(19) United States
(12) Patent Application Publication
(10) Pub. No.: US 2006/0084054 A1
(43) Pub. Date: Apr. 20, 2006

(54) Novel proteins and nucleic acids encoding same

(76) Inventors: John Alsobrook, Madison, CT (US); David Anderson, Plantsville, CT (US); Jason Baumgartner, New Haven, CT (US); Constance Berghs, New Haven, CT (US); Ferenc Boldog, North Haven, CT (US); Catherine Burgess, Wethersfield, CT (US); Stacie Casman, North Haven, CT (US); Elina Catterton, Milford, CT (US); Mohanraj Dhanabal, Branford, CT (US); Shlomit Edinger, New Haven, CT (US); Karen Ellerman, Branford, CT (US); Seth Ettenberg, New Haven, CT (US); Esha Gangolli, Acton, MA (US); Valerie Gerlach, Branford, CT (US); Linda Gorman, Branford, CT (US); William Grosse, Branford, CT (US); Erik Gunther, Branford, CT (US); Xiaojia (Sasha) Guo, Branford, CT (US); Vladimir Gusev, Madison, CT (US); John Herrmann, Guilford, CT (US); Weizhen Ji, Branford, CT (US); Ramesh Kekuda, Stamford, CT (US); Nikolai Khramtsov, Branford, CT (US); William LaRochelle, Madison, CT (US); Li Li, Branford, CT (US); Hongping Liang, Hamden, CT (US); Kenneth Low, New Haven, CT (US); John MacDougall, Hamden, CT (US); Timothy Maclachlan, Unionville, CT (US); Uriel Malyankar, North Branford, CT (US); Kelly McQueeney, Ansonia, CT (US); Amanda Mezick, Hamden, CT (US); Charles Miller, Guilford, CT (US); Isabelle Millet, Milford, CT (US); Muralidhara Padigaru, Branford, CT (US); Meera Patturajan, Branford, CT (US); John Peyman, New Haven, CT (US); Xiaozhong Qian, Branford, CT (US); Luca Rastelli, Guilford, CT (US); Daniel Rieger, Branford, CT (US); Mark Rothenberg, Clinton, CT (US); Suresh Shenoy, Branford, CT (US); Richard Shimkets, Guilford, CT (US); Glennda Smithson, Guilford, CT (US); Kimberly Spytek, Ellington, CT (US); David Stone, Guilford, CT (US); Sujatha Sukumaran, Branford, CT (US); Edward S. Szekeres JR., Walling Ford, CT (US); Corine Vernet, Chernex (CH); Edward Voss, Wallingford, CT (US); Adam R. Wolenc, New Haven, CT (US); Mei Zhong, Branford, CT (US); Haihong Zhong, Guilford, CT (US)

Correspondence Address: Jenell Lawson;Intellectual Property, CURAGEN CORPORATION, 555 Long Wharf Drive, New Haven, CT, 06551, US

(21) Appl. No.: 10/455,772

(22) Filed: Jun. 4, 2003

Related U.S. Application Data
(63) Continuation-in-part of application No. 09/669,360, filed on Sep. 26, 2000, now abandoned.
(60) Provisional application No. 60/385,615, filed on Jun. 4, 2002.
(60) Provisional application No. 60/402,268, filed on Aug. 9, 2002.
(60) Provisional application No. 60/387,606, filed on Jun. 11, 2002.
(60) Provisional application No. 60/386,357, filed on Jun. 6, 2002.
(60) Provisional application No. 60/385,755, filed on Jun. 4, 2002.
(60) Provisional application No. 60/386,355, filed on Jun. 6, 2002.
(60) Provisional application No. 60/385,490, filed on Jun. 4, 2002.
(60) Provisional application No. 60/420,718, filed on Oct. 23, 2002.
(60) Provisional application No. 60/386,447, filed on Jun. 6, 2002.
(60) Provisional application No. 60/386,465, filed on Jun. 6, 2002.
(60) Provisional application No. 60/420,627, filed on Oct. 23, 2002.
(60) Provisional application No. 60/386,459, filed on Jun. 6, 2002.
(60) Provisional application No. 60/410,505, filed on Sep. 13, 2002.
(60) Provisional application No. 60/420,852, filed on Oct. 24, 2002.
(60) Provisional application No. 60/386,796, filed on Jun. 7, 2002.
(60) Provisional application No. 60/387,078, filed on Jun. 7, 2002.
(60) Provisional application No. 60/387,083, filed on Jun. 7, 2002.
(60) Provisional application No. 60/387,081, filed on Jun. 7, 2002.
(60) Provisional application No. 60/386,041, filed on Jun. 5, 2002.
(60) Provisional application No. 60/386,701, filed on Jun. 7, 2002.
(60) Provisional application No. 60/387,610, filed on Jun. 11, 2002.
(60) Provisional application No. 60/387,540, filed on Jun. 10, 2002.
(60) Provisional application No. 60/387,429, filed on Jun. 10, 2002.
(60) Provisional application No. 60/410,085, filed on Sep. 12, 2002.
(60) Provisional application No. 60/389,120, filed on Jun. 14, 2002.
(60) Provisional application No. 60/386,931, filed on Jun. 7, 2002.
(60) Provisional application No. 60/387,866, filed on Jun. 10, 2002.
(60) Provisional application No. 60/387,859, filed on Jun. 11, 2002.
(60) Provisional application No. 60/387,659, filed on Jun. 11, 2002.
(60) Provisional application No. 60/387,934, filed on Jun. 12, 2002.
(60) Provisional application No. 60/387,696, filed on Jun. 11, 2002.
(60) Provisional application No. 60/390,006, filed on Jun. 19, 2002.
(60) Provisional application No. 60/389,604, filed on Jun. 18, 2002.
(60) Provisional application No. 60/387,668, filed on Jun. 11, 2002.
(60) Provisional application No. 60/386,864, filed on Jun. 6, 2002.
(60) Provisional application No. 60/401,628, filed on Aug. 6, 2002.
(60) Provisional application No. 60/406,182, filed on Aug. 26, 2002.
(60) Provisional application No. 60/412,955, filed on Sep. 23, 2002.
(60) Provisional application No. 60/415,195, filed on Sep. 30, 2002.
(60) Provisional application No. 60/422,750, filed on Oct. 31, 2002.
(60) Provisional application No. 60/390,144, filed on Jun. 19, 2002.
(60) Provisional application No. 60/388,022, filed on Jun. 12, 2002.
(60) Provisional application No. 60/402,822, filed on Aug. 12, 2002.
(60) Provisional application No. 60/388,096, filed on Jun. 12, 2002.
(60) Provisional application No. 60/389,123, filed on Jun. 13, 2002.
(60) Provisional application No. 60/390,209, filed on Jun. 19, 2002.
(60) Provisional application No. 60/388,479, filed on Jun. 12, 2002.
(60) Provisional application No. 60/403,458, filed on Aug. 13, 2002.
(60) Provisional application No. 60/389,884, filed on Jun. 18, 2002.
(60) Provisional application No. 60/389,146, filed on Jun. 14, 2002.
(60) Provisional application No. 60/387,960, filed on Jun. 12, 2002.
(60) Provisional application No. 60/388,432, filed on Jun. 12, 2002.
(60) Provisional application No. 60/403,617, filed on Aug. 15, 2002.
(60) Provisional application No. 60/423,095, filed on Nov. 1, 2002.
(60) Provisional application No. 60/423,748, filed on Nov. 5, 2002.
(60) Provisional application No. 60/391,726, filed on Jun. 25, 2002.
(60) Provisional application No. 60/403,732, filed on Aug. 15, 2002.
(60) Provisional application No. 60/389,742, filed on Jun. 17, 2002.
(60) Provisional application No. 60/156,217, filed on Sep. 27, 1999.

(51) Int. Cl. C12Q 1/68; C07H 21/04; C12N 9/00

(52) U.S. Cl. 435/6; 435/69.1; 435/183; 435/320.1; 435/325; 530/350; 536/23.2

(57) ABSTRACT

The present invention provides novel isolated polynucleotides and small molecule target polypeptides encoded by the polynucleotides. Antibodies that immunospecifically bind to a novel small molecule target polypeptide or any derivative, variant, mutant or fragment of that polypeptide, polynucleotide or antibody are disclosed, as are methods in which the small molecule target polypeptide, polynucleotide and antibody are utilized in the detection and treatment of a broad range of pathological states. More specifically, the present invention discloses methods of using recombinantly expressed and/or endogenously expressed proteins in various screening procedures for the purpose of identifying therapeutic antibodies and therapeutic small molecules associated with diseases. The invention further discloses therapeutic, diagnostic and research methods for diagnosis, treatment, and prevention of disorders involving any one of these novel human nucleic acids and proteins.

### RELATED APPLICATIONS

[0001] This application claims priority to U.S. Ser. No. 60/385,615, filed Jun. 4, 2002; U.S. Ser. No. 60/402,268, filed Aug. 9, 2002; U.S. Ser. No. 60/387,606, filed Jun. 11, 2002; U.S. Ser. No. 60/386,357, filed Jun. 6, 2002; U.S. Ser. No. 60/385,755, filed Jun. 4, 2002; U.S. Ser. No. 60/386,355, filed Jun. 6, 2002; U.S. Ser. No. 60/385,490, filed Jun. 4, 2002; U.S. Ser. No. 60/420,718, filed Oct. 23, 2002; U.S. Ser. No. 60/386,447, filed Jun. 6, 2002; U.S. Ser. No. 60/386,465, filed Jun. 6, 2002; U.S. Ser. No. 60/420,627, filed Oct. 23, 2002; U.S. Ser. No. 60/386,459, filed Jun. 6, 2002; U.S. Ser. No. 60/410,505, filed Sep. 13, 2002; U.S. Ser. No. 60/420,852, filed Oct. 24, 2002; U.S. Ser. No. 60/386,796, filed Jun. 7, 2002; U.S. Ser. No. 60/387,078, filed Jun. 7, 2002; U.S. Ser. No. 60/387,083, filed Jun. 7, 2002; U.S. Ser. No. 60/387,081, filed Jun. 7, 2002; U.S. Ser. No. 60/386,041, filed Jun. 5, 2002; U.S. Ser. No. 60/386,701, filed Jun. 7, 2002; U.S. Ser. No. 60/387,610, filed Jun. 11, 2002; U.S. Ser. No. 60/387,540, filed Jun. 10, 2002; U.S. Ser. No. 60/387,429, filed Jun. 10, 2002; U.S. Ser. No. 60/410,085, filed Sep. 12, 2002; U.S. Ser. No. 60/389,120, filed Jun. 14, 2002; U.S. Ser. No. 60/386,931, filed Jun. 7, 2002; U.S. Ser. No. 60/387,866, filed Jun. 10, 2002; U.S. Ser. No. 60/387,859, filed Jun. 11, 2002; U.S. Ser. No. 60/387,659, filed Jun. 11, 2002; U.S. Ser. No. 60/387,934, filed Jun. 12, 2002; U.S. Ser. No. 60/387,696, filed Jun. 11, 2002; U.S. Ser. No. 60/390,006, filed Jun. 19, 2002; U.S. Ser. No. 60/389,604, filed Jun. 18, 2002; U.S. Ser. No. 60/387,668, filed Jun. 11, 2002; U.S. Ser. No. 60/386,864, filed Jun. 6, 2002; U.S. Ser. No. 60/401,628, filed Aug. 6, 2002; U.S. Ser. No. 60/406,182, filed Aug. 26, 2002; U.S. Ser. No. 60/412,955, filed Sep. 23, 2002; U.S. Ser. No. 60/415,195, filed Sep. 30, 2002; U.S. Ser. No. 60/422,750, filed Oct. 31, 2002; U.S. Ser. No. 60/390,144, filed Jun. 19, 2002; U.S. Ser. No. 60/388,022, filed Jun. 12, 2002; U.S. Ser. No. 60/402,822, filed Aug. 12, 2002; U.S. Ser. No. 60/388,096, filed Jun. 12, 2002; U.S. Ser. No. 60/389,123, filed Jun. 13, 2002; U.S. Ser. No. 60/390,209, filed Jun. 19, 2002; U.S. Ser. No. 60/388,479, filed Jun. 12, 2002; U.S. Ser. No. 60/403,458, filed Aug. 13, 2002; U.S. Ser. No. 60/389,884, filed Jun. 18, 2002; U.S. Ser. No. 60/389,146, filed Jun. 14, 2002; U.S. Ser. No. 60/387,960, filed Jun. 12, 2002; U.S. Ser. No. 60/388,432, filed Jun. 12, 2002; U.S. Ser. No. 60/403,617, filed Aug. 15, 2002; U.S. Ser. No. 60/423,095, filed Nov. 1, 2002; U.S. Ser. No. 60/423,748, filed Nov. 5, 2002; U.S. Ser. No. 60/391,726, filed Jun. 25, 2002; U.S. Ser. No. 60/403,732, filed Aug. 15, 2002; and U.S. Ser. No. 60/389,742, filed Jun. 17, 2002, and is a continuation in part of U.S. Ser. No. 09/669,360, filed on Sep. 26, 2000, which claims priority to U.S. Ser. No. 60/156,217, filed on Sep. 27, 1999; a continuation in part of U.S. Ser. No. 09/795,271, filed on Feb. 27, 2001, which claims priority to U.S. Ser. No. 60/264,849, filed on Jan. 29, 2001; a continuation in part of U.S. Ser. No. 09/800,198, filed on Mar. 5, 2001, which claims priority to U.S. Ser. No. 60/196,018, filed on Apr. 7, 2000; a continuation in part of U.S. Ser. No. 09/844,861, filed on Apr. 27, 2001, which claims the benefit of U.S. Ser. No. 60/199,947, filed on Apr. 27, 2000; a continuation in part of U.S. Ser. No. 849,861, filed on May 4, 2001, which claims priority to U.S. Ser. No. 60/201,951, filed on May 5, 2000; a continuation in part of U.S. Ser. No. 10/038,854, filed on Dec. 31, 2001, which claims priority to U.S. Ser. No. 60/322,699, filed on Sep. 17, 2001 and U.S. Ser. No. 60/286,683, filed on Apr. 25, 2001; a continuation in part of U.S. Ser. No. 10/051,874, filed on Jan. 16, 2002, which claims priority to U.S. Ser. No. 60/262,454, filed on Jan. 18, 2001, U.S. Ser. No. 60/276,777, filed on Mar. 16, 2001, and U.S. Ser. No. 60/291,672, filed on May 17, 2001; a continuation in part of U.S. Ser. No. 10/092,900, filed on Mar. 7, 2002, which claims priority to U.S. Ser. No. 60/275,235, filed on Mar. 12, 2001; a continuation in part of U.S. Ser. No. 10/136,071, filed on May 1, 2002, which claims priority to U.S. Ser. No. 60/293,589 and U.S. Ser. No. 60/298,484, filed on Jun. 15, 2001; a continuation in part of U.S. Ser. No. 10/136,826, filed on May 1, 2002, which claims priority to U.S. Ser. No. 60/228,8063, filed on May 2, 2001; a continuation in part of U.S. Ser. No. 10/160,619, filed on Jun. 3, 2002, which claims priority to U.S. Ser. No. 60/295,661, filed on Jun. 4, 2001; a continuation in part of U.S. Ser. No. 09/783,429, filed on Feb. 14, 2001; a continuation in part of U.S. Ser. No. 09/800,321, filed on Mar. 5, 2001; a continuation in part of U.S. Ser. No. 09/832,522, filed on Apr. 11, 2001; a continuation in part of U.S. Ser. No. 09/995,514, filed on Nov. 28, 2001; a continuation in part of U.S. Ser. No. 10/023,634, filed on Dec. 17, 2001; a continuation in part of U.S. Ser. No. 10/028,248, filed on Dec. 19, 2001; a continuation in part of U.S. Ser. No. 10/038,854, filed on Dec. 31, 2001; a continuation in part of U.S. Ser. No. 10/055,877, filed on Jan. 22, 2002; a continuation in part of U.S. Ser. No. 10/092,900, filed on Mar. 7, 2002; a continuation in part of U.S. Ser. No. 10/114,153, filed on Apr. 2, 2002; a continuation in part of U.S. Ser. No. 10/115,479, filed on Apr. 2, 2002; and a continuation in part of U.S. Ser. No. 10/136,826, filed on May 1, 2002, each of which is incorporated by reference in its entirety.

### FIELD OF THE INVENTION

[0002] The present invention relates to novel polypeptides that are targets of small molecule drugs and that have properties related to stimulation of biochemical or physiological responses in a cell, a tissue, an organ or an organism. More particularly, the novel polypeptides are gene products of novel genes, or are specified biologically active fragments or derivatives thereof. Methods of use encompass diagnostic and prognostic assay procedures as well as methods of treating diverse pathological conditions.

### BACKGROUND

[0003] Eukaryotic cells are characterized by biochemical and physiological processes which under normal conditions are exquisitely balanced to achieve the preservation and propagation of the cells. When such cells are components of multicellular organisms such as vertebrates, or more particularly organisms such as mammals, the regulation of the biochemical and physiological processes involves intricate signaling pathways. Frequently, such signaling pathways involve extracellular signaling proteins, cellular receptors that bind the signaling proteins and signal transducing components located within the cells.

[0004] Signaling proteins may be classified as endocrine effectors, paracrine effectors or autocrine effectors. Endocrine effectors are signaling molecules secreted by a given organ into the circulatory system, which are then transported to a distant target organ or tissue. The target cells include the receptors for the endocrine effector, and when the endocrine effector binds, a signaling cascade is induced. Paracrine effectors involve secreting cells and receptor cells in close proximity to each other, for example two different classes of cells in the same tissue or organ. One class of cells secretes the paracrine effector, which then reaches the second class of cells, for example by diffusion through the extracellular fluid. The second class of cells contains the receptors for the paracrine effector; binding of the effector results in induction of the signaling cascade that elicits the corresponding biochemical or physiological effect. Autocrine effectors are highly analogous to paracrine effectors, except that the same cell type that secretes the autocrine effector also contains the receptor. Thus the autocrine effector binds to receptors on the same cell, or on identical neighboring cells. The binding process then elicits the characteristic biochemical or physiological effect.

[0005] Signaling processes may elicit a variety of effects on cells and tissues including by way of nonlimiting example induction of cell or tissue proliferation, suppression of growth or proliferation, induction of differentiation or maturation of a cell or tissue, and suppression of differentiation or maturation of a cell or tissue.

[0006] Many pathological conditions involve dysregulation of expression of important effector proteins. In certain classes of pathologies the dysregulation is manifested as diminished or suppressed level of synthesis and secretion of protein effectors. In other classes of pathologies the dysregulation is manifested as increased or up-regulated level of synthesis and secretion of protein effectors: In a clinical setting a subject may be suspected of suffering from a condition brought on by altered or mis-regulated levels of a protein effector of interest. Therefore there is a need to assay for the level of the protein effector of interest in a biological sample from such a subject, and to compare the level with that characteristic of a nonpathological condition. There also is a need to provide the protein effector as a product of manufacture. Administration of the effector to a subject in need thereof is useful in treatment of the pathological condition. Accordingly, there is a need for a method of treatment of a pathological condition brought on by a diminished or suppressed levels of the protein effector of interest. In addition, there is a need for a method of treatment of a pathological condition brought on by a increased or up-regulated levels of the protein effector of interest.

[0007] Small molecule targets have been implicated in various disease states or pathologies. These targets may be proteins, and particularly enzymatic proteins, which are acted upon by small molecule drugs for the purpose of altering target function and achieving a desired result. Cellular, animal and clinical studies can be performed to elucidate the genetic contribution to the etiology and pathogenesis of conditions in which small molecule targets are implicated in a variety of physiologic, pharmacologic or native states. These studies utilize the core technologies at CuraGen Corporation to look at differential gene expression, protein-protein interactions, large-scale sequencing of expressed genes and the association of genetic variations such as, but not limited to, single nucleotide polymorphisms (SNPs) or splice variants in and between biological samples from experimental and control groups. The goal of such studies is to identify potential avenues for therapeutic intervention in order to prevent, treat the consequences or cure the conditions.

[0008] In order to treat diseases, pathologies and other abnormal states or conditions in which a mammalian organism has been diagnosed as being, or as being at risk for becoming, other than in a normal state or condition, it is important to identify new therapeutic agents. Such a procedure includes at least the steps of identifying a target component within an affected tissue or organ, and identifying a candidate therapeutic agent that modulates the functional attributes of the target. The target component may be any biological macromolecule implicated in the disease or pathology. Commonly the target is a polypeptide or protein with specific functional attributes. Other classes of macromolecule may be a nucleic acid, a polysaccharide, a lipid such as a complex lipid or a glycolipid; in addition a target may be a sub-cellular structure or extra-cellular structure that is comprised of more than one of these classes of macromolecule. Once such a target has been identified, it may be employed in a screening assay in order to identify favorable candidate therapeutic agents from among a large population of substances or compounds.

[0009] In many cases the objective of such screening assays is to identify small molecule candidates; this is commonly approached by the use of combinatorial methodologies to develop the population of substances to be tested. The implementation of high throughput screening methodologies is advantageous when working with large, combinatorial libraries of compounds.

### SUMMARY OF THE INVENTION

[0010] The invention includes nucleic acid sequences and the novel polypeptides they encode. The novel nucleic acids and polypeptides are referred to herein as NOVX, or NOV1, NOV2, NOV3, etc., nucleic acids and polypeptides. These nucleic acids and polypeptides, as well as derivatives, homologs, analogs and fragments thereof, will hereinafter be collectively designated as “NOVX” nucleic acid, which represents the nucleotide sequence selected from the group consisting of SEQ ID NO: 2n−1, wherein n is an integer between 1 and 566, or polypeptide sequences, which represents the group consisting of SEQ ID NO: 2n, wherein n is an integer between 1 and 566.

[0011] In one aspect, the invention provides an isolated polypeptide comprising a mature form of a NOVX amino acid. One example is a variant of a mature form of a NOVX amino acid sequence, wherein any amino acid in the mature form is changed to a different amino acid, provided that no more than 15% of the amino acid residues in the sequence of the mature form are so changed. The amino acid can be, for example, a NOVX amino acid sequence or a variant of a NOVX amino acid sequence, wherein any amino acid specified in the chosen sequence is changed to a different amino acid, provided that no more than 15% of the amino acid residues in the sequence are so changed. The invention also includes fragments of any of these. In another aspect, the invention also includes an isolated nucleic acid that encodes a NOVX polypeptide, or a fragment, homolog, analog or derivative thereof.

[0012] Also included in the invention is a NOVX polypeptide that is a naturally occurring allelic variant of a NOVX sequence. In one embodiment, the allelic variant includes an amino acid sequence that is the translation of a nucleic acid sequence differing by a single nucleotide from a NOVX nucleic acid sequence. In another embodiment, the NOVX polypeptide is a variant polypeptide described therein, wherein any amino acid specified in the chosen sequence is changed to provide a conservative substitution. In one embodiment, the invention discloses a method for determining the presence or amount of the NOVX polypeptide in a sample. The method involves the steps of: providing a sample; introducing the sample to an antibody that binds immunospecifically to the polypeptide; and determining the presence or amount of antibody bound to the NOVX polypeptide, thereby determining the presence or amount of the NOVX polypeptide in the sample. In another embodiment, the invention provides a method for determining the presence of or predisposition to a disease associated with altered levels of a NOVX polypeptide in a mammalian subject. This method involves the steps of: measuring the level of expression of the polypeptide in a sample from the first mammalian subject; and comparing the amount of the polypeptide in the sample of the first step to the amount of the polypeptide present in a control sample from a second mammalian subject known not to have, or not to be predisposed to, the disease, wherein an alteration in the expression level of the polypeptide in the first subject as compared to the control sample indicates the presence of or predisposition to the disease.

[0013] In a further embodiment, the invention includes a method of identifying an agent that binds to a NOVX polypeptide. This method involves the steps of: introducing the polypeptide to the agent; and determining whether the agent binds to the polypeptide. In various embodiments, the agent is a cellular receptor or a downstream effector.

[0014] In another aspect, the invention provides a method for identifying a potential therapeutic agent for use in treatment of a pathology, wherein the pathology is related to aberrant expression or aberrant physiological interactions of a NOVX polypeptide. The method involves the steps of: providing a cell expressing the NOVX polypeptide and having a property or function ascribable to the polypeptide; contacting the cell with a composition comprising a candidate substance; and determining whether the substance alters the property or function ascribable to the polypeptide; whereby, if an alteration observed in the presence of the substance is not observed when the cell is contacted with a composition devoid of the substance, the substance is identified as a potential therapeutic agent. In another aspect, the invention describes a method for screening for a modulator of activity or of latency or predisposition to a pathology associated with the NOVX polypeptide. This method involves the following steps: administering a test compound to a test animal at increased risk for a pathology associated with the NOVX polypeptide, wherein the test animal recombinantly expresses the NOVX polypeptide. This method involves the steps of measuring the activity of the NOVX polypeptide in the test animal after administering the compound of step; and comparing the activity of the protein in the test animal with the activity of the NOVX polypeptide in a control animal not administered the polypeptide, wherein a change in the activity of the NOVX polypeptide in the test animal relative to the control animal indicates the test compound is a modulator of latency of, or predisposition to, a pathology associated with the NOVX polypeptide. In one embodiment, the test animal is a recombinant test animal that expresses a test protein transgene or expresses the transgene under the control of a promoter at an increased level relative to a wild-type test animal, and wherein the promoter is not the native gene promoter of the transgene. In another aspect, the invention includes a method for modulating the activity of the NOVX polypeptide, the method comprising introducing a cell sample expressing the NOVX polypeptide with a compound that binds to the polypeptide in an amount sufficient to modulate the activity of the polypeptide.

[0015] The invention also includes an isolated nucleic acid that encodes a NOVX polypeptide, or a fragment, homolog, analog or derivative thereof. In a preferred embodiment, the nucleic acid molecule comprises the nucleotide sequence of a naturally occurring allelic nucleic acid variant. In another embodiment, the nucleic acid encodes a variant polypeptide, wherein the variant polypeptide has the polypeptide sequence of a naturally occurring polypeptide variant. In another embodiment, the nucleic acid molecule differs by a single nucleotide from a NOVX nucleic acid sequence. In one embodiment, the NOVX nucleic acid molecule hybridizes under stringent conditions to the nucleotide sequence selected from the group consisting of SEQ ID NO: 2n−1, wherein n is an integer between 1 and 566, or a complement of the nucleotide sequence. In another aspect, the invention provides a vector or a cell expressing a NOVX nucleotide sequence.

[0016] In one embodiment, the invention discloses a method for modulating the activity of a NOVX polypeptide. The method includes the steps of: introducing a cell sample expressing the NOVX polypeptide with a compound that binds to the polypeptide in an amount sufficient to modulate the activity of the polypeptide. In another embodiment, the invention includes an isolated NOVX nucleic acid molecule comprising a nucleic acid sequence encoding a polypeptide comprising a NOVX amino acid sequence or a variant of a mature form of the NOVX amino acid sequence, wherein any amino acid in the mature form of the chosen sequence is changed to a different amino acid, provided that no more than 15% of the amino acid residues in the sequence of the mature form are so changed. In another embodiment, the invention includes an amino acid sequence that is a variant of the NOVX amino acid sequence, in which any amino acid specified in the chosen sequence is changed to a different amino acid, provided that no more than 15% of the amino acid residues in the sequence are so changed.

[0017] In one embodiment, the invention discloses a NOVX nucleic acid fragment encoding at least a portion of a NOVX polypeptide or any variant of the polypeptide, wherein any amino acid of the chosen sequence is changed to a different amino acid, provided that no more than 10% of the amino acid residues in the sequence are so changed. In another embodiment, the invention includes the complement of any of the NOVX nucleic acid molecules or a naturally occurring allelic nucleic acid variant. In another embodiment, the invention discloses a NOVX nucleic acid molecule that encodes a variant polypeptide, wherein the variant polypeptide has the polypeptide sequence of a naturally occurring polypeptide variant. In another embodiment, the invention discloses a NOVX nucleic acid, wherein the nucleic acid molecule differs by a single nucleotide from a NOVX nucleic acid sequence.

[0018] In another aspect, the invention includes a NOVX nucleic acid, wherein one or more nucleotides in the NOVX nucleotide sequence is changed to a different nucleotide provided that no more than 15% of the nucleotides are so changed. In one embodiment, the invention discloses a nucleic acid fragment of the NOVX nucleotide sequence and a nucleic acid fragment wherein one or more nucleotides in the NOVX nucleotide sequence is changed from that selected from the group consisting of the chosen sequence to a different nucleotide provided that no more than 15% of the nucleotides are so changed. In another embodiment, the invention includes a nucleic acid molecule wherein the nucleic acid molecule hybridizes under stringent conditions to a NOVX nucleotide sequence or a complement of the NOVX nucleotide sequence. In one embodiment, the invention includes a nucleic acid molecule, wherein the sequence is changed such that no more than 15% of the nucleotides in the coding sequence differ from the NOVX nucleotide sequence or a fragment thereof.

[0019] In a further aspect, the invention includes a method for determining the presence or amount of the NOVX nucleic acid in a sample. The method involves the steps of: providing the sample; introducing the sample to a probe that binds to the nucleic acid molecule; and determining the presence or amount of the probe bound to the NOVX nucleic acid molecule, thereby determining the presence or amount of the NOVX nucleic acid molecule in the sample. In one embodiment, the presence or amount of the nucleic acid molecule is used as a marker for cell or tissue type.

[0020] In another aspect, the invention discloses a method for determining the presence of or predisposition to a disease associated with altered levels of the NOVX nucleic acid molecule of in a first mammalian subject. The method involves the steps of: measuring the amount of NOVX nucleic acid in a sample from the first mammalian subject; and comparing the amount of the nucleic acid in the sample of step (a) to the amount of NOVX nucleic acid present in a control sample from a second mammalian subject known not to have or not be predisposed to, the disease; wherein an alteration in the level of the nucleic acid in the first subject as compared to the control sample indicates the presence of or predisposition to the disease.

[0021] Unless otherwise defined, all technical and scientific terms used herein have the same meaning as commonly understood by one of ordinary skill in the art to which this invention belongs. Although methods and materials similar or equivalent to those described herein can be used in the practice or testing of the present invention, suitable methods and materials are described below. All publications, patent applications, patents, and other references mentioned herein are incorporated by reference in their entirety. In the case of conflict, the present specification, including definitions, will control. In addition, the materials, methods, and examples are illustrative only and not intended to be limiting.

[0022] Other features and advantages of the invention will be apparent from the following detailed description and claims.

### BRIEF DESCRIPTION OF THE FIGURES

[0023] FIG. D1: Alignment of CG55806-04 (SEQ ID NO:748), CG55806-02 (SEQ ID NO:752), and 1PFX (SEQ ID NO: 1476).

[0024] FIG. D2: Structure of porcine factor IXa (1PFX).

[0025] FIG. E1: Data showing effect on cell growth by knockdown of CG59693-01.

[0026] FIG. E2: Data showing effect on cell growth by knockdown of CG59693-01 with subsequent treatment with Paclitaxel (48 hr).

[0027] FIG. E3: Data showing effect on cell viability by knockdown of CG59693-01 with subsequent treatment with Paclitaxel (48 hr).

[0028] FIG. E4: Data showing effect on cell growth by knockdown of CG59693-01 with subsequent treatment with Paclitaxel (72 hr).

[0029] FIG. E5: Data showing effect on cell viability by knockdown of CG59693-01 with subsequent treatment with Paclitaxel (72 hr).

[0030] FIG. E6: Data showing effect on cell growth by knockdown of CG59693-01 by AS4 antisense oligonucleotide followed by subsequent treatment with Gemcitabine.

[0031] FIG. E7: Data showing effect on cell growth by knockdown of CG59693-01 by AS4 antisense oligonucleotide followed by subsequent treatment with Daunorubicin.

[0032] FIG. E8: Data showing effect on cell growth by knockdown of CG59693-01 by AS4 antisense oligonucleotide followed by subsequent treatment with Etoposide.

[0033] FIG. E9: Data showing effect on cell growth by knockdown of CG59693-01 by AS4 antisense oligonucleotide followed by subsequent treatment with Cisplatin.

### DETAILED DESCRIPTION OF THE INVENTION

[0034] The present invention provides novel nucleotides and polypeptides encoded thereby. Included in the invention are the novel nucleic acid sequences, their encoded polypeptides, antibodies, and other related compounds. The sequences are collectively referred to herein as “NOVX nucleic acids” or “NOVX polynucleotides” and the corresponding encoded polypeptides are referred to as “NOVX polypeptides” or “NOVX proteins.” Unless indicated otherwise, “NOVX” is meant to refer to any of the novel sequences disclosed herein. Table A provides a summary of the NOVX nucleic acids and their encoded polypeptides.

TABLE A
Sequences and Corresponding SEQ ID Numbers

| | | SEQ ID | SEQ | |
|---|---|---|---|---|
| | | NO | ID NO | |
| NOVX | Internal | (nucleic | (amino | |
| Assignment | Identification | acid) | acid) | Homology |
| NOV1a | CG101340-01 | 1 | 2 | Putative G protein-coupled receptor |
| | | | | 92 (Putative G-protein coupled |
| | | | | receptor) - Homo sapiens |
| NOV1b | SNP13382465 | 3 | 4 | Putative G protein-coupled receptor |
| | | | | 92 (Putative G-protein coupled |
| | | | | receptor) - Homo sapiens |
| NOV2a | CG101396-01 | 5 | 6 | Glutamate receptor delta-1 subunit |
| | | | | precursor - Rattus norvegicus |
| NOV2b | 267253224 | 7 | 8 | Glutamate receptor delta-1 subunit |
| | | | | precursor - Rattus norvegicus |
| NOV2c | 315490179 | 9 | 10 | Glutamate receptor delta-1 subunit |
| | | | | precursor - Rattus norvegicus |
| NOV2d | CG101396-02 | 11 | 12 | Glutamate receptor delta-1 subunit |
| | | | | precursor - Rattus norvegicus |
| NOV2e | SNP13379211 | 13 | 14 | Glutamate receptor delta-1 subunit |
| | | | | precursor - Rattus norvegicus |
| NOV3a | CG102348-01 | 15 | 16 | Complement Clr-like proteinase - |
| | | | | Homo sapiens |
| NOV3b | 199842645 | 17 | 18 | Complement Clr-like proteinase - |
| | | | | Homo sapiens |
| NOV3c | 198306343 | 19 | 20 | Complement Clr-like proteinase - |
| | | | | Homo sapiens |
| NOV3d | 199842665 | 21 | 22 | Complement Clr-like proteinase - |
| | | | | Homo sapiens |
| NOV3e | 199842661 | 23 | 24 | Complement Clr-like proteinase - |
| | | | | Homo sapiens |
| NOV3f | 199597024 | 25 | 26 | Complement Clr-like proteinase - |
| | | | | Homo sapiens |
| NOV3g | 199842653 | 27 | 28 | Complement Clr-like proteinase - |
| | | | | Homo sapiens |
| NOV3h | 199652830 | 29 | 30 | Complement Clr-like proteinase - |
| | | | | Homo sapiens |
| NOV3i | 199652835 | 31 | 32 | Complement Clr-like proteinase - |
| | | | | Homo sapiens |
| NOV3j | 198306308 | 33 | 34 | Complement Clr-like proteinase - |
| | | | | Homo sapiens |
| NOV3k | CG102348-02 | 35 | 36 | Complement Clr-like proteinase - |
| | | | | Homo sapiens |
| NOV3l | CG102348-03 | 37 | 38 | Complement Clr-like proteinase - |
| | | | | Homo sapiens |
| NOV3m | CG102348-04 | 39 | 40 | Complement Clr-like proteinase - |
| | | | | Homo sapiens |
| NOV3n | CG102348-05 | 41 | 42 | Complement Clr-like proteinase - |
| | | | | Homo sapiens |
| NOV3o | CG102348-06 | 43 | 44 | Complement Clr-like proteinase - |
| | | | | Homo sapiens |
| NOV3p | SNP13376570 | 45 | 46 | Complement Clr-like proteinase - |
| | | | | Homo sapiens |
| NOV3q | SNP13376568 | 47 | 48 | Complement Clr-like proteinase - |
| | | | | Homo sapiens |
| NOV3r | SNP13382463 | 49 | 50 | Complement Clr-like proteinase - |
| | | | | Homo sapiens |
| NOV3s | SNP13374245 | 51 | 52 | Complement Clr-like proteinase - |
| | | | | Homo sapiens |
| NOV4a | CG125860-02 | 53 | 54 | Transmembrane protease, serine 5 |
| | | | | (EC 3.4.21.—) (Spinesin) - Homo |
| | | | | sapiens |
| NOV4b | CG125860-01 | 55 | 56 | Transmembrane protease, serine 5 |
| | | | | (EC 3.4.21.—) (Spinesin) - Homo |
| | | | | sapiens |
| NOV4c | SNP13376012 | 57 | 58 | Transmembrane protease, serine 5 |
| | | | | (EC 3.4.21.—) (Spinesin) - Homo |
| | | | | sapiens |
| NOV4d | SNP13376014 | 59 | 60 | Transmembrane protease, serine 5 |
| | | | | (EC 3.4.21.—) (Spinesin) - Homo |
| | | | | sapiens |
| NOV4e | SNP13376015 | 61 | 62 | Transmembrane protease, serine 5 |
| | | | | (EC 3.4.21.—) (Spinesin) - Homo |
| | | | | sapiens |
| NOV4f | SNP13376016 | 63 | 64 | Transmembrane protease, serine 5 |
| | | | | (EC 3.4.21.—) (Spinesin) - Homo |
| | | | | sapiens |
| NOV4g | SNP13376017 | 65 | 66 | Transmembrane protease, serine 5 |
| | | | | (EC 3.4.21.—) (Spinesin) - Homo |
| | | | | sapiens |
| NOV4h | SNP13376011 | 67 | 68 | Transmembrane protease, serine 5 |
| | | | | (EC 3.4.21.—) (Spinesin) - Homo |
| | | | | sapiens |
| NOV4i | SNP13376018 | 69 | 70 | Transmembrane protease, serine 5 |
| | | | | (EC 3.4.21.—) (Spinesin) - Homo |
| | | | | sapiens |
| NOV4j | SNP13382467 | 71 | 72 | Transmembrane protease, serine 5 |
| | | | | (EC 3.4.21.—) (Spinesin) - Homo |
| | | | | sapiens |
| NOV4k | SNP13382466 | 73 | 74 | Transmembrane protease, serine 5 |
| | | | | (EC 3.4.21.—) (Spinesin) - Homo |
| | | | | sapiens |
| NOV5a | CG155759-02 | 75 | 76 | Seven transmembrane helix receptor - |
| | | | | Homo sapiens |
| NOV5b | CG155759-01 | 77 | 78 | Seven transmembrane helix receptor - |
| | | | | Homo sapiens |
| NOV6a | CG187667-01 | 79 | 80 | LOC133308 protein - Homo sapiens |
| NOV6b | CG187667-02 | 81 | 82 | LOC133308 protein - Homo sapiens |
| NOV7a | CG187676-01 | 83 | 84 | Sentrin-specific protease 5 (EC |
| | | | | 3.4.22.—) (Sentrin/SUMO-specific |
| | | | | protease SENP5) (Protease FKSG45) - |
| | | | | Homo sapiens |
| NOV8a | CG50235-04 | 85 | 86 | Tolloid-like 2 protein - Homo sapiens |
| NOV8b | CG50235-01 | 87 | 88 | Tolloid-like 2 protein - Homo sapiens |
| NOV8c | CG50235-02 | 89 | 90 | Tolloid-like 2 protein - Homo sapiens |
| NOV8d | CG50235-03 | 91 | 92 | Tolloid-like 2 protein - Homo sapiens |
| NOV8e | SNP13377383 | 93 | 94 | Tolloid-like 2 protein - Homo sapiens |
| NOV8f | SNP13377384 | 95 | 96 | Tolloid-like 2 protein - Homo sapiens |
| NOV8g | SNP13377385 | 97 | 98 | Tolloid-like 2 protein - Homo sapiens |
| NOV8h | SNP13377386 | 99 | 100 | Tolloid-like 2 protein - Homo sapiens |
| NOV8i | SNP13377387 | 101 | 102 | Tolloid-like 2 protein - Homo sapiens |
| NOV9a | CG50249-01 | 103 | 104 | Voltage gated potassium channel |
| | | | | Kv3.2b (Potassium voltage-gated |
| | | | | potassium channel subfamily C |
| | | | | member 2) - Homo sapiens |
| NOV9b | 207885588 | 105 | 106 | Voltage gated potassium channel |
| | | | | Kv3.2b (Potassium voltage-gated |
| | | | | potassium channel subfamily C |
| | | | | member 2) - Homo sapiens |
| NOV9c | CG50249-02 | 107 | 108 | Voltage gated potassium channel |
| | | | | Kv3.2b (Potassium voltage-gated |
| | | | | potassium channel subfamily C |
| | | | | member 2) - Homo sapiens |
| NOV9d | CG50249-03 | 109 | 110 | Voltage gated potassium channel |
| | | | | Kv3.2b (Potassium voltage-gated |
| | | | | potassium channel subfamily C |
| | | | | member 2) - Homo sapiens |
| NOV9e | CG50249-04 | 111 | 112 | Voltage gated potassium channel |
| | | | | Kv3.2b (Potassium voltage-gated |
| | | | | potassium channel subfamily C |
| | | | | member 2) - Homo sapiens |
| NOV10a | CG50307-03 | 113 | 114 | Steroid dehydrogenase-like protein |
| NOV10b | 275624102 | 115 | 116 | Steroid dehydrogenase-like protein |
| NOV10c | CG50307-01 | 117 | 118 | Steroid dehydrogenase-like protein |
| NOV10d | CG50307-02 | 119 | 120 | Steroid dehydrogenase-like protein |
| NOV10e | SNP13375811 | 121 | 122 | Steroid dehydrogenase-like protein |
| NOV11a | CG50315-01 | 123 | 124 | Seven transmembrane helix receptor - |
| | | | | Homo sapiens |
| NOV11b | 207580272 | 125 | 126 | Seven transmembrane helix receptor - |
| | | | | Homo sapiens |
| NOV11c | 314411778 | 127 | 128 | Seven transmembrane helix receptor - |
| | | | | Homo sapiens |
| NOV11d | CG50315-02 | 129 | 130 | Seven transmembrane helix receptor - |
| | | | | Homo sapiens |
| NOV11e | CG50315-03 | 131 | 132 | Seven transmembrane helix receptor - |
| | | | | Homo sapiens |
| NOV12a | CG50341-01 | 133 | 134 | Seven transmembrane helix receptor - |
| | | | | Homo sapiens |
| NOV12b | 169475616 | 135 | 136 | Seven transmembrane helix receptor - |
| | | | | Homo sapiens |
| NOV12c | CG50341-02 | 137 | 138 | Seven transmembrane helix receptor - |
| | | | | Homo sapiens |
| NOV12d | CG50341-03 | 139 | 140 | Seven transmembrane helix receptor - |
| | | | | Homo sapiens |
| NOV12e | CG50341-04 | 141 | 142 | Seven transmembrane helix receptor - |
| | | | | Homo sapiens |
| NOV13a | CG50365-01 | 143 | 144 | Carbonic anhydrase XIII (EC 4.2.1.1) |
| | | | | (Carbonate dehydratase XIII) (CA- |
| | | | | XIII) - Homo sapiens |
| NOV13b | 278019595 | 145 | 146 | Carbonic anhydrase XIII (EC 4.2.1.1) |
| | | | | (Carbonate dehydratase XIII) (CA- |
| | | | | XIII) - Homo sapiens |
| NOV13c | CG50365-02 | 147 | 148 | Carbonic anhydrase XIII (EC 4.2.1.1) |
| | | | | (Carbonate dehydratase XIII) (CA- |
| | | | | XIII) - Homo sapiens |
| NOV14a | CG50367-01 | 149 | 150 | ADAM 33 precursor (EC 3.4.24.—) (A |
| | | | | disintegrin and metalloproteinase |
| | | | | domain 33) - Homo sapiens |
| NOV14b | CG50367-05 | 151 | 152 | ADAM 33 precursor (EC 3.4.24.—) (A |
| | | | | disintegrin and metalloproteinase |
| | | | | domain 33) - Homo sapiens |
| NOV14c | CG50367-06 | 153 | 154 | ADAM 33 precursor (EC 3.4.24.—) (A |
| | | | | disintegrin and metalloproteinase |
| | | | | domain 33) - Homo sapiens |
| NOV14d | CG50367-07 | 155 | 156 | ADAM 33 precursor (EC 3.4.24.—) (A |
| | | | | disintegrin and metalloproteinase |
| | | | | domain 33) - Homo sapiens |
| NOV14e | 249356906 | 157 | 158 | ADAM 33 precursor (EC 3.4.24.—) (A |
| | | | | disintegrin and metalloproteinase |
| | | | | domain 33) - Homo sapiens |
| NOV14f | CG50367-02 | 159 | 160 | ADAM 33 precursor (EC 3.4.24.—) (A |
| | | | | disintegrin and metalloproteinase |
| | | | | domain 33) - Homo sapiens |
| NOV14g | CG50367-03 | 161 | 162 | ADAM 33 precursor (EC 3.4.24.—) (A |
| | | | | disintegrin and metalloproteinase |
| | | | | domain 33) - Homo sapiens |
| NOV14h | CG50367-04 | 163 | 164 | ADAM 33 precursor (EC 3.4.24.—) (A |
| | | | | disintegrin and metalloproteinase |
| | | | | domain 33) - Homo sapiens |
| NOV15a | CG50718-02 | 165 | 166 | Glomerular mesangial cell receptor |
| | | | | protein-tyrosine phosphatase |
| | | | | precursor - Rattus norvegicus |
| NOV15b | CG50718-06 | 167 | 168 | Glomerular mesangial cell receptor |
| | | | | protein-tyrosine phosphatase |
| | | | | precursor - Rattus norvegicus |
| NOV15c | 258979883 | 169 | 170 | Glomerular mesangial cell receptor |
| | | | | protein-tyrosine phosphatase |
| | | | | precursor - Rattus norvegicus |
| NOV15d | CG50718-01 | 171 | 172 | Glomerular mesangial cell receptor |
| | | | | protein-tyrosine phosphatase |
| | | | | precursor - Rattus norvegicus |
| NOV15e | CG50718-03 | 173 | 174 | Glomerular mesangial cell receptor |
| | | | | protein-tyrosine phosphatase |
| | | | | precursor - Rattus norvegicus |
| NOV15f | CG50718-04 | 175 | 176 | Glomerular mesangial cell receptor |
| | | | | protein-tyrosine phosphatase |
| | | | | precursor - Rattus norvegicus |
| NOV15g | CG50718-05 | 177 | 178 | Glomerular mesangial cell receptor |
| | | | | protein-tyrosine phosphatase |
| | | | | precursor - Rattus norvegicus |
| NOV16a | CG50934-03 | 179 | 180 | Mast cell protease-11 - Mus musculus |
| NOV16b | CG50934-01 | 181 | 182 | Mast cell protease-11 - Mus musculus |
| NOV16c | CG50934-02 | 183 | 184 | Mast cell protease-11 - Mus musculus |
| NOV16d | SNP13381559 | 185 | 186 | Mast cell protease-11 - Mus musculus |
| NOV16e | SNP13381558 | 187 | 188 | Mast cell protease-11 - Mus musculus |
| NOV16f | SNP13376399 | 189 | 190 | Mast cell protease-11 - Mus musculus |
| NOV16g | SNP13378301 | 191 | 192 | Mast cell protease-11 - Mus musculus |
| NOV16h | SNP13378300 | 193 | 194 | Mast cell protease-11 - Mus musculus |
| NOV17a | CG51213-04 | 195 | 196 | ADAMTS-10 precursor (EC 3.4.24.—) |
| | | | | (A disintegrin and metalloproteinase |
| | | | | with thrombospondin motifs 10) |
| | | | | (ADAM-TS 10) (ADAM-TS10) - |
| | | | | Homo sapiens (Human), 1077 aa |
| NOV17b | CG51213-01 | 197 | 198 | ADAMTS-10 precursor (EC 3.4.24.—) |
| | | | | (A disintegrin and metalloproteinase |
| | | | | with thrombospondin motifs 10) |
| | | | | (ADAM-TS 10) (ADAM-TS10) - |
| | | | | Homo sapiens (Human), 1077 aa |
| NOV17c | 306345264 | 199 | 200 | ADAMTS-10 precursor (EC 3.4.24.—) |
| | | | | (A disintegrin and metalloproteinase |
| | | | | with thrombospondin motifs 10) |
| | | | | (ADAM-TS 10) (ADAM-TS10) - |
| | | | | Homo sapiens (Human), 1077 aa |
| NOV17d | CG51213-02 | 201 | 202 | ADAMTS-10 precursor (EC 3.4.24.—) |
| | | | | (A disintegrin and metalloproteinase |
| | | | | with thrombospondin motifs 10) |
| | | | | (ADAM-TS 10) (ADAM-TS10) - |
| | | | | Homo sapiens (Human), 1077 aa |
| NOV17e | CG51213-03 | 203 | 204 | ADAMTS-10 precursor (EC 3.4.24.—) |
| | | | | (A disintegrin and metalloproteinase |
| | | | | with thrombospondin motifs 10) |
| | | | | (ADAM-TS 10) (ADAM-TS10) - |
| | | | | Homo sapiens (Human), 1077 aa |
| NOV17f | CG51213-05 | 205 | 206 | ADAMTS-10 precursor (EG 3.4.24.—) |
| | | | | (A disintegrin and metalloproteinase |
| | | | | with thrombospondin motifs 10) |
| | | | | (ADAM-TS 10) (ADAM-TS10) - |
| | | | | Homo sapiens (Human), 1077 aa |
| NOV17g | CG51213-06 | 207 | 208 | ADAMTS-10 precursor (EC 3.4.24.—) |
| | | | | (A disintegrin and metalloproteinase |
| | | | | with thrombospondin motifs 10) |
| | | | | (ADAM-TS 10) (ADAM-TS10) - |
| | | | | Homo sapiens (Human), 1077 aa |
| NOV17h | CG51213-07 | 209 | 210 | ADAMTS-10 precursor (EC 3.4.24.—) |
| | | | | (A disintegrin and metalloproteinase |
| | | | | with thrombospondin motifs 10) |
| | | | | (ADAM-TS 10) (ADAM-TS10) - |
| | | | | Homo sapiens (Human), 1077 aa |
| NOV18a | CG51448-05 | 211 | 212 | Human cardiac myosin light chain |
| | | | | kinase (cMLCK) mutant, G89D |
| NOV18b | CG51448-01 | 213 | 214 | Human cardiac myosin light chain |
| | | | | kinase (cMLCK) mutant, G89D |
| NOV18c | 274051198 | 215 | 216 | Human cardiac myosin light chain |
| | | | | kinase (cMLCK) mutant, G89D |
| NOV18d | 274051170 | 217 | 218 | Human cardiac myosin light chain |
| | | | | kinase (cMLCK) mutant, G89D |
| NOV18e | CG51448-02 | 219 | 220 | Human cardiac myosin light chain |
| | | | | kinase (cMLCK) mutant, G89D |
| NOV18f | CG51448-03 | 221 | 222 | Human cardiac myosin light chain |
| | | | | kinase (cMLCK) mutant, G89D |
| NOV18g | CG51448-04 | 223 | 224 | Human cardiac myosin light chain |
| | | | | kinase (cMLCK) mutant, G89D |
| NOV18h | SNP13375535 | 225 | 226 | Human cardiac myosin light chain |
| | | | | kinase (cMLCK) mutant, G89D |
| NOV18i | SNP13375536 | 227 | 228 | Human cardiac myosin light chain |
| | | | | kinase (cMLCK) mutant, G89D |
| NOV18j | SNP13375537 | 229 | 230 | Human cardiac myosin light chain |
| | | | | kinase (cMLCK) mutant, G89D |
| NOV18k | SNP13375538 | 231 | 232 | Human cardiac myosin light chain |
| | | | | kinase (cMLCK) mutant, G89D |
| NOV18l | SNP13375539 | 233 | 234 | Human cardiac myosin light chain |
| | | | | kinase (cMLCK) mutant, G89D |
| NOV18m | SNP13375540 | 235 | 236 | Human cardiac myosin light chain |
| | | | | kinase (cMLCK) mutant, G89D |
| NOV18n | SNP13375541 | 237 | 238 | Human cardiac myosin light chain |
| | | | | kinase (cMLCK) mutant, G89D |
| NOV18o | SNP13375542 | 239 | 240 | Human cardiac myosin light chain |
| | | | | kinase (cMLCK) mutant, G89D |
| NOV18p | SNP13375543 | 241 | 242 | Human cardiac myosin light chain |
| | | | | kinase (cMLCK) mutant, G89D |
| NOV19a | CG51752-02 | 243 | 244 | Human FCTR6b polypeptide |
| | | | | sequence |
| NOV19b | CG51752-03 | 245 | 246 | Human FCTR6b polypeptide |
| | | | | sequence |
| NOV19c | 175069825 | 247 | 248 | Human FCTR6b polypeptide |
| | | | | sequence |
| NOV19d | 175069842 | 249 | 250 | Human FCTR6b polypeptide |
| | | | | sequence |
| NOV19e | 258076315 | 251 | 252 | Human FCTR6b polypeptide |
| | | | | sequence |
| NOV19f | 258076366 | 253 | 254 | Human FCTR6b polypeptide |
| | | | | sequence |
| NOV19g | CG51752-04 | 255 | 256 | Human FCTR6b polypeptide |
| | | | | sequence |
| NOV19h | 191887409 | 257 | 258 | Human FCTR6b polypeptide |
| | | | | sequence |
| NOV19i | CG51752-01 | 259 | 260 | Human FCTR6b polypeptide |
| | | | | sequence |
| NOV19j | CG51752-05 | 261 | 262 | Human FCTR6b polypeptide |
| | | | | sequence |
| NOV19k | CG51752-06 | 263 | 264 | Human FCTR6b polypeptide |
| | | | | sequence |
| NOV19l | CG51752-07 | 265 | 266 | Human FCTR6b polypeptide |
| | | | | sequence |
| NOV19m | SNP13374584 | 267 | 268 | Human FCTR6b polypeptide |
| | | | | sequence |
| NOV19n | SNP13374585 | 269 | 270 | Human FCTR6b polypeptide |
| | | | | sequence |
| NOV20a | CG51914-02 | 271 | 272 | Human kinase polypeptide (PKIN-16) |
| NOV20b | CG51914-01 | 273 | 274 | Human kinase polypeptide (PKIN-16) |
| NOV21a | CG51965-01 | 275 | 276 | Cadherin EGF LAG seven-pass G- |
| | | | | type receptor 1 precursor (Flamingo |
| | | | | homolog 2) (hFmi2) - Homo sapiens |
| NOV21b | 258076370 | 277 | 278 | Cadherin EGF LAG seven-pass G- |
| | | | | type receptor 1 precursor (Flamingo |
| | | | | homolog 2) (hFmi2) - Homo sapiens |
| NOV21c | 317619862 | 279 | 280 | Cadherin EGF LAG seven-pass G- |
| | | | | type receptor 1 precursor (Flamingo |
| | | | | homolog 2) (hFmi2) - Homo sapiens |
| NOV21d | 317460050 | 281 | 282 | Cadherin EGF LAG seven-pass G- |
| | | | | type receptor 1 precursor (Flamingo |
| | | | | homolog 2) (hFmi2) - Homo sapiens |
| NOV21e | SNP13382483 | 283 | 284 | Cadherin EGF LAG seven-pass G- |
| | | | | type receptor 1 precursor (Flamingo |
| | | | | homolog 2) (hFmi2) - Homo sapiens |
| NOV21f | SNP13382484 | 285 | 286 | Cadherin EGF LAG seven-pass G- |
| | | | | type receptor 1 precursor (Flamingo |
| | | | | homolog 2) (hFmi2) - Homo sapiens |
| NOV21g | SNP13382485 | 287 | 288 | Cadherin EGF LAG seven-pass G- |
| | | | | type receptor 1 precursor (Flamingo |
| | | | | homolog 2) (hFmi2) - Homo sapiens |
| NOV22a | CG51983-05 | 289 | 290 | ADAM 7 precursor (A disintegrin and |
| | | | | metalloproteinase domain 7) (Sperm |
| | | | | maturation-related glycoprotein GP- |
| | | | | 83) - Homo sapiens |
| NOV22b | CG51983-01 | 291 | 292 | ADAM 7 precursor (A disintegrin and |
| | | | | metalloproteinase domain 7) (Sperm |
| | | | | maturation-related glycoprotein GP- |
| | | | | 83) - Homo sapiens |
| NOV22c | CG51983-02 | 293 | 294 | ADAM 7 precursor (A disintegrin and |
| | | | | metalloproteinase domain 7) (Sperm |
| | | | | maturation-related glycoprotein GP- |
| | | | | 83) - Homo sapiens |
| NOV22d | CG51983-03 | 295 | 296 | ADAM 7 precursor (A disintegrin and |
| | | | | metalloproteinase domain 7) (Sperm |
| | | | | maturation-related glycoprotein GP- |
| | | | | 83) - Homo sapiens |
| NOV22e | CG51983-04 | 297 | 298 | ADAM 7 precursor (A disintegrin and |
| | | | | metalloproteinase domain 7) (Sperm |
| | | | | maturation-related glycoprotein GP- |
| | | | | 83) - Homo sapiens |
| NOV22f | CG51983-06 | 299 | 300 | ADAM 7 precursor (A disintegrin and |
| | | | | metalloproteinase domain 7) (Sperm |
| | | | | maturation-related glycoprotein GP- |
| | | | | 83) - Homo sapiens |
| NOV22g | SNP13376585 | 301 | 302 | ADAM 7 precursor (A disintegrin and |
| | | | | metalloproteinase domain 7) (Sperm |
| | | | | maturation-related glycoprotein GP- |
| | | | | 83) - Homo sapiens |
| NOV22h | SNP13376586 | 303 | 304 | ADAM 7 precursor (A disintegrin and |
| | | | | metalloproteinase domain 7) (Sperm |
| | | | | maturation-related glycoprotein GP- |
| | | | | 83) - Homo sapiens |
| NOV23a | CG53390-02 | 305 | 306 | Seven transmembrane helix receptor - |
| | | | | Homo sapiens |
| NOV23b | CG53390-01 | 307 | 308 | Seven transmembrane helix receptor - |
| | | | | Homo sapiens |
| NOV23c | CG53390-03 | 309 | 310 | Seven transmembrane helix receptor - |
| | | | | Homo sapiens |
| NOV24a | CG53482-01 | 311 | 312 | Human odorant receptor (OR) |
| NOV24b | CG53482-02 | 313 | 314 | Human odorant receptor (OR) |
| NOV24c | CG53482-03 | 315 | 316 | Human odorant receptor (OR) |
| NOV24d | SNP13373787 | 317 | 318 | Human odorant receptor (OR) |
| NOV24e | SNP13373786 | 319 | 320 | Human odorant receptor (OR) |
| NOV24f | SNP13373785 | 321 | 322 | Human odorant receptor (OR) |
| NOV25a | CG53530-03 | 323 | 324 | Seven transmembrane helix receptor - |
| | | | | Homo sapiens |
| NOV25b | CG53530-01 | 325 | 326 | Seven transmembrane helix receptor - |
| | | | | Homo sapiens |
| NOV25c | CG53530-02 | 327 | 328 | Seven transmembrane helix receptor - |
| | | | | Homo sapiens |
| NOV26a | CG53563-03 | 329 | 330 | Seven transmembrane helix receptor - |
| | | | | Homo sapiens |
| NOV26b | CG53563-01 | 331 | 332 | Seven transmembrane helix receptor - |
| | | | | Homo sapiens |
| NOV26c | CG53563-02 | 333 | 334 | Seven transmembrane helix receptor - |
| | | | | Homo sapiens |
| NOV27a | CG53719-02 | 335 | 336 | Olfactory receptor MOR106-5 - Mus |
| | | | | musculus |
| NOV27b | CG53719-01 | 337 | 338 | Olfactory receptor MOR106-5 - Mus |
| | | | | musculus |
| NOV28a | CG53746-04 | 339 | 340 | Olfactory receptor 5P3 (Olfactory |
| | | | | receptor-like protein JCG1) - Homo |
| | | | | sapiens |
| NOV28b | CG53746-01 | 341 | 342 | Olfactory receptor 5P3 (Olfactory |
| | | | | receptor-like protein JCG1) - Homo |
| | | | | sapiens |
| NOV28c | CG53746-02 | 343 | 344 | Olfactory receptor 5P3 (Olfactory |
| | | | | receptor-like protein JCG1) - Homo |
| | | | | sapiens |
| NOV28d | CG53746-03 | 345 | 346 | Olfactory receptor 5P3 (Olfactory |
| | | | | receptor-like protein JCG1) - Homo |
| | | | | sapiens |
| NOV28e | SNP13373967 | 347 | 348 | Olfactory receptor 5P3 (Olfactory |
| | | | | receptor-like protein JCG1) - Homo |
| | | | | sapiens |
| NOV28f | SNP13373968 | 349 | 350 | Olfactory receptor 5P3 (Olfactory |
| | | | | receptor-like protein JCG1) - Homo |
| | | | | sapiens |
| NOV28g | SNP13382432 | 351 | 352 | Olfactory receptor 5P3 (Olfactory |
| | | | | receptor-like protein JCG1) - Homo |
| | | | | sapiens |
| NOV28h | SNP13373969 | 353 | 354 | Olfactory receptor 5P3 (Olfactory |
| | | | | receptor-like protein JCG1) - Homo |
| | | | | sapiens |
| NOV28i | SNP13373970 | 355 | 356 | Olfactory receptor 5P3 (Olfactory |
| | | | | receptor-like protein JCG1) - Homo |
| | | | | sapiens |
| NOV28j | SNP13373971 | 357 | 358 | Olfactory receptor 5P3 (Olfactory |
| | | | | receptor-like protein JCG1) - Homo |
| | | | | sapiens |
| NOV28k | SNP13373972 | 359 | 360 | Olfactory receptor 5P3 (Olfactory |
| | | | | receptor-like protein JCG1) - Homo |
| | | | | sapiens |
| NOV28l | SNP13382433 | 361 | 362 | Olfactory receptor 5P3 (Olfactory |
| | | | | receptor-like protein JCG1) - Homo |
| | | | | sapiens |
| NOV29a | CG53767-02 | 363 | 364 | Seven transmembrane helix receptor - |
| | | | | Homo sapiens |
| NOV29b | CG53767-01 | 365 | 366 | Seven transmembrane helix receptor - |
| | | | | Homo sapiens |
| NOV29c | SNP13382437 | 367 | 368 | Seven transmembrane helix receptor - |
| | | | | Homo sapiens |
| NOV29d | SNP13382436 | 369 | 370 | Seven transmembrane helix receptor - |
| | | | | Homo sapiens |
| NOV30a | CG53776-02 | 371 | 372 | Olfactory receptor 5P2 (Olfactory |
| | | | | receptor-like protein JCG3) - Homo |
| | | | | sapiens |
| NOV30b | CG53776-03 | 373 | 374 | Olfactory receptor 5P2 (Olfactory |
| | | | | receptor-like protein JCG3) - Homo |
| | | | | sapiens |
| NOV30c | CG53776-01 | 375 | 376 | Olfactory receptor 5P2 (Olfactory |
| | | | | receptor-like protein JCG3) - Homo |
| | | | | sapiens |
| NOV31a | CG53803-02 | 377 | 378 | Sequence 3 from Patent WO0159113 - |
| | | | | Homo sapiens |
| NOV31b | CG53803-01 | 379 | 380 | Sequence 3 from Patent WO0159113 - |
| | | | | Homo sapiens |
| NOV32a | CG53989-03 | 381 | 382 | Mast cell protease-11 - Mus musculus |
| NOV32b | CG53989-04 | 383 | 384 | Mast cell protease-11 - Mus musculus |
| NOV32c | 306076095 | 385 | 386 | Mast cell protease-11 - Mus musculus |
| NOV32d | CG53989-01 | 387 | 388 | Mast cell protease-11 - Mus musculus |
| NOV32e | CG53989-02 | 389 | 390 | Mast cell protease-11 - Mus musculus |
| NOV32f | CG53989-05 | 391 | 392 | Mast cell protease-11 - Mus musculus |
| NOV32g | CG53989-06 | 393 | 394 | Mast cell protease-11 - Mus musculus |
| NOV32h | CG53989-07 | 395 | 396 | Mast cell protease-11 - Mus musculus |
| NOV32i | CG53989-08 | 397 | 398 | Mast cell protease-11 - Mus musculus |
| NOV32j | CG53989-09 | 399 | 400 | Mast cell protease-11 - Mus musculus |
| NOV32k | CG53989-10 | 401 | 402 | Mast cell protease-11 - Mus musculus |
| NOV32l | CG53989-11 | 403 | 404 | Mast cell protease-11 - Mus musculus |
| NOV32m | CG53989-12 | 405 | 406 | Mast cell protease-11 - Mus musculus |
| NOV32n | CG53989-13 | 407 | 408 | Mast cell protease-11 - Mus musculus |
| NOV33a | CG54203-02 | 409 | 410 | Olfactory receptor 2S2 - Homo |
| | | | | sapiens |
| NOV33b | CG54203-01 | 411 | 412 | Olfactory receptor 2S2 - Homo |
| | | | | sapiens |
| NOV33c | SNP13382442 | 413 | 414 | Olfactory receptor 2S2 - Homo |
| | | | | sapiens |
| NOV33d | SNP13373880 | 415 | 416 | Olfactory receptor 2S2 - Homo |
| | | | | sapiens |
| NOV33e | SNP13373881 | 417 | 418 | Olfactory receptor 2S2 - Homo |
| | | | | sapiens |
| NOV33f | SNP13382443 | 419 | 420 | Olfactory receptor 2S2 - Homo |
| | | | | sapiens |
| NOV33g | SNP13373844 | 421 | 422 | Olfactory receptor 2S2 - Homo |
| | | | | sapiens |
| NOV33h | SNP13373883 | 423 | 424 | Olfactory receptor 2S2 - Homo |
| | | | | sapiens |
| NOV34a | CG54212-02 | 425 | 426 | Seven transmembrane helix receptor - |
| | | | | Homo sapiens |
| NOV34b | CG54212-01 | 427 | 428 | Seven transmembrane helix receptor - |
| | | | | Homo sapiens |
| NOV34c | CG54212-03 | 429 | 430 | Seven transmembrane helix receptor - |
| | | | | Homo sapiens |
| NOV34d | CG54212-04 | 431 | 432 | Seven transmembrane helix receptor - |
| | | | | Homo sapiens |
| NOV34e | SNP13373981 | 433 | 434 | Seven transmembrane helix receptor - |
| | | | | Homo sapiens |
| NOV34f | SNP13373982 | 435 | 436 | Seven transmembrane helix receptor - |
| | | | | Homo sapiens |
| NOV34g | SNP13373984 | 437 | 438 | Seven transmembrane helix receptor - |
| | | | | Homo sapiens |
| NOV34h | SNP13373985 | 439 | 440 | Seven transmembrane helix receptor - |
| | | | | Homo sapiens |
| NOV35a | CG54236-01 | 441 | 442 | Cysteinyl leukotriene receptor 2 |
| | | | | (CysLTR2) (PSEC0146) (HG57) |
| | | | | (HPN321) (hGPCR21) - Homo |
| | | | | sapiens |
| NOV35b | CG54236-02 | 443 | 444 | Cysteinyl leukotriene receptor 2 |
| | | | | (CysLTR2) (PSEC0146) (HG57) |
| | | | | (HPN321) (hGPCR21) - Homo |
| | | | | sapiens |
| NOV36a | CG54479-06 | 445 | 446 | Macrophage stimulating 1 |
| | | | | (Hepatocyte growth factor-like) - |
| | | | | Homo sapiens |
| NOV36b | CG54479-05 | 447 | 448 | Macrophage stimulating 1 |
| | | | | (Hepatocyte growth factor-like) - |
| | | | | Homo sapiens |
| NOV36c | CG54479-01 | 449 | 450 | Macrophage stimulating 1 |
| | | | | (Hepatocyte growth factor-like) - |
| | | | | Homo sapiens |
| NOV36d | CG54479-02 | 451 | 452 | Macrophage stimulating 1 |
| | | | | (Hepatocyte growth factor-like) - |
| | | | | Homo sapiens |
| NOV36e | CG54479-03 | 453 | 454 | Macrophage stimulating 1 |
| | | | | (Hepatocyte growth factor-like) - |
| | | | | Homo sapiens |
| NOV36f | CG54479-04 | 455 | 456 | Macrophage stimulating 1 |
| | | | | (Hepatocyte growth factor-like) - |
| | | | | Homo sapiens |
| NOV37a | CG54539-02 | 457 | 458 | Zinc transporter 1 (ZnT-1) - Homo |
| | | | | sapiens |
| NOV37b | CG54539-01 | 459 | 460 | Zinc transporter 1 (ZnT-1) - Homo |
| | | | | sapiens |
| NOV37c | SNP13382438 | 461 | 462 | Zinc transporter 1 (ZnT-1) - Homo |
| | | | | sapiens |
| NOV38a | CG54683-05 | 463 | 464 | Gamma-aminobutyric-acid receptor |
| | | | | rho-3 subunit precursor (GABA(A) |
| | | | | receptor) - Rattus norvegicus |
| NOV38b | CG54683-01 | 465 | 466 | Gamma-aminobutyric-acid receptor |
| | | | | rho-3 subunit precursor (GABA(A) |
| | | | | receptor) - Rattus norvegicus |
| NOV38c | CG54683-02 | 467 | 468 | Gamma-aminobutyric-acid receptor |
| | | | | rho-3 subunit precursor (GABA(A) |
| | | | | receptor) - Rattus norvegicus |
| NOV38d | CG54683-03 | 469 | 470 | Gamma-aminobutyric-acid receptor |
| | | | | rho-3 subunit precursor (GABA(A) |
| | | | | receptor) - Rattus norvegicus |
| NOV38e | CG54683-04 | 471 | 472 | Gamma-aminobutyric-acid receptor |
| | | | | rho-3 subunit precursor (GABA(A) |
| | | | | receptor) - Rattus norvegicus |
| NOV39a | CG54692-06 | 473 | 474 | Human G-protein coupled receptor |
| | | | | (GCREC-15) |
| NOV39b | CG54692-01 | 475 | 476 | Human G-protein coupled receptor |
| | | | | (GCREC-15) |
| NOV39c | CG54692-02 | 477 | 478 | Human G-protein coupled receptor |
| | | | | (GCREC-15) |
| NOV39d | CG54692-03 | 479 | 480 | Human G-protein coupled receptor |
| | | | | (GCREC-15) |
| NOV39e | CG54692-04 | 481 | 482 | Human G-protein coupled receptor |
| | | | | (GCREC-15) |
| NOV39f | CG54692-05 | 483 | 484 | Human G-protein coupled receptor |
| | | | | (GCREC-15) |
| NOV40a | CG55069-01 | 485 | 486 | Ten-m3 - Mus musculus |
| NOV40b | CG55069-04 | 487 | 488 | Ten-m3 - Mus musculus |
| NOV40c | 248993047 | 489 | 490 | Ten-m3 - Mus musculus |
| NOV40d | 262802488 | 491 | 492 | Ten-m3 - Mus musculus |
| NOV40e | 248993606 | 493 | 494 | Ten-m3 - Mus musculus |
| NOV40f | 314411758 | 495 | 496 | Ten-m3 - Mus musculus |
| NOV40g | 319067006 | 497 | 498 | Ten-m3 - Mus musculus |
| NOV40h | 319506086 | 499 | 500 | Ten-m3 - Mus musculus |
| NOV40i | CG55069-03 | 501 | 502 | Ten-m3 - Mus musculus |
| NOV40j | 219937039 | 503 | 504 | Ten-m3 - Mus musculus |
| NOV40k | 219937046 | 505 | 506 | Ten-m3 - Mus musculus |
| NOV40l | 219937583 | 507 | 508 | Ten-m3 - Mus musculus |
| NOV40m | 219937000 | 509 | 510 | Ten-m3 - Mus musculus |
| NOV40n | 219937005 | 511 | 512 | Ten-m3 - Mus musculus |
| NOV40o | 219937013 | 513 | 514 | Ten-m3 - Mus musculus |
| NOV40p | 219937063 | 515 | 516 | Ten-m3 - Mus musculus |
| NOV40q | CG55069-09 | 517 | 518 | Ten-m3 - Mus musculus |
| NOV40r | 309327410 | 519 | 520 | Ten-m3 - Mus musculus |
| NOV40s | CG55069-02 | 521 | 522 | Ten-m3 - Mus musculus |
| NOV40t | CG55069-05 | 523 | 524 | Ten-m3 - Mus musculus |
| NOV40u | CG55069-06 | 525 | 526 | Ten-m3 - Mus musculus |
| NOV40v | CG55069-07 | 527 | 528 | Ten-m3 - Mus musculus |
| NOV40w | CG55069-08 | 529 | 530 | Ten-m3 - Mus musculus |
| NOV40x | CG55069-10 | 531 | 532 | Ten-m3 - Mus musculus |
| NOV40y | CG55069-11 | 533 | 534 | Ten-m3 - Mus musculus |
| NOV40z | CG55069-12 | 535 | 536 | Ten-m3 - Mus musculus |
| NOV40a | CG55069-13 | 537 | 538 | Ten-m3 - Mus musculus |
| NOV40b | CG55069-14 | 539 | 540 | Ten-m3 - Mus musculus |
| NOV40c | CG55069-15 | 541 | 542 | Ten-m3 - Mus musculus |
| NOV40d | SNP13374479 | 543 | 544 | Ten-m3 - Mus musculus |
| NOV40e | SNP13382453 | 545 | 546 | Ten-m3 - Mus musculus |
| NOV40f | SNP13382454 | 547 | 548 | Ten-m3 - Mus musculus |
| NOV40g | SNP13382455 | 549 | 550 | Ten-m3 - Mus musculus |
| NOV40h | SNP13378354 | 551 | 552 | Ten-m3 - Mus musculus |
| NOV41a | CG55343-03 | 553 | 554 | Olfactory receptor 2B6 (Hs6M1-32) |
| | | | | (Olfactory receptor 6-31) (OR6-31) - |
| | | | | Homo sapiens |
| NOV41b | 260568382 | 555 | 556 | Olfactory receptor 2B6 (Hs6M1-32) |
| | | | | (Olfactory receptor 6-31) (OR6-31) - |
| | | | | Homo sapiens |
| NOV41c | 314361391 | 557 | 558 | Olfactory receptor 2B6 (Hs6M1-32) |
| | | | | (Olfactory receptor 6-31) (OR6-31) - |
| | | | | Homo sapiens |
| NOV41d | 317286137 | 559 | 560 | Olfactory receptor 2B6 (Hs6M1-32) |
| | | | | (Olfactory receptor 6-31) (OR6-31) - |
| | | | | Homo sapiens |
| NOV41e | CG55343-01 | 561 | 562 | Olfactory receptor 2B6 (Hs6M1-32) |
| | | | | (Olfactory receptor 6-31) (OR6-31) - |
| | | | | Homo sapiens |
| NOV41f | CG55343-02 | 563 | 564 | Olfactory receptor 2B6 (Hs6M1-32) |
| | | | | (Olfactory receptor 6-31) (OR6-31) - |
| | | | | Homo sapiens |
| NOV41g | CG55343-04 | 565 | 566 | Olfactory receptor 2B6 (Hs6M1-32) |
| | | | | (Olfactory receptor 6-31) (OR6-31) - |
| | | | | Homo sapiens |
| NOV41h | CG55343-05 | 567 | 568 | Olfactory receptor 2B6 (Hs6M1-32) |
| | | | | (Olfactory receptor 6-31) (OR6-31) - |
| | | | | Homo sapiens |
| NOV41i | CG55343-06 | 569 | 570 | Olfactory receptor 2B6 (Hs6M1-32) |
| | | | | (Olfactory receptor 6-31) (OR6-31) - |
| | | | | Homo sapiens |
| NOV41j | SNP13373740 | 571 | 572 | Olfactory receptor 2B6 (Hs6M1-32) |
| | | | | (Olfactory receptor 6-31) (OR6-31) - |
| | | | | Homo sapiens |
| NOV41k | SNP13376425 | 573 | 574 | Olfactory receptor 2B6 (Hs6M1-32) |
| | | | | (Olfactory receptor 6-31) (OR6-31) - |
| | | | | Homo sapiens |
| NOV41l | SNP13376424 | 575 | 576 | Olfactory receptor 2B6 (Hs6M1-32) |
| | | | | (Olfactory receptor 6-31) (OR6-31) - |
| | | | | Homo sapiens |
| NOV41m | SNP13376423 | 577 | 578 | Olfactory receptor 2B6 (Hs6M1-32) |
| | | | | (Olfactory receptor 6-31) (OR6-31) - |
| | | | | Homo sapiens |
| NOV42a | CG55358-04 | 579 | 580 | G-protein coupled receptor 4a |
| | | | | (GPCR4a) |
| NOV42b | CG55358-03 | 581 | 582 | G-protein coupled receptor 4a |
| | | | | (GPCR4a) |
| NOV42c | 317863291 | 583 | 584 | G-protein coupled receptor 4a |
| | | | | (GPCR4a) |
| NOV42d | 317863328 | 585 | 586 | G-protein coupled receptor 4a |
| | | | | (GPCR4a) |
| NOV42e | 317863350 | 587 | 588 | G-protein coupled receptor 4a |
| | | | | (GPCR4a) |
| NOV42f | 271624076 | 589 | 590 | G-protein coupled receptor 4a |
| | | | | (GPCR4a) |
| NOV42g | CG55358-01 | 591 | 592 | G-protein coupled receptor 4a |
| | | | | (GPCR4a) |
| NOV42h | CG55358-02 | 593 | 594 | G-protein coupled receptor 4a |
| | | | | (GPCR4a) |
| NOV42i | CG55358-05 | 595 | 596 | G-protein coupled receptor 4a |
| | | | | (GPCR4a) |
| NOV42j | CG55358-06 | 597 | 598 | G-protein coupled receptor 4a |
| | | | | (GPCR4a) |
| NOV42k | CG55358-07 | 599 | 600 | G-protein coupled receptor 4a |
| | | | | (GPCR4a) |
| NOV42l | SNP13375122 | 601 | 602 | G-protein coupled receptor 4a |
| | | | | (GPCR4a) |
| NOV42m | SNP13375123 | 603 | 604 | G-protein coupled receptor 4a |
| | | | | (GPCR4a) |
| NOV42n | SNP13382494 | 605 | 606 | G-protein coupled receptor 4a |
| | | | | (GPCR4a) |
| NOV42o | SNP13375124 | 607 | 608 | G-protein coupled receptor 4a |
| | | | | (GPCR4a) |
| NOV42p | SNP13375125 | 609 | 610 | G-protein coupled receptor 4a |
| | | | | (GPCR4a) |
| NOV42q | SNP13376426 | 611 | 612 | G-protein coupled receptor 4a |
| | | | | (GPCR4a) |
| NOV42r | SNP13376427 | 613 | 614 | G-protein coupled receptor 4a |
| | | | | (GPCR4a) |
| NOV42s | SNP13375126 | 615 | 616 | G-protein coupled receptor 4a |
| | | | | (GPCR4a) |
| NOV43a | CG55604-04 | 617 | 618 | Seven transmembrane helix receptor |
| NOV43b | CG55604-01 | 619 | 620 | Seven transmembrane helix receptor |
| NOV43c | CG55604-02 | 621 | 622 | Seven transmembrane helix receptor |
| NOV43d | CG55604-03 | 623 | 624 | Seven transmembrane helix receptor |
| NOV43e | CG55604-05 | 625 | 626 | Seven transmembrane helix receptor |
| NOV43f | CG55604-06 | 627 | 628 | Seven transmembrane helix receptor |
| NOV43g | CG55604-07 | 629 | 630 | Seven transmembrane helix receptor |
| NOV43h | SNP13019742 | 631 | 632 | Seven transmembrane helix receptor |
| NOV43i | SNP13373776 | 633 | 634 | Seven transmembrane helix receptor |
| NOV43j | SNP13373777 | 635 | 636 | Seven transmembrane helix receptor |
| NOV43k | SNP13373778 | 637 | 638 | Seven transmembrane helix receptor |
| N0V43l | SNP13373838 | 639 | 640 | Seven transmembrane helix receptor |
| NOV43m | SNP13373837 | 641 | 642 | Seven transmembrane helix receptor |
| NOV43n | SNP13373836 | 643 | 644 | Seven transmembrane helix receptor |
| NOV43o | SNP13373780 | 645 | 646 | Seven transmembrane helix receptor |
| NOV43p | SNP13373781 | 647 | 648 | Seven transmembrane helix receptor |
| NOV43q | SNP13373782 | 649 | 650 | Seven transmembrane helix receptor |
| NOV43r | SNP13373783 | 651 | 652 | Seven transmembrane helix receptor |
| NOV43s | SNP13373833 | 653 | 654 | Seven transmembrane helix receptor |
| NOV43t | SNP13373784 | 655 | 656 | Seven transmembrane helix receptor |
| NOV43u | SNP13373832 | 657 | 658 | Seven transmembrane helix receptor |
| NOV44a | CG55752-07 | 659 | 660 | Glucosidase - Homo sapiens |
| | | | | (Human), 769 aa |
| NOV44b | CG55752-06 | 661 | 662 | Glucosidase - Homo sapiens |
| | | | | (Human), 769 aa |
| NOV44c | CG55752-01 | 663 | 664 | Glucosidase - Homo sapiens |
| | | | | (Human), 769 aa |
| NOV44d | CG55752-02 | 665 | 666 | Glucosidase - Homo sapiens |
| | | | | (Human), 769 aa |
| NOV44e | CG55752-03 | 667 | 668 | Glucosidase - Homo sapiens |
| | | | | (Human), 769 aa |
| NOV44f | CG55752-04 | 669 | 670 | Glucosidase - Homo sapiens |
| | | | | (Human), 769 aa |
| NOV44g | CG55752-05 | 671 | 672 | Glucosidase - Homo sapiens |
| | | | | (Human), 769 aa |
| NOV44h | SNP13379656 | 673 | 674 | Glucosidase - Homo sapiens |
| | | | | (Human), 769 aa |
| NOV44i | SNP13379655 | 675 | 676 | Glucosidase - Homo sapiens |
| | | | | (Human), 769 aa |
| NOV44j | SNP13379654 | 677 | 678 | Glucosidase - Homo sapiens |
| | | | | (Human), 769 aa |
| NOV45a | CG55778-03 | 679 | 680 | Aldo-keto reductase related protein 3 - |
| | | | | Homo sapiens |
| NOV45b | CG55778-06 | 681 | 682 | Aldo-keto reductase related protein 3 - |
| | | | | Homo sapiens |
| NOV45c | 275480984 | 683 | 684 | Aldo-keto reductase related protein 3 - |
| | | | | Homo sapiens |
| NOV45d | CG55778-01 | 685 | 686 | Aldo-keto reductase related protein 3 - |
| | | | | Homo sapiens |
| NOV45e | CG55778-02 | 687 | 688 | Aldo-keto reductase related protein 3 - |
| | | | | Homo sapiens |
| NOV45f | CG55778-04 | 689 | 690 | Aldo-keto reductase related protein 3 - |
| | | | | Homo sapiens |
| NOV45g | CG55778-05 | 691 | 692 | Aldo-keto reductase related protein 3 - |
| | | | | Homo sapiens |
| NOV45h | CG55778-07 | 693 | 694 | Aldo-keto reductase related protein 3 - |
| | | | | Homo sapiens |
| NOV45i | CG55778-08 | 695 | 696 | Aldo-keto reductase related protein 3 - |
| | | | | Homo sapiens |
| NOV45j | SNP13375813 | 697 | 698 | Aldo-keto reductase related protein 3 - |
| | | | | Homo sapiens |
| NOV46a | CG55794-03 | 699 | 700 | Zn-carboxypeptidase - Homo sapiens |
| NOV46b | 210223559 | 701 | 702 | Zn-carboxypeptidase - Homo sapiens |
| NOV46c | 210223626 | 703 | 704 | Zn-carboxypeptidase - Homo sapiens |
| NOV46d | 171095097 | 705 | 706 | Zn-carboxypeptidase - Homo sapiens |
| NOV46e | 183852229 | 707 | 708 | Zn-carboxypeptidase - Homo sapiens |
| NOV46f | 183852264 | 709 | 710 | Zn-carboxypeptidase - Homo sapiens |
| NOV46g | 183852410 | 711 | 712 | Zn-carboxypeptidase - Homo sapiens |
| NOV46h | 183523337 | 713 | 714 | Zn-carboxypeptidase - Homo sapiens |
| NOV46i | CG55794-01 | 715 | 716 | Zn-carboxypeptidase - Homo sapiens |
| NOV46j | CG55794-02 | 717 | 718 | Zn-carboxypeptidase - Homo sapiens |
| NOV46k | CG55794-04 | 719 | 720 | Zn-carboxypeptidase - Homo sapiens |
| NOV46l | CG55794-05 | 721 | 722 | Zn-carboxypeptidase - Homo sapiens |
| NOV46m | CG55794-06 | 723 | 724 | Zn-carboxypeptidase - Homo sapiens |
| NOV46n | CG55794-07 | 725 | 726 | Zn-carboxypeptidase - Homo sapiens |
| NOV46o | CG55794-08 | 727 | 728 | Zn-carboxypeptidase - Homo sapiens |
| NOV46p | CG55794-09 | 729 | 730 | Zn-carboxypeptidase - Homo sapiens |
| NOV46q | CG55794-10 | 731 | 732 | Zn-carboxypeptidase - Homo sapiens |
| NOV46r | CG55794-11 | 733 | 734 | Zn-carboxypeptidase - Homo sapiens |
| NOV46s | CG55794-12 | 735 | 736 | Zn-carboxypeptidase - Homo sapiens |
| NOV46t | CG55794-13 | 737 | 738 | Zn-carboxypeptidase - Homo sapiens |
| NOV46u | SNP13375362 | 739 | 740 | Zn-carboxypeptidase - Homo sapiens |
| NOV46v | SNP13379598 | 741 | 742 | Zn-carboxypeptidase - Homo sapiens |
| NOV46w | SNP13375066 | 743 | 744 | Zn-carboxypeptidase - Homo sapiens |
| NOV46x | SNP13375067 | 745 | 746 | Zn-carboxypeptidase - Homo sapiens |
| NOV47a | CG55806-04 | 747 | 748 | FACTOR IX - Homo sapiens |
| NOV47b | CG55806-01 | 749 | 750 | FACTOR IX - Homo sapiens |
| NOV47c | CG55806-02 | 751 | 752 | FACTOR IX - Homo sapiens |
| NOV47d | CG55806-03 | 753 | 754 | FACTOR IX - Homo sapiens |
| NOV47e | SNP13382503 | 755 | 756 | FACTOR IX - Homo sapiens |
| NOV47f | SNP13382492 | 757 | 758 | FACTOR IX - Homo sapiens |
| NOV48a | CG55828-02 | 759 | 760 | Serine/threonine-protein kinase PAK |
| | | | | 7 (EC 2.7.1.—) (p21-activated kinase 7) |
| | | | | (PAK-7) (PAK-5) - Homo sapiens |
| NOV48b | CG55828-01 | 761 | 762 | Serine/threonine-protein kinase PAK |
| | | | | 7 (EC 2.7.1.—) (p21-activated kinase 7) |
| | | | | (PAK-7) (PAK-5) - Homo sapiens |
| NOV48c | SNP13379517 | 763 | 764 | Serine/threonine-protein kinase PAK |
| | | | | 7 (EC 2.7.1.—) (p21-activated kinase 7) |
| | | | | (PAK-7) (PAK-5) - Homo sapiens |
| NOV48d | SNP13376535 | 765 | 766 | Serine/threonine-protein kinase PAK |
| | | | | 7 (EC 2.7.1.—) (p21-activated kinase 7) |
| | | | | (PAK-7) (PAK-5) - Homo sapiens |
| NOV48e | SNP13382500 | 767 | 768 | Serine/threonine-protein kinase PAK |
| | | | | 7 (EC 2.7.1.—) (p21-activated kinase 7) |
| | | | | (PAK-7) (PAK-5) - Homo sapiens |
| NOV48f | SNP13375705 | 769 | 770 | Serine/threonine-protein kinase PAK |
| | | | | 7 (EC 2.7.1.—) (p21-activated kinase 7) |
| | | | | (PAK-7) (PAK-5) - Homo sapiens |
| NOV49a | CG55980-02 | 771 | 772 | Seven transmembrane helix receptor - |
| | | | | Homo sapiens |
| NOV49b | CG55980-01 | 773 | 774 | Seven transmembrane helix receptor - |
| | | | | Homo sapiens |
| NOV50a | CG55988-03 | 775 | 776 | Organic cation transporter OKB1 - |
| | | | | Homo sapiens |
| NOV50b | CG55988-04 | 777 | 778 | Organic cation transporter OKB1 - |
| | | | | Homo sapiens |
| NOV50c | CG55988-01 | 779 | 780 | Organic cation transporter OKB1 - |
| | | | | Homo sapiens |
| NOV50d | CG55988-02 | 781 | 782 | Organic cation transporter OKB1 - |
| | | | | Homo sapiens |
| NOV51a | CG56071-01 | 783 | 784 | Mixed lineage kinase MLK1 - Homo |
| | | | | sapiens (Human), 1066 aa |
| NOV51b | 274082270 | 785 | 786 | Mixed lineage kinase MLK1 - Homo |
| | | | | sapiens (Human), 1066 aa |
| NOV51c | SNP13376041 | 787 | 788 | Mixed lineage kinase MLK1 - Homo |
| | | | | sapiens (Human), 1066 aa |
| NOV52a | CG56142-01 | 789 | 790 | Similar to protease, serine, 8 |
| | | | | (Prostasin) - Homo sapiens (Human), |
| | | | | 327 aa |
| NOV52b | CG56142-04 | 791 | 792 | Similar to protease, serine, 8 |
| | | | | (Prostasin) - Homo sapiens (Human), |
| | | | | 327 aa |
| NOV52c | 276873337 | 793 | 794 | Similar to protease, serine, 8 |
| | | | | (Prostasin) - Homo sapiens (Human), |
| | | | | 327 aa |
| NOV52d | 276863970 | 795 | 796 | Similar to protease, serine, 8 |
| | | | | (Prostasin) - Homo sapiens (Human), |
| | | | | 327 aa |
| NOV52e | 276863992 | 797 | 798 | Similar to protease, serine, 8 |
| | | | | (Prostasin) - Homo sapiens (Human), |
| | | | | 327 aa |
| NOV52f | 276873330 | 799 | 800 | Similar to protease, serine, 8 |
| | | | | (Prostasin) - Homo sapiens (Human), |
| | | | | 327 aa |
| NOV52g | CG56142-02 | 801 | 802 | Similar to protease, serine, 8 |
| | | | | (Prostasin) - Homo sapiens (Human), |
| | | | | 327 aa |
| NOV52h | CG56142-03 | 803 | 804 | Similar to protease, serine, 8 |
| | | | | (Prostasin) - Homo sapiens (Human), |
| | | | | 327 aa |
| NOV52i | CG56142-05 | 805 | 806 | Similar to protease, serine, 8 |
| | | | | (Prostasin) - Homo sapiens (Human), |
| | | | | 327 aa |
| NOV52j | CG56142-06 | 807 | 808 | Similar to protease, serine, 8 |
| | | | | (Prostasin) - Homo sapiens (Human), |
| | | | | 327 aa |
| NOV53a | CG56144-01 | 809 | 810 | Seven transmembrane helix receptor - |
| | | | | Homo sapiens |
| NOV53b | 170645965 | 811 | 812 | Seven transmembrane helix receptor - |
| | | | | Homo sapiens |
| NOV53c | 168869277 | 813 | 814 | Seven transmembrane helix receptor - |
| | | | | Homo sapiens |
| NOV53d | 170645981 | 815 | 816 | Seven transmembrane helix receptor - |
| | | | | Homo sapiens |
| NOV53e | 168869262 | 817 | 818 | Seven transmembrane helix receptor - |
| | | | | Homo sapiens |
| NOV53f | 168869254 | 819 | 820 | Seven transmembrane helix receptor - |
| | | | | Homo sapiens |
| NOV53g | CG56144-02 | 821 | 822 | Seven transmembrane helix receptor - |
| | | | | Homo sapiens |
| NOV53h | CG56144-03 | 823 | 824 | Seven transmembrane helix receptor - |
| | | | | Homo sapiens |
| NOV53i | CG56144-04 | 825 | 826 | Seven transmembrane helix receptor - |
| | | | | Homo sapiens |
| NOV53j | CG56144-05 | 827 | 828 | Seven transmembrane helix receptor - |
| | | | | Homo sapiens |
| NOV53k | CG56144-06 | 829 | 830 | Seven transmembrane helix receptor - |
| | | | | Homo sapiens |
| NOV54a | CG56146-02 | 831 | 832 | Seven transmembrane helix receptor - |
| | | | | Homo sapiens |
| NOV54b | CG56146-01 | 833 | 834 | Seven transmembrane helix receptor - |
| | | | | Homo sapiens |
| NOV54c | 170646057 | 835 | 836 | Seven transmembrane helix receptor - |
| | | | | Homo sapiens |
| NOV54d | 170646049 | 837 | 838 | Seven transmembrane helix receptor - |
| | | | | Homo sapiens |
| NOV54e | 170646053 | 839 | 840 | Seven transmembrane helix receptor - |
| | | | | Homo sapiens |
| NOV54f | 174307717 | 841 | 842 | Seven transmembrane helix receptor - |
| | | | | Homo sapiens |
| NOV54g | 168869383 | 843 | 844 | Seven transmembrane helix receptor - |
| | | | | Homo sapiens |
| NOV54h | CG56146-03 | 845 | 846 | Seven transmembrane helix receptor - |
| | | | | Homo sapiens |
| NOV54i | 262939640 | 847 | 848 | Seven transmembrane helix receptor - |
| | | | | Homo sapiens |
| NOV54j | CG56146-04 | 849 | 850 | Seven transmembrane helix receptor - |
| | | | | Homo sapiens |
| NOV54k | CG56146-05 | 851 | 852 | Seven transmembrane helix receptor - |
| | | | | Homo sapiens |
| NOV54l | CG56146-06 | 853 | 854 | Seven transmembrane helix receptor - |
| | | | | Homo sapiens |
| NOV55a | CG56258-04 | 855 | 856 | Na exchanger isoform 3 splice variant |
| | | | | 2 - Homo sapiens |
| NOV55b | CG56258-02 | 857 | 858 | Na exchanger isoform 3 splice variant |
| | | | | 2 - Homo sapiens |
| NOV55c | 258076220 | 859 | 860 | Na exchanger isoform 3 splice variant |
| | | | | 2 - Homo sapiens |
| NOV55d | 248057963 | 861 | 862 | Na exchanger isoform 3 splice variant |
| | | | | 2 - Homo sapiens |
| NOV55e | CG56258-01 | 863 | 864 | Na exchanger isoform 3 splice variant |
| | | | | 2 - Homo sapiens |
| NOV55f | CG56258-03 | 865 | 866 | Na exchanger isoform 3 splice variant |
| | | | | 2 - Homo sapiens |
| NOV55g | CG56258-05 | 867 | 868 | Na exchanger isoform 3 splice variant |
| | | | | 2 - Homo sapiens |
| NOV55h | CG56258-06 | 869 | 870 | Na exchanger isoform 3 splice variant |
| | | | | 2 - Homo sapiens |
| NOV56a | CG56262-01 | 871 | 872 | Putative calcium binding transporter - |
| | | | | Homo sapiens |
| NOV56b | 266120550 | 873 | 874 | Putative calcium binding transporter - |
| | | | | Homo sapiens |
| NOV57a | CG56315-01 | 875 | 876 | Connexin25 - Homo sapiens |
| NOV57b | 247679382 | 877 | 878 | Connexin25 - Homo sapiens |
| NOV57c | 247678321 | 879 | 880 | Connexin25 - Homo sapiens |
| NOV57d | 247679418 | 881 | 882 | Connexin25 - Homo sapiens |
| NOV57e | 247679395 | 883 | 884 | Connexin25 - Homo sapiens |
| NOV57f | 247679328 | 885 | 886 | Connexin25 - Homo sapiens |
| NOV57g | CG56315-02 | 887 | 888 | Connexin25 - Homo sapiens |
| NOV57h | CG56315-03 | 889 | 890 | Connexin25 - Homo sapiens |
| NOV57i | CG56315-04 | 891 | 892 | Connexin25 - Homo sapiens |
| NOV57j | CG56315-05 | 893 | 894 | Connexin25 - Homo sapiens |
| NOV57k | CG56315-06 | 895 | 896 | Connexin25 - Homo sapiens |
| NOV57l | CG56315-07 | 897 | 898 | Connexin25 - Homo sapiens |
| NOV57m | CG56315-08 | 899 | 900 | Connexin25 - Homo sapiens |
| NOV57n | SNP13381650 | 901 | 902 | Connexin25 - Homo sapiens |
| NOV57o | SNP13381651 | 903 | 904 | Connexin25 - Homo sapiens |
| NOV57p | SNP13381652 | 905 | 906 | Connexin25 - Homo sapiens |
| NOV57q | SNP13381653 | 907 | 908 | Connexin25 - Homo sapiens |
| NOV57r | SNP13381654 | 909 | 910 | Connexin25 - Homo sapiens |
| NOV58a | CG56398-01 | 911 | 912 | Sodium/glucose cotransporter KST1 - |
| | | | | Homo sapiens |
| NOV58b | 265726152 | 913 | 914 | Sodium/glucose cotransporter KST1 - |
| | | | | Homo sapiens |
| NOV58c | 267254040 | 915 | 916 | Sodium/glucose cotransporter KST1 - |
| | | | | Homo sapiens |
| NOV58d | SNP13379242 | 917 | 918 | Sodium/glucose cotransporter KST1 - |
| | | | | Homo sapiens |
| NOV59a | CG56605-03 | 919 | 920 | Protease PRTS-5 |
| NOV59b | CG56605-01 | 921 | 922 | Protease PRTS-5 |
| NOV59c | CG56605-02 | 923 | 924 | Protease PRTS-5 |
| NOV60a | CG56645-03 | 925 | 926 | sodium/glucose cotransporter |
| | | | | Fbh68723pat |
| NOV60b | CG56645-04 | 927 | 928 | sodium/glucose cotransporter |
| | | | | Fbh68723pat |
| NOV60c | CG56645-01 | 929 | 930 | sodium/glucose cotransporter |
| | | | | Fbh68723pat |
| NOV60d | CG56645-02 | 931 | 932 | sodium/glucose cotransporter |
| | | | | Fbh68723pat |
| NOV61a | CG56667-01 | 933 | 934 | Seven transmembrane helix receptor - |
| | | | | Homo sapiens |
| NOV61b | 268952113 | 935 | 936 | Seven transmembrane helix receptor - |
| | | | | Homo sapiens |
| NOV62a | CG56868-01 | 937 | 938 | ADAM 7 precursor (A disintegrin and |
| | | | | metalloproteinase domain 7) (Sperm |
| | | | | maturation-related glycoprotein GP- |
| | | | | 83) - Homo sapiens |
| NOV62b | 276580332 | 939 | 940 | ADAM 7 precursor (A disintegrin and |
| | | | | metalloproteinase domain 7) (Sperm |
| | | | | maturation-related glycoprotein GP- |
| | | | | 83) - Homo sapiens |
| NOV63a | CG56870-01 | 941 | 942 | NDRG3 protein - Homo sapiens |
| NOV63b | CG56870-06 | 943 | 944 | NDRG3 protein - Homo sapiens |
| NOV63c | 276585681 | 945 | 946 | NDRG3 protein - Homo sapiens |
| NOV63d | CG56870-02 | 947 | 948 | NDRG3 protein - Homo sapiens |
| NOV63e | CG56870-03 | 949 | 950 | NDRG3 protein - Homo sapiens |
| NOV63f | CG56870-04 | 951 | 952 | NDRG3 protein - Homo sapiens |
| NOV63g | CG56870-05 | 953 | 954 | NDRG3 protein - Homo sapiens |
| NOV64a | CG57109-01 | 955 | 956 | Human kinase (PKIN)-4 |
| NOV64b | 260457400 | 957 | 958 | Human kinase (PKIN)-4 |
| NOV64c | 260457409 | 959 | 960 | Human kinase (PKIN)-4 |
| NOV64d | CG57109-05 | 961 | 962 | Human kinase (PKIN)-4 |
| NOV64e | 267253965 | 963 | 964 | Human kinase (PKIN)-4 |
| NOV64f | 267254000 | 965 | 966 | Human kinase (PKIN)-4 |
| NOV64g | 267253987 | 967 | 968 | Human kinase (PKIN)-4 |
| NOV64h | CG57109-02 | 969 | 970 | Human kinase (PKIN)-4 |
| NOV64i | CG57109-03 | 971 | 972 | Human kinase (PKIN)-4 |
| NOV64j | CG57109-04 | 973 | 974 | Human kinase (PKIN)-4 |
| NOV64k | CG57109-06 | 975 | 976 | Human kinase (PKIN)-4 |
| NOV65a | CG57399-04 | 977 | 978 | Human phospholipase-like enzyme |
| NOV65b | CG57399-01 | 979 | 980 | Human phospholipase-like enzyme |
| NOV65c | CG57399-02 | 981 | 982 | Human phospholipase-like enzyme |
| NOV65d | CG57399-03 | 983 | 984 | Human phospholipase-like enzyme |
| NOV66a | CG57562-02 | 985 | 986 | cation-transporting ATPase 2 (EC |
| | | | | 3.6.3.—) (CGI-152) - Homo sapiens |
| NOV66b | CG57562-01 | 987 | 988 | cation-transporting ATPase 2 (EC |
| | | | | 3.6.3.—) (CGI-152) - Homo sapiens |
| NOV66c | SNP13380762 | 989 | 990 | cation-transporting ATPase 2 (EC |
| | | | | 3.6.3.—) (CGI-152) - Homo sapiens |
| NOV66d | SNP13380787 | 991 | 992 | cation-transporting ATPase 2 (EC |
| | | | | 3.6.3.—) (CGI-152) - Homo sapiens |
| NOV67a | CG57758-03 | 993 | 994 | Na+coupled citrate transporter protein - |
| | | | | Homo sapiens |
| NOV67b | 308537854 | 995 | 996 | Na+coupled citrate transporter protein - |
| | | | | Homo sapiens |
| NOV67c | CG57758-01 | 997 | 998 | Na+coupled citrate transporter protein - |
| | | | | Homo sapiens |
| NOV67d | CG57758-02 | 999 | 1000 | Na+coupled citrate transporter protein - |
| | | | | Homo sapiens |
| NOV67e | CG57758-04 | 1001 | 1002 | Na+coupled citrate transporter protein - |
| | | | | Homo sapiens |
| NOV67f | CG57758-05 | 1003 | 1004 | Na+coupled citrate transporter protein - |
| | | | | Homo sapiens |
| NOV68a | CG58504-01 | 1005 | 1006 | ADAMTS-12 precursor (EC 3.4.24.—) |
| | | | | (A disintegrin and metalloproteinase |
| | | | | with thrombospondin motifs 12) |
| | | | | (ADAM-TS 12) (ADAM-TS12) - |
| | | | | Homo sapiens |
| NOV68b | 169648376 | 1007 | 1008 | ADAMTS-12 precursor (EC 3.4.24.—) |
| | | | | (A disintegrin and metalloproteinase |
| | | | | with thrombospondin motifs 12) |
| | | | | (ADAM-TS 12) (ADAM-TS12) - |
| | | | | Homo sapiens |
| NOV68c | 169648388 | 1009 | 1010 | ADAMTS-12 precursor (EC 3.4.24.—) |
| | | | | (A disintegrin and metalloproteinase |
| | | | | with thrombospondin motifs 12) |
| | | | | (ADAM-TS 12) (ADAM-TS12) - |
| | | | | Homo sapiens |
| NOV68d | 169648365 | 1011 | 1012 | ADAMTS-12 precursor (EC 3.4.24.—) |
| | | | | (A disintegrin and metalloproteinase |
| | | | | with thrombospondin motifs 12) |
| | | | | (ADAM-TS 12) (ADAM-TS12) - |
| | | | | Homo sapiens |
| NOV68e | 284068250 | 1013 | 1014 | ADAMTS-12 precursor (EC 3.4.24.—) |
| | | | | (A disintegrin and metalloproteinase |
| | | | | with thrombospondin motifs 12) |
| | | | | (ADAM-TS 12) (ADAM-TS12) - |
| | | | | Homo sapiens |
| NOV68f | 305867866 | 1015 | 1016 | ADAMTS-12 precursor (EC 3.4.24.—) |
| | | | | (A disintegrin and metalloproteinase |
| | | | | with thrombospondin motifs 12) |
| | | | | (ADAM-TS 12) (ADAM-TS12) - |
| | | | | Homo sapiens |
| NOV68g | 318176397 | 1017 | 1018 | ADAMTS-12 precursor (EC 3.4.24.—) |
| | | | | (A disintegrin and metalloproteinase |
| | | | | with thrombospondin motifs 12) |
| | | | | (ADAM-TS 12) (ADAM-TS12) - |
| | | | | Homo sapiens |
| NOV68h | CG58504-02 | 1019 | 1020 | ADAMTS-12 precursor (EC 3.4.24.—) |
| | | | | (A disintegrin and metalloproteinase |
| | | | | with thrombospondin motifs 12) |
| | | | | (ADAM-TS 12) (ADAM-TS12) - |
| | | | | Homo sapiens |
| NOV68i | CG58504-03 | 1021 | 1022 | ADAMTS-12 precursor (EC 3.4.24.—) |
| | | | | (A disintegrin and metalloproteinase |
| | | | | with thrombospondin motifs 12) |
| | | | | (ADAM-TS 12) (ADAM-TS12) - |
| | | | | Homo sapiens |
| NOV68j | CG58504-04 | 1023 | 1024 | ADAMTS-12 precursor (EC 3.4.24.—) |
| | | | | (A disintegrin and metalloproteinase |
| | | | | with thrombospondin motifs 12) |
| | | | | (ADAM-TS 12) (ADAM-TS12) - |
| | | | | Homo sapiens |
| NOV68k | CG58504-05 | 1025 | 1026 | ADAMTS-12 precursor (EC 3.4.24.—) |
| | | | | (A disintegrin and metalloproteinase |
| | | | | with thrombospondin motifs 12) |
| | | | | (ADAM-TS 12) (ADAM-TS12) - |
| | | | | Homo sapiens |
| NOV68l | CG58504-06 | 1027 | 1028 | ADAMTS-12 precursor (EC 3.4.24.—) |
| | | | | (A disintegrin and metalloproteinase |
| | | | | with thrombospondin motifs 12) |
| | | | | (ADAM-TS 12) (ADAM-TS12) - |
| | | | | Homo sapiens |
| NOV68m | CG58504-07 | 1029 | 1030 | ADAMTS-12 precursor (EC 3.4.24.—) |
| | | | | (A disintegrin and metalloproteinase |
| | | | | with thrombospondin motifs 12) |
| | | | | (ADAM-TS 12) (ADAM-TS12) - |
| | | | | Homo sapiens |
| NOV69a | CG58510-01 | 1031 | 1032 | Cation transport protein YRDO |
| NOV70a | CG59309-01 | 1033 | 1034 | Human Acyl-CoA thioesterase |
| NOV70b | 278901386 | 1035 | 1036 | Human Acyl-CoA thioesterase |
| NOV71a | CG59490-01 | 1037 | 1038 | Mast cell protease-11 - Mus musculus |
| NOV71b | 207639512 | 1039 | 1040 | Mast cell protease-11 - Mus musculus |
| NOV71c | 207639476 | 1041 | 1042 | Mast cell protease-11 - Mus musculus |
| NOV71d | 207639523 | 1043 | 1044 | Mast cell protease-11 - Mus musculus |
| NOV71e | CG59490-02 | 1045 | 1046 | Mast cell protease-11 - Mus musculus |
| NOV72a | CG59693-01 | 1047 | 1048 | Aldo-keto reductase family 1 member |
| | | | | C1 (EC 1.1.1.—) (Trans-1,2- |
| | | | | dihydrobenzene-1,2-diol |
| | | | | dehydrogenase) (EC 1.3.1.20) (High- |
| | | | | affinity hepatic bile acid-binding |
| | | | | protein) (HBAB) (Chlordecone |
| | | | | reductase homolog HAKRC) |
| | | | | (Dihydrodiol dehydrogenase 2) (DD2) |
| | | | | (20 alpha-hydroxysteroid |
| | | | | dehydrogenase) - Homo sapiens |
| NOV72b | CG59693-03 | 1049 | 1050 | Aldo-keto reductase family 1 member |
| | | | | C1 (EC 1.1.1.—) (Trans-1,2- |
| | | | | dihydrobenzene-1,2-diol |
| | | | | dehydrogenase) (EC 1.3.1.20) (High- |
| | | | | affinity hepatic bile acid-binding |
| | | | | protein) (HBAB) (Chlordecone |
| | | | | reductase homolog HAKRC) |
| | | | | (Dihydrodiol dehydrogenase 2) (DD2) |
| | | | | (20 alpha-hydroxysteroid |
| | | | | dehydrogenase) - Homo sapiens |
| NOV72c | 277637252 | 1051 | 1052 | Aldo-keto reductase family 1 member |
| | | | | C1 (EC 1.1.1.—) (Trans-1,2- |
| | | | | dihydrobenzene-1,2-diol |
| | | | | dehydrogenase) (EC 1.3.1.20) (High- |
| | | | | affinity hepatic bile acid-binding |
| | | | | protein) (HBAB) (Chlordecone |
| | | | | reductase homolog HAKRC) |
| | | | | (Dihydrodiol dehydrogenase 2) (DD2) |
| | | | | (20 alpha-hydroxysteroid |
| | | | | dehydrogenase) - Homo sapiens |
| NOV72d | CG59693-02 | 1053 | 1054 | Aldo-keto reductase family 1 member |
| | | | | C1 (EC 1.1.1.—) (Trans-1,2- |
| | | | | dihydrobenzene-1,2-diol |
| | | | | dehydrogenase) (EC 1.3.1.20) (High- |
| | | | | affinity hepatic bile acid-binding |
| | | | | protein) (HBAB) (Chlordecone |
| | | | | reductase homolog HAKRC) |
| | | | | (Dihydrodiol dehydrogenase 2) (DD2) |
| | | | | dehydrogenase) - Homo sapiens |
| NOV72e | CG59693-04 | 1055 | 1056 | Aldo-keto reductase family 1 member |
| | | | | C1 (EC 1.1.1.—) (Trans-1,2- |
| | | | | dihydrobenzene-1,2-diol |
| | | | | dehydrogenase) (EC 1.3.1.20) (High- |
| | | | | affinity hepatic bile acid-binding |
| | | | | protein) (HBAB) (Chlordecone |
| | | | | reductase homolog HAKRC) |
| | | | | (Dihydrodiol dehydrogenase 2) (DD2) |
| | | | | (20 alpha-hydroxysteroid |
| | | | | dehydrogenase) - Homo sapiens |
| NOV72f | CG59693-05 | 1057 | 1058 | Aldo-keto reductase family 1 member |
| | | | | C1 (EC 1.1.1.—) (Trans-1,2- |
| | | | | dihydrobenzene-1,2-diol |
| | | | | dehydrogenase) (EC 1.3.1.20) (High- |
| | | | | affinity hepatic bile acid-binding |
| | | | | protein) (HBAB) (Chlordecone |
| | | | | reductase homolog HAKRC) |
| | | | | (Dihydrodiol dehydrogenase 2) (DD2) |
| | | | | (20 alpha-hydroxysteroid |
| | | | | dehydrogenase) - Homo sapiens |
| NOV72g | CG59693-06 | 1059 | 1060 | Aldo-keto reductase family 1 member |
| | | | | C1 (EC 1.1.1.—) (Trans-1,2- |
| | | | | dihydrobenzene-1,2-diol |
| | | | | dehydrogenase) (EC 1.3.1.20) (High- |
| | | | | affinity hepatic bile acid-binding |
| | | | | protein) (HBAB) (Chlordecone |
| | | | | reductase homolog HAKRC) |
| | | | | (Dihydrodiol dehydrogenase 2) (DD2) |
| | | | | (20 alpha-hydroxysteroid |
| | | | | dehydrogenase) - Homo sapiens |
| NOV72h | CG59693-07 | 1061 | 1062 | Aldo-keto reductase family 1 member |
| | | | | C1 (EC 1.1.1.—) (Trans-1,2- |
| | | | | dihydrobenzene-1,2-diol |
| | | | | dehydrogenase) (EC 1.3.1.20) (High- |
| | | | | affinity hepatic bile acid-binding |
| | | | | protein) (HBAB) (Chlordecone |
| | | | | reductase homolog HAKRC) |
| | | | | (Dihydrodiol dehydrogenase 2) (DD2) |
| | | | | (20 alpha-hydroxysteroid |
| | | | | dehydrogenase) - Homo sapiens |
| NOV72i | CG59693-08 | 1063 | 1064 | Aldo-keto reductase family 1 member |
| | | | | C1 (EC 1.1.1.—) (Trans-1,2- |
| | | | | dihydrobenzene-1,2-diol |
| | | | | dehydrogenase) (EC 1.3.1.20) (High- |
| | | | | affinity hepatic bile acid-binding |
| | | | | protein) (HBAB) (Chlordecone |
| | | | | reductase homolog HAKRC) |
| | | | | (Dihydrodiol dehydrogenase 2) (DD2) |
| | | | | (20 alpha-hydroxysteroid |
| | | | | dehydrogenase) - Homo sapiens |
| NOV72j | CG59693-09 | 1065 | 1066 | Aldo-keto reductase family 1 member |
| | | | | C1 (EC 1.1.1.—) (Trans-1,2- |
| | | | | dihydrobenzene-1,2-diol |
| | | | | dehydrogenase) (EC 1.3.1.20) (High- |
| | | | | affinity hepatic bile acid-binding |
| | | | | protein) (HBAB) (Chlordecone |
| | | | | reductase homolog HAKRC) |
| | | | | (Dihydrodiol dehydrogenase 2) (DD2) |
| | | | | (20 alpha-hydroxysteroid |
| | | | | dehydrogenase) - Homo sapiens |
| NOV73a | CG59839-02 | 1067 | 1068 | cation-transporting ATPase 3 (EC |
| | | | | 3.6.3.—) (ATPase family homolog up- |
| | | | | regulated in senescence cells 1) - |
| | | | | Homo sapiens |
| NOV73b | CG59839-01 | 1069 | 1070 | cation-transporting ATPase 3 (EC |
| | | | | 3.6.3.—) (ATPase family homolog up- |
| | | | | regulated in senescence cells 1) - |
| | | | | Homo sapiens |
| NOV74a | CG90866-04 | 1071 | 1072 | Human protein kinase |
| NOV74b | CG90866-03 | 1073 | 1074 | Human protein kinase |
| NOV74c | CG90866-01 | 1075 | 1076 | Human protein kinase |
| NOV74d | CG90866-02 | 1077 | 1078 | Human protein kinase |
| NOV74e | CG90866-05 | 1079 | 1080 | Human protein kinase |
| NOV75a | CG91708-02 | 1081 | 1082 | Stromelysin-1 precursor (EC |
| | | | | 3.4.24.17) (Matrix metalloproteinase- |
| | | | | 3) (MMP-3) (Transin-1) (SL-1) - |
| | | | | Homo sapiens |
| NOV75b | 262751856 | 1083 | 1084 | Stromelysin-1 precursor (EC |
| | | | | 3.4.24.17) (Matrix metalloproteinase- |
| | | | | 3) (MMP-3) (Transin-1) (SL-1) - |
| | | | | Homo sapiens |
| NOV75c | CG91708-01 | 1085 | 1086 | Stromelysin-1 precursor (EC |
| | | | | 3.4.24.17) (Matrix metalloproteinase- |
| | | | | 3) (MMP-3) (Transin-1) (SL-1) - |
| | | | | Homo sapiens |
| NOV75d | CG91708-03 | 1087 | 1088 | Stromelysin-1 precursor (EC |
| | | | | 3.4.24.17) (Matrix metalloproteinase- |
| | | | | 3) (MMP-3) (Transin-1) (SL-1) - |
| | | | | Homo sapiens |
| NOV75e | CG91708-04 | 1089 | 1090 | Stromelysin-1 precursor (EC |
| | | | | 3.4.24.17) (Matrix metalloproteinase- |
| | | | | 3) (MMP-3) (Transin-1) (SL-1) - |
| | | | | Homo sapiens |
| NOV75f | SNP13380740 | 1091 | 1092 | Stromelysin-1 precursor (EC |
| | | | | 3.4.24.17) (Matrix metalloproteinase- |
| | | | | 3) (MMP-3) (Transin-1) (SL-1) - |
| | | | | Homo sapiens |
| NOV76a | CG92078-02 | 1093 | 1094 | Yolk SAC permease-like YSPL-1 |
| | | | | form 1 (Yolk SAC permease-like |
| | | | | YSPL-1 form 4) (Yolk SAC |
| | | | | permease-like YSPL-1 form 3) (Yolk |
| | | | | SAC permease-like YSPL-1 form 2) - |
| | | | | Mus musculus |
| NOV76b | CG92078-01 | 1095 | 1096 | Yolk SAC permease-like YSPL-1 |
| | | | | form 1 (Yolk SAC permease-like |
| | | | | YSPL-1 form 4) (Yolk SAC |
| | | | | permease-like YSPL-1 form 3) (Yolk |
| | | | | SAC permease-like YSPL-1 form 2) - |
| | | | | Mus musculus |
| NOV77a | CG93669-04 | 1097 | 1098 | NIMA-related protein kinase 3 - |
| | | | | Homo sapiens |
| NOV77b | CG93669-01 | 1099 | 1100 | NIMA-related protein kinase 3 - |
| | | | | Homo sapiens |
| NOV77c | CG93669-02 | 1101 | 1102 | NIMA-related protein kinase 3 - |
| | | | | Homo sapiens |
| NOV77d | CG93669-03 | 1103 | 1104 | NIMA-related protein kinase 3 - |
| | | | | Homo sapiens |
| NOV77e | SNP13376464 | 1105 | 1106 | NIMA-related protein kinase 3 - |
| | | | | Homo sapiens |
| NOV77f | SNP13376462 | 1107 | 1108 | NIMA-related protein kinase 3 - |
| | | | | Homo sapiens |
| NOV77g | SNP13382521 | 1109 | 1110 | NIMA-related protein kinase 3 - |
| | | | | Homo sapiens |
| NOV78a | CG94235-01 | 1111 | 1112 | Thymidylate kinase homologue |
| NOV78b | 254647864 | 1113 | 1114 | Thymidylate kinase homologue |
| NOV78c | 254347797 | 1115 | 1116 | Thymidylate kinase homologue |
| NOV78d | CG94235-02 | 1117 | 1118 | Thymidylate kinase homologue |
| NOV79a | CG95175-01 | 1119 | 1120 | Human EphA full length kinase |
| NOV79b | 275697118 | 1121 | 1122 | Human EphA full length kinase |
| NOV79c | 275697150 | 1123 | 1124 | Human EphA full length kinase |
| NOV80a | CG99638-01 | 1125 | 1126 | Concentrative Na+-nucleoside |
| | | | | cotransporter hCNT3 |
| NOV81a | CG99650-01 | 1127 | 1128 | Concentrative Na+-nucleoside |
| | | | | cotransporter hCNT3 |
| NOV81b | SNP13382525 | 1129 | 1130 | Concentrative Na+-nucleoside |
| | | | | cotransporter hCNT3 |
| NOV81c | SNP13382526 | 1131 | 1132 | Concentrative Na+-nucleoside |
| | | | | cotransporter hCNT3 |

[0035] Table A indicates the homology of NOVX polypeptides to known protein families. Thus, the nucleic acids and polypeptides, antibodies and related compounds according to the invention corresponding to a NOVX as identified in column 1 of Table A will be useful in therapeutic and diagnostic applications implicated in, for example, pathologies and disorders associated with the known protein families identified in column 5 of Table A.

[0036] Pathologies, diseases, disorders and condition and the like that are associated with NOVX sequences include, but are not limited to, e.g., cardiomyopathy, atherosclerosis, hypertension, congenital heart defects, aortic stenosis, atrial septal defect (ASD), atrioventricular (A-V) canal defect, ductus arteriosus, pulmonary stenosis, subaortic stenosis, ventricular septal defect (VSD), valve diseases, tuberous sclerosis, scleroderma, obesity, metabolic disturbances associated with obesity, transplantation, adrenoleukodystrophy, congenital adrenal hyperplasia, prostate cancer, diabetes, metabolic disorders, neoplasm; adenocarcinoma, lymphoma, uterus cancer, fertility, hemophilia, hypercoagulation, idiopathic thrombocytopenic purpura, immunodeficiencies, graft versus host disease, AIDS, bronchial asthma, Crohn's disease; multiple sclerosis, treatment of Albright Hereditary Ostoeodystrophy, infectious disease, anorexia, cancer-associated cachexia, cancer, neurodegenerative disorders, Alzheimer's Disease, Parkinson's Disorder, immune disorders, hematopoietic disorders, and the various dyslipidemias, the metabolic syndrome X and wasting disorders associated with chronic diseases and various cancers, as well as conditions such as transplantation and fertility.

[0037] NOVX nucleic acids and their encoded polypeptides are useful in a variety of applications and contexts. The various NOVX nucleic acids and polypeptides according to the invention are useful as novel members of the protein families according to the presence of domains and sequence relatedness to previously described proteins. Additionally, NOVX nucleic acids and polypeptides can also be used to identify proteins that are members of the family to which the NOVX polypeptides belong.

[0038] Consistent with other known members of the family of proteins, identified in column 5 of Table A, the NOVX polypeptides of the present invention show homology to, and contain domains that are characteristic of, other members of such protein families. Details of the sequence relatedness and domain analysis for each NOVX are presented in Example A.

[0039] The NOVX nucleic acids and polypeptides can also be used to screen for molecules, which inhibit or enhance NOVX activity or function. Specifically, the nucleic acids and polypeptides according to the invention may be used as targets for the identification of small molecules that modulate or inhibit diseases associated with the protein families listed in Table A.

[0040] The NOVX nucleic acids and polypeptides are also useful for detecting specific cell types. Details of the expression analysis for each NOVX are presented in Example C. Accordingly, the NOVX nucleic acids, polypeptides, antibodies and related compounds according to the invention will have diagnostic and therapeutic applications in the detection of a variety of diseases with differential expression in normal vs. diseased tissues, e.g., detection of a variety of cancers. SNP analysis for each NOVX, if applicable, is presented in Example D.

[0041] Additional utilities for NOVX nucleic acids and polypeptides according to the invention are disclosed herein.

NOVX Clones

[0042] NOVX nucleic acids and their encoded polypeptides are useful in a variety of applications and contexts. The various NOVX nucleic acids and polypeptides according to the invention are useful as novel members of the protein families according to the presence of domains and sequence relatedness to previously described proteins. Additionally, NOVX nucleic acids and polypeptides can also be used to identify proteins that are members of the family to which the NOVX polypeptides belong.

[0043] The NOVX genes and their corresponding encoded proteins are useful for preventing, treating or ameliorating medical conditions, e.g., by protein or gene therapy. Pathological conditions can be diagnosed by determining the amount of the new protein in a sample or by determining the presence of mutations in the new genes. Specific uses are described for each of the NOVX genes, based on the tissues in which they are most highly expressed. Uses include developing products for the diagnosis or treatment of a variety of diseases and disorders.

[0044] The NOVX nucleic acids and proteins of the invention are useful in potential diagnostic and therapeutic applications and as a research tool. These include serving as a specific or selective nucleic acid or protein diagnostic and/or prognostic marker, wherein the presence or amount of the nucleic acid or the protein are to be assessed, as well as potential therapeutic applications such as the following: (i) a protein therapeutic, (ii) a small molecule drug target, (iii) an antibody target (therapeutic, diagnostic, drug targeting/cytotoxic antibody), (iv) a nucleic acid useful in gene therapy (gene delivery/gene ablation), and (v) a composition promoting tissue regeneration in vitro and in vivo (vi) a biological defense weapon.

[0045] In one specific embodiment, the invention includes an isolated polypeptide comprising an amino acid sequence selected from the group consisting of: (a) a mature form of the amino acid sequence selected from the group consisting of SEQ ID NO: 2n, wherein n is an integer between 1 and 566; (b) a variant of a mature form of the amino acid sequence selected from the group consisting of SEQ ID NO: 2n, wherein n is an integer between 1 and 566, wherein any amino acid in the mature form is changed to a different amino acid, provided that no more than 15% of the amino acid residues in the sequence of the mature form are so changed; (c) an amino acid sequence selected from the group consisting of SEQ ID NO: 2n, wherein n is an integer between 1 and 566; (d) a variant of the amino acid sequence selected from the group consisting of SEQ ID NO:2n, wherein n is an integer between 1 and 566 wherein any amino acid specified in the chosen sequence is changed to a different amino acid, provided that no more than 15% of the amino acid residues in the sequence are so changed; and (e) a fragment of any of (a) through (d).

[0046] In another specific embodiment, the invention includes an isolated nucleic acid molecule comprising a nucleic acid sequence encoding a polypeptide comprising an amino acid sequence selected from the group consisting of: (a) a mature form of the amino acid sequence given SEQ ID NO: 2n, wherein n is an integer between 1 and 566; (b) a variant of a mature form of the amino acid sequence selected from the group consisting of SEQ ID NO: 2n, wherein n is an integer between 1 and 566 wherein any amino acid in the mature form of the chosen sequence is changed to a different amino acid, provided that no more than 15% of the amino acid residues in the sequence of the mature form are so changed; (c) the amino acid sequence selected from the group consisting of SEQ ID NO: 2n, wherein n is an integer between 1 and 566; (d) a variant of the amino acid sequence selected from the group consisting of SEQ ID NO: 2n, wherein n is an integer between 1 and 566, in which any amino acid specified in the chosen sequence is changed to a different amino acid, provided that no more than 15% of the amino acid residues in the sequence are so changed; (e) a nucleic acid fragment encoding at least a portion of a polypeptide comprising the amino acid sequence selected from the group consisting of SEQ ID NO: 2n, wherein n is an integer between 1 and 566 or any variant of said polypeptide wherein any amino acid of the chosen sequence is changed to a different amino acid, provided that no more than 10% of the amino acid residues in the sequence are so changed; and (f) the complement of any of said nucleic acid molecules.

[0047] In yet another specific embodiment, the invention includes an isolated nucleic acid molecule, wherein said nucleic acid molecule comprises a nucleotide sequence selected from the group consisting of: (a) the nucleotide sequence selected from the group consisting of SEQ ID NO: 2n−1, wherein n is an integer between 1 and 566; (b) a nucleotide sequence wherein one or more nucleotides in the nucleotide sequence selected from the group consisting of SEQ ID NO: 2n−1, wherein n is an integer between 1 and 566 is changed from that selected from the group consisting of the chosen sequence to a different nucleotide provided that no more than 15% of the nucleotides are so changed; (c) a nucleic acid fragment of the sequence selected from the group consisting of SEQ ID NO: 2n−1, wherein n is an integer between 1 and 566; and (d) a nucleic acid fragment wherein one or more nucleotides in the nucleotide sequence selected from the group consisting of SEQ ID NO: 2n−1, wherein n is an integer between 1 and 566 is changed from that selected from the group consisting of the chosen sequence to a different nucleotide provided that no more than 15% of the nucleotides are so changed.

NOVX Nucleic Acids and Polypeptides

[0048] One aspect of the invention pertains to isolated nucleic acid molecules that encode NOVX polypeptides or biologically active portions thereof. Also included in the invention are nucleic acid fragments sufficient for use as hybridization probes to identify NOVX-encoding nucleic acids (e.g., NOVX mRNAs) and fragments for use as PCR primers for the amplification and/or mutation of NOVX nucleic acid molecules. As used herein, the term “nucleic acid molecule” is intended to include DNA molecules (e.g., cDNA or genomic DNA), RNA molecules (e.g., mRNA), analogs of the DNA or RNA generated using nucleotide analogs, and derivatives, fragments and homologs thereof. The nucleic acid molecule may be single-stranded or double-stranded, but preferably is comprised double-stranded DNA.

[0049] A NOVX nucleic acid can encode a mature NOVX polypeptide. As used herein, a “mature” form of a polypeptide or protein disclosed in the present invention is the product of a naturally occurring polypeptide or precursor form or proprotein. The naturally occurring polypeptide, precursor or proprotein includes, by way of nonlimiting example, the full-length gene product encoded by the corresponding gene. Alternatively, it may be defined as the polypeptide, precursor or proprotein encoded by an ORF described herein. The product “mature” form arises, by way of nonlimiting example, as a result of one or more naturally occurring processing steps that may take place within the cell (e.g., host cell) in which the gene product arises. Examples of such processing steps leading to a “mature” form of a polypeptide or protein include the cleavage of the N-terminal methionine residue encoded by the initiation codon of an ORF, or the proteolytic cleavage of a signal peptide or leader sequence. Thus a mature form arising from a precursor polypeptide or protein that has residues 1 to N, where residue 1 is the N-terminal methionine, would have residues 2 through N remaining after removal of the N-terminal methionine. Alternatively, a mature form arising from a precursor polypeptide or protein having residues 1 to N, in which an N-terminal signal sequence from residue 1 to residue M is cleaved, would have the residues from residue M+1 to residue N remaining. Further as used herein, a “mature” form of a polypeptide or protein may arise from a step of post-translational modification other than a proteolytic cleavage event. Such additional processes include, by way of non-limiting example, glycosylation, myristylation or phosphorylation. In general, a mature polypeptide or protein may result from the operation of only one of these processes, or a combination of any of them.

[0050] The term “probe”, as utilized herein, refers to nucleic acid sequences of variable length, preferably between at least about 10 nucleotides (nt), about 100 nt, or as many as approximately, e.g., 6,000 nt, depending upon the specific use. Probes are used in the detection of identical, similar, or complementary nucleic acid sequences. Longer length probes are generally obtained from a natural or recombinant source, are highly specific, and much slower to hybridize than shorter-length oligomer probes. Probes may be single-stranded or double-stranded and designed to have specificity in PCR, membrane-based hybridization technologies, or ELISA-like technologies.

[0051] The term “isolated” nucleic acid molecule, as used herein, is a nucleic acid that is separated from other nucleic acid molecules which are present in the natural source of the nucleic acid. Preferably, an “isolated” nucleic acid is free of sequences which naturally flank the nucleic acid (i.e., sequences located at the 5′- and 3′-termini of the nucleic acid) in the genomic DNA of the organism from which the nucleic acid is derived. For example, in various embodiments, the isolated NOVX nucleic acid molecules can contain less than about 5 kb, 4 kb, 3 kb, 2 kb, 1 kb, 0.5 kb or 0.1 kb of nucleotide sequences which naturally flank the nucleic acid molecule in genomic DNA of the cell/tissue from which the nucleic acid is derived (e.g., brain, heart, liver, spleen, etc.). Moreover, an “isolated” nucleic acid molecule, such as a cDNA molecule, can be substantially free of other cellular material, or culture medium, or of chemical precursors or other chemicals.

[0052] A nucleic acid molecule of the invention, e.g., a nucleic acid molecule having the nucleotide sequence of SEQ ID NO:2n−1, wherein n is an integer between 1 and 566, or a complement of this nucleotide sequence, can be isolated using standard molecular biology techniques and the sequence information provided herein. Using all or a portion of the nucleic acid sequence of SEQ ID NO:2n−1, wherein n is an integer between 1 and 566, as a hybridization probe, NOVX molecules can be isolated using standard hybridization and cloning techniques (e.g., as described in Sambrook, et al., (eds.), MOLECULAR CLONING: A LABORATORY MANUAL 2^{nd} Ed., Cold Spring Harbor Laboratory Press, Cold Spring Harbor, N.Y., 1989; and Ausubel, et al., (eds.), CURRENT PROTOCOLS IN MOLECULAR BIOLOGY, John Wiley & Sons, New York, N.Y., 1993.)

[0053] A nucleic acid of the invention can be amplified using cDNA, mRNA or alternatively, genomic DNA, as a template with appropriate oligonucleotide primers according to standard PCR amplification techniques. The nucleic acid so amplified can be cloned into an appropriate vector and characterized by DNA sequence analysis. Furthermore, oligonucleotides corresponding to NOVX nucleotide sequences can be prepared by standard synthetic techniques, e.g., using an automated DNA synthesizer.

[0054] As used herein, the term “oligonucleotide” refers to a series of linked nucleotide residues. A short oligonucleotide sequence may be based on, or designed from, a genomic or cDNA sequence and is used to amplify, confirm, or reveal the presence of an identical, similar or complementary DNA or RNA in a particular cell or tissue. Oligonucleotides comprise a nucleic acid sequence having about 10 nt, 50 nt, or 100 nt in length, preferably about 15 nt to 30 nt in length. In one embodiment of the invention, an oligonucleotide comprising a nucleic acid molecule less than 100 nt in length would further comprise at least 6 contiguous nucleotides of SEQ ID NO:2n−1, wherein n is an integer between 1 and 566, or a complement thereof. Oligonucleotides may be chemically synthesized and may also be used as probes.

[0055] In another embodiment, an isolated nucleic acid molecule of the invention comprises a nucleic acid molecule that is a complement of the nucleotide sequence shown in SEQ ID NO:2n−1, wherein n is an integer between 1 and 566, or a portion of this nucleotide sequence (e.g., a fragment that can be used as a probe or primer or a fragment encoding a biologically-active portion of a NOVX polypeptide). A nucleic acid molecule that is complementary to the nucleotide sequence of SEQ ID NO:2n−1, wherein n is an integer between 1 and 566, is one that is sufficiently complementary to the nucleotide sequence of SEQ ID NO:2n−1, wherein n is an integer between 1 and 566, that it can hydrogen bond with few or no mismatches to the nucleotide sequence shown in SEQ ID NO:2n−1, wherein n is an integer between 1 and 566, thereby forming a stable duplex.

[0056] As used herein, the term “complementary” refers to Watson-Crick or Hoogsteen base pairing between nucleotides units of a nucleic acid molecule, and the term “binding” means the physical or chemical interaction between two polypeptides or compounds or associated polypeptides or compounds or combinations thereof. Binding includes ionic, non-ionic, van der Waals, hydrophobic interactions, and the like. A physical interaction can be either direct or indirect. Indirect interactions may be through or due to the effects of another polypeptide or compound. Direct binding refers to interactions that do not take place through, or due to, the effect of another polypeptide or compound, but instead are without other substantial chemical intermediates.

[0057] A “fragment” provided herein is defined as a sequence of at least 6 (contiguous) nucleic acids or at least 4 (contiguous) amino acids, a length sufficient to allow for specific hybridization in the case of nucleic acids or for specific recognition of an epitope in the case of amino acids, and is at most some portion less than a full length sequence. Fragments may be derived from any contiguous portion of a nucleic acid or amino acid sequence of choice.

[0058] A full-length NOVX clone is identified as containing an ATG translation start codon and an in-frame stop codon. Any disclosed NOVX nucleotide sequence lacking an ATG start codon therefore encodes a truncated C-terminal fragment of the respective NOVX polypeptide, and requires that the corresponding full-length cDNA extend in the 5′ direction of the disclosed sequence. Any disclosed NOVX nucleotide sequence lacking an in-frame stop codon similarly encodes a truncated N-terminal fragment of the respective NOVX polypeptide, and requires that the corresponding full-length cDNA extend in the 3′ direction of the disclosed sequence.

[0059] A “derivative” is a nucleic acid sequence or amino acid sequence formed from the native compounds either directly, by modification or partial substitution. An “analog” is a nucleic acid sequence or amino acid sequence that has a structure similar to, but not identical to, the native compound, e.g., they differs from it in respect to certain components or side chains. Analogs may be synthetic or derived from a different evolutionary origin and may have a similar or opposite metabolic activity compared to wild type. A “homolog” is a nucleic acid sequence or amino acid sequence of a particular gene that is derived from different species.

[0060] Derivatives and analogs may be full length or other than full length. Derivatives or analogs of the nucleic acids or proteins of the invention include, but are not limited to, molecules comprising regions that are substantially homologous to the nucleic acids or proteins of the invention, in various embodiments, by at least about 70%, 80%, or 95% identity (with a preferred identity of 80-95%) over a nucleic acid or amino acid sequence of identical size or when compared to an aligned sequence in which the alignment is done by a computer homology program known in the art, or whose encoding nucleic acid is capable of hybridizing to the complement of a sequence encoding the proteins under stringent, moderately stringent, or low stringent conditions. See e.g., Ausubel, et al., CURRENT PROTOCOLS IN MOLECULAR BIOLOGY, John Wiley & Sons, New York, N.Y., 1993, and below.

[0061] A “homologous nucleic acid sequence” or “homologous amino acid sequence,” or variations thereof, refer to sequences characterized by a homology at the nucleotide level or amino acid level as discussed above. Homologous nucleotide sequences include those sequences coding for isoforms of NOVX polypeptides. Isoforms can be expressed in different tissues of the same organism as a result of, for example, alternative splicing of RNA. Alternatively, isoforms can be encoded by different genes. In the invention, homologous nucleotide sequences include nucleotide sequences encoding for a NOVX polypeptide of species other than humans, including, but not limited to: vertebrates, and thus can include, e.g., frog, mouse, rat, rabbit, dog, cat cow, horse, and other organisms. Homologous nucleotide sequences also include, but are not limited to, naturally occurring allelic variations and mutations of the nucleotide sequences set forth herein. A homologous nucleotide sequence does not, however, include the exact nucleotide sequence encoding human NOVX protein. Homologous nucleic acid sequences include those nucleic acid sequences that encode conservative amino acid substitutions (see below) in SEQ ID NO:2n−1, wherein n is an integer between 1 and 566, as well as a polypeptide possessing NOVX biological activity. Various biological activities of the NOVX proteins are described below.

[0062] A NOVX polypeptide is encoded by the open reading frame (“ORF”) of a NOVX nucleic acid. An ORF corresponds to a nucleotide sequence that could potentially be translated into a polypeptide. A stretch of nucleic acids comprising an ORF is uninterrupted by a stop codon. An ORF that represents the coding sequence for a full protein begins with an ATG “start” codon and terminates with one of the three “stop” codons, namely, TAA, TAG, or TGA. For the purposes of this invention, an ORF may be any part of a coding sequence, with or without a start codon, a stop codon, or both. For an ORF to be considered as a good candidate for coding for a bona fide cellular protein, a minimum size requirement is often set, e.g., a stretch of DNA that would encode a protein of 50 amino acids or more.

[0063] The nucleotide sequences determined from the cloning of the human NOVX genes allows for the generation of probes and primers designed for use in identifying and/or cloning NOVX homologues in other cell types, e.g., from other tissues, as well as NOVX homologues from other vertebrates. The probe/primer typically comprises substantially purified oligonucleotide. The oligonucleotide typically comprises a region of nucleotide sequence that hybridizes under stringent conditions to at least about 12, 25, 50, 100, 150, 200, 250, 300, 350 or 400 consecutive sense strand nucleotide sequence of SEQ ID NO:2n−1, wherein n is an integer between 1 and 566; or an anti-sense strand nucleotide sequence of SEQ ID NO:2n−1, wherein n is an integer between 1 and 566; or of a naturally occurring mutant of SEQ ID NO:2n−1, wherein n is an integer between 1 and 566.

[0064] Probes based on the human NOVX nucleotide sequences can be used to detect transcripts or genomic sequences encoding the same or homologous proteins. In various embodiments, the probe has a detectable label attached, e.g. the label can be a radioisotope, a fluorescent compound, an enzyme, or an enzyme co-factor. Such probes can be used as a part of a diagnostic test kit for identifying cells or tissues which mis-express a NOVX protein, such as by measuring a level of a NOVX-encoding nucleic acid in a sample of cells from a subject e.g., detecting NOVX mRNA levels or determining whether a genomic NOVX gene has been mutated or deleted.

[0065] “A polypeptide having a biologically-active portion of a NOVX polypeptide” refers to polypeptides exhibiting activity similar, but not necessarily identical to, an activity of a polypeptide of the invention, including mature forms, as measured in a particular biological assay, with or without dose dependency. A nucleic acid fragment encoding a “biologically-active portion of NOVX” can be prepared by isolating a portion of SEQ ID NO:2n−1, wherein n is an integer between 1 and 566, that encodes a polypeptide having a NOVX biological activity (the biological activities of the NOVX proteins are described below), expressing the encoded portion of NOVX protein (e.g., by recombinant expression in vitro) and assessing the activity of the encoded portion of NOVX.

NOVX Nucleic Acid and Polypeptide Variants

[0066] The invention further encompasses nucleic acid molecules that differ from the nucleotide sequences of SEQ ID NO:2n−1, wherein n is an integer between 1 and 566, due to degeneracy of the genetic code and thus encode the same NOVX proteins as that encoded by the nucleotide sequences of SEQ ID NO:2n−1, wherein n is an integer between 1 and 566. In another embodiment, an isolated nucleic acid molecule of the invention has a nucleotide sequence encoding a protein having an amino acid sequence of SEQ ID NO:2n, wherein n is an integer between 1 and 566.

[0067] In addition to the human NOVX nucleotide sequences of SEQ ID NO:2n−1, wherein n is an integer between 1 and 566, it will be appreciated by those skilled in the art that DNA sequence polymorphisms that lead to changes in the amino acid sequences of the NOVX polypeptides may exist within a population (e.g., the human population). Such genetic polymorphism in the NOVX genes may exist among individuals within a population due to natural allelic variation. As used herein, the terms “gene” and “recombinant gene” refer to nucleic acid molecules comprising an open reading frame (ORF) encoding a NOVX protein, preferably a vertebrate NOVX protein. Such natural allelic variations can typically result in 1-5% variance in the nucleotide sequence of the NOVX genes. Any and all such nucleotide variations and resulting amino acid polymorphisms in the NOVX polypeptides, which are the result of natural allelic variation and that do not alter the functional activity of the NOVX polypeptides, are intended to be within the scope of the invention.

[0068] Moreover, nucleic acid molecules encoding NOVX proteins from other species, and thus that have a nucleotide sequence that differs from a human SEQ ID NO:2n−1, wherein n is an integer between 1 and 566, are intended to be within the scope of the invention. Nucleic acid molecules corresponding to natural allelic variants and homologues of the NOVX cDNAs of the invention can be isolated based on their homology to the human NOVX nucleic acids disclosed herein using the human cDNAs, or a portion thereof, as a hybridization probe according to standard hybridization techniques under stringent hybridization conditions.

[0069] Accordingly, in another embodiment, an isolated nucleic acid molecule of the invention is at least 6 nucleotides in length and hybridizes under stringent conditions to the nucleic acid molecule comprising the nucleotide sequence of SEQ ID NO:2n−1, wherein n is an integer between 1 and 566. In another embodiment, the nucleic acid is at least 10, 25, 50, 100, 250, 500, 750, 1000, 1500, or 2000 or more nucleotides in length. In yet another embodiment, an isolated nucleic acid molecule of the invention hybridizes to the coding region. As used herein, the term “hybridizes under stringent conditions” is intended to describe conditions for hybridization and washing under which nucleotide sequences at least about 65% homologous to each other typically remain hybridized to each other.

[0070] Homologs (i.e., nucleic acids encoding NOVX proteins derived from species other than human) or other related sequences (e.g., paralogs) can be obtained by low, moderate or high stringency hybridization with all or a portion of the particular human sequence as a probe using methods well known in the art for nucleic acid hybridization and cloning.

[0071] As used herein, the phrase “stringent hybridization conditions” refers to conditions under which a probe, primer or oligonucleotide will hybridize to its target sequence, but to no other sequences. Stringent conditions are sequence-dependent and will be different in different circumstances. Longer sequences hybridize specifically at higher temperatures than shorter sequences. Generally, stringent conditions are selected to be about 5° C. lower than the thermal melting point (Tm) for the specific sequence at a defined ionic strength and pH. The Tm is the temperature (under defined ionic strength, pH and nucleic acid concentration) at which 50% of the probes complementary to the target sequence hybridize to the target sequence at equilibrium. Since the target sequences are generally present at excess, at Tm, 50% of the probes are occupied at equilibrium. Typically, stringent conditions will be those in which the salt concentration is less than about 1.0 M sodium ion, typically about 0.01 to 1.0 M sodium ion (or other salts) at pH 7.0 to 8.3 and the temperature is at least about 30° C. for short probes, primers or oligonucleotides (e.g., 10 nt to 50 nt) and at least about 60° C. for longer probes, primers and oligonucleotides. Stringent conditions may also be achieved with the addition of destabilizing agents, such as formamide.

[0072] Stringent conditions are known to those skilled in the art and can be found in Ausubel, et al., (eds.), CURRENT PROTOCOLS IN MOLECULAR BIOLOGY, John Wiley & Sons, N.Y. (1989), 6.3.1-6.3.6. Preferably, the conditions are such that sequences at least about 65%, 70%, 75%, 85%, 90%, 95%, 98%, or 99% homologous to each other typically remain hybridized to each other. A non-limiting example of stringent hybridization conditions are hybridization in a high salt buffer comprising 6×SSC, 50 mM Tris-HCl (pH 7.5), 1 mM EDTA, 0.02% PVP, 0.02% Ficoll, 0.02% BSA, and 500 mg/ml denatured salmon sperm DNA at 65° C., followed by one or more washes in 0.2×SSC, 0.01% BSA at 50° C. An isolated nucleic acid molecule of the invention that hybridizes under stringent conditions to a sequence of SEQ ID NO:2n−1, wherein n is an integer between 1 and 566, corresponds to a naturally-occurring nucleic acid molecule. As used herein, a “naturally-occurring” nucleic acid molecule refers to an RNA or DNA molecule having a nucleotide sequence that occurs in nature (e.g., encodes a natural protein).

[0073] In a second embodiment, a nucleic acid sequence that is hybridizable to the nucleic acid molecule comprising the nucleotide sequence of SEQ ID NO:2n−1, wherein n is an integer between 1 and 566, or fragments, analogs or derivatives thereof, under conditions of moderate stringency is provided. A non-limiting example of moderate stringency hybridization conditions are hybridization in 6×SSC, 5×Reinhardt's solution, 0.5% SDS and 100 mg/ml denatured salmon sperm DNA at 55° C., followed by one or more washes in 1×SSC, 0.1% SDS at 37° C. Other conditions of moderate stringency that may be used are well-known within the art. See, e.g., Ausubel, et al. (eds.), 1993, CURRENT PROTOCOLS IN MOLECULAR BIOLOGY, John Wiley & Sons, NY, and Krieger, 1990; GENE TRANSFER AND EXPRESSION, A LABORATORY MANUAL, Stockton Press, NY.

[0074] In a third embodiment, a nucleic acid that is hybridizable to the nucleic acid molecule comprising the nucleotide sequences of SEQ ID NO:2n−1, wherein n is an integer between 1 and 566, or fragments, analogs or derivatives thereof, under conditions of low stringency, is provided. A non-limiting example of low stringency hybridization conditions are hybridization in 35% formamide, 5×SSC, 50 mM Tris-HCl (pH 7.5), 5 mM EDTA, 0.02% PVP, 0.02% Ficoll, 0.2% BSA, 100 mg/ml denatured salmon sperm DNA, 10% (wt/vol) dextran sulfate at 40° C., followed by one or more washes in 2×SSC, 25 mM Tris-HCl (pH 7.4), 5 mM EDTA, and 0.1% SDS at 50° C. Other conditions of low stringency that may be used are well known in the art (e.g., as employed for cross-species hybridizations). See, e.g. Ausubel, et al. (eds.), 1993, CURRENT PROTOCOLS IN MOLECULAR BIOLOGY, John Wiley & Sons, NY, and Kriegler, 1990, GENE TRANSFER AND EXPRESSION, A LABORATORY MANUAL, Stockton Press, NY; Shilo and Weinberg, 1981. Proc Natl Acad Sci USA 78: 6789-6792.

Conservative Mutations

[0075] In addition to naturally-occurring allelic variants of NOVX sequences that may exist in the population, the skilled artisan will further appreciate that changes can be introduced by mutation into the nucleotide sequences of SEQ ID NO:2n−1, wherein n is an integer between 1 and 566, thereby leading to changes in the amino acid sequences of the encoded NOVX protein, without altering the functional ability of that NOVX protein. For example, nucleotide substitutions leading to amino acid substitutions at “non-essential” amino acid residues can be made in the sequence of SEQ ID NO:2n, wherein n is an integer between 1 and 566. A “non-essential” amino acid residue is a residue that can be altered from the wild-type sequences of the NOVX proteins without altering their biological activity, whereas an “essential” amino acid residue is required for such biological activity. For example, amino acid residues that are conserved among the NOVX proteins of the invention are not particularly amenable to alteration. Amino acids for which conservative substitutions can be made are well-known within the art.

[0076] Another aspect of the invention pertains to nucleic acid molecules encoding NOVX proteins that contain changes in amino acid residues that are not essential for activity. Such NOVX proteins differ in amino acid sequence from SEQ ID NO:2n−1, wherein n is an integer between 1 and 566, yet retain biological activity. In one embodiment, the isolated nucleic acid molecule comprises a nucleotide sequence encoding a protein, wherein the protein comprises an amino acid sequence at least about 40% homologous to the amino acid sequences of SEQ ID NO:2n, wherein n is an integer between 1 and 566. Preferably, the protein encoded by the nucleic acid molecule is at least about 60% homologous to SEQ ID NO:2n, wherein n is an integer between 1 and 566; more preferably at least about 70% homologous to SEQ ID NO:2n, wherein n is an integer between 1 and 566; still more preferably at least about 80% homologous to SEQ ID NO:2n, wherein n is an integer between 1 and 566; even more preferably at least about 90% homologous to SEQ ID NO:2n, wherein n is an integer between 1 and 566; and most preferably at least about 95% homologous to SEQ ID NO:2n, wherein n is an integer between 1 and 566.

[0077] An isolated nucleic acid molecule encoding a NOVX protein homologous to the protein of SEQ ID NO:2n, wherein n is an integer between 1 and 566, can be created by introducing one or more nucleotide substitutions, additions or deletions into the nucleotide sequence of SEQ ID NO:2n−1, wherein n is an integer between 1 and 566, such that one or more amino acid substitutions, additions or deletions are introduced into the encoded protein.

[0078] Mutations can be introduced any one of SEQ ID NO:2n−1, wherein n is an integer between 1 and 566, by standard techniques, such as site-directed mutagenesis and PCR-mediated mutagenesis. Preferably, conservative amino acid substitutions are made at one or more non-essential amino acid residues. A “conservative amino acid substitution” is one in which the amino acid residue is replaced with an amino acid residue having a similar side chain. Families of amino acid residues having similar side chains have been defined within the art. These families include amino acids with basic side chains (e.g., lysine, arginine, histidine), acidic side chains (e.g., aspartic acid, glutamic acid), uncharged polar side chains (e.g., glycine, asparagine, glutamine, serine, threonine, tyrosine, cysteine), nonpolar side chains (e.g., alanine, valine, leucine, isoleucine, proline, phenylalanine, methionine, tryptophan), beta-branched side chains (e.g., threonine, valine, isoleucine) and aromatic side chains (e.g., tyrosine, phenylalanine, tryptophan, histidine). Thus, a non-essential amino acid residue in the NOVX protein is replaced with another amino acid residue from the same side chain family. Alternatively, in another embodiment, mutations can be introduced randomly along all or part of a NOVX coding sequence, such as by saturation mutagenesis, and the resultant mutants can be screened for NOVX biological activity to identify mutants that retain activity. Following mutagenesis of a nucleic acid of SEQ ID NO:2n−1, wherein n is an integer between 1 and 566, the encoded protein can be expressed by any recombinant technology known in the art and the activity of the protein can be determined.

[0079] The relatedness of amino acid families may also be determined based on side chain interactions. Substituted amino acids may be fully conserved “strong” residues or fully conserved “weak” residues. The “strong” group of conserved amino acid residues may be any one of the following groups: STA, NEQK, NHQK, NDEQ, QHRK, MILV, MILF, HY, FYW, wherein the single letter amino acid codes are grouped by those amino acids that may be substituted for each other. Likewise, the “weak” group of conserved residues may be any one of the following: CSA, ATV, SAG, STNK, STPA, SGND, SNDEQK, NDEQHK, NEQHRK, HFY, wherein the letters within each group represent the single letter amino acid code.

[0080] In one embodiment, a mutant NOVX protein can be assayed for (i) the ability to form protein:protein interactions with other NOVX proteins, other cell-surface proteins, or biologically-active portions thereof, (ii) complex formation between a mutant NOVX protein and a NOVX ligand; or (iii) the ability of a mutant NOVX protein to bind to an intracellular target protein or biologically-active portion thereof; (e.g., avidin proteins).

[0081] In yet another embodiment, a mutant NOVX protein can be assayed for the ability to regulate a specific biological function (e.g., regulation of insulin release).

Interfering RNA

[0082] In one aspect of the invention, NOVX gene expression can be attenuated by RNA interference. One approach well-known in the art is short interfering RNA (siRNA) mediated gene silencing where expression products of a NOVX gene are targeted by specific double stranded NOVX derived siRNA nucleotide sequences that are complementary to at least a 19-25 nt long segment of the NOVX gene transcript, including the 5′ untranslated (UT) region, the ORF, or the 3′ UT region. See, e.g., PCT applications WO00/44895, WO99/32619, WO01/75164, WO01/92513, WO 01/29058, WO01/89304, WO02/16620, and WO02/29858, each incorporated by reference herein in their entirety. Targeted genes can be a NOVX gene, or an upstream or downstream modulator of the NOVX gene. Nonlimiting examples of upstream or downstream modulators of a NOVX gene include, e.g., a transcription factor that binds the NOVX gene promoter, a kinase or phosphatase that interacts with a NOVX polypeptide, and polypeptides involved in a NOVX regulatory pathway.

[0083] According to the methods of the present invention, NOVX gene expression is silenced using short interfering RNA. A NOVX polynucleotide according to the invention includes a siRNA polynucleotide. Such a NOVX siRNA can be obtained using a NOVX polynucleotide sequence, for example, by processing the NOVX ribopolynucleotide sequence in a cell-free system, such as but not limited to a Drosophila extract, or by transcription of recombinant double stranded NOVX RNA or by chemical synthesis of nucleotide sequences homologous to a NOVX sequence. See, e.g., Tuschl, Zamore, Lehmann, Bartel and Sharp (1999), Genes & Dev. 13: 3191-3197, incorporated herein by reference in its entirety. When synthesized, a typical 0.2 micromolar-scale RNA synthesis provides about 1 milligram of siRNA, which is sufficient for 1000 transfection experiments using a 24-well tissue culture plate format.

[0084] The most efficient silencing is generally observed with siRNA duplexes composed of a 21-nt sense strand and a 21-nt antisense strand, paired in a manner to have a 2-nt 3′ overhang. The sequence of the 2-nt 3′ overhang makes an additional small contribution to the specificity of siRNA target recognition. The contribution to specificity is localized to the unpaired nucleotide adjacent to the first paired bases. In one embodiment, the nucleotides in the 3′ overhang are ribonucleotides. In an alternative embodiment, the nucleotides in the 3′ overhang are deoxyribonucleotides. Using 2′-deoxyribonucleotides in the 3′ overhangs is as efficient as using ribonucleotides, but deoxyribonucleotides are often cheaper to synthesize and are most likely more nuclease resistant.

[0085] A contemplated recombinant expression vector of the invention comprises a NOVX DNA molecule cloned into an expression vector comprising operatively-linked regulatory sequences flanking the NOVX sequence in a manner that allows for expression (by transcription of the DNA molecule) of both strands. An RNA molecule that is antisense to NOVX mRNA is transcribed by a first promoter (e.g., a promoter sequence 3′ of the cloned DNA) and an RNA molecule that is the sense strand for the NOVX mRNA is transcribed by a second promoter (e.g., a promoter sequence 5′ of the cloned DNA). The sense and antisense strands may hybridize in vivo to generate siRNA constructs for silencing of the NOVX gene. Alternatively, two constructs can be utilized to create the sense and anti-sense strands of a siRNA construct. Finally, cloned DNA can encode a construct having secondary structure, wherein a single transcript has both the sense and complementary antisense sequences from the target gene or genes. In an example of this embodiment, a hairpin RNAi product is homologous to all or a portion of the target gene. In another example, a hairpin RNAi product is a siRNA. The regulatory sequences flanking the NOVX sequence may be identical or may be different, such that their expression may be modulated independently, or in a temporal or spatial manner.

[0086] In a specific embodiment, siRNAs are transcribed intracellularly by cloning the NOVX gene templates into a vector containing, e.g., a RNA pol III transcription unit from the smaller nuclear RNA (snRNA) U6 or the human RNase P RNA H1. One example of a vector system is the GeneSuppressor™ RNA Interference kit (commercially available from Imgenex). The U6 and H1 promoters are members of the type III class of Pol III promoters. The +1 nucleotide of the U6-like promoters is always guanosine, whereas the +1 for H1 promoters is adenosine. The termination signal for these promoters is defined by five consecutive thymidines. The transcript is typically cleaved after the second uridine. Cleavage at this position generates a 3′ TU overhang in the expressed siRNA, which is similar to the 3′ overhangs of synthetic siRNAs. Any sequence less than 400 nucleotides in length can be transcribed by these promoter, therefore they are ideally suited for the expression of around 21-nucleotide siRNAs in, e.g., an approximately 50-nucleotide RNA stem-loop transcript.

[0087] A siRNA vector appears to have an advantage over synthetic siRNAs where long term knock-down of expression is desired. Cells transfected with a siRNA expression vector would experience steady, long-term mRNA inhibition. In contrast, cells transfected with exogenous synthetic siRNAs typically recover from mRNA suppression within seven days or ten rounds of cell division. The long-term gene silencing ability of siRNA expression vectors may provide for applications in gene therapy.

[0088] In general, siRNAs are chopped from longer dsRNA by an ATP-dependent ribonuclease called DICER. DICER is a member of the RNase III family of double-stranded RNA-specific endonucleases. The siRNAs assemble with cellular proteins into an endonuclease complex. In vitro studies in Drosophila suggest that the siRNAs/protein complex (siRNP) is then transferred to a second enzyme complex, called an RNA-induced silencing complex (RISC), which contains an endoribonuclease that is distinct from DICER. RISC uses the sequence encoded by the antisense siRNA strand to find and destroy mRNAs of complementary sequence. The siRNA thus acts as a guide, restricting the ribonuclease to cleave only mRNAs complementary to one of the two siRNA strands.

[0089] A NOVX mRNA region to be targeted by siRNA is generally selected from a desired NOVX sequence beginning 50 to 100 nt downstream of the start codon. Alternatively, 5′ or 3′ UTRs and regions nearby the start codon can be used but are generally avoided, as these may be richer in regulatory protein binding sites. UTR-binding proteins and/or translation initiation complexes may interfere with binding of the siRNP or RISC endonuclease complex. An initial BLAST homology search for the selected siRNA sequence is done against an available nucleotide sequence library to ensure that only one gene is targeted. Specificity of target recognition by siRNA duplexes indicate that a single point mutation located in the paired region of an siRNA duplex is sufficient to abolish target mRNA degradation. See, Elbashir et al. 2001 EMBO J. 20(23):6877-88. Hence, consideration should be taken to accommodate SNPs, polymorphisms, allelic variants or species-specific variations when targeting a desired gene.

[0090] In one embodiment, a complete NOVX siRNA experiment includes the proper negative control. A negative control siRNA generally has the same nucleotide composition as the NOVX siRNA but lack significant sequence homology to the genome. Typically, one would scramble the nucleotide sequence of the NOVX siRNA and do a homology search to make sure it lacks homology to any other gene.

[0091] Two independent NOVX siRNA duplexes can be used to knock-down a target NOVX gene. This helps to control for specificity of the silencing effect. In addition, expression of two independent genes can be simultaneously knocked down by using equal concentrations of different NOVX siRNA duplexes, e.g., a NOVX siRNA and an siRNA for a regulator of a NOVX gene or polypeptide. Availability of siRNA-associating proteins is believed to be more limiting than target mRNA accessibility.

[0092] A targeted NOVX region is typically a sequence of two adenines (AA) and two thymidines (TT) divided by a spacer region of nineteen (N19) residues (e.g., AA(N19)TT). A desirable spacer region has a G/C-content of approximately 30% to 70%, and more preferably of about 50%. If the sequence AA(N19)TT is not present in the target sequence, an alternative target region would be AA(N21). The sequence of the NOVX sense siRNA corresponds to (N19)TT or N21, respectively. In the latter case, conversion of the 3′ end of the sense siRNA to TT can be performed if such a sequence does not naturally occur in the NOVX polynucleotide. The rationale for this sequence conversion is to generate a symmetric duplex with respect to the sequence composition of the sense and antisense 3′ overhangs. Symmetric 3′ overhangs may help to ensure that the siRNPs are formed with approximately equal ratios of sense and antisense target RNA-cleaving siRNPs. See, e.g., Elbashir, Lendeckel and Tuschl (2001). Genes & Dev. 15: 188-200, incorporated by reference herein in its entirely. The modification of the overhang of the sense sequence of the siRNA duplex is not expected to affect targeted mRNA recognition, as the antisense siRNA strand guides target recognition.

[0093] Alternatively, if the NOVX target mRNA does not contain a suitable AA(N21) sequence, one may search for the sequence NA(N21). Further, the sequence of the sense strand and antisense strand may still be synthesized as 5′ (N19)TT, as it is believed that the sequence of the 3′-most nucleotide of the antisense siRNA does not contribute to specificity. Unlike antisense or ribozyme technology, the secondary structure of the target mRNA does not appear to have a strong effect on silencing. See, Harborth, et al. (2001) J. Cell Science 114: 4557-4565, incorporated by reference in its entirety.

[0094] Transfection of NOVX siRNA duplexes can be achieved using standard nucleic acid transfection methods, for example, OLIGOFECTAMINE Reagent (commercially available from Invitrogen). An assay for NOVX gene silencing is generally performed approximately 2 days after transfection. No NOVX gene silencing has been observed in the absence of transfection reagent, allowing for a comparative analysis of the wild-type and silenced NOVX phenotypes. In a specific embodiment, for one well of a 24-well plate, approximately 0.84 μg of the siRNA duplex is generally sufficient. Cells are typically seeded the previous day, and are transfected at about 50% confluence. The choice of cell culture media and conditions are routine to those of skill in the art, and will vary with the choice of cell type. The efficiency of transfection may depend on the cell type, but also on the passage number and the confluency of the cells. The time and the manner of formation of siRNA-liposome complexes (e.g., inversion versus vortexing) are also critical. Low transfection efficiencies are the most frequent cause of unsuccessful NOVX silencing. The efficiency of transfection needs to be carefully examined for each new cell line to be used. Preferred cell are derived from a mammal, more preferably from a rodent such as a rat or mouse, and most preferably from a human. Where used for therapeutic treatment, the cells are preferentially autologous, although non-autologous cell sources are also contemplated as within the scope of the present invention.

[0095] For a control experiment, transfection of 0.84 μg single-stranded sense NOVX siRNA will have no effect on NOVX silencing, and 0.84 μg antisense siRNA has a weak silencing effect when compared to 0.84 μg of duplex siRNAs. Control experiments again allow for a comparative analysis of the wild-type and silenced NOVX phenotypes. To control for transfection efficiency, targeting of common proteins is typically performed, for example targeting of lamin A/C or transfection of a CMV-driven EGFP-expression plasmid (e.g., commercially available from Clontech). In the above example, a determination of the fraction of lamin A/C knockdown in cells is determined the next day by such techniques as immunofluorescence, Western blot, Northern blot or other similar assays for protein expression or gene expression. Lamin A/C monoclonal antibodies may be obtained from Santa Cruz Biotechnology.

[0096] Depending on the abundance and the half life (or turnover) of the targeted NOVX polynucleotide in a cell, a knock-down phenotype may become apparent after 1 to 3 days, or even later. In cases where no NOVX knock-down phenotype is observed, depletion of the NOVX polynucleotide may be observed by immunofluorescence or Western blotting. If the NOVX polynucleotide is still abundant after 3 days, cells need to be split and transferred to a fresh 24-well plate for re-transfection. If no knock-down of the targeted protein is observed, it may be desirable to analyze whether the target mRNA (NOVX or a NOVX upstream or downstream gene) was effectively destroyed by the transfected siRNA duplex. Two days after transfection, total RNA is prepared, reverse transcribed using a target-specific primer, and PCR-amplified with a primer pair covering at least one exon-exon junction in order to control for amplification of pre-mRNAs. RT/PCR of a non-targeted mRNA is also needed as control. Effective depletion of the mRNA yet undetectable reduction of target protein may indicate that a large reservoir of stable NOVX protein may exist in the cell. Multiple transfection in sufficiently long intervals may be necessary until the target protein is finally depleted to a point where a phenotype may become apparent. If multiple transfection steps are required, cells are split 2 to 3 days after transfection. The cells may be transfected immediately after splitting.

[0097] An inventive therapeutic method of the invention contemplates administering a NOVX siRNA construct as therapy to compensate for increased or aberrant NOVX expression or activity. The NOVX ribopolynucleotide is obtained and processed into siRNA fragments, or a NOVX siRNA is synthesized, as described above. The NOVX siRNA is administered to cells or tissues using known nucleic acid transfection techniques, as described above. A NOVX siRNA specific for a NOVX gene will decrease or knockdown NOVX transcription products, which will lead to reduced NOVX polypeptide production, resulting in reduced NOVX polypeptide activity in the cells or tissues.

[0098] The present invention also encompasses a method of treating a disease or condition associated with the presence of a NOVX protein in an individual comprising administering to the individual an RNAi construct that targets the mRNA of the protein (the mRNA that encodes the protein) for degradation. A specific RNAi construct includes a siRNA or a double stranded gene transcript that is processed into siRNAs. Upon treatment, the target protein is not produced or is not produced to the extent it would be in the absence of the treatment.

[0099] Where the NOVX gene function is not correlated with a known phenotype, a control sample of cells or tissues from healthy individuals provides a reference standard for determining NOVX expression levels. Expression levels are detected using the assays described, e.g., RT-PCR, Northern blotting, Western blotting, ELISA, and the like. A subject sample of cells or tissues is taken from a mammal, preferably a human subject, suffering from a disease state. The NOVX ribopolynucleotide is used to produce siRNA constructs, that are specific for the NOVX gene product. These cells or tissues are treated by administering NOVX siRNA's to the cells or tissues by methods described for the transfection of nucleic acids into a cell or tissue, and a change in NOVX polypeptide or polynucleotide expression is observed in the subject sample relative to the control sample, using the assays described. This NOVX gene knockdown approach provides a rapid method for determination of a NOVX minus (NOVX⁻) phenotype in the treated subject sample. The NOVX⁻ phenotype observed in the treated subject sample thus serves as a marker for monitoring the course of a disease state during treatment.

[0100] In specific embodiments, a NOVX siRNA is used in therapy. Methods for the generation and use of a NOVX siRNA are known to those skilled in the art. Example techniques are provided below.

[0101] Production of RNAs

[0102] Sense RNA (ssRNA) and antisense RNA (asRNA) of NOVX are produced using known methods such as transcription in RNA expression vectors. In the initial experiments, the sense and antisense RNA are about 500 bases in length each. The produced ssRNA and asRNA (0.5 μM) in 10 mM Tris-HCl (pH 7.5) with 20 mM NaCl were heated to 95° C. for 1 min then cooled and annealed at room temperature for 12 to 16 h. The RNAs are precipitated and resuspended in lysis buffer (below). To monitor annealing, RNAs are electrophoresed in a 2% agarose gel in TBE buffer and stained with ethidium bromide. See, e.g., Sambrook et al., Molecular Cloning. Cold Spring Harbor Laboratory Press, Plainview, N.Y. (1989).

[0103] Lysate Preparation

[0104] Untreated rabbit reticulocyte lysate (Ambion) are assembled according to the manufacturer's directions. dsRNA is incubated in the lysate at 30° C. for 10 min prior to the addition of mRNAs. Then NOVX mRNAs are added and the incubation continued for an additional 60 min. The molar ratio of double stranded RNA and mRNA is about 200:1. The NOVX mRNA is radiolabeled (using known techniques) and its stability is monitored by gel electrophoresis.

[0105] In a parallel experiment made with the same conditions, the double stranded RNA is internally radiolabeled with a ³²P-ATP. Reactions are stopped by the addition of 2×-proteinase-K buffer and deproteinized as described previously (Tuschl et al., Genes Dev., 13:3191-3197 (1999)). Products are analyzed by electrophoresis in 15% or 18% polyacrylamide sequencing gels using appropriate RNA standards. By monitoring the gels for radioactivity, the natural production of 10 to 25 nt RNAs from the double stranded RNA can be determined.

[0106] The band of double stranded RNA, about 21-23 bps, is eluded. The efficacy of these 21-23 mers for suppressing NOVX transcription is assayed in vitro using the same rabbit reticulocyte assay described above using 50 nanomolar of double stranded 21-23 mer for each assay. The sequence of these 21-23 mers is then determined using standard nucleic acid sequencing techniques.

[0107] RNA Preparation

[0108] 21 nt RNAs, based on the sequence determined above, are chemically synthesized using Expedite RNA phosphoramidites and thymidine phosphoramidite (Proligo, Germany). Synthetic oligonucleotides are deprotected and gel-purified (Elbashir, Lendeckel, & Tuschl, Genes & Dev. 15, 188-200 (2001)), followed by Sep-Pak C18 cartridge (Waters, Milford, Mass., USA) purification (Tuschl, et al., Biochemistry, 32:11658-11668 (1993)).

[0109] These RNAs (20 μM) single strands are incubated in annealing buffer (100 mM potassium acetate, 30 mM HEPES-KOH at pH 7.4, 2 mM magnesium acetate) for 1 min at 90° C. followed by 1 h at 37° C.

[0110] Cell Culture

[0111] A cell culture known in the art to regularly express NOVX is propagated using standard conditions. 24 hours before transfection, at approx. 80% confluency, the cells are trypsinized and diluted 1:5 with fresh medium without antibiotics (1-3×105 cells/ml) and transferred to 24-well plates (500 ml/well). Transfection is performed using a commercially available lipofection kit and NOVX expression is monitored using standard techniques with positive and negative control. A positive control is cells that naturally express NOVX while a negative control is cells that do not express NOVX. Base-paired 21 and 22 nt siRNAs with overhanging 3′ ends mediate efficient sequence-specific mRNA degradation in lysates and in cell culture. Different concentrations of siRNAs are used. An efficient concentration for suppression in vitro in mammalian culture is between 25 nM to 100 nM final concentration. This indicates that siRNAs are effective at concentrations that are several orders of magnitude below the concentrations applied in conventional antisense or ribozyme gene targeting experiments.

[0112] The above method provides a way both for the deduction of NOVX siRNA sequence and the use of such siRNA for in vitro suppression. In vivo suppression may be performed using the same siRNA using well known in-vivo transfection or gene therapy transfection techniques.

Antisense Nucleic Acids

[0113] Another aspect of the invention pertains to isolated antisense nucleic acid molecules that are hybridizable to or complementary to the nucleic acid molecule comprising the nucleotide sequence of SEQ ID NO:2n−1, wherein n is an integer between 1 and 566, or fragments, analogs or derivatives thereof. An “antisense” nucleic acid comprises a nucleotide sequence that is complementary to a “sense” nucleic acid encoding a protein (e.g., complementary to the coding strand of a double-stranded cDNA molecule or complementary to an mRNA sequence). In specific aspects, antisense nucleic acid molecules are provided that comprise a sequence complementary to at least about 10, 25, 50, 100, 250 or 500 nucleotides or an entire NOVX coding strand, or to only a portion thereof. Nucleic acid molecules encoding fragments, homologs, derivatives and analogs of a NOVX protein of SEQ ID NO:2n, wherein n is an integer between 1 and 566, or antisense nucleic acids complementary to a NOVX nucleic acid sequence of SEQ ID NO:2n−1, wherein n is an integer between 1 and 566, are additionally provided.

[0114] In one embodiment, an antisense nucleic acid molecule is antisense to a “coding region” of the coding strand of a nucleotide sequence encoding a NOVX protein. The term “coding region” refers to the region of the nucleotide sequence comprising codons which are translated into amino acid residues. In another embodiment, the antisense nucleic acid molecule is antisense to a “noncoding region” of the coding strand of a nucleotide sequence encoding the NOVX protein. The term “noncoding region” refers to 5′ and 3′ sequences that flank the coding region that are not translated into amino acids (i.e., also referred to as 5′ and 3′ untranslated regions).

[0115] Given the coding strand sequences encoding the NOVX protein disclosed herein, antisense nucleic acids of the invention can be designed according to the rules of Watson and Crick or Hoogsteen base pairing. The antisense nucleic acid molecule can be complementary to the entire coding region of NOVX mRNA, but more preferably is an oligonucleotide that is antisense to only a portion of the coding or noncoding region of NOVX mRNA. For example, the antisense oligonucleotide can be complementary to the region surrounding the translation start site of NOVX mRNA. An antisense oligonucleotide can be, for example, about 5, 10, 15, 20, 25, 30, 35, 40, 45 or 50 nucleotides in length. An antisense nucleic acid of the invention can be constructed using chemical synthesis or enzymatic ligation reactions using procedures known in the art. For example, an antisense nucleic acid (e.g., an antisense oligonucleotide) can be chemically synthesized using naturally-occurring nucleotides or variously modified nucleotides designed to increase the biological stability of the molecules or to increase the physical stability of the duplex formed between the antisense and sense nucleic acids (e.g., phosphorothioate derivatives and acridine substituted nucleotides can be used).

[0116] Examples of modified nucleotides that can be used to generate the antisense nucleic acid include: 5-fluorouracil, 5-bromouracil, 5-chlorouracil, 5-iodouracil, hypoxanthine, xanthine, 4-acetylcytosine, 5-carboxymethylaminomethyl-2-thiouridine, 5-(carboxyhydroxylmethyl) uracil, 5-carboxymethylaminomethyluracil, dihydrouracil, beta-D-galactosylqueosine, inosine, N6-isopentenyladenine, 1-methylguanine, 1-methylinosine, 2,2-dimethylguanine, 2-methyladenine, 2-methylguanine, 5-methoxyuracil, 3-methylcytosine, 5-methylcytosine, N6-adenine, 7-methylguanine, 5-methylaminomethyluracil, 5-methoxyaminomethyl-2-thiouracil, 2-thiouracil, 4-thiouracil, beta-D-mannosylqueosine, 5′-methoxycarboxymethyluracil, 2-methylthio-N-6-isopentenyladenine, uracil-5-oxyacetic acid (v), wybutoxosine, pseudouracil, queosine, 2-thiocytosine, 5-methyl-2-thiouracil, 5-methyluracil, uracil-5-oxyacetic acid methylester, uracil-5-oxyacetic acid (v), 5-methyl-2-thiouracil, 3-(3-amino-3-N-2-carboxypropyl) uracil, (acp3)w, and 2,6-diaminopurine. Alternatively, the antisense nucleic acid can be produced biologically using an expression vector into which a nucleic acid has been subcloned in an antisense orientation (i.e., RNA transcribed from the inserted nucleic acid will be of an antisense orientation to a target nucleic acid of interest, described further in the following subsection).

[0117] The antisense nucleic acid molecules of the invention are typically administered to a subject or generated in situ such that they hybridize with or bind to cellular mRNA and/or genomic DNA encoding a NOVX protein to thereby inhibit expression of the protein (e.g., by inhibiting transcription and/or translation). The hybridization can be by conventional nucleotide complementarity to form a stable duplex, or, for example, in the case of an antisense nucleic acid molecule that binds to DNA duplexes, through specific interactions in the major groove of the double helix. An example of a route of administration of antisense nucleic acid molecules of the invention includes direct injection at a tissue site. Alternatively, antisense nucleic acid molecules can be modified to target selected cells and then administered systemically. For example, for systemic administration, antisense molecules can be modified such that they specifically bind to receptors or antigens expressed on a selected cell surface (e.g., by linking the antisense nucleic acid molecules to peptides or antibodies that bind to cell surface receptors or antigens). The antisense nucleic acid molecules can also be delivered to cells using the vectors described herein. To achieve sufficient nucleic acid molecules, vector constructs in which the antisense nucleic acid molecule is placed under the control of a strong pol II or pol III promoter are preferred.

[0118] In yet another embodiment, the antisense nucleic acid molecule of the invention is an α-anomeric nucleic acid molecule. An α-anomeric nucleic acid molecule forms specific double-stranded hybrids with complementary RNA in which, contrary to the usual β-units, the strands run parallel to each other. See, e.g., Gaultier, et al., 1987. Nucl. Acids Res. 15: 6625-6641. The antisense nucleic acid molecule can also comprise a 2′-o-methylribonucleotide (See, e.g., Inoue, et al. 1987. Nucl. Acids Res. 15: 6131-6148) or a chimeric RNA-DNA analogue (See, e.g., Inoue, et al., 1987. FEBS Lett. 215: 327-330.

[0119] Ribozymes and PNA Moieties

[0120] Nucleic acid modifications include, by way of non-limiting example, modified bases, and nucleic acids whose sugar phosphate backbones are modified or derivatized. These modifications are carried out at least in part to enhance the chemical stability of the modified nucleic acid, such that they may be used, for example, as antisense binding nucleic acids in therapeutic applications in a subject.

[0121] In one embodiment, an antisense nucleic acid of the invention is a ribozyme. Ribozymes are catalytic RNA molecules with ribonuclease activity that are capable of cleaving a single-stranded nucleic acid, such as an mRNA, to which they have a complementary region. Thus, ribozymes (e.g., hammerhead ribozymes as described in Haselhoff and Gerlach 1988. Nature 334: 585-591) can be used to catalytically cleave NOVX mRNA transcripts to thereby inhibit translation of NOVX mRNA. A ribozyme having specificity for a NOVX-encoding nucleic acid can be designed based upon the nucleotide sequence of a NOVX cDNA disclosed herein (i.e., SEQ ID NO:2n−1, wherein n is an integer between 1 and 566). For example, a derivative of a Tetrahymena L-19 IVS RNA can be constructed in which the nucleotide sequence of the active site is complementary to the nucleotide sequence to be cleaved in a NOVX-encoding mRNA. See, e.g., U.S. Pat. No. 4,987,071 to Cech, et al. and U.S. Pat. No. 5,116,742 to Cech, et al. NOVX mRNA can also be used to select a catalytic RNA having a specific ribonuclease activity from a pool of RNA molecules. See, e.g., Bartel et al., (1993) Science 261:1411-1418.

[0122] Alternatively, NOVX gene expression can be inhibited by targeting nucleotide sequences complementary to the regulatory region of the NOVX nucleic acid (e.g., the NOVX promoter and/or enhancers) to form triple helical structures that prevent transcription of the NOVX gene in target cells. See, e.g., Helene, 1991. Anticancer Drug Des. 6: 569-84; Helene, et al. 1992. Ann. N.Y. Acad. Sci. 660: 27-36; Maher, 1992. Bioassays 14: 807-15.

[0123] In various embodiments, the NOVX nucleic acids can be modified at the base moiety, sugar moiety or phosphate backbone to improve, e.g., the stability, hybridization, or solubility of the molecule. For example, the deoxyribose phosphate backbone of the nucleic acids can be modified to generate peptide nucleic acids. See, e.g., Hyrup, et al., 1996. Bioorg Med Chem 4: 5-23. As used herein, the terms “peptide nucleic acids” or “PNAs” refer to nucleic acid mimics (e.g., DNA mimics) in which the deoxyribose phosphate backbone is replaced by a pseudopeptide backbone and only the four natural nucleotide bases are retained. The neutral backbone of PNAs has been shown to allow for specific hybridization to DNA and RNA under conditions of low ionic strength. The synthesis of PNA oligomer can be performed using standard solid phase peptide synthesis protocols as described in Hyrup, et al., 1996. supra; Perry-O'Keefe, et al., 1996. Proc. Natl. Acad. Sci. USA 93: 14670-14675.

[0124] PNAs of NOVX can be used in therapeutic and diagnostic applications. For example, PNAs can be used as antisense or antigene agents for sequence-specific modulation of gene expression by, e.g., inducing transcription or translation arrest or inhibiting replication. PNAs of NOVX can also be used, for example, in the analysis of single base pair mutations in a gene (e.g., PNA directed PCR clamping; as artificial restriction enzymes when used in combination with other enzymes, e.g., S₁ nucleases (See, Hyrup, et al., 1996.supra); or as probes or primers for DNA sequence and hybridization (See, Hyrup, et al., 1996, supra; Perry-O'Keefe, et al., 1996. supra).

[0125] In another embodiment, PNAs of NOVX can be modified, e.g., to enhance their stability or cellular uptake, by attaching lipophilic or other helper groups to PNA, by the formation of PNA-DNA chimeras, or by the use of liposomes or other techniques of drug delivery known in the art. For example, PNA-DNA chimeras of NOVX can be generated that may combine the advantageous properties of PNA and DNA. Such chimeras allow DNA recognition enzymes (e.g., RNase H and DNA polymerases) to interact with the DNA portion while the PNA portion would provide high binding affinity and specificity. PNA-DNA chimeras can be linked using linkers of appropriate lengths selected in terms of base stacking, number of bonds between the nucleotide bases, and orientation (see, Hyrup, et al., 1996. supra). The synthesis of PNA-DNA chimeras can be performed as described in Hyrup, et al., 1996. supra and Finn, et al., 1996. Nucl Acids Res 24: 3357-3363. For example, a DNA chain can be synthesized on a solid support using standard phosphoramidite coupling chemistry, and modified nucleoside analogs, e.g., 5′-(4-methoxytrityl)-amino-5′-deoxy-thymidine phosphoramidite, can be used between the PNA and the 5′ end of DNA. See, e.g., Mag, et al., 1989. Nucl Acid Res 17: 5973-5988. PNA monomers are then coupled in a stepwise manner to produce a chimeric molecule with a 5′ PNA segment and a 3′ DNA segment. See, e.g., Finn, et al., 1996. supra. Alternatively, chimeric molecules can be synthesized with a 5′ DNA segment and a 3′ PNA segment. See, e.g., Petersen, et al., 1975. Bioorg. Med. Chem. Lett. 5: 1119-11124.

[0126] In other embodiments, the oligonucleotide may include other appended groups such as peptides (e.g., for targeting host cell receptors in vivo), or agents facilitating transport across the cell membrane (see, e.g., Letsinger, et al., 1989. Proc. Natl. Acad. Sci. U.S.A. 86: 6553-6556; Lemaitre, et al., 1987. Proc. Natl. Acad. Sci. 84: 648-652; PCT Publication No. WO88/09810) or the blood-brain barrier (see, e.g., PCT Publication No. WO 89/10134). In addition, oligonucleotides can be modified with hybridization-triggered cleavage agents (see, e.g., Krol, et al., 1988. BioTechniques 6:958-976) or intercalating agents (see, e.g., Zon, 1988. Pharm. Res. 5: 539-549). To this end, the oligonucleotide may be conjugated to another molecule, e.g., a peptide, a hybridization triggered cross-linking agent, a transport agent, a hybridization-triggered cleavage agent, and the like.

NOVX Polypeptides

[0127] A polypeptide according to the invention includes a polypeptide including the amino acid sequence of NOVX polypeptides whose sequences are provided in any one of SEQ ID NO:2n, wherein n is an integer between 1 and 566. The invention also includes a mutant or variant protein any of whose residues may be changed from the corresponding residues shown in any one of SEQ ID NO:2n, wherein n is an integer between 1 and 566, while still encoding a protein that maintains its NOVX activities and physiological functions, or a functional fragment thereof.

[0128] In general, a NOVX variant that preserves NOVX-like function includes any variant in which residues at a particular position in the sequence have been substituted by other amino acids, and further include the possibility of inserting an additional residue or residues between two residues of the parent protein as well as the possibility of deleting one or more residues from the parent sequence. Any amino acid substitution, insertion, or deletion is encompassed by the invention. In favorable circumstances, the substitution is a conservative substitution as defined above.

[0129] One aspect of the invention pertains to isolated NOVX proteins, and biologically-active portions thereof, or derivatives, fragments, analogs or homologs thereof. Also provided are polypeptide fragments suitable for use as immunogens to raise anti-NOVX antibodies. In one embodiment, native NOVX proteins can be isolated from cells or tissue sources by an appropriate purification scheme using standard protein purification techniques. In another embodiment, NOVX proteins are produced by recombinant DNA techniques. Alternative to recombinant expression, a NOVX protein or polypeptide can be synthesized chemically using standard peptide synthesis techniques.

[0130] An “isolated” or “purified” polypeptide or protein or biologically-active portion thereof is substantially free of cellular material or other contaminating proteins from the cell or tissue source from which the NOVX protein is derived, or substantially free from chemical precursors or other chemicals when chemically synthesized. The language “substantially free of cellular material” includes preparations of NOVX proteins in which the protein is separated from cellular components of the cells from which it is isolated or recombinantly-produced. In one embodiment, the language “substantially free of cellular material” includes preparations of NOVX proteins having less than about 30% (by dry weight) of non-NOVX proteins (also referred to herein as a “contaminating protein”), more preferably less than about 20% of non-NOVX proteins, still more preferably less than about 10% of non-NOVX proteins, and most preferably less than about 5% of non-NOVX proteins. When the NOVX protein or biologically-active portion thereof is recombinantly-produced, it is also preferably substantially free of culture medium, i.e., culture medium represents less than about 20%, more preferably less than about 10%, and most preferably less than about 5% of the volume of the NOVX protein preparation.

[0131] The language “substantially free of chemical precursors or other chemicals” includes preparations of NOVX proteins in which the protein is separated from chemical precursors or other chemicals that are involved in the synthesis of the protein. In one embodiment, the language “substantially free of chemical precursors or other chemicals” includes preparations of NOVX proteins having less than about 30% (by dry weight) of chemical precursors or non-NOVX chemicals, more preferably less than about 20% chemical precursors or non-NOVX chemicals, still more preferably less than about 10% chemical precursors or non-NOVX chemicals, and most preferably less than about 5% chemical precursors or non-NOVX chemicals.

[0132] Biologically-active portions of NOVX proteins include peptides comprising amino acid sequences sufficiently homologous to or derived from the amino acid sequences of the NOVX proteins (e.g., the amino acid sequence of SEQ ID NO:2n, wherein n is an integer between 1 and 566) that include fewer amino acids than the full-length NOVX proteins, and exhibit at least one activity of a NOVX protein. Typically, biologically-active portions comprise a domain or motif with at least one activity of the NOVX protein. A biologically-active portion of a NOVX protein can be a polypeptide which is, for example, 10, 25, 50, 100 or more amino acid residues in length.

[0133] Moreover, other biologically-active portions, in which other regions of the protein are deleted, can be prepared by recombinant techniques and evaluated for one or more of the functional activities of a native NOVX protein.

[0134] In an embodiment, the NOVX protein has an amino acid sequence of SEQ ID NO:2n, wherein n is an integer between 1 and 566. In other embodiments, the NOVX protein is substantially homologous to SEQ ID NO:2n, wherein n is an integer between 1 and 566, and retains the functional activity of the protein of SEQ ID NO:2n, wherein n is an integer between 1 and 566, yet differs in amino acid sequence due to natural allelic variation or mutagenesis, as described in detail, below. Accordingly, in another embodiment, the NOVX protein is a protein that comprises an amino acid sequence at least about 45% homologous to the amino acid sequence of SEQ ID NO:2n, wherein n is an integer between 1 and 566, and retains the functional activity of the NOVX proteins of SEQ ID NO:2n, wherein n is an integer between 1 and 566.

[0135] Determining Homology Between Two or More Sequences

[0136] To determine the percent homology of two amino acid sequences or of two nucleic acids, the sequences are aligned for optimal comparison purposes (e.g., gaps can be introduced in the sequence of a first amino acid or nucleic acid sequence for optimal alignment with a second amino or nucleic acid sequence). The amino acid residues or nucleotides at corresponding amino acid positions or nucleotide positions are then compared. When a position in the first sequence is occupied by the same amino acid residue or nucleotide as the corresponding position in the second sequence, then the molecules are homologous at that position (i.e., as used herein amino acid or nucleic acid “homology” is equivalent to amino acid or nucleic acid “identity”).

[0137] The nucleic acid sequence homology may be determined as the degree of identity between two sequences. The homology may be determined using computer programs known in the art, such as GAP software provided in the GCG program package. See, Needleman and Wunsch, 1970. J Mol Biol 48: 443-453. Using GCG GAP software with the following settings for nucleic acid sequence comparison: GAP creation penalty of 5.0 and GAP extension penalty of 0.3, the coding region of the analogous nucleic acid sequences referred to above exhibits a degree of identity preferably of at least 70%, 75%, 80%, 85%, 90%, 95%, 98%, or 99%, with the CDS (encoding) part of the DNA sequence of SEQ ID NO:2n−1, wherein n is an integer between 1 and 566.

[0138] The term “sequence identity” refers to the degree to which two polynucleotide or polypeptide sequences are identical on a residue-by-residue basis over a particular region of comparison. The term “percentage of sequence identity” is calculated by comparing two optimally aligned sequences over that region of comparison, determining the number of positions at which the identical nucleic acid base (e.g., A, T, C, G, U, or I, in the case of nucleic acids) occurs in both sequences to yield the number of matched positions, dividing the number of matched positions by the total number of positions in the region of comparison (i.e., the window size), and multiplying the result by 100 to yield the percentage of sequence identity. The term “substantial identity” as used herein denotes a characteristic of a polynucleotide sequence, wherein the polynucleotide comprises a sequence that has at least 80 percent sequence identity, preferably at least 85 percent identity and often 90 to 95 percent sequence identity, more usually at least 99 percent sequence identity as compared to a reference sequence over a comparison region.

[0139] Chimeric and Fusion Proteins

[0140] The invention also provides NOVX chimeric or fusion proteins. As used herein, a NOVX “chimeric protein” or “fusion protein” comprises a NOVX polypeptide operatively-linked to a non-NOVX polypeptide. An “NOVX polypeptide” refers to a polypeptide having an amino acid sequence corresponding to a NOVX protein of SEQ ID NO:2n, wherein n is an integer between 1 and 566, whereas a “non-NOVX polypeptide” refers to a polypeptide having an amino acid sequence corresponding to a protein that is not substantially homologous to the NOVX protein, e.g., a protein that is different from the NOVX protein and that is derived from the same or a different organism. Within a NOVX fusion protein the NOVX polypeptide can correspond to all or a portion of a NOVX protein. In one embodiment, a NOVX fusion protein comprises at least one biologically-active portion of a NOVX protein. In another embodiment, a NOVX fusion protein comprises at least two biologically-active portions of a NOVX protein. In yet another embodiment, a NOVX fusion protein comprises at least three biologically-active portions of a NOVX protein. Within the fusion protein, the term “operatively-linked” is intended to indicate that the NOVX polypeptide and the non-NOVX polypeptide are fused in-frame with one another. The non-NOVX polypeptide can be fused to the N-terminus or C-terminus of the NOVX polypeptide.

[0141] In one embodiment, the fusion protein is a GST-NOVX fusion protein in which the NOVX sequences are fused to the C-terminus of the GST (glutathione S-transferase) sequences. Such fusion proteins can facilitate the purification of recombinant NOVX polypeptides.

[0142] In another embodiment, the fusion protein is a NOVX protein containing a heterologous signal sequence at its N-terminus. In certain host cells (e.g., mammalian host cells), expression and/or secretion of NOVX can be increased through use of a heterologous signal sequence.

[0143] In yet another embodiment, the fusion protein is a NOVX-immunoglobulin fusion protein in which the NOVX sequences are fused to sequences derived from a member of the immunoglobulin protein family. The NOVX-immunoglobulin fusion proteins of the invention can be incorporated into pharmaceutical compositions and administered to a subject to inhibit an interaction between a NOVX ligand and a NOVX protein on the surface of a cell, to thereby suppress NOVX-mediated signal transduction in vivo. The NOVX-immunoglobulin fusion proteins can be used to affect the bioavailability of a NOVX cognate ligand. Inhibition of the NOVX ligand/NOVX interaction may be useful therapeutically for both the treatment of proliferative and differentiative disorders, as well as modulating (e.g., promoting or inhibiting) cell survival. Moreover, the NOVX-immunoglobulin fusion proteins of the invention can be used as immunogens to produce anti-NOVX antibodies in a subject, to purify NOVX ligands, and in screening assays to identify molecules that inhibit the interaction of NOVX with a NOVX ligand.

[0144] A NOVX chimeric or fusion protein of the invention can be produced by standard recombinant DNA techniques. For example, DNA fragments coding for the different polypeptide sequences are ligated together in-frame in accordance with conventional techniques, e.g., by employing blunt-ended or stagger-ended termini for ligation, restriction enzyme digestion to provide for appropriate termini, filling-in of cohesive ends as appropriate, alkaline phosphatase treatment to avoid undesirable joining, and enzymatic ligation. In another embodiment, the fusion gene can be synthesized by conventional techniques including automated DNA synthesizers. Alternatively, PCR amplification of gene fragments can be carried out using anchor primers that give rise to complementary overhangs between two consecutive gene fragments that can subsequently be annealed and reamplified to generate a chimeric gene sequence (see, e.g., Ausubel, et al. (eds.) CURRENT PROTOCOLS IN MOLECULAR BIOLOGY, John Wiley & Sons, 1992). Moreover, many expression vectors are commercially available that already encode a fusion moiety (e.g., a GST polypeptide). A NOVX-encoding nucleic acid can be cloned into such an expression vector such that the fusion moiety is linked in-frame to the NOVX protein.

[0145] NOVX Agonists and Antagonists

[0146] The invention also pertains to variants of the NOVX proteins that function as either NOVX agonists (i.e., mimetics) or as NOVX antagonists. Variants of the NOVX protein can be generated by mutagenesis (e.g., discrete point mutation or truncation of the NOVX protein). An agonist of the NOVX protein can retain substantially the same, or a subset of, the biological activities of the naturally occurring form of the NOVX protein. An antagonist of the NOVX protein can inhibit one or more of the activities of the naturally occurring form of the NOVX protein by, for example, competitively binding to a downstream or upstream member of a cellular signaling cascade which includes the NOVX protein. Thus, specific biological effects can be elicited by treatment with a variant of limited function. In one embodiment, treatment of a subject with a variant having a subset of the biological activities of the naturally occurring form of the protein has fewer side effects in a subject relative to treatment with the naturally occurring form of the NOVX proteins.

[0147] Variants of the NOVX proteins that function as either NOVX agonists (i.e., mimetics) or as NOVX antagonists can be identified by screening combinatorial libraries of mutants (e.g., truncation mutants) of the NOVX proteins for NOVX protein agonist or antagonist activity. In one embodiment, a variegated library of NOVX variants is generated by combinatorial mutagenesis at the nucleic acid level and is encoded by a variegated gene library. A variegated library of NOVX variants can be produced by, for example, enzymatically ligating a mixture of synthetic oligonucleotides into gene sequences such that a degenerate set of potential NOVX sequences is expressible as individual polypeptides, or alternatively, as a set of larger fusion proteins. (e.g., for phage display) containing the set of NOVX sequences therein. There are a variety of methods which can be used to produce libraries of potential NOVX variants from a degenerate oligonucleotide sequence. Chemical synthesis of a degenerate gene sequence can be performed in an automatic DNA synthesizer, and the synthetic gene then ligated into an appropriate expression vector. Use of a degenerate set of genes allows for the provision, in one mixture, of all of the sequences encoding the desired set of potential NOVX sequences. Methods for synthesizing degenerate oligonucleotides are well-known within the art. See, e.g., Narang, 1983. Tetrahedron 39: 3; Itakura, et al., 1984. Annu. Rev. Biochem. 53: 323; Itakura, et al., 1984. Science 198: 1056; Ike, et al., 1983. Nucl. Acids Res. 11: 477.

[0148] Polypeptide Libraries

[0149] In addition, libraries of fragments of the NOVX protein coding sequences can be used to generate a variegated population of NOVX fragments for screening and subsequent selection of variants of a NOVX protein. In one embodiment, a library of coding sequence fragments can be generated by treating a double stranded PCR fragment of a NOVX coding sequence with a nuclease under conditions wherein nicking occurs only about once per molecule, denaturing the double stranded DNA, renaturing the DNA to form double-stranded DNA that can include sense/antisense pairs from different nicked products, removing single stranded portions from reformed duplexes by treatment with S₁ nuclease, and ligating the resulting fragment library into an expression vector. By this method, expression libraries can be derived which encodes N-terminal and internal fragments of various sizes of the NOVX proteins.

[0150] Various techniques are known in the art for screening gene products of combinatorial libraries made by point mutations or truncation, and for screening cDNA libraries for gene products having a selected property. Such techniques are adaptable for rapid screening of the gene libraries generated by the combinatorial mutagenesis of NOVX proteins. The most widely used techniques, which are amenable to high throughput analysis, for screening large gene libraries typically include cloning the gene library into replicable expression vectors, transforming appropriate cells with the resulting library of vectors, and expressing the combinatorial genes under conditions in which detection of a desired activity facilitates isolation of the vector encoding the gene whose product was detected. Recursive ensemble mutagenesis (REM), a new technique that enhances the frequency of functional mutants in the libraries, can be used in combination with the screening assays to identify NOVX variants. See, e.g., Arkin and Yourvan, 1992. Proc. Natl. Acad. Sci. USA 89: 7811-7815; Delgrave, et al., 1993. Protein Engineering 6:327-331.

Anti-NOVX Antibodies

[0151] Included in the invention are antibodies to NOVX proteins, or fragments of NOVX proteins. The term “antibody” as used herein refers to immunoglobulin molecules and immunologically active portions of immunoglobulin (Ig) molecules, i.e., molecules that contain an antigen-binding site that specifically binds (immunoreacts with) an antigen. Such antibodies include, but are not limited to, polyclonal, monoclonal, chimeric, single chain, F_{ab}, F_{ab′} and F_{(ab′)2} fragments, and an F_{ab} expression library. In general, antibody molecules obtained from humans relates to any of the classes IgG, IgM, IgA, IgE and IgD, which differ from one another by the nature of the heavy chain present in the molecule. Certain classes have subclasses as well, such as IgG₁, IgG₂, and others. Furthermore, in humans, the light chain may be a kappa chain or a lambda chain. Reference herein to antibodies includes a reference to all such classes, subclasses and types of human antibody species.

[0152] An isolated protein of the invention intended to serve as an antigen, or a portion or fragment thereof, can be used as an immunogen to generate antibodies that immunospecifically bind the antigen, using standard techniques for polyclonal and monoclonal antibody preparation. The full-length protein can be used or, alternatively, the invention provides antigenic peptide fragments of the antigen for use as immunogens. An antigenic peptide fragment comprises at least 6 amino acid residues of the amino acid sequence of the full length protein, such as an amino acid sequence of SEQ ID NO:2n, wherein n is an integer between 1 and 566, and encompasses an epitope thereof such that an antibody raised against the peptide forms a specific immune complex with the full length protein or with any fragment that contains the epitope. Preferably, the antigenic peptide comprises at least 10 amino acid residues, or at least 15 amino acid residues, or at least 20 amino acid residues, or at least 30 amino acid residues. Preferred epitopes encompassed by the antigenic peptide are regions of the protein that are located on its surface; commonly these are hydrophilic regions.

[0153] In certain embodiments of the invention, at least one epitope encompassed by the antigenic peptide is a region of NOVX that is located on the surface of the protein, e.g., a hydrophilic region. A hydrophobicity analysis of the human NOVX protein sequence will indicate which regions of a NOVX polypeptide are particularly hydrophilic and, therefore, are likely to encode surface residues useful for targeting antibody production. As a means for targeting antibody production, hydropathy plots showing regions of hydrophilicity and hydrophobicity may be generated by any method well known in the art, including, for example, the Kyte Doolittle or the Hopp Woods methods, either with or without Fourier transformation. See, e.g., Hopp and Woods, 1981, Proc. Nat. Acad. Sci USA 78: 3824-3828; Kyte and Doolittle 1982, J. Mol. Biol. 157: 105-142, each incorporated herein by reference in their entirety. Antibodies that are specific for one or more domains within an antigenic protein, or derivatives, fragments, analogs or homologs thereof, are also provided herein.

[0154] The term “epitope” includes any protein determinant capable of specific binding to an immunoglobulin or T-cell receptor. Epitopic determinants usually consist of chemically active surface groupings of molecules such as amino acids or sugar side chains and usually have specific three-dimensional structural characteristics, as well as specific charge characteristics. A NOVX polypeptide or a fragment thereof comprises at least one antigenic epitope. An anti-NOVX antibody of the present invention is said to specifically bind to antigen NOVX when the equilibrium binding constant (K_{D}) is ≦1 μM, preferably ≦100 nM, more preferably ≦10 nM, and most preferably ≦100 pM to about 1 pM, as measured by assays such as radioligand binding assays or similar assays known to those skilled in the art.

[0155] A protein of the invention, or a derivative, fragment, analog, homolog or ortholog thereof, may be utilized as an immunogen in the generation of antibodies that immunospecifically bind these protein components.

[0156] Various procedures known within the art may be used for the production of polyclonal or monoclonal antibodies directed against a protein of the invention, or against derivatives, fragments, analogs homologs or orthologs thereof (see, for example, Antibodies: A Laboratory Manual, Harlow E, and Lane D, 1988, Cold Spring Harbor Laboratory Press, Cold Spring Harbor, N.Y., incorporated herein by reference). Some of these antibodies are discussed below.

[0157] Polyclonal Antibodies

[0158] For the production of polyclonal antibodies, various suitable host animals (e.g., rabbit, goat, mouse or other mammal) may be immunized by one or more injections with the native protein, a synthetic variant thereof, or a derivative of the foregoing. An appropriate immunogenic preparation can contain, for example, the naturally occurring immunogenic protein, a chemically synthesized polypeptide representing the immunogenic protein, or a recombinantly expressed immunogenic protein. Furthermore, the protein may be conjugated to a second protein known to be immunogenic in the mammal being immunized. Examples of such immunogenic proteins include but are not limited to keyhole limpet hemocyanin, serum albumin, bovine thyroglobulin, and soybean trypsin inhibitor. The preparation can further include an adjuvant. Various adjuvants used to increase the immunological response include, but are not limited to, Freund's (complete and incomplete), mineral gels (e.g., aluminum hydroxide), surface active substances (e.g., lysolecithin, pluronic polyols, polyanions, peptides, oil emulsions, dinitrophenol, etc.), adjuvants usable in humans such as Bacille Calmette-Guerin and Corynebacterium parvum, or similar immunostimulatory agents. Additional examples of adjuvants which can be employed include MPL-TDM adjuvant (monophosphoryl Lipid A, synthetic trehalose dicorynomycolate).

[0159] The polyclonal antibody molecules directed against the immunogenic protein can be isolated from the mammal (e.g., from the blood) and further purified by well known techniques, such as affinity chromatography using protein A or protein G, which provide primarily the IgG fraction of immune serum. Subsequently, or alternatively, the specific antigen that is the target of the immunoglobulin sought, or an epitope thereof, may be immobilized on a column to purify the immune specific antibody by immunoaffinity chromatography. Purification of immunoglobulins is discussed, for example, by D. Wilkinson (The Scientist, published by The Scientist, Inc., Philadelphia Pa., Vol. 14, No. 8 (Apr. 17, 2000), pp. 25-28).

[0160] Monoclonal Antibodies

[0161] The term “monoclonal antibody” (MAb) or “monoclonal antibody composition”, as used herein, refers to a population of antibody molecules that contain only one molecular species of antibody molecule consisting of a unique light chain gene product and a unique heavy chain gene product. In particular, the complementarity determining regions (CDRs) of the monoclonal antibody are identical in all the molecules of the population. MAbs thus contain an antigen binding site capable of immunoreacting with a particular epitope of the antigen characterized by a unique binding affinity for it.

[0162] Monoclonal antibodies can be prepared using hybridoma methods, such as those described by Kohler and Milstein, Nature, 256:495 (1975). In a hybridoma method, a mouse, hamster, or other appropriate host animal, is typically immunized with an immunizing agent to elicit lymphocytes that produce or are capable of producing antibodies that will specifically bind to the immunizing agent. Alternatively, the lymphocytes can be immunized in vitro.

[0163] The immunizing agent will typically include the protein antigen, a fragment thereof or a fusion protein thereof. Generally, either peripheral blood lymphocytes are used if cells of human origin are desired, or spleen cells or lymph node cells are used if non-human mammalian sources are desired. The lymphocytes are then fused with an immortalized cell line using a suitable fusing agent, such as polyethylene glycol, to form a hybridoma cell (Goding, MONOCLONAL ANTIBODIES: PRINCIPLES AND PRACTICE, Academic Press, (1986) pp. 59-103). Immortalized cell lines are usually transformed mammalian cells, particularly myeloma cells of rodent, bovine and human origin. Usually, rat or mouse myeloma cell lines are employed. The hybridoma cells can be cultured in a suitable culture medium that preferably contains one or more substances that inhibit the growth or survival of the unfused, immortalized cells. For example, if the parental cells lack the enzyme hypoxanthine guanine phosphoribosyl transferase (HGPRT or HPRT), the culture medium for the hybridomas typically will include hypoxanthine, aminopterin, and thymidine (“HAT medium”), which substances prevent the growth of HGPRT-deficient cells.

[0164] Preferred immortalized cell lines are those that fuse efficiently, support stable high level expression of antibody by the selected antibody-producing cells, and are sensitive to a medium such as HAT medium. More preferred immortalized cell lines are murine myeloma lines, which can be obtained, for instance, from the Salk Institute Cell Distribution Center, San Diego, Calif. and the American Type Culture Collection, Manassas, Va. Human myeloma and mouse-human heteromyeloma cell lines also have been described for the production of human monoclonal antibodies (Kozbor, J. Immunol., 133:3001 (1984); Brodeur et al., Monoclonal Antibody Production Techniques and Applications, Marcel Dekker, Inc., New York, (1987) pp. 51-63).

[0165] The culture medium in which the hybridoma cells are cultured can then be assayed for the presence of monoclonal antibodies directed against the antigen. Preferably, the binding specificity of monoclonal antibodies produced by the hybridoma cells' is determined by immunoprecipitation or by an in vitro binding assay, such as radioimmunoassay (RIA) or enzyme-linked immunoabsorbent assay (ELISA). Such techniques and assays are known in the art. The binding affinity of the monoclonal antibody can, for example, be determined by the Scatchard analysis of Munson and Pollard, Anal. Biochem., 107:220 (1980). It is an objective, especially important in therapeutic applications of monoclonal antibodies, to identify antibodies having a high degree of specificity and a high binding affinity for the target antigen.

[0166] After the desired hybridoma cells are identified, the clones can be subcloned by limiting dilution procedures and grown by standard methods (Goding, 1986). Suitable culture media for this purpose include, for example, Dulbecco's Modified Eagle's Medium and RPMI-1640 medium. Alternatively, the hybridoma cells can be grown in vivo as ascites in a mammal.

[0167] The monoclonal antibodies secreted by the subclones can be isolated or purified from the culture medium or ascites fluid by conventional immunoglobulin purification procedures such as, for example, protein A-Sepharose, hydroxylapatite chromatography, gel electrophoresis, dialysis, or affinity chromatography.

[0168] The monoclonal antibodies can also be made by recombinant DNA methods, such as those described in U.S. Pat. No. 4,816,567. DNA encoding the monoclonal antibodies of the invention can be readily isolated and sequenced using conventional procedures (e.g., by using oligonucleotide probes that are capable of binding specifically to genes encoding the heavy and light chains of murine antibodies). The hybridoma cells of the invention serve as a preferred source of such DNA. Once isolated, the DNA can be placed into expression vectors, which are then transfected into host cells such as simian COS cells, Chinese hamster ovary (CHO) cells, or myeloma cells that do not otherwise produce immunoglobulin protein, to obtain the synthesis of monoclonal antibodies in the recombinant host cells. The DNA also can be modified, for example, by substituting the coding sequence for human heavy and light chain constant domains in place of the homologous murine sequences (U.S. Pat. No. 4,816,567; Morrison, Nature 368, 812-13 (1994)) or by covalently joining to the immunoglobulin coding sequence all or part of the coding sequence for a non-immunoglobulin polypeptide. Such a non-immunoglobulin polypeptide can be substituted for the constant domains of an antibody of the invention, or can be substituted for the variable domains of one antigen-combining site of an antibody of the invention to create a chimeric bivalent antibody.

[0169] Humanized Antibodies

[0170] The antibodies directed against the protein antigens of the invention can further comprise humanized antibodies or human antibodies. These antibodies are suitable for administration to humans without engendering an immune response by the human against the administered immunoglobulin. Humanized forms of antibodies are chimeric immunoglobulins, immunoglobulin chains or fragments thereof (such as Fv, Fab, Fab′, F(ab′)₂ or other antigen-binding subsequences of antibodies) that are principally comprised of the sequence of a human immunoglobulin, and contain minimal sequence derived from a non-human immunoglobulin. Humanization can be performed following the method of Winter and co-workers (Jones et al., Nature, 321:522-525 (1986); Riechmann et al., Nature, 332:323-327 (1988); Verhoeyen et al., Science, 239:1534-1536 (1988)), by substituting rodent CDRs or CDR sequences for the corresponding sequences of a human antibody. (See also U.S. Pat. No. 5,225,539.) In some instances, Fv framework residues of the human immunoglobulin are replaced by corresponding non-human residues. Humanized antibodies can also comprise residues which are found neither in the recipient antibody nor in the imported CDR or framework sequences. In general, the humanized antibody will comprise substantially all of at least one, and typically two, variable domains, in which all or substantially all of the CDR regions correspond to those of a non-human immunoglobulin and all or substantially all of the framework regions are those of a human immunoglobulin consensus sequence. The humanized antibody optimally also will comprise at least a portion of an immunoglobulin constant region (Fc), typically that of a human immunoglobulin (Jones et al., 1986; Riechmann et al., 1988; and Presta, Curr. Op. Struct. Biol., 2:593-596 (1992)).

[0171] Human Antibodies

[0172] Fully human antibodies essentially relate to antibody molecules in which the entire sequence of both the light chain and the heavy chain, including the CDRs, arise from human genes. Such antibodies are termed “human antibodies”, or “fully human antibodies” herein. Human monoclonal antibodies can be prepared by the trioma technique; the human B-cell hybridoma technique (see Kozbor, et al., 1983 Immunol Today 4: 72) and the EBV hybridoma technique to produce human monoclonal antibodies (see Cole, et al., 1985 In: MONOCLONAL ANTIBODIES AND CANCER THERAPY, Alan R. Liss, Inc., pp. 77-96). Human monoclonal antibodies may be utilized in the practice of the present invention and may be produced by using human hybridomas (see Cote, et al., 1983. Proc Natl Acad Sci USA 80: 2026-2030) or by transforming human B-cells with Epstein Barr Virus in vitro (see Cole, et al., 1985 In: MONOCLONAL ANTIBODIES AND CANCER THERAPY, Alan R. Liss, Inc., pp. 77-96).

[0173] In addition, human antibodies can also be produced using additional techniques, including phage display libraries (Hoogenboom and Winter, J. Mol. Biol., 227:381 (1991); Marks et al., J. Mol. Biol., 222:581 (1991)). Similarly, human antibodies can be made by introducing human immunoglobulin loci into transgenic animals. For example, mice in which the endogenous immunoglobulin genes have been partially or completely inactivated. Upon challenge, human antibody production is observed, which closely resembles that seen in humans in all respects, including gene rearrangement, assembly, and antibody repertoire. This approach is described, for example, in U.S. Pat. Nos. 5,545,807; 5,545,806; 5,569,825; 5,625,126; 5,633,425; 5,661,016, and in Marks et al. (Bio/Technology 10, 779-783 (1992)); Lonberg et al. (Nature 368 856-859 (1994)); Morrison (Nature 368, 812-13 (1994)); Fishwild et al, (Nature Biotechnology 14, 845-51 (1996)); Neuberger (Nature Biotechnology 14, 826 (1996)); and Lonberg and Huszar (Intern. Rev. Immunol. 13 65-93 (1995)).

[0174] Human antibodies may additionally be produced using transgenic nonhuman animals which are modified so as to produce fully human antibodies rather than the animal's endogenous antibodies in response to challenge by an antigen. (See PCT publication WO94/02602). The endogenous genes encoding the heavy and light immunoglobulin chains in the nonhuman host have been incapacitated, and active loci encoding human heavy and light chain immunoglobulins are inserted into the host's genome. The human genes are incorporated, for example, using yeast artificial chromosomes containing the requisite human DNA segments. An animal which provides all the desired modifications is then obtained as progeny by crossbreeding intermediate transgenic animals containing fewer than the full complement of the modifications. The preferred embodiment of such a nonhuman animal is a mouse, and is termed the Xenomouse™ as disclosed in PCT publications WO 96/33735 and WO 96/34096. This animal produces B cells which secrete fully human immunoglobulins. The antibodies can be obtained directly from the animal after immunization with an immunogen of interest, as, for example, a preparation of a polyclonal antibody, or alternatively from immortalized B cells derived from the animal, such as hybridomas producing monoclonal antibodies. Additionally, the genes encoding the immunoglobulins with human variable regions can be recovered and expressed to obtain the antibodies directly, or can be further modified to obtain analogs of antibodies such as, for example, single chain Fv molecules.

[0175] An example of a method of producing a nonhuman host, exemplified as a mouse, lacking expression of an endogenous immunoglobulin heavy chain is disclosed in U.S. Pat. No. 5,939,598. It can be obtained by a method including deleting the J segment genes from at least one endogenous heavy chain locus in an embryonic stem cell to prevent rearrangement of the locus and to prevent formation of a transcript of a rearranged immunoglobulin heavy chain locus, the deletion being effected by a targeting vector containing a gene encoding a selectable marker; and producing from the embryonic stem cell a transgenic mouse whose somatic and germ cells contain the gene encoding the selectable marker.

[0176] A method for producing an antibody of interest, such as a human antibody, is disclosed in U.S. Pat. No. 5,916,771. It includes introducing an expression vector that contains a nucleotide sequence encoding a heavy chain into one mammalian host cell in culture, introducing an expression vector containing a nucleotide sequence encoding a light chain into another mammalian host cell, and fusing the two cells to form a hybrid cell. The hybrid cell expresses an antibody containing the heavy chain and the light chain.

[0177] In a further improvement on this procedure, a method for identifying a clinically relevant epitope on an immunogen, and a correlative method for selecting an antibody that binds immunospecifically to the relevant epitope with high affinity, are disclosed in PCT publication WO 99/53049.

[0178] Fab Fragments and Single Chain Antibodies

[0179] According to the invention, techniques can be adapted for the production of single-chain antibodies specific to an antigenic protein of the invention (see e.g. U.S. Pat. No. 4,946,778). In addition, methods can be adapted for the construction of Fab expression libraries (see e.g., Huse, et al., 1989 Science 246: 1275-1281) to allow rapid and effective identification of monoclonal Fab fragments with the desired specificity for a protein or derivatives, fragments, analogs or homologs thereof. Antibody fragments that contain the idiotypes to a protein antigen may be produced by techniques known in the art including, but not limited to: (i) an F_{(ab′)2} fragment produced by pepsin digestion of an antibody molecule; (ii) an F_{ab} fragment generated by reducing the disulfide bridges of an F_{(ab′)2} fragment; (iii) an F_{ab} fragment generated by the treatment of the antibody molecule with papain and a reducing agent and (iv) Fᵥ fragments.

[0180] Bispecific Antibodies

[0181] Bispecific antibodies are monoclonal, preferably human or humanized, antibodies that have binding specificities for at least two different antigens. In the present case, one of the binding specificities is for an antigenic protein of the invention. The second binding target is any other antigen, and advantageously is a cell-surface protein or receptor or receptor subunit.

[0182] Methods for making bispecific antibodies are known in the art. Traditionally, the recombinant production of bispecific antibodies is based on the co-expression of two immunoglobulin heavy-chain/light-chain pairs, where the two heavy chains have different specificities (Milstein and Cuello, Nature, 305:537-539 (1983)). Because of the random assortment of immunoglobulin heavy and light chains, these hybridomas (quadromas) produce a potential mixture of ten different antibody molecules, of which only one has the correct bispecific structure. The purification of the correct molecule is usually accomplished by affinity chromatography. Similar procedures are disclosed in WO 93/08829, published 13 May 1993, and in Traunecker et al., EMBO J., 10:3655-3659 (1991).

[0183] Antibody variable domains with the desired binding specificities (antibody-antigen combining sites) can be fused to immunoglobulin constant domain sequences. The fusion preferably is with an immunoglobulin heavy-chain constant domain, comprising at least part of the hinge, CH2, and CH3 regions. It is preferred to have the first heavy-chain constant region (CH1) containing the site necessary for light-chain binding present in at least one of the fusions. DNAs encoding the immunoglobulin heavy-chain fusions and, if desired, the immunoglobulin light chain, are inserted into separate expression vectors, and are co-transfected into a suitable host organism. For further details of generating bispecific antibodies see, for example, Suresh et al., Methods in Enzymology, 121:210 (1986).

[0184] According to another approach described in WO 96/27011, the interface between a pair of antibody molecules can be engineered to maximize the percentage of heterodimers that are recovered from recombinant cell culture. The preferred interface comprises at least a part of the CH3 region of an antibody constant domain. In this method, one or more small amino acid side chains from the interface of the first antibody molecule are replaced with larger side chains (e.g., tyrosine or tryptophan). Compensatory “cavities” of identical or similar size to the large side chain(s) are created on the interface of the second antibody molecule by replacing large amino acid side chains with smaller ones (e.g., alanine or threonine). This provides a mechanism for increasing the yield of the heterodimer over other unwanted end-products such as homodimers.

[0185] Bispecific antibodies can be prepared as full length antibodies or antibody fragments (e.g., F(ab′)₂ bispecific antibodies). Techniques for generating bispecific antibodies from antibody fragments have been described in the literature. For example, bispecific antibodies can be prepared using chemical linkage. Brennan et al., Science 229:81 (1985) describe a procedure wherein intact antibodies are proteolytically cleaved to generate F(ab′)₂ fragments. These fragments are reduced in the presence of the dithiol complexing agent sodium arsenite to stabilize vicinal dithiols and prevent intermolecular disulfide formation. The Fab′ fragments generated are then converted to thionitrobenzoate (TNB) derivatives. One of the Fab′-TNB derivatives is then reconverted to the Fab′-thiol by reduction with mercaptoethylamine and is mixed with an equimolar amount of the other Fab′-TNB derivative to form the bispecific antibody. The bispecific antibodies produced can be used as agents for the selective immobilization of enzymes.

[0186] Additionally, Fab′ fragments can be directly recovered from E. coli and chemically coupled to form bispecific antibodies. Shalaby et al., J. Exp. Med. 175:217-225 (1992) describe the production of a fully humanized bispecific antibody F(ab′)₂ molecule. Each Fab′ fragment was separately secreted from E. coli and subjected to directed chemical coupling in vitro to form the bispecific antibody. The bispecific antibody thus formed was able to bind to cells overexpressing the ErbB2 receptor and normal human T cells, as well as trigger the lytic activity of human cytotoxic lymphocytes against human breast tumor targets.

[0187] Various techniques for making and isolating bispecific antibody fragments directly from recombinant cell culture have also been described. For example, bispecific antibodies have been produced using leucine zippers. Kostelny et al., J. Immunol. 148(5): 1547-1553 (1992). The leucine zipper peptides from the Fos and Jun proteins were linked to the Fab′ portions of two different antibodies by gene fusion. The antibody homodimers were reduced at the hinge region to form monomers and then re-oxidized to form the antibody heterodimers. This method can also be utilized for the production of antibody homodimers. The “diabody” technology described by Hollinger et al., Proc. Natl. Acad. Sci. USA 90:6444-6448 (1993) has provided an alternative mechanism for making bispecific antibody fragments. The fragments comprise a heavy-chain variable domain (V_{H}) connected to a light-chain variable domain (V_{L}) by a linker that is too short to allow pairing between the two domains on the same chain. Accordingly, the V_{H} and V_{L} domains of one fragment are forced to pair with the complementary V_{L} and V_{H} domains of another fragment, thereby forming two antigen-binding sites. Another strategy for making bispecific antibody fragments by the use of single-chain Fv (sFv) dimers has also been reported. See, Gruber et al., J. Immunol. 152:5368 (1994).

[0188] Antibodies with more than two valencies are contemplated. For example, trispecific antibodies can be prepared. Tutt et al., J. Immunol. 147:60 (1991).

[0189] Exemplary bispecific antibodies can bind to two different epitopes, at least one of which originates in the protein antigen of the invention. Alternatively, an anti-antigenic arm of an immunoglobulin molecule can be combined with an arm which binds to a triggering molecule on a leukocyte such as a T-cell receptor molecule (e.g., CD2, CD3, CD28, or B7), or Fc receptors for IgG (FcγR), such as FcγRI (CD64), FcγRII (CD32) and FcγRIII (CD16) so as to focus cellular defense mechanisms to the cell expressing the particular antigen. Bispecific antibodies can also be used to direct cytotoxic agents to cells which express a particular antigen. These antibodies possess an antigen-binding arm and an arm which binds a cytotoxic agent or a radionuclide chelator, such as EOTUBE, DPTA, DOTA, or TETA. Another bispecific antibody of interest binds the protein antigen described herein and further binds tissue factor (TF).

[0190] Heteroconjugate Antibodies

[0191] Heteroconjugate antibodies are also within the scope of the present invention. Heteroconjugate antibodies are composed of two covalently joined antibodies. Such antibodies have, for example, been proposed to target immune system cells to unwanted cells (U.S. Pat. No. 4,676,980), and for treatment of HIV infection (WO 91/00360; WO 92/200373; EP 03089). It is contemplated that the antibodies can be prepared in vitro using known methods in synthetic protein chemistry, including those involving crosslinking agents. For example, immunotoxins can be constructed using a disulfide exchange reaction or by forming a thioether bond. Examples of suitable reagents for this purpose include iminothiolate and methyl-4-mercaptobutyrimidate and those disclosed, for example, in U.S. Pat. No. 4,676,980.

[0192] Effector Function Engineering

[0193] It can be desirable to modify the antibody of the invention with respect to effector function, so as to enhance, e.g., the effectiveness of the antibody in treating cancer. For example, cysteine residue(s) can be introduced into the Fc region, thereby allowing interchain disulfide bond formation in this region. The homodimeric antibody thus generated can have improved internalization capability and/or increased complement-mediated cell killing and antibody-dependent cellular cytotoxicity (ADCC). See Caron et al., J. Exp Med., 176: 1191-1195 (1992) and Shopes, J. Immunol., 148: 2918-2922 (1992). Homodimeric antibodies with enhanced anti-tumor activity can also be prepared using heterobifunctional cross-linkers as described in Wolff et al. Cancer Research, 53: 2560-2565 (1993). Alternatively, an antibody can be engineered that has dual Fc regions and can thereby have enhanced complement lysis and ADCC capabilities. See Stevenson et al., Anti-Cancer Drug Design, 3: 219-230 (1989).

[0194] Immunoconjugates

[0195] The invention also pertains to immunoconjugates comprising an antibody conjugated to a cytotoxic agent such as a chemotherapeutic agent, toxin (e.g., an enzymatically active toxin of bacterial, fungal, plant, or animal origin, or fragments thereof), or a radioactive isotope (i.e., a radioconjugate).

[0196] Chemotherapeutic agents useful in the generation of such immunoconjugates have been described above. Enzymatically active toxins and fragments thereof that can be used include diphtheria A chain, nonbinding active fragments of diphtheria toxin, exotoxin A chain (from Pseudomonas aeruginosa), ricin A chain, abrin A chain, modeccin A chain, alpha-sarcin, Aleurites fordii proteins, dianthin proteins, Phytolaca americana proteins (PAPI, PAPII, and PAP-S), momordica charantia inhibitor, curcin, crotin, sapaonaria officinalis inhibitor, gelonin, mitogellin, restrictocin, phenomycin, enomycin, and the tricothecenes. A variety of radionuclides are available for the production of radioconjugated antibodies. Examples include ²¹²Bi, ¹³¹I, ¹³¹In, ⁹⁰Y, and ¹⁸⁶Re.

[0197] Conjugates of the antibody and cytotoxic agent are made using a variety of bifunctional protein-coupling agents such as N-succinimidyl-3-(2-pyridyldithiol) propionate (SPDP), iminothiolane (IT), bifunctional derivatives of imidoesters (such as dimethyl adipimidate HCL), active esters (such as disuccinimidyl suberate), aldehydes (such as glutareldehyde), bis-azido compounds (such as bis (p-azidobenzoyl) hexanediamine), bis-diazonium derivatives (such as bis-(p-diazoniumbenzoyl)-ethylenediamine), diisocyanates (such as tolyene 2,6-diisocyanate), and bis-active fluorine compounds (such as 1,5-difluoro-2,4-dinitrobenzene). For example, a ricin immunotoxin can be prepared as described in Vitetta et al., Science, 238: 1098 (1987). Carbon-14-labeled 1-isothiocyanatobenzyl-3-methyldiethylene triaminepentaacetic acid (MX-DTPA) is an exemplary chelating agent for conjugation of radionucleotide to the antibody. See WO94/11026.

[0198] In another embodiment, the antibody can be conjugated to a “receptor” (such streptavidin) for utilization in tumor pretargeting wherein the antibody-receptor conjugate is administered to the patient, followed by removal of unbound conjugate from the circulation using a clearing agent and then administration of a “ligand” (e.g., avidin) that is in turn conjugated to a cytotoxic agent.

[0199] Immunoliposomes

[0200] The antibodies disclosed herein can also be formulated as immunoliposomes. Liposomes containing the antibody are prepared by methods known in the art, such as described in Epstein et al., Proc. Natl. Acad. Sci. USA, 82: 3688 (1985); Hwang et al., Proc. Natl. Acad. Sci. USA, 77: 4030 (1980); and U.S. Pat. Nos. 4,485,045 and 4,544,545. Liposomes with enhanced circulation time are disclosed in U.S. Pat. No. 5,013,556.

[0201] Particularly useful liposomes can be generated by the reverse-phase evaporation method with a lipid composition comprising phosphatidylcholine, cholesterol, and PEG-derivatized phosphatidylethanolamine (PEG-PE). Liposomes are extruded through filters of defined pore size to yield liposomes with the desired diameter. Fab′ fragments of the antibody of the present invention can be conjugated to the liposomes as described in Martin et al., J. Biol. Chem., 257: 286-288 (1982) via a disulfide-interchange reaction. A chemotherapeutic agent (such as Doxorubicin) is optionally contained within the liposome. See Gabizon et al., J. National Cancer Inst., 81(19): 1484 (1989).

[0202] Diagnostic Applications of Antibodies Directed Against the Proteins of the Invention

[0203] In one embodiment, methods for the screening of antibodies that possess the desired specificity include, but are not limited to, enzyme linked immunosorbent assay (ELISA) and other immunologically mediated techniques known within the art. In a specific embodiment, selection of antibodies that are specific to a particular domain of an NOVX protein is facilitated by generation of hybridomas that bind to the fragment of an NOVX protein possessing such a domain. Thus, antibodies that are specific for a desired domain within an NOVX protein, or derivatives, fragments, analogs or homologs thereof, are also provided herein.

[0204] Antibodies directed against a NOVX protein of the invention may be used in methods known within the art relating to the localization and/or quantitation of a NOVX protein (e.g., for use in measuring levels of the NOVX protein within appropriate physiological samples, for use in diagnostic methods, for use in imaging the protein, and the like). In a given embodiment, antibodies specific to a NOVX protein, or derivative, fragment, analog or homolog thereof, that contain the antibody derived antigen binding domain, are utilized as pharmacologically active compounds (referred to hereinafter as “Therapeutics”).

[0205] An antibody specific for a NOVX protein of the invention (e.g., a monoclonal antibody or a polyclonal antibody) can be used to isolate a NOVX polypeptide by standard techniques, such as immunoaffinity, chromatography or immunoprecipitation. An antibody to a NOVX polypeptide can facilitate the purification of a natural NOVX antigen from cells, or of a recombinantly produced NOVX antigen expressed in host cells. Moreover, such an anti-NOVX antibody can be used to detect the antigenic NOVX protein (e.g., in a cellular lysate or cell supernatant) in order to evaluate the abundance and pattern of expression of the antigenic NOVX protein. Antibodies directed against a NOVX protein can be used diagnostically to monitor protein levels in tissue as part of a clinical testing procedure, e.g., to, for example, determine the efficacy of a given treatment regimen. Detection can be facilitated by coupling (i.e., physically linking) the antibody to a detectable substance. Examples of detectable substances include various enzymes, prosthetic groups, fluorescent materials, luminescent materials, bioluminescent materials, and radioactive materials. Examples of suitable enzymes include horseradish peroxidase, alkaline phosphatase, β-galactosidase, or acetylcholinesterase; examples of suitable prosthetic group complexes include streptavidin/biotin and avidin/biotin; examples of suitable fluorescent materials include umbelliferone, fluorescein, fluorescein isothiocyanate, rhodamine, dichlorotriazinylamine fluorescein, dansyl chloride or phycoerythrin; an example of a luminescent material includes luminol; examples of bioluminescent materials include luciferase, luciferin, and aequorin, and examples of suitable radioactive material include ¹²⁵I, ¹³¹I, ³⁵S or ³H.

[0206] Antibody Therapeutics

[0207] Antibodies of the invention, including polyclonal, monoclonal, humanized and fully human antibodies, may used as therapeutic agents. Such agents will generally be employed to treat or prevent a disease or pathology in a subject. An antibody preparation, preferably one having high specificity and high affinity for its target antigen, is administered to the subject and will generally have an effect due to its binding with the target. Such an effect may be one of two kinds, depending on the specific nature of the interaction between the given antibody molecule and the target antigen in question. In the first instance, administration of the antibody may abrogate or inhibit the binding of the target with an endogenous ligand to which it naturally binds. In this case, the antibody binds to the target and masks a binding site of the naturally occurring ligand, wherein the ligand serves as an effector molecule. Thus the receptor mediates a signal transduction pathway for which ligand is responsible.

[0208] Alternatively, the effect may be one in which the antibody elicits a physiological result by virtue of binding to an effector binding site on the target molecule. In this case the target, a receptor having an endogenous ligand that may be absent or defective in the disease or pathology, binds the antibody as a surrogate effector ligand, initiating a receptor-based signal transduction event by the receptor.

[0209] A therapeutically effective amount of an antibody of the invention relates generally to the amount needed to achieve a therapeutic objective. As noted above, this may be a binding interaction between the antibody and its target antigen that, in certain cases, interferes with the functioning of the target, and in other cases, promotes a physiological response. The amount required to be administered will furthermore depend on the binding affinity of the antibody for its specific antigen, and will also depend on the rate at which an administered antibody is depleted from the free volume other subject to which it is administered. Common ranges for therapeutically effective dosing of an antibody or antibody fragment of the invention may be, by way of nonlimiting example, from about 0.1 mg/kg body weight to about 50 mg/kg body weight. Common dosing frequencies may range, for example, from twice daily to once a week.

[0210] Pharmaceutical Compositions of Antibodies

[0211] Antibodies specifically binding a protein of the invention, as well as other molecules identified by the screening assays disclosed herein, can be administered for the treatment of various disorders in the form of pharmaceutical compositions. Principles and considerations involved in preparing such compositions, as well as guidance in the choice of components are provided, for example, in Remington: The Science And Practice Of Pharmacy 19th ed. (Alfonso R. Gennaro, et al., editors) Mack Pub. Co., Easton, Pa.: 1995; Drug Absorption Enhancement: Concepts, Possibilities, Limitations, And Trends, Harwood Academic Publishers, Langhorne, Pa., 1994; and Peptide And Protein Drug Delivery (Advances In Parenteral Sciences, Vol. 4), 1991, M. Dekker, New York.

[0212] If the antigenic protein is intracellular and whole antibodies are used as inhibitors, internalizing antibodies are preferred. However, liposomes can also be used to deliver the antibody, or an antibody fragment, into cells. Where antibody fragments are used, the smallest inhibitory fragment that specifically binds to the binding domain of the target protein is preferred. For example, based upon the variable-region sequences of an antibody, peptide molecules can be designed that retain the ability to bind the target protein sequence. Such peptides can be synthesized chemically and/or produced by recombinant DNA technology. See, e.g., Marasco et al., Proc. Natl. Acad. Sci. USA, 90: 7889-7893 (1993). The formulation herein can also contain more than one active compound as necessary for the particular indication being treated, preferably those with complementary activities that do not adversely affect each other. Alternatively, or in addition, the composition can comprise an agent that enhances its function, such as, for example, a cytotoxic agent, cytokine, chemotherapeutic agent, or growth-inhibitory agent. Such molecules are suitably present in combination in amounts that are effective for the purpose intended.

[0213] The active ingredients can also be entrapped in microcapsules prepared, for example, by coacervation techniques or by interfacial polymerization, for example, hydroxymethylcellulose or gelatin-microcapsules and poly-(methylmethacrylate) microcapsules, respectively, in colloidal drug delivery systems (for example, liposomes, albumin microspheres, microemulsions, nano-particles, and nanocapsules) or in macroemulsions.

[0214] The formulations to be used for in vivo administration must be sterile. This is readily accomplished by filtration through sterile filtration membranes.

[0215] Sustained-release preparations can be prepared. Suitable examples of sustained-release preparations include semipermeable matrices of solid hydrophobic polymers containing the antibody, which matrices are in the form of shaped articles, e.g., films, or microcapsules. Examples of sustained-release matrices include polyesters, hydrogels (for example, poly(2-hydroxyethyl-methacrylate), or poly(vinylalcohol)), polylactides (U.S. Pat. No. 3,773,919), copolymers of L-glutamic acid and γ ethyl-L-glutamate, non-degradable ethylene-vinyl acetate, degradable lactic acid-glycolic acid copolymers such as the LUPRON DEPOT™ (injectable microspheres composed of lactic acid-glycolic acid copolymer and leuprolide acetate), and poly-D-(−)-3-hydroxybutyric acid. While polymers such as ethylene-vinyl acetate and lactic acid-glycolic acid enable release of molecules for over 100 days, certain hydrogels release proteins for shorter time periods.

[0216] ELISA Assay

[0217] An agent for detecting an analyte protein is an antibody capable of binding to an analyte protein, preferably an antibody with a detectable label. Antibodies can be polyclonal, or more preferably, monoclonal. An intact antibody, or a fragment thereof (e.g., F_{ab} or F_{(ab)2}) can be used. The term “labeled”, with regard to the probe or antibody, is intended to encompass direct labeling of the probe or antibody by coupling (i.e., physically linking) a detectable substance to the probe or antibody, as well as indirect labeling of the probe or antibody by reactivity with another reagent that is directly labeled. Examples of indirect labeling include detection of a primary antibody using a fluorescently-labeled secondary antibody and end-labeling of a DNA probe with biotin such that it can be detected with fluorescently-labeled streptavidin. The term “biological sample” is intended to include tissues, cells and biological fluids isolated from a subject, as well as tissues, cells and fluids present within a subject. Included within the usage of the term “biological sample”, therefore, is blood and a fraction or component of blood including blood serum, blood plasma, or lymph. That is, the detection method of the invention can be used to detect an analyte mRNA, protein, or genomic DNA in a biological sample in vitro as well as in vivo. For example, in vitro techniques for detection of an analyte mRNA include Northern hybridizations and in situ hybridizations. In vitro techniques for detection of an analyte protein include enzyme linked immunosorbent assays (ELISAs), Western blots, immunoprecipitations, and immunofluorescence. In vitro techniques for detection of an analyte genomic DNA include Southern hybridizations. Procedures for conducting immunoassays are described, for example in “ELISA: Theory and Practice: Methods in Molecular Biology”, Vol. 42, J. R. Crowther (Ed.) Human Press, Totowa, N.J., 1995; “Immunoassay”, E. Diamandis and T. Christopoulus, Academic Press, Inc., San Diego, Calif., 1996; and “Practice and Theory of Enzyme Immunoassays”, P. Tijssen, Elsevier Science Publishers, Amsterdam, 1985. Furthermore, in vivo techniques for detection of an analyte protein include introducing into a subject a labeled anti-an analyte protein antibody. For example, the antibody can be labeled with a radioactive marker whose presence and location in a subject can be detected by standard imaging techniques.

NOVX Recombinant Expression Vectors and Host Cells

[0218] Another aspect of the invention pertains to vectors, preferably expression vectors, containing a nucleic acid encoding a NOVX protein, or derivatives, fragments, analogs or homologs thereof. As used herein, the term “vector” refers to a nucleic acid molecule capable of transporting another nucleic acid to which it has been linked. One type of vector is a “plasmid”, which refers to a circular double stranded DNA loop into which additional DNA segments can be ligated. Another type of vector is a viral vector, wherein additional DNA segments can be ligated into the viral genome. Certain vectors are capable of autonomous replication in a host cell into which they are introduced (e.g., bacterial vectors having a bacterial origin of replication and episomal mammalian vectors). Other vectors (e.g., non-episomal mammalian vectors) are integrated into the genome of a host cell upon introduction into the host cell, and thereby are replicated along with the host genome. Moreover, certain vectors are capable of directing the expression of genes to which they are operatively-linked. Such vectors are referred to herein as “expression vectors”. In general, useful expression vectors in recombinant DNA techniques are often in the form of plasmids. In the present specification, “plasmid” and “vector” can be used interchangeably as the plasmid is the most commonly used form of vector. However, the invention is intended to include such other forms of expression vectors, such as viral vectors (e.g., replication defective retroviruses, adenoviruses and adeno-associated viruses), which serve equivalent functions.

[0219] The recombinant expression vectors of the invention comprise a nucleic acid of the invention in a form suitable for expression of the nucleic acid in a host cell, which means that the recombinant expression vectors include one or more regulatory sequences, selected on the basis of the host cells to be used for expression, that is operatively-linked to the nucleic acid sequence to be expressed. Within a recombinant expression vector, “operably-linked” is intended to mean that the nucleotide sequence of interest is linked to the regulatory sequence(s) in a manner that allows for expression of the nucleotide sequence (e.g., in an in vitro transcription/translation system or in a host cell when the vector is introduced into the host cell).

[0220] The term “regulatory sequence” is intended to includes promoters, enhancers and other expression control elements (e.g., polyadenylation signals). Such regulatory sequences are described, for example, in Goeddel, GENE EXPRESSION TECHNOLOGY: METHODS IN ENZYMOLOGY 185, Academic Press, San Diego, Calif. (1990). Regulatory sequences include those that direct constitutive expression of a nucleotide sequence in many types of host cell and those that direct expression of the nucleotide sequence only in certain host cells (e.g., tissue-specific regulatory sequences). It will be appreciated by those skilled in the art that the design of the expression vector can depend on such factors as the choice of the host cell to be transformed, the level of expression of protein desired, etc. The expression vectors of the invention can be introduced into host cells to thereby produce proteins or peptides, including fusion proteins or peptides, encoded by nucleic acids as described herein (e.g., NOVX proteins, mutant forms of NOVX proteins, fusion proteins, etc.).

[0221] The recombinant expression vectors of the invention can be designed for expression of NOVX proteins in prokaryotic or eukaryotic cells. For example, NOVX proteins can be expressed in bacterial cells such as Escherichia coli, insect cells (using baculovirus expression vectors) yeast cells or mammalian cells. Suitable host cells are discussed further in Goeddel, GENE EXPRESSION TECHNOLOGY: METHODS IN ENZYMOLOGY 185, Academic Press, San Diego, Calif. (1990). Alternatively, the recombinant expression vector can be transcribed and translated in vitro, for example using T7 promoter regulatory sequences and T7 polymerase.

[0222] Expression of proteins in prokaryotes is most often carried out in Escherichia coli with vectors containing constitutive or inducible promoters directing the expression of either fusion or non-fusion proteins. Fusion vectors add a number of amino acids to a protein encoded therein, usually to the amino terminus of the recombinant protein. Such fusion vectors typically serve three purposes: (i) to increase expression of recombinant protein; (ii) to increase the solubility of the recombinant protein; and (iii) to aid in the purification of the recombinant protein by acting as a ligand in affinity purification. Often, in fusion expression vectors, a proteolytic cleavage site is introduced at the junction of the fusion moiety and the recombinant protein to enable separation of the recombinant protein from the fusion moiety subsequent to purification of the fusion protein. Such enzymes, and their cognate recognition sequences, include Factor Xa, thrombin and enterokinase. Typical fusion expression vectors include pGEX (Pharmacia Biotech Inc; Smith and Johnson, 1988. Gene 67: 3140), pMAL (New England Biolabs, Beverly, Mass.) and pRIT5 (Pharmacia, Piscataway, N.J.) that fuse glutathione S-transferase (GST), maltose E binding protein, or protein A, respectively, to the target recombinant protein.

[0223] Examples of suitable inducible non-fusion E. coli expression vectors include pTrc (Amrann et al., (1988) Gene 69:301-315) and pET 11d (Studier et al., GENE EXPRESSION TECHNOLOGY: METHODS IN ENZYMOLOGY 185, Academic Press, San Diego, Calif. (1990) 60-89).

[0224] One strategy to maximize recombinant protein expression in E. coli is to express the protein in a host bacteria with an impaired capacity to proteolytically cleave the recombinant protein. See, e.g., Gottesman, GENE EXPRESSION TECHNOLOGY: METHODS IN ENZYMOLOGY 185, Academic Press, San Diego, Calif. (1990) 119-128. Another strategy is to alter the nucleic acid sequence of the nucleic acid to be inserted into an expression vector so that the individual codons for each amino acid are those preferentially utilized in E. coli (see, e.g., Wada, et al., 1992. Nucl. Acids Res. 20: 2111-2118). Such alteration of nucleic acid sequences of the invention can be carried out by standard DNA synthesis techniques.

[0225] In another embodiment, the NOVX expression vector is a yeast expression vector. Examples of vectors for expression in yeast Saccharomyces cerivisae include pYepSec1 (Baldari, et al., 1987. EMBO J. 6: 229-234), pMFa (Kurjan and Herskowitz, 1982. Cell 30: 933-943), pJRY88 (Schultz et al., 1987. Gene 54: 113-123), pYES2 (Invitrogen Corporation, San Diego, Calif.), and picZ (InVitrogen Corp, San Diego, Calif.).

[0226] Alternatively, NOVX can be expressed in insect cells using baculovirus expression vectors. Baculovirus vectors available for expression of proteins in cultured insect cells (e.g., SF9 cells) include the pAc series (Smith, et al., 1983. Mol. Cell. Biol. 3: 2156-2165) and the pVL series (Lucklow and Summers, 1989. Virology 170: 31-39).

[0227] In yet another embodiment, a nucleic acid of the invention is expressed in mammalian cells using a mammalian expression vector. Examples of mammalian expression vectors include pCDM8 (Seed, 1987. Nature 329: 840) and pMT2PC (Kaufman, et al., 1987. EMBO J. 6: 187-195). When used in mammalian cells, the expression vector's control functions are often provided by viral regulatory elements. For example, commonly used promoters are derived from polyoma, adenovirus 2, cytomegalovirus, and simian virus 40. For other suitable expression systems for both prokaryotic and eukaryotic cells see, e.g., Chapters 16 and 17 of Sambrook, et al., MOLECULAR CLONING: A LABORATORY MANUAL. 2nd ed., Cold Spring Harbor Laboratory, Cold Spring Harbor Laboratory Press, Cold Spring Harbor, N.Y., 1989.

[0228] In another embodiment, the recombinant mammalian expression vector is capable of directing expression of the nucleic acid preferentially in a particular cell type (e.g., tissue-specific regulatory elements are used to express the nucleic acid). Tissue-specific regulatory elements are known in the art. Non-limiting examples of suitable tissue-specific promoters include the albumin promoter (liver-specific; Pinkert, et al., 1987. Genes Dev. 1: 268-277), lymphoid-specific promoters (Calame and Eaton, 1988. Adv. Immunol. 43: 235-275), in particular promoters of T cell receptors (Winoto and Baltimore, 1989. EMBO J. 8: 729-733) and immunoglobulins (Banerji, et al., 1983. Cell 33: 729-740; Queen and Baltimore, 1983. Cell 33: 741-748), neuron-specific promoters (e.g., the neurofilament promoter; Byrne and Ruddle, 1989. Proc. Natl. Acad. Sci. USA 86: 5473-5477), pancreas-specific promoters (Edlund, et al., 1985. Science 230: 912-916), and mammary gland-specific promoters (e.g., milk whey promoter; U.S. Pat. No. 4,873,316 and European Application Publication No. 264,166). Developmentally-regulated promoters are also encompassed, e.g., the murine hox promoters (Kessel and Gruss, 1990. Science 249: 374-379) and the α-fetoprotein promoter (Campes and Tilghman, 1989. Genes Dev. 3: 537-546).

[0229] The invention further provides a recombinant expression vector comprising a DNA molecule of the invention cloned into the expression vector in an antisense orientation. That is, the DNA molecule is operatively-linked to a regulatory sequence in a manner that allows for expression (by transcription of the DNA molecule) of an RNA molecule that is antisense to NOVX mRNA. Regulatory sequences operatively linked to a nucleic acid cloned in the antisense orientation can be chosen that direct the continuous expression of the antisense RNA molecule in a variety of cell types, for instance viral promoters and/or enhancers, or regulatory sequences can be chosen that direct constitutive, tissue specific or cell type specific expression of antisense RNA. The antisense expression vector can be in the form of a recombinant plasmid, phagemid or attenuated virus in which antisense nucleic acids are produced under the control of a high efficiency regulatory region, the activity of which can be determined by the cell type into which the vector is introduced. For a discussion of the regulation of gene expression using antisense genes see, e.g., Weintraub, et al., “Antisense RNA as a molecular tool for genetic analysis,”. Reviews-Trends in Genetics, Vol. 1(1) 1986.

[0230] Another aspect of the invention pertains to host cells into which a recombinant expression vector of the invention has been introduced. The terms “host cell” and “recombinant host cell” are used interchangeably herein. It is understood that such terms refer not only to the particular subject cell but also to the progeny or potential progeny of such a cell. Because certain modifications may occur in succeeding generations due to either mutation or environmental influences, such progeny may not, in fact, be identical to the parent cell, but are still included within the scope of the term as used herein.

[0231] A host cell can be any prokaryotic or eukaryotic cell. For example, NOVX protein can be expressed in bacterial cells such as E. coli, insect cells, yeast or mammalian cells (such as Chinese hamster ovary cells (CHO) or COS cells). Other suitable host cells are known to those skilled in the art.

[0232] Vector DNA can be introduced into prokaryotic or eukaryotic cells via conventional transformation or transfection techniques. As used herein, the terms “transformation” and “transfection” are intended to refer to a variety of art-recognized techniques for introducing foreign nucleic acid (e.g., DNA) into a host cell, including calcium phosphate or calcium chloride co-precipitation, DEAE-dextran-mediated transfection, lipofection, or electroporation. Suitable methods for transforming or transfecting host cells can be found in Sambrook, et al. (MOLECULAR CLONING: A LABORATORY MANUAL. 2nd ed., Cold Spring Harbor Laboratory, Cold Spring Harbor Laboratory Press, Cold Spring Harbor, N.Y., 1989), and other laboratory manuals.

[0233] For stable transfection of mammalian cells, it is known that, depending upon the expression vector and transfection technique used, only a small fraction of cells may integrate the foreign DNA into their genome. In order to identify and select these integrants, a gene that encodes a selectable marker (e.g., resistance to antibiotics) is generally introduced into the host cells along with the gene of interest. Various selectable markers include those that confer resistance to drugs, such as G418, hygromycin and methotrexate. Nucleic acid encoding a selectable marker can be introduced into a host cell on the same vector as that encoding NOVX or can be introduced on a separate vector. Cells stably transfected with the introduced nucleic acid can be identified by drug selection (e.g., cells that have incorporated the selectable marker gene will survive, while the other cells die).

[0234] A host cell of the invention, such as a prokaryotic or eukaryotic host cell in culture, can be used to produce (i.e., express) NOVX protein. Accordingly, the invention further provides methods for producing NOVX protein using the host cells of the invention. In one embodiment, the method comprises culturing the host cell of invention (into which a recombinant expression vector encoding NOVX protein has been introduced) in a suitable medium such that NOVX protein is produced. In another embodiment, the method further comprises isolating NOVX protein from the medium or the host cell.

Transgenic NOVX Animals

[0235] The host cells of the invention can also be used to produce non-human transgenic animals. For example, in one embodiment, a host cell of the invention is a fertilized oocyte or an embryonic stem cell into which NOVX protein-coding sequences have been introduced. Such host cells can then be used to create non-human transgenic animals in which exogenous NOVX sequences have been introduced into their genome or homologous recombinant animals in which endogenous NOVX sequences have been altered. Such animals are useful for studying the function and/or activity of NOVX protein and for identifying and/or evaluating modulators of NOVX protein activity. As used herein, a “transgenic animal” is a non-human animal, preferably a mammal, more preferably a rodent such as a rat or mouse, in which one or more of the cells of the animal includes a transgene. Other examples of transgenic animals include non-human primates, sheep, dogs, cows, goats, chickens, amphibians, etc. A transgene is exogenous DNA that is integrated into the genome of a cell from which a transgenic animal develops and that remains in the genome of the mature animal, thereby directing the expression of an encoded gene product in one or more cell types or tissues of the transgenic animal. As used herein, a “homologous recombinant animal” is a non-human animal, preferably a mammal, more preferably a mouse, in which an endogenous NOVX gene has been altered by homologous recombination between the endogenous gene and an exogenous DNA molecule introduced into a cell of the animal, e.g., an embryonic cell of the animal, prior to development of the animal.

[0236] A transgenic animal of the invention can be created by introducing a NOVX-encoding nucleic acid into the male pronuclei of a fertilized oocyte (e.g., by microinjection, retroviral infection) and allowing the oocyte to develop in a pseudopregnant female foster animal. The human NOVX cDNA sequences, i.e., any one of SEQ ID NO:2n−1, wherein n is an integer between 1 and 566, can be introduced as a transgene into the genome of a non-human animal. Alternatively, a non-human homologue of the human NOVX gene, such as a mouse NOVX gene, can be isolated based on hybridization to the human NOVX cDNA (described further supra) and used as a transgene. Intronic sequences and polyadenylation signals can also be included in the transgene to increase the efficiency of expression of the transgene. A tissue-specific regulatory sequence(s) can be operably-linked to the NOVX transgene to direct expression of NOVX protein to particular cells. Methods for generating transgenic animals via embryo manipulation and microinjection, particularly animals such as mice, have become conventional in the art and are described, for example, in U.S. Pat. Nos. 4,736,866; 4,870,009; and 4,873,191; and Hogan, 1986. In: MANIPULATING THE MOUSE EMBRYO, Cold Spring Harbor Laboratory Press, Cold Spring Harbor, N.Y. Similar methods are used for production of other transgenic animals. A transgenic founder animal can be identified based upon the presence of the NOVX transgene in its genome and/or expression of NOVX mRNA in tissues or cells of the animals. A transgenic founder animal can then be used to breed additional animals carrying the transgene. Moreover, transgenic animals carrying a transgene-encoding NOVX protein can further be bred to other transgenic animals carrying other transgenes.

[0237] To create a homologous recombinant animal, a vector is prepared which contains at least a portion of a NOVX gene into which a deletion, addition or substitution has been introduced to thereby alter, e.g., functionally disrupt, the NOVX gene. The NOVX gene can be a human gene (e.g., the cDNA of any one of SEQ ID NO:2n−1, wherein n is an integer between 1 and 566), but more preferably, is a non-human homologue of a human NOVX gene. For example, a mouse homologue of human NOVX gene of SEQ ID NO:2n−1, wherein n is an integer between 1 and 566, can be used to construct a homologous recombination vector suitable for altering an endogenous NOVX gene in the mouse genome. In one embodiment, the vector is designed such that, upon homologous recombination, the endogenous NOVX gene is functionally disrupted (i.e., no longer encodes a functional protein; also referred to as a “knock out” vector).

[0238] Alternatively, the vector can be designed such that, upon homologous recombination, the endogenous NOVX gene is mutated or otherwise altered but still encodes functional protein (e.g., the upstream regulatory region can be altered to thereby alter the expression of the endogenous NOVX protein). In the homologous recombination vector, the altered portion of the NOVX gene is flanked at its 5′- and 3′-termini by additional nucleic acid of the NOVX gene to allow for homologous recombination to occur between the exogenous NOVX gene carried by the vector and an endogenous NOVX gene in an embryonic stem cell. The additional flanking NOVX nucleic acid is of sufficient length for successful homologous recombination with the endogenous gene. Typically, several kilobases of flanking DNA (both at the 5′- and 3′-termini) are included in the vector. See, e.g., Thomas, et al., 1987. Cell 51: 503 for a description of homologous recombination vectors. The vector is ten introduced into an embryonic stem cell line (e.g., by electroporation) and cells in which the introduced NOVX gene has homologously-recombined with the endogenous NOVX gene are selected. See, e.g., Li, et al., 1992. Cell 69: 915.

[0239] The selected cells are then injected into a blastocyst of an animal (e.g., a mouse) to form aggregation chimeras. See, e.g., Bradley, 1987. In: TERATOCARCINOMAS AND EMBRYONIC STEM CELLS: A PRACTICAL APPROACH, Robertson, ed. IRL, Oxford, pp. 113-152. A chimeric embryo can then be implanted into a suitable pseudopregnant female foster animal and the embryo brought to term. Progeny harboring the homologously-recombined DNA in their germ cells can be used to breed animals in which all cells of the animal contain the homologously-recombined DNA by germline transmission of the transgene. Methods for constructing homologous recombination vectors and homologous recombinant animals are described further in Bradley, 1991. Curr. Opin. Biotechnol. 2: 823-829; PCT International Publication Nos.: WO 90/11354; WO 91/01140; WO 92/0968; and WO 93/04169.

[0240] In another embodiment, transgenic non-humans animals can be produced that contain selected systems that allow for regulated expression of the transgene. One example of such a system is the cre/loxP recombinase system of bacteriophage P1. For a description of the cre/loxP recombinase system, see, e.g., Lakso, et al., 1992. Proc. Natl. Acad. Sci. USA 89: 6232-6236. Another example of a recombinase system is the FLP recombinase system of Saccharomyces cerevisiae. See, O'Gorman, et al., 1991. Science 251:1351-1355. If a cre/loxP recombinase system is used to regulate expression of the transgene, animals containing transgenes encoding both the Cre recombinase and a selected protein are required. Such animals can be provided through the construction of “double” transgenic animals, e.g., by mating two transgenic animals, one containing a transgene encoding a selected protein and the other containing a transgene encoding a recombinase.

[0241] Clones of the non-human transgenic animals described herein can also be produced according to the methods described in Wilmut, et al., 1997. Nature 385: 810-813. In brief, a cell (e.g., a somatic cell) from the transgenic animal can be isolated and induced to exit the growth cycle and enter G₀ phase. The quiescent cell can then be fused, e.g., through the use of electrical pulses, to an enucleated oocyte from an animal of the same species from which the quiescent cell is isolated. The reconstructed oocyte is then cultured such that it develops to morula or blastocyte and then transferred to pseudopregnant female foster animal. The offspring borne of this female foster animal will be a clone of the animal from which the cell (e.g., the somatic cell) is isolated.

Pharmaceutical Compositions

[0242] The NOVX nucleic acid molecules, NOVX proteins, and anti-NOVX antibodies (also referred to herein as “active compounds”) of the invention, and derivatives, fragments, analogs and homologs thereof, can be incorporated into pharmaceutical compositions suitable for administration. Such compositions typically comprise the nucleic acid molecule, protein, or antibody and a pharmaceutically acceptable carrier. As used herein, “pharmaceutically acceptable carrier” is intended to include any and all solvents, dispersion media, coatings, antibacterial and antifungal agents, isotonic and absorption delaying agents, and the like, compatible with pharmaceutical administration. Suitable carriers are described in the most recent edition of Remington's Pharmaceutical Sciences, a standard reference text in the field, which is incorporated herein by reference. Preferred examples of such carriers or diluents include, but are not limited to, water, saline, finger's solutions, dextrose solution, and 5% human serum albumin. Liposomes and non-aqueous vehicles such as fixed oils may also be used. The use of such media and agents for pharmaceutically active substances is well known in the art. Except insofar as any conventional media or agent is incompatible with the active compound, use thereof in the compositions is contemplated. Supplementary active compounds can also be incorporated into the compositions.

[0243] A pharmaceutical composition of the invention is formulated to be compatible with its intended route of administration. Examples of routes of administration include parenteral, e.g., intravenous, intradermal, subcutaneous, oral (e.g., inhalation), transdermal (i.e., topical), transmucosal, and rectal administration. Solutions or suspensions used for parenteral, intradermal, or subcutaneous application can include the following components: a sterile diluent such as water for injection, saline solution, fixed oils, polyethylene glycols, glycerine, propylene glycol or other synthetic solvents; antibacterial agents such as benzyl alcohol or methyl parabens; antioxidants such as ascorbic acid or sodium bisulfite; chelating agents such as ethylenediaminetetraacetic acid (EDTA); buffers such as acetates, citrates or phosphates, and agents for the adjustment of tonicity such as sodium chloride or dextrose. The pH can be adjusted with acids or bases, such as hydrochloric acid or sodium hydroxide. The parenteral preparation can be enclosed in ampoules, disposable syringes or multiple dose vials made of glass or plastic.

[0244] Pharmaceutical compositions suitable for injectable use include sterile aqueous solutions (where water soluble) or dispersions and sterile powders for the extemporaneous preparation of sterile injectable solutions or dispersion. For intravenous administration, suitable carriers include physiological saline, bacteriostatic water, Cremophor EL™ (BASF, Parsippany, N.J.) or phosphate buffered saline (PBS). In all cases, the composition must be sterile and should be fluid to the extent that easy syringeability exists. It must be stable under the conditions of manufacture and storage and must be preserved against the contaminating action of microorganisms such as bacteria and fungi. The carrier can be a solvent or dispersion medium containing, for example, water, ethanol, polyol (for example, glycerol, propylene glycol, and liquid polyethylene glycol, and the like), and suitable mixtures thereof. The proper fluidity can be maintained, for example, by the use of a coating such as lecithin, by the maintenance of the required particle size in the case of dispersion and by the use of surfactants. Prevention of the action of microorganisms can be achieved by various antibacterial and antifungal agents, for example, parabens, chlorobutanol, phenol, ascorbic acid, thimerosal, and the like. In many cases, it will be preferable to include isotonic agents, for example, sugars, polyalcohols such as manitol, sorbitol, sodium chloride in the composition. Prolonged absorption of the injectable compositions can be brought about by including in the composition an agent that delays absorption, for example, aluminum monostearate and gelatin.

[0245] Sterile injectable solutions can be prepared by incorporating the active compound (e.g., a NOVX protein or anti-NOVX antibody) in the required amount in an appropriate solvent with one or a combination of ingredients enumerated above, as required, followed by filtered sterilization. Generally, dispersions are prepared by incorporating the active compound into a sterile vehicle that contains a basic dispersion medium and the required other ingredients from those enumerated above. In the case of sterile powders for the preparation of sterile injectable solutions, methods of preparation are vacuum drying and freeze-drying that yields a powder of the active ingredient plus any additional desired ingredient from a previously sterile-filtered solution thereof.

[0246] Oral compositions generally include an inert diluent or an edible carrier. They can be enclosed in gelatin capsules or compressed into tablets. For the purpose of oral therapeutic administration, the active compound can be incorporated with excipients and used in the form of tablets, troches, or capsules. Oral compositions can also be prepared using a fluid carrier for use as a mouthwash, wherein the compound in the fluid carrier is applied orally and swished and expectorated or swallowed. Pharmaceutically compatible binding agents, and/or adjuvant materials can be included as part of the composition. The tablets, pills, capsules, troches and the like can contain any of the following ingredients, or compounds of a similar nature: a binder such as microcrystalline cellulose, gum tragacanth or gelatin; an excipient such as starch or lactose, a disintegrating agent such as alginic acid, Primogel, or corn starch; a lubricant such as magnesium stearate or Sterotes; a glidant such as colloidal silicon dioxide; a sweetening agent such as sucrose or saccharin; or a flavoring agent such as peppermint, methyl salicylate, or orange flavoring.

[0247] For administration by inhalation, the compounds are delivered in the form of an aerosol spray from pressured container or dispenser that contains a suitable propellant, e.g., a gas such as carbon dioxide, or a nebulizer.

[0248] Systemic administration can also be by transmucosal or transdermal means. For transmucosal or transdermal administration, penetrants appropriate to the barrier to be permeated are used in the formulation. Such penetrants are generally known in the art, and include, for example, for transmucosal administration, detergents, bile salts, and fusidic acid derivatives. Transmucosal administration can be accomplished through the use of nasal sprays or suppositories. For transdermal administration, the active compounds are formulated into ointments, salves, gels, or creams as generally known in the art.

[0249] The compounds can also be prepared in the form of suppositories (e.g., with conventional suppository bases such as cocoa butter and other glycerides) or retention enemas for rectal delivery.

[0250] In one embodiment, the active compounds are prepared with carriers that will protect the compound against rapid elimination from the body, such as a controlled release formulation, including implants and microencapsulated delivery systems. Biodegradable, biocompatible polymers can be used, such as ethylene vinyl acetate, polyanhydrides, polyglycolic acid, collagen, polyorthoesters, and polylactic acid. Methods for preparation of such formulations will be apparent to those skilled in the art. The materials can also be obtained commercially from Alza Corporation and Nova Pharmaceuticals, Inc. Liposomal suspensions (including liposomes targeted to infected cells with monoclonal antibodies to viral antigens) can also be used as pharmaceutically acceptable carriers. These can be prepared according to methods known to those skilled in the art, for example, as described in U.S. Pat. No. 4,522,811.

[0251] It is especially advantageous to formulate oral or parenteral compositions in dosage unit form for ease of administration and uniformity of dosage. Dosage unit form as used herein refers to physically discrete units suited as unitary dosages for the subject to be treated; each unit containing a predetermined quantity of active compound calculated to produce the desired therapeutic effect in association with the required pharmaceutical carrier. The specification for the dosage unit forms of the invention are dictated by and directly dependent on the unique characteristics of the active compound and the particular therapeutic effect to be achieved, and the limitations inherent in the art of compounding such an active compound for the treatment of individuals.

[0252] The nucleic acid molecules of the invention can be inserted into vectors and used as gene therapy vectors. Gene therapy vectors can be delivered to a subject by, for example, intravenous injection, local administration (see, e.g., U.S. Pat. No. 5,328,470) or by stereotactic injection (see, e.g., Chen, et al., 1994. Proc. Natl. Acad. Sci. USA 91: 3054-3057). The pharmaceutical preparation of the gene therapy vector can include the gene therapy vector in an acceptable diluent, or can comprise a slow release matrix in which the gene delivery vehicle is imbedded. Alternatively, where the complete gene delivery vector can be produced intact from recombinant cells, e.g., retroviral vectors, the pharmaceutical preparation can include one or more cells that produce the gene delivery system.

[0253] The pharmaceutical compositions can be included in a container, pack, or dispenser together with instructions for administration.

Screening and Detection Methods

[0254] The isolated nucleic acid molecules of the invention can be used to express NOVX protein (e.g., via a recombinant expression vector in a host cell in gene therapy applications), to detect NOVX mRNA (e.g., in a biological sample) or a genetic lesion in a NOVX gene, and to modulate NOVX activity, as described further, below. In addition, the NOVX proteins can be used to screen drugs or compounds that modulate the NOVX protein activity or expression as well as to treat disorders characterized by insufficient or excessive production of NOVX protein or production of NOVX protein forms that have decreased or aberrant activity compared to NOVX wild-type protein (e.g.; diabetes (regulates insulin release); obesity (binds and transport lipids); metabolic disturbances associated with obesity, the metabolic syndrome X as well as anorexia and wasting disorders associated with chronic diseases and various cancers, and infectious disease (possesses anti-microbial activity) and the various dyslipidemias. In addition, the anti-NOVX antibodies of the invention can be used to detect and isolate NOVX proteins and modulate NOVX activity. In yet a further aspect, the invention can be used in methods to influence appetite, absorption of nutrients and the disposition of metabolic substrates in both a positive and negative fashion.

[0255] The invention further pertains to novel agents identified by the screening assays described herein and uses thereof for treatments as described, supra.

Screening Assays

[0256] The invention provides a method (also referred to herein as a “screening assay”) for identifying modulators, i.e., candidate or test compounds or agents (e.g., peptides, peptidomimetics, small molecules or other drugs) that bind to NOVX proteins or have a stimulatory or inhibitory effect on, e.g., NOVX protein expression or NOVX protein activity. The invention also includes compounds identified in the screening assays described herein.

[0257] In one embodiment, the invention provides assays for screening candidate or test compounds that bind to or modulate the activity of the membrane-bound form of a NOVX protein or polypeptide or biologically-active portion thereof. The test compounds of the invention can be obtained using any of the numerous approaches in combinatorial library methods known in the art, including: biological libraries; spatially addressable parallel solid phase or solution phase libraries; synthetic library methods requiring deconvolution; the “one-bead one-compound” library method; and synthetic library methods using affinity chromatography selection. The biological library approach is limited to peptide libraries, while the other four approaches are applicable to peptide, non-peptide oligomer or small molecule libraries of compounds. See, e.g., Lam, 1997. Anticancer Drug Design 12: 145.

[0258] A “small molecule” as used herein, is meant to refer to a composition that has a molecular weight of less than about 5 kD and most preferably less than about 4 kD. Small molecules can be, e.g., nucleic acids, peptides, polypeptides, peptidomimetics, carbohydrates, lipids or other organic or inorganic molecules. Libraries of chemical and/or biological mixtures, such as fungal, bacterial, or algal extracts, are known in the art and can be screened with any of the assays of the invention.

[0259] Examples of methods for the synthesis of molecular libraries can be found in the art, for example in: DeWitt, et al., 1993. Proc. Natl. Acad. Sci. U.S.A. 90: 6909; Erb, et al., 1994. Proc. Natl. Acad. Sci. U.S.A. 91: 11422; Zuckermann, et al., 1994. J. Med. Chem. 37: 2678; Cho, et al., 1993. Science 261: 1303; Carrell, et al., 1994. Angew. Chem. Int. Ed. Engl. 33: 2059; Carell, et al., 1994. Angew. Chem. Int. Ed. Engl. 33: 2061; and Gallop, et al., 1994. J. Med. Chem. 37: 1233.

[0260] Libraries of compounds may be presented in solution (e.g., Houghten, 1992. Biotechniques 13: 412-421), or on beads (Lam, 1991. Nature 354: 82-84), on chips (Fodor, 1993. Nature 364: 555-556), bacteria (Ladner, U.S. Pat. No. 5,223,409), spores (Ladner, U.S. Pat. No. 5,233,409), plasmids (Cull, et al., 1992. Proc. Natl. Acad. Sci. USA 89: 1865-1869) or on phage (Scott and Smith, 1990. Science 249: 386-390; Devlin, 1990. Science 249: 404-406; Cwirla, et al., 1990. Proc. Natl. Acad. Sci. U.S.A. 87: 6378-6382; Felici, 1991. J. Mol. Biol. 222: 301-310; Ladner, U.S. Pat. No. 5,233,409.).

[0261] In one embodiment, an assay is a cell-based assay in which a cell which expresses a membrane-bound form of NOVX protein, or a biologically-active portion thereof, on the cell surface is contacted with a test compound and the ability of the test compound to bind to a NOVX protein determined. The cell, for example, can of mammalian origin or a yeast cell. Determining the ability of the test compound to bind to the NOVX protein can be accomplished, for example, by coupling the test compound with a radioisotope or enzymatic label such that binding of the test compound to the NOVX protein or biologically-active portion thereof can be determined by detecting the labeled compound in a complex. For example, test compounds can be labeled with ¹²⁵I, ³⁵S, ¹⁴C, or ³H, either directly or indirectly, and the radioisotope detected by direct counting of radioemission or by scintillation counting. Alternatively, test compounds can be enzymatically-labeled with, for example, horseradish peroxidase, alkaline phosphatase, or luciferase, and the enzymatic label detected by determination of conversion of an appropriate substrate to product. In one embodiment, the assay comprises contacting a cell which expresses a membrane-bound form of NOVX protein, or a biologically-active portion thereof, on the cell surface with a known compound which binds NOVX to form an assay mixture, contacting the assay mixture with a test compound, and determining the ability of the test compound to interact with a NOVX protein, wherein determining the ability of the test compound to interact with a NOVX protein comprises determining the ability of the test compound to preferentially bind to NOVX protein or a biologically-active portion thereof as compared to the known compound.

[0262] In another embodiment, an assay is a cell-based assay comprising contacting a cell expressing a membrane-bound form of NOVX protein, or a biologically-active portion thereof, on the cell surface with a test compound and determining the ability of the test compound to modulate (e.g., stimulate or inhibit) the activity of the NOVX protein or biologically-active portion thereof. Determining the ability of the test compound to modulate the activity of NOVX or a biologically-active portion thereof can be accomplished, for example, by determining the ability of the NOVX protein to bind to or interact with a NOVX target molecule. As used herein, a “target molecule” is a molecule with which a NOVX protein binds or interacts in nature, for example, a molecule on the surface of a cell which expresses a NOVX interacting protein, a molecule on the surface of a second cell, a molecule in the extracellular milieu, a molecule associated with the internal surface of a cell membrane or a cytoplasmic molecule. A NOVX target molecule can be a non-NOVX molecule or a NOVX protein or polypeptide of the invention. In one embodiment, a NOVX target molecule is a component of a signal transduction pathway that facilitates transduction of an extracellular signal (e.g., a signal generated by binding of a compound to a membrane-bound NOVX molecule) through the cell membrane and into the cell. The target, for example, can be a second intercellular protein that has catalytic activity or a protein that facilitates the association of downstream signaling molecules with NOVX.

[0263] Determining the ability of the NOVX protein to bind to or interact with a NOVX target molecule can be accomplished by one of the methods described above for determining direct binding. In one embodiment, determining the ability of the NOVX protein to bind to or interact with a NOVX target molecule can be accomplished by determining the activity of the target molecule. For example, the activity of the target molecule can be determined by detecting induction of a cellular second messenger of the target (i.e., intracellular Ca²⁺, diacylglycerol, IP₃, etc.) detecting catalytic/enzymatic activity of the target an appropriate substrate, detecting the induction of a reporter gene (comprising a NOVX-responsive regulatory element operatively linked to a nucleic acid encoding a detectable marker, e.g., luciferase), or detecting a cellular response, for example, cell survival, cellular differentiation, or cell proliferation.

[0264] In yet another embodiment, an assay of the invention is a cell-free assay comprising contacting a NOVX protein or biologically-active portion thereof with a test compound and determining the ability of the test compound to bind to the NOVX protein or biologically-active portion thereof. Binding of the test compound to the NOVX protein can be determined either directly or indirectly as described above. In one such embodiment, the assay comprises contacting the NOVX protein or biologically-active portion thereof with a known compound which binds NOVX to form an assay mixture, contacting the assay mixture with a test compound, and determining the ability of the test compound to interact with a NOVX protein, wherein determining the ability of the test compound to interact with a NOVX protein comprises determining the ability of the test compound to preferentially bind to NOVX or biologically-active portion thereof as compared to the known compound.

[0265] In still another embodiment, an assay is a cell-free assay comprising contacting NOVX protein or biologically-active portion thereof with a test compound and determining the ability of the test compound to modulate (e.g., stimulate or inhibit) the activity of the NOVX protein or biologically-active portion thereof. Determining the ability of the test compound to modulate the activity of NOVX can be accomplished, for example, by determining the ability of the NOVX protein to bind to a NOVX target molecule by one of the methods described above for determining direct binding. In an alternative embodiment, determining the ability of the test compound to modulate the activity of NOVX protein can be accomplished by determining the ability of the NOVX protein further modulate a NOVX target molecule. For example, the catalytic/enzymatic activity of the target molecule on an appropriate substrate can be determined as described, supra.

[0266] In yet another embodiment, the cell-free assay comprises contacting the NOVX protein or biologically-active portion thereof with a known compound which binds NOVX protein to form an assay mixture, contacting the assay mixture with a test compound, and determining the ability of the test compound to interact with a NOVX protein, wherein determining the ability of the test compound to interact with a NOVX protein comprises determining the ability of the NOVX protein to preferentially bind to or modulate the activity of a NOVX target molecule.

[0267] The cell-free assays of the invention are amenable to use of both the soluble form or the membrane-bound form of NOVX protein. In the case of cell-free assays comprising the membrane-bound form of NOVX protein, it may be desirable to utilize a solubilizing agent such that the membrane-bound form of NOVX protein is maintained in solution. Examples of such solubilizing agents include non-ionic detergents such as n-octylglucoside, n-dodecylglucoside, n-dodecylmaltoside, octanoyl-N-methylglucamide, decanoyl-N-methylglucamide, Triton® X-100, Triton® X-114, Thesit®, Isotridecypoly(ethylene glycol ether)ₙ, N-dodecyl-N,N-dimethyl-3-ammonio-1-propane sulfonate, 3-(3-cholamidopropyl) dimethylamminiol-1-propane sulfonate (CHAPS), or 3-(3-cholamidopropyl)dimethylamminiol-2-hydroxy-1-propane sulfonate (CHAPSO).

[0268] In more than one embodiment of the above assay methods of the invention, it may be desirable to immobilize either NOVX protein or its target molecule to facilitate separation of complexed from uncomplexed forms of one or both of the proteins, as well as to accommodate automation of the assay. Binding of a test compound to NOVX protein, or interaction of NOVX protein with a target molecule in the presence and absence of a candidate compound, can be accomplished in any vessel suitable for containing the reactants. Examples of such vessels include microtiter plates, test tubes, and micro-centrifuge tubes. In one embodiment, a fusion protein can be provided that adds a domain that allows one or both of the proteins to be bound to a matrix. For example, GST-NOVX fusion proteins or GST-target fusion proteins can be adsorbed onto glutathione sepharose beads (Sigma Chemical, St. Louis, Mo.) or glutathione derivatized microtiter plates, that are then combined with the test compound or the test compound and either the non-adsorbed target protein or NOVX protein, and the mixture is incubated under conditions conducive to complex formation (e.g., at physiological conditions for salt and pH). Following incubation, the beads or microtiter plate wells are washed to remove any unbound components, the matrix immobilized in the case of beads, complex determined either directly or indirectly, for example, as described, supra. Alternatively, the complexes can be dissociated from the matrix, and the level of NOVX protein binding or activity determined using standard techniques.

[0269] Other techniques for immobilizing proteins on matrices can also be used in the screening assays of the invention. For example, either the NOVX protein or its target molecule can be immobilized utilizing conjugation of biotin and streptavidin. Biotinylated NOVX protein or target molecules can be prepared from biotin-NHS (N-hydroxy-succinimide) using techniques well-known within the art (e.g., biotinylation kit, Pierce Chemicals, Rockford, Ill.), and immobilized in the wells of streptavidin-coated 96 well plates (Pierce Chemical). Alternatively, antibodies reactive with NOVX protein or target molecules, but which do not interfere with binding of the NOVX protein to its target molecule, can be derivatized to the wells of the plate, and unbound target or NOVX protein trapped in the wells by antibody conjugation. Methods for detecting such complexes, in addition to those described above for the GST-immobilized complexes, include immunodetection of complexes using antibodies reactive with the NOVX protein or target molecule, as well as enzyme-linked assays that rely on detecting an enzymatic activity associated with the NOVX protein or target molecule.

[0270] In another embodiment, modulators of NOVX protein expression are identified in a method wherein a cell is contacted with a candidate compound and the expression of NOVX mRNA or protein in the cell is determined. The level of expression of NOVX mRNA or protein in the presence of the candidate compound is compared to the level of expression of NOVX mRNA or protein in the absence of the candidate compound. The candidate compound can then be identified as a modulator of NOVX mRNA or protein expression based upon this comparison. For example, when expression of NOVX mRNA or protein is greater (i.e., statistically significantly greater) in the presence of the candidate compound than in its absence, the candidate compound is identified as a stimulator of NOVX mRNA or protein expression. Alternatively, when expression of NOVX mRNA or protein is less (statistically significantly less) in the presence of the candidate compound than in its absence, the candidate compound is identified as an inhibitor of NOVX mRNA or protein expression. The level of NOVX mRNA or protein expression in the cells can be determined by methods described herein for detecting NOVX mRNA or protein.

[0271] In yet another aspect of the invention, the NOVX proteins can be used as “bait proteins” in a two-hybrid assay or three hybrid assay (see, e.g., U.S. Pat. No. 5,283,317; Zervos, et al., 1993. Cell 72: 223-232; Madura, et al., 1993. J. Biol. Chem. 268: 12046-12054; Bartel, et al., 1993. Biotechniques 14: 920-924; Iwabuchi, et al., 1993. Oncogene 8: 1693-1696; and Brent WO 94/10300), to identify other proteins that bind to or interact with NOVX (“NOVX-binding proteins” or “NOVX-bp”) and modulate NOVX activity. Such NOVX-binding proteins are also involved in the propagation of signals by the NOVX proteins as, for example, upstream or downstream elements of the NOVX pathway.

[0272] The two-hybrid system is based on the modular nature of most transcription factors, which consist of separable DNA-binding and activation domains. Briefly, the assay utilizes two different DNA constructs. In one construct, the gene that codes for NOVX is fused to a gene encoding the DNA binding domain of a known transcription factor (e.g., GAL-4). In the other construct, a DNA sequence, from a library of DNA sequences, that encodes an unidentified protein (“prey” or “sample”) is fused to a gene that codes for the activation domain of the known transcription factor. If the “bait” and the “prey” proteins are able to interact, in vivo, forming a NOVX-dependent complex, the DNA-binding and activation domains of the transcription factor are brought into close proximity. This proximity allows transcription of a reporter gene (e.g., LacZ) that is operably linked to a transcriptional regulatory site responsive to the transcription factor. Expression of the reporter gene can be detected and cell colonies containing the functional transcription factor can be isolated and used to obtain the cloned gene that encodes the protein which interacts with NOVX.

[0273] The invention further pertains to novel agents identified by the aforementioned screening assays and uses thereof for treatments as described herein.

Detection Assays

[0274] Portions or fragments of the cDNA sequences identified herein (and the corresponding complete gene sequences) can be used in numerous ways as polynucleotide reagents. By way of example, and not of limitation, these sequences can be used to: (i) map their respective genes on a chromosome; and, thus, locate gene regions associated with genetic disease; (ii) identify an individual from a minute biological sample (tissue typing); and (iii) aid in forensic identification of a biological sample. Some of these applications are described in the subsections, below.

[0275] Chromosome Mapping

[0276] Once the sequence (or a portion of the sequence) of a gene has been isolated, this sequence can be used to map the location of the gene on a chromosome. This process is called chromosome mapping. Accordingly, portions or fragments of the NOVX sequences of SEQ ID NO:2n−1, wherein n is an integer between 1 and 566, or fragments or derivatives thereof, can be used to map the location of the NOVX genes, respectively, on a chromosome. The mapping of the NOVX sequences to chromosomes is an important first step in correlating these sequences with genes associated with disease.

[0277] Briefly, NOVX genes can be mapped to chromosomes by preparing PCR primers (preferably 15-25 bp in length) from the NOVX sequences. Computer analysis of the NOVX, sequences can be used to rapidly select primers that do not span more than one exon in the genomic DNA, thus complicating the amplification process. These primers can then be used for PCR screening of somatic cell hybrids containing individual human chromosomes. Only those hybrids containing the human gene corresponding to the NOVX sequences will yield an amplified fragment.

[0278] Somatic cell hybrids are prepared by fusing somatic cells from different mammals (e.g., human and mouse cells). As hybrids of human and mouse cells grow and divide, they gradually lose human chromosomes in random order, but retain the mouse chromosomes. By using media in which mouse cells cannot grow, because they lack a particular enzyme, but in which human cells can, the one human chromosome that contains the gene encoding the needed enzyme will be retained. By using various media, panels of hybrid cell lines can be established. Each cell line in a panel contains either a single human chromosome or a small number of human chromosomes, and a full set of mouse chromosomes, allowing easy mapping of individual genes to specific human chromosomes. See, e.g., D'Eustachio, et al., 1983. Science 220: 919-924. Somatic cell hybrids containing only fragments of human chromosomes can also be produced by using human chromosomes with translocations and deletions.

[0279] PCR mapping of somatic cell hybrids is a rapid procedure for assigning a particular sequence to a particular chromosome. Three or more sequences can be assigned per day using a single thermal cycler. Using the NOVX sequences to design oligonucleotide primers, sub-localization can be achieved with panels of fragments from specific chromosomes.

[0280] Fluorescence in situ hybridization (FISH) of a DNA sequence to a metaphase chromosomal spread can further be used to provide a precise chromosomal location in one step. Chromosome spreads can be made using cells whose division has been blocked in metaphase by a chemical like colcemid that disrupts the mitotic spindle. The chromosomes can be treated briefly with trypsin, and then stained with Giemsa. A pattern of light and dark bands develops on each chromosome, so that the chromosomes can be identified individually. The FISH technique can be used with a DNA sequence as short as 500 or 600 bases. However, clones larger than 1,000 bases have a higher likelihood of binding to a unique chromosomal location with sufficient signal intensity for simple detection. Preferably 1,000 bases, and more preferably 2,000 bases, will suffice to get good results at a reasonable amount of time. For a review of this technique, see, Verma, et al., HUMAN CHROMOSOMES: A MANUAL OF BASIC TECHNIQUES (Pergamon Press, New York 1988).

[0281] Reagents for chromosome mapping can be used individually to mark a single chromosome or a single site on that chromosome, or panels of reagents can be used for marking multiple sites and/or multiple chromosomes. Reagents corresponding to noncoding regions of the genes actually are preferred for mapping purposes. Coding sequences are more likely to be conserved within gene families, thus increasing the chance of cross hybridizations during chromosomal mapping.

[0282] Once a sequence has been mapped to a precise chromosomal location, the physical position of the sequence on the chromosome can be correlated with genetic map data. Such data are found, e.g., in McKusick, MENDELIAN INHERITANCE IN MAN, available on-line through Johns Hopkins University Welch Medical Library). The relationship between genes and disease, mapped to the same chromosomal region, can then be identified through linkage analysis (co-inheritance of physically adjacent genes), described in, e.g., Egeland, et al., 1987. Nature, 325: 783-787.

[0283] Moreover, differences in the DNA sequences between individuals affected and unaffected with a disease associated with the NOVX gene, can be determined. If a mutation is observed in some or all of the affected individuals but not in any unaffected individuals, then the mutation is likely to be the causative agent of the particular disease. Comparison of affected and unaffected individuals generally involves first looking for structural alterations in the chromosomes, such as deletions or translocations that are visible from chromosome spreads or detectable using PCR based on that DNA sequence. Ultimately, complete sequencing of genes from several individuals can be performed to confirm the presence of a mutation and to distinguish mutations from polymorphisms.

[0284] Tissue Typing

[0285] The NOVX sequences of the invention can also be used to identify individuals from minute biological samples. In this technique, an individual's genomic DNA is digested with one or more restriction enzymes, and probed on a Southern blot to yield unique bands for identification. The sequences of the invention are useful as additional DNA markers for RFLP (“restriction fragment length polymorphisms,” described in U.S. Pat. No. 5,272,057).

[0286] Furthermore, the sequences of the invention can be used to provide an alternative technique that determines the actual base-by-base DNA sequence of selected portions of an individual's genome. Thus, the NOVX sequences described herein can be used to prepare two PCR primers from the 5′- and 3′-termini of the sequences. These primers can then be used to amplify an individual's DNA and subsequently sequence it.

[0287] Panels of corresponding DNA sequences from individuals, prepared in this manner, can provide unique individual identifications, as each individual will have a unique set of such DNA sequences due to allelic differences. The sequences of the invention can be used to obtain such identification sequences from individuals and from tissue. The NOVX sequences of the invention uniquely represent portions of the human genome. Allelic variation occurs to some degree in the coding regions of these sequences, and to a greater degree in the noncoding regions. It is estimated that allelic variation between individual humans occurs with a frequency of about once per each 500 bases. Much of the allelic variation is due to single nucleotide polymorphisms (SNPs), which include restriction fragment length polymorphisms (RFLPs).

[0288] Each of the sequences described herein can, to some degree, be used as a standard against which DNA from an individual can be compared for identification purposes. Because greater numbers of polymorphisms occur in the noncoding regions, fewer sequences are necessary to differentiate individuals. The noncoding sequences can comfortably provide positive individual identification with a panel of perhaps 10 to 1,000 primers that each yield a noncoding amplified sequence of 100 bases. If coding sequences, such as those of SEQ ID NO:2n−1, wherein n is an integer between 1 and 566, are used, a more appropriate number of primers for positive individual identification would be 500-2,000.

[0289] Predictive Medicine

[0290] The invention also pertains to the field of predictive medicine in which diagnostic assays, prognostic assays, pharmacogenomics, and monitoring clinical trials are used for prognostic (predictive) purposes to thereby treat an individual prophylactically. Accordingly, one aspect of the invention relates to diagnostic assays for determining NOVX protein and/or nucleic acid expression as well as NOVX activity, in the context of a biological sample (e.g., blood, serum, cells, tissue) to thereby determine whether an individual is afflicted with a disease or disorder, or is at risk of developing a disorder, associated with aberrant NOVX expression or activity. The disorders include metabolic disorders, diabetes, obesity, infectious disease, anorexia, cancer-associated cachexia, cancer, neurodegenerative disorders, Alzheimer's Disease, Parkinson's Disorder, immune disorders, and hematopoietic disorders, and the various dyslipidemias, metabolic disturbances associated with obesity, the metabolic syndrome X and wasting disorders associated with chronic diseases and various cancers. The invention also provides for prognostic (or predictive) assays for determining whether an individual is at risk of developing a disorder associated with NOVX protein, nucleic acid expression or activity. For example, mutations in a NOVX gene can be assayed in a biological sample. Such assays can be used for prognostic or predictive purpose to thereby prophylactically treat an individual prior to the onset of a disorder characterized by or associated with NOVX protein, nucleic acid expression, or biological activity.

[0291] Another aspect of the invention provides methods for determining NOVX protein, nucleic acid expression or activity in an individual to thereby select appropriate therapeutic or prophylactic agents for that individual (referred to herein as “pharmacogenomics”). Pharmacogenomics allows for the selection of agents (e.g., drugs) for therapeutic or prophylactic treatment of an individual based on the genotype of the individual (e.g., the genotype of the individual examined to determine the ability of the individual to respond to a particular agent.)

[0292] Yet another aspect of the invention pertains to monitoring the influence of agents (e.g., drugs, compounds) on the expression or activity of NOVX in clinical trials.

[0293] These and other agents are described in further detail in the following sections.

[0294] Diagnostic Assays

[0295] An exemplary method for detecting the presence or absence of NOVX in a biological sample involves obtaining a biological sample from a test subject and contacting the biological sample with a compound or an agent capable of detecting NOVX protein or nucleic acid (e.g., mRNA, genomic DNA) that encodes NOVX protein such that the presence of NOVX is detected in the biological sample. An agent for detecting NOVX mRNA or genomic DNA is a labeled nucleic acid probe capable of hybridizing to NOVX mRNA or genomic DNA. The nucleic acid probe can be, for example, a full-length NOVX nucleic acid, such as the nucleic acid of SEQ ID NO:2n−1, wherein n is an integer between 1 and 566, or a portion thereof, such as an oligonucleotide of at least 15, 30, 50, 100, 250 or 500 nucleotides in length and sufficient to specifically hybridize under stringent conditions to NOVX mRNA or genomic DNA. Other suitable probes for use in the diagnostic assays of the invention are described herein.

[0296] An agent for detecting NOVX protein is an antibody capable of binding to NOVX protein, preferably an antibody with a detectable label. Antibodies can be polyclonal, or more preferably, monoclonal. An intact antibody, or a fragment thereof (e.g., Fab or F(ab′)₂) can be used. The term “labeled”, with regard to the probe or antibody, is intended to encompass direct labeling of the probe or antibody by coupling (ise., physically linking) a detectable substance to the probe or antibody, as well as indirect labeling of the probe or antibody by reactivity with another reagent that is directly labeled. Examples of indirect labeling include detection of a primary antibody using a fluorescently-labeled secondary antibody and end-labeling of a DNA probe with biotin such that it can be detected with fluorescently-labeled streptavidin. The term “biological sample” is intended to include tissues, cells and biological fluids isolated from a subject, as well as tissues, cells and fluids present within a subject. That is, the detection method of the invention can be used to detect NOVX mRNA, protein, or genomic DNA in a biological sample in vitro as well as in vivo. For example, in vitro techniques for detection of NOVX mRNA include Northern hybridizations and in situ hybridizations. In vitro techniques for detection of NOVX protein include enzyme linked immunosorbent assays (ELISAs), Western blots, immunoprecipitations, and immunofluorescence. In vitro techniques for detection of NOVX genomic DNA include Southern hybridizations. Furthermore, in vivo techniques for detection of NOVX protein include introducing into a subject a labeled anti-NOVX antibody. For example, the antibody can be labeled with a radioactive marker whose presence and location in a subject can be detected by standard imaging techniques.

[0297] In one embodiment, the biological sample contains protein molecules from the test subject. Alternatively, the biological sample can contain mRNA molecules from the test subject or genomic DNA molecules from the test subject. A preferred biological sample is a peripheral blood leukocyte sample isolated by conventional means from a subject.

[0298] In another embodiment, the methods further involve obtaining a control biological sample from a control subject, contacting the control sample with a compound or agent capable of detecting NOVX protein, mRNA, or genomic DNA, such that the presence of NOVX protein, mRNA or genomic DNA is detected in the biological sample, and comparing the presence of NOVX protein, mRNA or genomic DNA in the control sample with the presence of NOVX protein, mRNA or genomic DNA in the test sample.

[0299] The invention also encompasses kits for detecting the presence of NOVX in a biological sample. For example, the kit can comprise: a labeled compound or agent capable of detecting NOVX protein or mRNA in a biological sample; means for determining the amount of NOVX in the sample; and means for comparing the amount of NOVX in the sample with a standard. The compound or agent can be packaged in a suitable container. The kit can further comprise instructions for using the kit to detect NOVX protein or nucleic acid.

[0300] Prognostic Assays

[0301] The diagnostic methods described herein can furthermore be utilized to identify subjects having or at risk of developing a disease or disorder associated with aberrant NOVX expression or activity. For example, the assays described herein, such as the preceding diagnostic assays or the following assays, can be utilized to identify a subject having or at risk of developing a disorder associated with NOVX protein, nucleic acid expression or activity. Alternatively, the prognostic assays can be utilized to identify a subject having or at risk for developing a disease or disorder. Thus, the invention provides a method for identifying a disease or disorder associated with aberrant NOVX expression or activity in which a test sample is obtained from a subject and NOVX protein or nucleic acid (e.g., mRNA, genomic DNA) is detected, wherein the presence of NOVX protein or nucleic acid is diagnostic for a subject having or at risk of developing a disease or disorder associated with aberrant NOVX expression or activity. As used herein, a “test sample” refers to a biological sample obtained from a subject of interest. For example, a test sample can be a biological fluid (e.g., serum), cell sample, or tissue.

[0302] Furthermore, the prognostic assays described herein can be used to determine whether a subject can be administered an agent (e.g., an agonist, antagonist, peptidomimetic, protein, peptide, nucleic acid, small molecule, or other drug candidate) to treat a disease or disorder associated with aberrant NOVX expression or activity. For example, such methods can be used to determine whether a subject can be effectively treated with an agent for a disorder. Thus, the invention provides methods for determining whether a subject can be effectively treated with an agent for a disorder associated with aberrant NOVX expression or activity in which a test sample is obtained and NOVX protein or nucleic acid is detected (e.g., wherein the presence of NOVX protein or nucleic acid is diagnostic for a subject that can be administered the agent to treat a disorder associated with aberrant NOVX expression or activity).

[0303] The methods of the invention can also be used to detect genetic lesions in a NOVX gene, thereby determining if a subject with the lesioned gene is at risk for a disorder characterized by aberrant cell proliferation and/or differentiation. In various embodiments, the methods include detecting, in a sample of cells from the subject, the presence or absence of a genetic lesion characterized by at least one of an alteration affecting the integrity of a gene encoding a NOVX-protein, or the misexpression of the NOVX gene. For example, such genetic lesions can be detected by ascertaining the existence of at least one of: (i) a deletion of one or more nucleotides from a NOVX gene; (ii) an addition of one or more nucleotides to a NOVX gene; (iii) a substitution of one or more nucleotides of a NOVX gene, (iv) a chromosomal rearrangement of a NOVX gene; (v) an alteration in the level of a messenger RNA transcript of a NOVX gene, (vi) aberrant modification of a NOVX gene, such as of the methylation pattern of the genomic DNA, (vii) the presence of a non-wild-type splicing pattern of a messenger RNA transcript of a NOVX gene, (viii) a non-wild-type level of a NOVX protein, (ix) allelic loss of a NOVX gene, and (x) inappropriate post-translational modification of a NOVX protein. As described herein, there are a large number of assay techniques known in the art which can be used for detecting lesions in a NOVX gene. A preferred biological sample is a peripheral blood leukocyte sample isolated by conventional means from a subject. However, any biological sample containing nucleated cells may be used, including, for example, buccal mucosal cells.

[0304] In certain embodiments, detection of the lesion involves the use of a probe/primer in a polymerase chain reaction (PCR) (see, e.g. U.S. Pat. Nos. 4,683,195 and 4,683,202), such as anchor PCR or RACE PCR, or, alternatively, in a ligation chain reaction (LCR) (see, e.g., Landegran, et al., 1988. Science 241: 1077-1080; and Nakazawa, et al., 1994. Proc. Natl. Acad. Sci. USA 91: 360-364), the latter of which can be particularly useful for detecting point mutations in the NOVX-gene (see, Abravaya, et al., 1995. Nucl. Acids Res. 23: 675-682). This method can include the steps of collecting a sample of cells from a patient, isolating nucleic acid (e.g., genomic, mRNA or both) from the cells of the sample, contacting the nucleic acid sample with one or more primers that specifically hybridize to a NOVX gene under conditions such that hybridization and amplification of the NOVX gene (if present) occurs, and detecting the presence or absence of an amplification product, or detecting the size of the amplification product and comparing the length to a control sample. It is anticipated that PCR and/or LCR may be desirable to use as a preliminary amplification step in conjunction with any of the techniques used for detecting mutations described herein.

[0305] Alternative amplification methods include: self sustained sequence replication (see, Guatelli, et al., 1990. Proc. Natl. Acad. Sci. USA 87: 1874-1878), transcriptional amplification system (see, Kwoh, et al., 1989. Proc. Natl. Acad. Sci. USA 86: 1173-1177); Qβ Replicase (see, Lizardi, et al, 1988. BioTechnology 6: 1197), or any other nucleic acid amplification method, followed by the detection of the amplified molecules using techniques well known to those of skill in the art. These detection schemes are especially useful for the detection of nucleic acid molecules if such molecules are present in very low numbers.

[0306] In an alternative embodiment, mutations in a NOVX gene from a sample cell can be identified by alterations in restriction enzyme cleavage patterns. For example, sample and control DNA is isolated, amplified (optionally), digested with one or more restriction endonucleases, and fragment length sizes are determined by gel electrophoresis and compared. Differences in fragment length sizes between sample and control DNA indicates mutations in the sample DNA. Moreover, the use of sequence specific ribozymes (see, e.g., U.S. Pat. No. 5,493,531) can be used to score for the presence of specific mutations by development or loss of a ribozyme cleavage site.

[0307] In other embodiments, genetic mutations in NOVX can be identified by hybridizing a sample and control nucleic acids, e.g., DNA or RNA, to high-density arrays containing hundreds or thousands of oligonucleotides probes. See, e.g., Cronin, et al., 1996. Human Mutation 7: 244-255; Kozal, et al., 1996. Nat. Med. 2: 753-759. For example, genetic mutations in NOVX can be identified in two dimensional arrays containing light-generated DNA probes as described in Cronin, et al., supra. Briefly, a first hybridization array of probes can be used to scan through long stretches of DNA in a sample and control to identify base changes between the sequences by making linear arrays of sequential overlapping probes. This step allows the identification of point mutations. This is followed by a second hybridization array that allows the characterization of specific mutations by using smaller, specialized probe arrays complementary to all variants or mutations detected. Each mutation array is composed of parallel probe sets, one complementary to the wild-type gene and the other complementary to the mutant gene.

[0308] In yet another embodiment, any of a variety of sequencing reactions known in the art can be used to directly sequence the NOVX gene and detect mutations by comparing the sequence of the sample NOVX with the corresponding wild-type (control) sequence. Examples of sequencing reactions include those based on techniques developed by Maxim and Gilbert, 1977. Proc. Natl. Acad. Sci. USA 74: 560 or Sanger, 1977. Proc. Natl. Acad. Sci. USA 74: 5463. It is also contemplated that any of a variety of automated sequencing procedures can be utilized when performing the diagnostic assays (see, e.g., Naeve, et al., 1995. Biotechniques 19: 448), including sequencing by mass spectrometry (see, e.g., PCT International Publication No. WO 94/16101; Cohen, et al., 1996. Adv. Chromatography 36: 127-162; and Griffin, et al., 1993. Appl. Biochem. Biotechnol. 38: 147-159).

[0309] Other methods for detecting mutations in the NOVX gene include methods in which protection from cleavage agents is used to detect mismatched bases in RNA/RNA or RNA/DNA heteroduplexes. See, e.g., Myers, et al., 1985. Science 230: 1242. In general, the art technique of “mismatch cleavage” starts by providing heteroduplexes of formed by hybridizing (labeled) RNA or DNA containing the wild-type NOVX sequence with potentially mutant RNA or DNA obtained from a tissue sample. The double-stranded duplexes are treated with an agent that cleaves single-stranded regions of the duplex such as which will exist due to basepair mismatches between the control and sample strands. For instance, RNA/DNA duplexes can be treated with RNase and DNA/DNA hybrids treated with S₁ nuclease to enzymatically digesting the mismatched regions. In other embodiments, either DNA/DNA or RNA/DNA duplexes can be treated with hydroxylamine or osmium tetroxide and with piperidine in order to digest mismatched regions. After digestion of the mismatched regions, the resulting material is then separated by size on denaturing polyacrylamide gels to determine the site of mutation. See, e.g., Cotton, et al., 1988. Proc. Natl. Acad. Sci. USA 85: 4397; Saleeba, et al., 1992. Methods Enzymol. 217: 286-295. In an embodiment, the control DNA or RNA can be labeled for detection.

[0310] In still another embodiment, the mismatch cleavage reaction employs one or more proteins that recognize mismatched base pairs in double-stranded DNA (so called “DNA mismatch repair” enzymes) in defined systems for detecting and mapping point mutations in NOVX cDNAs obtained from samples of cells. For example, the mutY enzyme of E. coli cleaves A at G/A mismatches and the thymidine DNA glycosylase from HeLa cells cleaves T at G/T mismatches. See, e.g., Hsu, et al., 1994. Carcinogenesis 15: 1657-1662. According to an exemplary embodiment, a probe based on a NOVX sequence, e.g., a wild-type NOVX sequence, is hybridized to a cDNA or other DNA product from a test cell(s). The duplex is treated with a DNA mismatch repair enzyme, and the cleavage products, if any, can be detected from electrophoresis protocols or the like. See, e.g., U.S. Pat. No. 5,459,039.

[0311] In other embodiments, alterations in electrophoretic mobility will be used to identify mutations in NOVX genes. For example, single strand conformation polymorphism (SSCP) may be used to detect differences in electrophoretic mobility between mutant and wild type nucleic acids. See, e.g., Orita, et al., 1989. Proc. Natl. Acad. Sci. USA: 86: 2766; Cotton, 1993. Mutat. Res. 285: 125-144; Hayashi, 1992. Genet. Anal. Tech. Appl. 9: 73-79. Single-stranded DNA fragments of sample and control NOVX nucleic acids will be denatured and allowed to renature. The secondary structure of single-stranded nucleic acids varies according to sequence, the resulting alteration in electrophoretic mobility enables the detection of even a single base change. The DNA fragments may be labeled or detected with labeled probes. The sensitivity of the assay may be enhanced by using RNA (rather than DNA), in which the secondary structure is more sensitive to a change in sequence. In one embodiment, the subject method utilizes heteroduplex analysis to separate double stranded heteroduplex molecules on the basis of changes in electrophoretic mobility. See, e.g., Keen, et al., 1991. Trends Genet. 7: 5.

[0312] In yet another embodiment, the movement of mutant or wild-type fragments in polyacrylamide gels containing a gradient of denaturant is assayed using denaturing gradient gel electrophoresis (DGGE). See, e.g., Myers, et al., 1985. Nature 313: 495. When DGGE is used as the method of analysis, DNA will be modified to insure that it does not completely denature, for example by adding a GC clamp of approximately 40 bp of high-melting GC-rich DNA by PCR. In a further embodiment, a temperature gradient is used in place of a denaturing gradient to identify differences in the mobility of control and sample DNA. See, e.g., Rosenbaum and Reissner, 1987. Biophys. Chem. 265:12753.

[0313] Examples of other techniques for detecting point mutations include, but are not limited to, selective oligonucleotide hybridization, selective amplification, or selective primer extension. For example, oligonucleotide primers may be prepared in which the known mutation is placed centrally and then hybridized to target DNA under conditions that permit hybridization only if a perfect match is found. See, e.g., Saiki, et al., 1986. Nature 324: 163; Saiki, et al., 1989. Proc. Natl. Acad. Sci. USA 86: 6230. Such allele specific oligonucleotides are hybridized to PCR amplified target DNA or a number of different mutations when the oligonucleotides are attached to the hybridizing membrane and hybridized with labeled target DNA.

[0314] Alternatively, allele specific amplification technology that depends on selective PCR amplification may be used in conjunction with the instant invention. Oligonucleotides used as primers for specific amplification may carry the mutation of interest in the center of the molecule (so that amplification depends on differential hybridization; see, e.g., Gibbs, et al., 1989. Nucl. Acids Res. 17: 2437-2448) or at the extreme 3′-terminus of one primer where, under appropriate conditions, mismatch can prevent, or reduce polymerase extension (see, e.g., Prossner, 1993. Tibtech. 11: 238). In addition it may be desirable to introduce a novel restriction site in the region of the mutation to create cleavage-based detection. See, e.g., Gasparini, et al., 1992. Mol. Cell Probes 6: 1. It is anticipated that in certain embodiments amplification may also be performed using Taq ligase for amplification. See, e.g., Barany, 1991. Proc. Natl. Acad. Sci. USA 88: 189. In such cases, ligation will occur only if there is a perfect match at the 3′-terminus of the 5′ sequence, making it possible to detect the presence of a known mutation at a specific site by looking for the presence or absence of amplification.

[0315] The methods described herein may be performed, for example, by utilizing pre-packaged diagnostic kits comprising at least one probe nucleic acid or antibody reagent described herein, which may be conveniently used, e.g., in clinical settings to diagnose patients exhibiting symptoms or family history of a disease or illness involving a NOVX gene.

[0316] Furthermore, any cell type or tissue, preferably peripheral blood leukocytes, in which NOVX is expressed may be utilized in the prognostic assays described herein. However, any biological sample containing nucleated cells may be used, including, for example, buccal mucosal cells.

[0317] Pharmacogenomics

[0318] Agents, or modulators that have a stimulatory or inhibitory effect on NOVX activity (e.g., NOVX gene expression), as identified by a screening assay described herein can be administered to individuals to treat (prophylactically or therapeutically) disorders. The disorders include but are not limited to, e.g., those diseases, disorders and conditions listed above, and more particularly include those diseases, disorders, or conditions associated with homologs of a NOVX protein, such as those summarized in Table A.

[0319] In conjunction with such treatment, the pharmacogenomics (i.e., the study of the relationship between an individual's genotype and that individual's response to a foreign compound or drug) of the individual may be considered. Differences in metabolism of therapeutics can lead to severe toxicity or therapeutic failure by altering the relation between dose and blood concentration of the pharmacologically active drug. Thus, the pharmacogenomics of the individual permits the selection of effective agents (e.g., drugs) for prophylactic or therapeutic treatments based on a consideration of the individual's genotype. Such pharmacogenomics can further be used to determine appropriate dosages and therapeutic regimens. Accordingly, the activity of NOVX protein, expression of NOVX nucleic acid, or mutation content of NOVX genes in an individual can be determined to thereby select appropriate agent(s) for therapeutic or prophylactic treatment of the individual.

[0320] Pharmacogenomics deals with clinically significant hereditary variations in the response to drugs due to altered drug disposition and abnormal action in affected persons. See e.g., Eichelbaum, 1996. Clin. Exp. Pharmacol. Physiol., 23: 983-985; Linder, 1997. Clin. Chem., 43: 254-266. In general, two types of pharmacogenetic conditions can be differentiated. Genetic conditions transmitted as a single factor altering the way drugs act on the body (altered drug action) or genetic conditions transmitted as single factors altering the way the body acts on drugs (altered drug metabolism). These pharmacogenetic conditions can occur either as rare defects or as polymorphisms. For example, glucose-6-phosphate dehydrogenase (G6PD) deficiency is a common inherited enzymopathy in which the main clinical complication is hemolysis after ingestion of oxidant drugs (anti-malarials, sulfonamides, analgesics, nitrofurans) and consumption of fava beans.

[0321] As an illustrative embodiment, the activity of drug metabolizing enzymes is a major determinant of both the intensity and duration of drug action. The discovery of genetic polymorphisms of drug metabolizing enzymes (e.g., N-acetyltransferase 2 (NAT 2) and cytochrome pregnancy zone protein precursor enzymes CYP2D6 and CYP2C19) has provided an explanation as to why some patients do not obtain the expected drug effects or show exaggerated drug response and serious toxicity after taking the standard and safe dose of a drug. These polymorphisms are expressed in two phenotypes in the population, the extensive metabolizer (EM) and poor metabolizer (PM). The prevalence of PM is different among different populations. For example, the gene coding for CYP2D6 is highly polymorphic and several mutations have been identified in PM, which all lead to the absence of functional CYP2D6. Poor metabolizers of CYP2D6 and CYP2C19 quite frequently experience exaggerated drug response and side effects when they receive standard doses. If a metabolite is the active therapeutic moiety, PM show no therapeutic response, as demonstrated for the analgesic effect of codeine mediated by its CYP2D6-formed metabolite morphine. At the other extreme are the so called ultra-rapid metabolizers who do not respond to standard doses. Recently, the molecular basis of ultra-rapid metabolism has been identified to be due to CYP2D6 gene amplification.

[0322] Thus, the activity of NOVX protein, expression of NOVX nucleic acid, or mutation content of NOVX genes in an individual can be determined to thereby select appropriate agent(s) for therapeutic or prophylactic treatment of the individual. In addition, pharmacogenetic studies can be used to apply genotyping of polymorphic alleles encoding drug-metabolizing enzymes to the identification of an individual's drug responsiveness phenotype. This knowledge, when applied to dosing or drug selection, can avoid adverse reactions or therapeutic failure and thus enhance therapeutic or prophylactic efficiency when treating a subject with a NOVX modulator, such as a modulator identified by one of the exemplary screening assays described herein.

[0323] Monitoring of Effects During Clinical Trials

[0324] Monitoring the influence of agents (e.g., drugs, compounds) on the expression or activity of NOVX (e.g., the ability to modulate aberrant cell proliferation and/or differentiation) can be applied not only in basic drug screening, but also in clinical trials. For example, the effectiveness of an agent determined by a screening assay as described herein to increase NOVX gene expression, protein levels, or upregulate NOVX activity, can be monitored in clinical trails of subjects exhibiting decreased NOVX gene expression, protein levels, or downregulated NOVX activity. Alternatively, the effectiveness of an agent determined by a screening assay to decrease NOVX gene expression, protein levels, or downregulate NOVX activity, can be monitored in clinical trails of subjects exhibiting increased NOVX gene expression, protein levels, or upregulated NOVX activity. In such clinical trials, the expression or activity of NOVX and, preferably, other genes that have been implicated in, for example, a cellular proliferation or immune disorder can be used as a “read out” or markers of the immune responsiveness of a particular cell.

[0325] By way of example, and not of limitation, genes, including NOVX, that are modulated in cells by treatment with an agent (e.g., compound, drug or small molecule) that modulates NOVX activity (e.g., identified in a screening assay as described herein) can be identified. Thus, to study the effect of agents on cellular proliferation disorders, for example, in a clinical trial, cells can be isolated and RNA prepared and analyzed for the levels of expression of NOVX and other genes implicated in the disorder. The levels of gene expression (i.e., a gene expression pattern) can be quantified by Northern blot analysis or RT-PCR, as described herein, or alternatively by measuring the amount of protein produced, by one of the methods as described herein, or by measuring the levels of activity of NOVX or other genes. In this manner, the gene expression pattern can serve as a marker, indicative of the physiological response of the cells to the agent. Accordingly, this response state may be determined before, and at various points during, treatment of the individual with the agent.

[0326] In one embodiment, the invention provides a method for monitoring the effectiveness of treatment of a subject with an agent (e.g., an agonist, antagonist, protein, peptide, peptidomimetic, nucleic acid, small molecule, or other drug candidate identified by the screening assays described herein) comprising the steps of (i) obtaining a pre-administration sample from a subject prior to administration of the agent; (ii) detecting the level of expression of a NOVX protein, mRNA, or genomic DNA in the preadministration sample; (iii) obtaining one or more post-administration samples from the subject; (iv) detecting the level of expression or activity of the NOVX protein, mRNA, or genomic DNA in the post-administration samples; (v) comparing the level of expression or activity of the NOVX protein, mRNA, or genomic DNA in the pre-administration sample with the NOVX protein, mRNA, or genomic DNA in the post administration sample or samples; and (vi) altering the administration of the agent to the subject accordingly. For example, increased administration of the agent may be desirable to increase the expression or activity of NOVX to higher levels than detected, i.e., to increase the effectiveness of the agent. Alternatively, decreased administration of the agent may be desirable to decrease expression or activity of NOVX to lower levels than detected, i.e., to decrease the effectiveness of the agent.

Methods of Treatment

[0327] The invention provides for both prophylactic and therapeutic methods of treating a subject at risk of (or susceptible to) a disorder or having a disorder associated with aberrant NOVX expression or activity. The disorders include but are not limited to, e.g., those diseases, disorders and conditions listed above, and more particularly include those diseases, disorders, or conditions associated with homologs of a NOVX protein, such as those summarized in Table A.

[0328] These methods of treatment will be discussed more fully, below.

[0329] Diseases and Disorders

[0330] Diseases and disorders that are characterized by increased (relative to a subject not suffering from the disease or disorder) levels or biological activity may be treated with Therapeutics that antagonize (i.e., reduce or inhibit) activity. Therapeutics that antagonize activity may be administered in a therapeutic or prophylactic manner. Therapeutics that may be utilized include, but are not limited to: (i) an aforementioned peptide, or analogs, derivatives, fragments or homologs thereof; (ii) antibodies to an aforementioned peptide; (iii) nucleic acids encoding an aforementioned peptide; (iv) administration of antisense nucleic acid and nucleic acids that are “dysfunctional” (i.e., due to a heterologous insertion within the coding sequences of coding sequences to an aforementioned peptide) that are utilized to “knockout” endogenous function of an aforementioned peptide by homologous recombination (see, e.g., Capecchi, 1989. Science 244: 1288-1292); or (v) modulators (i.e., inhibitors, agonists and antagonists, including additional peptide mimetic of the invention or antibodies specific to a peptide of the invention) that alter the interaction between an aforementioned peptide and its binding partner.

[0331] Diseases and disorders that are characterized by decreased (relative to a subject not suffering from the disease or disorder) levels or biological activity may be treated with Therapeutics that increase (i.e., are agonists to) activity. Therapeutics that upregulate activity may be administered in a therapeutic or prophylactic manner. Therapeutics that may be utilized include, but are not limited to, an aforementioned peptide, or analogs, derivatives, fragments or homologs thereof; or an agonist that increases bioavailability.

[0332] Increased or decreased levels can be readily detected by quantifying peptide and/or RNA, by obtaining a patient tissue sample (e.g., from biopsy tissue) and assaying it in vitro for RNA or peptide levels, structure and/or activity of the expressed peptides (or mRNAs of an aforementioned peptide). Methods that are well-known within the art include, but are not limited to, immunoassays (e.g., by Western blot analysis, immunoprecipitation followed by sodium dodecyl sulfate (SDS) polyacrylamide gel electrophoresis, immunocytochemistry, etc.) and/or hybridization assays to detect expression of mRNAs (e.g., Northern assays, dot blots, in situ hybridization, and the like).

[0333] Prophylactic Methods

[0334] In one aspect, the invention provides a method for preventing, in a subject, a disease or condition associated with an aberrant NOVX expression or activity, by administering to the subject an agent that modulates NOVX expression or at least one NOVX activity. Subjects at risk for a disease that is caused or contributed to by aberrant NOVX expression or activity can be identified by, for example, any or a combination of diagnostic or prognostic assays as described herein. Administration of a prophylactic agent can occur prior to the manifestation of symptoms characteristic of the NOVX aberrancy, such that a disease or disorder is prevented or, alternatively, delayed in its progression. Depending upon the type of NOVX aberrancy, for example, a NOVX agonist or NOVX antagonist agent can be used for treating the subject. The appropriate agent can be determined based on screening assays described herein. The prophylactic methods of the invention are further discussed in the following subsections.

[0335] Therapeutic Methods

[0336] Another aspect of the invention pertains to methods of modulating NOVX expression or activity for therapeutic purposes. The modulatory method of the invention involves contacting a cell with an agent that modulates one or more of the activities of NOVX protein activity associated with the cell. An agent that modulates NOVX protein activity can be an agent as described herein, such as a nucleic acid or a protein, a naturally-occurring cognate ligand of a NOVX protein, a peptide, a NOVX peptidomimetic, or other small molecule. In one embodiment, the agent stimulates one or more NOVX protein activity. Examples of such stimulatory agents include active NOVX protein and a nucleic acid molecule encoding NOVX that has been introduced into the cell. In another embodiment, the agent inhibits one or more NOVX protein activity. Examples of such inhibitory agents include antisense NOVX nucleic acid molecules and anti-NOVX antibodies. These modulatory methods can be performed in vitro (e.g., by culturing the cell with the agent) or, alternatively, in vivo (e.g., by administering the agent to a subject). As such, the invention provides methods of treating an individual afflicted with a disease or disorder characterized by aberrant expression or activity of a NOVX protein or nucleic acid molecule. In one embodiment, the method involves administering an agent (e.g., an agent identified by a screening assay described herein), or combination of agents that modulates (e.g., up-regulates or down-regulates) NOVX expression or activity. In another embodiment, the method involves administering a NOVX protein or nucleic acid molecule as therapy to compensate for reduced or aberrant NOVX expression or activity.

[0337] Stimulation of NOVX activity is desirable in situations in which NOVX is abnormally downregulated and/or in which increased NOVX activity is likely to have a beneficial effect. One example of such a situation is where a subject has a disorder characterized by aberrant cell proliferation and/or differentiation (e.g., cancer or immune associated disorders). Another example of such a situation is where the subject has a gestational disease (e.g., preclampsia).

Determination of the Biological Effect of the Therapeutic

[0338] In various embodiments of the invention, suitable in vitro or in vivo assays are performed to determine the effect of a specific Therapeutic and whether its administration is indicated for treatment of the affected tissue.

[0339] In various specific embodiments, in vitro assays may be performed with representative cells of the type(s) involved in the patient's disorder, to determine if a given Therapeutic exerts the desired effect upon the cell type(s). Compounds for use in therapy may be tested in suitable animal model systems including, but not limited to rats, mice, chicken, cows, monkeys, rabbits, and the like, prior to testing in human subjects. Similarly, for in vivo testing, any of the animal model system known in the art may be used prior to administration to human subjects.

Prophylactic and Therapeutic Uses of the Compositions of the Invention

[0340] The NOVX nucleic acids and proteins of the invention are useful in potential prophylactic and therapeutic applications implicated in a variety of disorders. The disorders include but are not limited to, e.g., those diseases, disorders and conditions listed above, and more particularly include those diseases, disorders, or conditions associated with homologs of a NOVX protein, such as those summarized in Table A.

[0341] As an example, a cDNA encoding the NOVX protein of the invention may be useful in gene therapy, and the protein may be useful when administered to a subject in need thereof. By way of non-limiting example, the compositions of the invention will have efficacy for treatment of patients suffering from diseases, disorders, conditions and the like, including but not limited to those listed herein.

[0342] Both the novel nucleic acid encoding the NOVX protein, and the NOVX protein of the invention, or fragments thereof, may also be useful in diagnostic applications, wherein the presence or amount of the nucleic acid or the protein are to be assessed. A further use could be as an anti-bacterial molecule (i.e., some peptides have been found to possess anti-bacterial properties). These materials are further useful in the generation of antibodies, which immunospecifically-bind to the novel substances of the invention for use in therapeutic or diagnostic methods.

[0343] The invention will be further described in the following examples, which do not limit the scope of the invention described in the claims.

### EXAMPLES

### Example A

### Polynucleotide and Polypeptide Sequences, and Homology Data Example 1

[0344] The NOV1 clone was analyzed, and the nucleotide and encoded polypeptide sequences are shown in Table 1A.

TABLE 1A
NOV1 Sequence Analysis

| | | |
|---|---|---|
| NOV1a, CG101340-01 | SEQ ID NO: 1 | 1327 bp |

| | | |
|---|---|---|
| DNA Sequence | ORF Start: ATG at 76 | ORF Stop: TGA at 1192 |

GAGGTGAATGCCATGCCATGATTCTGGTGTGCTCCATGGCATCCCCAGCCTAGCTCCCAATCCCACTT
TGGCACGATGTTAGCCAACAGCTCCTCAACCAACAGTTCTGTTCTCCCGTGTCCTGACTACCGACCTA
CCCACCGCCTGCACTTGGTGGTCTACAGCTTGGTGCTGGCTGCCGGGCTCCCCCTCAACGCGCTAGCC
CTCTGGGTCTTCCTGCGCGCGCTGCGCGTGCACTCGGTGGTGAGCGTGTACATGTGTAACCTGGCGGC
CAGCGACCTGCTCTTCACCCTCTCGCTGCCCGTTCGTCTCTCCTACTACGCACTGCACCACTGGCCCT
TCCCCGACCTCCTGTGCCAGACGACGGGCGCCATCTTCCAGATGAACATGTACGGCAGCTGCATCTTC
CTGATGCTCATCAACGTGGACCGCTACGCCGCCATCGTGCACCCGCTGCGACTGCGCCACCTGTGGCG
GCCCCGCGTGGCGCGGCTGCTCTACCTGGGCGTGTGGGCGCTCATCCTGGTGTTTGCCGTGCCCGCCG
CCCGCGTGCACAGGCCCTCGCGTTGCCGCTACCGGGACCTCGAGGTGCGCCTATGCTTCGAGAGCTTC
TGCGACGAGCTGTGGAAAGGCAGGCTGCTGCCCCTCGTGCTGCTGGCCGAGGCGCTGGGCTTCCTGCT
GCCCCTGGCGGCGGTGGTCTACTCGTCGGGCCGAGTCTTCTGGACGCTGGCGCGCCCCGACGCCACGC
AGAGCCAGCGGCGGTGGAAGACCGTGCGCCTCCTGCTGGCTAACCTCGTCATCTTCCTGCTGTGCTTC
GTGCCCTACAACAGCACGCTGGCGGTCTACGGGCTGCTGCGGAGCAAGCTGGTGGCGGCCAGCGTGCC
TGCCCGCGATCGCGTGCGCGGGGTGCTGATGGTGATGGTGCTGCTGGCCGGCGCCAACTGCGTGCTGG
ACCCGCTGGTGTACTACTTTAGCGCCGAGGGCTTCCGCAACACCCTGCGCGGCCTGGGCACTCCGCAC
CGGGCCAGGACCTCGGCCACCAACGGGACGCGGGCGGCGCTCGCGCAATCCGAAAGGTCCGCCGTCAC
CACCGACGCCACCAGGCCGGATGCCGCCAGTCAGGGGCTGCTCCGACCCTCCGACTCCCACTCTCTGT
CTTCCTTCACACAGTGTCCCCAGGATTCCGCCCTCTGAACACACATGCCATTGCGCTGTCCGTGCCCG
ACTCCCAACGCCTCTCGTTCTGGGAGGCTTACAGGGCGTACACACAAGAAGGTGGGCTGGGCACTTGG
ACCTTTGGGTGGCAATTCCAGCTTAGCAACGCAGA

NOV1a, CG101340-01

| | | | |
|---|---|---|---|
| Protein Sequence | SEQ ID NO: 2 | 372 aa | MW at 41482.1kD |

MLANSSSTNSSVLPCPDYRPTHRLHLVVYSLVLAAGLPLNALALWVFLRALRVHSVVSVYMCNLAASD
LLFTLSLPVRLSYYALHHWPFPDLLCQTTGAIFQMNMYGSCIFLMLINVDRYAAIVHPLRLRHLWRPR
VARLLYLGVWALILVFAVPAARVHRPSRCRYRDLEVRLCFESFCDELWKGRLLPLVLLAEALGFLLPL
AAVVYSSGRVFWTLARPDATQSQRRWKTVRLLLANLVIFLLCFVPYNSTLAVYGLLRSKLVAASVPAR
DRVRGVLMVMVLLAGANCVLDPLVYYFSAEGFRNTLRGLGTPHRARTSATNGTHAALAQSERSAVTTD
ATRPDAASQGLLRPSDSHSLSSFTQCPQDSAL

| | |
|---|---|
| SEQ ID NO: 3 | 1327 bp |

| | | |
|---|---|---|
| NOV1b, SNP13382465 of | ORF Start: ATG at 76 | ORF Stop: TGA at 1192 |

| | | |
|---|---|---|
| CG101340-01, DNA Sequence | SNP Pos: 472 | SNP Change: T to C |

GAGGTGAATGCCATGCCATGATTCTGGTGTGCTCCATGGCATCCCCAGCCTAGCTCCCAATCCCACTT
TGGCACGATGTTAGCCAACAGCTCCTCAACCAACAGTTCTGTTCTCCCGTGTCCTGACTACCGACCTA
CCCACCGCCTGCACTTGGTGGTCTACAGCTTGGTGCTGGCTGCCGGGCTCCCCCTCAACGCGCTAGCC
CTCTGGGTCTTCCTGCGCGCGCTGCGCGTGCAcTCGGTGGTGAGCGTGTACATGTGTAACCTGGCGGC
CAGCGACCTGCTCTTCACCCTCTCGCTGCCCGTTCGTCTCTCCTACTACGCACTGCACCACTGGCCCT
TCCCCGACCTCCTGTGCCAGACGACGGGCGCCATCTTCCAGATGAACATGTACGGCAGCTGCATCTTC
CTGATGCTCATCAACGTGGACCGCTACGCCGCCATCGTGCACCCGCTGCGACTGCGCCACCTGCGGCG
GCCCCGCGTGGCGCGGCTGCTCTACCTGGGCGTGTGGGCGCTCATCCTGGTGTTTGCCGTGCCCGCCG
CCCGCGTGCACAGGCCCTCGCGTTGCCGCTACCGGGACCTCGAGGTGCGCCTATGCTTCGAGAGCTTC
TGCGACGAGCTGTGGAAAGGCAGGCTGCTGCCCCTCGTGCTGCTGGCCGAGGCGCTGGGCTTCCTGCT
GCCCCTGGCGGCGGTGGTCTACTCGTCGGGCCGAGTCTTCTGGACGCTGGCGCGCCCCGACGCCACGC
AGAGCCAGCGGCGGTGGAAGACCGTGCGCCTCCTGCTGGCTAACCTCGTCATCTTCCTGCTGTGCTTC
GTGCCCTACAACAGCACGCTGGCGGTCTACGGGCTGCTGCGGAGCAAGCTGGTGGCGGCCAGCGTGCC
TGCCCGCGATCGCGTGCGCGGGGTGCTGATGGTGATGGTGCTGCTGGCCGGCGCCAACTGCGTGCTGG
ACCCGCTGGTGTACTACTTTAGCGCCGAGGGCTTCCGCAACACCCTGCGCGGCCTGGGCACTCCGCAC
CGGGCCAGGACCTCGGCCACCAACGGGACGCGGGCGGCGCTCGCGCAATCCGAAAGGTCCGCCGTCAC
CACCGACGCCACCAGGCCGGATGCCGCCAGTCAGGGGCTGCTCCGACCCTCCGACTCCCACTCTCTGT
CTTCCTTCACACAGTGTCCCCAGGATTCCGCCCTCTGAACACACATGCCATTGCGCTGTCCGTGCCCG
ACTCCCAACGCCTCTCGTTCTGGGAGGCTTACAGGGCGTACACACAAGAAGGTGGGCTGGGCACTTGG
ACCTTTGGGTGGCAATTCCAGCTTAGCAACGCAGA

| | | |
|---|---|---|
| NOV1b, SNP13382465 of | SEQ ID NO: 4 | MW at 41452.1kD |

| | | | |
|---|---|---|---|
| CG101340-01, Protein Sequence | SNP Pos: 133 | 372 aa | SNP Change: Trp to Arg |

MLANSSSTNSSVLPCPDYRPTHRLHLVVYSLVLAAGLPLNALALWVFLRALRVHSVVSVYMCNLAASD
LLFTLSLPVRLSYYALHHWPFPDLLCQTTGAIFQMNNYGSCIFLMLINVDRYAAIVHPLRLRHLRRPR
VARLLYLGVWALILVFAVPAARVHRPSRCRYRDLEVRLCFESFCDELWKGRLLPLVLLAEALGFLLPL
AAVVYSSGRVFWTLARPDATQSQRRWKTVRLLLANLVIFLLCFVPYNSTLAVYGLLRSKLVAASVPAR
DRVRGVLMVMVLLAGANCVLDPLVYYFSAEGFRNTLRGLGTPHRARTSATNGTRAALAQSERSAVTTD
ATRPDAASQGLLRPSDSHSLSSFTQCPQDSAL

[0345] A ClustalW comparison of the above protein sequences yields the following sequence alignment shown in Table 1B.

TABLE 1B
Comparison of the NOV1 protein sequences.

| | |
|---|---|
| NOV18a | MCSLPMARYYRIKYADQKALYTRDGQLLVGDPVADNCCAEKICILPNRGLARTKVPIFLG |
| NOV18b | MCSLPMARYYIIKYADQKALYTRDGQLLVGDPVADNCCAEKICILPNRGLARTKVPIFLG |
| NOV18c | -----LSYCFRIKYADQKALYTRDGQLLVGDPVADNCCAEKICILPNRGLARTKVPIFLG |
| NOV18a | QGGSRCLACVETEEGPSLQLEPSTLPPQDVNIEELYKGGEEATRFTFFQSSSGSAFRLE |
| NOV18b | QGGSRCLACVETEEGPSLQLE-------DVNIEELYKGGEEATRFTFFQSSSGSAFRLE |
| NOV18c | QGGSRCLACVETEEGPSLQLEPSTLPPQDVNIEELYKGGEEATRFTFFQSSSGSAFRLE |
| NOV18a | AAAWPGWFLCGPAEPQQPVQLTKESEPSARTKFYFEQSW |
| NOV18b | AAAWPGWFLCGPAEPQQPVQLTKESEPSARTKFYFEQSW |
| NOV18c | AAAWPGWFLCGPAEPQQPVQLTKESEPSARTKFYFEQSW |
| NOV1a | (SEQ ID NO: 2) |

[0346] Further analysis of the NOV1a protein yielded the following properties shown in Table 1C.

TABLE 1C
Protein Sequence Properties NOV1a

| | |
|---|---|
| SignalP analysis: | Cleavage site between residues 59 and 60 |

PSORT II analysis:

| | |
|---|---|
| PSG: | a new signal peptide prediction method |
| | N-region: length 0; pos.chg 0; neg.chg 0 |
| | H-region: length 16; peak value 3.12 |
| | PSG score: −1.28 |
| GvH: | von Heijne's method for signal seq. recognition |
| | GvH score (threshold: −2.1): 0.37 |
| | possible cleavage site: between 43 and 44 |

| | |
|---|---|
| >>> Seems to have no N-terminal signal peptide | |
| ALOM: | Klein et al's method for TM region allocation |
| | Init position for calculation: 1 |
| | Tentative number of TMS(s) for the threshold 0.5: 6 |

| | | |
|---|---|---|
| INTEGRAL | Likelihood = −4.19 | Transmembrane 31-47 |
| INTEGRAL | Likelihood = −0.16 | Transmembrane 99-115 |
| INTEGRAL | Likelihood = −7.01 | Transmembrane 140-156 |
| INTEGRAL | Likelihood = −6.90 | Transmembrane 192-208 |
| INTEGRAL | Likelihood = −7.54 | Transmembrane 232-248 |
| INTEGRAL | Likelihood = −3.82 | Transmembrane 277-293 |

| | |
|---|---|
| PERIPHERAL | Likelihood = 1.43 (at 56) |
| ALOM score: | −7.54 (number of TMSs: 6) |

| | |
|---|---|
| MTOP: | Prediction of membrane topology (Hartmann et al.) |
| | Center position for calculation: 38 |
| | Charge difference: 0.5 C(2.5) − N(2.0) |
| | C > N: C-terminal side will be inside |

>>> membrane topology: type 3b
MITDISC: discrimination of mitochondrial targeting seq

| | | | |
|---|---|---|---|
| R content: | 0 | Hyd Moment (75): | 4.95 |
| Hyd Moment (95): | 3.49 | G content: | 0 |
| D/E content: | 1 | S/T content: | 6 |
| Score: −3.65 | | | |

```
Gavel: prediction of cleavage sites for mitochondrial preseq
      R-2 motif at 176 CRY|RD
NUCDISC: discrimination of nuclear localization signals
      pat4: none
      pat7: none
      bipartite: none
      content of basic residues: 10.2%
NLS Score: −0.47
KDEL: ER retention motif in the C-terminus: none
ER Membrane Retention Signals: none
SKL: peroxisomal targeting signal in the C-terminus: none
PTS2: 2nd peroxisomal targeting signal: none
VAC: possible vacuolar targeting motif: none
RNA-binding motif: none
Actinin-type actin-binding motif:
      type 1: none
      type 2: none
NMYR: N-myristoylation pattern: none
Prenylation motif: none
memYQRL: transport motif from cell surface to Golgi: none
Tyrosines in the tail: none
Dileucine motif in the tail: none
checking 63 PROSITE DNA binding motifs: none
checking 71 PROSITE ribosomal protein motifs: none
checking 33 PROSITE prokaryotic DNA binding motifs: none
NNCN: Reinhardt's method for Cytoplasmic/Nuclear discrimination
      Prediction: cytoplasmic
      Reliability: 94.1
COIL: Lupas's algorithm to detect coiled-coil regions
total: 0 residues
--------------------------
Final Results (k = 9/23)
      55.6%: endoplasmic reticulum
      11.1%: Golgi
      11.1%: vacuolar
      11.1%: vesicles of secretory system
      11.1%: mitochondrial
>> prediction for CG101340-01 is end (k = 9)
```

[0347] A search of the NOV1a protein against the Geneseq database, a proprietary database that contains sequences published in patents and patent publication, yielded several homologous proteins shown in Table 1D.

TABLE 1D
Geneseq Results for NOV1a

| | | NOV1a | Identities/ | |
|---|---|---|---|---|
| | | Residues/ | Similarities for | |
| Geneseq | Protein/Organism/Length | Match | the Matched | Expect |
| Identifier | [Patent #, Date] | Residues | Region | Value |
| ABP81962 | Human G protein-coupled | 1 . . . 372 | 368/372 (98%) | 0.0 |
| | receptor GPR92/3 protein SEQ ID | 1 . . . 372 | 368/372 (98%) | |
| | NO:410 - Homo sapiens, 372 aa. | | | |
| | [WO200261087-A2, 08-AUG- | | | |
| | 2002] | | | |
| AAM52650 | Human G protein-coupled | 1 . . . 372 | 368/372 (98%) | 0.0 |
| | receptor TGR4 - Homo sapiens, | 1 . . . 372 | 368/372 (98%) | |
| | 372 aa. [WO200177326-A1, 18- | | | |
| | OCT-2001] | | | |
| AAU11897 | Human novel G protein-coupled | 1 . . . 372 | 368/372 (98%) | 0.0 |
| | receptor, GPCR9 - Homo sapiens, | 1 . . . 372 | 368/372 (98%) | |
| | 372 aa. [WO200190187-A2, 29- | | | |
| | NOV-2001] | | | |
| AAE16170 | Human G-protein coupled | 1 . . . 372 | 368/372 (98%) | 0.0 |
| | receptor 1 (GCREC-1) protein - | 1 . . . 372 | 368/372 (98%) | |
| | Homo sapiens, 372 aa. | | | |
| | [WO200187937-A2, 22-NOV- | | | |
| | 2001] | | | |
| AAU97915 | Human HIPHUM0000001 | 1 . . . 372 | 368/372 (98%) | 0.0 |
| | purinergic receptor protein - | 1 . . . 372 | 368/372 (98%) | |
| | Homo sapiens, 372 aa. | | | |
| | [GB2360523-A, 26-SEP-2001] | | | |

[0348] In a BLAST search of public sequence databases, the NOV1a protein was found to have homology to the proteins shown in the BLASTP data in Table 1E.

TABLE 1E
Public BLASTP Results for NOV1a

| | | NOV1a | Identities/ | |
|---|---|---|---|---|
| Protein | | Residues/ | Similarities for | |
| Accession | | Match | the Matched | Expect |
| Number | Protein/Organism/Length | Residues | Portion | Value |
| Q9H1C0 | Putative G protein-coupled | 1 . . . 372 | 368/372 (98%) | 0.0 |
| | receptor 92 (Putative G-protein | 1 . . . 372 | 368/372 (98%) | |
| | coupled receptor) - Homo sapiens | | | |
| | (Human), 372 aa. | | | |
| CAD38444 | Sequence 10 from Patent | 3 . . . 372 | 294/370 (79%) | e-164 |
| | WO0238607 - Mus musculus | 123 . . . 488 | 316/370 (84%) | |
| | (Mouse), 488 aa. | | | |
| P32250 | P2Y purinoceptor 5 (P2Y5) | 22 . . . 302 | 111/284 (39%) | 1e-51 |
| | (Purinergic receptor 5) (6H1) - | 14 . . . 293 | 169/284 (59%) | |
| | Gallus gallus (Chicken), 308 aa. | | | |
| Q8BMC0 | P2Y purinoceptor 5 - Mus | 7 . . . 309 | 113/306 (36%) | 1e-49 |
| | musculus (Mouse), 344 aa. | 3 . . . 303 | 178/306 (57%) | |
| P43657 | P2Y purinoceptor 5 (P2Y5) | 22 . . . 309 | 106/291 (36%) | 1e-49 |
| | (Purinergic receptor 5) (RB intron | 17 . . . 303 | 171/291 (58%) | |
| | encoded G-protein coupled | | | |
| | receptor) - Homo sapiens | | | |
| | (Human), 344 aa. | | | |

[0349] PFam analysis indicates that the NOV1a protein contains the domains shown in the Table 1F.

TABLE 1F
Domain Analysis of NOV1a

| | | Identities/ | |
|---|---|---|---|
| | | Similarities for | Expect |
| Pfam Domain | NOV1a Match Region | the Matched Region | Value |
| 7tm_1 | 39 . . . 297 | 87/276 (32%) | 7.2e-53 |
| | | 196/276 (71%) | |

### Example 2

[0350] The NOV2 clone was analyzed, and the nucleotide and encoded polypeptide sequences are shown in Table 2A.

TABLE 2A
NOV2 Sequence Analysis

| | | |
|---|---|---|
| NOV2a, CG101396-01 | SEQ ID NO: 5 | 3189 bp |

| | | |
|---|---|---|
| DNA Sequence | ORF Start: ATG at 86 | ORF Stop: TGA at 3113 |

CTGCACCGGGACCAGCGCCTCCCCGCTTCGCGCTGCCCTCGGCCTCGCCCCGGGCCCGGGTGGATGAG
CCGCGCGCCCGGGGGACATGGAAGCGCTGACGCTGTGGCTTCTCCCCTGGATATGCCAGTGCGTGTCG
GTGCGGGCCGACTCCATCATCCACATCGGTGCCATCTTCGAGGAGAACGCGGCCAAGGACGACAGGGT
GTTCCAGTTGGCGGTATCCGACCTGAGCCTCAACGATGACATCCTGCAGAGCGAGAAGATCACCTAGT
CCATCAAGGTCATCGAGGCCAACAACCCATTCCAGGCTGTGCAGGAAGCCTGTGACCTCATGACCCAG
GGGATTTTGGCCTTGGTCACGTCCACTGGCTGTGCATCTGCCAATGCCCTGCAGTCCCTCACGGATGC
CATGCACATCCCACACCTCTTTGTCCAGCGCAACCCGGGAGGGTCGCCACGCACCGCATGCCACCTGA
ACCCCAGCCCCGATGGTGAGGCCTACACACTGGCTTCGAGACCACCCGTCCGCCTCAATGATGTCATG
CTCAGGCTGGTGACGGAGCTGCGCTGGCAGAAGTTCGTCATGTTCTACGACAGCGAGTATGATATCCG
TGGGCTTCAAAGCTTTCTGGACCAGGCCTCGCGGCTGGGCCTTGACGTCTCTTTACAAAAGGTGGACA
AGAACATTAGCCACGTATTCACCAGCCTCTTCACCACGATGAAGACAGAGGAGCTGAATCGCTACCGG
GACACGCTTCGCCGCGCCATCCTGCTGCTCAGCCCACAGGGAGCCCACTCCTTCATCAACGAGGCCGT
GGAGACCAACCTGGCTTCCAAGGACAGCCACTGGGTCTTTGTGAATGAGGAAATCAGTGACCCGGAGA
TCCTGGATCTGGTCCATAGTGCCCTTGGAAGGATGACCGTGGTCCGGCAAATCTTTCCGTCTGCAAAG
GACAATCAGAAATGCACGAGGAACAACCACCGCATCTCCTCCCTGCTCTGCGACCCCCAGGAAGGCTA
CCTCCAGATGCTGCAGATCTCCAACCTCTATCTGTATGACAGTGTTCTGATGCTGGCCAACGCCTTTC
ACAGGAAGCTGGAGGACCGGAAGTGGCATAGCATGGCGAGCCTCAACTGCATACGGAAATCCACTAAG
CCATGGAATGGTGGGAGGTCCATGCTGGATACCATCAAAAAGGGCCACATCACTGGCCTCACTGGGGT
GATGGAGTTTCGGGAGGACAGTTCGAATCCCTATGTCCAGTTTGAAATCCTTGGCACTACCTATAGTG
AGACTTTTGGCAAAGACATGCGCAAGTTGGCGACATGGGACTCAGAGAAGGGCTTGAATGGCAGCTTG
CAAGAGAGGCCCATGGGCAGCCGCCTCCAAGGATTGACTCTTAAAGTGGTGACTGTCTTGGAAGAGCC
TTTCGTGATGGTGGCTGAGAACATCCTAGGACAGCCCAAGCGCTACAAAGGGTTCTCCATAGATGTCC
TGGATGCACTGGCCAAGGCTCTGGGCTTTAAATATGAGATTTACCAAGCCCCTGATGGCAGGTACGGT
CACCAGCTCCATAACACCTCCTGGAACGGGATGATCGGGGAGCTCATCAGCAAGAGAGCAGACTTGGC
CATCTCTGCCATCACCATCACCCCAGAGAGGGAGAGCGTTGTGGACTTCAGCAAGCGGTACATGGACT
ATTCAGTGGGGATTCTAATTAAGAAGCCCGAGGAGAAAATCAGCATCTTCTCCCTCTTTGCTCCATTT
GATTTCGCTGTGTGGGCCTGCATTGCAGCAGCCATCCCTGTGGTTGGTGTGCTGATATTTGTGTTGAA
CAGGATACAGGCTGTGAGGGCTCAGAGTGCTGCCCAGCCCAGGCCGTCAGCTTCTGCCACTCTGCACA
GCGCCATCTGGATTGTCTATGGAGCCTTCGTACAGCAAGGTGGCGAATCTTCCGTGAACTCCATGGCC
ATGCGCATCGTGATGGGCAGCTGGTGGCTCTTCACGCTCATTGTGTGCTCCTCCTACACAGCCAACGT
TGCTGCCTTCCTCACAGTGTCCAGGATGGACAACCCCATAAGGACTTTCCAGGACCTGTCCAAACAAG
TGGAAATGTCTTATGGCACTGTCCGGGATTCTGCTGTATATGAGTACTTCCGAGCCAAGGGCACCAAC
CCCCTGGAGCAGGACAGCACGTTTGCTGAACTCTGGCGGACCATCAGCAAGAACGGAGGGGCTGACAA
CTGCGTGTCCAGTCCTTCAGAAGGCATCAGGAAGGCAAAGAAGGGGAACTACGCCTTCCTGTGGGATG
TGGCCGTGGTGGAATACGCAGCCCTGACGGATGACGACTGCTCGGTGACTGTCATCGGCAACAGCATC
AGCAGCAAGGGTTACGGGATTGCCCTGCAGCATGGCAGCCCCTACAGGGACCTCTTCTCCCAGAGGAT
CCTGGAGCTGCAGGACACAGGGGACCTGGATGTGCTGAAGCAGAAGTGGTGGCCGCACATGGGCCGCT
GTGACCTCACCAGCCATGCCAGCGCCCAGGCCGACGGCAAATCCCTCAAGCTGCACAGCTTCGCCGGG
GTCTTCTGCATCCTGGCCATTGGCCTGCTCCTGGCCTGCCTGGTGGCTGCCCTGGAGTTGTGGTGGAA
CAGCAACCGGTGCCACCAGGAGACCCCCAAGGAGGACAAAGAAGTGAACTTGGAGCAGGTCCACCGGC
GCATGAACAGCCTCATGGATGAAGACATTGCTCACAAGCAGATTTCCCCAGCGTCGATTGAGCTCTCG
GCCCTGGAGATGGGGGGCCTGGCTCCCACCCAGACCTTGGAGCCGACACGGGAGTACCAGAACACCCA
GCTCTCGGTCAGCACCTTTCTGCCAGAGCAGAGCAGCCATGGCACCAGCCGGACACTCTCATCAGGGC
CCAGCAGCAACCTGCCGCTGCCGCTGAGCAGCTCGGCGACCATGCCCTCCATGCAGTGCAAACACAGG
TCACCCAACGGGGGGCTGTTCCGGCAGAGCCCGGTGAAGACCCCCATCCCCATGTCCTTCCAGCCCGT
GCCTGGAGGCGTCCTTCCAGAGGCTCTGGACACCTCCCACGGGACCTCCATCTGACTGCGCCGCCTGC
CCTCCTGCCCACCCTCCCACCCACCCGACCAGCAGAGCTTTTTAATACAAGAAAACAACAA

NOV2a, CG101396-01

| | | | |
|---|---|---|---|
| Protein Sequence | SEQ ID NO: 6 | 1009 aa | MW at 112129.7kD |

MEALTLWLLPWICQCVSVRADSIIHIGAIFEENAAKDDRVFQLAVSDLSLNDDILQSEKITYSIKVIE
ANNPFQAVQEACDLMTQGILALVTSTGCASANALQSLTDAMHIPHLFVQRNPGGSPRTACHLNPSPDG
EAYTLASRPPVRLNDVMLRLVTELRWQKFVMFYDSEYDIRGLQSFLDQASRLGLDVSLQKVDKNISHV
FTSLFTTMKTEELNRYRDTLRRAILLLSPQGAHSFINEAVETNLASKDSHWVFVNEEISDPEILDLVH
SALGRMTVVRQIFPSAKDNQKCTRNNHRISSLLCDPQEGYLQMLQISNLYLYDSVLMLANAFHRKLED
RKWHSMASLNCIRKSTKPWNGGRSMLDTIKKGHITGLTGVMEFREDSSNPYVQFEILGTTYSETFGKD
MRKLATWDSEKGLNGSLQERPMGSRLQGLTLKVVTVLEEPFVMVAENILGQPKRYKGFSIDVLDALAK
ALGFKYEIYQAPDGRYGHQLHNTSWNGMIGELISKRADLAISAITITPERESVVDFSKRYMDYSVGIL
IKKPEEKISIFSLFAPFDFAVWACIAAAIPVVGVLIFVLNRIQAVRAQSAAQPRPSASATLHSAIWIV
YGAFVQQGGESSVNSMAMRIVMGSWWLFTLIVCSSYTANLAAFLTVSRMDNPIRTFQDLSKQVEMSYG
TVRDSAVYEYFRAKGTNPLEQDSTFAELWRTISKNGGADNCVSSPSEGIRKAKKGNYAFLWDVAVVEY
AALTDDDCSVTVIGNSISSKGYGIALQHGSPYRDLFSQRILELQDTGDLDVLKQKWWPHMGRCDLTSH
ASAQADGKSLKLHSFAGVFCILAIGLLLACLVAALELWWNSNRCHQETPKEDKEVNLEQVHRRMWSLM
DEDIAHKQISPASIELSALEMGGLAPTQThEPTREYQNTQLSVSTFLPEQSSHGTSRTLSSGPSSNLP
LPLSSSATMPSMQCKHRSPNGGLFRQSPVKTPIPMSFQPVPGGVLPEALDTSHGTSI

| | | |
|---|---|---|
| NOV2b, 267253224 | SEQ ID NO: 7 | 2986 bp |

| | | |
|---|---|---|
| DNA Sequence | ORF Start: at 2 | ORF Stop: end of sequence |

CACCGGTACCGACTCCATCATCCACATCGGTGCCATCTTCGAGGAGAACGCGGCCAAGGACGACAGGG
TGTTCCAGTTGGCGGTATCCGACCTGAGCCTCAACGATGACATCCTGCAGAGCGAGAAGATCACCTAC
TCCATCAAGGTCATCGAGGCCAACAACCCATTCCAGGCTGTGCAGGAAGCCTGTGACCTCATGACCCA
GGGGATTTTGGCCTTGGTCACGTCCACTGGCTGTGCATCTGCCAATGCCCTGCAGTCCCTCACGGATG
CCATGCACATCCCACACCTCTTTGTCCAGCGCAACCCGGGAGGGTCGCCACGCACCGCATGCCACCTG
AACCCCAGCCCCGATGGTGAGGCCTACACACTGGCTTCGAGACCACCCGTCCGCCTCAATGATGTCAT
GCTCAGGCTGGTGACGGAGCTGCGCTGGCAGAAGTTCGTCATGTTCTACGACAGCGAGTATGATATCC
GTGGGCTTCAAAGCTTTCTGGACCAGGCCTCGCGGCTGGGCCTTGACGTCTCTTTACAAAAGGTGGAC
AAGAACATTAGCCACGTATTCACCAGCCTCTTCACCACGATGAAGACAGAGGAGCTGAATCGCTACCG
GGACACGCTTCGCCGCGCCATCCTGCTGCTCAGCCCACAGGGAGCCCACTCCTTCATCAACGAGGCCG
TGGAGACCAACCTGGCTTCCAAGGACAGCCACTGGGTCTTTGTGAATGAGGAAATCAGTGACCCGGAG
ATCCTGGATCTGGTCCATAGTGCCCTTGGAAGGATGACCGTGGTCCGGCAAATCTTTCCGTCTGCAAA
GGACAATCAGAAATGCACGAGGAACAACCACCGCATCTCCTCCCTGCTCTGCGACCCCCAGGAAGGCT
ACCTCCAGATGCTGCAGATCTCCAACCTCTATCTGTATGACAGTGTTCTGATGCTGGCCAACGCCTTT
CACAGGAAGCTGGAGGACCGGAAGTGGCATAGCATGGCGAGCCTCAACTGCATACGGAAATCCACTAA
GCCATGGAATGGTGGGAGGTCCATGCTGGATACCATCAAAAAGGGCCACATCACTGGCCTCACTGGGG
TGATGGAGTTTCGGGAGGACAGTTCGAATCCCTATGTCCAGTTTGAAATCCTTGGCACTACCTATAGT
GAGACTTTTGGCAAAGACATGCGCAAGTTGGCGACATGGGACTCAGAGAAGGGCTTGAATGGCAGCTT
GCAAGAGAGGCCCATGGGCAGCCGCCTCCAAGGATTGACTCTTAAAGTGGTGACTGTCTTGGAAGAGC
CTTTCGTGATGGTGGCTGAGAACATCCTAGGACAGCCCAAGCGCTACAAAGGGTTCTCCATAGATGTC
CTGGATGCACTGGCCAAGGCTCTGGGCTTTAAATATGAGATTTACCAAGCCCCTGATGGCAGGTACGG
TCACCAGCTCCATAACACCTCCTGGAACGGGATGATCGGGGAGCTCATCAGCAAGAGAGCAGACTTGG
CCATCTCTGCCATCACCATCACCCCAGAGAGGGAGAGCGTTGTGGACTTCAGCAAGCGGTACATGGAC
TATTCAGTGGGGATTCTAATTAAGAAGCCCGAGGAGAAAATCAGCATCTTCTCCCTCTTTGCTCCATT
TGATTTCGCTGTGTGGGCCTGCATTGCAGCAGCCATCCCTGTGGTTGGTGTGCTGATATTTGTGTTGA
ACAGGATACAGGCTGTGAGGGCTCAGAGTGCTGCCCAGCCCAGGCCGTCAGCTTCTGCCACTCTGCAC
AGCGCCATCTGGATTGTCTATGGAGCCTTCGTACAGCAAGGTGGCGAATCTTCCGTGAACTCCATGGC
CATGCGCATCGTGATGGGCAGCTGGTGGCTCTTCACGCTCATTGTGTGCTCCTCCTACACAGCCAACC
TTGCTGCCTTCCTCACAGTGTCCAGGATGGACAACCCCATAAGGACTTTCCAGGACCTGTCCAAACAA
GTGGAAATGTCTTATGGCACTGTCCGGGATTCTGCTGTATATGAGTACTTCCGAGCCAAGGGCACCAA
CCCCCTGGAGCAGGACAGCACGTTTGCTGAACTCTGGCGGACCATCAGCAAGAACGGAGGGGCTGACA
ACTGCGTGTCCAGTCCTTCAGAAGGCATCAGGAAGGCAAAGAAGGGGAACTACGCCTTCCTGTGGGAT
GTGGCCGTGGTGGAATACGCAGCCCTGACGGATGACGACTGCTCGGTGACTGTCATCGGCAACAGCAT
CAGCAGCAAGGGTTACGGGATTGCCCTGCAGCATGGCAGCCCCTACAGGGACCTCTTCTCCCAGAGGA
TCCTGGAGCTGCAGGACACAGGGGACCTGGATGTGCTGAAGCAGAAGTGGTGGCCGCACATGGGCCGC
TGTGACCTCACCAGCCATGCCAGCGCCCAGGCCGACGGCAAATCCCTCAAGCTGCACAGCTTCGCCGG
GGTCTTCTGCATCCTGGCCATTGGCCTGCTCCTGGCCTGCCTGGTGGCTGCCCTGGAGTTGTGGTGGA
ACAGCAACCGGTGCCACCAGGAGACCCCCAAGGAGGACAAAGAAGTGAACTTGGAGCAGGTCCACCGG
CGCATGAACAGCCTCATGGATGAAGACATTGCTCACAAGCAGATTTCCCCAGCGTCGATTGAGCTCTC
GGCCCTGGAGATGGGGAGCCTGGCTCCCACCCAGACCTTGGAGCCGACACGGGAGTACCAGAACACCC
AGCTCTCGGTCAGCACCTTTCTGCCAGAGCAGAGCAGCCATGGCACCAGCCGGACACTCTCATCAGGG
CCCAGCAGCAACCTGCCGCTGCCGCTGAGCAGCTCGGCGACCATGCCCTCCATGCAGTGCAAACACAG
GTCACCCAACGGGGGGCTGTTCCGGCAGAGCCCGGTGAAGACCCCCATCCCCATGTCCTTCCAGCCCG
TGCCTGGAGGCGTCCTTCCAGAGGCTCTGGACACCTCCCACGGGACCTCCATCCTCGAGGGC

NOV2b, 267253224

| | | | |
|---|---|---|---|
| Protein Sequence | SEQ ID NO: 8 | 995 aa | MW at 110403.5kD |

TGTDSIIHIGAIFEENAAKDDRVFQLAVSDLSLNDDILQSEKITYSIKVIEANNPFQAVQEACDLMTQ
GILALVTSTGCASANALQSLTDAMHIPHLFVQRNPGGSPRTACHLNPSPDGEAYTLASRPPVRLNDVM
LRLVTELRWQKFVMFYDSEYDIRGLQSFLDQASRLGLDVSLQKVDKNISHVFTSLFTTMKTEELNRYR
DTLRRAILLLSPQGAHSFINEAVETNLASKDSHWVFVNEEISDPEILDLVHSALGRMTVVRQIFPSAK
DNQKCTRNNHRISSLLCDPQEGYLQMLQISNLYLYDSVLMLANAFHRKLEDRKWHSMASLNCIRKSTK
PWNGGRSMLDTIKKGHITGLTGVMEFREDSSNPYVQFEILGTTYSETFGKDMRKLATWDSEKGLNGSL
QERPMGSRLQGLTLKVVTVLEEPFVMVAENILGQPKRYKGFSIDVLDALAKALGFKYEIYQAPDGRYG
HQLHNTSWNGMIGELISKRADLAISAITITPERESVVDFSKRYMDYSVGILIKKPEEKISIFSLFAPF
DFAVWACIAAAIPVVGVLIFVLNRIQAVRAQSAAQPRPSASATLHSAIWIVYGAFVQQGGESSVNSMA
MRIVMGSWWLFTLIVCSSYTANLAAFLTVSRMDNPIRTFQDLSKQVEMSYGTVRDSAVYEYFRAKGTN
PLEQDSTFAELWRTISKNGGADNCVSSPSEGIRKAKKGNYAFLWDVAVVEYAALTDDDCSVTVIGNSI
SSKGYGIALQHGSPYRDLFSQRILELQDTGDLDVLKQKWWPHMGRCDLTSHASAQADGKSLKLHSFAG
VFCILAIGLLLACLVAALELWWNSNRCHQETPKEDKEVNLEQVHRRMNSLMDEDIAHKQISPASIELS
ALEMGSLAPTQTLEPTREYQNTQLSVSTFLPEQSSHGTSRTLSSGPSSNLPLPLSSSATMPSMQCKHR
SPNGGLFRQSPVKTPIPMSFQPVPGGVLPEALDTSHGTSILEG

| | | |
|---|---|---|
| NOV2c, 315490179 | SEQ ID NO: 9 | 3049 bp |

| | | |
|---|---|---|
| DNA Sequence | ORF Start: at 2 | ORF Stop: end of sequence |

CACCGGATCCACCATGGAAGCGCTGACGCTGTGGCTTCTCCCCTGGATATGCCAGTGCGTGTCGGTGC
GGGCCGACTCCATCATCCACATTGGTGCCATCTTCGAGGAGAACGCGGCCAAGGACGACAGGGTGTTC
CAGTTGGCGGTATCCGACCTGAGCCTCAACGATGACATCCTGCAGAGCGAGAAGATCACCTACTCCAT
CAAGGTCATCGAGGCCAACAACCCATTCCAGGCTGTGCAGGAAGCCTGTGACCTCATGACCCAGGGGA
TTTTGGCCTTGGTCACGTCCACTGGCTGTGCATCTGCCAATGCCCTGCAGTCCCTCACGGATGCCATG
CACATCCCACACCTCTTTGTCCAGCGCAACCCGGGAGGGTCGCCACGCACCGCATGCCACCTGAACCC
CAGCCCCGATGGTGAGGCCTACACACTGGCTTCGAGACCACCCGTCCGCCTCAATGATGTCATGCTCA
GGCTGGTGACGGAGCTGCGCTGGCAGAAGTTCGTCATGTTCTACGACAGCGAGTATGATATCCGTGGG
CTTCAAAGCTTTCTGGACCAGGCCTCGCGGCTGGGCCTTGACGTCTCTTTACAAAAGGTGGACAAGAA
CATTAGCCACGTATTCACCAGCCTCTTCACCACGATGAAGACAGAGGAGCTGAATCGCTACCGGGACA
CGCTTCGCCGCGCCATCCTGCTGCTCAGCCCACAGGGAGCCCACTCCTTCATCAACGAGGCCGTGGAG
ACCAACCTGGCTTCCAAGGACAGCCACTGGGTCTTTGTGAATGAGGAAATCAGTGACCCGGAGATCCT
GGATCTGGTCCATAGTGCCCTTGGAAGGATGACCGTGGTCCGGCAAATCTTTCCGTCTGCAAAGGACA
ATCAGAAATGCACGAGGAACAACCACCGCATCTCCTCCCTGCTCTGCGACCCCCAGGAAGGCTACCTC
CAGATGCTGCAGATCTCCAACCTCTATCTGTATGACAGTGTTCTGATGCTGGCCAACGCCTTTCACAG
GAAGCTGGAGGACCGGAAGTGGCATAGCATGGCGAGCCTCAACTGCATACGGAAATCCACTAAGCCAT
GGAATGGTGGGAGGTCCATGCTGGATACCATCAAAAAGGGCCACATCACTGGCCTCACTGGGGTGATG
GAGTTTCGGGAGGACAGTTCGAATCCCTATGTCCAGTTTGAAATCCTTGGCACTACCTATAGTGAGAC
TTTTGGCAAAGACATGCGCAAGTTGGCGACATGGGACTCAGAGAAGGGCTTGAATGGCAGCTTGCAAG
AGAGGCCCATGGGCAGCCGCCTCCAAGGATTGACTCTTAAAGTGGTGACTGTCTTGGAAGAGCCTTTC
GTGATGGTGGCTGAGAACATCCTAGGACAGCCCAAGCGCTACAAAGGGTTCTCCATAGATGTCCTGGA
TGCACTGGCCAAGGCTCTGGGCTTTAAATATGAGATTTACCAAGCCCCTGATGGCAGGTACGGTCACC
AGCTCCATAACACCTCCTGGAACGGGATGATCGGGGAGCTCATCAGCAAGAGAGCAGACTTGGCCATC
TCTGCCATCACCATCACCCCAGAGAGGGAGAGCGTTGTGGACTTCAGCAAGCGGTACATGGACTATTC
AGTGGGGATTCTAATTAAGAAGCCCGAGGAGAAAATCAGCATCTTCTCCCTCTTTGCTCCATTTGATT
TCGCTGTGTGGGCCTGCATTGCAGCAGCCATCCCTGTGGTTGGTGTGCTGATATTTGTGTTGAACAGG
ATACAGGCTGTGAGGGCTCAGAGTGCTGCCCAGCCCAGGCCGTCAGCTTCTGCCACTCTGCACAGCGC
CATCTGGATTGTCTATGGAGCCTTCGTACAGCAAGGTGGCGAATCTTCCGTGAACTCCATGGCCATGC
GCATCGTGATGGGCAGCTGGTGGCTCTTCACGCTCATTGTGTGCTCCTCCTACACAGCCAACCTTGCT
GCCTTCCTCACAGTGTCCAGGATGGACAACCCCATAAGGACTTTCCAGGACCTGTCCAAACAAGTGGA
AATGTCTTATGGCACTGTCCGGGATTCTGCTGTATATGAGTACTTCCGAGCCAAGGGCACCAACCCCC
TGGAGCAGGACAGCACGTTTGCTGAACTCTGGCGGACCATCAGCAAGAACGGAGGGGCTGACAACTGC
GTGTCCAGTCCTTCAGAAGOCATCAGGAAGGCAAAGAAGGGGAACTACGCCTTCCTGTGGGATGTGGC
CGTGGTGGAATACGCAGCCCTGACGGATGACGACTGCTCGGTGACTGTCATCGGCAACAGCATCAGCA
GCAAGGGTTACGGGATTGCCCTGCAGCATGGCAGCCCCTACAGGGACCTCTTCTCCCAGAGGATCCTG
GAGCTGCAGGACACAGGGGACCTGGATGTGCTGAAGCAGAAGTGGTGGCCGCACATGGGCCGCTGTGA
CCTCACCAGCCATGCCAGCGCCCAGGCCGACGGCAAATCCCTCAAGCTGCACAGCTTCGCCGGGGTCT
TCTGCATCCTGGCCATTGGCCTGCTCCTGGCCTGCCTGGTGGCTGCCCTGGAGTTGTGGTGGAACAGC
AACCGGTGCCACCAGGAGACCCCCAAGGAGGACAAAGAAGTGAACTTGGAGCAGGTCCACCGGCGCAT
GAACAGCCTCATGGATGAAGACATTGCTCACAAGCAGATTTCCCCAGCGTCGATTGAGCTCTCGGCCC
TGGAGATGGGGGGCCTGGCTCCCACCCAGACCTTGGAGCCGACACGGGAGTACCAGAACACCCAGCTC
TCGGTCAGCACCTTTCTGCCAGAGCAGAGCAGCCATGGCACCAGCCGGACACTCTCATCAGGGCCCAG
CAGCAACCTGCCGCTGCCGCTGAGCAGCTCGGCGACCATGCCCTCCATGCAGTGCAAACACAGGTCAC
CCAACGGGGGGCTGTTCCGGCAGAGCCCGGTGAAGACCCCCATCCCCATGTCCTTCCAGCCCGTGCCT
GGAGGCGTCCTTCCAGAGGCTCTGGACACCTCCCACGGGACCTCCATCCTCGAGGGC

NOV2c, 315490179

| | | | |
|---|---|---|---|
| Protein Sequence | SEQ ID NO: 10 | 1016 aa | MW at 112775.3kD |

TGSTMEALTLWLLPWICQCVSVRADSIIHIGAIFEENAAKDDRVFQLAVSDLSLNDDILQSEKITYSI
KVIEANNPFQAVQEACDLMTQGILALVTSTGCASANALQSLTDAMHIPHLFVQRNPGGSPRTACHLNP
SPDGEAYTLASRPPVRLNDVMLRLVTELRWQKFVMFYDSEYDIRGLQSFLDQASRLGLDVSLQKVDKN
ISHVFTSLFTTMKTEELNRYRDTLRRAILLLSPQGAHSFINEAVETNLASKDSHWVFVNEEISDPEIL
DLVHSALGRMTVVRQIFPSAKDNQKCTRNNHRISSLLCDPQEGYLQMLQISNLYLYDSVLMLANAFHR
KLEDRKWHSMASLNCIRKSTKPWNGGRSMLDTIKKGHITGLTGVMEFREDSSNPYVQFEILGTTYSET
FGKDMRKLATWDSEKGLNGSLQERPMGSRLQGLTLKVVTVLEEPFVMVAENILGQPKRYKGFSIDVLD
ALAKALGFKYEIYQAPDGRYGHQLHNTSWNGMIGELISKRADLAISAITITPERESVVDFSKRYMDYS
VGILIKKPEEKISIFSLFAPFDFAVWACIAAAIPVVGVLIFVLNRIQAVRAQSAAQPRPSASATLHSA
IWIVYGAFVQQGGESSVNSMAMRIVMGSWWLFTLIVCSSYTANLAAFLTVSRMDNPIRTFQDLSKQVE
MSYGTVRDSAVYEYFRAKGTNPLEQDSTFAELWRTISKNGGADNCVSSPSEGIRKAKKGNYAFLWDVA
VVEYAALTDDDCSVTVIGNSISSKGYGIALQHGSPYRDLFSQRILELQDTGDLDVLKQKWWPHMGRCD
LTSHASAQADGKSLKLHSFAGVFCILAIGLLLACLVAALELWWNSNRCHQETPKEDKEVNLEQVHRRM
NSLMDEDIAHKQISPASIELSALEMGGLAPTQTLEPTREYQNTQLSVSTFLPEQSSHGTSRTLSSGPS
SNLPLPLSSSATMPSMQCKHRSPNGGLFRQSPVKTPIPMSFQPVPGGVLPEALDTSHGTSILEG

| | | |
|---|---|---|
| NOV2d, CG101396-02 | SEQ ID NO: 11 | 3094bp |

| | | |
|---|---|---|
| DNA Sequence | ORF Start: ATG at 56 | ORF Stop: TAG at 3083 |

TGTCGACGGCGCCAGTGTGATGATATTGCAGATTCGCCTTCACCGCGGCCGCACCATGGAAGCGCTGA
CGCTGTGGCTTCTCCCCTGGATATGCCAGTGCGTGTCGGTGCGGGCCGACTCCATCATCCACATCGGT
GCCATCTTCGAGGAGAACGCGGCCAAGGACGACAGGGTGTTCCAGTTGGCGGTATCCGACCTGAGCCT
CAGCGATGACATCCTGCAGAGCGAGAAGATCACCTACTCCATCAAGGTCATCGAGGCCAACAACCCAT
TCCAGGCTGTGCAGGAAGCCTGTGACCTCATGACCCAGGGGATTTTGGCCTTGGTCACGTCCACTGGC
TGTGCATCTGCCAATGCCCTGCAGTCCCTCACGGATGCCATGCACATCCCACACCTCTTTGTCCAGCG
CAACCCGGGAGGGTCGCCACGCACCGCATGCCACCTGAACCCCAGCCCCGATGGTGAGGCCTACACAC
TGGCTTCGAGACCACCCGTCCGCCTCAATGATGTCATGCTCAGGCTGGTGACGGAGCTGCGCTGGCAG
AAGTTCGTCATGTTCTACGACAGCGAGTATGATATCCGTGGGCTTCAAAGCTTTCTGGACCAGGCCTC
GCGGCTGGGCCTTGACGTCTCTTTACAAAAGGTGGACAAGAACATTAGCCACGTATTCACCAGCCTCT
TCACCACGATGAAGACAGAGGAGCTGAATCGCTACCGGGACACGCTTCGCCGCGCCATCCTGCTGCTC
AGCCCACAGGGAGCCCACTCCTTCATCAACGAGGCCGTGGAGACCAACCTGGCTTCCAAGGACAGCCA
CTGGGTCTTTGTGAATGAGGAAATCAGTGACCCGGAGATCCTGGATCTGGTCCATAGTGCCCTTGGAA
GGATGACCGTGGTCCGGCAAATCTTTCCGTCTGCAAAGGACAATCAGAAATGCACGAGGAACAACCAC
CGCATCTCCTCCCTGCTCTGCGACCCCCAGGAAGGCTACCTCCAGATGCTGCAGATCTCCAACCTCTA
TCTGTATGACAGTGTTCTGATGCTGGCCAACGCCTTTCACAGGAAGCTGGAGGACCGGAAGTGGCATA
GCATGGCGAGCCTCAACTGCATACGGAAATCCACTAAGCCATGGAATGGTGGGAGGTCCATGCTGGAT
ACCATCAAAAAGGGCCACATCACTGGCCTCACTGGGGTGATGGAGTTTCGGGAGGACAGTTCGAATCC
CTATGTCCAGTTTGAAATCCTTGGCACTACCTATAGTGAGACTTTTGGCAAAGACATGCGCAAGTTGG
CGACATGGGACTCAGAGAAGGGCTTGAATGGCAGCTTGCAAGAGAGGCCCATGGGCAGCCGCCTCCAA
GGATTGACTCTTAAAGTGGTGACTGTCTTGGAAGAGCCTTTCGTGATGGTGGCTGAGAACATCCTAGG
ACAGCCCAAGCGCTACAAAGGGTTCTCCATAGATGTCCTGGATGCACTGGCCAAGGCTCTGGGCTTTA
AATATGAGATTTACCAAGCCCCTGATGGCAGGTACGGTCACCAGCTCCATAACACCTCCTGGAACGGG
ATGATCGGGGAGCTCATCAGCAAGAGAGCAGACTTGGCCATCTCTGCCATCACCATCACCCCAGAGAG
GGAGAGCGTTGTGGACTTCAGCAAGCGGTACATGGACTATTCAGTGGGGATTCTAATTAAGAAGCCCG
AGGAGAAAATCAGCATCTTCTCCCTCTTTGCTCCATTTGATTTCGCTGTGTGGGCCTGCATTGCAGCA
GCCATCCCTGTGGTTGGTGTGCTGATATTTGTGTTGAACAGGATACAGGCTGTGAGGGCTCAGAGTGC
TGCCCAGCCCAGGCCGTCAGCTTCTGCCACTCTGCACAGCGCCATCTGGATTGTCTATGGAGCCTTCG
TACAGCAAGGTGGCGAATCTTCCGTGAACTCCATGGCCATGCGCATCGTGATGGGCAGCTGGTGGCTC
TTCACGCTCATTGTGTGCTCCTCCTACACAGCCAACCTTGCTGCCTTCCTCACAGTGTCCAGGATGGA
CAACCCCATAAGGACTTTCCAGGACCTGTCCAAACAAGTGGAAATGTCTTATGGCACTGTCCGGGATT
CTGCTGTATATGAGTACTTCCGAGCCAAGGGCACCAACCCCCTGGAGCAGGACAGCACGTTTGCTGAA
CTCTGGCGGACCATCAGCAAGAACGGAGGGGCTGACAACTGCGTGTCCAGTCCTTCAGAAGGCATCAG
GAAGGCAAAGAAGGGGAACTACGCCTTCCTGTGGGATGTGGCCGTGGTGGAATACGCAGCCCTGACGG
ATGACGACTGCTCGGTGACTGTCATCGGCAACAGCATCAGCAGCAAGGGTTACGGGATTGCCCTGCAG
CATGGCAGCCCCTACAGGGACCTCTTCTCCCAGAGGATCCTGGAGCTGCAGGACACAGGGGACCTGGA
TGTGCTGAAGCAGAAGTGGTGGCCGCACATGGGCCGCTGTGACCTCACCAGCCATGCCAGCGCCCAGG
CCGACGGCAAATCCCTCAAGCTGCACAGCTTCGCCGGGGTCTTCTGCATCCTGGCCATTGGCCTGCTC
CTGGCCTGCCTGGTGGCTGCCCTGGAGTTGTGGTGGAACAGCAACCGGTGCCACCAGGAGACCCCCAA
GGAGGACAAAGAAGTGAACTTGGAGCAGGTCCACCGGCGCATGAACAGCCTCATGGATGAAGACATTG
CTCACAAGCAGATTTCCCCAGCGTCGATTGAGCTCTCGGCCCTGGAGATGGGGGGCCTGGCTCCCACC
CAGACCTTGGAGCCGACACGGGAGTACCAGAACACCCAGCTCTCGGTCAGCACCTTTCTGCCAGAGCA
GAGCAGCCATGGCACCAGCCGGACACTCTCATCAGGGCCCAGCAGCAACCTGCCGCTGCCGCTGAGCA
GCTCGGCGACCATGCCCTCCATGCAGTGCAAACACAGGTCACCCAACGGGGGGCTGTTCCGGCAGAGC
CCGGTGAAGACCCCCATCCCCATGTCCTTCCAGCCCGTGCCTGGAGGCGTCCTTCCAGAGGCTCTGGA
CACCTCCCACGGGACCTCCATCTAGCTCGAGGGC

NOV2d, CG101396-02

| | | | |
|---|---|---|---|
| Protein Sequence | SEQ ID NO: 12 | 1009 aa | MW at 112102.6kD |

MEALTLWLLPWICQCVSVRADSIIHIGAIFEENAAKDDRVFQLAVSDLSLSDDILQSEKITYSIKVIE
ANNPFQAVQEACDLMTQGILALVTSTGCASANALQSLTDANHIPHLFVQRNPGGSPRTACHLNPSPDG
EAYTLASRPPVRLNDVMLRLVTELRWQKFVMFYDSEYDIRGLQSFLDQASRLGLDVSLQKVDKNISHV
FTSLFTTMKTEELNRYRDTLRRAILLLSPQGAHSFINEAVETNLASKDSHWVFVNEEISDPEILDLVH
SALGRMTVVRQIFPSAKDNQKCTRNNHRISSLLCDPQEGYLQMLQISNLYLYDSVLMLANAFHRKLED
RKWHSMASLNCIRKSTKPWNGGRSMLDTIKKGHITGLTGVMEFREDSSNPYVQFEILGTTYSETFGKD
MRKLATWDSEKGLMGSLQERPMGSRLOGLTLKVVTVLEEPFVMVAENILGQPKRYKGFSIDVLDALAK
ALGFKYEIYQAPDGRYGHQLHNTSWNGMIGELISKRADLAISAITITPERESVVDFSKRYMDYSVGIL
IKKPEEKISIFSLFAPFDFAVWACIAAAIPVVGVLIFVLNRIQAVRAQSAAQPRPSASATLHSAIWIV
YGAFVQQGGESSVNSMAMRIVMGSWWLFTLIVCSSYTANLAAFLTVSRMDNPIRTFQDLSKQVEMSYG
TVRDSAVYEYFRAKGTNPLEQDSTFAELWRTISKNGGADNCVSSPSEGIRKAKKGNYAFLWDVAVVEY
AALTDDDCSVTVIGNSISSKGYGIALQHGSPYRDLFSQRILELQDTGDLDVLKQKWWPHMGRCDLTSH
ASAQADGKSLKLHSFAGVFCILAIGLLLACLVAALELWWNSNRCHQETPKEDKEVNLEQVHRRMNSLM
DEDIAHKQISPASIELSALEMGGLAPTQTLEPTREYQNTQLSVSTFLPEQSSHGTSRTLSSGPSSNLP
LPLSSSATMPSMQCKHRSPNGGLFRQSPVKTPIPMSFQPVPGGVLPEALDTSHGTSI

| | |
|---|---|
| SEQ ID NO: 13 | 3189 bp |

| | | |
|---|---|---|
| NOV2e, SNP13379211 of | ORF Start: ATG at 86 | ORF Stop: TGA at 3113 |

| | | |
|---|---|---|
| CG101396-01, DNA Sequence | SNP Pos: 3184 | SNP Change: C to T |

CTGCACCGGGACCAGCGCCTCCCCGCTTCGCGCTGCCCTCGGCCTCGCCCCGGGCCCGGGTGGATGAG
CCGCGCGCCCGGGGGACATGGAAGCGCTGACGCTGTGGCTTCTCCCCTGGATATGCCAGTGCGTGTCG
GTGCGGGCCGACTCCATCATCCACATCGGTGCCATCTTCGAGGAGAACGCGGCCAAGGACGACAGGGT
GTTCCAGTTGGCGGTATCCGACCTGAGCCTCAACGATGACATCCTGCAGAGCGAGAAGATCACCTACT
CCATCAAGGTCATCGAGGCCAACAACCCATTCCAGGCTGTGCAGGAAGCCTGTGACCTCATGACCCAG
GGGATTTTGGCCTTGGTCACGTCCACTGGCTGTGCATCTGCCAATGCCCTGCAGTCCCTCACGGATGC
CATGCACATCCCGCACCTCTTTGTCCAGCGCAACCCGGGAGGGTCGCCACGCACCGCATGCCACCTGA
ACCCCAGCCCCGATGGTGAGGCCTACACACTGGCTTCGAGACCACCCGTCCGCCTCAATGATGTCATG
CTCAGGCTGGTGACGGAGCTGCGCTGGCAGAAGTTCGTCATGTTCTACGACAGCGAGTATGATATCCG
TGGGCTTCAAAGCTTTCTGGACCAGGCCTCGCGGCTGGGCCTTGACGTCTCTTTACAAAAGGTGGACA
AGAACATTAGCCACGTATTCACCAGCCTCTTCACCACGATGAAGACAGAGGAGCTGAATCGCTACCGG
GACACGCTTCGCCGCGCCATCCTGCTGCTCAGCCCACAGGGAGCCCACTCCTTCATCAACGAGGCCGT
GGAGACCAACCTGGCTTCCAAGGACAGCCACTGGGTCTTTGTGAATGAGGAAATCAGTGACCCGGAGA
TCCTGGATCTGGTCCATAGTGCCCTTGGAAGGATGACCGTGGTCCGGCAAATCTTTCCGTCTGCAAAG
GACAATCAGAAATGCACGAGGAACAACCACCGCATCTCCTCCCTGCTCTGCGACCCCCAGGAAGGCTA
CCTCCAGATGCTGCAGATCTCCAACCTCTATCTGTATGACAGTGTTCTGATGCTGGCCAACGCCTTTC
ACAGGAAGCTGGAGGACCGGAAGTGGCATAGCATGGCGAGCCTCAACTGCATACGGAAATCCACTAAG
CCATGGAATGGTGGGAGGTCCATGCTGGATACCATCAAAAAGGGCCACATCACTGGCCTCACTGGGGT
GATGGAGTTTCGGGAGGACAGTTCGAATCCCTATGTCCAGTTTGAAATCCTTGGCACTACCTATAGTG
AGACTTTTGGCAAAGACATGCGCAAGTTGGCGACATGGGACTCAGAGAAGGGCTTGAATGGCAGCTTG
CAAGAGAGGCCCATGGGCAGCCGCCTCCAAGGATTGACTCTTAAAGTGGTGACTGTCTTGGAAGAGCC
TTTCGTGATGGTGGCTGAGAACATCCTAGGACAGCCCAAGCGCTACAAAGGGTTCTCCATAGATGTCC
TGGATGCACTGGCCAAGGCTCTGGGCTTTAAATATGAGATTTACCAAGCCCCTGATGGCAGGTACGGT
CACCAGCTCCATAACACCTCCTGGAACGGGATGATCGGGGAGCTCATCAGCAAGAGAGCAGACTTGGC
CATCTCTGCCATCACCATCACCCCAGAGAGGGAGAGCGTTGTGGACTTCAGCAAGCGGTACATGGACT
ATTCAGTGGGGATTCTAATTAAGAAGCCCGAGGAGAAAATCAGCATCTTCTCCCTCTTTGCTCCATTT
GATTTCGCTGTGTGGGCCTGCATTGCAGCAGCCATCCCTGTGGTTGGTGTGCTGATATTTGTGTTGAA
CAGGATACAGGCTGTGAGGGCTCAGAGTGCTGCCCAGCCCAGGCCGTCAGCTTCTGCCACTCTGCACA
GCGCCATCTGGATTGTCTATGGAGCCTTCGTACAGCAAGGTGGCGAATCTTCCGTGAACTCCATGGCC
ATGCGCATCGTGATGGGCAGCTGGTGGCTCTTCACGCTCATTGTGTGCTCCTCCTACACAGCCAACCT
TGCTGCCTTCCTCACAGTGTCCAGGATGGACAACCCCATAAGGACTTTCCAGGACCTGTCCAAACAAG
TGGAAATGTCTTATGGCACTGTCCGGGATTCTGCTGTATATGAGTACTTCCGAGCCAAGGGCACCAAC
CCCCTGGAGCAGGACAGCACGTTTGCTGAACTCTGGCGGACCATCAGCAAGAACGGAGGGGCTGACAA
CTGCGTGTCCAGTCCTTCAGAAGGCATCAGGAAGGCAAAGAAGGGGAACTACGCCTTCCTGTGGGATG
TGGCCGTGGTGGAATACGCAGCCCTGACGGATGACGACTGCTCGGTGACTGTCATCGGCAACAGCATC
AGCAGCAAGGGTTACGGGATTGCCCTGCAGCATGGCAGCCCCTACAGGGACCTCTTCTCCCAGAGGAT
CCTGGAGCTGCAGGACACAGGGGACCTGGATGTGCTGAAGCAGAAGTGGTGGCCGCACATGGGCCGCT
GTGACCTCACCAGCCATGCCAGCGCCCAGGCCGACGGCAAATCCCTCAAGCTGCACAGCTTCGCCGGG
GTCTTCTGCATCCTGGCCATTGGCCTGCTCCTGGCCTGCCTGGTGGCTGCCCTGGAGTTGTGGTGGAA
CAGCAACCGGTGCCACCAGGAGACCCCCAAGGAGGACAAAGAAGTGAACTTGGAGCAGGTCCACCGGC
GCATGAACAGCCTCATGGATGAAGACATTGCTCACAAGCAGATTTCCCCAGCGTCGATTGAGCTCTCG
GCCCTGGAGATGGGGGGCCTGGCTCCCACCCAGACCTTGGAGCCGACACGGGAGTACCAGAACACCCA
GCTOTCGGTCAGCACCTTTCTGCCAGAGCAGAGCAGCCATGGCACCAGCCGGACACTCTCATCAGGGC
CCAGCAGCAACCTGCCGCTGCCGCTGAGCAGCTCGGCGACCATGCCCTCCATGCAGTGCAAACACAGG
TCACCCAACGGGGGGCTGTTCCGGCAGAGCCCGGTGAAGACCCCCATCCCCATGTCCTTCCAGCCCGT
GCCTGGAGGCGTCCTTCCAGAGGCTCTGGACACCTCCCACGGGACCTCCATCTGACTGCGCCGCCTGC
CCTCCTGCCCACCCTCCCACCCACCCGACCAGCAGAGCTTTTTAATACAAGAAAATAACAA

| | |
|---|---|
| NOV2e, SNP13379211 of | MW at 112129.7kD |

| | | | |
|---|---|---|---|
| CG101396-01, Protein Sequences | SEQ ID NO: 14 | 1009 aa | SNP Change: no change |

MEALTLWLLPWICQCVSVRADSIIHIGAIFEENAAKDDRVFQLAVSDLSLNDDILQSEKITYSIKVIE
ANNPFQAVQEACDLMTQGILALVTSTGCASANALQSLTDAMHIPHLFVQRNPGGSPRTACHLNPSPDG
EAYTLASRPPVRLNDVMLRLVTELRWQKFVMFYDSEYDIRGLQSFLDQASRLGLDVSLQKVDKNISHV
FTSLFTTMKTEELNRYRDTLRRAILLLSPQGAHSFINEAVETNLASKDSHWVFVNEEISDPEILDLVH
SALGRMTVVRQIFPSAKDNQKCTRNNHRISSLLCDPQEGYLQMLQISNLYLYDSVLMLANAFHRKLED
RKWHSMASLNCIRKSTKPWNGGRSMLDTIKKGHITGLTGVMEFREDSSNPYVQFEILGTTYSETFGKD
MRKLATWDSEKGLNGSLQERPMGSRLQGLTLKVVTVLEEPFVMVAENILGQPKRYKGFSIDVLDALAK
ALGFKYEIYQAPDGRYGHQLHNTSWNGMIGELISKRADLAISAITITPERESVVDFSKRYMDYSVGIL
IKKPEEKISIFSLFAPFDFAVWACIAAAIPVVGVLIFVLNRIQAVRAQSAAQPRPSASATLHSAIWIV
YGAFVQQGGESSVNSMAMRIVMGSWWLFTLIVCSSYTANLAAFLTVSRMDNPIRTFQDLSKQVEMSYG
TVRDSAVYEYFRAKGTNPLEQDSTFAELWRTISKNGGADNCVSSPSEGIRKAKKGNYAFLWDVAVVEY
AALTDDDCSVTVIGNSISSKGYGIALQHGSPYRDLFSQRILELQDTGDLDVLKQKWWPHMGRCDLTSH
ASAQADGKSLKLHSFAGVFCILAIGLLLACLVAALELWWNSNRCHQETPKEDKEVNLEQVHRRMNSLM
DEDIAHKQISPASIELSALEMGGLAPTQTLEPTREYQNTQLSVSTFLPEQSSHGTSRTLSSGPSSNLP
LPLSSSATMPSMQCKHRSPNGGLFRQSPVKTPIPMSFQPVPGGVLPEALDTSHGTSI

[0351] A ClustalW comparison of the above protein sequences yields the following sequence alignment shown in Table 2B.

TABLE 2B
Comparison of the NOV2 protein sequences.

| | |
|---|---|
| NOV2a | ----MEALTLWLLPWICQCVSVRASIIHIGAIFEENAAKDDRVFQLAVSDLSLNDDILQ |
| NOV2b | ---------------------TGTDSIIHIGAIFEENAAKDDRVFQLAVSDLSNDDILQ |
| NOV2c | TGSTMEALTLWLLPWICQCVSVRADSIIHIGAIFEENAAKDDRVFQLAVSDLSLNDDILQ |
| NOV2d | ----MEALTLWLLPWICQCVSVRADSIIHIGAIFEENAAKDDRVFQLAVSDLSLNDDILQ |
| NOV2a | SEKITYSIKVIEANNPFQAVQEACDLMTQGILALVTSTGCASANALQSLTDAMHIPHLFV |
| NOV2b | SEKITYSIKVIEANNPFQAVQEACDLMTQGILALVTSTGCASANALQSLTDAMHIPHLFV |
| NOV2c | SEKITYSIKVIEANNPFQAVQEACDLMTQGILALVTSTGCASANALQSLTDAMHIPHLFV |
| NOV2d | SEKITYSIKVIEANNPFQAVQEACDLMTQGILALVTSTGCASANALQSLTDAMHIPHLFV |
| NOV2a | QRNPGGSPRTACHLNPSPDGEAYTLASRPPVRLNDVMLRLVTELRWQKFVMFYDSEYDIR |
| NOV2b | QRNPGGSPRTACHLNPSPDGEAYTLASRPPVRLNDVMLRLVTELRWQKFVMFYDSEYDIR |
| NOV2c | QRNPGGSPRTACHLNPSPDGEAYTLASRPPVRLNDVMLRLVTELRWQKFVMFYDSEYDIR |
| NOV2d | QRNPGGSPRTACHLNPSPDGEAYTLASRPPVRLNDVMLRLVTELRWQKFVMFYDSEYDIR |
| NOV2a | GLQSFLDQASRLGLDVSLQKVDKNISHVFTSLFTTMKTEELNRYRDTLRRAILLLSPQGA |
| NOV2b | GLQSFLDQASRLGLDVSLQKVDKNISHVFTSLFTTMKTEELNRYRDTLRRAILLLSPQGA |
| NOV2c | GLQSFLDQASRLGLDVSLQKVDKNISHVFTSLFTTMKTEELNRYRDTLRRAILLLSPQGA |
| NOV2d | GLQSFLDQASRLGLDVSLQKVDKNISHVFTSLFTTMKTEELNRYRDTLRRAILLLSPQGA |
| NOV2a | HSFINEAVETNLASKDSHWVFVNEEESDPEILDLVHSALGRMTVVRQIFPSAKDNQKCTR |
| NOV2b | HSFINEAVETNLASKDSHWVFVNEEESDPEILDLVHSALGRMTVVRQIFPSAKDNQKCTR |
| NOV2c | HSFINEAVETNLASKDSHWVFVNEEESDPEILDLVHSALGRMTVVRQIFPSAKDNQKCTR |
| NOV2d | HSFINEAVETNLASKDSHWVFVNEEESDPEILDLVHSALGRMTVVRQIFPSAKDNQKCTR |
| NOV2a | NNHRISSLLCDPQEGYLQMLQISNLYLYDSVLMLANAFHRKLEDRKWHSMASLNCIRKST |
| NOV2b | NNHRISSLLCDPQEGYLQMLQISNLYLYDSVLMLANAFHRKLEDRKWHSMASLNCIRKST |
| NOV2c | NNHRISSLLCDPQEGYLQMLQISNLYLYDSVLMLANAFHRKLEDRKWHSMASLNCIRKST |
| NOV2d | NNHRISSLLCDPQEGYLQMLQISNLYLYDSVLMLANAFHRKLEDRKWHSMASLNCIRKST |
| NOV2a | KPWNGGRSMLDTIKKGHITGLTGVMEFREDSSNPYVQFEILGTTYSETFGKDMRKLATWD |
| NOV2b | KPWNGGRSMLDTIKKGHITGLTGVMEFREDSSNPYVQFEILGTTYSETFGKDMRKLATWD |
| NOV2c | KPWNGGRSMLDTIKKGHITGLTGVMEFREDSSNPYVQFEILGTTYSETFGKDMRKLATWD |
| NOV2d | KPWNGGRSMLDTIKKGHITGLTGVMEFREDSSNPYVQFEILGTTYSETFGKDMRKLATWD |
| NOV2a | SEKGLNGSLQERPMGSRLQGLTLKVVTVLEEPFVMVAENILGQPKRYKGFSIDVLDALAK |
| NOV2b | SEKGLNGSLQERPMGSRLQGLTLKVVTVLEEPFVMVAENILGQPKRYKGFSIDVLDALAK |
| NOV2c | SEKGLNGSLQERPMGSRLQGLTLKVVTVLEEPFVMVAENILGQPKRYKGFSIDVLDALAK |
| NOV2d | SEKGLNGSLQERPMGSRLQGLTLKVVTVLEEPFVMVAENILGQPKRYKGFSIDVLDALAK |
| NOV2a | ALGFKYEIYQAPDGRYGHQLHNTSWNGMIGELISKRADLAISAITITPERESVVDFSKRY |
| NOV2b | ALGFKYEIYQAPDGRYGHQLHNTSWNGMIGELISKRADLAISAITITPERESVVDFSKRY |
| NOV2c | ALGFKYEIYQAPDGRYGHQLHNTSWNGMIGELISKRADLAISAITITPERESVVDFSKRY |
| NOV2d | ALGFKYEIYQAPDGRYGHQLHNTSWNGMIGELISKRADLAISAITITPERESVVDFSKRY |
| NOV2a | MDYSVGILIKKPEEKISIFSLFAPFDFAVWACIAAAIPVVGVLIFVLNRIQAVRAQSAAQ |
| NOV2b | MDYSVGILIKKPEEKISIFSLFAPFDFAVWACIAAAIPVVGVLIFVLNRIQAVRAQSAAQ |
| NOV2c | MDYSVGILIKKPEEKISIFSLFAPFDFAVWACIAAAIPVVGVLIFVLNRIQAVRAQSAAQ |
| NOV2d | MDYSVGILIKKPEEKISIFSLFAPFDFAVWACIAAAIPVVGVLIFVLNRIQAVRAQSAAQ |
| NOV2a | PRPSASATLHSAIWIVYGAFVQQGGESSVNSMAMRIVMGSWWLFTLIVCSSYTANLAAFL |
| NOV2b | PRPSASATLHSAIWIVYGAFVQQGGESSVNSMAMRIVMGSWWLFTLIVCSSYTANLAAFL |
| NOV2c | PRPSASATLHSAIWIVYGAFVQQGGESSVNSMAMRIVMGSWWLFTLIVCSSYTANLAAFL |
| NOV2d | PRPSASATLHSAIWIVYGAFVQQGGESSVNSMAMRIVMGSWWLFTLIVCSSYTANLAAFL |
| NOV2a | TVSRMDNPIRTFQDLSKQVEMSYGTVRDSAVYEYFRAKGTNPLEQDSTFAELWRTISKNG |
| NOV2b | TVSRMDNPIRTFQDLSKQVEMSYGTVRDSAVYEYFRAKGTNPLEQDSTFAELWRTISKNG |
| NOV2c | TVSRMDNPIRTFQDLSKQVEMSYGTVRDSAVYEYFRAKGTNPLEQDSTFAELWRTISKNG |
| NOV2d | TVSRMDNPIRTFQDLSKQVEMSYGTVRDSAVYEYFRAKGTNPLEQDSTFAELWRTISKNG |
| NOV2a | GADNCVSSPSEGIRKAKKGNYAFLWDVAVVEYAALTDDDCSVTVIGNSISSKGYGIALQH |
| NOV2b | GADNCVSSPSEGIRKAKKGNYAFLWDVAVVEYAALTDDDCSVTVIGNSISSKGYGIALQH |
| NOV2c | GADNCVSSPSEGIRKAKKGNYAFLWDVAVVEYAALTDDDCSVTVIGNSISSKGYGIALQH |
| NOV2d | GADNCVSSPSEGIRKAKKGNYAFLWDVAVVEYAALTDDDCSVTVIGNSISSKGYGIALQH |
| NOV2a | GSPYRDLFSQRILELQDTGDLDVLKQKWWPHMGRCDLTSHASAQADGKSLKLHSFAGVFC |
| NOV2b | GSPYRDLFSQRILELQDTGDLDVLKQKWWPHMGRCDLTSHASAQADGKSLKLHSFAGVFC |
| NOV2c | GSPYRDLFSQRILELQDTGDLDVLKQKWWPHMGRCDLTSHASAQADGKSLKLHSFAGVFC |
| NOV2d | GSPYRDLFSQRILELQDTGDLDVLKQKWWPHMGRCDLTSHASAQADGKSLKLHSFAGVFC |
| NOV2a | ILAIGLLLACLVAALELWWNSNRCHQETPKEDKEVNLEQVHRRMNSLMDEDIAHKQISPA |
| NOV2b | ILAIGLLLACLVAALELWWNSNRCHQETPKEDKEVNLEQVHRRMNSLMDEDIAHKQISPA |
| NOV2c | ILAIGLLLACLVAALELWWNSNRCHQETPKEDKEVNLEQVHRRMNSLMDEDIAHKQISPA |
| NOV2d | ILAIGLLLACLVAALELWWNSNRCHQETPKEDKEVNLEQVHRRMNSLMDEDIAHKQISPA |
| NOV2a | SIELSALEMGGLAPTQTLEPTREYQNTQLSVSTFLPEQSSHGTSRTLSSGPSSNLPLPLS |
| NOV2b | SIELSALEMGGLAPTQTLEPTREYQNTQLSVSTFLPEQSSHGTSRTLSSGPSSNLPLPLS |
| NOV2c | SIELSALEMGGLAPTQTLEPTREYQNTQLSVSTFLPEQSSHGTSRTLSSGPSSNLPLPLS |
| NOV2d | SIELSALEMGGLAPTQTLEPTREYQNTQLSVSTFLPEQSSHGTSRTLSSGPSSNLPLPLS |
| NOV2a | SSATMPSMQCKHRSPNGGLFRQSPVKTPIPMSFQPVPGGVLPEALDTSHGTSI--- |
| NOV2b | SSATMPSMQCKHRSPNGGLFRQSPVKTPIPMSFQPVPGGVLPEALDTSHGTSILEG |
| NOV2c | SSATMPSMQCKHRSPNGGLFRQSPVKTPIPMSFQPVPGGVLPEALDTSHGTSILEG |
| NOV2d | SSATMPSMQCKHRSPNGGLFRQSPVKTPIPMSFQPVPGGVLPEALDTSHGTSI--- |
| NOV2a | (SEQ ID NO: 6) |
| NOV2b | (SEQ ID NO: 8) |
| NOV2c | (SEQ ID NO: 10) |
| NOV2d | (SEQ ID NO: 12) |

[0352] Further analysis of the NOV2a protein yielded the following properties shown in Table 2C.

TABLE 2C
Protein Sequence Properties NOV2a

| | |
|---|---|
| SignalP analysis: | Cleavage site between residues 21 and 22 |
| PSORT II analysis: | |

| | |
|---|---|
| PSG: | a new signal peptide prediction method |
| | N-region: length 2; pos. chg 0; neg. chg 1 |
| | H-region: length 16; peak value 0.00 |
| | PSG score: −4.40 |
| GvH: | von Heijne's method for signal seq. recognition |
| | GvH score (threshold: −2.1): −1.56 |
| | possible cleavage site: between 17 and 18 |

>>>Seems to have no N-terminal signal peptide

| | |
|---|---|
| ALOM: | Klein et al's method for TM region allocation |
| | Init position for calculation: 1 |
| | Tentative number of TMS (s) for the threshold 0.5: 3 |
| | INTEGRAL Likelihood = −11.41 Transmembrane 567-583 |
| | INTEGRAL Likelihood = −0.43 Transmembrane 629-645 |
| | INTEGRAL Likelihood = −12.79 Transmembrane 834-850 |
| | PERIPHERAL Likelihood = 1.01 (at 437) |
| | ALOM score: −12.79 (number of TMSs: 3) |
| MTOP: | Prediction of membrane topology (Hartmann et al.) |
| | Center position for calculation: 574 |
| | Charge difference: 5.0 C(3.0) − N(−2.0) |
| | C > N: C-terminal side will be inside |

>>>membrane topology: type 3b

| MITDISC: | discrimination of mitochondrial targeting seq | | | |
|---|---|---|---|---|
| | R content: | 1 | Hyd Moment(75): | 3.64 |
| | Hyd Moment (95): | 6.21 | G content: | 0 |
| | D/E content: | 2 | S/T content: | 2 |
| | Score: −5.86 | | | |

Gavel: prediction of cleavage sites for mitochondrial preseq

R-2 motif at 29 VRA|DS

NUCDISC: discrimination of nuclear localization signals

| | |
|---|---|
| | pat4: none |
| | pat7: PKRYKGF (5) at 460 |
| | bipartite: RKWHSMASLNCIRKSTK at 341 |
| | content of basic residues: 9.5% |
| | NLS Score: 0.45 |
| KDEL: | ER retention motif in the C-terminus: none |

ER Membrane Retention Signals: none

| | |
|---|---|
| SKL: | peroxisomal targeting signal in the C-terminus: none |
| PTS2: | 2nd peroxisomal targeting signal: none |
| VAC: | possible vacuolar targeting motif: none |

RNA-binding motif: none
Actinin-type actin-binding motif:

| | |
|---|---|
| | type 1: none |
| | type 2: none |
| NMYR: | N-myristoylation pattern none |

Prenylation motif: none
memYQRL: transport motif from cell surface to Golgi: none
Tyrosines in the tail: none
Dileucine motif in the tail: none
checking 63 PROSITE DNA binding motifs: none
checking 71 PROSITE ribosomal protein motifs: none
checking 33 PROSITE prokaryotic DNA binding motifs: none

| | |
|---|---|
| NNCN: | Reinhardt's method for Cytoplasmic/Nuclear discrimination |
| | Prediction: cytoplasmic |
| | Reliability: 70.6 |
| COIL: | Lupas's algorithm to detect coiled-coil regions |
| | total: 0 residues |

--------------------------
Final Results (k = 9/23):

44.4%: endoplasmic reticulum
22.2%: vacuolar
11.1%: Golgi
11.1%: nuclear
11.1%: mitochondrial

>> prediction for CG101396-01 is end (k = 9)

[0353] A search of the NOV2a protein against the Geneseq database, a proprietary database that contains sequences published in patents and patent publication, yielded several homologous proteins shown in Table 2D.

TABLE 2D
Geneseq Results for NOV2a

| | | NOV2a | Identities/ | |
|---|---|---|---|---|
| | | Residues/ | Similarities for | |
| Geneseq | Protein/Organism/Length | Match | the Matched | Expect |
| Identifier | [Patent #, Date] | Residues | Region | Value |
| AAE13278 | Human transporters and ion | 1 . . . 1009 | 1008/1009 (99%) | 0.0 |
| | channels (TRICH)-5 - Homo | 1 . . . 1009 | 1009/1009 (99%) | |
| | sapiens, 1009 aa. | | | |
| | [WO200177174-A2, 18-OCT- | | | |
| | 2001] | | | |
| AAM48984 | Rat glutamate receptor delta-1 | 1 . . . 1009 | 993/1009 (98%) | 0.0 |
| | subunit SEQ ID NO: 1 - Rattus | 1 . . . 1009 | 1004/1009 (99%) | |
| | norvegicus, 1009 aa. | | | |
| | [WO2002063 I 3-A2, 24-JAN- | | | |
| | 2002] | | | |
| AAG77969 | Human ion channel protein | 1 . . . 1009 | 999/1009 (99%) | 0.0 |
| | IC32391 - Homo sapiens, 1009 | 1 . . . 1009 | 1001/1009 (99%) | |
| | aa. [WO200183752-A2, 08- | | | |
| | NOV-2001] | | | |
| AAB40361 | Human ORFX ORF125 | 83 . . . 1009 | 927/927 (100%) | 0.0 |
| | polypeptide sequence SEQ ID | 1 . . . 927 | 927/927 (100%) | |
| | NO:250 - Homo sapiens, 927 aa. | | | |
| | [WO200058473-A2, 05-OCT- | | | |
| | 2000] | | | |
| AAM48988 | Human glutamate receptor delta- | 219 . . . 1009 | 791/791 (100%) | 0.0 |
| | 1 subunit SEQ ID NO: 8 - Homo | 1 . . . 791 | 791/791 (100%) | |
| | sapiens, 791 aa. | | | |
| | [WO200206313-A2, 24-JAN- | | | |
| | 2002] | | | |

[0354] In a BLAST search of public sequence databases, the NOV2a protein was found to have homology to the proteins shown in the BLASTP data in Table 2E.

TABLE 2E
Public BLASTP Results for NOV2a

| | | NOV2a | Identities/ | |
|---|---|---|---|---|
| Protein | | Residues/ | Similarities for | |
| Accession | | Match | the Matched | Expect |
| Number | Protein/Organism/Length | Residues | Portion | Value |
| Q62640 | Glutamate receptor delta-1 | 1 . . . 1009 | 993/1009 (98%) | 0.0 |
| | subunit precursor - Rattus | 1 . . . 1009 | 1004/1009 (99%) | |
| | norvegicus (Rat), 1009 aa. | | | |
| CAD19379 | Sequence 4 from Patent | 1 . . . 1009 | 999/1009 (99%) | 0.0 |
| | WO0183752 - Homo sapiens | 1 . . . 1009 | 1001/1009 (99%) | |
| | (Human), 1009 aa. | | | |
| 528857 | glutamate receptor delta-1 | 1 . . . 1009 | 992/1009 (98%) | 0.0 |
| | chain precursor - rat, 1009 aa. | 1 . . . 1009 | 1004/1009 (99%) | |
| Q61627 | Glutamate receptor delta-1 | 1 . . . 1009 | 992/1009 (98%) | 0.0 |
| | subunit precursor - Mus | 1 . . . 1009 | 1002/1009 (98%) | |
| | musculus (Mouse), 1009 aa. | | | |
| Q9ULK0 | Hypothetical protein | 219 . . . 1009 | 791/791 (100%) | 0.0 |
| | KIAAI220 - Homo sapiens | 1 . . . 791 | 791/791 (100%) | |
| | (Human), 791 aa (fragment) | | | |

[0355] PFam analysis indicates that the NOV2a protein contains the domains shown in the Table 2F.

TABLE 2F
Domain Analysis of NOV2a

| | | Identities/ | |
|---|---|---|---|
| | NOV2a | Similarities | Expect |
| Pfam Domain | Match Region | for the Matched Region | Value |
| ANF₋receptor | 17 . . . 410 | 67/478 (14%) | 0.00034 |
| | | 261/478 (55%) | |
| SBP₋bac₋3 | 439 . . . 808 | 60/404 (15%) | 8.4e-07 |
| | | 221/404 (55%) | |
| lig₋chan | 562 . . . 852 | 123/325 (38%) | 6.9e-125 |
| | | 250/325 (77%) | |

### Example 3

[0356] The NOV3 clone was analyzed, and the nucleotide and encoded polypeptide sequences are shown in Table 3A.

TABLE 3A
NOV3 Sequence Analysis

| | | |
|---|---|---|
| NOV3a, CG102348-01 | SEQ ID NO: 15 | 3345 bp |

| | | |
|---|---|---|
| DNA Sequence | ORF Start: ATG at 18 | ORF Stop: TGA at 1479 |

CAGATGTCCAGTTCCAGATGCCTGGACCCAGAGTGTGGGGGAAATATCTCTGGAGAAGCCCTCACTCC
AAAGGCTGTCCAGGCGCAATGTGGTGGCTGCTTCTCTGGGGAGTCCTCCAGGCTTGCCCAACCCGGGG
CTCCGTCCTCTTGGCCCAAGAGCTACCCCAGCAGCTGACATCCCCCGGGTACCCAGAGCCGTATGGCA
AAGGCCAAGAGAGCAGCACGGACATCAAGGCTCCAGAGGGCTTTGCTGTGAGGCTCGTCTTCCAGGAC
TTCGACCTGGAGCCGTCCCAGGACTGTGCAGGGGACTCTGTCACAATCTCATTCGTCGGTTCGGATCC
AAGCCAGTTCTGTGGTCAGCAAGGCTCCCCTCTGGGCAGGCCCCCTGGTCAGAGGGAGTTTGTATCCT
CAGGGAGGAGTTTGCGGCTGACCTTCCGCACACAGCCTTCCTCGGAGAACAAGACTGCCCACCTTCAC
AAGGGCTTTCTGGCCCTCTACCAAACCGTGGCTGTGAACTATAGTCAGCCCATCAGCGAGGCCAGCAG
GGGCTCTGAGGCCATCAACGCACCTGGAGACAACCCTGCCAAGGTCCAGAACCACTGCCAGGAGCCCT
ATTATCAGGCCGCGGCAGCAGGGGCACTCACCTGTGCAACCCCAGGGACCTGGAAAGACAGACAGGAT
GGGGAGGAGGTTCTTCAGTGTATGCCTGTCTGCGGACGGCCAGTCACCCCCATTGCCCAGAATCAGAC
GACCCTCGGTTCTTCCAGAGCCAAGCTGGGCAACTTCCCCTGGCAAGCCTTCACCAGTATCCACGGCC
GTGGGGGCGGGGCCCTGCTGGGGGACAGATGGATCCTCACTGCTGCCCACACCGTCTACCCCAAGGAC
AGTGTTTCTCTCAGGAAGAACCAGAGTGTGAATGTGTTCTTGGGCCACACAGCCATAGATGAGATGCT
GAAACTGGGGAACCACCCTGTCCACCGTGTCGTTGTGCACCCCGACTACCGTCAGAATGAGTCCCATA
ACTTTAGCGGGGACATCGCCCTCCTGGAGCTGCAGCACAGCATCCCCCTGGGCCCCAACGTCCTCCCG
GTCTGTCTGCCCGATAATGAGACCCTCTACCGCAGCGGCTTGTTGGGCTACGTCAGTGGGTTTGGCAT
GGAGATGGGCTGGCTAACTACTGAGCTGAAGTACTCGAGGCTGCCTGTAGCTCCCAGGGAGGCCTGCA
ACGCCTGGCTCCAAAAGAGACAGAGACCCGAGGTGTTTTCTGACAATATGTTCTGTGTTGGGGATGAG
ACGCAAAGGCACAGTGTCTGCCAGGGGGACAGTGGCAGCGTCTATGTGGTATGGGACAATCATGCCCA
TCACTGGGTGGCCACGGGCATTGTGTCCTGGGGCATAGGGTGTGGCGAAGGGTATGACTTCTACACCA
AGGTGCTCAGCTATGTGGACTGGATCAAGGGAGTGATGAATGGCAAGAATTGACCCTGGGGGCTTGAA
CAGGGACTGACCAGCACAGTGGAGGCCCCAGGCAACAGAGGGCCTGGAGTGAGGACTGAACACTGGGG
TAGGGGTTGGGGGTGGGGGGTTGGGGGAGGCAGGGAAATCCTATTCACATCACTGTTGCACCAAGCCA
CTGCAAGAGAAACCCCCACCCGGCAAGCCCGCCCCATCCCAGACAGGAAGCAGAGTCCCACAGACCGC
TCCTCCTCACCCTCTACCTCCCTGTGCTCATGCACTAGGCCCCGGGAAGCCTGTACATCTCAACAACT
TTCGCCTTGAATGTCCTTAGAACCACCTTCCCCTACTTCATCTGTTGACACAGCTTTTATACTCACCT
GTGGAAGAGTCAGCTACTCACCCGCTATTAGAGTATGGAGGAAGGGGTTTTCATTGCATTGCATTTCT
GAAACATTCCTAAGACCCTTTAGTTGACCTTCAAATATTCAAGCTATTCTGCAGCTCCAAGATGCAAT
TATAGAAACAGCTCCTTTTTTATTTTATGTCCTCTATATGCCAGGTGCTTCACCTGTTATTTCACTTA
ATCCTCATACCATATTTGCAAAGGATGTGTTATTATCTATGTGTGACAAATGAGGAAACTGAGGCTCA
GGGGATAAAGGGACTTGCCCAAGTCCCACAGCTGGTGTGTGACTGCAGAGACTGTGCTCTTCCCAGTG
TGCTGCAATACTTCTCAACCCTCCTCTAACCTGCTGTGTCACCCGCTTTCCCTCCCAGCCCCCACATC
CTTACCATTTTCCCTCCCTGGGAATTCCTGCTTCTGCGAAAATGGTATCCTCTAGCTCACACTTTCCT
AATGGCCCCATCTCCTGCAGAAGCCAGGTGAGCCCAGCACTGGACTGAAGTTCTTGCAGACACCCCAC
CTGTGCCCCTATCATCAGGGGAACTGCTCCACCTGAGAGGACCAACTCTTTAATTTTTAGTAAAACCT
GAAGGTGATGGGCCGGGCGCAGTGGCTCACGCCTGTAATCCCAACACCTTAGGAGTCCGAGGTGGGTG
GATCACGAGGTCAGGAGATCCAGCCCATCCTGGCCAACATGGTGAAACCCCATCTCTACTAAAAATAC
AAAAATTAGCCGGGCGTGGTGACACGTGCCTGTAGTCCCAGCTACTCGGGAGGCTGAGGCAGGAGAAT
CACTTGAACCTGGGAGGCGGAGGTTGCAGTGAGCTAAGATCACGCCACTGCACTCCAGCCTGCGGACA
GACCAAGACTTCATCCCCCCCAAAAAAAAAAGATTGGAGGTGATTTACAGTGAAAGACACAAATAAAA
TACAACTGTTCAATGGAAATAGAAAATAAACACCATAAAAGAGAGAAGAGAGGTAATTTGTTAGCATC
AAGAGTCAAGTTGCTATATGGTCAAAGGTTAAATTTATCTCTAAAAAATGGCAGGATTCAAAGTTGTA
CATACATGTGATTACTTCTGTTTTTTACACCCACATACAGTACAAAAGATTATTAAAAATATTCCCAA
AAGGCAGGTGCAATGATGCACACTTATACCCCCAGCCACTCAGGAGGCTGATGCAAGAGGATCGCTTG
AGCCCAGGAGTTGAAGTCCAGCCTAAGCAACATAGTGAAACCCCATCTCCAAAAATATAATAATAATT
CTCTCAAAATACTAAACAGAGGTGGTTTTATTGATAAGATTTTGGCTGTTTGGTTTTCCACTATTCTC
TATTGGCTAAAATTTGTTTAATGAGCATGAAATGTTTTTATTTTATTTTGCTTATTTTTATGATTGCA
AAAAATGATATGAGTTTCTCCCTGCCAAGGCAAAAAATATATATATATACCTATAAAAAAAAAAAAAA
AAAAAAAAAAAAA

NOV3a, CG102348-01

| | | | |
|---|---|---|---|
| Protein Sequence | SEQ ID NO: 16 | 487 aa | MW at 53483.9kD |

MPGPRVWGKYLWRSPHSKGCPGANWWLLLWGVLQACPTRGSVLLAQELPQQLTSPGYPEPYGKGQESS
TDIKAPEGFAVRLVFQDFDLEPSQDCAGDSVTISFVGSDPSQFCGQQGSPLGRPPGQREFVSSGRSLR
LTFRTQPSSENKTAHLHKGFLALYQTVAVNYSQPISEASRGSEAINAPGDNPAKVQNHCQEPYYQAAA
AGALTCATPGTWKDRQDGEEVLQCMPVCGRPVTPIAQNQTTLGSSRAKLGNFPWQAFTSIHGRGGGAL
LGDRWILTAAHTVYPKDSVSLRKMQSVNVFLGHTAIDEMLKLGNHPVHRVVVHPDYRQNESHNFSGDI
ALLELQHSIPLGPNVLPVCLPDNETLYRSGLLGYVSGFGMEMGWLTTELKYSRLPVAPREACNAWLQK
RQRPEVFSDNMFCVGDETQRHSVCQGDSGSVYVVWDNHAHHWVATGIVSWGIGCGEGYDFYTKVLSYV
DWIKGVNNGKN

| | | |
|---|---|---|
| NOV3b, 199842645 | SEQ ID NO: 17 | 1368 bp |

| | | |
|---|---|---|
| DNA Sequence | ORF Start: at 1 | ORF Stop: end of sequence |

AAGCTTTGCCCAACCCGGGGCTCCGTCCTCTTGGCCCAAGAGCTACCCCAGCAGCTGACATCCCCCGG
GTACCCAGAGCCGTATGGCAAAGGCCAAGAGAGCAGCACGGACATCAAGGCTCCAGAGGGCTTTGCTG
TGAGGTTCGTCTTCCAGGACTTCGACCTGGAGTCGTCCCAGGACTGTGCAGGGGACTCTGTCACAATC
TCATTCGTCGGTTCGGATCCAAGCCAGTTCTGTGGTCAGCAAGGCTCCCCTCTGGGCAGGCCCCCTGG
TCAGAGGGAGTTTGTATCCTCAGGGAGGAGTTTGCGGCTGACCTTCCGCACACAGCCTTCCTCGGAGA
ACAAGACTGCCCACCTCCACAAGGGCTTCCTGGCCCTCTACCAAACCGTGGCTGTGAACTATAGTCAG
CCCATCAGCGAGGCCAGCAGGGGCTCTGAGGCCATCAACGCACCTGGAGACAACCCTGCCAAGGTCCA
GAACCACTGCCAGGAGCCCTATTATCAGGCCACGGCAGCAGGGGCACTCACCTGTGCAACCCCAGGGA
CCTGGAAAGACAGACAGGATGGGGAGGAGGTTCTTCAGTGTATGCCTGTCTGCGGACGGCCAGTCACC
CCCATTGCCCAGAATCAGACGACCCTCGGTTCTTCCAGAGCCAAGCTGGGCAACTTCCCCTGGCAAGC
CTTCACCAGTATCCACGGCCGTGGGGGCGGGGCCCTGCTGGGGGACAGATGGATCCTCACTGCTGCCC
ACACCATCTACCCCAAGGACAGTGTTTCTCTCAGGAAGAACCAGAGTGTGAATGTGTTCTTGGGCCAC
ACAGCCATAGATGAGATGCTGAAACTGGGGAACCACCCTGTCCACCGTGTCGTTGTGCACCCCGACTA
CCGTCAGAATGAGTCCCATAACTTTAGCGGGGACATCGCCCTCCTGGAGCTGCAGCACAGCATCCCCC
TGGGCCCCAACGTCCTCCCGGTCTGTCTGCCCGATAATGAGACCCTCTACCGCAGCGGCTTGTTGGGC
TACGTCAGTGGGTTTGGCATGGAGATGGGCTGGCTAACTACTGAGCTGAAGTACTCGAGGCTGCCTGT
AGCTCCCAGGGAGGCCTGCAACGCCTGGCTCCAAAAGAGACAGAGACCCGAGGTGTTTTCTGACAATA
TGTTCTGTGTTGGGGATGAGACGCAAAGGCACAGTGTCTGCCAGGGGGACAGTGGCAGCGTCTATGTG
GTATGGGACAATCATGCCCATCACTGGGTGGCCACGGGCATTGTGTCcTGGGGCATAGGGTGTGGCGA
AGGGTATGACTTCTACACCAAGGTGCTCAGCTATGTGGACTGGATCAAGGGAGTGATGAATGGCAAGA
ATAAGCTT

NOV3b, 199842645

| | | | |
|---|---|---|---|
| Protein Sequence | SEQ ID NO: 18 | 456 aa | MW at 49986.8kD |

KLCPTRGSVLLAQELPQQLTSPGYPEPYGKGQESSTDIKAPEGFAVRFVFQDFDLESSQDCAGDSVTI
SFVGSDPSQFCGQQGSPLGRPPGQREFVSSGRSLRLTFRTQPSSENKTAHLHKGFLALYQTVAVNYSQ
PISEASRGSEAINAPGDNPAKVQNHCQEPYYQATAAGALTCATPGTWKDRQDGEEVLQCMPVCGRPVT
PIAQNQTTLGSSRAKLGNFPWQAFTSIHGRGGGALLGDRWILTAAHTIYPKDSVSLRKNQSVNVFLGH
TAIDEMLKLGNHPVHRVVVHPDYRQNESHNFSGDIALLELQHSIPLGPNVLPVCLPDNETLYRSGLLG
YVSGFGMEMGWLTTELKYSRLPVAPREACNAWLQKRQRPEVFSDNMFCVGDETQRRSVCQGDSGSVYV
VWDNHAHHWVATGIVSWGIGCGEGYDFYTKVLSYVDWIKGVMNGKNKL

| | | |
|---|---|---|
| NOV3c, 198306343 | SEQ ID NO: 19 | 741 bp |

| | | |
|---|---|---|
| DNA Sequence | ORF Start: at 1 | ORF Stop: end of sequence |

AAGCTTACCCTCGGTTCTTCCAGAGCCAAGCTGGGCAACTTCCCCTGGCAAGCCTTCACCAGTATCCA
CGGCCGTGGGGGCGGGGCCCTGCTGGGGGACAGATGGATCCTCACTGCTGCCCACACCATCTACCCCA
AGAACAGTGTTTCTCTCAGGAAGAACCAGAGTGTGAATGTGTTCTTGGGCCACACAGCCATAGATGAG
ATGCTGAAACTGGGGAACCACCCTGTCCACCGTGTCGTTGTGCACCCCGACTACCGTCAGAATGAGTC
CCATAACTTTAGCGGGGACATCGCCCTCCTGGAGCTGCAGCACAGCATCCCCCTGGGCCCCAACGTCC
TCCCGGTCTGTCTGCCCGATAATGAGACCCTCTACCGCAGCGGCTTGTTGGGCTACGTCAGTGGGTTT
GGCATGGAGATGGGCTGGCTAACTACTGAGCTGAAGTACTCGAGGCTGCCTGTAGCTCCCAGGGAGGC
CTGCAACGCCTGGCTCCAAAAGAGACAGAGACCCGAGGTGTTTTCTGACAATATGTTCTGTGTTGGGG
ATGAGACGCAAAGGCACAGTGTCTGCCAGGGGGACAGTGGCAGCGTCTATGTGGTATGGGACAATCGT
GCCCATCACTGGGTGGCCACGGGCATTGTGTCCTGGGGCATAGGGTGTGGCGAAGGGTATGACTTCTA
CACCAAGGTGCTCAGCTATGTGGACTGGATCAAGGGAGTGATGAATGGCAAGAATAAGCTT

NOV3c, 198306343

| | | | |
|---|---|---|---|
| Protein Sequence | SEQ ID NO: 20 | 247 aa | MW at 27566.2kD |

KLTLGSSRAKLGNFPWQAFTSIHGRGGGALLGDRWILTAAHTIYPKNSVSLRKNQSVNVFLGHTAIDE
MLKLGNHPVHRVVVHPDYRQNESHNFSGDIALLELQHSIPLGPNVLPVCLPDNETLYRSGLLGYVSGF
GMEMGWLTTELKYSRLPVAPREACNAWLQKRQRPEVFSDNNFCVGDETQRHSVCQGDSGSVYVVWDNR
AHHWVATGIVSWGIGCGEGYDFYTKVLSYVDWIKGVMNGKNKL

| | | |
|---|---|---|
| NOV3d, 199842665 | SEQ ID NO: 21 | 1368 bp |

| | | |
|---|---|---|
| DNA Sequence | ORF Start: at 1 | ORF Stop: end of sequence |

AAGCTTTGCCCAACCCGGGGCTCCGTCCTCTTGGCCCAAGAGCTACCCCAGCAGCTGACATCCCCCGG
GTACCCAGAGCCGTATGGCAAAGGCCAAGAGAGCAGCACGGACATCAAGGCTCCAGAGGGCTTTGCTG
TGAGGCTCGTCTTCCAGGACTTCGACCTGGAGCCGTCCCAGGACTGTGCAGGGGACTCTGTCACAATC
TCATTCGTCGGTTCGGATCCAAGCCAGTTCTGTGGTCAGCAAGGCTCCCCTCTGGGCAGGCCCCCTGG
TCAGAGGGAGTTTGTATCCTCAGGGAGGAGTTTGCGGCTGACCTTCCGCACACAGCCTTCCTCGGAGA
ACAAGACTGCCCACCTCCACAAGGGCTTCCTGGCCCTCTACCAAACCGTGGCTGTGAACTATAGTCAG
CCCATCAGCGAGGCCAGCAGGGGCTCTGAGGCCATCAACGCACCTGGAGACAACCCTGCCAAGGTCCA
GAACCACTGCCAGGAGCCCTATTATCAGGCCGCGGCAGCAGGGGCACTCACCTGTGCAACCCCAGGGA
CCTGGAAAGACAGACAGGATGGGGAGGAGGTTCTTCAGTGTATGCCTGTCTGCGGACGGCCAGTCACC
CCCATTGCCCAGAATCAGACGACCCTCGGTTCTTCCAGAGCCAAGCTGGGCAACTTCCCCTGGCAAGC
CTTCACCAGTATCCACGGCCGTGGGGGCGGGGCCCTGCTGGGGGACAGATGGATCCTCACTGCTGCCC
ACACCGTCTACCCCAAGGACAGTGTTTCTCTCAGGAAGAACCAGAGTGTGAATGTGTTCTTGGGCCAC
ACAGCCATAGATGAGATGCTGAAACTGGGGAACCACCCTGTCCACCGTGTCGTTGTGCACCCCGACTA
CCGTCAGAATGAGTCCCATAACTTTAGCGGGGACATCGCCCTCCTGGAGCTGCAGCACAGCATCCCCC
TGGGCCCCAACGTCCTCCCGGTCTGTCTGCCCGATAATGAGACCCTCTACCGCAGCGGCTTGTTGGGC
TACGTCAGTGGGTTTGGCATGGAGATGGGCTGGCTAACTACTGAGCTGAAGTACTCGAGGCTGCCTGT
AGCTCCCAGGGAGGCCTGCAACGCCTGGCTCCAAAAGAGACAGAGACCCGAGGTGTTTTCTGACAATA
TGTTCTGTGTTGGGGATGAGACGCAAAGGCACAGTGTCTGCCAGGGGGACAGTGGCAGCGTCTATGTG
GTATGGGACAATCATGCCCATCACTGGGTGGCCACGGGCATTGTGTCCTGGGGCATAGGGTGTGGCGA
AGGGTATGACTTCTACACCAAGGTGCTCAGCTATGTGGACTGGATCAAGGGAGTGATGAATGGCAAGA
ATAAGCTT

NOV3d, 199842665

| | | | |
|---|---|---|---|
| Protein Sequence | SEQ ID NO: 22 | 456 aa | MW at 49918.7kD |

KLCPTRGSVLLAQELPQQLTSPGYPEPYGKGQESSTDIKAPEGFAVRLVFQDFDLEPSQDCAGDSVTI
SFVGSDPSQFCGQQGSPLGRPPGQREFVSSGRSLRLTFRTQPSSENKTAHLHKGFLALYQTVAVNYSQ
PISEASRGSEAINAPGDNPAKVQNHCQEPYYQAAAAGALTCATPGTWKDRQDGEEVLQCMPVCGRPVT
PIAQNQTTLGSSRAKLGNFPWQAFTSIHGRGGGALLGDRWILTAAHTVYPKDSVSLRKNQSVNVFLGH
TAIDEMLKLGNHPVHRVVVHPDYRQNESHNFSGDIALLELQHSIPLGPNVLPVCLPDNETLYRSGLLG
YVSGFGMEMGWLTTELKYSRLPVAPREACNAWLQKRQRPEVFSDNMFCVGDETQRHSVCQGDSGSVYV
VWDNHAHHWVATGIVSWGIGCGEGYDFYTKVLSYVDWIKGVMNGKNKL

| | | |
|---|---|---|
| NOV3e, 199842661 | SEQ ID NO: 23 | 1368 bp |

| | | |
|---|---|---|
| DNA Sequence | ORF Start: at 1 | ORF Stop: end of sequence |

AAGCTTTGCCCAACCCGGGGCTCCGTCCTCTTGGCCCAAGAGCTACCCCAGCAGCTGACATCCCCCGG
GTACCCAGAGCCGTATGGCAAAGGCCAAGAGAGCAGCACGGACATCAAGGCTCCAGAGGGCTTTGCTG
TGAGGCTCGTCTTCCAGGACTTCGACCTGGAGCCGTCCCAGGACTGTGCAGGGGACTCTGTCACAATC
TCATTCGTCGGTTCGGATCCAAGCCAGTTCTGTGGTCAGCAAGGCTCCCCTCTGGGCAGGCCCCCTGG
TCAGAGGGAGTTTGTATCCTCAGGGAGGAGTTTGCGGCTGACCTTCCGCACACAGCCTTCCTCGGAGG
ACAAGACTGCCCACCTCCACAAGGGCTTCCTGGCCCTCTACCAAACCGTGGCTGTGAACTATAGTCAG
CCCATCAGCGAGGCCAGCAGGGGCTCTGAGGCCATCAACGCACCTGGAGACAACCCTGCCAAGGTCCA
GAACCACTGCCAGGAGCCCTATTATCAGGCCGCGGCAGCAGGGGCACTCACCTGTGCAACCCCAGGGA
CCTGGAAAGACAGACAGGATGGGGAGGAGGTTCTTCAGTGTATGCCTGTCTGCGGACGGCCAGTCACC
CCCATTGCCCAGAATCAGACGACCCTCGGTTCTTCCAGAGCCAAGCTGGGCAACTTCCCCTGGCAAGC
CTTCACCAGTATCCACGGCCGTGGGGGCGGGGCCCTGCTGGGGGACAGATGGATCCTCACTGCTGCCC
ACACCATCTACCCCAAGGACAGTGTTTCTCTCAGGAAGAACCAGAGTGTGAATGTGTTCTTGGGCCAC
ACAGCCATAGATGAGATGCTGAAACTGGGGAACCACCCTGTCCACCGTGTCGTTGTGCACCCCGACTA
CCGTCAGAATGAGTCCCATAACTTTAGCGGGGACATCGCCCTCCTGGAGCTGCAGCACAGCATCCCCC
TGGGCCCCAACGTCCTCCCGGTCTGTCTGCCCGATAATGAGACCCTCTACCGCAGCGGCTTGTTGGGC
TACGTCAGTGGGTTTGGCATGGAGATGGGCTGGCTAACTACTGAGCTGAAGTACTCGAGGCTGCCTGT
AGCTCCCAGGGAGGCCTGCAACGCCTGGCTCCAAAAGAGACAGAGACCCGAGGTGTTTTCTGACAATA
TGTTCTGTGITGGGGATGAGACGCAAAGGCACAGTGTCTGCCAGGGGGACAGTGGCAGCGTCTATGTG
GTATGGGACAATCATGCCCATCACTGGGTGGCCACGGGCATTGTGTCCTGGGGCATAGGGTGTGGCGA
AGGGTATGACTTCTACACCAAGGTGCTCAGCTATGTGGACTGGATCAAGGGAGTGATGAATGGCAAGA
ATAAGCTT

NOV3e, 199842661

| | | | |
|---|---|---|---|
| Protein Sequence | SEQ ID NO: 24 | 456 aa | MW at 49933.7kD |

KLCPTRGSVLLAQELPQQLTSPGYPEPYGKGQESSTDIKAPEGFAVRLVFQDFDLEPSQDCAGDSVTI
SFVGSDPSQFCGQQGSPLGRPPGQREFVSSGRSLRLTFRTQPSSEDKTAHLHKGFLALYQTVAVNYSQ
PISEASRGSEAINAPGDNPAKVQNHCQEPYYQAAAAGALTCATPGTWKDRQDGEEVLQCMPVCGRPVT
PIAQNQTTLGSSRAKLGNFPWQAFTSIHGRGGGALLGDRWILTAAHTIYPKDSVSLRKNQSVNVFLGH
TAIDEMLKLGNHPVHRVVVHPDYRQNESHNFSGDIALLELQHSIPLGPNVLPVCLPDNETLYRSGLLG
YVSGFGMEMGWLTTELKYSRLPVAPREACNAWLQKRQRPEVFSDNNFCVGDETQRHSVCQGDSGSVYV
VWDNHAHHWVATGIVSWGIGCGEGYDFYTKVLSYVDWIKGVMNGKNKL

| | | |
|---|---|---|
| NOV3f, 199597024 | SEQ ID NO: 25 | 1479 bp |

| | | |
|---|---|---|
| DNA Sequence | ORF Start: at 1 | ORF Stop: end of sequence |

AAGCTTCCCACCATGCCTGGACCCAGAGTGTGGGGGAAATATCTCTGGAGAAGCCCTCACTCCAAAGG
CTGTCCAGGCGCAATGTGGTGGCTGCTTCTCTGGGGAGTCCTCCAGGCTTGCCCAACCCGGGGCTCCG
TCCTCTTGGCCCAAGAGCTACCCCAGCAGCTGACATCCCCCGGGTACCCAGAGCCGTATGGCAAAGGC
CAAGAGAGCAGCACGGACATCAAGGCTCCAGAGGGCTTTGCTGTGAGGCTCGTCTTCCAGGACTTCGA
CCTGGAGCCGTCCCAGGACTGTGCAGGGGACTCTGTCACAGTCTCATTCGTCGGTTCGGATCCAAGCC
AGTTCTGTGGTCAGCAAGGCTCCCCTCTGGGCAGGCCCCCTGGTCAGAGGGAGTTTGTATCCTCAGGG
AGGAGTTTGCGGCTGACCTTCCGCACACAGCCTTCCTCGGAGAACAAGACTGCCCACCTCCACAAGGG
CTTCCTGGCCCTCTACCAAACCGTGGCTGTGAACTATAGTCAGCCCATCAGCGAGGCCAGCAGGGGCT
CTGAGGCCATCAACGCACCTGGAGACAACCCTGCCAAGGTCCAGAACCACTGCCAGGAGCCCTATTAT
CAGGCCGCGGCAGCAGGGGCACTCACCTGTGCAACCCCAGGGACCTGGAAAGACAGACAGGATGGGGA
GGAGGTTCTTCAGTGTATGCCTGTCTGCGGACGGCCAGTCACCCCCATTGCCCAGAATCAGACGACCC
TCGGTTCTTCCAGAGCCAAGCTGGGCAACTTCCCCTGGCAAGCCTTCACCAGTATCCACGGCCGTGGG
GGCGGGGCCCTGCTGGGGGACAGATGGATCCTCACTGCTGCCCACACCATCTACCCCAAGGACAGTGT
TTCTCTCAGGAAGAACCAGAGTGTGAATGTGTTCTTGGGCCACACAGCCATAGATGAGATGCTGAAAC
TGGGGAACCACCCTGTCCACCGTGTCGTTGTGCACCCCGACTACCGTCAGAATGAGTCCCATAACTTT
AGCGGGGACATCGCCCTCCTGGAGCTGCAGCACAGCATCCCCCTGGGCCCCAACGTCCTCCCGGTCTG
TCTGCCCGATAATGAGACCCTCTACCGCAGCGGCTTGTTGGGCTACGTCAGTGGGTTTGGCATGGAGA
TGGGCTGGCTAACTACTGAGCTGAAGTACTCGAGGCTGCCTGTAGCTCCCAGGGAGGCCTGCAACGCC
TGGCTCCAAAAGAGACAGAGACCCGAGGTGTTTTCTGACAATATGTTCTGTGTTGGGGATGAGACGCA
AAGGCACAGTGTCTGCCAGGGGGACAGTGGCAGCGTCTATGTGGTATGGGACAATCATGCCCATCACT
GGGTGGCCACGGGCATTGTGTCCTGGGGCATAGGGTGTGGCGAAGGGTATGACTTCTACACCAAGGTG
CTCAGCTATGTGGACTGGATCAAGGGAGTGATGAATGGCAAGAATAAGCTT

NOV3f, 199597024

| | | | |
|---|---|---|---|
| Protein Sequence | SEQ ID NO: 26 | 493 aa | MW at 54164.8kD |

KLPTMPGPRVWGKYLWRSPHSKGCPGAMWWLLLWGVLQACPTRGSVLLAQELPQQLTSPGYPEPYGKG
QESSTDIKAPEGFAVRLVFQDFDLEPSQDCAGDSVTVSFVGSDPSQFCGQQGSPLGRPPGQREFVSSG
RSLRLTFRTQPSSENKTAHLHKGFLALYQTVAVNYSQPISEASRGSEAINAPGDNPAKVQNHCQEPYY
QAAAAGALTCATPGTWKDRQDGEEVLQCMPVCGRPVTPIAQNQTTLGSSRAKLGNFPWQAFTSIHGRG
GGALLGDRWILTAAHTIYPKDSVSLRKNQSVNVFLGHTAIDEMLKLGNHPVHRVVVHPDYRQNESHNF
SGDIALLELQHSIPLGPNVLPVCLPDNETLYRSGLLGYVSGFGMEMGWLTTELKYSRLPVAPREACNA
WLQKRQRPEVFSDNMFCVGDETQRHSVCQGDSGSVYVVWDNHAHHWVATGIVSWGIGCGEGYDFYTKV
LSYVDWIKGVMNGKNKL

| | | |
|---|---|---|
| NOV3g, 199842653 | SEQ ID NO: 27 | 1293 bp |

| | | |
|---|---|---|
| DNA Sequence | ORF Start: at 1 | ORF Stop: end of sequence |

AAGCTTTGCCCAACCCGGGGCTCCGTCCTCTTGGCCCAAGAGCTACCCCAGCAGCTGACATCCCCCGG
GTACCCAGAGCCGTATGGCAAAGGCCAAGAGAGCAGCACGGACATCAAGGCTCCAGAGGGCTTTGCTG
TGAGGCTCGTCTTCCAGGACTTCGACCTGGAGCCGTCCCAGGACTGTGCAGGGGACTCTGTCACAATC
TCATTCGTCGGTTCGGATCCAAGCCAGTTCTGTGGTCAGCAAGGCTCCCCTCTGGGCAGGCCCCCTGG
TCAGAGGGAGTTTGTATCCTCAGGGAGGAGTTTGCGGCTGACCTTCCGCACACAGCCTTCCTCGGAGA
ACAAGACTGCCCACCTCCACAAGGGCTTCCTGGCCCTCTACCAAACCGTGGCTGTGAACTATAGTCAG
CCCATCAGCGAGGCCAGCAGGGGCTCTGAGGCCATCAACGCACCTGGAGACAACCCTGCCAAGGTCCA
GAACCACTGCCAGGAGCCCTATTATCAGGCCGCGGCAGCAGTCTGCGGACGGCCAGTCACCCCCATTG
CCCAGAATCAGACGACCCTCGGTTCTTCCAGAGCCAAGCTGGGCAACTTCCCCTGGCAAGCCTTCACC
AGTATCCACGGCCGTGGGGGCGGGGCCCTGCTGGGGGACAGATGGATCCTCACTGCTGCCCACACCAT
CTACCCCAAGGACAGTGTTTCTCTCAGGAAGAACCAGAGTGTGAATGTGTTCTTGGGCCACACAGCCA
TAGATGAGATGCTGAAACTGGGGAACCACCCTGTCCACCGTGTCGTTGTGCACCCCGACTACCGTCAG
AATGAGTCCCATAACTTTAGCGGGGACATCGCCCTCCTGGAGCTGCAGCACAGCATCCCCCTGGGCCC
CAACGTCCTCCCGGTCTGTCTGCCCGATAATGAGACCCTCTACCGCAGCGGCTTGTTGGGCTACGTCA
GTGGGTTTGGCATGGAGATGGGCCGGCTAACTACTGAGCTGAAGTACTCGAGGCTGCCTGTAGCTCCC
AGGGAGGCCTGCAACGCCTGGCTCCAAAAGAGACAGAGACCCGAGGTGTTTTCTGACAATATGTTCTG
TGTCGGGGATGAGACGCAAAGGCACAGTGTCTGCCAGGGGGACAGTGGCAGCGTCTATGTGGTATGGG
ACAATCATGCCCATCACTGGGTGGCCACGGGCATTGTGTCCTGGGGCATAGGGTGTGGCGAAGGGTAT
GACTTCTACACCAAGGTGCTCAGCTATGTGGACTGGATCAAGGGAGTGATGAATGGCAAGAATAAGCT
T

NOV3g, 199842653

| | | | |
|---|---|---|---|
| Protein Sequence | SEQ ID NO: 28 | 431 aa | MW at 47213.7kD |

KLCPTRGSVLLAQELPQQLTSPGYPEPYGKGQESSTDIKAPEGFAVRLVFQDFDLEPSQDCAGDSVTI
SFVGSDPSQFCGQQGSPLGRPPGQREFVSSGRSLRLTFRTQPSSENKTAHLHKGFLALYQTVAVNYSQ
PISEASRGSEAINAPGDNPAKVQNHCQEPYYQAAAAVCGRPVTPIAQNQTTLGSSRAKLGNFPWQAFT
SIHGRGGGALLGDRWILTAAHTIYPKDSVSLRKNQSVNVFLGHTAIDEMLKLGNHPVHRVVVHPDYRQ
NESHNFSGDIALLELQHSIPLGPNVLPVCLPDNETLYRSGLLGYVSGFGMEMGRLTTELKYSRLPVAP
REACNAWLQKRQRPEVFSDNMFCVGDETQRHSVCQGDSGSVYVVWDNHAHHWVATGIVSWGIGCGEGY
DFYTKVLSYVDWIKGVMNGKNKL

| | | |
|---|---|---|
| NOV3h, 199652830 | SEQ ID NO: 29 | 1368 bp |

| | | |
|---|---|---|
| DNA Sequence | ORF Start: at 1 | ORF Stop: end of sequence |

AAGCTTTGCCCAACCCGGGGCTCCGTCCTCTTGGCCCAAGAGCTACCCCAGCAGCTGACATCCCCCGG
GTACCCAGAGCCGTATGGCAAAGGCCAAGAGAGCAGCACGGACATCAAGGCTCCAGAGGGCTTTGCTG
TGAGGCTCGTCTTCCAGGACTTCGACCTGGAGCCGTCCCAGGACTGTGCAGGGGACTCTGTCACAATC
TCATTCGTCGGTTCGGATCCAAGCCAGTTCTGTGGTCAGCAAGGCTCCCCTCTGGGCAGGCCCCCTGG
TCAGAGGGAGTTTGTATCCTCAGGGAGGAGTTTGCGGCTGACCTTCCGCACACAGCCTTCCTCGGAGA
ACAAGACTGCCCACCTCCACAAGGGCTTCCTGGCCCTCTACCAAACCGTGGCTGTGAACTATAGTCAG
CCCATCAGCGAGGCCAGCAGGGGCTCTGAGGCCATCAACGCACCTGGAGACAACCCCGCCAAGGTCCA
GAACCACTGCCAGGAGCCCTATTATCAGGCCGCGGCAGCAGGGGCACTCACCTGTGCAACCCCAGGGA
CCTGGGAAGACAGACAGGATGGGGAAGAGGTTCTTCAGTGTATGCCTGTCTGTGGACGGCCAGTCACC
CCCATTGCCCAGAATCAGACGACCCTCGGTTCTTCCAGAGCCAAGCTGGGCAACTTCCCCTGGCAAGC
CTTCACCAGTATCCACGGCCGTGGGGGCGGGGCCCTGCTGGGGGACAGATGGATCCTCACTGCTGCCC
ACACCATCTACCCCAAGGACAGTGTTTCTCTCAGGAAGAACCAGAGTGTGAATGTGTTCTTGGGCCAC
ACAGCCATAGATGAGATGCTGAAACTGGGGAACCACCCTGTCCACCGTGTCGTTGTGCACCCCGACTA
CCGTCAGAATGAGTCCCATAACTTTAGCGGGGACATCGCCCTCCTGGAGCTGCAGCACAGCATCCCCC
TGGGCCCCAACGTCCTCCCGGTCTGTCTGCCCGATAATGAGACCCTCTACCGCAGCGGCTTGTTGGGC
TACGTCAGTGGGTTTGGCATGGAGATGGGCTGGCTAACTACTGAGCTGAAGTACTCGAGGCTGCCTGT
AGCTCCCAGGGAGGCCTGCAACGCCTGGCTCCAAAAGAGACAGAGACCCGAGGTGTTTTCTGACAATA
TGTTCTGTGTTGGGGATGAGACGCAAAGGCACAGTGTCTGCCAGGGGGACAGTGGCAGCGTCTATGTG
GTATGGGACAATCATGCCCATGACTGGGTGGCCACGGGCATTGTGTCCTGGGGCATAGGGTGTGGCGA
AGGGTATGACTTCTACACCAAGGTGCTCAGCTATGTGGACTGGATCAAGGGAGTGATGAATGGCAAGA
ATAAGCTT

NOV3h, 199652830

| | | | |
|---|---|---|---|
| Protein Sequence | SEQ ID NO: 30 | 456 aa | MW at 49933.7kD |

KLCPTRGSVLLAQELPQQLTSPGYPEPYGKGQESSTDIKAPEGFAVRLVFQDFDLEPSQDCAGDSVTI
SFVGSDPSQFCGQQGSPLGRPPGQREFVSSGRSLRLTFRTQPSSENKTAHLHKGFLALYQTVAVNYSQ
PISEASRGSEAINAPGDNPAKVQNHCQEPYYQAAAAGALTCATPGTWEDRQDGEEVLQCMPVCGRPVT
PIAQNQTTLGSSRAKLGNFPWQAFTSIHGRGGGALLGDRWILTAAHTIYPKDSVSLRKNQSVNVFLGH
TAIDEMLKLGNHPVHRVVVHPDYRQNESHNFSGDIALLELQHSIPLGPNVLPVCLPDNETLYRSGLLG
YVSGFGMEMGWLTTELKYSRLPVAPREACNAWLQKRQRPEVFSDNMFCVGDETQRHSVCQGDSGSVYV
VWDNHANHWVATGIVSWGIGCGEGYDFYTKVLSYVDWIKGVMNGKNKNKL

| | | |
|---|---|---|
| NOV3i, 199652835 | SEQ ID NO: 31 | 1368 bp |

| | | |
|---|---|---|
| DNA Sequence | ORF Start: at 1 | ORF Stop: end of sequence |

AAGCTTTGCCCAACCCGGGGCTCCGTCCTCTTGGCCCAAGAGCTACCCCAGCAGCTGACATCCCCCGG
GTACCCAGAGCCGTATGGCAAAGGCCAAGAGAGCAGCACGGACATCAAGGCTCCAGAGGGCTTTGCTG
TGAGGCTCGTCTTCCAGGACTTCGACCTGGAGCCGTCCCAGGACTGTGCAGGGGACTCTGTCACAATC
TCATTCGTCGGTTCGGATCCAAGCCAGTTCTGTGGTCAGCAAGGCTCCCCTCTGGGCAGGCCCCCTGG
TCAGAGGGAGTTTGTATCCTCAGGGAGGAGTTTGCGGCTGACCTTCCGCACACAGCCTTCCTCGGAGA
ACAAGACTGCCCACCTCCACAAGGGCTTCCTGGCCCTCTACCAAACCGTGGCTGTGAACTATAGTCAG
CCCATCAGCGAGGCCAGCAGGGGCTCTGAGGCCATCAACGCACCTGGAGACAACCCTGCCAAGGTCCA
GAACCACTGCCAGGAGCCCTATTATCAGGCCGCGGCAGCAGGGGCACTCACCTGTGCAACCCCAGGGA
CCTGGAAAGACAGACAGGATGGGGAGGAGGTTCTTCAGTGTATGCCTGTCTGCGGACGGCCAGTCACC
CCCATTGCCCAGAATCAGACGACCCTCGGTTCTTCCAGAGCCAAGCTGGGCAACTTCCCCTGGCAAGC
CTTCACCAGTATCCACGGCCGTGGGGGCGGGGCCCTGCTGGGGGACAGATGGATCCTCACTGCTGCCC
ACACCATCTACCCCAAGGACAGTGTTTCTCTCAGGAAGAACCAGAGTGTGAATGTGTTCTTGGGCCAC
ACAGCCATAGATGAGATGCTGAAACTGGGGAACCACCCTGTCCACCGTGTCGTTGTGCACCCCGACTA
CCGTCAGAATGAGTCCCATAACTTTAGCGGGGACATCGCCCTCCTGGAGCTGCGGCACAGCATCCCCC
TGGGCCCCAACGTCCTCCCGGTCTGTCTGCCCGATAATGAGACCCTCTACCGCAGCGGCTTGTTGGGC
TACGTCAGTGGGTTTGGCATGGAGATGGGCTGGCTAACTACTGAGCTGAAGTACTCGAGGCTGCCTGT
AGCTCCCAGGGAGGCCTGCAACGCCTGGCTCCAAAAGAGACAGAGACCCGAGGTGTTTTCTGACAATA
TGTTCTGTGTTGGGGATGGGACACAAAGGCACAGTGTCTGCCAGGGGGACAGTGGCAGCGTCTATGTG
GTATGGGACAATCATGCCCATCACTGGGTGGCCACGGGCATTGTGTCCTGGGGCATAGGGTGTGGCGA
AGGGTATGACTTCTACACCAAGGTGCTCAGCTATGTGGACTGGATCAAGGGAGTGATGAATGGCAAGA
ATAAGCTT

NOV3i, 199652835

| | | | |
|---|---|---|---|
| Protein Sequence | SEQ ID NO: 32 | 456 aa | MW at 49888.7kD |

KLCPTRGSVLLAQELPQQLTSPGYPEPYGKGQESSTDIKAPEGFAVRLVFQDFDLEPSQDCAGDSVTI
SFVGSDPSQFCGQQGSPLGRPPGQREFVSSGRSLRLTFRTQPSSENKTAHLHKGFLALYQTVAVNYSQ
PISEASRGSEAINAPGDNPAKVQNHCQEPYYQAAAAGALTCATPGTWKDRQDGEEVLQCMPVCGRPVT
PIAQNQTTLGSSRAKLGNFPWQAFTSIHGRGGGALLGDRWILTAAHTIYPKDSVSLRKMQSVNVFLGH
TAIDEMLKLGNHPVHRVVVHPDYRQNESHNFSGDIALLELRHSIPLGPNVLPVCLPDNETLYRSGLLG
YVSGFGMEMGWLTTELKYSRLPVAPREACNAWLQKRQRPEVFSDNMFCVGDGTQRHSVCQGDSGSVYV
VWDNHAHHWVATGIVSWGIGCGEGYDFYTKVLSYVDWIKGVMNGKNKL

| | | |
|---|---|---|
| NOV3j, 198306308 | SEQ ID NO: 33 | 387 bp |

| | | |
|---|---|---|
| DNA Sequence | ORF Start: at 1 | ORF Stop: end of sequence |

AAGCTTTGCCCAACCCGGGGCTCCGTCCTCTTGGCCCAAGAGCTACCCCAGCAGCTGACATCCCCCGG
GTACCCAGAGCCGTATGGCAAAGGCCAAGAGAGCAGCACGGACATCAAGGCTCCAGAGGGCTTTGCTG
TGAGGCTCGTCTTCCAGGACTTCGACCTGGAGCCGTCCCAGGACTGTGCGGGGGACTCTGTCACAATC
TCATTCGTCGGTTCGGATCCAAGCCAGTTCTGTGGTCAGCAAGGCTCCCCTCTGGGCAGGCCCCCTGG
TCAGAGGGAGTTTGTATCCTCAGGGAGGAGTTTGCGGCTGACCTTCCGCACACAGCCTTCCTCGGAGA
ACAAGACTGCCCACCTTCACAAGGGCTTTCTGGCCCTCTACAAGCTT

NOV3j, 198306308

| | | | |
|---|---|---|---|
| Protein Sequence | SEQ ID NO: 34 | 129 aa | MW at 14001.5kD |

KLCPTRGSVLLAQELPQQLTSPGYPEPYGKGQESSTDIKAPEGFAVRLVFQDFDLEPSQDCAGDSVTI
SFVGSDPSQFCGQQGSPLGRPPGQREFVSSGRSLRLTFRTQPSSENKTAHLHKGFLALYKL

| | | |
|---|---|---|
| NOV3k, CG102348-02 | SEQ ID NO: 35 | 387 bp |

| | | |
|---|---|---|
| DNA Sequence | ORF Start: at 7 | ORF Stop: at 382 |

AAGCTTTGCCCAACCCGGGGCTCCGTCCTCTTGGCCCAAGAGCTACCCCAGCAGCTGACATCCCCCGG
GTACCCAGAGCCGTATGGCAAAGGCCAAGAGAGCAGCACGGACATCAAGGCTCCAGAGGGCTTTGCTG
TGAGGCTCGTCTTCCAGGACTTCGACCTGGAGCCGTCCCAGGACTGTGCGGGGGACTCTGTCACAATC
TCATTCGTCGGTTCGGATCCAAGCCAGTTCTGTGGTCAGCAAGGCTCCCCTCTGGGCAGGCCCCCTGG
TCAGAGGGAGTTTGTATCCTCAGGGAGGAGTTTGCGGCTGACCTTCCGCACACAGCCTTCCTCGGAGA
ACAAGACTGCCCACCTTCACAAGGGCTTTCTGGCCCTCTACAAGCTT

NOV3k, CG102348-02

| | | | |
|---|---|---|---|
| Protein Sequence | SEQ ID NO: 36 | 125 aa | MW at 13518.9kD |

CPTRGSVLLAQELPQQLTSPGYPEPYGKGQESSTDIKAPEGFAVRLVFQDFDLEPSQDCAGDSVTISF
VGSDPSQFCGQQGSPLGRPPGQREFVSSGRSLRLTFRTQPSSENKTAHLHKGFLALY

| | | |
|---|---|---|
| NOV3l, CG102348-03 | SEQ ID NO: 37 | 741 bp |

| | | |
|---|---|---|
| DNA Sequence | ORF Start: at 7 | ORF Stop: at 736 |

AAGCTTACCCTCGGTTCTTCCAGAGCCAAGCTGGGCAACTTCCCCTGGCAAGCCTTCACCAGTATCCA
CGGCCGTGGGGGCGGGGCCCTGCTGGGGGACAGATGGATCCTCACTGCTGCCCACACCATCTACCCCA
AGAACAGTGTTTCTCTCAGGAAGAACCAGAGTGTGAATGTGTTCTTGGGCCACACAGCCATAGATGAG
ATGCTGAAACTGGGGAACCACCCTGTCCACCGTGTCGTTGTGCACCCCGACTACCGTCAGAATGAGTC
CCATAACTTTAGCGGGGACATCGCCCTCCTGGAGCTGCAGCACAGCATCCCCCTGGGCCCCAACGTCC
TCCCGGTCTGTCTGCCCGATAATGAGACCCTCTACCGCAGCGGCTTGTTGGGCTACGTCAGTGGGTTT
GGCATGGAGATGGGCTGGCTAACTACTGAGCTGAAGTACTCGAGGCTGCCTGTAGCTCCCAGGGAGGC
CTGCAACGCCTGGCTCCAAAAGAGACAGAGACCCGAGGTGTTTTCTGACAATATGTTCTGTGTTGGGG
ATGAGACGCAAAGGCACAGTGTCTGCCAGGGGGACAGTGGCAGCGTCTATGTGGTATGGGACAATCGT
GCCCATCACTGGGTGGCCACGGGCATTGTGTCCTGGGGCATAGGGTGTGGCGAAGGGTATGACTTCTA
CACCAAGGTGCTCAGCTATGTGGACTGGATCAAGGGAGTGATGAATGGCAAGAATAAGCTT

NOV3l, CG102348-03

| | | | |
|---|---|---|---|
| Protein Sequence | SEQ ID NO: 38 | 243 aa | MW at 27083.5kD |

TLGSSRAKLGNFPWQAFTSIHGRGGGALLGDRWILTAAHTIYPKNSVSLRKNQSVNVFLGHTAIDEML
KLGNHPVHRVVVHPDYRQNESHNFSGDIALLELQHSIPLGPNVLPVCLPDNETLYRSGLLGYVSGFGM
EMGWLTTELKYSRLPVAPREACNAWLQKRQRPEVFSDNMFCVGDETQRHSVCQGDSGSVYVVWDNRAH
HWVATGIVSWGIGCGEGYDFYTKVLSYVDWIKGVMNGKN

| | | |
|---|---|---|
| NOV3m, CG102348-04 | SEQ ID NO: 39 | 1293 bp |

| | | |
|---|---|---|
| DNA Sequence | ORF Start: at 7 | ORF Stop: at 1288 |

AAGCTTTGCCCAACCCGGGGCTCCGTCCTCTTGGCCCAAGAGCTACCCCAGCAGCTGACATCCCCCGG
GTACCCAGAGCCGTATGGCAAAGGCCAAGAGAGCAGCACGGACATCAAGGCTCCAGAGGGCTTTGCTG
TGAGGCTCGTCTTCCAGGACTTCGACCTGGAGCCGTCCCAGGACTGTGCAGGGGACTCTGTCACAATC
TCATTCGTCGGTTCGGATCCAAGCCAGTTCTGTGGTCAGCAAGGCTCCCCTCTGGGCAGGCCCCCTGG
TCAGAGGGAGTTTGTATCCTCAGGGAGGAGTTTGCGGCTGACCTTCCGCACACAGCCTTCCTCGGAGA
ACAAGACTGCCCACCTCCACAAGGGCTTCCTGGCCCTCTACCAAACCGTGGCTGTGAACTATAGTCAG
CCCATCAGCGAGGCCAGCAGGGGCTCTGAGGCCATCAACGCACCTGGAGACAACCCTGCCAAGGTCCA
GAACCACTGCCAGGAGCCCTATTATCAGGCCGCGGCAGCAGTCTGCGGACGGCCAGTCACCCCCATTG
CCCAGAATCAGACGACCCTCGGTTCTTCCAGAGCCAAGCTGGGCAACTTCCCCTGGCAAGCCTTCACC
AGTATCCACGGCCGTGGGGGCGGGGCCCTGCTGGGGGACAGATGGATCCTCACTGCTGCCCACACCAT
CTACCCCAAGGACAGTGTTTCTCTCAGGAAGAACCAGAGTGTGAATGTGTTCTTGGGCCACACAGCCA
TAGATGAGATGCTGAAACTGGGGAACCACCCTGTCCACCGTGTCGTTGTGCACCCCGACTACCGTCAG
AATGAGTCCCATAACTTTAGCGGGGACATCGCCCTCCTGGAGCTGCAGCACAGCATCCCCCTGGGCCC
CAACGTCCTCCCGGTCTGTCTGCCCGATAATGAGACCCTCTACCGCAGCGGCTTGTTGGGCTACGTCA
GTGGGTTTGGCATGGAGATGGGCCGGCTAACTACTGAGCTGAAGTACTCGAGGCTGCCTGTAGCTCCC
AGGGAGGCCTGCAACGCCTGGCTCCAAAAGAGACAGAGACCCGAGGTGTTTTCTGACAATATGTTCTG
TGTCGGGGATGAGACGCAAAGGCACAGTGTCrGCCAGGGGGACAGTGGCAGCGTCTATGTGGTATGGG
ACAATCATGCCCATCACTGGGTGGCCACGGGCATTGTGTCCTGGGGCATAGGGTGTGGCGAAGGGTAT
GACTTCTACACCAAGGTGCTCAGCTATGTGGACTGGATCAAGGGAGTGATGAATGGCAAGAATAAGCT
T

NOV3m, CG102348-04

| | | | |
|---|---|---|---|
| Protein Sequence | SEQ ID NO: 40 | 427 aa | MW at 46731.0kD |

CPTRGSVLLAQELPQQLTSPGYPEPYGKGQESSTDIKAPEGFAVRLVFQDFDLEPSQDCAGDSVTISF
VGSDPSQFCGOQGSPLGRPPGQREFVSSGRSLRLTFRTQPSSENKTAHLHKGFLALYQTVAVNYSQPI
SEASRGSEAINAPGDNPAKVQNHCQEPYYQAAAAVCGRPVTPIAQNQTTLGSSRAKLGNFPWQAFTSI
HGRGGGALLGDRWILTAAHTIYPKDSVSLRKNQSVNVFLGHTAIDEMLKLGNHPVHRVVVHPDYRQNE
SHNFSGDIALLELQHSIPLGPNVLPVCLPDNETLYRSGLLGYVSGFGMEMGRLTTELKYSRLPVAPRE
ACNAWLQKRQRPEVFSDNMFCVGDETQRHSVCQGDSGSVYVVWDNHAHHWVATGIVSWGIGCGEGYDF
YTKVLSYVDWIKGVMNGKN

| | | |
|---|---|---|
| NOV3n, CG102348-05 | SEQ ID NO: 41 | 1368 bp |

| | | |
|---|---|---|
| DNA Sequence | ORF Start: at 7 | ORF Stop: at 1363 |

AAGCTTTGCCCAACCCGGGGCTCCGTCCTCTTGGCCCAAGAGCTACCCCAGCAGCTGACATCCCCCGG
GTACCCAGAGCCGTATGGCAAAGGCCAAGAGAGCAGCACGGACATCAAGGCTCCAGAGGGCTTTGCTG
TGAGGTTCGTCTTCCAGGACTTCGACCTGGAGTCGTCCCAGGACTGTGCAGGGGACTCTGTCACAATC
TCATTCGTCGGTTCGGATCCAAGCCAGTTCTGTGGTCAGCAAGGCTCCCCTCTGGGCAGGCCCCCTGG
TCAGAGGGAGTTTGTATCCTCAGGGAGGAGTTTGCGGCTGACCTTCCGCACACAGCCTTCCTCGGAGA
ACAAGACTGCCCACCTCCACAAGGGCTTCCTGGCCCTCTACCAAACCGTGGCTGTGAACTATAGTCAG
CCCATCAGCGAGGCCAGCAGGGGCTCTGAGGCCATCAACGCACCTGGAGACAACCCTGCCAAGGTCCA
GAACCACTGCCAGGAGCCCTATTATCAGGCCACGGCAGCAGGGGCACTCACCTGTGCAACCCCAGGGA
CCTGGAAAGACAGACAGGATGGGGAGGAGGTTCTTCAGTGTATGCCTGTCTGCGGACGGCCAGTCACC
CCCATTGCCCAGAATCAGACGACCCTCGGTTCTTCCAGAGCCAAGCTGGGCAACTTCCCCTGGCAAGC
CTTCACCAGTATCCACGGCCGTGGGGGCGGGGCCCTGCTGGGGGACAGATGGATCCTCACTGCTGCCC
ACACCATCTACCCCAAGGACAGTGTTTCTCTCAGGAAGAACCAGAGTGTGAATGTGTTCTTGGGCCAC
ACAGCCATAGATGAGATGCTGAAACTGGGGAACCACCCTGTCCACCGTGTCGTTGTGCACCCCGACTA
CCGTCAGAATGAGTCCCATAACTTTAGCGGGGACATCGCCCTCCTGGAGCTGCAGCACAGCATCCCCC
TGGGCCCCAACGTCCTCCCGGTCTGTCTGCCCGATAATGAGACCCTCTACCGCAGCGGCTTGTTGGGC
TACGTCAGTGGGTTTGGCATGGAGATGGGCTGGCTAACTACTGAGCTGAAGTACTCGAGGCTGCCTGT
AGCTCCCAGGGAGGCCTGCAACGCCTGGCTCCAAAAGAGACAGAGACCCGAGGTGTTTTCTGACAATA
TGTTCTGTGTTGGGGATGAGACGCAAAGGCACAGTGTCTGCCAGGGGGACAGTGGCAGCGTCTATGTG
GTATGGGACAATCATGCCCATCACTGGGTGGCCACGGGCATTGTGTCCTGGGGCATAGGGTGTGGCGA
AGGGTATGACTTCTACACCAAGGTGCTCAGCTATGTGGACTGGATCAAGGGAGTGATGAATGGCAAGA
ATAAGCTT

NOV3n, CG102348-05

| | | | |
|---|---|---|---|
| Protein Sequence | SEQ ID NO: 42 | 452 aa | MW at 49504.1kD |

CPTRGSVLLAQELPQQLTSPGYPEPYGKGQESSTDIKAPEGFAVRFVFQDFDLESSQDCAGDSVTISF
VGSDPSQFCGQQGSPLGRPPGQREFVSSGRSLRLTFRTQPSSENKTAHLHKGFLALYQTVAVNYSQPI
SEASRGSEAINAPGDNPAKVQNHCQEPYYQATAAGALTCATPGTWKDRQDGEEVLQCMPVCGRPVTPI
AQNQTTLGSSRAKLGNFPWQAFTSIHGRGGGALLGDRWILTAAHTIYPKDSVSLRKNQSVNVFLGHTA
IDEMLKLGNHPVHRVVVHPDYRQNESHNFSGDIALLELQHSIPLGPNVLPVCLPDNETLYRSGLLGYV
SGFGMEMGWLTTELKYSRLPVAPREACNAWLQKRQRPEVFSDNNFCVGDETQRHSVCQGDSGSVYVVW
DNHAHHWVATGIVSWGIGCGEGYDFYTKVLSYVDWIKGVMNGKN

| | | |
|---|---|---|
| NOV3o, CG102348-06 | SEQ ID NO: 43 | 1479 bp |

| | | |
|---|---|---|
| DNA Sequence | ORF Start: ATG at 13 | ORF Stop: at 1474 |

AAGCTTCCCACCATGCCTGGACCCAGAGTGTGGGGGAAATATCTCTGGAGAAGCCCTCACTCCAAAGG
CTGTCCAGGCGCAATGTGGTGGCTGCTTCTCTGGGGAGTCCTCCAGGCTTGCCCAACCCGGGGCTCCG
TCCTCTTGGCCCAAGAGCTACCCCAGCAGCTGACATCCCCCGGGTACCCAGAGCCGTATGGCAAAGGC
CAAGAGAGCAGCACGGACATCAAGGCTCCAGAGGGCTTTGCTGTGAGGCTCGTCTTCCAGGACTTCGA
CCTGGAGCCGTCCCAGGACTGTGCAGGGGACTCTGTCACAATCTCATTCGTCGGTTCGGATCCAAGCC
AGTTCTGTGGTCAGCAAGGCTCCCCTCTGGGCAGGCCCCCTGGTCAGAGGGAGTTTGTATCCTCAGGG
AGGAGTTTGCGGCTGACCTTCCGCACACAGCCTTCCTCGGAGAACAAGACTGCCCACCTCCACAAGGG
CTTCCTGGCCCTCTACCAAACCGTGGCTGTGAACTATAGTCAGCCCATCAGCGAGGCCAGCAGGGGCT
CTGAGGCCATCAACGCACCTGGAGACAACCCTGCCAAGGTCCAGAACCACTGCCAGGAGCCCTATTAT
CAGGCCACGGCAGCAGGGGCACTCACCTGTGCAACCCCAGGGACCTGGAAAGACAGACAGGATGGGGA
GGAGGTTCTTCAGTGTATGCCTGTCTGCGGACGGCCAGTCACCCCCATTGCCCAGAATCAGACGACCC
TCGGTTCTTCCAGAGCCAAGCTGGGCAACTTCCCCTGGCAAGCCTTCACCAGTATCCACGGCCGTGGG
GGCGGGGCCCTGCTGGGGGACAGATGGATCCTCACTGCTGCCCACACCATCTACCCCAAGGACAGTGT
TTCTCTCAGGAAGAACCAGAGTGTGAATGTGTTCTTGGGCCACACAGCCATAGATGAGATGCTGAAAC
TGGGGAACCACCCTGTCCACCGTGTCGTTGTGCACCCCGACTACCGTCAGAATGAGTCCCATAACTTT
AGCGGGGACATCGCCCTCCTGGAGCTGCAGCACAGCATCCCCCTGGGCCCCAACGTCCTCCCGGTCTG
TCTGCCCGATAATGAGACCCTCTACCGCAGCGGCTTGTTGGGCTACGTCAGTGGGTTTGGCATGGAGA
TGGGCTGGCTAACTACTGAGCTGAAGTACTCGAGGCTGCCTGTAGCTCCCAGGGAGGCCTGCAACGCC
TGGCTCCAAAAGAGACAGAGACCCGAGGTGTTTTCTGACAATATGTTCTGTGTTGGGGATGAGACGCA
AAGGCACAGTGTCTGCCAGGGGGACAGTGGCAGCGTCTATGTGGTATGGGACAATCATGCCCATCACT
GGGTGGCCACGGGCATTGTGTCCTGGGGCATAGGGTGTGGCGAAGGGTATGACTTCTACACCAAGGTG
CTCAGCTATGTGGACTGGATCAAAGGGGAGTGATGAATGGCAAGAATAAGCTT

NOV3o, CG102348-06

| | | | |
|---|---|---|---|
| Protein Sequence | SEQ ID NO: 44 | 487 aa | MW at 53528.0kD |

MPGPRVWGKYLWRSPHSKGCPGAMWWLLLWGVLQACPTRGSVLLAQELPQQLTSPGYPEPYGKGQESS
TDIKAPEGFAVRLVFQDFDLEPSQDCAGDSVTISFVGSDPSQFCGQQGSPLGRPPGORFFVSSGRSLR
LTFRTQPSSENKTAHLHKGFLALYQTVAVNYSQPISEASRGSEAINAPGDNPAKVQNHCQEPYYQATA
AGALTCATPGTWKDRQDGEEVLQCMPVCGRPVTPIAQNQTTLGSSRAKLGNFPWQAFTSIHGRGGGAL
LGDRWILTAAHTIYPKDSVSLRKNQSVNVFLGHTAIDEMLKLGNHPVHRVVVHPDYRQNESHNFSGDI
ALLELQHSIPLGPNVLPVCLPDNETLYRSGLLGYVSGFGMEMGWLTTELKYSRLPVAPREACNAWLQK
RQRPEVFSDNMFCVGDETQRHSVCQGDSGSVYVVWDNHAHHWVATGIVSWGIGCGEGYDFYTKVLSYV
DWIKGVMNGKN

| | |
|---|---|
| SEQ ID NO: 45 | 3345 bp |

| | | |
|---|---|---|
| NOV3p, SNP 13376570 of | ORF Start: ATG at 18 | ORF Stop: TGA at 1479 |

| | | |
|---|---|---|
| CG102348-01, DNA Sequence | SNP Pos: 343 | SNP Change: G to A |

CAGATGTCCAGTTCCAGATGCCTGGACCCAGAGTGTGGGGGAAATATCTCTGGAGAAGCCCTCACTCC
AAAGGCTGTCCAGGCGCAATGTGGTGGCTGCTTCTCTGGGGAGTCCTCCAGGCTTGCCCAACCCGGGG
CTCCGTCCTCTTGGCCCAAGAGCTACCCCAGCAGCTGACATCCCCCGGGTACCCAGAGCCGTATGGCA
AAGGCCAAGAGAGCAGCACGGACATCAAGGCTCCAGAGGGCTTTGCTGTGAGGCTCGTCTTCCAGGAC
TTCGACCTGGAGCCGTCCCAGGACTGTGCAGGGGACTCTGTCACAATCTCATTCGTCGGTTCGGATCC
AAACCAGTTCTGTGGTCAGCAAGGCTCCCCTCTGGGCAGGCCCCCTGGTCAGAGGGAGTTTGTATCCT
CAGGGAGGAGTTTGCGGCTGACCTTCCGCACACAGCCTTCCTCGGAGAACAAGACTGCCCACCTTCAC
AAGGGCTTTCTGGCCCTCTACCAAACCGTGGCTGTGAACTATAGTCAGCCCATCAGCGAGGCCAGCAG
GGGCTCTGAGGCCATCAACGCACCTGGAGACAACCCTGCCAAGGTCCAGAACCACTGCCAGGAGCCCT
ATTATCAGGCCGCGGCAGCAGGGGCACTCACCTGTGCAACCCCAGGGACCTGGAAAGACAGACAGGAT
GGGGAGGAGGTTCTTCAGTGTATGCCTGTCTGCGGACGGCCAGTCACCCCCATTGCCCAGAATCAGAC
GACCCTCGGTTCTTCCAGAGCCAAGCTGGGCAACTTCCCCTGGCAAGCCTTCACCAGTATCCACGGCC
GTGGGGGCGGGGCCCTGCTGGGGGACAGATGGATCCTCACTGCTGCCCACACCGTCTACCCCAAGGAC
AGTGTTTCTCTCAGGAAGAACCAGAGTGTGAATGTGTTCTTGGGCCACACAGCCATAGATGAGATGCT
GAAACTGGGGAACCACCCTGTCCACCGTGTCGTTGTGCACCCCGACTACCGTCAGAATGAGTCCCATA
ACTTTAGCGGGGACATCGCCCTCCTGGAGCTGCAGCACAGCATCCCCCTGGGCCCCAACGTCCTCCCG
GTCTGTCTGCCCGATAATGAGACCCTCTACCGCAGCGGCTTGTTGGGCTACGTCAGTGGGTTTGGCAT
GGAGATGGGCTGGCTAACTACTGAGCTGAAGTACTCGAGGCTGCCTGTAGCTCCCAGGGAGGCCTGCA
ACGCCTGGCTCCAAAAGAGACAGAGACCCGAGGTGTTTTCTGACAATATGTTCTGTGTTGGGGATGAG
ACGCAAAGGCACAGTGTCTGCCAGGGGGACAGTGGCAGCGTCTATGTGGTATGGGACAATCATGCCCA
TCACTGGGTGGCCACGGGCATTGTGTCCTGGGGCATAGGGTGTGGCGAAGGGTATGACTTCTACACCA
AGGTGCTCAGCTATGTGGACTGGATCAAGGGAGTGATGAATGGCAAGAATTGACCCTGGGGGCTTGAA
CAGGGACTGACCAGCACAGTGGAGGCCCCAGGCAACAGAGGGCCTGGAGTGAGGACTGAACACTGGGG
TAGGGGTTGGGGGTGGGGGGTTGGGGGAGGCAGGGAAATCCTATTCACATCACTGTTGCACCAAGCCA
CTGCAAGAGAAACCCCCACCCGGCAAGCCCGCCCCATCCCAGACAGGAAGCAGAGTCCCACAGACCGC
TCCTCCTCACCCTCTACCTCCCTGTGCTCATGCACTAGGCCCCGGGAAGCCTGTACATCTCAACAACT
TTCGCCTTGAATGTCCTTAGAACCACCTTCCCCTACTTCATCTGTTGACACAGCTTTTATACTCACCT
GTGGAAGAGTCAGCTACTCACCCGCTATTAGAGTATGGAGGAAGGGGTTTTCATTGCATTGCATTTCT
GAAACATTCCTAAGACCCTTTAGTTGACCTTCAAATATTCAAGCTATTCTGCAGCTCCAAGATGCAAT
TATAGAAACAGCTCCTTTTTTATTTTATGTCCTCTATATGCCAGGTGCTTCACCTGTTATTTCACTTA
ATCCTCATACCATATTTGCAAAGGATGTGTTATTATCTATGTGTGACAAATGAGGAAACTGAGGCTCA
GGGGATAAAGGGACTTGCCCAAGTCCCACAGCTGGTGTGTGACTGCAGAGACTGTGCTCTTCCCAGTG
TGCTGCAATACTTCTCAACCCTCCTCTAACCTGCTGTGTCACCCGCTTTCCCTCCCAGCCCCCACATC
CTTACCATTTTCCCTCCCTGGGAATTCCTGCTTCTGCGAAAATGGTATCCTCTAGCTCACACTTTCCT
AATGGCCCCATCTCCTGCAGAAGCCAGGTGAGCCCAGCACTGGACTGAAGTTCTTGCAGACACCCCAC
CTGTGCCCCTATCATCAGGGGAACTGCTCCACCTGAGAGGACCAACTCTTTAATTTTTAGTAAAACCT
GAAGGTGATGGGCCGGGCGCAGTGGCTCACGCCTGTAATCCCAACACCTTAGGAGTCCGAGGTGGGTG
GATCACGAGGTCAGGAGATCCAGCCCATCCTGGCCAACATGGTGAAACCCCATCTCTACTAAAAATAC
AAAAATTAGCCGGGCGTGGTGACACGTGCCTGTAGTCCCAGCTACTCGGGAGGCTGAGGCAGGAGAAT
CACTTGAACCTGGGAGGCGGAGGTTGCAGTGAGCTAAGATCACGCCACTGCACTCCAGCCTGCGGACA
GACCAAGACTTCATCCCCCCCAAAAAAAAAAGATTGGAGGTGATTTACAGTGAAAGACACAAATAAAA
TACAACTGTTCAATGGAAATAGAAAATAAACACCATAAAAGAGAGAAGAGAGGTAATTTGTTAGCATC
AAGAGTCAAGTTGCTATATGGTCAAAGGTTAAATTTATCTCTAAAAAATGGCAGGATTCAAAGTTGTA
CATACATGTGATTACTTCTGTTTTTTACACCCACATACAGTACAAAAGATTATTAAAAATATTCCCAA
AAGGCAGGTGCAATGATGCACACTTATACCCCCAGCCACTCAGGAGGCTGATGCAAGAGGATCGCTTG
AGCCCAGGAGTTGAAGTCCAGCCTAAGCAACATAGTGAAACCCCATCTCCAAAAATATAATAATAATT
CTCTCAAAATACTAAACAGAGGTGGTTTTATTGATAAGATTTTGGCTGTTTGGTTTTCCACTATTCTC
TATTGGCTAAAATTTGTTTAATGAGCATGAAATGTTTTTATTTTATTTTGCTTATTTTTATGATTGCA
AAAAATGATATGAGTTTCTCCCTGCCAAGGCAAAAAATATATATATATACCTATAAAAAAAAAAAAAA
AAAAAAAAAAA

| | | |
|---|---|---|
| NOV3p, SNP13376570 of | SEQ ID NO: 46 | MW at 53510.9kD |

| | | | |
|---|---|---|---|
| CG102348-01, Protein Sequence | SNP Pos: 109 | 487 aa | SNP Change: Ser to Asn |

MPGPRVWGKYLWRSPHSKGCPGAMWWLLLWGVLQACPTRGSVLLAQELPQQLTSPGYPEPYGKGQESS
TDIKAPEGFAVRLVFQDFDLEPSQDCAGDSVTISFVGSDPNQFCGQQGSPLGRPPGQREFVSSGRSLR
LTFRTQPSSENKTAHLHKGFLALYQTVAVNYSQPISEASRGSEAINAPGDNPAKVQNHCOEPYYQAAA
AGALTCATPGTWKDRQDGEEVLQCMPVCGRPVTPIAQNQTTLGSSRAKLGNFPWQAFTSIHGRGGGAL
LGDRWILTAAHTVYPKDSVSLRKNQSVNVFLGHTAIDEMLKLGNHPVHRVVVHPDYRQNESHNFSGDI
ALLELQHSIPLGPNVLPVCLPDNETLYRSGLLGYVSGFGMEMGWLTTELKYSRLPVAPREACNAWLQK
RQRPEVFSDNMFCVGDETQRHSVCQGDSGSVYVVWDNHAHHWVATGIVSWGIGCGEGYDFYTKVLSYV
DWIKGVMNGKN

| | | |
|---|---|---|
| NOV3q, SNP13376568 of | SEQ ID NO: 47 | 3345 bp |
| CG102348-01, DNA Sequence | ORF Start: ATG at 18 | ORF Stop: TGA at 1479 |

| | |
|---|---|
| SNP Pos: 564 | SNP Change: G to A |

CAGATGTCCAGTTCCAGATGCCTGGACCCAGAGTGTGGGGGAAATATCTCTGGAGAAGCCCTCACTCC
AAAGGCTGTCCAGGCGCAATGTGGTGGCTGCTTCTCTGGGGAGTCCTCCAGGCTTGCCCAACCCGGGG
CTCCGTCCTCTTGGCCCAAGAGCTACCCCAGCAGCTGACATCCCCCGGGTACCCAGAGCCGTATGGCA
AAGGCCAAGAGAGCAGCACGGACATCAAGGCTCCAGAGGGCTTTGCTGTGAGGCTCGTCTTCCAGGAC
TTCGACCTGGAGCCGTCCCAGGACTGTGCAGGGGACTCTGTCACAATCTCATTCGTCGGTTCGGATCC
AAGCCAGTTCTGTGGTCAGCAAGGCTCCCCTCTGGGCAGGCCCCCTGGTCAGAGGGAGTTTGTATCCT
CAGGGAGGAGTITGCGGCTGACCTTCCGCACACAGCCTTCCTCGGAGAACAAGACTGCCCACCTTCAC
AAGGGCTTTCTGGCCCTCTACCAAACCGTGGCTGTGAACTATAGTCAGCCCATCAGCGAGGCCAGCAG
GGGCTCTGAGGCCATCAACACACCTGGAGACAACCCTGCCAAGGTCCAGAACCACTGCCAGGAGCCCT
ATTATCAGGCCGCGGCAGCAGGGGCACTCACCTGTGCAACCCCAGGGACCTGGAAAGACAGACAGGAT
GGGGAGGAGGTTCTTCAGTGTATGCCTGTCTGCGGACGGCCAGTCACCCCCATTGCCCAGAATCAGAC
GACCCTCGGTTCTTCCAGAGCCAAGCTGGGCAACTTCCCCTGGCAAGCCTTCACCAGTATCCACGGCC
GTGGGGGCGGGGCCCTGCTGGGGGACAGATGGATCCTCACTGCTGCCCACACCGTCTACCCCAAGGAC
AGTGTTTCTCTCAGGAAGAACCAGAGTGTGAATGTGTTCTTGGGCCACACAGCCATAGATGAGATGCT
GAAACTGGGGAACCACCCTGTCCACCGTGTCGTTGTGCACCCCGACTACCGTCAGAATGAGTCCCATA
ACTTTAGCGGGGACATCGCCCTCCTGGAGCTGCAGCACAGCATCCCCCTGGGCCCCAACGTCCTCCCG
GTCTGTCTGCCCGATAATGAGACCCTCTACCGCAGCGGCTTGTTGGGCTACGTCAGTGGGTTTGGCAT
GGAGATGGGCTGGCTAACTACTGAGCTGAAGTACTCGAGGCTGCCTGTAGCTCCCAGGGAGGCCTGCA
ACGCCTGGCTCCAAAAGAGACAGAGACCCGAGGTGTTTTCTGACAATATGTTCTGTGTTGGGGATGAG
ACGCAAAGGCACAGTGTCTGCCAGGGGGACAGTGGCAGCGTCTATGTGGTATGGGACAATCATGCCCA
TCACTGGGTGGCCACGGGCATTGTGTCCTGGGGCATAGGGTGTGGCGAAGGGTATGACTTCTACACCA
AGGTGCTCAGCTATGTGGACTGGATCAAGGGAGTGATGAATGGCAAGAATTGACCCTGGGGGCTTGAA
CAGGGACTGACCAGCACAGTGGAGGCCCCAGGCAACAGAGGGCCTGGAGTGAGGACTGAACACTGGGG
TAGGGGTTGGGGGTGGGGGGTTGGGGGAGGCAGGGAAATCCTATTCACATCACTGTTGCACCAAGCCA
CTGCAAGAGAAACCCCCACCCGGCAAGCCCGCCCCATCCCAGACAGGAAGCAGAGTCCCACAGACCGC
TCCTCCTCACCCTCTACCTCCCTGTGCTCATGCACTAGGCCCCGGGAAGCCTGTACATCTCAACAACT
TTCGCCTTGAATGTCCTTAGAACCACCTTCCCCTACTTCATCTGTTGACACAGCTTTTATACTCACCT
GTGGAAGAGTCAGCTACTCACCCGCTATTAGAGTATGGAGGAAGGGGTTTTCATTGCATTGCATTTCT
GAAACATTCCTAAGACCCTTTAGTTGACCTTCAAATATTCAAGCTATTCTGCAGCTCCAAGATGCAAT
TATAGAAACAGCTCCTTTTTTATTTTATGTCCTCTATATGCCAGGTGCTTCACCTGTTATTTCACTTA
ATCCTCATACCATATTTGCAAAGGATGTGTTATTATCTATGTGTGACAAATGAGGAAACTGAGGCTCA
GGGGATAAAGGGACTTGCCCAAGTCCCACAGCTGGTGTGTGACTGCAGAGACTGTGCTCTTCCCAGTG
TGCTGCAATACTTCTCAACCCTCCTCTAACCTGCTGTGTCACCCGCTTTCCCTCCCAGCCCCCACATC
CTTACCATTTTCCCTCCCTGGGAATTCCTGCTTCTGCGAAAATGGTATCCTCTAGCTCACACTTTCCT
AATGGCCCCATCTCCTGCAGAAGCCAGGTGAGCCCAGCACTGGACTGAAGTTCTTGCAGACACCCCAC
CTGTGCCCCTATCATCAGGGGAACTGCTCCACCTGAGAGGACCAACTCTTTAATTTTTAGTAAAACCT
GAAGGTGATGGGCCGGGCGCAGTGGCTCACGCCTGTAATCCCAACACCTTAGGAGTCCGAGGTGGGTG
GATCACGAGGTCAGGAGATCCAGCCCATCCTGGCCAACATGGTGAAACCCCATCTCTACTAAAAATAC
AAAAATTAGCCGGGCGTGGTGACACGTGCCTGTAGTCCCAGCTACTCGGGAGGCTGAGGCAGGAGAAT
CACTTGAACCTGGGAGGCGGAGGTTGCAGTGAGCTAAGATCACGCCACTGCACTCCAGCCTGCGGACA
GACCAAGACTTCATCCCCCCCAAAAAAAAAAGATTGGAGGTGATTTACAGTGAAAGACACAAATAAAA
TACAACTGTTCAATGGAAATAGAAAATAAACACCATAAAAGAGAGAAGAGAGGTAATTTGTTAGCATC
AAGAGTCAAGTTGCTATATGGTCAAAGGTTAAATTTATCTCTAAAAAATGGCAGGATTCAAAGTTGTA
CATACATGTGATTACTTCTGTTTTTTACACCCACATACAGTACAAAAGATTATTAAAAATATTCCCAA
AAGGCAGGTGCAATGATGCACACTTATACCCCCAGCCACTCAGGAGGCTGATGCAAGAGGATCGCTTG
AGCCCAGGAGTTGAAGTCCAGCCTAAGCAACATAGTGAAACCCCATCTCCAAAAATATAATAATAATT
CTCTCAAAATACTAAACAGAGGTGGTTTTATTGATAAGATTTTGGCTGTTTGGTTTTCCACTATTCTC
TATTGGCTAAAATTTGTTTAATGAGCATGAAATGTTTTTATTTTATTTTGCTTATTTTTATGATTGCA
AAAAATGATATGAGTTTCTCCCTGCCAAGGCAAAAAATATATATATATACCTATAAAAAAAAAAAAAA
AAAAAAAAAAAAA

| | | |
|---|---|---|
| NOV3q, SNP13376568 of | SEQ ID NO: 48 | MW at 53513.9kD |

| | | | |
|---|---|---|---|
| CG102348-01, Protein Sequence | SNP Pos: 183 | 487 aa | SNP Change: Ala to Thr |

MPGPRVWGKYLWRSPHSKGCPGAMWWLLLWGVLQACPTRGSVLLAQELPQQLTSPGYPEPYGKGQESS
TDIKAPEGFAVRLVFQDFDLEPSQDCAGDSVTISFVGSDPSQFCGQQGSPLGRPPGQREFVSSGRSLR
LTFRTQPSSENKTAHLHKGFLALYQTVAVNYSQPISEASRGSEAINTPGDNPAKVQNHCQEPYYQAAA
AGALTCATPGTWKDRQDGEEVLQCMPVCGRPVTPIAQNQTTLGSSRAKLGNFPWQAFTSIHGRGGGAL
LGDRWILTAAHTVYPKDSVSLRKNQSVNVFLGHTAIDEMLKLGNHPVHRVVVHPDYRQNESHNFSGDI
ALLELONSIPLGPNVLPVCLPDNETLYRSGLLGYVSGFGMEMGWLTTELKYSRLPVAPREACNAWLQK
RQRPEVFSDNMFCVGDETRQRHSVCQGDSGSVYVVWDNHAHHWVATGISWGIGCGEGYDFYTKVLSYV
DWIKGVNNGKN

| | |
|---|---|
| SEQ ID NO: 49 | 3345 bp |

| | | |
|---|---|---|
| NOV3r, SNP13382463 of | ORF Start: ATG at 18 | ORF Stop: TGA at 1479 |

| | | |
|---|---|---|
| CG102348-01, DNA Sequence | SNP Pos: 693 | SNP Change: C to T |

CAGATGTCCAGTTCCAGATGCCTGGACCCAGAGTGTGGGGGAAATATCTCTGGAGAAGCCCTCACTCC
AAAGGCTGTCCAGGCGCAATGTGGTGGCTGCTTCTCTGGGGAGTCCTCCAGGCTTGCCCAACCCGGGG
CTCCGTCCTCTTGGCCCAAGAGCTACCCCAGCAGCTGACATCCCCCGGGTACCCAGAGCCGTATGGCA
AAGGCCAAGAGAGCAGCACGGACATCAAGGCTCCAGAGGGCTTTGCTGTGAGGCTCGTCTTCCAGGAC
TTCGACCTGGAGCCGTCCCAGGACTGTGCAGGGGACTCTGTCACAATCTCATTCGTCGGTTCGGATCC
AAGCCAGTTCTGTGGTCAGCAAGGCTCCCCTCTGGGCAGGCCCCCTGGTCAGAGGGAGTTTGTATCCT
CAGGGAGGAGTTTGCGGCTGACCTTCCGCACACAGCCTTCCTCGGAGAACAAGACTGCCCACCTTCAC
AAGGGCTTTCTGGCCCTCTACCAAACCGTGGCTGTGAACTATAGTCAGCCCATCAGCGAGGCCAGCAG
GGGCTCTGAGGCCATCAACGCACCTGGAGACAACCCTGCCAAGGTCCAGAACCACTGCCAGGAGCCCT
ATTATCAGGCCGCGGCAGCAGGGGCACTCACCTGTGCAACCCCAGGGACCTGGAAAGACAGACAGGAT
GGGGAGGAGGTTTTTCAGTGTATGCCTGTCTGCGGACGGCCAGTCACCCCCATTGCCCAGAATCAGAC
GACCCTCGGTTCTTCCAGAGCCAAGCTGGGCAACTTCCCCTGGCAAGCCTTCACCAGTATCCACGGCC
GTGGGGGCGGGGCCCTGCTGGGGGACAGATGGATCCTCACTGCTGCCCACACCGTCTACCCCAAGGAC
AGTGTTTCTCTCAGGAAGAACCAGAGTGTGAATGTGTTCTTGGGCCACACAGCCATAGATGAGATGCT
GAAACTGGGGAACCACCCTGTCCACCGTGTCGTTGTGCACCCCGACTACCGTCAGAATGAGTCCCATA
ACTTTAGCGGGGACATCGCCCTCCTGGAGCTGCAGCACAGCATCCCCCTGGGCCCCAACGTCCTCCCG
GTCTGTCTGCCCGATAATGAGACCCTCTACCGCAGCGGCTTGTTGGGCTACGTCAGTGGGTTTGGCAT
GGAGATGGGCTGGCTAACTACTGAGCTGAAGTACTCGAGGCTGCCTGTAGCTCCCAGGGAGGCCTGCA
ACGCCTGGCTCCAAAAGAGACAGAGACCCGAGGTGTTTTCTGACAATATGTTCTGTGTTGGGGATGAG
ACGCAAAGGCACAGTGTCTGCCAGGGGGACAGTGGCAGCGTCTATGTGGTATGGGACAATCATGCCCA
TCACTGGGTGGCCACGGGCATTGTGTCCTGGGGCATAGGGTGTGGCGAAGGGTATGACTTCTACACCA
AGGTGCTCAGCTATGTGGACTGGATCAAGGGAGTGATGAATGGCAAGAATTGACCCTGGGGGCTTGAA
CAGGGACTGACCAGCACAGTGGAGGCCCCAGGCAACAGAGGGCCTGGAGTGAGGACTGAACACTGGGG
TAGGGGTTGGGGGTGGGGGGTTGGGGGAGGCAGGGAAATCCTATTCACATCACTGTTGCACCAAGCCA
CTGCAAGAGAAACCCCCACCCGGCAAGCCCGCCCCATCCCAGACAGGAAGCAGAGTCCCACAGACCGC
TCCTCCTCACCCTCTACCTCCCTGTGCTCATGCACTAGGCCCCGGGAAGCCTGTACATCTCAACAACT
TTCGCCTTGAATGTCCTTAGAACCACCTTCCCCTACTTCATCTGTTGACACAGCTTTTATACTCACCT
GTGGAAGAGTCAGCTACTCACCCGCTATTAGAGTATGGAGGAAGGGGTTTTCATTGCATTGCATTTCT
GAAACATTCCTAAGACCCTTTAGTTGACCTTCAAATATTCAAGCTATTCTGCAGCTCCAAGATGCAAT
TATAGAAACAGCTCCTTTTTTATTTTATGTCCTCTATATGCCAGGTGCTTCACCTGTTATTTCACTTA
ATCCTCATACCATATTTGCAAAGGATGTGTTATTATCTATGTGTGACAAATGAGGAAACTGAGGCTCA
GGGGATAAAGGGACTTGCCCAAGTCCCACAGCTGGTGTGTGACTGCAGAGACTGTGCTCTTCCCAGTG
TGCTGCAATACTTCTCAACCCTCCTCTAACCTGCTGTGTCACCCGCTTTCCCTCCCAGCCCCCACATC
CTTACCATTTTCCCTCCCTGGGAATTCCTGCTTCTGCGAAAATGGTATCCTCTAGCTCACACTTTCCT
AATGGCCCCATCTCCTGCAGAAGCCAGGTGAGCCCAGCACTGGACTGAAGTTCTTGCAGACACCCCAC
CTGTGCCCCTATCATCAGGGGAACTGCTCCACCTGAGAGGACCAACTCTTTAATTTTTAGTAAAACCT
GAAGGTGATGGGCCGGGCGCAGTGGCTCACGCCTGTAATCCCAACACCTTAGGAGTCCGAGGTGGGTG
GATCACGAGGTCAGGAGATCCAGCCCATCCTGGCCAACATGGTGAAACCCCATCTCTACTAAAAATAC
AAAAATTAGCCGGGCGTGGTGACACGTGCCTGTAGTCCCAGCTACTCGGGAGGCTGAGGCAGGAGAAT
CACTTGAACCTGGGAGGCGGAGGTTGCAGTGAGCTAAGATCACGCCACTGCACTCCAGCCTGCGGACA
GACCAAGACTTCATCCCCCCCAAAAAAAAAAGATTGGAGGTGATTTACAGTGAAAGACACAAATAAAA
TACAACTGTTCAATGGAAATAGAAAATAAACACCATAAAAGAGAGAAGAGAGGTAATTTGTTAGCATC
AAGAGTCAAGTTGCTATATGGTCAAAGGTTAAATTTATCTCTAAAAAATGGCAGGATTCAAAGTTGTA
CATACATGTGATTACTTCTGTTTTTTACACCCACATACAGTACAAAAGATTATTAAAAATATTCCCAA
AAGGCAGGTGCAATGATGCACACTTATACCCCCAGCCACTCAGGAGGCTGATGCAAGAGGATCGCTTG
AGCCCAGGAGTTGAAGTCCAGCCTAAGCAACATAGTGAAACCCCATCTCCAAAAATATAATAATAATT
CTCTCAAAATACTAAACAGAGGTGGTTTTATTGATAAGATTTTGGCTGTTTGGTTTTCCACTATTCTC
TATTGGCTAAAATTTGTTTAATGAGCATGAAATGTTTTTATTTTATTTTGCTTATTTTTATGATTGCA
AAAAATGATATGAGTTTCTCCCTGCCAAGGCAAAAAATATATATATATACCTATAAAAAAAAAAAAAA
AAAAAAAAAAAAA

| | | |
|---|---|---|
| NOV3r, SNP13382463 of | SEQ ID NO: 50 | MW at 53517.9kD |

| | | | |
|---|---|---|---|
| CG102348-01, Protein Sequence | SNP Pos: 226 | 487 aa | SNP Change: Leu to Phe |

MPGPRVWGKYLWRSPNSKGCPGAMWWLLLWGVLQACPTRGSVLLAQELPQQLTSPGYPEPYGKGQESS
TDIKAPEGFAVRLVFQDFDLEPSQDCAGDSVTISFVGSDPSQFCGQQGSPLGRPPGQREFVSSGRSLR
LTFRTQPSSENKTAHLHKGFLALYQTVAVNYSQPISEASRGSEAINAPGDNPAKVQNHCQEPYYQAAA
AGALTCATPGTWKDRQDGEEVFQCMPVCGRPVTPIAQNQTTLGSSRAKLGNFPWQAFTSIHGRGGGAL
LGDRWILTAAHTVYPKDSVSLRKNQSVNVFLGHTAIDEMLKLGNHPVHRVVVHPDYRQNESHNFSGDI
ALLELQHSIPLGPNVLPVCLPDNETLYRSGLLGYVSGFGMEMGWLTTELKYSRLPVAPREACNAWLQK
RQRPEVFSDNNFCVGDETQRHSVCQGDSGSVYVVWDNHAHHWVATGIVSWGIGCGEGYDFYTKVLSYV
DWIKGVMNGKN

| | |
|---|---|
| SEQ ID NO: 51 | 3345 bp |

| | | |
|---|---|---|
| NOV3s, SNP13374245 of | ORF Start: ATG at 18 | ORF Stop: TGA at 1479 |

| | | |
|---|---|---|
| CG102348-01, DNA Sequence | SNP Pos: 1459 | SNP Change: G to A |

CAGATGTCCAGTTCCAGATGCCTGGACCCAGAGTGTGGGGGAAATATCTCTGGAGAAGCCCTCACTCC
AAAGGCTGTCCAGGCGCAATGTGGTGGCTGCTTCTCTGGGGAGTCCTCCAGGCTTGCCCAACCCGGGG
CTCCGTCCTCTTGGCCCAAGAGCTACCCCAGCAGCTGACATCCCCCGGGTACCCAGAGCCGTATGGCA
AAGGCCAAGAGAGCAGCACGGACATCAAGGCTCCAGAGGGCTTTGCTGTGAGGCTCGTCTTCCAGGAC
TTCGACCTGGAGCCGTCCCAGGACTGTGCAGGGGACTCTGTCACAATCTCATTCGTCGGTTCGGATCC
AAGCCAGTTCTGTGGTCAGCAAGGCTCCCCTCTGGGCAGGCCCCCTGGTCAGAGGGAGTTTGTATCCT
CAGGGAGGAGTTTGCGGCTGACCTTCCGCACACAGCCTTCCTCGGAGAACAAGACTGCCCACCTTCAC
AAGGGCTTTCTGGCCCTCTACCAAACCGTGGCTGTGAACTATAGTCAGCCCATCAGCGAGGCCAGCAG
GGGCTCTGAGGCCATCAACGCACCTGGAGACAACCCTGCCAAGGTCCAGAACCACTGCCAGGAGCCCT
ATTATCAGGCCGCGGCAGCAGGGGCACTCACCTGTGCAACCCCAGGGACCTGGAAAGACAGACAGGAT
GGGGAGGAGGTTCTTCAGTGTATGCCTGTCTGCGGACGGCCAGTCACCCCCATTGCCCAGAATCAGAC
GACCCTCGGTTCTTCCAGAGCCAAGCTGGGCAACTTCCCCTGGCAAGCCTTCACCAGTATCCACGGCC
GTGGGGGCGGGGCCCTGCTGGGGGACAGATGGATCCTCACTGCTGCCCACACCGTCTACCCCAAGGAC
AGTGTTTCTCTCAGGAAGAACCAGAGTGTGAATGTGTTCTTGGGCCACACAGCCATAGATGAGATGCT
GAAACTGGGGAACCACCCTGTCCACCGTGTCGTTGTGCACCCCGACTACCGTCAGAATGAGTCCCATA
ACTTTAGCGGGGACATCGCCCTCCTGGAGCTGCAGCACAGCATCCCCCTGGGCCCCAACGTCCTCCCG
GTCTGTCTGCCCGATAATGAGACCCTCTACCGCAGCGGCTTGTTGGGCTACGTCAGTGGGTTTGGCAT
GGAGATGGGCTGGCTAACTACTGAGCTGAAGTACTCGAGGCTGCCTGTAGCTCCCAGGGAGGCCTGCA
ACGCCTGGCTCCAAAAGAGACAGAGACCCGAGGTGTTTTCTGACAATATGTTCTGTGTTGGGGATGAG
ACGCAAAGGCACAGTGTCTGCCAGGGGGACAGTGGCAGCGTCTATGTGGTATGGGACAATCATGCCCA
TCACTGGGTGGCCACGGGCATTGTGTCCTGGGGCATAGGGTGTGGCGAAGGGTATGACTTCTACACCA
AGGTGCTCAGCTATGTGGACTGGATCAAGGAAGTGATGAATGGCAAGAATTGACCCTGGGGGCTTGAA
CAGGGACTGACCAGCACAGTGGAGGCCCCAGGCAACAGAGGGCCTGGAGTGAGGACTGAACACTGGGG
TAGGGGTTGGGGGTGGGGGGTTGGGGGAGGCAGGGAAATCCTATTCACATCACTGTTGCACCAAGCCA
CTGCAAGAGAAACCCCCACCCGGCAAGCCCGCCCCATCCCAGACAGGAAGCAGAGTCCCACAGACCGC
TCCTCCTCACCCTCTACCTCCCTGTGCTCATGCACTAGGCCCCGGGAAGCCTGTACATCTCAACAACT
TTCGCCTTGAATGTCCTTAGAACCACCTTCCCCTACTTCATCTGTTGACACAGCTTTTATACTCACCT
GTGGAAGAGTCAGTTACTCACCCGCTATTAGAGTATGGAGGAAGGGGTTTTCATTGCATTGCATTTCT
GAAACATTCCTAAGACCCTTTAGTTGACCTTCAAATATTCAAGCTATTCTGCAGCTCCAAGATGCAAT
TATAGAAACAGCTCCTTTTTTATTTTATGTCCTCTATATGCCAGGTGCTTCACCTGTTATTTCACTTA
ATCCTCATACCATATTTGCAAAGGATGTGTTATTATCTATGTGTGACAAATGAGGAAACTGAGGCTCA
GGGGATAAAGGGACTTGCCCAAGTCCCACAGCTGGTGTGTGACTGCAGAGACTGTGCTCTTCCCAGTG
TGCTGCAATACTTCTCAACCCTCCTCTAACCTGCTGTGTCACCCGCTTTCCCTCCCAGCCCCCACATC
CTTACCATTTTCCCTCCCTGGGAATTCCTGCTTCTGCGAAAATGGTATCCTCTAGCTCACACTTTCCT
AATGGCCCCATCTCCTGCAGAAGCCAGGTGAGCCCAGCACTGGACTGAAGTTCTTGCAGACACCCCAC
CTGTGCCCCTATCATCAGGGGAACTGCTCCACCTGAGAGGACCAACTCTTTAATTTTTAGTAAAACCT
GAAGGTGATGGGCCGGGCGCAGTGGCTCACGCCTGTAATCCCAACACCTTAGGAGTCCGAGGTGGGTG
GATCACGAGGTCAGGAGATCCAGCCCATCCTGGCCAACATGGTGAAACCCCATCTCTACTAAAAATAC
AAAATTAGCCGGGCGTGGTGACACGTGCCTGTAGTCCCAGCTACTCGGGAAGGCTGAGGCAGGAGAAT
CACTTGAACCTGGGAGGCGGAGGTTGCAGTGAGCTAAGATCACGCCACTGCACTCCAGCCTGCGGACA
GACCAAGACTTCATCCCCCCCAAAAAAAAAAGATTGGAGGTGATTTACAGTGAAAGACACAAATAAAA
TACAACTGTTCAATGGAAATAGAAAATAAACACCATAAAAGAGAGAAGAGAGGTAATTTGTTAGCATC
AAGAGTCAAGTTGCTATATGGTCAAAGGTTAAATTTATCTCTAAAAAATGGCAGGATTCAAAGTTGTA
CATACATGTGATTACTTCTGTTTTTTACACCCACATACAGTACAAAAGATTATTAAAAATATTCCCAA
AAGGCAGGTGCAATGATGCACACTTATACCCCCAGCCACTCAGGAGGCTGATGCAAGAGGATCGCTTG
AGCCCAGGAGTTGAAGTCCAGCCTAAGCAACATAGTGAAACCCCATCTCCAAAAATATAATAATAATT
CTCTCAAAATACTAAACAGAGGTGGTTTTATTGATAAGATTTTGGCTGTTTGGTTTTCCACTATTCTC
TATTGGCTAAAATTTGTTTAATGAGCATGAAATGTTTTTATTTTATTTTGCTTATTTTTATGATTGCA
AAAAATGATATGAGTTTCTCCCTGCCAAGGCAAAAAATATATATATATACCTATAAAAAAAAAAAAAA
AAAAAAAAAAAAA

| | | |
|---|---|---|
| NOV3s, SNP13374245 of | SEQ ID NO: 52 | MW at 53556.0kD |

| | | | |
|---|---|---|---|
| CG102348-01, Protein Sequence | SNP Pos: 481 | 487 aa | SNP Change: Gly to Glu |

MPGPRVWGKYLWRSPHSKGCPGAMWLLWGVLQACPTRGSVLLAQELPQQLTSPGYPEPYGKGQESS
TDIKAPEGFAVRLVFQDFDLEPSQDCAGDSVTISFVGSDPSQFCGQQGSPLGRPPGQREFVSSGRSLR
LTFRTQPSSENKTAHLHKGFLALYQTVAVNYSQPISEASRGSEAINAPGDNPAKVQNHCQEPYYQAAA
AGALTCATPGTWKDRQDGEEVLQCMPVCGRPVTPIAQNQTTLGSSRAKLGNFPWQAFTSIHGRGGGAL
LGDRWILTAAHTVYPKDSVSLRKNQSVNVFLGHTAIDEMLKLGNHPVHRVVVHPDYRQNESHNFSGDI
ALLELQHSIPLGPNVLPVCLPDNETLYRSGLLGYVSGFGMEMGWLTTELKYSRLPVAPREACNAWLQK
RQRPEVFSDNMFCVGDETQRHSVCQGDSGSVYVVWDNHAHHWVATGIVSWGIGCGEGYDFYTKVLSYV
DWIKEVMNGKN

[0357] A ClustalW comparison of the above protein sequences yields the following sequence alignment shown in Table 3B.

TABLE 3B
Comparison of the NOV3 protein sequences.

| | |
|---|---|
| NOV3a | ----MPGPRVWGKYLWRSPHSKGCPGAMWWLLLWGVLQACPTRGSVLLAQELPQQLTSPG |
| NOV3b | -------------------------------------KLCPTRGSVLLAQELPQQLTSPG |
| NOV3c | ------------------------------------------------------------ |
| NOV3d | -------------------------------------KLCPTRGSVLLAQELPQQLTSPG |
| NOV3e | -------------------------------------KLCPTRGSVLLAQELPQQLTSPG |
| NOV3f | KLPTMPGPRVWGKYLWRSPHSKGCPGAMWWLLLWGVLQACPTRGSVLLAQELPQQLTSPG |
| NOV3g | -------------------------------------KLCPTRGSVLLAQELPQQLTSPG |
| NOV3h | -------------------------------------KLCPTRGSVLLAQELPQQLTSPG |
| NOV3i | -------------------------------------KLCPTRGSVLLAQELPQQLTSPG |
| NOV3j | -------------------------------------KLCPTRGSVLLAQELPQQLTSPG |
| NOV3k | ---------------------------------------CPTRGSVLLAQELPQQLTSPG |
| Nov3l | ------------------------------------------------------------ |
| NOV3m | ---------------------------------------CPTRGSVLLAQELPQQLTSPG |
| NOV3n | ---------------------------------------CPTRGSVLLAQELPQQLTSPG |
| NOV3o | ----MPGPRVWGKYLWRSPHSKGCPGAMWWLLLWGVLQACPTRGSVLLAQELPQQLTSPG |
| NOV3a | YPEPYGKGQESSTDIKAPEGFAVRLVFQDFDLEPSQDCAGDSVTISFVGSDPSQFCGQQG |
| NOV3b | YPEPYGKGQESSTDIKAPEGFAVRFVFQDFDLESSQDCAGDSVTISFVGSDPSQFCGQQG |
| NOV3c | ------------------------------------------------------------ |
| NOV3d | YPEPYGKGQESSTDIKAPEGFAVRLVFQDFDLEPSQDCAGDSVTISFVGSDPSQFCGQQG |
| NOV3e | YPEPYGKGQESSTDIKAPEGFAVRLVFQDFDLEPSQDCAGDSVTISFVGSDPSQFCGQQG |
| NOV3f | YPEPYGKGQESSTDIKAPEGFAVRLVFQDFDLEPSQDCAGDSVTVSFVGSDPSQFCGQQG |
| NOV3g | YPEPYGKGQESSTDIKAPEGFAVRLVFQDFDLEPSQDCAGDSVTISFVGSDPSQFCGQQG |
| NOV3h | YPEPYGKGQESSTDIKAPEGFAVRLVFQDFDLEPSQDCAGDSVTISFVGSDPSQFCGQQG |
| NOV3i | YPEPYGKGQESSTDIKAPEGFAVRLVFQDFDLEPSQDCAGDSVTISFVGSDPSQFCGQQG |
| NOV3j | YPEPYGKGQESSTDIKAPEGFAVRLVFQDFDLEPSQDCAGDSVTISFVGSDPSQFCGQQG |
| NOV3k | YPEPYGKGQESSTDIKAPEGFAVRLVFQDFDLEPSQDCAGDSVTISFVGSDPSQFCGQQG |
| NOV3l | ------------------------------------------------------------ |
| NOV3m | YPEPYGKGQESSTDIKAPEGFAVRLVFQDFDLEPSQDCAGDSVTISFVGSDPSQFCGQQG |
| NOV3n | YPEPYGKGQESSTDIKAPEGFAVRFVFQDFDLESSQDCAGDSVTISFVGSDPSQFCGQQG |
| NOV3o | YPEPYGKGQESSTDIKAPEGFAVRFVFQDFDLESSQDCAGDSVTISFVGSDPSQFCGQQG |
| NOV3a | SPLGRPPGQREFVSSGRSLRLTFRTQPSSENKTAHLHKGFLALYQTVAVNYSQPISEASR |
| NOV3b | SPLGRPPGQREFVSSGRSLRLTFRTQPSSENKTAHLHKGFLALYQTVAVNYSQPISEASR |
| NOV3c | ------------------------------------------------------------ |
| NOV3d | SPLGRPPGQREFVSSGRSLRLTFRTQPSSENKTAHLHKGFLALYQTVAVNYSQPISEASR |
| NOV3e | SPLGRPPGQREFVSSGRSLRLTFRTQPSSEDKTAHLHKGFLALYQTVAVNYSQPISEASR |
| NOV3f | SPLGRPPGQREFVSSGRSLRLTFRTQPSSENKTAHLHKGFLALYQTVAVNYSQPISEASR |
| NOV3g | SPLGRPPGQREFVSSGRSLRLTFRTQPSSENKTAHLHKGFLALYQTVAVNYSQPISEASR |
| NOV3h | SPLGRPPGQREFVSSGRSLRLTFRTQP5SENKTAHLHKGFLALYQTVAVNYSQPISEASR |
| NOV3i | SPLGRPPGQREFVSSGRSLRLTFRTQPSSENKTAHLHKGFLALYQTVAVNYSQPISEASR |
| NOV3j | SPLGRPPGQREFVSSGRSLRLTFRTQPSSENKTAHLHKGFLALYKL-------------- |
| NOV3k | SPLGRPPGQREFVSSGRSLRLTFRTQPSSENKTAHLHKGFLALY---------------- |
| NOV3l | ------------------------------------------------------------ |
| NOV3m | SPLGRPPGQREFVSSGRSLRLTFRTQPSSENKTAHLHKGFLALYQTVAVNYSQPISEASR |
| NOV3n | SPLGRPPGQREFVSSGRSLRLTFRTQPSSENKTAELHKGFLALYQTVAVNYSQPISEASR |
| NOV3o | SPLGRPPGQREFVSSGRSLRLTFRTQPSSENKTAHLHKGFLALYQTVAVNYSQPISEASR |
| NOV3a | GSEAINAPGDNPAKVQNHCQEPYYQAAAAGALTCATPGTWKDRQDGEEVLQCMPVCGRPV |
| NOV3b | GSEAINAPGDNPAKVQNHCQEPYYQATAAGALTCATPGTWKDRQDGEEVLQCMPVCGRPV |
| NOV3c | ------------------------------------------------------------ |
| NOV3d | GSEAINAPGDNPAKVQNHCQEPYYQAAAAGALTCATPGTWKDRQDGEEVLQCMPVCGRPV |
| NOV3e | GSEAINAPGDNPAKVQNHCQEPYYQAAAAGALTCATPGTWKDRQDGEEVLQCMPVCGRPV |
| NOV3f | GSEAINAPGDNPAKVQNHCQEPYYQAAAAGALTCATPGTWKDRQDGEEVLQCMPVCGRPV |
| NOV3g | GSEAINAPGDNPAKVQNHCQEPYYQAAAA-----------------------V--CGRPV |
| NOV3h | GSEAINAPGDNPAKVQNHCQEPYYQAAAAGALTCATPGTWEDRQDGEEVLQCMPVCGRPV |
| NOV3i | GSEAINAPGDNPAKVQNHCQEPYYQAAAAGALTCATPGTWKDRQDGEEVLQCMPVCGRPV |
| NOV3j | ------------------------------------------------------------ |
| NOV3k | ------------------------------------------------------------ |
| NOV3l | ------------------------------------------------------------ |
| NOV3m | GSEAINAPGDNPAKVQNHCQEPYYQAAAA-----------------------V--CGRPV |
| NOV3n | GSEAINAPGDNPAKVQNHCQEPYYQATAAGALTCATPGTWKDRQDGEEVLQCMPVCGRPV |
| NOV3o | GSEAINAPGDNPAKVQNHCQEPYYQATAAGALTCATPGTWKDRQDGEEVLQCMPVCGRPV |
| NOV3a | TPIAQNQTTLGSSPAKLGNFPWQAFTSIHGRGGGALLGDRWILTAAHTVYPKDSVSLRKN |
| NOV3b | TPIAQNQTTLGSSRAKLGNFPWQAFTSIHGRGGGALLGDRWILTAAHTIYPKDSVSLRKN |
| NOV3c | ------KLTLGSSRAKLGNFPWQAFTSIHGRGGGALLGDRWILTAAHTIYPKNSVSLRKN |
| NOV3d | TPIAQNQTTLGSSRAKLGNFPWQAFTSIHGRGGGALLGDRWILTAAHTVYPKDSVSLRKN |
| NOV3e | TPIAQNQTTLGSSRAKLGNFPWQAFTSIHGRGGGALLGDRWILTAAHTIYPKDSVSLRKN |
| NOV3f | TPIAQNQTTLGSSRAKLGNFPWQAFTSIHGRGGGALLGDRWILTAAHTIYPKDSVSLRKN |
| NOV3g | TPIAQNQTTLGSSRAKLGNFPWQAFTSIHGRGGGALLGDRWILTAAHTIYPKDSVSLRKN |
| NOV3h | TPIAQNQTTLGSSRAKLGNFPWQAFTSIHGRGGGALLGDRWILTAAETIYPKDSVSLRKN |
| NOV3i | TPIAQNQTTLGSSRAKLGNFPWOAFTSIHGRGGGALLGDRWILTAAHTIYPKDSVSLRKN |
| NOV3j | ------------------------------------------------------------ |
| NOV3k | ------------------------------------------------------------ |
| NOV3l | --------TLGSSRAKLGNFPWQAFTSIHGRGGGALLGDRWILTAAHTIYPKNSVSLRKN |
| NOV3m | TPIAQNQTTLGSSRAKLGNFPWQAFTSIHGRGGGALLGDRWILTAAHTIYPKDSVSLRKN |
| NOV3n | TPIAQNQTTLGSSRAKLGNFPWQAFTSIHGRGGGALLGDRWILTAAHTIYPKDSVSLRKN |
| NOV3o | TPIAQNQTTLGSSRAKLGNFPWQAFTSIHGRGGGALLGDRWILTAAHTIYPKDSVSLRKN |
| NOV3a | QSVNVFLGHTAIDEMLKLGNHPVHRVVVHPDYRQNESHNFSGDIALLELQHSIPLGPNVL |
| NOV3b | QSVNVFLGHTAIDEMLKLGNHPVHRVVVHPDYRQNESHNFSGDIALLELQHSIPIGPNVL |
| NOV3c | QSVNVFLGHTAIDEMLKLGNHPVHRVVVHPDYRQNESHNFSGDIALLELQHSIPLGPNVL |
| NOV3d | QSVNVFLGHTAIDEMLKLGNHPVHRVVVHPDYRQNESHNFSGDIALLELQHSIPLGPNVL |
| NOV3e | QSVNVFLGHTAIDEMLKLGNHPVHRVVVHPDYRQNESHNFSGDIALLELQHSIPLGPNVL |
| NOV3f | QSVNVFLGHTAIDEMLKLGNHPVHRVVVHPDYRQNESHNFSGDIALLELQHSIPLGPNVL |
| NOV3g | QSVNVFLGHTAIDEMLKLGNHPVHRVVVHPDYRQNESHNFSGDIALLELQHSIPLGPNVL |
| NOV3h | QSVNVFLGHTAIDEMLKLGNHPVHRVVVHPDYRQNESHNFSGDIALLELQHSIPLGPNVL |
| NOV3i | QSVNVFLGHTAIDEMLKLGNHPVHRVVVHPDYRQNESHNFSGDIALLELRHSIPLGPNVL |
| NOV3j | ------------------------------------------------------------ |
| NOV3k | ------------------------------------------------------------ |
| NOV3l | QSVNVFLGHTAIDEMLKLGNHPVHRVVVHPDYRQNESHNFSGDIALLELQHSIPLGPNVL |
| NOV3m | QSVNVFLGHTAIDEMLKLGNHPVHRVVVHPDYRQNESHNFSGDIALLELQHSIPLGPNVL |
| NOV3n | QSVNVFLGHTAIDEMLKLGNHPVHRVVVHPDYRQNESHNFSGDIALLELQHSIPLGPNVL |
| NOV3o | QSVNVFLGHTAIDEMLKLGNHPVHRVVVHPDYRQNESHNFSGDIALLELQHSIPLGPNVL |
| NOV3a | PVCLPDNETLYRSGLLGYVSGFGMEMGWLTTELKYSRLPVAPREACNAWLQKRQRPEVFS |
| NOV3b | PVCLPDNETLYRSGLLGYVSGFGMEMGWLTTELKYSRLPVAPREACNAWLQKRQRPEVFS |
| NOV3c | PVCLPDNETLYRSGLLGYVSGFGMEMGWLTTELKYSRLPVAPREACNAWLQKRQRPEVFS |
| NOV3d | PVCLPDNETLYRSGLLGYVSGFGMEMGWLTTELKYSRLPVAPREACNAWLQKRQRPEVFS |
| NOV3e | PVCLPDNETLYRSGLLGYVSGFGMEMGWLTTELKYSRLPVAPREAcNAWLQKRQRPEVFS |
| NOV3f | PVCLPDNETLYRSGLLGYVSGFGMEMGWLTTELKYSRLPVAPREACNAWLQKRQRPEVFS |
| NOV3g | PVCLPDNETLYRSGLLGYVSGFGMEMGRLTTELKYSRLPVAPREACNAWLQKRQRPEVFS |
| NOV3h | PVCLPDNETLYRSGLLGYVSGFGMEMGWLTTELKYSRLPVAPREACNAWLQKRQRPEVFS |
| NOV3i | PVCLPDNETLYRSGLLGYVSGFGMEMGWLTTELKYSRLPVAPREACNAWLQKRQRPEVFS |
| NOV3j | ------------------------------------------------------------ |
| NOV3k | ------------------------------------------------------------ |
| NOV3l | PVCLPDNETLYRSGLLGYVSGFGMEMGWLTTELKYSRLPVAPREACNAWLQKRQRPEVFS |
| NOV3m | PVCLPDNETLYRSGLLGYVSGFGMEMGRLTTELKYSRLPVAPREACNAWLQKRQRPEVFS |
| NOV3n | PVCLPDNETLYRSGLLGYVSGFGMEMGWLTTELKYSRLPVAPREACNAWLQKRQRPEVFS |
| NOV3o | PVCLPDNETLYRSGLLGYVSGFGMEMGWLTTELKYSRLPVAPREACNAWLQKRQRPEVFS |
| NOV3a | DNMFCVGDETQRHSVCQODSGSVYVVWDNHAHHWVATGIVSWGIGCGEGYDFYTKVLSYV |
| NOV3b | DNMFCVGDETQRHSVCQGDSGSVYVVWDNHAHHWVATGIVSWGIGCGEGYDFYTKVLSYV |
| NOV3c | DNMFCVGDETQRHSVCQGDSGSVYVVWDNRAHHWVATGIVSWGIGCGEGYDFYTKVLSYV |
| NOV3d | DNMFCVGDETQRHSVCQGDSGSVYVVWDNHAHHWVATGIVSWGIGCGEGYDFYTKVLSYV |
| NOV3e | DNMFCVGDETQRHSVCQGDSGSVYVVWDNHAHHWVATGIVSWGIGCGEGYDFYTKVLSYV |
| NOV3f | DNMFCVGDETQRHSVCQGDSGSVYVVWDNHAHHWVATGIVSWGIGCGEGYDFYTKVLSYV |
| NOV3g | DNMFCVGDETQRHSVCQGDSGSVYVVWDNHAHHWVATGIVSWGIGCGEGYDFYTKVLSYV |
| NOV3h | DNMFCVGDETQRHSVCQGDSGSVYVVWDNHAHHWVATGIVSWGIGCGEGYDFYTKVLSYV |
| NOV3i | DNMFCVGDGTQRHSVCQGDSGSVYVVWDNHAHHWVATGIVSWGIGCGEGYDFYTKVLSYV |
| NOV3j | ------------------------------------------------------------ |
| NOV3k | ------------------------------------------------------------ |
| NOV3l | DNMFCVGDETQRHSVCQGDSGSVYVVWDNRAHHWVATGIVSWGIGCGEGYDFYTKVLSYV |
| NOV3m | DNMFCVGDETQRHSVCQGDSGSVYVVWDNRAHHWVATGIVSWGIGCGEGYDFYTKVLSYV |
| NOV3n | DNMFCVGDETQRHSVCQGDSGSVYVVWDNRAHHWVATGIVSWGIGCGEGYDFYTKVLSYV |
| NOV3o | DNMFCVGDETQRHSVCQGDSGSVYVVWDNRAHHWVATGIVSWGIGCGEGYDFYTKVLSYV |
| NOV3a | DWIKGVMNGKN-- |
| NOV3b | DWIKGVMNGKNKL |
| NOV3c | DWIKGVMNGKNKL |
| NOV3d | DWIKGVMNGKNKL |
| NOV3e | DWIKGVMNGKNKL |
| NOV3f | DWIKGVMNGKNKL |
| NOV3g | DWIKGVMNGKNKL |
| NOV3h | DWIKGVMNGKNKL |
| NOV3i | DWIKGVMNGKNKL |
| NOV3j | ------------- |
| NOV3k | ------------- |
| NOV3l | DWIKGVMNGKN-- |
| NOV3m | DWIKGVMNGKN-- |
| NOV3n | DWIKGVNNGKN-- |
| NOV3o | DWIKGVMNGKN-- |
| NOV3a | (SEQ ID NO: 16) |
| NOV3b | (SEQ ID NO: 18) |
| NOV3c | (SEQ ID NO: 20) |
| NOV3d | (SEQ ID NO: 22) |
| NOV3e | (SEQ ID NO: 24) |
| NOV3f | (SEQ ID NO: 26) |
| NOV3g | (SEQ ID NO: 28) |
| NOV3h | (SEQ ID NO: 30) |
| NOV3i | (SEQ ID NO: 32) |
| NOV3j | (SEQ ID NO: 34) |
| NOV3k | (SEQ ID NO: 36) |
| NOV3l | (SEQ ID NO: 38) |
| NOV3m | (SEQ ID NO: 40) |
| NOV3n | (SEQ ID NO: 42) |
| NOV3o | (SEQ ID NO: 44) |

[0358] Further analysis of the NOV3a protein yielded the following properties shown in Table 3C.

TABLE 3C
Protein Sequence Properties NOV3a

| | |
|---|---|
| SignalP analysis: | Cleavage site between residues 36 and 37 |
| PSORT II analysis: | |

| | |
|---|---|
| PSG: | a new signal peptide prediction method |
| | N-region: length 9; pos.chg 2; neg.chg 0 |
| | H-region: length 3; peak value −5.40 |
| | PSG score: −9.80 |
| GvH: | von Heijne's method for signal seq. recognition |
| | GvH score (threshold: −2.1): 2.53 |
| | possible cleavage site: between 35 and 36 |

>>>Seems to have no N-terminal signal peptide

| ALOM: | Klein et al's method for TM region allocation | | | |
|---|---|---|---|---|
| | Init position for calculation: 1 | | | |
| | Tentative number of TMS(s) for the threshold 0.5: 0 | | | |
| | number of TMS(s) . . . fixed | | | |
| | PERIPHERAL Likelihood = 2.97 (at 20) | | | |
| | ALOM score: 2.97 (number of TMSs: 0) | | | |
| MITDISC: | discrimination of mitochondrial targeting seq | | | |
| | R content: | 3 | Hyd Moment (75): | 7.36 |
| | Hyd Moment (95): | 6.26 | G content: | 6 |
| | D/E content: | 1 | S/T content: | 4 |
| | Score: −3.72 | | | |

| | |
|---|---|
| Gavel: | prediction of cleavage sites for mitochondrial preseq |
| | R-2 motif at 49 TRG\|SV |

NUCDISC: discrimination of nuclear localization signals

| | |
|---|---|
| | pat4: none |
| | pat7: none |
| | bipartite: none |
| | content of basic residues: 8.4% |
| | NLS Score: −0.47 |
| KDEL: | ER retention motif in the C-terminus: none |

ER Membrane Retention Signals:

| | |
|---|---|
| | XXRR-like motif in the N-terminus: PGPR |
| | KKXX-like motif in the C-terminus: MNGK |
| SKL: | peroxisomal targeting signal in the C-terminus: none |
| PTS2: | 2nd peroxisomal targeting signal: none |

VAC: possible vacuolar targeting motif: none
RNA-binding motif: none
Actinin-type actin-binding motif:

| | |
|---|---|
| | type 1: none |
| | type 2: none |
| NMYR: | N-myristoylation pattern: none |

Prenylation motif: none
memYQRL: transport motif from cell surface to Golgi: none
Tyrosines in the tail: none
Dileucine motif in the tail: none
checking 63 PROSITE DNA binding motifs: none
checking 71 PROSITE ribosomal protein motifs: none
checking 33 PROSITE prokaryotic DNA binding motifs: none

| | |
|---|---|
| NNCN: | Reinhardt's method for Cytoplasmic/Nuclear discrimination |
| | Prediction: cytoplasmic |
| | Reliability: 76.7 |
| COIL: | Lupas's algorithm to detect coiled-coil regions |
| | total: 0 residues |

--------------------------
Final Results (k = 9/23)

60.9%: mitochondrial
17.4%: cytoplasmic
17.4%: nuclear
4.3%: peroxisomal

>>prediction for CG102348-01 is mit (k = 23)

[0359] A search of the NOV3a protein against the Geneseq database, a proprietary database that contains sequences published in patents and patent publication, yielded several homologous proteins shown in Table 3D.

TABLE 3D
Geneseq Results for NOV3a

| | | NOV3a | Identities/ | |
|---|---|---|---|---|
| | | Residues/ | Similarities for | |
| Geneseq | Protein/Organism/Length | Match | the Matched | Expect |
| Identifier | [Patent #, Date] | Residues | Region | Value |
| AAU08683 | Human FCTR5a polypeptide | 1 . . . 487 | 485/487 (99%) | 0.0 |
| | sequence - Homo sapiens, 487 | 1 . . . 487 | 487/487 (99%) | |
| | aa. [WO200166747-A2, 13-SEP- | | | |
| | 2001] | | | |
| AAU08684 | Human FCTR5b polypeptide | 1 . . . 487 | 484/487 (99%) | 0.0 |
| | sequence - Homo sapiens, 487 | 1 . . . 487 | 487/487 (99%) | |
| | aa. [WO200166747-A2, 13-SEP- | | | |
| | 2001] | | | |
| AAB23624 | Human secreted protein SEQ ID | 24 . . . 487 | 464/464 (100%) | 0.0 |
| | NO: 48 - Homo sapiens, 464 aa. | 1 . . . 464 | 464/464 (100%) | |
| | [WO200049134-A1, 24-AUG- | | | |
| | 2000] | | | |
| AAB95642 | Human protein sequence SEQ ID | 1 . . . 425 | 423/425 (99%) | 0.0 |
| | NO: 18384 - Homo sapiens, 438 | 1 . . . 425 | 423/425 (99%) | |
| | aa. [EP1074617-A2, 07-FEB- | | | |
| | 2001] | | | |
| ABG65427 | Human albumin fusion protein | 24 . . . 413 | 389/390 (99%) | 0.0 |
| | #2102 - Homo sapiens, 396 aa. | 1 . . . 390 | 390/390 (99%) | |
| | [WO200177137-A1, 18-OCT- | | | |
| | 2001] | | | |

[0360] In a BLAST search of public sequence databases, the NOV3a protein was found to have homology to the proteins shown in the BLASTP data in Table 3E.

TABLE 3E
Public BLASTP Results for NOV3a

| | | NOV3a | Identities/ | |
|---|---|---|---|---|
| Protein | | Residues/ | Similarities for | |
| Accession | | Match | the Matched | Expect |
| Number | Protein/Organism/Length | Residues | Portion | Value |
| Q9NZP8 | Complement C1r-like | 1 . . . 487 | 487/487 (100%) | 0.0 |
| | proteinase - Homo sapiens | 1 . . . 487 | 487/487 (100%) | |
| | (Human), 487 aa. | | | |
| CAC88678 | Sequence 16 from Patent | 1 . . . 487 | 485/487 (99%) | 0.0 |
| | WO0166747 - Homo sapiens | 1 . . . 487 | 487/487 (99%) | |
| | (Human), 487 aa. | | | |
| Q9H804 | Hypothetical protein - Homo | 1 . . . 425 | 423/425 (99%) | 0.0 |
| | sapiens (Human), 438 aa. | 1 . . . 425 | 423/425 (99%) | |
| AAH35220 | Similar to complement | 189 . . . 483 | 176/303 (58%) | e-108 |
| | component - Homo sapiens | 400 . . . 701 | 226/303 (74%) | |
| | (Human), 705 aa. | | | |
| Q8J012 | Complement component 1, r | 189 . . . 483 | 176/303 (58%) | e-108 |
| | subcomponent - Homo sapiens | 144 . . . 445 | 226/303 (74%) | |
| | (Human), 449 aa (fragment). | | | |

[0361] PFam analysis indicates that the NOV3a protein contains the domains shown in the Table 3F.

TABLE 3F
Domain Analysis of NOV3a

| | | | |
|---|---|---|---|
| | | Identities/ | |
| | NOV3a | Similarities for | |
| Pfam Domain | Match Region | the Matched Region | Expect Value |

| | | | |
|---|---|---|---|
| CUB | 40 . . . 160 | 41/131 (31%) | 1.4e-06 |
| | | 88/131 (67%) | |
| trypsin | 245 . . . 479 | 87/270 (32%) | 2.1e-43 |
| | | 174/270 (64%) | |

### Example 4

[0362] The NOV4 clone was analyzed, and the nucleotide and encoded polypeptide sequences are shown in Table 4A.

TABLE 4A
NOV4 Sequence Analysis

| | | |
|---|---|---|
| NOV4a, CG125860-02 | SEQ ID NO: 53 | 1880 bp |

| | | |
|---|---|---|
| DNA Sequence | ORF Start: ATG at 24 | ORF Stop: TAA at 1563 |

TTACAACAGTGCCACTGACCCCTATGAGCCTGATGCTGGATGACCAACCCCCTATGGAGGCCCAGTAT
GCAGAGGAGGGCCCAGGACCTGGGATCTTCAGAGCAGAGCCTGGAGACCAGCAGCATCCCAGTAGGCC
AGACTGGGCCATAGGGGAAATGACAGGGTGGGGACAGTGGAGGGCAATCATCCTACATTCCCCGGATC
CTCCTTGGGGTCAGCCCCACATGATTGATGTTTCTCAGGCAGTGTGCTGGCGTTCCATGCGACGTGGC
TGTGCAGTGCTGGGAGCCCTGGGGCTGCTGGCCGGTGCAGGTGTTGGCTCATGGCTCCTAGTGCTGTA
TCTGTGTCCTGCTGCCTCTCAGCCCATTTCCGGGACCTTGCAGGATGAGGAGATAACTTTGAGCTGCT
CAGAGGCCAGCGCTGAGGAAGCTCTGCTCCCTGCACTTCCCAAAACACCTGCACTTCCCAAAACAGTA
TCTTTCAGAATAAACAGCGAAGACTTCTTGCTGGAAGCGCAAGTGAGGGATCAGCCACGCTGGCTCCT
GGTCTGCCATGAGGGCTGGAGCCCCGCCCTGGGGCTGCAGATCTGCTGGAGCCTTGGGCATCTCAGAC
TCACTCACCACAAGGGAGTAAACCTCACTGACATCAAACTCAACAGTTCCCAGGAGTTTGCTCAGCTC
TCTCCTAGACTGGGAGGCTTCCTGGAGGAGGCGTGGCAGCCCAGTAGGACTACTGAGGCTGTTAGGAA
CAACTGCACTTCTGGTCAAGTTGTTTCCCTCAGATGCTCTGAGTGTGGAGCGAGGCCCCTGGCTTCCC
GGATAGTTGGTGGGCAGTCTGTGGCTCCTGGGCGCTGGCCGTGGCAGGCCAGCGTGGCCCTGGGCTTC
CGGCACACGTGTGGGGGCTCTGTGCTAGCGCCACGCTGGGTGGTGACTGCTGCACATTGTATGCACAG
TTTCAGGCTGGCCCGCCTGTCCAGCTGGCGGGTTCATGCGGGGCTGGTCAGCCACAGTGCCGTCAGGC
CCCACCAAGGGGCTCTGGTGGAGAGGATTATCCCACACCCCCTCTACAGTGCCCAGAATCATGACTAC
GACGTCGCCCTCCTGAGGCTCCAGACCGCTCTCAACTTCTCAGACACTGTGGGCGCTGTGTGCCTGCC
GGCCAAGGAACAGCATTTTCCGAAGGGCTCGCGGTGCTGGGTGTCTGGCTGGGGCCACACCCACCCTA
GCCATACTTACAGCTCGGATATGCTCCAGGACACGGTGGTGCCCCTGCTCAGCACTCAGCTCTGCAAC
AGCTCTTGCGTGTACAGCGGAGCCCTCACCCCCCGCATGCTTTGCGCTGGCTACCTGGACGGAAGGGC
TGATGCATGCCAGGGAGATAGCGGGGGCCCCCTAGTGTGCCCAGATGGGGACACATGGCGCCTAGTGG
GGGTGGTCAGCTGGGGGCGTGGCTGCGCAGAGCCCAATCACCCAGGTGTCTACGCCAAGGTAGCTGAG
TTTCTGGACTGGATCCATGACACTGCTCAGGTGAGTGTGGGGGCAGGAGTAGGGCAGGGAGATTTCTA
AAGGACCTGCCCTCGAATGCAAGGAACCTTACCCCTTAGGCCCGGGCCCTGCTGGGGACTGGGGAGGG
TGCTAGGACATATTCCCCAGAGTGAGTGGAGGAAGAAGTGAAGCTTAAACATGGAATCCATTGGATTT
CTATCAGTTTAAGGATGAACTGGGTAAGAGTATGCCTGAGTTTGTATCCCAGATCTACCATTTCCTGT
GTCGACCTTTGGCAAATTTCTAACTTTGTTAAACCTTAATTTCCTGATAATAACCATGATGGCTACTT
ATATGCTATTGTTATATGCTATTAAATAAGACCCGTACAATGCC

NOV4a, CG125860-02

| | | | |
|---|---|---|---|
| Protein Sequence | SEQ ID NO: 54 | 513 aa | MW at 55531.5kD |

MSLMLDDQPPMEAQYAEEGPGPGIFRAEPGDQQHPSRPDWAIGEMTGWGQWRAIILHSPDPPWGQPHM
IDVSQAVCWRSMRRGCAVLGALGLLAGAGVGSWLLVLYLCPAASQPISGTLQDEEITLSCSEASAEEA
LLPALPKTPALPKTVSFRINSEDFLLEAQVRDQPRWLLVCHEGWSPALGLQICWSLGHLRLTHHKGVN
LTDIKLNSSQEFAQLSPRLGGFLEEAWQPSRTTEAVRNNCTSGQVVSLRCSECGARPLASRIVGGQSV
APGRWPWQASVALGFRHTCGGSVLAPRWVVTAAHCMHSFRLARLSSWRVHAGLVSHSAVRPHQGALVE
RIIPHPLYSAQNHDYDVALLRLQTALNFSDTVGAVCLPAKEQHFPKGSRCWVSGWGHTHPSHTYSSDM
LQDTVVPLLSTQLCNSSCVYSGALTPRMLCAGYLDGRADACQGDSGGPLVCPDGDTWRLVGVVSWGRG
CAEPNHPGVYAKVAEFLDWIHDTAQVSVGAGVGQGDF

| | | |
|---|---|---|
| NOV4b, CG125860-01 | SEQ ID NO: 55 | 1787 bp |

| | | |
|---|---|---|
| DNA Sequence | ORF Start: ATG at 54 | ORF Stop: TAA at 1470 |

GCGGAACATTGCCTAGTAGACCCTGAGGCTTTACAACAGTGCCACTGACCCCTATGAGCCTGATGCTG
GATGACCAACCCCCTATGGAGGCCCAGTATGCAGAGGAGGGCCCAGGACCTGGGATCTTCAGAGCAGA
GCCTGGAGACCAGCAGCATCCCATTTCTCAGGCGGTGTGCTGGCGTTCCATGCGACGTGGCTGTGCAG
TGCTGGGAGCCCTGGGGCTGCTGGCCGGTGCAGGTGTTGGCTCATGGCTCCTAGTGCTGTATCTGTGT
CCTGCTGCCTCTCAGCCCATTTCCGGGACCTTGCAGGATGAGGAGATAACTTTGAGCTGCTCAGAGGC
CAGCGCTGAGGAAGCTCTGCTCCCTGCACTTCCCAAAACAGTATCTTTCAGAATAAACAGCGAAGACT
TCTTGCTGGAAGCGCAAGTGAGGGATCAGCCACGCTGGCTCCTGGTCTGCCATGAGGGCTGGAGCCCC
GCCCTGGGGCTGCAGATCTGCTGGAGCCTTGGGCATCTCAGACTCACTCACCACAAGGGAGTAAACCT
CACTGACATCAAACTCAACAGTTCCCAGGAGTTTGCTCAGCTCTCTCCTAGACTGGGAGGCTTCCTGG
AGGAGGCGTGGCAGCCCAGTAGGACTACTGAGGCTGTTAGGAACAACTGCACTTCTGGTCAAGTTGTT
TCCCTCAGATGCTCTGAGTGTGGAGCGAGGCCCCTGGCTTCCCGGATAGTTGGTGGGCAGTCTGTGGC
TCCTGGGCGCTGGCCGTGGCAGGCCAGCGTGGCCCTGGGCTTCCGGCACACGTGTGGGGGCTCTGTGC
TAGCGCCACGCTGGGTGGTGACTGCTGCACATTGTATGCACAGTTTCAGGCTGGCCCGCCTGTCCAGC
TGGCGGGTTCATGCGGGGCTGGTCAGCCACAGTGCCGTCAGGCCCCACCAAGGGGCTCTGGTGGAGAG
GATTATCCCACACCCCCTCTACAGTGCCCAGAATCATGACTACGACGTCGCCCTCCTGAGGCTCCAGA
CCGCTCTCAACTTCTCAGACACTGTGGGCGCTGTGTGCCTGCCGGCCAAGGAACAGCATTTTCCGAAG
GGCTCGCGGTGCTGGGTGTCTGGCTGGGGCCACACCCACCCTAGCCATACTTACAGCTCGGATATGCT
CCAGGACACGGTGGTGCCCCTGCTCAGCACTCAGCTCTGCAACAGCTCTTGCGTGTACAGCGGAGCCC
TCACCCCCCGCATGCTTTGCGCTGGCTACCTGGACGGAAGGGCTGATGCATGCCAGGGAGATAGCGGG
GGCCCCCTAGTGTGCCCAGATGGGGACACATGGCGCCTAGTGGGGGTGGTCAGCTGGGGGCGTGGCTG
CGCAGAGCCCAATCACCCAGGTGTCTACGCCAAGGTAGCTGAGTTTCTGGACTGGATCCATGACACTG
CTCAGGTGAGTGTGGGGGCAGGAGTAGGGCAGGGAGATTTCTAAAGGACCTGCCCTCGAATGCAAGGA
ACCTTACCCCTTAGGCCCGGGCCCTGCTGGGGACTGGGGAGGGTGCTAGGACATATTCCCCAGAGTGA
GTGGAGGAAGAAGTGAAGCTTAAACATGGAATCCATTGGATTTCTATCAGTTTAAGGATGAACTGGGT
AAGAGTATGCCTGAGTTTGTATCCCAGATCTACCATTTCCTGTGTCGACCTTTGGCAAATTTCTAACT
TTGTTAAACCTTAATTTCCTGATAATAACCATGATGGCTACTTATATGCTATTGTTATATGCTATTAA
ATAAGACCCGTACAATGCC

NOV4b, CG125860-01

| | | | |
|---|---|---|---|
| Protein Sequence | SEQ ID NO: 56 | 472 aa | MW at 50916.3kD |

MSLMLDDQPPMEAQYAEEGPGPGIFPAEPGDQQHPISQAVCWRSMRRGCAVLGALGLLAGAGVGSWLL
VLYLCPAASQPISGTLQDEEITLSCSEASAEEALLPALPKTVSFRINSEDFLLEAQVRDQPRWLLVCH
EGWSPALGLQICWSLGHLRLTHHKGVNLTDIKLNSSQEFAQLSPRLGGFLEEAWQPSRTTEAVRNNCT
SGQVVSLRCSECGARPLASRIVGGQSVAPGRWPWQASVALGFRHTCGGSVLAPRWVVTAAHCMHSFRL
ARLSSWRVHAGLVSHSAVRPHQGAINERIIPHPLYSAQNHDYDVALLRLQTALNFSDTVGAVCLPAKE
QHFPKGSRCWVSGWGHTHPSHTYSSDMLQDTVVPLLSTQLCNSSCVYSGALTPRNLCAGYLDGRADAC
QGDSGGPLVCPDGDTWRLVGVVSWGRGCAEPNHPGVYAKVAEFLDWIHDTAQVSVGAGVGQGDF

| | |
|---|---|
| SEQ ID NO: 57 | 1880 bp |

| | | |
|---|---|---|
| NOV4c, SNP13376012 of | ORF Start: ATG at 24 | ORF Stop: TAA at 1563 |

| | | |
|---|---|---|
| CG125860-02, DNA Sequence | SNP Pos: 36 | SNP Change: C to T |

TTACAACAGTGCCACTGACCCCTATGAGCCTGATGTTGGATGACCAACCCCCTATGGAGGCCCAGTAT
GCAGAGGAGGGCCCAGGACCTGGGATCTTCAGAGCAGAGCCTGGAGACCAGCAGCATCCCAGTAGGCC
AGACTGGGCCATAGGGGAAATGACAGGGTGGGGACAGTGGAGGGCAATCATCCTACATTCCCCGGATC
CTCCTTGGGGTCAGCCCCACATGATTGATGTTTCTCAGGCAGTGTGCTGGCGTTCCATGCGACGTGGC
TGTGCAGTGCTGGGAGCCCTGGGGCTGCTGGCCGGTGCAGGTGTTGGCTCATGGCTCCTAGTGCTGTA
TCTGTGTCCTGCTGCCTCTCAGCCCATTTCCGGGACCTTGCAGGATGAGGAGATAACTTTGAGCTGCT
CAGAGGCCAGCGCTGAGGAAGCTCTGCTCCCTGCACTTCCCAAAACACCTGCACTTCCCAAAACAGTA
TCTTTCAGAATAAACAGCGAAGACTTCTTGCTGGAAGCGCAAGTGAGGGATCAGCCACGCTGGcTCCT
GGTCTGCCATGAGGGCTGGAGCCCCGCCCTGGGGCTGCAGATCTGCTGGAGCCTTGGGCATCTCAGAC
TCACTCACCACAAGGGAGTAAACCTCACTGACATCAAACTCAACAGTTCCCAGGAGTTTGCTCAGCTC
TCTCCTAGACTGGGAGGCTTCCTGGAGGAGGCGTGGCAGCCCAGTAGGACTACTGAGGCTGTTAGGAA
CAACTGCACTTCTGGTCAAGTTGTTTCCCTCAGATGCTCTGAGTGTGGAGCGAGGCCCCTGGCTTCCC
GGATAGTTGGTGGGCAGTCTGTGGCTCCTGGGCGCTGGCCGTGGCAGGCCAGCGTGGCCCTGGGCTTC
CGGCACACGTGTGGGGGCTCTGTGCTAGCGCCACGCTGGGTGGTGACTGCTGCACATTGTATGCACAG
TTTCAGGCTGGCCCGCCTGTCCAGCTGGCGGGTTCATGCGGGGCTGGTCAGCCACAGTGCCGTCAGGC
CCCACCAAGGGGCTCTGGTGGAGAGGATTATCCCACACCCCCTCTACAGTGCCCAGAATCATGACTAC
GACGTCGCCCTCCTGAGGCTCCAGACCGCTCTCAACTTCTCAGACACTGTGGGCGCTGTGTGCCTGCC
GGCCAAGGAACAGCATTTTCCGAAGGGCTCGCGGTGCTGGGTGTCTGGCTGGGGCCACACCCACCCTA
GCCATACTTACAGCTCGGATATGCTCCAGGACACGGTGGTGCCCCTGCTCAGCACTCAGCTCTGCAAC
AGCTCTTGCGTGTACAGCGGAGCCCTCACCCCCCGCATGCTTTGCGCTGGCTACCTGGACGGAAGGGC
TGATGCATGCCAGGGAGATAGCGGGGGCCCCCTAGTGTGCCCAGATGGGGACACATGGCGCCTAGTGG
GGGTGGTCAGCTGGGGGCGTGGCTGCGCAGAGCCCAATCACCCAGGTGTCTACGCCAAGGTAGCTGAG
TTTCTGGACTGGATCCATGACACTGCTCAGGTGAGTGTGGGGGCAGGAGTAGGGCAGGGAGATTTCTA
AAGGACCTGCCCTCGAATGCAAGGAACCTTACCCCTTAGGCCCGGGCCCTGCTGGGGACTGGGGAGGG
TGCTAGGACATATTCCCCAGAGTGAGTGGAGGAAGAAGTGAAGCTTAAACATGGAATCCATTGGATTT
CTATCAGTTTAAGGATGAACTGGGTAAGAGTATGCCTGAGTTTGTATCCCAGATCTACCATTTCCTGT
GTCGACCTTTGGCAAATTTCTAACTTTGTTAAACCTTAATTTCCTGATAATAACCATGATGGCTACTT
ATATGCTATTGTTATATGCTATTAAATAAGACCCGTACAATGCC

| | | |
|---|---|---|
| NOV4c, SNP13376012 of | SEQ ID NO: 58 | MW at 55531.5kD |

| | | | |
|---|---|---|---|
| CG125860-02, Protein Sequence | SNP Pos: 5 | 513 aa | SNP Change: Leu to Leu |

MSLMLDDQPPMEAQYAEEGPGPGIFRAEPGDQQHPSRPDWAIGEMTGWGQWRAIILHSPDPPWGQPHM
IDVSQAVCWRSMRRGCAVLGALGLLAGAGVGSWLLVLYLCPAASQPISGTLQDEEITLSCSEASAEEA
LLPAIPKTPALPKTVSFRINSEDFLLEAQVRDQPRWLLVCHEGWSPALGLQICWSLGHLRLTHHKGVN
LTDIKLNSSQEFAQLSPRLGGFLEEAWQPSRTTEAVRNNCTSGQVVSLRCSECGARPLASRIVGGQSV
APGRWPWQASVALGFRHTCGGSVLAPRWVVTAAHCMHSFRLARLSSWRVHAGLVSHSAVRPHQGALVE
RIIPHPLYSAQNHDYDVALLRLQTALNFSDTVGAVCLPAKEQHFPKGSRCWVSGWGHTHPSHTYSSDM
LQDTVVPLLSTQLCNSSCVYSGALTPRMLCAGYLDGRADACQGDSGGPLVCPDGDTWRLVGVVSWGRG
CAEPNHPGVYAKVAEFLDWIHDTAQVSVGAGVGQGDF

| | |
|---|---|
| SEQ ID NO: 59 | 1880 bp |

| | | |
|---|---|---|
| NOV4d, SNP13376014 of | ORF Start: ATG at 24 | ORF Stop: TAA at 1563 |

| | | |
|---|---|---|
| CG125860-02, DNA Sequence | SNP Pos: 265 | SNP Change: G to A |

TTACAACAGTGCCACTGACCCCTATGAGCCTGATGCTGGATGACCAACCCCCTATGGAGGCCCAGTAT
GCAGAGGAGGGCCCAGGACCTGGGATCTTCAGAGCAGAGCCTGGAGACCAGCAGCATCCCAGTAGGCC
AGACTGGGCCATAGGGGAAATGACAGGGTGGGGACAGTGGAGGGCAATCATCCTACATTCCCCGGATC
CTCCTTGGGGTCAGCCCCACATGATTGATGTTTCTCAGGCAGTGTGCTGGCGTTCCATGCAACGTGGC
TGTGCAGTGCTGGGAGCCCTGGGGCTGCTGGCCGGTGCAGGTGTTGGCTCATGGCTCCTAGTGCTGTA
TCTGTGTCCTGCTGCCTCTCAGCCCATTTCCGGGACCTTGCAGGATGAGGAGATAACTTTGAGCTGCT
CAGAGGCCAGCGCTGAGGAAGCTCTGCTCCCTGCACTTCCCAAAACACCTGCACTTCCCAAAACAGTA
TCTTTCAGAATAAACAGCGAAGACTTCTTGCTGGAAGCGCAAGTGAGGGATCAGCCACGCTGGCTCCT
GGTCTGCCATGAGGGCTGGAGCCCCGCCCTGGGGCTGCAGATCTGCTGGAGCCTTGGGCATCTCAGAC
TCACTCACCACAAGGGAGTAAACCTCACTGACATCAAACTCAACAGTTCCCAGGAGTTTGCTCAGCTC
TCTCCTAGACTGGGAGGCTTCCTGGAGGAGGCGTGGCAGCCCAGTAGGACTACTGAGGCTGTTAGGAA
CAACTGCACTTCTGGTCAAGTTGTTTCCCTCAGATGCTCTGAGTGTGGAGCGAGGCCCCTGGCTTCCC
GGATAGTTGGTGGGCAGTCTGTGGCTCCTGGGCGCTGGCCGTGGCAGGCCAGCGTGGCCCTGGGCTTC
CGGCACACGTGTGGGGGCTCTGTGCTAGCGCCACGCTGGGTGGTGACTGCTGCACATTGTATGCACAG
TTTCAGGCTGGCCCGCCTGTCCAGCTGGCGGGTTCATGCGGGGCTGGTCAGCCACAGTGCCGTCAGGC
CCCACCAAGGGGCTCTGGTGGAGAGGATTATCCCACACCCCCTCTACAGTGCCCAGAATCATGACTAC
GACGTCGCCCTCCTGAGGCTCCAGACCGCTCTCAACTTCTCAGACACTGTGGGCGCTGTGTGCCTGCC
GGCCAAGGAACAGCATTTTCCGAAGGGCTCGCGGTGCTGGGTGTCTGGCTGGGGCCACACCCACCCTA
GCCATACTTACAGCTCGGATATGCTCCAGGACACGGTGGTGCCCCTGCTCAGCACTCAGCTCTGCAAC
AGCTCTTGCGTGTACAGCGGAGCCCTCACCCCCCGCATGCTTTGCGCTGGCTACCTGGACGGAAGGGC
TGATGCATGCCAGGGAGATAGCGGGGGCCCCCTAGTGTGCCCAGATGGGGACACATGGCGCCTAGTGG
GGGTGGTCAGCTGGGGGCGTGGCTGCGCAGAGCCCAATCACCCAGGTGTCTACGCCAAGGTAGCTGAG
TTTCTGGACTGGATCCATGACACTGCTCAGGTGAGTGTGGGGGCAGGAGTAGGGCAGGGAGATTTCTA
AAGGACCTGCCCTCGAATGCAAGGAACCTTACCCcTTAGGCCCGGGCCCTGCTGGGGACTGGGGAGGG
TGCTAGGACATATTCCCCAGAGTGAGTGGAGGAAGAAGTGAAGCTTAAACATGGAATCCATTGGATTT
CTATCAGTTTAAGGATGAACTGGGTAAGAGTATGCCTGAGTTTGTATCCCAGATCTACCATTTCCTGT
GTCGACCTTTGGCAAATTTCTAACTTTGTTAAACCTTAATTTCCTGATAATAACCATGATGGCTACTT
ATATGCTATTGTTATATGCTATTAAATAAGACCCGTACAATGCC

| | | |
|---|---|---|
| NOV4d, SNP13376014 of | SEQ ID NO: 60 | MW at 55503.5kD |

| | | | |
|---|---|---|---|
| CG125860-02, Protein Sequence | SNP Pos: 81 | 513 aa | SNP Change: Arg to Gln |

MSLMLDDQPPMEAQYAEEGPGPGIFRAEPGDQQHPSRPDWAIGEMTGWGQWRAIILHSPDPPWGQPHM
IDVSQAVCWRSMQRGCAVLGALGLLAGAGVGSWLLVLYLCPAASQPISGTLQDEEITLSCSEASAEEA
LLPALPKTPALPKTVSFRINSEDFLLEAQVRDQPRWLLVCHEGWSPALGLQICWSLGHLRLTHHKGVN
LTDIKLNSSQEFAQLSPRLGGFLEEAWQPSRTTEAVRNNCTSGQVVSLRCSECGARPLASRIVGGQSV
APGRWPWQASVALGFRHTCGGSVLAPRWVVTAAHCMHSFRLARLSSWRVHAGLVSHSAVRPHQGALVE
RIIPHPLYSAQNHDYDVALLRLQTALNFSDTVGAVCLPAKEQHFPKGSRCWVSGWGHTHPSHTYSSDM
LQDTVVPLLSTQLCNSSCVYSGALTPRMLCAGYLDGRADACQGDSGGPLVCPDGDTWRLVGVVSWGRG
CAEPNHPGVYAKVAEFLDWIHDTAQVSVGAGVGQGDF

| | |
|---|---|
| SEQ ID NO: 61 | 1880 bp |

| | | |
|---|---|---|
| NOV4e, SNP13376015 of | ORF Start: ATG at 24 | ORF Stop: TAA at 1563 |

| | | |
|---|---|---|
| CG125860-02, DNA Sequence | SNP Pos: 827 | SNP Change: T to C |

TTACAACAGTGCCACTGACCCCTATGAGCCTGATGCTGGATGACCAACCCCCTATGGAGGCCCAGTAT
GCAGAGGAGGGCCCAGGACCTGGGATCTTCAGAGCAGAGCCTGGAGACCAGCAGCATCCCAGTAGGCC
AGACTGGGCCATAGGGGAAATGACAGGGTGGGGACAGTGGAGGGCAATCATCCTACATTCCCCGGATC
CTCCTTGGGGTCAGCCCCACATGATTGATGTTTCTCAGGCAGTGTGCTGGCGTTCCATGCGACGTGGC
TGTGCAGTGCTGGGAGCCCTGGGGCTGCTGGCCGGTGCAGGTGTTGGCTCATGGCTCCTAGTGCTGTA
TCTGTGTCCTGCTGCCTCTCAGCCCATTTCCGGGACCTTGCAGGATGAGGAGATAACTTTGAGCTGCT
CAGAGGCCAGCGCTGAGGAAGCTCTGcTCCCTGCACTTCCCAAAACACCTGCACTTCCCAAAACAGTA
TCTTTCAGAATAAACAGCGAAGACTTCTTGCTGGAAGCGCAAGTGAGGGATCAGCCACGCTGGCTCCT
GGTCTGCCATGAGGGCTGGAGCCCCGCCCTGGGGCTGCAGATCTGCTGGAGCCTTGGGCATCTCAGAC
TCACTCACCACAAGGGAGTAAACCTCACTGACATCAAACTCAACAGTTCCCAGGAGTTTGCTCAGCTC
TCTCCTAGACTGGGAGGCTTCCTGGAGGAGGCGTGGCAGCCCAGTAGGACTACTGAGGCTGTTAGGAA
CAACTGCACTTCTGGTCAAGTTGTTTCCCTCAGATGCTCTGAGTGTGGAGCGAGGCCCCTGGCTTCCC
GGATAGTTGGCGGGCAGTCTGTGGCTCCTGGGCGCTGGCCGTGGCAGGCCAGCGTGGCCCTGGGCTTC
CGGCACACGTGTGGGGGCTCTGTGCTAGCGCCACGCTGGGTGGTGACTGCTGCACATTGTATGCACAG
TTTCAGGCTGGCCCGCCTGTCCAGCTGGCGGGTTCATGCGGGGCTGGTCAGCCACAGTGCCGTCAGGC
CCCACCAAGGGGCTCTGGTGGAGAGGATTATCCCACACCCCCTCTACAGTGCCCAGAATCATGACTAC
GACGTCGCCCTCCTGAGGCTCCAGACCGCTCTCAACTTCTCAGACACTGTGGGCGCTGTGTGCCTGCC
GGCCAAGGAACAGCATTTTCCGAAGGGCTCGCGGTGCTGGGTGTCTGGCTGGGGCCACACCCACCCTA
GCCATACTTACAGCTCGGATATGCTCCAGGACACGGTGGTGCCCCTGCTCAGCACTCAGCTCTGCAAC
AGCTCTTGCGTGTACAGCGGAGCCCTCACCCCCCGCATGCTTTGCGCTGGCTACCTGGACGGAAGGGC
TGATGCATGCCAGGGAGATAGCGGGGGCCCCCTAGTGTGCCCAGATGGGGACACATGGCGCCTAGTGG
GGGTGGTCAGCTGGGGGCGTGGCTGCGCAGAGCCCAATCACCCAGGTGTCTACGCCAAGGTAGCTGAG
TTTCTGGACTGGATCCATGACACTGCTCAGGTGAGTGTGGGGGCAGGAGTAGGGCAGGGAGATTTCTA
AAGGACCTGCCCTCGAATGCAAGGAACCTTACCCCTTAGGCCCGGGCCCTGCTGGGGACTGGGGAGGG
TGCTAGGACATATTCCCCAGAGTGAGTGGAGGAAGAAGTGAAGCTTAAACATGGAATCCATTGGATTT
CTATCAGTTTAAGGATGAACTGGGTAAGAGTATGCCTGAGTTTGTATCCCAGATCTACCATTTCCTGT
GTCGACCTTTGGCAAATTTCTAACTTTGTTAAACCTTAATTTCCTGATAATAACCATGATGGCTACTT
ATATGCTATTGTTATATGCTATTAAATAAGACCCGTACAATGCC

| | | |
|---|---|---|
| NOV4e, SNP13376015 of | SEQ ID NO: 62 | MW at 55531.5kD |

| | | | |
|---|---|---|---|
| CG125860-02, Protein Sequence | SNP Pos: 268 | 513 aa | SNP Change: Gly to Gly |

MSLMLDDQPPMEAQYAEEGPGPGIFRAEPGDQQHPSRPDWAIGEMTGWGQWRAIILHSPDPPWGQPHM
IDVSQAVCWRSMRRGCAVLGALGLLAGAGVGSWLLVLYLCPAASQPISGTLQDEEITLSCSEASAEEA
LLPALPKTPALPKTVSFRINSEDFLLEAQVRDQPRWLLVCHEGWSPALGLQICWSLGHLRLTHHKGVN
LTDIKLNSSQEFAQLSPRLGGFLEEAWQPSRTTEAVRNNCTSGQVVSLRCSECGARPLASRIVGGQSV
APGRWPWQASVALGFRHTCGGSVLAPRWVVTAAHCNHSFRLARLSSWRVHAGLVSHSAVRPHQGALVE
RIIPHPLYSAQNHDYDVALLRLQTALNFSDTVGAVCLPAKEQHFPKGSRCWVSGWGHTHPSHTYSSDM
LQDTVVPLLSTQLCNSSCVYSGALTPRMLCAGYLDGRADACQGDSGGPLVCPDGDTWRLVGVVSWGRG
CAEPNHPGVYAKVAEFLDWIHDTAQVSVGAGVGQGDF

| | |
|---|---|
| SEQ ID NO: 63 | 1880 bp |

| | | |
|---|---|---|
| NOV4f, SNP13376016 of | ORF Start: ATG at 24 | ORF Stop: TAA at 1563 |

| | | |
|---|---|---|
| CG125860-02, DNA Sequence | SNP Pos: 830 | SNP Change: G to T |

TTACAACAGTGCCACTGACCCCTATGAGCCTGATGCTGGATGACCAACCCCCTATGGAGGCCCAGTAT
GCAGAGGAGGGCCCAGGACCTGGGATCTTCAGAGCAGAGCCTGGAGACCAGCAGCATCCCAGTAGGCC
AGACTGGGCCATAGGGGAAATGACAGGGTGGGGACAGTGGAGGGCAATCATCCTACATTCCCCGGATC
CTCCTTGGGGTCAGCCCCACATGATTGATGTTTCTCAGGCAGTGTGCTGGCGTTCCATGCGACGTGGC
TGTGCAGTGCTGGGAGCCCTGGGGCTGCTGGCCGGTGCAGGTGTTGGCTCATGGCTCCTAGTGCTGTA
TCTGTGTCCTGCTGCCTCTCAGCCCATTTCCGGGACCTTGCAGGATGAGGAGATAACTTTGAGCTGCT
CAGAGGCCAGCGCTGAGGAAGCTCTGCTCCCTGCACTTCCCAAAACACCTGCACTTCCCAAAACAGTA
TCTTTCAGAATAAACAGCGAAGACTTCTTGCTGGAAGCGCAAGTGAGGGATCAGCCACGCTGGCTCCT
GGTCTGCCATGAGGGCTGGAGCCCCGCCCTGGGGCTGCAGATCTGCTGGAGCCTTGGGCATCTCAGAC
TCACTCACCACAAGGGAGTAAACCTCACTGACATCAAACTCAACAGTTCCCAGGAGTTTGCTCAGCTC
TCTCCTAGACTGGGAGGCTTCCTGGAGGAGGCGTGGCAGCCCAGTAGGACTACTGAGGCTGTTAGGAA
CAACTGCACTTCTGGTCAAGTTGTTTCCCTCAGATGCTCTGAGTGTGGAGCGAGGCCCCTGGCTTCCC
GGATAGTTGGTGGTCAGTCTGTGGCTCCTGGGCGCTGGCCGTGGCAGGCCAGCGTGGCCCTGGGCTTC
CGGCACACGTGTGGGGGCTCTGTGCTAGCGCCACGCTGGGTGGTGACTGCTGCACATTGTATGCACAG
TTTCAGGCTGGCCCGCCTGTCCAGCTGGCGGGTTCATGCGGGGCTGGTCAGCCACAGTGCCGTCAGGC
CCCACCAAGGGGCTCTGGTGGAGAGGATTATCCCACACCCCCTCTACAGTGCCCAGAATCATGACTAC
GACGTCGCCCTCCTGAGGCTCCAGACCGCTCTCAACTTCTCAGACACTGTGGGCGCTGTGTGCCTGCC
GGCCAAGGAACAGCATTTTCCGAAGGGCTCGCGGTGCTGGGTGTCTGGCTGGGGCCACACCCACCCTA
GCCATACTTACAGCTCGGATATGCTCCAGGACACGGTGGTGCCCCTGCTCAGCACTCAGCTCTGCAAC
AGCTCTTGCGTGTACAGCGGAGCCCTCACCCCCCGCATGCTTTGCGCTGGCTACCTGGACGGAAGGGC
TGATGCATGCCAGGGAGATAGCGGGGGCCCCCTAGTGTGCCCAGATGGGGACACATGGCGCCTAGTGG
GGGTGGTCAGCTGGGGGCGTGGCTGCGCAGAGCCCAATCACCCAGGTGTCTACGCCAAGGTAGCTGAG
TTTCTGGACTGGATCCATGACACTGCTCAGGTGAGTGTGGGGGCAGGAGTAGGGCAGGGAGATTTCTA
AAGGACCTGCCCTCGAATGCAAGGAACCTTACCCCTTAGGCCCGGGCCCTGCTGGGGACTGGGGAGGG
TGCTAGGACATATTCCCCAGAGTGAGTGGAGGAAGAAGTGAAGCTTAAACATGGAATCCATTGGATTT
CTATCAGTTTAAGGATGAACTGGGTAAGAGTATGCCTGAGTTTGTATCCCAGATCTACCATTTCCTGT
GTCGACCTTTGGCAAATTTCTAACTTTGTTAAACCTTAATTTCCTGATAATAACCATGATGGCTACTT
ATATGCTATTGTTATATGCTATTAAATAAGACCCGTACAATGCC

| | | |
|---|---|---|
| NOV4f, SNP13376016 of | SEQ ID NO: 64 | MW at 55531.5kD |

| | | | |
|---|---|---|---|
| CG125860-02, Protein Sequence | SNP Pos: 269 | 513 aa | SNP Change: Gly to Gly |

MSLMLDDQPPMEAQYAEEGPGPGIFRAEPGDQQHPSRPDWAIGEMTGWGQWRAIILHSPDPPWGQPHM
IDVSQAVCWRSMRRGCAVLGALGLLAGAGVGSWLLVLYLCPAASQPISGTLQDEEITLSCSEASAEEA
LLPALPKTPALPKTVSFRINSEDFLLEAQVRDQPRWLLVCHEGWSPALGLQICWSLGHLRLTHHKGVN
LTDIKLNSSQEFAQLSPRLGGFLEEAWQPSRTTEAVRNNCTSGQVVSLRCSECGARPLASRIVGGQSV
APGRWPWQASVALGFRHTCGGSVLAPRWVVTAAHCMHSFRLARLSSWRVHAGLVSHSAVRPHQGALVE
RIIPHPLYSAQNHDYDVALLRLQTALNFSDTVGAVCLPAKEQHFPKGSRCWVSGWGHTHPSHTYSSDM
LQDTVVPLLSTQLCNSSCVYSGALTPRHLCAGYLDGRADACQGDSGGPLVCPDGDTWRLVGVVSWGRG
CAEPNHPGVYAKVAEFLDWIHDTAQVSVGAGVGQGDF

| | |
|---|---|
| SEQ ID NO: 65 | 1880 bp |

| | | |
|---|---|---|
| NOV4g, SNP13376017 of | ORF Start: ATG at 24 | ORF Stop: TAA at 1563 |

| | | |
|---|---|---|
| CG125860-02, DNA Sequence | SNP Pos: 836 | SNP Change: T to C |

TTACAACAGTGCCACTGACCCCTATGAGCCTGATGCTGGATGACCAACCCCCTATGGAGGCCCAGTAT
GCAGAGGAGGGCCCAGGACCTGGGATCTTCAGAGCAGAGCCTGGAGACCAGCAGCATCCCAGTAGGCC
AGACTGGGCCATAGGGGAAATGACAGGGTGGGGACAGTGGAGGGCAATCATCCTACATTCCCCGGATC
CTCCTTGGGGTCAGCCCCACATGATTGATGTTTCTCAGGCAGTGTGCTGGCGTTCCATGCGACGTGGC
TGTGCAGTGCTGGGAGCCCTGGGGCTGCTGGCCGGTGCAGGTGTTGGCTCATGGCTCCTAGTGCTGTA
TCTGTGTCCTGCTGCCTCTCAGCCCATTTCCGGGACCTTGCAGGATGAGGAGATAACTTTGAGCTGCT
CAGAGGCCAGCGCTGAGGAAGCTCTGCTCCCTGCACTTCCCAAAACACCTGCACTTCCCAAAACAGTA
TCTTTCAGAATAAACAGCGAAGACTTCTTGCTGGAAGCGCAAGTGAGGGATCAGCCACGCTGGCTCCT
GGTCTGCCATGAGGGCTGGAGCCCCGCCCTGGGGCTGCAGATCTGCTGGAGCCITGGGCATCTCAGAC
TCACTCACCACAAGGGAGTAAACCTCACTGACATCAAACTCAACAGTTCCCAGGAGTTTGCTCAGCTC
TCTCCTAGACTGGGAGGCTTCCTGGAGGAGGCGTGGCAGCCCAGTAGGACTACTGAGGCTGTTAGGAA
CAACTGCACTTCTGGTCAAGTTGTTTCCCTCAGATGCTCTGAGTGTGGAGCGAGGCCCCTGGCTTCCC
GGATAGTTGGTGGGCAGTCCGTGGCTCCTGGGCGCTGGCCGTGGCAGGCCAGCGTGGCCCTGGGCTTC
CGGCACACGTGTGGGGGCTCTGTGCTAGCGCCACGCTGGGTGGTGACTGCTGCACATTGTATGCACAG
TTTCAGGCTGGCCCGCCTGTCCAGCTGGCGGGTTCATGCGGGGCTGGTCAGCCACAGTGCCGTCAGGC
CCCACCAAGGGGCTCTGGTGGAGAGGATTATCCCACACCCCCTCTACAGTGCCCAGAATCATGACTAC
GACGTCGCCCTCCTGAGGCTCCAGACCGCTCTCAACTTCTCAGACACTGTGGGCGCTGTGTGCCTGCC
GGCCAAGGAACAGCATTTTCCGAAGGGCTCGCGGTGCTGGGTGTCTGGCTGGGGCCACACCCACCCTA
GCCATACTTACAGCTCGGATATGCTCCAGGACACGGTGGTGCCCCTGCTCAGCACTCAGCTCTGCAAC
AGCTCTTGCGTGTACAGCGGAGCCCTCACCCCCCGCATGCTTTGCGCTGGCTACCTGGACGGAAGGGC
TGATGCATGCCAGGGAGATAGCGGGGGCCCCCTAGTGTGCCCAGATGGGGACACATGGCGCCTAGTGG
GGGTGGTCAGCTGGGGGCGTGGCTGCGCAGAGCCCAATCACCCAGGTGTCTACGCCAAGGTAGCTGAG
TTTCTGGACTGGATCCATGACACTGCTCAGGTGAGTGTGGGGGCAGGAGTAGGGCAGGGAGATTTCTA
AAGGACCTGCCCTCGAATGCAAGGAACCTTACCCCTTAGGCCCGGGCCCTGCTGGGGACTGGGGAGGG
TGCTAGGACATATTCCCCAGAGTGAGTGGAGGAAGAAGTGAAGCTTAAACATGGAATCCATTGGATTT
CTATCAGTTTAAGGATGAACTGGGTAAGAGTATGCCTGAGTTTGTATCCCAGATCTACCATTTCCTGT
GTCGACCTTTGGCAAATTTCTAACTTTGTTAAACCTTAATTTCCTGATAATAACCATGATGGCTACTT
ATATGCTATTGTTATATGCTATTAAATAAGACCCGTACAATGCC

| | | |
|---|---|---|
| NOV4g, SNP13376017 of | SEQ ID NO: 66 | MW at 55531.5kD |

| | | | |
|---|---|---|---|
| CG125860-02, Protein Sequence | SNP Pos: 271 | 513 aa | SNP Change: Ser to Ser |

MSLMLDDQPPMEAQYAEEGPGPGIFRAEPGDQQHPSRPDWAIGEMTGWGQWRAIILHSPDPPWGQPHM
IDVSQAVCWRSMRRGCAVLGALGLLAGAGVGSWLLVLYLCPAASQPISGTLQDEEITLSCSEASAEEA
LLPALPKTPALPKTVSFRINSEDFLLEAQVRDQPRWLLVCHEGWSPALGLQICWSLGHLRLTHHKGVN
LTDIKLNSSQEFAQLSPRLGGFLEEAWQPSRTTEAVRNNCTSGQVVSLRCSECGARPLASRIVGGQSV
APGRWPWQASVALGFRHTCGGSVLAPRWVVTAAHCMHSFRLARLSSWRVHAGLVSHSAVRPHQGALVE
RIIPHPLYSAQNHDYDVALLRLQTALNFSDTVGAVCLPAKEQHFPKGSRCWVSGWGHTHPSHTYSSDM
LQDTVVPLLSTQLCNSSCVYSGALTPRMLCAGYLDGRADACQGDSGGPLVCPDGDTWRLVGVVSWGRG
CAEPNHPGVYAKVAEFLDWIHDTAQVSVGAGVGQGDF

| | |
|---|---|
| SEQ ID NO: 67 | 1880 bp |

| | | |
|---|---|---|
| NOV4h, SNP13376011 of | ORF Start: ATG at 24 | ORF Stop: TAA at 1563 |

| | | |
|---|---|---|
| CG125860-02, DNA Sequence | SNP Pos: 869 | SNP Change: C to T |

TTACAACAGTGCCACTGACCCCTATGAGCCTGATGCTGGATGACCAACCCCCTATGGAGGCCCAGTAT
GCAGAGGAGGGCCCAGGACCTGGGATCTTCAGAGCAGAGCCTGGAGACCAGCAGCATCCCAGTAGGCC
AGACTGGGCCATAGGGGAAATGACAGGGTGGGGACAGTGGAGGGCAATCATCCTACATTCCCCGGATC
CTCCTTGGGGTCAGCCCCACATGATTGATGTTTCTCAGGCAGTGTGCTGGCGTTCCATGCGACGTGGC
TGTGCAGTGCTGGGAGCCCTGGGGCTGCTGGCCGGTGCAGGTGTTGGCTCATGGCTCCTAGTGCTGTA
TCTGTGTCCTGCTGCCTCTCAGCCCATTTCCGGGACCTTGCAGGATGAGGAGATAACTTTGAGCTGCT
CAGAGGCCAGCGCTGAGGAAGCTCTGCTCCCTGCACTTCCCAAAACACCTGCACTTCCCAAAACAGTA
TCTTTCAGAATAAACAGCGAAGACTTCTTGCTGGAAGCGCAAGTGAGGGATCAGCCACGCTGGCTCCT
GGTCTGCCATGAGGGCTGGAGCCCCGCCCTGGGGCTGCAGATCTGCTGGAGCCTTGGGCATCTCAGAC
TCACTCACCACAAGGGAGTAAACCTCACTGACATCAAACTCAACAGTTCCCAGGAGTTTGCTCAGCTC
TCTCCTAGACTGGGAGGCTTCCTGGAGGAGGCGTGGCAGCCCAGTAGGACTACTGAGGCTGTTAGGAA
CAACTGCACTTCTGGTCAAGTTGTTTCCCTCAGATGCTCTGAGTGTGGAGCGAGGCCCCTGGCTTCCC
GGATAGTTGGTGGGCAGTCTGTGGCTCCTGGGCGCTGGCCGTGGCAGGCCAGTGTGGCCCTGGGCTTC
CGGCACACGTGTGGGGGCTCTGTGCTAGCGCCACGCTGGGTGGTGACTGCTGCACATTGTATGCACAG
TTTCAGGCTGGCCCGCCTGTCCAGCTGGCGGGTTCATGCGGGGCTGGTCAGCCACAGTGCCGTCAGGC
CCCACCAAGGGGCTCTGGTGGAGAGGATTATCCCACACCCCCTCTACAGTGCCCAGAATCATGACTAC
GACGTCGCCCTCCTGAGGCTCCAGACCGCTCTCAACTTCTCAGACACTGTGGGCGCTGTGTGCCTGCC
GGCCAAGGAACAGCATTTTCCGAAGGGCTCGCGGTGCTGGGTGTCTGGCTGGGGCCACACCCACCCTA
GCCATACTTACAGCTCGGATATGCTCCAGGACACGGTGGTGCCCCTGCTCAGCACTCAGCTCTGCAAC
AGCTCTTGCGTGTACAGCGGAGCCCTCACCCCCCGCATGCTTTGCGCTGGCTACCTGGACGGAAGGGC
TGATGCATGCCAGGGAGATAGCGGGGGCCCCCTAGTGTGCCCAGATGGGGACACATGGCGCCTAGTGG
GGGTGGTCAGCTGGGGGCGTGGCTGCGCAGAGCCCAATCACCCAGGTGTCTACGCCAAGGTAGCTGAG
TTTCTGGACTGGATCCATGACACTGCTCAGGTGAGTGTGGGGGCAGGAGTAGGGCAGGGAGATTTCTA
AAGGACCTGCCCTCGAATGCAAGGAACCTTACCCCTTAGGCCCGGGCCCTGCTGGGGACTGGGGAGGG
TGCTAGGACATATTCCCCAGAGTGAGTGGAGGAAGAAGTGAAGCTTAAACATGGAATCCATTGGATTT
CTATCAGTTTAAGGATGAACTGGGTAAGAGTATGCCTGAGTTTGTATCCCAGATCTACCATTTCCTGT
GTCGACCTTTGGCAAATTTCTAACTTTGTTAAACCTTAATTTCCTGATAATAACCATGATGGCTACTT
ATATGCTATTGTTATATGCTATTAAATAAGACCCGTACAATGCC

| | | |
|---|---|---|
| NOV4h, SNP13376011 of | SEQ ID NO: 68 | MW at 55531.5kD |

| | | | |
|---|---|---|---|
| CG125860-02, Protein Sequence | SNP Pos: 282 | 513 aa | SNP Change: Ser to Ser |

MSLMLDDQPPMEAQYAEEGPGPGIFRAEPGDQQHPSRPDWAIGEMTGWGQWRAIILHSPDPPWGQPHM
IDVSQAVCWRSMRRGCAVLGALGLLAGAGVGSWLLVLYLCPAASQPISGTLQDEEITLSCSEASAEEA
LLPALPKTPALPKTVSFRINSEDFLLEAQVRDQPRWLLVCHEGWSPALGLQICWSLGHLRLTHHKGVN
LTDIKLNSSQEFAQLSPRLGGFLEEAWQPSRTTEAVRNNCTSGQVVSLRCSECGARPLASRIVGGQSV
APGRWPWQASVALGFRHTCGGSVLAPRWVVTAAHCMHSFRLARLSSWRVHAGLVSHSAVRPHQGALVE
RIIPHPLYSAQNHDYDVALLRLQTALNFSDTVGAVCLPAKEQHFPKGSRCWVSGWGHTHPSHTYSSDM
LQDTVVPLLSTOLCNSSCVYSGALTPRMLCAGYLDGRADACQGDSGGPLVCPDGDTWRLVGVVSWGRG
CAEPNHPGVYAKVAEFLDWIHDTAQVSVGAGVGQGDF

| | |
|---|---|
| SEQ ID NO: 69 | 1880 bp |

| | | |
|---|---|---|
| NOV4i, SNP13376018 of | ORF Start: ATG at 24 | ORF Stop: TAA at 1563 |

| | | |
|---|---|---|
| CG125860-02, DNA Sequence | SNP Pos: 975 | SNP Change: A to G |

TTACAACAGTGCCACTGACCCCTATGAGCCTGATGCTGGATGACCAACCCCCTATGGAGGCCCAGTAT
GCAGAGGAGGGCCCAGGACCTGGGATCTTCAGAGCAGAGCCTGGAGACCAGCAGCATCCCAGTAGGCC
AGACTGGGCCATAGGGGAAATGACAGGGTGGGGACAGTGGAGGGCAATCATCCTACATTCCCCGGATC
CTCCTTGGGGTCAGCCCCACATGATTGATGTTTCTCAGGCAGTGTGCTGGCGTTCCATGCGACGTGGC
TGTGCAGTGCTGGGAGCCCTGGGGCTGCTGGCCGGTGCAGGTGTTGGCTCATGGCTCCTAGTGCTGTA
TCTGTGTCCTGCTGCCTCTCAGCCCATTTCCGGGACCTTGCAGGATGAGGAGATAACTTTGAGCTGCT
CAGAGGCCAGCGCTGAGGAAGCTCTGCTCCCTGCACTTCCCAAAACACCTGCACTTCCCAAAACAGTA
TCTTTCAGAATAAACAGCGAAGACTTCTTGCTGGAAGCGCAAGTGAGGGATCAGCCACGCTGGCTCCT
GGTCTGCCATGAGGGCTGGAGCCCCGCCCTGGGGCTGCAGATCTGCTGGAGCCTTGGGCATCTCAGAC
TCACTCACCACAAGGGAGTAAACCTCACTGACATCAAACTCAACAGTTCCCAGGAGTTTGCTCAGCTC
TCTCCTAGACTGGGAGGCTTCCTGGAGGAGGCGTGGCAGCCCAGTAGGACTACTGAGGCTGTTAGGAA
CAACTGCACTTCTGGTCAAGTTGTTTCCCTCAGATGCTCTGAGTGTGGAGCGAGGCCCCTGGCTTCCC
GGATAGTTGGTGGGCAGTCTGTGGCTCCTGGGCGCTGGCCGTGGCAGGCCAGCGTGGCCCTGGGCTTC
CGGCACACGTGTGGGGGCTCTGTGCTAGCGCCACGCTGGGTGGTGACTGCTGCACATTGTATGCACAG
TTTCAGGCTGGCCCGCCTGTCCGGCTGGCGGGTTCATGCGGGGCTGGTCAGCCACAGTGCCGTCAGGC
CCCACCAAGGGGCTCTGGTGGAGAGGATTATCCCACACCCCCTCTACAGTGCCCAGAATCATGACTAC
GACGTCGCCCTCCTGAGGCTCCAGACCGCTCTCAACTTCTCAGACACTGTGGGCGCTGTGTGCCTGCC
GGCCAAGGAACAGCATTTTCCGAAGGGCTCGCGGTGCTGGGTGTCTGGCTGGGGCCACACCCACCCTA
GCCATACTTACAGCTCGGATATGCTCCAGGACACGGTGGTGCCCCTGCTCAGCACTCAGCTCTGCAAC
AGCTCTTGCGTGTACAGCGGAGCCCTCACCCCCCGCATGCTTTGCGCTGGCTACCTGGACGGAAGGGC
TGATGCATGCCAGGGAGATAGCGGGGGCCCCCTAGTGTGCCCAGATGGGGACACATGGCGCCTAGTGG
GGGTGGTCAGCTGGGGGCGTGGCTGCGCAGAGCCCAATCACCCAGGTGTCTACGCCAAGGTAGCTGAG
TTTCTGGACTGGATCCATGACACTGCTCAGGTGAGTGTGGGGGCAGGAGTAGGGCAGGGAGATTTCTA
AAGGACCTGCCCTCGAATGCAAGGAACCTTACCCCTTAGGCCCGGGCCCTGCTGGGGACTGGGGAGGG
TGCTAGGACATATTCCCCAGAGTGAGTGGAGGAAGAAGTGAAGCTTAAACATGGAATCCATTGGATTT
CTATCAGTTTAAGGATGAACTGGGTAAGAGTATGCCTGAGTTTGTATCCCAGATCTACCATTTCCTGT
GTCGACCTTTGGCAAATTTCTAACTTTGTTAAACCTTAATTTCCTGATAATAACCATGATGGCTACTT
ATATGCTATTGTTATATGCTATTAAATAAGACCCGTACAATGCC

| | | |
|---|---|---|
| NOV4i, SNP13376018 of | SEQ ID NO: 70 | MW at 55501.5kD |

| | | | |
|---|---|---|---|
| CG125860-02, Protein Sequence | SNP Pos: 318 | 513 aa | SNP Change: Ser to Gly |

MSLMLDDQPPMEAQYAEEGPGPGIFRAEPGDQQHPSRPDWAIGEMTGWGQWRAIILHSPDPPWGQPHM
IDVSQAVCWRSMRRGCAVLGALGLLAGAGVGSWLLVLYLCPAASQPISGTLQDEEITLSCSEASAEEA
LLPALPKTPALPKTVSFRINSEDFLLEAQVRDQPRWLLVCHEGWSPALGLQICWSLGHLRLTHHKGVN
LTDIKLNSSQEFAQLSPRLGGFLEEAWQPSRTTEAVRNNCTSGQVVSLRCSECGARPLASRIVGGQSV
APGRWPWQASVALGFRHTCGGSVLAPRWVVTAAHCMHSFRLARLSGWRVHAGLVSHSAVRPHQGALVE
RIIPHPLYSAQNHDYDVALLRLQTALNFSDTVGAVCLPAKEQHFPKGSRCWVSGWGHTHPSHTYSSDM
LQDTVVPLLSTQLCNSSCVYSGALTPRMLCAGYLDGRADACQGDSGGPLVCPDGDTWRLVGVVSWGRG
CAEPNHPGVYAKVAEFLDWIHDTAQVSVGAGVGQGDF

| | |
|---|---|
| SEQ ID NO: 71 | 1880 bp |

| | | |
|---|---|---|
| NOV4j, SNP13382467 of | ORF Start: ATG at 24 | ORF Stop: TAA at 1563 |

| | | |
|---|---|---|
| CG125860-02, DNA Sequence | SNP Pos: 1269 | SNP Change: C to T |

TTACAACAGTGCCACTGACCCCTATGAGCCTGATGCTGGATGACCAACCCCCTATGGAGGCCCAGTAT
GCAGAGGAGGGCCCAGGACCTGGGATCTTCAGAGCAGAGCCTGGAGACCAGCAGCATCCCAGTAGGCC
AGACTGGGCCATAGGGGAAATGACAGGGTGGGGACAGTGGAGGGCAATCATCCTACATTCCCCGGATC
CTCCTTGGGGTCAGCCCCACATGATTGATGTTTCTCAGGCAGTGTGCTGGCGTTCCATGCGACGTGGC
TGTGCAGTGCTGGGAGCCCTGGGGCTGCTGGCCGGTGCAGGTGTTGGCTCATGGCTCCTAGTGCTGTA
TCTGTGTCCTGCTGCCTCTCAGCCCATTTCCGGGACCTTGCAGGATGAGGAGATAACTTTGAGCTGCT
CAGAGGCCAGCGCTGAGGAAGCTCTGCTCCCTGCACTTCCCAAAACACCTGCACTTCCCAAAACAGTA
TCTTTCAGAATAAACAGCGAAGACTTCTTGCTGGAAGCGCAAGTGAGGGATCAGCCACGCTGGCTCCT
GTCTGCCATGAGGGCTGGAGCCCCGCCCCTGGGGCTGCAGATCTGCTGGAGCCTTGGGCATCTCAGAC
TCACTCACCACAAGGGAGTAAACCTCACTGACATCAAACTCAACAGTTCCCAGGAGTTTGCTCAGCTC
TCTCCTAGACTGGGAGGCTTCCTGGAGGAGGCGTGGCAGCCCAGTAGGACTACTGAGGCTGTTAGGAA
CAACTGCACTTCTGGTCAAGTTGTTTCCCTCAGATGCTCTGAGTGTGGAGCGAGGCCCCTGGCTTCCC
GGATAGTTGGTGGGCAGTCTGTGGCTCCTGGGCGCTGGCCGTGGCAGGCCAGCGTGGCCCTGGGCTTC
CGGCACACGTGTGGGGGCTCTGTGCTAGCGCCACGCTGGGTGGTGACTGCTGCACATTGTATGCACAG
TTTCAGGCTGGCCCGCCTGTCCAGCTGGCGGGTTCATGCGGGGCTGGTCAGCCACAGTGCCGTCAGGC
CCCACCAAGGGGCTCTGGTGGAGAGGATTATCCCACACCCCCTCTACAGTGCCCAGAATCATGACTAC
GACGTCGCCCTCCTGAGGCTCCAGACCGCTCTCAACTTCTCAGACACTGTGGGCGCTGTGTGCCTGCC
GGCCAAGGAACAGCATTTTCCGAAGGGCTCGCGGTGCTGGGTGTCTGGCTGGGGCCACACCCACCCTA
GCCATACTTACAGCTCGGATATGCTCCAGGACACGGTGGTGCCCTTGCTCAGCACTCAGCTCTGCAAC
AGCTCTTGCGTGTACAGCGGAGCCCTCACCCCCCGCATGCTTTGCGCTGGCTACCTGGACGGAAGGGC
TGATGCATGCCAGGGAGATAGCGGGGGCCCCCTAGTGTGCCCAGATGGGGACACATGGCGCCTAGTGG
GGGTGGTCAGCTGGGGGCGTGGCTGCGCAGAGCCCAATCACCCAGGTGTCTACGCCAAGGTAGCTGAG
TTTCTGGACTGGATCCATGACACTGCTCAGGTGAGTGTGGGGGCAGGAGTAGGGCAGGGAGATTTCTA
AAGGACCTGCCCTCGAATGCAAGGAACCTTACCCCTTAGGCCCGGGCCCTGCTGGGGACTGGGGAGGG
TGCTAGGACATATTCCCCAGAGTGAGTGGAGGAAGAAGTGAAGCTTAAACATGGAATCCATTGGATTT
CTATCAGTTTAAGGATGAACTGGGTAAGAGTATGCCTGAGTTTGTATCCCAGATCTACCATTTCCTGT
GTCGACCTTTGGCAAATTTCTAACTTTGTTAAACCTTAATTTCCTGATAATAACCATGATGGCTACTT
ATATGCTATTGTTATATGCTATTAAATAAGACCCGTACAATGCC

| | | |
|---|---|---|
| NOV4j, SNP13382467 of | SEQ ID NO: 72 | MW at 55531.5kD |

| | | | |
|---|---|---|---|
| CG125860-02, Protein Sequence | SNP Pos: 416 | 513 aa | SNP Change: Leu to Leu |

MSLMLDDQPPMEAQYAEEGPGPGIFRAEPGDQQHPSRPDWAIGEMTGWGQWRAIILHSPDPPWGQPHM
IDVSQAVCWRSMRRGCAVLGALGLLAGAGVGSWLLVLYLCPAASQPISGTLQDEEITLSCSEASAEEA
LLPALPKTPALPKTVSFRINSEDFLLEAQVRDQPRWLLVCHEGWSPALGLQICWSLGHLRLTHHKGVN
LTDIKLNSSQEFAQLSPRLGGFLEEAWQPSRTTEAVRNNCTSGQVVSLRCSECGARPLASRIVGGQSV
APGRWPWQASVALGFRHTCGGSVLAPRWVVTAAHCMHSFRLARLSSWRVHAGLVSHSAVRPHQGALVE
RIIPHPLYSAQNHDYDVALLRLQTALNFSDTVGAVCLPAKEQHFPKGSRCWVSGWGHTHPSHTYSSDM
LQDTVVPLLSTQLCNSSCVYSGALTPRMLCAGYLDGRADACQGDSGGPLVCPDGDTWRLVGVVSWGRG
CAEPMHPGVYAKVAEFLDWIHDTAQVSVGAGVGQGDF

| | |
|---|---|
| SEQ ID NO: 73 | 1880 bp |

| | | |
|---|---|---|
| NOV4k, SNP13382466 of | ORF Start: ATG at 24 | ORF Stop: TAA at 1563 |

| | | |
|---|---|---|
| CG125860-02, DNA Sequence | SNP Pos: 1272 | SNP Change: C to T |

TTACAACAGTGCCACTGACCCCTATGAGCCTGATGCTGGATGACCAACCCCCTATGGAGGCCCAGTAT
GCAGAGGAGGGCCCAGGACCTGGGATCTTCAGAGCAGAGCCTGGAGACCAGCAGCATCCCAGTAGGCC
AGACTGGGCCATAGGGGAAATGACAGGGTGGGGACAGTGGAGGGCAATCATCCTACATTCCCCGGATC
CTCCTTGGGGTCAGCCCCACATGATTGATGTTTCTCAGGCAGTGTGCTGGCGTTCCATGCGACGTGGC
TGTGCAGTGCTGGGAGCCCTGGGGCTGCTGGCCGGTGCAGGTGTTGGCTCATGGCTCCTAGTGCTGTA
TCTGTGTCCTGCTGCCTCTCAGCCCATTTCCGGGACCTTGCAGGATGAGGAGATAACTTTGAGCTGCT
CAGAGGCCAGCGCTGAGGAAGCTCTGCTCCCTGCACTTCCCAAAACACCTGCACTTCCCAAAACAGTA
TCTTTCAGAATAAACAGCGAAGACTTCTTGCTGGAAGCGCAAGTGAGGGATCAGCCACGCTGGCTCCT
GGTCTGCCATGAGGGCTGGAGCCCCGCCCTGGGGCTGCAGATCTGCTGGAGCCTTGGGCATCTCAGAC
TCACTCACCACAAGGGAGTAAACCTCACTGACATCAAACTCAACAGTTCCCAGGAGTTTGCTCTGCTC
TCTCCTAGACTGGGAGGCTTCCTGGAGGAGGCGTGGCAGCCCAGTAGGACTACTGAGGCTGTTAGGAA
CAACTGCACTTCTGGTCAAGTTGTTTCCCTCAGATGCTCTGAGTGTGGAGCGAGGCCCCTGGCTTCCC
GGATAGTTGGTGGGCAGTCTGTGGCTCCTGGGCGCTGGCCGTGGCAGGCCAGCGTGGCCCTGGGCTTC
CGGCACACGTGTGGGGGCTCTGTGCTAGCGCCACGCTGGGTGGTGACTGCTGCACATTGTATGCACAG
TTTCAGGCTGGCCCGCCTGTCCAGCTGGCGGGTTCATGCGGGGCTGGTCAGCCACAGTGCCGTCAGGC
CCCACCAAGGGGCTCTGGTGGAGAGGATTATCCCACACCCCCTCTACAGTGCCCAGAATCATGACTAC
GACGTCGCCCTCCTGAGGCTCCAGACCGCTCTCAACTTCTCAGACACTGTGGGCGCTGTGTGCCTGCC
GGCCAAGGAACAGCATTTTCCGAAGGGCTCGCGGTGCTGGGTGTCTGGCTGGGGCCACACCCACCCTA
GCCATACTTACAGCTCGGATATGCTCCAGGACACGGTGGTGCCCCTGTTCAGCACTCAGCTCTGCAAC
AGCTCTTGCGTGTACAGCGGAGCCCTCACCCCCCGCATGCTTTGCGCTGGCTACCTGGACGGAAGGGC
TGATGCATGCCAGGGAGATAGCGGGGGCCCCCTAGTGTGCCCAGATGGGGACACATGGCGCCTAGTGG
GGGTGGTCAGCTGGGGGCGTGGCTGCGCAGAGCCCAATCACCCAGGTGTCTACGCCAAGGTAGCTGAG
TTTCTGGACTGGATCCATGACACTGCTCAGGTGAGTGTGGGGGCAGGAGTAGGGCAGGGAGATTTCTA
AAGGACCTGCCCTCGAATGCAAGGAACCTTACCCCTTAGGCCCGGGCCCTGCTGGGGACTGGGGAGGG
TGCTAGGACATATTCCCCAGAGTGAGTGGAGGAAGAAGTGAAGCTTAAACATGGAATCCATTGGATTT
CTATCAGTTTAAGGATGAACTGGGTAAGAGTATGCCTGAGTTTGTATCCCAGATCTACCATTTCCTGT
GTCGACCTTTGGCAAATTTCTAACTTTGTTAAACCTTAATTTCCTGATAATAACCATGATGGCTACTT
ATATGCTATTGTTATATGCTATTAAATAAGACCCGTACAATGCC

| | | |
|---|---|---|
| NOV4k, SNP13382466 of | SEQ ID NO: 74 | MW at 55565.5kD |

| | | | |
|---|---|---|---|
| CG125860-02, Protein Sequence | SNP Pos: 417 | 513 aa | SNP Change: Leu to Phe |

MSLMLDDQPPMEAQYAEEGPGPGIFRAEPGDQQHPSRPDWAIGEMTGWGQWRAIILHSPDPPWGQPHM
IDVSQAVCWRSMRRGCAVLGALGLLAGAGVGSWLLVLYLCPAASQPISGTLQDEEITLSCSEASAEEA
LLPALPKTPALPKTVSFRINSEDFLLEAQVRDQPRWLLVCHEGWSPALGLQICWSLGHLRLTHHKGVN
LTDIKLNSSQEFAQLSPRLGGFLEEAWQPSRTTEAVRNNCTSGQVVSLRCSECGARPLASRIVGGQSV
APGRWPWQASVALGFRHTCGGSVLAPRWVVTAAHCMHSFRLARLSSWRVHAGLVSHSAVRPHQGALVE
RIIPHPLYSAQNHDYDVALLRLQTALNFSDTVGAVCLPAKEQHFPKGSRCWVSGWGHTHPSHTYSSDM
LQDTVVPLFSTQLCNSSCVYSGALTPRMLCAGYLDGRADACQGDSGGPLVCPDGDTWRLVGVVSWGRG
CAEPNHPGVYAKVAEFLDWIHDTAQVSVGAGVGQGDF

[0363] A ClustalW comparison of the above protein sequences yields the following sequence alignment shown in Table 4B.

TABLE 4B
Comparison of the NOV4 protein sequences.

| | |
|---|---|
| NOV4a | MSLMLDDQPPMEAQYAEEGPGPGIFRAEPGDQQHPSRPDWAIGEMTGWGQWRAIILHSPD |
| NOV4b | MSLMLDDQPPMEAQYAEEGPGPGIFRAEPGDQQHP------------------------- |
| NOV4a | PPWGQPHMIDVSQAVCWRSMRRGCAVLGALGLLAGAGVGSWLLVLYLCPAASQPISGTLQ |
| NOV4b | ----------ISQAVCWRSMRRGCAVLGALGLLAGAGVGSWLLVLYLCPAASQPISGTLQ |
| NOV4a | DEEITLSCSEASAEEALLPALPKTPALPKTVSFRINSEDFLLEAQVRDQPRWLLVCHEGW |
| NOV4b | DEEITLSCSEASAEEALLPALPKT------VSFRINSEDFLLEAQVRDQPRWLLVCHEGW |
| NOV4a | SPALGLQICWSLGHLRLTHHKGVNLTDIKLNSSQEFAQLSPRLGGFLEEAWQPSRTTEAV |
| NOV4b | SPALGLQICWSLGHLRLTHHKGVNLTDIKLNSSQEFAQLSPRLGGFLEEAWQPSRTTEAV |
| NOV4a | RNNCTSGQVVSLRCSECGARPLASRIVGGQSVAPGRWPWQASVALGFRHTCGGSVLAPRW |
| NOV4b | RNNCTSGQVVSLRCSECGARPLASRIVGGQSVAPGRWPWQASVALGFRHTCGGSVLAPRW |
| NOV4a | VVTAAHCMHSFRLARLSSWRVHAGLVSHSAVRPHQGALVERIIPHPLYSAQNHDYDVALL |
| NOV4b | VVTAAHCMHSFRLARLSSWRVHAGLVSHSAVRPHQGALVERIIPHPLYSAQNHDYDVALL |
| NOV4a | RLQTALNFSDTVGAVCLPAKEQHFPKGSRCWVSGWGHTHPSHTYSSDMLQDTVVPLLSTQ |
| NOV4b | RLQTALNFSDTVGAVCLPAKEQHFPKGSRCWVSGWGHTHPSHTYSSDMLQDTVVPLLSTQ |
| NOV4a | LCNSSCVYSGALTPRMLCAGYLDGRADACQGDSGGPLVCPDGDTWRLVGVVSWGRGCAEP |
| NOV4b | LCNSSCVYSGALTPRMLCAGYLDGRADACQGDSGGPLVCPDGDTWRLVGVVSWGRGCAEP |
| NOV4a | NHPGVYAKVAEFLDWIHDTAQVSVGAGVGQGDF |
| NOV4b | NHPGVYAKVAEFLDWIHDTAQVSVGAGVGQGDF |
| NOV4a | (SEQ ID NO: 54) |
| NOV4b | (SEQ ID NO: 56) |

[0364] Further analysis of the NOV4a protein yielded the following properties shown in Table 4C.

TABLE 4C
Protein Sequence Properties NOV4a

| | |
|---|---|
| SignalP analysis: | No Known Signal Sequence Indicated |
| PSORT II analysis: | |

| | |
|---|---|
| PSG: | a new signal peptide prediction method |
| | N-region: length 7; pos.chg 0; neg.chg 2 |
| | H-region: length 4; peak value 0.00 |
| | PSG score: −4.40 |
| GvH: | von Heijne's method for signal seq. recognition |
| | GvH score (threshold: −2.1): −12.80 |
| | possible cleavage site: between 13 and 14 |

>>> Seems to have no N-terminal signal peptide

| | |
|---|---|
| ALOM: | Klein et al's method for TM region allocation |
| | Init position for calculation: 1 |
| | Tentative number of TMS(s) for the threshold 0.5: 1 |
| | Number of TMS(s) for threshold 0.5: 1 |
| | INTEGRAL Likelihood = −3.40 Transmembrane 89-105 |
| | PERIPHERAL Likelihood = 5.57 (at 173) |
| | ALOM score: −3.40 (number of TMSs: 1) |
| MTOP: | Prediction of membrane topology (Hartmann et al.) |
| | Center position for calculation: 96 |
| | Charge difference: −8.0 C(−6.0) − N( 2.0) |
| | N >= C: N-terminal side will be inside |

>>> membrane topology: type 2 (cytoplasmic tail 1 to 89)

| MITDISC: | discrimination of mitochondrial targeting seq | | | |
|---|---|---|---|---|
| | R content: | 0 | Hyd Moment (75): | 8.83 |
| | Hyd Moment(95): | 8.90 | G content: | 0 |
| | DIE content: | 2 | S/T content: | 1 |
| | Score: −6.04 | | | |

| | |
|---|---|
| Gavel: | prediction of cleavage sites for mitochondrial preseq |
| | cleavage site motif not found |

NUCDISC: discrimination of nuclear localization signals

| | pat4: none |
|---|---|
| | pat7: none |
| | bipartite: none |
| | content of basic residues: 7.2% |
| | NLS Score: −0.47 |
| KDEL: | ER retention motif in the C-terminus: none |

ER Membrane Retention Signals: none

| | |
|---|---|
| SKL: | peroxisomal targeting signal in the C-terminus: none |
| PTS2: | 2nd peroxisomal targeting signal: none |
| VAC: | possible vacuolar targeting motif: none |

RNA-binding motif: none
Actinin-type actin-binding motif:

| | type 1: none |
|---|---|
| | type 2: none |
| NMYR: | N-myristoylation pattern : none |

Prenylation motif: none
memYQRL: transport motif from cell surface to Golgi: none
Tyrosines in the tail: too long tail
Dileucine motif in the tail: none
checking 63 PROSITE DNA binding motifs: none
checking 71 PROSITE ribosomal protein motifs: none
checking 33 PROSITE prokaryotic DNA binding motifs: none

| | |
|---|---|
| NNCN: | Reinhardt's method for Cytoplasmic/Nuclear discrimination |
| | Prediction: cytoplasmic |
| | Reliability: 89 |
| COIL: | Lupas's algorithm to detect coiled-coil regions |
| | total: 0 residues |

--------------------------
Final Results (k = 9/23):

```
34.8%: mitochondrial
26.1%: cytoplasmic
17.4%: Golgi
  8.7%: endoplasmic reticulum
  4.3%: extracellular, including cell wall
  4.3%: nuclear
  4.3%: vesicles of secretory system
```

>> prediction for CG125860-02 is mit (k = 23)

[0365] A search of the NOV4a protein against the Geneseq database, a proprietary database that contains sequences published in patents and patent publication, yielded several homologous proteins shown in Table 4D.

TABLE 4D
Geneseq Results for NOV4a

| | | NOV4a | Identities/ | |
|---|---|---|---|---|
| | | Residues/ | Similarities for | |
| Geneseq | Protein/Organism/Length | Match | the Matched | Expect |
| Identifier | [Patent #, Date] | Residues | Region | Value |
| ABG76906 | Human hepsin/plasma | 1 . . . 513 | 470/513 (91%) | 0.0 |
| | transmembrane serine protease- | 1 . . . 472 | 472/513 (91%) | |
| | like protein - Homo sapiens, 472 | | | |
| | aa. [WO200233087-A2, 25-APR- | | | |
| | 2002] | | | |
| AAU82752 | Amino acid sequence of novel | 1 . . . 504 | 451/504 (89%) | 0.0 |
| | human protease #51 - Homo | 1 . . . 456 | 453/504 (89%) | |
| | sapiens, 457 aa. [WO200200860- | | | |
| | A2, 03-JAN-2002] | | | |
| AAB11699 | Human serine protease BSSP2 | 1 . . . 504 | 451/504 (89%) | 0.0 |
| | (hBSSP2), SEQ ID NO:10 - Homo | 1 . . . 456 | 453/504 (89%) | |
| | sapiens, 457 aa. [WO200031272- | | | |
| | A1, 02-JUN-2000] | | | |
| AAB08950 | Human secreted protein sequence | 69 . . . 504 | 417/436 (95%) | 0.0 |
| | encoded by gene 22 SEQ ID | 57 . . . 479 | 419/436 (95%) | |
| | NO:107 - Homo sapiens, 480 aa. | | | |
| | [WO200017222-A1, 30-MAR- | | | |
| | 2000] | | | |
| AAB08912 | Human secreted protein sequence | 80 . . . 504 | 409/425 (96%) | 0.0 |
| | encoded by gene 22 SEQ ID | 1 . . . 412 | 410/425 (96%) | |
| | NO:69 - Homo sapiens, 414 aa. | | | |
| | [WO200017222-A1, 30-MAR- | | | |
| | 2000] | | | |

[0366] In a BLAST search of public sequence databases, the NOV4a protein was found to have homology to the proteins shown in the BLASTP data in Table 4E.

TABLE 4E
Public BLASTP Results for NOV4a

| | | | Identities/ | |
|---|---|---|---|---|
| | NOV4a | Similarities | | |
| Protein | | Residues/ | for the | |
| Accession | Protein/ | Match | Matched | Expect |
| Number | Organism/Length | Residues | Portion | Value |
| Q9H3S3 | Transmembrane pro- | 1 . . . 504 | 451/504 | 0.0 |
| | tease, serine 5 (EC | 1 . . . 456 | (89%) | |
| | 3.4.21.-) (Spinesin) - | | 453/504 | |
| | Homo sapiens | | (89%) | |
| | (Human), 457 aa. | | | |
| Q8CJ17 | Adrenal mitochondrial | 11 . . . 502 | 360/492 | 0.0 |
| | protease long variant - | 1 . . . 444 | (73%) | |
| | Rattus norvegicus | | 393/492 | |
| | (Rat), 445 aa. | | (79%) | |
| Q8CDR0 | Transmembrane pro- | 1 . . . 502 | 359/502 | 0.0 |
| | tease - Mus musculus | 1 . . . 454 | (71%) | |
| | (Mouse), 455 aa. | | 394/502 | |
| | | | (77%) | |
| Q9ER04 | Transmembrane pro- | 1 . . . 502 | 359/502 | 0.0 |
| | tease, serine 5 (EC | 1 . . . 454 | (71%) | |
| | 3.4.21.-) (Spinesin) - | | 394/502 | |
| | Mus musculus | | (77%) | |
| | (Mouse), 455 aa. | | | |
| Q8CJ16 | Adrenal mitochondrial | 151 . . . 502 | 289/352 | e-177 |
| | protease short variant - | 26 . . . 370 | (82%) | |
| | Rattus norvegicus | | 312/352 | |
| | (Rat), 371 aa. | (88%) | | |

[0367] PFam analysis indicates that the NOV4a protein contains the domains shown in the Table 4F.

TABLE 4F
Domain Analysis of NOV4a

| | | Identities/ | |
|---|---|---|---|
| | NOV4a | Similarities for | |
| Pfam Domain | Match Region | the Matched Region | Expect Value |
| trypsin | 266. . . 496 | 111/265 (42%) | 3.9e-87 |
| | | 198/265 (75%) | |

### Example 5

[0368] The NOV5 clone was analyzed, and the nucleotide and encoded polypeptide sequences are shown in Table 5A.

TABLE 5A
NOV5 Sequence Analysis

| | | |
|---|---|---|
| NOV5a, CG155759-02 | SEQ ID NO: 75 | 941 bp |

| | | |
|---|---|---|
| DNA Sequence | ORF Start: ATG at 4 | ORF Stop: TAG at 931 |

GACATGGAACAGGATAATACAACATTGCTGACAGAGTTTGTTCTCACAGGACTTACATATCAGCCAGA
GTGGAAAATGCCCCTGTTCTTGGTGTTCTTGGTGATCTATCTCATCACTATTGTGTGGAACCTTGGTC
TGATTGCTCTTATCTGGAATGACCCACAACTTCACATCCCCATGTACTTTTTTCTTGGGAGTTTAGCC
TTTGTTGATGCTTGGATATCTTCCACAGTAACTCCCAAAATGTTGGTTAATTTCTTGGCCAAAAACAG
GATGATATCTCTGTCTGAATGCATGATTCAATTTTTTTCCTTTGCATTTGGTGGAACTACAGAATGTT
TTCTCTTGGCAACAATGGCATATGATCGCTATGTAGCCATATGCAAACCTTTACTATATCCAGTGATT
ATGAACAATTCACTATGCATACGGCTGTTAGCCTTCTCATTTTTAGGTGGCTTCCTCCATGCCTTAAT
TCATGAAGTCCTTATATTCAGATTAACCTTCTGCAATTCTAACATAATACATCATTTTTACTGTGATA
TTATACCACTGTTTATGATTTCCTGTACTGACCCTTCTATTAATTTTCTAATGGTTTTTATTTTGTCT
GGCTCAATTCAGGTATTCACCATTGTGACAGTTCTTAATTCTTACACATTTGCTCTTTTCACAATCCT
AAAAAAGAAGTCTGTTAGAGGCGTAAGGAAAGCCTTTTCCACCTGTGGAGCCCATCTCTTATCTGTCT
CTTTATATTATGGCCCACTTATCTTCATGTATTTGCGCCCTGCATCTCCACAAGCAGATGACCAGGAT
ATGATAGACTCTGTCTTTTATACAATCATAATTCCTTTGCTAAATCCCATTATCTACAGTCTGAGAAA
TAAACAAGTAATAGATTCATTCACAAAAATGGTAAAAAGAAATGTTTAGATTTCATA

NOV5a, CG155759-02

| | | | |
|---|---|---|---|
| Protein Sequence | SEQ ID NO: 76 | 309 aa | MW at 35396.8kD |

MEQDNTTLLTEFVLTGLTYQPEWKMPLFLVFLVIYLITIVWNLGLIALIWNDPQLHIPMYFFLGSLAF
VDAWISSTVTPKMLVNFLAKNRMISLSECMIQFFSFAFGGTTECFLLATMAYDRYVAICKPLLYPVIM
NNSLCIRLLAFSFLGGFLHALIHEVLIFRLTFCNSNIIHHFYCDIIPLFMISCTDPSINFLMVFILSG
SIQVFTIVTVLNSYTFALFTILKKKSVRGVRKAFSTCGAHLLSVSLYYGPLIFMYLRPASPQADDQDM
IDSVFYTIIIPLLNPIIYSLRNKQVIDSFTKMVKRNV

| | | |
|---|---|---|
| NOV5b, CG155759-01 | SEQ ID NO: 77 | 941 bp |

| | | |
|---|---|---|
| DNA Sequence | ORF Start: ATG at 4 | ORF Stop: TAG at 931 |

GACATGGAACAGGATAATACAACATTGCTGACAGAGTTTGTTCTCACAGGACTTACATATCAGCCAGA
GTGGAAAATGCCCCTGTTCTTGGTGTTCTTGGTGATCTATCTCATCACTATTGTGTGGAACCTTGGTC
TGATTGCTCTTATCTGGAATGACCCACAACTTCACATCCCCATGTACTTTTTTCTTGGGAGTTTAGCC
TTTGTTGATGCTTGGATATCTTCCACAGTAACTCCCAAAATGTTGGTTAATTTCTTGGCCAAAAACAG
GATGATATCTCTGTCTGAATGCATGATTCAATTTTTTTCCTTTGCATTTGGTGGAACTACAGAATGTT
TTCTCTTGGCAACAATGGCATATGATCGCTATGTAGCCATATGCAAACCTTTACTATATCCAGTGATT
ATGAACAATTCACTATGCATACGGCTGTTAGCCTTCTCATTTTTAGGTGGCTTCCTCCATGCCTTAAT
TCATGAAGTCCTTATATTCAGATTAACCTTCTGCAATTCTAACATAATACATCATTTTTACTGTGATA
TTATACCACTGTTTATGATTTCCTGTACTGACCCTTCTATTAATTTTCTAATGGTTTTTATTTTGTCT
GGCTCAATTCAGGTATTCACCATTGTGACAGTTCTTAATTCTTACACATTTGCTCTTTTCACAATCCT
AAAAAAGAAGTCTGTTAGAGGCGTAAGGAAAGCCTTTTCCACCTGTGGAGCCCATCTCTTATCTGTCT
CTTTATATTATGGCCCACTTATCTTCATGTATTTGCGCCCTGCATCTCCACAAGCAGATGACCAAGAT
ATGATAGACTCTGTCTTTTATACAATCATAATTCCTTTGCTAAATCCCATTATCTACAGTCTGAGAAA
TAAACAAGTAATAGATTCATTCACAAAAATGGTAAAAAGAAATGTTTAGATTTCATA

NOV5b, CG155759-01

| | | | |
|---|---|---|---|
| Protein Sequence | SEQ ID NO: 78 | 309 aa | MW at 35396.8kD |

MEQDNTTLLTEFVLTGLTYQPEWKMPLFLVFLVIYLITIVWNLGLIALIWNDPQLHIPMYFFLGSLAF
VDAWISSTVTPKMLVNFLAKNRNISLSECMIQFFSFAFGGTTECFLLATMAYDRYVAICKPLLYPVIM
NNSLCIRLLAFSFLGGFLHALIHEVLIFRLTFCNSNIIHHFYCDIIPLFMISCTDPSINFLMVFILSG
SIQVFTIVTVLNSYTFALFTILKKKSVRGVRKAFSTCGAHLLSVSLYYGPLIFMYLRPASPQADDQDM
IDSVFYTIIIPLLNPIIYSLRNKQVIDSFTKMVKRNV

[0369] A ClustalW comparison of the above protein sequences yields the following sequence alignment shown in Table 5B.

TABLE 5B
Comparison of the NOV5 protein sequences.

| | |
|---|---|
| NOV5a | MEQDNTTLLTEFVLTGLTYQPEWKMPLFLVFLVIYLITIVWNLGLIALIWNDPQLHIPMY |
| NOV5b | MEQDNTTLLTEFVLTGLTYQPEWKMPLFLVFLVIYLITIVWNLGLIALIWNDPQLHIPMY |
| NOV5a | FFLGSLAFVDAWISSTVTPKMLVNFLAKNRMISLSECMIQFFSFAFGGTTECFLLATMAY |
| NOV5b | FFLGSLAFVDAWISSTVTPKMLVNFLAKNRMISLSECMIQFFSFAFGGTTECFLLATMAY |
| NOV5a | DRYVAICKPLLYPVIMNNSLCIRLLAFSFLGGFLHALIHEVLIFRLTFCNSNIIHHFYCD |
| NOV5b | DRYVAICKPLLYPVIMNNSLCIRLLAFSFLGGFLHALIHEVLIFRLTFCNSNIIHHFYCD |
| NOV5a | IIPLFMISCTDPSINFLMVFILSGSIQVFTIVTVLNSYTFALFTILKKKSVRGVRKAFST |
| NOV5b | IIPLFMISCTDPSINFLMVFILSGSIQVFTIVTVLNSYTFALFTILKKKSVRGVRKAFST |
| NOV5a | CGAHLLSVSLYYGPLIFMYLRPASPQADDQDMIDSVFYTIIIPLLNPIIYSLRNKQVIDS |
| NOV5b | CGAHLLSVSLYYGPLIFMYLRPASPQADDQDMIDSVFYTIIIPLLNPIIYSLRNKQVIDS |
| NOV5a | FTKMVKRNV |
| NOV5b | FTKMVKRNV |
| NOV5a | (SEQ ID NO: 76) |
| NOV5b | (SEQ ID NO: 78) |

[0370] Further analysis of the NOV5a protein yielded the following properties shown in Table 5C.

TABLE 5C
Protein Sequence Properties NOV5a

```
Signa1P analysis: Cleavage site between residues 52 and 53
PSORT II analysis:
PSG: a new signal peptide prediction method
    N-region: length 11; pos. chg 0; neg. chg 3
    H-region: length 10; peak value 0.00
    PSG score: −4.40
GvH: von Heijne's method for signal seq. recognition
    GvH score (threshold: −2.1): −3.77
    possible cleavage site: between 38 and 39
>>> Seems to have no N-terminal signal peptide
ALOM: Klein et al's method for TM region allocation
    Init position for calculation: 1
    Tentative number of TMS(s) for the threshold 0.5: 5
    INTEGRAL Likelihood = −9.24 Transmembrane 25-41
    INTEGRAL Likelihood = 0.37 Transmernbrane 57-73
    INTEGRAL Likelihood = 31 2.02 Transmembrane 142-158
    INTEGRAL Likelihood = 31 5.79 Transmembrane 196-212
    INTEGRAL Likelihood = 31 1.70 Transmembrane 276-292
    PERIPHERAL Likelihood = 0.90 (at 173)
    ALOM score: −9.24 (number of TMSs: 5)
MTOP: Prediction of membrane topology (Hartmann et al.)
    Center position for calculation: 32
    Charge difference: 0.5 C(−0.5) − N(−1.0).
    C > N: C-terminal side will be inside
>>> membrane topology: type 3b
MITDISC: discrimination of mitochondrial targeting seq
    R content: 0 Hyd Moment (75): 6.20
    Hyd Moment(95): 3.11 G content: 0
    D/E content: 2 SIT content: 0
    Score: −7.39
Gavel: prediction of cleavage sites for mitochondrial preseq
    cleavage site motif not found
NUCDISC: discrimination of nuclear localization signals
    pat4: none
    pat7: none
    bipartite: none
    content of basic residues: 6.5%
    NLS Score: −0.47
KDEL: ER retention motif in the C-terminus: none
ER Membrane Retention Signals:
    KKXX-like motif in the C-terminus: VKRN
SKL: peroxisomal targeting signal in the C-terminus: none
PTS2: 2nd peroxisomal targeting signal: none
VAC: possible vacuolar targeting motif: none
RNA-binding motif: none
Actinin-type actin-binding motif:
    type 1: none
    type 2: none
NMYR: N-myristoylation pattern : none
Prenylation motif: none
memYQRL: transport motif from cell surface to Golgi: none
Tyrosines in the tail: none
Dileucine motif in the tail: none
checking 63 PROSITE DNA binding motifs: none
checking 71 PROSITE ribosomal protein motifs: none
checking 33 PROSITE prokaryotic DNA binding motifs: none
NNCN: Reinhardt's method for Cytoplasmic/Nuclear discrimination
    Prediction: cytoplasmic
    Reliability: 94.1
COIL: Lupas's algorithm to detect coiled-coil regions
    total: 0 residues
--------------------------
Final Results (k = 9/23)
    33.3%: endoplasmic reticulum
    11.1%: mitochondrial
    11.1%: Golgi
    11.1%: vacuolar
    11.1%: nuclear
    11.1%: vesicles of secretory system
    11.1%: cytoplasmic
>> prediction for CG155759-02 is end (k=9)
```

[0371] A search of the NOV5a protein against the Geneseq database, a proprietary database that contains sequences published in patents and patent publication, yielded several homologous proteins shown in Table 5D.

TABLE 5D
Geneseq Results for NOV5a

| | | NOV5a | Identifies/ | |
|---|---|---|---|---|
| | | Residues/ | Similarities for | |
| Genesq | Protein/Organism/Length | Match | the Matched | Expect |
| Identifier | [Patent #,Date] | Residues | Region | Value |
| ABP72221 | Human G-protein coupled | 1 . . . 309 | 309/309 (100%) | e-179 |
| | receptor GCREC-15 (olfactory | 1 . . . 309 | 309/309 (100%) | |
| | receptor) - Homo sapiens, 309 aa. | | | |
| | [WO2003000859-A2, 03-JAN- | | | |
| | 2003] | | | |
| AAU85253 | G-coupled olfactory receptor | 1 . . . 309 | 309/309 (100%) | e-179 |
| | #114 - Homo sapiens, 314 aa. | 6 . . . 314 | 309/309 (100%) | |
| | [WO200198526-A2, 27-DEC- | | | |
| | 2001] | | | |
| AAU95610 | Human olfactory and pheromone | 1 . . . 309 | 309/309 (100%) | e-179 |
| | G protein-coupled receptor #97 - | 6 . . . 314 | 309/309 (100%) | |
| | Homo sapiens, 314 aa. | | | |
| | [WO200224726-A2, 28-MAR- | | | |
| | 2002] | | | |
| AAB71190 | Human GPCRX protein SEQ ID | 1 . . . 309 | 309/309 (100%) | e-179 |
| | 56 - Homo sapiens, 309 aa. | 1 . . . 309 | 309/309 (100%) | |
| | [WO200250275-A2, 27-JUN- | | | |
| | 2002] | | | |
| ABP95748 | Human GPCR polypeptide SEQ | 1 . . . 309 | 309/309 (100%) | e-179 |
| | ID NO 306- Homo sapiens, 314 | 6 . . . 314 | 309/309 (100%) | |
| | aa. [WO200216548-A2, 28-FEB- | | | |
| | 2002] | | | |

[0372] In a BLAST search of public sequence databases, the NOV5a protein was found to have homology to the proteins shown in the BLASTP data in Table 5E.

TABLE 5E
Public BLASTP Results for NOV5a

| | | | Identities/ | |
|---|---|---|---|---|
| | | NOV5a | Similarities | |
| Protein | | Residues/ | for the | |
| Accession | Protein/ | Match | Matched | Expect |
| Number | Organism/Length | Residues | Portion | Value |
| Q8NGV7 | Seven transmembrane | 1 . . . 309 | 309/309 | e-179 |
| | helix receptor - | 6 . . . 314 | (100%) | |
| | Homo sapiens | | 309/309 | |
| | (Human), 314 aa. | | (100%) | |
| Q8VG48 | Olfactory receptor | 4 . . . 308 | 232/305 | e-141 |
| | MOR183-1 - | 4 . . . 308 | (76%) | |
| | Mus musculus | | 272/305 | |
| | (Mouse), 309 aa. | | (89%) | |
| Q8VEX5 | Olfactory receptor | 1 . . . 309 | 239/309 | e-139 |
| | MOR183-1 - | 1 . . . 309 | (77%) | |
| | Mus musculus | | 270/309 | |
| | (Mouse), 309 aa. | | (87%) | |
| CAD- | Sequence 195 from | 1 . . . 309 | 241/309 | e-139 |
| 37583 | Patent WO0224726 - | 17 . . . 325 | (77%) | e-139 |
| | Homo sapiens | | 267/309 | |
| | (Human), 325 aa. | | (85%) | |
| Q8NGV6 | Seven transmembrane | 1 . . . 309 | 241/309 | e-139 |
| | helix receptor - | 1 . . . 309 | (77%) | |
| | Home sapiens | | 267/309 | |
| | (Human), 309 aa. | (85%) | | |

[0373] PFam analysis indicates that the NOV5a protein contains the domains shown in the Table 5F.

TABLE 5F
Domain Analysis of NOV5a

| | | Identities/ | |
|---|---|---|---|
| | NOV5a | Similarities for | |
| Pfam Domain | Match Region | the Matched Region | Expect Value |
| 7tm_1 | 41 . . . 290 | 43/276 (16%) | 1.2e-19 |
| | | 169/276 (61%) | |

### Example 6

[0374] The NOV6 clone was analyzed, and the nucleotide and encoded polypeptide sequences are shown in Table 6A.

TABLE 6A
NOV6 Sequence Analysis

| | | |
|---|---|---|
| NOV6a, CG187667-01 | SEQ ID NO: 79 | 2680 bp |

| | | |
|---|---|---|
| DNA Sequence | ORF Start: ATG at 873 | ORF Stop: TAG at 2484 |

GGGCAGGTGTTAAGCGATAAAGGGGGGCAGAACAAGTCTTTTATCCGGCCATTTAATTGGTCACCTTA
AGAAAGAATCCTATCTTCCCACCGCAGCTGAGAAGACACTTCTAAGAGGTACAGCTAAAAGGTGGAGG
ACTGATAGACAACTTAGAGGTTGGTTTCGGGAACGATAAAACAAGTAACGGGCTGCCCGGCCTGCGCC
GCGGAGTCCCGAGGAGCCTGCGCTGTGCTCCTCTCGCGGTGTCTCGTCATCTCCGGGAAGACTCGGCG
CCTGGGTCCGCGCTCTCTGGGTAAGCTTTCCGGGAAGCTTTCCCGGGAGCTCGCTGGTCCTGGCCCCA
GAAGCCTGCGGACCCGCCCAGGGAGGATAAGCAGCTGAAAGACCGCGCGGTGCCGCTCCGAGGCCCCG
GGACGTGGGCCCATGGTCGGCCTGGCGCCACCTTTCCGGGGGAAGCCACGCGCACCAGGCATCGCACG
CGGCTCTGCACCCGCGCCGCCGGACCTGAAACCCGGCGGAGGGCACACGGGGCTGCCGCTGCGGGCCC
CGGACCAACCCATGCTTACTCCGGAGCCTGTACCGGCGCCGACGGGTCGGACCTCCCTGCGCGGTGTC
GCCCAGCGGGTTCGTGCGAAAGGCGGGGCCGACTACACGCGGTGCCGCGCCCTGAGACCGTTTATCTG
CAGTCAACGCAGCCTCCCGGCTCAGCCTGGGAAGATGCGCGAATCGGGAACCCCAGAGCGCGGTGGCT
AGACCGGGCTCCGCCGCCTCCCCCACAGCCCCTTTCCTAATCGTTCAGACGGAGCCTGGTCGACTTCG
CCGGAGACTGCCAGATCTCGTTCCTCTTCCCTGTGTCATCTTCTTAATTATAAATAATGGGGGATGAA
GATAAAAGAATTACATATGAAGATTCAGAACCATCCACAGGAATGAATTACACGCCCTCCATGCATCA
AGAAGCACAGGAGGAGACAGTTATGAAGCTCAAAGGTATAGATGCAAATGAACCAACAGAAGGAAGTA
TTCTTTTGAAAAGCAGTGAAAAAAAGCTACAAGAAACACCAACTGAAGCAAATCACGTACAAAGACTG
AGACAAATGCTGGCTTGCCCTCCACATGGTTTACTGGACAGGGTCATAACAAATGTTACCATCATTGT
TCTTCTGTGGGCTGTAGTTTGGTCAATTACTGGCAGTGAATGTCTTCCTGGAGGAAACCTATTTGGAA
TTATAATCCTATTCTATTGTGCCATCATTGGTGGTAAACTTTTGGGGCTTATTAAGTTACCTACATTG
CCTCCACTGCCTTCTCTTCTTGGCATGCTGCTTGCAGGGTTTCTCATCAGAAATATCCCAGTCATCAA
CGATAATGTGCAGATCAAGCACAAGTGGTCTTCCTCTTTGAGAAGCATAGCCCTGTCTATCATTCTGG
TTCGTGCTGGCCTTGGTCTGGATTCAAAGGCCCTGAAGAAGTTAAAGGGCGTTTGTGTAAGACTGTCC
ATGGGTCCCTGTATTGTGGAGGCGTGCACATCTGCTCTTCTTGCCCATTACCTGCTGGGTTTACCATG
GCAATGGGGATTTATACTGGGTTTTGTTTTAGGTGCTGTATCTCCAGCTGTTGTGGTGCCTTCAATGC
TCCTTTTGCAGGGAGGAGGCTATGGTGTTGAGAAGGGTGTCCCAACCTTGCTCATGGCAGCTGGCAGC
TTCGATGACATTCTGGCCATCACTGGCTTCAACACATGCTTGGGCATAGCCTTTTCCACAGGCTCTAC
TGTCTTTAATGTCCTCAGAGGAGTTTTGGAGGTGGTAATTGGTGTGGCAACTGGATCTGTTCTTGGAT
TTTTCATTCAGTACTTTCCAAGCCGTGACCAGGACAAACTTGTGTGTAAGAGAACATTCCTTGTGTTG
GGGTTGTCTGTGCTAGCTGTGTTCAGCAGTGTGCATTTTGGTTTCCCTGGATCAGGAGGACTGTGCAC
GTTGGTCATGGCTTTCCTTGCAGGCATGGGATGGACCAGCGAAAAGGCAGAGGTTGAAAAGATAATTG
CAGTTGCCTGGGACATTTTTCAGCCCCTTCTTTTTGGACTAATTGGAGCAGAGGTATCTATTGCATCT
CTCAGACCAGAAACTGTAGGCCTTTGTGTTGCCACCGTAGGCATTGCAGTATTGATACGAATTTTGAC
TACATTTCTGATGGTGTGTTTTGCTGGTTTTAACTTAAAAGAAAAGATATTTATTTCTTTTGCATGGC
TTCCAAAGGCCACAGTTCAGGCTGCAATAGGATCTGTGGCTTTGGACACAGCAAGGTCACATGGAGAG
AAACAATTAGAAGACTATGGAATGGATGTGTTGACAGTGGCATTTTTGTCCATCCTCATCACAGCCCC
AATTGGAAGTCTGCTTATTGGTTTACTGGGCCCCAGGCTTCTGCAGAAAGTTGAACATCAAAATAAAG
ATGAAGAAGTTCAAGGAGAGACTTCTGTGCAAGTTTAGGAAGCGCGGATTCTATTACTGGAAACTTTG
GGACTGAAAGGCCAAAGCTTCTGGGCCCACCATCAACGCAGCTCCGCTTTCATTTCTTTCACATACAA
CTTTCCACATAAGATTTCATGCGGAAAAAAAAAAAAAACTCACAAAGGTTTTATACTGATAACAGTAT
ATTAAGTGTTTACTTTGTACACAGCGTC

NOV6a, CG187667-01

| | | | |
|---|---|---|---|
| Protein Sequence | SEQ ID NO: 80 | 537 aa | MW at 57563.3kD |

MGDEDKRITYEDSEPSTGMNYTPSMHQEAQEETVMKLKGIDANEPTEGSILLKSSEKKLQETPTEANH
VQRLRQMLACPPHGLLDRVITNVTIIVLLWAVVWSITGSECLPGGNLFGIIILFYCAIIGGKLLGLIK
LPTLPPLPSLLGMLLAGFLIRNIPVINDNVQIKHKWSSSLRSIALSIILVRAGLGLDSKALKKLKGVC
VRLSMGPCIVEACTSALLAHYLLGLPWQWGFILGFVLGAVSPAVVVPSMLLLQGGGYGVEKGVPTLLM
AAGSFDDILAITGFNTCLGIAFSTGSTVFNVLRGVLEVVIGVATGSVLGFFIQYFPSRDQDKLVCKRT
FLVLGLSVLAVFSSVHFGFPGSGGLCTLVMAFLAGMGWTSEKAEVEKIIAVAWDIFQPLLFGLIGAEV
SIASLRPETVGLCVATVGIAVLIRILTTFLMVCFAGFNLKEKIFISFAWLPKATVQAAIGSVALDTAR
SHGEKQLEDYGMDVLTVAFLSILITAPIGSLLIGLLGPRLLQKVEHQNKDEEVQGETSVQV

| | | |
|---|---|---|
| NOV6b, CG187667-02 | SEQ ID NO: 81 | 2285 bp |

| | | |
|---|---|---|
| DNA Sequence | ORF Start: ATG at 873 | ORF Stop: TAA at 2235 |

GGGCAGGTGTTAAGCGATAAAGGGGGGCAGAACAAGTCTTTTATCCGGCCATTTAATTGGTCACCTTA
AGAAAGAATCCTATCTTCCCACCGCAGCTGAGAAGACACTTCTAAGAGGTACAGCTAAAAGGTGGAGG
ACTGATAGACAACTTAGAGGTTGGTTTCGGGAACGATAAAACAAGTAACGGGCTGCCCGGCCTGCGCC
GCGGAGTCCCGAGGAGCCTGCGCTGTGCTCCTCTCGCGGTGTCTCGTCATCTCCGGGAAGACTCGGCG
CCTGGGTCCGCGCTCTCTGGGTAAGCTTTCCGGGAAGCTTTCCCGGGAGCTCGCTGGTCCTGGCCCCA
GAAGCCTGCGGACCCGCCCAGGGAGGATAAGCAGCTGAAAGACCGCGCGGTGCCGCTCCGAGGCCCCG
GGACGTGGGCCCATGGTCGGCCTGGCGCCACCTTTCCGGGGGAAGCCACGCGCACCAGGCATCGCACG
CGGCTCTGCACCCGCGCCGCCGGACCTGAAACCCGGCGGAGGGCACACGGGGCTGCCGCTGCGGGCCC
CGGACCAACCCATGCTTACTCCGGAGCCTGTACCGGCGCCGACGGGTCGGACCTCCCTGCGCGGTGTC
GCCCAGCGGGTTCGTGCGAAAGGCGGGGCCGACTACACGCGGTGCCGCGCCCTGAGACCGTTTATCTG
CAGTCAACGCAGCCTCCCGGCTCAGCCTGGGAAGATGCGCGAATCGGGAACCCCAGAGCGCGGTGGCT
AGACCGGGCTCCGCCGCCTCCCCCACAGCCCCTTTCCTAATCGTTCAGACGGAGCCTGGTCGACTTCG
CCGGAGACTGCCIGATCTCGTTCCTCTTCCCTGTGTCATCTTCTTAATTATAAATAATGGGGGATGAA
GATAAAAGAATTACATATGAAGATTCAGAACCATCCACAGGAATGAATTACACGCCCTCCATGCATCA
AGAAGCACAGGAGGAGACAGTTATGAAGCTCAAAGGTATAGATGCAAATGAACCAACAGAAGGAAGTA
TTCTTTTGAAAAGCAGTGAAAAAAAGCTACAAGAAACACCAACTGAAGCAAATCACGTACAAAGACTG
AGACAAATGCTGGCTTGCCCTCCACATGGTTTACTGGACAGGGTCATAACAAATGTTACCATCATTGT
TCTTCTGTGGGCTGTAGTTTGGTCAATTACTGGCAGTGAATGTCTTCCTGGAGGAAACCTATTTGGAA
TTATAATCCTATTCTATTGTGCCATCATTGGTGGTAAACTTTTGGGGCTTATTAAGTTACCTACATTG
CCTCCACTGCCTTCTCTTCTTGGCATGCTGCTTGCAGGGTTTCTCATCAGAAATATCCCAGTCATCAA
CGATAATGTGCAGATCAAGCACAAGTGGTCTTCCTCTTTGAGAAGCATAGCCCTGTCTATCATTCTGG
TTCGTGCTGGCCTTGGTCTGGATTCAAAGGCCCTGAAGAAGTTAAAGGGCGTTTGTGTAAGACTGTCC
ATGGGTCCCTGTATTGTGGAGGCGTGCACATCTGCTCTTCTTGCCCATTACCTGCTGGGTTTACCATG
GCAATGGGGATTTATACTGGGTTTTGTTTTAGGTGCTGTATCTCCAGCTGTTGTGGTGCCTTCAATGC
TCCTTTTGCAGGGAGGAGGCTATGGTGTTGAGAAGGGTGTCCCAACCTTGCTCATGGCAGCTGGCAGC
TTCGATGACATTCTGGCCATCACTGGCTTCAACACATGCTTGGGCATAGCCTTTTCCACAGGCTCTAC
TGTCTTTAATGTCCTCAGAGGAGTTTTGGAGGTGGTAATTGGTGTGGCAACTGGATCTGTTCTTGGAT
TTTTCATTCAGTACTTTCCAAGCCGTGACCAGGACAAACTTGTGTGTAAGAGAACATTCCTTGTGTTG
GGGTTGTCTGTGCTAGCTGTGTTCAGCAGTGTGCATTTTGGTTTCCCTGGATCAGGAGGACTGTGCAC
GTTGGTCATGGCTTTCCTTGCAGGCATGGGATGGACCAGCGAAAAGGCAGAGGTTGAAAAGATAATTG
CAGTTGCCTGGGACATTTTTCAGCCCCTTCTTTTTGGACTAATTGGAGCAGAGGTATCTATTGCATCT
CTCAGACCAGAAACTGTAGGAAGCGCGGATTCTATTACTGGAAACTTTGGGACTGAAAGGCCAAAGCT
TCTGGGCCCACCATCAACGCAGCTCCGCTTTCATTTCTTTCACATACAACTTTCCACATAAGATTTCA
TGCGGAAAAAAAAAAAAAACTCACAAAGGTTTTATACTGAT

NOV6b, CG187667-02

| | | | |
|---|---|---|---|
| Protein Sequence | SEQ ID NO: 82 | 454 aa | MW at 48709.8kD |

MGDEDKRITYEDSEPSTGMNYTPSMHQEAQEETVMKLKGIDANEPTEGSILLKSSEKKLQETPTEANH
VQRLRQMLACPPHGLLDRVITNVTIIVLLWAVVWSITGSECLPGGNLFGIIILFYCAIIGGKLLGLIK
LPTLPPLPSLLGMLLAGFLIRNIPVINDNVQIKHKWSSSLRSIALSIILVRAGLGLDSKALKKLKGVC
VRLSMGPCIVEACTSALLAHYLLGLPWQWGFILGFVLGAVSPAVVVPSMLLLQGGGYGVEKGVPTLLM
AAGSFDDILAITGFNTCLGIAFSTGSTVFNVLRGVLEVVIGVATGSVLGFFIQYFPSRDQDKLVCKRT
FLVLGLSVLAVFSSVHFGFPGSGGLCTLVMAFLAGMGWTSEKAEVEKIIAVAWDIFQPLLFGLIGAEV
SIASLRPETVGSADSITGNFGTERPKILGPPSTQLRFHFFHIQLST

[0375] A ClustalW comparison of the above protein sequences yields the following sequence alignment shown in Table 6B.

TABLE 6B
Comparison of the NOV6 protein sequences.

| | |
|---|---|
| NOV6a | MGDEDKRITYEDSEPSTGMNYTPSMHQEAQEETVMKLKGIDANEPTEGSILLKSSEKKLQ |
| NOV6b | MGDEDKRITYEDSEPSTGMNYTPSMHQEAQEETVMKLKGIDANEPTEGSILLKSSEKKLQ |
| NOV6a | ETPTEANHVQRLRQMLACPPHGLLDRVITNVTIIVLLWAVVWSITGSECLPGGNLFGIII |
| NOV6b | ETPTEANHVQRLRQMLACPPHGLLDRVITNVTIIVLLWAVVWSITGSECLPGGNLFGIII |
| NOV6a | LFYCAIIGGKLLGLIKLPTLPPLPSLLGMLLAGFLIRNIPVINDNVQIKHKWSSSLRSIA |
| NOV6b | LFYCAIIGGKLLGLIKLPTLPPLPSLLGMLLAGFLIRNIPVINDNVQIKHKWSSSLRSIA |
| NOV6a | LSIILVRAGLGLDSKALKKLKGVCVRLSMGPCIVEACTSALLAHYLLGLPWQWGFILGFV |
| NOV6b | LSIILVRAGLGLDSKALKKLKGVCVRLSMGPCIVEACTSALLAHYLLGLPWQWGFILGFV |
| NOV6a | LGAVSPAVVVPSMLLLQGGGYGVEKGVPTLLMAAGSFDDILAITGFNTCLGIAFSTGSTV |
| NOV6b | LGAVSPAVVVPSMLLLQGGGYGVEKGVPTLLMAAGSFDDILAITGFNTCLGIAFSTGSTV |
| NOV6a | FNVLRGVLEVVIGVATGSVLGFFIQYFPSRDQDKLVCKRTFLVLGLSVLAVFSSVHFGFP |
| NOV6b | FNVLRGVLEVVIGVATGSVLGFFIQYFPSRDQDKLVCKRTFLVLGLSVLAVFSSVHFGFP |
| NOV6a | GSGGLCTLVMAFLAGMGWTSEKAEVEKIIAVAWDIFQPLLFGLIGAEVSIASLRPETVGL |
| NOV6b | GSGGLCTLVMAFLAGMGWTSEKAEVEKIIAVAWDIFQPLLFGLIGAEVSIASLRPETVGS |
| NOV6a | CVATVGIAVLIRILTTFLMVCFAGFNLKEKIFISFAWLPKATVQAAIGSVALDTARSHGE |
| NOV6b | ADSITGNFGTERPK--LLG-----------P-------PSTQLRFHFFHIQLST------ |
| NOV6a | KQLEDYGMDVLTVAFLSILITAPIGSLLIGLLGPRLLQKVEHQNKDEEVQGETSVQV |
| NOV6b | --------------------------------------------------------- |
| NOV6a | (SEQ ID NO: 80) |
| NOV6b | (SEQ ID NO: 82) |

[0376] Further analysis of the NOV6a protein yielded the following properties shown in Table 6C.

TABLE 6C
Protein Sequence Properties NOV6a

```
Signa1P analysis: No Known Signal Sequence Indicated
PSORT II analysis:
PSG: a new signal peptide prediction method
    N-region: length 11; pos. chg 2; neg. chg 4
    H-region: length 0; peak value 0.00
    PSG score: −4.40
GvH: von Heijne's method for signal seq. recognition
    GvH score (threshold: −2.1): −13.82
    possible cleavage site: between 48 and 49
>>> Seems to have no N-terminal signal peptide
ALOM: Klein et al's method for TM region allocation
    Init position for calculation: 1
    Tentative number of TMS(s) for the threshold 0.5: 10
    INTEGRAL Likelihood = −5.20 Transmembrane 88-104
    INTEGRAL Likelihood = −6.10 Transmembrane 118-134
    INTEGRAL Likelihood = −3.13 Transmembrane 146-162
    INTEGRAL Likelihood = −1.06 Transmembrane 176-192
    INTEGRAL Likelihood = −6.26 Transmembrane 234-250
    INTEGRAL Likelihood = −4.09 Transmembrane 308-324
    INTEGRAL Likelihood = −4.94 Transmembrane 341-357
    INTEGRAL Likelihood = −3.19 Transmembrane 388-404
    INTEGRAL Likelihood = −7.91 Transmembrane 418-434
    INTEGRAL Likelihood = −6.69 Transmembrane 493-509
    PERIPHERAL Likelihood = 0.63 (at 213)
    ALOM score: −7.91(number of TMSs: 10)
MTOP: Prediction of membrane topology (Hartmann et al.)
    Center position for calculation: 95
    Charge difference: −2.5 C(−1.0) − N( 1.5)
    N >= C: N-terminal side will be inside
>>> membrane topology: type 3a
MITDISC: discrimination of mitochondrial targeting seq
    R content: 0 Hyd Moment(75): 9.18
    Hyd Moment(95): 7.68G content: 1
    DIE content: 2 S/T content: 0
    Score: −6.91
Gavel: prediction of cleavage sites for mitochondrial preseq
    cleavage site motif not found
NUCDISC: discrimination of nuclear localization signals
    pat4: none
    pat7: none
    bipartite: none
    content of basic residues: 7.4%
    NLS Score: −0.47
KDEL: ER retention motif in the C-terminus: none
ER Membrane Retention Signals: none
SKL: peroxisomal targeting signal in the C-terminus: none
PTS2: 2nd peroxisomal targeting signal: none
VAC: possible vacuolar targeting motif: none
RNA-binding motif: none
Actinin-type actin-binding motif:
    type 1: none
    type 2: none
NMYR: N-myristoylation pattern : none
Prenylation motif: none
memYQRL: transport motif from cell surface to Golgi: none
Tyrosines in the tail: none
Dileucine motif in the tail: none
checking 63 PROSITE DNA binding motifs: none
checking 71 PROSITE ribosomal protein motifs: none
checking 33 PROSITE prokaryotic DNA binding motifs: none
NNCN: Reinhardt's method for Cytoplasmic/Nuclear discrimination
    Prediction: cytoplasmic
    Reliability: 94.1
COIL: Lupas's algorithm to detect coiled-coil regions
    total: 0 residues
--------------------------
Final Results (k = 9/23)
    66.7%: endoplasmic reticulum
    11.1%: nuclear
    11.1%: vesicles of secretory system
    11.1%: mitochondrial
prediction for CG187667-01 is end (k=9)
```

[0377] A search of the NOV6a protein against the Geneseq database, a proprietary database that contains sequences published in patents and patent publication, yielded several homologous proteins shown in Table 6D.

TABLE 6D
Geneseq Results for NOV6a

| | | NOV6a | Identifies/ | |
|---|---|---|---|---|
| | | Residues/ | Similarities for | |
| Genesq | Protein/Organism/Length | Match | the Matched | Expect |
| Identifier | [Patent #,Date] | Residues | Region | Value |
| ABU11723 | Human MDDT polypeptide SEQ | 1 . . . 537 | 537/537 (100%) | 0.0 |
| | ID 670 - Homo sapiens, 538 aa. | 2 . . . 538 | 537/537 (100%) | |
| | [WO200279449-A2, 10-OCT- | | | |
| | 2002] | | | |
| ABP69843 | Human polypeptide SEQ ID NO | 1 . . . 537 | 526/537 (97%) | 0.0 |
| | 1890 - Homo sapiens, 537 aa. | 1 . . . 537 | 530/537 (97%) | |
| | [WO200270539-A2, 12-SEP- | | | |
| | 2002] | | | |
| AAY94918 | Human secreted protein clone | 100 . . . 464 | 231/365 (63%) | e-137 |
| | dd504_18 protein sequence SEQ | 1 . . . 365 | 290/365 (79%) | |
| | ID NO:42 - Homo sapiens, 396 | | | |
| | aa. [WO200009552-A1, 24-FEB- | | | |
| | 2000] | | | |
| AAU01672 | Human secreted protein encoded | 153 . . . 519 | 224/367 (61%) | e-130 |
| | by gene #13 - Homo sapiens, 370 | 1 . . . 366 | 287/367 (78%) | |
| | aa. [WO200123409-A2, 05-APR- | | | |
| | 2001] | | | |
| AAU01642 | Human secreted protein | 214 . . . 519 | 185/306 (60%) | e-106 |
| | immunogenic epitope encoded by | 1 . . . 305 | 236/306 (76%) | |
| | gene #2 - Homo sapiens, 323 aa. | | | |
| | [WO200123409-A2, 05-APR- | | | |
| | 2001] | | | |

[0378] In a BLAST search of public sequence databases, the NOV6a protein was found to have homology to the proteins shown in the BLASTP data in Table 6E.

TABLE 6E
Public BLASTP Results for NOV6a

| | | NOV6a | Identities/ | |
|---|---|---|---|---|
| Protein | | Residues/ | Similarities for | |
| Accession | Protein/ | Match | the Matched | Expect |
| Number | Organism/Length | Residues | Portion | Value |
| AAH47447 | LOC133308 protein - Homo | 19 . . . 537 | 519/519(100%) | 0.0 |
| | sapiens (Human), 519 aa. | 1 . . . 519 | 519/519 (100%) | |
| Q96D95 | Hypothetical protein - Homo | 101 . . . 426 | 320/326 (98%) | 0.0 |
| | sapiens (Human), 354 aa | 1 . . . 326 | 321/326 (98%) | |
| | (fragment). | | | |
| Q8C0X2 | Hypothetical glutainic acid-rich | 53 . . . 521 | 263/470 (55%) | e-159 |
| | region/Na+/H+ exchanger | 83 . . . 551 | 359/470 (75%) | |
| | containing protein - Mus | | | |
| | musculus (Mouse), 565 aa. | | | |
| Q95JS4 | Hypothetical 55.5 kDa protein - | 73 . . . 519 | 261/447 (58%) | e-157 |
| | Macaca fascicularis (Crab eating | 53 . . . 498 | 347/447 (77%) | |
| | macaque) (Gynomolgus | | | |
| | monkey), 511 aa. | | | |
| Q8CDX4 | Hypothetical Na+/H+ exchanger | 253 . . . 537 | 247/285 (86%) | e-138 |
| | containing protein - Mus | 1 . . . 284 | 264/285 (91%) | |
| | musculus (Mouse), 295 aa. | | | |

[0379] PFam analysis indicates that the NOV6a protein contains the domains shown in the Table 6F.

TABLE 6F
Domain Analysis of NOV6a

| | | Identities/ | |
|---|---|---|---|
| | NOV6a | Similarities for | |
| Pfam Domain | Match Region | the Matched Region | Expect Value |
| LrgA | 114 . . . 199 | 26/114 (23%) | 0.7 |
| | | 60/114 (53%) | |
| Na_H_{—} | 119 . . . 520 | 85/470 (18%) | 1.3e-16 |
| Exchanger | | 286/470 (61%) | |

### Example 7

[0380] The NOV7 clone was analyzed, and the nucleotide and encoded polypeptide sequences are shown in Table 7A.

TABLE 7A
NOV7 Sequence Analysis

| | | |
|---|---|---|
| NOV7a, CG187676-01 | SEQ ID NO: 83 | 2474 bp |

| | | |
|---|---|---|
| DNA Sequence | ORF Start: ATG at 5 | ORF Stop: TGA at 2270 |

AAAAATGAAAAAACAGAGGAAAATTCTATGGAGGAAAGGAATCCACTTAGCCTTTTCTGAGAAATGGA
ATACTGGGTTTGGAGGCTTTAAGAAGTTTTATTTTCACCAACACTTGTGCATTCTGAAAGCTAAGCTG
GGAAGGCCAGTTACTTGGAATAGACAGTTGAGACATTTCCAGGGTAGAAAGAAAGCTCTTCAAATCCA
GAAAACGTGGATCAAGGATGAACCCCTTTGTGCTAAGACCAAGTTCAATGTGGCTACTCAAAATGTTA
GTACTTTGTCCTCTAAAGTGAAAAGAAAGGACGCTAAACACTTCATTTCCTCCTCAAAGACTCTCCTG
AGACTCCAAGCAGAGAAGCTGTTGTCATCAGCAAAGAATTCTGACCATGAATACTGCAGAGAGAAAAA
TCTCTTGAAGGCAGTTACTGACTTTCCATCAAATAGTGCTTTAGGTCAGGCCAATGGTCACAGACCTA
GGACAGACCCACAACCTTCTGACTTTCCCATGAAGTTCAATGGGGAGAGCCAAAGTCCAGGTGAGAGT
GGCACGATTGTGGTCACCTTGAACAACCATAAGAGAAAGGGCTTTTGTTACGGCTGCTGCCAAGGGCC
GGAGCACCACAGGAATGGGGGACCCTTGATTCCAAAAAAGTTCCAACTTAACCAACATAGAAGGATAA
AATTATCTCCTCTTATGATGTATGAGAAATTATCCATGATTAGATTTCGGTACAGGATTCTCAGATCC
CAGCACTTCAGAACCAAAAGCAAGGTTTGCAAGCTAAGAAAAGCCCAGCGAAGCTGGGTACAGAAAGT
CACTGGGGACCATCAAGAGACCCGTAGGGAGAACGGTGAGGGTGGCAGTTGCAGCCCATTTCCTTCCC
CAGAACCTAAAGACCCTTCTTGTCGGCATCAGCCGTACTTTCCAGATATGGACAGCAGTGCTGTGGTG
AAGGGGACGAACTCTCATGTGCCTGATTGCCACACTAAAGGAAGCTCTTTCTTGGGCAAGGAGCTTAG
TTTAGACGAAGCATTCCCTGACCAACAGAATGGCAGTGCCACAAACGCCTGGGACCAGTCATCCTGTT
CTTCTCCTAAGTGGGAGTGTACAGAGCTGATTCATGACATCCCCTTACCAGAACATCGTTCTAATACC
ATGTTCATTTCAGAAACTGAAAGAGAAATTATGACTCTGGGTCAGGAAAATCAGACAAGTTCTGTCAG
TGATGACAGAGTAAAACTGTCAGTGTCTGGAGCAGATACATCTGTGAGTAGCGTAGATGGGCCTGTGT
CCCAAAAGGCTGTTCAAAATGAGAACTCATACCAGATGGAGGAGGATGGATCTCTCAAGCAGAGCATT
CTTAGTTCTGAGTTGCTGGACCACCCTTACTGTAAAAGTCCACTGGAGGCTCCCTTGGTGTGCAGTGG
ACTCAAACTAGAAAATCAAGTAGGAGGTGGAAAGAACAGTCAGAAAGCCTCTCCAGTGGATGATGAAC
AGCTGTCAGTCTGTCTTTCTGGATTCCTAGATGAGGTTATGAAGAAGTATGGCAGTTTGGTTCCACTC
AGTGAAAAAGAAGTCCTTGGAAGATTAAAAGATGTCTTTAATGAAGACTTTTCTAATAGAAAACCATT
TATCAATAGGGAAATAACAAACTATCGGGCCAGACATCAAAAATGTAACTTCCGTATCTTCTATAATA
AACACATGCTGGATATGGACGACCTGGCGACTCTGGATGGTCAGAACTGGCTGAATGACCAGGTCATT
AATATGTATGGTGAGCTGATAATGGATGCAGTCCCGGACAAAGTTCACTTCTTCAACAGCTTTTTTCA
TAGACAGCTGGTAACCAAAGGATATAATGGAGTAAAAAGATGGACTAAAAAGGTGGATTTGTTTAAAA
AGAGTCTTCTGTTGATTCCTATTCACCTGGAAGTCCACTGGTCTCTCATTACTGTGACACTCTCTAAT
CGAATTATTTCATTTTATGATTCCCAAGGCATTCATTTTAAGTTTTGTGTAGAGAATATAAGAAAGTA
TTTGCTGACTGAAGCCAGAGAAAAAAATAGACCTGAATTTCTTCAGGGTTGGCAGACTGCTGTTACGA
AGTGTATTCCACAACAGAAAAACGACAGTGACTGTGGAGTCTTTGTGCTCCAGTACTGCAAGTGCCTC
GCCTTAGAGCAGCCTTTCCAGTTTTCACAAGAAGACATGCCCCGAGTGCGGAAGAGGATTTACAAGGA
GCTATGTGAGTGCCGGCTCATGGACTGAAACTCAGCAGGGACTCTGGGAAGTCTGACCAAGTTGGAGC
AGATGGTTTGTTACTTGAATCTCCAAACACTTAGTTGAATTTTTACAGATATTTCAGATCAGTGGTGT
TGGGCCACTATTGTTACCTCAAATTTATTTTTTGCCCTTATTCATTTCTCCAGCTACCATGTACTATT
GTTTAATGTTCAGTTTGGTTTCAAAA

NOV7a, CG187676-01

| | | | |
|---|---|---|---|
| Protein Sequence | SEQ ID NO: 84 | 755 aa | MW at 86692.3kD |

MKKQRKILWRKGIHLAFSEKWNTGFGGFKKFYFHQHLCILKAKLGRPVTWNRQLRHFQGRKKALQIQK
TWIKDEPLCAKTKFNVATQNVSTLSSKVKRKDAKHFISSSKTLLRLQAEKLLSSAKNSDHEYCREKNL
LKAVTDFPSNSALGQANGHRPRTDPQPSDFPMKFNGESQSPGESGTIVVTLNNHKRKGFCYGCCQGPE
HHRNGGPLIPKKFQLNQHRRIKLSPLMMYEKLSMIRFRYRILRSQHFRTKSKVCKLRKAQRSWVQKVT
GDHQETRRENGEGGSCSPFPSPEPKDPSCRHQPYFPDMDSSAVVKGTNSHVPDCHTKGSSFLGKELSL
DEAFPDQQNGSATNAWDQSSCSSPKWECTELIHDIPLPEHRSNTMFISETEREIMTLGQENQTSSVSD
DRVKLSVSGADTSVSSVDGPVSQKAVQNENSYQMEEDGSLKQSILSSELLDHPYCKSPLEAPLVCSGL
KLENQVGGGKNSQKASPVDDEQLSVCLSGFLDEVMKKYGSLVPLSEKEVLGRLKDVFNEDFSNRKPFI
NREITNYRARHQKCNFRIFYNKHMLDMDDLATLDGQNWLNDQVINNYGELIMDAVPDKVHFFNSFFHR
QLVTKGYNGVKRWTKKVDLFKKSLLLIPIHLEVHWSLITVTLSNRIISFYDSQGIHFKFCVENIRKYL
LTEAREKNRPEFLQGWQTAVTKCIPQQKNDSDCGVFVLQYCKCLALEQPFQFSQEDMPRVRKRIYKEL
CECRLMD

[0381] Further analysis of the NOV7a protein yielded the following properties shown in Table 7B.

TABLE 7B
Protein Sequence Properties NOV7a

```
Signa1P analysis: No Known Signal Sequence Indicated
PSORT II analysis:
PSG: a new signal peptide prediction method
    N-region: length 11; pos. chg 6; neg. chg 0
    H-region: length 7; peak value 0.84
    PSG score: −3.56
GvH: von Heijne's method for signal seq. recognition
    GvH score (threshold: −2.1): −10.14
    possible cleavage site: between 18 and 19
>>> Seems to have no N-terminal signal peptide
ALOM: Klein et al's method for TM region allocation
    Init position for calculation: 1
    Tentative number of TMS(s) for the threshold 0.5: 1
    Number of TMS(s) for threshold 0.5: 0
    PERIPHERAL Likelihood = 6.31 (at 710)
    ALOM score: −0.06 (number of TMSs: 0)
MITDISC: discrimination of mitochondrial targeting seq
    R content: 2 Hyd Moment(75): 3.21
    Hyd Moment(95) : 10.20G content: 1
    D/E content: 1 S/T content: 1
    Score: −3.27
Gavel: prediction of cleavage sites for mitochondrial preseq
    R-2 motif at 70 GRK|KA
NUCDISC: discrimination of nuclear localization signals
    pat4: HKRK (3) at 190
    pat7: PRVRKRI (5) at 738
    bipartite: none
    content of basic residues: 15.1%
    NLS Score: 0.15
KDEL: ER retention motif in the C-terminus: none
ER Membrane Retention Signals:
    XXRR-like motif in the N-terminus: KKQR
none
SKL: peroxisomal targeting signal in the C-terminus: none
PTS2: 2nd peroxisomal targeting signal: none
VAC: possible vacuolar targeting motif: none
RNA-binding motif: none
Actinin-type actin-binding motif:
    type 1: none
    type 2: none
NMYR: N-myristoylation pattern : none
Prenylation motif: none
memYQRL: transport motif from cell surface to Golgi: none
Tyrosines in the tail: none
Dileucine motif in the tail: none
checking 63 PROSITE DNA binding motifs: none
checking 71 PROSITE ribosomal protein motifs: none
checking 33 PROSITE prokaryotic DNA binding motifs: none
NNCN: Reinhardt's method for Cytoplasmic/Nuclear discrimination
    Prediction: nuclear
    Reliability: 89
COIL: Lupas's algorithm to detect coiled-coil regions
    total: 0 residues
------------------------------
Final Results (k = 9/23)
    65.2%: nuclear
    26.1%: mitochondrial
    4.3%: cytoplasmic
    4.3%: peroxisomal
>> prediction for CG187676-01 is nuc (k=23)
```

[0382] A search of the NOV7a protein against the Geneseq database, a proprietary database that contains sequences published in patents and patent publication, yielded several homologous proteins shown in Table 7C.

TABLE 7C
Geneseq Results for NOV7a

| | | NOV7a | Identifies/ | |
|---|---|---|---|---|
| | | Residues/ | Similarities for | |
| Genesq | Protein/Organism/Length | Match | the Matched | Expect |
| Identifier | [Patent #,Date] | Residues | Region | Value |
| ABJ26650 | Human protein modification + | 1 . . . 755 | 755/755 (100%) | 0.0 |
| | maintenance molecule protein | 1 . . . 755 | 755/755 (100%) | |
| | SEQ ID No 4 - Homo sapiens, | | | |
| | 755 aa. [WO2003000844-A2, 03- | | | |
| | JAN-2003] | | | |
| AAB71412 | Human HIPHUM106 splice | 1 . . . 755 | 754/755 (99%) | 0.0 |
| | variant SEQ ID 4 - Homo | 1 . . . 755 | 755/755 (99%) | |
| | sapiens, 755 aa. [GB2371801-A, | | | |
| | 07-AUG-2002] | | | |
| AAB71411 | Human HIPIIUM106 protein | 1 . . . 755 | 727/755 (96%) | 0.0 |
| | SEQ ID 2 - Homo sapiens, 727 | 1 . . . 727 | 727/755 (96%) | |
| | aa. [GB2371801-A, 07-AUG- | | | |
| | 2002] | | | |
| ABP69066 | Human polypeptide SEQ ID NO | 310 . . . 752 | 413/443 (93%) | 0.0 |
| | 1113 - Homo sapiens, 419 aa. | 1 . . . 415 | 413/443 (93%) | |
| | [WO200270539-A2, 12-SEP- | | | |
| | 2002] | | | |
| AAM25617 | Human protein sequence SEQ ID | 485 . . . 755 | 267/271 (98%) | e-157 |
| | NO:1132 - Homo sapiens, 270 aa. | 1 . . . 270 | 268/271 (98%) | |
| | [WO200153455-A2 , 26-JUL- | | | |
| | 2001] | | | |

[0383] In a BLAST search of public sequence databases, the NOV7a protein was found to have homology to the proteins shown in the BLASTP data in Table 7D.

TABLE 7D
Public BLASTP Results for NOV7a

| | | NOV7a | Identities/ | |
|---|---|---|---|---|
| Protein | | Residues/ | Similarities for | |
| Accession | Protein/ | Match | the Matched | Expect |
| Number | Organism/Length | Residues | Portion | Value |
| Q96H10 | Sentrin-specific protease 5 (EC | 1 . . . 755 | 754/755 (99%) | 0.0 |
| | 3.4.22.-) (Sentrin/SUMO-specific | 1 . . . 755 | 754/755 (99%) | |
| | protease SENP5) (Protease | | | |
| | FKSG45) - Homo sapiens | | | |
| | (Human), 755 aa. | | | |
| Q8WP32 | Sentrin-specific protease 5 (EG | 1 . . . 755 | 714/755 (94%) | 0.0 |
| | 3.4.22.-) (Sentrin/SUMO-specific | 1 . . . 755 | 735/755 (96%) | |
| | protease SENP5) (QtsA-16408) - | | | |
| | Macaca fascicularis (Grab eating | | | |
| | macaque) (Cynomolgus monkey), | | | |
| | 755 aa. | | | |
| Q8BXW0 | Hypothetical SUMO/sentrin/Ub11 | 1 . . . 755 | 619/756 (81%) | 0.0 |
| | specific protease containing protein - | 1 . . . 749 | 667/756 (87%) | |
| | Mus musculus (Mouse), 749 aa. | | | |
| Q8BRD5 | Sentrin/SUMO-specific protease - | 485 . . . 753 | 148/274 (54%) | 1e-82 |
| | Mus musculus(Mouse), 568 aa. | 294 . . . 566 | 202/274 (73%) | |
| Q9EP97 | Sentrin-specific protease 3 (EC | 485 . . . 753 | 148/274 (54%) | 1e-82 |
| | 3.4.22.-) (Sentrin/SUMO-specific | 294 . . . 566 | 202/274 (73%) | |
| | protease SENP3) (SUMO-1 | | | |
| | specific protease 3) (Smt3- | | | |
| | specific isopeptidase 1) (Smt3ip1) - | | | |
| | Mus musculus (Mouse), 568 aa. | | | |

[0384] PFam analysis indicates that the NOV7a protein contains the domains shown in the Table 7E.

TABLE 7E
Domain Analysis of NOV7a

| | | Identities/ | |
|---|---|---|---|
| | NOV7a | Similarities for | |
| Pfam Domain | Match Region | the Matched Region | Expect Value |
| Peptifase_{—} | 563 . . . 752 | 62/248 (25%) | 7e-43 |
| C48 | | 149/248 (60%) | |

### Example 8

[0385] The NOV8 clone was analyzed, and the nucleotide and encoded polypeptide sequences are shown in Table 8A.

TABLE 8A
NOV8 Sequence Analysis

| | | |
|---|---|---|
| NOV8a, CG50235-04 | SEQ ID NO: 85 | 3120 bp |

| | | |
|---|---|---|
| DNA Sequence | ORF Start: ATG at 256 | ORF Stop: TGA at 2719 |

TAACCTGTCTCACGACGGTCTAAACCCAGGCAGCCTCGGCCGCCGGGCAAGTAGCTCCGAGCGGCTGC
TTCCCGGTTGCCTCGAAGAAGACAGGGGGCGCCGCGCTCCGCTTGCTCCGCGCCTGAGCCATGCCCAG
CAGCCCTGTGTAACCACCGAGTCCCGGCCGGAGCCGACCGACCCAGTGTGCGCCGTCTTTCGGCCGAG
CTGAGCTTTCGTGCACGCAACTCCCTCTGCCCCAGCCGGCCCCGCGCCACCATGCCCCGGGCGACTGC
ACTTGGGGCCCTGGTGTCACTGCTGCTGCTGCTGCCGCTGCCTCGCGGCGCCGGGGGACTCGGGGAGC
GCCCGGACGCCACCGCAGACTACTCAGAGCTGGACGGCGAGGAGGGCACGGAGCAGCAGCTGGAGCAT
TACCACGACCCTTGCAAAGCCGCTGTCTTTTGGGGAGACATTGCCTTAGATGAAGATGACTTGAAGCT
GTTTCACATTGACAAAGCCAGAGACTGGACCAAGCAGACAGTGGGGGCAACAGGACACAGCACAGGTG
GGCTTGAAGAGCAGGCATCTGAGAGCAGCCCAGACACCACAGCCATGGACACTGGCACCAAGGAAGCT
GGAAAGGATGGCCGGGAGAATACCACACTCCTGCACAGCCCTGGGACCTTGCATGCCGCAGCCAAGAC
CTTCTCTCCCCGGGTCCGAAGAGCCACAACCTCAAGGACAGAGAGGATATGGCCTGGAGGAGTCATCC
CCTACGTCATTGGAGGGAACTTCACTGGGAGCCAGAGGGCCATTTTTAAGCAGGCCATGAGACACTGG
GAGAAGCACACCTGTGTGACCTTCATAGAAAGGACGGATGAGGAAAGCTTTATTGTATTCAGTTACAG
AACCTGTGGCTGTTGCTCCTATGTTGGGCGCCGAGGAGGAGGCCCACAGGCCATATCCATTGGGAAGA
ACTGTGACAAGTTTGGCATTGTGGCTCACGAGCTGGGCCATGTGGTTGGGTTTTGGCATGAACACACC
CGGCCAGACAGAGACCAACATGTCACCATCATCAGGGAAAACATCCAGCCAGGTCAGGAGTATAATTT
CTTAAAAATGGAAGCTGGGGAAGTGAGCTCTCTGGGAGAGACATACGACTTTGACAGCATCATGCACT
ACGCCCGGAACACCTTCTCAAGAGGAGTTTTCTTAGACACCATCCTTCCCCGTCAAGATGACAATGGC
GTCAGGCCAACCATTGGCCAGCGCGTGCGGCTCAGTCAGGGAGACATAGCTCAAGCCCGGAAGCTGTA
CAAATGCCCAGCGTGTGGGGAGACCCTGCAGGACACAACGGGAAACTTTTCTGCACCTGGTTTCCCAA
ATGGGTACCCATCTTACTCCCACTGCGTCTGGAGGATCTCGGTCACCCCAGGGGAAAAGATCGTATTA
AACTTCACATCCATGGATTTGTTTAAAAGCCGACTGTGCTGGTATGATTACGTGGAGGTCCGGGATGG
TTACTGGAGAAAAGCCCCCCTTTTGGGCAGGTTTTGTGGCGATAAGATCCCGGAGCCCCTCGTCTCCA
CGGACAGCCGGCTCTGGGTGGAGTTCCGCAGCAGCAGCAACATCTTGGGCAAGGGCTTCTTTGCAGCG
TACGAAGCTACCTGCGGGGGAGACATGAACAAAGATGCCGGTCAGATTCAATCTCCCAACTATCCGGA
TGACTACAGACCTTCCAAGGAATGTGTCTGGAGGATTACGGTTTCGGAGGGGTTTCACGTGGGACTTA
CCTTCCAAGCTTTTGAGATTGAAAGGCACGACAGCTGTGCATATGACTACCTGGAAGTCCGGGATGGC
CCCACGGAAGAGAGTGCCCTGATCGGCCACTTTTGTGGCTATGAGAAGCCGGAGGATGTGAAATCGAG
CTCCAACAGACTGTGGATGAAGTTTGTGTCCGATGGCTCTATCAATAAAGCGGGCTTTGCAGCCAATT
TTTTCAAGGAGGTGGATGAGTGTTCCTGGCCAGATCACGGCGGGTGCGAACATCGCTGTGTGAACACG
CTGGGCAGCTACAAGTGTGCCTGTGACCCTGGCTACGAGCTGGCCGCCGATAAGAAGATGTGTGAAGT
GGCCTGTGGCGGTTTCATTACCAAGCTGAATGGAACCATCACCAGCCCTGGGTGGCCGAAGGAGTATC
CCACAAACAAAAACTGTGTCTGGCAGGTGGTGGCCCCCGCTCAGTACCGGATCTCCCTTCAGTTTGAA
GTGTTTGAACTGGAAGGCAATGACGTCTGTAAGTACGACTTTGTAGAGGTGCGCAGCGGCCTGTCCCC
CGACGCCAAGCTGCACGGCAGGTTCTGCGGCTCTGAGACGCCGGAAGTCATCACCTCGCAGAGCAACA
ACATGCGCGTGGAGTTCAAGTCCGACAACACCGTCTCCAAGCGCGGCTTCAGGGCCCACTTCTTCTCA
GATAAGGACGAGTGTGCCAAGGACAACGGCGGGTGTCAGCATGAGTGCGTCAACACCTTCGGGAGCTA
CCTGTGCAGGTGCAGAAACGGCTACTGGCTCCACGAGAATGGGCATGACTGCAAAGAGGCTGGCTGTG
CACACAAGATCAGCAGTGTGGAGGGGACCCTGGCGAGCCCCAACTGGCCTGACAAATACCCCAGCCGG
AGGGAGTGTACCTGGAACATCTCTTCGACTGCAGGCCACAGAGTAAAACTCAGTGCGGGGTCAGGCTG
AAGGCTGAAGTGCAGACCAAAGAGCTCTATTCCCACGCCCAGTTTGGGGACAACAACTACCCGAGCGA
GGCCCGCTGTGACTGGGTGATCGTGGCAGAGGACGGCTACGGCGTGGAGCTGACATTCCGGACCTTTG
AGGTTGAGGAGGAGGCCGACTGCGGCTACGACTACATGGAAGCCTACGACGGCTACGACAGCTCAGCG
CCCAGGCTCGGCCGCTTCTGTGGCTCTGGGCCATTAGAAGAAATCTACTCTGCAGGTGATTCCCTGAT
GATTCGATTCCGCACAGATGACACCATCAACAAGAAAGGCTTTCATGCCCGATACACCAGCACCAAGT
TCCAGGATGCCCTGCACATGAAGAAATAGTGCTGATGTTCTTGAAAGACAGAAACTGAGA

NOV8a, CG50235-04

| | | | |
|---|---|---|---|
| Protein Sequence | SEQ ID NO: 86 | 821 aa | MW at 91404.2kD |

MPRATALGALVSLLLLLPLPRGAGGLGERPDATADYSELDGEEGTEQQLEHYHDPCKAAVFWGDIALD
EDDLKLFHIDKARDWTKQTVGATGHSTGGLEEQASESSPDTTAMDTGTKEAGKDGRENTTLLHSPGTL
HAAAKTFSPRVRRATTSRTERIWPGGVIPYVIGGNFTGSQRAIFKQAMRHWEKHTCVTFIERTDEESF
IVFSYRTCGCCSYVGRRGGGPQAISIGKNCDKFGIVAHELGHVVGFWHEHTRPDRDQHVTIIRENIQP
GQEYNFLKMEAGEVSSLGETYDFDSIMHYARNTFSRGVFLDTILPRQDDNGVRPTIGQRVRLSQGDIA
QARKLYKCPACGETLQDTTGNFSAPGFPNGYPSYSHCVWRISVTPGEKIVLNFTSMDLFKSRLCWYDY
VEVRDGYWRKAPLLGRFCGDKIPEPLVSTDSRLWVEFRSSSNILGKGFFAAYEATCGGDMNKDAGQIQ
SPNYPDDYRPSKECVWRITVSEGFHVGLTFQAFEIERHDSCAYDYLEVRDGPTEESALIGHFCGYEKP
EDVKSSSNRLWMKFVSDGSINKAGFAANFFKEVDECSWPDHGGCEHRCVNTLGSYKCACDPGYELAAD
KKMCEVACGGFITKLNGTITSPGWPKEYPTNKNCVWQVVAPAQYRISLQFEVFELEGNDVCKYDFVEV
RSGLSPDAKLHGRFCGSETPEVITSQSNNMRVEFKSDNTVSKRGFRAHFFSDKDECAKDNGGCQHECV
NTFGSYLCRCRNGYWLHENGHDCKEAGCAHKISSVEGTLASPNWPDKYPSRRECTWNISSTAGHRVKL
SAGSG

| | | |
|---|---|---|
| NOV8b, CG50235-01 | SEQ ID NO: 87 | 3350 bp |

| | | |
|---|---|---|
| DNA Sequence | ORF Start: ATG at 365 | ORF Stop: TAG at 3341 |

CGCCCATTGGCTCCTCAGCCAAGCACGTACACCAAATGTCTGAACCTGCGGTTCCTCTCGTACTGAGC
AGGATTACCATGGCAACAACACATCATCAGTAGGGTAAAACTAACCTGTCTCACGACGGTCTAAACCC
AGGCAGCCTCGGCCGCCGGGCAAGTAGCTCCGAGCGGCTGCTTCCCGGTTGCCTCGAAGAAGACAGGG
GGCGCCGCGCTCCGCTTGCTCCGCGCCTGAGCCATGCCCAGCAGCCCTGTGTAACCACCGAGTCCCGG
CCGGAGCCGACCGACCCAGTGTGCGCCGTCTTTCGGCCGAGCTGAGCTTTCGTGCACGCAACTCCCTC
TGCCCCAGCCGGCCCCGCGCCACCATGCCCCGGGCGACTGCACTTGGGGCCCTGGTGTCACTGCTGCT
GCTGCTGCCGCTGCCTCGCGGCGCCGGGGGACTCGGGGAGCGCCCGGACGCCACCGCAGACTACTCAG
AGCTGGACGGCGAGGAGGGCACGGAGCAGCAGCTGGAGCATTACCACGACCCTTGCAAAGCCGCTGTC
TTTTGGGGAGACATTGCCTTAGATGAAGATGACTTGAAGCTGTTTCACATTGACAAAGCCAGAGACTG
GACCAAGCAGACAGTGGGGGCAACAGGACACAGCACAGGTGGGCTTGAAGAGCAGGCATCTGAGAGCA
GCCCAGACACCACAGCCATGGACACTGGCACCAAGGAAGCTGGAAAGGATGGCCGGGAGAATACCACA
CTCCTGCACAGCCCTGGGACCTTGCATGCCGCAGCCAAGACCTTCTCTCCCCGGGTCCGAAGAGCCAC
AACCTCAAGGACAGAGAGGATATGGCCTGGAGGAGTCATCCCCTACGTCATTGGAGGGAACTTCACTG
GGAGCCAGAGGGCCATTTTTAAGCAGGCCATGAGACACTGGGAGAAGCACACCTGTGTGACCTTCATA
GAAAGGACGGATGAGGAAAGCTTTATTGTATTCAGTTACAGAACCTGTGGCTGTTGCTCCTATGTTGG
GCGCCGAGGAGGAGGCCCACAGGCCATATCCATTGGGAAGAACTGTGACAAGTTTGGCATTGTGGCTC
ACGAGCTGGGCCATGTGGTTGGGTTTTGGCATGAACACACCCGGCCAGACAGAGACCAACATGTCACC
ATCATCAGGGAAAACATCCAGCCAGGTCAGGAGTATAATTTCTTAAAAATGGAAGCTGGGGAAGTGAG
CTCTCTGGGAGAGACATACGACTTTGACAGCATCATGCACTACGCCCGGAACACCTTCTCAAGAGGAG
TTTTCTTAGACACCATCCTTCCCCGTCAAGATGACAATGGCGTCAGGCCAACCATTGGCCAGCGCGTG
CGGCTCAGTCAGGGAGACATAGCTCAAGCCCGGAAGCTGTACAAATGCCCAGCGTGTGGGGAGACCCT
GCAGGACACAACGGGAAACTTTTCTGCACCTGGTTTCCCAAATGGGTACCCATCTTACTCCCACTGCG
TCTGGAGGATCTCGGTCACCCCAGGGGAAAAGATCGTATTAAACTTCACATCCATGGATTTGTTTAAA
AGCCGACTGTGCTGGTATGATTACGTGGAGGTCCGGGATGGTTACTGGAGAAAAGCCCCCCTTTTGGG
CAGGTTTTGTGGCGATAAGATCCCGGAGCCCCTCGTCTCCACGGACAGCCGGCTCTGGGTGGAGTTCC
GCAGCAGCAGCAACATCTTGGGCAAGGGCTTCTTTGCAGCGTACGAAGCTACCTGCGGGGGAGACATG
AACAAAGATGCCGGTCAGATTCAATCTCCCAACTATCCGGATGACTACAGACCTTCCAAGGAATGTGT
CTGGAGGATTACGGTTTCAGAGGGGTTTCACGTGGGACTTACCTTCCAAGCTTTTGAGATTGAAAGGC
ACGACAGCTGTGCATATGACTACCTGGAAGTCCGGGATGGCCCCACGGAAGAGAGTGCCCTGATCGGC
CACTTTTGTGGCTATGAGAAGCCGGAGGATGTGAAATCGAGCTCCAACAGACTGTGGATGAAGTTTGT
GTCCGATGGCTCTATCAATAAAGCGGGCTTTGCAGCCAATTTTTTCAAGGAGGTGGATGAGTGTTCCT
GGCCAGATCACGGCGGGTGCGAACATCGCTGTGTGAACACGCTGGGCAGCTACAAGTGTGCCTGTGAC
CCTGGCTACGAGCTGGCCGCCGATAAGAAGATGTGTGAAGTGGCCTGTGGCGGTTTCATTACCAAGCT
GAATGGAACCATCACCAGCCCTGGGTGGCCGAAGGAGTATCCCACAAACAAAAACTGTGTCTGGCAGG
TGGTGGCCCCCACTCAGTACCGGATCTCCCTTCAGTTTGAAGTGTTTGAACTGGAAGGCAATGACGTC
TGTAAGTACGACTTTGTAGAGGTGCGCAGCGGCCTGTCCCCCGACGCCAAGCTGCACGGCAGGTTCTG
CGGCTCTGAGACGCCGGAAGTCATCACCTCGCAGAGCAACAACATGCGCGTGGAGTTCAAGTCCGACA
ACACCGTCTCCAAGCGCGGCTTCAGGGCCCACTTCTTCTCAGATAAGGACGAGTGTGCCAAGGACAAC
GGCGGGTGTCAGCATGAGTGCGTCAACACCTTCGGGAGCTACCTGTGCAGGTGCAGAAACGGCTACTG
GCTCCACGAGAATGGGCATGACTGCAAAGAGGCTGGCTGTGCACACAAGATCAGCAGTGTGGAGGGGA
CCCTGGCGAGCCCCAACTGGCCTGACAAATACCCCAGCCGGAGGGAGTGTACCTGGAACATCTCTTCG
ACTGCAGGCCACAGAGTGAAACTCACCTTTAATGAGTTTGAGATCGAGCAGCACCAGGAATGTGCCTA
TGACCACCTGGAAATGTATGACGGGCCGGACAGCCTGGCCCCCATTCTGGGCCGTTTCTGCGGCAGCA
AGAAACCAGACCCCACGGTGGCTTCCGGCAGCAAGTGCGGGGGCAGGCTGAAGGCTGAAGTGCAGACC
AAAGAGCTCTATTCCCACGCCCAGTTTGGGGACAACAACTACCCGAGCGAGGCCCGCTGTGACTGGGT
GATCGTGGCAGAGGACGGCTACGGCGTGGAGCTGACATTCCGGACCTTTGAGGTTGAGGAGGAGGCCG
ACTGCGGCTACGACTACATGGAAGCCTACGACGGCTACGACAGCTCAGCGCCCAGGCTCGGCCGCTTC
TGTGGCTCTGGGCCATTAGAAGAAATCTACTCTGCAGGTGATTCCCTGATGATTCGATTCCGCACAGA
TGACACCATCAACAAGAAAGGCTTTCATGCCCGATACACCAGCACCAAGTTCCAGGATGGCCTGCACA
TGAAGAAATAGTGCTGAT

NOV8b, CG50235-01

| | | | |
|---|---|---|---|
| Protein Sequence | SEQ ID NO: 88 | 992 aa | MW at 110925.6kD |

MPRATALGALVSLLLLLPLPRGAGGLGERPDATADYSELDGEEGTEQQLEHYHDPCKAAVFWGDIALD
EDDLKLFHIDKARDWTKQTVGATGHSTGGLEEQASESSPDTTAMDTGTKEAGKDGRENTTLLHSPGTL
HAAAKTFSPRVRRATTSRTERIWPGGVIPYVIGGNFTGSQRAIFKQANRHWEKHTCVTFIERTDEESF
IVFSYRTCGCCSYVGRRGGGPQAISIGKNCDKFGIVAHELGHVVGFWHEHTRPDRDQHVTIIRENIQP
GQEYNFLKMEAGEVSSLGETYDFDSIMHYARNTFSRGVFLDTILPRQDDNGVRPTIGQRVRLSQGDIA
QARKLYKCPACGETLQDTTGNFSAPGFPNGYPSYSHCVWRISVTPGEKIVLNFTSMDLFKSRLCWYDY
VEVRDGYWRKAPLLGRFCGDKIPEPLVSTDSRLWVEFRSSSNILGKGFFAAYEATCGGDMNKDAGQIQ
SPNYPDDYRPSKECVWRITVSEGFHVGLTFQAFEIERHDSCAYDYLEVRDGPTEESALIGHFCGYEKP
EDVKSSSNRLWNKFVSDGSINKAGFAANFFKEVDECSWPDHGGCEHRCVNTLGSYKCACDPGYELAAD
KKMCEVACGGFITKLNGTITSPGWPKEYPTNKNCVWQVVAPTQYRISLQFEVFELEGNDVCKYDFVEV
RSGLSPDAKLHGRFCGSETPEVITSQSNNNRVEFKSDNTVSKRGFRAHFFSDKDECAKDMGGCQHECV
NTFGSYLCRCRNGYWLHENGHDCKEAGCAHKISSVEGTLASPNWPDKYPSRRECTWNISSTAGHRVKL
TFNEFEIEQHQECAYDHLEMYDGPDSLAPILGRFCGSKKPDPTVASGSKCGGRLKAEVQTKELYSHAQ
FGDNNYPSEARCDWVIVAEDGYGVELTFRTFEVEEEADCGYDYMEAYDGYDSSAPRLGRFCGSGPLEE
IYSAGDSLMIRFRTDDTINKKGFHARYTSTKFQDGLHMKK

| | | |
|---|---|---|
| NOV8c, CG50235-02 | SEQ ID NO: 89 | 5006 bp |

| | | |
|---|---|---|
| DNA Sequence | ORF Start: ATG at 365 | ORF Stop: TAG at 3410 |

CGCCCATTGGCTCCTCAGCCAAGCACGTACACCAAATGTCTGAACCTGCGGTTCCTCTCGTACTGAGC
AGGATTACCATGGCAACAACACATCATCAGTAGGGTAAAACTAACCTGTCTCACGACGGTCTAAACCC
AGGCAGCCTCGGCCGCCGGGCAAGTAGCTCCGAGCGGCTGCTTCCCGGTTGCCTCGAAGAAGACAGGG
GGCGCCGCGCTCCGCTTGCTCCGCGCCTGAGCCATGCCCAGCAGCCCTGTGTAACCACCGAGTCCCGG
CCGGAGCCGACCGACCCAGTGTGCGCCGTCTTTCGGCCGAGCTGAGCTTTCGTGCACGCAACTCCCTC
TGCCCCAGCCGGCCCCGCGCCACCATGCCCCGGGCGACTGCACTTGGGGCCCTGGTGTCACTGCTGCT
GCTGCTGCCGCTGCCTCGCGGCGCCGGGGGACTCGGGGAGCGCCCGGACGCCACCGCAGACTACTCAG
AGCTGGACGGCGAGGAGGGCACGGAGCAGCAGCTGGAGCATTACCACGACCCTTGCAAAGCCGCTGTC
TTTTGGGGAGACATTGCCTTAGATGAAGATGACTTGAAGCTGTTTCACATTGACAAAGCCAGAGACTG
GACCAAGCAGACAGTGGGGGCAACAGGACACAGCACAGGTGGGCTTGAAGAGCAGGCATCTGAGAGCA
GCCCAGACACCACAGCCATGGACACTGGCACCAAGGAAGCTGGAAAGGATGGCCGGGAGAATACCACA
CTCCTGCACAGCCCTGGGACCTTGCATGCCGCAGCCAAGACCTTCTCTCCCCGGGTCCGAAGAGCCAC
AACCTCAAGGACAGAGAGGATATGGCCTGGAGGAGTCATCCCCTACGTCATTGGAGGGAACTTCACTG
GGAGCCAGAGGGCCATTTTTAAGCAGGCCATGAGACACTGGGAGAAGCACACCTGTGTGACCTTCATA
GAAAGGACGGATGAGGAAAGCTTTATTGTATTCAGTTACAGAACCTGTGGCTGTTGCTCCTATGTTGG
GCGCCGAGGAGGAGGCCCACAGGCCATATCCATTGGGAAGAACTGTGACAAGTTTGGCATTGTGGCTC
ACGAGCTGGGCCATGTGGTTGGGTTTTGGCATGAACACACCCGGCCAGACAGAGACCAACATGTCACC
ATCATCAGGGAAAACATCCAGCCAGGTCAGGAGTATAATTTCTTAAAAATGGAAGCTGGGGAAGTGAG
CTCTCTGGGAGAGACATACGACTTTGACAGCATCATGCACTACGCCCGGAACACCTTCTCAAGAGGAG
TTTTCTTAGACACCATCCTTCCCCGTCAAGATGAGATGGCGTCCAGGCCAACCATTGGCCAGCGCGTG
CGGCTCAGTCAGGGAGACATAGCTCAAGCCCGGAAGCTGTACAAATGCCCAGCGTGTGGGGAGACCCT
GCAGGACACAACGGGAAACTTTTCTGCACCTGGTTTCCCAAATGGGTACCCATCTTACTCCCACTGCT
TCTGGAGGATCTCGGTCACCCCAGGGGAAAAGATCGTATTAAACTTCACATCCATGGATTTGTTTAAA
AGCCGACTGTGCTGGTATGATTACGTGGAGGTCCGGGATGGTTACTGGAGAAAAGCCCCCCTTTTGGG
CAGGTTTTGTGGCGATAAGATCCCGGAGCCCCTCGTCTCCACGGACAGCCGGCTCTGGGTGGAGTTCC
GCAGCAGCAGCAACATCTTGGGCAAGGGCTTCTTTGCAGCGTACGAAGCTACCTGCGGAAGAGACATG
AACAAAGATGCCGGTCAGATTCAATCTCCCAACTATCCGGATGACTACAGACCTTCCAAGGAATGTGT
CTGGAGGATTACGGTTTCGGAGGGGTTTCACGTGGGACTTACCTTCCAAGCTTTTGAGATTGAAAGGC
ACGACAGCTGTGCATATGACTACCTGGAAGTCCGGGATGGCCCCACGGAAGAGAGTGCCCTGATCGGC
CACTTTTGTGGCTATGAGAAGCCGGAGGATGTGAAATCGAGCTCCAACAGACTGTGGATGAAGTTTGT
GTCCGATGGCTCTATCAATAAAAGCGGGCTTTGCAGCCAATTTTTTCAAGGAGGTGGATGAGTGTTCT
GGCCAGATCACGGCGGGTGCGAACATCGCTGTGTGAACACGCTGGGCAGCTACAAGTGTGCCTGTGAC
CCTGGCTACGAGCTGGCCGCCGATAAGAAGATGTGTGAAGTGGCCTGTGGCGGTTTCATTACCAAGCT
GAATGGAACCATCACCAGCCCTGGGTGGCCGAAGGAGTATCCCACAAACAAAAACTGTGTCTGGCAGG
TGGTGGCCCCCGCTCAGTACCGGATCTCCCTTCAGTTTGAAGTGTTTGAACTGGAAGGCAATGACGTC
TGTAAGTACGACTTTGTACAGGTGCGCAGCGGCCTGTCCCCCGACGCCAAGCTGCACGGCAGGTTCTG
CGGCTCTGAGACGCCGGAAGTCATCACCTCGCAGAGCAACAACATGCGCGTGGAGTTCAAGTCCGACA
ACACCGTCTCCAAGCGCGGCTTCAGGGCCCACTTCTTCTCAGATAAGGACGAGTGTGCCAAGGACAAC
GGCGGGTGTCAGCATGAGTGCGTCAACACCTTCGGGAGCTACCTGTGCAGGTGCAGAAACGGCTACTG
GCTCCACGAGAATGGGCATGACTGCAAAGAGGCTGGCTGTGCACACAAGATCAGCAGTGTGGAGGGGA
CCCTGGCGAGCCCCAACTGGCCTGACAAATACCCCAGCCGGAGGGAGTGTACCTGGAACATCTCTTCG
ACTGCAGGCCACAGAGTGAAACTCACCTTTAATGAGTTTGAGATCGAGCAGCACCAGGAATGTGCCTA
TGACCACCTGGAAATGTATGACGGGCCGGACAGCCTGGCCCCCATTCTGGGCCGTTTCTGCGGCAGCA
AGAAACCAGACCCCACGGTGGCTTCCGGCAGCAGTATGTTTCTCAGGTTTTATTCGGATGCCTCAGTG
CAGAGGAAAGGCTTCCAGGCAGTGCACAGCACAGAGTGCGGGGGCAGGCTGAAGGCTGAAGTGCAGAC
CAAAGAGCTCTATTCCCACGCCCAGTTTGGGGACAACAACTACCCGAGCGAGGCCCGCTGTGACTGGG
TGATCGTGGCAGAGGACGGCTACGGCGTGGAGCTGACATTCCGGACCTTTGAGGTTGAGGAGGAGGCC
GACTGCGGCTACGACTACATGGAAGCCTACGACGGCTACGACAGCTCAGCGCCCAGGCTCGGCCGCTT
CTGTGGCTCTGGGCCATTAGAAGAAATCTACTCTGCAGGTGATTCCCTGATGATTCGATTCCGCACAG
ATGACACCATCAACAAGAAAGGCTTTCATGCCCGATACACCAGCACCAAGTTCCAGGATGCCCTGCAC
ATGAAGAAATAGTGCTGATGTTCTTGAAAGACAGAAACTGAGAATTTTTTTGTTTTGTTTTGTTTTTA
ACAACAATAGCACCTTGAAAATCTGCCCTAAAACAGTGTACAGTATTTTTCTCAAACAAAAACTCAGA
ATCCAGCCTTAGAGGTATATATTTGAATGAAAGTCTTGTAAGTTTGGCCAACAAGGTGGAGAAAAAAA
TGTTCTTTTGCTTCTGTCTGCAATGTTGTCATTCATGAACTGTTAAAGTGTTAAAGATTAGGATTGGA
GTCACTGACCATTCCGGCTATGCTTCTTCATACCATTCTCCTTGTTGTCCCTTGCTCCTATGTGGCAA
AAGGTCAGCCTTGGGGTTGGCCGTTCCTCTAATCTGGACTTGCTTGCTTGGTGCCAGGTGCGTCTTCT
GTCCATGTTGGGCATAAGGGATGAAAACTTGGCCGAGACTAATGTGTGGCCCACAGCTTTGGCTGGAA
TCATTTTCTTTCTCTCTGCCAGGGACATGTCAACCAAGAAACCTGAAAATATGGATGGATGTCAGGAC
TAAAAAAAGGCATCACAGTGAGCAGTGAGCACAGAGGGAGTTTCGAGTATAAGAATCATTGTCATGAA
GTTAGGAGACCACAAAGCCATTTCTCAGAGTCATTCACTCTCCTTGTCCCTTTGGTTTCCCCCCTTCC
TTAATTGCAGTGGGGGCTAAGGTATCCATTATGAATACAGCAGAACATTTGCTGGCGAGAGTCCTGTC
TGCTGAGAAGACAATATTGTGGCTCGTCCTGATATTTTTTCATTCATTGACTTTGAGAAGACTCCACC
TGTGCTTGGAATTCCATGGGCTTCAAAGAACATTTCTTCTTTTAGCTTTGGAGGCACTTGCCGTGGCA
CACCTGGACTCCTTGACATCCAATTCAAACTGCATTTGCAAAATGTGCAAAGACCTCTTATGAGGGAC
CAATTCAGGTCCCTTATGGGGTGAACACTGTTGAAGACTGGTTAATTATAAGTTATGTAAGAATCATC
GCCTTGTGGAACAAGTCAATCAGTGACTAGCTTCCTGTAGCCAATCAGGTTAAAGAGGGCGTTGGTAA
TTTTGTTCTGATTTAACTAGTATTCAATCACCAACTTGCAAACAGAATTCATAACACTTGGCACTTGT
TCTAGAGAAGTGTAGAGGATGATGTTAACATAATTTTAGCACTTCAAGGTATAATTTAAACAGTGAGG
TAGTTTTGAATGGCATTTCATTAAGGCATCTATGGGCATTATGAGCTAAAAGCTGTGGTATGTTAGCT
TTAAAAGAGTATTTATGTTGGAATAATTTTTAAATAATGTTTACATAACTGTAAGTCCTGTTTGGTTG
TTGTTGGACGCAGGGCGGCACATGAGTGTTTTTGGTTAGAGCCAAGATAGCTCCCATGCACCGGAATT
CCTTTGGGATGAATCAGCATCATTTTAAACAAAGTATATGTAAAAGGTGAAAGGTTATATTTTTTACA
GATCAGAATGTGGCACCAGAGGACTGTGTCTCATTAAAGTGATTGCTGGGAGCAAAAACTAGAATGAT
ACAAAGAAAGGTCAGAGAAATGCATGGGAATATTTTTTCTTT

NOV8c, CG50235-02

| | | | |
|---|---|---|---|
| Protein Sequence | SEQ ID NO: 90 | 1015 aa | MW at 113555.5kD |

MPRATALGALVSLLLLLPLPRGAGGLGERPDATADYSELDGEEGTEQQLEHYHDPCKAAVFWGDIALD
EDDLKLFHIDKARDWTKQTVGATGHSTGGLEEQASESSPDTTAMDTGTKEAGKDGRENTTLLHSPGTL
HAAAKTFSPRVRRATTSRTERIWPGGVIPYVIGGNFTGSQRAIFKQAMRHWEKHTCVTFIERTDEESF
IVFSYRTCGCCSYVGRRGGGPQAISIGKNCDKFGIVAHELGHVVGFWHEHTRPDRDQHVTIIRENIQP
GQEYNFLKMEAGEVSSLGETYDFDSIMHYARNTFSRGVFLDTILPRQDDNGVRPTIGQRVRLSQGDIA
QARKLYKCPACGETLQDTTGNFSAPGFPNGYPSYSHCVWRISVTPGEKIVLNFTSMDLFKSRLCWYDY
VEVRDGYWRKAPLLGRFCGDKIPEPLVSTDSRLWVEFRSSSNILGKGFFAAYEATCGGDMNKDAGQIQ
SPNYPDDYRPSKECVWRITVSEGFHVGLTFQAFEIERHDSCAYDYLEVRDGPTEESALIGHFCGYEKP
EDVKSSSNRLWMKFVSDGSINKAGFAANFFKEVDECSWPDHGGCEHRCVNTLGSYKCACDPGYELAAD
KKMCEVACGGFITKLNGTITSPGWPKEYPTNKNCVWQVVAPAQYRISLQFEVFELEGNDVCKYDFVEV
RSGLSPDAKLHGRFCGSETPEVITSQSNNMRVEFKSDNTVSKRGFRAHFFSDKDECAKDNGGCQHECV
NTFGSYLCRCRNGYWLHENGHDCKEAGCAHKISSVEGTLASPNWPDKYPSRRECTWNISSTAGHRVKL
TFNEFEIEQHQECAYDHLEMYDGPDSLAPILGRFCGSKKPDPTVASGSSMFLRFYSDASVQRKGFQAV
HSTECGGRLKAEVQTKELYSHAQFGDNNYPSEARCDWVIVAEDGYGVELTFRTFEVEEEADCGYDYME
AYDGYDSSAPRLGRFCGSGPLEEIYSAGDSLMIRFRTDDTINKKGFHARYTSTKFQDALHMKK

| | | |
|---|---|---|
| NOV8d, CG50235-03 | SEQ ID NO: 91 | 3146 bp |

| | | |
|---|---|---|
| DNA Sequence | ORF Start: ATG at 227 | ORF Stop: TAG at 3137 |

GCAGCCTCGGCCGCCGGGCAAGTAGCTCCGAGCGGCTGCTTCCCGGTTGCCTCGACGAAGACAGGGGG
CGCCGCGCTCCGCTTGCTCCGCGCCTGAGCCATGCCCAGCAGCCCTGTGTAACCACCGAGTCCCGGCC
GGAGCCGACCGACCCAGTGTGCGCCGTCTTTCGGCCGAGCTGAGCTTTCGTGCACGCAACTCCCTCTG
CCCCAGCCGGCCCCGCGCCACCATGCCCCGGGCGACTGCACTTGGGGCCCTGGTGTCACTGCTGCTGC
TGCTGCCGCTGCCTCGCGGCGCCGGGGGACTCGGGGAGCGCCCGGACGCCACCGCAGACTACTCAGAG
CTGGACGGCGAGGAGGGCACGGAGCAGCAGCTGGAGCATTACCACGACCCTTGCAAAGCCGCTGTCTT
TTGGGGAGACATTGCCTTAGATGAAGATGACTTGAAGCTGTTTCACATTGACAAAGCCAGAGACTGGA
CCAAGCAGACAGTGGGGGCAACAGGACACAGCACAGGTGGGCTTGAAGAGCAGGCATCTGAGAGCAGC
CCAGACACCACAGCCATGGACACTGGCACCAAGGAAGCTGGAAAGGGGAGCCAGAGGGCCATTTTTAA
GCAGGCCATGAGACACTGGGAGAAGCACACCTGTGTGACCTTCATAGAAAGGACGGATGAGGAAAGCT
TTATTGTATTCAGTTACAGAACCTGTGGCTGTTGCTCCTATGTTGGGCGCCGAGGAGGAGGCCCACAG
GCCATATCCATTGGGAAGAACTGTGACAAGTTTGGCATTGTGGCTCACGAGCTGGGCCATGTGGTTGG
GTTTTGGCATGAACACACCCGGCCAGACAGAGACCAACATGTCACCATCATCAGGGAAAACATCCAGC
CAGGTCAGGAGTATAATTTCTTAAAAATGGAAGCTGGGGAAGTGAGCTCTCTGGGAGAGACATACGAC
TTTGACAGCATCATGCACTACGCCCGGAACACCTTCTCAAGAGGAGTTTTTTTAGACACCATCCTTCC
CCGTCAAGATGACAATGGCGTCAGGCCAACCATTGGCCAGCGCGTGCGGCTCAGTCAGGGAGACATAG
CTCAAGCCCGGAAGCTGTACAAATGCCCAGGTCCTACTTGTGCTTTTGTTAGCCAGAAAACATCAATC
TGCTTGCTACACTTCTCACCAACCTGTTCCGAGGGCTTTGGCTGGCAAAGGGCGTGTGGGGAGACCCT
GCAGGACACAACGGGAAACTTTTCTGCACCTGGTTTCCCAAATGGGTACCCATCTTACTCCCACTGCG
TCTGGAGGATCTCGGTCACCCCAGGGGAAAAGATCGTATTAAACTTCACATCCATGGATTTGTTTAAA
AGCCGACTGTGCTGGTATGATTACGTGGAGGTCCGGGATGGTTACTGGAGAAAAGCCCCCCTTTTGGG
CAGGTTTTGTGGCGATAAGATCCCGGAGCCCCTCGTCTCCACGGACAGCCGGCTCTGGGTGGAGTTCC
GCAGCAGCAGCAACATCTTGGGCAAGGGCTTCTTTGCAGCGTACGAAGCTACCTGCGGGGGAGACATG
AACAAAGATGCCGGTCAGATTCAATCTCCCAACTATCCGGATGACTACAGACCTTCCAAGGAATGTGT
CTGGAGGATTACGGTTTCAGAGGGGTTTCACGTGGGACTTACCTTCCAAGCTTTTGAGATTGAAAGGC
ACGACAGCTGTGCATATGACTACCTGGAAGTCCGGGATGGCCCCACGGAAGAGAGTGCCCTGATCGGC
CACTTTTGTGGCTATGAGAAGCCGGAGGATGTGAAATCGAGCTCCAACAGACTGTGGATGAAGTTTGT
GTCCGATGGCTCTATCAATAAAGCGGGCTTTGCAGCCAATTTTTTCAAGGAGGTGGATGAGTGTTCCT
GGCCAGATCACGGCGGGTGCGAGCATCGCTGTGTGAACACGCTGGGCAGCTACAAGTGTGCCTGTGAC
CCTGGCTACGAGCTGGCCGCCGATAAGAAGATGTGTGAAGTGGCCTGTGGCGGTTTCATTACCAAGCT
GAATGGAACCATCACCAGCCCTGGGTGGCCGAAGGAGTATCCCACAAACAAAAACTGTGTCTGGCAGG
TGGTGGCCCCCACTCAGTACCGGATCTCCCTTCAGTTTGAAGTGTTTGAACTGGAAGGCAATGACGTC
TGTAAGTACGACTTTGTAGAGGTGCGCAGCGGCCTGTCCCCCGACGCCAAGCTGCACGGCAGGTTCTG
CGGCTCTGAGACGCCGGAGGTCATCACCTCGCAGAGCAACAACATGCGCGTGGAGTTCAAGTCCGACA
ACACCGTCTCCAAGCGCGGCTTCAGGGCCCACTTCTTCTCAGATAAGGACGAGTGTGCCAAGGACAAC
GGCGGGTGTCAGCATGAGTGCGTCAACACCTTCGGGAGCTACCTGTGCAGGTGCAGAAACGGCTACTG
GCTCCACGAGAATGGGCATGACTGCAAAGAGGCTGGCTGTGCACACAAGATCAGCAGTGTGGAGGGGA
CCCTGGCGAGCCCCAACTGGCCTGACAAATACCCCAGCCGGAGGGAGTGTACCTGGAACATCTCTTCG
ACTGCAGGCCACAGAGTGAAACTCACCTTTAATGAGTTTGAGATCGAGCAGCACCAGGAATGTGCCTA
TGACCACCTGGAAATGTATGACGGGCCGGACAGCCTGGCCCCCATTCTGGGCCGTTTCTGCGGTAGCA
AGAAACCAGACCCCACGGTGGCTTCCGGCAGCAAGTGCGGGGGCAGGCTGAAGGCTGAAGTGCAGACC
AAAGAGCTCTATTCCCACGCCCAGTTTGGGGACAACAACTACCCGAGCGAGGCCCGCTGTGACTGGGT
GATCGTGGCAGAGGACGGCTACGGCGTGGAGCTGACATTCCGGACCTTTGAGGTTGAGGAGGAGGCCG
ACTGCGGCTACGACTACATGGAAGCCTACGACGGCTACGACAGCTCAGCGCCCAGGCTCGGCCGCTTC
TGTGGCTCTGGGCCATTAGAAGAAATCTACTCTGCAGGTGATTCCCTGATGATTCGATTCCGCACAGA
TGACACCATCAACAAGAAAGGCTTTCATGCCCGATACACCAGCACCAAGTTCCAGGATGCCCTGCACA
TGAAGAAATAGTGCTGAT

NOV8d, CG50235-03

| | | | |
|---|---|---|---|
| Protein Sequence | SEQ ID NO: 92 | 970 aa | MW at 108564.0kD |

MPRATALGALVSLLLLLPLPRGAGGLGERPDATADYSELDGEEGTEQQLEHYHDPCKAAVFWGDIALD
EDDLKLFHIDKARDWTKQTVGATGHSTGGLEEQASESSPDTTAMDTGTKEAGKGSQRAIFKQAMRHWE
KHTCVTFIERTDEESFIVFSYRTCGCCSYVGRRGGGPQAISIGKNCDKFGIVAHELGHVVGFWHEHTR
PDRDQHVTIIRENIQPGQEYNFLKMEAGEVSSLGETYDFDSINHYARNTFSRGVFLDTILPRQDDNGV
RPTIGQRVRLSQGDIAQARKLYKCPGPTCAFVSQKTSICLLHFSPTCSEGFGWQRACGETLQDTTGNF
SAPGFPNGYPSYSHCVWRISVTPGEKIVLNFTSMDLFKSRLCWYDYVEVRDGYWRKAPLLGRFCGDKI
PEPLVSTDSRLWVEFRSSSNILGKGFFAAYEATCGGDMNKDAGQIQSPNYPDDYRPSKECVWRITVSE
GFHVGLTFQAFEIERHDSCAYDYLEVRDGPTEESALIGHFCGYEKPEDVKSSSNRLWMKFVSDGSINK
AGFAANFFKEVDECSWPDHGGCEHRCVNTLGSYKCACDPGYELAADKKMCEVACGGFITKLNGTITSP
GWPKEYPTNKNCVWQVVAPTQYRISLQFEVFELEGNDVCKYDFVEVRSGLSPDAKLHGRFCGSETPEV
ITSQSNNMRVEFKSDNTVSKRGFRAHFFSDKDECAKDNGGCQHECVNTFGSYLCRCRNGYWLHENGHD
CKEAGCAHKISSVEGTLASPNWPDKYPSRRECTWNISSTAGHRVKLTFNEFEIEQHOECAYDHLEMYD
GPDSLAPILGRFCGSKKPDPTVASGSKCGGRLKAEVQTKELYSHAQFGDNNYPSEARCDWVIVAEDGY
GVELTFRTFEVEEEADCGYDYMEAYDGYDSSAPRLGRFCGSGPLEEIYSAGDSLMIRFRTDDTINKKG
FHARYTSTKFQDALHMKK

| | |
|---|---|
| SEQ ID NO: 93 | 3120 bp |

| | | |
|---|---|---|
| NOV8e, SNP13377383 of | ORF Start: ATG at 256 | ORF Stop: TGA at 2719 |

| | | |
|---|---|---|
| CG50235-04, DNA Sequence | SNP Pos: 2201 | SNP Change: A to G |

TAACCTGTCTCACGACGGTCTAAACCCAGGCAGCCTCGGCCGCCGGGCAAGTAGCTCCGAGCGGCTGC
TTCCCGGTTGCCTCGAAGAAGACAGGGGGCGCCGCGCTCCGCTTGCTCCGCGCCTGAGCCATGCCCAG
CAGCCCTGTGTAACCACCGAGTCCCGGCCGGAGCCGACCGACCCAGTGTGCGCCGTCTTTCGGCCGAG
CTGAGCTTTCGTGCACGCAACTCCCTCTGCCCCAGCCGGCCCCGCGCCACCATGCCCCGGGCGACTGC
ACTTGGGGCCCTGGTGTCACTGCTGCTGCTGCTGCCGCTGCCTCGCGGCGCCGGGGGACTCGGGGAGC
GCCCGGACGCCACCGCAGACTACTCAGAGCTGGACGGCGAGGAGGGCACGGAGCAGCAGCTGGAGCAT
TACCACGACCCTTGCAAAGCCGCTGTCTTTTGGGGAGACATTGCCTTAGATGAAGATGACTTGAAGCT
GTTTCACATTGACAAAGCCAGAGACTGGACCAAGCAGACAGTGGGGGCAACAGGACACAGCACAGGTG
GGCTTGAAGAGCAGGCATCTGAGAGCAGCCCAGACACCACAGCCATGGACACTGGCACCAAGGAAGCT
GGAAAGGATGGCCGGGAGAATACCACACTCCTGCACAGCCCTGGGACCTTGCATGCCGCAGCCAAGAC
CTTCTCTCCCCGGGTCCGAAGAGCCACAACCTCAAGGACAGAGAGGATATGGCCTGGAGGAGTCATCC
CCTACGTCATTGGAGGGAACTTCACTGGGAGCCAGAGGGCCATTTTTAAGCAGGCCATGAGACACTGG
GAGAAGCACACCTGTGTGACCTTCATAGAAAGGACGGATGAGGAAAGCTTTATTGTATTCAGTTACAG
AACCTGTGGCTGTTGCTCCTATGTTGGGCGCCGAGGAGGAGGCCCACAGGCCATATCCATTGGGAAGA
ACTGTGACAAGTTTGGCATTGTGGCTCACGAGCTGGGCCATGTGGTTGGGTTTTGGCATGAACACACC
CGGCCAGACAGAGACCAACATGTCACCATCATCAGGGAAAACATCCAGCCAGGTCAGGAGTATAATTT
CTTAAAAATGGAAGCTGGGGAAGTGAGCTCTCTGGGAGAGACATACGACTTTGACAGCATCATGCACT
ACGCCCGGAACACCTTCTCAAGAGGAGTTTTCTTAGACACCATCCTTCCCCGTCAAGATGACAATGGC
GTCAGGCCAACCATTGGCCAGCGCGTGCGGCTCAGTCAGGGAGACATAGCTCAAGCCCGGAAGCTGTA
CAAATGCCCAGCGTGTGGGGAGACCCTGCAGGACACAACGGGAAACTTTTCTGCACCTGGTTTCCCAA
ATGGGTACCCATCTTACTCCCACTGCGTCTGGAGGATCTCGGTCACCCCAGGGGAAAAGATCGTATTA
AACTTCACATCCATGGATTTGTTTAAAAGCCGACTGTGCTGGTATGATTACGTGGAGGTCCGGGATGG
TTACTGGAGAAAAGCCCCCCTTTTGGGCAGGTTTTGTGGCGATAAGATCCCGGAGCCCCTCGTCTCCA
CGGACAGCCGGCTCTGGGTGGAGTTCCGCAGCAGCAGCAACATCTTGGGCAAGGGCTTCTTTGCAGCG
TACGAAGCTACCTGCGGGGGAGACATGAACAAAGATGCCGGTCAGATTCAATCTCCCAACTATCCGGA
TGACTACAGACCTTCCAAGGAATGTGTCTGGAGGATTACGGTTTCGGAGGGGTTTCACGTGGGACTTA
CCTTCCAAGCTTTTGAGATTGAAAGGCACGACAGCTGTGCATATGACTACCTGGAAGTCCGGGATGGC
CCCACGGAAGAGAGTGCCCTGATCGGCCACTTTTGTGGCTATGAGAAGCCGGAGGATGTGAAATCGAG
CTCCAACAGACTGTGGATGAAGTTTGTGTCCGATGGCTCTATCAATAAAGCGGGCTTTGCAGCCAATT
TTTTCAAGGAGGTGGATGAGTGTTCCTGGCCAGATCACGGCGGGTGCGAACATCGCTGTGTGAACACG
CTGGGCAGCTACAAGTGTGCCTGTGACCCTGGCTACGAGCTGGCCGCCGATAAGAAGATGTGTGAAGT
GGCCTGTGGCGGTTTCATTACCAAGCTGAATGGAACCATCACCAGCCCTGGGTGGCCGAAGGAGTATC
CCACAAACAAAAACTGTGTCTGGCGGGTGGTGGCCCCCGCTCAGTACCGGATCTCCCTTCAGTTTGAA
GTGTTTGAACTGGAAGGCAATGACGTCTGTAAGTACGACTTTGTAGAGGTGCGCAGCGGCCTGTCCCC
CGACGCCAAGCTGCACGGCAGGTTCTGCGGCTCTGAGACGCCGGAAGTCATCACCTCGCAGAGCAACA
ACATGCGCGTGGAGTTCAAGTCCGACAACACCGTCTCCAAGCGCGGCTTCAGGGCCCACTTCTTCTCA
GATAAGGACGAGTGTGCCAAGGACAACGGCGGGTGTCAGCATGAGTGCGTCAACACCTTCGGGAGCTA
CCTGTGCAGGTGCAGAAACGGCTACTGGCTCCACGAGAATGGGCATGACTGCAAAGAGGCTGGCTGTG
CACACAAGATCAGCAGTGTGGAGGGGACCCTGGCGAGCCCCAACTGGCCTGACAAATACCCCAGCCGG
AGGGAGTGTACCTGGAACATCTCTTCGACTGCAGGCCACAGAGTAAAACTCAGTGCGGGGTCAGGCTG
AAGGCTGAAGTGCAGACCAAAGAGCTCTATTCCCACGCCCAGTTTGGGGACAACAACTACCCGAGCGA
GGCCCGCTGTGACTGGGTGATCGTGGCAGAGGACGGCTACGGCGTGGAGCTGACATTCCGGACCTTTG
AGGTTGAGGAGGAGGCCGACTGCGGCTACGACTACATGGAAGCCTACGACGGCTACGACAGCTCAGCG
CCCAGGCTCGGCCGCTTCTGTGGCTCTGGGCCATTAGAAGAAATCTACTCTGCAGGTGATTCCCTGAT
GATTCGATTCCGCACAGATGACACCATCAACAAGAAAGGCTTTCATGCCCGATACACCAGCACCAAGT
TCCAGGATGCCCTGCACATGAAGAAATAGTGCTGATGTTCTTGAAAGACAGAAACTGAGA

| | | |
|---|---|---|
| NOV8e, SNP13377383 of | SEQ ID NO: 94 | MW at 91432.3kD |

| | | | |
|---|---|---|---|
| CG50235-04, Protein Sequence | SNP Pos: 649 | 821 aa | SNP Change: Gln to Arg |

MPRATALGALVSLLLLLPLPRGAGGLGERPDATADYSELDGEEGTEQQLEHYHDPCKAAVFWGDIALD
EDDLKLFHIDKARDWTKQTVGATGHSTGGLEEQASESSPDTTAIMDTGTKEAGKDGRENTTLLHSPGTL
HAAAKTFSPRVRRATTSRTERIWPGGVIPYVIGGNFTGSQRAIFKQAMRHWEKHTCVTFIERTDEESF
IVFSYRTCGCCSYVGRRGGGPQAISIGKNCDKFGIVAHELGHVVGFWHEHTRPDRDQHVTIIRENIQP
GQEYNFLKMEAGEVSSLGETYDFDSIMHYARNTFSRGVFLDTILPRQDDNGVRPTIGQRVRLSQGDIA
QARKLYKCPACGETLQDTTGNFSAPGFPNGYPSYSHCVWRISVTPGEKIVLNFTSMDLFKSRLCWYDY
VEVRDGYWRKAPLLGRFCGDKIPEPLVSTSSRLWVEFRSSSNILGKGFFAAYEATCGGDMNKDAGQIQ
SPNYPDDYRPSKECVWRITVSEGFHVGLTFQAFEIERHDSCAYDYLEVRDGPTEESALIGHFCGYEKP
EDVKSSSNRLWMKFVSDGSINKAGFAANFFKEVDECSWPDHGGCEHRCVNTLGSYKCACDPGYELAAD
KKMCEVACGGFITKLNGTITSPGWPKEYPTNKNCVWRVVAPAQYRISLQFEVFELEGNDVCKYDFVEV
RSGLSPDAKLHGRFCGSETPEVITSQSNNMRVEFKSDNTVSKRGFRAHFFSDKDECAKDNGGCQHECV
NTFGSYLCRCRNGYWLHENGHDCKEAGCAHKISSVEGTLASPNWPDKYPSRRECTWNISSTAGHRVKL
SAGSG

| | |
|---|---|
| SEQ ID NO: 95 | 3120 bp |

| | | |
|---|---|---|
| NOV8f, SNP13377384 of | ORF Start: ATG at 256 | ORF Stop: TGA at 2719 |

| | | |
|---|---|---|
| CG50235-04, DNA Sequence | SNP Pos: 2434 | SNP Change: G to A |

TAACCTGTCTCACGACGGTCTAAACCCAGGCAGCCTCGGCCGCCGGGCAAGTAGCTCCGAGCGGCTGC
TTCCCGGTTGCCTCGAAGAAGACAGGGGGCGCCGCGCTCCGCTTGCTCCGCGCCTGAGCCATGCCCAG
CAGCCCTGTGTAACCACCGAGTCCCGGCCGGAGCCGACCGACCCAGTGTGCGCCGTCTTTCGGCCGAG
CTGAGCTTTCGTGCACGCAACTCCCTCTGCCCCAGCCGGCCCCGCGCCACCATGCCCCGGGCGACTGC
ACTTGGGGCCCTGGTGTCACTGCTGCTGCTGCTGCCGCTGCCTCGCGGCGCCGGGGGACTCGGGGAGC
GCCCGGACGCCACCGCAGACTACTCAGAGCTGGACGGCGAGGAGGGCACGGAGCAGCAGCTGGAGCAT
TACCACGACCCTTGCAAAGCCGCTGTCTTTTGGGGAGACATTGCCTTAGATGAAGATGACTTGAAGCT
GTTTCACATTGACAAAGCCAGAGACTGGACCAAGCAGACAGTGGGGGCAACAGGACACAGCACAGGTG
GGCTTGAAGAGCAGGCATCTGAGAGCAGCCCAGACACCACAGCCATGGACACTGGCACCAAGGAAGCT
GGAAAGGATGGCCGGGAGAATACCACACTCCTGCACAGCCCTGGGACCTTGCATGCCGCAGCCAAGAC
CTTCTCTCCCCGGGTCCGAAGAGCCACAACCTCAAGGACAGAGAGGATATGGCCTGGAGGAGTCATCC
CCTACGTCATTGGAGGGAACTTCACTGGGAGCCAGAGGGCCATTTTTAAGCAGGCCATGAGACACTGG
GAGAAGCACACCTGTGTGACCTTCATAGAAAGGACGGATGAGGAAAGCTTTATTGTATTCAGTTACAG
AACCTGTGGCTGTTGCTCCTATGTTGGGCGCCGAGGAGGAGGCCCACAGGCCATATCCATTGGGAAGA
ACTGTGACAAGTTTGGCATTGTGGCTCACGAGCTGGGCCATGTGGTTGGGTTTTGGCATGAACACACC
CGGCCAGACAGAGACCAACATGTCACCATCATCAGGGAAAACATCCAGCCAGGTCAGGAGTATAATTT
CTTAAAAATGGAAGCTGGGGAAGTGAGCTCTCTGGGAGAGACATACGACTTTGACAGCATCATGCACT
ACGCCCGGAACACCTTCTCAAGAGGAGTTTTCTTAGACACCATCCTTCCCCGTCAAGATGACAATGGC
GTCAGGCCAACCATTGGCCAGCGCGTGCGGCTCAGTCAGGGAGACATAGCTCAAGCCCGGAAGCTGTA
CAAATGCCCAGCGTGTGGGGAGACCCTGCAGGACACAACGGGAAACTTTTCTGCACCTGGTTTCCCAA
ATGGGTACCCATCTTACTCCCACTGCGTCTGGAGGATCTCGGTCACCCCAGGGGAAAAGATCGTATTA
AACTTCACATCCATGGATTTGTTTAAAAGCCGACTGTGCTGGTATGATTACGTGGAGGTCCGGGATGG
TTACTGGAGAAAAGCCCCCCTTTTGGGCAGGTTTTGTGGCGATAAGATCCCGGAGCCCCTCGTCTCCA
CGGACAGCCGGCTCTGGGTGGAGTTCCGCAGCAGCAGCAACATCTTGGGCAAGGGCTTCTTTGCAGCG
TACGAAGCTACCTGCGGGGGAGACATGAACAAAGATGCCGGTCAGATTCAATCTCCCAACTATCCGGA
TGACTACAGACCTTCCAAGGAATGTGTCTGGAGGATTACGGTTTCGGAGGGGTTTCACGTGGGACTTA
CCTTCCAAGCTTTTGAGATTGAAAGGCACGACAGCTGTGCATATGACTACCTGGAAGTCCGGGATGGC
CCCACGGAAGAGAGTGCCCTGATCGGCCACTTTTGTGGCTATGAGAAGCCGGAGGATGTGAAATCGAG
CTCCAACAGACTGTGGATGAAGTTTGTGTCCGATGGCTCTATCAATAAAGCGGGCTTTGCAGCCAATT
TTTTCAAGGAGGTGGATGAGTGTTCCTGGCCAGATCACGGCGGGTGCGAACATCGCTGTGTGAACACG
CTGGGCAGCTACAAGTGTGCCTGTGACCCTGGCTACGAGCTGGCCGCCGATAAGAAGATGTGTGAAGT
GGCCTGTGGCGGTTTCATTACCAAGCTGAATGGAACCATCACCAGCCCTGGGTGGCCGAAGGAGTATC
CCACAAACAAAAACTGTGTCTGGCAGGTGGTGGCCCCCGCTCAGTACCGGATCTCCCTTCAGTTTGAA
GTGTTTGAACTGGAAGGCAATGACGTCTGTAAGTACGACTTTGTAGAGGTGCGCAGCGGCCTGTCCCC
CGACGCCAAGCTGCACGGCAGGTTCTGCGGCTCTGAGACGCCGGAAGTCATCACCTCGCAGAGCAACA
ACATGCGCGTGGAGTTCAAGTCCGACAACACCGTCTCCAAGCGCGGCTTCAGGACCCACTTCTTCTCA
GATAAGGACGAGTGTGCCAAGGACAACGGCGGGTGTCAGCATGAGTGCGTCAACACCTTCGGGAGCTA
CCTGTGCAGGTGCAGAAACGGCTACTGGCTCCACGAGAATGGGCATGACTGCAAAGAGGCTGGCTGTG
CACACAAGATCAGCAGTGTGGAGGGGACCCTGGCGAGCCCCAACTGGCCTGACAAATACCCCAGCCGG
AGGGAGTGTACCTGGAACATCTCTTCGACTGCAGGCCACAGAGTAAAACTCAGTGCGGGGTCAGGCTG
AAGGCTGAAGTGCAGACCAAAGAGCTCTATTCCCACGCCCAGTTTGGGGACAACAACTACCCGAGCGA
GGCCCGCTGTGACTGGGTGATCGTGGCAGAGGACGGCTACGGCGTGGAGCTGACATTCCGGACCTTTG
AGGTTGAGGAGGAGGCCGACTGCGGCTACGACTACATGGAAGCCTACGACGGCTACGACAGCTCAGCG
CCCAGGCTCGGCCGCTTCTGTGGCTCTGGGCCATTAGAAGAAATCTACTCTGCAGGTGATTCCCTGAT
GATTCGATTCCGCACAGATGACACCATCAACAAGAAAGGCTTTCATGCCCGATACACCAGCACCAGGT
TCCAGGATGCCCTGCACATGAAGAAATAGTGCTGATGTTCTTGAAAGACAGAAACTGAGA

| | | |
|---|---|---|
| NOV8f, SNP13377384 of | SEQ ID NO: 96 | MW at 91434.2kD |

| | | | |
|---|---|---|---|
| CG50235-04, Protein Sequence | SNP Pos: 727 | 821 aa | SNP Change: Ala to Thr |

MPRATALGALVSLLLLLPLPRGAGGLGERPDATADYSELDGEEGTEQQLEHYHDPCKAAVFWGDIALD
EDDLKLFHIDKARDWTKQTVGATGHSTGGLEEQASESSPDTTANDTGTKEAGKDGRENTTLLHSPGTL
HAAAKTFSPRVRRATTSRTERIWPGGVIPYVIGGNFTGSQRAIFKQAMRHWEKHTCVTFIERTDEESF
IVFSYRTCGCCSYVGRRGGGPQAISIGKNCDKFGIVAHELGHVVGFWHEHTRPDRDQHVTIIRENIQP
GQEYNFLKMEAGEVSSLGETYDFDSIMHYARNTFSRGVFLDTILPRQDDNGVRPTIGQRVRLSQGDIA
QARKLYKCPACGETLQDTTGNFSAPGFPNGYPSYSHCVWRISVTPGEKIVLNFTSMDLFKSRLCWYDY
VEVRDGYWRKAPLLGRFCGDKIPEPLVSTDSRLWVEFRSSSNILGKGFFAAYEATCGGDMNKDAGQIQ
SPNYPDDYRPSKECVWRITVSEGFHVGLTFQAFEIERHDSCAYDYLEVRDGPTEESALIGHFCGYEKP
EDVKSSSNRLWMKFVSDGSINKAGFAANFFKEVDECSWPDNGGCEHRCVNTLGSYKCACDPGYELAAD
KKNCEVACGGFITKLNGTITSPGWPKEYPTNKNCVWQVVAPAQYRISLQFEVFELEGNDVCKYDFVEV
RSGLSPDAKLHGRFCGSETPEVITSQSNMRVEFKSDNTVSKRGFRTHFFSDKDECAKDDNGGCQHECV
NTFGSYLCRCRNGYWLHENGHDCKEAGCAHKISSVEGTLASPNWPDKYPSRRECTWNISSTAGHRVKL
SAGSG

| | |
|---|---|
| SEQ ID NO: 97 | 3120 bp |

| | | |
|---|---|---|
| NOV8g, SNP13377385 of | ORF Start: ATG at 256 | ORF Stop: TGA at 2719 |

| | | |
|---|---|---|
| CG50235-04, DNA Sequence | SNP Pos: 2751 | SNP Change: T to C |

TAACCTGTCTCACGACGGTCTAAACCCAGGCAGCCTCGGCCGCCGGGCAAGTAGCTCCGAGCGGCTGC
TTCCCGGTTGCCTCGAAGAAGACAGGGGGCGCCGCGCTCCGCTTGCTCCGCGCCTGAGCCATGCCCAG
CAGCCCTGTGTAACCACCGAGTCCCGGCCGGAGCCGACCGACCCAGTGTGCGCCGTCTTTCGGCCGAG
CTGAGCTTTCGTGCACGCAACTCCCTCTGCCCCAGCCGGCCCCGCGCCACCATGCCCCGGGCGACTGC
ACTTGGGGCCCTGGTGTCACTGCTGCTGCTGCTGCCGCTGCCTCGCGGCGCCGGGGGACTCGGGGAGC
GCCCGGACGCCACCGCAGACTACTCAGAGCTGGACGGCGAGGAGGGCACGGAGCAGCAGCTGGAGCAT
TACCACGACCCTTGCAAAGCCGCTGTCTTTTGGGGAGACATTGCCTTAGATGAAGATGACTTGAAGCT
GTTTCACATTGACAAAGCCAGAGACTGGACCAAGCAGACAGTGGGGGCAACAGGACACAGCACAGGTG
GGCTTGAAGAGCAGGCATCTGAGAGCAGCCCAGACACCACAGCCATGGACACTGGCACCAAGGAAGCT
GGAAAGGATGGCCGGGAGAATACCACACTCCTGCACAGCCCTGGGACCTTGCATGCCGCAGCCAAGAC
CTTCTCTCCCCGGGTCCGAAGAGCCACAACCTCAAGGACAGAGAGGATATGGCCTGGAGGAGTCATCC
CCTACGTCATTGGAGGGAACTTCACTGGGAGCCAGAGGGCCATTTTTAAGCAGGCCATGAGACACTGG
GAGAAGCACACCTGTGTGACCTTCATAGAAAGGACGGATGAGGAAAGCTTTATTGTATTCAGTTACAG
AACCTGTGGCTGTTGCTCCTATGTTGGGCGCCGAGGAGGAGGCCCACAGGCCATATCCATTGGGAAGA
ACTGTGACAAGTTTGGCATTGTGGCTCACGAGCTGGGCCATGTGGTTGGGTTTTGGCATGAACACACC
CGGCCAGACAGAGACCAACATGTCACCATCATCAGGGAAAACATCCAGCCAGGTCAGGAGTATAATTT
CTTAAAAATGGAAGCTGGGGAAGTGAGCTCTCTGGGAGAGACATACGACTTTGACAGCATCATGCACT
ACGCCCGGAACACCTTCTCAAGAGGAGTTTTCTTAGACACCATCCTTCCCCGTCAAGATGACAATGGC
GTCAGGCCAACCATTGGCCAGCGCGTGCGGCTCAGTCAGGGAGACATAGCTCAAGCCCGGAAGCTGTA
CAAATGCCCAGCGTGTGGGGAGACCCTGCAGGACACAACGGGAAACTTTTCTGCACCTGGTTTCCCAA
ATGGGTACCCATCTTACTCCCACTGCGTCTGGAGGATCTCGGTCACCCCAGGGGAAAAGATCGTATTA
AACTTCACATCCATGGATTTGTTTAAAAGCCGACTGTGCTGGTATGATTACGTGGAGGTCCGGGATGG
TTACTGGAGAAAAGCCCCCCTTTTGGGCAGGTTTTGTGGCGATAAGATCCCGGAGCCCCTCGTCTCCA
CGGACAGCCGGCTCTGGGTGGAGTTCCGCAGCAGCAGCAACATCTTGGGCAAGGGCTTCTTTGCAGCG
TACGAAGCTACCTGCGGGGGAGACATGAACAAAGATGCCGGTCAGATTCAATCTCCCAACTATCCGGA
TGACTACAGACCTTCCAAGGAATGTGTCTGGAGGATTACGGTTTCGGAGGGGTTTCACGTGGGACTTA
CCTTCCAAGCTTTTGAGATTGAAAGGCACGACAGCTGTGCATATGACTACCTGGAAGTCCGGGATGGC
CCCACGGAAGAGAGTGCCCTGATCGGCCACTTTTGTGGCTATGAGAAGCCGGAGGATGTGAAATCGAG
CTCCAACAGACTGTGGATGAAGTTTGTGTCCGATGGCTCTATCAATAAAGCGGGCTTTGCAGCCAATT
TTTTCAAGGAGGTGGATGAGTGTTCCTGGCCAGATCACGGCGGGTGCGAACATCGCTGTGTGAACACG
CTGGGCAGCTACAAGTGTGCCTGTGACCCTGGCTACGAGCTGGCCGCCGATAAGAAGATGTGTGAAGT
GGCCTGTGGCGGTTTCATTACCAAGCTGAATGGAACCATCACCAGCCCTGGGTGGCCGAAGGAGTATC
CCACAAACAAAAACTGTGTCTGGCAGGTGGTGGCCCCCGCTCAGTACCGGATCTCCCTTCAGTTTGAA
GTGTTTGAACTGGAAGGCAATGACGTCTGTAAGTACGACTTTGTAGAGGTGCGCAGCGGCCTGTCCCC
CGACGCCAAGCTGCACGGCAGGTTCTGCGGCTCTGAGACGCCGGAAGTCATCACCTCGCAGAGCAACA
ACATGCGCGTGGAGTTCAAGTCCGACAACACCGTCTCCAAGCGCGGCTTCAGGGCCCACTTCTTCTCA
GATAAGGACGAGTGTGCCAAGGACAACGGCGGGTGTCAGCATGAGTGCGTCAACACCTTCGGGAGCTA
CCTGTGCAGGTGCAGAAACGGCTACTGGCTCCACGAGAATGGGCATGACTGCAAAGAGGCTGGCTGTG
CACACAAGATCAGCAGTGTGGAGGGGACCCTGGCGAGCCCCAACTGGCCTGACAAATACCCCAGCCGG
AGGGAGTGTACCTGGAACATCTCTTCGACTGCAGGCCACAGAGTAAAACTCAGTGCGGGGTCAGGCTG
AAGGCTGAAGTGCAGACCAAAGAGCTCTATCCCCACGCCCAGTTTGGGGACAACAACTACCCGAGCGA
GGCCCGCTGTGACTGGGTGATCGTGGCAGAGGACGGCTACGGCGTGGAGCTGACATTCCGGACCTTTG
AGGTTGAGGAGGAGGCCGACTGCGGCTACGACTACATGGAAGCCTACGACGGCTACGACAGCTCAGCG
CCCAGGCTCGGCCGCTTCTGTGGCTCTGGGCCATTAGAAGAAATCTACTCTGCAGGTGATTCCCTGAT
GATTCGATTCCGCACAGATGACACCATCAACAAGAAAGGCTTTCATGCCCGATACACCAGCACCAAGT
TCCAGGATGCCCTGCACATGAAGAAATAGTGCTGATGTTCTTGAAAGACAGAAACTGAGA

| | | |
|---|---|---|
| NOV8g, SNP13377385 of | +TL,19 | MW at 91404.2kD |

| | | | |
|---|---|---|---|
| CG50235-04, Protein Sequence | SEQ ID NO: 98 | 821 aa | SNP Change: no change |

MPRATALGALVSLLLLLPLPRGAGGLGERPDATADYSELDGEEGTEQQLEHYHDPCKAAVFWGDIALD
EDDLKLFHIDKARDWTKQTVGATGHSTGGLEEQASESSPDTTAMDTGTKEAGKDGRENTTLLHSPGTL
HAAAKTFSPRVRRATTSRTERIWPGGVIPYVIGGNFTGSQRAIFKQAMRHWEKHTCVTFIERTDEESF
IVFSYRTCGCCSYVGRRGGGPQAISIGKNCDKFGIVAHELGHVVGFWHEHTRPDRDQHVTIIRENIQP
GQEYNFLKMEAGEVSSLGETYDFDSIMHYARNTFSRGVFLDTILPRQDDNGVRPTIGQRVRLSQGDIA
QARKLYKCPACGETLQDTTGNFSAPGFPNGYPSYSHCVWRISVTPGEKIVLNFTSMDLFKSRLCWYDY
VEVRDGYWRKAPLLGRFCGDKIPEPLVSTDSRLWVEFRSSSNILGKGFFAAYEATCGGDNNKDAGQIQ
SPNYPDDYRPSKECVWRITVSEGFHVGLTFQAFEIERHDSCAYDYLEVRDGPTEESALIGHFCGYEKP
EDVKSSSNRLWMKFVSDGSINKAGFAANFFKEVDECSWPDHGGCEHRCVNTLGSYKCACDPGYELAAD
KKMCEVACGGFITKLNGTITSPGWPKEYPTNKNCVWQVVAPAQYRISLQFEVFELEGNDVCKYDFVEV
RSGLSPDAKLHGRFCGSETPEVITSQSNNMRVEFKSDNTVSKRGFRAHFFSDKDECAKDNGGCQHECV
NTFGSYLCRCRNGYWLHENGHDCKEAGCAHKISSVEGTLASPNWPDKYPSRRECTWNISSTAGHRVKL
SAGSG

| | |
|---|---|
| SEQ ID NO: 99 | 3120 bp |

| | | |
|---|---|---|
| NOV8h, SNP13377386 of | ORF Start: ATG at 256 | ORF Stop: TGA at 2719 |

| | | |
|---|---|---|
| CG50235-04, DNA Sequence | SNP Pos: 2794 | SNP Change: G to A |

TAACCTGTCTCACGACGGTCTAAACCCAGGCAGCCTCGGCCGCCGGGCAAGTAGCTCCGAGCGGCTGC
TTCCCGGTTGCCTCGAAGAAGACAGGGGGCGCCGCGCTCCGCTTGCTCCGCGCCTGAGCCATGCCCAG
CAGCCCTGTGTAACCACCGAGTCCCGGCCGGAGCCGACCGACCCAGTGTGCGCCGTCTTTCGGCCGAG
CTGAGCTTTCGTGCACGCAACTCCCTCTGCCCCAGCCGGCCCCGCGCCACCATGCCCCGGGCGACTGC
ACTTGGGGCCCTGGTGTCACTGCTGCTGCTGCTGCCGCTGCCTCGCGGCGCCGGGGGACTCGGGGAGC
GCCCGGACGCCACCGCAGACTACTCAGAGCTGGACGGCGAGGAGGGCACGGAGCAGCAGCTGGAGCAT
TACCACGACCCTTGCAAAGCCGCTGTCTTTTGGGGAGACATTGCCTTAGATGAAGATGACTTGAAGCT
GTTTCACATTGACAAAGCCAGAGACTGGACCAAGCAGACAGTGGGGGCAACAGGACACAGCACAGGTG
GGCTTGAAGAGCAGGCATCTGAGAGCAGCCCAGACACCACAGCCATGGACACTGGCACCAAGGAAGCT
GGAAAGGATGGCCGGGAGAATACCACACTCCTGCACAGCCCTGGGACCTTGCATGCCGCAGCCAAGAC
CTTCTCTCCCCGGGTCCGAAGAGCCACAACCTCAAGGACAGAGAGGATATGGCCTGGAGGAGTCATCC
CCTACGTCATTGGAGGGAACTTCACTGGGAGCCAGAGGGCCATTTTTAAGCAGGCCATGAGACACTGG
GAGAAGCACACCTGTGTGACCTTCATAGAAAGGACGGATGAGGAAAGCTTTATTGTATTCAGTTACAG
AACCTGTGGCTGTTGCTCCTATGTTGGGCGCCGAGGAGGAGGCCCACAGGCCATATCCATTGGGAAGA
ACTGTGACAAGTTTGGCATTGTGGCTCACGAGCTGGGCCATGTGGTTGGGTTTTGGCATGAACACACC
CGGCCAGACAGAGACCAACATGTCACCATCATCAGGGAAAACATCCAGCCAGGTCAGGAGTATAATTT
CTTAAAAATGGAAGCTGGGGAAGTGAGCTCTCTGGGAGAGACATACGACTTTGACAGCATCATGCACT
ACGCCCGGAACACCTTCTCAAGAGGAGTTTTCTTAGACACCATCCTTCCCCGTCAAGATGACAATGGC
GTCAGGCCAACCATTGGCCAGCGCGTGCGGCTCAGTCAGGGAGACATAGCTCAAGCCCGGAAGCTGTA
CAAATGCCCAGCGTGTGGGGAGACCCTGCAGGACACAACGGGAAACTTTTCTGCACCTGGTTTCCCAA
ATGGGTACCCATCTTACTCCCACTGCGTCTGGAGGATCTCGGTCACCCCAGGGGAAAAGATCGTATTA
AACTTCACATCCATGGATTTGTTTAAAAGCCGACTGTGCTGGTATGATTACGTGGAGGTCCGGGATGG
TTACTGGAGAAAAGCCCCCCTTTTGGGCAGGTTTTGTGGCGATAAGATCCCGGAGCCCCTCGTCTCCA
CGGACAGCCGGCTCTGGGTGGAGTTCCGCAGCAGCAGCAACATCTTGGGCAAGGGCTTCTTTGCAGCG
TACGAAGCTACCTGCGGGGGAGACATGAACAAAGATGCCGGTCAGATTCAATCTCCCAACTATCCGGA
TGACTACAGACCTTCCAAGGAATGTGTCTGGAGGATTACGGTTTCGGAGGGGTTTCACGTGGGACTTA
CCTTCCAAGCTTTTGAGATTGAAAGGCACGACAGCTGTGCATATGACTACCTGGAAGTCCGGGATGGC
CCCACGGAAGAGAGTGCCCTGATCGGCCACTTTTGTGGCTATGAGAAGCCGGAGGATGTGAAATCGAG
CTCCAACAGACTGTGGATGAAGTTTGTGTCCGATGGCTCTATCAATAAAGCGGGCTTTGCAGCCAATT
TTTTCAAGGAGGTGGATGAGTGTTCCTGGCCAGATCACGGCGGGTGCGAACATCGCTGTGTGAACACG
CTGGGCAGCTACAAGTGTGCCTGTGACCCTGGCTACGAGCTGGCCGCCGATAAGAAGATGTGTGAAGT
GGCCTGTGGCGGTTTCATTACCAAGCTGAATGGAACCATCACCAGCCCTGGGTGGCCGAAGGAGTATC
CCACAAACAAAAACTGTGTCTGGCAGGTGGTGGCCCCCGCTCAGTACCGGATCTCCCTTCAGTTTGAA
GTGTTTGAACTGGAAGGCAATGACGTCTGTAAGTACGACTTTGTAGAGGTGCGCAGCGGCCTGTCCCC
CGACGCCAAGCTGCACGGCAGGTTCTGCGGCTCTGAGACGCCGGAAGTCATCACCTCGCAGAGCAACA
ACATGCGCGTGGAGTTCAAGTCCGACAACACCGTCTCCAAGCGCGGCTTCAGGGCCCACTTCTTCTCA
GATAAGGACGAGTGTGCCAAGGACAACGGCGGGTGTCAGCATGAGTGCGTCAACACCTTCGGGAGCTA
CCTGTGCAGGTGCAGAAACGGCTACTGGCTCCACGAGAATGGGCATGACTGCAAAGAGGCTGGCTGTG
CACACAAGATCAGCAGTGTGGAGGGGACCCTGGCGAGCCCCAACTGGCCTGACAAATACCCCAGCCGG
AGGGAGTGTACCTGGAACATCTCTTCGACTGCAGGCCACAGAGTAAAACTCAGTGCGGGGTCAGGCTG
AAGGCTGAAGTGCAGACCAAAGAGCTCTATTCCCACGCCCAGTTTGGGGACAACAACTACCCGAGCGA
GGCCCACTGTGACTGGGTGATCGTGGCAGAGGACGGCTACGGCGTGGAGCTGACATTCCGGACCTTTG
AGGTTGAGGAGGAGGCCGACTGCGGCTACGACTACATGGAAGCCTACGACGGCTACGACAGCTCAGCG
CCCAGGCTCGGCCGCTTCTGTGGCTCTGGGCCATTAGAAGAAATCTACTCTGCAGGTGATTCCCTGAT
GATTCGATTCCGCACAGATGACACCATCAACAAGAAAGGCTTTCATGCCCGATACACCAGCACCAAGT
TCCAGGATGCCCTGCACATGAAGAAATAGTGCTGATGTTCTTGAAAGACAGAAACTGAGA

| | |
|---|---|
| NOV8h, SNP13377386 of | MW at 91404.2kD |

| | | | |
|---|---|---|---|
| CG50235-04, Protein Sequence | SEQ ID NO: 100 | 821 aa | SNP Change: no change |

MPRATALGALVSLLLLLPLPRGAGGLGERPDATADYSELDGEEGTEQQLEHYHDPCKAAVFWGDIALD
EDDLKLFHIDKARDWTKQTVGATGHSTGGLEEQASESSPDTTAMDTGTKEAGKDGRENTTLLHSPGTL
HAAAKTFSPRVRRATTSRTERIWPGGVIPYVIGGNFTGSQRAIFKQAMRHWEKHTCVTFIERTDEESF
IVFSYRTCGCCSYVGRRGGGPQAISIGKNCDKFGIVAHELGHVVGFWHEHTRPDRDQHVTIIRENIOP
GQEYNFLKMEAGEVSSLGETYDFDSIMHYARNTFSRGVFLDTILPRQDDNGVRPTIGQRVRLSQGDIA
QARKLYKCPACGETLQDTTGNFSAPGFPNGYPSYSHCVWRISVTPGEKIVLNFTSMDLFKSRLCWYDY
VEVRDGYWRKAPLLGRFCGDKIPEPLVSTDSRLWVEFRSSSNILGKGFFAAYEATCGGDMNKDAGQIQ
SPNYPDDYRPSKECVWRITVSEGFHVGLTFQAFEIERHDSCAYDYLEVRDGPTEESALIGHFCGYEKP
EDVKSSSNRLWMKFVSDGSINKAGFAANFFKEVDECSWPDHGGCEHRCVNTLGSYKCACDPGYELAAD
KKMCEVACGGFITKLNGTITSPGWPKEYPTNKNCVWQVVAPAQYRISLQFEVFELEGNDVCKYDFVEV
RSGLSPDAKLHGRFCGSETPEVITSQSNNMRVEFKSDNTVSKRGFRAHFFSDKDECAKDNGGCQHECV
NTFGSYLCRCRNGYWLHENGHDCKEAGCAHKISSVEGTLASPNWPDKYPSRRECTNNISSTAGHRVKL
SAGSG

| | |
|---|---|
| SEQ ID NO: 101 | 3120 bp |

| | | |
|---|---|---|
| NOV8i, SNP13377387 of | ORF Start: ATG at 256 | ORF Stop: TGA at 2719 |

| | | |
|---|---|---|
| CG50235-04, DNA Sequence | SNP Pos: 2983 | SNP Change: A to G |

TAACCTGTCTCACGACGGTCTAAACCCAGGCAGCCTCGGCCGCCGGGCAAGTAGCTCCGAGCGGCTGC
TTCCCGGTTGCCTCGAAGAAGACAGGGGGCGCCGCGCTCCGCTTGCTCCGCGCCTGAGCCATGCCCAG
CAGCCCTGTGTAACCACCGAGTCCCGGCCGGAGCCGACCGACCCAGTGTGCGCCGTCTTTCGGCCGAG
CTGAGCTTTCGTGCACGCAACTCCCTCTGCCCCAGCCGGCCCCGCGCCACCATGCCCCGGGCGACTGC
ACTTGGGGCCCTGGTGTCACTGCTGCTGCTGCTGCCGCTGCCTCGCGGCGCCGGGGGACTCGGGGAGC
GCCCGGACGCCACCGCAGACTACTCAGAGCTGGACGGCGAGGAGGGCACGGAGCAGCAGCTGGAGCAT
TACCACGACCCTTGCAAAGCCGCTGTCTTTTGGGGAGACATTGCCTTAGATGAAGATGACTTGAAGCT
GTTTCACATTGACAAAGCCAGAGACTGGACCAAGCAGACAGTGGGGGCAACAGGACACAGCACAGGTG
GGCTTGAAGAGCAGGCATCTGAGAGCAGCCCAGACACCACAGCCATGGACACTGGCACCAAGGAAGCT
GGAAAGGATGGCCGGGAGAATACCACACTCCTGCACAGCCCTGGGACCTTGCATGCCGCAGCCAAGAC
CTTCTCTCCCCGGGTCCGAAGAGCCACAACCTCAAGGACAGAGAGGATATGGCCTGGAGGAGTCATCC
CCTACGTCATTGGAGGGAACTTCACTGGGAGCCAGAGGGCCATTTTTAAGCAGGCCATGAGACACTGG
GAGAAGCACACCTGTGTGACCTTCATAGAAAGGACGGATGAGGAAAGCTTTATTGTATTCAGTTACAG
AACCTGTGGCTGTTGCTCCTATGTTGGGCGCCGAGGAGGAGGCCCACAGGCCATATCCATTGGGAAGA
ACTGTGACAAGTTTGGCATTGTGGCTCACGAGCTGGGCCATGTGGTTGGGTTTTGGCATGAACACACC
CGGCCAGACAGAGACCAACATGTCACCATCATCAGGGAAAACATCCAGCCAGGTCAGGAGTATAATTT
CTTAAAAATGGAAGCTGGGGAAGTGAGCTCTCTGGGAGAGACATACGACTTTGACAGCATCATGCACT
ACGCCCGGAACACCTTCTCAAGAGGAGTTTTCTTAGACACCATCCTTCCCCGTCAAGATGACAATGGC
GTCAGGCCAACCATTGGCCAGCGCGTGCGGCTCAGTCAGGGAGACATAGCTCAAGCCCGGAAGCTGTA
CAAATGCCCAGCGTGTGGGGAGACCCTGCAGGACACAACGGGAAACTTTTCTGCACCTGGTTTCCCAA
ATGGGTACCCATCTTACTCCCACTGCGTCTGGAGGATCTCGGTCACCCCAGGGGAAAAGATCGTATTA
AACTTCACATCCATGGATTTGTTTAAAAGCCGACTGTGCTGGTATGATTACGTGGAGGTCCGGGATGG
TTACTGGAGAAAAGCCCCCCTTTTGGGCAGGTTTTGTGGCGATAAGATCCCGGAGCCCCTCGTCTCCA
CGGACAGCCGGCTCTGGGTGGAGTTCCGCAGCAGCAGCAACATCTTGGGCAAGGGCTTCTTTGCAGCG
TACGAAGCTACCTGCGGGGGAGACATGAACAAAGATGCCGGTCAGATTCAATCTCCCAACTATCCGGA
TGACTACAGACCTTCCAAGGAATGTGTCTGGAGGATTACGGTTTCGGAGGGGTTTCACGTGGGACTTA
CCTTCCAAGCTTTTGAGATTGAAAGGCACGACAGCTGTGCATATGACTACCTGGAAGTCCGGGATGGC
CCCACGGAAGAGAGTGCCCTGATCGGCCACTTTTGTGGCTATGAGAAGCCGGAGGATGTGAAATCGAG
CTCCAACAGACTGTGGATGAAGTTTGTGTCCGATGGCTCTATCAATAAAGCGGGCTTTGCAGCCAATT
TTTTCAAGGAGGTGGATGAGTGTTCCTGGCCAGATCACGGCGGGTGCGAACATCGCTGTGTGAACACG
CTGGGCAGCTACAAGTGTGCCTGTGACCCTGGCTACGAGCTGGCCGCCGATAAGAAGATGTGTGAAGT
GGCCTGTGGCGGTTTCATTACCAAGCTGAATGGAACCATCACCAGCCCTGGGTGGCCGAAGGAGTATC
CCACAAACAAAAACTGTGTCTGGCAGGTGGTGGCCCCCGCTCAGTACCGGATCTCCCTTCAGTTTGAA
GTGTTTGAACTGGAAGGCAATGACGTCTGTAAGTACGACTTTGTAGAGGTGCGCAGCGGCCTGTCCCC
CGACGCCAAGCTGCACGGCAGGTTCTGCGGCTCTGAGACGCCGGAAGTCATCACCTCGCAGAGCAACA
ACATGCGCGTGGAGTTCAAGTCCGACAACACCGTCTCCAAGCGCGGCTTCAGGGCCCACTTCTTCTCA
GATAAGGACGAGTGTGCCAAGGACAACGGCGGGTGTCAGCATGAGTGCGTCAACACCTTCGGGAGCTA
CCTGTGCAGGTGCAGAAACGGCTACTGGCTCCACGAGAATGGGCATGACTGCAAAGAGGCTGGCTGTG
CACACAAGATCAGCAGTGTGGAGGGGACCCTGGCGAGCCCCAACTGGCCTGACAAATACCCCAGCCGG
AGGGAGTGTACCTGGAACATCTCTTCGACTGCAGGCCACAGAGTAAAACTCAGTGCGGGGTCAGGCTG
AAGGCTGAAGTGCAGACCAAAGAGCTCTATTCCCACGCCCAGTTTGGGGACAACAACTACCCGAGCGA
GGCCCGCTGTGACTGGGTGATCGTGGCAGAGGACGGCTACGGCGTGGAGCTGACATTCCGGACCTTTG
AGGTTGAGGAGGAGGCCGACTGCGGCTACGACTACATGGAAGCCTACGACGGCTACGACAGCTCAGCG
CCCAGGCTCGGCCGCTTCTGTGGCTCTGGGCCATTAGAAGAAATCTACTCTGCAGGTGGTTCCCTGAT
GATTCGATTCCGCACAGATGACACCATCAACAAGAAAGGCTTTCATGCCCGATACACCAGCACCAAGT
TCCAGGATGCCCTGCACATGAAGAAATAGTGCTGATGTTCTTGAAAGACAGAAACTGAGA

| | |
|---|---|
| NOV8i, SNP13377387 of | MW at 91404.2kD |

| | | | |
|---|---|---|---|
| CG50235-04, Protein Sequence | SEQ ID NO: 102 | 821 aa | SNP Change: no change |

MPRATALGALVSLLLLLPLPRGAGGLGERPDATADYSELDGEEGTEQQLEHYHDPCKAAVFWGDIALD
EDDLKLFHIDKARDWTKQTVGATGHSTGGLEEQASESSPDTTAMDTGTKEAGKDGREMTTLLHSPGTL
HAAAKTFSPRVRRATTSRTERIWPGGVIPYVIGGNFTGSQRAIFKQANRHWEKHTCVTFIERTDEESF
IVFSYRTCGCCSYVGRRGGGPQAISIGKNCDKFGIVAHELGHVVGFWHEHTRPDRDQHVTIIRENIQP
GQEYNFLKMEAGEVSSLGETYDFDSIMHYARNTFSRGVFLDTILPRQDDNGVRPTIGQRVRLSQGDIA
QARKLYKCPACGETLQDTTGNFSAPGFPNGYPSYSHCVWRISVTPGEKIVLNFTSMDLFKSRLCWYDY
VEVRDGYWRKAPLLGRFCGDKIPEPLVSTDSRLWVEFRSSSNILGKGFFAAYEATCGGDMNKDAGQIQ
SPNYPDDYRPSKECVWRITVSEGFHVGLTFQAFEIERHDSCAYDYLEVRDGPTEESALIGHFCGYEKP
EDVKSSSNRLWMKFVSDGSINKAGFAANFFKEVDECSWPDHGGCEHRCVNTLGSYKCACDPGYELAAD
KKMCEVACGGFITKLNGTITSPGWPKEYPTNKNCVWQVVAPAQYRISLQFEVFELEGNDVCKYDFVEV
RSGLSPDAKLHGRFCGSETPEVITSQSNNMRVEFKSDNTVSKRGFRAHFFSDKDECAKDNGGCQHECV
NTFGSYLCRCRNGYWLHENGHDCKEAGCAHKISSVEGTLASPNWPDKYPSRRECTWNISSTAGHRVKL
SAGSG

[0386] A ClustalW comparison of the above protein sequences yields the following sequence alignment shown in Table 8B.

TABLE 8B
Comparison of the NOV8 protein sequences.

| | |
|---|---|
| NOV8a | MPRATALGALVSLLLLLPLPRGAGGLGERPDATADYSELDGEEGTEQQLEHYHDPCKAAV |
| NOV8b | MPRATALGALVSLLLLLPLPRGAGGLGERPDATADYSELDGEEGTEQQLEHYHDPCKAAV |
| NOV8c | MPRATALGALVSLLLLLPLPRGAGGLGERPDATADYSELDGEEGTEQQLEHYHDPCKAAV |
| NOV8d | MPRATALGALVSLLLLLPLPRGAGGLGERPDATADYSELDGEEGTEQQLEHYHDPCKAAV |
| NOV8a | FWGDIALDEDDLKLFHIDKARDWTKQTVGATGHSTGGLEEQASESSPDTTAMDTGTKEAG |
| NOV8b | FWGDIALDEDDLKLFHIDKARDWTKQTVGATGHSTGGLEEQASESSPDTTAMDTGTKEAG |
| NOV8C | FWGDIALDEDDLKLFHIDKARDWTKQTVGATGHSTGGLEEQASESSPDTTAMDTGTKEAG |
| NOV8d | FWGDIALDEDDLKLFHIDKARDWTKQTVGATGHSTGGLEEQASESSPDTTAMDTGTKEAG |
| NOV8a | KDGRENTTLLHSPGTLHAAAKTFSPRVRRATTSRTERIWPGGVIPYVIGGNFTGSQRAIF |
| NOV8b | KDGRENTTLLHSPGTLHAAAKTFSPRVRRATTSRTERIWPGGVIPYVIGGNFTGSQRAIF |
| NOV8c | KDGRENTTLLHSPGTLHAAAKTFSPRVRRATTSRTERIWPGGVIPYVIGGNFTGSQRAIF |
| NOV8d | K----------------------------------------------------GSQRAIF |
| NOV8a | KQAMRHWEKHTCVTFIERTDEESFIVFSYRTCGCCSYVGRRGGGPQAISIGKNCDKFGIV |
| NOV8b | KQAMRHWEKHTCVTFIERTDEESFIVFSYRTCGCCSYVGRRGGGPQAISIGKNCDKFGIV |
| NOV8c | KQAMRHWEKHTCVTFIERTDEESFIVFSYRTCGCCSYVGRRGGGPQAISIGKNCDKFGIV |
| NOV8d | KQAMRHWEKHTCVTFIERTDEESFIVFSYRTCGCCSYVGRRGGGPQAISIGKNCDKFGIV |
| NOV8a | AHELGHVVGFWHEHTRPDRDQHVTIIRENIQPGQEYNFLKMEAGEVSSLGETYDFDSIMH |
| NOV8b | AHELGHVVGFWHEHTRPDRDQHVTIIRENIQPGQEYNFLKMEAGEVSSLGETYDFDSIMH |
| NOV8c | AHELGHVVGFWHEHTRPDRDQHVTIIRENIQPGQEYNFLKMEAGEVSSLGETYDFDSIMH |
| NOV8d | AHELGHVVGFWHEHTRPDRDQHVTIIRENIQPGQEYNFLKMEAGEVSSLGETYDFDSIMH |
| NOV8a | YARNTFSRGVFLDTILPRQDDNGVRPTIGQRVRLSQGDIAQARKLYKCP----------- |
| NOV8b | YARNTFSRGVFLDTILPRQDDNGVRPTIGQRVRLSQGDIAQARKLYKCP----------- |
| NOV8c | YARNTFSRGVFLDTILPRQDDNGVRPTIGQRVRLSQGDIAQARKLYKCP----------- |
| NOV8d | YARNTFSRGVFLDTILPRQDDNGVRPTIGQRVRLSQGDIAQARKLYKCPGPTCAFVSQKT |
| NOV8a | -------------------ACGETLQDTTGNFSAPGFPNGYPSYSHCVWRISVTPGEKIV |
| NOV8b | -------------------ACGETLQDTTGNFSAPGFPNGYPSYSHCVWRISVTPGEKIV |
| NOV8c | -------------------ACGETLQDTTGNFSAPGFPNGYPSYSHCVWRISVTPGEKIV |
| NOV8d | SICLLHFSPTCSEGFGWQRACGETLQDTTGNFSAPGFPNGYPSYSHCVWRISVTPGEKIV |
| NQV8a | LNFTSMDLFKSRLCWYDYVEVRDGYWRKAPLLGRFCGDKIPEPLVSTDSRLWVEFRSSSN |
| NOV8b | LNFTSMDLFKSRLCWYDYVEVRDGYWRKAPLLGRFCGDKIPEPLVSTDSRLWVEFRSSSN |
| NOV8c | LNFTSMDLFKSRLCWYDYVEVRDGYWRKAPLLGRFCGDKIPEPLVSTDSRLWVEFRSSSN |
| NOV8d | LNFTSMDLFKSRLCWYDYVEVRDGYWRKAPLLGRFCGDKIPEPLVSTDSRLWVEFRSSSN |
| NOV8a | ILGKGFFAAYEATCGGDMNKDAGQIQSPNYPDDYRPSKECVWRITVSEGFHVGLTFQAFE |
| NOV8b | ILGKGFFAAYEATCGGDMNKDAGQIQSPNYPDDYRPSKECVWRITVSEGFHVGLTFQAFE |
| NOV8c | ILGKGFFAAYEATCGGDMNKDAGQIQSPNYPDDYRPSKECVWRITVSEGFHVGLTFQAFE |
| NOV8d | ILGKGFFAAYEATCGGDMNKDAGQIQSPNYPDDYRPSKECVWRITVSEGFHVGLTFQAFE |
| NOV8a | IERHDSCAYDYLEVRDGPTEESALIGHFCGYEKPEDVKSSSNRLWMKFVSDGSINKAGFA |
| NOV8b | IERHDSCAYDYLEVRDGPTEESALIGHFCGYEKPEDVKSSSNRLWMKFVSDGSINKAGFA |
| NOV8c | IERHDSCAYDYLEVRDGPTEESALIGHFCGYEKPEDVKSSSNRLWMKFVSDGSINKAGFA |
| NOV8d | IERHDSCAYDYLEVRDGPTEESALIGHFCGYEKPEDVKSSSNRLWMKFVSDGSINKAGFA |
| NOV8a | ANFFKEVDECSWPDHGGCENRCVNTLGSYKCACDPGYELAADKKMCEVACGGFITKLNGT |
| NOV8b | ANFFKEVDECSWPDHGGCEHRCVNTLGSYKCACDPGYELAADKKMCEVACGGFITKLNGT |
| NOV8c | ANFFKEVDECSWPDHGGCEHRCVNTLGSYKCACDPGYELAADKKMCEVACGGFITKLNGT |
| NOV8d | ANFFKEVDECSWPDHGGCEHRCVNTLGSYKCACDPGYELAADKKMCEVACGGFITKLNGT |
| NOV8a | ITSPGWPKEYPTMKNCVWQVVAPAQYRISLQFEVFELEGNDVCKYDFVEVRSGLSPDAKL |
| NOV8b | ITSPGWPKEYPTNKNCVWQVVAPTQYRISLQFEVFELEGNDVCKYDFVEVRSGLSPDAKL |
| NOV8c | ITSPGWPKEYPTNKNCVWQVVAPAQYRISLQFEVFELEGNDVCKYDFVEVRSGLSPDAKL |
| NOV8d | ITSPGWPKEYPTNKNCVWQVVAPTQYRISLQFEVFELEGNDVCKYDFVEVRSGLSPDAKL |
| NOV8a | HGRFCGSETPEVITSQSNNMRVEFKSDNTVSKRGFRAHFFSDKDECAKDNGGCQHECVNT |
| NOV8b | HGRFCGSETPEVITSQSNNMRVEFKSDNTVSKRGFRAHFFSDKDECAKDNGGCQHECVNT |
| NOV8c | HGRFCGSETPEVITSQSNNMRVEFKSDNTVSKRGFRAHFFSDKDECAKDNGGCQHECVNT |
| NOV8d | HGRFCGSETPEVITSQSNNMRVEFKSDNTVSKRGFRAHFFSDKDECAKDNGGCQHECVNT |
| NOV8a | FGSYLCRCRNGYWLHENGHDCKEAGCAHKISSVEGTLASPNWPDKYPSRRECTWNISSTA |
| NOV8b | FGSYLCRCRNGYWLHENGHDCKEAGCAHKISSVEGTLASPNWPDKYPSRRECTWNISSTA |
| NOV8c | FGSYLCRCRNGYWLHENGHDCKEAGCAHKISSVEGTLASPNWPDKYPSRRECTWNISSTA |
| Novad | FGSYLCRCRNGYWLHENGHDCKEAGCAHKISSVEGTLASPNWPDKYPSRRECTWNISSTA |
| NOV8a | GHRVKLSAGSG------------------------------------------------- |
| NOV8b | GHRVKLTFNEFEIEQHQECAYDHLEMYDGPDSLAPILGRFCGSKKPDPTVASGSKCGGRL |
| NOV8c | GHRVKLTFNEFEIEQHQECAYDHLEMYDGPDSLAPILGRFCGSKKPDPTVASGSSMFLRF |
| NOV8d | GHRVKLTFNEFEIEQHQECAYDHLEMYDGPDSLAPILGRFCGSKKPDPTVASGSKCGGRL |
| NOV8a | ------------------------------------------------------------ |
| NOV8b | KAEVQTKELYSHAQFGDNNYPSEARCDWVIVAEDGYGVELTFRTFEVEEEADCGYDYMEA |
| NOV8c | YSDASVQRKGFQAVIISTECGGRLKAEVQTKELYSHAQFGDNNYPSEARCDWVIVAEDGYG |
| NOV8d | KAEVQTKELYSHAQFGDNNYPSEARCDWVIVAEDGYGVELTFRTFEVEEEADCGYDYMEA |
| NOV8a | ------------------------------------------------------------ |
| NOV8b | YDGYDSSAPRLGRFCGSGPLEEIYSAGDSLMIRFRTDDTINKKGFHARYTSTKFQDGLHM |
| NOV8c | VELTFRTFEVEEEADCGYDYMEAYDGYDSSAPRLGRFCGSGPLEEIYSAGDSLMIRFRTD |
| NOV8d | YDGYDSSAPRLGRFCGSGPLEEIYSAGDSLMIRFRTDDTINKKGFHARYTSTKFQDALHM |
| NOV8a | ------------------------- |
| NOV8b | KK----------------------- |
| NOV8c | DTINKKGFHARYTSTKFQDALHMKK |
| NOV8d | KK----------------------- |
| NOV8a | (SEQ ID NO: 86) |
| NOV8b | (SEQ ID NO: 88) |
| NOV8c | (SEQ ID NO: 90) |
| NOV8d | (SEQ ID NO: 92) |

[0387] Further analysis of the NOV8a protein yielded the following properties shown in Table 8C.

TABLE 8C
Protein Sequence Properties NOV8a

```
Signa1P analysis: Cleavage site between residues 26 and 27
PSORT II analysis:
PSG: a new signal peptide prediction method
    N-region: length 3; pos. chg 1; neg. chg 0
    H-region: length 17; peak value 10.45
    PSG score: 6.05
GvH: von Heijne's method for signal seq. recognition
    GvH score (threshold: −2.1): 4.44
    possible cleavage site: between 25 and 26
>>> Seems to have a cleavable signal peptide (1 to 25)
ALOM: Klein et al's method for TM region allocation
    Init position for calculation: 26
    Tentative number of TMS(s) for the threshold 0.5: 0
    number of TMS(s) .. fixed
    PERIPHERAL Likelihood = 6.31 (at 203)
    ALOM score: 6.31 (number of TMSs: 0)
MTOP: Prediction of membrane topology (Hartmann et al.)
    Center position for calculation: 12
    Charge difference: −3.0 C(−1.0) − N( 2.0)
    N >= C: N-terminal side will be inside
MITDISC: discrimination of mitochondrial targeting seq
    R content: 2 Hyd Moment(75): 7.80
    Hyd Moment(95): 7.61G content: 5
    DIE content: 1 S/T content: 2
    Score: −4.54
Gavel: prediction of cleavage sites for mitochondrial preseq
    R-2 motif at 31 PRG|AG
NUCDISC: discrimination of nuclear localization signals
    pat4: none
    pat7: PRVRRAT (5) at 145
    bipartite: none
    content of basic residues: 11.2%
    NLS Score: −0.04
KDEL: ER retention motif in the C-terminus: none
ER Membrane Retention Signals:
    XXRR-like motif in the N-terminus: PRAT
none
SKL: peroxisomal targeting signal in the C-terminus: none
PTS2: 2nd peroxisomal targeting signal: none
VAC: possible vacuolar targeting motif: none
RNA-binding motif: none
Actinin-type actin-binding motif:
    type 1: none
    type 2: none
NMYR: N-myristoylation pattern : none
Prenylation motif: none
memYQRL: transport motif from cell surface to Golgi: none
Tyrosines in the tail: none
Dileucine motif in the tail: none
checking 63 PROSITE DNA binding motifs: none
checking 71 PROSITE ribosomal protein motifs: none
checking 33 PROSITE prokaryotic DNA binding motifs: none
NNCN: Reinhardt's method for Cytoplasmic/Nuclear discrimination
    Prediction: cytoplasmic
    Reliability: 76.7
COIL: Lupas's algorithm to detect coiled-coil regions
    total: 0 residues
--------------------------
Final Results (k = 9/23)
    33.3%: extracellular, including cell wall
    22.2%: Golgi
    22.2%: vacuolar
    11.1%: mitochondrial
    11.1%: endoplasmic reticulum
>> predictionfor CG50235-04 is exc (k=9)
```

[0388] A search of the NOV8a protein against the Geneseq database, a proprietary database that contains sequences published in patents and patent publication, yielded several homologous proteins shown in Table 8D.

TABLE 8D
Geneseq Results for NOV8a

| | | NOV8a | Identifies/ | |
|---|---|---|---|---|
| | | Residues/ | Similarities for | |
| Genesq | Protein/Organism/Length | Match | the Matched | Expect |
| Identifier | [Patent #,Date] | Residues | Region | Value |
| AAY32240 | Human tolloid-like protein | 1 . . . 817 | 816/817 (99%) | 0.0 |
| | mT11-2 - Homo sapiens, 1015 | 1 . . . 817 | 817/817 (99%) | |
| | aa. [WO9951730-A2, 14-OCT- | | | |
| | 1999] | | | |
| ABG79187 | Human tolloid-like 2-like protein | 1 . . . 817 | 815/817 (99%) | 0.0 |
| | #1 - Homo sapiens, 992 aa. | 1 . . . 817 | 816/817 (99%) | |
| | [WO200264791-A2, 22-AUG- | | | |
| | 2002] | | | |
| ABG79188 | Human tolloid-like 2-like protein | 1 . . . 817 | 763/847 (90%) | 0.0 |
| | #2 - Homo sapiens, 970 aa. | 1 . . . 795 | 764/847 (90%) | |
| | [WO200264791 -A2, 22-AUG- | | | |
| | 2002] | | | |
| AAY32241 | Mouse tolloid-like protein mT11- | 1 . . . 817 | 728/817 (89%) | 0.0 |
| | 2-Mus musculus, 1012 aa. | 1 . . . 814 | 759/817(92%) | |
| | [WO9951730-A2, 14-OCT- | | | |
| | 1999] | | | |
| AAW40224 | Human tolloid-like (T11) protein - | 35 . . . 817 | 584/783 (74%) | 0.0 |
| | Homo sapiens, 1013 aa. | 34 . . . 815 | 666/783 (84%) | |
| | [WO9745528-A2, 04-DEC- | | | |
| | 1997] | | | |

[0389] In a BLAST search of public sequence databases, the NOV8a protein was found to have homology to the proteins shown in the BLASTP data in Table 8E.

TABLE 8E
Public BLASTP Results for NOV8a

| | | | Identities/ | |
|---|---|---|---|---|
| | | NOV8a | Similarities | |
| Protein | | Residues/ | for the | |
| Accession | Protein/ | Match | Matched | Expect |
| Number | Organism/Length | Residues | Portion | Value |
| Q9Y6L7 | Tolloid-like 2 protein - | 1 . . . 817 | 816/817 | 0.0 |
| | Homo sapiens | 1 . . . 817 | (99%) | |
| | (Human), 1015 aa. | | 817/817 | |
| | | | | (99%) |
| Q9WVM6 | Tolloid-like-2 protein - | 1 . . . 817 | 728/817 | 0.0 |
| | Mus musculus | 1 . . . 814 | (89%) | |
| | (Mouse), 1012 aa. | | 759/817 | |
| | | | | (92%) |
| Q9UQ00 | Hypothetical protein | 90 . . . 817 | 726/728 | 0.0 |
| | KIAA0932 - Homo | 1 . . . 728 | (99%) | |
| | sapiens (Human), 926 | | 727/728 | |
| | aa (fragment). | | (99%) | |
| O57382 | Xolloid - Xenopus | 52 . . . 816 | 596/768 | 0.0 |
| | laevis (African clawed | 52 . . . 819 | (77%) | |
| | frog), 1019 aa. | | 680/768 | |
| | | | | (87%) |
| Q8J128 | Xolloid-like | 35 . . . 817 | 597/783 | 0.0 |
| | metalloprotease - | 29 . . . 810 | (76%) | |
| | Xenopus laevis | | 679/783 | |
| | Africian clawed | | (86%) | |
| | frog), 1007 aa. | | | |

[0390] PFam analysis indicates that the NOV8a protein contains the domains shown in the Table 8F.

TABLE 8F
Domain Analysis of NOV8a

| | | Identities/ | |
|---|---|---|---|
| | NOV8a | Similarities for | |
| Pfam Domain | Match Region | the Matched Region | Expect Value |
| Astacin | 157 . . . 350 | 100/202 (50%) | 9.5e-114 |
| | | 172/202 (85%) | |
| CUB | 351 . . . 460 | 50/116(43%) | 2.4e-52 |
| | | 99/116 (85%) | |
| CUB | 464 . . . 573 | 62/116 (53%) | 3.1e-60 |
| | | 98/116 (84%) | |
| EGF | 580 . . . 616 | 17/47 (36%) | 1.2e-05 |
| | | 29/47 (62%) | |
| CUB | 620 . . . 729 | 57/116 (49%) | 4.7e-58 |
| | | 101/116 (87%) | |
| EGF | 736 . . . 771 | 18/47 (38%) | 7.4e-07 |
| | | 31/47 (66%) | |

### Example 9

[0391] The NOV9 clone was analyzed, and the nucleotide and encoded polypeptide sequences are shown in Table 9A.

TABLE 9A
NOV9 Sequence Analysis

| | | |
|---|---|---|
| NOV9a, CG50249-01 | SEQ ID NO: 103 | 1953 bp |

| | | |
|---|---|---|
| DNA Sequence | ORF Start: ATG at 16 | ORF Stop: TAA at 1930 |

GTCTGAGTCACAGAGATGGGCAAGATCGAGAACAACGAGAGGGTGATCCTCAATGTCGGGGGCACCCG
GCACGAAACCTACCGCAGCACCCTCAAGACCCTGCCTGGAACACGCCTGGCCCTTCTTGCCTCCTCCG
AGCCCCCAGGCGACTGCTTGACCACGGCGGGCGACAAGCTGCAGCCGTCGCCGCCTCCACTGTCGCCG
CCGCCGAGAGCGCCCCCGCTGTCCCCCGGGCCAGGCGGCTGCTTCGAGGGCGGCGCGGGCAACTGCAG
TTCCCGCGGCGGCAGGGCCAGCGACCATCCCGGTGGCGGCCGCGAGTTCTTCTTCGACCGGCACCCGG
GCGTCTTCGCCTATGTGCTCAATTACTACCGCACCGGCAAGCTGCACTGCCCCGCAGACGTGTGCGGG
CCGCTCTTCGAGGAGGAGCTGGCCTTCTGGGGCATCGACGAGACCGACGTGGAGCCCTGCTGCTGGAT
GACCTACCGGCAGCACCGCGACGCCGAGGAGGCGCTGGACATCTTCGAGACCCCCGACCTCATTGGCG
GCGACCCCGGCGACGACGAGGACCTGGCGGCCAAGAGGCTGGGCATCGAGGACGCGGCGGGGCTCGGG
GGCCCGGACGGCAAATCTGGCCGCTGGAGGAGGCTGCAGCCCCGCATGTGGGCCCTCTTCGAAGACCC
CTACTCGTCCAGAGCCGCCAGGTTTATTGCTTTTGCTTCTTTATTCTTCATCCTGGTTTCAATTACAA
CTTTTTGCCTGGAAACACATGAAGCTTTCAATATTGTTAAAAACAAGACAGAACCAGTCATCAATGGC
ACAAGTGTTGTTCTACAGTATGAAATTGAAACGGATCCTGCCTTGACGTATGTAGAAGGAGTGTGTGT
GGTGTGGTTTACTTTTGAATTTTTAGTCCGTATTGTTTTTTCACCCAATAAACTTGAATTCATCAAAA
ATCTCTTGAATATCATTGACTTTGTGGCCATCCTACCTTTCTACTTAGAGGTGGGACTCAGTGGGCTG
TCATCCAAAGCTGCTAAAGATGTGCTTGGCTTCCTCAGGGTGGTAAGGTTTGTGAGGATCCTGAGAAT
TTTCAAGCTCACCCGCCATTTTGTAGGTCTGAGGGTGCTTGGACATACTCTTCGAGCTAGTACTAATG
AATTTTTGCTGCTGATAATTTTCCTGGCTCTAGGAGTTTTGATATTTGCTACCATGATCTACTATGCC
GAGAGAGTGGGAGCTCAACCTAACGACCCTTCAGCTAGTGAGCACACACAGTTCAAAAACATTCCCAT
TGGGTTCTGGTGGGCTGTAGTGACCATGACTACCCTGGGTTATGGGGATATGTACCCCCAAACATGGT
CAGGCATGCTGGTGGGAGCCCTGTGTGCTCTGGCTGGAGTGCTGACAATAGCCATGCCAGTGCCTGTC
ATTGTCAATAATTTTGGAATGTACTACTCCTTGGCAATGGCAAAGCAGAAACTTCCAAGGAAAAGAAA
GAAGCACATCCCTCCTGCTCCTCAGGCAAGCTCACCTACTTTTTGCAAGACAGAATTAAATATGGCCT
GCAATAGTACACAGAGTGACACATGTCTGGGCAAAGACAATCGACTTCTGGAACATAACAGATCAGTG
TTATCAGGTGACGACAGTACAGGAAGTGAGCCGCCACTATCACCCCCAGAAAGGCTCCCCATCAGACG
CTCTAGTACCAGAGACAAAAACAGAAGAGGGGAAACATGTTTCCTACTGACGACAGGTGATTACACGT
GTGCTTCTGATGGAGGGATCAGGAAAGGTTATGAAAAATCCCGAAGCTTAAACAACATAGCGGGCTTG
GCAGGCAATGCTCTGAGGCTCTCTCCAGTAACATCACCCTACAACTCTCCTTGTCCTCTGAGGCGCTC
TCGATCTCCCATCCCATCTATCTTGTAAACCAAACAACCAAACTGCATC

NOV9a, CG50249-01

| | | | |
|---|---|---|---|
| Protein Sequence | SEQ ID NO: 104 | 638 aa | MW at 70224.7kD |

MGKIENNERVILNVGGTRHETYRSTLKTLPGTRLALLASSEPPGDCLTTAGDKLQPSPPPLSPPPRAP
PLSPGPGGCFEGGAGNCSSRGGRASDHPGGGREFFFDRHPGVFAYVLNYYRTGKLHCPADVCGPLFEE
ELAFWGIDETDVEPCCWMTYRQHRDAEEALDIFETPDLIGGDPGDDEDLAAKRLGIEDAAGLGGPDGK
SGRWRRLQPRMWALFEDPYSSRAARFIAFASLFFILVSITTFCLETHEAFNIVKNKTEPVINGTSVVL
QYEIETDPALTYVEGVCVVWFTFEFLVRIVFSPNKLEFIKNLLNIIDFVAILPFYLEVGLSGLSSKAA
KDVLGFLRVVRFVRILRIFKLTRHFVGLRVLGHTLRASTNEFLLLIIFLALGVLIFATMIYYAERVGA
QPNDPSASEHTQFKNIPIGFWWAVVTMTTLGYGDMYPQTWSGMLVGALCALAGVLTIAMPVPVIVNNF
GMYYSLAMAKQKLPRKRKKHIPPAPQASSPTFCKTELNMACNSTQSDTCLGKDNRLLEHNRSVLSGDD
STGSEPPLSPPERLPIRRSSTRDKNRRGETCFLLTTGDYTCASDGGIRKGYEKSRSLNNIAGLAGNAL
RLSPVTSPYNSPCPLRRSRSPIPSIL

| | | |
|---|---|---|
| NOV9b, 207885588 | SEQ ID NO: 105 | 1815 bp |

| | | |
|---|---|---|
| DNA Sequence | ORF Start: at 1 | ORF Stop: end of sequence |

AGATCTCCCACCATGGGCAAGATCGAGAACAACGAGAGGGTGATCCTCAATGTCGGGGGCACCCGGCA
CGAAACCTACCGCAGCACCCTCAAGACCCTGCCTGGAACACGCCTGGCCCTTCTTGCCTCCTCCGAGC
CCCCAGGCAACTGCAGTTCCCGCGGCGGCAGGGCCAGCGACCATCCCGGTGGCGGCCGCGAGTTCTTC
TTCGACCGGCACCCGGGCGTCTTCGCCTATGTGCTCAATTACTACCGCACCGGCAAGCTGCACTGCCC
CGCAGACGTGTGCGGGCCGCTCTTCGAGGAGGAGCTGGCCTTCTGGGGCATCGACGAGACCGACGTGG
AGCCCTGCTGCTGGATGACCTACCGGCAGCACCGCGACGCCGAGGAGGCGCTGGACATCTTCGAGACC
CCCGACCTCATTGGCGGCGACCCCGGCGACGACGAGGACCTGGCGGCCAAGAGGCTGGGCATCGAGGA
CGCGGCGGGGCTCGGGGGCCCCGACGGCAAATCTGGCCGCTGGAGGAGGCTGCAGCCCCGCATGTGGG
CCCTCTTCGAAGACCCCTACTCGTCCAGAGCCGCCAGGTTTATTGCTTTTGCTTCTTTATTCTTCATC
CTGGTTTCAATTACAACTTTTTGCCTGGAAACACATGAAGCTTTCAATATTGTTAAAAACAAGACAGA
ACCAGTCATCAATGGCACAAGTGTTGTTCTACAGTATGAAATTGAAACGGATCCTGCCTTGACGTATG
TAGAAGGAGTGTGTGTGGTGTGGTTTACTTTTGAATTTTTAGTCCGTATTGTTTTTTCACCCAATAAA
CTTGAATTCATCAAAAATCTCTTGAATATCATTGACTTTGTGGCCATCCTACCTTTCTACTTAGAGGT
GGGACTCAGTGGGCTGTCATCCAAAGCTGCTAAAGATGTGCTTGGCTTCCTCAGGGTGGTAAGGTTTG
TGAGGATCCTGAGAATTTTCAAGCTCACCCGCCATTTTGTAGGTCTGAGGGTGCTTGGACATACTCTT
CGAGCTAGTACTAATGAATTTTTGCTGCTGATAATTTTCCTGGCTCTAGGAGTTTTGATATTTGCTAC
CATGATCTACTATGCCGAGAGAGTGGGAGCTCAACCTAACGACCCTTCAGCTAGTGAGCACACACAGT
TCAAAAACATTCCCATTGGGTTCTGGTGGGCTGTAGTGACCATGACTACCCTGGGTTATGAGGATACG
TACCCCCAAACATGGTCAGGCATGCTGGTGGGAGCCCTGTGTGCTCTGGCTGGAGTGCTGACAATAGC
CATGCCAGTGCCTGTCATTGTCAATAATTTTGGAATGTACTACTCCTTGGCAATGGCAAAGCAGAAAC
TTCCAAGGAAAAGAAAGAAGCACATCCCTCCTGCTCCTCAGGCAAGCTCACCTACTTTTTGCAAGACA
GAATTAAATATGGCCTGCAATAGTACACAGAGTGACACATGTCTGGGCAAAGACAATCGACTTCTGGA
ACATAACAGATCAGTGTTATCAGGTGACGACAGTACAGGAAGTGAGCCGCCACTATCACCCCCAGAAA
GGCTCCCCATCAGACGCTCTAGTACCAGAGACAAAAACAGAAGAGGGGAAACATGTTTCCTACTGACG
ACAGGTGATTACACGTGTGCTTCTGATGGAGGGATCAGGAAAGGATATGAAAAATCCCGAAGCTTAAA
CAACATAGCGGGCTTGGCAGGCAATGCTCTGAGGCTCTCTCCAGTAACATCACCCTACAACTCTCCTT
GTCCTCTGAGGCGCTCTCGATCTCCCATCCCATCTATCTTGCTCGAG

NOV9b, 207885588

| | | | |
|---|---|---|---|
| Protein Sequence | SEQ ID NO: 106 | 605 aa | MW at 67228.3kD |

RSPTMGKIENNERVILNVGGTRHETYRSTLKTLPGTRLALLASSEPPGNCSSRGGRASDHPGGGREFF
FDRHPGVFAYVLNYYRTGKLHCPADVCGPLFEEELAFWGIDETDVEPCCWMTYRQHRDAEEALDIFET
PDLIGGDPGDDEDLAAKRLGIEDAAGLGGPDGKSGRWRRLQPRMWALFEDPYSSRAARFIAFASLFFI
LVSITTFCLETHEAFNIVKNKTEPVINGTSVVLQYEIETDPALTYVEGVCVVWFTFEFLVRIVFSPNK
LEFIKNLLNIIDFVAILPFYLEVGLSGLSSKAAKDVLGFLRVVRFVRILRIFKLTRHFVGLRVLGHTL
RASTNEFLLLIIFLALGVLIFATMIYYAERVGAQPNDPSASEHTQFKNIPIGFWWAVVTMTTLGYEDT
YPQTWSGMLVGALCALAGVLTIANPVPVIVNNFGMYYSLAMAKQKLPRKRKKHIPPAPQASSPTFCKT
ELNMACNSTQSDTCLGKDNRLLEHNRSVLSGDDSTGSEPPLSPPERLPIRRSSTRDKNRRGETCFLLT
TGDYTCASDGGIRKGYEKSRSLNNIAGLAGNALRLSPVTSPYNSPCPLRRSRSPIPSILLE

| | | |
|---|---|---|
| NOV9c, CG50249-02 | SEQ ID NO: 107 | 607 bp |

| | | |
|---|---|---|
| DNA Sequence | ORF Start: ATG at 13 | ORF Stop: at 604 |

AGATTTCCCACCATGGGCAAGATCGAGAACAACGAGAGGGTGATCCTCAATGTCGGGGGCACCCGGCA
CGAAACCTACCGCAGCACCCTCAAGACCCTGCCTGGAACACGCCTGGCCCTTCTTGCCTCCTCCGAGC
CCCCAGGCGACTGCTTGACCACAGCGGGCAACTGCAGTTCCCGCGGCGGCAGGGCCAGCGACCATCCC
GGTGGCGGCCGCGAGTTCTTCTTCGACCGGCATCCGGGCGTCTTCGCCTATGTGCTCAATTACTACCG
CACCGGCAAGCTGCACTGTCCCGCAGACGTGTGCGGGCCGCTCTTCGAGGAGGAGCTGGCCTTCTGGG
GCATCGACGAGACCGACGTGGAGCCCTGCTGCTGGATGACCTACCGGCAGCACCGCGACGCCGAGGAG
GCGCTGGACATCTTCGAGACCCCCGACCTCATTGGCGGCGACCCCGGCGACGACGAGGACCTGGCGGC
CAAGAGGCTGGGCATCGAGGACGCGGCGGGGCTCGGGGGCCCCGACGGCAAATCTGGCCGCTGGAGGA
GGCTGCAGCCCCGCATGTGGGCCCTCTTCGACCCCTACTCGTCCAGAGCCGCCAGGCTCG

NOV9c, CG50249-02

| | | | |
|---|---|---|---|
| Protein Sequence | SEQ ID NO: 108 | 197 aa | MW at 21779.0kD |

MGKIENNERVILNVGGTRHETYRSTLKTLPGTRLALLASSEPPGDCLTTAGNCSSRGGRASDHPGGGR
EFFFDRHPGVFAYVLNYYRTGKLHCPADVCGPLFEEELAFWGIDETDVEPCCWMTYRQHRDAEEALDI
FETPDLIGGDPGDDEDLAAKRLGIEDAAGLGGPDGKSGRWRRLQPRMWALFEDPYSSRAAR

| | | |
|---|---|---|
| NOV9d, CG50249-03 | SEQ ID NO: 109 | 1815 bp |

| | | |
|---|---|---|
| DNA Sequence | ORF Start: ATG at 13 | ORF Stop: at 1810 |

AGATCTCCCACCATGGGCAAGATCGAGAACAACGAGAGGGTGATCCTCAATGTCGGGGGCACCCGGCA
CGAAACCTACCGCAGCACCCTCAAGACCCTGCCTGGAACACGCCTGGCCCTTCTTGCCTCCTCCGAGC
CCCCAGGCAACTGCAGTTCCCGCGGCGGCAGGGCCAGCGACCATCCCGGTGGCGGCCGCGAGTTCTTC
TTCGACCGGCACCCGGGCGTCTTCGCCTATGTGCTCAATTACTACCGCACCGGCAAGCTGCACTGCCC
CGCAGACGTGTGCGGGCCGCTCTTCGAGGAGGAGCTGGCCTTCTGGGGCATCGACGAGACCGACGTGG
AGCCCTGCTGCTGGATGACCTACCGGCAGCACCGCGACGCCGAGGAGGCGCTGGACATCTTCGAGACC
CCCGACCTCATTGGCGGCGACCCCGGCGACGACGAGGACCTGGCGGCCAAGAGGCTGGGCATCGAGGA
CGCGGCGGGGCTCGGGGGCCCCGACGGCAAATCTGGCCGCTGGAGGAGGCTGCAGCCCCGCATGTGGG
CCCTCTTCGAAGACCCCTACTCGTCCAGAGCCGCCAGGTTTATTGCTTTTGCTTCTTTATTCTTCATC
CTGGTTTCAATTACAACTTTTTGCCTGGAAACACATGAAGCTTTCAATATTGTTAAAAACAAGACAGA
ACCAGTCATCAATGGCACAAGTGTTGTTCTACAGTATGAAATTGAAACGGATCCTGCCTTGACGTATG
TAGAAGGAGTGTGTGTGGTGTGGTTTACTTTTGAATTTTTAGTCCGTATTGTTTTTTCACCCAATAAA
CTTGAATTCATCAAAAATCTCTTGAATATCATTGACTTTGTGGCCATCCTACCTTTCTACTTAGAGGT
GGGACTCAGTGGGCTGTCATCCAAAGCTGCTAAAGATGTGCTTGGCTTCCTCAGGGTGGTAAGGTTTG
TGAGGATCCTGAGAATTTTCAAGCTCACCCGCCATTTTGTAGGTCTGAGGGTGCTTGGACATACTCTT
CGAGCTAGTACTAATGAATTTTTGCTGCTGATAATTTTCCTGGCTCTAGGAGTTTTGATATTTGCTAC
CATGATCTACTATGCCGAGAGAGTGGGAGCTCAACCTAACGACCCTTCAGCTAGTGAGCACACACAGT
TCAAAAACATTCCCATTGGGTTCTGGTGGGCTGTAGTGACCATGACTACCCTGGGTTATGAGGATACG
TACCCCCAAACATGGTCAGGCATGCTGGTGGGAGCCCTGTGTGCTCTGGCTGGAGTGCTGACAATAGC
CATGCCAGTGCCTGTCATTGTCAATAATTTTGGAATGTACTACTCCTTGGCAATGGCAAAGCAGAAAC
TTCCAAGGAAAAGAAAGAAGCACATCCCTCCTGCTCCTCAGGCAAGCTCACCTACTTTTTGCAAGACA
GAATTAAATATGGCCTGCAATAGTACACAGAGTGACACATGTCTGGGCAAAGACAATCGACTTCTGGA
ACATAACAGATCAGTGTTATCAGGTGACGACAGTACAGGAAGTGAGCCGCCACTATCACCCCCAGAAA
GGCTCCCCATCAGACGCTCTAGTACCAGAGACAAAAACAGAAGAGGGGAAACATGTTTCCTACTGACG
ACAGGTGATTACACGTGTGCTTCTGATGGAGGGATCAGGAAAGGATATGAAAAATCCCGAAGCTTAAA
CAACATAGCGGGCTTGGCAGGCAATGCTCTGAGGCTCTCTCCAGTAACATCACCCTACAACTCTCCTT
GTCCTCTGAGGCGCTCTCGATCTCCCATCCCATCTATCTTGCTCGAG

NOV9d, CG50249-03

| | | | |
|---|---|---|---|
| Protein Sequence | SEQ ID NO: 110 | 599 aa | MW at 66544.6kD |

MGKIENNERVILNVGGTRHETYRSTLKTLPGTRLALLASSEPPGNCSSRGGRASDHPGGGREFFFDRH
PGVFAYVLNYYRTGKLHCPADVCGPLFEEELAFWGIDETDVEPCCWMTYRQHRDAEEALDIFETPDLI
GGDPGDDEDLAAKRLGIEDAAGLGGPDGKSGRWRRLQPRMWALFEDPYSSRAARFIAFASLFFILVSI
TTFCLETHEAFNIVKNKTEPVINGTSVVLQYEIETDPALTYVEGVCVVWFTFEFLVRIVFSPNKLEFI
KNLLNIIDFVAILPFYLEVGLSGLSSKAAKDVLGFLRVVRFVRILRIFKLTRHFVGLRVLGHTLRAST
NEFLLLIIFLALGVLIFATMIYYAERVGAQPNDPSASEHTQFKNIPIGFWWAVVTMTTLGYEDTYPQT
WSGMLVGALCALAGVLTIAMPVPVIVNNFGMYYSLAMAKQKLPRKRKKHIPPAPQASSPTFCKTELNM
ACNSTQSDTCLGKDNRLLEHNRSVLSGDDSTGSEPPLSPPERLPIRRSSTRDKNRRGETCFLLTTGDY
TCASDGGIRKGYEKSRSLNNIAGLAGNALRLSPVTSPYNSPCPLRRSRSPIPSIL

| | | |
|---|---|---|
| NOV9e, CG50249-04 | SEQ ID NO: 111 | 3028 bp |

| | | |
|---|---|---|
| DNA Sequence | ORF Start: ATG at 22 | ORF Stop: TAA at 1861 |

AGTCATGTCTGAGTCACAGAGATGGGCAAGATCGAGAACAACGAGAGGGTGATCCTCAATGTCGGGGG
CACCCGGCACGAAACCTACCGCAGCACCCTCAAGACCCTGCCTGGAACACGCCTGGCCCTTCTTGCCT
CCTCCGAGCCCCCAGGCGACTGCTTGACCACGGCGGGCGACAAGCTGCAGCCGTCGCCGCCTCCACTG
TCGCCGCCGCCGAGAGCGCCCCCGCTGTCCCCCGGGCCAGGCGGCTGCTTCGAGGGCGGCGCGGGCAA
CTGCAGTTCCCGCGGCGGCAGGGCCAGCGACCATCCCGGTGGCGGCCGCGAGTTCTTCTTCGACCGGC
ACCCGGGCGTCTTCGCCTATGTGCTCAATTACTACCGCACCGGCAAGCTGCACTGCCCCGCAGACGTG
TGCGGGCCGCTCTTCGAGGAGGAGCTGGCCTTCTGGGGCATCGACGAGACCGACGTGGAGCCCTGCTG
CTGGATGACCTACCGGCAGCACCGCGACGCCGAGGAGGCGCTGGACATCTTCGAGACCCCCGACCTCA
TTGGCGGCGACCCCGGCGACGACGAGGACCTGGCGGCCAAGAGGCTGGGCATCGAGGACGCGGCGGGG
CTCGGGGGCCCCGACGGCAAATCTGGCCGCTGGAGGAGGCTGCAGCCCCGCATGTGGGCCCTCTTCGA
AGACCCCTACTCGTCCAGAGCCGCCAGGTTTATTGCTTTTGCTTCTTTATTCTTCATCCTGGTTTCAA
TTACAACTTTTTGCCTGGAAACACATGAAGCTTTCAATATTGTTAAAAACAAGACAGAACCAGTCATC
AATGGCACAAGTGTTGTTCTACAGTATGAAATTGAAACGGATCCTGCCTTGACGTATGTAGAAGGAGT
GTGTGTGGTGTGGTTTACTTTTGAATTTTTAGTCCGTATTGTTTTTTCACCCAATAAACTTGAATTCA
TCAAAAATCTCTTGAATATCATTGACTTTGTGGCCATCCTACCTTTCTACTTAGAGGTGGGACTCAGT
GGGCTGTCATCCAAAGCTGCTAAAGATGTGCTTGGCTTCCTCAGGGTGGTAAGGTTTGTGAGGATCCT
GAGAATTTTCAAGCTCACCCGCCATTTTGTAGGTCTGAGGGTGCTTGGACATACTCTTCGAGCTAGTA
CTAATGAATTTTTGCTGCTGATAATTTTCCTGGCTCTAGGAGTTTTGATATTTGCTACCATGATCTAC
TATGCCGAGAGAGTGGGAGCTCAACCTAACGACCCTTCAGCTAGTGAGCACACACAGTTCAAAAACAT
TCCCATTGGGTTCTGGTGGGCTGTAGTGACCATGACTACCCTGGGTTATGGGGATATGTACCCCCAAA
CATGGTCAGGCATGCTGGTGGGAGCCCTGTGTGCTCTGGCTGGAGTGCTGACAATAGCCATGCCAGTG
CCTGTCATTGTCAATAATTTTGGAATGTACTACTCCTTGGCAATGGCAAAGCAGAAACTTCCAAGGAA
AAGAAAGAAGCACATCCCTCCTGCTCCTCAGGCAAGCTCACCTACTTTTTGCAAGACAGAATTAAATA
TGGCCTGCAATAGTACACAGAGTGACACATGTCTGGGCAAAGACAATCGACTTCTGGAACATAACAGA
TCAGTGTTATCAGGTGACGACAGTACAGGAAGTGAGCCGCCACTATCACCCCCAGAAAGGCTCCCCAT
CAGACGCTCTAGTACCAGAGACAAAAACAGAAGAGGGGAAACATGTTTCCTACTGACGACAGGTGATT
ACACGTGTGCTTCTGATGGAGGGATCAGGAAACATAACTGCAAAGAGGTTGTCATTACTGGTTACACG
CAAGCCGAGGCCAGATCTCTTACTTAATGACTTGGGGGAAGGCACAAAACATGAGAGAAAGTGTTGTA
CAGAATTTATCATGGATTATTGACTGCTGAGAAAGGGACAGTGGAATTTAGCCATACAAAGGACTATA
CTGGAAACAGACTTCTGCTGCTGAATGTGCCCTGATGTGACCAGGTTGCACTTGGAAGAGATCCTCCG
CGTCTTCATGAGGCACTTAAAGCTTATAAAAGAACTGCGGCTGGAACTCATCTGGTGCTCCCCATGAG
AGTGCTCTGCTTGTAGACTGGCCAGTGTCCATGAAACAACTGTAAATACCAACATGTGTGCATGGGTC
AACAGTCTTGGCCATTTCTCATCAAAAGAAGCCAAATTCATGATCAACATCTCTGAAGTTTCAAGTAA
GGCCCACACTTCTTTGAATTACTCTTCATGGGCCCACATTAGGTTGTGCTGTGAATTACTTAAGGCAG
TGATACTGATGTAGTATAGTTTTGTCTTAATTTCCCTTATTTCTACTTCTTTGGTTGAATCTATGAAC
TTGATTGTATAATTTTCTTATAAATTACTGATGTAATCAGCTTGTCAATTATGTTGTGAAATTGTTAG
TATTCATTTATCAAAAATGACCTATGTTTAGTCACATATTTGTTTAGTTCTGGGAAATTGTTATAGCT
TAAATGGAACTCACCAACATTATTCATAGTTTAAGTCTTTTATCATTATTACCTCAATTATAAATATT
ACAAAAACATAATTCTGGCAATGAGAGTATTTTTTTATTCAATGATCAAGGAGCAATGTCAGTATATA
GTAGAATATCAATTAAATTATATCCTAAAATGTATATTTTGCATAAAAGAGATATTCTTTAATCAATT
ACTTTTTTGTGAGTTTTGTGGCGAATGAAGCTTGTACGTGTCTTTAAAACTGTTGTAGATGAAACTGT
ATAAGATTTTTACATCTTGCTTAATCAATATTTTCAGAGTCTATTAGTTCCCCTGGGATTCTGAATAT
AACATATAGCCTATTATAAATCCCTGTATCGTGGACCTTTTGTGAACATTTCAAGGCGCATGCACAAC
CTTGATGATAACCAGTGGAAATGTAACTAACTGAAATGAAGAATAAAAGGCAAATGAGCTGGGGATAA
ACTTGAATGTTATCTGATTAAATTACTCAAATTATT

NOV9e, CG50249-04

| | | | |
|---|---|---|---|
| Protein Sequence | SEQ ID NO: 112 | 613 aa | MW at 67598.7kD |

MGKIENNERVILNVGGTRHETYRSTLKTLPGTRLALLASSEPPGDCLTTAGDKLQPSPPPLSPPPRAP
PLSPGPGGCFEGGAGNCSSRGGRASDHPGGGREFFFDRHPGVFAYVLNYYRTGKLHCPADVCGPLFEE
ELAFWGIDETDVEPCCWMTYRQHRDAEEALDIFETPDLIGGDPGDDEDLAAKRLGIEDAAGLGGPDGK
SGRWRRLQPRMWALFEDPYSSRAARFIAFASLFFILVSITTFCLETHEAFNIVKNKTEPVINGTSVVL
QYEIETDPALTYVEGVCVVWFTFEFLVRIVFSPNKLEFIKNLLNIIDFVAILPFYLEVGLSGLSSKAA
KDVLGFLRVVRFVRILRIFKLTRHFVGLRVLGHTLRASTNEFLLLIIFLALGVLIFATMIYYAERVGA
QPNDPSASEHTQFKNIPIGFWWAVVTMTTLGYGDMYPQTWSGMLVGALCALAGVLTIAMPVPVIVNNF
GMYYSLAMAKQKLPRKRKKHIPPAPQASSPTFCKTELNMACNSTQSDTCLGKDNRLLEHNRSVLSGDD
STGSEPPLSPPERLPIRRSSTRDKNRRGETCFLLTTGDYTCASDGGIRKDNCKEVVITGYTQAEARSL
T

[0392] A ClustalW comparison of the above protein sequences yields the following sequence alignment shown in Table 9B.

TABLE 9B
Comparison of the NOV9 protein sequences.

| | |
|---|---|
| NOV9a | ----MGKIENNERVILNVGGTRHETYRSTLKTLPGTRLALLASSEPPGDCLTTAGDKLQP |
| NOV9b | RSPTMGKIENNERVILNVGGTRHETYRSTLKLPGTRRLALLSSEPPG------------ |
| NOV9c | ----MGKIENNERVILNVGGTRHETYRSTLKTLPGTRLALLASSEPPGDCLTTA------ |
| NOV9d | ----MGKIENNERVILNVGGTRHETYRSTLKTLPGTRLALLASSEPPG------------ |
| NOV9e | ----MGKIENNERVILNVGGTRHETYRSTLKTLPGTRLALLASSEPPGDCLTTAGDKLQP |
| NOV9a | SPPPLSPPPRAPPLSPGPGGCFEGGAGNCSSRGGRASDHPGGGREFFFDRHPGVFAYVLN |
| NOV9b | ---------------------------NCSSRGGRASDHPGGGREFFFDRHPGVFAYVLN |
| NOV9c | --------------------------GNCSSRGGRASDHPGGGREFFFDRHPGVFAYVLN |
| NOV9d | ---------------------------NCSSRGGRASDHPGGGREFFFDRHPGVFAYVLN |
| NQV9e | SPPPLSPPPRAPPLSPGPGGCFEGGAGNCSSRGGRASDHPGGGREFFFDRHPGVFAYVLN |
| NOV9a | YYRTGKLHCPADVCGPLFEEELAFWGIDETDVEPCCWMTYRQHRDAEEALDIFETPDLIG |
| NOV9b | YYRTGKLHCPADVCGPLFEEELAFWGIDETDVEPCCWMTYRQHRDAEEALDIFETPDLIG |
| NOV9c | YYRTGKLHCPADVCGPLFEEELAFWGIDETDVEPCCWMTYRQHRDAEEALDIFETPDLIG |
| NOV9d | YYRTGKLHCPADVCGPLFEEELAFWGIDETDVEPCCWMTYRQHRDAEEALDIFETPDLIG |
| NOV9e | YYRTGKLHCPADVCGPLFEEELAFWGIDETDVEPCCWMTYRQHRDAEEALDIFETPDLIG |
| NOV9a | GDPGDDEDLAAKRLGIEDAAGLGGPDGKSGRWRRLQPRMWALFEDPYSSRAARFIAFASL |
| NOV9b | GDPGDDEDLAAKRLGIEDAAGLGGPDGKSGRWRRLQPRMWALFEDPYSSRAARFIAFASL |
| NOV9c | GDPGDDEDLAAKRLGIEDAAGLGGPDGKSGRWRRLQPRMWALFEDPYSSRAARFIAFASL |
| NOV9d | GDPGDDEDLAAKRLGIEDAAGLGGPDGKSGRWRRLQPRMWALFEDPYSSRAARFIAFASL |
| NOV9e | GDPGDDEDLAAKRLGIEDAAGLGGPDGKSGRWRRLQPRMWALFEDPYSSRAARFIAFASL |
| NOV9a | FFILVSITTFCLETHEAFNIVKNKTEPVINGTSVVLQYEIETDPALTYVEGVCVVWFTFE |
| NOV9b | FFILVSITTFCLETHEAFNIVKNKTEPVINGTSVVLQYEIETDPALTYVEGVCVVWFTFE |
| NOV9c | ------------------------------------------------------------ |
| NOV9d | FFILVSITTFCLETHEAFNIVKNKTEPVINGTSVVLQYEIETDPALTYVEGVCVVWFTFE |
| NOV9e | FFILVSITTFCLETHEAFNIVKNKTEPVINGTSVVLQYEIETDPALTYVEGVCVVWFTFE |
| NOV9a | FLVRIVFSPNKLEFIKNLLNIIDFVAILPFYLEVGLSGLSSKAAKDVLGFLRVVRFVRIL |
| NOV9b | FLVRIVFSPNKLEFIKNLLNIIDFVAILPFYLEVGLSGLSSKAAKDVLGFLRVVRFVRIL |
| NOV9c | ------------------------------------------------------------ |
| NOV9d | FLVRIVFSPNKLEFIKNLLNIIDFVAILPFYLEVGLSGLSSKAAKDVLGFLRVVRFVRIL |
| NOV9e | FLVRIVFSPNKLEFIKNLLNIIDFVAILPFYLEVGLSGLSSKAAKDVLGFLRVVRFVRIL |
| NOV9a | RIFKLTRHFVGLRVLGHTLRASTNEFLLLIIFLALGVLIFATMIYYAERVGAQPNDPSAS |
| NOV9b | RIFKLTRHFVGLRVLGHTLRASTNEFLLLIIFLALGVLIFATMIYYAERVGAQPNDPSAS |
| NOV9c | ------------------------------------------------------------ |
| NOV9d | RIFKLTRHFVGLRVLGHTLRASTNEFLLLIIFLALGVLIFATMIYYAERVGAQPNDPSAS |
| NOV9e | RIFKLTRHFVGLRVLGHTLRASTNEFLLLIIFLALGVLIFATMIYYAERVGAQPNDPSAS |
| NOV9a | EHTQFKNIPIGFWWAVVTMTTLGYEDTYPQTWSGMLVGALCALAGVLTIAMPVPVIVNNF |
| NOV9b | EHTQFKNIPIGFWWAVVTMTTLGYEDTYPQTWSGMLVGALCALAGVLTIAMPVPVIVNNF |
| NOV9c | ------------------------------------------------------------ |
| NOV9d | EHTQFKNIPIGFWWAVVTMTTLGYEDTYPQTWSGMLVGALCALAGVLTIAMPVPVIVNNF |
| NOV9e | EHTQFKNIPIGFWWAVVTMTTLGYEDTYPQTWSGMLVGALCALAGVLTIAMPVPVIVNNF |
| NOV9a | GMYYSLAMAKQKLPRKRKKHIPPAPQASSPTFCKTELNMACNSTQSDTCLGKDNRLLEHN |
| NOV9b | GMYYSLAMAKQKLPRKRKKHIPPAPQASSPTFCKTELNMACNSTQSDTCLGKDNRLLEHN |
| NOV9c | ------------------------------------------------------------ |
| NOV9d | GMYYSLAMAKQKLPRKRKKHIPPAPQASSPTFCKTELNMACNSTQSDTCLGKDNRLLEHN |
| NOV9e | GMYYSLAMAKQKLPRKRKKHIPPAPQASSPTFCKTELNMACNSTQSDTCLGKDNRLLEHN |
| NOV9a | RSVLSGDDSTGSEPPLSPPERLPIRRSSTRDKNRRGETCFLLTTGDYTCASDGGIRKGYE |
| NOV9b | RSVLSGDDSTGSEPPLSPPERLPIRRSSTRDKNRRGETCFLLTTGDYTCASDGGIRKGYE |
| NOV9c | ------------------------------------------------------------ |
| NOV9d | RSVLSGDDSTGSEPPLSPPERLPIRRSSTRDKNRRGETCFLLTTGDYTCASDGGIRKGYE |
| NOV9e | RSVLSGDDSTGSEPPLSPPERLPIRRSSTRDKNRRGETCFLLTTGDYTCASDGGIRKGYE |
| NOV9a | KSRSLNNIAGLAGNALRLSPVTSPYNSPCPLRRSRSPIPSIL-- |
| NOV9b | KSRSLNNIAGLAGNALRLSPVTSPYNSPCPLRRSRSPIPSILLE |
| NOV9c | -------------------------------------------- |
| NOV9d | KSRSLNNIAGLAGNALRLSPVTSPYNSPCPLRRSRSPIPSIL-- |
| NOV9e | KEVVITGYTQAEARSLT--------------------------- |
| NOV9a | (SEQ ID NO: 104) |
| NOV9b | (SEQ ID NO: 106) |
| NOV9c | (SEQ ID NO: 108) |
| NOV9d | (SEQ ID NO: 110) |
| NOV9e | (SEQ ID NO: 112) |

[0393] Further analysis of the NOV9a protein yielded the following properties shown in Table 9C.

TABLE 9C
Protein Sequence Properties NOV9a

```
Signa1P analysis: No Known Signal Sequence Indicated
PSORT II analysis:
PSG: a new signal peptide prediction method
    N-region: length 9; pos. chg 2; neg. chg 2
    H-region: length 8; peak value 4.97
    PSG score: 0.57
GvH: von Heijne's method for signal seq. recognition
    GvH score (threshold: −2.1): −3.54
    possible cleavage site: between 46 and 47
>>> Seems to have no N-terminal signal peptide
ALOM: Klein et al's method for TM region allocation
    Init position for calculation: 1
    Tentative number of TMS(s) for the threshold 0.5: 6
    INTEGRAL Likelihood = −6.90 Transmembrane 230-246
    INTEGRAL Likelihood = −3.24 Transmembrane 287-303
    INTEGRAL Likelihood = −2.23 Transmembrane 314-330
    INTEGRAL Likelihood = −0.16 Transmembrane 343-359
    INTEGRAL Likelihood = −13.00 Transmembrane 382-398
    INTEGRAL Likelihood = −7.01 Transmembrafle 451-467
    PERIPHERAL Likelihood = 3.61 (at 424)
    ALOM score: −13.00 (number of TMSs: 6)
MTOP: Prediction of membrane topology (Hartmann et al.)
    Center position for calculation: 237
    Charge difference: −0.5 C(−0.5) − N( 0.0)
    N >= C: N-terminal side will be inside
>>> membrane topology: type 3a
MITDISC: discrimination of mitochondrial targeting seq
    R content: 0 Hyd Moment (75) : 5.56
    Hyd Moment (95): 3.52G content: 1
    DIE content: 2 S/T content: 0
    Score: −7.90
Gavel: prediction of cleavage sites for mitochondrial preseq
    cleavage site motif not found
NUCDISC: discrimination of nuclear vocalization signals
    pat4: PRKR (4) at 490
    pat4: RKRK (5) at 491
    pat4: KRKK (5) at 492
    pat4: RKKH (3) at 493
    pat7: PRKRKKH (5) at 490
    pat7: PLRRSRS (4) at 626
    bipartite: none
    content of basic residues: 10.7%
    NLS Score: 1.37
KDEL: ER retention motif in the C-terminus: none
ER Membrane Retention Signals: none
SKL: peroxisomal targeting signal in the C-terminus: none
PTS2: 2nd peroxisomal targeting signal: none
VAC: possible vacuolar targeting motif: none
RNA-binding motif: none
Actinin-type actin-binding motif:
    type 1: none
    type 2: none
NMYR: N-myristoylation pattern : none
Prenylation motif: none
memYQRL: transport motif from cell surface to Golgi: none
Tyrosines in the tail: none
Dileucine motif in the tail: none
checking 63 PROSITE DNA binding motifs: none
checking 71 PROSITE ribosomal protein motifs: none
checking 33 PROSITE prokaryotic DNA binding motifs: none
NNCN: Reinhardt's method for Cytoplasmic/Nuclear discrimination
Prediction: cytoplasmic
Reliability: 89
COIL: Lupas's algorithm to detect coiled-coil regions
total: 0 residues
--------------------------
Final Results (k = 9/23):
    66.7%: endoplasmic reticulum
    22.2%: mitochondrial
    11.1%: nuclear
prediction for CG50249-01 is end (k=9)
```

[0394] A search of the NOV9a protein against the Geneseq database, a proprietary database that contains sequences published in patents and patent publication, yielded several homologous proteins shown in Table 9D.

TABLE 9D
Geneseq Results for NOV9a

| | | NOV9a | Identifies/ | |
|---|---|---|---|---|
| | | Residues/ | Similarities for | |
| Genesq | Protein/Organism/Length | Match | the Matched | Expect |
| Identifier | [Patent #,Date] | Residues | Region | Value |
| AA014201 | Human transporter and ion | 1 . . . 638 | 638/638 (100%) | 0.0 |
| | channel TRICH-18 - Homo | 1 . . . 638 | 638/638 (100%) | |
| | sapiens, 638 aa. [WO200204520- | | | |
| | A2, 17-JAN-2002] | | | |
| ABP52157 | Human 53763 transporter protein | 1 . . . 638 | 638/638 (100%) | 0.0 |
| | SEQ ID NO:11 - Homo sapiens, | 1 . . . 638 | 638/638 (100%) | |
| | 638 aa. [WO200255701-A2, 18- | | | |
| | JUL-2002] | | | |
| ABG70285 | Human novel polypeptide #1 - | 1 . . . 638 | 638/638 (100%) | 0.0 |
| | Homo sapiens, 638 aa. | 1 . . . 638 | 638/638 (100%) | |
| | [WO200257452-A2, 25-JUL- | | | |
| | 2002] | | | |
| ABB78396 | Longer splice variant of a human | 1 . . . 638 | 638/638 (100%) | 0.0 |
| | voltage-gated potassium channel - | 1 . . . 638 | 638/638 (100%) | |
| | Homo sapiens, 638 aa. | | | |
| | [GB2372503-A, 28-AUG-2002] | | | |
| ABP52167 | Rat voltage gated potassium | 1 . . . 638 | 623/638 (97%) | 0.0 |
| | channel protein KV3.2 SEQ ID | 1 . . . 638 | 625/638 (97%) | |
| | NO:33 - Rattus norvegicus, 638 | | | |
| | aa. [WO200255701-A2, 18-JUL- | | | |
| | 2002] | | | |

[0395] In a BLAST search of public sequence databases, the NOV9a protein was found to have homology to the proteins shown in the BLASTP data in Table 9E.

TABLE 9E
Public BLASTP Results for NOV9a

| | | NOV9a | Identities/ | |
|---|---|---|---|---|
| Protein | | Residues/ | Similarities for | |
| Accession | Protein/ | Match | the Matched | Expect |
| Number | Organism/Length | Residues | Portion | Value |
| Q96PR1 | Voltage gated potassium channel | 1 . . . 638 | 638/638 (100%) | 0.0 |
| | Kv3 .2b (Potassium voltage-gated | 1 . . . 638 | 638/638 (100%) | |
| | potassium channel subfamily C | | | |
| | member 2) - Homo sapiens | | | |
| | (Human), 638 aa. | | | |
| P22462 | Potassium voltage-gated channel | 1 . . . 638 | 623/638 (97%) | 0.0 |
| | subfamily C member 2 | 1 . . . 638 | 625/638 (97%) | |
| | (Potassium channel Kv3.2) | | | |
| | (KSHIIIA) - Rattus norvegicus | | | |
| | (Rat), 638 aa. | | | |
| AA089503 | Kv3.2d voltage-gated potassium | 1 . . . 593 | 593/593 (100%) | 0.0 |
| | channel - Homo sapiens | 1 . . . 59 | 3593/593 (100%) | |
| | (Human), 629 aa. | | | |
| Q96PR0 | Voltage gated potassium channel | 1 . . . 593 | 593/593 (100%) | 0.0 |
| | Kv3.2a - Homo sapiens (Human), | 1 . . . 593 | 593/593 (100%) | |
| | 613 aa. | | | |
| A39402 | potassium channel protein IIIA | 1 . . . 593 | 578/593 (97%) | 0.0 |
| | form 1, shaker-type - rat, 613 aa. | 1 . . . 593 | 580/593 (97%) | |

[0396] PFam analysis indicates that the NOV9a protein contains the domains shown in the Table 9F.

TABLE 9F
Domain Analysis of NOV9a

| | | Identities/ | |
|---|---|---|---|
| | NOV9a | Similarities for | |
| Pfam Domain | Match Region | the Matched Region | Expect Value |
| K_tetra | 9 . . . 156 | 50/161 (31%) | 3.2e-42 |
| | | 121/161 (75%) | |
| ion_trans | 281 . . . 472 | 53/233 (23%) | 6.3e-43 |
| | | 155/233 (67%) | |

### Example 10

[0397] The NOV10 clone was analyzed, and the nucleotide and encoded polypeptide sequences are shown in Table 10A.

TABLE 10A
NOV10 Sequence Analysis

| | | |
|---|---|---|
| NOV10a, CG50307-03 | SEQ ID NO: 113 | 1162 bp |

| | | |
|---|---|---|
| DNA Sequence | ORF Start: ATG at 97 | ORF Stop: TGA at 1087 |

ATCTACGGAGTCCCTTTGGCCACATAAGATTGGCCTTAAGAGAAGGACGGAGCCACATACTGCTGACG
GCCCAGAACTGGCAGAGAGAAGGTTGCCATGGCTGCTGTTGACAGTTTCTACCTCTTGTACTGGGAAA
TCGCCAGGTCTTGCAATTGCTATATGGAAGCTCTAGCTTTGGTTGGAGCCTGGTATACGGCCAGAAAA
AGCATCACTGTCATCTGTGACTTTTACAGCCTGATCAGGCTGCATTTTATCCCCCGCCTGGGGAGCAG
AGCAGACTTGATCAAGCAGTATGGAAGATGGGCCGTTGTCAGCGGTGCAACAGATGGGATTGGAAAAG
CCTACGCTGAAGAGTTAGCAAGCCGAGGTCTCAATATAATCCTGATTAGTCGGAACGAGGAGAAGTTG
CAGGTTGTTGCTAAAGACATAGCCGACACGTACAAAGTGGAAACTGATATTATAGTTGCGGACTTCAG
CAGCGGTCGTGAGATCTACCTTCCAATTCGAGAAGCCCTGAAGGACAAAGACGTTGGCATCTTGGTAA
ATAACGTGGGTGTGTTTTATCCCTACCCGCAGTATTTCACTCAGCTGTCCGAGGACAAGCTCTGGGAC
ATCATAAATGTGAACATTGCCGCCGCTAGTTTGATGGTCCATGTTGTGTTACCGGGAATGGTGGAGAG
AAAGAAAGGTGCCATCGTCACGATCTCTTCTGGCTCCTGCTGCAAACCCACTCCTCAGCTGGCTGCAT
TTTCTGCTTCTAAGGCTTATTTAGACCACTTCAGCAGAGCCTTGCAATATGAATATGCCTCTAAAGGA
ATCTTTGTACAGAGTCTAATCCCTTTCTATGTAGCCACCAGCATGACAGCACCCAGCAACTTTCTGCA
CAGGTGCTCGTGGTTGGTGCCTTCGCCAAAAGTCTATGCACATCATGCTGTTTCTACTCTTGGGATTT
CCAAAAGGACCACAGGATATTGGTCCCATTCTATTCAGTTTCTTTTTGCACAGTATATGCCTGAATGG
CTCTGGGTGTGGGGAGCAAATATTCTCAACCGTTCACTACGTAAGGAAGCCTTATCCTGCACAGCCTG
AGTCTGGATGGCCACTTGAGAAGTTTTGCCAACTCCTGGGAACCTCGATATTCTGACATTTGGAAAAA
CACATT

NOV10a, CG50307-03

| | | | |
|---|---|---|---|
| Protein Sequence | SEQ ID NO: 114 | 330 aa | MW at 37031.4kD |

MAAVDSFYLLYWEIARSCNCYMEALALVGAWYTARKSITVICDFYSLIRLHFIPRLGSRADLIKQYGR
WAVVSGATDGIGKAYAEELASRGLNIILISRNEEKLQVVAKDIADTYKVETDIIVADFSSGREIYLPI
REALKDKDVGILVNNVGVFYPYPQYFTQLSEDKLWDIINVNIAAASLMVHVVLPGMVERKKGAIVTIS
SGSCCKPTPQLAAFSASKAYLDHFSRALQYEYASKGIFVQSLIPFYVATSMTAPSNFLHRCSWLVPSP
KVYAHHAVSTLGISKRTTGYWSHSIQFLFAQYMPEWLWVWGANILNRSLRKEALSCTA

| | | |
|---|---|---|
| NOV10b, 275624102 | SEQ ID NO: 115 | 1012 bp |

| | | |
|---|---|---|
| DNA Sequence | ORF Start: at 2 | ORF Stop: end of sequence |

CACCGGATCCACCATGGCTGCTGTTGACAGTTTCTACCTCTTGTACAGGGAAATCGCCAGGTCTTGCA
ATTGCTATATGGAAGCTCTAGCTTTGGTTGGAGCCTGGTATACGGCCAGAAAAAGCATCACTGTCATC
TGTGACTTTTACAGCCTGATCAGGCTGCATTTTATCCCCCGCCTGGGGAGCAGAGCAGACTTGATCAA
GCAGTATGGAAGATGGGCCGTTGTCAGCGGTGCAACAGATGGGATTGGAAAAGCCTACGCTGAAGAGT
TAGCAAGCCGAGGTCTCAATATAATCCTGATTAGTCGGAACGAGGAGAAGTTGCAGGTTGTTGCTAAA
GACATAGCCGACACGTACAAAGTGGAAACTGATATTATAGTTGCGGACTTCAGCAGCGGTCGTGAGAT
CTACCTTCCAATTCGAGAAGCCCTGAAGGACAAAGACGTTGGCATCTTGGTAAATAACGTGGGTGTGT
TTTATCCCTACCCGCAGTATTTCACTCAGCTGTCCGAGGACAAGCTCTGGGACATCATAAATGTGAAC
ATTGCCGCCGCTAGTTTGATGGTCCATGTTGTGTTACCGGGAATGGTGGAGAGAAAGAAAGGTGCCAT
CGTCACGATCTCTTCTGGCTCCTGCTGCAAACCCACTCCTCAGCTGGCTGCATTTTCTGCTTCTAAGG
CTrATTTAGACCACTTCAGCAGAGCCTTGCAATATGAATATGCCTCTAAAGGAATCTTTGTACAGAGT
CTAATCCCTTTCTATGTAGCCACCAGCATGACAGCACCCAGCAACTTTCTGCACAGGTGCTCGTGGTT
GGTGCCTTCGCCAAAAGTCTATGCACATCATGCTGTTTCTACTCTTGGGATTTCCAAAAGGACCACAG
GATATTGGTCCCATTCTATTCAGTTTCTTTTTGCACAGTATATGCCTGAATGGCTCTGGGTGTGGGGA
GCAAATATTCTCAACCGTTCACTACGTAAGGAAGCCTTATCCTGCACAGCCCTCGAGGGC

NOV10b, 275624102

| | | | |
|---|---|---|---|
| Protein Sequence | SEQ ID NO: 116 | 337 aa | MW at 37647.0kD |

TGSTMAAVDSFYLLYREIARSCNCYMEALALVGAWYTARKSITVICDFYSLIRLHFIPRLGSRADLIK
QYGRWAVVSGATDGIGKAYAEELASRGLNIILISRNEEKLQVVAKDIADTYKVETDIIVADFSSGREI
YLPIREALKDKDVGILVNNVGVFYPYPQYFTQLSEDKLWDIINVNIAAASLMVHVVLPGMVERKKGAI
VTISSGSCCKPTPQLAAFSASKAYLDHFSRALQYEYASKGIFVQSLIPFYVATSMTAPSNFLHRCSWL
VPSPKVYAHHAVSTLGISKRTTGYWSHSIQFLFAQYMPEWLWVWGANILNRSLRKEALSCTALEG

| | | |
|---|---|---|
| NOV10c, CG50307-01 | SEQ ID NO: 117 | 1831 bp |

| | | |
|---|---|---|
| DNA Sequence | ORF Start: ATG at 183 | ORF Stop: TGA at 1173 |

ACCGGTTTGGAAGACTTTGCCGGCCTGCAGGACACATGATGACATTGGACCCACCCTCCCCAGCTCGG
AGTCTTTAACTCAGTCACATCTACGGAGTCCCTTTGGCCACATAAGATTGGCCTTAAGAGAAGGACGG
AGCCACATACTGCTGACGGCCCAGAACTGGCAGAGAGAAGGTTGCCATGGCTGCTGTTGACAGTTTCT
ACCTCTTGTACAGGGAAATCGCCAGGTCTTGCAATTGCTATATGGAAGCTCTAGCTTTGGTTGGAGCC
TGGTATACGGCCAGAAAAAGCATCACTGTCATCTGTGACTTTTACAGCCTGATCAGGCTGCATTTTAT
CCCCCGCCTGGGGAGCAGAGCAGACTTGATCAAGCAGTATGGAAGATGGGCCGTTGTCAGCGGTGCAA
CAGATGGGATTGGAAAAGCCTACGCTGAAGAGTTAGCAAGCCGAGGTCTCAATATAATCCTGATTAGT
CGGAACGAGGAGAAGTTGCAGGTTGTTGCTAAAGACATAGCCGACACGTACAAAGTGGAAACTGATAT
TATAGTTGCGGACTTCAGCAGCGGTCGTGAGATCTACCTTCCAATTCGAGAAGCCCTGAAGGACAAAG
ACGTTGGCATCTTGGTAAATAACGTGGGTGTGTTTTATCCCTACCCGCAGTATTTCACTCAGCTGTCC
GAGGACAAGCTCTGGGACATCATAAATGTGAACATTGCCGCCGCTAGTTTGATGGTCCATGTTGTGTT
ACCGGGAATGGTGGAGAGAAAGAAAGGTGCCATCGTCACGATCTCTTCTGGCTCCTGCTGCAAACCCA
CTCCTCAGCTGGCTGCATTTTCTGCTTCTAAGGCTTATTTAGACCACTTCAGCAGAGCCTTGCAATAT
GAATATGCCTCTAAAGGAATCTTTGTACAGAGTCTAATNCCTTTCTATGTAGCCACCAGCATGACAGC
ACCCAGCAACTTTCTGCACAGGTGCTCGTGGTTGGTGCCTTCGCCAAAAGTCTATGCACATCATGCTG
TTTCTACTCTTGGGATTTCCAAAAGGACCACAGGATATTGGTCCCATTCTATTCAGTTTCTTTTTGCA
CAGTATATGCCTGAATGGCTCTGGGTGTGGGGAGCAAATATTCTCAACCGTTCACTACGTAAGGAAGC
CTTATCCTGCACAGCCTGAGTCTGGATGGCCACTTGAGAAGTTTTGCCAACTCCTGGGAACCTCGATA
TTCTGACATTTGGAAAAACACATTTAATTTATCTCCTGTGTTTCATTGCTGATTATTCAGCATACTGT
TGATTCGTCATTTGCAAAACACACATAATACCGTCAGAGTGCTGTGAAAAACCTTAAGGGTGTGTGGA
TGGCACAGGATCAATAATGCCTGAGGCTGATTGACGACATCTACATTTCAGTGCTTTTTCCCTAAGCT
GTTTGAAAGTTACGCTTTTCTGTTGTTCTAGAGCCACAGCAGTCTAATATTGAAATATAATATGATTG
TCAGGTCTTATAATTTCAGATGTTGTTTTTTAAGGGAAATTGACCATTTCACTAGAGGAGTTGTGCTG
GTTTTTACATGTGCATCAAGGAAAGACTACTGGAAAAGTATTTATTTTGGTAACTAAGATTGCTGGCT
ACTATTAGGGACACACTCCGGGCTGTTTGGTATAGCTCTACCTGGTTTGACTATCTGTCATGGAAATG
CTGCCTTCCACTGGTTTTTCCTTTGAGACGGGGTGTGTGCCTGGGTTGTGGGGCCCTTGGGCCCCTTT
TTTTTGGTGCCCCTTCTTCCACCCACTTTCGGCCCGCGGGCCCCCTGGCGCTCTGGGTTTCCC

NOV10c, CG50307-01

| | | | |
|---|---|---|---|
| Protein Sequence | SEQ ID NO: 118 | 330 aa | MW at 36888.2kD |

MAAVDSFYLLYREIARSCNCYMEALALVGAWYTARKSITVICDFYSLIRLHFIPRLGSRADLIKQYGR
WAVVSGATDGIGKAYAEELASRGLNIILISRNEEKLQVVAKDIADTYKVETDIIVADFSSGREIYLPI
REALKDKDVGILVNNVGVFYPYPQYFTQLSEDKLWDIINVNIAAASLMVHVVLPGMVERKKGAIVTIS
SGSCCKPTPQLAAFSASKAYLDHFSRALQYEYASKGIFVQSLXPFYVATSMTAPSNFLHRCSWLVPSP
KVYAHHAVSTLGISKRTTGYWSHSIQFLFAQYMPEWLWVWGANILNRSLRKEALSCTA

| | | |
|---|---|---|
| NOV10d, CG50307-02 | SEQ ID NO: 119 | 1152 bp |

| | | |
|---|---|---|
| DNA Sequence | ORF Start: ATG at 97 | ORF Stop: TGA at 1087 |

ATCTACGGAGTCCCTTTGGCCACATAAGATTGGCCTTAAGAGAAGGACGGAGCCACATACTGCTGACG
GCCCAGAACTGGCAGAGAGAAGGTTGCCATGGCTGCTGTTGACAGTTTCTACCTCTTGTACAGGGAAA
TCGCCAGGTCTTGCAATTGCTATATGGAAGCTCTAGCTTTGGTTGGAGCCTGGTATACGGCCAGAAAA
AGCATCACTGTCATCTGTGACTTTTACAGCCTGATCAGGCTGCATTTTATCCCCCGCCTGGGGAGCAG
AGCAGACTTGATCAAGCAGTATGGAAGATGGGCCGTTGTCAGCGGTGCAACAGATGGGATTGGAAAAG
CCTACGCTGAAGAGTTAGCAAGCCGAGGTCTCAATATAATCCTGATTAGTCGGAACGAGGAGAAGTTG
CAGGTTGTTGCTAAAGACATAGCCGACACGTACAAAGTGGAAACTGATATTATAGTTGCGGACTTCAG
CAGCGGTCGTGAGATCTACCTTCCAATTCGAGAAGCCCTGAAGGACAAAGACGTTGGCATCTTGGTAA
ATAACGTGGGTGTGTTTTATCCCTACCCGCAGTATTTCACTCAGCTGTCCGAGGACAAGCTCTGGGAC
ATCATAAATGTGAACATTGCCGCCGCTAGTTTGATGGTCCATGTTGTGTTACCGGGAATGGTGGAGAG
AAAGAAAGGTGCCATCGTCACGATCTCTTCTGGCTCCTGCTGCAAACCCACTCCTCAGCTGGCTGCAT
TTTCTGCTTCTAAGGCTTATTTAGACCACTTCAGCAGAGCCTTGCAATATGAATATGCCTCTAAAGGA
ATCTTTGTACAGAGTCTAATCCCTTTCTATGTAGCCACCAGCATGACAGCACCCAGCAACTTTCTGCA
CAGGTGCTCGTGGTTGGTGCCTTCGCCAAAAGTCTATGCACATCATGCTGTTTCTACTCTTGGGATTT
CCAAAAGGACCACAGGATATTGGTCCCATTCTATTCAGTTTCTTTTTGCACAGTATATGCCTGAATGG
CTCTGGGTGTGGGGAGCAAATATTCTCAACCGTTCACTACGTAAGGAAGCCTTATGCTGCACAGCCTG
AGTCTGGATGGCCACTTGAGAAGTTTTGCCAACTCCTGGGAACCTCGATATTCTGACATTTGGA

NOV10d, CG50307-02

| | | | |
|---|---|---|---|
| Protein Sequence | SEQ ID NO: 120 | 330 aa | MW at 37017.4kD |

MAAVDSFYLLYREIARSCNCYMEALALVGAWYTARKSITVICDFYSLIRLHFIPRLGSRADLIKQYGR
WAVVSGATDGIGKAYAEELASRGLMIILISRNEEKLQVVAKDIADTYKVETDIIVADFSSGREIYLPI
REALKDKDVGILVNNVGVFYPYPQYFTQLSEDKLWDIINVNIAAASLMVHVVLPGMVERKKGAIVTIS
SGSCCKPTPQLAAFSASKAYLDHFSRALQYEYASKGIFVQSLIPFYVATSMTAPSNFLHRCSWLVPSP
KVYAHHAVSTLGISKRTTGYWSHSIQFLFAQYMPEWLWVWGANILNRSLRKEALCCTA

| | |
|---|---|
| SEQ ID NO: 121 | 1162bp |

| | | |
|---|---|---|
| NOV10e, SNP13375811 of | ORF Start: ATG at 97 | ORF Stop: TGA at 1087 |

| | | |
|---|---|---|
| CG50307-03, DNA Sequence | SNP Pos: 1076 | SNP Change: C to G |

ATCTACGGAGTCCCTTTGGCCACATAAGATTGGCCTTAAGAGAAGGACGGAGCCACATACTGCTGACG
GCCCAGAACTGGCAGAGAGAAGGTTGCCATGGCTGCTGTTGACAGTTTCTACCTCTTGTACTGGGAAA
TCGCCAGGTCTTGCAATTGCTATATGGAAGCTCTAGCTTTGGTTGGAGCCTGGTATACGGCCAGAAAA
AGCATCACTGTCATCTGTGACTTTTACAGCCTGATCAGGCTGCATTTTATCCCCCGCCTGGGGAGCAG
AGCAGACTTGATCAAGCAGTATGGAAGATGGGCCGTTGTCAGCGGTGCAACAGATGGGATTGGAAAAG
CCTACGCTGAAGAGTTAGCAAGCCGAGGTCTCAATATAATCCTGATTAGTCGGAACGAGGAGAAGTTG
CAGGTTGTTGCTAAAGACATAGCCGACACGTACAAAGTGGAAACTGATATTATAGTTGCGGACTTCAG
CAGCGGTCGTGAGATCTACCTTCCAATTCGAGAAGCCCTGAAGGACAAAGACGTTGGCATCFIGGTAA
ATAACGTGGGTGTGTTTTATCCCTACCCGCAGTATTTCACTCAGCTGTCCGAGGACAAGCTCTGGGAC
ATCATAAATGTGAACATTGCCGCCGCTAGTTTGATGGTCCATGTTGTGTTACCGGGAATGGTGGAGAG
AAAGAAAGGTGCCATCGTCACGATCTCTTCTGGCTCCTGCTGCAAACCCACTCCTCAGCTGGCTGCAT
TTTCTGCTTCTAAGGCTTATTTAGACCACTTCAGCAGAGCCTTGCAATATGAATATGCCTCTAAAGGA
ATCTTTGTACAGAGTCTAATCCCTTTCTATGTAGCCACCAGCATGACAGCACCCAGCAACTTTCTGCA
CAGGTGCTCGTGGTTGGTGCCTTCGCCAAAAGTCTATGCACATCATGCTGTTTCTACTCTTGGGATTT
CCAAAAGGACCACAGGATATTGGTCCCATTCTATTCAGTTTCTTTTTGCACAGTATATGCCTGAATGG
CTCTGGGTGTGGGGAGCAAATATTCTCAACCGTTCACTACGTAAGGAAGCCTTATGCTGCACAGCCTG
AGTCTGGATGGCCACTTGAGAAGTTTTGCCAACTCCTGGGAACCTCGATATTCTGACATTTGGAAAAA
CACATT

| | | |
|---|---|---|
| NOV10e, SNP13375811 of | SEQ ID NO: 122 | MW at 37047.4kD |

| | | | |
|---|---|---|---|
| CG50307-03, Protein Sequence | SNP Pos: 327 | 330 aa | SNP Change: Ser to Cys |

MAAVDSFYLLYWEIARSCNCYMEALALVGAWYTARKSITVICDFYSLIRLHFIPRLGSRADLIKQYGR
WAVVSGATDGIGKAYAEELASRGLNIILISRNEEKLQVVAKDIADTYKVETDIIVADFSSGREIYLPI
REALKDKDVGILVNNVGVFYPYPQYFTQLSEDKLWDIINVNIAAASLMVHVVLPGMVERKKGAIVTIS
SGSCCKPTPQLAAFSASKAYLDHFSRALQYEYASKGIFVQSLIPFYVATSMTAPSNFLHRCSWLVPSP
KVYAHHAVSTLGISKRTTGYWSHSIQFLFAQYMPEWLWVWGANILNRSLRKEALCCTA

[0398] A ClustalW comparison of the above protein sequences yields the following sequence alignment shown in Table 10B.

TABLE 10B
Comparison of the NOV10 protein sequences.

| | |
|---|---|
| NOV10a | ----MAAVDSFYLLYWEIARSCNCYMEALALVGAWYTARKSITVICDFYSLIRLHFIPRL |
| NOV10b | TGSTMAAVDSFYLLYREIARSCNCYMEALALVGAWYTARKSITVICDFYSLIRLHFIPRL |
| NOV10c | ----MAAVDSFYLLYREIARSCNCYMEALALVGAWYTARKSITVICDFYSLIRLHFIPRL |
| NOV10d | ----MAAVDSFYLLYREIARSCNCYMEALALVGAWYTARKSITVICDFYSLIRLHFIPRL |
| NOV10a | GSRADLIKQYGRWAVVSGATDGIGKAYAEELASRGLNIILISRNEEKLQVVAKDIADTYK |
| NOV10b | GSRADLIKQYGRWAVVSGATDGIGKAYAEELASRGLNIILISRNEEKLQVVAKDIADTYK |
| NOV10c | GSRADLIKQYGRWAVVSGATDGIGKAYAEELASRGLNIILISRNEEKLQVVAKDIADTYK |
| NOV10d | GSRADLIKQYGRWAVVSGATDGIGKAYAEELASRGLNIILISRNEEKLQVVAKDIADTYK |
| NOV10a | VETDIIVADFSSGREIYLPIREALKDKDVGILVNNVGVFYPYPQYFTQLSEDKLWDIINV |
| NOV10b | VETDIIVADFSSGREIYLPIREALKDKDVGILVNNVGVFYPYPQYFTQLSEDKLWDIINV |
| NOV10c | VETDIIVADFSSGREIYLPIREALKDKDVGILVNNVGVFYPYPQYFTQLSEDKLWDIINV |
| NOV10d | VETDIIVADFSSGREIYLPIREALKDKDVGILVNNVGVFYPYPQYFTQLSEDKLWDIINV |
| NOV10a | NIAAASLMVHVVLPGMVERKKGAIVTISSGSCCKPTPQLAAFSASKAYLDHFSRALQYEY |
| NOV10b | NIAAASLMVHVVLPGMVERKKGAIVTISSGSCCKPTPQLAAFSASKAYLDHFSRALQYEY |
| NOV10c | NIAAASLMVHVVLPGMVERKKGAIVTISSGSCCKPTPQLAAFSASKAYLDHFSRALQYEY |
| NOV10d | NIAAASLMVHVVLPGMVERKKGAIVTISSGSCCKPTPQLAAFSASKAYLDHFSRALQYEY |
| NOV10a | ASKGIFVQSLIPFYVATSMTAPSNFLHRCSWLVPSPKVYAHHAVSTLGISKRTTGYWSHS |
| NOV10b | ASKGIFVQSLIPFYVATSMTAPSNFLHRCSWLVPSPKVYAHHAVSTLGISKRTTGYWSHS |
| NOV10c | ASKGIFVQSLIPFYVATSMTAPSNFLHRCSWLVPSPKVYAHHAVSTLGISKRTTGYWSHS |
| NOV10d | ASKGIFVQSLIPFYVATSMTAPSNFLHRCSWLVPSPKVYAHHAVSTLGISKRTTGYWSHS |
| NOV10a | IQFLFAQYMPEWLWVWGANILNRSLRKEALSCTA--- |
| NOV10b | IQFLFAQYMPEWLWVWGANILNRSLRKEALSCTALEG |
| NOV10c | IQFLFAQYMPEWLWVWGANILNRSLRKEALSCTA--- |
| NOV10d | IQFLFAQYMPEWLWVWGANILNRSLRKEALCCTA--- |
| NOV10a | (SEQ ID NO: 114) |
| NOV10b | (SEQ ID NO: 116) |
| NOV10c | (SEQ ID NO: 118) |
| NOV10d | (SEQ ID NO: 120) |

[0399] Further analysis of the NOV10a protein yielded the following properties shown in Table 10C.

TABLE 10C
Protein Sequence Properties NOV10a

```
SignalP analysis: No Known Signal Sequence Indicated
PSORT II analysis:
PSG: a new signal peptide prediction method
    N-region: length 5; pos. chg 0; neg. chg 1
    H-region: length 7; peak value 0.00
    PSG score: −4.40
GvH: von Heijne's method for signal seq. recognition
    GvH score (threshold: −2.1): −6.54
    possible cleavage site: between 58 and 59
>>> Seems to have no N-terminal signal peptide
ALOM: Klein et al's method for TM region allocation
    mit position for calculation: 1
    Tentative number of TMS(s) for the threshold 0.5: 1
    Number of TMS(s) for threshold 0.5: 1
    INTEGRAL Likelihood = −3.88 Transmembrane 173-189
    PERIPHERAL Likelihood = 2.01 (at 37)
    ALOM score: −3.88 (number of TMSs: 1)
MTOP: Prediction of membrane topology (Hartmann et al.)
    Center position for calculation: 180
    Charge difference: 4.5 C( 2.5) − N(−2.0)
    C > N: C-terminal side will be inside
>>> membrane topology: type lb (cytoplasmic tail 173 to 330)
MITDISC: discrimination of mitochondrial targeting seq
    R content: 0 Hyd Moment(75) : 6.52
    Hyd Moment(95) : 5.94 G content: 0
    D/E content: 2 S/T content: 1
    Score: −6.71
Gavel: prediction of cleavage sites for mitochondrial preseq
    cleavage site motif not found
NUCDISC: discrimination of nuclear localization signals
    pat4: none
    pat7: none
    bipartite: none
    content of basic residues: 10.0%
    NLS Score: −0.47
KDEL: ER retention motif in the C-terminus: none
ER Membrane Retention Signals: none
SKL: peroxisomal targeting signal in the C-terminus: none
PTS2: 2nd peroxisomal targeting signal: none
VAC: possible vacuolar targeting motif: none
RNA-binding motif: none
Actinin-type actin-binding motif:
    type 1: none
    type 2: none
NMYR: N-myristoylation pattern none
Prenylation motif: none
memYQRL: transport motif from cell surface to Golgi: none
Tyrosines in the tail: too long tail
Dileucine motif in the tail: none
checking 63 PROSITE DNA binding motifs: none
checking 71 PROSITE ribosomal protein motifs: none
checking 33 PROSITE prokaryotic DNA binding motifs: none
NNCN: Reinhardt's method for Cytoplasmic/Nuclear discrimination
    Prediction: cytoplasmic
    Reliability: 94.1
COIL: Lupas's algorithm to detect coiled-coil regions
    total: 0 residues
--------------------------
Final Results (k = 9/23)
    34.8%: nuclear
    21.7%: mitochondrial
    21.7%: cytoplasmic
    8.7%: vesicles of secretory system
    4.3%: vacuolar
    4.3%: peroxisomal
    4.3%: endoplasmic reticulum
prediction for CG50307-03 is nuc (k=23)
```

[0400] A search of the NOV10a protein against the Geneseq database, a proprietary database that contains sequences published in patents and patent publication, yielded several homologous proteins shown in Table 10D.

TABLE 10D
Geneseq Results for NOV10a

| | | NOV10a | Identifies/ | |
|---|---|---|---|---|
| | | Residues/ | Similarities for | |
| Genesq | Protein/Organism/Length | Match | the Matched | Expect |
| Identifier | [Patent #,Date] | Residues | Region | Value |
| AAE21050 | Human ding metabolising | 1 . . . 330 | 329/330 (99%) | 0.0 |
| | enzyme (DME-8) protein - Homo | 1 . . . 330 | 329/330 (99%) | |
| | sapiens, 330 aa. [WO200212467- | | | |
| | A2, 14-FEB-2002] | | | |
| AAE21521 | Human dehydrogenase DHDR-5 | 1 . . . 330 | 329/330 (99%) | 0.0 |
| | protein - Homo sapiens, 330 aa. | 1 . . . 330 | 329/330 (99%) | |
| | [WO200216562-A2, 28-FEB- | | | |
| | 2002] | | | |
| ABJ10602 | Human novel protein NOV10a | 1 . . . 330 | 329/330 (99%) | 0.0 |
| | SEQ ID NO: 32 - Homo sapiens, | 1 . . . 330 | 29/330 (99%) | |
| | 330 aa. [WO200259315-A2, 01- | | | |
| | AUG-2002] | | | |
| AAM41389 | Human polypeptide SEQ ID NO | 1 . . . 330 | 329/330 (99%) | 0.0 |
| | 6320 - Homo sapiens, 340 aa. | 11 . . . 340 | 329/330 (99%) | |
| | [WO200153312-A1, 26-JUL- | | | |
| | 2001] | | | |
| AAM39603 | Human polypeptide SEQ ID NO | 1 . . . 330 | 329/330 (99%) | 0.0 |
| | 2748 - Homo sapiens, 330 aa. | 1 . . . 330 | 329/330 (99%) | |
| | [WO200153312-A1, 26-JUL- | | | |
| | 2001] | | | |

[0401] In a BLAST search of public sequence databases, the NOV10a protein was found to have homology to the proteins shown in the BLASTP data in Table 10E.

TABLE 10E
Public BLASTP Results for NOV10a

| | | | Identities/ | |
|---|---|---|---|---|
| | | NOV10a | Similarities | |
| Protein | | Residues/ | for the | |
| Accession | | Match | Matched | Expect |
| Number | Protein/Organism/Length | Residues | Portion | Value |
| CAD28991 | Sequence 1 from Patent | 1 . . . 330 | 329/330 (99%) | 0.0 |
| | WO0216562 - Homo sapiens | 1 . . . 330 | 329/330 (99%) | |
| | (Human), 330 aa. | | | |
| Q8NC98 | Hypothetical protein FLJ90397 - | 1 . . . 330 | 328/330 (99%) | 0.0 |
| | Homo sapiens (Human), 330 | 1 . . . 330 | 328/330 (99%) | |
| | aa. | | | |
| Q9BY22 | Steroid dehydrogenase-like | 22 . . . 330 | 309/309 (100%) | e−179 |
| | protein - Homo sapiens | 1 . . . 309 | 309/309 (100%) | |
| | (Human), 309 aa. | | | |
| Q8WVE5 | Steroid dehydrogenase-like - | 22 . . . 330 | 308/309 (99%) | e−178 |
| | Homo sapiens (Human), 309 | 1 . . . 309 | 308/309 (99%) | |
| | aa. | | | |
| Q8BTX9 | Steroid dehydrogenase-like | 1 . . . 330 | 289/330 (87%) | e−173 |
| | protein homolog - Mus | 1 . . . 330 | 310/330 (93%) | |
| | musculus (Mouse), 330 aa. | | | |

[0402] PFam analysis indicates that the NOV10a protein contains the domains shown in the Table 10F.

TABLE 10F
Domain Analysis of NOV10a

| | NOV10a | Identities/ | |
|---|---|---|---|
| | Match | Similarities | |
| Pfam Domain | Region | for the Matched Region | Expect Value |
| adh_short | 66 . . . 306 | 73/275 (27%) | 8e−24 |
| | | 166/275 (60%) | |

### Example 11

[0403] The NOV11 clone was analyzed, and the nucleotide and encoded polypeptide sequences are shown in Table 11A.

TABLE 11A
NOV11 Sequence Analysis

| | | |
|---|---|---|
| NOV11a, CG50315-01 | SEQ ID NO: 123 | 938 bp |

| | | |
|---|---|---|
| DNA Sequence | ORF Start: at 1 | ORF Stop: TAG at 931 |

AATCTCACCAGAGTAACCGAATTCATTCTCATGGGCTTTATGGACCACCCCAAATTGGAGATTCCCCT
CTTTCTGGTGTTTCTGAGTTTCTACCTAGTCACCCTTCTTGGGAATGTGGGGATGATTATGTTAATCC
AAGTAGATGTCAAACTCTACACCCCAATGTACTTCTTCCTGAGCCACCTCTCCCTGCTGGATGCCTGT
TACACCTCAGTCATCACCCCTCAGATCCTAGCCACATTGGCCACAGGCAAAACGGTCATCTCCTACGG
CCACTGTGCTGCCCAGTTCTTTTTATTCACCATCTGTGCAGGCACAGAGTGCTTTCTGCTGGCAGTGA
TGGCCTATGATCGCTATGCTGCCATTCGCAACCCACTGCTCTATACCGTGGCCATGAATCCCAGGCTC
TACTGGAGCCTGGTGGTAGGAGCCTATGTCTGTGGGGTGTCAGGAGCCATCCTGCGTACCACTTGCAC
CTTCACCCTCTCCTTCTGTAAGGACAATCAAATAAACTTCTTCTTCTGTGACCTCCCACCCCTGCTGA
AGCTTGCCTGCAGTGACACAGCAAACATCGAGATTGTCATCATCTTCTTTGGCAATTTTGTGATTTTG
GCCAATGCCTCCGTCATCCTGATTTCCTATCTGCTCATCATCAAGACCATTTTGAAAGTGAAGTCTTC
AGGTGGCAGGGCCAAGACTTTCTCCACATGTGCCTCTCACATCACTGCTGTGGCCCTTTTCTTTGGAG
CCCTTATCTTCATGTATCTGCAAAGTGGCTCAGGCAAATCTCTGGAGGAAGACAAAGTCGTGTCTGTC
TTCTATACAGTGGTCATCCCCATGCTGAACCCTCTGATCTACAGCTTAAGAAACAAAGATGTAAAAGA
CGCCTTCAGAAAGGTCGCTAGGAGACTCCAGGTGTCCCTGAGCATGTAGATTTA

NOV11a, CG50315-01

| | | | |
|---|---|---|---|
| Protein Sequence | SEQ ID NO: 124 | 310 aa | MW at 34522.7kD |

NLTRVTEFILMGFMDHPKLEIPLFLVFLSFYLVTLLGNVGMIMLIQVDVKLYTPMYFFLSHLSLLDAC
YTSVITPQILAThATGKTVISYGHCAAQFFLFTICAGTECFLLAVMAYDRYAAIRNPLLYTVAMNPRL
YWSLVVGAYVCGVSGAILRTTCTFTLSFCKDNQINFFFCDLPPLLKLACSDTANIEIVIIFFGNFVIL
ANASVILISYLLIIKTILKVKSSGGRAKTFSTCASHITAVALFFGALIFMYLQSGSGKSLEEDKVVSV
FYTVVIPMLNPLIYSLRNKDVKDAFRKVARRLQVSLSM

| | | |
|---|---|---|
| NOV11b, 207580272 | SEQ ID NO: 125 | 822 bp |

| | | |
|---|---|---|
| DNA Sequence | ORF Start: at 1 | ORF Stop: end of sequence |

GGATCCATGATTATGTTAATCCAAGTAGATGTCAAACTCTACACCCCAATGTACTTCTTCCTGAGCCA
CCTCTCCCTGCTGGATGCCTGTTACACCTCAGTCATCACCCCTCAGATCCTAGCCACATTGGCCACAG
GCAAAACGGTCATCTCCTACGGCCACTGTGCTGCCCAGTTCTTTTTATTCACCATCTGTGCAGGCACA
GAGTGCTTTCTGCTGGCAGTGATGGCCTATGATCGCTATGCTGCCATTCGCAACCCACTGCTCTATAC
CGTGGCCATGAATCCCAGGCTCTACTGGAGCCTGGTGGTAGGAGCCTATGTCTGTGGGGTGTCAGGAG
CCATCCTGCGTACCACTTGCACCTTCACCCTCTCCTTCTGTAAGGACAATCAAATAAACTTCTTCTTC
TGTGACCTCCCACCCCTGCTGAAGCTTGCCTGCAGTGACACAGCAAACATCGAGATTGTCATCATCTT
CTTTGGCAATTTTGTGATTTTGGCCAATGCCTCCGTCATCCTGATTTCCTATCTGCTCATCATCAAGA
CCATTTTGAAAGTGAAGTCTTCAGGTGGCAGGGCCAAGACTTTCTCCACATGTGCCTCTCACATCACT
GCTGTGGCCCTTTTCTTTGGAGCCCTTATCTTCATGTATCTGCAAAGTGGCTCAGGCAAATCTCTGGA
GGAAGACAAAGTCGTGTCTGTCTTCTATACAGTGGTCATCCCCATGCTGAACCCTCTGATCTACAGCT
TAAGAAACAAAGATGTAAAAGACGCCTTCAGAAAGGTCGCTAGGAGACTCCAGGTGTTCCTGAGCATG
CTCGAG

NOV11b, 207580272

| | | | |
|---|---|---|---|
| Protein Sequence | SEQ ID NO: 126 | 274 aa | MW at 30387.7kD |

GSMIMLIQVDVKLYTPMYFFLSHLSLLDACYTSVITPQILATLATGKTVISYGHCAAQFFLFTICAGT
ECFLLAVMAYDRYAAIRNPLLYTVAMNPRLYWSLVVGAYVCGVSGAILRTTCTFTLSFCKDNQINFFF
CDLPPLLKLACSDTANIEIVIIFFGNFVILANASVILISYLLIIKTILKVKSSGGRAKTFSTCASHIT
AVALFFGALIFMYLQSGSGKSLEEDKVVSVFYTVVIPMLNPLIYSLRNKDVKDAFRKVARRLQVFLSM
LE

| | | |
|---|---|---|
| NOV11c, 314411778 | SEQ ID NO: 127 | 964 bp |

| | | |
|---|---|---|
| DNA Sequence | ORF Start: at 2 | ORF Stop: end of sequence |

CACCGGATCCACCATGGCCAAGAATAATCTCACCAGAGTAACCGAATTCATTCTCATGGGCTTTATGG
ACCACCCCAAATTGGAGATTCCCCTCTTTCTGGTGTTTCTGAGTTTCTACCTAGTCACCCTTCTTGGG
AATGTGGGGATGATTATGTTAATCCAAGTAGATGTCAAACTCTACACCCCAATGTACTTCTTCCTGAG
CCACCTCTCCCTGCTGGATGCCTGTTACACCTCAGTCATCACCCCTCAGATCCTAGCCACATTGGCCA
CAGGCAAAACGGTCATCTCCTACGGCCACTGTGCTGCCCAGTTCTTTTTATTCACCATCTGTGCAGGC
ACAGAGTGCTTTCTGCTGGCAGTGATGGCCTATGATCGCTATGCTGCCATTCGCAACCCACTGCTCTA
TACCGTGGCCATGAATCCCAGGCTCTGCTGGAGCCTGGTGGTAGGAGCCTATGTCTGTGGGGTGTCAG
GAGCCATCCTGCGTACCACTTGCACCTTCACCCTCTCCTTCTGTAAGGACAATCAAATAAACTTCTTC
TTCTGTGACCTCCCACCCCTGCTGAAGCTTGCCTGCAGTGACACAGCAAACATCGAGATTGTCATCAT
CTTCTTTGGCAATTTTGTGATTTTGGCCAATGCCTCCGTCATCCTGATTTCCTATCTGCTCATCATCA
AGACCATTTTGAAAGTGAAGTCTTCAGGTGGCAGGGCCAAGACTTTCTCCACATGTGCCTCTCACATC
ACTGCTGTGGCCCTTTTCTTTGGAGCCCTTATCTTCATGTATCTGCAAAGTGGCTCAGGCAAATCTCT
GGAGGAAGACAAAGTCGTGTCTGTCTTCTATACAGTGGTCATCCCCATGCTGAACCCTCTGATCTACA
GCTTAAGAAACAAAGATGTAAAAGACGCCTTCAGAAAGGTCGCTAGGAGACTCCAGGTGTCCCTGAGC
ATGCTCGAGGGC

NOV11c, 314411778

| | | | |
|---|---|---|---|
| Protein Sequence | SEQ ID NO: 128 | 321 aa | MW at 35552.9kD |

TGSTMAKNNLTRVTEFILMGFMDNPKLEIPLFLVFLSFYLVTLLGNVGMIMLIQVDVKLYTPMYFFLS
HLSLLDACYTSVITPQILATLATGKTVISYGHCAAQFFLFTICAGTECFLLAVMAYDRYAAIRNPLLY
TVANNPRLCWSLVVGAYVCGVSGAILRTTCTFTLSFCKDNQINFFFCDLPPLLKLACSDTANIEIVII
FFGNFVILANASVILISYLLIIKTILKVKSSGGRAKTFSTCASHITAVALFFGALIFMYLQSGSGKSL
EEDKVVSVFYTVVIPMLNPLIYSLRNKDVKDAFRKVARRLQVSLSMLEG

| | | |
|---|---|---|
| NOV11d, CG50315-02 | SEQ ID NO: 129 | 968 bp |

| | | |
|---|---|---|
| DNA Sequence | ORF Start: ATG at 17 | ORF Stop: TAG at 959 |

AGTCCACATTGTCTCCATGGCCAAGAATAATCTCACCAGAGTAACCGAATTCATTCTCATGGGCTTTA
TGGACCACCCCAAATTGGAGATTCCCCTCTTTCTGGTGTTTCTGAGTTTCTACCTAGTCACCCTTCTT
GGGAATGTGGGGATGATTATGTTAATCCAAGTAGATGTCAAACTCTACACCCCAATGTACTTCTTCCT
GAGCCACCTCTCCCTGCTGGATGCCTGTTACACCTCAGTCATCACCCCTCAGATCCTAGCCACATTGG
CCACAGGCAAAACGGTCATCTCCTACGGCCACTGTGCTGCCCAGTTCTTTTTATTCACCATCTGTGCA
GGCACAGAGTGCTTTCTGCTGGCAGTGATGGCCTATGATCGCTATGCTGCCATTCGCAACCCAOTGCT
CTATACCGTGGCCATGAATCCCAGGCTCTGCTGGAGCCTGGTGGTAGGAGCCTATGTCTGTGGGGTGT
CAGGAGCCATCCTGCGTACCACTTGCACCTTCACCCTCTCCTTCTGTAAGGACAATCAAATAAACTTC
TTCTTCTGTGACCTCCCACCCCTGCTGAAGCTTGCCTGCAGTGACACAGCAAACATCGAGATTGTCAT
CATCTTCTTTGGCAATTTTGTGATTTTGGCCAATGCCTCCGTCATCCTGATTTCCTATCTGCTCATCA
TCAAGACCATTTTGAAAGTGAAGTCTTCAGGTGGCAGGGCCAAGACTTTCTCCACATGTGCCTCTCAC
ATCACTGCTGTGGCCCTTTTCTTTGGAGCCCTTATCTTCATGTATCTGCAAAGTGGCTCAGGCAAATC
TCTGGAGGAAGACAAAGTCGTGTCTGTCTTCTATACAGTGGTCATCCCCATGCTGAACCCTCTGATCT
ACAGCTTAAGAAACAAAGATGTAAAAGACGCCTTCAGAAAGGTCGCTAGGAGACTCCAGGTGTCCCTG
AGCATGTAGATCTAAG

NOV11d, CG50315-02

| | | | |
|---|---|---|---|
| Protein Sequence | SEQ ID NO: 130 | 314 aa | MW at 34907.2kD |

MAKNNLTRVTEFILMGFMDHPKLEIPLFLVFLSFYLVTLLGNVGMIMLIQVDVKLYTPMYFFLSHLSL
LDACYTSVITPQILATLATGKTVISYGHCAAQFFLFTICAGTECFLLAVMAYDRYAAIRNPLLYTVAM
NPRLCWSLVVGAYVCGVSGAILRTTCTFTLSFCKDNQINFFFCDLPPLLKLACSDTANIEIVIIFFGN
FVILANASVILISYLLIIKTILKVKSSGGRAKTFSTCASHITAVALFFGALIFMYLQSGSGKSLEEDK
VVSVFYTVVIPMLNPLIYSLRNKDVKDAFRKVARRLQVSLSM

| | | |
|---|---|---|
| NOV11e, CG50315-03 | SEQ ID NO: 131 | 822 bp |

| | | |
|---|---|---|
| DNA Sequence | ORF Start: ATG at 7 | ORF Stop: at 817 |

GGATCCATGATTATGTTAATCCAAGTAGATGTCAAACTCTACACCCCAATGTACTTCTTCCTGAGCCA
CCTCTCCCTGCTGGATGCCTGTTACACCTCAGTCATCACCCCTCAGATCCTAGCCACATTGGCCACAG
GCAAAACGGTCATCTCCTACGGCCACTGTGCTGCCCAGTTCTTTTTATTCACCATCTGTGCAGGCACA
GAGTGCTTTCTGCTGGCAGTGATGGCCTATGATCGCTATGCTGCCATTCGCAACCCACTGCTCTATAC
CGTGGCCATGAATCCCAGGCTCTACTGGAGCCTGGTGGTAGGAGCCTATGTCTGTGGGGTGTCAGGAG
CCATCCTGCGTACCACTTGCACCTTCACCCTCTCCTTCTGTAAGGACAATCAAATAAACTTCTTCTTC
TGTGACCTCCCACCCCTGCTGAAGCTTGCCTGCAGTGACACAGCAAACATCGAGATTGTCATCATCTT
CTTTGGCAATTTTGTGATTTTGGCCAATGCCTCCGTCATCCTGATTTCCTATCTGCTCATCATCAAGA
CCATTTTGAAAGTGAAGTCTTCAGGTGGCAGGGCCAAGACTTTCTCCACATGTGCCTCTCACATCACT
GCTGTGGCCCTTTTCTTTGGAGCCCTTATCTTCATGTATCTGCAAAGTGGCTCAGGCAAATCTCTGGA
GGAAGACAAAGTCGTGTCTGTCTTCTATACAGTGGTCATCCCCATGCTGAACCCTCTGATCTACAGCT
TAAGAAACAAAGATGTAAAAGACGCCTTCAGAAAGGTCGCTAGGAGACTCCAGGTGTTCCTGAGCATG
CTCGAG

NOV11e, CG50315-03

| | | | |
|---|---|---|---|
| Protein Sequence | SEQ ID NO: 132 | 270 aa | MW at 30001.3kD |

MIMLIQVDVKLYTPMYFFLSHLSLLDACYTSVITPQILAThATGKTVISYGHCAAQFFLFTICAGTEC
FLLAVMAYDRYAAIRNPLLYTVAMNPRLYWSLVVGAYVCGVSGAILRTTCTFTLSFCKDNQINFFFCD
LPPLLKLACSDTANIEIVIIFFGNFVILANASVILISYLLIIKTILKVKSSGGRAKTFSTCASHITAV
ALFFGALIFMYLQSGSGKSLEEDKVVSVFYTVVIPMLNPLIYSLRNKDVKDAFRKVARRLQVFLSM

[0404] A ClustalW comparison of the above protein sequences yields the following sequence alignment shown in Table 11B.

TABLE 11B
Comparison of the NOV11 protein sequences.

| | |
|---|---|
| NOV11a | --------NLTRVTEFILMGFMDHPKLEIPLFLVFLSFYLVTLLGNVGMIMLIQVDVKYL |
| NOV11b | ----------------------------------------------GSMIMLIQVDVKLY |
| NOV11c | TGSTMAKNNLTRVTEFILMGFMDHPKLEIPLFLVFLSFYLVTLLGNVGMIMLIQVDVKYL |
| NOV11d | ----MAKNNLTRVTEFILMGFMDHPKLEIPLFLVFLSFYLVTLLGNVGMIMLIQVDVKYL |
| NOV11e | ------------------------------------------------MIMLIQVDVKLY |
| NOV11a | TPMYFFLSHLSLLDACYTSVITPQILATLATGKTVISYGHCAAQFFLFTICAGTECFLLA |
| NOV11b | TPMYFFLSHLSLLDACYTSVITPQILATLATGKTVISYGHCAAQFFLFTICAGTECFLLA |
| NOV11c | TPMYFFLSHLSLLDACYTSVITPQILATLATGKTVISYGHCAAQFFLFTICAGTECFLLA |
| NOV11d | TPMYFFLSHLSLLDACYTSVITPQILATLATGKTVISYGHCAAQFFLFTICAGTECFLLA |
| NOV11e | TPMYFFLSHLSLLDACYTSVITPQILATLATGKTVISYGHCAAQFFLFTICAGTECFLLA |
| NOV11a | VMAYDRYAAIRNPLLYTVANNPRLYWSLVVGAYVCGVSGAILRTTCTFTLSFCKDNQINF |
| NOV11b | VMAYDRYAAIRNPLLYTVANNPRLYWSLVVGAYVCGVSGAILRTTCTFTLSFCKDNQINF |
| NOV11c | VMAYDRYAAIRNPLLYTVANNPRLCWSLVVGAYVCGVSGAILRTTCTFTLSFCKDNQINF |
| NOV11d | VMAYDRYAAIRNPLLYTVANNPRLCWSLVVGAYVCGVSGAILRTTCTFTLSFCKDNQINF |
| NOV11e | VMAYDRYAAIRNPLLYTVANNPRLYWSLVVGAYVCGVSGAILRTTCTFTLSFCKDNQINF |
| NOV11a | FFCDLPPLLKLACSDTANIEIVIIFFGNFVILANASVILISYLLIIKTILKVKSSGGRAK |
| NOV11b | FFCDLPPLLKLACSDTANIEIVIIFFGNFVILANASVILISYLLIIKTILKVKSSGGRAK |
| NOV11c | FFCDLPPLLKLACSDTANIEIVIIFFGNFVILANASVILISYLLIIKTILKVKSSGGRAK |
| NOV11d | FFCDLPPLLKLACSDTANIEIVIIFFGNFVILANASVILISYLLIIKTILKVKSSGGRAK |
| NOV11e | FFCDLPPLLKLACSDTANIEIVIIFFGNFVILANASVILISYLLIIKTILKVKSSGGRAK |
| NOV11a | TFSTCASHITAVALFFGALIFMYLQSGSGKSLEEDKVVSVFYTVVIPMLNPLIYSLRNKD |
| NOV11b | TFSTCASHITAVALFFGALIFMYLQSGSGKSLEEDKVVSVFYTVVIPMLNPLIYSLRNKD |
| NOV11c | TFSTCASHITAVALFFGALIFMYLQSGSGKSLEEDKVVSVFYTVVIPMLNPLIYSLRNKD |
| NOV11d | TFSTCASHITAVALFFGALIFMYLQSGSGKSLEEDKVVSVFYTVVIPMLNPLIYSLRNKD |
| NOV11e | TFSTCASHITAVALFFGALIFMYLQSGSGKSLEEDKVVSVFYTVVIPMLNPLIYSLRNKD |
| NOV11a | VKDAFRKVARRLQVSLSM--- |
| NOV11b | VKDAFRKVARRLQVFLSMLE- |
| NOV11c | VKDAFRKVARRLQVSLSMLEG |
| NOV11d | VKDAFRKVARRLQVSLSM--- |
| NOV11e | VKDAFRKVARRLQVFLSM--- |
| NOV11a | (SEQ ID NO: 124) |
| NOV11b | (SEQ ID NO: 126) |
| NOV11c | (SEQ ID NO: 128) |
| NOV11d | (SEQ ID NO: 130) |
| NOV11e | (SEQ ID NO: 132) |

[0405] Further analysis of the NOV11a protein yielded the following properties shown in Table 11C.

TABLE 11C
Protein Sequence Properties NOV11a

SignalP analysis: Cleavage site between residues 38 and 39
PSORT II analysis:

| | |
|---|---|
| PSG: | a new signal peptide prediction method |
| | N-region: length 7; pos.chg 1; neg.chg 1 |
| | H-region: length 7; peak value 6.23 |
| | PSG score: 1.83 |
| GvH: | von Heijne's method for signal seq. recognition |
| | GvH score (threshold: −2.1): −3.00 |
| | possible cleavage site: between 37 and 38 |

>>> Seems to have no N-terminal signal peptide

| ALOM: | Klein et al's method for TM region allocation | |
|---|---|---|
| | Init position for calculation: 1 | |
| | Tentative number of TMS(s) for the threshold 0.5: 6 | |
| | INTEGRAL | Likelihood = −6.58 Transmembrane 21-37 |
| | INTEGRAL | Likelihood = −4.09 Transmembrane 97-113 |
| | INTEGRAL | Likelihood = −1.65 Transmembrane 138-154 |
| | INTEGRAL | Likelihood = −8.70 Transmembrane 202-218 |
| | INTEGRAL | Likelihood = −4.14 Transmembrane 240-256 |
| | INTEGRAL | Likelihood = −3.13 Transmembrane 269-285 |
| | PERIPHERAL | Likelihood = 0.85 (at 183) |

| | |
|---|---|
| | ALOM score: −8.70 (number of TMSs: 6) |
| MTOP: | Prediction of membrane topology (Hartmann et al.) |
| | Center position for calculation: 28 |
| | Charge difference: 2.0 C(0.5) − N(−1.5) |
| | C > N: C-terminal side will be inside |

>>>Caution: Inconsistent mtop result with signal peptide
>>> membrane topology: type 3b
MITDISC: discrimination of mitochondrial targeting seq

| | | | |
|---|---|---|---|
| R content: | 1 | Hyd Moment(75): | 1.96 |
| Hyd Moment(95): | 9.20 | G content: | 1 |
| D/E content: | 2 | S/T content: | 2 |
| Score: −6.22 | | | |

| | |
|---|---|
| Gavel: | prediction of cleavage sites for mitochondrial preseq |
| | R-2 motif at 14 TRV\|TE |
| NUCDISC: | discrimination of nuclear localization signals |
| | pat4: none |
| | pat7: none |
| | bipartite: none |
| | content of basic residues: 7.7% |
| | NLS Score: −0.47 |

KDEL: ER retention motif in the C-terminus: none
ER Membrane Retention Signals:

XXRR-like motif in the N-terminus: LTRV

none
SKL: peroxisomal targeting signal in the C-terminus: none
PTS2: 2nd peroxisomal targeting signal: none
VAC: possible vacuolar targeting motif: none
RNA-binding motif: none
Actinin-type actin-binding motif:

type 1: none
type 2: none

NMYR: N-myristoylation pattern: none
Prenylation motif: none
memYQRL: transport motif from cell surface to Golgi: none
Tyrosines in the tail: none
Dileucine motif in the tail: none
checking 63 PROSITE DNA binding motifs: none
checking 71 PROSITE ribosomal protein motifs: none
checking 33 PROSITE prokaryotic DNA binding motifs: none

| | |
|---|---|
| NNCN: | Reinhardt's method for Cytoplasmic/Nuclear discrimination |
| | Prediction: cytoplasmic |
| | Reliability: 94.1 |
| COIL: | Lupas's algorithm to detect coiled-coil regions |
| | total: 0 residues |

Final Results (k = 9/23):

44.4%: endoplasmic reticulum
22.2%: vacuolar
11.1%: Golgi
11.1%: vesicles of secretory system
11.1%: mitochondrial

>> prediction for CG50315-01 is end (k = 9)

[0406] A search of the NOV11a protein against the Geneseq database, a proprietary database that contains sequences published in patents and patent publication, yielded several homologous proteins shown in Table 11D.

TABLE 11D
Geneseq Results for NOV11a

| | | NOV11a | Identities/ | |
|---|---|---|---|---|
| | | Residues/ | Similarities for | |
| Geneseq | Protein/Organism/Length | Match | the Matched | Expect |
| Identifier | [Patent #, Date] | Residues | Region | Value |
| ABB06632 | G protein-coupled receptor | 1 . . . 310 | 310/310 (100%) | e−176 |
| | GPCR17b protein SEQ ID NO: 74 - | 1 . . . 310 | 310/310 (100%) | |
| | Homo sapiens, 310 aa. | | | |
| | [WO200212343-A2, 14-FEB- | | | |
| | 2002] | | | |
| ABB06631 | G protein-coupled receptor | 1 . . . 310 | 309/310 (99%) | e−175 |
| | GPCR17a protein SEQ ID NO: 72 - | 5 . . . 314 | 309/310 (99%) | |
| | Homo sapiens, 314 aa. | | | |
| | [WO200212343-A2, 14-FEB- | | | |
| | 2002] | | | |
| AAU95529 | Human olfactory and pheromone | 1 . . . 310 | 309/310 (99%) | e−175 |
| | G protein-coupled receptor #16 - | 5 . . . 314 | 309/310 (99%) | |
| | Homo sapiens, 314 aa. | | | |
| | [WO200224726-A2, 28-MAR- | | | |
| | 2002] | | | |
| ABP95742 | Human GPCR polypeptide SEQ | 1 . . . 310 | 309/310 (99%) | e−175 |
| | ID NO 294 - Homo sapiens, 314 | 5 . . . 314 | 309/310 (99%) | |
| | aa. [WO200216548-A2, 28-FEB- | | | |
| | 2002] | | | |
| AAG72468 | Human OR-like polypeptide | 1 . . . 310 | 309/310 (99%) | e−175 |
| | query sequence, SEQ ID NO: | 5 . . . 314 | 309/310 (99%) | |
| | 2149 - Homo sapiens, 314 aa. | | | |
| | [WO200127158-A2, 19-APR- | | | |
| | 2001] | | | |

[0407] In a BLAST search of public sequence databases, the NOV11a protein was found to have homology to the proteins shown in the BLASTP data in Table 11E.

TABLE 11E
Public BLASTP Results for NOV11a

| | | NOV11a | Identities/ | |
|---|---|---|---|---|
| Protein | | Residues/ | Similarities for | |
| Accession | | Match | the Matched | Expect |
| Number | Protein/Organism/Length | Residues | Portion | Value |
| Q8NGQ6 | Seven transmembrane helix | 1 . . . 310 | 309/310 (99%) | e−175 |
| | receptor - Homo sapiens | 5 . . . 314 | 309/310 (99%) | |
| | (Human), 314 aa. | | | |
| CAD37586 | Sequence 201 from Patent | 1 . . . 310 | 308/310 (99%) | e−173 |
| | WO0224726 - Homo sapiens | 5 . . . 314 | 308/310 (99%) | |
| | (Human), 314 aa. | | | |
| Q8VG66 | Olfactory receptor MOR211-1 - | 1 . . . 307 | 253/307 (82%) | e−146 |
| | Mus musculus (Mouse), 316 aa. | 5 . . . 311 | 279/307 (90%) | |
| Q8VG65 | Olfactory receptor MOR211-2 - | 1 . . . 310 | 246/310 (79%) | e−144 |
| | Mus musculus (Mouse), 314 aa. | 5 . . . 314 | 278/310 (89%) | |
| Q96RA8 | Olfactory receptor - Homo | 64 . . . 279 | 215/216 (99%) | e−119 |
| | sapiens (Human), 216 aa | 1 . . . 216 | 215/216 (99%) | |
| | (fragment). | | | |

[0408] PFam analysis indicates that the NOV11a protein contains the domains shown in the Table 11F.

TABLE 11F
Domain Analysis of NOV11a

| | NOV11a | Identities/ | |
|---|---|---|---|
| | Match | Similarities | |
| Pfam Domain | Region | for the Matched Region | Expect Value |
| 7tm_1 | 37 . . . 286 | 55/276 (20%) | 1.5e−28 |
| | | 174/276 (63%) | |

### Example 12

[0409] The NOV12 clone was analyzed, and the nucleotide and encoded polypeptide sequences are shown in Table 12A.

TABLE 12A
NOV12 Sequence Analysis

| | | |
|---|---|---|
| NOV12a, CG50341-01 | SEQ ID NO: 133 | 997 bp |

| | | |
|---|---|---|
| DNA Sequence | ORF Start: ATG at 21 | ORF Stop: TAA at 966 |

GGCGCTTATAATTTTGAACTATGACCAATCAGACACAGATGATGGAATTCTTGCTTGTGAGATTTACT
GAGAATTGGGTGCTCCTGAGGCTGCATGCTTTGCTCTTCTCACTGATCTACCTCACGGCTGTGCTGAT
GAATTTAGTCATCATTCTCCTCATGATTCTGGACCATCGTCTCCACATGGCAATGTACTTTTTCCTCC
GACATTTGTCCTTCTTAGACCTGTGTCTCATTTCTGCCACAGTCCCCAAATCCATCCTCAACTCTGTC
GCCTCCACTGACTCCATCTCCTTCCTGGGGTGTGTGTTGCAGCTCTTCTTGGTGGTACTGCTGGCTGG
ATCAGAGATTGGCATCCTTACTGCCATGTCCTATGACCGCTATGCTGCCATCTGCTGCCCCCTACACT
GTGAGGCTGTCATGAGCAGAGGGCTCTGTGTCCAGTTGATGGCTCTGTCCTGGCTCAACAGAGGGGCC
TTGGGACTCTTGTACACAGCTGGAACATTCTCTCTGAATTTTTATGGCTCTGATGAGCTACATCAGTT
CTTCTGCGATGTCCCTGCCCTACTAAAGCTCACTTGTTCTAAAGAACATGCCATCATTAGTGTCAGTG
TGGCCATTGGGGTCTGTTATGCATTTTCATGTTTAGTTTGCATTGTAGTTTCCTATGTGTACATTTTC
TCTGCTGTGTTAAGGATATCACAGAGACAGAGACAATCCAAAGCCTTTTCCAACTGTGTGCCTCACCT
CATTGTTGTCACTGTGTTTCTTGTAACAGGTGCTGTTGCTTATTTAAAGCCAGGGTCTGATGCACCTT
CTATTCTAGACTTGCTGGTGTCTGTGTTCTATTCTGTCGCACCTCCAACCTTGAACCCTGTTATCTAC
TGTCTGAAGAACAAGGACATTAAATCCGCTCTGAGTAAAGTCCTGTGGAATGTTAGAAGCAGTGGGGT
AATGAAAGATGACTAAAGTTGAAGATGGGAAGTACTTTTTTTGNN

NOV12a, CG50341-01

| | | | |
|---|---|---|---|
| Protein Sequence | SEQ ID NO: 134 | 315 aa | MW at 34934.2kD |

MTNQTQMMEFLLVRFTENWVLLRLHALLFSLIYLTAVLMNLVIILLMILDHRLHMAMYFFLRHLSFLD
LCLISATVPKSILNSVASTDSISFLGCVLQLFLVVLLAGSEIGILTAMSYDRYAAICCPLHCEAVMSR
GLCVQLMALSWLNRGALGLLYTAGTFSLNFYGSDELHQFFCDVPALLKLTCSKEHAIISVSVAIGVCY
AFSCLVCIVVSYVYIFSAVLRISQRQRQSKAFSNCVPHLIVVTVFLVTGAVAYLKPGSDAPSILDLLV
SVFYSVAPPTLNPVIYCLKNKDIKSALSKVLWNVRSSGVMKDD

| | | |
|---|---|---|
| NOV12b, 169475616 | SEQ ID NO: 135 | 819 bp |

| | | |
|---|---|---|
| DNA Sequence | ORF Start: at 1 | ORF Stop: end of sequence |

GGATCCATGATTCTGGACCATCGTCTCCACATGGCAATGTACTTTTTCCTCCGACATTTGTCCTTCTT
AGACCTGTGTCTCATTTCTGCCACAGTCCCCAAATCCATCCTCAACTCTGTCGCCTCCACTGACTCCA
TCTCCTTCCTGGGGTGTGTGTTGCAGCTCTTCTTGGTGGTACTGCTGGCTGGATCAGAGATTGGCATC
CTTACTGCCATGTCCTATGACCGCTATGCTGCCATCTGCTGCCCCCTACACTGTGAGGCTGTCATGAG
CAGAGGGCTCTGTGTCCAGTTGATGGCTCTGTCCTGGCTCAACAGAGGGGCCTTGGGACTCTTGTACA
CAGCTGGAACATTCTCTCTGAATTTTTATGGCTCTGATGAGCTACATCAGTTCTTCTGCGATGTCCCT
GCCCTACTAAAGCTCACTTGTTCTAAAGAACATGCCATCATTAGTGTCAGTGTGGCCATTGGGGTCTG
TTATGCATTTTCATGTTTAGTTTGCATTGTAGTTTCCTATGTGTACATTTTCTCTGCTGTGTTAAGGA
TATCACAGAGACAGAGACAATCCAAAGCCTTTTCCAACTGTGTGCCTCACCTCATTGTTGTCACTGTG
TTTCTTGTAACAGGTGCTGTTGCTTATTTAAAGCCAGGGTCTGATGCACCTTCTATTCTAGACTTGCT
GGTGTCTGTGTTCTATTCTGTCGCACCTCCAACCTTGAACCCTGTTATCTACTGTCTGAAGAACAAGG
ACATTAAATCCGCTCTGAGTAAAGTCCTGTGGAATGTTAGAAGCAGTGGGGTAATGAAAGATGACCTC
GAG

NOV12b, 169475616

| | | | |
|---|---|---|---|
| Protein Sequence | SEQ ID NO: 136 | 273 aa | MW at 29857.9kD |

GSMILDHRLHMAMYFFLRHLSFLDLCLISATVPKSILNSVASTDSISFLGCVLQLFLVVLLAGSEIGI
LTAMSYDRYAAICCPLHCEAVMSRGLCVQLMALSWLNRGALGLLYTAGTFSLNFYGSDELHQFFCDVP
ALLKLTCSKEHAIISVSVAIGVCYAFSCLVCIVVSYVYIFSAVLRISQRQRQSKAFSNCVPHLIVVTV
FLVTGAVAYLKPGSDAPSILDLLVSVFYSVAPPTLNPVIYCLKNKDIKSALSKVLWNVRSSGVMKDDL
E

| | | |
|---|---|---|
| NOV12c, CG50341-02 | SEQ ID NO: 137 | 996 bp |

| | | |
|---|---|---|
| DNA Sequence | ORF Start: ATG at 21 | ORF Stop: TAA at 966 |

GGCGCTTATAATTTTGAACTATGACCAATCAGACACAGATGATGGAATTCTTGCTTGTGAGATTTACT
GAGAATTGGGTGCTCCTGAGGCTGCATGCTTTGCTCTTCTCACTGATCTACCTCACGGCTGTGCTGAT
GAATTTAGTCATCATTCTCCTCATGATTCTGGACCATCGTCTCCACATGGCAATGTACTTTTTCCTCC
GACATTTGTCCTTCTTAGACCTGTGTCTCATTTCTGCCACAGTCCCCAAATCCATCCTCAACTCTGTC
GCCTCCACTGACTCCATCTCCTTCCTGGGGTGTGTGTTGCAGCTCTTCTTGGTGGTACTGCTGGCTGG
ATCAGAGATTGGCATCCTTACTGCCATGTCCTATGACCGCTATGCTGCCATCTGCTGCCCCCTACACT
GTGAGGCTGTCATGAGCAGAGGGCTCTGTGTCCAGTTGATGGCTCTGTCCTGGCTCAACAGAGGGGCC
TTGGGACTCTTGTACACAGCTGGAACATTCTCTCTGAATTTTTATGGCTCTGATGAGCTACATCAGTT
CTTCTGCGATGTCCCTGCCCTACTAAAGCTCACTTGTTCTAAAGAACATGCCATCATTAGTGTCAGTG
TGGCCATTGGGGTCTGTTATGCATTTTCATGTTTAGTTTGCATTGTAGTTTCCTATGTGTACATTTTC
TCTGCTGTGTTAAGGATATCACAGAGACAGAGACAATCCAAAGCCTTTTCCAACTGTGTGCCTCACCT
CATTGTTGTCACTGTGTTTCTTGTAACAGGTGCTGTTGCTTATTTAAAGCCAGGGTCTGATGCACCTT
CTATTCTAGACTTGCTGGTGTCTGTGTTCTATTCTGTCGCACCTCCAACCTTGAACCCTGTTATCTAC
TGTCTGAAGAACAAGGACATTAAATCCGCTCTGAGTAAAGTCCTGTGGAATGTTAGAAGCAGTGGGGT
AATGAAAGATGACTAAAGATTGAAGATGGGAAGTACTTTTTTTG

NOV12c, CG50341-02

| | | | |
|---|---|---|---|
| Protein Sequence | SEQ ID NO: 138 | 315 aa | MW at 34934.2kD |

MTNQTQMMEFLLVRFTENWVLLRLHALLFSLIYLTAVLMNLVIILLMILDHRLHMAMYFFLRHLSFLD
LCLISATVPKSILNSVASTDSISFLGCVLQLFLVVLLAGSEIGILTAMSYDRYAAICCPLHCEAVMSR
GLCVQLMALSWLNRGALGLLYTAGTFSLNFYGSDELHQFFCDVPALLKLTCSKEHAIISVSVAIGVCY
AFSCLVCIVVSYVYIFSAVLRISQRQRQSKAFSNCVPHLIVVTVFLVTGAVAYLKPGSDAPSILDLLV
SVFYSVAPPTLNPVIYCLKNKDIKSALSKVLWNVRSSGVMKDD

| | | |
|---|---|---|
| NOV12d, CG50341-03 | SEQ ID NO: 139 | 819 bp |

| | | |
|---|---|---|
| DNA Sequence | ORF Start: ATG at 7 | ORF Stop: at 814 |

GGATCCATGATTCTGGACCATCGTCTCCACATGGCAATGTACTTTTTCCTCCGACATTTGTCCTTCTT
AGACCTGTGTCTCATTTCTGCCACAGTCCCCAAATCCATCCTCAACTCTGTCGCCTCCACTGACTCCA
TCTCCTTCCTGGGGTGTGTGTTGCAGCTCTTCTTGGTGGTACTGCTGGCTGGATCAGAGATTGGCATC
CTTACTGCCATGTCCTATGACCGCTATGCTGCCATCTGCTGCCCCCTACACTGTGAGGCTGTCATGAG
CAGAGGGCTCTGTGTCCAGTTGATGGCTCTGTCCTGGCTCAACAGAGGGGCCTTGGGACTCTTGTACA
CAGCTGGAACATTCTCTCTGAATTTTTATGGCTCTGATGAGCTACATCAGTTCTTCTGCGATGTCCCT
GCCCTACTAAAGCTCACTTGTTCTAAAGAACATGCCATCATTAGTGTCAGTGTGGCCATTGGGGTCTG
TTATGCATTTTCATGTTTAGTTTGCATTGTAGTTTCCTATGTGTACATTTTCTCTGCTGTGTTAAGGA
TATCACAGAGACAGAGACAATCCAAAGCCTTTTCCAACTGTGTGCCTCACCTCATTGTTGTCACTGTG
TTTCTTGTAACAGGTGCTGTTGCTTATTTAAAGCCAGGGTCTGATGCACCTTCTATTCTAGACTTGCT
GGTGTCTGTGTTCTATTCTGTCGCACCTCCAACCTTGAACCCTGTTATCTACTGTCTGAAGAACAAGG
ACATTAAATCCGCTCTGAGTAAAGTCCTGTGGAATGTTAGAAGCAGTGGGGTAATGAAAGATGACCTC
GAG

NOV12d, CG50341-03

| | | | |
|---|---|---|---|
| Protein Sequence | SEQ ID NO: 140 | 269 aa | MW at 29471.5kD |

MILDHRLHMAMYFFLRHLSFLDLCLISATVPKSILNSVASTDSISFLGCVLQLFLVVLLAGSEIGILT
ANSYDRYAAICCPLHCEAVMSRGLCVQLMALSWLNRGALGLLYTAGTFSLNFYGSDELHQFFCDVPAL
LKLTCSKEHAIISVSVAIGVCYAFSCLVCIVVSYVYIFSAVLRISQRQRQSKAFSNCVPHLIVVTVFL
VTGAVAYLKPGSDAPSILDLLVSVFYSVAPPTLNPVIYCLKNKDIKSALSKVLWNVRSSGVMKDD

| | | |
|---|---|---|
| NOV12e, CG50341-04 | SEQ ID NO: 141 | 957 bp |

| | | |
|---|---|---|
| DNA Sequence | ORF Start: ATG at 7 | ORF Stop: at 952 |

GGATCCATGACCAATCAGACACAGATGATGGAATTCTTGCTTGTGAGATTTACTGAGAATTGGGTGCT
CCTGAGGCTGCATGCTTTGCTCTTCTCACTGATCTACCTCACGGCTGTGCTGATGAATTTAGTCATCA
TTCTCCTCATGATTCTGGACCATCGTCTCCACATGGCAATGTACTTTTTCCTCCGACATTTGTCCTTC
TTAGACCTGTGTCTCATTTCTGCCACAGTCCCCAAATCCATCCTCAACTCTGTCGCCTCCACTGACTC
CATCTCCTTCCTGGGGTGTGTGTTGCAGCTCTTCTTGGTGGTACTGCTGGCTGGATCAGAGATTGGCA
TCCTTACTGCCATGTCCTATGACCGCTATGCTGCCATCTGCTGCCCCCTACACTGTGAGGCTGTCATG
AGCAGAGGGCTCTGTGTCCAGTTGATGGCTCTGTCCTGGCTCAACAGAGGGGCCTTGGGACTCTTGTA
CACAGCTGGAACATTCTCTCTGAATTTTTATGGCTCTGATGAGCTACATCAGTTCTTCTGCGATGTCC
CTGCCCTACTAAAGCTCACTTGTTCTAAAGAACATGCCATCATTAGTGTCAGTGTGGCCATTGGGGTC
TGTTATGCATTTTCATGTTTAGTTTGCATTGTAGTTTCCTATGTGTACATTTTCTCTGCTGTGTTAAG
GATATCACAGAGACAGAGACAATCCAAAGCCTTTTCCAACTGTGTGCCTCACCTCATTGTTGTCACTG
TGTTTCTTGTAACAGGTGCTGTTGCTTATTTAAAGCCAGGGTCTGATGCACCTTCTATTCTAGACTTG
CTGGTGTCTGTGTTCTATTCTGTCGCACCTCCAACCTTGAACCCTGTTATCTACTGTCTGAAGAACAA
GGACATTAAATCCGCTCTGAGTAAAGTCCTGTGGAATGTTAGAAGCAGTGGGGTAATGAAAGATGACC
TCGAG

NOV12e, CG50341-04

| | | | |
|---|---|---|---|
| Protein Sequence | SEQ ID NO: 142 | 315 aa | MW at 34934.2kD |

MTNQTQMMEFLLVRFTENWVLLRLHALLFSLIYLTAVLMNLVIILLMILDHRLHMAMYFFLRHLSFLD
LCLISATVPKSILNSVASTDSISFLGCVLQLFLVVLLAGSEIGILTAMSYDRYAAICCPLHCEAVMSR
GLCVQLMALSWLHRGALGLLYTAGTFSLNFYGSDELHQFFCDVPALLKLTCSKEHAIISVSVAIGVCY
AFSCLVCIVVSYVYIFSAVLRISQRQRQSKAFSNCVPHLIVVTVFLVTGAVAYLKPGSDAPSILDLLV
SVFYSVAPPTLNPVIYCLKNKDIKSALSKVLWNVRSSGVMKDD

[0410] A ClustalW comparison of the above protein sequences yields the following sequence alignment shown in Table 12B.

TABLE 12B
Comparison of the NOV12 protein sequences.

| | |
|---|---|
| NOV12a | MTNQTQMMEFLLVRFTENWVLLRLHALLFSLIYLTAVLMNLVIILLMILDHRLHMAMYFF |
| NOV12b | --------------------------------------------GSMILDHRLHMAMYFF |
| NOV12c | MTNQTQMMEFLLVRFTENWVLLRLHALLFSLIYLTAVLMNLVIILLMILDHRLHMAMYFF |
| NOV12d | ----------------------------------------------MILDHRLHMAMYFF |
| NOV12e | MTNQTQMMEFLLVRFTENWVLLRLHALLFSLIYLTAVLMNLVIILLMILDHRLHMAMYFF |
| NOV12a | LRHLSFLDLCLISATVPKSILNSVASTDSISFLGCVLQLFLVVLLAGSEIGILTANSYDR |
| NOV12b | LRHLSFLDLCLISATVPKSILNSVASTDSISFLGCVLQLFLVVLLAGSEIGILTANSYDR |
| NOV12c | LRHLSFLDLCLISATVPKSILNSVASTDSISFLGCVLQLFLVVLLAGSEIGILTANSYDR |
| NOV12d | LRHLSFLDLCLISATVPKSILNSVASTDSISFLGCVLQLFLVVLLAGSEIGILTANSYDR |
| NOV12e | LRHLSFLDLCLISATVPKSILNSVASTDSISFLGCVLQLFLVVLLAGSEIGILTANSYDR |
| NOV12a | YAAICCPLHCEAVMSRGLCVQLMALSWLNRGALGLLYTAGTFSLNFYGSDELHQFFCDVP |
| NOV12b | YAAICCPLHCEAVMSRGLCVQLMALSWLNRGALGLLYTAGTFSLNFYGSDELHQFFCDVP |
| NOV12c | YAAICCPLHCEAVMSRGLCVQLMALSWLNRGALGLLYTAGTFSLNFYGSDELHQFFCDVP |
| NOV12d | YAAICCPLHCEAVMSRGLCVQLMALSWLNRGALGLLYTAGTFSLNFYGSDELHQFFCDVP |
| NOV12e | YAAICCPLHCEAVMSRGLCVQLMALSWLNRGALGLLYTAGTFSLNFYGSDELHQFFCDVP |
| NOV12a | ALLKLTCSKEHAIISVSVAIGVCYAFSCLVCIVVSYVYIFSAVLRISQRQRQSKAFSNCV |
| NOV12b | ALLKLTCSKEHAIISVSVAIGVCYAFSCLVCIVVSYVYIFSAVLRISQRQRQSKAFSNCV |
| NOV12c | ALLKLTCSKEHAIISVSVAIGVCYAFSCLVCIVVSYVYIFSAVLRISQRQRQSKAFSNCV |
| NOV12d | ALLKLTCSKEHAIISVSVAIGVCYAFSCLVCIVVSYVYIFSAVLRISQRQRQSKAFSNCV |
| NOV12e | ALLKLTCSKEHAIISVSVAIGVCYAFSCLVCIVVSYVYIFSAVLRISQRQRQSKAFSNCV |
| NOV12a | PHLIVVTVFLVTGAVAYLKPGSDAPSILDLLVSVFYSVAPPTLNPVIYCLKNKDIKSALS |
| NOV12b | PHLIVVTVFLVTGAVAYLKPGSDAPSILDLLVSVFYSVAPPTLNPVIYCLKNKDIKSALS |
| NOV12c | PHLIVVTVFLVTGAVAYLKPGSDAPSILDLLVSVFYSVAPPTLNPVIYCLKMKDIKSALS |
| NOV12d | PHLIVVTVFLVTGAVAYLKPGSDAPSILDLLVSVFYSVAPPTLNPVIYCLKNKDIKSALS |
| NOV12e | PHLIVVTVFLVTGAVAYLKPGSDAPSILDLLVSVFYSVAPPTLNPVIYCLKNKDIKSALS |
| NOV12a | KVLWNVRSSGVMKDD-- |
| NOV12b | KVLWNVRSSGVMKDDLE |
| NOV12c | KVLWNVRSSGVMKDD-- |
| NOV12d | KVLWNVRSSGVMKDD-- |
| NOV12e | KVLWNVRSSGVMKDD-- |
| NOV12a | (SEQ ID NO: 134) |
| NOV12b | (SEQ ID NO: 136) |
| NOV12c | (SEQ ID NO: 138) |
| NOV12d | (SEQ ID NO: 140) |
| NOV12e | (SEQ ID NO: 142) |

[0411] Further analysis of the NOV12a protein yielded the following properties shown in Table 12C.

TABLE 12C
Protein Sequence Properties NOV12a

SignalP analysis: Cleavage site between residues 47 and 48
PSORT II analysis:

| | |
|---|---|
| PSG: | a new signal peptide prediction method |
| N-region: | length 9; pos.chg 0; neg.chg 1 |
| H-region: | length 4; peak value 0.00 |
| PSG score: | −4.40 |
| GvH: | von Heijne's method for signal seq. recognition |
| | GvH score (threshold: −2.1): −3.11 |
| | possible cleavage site: between 36 and 37 |

>>> Seems to have no N-terminal signal peptide

| ALOM: | Klein et al's method for TM region allocation | |
|---|---|---|
| | Init position for calculation: 1 | |
| | Tentative number of TMS(s) for the threshold 0.5: 5 | |
| | INTEGRAL | Likelihood = −9.87 Transmembrane 32-48 |
| | INTEGRAL | Likelihood = −9.66 Transmembrane 90-106 |
| | INTEGRAL | Likelihood = −9.71 Transmembrane 198-214 |
| | INTEGRAL | Likelihood = −5.79 Transmembrane 239-255 |
| | INTEGRAL | Likelihood = 0.16 Transmembrane 267-283 |
| | PERIPHERAL | Likelihood = 1.11 (at 56) |

| | ALOM score: −9.87 (number of TMSs: 5) |
|---|---|
| MTOP: | Prediction of membrane topology (Hartmann et al.) |
| | Center position for calculation: 39 |
| | Charge difference: 1.0 C(2.5) − N(1.5) |
| | C > N: C-terminal side will be inside |

>>> membrane topology: type 3b
MITDISC: discrimination of mitochondrial targeting seq

| | | | |
|---|---|---|---|
| R content: | 1 | Hyd Moment(75): | 2.94 |
| Hyd Moment(95): | 4.71 | G content: | 0 |
| D/E content: | 2 | S/T content: | 3 |
| Score: −5.83 | | | |

| | |
|---|---|
| Gavel: | prediction of cleavage sites for mitochondrial preseq |
| | cleavage site motif not found |
| NUCDISC: | discrimination of nuclear localization signals |
| | pat4: none |
| | pat7: none |
| | bipartite: none |
| | content of basic residues: 6.7% |
| | NLS Score: −0.47 |

KDEL: ER retention motif in the C-terminus: none
ER Membrane Retention Signals:

KKXX-like motif in the C-terminus: VMKD

SKL: peroxisomal targeting signal in the C-terminus: none
PTS2: 2nd peroxisomal targeting signal: none
VAC: possible vacuolar targeting motif: none
RNA-binding motif: none
Actinin-type actin-binding motif:

type 1: none
type 2: none

NMYR: N-myristoylation pattern: none
Prenylation motif: none
memYQRL: transport motif from cell surface to Golgi: none
Tyrosines in the tail: none
Dileucine motif in the tail: none
checking 63 PROSITE DNA binding motifs:

Leucine zipper pattern (PS00029): *** found ***
LHALLFSLIYLTAVLMNLVIIL at 24

none
checking 71 PROSITE ribosomal protein motifs: none
checking 33 PROSITE prokaryotic DNA binding motifs: none

| | |
|---|---|
| NNCN: | Reinhardt's method for Cytoplasmic/Nuclear discrimination |
| | Prediction: cytoplasmic |
| | Reliability: 94.1 |
| COIL: | Lupas's algorithm to detect coiled-coil regions |
| | total: 0 residues |

Final Results (k = 9/23):

44.4%: endoplasmic reticulum
11.1%: mitochondrial
11.1%: Golgi
11.1%: vacuolar
11.1%: vesicles of secretory system
11.1%: cytoplasmic

>> prediction for CG50341-01 is end (k = 9)

[0412] A search of the NOV12a protein against the Geneseq database, a proprietary database that contains sequences published in patents and patent publication, yielded several homologous proteins shown in Table 12D.

TABLE 12D
Geneseq Results for NOV12a

| | | NOV12a | Identities/ | |
|---|---|---|---|---|
| | | Residues/ | Similarities for | |
| Geneseq | Protein/Organism/Length | Match | the Matched | Expect |
| Identifier | [Patent #, Date] | Residues | Region | Value |
| AAU11100 | Human novel G protein-coupled | 1 . . . 315 | 315/315 (100%) | e−179 |
| | receptor, NOV7 - Homo sapiens, | 1 . . . 315 | 315/315 (100%) | |
| | 315 aa. [WO200177177-A2, 18- | | | |
| | OCT-2001] | | | |
| AAU85251 | G-coupled olfactory receptor | 1 . . . 315 | 315/315 (100%) | e−179 |
| | #112 - Homo sapiens, 315 aa. | 1 . . . 315 | 315/315 (100%) | |
| | [WO200198526-A2, 27-DEC- | | | |
| | 2001] | | | |
| AAU95586 | Human olfactory and pheromone | 1 . . . 315 | 315/315 (100%) | e−179 |
| | G protein-coupled receptor #73 - | 1 . . . 315 | 315/315 (100%) | |
| | Homo sapiens, 315 aa. | | | |
| | [WO200224726-A2, 28-MAR- | | | |
| | 2002] | | | |
| AAU24631 | Human olfactory receptor | 1 . . . 315 | 315/315 (100%) | e−179 |
| | AOLFR125 - Homo sapiens, 315 | 1 . . . 315 | 315/315 (100%) | |
| | aa. [WO200168805-A2, 20-SEP- | | | |
| | 2001] | | | |
| ABP95851 | Human GPCR polypeptide SEQ | 1 . . . 313 | 313/313 (100%) | e−178 |
| | ID NO 512 - Homo sapiens, 314 | 1 . . . 313 | 313/313 (100%) | |
| | aa. [WO200216548-A2, 28-FEB- | | | |
| | 2002] | | | |

[0413] In a BLAST search of public sequence databases, the NOV12a protein was found to have homology to the proteins shown in the BLASTP data in Table 12E.

TABLE 12E
Public BLASTP Results for NOV12a

| | | NOV12a | Identities/ | |
|---|---|---|---|---|
| Protein | | Residues/ | Similarities for | |
| Accession | | Match | the Matched | Expect |
| Number | Protein/Organism/Length | Residues | Portion | Value |
| Q8NGZ2 | Seven transmembrane helix | 1 . . . 315 | 315/315 (100%) | e−179 |
| | receptor - Homo sapiens | 1 . . . 315 | 315/315 (100%) | |
| | (Human), 315 aa. | | | |
| Q96R53 | Olfactory receptor - Homo | 66 . . . 282 | 217/217 (100%) | e−120 |
| | sapiens (Human), 217 aa | 1 . . . 217 | 217/217 (100%) | |
| | (fragment). | | | |
| Q8NHC5 | Seven transmembrane helix | 1 . . . 303 | 158/307 (51%) | 9e−88 |
| | receptor - Homo sapiens | 1 . . . 302 | 225/307 (72%) | |
| | (Human), 309 aa. | | | |
| CAD35484 | Sequence 23 from Patent | 1 . . . 303 | 155/303 (51%) | 4e−87 |
| | WO0208289 - Homo sapiens | 1 . . . 303 | 211/303 (69%) | |
| | (Human), 314 aa. | | | |
| Q8VF67 | Olfactory receptor MOR218-3 - | 1 . . . 302 | 156/302 (51%) | 4e−87 |
| | Mus musculus (Mouse), 315 | 5 . . . 306 | 214/302 (70%) | |
| | aa. | | | |

[0414] PFam analysis indicates that the NOV12a protein contains the domains shown in the Table 12F.

TABLE 12F
Domain Analysis of NOV12a

| | NOV12a | Identities/ | |
|---|---|---|---|
| | Match | Similarities | |
| Pfam Domain | Region | for the Matched Region | Expect Value |
| 7tm_1 | 39 . . . 288 | 57/277 (21%) | 1.8e−14 |
| | | 170/277 (61%) | |

### Example 13

[0415] The NOV13 clone was analyzed, and the nucleotide and encoded polypeptide sequences are shown in Table 13A.

TABLE 13A
NOV13 Sequence Analysis

| | | |
|---|---|---|
| NOV13a, CG50365-01 | SEQ ID NO: 143 | 828 bp |

| | | |
|---|---|---|
| DNA Sequence | ORF Start: ATG at 16 | ORF Stop: TAA at 802 |

CCACCCCGAGGGACCATGTCGAGGCTCAGCTGGGGATACCGCGAGCACAACGGTCCTATTCACTGGAA
GGAATTTTTCCCTATTGCTGATGGTGATCAGCAATCTCCAATTGAGATTAAAACCAAAGAAGTGAAAT
ATGACTCTTCCCTCCGACCACTTAGTATCAAGTATGACCCAAGCTCAGCTAAAATCATCAGCAACAGC
GGCCATTCCTTCAATGTTGACTTTGATGACACAGAGAACAAATCAGTTCTGCGTGGTGGTCCTCTCAC
TGGAAGCTACAGGTTACGGCAGGTTCACCTTCACTGGGGGTCCGCTGATGACCACGGCTCCGAGCACA
TAGTAGATGGAGTGAGCTATGCTGCAGAGCTCCATGTTGTTCACTGGAATTCAGACAAATACCCCAGC
TTTGTTGAGGCAGCTCATGAACCAGATGGACTGGCTGTCTTGGGAGTGTTTTTACAGGTGGGTGAACC
TAATTCCCAACTGCAAAAGATTACTGACACTTTGGATTCCATTAAAGAAAAGGGTAAACAAACTCGAT
TCACAAATTTTGACCTATTGTCTCTGCTTCCACCATCCTGGGACTACTGGACATATCCTGGTTCTCTT
ACAGTTCCACCTCTTCTTGAGAGTGTCACATGGATTGTTTTAAAGCAACCTATAAACATCAGCTCTCA
ACAGCTGGCCAAATTTCGCAGTCTCCTGTGCACAGCGGAGGGTGAAGCAGCAGCTTTTCTGGTGAGCA
ATCACCGCCCACCACAGCCTCTAAAGGGCCGCAAAGTGAGAGCCTCTTTCCATTAAAAATTGTCACCA
ATGAACTCCCCC

NOV13a, CG50365-01

| | | | |
|---|---|---|---|
| Protein Sequence | SEQ ID NO: 144 | 262 aa | MW at 29428.8kD |

MSRLSWGYREHNGPIHWKEFFPIADGDQQSPIEIKTKEVKYDSSLRPLSIKYDPSSAKIISNSGHSFN
VDFDDTENKSVLRGGPLTGSYRLRQVHLHWGSADDHGSEHIVDGVSYAAELHVVHWNSDKYPSFVEAA
HEPDGLAVLGVFLQVGEPNSQLQKITDTLDSIKEKGKQTRFTNFDLLSLLPPSWDYWTYPGSLTVPPL
LESVTWIVLKQPINISSQQLAKFRSLLCTAEGEAAAFLVSNHRPPQPLKGRKVRASFH

| | | |
|---|---|---|
| NOV13b, 278019595 | SEQ ID NO: 145 | 784 bp |

| | | |
|---|---|---|
| DNA Sequence | ORF Start: at 2 | ORF Stop: end of sequence |

CACCGGATCCAGCTGGGGATACCGCGAGCACAACGGTCCTATTCACTGGAAGGAATTTTTCCCTATTG
CTGATGGTGATCAGCAATCTCCAATTGAGATTAAAACCAAAGAAGTGAAATATGACTCTTCCCTCCGA
CCACTTAGTATCAAGTATGACCCAAGCTCAGCTAAAATCATCAGCAACAGCGGCCATTCCTTCAATGT
TGACTTTGATGACACAGAGAACAAATCAGTTCTGCGTGGTGGTCCTCTCACTGGAAGCTACAGGTTAC
GGCAGGTTCACCTTCACTGGGGGTCCGCTGATGACCACGGCTCCGAGCACATAGTAGATGGAGTGAGC
TATGCTGCAGAGCTCCATGTTGTTCACTGGAATTCAGACAAATACCCCAGCTTTGTTGAGGCAGCTCA
TGAACCAGATGGACTGGCTGTCTTGGGAGTGTTTTTACAGATTGGTGAACCTAATTCCCAACTGCAAA
AGATTACTGACACTTTGGATTCCATTAAAGAAAAGGGTAAACAAACTCGATTCACAAATTTTGACCTA
TTGTCTCTGCTTCCACCATCCTGGGACTACTGGACATATCCTGGTTCTCTTACAGTTCCACCTCTTCT
TGAGAGTGTCACATGGATTGTTTTAAAGCAACCTATAAACATCAGCTCTCAACAGCTGGCCAAATTTC
GCAGTCTCCTGTGCACAGCGGAGGGTGAAGCAGCAGCTTTTCTGGTGAGCAATCACCGCCCACCACAG
CCTCTAAAGGGCCGCAAAGTGAGAGCCCTCGAGGGC

NOV13b, 278019595

| | | | |
|---|---|---|---|
| Protein Sequence | SEQ ID NO: 146 | 261 aa | MW at 29128.4kD |

TGSSWGYREHNGPIHWKEFFPIADGDQQSPIEIKTKEVKYDSSLRPLSIKYDPSSAKIISNSGHSFNV
DFDDTEMKSVLRGGPLTGSYRLRQVHLHWGSADDHGSEHIVDGVSYAAELHVVHWNSDKYPSFVEAAH
EPDGLAVLGVFLQIGEPNSOLQKITDTLDSIKEKGKQTRFTNFDLLSLLPPSWDYWTYPGSLTVPPLL
ESVTWIVLKQPINISSQQLAKFRSLLCTAEGEAAAFLVSNHRPPQPLKGRKVRALEG

| | | |
|---|---|---|
| NOV13c, CG50365-02 | SEQ ID NO: 147 | 833 bp |

| | | |
|---|---|---|
| DNA Sequence | ORF Start: ATG at 21 | ORF Stop: TAA at 807 |

ATGTCGAGGCTCAGCTGGGGATGTCGAGGCTCAGCTGGGGATACCGCGAGCACAACGGTCCTATTCAC
TGGAAGGAATTTTTCCCTATTGCTGATGGTGATCAGCAATCTCCAATTGAGATTAAAACCAAAGAAGT
GAAATATGACTCTTCCCTCCGACCACTTAGTATCAAGTATGACCCAAGCTCAGCTAAAATCATCAGCA
ACAGCGGCCATTCCTTCAATGTTGACTTTGATGACACAGAGAACAAATCAGTTCTGCGTGGTGGTCCT
CTCACTGGAAGCTACAGGTTACGGCAGGTTCACCTTCACTGGGGGTCCGCTGATGACCACGGCTCCGA
GCACATAGTAGATGGAGTGAGCTATGCTGCAGAGCTCCATGTTGTTCACTGGAATTCAGACAAATACC
CCAGCTTTGTTGAGGCAGCTCATGAACCAGATGGACTGGCTGTCTTGGGAGTGTTTTTACAGATTGGT
GAACCTAATTCCCAACTGCAAAAGATTACTGACACTTTGGATTCCATTAAAGAAAAGGGTAAACAAAC
TCGATTCACAAATTTTGACCTATTGTCTCTGCTTCCACCATCCTGGGACTACTGGACATATCCTGGTT
CTCTTACAGTTCCACCTCTTCTTGAGAGTGTCACATGGATTGTTTTAAAGCAACCTATAAACATCAGC
TCTCAACAGCTGGCCAAATTTCGCAGTCTCCTGTGCACAGCGGAGGGTGAAGCAGCAGCTTTTCTGGT
GAGCAATCACCGCCCACCACAGCCTCTAAAGGGCCGCAAAGTGAGAGCCTCTTTCCATTAAAAATTGT
CACCAATGAACTCCCCC

NOV13c, CG50365-02

| | | | |
|---|---|---|---|
| Protein Sequence | SEQ ID NO: 148 | 262 aa | MW at 29442.8kD |

MSRLSWGYREHNGPIHWKEFFPIADGDQQSPIEIKTKEVKYDSSLRPLSIKYDPSSAKIISNSGHSFN
VDFDDTENKSVLRGGPLTGSYRLRQVHLHWGSADDHGSEHIVDGVSYAAELHVVHWNSDKYPSFVEAA
HEPDGLAVLGVFLQIGEPNSQLQKITDTLDSIKEKGKQTRFTNFDLLSLLPPSWDYWTYPGSLTVPPL
LESVTWIVLKQPINISSQQLAKFRSLLCTAEGEAAAFLVSNHRPPQPLKGRKVRASFH

[0416] A ClustalW comparison of the above protein sequences yields the following sequence alignment shown in Table 13B.

TABLE 13B
Comparison of the NOV13 protein sequences.

| | |
|---|---|
| NOV13a | MSRLSWGYREHNGPIHWKEFFPIADGDQQSPIEIKTKEVKYDSSLRPLSIKYDPSSAKII |
| NOV13b | -TGSSWGYREHNGPIHWKEFFPIADGDQQSPIEIKTKEVKYDSSLRPLSIKYDPSSAKII |
| NOV13c | MSRLSWGYREHNGPIHWKEFFPIADGDQQSPIEIKTKEVKYDSSLRPLSIKYDPSSAKII |
| NOV13a | SNSGHSFNVDFDDTENKSVLRGGPLTGSYRLRQVHLHWGSADDHGSEHIVDGVSYAAELH |
| NOV13b | SNSGHSFNVDFDDTENKSVLRGGPLTGSYRLRQVHLHWGSADDHGSEHIVDGVSYAAELH |
| NOV13c | SNSGHSFNVDFDDTENKSVLRGGPLTGSYRLRQVHLHwGSADDHGSEHIVDGVSYAAELH |
| NOV13a | VVHWNSDKYPSFVEAAHEPDGLAVLGVFLQVGEPNSQLQKITDTLDSIKEKGKQTRFTNF |
| NOV13b | VVHWNSDKYPSFVEAAHEPDGLAVLGVFLQIGEPNSQLQKITDTLDSIKEKGKQTRFTNF |
| NOV13c | VVHWNSDKYPSFVEAAHEPDGLAVLGVFLQIGEPNSQLQKITDTLDSIKEKGKQTRFTNF |
| NOV13a | DLLSLLPPSWDYWTYPGSLTVPPLLESVTWIVLKQPINISSQQLAKFRSLLCTAEGEAAA |
| NOV13b | DLLSLLPPSWDYWTYPGSLTVPPLLESVTWIVLKQPINISSQQLAKFRSLLCTAEGEAAA |
| NOV13c | DLLSLLPPSWDYWTYPGSLTVPPLLESVTWIVLKQPINISSQQLAKFRSLLCTAEGEAAA |
| NOV13a | FLVSNHRPPQPLKGRKVRASFH |
| NOV13b | FLVSNHRPPQPLKGRKVRALEG |
| NOV13c | FLVSNHRPPQPLKGRKVRASFH |
| NOV13a | (SEQ ID NO: 144) |
| NOV13b | (SEQ ID NO: 146) |
| NOV13c | (SEQ ID NO: 148) |

[0417] Further analysis of the NOV13a protein yielded the following properties shown in Table 13C.

TABLE 13C
Protein Sequence Properties NOV13a

SignalP analysis: No Known Signal Sequence Predicted
PSORT II analysis:

| | |
|---|---|
| PSG: | a new signal peptide prediction method |
| | N-region: length 10; pos.chg 2; neg.chg 1 |
| | H-region: length 7; peak value −7.23 |
| | PSG score: −11.62 |
| GvH: | von Heijne's method for signal seq. recognition |
| | GvH score (threshold: −2.1): −8.81 |
| | possible cleavage site: between 57 and 58 |

>>> Seems to have no N-terminal signal peptide

| ALOM: | Klein et al's method for TM region allocation | |
|---|---|---|
| | Init position for calculation: 1 | |
| | Tentative number of TMS(s) for the threshold 0.5: 0 | |
| | number of TMS(s) . . . fixed | |
| | PERIPHERAL | Likelihood = 2.97 (at 197) |

ALOM score: 2.97 (number of TMSs: 0)

MITDISC: discrimination of mitochondrial targeting seq

| | | | |
|---|---|---|---|
| R content: | 2 | Hyd Moment(75): | 8.62 |
| Hyd Moment(95): | 7.75 | G content: | 2 |
| D/E content: | 2 | S/T content: | 2 |
| Score: −5.03 | | | |

| | |
|---|---|
| Gavel: | prediction of cleavage sites for mitochondrial preseq |
| | R-2 motif at 13 SRL\|SW |
| NUCDISC: | discrimination of nuclear localization signals |
| | pat4: none |
| | pat7: PLKGRKV (4) at 251 |
| | bipartite: none |
| | content of basic residues: 10.3% |
| | NLS Score: −0.13 |

KDEL: ER retention motif in the C-terminus: none
ER Membrane Retention Signals:

XXRR-like motif in the N-terminus: SRLS

none
SKL: peroxisomal targeting signal in the C-terminus: none
PTS2: 2nd peroxisomal targeting signal: none
VAC: possible vacuolar targeting motif: none
RNA-binding motif: none
Actinin-type actin-binding motif:

type 1: none
type 2: none

NMYR: N-myristoylation pattern: none
Prenylation motif: none
memYQRL: transport motif from cell surface to Golgi: none
Tyrosines in the tail: none
Dileucine motif in the tail: none
checking 63 PROSITE DNA binding motifs: none
checking 71 PROSITE ribosomal protein motifs: none
checking 33 PROSITE prokaryotic DNA binding motifs: none

| | |
|---|---|
| NNCN: | Reinhardt's method for Cytoplasmic/Nuclear discrimination |
| | Prediction: cytoplasmic |
| | Reliability: 55.5 |
| COIL: | Lupas's algorithm to detect coiled-coil regions |
| | total: 0 residues |

Final Results (k = 9/23):

43.5%: cytoplasmic
34.8%: mitochondrial
21.7%: nuclear

>> prediction for CG50365-01 is cyt (k = 23)

[0418] A search of the NOV13a protein against the Geneseq database, a proprietary database that contains sequences published in patents and patent publication, yielded several homologous proteins shown in Table 13D.

TABLE 13D
Geneseq Results for NOV13a

| | | NOV13a | Identities/ | |
|---|---|---|---|---|
| | | Residues/ | Similarities for | |
| Geneseq | Protein/Organism/Length | Match | the Matched | Expect |
| Identifier | [Patent #, Date] | Residues | Region | Value |
| AAE25377 | Human NZMS-1 protein - Homo | 1 . . . 262 | 246/262 (93%) | e−143 |
| | sapiens, 247 aa. [WO200246385- | 1 . . . 247 | 247/262 (93%) | |
| | A2, 13-JUN-2002] | | | |
| AAU19418 | Human diagnostic and therapeutic | 1 . . . 262 | 246/262 (93%) | e−143 |
| | polypeptide (DITHP) #4 - Homo | 13 . . . 273 | 248/262 (93%) | |
| | sapiens, 274 aa. [WO200162927- | | | |
| | A2, 30-AUG-2001] | | | |
| ABB08900 | Human lyase HLYA-1 protein - | 1 . . . 242 | 241/242 (99%) | e−143 |
| | Homo sapiens, 242 aa. | 1 . . . 242 | 242/242 (99%) | |
| | [WO200200840-A2, 03-JAN- | | | |
| | 2002] | | | |
| AAB63110 | Human secreted protein sequence | 78 . . . 261 | 181/184 (98%) | e−105 |
| | encoded by gene 27 SEQ ID | 1 . . . 184 | 183/184 (99%) | |
| | NO: 120 - Homo sapiens, 184 aa. | | | |
| | [WO200061748-A1, 19-OCT- | | | |
| | 2000] | | | |
| AAO15236 | Human carbonic anhydrase I | 1 . . . 261 | 157/261 (60%) | 5e−94 |
| | (Cln115) protein - Homo sapiens, | 1 . . . 261 | 202/261 (77%) | |
| | 261 aa. [US2002042088-A1, 11- | | | |
| | APR-2002] | | | |

[0419] In a BLAST search of public sequence databases, the NOV13a protein was found to have homology to the proteins shown in the BLASTP data in Table 13E.

TABLE 13E
Public BLASTP Results for NOV13a

| | | NOV13a | Identities/ | |
|---|---|---|---|---|
| Protein | | Residues/ | Similarities for | |
| Accession | | Match | the Matched | |
| Number | Protein/Organism/Length | Residues | Portion | Expect Value |
| Q8N1Q1 | Carbonic anhydrase XIII (EC | 1 . . . 262 | 261/262 (99%) | e−155 |
| | 4.2.1.1) (Carbonate dehydratase | 1 . . . 262 | 262/262 (99%) | |
| | XIII) (CA-XIII) - Homo sapiens | | | |
| | (Human), 262 aa. | | | |
| Q9D6N1 | Carbonic anhydrase XIII (EC | 1 . . . 262 | 238/262 (90%) | e−141 |
| | 4.2.1.1) (Carbonate dehydratase | 1 . . . 262 | 250/262 (94%) | |
| | XIII) (CA-XIII) - Mus musculus | | | |
| | (Mouse), 262 aa. | | | |
| Q8HY33 | Carbonic anhydrase 1 - | 1 . . . 261 | 164/261 (62%) | e−99 |
| | Monodelphis domestica (Short- | 1 . . . 261 | 210/261 (79%) | |
| | tailed grey opossum), 262 aa. | | | |
| Q8JG56 | Erythrocyte carbonic anhydrase - | 5 . . . 261 | 165/257 (64%) | 1e−95 |
| | Lepisosteus osseus (Long-nosed | 4 . . . 260 | 198/257 (76%) | |
| | gar), 261 aa. | | | |
| Q8UWA5 | Carbonic anhydrase 2 (EC 4.2.1.1) | 6 . . . 261 | 164/256 (64%) | 8e−95 |
| | (Carbonate dehydratase) - | 5 . . . 259 | 200/256 (78%) | |
| | Tribolodon hakonensis, 260 aa. | | | |

[0420] PFam analysis indicates that the NOV13a protein contains the domains shown in the Table 13F.

TABLE 13F
Domain Analysis of NOV13a

| | NOV13a | Identities/ | |
|---|---|---|---|
| | Match | Similarities | |
| Pfam Domain | Region | for the Matched Region | Expect Value |
| carb_anhydrase | 6 . . . 261 | 172/283 (61%) | 1.9e−162 |
| | | 221/283 (78%) | |

### Example 14

[0421] The NOV14 clone was analyzed, and the nucleotide and encoded polypeptide sequences are shown in Table 14A.

TABLE 14A
NOV14 Sequence Analysis

| | | |
|---|---|---|
| NOV14a, CG50367-01 | SEQ ID NO: 149 | 2762 bp |

| | | |
|---|---|---|
| DNA Sequence | ORF Start: ATG at 3 | ORF Stop: TGA at 2745 |

CTATGGGCTGGAGGCCCCGGAGAGCTCGGGGGACCCCGTTGCTGCTGCTGCTACTACTGCTGCTGCTC
TGGCCAGTGCCAGGCGCCGGGGTGCTTCAAGGACATATCCCTGGGCAGCCAGTCACCCCGCACTGGGT
CCTGGATGGACAACCCTGGCGCACCGTCAGCCTGGAGGAGCCGGTCTCGAAGCCAGACATGGGGCTGG
TGGCCCTGGAGGCTGAAGGCCAGGAGCTCCTGCTTGAGCTGGAGAAGAACCACAGGCTGCTGGCCCCA
GGATACATAGAAACCCACTACGGCCCAGATGGGCAGCCAGTGGTGCTGGCCCCCAACCACACGGATCA
TTGCCACTACCAAGGGCGAGTAAGGGGCTTCCCCGACTCCTGGGTAGTCCTCTGCACCTGCTCTGGGA
TGAGTGGCCTGATCACCCTCAGCAGGAATGCCAGCTATTATCTGCGTCCCTGGCCACCCCGGGGCTCC
AAGGACTTCTCAACCCACGAGATCTTTCGGATGGAGCAGCTGCTCACCTGGAAAGGAACCTGTGGCCA
CAGGGATCCTGGGAACAAAGCGGGCATGACCAGCCTTCCTGGTGGTCCCCAGAGCAGGGGCAGGCGAG
AAGCGCGCAGGACCCGGAAGTACCTGGAACTGTACATTGTGGCAGACCACACCCTGTTCTTGACTCGG
CACCGAAACTTGAACCACACCAAACAGCGTCTCCTGGAAGTCGCCAACTACGTGGACCAGCTTCTCAG
GACTCTGGACATTCAGGTGGCGCTGACCGGCCTGGAGGTGTGGACCGAGCGGGACCGCAGCCGCGTCA
CGCAGGACGCCAACGCCACGCTCTGGGCCTTCCTGCAGTGGCGCCGGGGGCTGTGGGCGCAGCGGCCC
CACGACTCCGCGCAGCTGCTCACGGGCCGCGCCTTCCAGGGCGCCACAGTGGGCCTGGCGCCCGTCGA
GGGCATGTGCCGCGCCGAGAGCTCGGGAGGCGTGAGCACGGACCACTCGGAGCTCCCCATCGGCGCCG
CAGCCACCATGGCCCATGAGATCGGCCACAGCCTCGGCCTCAGCCACGACCCCGACGGCTGCTGCGTG
GAGGCTGCGGCCGAGTCCGGAGGCTGCGTCATGGCTGCGGCCACCGGGCACCCGTTTCCGCGCGTGTT
CAGCGCCTGCAGCCGCCGCCAGCTGCGCGCCTTCTTCCGCAAGGGGGGCGGCGCTTGCCTCTCCAATG
CCCCGGACCCCGGACTCCCGGTGCCGCCGGCGCTCTGCGGGAACGGCTTCGTGGAAGCGGGCGAGGAG
TGTGACTGCGGCCCTGGCCAGGAGTGCCGCGACCTCTGCTGCTTTGCTCACAACTGCTCGCTGCGCCC
GGGGGCCCAGTGCGCCCACGGGGACTGCTGCGTGCGCTGCCTGCTGAAGCCGGCTGGAGCGCTGTGCC
GCCAGGCCATGGGTGACTGTGACCTCCCTGAGTTTTGCACGGGCACCTCCTCCCACTGTCCCCCAGAC
GTTTACCTACTGGACGGCTCACCCTGTGCCAGGGGCAGTGGCTACTGCTGGGATGGCGCATGTCCCAC
GCTGGAGCAGCAGTGCCAGCAGCTCTGGGGGCCTGGCTCCCACCCAGCTCCCGAGGCCTGTTTCCAGG
TGGTGAACTCTGCGGGAGATGCTCATGGAAACTGCGGCCAGGACAGCGAGGGCCACTTCCTGCCCTGT
GCAGGGAGGGATGCCCTGTGTGGGAAGCTGCAGTGCCAGGGTGGAAAGCCCAGCCTGCTCGCACCGCA
CATGGTGCCAGTGGACTCTACCGTTCACCTAGATGGCCAGGAAGTGACTTGTCGGGGAGCCTTGGCAC
TCCCCAGTGCCCAGCTGGACCTGCTTGGCCTGGGCCTGGTAGAGCCAGGCACCCAGTGTGGACCTAGA
ATGGTGTGCCAGAGCAGGCGCTGCAGGAAGAATGCCTTCCAGGAGCTTCAGCGCTGCCTGACTGCCTG
CCACAGCCACGGGGTTTGCAATAGCAACCATAACTGCCACTGTGCTCCAGGCTGGGCTCCACCCITCT
GTGACAAGCCAGGCTTTGGTGGCAGCATGGACAGTGGCCCTGTGCAGGCTGAAAACCATGACACCTTC
CTGCTGGCCATGCTCCTCAGCGTCCTGCTGCCTCTGCTCCCAGGGGCCGGCCTGGCCTGGTGTTGCTA
CCGACTCCCAGGAGCCCATCTGCAGCGATGCAGCTGGGGCTGCAGAAGGGACCCTGCGTGCAGTGGCC
CCAAAGATGGCCCACACAGGGACCACCCCCTGGGCGGCGITCACCCCATGGAGTTGGGCCCCACAGCC
ACTGGACAGCCCTGGCCCCTGGCCCCAGGGGCTCCTGCTGACCATATTCACAACATTTACCCTCCACC
ATTTCTCCCAGACCCTGAGAACTCTCATGAGCCCAGCAGCCACCCTGAGAAGCCTCTGCCAGCAGTCT
CGCCTGACCCCCAAGGTGGTTCCCTTGCAGCCTGGGGCCCCAGTCCTTTAGGGGACAACATATCCTCC
TCATTCTCAGCAGATCAAGTCCAGATGCCAAGATCCTGCCTCTGTGGCGAACCCTGGGGAGGCCACGT
GGGAAGGAAAGAGGGCTCTAAGAGGGGAGGCCCCAGACTGGGGGAGAGGCCTGTCTGGAGCCCAGGAT
CACCTGGCTGTGCTGCAGAACTGGAGAAGAGAAGCTCAGCAGAAAGGAGCTGGCATGGGGCCAACAGC
AGAAAAGCAGGAGGCACGCAGAAGTGACTGGGAAGCAGGAGG

NOV14a, CG50367-01

| | | | |
|---|---|---|---|
| Protein Sequence | SEQ ID NO: 150 | 914 aa | MW at 98055.2kD |

MGWRPRPARGTPLLLLLLLLLLWPVPGAGVLQGHIPGQPVTPHWVLDGQPWRTVSLEEPVSKPDMGLV
ALEAEGQELLLELEKNHRLLAPGYIETHYGPDGQPVVLAPNHTDHCHYQGRVRGFPDSWVVLCTCSGM
SGLITLSRNASYYLRPWPPRGSKDFSTHEIFRMEQLLTWKGTCGHRDPGNKAGMTSLPGGPQSRGRRE
ARRTRKYLELYIVADHTLFLTRHRNLNHTKQRLLEVANYVDQLLRTLDIQVALTGLEVWTERDRSRVT
QDANATLWAFLQWRRGLWAQRPHDSAQLLTGRAFQGATVGLAPVEGMCRAESSGGVSTDHSELPIGAA
ATMAHEIGHSLGLSHDPDGCCVEAAAESGGCVMAAATGHPFPRVFSACSRRQLRAFFRKGGGACLSNA
PDPGLPVPPALCGNGFVEAGEECDCGPGQECRDLCCFAHNCSLRPGAQCAHGDCCVRCLLKPAGALCR
QAMGDCDLPEFCTGTSSHCPPDVYLLDGSPCARGSGYCWDGACPTLEQQCQQLWGPGSHPAPEACFQV
VNSAGDAHGNCGQDSEGHFLPCAGRDALCGKLQCQGGKPSLLAPHMVPVDSTVHLDGQEVTCRGALAL
PSAQLDLLGLGLVEPGTQCGPRMVCQSRRCRKNAFQELQRCLTACHSHGVCNSNHNCHCAPGWAPPFC
DKPGFGGSMDSGPVQAENHDTFLLAMLLSVLLPLLPGAGLAWCCYRLPGAHLQRCSWGCRRDPACSGP
KDGPHRDHPLGGVHPMELGPTATGQPWPLAPGAPADHIHNIYPPPFLPDPENSHEPSSHPEKPLPAVS
PDPQGGSLAAWGPSPLGDNISSSFSADQVQMPRSCLCGEPWGGHVGRKEGSKRGGPRLGERPVWSPGS
PGCAAELEKRSSAERSWHGANSRKAGGTQK

| | | |
|---|---|---|
| NOV14b, CG50367-05 | SEQ ID NO: 151 | 3397 bp |

| | | |
|---|---|---|
| DNA Sequence | ORF Start: ATG at 37 | ORF Stop: TGA at 2398 |

GCGAGCCGCTGCCTAGAGGCCGAGGAGCTCACAGCTATGGGCTGGAGGCCCCGGAGAGCTCGGGGGAC
CCCGTTGCTGCTGCTGCTACTACTGCTGCTGCTCTGGCCAGTGCCAGTCGCCGGGGTGCTTCAAGGAC
ATATCCCTGGGCAGCCAGTCACCCCGCACTGGGTCCTGGATGGACAACCCTGGCGCACCGTCAGCCTG
GAGGAGCCGGTCTCGAAGCCAGACATGGGGCTGGTGGCCCTGGAGGCTGAAGGCCAGGAGCTCCTGCT
TGAGCTGGAGAAGAACCACAGGCTGCTGGCCCCAGGATACATAGAAACCCACTACGGCCCAGATGGGC
AGCCAGTGGTGCTGGCCCCCAACCACACGGATCATTGCCACTACCAAGGGCGAGTAAGGGGCTTCCCC
GACTCCTGGGTAGTCCTCTGCACCTGCTCTGGGATGAGTGGCCTGATCACCCTCAGCAGGAATGCCAG
CTATTATCTGCGTCCCTGGCCACCCCGGGGCTCCAAGGACTTCTCAACCCACGAGATCTTTCGGATGG
AGCAGCTGCTCACCTGGAAAGGAACCTGTGGCCACAGGGATCCTGGGAACAAAGCGGGCATGACCAGC
CTTCCTGGTGGTCCCCAGAGCAGGGGCAGGCGAGAAGCGCGCAGGACCCGGAAGTACCTGGAACTGTA
CATTGTGGCAGACCACACCCTGTTCTTGACTCGGCACCGAAACTTGAACCACACCAAACAGCGTCTCC
TGGAAGTCGCCAACTACGTGGACCAGCTTCTCAGGACTCTGGACATTCAGGTGGCGCTGACCGGCCTG
GAGGTGTGGACCGAGCGGGACCGCAGCCGCGTCACGCAGGACGCCAACGCCACGCTCTGGGCCTTCCT
GCAGTGGCGCCGGGGGCTGTGGGCGCAGCGGCCCCACGACTCCGCGCAGCTGCTCACGGGCCGCGCCT
TCCAGGGCGCCACAGTGGGCCTGGCGCCCGTCGAGGGCATGTGCCGCGCCGAGAGCTCGGGAGGCGTG
AGCACGGACCACTCGGAGCTCCCCATCGGCGCCGCAGCCACCATGGCCCATGAGATCGGCCACAGCCT
CGGCCTCAGCCACGACCCCGACGGCTGCTGCGTGGAGGCTGCGGCCGAGTCCGGAGGCTGCGTCATGG
CTGCGGCCACCGGGCACCCGTTTCCGCGCGTGTTCAGCGCCTGCAGCCGCCGCCAGCTGCGCGCCTTC
TTCCGCAAGGGGGGCGGCGCTTGCCTCTCCAATGCCCCGGACCCCGGACTCCCGGTGCCGCCGGCGCT
CTGCGGGAACGGCTTCGTGGAAGCGGGCGAGGAGTGTGACTGCGGCCCTGGCCAGGAGTGCCGCGACC
TCTGCTGCTTTGCTCACAACTGCTCGCTGCGCCCGGGGGCCCAGTGCGCCCACGGGGACTGCTGCGTG
CGCTGCCTGCTGAAGCCGGCTGGAGCGCTGTGCCGCCAGGCCATGGGTGACTGTGACCTCCCTGAGTT
TTGCACGGGCACCTCCTCCCACTGTCCCCCAGACGTTTACCTACTGGACGGCTCACCCTGTGCCAGGG
GCAGTGGCTACTGCTGGGATGGCGCATGTCCCACGCTGGAGCAGCAGTGCCAGCAGCTCTGGAAGCCT
GGCTCCCACCCAGCTCCCGAGGCCTGTTTCCAGGTGGTGAACTCTGCGGGAGATGCTCATGGAAACTG
CGGCCAGGACAGCGAGGGCCACTTCCTGCCCTGTGCAGGGAGGGATGCCCTGTGTGGGAAGCTGCAGT
GCCAGGGTGGAAAGCCCAGCCTGCTCGCACCGCACATGGTGCCAGTGGACTCTACCGTTCACCTAGAT
GGCCAGGAAGTGACTTGTCGGGGAGCCTTGGACTCCCCAGTGCCCAGCTGGACCTGCTTGGCCTTGGG
CCTGGTAGAGTCAGGCACCCAGTGTGGACCTAGAATGGTTTGCAATAGCAACCATAACTGCCACTGTG
CTCCAGGCTGGGCTCCACCCTTCTGTGACAAGCCAGGCTTTGGTGGCAGCATGGACAGTGGCCCTGTG
CAGGCTGAAAACCATGACACCTTCCTGCTGGCCATGCTCCTCAGCGTCCTGCTGCCTCTGCTCCCAGG
GGCCGGCCTGGCCTGGTGTTGCTACCGACTCCCAGGAGCCCATCTGCAGCGATGCAGCTGGGGCTGCA
GAAGGGACCCTGCGTGCAGTGGCCCCAAAGATGGCCCACACAGGGACCACCCCCTGGGCGGCGTTCAC
CCCATGGAGTTGGGCCCCACAGCCACTGGACAGCCCTGGCCCCTGGACCCTGAGAACTCTCATGAGCC
CAGCAGCCACCCTGAGAAGCCTCTGCCAGCAGTCTCGCCCGACCCCCAAGCAGATCAAGTCCAGATGC
CAAGATCCTGCCTCTGGTGAGAGGTAGCTCCTAAAATGAACAGATTTAAAGACAGGTGGCCACTGACA
GCCACTCCAGGAACTTGAACTGCAGGGGCAGAGCCAGTGAATCACCGGACCTCCAGCACCTGCAGGCA
GCTTGGAAGTTTCTTCCCCGAGTGGAGCTTCGACCCACCCACTCCAGGAACCCAGAGCCACACTAGAA
GTTCCTGAGGGCTGGAGAACACTGCTGGGCACACTCTCCAGCTCAATAAACCATCAGTCCCAGAAGCA
AAGGTCACACAGCCCCTGACCTCCCTCACCAGTGGAGGCTGGGTAGTGCTGGCCATCCCAAAAGGGCT
CTGTCCTGGGAGTCTGGTGTGTCTCCTACATGCAATTTCCACGGACCCAGCTCTGTGGAGGGCATGAC
TGCTGGCCAGAAGCTAGTGGTCCTGGGGCCCTATGGTTCGACTGAGTCCACACTCCCCTGCAGCCTGG
CTGGCCTCTGCAAACAAACATAATTTTGGGGACCTTCCTTCCTGTTTCTTCCCACCCTGTCTTCTCCC
CTAGGTGGTTCCTGAGCCCCCACCCCCAATCCCAGTGCTACACCTGAGGTTCTGGAGCTCAGAATCTG
ACAGCCTCTCCCCCATTCTGTGTGTGTCGGGGGGACAGAGGGAACCATTTAAGAAAAGATACCAAAGT
AGAAGTCAAAAGAAAGACATGTTGGCTATAGGCGTGGTGGCTCATGCCTATAATCCCAGCACTTTGGG
AAGCCGGGGTAGGAGGATCACCAGAGGCCAGCAGGTCCACACCAGCCTGGGCAACACAGCAAGACACC
GCATCTACAGAAAAATTTTAAAATTAGCTGGGCGTGGTGGTGTGTACCTGTAGGCCTAGCTGCTCAGG
AGGCTGAAGCAGGAGGATCACTTGAGCCTGAGTTCAACACTGCAGTGAGCTATGGTGGCACCACTGCA
CTCCAGCCTGGGTGACAGAGCAAGACCCTGTCTCTAAAATAAATTTTAAAAAGACATATTACACT

NOV14b, CG50367-05

| | | | |
|---|---|---|---|
| Protein Sequence | SEQ ID NO: 152 | 787 aa | MW at 84713.5kD |

MGWRPRRARGTPLLLLLLLLLLWPVPGAGVLQGHIPGQPVTPHWVLDGQPWRTVSLEEPVSKPDMGLV
ALEAEGQELLLELEKNHRLLAPGYIETHYGPDGQPVVLAPNHTDHCHYQGRVRGFPDSWVVLCTCSGM
SGLITLSRNASYYLRPWPPRGSKDFSTHEIFRMEQLLTWKGTCGHRDPGNKAGMTSLPGGPQSRGRRE
ARRTRKYLELYIVADHTLFLTRHRNLNHTKQRLLEVANYVDQLLRTLDIQVALTGLEVWTERDRSRVT
QDANATLWAFLQWRRGLWAQRPHDSAQLLTGRAFQGATVGLAPVEGMCRAESSGGVSTDHSELPIGAA
ATMAHEIGHSLGLSHDPDGCCVEAAAESGGCVMAAATGHPFPRVFSACSRRQLRAFFRKGGGACLSNA
PDPGLPVPPALCGNGFVEAGEECDCGPGQECRDLCCFAHNCSLRPGAQCAHGDCCVRCLLKPAGALCR
QAMGDCDLPEFCTGTSSHCPPDVYLLDGSPCARGSGYCWDGACPTLEQQCQQLWGPGSHPAPEACFQV
VNSAGDAHGNCGQDSEGHFLPCAGRDALCGKLQCQGGKPSLLAPHMVPVDSTVNLDGQEVTCRGALAL
PSAQLDLLGLGLVESGTQCGPRNVCNSNHNCHCAPGWAPPFCDKPGFGGSMDSGPVQAENHDTFLLAM
LLSVLLPLLPGAGLAWCCYRLPGAHLQRCSWGCRRDPACSGPKDGPHRDHPLGGVHPMELGPTATGQP
WPLDPENSHEPSSHPEKPLPAVSPDPQADQVQMPRSCLW

| | | |
|---|---|---|
| NOV14c, CG50367-06 | SEQ ID NO: 153 | 3351 bp |

| | | |
|---|---|---|
| DNA Sequence | ORF Start: ATG at 37 | ORF Stop: TGA at 1579 |

GCGAGCCGCTGCCTAGAGGCCGAGGAGCTCACAGCTATGGGCTGGAGGCCCCGGAGAGCTCGGGGGAC
CCCGTTGCTGCTGCTGCTACTACTGCTGCTGCTCTGGCCAGTGCCAGGCGCCGGGGTGCTTCAAGGAC
ATATCCCTGGGCAGCCAGTCACCCCGCACTGGGTCCTGGATGGACAACCCTGGCGCACCGTCAGCCTG
GAGGAGCCGGTCTCGAAGCCAGACATGGGGCTGGTGGCCCTGGAGGCTGAAGGCCAGGAGCTCCTGCT
TGAGCTGGAGAAGAACCACAGGCTGCTGGCCCCAGGATACATAGAAACCCACTACGGCCCAGATGGGC
AGCCAGTGGTGCTGGCCCCCAACCACACGGATCATTGCCACTACCAAGGGCGAGTAAGGGGCTTCCCC
GACTCCTGGGTAGTCCTCTGCACCTGCTCTGGGATGAGTGGCCTGATCACCCTCAGCAGGAATGCCAG
CTATTATCTGCGTCCCTGGCCACCCCGGGGCTCCAAGGACTTCTCAACCCACGAGATCTTTCGGATGG
AGCAGCTGCTCACCTGGAAAGGAACCTGTGGCCACAGGGATCCTGGGAACAAAGCGGGCATGACCAGC
CTTCCTGGTGGTCCCCAGAGCAGGGGCAGGCGAGAAGCGCGCAGGACCCGGAAGTACCTGGAACTGTA
CATTGTGGCAGACCACACCCTGTTCTTGACTCGGCACCGAAACTTGAACCACACCACACAGCGTCTCC
TGGAAGTCGCCAACTACGTGGACCAGCTTCTCAGGACTCTGGACATTCAGGTGGCGCTGACCGGCCTG
GAGGTGTGGACCGAGCGGGACCGCAGCCGCGTCACGCAGGACGCCAACGCCACGCTCTGGGCCTTCCT
GCAGTGGCGCCGGGGGCTGTGGGCGCAGCGGCCCCACGACTCCGCGCAGCTGCTCACGGGCCGCGCCT
TCCAGGGCGCCACAGTGGGCCTGGCGCCCGTCGAGGGCATGTGCCGCGCCGAGAGCTCGGGAGGCGTG
AGCACGGACCACTCGGAGCTCCCCATCGGCGCCGCAGCCACCATGGCCCATGAGATCGGCCACAGCCT
CGGCCTCAGCCACGACCCCGACGGCTGCTGCGTGGAGGCTGCGGCCGAGTCCGGAGGCTGCGTCATGG
CTGCGGCCACCGGGCACCCGTTTCCGCGCGTGTTCAGCGCCTGCAGCCGCCGCCAGCTGCGCGCCTTC
TTCCGCAAGGGGGGCGGCGCTTGCCTCTCCAATGCCCCGGACCCCGGACTCCCGGTGCCGCCGGCGCT
CTGCGGGAACGGCTTCGTGGAAGCGGGCGAGGAGTGTGACTGCGGCCCTGGCCAGGAGTGCCGCGACC
TCTGCTGCTTTGCTCACAACTGCTCGCTGCGCCCGGGGGCCCAGTGCGCCCACGGGGACTGCTGCGTG
CGCTGCCTGACGTTTACCTACTGGACGGCTCACCCTGTGCCAGGGGCAGTGGCTACTGCTGGGATGGC
GCATGTCCCACGCTGGAGCAGCAGTGCCAGCAGCTCTGGGGGCCTGGCTCCCACCCAGCTCCCGAGGC
CTGTTTCCAGGTGGTGAACTCTGCGGGAGATGCTCATGGAAACTGCGGCCAGGACAGCGAGGGCCACT
TCCTGCCCTGTGCAGGGAGGGATGCCCTGTGTGGGAAGCTGCAGTGCCAGGGTGGAAAGCCCAGCCTG
CTCGCACCGCACATGGTGCCAGTGGACTCTACCGTTCACCTAGATGGCCAGGAAGTGACTTGTCGGGG
AGCCTTGGCACTCCCCAGTGCCCAGCTGGACCTGCTTGGCCTGGGCCTGGTAGAGCCAGGCACCCAGT
GTGGACCTAGAATGGTGTGCCAGAGCAGGCGCTGCAGGAAGAATGCCTTCCAGGAGCTTCAGCGCTGC
CTGACTGCCTGCCACAGCCACGGGGTTTGCAATAGCAACCATAACTGCCACTGTGCTCCAGGCTGGGC
TCCACCCTTCTGTGACAAGCCAGGCTTTGGTGGCAGCATGGACAGTGGCCCTGTGCAGGCTGAAAACC
ATGACACCTTCCTGCTGGCCATGCTCCTCAGCGTCCTGCTGCCTCTGCTCCCAGGGGCCGGCCTGGCC
TGGTGTTGCTACCGACTCCCAGGAGCCCATCTGCAGCGATGCAGCTGGGGCTGCAGAAGGGACCCTGC
GTGCAGTGGCCCCAAAGATGGCCCACACAGGGACCACCCCCTGGGCGGCGTTCACCCCATGGAGTTGG
GCCCCACAGCCACTGGACAGCCCTGGCCCCTGGACCCTGAGAACTCTCATGAGCCCAGCAGCCACCCT
GAGAAGCCTCTGCCAGCAGTCTCGCCTGACCCCCAAGATCAAGTCCAGATGCCAAGATCCTGCCTCTG
GTGAGAGGTAGCTCCTAAAATGAACAGATTTAAAGACAGGTGGCCACTGACAGCCACTCCAGGAACTT
GAACTGCAGGGGCAGAGCCAGTGAATCACCGGACCTCCAGCACCTGCAGGCAGCTTGGAAGTTTCTTC
CCCGAGTGGAGCTTCGACCCACCCACTCCAGGAACCCAGAGCCACATTAGAAGTTCCTGAGGGCTGGA
GAACACTGCTGGGCACACTCTCCAGCTCAATAAACCATCAGTCCCAGAAGCAAAGGTCACACAGCCCC
TGACCTCCCTCACCAGTGGAGGCTGGGTAGTGCTGGCCATCCCAAAAGGGCTCTGTCCTGGGAGTCTG
GTGTGTCTCCTACATGCAATTTCCACGGACCCAGCTCTGTGGAGGGCATGACTGCTGGCCAGAAGCTA
GTGGTCCTGGGGCCCTATGGTTCGACTGAGTCCACACTCCCCTGGAGCCTGGCTGGCCTCTGCAAACA
AACATAATTTTGGGGACCTTCCTTCCTGTTTCTTCCCACCCTGTCTTCTCCCCTAGGTGGTTCCTGAG
CCCCCACCCCCAATCCCAGTGCTACACCTGAGGTTCTGGAGCTCAGAATCTGACAGCCTCTCCCCCAT
TCTGTGTGTGTCGGGGGGACAGAGGGAACCATTTAAGAAAAGATACCAAAGTAGAAGTCAAAAGAAAG
ACATGTTGGCTATAGGCGTGGTGGCTCATGCCTATAATCCCAGCACTTTGGGAAGCCGGGGTAGGAGG
ATCACCAGAGGCCAGCAGGTCCACACCAGCCTGGGCAACACAGCAAGACACCGCATCTACAGAAAAAT
TTTAAAATTAGCTGGGCGTGGTGGTGTGTACCTGTAGGCCTAGCTGCTCAGGAGGCTGAAGCAGGAGG
ATCACTTGAGCCTGAGTTCAACACTGCAGTGAGCTATGGTGGCACCACTGCACTCCAGCCTGGGTGAC
AGAGCAAGACCCTGTCTCT

NOV14c, CG50367-06

| | | | |
|---|---|---|---|
| Protein Sequence | SEQ ID NO: 154 | 514 aa | MW at 55996.3kD |

MGWRPRRARGTPLLLLLLLLLLWPVPGAGVLQGHIPGQPVTPHWVLDGQPWRTVSLEEPVSKPDMGLV
ALEAEGQELLLELEKNHRLLAPGYIETHYGPDGQPVVLAPNHTDHCHYQGRVRGFPDSWVVLCTCSGM
SGLITLSRNASYYLRPWPPRGSKDFSTHEIFRMEQLLTWKGTCGHRDPGNKAGMTSLPGGPQSRGRRE
ARRTRKYLELYIVADHTLFLTRHRNLNHTKQRLLEVANYVDQLLRTLDIQVALTGLEVWTERDRSRVT
QDANATLWAFLQWRRGLWAQRPHDSAQLLTGRAFQGATVGLAPVEGMCRAESSGGVSTDHSELPIGAA
ATMAHEIGHSLGLSHDPDGCCVEAAAESGGCVMAAATGHPFPRVFSACSRRQLRAFFRKGGGACLSNA
PDPGLPVPPALCGNGFVEAGEECDCGPGQECRDLCCFAHNCSLRPGAQCAHGDCCVRCLTFTYWTAHP
VPGAVATAGMAHVPRWSSSASSSGGLAPTQLPRPVSRW

| | | |
|---|---|---|
| NOV14d, CG50367-07 | SEQ ID NO: 155 | 3139 bp |

| | | |
|---|---|---|
| DNA Sequence | ORF Start: ATG at 37 | ORF Stop: TGA at 1354 |

GCGAGCCGCTGCCTAGAGGCCGAGGAGCTCACAGCTATGGGCTGGAGGCCCCGGAGAGCTCGGGGGAC
CCCGTTGCTGCTGCTGCTACTACTGCTGCTGCTCTGGCCAGTGCCAGGCGCCGGGGTGCTTCAAGGAC
ATATCCCTGGGCAGCCAGTCACCCCGCACTGGGTCCTGGATGGACAACCCTGGCGCACCGTCAGCCTG
GAGGAGCCGGTCTCGAAGCCAGACATGGGGCTGGTGGCCCTGGAGGCTGAAGGCCAGGAGCTCCTGCT
TGAGCTGGAGAAGAACCACAGGCTGCTGGCCCCAGGATACATAGAAACCCACTACGGCCCAGATGGGC
AGCCAGTGGTGCTGGCCCCCAACCACACGGATCATTGCCACTACCAAGGGCGAGTAAGGGGCTTCCCC
GACTCCTGGGTAGTCCTCTGCACCTGCTCTGGGATGAGTGGCCTGATCACCCTCAGCAGGAATGCCAG
CTATTATCTGCGTCCCTGGCCACCCCGGGGCTCCAAGGACTTCTCAACCCACGAGATCTTTCGGATGG
AGCAGCTGCTCACCTGGAAAGGAACCTGTGGCCACAGGGATCCTGGGAACAAAGCGGGCATGACCAGC
CTTCCTGGTGGTCCCCAGAGCAGGGGCAGGCGAGAAGCGCGCAGGACCCGGAAGTACCTGGAACTGTA
CATTGTGGCAGACCACACCCTGTTCTTGACTCGGCACCGAAACTTGAACCACACCAAACAGCGTCTCC
TGGAAGTCGCCAACTACGTGGACCAGCTTCTCAGGACTCTGGACATTCAGGTGGCGCTGACCGGCCTG
GAGGTGTGGACCGAGCGGGACCGCAGCCGCGTCACGCAGGACGCCAACGCCACGCTCTGGGCCTTCCT
GCAGTGGCGCCGGGGACTGTGGGCGCAGCGGCCCCACGACTCCGCGCAGCTGCTCACGACCACTCGGA
GCTCCCCATCGGCGCCGCAGCCACCATGGCCCATGAGATCGGCCACAGCCTCGGCCTCAGCCACGACC
CCGACGGCTGCTGCGTGGAGGCTGCGGCCGAGTCCGGAGGCTGCGTCATGGCTGCGGCCACCGGGCAC
CCGTTTCCGCGCGTGTTCAGCGCCTGCAGCCGCCGCCAGCTGCGCGCCTTCTTCCGCAAGGGGGGCGG
CGCTTGCCTCTCCAATGCCCCGGACCCCGGACTCCCGGTGCCGCCGGCGCTCTGCGGGAACGGCTTCG
TGGAAGCGGGCGAGGAGTGTGACTGCGGCCCTGGCCAGGAGTGCCGCGACCTCTGCTGCTTTGCTCAC
AACTGCTCGCTGCGCCCGGGGGCCCAGTGCGCCCACGGGGACTGCTGCGTGCGCTGCCTGCTGAAGCC
GGCTGGAGCGCTGTGCCGCCAGGCCATGGGTGACTGTGACCTCCCTGAGTTTTGCACGGGCACCTCCT
CCCACTGTCCCCCAGACGTTTACCTACTGGACGGCTCACCCTGTGCCAGGGGCAGTGGCTACTGCTGG
GATGGCGCATGTCCCACGCTGGAGCAGCAGTGCCAGCAGCTCTGGGGGCCTGGCTCCCACCCAGCTCC
CGAGGCCTGTTTCCAGGTGGTGAACTCTGCGGGAGATGCTCATGGAAACTGCGGCCAGGACAGCGAGG
GCCACTTCCTGCCCTGTGCAGGGAGGGATGCCCTGTGTGGGAAGCTGCAGTGCCAGGGTGGAAAGCCC
AGCCTGCTCGCACCGCACATGGTGCCAGTGGACTCTACCGTTCACCTAGATGGCCAGGAAGTGACTTG
TCGGGGAGCCTTGGCACTCCCCAGTGCCCAGCTGGACCTGCTTGGCCTGGGCCTGGTAGAGCCAGGCA
CCCAGTGTGGACCTAGAATGGTGTGCCAGAGCAGGCGCTGCAGGAAGAATGCCTTCCAGGAGCTTCAG
CGCTGCCTGACTGCCTGCCACAGCCACGGGGTTTGCAATAGCAACCATAACTGCCACTGTGCTCCAGG
CTGGGCTCCACCCTTCTGTGACAAGCCAGGCTTTGGTGGCAGCATGGACAGTGGCCCTGTGCAGGCTG
AAAACCATGACACCTTCCTGCTGGCCATGCTCCTCAGCGTCCTGCTGCCTCTGCTCCCAGGGGCCGGC
CTGGCCTGGTGTTGCTACCGACTCCCAGGAGCCCATCTGCAGCGATGCAGCTGGGGCTGCAGAAGGGA
CCCTGCGTGCAGTGGCCCCAAAGATGGCCCACACAGGGACCACCCCCTGGGCGGCGTTCACCCCATGG
AGTTGGGCCCCACAGCCACTGGACAGCCCTGGCCCCTGGACCCTGAGAACTCTCATGAGCCCAGCAGC
CACCCTGAGAAGCCTCTGCCAGCAGTCTCGCCTGACCCCCAAGATCAAGTCCAGATGCCAAGATCCTG
CCTCTGGTGAGAGGTAGCTCCTAAAATGAACAGATTTAAAGACAGGTGGCCACTGACAGCCACTCCAG
GAACTTGAACTGCAGGGGCAGAGCCAGTGAATCACCGGACCTCCAGCACCTGCAGGCAGCTTGGAAGT
TTCTTCCCCGAGTGGAGCTTCGACCCACCCACTCCAGGAACCCAGAGCCACATTAGAAGTTCCTGAGG
GCTGGAGAACACTGCTGGGCACACTCTCCAGCTCAATAAACCATCAGTCCCAGAAGCAAAGGTCACAC
AGCCCCTGACCTCCCTCACCAGTGGAGGCTGGGTAGTGCTGGCCATCCCAAAAGGGCTCTGTCCTGGG
AGTCTGGTGTGTCTCCTACATGCAATTTCCACGGACCCAGCTCTGTGGAGGGCATGACTGCTGGCCAG
AAGCTAGTGGTCCTGGGGCCCTATGGTTCGACTGAGTCCACACTCCCCTGGAGCCTGGCTGGCCTCTG
CAAACAAACATAATTTTGGGGACCTTCCTTCCTGTTTCTTCCCACCCTGTCTTCTCCCCTAGGTGGTT
CCTGAGCCCCCACCCCCAATCCCAGTGCTACACCTGAGGTTCTGGAGCTCAGAATCTGACAGCCTCTC
CCCCATTCTGTGTGTGTCGGGGGGACAGAGGGAACCATTTAAGAAAAGATACCAAAGTAGAAGTCAAA
AGAAAGACATGTTGGCTATAGGCGTGGTGGCTCATGCCTATAATCCCAGCACTTTGGGAAGCCGGGGT
AGGAGGATCAC

NOV14d, CG50367-07

| | | | |
|---|---|---|---|
| Protein Sequence | SEQ ID NO: 156 | 439 aa | MW at 48163.4kD |

MGWRPRRARGTPLLLLLLLLLLWPVPGAGVLQGHIPGQPVTPHWVLDGQPWRTVSLEEPVSKPDMGLV
ALEAEGQELLLELEKNHRLLAPGYIETHYGPDGQPVVLAPNHTDHCHYQGRVRGFPDSWVVLCTCSGM
SGLITLSRNASYYLRPWPPRGSKDFSTHEIFRMEQLLTWKGTCGHRDPGNKAGMTSLPGGPQSRGRRE
ARRTRKYLELYIVADHTLFLTRHRNLNHTKQRLLEVANYVDQLLRTLDIQVALTGLEVWTERDRSRVT
QDANATLWAFLQWRRGLWAQRPHDSAQLLTTTRSSPSAPQPPWPMRSATASASATTPTAAAWRLRPSP
EAASWLRPPGTRFRACSAPAAAASCAPSSARGAALASPMPRTPDSRCRRRSAGTASWKRARSVTAALA
RSAATSAALLTTARCARGPSAPTGTAACAAC

| | | |
|---|---|---|
| NOV14e, 249356906 | SEQ ID NO: 157 | 1278 bp |

| | | |
|---|---|---|
| DNA Sequence | ORF Start: at 1 | ORF Stop: end of sequence |

AAGCTTGAGCTGGAGAAGAACCACAGGCTGCTGGCCCCAGGATACATAGAAACCCACTACGGCCCAGA
TGGGCAGCCAGTGGTGCTGGCCCCCAACCACACGGATCATTGCCACTACCAAGGGCGAGTAAGGGGCT
TCCCCGACTCCTGGGTAGTCCTCTGCACCTGCTCTGGGATGAGTGGCCTGATCACCCTCAGCAGGAAT
GCCAGCTATTATCTGCGTCCCTGGCCACCCCGGGGCTCCAAGGACTTCTCAACCCACGAGATCTTTCG
GATGGAGCAGCTGCTCACCTGGAAAGGAACCTGTGGCCACAGGGATCCTGGGAACAAAGCGGGCATGA
CCAGCCTTCCTGGTGGTCCCCAGAGCAGGGGCAGGCGAGAAGCGCGCAGGACCCGGAAGTACCTGGAA
CTGTACATTGTGGCAGACCACACCCTGTTCTTGACTCGGCACCGAAACTTGAACCACACCAAACAGCG
TCTCCTGGAAGTCGACAACTACGTGGACCAGCTTCTCAGGACTCTGGACATTCAGGTGGCGCTGACCG
GCCTGGAGGTGTGGACCGAGCGGGACCGCAGCCGCGTCACGCAGGACGCCAACGCCACGCTCTGGGCC
TTCCTGCAGTGGCGCCGGGGACTGTGGGCGCAGCGGCCCCACGACTCCGCGCAGCTGCTCACGGGCCG
CGCCTTCCAGGGCGCCACAGTGGGCCTGGCGCCCGTCGAGGGCATGTGCCGCGCCGAGAGCTCGGGAG
GCGTGAGCACGGACCACTCGGAGCTCCCCATCGGCGCCGCAGCCACCATGGCCCATGAGATCGGCCAC
AGCCTCGGCCTCAGCCACGACCCCGACGGCTGCTGCGTGGAGGCTGCGGCCGAGTCCGGAGGCTGCGT
CATGGCTGCGGCCACCGGGCACCCGTTTCCGCGCGTGTTCAGCGCCTGCAGCCGCCGCCAGCTGCGCG
CCTTCTTCCGCAAGGGGGGCGGCGCTTGCCTCTCCAATGCCCCGGACCCCGGACTCCCGGTGCCGCCG
GCGCTCTGCGGGAACGGCTTCGTGGAAGCGGGCGAGGAGTGTGACTGCGGCCCTGGCCAGGAGTGCCG
CGACCTCTGCTGCTTTGCTCACAACTGCTCGCTGCGCCCGGGGGCCCAGTGCGCCCACGGGGACTGCT
GCGTGCGCTGCCTGCTGAAGCCGGCTGGAGCGCTGTGCCGCCAGGCCATGGGTGACTGTGACCTCCCT
GAGTTTTGCACGGGCACCTCCTCCCACTGTCCCCCAGACGTTTACCTACTCGAG

NOV14e, 249356906

| | | | |
|---|---|---|---|
| Protein Sequence | SEQ ID NO: 158 | 426 aa | MW at 46516.2kD |

KLELEKNHRLLAPGYIETHYGPDGQPVVLAPNHTDHCHYQGRVRGFPDSWVVLCTCSGMSGLITLSRN
ASYYLRPWPPRGSKDFSTHEIFRMEQLLTWKGTCGHRDPGNKAGMTSLPGGPQSRGRREARRTRKYLE
LYIVADHTLFLTRHRNLNHTKQRLLEVDNYVDQLLRTLDIQVALTGLEVWTERDRSRVTQDANATLWA
FLQWRRGLWAQRPHDSAQLLTGRAFQGATVGLAPVEGMCRAESSGGVSTDHSELPIGAAATMAHEIGH
SLGLSHDPDGCCVEAAAESGGCVMAAATGHPFPRVFSACSRRQLRAFFRKGGGACLSNAPDPGLPVPP
ALCGNGFVEAGEECDCGPGQECRDLCCFAHNCSLRPGAQCAHGDCCVRCLLKPAGALCRQAMGDCDLP
EFCTGTSSHCPPDVYLLE

| | | |
|---|---|---|
| NOV14f, CG50367-02 | SEQ ID NO: 159 | 2705 bp |

| | | |
|---|---|---|
| DNA Sequence | ORF Start: ATG at 3 | ORF Stop: TGA at 2688 |

CTATGGGCTGGAGGCCCCGGAGAGCTCGGGGGACCCCGTTGCTGCTGCTGCTACTACTGCTGCTGCTC
TGGCCAGTGCCAGGCGCCGGGGTGCTTCAAGGACATATCCCTGGGCAGCCAGTCACCCCGCACTGGGT
CCTGGATGGACAACCCTGGCGCACCGTCAGCCTGGAGGAGCCGGTCTCGAAGCCAGACATGGGGCTGG
TGGCCCTGGAGGCTGAAGGCCAGGAGCTCCTGCTTGAGCTGGAGAAGAACCACAGGCTGCTGGCCCCA
GGATACATAGAAACCCACTACGGCCCAGATGGGCAGCCAGTGGTGCTGGCCCCCAACCACACGGATCA
TTGCCACTACCAAGGGCGAGTAAGGGGCTTCCCCGACTCCTGGGTAGTCCTCTGCACCTGCTCTGGGA
TGAGTGGCCTGATCACCCTCAGCAGGAATGCCAGCTATTATCTGCGTCCCTGGCCACCCCGGGGCTCC
AAGGACTTCTCAACCCACGAGATCTTTCGGATGGAGCAGCTGCTCACCTGGAAAGGAACCTGTGGCCA
CAGGGATCCTGGGAACAAAGCGGGCATGACCAGCCTTCCTGGTGGTCCCCAGAGCAGGGGCAGGCGAG
AAGCGCGCAGGACCCGGAAGTACCTGGAACTGTACATTGTGGCAGACCACACCCTGTTCTTGACTCGG
CACCGAAACTTGAACCACACCAAACAGCGTCTCCTGGAAGTCGCCAACTACGTGGACCAGCTTCTCAG
GACTCTGGACATTCAGGTGGCGCTGACCGGCCTGGAGGTGTGGACCGAGCGGGACCGCAGCCGCGTCA
CGCAGGACGCCAACGCCACGCTCTGGGCCTTCCTGCAGTGGCGCCGGGGGCTGTGGGCGCAGCGGCCC
CACGACTCCGCGCAGCTGCTCACGGGCCGCGCCTTCCAGGGCGCCACAGTGGGCCTGGCGCCCGTCGA
GGGCATGTGCCGCGCCGAGAGCTCGGGAGGCGTGAGCACGGACCACTCGGAGCTCCCCATCGGCGCCG
CAGCCACCATGGCCCATGAGATCGGCCACAGCCTCGGCCTCAGCCACGACCCCGACGGCTGCTGCGTG
GAGGCTGCGGCCGAGTCCGGAGGCTGCGTCATGGCTGCGGCCACCGGGCACCCGTTTCCGCGCGTGTT
CAGCGCCTGCAGCCGCCGCCAGCTGCGCGCCTTCTTCCGCAAGGGGGGCGGCGCTTGCCTCTCCAATG
CCCCGGACCCCGGACTCCCGGTGCCGCCGGCGCTCTGCGGGAACGGCTTCGTGGAAGCGGGCGAGGAG
TGTGACTGCGGCCCTGGCCAGGAGTGCCGCGACCTCTGCTGCTTTGCTCACAACTGCTCGCTGCGCCC
GGGGGCCCAGTGCGCCCACGGGGACTGCTGCGTGCGCTGCCTGCTGCCGCCGGCTGGAGCGCTGTGCC
GCCAGGCCATGGGTGACTGTGACCTCCCTGAGTTTTGCACGGGCACCTCCTCCCACTGTCCCCCAGAC
GTTTACCTACTGGACGGCTCACCCTGTGCCAAGGGCAGTGGCTACTGCTGGGATGGCGCATGTCCCAC
GCTGGAGCAGCAGTGCCAGCAGCTCTGGGGGCCTGGCTCCCACCCAGCTCCCGAGGCCTGTTTCCAGG
TGGTGAACTCTGCGGGAGATGCTCATGGAAACTGCGGCCAGGACAGCGAGGGCCACTTCCTGCCCTGT
GCAGGGAGGGATGCCCTGTGTGGGAAGCTGCAGTGCCAGGGTGGAAAGCCCAGCCTGCTCGCACCGCA
CATGGTGCCAGTGGACTCTACCGTTCACCTAGATGGCCAGGAAGTGACTTGTCGGGGAGCCTTGGCAC
TCCCCAGTGCCCAGCTGGACCTGCTTGGCCTGGGCCTGGTAGAGCCAGGCACCCAGTGTGGACCTAGA
ATGGTGTGCCAGAGCAGGCGCTGCAGGAAGAATGCCTTCCAGGAGCTTCAGCGCTGCCTGACTGCCTG
CCACAGCCACGGGGTTTGCAATAGCAACCATAACTGCCACTGTGCTCCAGGCTGGGCTCCACCCTTCT
GTGACAAGCCAGGCTTTGGTGGCAGCATGGACAGTGGCCCTGTGCAGGCTGALAACCATGACACCTTC
CTGCTGGCCATGCTCCTCAGCGTCCTGCTGCCTCTGCTCCCAGGCGCCGGCCTGGCCTGGTGTTGCTA
CCGACTCCCAGGAGCCCATCTGCAGCGATGCAGCTGGGGCTGCAGAAGGGACCCTGCGTGCAGTGGCC
CCAAAGATGGCCCACACAGAGACCACCCCCTGGGCGGCGTTCACCCCATGGAGTTGGGCCCCACAGCC
ACTGGACAGCCCTGGCCCCTGGACCCTGAGAACTCTCATGAGCCCAGCAGCCACCCTGAGAAGCCTCT
GCCAGCAGTCTCGCCTGACCCCCAAGGTGGTTCCCTTGCAGCCTGGGGCCCCAGTCCTTTAGGGGACA
ACATATCCTCCTCATTCTCAGCAGATCAAGTCCAGATGCCAAGATCCTGCCTCTGTGGCGAACCCTGG
GGAGGCCACGTGGGAAGGAAAGAGGGCTCTAAGAGGGGAGGCCCCAGACTGGGGGAGAGGCCTGTCTG
GAGCCCAGGATCACCTGGCTGTGCTGCAGAACTGGAGAAGAGAAGCTCAGCAGCAGGGAGCTGGCATG
GGGCCAACAGCAGAAAAGCAGGAGGCACGCAGAAGTGACTGGGAAGCAGGAGG

NOV14f, CG50367-02

| | | | |
|---|---|---|---|
| Protein Sequence | SEQ ID NO: 160 | 895 aa | MW at 96021.0kD |

MGWRPRRARGTPLLLLLLLLLLWPVPGAGVLQGHIPGQPVTPHWVLDGQPWRTVSLEEPVSKPDMGLV
ALEAEGQELLLELEKNHRLLAPGYIETHYGPDGQPVVLAPNHTDHCHYQGRVRGFPDSWVVLCTCSGN
SGLITLSRNASYYLRPWPPRGSKDFSTHEIFRNEQLLTWKGTCGHRDPGNKAGMTSLPGGPQSRGRRE
ARRTRKYLELYIVADHTLFLTRHRNLNHTKQRLLEVANYVDQLLRTLDIQVALTGLEVWTERDRSRVT
QDANATLWAFLQWRRGLWAQRPHDSAQLLTGRAFQGATVGLAPVEGMCRAESSGGVSTDHSELPIGAA
ATMAHEIGHSLGLSHDPDGCCVEAAAESGGCVMAAATGHPFPRVFSACSRRQLRAFFRKGGGACLSNA
PDPGLPVPPALCGNGFVEAGEECDCGPGQECRDLCCFAHNCSLRPGAQCAHGDCCVRCLLKPAGALCR
QAMGDCDLPEFCTGTSSHCPPDVYLLDGSPCAKGSGYCWDGACPTLEQQCQQLWGPGSHPAPEACFQV
VNSAGDAHGNCGQDSEGHFLPCAGRDALCGKLQCQGGKPSLLAPHMVPVDSTVHLDGQEVTCRGALAL
PSAQLDLLGLGLVEPGTQCGPRMVCQSRRCRKNAFQELQRCLTACHSHGVCNSNHNCHCAPGWAPPFC
DKPGFGGSMDSGPVQAENHDTFLLAMLLSVLLPLLPGAGLAWCCYRLPGAHLQRCSWGCRRDPACSGP
KDGPHRDHPLGGVHPMELGPTATGQPWPLDPENSHEPSSHPEKPLPAVSPDPQGGSLAAWGPSPLGDN
ISSSFSADQVQMPRSCLCGEPWGGHVGRKEGSKRGGPRLGERPVWSPGSPGCAAELEKRSSAERSWHG
ANSRKAGGTQK

| | | |
|---|---|---|
| NOV14g, CG50367-03 | SEQ ID NO: 161 | 2642 bp |

| | | |
|---|---|---|
| DNA Sequence | ORF Start: ATG at 3 | ORF Stop: TGA at 2625 |

CTATGGGCTGGAGGCCCCGGAGAGCTCGGGGGACCCCGTTGCTGCTGCTGCTACTACTGCTGCTGGGC
TGGCCAGTGCCAGGCGCCGGGGTGCTTCAAGGACATATCCCTGGGCAGCCAGTCACCCCGCACTGGGT
CCTGGATGGACAACCCTGGCGCACCGTCAGCCTGGAGGAGCCGGTCTCGAAGCCAGACATGGGGCTGG
TGGCCCTGGAGGCTGAAGGCCAGGAGCTCCTGCTTGAGCTGGAGAAGAACCACAGGCTGCTGGCCCCA
GGATACATAGAAACCCACTACGGCCCAGATGGGCAGCCAGTGGTGCTGGCCCCCAACCACACGGATCA
TTGCCACTACCAAGGGCGAGTAAGGGGCTTCCCCGACTCCTGGGTAGTCCTCTGCACCTGCTCTGGGA
TGAGTGGCCTGATCACCCTCAGCAGGAATGCCAGCTATTATCTGCGTCCCTGGCCACCCCGGGGCTCC
AAGGACTTCTCAACCCACGAGATCTTTCGGATGGAGCAGCTGCTCACCTGGAAAGGAACCTGTGGCCA
CAGGGATCCTGGGAACAAAGCGGGCATGACCAGCCTTCCTGGTGGTCCCCAGAGCAGGGGCAGGCGAG
AAGCGCGCAGGACCCGGAAGTACCTGGAACTGTACATTGTGGCAGACCACACCCTGTTCTTGACTCGG
CACCGAAACTTGAACCACACCAAACAGCGTCTCCTGGAAGTCGCCAACTACGTGGACCAGCTTCTCAG
GACTCTGGACATTCAGGTGGCGCTGACCGGCCTGGAGGTGTGGACCGAGCGGGACCGCAGCCGCGTCA
CGCAGGACGCCAACGCCACGCTCTGGGCCTTCCTGCAGTGGCGCCGGGGGCTGTGGGCGCAGCGGCCC
CACGACTCCGCGCAGCTGCTCACGGGCCGCGCCTTCCAGGGCGCCACAGTGGGCCTGGCGCCCGTCGA
GGGCATGTGCCGCGCCGAGAGCTCGGGAGGCGTGAGCACGGACCACTCGGAGCTCCCCATCGGCGCCG
CAGCCACCATGGCCCATGAGATCGGCCACAGCCTCGGCCTCAGCCACGACCCCGACGGCTGCTGCGTG
GAGGCTGCGGCCGAGTCCGGAGGCTGCGTCATGGCTGCGGCCACCGGGCACCCGTTTCCGCGCGTGTT
CAGCGCCTGCAGCCGCCGCCAGCTGCGCGCCTTCTTCCGCAAGGGGGGCGGCGCTTGCCTCTCCAATG
CCCCGGACCCCGGACTCCCGGTGCCGCCGGCGCTCTGCGGGAACGGCTTCGTGGAAGCGGGCGAGGAG
TGTGACTGCGGCCCTGGCCAGGAGTGCCGCGACCTCTGCTGCTTTGCTCACAACTGCTCGCTGCGCCC
GGGGGCCCAGTGCGCCCACGGGGACTGCTGCGTGCGCTGCCTGCTGAAGCCGGCTGGAGCGCTGTGCC
GCCAGGCCATGGGTGACTGTGACCTCCCTGAGTTTTGCACGGGCACCTCCTCCCACTGTCCCCCAGAC
GTTTACCTACTGGACGGCTCACCCTGTGCCAAGGGCAGTGGCTACTGCTGGGATGGCGCATGTCCCAC
GCTGGAGCAGCAGTGCCAGCAGCTCTGGGGGCCTGGCTCCCACCCAGCTCCCGAGGCCTGTTTCCAGG
TGGTGAACTCTGCGGGAGATGCTCATGGAAACTGCGGCCAGGACAGCGAGGGCCACTTCCTGCCCTGT
GCAGGGAGGGATGCCCTGTGTGGGAAGCTGCAGTGCCAGGGTGGAAAGCCCAGCCTGCTCGCACCGCA
CATGGTGCCAGTGGACTCTACCGTTCACCTAGATGGCCAGGAAGTGACTTGTCGGGGAGCCTTGGCAC
TCCCCAGTGCCCAGCTGGACCTGCTTGGCCTGGGCCTGGTAGAGCCAGGCACCCAGTGTGGACCTAGA
ATGGTGTGCCAGAGCAGGCGCTGCAGGAAGAATGCCTTCCAGGAGCTTCAGCGCTGCCTGACTGCCTG
CCACAGCCACGGGGTTTGCAATAGCAACCATAACTGCCACTGTGCTCCAGGCTGGGCTCCACCCTTCT
GTGACAAGCCAGGCTTTGGTGGCAGCATGGACAGTGGCCCTGTGCAGGCTGAAAACCATGACACCTTC
CTGCTGGCCATGCTCCTCAGCGTCCTGCTGCCTCTGCTCCCAGGCGCCGGCCTGGCCTGGTGTTGCTA
CCGACTCCCAGGAGCCCATCTGCAGCGATGCAGCTGGGGCTGCAGAAGGGACCCTGCGTGCAGTGGCC
CCAAAGATGGCCCACACAGAGACCACCCCCTGGGCGGCGTTCACCCCATGGAGTTGGGCCCCACAGCC
ACTGGACAGCCCTGGCCCCTGGACCCTGAGAACTCTCATGAGCCCAGCAGCCACCCTGAGAAGCCTCT
GCCAGCAGTCTCGCCTGACCCCCAAGCAGATCAAGTCCAGATGCCAAGATCCTGCCTCTGTGGCGAAC
CCTGGGGAGGCCACGTGGGAAGGAAAGAGGGCTCTAAGAGGGGAGGCCCCAGACTGGGGGAGAGGCCT
GTCTGGAGCCCAGGATCACCTGGCTGTGCTGCAGAACTGGAGAAGAGAAGCTCAGCAGAAAGGAGCTG
GCATGGGGCCAACAGCAGAAAAGCAGGAGGCACGCAGAAGTGACTGGGAAGCAGGAGG

NOV14g, CG50367-03

| | | | |
|---|---|---|---|
| Protein Sequence | SEQ ID NO: 162 | 874 aa | MW at 94031.9kD |

MGWRPRRARGTPLLLLLLLLLLWPVPGAGVLQGHIPGQPVTPHWVLDGQPWRTVSLEEPVSKPDMGLV
ALEAEGQELLLELEKNHRLLAPGYIETHYGPDGQPVVLAPNHTDHCHYQGRVRGFPDSWVVLCTCSGM
SGLITLSRNASYYLRPWPPRGSKDFSTHEIFRNEQLLTWKGTCGHRDPGNKAGMTSLPGGPQSRGRRE
ARRTRKYLELYIVADHTLFLTRHRNLNHTKQRLLEVANYVDQLLRTLDIQVALTGLEVWTERDRSRVT
QDANATLWAFLQWRRGLWAQRPHDSAQLLTGRAFQGATVGLAPVEGMCRAESSGGVSTDHSELPIGAA
ATMAHEIGHSLGLSHDPDGCCVEAAAESGGCVMAAATGHPFPRVFSACSRRQLRAFFRKGGGACLSNA
PDPGLPVPPALCGNGFVEAGEECDCGPGQECRDLCCFAHNCSLRPGAQCAHGDCCVRCLLKPAGALCR
QAMGDCDLPEFCTGTSSHCPPDVYLLDGSPCAKGSGYCWDGACPTLEQQCQQLWGPGSHPAPEACFQV
VNSAGDAHGNCGQDSEGHFLPCAGRDALCGKLQCQGGKPSLLAPHMVPVDSTVHLDGQEVTCRGALAL
PSAQLDLLGLGLVEPGTQCGPRMVCQSRRCRKNAFQELQRCLTACHSHGVCNSNHNCHCAPGWAPPFC
DKPGFGGSMDSGPVQAENHDTFLLANLLSVLLPLLPGAGLAWCCYRLPGAHLQRCSWGCRRDPACSGP
KDGPHRDHPLGGVHPMELGPTATGQPWPLDPENSHEPSSHPEKPLPAVSPDPQADQVQMPRSCLCGEP
WGGHVGRKEGSKRGGPRLGERPVWSPGSPGCAAELEKRSSAERSWHGANSRKAGGTQK

| | | |
|---|---|---|
| NOV14h, CG50367-04 | SEQ ID NO: 163 | 3468 bp |

| | | |
|---|---|---|
| DNA Sequence | ORF Start: ATG at 37 | ORF Stop: TGA at 2473 |

GCGAGCCGCTGCCTAGAGGCCGAGGAGCTCACAGCTATGGGCTGGAGGCCCCGGAGAGCTCGGGGGAC
CCCGTTGCTGCTGCTGCTACTACTGCTGCTGCTCTGGCCAGTGCCAGGCGCCGGGGTGCTTCAAGGAC
ATATCCCTGGGCAGCCAGTCACCCCGCACTGGGTCCTGGATGGACAACCCTGGCGCACCGTCAGCCTG
GAGGAGCCGGTCTCGAAGCCAGACATGGGGCTGGTGGCCCTGCAGGCTGAAGGCCAGGAGCTCCTGCT
TGAGCTGGAGAAGAACCACAGGCTGCTGGCCCCAGGATACATAGAAACCCACTACGGCCCAGATGGGC
AGCCAGTGGTGCTGGCCCCCAACCACACGGATCATTGCCACTACCAAGGGCGAGTAAGGGGCTTCCCC
GACTCCTGGGTAGTCCTCTGCACCTGCTCTGGGATGAGTGGCCTGATCACCCTCAGCAGGAATGCCAG
CTATTATCTGCGTCCCTGGCCACCCCGGGGCTCCAAGGACTTCTCAACCCACGAGATCTTTCGGATGG
AGCAGCTGCTCACCTGGAAAGGAACCTGTGGCCACAGGGATCCTGGGAACAAAGCGGGCATGACCAGC
CTTCCTGGTGGTCCCCAGAGCAGGGGCAGGCGAGAAGCGCGCAGGACCCGGAAGTACCTGGAACTGTA
CATTGTGGCAGACCACACCCTGTTCTTGACTCGGCACCGAAACTTGAACCACACCAAACAGCGTCTCC
TGGAAGTCGCCAACTACGTGGACCAGCTTCTCAGGACTCTGGACATTCAGGTGGCGCTGACCGGCCTG
GAGGTGTGGACCGAGCGGGACCGCAGCCGCGTCACGCAGGACGCCAACGCCACGCTCTGGGCCTTCCT
GCAGTGGCGCCGGGGGCTGTGGGCGCAGCGGCCCCACGACTCCGCGCAGCTGCTCACGGGCCGCGCCT
TCCAGGGCGCCACAGTGGGCCTGGCGCCCGTCGAGGGCATGTGCCGCGCCGAGAGCTCGGGAGGCGTG
AGCACGGACCACTCGGAGCTCCCCATCGGCGCCGCAGCCACCATGGCCCATGAGATCGGCCACAGCCT
CGGCCTCAGCCACGACCCCGACGGCTGCTGCGTGGAGGCTGCGGCCGAGTCCGGAGGCTGCGTCATGG
CTGCGGCCACCGGGCACCCGTTTCCGCGCGTGTTCAGCGCCTGCAGCCGCCGCCAGCTGCGCGCCTTC
TTCCGCAAGGGGGGCGGCGCTTGCCTCTCCAATGCCCCGGACCCCGGACTCCCGGTGCCGCCGGCGCT
CTGCGGGAACGGCTTCGTGGAAGCGGGCGAGGAGTGTGACTGCGGCCCTGGCCAGGAGTGCCGCGACC
TCTGCTGCTTTGCTCACAACTGCTCGCTGCGCCCGGGGGCCCAGTGCGCCCACGGGGACTGCTGCGTG
CGCTGCCTGCTGAAGCCGGCTGGAGCGCTGTGCCGCCAGGCCATGGGTGACTGTGACCTCCCTGAGTT
TTGCACGGGCACCTCCTCCCACTGTCCCCCAGACGTTTACCTACTGGACGGCTCACCCTGTGCCAGGG
GCAGTGGCTACTGCTGGGATGGCGCATGTCCCACGCTGGAGCAGCAGTGCCAGCAGCTCTGGGGGCCT
GGCTCCCACCCAGCTCCCGAGGCCTGTTTCCAGGTGGTGAACTCTGCGGGAGATGCTCATGGAAACTG
CGGCCAGGACAGCGAGGGCCACTTCCTGCCCTGTGCAGGGAGGGATGCCCTGTGTGGGAAGCTGCAGT
GCCAGGGTGGAAAGCCCAGCCTGCTCGCACCGCACATGGTGCCAGTGGACTCTACCGTTCACCTAGAT
GGCCAGGAAGTGACTTGTCGGGGAGCCTTGGCACTCCCCAGTGCCCAGCTGGACCTGCTTGGCCTGGG
CCTGGTAGAGCCAGGCACCCAGTGTGGACCTAGAATGGTGTGCCAGAGCAGGCGCTGCAGGAAGAATG
CCTTCCAGGAGCTTCAGCGCTGCCTGACTGCCTGCCACAGCCACGGGGTTTGCAATAGCAACCATAAC
TGCCACTGTGCTCCAGGCTGGGCTCCACCCTTCTGTGACAAGCCAGGCTTTGGTGGCAGCATGGACAG
TGGCCCTGTGCAGGCTGAAAACCATGACACCTTCCTGCTGGCCATGCTCCTCAGCGTCCTGCTGCCTC
TGCTCCCAGGGGCCGGCCTGGCCTGGTGTTGCTACCGACTCCCAGGAGCCCATCTGCAGCGATGCAGC
TGGGGCTGCAGAAGGGACCCTGCGTGCAGTGGCCCCAAAGATGGCCCACACAGGGACCACCCCCTGGG
CGGCGTTCACCCCATGGAGTTGGGCCCCACAGCCACTGGACAGCCCTGGCCCCTGGACCCTGAGAACT
CTCATGAGCCCAGCAGCCACCCTGAGAAGCCTCTGCCAGCAGTCTCGCCTGACCCCCAAGATCAAGTC
CAGATGCCAAGATCCTGCCTCTGGTGAGAGGTAGCTCCTAAAATGAACAGATTTAAAGACAGGTGGCC
ACTGACAGCCACTCCAGGAACTTGAACTGCAGGGGCAGAGCCAGTGAATCACCGGACCTCCAGCACCT
GCAGGCAGCTTGGAAGTTTCTTCCCCGAGTGGAGCTTCGACCCACCCACTCCAGGAACCCAGAGCCAC
ATTAGAAGTTCCTGAGGGCTGGAGAACACTGCTGGGCACACTCTCCAGCTCAATAAACCATCAGTCCC
AGAAGCAAAGGTCACACAGCCCCTGACCTCCCTCACCAGTGGAGGCTGGGTAGTGCTGGCCATCCCAA
AAGGGCTCTGTCCTGGGAGTCTGGTGTGTCTCCTACATGCAATTTCCACGGACCCAGCTCTGTGGAGG
GCATGACTGCTGGCCAGAAGCTAGTGGTCCTGGGGCCCTATGGTTCGACTGAGTCCACACTCCCCTGG
AGCCTGGCTGGCCTCTGCAAACAAACATAATTTTGGGGACCTTCCTTCCTGTTTCTTCCCACCCTGTC
TTCTCCCCTAGGTGGTTCCTGAGCCCCCACCCCCAATCCCAGTGCTACACCTGAGGTTCTGGAGCTCA
GAATCTGACAGCCTCTCCCCCATTCTGTGTGTGTCGGGGGGACAGAGGGAACCATTTAAGAAAAGATA
CCAAAGTAGAAGTCAAAAGAAAGACATGTTGGCTATAGGCGTGGTGGCTCATGCCTATAATCCCAGCA
CTTTGGGAAGCCGGGGTAGGAGGATCACCAGAGGCCAGCAGGTCCACACCAGCCTGGGCAACACAGCA
AGACACCGCATCTACAGAAAAATTTTAAAATTAGCTGGGCGTGGTGGTGTGTACCTGTAGGCCTAGCT
GCTCAGGAGGCTGAAGCAGGAGGATCACTTGAGCCTGAGTTCAACACTGCAGTGAGCTATGGTGGCAC
CACTGCACTCCAGCCTGGGTGACAGAGCAAGACCCTGTCTCTAAAATAAATTTTAAAAAGACATATTA

NOV14h, CG50367-04

| | | | |
|---|---|---|---|
| Protein Sequence | SEQ ID NO: 164 | 812 aa | MW at 87666.9kD |

MGWRPRRARGTPLLLLLLLLLLWPVPGAGVLQGHIPGQPVTPHWVLDGQPWRTVSLEEPVSKPDMGLV
ALEAEGQELLLELEKNHRLLAPGYIETHYGPDGQPVVLAPNHTDHCHYQGRVRGFPDSWVVLCTCSGM
SGLITLSRNASYYLRPWPPRGSKDFSTHEIFRMEQLLTWKGTCGHRDPGNKAGMTSLPGGPQSRGRRE
ARRTRKYLELYIVADHTLFLTRHRNLNHTKQRLLEVANYVDQLLRTLDIQVALTGLEVWTERDRSRVT
QDANATLWAFLQWRRGLWAQRPHDSAQLLTGRAFQGATVGLAPVEGMCRAESSGGVSTDHSELPIGAA
ATMAHEIGHSLGLSHDPDGCCVEAAAESGGCVMAAATGHPFPRVFSACSRRQLRAFFRKGGGACLSNA
PDPGLPVPPALCGNGFVEAGEECDCGPGQECRDLCCFAHNCSLRPGAQCAHGDCCVRCLLKPAGALCR
QAMGDCDLPEFCTGTSSHCPPDVYLLDGSPCARGSGYCWDGACPTLEQQCQQLWGPGSHPAPEACFQV
VNSAGDAHGNCGQDSEGHFLPCAGRDALCGKLQCQGGKPSLLAPHMVPVDSTVHLDGQEVTCRGALAL
PSAQLDLLGLGLVEPGTQCGPRIVIVCQSRRCRKNAFQELQRCLTACHSHGVCNSNHNCHCAPGWAPPFC
DKPGFGGSMDSGPVQAENHDTFLLAMLLSVLLPLLPGAGLAWCCYRLPGAHLQRCSWGCRRDPACSGP
KDGPHRDHPLGGVHPMELGPTATGQPWPLDPENSHEPSSHPEKPLPAVSPDPQDQVQMPRSCLW

[0422] A ClustalW comparison of the above protein sequences yields the following sequence alignment shown in Table 14B.

TABLE 14B
Comparison of the NOV14 protein sequences.

| | |
|---|---|
| NOV14a | MGWRPRRARGTPLLLLLLLLLLWPVPGAGVLQGHIPGOPVTPHWVLDGQPWRTVSLEEPV |
| NOV14b | MGWRPRRARGTPLLLLLLLLLLWPVPGAGVLQGHIPGQPVTPHWVLDGQPWRTVSLEEPV |
| NOV14c | MGWRPRRARGTPLLLLLLLLLLWPVPGAGVLQGHIPGQPVTPHWVLDGQPWRTVSLEEPV |
| NOV14d | MGWRPRRARGTPLLLLLLLLLLWPVPGAGVLQGHIPGQPVTPHWVLDGQPWRTVSLEEPV |
| NOV14e | ------------------------------------------------------------- |
| NOV14f | MGWRPRRARGTPLLLLLLLLLLWPVPGAGVLQGHIPGQPVTPHWVIDGQPWRTVSLEEPV |
| NOV14g | MGWRPRRARGTPLLLLLLLLLLWPVPGAGVLQGHIPGQPVTPHWVLDGQPWRTVSLEEPV |
| NOV14h | MGWRPRRARGTPLLLLLLLLLLWPVPGAGVLQGHIPGQPVTPHWVLDGQPWRTVSLEEPV |
| NOV14a | SKPDMGLVALEAEGQELLLELEKNHRLLAPGYIETHYGPDGQPVVLAPNHTDHCHYQGRV |
| NOV14b | SKPDMGLVALEAEGQELLLELEKNHRLLAPGYIETHYGPDGQPVVLAPNHTDHCHYQGRV |
| NOV14c | SKPDMGLVALEAEGQELLLELEKNHRLLAPGYIETHYGPDGQPVVLAPNHTDHCHYQGRV |
| NOV14d | SKPDMGLVALEAEGQELLLELEKNHRLLAPGYIETHYGPDGQPVVLAPNHTDHCHYQGRV |
| NOV14e | -----------------KLELEKNHRLLAPGYIETHYGPDGQPVVLAPNHTDHCHYQGRV |
| NOV14f | SKPDMGLVALEAEGQELLLELEKNHRLLAPGYIETHYGPDGQPVVLAPNHTDHCHYQGRV |
| NOV14g | SKPDMGLVALEAEGQELLLELEKNHRLLAPGYIETHYGPDGQPVVLAPNHTDHCHYQGRV |
| NOV14h | SKPDMGLVALEAEGQELLLELEKNHRLLAPGYIETHYGPDGQPVVLAPNHTDHCHYQGRV |
| NOV14a | RGFPDSWVVLCTCSGMSGLITLSRNASYYLRPWPPRGSKDFSTHEIFRMEQLLTWKGTCG |
| NOV14b | RGFPDSWVVLCTCSGMSGLITLSRNASYYLRPWPPRGSKDFSTHEIFRMEQLLTWKGTCG |
| NOV14c | RGFPDSWVVLCTCSGMSGLITLSRNASYYLRPWPPRGSKDFSTHEIFRMEQLLTWKGTCG |
| NOV14d | RGFPDSWVVLCTCSGMSGLITLSRNASYYLRPWPPRGSKDFSTHEIFRMEQLLTWKGTCG |
| NOV14e | RGFPDSWVVLCTCSGMSGLITLSRNASYYLRPWPPRGSKDFSTHEIFRMEQLLTWKGTCG |
| NOV14f | RGFPDSWVVLCTCSGMSGLITLSRNASYYLRPWPPRGSKDFSTHEIFRMEQLLTWKGTCG |
| NOV14g | RGFPDSWVVLCTCSGMSGLITLSRNASYYLRPWPPRGSKDFSTHEIFRNEQLLTWKGTCG |
| NOV14h | RGFPDSWVVLCTCSGMSGLITLSRNASYYLRPWPPRGSKDFSTHEIFRMEQLLTWKGTCG |
| NOV14a | HRDPGNKAGMTSLPGGPQSRGRREARRTRKYLELYIVADHTLFLTRHRNLNHTKQRLLEV |
| NOV14b | HRDPGNKAGMTSLPGGPQSRGRREARRTRKYLELYIVADHTLFLTRHRNLNHTKQRLLEV |
| NOV14c | HRDPGNKAGMTSLPGGPQSRGRREARRTRKYLELYIVADHTLFLTRHRNLNHTKQRLLEV |
| NOV14d | HRDPGNKAGMTSLPGGPQSRGRREARRTRKYLELYIVADHTLFLTRHRNLNHTKQRLLEV |
| NOV14e | HRDPGNKAGMTSLPGGPQSRGRREARRTRKYLELYIVADHTLFLTRHRKLNHTKQRLLEV |
| NOV14f | HRDPGNKAGMTSLPGGPQSRGRREARRTRKYLELYIVADHTLFLTRHRNLNHTKQRLLEV |
| NOV14g | HRDPGNKAGMTSLPGGPQSRGRREARRTRKYLELYIVADHTLFLTRHRNLNHTKQRLLEV |
| NOV14h | HRDPGNKAGMTSLPGGPQSRGRREARRTRKYLELYIVADHTLFLTRHRNLNHTKQRLLEV |
| NOV14a | ANYVDQLLRTLDIQVALTGLEVWTERDRSRVTQDANATLWAFLQWRRGLWAQRPHDSAQL |
| NOV14b | ANYVDQLLRTLDIQVALTGLEVWTERDRSRVTQDANATLWAFLQWRRGLWAQRPHDSAQL |
| NOV14c | ANYVDQLLRTLDIQVALTGLEVWTERDRSRVTQDANATLWAFLQWRRGLWAQRPHDSAQL |
| NOV14d | ANYVDQLLRTLDIQVALTGLEVWTERDRSRVTQDANATLWAFLQWRRGLWAQRPHDSAQL |
| NOV14e | DNYVDQLLRTLDIQVALTGLEVWTERDRSRVTQDANATLWAFLQWRRGLWAQRPHDSAQL |
| NOV14f | ANYVDQLLRTLDIQVALTGLEVWTERDRSRVTQDANATLWAFLQWRRGLWAQRPHDSAQL |
| NOV14g | ANYVDQLLRTLDIQVALTGLEVWTERDRSRVTQDANATLWAFLQWRRGLWAQRPHDSAQL |
| NOV14h | ANYVDQLLRTLDIQVALTGLEVWTERDRSRVTQDANATLWAFLQWRRGLWAQRPHDSAQL |
| NOV14a | LTGRAFQGATVGLAPVEGMCRAESSGGVSTDHSELPIGAAATMAHEIGHSLGLSHDPDGC |
| NOV14b | LTGRAFQGATVGLAPVEGMCRAESSGGVSTDHSELPIGAAATMAHEIGHSLGLSHDPDGC |
| NOV14c | LTGRAFQGATVGLAPVEGMCRAESSGGVSTDHSELPIGAAATMAHEIGHSLGLSHDPDGC |
| NOV14d | LTTTRSSPSAP--QPPWPMRSATASASATTPTAAAWRLRPSPEAASWLRPPGTRFRACSA |
| NOV14e | LTGRAFQGATVGLAPVEGMCRAESSGGVSTDHSELPIGAAATMAHEIGHSLGLSHDPDGC |
| NOV14f | LTGRAFQGATVGLAPVEGMCRAESSGGVSTDHSELPIGAAATMAHEIGHSLGLSHDPDGC |
| NOV14g | LTGRAFQGATVGLAPVEGMCRAESSGGVSTDHSELPIGAAATMAHEIGHSLGLSHDPDGC |
| NOV14h | LTGRAFQGATVGLAPVEGMCRAESSGGVSTDHSELPIGAAATMAHEIGHSLGLSHDPDGC |
| NOV14a | CVEAAAESGGCVMAAATGHPFPRVFSACSRRQLRAFFRKGGGACLSNAPDPGLPVPPALC |
| NOV14b | CVEAAAESGGCVMAAATGHPFPRVFSACSRRQLRAFFRKGGGACLSNAPDPGLPVPPALC |
| NOV14c | CVEAAAESGGCVMAAATGHPFPRVFSACSRRQLRAFFRKGGGACLSNAPDPGLPVPPALC |
| NOV14d | PAAAASCAPSSARGAALASPMPRTPDSRCRR------RSAGTASWKRARSVTAALARSAA |
| NOV14e | CVEAAAESGGCVMAAATGHPFPRVFSACSRRQLRAFFRKGGGACLSNAPDPGLPVPPALC |
| NOV14f | CVEAAAESGGCVMAAATGHPFPRVFSACSRRQLRAFFRKGGGACLSNAPDPGLPVPPALC |
| NOV14g | CVEAAAESGGCVMAAATGHPFPRVFSACSRRQLRAFFRKGGGACLSNAPDPGLPVPPALC |
| NOV14h | CVEAAAESGGCVMAAATGHPFPRVFSACSRRQLRAFFRKGGGACLSNAPDPGLPVPPALC |
| NOV14a | GNGFVEAGEECDCGPGQECRDLCCFAHNCSLRPGAQCAHGDCCVRCLLKP-------AGA |
| NOV14b | GNGFVEAGEECDCGPGQECRDLCCFAHNCSLRPGAQCAHGDCCVRCLLKP-------AGA |
| NOV14c | GNGFVEAGEECDCGPGQECRDLCCFAHNCSLRPGAQCAHGDCCVRCLTFTYWTAHPVPGA |
| NOV14d | TSAALLTTARCARGPSAPTGTAACAAC--------------------------------- |
| NOV14e | GNGFVEAGEECDCGPGQECRDLCCFAHNCSLRPGAQCAHGDCCVRCLLKP-------AGA |
| NOV14f | GNGFVEAGEECDCGPGQECRDLCCFAHNCSLRPGAQCAHGDCCVRCLLKP-------AGA |
| NOV14g | GNGFVEAGEECDCGPGQECRDLCCFAHNCSLRPGAQCAHGDCCVRCLLKP-------AGA |
| NOV14h | GNGFVEAGEECDCGPGQECRDLCCFAHNCSLRPGAQCAHGDCCVRCLLKP-------AGA |
| NOV14a | LCRQAMGDCDLPEFCTGTSSHCPPDVYLLDGSPCARGSGYCWDGACPTLEQQCQQLWGPG |
| NOV14b | LCRQAMGDCDLPEFCTGTSSHCPPDVYLLDGSPCARGSGYCWDGACPTLEQQCQQLWGPG |
| NOV14c | VATAGMAHVPRWSSSASSSGGLAPTQLPRPVSRW-------------------------- |
| NOV14d | ------------------------------------------------------------- |
| NOV14e | LCRQAMGDCDLPEFCTGTSSHCPPDVYLLE------------------------------ |
| NOV14f | LCRQAMGDCDLPEFCTGTSSHCPPDVYLLDGSPCAKGSGYCWDGACPTLEQQCQQLWGPG |
| NOV14g | LCRQAMGDCDLPEFCTGTSSHCPPDVYLLDGSPCAKGSGYCWDGACPTLEQQCQQLWGPG |
| NOV14h | LCRQAMGDCDLPEFCTGTSSHCPPDVYLLDGSPCARGSGYCWDGACPTLEQQCQQLWGPG |
| NOV14a | SHPAPEACFQVVNSAGDAHGNCGQDSEGHFLPCAGRDALCGKLQCQGGKPSLLAPHMVPV |
| NOV14b | SHPAPEACFQVVNSAGDAHGNCGQDSEGHFLPCAGRDALCGKLQCQGGKPSLLAPHMVPV |
| NOV14c | ------------------------------------------------------------- |
| NOV14d | ------------------------------------------------------------- |
| NOV14e | ------------------------------------------------------------- |
| NOV14f | SHPAPEACFQVVNSAGDAHGNCGQDSEGHFLPCAGRDALCGKLQCQGGKPSLLAPHMVPV |
| NOV14g | SHPAPEACFQVVNSAGDAHGNCGQDSEGHFLPCAGRDALCGKLQCQGGKPSLLAPHMVPV |
| NOV14h | SHPAPEACFQVVNSAGDAHGNCGQDSEGHFLPCAGRDALCGKLQCQGGKPSLLAPHMVPV |
| NOV14a | DSTVHLDGQEVTCRGALALPSAQLDLLGLGLVEPGTQCGPRNVCQSRRCRKNAFQELQRC |
| NOV14b | DSTVHLDGQEVTCRGALALPSAQLDLLGLGLVESGTQCGPRMVCN--------------- |
| NOV14c | ------------------------------------------------------------- |
| NOV14d | ------------------------------------------------------------- |
| NOV14e | ------------------------------------------------------------- |
| NOV14f | DSTVHLDGQEVTCRGALALPSAQLDLLGLGLVEPGTQCGPRMVCQSRRCRKNAFQELQRC |
| NOV14g | DSTVHLDGQEVTCRGALALPSAQLDLLGLGLVEPGTQCGPRMVCQSRRCRKNAFQELQRC |
| NOV14h | DSTVHLDGQEVTCRGALALPSAQLDLLGLGLVEPGTQCGPRMVCQSRRCRKNAFQELQRC |
| NOV14a | LTACHSHGVCNSNHNCHCAPGWAPPFCDKPGFGGSMDSGPVQAENHDTFLLAMLLSVLLP |
| NOV14b | -----------SNHNCHCAPGWAPPFCDKPGFGGSMDSGPVQAENHDTFLLAMLLSVLLP |
| NOV14c | ------------------------------------------------------------- |
| NOV14d | ------------------------------------------------------------- |
| NOV14e | ------------------------------------------------------------- |
| NOV14f | LTACHSHGVCNSNHNCHCAPGWAPPFCDKPGFGGSMDSGPVQAENHDTFLLAMLLSVLLP |
| NOV14g | LTACHSHGVCNSNHNCHCAPGWAPPFCDKPGFGGSMDSGPVQAENHDTFLLAMLLSVLLP |
| NOV14h | LTACHSHGVCNSNHNCHCAPGWAPPFCDKPGFGGSMDSGPVQAENHDTFLLAMLLSVLLP |
| NOV14a | LLPGAGLAWCCYRLPGAHLQRCSWGCRRDPACSGPKDGPHRDHPLGGVHPMELGPTATGQ |
| NOV14b | LLPGAGLAWCCYRLPGAHLQRCSWGCRRDPACSGPKDGPNRDHPLGGVHPMELGPTATGQ |
| NOV14c | ------------------------------------------------------------- |
| NOV14d | ------------------------------------------------------------- |
| NOV14e | ------------------------------------------------------------- |
| NOV14f | LLPGAGLAWCCYRLPGAHLQRCSWGCRRDPACSGPKDGPHRDHPLGGVHPMELGPTATGQ |
| NOV14g | LLPGAGLAWCCYRLPGAHLQRCSWGCRRDPACSGPKDGPHRDHPLGGVHPMELGPTATGQ |
| NOV14h | LLPGAGLAWCCYRLPGAHLQRCSWGCRRDPACSGPKDGPHRDHPLGGVHPMELGPTATGQ |
| NOV14a | PWPLAPGAPADHIHNIYPPPFLPDPENSHEPSSHPEKPLPAVSPDPQGGSLAAWGPSPLG |
| NOV14b | PWPLDP-------------------ENSHEPSSHPEKPLPAVSPDPQ------------- |
| NOV14c | ------------------------------------------------------------- |
| NOV14d | ------------------------------------------------------------- |
| NOV14e | ------------------------------------------------------------- |
| NOV14f | PWPLDP-------------------ENSHEPSSHPEKPLPAVSPDPQGGSLAAWGPSPLG |
| NOV14g | PWPLDP-------------------ENSHEPSSHPEKPLPAVSPDPQ------------- |
| NOV14h | PWPLDP-------------------ENSHEPSSHPEKPLPAVSPDPQ------------- |
| NOV14a | DNISSSFSADQVQMPRSCLCGEPWGGHVGRKEGSKRGGPRLGERPVWSPGSPGCAAELEK |
| NOV14b | --------ADQVQMPRSCLW---------------------------------------- |
| NOV14c | ------------------------------------------------------------- |
| NOV14d | ------------------------------------------------------------- |
| NOV14e | ------------------------------------------------------------- |
| NOV14f | DNISSSFSADQVQMPRSCLCGEPWGGHVGRKEGSKRGGPRLGERPVWSPGSPGCAAELEK |
| NOV14g | --------ADQVQMPRSCLCGEPWGGHVGRKEGSKRGGPRLGERPVWSPGSPGCAAELEK |
| NOV14h | ---------DQVQMPRSCLW---------------------------------------- |
| NOV14a | RSSAERSWHGANSRKAGGTQK |
| NOV14b | --------------------- |
| NOV14c | --------------------- |
| NOV14d | --------------------- |
| NOV14e | --------------------- |
| NOV14f | RSSAERSWHGANSRKAGGTQK |
| NOV14g | RSSAERSWHGANSRKAGGTQK |
| NOV14h | --------------------- |
| NOV14a | (SEQ ID NO: 150) |
| NOV14b | (SEQ ID NO: 152) |
| NOV14C | (SEQ ID NO: 154) |
| NOV14d | (SEQ ID NO: 156) |
| NOV14e | (SEQ ID NO: 158) |
| NOV14f | (SEQ ID NO: 160) |
| NOV14g | (SEQ ID NO: 162) |
| NOV14h | (SEQ ID NO: 164) |

[0423] Further analysis of the NOV14a protein yielded the following properties-shown in Table 14C.

TABLE 14C
Protein Sequence Properties NOV14a

SignalP analysis: Cleavage site between residues 30 and 31
PSORT II analysis:

| | |
|---|---|
| PSG: | a new signal peptide prediction method |
| | N-region: length 9; pos.chg 4; neg.chg 0 |
| | H-region: length 37; peak value 11.70 |
| | PSG score: 7.30 |
| GvH: | von Heijne's method for signal seq. recognition |
| | GvH score (threshold: −2.1): 5.85 |
| | possible cleavage site: between 27 and 28 |

>>> Seems to have a cleavable signal peptide (1 to 27)

| ALOM: | Klein et al's method for TM region allocation | |
|---|---|---|
| | Init position for calculation: 28 | |
| | Tentative number of TMS(s) for the threshold 0.5: 2 | |
| | Number of TMS(s) for threshold 0.5: 1 | |
| | INTEGRAL | Likelihood = −6.16 Transmembrane 702-718 |
| | PERIPHERAL | Likelihood = 0.63 (at 126) |

| | ALOM score: −6.16 (number of TMSs: 1) |
|---|---|
| MTOP: | Prediction of membrane topology (Hartmann et al.) |
| | Center position for calculation: 13 |
| | Charge difference: −5.0 C(0.0) − N(5.0) |
| | N >= C: N-terminal side will be inside |

>>> membrane topology: type 1a (cytoplasmic tail 719 to 914)
MITDISC: discrimination of mitochondrial targeting seq

| | | | |
|---|---|---|---|
| R content: | 4 | Hyd Moment(75): | 2.69 |
| Hyd Moment(95): | 8.42 | G content: | 6 |
| D/E content: | 1 | S/T content: | 2 |
| Score: −3.80 | | | |

| | |
|---|---|
| Gavel: | prediction of cleavage sites for mitochondrial preseq |
| | R-2 motif at 19 ARG\|TP |

NUCDISC: discrimination of nuclear localization signals

pat4: RPRR (4) at 4
pat7: PRRARGT (5) at 5
pat7: PQSRGRR (3) at 197
bipartite: none
content of basic residues: 8.9%
NLS Score: 0.47

KDEL: ER retention motif in the C-terminus: none
ER Membrane Retention Signals:

XXRR-like motif in the N-terminus: GWRP

none
SKL: peroxisomal targeting signal in the C-terminus: none
PTS2: 2nd peroxisomal targeting signal: none
VAC: possible vacuolar targeting motif: none
RNA-binding motif: none
Actinin-type actin-binding motif:

type 1: none
type 2: none

NMYR: N-myristoylation pattern: none
Prenylation motif: none
memYQRL: transport motif from cell surface to Golgi: none
Tyrosines in the tail: too long tail
Dileucine motif in the tail: none
checking 63 PROSITE DNA binding motifs: none
checking 71 PROSITE ribosomal protein motifs: none
checking 33 PROSITE prokaryotic DNA binding motifs: none

| | |
|---|---|
| NNCN: | Reinhardt's method for Cytoplasmic/Nuclear discrimination |
| | Prediction: nuclear |
| | Reliability: 70.6 |
| COIL: | Lupas's algorithm to detect coiled-coil regions |
| | total: 0 residues |

Final Results (k = 9/23):

44.4%: extracellular, including cell wall
22.2%: Golgi
22.2%: endoplasmic reticulum
11.1%: plasma membrane

>> prediction for CG50367-01 is exc (k = 9)

[0424] A search of the NOV14a protein against the Geneseq database, a proprietary database that contains sequences published in patents and patent publication, yielded several homologous proteins shown in Table 14D.

TABLE 14D
Geneseq Results for NOV14a

| | | NOV14a | Identities/ | |
|---|---|---|---|---|
| | | Residues/ | Similarities for | |
| Geneseq | Protein/Organism/Length | Match | the Matched | Expect |
| Identifier | [Patent #, Date] | Residues | Region | Value |
| ABJ10597 | Human novel protein NOV7a | 1 . . . 914 | 914/914 (100%) | 0.0 |
| | SEQ ID NO: 22 - Homo sapiens, | 1 . . . 914 | 914/914 (100%) | |
| | 914 aa. [WO200259315-A2, 01- | | | |
| | AUG-2002] | | | |
| ABJ10598 | Human novel protein NOV7b | 1 . . . 914 | 894/914 (97%) | 0.0 |
| | SEQ ID NO: 24 - Homo sapiens, | 1 . . . 895 | 895/914 (97%) | |
| | 895 aa. [WO200259315-A2, 01- | | | |
| | AUG-2002] | | | |
| ABJ10599 | Human novel protein NOV7c | 1 . . . 914 | 873/914 (95%) | 0.0 |
| | SEQ ID NO: 26 - Homo sapiens, | 1 . . . 874 | 874/914 (95%) | |
| | 874 aa. [WO200259315-A2, 01- | | | |
| | AUG-2002] | | | |
| ABU58632 | Human PRO polypeptide #233 - | 1 . . . 852 | 812/852 (95%) | 0.0 |
| | Homo sapiens, 813 aa. | 1 . . . 812 | 812/852 (95%) | |
| | [US2003027272-A1, 06-FEB- | | | |
| | 2003] | | | |
| ABU57163 | Human PRO polypeptide #233 - | 1 . . . 852 | 812/852 (95%) | 0.0 |
| | Homo sapiens, 813 aa. | 1 . . . 812 | 812/852 (95%) | |
| | [US2003027280-A1, 06-FEB- | | | |
| | 2003] | | | |

[0425] In a BLAST search of public sequence databases, the NOV14a protein was found to have homology to the proteins shown in the BLASTP data in Table 14E.

TABLE 14E
Public BLASTP Results for NOV14a

| | | NOV14a | Identities/ | |
|---|---|---|---|---|
| Protein | | Residues/ | Similarities for | |
| Accession | | Match | the Matched | Expect |
| Number | Protein/Organism/Length | Residues | Portion | Value |
| Q9BZ11 | ADAM 33 precursor (EC | 1 . . . 852 | 812/852 (95%) | 0.0 |
| | 3.4.24.-) (A disintegrin and | 1 . . . 812 | 812/852 (95%) | |
| | metalloproteinase domain 33) - | | | |
| | Homo sapiens (Human), 813 aa. | | | |
| Q8N0W6 | A disintegrin and | 1 . . . 852 | 811/852 (95%) | 0.0 |
| | metalloprotease domain 33 - | 1 . . . 811 | 811/852 (95%) | |
| | Homo sapiens (Human), 812 aa. | | | |
| CAC33153 | Sequence 1 from Patent | 1 . . . 661 | 661/661 (100%) | 0.0 |
| | WO0109293 - Homo sapiens | 1 . . . 661 | 661/661 (100%) | |
| | (Human), 802 aa. | | | |
| Q8R5G5 | Metalloprotease/disintegrin | 1 . . . 805 | 571/806 (70%) | 0.0 |
| | ADAM33 - Mus musculus | 1 . . . 784 | 632/806 (77%) | |
| | (Mouse), 797 aa. | | | |
| Q923W9 | ADAM 33 precursor (EC | 1 . . . 805 | 570/806 (70%) | 0.0 |
| | 3.4.24.-) (A disintegrin and | 1 . . . 784 | 631/806 (77%) | |
| | metalloproteinase domain 33) - | | | |
| | Mus musculus (Mouse), 797 aa. | | | |

[0426] PFam analysis indicates that the NOV14a protein contains the domains shown in the Table 14F.

TABLE 14F
Domain Analysis of NOV14a

| | NOV14a | Identities/ | |
|---|---|---|---|
| | Match | Similarities | Expect |
| Pfam Domain | Region | for the Matched Region | Value |
| Pep_M12B_propep | 80 . . . 198 | 44/122 (36%) | 1.3e−31 |
| | | 93/122 (76%) | |
| Reprolysin | 210 . . . 409 | 84/206 (41%) | 3e−88 |
| | | 163/206 (79%) | |
| disintegrin | 426 . . . 501 | 38/76 (50%) | 2.5e−23 |
| | | 52/76 (68%) | |
| EGF | 653 . . . 680 | 9/47 (19%) | 0.43 |
| | | 20/47 (43%) | |

### Example 15

[0427] The NOV15 clone was analyzed, and the nucleotide and encoded polypeptide sequences are shown in Table 15A.

TABLE 15A
NOV15 Sequence Analysis

| | | |
|---|---|---|
| NOV15a, CG50718-02 | SEQ ID NO: 165 | 6881 bp |

| | | |
|---|---|---|
| DNA Sequence | ORF Start: ATG at 16 | ORF Stop: TAA at 6859 |

AAAAATGTAATAAAGATGGATTTTCTTATCATTTTTCTTTTACTTTTTATTGGGACTTCAGAGACACA
GGTAGATGTTTCCAATGTCGTTCCTGGTACTAGGTACGATATAACCATCTCTTCAATTTCTACAACAT
ACACCTCACCTGTTACTAGAATAGGGGCTTCTAATGAACCAGGGCCTCCAGTCTTCCTAGCCGGGGAA
AGAGTCGGATCTGCTGGGATTCTTCTGTCTTGGAATACACCACCTAATCCAAATGGAAGGATTATATC
TTACATTGTCAAATATAAGGAAGTTTGTCCGTGGATGCAAACAGTATATACACAAGTCAGATCAAAGC
CAGACAGTCTGGAAGTTCTTCTTACTAATCTTAATCCTGGAACAACATATGAAATTAAGGTAGCTGCT
GAAAACAGTGCTGGCATTGGAGTGTTTAGTGATCCATTTCTCTTCCAAACTGCAGAAAGTGCTCCAGG
AAAAGTGGTGGATTTCACAGGTGAGGCTGTCCCGTTCAGCAGTAAGCTGATGTGGTATACCTCGGCAA
CCAAAAAAAAAATTACCAGCTTCAAGATTAGTGTCAAGCATAACAGAAGTGGGATAGTAGTGAAAGAA
GTGTCAATCAGAGTGGAGTGCATTTTAAGTGCTTCCCTTCCTTTGCACTGCAACGAGAATAGTGAATC
TTTTTTATGGAGTACAGCCAGCCCTTCTCCAACCCTTGGTAGAGTTACACCTCCATCGCGTACCACAC
ATTCATCAAGCACGTTGACACAGAATGAGATCAGCTCTGTGAAAGAGCCTATCAGTTTTGTAGTGACA
CACTTGAGACCTTATACAACATATCTTTTTGAAGTTTCAGCTGCTACAACTGAAGCAGGTTATATTGA
TAGTACGATTGTCAGAACACCAGAATCAGTGCCTGAAGGACCACCACAAAACTGCGTAACAGGCAACA
TCACAGGAAAGTCCTTTTCAATTTTATGGGACCCACCAACTATAGTAACAGGGAAATTTAGTTATAGA
GTTGAATTATATGGACCATCAGCAGGTCGCATTTTGGATAACAGCACAAAAGACCTCAAGTTTGCATT
CACTAACCTAACACCATTTACAATGTATGATGTCTATATTGCGGCTGCGGCCAGTGCAGGGACTGGGC
CCAAGTCAAATATTTCAGTATTCACTCCACCAGATGTTCCAGGGGCAGTGTTTGATTTACAACTTGCA
GAGGTAGAATCCACGCAAGTAAGAATTACTTGGAAGAAACCACGACAACCAAATGGAATTATTAACCA
ATACCGAGTGAAAGTGCTAGTTCCAGAGACAGGAATAATTTTGGAAAATACTTTGCTCACTGGAAATA
ATGAGATAAATGACCCCATGGCTCCAGAATTGTGAACATAGTACAGCCCAATGGTAGGATTATATGAG
GGTTCAGCAGAGATGTCGTCTGACCTTCACTCACTTGCTACATTTATATATAACAGCCATCCAGATAA
AAACTTTCCTGCAAGGAATAGAGCTGAAGACCAGACTTCACCAGTTGTAACTACAAGGAATCAGTATA
TTACTGACATTGCAGCTGAACAGCTGACTTATGTTCTTATCAGATTAAGGAGATTTTGGGCTGAGACA
ATGGGGTTTTCTAGATATACAATCATGTCATCTGCAAGCAGGGACAATTTGACTTCCCCAGGCCCTTT
GTCAGCCCAAAATTTCAGAGTTACACATGTTACCATAACAGAAGTATTTTTACACTGGGATCCTCCAG
ATCCTGTATTTTTTCATCATTACCTTATCACTATTTTGGATGTTGAAAACCAATCCAAGAGTATTATT
TTAAGGACATTAAACAGTTTGTCTCTTGTCCTTATAGGGTTAAAGAAATACACAAAATACAAAATGAG
AGTGGCAGCCTCAACCCACGTTGGAGAAAGTTCTTTGTCTGAAGAAAATGACATCTTTGTGAGAACTT
CAGAAGATGAACCGGAATCATCACCTCAAGATGTCGAAGTAATTGATGTTACCGCAGATGAAATAAGG
TTGAAGTGGTCACCACCCGAAAAGCCCAATGGGATCATTATTGCTTATGAAGTGCTATATAAAAATAT
AGATACTTTATATATGAAGAACACATCAACAACAGACATAATATTAAGGAACTTAAGACCTCACACCC
TCTATAACATTTCTGTAAGGTCTTACACCAGATTTGGTCATGGCAATCAGGTATCTTCTTTACTCTCT
GTAAGGACTTCGGAGTCAGTGCCTGATAGTGCACCAGAAAATATCACTTACAAAAATATTTCTTCTGG
AGAGATTGAGCTATCATTCCTTCCCCCAAGTAGTCCCAATGGAATCATACAAAAATATACAATTTATC
TCAAGAGAAGTAATGGAAATGAGGAAAGAACTATAAATACAACCTCTTTAACCCAAAACATTAAAGGT
CTGAAGAAATATACCCAATATATCATTGAGGTGTCTGCTAGTACACTCAAAGGTGAAGGAGTTCGGAG
TGCTCCCCATAAGTATACTGACGGAGGAAGATGCTCCTGATTCTCCCCCCAAGACTTCTCTGTAAAAC
AGTTGTCTGGTGTCACGGTGAAGTTGTCATGGCAACCACCCCTGGAGCCAAATGGAATTATCCTTTAT
TACACAGTTTATGTCTGGAGATCATCATTAAAAACTATTAATGTCACTGAAATCATTGGAGAGTTATC
AGATTTGGATTATAATGTTGAATACAGTGCTTATGTAACAGCTAGCACCAGATTTGGTGATGGGAAAA
CAAGAAGCAATATCATTAGCTTTCAAACACCAGAGGGACCAAGCGATCCTCCCAAAGATGTTTATTAT
GCAAACCTCAGTTCTTCATCAATAATTCTTTTCTGGACACCTCCTTCAAAACCTAATGGGATTATACA
ATATTACTCTGTTTATTACAGAAATACTTCAGGTACTTTTATGCAGAATTTTACACTCCATGAAGTAA
CCAATGACTTTGACAATATGACTGTATCCACAATTATAGATAAACTGACAATATTCAGCTACTATACA
TTTTGGTTAACAGCAAGTACTTCAGTTGGAAATGGGAATAAAAGCAGTGACATCATTGAAGTATACAC
AGATCAAGACGTACCTGAAGGGTTTGTTGGAAACCTGACTTACGAATCCATTTCGTCAACTGCAATAA
ATGTAAGCTGGGTCCCACCGGCTCAACCAAACGGTCTAGTCTTCTACTATGTTTCACTGATCTTACAG
CAGACTCCTCGCCATGTGAGACCACCTCTTGTTACATATGAGAGAAGCATATATTTTGATAATCTGGA
AAAATACACTGATTATATATTAAAAATTACTCCATCAACAGAAAAGGGATTCTCTGATACCTATACTG
CCCAGCTATACATCAAGACTGAAGAAGATATCCCAGAAACTTCACCAATAATCAACACTTTTAAAAAC
CTTTCCTCTACCTCAGTTCTCTTATCATGGGATCCCCCAGTAAAGCCAAATGGTGCAATAATAAGTTA
TGATTTAACTTTACAAGGACCAAATGAAAATTATTCTTTCATTACTTCTGATAATTACATAATATTGG
AAGAGCTTTCACCATTTACATTATATAGCTTTTTTGCTGCCGCAAGAACTAGAAAAGGACTTGGTCCT
TCCAGTATTCTTTTCTTTTACACAGATGAGTCAGTGCCGTTAGCACCTCCACAAAATTTGACTTTAAT
CAACTGTACTTCAGACTTTGTATGGCTGAAATGGAGCCCAAGTCCTCTTCCAGGTGGTATTGTTAAAG
TATATAGTTTTAAAATTCATGAACATGAAACTGACACTATATATTATAAGAATATATCAGGATTTAAA
ACTGAAGCCAAACTTGTTGGACTGGAACCAGTCAGCACCTACTCTATCCGTGTATCTGCGTTCACCAA
AGTTGGAAATGGCAATCAATTTAGTAATGTAGTAAAATTCACAACCCAAGAATCAGTTCCAGATGTCG
TGCAGAATATGCAGTGCATGGCAACTAGCTGGCAGTCAGTTTTAGTGAAATGGGATCCACCCAAAAAG
GCAAATGGAATAATAACGCAGTATATGGTAACAGTTGAAAGGAATTCTACAAAAGTTTCTCCCCAAGA
TCACATGTACACTTTCATAAAGCTTCTTGCCAATACCTCATATGTCTTTAAAGTAAGAGCTTCAACCT
CAGCTGGTGAAGGTGATGAAAGCACATGCCATGTCAGCACACTACCTGAAACAGTTCCCAGTGTTCCC
ACAAATATTGCTTTTTCTGATGTTCAGTCAACTAGTGCAACATTGACATGGATAAGACCTGACACTAT
CCTTGGCTACTTTCAAAATTACAAAATTACCACTCAAGTTCGTGCTCAAAAATGCAAAGAATGGGAAT
CCGAAGAATGTGTTGAATATCAAAAAATTCAATACCTOTATGAAGCTCACTTAACTGAAGAGACAGTA
TATGGATTAAAGAAATTTAGATGGTATAGATTCCAAGTGGCTGCCAGCACCAATGCTGGCTATGGCAA
TGCTTCAAACTGGATTTCTACAAAAACTCTGCCTGGCCCTCCAGATGGTCCTCCTGAAAATGTTCATG
TAGTAGCAACATCACCTTTTAGCATCAGCATAAGCTGGAGTGAACCTGCTGTCATTACTGGACCAACA
TGTTATCTGATTGATGTCAAATCGGTAGATAATGATGAATTTAATATATCCTTCATCAAGTCAAATGA
AGAAAATAAAACCATAGAAATTAAAGATTTAGAAATATTCACAAGGTATTCTGTAGTGATCACTGCAT
TTACTGGGAACATTAGTGCTGCATATGTAGAAGGGAAGTCAAGTGCTGAAATGATTGTTACTACTTTA
GAATCAGCCCCAAAGGACCCACCTAACAACATGACATTTCAGAAGATACCAGATGAAGTTACAAAATT
TCAATTAACGTTCCTTCCTCCTTCTCAACCTAATGGAAATATCCAAGTATATCAAGCTCTGGTTTACC
GAGAAGATGATCCTACTGCTGTCCAGATTCACAACCTCAGTATTATACAGAAAACCAACACATTCGTC
ATTGCAATGCTAGAAGGACTAAAAGGTGGACATACATACAATATCAGTGTTTACGCAGTCAATAGTGC
TGGTGCAGGTCCAAAGGTTCCGATGAGAATAACCATGGATATCAAAGCTCCAGCACGACCAAAAAACA
AACCAACCCCTATTTATGATGCCACAGGAAAACTGCTTGTGACTTCAACAACAATTACAATCAGAATG
CCAATATGTTACTACAGTGATGATCATGGACCAATAAAAAAAATGTACAAGTGCTTGTGAACAGCAGG
AGCTCAGCATGATGGAAATGTAACAAAGTGGTATGATGCATATTTTAATAAAGCAAGGCCATATTTTA
CAAATGAAGGCTTTCCTAACCCTCCATGTACAGAAGGAAAGACAAAGTTTAGTGGCAATGAAGAAATC
TACATCATAGGTGCTGATAATGCATGCATGATTCCTGGCAATGAAGACAAAATTTGCAATGGACCACT
GAAACCAAAAAAGCAATACTTATTTAAATTTAGAGCTACAAATATTATGGGACAATTTACTGACTCTG
ATTATTCTGACCCTGTTAAGACTTTAGGCGAAGGACTTTCAGAAAGAACCGTAGAGATCATTCTTTCC
GTCACTTTGTGTATCCTTTCAATAATTCTCCTTGGAACAGCTATTTTTGCATTTGCAAGAATTCGACA
GAAGCAGAAAGAAGGTGGCACATACTCTCCTCAGGATGCAGAAATTATTGACACTAAATTGAAGCTGG
ATCAGCTCATCACAGTGGCAGACCTGGAACTGAAGGACGAGAGATTAACGCGGCCAATAAGCAAGAAA
TCCTTCCTGCAACATGTTGAAGAGCTTTGCACAAACAACAACCTAAAGTTTCAAGAAGAATTTTCGGA
ATTACGAAAATTTCTTCAGGATCTTTCTTCAACTGATGCTGATCTGCCTTGGAATAGAGCAAAAAACC
GCTTCCCAAACATAAAACCATATAATAATAACAGAGTAAAGCTGATAGCTGACGCTAGTGTTCCAGGT
TCGGATTATATTAATGCCAGCTATATTTCTGGTTATTTATGTCCAAATGAATTTATTGCTACTCAAGG
TCCACTACCAGGAACAGTTGGAGATTTTTGGAGAATGGTGTGGGAAACCAGAGCAAAAACATTAGTAA
TGCTAACACAGTGTTTTGAAAAAGGACGGATCAGATGCCATCAGTATTGGCCAGAGGACAACAAGCCA
GTTACTGTCTTTGGAGATATAGTGATTACAAAGCTAATGGAGGATGTTCAAATAGATTGGACTATCAG
GGATCTGAAAATTGAAAGGCATGGGGATTGCATGACTGTTCGACAGTGTAACTTTACTGCCTGGCCAG
AGCATGGGGTTCCTGAGAACAGCGCCCCTCTAATTCACTTTGTGAAGTTGGTTCGAGCAAGCAGGGCA
CATGACACCACACCTATGATTGTTCACTGCAGTGCTGGAGTTGGAAGAACTGGAGTTTTTATTGCTCT
GGACCATTTAACACAACATATAAATGACCATGATTTTGTGGATATATATGGACTAGTAGCTGAACTGA
GAAGTGAAAGAATGTGCATGGTGCAGAATCTGGCACAGTATATCTTTTTACACCAGTGCATTCTGGAT
CTCTTATCAAATAAGGGAAGTAATCAGCCCATCTGTTTTGTTAACTATTCAGCACTTCAGAAGATGGA
CTCTTTGGACGCCATGGAAGGTGGTGATGTTGAGCTTGAATGGGAAGAAACCACTATGTAAATATTCA
GACCAAAGGATAC

NOV15a, CG50718-02

| | | | |
|---|---|---|---|
| Protein Sequence | SEQ ID NO: 166 | 2281 aa | MW at 255030.3kD |

MDFLIIFLLLFIGTSETQVDVSNVVPGTRYDITISSISTTYTSPVTRIGASNEPGPPVFLAGERVGSA
GILLSWNTPPNPNGRIISYIVKYKEVCPWMQTVYTQVRSKPDSLEVLLTNLNPGTTYEIKVAAENSAG
IGVFSDPFLFQTAESAPGKVVDFTGEAVPFSSKLMWYTSATKKKITSFKISVKHNRSGIVVKEVSIRV
ECILSASLPLHCNENSESFLWSTASPSPTLGRVTPPSRTTHSSSTLTQNEISSVKEPISFVVTHLRPY
TTYLFEVSAATTEAGYIDSTIVRTPESVPEGPPQNCVTGNITGKSFSILWDPPTIVTGKFSYRVELYG
PSAGRILDNSTKDLKFAFTNLTPFTMYDVYIAAETSAGTGPKSNISVFTPPDVPGAVFDLQLAEVEST
QVRITWKKPRQPNGIINQYRVKVLVPETGIILENTLLTGNNEINDPMAPEIVNIVQPMVGLYEGSAEM
SSDLHSLATFIYNSHPDKNFPARNRAEDQTSPVVTTRNQYITDIAAEQLTYVLIRLRRFWAEThGFSR
YTIMSSASRDNLTSPGPLSAQNFRVTHVTITEVFLHWDPPDPVFFHHYLITILDVENQSKSIILRTLN
SLSLVLIGLKKYTKYKMRVAASTHVGESSLSEENDIFVRTSEDEPESSPQDVEVIDVTADEIRLKWSP
PEKPNGIIIAYEVLYKNIDTLYMKNTSTTDIILRNLRPHTLYNISVRSYTRFGHGNQVSSLLSVRTSE
SVPDSAPENITYKNISSGEIELSFLPPSSPNGIIQKYTIYLKRSNGNEERTINTTSLTQNIKGLKKYT
QYIIEVSASTLKGEGVRSAPISILTEEDAPDSPPQDFSVKQLSGVTVKLSWQPPLEPNGIILYYTVYV
WRSSLKTINVTETSLELSDLDYNVEYSAYVTASTRFGDGKTRSNIISFQTPEGPSDPPKDVYYANLSS
SSIILFWTPPSKPNGIIQYYSVYYRNTSGTFMQNFTLHEVTNDFDNMTVSTIIDKLTIFSYYTFWLTA
STSVGNGNKSSDIIEVYTDQDVPEGFVGNLTYESISSTAINVSWVPPAQPNGLVFYYVSLILQQTPRH
VRPPLVTYERSIYFDNLEKYTDYILKITPSTEKGFSDTYTAQLYIKTEEDIPETSPIINTFKNLSSTS
VLLSWDPPVKPNGAIISYDLTLQGPNENYSFITSDNYIILEELSPFTLYSFFAAARTRKGLGPSSILF
FYTDESVPLAPPQNLTLINCTSDFVWLKWSPSPLPGGIVKVYSFKIHEHETDTIYYKNISGFKTEAKL
VGLEPVSTYSIRVSAFTKVGNGMQFSNVVKFTTQESVPDVVQNMQCMATSWQSVLVKWDPPKKANGII
TQYMVTVERNSTKVSPQDHMYTFIKLLANTSYVFKVRASTSAGEGDESTCHVSTLPETVPSVPTNIAF
SDVQSTSATLTWIRPDTILGYFQNYKITTQLRAQKCKEWESEECVEYQKIQYLYEAHLTEETVYGLKK
FRWYRFQVAASTNAGYGNASNWISTKTLPGPPDGPPENVHVVATSPFSISISWSEPAVITGPTCYLID
VKSVDNDEFNISFIKSNEENKTIEIKDLEIFTRYSVVITAFTGNISAAYVEGKSSAEMIVTTLESAPK
DPPNNNTFQKIPDEVTKFQLTFLPPSQPNGNIQVYQALVYREDDPTAVQIHNLSIIQKTNTFVIANLE
GLKGGHTYNISVYAVNSAGAGPKVPMRITMDIKAPARPKTKPTPIYDATGKLLVTSTTITIRNPICYY
SDDHGPIKNVQVLVTETGAQHDGNVTKWYDAYFNKARPYFTNEGFPNPPCTEGKTKFSGNEEIYIIGA
DNACMIPGNEDKICNGPLKPKKQYLFKFRATNIMGQFTDSDYSDPVKTLGEGLSERTVEIILSVTLCI
LSIILLGTAIFAFARIRQKQKEGGTYSPQDAEIIDTKLKLDQLITVADLELKDERLTRPISKKSFLQH
VEELCTNNNLKFQEEFSELPKFLQDLSSTDADLPWNRAKNRFPNIKPYNNNRVKLIADASVPGSDYIN
ASYISGYLCPNEFIATQGPLPGTVGDFWRNVWETRAKTLVMLTQCFEKGRIRCHQYWPEDNKPVTVFG
DIVITKLMEDVQIDWTIRDLKIERHGDCMTVRQCNFTAWPEHGVPENSAPLIHFVKLVRASRAHDTTP
MIVHCSAGVGRTGVFIALDHLTQHINDHDFVDIYGLVAELRSERMCMVQNLAQYIFLHQCILDLLSNK
GSNQPICFVNYSAILQKMDSLDAMEGGDVELEWEETTM

| | | |
|---|---|---|
| NOV15b, CG50718-06 | SEQ ID NO: 167 | 6900 bp |

| | | |
|---|---|---|
| DNA Sequence | ORF Start: ATG at 1 | ORF Stop: TAA at 6898 |

ATGGATTTTCTTATCATTTTTCTTTTACTTTTTATTGGGACTTCAGAGACACAGGTAGATGTTTCCAA
TGTCGTTCCTGGTACTAGGTACGATATAACCATCTCTTCAATTTCTACAACATACACCTCACCTGTTA
CTAGAATAGTGACAACAAATGTAACAAAACCAGGGCCTCCAGTCTTCCTAGCCGGGGAAAGAGTCGGA
TCTGCTGGGATTCTTCTGTCTTGGAATACACCACCTAATCCAAATGGAAGGATTATATCTTACATTGT
CAAATATAAGGAAGTTTGTCCGTGGATGCAAACAGTATATACACAAGTCAGATCAAAGCCAGACAGTC
TGGAAGTTCTTCTTACTAATCTTAATCCTGGAACAACATATGAAATTAAGGTTGCTGCTGAAAACAGT
GCTGGCATTGGAGTGTTTAGTGATCCATTTCTCTTCCAAACTGCAGAAAGTGCTCCAGGAAAAGTGGT
GAATCTCACAGTTGAGGCCTACAACGCTTCAGCAGTTAAGCTGATTTGGTATTTACCTCGGCAACCAA
ATGGCAAAATTACCAGCTTCAAGATTAGTGTCAAGCATGCCAGAAGTGGGATAGTAGTGAAAGATGTC
TCAATCAGAGTAGAGGACATTTTGACTGGGAAATTGCCAGAATGCAATGAGAATAGTGAATCTTTTTT
ATGGAGTACAGCCAGCCCTTCTCCAACCCTTGGTAGAGTTACACCTCCATCGCGTACCACACATTCAT
CAAGCACGTTGACACAGAATGAGATCAGCTCTGTGTGGAAAGAGCCTATCAGTTTTGTAGTGACACAC
TTGAGACCTTATACAACATATCTTTTTGAAGTTTCAGCTGTTACAACTGAAGCAGGTTATATTGATAG
TACGATTGTCAGAACACCAGAATCAGTGCCTGAAGGACCACCACAAAACTGCGTAACAGGCAACATCA
CAGGAAAGTCCTTTTCAATTTTATGGGACCCACCAACTATAGTAACAGGGAAATTTAGTTATAGAGTT
GAATTATATGGACCATCAGGTCGCATTTTGGATAACAGCACAAAAGACCTCAAGTTTGCATTCACTAA
CCTAACACCATTTACAATGTATGATGTCTATATTTGCGGCTGAAACCAGTGCAGGGACTGGGCCAAGT
CAAATATTTCAGTATTCACTCCACCAGATGTTCCAGGGGCAGTGTTTGATTTACAACTTGCAGAGGTA
GAATCCACGCAAGTAAGAATTACTTGGAAGAAACCACGACAACCAAATGGAATTATTAACCAATACCG
AGTGAAAGTGCTAGTTCCAGAGACAGGAATAATTTTGGAAAATACTTTGCTCACTGGAAATAATGAGT
ATATAAATGACCCCATGGCTCCAGAAATTGTGAACATAGTAGAGCCAATGGTAGGATTATATGAGGGT
TCAGCAGAGATGTCGTCTGACCTTCACTCACTTGCTACATTTATATATAACAGCCATCCAGATAAAAA
CTTTCCTGCAAGGAATAGAGCTGAAGACCAGACTTCACCAGTTGTAACTACAAGGAATCAGTATATTA
CTGACATTGCAGCTGAACAGCTGTCTTATGTTATCAGGAGACTTGTACCTTTCACTGAGCACATGATT
AGTGTATCTGCTTTCACCATCATGGGAGAAGGACCACCAACAGTTCTCAGTGTTAGGACACGTCAGCA
AGTGCCAAGCTCCATTAAAATTATAAACTATAAAAATATTAGTTCTTCATCTATTTTGTTATATTGGG
ATCCTCCAGAATATCCCAATGGAAAAATAACTCACTATACGATTTATGCAATGGAATTGGATACAAAC
AGAGCATTCCAGATAACTACCATAGATAACAGCTTTCTCATAACAGGGTTAAAGAAATACACAAAATA
CAAAATGAGAGTGGCAGCCTCAACCCACGATGGAGAAAGTTCTTTGTCTGAAGAAAATGACATCTTTG
TGAGAACTTCAGAAGATGAACCGGAATCATCACCTCAAGATGTCGAAGTAATTGATGTTACCGCAGAT
GAAATAAGGTTGAAGTGGTCACCACCCGAAAAGCCCAATGGGATCATTATTGCTTATGAAGTGCTATA
TAAAAATATAGATACTTTATATATGAAGAACACATCAACAACAGACATAATATTAAGGAACTTAAGAC
CTCACACCCTCTATAACATTTCTGTAAGGTCTTACACCAGATTTGGTCATGGCAATCAGGTATCTTCT
TTACTCTCTGTAAGGACTTCGGAGACTGTGCCTGATAGTGCACCAGAAAATATCACTTACAAAAATAT
TTCTTCTGGAGAGATTGAGCTATCATTCCTTCCCCCAAGTAGTCCCAATGGAATCATAAAAAAATATA
CAATTTATCTCAAGAGAAGTAATGGAAATGAGGAAAGAACTATAAATACAACCTCTTTAACCCAAAAC
ATTAAAGTACTGAAGAAATATACCCAATATATCATTGAGGTGTCTGCTAGTACACTGAAAGGTGAAGG
AGTTCGGAGTGCTCCCATAAGTATACTGACGGAGGAAGATGCTCCTGATTCTCCCCCTCAAGACTTCT
CTGTAAAACAGTTGTCTGGTGTCACGGTGAAGTTGTCATGGCAACCACCCCTGGAGCCAAATGGAATT
ATCCTTTATTACACAGTTTATGTCTGGAATAGATCATCATTAAAAACTATTAATGTCACTGAAACATC
ATTGGAGTTATCAGATTTGGATTATAATGTTGAATACAGTGCTTATGTAACAGCTAGCACCAGATTTG
GTGATGGGAAAACAAGAAGCAATATCATTAGCTTTCAAACACCAGAGGGAGCACCAAGCGATCCTCCC
AAAGATGTTTATTATGCAAACCTCAGTTCTTCATCAATAATTCTTTTCTGGACACCTCCTTCAAAACC
TAATGGGATTATACAATATTACTCTGTTTATTACAGAAATACTTCAGGTACTTTTATGCAGAATTTTA
CACTCCATGAAGTAACCAATGACTTTGACAATATGACTGTATCCACAATTATAGATAAACTGACAATA
TTCAGCTACTATACATTTTGGTTAACAGCAAGTACTTCAGTTGGAAATGGGAATAAAAGCAGTGACAT
CATTGAAGTATACACAGATCAAGACGTCCCTGAAGGGTTTGTTGGAAACCTGACTTACGAATCCATTT
CGTCAACTGCAATAAATGTAAGCTGGGTCCCACCGGCTCAACCAAACGGTCTAGTCTTCTACTATGTT
TCACTGATCTTACAGCAGACTCCTCGCCATGTGAGACCACCTCTTGTTACATATGAGAGAAGCATATA
TTTTGATAATCTGGAAAAATACACTGATTATATATTAAAAATTACTCCATCAACAGAAAAGGGATTCT
CTGATACCTATACTGCCCAGCTATACATCAAGACTGAAGAAGATGTCCCAGAAACTTCACCAATAATC
AACACTTTTAAAAACCTTTCCTCTACCTCAGTTCTCTTATCATGGGATCCCCCAGTAAAGCCAAATGG
TGCAATAATAAGTTATGATTTAACTTTACAAGGACCAAATGAAAATTATTCTTTCATTACTTCTGATA
ATTACATAATATTGGAAGAGCTTTCACCATTTACATTATATAGCTTTTTTGCTGCCGCAAGAACTAGA
AAAGGACTTGGTCCTTCCAGTATTCTTTTCTTTTACACAGATGAGTCAGTGCCGTTAGCACCTCCACA
AAATTTGACTTTAATCAACTGTACTTCAGACTTTGTATGGCTGAAATGGAGCCCAAGTCCTCTTCCAG
GTGGTATTGTTAAAGTATATAGTTTTAAAATTCATGAACATGAAACTGACACTATATATTATAAGAAT
ATATCAGGATTTAAAACTGAAGCCAAACTTGTTGGACTGGAACCAGTCAGCACCTACTCTATCCGTGT
ATCTGCGTTCACCAAAGTTGGAAATGGCAATCAATTTAGTAATGTAGTAAAATTCACAACCCAAGAAT
CAGTTCCAGATGTCGTGCAGAATATGCAGTGCATGGCAACTAGCTGGCAGTCAGTTTTAGTGAAATGG
GATCCACCCAAAAAGGCAAATGGAATAATAACGCAGTATATGGTAACAGTTGAAAGGAATTCTACAAA
AGTTTCTCCCCAAGATCACATGTACACTTTCATAAAGCTTCTTGCCAATACCTCATATGTCTTTAAAG
TAAGAGCTTCAACCTCAGCTGGTGAAGGTGATGAAAGCACATGCCATGTCAGCACACTACCTGAAACA
GTTCCCAGTGTTCCCACAAATATTGCTTTTTCTGATGTTCAGTCAACTAGTGCAACATTGACATGGAT
AAGACCTGACACTATCCTTGGCTACTTTCAAAATTACAAAATTACCACTCAACTTCGTGCTCAAAAAT
GCAAAGAATGGGAATCCGAAGAATGTGTTGAATATCAAAAAATTCAATACCTCTATGAAGCTCACTTA
ACTGAAGAGACAGTATATGGATTAAAGAAATTTAGATGGTATAGATTCCAAGTGGCTGCCAGCACCAA
TGCTGGCTATGGCAATGCTTCAAACTGGATTTCTACAAAAACTCTGCCTGGCCCTCCAGATGGTCCTC
CTGAAAATGTTCATGTAGTAGCAACATCACCTTTTAGCATCAGCATAAGCTGGAGTGAACCTGCTGTC
ATTACTGGACCAACATGTTATCTGATTGATGTCAAATCGGTAGATAATGATGAATTTAATATATCCTT
CATCAAGTCAAATGAAGAAAATAAAACCATAGAAATTAAAGATTTAGAAATATTCACAAGGTATTCTG
TAGTGATCACTGCATTTACTGGGAACATTAGTGCTGCATATGTAGAAGGGAAGTCAAGTGCTGAAATG
ATTGTTACTACTTTAGAATCAGCCCCAAAGGACCCACCTAACAACATGACATTTCAGAAGATACCAGA
TGAAGTTACAAAATTTCAATTAACGTCCCTTCCTCCTTCTCAACCTAATGGAAATATCCAAGTATATC
AAGCTCTGGTTTACCGAGAAGATGATCCTACTGCTGTCCAGATTCACAACCTCAGTATTATACAGAAA
ACCAACACATTCGTCATTGCAATGCTAGAAGGACTAAAAGGTGGACATACATACAATATCAGTGTTTA
CGCAGTCAATAGTGCTGGTGCAGGTCCAAAGGTTCCGATGAGAATAACCATGGATATCAAAGCTCCAG
CACGACCAAAAACCAAACCAACCCCTATTTATGATGCCACAGGAAAACTGCTTGTGACTTCAACAACA
ATTACAATCAGAATGCCAATATGTTACTACAGTGATGATCATGGACCAATAAAAAATGTACAAGTGCT
TGTGACAGAAACAGGAGCTCAGCATGATGGAAATGTAACAAAGTGGTATGATGCATATTTTAATAAAG
CAAGGCCATATTTTACAAATGAAGGCTTTCCTAACCCTCCATGTACAGAAGGAAAGACAAAGTTTAGT
GGCAATGAAGAAATCTACATCATAGGTGCTGATAATGCATGCATGATTCCTGGCAATGAAGACAAAAT
TTGCAATGGACCACTGAAACCAAAAAAGCAATACTTATTTAAATTTAGAGCTACAAATATTATGGGAC
AATTTACTGACTCTGATTATTCTGACCCTGTTAAGACTTTAGGCGAAGGACTTTCAGAAAGAACCCTA
GAGATCATTCTTTCCGTCACTTTGTGTATCCTTTCAATAATTCTCCTTGGAACAGCTATTTTTGCATT
TGCAAGAATTCGACAGAAGCAGAAAGAAGGTGGCACATACTCTCCTCAGGATGCAGAAATTATTGACA
CTAAATTGAAGCTGGATCAGCTCATCACAGTGGCAGACCTGGAACTGAAGGACGAGAGATTAACGCGG
TTACTTAGTTATAGAAAATCCATCAAGCCAATAAGCAAGAAATCCTTCCTGCAACATGTTGAAGAGCT
TTGCACAAACAACAACCTAAAGTTTCAAAGAAGAATTTTCGGAATTACCAAATTTCTTCAGGATCTTT
CTTCAACTGATGCTGATCTGCCTTGGAATAGAGCAAAAAACCGCTTCCCAAACATAAAACCATATAAT
AATAACAGAGTAAAGCTGATAGCTGACGCTAGTGTTCCAGGTTCGGATTATATTAATGCCAGCTATAT
TTCTGGTTATTTATGTCCAAATGAATTTATTGCTACTCAAGGTCCACTACCAGGAACAGTTGGAGATT
TTTGGAGAATGGTGTGGGAAACCAGAGCAAAAACATTAGTAATGCTAACACAGTGTTTTGAAAAAGGA
CGGATCAGATGCCATCAGTATTGGCCAGAGGACAACAAGCCAGTTACTGTCTTTGGAGATATAGTGAT
TACAAAGCTAATGGAGGATGTTCAAATAGATTGGACTATCAGGGATCTGAAAATTGAAAGGCATGGGG
ATTGCATGACTGTTCGACAGTGTAACTTTACTGCCTGGCCAGAGCATGGGGTTCCTGAGAACAGCGCC
CCTCTAATTCACTTTGTGAAGTTGGTTCGAGCAAGCAGGGCACATGACACCACACCTATGATTGTTCA
CTGTAGTGCTGGAGTTGGAAGAACTGGAGTTTTTATTGCTCTGGACCATTTAACACAACATATAAATG
ACCATGATTTTGTGGATATATATGGACTAGTAGCTGAACTGAGAAGTGAAAGAATGTGCATGGTGCAG
AATCTGGCACAGTATATCTTTTTACACCAGTGCATTCTGGATCTCTTATCAAATAAGGGAAGTAATCA
GCCCATCTGTTTTGTTAACTATTCAGCACTTCAGAAGATGGACTCTTTGGACGCCATGGAAGGTGATG
TTGAGCTTGAATGGGAAAGAAACCACTATGTAA

NOV15b, CG50718-06

| | | | |
|---|---|---|---|
| Protein Sequence | SEQ ID NO: 168 | 2299 aa | MW at 257243.9kD |

MDFLIIFLLLFIGTSETQVDVSNVVPGTRYDITISSISTTYTSPVTRIVTTNVTKPGPPVFLAGERVG
SAGILLSWNTPPNPNGRIISYIVKYKEVCPWMQTVYTQVRSKPDSLEVLLTNLNPGTTYEIKVAAENS
AGIGVFSDPFLFQTAESAPGKVVNLTVEAYNASAVKLIWYLPRQPNGKITSFKISVKHARSGIVVKDV
SIRVEDILTGKLPECNENSESFLWSTASPSPTLGRVTPPSRTTHSSSTLTQNEISSVWKEPISFVVTH
LRPYTTYLFEVSAVTTEAGYIDSTIVRTPESVPEGPPQNCVTGNITGKSFSILWDPPTIVTGKFSYRV
ELYGPSGRILDNSTKDLKFAFTNLTPFTMYDVYIAAETSAGTGPKSNISVFTPPDVPGAVFDLQLAEV
ESTQVRITWKKPRQPNGIINQYRVKVLVPETGIILENTLLTGNNEYINDPMAPEIVNIVEPMVGLYEG
SAEMSSDLHSLATFIYNSHPDKNFPARNRAEDQTSPVVTTRNQYITDIAAEQLSYVIRRLVPFTEHMI
SVSAFTIMGEGPPTVLSVRTRQQVPSSIKIINYKNISSSSILLYWDPPEYPNGKITHYTIYAMELDTN
RAFQITTIDNSFLITGLKKYTKYKMRVAASTHDGESSLSEENDIFVRTSEDEPESSPQDVEVIDVTAD
EIRLKWSPPEKPNGIIIAYEVLYKNIDTLYMKNTSTTDIILRNLRPHTLYNISVRSYTRFGHGNQVSS
LLSVRTSETVPDSAPENITYKNISSGEIELSFLPPSSPNGIIKKYTIYLKRSNGNEERTINTTSLTQN
IKVLKKYTQYIIEVSASTLKGEGVRSAPISILTEEDAPDSPPQDFSVKQLSGVTVKLSWQPPLEPNGI
ILYYTVYVWNRSSLKTINVTETSLELSDLDYNVEYSAYVTASTRFGDGKTRSNIISFQTPEGAPSDPP
KDVYYANLSSSSIILFWTPPSKPNGIIQYYSVYYRNTSGTFMQNFTLHEVTNDFDNMTVSTIIDKLTI
FSYYTFWLTASTSVGNGNKSSDIIEVYTDQDVPEGFVGNLTYESISSTAINVSWVPPAQPNGLVFYYV
SLILQQTPRHVRPPLVTYERSIYFDNLEKYTDYILKITPSTEKGFSDTYTAQLYIKTEEDVPETSPII
NTFKNLSSTSVLLSWDPPVKPNGAIISYDLTLQGPNENYSFITSDNYIILEELSPFTLYSFFAAARTR
KGLGPPSSILFFYTDESVPLAPPQNLTLINCTSDFVWLKWSPSPLPGGIVKVYSFKIHEHTDTIYYKN
ISGFKTEAKLVGLEPVSTYSIRVSAFTKVGNGNQFSNVVKFTTQESVPDVVQNMQCMATSWQSVLVKW
DPPKKANGIITQYMVTVERNSTKVSPQDHMYTFIKLLANTSYVFKVRASTSAGEGDESTCHVSTLPET
VPSVPTNIAFSDVQSTSATLTWIRPDTILGYFQNYKITTQLRAQKCKEWESEECVEYQKIQYLYEAHL
TEETVYGLKKFRWYRFQVAASTNAGYGNASNWISTKTLPGPPDGPPENVHVVATSPFSISISWSEPAV
ITGPTCYLIDVKSVDNDEFNISFIKSNEENKTIEIKDLEIFTRYSVVITAFTGNISAAYVEGKSSAEM
IVTTLESAPKDPPNNMTFQKIPDEVTKFQLTSLPPSQPNGNIQVYQALVYREDDPTAVQIHNLSIIQK
TNTFVIAMLEGLKGGHTYNISVYAVMSAGAGPKVPMRITMDIKAPARPKTKPTPIYDATGKLLVTSTT
ITIRMPICYYSDDHGPIKNVQVLVTETGAQHDGNVTKWYDAYFNKARPYFTNEGFPNPPCTEGKTKFS
GNEEIYIIGADNACMIPGNEDKICNGPLKPKKQYLFKFRATNIMGQFTDSDYSDPVKTLGEGLSERTL
EIILSVTLCILSIILLGTAIFAFARIRQKQKEGGTYSPQDAEIIDTKLKLDQLITVADLELKDERLTR
LLSYRKSIKPISKKSFLQHVEELCTNNNLKFQEEFSELPKFLQDLSSTDADLPWNRAKNRFPNIKPYN
NNRVKLIADASVPGSDYINASYISGYLCPNEFIATQGPLPGTVGDFWRMVWETRAKTLVMLTQCFEKG
RIRCHQYWPEDNKPVTVFGDIVITKLMEDVQIDWTIRDLKIERHGDCMTVRQCNFTAWPEHGVPENSA
PLIHFVKLVRASRAHDTTPMIVHCSAGVGRTGVFIALDHLTQHINDHDFVDIYGLVAELRSERMCMVQ
NLAQYIFLHQCILDLLSNKGSNQPICFVNYSALQKMDSLDAMEGDVELEWEETTM

| | | |
|---|---|---|
| NOV15c, 258979883 | SEQ ID NO: 169 | 2220 bp |

| | | |
|---|---|---|
| DNA Sequence | ORF Start: at 1 | ORF Stop: end of sequence |

AGATCTCCTGAAGGACCACCACAAAACTGCGTAACAGGCAACATCACAGGAAAGTCCTTTTCAATTTT
ATGGGACCCACCAACTATAGTAACAGGGAAATTTAGTTATAGAGTTGAATTATATGGACCATCAGGTC
GCATTTTGGATAACAGCACAAAAGACCTCAAGTTTGCATTCACTAACCTAACACCATTTACAATGTAT
GATGTCTATATTGCGGCTGAAACCAGTGCAGGGACTGGGCCCAAGTCAAATATTTCAGTATTCACTCC
ACCAGATGTTCCAGGGGCAGTGTTTGATTTACAACTTGCAGAGGTAGAATCCACGCAAGTAAGAATTA
CTTGGAAGAAACCACGACAACCAAATGGAATTATTAACCAATACCGAGTGAAAGTGCTAGTTCCAGAG
ACAGGAATAATTTTGGAAAATACTTTGCTCACTGGAAATAATGAGTATATAAATGACCCCATGGCTCC
AGAAATTGTGAACATAGTAGAGCCAATGGTAGGATTATATGAGGGTTCAGCAGAGATGTCGTCTGACC
TTCACTCACTTGCTACATTTATATATAACAGCCATCCAGATAAAAACTTTCCTGCAAGGAATAGAGCT
GAAGACCAGACTTCACCAGTTGTAACTACAAGGAATCAGTATATTACTGACATTGCAGCTGAACAGCT
GTCTTATGTTATCAGGAGACTTGTACCTTTCACTGAGCACATGATTAGTGTATCTGCTTTCACCATCA
TGGGAGAAGGACCACCAACAGTTCTCAGTGTTAGGACACGTCAGCAAGTGCCAAGCTCCATTAAAATT
ATAAACTATAAAAATATTAGTTCTTCATCTATTTTGTTATATTGGGATCCTCCAGAATATCCCAATGG
AAAAATAACTCACTATACGATTTATGCAATGGAATTGGATACAAACAGAGCATTCCAGATAACTACCA
TAGATAACAGCTTTCTCATAACAGGGTTAAAGAAATACACAAAATACAAAATGAGAGTGGCAGCCTCA
ACCCACGATGGAGAAAGTTCTTTGTCTGAAGAAAATGACATCTTTGTGAGAACTTCAGAAGATGAACC
GGAATCATCACCTCAAGATGTCGAAGTAATTGATGTTACCGCAGATGAAATAAGGTTGAAGTGGTCAC
CACCCGAAAAGCCCAATGGGATCATTATTGCTTATGAAGTGCTATATAAAAATATAGATACTTTATAT
ATGAAGAACACATCAACAACAGACATAATATTAAGGAACTTAAGACCTCACACCCTCTATAACATTTC
TGTAAGGTCTTACACCAGATTTGGTCATGGCAATCAGGTATCTTCTTTACTCTCTGTAAGGACTTCGG
AGACTGTGCCTGATAGTGCACCAGAAAATATCACTTACAAAAATATTTCTTCTGGAGAGATTGAGCTA
TCATTCCTTCCCCCAAGTAGTCCCAATGGAATCATAAAAAAATATACAATTTATCTCAAGAGAAGTAA
TGGAAATGAGGAAAGAACTATAAATACAACCTCTTTAACCCAAACATTAAAAGTACTGAAGAAATATA
CCCAATATATCATTGAGGTGTCTGCTAGTACACTGAAAGGTGAAGGAGTTCGGAGTGCTCCCATAAGT
ATACTGACGGAGGAAGATGCTCCTGATTCTCCCCCTCAAGACTTCTCTGTAAAACAGTTGTCTGGTGT
CACGGTGAAGTTGTCATGGCAACCACCCCTGGAGCCAAATGGAATTATCCTTTATTACACAGTTTATG
TCTGGAATAGATCATCATTAAAAACTATTAATGTCACTGAAACATCATTGGAGTTATCAGATTTGGAT
TATAATGTTGAATACAGTGCTTATGTAACAGCTAGCACCAGATTTGGTGATGGGAAAACAAGAAGCAA
TATCATTAGCTTTCAAACACCAGAGGGAGCACCAAGCGATCCTCCCAAAGATGTTTATTATGCAAACC
TCAGTTCTTCATCAATAATTCTTTTCTGGACACCTCCTTCAAAACCTAATGGGATTATACAATATTAC
TCTGTTTATTACAGAAATACTTCAGGTACTTTTATGCAGAATTTTACACTCCATGAAGTAACCAATGA
CTTTGACAATATGACTGTATCCACAATTATAGATAAACTGACAATATTCAGCTACTATACATTTTGGT
TAACAGCAAGTACTTCAGTTGGAAATGGGAATAAAAGCCTCGAG

NOV15c, 258979883

| | | | |
|---|---|---|---|
| Protein Sequence | SEQ ID NO: 170 | 740 aa | MW at 82862.3kD |

RSPEGPPQNCVTGNITGKSFSILWDPPTIVTGKFSYRVELYGPSGRILDNSTKDLKFAFTNLTPFTMY
DVYIAAETSAGTGPKSNISVFTPPDVPGAVFDLQLAEVESTQVRITWKKPRQPNGIINQYRVKVLVPE
TGIILENTLLTGNNEYINDPMAPEIVNIVEPMVGLYEGSAEMSSDLHSLATFIYNSHPDKNFPARNRA
EDQTSPVVTTRNQYITDIAAEQLSYVIRRLVPFTEHMISVSAFTIMGEGPPTVLSVRTRQQVPSSIKI
INYKNISSSSILLYWDPPEYPNGKITHYTIYA4ELDTNRAFQITTIDNSFLITGLKKYTKYKMRVAAS
THDGESSLSEENDIFVRTSEDEPESSPQDVEVIDVTADEIRLKWSPPEKPNGIIIAYEVLYKNIDTLY
MKNTSTTDIILRNLRPHTLYNISVRSYTRFGHGNQVSSLLSVRTSETVPDSAPENITYKNISSGEIEL
SFLPPSSPNGIIKKYTIYLKRSNGNEERTINTTSLTQNIKVLKKYTQYIIEVSASTLKGEGVRSAPIS
ILTEEDAPDSPPQDFSVKQLSGVTVKLSWQPPLEPNGIILYYTVYVWNRSSLKTINVTETSLELSDLD
YNVEYSAYVTASTRFGDGKTRSNIISFQTPEGAPSDPPKDVYYANLSSSSIILFWTPPSKPNGIIQYY
SVYYRNTSGTFMQNFTLHEVTNDFDNMTVSTIIDKLTIFSYYTFWLTASTSVGNGNKSLE

| | | |
|---|---|---|
| NOV5d, CG50718-01 | SEQ ID NO: 171 | 6994 bp |

| | | |
|---|---|---|
| DNA Sequence | ORF Start: ATG at 31 | ORF Stop: TAA at 6874 |

TGATTCTACTGGCTGAAAAATGTAATAAAGATGGATTTTCTTATCATTTTTCTTTTACTTTTTATTGG
GACTTCAGAGACACAGGTAGATGTTTCCAATGTCGTTCCTGGTACTAGGTACGATATAACCATCTCTT
CAATTTCTACAACATACACCTCACCTGTTACTAGAATAGGGGCTTCTAATGAACCAGGGCCTCCAGTC
TTCCTAGCCGGGGAAAGAGTCGGATCTGCTGGGATTCTTCTGTCTTGGAATACACCACCTAATCCAAA
TGGAAGGATTATATCTTACATTGTCAAATATAAGGAAGTTTGTCCGTGGATGCAAACAGTATATACAC
AAGTCAGATCAAAGCCAGACAGTCTGGAAGTTCTTCTTACTAATCTTAATCCTGGAACAACATATGAA
ATTAAGGTAGCTGCTGAAAACAGTGCTGGCATTGGAGTGTTTAGTGATCCATTTCTCTTCCAAACTGC
AGAAAGTGCTCCAGGAAAAGTGGTGGATTTCACAGGTGAGGCTGTCCCGTTCAGCAGTAAGCTGATGT
GGTATACCTCGGCAACCAAAAAAAAAATTACCAGCTTCAAGATTAGTGTCAAGCATAACAGAAGTGGG
ATAGTAGTGAAAGAAGTGTCAATCAGAGTGGAGTGCATTTTAAGTGCTTCCCTTCCTTTGCACTGCAA
CGAGAATAGTGAATCTTTTTTATGGAGTACAGCCAGCCCTTCTCCAACCCTTGGTAGAGTTACACCTC
CATCGCGTACCACACATTCATCAAGCACGTTGACACAGAATGAGATCAGCTCTGTGAAAGAGCCTATC
AGTTTTGTAGTGACACACTTGAGACCTTATACAACATATCTTTTTGAAGTTTCAGCTGCTACAACTGA
AGCAGGTTATATTGATAGTACGATTGTCAGAACACCAGAATCAGTGCCTGAAGGACCACCACAAAACT
GCGTAACAGGCAACATCACAGGAAAGTCCTTTTCAATTTTATGGGACCCACCAACTATAGTAACAGGG
AAATTTAGTTATAGAGTTGAATTATATGGACCATCAGCAGGTCGCATTTTGGATAACAGCACAAAAGA
CCTCAAGTTTGCATTCACTAACCTAACACCATTTACAATGTATGATGTCTATATTGCGGCTGAAACCA
GTGCAGGGACTGGGCCCAAGTCAAATATTTCAGTATTCACTCCACCAGATGTTCCAGGGGCAGTGTTT
GATTTACAACTTGCAGAGGTAGAATCCACGCAAGTAAGAATTACTTGGAAGAAACCACGACAACCAAA
TGGAATTATTAACCAATACCGAGTGAAAGTGCTAGTTCCAGAGACAGGAATAATTTTGGAAAATACTT
TGCTCACTGGAAATAATGAGATAAATGACCCCATGGCTCCAGAAATTGTGAACATAGTACAGCCAATG
GTAGGATTATATGAGGGTTCAGCAGAGATGTCGTCTGACCTTCACTCACTTGCTACATTTATATATAA
CAGCCATCCAGATAAAAACTTTCCTGCAAGGAATAGAGCTGAAGACCAGACTTCACCAGTTGTAACTA
CAAGGAATCAGTATATTACTGACATTGCAGCTGAACAGCTGACTTATGTTCTTATCAGATTAAGGAGA
TTTTGGGCTGAGACAATGGGGTTTTCTAGATATACAATCATGTCATCTGCAAGCAGGGACAATTTGAC
TTCCCCAGGCCCTTTGTCAGCCCAAAATTTCAGAGTTACACATGTTACCATAACAGAAGTATTTTTAC
ACTGGGATCCTCCAGATCCTGTATTTTTTCATCATTACCTTATCACTATTTTGGATGTTGAAAACCAA
TCCAAGAGTATTATTTTAAGGACATTAAACAGTTTGTCTCTTGTCCTTATAGGGTTAAAGAAATACAC
AAAATACAAAATGAGAGTGGCAGCCTCAACCCACGTTGGAGAAAGTTCTTTGTCTGAAGAAAATGACA
TCTTTGTGAGAACTTCAGAAGATGAACCGGAATCATCACCTCAAGATGTCGAAGTAATTGATGTTACC
GCAGATGAAATAAGGTTGAAGTGGTCACCACCCGAAAAGCCCAATGGGATCATTATTGCTTATGAAGT
GCTATATAAAAATATAGATACTTTATATATGAAGAACACATCAACAACAGACATAATATTAAGGAACT
TAAGACCTCACACCCTCTATAACATTTCTGTAAGGTCTTACACCAGATTTGGTCATGGCAATCAGGTA
TCTTCTTTACTCTCTGTAAGGACTTCGGAGTCAGTGCCTGATAGTGCACCAGAAAATATCACTTACAA
AAATATTTCTTCTGGAGAGATTGAGCTATCATTCCTTCCCCCAAGTAGTCCCAATGGAATCATACAAA
AATATACAATTTATCTCAAGAGAAGTAATGGAAATGAGGAAAGAACTATAAATACAACCTCTTTAACC
CAAAACATTAAAGGTCTGAAGAAATATACCCAATATATCATTGAGGTGTCTGCTAGTACACTCAAAGG
TGAAGGAGTTCGGAGTGCTCCCATAAGTATACTGACGGAGGAAGATGCTCCTGATTCTCCCCCTCAAG
ACTTCTCTGTAAAACAGTTGTCTGGTGTCACGGTGAAGTTGTCATGGCAACCACCCCTGGAGCCAAAT
GGAATTATCCTTTATTACACAGTTTATGTCTGGAGATCATCATTAAAAACTATTAATGTCACTGAAAC
ATCATTGGAGTTATCAGATTTGGATTATAATGTTGAATACAGTGCTTATGTAACAGCTAGCACCAGAT
TTGGTGATGGGAAAACAAGAAGCAATATCATTAGCTTTCAAACACCAGAGGGACCAAGCGATCCTCCC
AAAGATGTTTATTATGCAAACCTCAGTTCTTCATCAATAATTCTTTTCTGGACACCTCCTTCAAAACC
TAATGGGATTATACAATATTACTCTGTTTATTACAGAAATACTTCAGGTACTTTTATGCAGAATTTTA
CACTCCATGAAGTAACCAATGACTTTGACAATATGACTGTATCCACAATTATAGATAAACTGACAATA
TTCAGCTACTATACATTTTGGTTAACAGCAAGTACTTCAGTTGGAAATGGGAATAAAAGCAGTGACAT
CATTGAAGTATACACAGATCAAGACGTACCTGAAGGGTTTGTTGGAAACCTGACTTACGAATCCATTT
CGTCAACTGCAATAAATGTAAGCTGGGTCCCACCGGCTCAACCAAACGGTCTAGTCTTCTACTATGTT
TCACTGATCTTACAGCAGACTCCTCGCCATGTGAGACCACCTCTTGTTACATATGAGAGAAGCATATA
TTTTGATAATCTGGAAAAATACACTGATTATATATTAAAAATTACTCCATCAACAGAAAAGGGATTCT
CTGATACCTATACTGCCCAGCTATACATCAAGACTGAAGAAGATATCCCAGAAACTTCACCAATAATC
AACACTTTTAAAAACCTTTCCTCTACCTCAGTTCTCTTATCATGGGATCCCCCAGTAAAGCCAAATGG
TGCAATAATAAGTTATGATTTAACTTTACAAGGACCAAATGAAAATTATTCTTTCATTACTTCTGATA
ATTACATAATATTGGAAGAGCTTTCACCATTTACATTATATAGCTTTTTTGCTGCCGCAAGAACTAGA
AAAGGACTTGGTCCTTCCAGTATTCTTTTCTTTTACACAGATGAGTCAGTGCCGTTAGCACCTCCACA
AAATTTGACTTTAATCAACTGTACTTCAGACTTTGTATGGCTGAAATGGAGCCCAAGTCCTCTTCCAG
GTGGTATTGTTAAAGTATATAGTTTTAAAATTCATGAACATGAAACTGACACTATATATTATAAGAAT
ATATCAGGATTTAAAACTGAAGCCAAACTTGTTGGACTGGAACCAGTCAGCACCTACTCTATCCGTGT
ATCTGCGTTCACCAAAGTTGGAAATGGCAATCAATTTAGTAATGTAGTAAAATTCACAACCCAAGAAT
CAGTTCCAGATGTCGTGCAGAATATGCAGTGCATGGCAACTAGCTGGCAGTCAGTTTTAGTGAAATGG
GATCCACCCAAAAAGGCAAATGGAATAATAACGCAGTATATGGTAACAGTTGAAAGGAATTCTACAAA
AGTTTCTCCCCAAGATCACATGTACACTTTCATAAAGCTTCTTGCCAATACCTCATATGTCTTTAAAG
TAAGAGCTTCAACCTCAGCTGGTGAAGGTGATGAAAGCACATGCCATGTCAGCACACTACCTGAAACA
GTTCCCAGTGTTCCCACAAATATTGCTTTTTCTGATGTTCAGTCAACTAGTGCAACATTGACATGGAT
AAGACCTGACACTATCCTTGGCTACTTTCAAAATTACAAAATTACCACTCAACTTCGTGCTCAAAAAT
GCAAAGAATGGGAATCCGAAGAATGTGTTGAATATCAAAAAATTCAATACCTCTATGAAGCTCACTTA
ACTGAAGAGACAGTATATGGATTAAAGAAATTTAGATGGTATAGATTCCAAGTGGCTGCCAGCACCAA
TGCTGGCTATGGCAATGCTTCAAACTGGATTTCTACAAAAACTCTGCCTGGCCCTCCAGATGGTCCTC
CTGAAAATGTTCATGTAGTAGCAACATCACCTTTTAGCATCAGCATAAGCTGGAGTGAACCTGCTGTC
ATTACTGGACCAACATGTTATCTGATTGATGTCAAATCGGTAGATAATGATGAATTTAATATATCCTT
CATCAAGTCAAATGAAGAAAATAAAACCATAGAAATTAAAGATTTAGAAATATTCACAAGGTATTCTG
TAGTGATCACTGCATTTACTGGGAACATTAGTGCTGCATATGTAGAAGGGAAGTCAAGTGCTGAAATG
ATTGTTACTACTTTAGAATCAGCCCCAAAGGACCCACCTAACAACATGACATTTCAGAAGATACCAGA
TGAAGTTACAAAATTTCAATTAACGTTCCTTCCTCCTTCTCAACCTAATGGAAATATCCAAGTATATC
AAGCTCTGGTTTACCGAGAAGATGATCCTACTGCTGTCCAGATTCACAACCTCAGTATTATACAGAAA
ACCAACACATTCGTCATTGCAATGCTAGAAGGACTAAAAGGTGGACATACATACAATATCAGTGTTTA
CGCAGTCAATAGTGCTGGTGCAGGTCCAAAGGTTCCGATGAGAATAACCATGGATATCAAAGCTCCAG
CACGACCAAAAACCAAACCAACCCCTATTTATGATGCCACAGGAAAACTGCTTGTGACTTCAACAACA
ATTACAATCAGAATGCCAATATGTTACTACAGTGATGATCATGGACCAATAAAAAATGTACAAGTGCT
TGTGACAGAAACAGGAGCTCAGCATGATGGAAATGTAACAAAGTGGTATGATGCATATTTTAATAAAG
CAAGGCCATATTTTACAAATGAAGGCTTTCCTAACCCTCCATGTACAGAAGGAAAGACAAAGTTTAGT
GGCAATGAAGAAATCTACATCATAGGTGCTGATAATGCATGCATGATTCCTGGCAATGAAGACAAAAT
TTGCAATGGACCACTGAAACCAAAAAAGCAATACTTATTTAAATTTAGAGCTACAAATATTATGGGAC
AATTTACTGACTCTGATTATTCTGACCCTGTTAAGACTTTAGGCGAAGGACTTTCAGAAAGAACCGTA
GAGATCATTCTTTCCGTCACTTTGTGTATCCTTTCAATAATTCTCCTTGGAACAGCTATTTTTGCATT
TGCAAGAATTCGACAGAAGCAGAAAGAAGGTGGCACATACTCTCCTCAGGATGCAGAAATTATTGACA
CTAAATTGAAGCTGGATCAGCTCATCACAGTGGCAGACCTGGAACTGAAGGACGAGAGATTAACGCGG
CCAATAAGCAAGAAATCCTTCCTGCAACATGTTGAAGAGCTTTGCACAAACAACAACCTAAAGTTTCA
AGAAGAATTTTCGGAATTACCAAAATTTCTTCAGGATCTTTCTTCAACTGATGCTGATCTGCCTTGGA
ATAGAGCAAAAAACCGCTTCCCAAACATAAAACCATATAATAATAACAGAGTAAAGCTGATAGCTGAC
GCTAGTGTTCCAGGTTCGGATTATATTAATGCCAGCTATATTTCTGGTTATTTATGTCCAAATGAATT
TATTGCTACTCAAGGTCCACTACCAGGAACAGTTGGAGATITTTGGAGAATGGTGTGGGAAACCAGAG
CAAAAACATTAGTAATGCTAACACAGTGTTTTGAAAAAGGACGGATCAGATGCCATCAGTATTGGCCA
GAGGACAACAAGCCAGTTACTGTCTTTGGAGATATAGTGATTACAAAGCTAATGGAGGATGTTCAAAT
AGATTGGACTATCAGGGATCTGAAAATTGAAAGGCATGGGGATTGCATGACTGTTCGACAGTGTAACT
TTACTGCCTGGCCAGAGCATGGGGTTCCTGAGAACAGCGCCCCTCTAATTCACTTTGTGAAGTTGGTT
CGAGCAAGCAGGGCACATGACACCACACCTATGATTGTTCACTGCAGTGCTGGAGTTGGAAGAACTGG
AGTTTTTATTGCTCTGGACCATTTAACACAACATATAAATGACCATGATTTTGTGGATATATATGGAC
TAGTAGCTGAACTGAGAAGTGAAAGAATGTGCATGGTGCAGAATCTGGCACAGTATATCTTTTTACAC
CAGTGCATTCTGGATCTCTTATCAAATAAGGGAAGTAATCAGCCCATCTGTTTTGTTAACTATTCAGC
ACTTCAGAAGATGGACTCTTTGGACGCCATGGAAGGTGGTGATGTTGAGCTTGAATGGGAAGAAACCA
CTATGTAAATATTCAGACCAAAGGATACAATTGGAAGAGATTTTTAAATCCCAGGGGCCAAAGTTACC
CCCTCATTCTTCCGAATTGAAATGTGCAACCTTAAAGAAATATCTATGCTTCTCTCAC

NOV15d, CG50718-01

| | | | |
|---|---|---|---|
| Protein Sequence | SEQ ID NO: 172 | 2281 aa | MW at 255030.3kD |

MDFLIIFLLLFIGTSETQVDVSNVVPGTRYDITISSISTTYTSPVTRIGASNEPGPPVFLAGERVGSA
GILLSWNTPPNPNGRIISYIVKYKEVCPWMQTVYTQVRSKPDSLEVLLTNLNPGTTYEIKVAAENSAG
IGVFSDPFLFQTAESAPGKVVDFTGEAVPFSSKLMWYTSATKKKITSFKISVKHNRSGIVVKEVSIRV
ECILSASLPLHCNENSESFLWSTASPSPTLGRVTPPSRTTHSSSTLTQNEISSVKEPISFVVTHLRPY
TTYLFEVSAATTEAGYIDSTIVRTPESVPEGPPQNCVTGNITGKSFSILWDPPTIVTGKFSYRVELYG
PSAGRILDNSTKDLKFAFTNLTPFTMYDVYIAAETSAGTGPKSNISVFTPPDVPGAVFDLQLAEVEST
QVRITWKKPRQPNGIINQYRVKVLVPETGIILENTLLTGNNEINDPMAPEIVNIVQPMVGLYEGSAEM
SSDLHSLATFIYNSHPDKNFPARNRAEDQTSPVVTTRNQYITDIAAEQLTYVLIRLRRFWAETMGFSR
YTIMSSASRDNLTSPGPLSAQMFRVTHVTITEVFLHWDPPDPVFFHHYLITILDVENQSKSIILRTLN
SLSLVLIGLKKYTKYKMRVAASTHVGESSLSEENDIFVRTSEDEPESSPQDVEVIDVTADEIRLKWSP
PEKPNGIIIAYEVLYKNIDTLYMKNTSTTDIILRNLRPHTLYNISVRSYTRFGNGNQVSSLLSVRTSE
SVPDSAPENITYKNISSGEIELSFLPPSSPNGIIQKYTIYLKRSNGNEERTINTTSLTQNIKGLKKYT
QYIIEVSASTLKGEGVRSAPISILTEEDAPDSPPQDFSVKQLSGVTVKLSWQPPLEPNGIILYYTVYV
WRSSLKTINVTETSLELSDLDYNVEYSAYVTASTRFGDGKTRSNIISFQTPEGPSDPPKDVYYANLSS
SSIILFWTPPSKPNGIIQYYSVYYRNTSGTFMQNFTLHEVTNDFDNMTVSTIIDKLTIFSYYTFWLTA
STSVGNGNKSSDIIEVYTDQDVPEGFVGNLTYESISSTAINVSWVPPAQPNGLVFYYVSLILQQTPRH
VRPPLVTYERSIYFDNLEKYTDYILKITPSTEKGFSDTYTAQLYIKTEEDIPETSPIINTFKNLSSTS
VLLSWDPPVKPNGAIISYDLTLQGPNENYSFITSDNYIILEELSPFTLYSFFAAARTRKGLGPSSILF
FYTDESVPLAPPQNLTLINCTSDFVWLKWSPSPLPGGIVKVYSFKIHEHETDTIYYKNISGFKTEAKL
VGLEPVSTYSIRVSAFTKVGNGNQFSNVVKFTTQESVPDVVQNMQCMATSWQSVLVKWDPPKKANGII
TQYMVTVERNSTKVSPQDHMYTFIKLLANTSYVFKVRASTSAGEGDESTCHVSTLPETVPSVPTNIAF
SDVQSTSATLTWIRPDTILGYFQNYKITTQLRAQKCKEWESEECVEYQKIQYLYEAHLTEETVYGLKK
FRWYRFQVAASTNAGYGNASNWISTKTLPGPPDGPPENVHVVATSPFSISISWSEPAVITGPTCYLID
VKSVDNDEFNISF1KSNEENKTIEIKDLEIFTRYSVVITAFTGNISAAYVEGKSSAEMIVTTLESAPK
DPPNNMTFQKIPDEVTKFQLTFLPPSQPNGNIQVYQALVYREDDPTAVQIHNLSIIQKTNTFVIAMLE
GLKGGHTYNISVYAVNSAGAGPKVPMRITMDIKAPARPKTKPTPIYDATGKLLVTSTTITIRMPICYY
SDDHGPIKNVQVLVTETGAQHDGNVTKWYDAYFNKARPYFTNEGFPNPPCTEGKTKFSGNEEIYIIGA
DNACMIPGNEDKICNGPLKPKKQYLFKFRATNIMGQFTDSDYSDPVKTLGEGLSERTVEIILSVTLCI
LSIILLGTAIFAFARIRQKQKEGGTYSPQDAEIIDTKLKLDQLITVADLELKDERLTRPISKKSFLQH
VEELCTNNNLKFQEEFSELPKFLQDLSSTDADLPWNRAKNRFPNIKPYNNNRVKLIADASVPGSDYIN
ASYISGYLCPNEFIATQGPLPGTVGDFWRMVWETRAKTLVMLTQCFEKGRIRCHQYWPEDNKPVTVFG
DIVITKLMEDVOIDWTIRDLKIERHGDCMTVROCNFTAWPEHGVPENSAPLIHFVKLVRASRAHDTTP
MIVHCSAGVGRTGVFIALDHLTQHINDHDFVDIYGLVAELRSERNGMVQNLAQYIFLHQCILDLLSNK
GSNQPICFVNYSALQKMDSLDAMEGGDVELEWEETTM

| | | |
|---|---|---|
| NOV15e, CG50718-03 | SEQ ID NO: 173 | 2739 bp |

| | | |
|---|---|---|
| DNA Sequence | ORF Start: at 7 | ORF Stop: at 2734 |

AGATCTCAGGTAGATGTTTCCAATGTCGTTCCTGGTACTAGGTACGATATAACCATCTCTTCAATTTC
TACAACATACACCTCACCTGTTACTAGAATAGTGACAACAAATGTAACAAAACCAGGGCCTCCAGTCT
TCCTAGCCGGGGAAAGAGTCGGATCTGCTGGGATTCTTCTGTCTTGGAATACACCACCTAATCCAAAT
GGAAGGATTATATCTTACATTGTCAAATATAAGGAAGTTTGTCCGTGGATGCAAACAGTATATACACA
AGTCAGATCAAAGCCAGACAGTCTGGAAGTTCTTCTTACTAATCTTAATCCTGGAACAACATATGAAA
TTAAGGTTGCTGCTGAAAACAGTGCTGGCATTGGAGTGTTTAGTGATCCATTTCTCTTCCAAACTGCA
GAAAGTGCTCCAGGAAAAGTGGTGAATCTCACAGTTGAGGCCTACAACGCTTCAGCAGTTAAGCTGAT
TTGGTATTTACCTCGGCAACCAAATGGCAAAATTACCAGCTTCAAGATTAGTGTCAAGCATGCCAGAA
GTGGGATAGTAGTGAAAGATGTCTCAATCAGAGTAGAGGACATTTTGACTGGGAAATTGCCAGAATGC
AATGAGAATAGTGAATCTTTTTTATGGAGTACAGCCAGCCCTTCTCCAACCCTTGGTAGAGTTACACC
TCCATCGCGTACCACACATTCATCAAGCACGTTGACACAGAATGAGATCAGCTCTGTGTGGAAAGAGC
CTATCAGTTTTGTAGTGACACACTTGAGACCTTATACAACATATCTTTTTGAAGTTTCAGCTGTTACA
ACTGAAGCAGGTTATATTGATAGTACGATTGTCAGAACACCAGAATCAGTGCCTGAAGGACCACCACA
AAACTGCGTAACAGGCAACATCACAGGAAAGTCCTTTTCAATTTTATGGGACCCACCAACTATAGTAA
CAGGGAAATTTAGTTATAGAGTTGAATTATATGGACCATCAGGTCGCATTTTGGATAACAGCACAAAA
GACCTCAAGTTTGCATTCACTAACCTAACACCATTTACAATGTATGATGTCTATATTGCGGCTGAAAC
CAGTGCAGGGACTGGGCCCAAGTCAAATATTTCAGTATTCACTCCACCAGATGTTCCAGGGGCAGTGT
TTGATTTACAACTTGCAGAGGTAGAATCCACGCAAGTAAGAATTACTTGGAAGAAACCACGACAACCA
AATGGAATTATTAACCAATACCGAGTGAAAGTGCTAGTTCCAGAGACAGGAATAATTTTGGAAAATAC
TTTGCTCACTGGAAATAATGAGTATATAAATGACCCCATGGCTCCAGAAATTGTGAACATAGTAGAGC
CAATGGTAGGATTATATGAGGGTTCAGCAGAGATGTCGTCTGACCTTCACTCACTTGCTACATTTATA
TATAACAGCCATCCAGATAAAAACTTTCCTGCAAGGAATAGAGCTGAAGACCAGACTTCACCAGTTGT
AACTACAAGGAATCAGTATATTACTGACATTGCAGCTGAACAGCTGTCTTATGTTATCAGGAGACTTG
TACCTTTCACTGAGCACATGATTAGTGTATCTGCTTTCACCATCATGGGAGAAGGACCACCAACAGTT
CTCAGTGTTAGGACACGTCAGCAAGTGCCAAGCTCCATTAAAATTATAAACTATAAAAATATTAGTTC
TTCATCTATTTTGTTATATTGGGATCCTCCAGAATATCCCAATGGAAAAATAACTCACTATACGATTT
ATGCAATGGAATTGGATACAAACAGAGCATTCCAGATAACTACCATAGATAACAGCTTTCTCATAACA
GGGTTAAAGAAATACACAAAATACAAAATGAGAGTGGCAGCCTCAACCCACGATGGAGAAAGTTCTTT
GTCTGAAGAAAATGACATCTTTGTGAGAACTTCAGAAGATGAACCGGAATCATCACCTCAAGATGTCG
AAGTAATTGATGTTACCGCAGATGAAATAAGGTTGAAGTGGTCACCACCCGAAAAGCCCAATGGGATC
ATTATTGCTTATGAAGTGCTATATAAAAATATAGATACTTTATATATGAAGAACACATCAACAACAGA
CATAATATTAAGGAACTTAAGACCTCACACCCTCTATAACATTTCTGTAAGGTCTTACACCAGATTTG
GTCATGGCAATCAGGTATCTTCTTTACTCTCTGTAAGGACTTCGGAGACTGTGCCTGATAGTGCACCA
GAAAATATCACTTACAAAAATATTTCTTCTGGAGAGATTGAGCTATCATTCCTTCCCCCAAGTAGTCC
CAATGGAATCATACAAAAATATACAATTTATCTCAAGAGAAGTAATGGAAATGAGGAAAGAACTATAA
ATACAACCTCTTTAACCCAAAACATTAAAGGACTGAAGAAATATACCCAATATATCATTGAGGTGTCT
GCTAGTACACTCAAAGGTGAAGGAGTTCGGAGTGCTCCCATAAGTATACTGACGGAGGAAGATGCTCC
TGATTCTCCCCCTCAAGACTTCTCTGTAAAACAGTTGTCTGGTGTCACGGTGAAGTTGTCATGGCAAC
CACCCCTGGAGCCAAATGGAATTATCCTTTATTACACAGTTTATGTCTGGAATAGATCATCATTAAAA
ACTATTAATGTCACTGAAACATCATTGGAGTTATCAGATTTGGATTATAATGTTGAATACAGTGCTTA
TGTAACAGCTAGCCTCGAG

NOV15e, CG50718-03

| | | | |
|---|---|---|---|
| Protein Sequence | SEQ ID NO: 174 | 909 aa | MW at 100812.8kD |

QVDVSNVVPGTRYDITISSISTTYTSPVTRIVTTNVTKPGPPVFLAGERVGSAGILLSWNTPPNPNGR
IISYIVKYKEVCPWMQTVYTQVRSKPDSLEVLLTNLNPGTTYEIKVAAENSAGIGVFSDPFLFQTAES
APGKVVNLTVEAYNASAVKLIWYLPRQPNGKITSFKISVKHARSGIVVKDVSIRVEDILTGKLPECNE
NSESFLWSTASPSPTLGRVTPPSRTThSSSTLTQNEISSVWKEPISFVVTHLRPYTTYLFEVSAVTTE
AGYIDSTIVRTPESVPEGPPQNCVTGNITGKSFSILWDPPTIVTGKFSYRVELYGPSGRILDNSTKDL
KFAFTNLTPFTMYDVYIAAETSAGTGPKSNISVFTPPDVPGAVFDLQLAEVESTQVRITWKKPRQPNG
IINQYRVKVLVPETGIILENTLLTGNNEYINDPMAPEIVNIVEPMVGLYEGSAEMSSDLHSLATFIYN
SHPDKNFPARNRAEDQTSPVVTTRNQYITDIAAEQLSYVIRRLVPFTEHMISVSAFTIMGEGPPTVLS
VRTRQQVPSSIKIINYKRNSSSSILLYWDPPEYPNGKITHYTIYAMELDTNRAFQITTIDNSFLITGL
KKYTKYKMRVAASTHDGESSLSEENDIFVRTSEDEPESSPQDVEVIDVTADEIRLKWSPPEKPNGIII
AYEVLYKNIDTLYMKNTSTTDIILRNLRPHTLYNISVRSYTRFGHGNQVSSLLSVRTSETVPDSAPEN
ITYKNISSGEIELSFLPPSSPNGIIQKYTIYLKRSNGNEERTINTTSLTQNIKGLKKYTQYIIEVSAS
TLKGEGVRSAPISILTEEDAPDSPPQDFSVKQLSGVTVKLSWQPPLEPNGIELYYTVYVWNRSSLKTI
NVTETSLELSDLDYNVEYSAYVTAS

| | | |
|---|---|---|
| NOV15f, CG50718-04 | SEQ ID NO: 175 | 2565 bp |

| | | |
|---|---|---|
| DNA Sequence | ORF Start: at 7 | ORF Stop: at 2560 |

AGATCTCCTGAAGGGTTTGTTGGAAACCTGACTTACGAATCCATTTCGTCAACTGCAATAAATGTAAG
CTGGGTCCCACCGGCTCAACCAAACGGTCTAGTCTTCTACTATGTTTCACTGATCTTACAGCAGACTC
CTCGCCATGTGAGACCACCTCTTGTTACATATGAGAGAAGCATATATTTTGATAATCTGGAAAAATAC
ACTGATTATATATTAAAAATTACTCCATCAACAGAAAAGGGATTCTCTGATACCTATACTGCCCAGCT
ATACATCAAGACTGAAGAAGATGTCCCAGAAACTTCACCAATAATCAACACTTTTAAAAACCTTTCCT
CTACCTCAGTTCTCTTATCATGGGATCCCCCAGTAAAGCCAAATGGTGCAATAATAAGTTATGATTTA
ACTTTACAAGGACCAAATGAAAATTATTCTTTCATTACTTCTGATAATTACATAATATTGGAAGAGCT
TTCACCATTTACATTATATAGCTTTTTTGCTGCCGCAAGAACTAGAAAAGGACTTGGTCCTTCCAGTA
TTCTTTTCTTTTACACAGATGAGTCAGTGCCGTTAGCACCTCCACAAAATTTGACTTTAATCAACTGT
ACTTCAGACTTTGTATGGCTGAAATGGAGCCCAAGTCCTCTTCCAGGTGGTATTGTTAAAGTATATAG
TTrTAAAATTCATGAACATGAAACTGACACTATATATTATAAGAATATATCAGGATTTAAAACTGAAG
CCAAACTTGTTGGACTGGAACCAGTCAGCACCTACTCTATCCGTGTATCTGCGTTCACCAAAGTTGGA
AATGGCAATCAATTTAGTAATGTAGTAAAATTCACAACCCAAGAATCAGTTCCAGATGTCGTGCAGAA
TATGCAGTGCATGGCAACTAGCTGGCAGTCAGTTTTAGTGAAATGGGATCCACCCAAAAAGGCAAATG
GAATAATAACGCAGTATATGGTAACAGTTGAAAGGAATTCTACAAAAGTTTCTCCCCAAGATCACATG
TACACTTTCATAAAGCTTCTTGCCAATACCTCATATGTCTTTAAAGTAAGAGCTTCAACCTCAGCTGG
TGAAGGTGATGAAAGCACATGCCATGTCAGCACACTACCTGAAACAGTTCCCAGTGTTCCCACAAATA
TTGCTTTTTCTGATGTTCAGTCAACTAGTGCAACATTGACATGGATAAGACCTGACACTATCCTTGGC
TACTTTCAAAATTACAAAATTACCACTCAACTTCGTGCTCAAAAATGCAAAGAATGGGAATCCGAAGA
ATGTGTTGAATATCAAAAAATTCAATACCTCTATGAAGCTCACTTAACTGAAGAGACAGTATATGGAT
TAAAGAAATTTAGATGGTATAGATTCCAAGTGGCTGCCAGCACCAATGCTGGCTATGGCAATGCTTCA
AACTGGATTTCTACAAAAACTCTGCCTGGCCCTCCAGATGGTCCTCCTGAAAATGTTCATGTAGTAGC
AACATCACCTTTTAGCATCAGCATAAGCTGGAGTGAACCTGCTGTCATTACTGGACCAACATGTTATC
TGATTGATGTCAAATCGGTAGATAATGATGAATTTAATATATCCTTCATCAAGTCAAATGAAGAAAAT
AAAACCATAGAAATTAAAGATTTAGAAATATTCACAAGGTATTCTGTAGTGATCACTGCATTTACTGG
GAACATTAGTGCTGCATATGTAGAAGGGAAGTCAAGTGCTGAAATGATTGTTACTACTTTAGAATCAG
CCCCAAAGGACCCACCTAACAACATGACATTTCAGAAGATACCAGATGAAGTTACAAAATTTCAATTA
ACGTCCCTTCCTCCTTCTCAACCTAATGGAAATATCCAAGTATATCAAGCTCTGGTTTACCGAGAAGA
TGATCCTACTGCTGTCCAGATTCACAACCTCAGTATTATACAGAAAACCAACACATTCGTCATTGCAA
TGCTAGAAGGACTAAAAGGTGGACATACATACAATATCAGTGTTTACGCAGTCAATAGTGCTGGTGCA
GGTCCAAAGGTTCCGATGAGAATAACCATGGATATCAAAGCTCCAGCACGACCAAAAACCAAACCAAC
CCCTATTTATGATGCCACAGGAAAACTGCTTGTGACTTCAACAACAATTACAATCAGAATGCCAATAT
GTTACTACAGTGATGATCATGGACCAATAAAAAATGTACAAGTGCTTGTGACAGAAACAGGAGCTCAG
CATGATGGAAATGTAACAAAGTGGTATGATGCATATTTTAATAAAGCAAGGCCATATTTTACAAATGA
AGGCTTTCCTAACCCTCCATGTACAGAAGGAAAGACAAAGTTTAGTGGCAATGAAGAAATCTACATCA
TAGGTGCTGATAATGCATGCATGATTCCTGGCAATGAAGACAAAATTTGCAATGGACCACTGAAACCA
AAAAAGCAATACTTATTTAAATTTAGAGCTACAAATATTATGGGACAATTTACTGACTCTGATTATTC
TGACCCTGTTAAGACTTTAGGCGAAGGACTTTCAGAAAGAACCCTCGAG

NOV15f, CG50718-04

| | | | |
|---|---|---|---|
| Protein Sequence | SEQ ID NO: 176 | 851 aa | MW at 95001.6kD |

PEGFVGNLTYESISSTAINVSWVPPAQPNGLVFYYVSLILQQTPRHVRPPLVTYERSIYFDNLEKYTD
YILKITPSTEKGFSDTYTAQLYIKTEEDVPETSPIINTFKNLSSTSVLLSWDPPVKPNGAIISYDLTL
QGPNENYSFITSDNYIILEELSPFTLYSFFAAARTRKGLGPSSILFFYTDESVPLAPPQNLTLINCTS
DFVWLKWSPSPLPGGIVKVYSFKIHEHETDTIYYKNISGFKTEAKLVGLEPVSTYSIRVSAFTKVGNG
NQFSNVVKFTTQESVPDVVQNNQCMATSWQSVLVKWDPPKKANGIITQYMVTVERNSTKVSPQDHMYT
FIKLLANTSYVFKVRASTSAGEGDESTCHVSTLPETVPSVPTNIAFSDVQSTSATLTWIRPDTILGYF
QNYKITTQLRAQKCKEWESEECVEYQKIQYLYEAHLTEETVYGLKKFRWYRFQVAASTNAGYGNASNW
ISTKTLPGPPDGPPENVHVVATSPFSISISWSEPAVITGPTCYLIDVKSVDMDEFNISFIKSNEENKT
IEIKDLEIFTRYSVVITAFTGNISAAYVEGKSSAEMIVTTLESAPKDPPNNMTFQKIPDEVTKFQLTS
LPPSQPNGNIQVYQALVYREDDPTAVQIHNLSIIQKTNTFVIAMLEGLKGGHTYNISVYAVNSAGAGP
KVPMRITMDIKAPARPKTKPTPIYDATGKLLVTSTTITIRMPICYYSDDHGPIKNVQVLVTETGAQHD
GNVTKWYDAYFNKARPYFTNEGFPNPPCTEGKTKFSGNEEIYIIGADNACMIPGNEDKICNGPLKPKK
QYLFKFRATNIMGQFTDSDYSDPVKTLGEGLSERT

| | | |
|---|---|---|
| NOV15g, CG50718-05 | SEQ ID NO: 177 | 6903 bp |

| | | |
|---|---|---|
| DNA Sequence | ORF Start: ATG at 1 | ORF Stop: TAA at 6901 |

ATGGATTTTCTTATCATTTTTCTTTTACTTTTTATTGGGACTTCAGAGACACAGGTAGATGTTTCCAA
TGTCGTTCCTGGTACTAGGTACGATATAACCATCTCTTGAATTTCTACAACATACACCTCACCTGTTA
CTAGAATAGTGACAACAAATGTAACAGAACCAGGGCCTCCAGTCTTCCTAGCCGGGGAAAGAGTCGGA
TCTGCTGGGATTCTTCTGTCTTGGAATACACCACCTAATCCAAATGGAAGGATTATATCTTACATTGT
CAAATATAAGGAAGTTTGTCCGTGGATGCAAACAGTATATACACAAGTCAGATCAAAGCCAGACAGTC
TGGAAGTTCTTCTTACTAATCTTAATCCTGGAACAACATATGAAATTAAGGTAGCTGCTGAAAACAGT
GCTGGCATTGGAGTGTTTAGTGATCCATTTCTCTTCCAAACTGCAGAAAGTCCAGCTCCAGGAAAAGT
GGTGAATCTCACAGTTGAGGCCTACAACGCTTCAGCAGTTAAGCTGATTTGGTATTTACCTCGGCAAC
CAAATGGCAAAATTACCAGCTTCAAGATTAGTGTCAAGCATGCCAGAAGTGGGATAGTAGTGAAAGAT
GTCTCAATCAGAGTAGAGGACATTTTGACTGGGAAATTGCCAGAATGCAATGTAGAGAATAGTGAATC
TTTTTTATGGAGTACAGCCAGCCCTTCTCCAACCCTTGGTAGAGTTACACCTCCATCGCGTACCACAC
ATTCATCAAGCACGTTGACACAGAATGAGATCAGCTCTGTGTGGAAAGAGCCTATCAGTTTTGTAGTG
ACACACTTGAGACCTTATACAACATATCTTTTTGAAGTTTCAGCTGCTACAACTGAAGCAGGTTATAT
TGATAGTACGATTGTCAGAACACCAGAATCAGTGCCTGAAGGACCACCACAAAACTGCGTAACAGGCA
ACATCACAGGAAAGTCCTTTTCAATTTTATGGGACCCACCAACTATAGTAACAGGGAAATTTAGTTAT
AGAGTTGAATTATATGGACCATCAGGTCGCATTTTGGATAACAGCACAAAAGACCTCAAGTTTGCATT
CACTAACCTAACACCATTTACAATGTATGATGTCTATATTGCGGCTGAAACCAGTGCAGGGACTGGGC
CCAAGTCAAATATTTCAGTATTCACTCCACCAGATGTTCCAGGGGCAGTGTTTGATTTACAACTTGCA
GAGGTAGAATCCACGCAAGTAAGAATTACTTGGAAGAAACCACGACAACCAAATGGAATTATTAACCA
ATACCGAGTGAAAGTGCTAGTTCCAGAGACAGGAATAATTTTGGAAAATACTTTGCTCACTGGAAATA
ATGAGATAAATGACCCCATGGCTCCAGAAATTGTGAACATAGTAGAGCCAATGGTAGGATTATATGAG
GGTTCAGCAGAGATGTCGTCTGACCTTCACTCACTTGCTACATTTATATATAACAGCCATCCAGATAA
AAACTTTCCTGCAAGGAATAGAGCTGAAGACCAGACTTCACCAGTTGTAACTACAAGGAATCAGTATA
TTACTGACATTGCAGCTGAACAGCTGTCTTATGTTATCAGGAGACTTGTACCTTTCACTGAGCACATG
ATTAGTGTATCTGCTTTCACCATCATGGGAGAAGGACCACCAACAGTTCTCAGTGTTAGGACACGTCA
GCAAGTGCCAAGCTCCATTAAAATTATAAACTATAAAAATATTAGTTCTTCATCTATTTTGTTATATT
GGGATCCTCCAGAATATCCCAATGGAAAAATAACTCACTATACGATTTATGCAATGGAATTGGATACA
AACAGAGCATTCCAGATAACTACCATAGATAACAGCTTTCTCATAACAGGTATAGGGTTAAAGAAATA
CACAAAATACAAAATGAGAGTGGCAGCCTCAACCCACGTTGGAGAAAGTTCTTTGTCTGAAGAAAATG
ACATCTTTGTGAGAACTTCAGAAGATGAACCGGATCATCACCTCACCGATGTCGAAGTAATTGATGTT
ACCGCAGATGAAATAAGGTTGAAGTGGTCACCACCCGAAAAGCCCAATGGGATCATTATTGCTTATGA
AGTGCTATATAAAAATATAGATACTTTATATATGAAGAACACATCAACAACAGACATAATATTAAGGA
ACTTAAGACCTCACACCCTCTATAACATTTCTGTAAGGTCTTACACCAGATTTGGTCATGGCAATCAG
GTATCTTCTTTACTCTCTGTAAGGACTTCGGAGACTGTGCCTGATAGTGCACCAGAAAATATCACTTA
CAAAAATATTTCTTCTGGAGAGATTGAGCTATCATTCCTTCCCCCAAGTAGTCCCAATGGAATCATAC
AAAAATATACAATTTATCTCAAGAGAAGTAATGGAAATGAGGAAAGAACTATAAATACAACCTCTTTA
ACCCAAAACATTCTGAAGAAATATACCCAATATATCATTGAGGTGTCTGCTAGTACACTCAAAGGTGA
AGGAGTTCGGAGTGCTCCCATAAGTATACTGACGGAGGAAGATGCTCCTGATTCTCCCCCTCAAGACT
TCTCTGTAAAACAGTTGTCTGGTGTCACGGTGAAGTTGTCATGGCAACCACCCCTGGAGCCAAATGGA
ATTATCCTTTATTACACAGTTTATGTCTGGAGGAATAGATCATCATTAAAAACTATTAATGTCACTGA
AACATCATTGGAGTTATCAGATTTGGATTATAATGTTGAATACAGTGCTTATGTAACAGCTAGCACCA
GATTTGGTGATGGGAAAACAAGAAGCAATATCATTAGCTTTCAAACACCAGAGGGACCAAGCGATCCT
CCCAAAGATGTTTATTATGCAAACCTCAGTTCTTCATCAATAATTCTTTTCTGGACACCTCCTTCAAA
ACCTAATGGGATTATACAATATTACTCTGTTTATTACAGAATTACTTCAGGTACTTTTATGCAGAATT
TTACACTCCATGAAGTAACCAATGACTTTGACAATATGACTGTATCCACAATTATAGATAAACTGACA
ATATTCAGCTACTATACATTTTGGTTAACAGCAAGTACTTCAGTTGGAAATGGGAATAAAAGCAGTGA
CATCATTGAAGTATACACAGATCAAGACGTCCCTGAAGGGTTTGTTGGAAACCTGACTTACGAATCCA
TTTCGTCAACTGCAATAAATGTAAGCTGGGTCCCACCGGCTCAACCAAACGGTCTAGTCTTCTACTAT
GTTTCACTGATCTTACAGCAGACTCCTCGCCATGTGAGACCACCTCTTGTTACATATGAGAGAAGCAT
ATATTTTGATAATCTGGAAAAATACACTGATTATATATTAAAAATTACTCCATCAACAGAAAAGGGAT
TCTCTGATACCTATACTGCCCAGCTATACATCAAGACTGAAGAAGATGTCCCAGAAACTTCACCAATA
ATCAACACTTTTAAAAACCTTTCCTCTACCTCAGTTCTCTTATCATGGGATCCCCCAGTAAAGCCAAA
TGGTGCAATAATAAGTTATGATTTAACTTTACAAGGACCAAATGAAAATTATTCTTTCATTACTTCTG
ATAATTACATAATATTGGAAGAGCTTTCACCATTTACATTATATAGCTTTTTTGCTGCCGCAAGAACT
AGAAAAGGACTTGGTCCTTCCAGTATTCTTTTCTTTTACACAGATGAGTCAGTGCCGTTAGCACCTCC
ACAAAATTTGACTTTAATCAACTGTACTTCAGACTTTGTATGGCTGAAATGGAGCCCAAGTCCTCTTC
CAGGTGGTATTGTTAAAGTATATAGTTTTAAAATTCATGAACATGAAACTGACACTATATATTATAAG
AATATATCAGGATTTAAAACTGAAGCCAAACTTGTTGGACTGGAACCAGTCAGCACCTACTCTATCCG
TGTATCTGCGTTCACCAAAGTTGGAAATGGCAATCAATTTAGTAATGTAGTAAAATTCACAACCCAAG
AATCAGTTCCAGATGTCGTGCAGAATATGCAGTGCATGGCAACTAGCTGGCAGTCAGTTTTAGTGAAA
TGGGATCCACCCAAAAAGGCAAATGGAATAATAACGCAGTATATGGTAACAGTTGAAAGGAATTCTAC
AAAAGTTTCTCCCCAAGATCACATGTACACTTTCATAAAGCTTCTTGCCAATACCTCATATGTCTTTA
AAGTAAGAGCTTCAACCTCAGCTGGTGAAGGTGATGAAAGCACATGCCATGTCAGCACACTACCTGAA
ACAGTTCCCAGTGTTCCCACAAATATTGCTTTTTCTGATGTTCAGTCAACTAGTGCAACATTGACATG
GATAAGACCTGACACTATCCTTGGCTACTTTCAAAATTACAAAATTACCACTCAACTTCGTGCTCAAA
AATGCAAAGAATGGGAATCCGAAGAATGTGTTGAATATCAAAAAATTCAATACCTCTATGAAGCTCAC
TTAACTGAAGAGACAGTATATGGATTAAAGAAATTTAGATGGTATAGATTCCAAGTGGCTGCCAGCAC
CAATGCTGGCTATGGCAATGCTTCAAACTGGATTTCTACAAAAACTCTGCCTGGCCCTCCAGATGGTC
CTCCTGAAAATGTTCATGTAGTAGCAACATCACCTTTTAGCATCAGCATAAGCTGGAGTGAACCTGCT
GTCATTACTGGACCAACATGTTATCTGATTGATGTCAAATCGGTAGATAATGATGAATTTAATATATC
CTTCATCAAGTCAAATGAAGAAAATAAAACCATAGAAATTAAAGATTTAGAAATATTCACAAGGTATT
CTGTAGTGATCACTGCATTTACTGGGAACATTAGTGCTGCATATGTAGAAGGGAAGTCAAGTGCTGAA
ATGATTGTTACTACTTTAGAATCAGCCCCAAAGGACCCACCTAACAACATGACATTTCAGAAGATACC
AGATGAAGTTACAAAATTTCAATTAACGTCCCTTCCTCCTTCTCAACCTAATGGAAATATCCAAGTAT
ATCAAGCTCTGGTTTACCGAGAAGATGATCCTACTGCTGTCCAGATTCACAACCTCAGTATTATACAG
AAAACCAACACATTCGTCATTGCAATGCTAGAAGGACTAAAAGGTGGACATACATACAATATCAGTGT
TTACGCAGTCAATAGTGCTGGTGCAGGTCCAAAGGTTCCGATGAGAATAACCATGGATATCAAAGCTC
CAGCACGACCAAAAACCAAACCAACCCCTATTTATGATGCCACAGGAAAACTGCTTGTGACTTCAACA
ACAATTACAATCAGAATGCCAATATGTTACTACAGTGATGATCATGGACCAATAAAAAATGTACAAGT
GCTTGTGACAGAAACAGGAGCTCAGCATGATGGAAATGTAACAAAGTGGTATGATGCATATTTTAATA
AAGCAAGGCCATATTTTACAAATGAAGGCTTTCCTAACCCTCCATGTACAGAAGGAAAGACAAAGTTT
AGTGGCAATGAAGAAATCTACATCATAGGTGCTGATAATGCATGCATGATTCCTGGCAATGAAGACAA
AATTTGCAATGGACCACTGAAACCAAAAAAGCAATACTTATTTAAATTTAGAGCTACAAATATTATGG
GACAATTTACTGACTCTGATTATTCTGACCCTGTTAAGACTTTAGGCGAAGGACTTTCAGAAAGAACC
CTAGAGATCATTCTTTCCGTCACTTTGTGTATCCTTTCAATAATTCTCCTTGGAACAGCTATTTTTGC
ATTTGCAAGAATTCGACAGAAGCAGAAAGAAGGTGGCACATACTCTCCTCAGGATGCAGAAATTATTG
ACACTAAATTGAAGCTGGATCAGCTCATCACAGTGGCAGACCTGGAACTGAAGGACGAGAGATTAACG
CGGTTACTTAGTTATAGAAAATCCATCAAGCCAATAAGCAAGAAATCCTTCCTGCAACATGTTGAAGA
GCTTTGCACAAACAACAACCTAAAGTTTCAAGAAGAATTTTCGGAATTACCAAAATTTCTTCAGGATC
TTTCTTCAACTGATGCTGATCTGCCTTGGAATAGAGCAAAAAACCGCTTCCCAAACATAAAACCATAT
AATAATAACAGAGTAAAGCTGATAGCTGACGCTAGTGTTCCAGGTTCGGATTATATTAATGCCAGCTA
TATTTCTGGTTATTTATGTCCAAATGAATTTATTGCTACTCAAGGTCCACTACCAGGAACAGTTGGAG
ATTTTTGGAGAATGGTGTGGGAAACCAGAGCAAAAACATTAGTAATGCTAACACAGTGTTTTGAAAAA
GGACGGATCAGATGCCATCAGTATTGGCCAGAGGACAACAAGCCAGTTACTGTCTTTGGAGATATAGT
GATTACAAAGCTAATGGAGGATGTTCAAATAGATTGGACTATCAGGGATCTGAAAATTGAAAGGCATG
GGGATTGCATGACTGTTCGACAGTGTAACTTTACTGCCTGGCCAGAGCATGGGGTTCCTGAGAACAGC
GCCCCTCTAATTCACTTTGTGAAGTTGGTTCGAGCAAGCAGGGCACATGACACCACACCTATGATTGT
TCACTGTAGTGCTGGAGTTGGAAGAACTGGAGTTTTTATTGCTCTGGACCATTTAACACAACATATAA
ATGACCATGATTTTGTGGATATATATGGACTAGTAGCTGAACTGAGAAGTGAAAGAATGTGCATGGTG
CAGAATCTGGCACAGTATATCTTTTTACACCAGTGCATTCTGGATCTCTTATCAAATAAGGGAAGTAA
TCAGCCCATCTGTTTTGTTAACTATTCAGCACTTCAGAAGATGGACTCTTTGGACGCCATGGAAGGTG
ATGTTGAGCTTGAATGGGAAGAAACCACTATGTAA

NOV15g, CG50718-05

| | | | |
|---|---|---|---|
| Protein Sequence | SEQ ID NO: 178 | 2300 aa | MW at 257261.9kD |

MDFLIIFLLLFIGTSETQVDVSNVVPGTRYDITISSISTTYTSPVTRIVTTNVTEPGPPVFLAGERVG
SAGILLSWNTPPNPNGRIISYIVKYKEVCPWMQTVYTQVRSKPDSLEVLLTNLNPGTTYEIKVAAENS
AGIGVFSDPFLFQTAESPAPGKVVNLTVEAYNASAVKLIWYLPRQPNGKITSFKISVKHARSGIVVKD
VSIRVEDILTGKLPECNVENSESFLWSTASPSPTLGRVTPPSRTTHSSSTLTQNEISSVWKEPISFVV
THLRPYTTYLFEVSAATTEAGYIDSTIVRTPESVPEGPPQNCVTGNITGKSFSILWDPPTIVTGKFSY
RVELYGPSGRILDNSTKDLKFAFTNLTPFTMYDVYIAAETSAGTGPKSNISVFTPPDVPGAVFDLQLA
EVESTQVRITWKKPRQPNGIINQYRVKVLVPETGIILENTLLTGNNEINDPMAPEIVNIVEPMVGLYE
GSAEMSSDLHSLATFIYNSHPDKNFPARNRAEDQTSPVVTTRNQYITDIAAEQLSYVIRRIVPFTEHM
ISVSAFTIMGEGPPTVLSVRTRQQVPSSIKIINYKNISSSSILLYWDPPEYPNGKITHYTIYAMELDT
NRAFQITTIDNSFLITGIGLKKYTKYKMRVAASTHVGESSLSEENDIFVRTSEDEPESSPQDVEVIDV
TADEIRLKWSPPEKPNGIIIAYEVLYKNIDTLYMKNTSTTDIILRNLRPHTLYNISVRSYTRFGHGNQ
VSSLLSVRTSETVPDSAPENITYKNISSGEIELSFLPPSSPNGIIQKYTIYLKRSNGNEERTINTTSL
TQNILKKYTQYIIEVSASTLKGEGVRSAPISILTEEDAPDSPPQDFSVKQLSGVTVKLSWQPPLEPNG
IILYYTVYVWRNRSSLKTINVTETSLELSDLDYNVEYSAYVTASTRFGDGKTRSNIISFQTPEGPSDP
PKDVYYANLSSSSIILFWTPPSKPNGIIQYYSVYYRNTSGTFMQNFTLHEVTNDFDNMTVSTIIDKLT
IFSYYTFWLTASTSVGNGNKSSDIIEVYTDQDVPEGFVGNLTYESISSTAINVSWVPPAQPNGLVFYY
VSLILQQTPRHVRPPLVTYERSIYFDNLEKYTDYILKITPSTEKGFSDTYTAQLYIKTEEDVPETSPI
INTFKNLSSTSVLLSWDPPVKPNGAIISYDLTLQGPNENYSFITSDNYIILEELSPFTLYSFFAAART
RKGLGPSSILFFYTDESVPLAPPQNLTLINCTSDFVWLKWSPSPLPGGIVKVYSFKIHEHETDTIYYK
NISGFKTEAKLVGLEPVSTYSIRVSAFTKVGNGNQFSNVVKFTTQESVPDVVQNNQCMATSWQSVLVK
WDPPKKANGIITQYMVTVERNSTKVSPQDHMYTFIKLLANTSYVFKVRASTSAGEGDESTCHVSTLPE
TVPSVPTNIAFSDVQSTSATLTWIRPDTILGYFQNYKITTQLRAQKCKEWESEECVEYQKIQYLYEAH
LTEETVYGLKKFRWYRFQVAASTNAGYGNASNWISTKTLPGPPDGPPENVHVVATSPFSISISWSEPA
VITGPTCYLIDVKSVDNDEFNISFIKSNEENKTIEIKDLEIFTRYSVVITAFTGNISAAYVEGKSSAE
MIVTTLESAPKDPPNNMTFQKIPDEVTKFQLTSLPPSQPNGNIQVYQALVYREDDPTAVQIHNLSIIQ
KThTFVIAMLEGLKGGHTYNISVYAVNSAGAGPKVPMRITMDIKAPARPKTKPTPIYDATGKLLVTST
TITIRMPICYYSDDHGPIKNVQVLVTETGAQHDGNVTKWYDAYFNKARPYFTNEGFPNPPCTEGKTKF
SGNEEIYIIGADNACMIPGNEDKICNGPLKPKKQYLFKFRATNIMGQFTDSDYSDPVKTLGEGLSERT
LEIILSVTLCILSIILLGTAIFAFARIRQKQKEGGTYSPQDAEIIDTKLKLDQLITVADLELKDERLT
RLLSYRKSIKPISKKSFLQHVEELCTNNNLKFQEEFSELPKFLQDLSSTDADLPWNRAKNRFPNIKPY
NNNRVKLIADASVPGSDYINASYISGYLCPNEFIATQGPLPGTVGDFWRMVWETRAKTLVMLTQCFEK
GRIRCHQYWPEDNKPVTVFGDIVITKLMEDVQIDWTIRDLKIERHGDCMTVRQCNFTAWPEHGVPENS
APLIHFVKLVRASRAHDTTPMIVHCSAGVGRTGVFIALDHLTQHINDHDFVDIYGLVAELRSERMCMV
QNLAQYIFLHQCILDLLSNKGSNQPICFVNYSALQKMDSLDAMEGDVELEWEETTM

[0428] A ClustalW comparison of the above protein sequences yields the following sequence alignment shown in Table 15B.

TABLE 15B
Comparison of the NOV15 protein sequences.

| | |
|---|---|
| NOV15a | MDFLIIFLLLFIGTSETQVDVSNVVPGTRYDITISSISTTYTSPVTRIGASNEPGPPVFL |
| NOV15b | ------------------------------------------------------------ |
| NOV15c | ------------------------------------------------------------ |
| NOV15d | MDFLIIFLLLFIGTSETQVDVSNVVPGTRYDITISSISTTYTSPVTRIGASNEPGPPVFL |
| NOV15e | ------------------------------------------------------------ |
| NOV15f | ------------------------------------------------------------ |
| NOV15g | ------------------------------------------------------------ |
| NOV15a | AGERVGSAGILLSWNTPPNPNGRIISYIVKYKEVCPWMQTVYTQVRSKPDSLEVLLTNLN |
| NOV15b | ------------------------------------------------------------ |
| NOV15c | ------------------------------------------------------------ |
| NOV15d | AGERVGSAGILLSWNTPPNPNGRIISYIVKYKEVCPWMQTVYTQVRSKPDSLEVLLTNLN |
| NOV15e | ------------------------------------------------------------ |
| NOV15f | ------------------------------------------------------------ |
| NOV15g | ------------------------------------------------------------ |
| NOV15a | PGTTYEIKVAAENSAGIGVFSDPFLFQTAESAPGKVVDFTGEAVPFSSKLMWYTSATKKK |
| NOV15b | ------------------------------------------------------------ |
| NOV15c | ------------------------------------------------------------ |
| NOV15d | PGTTYEIKVAAENSAGIGVFSDPFLFQTAESAPGKVVDFTGEAVPFSSKLMWYTSATKKK |
| NOV15e | ------------------------------------------------------------ |
| NOV15f | ------------------------------------------------------------ |
| NOV15g | ------------------------------------------------------------ |
| NOV15a | ITSFKISVKHNRSGIVVKEVSIRVECILSASLPLHCNENSESFLWSTASPSPTLGRVTPP |
| NOV15b | ------------------------------------------------------------ |
| NOV15c | ------------------------------------------------------------ |
| NOV15d | ITSFKISVKHNRSGIVVKEVSIRVECILSASLPLHCNENSESFLWSTASPSPTLGRVTPP |
| NOV15e | ------------------------------------------------------------ |
| NOV15f | ------------------------------------------------------------ |
| NOV15g | ------------------------------------------------------------ |
| NOV15a | SRTTHSSSTLTQNEISSVKEPISFVVTHLRPYTTYLFEVSAATTEAGYIDSTIVRTPESV |
| NOV15b | ------------------------------------------------------------ |
| NOV15c | ------------------------------------------------------------ |
| NOV15d | SRTTHSSSTLTQNEISSVKEPISFVVTHLRPYTTYLFEVSAATTEAGYIDSTIVRTPESV |
| NOV15e | ------------------------------------------------------------ |
| NOV15f | ------------------------------------------------------------ |
| NOV15g | ------------------------------------------------------------ |
| NOV15a | PEGPPQNCVTGNITGKSFSILWDPPTIVTGKFSYRVELYGPSAGRILDNSTKDLKFAFTN |
| NOV15b | ------------------------------------------------------------ |
| NOV15c | ------------------------------------------------------------ |
| NOV15d | PEGPPQNCVTGNITGKSFSILWDPPTIVTGKFSYRVELYGPSAGRILDNSTKDLKFAFTN |
| NOV15e | ------------------------------------------------------------ |
| NOV15f | ------------------------------------------------------------ |
| NOV15g | ------------------------------------------------------------ |
| NOV15a | LTPFTMYDVYIAAETSAGTGPKSNISVFTPPDVPGAVFDLQLAEVESTQVRITWKKPRQP |
| NOV15b | ------------------------------------------------------------ |
| NOV15c | ------------------------------------------------------------ |
| NOV15d | LTPFTMYDVYIAAETSAGTGPKSNISVFTPPDVPGAVFDLQLAEVESTQVRITWKKPRQP |
| NOV15e | ------------------------------------------------------------ |
| NOV15f | ------------------------------------------------------------ |
| NOV15g | ------------------------------------------------------------ |
| NOV15a | NGIINQYRVKVLVPETGIILENTLLTGNNEINDPMAPEIVNIVQPMVGLYEGSAEMSSDL |
| NOV15b | ------------------------------------------------------------ |
| NOV15c | ------------------------------------------------------------ |
| NOV15d | NGIINQYRVKVLVPETGIILENTLLTGNNEINDPMAPEIVNIVQPMVGLYEGSAEMSSDL |
| NOV15e | ------------------------------------------------------------ |
| NOV15f | ------------------------------------------------------------ |
| NOV15g | ------------------------------------------------------------ |
| NOV15a | HSLATFIYNSHPDKNFPARNRAEDQTSPVVTTRNQYITDIAAEQLTYVLIRLRRFWAETM |
| NOV15b | ------------------------------------------------------------ |
| NOV15c | ------------------------------------------------------------ |
| NOV15d | HSLATFIYNSHPDKNFPARNRAEDQTSPVVTTRNQYITDIAAEQLTYVLIRLRRFWAETM |
| NOV15e | ------------------------------------------------------------ |
| NOV15f | ------------------------------------------------------------ |
| NOV15g | ------------------------------------------------------------ |
| NOV15a | GFSRYTIMSSASRDNLTSPGPLSAQNFRVTHVTITEVFLHWDPPDPVFFHHYLITILDVE |
| NOV15b | ------------------------------------------------------------ |
| NOV15c | ------------------------------------------------------------ |
| NOV15d | GFSRYTIMSSASRDNLTSPGPLSAQNFRVTHVTITEVFLHWDPPDPVFFHHYLITILDVE |
| NOV15e | ------------------------------------------------------------ |
| NOV15f | ------------------------------------------------------------ |
| NOV15g | ------------------------------------------------------------ |
| NOV15a | NQSKSIILRTLNSLSLVLIGLKKYTKYKMRVAASTHVGESSLSEENDIFVRTSEDEPESS |
| NOV15b | ------------------------------------------------------------ |
| NOV15c | ------------------------------------------------------------ |
| NOV15d | NQSKSIILRTLNSLSLVLIGLKKYTKYKMRVAASTHVGESSLSEENDIFVRTSEDEPESS |
| NOV15e | ------------------------------------------------------------ |
| NOV15f | ------------------------------------------------------------ |
| NOV15g | ------------------------------------------------------------ |
| NOV15a | PQDVEVIDVTADEIRLKWSPPEKPNGIIIAYEVLYKNIDTLYNKNTSTTDIILRNLRPHT |
| NOV15b | ------------------------------------------------------------ |
| NOV15c | ------------------------------------------------------------ |
| NOV15d | PQDVEVIDVTADEIRLKWSPPEKPNGIIIAYEVLYKNIDTLYNKNTSTTDIILRNLRPHT |
| NOV15e | ------------------------------------------------------------ |
| NOV15f | ------------------------------------------------------------ |
| NOV15g | ------------------------------------------------------------ |
| NOV15a | LYNISVRSYTRFGHGNQVSSLLSVRTSESVPDSAPENITYKNISSGEIELSFLPPSSPNG |
| NOV15b | ------------------------------------------------------------ |
| NOV15c | ------------------------------------------------------------ |
| NOV15d | LYNISVRSYTRFGHGNQVSSLLSVRTSESVPDSAPENITYKNISSGEIELSFLPPSSPNG |
| NOV15e | ------------------------------------------------------------ |
| NOV15f | ------------------------------------------------------------ |
| NOV15g | ------------------------------------------------------------ |
| NOV15a | IIQKYTIYLKRSNGNEERTINTTSLTQNIKGLKKYTQYIIEVSASTLKGEGVRSAPISIL |
| NOV15b | ------------------------------------------------------------ |
| NOV15c | ------------------------------------------------------------ |
| NOV15d | IIQKYTIYLKRSNGNEERTINTTSLTQNIKGLKKYTQYIIEVSASTLKGEGVRSAPISIL |
| NOV15e | ------------------------------------------------------------ |
| NOV15f | ------------------------------------------------------------ |
| NOV15g | ------------------------------------------------------------ |
| NOV15a | TEEDAPDSPPQDFSVKQLSGVTVKLSWQPPLEPNGIILYYTVYVWRSSLKTINVTETSLE |
| NOV15b | ------------------------------------------------MDFLIIFLLLFI |
| NOV15c | ------------------------------------------------------------ |
| NOV15d | TEEDAPDSPPQDFSVKQLSGVTVKLSWQPPLEPNGIILYYTVYVWRSSLKTINVTETSLE |
| NOV15e | ------------------------------------------------------------ |
| NOV15f | ------------------------------------------------------------ |
| NOV15g | ------------------------------------------------MDFLIIFLLLFI |
| NOV15a | LSDLDYNVEYSAYVTASTRFGDGKTRSNIISFQTPEGPSDPPKDVYYANLSSSSIILFWT |
| NOV15b | GTSETQVDVSNVVPGTRYDITISSISTTYTSPVTRIVTTNVTKPGPPVFLAGERVGSAGI |
| NOV15c | ------------------------------------------------------------ |
| NOV15d | LSDLDYNVEYSAYVTASTRFGDGKTRSNIISFQTPEGPSDPPKDVYYANLSSSSIILFWT |
| NOV15e | -----QVDVSNVVPGTRYDITISSISTTYTSPVTRIVTTNVTKPGPPVFLAGERVGSAGI |
| NOV15f | ------------------------------------------------------------ |
| NOV15g | GTSETQVDVSNVVPGTRYDITISSISTTYTSPVTRIVTTNVTEPGPPVFLAGERVGSAGI |
| NOV15a | PPSKPNGIIQYYSVYYRNTSGTFMQNFTLHEVTNDFDNMTVSTIIDKLTIFSYYTFWLTA |
| NOV15b | LLSWNTPPNPMGRIISYIVKYKEVCPWMQTVYTQVRSKPDSLEVLLTNLNPGTTYEIKVA |
| NOV15c | ------------------------------------------------------------ |
| NOV15d | PPSKPNGIIQYYSVYYRNTSGTFMQNFTLHEVTNDFDNMTVSTIIDKLTIFSYYTFWLTA |
| NOV15e | LLSWNTPPNPMGRIISYIVKYKEVCPWMQTVYTQVRSKPDSLEVLLTNLNPGTTYEIKVA |
| NOV15f | ------------------------------------------------------------ |
| NOV15g | LLSWNTPPNPMGRIISYIVKYKEVCPWMQTVYTQVRSKPDSLEVLLTNLNPGTTYEIKVA |
| NOV15a | STSVGNGNKSSDIIEVYTDQDVPEGFVGNLTYESISSTAINVSWVPPAQPNG-------- |
| NOV15b | AENSAGIGVFSDPFLFQTAES-APGKVVNLTVEAYNASAVKLIWYLPRQPNGKITSFKIS |
| NOV15c | ------------------------------------------------------------ |
| NOV15d | STSVGNGNKSSDIIEVYTDQDVPEGFVGNLTYESISSTAINVSWVPPAQPNG-------- |
| NOV15e | AENSAGIGVFSDPFLFQTAES-APGKVVNLTVEAYNASAVKLIWYLPRQPNGKITSFKIS |
| NOV15f | ----------------------PEGFVGNLTYESISSTAINVSWVPPAQPNG-------- |
| NOV15g | AENSAGIGVFSDPFLFQTAESPAPGKVVNLTVEAYNASAVKLIWYLPRQPNGKITSFKIS |
| NOV15a | -------------------------LVFYY--------VSLILQQTPRHVRPPLVTYERS |
| NOV15b | VKHARSGIVVKDVSIRVEDILTGKLPECNE-NSESFLWSTASPSPTLGRVTPPSRTTHSS |
| NOV15c | ------------------------------------------------------------ |
| NOV15d | -------------------------LVFYY--------VSLILQQTPRHVRPPLVTYERS |
| NOV15e | VKHARSGIVVKDVSIRVEDILTGKLPECNE-NSESFLWSTASPSPTLGRVTPPSRTTHSS |
| NOV15f | -------------------------LVFYY--------VSLILQQTPRHVRPPLVTYERS |
| NOV15g | VKHARSGIVVKDVSIRVEDILTGKLPECNVENSESFLWSTASPSPTLGRVTPPSRTTHSS |
| NOV15a | IYFDN--------------LEKYTDYILKITPSTEKGFSDTYTAQLYIKTEEDIPETSPI |
| NOV15b | STLTQNEISSVWKEPISFVVTHLRPYTTYLFEVSAVTTEAGYIDSTIVRTPESVPEGPPQ |
| NOV15c | ----------------------------------------------------RSPEGPPQ |
| NOV15d | IYFDN--------------LEKYTDYILKITPSTEKGFSDTYTAQLYIKTEEDIPETSPI |
| NOV15e | STLTQNEISSVWKEPISFVVTHLRPYTTYLFEVSAVTTEAGYIDSTIVRTPESVPEGPPQ |
| NOV15f | IYFDN--------------LEKYTDYILKITPSTEKGFSDTYTAQLYIKTEEDVPETSPI |
| NOV15g | STLTQNEISSVWKEPISFVVTHLRPYTTYLFEVSAATTEAGYIDSTIVRTPESVPEGPPQ |
| NOV15a | INTFKNLSSTSVLLSWDPPVKPNGAIISYDLTLQGPN-ENYSFITSDNYIILEELSPFTL |
| NOV15b | NCVTGNITGKSFSILWDPPTIVT-GKFSYRVELYGPSGRILDNSTKDLKFAFTNLTPFTM |
| NOV15c | NCVTGNITGKSFSILWDPPTIVT-GKFSYRVELYGPSGRILDNSTKDLKFAFTNLTPFTM |
| NOV15d | INTFKNLSSTSVLLSWDPPVKPNGAIISYDLTLQGPN-ENYSFITSDNYIILEELSPFTL |
| NOV15e | NCVTGNITGKSFSILWDPPTIVT-GKFSYRVELYGPSGRILDNSTKDLKFAFTNLTPFTM |
| NOV15f | INTFKNLSSTSVLLSWDPPVKPNGAIISYDLTLQGPN-ENYSFITSDNYIILEELSPFTL |
| NOV15g | NCVTGMITGKSFSILWDPPTIVT-GKFSYRVELYGPSGRILDNSTKDLKFAFThLTPFTM |
| NOV15a | YSFFAAARTRKGLGPSSILFFYTDESVPLAPPQNLTLINCTSDFVWLKWSPSPLPGGIVK |
| NOV15b | YDVYIAAETSAGTGPKSNISVFTPPDVPGA-VFDLQLAEVESTQVRITWKKPRQPNGIIN |
| NOV15c | YDVYIAAETSAGTGPKSNISVFTPPDVPGA-VFDLQLAEVESTQVRITWKKPRQPNGIIN |
| NOV15d | YSFFAAARTRKGLGPSSILFFYTDESVPLAPPQNLTLINCTSDFVWLKWSPSPLPGGIVK |
| NOV15e | YDVYIAAETSAGTGPKSNISVFTPPDVPGA-VFDLQLAEVESTQVRITWKKPRQPNGIIN |
| NOV15f | YSFFAAARTRKGLGPSSILFFYTDESVPLAPPQNLTLINCTSDFVWLKWSPSPLPGGIVK |
| NOV15g | YDVYIAAETSAGTGPKSNISVFTPPDVPGA-VFDLQLAEVESTQVRITWKKPRQPNGIIN |
| NOV15a | VYSFKIHEHETDTIYYKNISGFKTEAKLVGLEPVSTYSIRVSAFTKVGNGNQFSNVVKFT |
| NOV15b | QYRVKVLVPETGIILENTLLTGNNEYINDPMAPEIVNIVEPMVGLYEGSAEMSSDLHSLA |
| NOV15c | QYRVKVLVPETGIILENTLLTGNNEYINDPMAPEIVNIVEPMVGLYEGSAEMSSDLHSLA |
| NOV15d | VYSFKIHEHETDTIYYKNISGFKTEAKLVGLEPVSTYSIRVSAFTKVGNGNQFSNVVKFT |
| NOV15e | QYRVKVLVPETGIILENTLLTGNNEYINDPMAPEIVNIVEPMVGLYEGSAEMSSDLHSLA |
| NOV15f | VYSFKIHEHETDTIYYKNISGFKTEAKLVGLEPVSTYSIRVSAFTKVGNGNQFSNVVKFT |
| NOV15g | QYRVKVLVPETGIILENTLLTGNN-EINDPMAPEIVNIVEPMVGLYEGSAEMSSDLHSLA |
| NOV15a | TQESVPDVVQNNQCMATSWQSVLVKWDPPKKANGIITQYMVTVERNSTKVSPQDHMYTFI |
| NOV15b | TFIYNSHPDK--------------NFPARNRAEDQTSPVVTTRNQYITDIAAEQLSYVIR |
| NOV15c | TFIYNSHPDK--------------NFPARNRAEDQTSPVVTTRNQYITDIAAEQLSYVIR |
| NOV15d | TQESVPDVVQNNQCMATSWQSVLVKWDPPKKANGIITQYMVTVERNSTKVSPQDHMYTFI |
| NOV15e | TFIYNSHPDK--------------NFPARNRAEDQTSPVVTTRNQYITDIAAEQLSYVIR |
| NOV15f | TQESVPDVVQNMQCMATSWQSVLVKWDPPKKANGIITQYMVTVERNSTKVSPQDHMYTFI |
| NOV15g | TFIYNSHPDK--------------NFPARNRAEDQTSPVVTTRNQYITDIAAEQLSYVIR |
| NOV15a | KLLANTSYVFKVRASTSAGEGDESTCHVSTLPETVPSVPTNIAFSDVQSTSATLTWIRPD |
| NOV15b | RLVPFTEHMISVSAFTIMGEG-PPTVLSVRTRQQVPSSIKIINYKNISSSSILLYWDPPE |
| NOV15c | RLVPFTEHMISVSAFTIMGEG-PPTVLSVRTRQQVPSSIKIINYKNISSSSILLYWDPPE |
| NOV15d | KLLANTSYVFKVRASTSAGEGDESTCHVSTLPETVPSVPTNIAFSDVQSTSATLTWIRPD |
| NOV15e | RLVPFTEHMISVSAFTIMGEG-PPTVLSVRTRQQVPSSIKIINYKNISSSSILLYWDPPE |
| NOV15f | KLLANTSYVFKVRASTSAGEGDESTCHVSTLPETVPSVPTNIAFSDVQSTSATLTWIRPD |
| NOV15g | RLVPFTEHMISVSAFTIMGEG-PPTVLSVRTRQQVPSSIKIINYKNISSSSILLYWDPPE |
| NOV15a | TILGYFQNYKITTQLRAQKCKEWESEECVEYQKIQYLYEAHLTEETVYGLKKFRWYRFQV |
| NOV15b | YPNGKITHYTIY------------AMELDTNRAFQITTIDNSFLIT--GLKKYTKYKMRV |
| NOV15c | YPNGKITHYTIY------------AMELDTNRAFQITTIDNSFLIT--GLKKYTKYKMRV |
| NOV15d | TILGYFQNYKITTQLRAQKCKEWESEECVEYQKIQYLYEAHLTEETVYGLKKFRWYRFQV |
| NOV15e | YPNGKITHYTIY------------AMELDTNRAFQITTIDNSFLIT--GLKKYTKYKMRV |
| NOV15f | TILGYFQNYKITTQLRAQKCKEWESEECVEYQKIQYLYEAHLTEETVYGLKKFRWYRFQV |
| NOV15g | YPNGKITHYTIY------------AMELDTNRAFQITTIDNSFLITGIGLKKYTKYKMRV |
| NOV15a | AASTNAGYGNAS--NWISTKTLPGPPDGPPENVHVVATSPFSISISWSEPAVITGPTCYL |
| NOV15b | AASTHDGESSLSEENDIFVRTSEDEPESSPQDVEVIDVTADEIRLKWSPPEKPNG----I |
| NOV15c | AASTHDGESSLSEENDIFVRTSEDEPESSPQDVEVIDVTADEIRLKWSPPEKPNG----I |
| NOV15d | AASTNAGYGNAS--NWISTKTLPGPPDGPPENVHVVATSPFSISISWSEPAVITGPTCYL |
| NOV15e | AASTHDGESSLSEENDIFVRTSEDEPESSPQDVEVIDVTADEIRLKWSPPEKPNG----I |
| NOV15f | AASTNAGYGNAS--NWISTKTLPGPPDGPPENVHVVATSPFSISISWSEPAVITGPTCYL |
| NOV15g | AASTHVGESSLSEENDIFVRTSEDEPESSPQDVEVIDVTADEIRLKWSPPEKPNG----I |
| NOV15a | IDVKSVDNDEFNISFIKSNEENKTIEIKDLEIFTRYSVVITAFTGNISAAYVEGKSSAEM |
| NOV15b | IIAYEVLYKNIDTLYNKSNTSTTDIILRNLRPHTLYNISVRSYTRFGHGNQVS----SLL |
| NOV15c | IIAYEVLYKNIDTLYMK-NTSTTDIILRNLRPHTLYNISVRSYTRFGHGNQVS----SLL |
| NOV15d | IDVKSVDNDEFNISFIKSNEENKTIEIKDLEIFTRYSVVITAFTGNISAAYVEGKSSAEM |
| NOV15e | IIAYEVLYKNIDTLYMK-NTSTTDIILRNLRPHTLYNISVRSYTRFGHGNQVS----SLL |
| NOV15f | IDVKSVDNDEFNISFIKSNEENKTIEIKDLEIFTRYSVVITAFTGNISAAYVEGKSSAEM |
| NOV15g | IIAYEVLYKNIDTLYMK-NTSTTDIILRNLRPHTLYNISVRSYTRFGHGNQVS----SLL |
| NOV15a | IVTTLESAPKDPPNNMTFQKIPDEVTKFQLTFLPPSQPNGNIQVYQALVYREDDPTAVQI |
| NOV15b | SVRTSETVPDSAPENITYKNIS--SGEIELSFLPPSSPNGIIKKYTIYLKRSNGNEERTI |
| NOV15c | SVRTSETVPDSAPENITYKNIS--SGEIELSFLPPSSPNGIIKKYTIYLKRSNGNEERTI |
| NOV15d | IVTTLESAPKDPPNNMTFQKIPDEVTKFQLTFLPPSQPNGNIQVYQALVYREDDPTAVQI |
| NOV15e | SVRTSETVPDSAPENITYKNIS--SGEIELSFLPPSSPNGIIQKYTIYLKRSNGNEERTI |
| NOV15f | IVTTLESAPKDPPNNNTFQKIPDEVTKFQLTSLPPSQPNGNIQVYQALVYREDDPTAVQI |
| NOV15g | SVRTSETVPDSAPENITYKNIS--SGEIELSFLPPSSPNGIIQKYTIYLKRSNGNEERTI |
| NOV15a | HNLSIIQKTNTFVIAMLEGLKGGHTYNISVYAVNSAG-AGPKVPMRITMDIKAP-ARPKT |
| NOV15b | NTTSLTQNIK--------VLKKYTQYIIEVSASTLKGEGVRSAPISILTEEDAPDSPPQD |
| NOV15c | NTTSLTQNIK--------VLKKYTQYIIEVSASTLKGEGVRSAPISILTEEDAPDSPPQD |
| NOV15d | HNLSIIQKTNTFVIAMLEGLKGGHTYNISVYAVNSAG-AGPKVPMRITMDIKAP-ARPKT |
| NOV15e | NTTSLTQNIK--------GLKKYTQYIIEVSASTLKGEGVRSAPISILTEEDAPDSPPQD |
| NOV15f | HNLSIIQKTNTFVIAMLEGLKGGHTYNISVYAVNSAG-AGPKVPMRITMDIKAP-ARPKT |
| NOV15g | NTTSLTQNI----------LKKYTQYIIEVSASTLKGEGVRSAPISILTEEDAPDSPPQD |
| NOV15a | KPTPIYDATGKLLVTSTTITIRMPICYYSDDHGP--IKNVQVLVTETGAQH-DGNVTKWY |
| NOV15b | FSVKQLSGVTVKLSWQPPLEPNGIILYYTVYVWN-RSSLKTINVTETSLELSDLDYNVEY |
| NOV15c | FSVKQLSGVTVKLSWQPPLEPNGIILYYTVYVWN-RSSLKTINVTETSLELSDLDYNVEY |
| NOV15d | KPTPIYDATGKLLVTSTTITIRMPICYYSDDHGP--IKNVQVLVTETGAQH-DGNVTKWY |
| NOV15e | FSVKQLSGVTVKLSWQPPLEPNGIILYYTVYVWN-RSSLKTINVTETSLELSDLDYNVEY |
| NOV15f | KPTPIYDATGKLLVTSTTITIRMPICYYSDDHGP--IKNVQVLVTETGAQH-DGNVTKWY |
| NOV15g | FSVKQLSGVTVKLSWQPPLEPNGIILYYTVYVWRNRSSLKTINVTETSLELSDLDYNVEY |
| NOV15a | DAYFNKARPYFTNEGFPNPP--CT-EGKTKFSGNEEIYIIGADNACMIPGNEDKICNGPL |
| NOV15b | SAYVTASTRFGDGKTRSNIISFQTPEGAPSDPPKDVYYANLSSSSIILFWTPPSKPNGII |
| NOV15c | SAYVTASTRFGDGKTRSNIISFQTPEGAPSDPPKDVYYANLSSSSIILFWTPPSKPNGII |
| NOV15d | DAYFNKARPYFTNEGFPNPP--CT-EGKTKFSGNEEIYIIGADNACMIPGNEDKICNGPL |
| NOV15e | SAYVTAS---------------------------------------------------- |
| NOV15f | DAYFNKARPYFTNEGFPNPP--CT-EGKTKFSGNEEIYIIGADNACMIPGNEDKICNGPL |
| NOV15g | SAYVTASTRFGDGKTRSNIISFQTPEGP-SDPPKDVYYANLSSSSIILFWTPPSKPNGII |
| NOV15a | KPKKQYLFKFRATNIMGQFTDSDYSDPVKTLGEGLSERTVEIILSVTLCILSIILLGTAI |
| NOV15b | QYYSVYYRNTSGTFNQNFTLHEVTNDFDNNTVSTIIDKLTIFSYYTFWLTASTSVGNGNK |
| NOV15c | QYYSVYYRNTSGTFMQNFTLHEVTNDFDNNTVSTIIDKLTIFSYYTFWLTASTSVGNGNK |
| NOV15d | KPKKQYLFKFRATNIMGQFTDSDYSDPVKTLGEGLSERTVEIILSVTLCILSIILLGTAI |
| NOV15e | ------------------------------------------------------------ |
| NOV15f | KPKKQYLFKFRATNIMGQFTDSDYSDPVKTLGEGLSERT--------------------- |
| NOV15g | QYYSVYYRNTSGTFMQNFTLHEVTNDFDNMTVSTIIDKLTIFSYYTFWLTASTSVGNGNK |
| NOV15a | FAFARIRQKQKEGGTYSPQDAEIIDTKLKLDQLITVADLELKDERLTRPISKKSFLQHVE |
| NOV15b | SSDIIEVYTDQDVPEGFVGNLTYESISSTAINVSWVPPAQPNGLVFYYVSLILQQTPRHV |
| NOV15c | SLE--------------------------------------------------------- |
| NOV15d | FAFARIRQKQKEGGTYSPQDAEIIDTKLKLDQLITVADLELKDERLTRPISKKSFLQHVE |
| NOV15e | ------------------------------------------------------------ |
| NOV15f | ------------------------------------------------------------ |
| NOV15g | SSDIIEVYTDQDVPEGFVGNLTYESISSTAINVSWVPPAQPNGLVFYYVSLILQQTPRHV |
| NOV15a | ELCTNNNLKFQEEFSELPKFLQDLSSTDADLPWNRAKNRFPNIKPYNNNRVKLIADASVP |
| NOV15b | RPPLVTYERSIYFDNLEKYTDYILKITPSTEKGFSDTYTAQLYIKTEEDVPETSPIINTF |
| NOV15c | ------------------------------------------------------------ |
| NOV15d | ELCTNNNLKFQEEFSELPKFLQDLSSTDADLPWNRAKNRFPNIKPYNNNRVKLIADASVP |
| NOV15e | ------------------------------------------------------------ |
| NOV15f | ------------------------------------------------------------ |
| NOV15g | RPPLVTYERSIYFDNLEKYTDYILKITPSTEKGFSDTYTAQLYIKTEEDVPETSPIINTF |
| NOV15a | GSDYINASYISGYLCPNEFIATQGPLPGTVGDFWRMVWETRAKTLVMLTQCFEKGRIRCH |
| NOV15b | KNLSSTSVLLSWDPPVKPNGAIISYDLTLQGPNENYSFITSDNYIILEELSPFTLYSFFA |
| NOV15c | ------------------------------------------------------------ |
| NOV15d | GSDYINASYISGYLCPNEFIATQGPLPGTVGDFWRMVWETRAKTLVMLTQCFEKGRIRCH |
| NOV15e | ------------------------------------------------------------ |
| NOV15f | ------------------------------------------------------------ |
| NOV15g | KNLSSTSVLLSWDPPVKPNGAIISYDLTLQGPNENYSFITSDNYIILEELSPFTLYSFFA |
| NOV15a | QYWPEDNKPVTVFGDIVITKLMEDVQIDWTIRDLKIERHGDCMTVRQCNFTAWPEHGVPE |
| NOV15b | AARTRKGLGPSSILFFYTDESVPLAPPQNLTLINCTSDFVWLKWSPSPLPGGIVKVYSFK |
| NOV15c | ------------------------------------------------------------ |
| NOV15d | QYWPEDHKPVTVFGDIVITKLMEDVQIDWTIRDLKIERHGDCMTVRQCNFTAWPEHGVPE |
| NOV15e | ------------------------------------------------------------ |
| NOV15f | ------------------------------------------------------------ |
| NOV15g | AARTRKGLGPSSILFFYTDESVPLAPPQNLTLINCTSDFVWLKWSPSPLPGGIVKVYSFK |
| NOV15a | NSAPLIHFVKLVRASRAHDTTPMIVHCSAGVGRTGVFIALDHLTQHINDHDFVDIYGLVA |
| NOV15b | IHEHETDTIYYKNISGFKTEAKLVGLEPVSTYSIRVSAFTKVGNGNQFSNVVKFTTQESV |
| NOV15c | ------------------------------------------------------------ |
| NOV15d | NSAPLIHFVKLVRASRAHDTTPMIVHCSAGVGRTGVFIALDHLTQHINDHDFVDIYGLVA |
| NOV15e | ------------------------------------------------------------ |
| NOV15f | ------------------------------------------------------------ |
| NOV15g | IHEHETDTIYYKNISGFKTEAKLVGLEPVSTYSIRVSAFTKVGNGNQFSNVVKFTTQESV |
| NOV15a | ELRSERMCMVQNLAQYIFLHQCILDLLSNKGSNQPICFVNYSALQKMDSLDAMEGGDVEL |
| NOV15b | PDVVQNMQCMATSWQSVLVKWDPPKKANGIITQYMVTVERNSTKVSPQDHMYTFIKLLAN |
| NOV15c | ------------------------------------------------------------ |
| NOV15d | ELRSERMCMVQNLAQYIFLHQCILDLLSNKGSNQPICFVNYSALQKMDSLDAMEGGDVEL |
| NOV15e | ------------------------------------------------------------ |
| NOV15f | ------------------------------------------------------------ |
| NOV15g | PDVVQNMQCMATSWQSVLVKWDPPKKANGIITQYMVTVERNSTKVSPQDHMYTFIKLLAN |
| NOV15a | EWEETTM----------------------------------------------------- |
| NOV15b | TSYVFKVRASTSAGEGDESTCHVSTLPETVPSVPTNIAFSDVQSTSATLTWIRPDTILGY |
| NOV15c | ------------------------------------------------------------ |
| NOV15d | EWEETTM----------------------------------------------------- |
| NOV15e | ------------------------------------------------------------ |
| NOV15f | ------------------------------------------------------------ |
| NOV15g | TSYVFKVRASTSAGEGDESTCHVSTLPETVPSVPTNIAFSDVQSTSATLTWIRPDTILGY |
| NOV15a | ------------------------------------------------------------ |
| NOV15b | FQNYKITTQLRAQKCKEWESEECVEYQKIQYLYEAHLTEETVYGLKKFRWYRFQVAASTN |
| NOV15c | ------------------------------------------------------------ |
| NOV15d | ------------------------------------------------------------ |
| NOV15e | ------------------------------------------------------------ |
| NOV15f | ------------------------------------------------------------ |
| NOV15g | FQNYKITTQLRAQKCKEWESEECVEYQKIQYLYEAHLTEETVYGLKKFRWYRFQVAASTN |
| NOV15a | ------------------------------------------------------------ |
| NOV15b | AGYGNASNWISTKTLPGPPDGPPENVHVVATSPFSISISWSEPAVITGPTCYLIDVKSVD |
| NOV15c | ------------------------------------------------------------ |
| NOV15d | ------------------------------------------------------------ |
| NOV15e | ------------------------------------------------------------ |
| NOV15f | ------------------------------------------------------------ |
| NOV15g | AGYGNASNWISTKTLPGPPDGPPENVHVVATSPFSISISWSEPAVITGPTCYLIDVKSVD |
| NOV15a | ------------------------------------------------------------ |
| NOV15b | NDEFNISFIKSNEENKTIEIKDLEIFTRYSVVITAFTGNISAAYVEGKSSAEMIVTTLES |
| NOV15c | ------------------------------------------------------------ |
| NOV15d | ------------------------------------------------------------ |
| NOV15e | ------------------------------------------------------------ |
| NOV15f | ------------------------------------------------------------ |
| NOV15g | NDEFNISFIKSNEENKTIEIKDLEIFTRYSVVITAFTGNISAAYVEGKSSAEMIVTTLES |
| NOV15a | ------------------------------------------------------------ |
| NOV15b | APKDPPNNMTFQKIPDEVTKFQLTSLPPSQPNGNIQVYQALVYREDDPTAVQIHNLSIIQ |
| NOV15c | ------------------------------------------------------------ |
| NOV15d | ------------------------------------------------------------ |
| NOV15e | ------------------------------------------------------------ |
| NOV15f | ------------------------------------------------------------ |
| NOV15g | APKDPPNNMTFQKIPDEVTKFQLTSLPPSQPNGNIQVYQALVYREDDPTAVQIHNLSIIQ |
| NOV15a | ------------------------------------------------------------ |
| NOV15b | KTNTFVIAMLEGLKGGHTYNISVYAVNSAGAGPKVPMRITMDIKAPARPKTKPTPIYDAT |
| NOV15c | ------------------------------------------------------------ |
| NOV15d | ------------------------------------------------------------ |
| NOV15e | ------------------------------------------------------------ |
| NOV15f | ------------------------------------------------------------ |
| NOV15g | KTNTFVIAMLEGLKGGHTYNISVYAVNSAGAGPKVPMRITMDIKAPARPKTKPTPIYDAT |
| NOV15a | ------------------------------------------------------------ |
| NOV15b | GKLLVTSTTITIRMPICYYSDDHGPIKNVQVLVTETGAQHDGNVTKWYDAYFNKARPYFT |
| NOV15c | ------------------------------------------------------------ |
| NOV15d | ------------------------------------------------------------ |
| NOV15e | ------------------------------------------------------------ |
| NOV15f | ------------------------------------------------------------ |
| NOV15g | GKLLVTSTTITIRMPICYYSDDHGPIKNVQVLVTETGAQHDGNVTKWYDAYFNKARPYFT |
| NOV15a | ------------------------------------------------------------ |
| NOV15b | NEGFPNPPCTEGKTKFSGNEEIYIIGADNACMIPGNEDKICNGPLKPKKQYLFKFRATNI |
| NOV15c | ------------------------------------------------------------ |
| NOV15d | ------------------------------------------------------------ |
| NOV15e | ------------------------------------------------------------ |
| NOV15f | ------------------------------------------------------------ |
| NOV15g | NEGFPNPPCTEGKTKFSGNEEIYIIGADNACMIPGNEDKICNGPLKPKKQYLFKFRATNI |
| NOV15a | ------------------------------------------------------------ |
| NOV15b | MGQFTDSDYSDPVKTLGEGLSERTLEIILSVTLCILSIILLGTAIFAFARIRQKQKEGGT |
| NOV15c | ------------------------------------------------------------ |
| NOV15d | ------------------------------------------------------------ |
| NOV15e | ------------------------------------------------------------ |
| NOV15f | ------------------------------------------------------------ |
| NOV15g | MGQFTDSDYSDPVKTLGEGLSERTLEIILSVTLCILSIILLGTAIFAFARIRQKQKEGGT |
| NOV15a | ------------------------------------------------------------ |
| NOV15b | YSPQDAEIIDTKLKLDQLITVADLELKDERLTRLLSYRKSIKPISKKSFLQHVEELCTNN |
| NOV15c | ------------------------------------------------------------ |
| NOV15d | ------------------------------------------------------------ |
| NOV15e | ------------------------------------------------------------ |
| NOV15f | ------------------------------------------------------------ |
| NOV15g | YSPQDAEIIDTKLKLDQLITVADLELKDERLTRLLSYRKSIKPISKKSFLQHVEELCTNN |
| NOV15a | ------------------------------------------------------------ |
| NOV15b | NLKFQEEFSELPKFLQDLSSTDADLPWNRAKNRFPNIKPYNNNRVKLIADASVPGSDYIN |
| NOV15c | ------------------------------------------------------------ |
| NOV15d | ------------------------------------------------------------ |
| NOV15e | ------------------------------------------------------------ |
| NOV15f | ------------------------------------------------------------ |
| NOV15g | NLKFQEEFSELPKFLQDLSSTDADLPWNRAKNRFPNIKPYNNNRVKLIADASVPGSDYIN |
| NOV15a | ------------------------------------------------------------ |
| NOV15b | ASYISGYLCPNEFIATQGPLPGTVGDFWRMVWETRAKTLVMLTQCFEKGRIRCHQYWPED |
| NOV15c | ------------------------------------------------------------ |
| NOV15d | ------------------------------------------------------------ |
| NOV15e | ------------------------------------------------------------ |
| NOV15f | ------------------------------------------------------------ |
| NOV15g | ASYISGYLCPNEFIATQGPLPGTVGDFWRMVWETRAKTLVMLTQCFEKGRIRCHQYWPED |
| NOV15a | ------------------------------------------------------------ |
| NOV15b | NKPVTVFGDIVITKLMEDVQIDWTIRDLKIERHGDCMTVRQCNFTAWPEHGVPENSAPLI |
| NOV15c | ------------------------------------------------------------ |
| NOV15d | ------------------------------------------------------------ |
| NOV15e | ------------------------------------------------------------ |
| NOV15f | ------------------------------------------------------------ |
| NOV15g | NKPVTVFGDIVITKLMEDVQIDWTIRDLKIERHGDCMTVRQCNFTAWPEHGVPENSAPLI |
| NOV15a | ------------------------------------------------------------ |
| NOV15b | HFVKLVRASRAHDTTPMIVHCSAGVGRTGVFIALDHLTQHINDHDFVDIYGLVAELRSER |
| NOV15c | ------------------------------------------------------------ |
| NOV15d | ------------------------------------------------------------ |
| NOV15e | ------------------------------------------------------------ |
| NOV15f | ------------------------------------------------------------ |
| NOV15g | HFVKLVRASRAHDTTPMIVHCSAGVGRTGVFIALDHLTQHINDHDFVDIYGLVAELRSER |
| NOV15a | ------------------------------------------------------------ |
| NOV15b | MCMVQNLAQYIFLHQCILDLLSNKGSNQPICFVNYSALQKMDSLDAMEGDVELEWEETTM |
| NOV15c | ------------------------------------------------------------ |
| NOV15d | ------------------------------------------------------------ |
| NOV15e | ------------------------------------------------------------ |
| NOV15f | ------------------------------------------------------------ |
| NOV15g | MCMVQNLAQYIFLHQCILDLLSNKGSNQPICFVNYSALQKMDSLDAMEGDVELEWEETTM |
| NOV15a | (SEQ ID NO: 166) |
| NOV15b | (SEQ ID NO: 168) |
| NOV15c | (SEQ ID NO: 170) |
| NOV15d | (SEQ ID NO: 172) |
| NOV15e | (SEQ ID NO: 174) |
| NOV15f | (SEQ ID NO: 176) |
| NOV15g | (SEQ ID NO: 178) |

[0429] Further analysis of the NOV15a protein yielded the following properties shown in Table 15C.

TABLE 15C
Protein Sequence Properties NOV15a

SignalP analysis: Cleavage site between residues 18 and 19
PSORT II analysis:

| | |
|---|---|
| PSG: | a new signal peptide prediction method |
| | N-region: length 2; pos.chg 0; neg.chg 1 |
| | H-region: length 13; peak value 0.00 |
| | PSG score: −4.40 |
| GvH: | von Heijne's method for signal seq. recognition |
| | GvH score (threshold: −2.1): 2.26 |
| | possible cleavage site: between 17 and 18 |

>>> Seems to have no N-terminal signal peptide

| ALOM: | Klein et al's method for TM region allocation | |
|---|---|---|
| | Init position for calculation: 1 | |
| | Tentative number of TMS(s) for the threshold 0.5: 3 | |
| | INTEGRAL | Likelihood = −2.55 Transmembrane 3-19 |
| | INTEGRAL | Likelihood = −1.12 Transmembrane 605-621 |
| | INTEGRAL | Likelihood = −10.46 Transmembrane 1894-1910 |
| | PERIPHERAL | Likelihood = 1.59 (at 2178) |

| | ALOM score: −10.46 (number of TMSs: 3) |
|---|---|
| MTOP: | Prediction of membrane topology (Hartmann et al.) |
| | Center position for calculation: 10 |
| | Charge difference: −1.0 C(−1.0) − N(0.0) |
| | N >= C: N-terminal side will be inside |

>>> membrane topology: type 3a
MITDISC: discrimination of mitochondrial targeting seq

| | | | |
|---|---|---|---|
| R content: | 0 | Hyd Moment(75): | 3.60 |
| Hyd Moment(95): | 6.71 | G content: | 1 |
| D/E content: | 2 | S/T content: | 2 |
| Score: −7.20 | | | |

| | |
|---|---|
| Gavel: | prediction of cleavage sites for mitochondrial preseq |
| | cleavage site motif not found |

NUCDISC: discrimination of nuclear localization signals

pat4: KKPR (4) at 415
pat4: KPKK (4) at 1855
pat7: PLKPKKQ (4) at 1853
bipartite: none
content of basic residues: 8.8%
NLS Score: 0.37

KDEL: ER retention motif in the C-terminus: none
ER Membrane Retention Signals: none
SKL: peroxisomal targeting signal in the C-terminus: none
PTS2: 2nd peroxisomal targeting signal: none
VAC: possible vacuolar targeting motif: none
RNA-binding motif: none
Actinin-type actin-binding motif:

type 1: none
type 2: none

NMYR: N-myristoylation pattern: none
Prenylation motif: none
memYQRL: transport motif from cell surface to Golgi: none
Tyrosines in the tail: none
Dileucine motif in the tail: none
checking 63 PROSITE DNA binding motifs: none
checking 71 PROSITE ribosomal protein motifs: none
checking 33 PROSITE prokaryotic DNA binding motifs: none

| | |
|---|---|
| NNCN: | Reinhardt's method for Cytoplasmic/Nuclear discrimination |
| | Prediction: cytoplasmic |
| | Reliability: 70.6 |
| COIL: | Lupas's algorithm to detect coiled-coil regions |
| | total: 0 residues |

Final Results (k = 9/23):

56.5%: endoplasmic reticulum
26.1%: mitochondrial
17.4%: nuclear

>> prediction for CG50718-02 is end (k = 23)

[0430] A search of the NOV15a protein against the Geneseq database, a proprietary database that contains sequences published in patents and patent publication, yielded several homologous proteins shown in Table 15D.

TABLE 15D
Geneseq Results for NOV15a

| | | NOV15a | Identities/ | |
|---|---|---|---|---|
| | | Residues/ | Similarities for | |
| Geneseq | Protein/Organism/Length | Match | the Matched | Expect |
| Identifier | [Patent #, Date] | Residues | Region | Value |
| AAO18736 | Human NOV2a protein - Homo | 1 . . . 2281 | 2281/2281 (100%) | 0.0 |
| | sapiens, 2281 aa. | 1 . . . 2281 | 2281/2281 (100%) | |
| | [WO200257450-A2, 25-JUL- | | | |
| | 2002] | | | |
| AAG79724 | Human KPP-2, Incyte ID No. | 1 . . . 2281 | 2180/2306 (94%) | 0.0 |
| | 7480588CD1 - Homo sapiens, | 1 . . . 2299 | 2214/2306 (95%) | |
| | 2299 aa. [WO200290530-A2, | | | |
| | 14-NOV-2002] | | | |
| AAO18738 | Human NOV2c protein - Homo | 1 . . . 2281 | 2177/2305 (94%) | 0.0 |
| | sapiens, 2300 aa. | 1 . . . 2300 | 2205/2305 (95%) | |
| | [WO200257450-A2, 25-JUL- | | | |
| | 2002] | | | |
| ABP60057 | Human phosphatase protein | 1 . . . 2281 | 2171/2296 (94%) | 0.0 |
| | SEQ ID #2 - Homo sapiens, | 1 . . . 2291 | 2209/2296 (95%) | |
| | 2291 aa. [WO200279452-A2, | | | |
| | 10-OCT-2002] | | | |
| ABP60058 | Human phosphatase related | 1 . . . 2281 | 1893/2306 (82%) | 0.0 |
| | protein #SEQ ID 4 - Homo | 1 . . . 2301 | 2077/2306 (89%) | |
| | sapiens, 2301 aa. | | | |
| | [WO200279452-A2, 10-OCT- | | | |
| | 2002] | | | |

[0431] In a BLAST search of public sequence databases, the NOV15a protein was found to have homology to the proteins shown in the BLASTP data in Table 15E.

TABLE 15E
Public BLASTP Results for NOV15a

| | | NOV15a | Identities/ | |
|---|---|---|---|---|
| Protein | | Residues/ | Similarities for | |
| Accession | | Match | the Matched | Expect |
| Number | Protein/Organism/Length | Residues | Portion | Value |
| O88488 | Glomerular mesangial cell | 1 . . . 2281 | 1893/2306 (82%) | 0.0 |
| | receptor protein-tyrosine | 2 . . . 2302 | 2077/2306 (89%) | |
| | phosphatase precursor - Rattus | | | |
| | norvegicus (Rat), 2302 aa. | | | |
| Q8BY76 | Hypothetical fibronectin type | 1 . . . 1042 | 791/1058 (74%) | 0.0 |
| | III domain/fibronectin type III | 1 . . . 1053 | 897/1058 (84%) | |
| | repeat containing protein - Mus | | | |
| | musculus (Mouse), 1086 aa | | | |
| | (fragment). | | | |
| AAO42638 | RE52018p - Drosophila | 1142 . . . 2244 | 311/1133 (27%) | 2e−99 |
| | melanogaster (Fruit fly), 1631 | 497 . . . 1531 | 505/1133 (44%) | |
| | aa. | | | |
| Q8IR87 | CG1817-PC - Drosophila | 1142 . . . 2244 | 311/1133 (27%) | 2e−99 |
| | melanogaster (Fruit fly), 1556 | 497 . . . 1531 | 505/1133 (44%) | |
| | aa. | | | |
| Q9VYW1 | CG1817 protein - Drosophila | 1142 . . . 2244 | 311/1133 (27%) | 2e−99 |
| | melanogaster (Fruit fly), 1962 | 497 . . . 1531 | 505/1133 (44%) | |
| | aa. | | | |

[0432] PFam analysis indicates that the NOV15a protein contains the domains shown in the Table 15F.

TABLE 15F
Domain Analysis of NOV15a

| | | Identities/ | |
|---|---|---|---|
| | NOV15a Match | Similarities | Expect |
| Pfam Domain | Region | for the Matched Region | Value |
| fn3 | 54 . . . 141 | 30/91 (33%) | 1.6e−14 |
| | | 63/91 (69%) | |
| fn3 | 301 . . . 383 | 25/88 (28%) | 2.7e−06 |
| | | 59/88 (67%) | |
| fn3 | 561 . . . 643 | 26/86 (30%) | 7.9e−07 |
| | | 56/86 (65%) | |
| fn3 | 657 . . . 738 | 28/87 (32%) | 4.2e−14 |
| | | 62/87 (71%) | |
| fn3 | 751 . . . 834 | 29/87 (33%) | 9.4e−12 |
| | | 67/87 (77%) | |
| fn3 | 846 . . . 926 | 24/87 (28%) | 7.6e−12 |
| | | 62/87 (71%) | |
| fn3 | 938 . . . 1030 | 25/97 (26%) | 6.8e−08 |
| | | 68/97 (70%) | |
| fn3 | 1043 . . . 1124 | 19/87 (22%) | 0.058 |
| | | 56/87 (64%) | |
| fn3 | 1140 . . . 1221 | 28/87 (32%) | 2.4e−09 |
| | | 57/87 (66%) | |
| fn3 | 1233 . . . 1318 | 24/87 (28%) | 8.3e−09 |
| | | 59/87 (68%) | |
| fn3 | 1330 . . . 1408 | 25/86 (29%) | 6.2e−11 |
| | | 58/86 (67%) | |
| fn3 | 1420 . . . 1516 | 29/99 (29%) | 7.7e−09 |
| | | 67/99 (68%) | |
| fn3 | 1528 . . . 1610 | 19/87 (22%) | 2.1e−07 |
| | | 60/87 (69%) | |
| fn3 | 1631 . . . 1724 | 26/97 (27%) | 1e−05 |
| | | 66/97 (68%) | |
| Y_phosphatase | 2008 . . . 2239 | 116/280 (41%) | 5.1e−109 |
| | | 190/280 (68%) | |

### Example 16

[0433] The NOV16 clone was analyzed, and the nucleotide and encoded polypeptide sequences are shown in Table 16A.

TABLE 16A
NOV16 Sequence Analysis

| | | |
|---|---|---|
| NOV16a, CG50934-03 | SEQ ID NO: 179 | 964 bp |

| | | |
|---|---|---|
| DNA Sequence | ORF Start: ATG at 67 | ORF Stop: TGA at 655 |

GACCATCTGATTGCCGGTCTCTCCTGGTGCCCCTGAGCTCTGGGAAGACCCTCGTCCGTCCCCCTCAT
GAGCCCGGCACGGGGCGTGAGCTGGTGGGCATCACTGGGGGCTGCGACGTCTCGGCCAGGAGGCACCC
CTGGCAGGGAGGAGTTGGAGGCTTGCGCGTTTAGAGTGCAGGTGGGGCAGCTGAGGCTCTATGAGGAC
GACCAGCGGACGAAGGTGGTTGAGATCGTCCGTCACCCCCAGTACAACGAGAGCCTGTCTGCCCAGGG
CGGTGCGGACATCGCCCTGCTGAAGCTGGAGGCCCCGGTGCCGCTGTCTGAGCTCATCCACCCGGTCT
CGCTCCCGTCTGCCTCCCGGGACGTGCCCTCGGGGAAGACCTGCTGGGTGACCGGCTGGGGTGTCATT
GGACGTGGAGGTCAGGAGCAGGACCACTTGGGTGGGATGTGGAGAGATGACCCGGAATGTCGGTGCAG
GCCTGGGCTCCAGACGCGTCCTGGATGGCTTCCTGCCGCTGCCGAGACGGATGGCCACAGGCCAGGTG
GCTCAGAGCAGCAGGAATGTACTATCTCACGGCTCTGCAGGCGGAACGTCCACACTCCAGGCGTGGGC
AGGAACTACTGCCCTGGCCCCTCAGCTTGTGGGAGGCGACGGTGAAGGTCAGGAGCAACGTCCTCTGT
AACCAGACCTGTCGCCGCCGCATTCCTTCCAACCACACTGAGCGGTTTGAGCGGCTCATCAAGGACGA
CATGCTGTGTGCCGGGGACGGGAACCACGGCTCCTGGCCAGGCGACAACGGGGGCCCCCTCCTGTGCA
GGCGGAATTGCACCTGGGTCCAGGTGGAGGTGGTGAGCTGGGGCAAACTCTGCGGCCTTCGCGGCTAT
CCCGGCATGTACACCCGCGTGACGAGCTACGTGTCCTGGATCCGCCAGTACGTCCCGCCGTTCCCCAG
ACGCTAGCTGGG

NOV16a, CG50934-03

| | | | |
|---|---|---|---|
| Protein Sequence | SEQ ID NO: 180 | 196 aa | MW at 21256.7kD |

MSPARGVSWWASLGAATSRPGGTPGREELEACAFRVQVGQLRLYEDDQRTKVVEIVRHPQYNESLSAQ
GGADIALLKLEAPVPLSELIHPVSLPSASRDVPSGKTCWVTGWGVIGRGGQEQDHLGGMWRDDPECRC
RPGLQTRPGWLPAAAETDGHRPGGSEQQECTISRLCRRNVHTPGVGRNYCPGPSACGRRR

| | | |
|---|---|---|
| NOV16b, CG50934-01 | SEQ ID NO: 181 | 1171 bp |

| | | |
|---|---|---|
| DNA Sequence | ORF Start: at 187 | ORF Stop: TGA at 805 |

ATGCTGTGGCTACTGCTCCTGACCCTCCCCTGCCTGATGGGCTCTGTGCCCAGGAACCCAGGCGAGTC
CGCCCCACCCAATGCCCCTGCTGCCCAGGACCCCCTCCTTGCCCTGCCCCGGGCTCAGAGTGCCAGCC
CTGGGGTGGGTGGGGACCATCTGATTGCCGGTCTCTCCTGGTGCCCCTGAGCTCTGGGAAGACCCTCG
TCCGTCCCCCTCATGAGCCCGGCACGGGGCGTGAGCTGGTGGGCATCACTGGGGGCTGCGACGTCTCG
GCCAGGAGGCACCCCTGGCAGGGAGGAGTTGGAGGCTTGCGCGTTTAGAGTGCAGGTGGGGCAGCTGA
GGCTCTATGAGGACGACCAGCGGACGAAGGTGGTTGAGATCGTCCGTCACCCCCAGTACAACGAGAGC
CTGTCTGCCCAGGGCGGTGCGGACATCGCCCTGCTGAAGCTGGAGGCCCCGGTGCCGCTGTCTGAGCT
CATCCACCCGGTCTCGCTCCCGTCTGCCTCCCTGGACGTGCCCTCGGGGAAGACCTGCTGGGTGACCG
GCTGGGGTGTCATTGGACGTGGAGGTCAGGAGCAGGACCACTTGGGTGGGATGTGGAGAGATGACCCG
GAATGTCGGTGCAGGCCTGGGCTCCAGACGCGTCCTGGATGGCTTCCTGCCGCTGCCGAGACGGATGG
CCACAGGCCAGGTGGCTCAGAGCAGCAGGAATGTACTATCTCACGGCTCTGCAGGCGGAACGTCCACA
CTCCAGGCGTGGGCAGGAACTACTGCCCTGGCCCCTCAGCTTGTGGGAGGCGACGGTGAAGGTCAGGA
GCAACGTCCTCTGTAACCAGACCTGTCGCCGCCGCTTTCCTTCCAACCACACTGAGCGGTTTGAGCGG
CTCATCAAGGACGACATGCTGTGTGCCGGGGACGGGAACCACGGCTCCTGGCCAGGCGACAACGGGGG
CCCCCTCCTGTGCAGGCGGAATTGCACCTGGGTCCAGGTGGAGGTGGTGAGCTGGGGCAAACTCTGCG
GCCTTCGCGGCTATCCCGGCATGTACACCCGCGTGACGAGCTACGTGTCCTGGATCCGCCAGTACGTC
CCGCCGTTCCCCAGACGCTAGCTGGGGTGCAGTGGGGTCTGCATGATCCAGGAGGGCCCGTCTTCCTT
GTGGACACGCCTGCT

NOV1 6b, CG50934-01

| | | | |
|---|---|---|---|
| Protein Sequence | SEQ ID NO: 182 | 206 aa | MW at 22191.8kD |

ALGRPSSVPLMSPARGVSWWASLGAATSRPGGTPGREELEACAFRVQVGQLRLYEDDQRTKVVEIVRH
PQYNESLSAQGGADIALLKLEAPVPLSELIHPVSLPSASLDVPSGKTCWVTGWGVIGRGGQEQDHLGG
MWRDDPECRCRPGLQTRPGWLPAAAETDGHRPGGSEQQECTISRLCRRNVHTPGVGRNYCPGPSACGR
RR

| | | |
|---|---|---|
| NOV16c, CG50934-02 | SEQ ID NO: 183 | 843 bp |

| | | |
|---|---|---|
| DNA Sequence | ORF Start: ATG at 26 | ORF Stop: TAG at 836 |

GAGGTGGAGGTTGCAGTAAGCCAAGATGGCGCCACTGCACTCTAGCCTGTTTCTGCTGAGCGGGACCA
TGAGCCCAAAAGTGGGCATCACTGGGGGCTGCGACGTCTCGGCCAGGAGGCACCCCTGGCAGGTCAGC
CTGAGGTTCTACAGCATGAAGAAGGGTCTGTGGGAGCCCATCTGTGGGGGCTCCCTCATCCACCCAGA
GTGGGTGCTGACCGCCGCCCACTGCGTCGAGCTTGAGGAGTTGGAGGCTTGCGCGTTTAGAGTGCAGG
TGGGGCAGCTGAGGCTCTATGAGGACGACCAGCGGACGAAGGTGGTTGAGATCGTCCGTCACCCCCAG
TACAACGAGAGCCTGTCTGCCCAGGGCGGTGCGGACATCGCCCTGCTGAAGCTGGAGGCCCCGGTGCC
GCTGTCTGAGCTCATCCACCCGGTCTCGCTCCCGTCTGCCTCCCTGGACGTGCCCTCGGGGAAGACCT
GCTGGGTGACCGGCTGGGGTGTCATTTGGGGACACGTTTTCCTGCTCCCGCCACCCCACCTCAGGGCA
GCGGAAGGTCCAATCATGAGGACCCGAGCTTGCGAGAGGATGTATCACAAAGGCCCCACTGCCCACGT
CACCATCATCAAGGCTGCCATGCCGTGTGCAGGGGCTGAGCGCCATCTCTCCCCACAGGGCGACAACG
GGGGCCCCCTCCTGTGCAGGCGGAATTGCACCTGGGTCCAGGTGGAGGTGGTGAGCTGGGGCAAACTC
TGCGGCCTTCGCTATCCCGGCATGTACACCCGCGTGACGAGCTACGTGTCCTGGATCCGCCAGTACGT
CCCGCCGTTCCCCAGACGCTAGCTGGG

NOV16c, CG50934-02

| | | | |
|---|---|---|---|
| Protein Sequence | SEQ ID NO: 184 | 270 aa | MW at 29993.6kD |

MAPLHSSLFLLSGTMSPKVGITGGCDVSARRHPWQVSLRFYSMKKGLWEPICGGSLIHPEWVLTAAHC
VELEELEACAFRVQVGQLRLYEDDQRTKVVEIVRHPQYNESLSAQGGADIALLKLEAPVPLSELIHPV
SLPSASLDVPSGKTCWVTGWGVIWGHVFLLPPPHLRAAEGPIMRTRACERNYHKGPTAHVTIIKAAMP
CAGAERHLSPQGDNGGPLLCRRNCTWVQVEVVSWGKLCGLRYPGMYTRVTSYVSWIRQYVPPFPRR

| | |
|---|---|
| SEQ ID NO: 185 | 964 bp |

| | | |
|---|---|---|
| NOV16d, SNP13381559 of | ORF Start: ATG at 67 | ORF Stop: TGA at 655 |

| | | |
|---|---|---|
| CG50934-03, DNA Sequence | SNP Pos: 338 | SNP Change: T to C |

GACCATCTGATTGCCGGTCTCTCCTGGTGCCCCTGAGCTCTGGGAAGACCCTCGTCCGTCCCCCTCAT
GAGCCCGGCACGGGGCGTGAGCTGGTGGGCATCACTGGGGGCTGCGACGTCTCGGCCAGGAGGCACCC
CTGGCAGGGAGGAGTTGGAGGCTTGCGCGTTTAGAGTGCAGGTGGGGCAGCTGAGGCTCTATGAGGAC
GACCAGCGGACGAAGGTGGTTGAGATCGTCCGTCACCCCCAGTACAACGAGAGCCTGTCTGCCCAGGG
CGGTGCGGACATCGCCCTGCTGAAGCTGGAGGCCCCGGTGCCGCTGTCTGAGCTCATCCACCCGGCCT
CGCTCCCGTCTGCCTCCCGGGACGTGCCCTCGGGGAAGACCTGCTGGGTGACCGGCTGGGGTGTCATT
GGACGTGGAGGTCAGGAGCAGGACCACTTGGGTGGGATGTGGAGAGATGACCCGGAATGTCGGTGCAG
GCCTGGGCTCCAGACGCGTCCTGGATGGCTTCCTGCCGCTGCCGAGACGGATGGCCACAGGCCAGGTG
GCTCAGAGCAGCAGGAATGTACTATCTCACGGCTCTGCAGGCGGAACGTCCACACTCCAGGCGTGGGC
AGGAACTACTGCCCTGGCCCCTCAGCTTGTGGGAGGCGACGGTGAAGGTCAGGAGCAACGTCCTCTGT
AACCAGACCTGTCGCCGCCGCATTCCTTCCAACCACACTGAGCGGTTTGAGCGGCTCATCAAGGACGA
CATGCTGTGTGCCGGGGACGGGAACCACGGCTCCTGGCCAGGCGACAACGGGGGCCCCCTCCTGTGCA
GGCGGAATTGCACCTGGGTCCAGGTGGAGGTGGTGAGCTGGGGCAAACTCTGCGGCCTTCGCGGCTAT
CCCGGCATGTACACCCGCGTGACGAGCTACGTGTCCTGGATCCGCCAGTACGTCCCGCCGTTCCCCAG
ACGCTAGCTGGG

| | | |
|---|---|---|
| NOV16d, SNP13381559 of | SEQ ID NO: 186 | MW at 21228.6kD |

| | | | |
|---|---|---|---|
| CG50934-03, Protein Sequence | SNP Pos: 91 | 196 aa | SNP Change: Val to Ala |

MSPARGVSWWASLGAATSRPGGTPGREELEACAFRVQVGQLRLYEDDQRTKVVEIVRHPQYNESLSAQ
GGADIALLKLEAPVPLSELIHPASLPSASRDVPSGKTCWVTGWGVIGRGGQEQDHLGGMWRDDPECRC
RPGLQTRPGWLPAAAETDGHRPGGSEQQECTISRLCRRNVHTPGVGRNYCPGPSACGRRR

| | |
|---|---|
| SEQ ID NO: 187 | 964 bp |

| | | |
|---|---|---|
| NOV16e, SNP13381558 of | ORF Start: ATG at 67 | ORF Stop: TGA at 655 |

| | | |
|---|---|---|
| CG50934-03, DNA Sequence | SNP Pos: 359 | SNP Change: G to T |

GACCATCTGATTGCCGGTCTCTCCTGGTGCCCCTGAGCTCTGGGAAGACCCTCGTCCGTCCCCCTCAT
GAGCCCGGCACGGGGCGTGAGCTGGTGGGCATCACTGGGGGCTGCGACGTCTCGGCCAGGAGGCACCC
CTGGCAGGGAGGAGTTGGAGGCTTGCGCGTTTAGAGTGCAGGTGGGGCAGCTGAGGCTCTATGAGGAC
GACCAGCGGACGAAGGTGGTTGAGATCGTCCGTCACCCCCAGTACAACGAGAGCCTGTCTGCCCAGGG
CGGTGCGGACATCGCCCTGCTGAAGCTGGAGGCCCCGGTGCCGCTGTCTGAGCTCATCCACCCGGTCT
CGCTCCCGTCTGCCTCCCTGGACGTGCCCTCGGGGAAGACCTGCTGGGTGACCGGCTGGGGTGTCATT
GGACGTGGAGGTCAGGAGCAGGACCACTTGGGTGGGATGTGGAGAGATGACCCGGAATGTCGGTGCAG
GCCTGGGCTCCAGACGCGTCCTGGATGGCTTCCTGCCGCTGCCGAGACGGATGGCCACAGGCCAGGTG
GCTCAGAGCAGCAGGAATGTACTATCTCACGGCTCTGCAGGCGGAACGTCCACACTCCAGGCGTGGGC
AGGAACTACTGCCCTGGCCCCTCAGCTTGTGGGAGGCGACGGTGAAGGTCAGGAGCAACGTCCTCTGT
AACCAGACCTGTCGCCGCCGCATTCCTTCCAACCACACTGAGCGGTTTGAGCGGCTCATCAAGGACGA
CATGCTGTGTGCCGGGGACGGGAACCACGGCTCCTGGCCAGGCGACAACGGGGGCCCCCTCCTGTGCA
GGCGGAATTGCACCTGGGTCCAGGTGGAGGTGGTGAGCTGGGGCAAACTCTGCGGCCTTCGCGGCTAT
CCCGGCATGTACACCCGCGTGACGAGCTACGTGTCCTGGATCCGCCAGTACGTCCCGCCGTTCCCCAG
ACGCTAGCTGGG

| | | |
|---|---|---|
| NOV16e, SNP13381558 of | SEQ ID NO: 188 | MW at 21213.7kD |

| | | | |
|---|---|---|---|
| CG50934-03, Protein Sequence | SNP Pos: 98 | 196 aa | SNP Change: Arg to Leu |

MSPARGVSWWASLGAATSRPGGTPGREELEACAFRVQVGQLRLYEDDQRTKVVEIVRHPQYNESLSAQ
GGADIALLKLEAPVPLSELIHPVSLPSASLDVPSGKTCWVTGWGVIGRGGQEQDHLGGMWRDDPECRC
RPGLQTRPGWLPAAAETDGHRPGGSEQQECTISRLCRRNVHTPGVGRNYCPGPSACGRRR

| | |
|---|---|
| SEQ ID NO: 189 | 964 bp |

| | | |
|---|---|---|
| NOV16f, SNP13376399 of | ORF Start: ATG at 67 | ORF Stop: TGA at 655 |

| | | |
|---|---|---|
| CG50934-03, DNA Sequence | SNP Pos: 641 | SNP Change: G to A |

GACCATCTGATTGCCGGTCTCTCCTGGTGCCCCTGAGCTCTGGGAAGACCCTCGTCCGTCCCCCTCAT
GAGCCCGGCACGGGGCGTGAGCTGGTGGGCATCACTGGGGGCTGCGACGTCTCGGCCAGGAGGCACCC
CTGGCAGGGAGGAGTTGGAGGCTTGCGCGTTTAGAGTGCAGGTGGGGCAGCTGAGGCTCTATGAGGAC
GACCAGCGGACGAAGGTGGTTGAGATCGTCCGTCACCCCCAGTACAACGAGAGCCTGTCTGCCCAGGG
CGGTGCGGACATCGCCCTGCTGAAGCTGGAGGCCCCGGTGCCGCTGTCTGAGCTCATCCACCCGGTCT
CGCTCCCGTCTGCCTCCCGGGACGTGCCCTCGGGGAAGACCTGCTGGGTGACCGGCTGGGGTGTCATT
GGACGTGGAGGTCAGGAGCAGGACCACTTGGGTGGGATGTGGAGAGATGACCCGGAATGTCGGTGCAG
GCCTGGGCTCCAGACGCGTCCTGGATGGCTTCCTGCCGCTGCCGAGACGGATGGCCACAGGCCAGGTG
GCTCAGAGCAGCAGGAATGTACTATCTCACGGCTCTGCAGGCGGAACGTCCACACTCCAGGCGTGGGC
AGGAACTACTGCCCTGGCCCCTCAGCTTATGGGAGGCGACGGTGAAGGTCAGGAGCAACGTCCTCTGT
AACCAGACCTGTCGCCGCCGCATTCCTTCCAACCACACTGAGCGGTTTGAGCGGCTCATCAAGGACGA
CATGCTGTGTGCCGGGGACGGGAACCACGGCTCCTGGCCAGGCGACAACGGGGGCCCCCTCCTGTGCA
GGCGGAATTGCACCTGGGTCCAGGTGGAGGTGGTGAGCTGGGGCAAACTCTGCGGCCTTCGCGGCTAT
CCCGGCATGTACACCCGCGTGACGAGCTACGTGTCCTGGATCCGCCAGTACGTCCCGCCGTTCCCCAG
ACGCTAGCTGGG

| | | |
|---|---|---|
| NOV16f, SNP13376399 of | SEQ ID NO: 190 | MW at 21316.7kD |

| | | | |
|---|---|---|---|
| CG50934-03, Protein Sequence | SNP Pos: 192 | 196 aa | SNP Change: Cys to Tyr |

MSPARGVSWWASLGAATSRPGGTPGREELEACAFRVQVGQLRLYEDDQRTKVVEIVRHPQYNESLSAQ
GGADIALLKLEAPVPLSELIHPVSLPSASRDVPSGKTCWVTGWGVIGRGGQEQDHLGGMWRDDPECRC
RPGLQTRPGWLPAAAETDGHRPGGSEQQECTISRLCRRNVHTPGVGRNYCPGPSAYGRRR

| | |
|---|---|
| SEQ ID NO: 191 | 964 bp |

| | | |
|---|---|---|
| NOV16g, SNP13378301 of | ORF Start: ATG at 67 | ORF Stop: TGA at 655 |

| | | |
|---|---|---|
| CG50934-03, DNA Sequence | SNP Pos: 868 | SNP Change: G to A |

GACCATCTGATTGCCGGTCTCTCCTGGTGCCCCTGAGCTCTGGGAAGACCCTCGTCCGTCCCCCTCAT
GAGCCCGGCACGGGGCGTGAGCTGGTGGGCATCACTGGGGGCTGCGACGTCTCGGCCAGGAGGCACCC
CTGGCAGGGAGGAGTTGGAGGCTTGCGCGTTTAGAGTGCAGGTGGGGCAGCTGAGGCTCTATGAGGAC
GACCAGCGGACGAAGGTGGTTGAGATCGTCCGTCACCCCCAGTACAACGAGAGCCTGTCTGCCCAGGG
CGGTGCGGACATCGCCCTGCTGAAGCTGGAGGCCCCGGTGCCGCTGTCTGAGCTCATCCACCCGGTCT
CGCTCCCGTCTGCCTCCCGGGACGTGCCCTCGGGGAAGACCTGCTGGGTGACCGGCTGGGGTGTCATT
GGACGTGGAGGTCAGGAGCAGGACCACTTGGGTGGGATGTGGAGAGATGACCCGGAATGTCGGTGCAG
GCCTGGGCTCCAGACGCGTCCTGGATGGCTTCCTGCCGCTGCCGAGACGGATGGCCACAGGCCAGGTG
GCTCAGAGCAGCAGGAATGTACTATCTCACGGCTCTGCAGGCGGAACGTCCACACTCCAGGCGTGGGC
AGGAACTACTGCCCTGGCCCCTCAGCTTGTGGGAGGCGACGGTGAAGGTCAGGAGCAACGTCCTCTGT
AACCAGACCTGTCGCCGCCGCATTCCTTCCAACCACACTGAGCGGTTTGAGCGGCTCATCAAGGACGA
CATGCTGTGTGCCGGGGACGGGAACCACGGCTCCTGGCCAGGCGACAACGGGGGCCCCCTCCTGTGCA
GGCGGAATTGCACCTGGGTCCAGGTGGAGGTGGTGAGCTGGGGCAAACTCTACGGCCTTCGCGGCTAT
CCCGGCATGTACACCCGCGTGACGAGCTACGTGTCCTGGATCCGCCAGTACGTCCCGCCGTTCCCCAG
ACGCTAGCTGGG

| | |
|---|---|
| NOV16g, SNP13378301 of | MW at 21256.7kD |

| | | | |
|---|---|---|---|
| CG50934-03, Protein Sequence | SEQ ID NO: 192 | 196 aa | SNP Change: no change |

MSPARGVSWWASLGAATSRPGGTPGREELEACAFRVQVGQLRLYEDDQRTKVVEIVRHPQYNESLSAQ
GGADIALLKLEAPVPLSELIHPVSLPSASRDVPSGKTCWVTGWGVIGRGGQEQDHLGGMWRDDPECRC
RPGLQTRPGWLPAAAETDGHRPGGSEQQECTISRLCRRNVHTPGVGRNYCPGPSACGRRR

| | |
|---|---|
| SEQ ID NO: 193 | 964 bp |

| | | |
|---|---|---|
| NOV16h, SNP13378300 of | ORF Start: ATG at 67 | ORF Stop: TGA at 655 |

| | | |
|---|---|---|
| CG50934-03, DNA Sequence | SNP Pos: 907 | SNP Change: C to T |

GACCATCTGATTGCCGGTCTCTCCTGGTGCCCCTGAGCTCTGGGAAGACCCTCGTCCGTCCCCCTCAT
GAGCCCGGCACGGGGCGTGAGCTGGTGGGCATCACTGGGGGCTGCGACGTCTCGGCCAGGAGGCACCC
CTGGCAGGGAGGAGTTGGAGGCTTGCGCGTTTAGAGTGCAGGTGGGGCAGCTGAGGCTCTATGAGGAC
GACCAGCGGACGAAGGTGGTTGAGATCGTCCGTCACCCCCAGTACAACGAGAGCCTGTCTGCCCAGGG
CGGTGCGGACATCGCCCTGCTGAAGCTGGAGGCCCCGGTGCCGCTGTCTGAGCTCATCCACCCGGTCT
CGCTCCCGTCTGCCTCCCGGGACGTGCCCTCGGGGAAGACCTGCTGGGTGACCGGCTGGGGTGTCATT
GGACGTGGAGGTCAGGAGCAGGACCACTTGGGTGGGATGTGGAGAGATGACCCGGAATGTCGGTGCAG
GCCTGGGCTCCAGACGCGTCCTGGATGGCTTCCTGCCGCTGCCGAGACGGATGGCCACAGGCCAGGTG
GCTCAGAGCAGCAGGAATGTACTATCTCACGGCTCTGCAGGCGGAACGTCCACACTCCAGGCGTGGGC
AGGAACTACTGCCCTGGCCCCTCAGCTTGTGGGAGGCGACGGTGAAGGTCAGGAGCAACGTCCTCTGT
AACCAGACCTGTCGCCGCCGCATTCCTTCCAACCACACTGAGCGGTTTGAGCGGCTCATCAAGGACGA
CATGCTGTGTGCCGGGGACGGGAACCACGGCTCCTGGCCAGGCGACAACGGGGGCCCCCTCCTGTGCA
GGCGGAATTGCACCTGGGTCCAGGTGGAGGTGGTGAGCTGGGGCAAACTCTGCGGCCTTCGCGGCTAT
CCCGGCATGTACACCCGCGTGATGAGCTACGTGTCCTGGATCCGCCAGTACGTCCCGCCGTTCCCCAG
ACGCTAGCTGGG

| | |
|---|---|
| NOV16h, SNP13378300 of | MW at 21256.7kD |

| | | | |
|---|---|---|---|
| CG50934-03, Protein Sequence | SEQ ID NO: 194 | 196 aa | SNP Change: no change |

MSPARGVSWWASLGAATSRPGGTPGREELEACAFRVQVGQLRLYEDDQRTKVVEIVRHPQYNESLSAQ
GGADIALLKLEAPVPLSELIHPVSLPSASRDVPSGKTCWVTGWGVIGRGGQEQDHLGGMWRDDPECRC
RPGLQTRPGWLPAAAETDGHRPGGSEQQECTISRLCRRNVHTPGVGRNYCPGPSACGRRR

[0434] A ClustalW comparison of the above protein sequences yields the following sequence alignment shown in Table 16B.

TABLE 16B
Comparison of the NOV16 protein sequences.

| | |
|---|---|
| NOV16a | --------------MSPARGVS-----------WWASLGAATSRP-------GGTPGR-- |
| NOV16b | ----ALGRPSSVPLMSPARGVS-----------WWASLGAATSRP-------GGTPGR-- |
| NOV16c | MAPLHSSLFLLSGTMSPKVGITGGCDVSARRHPWQVSLRFYSMKKGLWEPICGGSLIHPE |
| NOV16a | -----------EELEACAFRVQVGQLRLYEDDQRTKVVEIVRHPQYNESLSAQGGADIAL |
| NOV16b | -----------EELEACAFRVQVGQLRLYEDDQRTKVVEIVRHPQYNESLSAQGGADIAL |
| NOV16c | WVLTAAHCVELEELEACAFRVQVGQLRLYEDDQRTKVVEIVRHPQYNESLSAQGGADIAL |
| NOV16a | LKLEAPVPLSELIHPVSLPSASRDVPSGKTCWVTGWGVIG------RGGQEQDHLGGMWR |
| NOV16b | LKLEAPVPLSELIHPVSLPSASLDVPSGKTCWVTGWGVIG------RGGQEQDHLGGMWR |
| NOV16c | LKLEAPVPLSELIHPVSLPSASLDVPSGKTCWVTGWGVIWGHVFLLPPPHLRAAEGPIMR |
| NOV16a | D-DPECRCRPGLQTRPGWLPAAAETDGHRPGGSEQQECTISRLCRRNVHTPGVGRNYCPG |
| NOV16b | D-DPECRCRPGLQTRPGWLPAAAETDGHRPGGSEQQECTISRLCRRNVHTPGVGRNYCPG |
| NOV16c | TRACERMYHKGPTAHVTIIKAAMPCAGAERHLSPQGDNGGPLLCRRN--CTWVQVEVVSW |
| NOV16a | PSACGRRR------------------------ |
| NOV16b | PSACGRRR------------------------ |
| NOV16c | GKLCGLRYPGMYTRVTSYVSWIRQYVPPFPRR |
| NOV16a | (SEQ ID NO: 180) |
| NOV16b | (SEQ ID NO: 182) |
| NOV16c | (SEQ ID NO: 184) |

[0435] Further analysis of the NOV16a protein yielded the following properties shown in Table 16C.

TABLE 16C
Protein Sequence Properties NOV16a

SignalP analysis: Cleavage site between residues 19 and 20
PSORT II analysis:

| | |
|---|---|
| PSG: | a new signal peptide prediction method |
| | N-region: length 5; pos.chg 1; neg.chg 0 |
| | H-region: length 13; peak value 6.79 |
| | PSG score: 2.39 |
| GvH: | von Heijne's method for signal seq. recognition |
| | GvH score (threshold: −2.1): −3.86 |
| | possible cleavage site: between 18 and 19 |

>>> Seems to have no N-terminal signal peptide

| ALOM: | Klein et al's method for TM region allocation | |
|---|---|---|
| | Init position for calculation: 1 | |
| | Tentative number of TMS(s) for the threshold 0.5: 0 | |
| | number of TMS(s) .. fixed | |
| | PERIPHERAL | Likelihood = 4.88 (at 73) |

| | ALOM score: 4.88 (number of TMSs: 0) |
|---|---|
| MTOP: | Prediction of membrane topology (Hartmann et al.) |
| | Center position for calculation: 6 |
| | Charge difference: −3.0 C(−1.0) − N(2.0) |
| | N >= C: N-terminal side will be inside |

MITDISC: discrimination of mitochondrial targeting seq

| | | | |
|---|---|---|---|
| R content: | 3 | Hyd Moment(75): | 7.01 |
| Hyd Moment(95): | 6.08 | G content: | 5 |
| DIE content: | 1 | S/T content: | 6 |
| Score: −2.71 | | | |

| | |
|---|---|
| Gavel: | prediction of cleavage sites for mitochondrial preseq |
| | R-2 motif at 29 SRP\|GG |

NUCDISC: discrimination of nuclear localization signals

pat4: none
pat7: none
bipartite: none
content of basic residues: 12.2%
NLS Score: −0.47

KDEL: ER retention motif in the C-terminus: none
ER Membrane Retention Signals:

XXRR-like motif in the N-terminus: SPAR

none
SKL: peroxisomal targeting signal in the C-terminus: none
PTS2: 2nd peroxisomal targeting signal: none
VAC: possible vacuolar targeting motif: none
RNA-binding motif: none
Actinin-type actin-binding motif:

type 1: none
type 2: none

NMYR: N-myristoylation pattern: none
Prenylation motif: none
memYQRL: transport motif from cell surface to Golgi: none
Tyrosines in the tail: none
Dileucine motif in the tail: none
checking 63 PROSITE DNA binding motifs: none
checking 71 PROSITE ribosomal protein motifs: none
checking 33 PROSITE prokaryotic DNA binding motifs: none

| | |
|---|---|
| NNCN: | Reinhardt's method for Cytoplasmic/Nuclear discrimination |
| | Prediction: nuclear |
| | Reliability: 70.6 |
| COIL: | Lupas's algorithm to detect coiled-coil regions |
| | total: 0 residues |

Final Results (k = 9/23):

55.6%: extracellular, including cell wall
33.3%: mitochondrial
11.1%: cytoplasmic

>> prediction for CG50934-03 is exc (k = 9)

[0436] A search of the NOV16a protein against the Geneseq database, a proprietary database that contains sequences published in patents and patent publication, yielded several homologous proteins shown in Table 16D.

TABLE 16D
Geneseq Results for NOV16a

| | | NOV16a | Identities/ | |
|---|---|---|---|---|
| | | Residues/ | Similarities for | |
| Geneseq | Protein/Organism/Length | Match | the Matched | Expect |
| Identifier | [Patent #, Date] | Residues | Region | Value |
| AAE08591 | Human NOV12 protein - Homo | 12 . . . 117 | 106/106 (100%) | 2e−56 |
| | sapiens, 220 aa. [WO200161009- | 1 . . . 106 | 106/106 (100%) | |
| | A2, 23-AUG-2001] | | | |
| AAU82736 | Amino acid sequence of novel | 5 . . . 117 | 97/121 (80%) | 3e−47 |
| | human protease #35 - Homo | 184 . . . 302 | 101/121 (83%) | |
| | sapiens, 948 aa. [WO200200860- | | | |
| | A2, 03-JAN-2002] | | | |
| AAE14347 | Human protease PRTS-12 | 5 . . . 117 | 97/121 (80%) | 3e−47 |
| | protein - Homo sapiens, 262 aa. | 30 . . . 148 | 101/121 (83%) | |
| | [WO2001 83775-A2, 08-NOV- | | | |
| | 2001] | | | |
| AAE08587 | Human NOV8 protein - Homo | 25 . . . 117 | 91/93 (97%) | 6e−47 |
| | sapiens, 290 aa. [WO200161009- | 84 . . . 176 | 91/93 (97%) | |
| | A2, 23-AUG-2001] | | | |
| AAE08590 | Human NOV11 protein - Homo | 27 . . . 117 | 90/91 (98%) | 2e−46 |
| | sapiens, 285 aa. [WO200161009- | 81 . . . 171 | 90/91 (98%) | |
| | A2, 23-AUG-2001] | | | |

[0437] In a BLAST search of public sequence databases, the NOV16a protein was found to have homology to the proteins shown in the BLASTP data in Table 16E.

TABLE 16E
Public BLASTP Results for NOV16a

| | | NOV16a | Identities/ | |
|---|---|---|---|---|
| Protein | | Residues/ | Similarities for | |
| Accession | | Match | the Matched | Expect |
| Number | Protein/Organism/Length | Residues | Portion | Value |
| AAP21675 | Mast cell protease-11 - Mus | 10 . . . 114 | 63/105 (60%) | 3e-27 |
| | musculus (Mouse), 318 aa. | 75 . . . 173 | 77/105 (73%) | |
| AAA30855 | Mastin precursor - Canis sp, 251 | 27 . . . 114 | 55/88 (62%) | 5e-22 |
| | aa (fragment). | 53 . . . 140 | 61/88 (68%) | |
| P19236 | Mastocytoma protease precursor | 27 . . . 114 | 55/88 (62%) | 5e-22 |
| | (EC 3.4.21.-) - Canis familiaris | 71 . . . 158 | 61/88 (68%) | |
| | (Dog), 269 aa. | | | |
| Q8SQ44 | Tryptase precursor - Sus scrofa | 35 . . . 114 | 49/80 (61%) | 1e-18 |
| | (Pig), 277 aa. | 90 . . . 167 | 60/80 (74%) | |
| I48685 | mast cell proteinase 6 (EC | 34 . . . 114 | 44/81 (54%) | 2e-16 |
| | 3.4.21.-) precursor - mouse, 230 | 87 . . . 164 | 54/81 (66%) | |
| | aa. | | | |

[0438] PFam analysis indicates that the NOV16a protein contains the domains shown in the Table 16F.

TABLE 16F
Domain Analysis of NOV16a

| | | Identities/ | |
|---|---|---|---|
| | | Similarities | |
| Pfam | NOV16a Match | for the | Expect |
| Domain | Region | Matched Region | Value |
| trypsin | 19 . . . 172 | 52/266 (20%) | 0.00069 |
| | | 108/266 (41%) | |

### Example 17

[0439] The NOV17 clone was analyzed, and the nucleotide and encoded polypeptide sequences are shown in Table 17A.

TABLE 17A
NOV17 Sequence Analysis

| | | |
|---|---|---|
| NOV17a, CG51213-04 | SEQ ID NO: 195 | 2804 bp |
| DNA Sequence | ORF Start: ATG at 71 | ORF Stop: TAG at 2636 |

TGGCCAGCCAGGCCTGAAGCGATCGGTCAGCCGAGAGCGCTACGTGGAGACCCTGGTGGTGGCTGACA
AGATGATGGTGGCCTATCACGGGCGCCGGGATGTGGAGCAGTATGTCCTGGCCATCATGAACATTCAG
GTTGCCAAACTTTTCCAGGACTCGAGTCTGGGAAGCACCGTTAACATCCTCGTAACTCGCCTCATCCT
GCTCACGGAGGACCAGCCCACTCTGGAGATCACCCACCATGCCGGGAAGTCCCTGGACAGCTTCTGTA
AGTGGCAGAAATCCATCGTGAACCACAGCGGCCATGGCAATGCCATTCCAGAGAACGGTGTGGCTAAC
CATGACACAGCAGTGCTCATCACACGCTATGACATCTGCATCTACAAGAACAAACCCTGCGGCACACT
AGGCCTGGCCCCGGTGGGCGGAATGTGTGAGCGCGAGAGAAGCTGCAGCGTCAATGAGGACATTGGCC
TGGCCACAGCGTTCACCATTGCCCACGAGATCGGGCACACATTCGGCATGAACCATGACGGCGTGGGA
AACAGCTGTGGGGCCCGTGGTCAGGACCCAGCCAAGCTCATGGCTGCCCACATTACCATGAAGACCAA
CCCATTCGTGTGGTCATCCTGCAGCCGTGACTACATCACCAGCTTTCTAGACTCGGGCCTGGGGCTCT
GCCTGAACAACCGGCCCCCCAGACAGGACTTTGTGTACCCGACAGTGGCACCGGGCCAAGCCTACGAT
GCAGATGAGCAATGCCGCTTTCAGCATGGAGTCAAATCGCGTCAGTGTAAATACGGGGAGGTCTGCAG
CGAGCTGTGGTGTCTGAGCAAGAGCAACCGGTGCATCACCAACAGCATCCCGGCCGCCGAGGGCACGC
TGTGCCAGACGCACACCATCGACAAGGGGTGGTGCTACAAACGGGTCTGTGTCCCCTTTGGGTCGCGC
CCAGAGGGTGTGGACGGAGCCTGGGGGCCGTGGACTCCATGGGGCGACTGCAGCCGGACCTGTGGCGG
CGGCGTGTCCTCTTCTAGCCGTCACTGCGACAGCCCCAGGCCAACCATCGGGGGCAAGTACTGTCTGA
GTGAGAGAAGGCGGCACCGCTCCTGCAACACGGATGACTGTCCCCCTGGCTCCCAGGACTTCAGAGAA
GTGCAGTGTTCTGAATTTGACAGCATCCCTTTCCGTGGGAAATTCTACAAGTGGAAAACGTACCGGGG
AGGGGGCGTGAAGGCCTGCTCGCTCACGAGCCTAGCGGAAGGCTTCAACTTCTACACGGAGAGGGCGG
CAGCCGTGGTGGACGGGACACCCTGCCGTCCAGACACGGTGGACATTTGCGTCAGTGGCGAATGCAAG
CACGTGGGCTGCGACCGAGTCCTGGGCTCCGACCTGCGGGAGGACAAGTGCCGAGTGTGTGGCGGTGA
CGGCAGTGCCTGCGAGACCATCGAGGGCGTCTTCAGCCCAGCCTCACCTGGGGCCGGGTACGAGGATG
TCGTCTGGATTCCCAAAGGCTCCGTCCACATCTTCATCCAGGATCTGAACCTCTCTCTCAGTCACTTG
GCCCTGAAGGGAGACCAGGAGTCCCTGCTGCTGGAGGGGCTGCCTGGGACCCCCCAGCCCCACCGTCT
GCCTCTAGCTGGGACCACCTTTCAACTGCGACAGGGGCCAGACCAGGTCCAGAGCCTCGAAGCCCTGG
GACCGATTAATGCATCTCTCATCGTCATGGTGCTGGCCCGGACCGAGCTGCCTGCCCTCCGCTACCGC
TTCAATGCCCCCATCGCCCGTGACTCGCTGCCCCCCTACTCCTGGCACTATGCGCCCTGGACCAAGTG
CTCGGCCCAGTGTGCAGGCGGTAGCCAGGTGCAGGCGGTGGAGTGCCGCAACCAGCTGGACAGCTCCG
CGGTCGCCCCCCACTACTGCAGTGCCCACAGCAAGCTGCCCAAAAGGCAGCGCGCCTGCAACACGGAG
CCTTGCCCTCCAGACTGGGTTGTAGGGAACTGGTCGCTCTGCAGCCGCAGCTGCGATGCAGGCGTGCG
CAGTCGCTCGGTCGTGTGCCAGCGCCGCGTCTCTGCCGCGGAGGAGAAGGCGCTGGACGACAGCGCAT
GCCCGCAGCCGCGCCCACCTGTACTGGAGGCCTGCCACGGCCCCACTTGCCCTCCGGAGTGGGCGGCC
CTCGACTGGTCTGAGTGCACCCCCAGCTGCGGGCCGGGCCTCCGCCACCGCGTGGTCCTTTGCAAGAG
CGCAGACCACCGCGCCACGCTGCCCCCGGCGCACTGCTCACCCGCCGCCAAGCCACCGGCCACCATGC
GCTGCAACTTGCGCCGCTGCCCCCCGGCCCGCTGGGTGGCTGGCGAGTGGGGTGAGTGCTCTGCACAG
TGCGGCGTCGGGCAGCGGCAGCGCTCGGTGCGCTGCACCAGCCACACGGGCCAGGCGTCGCACGAGTG
CACGGAGGCCCTGCGGCCGCCCACCACGCAGCAGTGTGAGGCCAAGTGCGACAGCCCAACCCCCGGGG
ACGGCCCTGAAGAGTGCAAGGATGTGAACAAGGTCGCCTACTGCCCCCTGGTGCTCAAATTTCAGTTC
TGCAGCCGAGCCTACTTCCGCCAGATGTGCTGCAAAACCTGCCAGGGCCACTAGGGGGCGCGCGGCAC
CCGGAGCCACAGCTGGCGGGGTCTCCGCCGCCAGCCCTGCAGCGGGCCGGCCAAAGGGGGCCCCGGGG
GGGCGGGAACTGGGAGGGAAGGGTGAGACGGAGCCGGAAGTTATTTATTGGGAACCCCTGCAGGGCCC
TGGCTGGGGGGATGGA

| | | | |
|---|---|---|---|
| NOV17a, CG51213-04 | SEQ ID NO: 196 | 855 aa | MW at 93285.7kD |
| Protein Sequence | | | |

MMVAYHGRRDVEQYVLAINNIQVAKLFQDSSLGSTVNILVTRLILLTEDQPTLEITHHAGKSLDSFCK
WQKSIVNHSGHGNAIPENGVANHDTAVLITRYDICIYKNKPCGTLGLAPVGGMCERERSCSVNEDIGL
ATAFTIAHEIGHTFGMNHDGVGNSCGARGQDPAKLMAAHITMKTNPFVWSSCSRDYITSFLDSGLGLC
LNNRPPRQDFVYPTVAPGQAYDADEQCRFQNGVKSRQCKYGEVCSELWCLSKSNRCITNSIPAAEGTL
CQTHTIDKGWCYKRVCVPFGSRPEGVDGAWGPWTPWGDCSRTCGGGVSSSSRHCDSPRPTIGGKYCLS
ERRRHRSCNTDDCPPGSQDFREVQCSEFDSIPFRGKFYKWKTYRGGGVKACSLTSLAEGFNFYTERAA
AVVDGTPCRPDTVDICVSGECKHVGCDRVLGSDLREDKCRVCGGDGSACETIEGVFSPASPGAGYEDV
VWIPKGSVHIFIQDLNLSLSHLALKGDQESLLLEGLPGTPQPHRLPLAGTTFQLRQGPDQVQSLEALG
PINASLIVMVLARTELPALRYRFNAPIARDSLPPYSWHYAPWTKCSAQCAGGSQVQAVECRNQLDSSA
VAPHYCSAHSKLPKRQRACNTEPCPPDWVVGNWSLCSRSCDAGVRSRSVVCQRRVSAAEEKALDDSAC
PQPRPPVLEACHGPTCPPEWAALDWSECTPSCGPGLRHRVVLCKSADHRATLPPAHCSPAAKPPATMR
CNLRRCPPARWVAGEWGECSAQCGVGQRQRSVRCTSHTGQASHECTEALRPPTTQQCEAKCDSPTPGD
GPEECKDVNKVAYCPLVLKFQFCSRAYFRQMCCKTCQGH

| | | |
|---|---|---|
| NOV17b, CG51213-01 | SEQ ID NO: 197 | 2266 bp |
| DNA Sequence | ORF Start: ATG at 589 | ORF Stop: TAG at 2158 |

CTCGGGCCTGGGGCTCTGCCTGAACAACCGGCCCCCCAGACAGGACTTTGTGTACCCGACAGTGGCAC
CGGGCCAAGCCTACGATGCAGATGAGCAATGCCGCTTTCAGCATGGAGTCAAATCGCGTCAGTTGGTG
CTACAAACGGGTCTGTGTCCCCTTTGGGTCGCGCCCAGAGGGTGTGGACGGAGCCTGGGGGCCGTGGA
CTCCATGGGGCGACTGCAGCCGGACCTGTGGCGGCGGCGTGTCCTCTTCTAGCCGTCACTGCGACAGC
CCCAGGCCAACCATCGGGGGCAAGTACTGTCTGGGTGAGAGAAGGCGGCACCGCTCCTGCAACACGGA
TGACTGTCCCCCTGGCTCCCAGGACTTCAGAGAAGTGCAGTGTTCTGAATTTGACAGCATCCCTTTCC
GTGGGAAATTCTACAAGTGGAAAACGTACCGGGGAAGGTGAGTGTGGGACTCCAAAGGCTGTGGGGCC
GTGAAGGGCAGCCGTGGGAGTGTCCAGCAGCAGGTGGATGAATGCAGCATCCCGGGGTCTGCCATGAG
CCCTGTCCCCACCCGGGGAGACAGAGTACCTGGGATACGGTACCATGGGGGTTCAACGTGACGCTGGG
AGCCCCCACTCCCTCTGCCCAAGCTGCCCTTCCTCTTGGGTCTGGGGTCTGTCCCTCTTGGCCTCACT
CCCCCAGGGAGCAAGCAAAGAGTTCCGGGGTGGCCTGGCCCGTGGTGTGACGGGGCCGTGCCCCCCAG
GGGGCGTGAAGGCCTGCTCGCTCACGTGCCTAGCGGAAGGCTTCAACTTCTACACGGAGAGGGCGGCA
GCCGTGGTGGACGGGACACCCTGCCGTCCAGACACGGTGGACATTTGCGTCAGTGGCGAATGCAAGCA
CGTGGGCTGCGACCGAGTCCTGGGCTCCGACCTGCGGGAGGACAAGTGCCGAGTGTGTGGCGGTGACG
GCAGTGCCTGCGAGACCATCGAGGGCGTCTTCAGCCCAGCCTCACCTGGGGCCGGGTACGAGGATGTC
GTCTGGATTCCCAAAGGCTCCGTCCACATCTTCATCCAGGATCTGAACCTCTCTCTCAGTCACTTGGC
CCTGAAGGGAGACCAGGAGTCCCTGCTGCTGGAGGGGCTGCCTGGGACCCCCCAGCCCCACCGTCTGC
CTCTAGCTGGGACCACCTTTCAACTGCGACAGGGGCCAGACCAGGTCCAGAGCCTCGAAGCCCTGGGA
CCGATTAATGCATCTCTCATCGTCATGGTGCTGGCCCGGACCGAGCTGCCTGCCCTCCGCTACCGCTT
CAATGCCCCCATCGCCCGTGACTCGCTGCCCCCCTACTCCTGGCACTATGCGCCCTGGACCAAGTGCT
CGGCCCAGTGTGCAGGCGGTAGCCAGGTGCAGGCGGTGGAGTGCCGCAACCAGCTGGACAGCTCCGCG
GTCGCCCCCCACTACTGCAGTGCCCACAGCAAGCTGCCCAAAAGGCAGCGCGCCTGCAACACGGAGCC
TTGCCCTCCAGACTGGGTTGTAGGGAACTGGTCGCTCTGCAGCCGCAGCTGCGATGCAGGCGTGCGCA
GCCGCTCGGTCGTGTGCCAGCGCCGCGTCTCTGCCGCGGAGGAGAAGGCGCTGGACGACAGCGCATGC
CCGCAGCCGCGCCCACCTGTACTGGAGGCCTGCCACGGCCCCACTTGCCCTCCGGAGTGGGCGGCCCT
CGACTGGTCTGAGTGCACCCCCAGCTGCGGGCCGGGCCTCCGCCACCGCGTGGTCCTTTGCAAGAGCG
CAGACCACCGCGCCACGCTGCCCCCGGCGCACTGCTCACCCGCCGCCAAGCCACCGGCCACCATGCGC
TGCAACTTGCGCCGCTGCCCCCCGGCCCGCTGGGTGGCTGGCGAGTGGGGTGAGTGCTCTGCACAGTG
CGGCGTCGGGCAGCGGCAGCGCTCGGTGCGCTGCACCAGCCACACGGGCCAGGCGTCGCACGAGTGCA
CGGAGGCCCTGCGGCCGCCCACCACGCAGCAGTGTGAGGCCAAGTGCGACAGCCCAACCCCCGGGGAC
GGCCCTGAAGAGTGCAAGGATGTGAACAAGGTCGCCTACTGCCCCCTGGTGCTCAAATTTCAGTTCTG
CAGCCGAGCCTACTTCCGCCAGATGTGCTGCAAAACCTGCCAGGGCCACTAGGGGGCGCGCGGCACCC
GGAGCCACAGCTGGCGGGGTCTCCGCCGCCAGCCCTGCAGCTGGGCCGGCCAGAGGGGGCCCCGGGGG
GGCGGGAACTGGGAGGGAAGGG

| | | | |
|---|---|---|---|
| NOV17b, CG51213-01 | SEQ ID NO: 198 | 523 aa | MW at 56126.2kD |
| Protein Sequence | | | |

MGVQRDAGSPHSLCPSCPSSWVWGLSLLASLPQGASKEFRGGLARGVTGPCPPGGVKACSLTCLAEGF
NFYTERAAAVVDGTPCRPDTVDICVSGECKHVGCDRVLGSDLREDKCRVCGGDGSACETIEGVFSPAS
PGAGYEDVVWIPKGSVHIFIQDLNLSLSHLALKGDQESLLLEGLPGTPQPHRLPLAGTTFQLRQGPDQ
VQSLEALGPINASLIVMVLARTELPALRYRFNAPIARDSLPPYSWHYAPWTKCSAQCAGGSQVQAVEC
RNQLDSSAVAPHYCSAHSKLPKRQRACNTEPCPPDWVVGNWSLCSRSCDAGVRSRSVVCQRRVSAAEE
KALDDSACPQPRPPVLEACHGPTCPPEWAALDWSECTPSCGPGLRHRVVLCKSADHRATLPPAHCSPA
AKPPATMRCNLRRCPPARWVAGEWGECSAQCGVGQRQRSVRCTSHTGQASNECTEALRPPTTQQCEAK
CDSPTPGDGPEECKDVNKVAYCPLVLKFQFCSRAYFRQMCCKTCQGH

| | | |
|---|---|---|
| NOV17c, 306345264 | SEQ ID NO: 199 | 706 bp |
| DNA Sequence | ORF Start: at 2 | ORF Stop: end of sequence |

CACCGGATCCTGGCACTATGCGCCCTGGACCAAGTGCTCGGCCCAGTGTGCAGGCGGTAGCCAGGTGC
AGGCGGTGGAGTGCCGCAACCAGCTGGACAGCTCCGCGGTCGCCCCCCACTACTGCAGTGCCCACAGC
AAGCTGCCCAAAAGGCAGCGCGCCTGCAACACGGAGCCTTGCCCTCCAGACTGGGTTGTAGGGAACTG
GTCGCTCTGCAGCCGCAGCTGCGATGCAGGCGTGCGCAGCCGCTCGGTCGTGTGCCAGCGCCGCGTCT
CTGCCGCGGAGGAGAAGGCGCTGGACGACAGCGCATGCCCGCAGCCGCGCCCACCTGTACTGGAGGCC
TGCCACGGCCCCACTTGCCCTCCGGAGTGGGCGGCCCTCGACTGGTCTGAGTGCACCCCCAGCTGCGG
GCCGGGCCTCCGCCACCGCGTGGTCCTTTGCAAGAGCGCAGACCACCGCGCCACGCTGCCCCCGGCGC
ACTGCTCACCCGCCGCCAAGCCACCGGCCACCATGCGCTGCAACTTGCGCCGCTGCCCCCCGGCCCGC
TGGGTGGCTGGCGAGTGGGGTGAGTGCTCTGCACAGTGCGGCGTCGGGCAGCGGCAGCGCTCGGTGCG
CTGCACCAGCCACACGGGCCAGGCGTCGCACGAGTGCACGGAGGCCCTGCGGCCGCCCACCACGCAGC
AGTGTGAGGCCAAGTGCCTCGAGGGC

| | | | |
|---|---|---|---|
| NOV17c, 306345264 | SEQ ID NO: 200 | 235 aa | MW at 25395.4kD |
| Protein Sequence | | | |

TGSWHYAPWTKCSAQCAGGSQVQAVECRNQLDSSAVAPHYCSAHSKLPKRQRACNTEPCPPDWVVGNW
SLCSRSCDAGVRSRSVVCQRRVSAAEEKALDDSACPQPRPPVLEACHGPTCPPEWAALDWSECTPSCG
PGLRHRVVLCKSADHRATLPPAHCSPAAKPPATMRCNLRRCPPARWVAGEWGECSAQCGVGQRQRSVR
CTSHTGQASHECTEALRPPTTQQCEAKCLEG

| | | |
|---|---|---|
| NOV17d, CG51213-02 | SEQ ID NO: 201 | 3199 bp |
| DNA Sequence | ORF Start: at 1297 | ORF Stop: at 3199 |

TAAAGGGTTCAGCCTGGTGCCTGGTCCAGAGATAGTGGTGGTCATTGTTACCCCATAATGGCATTGGT
GCAAGTCCTTTCTTATCTATCCTGTCACGTGCCTCATAGCCATTTATATAGGCAAGACAGGCATTAGG
CTGCCCATCTTGTAGATGAGTAAACTGAGGCCCAGAGAGGGGAAATATATTGCAAGTTGGTAGCAGAA
TTGAGGTCTCTGCACAACTCAAATATGCCACAGTGCCTCCTTGTGGAGAGGAGGACAAAAGCAGAGCT
GAAATCATTATCTTGAAGAGGTGTCAGAAGTGGGATTGCGACAGGACTGATGTGATATTTTTAGATAT
GGCCAAGAGGACACAGTCTGAGTTTTTAGCTGAGAAATGTCCTCTATAAGGCAGAAGGCAGAGATTCT
AGAGGACCTTTGAGGGAGAATGTATTTGAGAACAACTCTTCCAGCTTCTTACATATGTACAGGTATCT
CTCAGGGGCTGACCTAGGAAGGGTCCTTTCCTGTGGCCATTGATCGATCCAGTCCCACATCTGGAAAG
CTTACAAGAATTGGGTTCAAAGCGGGGATTACACTTGATAATTACAGAAGGACCACCTACTTCTTAGA
GGAAAGACGCTGGGAGGTTGCTTAGGATGTGGGCCAAGAGGGTCAGAGAGGACCACCTACTTTTTAGA
GGAAAGACGCTGGGAGGTTGCTTAGGATGTGGGCCAAGAGGGTCAGAGATTTTGCTTCACCTGAACTC
ACTGGGGCTTCTCCAGGGATATTAACCTGGACTTTAAGAGTCAGAGTGAGTCCCTGGGACTAGTTCAG
CCCATCCAGGATTCAGACGGGAAGAAGGTGGGGCTGATTTTTCACCTGGAGAAAGAGAGGCATGTCCC
ACACAGACCTAACTCGGCATTGTCCCCTCCCAAACTCCCACCCCTCCACATAGCTTAAAAGTGTTGGG
GGCTTCTCCAGTTTAGATGGGGGAACAAAGAGAACCAACAGCTGGAAAAAACTAGAGATGAGGCCGTT
GGCCTAGTCATCATCCAGGCCGATTTCTCAGAACCACCACTTTCTCTTCGGCTACTTTGCCCATCCCA
TAAAAGAACCCCAAATCCTTCCTGTTCATTCCTCAGCAGTTCCCACGTTTCCTTCCAGAAACTCAGAA
GGCACCAGGAACTGAATTGCAAAGTTCGTTAGAGCACAGACTCTGAATTAAAGAGCTGGGTTAAACTC
CAGGCTATTCCCTTAGTAGCTGTGTGACCTTACCTGTCTGAAGCTTGGTTTTCTCCCAGTAAGATGGG
GTAGTACTGCCTAAAGAGGTATATGGCATGTATAAAGTGCTCCATAAATGGAGCTTATTGGGAGAGTA
TAAGTCACAGGCCATGCCCCGCAAGGGGATGCACGAAGACCCACCGCGAGCCAGGAAGGGAGCACCGG
GCTCTCTGCTCTGGGACCGGCAGTGAGCCGGACATCTGGGTCCTCCCAAGCCGGGCGGGCTGCCCCAG
GGAGGAAGGGAGGGGGGCGAGCCTGAGCGGGCACCTCGGCCCGCAGGAGGTCTGCAGCGAGCTGTGGT
GTCTGAGCAAGAGCAACCGGTGCATCACCAACAGCATCCCGGCCGCCGAGGGCACGCTGTGCCAGACG
CACACCATCGACAAGGGGTGGTGCTACAAACGGGTCTGTGTCCCCTTTGGGTCGCGCCCAGAGGGTGT
GGACGGAGCCTGGGGGCCGTGGACTCCATGGGGCGACTGCAGCCGGACCTGTGGCGGCGGCGTGTCCT
CTTCTAGCCGTCACTGCGACAGCCCCAGGCCAACCATCGGGGGCAAGTACTGTCTGGGTGAGAGAAGG
CGGCACCGCTCCTGCAACACGGATGACTGTCCCCCTGGCTCCCAGGACTTCAGAGAAGTGCAGTGTTC
TGAATTTGACAGCATCCCTTTCCGTGGGAAATTCTACAAGTGGAAAACGTACCGGGGAGGGGGCGTGA
AGGCCTGCTCGCTCACGTGCCTAGCGGAAGGCTTCAACTTCTACACGGAGAGGGCGGCAGCCGTGGTG
GACGGGACACCCTGCCGTCCAGACACGGTGGACATTTGCGTCAGTGGCGAATGCAAGCACGTGGGCTG
CGACCGAGTCCTGGGCTCCGACCTGCGGGAGGACAAGTGCCGAGTGTGTGGCGGTGACGGCAGTGCCT
GCGAGACCATCGAGGGCGTCTTCAGCCCAGCCTCACCTGGGGCCGGGTACGAGGATGTCGTCTGGATT
CCCAAAGGCTCCGTCCACATCTTCATCCAGGATCTGAACCTCTCTCTCAGTCACTTGGCCCTGAAGGG
AGACCAGGAGTCCCTGCTGCTGGAGGGGCTGCCCGGGACCCCCCAGCCCCACCGTCTGCCTCTAGCTG
GGACCACCTTTCAACTGCGACAGGGGCCAGACCAGGTCCAGAGCCTCGAAGCCCTGGGACCGATTAAT
GCATCTCTCATCGTCATGGTGCTGGCCCGGACCGAGCTGCCTGCCCTCCGCTACCGCTTCAATGCCCC
CATCGCCCGTGACTCGCTGCCCCCCTACTCCTGGCACTATGCGCCCTGGACCAAGTGCTCGGCCCAGT
GTGCAGGCGGTAGCCAGGTGCAGGCGGTGGAGTGCCGCAACCAGCTGGACAGCTCCGCGGTCGCCCCC
CACTACTGCAGTGCCCACAGCAAGCTGCCCAAAAGGCAGCGCGCCTGCAACACGGAGCCTTGCCCTCC
AGACTGGGTTGTAGGGAACTGGTCGCTCTGCAGCCGCAGCTGCGATGCAGGCGTGCGCAGCCGCTCGG
TCGTGTGCCAGCGCCGCGTCTCTGCCGCGGAGGAGAAGGCGCTGGACGACAGCGCATGCCCGCAGCCG
CGCCCACCTGTACTGGAGGCCTGCCACGGCCCCACTTGCCCTCCGGAGTGGGCGGCCCTCGACTGGTC
TGAGTGCACCCCCAGCTGCGGGCCGGGCCTCCGCCACCGCGTGGTCCTTTGCAAGAGCGCAGACCACC
GCGCCACGCTGCCCCCGGCGCACTGCTCACCCGCCGCCAAGCCACCGGCCACCATGCGCTGCAACTTG
CGCCGCTGCCCCCCGGCCCGCTGGGTGGCTGGCGAGTGGGGTGAGTGCTCTGCACAGTGCGGCGTCGG
GCAGCGGCAGCGCTCGGTGCGCTGCACCAGCCACACGGGCCAGGCGTCGCACGAGTGCACGGAGGCCC
TGC

| | | | |
|---|---|---|---|
| NOV17d, CG51213-02 | SEQ ID NO: 202 | 1634 aa | MW at 68853.1kD |
| Protein Sequence | | | |

YCLKRYMACIKCSINGAYWESISHRPCPARGCTKTHREPGREHRALCSGTGSEPDIWVLPSRAGCPRE
EGRGASLSGHLGPQEVCSELWCLSKSNRCIThSIPAAEGTLCQTHTIDKGWCYKRVCVPFGSRPEGVD
GAWGPWTPWGDCSRTCGGGVSSSSRHCDSPRPTIGGKYCLGERRRHRSCNTDDCPPGSQDFREVQCSE
FDSIPFRGKFYKWKTYRGGGVKACSLTCLAEGFNFYTERAAAVVDGTPCRPDTVDICVSGECKHVGCD
RVLGSDLREDKCRVCGGDGSACETIEGVFSPASPGAGYEDVVWIPKGSVHIFIQDLNLSLSHLALKGD
QESLLLEGLPGTPQPHRLPLAGTTFQLRQGPDQVQSLEALGPINASLIVMVLARTELPALRYRFNAPI
ARDSLPPYSWHYAPWTKCSAQCAGGSQVQAVECRNQLDSSAVAPHYCSAHSKLPKRQRACNTEPCPPD
WVVGNWSLCSRSCDAGVRSRSVVCQRRVSAAEEKALDDSACPQPRPPVLEACHGPTCPPEWAALDWSE
CTPSCGPGLRHRVVLCKSADHRATLPPAHCSPAAKPPATMRCNLRRCPPARWVAGEWGECSAQCGVGQ
RQRSVRCTSHTGQASHECTEAL

| | | |
|---|---|---|
| NOV17e, CG51213-03 | SEQ ID NO: 203 | 3700 bp |
| DNA Sequence | ORF Start: at 1798 | ORF Stop: at 3700 |

CTGACATTCCACCCTTGACACCCCCCAACATCCTAACTTAGCTGGTAACTGCAGCACCCTCTAAGGAA
TTCCTAAAGAATTCTGAAGCTACTCCTCAACATCTGCTGTGACCCAGGTATCCTAACAATGATCATGG
TGTCTGACATTTACTGAGCTCTCACTATGGGCTAAGCATGTGCTGTGTGTCACCATCTAAACTCCTGA
CAATCCTGCTAGCCCCCACGTTACAGAGGAAGGGACTGAGCCATAGCATAGGGAGGATGACTTGTCCA
AGGCCACAGTTTGAGACCATGACAGAGCTGGGATTTAAATCCAGGTCTCTCATGACTCTCTAAATTTT
ACAAAGGGGCAGGGGAGGGGAGGAGCTGTCAAAATATCAAGCTTGGGCTGGCACTGGCTATATGTTGA
ATTGAGCCTTCCTTTTAGTTTTTGAAGGAACATCTTTCAGGCCATCTTGGCAAAGGGGGATTTATTTA
CTAAATGTGAACTGGTTAATATATGTAAAGGGTTCAGCCTGGTGCCTGGTCCAGAGATAGTGGTGGTC
ATTGTTACCCCATAATGGCATTGGTGCAAGTCCTTTCTTATCTATCCTGTCACGTGCCTCATAGCCAT
TTATATAGGCAAGACAGGCATTAGGCTGCCCATCTTGTAGATGAGTAAACTGAGGCCCAGAGAGGGGA
AATATATTGCAAGTTGGTAGCAGAATTGAGGTCTCTGCACAACTCAAATATGCCACAGTGCCTCCTTG
TGGAGAGGAGGACAAAAGCAGAGCTGAAATCATTATCTTGAAGAGGTGTCAGAAGTGGGATTGCGACA
GGACTGATGTGATATTTTTAGATATGGCCAAGAGGACACAGTCTGAGTTTTTAGCTGAGAAATGTCCT
CTATAAGGCAGAAGGCAGAGATTCTAGAGGACCTTTGAGGGAGAATGTATTTGAGAACAACTCTTCCA
GCTTCTTACATATGTACAGGTATCTCTCAGGGGCTGACCTAGGAAGGGTCCTTTCCTGTGGCCATTGA
TCGATCCAGTCCCACATCTGGAAAGCTTACAAGAATTGGGTTCAAAGCGGGGATTACACTTGATAATT
ACAGAAGGACCACCTACTTCTTAGAGGAAAGACGCTGGGAGGTTGCTTAGGATGTGGGCCAAGAGGGT
CAGAGAGGACCACCTACTTTTTAGAGGAAAGACGCTGGGAGGTTGCTTAGGATGTGGGCCAAGAGGGT
CAGAGATTTTGCTTCACCTGAACTCACTGGGGCTTCTCCAGGGATATTAACCTGGACTTTAAGAGTCA
GAGTGAGTCCCTGGGACTAGTTCAGCCCATCCAGGATTCAGACGGGAAGAAGGTGGGGCTGATTTTTC
ACCTGGAGAAAGAGAGGCATGTCCCACACAGACCTAACTCGGCATTGTCCCCTCCCAAACTCCCACCC
CTCCACATAGCTTAAAAGTGTTGGGGGCTTCTCCAGTTTAGATGGGGGAACAAAGAGAACCAACAGCT
GGAAAAAACTAGAGATGAGGCCGTTGGCCTAGTCATCATCCAGGCCGATTTCTCAGAACCACCACTTT
CTCTTCGGCTACTTTGCCCATCCCATAAAAGAACCCCAAATCCTTCCTGTTCATTCCTCAGCAGTTCC
CACGTTTCCTTCCAGAAACTCAGAAGGCACCAGGAACTGAATTGCAAAGTTCGTTAGAGCACAGACTC
TGAATTAAAGAGCTGGGTTAAACTCCAGGCTATTCCCTTAGTAGCTGTGTGACCTTACCTGTCTGAAG
CTTGGTTTTCTCCCAGTAAGATGGGGTAGTACTGCCTAAAGAGGTATATGGCATGTATAAAGTGCTCC
ATAAATGGAGCTTATTGGGAGAGTATAAGTCACAGGCCATGCCCCGCAAGGGGATGCACGAAGACCCA
CCGCGAGCCAGGAAGGGAGCACGGGGCTCTCTGCTCTGGGACCGGCAGTGAGCCGGACATCTGGGTCC
TCCCAAGCCGGGCGGGCTGCCCCAGGGAGGAAGGGAGGGGGGCGAGCCTGAGCGGGCACCTCGGCCCG
CAGGAGGTCTGCAGCGAGCTGTGGTGTCTGAGCAAGAGCAACCGGTGCATCACCAACAGCATCCCGGC
CGCCGAGGGCACGCTGTGCCAGACGCACACCATCGACAAGGGGTGGTGCTACAAACGGGTCTGTGTCC
CCTTTGGGTCGCGCCCAGAGGGTGTGGACGGAGCCTGGGGGCCGTGGACTCCATGGGGCGACTGCAGC
CGGACCTGTGGCGGCGGCGTGTCCTCTTCTAGCCGTCACTGCGACAGCCCCAGGCCAACCATCGGGGG
CAAGTACTGTCTGGGTGAGAGAAGGCGGCACCGCTCCTGCAACACGGATGACTGTCCCCCTGGCTCCC
AGGACTTCAGAGAAGTGCAGTGTTCTGAATTTGACAGCATCCCTTTCCGTGGGAAATTCTACAAGTGG
AAAACGTACCGGGGAGGGGGCGTGAAGGCCTGCTCGCTCACGTGCCTAGCGGAAGGCTTCAACTTCTA
CACGGAGAGGGCGGCAGCCGTGGTGGACGGGACACCCTGCCGTCCAGACACGGTGGACATTTGCGTCA
GTGGCGAATGCAAGCACGTGGGCTGCGACCGAGTCCTGGGCTCCGACCTGCGGGAGGACAAGTGCCGA
GTGTGTGGCGGTGACGGCAGTGCCTGCGAGACCATCGAGGGCGTCTTCAGCCCAGCCTCACCTGGGGC
CGGGTACGAGGATGTCGTCTGGATTCCCAAAGGCTCCGTCCACATCTTCATCCAGGATCTGAACCTCT
CTCTCAGTCACTTGGCCCTGAAGGGAGACCAGGAGTCCCTGCTGCTGGAGGGGCTGCCCGGGACCCCC
CAGCCCCACCGTCTGCCTCTAGCTGGGACCACCTTTCAACTGCGACAGGGGCCAGACCAGGTCCAGAG
CCTCGAAGCCCTGGGACCGATTAATGCATCTCTCATCGTCATGGTGCTGGCCCGGACCGAGCTGCCTG
CCCTCCGCTACCGCTTCAATGCCCCCATCGCCCGTGACTCGCTGCCCCCCTACTCCTGGCACTATGCG
CCCTGGACCAAGTGCTCGGCCCAGTGTGCAGGCGGTAGCCAGGTGCAGGCGGTGGAGTGCCGCAACCA
GCTGGACAGCTCCGCGGTCGCCCCCCACTACTGCAGTGCCCACAGCAAGCTGCCCAAAAGGCAGCGCG
CCTGCAACACGGAGCCTTGCCCTCCAGACTGGGTTGTAGGGAACTGGTCGCTCTGCAGCCGCAGCTGC
GATGCAGGCGTGCGCAGCCGCTCGGTCGTGTGCCAGCGCCGCGTCTCTGCCGCGGAGGAGAAGGCGCT
GGACGACAGCGCATGCCCGCAGCCGCGCCCACCTGTACTGGAGGCCTGCCACGGCCCCACTTGCCCTC
CGGAGTGGGCGGCCCTCGACTGGTCTGAGTGCACCCCCAGCTGCGGGCCGGGCCTCCGCCACCGCGTG
GTCCTTTGCAAGAGCGCAGACCACCGCGCCACGCTGCCCCCGGCGCACTGCTCACCCGCCGCCAAGCC
ACCGGCCACCATGCGCTGCAACTTGCGCCGCTGCCCCCCGGCCCGCTGGGTGGCTGGCGAGTGGGGTG
AGTGCTCTGCACAGTGCGGCGTCGGGCAGCGGCAGCGCTCGGTGCGCTGCACCAGCCACACGGGCCAG
GCGTCGCACGAGTGCACGGAGGCCCTGC

| | | | |
|---|---|---|---|
| NOV17e, CG51213-03 | SEQ ID NO: 204 | 634 aa | MW at 68754.0kD |
| Protein Sequence | | | |

YCLKRYMACIKCSINGAYWESISHRPCPARGCTKTHREPGREHGALCSGTGSEPDIWVLPSRAGCPRE
EGRGASLSGHLGPQEVCSELWCLSKSNRCITNSIPAAEGTLCQTHTIDKGWCYKRVCVPFGSRPEGVD
GAWGPWTPWGDCSRTCGGGVSSSSRHCDSPRPTIGGKYCLGERRRBRSCNTDDCPPGSQDFREVQCSE
FDSIPFRGKFYKWKTYRGGGVKACSLTCLAEGFNFYTERAAAVVDGTPCRPDTVDICVSGECKHVGCD
RVLGSDLREDKCRVCGGDGSACETIEGVFSPASPGAGYEDVVWIPKGSVHIFIQDLNLSLSHLALKGD
QESLLLEGLPGTPQPHRLPLAGTTFQLRQGPDQVQSLEALGPINASLIVMVLARTELPALRYRFNAPI
ARDSLPPYSWHYAPWTKCSAQCAGGSQVQAVECRNQLDSSAVAPHYCSAHSKLPKRQRACNTEPCPPD
WVVGNWSLCSRSCDAGVRSRSVVCQRRVSAAEEKALDDSACPQPRPPVLEACHGPTCPPEWAALDWSE
CTPSCGPGLRHRVVLCKSADHRATLPPAHCSPAAKPPATMRCNLRRCPPARNVAGEWGECSAQCGVGQ
RQRSVRCTSHTGQASHECTEAL

| | | |
|---|---|---|
| NOV17f, CG51213-05 | SEQ ID NO: 205 | 3400 bp |
| DNA Sequence | ORF Start: at 1 | ORF Stop: TAG at 3232 |

CGGTCTCAAGATGAGTTCCTGTCCAGTCTGGAGAGCTATGAGATCGCCTTCCCCACCCGCGTGGACCA
CAACGGGGCACTGCTGGCCTTCTCGCCACCTCCTCCCCGGAGGCAGCGCCGCGGCACGGGGGCCACAG
CCGAGTCCCGCCTCTTCTACAAAGTAGCCTCGCCCAGCACCCACTTCCTGCTGAACCTGACCCGCAGC
TCCCGTCTACTGGCAGGGCACGTCTCCGTGGAGTACTGGACACGGGAGGGCCTGGCCTGGCAGAGGGC
GGCCCGGCCCCACTGCCTCTACGCTGGTCACCTGCAGGGCCAGGCCAGCAGCTCCCATGTGGCCATCA
GCACCTGTGGAGGCCTGCACGGCCTGATCGTGGCAGACGAGGAAGAGTACCTGATTGAGCCCCTGCAC
GGTGGGCCCAAGGGTTCTCGGAGCCCGGAGGAAAGTGGACCACATGTGGTGTACAAGCGTTCCTCTCT
GCGTCACCCCCACCTGGACACAGCCTGTGGAGTGAGAGATGAGAAACCGTGGAAAGGGCGGCCATGGT
GGCTGCGGACCTTGAAGCCACCGCCTGCCAGACCCCTGGGGAATGAAACAGAGCGTGGCCAGCCAGGC
CTGAAGCGATCGGTCAGCCGAGAGCGCTACGTGGAGACCCTGGTGGTGGCTGACAAGATGATGGTGGC
CTATCACGGGCGCCGGGATGTGGAGCAGTATGTCCTGGCCATCATGAACATTGTTGCCAAACTTTTCC
AGGACTCGAGTCTGGGAAGCACCGTTAACATCCTCGTAACTCGCCTCATCCTGCTCACGGAGGACCAG
CCCACTCTGGAGATCACCCACCATGCCGGGAAGTCCCTAGACAGCTTCTGTAAGTGGCAGAAATCCAT
CGTGAACCACAGCGGCCATGGCAATGCCATTCCAGAGAACGGTGTGGCTAACCATGACACAGCAGTGC
TCATCACACGCTATGACATCTGCATCTACAAGAACAAACCCTGCGGCACACTAGGCCTGGCCCCGGTG
GGCGGAATGTGTGAGCGCGAGAGAAGCTGCAGCGTCAATGAGGACATTGGCCTGCCACAAGCGTTCAC
CATTGCCCACGAGATCGGGCACACATTCGGCATGAACCATGACGGCGTGGGAAACAGCTGTGGGGCCC
GTGGTCAGGACCCAGCCAAGCTCATGGCTGCCCACATTACCATGAAGACCAACCCATTCGTGTGGTCA
TCCTGCAACCGTGACTACATCACCAGCTTTCTAGACTCGGGCCTGGGGCTCTGCCTGAACAACCGGCC
CCCCAGACAGGACTTTGTGTACCCGACAGTGGCACCGGGCCAAGCCTACGATGCAGATGAGCAATGCC
GCTTTCAGCATGGAGTCAAATCGCGTCAGTGTAAATACGGGGAGGTCTGCAGCGAGCTGTGGTGTCTG
AGCAAGAGCAACCGGTGCATCACCAACAGCATCCCGGCCGCCGAGGGCACGCTGTGCCAGACGCACAC
CATCGACAAGGGGTGGTGCTACAAACGGGTCTGTGTCCCCTTTGGGTCGCGCCCAGAGGGTGTGGACG
GAGCCTGGGGGCCGTGGACTCCATGGGGCGACTGCAGCCGGACCTGTGGCGGCGGCGTGTCCTCTTCT
AGTCGTCACTGCGACAGCCCCAGGCCAACCATCGGGGGCAAGTACTGTCTGGGTGAGAGAAGGCGGCA
CCGCTCCTGCAACACGGATGACTGTCCCCCTGGCTCCCAGGACTTCAGAGAAGTGCAGTGTTCTGAAT
TTGACAGCATCCCTTTCCGTGGGAAATTCTACAAGTGGAAAACGTACCGGGGAGGGGGCGTGAAGGCC
TGCTCGCTCACGAGCCTAGCGGAAGGCTTCAACTTCTACACGGAGAGGGCGGCAGCCGTGGTGGACGG
GACACCCTGCCGTCCAGACACGGTGGACATTTGCGTCAGTGGCGAATGCAAGCACGTGGGCTGCGACC
GAGTCCTGGGCTCCGACCTGCGGGAGGACAAGTGCCGAGTGTGTGGCGGTGACGGCAGTGCCTGCGAG
ACCATCGAGGGCGTCTTCAGCCCAGCCTCACCTGGGGCCGGGTACGAGGATGTCGTCTGGATTCCCAA
AGGCTCCGTCCACATCTTCATCCAGGATCTGAACCTCTCTCTCAGTCACTTGGCCCTGAAGGGAGACC
AGGAGTCCCTGCTGCTGGAGGGGCTGCCTGGGACCCCCCAGCCCCACCGTCTGCCTCTAGCTGGGACC
ACCTTTCAACTGCGACAGGGGCCAGACCAGGTCCAGAGCCTCGAAGCCCTGGGACCGATTAATGCATC
TCTCATCGTCATGGTGCTGGCCCGGACCGAGCTGCCTGCCCTCCGCTACCGCTTCAATGCCCCCATCG
CCCGTGACTCGCTGCCCCCCTACTCCTGGCACTATGCGCCCTGGACCAAGTGCTCGGCCCAGTGTGCA
GGCGGTAGCCAGGTGCAGGCGGTGGAGTGCCGCAACCAGCTGGACAGCTCCGCGGTCGCCCCCCACTA
CTGCAGTGCCCACAGCAAGCTGCCCAAAAGGCAGCGCGCCTGCAACACGGAGCCTTGCCCTCCAGACT
GGGTTGTAGGGAACTGGTCGCTCTGCAGCCGCAGCTGCGATGCAGGCGTGCGCAGTCGCTCGGTCGTG
TGCCAGCGCCGCGTCTCTGCCGCGGAGGAGAAGGCGCTGGACGACAGCGCATGCCCGCAGCCGCGCCC
ACCTGTACTGGAGGCCTGCCACGGCCCCACTTGCCCTCCGGAGTGGGCGGCCCTCGACTGGTCTGAGT
GCACCCCCAGCTGCGGGCCGGGCCTCCGCCACCGCGTGGTCCTTTGCAAGAGCGCAGACCACCGCGCC
ACGCTGCCCCCGGCGCACTGCTCACCCGCCGCCAAGCCACCGGCCACCATGCGCTGCAACTTGCGCCG
CTGCCCCCCGGCCCGCTGGGTGGCTGGCGAGTGGGGTGAGTGCTCTGCACAGTGCGGCGTCGGGCAGC
GGCAGCGCTCGGTGCGCTGCACCAGCCACACGGGCCAGGCGTCGCACGAGTGCACGGAGGCCCTGCGG
CCGCCCACCACGCAGCAGTGTGAGGCCAAGTGCGACAGCCCAACCCCCGGGGACGGCCCTGAAGAGTG
CAAGGATGTGAACAAGGTCGCCTACTGCCCCCTGGTGCTCAAATTTCAGTTCTGCAGCCGAGCCTACT
TCCGCCAGATGTGCTGCAAAACCTGCCAGGGCCACTAGGGGGCGCGCGGCACCCGGAGCCACAGCTGG
CGGGGTCTCCGCCGCCAGCCCTGCAGCGGGCCGGCCAAAGGGGGCCCCGGGGGGGCGGGAACTGGGAG
GGAAGGGTGAGACGGAGCCGGAAGTTATTTATTGGGAACCCCTGCAGGGCCCTGGCTGGGGGGATGGA

| | | | |
|---|---|---|---|
| NOV17f, CG51213-05 | SEQ ID NO: 206 | 1077 aa | MW at 118071.4kD |
| Protein Sequence | | | |

RSQDEFLSSLESYEIAFPTRVDHNGALLAFSPPPPRRQRRGTGATAESRLFYKVASPSTHFLLNLTRS
SRLLAGHVSVEYWTREGLAWQRAARPHCLYAGHLQGQASSSHVAISTCGGLHGLIVADEEEYLIEPLH
GGPKGSRSPEESGPHVVYKRSSLRHPHLDTACGVRDEKPWKGRPWWLRTLKPPPARPLGNETERGQPG
LKRSVSRERYVETLVVADKMMVAYHGRRDVEQYVLAIMNIVAKLFQDSSLGSTVNILVTRLILLTEDQ
PTLEITHHAGKSLDSFCKWQKSIVNHSGHGNAIPENGVANHDTAVLITRYDICIYKNKPCGTLGLAPV
GGMCERERSCSVNEDIGLPQAFTIAHEIGHTFGMNHDGVGMSCGARGQDPAKLMAAHITNKTNPFVWS
SCNRDYITSFLDSGLGLCLNNRPPRQDFVYPTVAPGQAYDADEQCRFQHGVKSRQCKYGEVCSELWCL
SKSNRCITNSIPAAEGTLCQTHTIDKGWCYKRVCVPFGSRPEGVDGAWGPWTPWGDCSRTCGGGVSSS
SRHCDSPRPTIGGKYCLGERRRHRSCNTDDCPPGSQDFREVQCSEFDSIPFRGKFYKWKTYRGGGVKA
CSLTSLAEGFNFYTERAAAVVDGTPCRPDTVDICVSGECKHVGCDRVLGSDLREDKCRVCGGDGSACE
TIEGVFSPASPGAGYEDVVWIPKGSVHIFIQDLNLSLSHLALKGDQESLLLEGLPGTPQPHRLPLAGT
TFQLRQGPDQVQSLEALGPINASLIVMVLARTELPALRYRFNAPIARDSLPPYSWHYAPWTKCSAQCA
GGSQVQAVECRNQLDSSAVAPHYCSAHSKLPKRQRACNTEPCPPDWVVGNWSLCSRSCDAGVRSRSVV
CQRRVSAAEEKALDDSACPQPRPPVLEACHGPTCPPEWAALDWSECTPSCGPGLRHRVVLCKSADHPA
TLPPAHCSPAAKPPATMRCNLRRCPPARWVAGEWGECSAQCGVGQRQRSVRCTSHTGQASHECTEALR
PPTTQQCEAKCDSPTPGDGPEECKDVNKVAYCPLVLKFQFCSRAYFRQMCCKTCQGH

| | | |
|---|---|---|
| NOV17g, CG51213-06 | SEQ ID NO: 207 | 978 bp |
| DNA Sequence | ORF Start: at I | ORF Stop: end of sequence |

TCCATAAATGGAGCTTATTGGGAGAGTATAAGTCACAGGCCATGCCCCGCAAGGGGATGCACGAAGAC
CCACCGCGAGCCAGGAAGGGAGCACCGGGCTCTCTGCTCTGGGACCGGCAGTGAGCCGGACATCTGGG
TCCTCCCAAGCCGGGCGGGCTGCCCCAGGGAGGAAGGGAGGGGGGCGAGCCTGAGCGGGCACCTCGGC
CCGCAGGAGGTCTGCAGCGAGCTGTGGTGTCTGAGCAAGAGCAACCGGTGCATCACCAACAGCATCCC
GGCCGCCGAGGGCACGCTGTGCCAGACGCACACCATCGACAAGGGGTGGTGCTACAAACGGGTCTGTG
TCCCCTTTGGGTCGCGCCCAGAGGGTGTGGACGGAGCCTGGGGGCCGTGGACTCCATGGGGCGACTGC
AGCCGGACCTGTGGCGGCGGCGTGTCCTCTTCTAGCCGTCACTGCGACAGCCCCAGGCCAACCATCGG
GGGCAAGTACTGTCTGGGTGAGAGAAGGCGGCACCGCTCCTGCAACACGGATGACTGTCCCCCTGGCT
CCCAGGACTTCAGAGAAGTGCAGTGTTCTGAATTTGACAGCATCCCTTTCCGTGGGAAATTCTACAAG
TGGAAAACGTACCGGGGAGGGGGCGTGAAGGCCTGCTCGCTCACGTGCCTAGCGGAAGGCTTCAACTT
CTACACGGAGAGGGCGGCAGCCGTGGTGGACGGGACACCCTGCCGTCCAGACACGGTGGACATTTGCG
TCAGTGGCGAATGCAAGCACGTGGGCTGCGACCGAGTCCTGGGCTCCGACCTGCGGGAGGACAAGTGC
CGAGTGTGTGGCGGTGACGGCAGTGCCTGCGAGACCATCGAGGGCGTCTTCAGCCCAGCCTCACCTGG
GGCCGGGTACGAGGATGTCGTCTGGATTCCCAAAGGCTCCGTCCACATCTTCATCCAGGATCTGAACC
TCTCTCTCAGTCACTTGGCCCTGAAG

| | | | |
|---|---|---|---|
| NOV17g, CG51213-06 | SEQ ID NO: 208 | 326 aa | MW at 35330.2kD |
| Protein Sequence | | | |

SINGAYWESISHRPCPARGCTKTHREPGREHRALCSGTGSEPDIWVLPSRAGCPREEGRGASLSGHLG
PQEVCSELWCLSKSNRCITNSIPAAEGTLCQTHTIDKGWCYKRVCVPFGSRPEGVDGAWGPWTPWGDC
SRTCGGGVSSSSRHCDSPRPTIGGKYCLGERRRHRSCNTDDCPPGSQDFREVQCSEFDSIPFRGKFYK
WKTYRGGGVKACSLTCLAEGFNFYTERAAAVVDGTPCRPDTVDICVSGECKHVGCDRVLGSDLREDKC
RVCGGDGSACETIEGVFSPASPGAGYEDVVWIPKGSVHIFIQDLNLSLSHLALK

| | | |
|---|---|---|
| NOV17h, CG51213-07 | SEQ ID NO: 209 | 1866 bp |
| DNA Sequence | ORF Start: at 1 | ORF Stop: end of sequence |

TCCATAAATGGAGCTTATTGGGAGAGTATAAGTCACAGGCCATGCCCCGCAAGGGGATGCACGAAGAC
CCACCGCGAGCCAGGAAGGGAGCACCGGGCTCTCTGCTCTGGGACCGGCAGTGAGCCGGACATCTGGG
TCCTCCCAAGCCGGGCGGGCTGCCCCAGGGAGGAAGGGAGGGGGGCGAGCCTGAGCGGGCACCTCGGC
CCGCAGGAGGTCTGCAGCGAGCTGTGGTGTCTGAGCAAGAGCAACCGGTGCATCACCAACAGCATCCC
GGCCGCCGAGGGCACGCTGTGCCAGACGCACACCATCGACAAGGGGTGGTGCTACAAACGGGTCTGTG
TCCCCTTTGGGTCGCGCCCAGAGGGTGTGGACGGAGCCTGGGGGCCGTGGACTCCATGGGGCGACTGC
AGCCGGACCTGTGGCGGCGGCGTGTCCTCTTCTAGCCGTCACTGCGACAGCCCCAGGCCAACCATCGG
GGGCAAGTACTGTCTGGGTGAGAGAAGGCGGCACCGCTCCTGCAACACGGATGACTGTCCCCCTGGCT
CCCAGGACTTCAGAGAAGTGCAGTGTTCTGAATTTGACAGCATCCCTTTCCGTGGGAAATTCTACAAG
TGGAAAACGTACCGGGGAGGGGGCGTGAAGGCCTGCTCGCTCACGTGCCTAGCGGAAGGCTTCAACTT
CTACACGGAGAGGGCGGCAGCCGTGGTGGACGGGACACCCTGCCGTCCAGACACGGTGGACATTTGCG
TCAGTGGCGAATGCAAGCACGTGGGCTGCGACCGAGTCCTGGGCTCCGACCTGCGGGAGGACAAGTGC
CGAGTGTGTGGCGGTGACGGCAGTGCCTGCGAGACCATCGAGGGCGTCTTCAGCCCAGCCTCACCTGG
GGCCGGGTACGAGGATGTCGTCTGGATTCCCAAAGGCTCCGTCCACATCTTCATCCAGGATCTGAACC
TCTCTCTCAGTCACTTGGCCCTGAAGGGAGACCAGGAGTCCCTGCTGCTGGAGGGGCTGCCCGGGACC
CCCCAGCCCCACCGTCTGCCTCTAGCTGGGACCACCTTTCAACTGCGACAGGGGCCAGACCAGGTCCA
GAGCCTCGAAGCCCTGGGACCGATTAATGCATCTCTCATCGTCATGGTGCTGGCCCGGACCGAGCTGC
CTGCCCTCCGCTACCGCTTCAATGCCCCCATCGCCCGTGACTCGCTGCCCCCCTACTCCTGGCACTAT
GCGCCCTGGACCAAGTGCTCGGCCCAGTGTGCAGGCGGTAGCCAGGTGCAGGCGGTGGAGTGCCGCAA
CCAGCTGGACAGCTCCGCGGTCGCCCCCCACTACTGCAGTGCCCACAGCAAGCTGCCCAAAAGGCAGC
GCGCCTGCAACACGGAGCCTTGCCCTCCAGACTGGGTTGTAGGGAACTGGTCGCTCTGCAGCCGCAGC
TGCGATGCAGGCGTGCGCAGCCGCTCGGTCGTGTGCCAGCGCCGCGTCTCTGCCGCGGAGGAGAAGGC
GCTGGACGACAGCGCATGCCCGCAGCCGCGCCCACCTGTACTGGAGGCCTGCCACGGCCCCACTTGCC
CTCCGGAGTGGGCGGCCCTCGACTGGTCTGAGTGCACCCCCAGCTGCGGGCCGGGCCTCCGCCACCGC
GTGGTCCTTTGCAAGAGCGCAGACCACCGCGCCACGCTGCCCCCGGCGCACTGCTCACCCGCCGCCAA
GCCACCGGCCACCATGCGCTGCAACTTGCGCCGCTGCCCCCCGGCCCGCTGGGTGGCTGGCGAGTGGG
GTGAGTGCTCTGCACAGTGCGGCGTCGGGCAGCGGCAGCGCTCGGTGCGCTGCACCAGCCACACGGGC
CAGGCGTCGCACGAGTGCACGGAGGCCCTG

| | | | |
|---|---|---|---|
| NOV17h, CG51213-07 | SEQ ID NO: 210 | 622 aa | MW at 67376.2kD |
| Protein Sequence | | | |

SINGAYWESISHRPCPARGCTKTHREPGREHRALCSGTGSEPDIWVLPSRAGCPREEGRGASLSGHLG
PQEVCSELWCLSKSNRCITNSIPAAEGTLCQTHTIDKGWCYKRVCVPFGSRPEGVDGAWGPWTPWGDC
SRTCGGGVSSSSRHCDSPRPTIGGKYCLGERRRHRSCNTDDCPPGSQDFREVQCSEFDSIPFRGKFYK
WKTYRGGGVKACSLTCLAEGFNFYTERAAAVVDGTPCRPDTVDICVSGECKHVGCDRVLGSDLREDKC
RVCGGDGSACETIEGVFSPASPGAGYEDVVWIPKGSVHIFIQDLNLSLSHLALKGDQESLLLEGLPGT
PQPHRLPLAGTTFQLRQGPDQVQSLEALGPINASLIVMVLARTELPALRYRFNAPIARDSLPPYSWHY
APWTKCSAQCAGGSQVQAVECRNQLDSSAVAPHYCSAHSKLPKRQRACNTEPCPPDWVVGNWSLCSRS
CDAGVRSRSVVCQRRVSAAEEKALDDSACPQPRPPVLEACHGPTCPPEWAALDWSECTPSCGPGLRHR
VVLCKSADHRATLPPAHCSPAAKPPATMRCNLRRCPPARWVAGEWGECSAQCGVGQRQRSVRCTSHTG
QASHECTEAL

[0440] A ClustalW comparison of the above protein sequences yields the following sequence alignment shown in Table 17B.

TABLE 17B
Comparison of the NOV17 protein sequences.

NOV17a ------------------------------------------------------------
NOV17b ------------------------------------------------------------
NOV17c ------------------------------------------------------------
NOV17d ------------------------------------------------------------
NOV17e ------------------------------------------------------------
NOV17f RSQDEFLSSLESYEIAFPTRVDHNGALLAFSPPPPRRQRRGTGATABSRLFYKVASPSTH
NOV17g ------------------------------------------------------------
NOV17h ------------------------------------------------------------
NOV17a ------------------------------------------------------------
NOV17b ------------------------------------------------------------
NOV17c ------------------------------------------------------------
NOV17d ------------------------------------------------------------
NOV17e ------------------------------------------------------------
NOV17f FLLNLTRSSRLLAGHVSVEYWTREGLAWQRAARPHCLYAGHLQGQASSSHVAISTCGGLH
NOV17g ------------------------------------------------------------
NOV17h ------------------------------------------------------------
NOV17a ------------------------------------------------------------
NOV17b ------------------------------------------------------------
NOV17c ------------------------------------------------------------
NOV17d ------------------------------------------------------------
NOV17e ------------------------------------------------------------
NOV17f GLIVADEEEYLIEPLHGGPKGSRSPEESGPHVVYKRSSLRHPHLDTACGVRDEKPWKGRP
NOV17g ------------------------------------------------------------
NOV17h ------------------------------------------------------------
NOV17a ------------------------------------------MMVAYHGRRDVEQYVLAI
NOV17b ------------------------------------------------------------
NOV17c ------------------------------------------------------------
NOV17d ------------------------------------------------------------
NOV17e ------------------------------------------------------------
NOV17f WWLRTLKPPPARPLGNETERGQPGLKRSVSRERYVETLVVADKMMVAYHGRRDVEQYVLA
NOV17g ------------------------------------------------------------
NOV17h ------------------------------------------------------------
NOV17a MNIQVAKLFQDSSLGSTVNILVTRLILLTEDQPTLEITHHAGKSLDSFCKWQKSIVNHSG
NOV17b ------------------------------------------------------------
NOV17c ------------------------------------------------------------
NOV17d ------------------------------------------------------------
NOV17e ------------------------------------------------------------
NOV17f IMNIVAKLFQDSSLGSTVNILVTRLILLTEDQPTLEITHHAGKSLDSFCKWQKSIVNHSG
NOV17g ------------------------------------------------------------
NOV17h ------------------------------------------------------------
NOV17a HGNAIPENGVANHDTAVLITRYDICIYKNKPCGTLGLAPVGGMCERERSCSVNEDIGLAT
NOV17b ------------------------------------------------------------
NOV17c ------------------------------------------------------------
NOV17d ------------------------------------------------------------
NOV17e ------------------------------------------------------------
NOV17f HGNAIPENGVANHDTAVLITRYDICIYKNKPCGTLGLAPVGGMCERERSCSVNEDIGLPQ
NOV17g ------------------------------------------------------------
NOV17h ------------------------------------------------------------
NOV17a AFTIAHEIGHTFGMNHDGVGMSCGARGQDPAKLMAAHITMKTNPFVWSSCSRDYITSFLD
NOV17b ------------------------------------------------------------
NOV17c ------------------------------------------------------------
NOV17d ------------------------------------------------------------
NOV17e ------------------------------------------------------------
NOV17f AFTIAHEIGHTFGMNHDGVGNSCGARGQDPAKLMAAHITMKTNPFVWSSCNRDYITSFLD
NOV17g ------------------------------------------------------------
NOV17h ------------------------------------------------------------
NOV17a SGLGLCLNNRPPRQDFVYPTVAPGQAYDADEQCRFQHGVKSRQCKYGEVCSELWCLSKSN
NOV17b ------------------------------------------------------------
NOV17c ------------------------------------------------------------
NOV17d ------------------------------YCLKRYMACIKCSINGAYWESISHRPCPAR
NOV17e ------------------------------YCLKRYMACIKCSINGAYWESISHRPCPAR
NOV17f SGLGLCLNNRPPRQDFVYPTVAPGQAYDADEQCRFQHGVKSRQCKYGEVCSELWCLSKSN
NOV17g ------------------------------------------SINGAYWESISHRPCPAR
NOV17h ------------------------------------------SINGAYWESISHRPCPAR
NOV17a RCITNSIPAAEGTLCQTHTIDKGWCYKRVCVPFGSRPEGVDGAWGPWTPWGDCSRTCGGG
NOV17b --------------------------------MGVQRD----AGSPHSLCPSCPSSWVWG
NOV17c ------------------------------------------------------------
NOV17d GCTKTHREPGREHRALCSGTGSEPDIWVLPSRAGCPREEGRGASLSGHLGPQEVCSELWC
NOV17e GCTKTHREPGREHGALCSGTGSEPDIWVLPSRAGCPREEGRGASLSGHLGPQEVCSELWC
NOV17f RCITNSIPAAEGTLCQTHTIDKGWCYKRVCVPFGSRPEGVDGAWGPWTPWGDCSRTCGGG
NOV17g GCTKTHREPGREHRALCSGTGSEPDIWVLPSRAGCPREEGRGASLSGHLGPQEVCSELWC
NOV17h GCTKTHREPGREHRALCSGTGSEPDIWVLPSRAGCPREEGRGASLSGHLGPQEVCSELWC
NOV17a VS-----------------------S--SS---------RHCD-----------------
NOV17b LS-----------------------L--LA---------SLPQ-----------------
NOV17c ------------------------------------------------------------
NOV17d LSKSNRCITNSIPAAEGTLCQTHTIDKGWCYKRVCVPFGSRPEGVDGAWGPWTPWGDCSR
NOV17e LSKSNRCITNSIPAAEGTLCQTHTIDKGWCYKRVCVPFGSRPEGVDGAWGPWTPWGDCSR
NOV17f VS-----------------------S--SS---------RHCD-----------------
NOV17g LSKSNRCITNSIPAAEGTLCQTHTIDKGWCYKRVCVPFGSRPEGVDGAWGPWTPWGDCSR
NOV17h LSKSNRCITNSIPAAEGTLCQTHTIDKGWCYKRVCVPFGSRPEGVDGAWGPWTPWGDCSR
NOV17a ---S-PR--P--------TIGGKYCLSERRRHRSCNTDDCPPGSQDFREVQCSEFDSIPF
NOV17b ---G-AS--K--------EFRGGLARG--------VTGPCPPG-----------------
NOV17c ------------------------------------------------------------
NOV17d TCGGGVSSSSRHCDSPRPTIGGKYCLGERRRHRSCNTDDCPPGSQDFREVQCSEFDSIPF
NOV17e TCGGGVSSSSRHCDSPRPTIGGKYCLGERRRHRSCNTDDCPPGSQDFREVQCSEFDSIPF
NOV17f ---S-PR--P--------TIGGKYCLGERRRHRSCNTDDCPPGSQDFREVQCSEFDSIPF
NOV17g TCGGGVSSSSRHCDSPRPTIGGKYCLGERRRHRSCNTDDCPPGSQDFREVQCSEFDSIPF
NOV17h TCGGGVSSSSRHCDSPRPTIGGKYCLGERRRHRSCNTDDCPPGSQDFREVQCSEFDSIPF
NOV17a RGKFYKWKTYRGGGVKACSLTSLAEGFNFYTERAAAVVDGTPCRPDTVDICVSGECKHVG
NOV17b -------------GVKACSLTCLAEGFNFYTERAAAVVDGTPCRPDTVDICVSGECKHVG
NOV17c ------------------------------------------------------------
NOV17d RGKFYKWKTYRGGGVKACSLTCLAEGFNFYTERAAAVVDGTPCRPDTVDICVSGECKHVG
NOV17e RGKFYKWKTYRGGGVKACSLTCLAEGFNFYTERAAAVVDGTPCRPDTVDICVSGECKHVG
NOV17f RGKFYKWKTYRGGGVKACSLTSLAEGFNFYTERAAAVVDGTPCRPDTVDICVSGECKHVG
NOV17g RGKFYKWKTYRGGGVKACSLTCLAEGFNFYTERAAAVVDGTPCRPDTVDICVSGECKHVG
NOV17h RGKFYKWKTYRGGGVKACSLTCLAEGFNFYTERAAAVVDGTPCRPDTVDICVSGECKHVG
NOV17a CDRVLGSDLREDKCRVCGGDGSACETIEGVFSPASPGAGYEDVVWIPKGSVHIFIQDLNL
NOV17b CDRVLGSDLREDKCRVCGGDGSACETIEGVFSPASPGAGYEDVVWIPKGSVHIFIQDLNL
NOV17c ------------------------------------------------------------
NOV17d CDRVLGSDLREDKCRVCGGDGSACETIEGVFSPASPGAGYEDVVWIPKGSVHIFIQDLNL
NOV17e CDRVLGSDLREDKCRVCGGDGSACETIEGVFSPASPGAGYEDVVWIPKGSVHIFIQDLNL
NOV17f CDRVLGSDLREDKCRVCGGDGSACETIEGVFSPASPGAGYEDVVWIPKGSVHIFIQDLNL
NOV17g CDRVLGSDLREDKCRVCGGDGSACETIEGVFSPASPGAGYEDVVWIPKGSVHIFIQDLNL
NOV17h CDRVLGSDLREDKCRVCGGDGSACETIEGVFSPASPGAGYEDVVWIPKGSVHIFIQDLNL
NOV17a SLSHLALKGDQESLLLEGLPGTPQPHRLPLAGTTFQLRQGPDQVQSLEALGPINASLIVM
NOV17b SLSHLALKGDQESLLLEGLPGTPQPHRLPLAGTTFQLRQGPDQVQSLEALGPINASLIVM
NOV17c ------------------------------------------------------------
NOV17d SLSHLALKGDQESLLLEGLPGTPQPHRLPLAGTTFQLRQGPDQVQSLEALGPINASLIVM
NOV17e SLSHLALKGDQESLLLEGLPGTPQPHRLPLAGTTFQLRQGPDQVQSLEALGPINASLIVM
NOV17f SLSHLALKGDQESLLLEGLPGTPQPHRLPLAGTTFQLRQGPDQVQSLEALGPINASLIVM
NOV17g SLSHLALK----------------------------------------------------
NOV17h SLSHLALKGDQESLLLEGLPGTPQPHRLPLAGTTFQLRQGPDQVQSLEALGPINASLIVM
NOV17a VLARTELPALRYRFNAPIARDSLPPYSWHYAPWTKCSAQCAGGSQVQAVECRNQLDSSAV
NOV17b VLARTELPALRYRFNAPIARDSLPPYSWHYAPWTKCSAQCAGGSQVQAVECRNQLDSSAV
NOV17c ------------------------TGSNHYAPWTKCSAQCAGGSQVQAVECRNQLDSSAV
NOV17d VLARTELPALRYRFNAPIARDSLPPYSWHYAPWTKCSAQCAGGSQVQAVECRNQLDSSAV
NOV17e VLARTELPALRYRFNAPIARDSLPPYSWHYAPWTKCSAQCAGGSQVQAVECRNQLDSSAV
NOV17f VLARTELPALRYRFNAPIARDSLPPYSWHYAPWTKCSAQCAGGSQVQAVECRNQLDSSAV
NOV17g ------------------------------------------------------------
NOV17h VLARTELPALRYRFNAPIARDSLPPYSWHYAPWTKCSAQCAGGSQVQAVECRNQLDSSAV
NOV17a APHYCSAHSKLPKRQRACNTEPCPPDWVVGNWSLCSRSCDAGVRSRSVVCQRRVSAAEEK
NOV17b APHYCSAHSKLPKRQRACNTEPCPPDWVVGNWSLCSRSCDAGVRSRSVVCQRRVSAAEEK
NOV17c APHYCSAHSKLPKRQRACNTEPCPPDNVVGNWSLCSRSCDAGVRSRSVVCQRRVSAAEEK
NOV17d APHYCSAHSKLPKRQRACNTEPCPPDWVVGNWSLCSRSCDAGVRSRSVVCQRRVSAAEEK
NOV17e APHYCSAHSKLPKRQRACNTEPCPPDWVVGNWSLCSRSCDAGVRSRSVVCQRRVSAAEEK
NOV17f APHYCSAHSKLPKRQRACNTEPCPPDWVVGNWSLCSRSCDAGVRSRSVVCQRRVSAAEEK
NOV17g ------------------------------------------------------------
NOV17h APHYCSAHSKLPKRQRACNTEPCPPDWVVGNWSLCSRSCDAGVRSRSVVCQRRVSAAEEK
NOV17a ALDDSACPQPRPPVLEACHGPTCPPEWAALDWSECTPSCGPGLRHRVVLCKSADHRATLP
NOV17b ALDDSACPQPRPPVLEACHGPTCPPEWAALDWSECTPSCGPGLRHRVVLCKSADHRATLP
NOV17d ALDDSACPQPRPPVLEACHGPTCPPEWAALDWSECTPSCGPGLRHRVVLCKSADHRATLP
NOV17d ALDDSACPQPRPPVLEACHGPTCPPEWAALDWSECTPSCGPGLRHRVVLCKSADHPATLP
NOV17e ALDDSACPQPRPPVLEACHGPTCPPEWAALDWSECTPSCGPGLRHRVVLCKSADHRATLP
NOV17f ALDDSACPQPRPPVLEACHGPTCPPEWAALDWSECTPSCGPGLRHRVVLCKSADHRATLP
NOV17g ------------------------------------------------------------
NOV17h ALDDSACPQPRPPVLEACHGPTCPPEWAALDWSECTPSCGPGLRHRVVLCKSADHRATLP
NOV17a PAHCSPAAKPPATMRCNLRRCPPARWVAGEWGECSAQCGVGQRQRSVRCTSHTGQASHEC
NOV17b PAHCSPAAKPPATMRCNLRRCPPARWVAGEWGECSAQCGVGQRQRSVRCTSHTGQASHEC
NOV17c PAHCSPAAKPPATMRCNLRRCPPARWVAGEWGECSAQCGVGQRQRSVRCTSHTGQASHEC
NOV17d PAHCSPAAKPPATMRCNLRRCPPARWVAGEWGECSAQCGVGQRQRSVRCTSHTGQASHEC
NOV17e PAHCSPAAKPPATMRCNLRRCPPARWVAGEWGECSAQCGVGQRQRSVRCTSHTGQASHEC
NOV17f PAHCSPAAKPPATMRCNLRRCPPARWVAGEWGECSAQCGVGQRQRSVRCTSHTGQASHEC
NOV17g ------------------------------------------------------------
NOV17h PAHCSPAAKPPATMRCNLRRCPPARWVAGEWGECSAQCGVGQRQRSVRCTSHTGQASHEC
NOV17a TEALRPPTTQQCEAKCDSPTPGDGPEECKDVNKVAYCPLVLKFQFCSRAYFRQMCCKTCQ
NOV17b TEALRPPTTQQCEAKCDSPTPGDGPEECKDVNKVAYCPLVLKFQFCSRAYFRQMCCKTCQ
NOV17c TEALRPPTTQQCEAKCLEG-----------------------------------------
NOV17d TEAL--------------------------------------------------------
NOV17e TEAL--------------------------------------------------------
NOV17f TEALRPPTTQQCEAKCDSPTPGDGPEECKDVNKVAYCPLVLKFQFCSRAYFRQMCCKTCQ
NOV17g ------------------------------------------------------------
NOV17h TEAL--------------------------------------------------------
NOV17a GH
NOV17b GH
NOV17c --
NOV17d --
NOV17e --
NOV17f GH
NOV17g --
NOV17h --
NOV17a (SEQ ID NO: 196)
NOV17b (SEQ ID NO: 198)
NOV17c (SEQ ID NO: 200)
NOV17d (SEQ ID NO: 202)
NOV17e (SEQ ID NO: 204)
NOV17f (SEQ ID NO: 206)
NOV17g (SEQ ID NO: 208)
NOV17h (SEQ ID NO: 210)

[0441] Further analysis of the NOV17a protein yielded the following properties shown in Table 17C.

TABLE 17C
Protein Sequence Properties NOV17a

SignalP analysis: No Known Signal Sequence Indicated
PSORT II analysis:

| PSG: | a new signal peptide prediction method |
|---|---|
| | N-region: length 10; pos.chg 2; neg.chg 1 |
| | H-region: length 1; peak value −0.15 |
| | PSG score: −4.55 |
| GvH: | von Heijne's method for signal seq. recognition |
| | GvH score (threshold: −2.1): −8.03 |
| | possible cleavage site: between 33 and 34 |

>>> Seems to have no N-terminal signal peptide

| ALOM: | Klein et al's method for TM region allocation | | | |
|---|---|---|---|---|
| | Init position for calculation: 1 | | | |
| | Tentative number of TMS(s) for the threshold 0.5: 1 | | | |
| | Number of TMS(s) for threshold 0.5: 0 | | | |
| | PERIPHERAL Likelihood = 1.38 (at 31) | | | |
| | ALOM score: −1.70 (number of TMSs: 0) | | | |
| | MITDISC: discrimination of mitochondrial targeting seq | | | |
| | R content: | 2 | Hyd Moment(75): | 5.01 |
| | Hyd Moment(95): | 5.34 | G content: | 1 |
| | D/E content: | 2 | S/T content: | 0 |
| | Score: −5.94 | | | |

Gavel: prediction of cleavage sites for mitochondrial preseq

R-2 motif at 18 GRR|DV

NUCDISC: discrimination of nuclear localization signals

pat4: RRRH (3) at 342
pat4: RRHR (3) at 343
pat7: PKRQRAC (5) at 625
bipartite: none
content of basic residues: 10.6%
NLS Score: 0.33

KDEL: ER retention motif in the C-terminus: none
ER Membrane Retention Signals: none
SKL: peroxisomal targeting signal in the C-terminus: none
PTS2: 2nd peroxisomal targeting signal: none
VAC: possible vacuolar targeting motif: found

KLPK at 623

RNA-binding motif: none
Actinin-type actin-binding motif:

| | type 1: none |
|---|---|
| | type 2: none |
| NMYR: | N-myristoylation pattern : none |

Prenylation motif: none
memYQRL: transport motif from cell surface to Golgi: none
Tyrosines in the tail: none
Dileucine motif in the tail: none
checking 63 PROSITE DNA binding motifs:

Leucine zipper pattern (PS00029): *** found ***
LGSTVNILVTRLILLTEDQPTL at 32

none
checking 71 PROSITE ribosomal protein motifs: none
checking 33 PROSITE prokaryotic DNA binding motifs: none

| NNCN: | Reinhardt's method for Cytoplasmic/Nuclear discrimination |
|---|---|
| | Prediction: nuclear |
| | Reliability: 76.7 |
| COIL: | Lupas's algorithm to detect coiled-coil regions |
| | total: 0 residues |

--------------------------
Final Results (k = 9/23):

95.7%: nuclear
4.3%: cytoplasmic

>> prediction for CG51213-04 is nuc (k = 23)

[0442] A search of the NOV17a protein against the Geneseq database, a proprietary database that contains sequences published in patents and patent publication, yielded several homologous proteins shown in Table 17D.

TABLE 17D
Geneseq Results for NOV17a

| | | NOV17a | Identities/ | |
|---|---|---|---|---|
| | | Residues/ | Similarities for | |
| Geneseq | Protein/Organism/Length | Match | the Matched | Expect |
| Identifier | [Patent #, Date] | Residues | Region | Value |
| AAU97888 | Human aggrecanase protein #2 - | 1 . . . 855 | 852/855 (99%) | 0.0 |
| | Homo sapiens, 1104 aa. | 250 . . . 1103 | 852/855 (99%) | |
| | [WO200234895-A2, 02-MAY- | | | |
| | 2002] | | | |
| AAB74945 | Human ADAM type metal | 1 . . . 855 | 852/855 (99%) | 0.0 |
| | protease MDTS2 protein SEQ ID | 250 . . . 1103 | 852/855 (99%) | |
| | NO: 10 - Homo sapiens, 1103 aa. | | | |
| | [JP2001008687-A, 16 Jan. 2001] | | | |
| AAU72890 | Human metalloprotease partial | 1 . . . 855 | 851/855 (99%) | 0.0 |
| | protein sequence #2 - Homo | 250 . . . 1103 | 852/855 (99%) | |
| | sapiens, | | | |
| | 1103 aa. [WO200183782- | | | |
| | A2, 08-NOV-2001] | | | |
| ABG76505 | DNA encoding protein | 1 . . . 855 | 851/855 (99%) | 0.0 |
| | modification and maintenance | 250 . . . 1103 | 852/855 (99%) | |
| | molecule #9 - Homo sapiens, 1103 | | | |
| | aa. [WO200260942-A2, 08-AUG- | | | |
| | 2002] | | | |
| AAB47719 | ADAMTS-E - Homo sapiens, | 1 . . . 855 | 852/856 (99%) | 0.0 |
| | 1104 aa. [EP1149903-A1, 31- | 250 . . . 1104 | 852/856 (99%) | |
| | OCT-2001] | | | |

[0443] In a BLAST search of public sequence databases, the NOV17a protein was found to have homology to the proteins shown in the BLASTP data in Table 17E.

TABLE 17E
Public BLASTP Results for NOV17a

| | | NOV17a | Identities/ | |
|---|---|---|---|---|
| Protein | | Residues/ | Similarities for | |
| Accession | | Match | the Matched | Expect |
| Number | Protein/Organism/Length | Residues | Portion | Value |
| Q9H324 | ADAMTS-10 precursor (EC | 1 . . . 855 | 850/855 (99%) | 0.0 |
| | 3.4.24.-) (A disintegrin and | 224 . . . 1077 | 851/855 (99%) | |
| | metalloproteinase with | | | |
| | thrombospondin motifs 10) | | | |
| | (ADAM-TS 10) (ADAM-TS10) - | | | |
| | Homo sapiens (Human), 1077 aa | | | |
| | (fragment). | | | |
| Q8CG28 | Zinc metalloendopeptidase - Mus | 1 . . . 854 | 809/855 (94%) | 0.0 |
| | musculus (Mouse), 1070 aa. | 216 . . . 1069 | 824/855 (95%) | |
| CAD20434 | Sequence 8 from Patent | 1 . . . 796 | 793/796 (99%) | 0.0 |
| | WO0188156 - Homo sapiens | 250 . . . 1044 | 793/796 (99%) | |
| | (Human), 1044 aa (fragment). | | | |
| CAC37777 | Sequence 11 from Patent | 246 . . . 797 | 550/552 (99%) | 0.0 |
| | WO0123561 - Homo sapiens | 83 . . . 634 | 550/552 (99%) | |
| | (Human), 634 aa (fragment). | | | |
| CAD20435 | Sequence 11 from Patent | 1 . . . 557 | 552/557 (99%) | 0.0 |
| | WO0188156 - Homo sapiens | 250 . . . 805 | 552/557 (99%) | |
| | (Human), 814 aa. | | | |

[0444] PFam analysis indicates that the NOV17a protein contains the domains shown in the Table 17F.

TABLE 17F
Domain Analysis of NOV17a

| | | Identities/ | |
|---|---|---|---|
| | NOV17a | Similarities | |
| Pfam | Match | for the Matched | Expect |
| Domain | Region | Matched Region | Value |
| Reprolysin | 2 . . . 209 | 59/235 (25%) | 1.4e-09 |
| | | 151/235 (64%) | |
| tsp_1 | 303 . . . 353 | 21/53 (40%) | 2.8e-07 |
| | | 37/53 (70%) | |
| tsp_1 | 581 . . . 636 | 11/59 (19%) | 0.056 |
| | | 38/59 (64%) | |
| tsp_1 | 640 . . . 696 | 14/63 (22%) | 0.13 |
| | | 38/63 (60%) | |
| tsp_1 | 698 . . . 754 | 16/57 (28%) | 0.43 |
| | | 34/57 (60%) | |
| tsp_1 | 759 . . . 809 | 17/55 (31%) | 0.2 |
| | | 34/55 (62%) | |

### Example 18

[0445] The NOV18 clone was analyzed, and the nucleotide and encoded polypeptide sequences are shown in Table 18A.

TABLE 18A
NOV18 Sequence Analysis

| | | |
|---|---|---|
| NOV18a, CG51448-05 | SEQ ID NO: 211 | 1762 bp |
| DNA Sequence | ORF Start: ATG at 197 | ORF Stop: TGA at 1760 |

TTTGAGTTAGACAAGCAGCAGCACACGCCTCCCTACCTCATGGCGACAGAAAATGGAGCAGTTGAGCT
GGGAATTCAGAACCCATCAACAGACAAGGCACCTAAAGGTCCCACAGGTGAAAGACCCCTGGCTGCAG
GGAAAGACCCTGGCCCCCCAGACCCAAAGAAAGCTCCGGATCCACCCACCCTGAAGAAAGATGCCAAA
GCCCCTGCCTCAGAGAAAGGGGATGGTACCCTGGCCCAACCCTCAACTAGCAGCCCTGCCCCAGCAGA
CTGCGACACCTGAGACCAGCGTCAAGAAGCCCAAGGCTGAGCAGGGAGCCTCAGGCAGCCAGGATCCT
GGAAAGCCCAGGGTGGGCAAGAAGGCAGCAGAGGGCCAAGCAGCAGCCAGGAGGGGCTCACCTGCCTT
TCTGCATAGCCCCAGCTGTCCTGCCATCATCTCCAGTTCTGAGAAGCTGCTGGCCAAGAAGCCCCCAA
GCGAGGCATCAGAGCTCACCTTTGAAGGGGTGCCCATGACCCACAGCCCCACGGATCCCAGGCCAGCC
AAGGCAGAAGAAGGAAAGAACATCCTGGCAGAGAGCCAGAAGGAAGTGGGAGAGAAAACCCCAGGCCA
GGCTGGCCAGGCTAAGATGCAAGGGGACACCTCGAGGGGGATTGAGTTCCAGGCTGTTCCCTCAGAGA
AATCCGAGGTGGGGCAGGCCCTCTGTCTCACAGCCAGGGAGGAGGACTGCTTCCAGATTTTGGATGAT
TGCCCGCCACCTCCGGCCCCCTTCCCTCACCGCATGGTGGAGCTGAGGACCGGGAATGTCAGCAGTGA
ATTCAGTATGAACTCCAAGGAGGCGCTCGGAGGTGGCAAGTTTGGGGCAGTCTGTACCTGCATGGAGA
AAGCCACAGGCCTCAAGCTGGCAGCCAAGGTCATCAAGAAACAGACTCCCAAAGACAAGGAAATGGTG
TTGCTGGAGATTGAGGTCATGAACCAGCTGAACCACCGCAATCTGATCCAGCTGTATGCAGCCATCGA
GACTCCGCATGAGATCGTCCTGTTCATGGAGTACATCGAGGGCGGAGAGCTCTTCGAGAGGATTGTGG
ATGAGGACTACCATCTGACCGAGGTGGACACCATGGTGTTTGTCAGGCAGATCTGTGACGGGATCCTC
TTCATGCACAAGATGAGGGTTTTGCACCTGGACCTCAAGCCAGAGAACATCCTGTGTGTCAACACCAC
CGGGCATTTGGTGAAGATCATTGACTTTGGCCTGGCACGGAGGTATAACCCCAACGAGAAGCTGAAGG
TGAACTTTGGGACCCCAGAGTTCCTGTCACCTGAGGTGGTGAATTATGACCAAATCTCCGATAAGACA
GACATGTGGAGTATGGGGGTGATCACCTACATGCTGCTGAGCGGCCTCTCCCCCTTCCTGGGAGATGA
TGACACAGAGACCCTAAACAACGTTCTATCTGGCAACTGGTACTTTGATGAAGAGACCTTTGAGGCCG
TATCAGACGAGGCCAAAGACTTTGTCTCCAACCTCATCGTCAAGGACCAGAGGGCCCGGATGAACGCT
GCCCAGTGTCTCGCCCATCCCTGGCTCAACAACCTGGCGGAGAAAGCCAAACGCTGTAACCGACGCCT
TAAGTCCCAGATCTTGCTTAAGAAATACCTCATGAAGAGGCGCTGGAAGAAAAACTTCATTGCTGTCA
GCGCTGCCAACCGCTTCAAGAAGATCAGCAGTTCGGGGGCACTGATGGCTCTGGGGGTCTGA

| | | | |
|---|---|---|---|
| NOV18a,CG51448-05 | SEQ ID NO: 212 | 521 aa | MW at 57751.9kD |
| Protein Sequence | | | |

MPKPLPQRKGMVPWPNPQLAALPQQTATPETSVKKPKAEQGASGSQDPGKPRVGKKAAEGQAAARRGS
PAFLHSPSCPAIISSSEKLLAKKPPSEASELTFEGVPMTHSPTDPRPAKAEEGKMILAESQKEVGEKT
PGQAGQAKMQGDTSRGIEFQAVPSEKSEVGQALCLTAREEDCFQILDDCPPPPAPFPHRMVELRTGNV
SSEFSNNSKEALGGGKFGAVCTCMEKATGLKLAAKVIKKQTPKDKEMVLLEIEVMNQLNHRNLIQLYA
AIETPHEIVLFMBYIEGGELFERIVDEDYHLTEVDTNVFVRQICDGILFMHKMRVLHLDLKPENILCV
NTTGHLVKIIDFGLARRYNPNEKLKVNFGTPEFLSPEVVNYDQISDKTDMWSMGVITYMLLSGLSPFL
GDDDTETLNNVLSGNWYFDEETFEAVSDEAKDFVSNLIVKDQRARMNAAQCLAHPWLNNLAEKAKRCN
RRLKSQILLKKYLMKRRWKKNFIAVSAANRFKKISSSGALMALGV

| | | |
|---|---|---|
| NOV18b, CG51448-01 | SEQ ID NO: 213 | 1788 bp |
| DNA Sequence | ORF Start: ATG at 1 | ORF Stop: TGA at 1786 |

ATGGCGACAGAAAATGGAGCAGTTGAGCTGGGAATTCAGAACCCATCAACAGACAAGGCACCTAAAGG
TCCCACAGGTGAAAGACCCCTGGCTGCAGGGAAAGACCCTGGCCCCCCAGACCCAAAGAAAGCTCCGG
ATCCACCCACCCTGAAGAAAGATGCCAAAGCCCCTGCCTCAGAGAAAGGGGATGGTACCCTGGCCCAA
CCCTCAACTAGCAGCCAAGGCCCCAAAGGAGAGGGTGACAGGGGCGGGGGGCCCGCGGAGGGCAGTGC
TGGGCCCCCGGCAGCCCTGCCCCAGCAGACTGCGACACCTGAGACCAGCGTCAAGAAGCCCAAGGCTG
AGCAGGGAGCCTCAGGCAGCCAGGATCCTGGAAAGCCCAGGGTGGGCAAGAAGGCAGCAGAGGGCCAA
GCAGCAGCCAGGAGGGGCTCACCTGCCTTTCTGCATAGCCCCAGCTGTCCTGCCATCATCTCCAGTTC
TGAGAAGCTGCTGGCCAAGAAGCCCCCAAGCGAGGCATCAGAGCTCACCTTTGAAGGGGTGCCCATGA
CCCACAGCCCCACGGATCCCAGGCCAGCCAAGGCAGAAGAAGGAAAGAACATCCTGGCAGAGAGCCAG
AAGGAAGTGGGAGAGAAAACCCCAGGCCAGGCTGGCCAGGCTAAGATGCAAGGGGACACCTCGAGGGG
GATTGAGTTCCAGGCTGTTCCCTCAGAGAAATCCGAGGTGGGGCAGGCCCTCTGTCTCACAGCCAGGG
AGGAGGACTGCTTCCAGATTTTGGATGATTGCCCGCCACCTCCGGCCCCCTTCCCTCACCGCATGGTG
GAGCTGAGGACCGGGAATGTCAGCAGTGAATTCAGTATGAACTCCAAGGAGGCGCTCGGAGGGGGCAA
GTTTGGGGCAGTCTGTACCTGCATGGAGAAAGCCACAGGCCTCAAGCTGGCAGCCAAGGTCATCAAGA
AACAGACTCCCAAAGACAAGGAAATGGTGTTGCTGGAGATTGAGGTCATGAACCAGCTGAACCACCGC
AATCTGATCCAGCTGTATGCAGCCATCGAGACTCCGCATGAGATCGTCCTGTTCATGGAGATCGAGGG
CGGAGAGCTCTTCGAGAGGATTGTGGATGAGGACTACCATCTGACCGAGGTGGACACCATGGTGTTTG
TCAGGCAGATCTGTGACGGGATCCTCTTCATGCACAAGATGAGGGTTTTGCACCTGGACCTCAAGCCA
GAGAACATCCTGTGTGTCAACACCACCGGGCATTTGGTGAAGATCATTGACTTTGGCCTGGCACGGAG
GTACCACAACCCCAACGAGAAGCTGAAGGTGAACTTTGGGACCCCAGAGTTCCTGTCACCTGAGGTGG
TGAATTATGACCAAATCTCCGATAAGACAGACATGTGGAGTATGGGGGTGATCACCTACATGCTGCTG
AGCGGCCTCTCCCCCTTCCTGGGAGATGATGACACAGAGACCCTAAACAACGTTCTATCTGGCAACTG
GTACTTTGATGAAGAGACCTTTGAGGCCGTATCAGACGAGGCCAAAGACTTTGTCTCCAACCTCATCG
TCAAGGACCAGGCCCGGATGAACGCTGCCCAGTGTCTCGCCCATCCCTGGCTCAACAACCTGGCGGAG
AAAGCCAAACGCTGTAACCGACGCCTTAAGTCCCAGATCTTGCTTAAGAAATACCTCATGAAGAGGCG
CTGGAAGAAAAACTTCATTGCTGTCAGCGCTGCCAACCGCTTCAAGAAGATCAGCAGCTCGGGGGCAC
TGATGGCTCTGGGGGTCTGA

| | | | |
|---|---|---|---|
| NOV18b, CG51448-01 | SEQ ID NO: 214 | 595 aa | MW at 64501.9kD |
| Protein Sequence | | | |

MATENGAVELGIQNPSTDKAPKGPTGERPLAAGKDPGPPDPKKAPDPPTLKKDAKAPASEKGDGTLAQ
PSTSSQGPKGEGDRGGGPAEGSAGPPAALPQQTATPETSVKKPKAEQGASGSQDPGKPRVGKKAAEGQ
AAARRGSPAFLHSPSCPAIISSSEKLLAKKPPSEASELTFEGVPMTHSPTDPRPAKAEEGKNILAESQ
KEVGEKTPGQAGQAKMQGDTSRGIEFQAVPSEKSEVGQALCLTAREEDCFQILDDCPPPPAPFPHRMV
ELRTGNVSSEFSMNSKEALGGGKFGAVCTCMEKATGLKLAAKVIKKQTPKDKEMVLLEIEVMNQLNHR
NLIQLYAAIETPHEIVLFMEIEGGELFERIVDEDYHLTEVDTMVFVRQICDGILFMHKMRVLHLDLKP
ENILCVNTTGHLVKIEDFGLARRYHNPNEKLKVNFGTPEFLSPEVVNYDQISDKTDMWSMGVITYMLL
SGLSPFLGDDDTETLNNVLSGNWYFDEETFEAVSDEAKDFVSNLIVKDQARNNAAQOLAHPWLNNLAE
KAKRCNRRLKSQILLKKYLMKRRWKKNFIAVSAVSAANRFKKISSSGALMALGV

| | | |
|---|---|---|
| NOV18c, 274051198 | SEQ ID NO: 215 | 787 bp |
| DNA Sequence | ORF Start: at 2 | ORF Stop: end of sequence |

CACCAAGCTTATGAACTCCAAGGAGGCGCTCGGAGGGGGCAAGTTTGGGGCAGTCTGTACCTGCATGG
AGAAAGCCACAGGCCTCAAGCTGGCAGCCAAGGTCATCAAGAAACAGACTCCCAAAGACAAGGAAATG
GTGTTGCTGGAGATTGAGGTCATGAACCAGCTGAACCACCGCAATCTGATCCAGCTGTATGCAGCCAT
CGAGACTCCGCATGAGATCGTCCTGTTCATGGAGTACATCGAGGGCGGAGAGCTCTTCGAGAGGATTG
TGGATGAGGACTACCATCTGACCGAGGTGGACACCATGGTGTTTGTCAGGCAGATCTGTGACGGGATC
CTCTTCATGCACAAGATGAGGGTTTTGCACCTGGACCTCAAGCCAGAGAACATCCTGTGTGTCAACAC
CACCGGGCATTTGGTGAAGATCATTGACTTTGGCCTGGCACGGAGGTATAACCCCAACGAGAAGCTGA
AGGTGAACTTTGGGACCCCAGAGTTCCTGTCACCTGAGGTGGTGAATTATGACCAAATCTCCGATAAG
ACAGACATGTGGAGTATGGGGGTGATCACCTACATGCTGCTGAGCGGCCTCTCCCCCTTCCTGGGAGA
TGATGACACAGAGACCCTAAACAACGTTCTATCTGGCAACTGGTACTTTGATGAAGAGACCTTTGAGG
CCGTATCAGACGAGGCCAAAGACTTTGTCTCCAACCTCATCGTCAAGGACCAGAGGGCCCGGATGAAC
GCTGCCCAGTGTCTCGCCCATCCCTGGCTCGTCGACGGC

| | | | |
|---|---|---|---|
| NOV18c, 274051198 | SEQ ID NO: 216 | 262 aa | MW at 29771.1kD |
| Protein Sequence | | | |

TKLMNSKEALGGGKFGAVCTCMEKATGLKLAAKVIKKQTPKDKEMVLLEIEVMNQLNHRNLIQLYAAI
ETPHEIVLFMEYIEGGELFERIVDEDYHLTEVDTMVFVRQICDGILFNHKMRVLHLDLKPENILCVNT
TGHLVKIIDFGLARRYNPNEKLKVNFGTPEFLSPEVVNYDQISDKTDMWSMGVITYMLLSGLSPFLGD
DDTETLNNVLSGNWYFDEETFEAVSDEAKDFVSNLIVKDQRARMNAAQCLAHPWLVDG

| | | |
|---|---|---|
| NOV18d, 274051170 | SEQ ID NO: 217 | 1813 bp |
| DNA Sequence | ORF Start: at 2 | ORF Stop: end of sequence |

CACCAAGCTTCCCACCATGGCGACAGAAAATGGAGCAGTTGAGCTGGGAATTCAGAACCCATCAACAG
ACAAGGCACCTAAAGGTCCCACAGGTGAAAGACCCCTGGCTGCAGGGAAAGACCCTGGCCCCCCAGAC
CCAAAGAAAGCTCCGGATCCACCCACCCTGAAGAAAGATGCCAAAGCCCCTGCCTCAGAGAAAGGGGA
TGGTACCCTGGCCCAACCCTCAACTAGCAGCCAAGGCCCCAAAGGAGAGGGTGACAGGGGCGGGGGGC
CCGCGGAGGGCAGTGCTGGGCCCCCGGCAGCCCTGCCCCAGCAGACTGCGACACCTGAGACCAGCGTC
AAGAAGCCCAAGGCTGAGCAGGGAGCCTCAGGCAGCCAGGATCCTGGAAAGCCCAGGGTGGGCAAGAA
GGCAGCAGAGGGCCAAGCAGCAGCCAGGAGGGGCTCACCTGCCTTTCTGCATAGCCCCAGCTGTCCTG
CCATCATCTCCAGTTCTGAGAAGCTGCTGGCCAAGAAGCCCCCAAGCGAGGCATCAGAGCTCACCTTT
GAAGGGGTGCCCATGACCCACAGCCCCACGGATCCCAGGCCAGCCAAGGCAGAAGAAGGAAAGAACAT
CCTGGCAGAGAGCCAGAAGGAAGTGGGAGAGAAAACCCCAGGCCAGGCTGGCCAGGCTAAGATGCAAG
GGGACACCTCGAGGGGGATTGAGTTCCAGGCTGTTCCCTCAGAGAAATCCGAGGTGGGGCAGGCCCTC
TGTCTCACAGCCAGGGAGGAGGACTGCTTCCAGATTTTGGATGATTGCCCGCCACCTCCGGCCCCCTT
CCCTCACCGCATGGTGGAGCTGAGGACCGGGAATGTCAGCAGTGAATTCAGTATGAACTCCAAGGAGG
CGCTCGGAGGTGGCAAGTTTGGGGCAGTCTGTACCTGCATGGAGAAAGCCACAGGCCTCAAGCTGGCA
GCCAAGGTCATCAAGAAACAGACTCCCAAAGACAAGGAAATGGTGTTGCTGGAGATTGAGGTCATGAA
CCAGCTGAACCACCGCAATCTGATCCAGCTGTATGCAGCCATCGAGACTCCGCATGAGATCGTCCTGT
TCATGGAGTACATCGAGGGCGGAGAGCTCTTCGAGAGGATTGTGGATGAGGACTACCATCTGACCGAG
GTGGACACCATGGTGTTTGTCAGGCAGATCTGTGACGGGATCCTCTTCATGCACAAGATGAGGGTTTT
GCACCTGGACCTCAAGCCAGAGAACATCCTGTGTGTCAACACCACCGGGCATTTGGTGAAGATCATTG
ACTTTGGCCTGGCACGGAGGTATAACCCCAACGAGAAGCTGAAGGTGAACTTTGGGACCCCAGAGTTC
CTGTCACCTGAGGTGGTGAATTATGACCAAATCTCCGATAAGACAGACATGTGGAGTATGGGGGTGAT
CACCTACATGCTGCTGAGCGGCCTCTCCCCCTTCCTGGGAGATGATGACACAGAGACCCTAAACAACG
TTCTATCTGGCAACTGGTACTTTGATGAAGAGACCTTTGAGGCCGTATCAGACGAGGCCAAAGACTTT
GTCTCCAACCTCATCGTCAAGGACCAGAGGGCCCGGATGAACGCTGCCCAGTGTCTCGCCCATCCCTG
GCTCAACAACCTGGCGGAGAAAGCCAAACGCTGTAACCGACGCCTTAAGTCCCAGATCTTGCTTAAGA
AATACCTCATGAAGAGGCGCTGGAAGAAAAACTTCATTGCTGTCAGCGCTGCCAACCGCTTCAAGAAG
ATCAGCAGCTCGGGGGCACTGATGGCTCTGGGGGTCGTCGACGGC

| | | | |
|---|---|---|---|
| NOV18d, 274051170 | SEQ ID NO: 218 | 604 aa | MW at 65496.1kD |
| Protein Sequence | | | |

TKLPTMATENGAVELGIQNPSTDKAPKGPTGERPLAAGKDPGPPDPKKAPDPPTLKKDAKAPASEKGD
GTLAQPSTSSQGPKGEGDRGGGPAEGSAGPPAALPQQTATPETSVKKPKAEQGASGSQDPGKPRVGKK
AAEGQAAARRGSPAFLHSPSCPAIISSSEKLLAKKPPSEASELTFEGVPMTHSPTDPRPAKAEEGKNI
LAESQKEVGEKTPGQAGQAKMQGDTSRGIEFQAVPSEKSEVGQALCLTAREEDCFQILDDCPPPPAPF
PHRMVELRTGNVSSEFSMNSKEALGGGKFGAVCTCMEKATGLKLAAKVIKKQTPKDKEMVLLEIEVMN
QLNHRNLIQLYAAIETPHEIVLFMEYIEGGELFERIVDEDYHLTEVDTMVFVRQICDGILFMHKMRVL
HLDLKPENILCVNTTGHLVKIIDFGLARRYNPNEKLKVNFGTPEFLSPEVVNYDQISDKTDMWSMGVI
TYMLLSGLSPFLGDDDTETLNNVLSGNWYFDEETFEAVSDEAKDFVSNLIVKDQRARMNAAQCLAHPW
LNNLAEKAKRCNRRLKSQILLKKYLMKRRWKKNFIAVSAANRFKKISSSGALMALGVVDG

| | | |
|---|---|---|
| NOV18e, GG51448-02 | SEQ ID NO: 219 | 2010 bp |
| DNA Sequence | ORF Start: ATG at 40 | ORF Stop: TGA at 1828 |

TTTGAGTTAGACAAGCAGCAGCACACGCCTCCCTACCTCATGGCGACAGAAAATGGAGCAGTTGAGCT
GGGAATTCAGAACCCATCAACAGACAAGGCACCTAAAGGTCCCACAGGTGAAAGACCCCTGGCTGCAG
GGAAAGACCCTGGCCCCCCAGACCCAAAGAAAGCTCCGGATCCACCCACCCTGAAGAAAGATGCCAAA
GCCCCTGCCTCAGAGAAAGGGGATGGTACCCTGGCCCAACCCTCAACTAGCAGCCAAGGCCCCAAAGG
AGAGGGTGACAGGGGCGGGGGGCCCGCGGAGGGCAGTGCTGGGCCCCCGGCAGCCCTGCCCCAGCAGA
CTGCGACACCTGAGACCAGCGTCAAGAAGCCCAAGGCTGAGCAGGGAGCCTCAGGCAGCCAGGATCCT
GGAAAGCCCAGGGTGGGCAAGAAGGCAGCAGAGGGCCAAGCAGCAGCCAGGAGGGGCTCACCTGCCTT
TCTGCATAGCCCCAGCTGTCCTGCCATCATCTCCAGTTCTGAGAAGCTGCTGGCCAAGAAGCCCCCAA
GCGAGGCATCAGAGCTCACCTTTGAAGGGGTGCCCATGACCCACAGCCCCACGGATCCCAGGCCAGCC
AAGGCAGAAGAAGGAAAGAACATCCTGGCAGAGAGCCAGAAGGAAGTGGGAGAGAAAACCCCAGGCCA
GGCTGGCCAGGCTAAGATGCAAGGGGACACCTCGAGGGGGATTGAGTTCCAGGCTGTTCCCTCAGAGA
AATCCGAGGTGGGGCAGGCCCTCTGTCTCACAGCCAGGGAGGAGGACTGCTTCCAGATTTTGGATGAT
TGCCCGCCACCTCCGGCCCCCTTCCCTCACCGCATGGTGGAGCTGAGGACCGGGAATGTCAGCAGTGA
ATTCAGTATGAACTCCAAGGAGGCGCTCGGAGGTGGCAAGTTTGGGGCAGTCTGTACCTGCATGGAGA
AAGCCACAGGCCTCAAGCTGGCAGCCAAGGTCATCAAGAAACAGACTCCCAAAGACAAGGAAATGGTG
TTGCTGGAGATTGAGGTCATGAACCAGCTGAACCACCGCAATCTGATCCAGCTGTATGCAGCCATCGA
GACTCCGCATGAGATCGTCCTGTTCATGGAGTACATCGAGGGCGGAGAGCTCTTCGAGAGGATTGTGG
ATGAGGACTACCATCTGACCGAGGTGGACACCATGGTGTTTGTCAGGCAGATCTGTGACGGGATCCTC
TTCATGCACAAGATGAGGGTTTTGCACCTGGACCTCAAGCCAGAGAACATCCTGTGTGTCAACACCAC
CGGGCATTTGGTGAAGATCATTGACTTTGGCCTGGCACGGAGGTATAACCCCAACGAGAAGCTGAAGG
TGAACTTTGGGACCCCAGAGTTCCTGTCACCTGAGGCGGTGAATTATGACCAAATCTCCGATAAGACA
GACATGTGGAGTATGGGGGTGATCACCTACATGCTGCTGAGCGGCCTCTCCCCCTTCCTGGGAGATGA
TGACACAGAGACCCTAAACAACGTTCTATCTGGCAACTGGTACTTTGATGAAGAGACCTTTGAGGCCG
TATCAGACGAGGCCAAAGACTTTGTCTCCAACCTCATCGTCAAGGACCAGAGGGCCCGGATGAACGCT
GCCCAGTGTCTCGCCCATCCCTGGCTCAACAACCTGGCGGAGAAAGCCAAACGCTGTAACCGACGCCT
TAAGTCCCAGATCTTGCTTAAGAAATACCTCATGAAGAGGCGCTGGAAGAAAAACTTCATTGCTGTCA
GCGCTGCCAACCGCTTCAAGAAGATCAGCAGCTCGGGGGCACTGATGGCTCTGGGGGTCTGAGCCCTG
GGCGCAGCTGAAGCCTGGACGCAGCCACACAGTGGCCGGGGCTGAAGCCACACAGCCCAGAAGGCCAG
AAAAGGCAGCCAGATCCCCAGGGCAGCCTCGTTAGGACAAGGCTGTGCCAGGCTGGGAGGCTCGGGGC
TCCCCACGCCCCCATGCAGTGACCGCTTCCCCGATGTG

| | | | |
|---|---|---|---|
| NOV18e, GG51448-02 | SEQ ID NO: 220 | 596 aa | MW at 64656.1kD |
| Protein Sequence | | | |

MATENGAVELGIQNPSTDKAPKGPTGERPLAAGKDPGPPDPKKAPDPPTLKKDAKAPASEKGDGTLAQ
PSTSSQGPKGEGDRGGGPAEGSAGPPAALPQQTATPETSVKKPKAEQGASGSQDPGKPRVGKKAAEGQ
AAARRGSPAFLHSPSCPAIISSSEKLLAKKPPSEASELTFEGVPMTHSPTDPRPAKAEEGKNILAESQ
KEVGEKTPGQAGQAKMQGDTSRGIEFQAVPSEKSEVGQALCLTAREEDCFQILDDCPPPPAPFPHRMV
ELRTGNVSSEFSMNSKEALGGGKFGAVCTCMEKATGLKLAAKVIKKQTPKDKEMVLLEIEVMNQLNHR
NLIQLYAAIETPHEIVLFMEYIEGGELFERIVDEDYHLTEVDTMVFVRQICDGILFMNKMRVLHLDLK
PENILCVNTTGHLVKIIDFGLARRYNPNEKLKVNFGTPEFLSPEAVNYDQISDKTDMWSMGVITYMLL
SGLSPFLGDDDTETLNNVLSGNWYFDEETFEAVSDEAKDFVSNLIVKDQRARMNAAQCLAHPWLNNLA
EKAKRCNRRLKSQILLKKYLMKRRWKKNFIAVSAANRFKKISSSGALMALGV

| | | |
|---|---|---|
| NOV18f, CG51448-03 | SEQ ID NO: 221 | 1839 bp |
| DNA Sequence | ORF Start: ATG at 49 | ORF Stop: TGA at 1837 |

CTAGAAAGACTTGAGTTAGACAAGCAGCAGCACACGCCTCCCTACCTCATGGCGACAGAAAATGGAGC
AGTTGAGCTGGGAATTCAGAACCCATCAACAGACAAGGCACCTAAAGGTCCCACAGGTGAAAGACCCC
TGGCTGCAGGGAAAGACCCTGGCCCCCCAGACCCAAAGAAAGCTCCGGATCCACCCACCCTGAAGAAA
GATGCCAAAGCCCCTGCCTCAGAGAAAGGGGATGGTACCCTGGCCCAACCCTCAACTAGCAGCCAAGG
CCCCAAAGGAGAGGGTGACAGGGGCGGGGGGCCCGCGGAGGGCAGTGCTGGGCCCCCGGCAGCCCTGC
CCCAGCAGACTGCGACACCTGAGACCAGCGTCAAGAAGCCCAAGGCTGAGCAGGGAGCCTCAGGCAGC
CAGGATCCTGGAAAGCCCAGGGTGGGCAAGAAGGCAGCAGAGGGCCAAGCAGCAGCCAGGAGGGGCTC
ACCTGCCTTTCTGCATAGCCCCAGCTGTCCTGCCATCATCTCCAGTTCTGAGAAGCTGCTGGCCAAGA
AGCCCCCAAGCGAGGCATCAGAGCTCACCTTTGAAGGGGTGCCCATGACCCACAGCCCCACGGATCCC
AGGCCAGCCAAGGCAGAAGAAGGAAAGAACATCCTGGCAGAGAGCCAGAAGGAAGTGGGAGAGAAAAC
CCCAGGCCAGGCTGGCCAGGCTAAGATGCAAGGGGACACCTCGAGGGGGATTGAGTTCCAGGCTGTTC
CCTCAGAGAAATCCGAGGTGGGGCAGGCCCTCTGTCTCACAGCCAGGGAGGAGGACTGCTTCCAGATT
TTGGATGATTGCCCGCCACCTCCGGCCCCCTTCCCTCACCGCATGGTGGAGCTGAGGACCGGGAATGT
CAGCAGTGAATTCAGTATGAACTCCAAGGAGGCGCTCGGAGGTGGCAAGTTTGGGGCAGTCTGTACCT
GCATGGAGAAAGCCACAGGCCTCAAGCTGGCAGCCAAGGTCATCAAGAAACAGACTCCCAAAGACAAG
GAAATGGTGTTGCTGGAGATTGAGGTCATGAACCAGCTGAACCACCGCAATCTGATCCAGCTGTATGC
AGCCATCGAGACTCCGCATGAGATCGTCCTGTTCATGGAGTACATCGAGGGCGGAGAGCTCTTCGAGA
GGATTGTGGATGAGGACTACCATCTGACCGAGGTGGACACCATGGTGTTTGTCAGGCAGATCTGTGAC
GGGATCCTCTTCATGCACAAGATGAGGGTTTTGCACCTGGACCTCAAGCCAGAGAACATCCTGTGTGT
CAACACCACCGGGCATTTGGTGAAGATCATTGACTTTGGCCTGGCACGGAGGTATAACCCCAACGAGA
AGCTGAAGGTGAACTTTGGGACCCCAGAGTTCCTGTCACCTGAGGCGGTGAATTATGACCAAATCTCC
GATAAGACAGACATGTGGAGTATGGGGGTGATCACCTACATGCTGCTGAGCGGCCTCTCCCCCTTCCT
GGGAGATGATGACACAGAGACCCTAAACAACGTTCTATCTGGCAACTGGTACTTTGATGAAGAGACCT
TTGAGGCCGTATCAGACGAGGCCAAAGACTTTGTCTCCAACCTCATCGTCAAGGACCAGAGGGCCCGG
ATGAACGCTGCCCAGTGTCTCGCCCATCCCTGGCTCAACAACCTGGCGGAGAAAGCCAAACGCTGTAA
CCGACGCCTTAAGTCCCAGATCTTGCTTAAGAAATACCTCATGAAGAGGCGCTGGAAGAAAAACTTCA
TTGCTGTCAGCGCTGCCAACCGCTTCAAGAAGATCAGCAGCTCGGGGGCACTGATGGCTCTGGGGGTC
TGA

| | | | |
|---|---|---|---|
| NOV18f, CG51448-03 | SEQ ID NO: 222 | 596 aa | MW at 64656.1kD |
| Protein Sequence | | | |

MATENGAVELGIQNPSTDKAPKGPTGERPLAAGKDPGPPDPKKAPDPPTLKKDAKAPASEKGDGTLAQ
PSTSSQGPKGEGDRGGGPAEGSAGPPAALPQQTATPETSVKKPKAEQGASGSQDPGKPRVGKKAAEGQ
AAARRGSPAFLHSPSCPAIISSSEKLLAKKPPSEASELTFEGVPMTHSPTDPRPAKAEEGKNILAESQ
KEVGEKTPGQAGQAKMQGDTSRGIEFQAVPSEKSEVGQALCLTAREEDCFQILDDCPPPPAPFPHRMV
ELRTGNVSSEFSMNSKEALGGGKFGAVCTCMEKATGLKLAAKVIKKQTPKDKEMVLLEIEVMNQLNHR
NLIQLYAAIETPHEIVLFMEYIEGGELFERIVDEDYHLTEVDTMVFVRQICDGILFMHKMRVLHLDLK
PENILCVNTTGHLVKIIDFGLARRYNPNEKLKVNFGTPEFLSPEAVNYDQISDKTDMWSMGVITYMLL
SGLSPFLGDDDTETLNNVLSGNWYFDEETFEAVSDEAKDFVSNLIVKDQRARMNAAQCLAHPWLNNLA
EKAKRCNRRLKSQILLKKYLMKRRWKKNFIAVSAANRFKKISSSGALMALGV

| | | |
|---|---|---|
| NOV18g, GG51448-04 | SEQ ID NO: 223 | 2558 bp |
| DNA Sequence | ORF Start: ATG at 164 | ORF Stop: TGA at 1949 |

CTTTGCTCCAGGTACCTCTCTCCCCTCAGTTAGCAGGCCTCGGCTTCCTGTCTCACTGCAGCCAGACG
AGAGGGGAAATTGGACAGCCTGACACACTCCACTCTTGTTTCTGCAGCTAGAAAGACTTGAGTTAGAC
AAGCAGCAGCACACGCCTCCCTACCTCATGGCGACAGAAAATGGAGCAGTTGAGCTGGGAATTCAGAA
CCCATCAACAGACAAGGCACCTAAAGGTCCCACAGGTGAAAGACCCCTGGCTGCAGGGAAAGACCCTG
GCCCCCCAGACCCAAAGAAAGCTCCGGATCCACCCACCCTGAAGAAAGATGCCAAAGCCCCTGCCTCA
GAGAAAGGGGATGGTACCCTGGCCCAACCCTCAACTAGCAGCCAAGGCCCCAAAGGAGAGGGTGACAG
GGGCGGGGGGCCCGCGGAGGGCAGTGCTGGGCCCCCGGCAGCCCTGCCCCAGCAGACTGCGACACCTG
AGACCAGCGTCAAGAAGCCCAAGGCTGAGCAGGGAGCCTCAGGCAGCCAGGATCCTGGAAAGCCCAGG
GTGGGCAAGAAGGCAGCAGAGGGCCAAGCAGCAGCCAGGAGGGGCTCACCTGCCTTTCTGCATAGCCC
CAGCTGTCCCGCCATCATCTCCAGTTCTGAGAAGCTGCTGGCCAAGAAGCCCCCAAGCGAGGCATCAG
AGCTCACCTTTGAAGGGGTGCCCATGACCCACAGCCCCACGGATCCCAGGTCGGCCAAGGCAGAAGAA
GGAAAGAACATCCTGGCAGAGAGCCAGAAGGAAGTGGGAGAGAAAACCCCAGGCCAGGCTGGCCAGGC
TAAGATGCAAGGGGACACCTCGAGGGGGATTGAGTTCCAGGCTGTTCCCTCAGAGAAATCCGAGGTGG
GGCAGGCCCTCTGTCTCACAGCCAGGGAGGAGGACTGCTTCCAGATTTTGGATGATTGCCCGCCACCT
CCGGCCCCCTTCCCTCACCGCATGGTGGAGCTGAGGACCGGGAATGTCAGCAGTGAATTCAGTATGAA
CTCCAAGGAGGCGCTCGGAGGGGGCAAGTTTGGGGCAGTCTGTACCTGCATGGAGAAAGCCACAGGCC
TCAAGCTGGCAGCCAAGGTCATCAAGAAACAGACTCCCAAAGACAAGGAAATGGTGTTGCTGGAGATT
GAGGTCATGAACCAGCTGAACCACCGCAATCTGATCCAGCTGTATGCAGCCATCGAGACTCCGCATGA
GATCGTCCTGTTCATGGAGATCGAGGGCGGAGAGCTCTTCGAGAGGATTGTGGATGAGGACTACCATC
TGACCGAGGTGGACACCATGGTGTTTGTCAGGCAGATCTGTGACGGGATCCTCTTGATGCACAAGATG
AGGGTTTTGCACCTGGACCTCAAGCCAGAGAACATCCTGTGTGTCAACACCACCGGGCATTTGGTGAA
GATCATTGACTTTGGCCTGGCACGGAGGTATAACCCCAACGAGAAGCTGAAGGTGAACTTTGGGACCC
CAGAGTTCCTGTCACCTGAGGTGGTGAATTATGACCAAATCTCCGATAAGACAGACATGTGGAGTATG
GGGGTGATCACCTACATGCTGCTGAGCGGCCTCTCCCCCTTCCTGGGAGATGATGACACAGAGACCCT
AAACAACGTTCTATCTGGCAACTGGTACTTTGATGAAGAGACCTTTGAGGCCGTATCAGACGAGGCCA
AAGACTTTGTCTCCAACCTCATCGTCAAGGACCAGAGGGCCCGGATGAACGCTGCCCAGTGTCTCGCC
CATCCCTGGCTCAACAACCTGGCGGAGAAAGCCAAACGCTGTAACCGACGCCTTAAGTCCCAGATCTT
GCTTAAGAAATACCTCATGAAGAGGCGCTGGAAGAAAAACTTCATTGCTGTCAGCGCTGCCAACCGCT
TCAAGAAGATCAGCAGCTCGGGGGCACTGATGGCTCTGGGGGTCTGAGCCCTGGGCGCAGCTGAAGCC
TGGACGCAGCCACACAGTGGCCGGGGCTGAAGCCACACAGCCCAGAAGGCCAGAAAAGGCAGCCAGAT
CCCCAGGGCAGCCTCGTTAGGACAAGGCTGTGCCAGGCTGGGAGGCTCGGGGCTCCCCACGCCCCCAT
GCAGTGACCGCTTCCCCGATGTGAGCCGCCTCGGAGTGTGGCCTGGATCCATCCTGCTAGCACCTCCC
CAGACAGGGCTCCAGCCTGTCGGCCACACCCCAGACTCCAGGCCCCCGTTGAAGCCGCTCCCGGTTCC
CTCCCCAGCTCCTCGTCTTTGAACTGCCGCCGCCGTGGTGACCCCTGCTTTGCCCCACTGGGAGAGTC
CTTAGCCTGGGCCTCCTCCTAGCTGGAGTGCCATGGCTGGGGGGTCTCAGCATGTAGGGCTTCTGTGG
TTGTGGATGGGAGGCTCCTGGTGGGGCAGAAAGGCTGCAACGCTGATTCCTAAGGCCCAGCTGCCAGG
GAAGACAGAGCAGGCTTTGTGAGAGAGGACCTCCATGCCCCCGCCACCTCCCCACTCCAGCAGATAAG
GCCGAGCCCACACCATCTGGCCCAGGCTGGCCCCCACCACCT

| | | | |
|---|---|---|---|
| NOV18g, CG51448-04 | SEQ ID NO: 224 | 595 aa | MW at 64476.9kD |
| Protein Sequence | | | |

MATENGAVELGIQNPSTDKAPKGPTGERPLAAGKDPGPPDPKKAPDPPTLKKDAKAPASEKGDGTLAQ
PSTSSQGPKGEGDRGGGPAEGSAGPPAALPQQTATPETSVKKPKAEQGASGSQDPGKPRVGKKAAEGQ
AAARRGSPAFLHSPSCPAIISSSEKLLAKKPPSEASELTFEGVPMTHSPTDPRSAKAEEGKNILAESQ
KEVGEKTPGQAGQAKMQGDTSRGIEFQAVPSEKSEVGQALCLTAREEDCFQILDDCPPPPAPFPHRMV
ELRTGNVSSEFSMNSKEALGGGKFGAVCTCMEKATGLKLAAKVIKKQTPKDKEMVLLEIEVMNQLNHR
NLIQLYAAIETPHEIVLFMEIEGGELFERIVDEDYHLTEVDTMVFVRQICDGILLMHKMRVLHLDLKP
ENILCVNTTGHLVKIIDFGLARRYNPNEKLKVNFGTPEFLSPEVVNYDQISDKTDMWSMGVITYMLLS
GLSPFLGDDDTETLNNVLSGNWYFDEETFEAVSDEAKDFVSNLIVKDQRARMNAAQCLAHPWLNNLAE
KAKRCNRRLKSQILLKKYLMKRRWKKNFIAVSAANRFKKISSSGALMALGV

| | | |
|---|---|---|
| NOV18h, SNP13375535 of | SEQ ID NO: 225 | 1788 bp |
| CG51448-01, DNA Sequence | ORF Start: ATG at 1 | ORF Stop: TGA at 1786 |
| | SNP Pos: 102 | SNP Change: A to G |

ATGGCGACAGAAAATGGAGCAGTTGAGCTGGGAATTCAGAACCCATCAACAGACAAGGCACCTAAAGG
TCCCACAGGTGAAAGACCCCTGGCTGCAGGGAAGGACCCTGGCCCCCCAGACCCAAAGAAAGCTCCGG
ATCCACCCACCCTGAAGAAAGATGCCAAAGCCCCTGCCTCAGAGAAAGGGGATGGTACCCTGGCCCAA
CCCTCAACTAGCAGCCAAGGCCCCAAAGGAGAGGGTGACAGGGGCGGGGGGCCCGCGGAGGGCAGTGC
TGGGCCCCCGGCAGCCCTGCCCCAGCAGACTGCGACACCTGAGACCAGCGTCAAGAAGCCCAAGGCTG
AGCAGGGAGCCTCAGGCAGCCAGGATCCTGGAAAGCCCAGGGTGGGCAAGAAGGCAGCAGAGGGCCAA
GCAGCAGCCAGGAGGGGCTCACCTGCCTTTCTGCATAGCCCCAGCTGTCCTGCCATCATCTCCAGTTC
TGAGAAGCTGCTGGCCAAGAAGCCCCCAAGCGAGGCATCAGAGCTCACCTTTGAAGGGGTGCCCATGA
CCCACAGCCCCACGGATCCCAGGCCAGCCAAGGCAGAAGAAGGAAAGAACATCCTGGCAGAGAGCCAG
AAGGAAGTGGGAGAGAAAACCCCAGGCCAGGCTGGCCAGGCTAAGATGCAAGGGGACACCTCGAGGGG
GATTGAGTTCCAGGCTGTTCCCTCAGAGAAATCCGAGGTGGGGCAGGCCCTCTGTCTCACAGCCAGGG
AGGAGGACTGCTTCCAGATTTTGGATGATTGCCCGCCACCTCCGGCCCCCTTCCCTCACCGCATGGTG
GAGCTGAGGACCGGGAATGTCAGCAGTGAATTCAGTATGAACTCCAAGGAGGCGCTCGGAGGGGGCAA
GTTTGGGGCAGTCTGTACCTGCATGGAGAAAGCCACAGGCCTCAAGCTGGCAGCCAAGGTCATCAAGA
AACAGACTCCCAAAGACAAGGAAATGGTGTTGCTGGAGATTGAGGTCATGAACCAGCTGAACCACCGC
AATCTGATCCAGCTGTATGCAGCCATCGAGACTCCGCATGAGATCGTCCTGTTCATGGAGATCGAGGG
CGGAGAGCTCTTCGAGAGGATTGTGGATGAGGACTACCATCTGACCGAGGTGGACACCATGGTGTTTG
TCAGGCAGATCTGTGACGGGATCCTCTTCATGCACAAGATGAGGGTTTTGCACCTGGACCTCAAGCCA
GAGAACATCCTGTGTGTCAACACCACCGGGCATTTGGTGAAGATCATTGACTTTGGCCTGGCACGGAG
GTACCACAACCCCAACGAGAAGCTGAAGGTGAACTTTGGGACCCCAGAGTTCCTGTCACCTGAGGTGG
TGAATTATGACCAAATCTCCGATAAGACAGACATGTGGAGTATGGGGGTGATCACCTACATGCTGCTG
AGCGGCCTCTCCCCCTTCCTGGGAGATGATGACACAGAGACCCTAAACAACGTTCTATCTGGCAACTG
GTACTTTGATGAAGAGACCTTTGAGGCCGTATCAGACGAGGCCAAAGACTTTGTCTCCAACCTCATCG
TCAAGGACCAGGCCCGGATGAACGCTGCCCAGTGTCTCGCCCATCCCTGGCTCAACAACCTGGCGGAG
AAAGCCAAACGCTGTAACCGACGCCTTAAGTCCCAGATCTTGCTTAAGAAATACCTCATGAAGAGGCG
CTGGAAGAAAAACTTCATTGCTGTCAGCGCTGCCAACCGCTTCAAGAAGATCAGCAGCTCGGGGGCAC
TGATGGCTCTGGGGGTCTGA

| | | | |
|---|---|---|---|
| NOV18h, SNP13375535 of | SEQ ID NO: 226 | 595 aa | MW at 64501.9kD |
| CG51448-01, Protein | SNP Pos: 34 | | SNP Change: Lys to Lys |
| Sequence | | | |

MATENGAVELGIQNPSTDKAPKGPTGERPLAAGKDPGPPDPKKAPDPPTLKKDAKAPASEKGDGTLAQ
PSTSSQGPKGEGDRGGGPAEGSAGPPAALPQQTATPETSVKKPKAEQGASGSQDPGKPRVGKKAAEGQ
AAARRGSPAFLHSPSCPAIISSSEKLLAKKPPSEASELTFEGVPMTHSPTDPRPAKAEEGKNILAESQ
KEVGEKTPGQAGQAKMQGDTSRGIEFQAVPSEKSEVGQALCLTAREEDCFQILDDCPPPPAPFPHRMV
ELRTGNVSSEFSMNSKEALGGGKFGAVCTCMEKATGLKLAAKVIKKQTPKDKEMVLLEIEVMNQLNHR
NLIQLYAAIETPHEIVLFMEIEGGELFERIVDEDYHLTEVDTMVFVRQICDGILFMHKMRVLHLDLKP
ENILCVNTTGHLVKIIDFGLARRYHNPNEKLKVNFGTPEFLSPEVVNYDQISDKTDMWSMGVITYMLL
SGLSPFLGDDDTETLNNVLSGNWYFDEETFEAVSDEAKDFVSNLIVKDQARNNAAQCLAHPWLNNLAE
KAKRCNRRLKSQILLKKYLMKRRWKKNFIAVSAANRFKKISSSGALMALGV

| | | |
|---|---|---|
| NOV18i, SNP13375536 of | SEQ ID NO: 227 | 1788 bp |
| CG51448-01, DNA Sequence | ORF Start: ATG at 1 | ORF Stop: TGA at 1786 |
| | SNP Pos: 287 | SNP Change: C to T |

ATGGCGACAGAAAATGGAGCAGTTGAGCTGGGAATTCAGAACCCATCAACAGACAAGGCACCTAAAGG
TCCCACAGGTGAAAGACCCCTGGCTGCAGGGAAAGACCCTGGCCCCCCAGACCCAAAGAAAGCTCCGG
ATCCACCCACCCTGAAGAAAGATGCCAAAGCCCCTGCCTCAGAGAAAGGGGATGGTACCCTGGCCCAA
CCCTCAACTAGCAGCCAAGGCCCCAAAGGAGAGGGTGACAGGGGCGGGGGGCCCGCGGAGGGCAGTGC
TGGGCCCCCGGCAGTCCTGCCCCAGCAGACTGCGACACCTGAGACCAGCGTCAAGAAGCCCAAGGCTG
AGCAGGGAGCCTCAGGCAGCCAGGATCCTGGAAAGCCCAGGGTGGGCAAGAAGGCAGCAGAGGGCCAA
GCAGCAGCCAGGAGGGGCTCACCTGCCTTTCTGCATAGCCCCAGCTGTCCTGCCATCATCTCCAGTTC
TGAGAAGCTGCTGGCCAAGAAGCCCCCAAGCGAGGCATCAGAGCTCACCTTTGAAGGGGTGCCCATGA
CCCACAGCCCCACGGATCCCAGGCCAGCCAAGGCAGAAGAAGGAAAGAACATCCTGGCAGAGAGCCAG
AAGGAAGTGGGAGAGAAAACCCCAGGCCAGGCTGGCCAGGCTAAGATGCAAGGGGACACCTCGAGGGG
GATTGAGTTCCAGGCTGTTCCCTCAGAGAAATCCGAGGTGGGGCAGGCCCTCTGTCTCACAGCCAGGG
AGGAGGACTGCTTCCAGATTTTGGATGATTGCCCGCCACCTCCGGCCCCCTTCCCTCACCGCATGGTG
GAGCTGAGGACCGGGAATGTCAGCAGTGAATTCAGTATGAACTCCAAGGAGGCGCTCGGAGGGGGCAA
GTTTGGGGCAGTCTGTACCTGCATGGAGAAAGCCACAGGCCTCAAGCTGGCAGCCAAGGTCATCAAGA
AACAGACTCCCAAAGACAAGGAAATGGTGTTGCTGGAGATTGAGGTCATGAACCAGCTGAACCACCGC
AATCTGATCCAGCTGTATGCAGCCATCGAGACTCCGCATGAGATCGTCCTGTTCATGGAGATCGAGGG
CGGAGAGCTCTTCGAGAGGATTGTGGATGAGGACTACCATCTGACCGAGGTGGACACCATGGTGTTTG
TCAGGCAGATCTGTGACGGGATCCTCTTCATGCACAAGATGAGGGTTTTGCACCTGGACCTCAAGCCA
GAGAACATCCTGTGTGTCAACACCACCGGGCATTTGGTGAAGATCATTGACTTTGGCCTGGCACGGAG
GTACCACAACCCCAACGAGAAGCTGAAGGTGAACTTTGGGACCCCAGAGTTCCTGTCACCTGAGGTGG
TGAATTATGACCAAATCTCCGATAAGACAGACATGTGGAGTATGGGGGTGATCACCTACATGCTGCTG
AGCGGCCTCTCCCCCTTCCTGGGAGATGATGACACAGAGACCCTAAACAACGTTCTATCTGGCAACTG
GTACTTTGATGAAGAGACCTTTGAGGCCGTATCAGACGAGGCCAAAGACTTTGTCTCCAACCTCATCG
TCAAGGACCAGGCCCGGATGAACGCTGCCCAGTGTCTCGCCCATCCCTGGCTCAACAACCTGGCGGAG
AAAGCCAAACGCTGTAACCGACGCCTTAAGTCCCAGATCTTGCTTAAGAAATACCTCATGAAGAGGCG
CTGGAAGAAAAACTTCATTGCTGTCAGCGCTGCCAACCGCTTCAAGAAGATCAGCAGCTCGGGGGCAC
TGATGGCTCTGGGGGTCTGA

| | | | |
|---|---|---|---|
| NOV18i, SNP13375536 of | SEQ ID NO: 228 | 595 aa | MW at 64530.0kD |
| CG51448-01, Protein | SNP Pos: 96 | | SNP Change: Ala to Val |
| Sequence | | | |

MATENGAVELGIQNPSTDKAPKGPTGERPLAAGKDPGPPDPKKAPDPPTLKKDAKAPASEKGDGTLAQ
PSTSSQGPKGEGDRGGGPAEGSAGPPAVLPQQTATPETSVKKPKAEQGASGSQDPGKPRVGKKAAEGQ
AAARRGSPAFLHSPSCPAIISSSEKLLAKKPPSEASELTFEGVPMTHSPTDPRPAKAEEGKNILAESQ
KEVGEKTPGQAGQAKMQGDTSRGIEFQAVPSEKSEVGQALCLTAREEDCFQILDDCPPPPAPFPHRMV
ELRTGNVSSEFSMNSKEALGGGKFGAVCTCMEKATGLKLAAKVIKKQTPKDKENVLLEIEVMNQLNHR
NLIQLYAAIETPHEIVLFMEEEGGELFERIVDEDYHLTEVDTMVFVRQICDGILFMHKMRVLHLDLKP
ENILCVNTTGHLVKIIDFGLARRYHNPNEKLKVNFGTPEFLSPEVVNYDQISDKTDMWSMGVITYMLL
SGLSPFLGDDDTETLNNVLSGNWYFDEETFEAVSDEAKDFVSNLIVKDQARMNAAQCLAHPWLNNLAE
KAKRCNRRLKSQILLKKYLMKRRWKKNFIAVSAANRFKKISSSGALMALGV

| | | |
|---|---|---|
| NOV18j, SNP13375537 of | SEQ ID NO: 229 | 1788 bp |
| CG51448-01, DNA Sequence | ORF Start: ATG at 1 | ORF Stop: TGA at 1786 |
| | SNP Pos: 350 | SNP Change: C to T |

ATGGCGACAGAAAATGGAGCAGTTGAGCTGGGAATTCAGAACCCATCAACAGACAAGGCACCTAAAGG
TCCCACAGGTGAAAGACCCCTGGCTGCAGGGAAAGACCCTGGCCCCCCAGACCCAAAGAAAGCTCCGG
ATCCACCCACCCTGAAGAAAGATGCCAAAGCCCCTGCCTCAGAGAAAGGGGATGGTACCCTGGCCCAA
CCCTCAACTAGCAGCCAAGGCCCCAAAGGAGAGGGTGACAGGGGCGGGGGGCCCGCGGAGGGCAGTGC
TGGGCCCCCGGCAGCCCTGCCCCAGCAGACTGCGACACCTGAGACCAGCGTCAAGAAGCCCAAGGCTG
AGCAGGGAGTCTCAGGCAGCCAGGATCCTGGAAAGCCCAGGGTGGGCAAGAAGGCAGCAGAGGGCCAA
GCAGCAGCCAGGAGGGGCTCACCTGCCTTTCTGCATAGCCCCAGCTGTCCTGCCATCATCTCCAGTTC
TGAGAAGCTGCTGGCCAAGAAGCCCCCAAGCGAGGCATCAGAGCTCACCTTTGAAGGGGTGCCCATGA
CCCACAGCCCCACGGATCCCAGGCCAGCCAAGGCAGAAGAAGGAAAGAACATCCTGGCAGAGAGCCAG
AAGGAAGTGGGAGAGAAAACCCCAGGCCAGGCTGGCCAGGCTAAGATGCAAGGGGACACCTCGAGGGG
GATTGAGTTCCAGGCTGTTCCCTCAGAGAAATCCGAGGTGGGGCAGGCCCTCTGTCTCACAGCCAGGG
AGGAGGACTGCTTCCAGATTTTGGATGATTGCCCGCCACCTCCGGCCCCCTTCCCTCACCGCATGGTG
GAGCTGAGGACCGGGAATGTCAGCAGTGAATTCAGTATGAACTCCAAGGAGGCGCTCGGAGGGGGCAA
GTTTGGGGCAGTCTGTACCTGCATGGAGAAAGCCACAGGCCTCAAGCTGGCAGCCAAGGTCATCAAGA
AACAGACTCCCAAAGACAAGGAAATGGTGTTGCTGGAGATTGAGGTCATGAACCAGCTGAACCACCGC
AATCTGATCCAGCTGTATGCAGCCATCGAGACTCCGCATGAGATCGTCCTGTTCATGGAGATCGAGGG
CGGAGAGCTCTTCGAGAGGATTGTGGATGAGGACTACCATCTGACCGAGGTGGACACCATGGTGTTTG
TCAGGCAGATCTGTGACGGGATCCTCTTCATGCACAAGATGAGGGTTTTGCACCTGGACCTCAAGCCA
GAGAACATCCTGTGTGTCAACACCACCGGGCATTTGGTGAAGATCATTGACTTTGGCCTGGCACGGAG
GTACCACAACCCCAACGAGAAGCTGAAGGTGAACTTTGGGACCCCAGAGTTCCTGTCACCTGAGGTGG
TGAATTATGACCAAATCTCCGATAAGACAGACATGTGGAGTATGGGGGTGATCACCTACATGCTGCTG
AGCGGCCTCTCCCCCTTCCTGGGAGATGATGACACAGAGACCCTAAACAACGTTCTATCTGGCAACTG
GTACTTTGATGAAGAGACCTTTGAGGCCGTATCAGACGAGGCCAAAGACTTTGTCTCCAACCTCATCG
TCAAGGACCAGGCCCGGATGAACGCTGCCCAGTGTCTCGCCCATCCCTGGCTCAACAACCTGGCGGAG
AAAGCCAAACGCTGTAACCGACGCCTTAAGTCCCAGATCTTGCTTAAGAAATACCTCATGAAGAGGCG
CTGGAAGAAAAACTTCATTGCTGTCAGCGCTGCCAACCGCTTCAAGAAGATCAGCAGCTCGGGGGCAC
TGATGGCTCTGGGGGTCTGA

| | | | |
|---|---|---|---|
| NOV18j, SNP13375537 of | SEQ ID NO: 230 | 595 aa | MW at 64530.0kD |
| CG51448-01, Protein | SNP Pos: 117 | | SNP Change: Ala to Val |
| Sequence | | | |

MATENGAVELGIQNPSTDKAPKGPTGERPLAAGKDPGPPDPKKAPDPPTLKKDAKAPASEKGDGTLAQ
PSTSSQGPKGEGDRGGGPAEGSAGPPAALPQQTATPETSVKKPKAEQGVSGSQDPGKPRVGKKAAEGQ
AAARRGSPAFLHSPSCPAIISSSEKLLAKKPPSEASELTFEGVPMTHSPTDPRPAKAEEGKNILAESQ
KEVGEKTPGQAGQAKMQGDTSRGIEFQAVPSEKSEVGQALCLTAREEDCFQILDDCPPPPAPFPHRMV
ELRTGNVSSEFSMNSKEALGGGKFGAVCTCMEKATGLKLAAKVIKKQTPKDKEMVLLEIEVMNQLNHR
NLIQLYAAIETPHEIVLFMEIEGGELFERIVDEDYHLTEVDTMVFVRQICDGILFMHKMRVLHLDLKP
ENILCVNTTGHLVKIIDFGLARRYHNPNEKLKVNFGTPEFLSPEVVNYDQISDKTDMWSMGVITYMLL
SGLSPFLGDDDTETLNNVLSGNWYFDEETFEAVSDEAKDFVSNLIVKDQARMNAAQCLAHPWLNNLAE
KAKRCNRRLKSQILLKKYLMKRRWKKNFIAVSAANRFKKISSSGALMALGV

| | | |
|---|---|---|
| NOV18k, SNP13375538 of | SEQ ID NO: 231 | 1788 bp |
| CG51448-01, DNA Sequence | ORF Start: ATG at 1 | ORF Stop: TGA at 1786 |
| | SNP Pos: 1249 | SNP Change: A to T |

ATGGCGACAGAAAATGGAGCAGTTGAGCTGGGAATTCAGAACCCATCAACAGACAAGGCACCTAAAGG
TCCCACAGGTGAAAGACCCCTGGCTGCAGGGAAAGACCCTGGCCCCCCAGACCCAAAGAAAGCTCCGG
ATCCACCCACCCTGAAGAAAGATGCCAAAGCCCCTGCCTCAGAGAAAGGGGATGGTACCCTGGCCCAA
CCCTCAACTAGCAGCCAAGGCCCCAAAGGAGAGGGTGACAGGGGCGGGGGGCCCGCGGAGGGCAGTGC
TGGGCCCCCGGCAGCCCTGCCCCAGCAGACTGCGACACCTGAGACCAGCGTCAAGAAGCCCAAGGCTG
AGCAGGGAGCCTCAGGCAGCCAGGATCCTGGAAAGCCCAGGGTGGGCAAGAAGGCAGCAGAGGGCCAA
GCAGCAGCCAGGAGGGGCTCACCTGCCTTTCTGCATAGCCCCAGCTGTCCTGCCATCATCTCCAGTTC
TGAGAAGCTGCTGGCCAAGAAGCCCCCAAGCGAGGCATCAGAGCTCACCTTTGAAGGGGTGCCCATGA
CCCACAGCCCCACGGATCCCAGGCCAGCCAAGGCAGAAGAAGGAAAGAACATCCTGGCAGAGAGCCAG
AAGGAAGTGGGAGAGAAAACCCCAGGCCAGGCTGGCCAGGCTAAGATGCAAGGGGACACCTCGAGGGG
GATTGAGTTCCAGGCTGTTCCCTCAGAGAAATCCGAGGTGGGGCAGGCCCTCTGTCTCACAGCCAGGG
AGGAGGACTGCTTCCAGATTTTGGATGATTGCCCGCCACCTCCGGCCCCCTTCCCTCACCGCATGGTG
GAGCTGAGGACCGGGAATGTCAGCAGTGAATTCAGTATGAACTCCAAGGAGGCGCTCGGAGGGGGCAA
GTTTGGGGCAGTCTGTACCTGCATGGAGAAAGCCACAGGCCTCAAGCTGGCAGCCAAGGTCATCAAGA
AACAGACTCCCAAAGACAAGGAAATGGTGTTGCTGGAGATTGAGGTCATGAACCAGCTGAACCACCGC
AATCTGATCCAGCTGTATGCAGCCATCGAGACTCCGCATGAGATCGTCCTGTTCATGGAGATCGAGGG
CGGAGAGCTCTTCGAGAGGATTGTGGATGAGGACTACCATCTGACCGAGGTGGACACCATGGTGTTTG
TCAGGCAGATCTGTGACGGGATCCTCTTCATGCACAAGATGAGGGTTTTGCACCTGGACCTCAAGCCA
GAGAACATCCTGTGTGTCAACACCTCCGGGCATTTGGTGAAGATCATTGACTTTGGCCTGGCACGGAG
GTACCACAACCCCAACGAGAAGCTGAAGGTGAACTTTGGGACCCCAGAGTTCCTGTCACCTGAGGTGG
TGAATTATGACCAAATCTCCGATAAGACAGACATGTGGAGTATGGGGGTGATCACCTACATGCTGCTG
AGCGGCCTCTCCCCCTTCCTGGGAGATGATGACACAGAGACCCTAAACAACGTTCTATCTGGCAACTG
GTACTTTGATGAAGAGACCTTTGAGGCCGTATCAGACGAGGCCAAAGACTTTGTCTCCAACCTCATCG
TCAAGGACCAGGCCCGGATGAACGCTGCCCAGTGTCTCGCCCATCCCTGGCTCAACAACCTGGCGGAG
AAAGCCAAACGCTGTAACCGACGCCTTAAGTCCCAGATCTTGCTTAAGAAATACCTCATGAAGAGGCG
CTGGAAGAAAAACTTCATTGCTGTCAGCGCTGCCAACCGCTTCAAGAAGATCAGCAGCTCGGGGGCAC
TGATGGCTCTGGGGGTCTGA

| | | | |
|---|---|---|---|
| NOV18k, SNP13375538 of | SEQ ID NO: 232 | 595 aa | MW at 64487.9kD |
| CG51448-01, Protein | SNP Pos: 417 | | SNP Change: Thr to Ser |
| Sequence | | | |

MATENGAVELGIQNPSTDKAPKGPTGERPLAAGKDPGPPDPKKAPDPPTLKKDAKAPASEKGDGTLAQ
PSTSSQGPKGEGDRGGGPAEGSAGPPAALPQQTATPETSVKKPKAEQGASGSQDPGKPRVGKKAAEGQ
AAARRGSPAFLHSPSCPAIISSSEKLLAKKPPSEASELTFEGVPMTHSPTDPRPAKAEEGKNILAESQ
KEVGEKTPGQAGQAKMQGDTSRGIEFQAVPSEKSEVGQALCLTAREEDCFQILDDCPPPPAPFPHRNV
ELRTGNVSSEFSMNSKEALGGGKFGAVCTCMEKATGLKLAAKVIKKQTPKDKEMVLLEIEVMNQLNHR
NLIQLYAAIETPHEIVLFMEIEGGELFERIVDEDYHLTEVDTMVFVRQICDGILFMHKMRVLHLDLKP
ENILCVNTSGHLVKIIDFGLARRYHNPNEKLKVNFGTPEFLSPEVVNYDQISDKTDMWSMGVITYMLL
SGLSPFLGDDDTETLNNVLSGNWYFDEETFEAVSDEAKDFVSNLIVKDQARMNAAQCLAHPWLNNLAE
KAKRCNRRLKSQILLKKYLMKRRWKKNFIAVSAANRFKKISSSGALMALGV

| | | |
|---|---|---|
| NOV18l, SNP13375539 of | SEQ ID NO: 233 | 1788 bp |
| CG51448-01, DNA Sequence | ORF Start: ATG at 1 | ORF Stop: TGA at 1786 |
| | SNP Pos: 1358 | INP Change: T to C |

ATGGCGACAGAAAATGGAGCAGTTGAGCTGGGAATTCAGAACCCATCAACAGACAAGGCACCTAAAGG
TCCCACAGGTGAAAGACCCCTGGCTGCAGGGAAAGACCCTGGCCCCCCAGACCCAAAGAAAGCTCCGG
ATCCACCCACCCTGAAGAAAGATGCCAAAGCCCCTGCCTCAGAGAAAGGGGATGGTACCCTGGCCCAA
CCCTCAACTAGCAGCCAAGGCCCCAAAGGAGAGGGTGACAGGGGCGGGGGGCCCGCGGAGGGCAGTGC
TGGGCCCCCGGCAGCCCTGCCCCAGCAGACTGCGACACCTGAGACCAGCGTCAAGAAGCCCAAGGCTG
AGCAGGGAGCCTCAGGCAGCCAGGATCCTGGAAAGCCCAGGGTGGGCAAGAAGGCAGCAGAGGGCCAA
GCAGCAGCCAGGAGGGGCTCACCTGCCTTTCTGCATAGCCCCAGCTGTCCTGCCATCATCTCCAGTTC
TGAGAAGCTGCTGGCCAAGAAGCCCCCAAGCGAGGCATCAGAGCTCACCTTTGAAGGGGTGCCCATGA
CCCACAGCCCCACGGATCCCAGGCCAGCCAAGGCAGAAGAAGGAAAGAACATCCTGGCAGAGAGCCAG
AAGGAAGTGGGAGAGAAAACCCCAGGCCAGGCTGGCCAGGCTAAGATGCAAGGGGACACCTCGAGGGG
GATTGAGTTCCAGGCTGTTCCCTCAGAGAAATCCGAGGTGGGGCAGGCCCTCTGTCTCACAGCCAGGG
AGGAGGACTGCTTCCAGATTTTGGATGATTGCCCGCCACCTCCGGCCCCCTTCCCTCACCGCATGGTG
GAGCTGAGGACCGGGAATGTCAGCAGTGAATTCAGTATGAACTCCAAGGAGGCGCTCGGAGGGGGCAA
GTTTGGGGCAGTCTGTACCTGCATGGAGAAAGCCACAGGCCTCAAGCTGGCAGCCAAGGTCATCAAGA
AACAGACTCCCAAAGACAAGGAAATGGTGTTGCTGGAGATTGAGGTCATGAACCAGCTGAACCACCGC
AATCTGATCCAGCTGTATGCAGCCATCGAGACTCCGCATGAGATCGTCCTGTTCATGGAGATCGAGGG
CGGAGAGCTCTTCGAGAGGATTGTGGATGAGGACTACCATCTGACCGAGGTGGACACCATGGTGTTTG
TCAGGCAGATCTGTGACGGGATCCTCTTCATGCACAAGATGAGGGTTTTGCACCTGGACCTCAAGCCA
GAGAACATCCTGTGTGTCAACACCACCGGGCATTTGGTGAAGATCATTGACTTTGGCCTGGCACGGAG
GTACCACAACCCCAACGAGAAGCTGAAGGTGAACTTTGGGACCCCAGAGTTCCTGTCACCTGAGGCGG
TGAATTATGACCAAATCTCCGATAAGACAGACATGTGGAGTATGGGGGTGATCACCTACATGCTGCTG
AGCGGCCTCTCCCCCTTCCTGGGAGATGATGACACAGAGACCCTAAACAACGTTCTATCTGGCAACTG
GTACTTTGATGAAGAGACCTTTGAGGCCGTATCAGACGAGGCCAAAGACTTTGTCTCCAACCTCATCG
TCAAGGACCAGGCCCGGATGAACGCTGCCCAGTGTCTCGCCCATCCCTGGCTCAACAACCTGGCGGAG
AAAGCCAAACGCTGTAACCGACGCCTTAAGTCCCAGATCTTGCTTAAGAAATACCTCATGAAGAGGCG
CTGGAAGAAAAACTTCATTGCTGTCAGCGCTGCCAACCGCTTCAAGAAGATCAGCAGCTCGGGGGCAC
TGATGGCTCTGGGGGTCTGA

| | | | |
|---|---|---|---|
| NOV18l, SN1P13375539 of | SEQ ID NO: 234 | 595 aa | MW at 64473.8kD |
| CG51448-01, Protein | SNP Pos: 453 | | SNP Change: Val to Ala |
| Sequence | | | |

MATENGAVELGIQNPSTDKAPKGPTGERPLAAGKDPGPPDPKKAPDPPTLKKDAKAPASEKGDGTLAQ
PSTSSQGPKGEGDRGGGPAEGSAGPPAALPQQTATPETSVKKPKAEQGASGSQDPGKPRVGKKAAEGQ
AAARRGSPAFLHSPSCPAIISSSEKLLAKKPPSEASELTFEGVPMTHSPTDPRPAKABEGKNILAESQ
KBVGEKTPGQAGQAKMQGDTSRGIEFQAVPSEKSEVGQALCLTAREEDCFQILDDCPPPPAPFPHRMV
ELRTGNVSSEFSMNSKEALGGGKFGAVCTCMEKATGLKLAAKVIKKQTPKDKEMVLLEIEVMNQLNHR
NLIQLYAAIETPHEIVLFMEIEGGELFERIVDEDYHLTEVDTNVFVRQICDGILFMHKMRVLHLDLKP
ENILCVNTTGHLVKIIDFGLARRYHNPNEKLKVNFGTPEFLSPEAVNYDQISDKTDMWSMGVITYMLL
SGLSPFLGDDDTETLNNVLSGNWYFDEETFEAVSDEAKDFVSNLIVKDQARMNAAQCLAHPWLNNLAE
KAKRCNRRLKSQILLKKYLMKRRWKKNFIAVSAANRFKKISSSGALMALGV

| | | |
|---|---|---|
| NOV18m, SNP13375540 of | SEQ ID NO: 235 | 1788 bp |
| CG51448-01, DNA Sequence | ORF Start: ATG at 1 | ORF Stop: TGA at 1786 |
| | SNP Pos: 1391 | SNP Change: A to G |

ATGGCGACAGAAAATGGAGCAGTTGAGCTGGGAATTCAGAACCCATCAACAGACAAGGCACCTAAAGG
TCCCACAGGTGAAAGACCCCTGGCTGCAGGGAAAGACCCTGGCCCCCCAGACCCAAAGAAAGCTCCGG
ATCCACCCACCCTGAAGAAAGATGCCAAAGCCCCTGCCTCAGAGAAAGGGGATGGTACCCTGGCCCAA
CCCTCAACTAGCAGCCAAGGCCCCAAAGGAGAGGGTGACAGGGGCGGGGGGCCCGCGGAGGGCAGTGC
TGGGCCCCCGGCAGCCCTGCCCCAGCAGACTGCGACACCTGAGACCAGCGTCAAGAAGCCCAAGGCTG
AGCAGGGAGCCTCAGGCAGCCAGGATCCTGGAAAGCCCAGGGTGGGCAAGAAGGCAGCAGAGGGCCAA
GCAGCAGCCAGGAGGGGCTCACCTGCCTTTCTGCATAGCCCCAGCTGTCCTGCCATCATCTCCAGTTC
TGAGAAGCTGCTGGCCAAGAAGCCCCCAAGCGAGGCATCAGAGCTCACCTTTGAAGGGGTGCCCATGA
CCCACAGCCCCACGGATCCCAGGCCAGCCAAGGCAGAAGAAGGAAAGAACATCCTGGCAGAGAGCCAG
AAGGAAGTGGGAGAGAAAACCCCAGGCCAGGCTGGCCAGGCTAAGATGCAAGGGGACACCTCGAGGGG
GATTGAGTTCCAGGCTGTTCCCTCAGAGAAATCCGAGGTGGGGCAGGCCCTCTGTCTCACAGCCAGGG
AGGAGGACTGCTTCCAGATTTTGGATGATTGCCCGCCACCTCCGGCCCCCTTCCCTCACCGCATGGTG
GAGCTGAGGACCGGGAATGTCAGCAGTGAATTCAGTATGAACTCCAAGGAGGCGCTCGGAGGGGGCAA
GTTTGGGGCAGTCTGTACCTGCATGGAGAAAGCCACAGGCCTCAAGCTGGCAGCCAAGGTCATCAAGA
AACAGACTCCCAAAGACAAGGAAATGGTGTTGCTGGAGATTGAGGTCATGAACCAGCTGAACCACCGC
AATCTGATCCAGCTGTATGCAGCCATCGAGACTCCGCATGAGATCGTCCTGTTCATGGAGATCGAGGG
CGGAGAGCTCTTCGAGAGGATTGTGGATGAGGACTACCATCTGACCGAGGTGGACACCATGGTGTTTG
TCAGGCAGATCTGTGACGGGATCCTCTTCATGCACAAGATGAGGGTTTTGCACCTGGACCTCAAGCCA
GAGAACATCCTGTGTGTCAACACCACCGGGCATTTGGTGAAGATCATTGACTTTGGCCTGGCACGGAG
GTACCACAACCCCAACGAGAAGCTGAAGGTGAACTTTGGGACCCCAGAGTTCCTGTCACCTGAGGTGG
TGAATTATGACCAAATCTCCGATAAGACAGGCATGTGGAGTATGGGGGTGATCACCTACATGCTGCTG
AGCGGCCTCTCCCCCTTCCTGGGAGATGATGACACAGAGACCCTAAACAACGTTCTATCTGGCAACTG
GTACTTTGATGAAGAGACCTTTGAGGCCGTATCAGACGAGGCCAAAGACTTTGTCTCCAACCTCATCG
TCAAGGACCAGGCCCGGATGAACGCTGCCCAGTGTCTCGCCCATCCCTGGCTCAACAACCTGGCGGAG
AAAGCCAAACGCTGTAACCGACGCCTTAAGTCCCAGATCTTGCTTAAGAAATACCTCATGAAGAGGCG
CTGGAAGAAAAACTTCATTGCTGTCAGCGCTGCCAACCGCTTCAAGAAGATCAGCAGCTCGGGGGCAC
TGATGGCTCTGGGGGTCTGA

| | | | |
|---|---|---|---|
| NOV18m, SNP13375540 of | SEQ ID NO: 236 | 595 aa | MW at 64443.9kD |
| CG51448-01, Protein | SNP Pos: 464 | | SNP Change: Asp to Gly |
| Sequence | | | |

MATENGAVELGIQNPSTDKAPKGPTGERPLAAGKDPGPPDPKKAPDPPTLKKDAKAPASEKGDGTLAQ
PSTSSQGPKGEGDRGGGPAEGSAGPPAALPQQTATPETSVKKPKAEQGASGSQDPGKPRVGKKAAEGQ
AAARRGSPAFLHSPSCPAIISSSEKLLAKKPPSEASELTFEGVPMTHSPTDPRPAKAEEGKMILAESQ
KEVGEKTPGQAGQAKMQGDTSRGIEFQAVPSEKSEVGQALCLTAREEDCFQILDDCPPPPAPFPHRMV
ELRTGNVSSEFSMNSKEALGGGKFGAVCTCMEKATGLKLAAKVIKKQTPKDKEMVLLEIEVMNQLNHR
NLIQLYAAIETPHEIVLFNEIEGGELFERIVDEDYHLTEVDTMVFVRQICDGILFMHKMRVLHLDLKP
ENILCVNTTGHLVKIIDFGLARRYHNPNEKLKVNFGTPEFLSPEVVNYDQISDKTGMWSMGVITYMLL
SGLSPFLGDDDTETLNNVLSGNWYFDEETFEAVSDEAKDFVSNLIVKDQARNNAAQCLAHPWLNNLAE
KAKRCNRRLKSQILLKKYLMKRRWKKNFIAVSAANRFKKISSSGALMALGV

| | | |
|---|---|---|
| NOV18n, SNP13375541 of | SEQ ID NO: 237 | 1788 bp |
| CG51448-01, DNA Sequence | ORF Start: ATG at 1 | ORF Stop: TGA at 1786 |
| | SNP Pos: 1511 | SNP Change: A to G |

ATGGCGACAGAAAATGGAGCAGTTGAGCTGGGAATTCAGAACCCATCAACAGACAAGGCACCTAAAGG
TCCCACAGGTGAAAGACCCCTGGCTGCAGGGAAAGACCCTGGCCCCCCAGACCCAAAGAAAGCTCCGG
ATCCACCCACCCTGAAGAAAGATGCCAAAGCCCCTGCCTCAGAGAAAGGGGATGGTACCCTGGCCCAA
CCCTCAACTAGCAGCCAAGGCCCCAAAGGAGAGGGTGACAGGGGCGGGGGGCCCGCGGAGGGCAGTGC
TGGGCCCCCGGCAGCCCTGCCCCAGCAGACTGCGACACCTGAGACCAGCGTCAAGAAGCCCAAGGCTG
AGCAGGGAGCCTCAGGCAGCCAGGATCCTGGAAAGCCCAGGGTGGGCAAGAAGGCAGCAGAGGGCCAA
GCAGCAGCCAGGAGGGGCTCACCTGCCTTTCTGCATAGCCCCAGCTGTCCTGCCATCATCTCCAGTTC
TGAGAAGCTGCTGGCCAAGAAGCCCCCAAGCGAGGCATCAGAGCTCACCTTTGAAGGGGTGCCCATGA
CCCACAGCCCCACGGATCCCAGGCCAGCCAAGGCAGAAGAAGGAAAGAACATCCTGGCAGAGAGCCAG
AAGGAAGTGGGAGAGAAAACCCCAGGCCAGGCTGGCCAGGCTAAGATGCAAGGGGACACCTCGAGGGG
GATTGAGTTCCAGGCTGTTCCCTCAGAGAAATCCGAGGTGGGGCAGGCCCTCTGTCTCACAGCCAGGG
AGGAGGACTGCTTCCAGATTTTGGATGATTGCCCGCCACCTCCGGCCCCCTTCCCTCACCGCATGGTG
GAGCTGAGGACCGGGAATGTCAGCAGTGAATTCAGTATGAACTCCAAGGAGGCGCTCGGAGGGGGCAA
GTTTGGGGCAGTCTGTACCTGCATGGAGAAAGCCACAGGCCTCAAGCTGGCAGCCAAGGTCATCAAGA
AACAGACTCCCAAAGACAAGGAAATGGTGTTGCTGGAGATTGAGGTCATGAACCAGCTGAACCACCGC
AATCTGATCCAGCTGTATGCAGCCATCGAGACTCCGCATGAGATCGTCCTGTTCATGGAGATCGAGGG
CGGAGAGCTCTTCGAGAGGATTGTGGATGAGGACTACCATCTGACCGAGGTGGACACCATGGTGTTTG
TCAGGCAGATCTGTGACGGGATCCTCTTCATGCACAAGATGAGGGTTTTGCACCTGGACCTCAAGCCA
GAGAACATCCTGTGTGTCAACACCACCGGGCATTTGGTGAAGATCATTGACTTTGGCCTGGCACGGAG
GTACCACAACCCCAACGAGAAGCTGAAGGTGAACTTTGGGACCCCAGAGTTCCTGTCACCTGAGGTGG
TGAATTATGACCAAATCTCCGATAAGACAGACATGTGGAGTATGGGGGTGATCACCTACATGCTGCTG
AGCGGCCTCTCCCCCTTCCTGGGAGATGATGACACAGAGACCCTAAACAACGTTCTATCTGGCAACTG
GTACTTTGATGAAGGGACCTTTGAGGCCGTATCAGACGAGGCCAAAGACTTTGTCTCCAACCTCATCG
TCAAGGACCAGGCCCGGATGAACGCTGCCCAGTGTCTCGCCCATCCCTGGCTCAACAACCTGGCGGAG
AAAGCCAAACGCTGTAACCGACGCCTTAAGTCCCAGATCTTGCTTAAGAAATACCTCATGAAGAGGCG
CTGGAAGAAAAACTTCATTGCTGTCAGCGCTGCCAACCGCTTCAAGAAGATCAGCAGCTCGGGGGCAC
TGATGGCTCTGGGGGTCTGA

| | | | |
|---|---|---|---|
| NOV18n, SNP13375541 of | SEQ ID NO: 238 | 595 aa | MW at 64429.8kD |
| CG51448-01, Protein | SNP Pos: 504 | | SNP Change: Glu to Gly |
| Sequence | | | |

MATENGAVELGIQNPSTDKAPKGPTGERPLAAGKDPGPPDPKKAPDPPTLKKDAKAPASEKGDGTLAQ
PSTSSQGPKGEGDRGGGPAEGSAGPPAALPQQTATPETSVKKPKAEQGASGSQDPGKPRVGKKAAEGQ
AAARRGSPAFLHSPSCPAIISSSEKLLAKKPPSEASELTFEGVPMTHSPTDPRPAKAEEGKNILAESQ
KEVGEKTPGQAGQAKMQGDTSRGIEFQAVPSEKSEVGQALCLTAREEDCFQILDDCPPPPAPFPHRMV
ELRTGNVSSEFSMNSKEALGGGKFGAVCTCMEKATGLKLAAKVIKKQTPKDKEMVLLEIEVMNQLNHR
NLIQLYAAIETPHEIVLFMEIEGGELFERIVDEDYHLTEVDTMVFVRQICDGILFMHKMRVLHLDLKP
ENILCVNTTGHLVKIIDFGLARRYHNPNEKLKVNFGTPEFLSPEVVNYDQISDKTDMWSMGVITYMLL
SGLSPFLGDDDTETLNNVLSGNWYFDEGTFEAVSDEAKDFVSNLIVKDQARMNAAQCLAHPWLNNLAE
KAKRCNRRLKSQILLKKYLMKRRWKKNFIAVSAANRFKKISSSGALMALGV

| | | |
|---|---|---|
| NOV18o, SNP13375542 of | SEQ ID NO: 239 | 1788 bp |
| CG51448-01, DNA Sequence | ORF Start: ATG at 1 | ORF Stop: TGA at 1786 |
| | SNP Pos: 1675 | SNP Change: C to T |

ATGGCGACAGAAAATGGAGCAGTTGAGCTGGGAATTCAGAACCCATCAACAGACAAGGCACCTAAAGG
TCCCACAGGTGAAAAGACCCCTGGCTGCAGGGAAGACCCTGGCCCCCCAGACCCAAAGAAAGCTCCGG
ATCCACCCACCCTGAAGAAAGATGCCAAAGCCCCTGCCTCAGAGAAAGGGGATGGTACCCTGGCCCAA
CCCTCAACTAGCAGCCAAGGCCCCAAAGGAGAGGGTGACAGGGGCGGGGGGCCCGCGGAGGGCAGTGC
TGGGCCCCCGGCAGCCCTGCCCCAGCAGACTGCGACACCTGAGACCAGCGTCAAGAAGCCCAAGGCTG
AGCAGGGAGCCTCAGGCAGCCAGGATCCTGGAAAGCCCAGGGTGGGCAAGAAGGCAGCAGAGGGCCAA
GCAGCAGCCAGGAGGGGCTCACCTGCCTTTCTGCATAGCCCCAGCTGTCCTGCCATCATCTCCAGTTC
TGAGAAGCTGCTGGCCAAGAAGCCCCCAAGCGAGGCATCAGAGCTCACCTTTGAAGGGGTGCCCATGA
CCCACAGCCCCACGGATCCCAGGCCAGCCAAGGCAGAAGAAGGAAAGAACATCCTGGCAGAGAGCCAG
AAGGAAGTGGGAGAGAAAACCCCAGGCCAGGCTGGCCAGGCTAAGATGCAAGGGGACACCTCGAGGGG
GATTGAGTTCCAGGCTGTTCCCTCAGAGAAATCCGAGGTGGGGCAGGCCCTCTGTCTCACAGCCAGGG
AGGAGGACTGCTTCCAGATTTTGGATGATTGCCCGCCACCTCCGGCCCCCTTCCCTCACCGCATGGTG
GAGCTGAGGACCGGGAATGTCAGCAGTGAATTCAGTATGAACTCCAAGGAGGCGCTCGGAGGGGGCAA
GTTTGGGGCAGTCTGTACCTGCATGGAGAAAGCCACAGGCCTCAAGCTGGCAGCCAAGGTCATCAAGA
AACAGACTCCCAAAGACAAGGAAATGGTGTTGCTGGAGATTGAGGTCATGAACCAGCTGAACCACCGC
AATCTGATCCAGCTGTATGCAGCCATCGAGACTCCGCATGAGATCGTCCTGTTCATGGAGATCGAGGG
CGGAGAGCTCTTCGAGAGGATTGTGGATGAGGACTACCATCTGACCGAGGTGGACACCATGGTGTTTG
TCAGGCAGATCTGTGACGGGATCCTCTTCATGCACAAGATGAGGGTTTTGCACCTGGACCTCAAGCCA
GAGAACATCCTGTGTGTCAACACCACCGGGCATTTGGTGAAGATCATTGACTTTGGCCTGGCACGGAG
GTACCACAACCCCAACGAGAAGCTGAAGGTGAACTTTGGGACCCCAGAGTTCCTGTCACCTGAGGTGG
TGAATTATGACCAAATCTCCGATAAGACAGACATGTGGAGTATGGGGGTGATCACCTACATGCTGCTG
AGCGGCCTCTCCCCCTTCCTGGGAGATGATGACACAGAGACCCTAAACAACGTTCTATCTGGCAACTG
GTACTTTGATGAAGAGACCTTTGAGGCCGTATCAGACGAGGCCAAAGACTTTGTCTCCAACCTCATCG
TCAAGGACCAGGCCCGGATGAACGCTGCCCAGTGTCTCGCCCATCCCTGGCTCAACAACCTGGCGGAG
AAAGCCAAACGCTGTAACCGACGCCTTAAGTCCCAGATCTTGTTTAAGAAATACCTCATGAAGAGGCG
CTGGAAGAAAAACTTCATTGCTGTCAGCGCTGCCAACCGCTTCAAGAAGATCAGCAGCTCGGGGGCAC
TGATGGCTCTGGGGGTCTGA

| | | | |
|---|---|---|---|
| NOV18o, SNP13375542 of | SEQ ID NO: 240 | 595 aa | MW at 64535.9kD |
| CG51448-01, Protein | SNP Pos: 559 | | SNP Change: Leu to Phe |
| Sequence | | | |

MATENGAVELGIQNPSTDKAPKGPTGERPLAAGKDPGPPDPKKAPDPPTLKKDAKAPASEKGDGTLAQ
PSTSSQGPKGEGDRGGGPAEGSAGPPAALPQQTATPETSVKKPKAEOGASGSQDPGKPRVGKKAAEGQ
AAARRGSPAFLHSPSCPAIISSSEKLLAKKPPSEASELTFEGVPMTHSPTDPRPAKAEEGKNILAESQ
KEVGEKTPGQAGQAKMQGDTSRGIEFQAVPSEKSEVGQALCLTAREEDCFQILDDCPPPPAPFPHRMV
ELRTGNVSSEFSMNSKEALGGGKFGAVCTCMEKATGLKLAAKVIKKQTPKDKEMVLLEIEVMNQLNHR
NLIQLYAAIETPHEIVLFMEIEGGELFERIVDEDYHLTEVDTMVFVRQICDGILFMHKMRVLHLDLKP
ENILCVNTTGHLVKIIDFGLARRYHNPNEKLKVNFGTPEFLSPEVVNYDQISDKTDMWSMGVITYMLL
SGLSPFLGDDDTETLNNVLSGNWYFDEETFEAVSDEAKDFVSNLIVKDQARMNAAQCLAHPWLNNLAE
KAKRCNRRLKSQILFKKYLMKRRWKKNFIAVSAANRFKKISSSGALMALGV

| | | |
|---|---|---|
| NOV18p, SNP13375543 of | SEQ ID NO: 241 | 1788 bp |
| CG51448-01, DNA Sequence | ORF Start: ATG at 1 | ORF Stop: TGA at 1786 |
| | SNP Pos: 1724 | SNP Change: T to G |

ATGGCGACAGAAAATGGAGCAGTTGAGCTGGGAATTCAGAACCCATCAACAGACAAGGCACCTAAAGG
TCCCACAGGTGAAAGACCCCTGGCTGCAGGGAAAGACCCTGGCCCCCCAGACCCAAAGAAAGCTCCGG
ATCCACCCACCCTGAAGAAAGATGCCAAAGCCCCTGCCTCAGAGAAAGGGGATGGTACCCTGGCCCAA
CCCTCAACTAGCAGCCAAGGCCCCAAAGGAGAGGGTGACAGGGGCGGGGGGCCCGCGGAGGGCAGTGC
TGGGCCCCCGGCAGCCCTGCCCCAGCAGACTGCGACACCTGAGACCAGCGTCAAGAAGCCCAAGGCTG
AGCAGGGAGCCTCAGGCAGCCAGGATCCTGGAAAGCCCAGGGTGGGCAAGAAGGCAGCAGAGGGCCAA
GCAGCAGCCAGGAGGGGCTCACCTGCCTTTCTGCATAGCCCCAGCTGTCCTGCCATCATCTCCAGTTC
TGAGAAGCTGCTGGCCAAGAAGCCCCCAAGCGAGGCATCAGAGCTGACCTTTGAAGGGGTGCCCATGA
CCCACAGCCCCACGGATCCCAGGCCAGCCAAGGCAGAAGAAGGAAAGAACATCCTGGCAGAGAGCCAG
AAGGAAGTGGGAGAGAAAACCCCAGGCCAGGCTGGCCAGGCTAAGATGCAAGGGGACACCTCGAGGGG
GATTGAGTTCCAGGCTGTTCCCTCAGAGAAATCCGAGGTGGGGCAGGCCCTCTGTCTCACAGCCAGGG
AGGAGGACTGCTTCCAGATTTTGGATGATTGCCCGCCACCTCCGGCCCCCTTCCCTCACCGCATGGTG
GAGCTGAGGACCGGGAATGTCAGCAGTGAATTCAGTATGAACTCCAAGGAGGCGCTCGGAGGGGGCAA
GTTTGGGGCAGTCTGTACCTGCATGGAGAAAGCCACAGGCCTCAAGCTGGCAGCCAAGGTCATCAAGA
AACAGACTCCCAAAGACAAGGAAATGGTGTTGCTGGAGATTGAGGTCATGAACCAGCTGAACCACCGC
AATCTGATCCAGCTGTATGCAGCCATCGAGACTCCGCATGAGATCGTCCTGTTCATGGAGATCGAGGG
CGGAGAGCTCTTCGAGAGGATTGTGGATGAGGACTACCATCTGACCGAGGTGGACACCATGGTGTTTG
TCAGGCAGATCTGTGACGGGATCCTCTTCATGCACAAGATGAGGGTTTTGCACCTGGACCTCAAGCCA
GAGAACATCCTGTGTGTCAACACCACCGGGCATTTGGTGAAGATCATTGACTTTGGCCTGGCACGGAG
GTACCACAACCCCAACGAGAAGCTGAAGGTGAACTTTGGGACCCCAGAGTTCCTGTCACCTGAGGTGG
TGAATTATGACCAAATCTCCGATAAGACAGACATGTGGAGTATGGGGGTGATCACCTACATGCTGCTG
AGCGGCCTCTCCCCCTTCCTGGGAGATGATGACACAGAGACCCTAAACAACGTTCTATCTGGCAACTG
GTACTTTGATGAAGAGACCTTTGAGGCCGTATCAGACGAGGCCAAAGACTTTGTCTCCAACCTCATCG
TCAAGGACCAGGCCCGGATGAACGCTGCCCAGTGTCTCGCCCATCCCTGGCTCAACAACCTGGCGGAG
AAAGCCAAACGCTGTAACCGACGCCTTAAGTCCCAGATCTTGCTTAAGAAATACCTCATGAAGAGGCG
CTGGAAGAAAAACTTCATTGCTGGCAGCGCTGCCAACCGCTTCAAGAAGATCAGCAGCTCGGGGGCAC
TGATGGCTCTGGGGGTCTGA

| | | | |
|---|---|---|---|
| NOV18p, SNP13375543 of | SEQ ID NO: 242 | 595 aa | MW at 64459.8kD |
| CG51448-01, Protein | SNP Pos: 575 | | SNP Change: Val to Gly |
| Sequence | | | |

MATENGAVELGIQNPSTDKAPKGPTGERPLAAGKDPGPPDPKKAPDPPTLKKDAKAPASEKGDGTLAQ
PSTSSQGPKGEGDRGGGPAEGSAGPPAALPQQTATPETSVKKPKAEQGASGSQDPGKPRVGKKAAEGQ
AAARRGSPAFLHSPSCPAIISSSEKLLAKKPPSEASELTFEGVPMTHSPTDPRPAKAEEGKNILAESQ
KEVGEKTPGQAGQAKMQGDTSRGIEFQAVPSEKSEVGQALCLTAREEDCFQILDDCPPPPAPFPHRMV
ELRTGNVSSEFSNNSKEALGGGKFGAVCTCMEKATGLKLAAKVIKKQTPKDKEMVLLEIEVMNQLNHR
NLIQLYAAIETPHEIVLFMEIEGGELFERIVDEDYHLTEVDTMVFVRQICDGILFMHKMRVLHLDLKP
ENILCVNTTGHLVKIIDFGLARRYHNPNEKLKVNFGTPEFLSPEVVNYDQISDKTDMWSMGVITYMLL
SGLSPFLGDDDTETLMNVLSGNWYFDEETFEAVSDEAKDFVSNLIVKDQARMNAAQCLAHPWLNNLAE
KAKRCNRRLKSQILLKKYLMKRRWKKNFIAGSAANRFKKISSSGALMALGV

[0446] A ClustalW comparison of the above protein sequences yields the following sequence alignment shown in Table 18B.

TABLE 18B
Comparison of the NOV18 protein sequences.

NOV18a ------------------------------------------------------------
NOV18b -----MATENGAVELGIQNPSTDKAPKGPTGERPLAAGKDPGPPDPKKAPDPPTLKKDAK
NOV18c ------------------------------------------------------------
NOV18d TKLPTMATENGAVELGIQNPSTDKAPKGPTGERPLAAGKDPGPPDPKKAPDPPTLKKDAK
NOV18e -----MATENGAVELGIQNPSTDKAPKGPTGERPLAAGKDPGPPDPKKAPDPPTLKKDAK
NOV18f -----MATENGAVELGIQNPSTDKAPKGPTGERPLAAGKDPGPPDPKKAPDPPTLKKDAK
NOV18g -----MATENGAVELGIQNPSTDKAPKGPTGERPLAAGKDPGPPDPKKAPDPPTLKKDAK
NOV18a -------------------MPKPLPQRKG-MVPWPNPQLAALPQQTATPETSVKKPKAEQ
NOV18b APASEKGDGTLAQPSTSSQGPKGEGDRGGGPAEGSAGPPAALPQQTATPETSVKKPKAEQ
NOV18c ------------------------------------------------------------
NOV18d APASEKGDGTLAQPSTSSQGPKGEGDRGGGPAEGSAGPPAALPQQTATPETSVKKPKAEQ
NOV18e APASEKGDGThAQPSTSSQGPKGEGDRGGGPAEGSAGPPAALPQQTATPETSVKKPKAEQ
NOV18f APASEKGDGTLAQPSTSSQGPKGEGDRGGGPAEGSAGPPAALPQQTATPETSVKKPKAEQ
NOV18g APASEKGDGTLAQPSTSSQGPKGEGDRGGGPAEGSAGPPAALPQQTATPETSVKKPKAEQ
NOV18a GASGSQDPGKPRVGKKAAEGQAAARRGSPAFLHSPSCPAIISSSEKLLAKKPPSEASELT
NOV18b GASGSQDPGKPRVGKKAAEGQAAARRGSPAFLHSPSCPAIISSSEKLLAKKPPSEASELT
NOV18c ------------------------------------------------------------
NOV18d GASGSQDPGKPRVGKKAAEGQAAARRGSPAFLHSPSCPAIISSSEKLLAKKPPSEASELT
NOV18e GASGSQDPGKPRVGKKAAEGQAAARRGSPAFLHSPSCPAIISSSEKLLAKKPPSEASELT
NOV18f GASGSQDPGKPRVGKKAAEGQAAARRGSPAFLHSPSCPAIISSSEKLLAKKPPSEASELT
NOV18g GASGSQDPGKPRVGKKAAEGQAAARRGSPAFLHSPSCPAIISSSEKLLAKKPPSEASELT
NOV18a FEGVPMTHSPTDPRPAKAEEGKNILAESQKEVGEKTPGQAGQAKMQGDTSRGIEFQAVPS
NOV18b FEGVPMTHSPTDPRPAKAEEGKNILAESQKEVGEKTPGQAGQAXMQGDTSRGIEFQAVPS
NOV18c ------------------------------------------------------------
NOV18d FEGVPMTHSPTDPRPAKAEEGKNILAESQKEVGEKTPGQAGQAKMQGDTSRGIEFQAVPS
NOV18e FEGVPMTHSPTDPRPAKAEEGKNThAESQKEVGEKTPGQAGQAKMQGDTSRGIEFQAVPS
NOV18f FEGVPMTHSPTDPRPAKAEEGKNILAESQKEVGEKTPGQAGQAKMQGDTSRGIEFQAVPS
NOV18g FEGVPMTHSPTDPRSAKAEEGKNILAESQKEVGEKTPGQAGQAKMQGDTSRGIEFQAVPS
NOV18a EKSEVGQALCLTAREEDCFQILDDCPPPPAPFPHRMVELRTGNVSSEFSMNSKEALGGGK
NOV18b EKSEVGQALCLTAREEDCFQILDDCPPPPAPFPHRMVELRTGNVSSEFSMNSKEALGGGK
NOV18c ----------------------------------------------TKLMNSKEALGGGK
NOV18d EKSEVGQALCLTAREEDCFQILDDCPPPPAPFPHRMVELRTGNVSSEFSMNSKEALGGGK
NOV18e EKSEVGQALCLTAREEDCFQILDDCPPPPAPFPHRMVELRTGNVSSEFSMNSKEALGGGK
NOV18f EKSEVGQALCLTAREEDCFQILDDCPPPPAPFPHRMVELRTGNVSSEFSMNSKEALGGGK
NOV18g EKSEVGQALCLTAREEDCFQILDDCPPPPAPFPHRMVELRTGNVSSEFSMNSKEALGGGK
NOV18a FGAVCTCMEKATGLKLAAKVIKKQTPKDKEMVLLEIEVMNQLNHRNLIQLYAPJETPHEI
NOV18b FGAVCTCMEKATGLKIAAKVIKKQTPKDKEMVLLEIEVMNQLNHRNLIQLYAAIETPHEI
NOV18c FGAVCTCMEKATGLKLAAKVIKKQTPKDKEMVLLEIEVMNQLNHRNLIQLYAAIETPHEI
NOV18d FGAVCTCMEKATGLKLAAKVIKKQTPKDKEMVLLEIEVMNQLNHRNLIQLYAAIETPHEI
NOV18e FGAVCTCMEKATGLKLAAKVIKKQTPKDKEMVLLEIEVMNQLNHRNLIQLYAAIETPHEI
NOV18f FGAVCTCMEKATGLKLAAKVIKKQTPKDKEMVLLEIEVMNQLNHRNLIQLYAAIETPHEI
NOV18g FGAVCTCMEKATGLKLAAKVIKKQTPKDKEMVLLEIEVMNQLNHRNLIQLYAAIETPHEI
NOV18a VLFMEYIEGGELFERIVDEDYHLTEVDTMVFVRQICDGILFMHKMRVLHLDLKPENILCV
NOV18b VLFMEIE-GGELFERIVDEDYHLTEVDTMVFVRQICDGILFMHKMRVLHLDLKPENILCV
NOV18c VLFMEYIEGGELFERIVDEDYHLTEVDTMVFVRQICDGILFMHKMRVLHLDLKPENILCV
NOV18d VLFMEYIEGGELFERIVDEDYHLTEVDTMVFVRQICDGILFMHKMRVLHLDLKPENILCV
NOV18e VLFMEYIEGGELFERIVDEDYHLTEVDTMVFVRQICDGILFMHKMRVLHLDLKPENILCV
NOV18f VLFMEYIEGGELFERIVDEDYHLTEVDTMVFVRQICDGILFMHKMRVLHLDLKPENILCV
NOV18g VLFMEIE-GGELFERIVDEDYHLTEVDTMVFVRQICDGILLMHKMRVLHLDLKPENILCV
NOV18a NTTGHLVKIIDFGLARRYN-PNEKLKVNFGTPEFLSPEVVNYDQISDKTDMWSMGVITYM
NOV18b NTTGHLVKIIDFGLARRYHNPNEKLKVNFGTPEFLSPEVVNYDQISDKTDMWSMGVITYM
NOV18c NTTGHLVKIIDFGLARRYN-PNEKLKVNFGTPEFLSPEVVNYDQISDKTDMWSMGVITYM
NOV18d NTTGHLVKIIDFGLARRYN-PNEKLKVNFGTPEFLSPEVVNYDQISDKTDMWSMGVITYM
NOV18e NTTGHLVKIIDFGLARRYN-PNEKLKVNFGTPEFLSPEAVNYDQISDKTDMWSMGVITYM
NOV18f NTTGHLVKIIDFGLARRYN-PNEKLKVNFGTPEFLSPEAVNYDQISDKTDMWSMGVITYM
NOV18g NTTGHLVKIIDFGLARRYN-PNEKLKVNFGTPEFLSPEVVNYDQISDKTDMWSMGVITYM
NOV18a LLSGLSPFLGDDDTETLNNVLSGNWYFDEETFEAVSDEAKDFVSNLIVKDQRARNNAAQC
NOV18b LLSGLSPFLGDDDTETLNNVLSGNWYFDEETFEAVSDEAKDFVSNLIVKDQ-ARNNAAQC
NOV18c LLSGLSPFLGDDDTETLNNVLSGNWYFDEETFEAVSDEAKDFVSNLIVKDQRARMNAAQC
NOV18d LLSGLSPFLGDDDTETLNNVLSGNWYFDEETFEAVSDEAKDFVSNLIVKDQRARMNAAQC
NOV18e LLSGLSPFLGDDDTETLNNVLSGNWYFDEETFEAVSDEAKDFVSNLIVKDQRARNNAAQC
NOV18f LLSGLSPFLGDDDTETLNNVLSGNWYFDEETFEAVSDEAKDFVSNLIVKDQRARNNAAQC
NOV18g LLSGLSPFLGDDDTETLNNVLSGNWYFDEETFEAVSDEAKDFVSNLIVKDQRARMNAAQC
NOV18a LAHPWLNNLAEKAKRCNRRLKSQILLKKYLMKRRWKKNFIAVSAANRFKKISSSGALMAL
NOV18b LAHPWLNNLAEKAKRCNRRLKSQILLKKYLMKRRWKKNFIAVSAANRFKKISSSGALMAL
NOV18c LAHPWLVDG---------------------------------------------------
NOV18d LAHPWLNNLAEKAKRCNRRLKSQILLKKYLMKRRWKKNFIAVSAANRFKKISSSGALMAL
NOV18e LAHPWLNNLAEKAKRCNRRLKSQILLKKYLMKRRWKKNFIAVSAANRFKKISSSGALMAL
NOV18f LAHPWLNNLAEKAKRCNRRLKSQILLKKYLMKRRWKKNFIAVSAANRFKKISSSGALMAL
NOV18g LAHPWLNNLAEKAKRCNRRLKSQILLKKYLMKRRWKKNFIAVSAANRFKKISSSGALMAL
NOV18a GV---
NOV18b GV---
NOV18c -----
NOV18d GVVDG
NOV18e GV---
NOV18f GV---
NOV18g GV---
NOV18a (SEQ ID NO: 212)
NOV18b (SEQ ID NO: 214)
NOV18c (SEQ ID NO: 216)
NOV18d (SEQ ID NO: 218)
NOV18e (SEQ ID NO: 220)
NOV18f (SEQ ID NO: 222)
NOV18g (SEQ ID NO: 224)

[0447] Further analysis of the NOV18a protein yielded the following properties shown in Table 18C.

TABLE 18C
Protein Sequence Properties NOV18a

SignalP analysis: No Known Signal Sequence Indicated
PSORT II analysis:

| PSG: | a new signal peptide prediction method |
|---|---|
| | N-region: length 9; pos.chg 3; neg.chg 0 |
| | H-region: length 20; peak value 1.84 |
| | PSG score: −2.56 |
| GvH: | von Heijne's method for signal seq. recognition |
| | GvH score (threshold: −2.1): −10.69 |
| | possible cleavage site: between 29 and 30 |

>>> Seems to have no N-terminal signal peptide

| ALOM: | Klein et al's method for TM region allocation |
|---|---|
| | Init position for calculation: 1 |
| | Tentative number of TMS(s) for the threshold 0.5: 0 |
| | number of TMS(s) . . . fixed |
| | PERIPHERAL Likelihood = 1.48 (at 393) |
| | ALOM score: 1.48 (number of TMSs: 0) |

MITDISC: discrimination of mitochondrial targeting seq

| | | | |
|---|---|---|---|
| R content: | 1 | Hyd Moment(75): | 14.68 |
| Hyd Moment(95): | 9.57 | G content: | 1 |
| D/E content: | 1 | S/T content: | 2 |
| Score: —2.37 | | | |

Gavel: prediction of cleavage sites for mitochondrial preseq

R-2 motif at 18 QRK|GM

NUCDISC: discrimination of nuclear localization signals

pat4: KKPK (4) at 34
pat7: none
bipartite: RRLKSQILLKKYLMKRR at 477
content of basic residues: 12.9%
NLS Score: 0.27

KDEL: ER retention motif in the C-terminus: none
ER Membrane Retention Signals: none
SKL: peroxisomal targeting signal in the C-terminus: none
PTS2: 2nd peroxisomal targeting signal: found

RIVDEDYHL at 295

VAC: possible vacuolar targeting motif: none
RNA-binding motif: none
Actinin-type actin-binding motif:

type 1: none
type 2: none

NMYR: N-myristoylation pattern : none
Prenylation motif: none
memYQRL: transport motif from cell surface to Golgi: none
Tyrosines in the tail: none
Dileucine motif in the tail: none
checking 63 PROSITE DNA binding motifs: none
checking 71 PROSITE ribosomal protein motifs: none
checking 33 PROSITE prokaryotic DNA binding motifs: none
NNCN: Reinhardt's method for Cytoplasmic/Nuclear discrimination

Prediction: nuclear
Reliability: 55.5

COIL: Lupas's algorithm to detect coiled-coil regions

total: 0 residues

--------------------------
Final Results (k = 9/23):

69.6%: nuclear
17.4%: mitochondrial
13.0%: cytoplasmic

>> prediction for CG51448-05 is nuc (k = 23)

[0448] A search of the NOV18a protein against the Geneseq database, a proprietary database that contains sequences published in patents and patent publication, yielded several homologous proteins shown in Table 18D.

TABLE 18D
Geneseq Results for NOV18a

| | | NOV18a | Identities/ | |
|---|---|---|---|---|
| | | Residues/ | Similarities for | |
| Geneseq | Protein/Organism/Length | Match | the Matched | Expect |
| Identifier | [Patent #, Date] | Residues | Region | Value |
| AAE22849 | Human cardiac myosin light | 20 . . . 521 | 502/502 (100%) | 0.0 |
| | chain kinase (cMLCK) mutant, | 95 . . . 596 | 502/502 (100%) | |
| | G89D - Homo sapiens, 596 aa. | | | |
| | [WO200224889-A2, 28-MAR- | | | |
| | 2002] | | | |
| AAE22847 | Human cardiac myosin light | 20 . . . 521 | 502/502 (100%) | 0.0 |
| | chain kinase (cMLCK) mutant, | 95 . . . 596 | 502/502 (100%) | |
| | A87V - Homo sapiens, 596 aa. | | | |
| | [WO200224889-A2, 28-MAR- | | | |
| | 2002] | | | |
| AAE22723 | Human cardiac myosin light | 20 . . . 521 | 502/502 (100%) | 0.0 |
| | chain kinase (cMLCK) protein - | 95 . . . 596 | 502/502 (100%) | |
| | Homo sapiens, 596 aa. | | | |
| | [WO200224889-A2, 28-MAR- | | | |
| | 2002] | | | |
| AAU03521 | Human protein kinase #21 - | 20 . . . 521 | 502/502 (100%) | 0.0 |
| | Homo sapiens, 612 aa. | 111 . . . 612 | 502/502 (100%) | |
| | [WO200138503-A2, 31-MAY- | | | |
| | 2001] | | | |
| AAE16340 | Human POLY4 protein - Homo | 20 . . . 521 | 501/502 (99%) | 0.0 |
| | sapiens, 596 aa. [WO200185767- | 95 . . . 596 | 501/502 (99%) | |
| | A2, 15-NOV-2001] | | | |

[0449] In a BLAST search of public sequence databases, the NOV18a protein was found to have homology to the proteins shown in the BLASTP data in Table 18E.

TABLE 18E
Public BLASTP Results for NOV18a

| | | NOV18a | Identities/ | |
|---|---|---|---|---|
| Protein | | Residues/ | Similarities for | |
| Accession | | Match | the Matched | Expect |
| Number | Protein/Organism/Length | Residues | Portion | Value |
| CAC88318 | Sequence 7 from Patent | 20 . . . 521 | 502/502 (100%) | 0.0 |
| | WO0164905 - Homo sapiens | 95 . . . 596 | 502/502 (100%) | |
| | (Human), 596 aa. | | | |
| Q9H1R3 | Myosin light chain kinase 2, | 20 . . . 521 | 502/502 (100%) | 0.0 |
| | skeletal/cardiac muscle (EC | 94 . . . 595 | 502/502 (100%) | |
| | 2.7.1.117) (MLCK2) - Homo | | | |
| | sapiens (Human), 595 aa. | | | |
| A35021 | myosin-light-chain kinase (EC | 20 . . . 521 | 462/504 (91%) | 0.0 |
| | 2.7.1.117), skeletal muscle - | 105 . . . 608 | 479/504 (94%) | |
| | rabbit, 608 aa. | | | |
| P07313 | Myosin light chain kinase 2, | 20 . . . 521 | 462/504 (91%) | 0.0 |
| | skeletal/cardiac muscle (EC | 104 . . . 607 | 479/504 (94%) | |
| | 2.7.1.117) (MLCK2) - | | | |
| | Oryctolagus cuniculus (Rabbit), | | | |
| | 607 aa. | | | |
| A28798 | myosin-light-chain kinase (EC | 20 . . . 521 | 429/502 (85%) | 0.0 |
| | 2.7.1.117), skeletal muscle - rat, | 112 . . . 610 | 453/502 (89%) | |
| | 610 aa. | | | |

[0450] PFam analysis inidcates that the NOV18a protein contains the domains shown in the Table 18F.

TABLE 18F
Domain Analysis of NOV18a

| | | Identities/ | |
|---|---|---|---|
| | | Similarities | |
| | NOV18a Match | for the | |
| Pfam Domain | Region | Matched Region | Expect Value |
| pkinase | 210 . . . 465 | 93/297 (31%) | 9.3e-76 |
| | | 198/297 (67%) | |

### Example 19

[0451] The NOV19 clone was analyzed, and the nucleotide and encoded polypeptide sequences are shown in Table 19A.

TABLE 19A
NOV19 Sequence Analysis

| | | |
|---|---|---|
| NOV19a, CG51752-02 | SEQ ID NO: 243 | 1042 bp |
| DNA Sequence | ORF Start: ATG at 207 | ORF Stop: TGA at 1008 |

AGAGTGCTCTAAACCCAGCTCGGCCTTTGCTGTATTAGACAGAAGCACCTCATTCATATCCCTGGGGC
CCCTGATGGTGCAGTGGTCTGGCTGTGGTCTGCACACCAGCTATTCTGTTTTGTTTTGTTTTGTTTTT
TCCTACCTTTTTCCAATCCTCACACCTTCTGATCAACAGCCCCAGTAGGGTTTAAAGGTCCTAGAGCT
ACATGGGATTTAGGTTTCTGGGCACAGCCAATTCTGCCACTTTTGAGACTTCCCTTCCCCTTCCACTT
GCCCCTCTCTGGTTCTCTGCCACCAGTCCAGAAGAACTGAGTGTCGTGCTGGGGACCAACGACTTAAC
TAGCCCATCCATGGAAATAAAGGAGGTCGCCAGCATCATTCTTCACAAAGACTTTAAGAGAGCCAACA
TGGACAATGACATTGCCTTGCTGCTGCTGGCTTCGCCCATCAAGCTCGATGACCTGAAGGTGCCCATC
TGCCTCCCCACGCAGCCCGGCCCTGCCACATGGCGCGAATGCTGGGTGGCAGGTTGGGGCCAGACCAA
TGCTGCTGACAAAAACTCTGTGAAAACGGATCTGATGAAAGTGCCAATGGTCATCATGGACTGGGAGG
AGTGTTCAAAGATGTTTCCAAAACTTACCAAAAATATGCTGTGTGCCGGATACAAGAATGAGAGCTAT
GATGCCTGCAAGGGTGACAGTGGGGGGCCTCTGGTCTGCACCCCAGAGCCTGGTGAGAAGTGGTACCA
GGTGGGCATCATCAGCTGGGGAAAGAGCTGTGGAGAGAAGAACACCCCAGGGATATACACCTCGTTGG
TGAACTACAACCTCTGGATCGAGAAAGTGACCCAGCTAGAGGGCAGGCCCTTCAATGCAGAGAAAAGG
AGGACTTCTGTCAAACAGAAACCTATGGGCTCCCCAGTCTCGGGAGTCCCAGAGCCAGGCAGCCCCAG
ATCCTGGCTCCTGCTCTGTCCCCTGTCCCATGTGTTGTTCAGAGCTATTTTGTACTGATAATAAAATA
GAGGCTATTCTTTCAACCGAAA

| | | | |
|---|---|---|---|
| NOV19a, CG51752-02 | SEQ ID NO: 244 | 267 aa | MW at 29498.9kD |
| Protein Sequence | | | |

MGFRFLGTANSATFETSLPLPLAPLWFSATSPEELSVVLGTNDLTSPSMEIKEVASIILHKDFKRANM
DNDIALLLLASPIKLDDLKVPICLPTQPGPATWRECWVAGWGQTNAADKNSVKTDLMKVPMVIMDWEE
CSKMFPKLTKNNLCAGYKNESYDACKGDSGGPLVCTPEPGEKWYQVGIISWGKSCGEKNTPGIYTSLV
NYNLWIEKVTQLEGRPFNAEKRRTSVKQKPMGSPVSGVPEPGSPRSWLLLCPLSHVLFRAILY

| | | |
|---|---|---|
| NOV19b, CG51752-03 | SEQ ID NO: 245 | 888 bp |
| DNA Sequence | ORF Start: ATG at 79 | ORF Stop: TGA at 880 |

TTGTTTTTTCCTACCTTTTTCCAATCCTCACACCTTCTGATCAACAGCCCCAGTAGGGTTTAAAGGTC
CTAGAGCTACATGGGATTTAGGTTTCTGGGCACAGCCAATTCTGCCACTTTTGAGACTTCCCTTCCCC
TTCCACTTGCCCCTCTCTGGTTCTCTGCCACCAGTCCAGAAGAACTGAGTGTCGTGCTGGGGACCAAC
GACTTAACTAGCCCATCCATGGAAATAAAGGAGGTCGCCAGCATCATTCTTCACAAAGACTTTAAGAG
AGCCAACATGGACAATGACATTGCCTTGCTGCTGCTGGCTTCGCCCATCAAGCTCGATGACCTGAAGG
TGCCCATCTGCCTCCCCACGCAGCCCGGCCCTGCCACATGGCGCGAATGCTGGGTGGCAGGTTGGGGC
CAGACCAATGCTGCTGACAAAAACTCTGTGAAAACGGATCTGATGAAAGCGCCAATGGTCATCATGGA
CTGGGAGGAGTGTTCAAAGATGTTTCCAAAACTTACCAAAAATATGCTGTGTGCCGGATACAAGAATG
AGAGCTATGATGCCTGCAAGGGTGACAGTGGGGGGCCTCTGGTCTGCACCCCAGAGCCTGGTGAGAAG
TGGTACCAGGTGGGCATCATAACCTGGGGAAAGAGCTGTGGAGAGAAGAACACCCCAGGGATATACAC
CTCGTTGGTGAACTACAACCTCTGGATCGAGAAAGTGACCCAGCTAGAGGGCAGGCCCTTCAATGCAG
AGAAAAGGAGGACTTCTGTCAAACAGAAACCTATGGGCTCCCCAGTCTCGGGAGTCCCAGAGCCAGGC
AGCCCCAGATCCTGGCTCCCGCTCTGTCCCCTGTCCCATGTGTTGTTCAGAGCTATTTTGTACTGATT
ATAA

| | | | |
|---|---|---|---|
| NOV19b, CG51752-03 | SEQ ID NO: 246 | 267 aa | MW at 29468.8kD |
| Protein Sequence | | | |

MGFRFLGTANSATFETSLPLPLAPLWFSATSPEELSVVLGTNDLTSPSMEIKEVASIILHKDFKRANM
DNDIALLLLASPIKLDDLKVPICLPTQPGPATWRECWVAGWGQThAADKNSVKTDLMKAPMVIMDWEE
CSKMFPKLTKNMLCAGYKNESYDACKGDSGGPLVCTPEPGEKWYQVGIITWGKSCGEKNTPGIYTSLV
NYNLWIEKVTQLEGRPFNAEKRRTSVKQKPMGSPVSGVPEPGSPRSWLPLCPLSHVLFRAILY

| | | |
|---|---|---|
| NOV19c, 175069825 | SEQ ID NO:247 | 816 bp |
| DNA Sequence | ORF Start: at 1 | ORF Stop: end of sequence |

GGATCCACCATGGGATTTAGGTTTCTGGGCACAGCCAATTCTGCCGCTTTTGAGACTTCCCTTCCCCT
TCCACTTGCCCCTCTCTGGTTCTCTGCCACCAGTCCAGAAGAACTGAGTGTCGTGCTGGGGACCAACG
ACTTAACTAGCCCATCCATGGAAATAAAGGAGGTCGCCAGCATCATTCTTCACAAAGACTTTAAGAGA
GCCAACATGGACAATGACATTGCCTTGCTGCTGCTGGCTTCGCCCATCAAGCTCGATGACCTGAAGGT
GCCCATCTGCCTCCCCACGCAGCCCGGCCCTGCCACATGGCGCGAATGCTGGGTGGCAGGTTGGGGCC
AGACCAATGCTGCTGACAAAAACTCTGTGAAAACGGATCTGATGAAAGCGCCAATGGTCATCATGGAC
TGGGAGGAGTGTTCAAAGATGTTTCCAAAACTTACCAAAAATATGCTGTGTGCCGGATACAAGAATGA
GAGCTATGATGCCTGCAAGGGTGACAGTGGGGGGCCTCTGGTCTGCACCCCAGAGCCTGGTGAGAAGT
GGTACCAGGTGGGCATCATAAGCTGGGGAAAGAGCTGTGGAGAGAAGAACACCCCAGGGATATACACC
TCGTTGGTGAACTACAACCTCTGGATCGAGAAAGTGACCCAGCTAGAGGGCAGGCCCTTCAATGCAGA
GAAAAGGAGGACTTCTGTCAAACAGAAACCTATGGGCTCCCCAGTCTCGGGAGTCCCAGAGCCAGGCA
GCCCCAGATCCTGGCTCCTGCTCTGTCCCCTGTCCCATGTGTTGTTCAGAGCTATTTTGTACCTCGAG

| | | | |
|---|---|---|---|
| NOV19c, 175069825 | SEQ ID NO: 248 | 272 aa | MW at 29928.3kD |
| Protein Sequence | | | |

GSTMGFRFLGTANSAAFETSLPLPLAPLWFSATSPEELSVVLGTNDLTSPSMEIKEVASIILHKDFKR
ANMDNDIALLLLASPIKLDDLKVPICLPTQPGPATWRECWVAGWGQTNAADKNSVKTDLMKAPMVIMD
WEECSKMFPKLTKNMLCAGYKNESYDACKGDSGGPLVCTPEPGEKWYQVGIISWGKSCGEKNTPGIYT
SLVNYNLWIEKVTQLEGRPFNAEKRRTSVKQKPMGSPVSGVPEPGSPRSWLLLCPLSHVLFRAILYLE

| | | |
|---|---|---|
| NOV19d, 175069842 | SEQ ID NO: 249 | 816 bp |
| DNA Sequence | ORF Start: at 1 | ORF Stop: end of sequence |

GGATCCACCATGGGATTTAGGTTTCTGGGCACAGCCAATTCTGCCGCTTTTGAGACTTCCCTTCCCCT
TCCACTTGCCCCTCTCTGGTTCTCTGCCACCAGTCCAGAAGAACTGAGTGTCGTGCTGGGGACCAACG
ACTTAACTAGCCCATCCATGGAAATAAAGGAGGTCGCCAGCATCATTCTTCACAAAGACTTTAAGAGA
GCCAACATGGACAATGACATTGCCTTGCTGCTGCTGGCTTCGCCCATCAAGCTCGATGACCTGAAGGT
GCCCATCTGCCTCCCCACGCAGCCCGGCCCTGCCACATGGCGCGAATGCTGGGTGGCAGGTTGGGGCC
AGACCAATGCTGCTGACAAAAACTCTGTGAAAACGGATCTGATGAAAGCGCCAATGGTCATCATGGAC
TGGGAGGAGTGTTCAAAGATGTTTCCAAAACTTACCAAAAATATGCTGCGTGCCGGATACAAGAATGA
GAGCTATGATGCCTGCAAGGGTGACAGTGGGGGGCCTCTGGTCTGCACCCCAGAGCCTGGTGAGAAGT
GGTACCAGGTGGGCATCATAAGCTGGGGAAAGAGCTGTGGAGAGAAGAACACCCCAGGGATATACACC
TCGTTGGTGAACTACAACCTCTGGATCGAGAAAGTGACCCAGCTAGAGGGCAGGCCCTTCAATGCAGA
GAAAAGGAGGACTTCTGTCAAACAGAAACCTATGGGCTCCCCAGTCTCGGGAGTCCCAGAGCCAGGCA
GCCCCAGATCCTGGCTCCTGCTCTGTCCCCTGTCCCATGTGTTGTTCAGAGCTATTTTGTACCTCGAG

| | | | |
|---|---|---|---|
| NOV19d, 175069842 | SEQ ID NO: 250 | 272 aa | MW at 29981.3kD |
| Protein Sequence | | | |

GSTMGFRFLGTANSAAFETSLPLPLAPLWFSATSPEELSVVLGTNDLTSPSMEIKEVASIILHKDFKR
ANMDNDIALLLLASPIKLDDLKVPICLPTQPGPATWRECWVAGWGQTNAADKNSVKTDLMKAPMVIMD
WEECSKMFPKLTKNMLRAGYKNESYDACKGDSGGPLVCTPEPGEKWYQVGIISWGKSCGEKNTPGIYT
SLVNYNLWIEKVTQLEGRPFNAEKRRTSVKQKPMGSPVSGVPEPGSPRSWLLLCPLSHVLFRAILYLE

| | | |
|---|---|---|
| NOV19e, 258076315 | SEQ ID NO: 251 | 729 bp |
| DNA Sequence | ORF Start: at 1 | ORF Stop: end of sequence |

GGATCCGCCACCAGTCCAGAAGAACTGAGTGTCGTGCTGGGGACCAACGACTTAACTAGCCCATCCAT
GGAAATAAAGGAGGTCGCCAGCATCATTCTTCACAAAGACTTTAAGAGAGCCAACATGGACAATGACA
TTGCCTTGCTGCTGCTGGCTTCGCCCATCAAGCTCGATGACCTGAAGGTGCCCATCTGCCTCCCCACG
CAGCCCGGCCCTGCCACATGGCGCGAATGCTGGGTGGCAGGTTGGGGCCAGACCAATGCTGCTGACAA
AAACTCTGTGAAAACGGATCTGATGAAAGCGCCAATGGTCATCATGGACTGGGAGGAGTGTTCAAAGA
TGTTTCCAAAACTTACCAAAAATATGCTGTGTGCCGGATACAAGAATGAGAGCTATGATGCCTGCAAG
GGTGACAGTGGGGGGCCTCTGGTCTGCACCCCAGAGCCTGGTGAGAAGTGGTACCAGGTGGGCATCAT
CAGCTGGGGAAAGAGCTGTGGAGAGAAGAACACCCCAGGGATATACACCTCGTTGGTGAACTACAACC
TCTGGATCGAGAAAGTGACCCAGCTAGAGGGCAGGCCCTTCAATGCAGAGAAAAGGAGGACTTCTGTC
AAACAGAAACCTATGGGCTCCCCAGTCTCGGGAGTCCCAGAGCCAGGCAGCCCCAGATCCTGGCTCCT
GCTCTGTCCCCTGTCCCATGTGTTGTTCAGAGCTATTTTGTACCTCGAG

| | | | |
|---|---|---|---|
| NOV19e, 258076315 | SEQ ID NO: 252 | 243 aa | MW at 26802.7kD |
| Protein Sequence | | | |

GSATSPEELSVVLGTNDLTSPSMEIKEVASIILHKDFKRANMDNDIALLLLASPIKLDDLKVPICLPT
QPGPATWRECWVAGWGQTNAADKNSVKTDLMKAPMVIMDWEECSKMFPKLTKNMLCAGYKNESYDACK
GDSGGPLVCTPEPGEKWYQVGIISWGKSCGEKNTPGIYTSLVNYNLWIEKVTQLEGRPFNAEKRRTSV
KQKPMGSPVSGVPEPGSPRSWLLLCPLSHVLFRAILYLE

| | | |
|---|---|---|
| NOV19f, 258076366 | SEQ ID NO: 253 | 729 bp |
| DNA Sequence | ORF Start: at 1 | ORF Stop: end of sequence |

GGATCCGCCACCAGTCCAGAAGAACTGAGTGTCGTGCTGGGGACCAACGACTTAACTAGCCCATCCAT
GGAAATAAAGGAGGTCGCCAGCATCATTCTTCACAAAGACTTTAAGAGAGCCAACATGGACAATGACA
TTGCCTTGCTGCTGCTGGCTTCGCCCATCAAGCTCGATGACCTGAAGGTGCCCATCTGCCTCCCCACG
CAGCCCGGCCCTGCCACATGGCGCGAATGCTGGGTGGCAGGTTGGGGCCAGACCAATGCTGCTGACAA
AAACTCTGTGAAAACGGATCTGATGAAAGTGCCAATGGTCATCATGGACTGGGAGGAGTGTTCAAAGA
TGTTTCCAAAACTTACCAAAAATATGCTGTGTGCCGGATACAAGAATGAGAGCTATGATGCCTGCAAG
GGTGACAGTGGGGGGCCTCTGGTCTGCACCCCAGAGCCTGGTGAGAAGTGGTACCAGGTGGGCATCAT
CAGCTGGGGAAAGAGCTGTGGAGAGAAGAACACCCCAGGGATATACACCTCGTTGGTGAACTACAACC
TCTGGATCGAGAAAGTGACCCAGCTAGAGGGCAGGCCCTTCAATGCAGAGAAAAGGAGGACTTCTGTC
AAACAGAAACCTATGGGCTCCCCAGTCTCGGGAGTCCCAGAGCCAGGCAGCCCCAGATCCTGGCTCCT
GCTCTGTCCCCTGTCCCATGTGTTGTTCAGAGCTATTTTGTACCTCGAG

| | | | |
|---|---|---|---|
| NOV19f, 258076366 | SEQ ID NO: 254 | 243 aa | MW at 26830.8kD |
| Protein Sequence | | | |

GSATSPEELSVVLGTNDLTSPSMEIKEVASIILHKDFKRANMDNDIALLLLASPIKLDDLKVPICLPT
QPGPATWRECWVAGWGQTNAADKNSVKTDLMKVPMVIMDWEECSKMFPKLTKNMLCAGYKNESYDACK
GDSGGPLVCTPEPGEKWYQVGIISWGKSCGEKNTPGIYTSLVNYNLWIEKVTQLEGRPFNAEKRRTSV
KQKPMGSPVSGVPEPGSPRSWLLLCPLSHVLFRAILYLE

| | | |
|---|---|---|
| NOV19g, CG51752-04 | SEQ ID NO: 255 | 852 bp |
| DNA Sequence | ORF Start: ATG at 46 | ORF Stop: TGA at 847 |

CTTCTGATCAACAGCCCCAGTAGGGTTTAAAGGTCCTAGAGCTACATGGGATTTAGGTTTCTGGGCAC
AGCCAATTCTGCCACTTTTGAGGCTTCCCTTCCCCTTCCACTTGCCCCTCTCTGGTTCTCTGCCCCCA
GTCCAGAAGAACTGAGTGTCGTGCTGGGGACCAACGACTTAACTAGCCCATCCATGGAAATAAAGGAG
GTCGCCAGCATCATTCTTCACAAAGACTTTAAGAGAGCCAACATGGACAATGACATTGCCTTGCTGCT
GCTGGCTTCGCCCATCAAGCTCGATGACCTGAAGGTGCCCATCTGCCTCCCCACGCAGCCCGGCCCTG
CCACATGGCGCGAATGCTGGGTGGCAGGTTGGGGCCAGACCAATGCTGCTGACAAAAACTCTGTGAAA
ACGGATCTGATGAAAGCGCCAATGGTCATCATGGACTGGGAGGAGTGTTCAAAGATGTTTCCAAAACT
TACCAAAAATATGCTGTGTGCCGGATACAAGAATGAGAGCTATGATGCCTGCAAGGGTGACAGTGGGG
GGCCTCTGGTCTGCACCCCAGAGCCTGGTGAGAAGTGGTACCAGGTGGGCATCATCAGCTGGGGAAAG
AGCTGTGGAGAGAAGAACACCCCAGGGATATACACCTCGTTGGTGAATTACAACCTCTGGATCGAGAA
AGTGACCCAGCTAGAGGGCAGGCCCTTCAATGCAGAGAAAAGGAGGACTTCTGTCAAACAGAAACCTA
TGGGCTCCCCAGTCTCGGGAGTCCCAGAGCCAGGCAGCCCCAGATCCTGGCTCCTGCTCTGTCCCCTG
TCCCATGTGTTGTTCAGAGCTATTTTGTACTGATAA

| | | | |
|---|---|---|---|
| NOV19g, CG51752-04 | SEQ ID NO: 256 | 267 aa | MW at 29436.8kD |
| Protein Sequence | | | |

MGFRFLGTANSATFEASLPLPLAPLWFSAPSPEELSVVLGTNDLTSPSMEIKEVASIILHKDFKRANN
DNDIALLLLASPIKLDDLKVPICLPTQPGPATWRECWVAGWGQTNAADKNSVKTDLMKAPMVIMDWEE
CSKMFPKLTKNMLCAGYKNESYDACKGDSGGPLVCTPEPGEKWYQVGIISWGKSCGEKNTPGIYTSLV
NYNLWIEKVTQLEGRPFNAEKRRTSVKQKPMGSPVSGVPEPGSPRSWLLLCPLSHVLFRAILY

| | | |
|---|---|---|
| NOV19h, 191887409 | SEQ ID NO: 257 | 816 bp |
| DNA Sequence | ORF Start: at 1 | ORF Stop: end of sequence |

GGATCCACCATGGGATTTAGGTTTCTGGGCACAGCCAATTCTGCCACTTTTGAGACTTCCCTTCCCCT
TCCACTTGCCCCTCTCTGGTTCTCTGCCACCAGTCCAGAAGAACTGAGTGTCGTGCTGGGGACCAACG
ACTTAACTAGCCCATCCATGGAAATAAAGGAGGTCGCCAGCATCATTCTTCACAAAGACTTTAAGAGA
GCCAACATGGACAATGACATTGCCTTGCTGCTGCTGGCTTCGCCCATCAAGCTCGATGACCTGAAGGT
GCCCATCTGCCTCCCCACGCAGCCCGGCCCTGCCACATGGCGCGAATGCTGGGTGGCAGGTTGGGGCC
AGACCAATGCTGCTGACAAAAACTCTGTGAAAACGGATCTGATGAAAGTGCCAATGGTCATCATGGAC
TGGGAGGAGTGTTCAAAGATGTTTCCAAAACTTACCAAAAATATGCTGTGTGCCGGATACAAGAATGA
GAGCTATGATGCCTGCAAGGGTGACAGTGGGGGGCCTCTGGTCTGCACCCCAGAGCCTGGTGAGAAGT
GGTACCAGGTGGGCATCATCAGCTGGGGAAAGAGCTGTGGAGAGAAGAACACCCCAGGGATATACACC
TCGTTGGTGAACTACAACCTCTGGATCGAGAAAGTGACCCAGCTAGAGGGCAGGCCCTTCAATGCAGA
GAAAAGGAGGACCTCTGTCAAACAGAAACCTATGGGCTCCCCAGTCTCGGGAGTCCCAGAGCCAGGCA
GCCCCAGATCCTGGCTCCTGCTCTGTCCCCTGTCCCATGTGTTGTTCAGAGCTATTTTGTACCTCGAG

| | | | |
|---|---|---|---|
| NOV19h, 191887409 | SEQ ID NO: 258 | 272 aa | MW at 29986.4kD |
| Protein Sequence | | | |

GSTMGFRFLGTANSATFETSLPLPLAPLWFSATSPEELSVVLGTNDLTSPSMEIKEVASIILHKDFKR
ANMDNDIALLLLASPIKLDDLKVPICLPTQPGPATWRECWVAGWGQTNAADKNSVKTDLMKVPMVIMD
WEECSKMFPKLTKNMLCAGYKNESYDACKGDSGGPLVCTPEPGEKWYQVGIISWGKSCGEKNTPGIYT
SLVNYLWIEKVTQLEGRPFNAEKRRTSVKQKPMGSPVSGVPEPGSPRSWLLLCPLSHVLFRAILYLE

| | | |
|---|---|---|
| NOV19i, CG51752-01 | SEQ ID NO: 259 | 1078 bp |
| DNA Sequence | ORF Start: ATG at 243 | ORF Stop: TGA at 1044 |

TTGATCCGTGCCAAGTGGCTTTTTGTGGGCTCTGTAGAGTGCTCTAAACCCAGCTCGGCCTTTGCTGT
ATTAGACAGAAGCACCTCATTCATATCCCTGGGGCCCCTGATGGTGCAGTGGTCTGGCTGTGGTCTGC
ACACCAGCTATTCTGTTTTGTTTTGTTTTGTTTTTTTCCTACCTTTTTCCAATCCTCACACCTTCTGA
TCAACAGCCCCAGTAGGGTTTAAAGGTCCTAGAGCTACATGGGATTTAGGTTTCTGGGCACAGCCAAT
TCTGCCACTTTTGAGACTTCCCTTCCCCTTCCACTTGCCCCTCTCTGGTTCTCTGCCACCAGTCCAGA
AGAACTGAGTGTCGTGCTGGGGACCAACGACTTAACTAGCCCATCCATGGAAATAAAGGAGGTCGCCA
GCATCATTCTTCACAAAGACTTTAAGAGAGCCAACATGGACAATGACATTGCCTTGCTGCTGCTGGCT
TCGCCCATCAAGCTCGATGACCTGAAGGTGCCCATCTGCCTCCCCACGCAGCCCGGCCCTGCCACATG
GCGCGAATGCTGGGTGGCAGGTTGGGGCCAGACCAATGCTGCTGACAAAAACTCTGTGAAAACGGATC
TGATGAAAGTGCCAATGGTCATCATGGACTGGGAGGAGTGTTCAAAGATGTTTCCAAAACTTACCAAA
AATATGCTGTGTGCCGGATACAAGAATGAGAGCTATGATGCCTGCAAGGGTGACAGTGGGGGGCCTCT
GGTCTGCACCCCAGAGCCTGGTGAGAAGTGGTACCAGGTGGGCATCATCAGCTGGGGAAAGAGCTGTG
GAGATAAGAACACCCCAGGGATATACACCTCGTTGGTGAACTACAACCTCTGGATCGAGAAAGTGACC
CAGCTAGGAGGCAGGCCCTTCAATGCAGAGAAAAGGAGGACTTCTGTCAAACAGAAACCTATGGGCTC
CCCAGTCTCGGGAGTCCCAGAGCCAGGCAGCCCCAGATCCTGGCTCCTGCTCTGTCCCCTGTCCCATG
TGTTGTTCAGAGCTATTTTGTACTGATAATAAAATAGAGGCTATTCTTTCAACCGAAA

| | | | |
|---|---|---|---|
| NOV19i, CG51752-01 | SEQ ID NO: 260 | 267 aa | MW at 29412.8kD |
| Protein Sequence | | | |

MGFRFLGTANSATFETSLPLPLAPLWFSATSPEELSVVLGTNDLTSPSMEIKEVASIILHKDFKRANN
DNDIALLLLASPIKLDDLKVPICLPTQPGPATWRECWVAGWGQTNAADKNSVKTDLMKVPMVIMDWEE
CSKMFPKLTKNMLCAGYKNESYDACKGDSGGPLVCTPEPGEKWYQVGIISWGKSCGDKNTPGIYTSLV
NYNLWIEKQLGGRPFNAEKRRTSVKQKPMGSPVSGVPEPGSPRSWLLLCPLSHVLFRAILY

| | | |
|---|---|---|
| NOV19j, CG51752-05 | SEQ ID NO: 261 | 816 bp |
| DNA Sequence | ORF Start: ATG at 10 | ORF Stop: at 811 |

GGATCCACCATGGGATTTAGGTTTCTGGGCACAGCCAATTCTGCCGCTTTTGAGACTTCCCTTCCCCT
TCCACTTGCCCCTCTCTGGTTCTCTGCCACCAGTCCAGAAGAACTGAGTGTCGTGCTGGGGACCAACG
ACTTAACTAGCCCATCCATGGAAATAAAGGAGGTCGCCAGCATCATTCTTCACAAAGACTTTAAGAGA
GCCAACATGGACAATGACATTGCCTTGCTGCTGCTGGCTTCGCCCATCAAGCTCGATGACCTGAAGGT
GCCCATCTGCCTCCCCACGCAGCCCGGCCCTGCCACATGGCGCGAATGCTGGGTGGCAGGTTGGGGCC
AGACCAATGCTGCTGACAAAAACTCTGTGAAAACGGATCTGATGAAAGCGCCAATGGTCATCATGGAC
TGGGAGGAGTGTTCAAAGATGTTTCCAAAACTTACCAAAAATATGCTGTGTGCCGGATACAAGAATGA
GAGCTATGATGCCTGCAAGGGTGACAGTGGGGGGCCTCTGGTCTGCACCCCAGAGCCTGGTGAGAAGT
GGTACCAGGTGGGCATCATAAGCTGGGGAAAGAGCTGTGGAGAGAAGAACACCCCAGGGATATACACC
TCGTTGGTGAACTACAACCTCTGGATCGAGAAAGTGACCCAGCTAGAGGGCAGGCCCTTCAATGCAGA
GAAAAGGAGGACTTCTGTCAAACAGAAACCTATGGGCTCCCCAGTCTCGGGAGTCCCAGAGCCAGGCA
GCCCCAGATCCTGGCTCCTGCTCTGTCCCCTGTCCCATGTGTTGTTCAGAGCTATTTTGTACCTCGAG

| | | | |
|---|---|---|---|
| NOV19j, CG51752-05 | SEQ ID NO: 262 | 267 aa | MW at 29440.8kD |
| Protein Sequence | | | |

MGFRFLGTANSAAFETSLPLPLAPLWFSATSPEELSVVLGTNDLTSPSMEIKEVASIILHKDFKRANN
DNDIALLLLASPIKLDDLKVPICLPTQPGPATWRECWVAGWGQTNAADKNSVKTDLMKAPMVIMDWEE
CSKMFPKLTKNNLCAGYKNESYDACKGDSGGPLVCTPEPGEKWYQVGIISWGKSCGEKNTPGIYTSLV
NYNLWIEKVTQLEGRPFMAEKRRTSVKQKPMGSPVSGVPEPGSPRSWLLLCPLSHVLFRAILY

| | | |
|---|---|---|
| NOV19k, CG51752-06 | SEQ ID NO: 263 | 729 bp |
| DNA Sequence | ORF Start: at 7 | ORF Stop: at 724 |

GGATCCGCCACCAGTCCAGAAGAACTGAGTGTCGTGCTGGGGACCAACGACTTAACTAGCCCATCCAT
GGAAATAAAGGAGGTCGCCAGCATCATTCTTCACAAAGACTTTAAGAGAGCCAACATGGACAATGACA
TTGCCTTGCTGCTGCTGGCTTCGCCCATCAAGCTCGATGACCTGAAGGTGCCCATCTGCCTCCCCACG
CAGCCCGGCCCTGCCACATGGCGCGAATGCTGGGTGGCAGGTTGGGGCCAGACCAATGCTGCTGACAA
AAACTCTGTGAAAACGGATCTGATGAAAGTGCCAATGGTCATCATGGACTGGGAGGAGTGTTCAAAGA
TGTTTCCAAAACTTACCAAAAATATGCTGTGTGCCGGATACAAGAATGAGAGCTATGATGCCTGCAAG
GGTGACAGTGGGGGGCCTCTGGTCTGCACCCCAGAGCCTGGTGAGAAGTGGTACCAGGTGGGCATCAT
CAGCTGGGGAAAGAGCTGTGGAGAGAAGAACACCCCAGGGATATACACCTCGTTGGTGAACTACAACC
TCTGGATCGAGAAAGTGACCCAGCTAGAGGGCAGGCCCTTCAATGCAGAGAAAAGGAGGACCTCTGTC
AAACAGAAACCTATGGGCTCCCCAGTCTCGGGAGTCCCAGAGCCAGGCAGCCCCAGATCCTGGCTCCT
GCTCTGTCCCCTGTCCCATGTGTTGTTCAGAGCTATTTTGTACCTCGAG

| | | | |
|---|---|---|---|
| NOV19k, CG51752-06 | SEQ ID NO: 264 | 239 aa | MW at 26444.4kD |
| Protein Sequence | | | |

ATSPEELSVVLGTNDLTSPSMEIKEVASIILHKDFKRANMDNDIALLLLASPIKLDDLKVPICLPTQP
GPATWRECWVAGWGQTNAADKNSVKTDLMKVPMVIMDWEECSKMFPKLTKNMLCAGYKNESYDACKGD
SGGPLVCTPEPGEKWYQVGIISWGKSCGEKNTPGIYTSLVNYNLWIEKVTQLEGRPFNAEKRRTSVKQ
KPMGSPVSGVPEPGSPRSWLLLCPLSHVLFRAILY

| | | |
|---|---|---|
| NOV19l, CG51752-07 | SEQ ID NO: 265 | 816 bp |
| DNA Sequence | ORF Start: ATG at 10 | ORF Stop: at 811 |

GGATCCACCATGGGATTTAGGTTTCTGGGCACAGCCAATTCTGCCACTTTTGAGACTTCCCTTCCCCT
TCCACTTGCCCCTCTCTGGTTCTCTGCCACCAGTCCAGAAGAACTGAGTGTCGTGCTGGGGACCAACG
ACTTAACTAGCCCATCCATGGAAATAAAGGAGGTCGCCAGCATCATTCTTCACAAAGACTTTAAGAGA
GCCAACATGGACAATGACATTGCCTTGCTGCTGCTGGCTTCGCCCATCAAGCTCGATGACCTGAAGGT
GCCCATCTGCCTCCCCACGCAGCCCGGCCCTGCCACATGGCGCGAATGCTGGGTGGCAGGTTGGGGCC
AGACCAATGCTGCTGACAAAAACTCTGTGAAAACGGATCTGATGAAAGTGCCAATGGTCATCATGGAC
TGGGAGGAGTGTTCAAAGATGTTTCCAAAACTTACCAAAAATATGCTGTGTGCCGGATACAAGAATGA
GAGCTATGATGCCTGCAAGGGTGACAGTGGGGGGCCTCTGGTCTGCACCCCAGAGCCTGGTGAGAAGT
GGTACCAGGTGGGCATCATCAGCTGGGGAAAGAGCTGTGGAGAGAAGAACACCCCAGGGATATACACC
TCGTTGGTGAACTACAACCTCTGGATCGAGAAAGTGACCCAGCTAGAGGGCAGGCCCTTCAATGCAGA
GAAAAGGAGGACCTCTGTCAAACAGAAACCTATGGGCTCCCCAGTCTCGGGAGTCCCAGAGCCAGGCA
GCCCCAGATCCTGGCTCCTGCTCTGTCCCCTGTCCCATGTGTTGTTCAGAGCTATTTTGTACCTCGAG

| | | | |
|---|---|---|---|
| NOV19l, GG51752-07 | SEQ ID NO: 266 | 267 aa | MW at 29498.9kD |
| Protein Sequence | | | |

MGFRFLGThNSATFETSLPLPLAPLWFSATSPEELSVVLGTNDLTSPSMEIKEVASIILHKDFKRANM
DNDIALLLLASPIKLDDLKVPICLPTQPGPATWRECWVAGWGQTNAADKNSVKTDLMKVPMVIMDWEE
CSKMFPKLTKNMLCAGYKNESYDACKGDSGGPLVCTPEPGEKWYQVGIISWGKSCGEKNTPGIYTSLV
NYNLWIEKVTQLEGRPFNAEKRRTSVKQKPMGSPVSGVPEPGSPRSWLLLCPLSHVLFRAILY

| | | |
|---|---|---|
| NOV19m, SNP13374584 of | SEQ ID NO: 267 | 1042 bp |
| CG51752-02, DNA Sequence | ORF Start: ATG at 207 | ORF Stop: TGA at 1008 |
| | SNP Pos: 243 | SNP Change: A to G |

AGAGTGCTCTAAACCCAGCTCGGCCTTTGCTGTATTAGACAGAAGCACCTCATTCATATCCCTGGGGC
CCCTGATGGTGCAGTGGTCTGGCTGTGGTCTGCACACCAGCTATTCTGTTTTGTTTTGTTTTGTTTTT
TCCTACCTTTTTCCAATCCTCACACCTTCTGATCAACAGCCCCAGTAGGGTTTAAAGGTCCTAGAGCT
ACATGGGATTTAGGTTTCTGGGCACAGCCAATTCTGCCGCTTTTGAGACTTCCCTTCCCCTTCCACTT
GCCCCTCTCTGGTTCTCTGCCACCAGTCCAGAAGAACTGAGTGTCGTGCTGGGGACCAACGACTTAAC
TAGCCCATCCATGGAAATAAAGGAGGTCGCCAGCATCATTCTTCACAAAGACTTTAAGAGAGCCAACA
TGGACAATGACATTGCCTTGCTGCTGCTGGCTTCGCCCATCAAGCTCGATGACCTGAAGGTGCCCATC
TGCCTCCCCACGCAGCCCGGCCCTGCCACATGGCGCGAATGCTGGGTGGCAGGTTGGGGCCAGACCAA
TGCTGCTGACAAAAACTCTGTGAAAACGGATCTGATGAAAGTGCCAATGGTCATCATGGACTGGGAGG
AGTGTTCAAAGATGTTTCCAAAACTTACCAAAAATATGCTGTGTGCCGGATACAAGAATGAGAGCTAT
GATGCCTGCAAGGGTGACAGTGGGGGGCCTCTGGTCTGCACCCCAGAGCCTGGTGAGAAGTGGTACCA
GGTGGGCATCATCAGCTGGGGAAAGAGCTGTGGAGAGAAGAACACCCCAGGGATATACACCTCGTTGG
TGAACTACAACCTCTGGATCGAGAAAGTGACCCAGCTAGAGGGCAGGCCCTTCAATGCAGAGAAAAGG
AGGACTTCTGTCAAACAGAAACCTATGGGCTCCCCAGTCTCGGGAGTCCCAGAGCCAGGCAGCCCCAG
ATCCTGGCTCCTGCTCTGTCCCCTGTCCCATGTGTTGTTCAGAGCTATTTTGTACTGATAATAAAATA
GAGGCTATTCTTTCAACCGAAA

| | | | |
|---|---|---|---|
| NOV19m, SNP13374584 of | SEQ ID NO: 268 | 267 aa | MW at 29468.8kD |
| CG51752-02, Protein | SNP Pos: 13 | | SNP Change: Thr to Ala |
| Sequence | | | |

MGFRFLGTANSAAFETSLPLPLAPLWFSATSPEELSVVLGTNDLTSPSMEIKEVASIILHKDFKRANM
DNDIALLLLASPIKLDDLKVPICLPTQPGPATWRECWVAGWGQTNAADKNSVKTDLMKVPMVIMDWEE
CSKMFPKLTKNMLCAGYKNESYDACKGDSGGPLVCTPEPGEKWYQVGIISWGKSCGEKNTPGIYTSLV
NYNLWIEKVTQLEGRPFNAEKRRTSVKQKPMGSPVSGVPEPGSPRSWLLLCPLSHVLFRAILY

| | | |
|---|---|---|
| NOV19n, SNP13374585 of | SEQ ID NO: 269 | 1042 bp |
| CG51752-02, DNA Sequence | ORF Start: ATG at 207 | ORF Stop: TGA at 1008 |
| | SNP Pos: 586 | SNP Change: T to C |

AGAGTGCTCTAAACCCAGCTCGGCCTTTGCTGTATTAGACAGAAGCACCTCATTCATATCCCTGGGGC
CCCTGATGGTGCAGTGGTCTGGCTGTGGTCTGCACACCAGCTATTCTGTTTTGTTTTGTTTTGTTTTT
TCCTACCTTTTTCCAATCCTCACACCTTCTGATCAACAGCCCCAGTAGGGTTTAAAGGTCCTAGAGCT
ACATGGGATTTAGGTTTCTGGGCACAGCCAATTCTGCCACTTTTGAGACTTCCCTTCCCCTTCCACTT
GCCCCTCTCTGGTTCTCTGCCACCAGTCCAGAAGAACTGAGTGTCGTGCTGGGGACCAACGACTTAAC
TAGCCCATCCATGGAAATAAAGGAGGTCGCCAGCATCATTCTTCACAAAGACTTTAAGAGAGCCAACA
TGGACAATGACATTGCCTTGCTGCTGCTGGCTTCGCCCATCAAGCTCGATGACCTGAAGGTGCCCATC
TGCCTCCCCACGCAGCCCGGCCCTGCCACATGGCGCGAATGCTGGGTGGCAGGTTGGGGCCAGACCAA
TGCTGCTGACAAAAACTCTGTGAAAACGGATCTGATGAAAGCGCCAATGGTCATCATGGACTGGGAGG
AGTGTTCAAAGATGTTTCCAAAACTTACCAAAAATATGCTGTGTGCCGGATACAAGAATGAGAGCTAT
GATGCCTGCAAGGGTGACAGTGGGGGGCCTCTGGTCTGCACCCCAGAGCCTGGTGAGAAGTGGTACCA
GGTGGGCATCATCAGCTGGGGAAAGAGCTGTGGAGAGAAGAACACCCCAGGGATATACACCTCGTTGG
TGAACTACAACCTCTGGATCGAGAAAGTGACCCAGCTAGAGGGCAGGCCCTTCAATGCAGAGAAAAGG
AGGACTTCTGTCAAACAGAAACCTATGGGCTCCCCAGTCTCGGGAGTCCCAGAGCCAGGCAGCCCCAG
ATCCTGGCTCCTGCTCTGTCCCCTGTCCCATGTGTTGTTCAGAGCTATTTTGTACTGATAATAAAATA
GAGGCTATTCTTTCAACCGAAA

| | | | |
|---|---|---|---|
| NOV19n, SNP13374585 of | SEQ ID NO: 270 | 267 aa | MW at 29470.8kD |
| CG51752-02, Protein | SNP Pos: 127 | | SNP Change: Val to Ala |
| Sequence | | | |

MGFRFLGTANSATFETSLPLPLAPLWFSATSPEELSVVLGTNDLTSPSMEIKEVASIILHKDFKRANM
DNDIALLLLASPIKLDDLKVPICLPTQPGPATWRECWVAGWGQTNAADKNSVKTDLMKAPMVIMDWEE
CSKMFPKLTKNMLCAGYKNESYDACKGDSGGPLVCTPEPGEKWYQVGIISWGKSCGEKNTPGIYTSLV
NYNLWIEKVTQLEGRPFNAEKRRTSVKQKPMGSPVSGVPEPGSPRSWLLLCPLSHVLFRAILY

[0452] A ClustalW comparison of the above protein sequences yields the following sequence alignment shown in Table 19B.

TABLE 19B
Comparison of the NOV19 protein sequences.

NOV19a ---MGFRFLGTANSATFETSLPLPLAPLWFSATSPEELSVVLGTNDLTSPSMEIKEVASI
NOV19b ---MGFRFLGTANSATFETSLPLPLAPLWFSATSPEELSVVLGTNDLTSPSMEIKEVASI
NOV19c GSTMGFRFLGTANSAAFETSLPLPLAPLWFSATSPEELSVVLGTNDLTSPSMEIKEVASI
NOV19d GSTMGFRFLGTANSAAFETSLPLPLAPLWFSATSPEELSVVLGTNDLTSPSMEIKEVASI
NOV19e -----------------------------GSATSPEELSVVLGTNDLTSPSMEIKEVASI
NOV19f -----------------------------GSATSPEELSVVLGTNDLTSPSMEIKEVASI
NOV19g ---MGFRFLGTANSATFEASLPLPLAPLWFSAPSPEELSVVLGTNDLTSPSMEIKEVASI
NOV19h GSTMGFRFLGTANSATFETSLPLPLAPLWFSATSPEELSVVLGTNDLTSPSMEIKEVASI
NOV19i ---MGFRFLGTANSATFETSLPLPLAPLWFSATSPEELSVVLGTNDLTSPSMEIKEVASI
NOV19j ---MGFRFLGTANSAAFETSLPLPLAPLWFSATSPEELSVVLGTNDLTSPSMEIKEVASI
NOV19k -------------------------------ATSPEELSVVLGTNDLTSPSMEIKEVASI
NOV19l ---MGFRFLGTANSATFETSLPLPLAPLWFSATSPEELSVVLGTNDLTSPSMEIKEVASI
NOV19a ILHKDFKRANMDNDIALLLLASPIKLDDLKVPICLPTQPGPATWRECWVAGWGQTNAADK
NOV19b ILHKDFKRANMDNDIALLLLASPIKLDDLKVPICLPTQPGPATWRECWVAGWGQTNAADK
NOV19c ILHKDFKRANMDNDIALLLLASPIKLDDLKVPICLPTQPGPATWRECWVAGWGQTNAADK
NOV19d ILHKDFKRANMDNDIALLLLASPIKLDDLKVPICLPTQPGPATWRECWVAGWGQTNAADK
NOV19e ILHKDFKRANMDNDIALLLLASPIKLDDLKVPICLPTQPGPATWRECWVAGWGQTNAADK
NOV19f ILHKDFKRANMDNDIALLLLASPIKLDDLKVPICLPTQPGPATWRECWVAGWGQTNAADK
NOV19g ILHKDFKRANNDNDIALLLLASPIKLDDLKVPICLPTQPGPATWRECWVAGWGQTNAADK
NOV19h ILHKDFKRANMDNDIALLLLASPIKLDDLKVPICLPTQPGPATWRECWVAGWGQTNAADK
NOV19i ILHKDFKRANMDNDIALLLLASPIKLDDLKVPICLPTQPGPATWRECWVAGWGQTNAADK
NOV19j ILHKDFKRANMDNDIALLLLASPIKLDDLKVPICLPTQPGPATWRECWVAGWGQTNAADK
NOV19k ILHKDFKRANMDNDIALLLLASPIKLDDLKVPICLPTQPGPATWRECWVAGWGQTNAADK
NOV19l ILHKDFKRANMDNDIALLLLASPIKLDDLKVPICLPTQPGPATWRECWVAGWGQTNAADK
NOV19a NSVKTDLMKVPMVIMDWEECSKMFPKLTKNMLCAGYKNESYDACKGDSGGPLVCTPEPGE
NOV19b NSVKTDLMKAPMVIMDWEECSKMFPKLTKNMLCAGYKNESYDACKGDSGGPLVCTPEPGE
NOV19c NSVKTDLMKAPMVIMDWEECSKMFPKLTKNMLCAGYKNESYDACKGDSGGPLVCTPEPGE
NOV19d NSVKTDLMKAPMVIMDWEECSKMFPKLTKNMLRAGYKNESYDACKGDSGGPLVCTPEPGE
NOV19e NSVKTDLMKAPMVIMDWEECSKMFPKLTKNMLCAGYKNESYDACKGDSGGPLVCTPEPGE
NOV19f NSVKTDLMKVPMVIMDWEECSKMFPKLTKNMLCAGYKNESYDACKGDSGGPLVCTPEPGE
NOV19g NSVKTDLMKAPMVIMDWEECSKMFPKLTKNMLCAGYKNESYDACKGDSGGPLVCTPEPGE
NOV19h NSVKTDLMKVPMVIMDWEECSKMFPKLTKNMLCAGYKNESYDACKGDSGGPLVCTPEPGE
NOV19i NSVKTDLMKVPMVIMDWEECSKMFPKLTKNMLCAGYKNESYDACKGDSGGPLVCTPEPGE
NOV19j NSVKTDLMKAPMVIMDWEECSKMFPKLTKNMLCAGYKNESYDACKGDSGGPLVCTPEPGE
NOV19k NSVKTDLMKVPMVIMDWEECSKMFPKLTKNMLCAGYKNESYDACKGDSGGPLVCTPEPGE
NOV19l NSVKTDLMKVPMVIMDWEECSKMFPKLTKNMLCAGYKNESYDACKGDSGGPLVCTPEPGE
NOV19a KWYQVGIISWGKSCGEKNTPGIYTSLVNYNLWIEKVTQLEGRPFNAEKRRTSVKQKPMGS
NOV19b KWYQVGIITWGKSCGEKNTPGIYTSLVNYNLWIEKVTQLEGRPFNAEKRRTSVKQKPMGS
NOV19c KWYQVGIISWGKSCGEKNTPGIYTSLVNYNLWIEKVTQLEGRPFNAEKRRTSVKQKPMGS
NOV19d KWYQVGIISWGKSCGEKMTPGIYTSLVNYNLWIEKVTQLEGRPFNAEKRRTSVKQKPMGS
NOV19e KWYQVGIISWGKSCGEKNTPGIYTSLVNYNLWIEKVTQLEGRPFNAEKRRTSVKQKPMGS
NOV19f KWYQVGIISWGKSCGEKNTPGIYTSLVNYNLWIEKVTQLEGRPFNAEKRRTSVKQKPMGS
NOV19g KWYQVGIISWGKSCGEKNTPGIYTSLVNYNLWIEKVTQLEGRPFNAEKRRTSVKQKPMGS
NOV19h KWYQVGIISWGKSCGEKNTPGIYTSLVNYNLWIEKVTQLEGRPFNAEKRRTSVKQKPMGS
NOV19i KWYQVGIISWGKSCGDKNTPGIYTSLVNYNLWIEKVTQLGGRPFNAEKRRTSVKQKPMGS
NOV19j KWYQVGIISWGKSCGEKNTPGIYTSLVNYNLWIEKVTQLEGRPFNAEKRRTSVKQKPMGS
NOV19k KWYQVGIISWGKSCGEKNTPGIYTSLVNYNLWIEKVTQLEGRPFNAEKRRTSVKQKPMGS
NOV19l KWYQVGIISWGKSCGEKNTPGIYTSLVNYNLWIEKVTQLEGRPFNAEKRRTSVKQKPMGS
NOV19a PVSGVPEPGSPRSWLLLCPLSHVLFRAILY--
NOV19b PVSGVPEPGSPRSWLPLCPLSHVLFRAILY--
NOV19c PVSGVPEPGSPRSWLLLCPLSHVLFRAILYLE
NOV19d PVSGVPEPGSPRSWLLLCPLSHVLFRAILYLE
NOV19e PVSGVPEPGSPRSWLLLCPLSHVLFRAILYLE
NOV19f PVSGVPEPGSPRSWLLLCPLSHVLFRAILYLE
NOV19g PVSGVPEPGSPRSWLLLCPLSHVLFRAILY--
NOV19h PVSGVPEPGSPRSWLLLCPLSHVLFRAILYLE
NOV19i PVSGVPEPGSPRSWLLLCPLSHVLFRAILY--
NOV19j PVSGVPEPGSPRSWLLLCPLSHVLFRAILY--
NOV19k PVSGVPEPGSPRSWLLLCPLSHVLFRAILY--
NOV19l PVSGVPEPGSPRSWLLLCPLSHVLFRAILY--
NOV19a (SEQ ID NO: 244)
NOV19b (SEQ ID NO: 246)
NOV19c (SEQ ID NO: 248)
NOV19d (SEQ ID NO: 250)
NOV19e (SEQ ID NO: 252)
NQV19f (SEQ ID NO: 254)
NOV19g (SEQ ID NO: 256)
NOV19h (SEQ ID NO: 258)
NOV19i (SEQ ID NO: 260)
NOV19j (SEQ ID NO: 262)
NOV19k (SEQ ID NO: 264)
NOV19l (SEQ ID NO: 266)

[0453] Further analysis of the NOV19a protein yielded the following properties shown in Table 19C.

TABLE 19C
Protein Sequence Properties NOV19a

SignalP analysis: No Known Signal Sequence Indicated
PSORT II analysis:

| PSG: | a new signal peptide prediction method |
|---|---|
| | N-region: length 4; pos.chg 1; neg.chg 0 |
| | H-region: length 10; peak value 4.03 |
| | PSG score: −0.38 |
| GvH: | von Heijne's method for signal seq. recognition |
| | GvH score (threshold: −2.1): −3.06 |
| | possible cleavage site: between 32 and 33 |

>>> Seems to have no N-terminal signal peptide

| ALOM: | Klein et al's method for TM region allocation |
|---|---|
| | Init position for calculation: 1 |
| | Tentative number of TMS(s) for the threshold 0.5: 0 |
| | Number of TMS(s) for threshold 0.5: 0 |
| | PERIPHERAL Likelihood = 2.38 (at 72) |
| | ALOM score: 0.05 (number of TMSs: 0) |

MITDISC: discrimination of mitochondrial targeting seq

| | | | |
|---|---|---|---|
| R content: | 1 | Hyd Moment(75): | 8.51 |
| Hyd Moment(95): | 7.65 | G content: | 2 |
| D/E content: | 2 | S/T content: | 8 |
| Score: −4.16 | | | |

Gavel: prediction of cleavage sites for mitochondrial preseq

R-2 motif at 14 FRF|LG

NUCDISC: discrimination of nuclear localization signals

pat4: none
pat7: none
bipartite: none
content of basic residues: 10.5%
NLS Score: −0.47

KDEL: ER retention motif in the C-terminus: none
ER Membrane Retention Signals:

XXRR-like motif in the N-terminus: GFRF

none
SKL: peroxisomal targeting signal in the C-terminus: none
PTS2: 2nd peroxisomal targeting signal: none
VAC: possible vacuolar targeting motif: none
RNA-binding motif: none
Actinin-type actin-binding motif:

type 1: none
type 2: none

NMYR: N-myristoylation pattern: none
Prenylation motif: none
memYQRL: transport motif from cell surface to Golgi: none
Tyrosines in the tail: none
Dileucine motif in the tail: none
checking 63 PROSITE DNA binding motifs: none
checking 71 PROSITE ribosomal protein motifs: none
checking 33 PROSITE prokaryotic DNA binding motifs:

Bacterial regulatory proteins, gntR family signature
(PS00043):

*** found ***

VASIILHKDFKRANMDNDIALL at 54

NNCN: Reinhardt's method for Cytoplasmic/Nuclear discrimination

Prediction: cytoplasmic
Reliability: 70.6

COIL: Lupas's algorithm to detect coiled-coil regions
total: 0 residues
Final Results (k = 9/23):

```
43.5%: mitochondrial
34.8%: cytoplasmic
  8.7%: peroxisomal
  4.3%: vacuolar
  4.3%: nuclear
  4.3%: endoplasmic reticulum
```

>> prediction for CG51752-02 is mit (k = 23)

[0454] A search of the NOV19a protein against the Geneseq database, a proprietary database that contains sequences published in patents and patent publication, yielded several homologous proteins shown in Table 19D.

TABLE 19D
Geneseq Results for NOV19a

| | | NOV19a | Identities/ | |
|---|---|---|---|---|
| | | Residues/ | Similarities for | |
| Geneseq | Protein/Organism/Length | Match | the Matched | Expect |
| Identifier | [Patent #, Date] | Residues | Region | Value |
| AAU08686 | Human FCTR6b polypeptide | 1 . . . 267 | 267/267 (100%) | e-160 |
| | sequence - Homo sapiens, 267 | 1 . . . 267 | 267/267 (100%) | |
| | aa. [WO200166747-A2, 13-SEP- | | | |
| | 2001] | | | |
| AAU08685 | Human FCTR6a polypeptide | 1 . . . 267 | 265/267 (99%) | e-159 |
| | sequence - Homo sapiens, 267 | 1 . . . 267 | 266/267 (99%) | |
| | aa. [WO200166747-A2, 13-SEP- | | | |
| | 2001] | | | |
| AAU82737 | Amino acid sequence of novel | 32 . . . 267 | 235/236 (99%) | e-141 |
| | human protease #36 - Homo | 117 . . . 352 | 235/236 (99%) | |
| | sapiens, 352 aa. [WO200200860- | | | |
| | A2, 03-JAN-2002] | | | |
| AAB03160 | Human trypsin family serine | 32 . . . 267 | 233/236 (98%) | e-140 |
| | protease Tespec PRO-3 - Homo | 117 . . . 352 | 234/236 (98%) | |
| | sapiens, 352 aa. [WO200026352- | | | |
| | A1, 11-MAY-2000] | | | |
| AAU76529 | Human LP polypeptide #2 - | 32 . . . 249 | 214/218 (98%) | e-127 |
| | Homo sapiens, 356 aa. | 117 . . . 334 | 215/218 (98%) | |
| | [WO200216578-A2, 28-FEB- | | | |
| | 2002] | | | |

[0455] In a BLAST search of public sequence databases, the NOV19a protein was found to have homology to the proteins shown in the BLASTP data in Table 19E.

TABLE 19E
Public BLASTP Results for NOV19a

| | | NOV19a | Identities/ | |
|---|---|---|---|---|
| Protein | | Residues/ | Similarities for | |
| Accession | | Match | the Matched | Expect |
| Number | Protein/Organism/Length | Residues | Portion | Value |
| CAC88680 | Sequence 22 from Patent | 1 . . . 267 | 267/267 (100%) | e-160 |
| | WO0166747 - Homo sapiens | 1 . . . 267 | 267/267 (100%) | |
| | (Human), 267 aa. | | | |
| CAC88679 | Sequence 20 from Patent | 1 . . . 267 | 265/267 (99%) | e-159 |
| | WO0166747 - Homo sapiens | 1 . . . 267 | 266/267 (99%) | |
| | (Human), 267 aa. | | | |
| Q9MZZ6 | Hypothetical 29.5 kDa protein - | 1 . . . 267 | 248/267 (92%) | e-146 |
| | Macaca fascicularis (Crab eating | 1 . . . 267 | 251/267 (93%) | |
| | macaque) (Cynomolgus | | | |
| | monkey), 267 aa. | | | |
| CAD28997 | Sequence 3 from Patent | 32 . . . 249 | 214/218 (98%) | e-127 |
| | WO0216578 - Homo sapiens | 117 . . . 334 | 215/218 (98%) | |
| | (Human), 356 aa. | | | |
| AAH49714 | 1700049K14Rik protein - Mus | 27 . . . 225 | 87/200 (43%) | 5e-45 |
| | musculus (Mouse), 321 aa. | 98 . . . 297 | 119/200 (59%) | |

[0456] PFam analysis indicates that the NOV19a protein contains the domains shown in the Table 19F.

TABLE 19F
Domain Analysis of NOV19a

| | | Identities/ | |
|---|---|---|---|
| Pfam | | Similarities | Expect |
| Domain | NOV19a Match Region | for the Matched Region | Value |
| trypsin | 5 . . . 210 | 75/267 (28%) | 8.6e-34 |
| | | 153/267 (57%) | |

### Example 20

[0457] The NOV20 clone was analyzed, and the nucleotide and encoded polypeptide sequences are shown in Table 20A.

TABLE 20A
NOV20 Sequence Analysis

| | | |
|---|---|---|
| NOV20a, GG51914-02 | SEQ ID NO: 271 | 3261 bp |
| DNA Sequence | ORF Start: ATG at 92 | ORF Stop: TGA at 3146 |

AGCGGGGCTCTGGGGTCTGGGGGCATTGCTCAGCGGTGCTAGGCTGGCGCGGCTTGAGCCGCCGCCGG
ACTGACAGCTCGGTCTGCGGACCATGGAGACCTGCGCCGGTCCACACCCGCTGCGCCTCTTCCTCTGC
CGGATGCAGCTCTGTCTCGCGCTGCTTTTGGGACCCTGGCGGCCTGGGACCGCCGAGGAAGTTATCCT
CCTGGATTCCAAAGCCTCCCAGGCCGAGCTGGGCTGGACTGCACTGCCAAGTAATGGGTGGGAGGAGA
TCAGCGGCGTGGATGAACACGACCGTCCCATCCGCACGTACCAAGTGTGCAATGTGCTGGAGCCCAAC
CAGGACAACTGGCTGCAGACTGGCTGGATAAGCCGTGGCCGCGGGCAGCGCATCTTCGTGGAACTGCA
GTTCACACTCCGTGACTGCAGCAGCATCCCTGGCGCCGCGGGTACCTGCAAGGAGACCTTCAACGTCT
ACTACCTGGAAACTGAGGCCGACCTGGGCCGTGGGCGTCCCCGCCTAGGCGGCAGCCGGCCCCGCAAA
ATCGACACGATCGCGGCGGACGAGAGCTTCACGCAGGGCGACCTGGGTGAGCGCAAGATGAAGCTGAA
CACAGAGGTGCGCGAGATCGGACCGCTCAGCCGGCGGGGTTTCCACCTGGCCTTTCAGGACGTGGGCG
CATGCGTGGCGCTTGTCTCGGTGCGCGTCTACTACAAGCAGTGCCGCGCCACCGTGCGGGGCCTGGCC
ACGTTCCCAGCCACCGCAGCCGAGAGCGCCTTCTCCACACTGGTGGAAGTGGCCGGAACGTGCGTGGC
GCACTCGGAAGGGGAGCCTGGCAGCCCCCCACGCATGCACTGCGGCGCCGACGGCGAGTGGCTGGTGC
CTGTGGGCCGCTGCAGCTGCAGCGCGGGATTCCAGGAGCGTGGTGACTTCTGCGAATGTCCCCCAGGG
TTTTACAAGGTGTCCCCGCGGCGGCCCCTCTGCTCACCGTGCCCAGAGCACAGCCGGGCCCTGGAAAA
CGCCTCCACCTTCTGCGTGTGCCAGGACAGCTATGCGCGCTCACCCACCGACCCGCCCTCGGCTTCCT
GCACCCGTCCGCCGTCGGCGCCGCGGGACCTGCAGTACAGCCTGAGCCGCTCGCCGCTGGTGCTGCGA
CTGCGCTGGCTGCCGCCGGCCGACTCGGGAGGCCGCTCGGACGTCACCTACTCGCTGCTGTGCCTGCG
CTGCGGCCGCGAGGGCCCGGCGGGCGCCTGCGAGCCGTGCGGGCCGCGCGTGGCCTTCCTACCGCGCC
AGGCAGGGCTGCGGGAGCGAGCCGCCACGCTGCTGCACCTGCGGCCCGGGGCGCGCTACACCGTGCGC
GTGGCCGTGCTCAACGGCGTCTCGTCAGCGCCCTGGGAGGAGGATGAGATCCGCAGGGACCGAGTGGA
ACCCCAGAGCGTGTCCCTGTCGTGGCGGGAGCCCATCCCTGCCGGAGCCCCTGGGGCCAATGACACGG
AGTACGAGATCCGATACTACGAGAAGGGTCAGAGTGAGCAGACTTACTCCATGGTGAAGACGGGGGCG
CCCACAGTCACCGTCACCAACCTGAAGCCGGCTACCCGCTACGTCTTTCAGATCCGGGCCGCTTCCCC
GGGGCCATCCTGGGAGGCCCAGAGTTTTAACCCCAGCATTGAAGTACAGACCCTGGGGGAGGCTGCCT
CAGGGTCCAGGGACCAGAGCCCCGCCATTGTCGTCACCGTAGTGACCATCTCGGCCCTCCTCGTCCTG
GGCTCCGTGATGAGTGTGCTGGCCATTTGGAGGAGGCCCTGCAGCTATGGCAAAGGAGGAGGGGATGC
CCATGATGAAGAGGAGCTGTATTTCCACTTCAAAGTCCCAACACGTCGCACATTCCTGGACCCCCAGA
GCTGTGGGGACCTGCTGCAGGCTGTGCATCTGTTCGCCAAGGAACTGGATGCGAAAAGCGTCACGCTG
GAGAGGAGCCTTGGAGGAGGCAAGCTGGGCGCCCAGGAAGCCTTGTCCCCATCTGGAAGCCTCACCCA
CTCTATAGGCCCCGCCCCTACTCTGTCCACACCTCTATCCGGGCGGTTTGGGGAGCTGTGCTGTGGCT
GCTTGCAGCTCCCCGGTCGCCAGGAGCTGCTCGTAGCCGTGCATATGCTGAGGGACAGCGCCTCCGAC
TCACAGAGGCTCGGCTTCCTGGCCGAGGCCCTCACGCTGGGCCAGTTTGACCATAGCCACATCGTGCG
GCTGGAGGGCGTTGTTACCCGAGGTAGGGGAAGCACCTTGATGATTGTCACCGAGTACATGAGCCATG
GGGCCCTGGACGGCTTCCTCAGGCGGCACGAGGGGCAGCTGGTGGCTGGGCAACTGATGGGGTTGCTG
CCTGGGCTGGCATCAGCCATGAAGTATCTGTCAGAGATGGGCTACGTTCACCGGGGCCTGGCAGCTCG
CCATGTGCTGGTCAGCAGCGACCTTGTCTGCAAGATCTCTGGCTTCGGGCGGGGCCCCCGGGACCGAT
CAGAGGCTGTCTACACCACTGGCCGGAGCCCAGCGCTATGGGCCGCTCCCGAGACACTTCAGTTTGGC
CACTTCAGCTCTGCCAGTGACGTGTGGAGCTTCGGCATCATCATGTGGGAGGTGATGGCCTTTGGGGA
GCGGCCTTACTGGGACATGTCTGGCCAAGACGTGATCAAGGCTGTGGAGGATGGCTTCCGGCTGCCAC
CCCCCAGGAACTGTCCTAACCTTCTGCACCGACTAATGCTCGACTGCTGGCAGAAGGACCCAGGTGAG
CGGCCCAGGTTCTCCCAGATCCACAGCATCCTGAGCAAGATGGTGCAGGACCCAGAGCCCCCCAAGTG
TGCCCTGACTACCTGTCCCAGGCCTCCCACCCCACTAGCGGACCGTGCCTTCTCCACCTTCCCCTCCT
TTGGCTCTGTGGGCGCGTGGCTGGAGGCCCTGGACCTGTGCCGCTACAAGGACAGCTTCGCGGCTGCT
GGCTATGGGAGCCTGGAGGCCGTGGCCGAGATGACTGCCCAGGACCTGGTGAGCCTAGGCATCTCTTT
GGCTGAACATCGAGAGGCCCTCCTCAGCGGGATCAGCGCCCTGCAGGCACGAGTGCTCCAGCTGCAGG
GCCAGGGGGTGCAGGTGTGAGTGGACCCCATTCTTCCAAGGCAGGACTCCGGTGGGGGTCCAGTCCCC
CAGCCCTGCCCAAGGACCGTGGCAAGCTGCGCTCCAGCAGTGTGGGAGGGAGCGCTCTCTTCCTC

| | | | |
|---|---|---|---|
| NOV20a, CG51914-02 | SEQ ID NO: 272 | 1018 aa | MW at 110851.8kD |
| Protein Sequence | | | |

METCAGPHPLRLFLCRNQLCLALLLGPWRPGTAEEVILLDSKASQAELGWTALPSNGWEEISGVDEHD
RPIRTYQVCNVLEPNQDNWLQTGWISRGRGQRIFVELQFTLRDCSSIPGAAGTCKETFNVYYLETEAD
LGRGRPRLGGSRPRKIDTIAADESFTQGDLGERKMKLNTEVREIGPLSRRGFHLAFQDVGACVALVSV
RVYYKQCRATVRGLATFPATAAESAFSTLVEVAGTCVAHSEGEPGSPPRMHCGADGEWLVPVGRCSCS
AGFQERGDFCECPPGFYKVSPRRPLCSPCPEHSRALENASTFCVCQDSYARSPTDPPSASCTRPPSAP
RDLQYSLSRSPLVLRLRWLPPADSGGRSDVTYSLLCLRCGREGPAGACEPCGPRVAFLPRQAGLRYYE
ATLLHLRPGARYTVRVAVLNGVSSAPWEEDEIRRDRVEPQSVSLSWREPIPAGAPGANDTEYEIRYYE
KGQSEQTYSMVKTGAPTVTVTNLKPATRYVFQIRAASPGPSWEAQSFNPSIEVQTLGEAASGSRDQSP
AIVVTVVTISALLVLGSVMSVLAIWRRPCSYGKGGGDAHDEEELYFHFKVPTRRTFLDPQSCGDLLQA
VHLFAKELDAKSVTLERSLGGGKLGAQEALSPSGSLTHSIGPAPTLSTPLSGRFGELCCGCLQLPGRQ
ELLVAVHMLRDSASDSQRLGFLAEALTLGQFDHSHIVRLEGVVTRGRGSTLMIVTEYMSHGALDGFLR
RHEGQLVAGQLMGLLPGLASAMKYLSEMGYVHRGLAARHVLVSSDLVCKISGFGRGPRDRSEAVYTTG
RSPALWAAPETLQFGHFSSASDVWSFGIIMWEVMAFGERPYWDMSGQDVIKAVEDGFRLPPPRNCPNL
LHRLMLDCWQKDPGERPRFSQIHSILSKMVQDPEPPKCALTTCPRPPTPLADRAFSTFPSFGSVGAWL
EALDLCRYKDSFAAAGYGSLEAVAEMTAQDLVSLGISLAEHREALLSGISALQARVLQLQGQGVQV

| | | |
|---|---|---|
| NOV20b, GG51914-01 | SEQ ID NO: 273 | 3003 bp |
| DNA Sequence | ORF Start: ATG at 1 | ORF Stop: TGA at 3001 |

ATGGTATTGACAACTGCTATACCAGCCTGGCTTCTTAGCTGTTCCCTCCCACTCTCATCCTGGGCCCA
CCATGCGACACCGCCCCTCCGTCTAGTAGTTATCCTCCTGGATTCCAAAGCCTCCCAGGCCGAGCTGG
GCTGGACTGCACTGCCAAGTAATGGGTGGGAGGAGATCAGCGGCGTGGATGAACACGACCGTCCCATC
CGCACGTACCAAGTGTGCAATGTGCTGGAGCCCAACCAGGACAACTGGCTGCAGACTGGCTGGATAAG
CCGTGGCCGCGGGCAGCGCATCTTCGTGGAACTGCAGTTCACACTCCGTGACTGCAGCAGCATCCCTG
GCGCCGCGGGTACCTGCAAGGAGACCTTCAACGTCTACTACCTGGAAACTGAGGCCGACCTGGGCCGT
GGGCGTCCCCGCCTAGGCGGCAGCCGGCCCCGCAAAATCGACACGATCGCGGCGGACGAGAGCTTCAC
GCAGGGCGACCTGGGTGAGCGCAAGATGAAGCTGAACACAGAGGTGCGCGAGATCGGACCGCTCAGCC
GGCGGGGTTTCCACCTGGCCTTTCAGGACGTGGGCGCATGCGTGGCGCTTGTCTCGGTGCGCGTCTAC
TACAAGCAGTGCCGCGCCACCGTGCGGGGCCTGGCCACGTTCCCAGCCACCGCAGCCGAGAGCGCCTT
CTCCACACTGGTGGAAGTGGCCGGAACGTGCGTGGCGCACTCGGAAGGGGAGCCTGGCAGCCCCCCAC
GCATGCACTGCGGCGCCGACGGCGAGTGGCTGGTGCCTGTGGGCCGCTGCAGCTGCAGCGCGGGATTC
CAGGAGCGTGGTGACTTCTGCGAATGTCCCCCAGGGTTTTACAAGGTGTCCCCGCGGCGGCCCCTCTG
CTCACCGTGCCCAGAGCACAGCCGGGCCCTGGAAAACGCCTCCACCTTCTGCGTGTGCCAGGACAGCT
ATGCGCGCTCACCCACCGACCCGCCCTCGGCTTCCTGCACCCGTCCGCCGTCGGCGCCGCGGGACCTG
CAGTACAGCCTGAGCCGCTCGCCGCTGGTGCTGCGACTGCGCTGGCTGCCGCCGGCCGACTCGGGAGG
CCGCTCGGACGTCACCTACTCGCTGCTGTGCCTGCGCTGCGGCCGCGAGGGCCCGGCGGGCGCCTGCG
AGCCGTGCGGGCCGCGCGTGGCCTTCCTACCGCGCCAGGCAGGGCTGCGGGAGCGAGCCGCCACGCTG
CTGCACCTGCGGCCCGGCGCGCGCTACACCGTGCGCGTGGCCGCGCTCAACGGCGTCTCGGGCCCGGC
GGCCGCCGCGGGAACCACCTACGCGCAGGTCACCGTCTCCACCGGGCCCTCAGCGCCCTGGGAGGAGG
ATGAGATCCGCAGGGAACCGAGTGGAACCCCAGAGCGTGTCCCTGTCGTGGCGGGAGCCCATCCTGCC
GGAGCCCCTGGGGCCAATGACACGGAGTACGAGATCCGATACTACGAGAAGCAGAGTGAGCAGACTTA
CTCCATGGTGAAGACAGGGGCGCCCACAGTCACCGTCACCAACCTGAAGCCGGCTACCCGCTACGTCT
TTCAGATCCGGGCCGCTTCCCCGGGGCCATCCTGGGAGGCCCAGAGTTTTAACCCCAGCATTGAAGTA
CAGACCCTGGGGGAGGCTGCCTCAGGGTCCAGGGACCAGAGCCCCGCCATTGTCGTCACCGTAGTGAC
CATCTCGGCCCTCCTCGTCCTGGGCTCCGTGATGAGTGTGCTGGCCATTTGGAGGAGGAGGCCCTGCA
GCTATGGCAAAGGAGGAGGGGATGCCCATGATGAAGAGGAGCTGTATTTCCACTGTAAAGTCCCAACA
CGTCGCACATTCCTGGACCCCCAGAGCTGTGGGGACCTGCTGCAGGCTGTGCATCTGTTCGCCAAGGA
ACTGGATGCGAAAAGCGTCACGCTGGAGAGGAGCCTTGGAGGAGGCAAGTTTGGGGAGCTGTGCTGTG
GCTGCTTGCAGCTCCCCGGTCGCCAGGAGCTGCTCGTAGCCGTGCACATGCTGAGGGACAGCGCCTCC
GACTCACAGAGGCTCGGCTTCCTGGCCGAGGCCCTCACGCTGGGCCAGTTTGACCATAGCCACATCGT
GCGGCTGGAGGGCGTTGTTACCCGAGGTAGGACCTTGATGATTGTCACCGAGTACATGAGCCATGGGG
CCCTGGACGGCTTCCTCAGGCACGAGGGGCAGCTGGTGGCTGGGCAACTGATGGGGTTGCTGCCTGGG
CTGGCATCAGCCATGAAGTATCTGTCAGAGATGGGCTACGTTCACCGGGGCCTGGCAGCTCGCCATGT
GCTGGTCAGCAGCGACCTTGTCTGCAAGATCTCTGGCTTCGGGCGGGGCCCCCGGGACCGATCAGAGG
CTGTCTACACCACTGGCCGGAGCCCAGCGCTATGGGCCGCTCCCGAGACACTTCAGTTTGGCCACTTC
AGCTCTGCCAGTGACGTGTGGAGCTTCGGCATCATCATGTGGGAGGTGATGGCCTTTGGGGAGCGGCC
TTACTGGGACATGTCTGGCCAAGACGTGAAGGCTGTGGAGGATGGCTTCCGGCTGCCACCCCCCAGGA
ACTGTCCTAACCTTCTGCACCGACTAATGCTCGACTGCTGGCAGAAGGACCCAGGTGAGCGGCCCAGG
TTCTCCCAGATCCACAGCATCCTGAGCAAGATGGTGCAGGACCCAGAGCCCCCCAAGTGTGCCCTGAC
TACCTGTCCCAGGCCTCCCACTCCACTAGCCGACCGTGCCTTCTCCACCTTCCCCTCCTTTGGCTCTG
TGGGCGCGTGGCTGGAGGCCCTGGACCTGTGCCGCTACAAGGACAGCTTCGCGGCTGCTGGCTATGGG
AGCCTGGAGGCCGTGGCCGAGATGACTGCCCAGGACCTGGTGAGCCTAGGCATCTCTTTGGCTGAACA
TCGAGAGGCCCTCCTCAGCGGGATCAGCGCCCTGCAGGCACGAGTGCTCCAGCTGCAGGGCCAGGGGG
TGCAGGTGTGA

| | | | |
|---|---|---|---|
| NOV20b, CG51914-01 | SEQ ID NO: 274 | 1000 aa | MW at 108840.5kD |
| Protein Sequence | | | |

MVLTTAIPAWLLSCSLPLSSWAHHATPPLRLVVILLDSKASQAELGWTALPSNGWEEISGVDEHDRPI
RTYQVCNVLEPNQDNWLQTGWISRGRGQRIFVELQFTLRDCSSIPGAAGTCKETFNVYYLETEADLGR
GRPRLGGSRPRKIDTIAADESFTQGDLGERKMKLNTEVREIGPLSRRGFHLAFQDVGACVALVSVRVY
YKQCRATVRGLATFPATAAESAFSTLVEVAGTCVAHSEGEPGSPPRMHCGADGEWLVPVGRCSCSAGF
QERGDFCECPPGFYKVSPRRPLCSPCPEHSRALENASTFCVCQDSYARSPTDPPSASCTRPPSAPRDL
QYSLSRSPLVLRLRWLPPADSGGRSDVTYSLLCLRCGREGPAGACEPCGPRVAFLPRQAGLRERAATL
LHLRPGARYTVRVAALNGVSGPAAAAGTTYAQVTVSTGPSAPWEEDEIRRDRVEPQSVSLSWREPIPA
GAPGANDTEYEIRYYEKQSEQTYSMVKTGAPTVTVTNLKPATRYVFQIRAASPGPSWEAQSFNPSIEV
QTLGEAASGSRDQSPAIVVTVVTISALLVLGSVMSVLAIWRRRPCSYGKGGGDAHDEEELYFHCKVPT
RRTFLDPQSCGDLLQAVHLFAKELDAKSVTLERSLGGGKFGELCCGCLQLPGRQELLVAVHMLRDSAS
DSQRLGFLAEALTLGQFDHSHIVRLEGVVTRGRTLMIVTEYMSHGALDGFLRHEGQLVAGQLMGLLPG
LASANKYLSEMGYVHRGLAARHVLVSSDLVCKISGFGRGPRDRSEAVYTTGRSPALWAAPETLQFGHF
SSASDVWSFGIIMWEVMAFGERPYWDMSGQDVKAVEDGFRLPPPRNCPNLLHRLMLDCWQKDPGERPR
FSQIHSILSKMVQDPEPPKCALTTCPRPPTPLADRAFSTFPSFGSVGAWLEALDLCRYKDSFAAAGYG
SLEAVAEMTAQDLVSLGISLABHREALLSGISALQARVLQLQGQGVQV

[0458] A ClustalW comparison of the above protein sequences yields the following sequence alignment shown in Table 20B.

TABLE 20B
Comparison of the NOV20 protein sequences.

NOV20a METCAGPHPLRLFLCRMQLCLALLLGPWRPGTAEEVILLDSKASQAELGWTALPSNGWEE
NOV20b -MVLTTAIPAWLLSC--SLPLSSWAHHATPPLRLVVILLDSKASQAELGWTALPSNGWEE
NOV20a ISGVDEHDRPIRTYQVCNVLEPNQDNWLQTGWISRGRGQRIFVELQFTLRDCSSIPGAAG
NOV20b ISGVDEHDRPIRTYQVCNVLEPNQDNWLQTGWISRGRGQRIFVELQFTLRDCSSIPGAAG
NOV20a TCKETFNVYYLETEADLGRGRPRLGGSRPRKIDTIAADESFTQGDLGERKMKLNTEVREI
NOV20b TCKETFNVYYLETEADLGRGRPRLGGSRPRKIDTIAADESFTQGDLGERKMKLNTEVREI
NOV20a GPLSRRGFHLAFQDVGACVALVSVRVYYKQCRATVRGLATFPATAAESAFSTLVEVAGTC
NOV20b GPLSRRGFHLAFQDVGACVALVSVRVYYKQCRATVRGLATFPATAAESAFSTLVEVAGTC
NOV20a VAHSEGEPGSPPRNHCGADGEWLVPVGRCSCSAGFQERGDFCECPPGFYKVSPRRPLCSP
NOV20b VAHSEGEPGSPPRMHCGADGEWLVPVGRCSCSAGFQERGDFCECPPGFYKVSPRRPLCSP
NOV20a CPEHSRALENASTFCVCQDSYARSPTDPPSASCTRPPSAPRDLQYSLSRSPLVLRLRWLP
NOV20b CPEHSRALENASTFCVCQDSYARSPTDPPSASCTRPPSAPRDLQYSLSRSPLVLRLRWLP
NOV20a PADSGGRSDVTYSLLCLRCGREGPAGACEPCGPRVAFLPRQAGLRERAATLLHLRPGARY
NOV20b PADSGGRSDVTYSLLCLRCGREGPAGACEPCGPRVAFLPRQAGLRERAATLLHLRPGARY
NOV20a TVRVAVLNGVS-------------------SAPWEEDEIRRDRVEPQSVSLSWREPIPAG
NOV20b TVRVAALNGVSGPAAAAGTTYAQVTVSTGPSAPWEEDEIRRDRVEPQSVSLSWREPIPAG
NOV20a APGANDTEYEIRYYEKGQSEQTYSMVKTGAPTVTVTNLKPATRYVFQIRAASPGPSWEAQ
NOV20b APGANDTEYEIRYYEK-QSEQTYSMVKTGAPTVTVTNLKPATRYVFQIRAASPGPSWEAQ
NOV20a SFNPSIEVQTLGEAASGSRDQSPAIVVTVVTISALLVLGSVMSVLAIWRR-PCSYGKGGG
NOV20b SFNPSIEVQTLGEAASGSRDQSPAIVVTVVTISALLVLGSVMSVLAIWRRRPCSYGKGGG
NOV20a DAHDEEELYFHFKVPTRRTFLDPQSCGDLLQAVHLFAKELDAKSVTLERSLGGGKLGAQE
NOV20b DAHDEEELYFHFKVPTRRTFLDPQSCGDLLQAVHLFAKELDAKSVTLERSLGGG------
NOV20a ALSPSGSLTHSIGPAPTLSTPLSGRFGELCCGCLQLPGRQELLVAVHMLRDSASDSQRLG
NOV20b ------------------------KFGELCCGCLQLPGRQELLVAVHMLRDSASDSQRLG
NOV20a FLAEALTLGQFDHSHIVRLEGVVTRGRGSTLMIVTEYMSHGALDGFLRRHEGQLVAGQLM
NOV20b FLAEALTLGQFDHSHIVRLEGVVTRGR--TLMIVTEYMSHGALDGFLR-HEGQLVAGQLM
NOV20a GLLPGLASAMKYLSEMGYVHRGLAARHVLVSSDLVCKISGFGRGPRDRSEAVYTTGRSPA
NOV20b GLLPGLASAMKYLSEMGYVHRGLAARHVLVSSDLVCKISGFGRGPRDRSEAVYTTGRSPA
NOV20a LWAAPETLQFGHFSSASDVWSFGIIMWEVMAFGERPYWDMSGQDVIKAVEDGFRLPPPRN
NOV20b LWAAPETLQFGHFSSASDVWSFGIIMWEVMAFGERPYWDMSGQD-VKAVEDGFRLPPPRN
NOV20a CPNLLHRLMLDCWQKDPGERPRFSQIHSILSKMVQDPEPPKCALTTCPRPPTPLADRAFS
NOV20b CPNLLHRLMLDCWQKDPGERPRFSQIHSILSKMVQDPEPPKCALTTCPRPPTPLADRAFS
NOV20a TFPSFGSVGAWLEALDLCRYKDSFAAAGYGSLEAVAEMTAQDLVSLGISLAEHREALLSG
NOV20b TFPSFGSVGAWLEALDLCRYWDSFAAAGYGSLEAVAEMTAQDLVSLGISLAEHREALLSG
NOV20a ISALQARVLQLQGQGVQV
NOV20b ISALQARVLQLQGQGVQV
NOV20a (SEQ ID NO: 272)
NOV20b (SEQ ID NO: 274)

[0459] Further analysis of the NOV20a protein yielded the following properties shown in Table 20C.

TABLE 20C
Protein Sequence Properties NOV20a

SignalP analysis: Cleavage site between residues 34 and 35
PSORT II analysis:

| PSG: | a new signal peptide prediction method |
|---|---|
| | N-region: length 11; pos.chg 1; neg.chg 1 |
| | H-region: length 4; peak value 0.56 |
| | PSG score: −3.84 |
| GvH: | von Heijne's method for signal seq. recognition |
| | GvH score (threshold: −2.1): 0.06 |
| | possible cleavage site: between 33 and 34 |

>>> Seems to have no N-terminal signal peptide

| ALOM: | Klein et al's method for TM region allocation | |
|---|---|---|
| | Init position for calculation: 1 | |
| | Tentative number of TMS(s) for the threshold 0.5: 3 | |
| | Number of TMS(s) for threshold 0.5: 1 | |
| | INTEGRAL Likelihood = −9.08 | Transmembrane 546-562 |

| | PERIPHERAL Likelihood = 0.85 (at 754) |
|---|---|
| | ALOM score: −9.08 (number of TMSs: 1) |
| MTOP: | Prediction of membrane topology (Hartmann et al.) |
| | Center position for calculation: 553 |
| | Charge difference: 3.5 C( 1.5) - N(-2.0) |
| | C > N: C-terminal side will be inside |

>>> membrane topology: type 1b (cytoplasmic tail 546 to 1018)
MITDISC: discrimination of mitochondrial targeting seq

| | | | |
|---|---|---|---|
| R content: | 3 | Hyd Moment(75): | 5.96 |
| Hyd Moment(95): | 3.64 | G content: | 3 |
| D/E content: | 2 | S/T content: | 2 |
| Score: −5.44 | | | |

Gavel: prediction of cleavage sites for mitochondrial preseq

R-2 motif at 39 WRP|GT

NUCDISC: discrimination of nuclear localization signals

pat4: RPRK (4) at 148
pat7: none
bipartite: none
content of basic residues: 10.2%
NLS Score: −0.22

KDEL: ER retention motif in the C-terminus: none
ER Membrane Retention Signals: none
SKL: peroxisomal targeting signal in the C-terminus: none
PTS2: 2nd peroxisomal targeting signal: found

RLFLCRMQL at 11

VAC: possible vacuolar targeting motif: none
RNA-binding motif: none
Actinin-type actin-binding motif:

type 1: none
type 2: none

NMYR: N-myristoylation pattern: none
Prenylation motif: none
memYQRL: transport motif from cell surface to Golgi: none
Tyrosines in the tail: too long tail
Dileucine motif in the tail: found

LL at 556
LL at 609
LL at 682
LL at 762
LL at 884
LL at 997

checking 63 PROSITE DNA binding motifs:

```
Leucine zipper pattern (PS00029):  *** found ***
    LSGRFGELCCGCLQLPGRQELL at 662
    LVSLGISLAEHREALLSGISAL at 983
```

none
checking 71 PROSITE ribosomal protein motifs: none
checking 33 PROSITE prokaryotic DNA binding motifs: none

| NNCN: | Reinhardt's method for Cytoplasmic/Nuclear discrimination |
|---|---|
| | Prediction: cytoplasmic |
| | Reliability: 70.6 |
| COIL: | Lupas's algorithm to detect coiled-coil regions |
| | total: 0 residues |

--------------------------
Final Results (k = 9/23):

```
39.1%: nuclear
21.7%: cytoplasmic
17.4%: mitochondrial
  8.7%: vesicles of secretory system
  4.3%: vacuolar
  4.3%: peroxisomal
  4.3%: endoplasmic reticulum
```

>> prediction for CG51914-02 is nuc (k = 23)

[0460] A search of the NOV20a protein against the Geneseq database, a proprietary database that contains sequences published in patents and patent publication, yielded several homologous proteins shown in Table 20D.

TABLE 20D
Geneseq Results for NOV20a

| | | NOV20a | Identities/ | |
|---|---|---|---|---|
| | | Residues/ | Similarities for | |
| Geneseq | Protein/Organism/Length | Match | the Matched | Expect |
| Identifier | [Patent #, Date] | Residues | Region | Value |
| ABB98843 | Human NEPHA - Homo | 1 . . . 1018 | 984/1040 (94%) | 0.0 |
| | sapiens, 1008 aa. | 1 . . . 1008 | 984/1040 (94%) | |
| | [WO200283735-A1, 24-OCT- | | | |
| | 2002] | | | |
| AAE19158 | Human kinase polypeptide | 1 . . . 1018 | 973/1041 (93%) | 0.0 |
| | (PKIN-16) - Homo sapiens, | 1 . . . 1009 | 975/1041 (93%) | |
| | 1009 aa. [WO200208399-A2, | | | |
| | 31-JAN-2002] | | | |
| AAU03553 | Human protein kinase #53 - | 1 . . . 1018 | 973/1041 (93%) | 0.0 |
| | Homo sapiens, 1009 aa. | 1 . . . 1009 | 975/1041 (93%) | |
| | [WO200138503-A2, 31-MAY- | | | |
| | 2001] | | | |
| AAU76874 | Human EphA full length kinase - | 37 . . . 1018 | 948/1004 (94%) | 0.0 |
| | Homo sapiens, 974 aa. | 1 . . . 974 | 948/1004 (94%) | |
| | [WO200208253-A2, 31-JAN- | | | |
| | 2002] | | | |
| AAM47209 | Human NOV3 protein - Homo | 36 . . . 1018 | 946/1003 (94%) | 0.0 |
| | sapiens, 1000 aa. | 33 . . . 1000 | 946/1003 (94%) | |
| | [WO200174851-A2, 11-OCT- | | | |
| | 2001] | | | |

[0461] In a BLAST search of public sequence databases, the NOV20a protein was found to have homology to the proteins shown in the BLASTP data in Table 20E.

TABLE 20E
Public BLASTP Results for NOV20a

| | | NOV20a | Identities/ | |
|---|---|---|---|---|
| Protein | | Residues/ | Similarities for | |
| Accession | | Match | the Matched | Expect |
| Number | Protein/Organism/Length | Residues | Portion | Value |
| CAD23752 | Sequence 1 from Patent | 37 . . . 1018 | 948/1004 (94%) | 0.0 |
| | WO0208253 - Homo sapiens | 1 . . . 974 | 948/1004 (94%) | |
| | (Human), 974 aa (fragment). | | | |
| CAD13085 | Sequence 5 from Patent | 36 . . . 1018 | 946/1003 (94%) | 0.0 |
| | WO0174851 - Homo sapiens | 33 . . . 1000 | 946/1003 (94%) | |
| | (Human), 1000 aa. | | | |
| CAD23753 | Sequence 3 from Patent | 37 . . . 1018 | 947/1052 (90%) | 0.0 |
| | WO0208253 - Homo sapiens | 1 . . . 1022 | 947/1052 (90%) | |
| | (Human), 1022 aa (fragment). | | | |
| CAD23754 | Sequence 5 from Patent | 37 . . . 663 | 625/647 (96%) | 0.0 |
| | WO0208253 - Homo sapiens | 1 . . . 647 | 625/647 (96%) | |
| | (Human), 647 aa (fragment). | | | |
| CAD23755 | Sequence 7 from Patent | 37 . . . 663 | 624/695 (89%) | 0.0 |
| | WO0208253 - Homo sapiens | 1 . . . 695 | 624/695 (89%) | |
| | (Human), 695 aa (fragment). | | | |

[0462] PFam analysis indicates that the NOV20a protein contains the domains shown in the Table 20F.

TABLE 20F
Domain Analysis of NOV20a

| | | Identities/ | |
|---|---|---|---|
| Pfam | | Similarities for | Expect |
| Domain | NOV20a Match Region | the Matched Region | Value |
| EPH_1bd | 35 . . . 211 | 116/178 (65%) | 8.8e-122 |
| | | 159/178 (89%) | |
| fn3 | 337 . . . 432 | 25/100 (25%) | 1.9e-05 |
| | | 65/100 (65%) | |
| fn3 | 437 . . . 517 | 23/88 (26%) | 7.3e-09 |
| | | 58/88 (66%) | |
| pkinase | 656 . . . 910 | 81/298 (27%) | 8.3e-38 |
| | | 176/298 (59%) | |
| SAM | 941 . . . 1005 | 27/68 (40%) | 7.1e-16 |
| | | 51/68 (75%) | |

### Example 21

[0463] The NOV21 clone was analyzed, and the nucleotide and encoded polypeptide sequences are shown in Table 21A.

TABLE 21A
NOV21 Sequence Analysis

| | | |
|---|---|---|
| NOV21a, CG51965-01 | SEQ ID NO: 275 | 9087 bp |
| DNA Sequence | ORF Start: ATG at 1 | ORF Stop: TGA at 9085 |

ATGGCGCCGCCGCCGCCGCCCGTGCTGCCCGTGCTGCTGCTCCTGGCCGCCGCCGCCGCCCTGCCGGC
GATGGGGCTGCGAGCGGCCGCCTGGGAGCCGCGCGTACCCGGCGGGACCCGCGCCTTCGCCCTCCGGC
CCGGCTGTACCTACGCGGTGGGCGCCGCTTGCACGCCCCGGGCGCCGCGGGAGCTGCTGGACGTGGGC
CGCGATGGGCGGCTGGCAGGACGTCGGCGCGTCTCGGGCGCGGGGCGCCCGCTGCCGCTGCAAGTCCG
CTTGGTGGCCCGCAGTGCCCCGACGGCGCTGAGCCGCCGCCTGCGGGCGCGCACGCACCTTCCCGGCT
GCGGAGCCCGTGCCCGGCTCTGCGGAACCGGTGCCCGGCTCTGCGGGGCGCTCTGCTTCCCCGTCCCC
GGCGGCTGCGCGGCCGCGCAGCATTCGGCGCTCGCAGCTCCGACCACCTTACCCGCCTGCCGCTGCCC
GCCGCGCCCCAGGCCCCGCTGTCCCGGCCGTCCCATCTGCCTGCCGCCGGGCGGCTCGGTCCGCCTGC
GTCTGCTGTGCGCCCTGCGGCGCGCGGCTGGCGCCGTCCGGGTGGGACTGGCGCTGGAGGCCGCCACC
GCGGGGACGCCCTCCGCGTCGCCATCCCCATCGCCGCCCCTGCCGCCGAACTTGCCCGAAGCCCGGGC
GGGGCCGGCGCGACGGGCCCGGCGGGGCACGAGCGGCAGAGGGAGCCTGAAGTTTCCGATGCCCAACT
ACCAGGTGGCGTTGTTTGAGAACGAACCGGCGGGCACCCTCATCCTCCAGCTGCACGCGCACTACACC
ATCGAGGGCGAGGAGGAGCGCGTGAGCTATTACATGGAGGGGCTGTTCGACGAGCGCTCCCGGGGCTA
CTTCCGAATCGACTCTGCCACGGGCGCCGTGAGCACGGACAGCGTACTGGACCGCGAGACCAAGGAGA
CGCACGTCCTCAGGGTGAAAGCCGTGGACTACAGTACGCCGCCGCGCTCGGCCACCACCTACATCACT
GTCTTGGTCAAAGACACCAACGACCACAGCCCGGTCTTCGAGCAGTCGGAGTACCGCGAGCGCGTGCG
GGAGAACCTGGAGGTGGGCTACGAGGTGCTGACCATCCGCGCCAGCGACCGCGACTCGCCCATCAACG
CCAACTTGCGTTACCGCGTGTTGGGGGGCGCGTGGGACGTCTTCCAGCTCAACGAGAGCTCTGGCGTG
GTGAGCACACGGGCGGTGCTGGACCGGGAGGAGGCGGCCGAGTACCAGCTCCTGGTGGAGGCCAACGA
CCAGGGGCGCAATCCGGGCCCGCTCAGTGCCACGGCCACCGTGTACATCGAGGTGGAGGACGAGAACG
ACAACTACCCCCAGTTCAGCGAGCAGAACTACGTGGTCCAGGTGCCCGAGGACGTGGGGCTCAACACG
GCTGTGCTGCGAGTGCAGGCCACGGACCGGGACCAGGGCCAGAACGCGGCCATTCACTACAGCATCCT
CAGCGGGAACGTGGCCGGCCAGTTCTACCTGCACTCGCTGAGCGGGATCCTGGATGTGATCAACCCCT
TGGATTTCGAGGATGTCCAGAAATACTCGCTGAGCATTAAGGCCCAGGATGGGGGCCGGCCCCCGCTC
ATCAATTCTTCAGGGGTGGTGTCTGTGCAGGTGCTGGATGTCAACGACAACGAGCCTATCTTTGTGAG
CAGCCCCTTCCAGGCCACGGTGCTGGAGAATGTGCCCCTGGGCTACCCCGTGGTGCACATTCAGGCGG
TGGACGCGGACTCTGGAGAGAACGCCCGGCTGCACTATCGCCTGGTGGACACGGCCTCCACCTTTCTG
GGGGGCGGCAGCGCTGGGCCTAAGAATCCTGCCCCCACCCCTGACTTCCCCTTCCAGATCCACAACAG
CTCCGGTTGGATCACAGTGTGTGCCGAGCTGGACCGCGAGGAGGTGGAGCACTACAGCTTCGGGGTGG
AGGCGGTGGACCACGGCTCGCCCCCCATGAGCTCCTCCACCAGCGTGTCCATCACGGTGCTGGACGTG
AATGACAACGACCCGGTGTTCACGCAGCCCACCTACGAGCTTCGTCTGAATGAGGATGCGGCCGTGGG
GAGCAGCGTGCTGACCCTGCAGGCCCGCGACCGTGACGCCAACAGTGTGATTACCTACCAGCTCACAG
GCGGCAACACCCGGAACCGCTTTGCACTCAGCAGCCAGAGAGGGGGCGGCCTCATCACCCTGGCGCTA
CCTCTGGACTACAAGCAGGAGCAGCAGTACGTGCTGGCGGTGACAGCATCCGACGGCACACGGTCGCA
CACTGCGCATGTCCTAATCAACGTCACTGATGCCAACACCCACAGGCCTGTCTTTCAGAGCTCCCATT
ACACAGTGAGTGTCAGTGAGGACAGGCCTGTGGGCACCTCCATTGCTACCCTCAGTGCCAACGATGAG
GACACAGGAGAGAATGCCCGCATCACCTACGTGATTCAGGACCCCGTGCCGCAGTTCCGCATTGACCC
CGACAGTGGCACCATGTACACCATGATGGAGCTGGACTATGAGAACCAGGTCGCCTACACGCTGACCA
TCATGGCCCAGGACAACGGCATCCCGCAGAAATCAGACACCACCACCCTAGAGATCCTCATCCTCGAT
GCCAATGACAATGCACCCCAGTTCCTGTGGGATTTCTACCAGGGTTCCATCTTTGAGGATGCTCCACC
CTCGACCAGCATCCTCCAGGTCTCTGCCACGGACCGGGACTCAGGTCCCAATGGGCGTCTGCTGTACA
CCTTCCAGGGTGGGGACGACGGCGATGGGGACTTCTACATCGAGCCCACGTCCGGTGTGATTCGCACC
CAGCGCCGGCTGGACCGGGAGAATGTGGCCGTGTACAACCTTTGGGCTCTGGCTGTGGATCGGGGCAG
TCCCACTCCCCTTAGCGCCTCGGTAGAAATCCAGGTGACCATCTTGGACATTAATGACAATGCCCCCA
TGTTTGAGAAGGACGAACTGGAGCTGTTTGTTGAGGAGAACAACCCAGTGGGGTCGGTGGTGGCAAAG
ATTCGTGCTAACGACCCTGATGAAGGCCCTAATGCCCAGATCATGTATCAGATTGTGGAAGGGGACAT
GCGGCATTTCTTCCAGCTGGACCTGCTCAACGGGGACCTGCGTGCCATGGTGGAGCTGGACTTTGAGG
TCCGGCGGGAGTATGTGCTGGTGGTGCAGGCCACGTCGGCTCCGCTGGTGAGCCGAGCCACGGTGCAC
ATCCTTCTCGTGGACCAGAATGACAACCCGCCTGTGCTGCCCGACTTCCAGATCCTCTTCAACAACTA
TGTCACCAACAAGTCCAACAGTTTCCCCACCGGCGTGATCGGCTGCATCCCGGCCCATGACCCCGACG
TGTCAGACAGCCTCAACTACACCTTCGTGCAGGGCAACGAGCTGCGCCTGTTGCTGCTGGACCCCGCC
ACGGGCGAACTGCAGCTCAGCCGCGACCTGGACAACAACCGGCCGCTGGAGGCGCTCATGGAGGTGTC
TGTGTCTGCAGATGGCATCCACAGCGTCACGGCCTTCTGCACCCTGCGTGTCACCATCATCACGGACG
ACATGCTGACCAACAGCATCACTGTCCGCCTGGAGAACATGTCCCAGGAGAAGTTCCTGTCCCCGCTG
CTGGCCCTCTTCGTGGAGGGGGTGGCCGCCGTGCTGTCCACCACCAAGGACGACGTCTTCGTCTTCAA
CGTCCAGAACGACACCGACGTCAGCTCCAACATCCTGAACGTGACCTTCTCGGCGCTGCTGCCTGGCG
GCGTCCGCGGCCAGTTCTTCCCGTCGGAGGACCTGCAGGAGCAGATCTACCTGAATCGGACGCTGCTG
ACCACCATCTCCACGCAGCGCGTGCTGCCCTTCGACGACGACATCTGCCTGCGCGAGCCCTGCGAGAA
CTACATGAAGTGCGTGTCCGTTCTGCGATTCGACAGCTCCGCGCCCTTCCTCAGCTCCACCACCGTGC
TCTTCCGGCCCATCCACCCCATCAACGGCCTGCGCTGCCGCTGCCCGCCCGGCTTCACCGGCGACTAC
TGCGAGACGGAGATCGACCTCTGCTACTCCGACCCGTGCGGCGCCAACGGCCGCTGCCGCAGCCGCGA
GGGCGGCTACACCTGCGAGTGCTTCGAGGACTTCACTGGAGAGCACTGTGAGGTGGATGCCCGCTCAG
GCCGCTGTGCCAACGGGGTGTGCAAGAACGGGGGCACCTGCGTGAACCTGCTCATCGGCGGCTTCCAC
TGCGTGTGTCCTCCTGGCGAGTATGAGAGGCCCTACTGTGAGGTGACCACCAGGAGCTTCCCGCCCCA
GTCCTTCGTCACCTTCCGGGGCCTGAGACAGCGCTTCCACTTCACCATCTCCCTCACGTTTGCCACTC
AGGAAAGGAACGGCTTGCTTCTCTACAACGGCCGCTTCAATGAGAAGCACGACTTCATCGCCCTGGAG
ATCGTGGACGAGCAGGTGCAGCTCACCTTCTCTGCAGGTGCAGGCGAGACAACAACGACCGTGGCACC
GAAGGTTCCCAGTGGTGTGAGTGACGGGCGGTGGCACTCTGTGCAGGTGCAGTACTACAACAAGGTAA
GATGGGCCCCACCACTTCCCCCTGGCCCCCAGCCCAATATTGGCCACCTGGGCCTGCCCCATGGGCCG
TCCGGGGAAAAGATGGCCGTGGTGACAGTGGATGATTGTGACACAACCATGGCTGTGCGCTTTGGAAA
GGACATCGGGAACTACAGCTGCGCTGCCCAGGGCACTCAGACCGGCTCCAAGAAGTCCCTGGATCTGA
CCGGCCCTCTACTCCTGGGGGGTGTCCCCAACCTGCCAGAAGACTTCCCAGTGCACAACCGGCAGTTC
GTGGGCTGCATGCGGAACCTGTCAGTCGACGGCAAAAATGTGGACATGGCCGGATTCATCGCCAACAA
TGGCACCCGGGAAGGCTGCGCTGCTCGGAGGAACTTCTGCGATGGGAGGCGGTGTCAGAATGGAGGCA
CCTGTGTCAACAGGTGGAATATGTATCTGTGTGAGTGTCCACTCCGATTCGGCGGGAAGAACTGTGAG
CAAGCCATGCCTCACCCCCAGCTCTTCAGCGGTGAGAGCGTCGTGTCCTGGAGTGACCTGAACATCAT
CATCTCTGTGCCCTGGTACCTGGGGCTCATGTTCCGGACCCGGAAGGAGGACAGCGTTCTGATGGAGG
CCACCAGTGGTGGGCCCACCAGCTTTCGCCTCCAGATCCTGAACAACTACCTCCAGTTTGAGGTGTCC
CACGGCCCCTCCGATGTGGAGTCCGTGATGCTGTCCGGGTTGCGGGTGACCGACGGGGAGTGGCACCA
CCTGCTGATCGAGCTGAAGAATGTTAAGGAGGACAGTGAGATGAAGCACCTGGTCACCATGACCTTGG
ACTATGGGATGGACCAGAACAAGGCAGATATCGGGGGCATGCTTCCCGGGCTGACGGTAAGGAGCGTG
GTGGTCGGAGGCGCCTCTGAAGACAAGGTCTCCGTGCGCCGTGGATTCCGAGGCTGCATGCAGGGAGT
GAGGATGGGGGGGACGCCCACCAACGTCGCCACCCTGAACATGAACAACGCACTCAAGGTCAGGGTGA
AGGACGGCTGTGATGTGGACGACCCCTGTACCTCGAGCCCCTGTCCCCCCAATAGCCGCTGCCACGAC
GCCTGGGAGGACTACAGCTGCGTCTGTGACAAAGGGTACCTTGGAATAAACTGTGTGGATGCCTGTCA
CCTGAACCCCTGCGAGAACATGGGGGCCTGCGTGCGCTCCCCCGGCTCCCCGCAGGGCTACGTGTGCG
AGTGTGGGCCCAGTCACTACGGGCCGTACTGTGAGAACAAACTCGACCTTCCGTGCCCCAGAGGCTGG
TGGGGGAACCCCGTCTGTGGACCCTGCCACTGTGCCGTCAGCAAAGGCTTTGATCCCGACTGTAATAA
GACCAACGGCCAGTGCCAATGCAAGGAGAATTACTACAAGCTCCTAGCCCAGGACACCTGTCTGCCCT
GCGACTGCTTCCCCCATGGCTCCCACAGCCGCACTTGCGACATGGCCACCGGGCAGTGTGCCTGCAAG
CCCGGCGTCATCGGCCGCCAGTGCAACCGCTGCGACAACCCGTTTGCCGAGGTCACCACGCTCGGCTG
TGAAGTGATCTACAATGGCTGTCCCAAAGCATTTGAGGCCGGCATCTGGTGGCCACAGACCAAGTTCG
GGCAGCCGGCTGCGGTGCCATGCCCTAAGGGATCCGTTGGAAATGCGGTCCGACACTGCAGCGGGGAG
AAGGGCTGGCTGCCCCCAGAGCTCTTTAACTGTACCACCATCTCCTTCGTGGACCTCAGGGCCATGAA
TGAGAAGCTGAGCCGCAATGAGACGCAGGTGGACGGCGCCAGGGCCCTGCAGCTGGTGAGGGCGCTGC
GCAGTGCTACACAGCACACGGGCACGCTCTTTGGCAATGACGTGCGCACGGCCTACCAGCTGCTGGGC
CACGTCCTTCAGCACGAGAGCTGGCAGCAGGGCTTCGACCTGGCAGCCACGCAGGACGCCGACTTTCA
CGAGGACGTCATCCACTCGGGCAGCGCCCTCCTGGCCCCAGCCACCAGGGCGGCGTGGGAGCAGATCC
AGCGGAGCGAGGGCGGCACGGCACAGCTGCTCCGGCGCCTCGAGGGCTACTTCAGCAACGTGGCACGC
AACGTGCGGCGGACGTACCTGCGGCCCTTCGTCATCGTCACCGCCAACATGGTTCTTGCTGTCGACAT
CTTTGACAAGTTCAACTTTACGGGAGCCAGGGTCCCGCGATTCGACACCATCCATGAAGAGTTCCCCA
GGGAGCTGGAGTCCTCCGTCTCCTTCCCAGCCGACTTCTTCAGACCACCTGAAGAAAAAGAAGGCCCC
CTGCTGAGGCCGGCTGGCCGGAGGACCACCCCGCAGACCACGCGCCCGGGGCCTGGCACCGAGAGGGA
GGCCCCGATCAGCAGGCGGAGGCGACACCCTGATGACGCTGGCCAGTTCGCCGTCGCTCTGGTCATCA
TTTACCGCACCCTGGGGCAGCTCCTGCCCGAGCGCTACGACCCCGACCGTCGCAGCCTCCGGTTGCCT
CACCGGCCCATCATTAATACCCCGATGGTGAGCACGCTGGTGTACAGCGAGGGGGCTCCGCTCCCGAG
ACCCCTGGAGAGGCCCGTCCTGGTGGAGTTCGCCCTGCTGGAGGTGGAGGAGCGAACCAAGCCTGTCT
GCGTGTTCTGGAACCACTCCCTGGCCGTTGGTGGGACGGGAGGGTGGTCTGCCCGGGGCTGCGAGCTC
CTGTCCAGGAACCGGACACATGTCGCCTGCCAGTGCAGCCACACAGCCAGCTTTGCGGTGCTCATGGA
TATCTCCAGGCGTGAGAACGGGGAGGTCCTGCCTCTGAAGATTGTCACCTATGCCGCTGTGTCCTTGT
CACTGGCAGCCCTGCTGGTGGCCTTCGTCCTCCTGAGCCTGGTCCGCATGCTGCGCTCCAACCTGCAC
AGCATTCACAAGCACCTCGCCGTGGCGCTCTTCCTCTCTCAGCTGGTGTTCGTGATTGGGATCAACCA
GACGGAAAACCCGTTTCTGTGCACAGTGGTTGCCATCCTCCTCCACTACATCTACATGAGCACCTTTG
CCTGGACCCTCGTGGAGAGCCTGCATGTCTACCGCATGCTGACCGAGGTGCGCAACATCGACACGGGG
CCCATGCGGTTCTACTACGTCGTGGGCTGGGGCATCCCGGCCATTGTCACAGGACTGGCGGTCGGCCT
GGACCCCCAGGGCTACGGGAACCCCGACTTCTGCTGGCTGTCGCTTCAAGACACCCTGATTTGGAGCT
TTGCGGGGCCCATCGGAGCTGTTATAATCATCAACACAGTCACTTCTGTCCTATCTGCAAAGGTTTCC
TGCCAAAGAAAGCACCATTATTATGGGAAAAAAGGGATCGTCTCCCTGCTGAGGACCGCATTCCTCCT
GCTGCTGCTCATCAGCGCCACCTGGCTGCTGGGGCTGCTGGCTGTGAACCGCGATGCACTGAGCTTTC
ACTACCTCTTCGCCATCTTCAGCGGCTTACAGGGCCCCTTCGTCCTCCTTTTCCACTGCGTGCTCAAC
CAGGAGGTCCGGAAGCACCTGAAGGGCGTGCTCGGCGGGAGGAAGCTGCACCTGGAGGACTCCGCCAC
CACCAGGGCCACCCTGCTGACGCGCTCCCTCAACTGCAACACCACCTTCGGTGACGGGCCTGACATGC
TGCGCACAGACTTGGGCGAGTCCACCGCCTCGCTGGACAGCATCGTCAGGGATGAAGGGATCCAGAAG
CTCGGCGTGTCCTCTGGGCTGGTGAGGGGCAGCCACGGAGAGCCAGACGCGTCCCTCATGCCCAGGAG
CTGCAAGGATCCCCCTGGCCACGATTCCGACTCAGATAGCGAGCTGTCCCTGGATGAGCAGAGCAGCT
CTTACGCCTCCTCACACTCGTCAGACAGCGAGGACGATGGGGTGGGAGCTGAGGAAAAATGGGACCCG
GCCAGGGGCGCCGTCCACAGCACCCCCAAAGGGGACGCTGTGGCCAACCACGTTCCGGCCGGCTGGCC
CGACCAGAGCCTGGCTGAGAGTGACAGTGAGGACCCCAGCGGCAAGCCCCGCCTGAAGGTGGAGACCA
AGGTCAGCGTGGAGCTGCACCGCGAGGAGCAGGGCAGTCACCGTGGAGAGTACCCCCCGGACCAGGAG
AGCGGGGGGCGCAGCCAGGCTTGCTAGCAGCCAGCCCCCAGAGCAGAGGAGCATCTTGAAAAATAAGT
CACCTACCCGCCGCCGCTGACGCTGACGGAGCAGACGCTGAAGGGCCGGCTCCGGGAGAAGCTGGCCG
ACTGTGAGCAGAGCCCCACATCCTCGCGCACGTCTTCCCTGGGCTCTGGCGGCCCCGACTGCGCCATC
ACAGTCAAGAGCCCTGGGAGGGAGCCGGGGCGTGACCACCTCAACGGGGTGGCCATGAATGTGCGCAC
TGGAGCGCCCAGGCCGATGGCTCCGACTCTGAGAAACCGTGA

| | | | |
|---|---|---|---|
| NOV21a, GG51965-01 | SEQ ID NO: 276 | 3028 aa | MW at 330865.9kD |
| Protein Sequence | | | |

MAPPPPPVLPVLLLLAAAAALPAMGLRAAAWEPRVPGGTRAFALRPGCTYAVGAACTPRAPRELLDVG
RDGRLAGRRRVSGAGRPLPLQVRLVARSAPTALSRRLRARTHLPGCGARARLCGTGARLCGALCFPVP
GGCAAAQHSALAAPTTLPACRCPPRPRPRCPGRPICLPPGGSVRLRLLCALRRAAGAVRVGLALEAAT
AGTPSASPSPSPPLPPNLPEARAGPARRARRGTSGRGSLKFPMPNYQVALFENEPAGTLILQLHAHYT
IEGEEERVSYYMEGLFDERSRGYFRIDSATGAVSTDSVLDRETKETHVLRVKAVDYSTPPRSATTYIT
VLVKDTNDHSPVFEQSEYRERVRENLEVGYEVLTIRASDRDSPINANLRYRVLGGAWDVFQLNESSGV
VSTRAVLDREEAAEYQLLVEANDQGRNPGPLSATATVYIEVEDENDNYPQFSEQNYVVQVPEDVGLNT
AVLRVQATDRDQGQNAAIHYSILSGNVAGQFYLHSLSGILDVINPLDFEDVQKYSLSIKAQDGGRPPL
INSSGVVSVQVLDVNDNEPIFVSSPFQATVLENVPLGYPVVHIQAVDADSGENARLHYRLVDTASTFL
GGGSAGPKNPAPTPDFPFQIHNSSGWITVCAELDREEVEHYSFGVEAVDHGSPPMSSSTSVSITVLDV
NDNDPVFTQPTYELRLNBDAAVGSSVLTLQARDRDANSVITYQLTGGNTRNRFALSSQRGGGLITLAL
PLDYKQEQQYVLAVTASDGTRSHTAHVLINVTDANTHRPVFQSSHYTVSVSEDRPVGTSIATLSANDE
DTGENARITYVIQDPVPQFRIDPDSGTMYTMMELDYENQVAYTLTIMAQDNGIPQKSDTTTLEILILD
ANDNAPQFLWDFYQGSIFEDAPPSTSILQVSATDRDSGPNGRLLYTFQGGDDGDGDFYIEPTSGVIRT
QRRLDRENVAVYNLWALAVDRGSPTPLSASVEIQVTILDINDNAPMFEKDELELFVEENNPVGSVVAK
IRANDPDEGPNAQIMYQIVEGDMRHFFQLDLLNGDLRAMVELDFEVRREYVLVVQATSAPLVSRATVH
ILLVDQNDNPPVLPDFOILFNNYVTNKSNSFPTGVIGCIPAHDPDVSDSLNYTFVQGNELRLLLLDPA
TGELQLSRDLDNNRPLEALMEVSVSADGIHSVTAFCTLRVTIITDDMLTNSITVRLENMSQEKFLSPL
LALFVEGVAAVLSTTKDDVFVFNVQNDTDVSSNILNVTFSALLPGGVRGQFFPSEDLQEQIYLNRTLL
TTISTQRVLPFDDNICLREPCENYMKCVSVLRFDSSAPFLSSTTVLFRPIHPINGLRCRCPPGFTGDY
CETEIDLCYSDPCGANGRCRSREGGYTCECFEDFTGEHCEVDARSGRCANGVCKNGGTCVNLLIGGFH
CVCPPGEYERPYCEVTTRSFPPQSFVTFRGLRQRFHFTISLTFATQERNGLLLYNGRFNEKHDFIALE
IVDEQVQLTFSAGAGETTTTVAPKVPSGVSDGRWHSVQVQYYNKVRWAPPLPPGPQPNIGHLGLPHGP
SGEKMAVVTVDDCDTTMAVRFGKDIGNYSCAAQGTQTGSKKSLDLTGPLLLGGVPNLPEDFPVNHRQF
VGCMRNLSVDGKNVDMAGFIANNGTREGCAARRNFCDGRRCQNGGTCVNRWNMYLCECPLRFGGKNCE
QAMPHPQLFSGESVVSWSDLNIIISVPWYLGLMFRTRKEDSVLMEATSGGPTSFRLQILNNYLQFEVS
HGPSDVESVMLSGLRVTDGEWHHLLIELKNVKEDSEMKHLVTMTLDYGMDQNKADIGGMLPGLTVRSV
VVGGASEDKVSVRRGFRGCMQGVRMGGTPTNVATLNMNNALKVRVKDGCDVDDPCTSSPCPPNSRCHD
AWEDYSCVCDKGYLGIMCVDACHLNPCENMGACVRSPGSPQGYVCECGPSHYGPYCENKLDLPCPRGW
WGNPVCGPCHCAVSKGFDPDCNKTNGQCQCKENYYKLLAQDTCLPCDCFPHGSHSRTCDMATGQCACK
PGVIGRQCNRCDNPFAEVTTLGCEVIYNGCPKAPEAGIWWPQTKFGQPAAVPCPKGSVGNAVRHCSGE
KGWLPPELFNCTTISFVDLRAMNEKLSRNETQVDGARALQLVRALRSATQHTGTLFGNDVRTAYQLLG
HVLQHESWQQGFDLAATQDADFHEDVIHSGSALLAPATRAAWEQIQRSEGGTAQLLRPLEGYFSNVAR
NVRRTYLRPFVIVTANMVLAVDIFDKFNFTGARVPRFDTIHEEFPRELESSVSFPADFFRPPEEKEGP
LLRPAGRRTTPQTTRPGPGTEREAPISRRRRHPDDAGQFAVALVIIYRTLGQLLPERYDPDRRSLRLP
HRPIINTPMVSTLVYSEGAPLPRPLERPVLVEFALLEVEERTKPVCVFWNHSLAVGGTGGWSARGCEL
LSRNRTHVACQCSHTASFAVLMDISRRENGEVLPLKIVTYAAVSLSLAALLVAFVLLSLVRMLRSNLH
SIHKHLAVALFLSQLVFVIGINQTENPFLCTVVAILLHYIYMSTFAWTLVESLHVYRMLTEVRNIDTG
PMRFYYVVGWGIPAIVTGLAVGLDPQGYGNPDFCWLSLQDTLIWSFAGPIGAVIIINTVTSVLSAKVS
CQRKHHYYGKKGIVSLLRTAFLLLLLISATWLLGLLAVNRDALSFHYLFAIFSGLQGPFVLLFHCVLN
QEVRKHLKGVLGGRKLHLEDSATTRATLLTRSLNCNTTFGDGPDMLRTDLGESTASLDSIVRDEGIQK
LGVSSGLVRGSHGEPDASLMPRSCKDPPGHDSDSDSELSLDEQSSSYASSHSSDSEDDGVGAEEKWDP
ARGAVHSTPKGDAVANHVPAGWPDQSLAESDSEDPSGKPRLKVETKVSVELHREEQGSHRGEYPPDQE
SGGAARLASSQPPEQRSILKNKVTYPPPLTLTEQTLKGRLREKLADCEQSPTSSRTSSLGSGGPDCAI
TVKSPGREPGRDHLNGVAMNVRTGSAQADGSDSEKP

| | | |
|---|---|---|
| NOV21b, 258076370 | SEQ ID NO: 277 | 1263 bp |
| DNA Sequence | ORF Start: at 1 | ORF Stop: end of sequence |

CTCAAGCTTGAAGTGATCTACAATGGCTGTCCCAAAGCATTTGAGGCCGGCATCTGGTGGCCACAGAC
CAAGTTCGGGCAGCCGGCTGCGGTGCCATGCCCTAAGGGATCCGTTGGAAATGCGGTCCGACACTGCA
GCGGGGAGAAGGGCTGGCTGCCCCCAGAGCTCTTTAACTGTACCACCATCTCCTTCGTGGACCTCAGG
GCCATGAATGAGAAGCTGAGCCGCAATGAGACGCAGGTGGACGGCGCCAGGGCCCTGCAGCTGGTGAG
GGCGCTGCGCAGTGCTACACAGCACACGGGCACGCTCTTTGGCAATGACGTGCGCACGGCCTACCAGC
TGCTGGGCCACGTCCTTCAGCACGAGAGCTGGCAGCAGGGCTTCGACCTGGCAGCCACGCAGGACGCC
GACTTTCACGAGGACGTCATCCACTCGGGCAGCGCCCTCCTGGCCCCAGCCACCAGGGCGGCGTGGGA
GCAGATCCAGCGGAGCGAGGGCGGCACGGCACAGCTGCTCCGGCGCCTCGAGGGCTACTTCAGCAACG
TGGCACGCAACGTGCGGCGGACGTACCTGCGGCCCTTCGTCATCGTCACCGCCAACATGATTCTTGCT
GTCGACATCTTTGACAAGTTCAACTTTACGGGAGCCAGGGTCCCGCGATTCGACACCATCCATGAAGA
GTTCCCCAGGGAGCTGGAGTCCTCCGTCTCCTTCCCAGCCGACTTCTTCAGACCACCTGAAGAAAAAG
AAGGCCCCCTGCTGAGGCCGGCTGGCCGGAGGACCACCCCGCAGACCACGCGCCCGGGGCCTGGCACC
GAGAGGGAGGCCCCGATCAGCAGGCGGAGGCGACACCCTGATGACGCTGGCCAGTTCGCCGTCGCTCT
GGTCATCATTTACCGCACCCTGGGGCAGCTCCTGCCCGAGCGCTACGACCCCGACCGTCGCAGCCTCC
GGTTGCCTCACCGGCCCATCATTAATACCCCGATGGTGAGCACGCTGGTGTACAGCGAGGGGGCTCCG
CTCCCGAGACCCCTGGAGAGGCCCGTCCTGGTGGAGTTCGCCCTGCTGGAGGTGGAGGAGCGAACCAA
GCCTGTCTGCGTGTTCTGGAACCACTCCCTGGCCGTTGGTGGGACGGGAGGGTGGTCTGCCCGGGGCT
GCGAGCTCCTGTCCAGGAACCGGACACATGTCGCCTGCCAGTGCAGCCACACAGCCAGCTTTGCGGTG
CTCATGGATATCTCCAGGCGTGAGAACGGGGAGAAGCTT

| | | | |
|---|---|---|---|
| NOV21b, 258076370 | SEQ ID NO: 278 | 421 aa | MW at47178.1kD |
| Protein Sequence | | | |

LKLEVIYNGCPKAFEAGIWWPQTKFGQPAAVPCPKGSVGNAVRHCSGEKGWLPPELFNCTTISFVDLR
AMNEKLSRNETQVDGARALQLVRALRSATQHTGTLFGNDVRTAYQLLGHVLQHESWQQGFDLAATQDA
DFHEDVIHSGSALLAPATRAAWEQIQRSEGGTAQLLRRLEGYFSNVARNVRRTYLRPFVIVTANMILA
VDIFDKFNFTGARVPRFDTIHEEFPRELESSVSFPADFFRPPEEKEGPLLRPAGRRTTPQTTRPGPGT
EREAPISRRRRHPDDAGQFAVALVIIYRTLGQLLPERYDPDRRSLRLPNRPIINTPMVSTLVYSEGAP
LPRPLERPVLVEFALLEVEERTKPVCVFWNHSLAVGGTGGWSARGCELLSRNRTHVACQCSHTASFAV
LMDISRRENGEKL

| | | |
|---|---|---|
| NOV21c, 317619862 | SEQ ID NO: 279 | 750 bp |
| DNA Sequence | ORF Start: at 1 | ORF Stop: end of sequence |

CGCAAGCTTGTCCTGCCTCTGAAGATTGTCACCTATGCCGCTGTGTCCTTGTCACTGGCAGCCCTGCT
GGTGGCCTTCGTCCTCCTGAGCCTGGTCCGCATGCTGCGCTCCAACCTGCACAGCATTCACAAGCACC
TCGCCGTGGCGCTCTTCCTCTCTCAGCTGGTGTTCGTGATTGGGATCAACCAGACGGAAAACCCGTTT
CTGTGCACAGTGGTTGCCATCCTCCTCCACTACATCTACATGAGCACCTTTGCCTGGACCCTCGTGGA
GAGCCTGCATGTCTACCGCATGCTGACCGAGGTGCGCAACATCGACACGGGGCCCATGCGGTTCTACT
ACGTCGTGGGCTGGGGCATCCCGGCCATTGTCACAGGACTGGCGGTCGGCCTGGACCCCCAGGGCTAC
GGGAACCCCGACTTCTGCTGGCTGTCGCTTCAAGACACCCTGATTTGGAGCTTTGCGGGGCCCATCGG
AGCTGTTATAATCATCAACACAGTCACTTCTGTCCTATCTGCAAAGGTTTCCTGCCAAAGAAAGCACC
ATTATTATGGGAAAAAAGGGATCGTCTCCCTGCTGAGGACCGCATTCCTCCTGCTGCTGCTCATCAGC
GCCACCTGGCTGCTGGGGCTGCTGGCTGTGAACCGCGACGCACTGAGCTTTCACTACCTCTTCGCCAT
CTTCAGCGGCTTACAGGGCCCCTTCGTCCTCCTTTTCCACTGCGTGCTCAACCAGGAGGTCAAGCTTG
CG

| | | | |
|---|---|---|---|
| NOV21c, 317619862 | SEQ ID NO: 280 | 250 aa | MW at 27799.9kD |
| Protein Sequence | | | |

RKLVLPLKIVTYAAVSLSLAALLVAFVLLSLVRMLRSNLHSIHKHLAVALFLSQLVFVIGINQTENPF
LCTVVAILLHYIYMSTFAWTLVESLHVYRMLTEVRNIDTGPMRFYYVVGWGIPAIVTGLAVGLDPQGY
GNPDFCWLSLQDTLIWSFAGPIGAVIIINTVTSVLSAKVSCQRKHHYYGKKGIVSLLRTAFLLLLLIS
ATWLLGLLAVNRDALSFHYLFAIFSGLQGPFVLLFHCVLNQEVKLA

| | | |
|---|---|---|
| NOV21d, 317460050 | SEQ ID NO: 281 | 2541 bp |
| DNA Sequence | ORF Start: at 1 | ORF Stop: end of sequence |

AAGCTTTACCAGGTGGCGTTGTTTGAGAACGAACCGGCGGGCACCCTCATCCTCCAGCTGCACGCGCA
CCACACCATCGAGGGCGAGGAGGAGCGCGTGAGCTATTACATGGAGGGGCTGTTCGACGAGCGCTCCC
GGGGCTACTTCCGAATCGACTCTGCCGCGGGCGCCGTGAGCACGGACAGCGTACTGGACCGCGAGACC
AAGGAGACGCACGTCCTCAGGGTGAAAGCCGTGGACTACAGTACGCCGCCGCGCTCGGCCACCACCTA
CATCACTGTCTTGGTCAAAGACACCAACGACCACAGCCCGGTCTTCGAGCAGTCGGAGTACCGCGAGC
GCGTGCGGGAGAACCTGGAGGTGGGCTACGAGGTGCTGACCATCCGCGCCAGCGACCGCGACTCGCCC
ATCAACGCCAACTTGCGTTACCGCGTGTTGGGGGGCGCGTGGGACGTCTTCCAGCTCAACGAGAGCTC
TGGCGTGGTGAGTACACGGGCGGTGCTGGACCGGGAGGAGGCGGCCGAGTACCAGCTGCTGGTGGAGG
CCAACGACCAGGGGCGCAATCCGGGCCCGCTCAGTGCCACGGCCACCGTGTACATCGAGGTGGAGGAC
GAGAACGACAACTACCCCCAGTTCAGCGAGCAGAACTACGTGGTCCAGGTGCCCGAGGACGTGGGGCT
CAACACGGCTGTGCTGCGAGTGCAGGCCACGGACCGGGACCAGGGCCAGAACGCGGCCATTCACTACA
GCATCCTCAGCGGGAACGTGGCCGGCCAGTTCTACCTGCACTCGCTGAGCGGGATCCTGGATGTGATC
AACCCCTTGGATTTCGAGGATGTCCAGAAATACTCGCTGAGCATTAAGGCCCAGGATGGGGGCCGGCC
CCCGCTCATCAATTCTTCAGGGGTGGTGTCTGTGCAGGTGCTGGATGTCAACGACAACGAGCCTATCT
TTGTGAGCAGCCCCTTCCAGGCCACGGTGCTGGAGAATGTGCCCCTGGGCTACCCCGTGGTGCACATT
CAGGCGGTGGACGCGGACTCTGGAGAGAACGCCCGGCTGCACTATCGCCTGGTGGACACGGCCTCCAC
CTTTCTGGGGGGCGGCAGCGCTGGGCCTAAGAATCCTGCCCCCACCCCTGACTTCCCCTTCCAGATCC
GCAACAGCTCCGGTTGGATCACAGTGTGTGCCGAGCTGGACCGCGAGGAGGTGGAGCACTACAGCTTC
GGGGTGGAGGCGGTGGACCACGGCTGGCCCCCCATGAGCTCCTCCACCAGCGTGTCCATCACGGTGCT
GGACGTGAATGACAACGACCCGGTGTTCACGCAGCCCACCTACGAGCTTCGTCTGAATGAGGATGCGG
CCGTGGGGAGCAGCGTGCTGACCCTGCAGGCCCGCGACCGTGACGCCAACAGTGTGATTACCTACCAG
CTCACAGGCGGCAACACCCGGAACCGCTTTGCACTCAGCAGCCAGAGAGGGGGCGGCCTCATCACCCT
GGCGCTACCTCTGGACTACAAGCAGGAGCAGCAGTACGTGCTGGCGGTGACAGCATCCGACGGCACAC
GGTCGCACACTGCGCATGTCCTAATCAACGTCACTGATGCCAACACCCACAGGCCTGTCTTTCAGAGC
TCCCATTACACAGTGAGTGTCAGTGAGGACAGGCCTGTGGGCACCTCCATTGCTACCCTCAGTGCCAA
CGATGAGGACACAGGAGAGAATGCCCGCATCACCTACGTGATTCAGGACCCCGTGCCGCAGTTCCGCA
TTGACCCCGACAGTGGCACCATGTACACCATGATGGAGCTGGACTATGAGAACCAGGTCGCCTACACG
CTGACCATCATGGCCCAGGACAACGGCATCCCGCAGAAATCAGACACCACCACCCTAGAGATCCTCAT
CCTCGATGCCAATGACAATGCACCCCAGTTCCTGTGGGATTTCTACCAGGGTTCCATCTTTGAGGATG
CTCCACCCTCGACCAGCATCCTCCAGGTCTCTGCCACGGACCGGGACTCAGGTCCCAATGGGCGTCTG
CTGTACACCTTCCAGGGTGGGGACGACGGCGATGGGGACTTCTACATCGAGCCCACGTCCGGTGTGAT
TCGCACCCAGCGCCGGCTGGACCGGGAGAATGTGGCCGTGTACAACCTTTGGGCTCTGGCTGTGGATC
GGGGCAGTCCCACTCCCCTTAGCGCCTCGGTAGAAATCCAGGTGACCATCTTGGACATTAATGACAAT
GCCCCCATGTTTGAGAAGGACGAACTGGAGCTGTTTGTTGAGGAGAACAACCCAGTGGGGTCGGTGGT
GGCAAAGATTCGTGCTAACGACCCTGATGAAGGCCCTAATGCCCAGATCATGTATCAGATTGTGGAAG
GGGACATGCGGCATTTCTTCCAGCTGGACCTGCTCAACGGGGACCTGCGTGCCATGGTGGAGCTGGAC
TTTGAGGTCCGGCGGGAGTATGTGCTGGTGGTGCAGGCCACGTCGGCTCCGCTGGTGAGCCGAGCCAC
GGTGCACATCCTTCTCGTGCTCGAG

| | | | |
|---|---|---|---|
| NOV21d, 317460050 | SEQ ID NO: 282 | 847 aa | MW at 93611.5kD |
| Protein Sequence | | | |

KLYQVALFENEPAGTLILQLHAHHTIEGEEERVSYYMEGLFDERSRGYFRIDSAAGAVSTDSVLDRET
KETHVLRVKAVDYSTPPRSATTYITVLVKDTNDHSPVFEQSEYRERVRENLEVGYEVLTIRASDRDSP
INANLRYRVLGGAWDVFQLNESSGVVSTRAVLDREEAAEYQLLVEANDQGRNPGPLSATATVYIEVED
ENDNYPQFSEQNYVVQVPEDVGLNTAVLRVQATDRDQGQNAAIHYSILSGNVAGQFYLHSLSGILDVI
NPLDFEDVQKYSLSIKAQDGGRPPLINSSGVVSVQVLDVNDNEPIFVSSPFQATVLENVPLGYPVVHI
QAVDADSGENARLHYRLVDTASTFLGGGSAGPKNPAPTPDFPFQIRNSSGWITVCAELDREEVEHYSF
GVEAVDHGWPPMSSSTSVSITVLDVNDNDPVFTQPTYELRLNEDAAVGSSVLTLQARDRDANSVITYQ
LTGGNTRNRFALSSQRGGGLITLALPLDYKQEQQYVLAVTASDGTRSHTAHVLINVTDANTHRPVFQS
SHYTVSVSEDRPVGTSIATLSANDEDTGENARITYVIQDPVPQFRIDPDSGTMYTMMELDYENQVAYT
LTIMAQDNGIPQKSDTTTLEILILDANDNAPQFLWDFYQGSIFEDAPPSTSILQVSATDRDSGPNGRL
LYTFQGGDDGDGDFYIEPTSGVIRTQRRLDRENVAVYNLWALAVDRGSPTPLSASVEIQVTILDINDN
APMFEKDELELFVEENNPVGSVVAKIRANDPDEGPNAQIMYQIVEGDMRHFFQLDLLNGDLRAMVELD
FEVRREYVLVVQATSAPLVSRATVHILLVLE

| | | |
|---|---|---|
| NOV21e, SNP13382483 of | SEQ ID NO: 283 | 9087 bp |
| CG51965-01, DNA Sequence | ORF Start: ATG at 1 | ORF Stop: TGA at 9085 |
| | SNP Pos: 8435 | SNP Change: G to C |

ATGGCGCCGCCGCCGCCGCCCGTGCTGCCCGTGCTGCTGCTCCTGGCCGCCGCCGCCGCCCTGCCGGC
GATGGGGCTGCGAGCGGCCGCCTGGGAGCCGCGCGTACCCGGCGGGACCCGCGCCTTCGCCCTCCGGC
CCGGCTGTACCTACGCGGTGGGCGCCGCTTGCACGCCCCGGGCGCCGCGGGAGCTGCTGGACGTGGGC
CGCGATGGGCGGCTGGCAGGACGTCGGCGCGTCTCGGGCGCGGGGCGCCCGCTGCCGCTGCAAGTCCG
CTTGGTGGCCCGCAGTGCCCCGACGGCGCTGAGCCGCCGCCTGCGGGCGCGCACGCACCTTCCCGGCT
GCGGAGCCCGTGCCCGGCTCTGCGGAACCGGTGCCCGGCTCTGCGGGGCGCTCTGCTTCCCCGTCCCC
GGCGGCTGCGCGGCCGCGCAGCATTCGGCGCTCGCAGCTCCGACCACCTTACCCGCCTGCCGCTGCCC
GCCGCGCCCCAGGCCCCGCTGTCCCGGCCGTCCCATCTGCCTGCCGCCGGGCGGCTCGGTCCGCCTGC
GTCTGCTGTGCGCCCTGCGGCGCGCGGCTGGCGCCGTCCGGGTGGGACTGGCGCTGGAGGCCGCCACC
GCGGGGACGCCCTCCGCGTCGCCATCCCCATCGCCGCCCCTGCCGCCGAACTTGCCCGAAGCCCGGGC
GGGGCCGGCGCGACGGGCCCGGCGGGGCACGAGCGGCAGAGGGAGCCTGAAGTTTCCGATGCCCAACT
ACCAGGTGGCGTTGTTTGAGAACGAACCGGCGGGCACCCTCATCCTCCAGCTGCACGCGCACTACACC
ATCGAGGGCGAGGAGGAGCGCGTGAGCTATTACATGGAGGGGCTGTTCGACGAGCGCTCCCGGGGCTA
CTTCCGAATCGACTCTGCCACGGGCGCCGTGAGCACGGACAGCGTACTGGACCGCGAGACCAAGGAGA
CGCACGTCCTCAGGGTGAAAGCCGTGGACTACAGTACGCCGCCGCGCTCGGCCACCACCTACATCACT
GTCTTGGTCAAAGACACCAACGACCACAGCCCGGTCTTCGAGCAGTCGGAGTACCGCGAGCGCGTGCG
GGAGAACCTGGAGGTGGGCTACGAGGTGCTGACCATCCGCGCCAGCGACCGCGACTCGCCCATCAACG
CCAACTTGCGTTACCGCGTGTTGGGGGGCGCGTGGGACGTCTTCCAGCTCAACGAGAGCTCTGGCGTG
GTGAGCACACGGGCGGTGCTGGACCGGGAGGAGGCGGCCGAGTACCAGCTCCTGGTGGAGGCCAACGA
CCAGGGGCGCAATCCGGGCCCGCTCAGTGCCACGGCCACCGTGTACATCGAGGTGGAGGACGAGAACG
ACAACTACCCCCAGTTCAGCGAGCAGAACTACGTGGTCCAGGTGCCCGAGGACGTGGGGCTCAACACG
GCTGTGCTGCGAGTGCAGGCCACGGACCGGGACCAGGGCCAGAACGCGGCCATTCACTACAGCATCCT
CAGCGGGAACGTGGCCGGCCAGTTCTACCTGCACTCGCTGAGCGGGATCCTGGATGTGATCAACCCCT
TGGATTTCGAGGATGTCCAGAAATACTCGCTGAGCATTAAGGCCCAGGATGGGGGCCGGCCCCCGCTC
ATCAATTCTTCAGGGGTGGTGTCTGTGCAGGTGCTGGATGTCAACGACAACGAGCCTATCTTTGTGAG
CAGCCCCTTCCAGGCCACGGTGCTGGAGAATGTGCCCCTGGGCTACCCCGTGGTGCACATTCAGGCGG
TGGACGCGGACTCTGGAGAGAACGCCCGGCTGCACTATCGCCTGGTGGACACGGCCTCCACCTTTCTG
GGGGGCGGCAGCGCTGGGCCTAAGAATCCTGCCCCCACCCCTGACTTCCCCTTCCAGATCCACAACAG
CTCCGGTTGGATCACAGTGTGTGCCGAGCTGGACCGCGAGGAGGTGGAGCACTACAGCTTCGGGGTGG
AGGCGGTGGACCACGGCTCGCCCCCCATGAGCTCCTCCACCAGCGTGTCCATCACGGTGCTGGACGTG
AATGACAACGACCCGGTGTTCACGCAGCCCACCTACGAGCTTCGTCTGAATGAGGATGCGGCCGTGGG
GAGCAGCGTGCTGACCCTGCAGGCCCGCGACCGTGACGCCAACAGTGTGATTACCTACCAGCTCACAG
GCGGCAACACCCGGAACCGCTTTGCACTCAGCAGCCAGAGAGGGGGCGGCCTCATCACCCTGGCGCTA
CCTCTGGACTACAAGCAGGAGCAGCAGTACGTGCTGGCGGTGACAGCATCCGACGGCACACGGTCGCA
CACTGCGCATGTCCTAATCAACGTCACTGATGCCAACACCCACAGGCCTGTCTTTCAGAGCTCCCATT
ACACAGTGAGTGTCAGTGAGGACAGGCCTGTGGGCACCTCCATTGCTACCCTCAGTGCCAACGATGAG
GACACAGGAGAGAATGCCCGCATCACCTACGTGATTCAGGACCCCGTGCCGCAGTTCCGCATTGACCC
CGACAGTGGCACCATGTACACCATGATGGAGCTGGACTATGAGAACCAGGTCGCCTACACGCTGACCA
TCATGGCCCAGGACAACGGCATCCCGCAGAAATCAGAAACCACCACCCTAGAGATCCTCATCCTCGAT
GCCAATGACAATGCACCCCAGTTCCTGTGGGATTTCTACCAGGGTTCCATCTTTGAGGATGCTCCACC
CTCGACCAGCATCCTCCAGGTCTCTGCCACGGACCGGGACTCAGGTCCCAATGGGCGTCTGCTGTACA
CCTTCCAGGGTGGGGACGACGGCGATGGGGACTTCTACATCGAGCCCACGTCCGGTGTGATTCGCACC
CAGCGCCGGCTGGACCGGGAGAATGTGGCCGTGTACAACCTTTGGGCTCTGGCTGTGGATCGGGGCAG
TCCCACTCCCCTTAGCGCCTCGGTAGAAATCCAGGTGACCATCTTGGACATTAATGACAATGCCCCCA
TGTTTGAGAAGGACGAACTGGAGCTGTTTGTTGAGGAGAACAACCCAGTGGGGTCGGTGGTGGCAAAG
ATTCGTGCTAACGACCCTGATGAAGGCCCTAATGCCCAGATCATGTATCAGATTGTGGAAGGGGACAT
GCGGCATTTCTTCCAGCTGGACCTGCTCAACGGGGACCTGCGTGCCATGGTGGAGCTGGACTTTGAGG
TCCGGCGGGAGTATGTGCTGGTGGTGCAGGCCACGTCGGCTCCGCTGGTGAGCCGAGCCACGGTGCAC
ATCCTTCTCGTGGACCAGAATGACAACCCGCCTGTGCTGCCCGACTTCCAGATCCTCTTCAACAACTA
TGTCACCAACAAGTCCAACAGTTTCCCCACCGGCGTGATCGGCTGCATCCCGGCCCATGACCCCGACG
TGTCAGACAGCCTCAACTACACCTTCGTGCAGGGCAACGAGCTGCGCCTGTTGCTGCTGGACCCCGCC
ACGGGCGAACTGCAGCTCAGCCGCGACCTGGACAACAACCGGCCGCTGGAGGCGCTCATGGAGGTGTC
TGTGTCTGCAGATGGCATCCACAGCGTCACGGCCTTCTGCACCCTGCGTGTCACCATCATCACGGACG
ACATGCTGACCAACAGCATCACTGTCCGCCTGGAGAACATGTCCCAGGAGAAGTTCCTGTCCCCGCTG
CTGGCCCTCTTCGTGGAGGGGGTGGCCGCCGTGCTGTCCACCACCAAGGACGACGTCTTCGTCTTCAA
CGTCCAGAACGACACCGACGTCAGCTCCAACATCCTGAACGTGACCTTCTCGGCGCTGCTGCCTGGCG
GCGTCCGCGGCCAGTTCTTCCCGTCGGAGGACCTGCAGGAGCAGATCTACCTGAATCGGACGCTGCTG
ACCACCATCTCCACGCAGCGCGTGCTGCCCTTCGACGACAACATCTGCCTGCGCGAGCCCTGCGAGAA
CTACATGAAGTGCGTGTCCGTTCTGCGATTCGACAGCTCCGCGCCCTTCCTCAGCTCCACCACCGTGC
TCTTCCGGCCCATCCACCCCATCAACGGCCTGCGCTGCCGCTGCCCGCCCGGCTTCACCGGCGACTAC
TGCGAGACGGAGATCGACCTCTGCTACTCCGACCCGTGCGGCGCCAACGGCCGCTGCCGCAGCCGCGA
GGGCGGCTACACCTGCGAGTGCTTCGAGGACTTCACTGGAGAGCACTGTGAGGTGGATGCCCGCTCAG
GCCGCTGTGCCAACGGGGTGTGCAAGAACGGGGGCACCTGCGTGAACCTGCTCATCGGCGGCTTCCAC
TGCGTGTGTCCTCCTGGCGAGTATGAGAGGCCCTACTGTGAGGTGACCACCAGGAGCTTCCCGCCCCA
GTCCTTCGTCACCTTCCGGGGCCTGAGACAGCGCTTCCACTTCACCATCTCCCTCACGTTTGCCACTC
AGGAAAGGAACGGCTTGCTTCTCTACAACGGCCGCTTCAATGAGAAGCACGACTTCATCGCCCTGGAG
ATCGTGGACGAGCAGGTGCAGCTCACCTTCTCTGCAGGTGCAGGCGAGACAACAACGACCGTGGCACC
GAAGGTTCCCAGTGGTGTGAGTGACGGGCGGTGGCACTCTGTGCAGGTGCAGTACTACAACAAGGTAA
GATGGGCCCCACCACTTCCCCCTGGCCCCCAGCCCAATATTGGCCACCTGGGCCTGCCCCATGGGCCG
TCCGGGGAAAAGATGGCCGTGGTGACAGTGGATGATTGTGACACAACCATGGCTGTGCGCTTTGGAAA
GGACATCGGGAACTACAGCTGCGCTGCCCAGGGCACTCAGACCGGCTCCAAGAAGTCCCTGGATCTGA
CCGGCCCTCTACTCCTGGGGGGTGTCCCCGACCTGCCAGAAGACTTCCCAGTGCACAACCGGCAGTTC
GTGGGCTGCATGCGGAACCTGTCAGTCGACGGCAAAAATGTGGACATGGCCGGATTCATCGCCAACAA
TGGCACCCGGGAAGGCTGCGCTGCTCGGAGGAACTTCTGCGATGGGAGGCGGTGTCAGAATGGAGGCA
CCTGTGTCAACAGGTGGAATATGTATCTGTGTGAGTGTCCACTCCGATTCGGCGGGAAGAACTGTGAG
CAAGCCATGCCTCACCCCCAGCTCTTCAGCGGTGAGAGCGTCGTGTCCTGGAGTGACCTGAACATCAT
CATCTCTGTGCCCTGGTACCTGGGGCTCATGTTCCGGACCCGGAAGGAGGACAGCGTTCTGATGGAGG
CCACCAGTGGTGGGCCCACCAGCTTTCGCCTCCAGATCCTGAACAACTACCTCCAGTTTGAGGTGTCC
CACGGCCCCTCCGATGTGGAGTCCGTGATGCTGTCCGGGTTGCGGGTGACCGACGGGGAGTGGCACCA
CCTGCTGATCGAGCTGAAGAATGTTAAGGAGGACAGTGAGATGAAGCACCTGGTCACCATGACCTTGG
ACTATGGGATGGACCAGAACAAGGCAGATATCGGGGGCATGCTTCCCGGGCTGACGGTAAGGAGCGTG
GTGGTCGGAGGCGCCTCTGAAGACAAGGTCTCCGTGCGCCGTGGATTCCGAGGCTGCATGCAGGGAGT
GAGGATGGGGGGGACGCCCACCAACGTCGCCACCCTGAACATGAACAACGCACTCAAGGTCAGGGTGA
AGGACGGCTGTGATGTGGACGACCCCTGTACCTCGAGCCCCTGTCCCCCCAATAGCCGCTGCCACGAC
GCCTGGGAGGACTACAGCTGCGTCTGTGACAAAGGGTACCTTGGAATAAACTGTGTGGATGCCTGTCA
CCTGAACCCCTGCGAGAACATGGGGGCCTGCGTGCGCTCCCCCGGCTCCCCGCAGGGCTACGTGTGCG
AGTGTGGGCCCAGTCACTACGGGCCGTACTGTGAGAACAAACTCGACCTTCCGTGCCCCAGAGGCTGG
TGGGGGAACCCCGTCTGTGGACCCTGCCACTGTGCCGTCAGCAAAGGCTTTGATCCCGACTGTAATAA
GACCAACGGCCAGTGCCAATGCAAGGAGAATTACTACAAGCTCCTAGCCCAGGACACCTGTCTGCCCT
GCGACTGCTTCCCCCATGGCTCCCACAGCCGCACTTGCGACATGGCCACCGGGCAGTGTGCCTGCAAG
CCCGGCGTCATCGGCCGCCAGTGCAACCGCTGCGACAACCCGTTTGCCGAGGTCACCACGCTCGGCTG
TGAAGTGATCTACAATGGCTGTCCCAAAGCATTTGAGGCCGGCATCTGGTGGCCACAGACCAAGTTCG
GGCAGCCGGCTGCGGTGCCATGCCCTAAGGGATCCGTTGGAAATGCGGTCCGACACTGCAGCGGGGAG
AAGGGCTGGCTGCCCCCAGAGCTCTTTAACTGTACCACCATCTCCTTCGTGGACCTCAGGGCCATGAA
TGAGAAGCTGAGCCGCAATGAGACGCAGGTGGACGGCGCCAGGGCCCTGCAGCTGGTGAGGGCGCTGC
GCAGTGCTACACAGCACACGGGCACGCTCTTTGGCAATGACGTGCGCACGGCCTACCAGCTGCTGGGC
CACGTCCTTCAGCACGAGAGCTGGCAGCAGGGCTTCGACCTGGCAGCCACGCAGGACGCCGACTTTCA
CGAGGACGTCATCCACTCGGGCAGCGCCCTCCTGGCCCCAGCCACCAGGGCGGCGTGGGAGCAGATCC
AGCGGAGCGAGGGCGGCACGGCACAGCTGCTCCGGCGCCTCGAGGGCTACTTCAGCAACGTGGCACGC
AACGTGCGGCGGACGTACCTGCGGCCCTTCGTCATCGTCACCGCCAACATGGTTCTTGCTGTCGACAT
CTTTGACAAGTTCAACTTTACGGGAGCCAGGGTCCCGCGATTCGACACCATCCATGAAGAGTTCCCCA
GGGAGCTGGAGTCCTCCGTCTCCTTCCCAGCCGACTTCTTCAGACCACCTGAAGAAAAAGAAGGCCCC
CTGCTGAGGCCGGCTGGCCGGAGGACCACCCCGCAGACCACGCGCCCGGGGCCTGGGGCCGAGAGGGA
GGCCCCGATCAGCAGGCGGAGGCGACACCCTGATGACGCTGGCCAGTTCGCCGTCGCTCTGGTCATCA
TTTACCGCACCCTGGGGCAGCTCCTGCCCGAGCGCTACGACCCCGACCGTCGCAGCCTCCGGTTGCCT
CACCGGCCCATCATTAATACCCCGATGGTGAGCACGCTGGTGTACAGCGAGGGGGCTCCGCTCCCGAG
ACCCCTGGAGAGGCCCGTCCTGGTGGAGTTCGCCCTGCTGGAGGTGGAGGAGCGAACCAAGCCTGTCT
GCGTGTTCTGGAACCACTCCCTGGCCGTTGGTGGGACGGGAGGGTGGTCTGCCCGGGGCTGCGAGCTC
CTGTCCAGGAACCGGACACATGTCGCCTGCCAGTGCAGCCACACAGCCAGCTTTGCGGTGCTCATGGA
TATCTCCAGGCGTGAGAACGGGGAGGTCCTGCCTCTGAAGATTGTCACCTATGCCGCTGTGTCCTTGT
CACTGGCAGCCCTGCTGGTGGCCTTCGTCCTCCTGAGCCTGGTCCGCATGCTGCGCTCCAACCTGCAC
AGCATTCACAAGCACCTCGCCGTGGCGCTCTTCCTCTCTCAGCTGGTGTTCGTGATTGGGATCAACCA
GACGGAAAACCCGTTTCTGTGCACAGTGGTTGCCATCCTCCTCCACTACATCTACATGAGCACCTTTG
CCTGGACCCTCGTGGAGAGCCTGCATGTCTACCGCATGCTGACCGAGGTGCGCAACATCGACACGGGG
CCCATGCGGTTCTACTACGTCGTGGGCTGGGGCATCCCGGCCATTGTCACAGGACTGGCGGTCGGCCT
GGACCCCCAGGGCTACGGGAACCCCGACTTCTGCTGGCTGTCGCTTCAAGACACCCTGATTTGGAGCT
TTGCGGGGCCCATCGGAGCTGTTATAATCATCAACACAGTCACTTCTGTCCTATCTGCAAAGGTTTCC
TGCCAAAGAAAGCACCATTATTATGGGAAAAAAGGGATCGTCTCCCTGCTGAGGACCGCATTCCTCCT
GCTGCTGCTCATCAGCGCCACCTGGCTGCTGGGGCTGCTGGCTGTGAACCGCGATGCACTGAGCTTTC
ACTACCTCTTCGCCATCTTCAGCGGCTTACAGGGCCCCTTCGTCCTCCTTTTCCACTGCGTGCTCAAC
CAGGAGGTCCGGAAGCACCTGAAGGGCGTGCTCGGCGGGAGGAAGCTGCACCTGGAGGACTCCGCCAC
CACCAGGGCCACCCTGCTGACGCGCTCCCTCAACTGCAACACCACCTTCGGTGACGGGCCTGACATGC
TGCGCACAGACTTGGGCGAGTCCACCGCCTCGCTGGACAGCATCGTCAGGGATGAAGGGATCCAGAAG
CTCGGCGTGTCCTCTGGGCTGGTGAGGGGCAGCCACGGAGAGCCAGACGCGTCCCTCATGCCCAGGAG
CTCCAAGGATCCCCCTGGCCACGATTCCGACTCAGATAGCGAGCTGTCCCTGGATGAGCAGAGCAGCT
CTTACGCCTCCTCACACTCGTCAGACAGCGAGGACGATGGGGTGGGAGCTGAGGAAAAATGGGACCCG
GCCAGGGGCGCCGTCCACAGCACCCCCAAAGGGGACGCTGTGGCCAACCACGTTCCGGCCGGCTGGCC
CGACCAGAGCCTGGCTGAGAGTGACAGTGAGGACCCCAGCGGCAAGCCCCGCCTGAAGGTGGAGACCA
AGGTCAGCGTGGAGCTGCACCGCGAGGAGCAGGGCAGTCACCGTGGAGAGTACCCCCCCGGACAGGAG
AGCGGGGGCGCAGCCAGGCTTGCTAGCAGCCAGCCCCCAGAGCAGAGGAGCATCTTGAAAAATAAAGT
CACCTACCCGCCGCCGCTGACGCTGACGGAGCAGACGCTGAAGGGCCGGCTCCGGGAGAAGCTGGCCG
ACTGTGAGCAGAGCCCCACATCCTCGCGCACGTCTTCCCTGGGCTCTGGCGGCCCCGACTGCGCCATC
ACAGTCAAGAGCCCTGGGAGGGAGCCGGGGCGTGACCACCTCAACGGGGTGGCCATGAATGTGCGCAC
TGGGAGCGCCCAGGCCGATGGCTCCGACTCTGAGAAACCGTGA

| | | | |
|---|---|---|---|
| NOV21e, SNP13382483 of | SEQ ID NO: 284 | 3028 aa | MW at 330849.8kD |
| CG51965-01, Protein | SNP Pos: 2812 | | SNP Change: Cys to Ser |
| Sequence | | | |

MAPPPPPVLPVLLLLAAAAALPAMGLRAAAWEPRVPGGTRAFALRPGCTYAVGAACTPRAPRELLDVG
RDGRLAGRRRVSGAGRPLPLQVRLVARSAPTALSRRLRARTHLPGCGARARLCGTGARLCGALCFPVP
GGCAAAQHSALAAPTTLPACRCPPRPRPRCPGRPICLPPGGSVRLRLLCALRRAAGAVRVGLALEAAT
AGTPSASPSPSPPLPPNLPEARAGPARRARRGTSGRGSLKFPMPNYQVALFENEPAGTLILQLHAHYT
IEGEEERVSYYMEGLFDERSRGYFRIDSATGAVSTDSVLDRETKETHVLRVKAVDYSTPPRSATTYIT
VLVKDTNDHSPVFEQSEYRERVRENLEVGYEVLTIRASDRDSPINANLRYRVLGGAWDVFQLNESSGV
VSTRAVLDREEAAEYQLLVEANDQGRNPGPLSATATVYIEVEDENDNYPQFSEQNYVVQVPEDVGLNT
AVLRVQATDRDQGQNAAIHYSILSGNVAGQFYLHSLSGILDVINPLDFEDVQKYSLSIKAQDGGRPPL
INSSGVVSVQVLDVNDNEPIFVSSPFQATVLENVPLGYPVVHIQAVDADSGENARLHYRLVDTASTFL
GGGSAGPKNPAPTPDFPFQIHNSSGWITVCAELDREEVEHYSFGVEAVDHGSPPMSSSTSVSITVLDV
NDNDPVFTQPTYELRLNEDAAVGSSVLTLQARDRDANSVITYQLTGGNTRNRFALSSQRGGGLITLAL
PLDYKQEQQYVLAVTASDGTRSHTAHVLINVTDANTNRPVFQSSHYTVSVSEDRPVGTSIATLSANDE
DTGENARITYVIQDPVPQFRIDPDSGTMYTMMELDYENQVAYTLTIMAQDNGIPQKSDTTTLEILILD
ANDNAPQFLWDFYQGSIFEDAPPSTSILQVSATDRDSGPNGRLLYTFQGGDDGDGDFYIEPTSGVIRT
QRRLDRENVAVYNLWAIAVDRGSPTPLSASVEIQVTILDINDNAPMFEKDELELFVEENNPVGSVVAK
IRANDPDEGPNAQIMYQIVEGDMRHFFQLDLLNGDLRAMVELDFEVRREYVLVVQATSAPLVSRATVH
ILLVDQNDNPPVLPDFQILFNNYVTNKSNSFPTGVIGCIPAHDPDVSDSLNYTFVQGNELRLLLLDPA
TGELQLSRDLDNNRPLEALMEVSVSADGIHSVTAFCTLRVTIITDDMLTNSITVRLENMSQEKFLSPL
LALFVEGVAAVLSTTKDDVFVFNVQNDTDVSSNILNVTFSALLPGGVRGQFFPSEDLQEQIYLNRTLL
TTISTQRVLPFDDNICLREPCENYMKCVSVLRFDSSAPFLSSTTVLFRPIHPINGLRCRCPPGFTGDY
CETEIDLCYSDPCGANGRCRSREGGYTCECFEDFTGEHCEVDARSGRCANGVCKNGGTCVNLLIGGFH
CVCPPGEYERPYCEVTTRSFPPQSFVTFRGLRQRFHFTISLTFATQERNGLLLYNGRFNEKHDFIALE
IVDEQVQLTFSAGAGETTTTVAPKVPSGVSDGRWHSVQVQYYNKVRWAPPLPPGPQPNIGHLGLPHGP
SGEKMAVVTVDDCDTTMAVRFGKDIGNYSCAAQGTQTGSKKSLDLTGPLLLGGVPNLPEDFPVHNRQF
VGCMRNLSVDGKNVDMAGFIANNGTREGCAARRNFCDGRRCQNGGTCVNRWNMYLCECPLRFGGKNCE
QANPHPQLFSGESVVSWSDLNIIISVPWYLGLMFRTRKEDSVLMEATSGGPTSFRLQILNNYLQFEVS
HGPSDVESVMLSGLRVTDGEWHHLLIELKNVKEDSEMKHLVTMTLDYGMDQNKADIGGMLPGLTVRSV
VVGGASEDKVSVRRGFRGCMQGVRMGGTPTNVATLNMNNALKVRVKDGCDVDDPCTSSPCPPNSRCHD
AWEDYSCVCDKGYLGINCVDACHLNPCENMGACVRSPGSPQGYVCECGPSHYGPYCENKLDLPCPRGW
WGNPVCGPCHCAVSKGFDPDCNKTNGQCQCKENYYKLLAQDTCLPCDCFPHGSHSRTCDMATGQCACK
PGVIGRQCNRCDNPFAEVTTLGCEVIYNGCPKAFEAGIWWPQTKFGQPAAVPCPKGSVGNAVRHCSGE
KGWLPPELFNCTTISFVDLRAMNEKLSRNETQVDGARALQLVRALRSATQHTGTLFGNDVRTAYQLLG
HVLQHESWQQGFDLAATQDADFHEDVIHSGSALLAPATRAAWEQIQRSEGGTAQLLRRLEGYFSNVAR
NVRRTYLRPFVIVTANMVLAVDIFDKFNFTGARVPRFDTIHEEFPRELESSVSFPADFFRPPEEKEGP
LLRPAGRRTTPQTTRPGPGTEREAPISRRRRHPDDAGQFAVALVIIYRTLGOLLPERYDPDRRSLRLP
HRPIINTPMVSTLVYSEGAPLPRPLERPVLVEFALLEVEERTKPVCVFWNHSLAVGGTGGWSARGCEL
LSRNRTHVACQCSHTASFAVLMDISRRENGEVLPLKIVTYAAVSLSLAALLVAFVLLSLVRMLRSNLH
SIHKHLAVALFLSQLVFVIGINQTENPFLCTVVAILLHYIYMSTFAWTLVESLHVYRMLTEVRNIDTG
PMRFYYVVGWGIPAIVTGLAVGLDPQGYGNPDFCWLSLQDTLIWSFAGPIGAVIIINTVTSVLSAKVS
CQRKHHYYGKKGIVSLLRTAFLLLLLISATWLLGLLAVNRDALSFHYLFAIFSGLQGPFVLLFHCVLN
QEVRKHLKGVLGGRKLHLEDSATTRATLLTRSLNCNTTFGDGPDMLRTDLGESTASLDSIVRDEGIQK
LGVSSGLVRGSHGEPDASLMPRSSKDPPGHDSDSDSELSLDEOSSSYASSHSSDSEDDGVGAEEKWDP
ARGAVHSTPKGDAVANHVPAGWPDQSLAESDSEDPSGKPRLKVETKVSVELHREEQGSHRGEYPPDQE
SGGAARLASSQPPEQRSILKNKVTYPPPLTLTEQTLKGRLREKLADCEQSPTSSRTSSLGSGGPDCAI
TVKSPGREPGRDHLNGVANNVRTGSAQADGSDSEKP

| | | |
|---|---|---|
| NOV21f, SNP13382484 of | SEQ ID NO: 285 | 9087 bp |
| CG51965-01, DNA Sequence | ORF Start: ATG at 1 | ORF Stop: TGA at 9085 |
| | SNP Pos: 8592 | SNP Change: C to A |

ATGGCGCCGCCGCCGCCGCCCGTGCTGCCCGTGCTGCTGCTCCTGGCCGCCGCCGCCGCCCTGCCGGC
GATGGGGCTGCGAGCGGCCGCCTGGGAGCCGCGCGTACCCGGCGGGACCCGCGCCTTCGCCCTCCGGC
CCGGCTGTACCTACGCGGTGGGCGCCGCTTGCACGCCCCGGGCGCCGCGGGAGCTGCTGGACGTGGGC
CGCGATGGGCGGCTGGCAGGACGTCGGCGCGTCTCGGGCGCGGGGCGCCCGCTGCCGCTGCAAGTCCG
CTTGGTGGCCCGCAGTGCCCCGACGGCGCTGAGCCGCCGCCTGCGGGCGCGCACGCACCTTCCCGGCT
GCGGAGCCCGTGCCCGGCTCTGCGGAACCGGTGCCCGGCTCTGCGGGGCGCTCTGCTTCCCCGTCCCC
GGCGGCTGCGCGGCCGCGCAGCATTCGGCGCTCGCAGCTCCGACCACCTTACCCGCCTGCCGCTGCCC
GCCGCGCCCCAGGCCCCGCTGTCCCGGCCGTCCCATCTGCCTGCCGCCGGGCGGCTCGGTCCGCCTGC
GTCTGCTGTGCGCCCTGCGGCGCGCGGCTGGCGCCGTCCGGGTGGGACTGGCGCTGGAGGCCGCCACC
GCGGGGACGCCCTCCGCGTCGCCATCCCCATCGCCGCCCCTGCCGCCGAACTTGCCCGAAGCCCGGGC
GGGGCCGGCGCGACGGGCCCGGCGGGGCACGAGCGGCAGAGGGAGCCTGAAGTTTCCGATGCCCAACT
ACCAGGTGGCGTTGTTTGAGAACGAACCGGCGGGCACCCTCATCCTCCAGCTGCACGCGCACTACACC
ATCGAGGGCGAGGAGGAGCGCGTGAGCTATTACATGGAGGGGCTGTTCGACGAGCGCTCCCGGGGCTA
CTTCCGAATCGACTCTGCCACGGGCGCCGTGAGCACGGACAGCGTACTGGACCGCGAGACCAAGGAGA
CGCACGTCCTCAGGGTGAAAGCCGTGGACTACAGTACGCCGCCGCGCTCGGCCACCACCTACATCACT
GTCTTGGTCAAAGACACCAACGACCACAGCCCGGTCTTCGAGCAGTCGGAGTACCGCGAGCGCGTGCG
GGAGAACCTGGAGGTGGGCTACGAGGTGCTGACCATCCGCGCCAGCGACCGCGACTCGCCCATCAACG
CCAACTTGCGTTACCGCGTGTTGGGGGGCGCGTGGGACGTCTTCCAGCTCAACGAGAGCTCTGGCGTG
GTGAGCACACGGGCGGTGCTGGACCGGGAGGAGGCGGCCGAGTACCAGCTCCTGGTGGAGGCCAACGA
CCAGGGGCGCAATCCGGGCCCGCTCAGTGCCACGGCCACCGTGTACATCGAGGTGGAGGACGAGAACG
ACAACTACCCCCAGTTCAGCGAGCAGAACTACGTGGTCCAGGTGCCCGAGGACGTGGGGCTCAACACG
GCTGTGCTGCGAGTGCAGGCCACGGACCGGGACCAGGGCCAGAACGCGGCCATTCACTACAGCATCCT
CAGCGGGAACGTGGCCGGCCAGTTCTACCTGCACTCGCTGAGCGGGATCCTGGATGTGATCAACCCCT
TGGATTTCGAGGATGTCCAGAAATACTCGCTGAGCATTAAGGCCCAGGATGGGGGCCGGCCCCCGCTC
ATCAATTCTTCAGGGGTGGTGTCTGTGCAGGTGCTGGATGTCAACGACAACGAGCCTATCTTTGTGAG
CAGCCCCTTCCAGGCCACGGTGCTGGAGAATGTGCCCCTGGGCTACCCCGTGGTGCACATTCAGGCGG
TGGACGCGGACTCTGGAGAGAACGCCCGGCTGCACTATCGCCTGGTGGACACGGCCTCCACCTTTCTG
GGGGGCGGCAGCGCTGGGCCTAAGAATCCTGCCCCCACCCCTGACTTCCCCTTCCAGATCCACAACAG
CTCCGGTTGGATCACAGTGTGTGCCGAGCTGGACCGCGAGGAGGTGGAGCACTACAGCTTCGGGGTGG
AGGCGGTGGACCACGGCTCGCCCCCCATGAGCTCCTCCACACGCGTGTCCATCACGGTGCTGGACGTG
AATGACAACGACCCGGTGTTCACGCAGCCCACCTACGAGCTTCGTCTGAATGAGGATGCGGCCGTGGG
GAGCAGCGTGCTGACCCTGCAGGCCCGCGACCGTGACGCCAACAGTGTGATTACCTACCAGCTCACAG
GCGGCAACACCCGGAACCGCTTTGCACTCAGCAGCCAGAGAGGGGGCGGCCTCATCACCCTGGCGCTA
CCTCTGGACTACAAGCAGGAGCAGCAGTACGTGCTGGCGGTGACAGCATCCGACGGCACACGGTCGCA
CACTGCGCATGTCCTAATCAACGTCACTGATGCCAACACCCACAGGCCTGTCTTTCAGAGCTCCCATT
ACACAGTGAGTGTCAGTGAGGACAGGCCTGTGGGCACCTCCATTGCTACCCTCAGTGCCAACGATGAG
GACACAGGAGAGAATGCCCGCATCACCTACGTGATTCAGGACCCCGTGCCGCAGTTCCGCATTGACCC
CGACAGTGGCACCATGTACACCATGATGGAGCTGGACTATGAGAACCAGGTCGCCTACACGCTGACCA
TCATGGCCCAGGACAACGGCATCCCGCAGAAATCAGACACCACCACCCTAGAGATCCTCATCCTCGAT
GCCAATGACAATGCACCCCAGTTCCTGTGGGATTTCTACCAGGGTTCCATCTTTGAGGATGCTCCACC
CTCGACCAGCATCCTCCAGGTCTCTGCCACGGACCGGGACTCAGGTCCCAATGGGCGTCTGCTGTACA
CCTTCCAGGGTGGGGACGACGGCGATGGGGACTTCTACATCGAGCCCACGTCCGGTGTGATTCGCACC
CAGCGCCGGCTGGACCGGGAGAATGTGGCCGTGTACAACCTTTGGGCTCTGGCTGTGGATCGGGGCAG
TCCCACTCCCCTTAGCGCCTCGGTAGAAATCCAGGTGACCATCTTGGACATTAATGACAATGCCCCCA
TGTTTGAGAAGGACGAACTGGAGCTGTTTGTTGAGGAGAACAACCCAGTGGGGTCGGTGGTGGCAAAG
ATTCGTGCTAACGACCCTGATGAAGGCCCTAATGCCCAGATCATGTATCAGATTGTGGAAGGGGACAT
GCGGCATTTCTTCCAGCTGGACCTGCTCAACGGGGACCTGCGTGCCATGGTGGAGCTGGACTTTGAGG
TCCGGCGGGAGTATGTGCTGGTGGTGCAGGCCACGTCGGCTCCGCTGGTGAGCCGAGCCACGGTGCAC
ATCCTTCTCGTGGACCAGAATGACAACCCGCCTGTGCTGCCCGACTTCCAGATCCTCTTCAACAACTA
TGTCACCAACAAGTCCAACAGTTTCCCCACCGGCGTGATCGGCTGCATCCCGGCCCATGACCCCGACG
TGTCAGACAGCCTCAACTACACCTTCGTGCAGGGCAACGAGCTGCGCCTGTTGCTGCTGGACCCCGCC
ACGGGCGAACTGCAGCTCAGCCGCGACCTGGACAACAACCGGCCGCTGGAGGCGCTCATGGAGGTGTC
TGTGTCTGCAGATGGCATCCACAGCGTCACGGCCTTCTGCACCCTGCGTGTCACCATCATCACGGACG
ACATGCTGACCAACAGCATCACTGTCCGCCTGGAGAACATGTCCCAGGAGAAGTTCCTGTCCCCGCTG
CTGGCCCTCTTCGTGGAGGGGGTGGCCGCCGTGCTGTCCACCACCAAGGACGACGTCTTCGTCTTCAA
CGTCCAGAACGACACCGACGTCAGCTCCAACATCCTGAACGTGACCTTCTCGGCGCTGCTGCCTGGCG
GCGTCCGCGGCCAGTTCTTCCCGTCGGAGGACCTGCAGGAGCAGATCTACCTGAATCGGACGCTGCTG
ACCACCATCTCCACGCAGCGCGTGCTGCCCTTCGACGACAACATCTGCCTGCGCGAGCCCTGCGAGAA
CTACATGAAGTGCGTGTCCGTTCTGCGATTCGACAGCTCCGCGCCCTTCCTCAGCTCCACCACCGTGC
TCTTCCGGCCCATCCACCCCATCAACGGCCTGCGCTGCCGCTGCCCGCCCGGCTTCACCGGCGACTAC
TGCGAGACGGAGATCGACCTCTGCTACTCCGACCCGTGCGGCGCCAACGGCCGCTGCCGCAGCCGCGA
GGGCGGCTACACCTGCGAGTGCTTCGAGGACTTCACTGGAGAGCACTGTGAGGTGGATGCCCGCTCAG
GCCGCTGTGCCAACGGGGTGTGCAAGAACGGGGGCACCTGCGTGAACCTGCTCATCGGCGGCTTCCAC
TGCGTGTGTCCTCCTGGCGAGTATGAGAGGCCCTACTGTGAGGTGACCACCAGGAGCTTCCCGCCCCA
GTCCTTCGTCACCTTCCGGGGCCTGAGACAGCGCTTCCACTTCACCATCTCCCTCACGTTTGCCACTC
AGGAAAGGAACGGCTTGCTTCTCTACAACGGCCGCTTCAATGAGAAGCACGACTTCATCGCCCTGGAG
ATCGTGGACGAGCAGGTGCAGCTCACCTTCTCTGCAGGTGCAGGCGAGACAACAACGACCGTGGCACC
GAAGGTTCCCAGTGGTGTGAGTGACGGGCGGTGGCACTCTGTGCAGGTGCAGTACTACAACAAGGTAA
GATGGGCCCCACCACTTCCCCCTGGCCCCCAGCCCAATATTGGCCACCTGGGCCTGCCCCATGGGCCG
TCCGGGGAAAAGATGGCCGTGGTGACAGTGGATGATTGTGACACAACCATGGCTGTGCGCTTTGGAAA
GGACATCGGGAACTACAGCTGCGCTGCCCAGGGCACTCAGACCGGCTCCAAGAAGTCCCTGGATCTGA
CCGGCCCTCTACTCCTGGGGGGTGTCCCCAACCTGCCAGAAGACTTCCCAGTGCACAACCGGCAGTTC
GTGGGCTGCATGCGGAACCTGTCAGTCGACGGCAAAAATGTGGACATGGCCGGATTCATCGCCAACAA
TGGCACCCGGGAAGGCTGCGCTGCTCGGAGGAACTTCTGCGATGGGAGGCGGTGTCAGAATGGAGGCA
CCTGTGTCAACAGGTGGAATATGTATCTGTGTGAGTGTCCACTCCGATTCGGCGGGAAGAACTGTGAG
CAAGCCATGCCTCACCCCCAGCTCTTCAGCGGTGAGAGCGTCGTGTCCTGGAGTGACCTGAACATCAT
CATCTCTGTGCCCTGGTACCTGGGGCTCATGTTCCGGACCCGGAAGGAGGACAGCGTTCTGATGGAGG
CCACCAGTGGTGGGCCCACCAGCTTTCGCCTCCAGATCCTGAACAACTACCTCCAGTTTGAGGTGTCC
CACGGCCCCTCCGATGTGGAGTCCGTGATGCTGTCCGGGTTGCGGGTGACCGACGGGGAGTGGCACCA
CCTGCTGATCGAGCTGAAGAATGTTAAGGAGGACAGTGAGATGAAGCACCTGGTCACCATGACCTTGG
ACTATGGGATGGACCAGAACAAGGCAGATATCGGGGGCATGCTTCCCGGGCTGACGGTAAGGAGCGTG
GTGGTCGGAGGCGCCTCTGAAGACAAGGTCTCCGTGCGCCGTGGATTCCGAGGCTGCATGCAGGGAGT
GAGGATGGGGGGGACGCCCACCAACGTCGCCACCCTGAACATGAACAACGCACTCAAGGTCAGGGTGA
AGGACGGCTGTGATGTGGACGACCCCTGTACCTCGAGCCCCTGTCCCCCCAATAGCCGCTGCCACGAC
GCCTGGGAGGACTACAGCTGCGTCTGTGACAAAGGGTACCTTGGAATAAACTGTGTGGATGCCTGTCA
CCTGAACCCCTGCGAGAACATGGGGGCCTGCGTGCGCTCCCCCGGCTCCCCGCAGGGCTACGTGTGCG
AGTGTGGGCCCAGTCACTACGGGCCGTACTGTGAGAACAAACTCGACCTTCCGTGCCCCAGAGGCTGG
TGGGGGAACCCCGTCTGTGGACCCTGCCACTGTGCCGTCAGCAAAGGCTTTGATCCCGACTGTAATAA
GACCAACGGCCAGTGCCAATGCAAGGAGAATTACTACAAGCTCCTAGCCCAGGACACCTGTCTGCCCT
GCGACTGCTTCCCCCATGGCTCCCACAGCCGCACTTGCGACATGGCCACCGGGCAGTGTGCCTGCAAG
CCCGGCGTCATCGGCCGCCAGTGCAACCGCTGCGACAACCCGTTTGCCGAGGTCACCACGCTCGGCTG
TGAAGTGATCTACAATGGCTGTCCCAAAGCATTTGAGGCCGGCATCTGGTGGCCACAGACCAAGTTCG
GGCAGCCGGCTGCGGTGCCATGCCCTAAGGGATCCGTTGGAAATGCGGTCCGACACTGCAGCGGGGAG
AAGGGCTGGCTGCCCCCAGAGCTCTTTAACTGTACCACCATCTCCTTCGTGGACCTCAGGGCCATGAA
TGAGAAGCTGAGCCGCAATGAGACGCAGGTGGACGGCGCCAGGGCCCTGCAGCTGGTGAGGGCGCTGC
GCAGTGCTACACAGCACACGGGCACGCTCTTTGGCAATGACGTGCGCACGGCCTACCAGCTGCTGGGC
CACGTCCTTCAGCACGAGAGCTGGCAGCAGGGCTTCGACCTGGCAGCCACGCAGGACGCCGACTTTCA
CGAGGACGTCATCCACTCGGGCAGCGCCCTCCTGGCCCCAGCCACCAGGGCGGCGTGGGAGCAGATCC
AGCGGAGCGAGGGCGGCACGGCACAGCTGCTCCGGCGCCTCGAGGGCTACTTCAGCAACGTGGCACGC
AACGTGCGGCGGACGTACCTGCGGCCCTTCGTCATCGTCACCGCCAACATGGTTCTTGCTGTCGACAT
CTTTGACAAGTTCAACTTTACGGGAGCCAGGGTCCCGCGATTCGACACCATCCATGAAGAGTTCCCCA
GGGAGCTGGAGTCCTCCGTCTCCTTCCCAGCCGACTTCTTCAGACCACCTGAAGAAAAAGAAGGCCCC
CTGCTGAGGCCGGCTGGCCGGAGGACCACCCCGCAGACCACGCGCCCGGGGCCTGGCACCGAGAGGGA
GGCCCCGATCAGCAGGCGGAGGCGACACCCTGATGACGCTGGCCAGTTCGCCGTCGCTCTGGTCATCA
TTTACCGCACCCTGGGGCAGCTCCTGCCCGAGCGCTACGACCCCGACCGTCGCAGCCTCCGGTTGCCT
CACCGGCCCATCATTAATACCCCGATGGTGAGCACGCTGGTGTACAGCGAGGGGGCTCCGCTCCCGAG
ACCCCTGGAGAGGCCCGTCCTGGTGGAGTTCGCCCTGCTGGAGGTGGAGGAGCGAACCAAGCCTGTCT
GCGTGTTCTGGAACCACTCCCTGGCCGTTGGTGGGACGGGAGGGTGGTCTGCCCGGGGCTGCGAGCTC
CTGTCCAGGAACCGGACACATGTCGCCTGCCAGTGCAGCCACACAGCCAGCTTTGCGGTGCTCATGGA
TATCTCCAGGCGTGAGAACGGGGAGGTCCTGCCTCTGAAGATTGTCACCTATGCCGCTGTGTCCTTGT
CACTGGCAGCCCTGCTGGTGGCCTTCGTCCTCCTGAGCCTGGTCCGCATGCTGCGCTCCAACCTGCAC
AGCATTCACAAGCACCTCGCCGTGGCGCTCTTCCTCTCTCAGCTGGTGTTCGTGATTGGGATCAACCA
GACGGAAAACCCGTTTCTGTGCACAGTGGTTGCCATCCTCCTCCACTACATCTACATGAGCACCTTTG
CCTGGACCCTCGTGGAGAGCCTGCATGTCTACCGCATGCTGACCGAGGTGCGCAACATCGACACGGGG
CCCATGCGGTTCTACTACTGTCGTGGGCTGGGGATCCCGGCCATTGTCACAGGACTGGCGGTCGGCCT
GGACCCCCAGGGCTACGGGAACCCCGACTTCTGCTGGCTGTCGCTTCAAGACACCCTGATTTGGAGCT
TTGCGGGGCCCATCGGAGCTGTTATAATCATCAACACAGTCACTTCTGTCCTATCTGCAAAGGTTTCC
TGCCAAAGAAAGCACCATTATTATGGGAAAAAAGGGATCGTCTCCCTGCTGAGGACCGCATTCCTCCT
GCTGCTGCTCATCAGCGCCACCTGGCTGCTGGGGCTGCTGGCTGTGAACCGCGATGCACTGAGCTTTC
ACTACCTCTTCGCCATCTTCAGCGGCTTACAGGGCCCCTTCGTCCTCCTTTTCCACTGCGTGCTCAAC
CAGGAGGTCCGGAAGCACCTGAAGGGCGTGCTCGGCGGGAGGAAGCTGCACCTGGAGGACTCCGCCAC
CACCAGGGCCACCCTGCTGACGCGCTCCCTCAACTGCAACACCACCTTCGGTGACGGGCCTGACATGC
TGCGCACAGACTTGGGCGAGTCCACCGCCTCGCTGGACAGCATCGTCAGGGATGAAGGGATCCAGAAG
CTCGGCGTGTCCTCTGGGCTGGTGAGGGGCAGCCACGGAGAGCCAGACGCGTCCCTCATGCCCAGGAG
CTGCAAGGATCCCCCTGGCCACGATTCCGACTCAGATAGCGAGCTGTCCCTGGATGAGCAGAGCAGCT
CTTACGCCTCCTCACACTCGTCAGACAGCGAGGACGATGGGGTGGGAGCTGAGGAAAAATGGGACCCG
GCCAGGGGCGCCGTCCACAGCACACCCAAAGGGGACGCTGTGGCCAACCACGTTCCGGCCGGCTGGCC
CGACCAGAGCCTGGCTGAGAGTGACAGTGAGGACCCCAGCGGCAAGCCCCGCCTGAAGGTGGAGACCA
AGGTCAGCGTGGAGCTGCACCGCGAGGAGCAGGGCAGTCACCGTGGAGAGTACCCCCCGGACCAGGAG
AGCGGGGGCGCAGCCAGGCTTGCTAGCAGCCAGCCCCCAGAGCAGAGGAGCATCTTGAAAAATAAAGT
CACCTACCCGCCGCCGCTGACGCTGACGGAGCAGACGCTGAAGGGCCGGCTCCGGGAGAAGCTGGCCG
ACTGTGAGCAGAGCCCCACATCCTCGCGCACGTCTTCCCTGGGCTCTGGCGGCCCCGACTGCGCCATC
ACAGTCAAGAGCCCTGGGAGGGAGCCGGGGCGTGACCACCTCAACGGGGTGGCCATGAATGTGCGCAC
TGGGAGCGCCCAGGCCGATGGCTCCGACTCTGAGAAACCGTGA

| | | | |
|---|---|---|---|
| NOV21f, SNP13382484 of | SEQ ID NO: 286 | 3028 aa | MW at 330865.9kD |
| CG51965-01, Protein | SNP Pos: 2864 | | SNP Change: Thr to Thr |
| Sequence | | | |

MAPPPPPVLPVLLLLAAAAALPAMGLRAAAWEPRVPGGTRAFALRPGCTYAVGAACTPRAPRELLDVG
RDGRLAGRRRVSGAGRPLPLQVRLVARSAPTALSRRLRARTHLPGCGARARLCGTGARLCGALCFPVP
GGCAAAQHSALAAPTTLPACRCPPRPRPRCPGRPICLPPGGSVRLRLLCALRRAAGAVRVGLALEAAT
AGTPSASPSPSPPLPPNLPEARAGPARRARRGTSGRGSLKFPMPNYQVALFENEPAGTLILQLHAHYT
IEGEEERVSYYMEGLFDERSRGYFRIDSATGAVSTDSVLDRETKETHVLRVKAVDYSTPPRSATTYIT
VLVKDTNDHSPVFEQSEYRERVRENLEVGYEVLTIRASDRDSPINANLRYRVLGGAWDVFQLNESSGV
VSTRAVLDREEAAEYQLLVEANDQGRNPGPLSATATVYIEVEDENDNYPQFSEQNYVVQVPEDVGLNT
AVLRVQATDRDQGQNAAIHYSILSGNVAGQFYLHSLSGILDVINPLDFEDVQKYSLSIKAQDGGRPPL
INSSGVVSVQVLDVNDNEPIFVSSPFQATVLENVPLGYPVVHIQAVDADSGENARLHYRLVDTASTFL
GGGSAGPKNPAPTPDFPFQIHNSSGWITVCAELDREEVEHYSFGVEAVDHGSPPMSSSTSVSITVLDV
NDNDPVFTQPTYELRLNEDAAVGSSVLTLQARDRDANSVITYQLTGGNTRNRFALSSQRGGGLITLAL
PLDYKQEQQYVLAVTASDGTRSHTAHVLINVTDANTNRPVFQSSHYTVSVSEDRPVGTSIATLSANDE
DTGENARITYVIQDPVPQFRIDPDSGTMYTMMELDYENQVAYTLTIMAQDNGIPQKSDTTTLEILILD
ANDNAPQFLWDFYQGSIFEDAPPSTSILQVSATDRDSGPNGRLLYTFQGGDDGDGDFYIEPTSGVIRT
QRRLDRENVAVYNLWAIAVDRGSPTPLSASVEIQVTILDINDNAPMFEKDELELFVEENNPVGSVVAK
IRANDPDEGPNAQIMYQIVEGDMRHFFQLDLLNGDLRAMVELDFEVRREYVLVVQATSAPLVSRATVH
ILLVDQNDNPPVLPDFQILFNNYVTNKSNSFPTGVIGCIPAHDPDVSDSLNYTFVQGNELRLLLLDPA
TGELQLSRDLDNNRPLEALMEVSVSADGIHSVTAFCTLRVTIITDDMLTNSITVRLENMSQEKFLSPL
LALFVEGVAAVLSTTKDDVFVFNVQNDTDVSSNILNVTFSALLPGGVRGQFFPSEDLQEQIYLNRTLL
TTISTQRVLPFDDNICLREPCENYMKCVSVLRFDSSAPFLSSTTVLFRPIHPINGLRCRCPPGFTGDY
CETEIDLCYSDPCGANGRCRSREGGYTCECFEDFTGEHCEVDARSGRCANGVCKNGGTCVNLLIGGFH
CVCPPGEYERPYCEVTTRSFPPQSFVTFRGLRQRFHFTISLTFATQERNGLLLYNGRFNEKHDFIALE
IVDEQVQLTFSAGAGETTTTVAPKVPSGVSDGRWHSVQVQYYNKVRWAPPLPPGPQPNIGHLGLPHGP
SGEKMAVVTVDDCDTTMAVRFGKDIGNYSCAAQGTQTGSKKSLDLTGPLLLGGVPNLPEDFPVHNRQF
VGCMRNLSVDGKNVDMAGFIANNGTREGCAARRNFCDGRRCQNGGTCVNRWNMYLCECPLRFGGKNCE
QANPHPQLFSGESVVSWSDLNIIISVPWYLGLMFRTRKEDSVLMEATSGGPTSFRLQILNNYLQFEVS
HGPSDVESVMLSGLRVTDGEWHHLLIELKNVKEDSEMKHLVTMTLDYGMDQNKADIGGMLPGLTVRSV
VVGGASEDKVSVRRGFRGCMQGVRMGGTPTNVATLNMNNALKVRVKDGCDVDDPCTSSPCPPNSRCHD
AWEDYSCVCDKGYLGINCVDACHLNPCENMGACVRSPGSPQGYVCECGPSHYGPYCENKLDLPCPRGW
WGNPVCGPCHCAVSKGFDPDCNKTNGQCQCKENYYKLLAQDTCLPCDCFPHGSHSRTCDMATGQCACK
PGVIGRQCNRCDNPFAEVTTLGCEVIYNGCPKAFEAGIWWPQTKFGQPAAVPCPKGSVGNAVRHCSGE
KGWLPPELFNCTTISFVDLRAMNEKLSRNETQVDGARALQLVRALRSATQHTGTLFGNDVRTAYQLLG
HVLQHESWQQGFDLAATQDADFHEDVIHSGSALLAPATRAAWEQIQRSEGGTAQLLRRLEGYFSNVAR
NVRRTYLRPFVIVTANMVLAVDIFDKFNFTGARVPRFDTIHEEFPRELESSVSFPADFFRPPEEKEGP
LLRPAGRRTTPQTTRPGPGTEREAPISRRRRHPDDAGQFAVALVIIYRTLGOLLPERYDPDRRSLRLP
HRPIINTPMVSTLVYSEGAPLPRPLERPVLVEFALLEVEERTKPVCVFWNHSLAVGGTGGWSARGCEL
LSRNRTHVACQCSHTASFAVLMDISRRENGEVLPLKIVTYAAVSLSLAALLVAFVLLSLVRMLRSNLH
SIHKHLAVALFLSQLVFVIGINQTENPFLCTVVAILLHYIYMSTFAWTLVESLHVYRMLTEVRNIDTG
PMRFYYVVGWGIPAIVTGLAVGLDPQGYGNPDFCWLSLQDTLIWSFAGPIGAVIIINTVTSVLSAKVS
CQRKHHYYGKKGIVSLLRTAFLLLLLISATWLLGLLAVNRDALSFHYLFAIFSGLQGPFVLLFHCVLN
QEVRKHLKGVLGGRKLHLEDSATTRATLLTRSLNCNTTFGDGPDMLRTDLGESTASLDSIVRDEGIQK
LGVSSGLVRGSHGEPDASLMPRSSKDPPGHDSDSDSELSLDEOSSSYASSHSSDSEDDGVGAEEKWDP
ARGAVHSTPKGDAVANHVPAGWPDQSLAESDSEDPSGKPRLKVETKVSVELHREEQGSHRGEYPPDQE
SGGAARLASSQPPEQRSILKNKVTYPPPLTLTEQTLKGRLREKLADCEQSPTSSRTSSLGSGGPDCAI
TVKSPGREPGRDHLNGVANNVRTGSAQADGSDSEKP

| | | |
|---|---|---|
| NOV21g, SNP13382485 of | SEQ ID NO: 287 | 9087 bp |
| CG51965-01, DNA Sequence | ORF Start: ATG at 1 | ORF Stop: TGA at 9085 |
| | SNP Pos: 8752 | SNP Change: G to C |

ATGGCGCCGCCGCCGCCGCCCGTGCTGCCCGTGCTGCTGCTCCTGGCCGCCGCCGCCGCCCTGCCGGC
GATGGGGCTGCGAGCGGCCGCCTGGGAGCCGCGCGTACCCGGCGGGACCCGCGCCTTCGCCCTCCGGC
CCGGCTGTACCTACGCGGTGGGCGCCGCTTGCACGCCCCGGGCGCCGCGGGAGCTGCTGGACGTGGGC
CGCGATGGGCGGCTGGCAGGACGTCGGCGCGTCTCGGGCGCGGGGCGCCCGCTGCCGCTGCAAGTCCG
CTTGGTGGCCCGCAGTGCCCCGACGGCGCTGAGCCGCCGCCTGCGGGCGCGCACGCACCTTCCCGGCT
GCGGAGCCCGTGCCCGGCTCTGCGGAACCGGTGCCCGGCTCTGCGGGGCGCTCTGCTTCCCCGTCCCC
GGCGGCTGCGCGGCCGCGCAGCATTCGGCGCTCGCAGCTCCGACCACCTTACCCGCCTGCCGCTGCCC
GCCGCGCCCCAGGCCCCGCTGTCCCGGCCGTCCCATCTGCCTGCCGCCGGGCGGCTCGGTCCGCCTGC
GTCTGCTGTGCGCCCTGCGGCGCGCGGCTGGCGCCGTCCGGGTGGGACTGGCGCTGGAGGCCGCCACC
GCGGGGACGCCCTCCGCGTCGCCATCCCCATCGCCGCCCCTGCCGCCGAACTTGCCCGAAGCCCGGGC
GGGGCCGGCGCGACGGGCCCGGCGGGGCACGAGCGGCAGAGGGAGCCTGAAGTTTCCGATGCCCAACT
ACCAGGTGGCGTTGTTTGAGAACGAACCGGCGGGCACCCTCATCCTCCAGCTGCACGCGCACTACACC
ATCGAGGGCGAGGAGGAGCGCGTGAGCTATTACATGGAGGGGCTGTTCGACGAGCGCTCCCGGGGCTA
CTTCCGAATCGACTCTGCCACGGGCGCCGTGAGCACGGACAGCGTACTGGACCGCGAGACCAAGGAGA
CGCACGTCCTCAGGGTGAAAGCCGTGGACTACAGTACGCCGCCGCGCTCGGCCACCACCTACATCACT
GTCTTGGTCAAAGACACCAACGACCACAGCCCGGTCTTCGAGCAGTCGGAGTACCGCGAGCGCGTGCG
GGAGAACCTGGAGGTGGGCTACGAGGTGCTGACCATCCGCGCCAGCGACCGCGACTCGCCCATCAACG
CCAACTTGCGTTACCGCGTGTTGGGGGGCGCGTGGGACGTCTTCCAGCTCAACGAGAGCTCTGGCGTG
GTGAGCACACGGGCGGTGCTGGACCGGGAGGAGGCGGCCGAGTACCAGCTCCTGGTGGAGGCCAACGA
CCAGGGGCGCAATCCGGGCCCGCTCAGTGCCACGGCCACCGTGTACATCGAGGTGGAGGACGAGAACG
ACAACTACCCCCAGTTCAGCGAGCAGAACTACGTGGTCCAGGTGCCCGAGGACGTGGGGCTCAACACG
GCTGTGCTGCGAGTGCAGGCCACGGACCGGGACCAGGGCCAGAACGCGGCCATTCACTACAGCATCCT
CAGCGGGAACGTGGCCGGCCAGTTCTACCTGCACTCGCTGAGCGGGATCCTGGATGTGATCAACCCCT
TGGATTTCGAGGATGTCCAGAAATACTCGCTGAGCATTAAGGCCCAGGATGGGGGCCGGCCCCCGCTC
ATCAATTCTTCAGGGGTGGTGTCTGTGCAGGTGCTGGATGTCAACGACAACGAGCCTATCTTTGTGAG
CAGCCCCTTCCAGGCCACGGTGCTGGAGAATGTGCCCCTGGGCTACCCCGTGGTGCACATTCAGGCGG
TGGACGCGGACTCTGGAGAGAACGCCCGGCTGCACTATCGCCTGGTGGACACGGCCTCCACCTTTCTG
GGGGGCGGCAGCGCTGGGCCTAAGAATCCTGCCCCCACCCCTGACTTCCCCTTCCAGATCCACAACAG
CTCCGGTTGGATCACAGTGTGTGCCGAGCTGGACCGCGAGGAGGTGGAGCACTACAGCTTCGGGGTGG
AGGCGGTGGACCACGGCTCGCCCCCCATGAGCTCCTCCACCAGCGTGTCCATCACGGTGCTGGACGTG
AATGACAACGACCCGGTGTTCACGCAGCCCACCTACGAGCTTCGTCTGAATGAGGATGCGGCCGTGGG
GAGCAGCGTGCTGACCCTGCAGGCCCGCGACCGTGACGCCAACAGTGTGATTACCTACCAGCTCACAG
GCGGCAACACCCGGAACCGCTTTGCACTCAGCAGCCAGAGAGGGGGCGGCCTCATCACCCTGGCGCTA
CCTCTGGACTACAAGCAGGAGCAGCAGTACGTGCTGGCGGTGACAGCATCCGACGGCACACGGTCGCA
CACTGCGCATGTCCTAATCAACGTCACTGATGCCAACACCCACAGGCCTGTCTTTCAGAGCTCCCATT
ACACAGTGAGTGTCAGTGAGGACAGGCCTGTGGGCACCTCCATTGCTACCCTCAGTGCCAACGATGAG
GACACAGGAGAGAATGCCCGCATCACCTACGTGATTCAGGACCCCGTGCCGCAGTTCCGCATTGACCC
CGACAGTGGCACCATGTACACCATGATGGAGCTGGACTATGAGAACCAGGTCGCCTACACGCTGACCA
TCATGGCCCAGGACAACGGCATCCCGCAGAAATCAGACACCACCACCCTAGAGATCCTCATCCTCGAT
GCCAATGACAATGCACCCCAGTTCCTGTGGGATTTCTACCAGGGTTCCATCTTTGAGGATGCTCCACC
CTCGACCAGCATCCTCCAGGTCTCTGCCACGGACCGGGACTCAGGTCCCAATGGGCGTCTGCTGTACA
CCTTCCAGGGTGGGGACGACGGCGATGGGGACTTCTACATCGAGCCCACGTCCGGTGTGATTCGCACC
CAGCGCCGGCTGGACCGGGAGAATGTGGCCGTGTACAACCTTTGGGCTCTGGCTGTGGATCGGGGCAG
TCCCACTCCCCTTAGCGCCTCGGTAGAAATCCAGGTGACCATCTTGGACATTAATGACAATGCCCCCA
TGTTTGAGAAGGACGAACTGGAGCTGTTTGTTGAGGAGAACAACCCAGTGGGGTCGGTGGTGGCAAAG
ATTCGTGCTAACGACCCTGATGAAGGCCCTAATGCCCAGATCATGTATCAGATTGTGGAAGGGGACAT
GCGGCATTTCTTCCAGCTGGACCTGCTCAACGGGGACCTGCGTGCCATGGTGGAGCTGGACTTTGAGG
TCCGGCGGGAGTATGTGCTGGTGGTGCAGGCCACGTCGGCTCCGCTGGTGAGCCGAGCCACGGTGCAC
ATCCTTCTCGTGGACCAGAATGACAACCCGCCTGTGCTGCCCGACTTCCAGATCCTCTTCAACAACTA
TGTCACCAACAAGTCCAACAGTTTCCCCACCGGCGTGATCGGCTGCATCCCGGCCCATGACCCCGACG
TGTCAGACAGCCTCAACTACACCTTCGTGCAGGGCAACGAGCTGCGCCTGTTGCTGCTGGACCCCGCC
ACGGGCGAACTGCAGCTCAGCCGCGACCTGGACAACAACCGGCCGCTGGAGGCGCTCATGGAGGTGTC
TGTGTCTGCAGATGGCATCCACAGCGTCACGGCCTTCTGCACCCTGCGTGTCACCATCATCACGGACG
ACATGCTGACCAACAGCATCACTGTCCGCCTGGAGAACATGTCCCAGGAGAAGTTCCTGTCCCCGCTG
CTGGCCCTCTTCGTGGAGGGGGTGGCCGCCGTGCTGTCCACCACCAAGGACGACGTCTTCGTCTTCAA
CGTCCAGAACGACACCGACGTCAGCTCCAACATCCTGAACGTGACCTTCTCGGCGCTGCTGCCTGGCG
GCGTCCGCGGCCAGTTCTTCCCGTCGGAGGACCTGCAGGAGCAGATCTACCTGAATCGGACGCTGCTG
ACCACCATCTCCACGCAGCGCGTGCTGCCCTTCGACGACAACATCTGCCTGCGCGAGCCCTGCGAGAA
CTACATGAAGTGCGTGTCCGTTCTGCGATTCGACAGCTCCGCGCCCTTCCTCAGCTCCACCACCGTGC
TCTTCCGGCCCATCCACCCCATCAACGGCCTGCGCTGCCGCTGCCCGCCCGGCTTCACCGGCGACTAC
TGCGAGACGGAGATCGACCTCTGCTACTCCGACCCGTGCGGCGCCAACGGCCGCTGCCGCAGCCGCGA
GGGCGGCTACACCTGCGAGTGCTTCGAGGACTTCACTGGAGAGCACTGTGAGGTGGATGCCCGCTCAG
GCCGCTGTGCCAACGGGGTGTGCAAGAACGGGGGCACCTGCGTGAACCTGCTCATCGGCGGCTTCCAC
TGCGTGTGTCCTCCTGGCGAGTATGAGAGGCCCTACTGTGAGGTGACCACCAGGAGCTTCCCGCCCCA
GTCCTTCGTCACCTTCCGGGGCCTGAGACAGCGCTTCCACTTCACCATCTCCCTCACGTTTGCCACTC
AGGAAAGGAACGGCTTGCTTCTCTACAACGGCCGCTTCAATGAGAAGCACGACTTCATCGCCCTGGAG
ATCGTGGACGAGCAGGTGCAGCTCACCTTCTCTGCAGGTGCAGGCGAGACAACAACGACCGTGGCACC
GAAGGTTCCCAGTGGTGTGAGTGACGGGCGGTGGCACTCTGTGCAGGTGCAGTACTACAACAAGGTAA
GATGGGCCCCACCACTTCCCCCTGGCCCCCAGCCCAATATTGGCCACCTGGGCCTGCCCCATGGGCCG
TCCGGGGAAAAGATGGCCGTGGTGACAGTGGATGATTGTGACACAACCATGGCTGTGCGCTTTGGAAA
GGACATCGGGAACTACAGCTGCGCTGCCCAGGGCACTCAGACCGGCTCCAAGAAGTCCCTGGATCTGA
CCGGCCCTCTACTCCTGGGGGGTGTCCCCAACCTGCCAGAAGACTTCCCAGTGCACAACCGGCAGTTC
GTGGGCTGCATGCGGAACCTGTCAGTCGACGGCAAAAATGTGGACATGGCCGGATTCATCGCCAACAA
TGGCACCCGGGAAGGCTGCGCTGCTCGGAGGAACTTCTGCGATGGGAGGCGGTGTCAGAATGGAGGCA
CCTGTGTCAACAGGTGGAATATGTATCTGTGTGAGTGTCCACTCCGATTCGGCGGGAAGAACTGTGAG
CAAGCCATGCCTCACCCCCAGCTCTTCAGCGGTGAGAGCGTCGTGTCCTGGAGTGACCTGAACATCAT
CATCTCTGTGCCCTGGTACCTGGGGCTCATGTTCCGGACCCGGAAGGAGGACAGCGTTCTGATGGAGG
CCACCAGTGGTGGGCCCACCAGCTTTCGCCTCCAGATCCTGAACAACTACCTCCAGTTTGAGGTGTCC
CACGGCCCCTCCGATGTGGAGTCCGTGATGCTGTCCGGGTTGCGGGTGACCGACGGGGAGTGGCACCA
CCTGCTGATCGAGCTGAAGAATGTTAAGGAGGACAGTGAGATGAAGCACCTGGTCACCATGACCTTGG
ACTATGGGATGGACCAGAACAAGGCAGATATCGGGGGCATGCTTCCCGGGCTGACGGTAAGGAGCGTG
GTGGTCGGAGGCGCCTCTGAAGACAAGGTCTCCGTGCGCCGTGGATTCCGAGGCTGCATGCAGGGAGT
GAGGATGGGGGGGACGCCCACCAACGTCGCCACCCTGAACATGAACAACGCACTCAAGGTCAGGGTGA
AGGACGGCTGTGATGTGGACGACCCCTGTACCTCGAGCCCCTGTCCCCCCAATAGCCGCTGCCACGAC
GCCTGGGAGGACTACAGCTGCGTCTGTGACAAAGGGTACCTTGGAATAAACTGTGTGGATGCCTGTCA
CCTGAACCCCTGCGAGAACATGGGGGCCTGCGTGCGCTCCCCCGGCTCCCCGCAGGGCTACGTGTGCG
AGTGTGGGCCCAGTCACTACGGGCCGTACTGTGAGAACAAACTCGACCTTCCGTGCCCCAGAGGCTGG
TGGGGGAACCCCGTCTGTGGACCCTGCCACTGTGCCGTCAGCAAAGGCTTTGATCCCGACTGTAATAA
GACCAACGGCCAGTGCCAATGCAAGGAGAATTACTACAAGCTCCTAGCCCAGGACACCTGTCTGCCCT
GCGACTGCTTCCCCCATGGCTCCCACAGCCGCACTTGCGACATGGCCACCGGGCAGTGTGCCTGCAAG
CCCGGCGTCATCGGCCGCCAGTGCAACCGCTGCGACAACCCGTTTGCCGAGGTCACCACGCTCGGCTG
TGAAGTGATCTACAATGGCTGTCCCAAAGCATTTGAGGCCGGCATCTGGTGGCCACAGACCAAGTTCG
GGCAGCCGGCTGCGGTGCCATGCCCTAAGGGATCCGTTGGAAATGCGGTCCGACACTGCAGCGGGGAG
AAGGGCTGGCTGCCCCCAGAGCTCTTTAACTGTACCACCATCTCCTTCGTGGACCTCAGGGCCATGAA
TGAGAAGCTGAGCCGCAATGAGACGCAGGTGGACGGCGCCAGGGCCCTGCAGCTGGTGAGGGCGCTGC
GCAGTGCTACACAGCACACGGGCACGCTCTTTGGCAATGACGTGCGCACGGCCTACCAGCTGCTGGGC
CACGTCCTTCAGCACGAGAGCTGGCAGCAGGGCTTCGACCTGGCAGCCACGCAGGACGCCGACTTTCA
CGAGGACGTCATCCACTCGGGCAGCGCCCTCCTGGCCCCAGCCACCAGGGCGGCGTGGGAGCAGATCC
AGCGGAGCGAGGGCGGCACGGCACAGCTGCTCCGGCGCCTCGAGGGCTACTTCAGCAACGTGGCACGC
AACGTGCGGCGGACGTACCTGCGGCCCTTCGTCATCGTCACCGCCAACATGGTTCTTGCTGTCGACAT
CTTTGACAAGTTCAACTTTACGGGAGCCAGGGTCCCGCGATTCGACACCATCCATGAAGAGTTCCCCA
GGGAGCTGGAGTCCTCCGTCTCCTTCCCAGCCGACTTCTTCAGACCACCTGAAGAAAAAGAAGGCCCC
CTGCTGAGGCCGGCTGGCCGGAGGACCACCCCGCAGACCACGCGCCCGGGGCCTGGCACCGAGAGGGA
GGCCCCGATCAGCAGGCGGAGGCGACACCCTGATGACGCTGGCCAGTTCGCCGTCGCTCTGGTCATCA
TTTACCGCACCCTGGGGCAGCTCCTGCCCGAGCGCTACGACCCCGACCGTCGCAGCCTCCGGTTGCCT
CACCGGCCCATCATTAATACCCCGATGGTGAGCACGCTGGTGTACAGCGAGGGGGCTCCGCTCCCGAG
ACCCCTGGAGAGGCCCGTCCTGGTGGAGTTCGCCCTGCTGGAGGTGGAGGAGCGAACCAAGCCTGTCT
GCGTGTTCTGGAACCACTCCCTGGCCGTTGGTGGGACGGGAGGGTGGTCTGCCCGGGGCTGCGAGCTC
CTGTCCAGGAACCGGACACATGTCGCCTGCCAGTGCAGCCACACAGCCAGCTTTGCGGTGCTCATGGA
TATCTCCAGGCGTGAGAACGGGGAGGTCCTGCCTCTGAAGATTGTCACCTATGCCGCTGTGTCCTTGT
CACTGGCAGCCCTGCTGGTGGCCTTCGTCCTCCTGAGCCTGGTCCGCATGCTGCGCTCCAACCTGCAC
AGCATTCACAAGCACCTCGCCGTGGCGCTCTTCCTCTCTCAGCTGGTGTTCGTGATTGGGATCAACCA
GACGGAAAACCCGTTTCTGTGCACAGTGGTTGCCATCCTCCTCCACTACATCTACATGAGCACCTTTG
CCTGGACCCTCGTGGAGAGCCTGCATGTCTACCGCATGCTGACCGAGGTGCGCAACATCGACACGGGG
CCCATGCGGTTCTACTACGTCGTGGGCTGGGGCATCCCGGCCATTGTCACAGGACTGGCGGTCGGCCT
GGACCCCCAGGGCTACGGGAACCCCGACTTCTGCTGGCTGTCGCTTCAAGACACCCTGATTTGGAGCT
TTGCGGGGCCCATCGGAGCTGTTATAATCATCAACACAGTCACTTCTGTCCTATCTGCAAAGGTTTCC
TGCCAAAGAAAGCACCATTATTATGGGAAAAAAGGGATCGTCTCCCTGCTGAGGACCGCATTCCTCCT
GCTGCTGCTCATCAGCGCCACCTGGCTGCTGGGGCTGCTGGCTGTGAACCGCGATGCACTGAGCTTTC
ACTACCTCTTCGCCATCTTCAGCGGCTTACAGGGCCCCTTCGTCCTCCTTTTCCACTGCGTGCTCAAC
CAGGAGGTCCGGAAGCACCTGAAGGGCGTGCTCGGCGGGAGGAAGCTGCACCTGGAGGACTCCGCCAC
CACCAGGGCCACCCTGCTGACGCGCTCCCTCAACTGCAACACCACCTTCGGTGACGGGCCTGACATGC
TGCGCACAGACTTGGGCGAGTCCACCGCCTCGCTGGACAGCATCGTCAGGGATGAAGGGATCCAGAAG
CTCGGCGTGTCCTCTGGGCTGGTGAGGGGCAGCCACGGAGAGCCAGACGCGTCCCTCATGCCCAGGAG
CTGCAAGGATCCCCCTGGCCACGATTCCGACTCAGATAGCGAGCTGTCCCTGGATGAGCAGAGCAGCT
CTTACGCCTCCTCACACTCGTCAGACAGCGAGGACGATGGGGTGGGAGCTGAGGAAAAATGGGACCCG
GCCAGGGGCGCCGTCCACAGCACCCCCAAAGGGGACGCTGTGGCCAACCACGTTCCGGCCGGCTGGCC
CGACCAGAGCCTGGCTGAGAGTGACAGTGAGGACCCCAGCGGCAAGCCCCGCCTGAAGGTGGAGACCA
AGGTCAGCGTGGAGCTGCACCGCGAGGAGCAGGGCAGTCACCGTGGACAGTACCCCCCGGACCAGGAG
AGCGGGGGCGCAGCCAGGCTTGCTAGCAGCCAGCCCCCAGAGCAGAGGAGCATCTTGAAAAATAAAGT
CACCTACCCGCCGCCGCTGACGCTGACGGAGCAGACGCTGAAGGGCCGGCTCCGGGAGAAGCTGGCCG
ACTGTGAGCAGAGCCCCACATCCTCGCGCACGTCTTCCCTGGGCTCTGGCGGCCCCGACTGCGCCATC
ACAGTCAAGAGCCCTGGGAGGGAGCCGGGGCGTGACCACCTCAACGGGGTGGCCATGAATGTGCGCAC
TGGGAGCGCCCAGGCCGATGGCTCCGACTCTGAGAAACCGTGA

| | | | |
|---|---|---|---|
| NOV21g, SNP13382485 of | SEQ ID NO: 288 | 3028 aa | MW at 330864.9kD |
| CG51965-01, Protein | SNP Pos: 2918 | | SNP Change: Glu to Gln |
| Sequence | | | |

MAPPPPPVLPVLLLLAAAAALPAMGLRAAAWEPRVPGGTRAFALRPGCTYAVGAACTPRAPRELLDVG
RDGRLAGRRRVSGAGRPLPLQVRLVARSAPTALSRRLRARTHLPGCGARARLCGTGARLCGALCFPVP
GGCAAAQHSALAAPTTLPACRCPPRPRPRCPGRPICLPPGGSVRLRLLCALRRAAGAVRVGLALEAAT
AGTPSASPSPSPPLPPNLPEARAGPARRARRGTSGRGSLKFPMPNYQVALFENEPAGTLILQLHAHYT
IEGEEERVSYYMEGLFDERSRGYFRIDSATGAVSTDSVLDRETKETHVLRVKAVDYSTPPRSATTYIT
VLVKDTNDHSPVFEQSEYRERVRENLEVGYEVLTIRASDRDSPINANLRYRVLGGAWDVFQLNESSGV
VSTRAVLDREEAAEYQLLVEANDQGRNPGPLSATATVYIEVEDENDNYPQFSEQNYVVQVPEDVGLNT
AVLRVQATDRDQGQNAAIHYSILSGNVAGQFYLHSLSGILDVINPLDFEDVQKYSLSIKAQDGGRPPL
INSSGVVSVQVLDVNDNEPIFVSSPFQATVLENVPLGYPVVHIQAVDADSGENARLHYRLVDTASTFL
GGGSAGPKWPAPTPDFPFQIHNSSGWITVCAELDREEVEHYSFGVEAVDHGSPPMSSSTSVSITVLDV
NDNDPVFTQPTYELRINEDAAVGSSVLTLQARDRDANSVITYQLTGGNTRNRFALSSORGGGLITLAL
PLDYKQEQQYVLAVTASDGTRSHTAHVLINVTDANTHRPVFQSSHYTVSVSEDRPVGTSIATLSANDE
DTGENARITYVIQDPVPQFRIDPDSGTMYTMMELDYENQVAYTLTIMAQDNGIPQKSDTTTLEILILD
ANDNAPQFLWDFYQGSIFEDAPPSTSILQVSATDRDSGPNGRLLYTFQGGDDGDGDFYIEPTSGVIRT
QRRLDRENVAVYNLWALAVDRGSPTPLSASVEIQVTILDINDNAPMFEKDELELFVEENNPVGSVVAK
IRANDPDEGPNAQIMYQIVEGDMRHFFQLDLLNGDLRAMVELDFEVRREYVLVVQATSAPLVSRATVH
ILLVDQNDNPPVLPDFQILFNNYVTNKSNSFPTGVIGCIPAHDPDVSDSLNYTFVQGNELRLLLLDPA
TGELQLSRDLDNNRPLEALMEVSVSADGIHSVTAFCTLRVTIITDDMLTNSITVRLENNSQEKFLSPL
LALFVEGVAAVLSTTKDDVFVFNVQNDTDVSSNILNVTFSALLPGGVRGQFFPSEDLQEQIYLNRTLL
TTISTQRVLPFDDNICLREPCENYMKCVSVLRFDSSAPFLSSTTVLFRPIHPINGLRCRCPPGFTGDY
CETEIDLCYSDPCGANGRCRSREGGYTCECFEDFTGEHCEVDARSGRCANGVCKNGGTCVNLLIGGFH
CVCPPGEYERPYCEVTTRSFPPQSFVTFRGLRQRFHFTISLTFATQERNGLLLYNGRFNEKHDFIALE
IVDEQVQLTFSAGAGETTTTVAPKVPSGVSDGRWHSVQVQYYNKVRWAPPLPPGPQPNIGHLGLPHGP
SGEKMAVVTVDDCDTTMAVRFGKDIGNYSCAAQGTQTGSKKSLDLTGPLLLGGVPNLPEDFPVHNRQF
VGCMRNLSVDGKNVDMAGFIANNGTREGCAARRNFCDGRRCQNGGTCVNRWNMYLCECPLRFGGKNCE
QAMPHPQLFSGESVVSWSDLNIIISVPWYLGLMFRTRKEDSVLMEATSGGPTSFRLQILNNYLQFEVS
HGPSDVESVNLSGLRVTDGEWHHLLIELKNVKEDSEMKHLVTMTLDYGMDQNKADIGGMLPGLTVRSV
VVGGASEDKVSVRRGFRGCMQGVRMGGTPTNVATLNNNNALKVRVKDGCDVDDPCTSSPCPPNSRCHD
AWEDYSCVCDKGYLGINCVDACHLNPCENNGACVRSPGSPQGYVCECGPSHYGPYCENKLDLPCPRGW
WGNPVCGPCHCAVSKGFDPDCNKTNGQCQCKENYYKLLAQDTCLPCDCFPHGSHSRTCDMATGOCACK
PGVIGRQCNRCDNPFAEVTTLGCEVIYNGCPKAFEAGIWWPQTKFGQPAAVPCPKGSVGNAVRHCSGE
KGWLPPELFNCTTISFVDLRAMNEKLSRNETQVDGARALQLVRALRSATQHTGTLFGNDVRTAYQLLG
HVLQHESWQQGFDLAATQDADFHEDVIHSGSALLAPATRAAWEQIQRSEGGTAQLLRRLEGYFSNVAR
NVRRTYLRPFVIVTANMVLAVDIFDKFNFTGARVPRFDTIHEEFPRELESSVSFPADFFRPPEEKEGP
LLRPAGRRTTPQTTRPGPGTEREAPISRRRRHPDDAGQFAVALVIIYRTLGQLLPERYDPDRRSLRLP
HRPIINTPMVSTLVYSEGAPLPRPLERPVLVEFALLEVEERTKPVCVFWNHSLAVGGTGGWSARGCEL
LSRNRTHVACQCSHTASFAVLMDISRRENGEVLPLKIVTYAAVSLSLAALLVAFVLLSLVRMLRSNLH
SIHKHLAVALFLSQLVFVIGINQTENPFLCTVVAILLHYIYMSTFAWTLVESLHVYRMLTEVRNIDTG
PMRFYYVVGWGIPAIVTGLAVGLDPQGYGNPDFCWLSLQDTLIWSFAGPIGAVIIINTVTSVLSAKVS
CQRKHHYYGKKGIVSLLRTAFLLLLLISATWLLGLLAVNRDALSFHYLFAIFSGLQGPFVLLFHCVLM
QEVRKHLKGVLGGRKLHLEDSATTRATLLTRSLNCNTTFGDGPDMLRTDLGESTASLDSIVRDEGIQK
LGVSSGLVRGSHGEPDASLMPRSCKDPPGHDSDSDSELSLDEQSSSYASSHSSDSEDDGVGAEEKWDP
ARGAVHSTPKGDAVANHVPAGWPDQSLAESDSEDPSGKPRLKVETKVSVELHREEQGSHRGQYPPDQE
SGGAARLASSQPPEQRSILKNKVTYPPPLTLTEQTLKGRLREKLADCEQSPTSSRTSSLGSGGPDCAI
TVKSPGREPGRDHLNGVANNVRTGSAQADGSDSEKP

[0464] A ClustalW comparison of the above protein sequences yields the following sequence alignment shown in Table 21B.

TABLE 21B
Comparison of the NOV21 protein sequences.

NOV21a MAPPPPPVLPVLLLLAAAAALPANGLRAAAWEPRVPGGTRAFALRPGCTYAVGAACTPRA
NOV21b ------------------------------------------------------------
NOV21c ------------------------------------------------------------
NOV21d ------------------------------------------------------------
NOV21a PRELLDVGRDGRLAGRRRVSGAGRPLPLQVRLVARSAPTALSRRLRARTHLPGCGARARL
NOV21b ------------------------------------------------------------
NOV21c ------------------------------------------------------------
NOV21d ------------------------------------------------------------
NOV21a CGTGARLCGALCFPVPGGCAAAQHSALAAPTTLPACRCPPRPRPRCPGRPICLPPGGSVR
NOV21b ------------------------------------------------------------
NOV21c ------------------------------------------------------------
NOV21d ------------------------------------------------------------
NOV21a LRLLCALRRAAGAVRVGLALEAATAGTPSASPSPSPPLPPNLPEARAGPARRARRGTSGR
NOV21b ------------------------------------------------------------
NOV21c ------------------------------------------------------------
NOV21d ------------------------------------------------------------
NOV21a GSLKFPMPNYQVALFENEPAGTLILQLHAHYTIEGEEERVSYYMEGLFDERSRGYFRIDS
NOV21b ------------------------------------------------------------
NOV21c ------------------------------------------------------------
NOV21d -------KLYQVALFENEPAGTLILQLHAHHTIEGEEERVSYYMEGLFDERSRGYFRIDS
NOV21a ATGAVSTDSVLDRETKETHVLRVKAVDYSTPPRSATTYITVLVKDTNDHSPVFEQSEYRE
NOV21b ------------------------------------LKLEVIYNGCPKAFEAGIWWPQTK
NOV21c ------------------------------------------------------------
NOV21d AAGAVSTDSVLDRETKETHVLRVKAVDYSTPPRSATTYITVLVKDTNDHSPVFEQSEYRE
NOV21a RVRENLEVGYEVLTIRASDRDSPINANLRYRVLGGAWDVFQLNESSGVVSTRAVLDREEA
NOV21b FGQPAAVPCPKGSVGNAVRHCSGEKGWLPPELFNCTTISFVDLRAMNEKLSRNETQVDGA
NOV21c --RK-LVLPLKIVTYAAVS-LS-LAALLVAFVLLSLVRMLRSNLHS-IHKHLAVALF--L
NOV21d RVRENLEVGYEVLTIRASDRDSPINANLRYRVLGGAWDVFQLNESSGVVSTRAVLDREEA
NOV21a AEYQLLVEANDQGRNPGPLSATATVYIEVEDENDNYPQFSEQNYVVQVPEDVGLNTAVLR
NOV21b RALQLVRALRSATQHTGTLFGNDVRTAYQLLGHVLQHESWQQGFDLAATQDADFHEDVIH
NOV21c SQLVFVIGIN-QTENP-FLCTVVAILLHYIYMS----TFAWT--LVES-------LHVYR
NOV21d AEYQLLVEANDQGRNPGPLSATATVYIEVEDENDNYPQFSEQNYVVQVPEDVGLNTAVLR
NOV21a VQATDRDQGQNAAIHYSILSGNVAGQFYLHSLSGILDVINPLDFEDVQKYSLSIKAQDGG
NOV21b SGSALLAPATRAAWEQIQRSEG-GTAQLLRRLEGYFSNVARNVRRTYLRPFVIVTANMIL
NOV21c MLTEVRN----------IDTG--PMRFYYVVGWGIPAIVT----G----LAVGLDPQGYG
NOV21d VQATDRDQGQNAAIHYSILSGNVAGQFYLHSLSGILDVINPLDFEDVQKYSLSIKAQDGG
NOV21a RPPLINSSGVVSVQVLDVNDNEPIFVSSPFQATVLENVPLGYPVVHIQAVDADSGENARL
NOV21b AVDIFDKFNFTGARVPRFDTIHEEFPRELESSVSFPADFFRPPEEKEGPLLRPAGRRTTP
NOV21c NPDFC----WLSLQDTLI----WSFAG-PIGAVIIINT--------VTSVLSAKVSCQRK
NOV21d RPPLINSSGVVSVQVLDVNDNEPIFVSSPFQATVLENVPLGYPVVHIQAVDADSGENARL
NOV21a HYRLVDTASTFLGGGSAGPKNPAPTPDFPFQIHNSSGWITVCAELDRE-EVEHYSFGVBA
NOV21b QTTRPGPGTEREAPISRRRRHPDDAGQFAVALVIIYRTLGQLLPERYD-PDRRSLRLPHR
NOV21c HH--------YYG--KKGIVSLLRT-AFLLLLLISATWLLGLLAVNRDALSFHYLFAIFS
NOV21d HYRLVDTASTFLGGGSAGPKNPAPTPDFPFQIRNSSGWITVCAELDREEVE-HYSFGVEA
NOV21a VDHGSPPMSSSTSVSITVLDVNDNDPVFTQPTYELRLNEDAAVGSSVLTLQARDRDANSV
NOV21b PIINTPMVSTLVYSEGAPLPRPLERPVLVEFALLEVEERTKPVCVFWNHSLAVGGTGGWS
NOV21c GLQG-P------FV-LLFHCV-LNQEVKLA------------------------------
NOV21d VDHGWPPMSSSTSVSITVLDVNDNDPVFTQPTYELRLNEDAAVGSSVLTLQARDRDANSV
NOV21a ITYQLTGGNTRNRFALSSQRGGGLITLALPLDYKQEQQYVLAVTASDGTRSHTAHVLINV
NOV21b ARGCELLSRNRTHVACQCSHTASFAVLMDISRRENGEKL---------------------
NOV21c ------------------------------------------------------------
NOV21d ITYQLTGGNTRNRFALSSQRGGGLITLALPLDYKQEQQYVLAVTASDGTRSHTAHVLINV
NOV21a TDANTHRPVFQSSHYTVSVSEDRPVGTSIATLSANDEDTGENARITYVIQDPVPQFRIDP
NOV21b ------------------------------------------------------------
NOV21c ------------------------------------------------------------
NOV21d TDANTHRPVFQSSHYTVSVSEDRPVGTSIATLSANDEDTGENARITYVIQDPVPQFRIDP
NOV21a DSGTMYTMMELDYENQVAYTLTIMAQDNGIPQKSDTTTLEILILDANDNAPQFLWDFYQG
NOV21b ------------------------------------------------------------
NOV21c ------------------------------------------------------------
NOV21d DSGTMYTMMELDYENQVAYTLTIMAQDNGIPQKSDTTTLEILILDANDNAPQFLWDFYQG
NOV21a SIFEDAPPSTSILQVSATDRDSGPNGRLLYTFQGGDDGDGDFYIEPTSGVIRTQRRLDRE
NOV21b ------------------------------------------------------------
NOV21c ------------------------------------------------------------
NOV21d SIFEDAPPSTSILQVSATDRDSGPNGRLLYTFQGGDDGDGDFYIEPTSGVIRTQRRLDRE
NOV21a NVAVYNLWALAVDRGSPTPLSASVEIQVTILDINDNAPMFEKDELELFVEENNPVGSVVA
NOV21b ------------------------------------------------------------
NOV21c ------------------------------------------------------------
NOV21d NVAVYNLWALAVDRGSPTPLSASVEIQVTILDINDNAPMFEKDELELFVEENNPVGSVVA
NOV21a KIRANDPDEGPNAQIMYQIVEGDMRHFFQLDLLNGDLRAMVELDFEVRREYVLVVQATSA
NOV21b ------------------------------------------------------------
NOV21c ------------------------------------------------------------
NOV21d KIRANDPDEGPNAQIMYQIVEGDMRHFFQLDLLNGDLRAMVELDFEVRREYVLVVQATSA
NOV21a PLVSRATVHILLVDQNDNPPVLPDFQILFNNYVTNKSNSFPTGVIGCIPAHDPDVSDSLN
NOV21b ------------------------------------------------------------
NOV21c ------------------------------------------------------------
NOV21d PLVSRATVHILLVLE---------------------------------------------
NOV21a YTFVQGNELRLLLLDPATGELQLSRDLDNNRPLEALMEVSVSADGIHSVTAFCTLRVTII
NOV21b ------------------------------------------------------------
NOV21c ------------------------------------------------------------
NOV21d ------------------------------------------------------------
NOV21a TDDMLTNSITVRLENMSQEKFLSPLLALFVEGVAAVLSTTKDDVFVFNVQNDTDVSSNIL
NOV21b ------------------------------------------------------------
NOV21c ------------------------------------------------------------
NOV21d ------------------------------------------------------------
NOV21a NVTFSALLPGGVRGQFFPSEDLQEQIYLNRTLLTTISTQRVLPFDDNICLREPCENYMKC
NOV21b ------------------------------------------------------------
NOV21c ------------------------------------------------------------
NOV21d ------------------------------------------------------------
NOV21a VSVLRFDSSAPFLSSTTVLFRPIHPINGLRCRCPPGFTGDYCETEIDLCYSDPCGANGRC
NOV21b ------------------------------------------------------------
NOV21c ------------------------------------------------------------
NOV21d ------------------------------------------------------------
NOV21a RSREGGYTCECFEDFTGEHCEVDARSGRCANGVCKNGGTCVNLLIGGFHCVCPPGEYERP
NOV21b ------------------------------------------------------------
NOV21c ------------------------------------------------------------
NOV21d ------------------------------------------------------------
NOV21a YCEVTTRSFPPQSFVTFRGLRQRFHFTISLTFATQERNGLLLYNGRFNEKHDFIALEIVD
NOV21b ------------------------------------------------------------
NOV21c ------------------------------------------------------------
NOV21d ------------------------------------------------------------
NOV21a EQVQLTFSAGAGETTTTVAPKVPSGVSDGRWHSVQVQYYNKVRWAPPLPPGPQPNIGHLG
NOV21b ------------------------------------------------------------
NOV21c ------------------------------------------------------------
NOV21d ------------------------------------------------------------
NOV21a LPHGPSGEKMAVVTVDDCDTTMAVRFGKDIGNYSCAAQGTQTGSKKSLDLTGPLLLGGVP
NOV21b ------------------------------------------------------------
NOV21c ------------------------------------------------------------
NOV21d ------------------------------------------------------------
NOV21a NLPEDFPVHNRQFVGCMRNLSVDGKNVDMAGFIANNGTREGCAARRNFCDGRRCQNGGTC
NOV21b ------------------------------------------------------------
NOV21c ------------------------------------------------------------
NOV21d ------------------------------------------------------------
NOV21a VNRWNMYLCECPLRFGGKNCEQAMPHPQLFSGESVVSWSDLNIIISVPWYLGLMFRTRKE
NOV21b ------------------------------------------------------------
NOV21c ------------------------------------------------------------
NOV21d ------------------------------------------------------------
NOV21a DSVLMEATSGGPTSFRLQILNNYLQFEVSHGPSDVESVMLSGLRVTDGEWHHLLIELKNV
NOV21b ------------------------------------------------------------
NOV21c ------------------------------------------------------------
NOV21d ------------------------------------------------------------
NOV21a KEDSEMKHLVTMTLDYGMDQNXADIGGMLPGLTVRSVVVGGASEDKVSVRRGFRGCMQGV
NOV21b ------------------------------------------------------------
NOV21c ------------------------------------------------------------
NOV21d ------------------------------------------------------------
NOV21a RNGGTPTNVATLNMNNALKVRVKDGCDVDDPCTSSPCPPNSRCHDAWEDYSCVCDKGYLG
NOV21b ------------------------------------------------------------
NOV21c ------------------------------------------------------------
NOV21d ------------------------------------------------------------
NOV21a INCVDACHLNPCENNGACVRSPGSPQGYVCECGPSHYGPYCENKLDLPCPRGWWGNPVCG
NOV21b ------------------------------------------------------------
NOV21c ------------------------------------------------------------
NOV21d ------------------------------------------------------------
NOV21a PCHCAVSKGFDPDCNKTNGQCQCKENYYKLLAQDTCLPCDCFPHGSHSRTCDMATGQCAC
NOV21b ------------------------------------------------------------
NOV21c ------------------------------------------------------------
NOV21d ------------------------------------------------------------
NOV21a KPGVIGRQCNRCDNPFAEVTTLGCEVIYNGCPKAFEAGIWWPQTKFGQPAAVPCPKGSVG
NOV21b ------------------------------------------------------------
NOV21c ------------------------------------------------------------
NOV21d ------------------------------------------------------------
NOV21a NAVRHCSGEKGWLPPELFNCTTISFVDLRAMNEKLSRNETQVDGARALQLVRALRSATQH
NOV21b ------------------------------------------------------------
NOV21c ------------------------------------------------------------
NOV21d ------------------------------------------------------------
NOV21a TGTLFGNDVRTAYQLLGHVLQHESWQQGFDLAATQDADFHEDVIHSGSALLAPATRAAWE
NOV21b ------------------------------------------------------------
NOV21c ------------------------------------------------------------
NOV21d ------------------------------------------------------------
NOV21a QIQRSEGGTAQLLRRLEGYFSNVARNVRRTYLRPFVIVTANNVLAVDIFDKFNFTGARVP
NOV21b ------------------------------------------------------------
NOV21c ------------------------------------------------------------
NOV21d ------------------------------------------------------------
NOV21a RFDTIHEEFPRELESSVSFPADFFRPPEEKEGPLLRPAGRRTTPQTTRPGPGTEREAPIS
NOV21b ------------------------------------------------------------
NOV21c ------------------------------------------------------------
NOV21d ------------------------------------------------------------
NOV21a RRRRHPDDAGQFAVALVIIYRTLGQLLPERYDPDRRSLRLPHRPIINTPMVSTLVYSEGA
NOV21b ------------------------------------------------------------
NOV21c ------------------------------------------------------------
NOV21d ------------------------------------------------------------
NOV21a PLPRPLERPVLVEFALLEVEERTKPVCVFWNHSLAVGGTGGWSARGCELLSRNRTHVACQ
NOV21b ------------------------------------------------------------
NOV21c ------------------------------------------------------------
NOV21d ------------------------------------------------------------
NOV21a CSHTASFAVLMDISRRENGEVLPLKIVTYAAVSLSLAALLVAFVLLSLVRMLRSNLHSIH
NOV21b ------------------------------------------------------------
NOV21c ------------------------------------------------------------
NOV21d ------------------------------------------------------------
NOV21a KHLAVALFLSQLVFVIGINQTENPFLCTVVAILLHYIYMSTFAWTLVESLHVYRMLTEVR
NOV21b ------------------------------------------------------------
NOV21c ------------------------------------------------------------
NOV21d ------------------------------------------------------------
NOV21a NIDTGPMRFYYVVGWGIPAIVTGLAVGLDPQGYGNPDFCWLSLQDTLIWSFAGPIGAVII
NOV21b ------------------------------------------------------------
NOV21c ------------------------------------------------------------
NOV21d ------------------------------------------------------------
NOV21a INTVTSVLSAKVSCQRKHHYYGKKGIVSLLRTAFLLLLLISATWLLGLLAVNRDALSFHY
NOV21b ------------------------------------------------------------
NOV21c ------------------------------------------------------------
NOV21d ------------------------------------------------------------
NOV21a LFAIFSGLQGPFVLLFHCVLNQEVRKHLKGVLGGRKLHLEDSATTRATLLTRSLNCNTTF
NOV21b ------------------------------------------------------------
NOV21c ------------------------------------------------------------
NOV21d ------------------------------------------------------------
NOV21a GDGPDMLRTDLGESTASLDSIVRDEGIQKLGVSSGLVRGSHGEPDASLMPRSCKDPPGHD
NOV21b ------------------------------------------------------------
NOV21c ------------------------------------------------------------
NOV21d ------------------------------------------------------------
NOV21a SDSDSELSLDEQSSSYASSHSSDSEDDGVGAEEKWDPARGAVHSTPKGDAVANHVPAGWP
NOV21b ------------------------------------------------------------
NOV21c ------------------------------------------------------------
NOV21d ------------------------------------------------------------
NOV21a DQSLAESDSEDPSGKPRLKVETKVSVELHREEQGSHRGEYPPDQESGGAARLASSQPPEQ
NOV21b ------------------------------------------------------------
NOV21c ------------------------------------------------------------
NOV21d ------------------------------------------------------------
NOV21a RSILKNKVTYPPPLTLTEQTLKGRLREKLADCEQSPTSSRTSSLGSGGPDCAITVKSPGR
NOV21b ------------------------------------------------------------
NOV21c ------------------------------------------------------------
NOV21d ------------------------------------------------------------
NOV21a EPGRDHLNGVAMNVRTGSAQADGSDSEKP
NOV21b -----------------------------
NOV21c -----------------------------
NOV21d -----------------------------
NOV21a (SEQ ID NO: 276)
NOV21b (SEQ ID NO: 278)
NOV21c (SEQ ID NO: 280)
NOV21d (SEQ ID NO: 282)

[0465] Further analysis of the NOV21a protein yielded the following properties shown in Table 21C.

TABLE 21C
Protein Sequence Properties NOV21a

SignalP analysis: Cleavage site between residues 21 and 22
PSORT II analysis:

| PSG: | a new signal peptide prediction method |
|---|---|
| | N-region: length 0; pos.chg 0; neg.chg 0 |
| | H-region: length 26; peak value 9.94 |
| | PSG score: 5.54 |
| GvH: | von Heijne's method for signal seq. recognition |
| | GvH score (threshold: −2.1): 3.49 |
| | possible cleavage site: between 20 and 21 |

>>> Seems to have a cleavable signal peptide (1 to 20)

| ALOM: | Klein et al's method for TM region allocation | |
|---|---|---|
| | Init position for calculation: 21 | |
| | Tentative number of TMS(s) for the threshold 0.5: 10 | |
| | INTEGRAL Likelihood = −4.99 | Transmembrane 1220 −1236 |
| | INTEGRAL Likelihood = −0.53 | Transmembrane 2251 −2267 |
| | INTEGRAL Likelihood = −0.06 | Transmembrane 2351 −2367 |
| | INTEGRAL Likelihood = −9.92 | Transmembrane 2489 −2505 |
| | INTEGRAL Likelihood = −5.95 | Tranamembrane 2521 −2537 |
| | INTEGRAL Likelihood = −1.54 | Transmembrane 2544 −2560 |
| | INTEGRAL Likelihood = −2.81 | Transmembrane 2591 −2607 |
| | INTEGRAL Likelihood = −1.59 | Transmembrane 2631 −2647 |
| | INTEGRAL Likelihood = −8.92 | Transmembrane 2674 −2690 |
| | INTEGRAL Likelihood = −1.17 | Transmembrane 2703 −2719 |

PERIPHERAL Likelihood = 2.81 (at 1076)
ALOM score: −9.92 (number of TMSs: 10)

MTOP: Prediction of membrane topology (Hartmann et al.)

Center position for calculation: 10
Charge difference: 1.0 C( 2.0) - N( 1.0)
C > N: C-terminal side will be inside

>>> Caution: Inconsistent mtop result with signal peptide
>>> membrane topology: type 3b
MITDISC: discrimination of mitochondrial targeting seq

| | | | |
|---|---|---|---|
| R content: | 1 | Hyd Moment(75) | 1.33 |
| Hyd Moment(95): | 2.60 | G content: | 1 |
| D/E content: | 1 | S/T content: | 0 |
| Score: −5.63 | | | |

Gavel: prediction of cleavage sites for mitochondrial preseq

R-2 motif at 69 PRA|PR

NUCDISC: discrimination of nuclear localization signals

pat4: RRRR (5) at 2340
pat4: RRRH (3) at 2341
pat7: PARRARR (4) at 229
pat7: PISRRRR (5) at 2337
bipartite: none
content of basic residues: 9.1%
NLS Score: 0.80

KDEL: ER retention motif in the C-terminus: none
ER Membrane Retention Signals:

KKXX-like motif in the C-terminus: DSEK

SKL: peroxisomal targeting signal in the C-terminus: none
PTS2: 2nd peroxisomal targeting signal: none
VAC: possible vacuolar targeting motif: none
RNA-binding motif: none
Actinin-type actin-binding motif:

type 1: none
type 2: none

NMYR: N-myristoylation pattern: none
Prenylation motif: none
memYQRL: transport motif from cell surface to Golgi: none
Tyrosines in the tail: none
Dileucine motif in the tail: none
checking 63 PROSITE DNA binding motifs: none
checking 71 PROSITE ribosomal protein motifs: none
checking 33 PROSITE prokaryotic DNA binding motifs: none

| NNCN: | Reinhardt's method for Cytoplasmic/Nuclear discrimination |
|---|---|
| | Prediction: cytoplasmic |
| | Reliability: 70.6 |
| COIL: | Lupas's algorithm to detect coiled-coil regions |
| | total: 0 residues |
| | -------------------------- |

Final Results (k = 9/23):

66.7%: endoplasmic reticulum
11.1%: vacuolar
11.1%: mitochondrial
11.1%: cytoplasmic

>> prediction for CG51965-01 is end (k = 9)

[0466] A search of the NOV21a protein against the Geneseq database, a proprietary database that contains sequences published in patents and patent publication, yielded several homologous proteins shown in Table 21D.

TABLE 21D
Geneseq Results for NOV21a

| | | NOV21a | Identities/ | |
|---|---|---|---|---|
| | | Residues/ | Similarities for | |
| Geneseq | Protein/Organism/Length | Match | the Matched | Expect |
| Identifier | [Patent #, Date] | Residues | Region | Value |
| AAE08586 | Human NOV7 protein - Homo | 1 . . . 3028 | 3028/3028 (100%) | 0.0 |
| | sapiens, 3028 aa. | 1 . . . 3028 | 3028/3028 (100%) | |
| | [WO200161009-A2, 23-AUG- | | | |
| | 2001] | | | |
| ABP81979 | Human GPCR | 1 . . . 3028 | 3011/3029 (99%) | 0.0 |
| | CELSR1/Flamingo protein | 1 . . . 3014 | 3012/3029 (99%) | |
| | SEQ ID NO: 444 - Homo | | | |
| | sapiens, 3014 aa. | | | |
| | [WO200261087-A2, 08-AUG- | | | |
| | 2002] | | | |
| AAU02196 | Seven-pass transmembrane | 1 . . . 3028 | 3011/3029 (99%) | 0.0 |
| | receptor-like protein, MEM1 - | 1 . . . 3014 | 3012/3029 (99%) | |
| | Homo sapiens, 3014 aa. | | | |
| | [WO200144473-A2, 21-JUN- | | | |
| | 2001] | | | |
| AAU68533 | Human novel cytokine encoded | 1 . . . 3028 | 3011/3029 (99%) | 0.0 |
| | by cDNA 790C1P2C_4 #1 - | 1 . . . 3014 | 3012/3029 (99%) | |
| | Homo sapiens, 3014 aa. | | | |
| | [WO200175093-A1, 11-OCT- | | | |
| | 2001] | | | |
| AAW27161 | Mouse receptor ME2 - Mus | 256 . . . 2902 | 2138/2647 (80%) | 0.0 |
| | musculus, 2707 aa. | 35 . . . 2663 | 2345/2647 (87%) | |
| | [WO9707209-A2, 27-FEB- | | | |
| | 1997] | | | |

[0467] In a BLAST search of public sequence databases, the NOV21a protein was found to have homology to the proteins shown in the BLASTP data in Table 21E.

TABLE 21E
Public BLASTP Results for NOV21a

| | | NOV21a | Identities/ | |
|---|---|---|---|---|
| Protein | | Residues/ | Similarities for | |
| Accession | | Match | the Matched | Expect |
| Number | Protein/Organism/Length | Residues | Portion | Value |
| Q9NYQ6 | Cadherin EGF LAG seven-pass | 1 . . . 3028 | 3011/3029 (99%) | 0.0 |
| | G-type receptor 1 precursor | 1 . . . 3014 | 3012/3029 (99%) | |
| | (Flamingo homolog 2) (hFmi2) - | | | |
| | Homo sapiens (Human), 3014 aa. | | | |
| O35161 | Cadherin EGF LAG seven-pass | 1 . . . 3028 | 2453/3057 (80%) | 0.0 |
| | G-type receptor 1 precursor - Mus | 1 . . . 3034 | 2680/3057 (87%) | |
| | musculus (Mouse), 3034 aa. | | | |
| E1260972 | SEQUENCE 3 FROM PATENT | 256 . . . 2902 | 2138/2647 (80%) | 0.0 |
| | WO9707209 - unidentified, 2707 | 35 . . . 2663 | 2345/2647 (87%) | |
| | aa. | | | |
| Q9HCU4 | Cadherin EGF LAG seven-pass | 223 . . . 3026 | 1658/2839 (58%) | 0.0 |
| | G-type receptor 2 precursor | 163 . . . 2915 | 2067/2839 (72%) | |
| | (Epidermal growth factor-like 2) | | | |
| | (Multiple epidermal growth | | | |
| | factor-like domains 3) (Flamingo | | | |
| | 1) - Homo sapiens (Human), 2923 | | | |
| | aa. | | | |
| Q9R0M0 | Cadherin EGF LAG seven-pass | 2 . . . 3026 | 1665/3072 (54%) | 0.0 |
| | G-type receptor 2 precursor | 8 . . . 2912 | 2095/3072 (67%) | |
| | (Flamingo 1) (mFmi1) - Mus | | | |
| | musculus (Mouse), 2920 aa. | | | |

[0468] PFam analysis indicates that the NOV21a protein contains the domains shown in the Table 21F.

TABLE 21F
Domain Analysis of NOV21a

| | | Identities/ | |
|---|---|---|---|
| | NOV21a | Similarities | Expect |
| Pfam Domain | Match Region | for the Matched Region | Value |
| cadherin | 250 . . . 344 | 35/110 (32%) | 1e-14 |
| | | 70/110 (64%) | |
| cadherin | 358 . . . 450 | 44/107 (41%) | 1.8e-21 |
| | | 72/107 (67%) | |
| cadherin | 464 . . . 556 | 38/107 (36%) | 2e-24 |
| | | 74/107 (69%) | |
| cadherin | 570 . . . 678 | 39/124 (31%) | 3.8e-23 |
| | | 87/124 (70%) | |
| cadherin | 692 . . . 780 | 35/107 (33%) | 7.4e-19 |
| | | 71/107 (66%) | |
| cadherin | 794 . . . 883 | 42/107 (39%) | 1.6e-28 |
| | | 73/107 (68%) | |
| cadherin | 897 . . . 990 | 41/108 (38%) | 2.2e-27 |
| | | 76/108 (70%) | |
| cadherin | 1004 . . . 1092 | 38/107 (36%) | 3.8e-22 |
| | | 67/107 (63%) | |
| EGF | 1308 . . . 1361 | 16/61 (26%) | 0.71 |
| | | 38/61 (62%) | |
| EGF | 1368 . . . 1399 | 15/47 (32%) | 1.8e-05 |
| | | 26/47 (55%) | |
| EGF | 1408 . . . 1441 | 19/47 (40%) | 5.3e-07 |
| | | 29/47 (62%) | |
| laminin_G | 1471 . . . 1647 | 43/206 (21%) | 5.5e-17 |
| | | 138/206 (67%) | |
| EGF | 1668 . . . 1699 | 17/47 (36%) | 4.7e-07 |
| | | 24/47 (51%) | |
| laminin_G | 1734 . . . 1867 | 26/163 (16%) | 0.0034 |
| | | 90/163 (55%) | |
| EGF | 1891 . . . 1922 | 11/47 (23%) | 7.7e-05 |
| | | 24/47 (51%) | |
| EGF | 1926 . . . 1960 | 18/47 (38%) | 0.0057 |
| | | 24/47 (51%) | |
| laminin_EGF | 1981 . . . 2015 | 13/60 (22%) | 0.87 |
| | | 24/60 (40%) | |
| laminin_EGF | 2018 . . . 2063 | 26/59 (44%) | 8.8e-09 |
| | | 31/59 (53%) | |
| HRM | 2067 . . . 2124 | 21/77 (27%) | 5.1e-17 |
| | | 47/77 (61%) | |
| GPS | 2422 . . . 2475 | 26/56 (46%) | 1.6e-21 |
| | | 46/56 (82%) | |
| 7tm_2 | 2480 . . . 2723 | 88/274 (32%) | 6.4e-90 |
| | | 210/274 (77%) | |

### Example 22

[0469] The NOV22 clone was analyzed, and the nucleotide and encoded polypeptide sequences are shown in Table 22A.

TABLE 22A
NOV22 Sequence Analysis

| | | |
|---|---|---|
| NOV22a, CG51983-05 | SEQ ID NO: 289 | 2268 bp |
| DNA Sequence | ORF Start: ATG at 1 | ORF Stop: TAG at 2266 |

ATGCTTCCCGGGTGTATATTCTTGATGATTTTACTCATTCCTCAGGTTAAAGAAAAGTTCATCCTTGG
AGTAGAGGGTCAACAACTGGTTCGTCCTAAAAAGCTTCCTCTGATACAGAAGCGAGATACTGGACACA
CCCATGATGATGACATACTGAAAACGTATGAAGAAGAATTGTTGTATGAAATAAAACTAAATAGAAAA
ACCTTAGTCCTTCATCTTCTAAGATCCAGGGAGTTCCTAGGCTCAAATTACAGTGAAACATTCTACTC
CATGAAAGGAGAAGCGTTCACCAGGCATCCTCAGATCATGGAACACTGTTACTATAAAGGAAACATCC
TAAATGAAAAGAATTCTGTTGCCAGCATCAGTACTTGTGACGGGTTGAGGGGATTCTTCAGAATAAAC
GACCAAAGATACCTCATTGAACCAGTGAAATACTCAGATGAGGGAGAACATTTGGTGTTCAAATATAA
CCTGAGGGTGCCGTATGGTGCCAATTATTCCTGTACAGAGCTTAATTTTACCAGAAAAACTGTTCCAG
GGGATAATGAATCTGAAGAAGACTCCAAAATAAAAGGCATCCATGATGAAAAGTATGTTGAATTGTTC
ATTGTTGCTGATGATACTGTGTATCGCAGAAATGGTCATCCTCACAATAAACTAAGGAACCGAATTTG
GGGAATGGTCAATTTTGTCAACATGATTTATAAAACCTTAAACATCCATGTGACGTTGGTTGGCATTG
AAATATGGACACATGAAGATAAATAGAACTATATTCAAATATAGAAACTACCTTATTGCGTTTTTTCA
TTTTGGCAAGAAAAGATCCTTAAAACACGGAAGGATTTTGATCATGTTGTATTACTCAGTGGGAAGTG
GCTCTACTCACATGTGCAAGGAATTTCTTATCCAGGGGGTATGTGCCTGCCCTATTATTCCACCAGTA
TCATTAAGGATCTTTTACCTGACACAAACATAATTGCAAACAGAATGGCACATCAACTGGGGCATAAC
CTTGGGATGCAGCATGACGAGTTCCCATGCACCTGTCCTTCAGGAAAATGCGTGATGGACAGTGATGG
AAGCATTCCTGCACTGAAATTCAGTAAATGCAGCCAAAACCAATACCACCAGTACTTGAAGGATTATA
AGCCAACATGCATGCTCAACATTCCATTTCCTTACAATTTTCATGATTTCCAATTTTGTGGAAACAAG
AAGTTGGATGAGGGTGAAGAGTGTGACTGTGGCCCTGCTCAGGAGTGTACTAATCCTTGCTGTGATGC
ACACACATGTGTACTGAAGCCAGGATTTACTTGTGCAGAAGGAGAATGCTGTGAATCTTGTCAGATAA
AAAAAGCAGGGTCCATATGCAGACCGGCGAAAGATGAATGTGATTTTCCTGAGATGTGCACTGGCCAC
TCGCCTGCCTGTCCTAAGGACCAGTTCAGGGTCAATGGATTTCCTTGCAAGAACTCAGAAGGCTACTG
TTTCATGGGGAAATGTCCAACTCGTGAGGATCAGTGCTCTGAACTATTTGATGATGAGGCAATAGAGA
GTCATGATATCTGCTACAAGATGAATACAAAAGGAAATAAATTTGGATACTGCAAAAACAAGGAAAAC
AGATTTCTTCCCTGTGAGGAGAAGGATGTCAGATGTGGAAAGATCTACTGCACTGGAGGGGAGCTTTC
CTCTCTCCTTGGAGAAGACAAGACTTATCACCTTAAGGATCCCCAGAAGAATGCTACTGTCAAATGCA
AAACTATTTTTTTATACCATGATTCTACAGACATTGGCCTGGTGGCGTCAGGAACAAAATGTGGAGAG
GGAATGGTATGCAACAATGGTGAATGTCTAAACATGGAAAAGGTCTATATCTCAACCAATTGCCCCTC
TCAGTGCAATGAAAATCCTGTAGATGGCCACGGACTCCAGTGCCACTGTGAGGAAGGACAGGCACCTG
TAGCCTGTGAAGAAACCTTACATGTTACCAGTATCACCATCTTGGTTGTTGTGCTTGTCCTGGTTATT
GTCGGTATCGGAGTTCTTATACTATTAGTTCGTTACCGAAAATGTATCAAGTTGAAGCAAGTTCAGAG
CCCACCTACAGAAACCCTGGGAGTGGAGAACAAAGGATACTTTGGTGATGAGCAGCAGATAAGGACTG
AGCCAATCCTGCCAGAAATTCATTTCCTAAATAAACCTGCAAGTAAAGATTCAAGAGGAATCGCAGAT
CCCAATCAAAGTGCCAAGTGGTAG

| | | | |
|---|---|---|---|
| NOV22a, CG51983-05 | SEQ ID NO: 290 | 755 aa | MW at 85868.5kD |
| Protein Sequence | | | |

MLPGCIFLMILLIPQVKEKFILGVEGQQLVRPKKLPLIQKRDTGHTHDDDILKTYEEELLYEIKLNRK
TLVLHLLRSREFLGSNYSETFYSMKGEAFTRHPQIMEHCYYKGNILNEKNSVASISTCDGLRGFFRIN
DQRYLIEPVKYSDEGEHLVFKYNLRVPYGANYSCTELNFTRKTVPGDNESEEDSKIKGIHDEKYVELF
IVADDTVYRRNGHPHNKLRMRIWGMVNFVNMIYKTLNIHVTLVGIEIWTHEDKIELYSNIETTLLRFS
FWQEKILKTRKDFDHVVLLSGKWLYSHVQGISYPGGMCLPYYSTSIIKDLLPDTNIIANRMAHQLGHN
LGMQHDEFPCTCPSGKCVMDSDGSIPALKFSKCSQNQYHQYLKDYKPTCMLNIPFPYNFHDFQFCGNK
KLDEGEECDCGPAQECTNPCCDAHTCVLKPGFTCABGECCESCQIKKAGSICRPAKDECDFPEMCTGH
SPACPKDQFRVNGFPCKNSEGYCFMGKCPTREDQCSELFDDEAIESHDICYKMNTKGNKFGYCKNKEN
RFLPCEEKDVRCGKIYCTGGELSSLLGEDKTYHLKDPQKNATVKCKTIFLYHDSTDIGLVASGTKCGE
GMVCNNGECLNMEKVYISTNCPSQCNENPVDGHGLQCHCEEGQAPVACEETLHVTSITILVVVLVLVI
VGIGVLILLVRYRKCIKLKQVQSPPTETLGVENKGYFGDEQQIRTEPILPEIHFLNKPASKDSRGIAD
PNQSAKW

| | | |
|---|---|---|
| NOV22b, CG51983-01 | SEQ ID NO: 291 | 2431 bp |
| DNA Sequence | ORF Start: ATG at 51 | ORF Stop: TAG at 2385 |

GAACTCCTTTTCTCAAGCACTTCTGCTCTCCTCTACCAGAATCACTCAGAATGCTTCCCGGGTGTATA
TTCTTGATGATTTTACTCATTCCTCAGGTTAAAGAAAAGTTCATCCTTGGAGTAGAGGGTCAACAACT
GGTTCGTCCTAAAAAGCTTCCTCTGATACAGAAGCGAGATACTGGACACACCCATGATGATGACATAA
AAACGTATGAAGAAGAATTGTTGTATGAAATAAAACTAAATAGAAAAACCTTAGTCCTTCATCTTCTA
AGATCCAGGAGGGAGTTCCTAGGCTCAAATTACAGTGAAACATTCTACTCCATGAAAGGAGAAGCGTT
CACCAGGCATCCTCAGATCATGGATCATTGTTTTTACCAAGGATCCATAGTACACGAATATGATTCAG
CTGCCAGTATCAGTACGTGTAATGGTCTAAGGGGATTCTTCAGAATAAACGACCAAAGATACCTCATT
GAACCAGTGAAATACTCAGATGAGGGAGAACATTTGGTGTTCAAATATAACCTGAGGGTGCCGTATGG
TGCCAATTATTCCTGTACAGAGCTTAATTTTACCAGAAAAACTGTTCCAGGGGATAATGAATCTGAAG
AAGACTCCAAAATAAAACAGGGCATCCATGATGAAAAGTATGTTGAATTGTTCATTGTTGCTGATGAT
ACTGTGTATCGCAGAAATGGTCATCCTCACAATAAACTAAGGAACCGAATTTGGGGAATGGTCAATTT
TGTCAACATGATTTATAAAACCTTAAACATCCATGTGACGTTGGTTGGCATTGAAATATGGACACATG
AAGATAAAATAGAACTATATTCAAATATAGAAACTACCTTATTGCGTTTTTCATTTTGGCAAGAAAAG
ATCCTTAAAACACGGAAGGATTTTGATCATGTTGTATTACTCAGTGGGAAGTGGCTCTACTCACATGT
GCAAGGAATTTCTTATCCAGGGGGTATGTGCCTGCCCTATTATTCCACCAGTATCATTAAGGATCTTT
TACCTGACACAAACATAATTGCAAACAGAATGGCACATCAACTGGGGCATAACCTTGGGATGCAGCAT
GACGAGTTCCCATGCACCTGTCCTTCAGGAAAATGCGTGATGGACAGTGATGGAAGCATTCCTGCACT
GAAATTCAGTAAATGCAGCCAAAACCAATACCACCAGTACTTGAAGGATTATAAGCCAACATGCATGC
TCAACATTCCATTTCCTTACAATTTTCATGATTTCCAATTTTGTGGAAACAAGAAGTTGGATGAGGGT
GAAGAGTGTGACTGTGGCCCTGCTCAGGAGTGTACTAATCCTTGCTGTGATGCACACACATGTGTACT
GAAGCCAGGATTTACTTGTGCAGAAGGAGAATGCTGTGAATCTTGTCAGATAAAAAAAGCAGGGTCCA
TATGCAGACCGGCGAAAGATGAATGTGATTTTCCTGAGATGTGCACTGGCCACTCGCCTGCCTGTCCT
AAGGACCAGTTCAGGGTCAATGGATTTCCTTGCAAGAACTCAGAAGGCTACTGTTTCATGGGGAAATG
TCCAACTCGTGAGGATCAGTGCTCTGAACTATTTGATGATGAGGCAATAGAGAGTCATGATATCTGCT
ACAAGATGAATACAAAAGGAAATAAATTTGGATACTGCAAAAACAAGGAAAACAGATTTCTTCCCTGT
GAGGAGAAGGATGTCAGATGTGGAAAGATCTACTGCACTGGAGGGGAGCTTTCCTCTCTCCTTGGAGA
AGACAAGACTTATCACCTTAAGGATCCCCAGAAGAATGCTACTGTCAAATGCAAAACTATTTTTTTAT
ACCATGATTCTACAGACATTGGCCTGGTGGCGTCAGGAACAAAATGTGGAGAGGGAATGGTATGCAAC
AATGGTGAATGTCTAAACATGGAAAAGGTCTATATCTCAACCAATTGCCCCTCTCAGTGCAATGAAAA
TCCTGTAGATGGCCACGGACTCCAGTGCCACTGTGAGGAAGGACAGGCACCTGTAGCCTGTGAAGAAA
CCTTACATGTTACCAGTATCACCATCTTGGTTGTTGTGCTTGTCCTGGTTATTGTCGGTATCGGAGTT
CTTATACTATTAGTTCGTTACCGAAAATGTATCAAGTTGAAGCAAGTTCAGAGCCCACCTACAGAAAC
CCTGGGAGTGGAGAACAAAGGATACTTTGGTGATGAGCAGCAGATAAGGACTGAGCCAATCCTGCCAG
AAATTCATTTCCTAAATCAGAGAACTCCAGAATCCTTGGAAAGCCTGCCCACTAGTTTTTCAAGTCCC
CACTACATCACACTGAAACCTGCAAGTAAAGATTCAAGAGGAATCGCAGATCCCAATCAAAGTGCCAA
GTGGTAGGTTACCCTGACAGATAGTACCTCCCTTTTTTATTTTTCAAATGC

| | | | |
|---|---|---|---|
| NOV22b, GG51983-01 | SEQ ID NO: 292 | 778 aa | MW at 88471.2kD |
| Protein Sequence | | | |

MLPGCIFLMILLIPQVKEKFILGVEGQQLVRPKKLPLIQKRDTGHTHDDDIKTYEEELLYEIKLNRKT
LVLHLLRSRREFLGSNYSETFYSMKGEAFTRHPQIMDHCFYQGSIVHEYDSAASISTCNGLRGFFRIN
DQRYLIEPVKYSDEGEHLVFKYNLRVPYGANYSCTELNFTRKTVPGDNESEEDSKIKQGIHDEKYVEL
FIVADDTVYRRNGHPHNKLRNRIWGMVNFVNMIYKTLNIHVTLVGIEIWTHEDKIELYSNIETTLLRF
SFWQEKILKTRKDFDHVVLLSGKWLYSHVQGISYPGGMCLPYYSTSIIKDLLPDTNIIANRMAHQLGH
NLGMQHDEFPCTCPSGKCVMDSDGSIPALKFSKCSQNQYHQYLKDYKPTCMLNIPFPYNFHDFQFCGN
KKLDEGEECDCGPAQECTNPCCDAHTCVLKPGFTCAEGECCESCQIKKAGSICRPAKDECDFPEMCTG
HSPACPKDQFRVNGFPCKNSEGYCFMGKCPTREDQCSELFDDEAIESHDICYKMNTKGNKFGYCKNKE
NRFLPCEEKDVRCGKIYCTGGELSSLLGEDKTYHLKDPQKNATVKCKTIFLYHDSTDIGLVASGTKCG
EGMVCNNGECLNMEKVYISTNCPSQCNENPVDGHGLQCHCEEGQAPVACEETLHVTSITILVVVLVLV
IVGIGVLILLVRYRKCIKLKQVQSPPTETLGVENKGYFGDEQQIRTEPILPEIHFLNQRTPESLESLP
TSFSSPHYITLKPASKDSRGIADPNQSAKW

| | | |
|---|---|---|
| NOV22c, GG51983-02 | SEQ ID NO: 293 | 2583 bp |
| DNA Sequence | ORF Start: ATG at 85 | ORF Stop: TGA at 2347 |

GATCCCTGCAGTGGAAGTGAGGAGGAAGAAAGGTGAACTCCTTTTCTCAAGCACTTCTGCTCTCCTCT
ACCAGAATCACTCAGAATGCTTCCCGGGTGTATATTCTTGATGATTTTACTCATTCCTCAGGTTAAAG
AAAAGTTCATCCTTGGAGTAGAGGGTCAACAACTGGTTCGTCCTAAAAAGCTTCCTCTGATACAGAAG
CGAGATACTGGACACACCCATGATGATGACATACTGAAAACGTATGAAGAAGAATTGTTGTATGAAAT
AAAACTAAATAGAAAAACCTTAGTCCTTCATCTTCTAAGATCCAGGGAGTTCCTAGGCTCAAATTACA
GTGAAACATTCTACTCCATGAAAGGAGGAGCGTTCACCAGGCATCCTCAGATCATGGATCATTGTTTT
TACCAAGGATCCATAGTACACGAATATGATTCAGCTGCCAGTATCAGTACGTGTAATGGTCTAAGGGG
ATTCTTCAGAATAAACGACCAAAGATACCTCATTGAACCAGTGAAATACTCAGATGAGGGAGAACATT
TGGTGTTCAAATATAACCTGAGGGTGCCGTATGGTGCCAATTATTCCTGTACAGAGCTTAATTTTACC
AGAAAAACTGTTCCAGGGGATAATGAATCTGAAGAAGACTCCAAAATAAAAGGCATCCATGATGAAAA
GTATGTTGAATTGTTCATTGTTGCTGATGATACTGTGTATCGCAGAAATGGTCATCCTCACAATAAAC
TAAGGAACCGAATTTGGGGAATGGTCAATTTTGTCAACATGATTTATAAAACCTTAAACATCCATGTG
ACGTTGGTTGGCATTGAAATATGGACACATGAAGATAAAATAGAACTATATTCAAATATAGAAACTAC
CTTATTGCGTTTTTCATTTTGGCAAGAAAAGATCCTTAAAACACGGAAGGATTTTGATCATGTTGTAT
TACTCAGTGGGAAGTGGCTCTACTCACATGTGCAAGGAATTTCTTATCCAGGGGGTATGTGCCTGCCC
TATTATTCCACCAGTATCATTAAGGATCTTTTACCTGACACAAACATAATTGCAAACAGAATGGCACA
TCAACTGGGGCATAACCTTGGGATGCAGCATGACGAGTTCCCATGCACCTGTCCTTCAGGAAAATGCG
TGATGGACAGTGATGGAAGCATTCCTGCACTGAAATTCAGTAAATGCAGCCAAAACCAATACCACCAG
TACTTGAAGGATTATAAGCCAACATGCATGCTCAACATTCCATTTCCTTACAATTTTCATGATTTCCA
ATTTTGTGGAAACAAGAAGTTGGATGAGGGTGAAGAGTGTGACTGTGGCCCTGCTCAGGAGTGTACTA
ATCCTTGCTGTGATGCACACACATGTGTACTGAAGCCAGGATTTACTTGTGCAGAAGGAGAATGCTGT
GAATCTTGTCAGATAAAAAAAGCAGGGTCCATATGCAGACCGGCGAAAGATGAATGTGATTTTCCTGA
GATGTGCACTGGCCACTCGCCTGCCTGTCCTAAGGACCAGTTCAGGGTCAATGGATTTCCTTGCAAGA
ACTCAGAAGGCTACTGTTTCATGGGGAAATGTCCAACTCGTGAGGATCAGTGCTCTGAACTATTTGAT
GATGATGCAATAGAGAGTCATGATATCTGCTACAAGATGAATACAAAAGGAAATAAATTTGGATACTG
CAAAAACAAGGAAAACAGATTTCTTCCCTGTGAGGAGAAAGATGTCAGATGTGGAAAGATCTACTGCA
CTGGAGGGGAGCTTTCCTCTCTCCTTGGAGAAGACAAGACTTATCACCTTAAGGATCCCCAGAAGAAT
GCTACTGTCAAATGCAAAACTATTTTTTTATACCATGATTCTACAGACATTGGCCTGGTGGCGTCAGG
AACAAAATGTGGAGAGGGAATGGTGTGCAACAATGGTGAATGTCTAAACATGGAAAAGGTCTATATCT
CAACCAATTGCCCCTCTCAGTGCAATGAAAATCCTGTGGATGGCCACGGACTCCAGTGCCACTGTGAG
GAAGGACAGGCACCTGTAGCCTGTGAAGAAACCTTACATGTTACCAATATCACCATCTTGGTTGTTGT
GCTTGTCCTGGTTATTGTCGGTATCGGAGTTCTTATACTATTAGTTCGTTACCGAAAATGTATCAAGT
TGAAGCAAGTTCAGAGCCCACCTACAGAAACCCTGGGAGTGGAGAACAAAGGATACTTTGGTGATGAG
CAGCAGATAAGGACTGAGCCAATCCTGCCAGAAATTCATTTCCTAAATAAACCTGCAAGTAAAGATTC
AAGAGGAATCGCAGATCCCAATCAAAGTGCCAAGTGAGCTTGAAGTTGGATATCCAAAATGGCCGTGC
AAGCTTAGGCTGGGGATTCTGGATGCAACGTCTTTACAACCTTACCTAGATATCTGCTACTCACATTT
TTGGTAGTGTTTCAAACGTTCTTTATCCAGACAGACAATGTTTAAGAGAAACAACTTATTTCTGTTAA
TATTTACCGGTAGAATTCACACCCTCTATCATAAACATATGCTGCAGAAAAAAAAAAAAAAAAAAAA

| | | | |
|---|---|---|---|
| NOV22c, CG51983-02 | SEQ ID NO: 294 | 754 aa | MW at 85582.1kD |
| Protein Sequence | | | |

MLPGCIFLMILLIPQVKEKFILGVEGQQLVRPKKLPLIQKRDTGHTHDDDILKTYEEELLYEIKLNRK
TLVLHLLRSREFLGSNYSETFYSMKGGAFTRHPQIMDHCFYQGSIVHEYDSAASISTCNGLRGFFRIN
DQRYLIEPVKYSDEGEHLVFKYNLRVPYGANYSCTELNFTRKTVPGDNESEEDSKIKGIHDEKYVELF
IVADDTVYRRNGHPHNKLRNRIWGMVNFVNMIYKTLNIHVTLVGIEIWTHEDKIELYSNIETTLLRFS
FWQEKILKTRKDFDHVVLLSGKWLYSHVQGISYPGGMCLPYYSTSIIKDLLPDTNIIANRMAHQLGHN
LGMQHDEFPCTCPSGKCVMDSDGSIPALKFSKCSQNQYHQYLKDYKPTCMLNIPFPYNFHDFQFCGNK
KLDEGEECDCGPAQECTNPCCDAHTCVLKPGFTCAEGECCESCQIKKAGSICRPAKDECDFPEMCTGH
SPACPKDQFRVNGFPCKNSEGYCFMGKCPTREDQCSELFDDDAIESHDICYKMNTKGNKFGYCKWKEN
RFLPCEEKDVRCGKIYCTGGELSSLLGEDKTYHLKDPQKNATVKCKTIFLYHDSTDIGLVASGTKCGE
GMVCNNGECLNMEKVYISTNCPSQCNENPVDGHGLQCHCEEGQAPVACEETLHVTNITILVVVLVLVI
VGIGVLILLVRYRKCIKLKQVQSPPTETLGVENKGYFGDEQQIRTEPILPEIHFLNKPASKDSRGIAD
PNQSAK

| | | |
|---|---|---|
| NOV22d, GG51983-03 | SEQ ID NO: 295 | 2274 bp |
| DNA Sequence | ORF Start: ATG at 4 | ORF Stop: TAG at 2272 |

AGAATGCTTCCCGGGTGTATATTCTTGATGATTTTACTCATTCCTCAGGTTAAAGAAAAGTTCATCCT
TGGAGTAGAGGGTCAACAACTGGTTCGTCCTAAAAAGCTTCCTCTGATACAGAAGCGAGATACTGGAC
ACACCCATGATGATGACATAAAAAACGTATGAAGAAGAATTGTTGTATGAATAAAACTAAATAGAAAA
ACCTTAGTCCTTCATCTTCTAAGATCCAGGAGGGAGTTCCTAGGCTCAAATTACAGTGAAACATTCTA
CTCCATGAAAGGAGAAGCGTTCACCAGGCATCCTCAGATCATGGATCATTGTTTTTACCAAGGATCCA
TAGTACACGAATATGATTCAGCTGCCAGTATCAGTACGTGTAATGGTCTAAGGGGATTCTTCAGAATA
AACGACCAAAGATACCTCATTGAACCAGTGAAATACTCAGATGAGGGAGAACATTTGGTGTTCAAATA
TAACCTGAGGGTGCCGTATGGTGCCAATTATTCCTGTACAGAGCTTAATTTTACCAGAAAAACTGTTC
CAGGGGATAATGAATCTGAAGAAGACTCCAAAATAAAACAGGGCATCCATGATGAAAAGTATGTTGAA
TTGTTCATTGTTGCTGATGATACTGTGTATCGCAGAAATGGTCATCCTCACAATAAACTAAGGAACCG
AATTTGGGGAATGGTCAATTTTGTCAACATGATTTATAAAACCTTAAACATCCATGTGACGTTGGTTG
GCATTGAAATATGGACACATGAAGATAAAATAGAACTATATTCAAATATAGAAACTACCTTATTGCGT
TTTTCATTTTGGCAAGAAAAGATCCTTAAAACACGGAAGGATTTTGATCATGTTGTATTACTCAGTGG
GAAGTGGCTCTACTCACATGTGCAAGGAATTTCTTATCCAGGGGGTATGTGCCTGCCCTATTATTCCA
CCAGTATCATTAAGGATCTTTTACCTGACACAAACATAATTGCAAACAGAATGGCACATCAACTGGGG
CATAACCTTGGGATGCAGCATGACGAGTTCCCATGCACCTGTCCTTCAGGAAAATGCGTGATGGACAG
TGATGGAAGCATTCCTGCACTGAAATTCAGTAAATGCAGCCAAAACCAATACCACCAGTACTTGAAGG
ATTATAAGCCAACATGCATGCTCAACATTCCATTTCCTTACAATTTTCATGATTTCCAATTTTGTGGA
AACAAGAAGTTGGATGAGGGTGAAGAGTGTGACTGTGGCCCTGCTCAGGAGTGTACTAATCCTTGCTG
TGATGCACACACATGTGTACTGAAGCCAGGATTTACTTGTGCAGAAGGAGAATGCTGTGAATCTTGTC
AGATAAAAAAAGCAGGGTCCATATGCAGACCGGCGAAAGATGAATGTGATTTTCCTGAGATGTGCACT
GGCCACTCGCCTGCCTGTCCTAAGGACCAGTTCAGGGTCAATGGATTTCCTTGCAAGAACTCAGAAGG
CTACTGTTTCATGGGGAAATGTCCAACTCGTGAGGATCAGTGCTCTGAACTATTTGATGATGAGGCAA
TAGAGAGTCATGATATCTGCTACAAGATGAATACAAAAGGAAATAAATTTGGATACTGCAAAAACAAG
GAAAACAGATTTCTTCCCTGTGAGGAGAAGGATGTCAGATGTGGAAAGATCTACTGCACTGGAGGGAA
GCTTTCCTCTCTCCTTGGAGAAGACAAGACTTATCACCTTAAGGATCCCCAGAAGAATGCTACTGTCA
AATGCAAAACTATTTTTTTATACCATGATTCTACAGACATTGGCCTGGTGGCGTCAGGAACAAAATGT
GGAGAGGGAATGGTATGCAACAATGGTGAATGTCTAAACATGGAAAAGGTCTATATCTCAACCAATTG
CCCCTCTCAGTGCAATGAAAATCCTGTAGATGGCCACGGACTCCAGTGCCACTGTGAGGAAGGACAGG
CACCTGTAGCCTGTGAAGAAACCTTACATGTTACCAGTATCACCATCTTGGTTGTTGTGCTTGTCCTG
GTTATTGTCGGTATCGGAGTTCTTATACTATTAGTTCGTTACCGAAAATGTATCAAGTTGAAGCAAGT
TCAGAGCCCACCTACAGAAACCCTGGGAGTGGAGAACAAAGGATACTTTGGTGATGAGCAGCAGATAA
GGACTGAGCCAATCCTGCCAGAAATTCATTTCCTAAATAAACCTGCAAGTAAAGATTCAAGAGGAATC
GCAGATCCCAATCAAAGTGCCAAGTGGTAG

| | | | |
|---|---|---|---|
| NOV22d, CG51983-03 | SEQ ID NO: 296 | 756 aa | MW at 85998.5kD |
| Protein Sequence | | | |

MLPGCIFLMILLIPQVKEKFILGVEGQQLVRPKKLPLIQKRDTGHTHDDDIKTYEEELLYEIKLNRKT
LVLHLLRSRREFLGSNYSETFYSMKGEAFTRHPQIMDHCFYQGSIVHEYDSAASISTCNGLRGFFRIN
DQRYLIEPVKYSDEGEHLVFKYNLRVPYGANYSCTELNFTRKTVPGDNESEEDSKIKQGIHDEKYVEL
FIVADDTVYRRNGHPHNKLRNRIWGMVNFVNMIYKTLNIHVTLVGIEIWTHEDKIELYSNIETTLLRF
SFWQEKILKTRKDFDHVVLLSGKWLYSHVQGISYPGGMCLPYYSTSIIKDLLPDTNIIANRMAHQLGH
NLGMQHDEFPCTCPSGKCVMDSDGSIPALKFSKCSQNQYHQYLKDYKPTCMLNIPFPYNFHDFQFCGN
KKLDEGEECDCGPAQECTNPCCDAHTCVLKPGFTCAEGECCESCQIKKAGSICRPAKDECDFPEMCTG
HSPACPKDQFRVNGFPCKNSEGYCFMGKCPTREDQCSELFDDEAIESHDICYKMNTKGNKFGYCKNKE
NRFLPCEEKDVRCGKIYCTGGELSSLLGEDKTYHLKDPQKNATVKCKTIFLYHDSTDIGLVASGTKCG
EGMVCNNGECLNMEKVYISTNCPSQCNENPVDGHGLQCHCEEGQAPVACEETLHVTSITILVVVLVLV
IVGIGVLILLVRYRKCIKLKQVQSPPTETLGVENKGYFGDEQQIRTEPILPEIHFLNKPASKDSRGIA
DPNQSAKW

| | | |
|---|---|---|
| NOV22e, CG51983-04 | SEQ ID NO: 297 | 2283 bp |
| DNA Sequence | ORF Start: ATG at 12 | ORF Stop: TGA at 2274 |

AATCACTCAGAATGCTTCCCGGGTGTATATTCTTGATGATTTTACTCATTCCTCAGGTTAAAGAAAAG
TTCATCCTTGGAGTAGAGGGTCAACAACTGGTTCGTCCTAAAAAGCTTCCTCTGATACAGAAGCGAGA
TACTGGACACACCCATGATGATGACATACTGAAAACGTATGAAGAAGAATTGTTGTATGAAATAAAAC
TAAATAGAAAAACCTTAGTCCTTCATCTTCTAAGATCCAGGGAGTTCCTAGGCTCAAATTACAGTGAA
ACATTCTACTCCATGAAAGGAGGAGCGTTCACCAGGCATCCTCAGATCATGGATCATTGTTTTTACCA
AGGATCCATAGTACACGAATATGATTCAGCTGCCAGTATCAGTACGTGTAATGGTCTAAGGGGATTCT
TCAGAATAAACGACCAAAGATACCTCATTGAACCAGTGAAATACTCAGATGAGGGAGAACATTTGGTG
TTCAAATATAACCTGAGGGTGCCGTATGGTGCCAATTATTCCTGTACAGAGCTTAATTTTACCAGAAA
AACTGTTCCAGGGGATAATGAATCTGAAGAAGACTCCAAAATAAAAGGCATCCATGATGAAAAGTATG
TTGAATTGTTCATTGTTGCTGATGATACTGTGTATCGCAGAAATGGTCATCCTCACAATAAACTAAGG
AACCGAATTTGGGGAATGGTCAATTTTGTCAACATGATTTATAAAACCTTAAACATCCATGTGACGTT
GGTTGGCATTGAAATATGGACACATGAAGATAAAATAGAACTATATTCAAATATAGAAACTACCTTAT
TGCGTTTTTCATTTTGGCAAGAAAAGATCCTTAAAACACGGAAGGATTTTGATCATGTTGTATTACTC
AGTGGGAAGTGGCTCTACTCACATGTGCAAGGAATTTCTTATCCAGGGGGTATGTGCCTGCCCTATTA
TTCCACCAGTATCATTAAGGATCTTTTACCTGACACAAACATAATTGCAAACAGAATGGCACATCAAC
TGGGGCATAACCTTGGGATGCAGCATGACGAGTTCCCATGCACCTGTCCTTCAGGAAAATGCGTGATG
GACAGTGATGGAAGCATTCCTGCACTGAAATTCAGTAAATGCAGCCAAAACCAATACCACCAGTACTT
GAAGGATTATAAGCCAACATGCATGCTCAACATTCCATTTCCTTACAATTTTCATGATTTCCAATTTT
GTGGAAACAAGAAGTTGGATGAGGGTGAAGAGTGTGACTGTGGCCCTGCTCAGGAGTGTACTAATCCT
TGCTGTGATGCACACACATGTGTACTGAAGCCAGGATTTACTTGTGCAGAAGGAGAATGCTGTGAATC
TTGTCAGATAAAAAAAGCAGGGTCCATATGCAGACCGGCGAAAGATGAATGTGATTTTCCTGAGATGT
GCACTGGCCACTCGCCTGCCTGTCCTAAGGACCAGTTCAGGGTCAATGGATTTCCTTGCAAGAACTCA
GAAGGCTACTGTTTCATGGGGAAATGTCCAACTCGTGAGGATCAGTGCTCTGAACTATTTGATGATGA
TGCAATAGAGAGTCATGATATCTGCTACAAGATGAATACAAAAGGAAATAAATTTGGATACTGCAAAA
ACAAGGAAAACAGATTTCTTCCCTGTGAGGAGAAAGATGTCAGATGTGGAAAGATCTACTGCACTGGA
GGGGAGCTTTCCTCTCTCCTTGGAGAAGACAAGACTTATCACCTTAAGGATCCCCAGAAGAATGCTAC
TGTCAAATGCAAAACTATTTTTTTATACCATGATTCTACAGACATTGGCCTGGTGGCGTCAGGAACAA
AATGTGGAGAGGGAATGGTGTGCAACAATGGTGAATGTCTAAACATGGAAAAGGTCTATATCTCAACC
AATTGCCCCTCTCAGTGCAATGAAAATCCTGTGGATGGCCACGGACTCCAGTGCCACTGTGAGGAAGG
ACAGGCACCTGTAGCCTGTGAAGAAACCTTACATGTTACCAATATCACCATCTTGGTTGTTGTGCTTG
TCCTGGTTATTGTCGGTATCGGAGTTCTTATACTATTAGTTCGTTACCGAAAATGTATCAAGTTGAAG
CAAGTTCAGAGCCCACCTACAGAAACCCTGGGAGTGGAGAACAAAGGATACTTTGGTGATGAGCAGCA
GATAAGGACTGAGCCAATCCTGCCGGAAATTCATTTCCTAAATAAACCTGCAAGTAAAGATTCAAGAG
GAATCGCAGATCCCAATCAAAGTGCCAAGTGAGCTTGAA

| | | | |
|---|---|---|---|
| NOV22e, CG51983-04 | SEQ ID NO: 298 | 754 aa | MW at 85582.1kD |
| Protein Sequence | | | |

MLPGCIFLMILLIPQVKEKFILGVEGQQLVRPKKLPLIQKRDTGHTHDDDILKTYEEELLYEIKLNRK
TLVLHLLRSREFLGSNYSETFYSMKGGAFTRHPQIMDHCFYQGSIVHEYDSAASISTCNGLRGFFRIN
DQRYLIEPVKYSDEGEHLVFKYNLRVPYGANYSCTELNFTRKTVPGDNESEEDSKIKGIHDEKYVELF
IVADDTVYRRNGHPHNKLRNRIWGMVNFVNMIYKTLNIHVTLVGIEIWTHEDKIELYSNIETTLLRFS
FWQEKILKTRKDFDHVVLLSGKWLYSHVQGISYPGGMCLPYYSTSIIKDLLPDTNIIANRMAHQLGHN
LGMQHDEFPCTCPSGKCVMDSDGSIPALKFSKCSQNQYHQYLKDYKPTCMLNIPFPYNFHDFQFCGNK
KLDEGEECDCGPAQECTNPCCDAHTCVLKPGFTCAEGECCESCQIKKAGSICRPAKDECDFPEMCTGH
SPACPKDQFRVNGFPCKNSEGYCFMGKCPTREDQCSELFDDDAIESHDICYKMNTKGNKFGYCKNKEN
RFLPCEEKDVRCGKIYCTGGELSSLLGEDKTYHLKDPQKNATVKCKTIFLYHDSTDIGLVASGTKCGE
GMVCNNGECLNNEKVYISTNCPSQCNENPVDGHGLQCHCEEGQAPVACEETLHVTNITILVVVLVLVI
VGIGVLILLVRYRKCIKLKQVQSPPTETLGVENKGYFGDEQQIRTEPILPEIHFLNKPASKDSRGIAD
PNQSAK

| | | |
|---|---|---|
| NOV22f, CG51983-06 | SEQ ID NO: 299 | 2464 bp |
| DNA Sequence | ORF Start: ATG at 4 | ORF Stop: TGA at 2248 |

AGAATGCTTCCCGGGTGTATATTCTTGATGATTTTACTCATTCCTCAGGTTAAAGAAAAGTTCATCCT
TGGAGTAGAGGGTCAACAACTGGTTCGTCCTAAAAAGCTTCCTCTGATACAGAAGCGAGATACTGGAC
ACACCCATGATGATGACATACTGAAAACGTATGAAGAAGAATTGTTGTATGAAATAAAACTAAATAGA
AAAACCTTAGTCCTTCATCTTCTAAGATCCAGGGAGTTCCTAGGCTCAAATTACAGTGAAACATTCTA
CTCCATGAAAGGAGAAGCGTTCACCAGGCATCCTCAGATCATGGATCATTGTTTTTACCAAGGATCCA
TAGTACACGAATATGATTCAGCTGCCAGTATCAGTACGTGTAATGGTCTAAGGGGATTCTTCAGAATA
AACGACCAAAGATACCTCATTGAACCAGTGAAATACTCAGATGAGGGAGAACATTTGGTGTTCAAATA
TAACCTGAGGGTGCCGTATGGTGCCAATTATTCCTGTACAGAGCTTAATTTTACCAGAAAAACTGTTC
CAGGGGATAATGAATCTGAAGAAGACTCCAAAATAAAAGGCATCCATGATGAAAAGTATGTTGAATTG
TTCATTGTTGCTGATGATACTGTGTATCGCAGAAATGGTCATCCTCACAATAAACTAAGGAACCGAAT
TTGGGGAATGGTCAATTTTGTCAACATGATTTATAAAACCTTAAACATCCATGTGACGTTGGTTGGCA
TTGAAATATGGACACATGAAGATAAAATAGAACTATATTCAAATATAGAAACTACCTTATTGCGTTTT
TCATTTTGGCAAGAAAAGATCCTTAAAACACGGAAGGATTTTGATCATGTTGTATTACTCAGTGGGAA
GTGGCTCTACTCACATGTGCAAGGAATTTCTTATCCAGGGGGTATGTGCCTGCCCTATTATTCCACCA
GTATCATTAAGGATCTTTTACCTGACACAAACATAATTGCAAACAGAATGGCACATCAACTGGGGCAT
AACCTTGGGATGCAGCATGACGAGTTCCCATGCACCTGTCCTTCAGGAAAATGCGTGATGGACAGTGA
TGGAAGCATTCCTGCACTGAAATTCAGTAAATGCAGCCAAAACCAATACCACCAGTACTTGAAGGATT
ATAAGCCAACATGCATGCTCAACATTCCATTTCCTTACAATTTTCATGATTTCCAATTTTGTGGAAAC
AAGAAGTTGGATGAGGGTGAAGAGTGTGACTGTGGCCCTGCTCAGGAGTGTACTAATCCTTGCTGTGA
TGCACACACATGTGTACTGAAGCCAGGATTTACTTGTGCAGAAGGAGAATGCTGTGAATCTTGTCAGA
TAAAAAAAGCAGGGTCCATATGCAGACCGGCGAAAGATGAATGTGATTTTCCTGAGATGTGCACTGGC
CACTCGCCTGCCTGTCCTAAGGACCAGTTCAGGGTCAATGGATTTCCTTGCAAGAACTCAGAAGGCTA
CTGTTTCATGGGGAAATGTCCAACTCGTGAGGATCAGTGCTCTGAACTATTTGATGATGAGGCAATAG
AGAGTCATGATATCTGCTACAAGATGAATACAAAAGGAAATAAATTTGGATACTGCAAAAACAAGGAA
AACAGATTTCTTCCCTGTGAGGAGAAAGATGTCAGATGTGGAAAGACCTACTGCACTGGAGGGGAGCT
TTCCTCTCTCCTTGGAGAAGACAAGACTTATCACCTTAAGGATCCCCAGAAGAATGCTACTGTCAAAT
GCAAAACTATTTTTTTATACCATGATTCTACAGACATTGGCCTGGTGGCGTCAGGAACAAAATGTGGA
GAGGGAATGGTGGATGGCCACGGACTCCAGTGCCACTGTGAGGAAGGACAGGCACCTGTAGCCTGTGA
AGAAACCTTACATGTTACCAATATCACCATCTTGGTTGTTGTGCTTGTCCTGGTTATTGTCGGTATCG
GAGTTCTTATACTATTAGTTCGTTACCGAAAATGTATCAAGTTGAAGCAAGTTCAGAGCCCACCTACA
GAAACCCTGGGAGTGGAGAACAAAGGATACTTTGGTGATGAGCAGCAGATAAGGACTGAGCCAATCCT
GCCAGAAATTCATTTCCTAAATAGAACTCCAGAATCCTTGGAAAGCCTGCCCACTAGTTTTTCAAGTC
CCCACTACATCACACTGAAACCTGCAAGTAAAGATTCAAGAGGAATCGCAGATCCCAATCAAAGTGCC
AAGTGAGCTTGAAGTTGGATATCCAAAATGGCCGTGCAAGCTTAGGCTGGGGATTCTGGATGCAACGT
CTTTACAACCTTACCTAGATATCTGCTACTCACATTTTTGGTAGTGTTTCAAACGTTCTTTATCCAGA
CAGACAATGTTTAAGAGAAACAACTTATTTCTGTTAATATTTACCGGTAGAATTCACACCCTCTATCA
TAAACATATGCTGCAG

| | | | |
|---|---|---|---|
| NOV22f, CG51983-06 | SEQ ID NO: 300 | 748 aa | MW at 85014.4kD |
| Protein Sequence | | | |

MLPGCIFLMILLIPQVKEKFILGVEGQQLVRPKKLPLIQKRDTGHTHDDDILKTYEEELLYEIKLNRK
TLVLHLLRSREFLGSNYSETFYSMKGEAFTRHPQIMDHCFYQGSIVHEYDSAASISTCNGLRGFFRIN
DQRYLIEPVKYSDEGEHLVFKYNLRVPYGANYSCTELNFTRKTVPGDNESEEDSKIKGIHDEKYVELF
IVADDTVYRRNGHPHNKLRNRIWGMVNFVNMIYKTLNIHVTLVGIEIWTHEDKIELYSNIETTLLRFS
FWQEKILKTRKDFDHVVLLSGKWLYSHVQGISYPGGMCLPYYSTSIIKDLLPDTNIIANRMAHQLGHN
LGMQHDEFPCTCPSGKCVMDSDGSIPALKFSKCSQNQYHQYLKDYKPTCMLNIPFPYNFHDFQFCGNK
KLDEGEECDCGPAQECTNPCCDAHTCVLKPGFTCAEGECCESCQIKKAGSICRPAKDECDFPEMCTGH
SPACPKDQFRVNGFPCKNSEGYCFMGKCPTREDQCSELFDDEAIESHDICYKMNTKGNKFGYCKNKEN
RFLPCEEKDVRCGKTYCTGGELSSLLGEDKTYHLKDPQKNATVKCKTIFLYHDSTDIGLVASGTKCGE
GMVDGHGLQCHCEEGQAPVACEETLHVTNITILVVVLVLVIVGIGVLILLVRYRKCIKLKQVQSPPTE
TLGVENKGYFGDEQQIRTEPILPEIHFLNRTPESLESLPTSFSSPHYITLKPASKDSRGIADPNQSAK

| | | |
|---|---|---|
| NOV22g, SNP13376585 | SEQ ID NO: 301 | 2268 bp |
| of GG51983-05, DNA | ORF Start: ATG at 1 | ORF Stop: TAG at 2266 |
| Sequence | SNP Pos: 119 | SNP Change: A to G |

ATGCTTCCCGGGTGTATATTCTTGATGATTTTACTCATTCCTCAGGTTAAAGAAAAGTTCATCCTTGG
AGTAGAGGGTCAACAACTGGTTCGTCCTAAAAAGCTTCCTCTGATACAGAGGCGAGATACTGGACACA
CCCATGATGATGACATACTGAAAACGTATGAAGAAGAATTGTTGTATGAAATAAAACTAAATAGAAAA
ACCTTAGTCCTTCATCTTCTAAGATCCAGGGAGTTCCTAGGCTCAAATTACAGTGAAACATTCTACTC
CATGAAAGGAGAAGCGTTCACCAGGCATCCTCAGATCATGGAACACTGTTACTATAAAGGAAACATCC
TAAATGAAAAGAATTCTGTTGCCAGCATCAGTACTTGTGACGGGTTGAGGGGATTCTTCAGAATAAAC
GACCAAAGATACCTCATTGAACCAGTGAAATACTCAGATGAGGGAGAACATTTGGTGTTCAAATATAA
CCTGAGGGTGCCGTATGGTGCCAATTATTCCTGTACAGAGCTTAATTTTACCAGAAAAACTGTTCCAG
GGGATAATGAATCTGAAGAAGACTCCAAAATAAAAGGCATCCATGATGAAAAGTATGTTGAATTGTTC
ATTGTTGCTGATGATACTGTGTATCGCAGAAATGGTCATCCTCACAATAAACTAAGGAACCGAATTTG
GGGAATGGTCAATTTTGTCAACATGATTTATAAAACCTTAAACATCCATGTGACGTTGGTTGGCATTG
AAATATGGACACATGAAGATAAAATAGAACTATATTCAAATATAGAAACTACCTTATTGCGTTTTTCA
TTTTGGCAAGAAAAGATCCTTAAAACACGGAAGGATTTTGATCATGTTGTATTACTCAGTGGGAAGTG
GCTCTACTCACATGTGCAAGGAATTTCTTATCCAGGGGGTATGTGCCTGCCCTATTATTCCACCAGTA
TCATTAAGGATCTTTTACCTGACACAAACATAATTGCAAACAGAATGGCACATCAACTGGGGCATAAC
CTTGGGATGCAGCATGACGAGTTCCCATGCACCTGTCCTTCAGGAAAATGCGTGATGGACAGTGATGG
AAGCATTCCTGCACTGAAATTCAGTAAATGCAGCCAAAACCAATACCACCAGTACTTGAAGGATTATA
AGCCAACATGCATGCTCAACATTCCATTTCCTTACAATTTTCATGATTTCCAATTTTGTGGAAACAAG
AAGTTGGATGAGGGTGAAGAGTGTGACTGTGGCCCTGCTCAGGAGTGTACTAATCCTTGCTGTGATGC
ACACACATGTGTACTGAAGCCAGGATTTACTTGTGCAGAAGGAGAATGCTGTGAATCTTGTCAGATAA
AAAAAGCAGGGTCCATATGCAGACCGGCGAAAGATGAATGTGATTTTCCTGAGATGTGCACTGGCCAC
TCGCCTGCCTGTCCTAAGGACCAGTTCAGGGTCAATGGATTTCCTTGCAAGAACTCAGAAGGCTACTG
TTTCATGGGGAAATGTCCAACTCGTGAGGATCAGTGCTCTGAACTATTTGATGATGAGGCAATAGAGA
GTCATGATATCTGCTACAAGATGAATACAAAAGGAAATAAATTTGGATACTGCAAAAACAAGGAAAAC
AGATTTCTTCCCTGTGAGGAGAAGGATGTCAGATGTGGAAAGATCTACTGCACTGGAGGGGAGCTTTC
CTCTCTCCTTGGAGAAGACAAGACTTATCACCTTAAGGATCCCCAGAAGAATGCTACTGTCAAATGCA
AAACTATTTTTTTATACCATGATTCTACAGACATTGGCCTGGTGGCGTCAGGAACAAAATGTGGAGAG
GGAATGGTATGCAACAATGGTGAATGTCTAAACATGGAAAAGGTCTATATCTCAACCAATTGCCCCTC
TCAGTGCAATGAAAATCCTGTAGATGGCCACGGACTCCAGTGCCACTGTGAGGAAGGACAGGCACCTG
TAGCCTGTGAAGAAACCTTACATGTTACCAGTATCACCATCTTGGTTGTTGTGCTTGTCCTGGTTATT
GTCGGTATCGGAGTTCTTATACTATTAGTTCGTTACCGAAAATGTATCAAGTTGAAGCAAGTTCAGAG
CCCACCTACAGAAACCCTGGGAGTGGAGAACAAAGGATACTTTGGTGATGAGCAGCAGATAAGGACTG
AGCCAATCCTGCCAGAAATTCATTTCCTAAATAAACCTGCAAGTAAAGATTCAAGAGGAATCGCAGAT
CCCAATCAAAGTGCCAAGTGGTAG

| | | | |
|---|---|---|---|
| NOV22g, SNP13376585 of | SEQ ID NO: 302 | 755 aa | MW at 85896.5k.D |
| CG51983-05, Protein | SNP Pos: 40 | | SNP Change: Lys to Arg |
| Sequence | | | |

MLPGCIFLMILLIPQVKEKFILGVEGQQLVRPKKLPLIQRRDTGHTHDDDILKTYEEELLYEIKLNRK
TLVLHLLRSREFLGSNYSETFYSMKGEAFTRHPQIMEHCYYKGNILNEKNSVASISTCDGLRGFFRIN
DQRYLIEPVKYSDEGEHLVFKYNLRVPYGANYSCTELNFTRKTVPGDNESEEDSKIKGIHDEKYVELF
IVADDTVYRRNGHPHNKLRNRIWGMVNFVNMIYKTLNIHVTLVGIEIWTHEDKIELYSNIETTLLRFS
FWQEKILKTRKDFDHVVLLSGKWLYSHVQGISYPGGMCLPYYSTSIIKDLLPDTNIIANRMAHQLGHN
LGMQHDEFPCTCPSGKCVMDSDGSIPALKFSKCSQNQYHQYLKDYKPTCMLNIPFPYNFHDFQFCGNK
KLDEGEECDCGPAQECTNPCCDAHTCVLKPGFTCABGECCESCQIKKAGSICRPAKDECDFPEMCTGH
SPACPKDQFRVNGFPCKNSEGYCFMGKCPTREDQCSELFDDEAIESHDICYKMNTKGNKFGYCKNKEN
RFLPCEEKDVRCGKIYCTGGELSSLLGEDKTYHLKDPQKNATVKCKTIFLYHDSTDIGLVASGTKCGE
GMVCNNGECLNMEKVYISTNCPSQCNENPVDGHGLQCHCEEGQAPVACEETLHVTSITILVVVLVLVI
VGIGVLILLVRYRKCIKLKQVQSPPTETLGVENKGYFGDEQQIRTEPILPEIHFLNKPASKDSRGIAD
PNQSAKW

| | | |
|---|---|---|
| NOV22h, SNP13376586 of | SEQ ID NO: 303 | 2268 bp |
| CG51983-05, DNA Sequence | ORF Start: ATG at 1 | ORF Stop: TAG at 2266 |
| | SNP Pos: 125 | SNP Change: A to G |

ATGCTTCCCGGGTGTATATTCTTGATGATTTTACTCATTCCTCAGGTTAAAGAAAAGTTCATCCTTGG
AGTAGAGGGTCAACAACTGGTTCGTCCTAAAAAGCTTCCTCTGATACAGAAGCGAGGTACTGGACACA
CCCATGATGATGACATACTGAAAACGTATGAAGAAGAATTGTTGTATGAAATAAAACTAAATAGAAAA
ACCTTAGTCCTTCATCTTCTAAGATCCAGGGAGTTCCTAGGCTCAAATTACAGTGAAACATTCTACTC
CATGAAAGGAGAAGCGTTCACCAGGCATCCTCAGATCATGGAACACTGTTACTATAAAGGAAACATCC
TAAATGAAAAGAATTCTGTTGCCAGCATCAGTACTTGTGACGGGTTGAGGGGATTCTTCAGAATAAAC
GACCAAAGATACCTCATTGAACCAGTGAAATACTCAGATGAGGGAGAACATTTGGTGTTCAAATATAA
CCTGAGGGTGCCGTATGGTGCCAATTATTCCTGTACAGAGCTTAATTTTACCAGAAAAACTGTTCCAG
GGGATAATGAATCTGAAGAAGACTCCAAAATAAAAGGCATCCATGATGAAAAGTATGTTGAATTGTTC
ATTGTTGCTGATGATACTGTGTATCGCAGAAATGGTCATCCTCACAATAAACTAAGGAACCGAATTTG
GGGAATGGTCAATTTTGTCAACATGATTTATAAAACCTTAAACATCCATGTGACGTTGGTTGGCATTG
AAATATGGACACATGAAGATAAAATAGAACTATATTCAAATATAGAAACTACCTTATTGCGTTTTTCA
TTTTGGCAAGAAAAGATCCTTAAAACACGGAAGGATTTTGATCATGTTGTATTACTCAGTGGGAAGTG
GCTCTACTCACATGTGCAAGGAATTTCTTATCCAGGGGGTATGTGCCTGCCCTATTATTCCACCAGTA
TCATTAAGGATCTTTTACCTGACACAAACATAATTGCAAACAGAATGGCACATCAACTGGGGCATAAC
CTTGGGATGCAGCATGACGAGTTCCCATGCACCTGTCCTTCAGGAAAATGCGTGATGGACAGTGATGG
AAGCATTCCTGCACTGAAATTCAGTAAATGCAGCCAAAACCAATACCACCAGTACTTGAAGGATTATA
AGCCAACATGCATGCTCAACATTCCATTTCCTTACAATTTTCATGATTTCCAATTTTGTGGAAACAAG
AAGTTGGATGAGGGTGAAGAGTGTGACTGTGGCCCTGCTCAGGAGTGTACTAATCCTTGCTGTGATGC
ACACACATGTGTACTGAAGCCAGGATTTACTTGTGCAGAAGGAGAATGCTGTGAATCTTGTCAGATAA
AAAAAGCAGGGTCCATATGCAGACCGGCGAAAGATGAATGTGATTTTCCTGAGATGTGCACTGGCCAC
TCGCCTGCCTGTCCTAAGGACCAGTTCAGGGTCAATGGATTTCCTTGCAAGAACTCAGAAGGCTACTG
TTTCATGGGGAAATGTCCAACTCGTGAGGATCAGTGCTCTGAACTATTTGATGATGAGGCAATAGAGA
GTCATGATATCTGCTACAAGATGAATACAAAAGGAAATAAATTTGGATACTGCAAAAACAAGGAAAAC
AGATTTCTTCCCTGTGAGGAGAAGGATGTCAGATGTGGAAAGATCTACTGCACTGGAGGGGAGCTTTC
CTCTCTCCTTGGAGAAGACAAGACTTATCACCTTAAGGATCCCCAGAAGAATGCTACTGTCAAATGCA
AAACTATTTTTTTATACCATGATTCTACAGACATTGGCCTGGTGGCGTCAGGAACAAAATGTGGAGAG
GGAATGGTATGCAACAATGGTGAATGTCTAAACATGGAAAAGGTCTATATCTCAACCAATTGCCCCTC
TCAGTGCAATGAAAATCCTGTAGATGGCCACGGACTCCAGTGCCACTGTGAGGAAGGACAGGCACCTG
TAGCCTGTGAAGAAACCTTACATGTTACCAGTATCACCATCTTGGTTGTTGTGCTTGTCCTGGTTATT
GTCGGTATCGGAGTTCTTATACTATTAGTTCGTTACCGAAAATGTATCAAGTTGAAGCAAGTTCAGAG
CCCACCTACAGAAACCCTGGGAGTGGAGAACAAAGGATACTTTGGTGATGAGCAGCAGATAAGGACTG
AGCCAATCCTGCCAGAAATTCATTTCCTAAATAAACCTGCAAGTAAAGATTCAAGAGGAATCGCAGAT
CCCAATCAAAGTGCCAAGTGGTAG

| | | | |
|---|---|---|---|
| NOV22h, SNP13376586 of | SEQ ID NO: 304 | 755 aa | MW at 85810.5kD |
| CG51983-05, Protein | SNP Pos: 42 | | SNP Change: Asp to Gly |
| Sequence | | | |

MLPGCIFLMILLIPQVKEKFILGVEGQQLVRPKKLPLIQKRGTGHTHDDDILKTYEEELLYEIKLNRK
TLVLHLLRSREFLGSNYSETFYSMKGEAFTRHPQIMEHCYYKGNILNEKNSVASISTCDGLRGFFRIN
DQRYLIEPVKYSDEGEHLVFKYNLRVPYGANYSCTELNFTRKTVPGDNESEEDSKIKGIHDEKYVELF
IVADDTVYRRNGHPHNKLRNRIWGMVNFVNMIYKTLNIHVTLVGIEIWTHEDKIELYSNIETTLLRFS
FWQEKILKTRKDFDHVVLLSGKWLYSHVQGISYPGGMCLPYYSTSIIKDLLPDTNIIANRMAHQLGHN
LGMQHDEFPCTCPSGKCVMDSDGSIPALKFSKCSQNQYHQYLKDYKPTCMLNIPFPYNFHDFQFCGNK
KLDEGEECDCGPAQECTNPCCDAHTCVLKPGFTCAEGECCESCQIKKAGSICRPAKDECDFPEMCTGH
SPACPKDQFRVNGFPCKNSEGYCFMGKCPTREDQCSELFDDEAIESHDICYKMNTKGNKFGYCKNKEN
RFLPCEEKDVRCGKIYCTGGELSSLLGEDKTYHLKDPQKNATVKCKTIFLYHDSTDIGLVASGTKCGE
GMVCNNGECLNNEKVYISTNCPSQCNENPVDGHGLQCHCEEGQAPVACEETLHVTSITILVVVLVLVI
VGIGVLILLVRYRKCIKLKQVQSPPTETLGVENKGYFGDEQQIRTEPILPEIHFLNKPASKDSRGIAD
PNQSAKW

[0470] A ClustalW comparison of the above protein sequences yields the following sequence alignment shown in Table 22B.

TABLE 22B
Comparison of the NOV22 protein sequences.

NOV22a MLPGCIFLMILLIPQVKEKFILGVEGQQLVRPKKLPLIQKRDTGHTHDDDILKTYEEELL
NOV22b MLPGCIFLMILLIPQVKEKFILGVEGOQLVRPKKLPLIQKRDTGHTHDDDIK-TYEEELL
NOV22c MLPGCIFLMILLIPQVKEKFILGVEGQQLVRPKKLPLIQKRDTGHTHDDDILKTYEEELL
NOV22d MLPGCIFLMILLIPOVKEKFILGVEGQQLVRPKKLPLIQKRDTGHTHDDDIK-TYEEELL
NOV22e MLPGCIFLMILLIPQVKEKFILGVEGQQLVRPKKLPLIQKRDTGHTHDDDILKTYEEELL
NOV22f MLPGCIFLMILLIPQVKEKFILGVEGQQLVRPKKLPLIQKRDTGHTHDDDILKTYEEELL
NOV22a YEIKLNRKTLVLHLLRSR-EFLGSNYSETFYSMKGEAFTRHPQIMEHCYYKGNILNEKNS
NOV22b YEIKLNRKTLVLHLLRSRREFLGSNYSETFYSMKGEAFTRHPQIMDHCFYQGSIVHEYDS
NOV22c YEIKLNRKTLVLHLLRSR-EFLGSNYSETFYSMKGGAFTRHPQIMDHCFYQGSIVHEYDS
NOV22d YEIKLNRKTLVLHLLRSRREFLGSNYSETFYSMKGEAFTRHPQIMDHCFYQGSIVHEYDS
NOV22e YEIKLNRKTLVLHLLRSR-EFLGSNYSETFYSMKGGAFTRHPQIMDHCFYQGSIVHEYDS
NOV22f YEIKLNRKTLVLHLLRSR-EFLGSNYSETFYSMKGEAFTRHPQIMDHCFYQGSIVHEYDS
NOV22a VASISTCDGLRGFFRINDQRYLIEPVKYSDEGEHLVFKYNLRVPYGANYSCTELNFTRKT
NOV22b AASISTCNGLRGFFRINDQRYLIEPVKYSDEGEHLVFYNLKRVPYGANYSCTELNFTRKT
NOV22c AASISTCNGLRGFFRINDQRYLIEPVKYSDEGEHLVFYNLKRVPYGANYSCTELNFTRKT
NOV22d AASISTCNGLRGFFRINDQRYLIEPVKYSDEGEHLVFYNLKRVPYGANYSCTELNFTRKT
NOV22e AASISTCNGLRGFFRINDQRYLIEPVKYSDEGEHLVFYNLKRVPYGANYSCTELNFTRKT
NOV22f AASISTCNGLRGFFRINDQRYLIEPVKYSDEGEHLVFYNLKRVPYGANYSCTELNFTRKT
NOV22a VPGDNESEEDSKIKG-IHDEKYVELFIVADDTVYRRNGHPHNKLRNRIWGMVNFVNMIYK
NOV22b VPGDNESEEDSKIKQGIHDEKYVELFIVADDTVYRRNGHPHNKLRNRIWGMVNFVNMIYK
NOV22c VPGDNESEEDSKIKG-IHDEKYVELFIVADDTVYRRNGHPHNKLRNRIWGMVNFVNMIYK
NOV22d VPGDNESEEDSKIKQGIHDEKYVELFIVADDTVYRRNGHPHNKLRNRIWGMVNFVNMIYK
NOV22e VPGDNESEEDSKIKG-IHDEKYVELFIVADDTVYRRNGHPHNKLRNRIWGMVNFVNMIYK
NOV22f VPGDNESEEDSKIKG-IHDEKYVELFIVADDTVYRRNGHPHNKLRNRIWGMVNFVNMIYK
NOV22a TLNIHVTLVGIEIWTHEDKIELYSNIETTLLRFSFWQEKILKTRKDFDHVVLLSGKWLYS
NOV22b TLNIHVTLVGIEIWTHEDKIELYSNIETTLLRFSFWQEKILKTRKDFDHVVLLSGKWLYS
NOV22c TLNIHVTLVGIEIWTHEDKIELYSNIETTLLRFSFWQEKILKTRKDFDHVVLLSGKWLYS
NOV22d TLNIHVTLVGIEIWTHEDKIELYSNIETTLLRFSFWQEKILKTRKDFDHVVLLSGKWLYS
NOV22e TLNIHVTLVGIEIWTHEDKIELYSNIETTLLRFSFWQEKILKTRKDFDHVVLLSGKWLYS
NOV22f TLNIHVTLVGIEIWTHEDKIELYSNIETTLLRFSFWQEKILKTRKDFDHVVLLSGKWLYS
NOV22a HVQGISYPGGMCLPYYSTSIIKDLLPDTNIIANRMAHQLGHNLGMQHDEFPCTCPSGKCV
NOV22b HVQGISYPGGMCLPYYSTSIIKDLLPDTNIIANRMAHQLGHNLGMQHDEFPCTCPSGKCV
NOV22c HVQGISYPGGMCLPYYSTSIIKDLLPDTNIIANRMAHQLGHNLGMQHDEFPCTCPSGKCV
NOV22d HVQGISYPGGMCLPYYSTSIIKDLLPDTNIEANRMAHQLGHNLGMQHDEFPCTCPSGKCV
NOV22e HVQGISYPGGMCLPYYSTSIIKDLLPDTNIIANRMAHQLGHNLGMQHDEFPCTCPSGKCV
NOV22f HVQGISYPGGMCLPYYSTSIIKDLLPDTNIIANRMAHQLGHNLGMQHDEFPCTCPSGKCV
NOV22a MDSDGSIPALKFSKCSQNQYHQYLKDYKPTCMLNIPFPYNFHDFQFCGNKKLDEGEECDC
NOV22b MDSDGSIPALKFSKCSQNQYHQYLKDYKPTCMLNIPFPYNFHDFQFCGNKKLDEGEECDC
NOV22c MDSDGSIPALKFSKCSQNQYHQYLKDYKPTCMLNIPFPYNFHDFQFCGNKKLDEGEECDC
NOV22d MDSDGSIPALKFSKCSQNQYHQYLKDYKPTCMLNIPFPYNFHDFQFCGNKKLDEGEECDC
NOV22e MDSDGSIPALKFSKCSQNQYHQYLKDYKPTCMLNIPFPYNFHDFQFCGNKKLDEGEECDC
NOV22f MDSDGSIPALKFSKCSQNQYHQYLKDYKPTCMLNIPFPYNFHDFQFCGNKKLDEGEECDC
NOV22a GPAQECTNPCCDAHTCVLKPGFTCAEGECCESCQIKKAGSICRPAKDECDFPEMCTGHSP
NOV22b GPAQECTNPCCDAHTCVLKPGFTCAEGECCESCQIKKAGSICRPAKDECDFPEMCTGHSP
NOV22c GPAQECTNPCCDAHTCVLKPGFTCAEGECCESCQIKKAGSICRPAKDECDFPEMCTGHSP
NOV22d GPAQECTNPCCDAHTCVLKPGFTCAEGECCESCQIKKAGSICRPAKDECDFPENCTGHSP
NOV22e GPAQECTNPCCDAHTCVLKPGFTCABGECCESCQIKKAGSICRPAKDECDFPEMCTGHSP
NOV22f GPAQECTNPCCDAHTCVLKPGFTCAEGECCESCQIKKAGSICRPAKDECDFPEMCTGHSP
NOV22a ACPKDQFRVNGFPCKNSEGYCFMGKCPTREDQCSELFDDEAIESHDICYKMNTKGNKFGY
NOV22b ACPKDQFRVNGFPCKNSEGYCFMGKCPTREDQCSELFDDEAIESHDICYKMNTKGNKFGY
NOV22c ACPKDQFRVNGFPCKNSEGYCFMGKCPTREDQCSELFDDDAIESHDICYKMNTKGNKFGY
NOV22d ACPKDQFRVNGFPCKNSEGYCFMGKCPTREDQCSELFDDEAIESHDICYKMNTKGNKFGY
NOV22e ACPKDQFRVNGFPCKNSEGYCFMGKCPTREDQCSELFDDDAIESHDICYKMNTKGNKFGY
NOV22f ACPKDQFRVNGFPCKNSEGYCFMGKCPTREDQCSELFDDEAIESHDICYKMNTKGNKFGY
NOV22a CKNKENRFLPCEEKDVRCGKIYCTGGELSSLLGEDKTYHLKDPQKNATVKCKTIFLYHDS
NOV22b CKNKENRFLPCEEKDVRCGKIYCTGGELSSLLGEDKTYHLKDPQKNATVKCKTIFLYHDS
NOV22c CKNKENRFLPCEEKDVRCGKIYCTGGELSSLLGEDKTYHLKDPQKNATVKCKTIFLYHDS
NOV22d CKNKENRFLPCEEKDVRCGKIYCTGGELSSLLGEDKTYHLKDPQKNATVKCKTIFLYHDS
NOV22e CKNKENRFLPCEEKDVRCGKIYCTGGELSSLLGEDKTYHLKDPQKNATVKCKTIFLYHDS
NOV22f CKNKENRFLPCEEKDVRCGKIYCTGGELSSLLGEDKTYHLKDPQKNATVKCKTIFLYHDS
NOV22a TDIGLVASGTKCGEGMVCNNGECLNMEKVYISTNCPSQGNENPVDGHGLQCHCEEGQAPV
NOV22b TDIGLVASGTKCGEGMVCNNGECLNMEKVYISTNCPSQCNENPVDGHGLQCHCEEGQAPV
NOV22c TDIGLVASGTKCGEGMVCNNGECLNMEKVYISTNCPSQcNENPVDGHGLQCHCEEGQAPV
NOV22d TDIGLVASGTKCGEGMVCNNGECLNMEKVYISTNCPSQCNENPVDGHGLQCHCEEGQAPV
NOV22e TDIGLVASGTKCGEGMVCNNGECLNMEKVYISTNCPSQCNENPVDGHGLQCHCEEGQAPV
NOV22f TDIGLVASGTKCGEGMVD---------------------------GHGLQCHCEEGQAPV
NOV22a ACEETLHVTSITILVVVLVLVIVGIGVLILLVRYRKCIKLKQVQSPPTETLGVENKGYFG
NOV22b ACEETLHVTSITILVVVLVLVIVGIGVLILLVRYRKCIKLKQVQSPPTETLGVENKGYFG
NOV22c ACEETLHVTNITILVVVLVLVIVGIGVLILLVRYRKCIKLKQVQSPPTETLGVENKGYFG
NOV22d ACEETLHVTSITILVVVLVLVIVGIGVLILLVRYRKCIKLKQVQSPPTETLGVENKGYFG
NOV22e ACEETLHVTNITILVVVLVLVIVGIGVLILLVRYRKCIKLKQVQSPPTETLGVENKGYFG
NOV22f ACEETLHVTNITILVVVLVLVIVGIGVLILLVRYRKCIKLKQVQSPPTETLGVENKGYFG
NOV22a DEQQIRTEPILPEIHFLN----------------------KPASKDSRGIADPNQSAKW
NOV22b DEQQIRTEPILPEIHFLNQRTPESLESLPTSFSSPHYITLKPASKDSRGIADPNQSAKW
NOV22c DEQQIRTEPILPEIHFLN----------------------KPASKDSRGIADPNQSAK-
NOV22d DEQQIRTEPILPEIHFLN----------------------KPASKDSRGIADPNQSAKW
NOV22e DEQQIRTEPILPEIHFLN----------------------KPASKDSRGIADPNQSAK-
NOV22f DEQQIRTEPILPEIHFLN-RTPESLESLPTSFSSPHYITLKPASKDSRGIADPNQSAK-
NOV22a (SEQ ID NO: 290)
NOV22b (SEQ ID NO: 292)
NOV22c (SEQ ID NO: 294)
NOV22d (SEQ ID NO: 296)
NOV22e (SEQ ID NO: 298)
NOV22f (SEQ ID NO: 300)

[0471] Further analysis of the NOV22a protein yielded the following properties shown in Table 22C.

TABLE 22C
Protein Sequence Properties NOV22a

SignalP analysis: Cleavage site between residues 19 and 20
PSORT II analysis:

| PSG: | a new signal peptide prediction method |
|---|---|
| | N-region: length 0; pos.chg 0; neg.chg 0 |
| | H-region: length 16; peak value 12.97 |
| | PSG score: 8.57 |
| GvH: | von Heijne's method for signal seq. recognition |
| | GvH score (threshold: −2.1): −5.58 |
| | possible cleavage site: between 18 and 19 |

>>> Seems to have no N-terminal signal peptide

| ALOM: | Klein et al's method for TM region allocation | |
|---|---|---|
| | Init position for calculation: 1 | |
| | Tentative number of TMS(s) for the threshold 0.5: 2 | |
| | INTEGRAL Likelihood = −2.18 | Transmembrane 1-17 |
| | INTEGRAL Likelihood = −18.52 | Transmembrane 671-687 |

| | PERIPHERAL Likelihood = 4.35 (at 235) |
|---|---|
| | ALOM score: —18.52 (number of TMSs: 2) |
| MTOP: | Prediction of membrane topology (Hartmann et al.) |
| | Center position for calculation: 8 |
| | Charge difference: 0.0 C( 1.0) - N( 1.0) |
| | N >= C: N-terminal side will be inside |

>>> membrane topology: type 3a
MITDISC: discrimination of mitochondrial targeting seq

| | | | |
|---|---|---|---|
| R content: | 0 | Hyd Moment(75): | 3.80 |
| Hyd Moment(95): | 1.48 | G content: | 1 |
| D/E content: | 1 | S/T content: | 0 |
| Score: −6.33 | | | |

Gavel: prediction of cleavage sites for mitochondrial preseq

cleavage site motif not found

NUCDISC: discrimination of nuclear localization signals

pat4: RPKK (4) at 31
pat7: none
bipartite: none
content of basic residues: 11.5%
NLS Score: −0.22

KDEL: ER retention motif in the C-terminus: none
ER Membrane Retention Signals:

KKXX-like motif in the C-terminus: QSAK
SKL: peroxisomal targeting signal in the C-terminus: none

PTS2: 2nd peroxisomal targeting signal: none
VAC: possible vacuolar targeting motif: none
RNA-binding motif: none
Actinin-type actin-binding motif:

type 1: none
type 2: none

NMYR: N-myristoylation pattern: none
Prenylation motif: none
memYQRL: transport motif from cell surface to Golgi: none
Tyrosines in the tail: none
Dileucine motif in the tail: none
checking 63 PROSITE DNA binding motifs: none
checking 71 PROSITE ribosomal protein motifs: none
checking 33 PROSITE prokaryotic DNA binding motifs:

Bacterial regulatory proteins, gntR family signature (PS00043):

*** found ***

EEELLYEIKLNRKTLVLHLLRS at 56

NNCN: Reinhardt's method for Cytoplasmic/Nuclear discrimination

Prediction: nuclear
Reliability: 55.5

COIL: Lupas's algorithm to detect coiled-coil regions

total: 0 residues

--------------------------
Final Results (k = 9/23)

```
34.8%: nuclear
30.4%: endoplasmic reticulum
21.7%: mitochondrial
  4.3%: vesicles of secretory system
  4.3%: cytoplasmic
  4.3%: peroxisomal
```

>> prediction for CG51983-05 is nuc (k = 23)

[0472] A search of the NOV22a protein against the Geneseq database, a proprietary database that contains sequences published in patents and patent publication, yielded several homologous proteins shown in Table 22D.

TABLE 22D
Geneseq Results for NOV22a

| | | NOV22a | Identities/ | |
|---|---|---|---|---|
| | | Residues/ | Similarities for | |
| Geneseq | Protein/Organism/Length | Match | the Matched | Expect |
| Identifier | [Patent #, Date] | Residues | Region | Value |
| AAB47567 | Protease PRTS-9 - Homo sapiens, | 1 . . . 754 | 749/776 (96%) | 0.0 |
| | 776 aa. [WO200171004-A2, 27- | 1 . . . 776 | 751/776 (96%) | |
| | SEP-2001] | | | |
| AAU77409 | Human NOV4b protein, | 1 . . . 755 | 754/780 (96%) | 0.0 |
| | homologue of ADAM proteins - | 1 . . . 779 | 754/780 (96%) | |
| | Homo sapiens, 779 aa. | | | |
| | [WO200206329-A2, 24-JAN- | | | |
| | 2002] | | | |
| AAU77408 | Human NOV4a protein, | 1 . . . 755 | 744/779 (95%) | 0.0 |
| | homologue of ADAM proteins - | 1 . . . 778 | 752/779 (96%) | |
| | Homo sapiens, 778 aa. | | | |
| | [WO200206329-A2, 24-JAN- | | | |
| | 2002] | | | |
| AAU16950 | Human novel secreted protein, | 1 . . . 677 | 664/677 (98%) | 0.0 |
| | SEQ ID 191 - Homo sapiens, 695 | 17 . . . 693 | 675/677 (99%) | |
| | aa. [WO200155441-A2, 02-AUG- | | | |
| | 2001] | | | |
| AAB64744 | Gene 16 human secreted protein | 336 . . . 710 | 353/375 (94%) | 0.0 |
| | homologous amino acid sequence | 1 . . . 375 | 364/375 (96%) | |
| | #138 - Macaca fascicularis, 375 | | | |
| | aa. [WO200077237-A1, 21-DEC- | | | |
| | 2000] | | | |

[0473] In a BLAST search of public sequence databases, the NOV22a protein was found to have homology to the proteins shown in the BLASTP data in Table 22E.

TABLE 22E
Public BLASTP Results for NOV22a

| | | NOV22a | Identities/ | |
|---|---|---|---|---|
| Protein | | Residues/ | Similarities for | |
| Accession | | Match | the Matched | Expect |
| Number | Protein/Organism/Length | Residues | Portion | Value |
| Q9H2U9 | ADAM 7 precursor (A disintegrin | 1 . . . 754 | 741/754 (98%) | 0.0 |
| | and metalloproteinase domain 7) | 1 . . . 754 | 751/754 (99%) | |
| | (Sperm maturation-related | | | |
| | glycoprotein GP-83) - Homo | | | |
| | sapiens (Human), 754 aa. | | | |
| Q28475 | ADAM 7 precursor (A disintegrin | 1 . . . 754 | 695/776 (89%) | 0.0 |
| | and metalloproteinase domain 7) | 1 . . . 776 | 726/776 (92%) | |
| | (Epididymal apical protein I) (EAP | | | |
| | I) - Macaca fascicularis (Crab | | | |
| | eating macaque) (Cynomolgus | | | |
| | monkey), 776 aa. | | | |
| AAH43207 | Hypothetical protein - Homo | 212 . . . 736 | 524/525 (99%) | 0.0 |
| | sapiens (Human), 561 aa | 29 . . . 553 | 525/525 (99%) | |
| | (fragment). | | | |
| O35227 | ADAM 7 precursor (A disintegrin | 1 . . . 752 | 507/773 (65%) | 0.0 |
| | and metalloproteinase domain 7) - | 1 . . . 771 | 620/773 (79%) | |
| | Mus musculus (Mouse), 788 aa. | | | |
| Q63180 | ADAM 7 precursor (A disintegrin | 1 . . . 752 | 505/773 (65%) | 0.0 |
| | and metalloproteinase domain 7) | 1 . . . 772 | 614/773 (79%) | |
| | (Epididymal apical protein I) (EAP | | | |
| | I) - Rattus norvegicus (Rat), 789 | | | |
| | aa. | | | |

[0474] Pam analysis indicates that the NOV22a protein contains the domains shown in the Table 22F.

TABLE 22F
Domain Analysis of NOV22a

| | NOV22a | Identities/ | |
|---|---|---|---|
| | Match | Similarities for | |
| Pfam Domain | Region | the Matched Region | Expect Value |
| Pep_M12B_propep | 73 . . . 188 | 38/119 (32%) | 6.7e−45 |
| | | 100/119 (84%) | |
| Reprolysin | 199 . . . 394 | 88/203 (43%) | 5.5e−104 |
| | | 173/203 (85%) | |
| disintegrin | 411 . . . 486 | 41/76 (54%) | 1.6e−25 |
| | | 53/76 (70%) | |

### Example 23

[0475] The NOV23 clone was analyzed, and the nucleotide and encoded polypeptide sequences are shown in Table 23A.

TABLE 23A
NOV23 Sequence Analysis

| | | |
|---|---|---|
| NOV23a, CG53390-02 | SEQ ID NO: 305 | 994 bp |
| DNA Sequence | ORF Start: ATG at 27 | ORF Stop: TGA at 969 |

TGCAGCTAAAGTGCATTGTGTAAAACATGGGGGATGTGAATCAGTCGGTGGCCTCAGACTTCATTCTG
GTGGGCCTCTTCAGTCACTCAGGATCACGCCAGCTCCTCTTCTCCCTGGTGGCTGTCATGTTTGTCAT
AGGCCTTCTGGGCAACACCGTTCTTCTCTTCTTGATCCGTGTGGACTCCCGGCTCCATACACCCATGT
ACTTCCTGCTCAGCCAGCTCTCCCTGTTTGACATTGGCTGTCCCATGGTCACCATCCCCAAGATGGCA
TCAGACTTTCTGCGGGGAGAAGGTGCCACCTCCTATGGAGGTGGTGCAGCTCAAATATTCTTCCTCAC
ACTGATGGGTGTGGCTGAGGGCGTCCTGTTGGTCCTCATGTCTTATGACCGTTATGTTGCTGTGTGCC
AGCCCCTGCAGTATCCTGTACTTATGAGACGCCAGGTATGTCTGCTGATGATGGGCTCCTCCTGGGTG
GTAGGTGTGCTCAACGCCTCCATCCAGACCTCCATCACCCTGCATTTTCCCTACTGTGCCTCCCGTAT
TGTGGATCACTTCTTCTGTGAGGTGCCAGCCCTACTGAAGCTCTCCTGTGCAGATACCTGTGCCTACG
AGATGGCGCTGTCCACCTCAGGGGTGCTGATCCTAATGCTCCCTCTTTCCCTCATCGCCACCTCCTAC
GGCCACGTGTTGCAGGCTGTTCTAAGCATGCGCTCAGAGGAGGCCAGACACAAGGCTGTCACCACCTG
CTCCTCGCACATCACGGTAGTGGGGCTCTTTTATGGTGCCGCCGTGTTCATGTACATGGTGCCTTGCG
CCTACCACAGTCCACAGCAGGATAACGTGGTTTCCCTCTTCTATAGCCTTGTCACCCCTACACTCAAC
CCCCTTATCTACAGTCTGAGGAATCCGGAGGTGTGGATGGCTTTGGTCAAAGTGCTTAGCAGAGCTGG
ACTCAGGCAAATGTGCTGACTACATAGAAACTGCTGGTGAGA

| | | | |
|---|---|---|---|
| NOV23a, CG53390-02 | SEQ ID NO: 306 | 314 aa | MW at 34443.4kD |
| Protein Sequence | | | |

MGDVNQSVASDFILVGLFSHSGSRQLLFSLVAVMFVIGLLGNTVLLFLIRVDSRLHTPMYFLLSQLSL
FDIGCPMVTIPKMASDFLRGEGATSYGGGAAQIFFLTLMGVAEGVLLVLMSYDRYVAVCQPLQYPVLM
RRQVCLLMMGSSWVVGVLNASIQTSITLHFPYCASRIVDHFFCEVPALLKLSCADTCAYEMALSTSGV
LILMLPLSLIATSYGHVLQAVLSMRSEEARHKAVTTCSSHITVVGLFYGAAVFMYMVPCAYHSPQQDN
VVSLFYSLVTPTLNPLIYSLRNPEVWMALVKVLSRAGLRQMC

| | | |
|---|---|---|
| NOV23b, CG53390-01 | SEQ ID NO: 307 | 994 bp |
| DNA Sequence | ORF Start: ATG at 27 | ORF Stop: TGA at 969 |

TGCAGCTAAAGTGCATTGTGTAAAACATGGGGGATGTGAATCAGTCGGTGGCCTCAGACTTCATTCTG
GTGGGCCTCTTCAGTCACTCAGGATCACGCCAGCTCCTCTTCTCCCTGGTGGCTGTCATGTTTGTCAT
AGGCCTTCTGGGCAACACCGTTCTTCTCTTCTTGATCCGTGTGGACTCCCGGCTCCATACACCCATGT
ACTTCCTGCTCAGCCAGCTCTCCCTGTTTGACATTGGCTGTCCCATGGTCACCATCCCCAAGATGGCA
TCAGACTTTCTGCGGGGAGAAGGTGCCACCTCCTATGGAGGTGGTGCAGCTCAAATATTCTTCCTCAC
ACTGATGGGTGTGGCTGAGGGCGTCCTGTTGGTCCTCATGTCTTATGACCGTTATGTTGCTGTGTGCC
AGCCCCTGCAGTATCCTGTACTTATGAGACGCCAGGTATGTCTGCTGATGATGGGCTCCTCCTGGGTG
GTAGGTGTGCTCAACGCCTCCATCCAGACCTCCATCACCCTGCATTTTCCCTACTGTGCCTCCCGTAT
TGTGGATCACTTCTTCTGTGAGGTGCCAGCCCTACTGAAGCTCTCCTGTGCAGATACCTGTGCCTACG
AGATGGCGCTGTCCACCTCAGGGGTGCTGATCCTAATGCTCCCTCTTTCCCTCATCGCCACCTCCTAC
GGCCACGTGTTGCAGGCTGTTCTAAGCATGCGCTCAGAGGAGGCCAGACACAAGGCTGTCACCACCTG
CTCCTCGCACATCACGGTAGTGGGGCTCTTTTATGGTGCCGCCGTGTTCATGTACATGGTGCCTTGCG
CCTACCACAGTCCACAGCAGGATAACGTGGTTTCCCTCTTCTATAGCCTTGTCACCCCTACACTCAAC
CCCCTTATCTACAGTCTGAGGAATCCGGAGGTGTGGATGGCTTTGGTCAAAGTGCTTAGCAGAGCTGG
ACTCAGGCAAATGTGCTGACTACATAGAAACTGCTGGTGAGA

| | | | |
|---|---|---|---|
| NOV23b, CG53390-01 | SEQ ID NO: 308 | 314 aa | MW at 34443.4kD |
| Protein Sequence | | | |

MGDVNQSVASDFILVGLFSHSGSRQLLFSLVAVMFVIGLLGNTVLLFLIRVDSRLHTPMYFLLSQLSL
FDIGCPMVTIPKMASDFLRGEGATSYGGGAAQIFFLTLMGVAEGVLLVLMSYDRYVAVCQPLQYPVLM
RRQVCLLMMGSSWVVGVLNASIQTSITLHFPYCASRIVDHFFCEVPALLKLSCADTCAYEMALSTSGV
LILMLPLSLIATSYGHVLQAVLSMRSEEARHKAVTTCSSHITVVGLFYGAAVFMYMVPCAYHSPQQDN
VVSLFYSLVTPTLNPLIYSLRNPEVWMALVKVLSPAGLRQMC

| | | |
|---|---|---|
| NOV23c, CG53390-03 | SEQ ID NO: 309 | 977 bp |
| DNA Sequence | ORF Start: ATG at 16 | ORF Stop: TGA at 958 |

TGCATTGTGTAAAACATGGGGGATGTGAATCAGTCGGTGGCCTCAGACTTCATTCTGGTGGGCCTCTT
CAGTCACTCAGGATCACGCCAGCTCCTCTTCTCCCTGGTGGCTGTCATGTTTGTCATAGGCCTTCTGG
GCAACACCGTTCTTCTCTTCTTGATCCGTGTGGACTCCCGGCTCCATACACCCATGTACTTCCTGCTC
AGCCAGCTCTCCCTGTTTGACATTGGCTGTCCCATGGTCACCATCCCCAAGATGGCATCAGACTTTCT
GCGGGGAGAAGGTGCCACCTCCTATGGAGGTGGTGCAGCTCAAATATTCTTCCTCACACTGATGGGTG
TGGCTGAGGGCGTCCTGTTGGTCCTCATGTCTTATGACCGTTATGTTGCTGTGTGCCAGCCCCTGCAG
TATCCTGTACTTATGAGACGCCAGGTATGTCTGCTGATGATGGGCTCCTCCTGGGTGGTAGGTGTGCT
CAACGCCTCCATCCAGACCTCCATCACCCTGCATTTTCCCTACTGTGCCTCCCGTATTGTGGATCACT
TCTTCTGTGAGGTGCCAGCCCTACTGAAGCTCTCCTGTGCAGATACCTGTGCCTACGAGATGGCGCTG
TCCACCTCAGGGGTGCTGATCCTAATGCTCCCTCTTTCCGTCATCGCCACCTCCTACGGCCACGTGTT
GCAGGCTGTTCTAAGCATGCGCTCAGAGGAGGCCAGACACAAGGCTGTCACCACCTGCTCCTCGCACA
TCACGGTAGTGGGGCTCTTTTATGGTGCCGCCGTGTTCATGTACATGGTGCCTTGCGCCTACCACAGT
CCACAGCAGGATAACGTGGTTTCCCTCTTCTATAGCCTTGTCACCCCTACACTCAACCCCCTTATCTA
CAGTCTGAGGAATCCGGAGGTGTGGATGGCTTTGGTCAAAGTGCTTAGCAGAGCTGGACTCAGGCAAA
TGTGCTGACTACATAGAAACTGCTG

| | | | |
|---|---|---|---|
| NOV23c, CG53390-03 | SEQ ID NO: 310 | 314 aa | MW at 34443.4kD |
| Protein Sequence | | | |

MGDVNQSVASDFILVGLFSHSGSRQLLFSLVAVMFVIGLLGNTVLLFLIRVDSRLHTPMYFLLSQLSL
FDIGCPMVTIPKMASDFLRGEGATSYGGGAAQIFFLTLMGVAEGVLLVLMSYDRYVAVCQPLQYPVLM
RRQVCLLMMGSSWVVGVLNASIQTSITLHFPYCASRIVDHFFCEVPALLKLSCADTCAYEMALSTSGV
LILMLPLSLIATSYGHVLQAVLSMRSEEARHKAVTTCSSHITVVGLFYGAAVFMYMVPCAYHSPQQDN
VVSLFYSLVTPTLNPLIYSLRNPEVWMALVKVLSRAGLRQMC

[0476] A ClustalW comparison of the above protein sequences yields the following sequence alignment shown in Table 23B.

TABLE 23B
Comparison of the NOV23 protein sequences.

NOV23a MGDVNQSVASDFILVGLFSHSGSRQLLFSLVAVMFVIGLLGNTVLLFLIRVDSRLHTPMY
NOV23b MGDVNQSVASDFILVGLFSHSGSRQLLFSLVAVMFVIGLLGNTVLLFLIRVDSRLHTPMY
NOV23c MGDVNQSVASDFILVGLFSHSGSRQLLFSLVAVMFVIGLLGNTVLLFLIRVDSRLHTPMY
NOV23a FLLSQLSLFDIGCPMVTIPKMASDFLRGEGATSYGGGAAQIFFLTLMGVAEGVLLVLMSY
NOV23b FLLSQLSLFDIGCPMVTIPKMASDFLRGEGATSYGGGAAQIFFLTLMGVAEGVLLVLMSY
NOV23c FLLSQLSLFDIGCPMVTIPKMASDFLRGEGATSYGGGAAQIFFLTLMGVAEGVLLVLMSY
NOV23a DRYVAVCQPLQYPVLMRRQVCLLMMGSSWVVGVLNASIQTSITLHFPYCASRIVDHFFCE
NOV23b DRYVAVCQPLQYPVLMRRQVCLLMMGSSWVVGVLNASIQTSITLHFPYCASRIVDHFFCE
NOV23c DRYVAVCQPLQYPVLNRRQVCLLMMGSSWVVGVLNASIQTSITLHFPYCASRIVDHFFCE
NOV23a VPALLKLSCADTCAYEMALSTSGVLILMLPLSLIATSYGHVLQAVLSMRSEEARHKAVTT
NOV23b VPALLKLSCADTCAYEMALSTSGVLILMLPLSLIATSYGHVLQAVLSMRSEEARHKAVTT
NOV23c VPALLKLSCADTCAYEMALSTSGVLILMLPLSLIATSYGHVLQAVLSMRSEEARHKAVTT
NOV23a CSSHITVVGLFYGAAVFMYMVPCAYHSPQQDNVVSLFYSLVTPTLNPLIYSLRNPEVWMA
NOV23b CSSHITVVGLFYGAAVFMYMVPCAYHSPQQDNVVSLFYSLVTPTLNPLIYSLRNPEVWMA
NOV23c CSSHITVVGLFYGAAVFMYMVPCAYHSPQQDNVVSLFYSLVTPTLNPLIYSLRNPEVWMA
NOV23a LVKVLSRAGLRQMC
NOV23b LVKVLSRAGLRQMC
NOV23c LVKVLSRAGLRQMC
NOV23a (SEQ ID NO: 306)
NOV23b (SEQ ID NO: 308)
NOV23c (SEQ ID NO: 310)

[0477] Further analysis of the NOV23a protein yielded the following properties shown in Table 23C.

TABLE 23C
Protein Sequence Properties NOV23a

| | |
|---|---|
| SignalP analysis: | Cleavage site between residues 42 and 43 |
| PSORT II analysis: | |

| | |
|---|---|
| PSG: | a new signal peptide prediction method |
| | N-region: length 11; pos.chg 0; neg.chg 2 |
| | H-region: length 12; peak value 0.00 |
| | PSG score: −4.40 |
| GvH: | von Heijne's method for signal seq. recognition |
| | GvH score (threshold: −2.1): −1.30 |
| | possible cleavage site: between 41 and 42 |

>>> Seems to have no N-terminal signal peptide

| ALOM: | Klein et al's method for TM region allocation | | |
|---|---|---|---|
| | Init position for calculation: 1 | | |
| | Tentative number of TMS(s) for the threshold 0.5: 5 | | |
| | INTEGRAL | Likelihood = −8.60 | Transmembrane 33-49 |
| | INTEGRAL | Likelihood = −7.17 | Transmembrane 101-117 |
| | INTEGRAL | Likelihood = −1.38 | Transmembrane 140-156 |
| | INTEGRAL | Likelihood = −4.09 | Transmembrane 198-214 |
| | INTEGRAL | Likelihood = −3.77 | Transmembrane 245-261 |

| | |
|---|---|
| PERIPHERAL | Likelihood = 1.38 (at 62) |

| | |
|---|---|
| | ALOM score: −8.60 (number of TMSs: 5) |
| MTOP: | Prediction of membrane topology (Hartmann et al.) |
| | Center position for calculation: 40 |
| | Charge difference: 1.0 C(1.5) − N(0.5) |
| | C > N: C-terminal side will be inside |

>>> membrane topology: type 3b
MITDISC: discrimination of mitochondrial targeting seq

| | | | |
|---|---|---|---|
| R content: | 0 | Hyd Moment(75): | 0.74 |
| Hyd Moment(95): | 7.13 | G content: | 1 |
| D/E content: | 2 | S/T content: | 2 |

Score: −7.54

Gavel: prediction of cleavage sites for mitochondrial preseq

cleavage site motif not found

NUCDISC: discrimination of nuclear localization signals

pat4: none
pat7: none
bipartite: none
content of basic residues: 5.4%
NLS Score: −0.47

KDEL: ER retention motif in the C-terminus: none
ER Membrane Retention Signals: none
SKL: peroxisomal targeting signal in the C-terminus: none
PTS2: 2nd peroxisomal targeting signal: none
VAC: possible vacuolar targeting motif: none
RNA-binding motif: none
Actinin-type actin-binding motif:

type 1: none
type 2: none

NMYR: N-myristoylation pattern: none
Prenylation motif: none
memYQRL: transport motif from cell surface to Golgi: none
Tyrosines in the tail: none
Dileucine motif in the tail: none
checking 63 PROSITE DNA binding motifs: none
checking 71 PROSITE ribosomal protein motifs: none
checking 33 PROSITE prokaryotic DNA binding motifs: none

| | |
|---|---|
| NNCN: | Reinhardt's method for Cytoplasmic/Nuclear discrimination |
| | Prediction: cytoplasmic |
| | Reliability: 94.1 |
| COIL: | Lupas's algorithm to detect coiled-coil regions |
| | total: 0 residues |

Final Results (k = 9/23):

55.6%: endoplasmic reticulum
11.1%: Golgi
11.1%: vacuolar
11.1%: vesicles of secretory system
11.1%: mitochondrial

>> prediction for CG53390-02 is end (k = 9)

[0478] A search of the NOV23a protein against the Geneseq database, a proprietary database that contains sequences published in patents and patent publication, yielded several homologous proteins shown in Table 23D.

TABLE 23D
Geneseq Results for NOV23a

| | | NOV23a | Identities/ | |
|---|---|---|---|---|
| | | Residues/ | Similarities for | |
| Geneseq | Protein/Organism/Length | Match | the Matched | Expect |
| Identifier | [Patent #, Date] | Residues | Region | Value |
| AAU85207 | G-coupled olfactory receptor #68 - | 1 . . . 314 | 314/314 (100%) | e−179 |
| | Homo sapiens, 314 aa. | 1 . . . 314 | 314/314 (100%) | |
| | [WO200198526-A2, 27-DEC- | | | |
| | 2001] | | | |
| AAU95551 | Human olfactory and pheromone | 1 . . . 314 | 314/314 (100%) | e−179 |
| | G protein-coupled receptor #38 - | 1 . . . 314 | 314/314 (100%) | |
| | Homo sapiens, 314 aa. | | | |
| | [WO200224726-A2, 28-MAR- | | | |
| | 2002] | | | |
| ABJ04025 | Human G-protein coupled | 1 . . . 314 | 314/314 (100%) | e−179 |
| | receptor SEQ ID NO: 116 - | 1 . . . 314 | 314/314 (100%) | |
| | Homo sapiens, 314 aa. | | | |
| | [WO200255558-A2, 18-JUL- | | | |
| | 2002] | | | |
| ABP95895 | Human GPCR polypeptide SEQ | 1 . . . 314 | 314/314 (100%) | e−179 |
| | ID NO 600 - Homo sapiens, 314 | 1 . . . 314 | 314/314 (100%) | |
| | aa. [WO200216548-A2, 28-FEB- | | | |
| | 2002] | | | |
| AAG71902 | Human olfactory receptor | 1 . . . 314 | 314/314 (100%) | e−179 |
| | polypeptide, SEQ ID NO: 1583 - | 1 . . . 314 | 314/314 (100%) | |
| | Homo sapiens, 314 aa. | | | |
| | [WO200127158-A2, 19-APR- | | | |
| | 2001] | | | |

[0479] In a BLAST search of public sequence databases, the NOV23a protein was found to have homology to the proteins shown in the BLASTP data in Table 23E.

TABLE 23E
Public BLASTP Results for NOV23a

| | | NOV23a | Identities/ | |
|---|---|---|---|---|
| Protein | | Residues/ | Similarities for | |
| Accession | | Match | the Matched | Expect |
| Number | Protein/Organism/Length | Residues | Portion | Value |
| Q8NG97 | Seven transmembrane helix | 1 . . . 314 | 314/314 (100%) | e−179 |
| | receptor - Homo sapiens | 1 . . . 314 | 314/314 (100%) | |
| | (Human), 314 aa. | | | |
| Q8VFG8 | Olfactory receptor MOR282-1 - | 1 . . . 301 | 225/301 (74%) | e−126 |
| | Mus musculus (Mouse), 308 aa. | 1 . . . 301 | 255/301 (83%) | |
| Q96R25 | Olfactory receptor - Homo | 68 . . . 284 | 217/217 (100%) | e−122 |
| | sapiens (Human), 217 aa | 1 . . . 217 | 217/217 (100%) | |
| | (fragment). | | | |
| Q8VGD8 | Olfactory receptor MOR281-1 - | 5 . . . 312 | 173/308 (56%) | 2e−97 |
| | Mus musculus (Mouse), 315 aa. | 7 . . . 313 | 229/308 (74%) | |
| Q8VGD7 | Olfactory receptor MOR277-1 - | 5 . . . 307 | 170/304 (55%) | 3e−91 |
| | Mus musculus (Mouse), 317 aa. | 6 . . . 308 | 218/304 (70%) | |

[0480] PFam analysis indicates that the NOV23a protein contains the domains shown in the Table 23F.

TABLE 23F
Domain Analysis of NOV23a

| | | Identities/ | |
|---|---|---|---|
| | NOV23a Match | Similarities for | |
| Pfam Domain | Region | the Matched Region | Expect Value |
| 7tm_1 | 41 . . . 290 | 46/276 (17%) | 5.5e−25 |
| | | 167/276 (61%) | |

### Example 24

[0481] The NOV24 clone was analyzed, and the nucleotide and encoded polypeptide sequences are shown in Table 24A.

TABLE 24A
NOV24 Sequence Analysis

| | | |
|---|---|---|
| NOV24a, CG53482-01 | SEQ ID NO: 311 | 1008 bp |
| DNA Sequence | ORF Start: ATG at 27 | ORF Stop: TAG at 999 |

AGCTGGAGATCTGGAACTTCCACAGCATGGAGCTCTGGAACTACCACAGCATGGAGCTCTGGAACTTC
ACCTTGGGAAGTGGCTTCATTTTGGTGGGGATTCTGAATGACAGTGGGTCTCCTGAACTGCTCTGTGC
TACAATTACAATCCTATACTTGTTGGCCCTGATCAGCAATGGCCTACTGCTCCTGGCTATCACCATGG
AAGCCCGGCTCCACATGCCCATGTACCTCCTGCTTGGGCAGCTCTCTCTCATGGACCTCCTGTTCACA
TCTGTTGTCACTCCCAAGGCCCTTGCGGACTTTCTGCGCAGAGAAAACACCATCTCCTTTGGAGGCTG
TGCCCTTCAGATGTTCCTGGCACTGACAATGGGTGGTGCTGAGGACCTCCTACTGGCCTTCATGGCCT
ATGACAGGTATGTGGCCATTTGTCATCCTCTGACATACATGACCCTCATGAGCTCAAGAGCCTGCTGG
CTCATGGTGGCCACGTCCTGGATCCTGGCATCCCTAAGTGCCCTAATATATACCGTGTATACCATGCA
CTATCCCTTCTGCAGGGCCCAGGAGATCAGGCATCTTCTCTGTGAGATCCCACACTTGCTGAAGTTGG
CCTGTGCTGATACCTCCAGATATGAGCTCATGGTATATGTGATGGGTGTGACCTTCCTGATTCCCTCT
CTTGCTGCTATACTGGCCTCCTATACACAAATTCTACTCACTGTGCTCCATATGCCATCAAATGAGGG
GAGGAAGAAAGCCCTTGTCACCTGCTCTTCCCACCTGACTGTGGTTGGGATGTTCTATGGAGCTGCCA
CATTCATGTATGTCTTGCCCAGTTCCTTCCACAGCACCAGACAAGACAACATCATCTCTGTTTTCTAC
ACAATTGTCACTCCAGCCCTGAATCCACTCATCTACAGCCTGAGGAATAAGGAGGTCATGCGGGCCTT
GAGGAGGGTCCTGGGAAAATACATGCTGCCAGCACACTCCACGCTCTAGGGAAGGA

| | | | |
|---|---|---|---|
| NOV24a, CG53482-01 | SEQ ID NO: 312 | 324 aa | MW at 36344.8kD |
| Protein Sequence | | | |

MELWNYHSMELWNFTLGSGFILVGILNDSGSPELLCATITILYLLALISNGLLLLAITMEARLHMPMY
LLLGQLSLMDLLFTSVVTPKALADFLRRENTISFGGCALQMFLALTMGGAEDLLLAFMAYDRYVAICH
PLTYMTLMSSRACWLMVATSWILASLSALIYTVYTMHYPFCRAQEIRHLLCEIPHLLKLACADTSRYE
LMVYVMGVTFLIPSLAAILASYTQILLTVLHMPSNEGRKKALVTCSSHLTVVGMFYGAATFMYVLPSS
FHSTRQDNIISVFYTIVTPALNPLIYSLRNKEVMRALRRVLGKYMLPAHSTL

| | | |
|---|---|---|
| NOV24b, CG53482-02 | SEQ ID NO: 313 | 1050 bp |
| DNA Sequence | ORF Start: ATG at 72 | ORF Stop: TAG at 1020 |

AAACTAGAGTTCATCTTAGCAPAAATTCATGAAGTATCCATCTTGTTCTAGGTGATGAAAGAAACCAC
AGCATGGAGCTCTGGAACTTCACCTTGGGAAGTGGCTTCATTTTGGTGGGGATTCTGAATGACAGTGG
GTCTCCTGAACTGCTCTGTGCTACAATTACAATCCTATACTTGTTGGCCCTGATCAGCAATGGCCTAC
TGCTCCTGGCTATCACCATGGAAGCCCGGCTCCACATGCCCATGTACCTCCTGCTTGGGCAGCTCTCT
CTCATGGACCTCCTGTTCACATCTGTTGTCACTCCCAAGGCCCTTGCGGACTTTCTGCGCAGAGAAAA
CACCATCTCCTTTGGAGGCTGTGCCCTTCAGATGTTCCTGGCACTGACAATGGGTGGTGCTGAGGACC
TCCTACTGGCCTTCATGGCCTATGACAGGTATGTGGCCATTTGTCATCCTCTGACATACATGACCCTC
ATGAGCTCAAGAGCCTGCTGGCTCATGGTGGCCACGTCCTGGATCCTGGCATCCCTAAGTGCCCTAAT
ATATACCGTGTATACCATGCACTATCCCTTCTGCAGGGCCCAGGAGATCAGGCATCTTCTCTGTGAGA
TCCCACACTTGCTGAAGGTGGCCTGTGCTGATACCTCCAGATATGAGCTCATGGTATATGTGATGGGT
GTGACCTTCCTGATTCCCTCTCTTGCTGCTATACTGGCCTCCTATACACAAATTCTACTCACTGTGCT
CCATATGCCATCAAATGAGGGGAGGAAGAAAGCCCTTGTCACCTGCTCTTCCCACCTGACTGTGGTTG
GGATGTTCTATGGAGCTGCCACATTCATGTATGTCTTGCCCAGTTCCTTCCACAGCACCAGACAAGAC
AACATCATCTCTGTTTTCTACACAATTGTCACTCCAGCCCTGAATCCACTCATCTACAGCCTGAGGAA
TAAGGAGGTCATGCGGGCCTTGAGGAGGGTCCTGGGAAAATACATGCTGCCAGCACACTCCACGCTCT
AGGGAAGGATCATGGCTAGCTTCCAGAATT

| | | | |
|---|---|---|---|
| NOV24b, CG53482-02 | SEQ ID NO: 314 | 316 aa | MW at 35269.6kD |
| Protein Sequence | | | |

MELWNFTLGSGFILVGILNDSGSPELLCATITILYLLALISNGLLLLAITMEARLHMPMYLLLGQLSL
MDLLFTSVVTPKALADFLRRENTISFGGCALQMFLALTMGGAEDLLLAFMAYDRYVAICHPLTYMTLM
SSRACWLMVATSWILASLSALIYTVYTNHYPFCRAQEIRHLLCEIPHLLKVACADTSRYELMVYVMGV
TFLIPSLAAILASYTQILLTVLHMPSNEGRKKALVTCSSHLTVVGMFYGAATFMYVLPSSFHSTRQDN
IISVFYTIVTPALNPLIYSLRNKEVMRALRRVLGKYMLPAHSTL

| | | |
|---|---|---|
| NOV24c, CG53482-03 | SEQ ID NO: 315 | 1010 bp |
| DNA Sequence | ORF Start: at 4 | ORF Stop: TAG at 1000 |

TAGCTGGAGATCTGGAACTTCCACAGCATGGAGCTCTGGAACTACCACAGCATGGAGCTCTGGAACTT
CACCTTGGGAAGTGGCTTCATTTTGGTGGGGATTCTGAATGACAGTGGGTCTCCTGAACTGCTCTGTG
CTACAATTACAATCCTATACTTGTTGGCCCTGATCAGCAATGGCCTACTGCTCCTGGCTATCACCATG
GAAGCCCGGCTCCACATGCCCATGTACCTCCTGCTTGGGCAGCTCTCTCTCATGGACCTCCTGTTCAC
ATCTGTTGTCACTCCCAAGGCCCTTGCGGACTTTCTGCGCAGAGAAAACACCATCTCCTTTGGAGGCT
GTGCCCTTCAGATGTTCCTGGCACTGACAATGGGTGGTGCTGAGGACCTCCTACTGGCCTTCATGGCC
TATGACAGGTATGTGGCCATTTGTCATCCTCTGACATACATGACCCTCATGAGCTCAAGAGCCTGCTG
GCTCATGGTGGCCACGTCCTGGATCCTGGCATCCCTAAGTGCCCTAATATATACCGTGTATACCATGC
ACTATCCCTTCTGCAGGGCCCAGGAGATCAGGCATCTTCTCTGTGAGATCCCACACTTGCTGAAGTTG
GCCTGTGCTGATACCTCCAGATATGAGCTCATGGTATATGTGATGGGTGTGACCTTCCTGATTCCCTC
TCTTGCTGCTATACTGGCCTCCTATACACAAATTCTACTCACTGTGCTCCATATGCCATCAAATGAGG
GGAGGAAGAAAGCCCTTGTCACCTGCTCTTCCCACCTGACTGTGGTTGGGATGTTCTATGGAGCTGCC
ACATTCATGTATGTCTTGCCCAGTTCCTTCCACAGCACCAGACAAGACAACATCATCTCTGTTTTCTA
CACAATTGTCACTCCAGCCCTGAATCCACTCATCTACAGCCTGAGGAATAAGGAGGTCATGCGGGCCT
TGAGGAGGGTCCTGGGAAAATACATGCTGCCAGCACACTCCACGCTCTAGGGAAGGAA

| | | | |
|---|---|---|---|
| NOV24c, CG53482-03 | SEQ ID NO: 316 | 332 aa | MW at 37371.9kD |
| Protein Sequence | | | |

LEIWNFHSMELNNYHSMELWNFTLGSGFILVGILNDSGSPELLCATITILYLLALISNGLLLLAITME
ARLHMPMYLLLGQLSLMDLLFTSVVTPKALADFLRRENTISFGGCALQMFLALTMGGABDLLLAFMAY
DRYVAICHPLTYMTLMSSRACWLMVATSWILASLSALIYTVYTMHYPFCRAQEIRHLLCEIPHLLKLA
CADTSRYELMVYVMGVTFLIPSLAAILASYTQILLTVLHMPSNEGRKKALVTCSSHLTVVGMFYGAAT
FMYVLPSSFHSTRQDNIISVFYTIVTPALNPLIYSLRNKEVMRALRRVLGKYMLPAHSTL

| | | |
|---|---|---|
| NOV24d, SNP13373787 of | SEQ ID NO: 317 | 1008 bp |
| CG53482-01, DNA Sequence | ORF Start: ATG at 27 | ORF Stop: TAG at 999 |
| | SNP Pos: 430 | SNP Change: G to A |

AGCTGGAGATCTGGAACTTCCACAGCATGGAGCTCTGGAACTACCACAGCATGGAGCTCTGGAACTTC
ACCTTGGGAAGTGGCTTCATTTTGGTGGGGATTCTGAATGACAGTGGGTCTCCTGAACTGCTCTGTGC
TACAATTACAATCCTATACTTGTTGGCCCTGATCAGCAATGGCCTACTGCTCCTGGCTATCACCATGG
AAGCCCGGCTCCACATGCCCATGTACCTCCTGCTTGGGCAGCTCTCTCTCATGGACCTCCTGTTCACA
TCTGTTGTCACTCCCAAGGCCCTTGCGGACTTTCTGCGCAGAGAAAACACCATCTCCTTTGGAGGCTG
TGCCCTTCAGATGTTCCTGGCACTGACAATGGGTGGTGCTGAGGACCTCCTACTGGCCTTCATGGCCT
ATGACAGGTATGTGGCCATTTATCATCCTCTGACATACATGACCCTCATGAGCTCAAGAGCCTGCTGG
CTCATGGTGGCCACGTCCTGGATCCTGGCATCCCTAAGTGCCCTAATATATACCGTGTATACCATGCA
CTATCCCTTCTGCAGGGCCCAGGAGATCAGGCATCTTCTCTGTGAGATCCCACACTTGCTGAAGTTGG
CCTGTGCTGATACCTCCAGATATGAGCTCATGGTATATGTGATGGGTGTGACCTTCCTGATTCCCTCT
CTTGCTGCTATACTGGCCTCCTATACACAAATTCTACTCACTGTGCTCCATATGCCATCAAATGAGGG
GAGGAAGAAAGCCCTTGTCACCTGCTCTTCCCACCTGACTGTGGTTGGGATGTTCTATGGAGCTGCCA
CATTCATGTATGTCTTGCCCAGTTCCTTCCACAGCACCAGACAAGACAACATCATCTCTGTTTTCTAC
ACAATTGTCACTCCAGCCCTGAATCCACTCATCTACAGCCTGAGGAATAAGGAGGTCATGCGGGCCTT
GAGGAGGGTCCTGGGAAAATACATGCTGCCAGCACACTCCACGCTCTAGGGAAGGA

| | | | |
|---|---|---|---|
| NOV24d, SNP13373787 of | SEQ ID NO: 318 | 324 aa | MW at 36404.8kD |
| CG53482-01, Protein | SNP Pos: 135 | | SNP Change: Cys to Tyr |
| Sequence | | | |

MELWNYHSMELWNFTLGSGFILVGILNDSGSPELLCATITILYLLALISNGLLLLAITMEARLHMPMY
LLLGQLSLMDLLFTSVVTPKALADFLRRENTISFGGCALQMFLALTMGGAEDLLLAFMAYDRYVAIYH
PLTYMTLMSSRACWLMVATSWILASLSALIYTVYTMHYPFCRAQEIRHLLCEIPHLLKLACADTSRYE
LMVYVMGVTFLIPSLAAILASYTQILLTVLHMPSNEGRKKALVTCSSHLTVVGMFYGAATFMYVLPSS
FHSTRQDNIISVFYTIVTPALNPLIYSLRNKEVMRALRRVLGKYMLPAHSTL

| | | |
|---|---|---|
| NOV24e, SNP13373786 of | SEQ ID NO: 319 | 1008 bp |
| CG53482-01, DNA Sequence | ORF Start: ATG at 27 | ORF Stop: TAG at 999 |
| | SNP Pos: 442 | SNP Change: C to A |

AGCTGGAGATCTGGAACTTCCACAGCATGGAGCTCTGGAACTACCACAGCATGGAGCTCTGGAACTTC
ACCTTGGGAAGTGGCTTCATTTTGGTGGGGATTCTGAATGACAGTGGGTCTCCTGAACTGCTCTGTGC
TACAATTACAATCCTATACTTGTTGGCCCTGATCAGCAATGGCCTACTGCTCCTGGCTATCACCATGG
AAGCCCGGCTCCACATGCCCATGTACCTCCTGCTTGGGCAGCTCTCTCTCATGGACCTCCTGTTCACA
TCTGTTGTCACTCCCAAGGCCCTTGCGGACTTTCTGCGCAGAGAAAACACCATCTCCTTTGGAGGCTG
TGCCCTTCAGATGTTCCTGGCACTGACAATGGGTGGTGCTGAGGACCTCCTACTGGCCTTCATGGCCT
ATGACAGGTATGTGGCCATTTGTCATCCTCTGAAATACATGACCCTCATGAGCTCAAGAGCCTGCTGG
CTCATGGTGGCCACGTCCTGGATCCTGGCATCCCTAAGTGCCCTAATATATACCGTGTATACCATGCA
CTATCCCTTCTGCAGGGCCCAGGAGATCAGGCATCTTCTCTGTGAGATCCCACACTTGCTGAAGTTGG
CCTGTGCTGATACCTCCAGATATGAGCTCATGGTATATGTGATGGGTGTGACCTTCCTGATTCCCTCT
CTTGCTGCTATACTGGCCTCCTATACACAAATTCTACTCACTGTGCTCCATATGCCATCAAATGAGGG
GAGGAAGAAAGCCCTTGTCACCTGCTCTTCCCACCTGACTGTGGTTGGGATGTTCTATGGAGCTGCCA
CATTCATGTATGTCTTGCCCAGTTCCTTCCACAGCACCAGACAAGACAACATCATCTCTGTTTTCTAC
ACAATTGTCACTCCAGCCCTGAATCCACTCATCTACAGCCTGAGGAATAAGGAGGTCATGCGGGCCTT
GAGGAGGGTCCTGGGAAATACATGCTGCCAGCACACTCCACGCTCTAGGGAAGGA

| | | | |
|---|---|---|---|
| NOV24e, SNP13373786 of | SEQ ID NO: 320 | 324 aa | MW at 36371.9kD |
| CG53482-01, Protein | SNP Pos: 139 | | SNP Change: Thr to Lys |
| Sequence | | | |

MELWNYHSMELWNFTLGSGFILVGILNDSGSPELLCATITILYLLALISNGLLLLAITMEARLHMPMY
LLLGQLSLMDLLFTSVVTPKALADFLRRENTISFGGCALQMFLALTMGGAEDLLLAFMAYDRYVAICH
PLKYMTLMSSRACWLMVATSWILASLSALIYTVYTMHYPFCRAQEIRHLLCEIPHLLKLACADTSRYE
LMVYVMGVTFLIPSLAAILASYTQILLTVLHMPSNEGRKKALVTCSSHLTVVGMFYGAATFMYVLPSS
FHSTRQDNIISVFYTIVTPALNPLIYSLRNKEVMRALRRVLGKYMLPAHSTL

| | | |
|---|---|---|
| NOV24f, SNP13373785 of | SEQ ID NO: 321 | 1008 bp |
| CG53482-01, DNA Sequence | ORF Start: ATG at 27 | ORF Stop: TAG at 999 |
| | SNP Pos: 754 | SNP Change: A to G |

AGCTGGAGATCTGGAACTTCCACAGCATGGAGCTCTGGAACTACCACAGCATGGAGCTCTGGAACTTC
ACCTTGGGAAGTGGCTTCATTTTGGTGGGGATTCTGAATGACAGTGGGTCTCCTGAACTGCTCTGTGC
TACAATTACAATCCTATACTTGTTGGCCCTGATCAGCAATGGCCTACTGCTCCTGGCTATCACCATGG
AAGCCCGGCTCCACATGCCCATGTACCTCCTGCTTGGGCAGCTCTCTCTCATGGACCTCCTGTTCACA
TCTGTTGTCACTCCCAAGGCCCTTGCGGACTTTCTGCGCAGAGAAAACACCATCTCCTTTGGAGGCTG
TGCCCTTCAGATGTTCCTGGCACTGACAATGGGTGGTGCTGAGGACCTCCTACTGGCCTTCATGGCCT
ATGACAGGTATGTGGCCATTTGTCATCCTCTGACATACATGACCCTCATGAGCTCAAGAGCCTGCTGG
CTCATGGTGGCCACGTCCTGGATCCTGGCATCCCTAAGTGCCCTAATATATACCGTGTATACCATGCA
CTATCCCTTCTGCAGGGCCCAGGAGATCAGGCATCTTCTCTGTGAGATCCCACACTTGCTGAAGTTGG
CCTGTGCTGATACCTCCAGATATGAGCTCATGGTATATGTGATGGGTGTGACCTTCCTGATTCCCTCT
CTTGCTGCTATACTGGCCTCCTATACACAAATTCTACTCACTGTGCTCCATATGCCATCAAATGAGGG
GAGGAGGAAAGCCCTTGTCACCTGCTCTTCCCACCTGACTGTGGTTGGGATGTTCTATGGAGCTGCCA
CATTCATGTATGTCTTGCCCAGTTCCTTCCACAGCACCAGACAAGACAACATCATCTCTGTTTTCTAC
ACAATTGTCACTCCAGCCCTGAATCCACTCATCTACAGCCTGAGGAATAAGGAGGTCATGCGGGCCTT
GAGGAGGGTCCTGGGAAATACATGCTGCCAGCACACTCCACGCTCTAGGGAAAGGA

| | | | |
|---|---|---|---|
| NOV24f, SNP13373785 of | SEQ ID NO: 322 | 324 aa | MW at 36372.8kD |
| CG53482-01, Protein | SNP Pos: 243 | | SNP Change: Lys to Arg |
| Sequence | | | |

MELWNYHSMELWNFTLGSGFILVGILNDSGSPELLCATITILYLLALISNGLLLLAITMEARLHMPMY
LLLGQLSLMDLLFTSVVTPKALADFLRRENTISFGGCALQMFLALTMGGAEDLLLAFMAYDRYVAICH
PLKYMTLMSSRACWLMVATSWILASLSALIYTVYTMHYPFCRAQEIRHLLCEIPHLLKLACADTSRYE
LMVYVMGVTFLIPSLAAILASYTQILLTVLHMPSNEGRRKALVTCSSHLTVVGMFYGAATFMYVLPSS
FHSTRQDNIISVFYTIVTPALNPLIYSLRNKEVMRALRRVLGKYMLPAHSTL

[0482] A ClustalW comparison of the above protein sequences yields the following sequence alignment shown in Table 24B.

TABLE 24B
Comparison of the NOV24 protein sequences.

NOV24a --------MELWNYHSMELWNFTLGSGFILVGILNDSGSPELLCATITILYLLALISNGL
NOV24b ----------------MELWNFTLGSGFILVGILNDSGSPELLCATITILYLLALISNGL
NOV24c LEIWNFHSMELWNYHSMELWNFTLGSGFILVGILNDSGSPELLCATITILYLLALISNGL
NOV24a LLLAITMEARLHMPMYLLLGQLSLMDLLFTSVVTPKALADFLRRENTISFGGCALQMFLA
NOV24b LLLAITMEARLHMPMYLLLGQLSLMDLLFTSVVTPKALADFLRRENTISFGGCALQMFLA
NOV24c LLLAITMEARLHMPMYLLLGQLSLMDLLFTSVVTPKALADFLRRENTISFGGCALQMFLA
NOV24a LTMGGAEDLLLAFMAYDRYVAICHPLTYMTLMSSRACWLMVATSWILASLSALIYTVYTM
NOV24b LTMGGAEDLLLAFMAYDRYVAICHPLTYMTLMSSRACWLMVATSWILASLSALIYTVYTM
NOV24c LTMGGAEDLLLAFMAYDRYVAICHPLTYMTLMSSRACWLMVATSWILASLSALIYTVYTM
NOV24a HYPFCRAQEIRHLLCEIPHLLKLACADTSRYELMVYVMGVTFLIPSLAAILASYTQILLT
NOV24b HYPFCRAQEIRHLLCEIPHLLKVACADTSRYELMVYVMGVTFLIPSLAAILASYTQILLT
NOV24c HYPFCRAQEIRHLLCEIPHLLKLACADTSRYELMVTVMGVTFLIPSLAAILASYTQILLT
NOV24a VLHMPSNEGRKKALVTCSSHLTVVGMFYGAATFMYVLPSSFHSTRQDNIISVFYTIVTPA
NOV24b VLHMPSNEGRKKALVTCSSHLTVVGMFYGAATFMYVLPSSFHSTRQDNIISVFYTIVTPA
NOV24c VLHMPSNEGRKKALVTCSSHLTVVGMFYGAATFMYVLPSSFHSTRQDNIISVFYTIVTPA
NOV24a LNPLIYSLRNKEVMRALRRVLGKYMLPAHSTL
NOV24b LNPLIYSLRNKEVMRALRRVLGKYMLPAHSTL
NOV24c LNPLIYSLRNKEVMRALRRVLGKYMLPAHSTL
NOV24a (SEQ ID NO: 312)
NOV24b (SEQ ID NO: 314)
NOV24c (SEQ ID NO: 316)

[0483] Further analysis of the NOV24a protein yielded the following properties shown in Table 24C.

TABLE 24C
Protein Sequence Properties NOV24a

| | |
|---|---|
| SignalP analysis: | Cleavage site between residues 62 and 63 |
| PSORT II analysis: | |

| | |
|---|---|
| PSG: | a new signal peptide prediction method |
| | N-region: length 10; pos.chg 0; neg.chg 2 |
| | H-region: length 17; peak value 0.00 |
| | PSG score: −4.40 |
| GvH: | von Heijne's method for signal seq. recognition |
| | GvH score (threshold: −2.1): −3.29 |
| | possible cleavage site: between 56 and 57 |

>>> Seems to have no N-terminal signal peptide

| ALOM: | Klein et al's method for TM region allocation | | |
|---|---|---|---|
| | Init position for calculation: 1 | | |
| | Tentative number of TMS(s) for the threshold 0.5: 6 | | |
| | INTEGRAL | Likelihood = −7.75 | Transmembrane 41-57 |
| | INTEGRAL | Likelihood = −1.65 | Transmembrane 69-85 |
| | INTEGRAL | Likelihood = −2.07 | Transmembrane 150-166 |
| | INTEGRAL | Likelihood = −5.10 | Transmembrane 207-223 |
| | INTEGRAL | Likelihood = −0.80 | Transmembrane 253-269 |
| | INTEGRAL | Likelihood = −0.80 | Transmembrane 281-297 |

| | |
|---|---|
| PERIPHERAL | Likelihood = 0.85 (at 109) |

| | |
|---|---|
| | ALOM score: −7.75 (number of TMSs: 6) |
| MTOP: | Prediction of membrane topology (Hartmann et al.) |
| | Center position for calculation: 48 |
| | Charge difference: 2.5 C(0.5) − N(−2.0) |
| | C > N: C-terminal side will be inside |

>>> membrane topology: type 3b
MITDISC: discrimination of mitochondrial targeting seq

| | | | |
|---|---|---|---|
| R content: | 0 | Hyd Moment(75): | 4.76 |
| Hyd Moment(95): | 6.14 | G content: | 0 |
| D/E content: | 2 | S/T content: | 1 |

Score: −6.93

Gavel: prediction of cleavage sites for mitochondrial preseq

cleavage site motif not found

NUCDISC: discrimination of nuclear localization signals

pat4: none
pat7: none
bipartite: none
content of basic residues: 6.2%
NLS Score: −0.47

KDEL: ER retention motif in the C-terminus: none
ER Membrane Retention Signals: none
SKL: peroxisomal targeting signal in the C-terminus: none
PTS2: 2nd peroxisomal targeting signal: none
VAC: possible vacuolar targeting motif: none
RNA-binding motif: none
Actinin-type actin-binding motif:

type 1: none
type 2: none

NMYR: N-myristoylation pattern: none
Prenylation motif: none
memYQRL: transport motif from cell surface to Golgi: none
Tyrosines in the tail: none
Dileucine motif in the tail: none
checking 63 PROSITE DNA binding motifs: none
checking 71 PROSITE ribosomal protein motifs: none
checking 33 PROSITE prokaryotic DNA binding motifs: none

| | |
|---|---|
| NNCN: | Reinhardt's method for Cytoplasmic/Nuclear discrimination |
| | Prediction: cytoplasmic |
| | Reliability: 94.1 |
| COIL: | Lupas's algorithm to detect coiled-coil regions |
| | total: 0 residues |

Final Results (k = 9/23):

44.4%: endoplasmic reticulum
22.2%: vacuolar
11.1%: Golgi
11.1%: vesicles of secretory system
11.1%: mitochondrial

>> prediction for CG53482-01 is end (k = 9)

[0484] A search of the NOV24a protein against the Geneseq database, a proprietary database that contains sequences published in patents and patent publication, yielded several homologous proteins shown in Table 24D.

TABLE 24D
Geneseq Results for NOV24a

| | | NOV24a | Identities/ | |
|---|---|---|---|---|
| | | Residues/ | Similarities for | |
| Geneseq | Protein/Organism/Length | Match | the Matched | Expect |
| Identifier | [Patent #, Date] | Residues | Region | Value |
| AAU97928 | Novel odourant receptor NOV7 | 1 . . . 324 | 324/324 (100%) | 0.0 |
| | protein - Unidentified, 324 aa. | 1 . . . 324 | 324/324 (100%) | |
| | [WO200236632-A2, 10-MAY- | | | |
| | 2002] | | | |
| AAU97927 | Novel odourant receptor NOV6 | 1 . . . 324 | 324/324 (100%) | 0.0 |
| | protein - Unidentified, 324 aa. | 1 . . . 324 | 324/324 (100%) | |
| | [WO200236632-A2, 10-MAY- | | | |
| | 2002] | | | |
| AAU07088 | Human odorant receptor (OR) | 1 . . . 324 | 324/324 (100%) | 0.0 |
| | polypeptide #5 - Homo sapiens, | 1 . . . 324 | 324/324 (100%) | |
| | 324 aa. [WO200157215-A2, 09- | | | |
| | AUG-2001] | | | |
| AAU85234 | G-coupled olfactory receptor #95 - | 9 . . . 324 | 315/316 (99%) | e−180 |
| | Homo sapiens, 316 aa. | 1 . . . 316 | 316/316 (99%) | |
| | [WO200198526-A2, 27-DEC- | | | |
| | 2001] | | | |
| AAU95574 | Human olfactory and pheromone | 9 . . . 324 | 315/316 (99%) | e−180 |
| | G protein-coupled receptor #61 - | 1 . . . 316 | 316/316 (99%) | |
| | Homo sapiens, 316 aa. | | | |
| | [WO200224726-A2, 28-MAR- | | | |
| | 2002] | | | |

[0485] In a BLAST search of public sequence databases, the NOV24a protein was found to have homology to the proteins shown in the BLASTP data in Table 24E.

TABLE 24E
Public BLASTP Results for NOV24a

| | | NOV24a | Identities/ | |
|---|---|---|---|---|
| Protein | | Residues/ | Similarities for | |
| Accession | | Match | the Matched | Expect |
| Number | Protein/Organism/Length | Residues | Portion | Value |
| CAD57894 | Sequence 11 from Patent | 1 . . . 324 | 324/324 (100%) | 0.0 |
| | WO0236632 - Homo sapiens | 1 . . . 324 | 324/324 (100%) | |
| | (Human), 324 aa. | | | |
| Q9H205 | Olfactory receptor 2AG1 | 9 . . . 324 | 315/316 (99%) | e−179 |
| | (HT3) - Homo sapiens | 1 . . . 316 | 316/316 (99%) | |
| | (Human), 316 aa. | | | |
| Q8VGU0 | Olfactory receptor MOR283-2 - | 9 . . . 324 | 264/316 (83%) | e−149 |
| | Mus musculus (Mouse), 316 | 1 . . . 316 | 284/316 (89%) | |
| | aa. | | | |
| Q9EPF7 | T2 olfactory receptor - Mus | 9 . . . 324 | 262/316 (82%) | e−149 |
| | musculus (Mouse), 316 aa. | 1 . . . 316 | 284/316 (88%) | |
| Q8VFM5 | Olfactory receptor MOR283-4 - | 9 . . . 323 | 253/315 (80%) | e−145 |
| | Mus musculus (Mouse), 316 | 1 . . . 315 | 280/315 (88%) | |
| | aa. | | | |

[0486] PFam analysis indicates that the NOV24a protein contains the domains shown in the Table 24F.

TABLE 24F
Domain Analysis of NOV24a

| | | Identities/ | |
|---|---|---|---|
| | NOV24a Match | Similarities for | |
| Pfam Domain | Region | the Matched Region | Expect Value |
| 7tm_1 | 49 . . . 298 | 62/277 (22%) | 1.3e−33 |
| | | 173/277 (62%) | |

### Example 25

[0487] The NOV25 clone was analyzed, and the nucleotide and encoded polypeptide sequences are shown in Table 25A.

TABLE 25A
NOV25 Sequence Analysis

| | | |
|---|---|---|
| NOV25a, CG53530-03 | SEQ ID NO: 323 | 1016 bp |
| DNA Sequence | ORF Start: ATG at 7 | ORF Stop: TAG at 961 |

TACCAGATGAATCCAGCAAATCATTCCCAGGTGGCAGGATTTGTTCTACTGGGGCTCTCTCAGGTTTG
GGAGCTTCGGTTTGTTTTCTTCACTGTTTTCTCTGCTGTGTATTTTATGACTGTAGTGGGAAACCTTC
TTATTGTGGTCATAGTGACCTCCGACCCACACCTGCACACAACCATGTATTTTCTCTTGGGCAATCTT
TCTTTCCTGGACTTTTGCTACTCTTCCATCACAGCACCTAGGATGCTGGTTGACTTGCTCTCAGGCAA
CCCTACCATTTCCTTTGGTGGATGCCTGACTCAACTCTTCTTCTTCCACTTCATTGGAGGCATCAAGA
TCTTCCTGCTGACTGTCATGGCGTATGACCGCTACATTGCCATTTCCCAGCCCCTGCACTACACGCTC
ATTATGAATCAGACTGTCTGTGCACTCCTTATGGCAGCCTCCTGGGTGGGGGGCTTCATCCACTCCAT
AGTACAGATTGCATTGACTATCCAGCTGCCATTCTGTGGGCCTGACAAGCTGGACAACTTTTATTGTG
ATGTGCCTCAGCTGATCAAATTGGCCTGCACAGATACCTTTGTCTTAGAGCTTTTAATGGTGTCTAAC
AATGGCCTGGTGACCCTGATGTGTTTTCTGGTGCTTCTGGGATCGTACACAGCACTGCTAGTCATGCT
CCGAAGCCACTCACGGGAGGGCCGCAGCAAGGCCCTGTCTACCTGTGCCTCTCACATTGCTGTGGTGA
CCTTAATCTTTGTGCCTTGCATCTACGTCTATACAAGGCCTTTTCGGACATTCCCCATGGACAAGGCC
GTCTCTGTGCTATACACAATTGTCACCCCCATGCTGAATCCTGCCATCTATACCCTGAGAAACAAGGA
AGTGATCATGGCCATGAAGAAGCTGTGGAGGAGGAAAAAGGACCCTATTGGTCCCCTGGAGCACAGAC
CCTTACATTAGCAGAGGCAGTGACCTGAGAATCTGAAAGATGCTACAGGGTATTAGCAGAGGCA

| | | | |
|---|---|---|---|
| NOV25a, CG53530-03 | SEQ ID NO: 324 | 318 aa | MW at 35770.3kD |
| Protein Sequence | | | |

MNPANHSQVAGFVLLGLSQVWELRFVFFTVFSAVYFMTVVGNLLIVVIVTSDPHLHTTMYFLLGNLSF
LDFCYSSITAPRMLVDLLSGNPTISFGGCLTQLFFFHFIGGIKIFLLTVMAYDRYIAISQPLHYTLIM
NQTVCALLMAASWVGGFIHSIVQIALTIQLPFCGPDKLDNFYCDVPQLIKLACTDTFVLELLMVSNNG
LVTLMCFLVLLGSYTALLVMLRSHSREGRSKALSTCASHIAVVTLIFVPCIYVYTRPFRTFPMDKAVS
VLYTIVTPHLNPAIYTLRNKEVIMANKKLWRRKKDPIGPLEHRPLH

| | | |
|---|---|---|
| NOV25b, CG53530-01 | SEQ ID NO: 325 | 1077 bp |
| DNA Sequence | ORF Start: ATG at 31 | ORF Stop: TAG at 985 |

CAGGTTCATTGACAAGGTCATACCAACCAGATGAATCCAGCAAATCATTCCCAGGTGGCAGGATTTGT
TCTACTGGGGCTCTCTCAGGTTTGGGAGCTTCGGTTTGTTTTCTTCACTGTTTTCTCTGCTGTGTATT
TTATGACTGTAGTGGGAAACCTTCTTATTGTGGTCATAGTGACCTCCGACCCACACCTGCACACAACC
ATGTATTTTCTCTTGGGCAATCTTTCTTTCCTGGACTTTTGCTACTCTTCCATCACAGCACCTAGGAT
GCTGGTTGACTTGCTCTCAGGCAACCCTACCATTTCCTTTGGTGGATGCCTGACTCAACTCTTCTTCT
TCCACTTCATTGGAGGCATCAAGATCTTCCTGCTGACTGTCATGGCGTATGACCGCTACATTGCCATT
TCCCAGCCCCTGCACTACACGCTCATTATGAATCAGACTGTCTGTGCACTCCTTATGGCAGCCTCCTG
GGTGGGGGGCTTCATCCACTCCATAGTACAGATTGCATTGACTATCCAGCTGCCATTCTGTGGGCCTG
ACAAGCTGGACAACTTTTATTGTGATGTGCCTCAGCTGATCAAATTGGCCTGCACAGATACCTTTGTC
TTAGAGCTTTTAATGGTGTCTAACAATGGCCTGGTGACCCTGATGTGTTTTCTGGTGCTTCTGGGATC
GTACACAGCACTGCTAGTCATGCTCCGAAGCCACTCACGGGAGGGCCGCAGCAAGGCCCTGTCTACCT
GTGCCTCTCACATTGCTGTGGTGACCTTAATCTTTGTGCCTTGCATCTACGTCTATACAAGGCCTTTT
CGGACATTCCCCATGGACAAGGCCGTCTCTGTGCTATACACAATTGTCACCCCCATGCTGAATCCTGC
CATCTATACCCTGAGAAACAAGGAAGTGATCATGGCCATGAAGAAGCTGTGGAGGAGGAAAAAGGACC
CTATTGGTCCCCTGGAGCACAGACCCTTACATTAGCAGAGGCAGTGACCTGAGAATCTGAAAGATGCT
ACAGGGTATTAGCAGAGGCAGTGACCTGAGAATCTGAAAGATGCTACAGGGTATTAG

| | | | |
|---|---|---|---|
| NOV25b, CG53530-01 | SEQ ID NO: 326 | 318 aa | MW at 35770.3kD |
| Protein Sequence | | | |

MNPANHSQVAGFVLLGLSQVWELRFVFFTVFSAVYFMTVVGNLLIVVIVTSDPHLHTTMYFLLGNLSF
LDFCYSSITAPRMLVDLLSGNPTISFGGCLTQLFFFHFIGGIKIFLLTVMAYDRYIAISQPLHYTLIM
NQTVCALLMAASWVGGFIHSIVQIALTIQLPFCGPDKLDMFYCDVPQLIKLACTDTFVLELLMVSNNG
LVTLMCFLVLLGSYTALLVMLRSHSREGRSKALSTCASHIAVVTLIFVPCIYVYTRPFRTFPMDKAVS
VLYTIVTPMLNPAIYTLRNIEVIMAHKKLWRRKKDPIGPLEHRPLH

| | | |
|---|---|---|
| NOV25c,CG53530-02 | SEQ ID NO: 327 | 1077 bp |
| DNA Sequence | ORF Start: ATG at 31 | ORF Stop: TAG at 985 |

CAGGTTCATTGACAAGGTCATACCAACCAGATGAATCCAGCAAATCATTCCCAGGTGGCAGGATTTGT
TCTACTGGGGCTCTCTCAGGTTTGGGAGCTTCGGTTTGTTTTCTTCACTGTTTTCTCTGCTGTGTATT
TTATGACTGTAGTGGGAAACCTTCTTATTGTGGTCATAGTGACCTCCGACCCACACCTGCACACAACC
ATGTATTTTCTCTTGGGCAATCTTTCTTTCCTGGACTTTTGCTACTCTTCCATCACAGCACCTAGGAT
GCTGGTTGACTTGCTCTCAGGCAACCCTACCATTTCCTTTGGTGGATGCCTGACTCAACTCTTCTTCT
TCCACTTCATTGGAGGCATCAAGATCTTCCTGCTGACTGTCATGGCGTATGACCGCTACATTGCCATT
TCCCAGCCCCTGCACTACACGCTCATTATGAATCAGACTGTCTGTGCACTCCTTATGGCAGCCTCCTG
GGTGGGGGGCTTCATCCACTCCATAGTACAGATTGCATTGACTATCCAGCTGCCATTCTGTGGGCCTG
ACAAGCTGGACAACTTTTATTGTGATGTGCCTCAGCTGATCAAATTGGCCTGCACAGATACCTTTGTC
TTAGAGCTTTTAATGGTGTCTAACAATGGCCTGGTGACCCTGATGTGTTTTCTGGTGCTTCTGGGATC
GTACACAGCACTGCTAGTCATGCTCCGAAGCCACTCACGGGAGGGCCGCAGCAAGGCCCTGTCTACCT
GTGCCTCTCACATTGCTGTGGTGACCTTAATCTTTGTGCCTTGCATCTACGTCTATACAAGGCCTTTT
CGGACATTCCCCATGGACAAGGCCGTCTCTGTGCTATACACAATTGTCACCCCCATGCTGAATCCTGC
CATCTATACCCTGAGAAACAAGGAAGTGATCATGGCCATGAAGAAGCTGTGGAGGAGGAAAAAGGACC
CTATTGGTCCCCTGGAGCACAGACCCTTACATTAGCAGAGGCAGTGACCTGAGAATCTGAAAGATGCT
ACAGGGTATTAGCAGAGGCAGTGACCTGAGAATCTGAAAGATGCTACAGGGTATTAG

| | | | |
|---|---|---|---|
| NOV25c, CG53530-02 | SEQ ID NO: 328 | 318 aa | MW at 35770.3kD |
| Protein Sequence | | | |

MNPANHSQVAGFVLLGLSQVWELRFVFFTVFSAVYFMTVVGNLLIVVIVTSDPHLHTTMYFLLGNLSF
LDFCYSSITAPRNLVDLLSGNPTISFGGCLTQLFFFHFIGGIKIFLLTVMAYDRYIAISQPLHYTLIM
NQTVCALLMAASWVGGFIHSIVQIALTIQLPFCGPDKLDNFYCDVPQLIKLACTDTFVLELLMVSNNG
LVTLMCFLVLLGSYTALLVMLRSHSREGRSKALSTCASHIAVVTLIFVPCIYVYTRPFRTFPMDKAVS
VLYTIVTPMLNPAIYTLRNKEVIMAMKKLWRRKKDPIGPLEHRPLH

[0488] A ClustalW comparison of the above protein sequences yields the following sequence alignment shown in Table 25B.

TABLE 25B
Comparison of the NOV25 protein sequences.

NOV25a MNPANHSQVAGFVLLGLSQVWELRFVFFTVFSAVYFMTVVGNLLIVVIVTSDPHLHTTMY
NOV25b MNPANHSQVAGFVLLGLSQVWELRFVFFTVFSAVYFMTVVGNLLIVVIVTSDPHLHTTMY
NOV25c MNPANHSQVAGFVLLGLSQVWELRFVFFTVFSAVYFMTVVGNLLIVVIVTSDPHLHTTMY
NOV25a FLLGNLSFLDFCYSSITAPRMLVDLLSGNPTISFGGCLTQLFFFHFIGGIKIFLLTVMAY
NOV25b FLLGNLSFLDFCYSSITAPRMLVDLLSGNPTISFGGCLTQLFFFHFIGGIKIFLLTVMAY
NOV25c FLLGNLSFLDFCYSSITAPRMLVDLLSGNPTISFGGCLTQLFFFHFIGGIKIFLLTVMAY
NOV25a DRYIAISQPLHYTLIMNQTVCALLMAASWVGGFINSIVQIALTIQLPFCGPDKLDNFYCD
NOV25b DRYIAISQPLHYTLIMNQTVCALLMAASWVGGFINSIVQIALTIQLPFCGPDKLDNFYCD
NOV25c DRYIAISQPLHYTLIMNQTVCALLMAASWVGGFINSIVQIALTIQLPFCGPDKLDNFYCD
NOV25a VPQLIKLACTDTFVLELLMVSNNGLVTLMCFLVLLGSYTALLVMLRSHSREGRSKALSTC
NOV25b VPQLIKLACTDTFVLELLMVSNNGLVTLMCFLVLLGSYTALLVMLRSHSREGRSKALSTC
NOV25c VPQLIKLACTDTFVLELLMVSNNGLVTLMCFLVLLGSYTALLVMLRSHSREGRSKALSTC
NOV25a ASHIAVVTLIFVPCIYVYTRPFRTFPMDKAVSVLYTIVTPMLNPAIYTLRNKEVIMAMKK
NOV25b ASHIAVVTLIFVPCIYVYTRPFRTFPMDKAVSVLYTIVTPMLNPAIYTLRNKEVIMAMKK
NOV25c ASHIAVVTLIFVPCIYVYTRPFRTFPMDKAVSVLYTIVTPMLNPAIYTLRNKEVIMAMKK
NOV25a LWRRKKDPIGPLEHRPLH
NOV25b LWRRKKDPIGPLENRPLH
NOV25c LWRRKKDPIGPLEHRPLH
NOV25a (SEQ ID NO: 324)
NOV25b (SEQ ID NO: 326)
NOV25C (SEQ ID NO: 328)

[0489] Further analysis of the NOV25a protein yielded the following properties shown in Table 25C.

TABLE 25C
Protein Sequence Properties NOV25a

| | |
|---|---|
| SignalP analysis: | Cleavage site between residues 52 and 53 |
| PSORT II analysis: | |

| | |
|---|---|
| PSG: | a new signal peptide prediction method |
| | N-region: length 0; pos.chg 0; neg.chg 0 |
| | H-region: length 21; peak value 9.57 |
| | PSG score: 5.17 |
| GvH: | von Heijne's method for signal seq. recognition |
| | GvH score (threshold: −2.1): −5.51 |
| | possible cleavage site: between 32 and 33 |

>>> Seems to have no N-terminal signal peptide

| ALOM: | Klein et al's method for TM region allocation | | |
|---|---|---|---|
| | Init position for calculation: 1 | | |
| | Tentative number of TMS(s) for the threshold 0.5: 6 | | |
| | INTEGRAL | Likelihood = −8.23 | Transmembrane 33-49 |
| | INTEGRAL | Likelihood = −4.04 | Transmembrane 101-117 |
| | INTEGRAL | Likelihood = −0.90 | Transmembrane 142-158 |
| | INTEGRAL | Likelihood = −0.90 | Transmembrane 184-200 |
| | INTEGRAL | Likelihood = −6.37 | Transmembrane 208-224 |
| | INTEGRAL | Likelihood = −4.51 | Transmembrane 241-257 |

| | |
|---|---|
| PERIPHERAL | Likelihood = 0.79 (at 12) |

| | |
|---|---|
| | ALOM score: −8.23 (number of TMSs: 6) |
| MTOP: | Prediction of membrane topology (Hartmann et al.) |
| | Center position for calculation: 40 |
| | Charge difference: 0.0 C(0.0) − N(0.0) |
| | N >= C: N-terminal side will be inside |

>>> membrane topology: type 3a
MITDISC: discrimination of mitochondrial targeting seq

| | | | |
|---|---|---|---|
| R content: | 0 | Hyd Moment(75): | 1.55 |
| Hyd Moment(95): | 4.07 | G content: | 2 |
| D/E content: | 1 | S/T content: | 2 |

Score: −6.22

Gavel: prediction of cleavage sites for mitochondrial preseq

R-2 motif at 132 DRY|IA

NUCDISC: discrimination of nuclear localization signals

pat4: RRKK (5) at 303
pat7: none
bipartite: none
content of basic residues: 6.9%
NLS Score: −0.16

KDEL: ER retention motif in the C-terminus: none
ER Membrane Retention Signals: none
SKL: peroxisomal targeting signal in the C-terminus: none
PTS2: 2nd peroxisomal targeting signal: none
VAC: possible vacuolar targeting motif: none
RNA-binding motif: none
Actinin-type actin-binding motif:

type 1: none
type 2: none

NMYR: N-myristoylation pattern: none
Prenylation motif: none
memYQRL: transport motif from cell surface to Golgi: none
Tyrosines in the tail: none
Dileucine motif in the tail: none
checking 63 PROSITE DNA binding motifs: none
checking 71 PROSITE ribosomal protein motifs: none
checking 33 PROSITE prokaryotic DNA binding motifs: none

| | |
|---|---|
| NNCN: | Reinhardt's method for Cytoplasmic/Nuclear discrimination |
| | Prediction: cytoplasmic |
| | Reliability: 94.1 |
| COIL: | Lupas's algorithm to detect coiled-coil regions |
| | total: 0 residues |

Final Results (k = 9/23):

66.7%: endoplasmic reticulum
22.2%: mitochondrial
11.1%: nuclear

>> prediction for CG53530-03 is end (k = 9)

[0490] A search of the NOV25a protein against the Geneseq database, a proprietary database that contains sequences published in patents and patent publication, yielded several homologous proteins shown in Table 25D.

TABLE 25D
Geneseq Results for NOV25a

| | | NOV25a | Identities/ | |
|---|---|---|---|---|
| | | Residues/ | Similarities for | |
| Geneseq | Protein/Organism/Length | Match | the Matched | Expect |
| Identifier | [Patent #, Date] | Residues | Region | Value |
| AAU85175 | G-coupled olfactory receptor #36 - | 1 . . . 318 | 318/318 (100%) | 0.0 |
| | Homo sapiens, 318 aa. | 1 . . . 318 | 318/318 (100%) | |
| | [WO200198526-A2, 27-DEC-2001] | | | |
| AAU95525 | Human olfactory and pheromone | 1 . . . 318 | 318/318 (100%) | 0.0 |
| | G protein-coupled receptor #12 - | 1 . . . 318 | 318/318 (100%) | |
| | Homo sapiens, 318 aa. | | | |
| | [WO200224726-A2, 28-MAR-2002] | | | |
| AAU05140 | Human odorant receptor (OR)- | 1 . . . 318 | 318/318 (100%) | 0.0 |
| | like protein, NOV10 - Homo | 1 . . . 318 | 318/318 (100%) | |
| | sapiens, 318 aa. | | | |
| | [WO200151632-A2, 19-JUL-2001] | | | |
| AAU10320 | G-protein coupled receptor | 1 . . . 318 | 318/318 (100%) | 0.0 |
| | (GCREC) #21 - Homo sapiens, | 1 . . . 318 | 318/318 (100%) | |
| | 318 aa. [WO200166742-A2, 13-SEP-2001] | | | |
| AAG71624 | Human olfactory receptor | 1 . . . 315 | 314/315 (99%) | 0.0 |
| | polypeptide, SEQ ID NO: 1305 - | 1 . . . 315 | 314/315 (99%) | |
| | Homo sapiens, 315 aa. | | | |
| | [WO200127158-A2, 19-APR-2001] | | | |

[0491] In a BLAST search of public sequence databases, the NOV25a protein was found to have homology to the proteins shown in the BLASTP data in Table 25E.

TABLE 25E
Public BLASTP Results for NOV25a

| | | NOV25a | Identities/ | |
|---|---|---|---|---|
| Protein | | Residues/ | Similarities | |
| Accession | | Match | for the Matched | |
| Number | Protein/Organism/Length | Residues | Portion | Expect Value |
| Q8NGN0 | Seven transmembrane helix | 1 . . . 318 | 318/318 (100%) | 0.0 |
| | receptor - Homo sapiens | 1 . . . 318 | 318/318 (100%) | |
| | (Human), 318 aa. | | | |
| Q8VFN1 | Olfactory receptor MOR239-6 - | 1 . . . 314 | 284/314 (90%) | e−166 |
| | Mus musculus (Mouse), 314 aa. | 1 . . . 314 | 296/314 (93%) | |
| Q8VFU8 | Olfactory receptor MOR239-5 - | 1 . . . 317 | 200/317 (63%) | e−113 |
| | Mus musculus (Mouse), 314 aa. | 1 . . . 313 | 241/317 (75%) | |
| Q8NGE8 | Seven transmembrane helix | 1 . . . 304 | 190/304 (62%) | e−110 |
| | receptor - Homo sapiens | 1 . . . 304 | 236/304 (77%) | |
| | (Human), 314 aa. | | | |
| Q8VF58 | Olfactory receptor MOR240-1 - | 1 . . . 304 | 186/304 (61%) | e−110 |
| | Mus musculus (Mouse), 311 aa. | 1 . . . 304 | 237/304 (77%) | |

[0492] PFam analysis indicates that the NOV25a protein contains the domains shown in the Table 25F.

TABLE 25F
Domain Analysis of NOV25a

| | | Identities/ | |
|---|---|---|---|
| | NOV25a Match | Similarities for | |
| Pfam Domain | Region | the Matched Region | Expect Value |
| 7tm_1 | 41 . . . 287 | 57/276 (21%) | 3.3e−28 |
| | | 172/276 (62%) | |

### Example 26

[0493] The NOV26 clone was analyzed, and the nucleotide and encoded polypeptide sequences are shown in Table 26A.

TABLE 26A
NOV26 Sequence Analysis

| | | |
|---|---|---|
| NOV26a, CG53563-03 | SEQ ID NO: 329 | 1028 bp |
| DNA Sequence | ORF Start: ATG at 28 | ORF Stop: TAG at 961 |

AGGGAGAGAGACCAAGGGTGAGAAGAAATGTCCAACGCCAGCCTACTGACAGCGTTCATCCTCATGGG
CCTTCCCCATGCCCCAGCGCTGGACGCCCCCCTCTTTGGAGTCTTCCTGGTGGTTTACGTGCTCACTG
TGCTGGGGAACCTCCTCATCCTGCTGGTGATCAGGGTGGATTCTCACCTCCACACCACCATGTACTAC
TTCCTCACCAACCTGTCGTTCATTGACATGTGGTTCTCCACTGTCACGGTGCCCAAATTGCTGATGAC
TTTGGTGTTCCCAAGTGGCAGGGCTATCTCCTTCCACAGCTGCATGGCTCAGCTCTATTTCTTTCACT
TCCTAGGGGGCACCGAGTGTTTCCTCTACAGGGTCATGTCCTGTGATCGCTACCTGGCCATCAGTTAC
CCGCTCAGGTACACCAGCATGATGACTGGGCGCTCGTGTACTCTTCTGGCCACCAGCACTTGGCTCAG
TGGCTCTCTGCACTCTGCTGTCCAGGCCATATTGACTTTCCATTTGCCCTACTGTGGACCCAACTGGA
TCCAGCACTATTTGTGTGATGCACCGCCCATCCTGAAACTGGCCTGTGCAGACACCTCAGCCATAGAG
ACTGTCATTTTTGTGACTGTTGGAATAGTGGCCTCGGGCTGCTTTGTCCTGATAGTGCTGTCCTATGT
GTCCATCGTCTGTTCCATCCTGCGGATCCGCACCTCAGAGGGGAAGCACAGAGCCTTTCAGACCTGTG
CCTCCCACTGTATCGTGGTCCTTTGCTTCTTTGGCCCTGGTCTTTTCATTTACCTGAGGCCAGGCTCC
AGGAAAGCTGTGGATGGAGTTGTGGCCGTTTTCTACACTGTGCTGACGCCCCTTCTCAACCCTGTTGT
GTACACCCTGAGGAACAAGGAGGTGAAGAAAGCTCTGTTGAAGCTGAAAGACAAAGTAGCACATTCTC
AGAGCAAATAGACACTAGGGAAGATTACATATCTTAGCTCTTGTGAATAGTGCTGTGAAAAACATACA
GGGGCAGG

| | | | |
|---|---|---|---|
| NOV26a, GG53563-03 | SEQ ID NO: 330 | 311 aa | MW at 34518.7kD |
| Protein Sequence | | | |

MSNASLLTAFILMGLPHAPALDAPLFGVFLVVYVLTVLGNLLILLVIRVDSHLHTTMYYFLTNLSFID
MWFSTVTVPKLLMTLVFPSGRAISFHSCMAQLYFFHFLGGTECFLYRVMSCDRYLAISYPLRYTSMMT
GRSCTLLATSTWLSGSLHSAVQAILTFHLPYCGPNWIQHYLCDAPPILKLACADTSAIETVIFVTVGI
VASGCFVLIVLSYVSIVCSILRIRTSEGKHRAFQTCASHCIVVLCFFGPGLFIYLRPGSRKAVDGVVA
VFYTVLTPLLNPVVYTLRNKEVKKALLKLKDKVAHSQSK

| | | |
|---|---|---|
| NOV26b, CG53563-01 | SEQ ID NO: 331 | 1038 bp |
| DNA Sequence | ORF Start: ATG at 28 | ORF Stop: TAG at 961 |

AGGGAGAGAGACCAAGGGTGAGAAGAAATGTCCAACGCCAGCCTACTGACAGCGTTCATCCTCATGGG
CCTTCCCCATGCCCCAGCGCTGGACGCCCCCCTCTTTGGAGTCTTCCTGGTGGTTTACGTGCTCACTG
TGCTGGGGAACCTCCTCATCCTGCTGGTGATCAGGGTGGATTCTCACCTCCACACCACCATGTACTAC
TTCCTCACCAACCTGTCGTTCATTGACATGTGGTTCTCCACTGTCACGGTGCCCAAATTGCTGATGAC
TTTGGTGTTCCCAAGTGGCAGGGCTATCTCCTTCCACAGCTGCATGGCTCAGCTCTATTTCTTTCACT
TCCTAGGGGGCACCGAGTGTTTCCTCTACAGGGTCATGTCCTGTGATCGCTACCTGGCCATCAGTTAC
CCGCTCAGGTACACCAGCATGATGACTGGGCGCTCGTGTACTCTTCTGGCCACCAGCACTTGGCTCAG
TGGCTCTCTGCACTCTGCTGTCCAGGCCATATTGACTTTCCATTTGCCCTACTGTGGACCCAACTGGA
TCCAGCACTATTTGTGTGATGCACCGCCCATCCTGAAACTGGCCTGTGCAGACACCTCAGCCATAGAG
ACTGTCATTTTTGTGACTGTTGGAATAGTGGCCTCGGGCTGCTTTGTCCTGATAGTGCTGTCCTATGT
GTCCATCGTCTGTTCCATCCTGCGGATCCGCACCTCAGAGGGGAAGCACAGAGCCTTTCAGACCTGTG
CCTCCCACTGTATCGTGGTCCTTTGCTTCTTTGGCCCTGGTCTTTTCATTTACCTGAGGCCAGGCTCC
AGGAAAGCTGTGGATGGAGTTGTGGCCGTTTTCTACACTGTGCTGACGCCCCTTCTCAACCCTGTTGT
GTACACCCTGAGGAACAAGGAGGTGAAGAAAGCTCTGTTGAAGCTGAAAGACAAAGTAGCACATTCTC
AGAGCAAATAGACACTAGGGAAGATTACATATCTTAGCTCTTGTGAATAGTGCTGTGAAAAACATACA
GGGGCAGGTATCTTTTGG

| | | | |
|---|---|---|---|
| NOV26b, GG53563-01 | SEQ ID NO: 332 | 311 aa | MW at 34518.7kD |
| Protein Sequence | | | |

MSNASLLTAFILMGLPHAPALDAPLFGVFLVVYVLTVLGNLLILLVIRVDSHLHTTMYYFLTNLSFID
MWFSTVTVPKLLMTLVFPSGRAISFHSCMAQLYFFHFLGGTECFLYRVMSCDRYLAISYPLRYTSMMT
GRSCTLLATSTWLSGSLHSAVQAILTFHLPYCGPNWIQHYLCDAPPILKLACADTSAIETVIFVTVGI
VASGCFVLIVLSYVSIVCSILRIRTSEGKHRAFQTCASHCIVVLCFFGPGLFIYLRPGSRKAVDGVVA
VFYTVLTPLLNPVVYTLRNKEVKKALLKLKDKVAHSQSK

| | | |
|---|---|---|
| NOV26c, CG53563-02 | SEQ ID NO: 333 | 1040 bp |
| DNA Sequence | ORF Start: ATG at 36 | ORF Stop: TAG at 969 |

TTTCTGTAAGAACAGAGCCCCATATATGAGAAGAAATGTCCAACGCCACCCTACTGACAGCGTTCATC
CTCACGGGCCTTCCCCATGCCCCAGGGCTGGACGCCCCCCTCTTTGGAATCTTCCTGGTGGTTTACGT
GCTCACTGTGCTGGGGAACCTCCTCATCCTGCTGGTGATCAGGGTGGATTCTCACCTCCACACCCCCA
TGTACTACTTCCTCACCAACCTGTCCTTCATTGACATGTGGTTCTCCACTGTCACGGTGCCCAAAATG
CTGATGACCTTGGTGTCCCCAAGCGGCAGGACTATCTCCTTCCACAGCTGCGTGGCTCAGCTCTATTT
TTTCCACTTCCTGGGGAGCACCGAGTGTTTCCTCTACACAGTCATGTCCTATGATCGCTACCTGGCCA
TCAGTTACCCGCTCAGGTACACCAACATGATGACTGGGCGCTCGTGTGCCCTCCTGGCCACCGGCACT
TGGCTCAGTGGCTCTCTGCACTCTGCTGTCCAGACCATATTGACTTTCCATTTGCCCTACTGTGGACC
CAACCAGATCCAGCACTACTTCTGTGACGCACCGCCCATCCTGAAACTGGCCTGTGCAGACACCTCAG
CCAACGAGATGGTCATCTTTGTGAATATTGGGCTAGTGGCCTCGGGCTGCTTTGTCCTGATAGTGCTG
TCCTATGTGTCCATCGTCTGTTCCATCCTGCGGATCCGCACCTCAGAGGGGAGGCAGAGAGCCTTTCA
GACCTGTGCCTCCCACTGTATCGTGGTCCTTTGCTTCTTTGGCCCTGGTCTTTTCATTTACCTGAGGC
CAGGCTCCAGGGACGCCTTGCATGGGGTTGTGGCCGTTTTCTACACCACGCTGACTCCTCTTTTCAAC
CCTGTTGTGTACACCCTGAGAAACAAGGAGGTAAAGAAAGCTCTGTTGAAGCTGAAAAATGGGTCAGT
ATTTGCTCAGGGTGAATAGTTAAGAAAGGCCATATATGGCTAACTTTTCTTTTTTTATTTGTAATTAA
ATTAAACCTTCAACATAAGC

| | | | |
|---|---|---|---|
| NOV26c, CG53563-02 | SEQ ID NO: 334 | 311 aa | MW at 34516.4kD |
| Protein Sequence | | | |

MSNATLLTAFILTGLPHAPGLDAPLFGIFLVVYVLTVLGNLLILLVIRVDSHLHTPMYYFLTNLSFID
MWFSTVTVPKMLMTLVSPSGRTISFHSCVAQLYFFHFLGSTECFLYTVMSYDRYLAISYPLRYTNMMT
GRSCALLATGTWLSGSLHSAVQTILTFHLPYCGPNQIQHYFCDAPPILKLACADTSANEMVIFVNIGL
VASGCFVLIVLSYVSIVCSILRIRTSEGRHRAFQTCASHCIVVLCFFGPGLFIYLRPGSRDALHGVVA
VFYTTLTPLFNPVVYTLRNKEVKKALLKLKNGSVFAQGE

[0494] A ClustalW comparison of the above protein sequences yields the following sequence alignment shown in Table 26B.

TABLE 26B
Comparison of the NOV26 protein sequences.

NOV26a MSNASLLTAFILMGLPHAPALDAPLFGVFLVVYVLTVLGNLLILLVIRVDSHLHTTMYYF
NOV26b MSNASLLTAFILMGLPHAPALDAPLFGVFLVVYVLTVLGNLLILLVIRVDSHLHTTMYYF
NOV26c MSNATLLTAFILTGLPHAPGLDAPLFGIFLVVYVLTVLGNLLILLVIRVDSHLHTTMYYF
NOV26a LTNLSFIDMWFSTVTVPKLLMTLVFPSGRAISFHSCMAQLYFFHFLGGTECFLYRVMSCD
NOV26b LTNLSFIDMWFSTVTVPKLLMTLVFPSGRAISFHSCMAQLYFFHFLGGTECFLYRVMSCD
NOV26c LTNLSFIDMWFSTVTVPKMLMTLVSPSGRTISFHSCVAQLYFFHFLGSTECFLYRVMSYD
NOV26a RYLAISYPLRYTSMMTGRSCTLLATSTWLSGSLHSAVQAILTFHLPYCGPNWIQHYLCDA
NOV26b RYLAISYPLRYTSMMTGRSCTLLATSTWLSGSLHSAVQAILTFHLPYCGPNWIQHYLCDA
NOV26c RYLAISYPLRYTNMMTGRSCALLATGTWLSGSLHSAVQTILTFHLPYCGPNQIQHYFCDA
NOV26a PPILKLACADTSAIETVIFVTVGIVASGCFVLIVLSYVSIVCSILRIRTSEGKHRAFQTC
NOV26b PPILKLACADTSAIETVIFVTVGIVASGCFVLIVLSYVSIVCSILRIRTSEGKHRAFQTC
NOV26c PPILKLACADTSANEMVIFVNIGLVASGCFVLIVLSYVSIVCSILRIRTSEGRHRAFQTC
NOV26a ASHCIVVLCFFGPGLFIYLRPGSRKAVDGVVAVFYTVLTPLLNPVVYTLRNKEVKKALLK
NOV26b ASHCIVVLCFFGPGLFIYLRPGSRKAVDGVVAVFYTVLTPLLNPVVYTLRNKEVKKALLK
NOV26c ASHCIVVLCFFGPGLFIYLRPGSRDALHGVVAVFYTTLTPLFNPVVYTLRNKEVKKALLK
NOV26a LKDKVAHSQSK
NOV26b LKDKVAHSQSK
NOV26c LKNGSVFAQGE
NOV26a (SEQ ID NO: 330)
NOV26b (SEQ ID NO: 332)
NOV26c (SEQ ID NO: 334)

[0495] Further analysis of the NOV26a protein yielded the following properties shown in Table 26C.

TABLE 26C
Protein Sequence Properties NOV26a

| | |
|---|---|
| SignalP analysis: | Cleavage site between residues 52 and 53 |
| PSORT II analysis: | |

| | |
|---|---|
| PSG: | a new signal peptide prediction method |
| | N-region: length 0; pos.chg 0; neg.chg 0 |
| | H-region: length 21; peak value 11.19 |
| | PSG score: 6.79 |
| GvH: | von Heijne's method for signal seq. recognition |
| | GvH score (threshold: −2.1): −3.58 |
| | possible cleavage site: between 51 and 52 |

>>> Seems to have no N-terminal signal peptide

| ALOM: | Klein et al's method for TM region allocation | | |
|---|---|---|---|
| | Init position for calculation: 1 | | |
| | Tentative number of TMS(s) for the threshold 0.5: 4 | | |
| | INTEGRAL | Likelihood = −10.61 | Transmembrane 31-47 |
| | INTEGRAL | Likelihood = −10.08 | Transmembrane 197-213 |
| | INTEGRAL | Likelihood = −4.46 | Transmembrane 243-259 |
| | INTEGRAL | Likelihood = −2.60 | Transmembrane 270-286 |

| | |
|---|---|
| PERIPHERAL | Likelihood = 0.85 (at 5) |

| | |
|---|---|
| | ALOM score: −10.61 (number of TMSs: 4) |
| MTOP: | Prediction of membrane topology (Hartmann et al.) |
| | Center position for calculation: 38 |
| | Charge difference: 1.5 C(1.0) − N(−0.5) |
| | C > N: C-terminal side will be inside |

>>>Caution: Inconsistent mtop result with signal peptide
>>> membrane topology: type 3b
MITDISC: discrimination of mitochondrial targeting seq

| | | | |
|---|---|---|---|
| R content: | 0 | Hyd Moment(75): | 4.41 |
| Hyd Moment(95): | 3.21 | G content: | 1 |
| D/E content: | 1 | S/T content: | 3 |

Score: −5.14

Gavel: prediction of cleavage sites for mitochondrial preseq

R-2 motif at 99 GRA|IS

NUCDISC: discrimination of nuclear localization signals

pat4: none
pat7: none
bipartite: none
content of basic residues: 7.4%
NLS Score: −0.47

KDEL: ER retention motif in the C-terminus: none
ER Membrane Retention Signals: none
SKL: peroxisomal targeting signal in the C-terminus: none
PTS2: 2nd peroxisomal targeting signal: none
VAC: possible vacuolar targeting motif: none
RNA-binding motif: none
Actinin-type actin-binding motif:

type 1: none
type 2: none

NMYR: N-myristoylation pattern: none
Prenylation motif: none
memYQRL: transport motif from cell surface to Golgi: none
Tyrosines in the tail: none
Dileucine motif in the tail: none
checking 63 PROSITE DNA binding motifs: none
checking 71 PROSITE ribosomal protein motifs: none
checking 33 PROSITE prokaryotic DNA binding motifs: none

| | |
|---|---|
| NNCN: | Reinhardt's method for Cytoplasmic/Nuclear discrimination |
| | Prediction: cytoplasmic |
| | Reliability: 94.1 |
| COIL: | Lupas's algorithm to detect coiled-coil regions |
| | total: 0 residues |

Final Results (k = 9/23):

44.4%: endoplasmic reticulum
22.2%: vacuolar
11.1%: Golgi
11.1%: vesicles of secretory system
11.1%: mitochondrial

>> prediction for CG53563-03 is end (k = 9)

[0496] A search of the NOV26a protein against the Geneseq database, a proprietary database that contains sequences published in patents and patent publication, yielded several homologous proteins shown in Table 26D.

TABLE 26D
Geneseq Results for NOV26a

| | | NOV26a | Identities/ | |
|---|---|---|---|---|
| | | Residues/ | Similarities for | |
| Geneseq | Protein/Organism/Length | Match | the Matched | Expect |
| Identifier | [Patent #, Date] | Residues | Region | Value |
| AAU85273 | G-coupled olfactory receptor | 1 . . . 311 | 311/311 (100%) | 0.0 |
| | #134 - Homo sapiens, 311 aa. | 1 . . . 311 | 311/311 (100%) | |
| | [WO200198526-A2, 27-DEC- | | | |
| | 2001] | | | |
| AAU95627 | Human olfactory and pheromone | 1 . . . 311 | 311/311 (100%) | 0.0 |
| | G protein-coupled receptor #114 - | 1 . . . 311 | 311/311 (100%) | |
| | Homo sapiens, 311 aa. | | | |
| | [WO200224726-A2, 28-MAR- | | | |
| | 2002] | | | |
| ABP95802 | Human GPCR polypeptide SEQ | 1 . . . 311 | 311/311 (100%) | 0.0 |
| | ID NO 414 - Homo sapiens, 311 | 1 . . . 311 | 311/311 (100%) | |
| | aa. [WO200216548-A2, 28-FEB- | | | |
| | 2002] | | | |
| AAG66376 | Partial NOV 15 protein sequence | 1 . . . 311 | 311/311 (100%) | 0.0 |
| | #2 - Unidentified, 311 aa. | 1 . . . 311 | 311/311 (100%) | |
| | [WO200155179-A2, 02-AUG- | | | |
| | 2001] | | | |
| AAG66335 | Human NOV 15 protein sequence - | 1 . . . 311 | 311/311 (100%) | 0.0 |
| | Homo sapiens, 311 aa. | 1 . . . 311 | 311/311 (100%) | |
| | [WO200155179-A2, 02-AUG- | | | |
| | 2001] | | | |

[0497] In a BLAST search of public sequence databases, the NOV26a protein was found to have homology to the proteins shown in the BLASTP data in Table 26E.

TABLE 26E
Public BLASTP Results for NOV26a

| | | NOV26a | Identities/ | |
|---|---|---|---|---|
| Protein | | Residues/ | Similarities for | |
| Accession | | Match | the Matched | |
| Number | Protein/Organism/Length | Residues | Portion | Expect Value |
| Q8NGN5 | Seven transmembrane helix | 1 . . . 311 | 311/311 (100%) | 0.0 |
| | receptor - Homo sapiens | 1 . . . 311 | 311/311 (100%) | |
| | (Human), 311 aa. | | | |
| CAC69628 | Sequence 13 from Patent | 1 . . . 311 | 308/311 (99%) | e−179 |
| | WO0155179 - Homo sapiens | 1 . . . 311 | 308/311 (99%) | |
| | (Human), 311 aa. | | | |
| CAC69627 | Sequence 11 from Patent | 1 . . . 311 | 308/311 (99%) | e−178 |
| | WO0155179 - Homo sapiens | 1 . . . 311 | 308/311 (99%) | |
| | (Human), 311 aa. | | | |
| Q8NGN4 | Seven transmembrane helix | 1 . . . 311 | 274/311 (88%) | e−159 |
| | receptor - Homo sapiens | 1 . . . 311 | 288/311 (92%) | |
| | (Human), 311 aa. | | | |
| Q8NGN6 | Seven transmembrane helix | 1 . . . 311 | 274/311 (88%) | e−159 |
| | receptor - Homo sapiens | 1 . . . 311 | 286/311 (91%) | |
| | (Human), 311 aa. | | | |

[0498] PFam analysis indicates that the NOV26a protein contains the domains shown in the Table 26F.

TABLE 26F
Domain Analysis of NOV26a

| | | Identities/ | |
|---|---|---|---|
| | NOV26a Match | Similarities for | |
| Pfam Domain | Region | the Matched Region | Expect Value |
| 7tm_1 | 39 . . . 287 | 52/276 (19%) | 2.4e−26 |
| | | 165/276 (60%) | |

### Example 27

[0499] The NOV27 clone was analyzed, and the nucleotide and encoded polypeptide sequences are shown in Table 27A.

TABLE 27A
NOV27 Sequence Analysis

| | | |
|---|---|---|
| NOV27a, GG53719-02 | SEQ ID NO: 335 | 993 bp |
| DNA Sequence | ORF Start: at 256 | ORF Stop: end of sequence |

TATTAGAAGAAGAGTGTCATAGAAGCCAATAACATTTCTGGGCCTGTGAGTGAATTTATCCTCCTGGG
CTTCCCCTGCCTGCTGCAGGGAGACCAAGATCCTCCTCTTTGTGGTCTTCTCCCTCATCTACCTTCTG
ACCCTCATGGGTAACACATCCATCATCTGCGCTGTGTGGTCAAGCCAGAAACTCCACACACCTATGTA
CATCCTCTTGGCTAATTTCTCTTTCCTGGAGATCTGCTGCATTAGTTCTGATGTCCCAAAATGTTGGC
CAATCTCATCTCCCATATCAAGAGCATCTCCTATGCTGGCTGCCTGCTCCAGTTCTTCTACTTCTCCA
TGTGTGCTGCAGAGGGCTATTTTCTGTCTGTGATGTCCTTTGATCGGTTCCTTACCATCTGTCGACCT
TTGCATTATCCCACAGTCATGACTCACCACCTGTGTGTCCGATTAGTGGCCTTCTGCAGGGCAGGTGG
TTTTCTATCCATACTGATGCCTGCAGTGCTTATGTCCCGAGTGCCTTTCTGTGGCCCTAACATCACTG
ACCATTTTTTCTGTAACCTGGGACCATTGCTGGCACTGTCCTGTGCCCCAGTTCCCAAAACTACTCTG
ACTTGTGCTACAGTAAGCTCTCTCATCATCTTCATCACCTTCCTCTACATTCTTGGGTCCCATATCTT
AGTTTTGCGAGCTGTTCTGTGGGTCCCAGCTGGCTCAGGCAGGAACAAAGCTTTCTCTACATGTGCTT
CCCATTTCTTGGTTGTTTCTTTCTTCTATGGCTCAGTCATGGTGATGTATGTGAGTCCAGGCTCCAGG
AGCCGTCCTGGGACACAGAAATTTGTGACATTGTTTTACTGCACAGCAAACCCATTCTTTAATCCCCT
GACCTACAGTCTCTGGAACAAAGATATGACAGATGCCCTTAAAAAAGTGCTGGGAGTGCCATCAAAAG
AAATATCTTGGAACACACTGAAATGATATACATTCTTCTAC

| | | | |
|---|---|---|---|
| NOV27a, GG53719-02 | SEQ ID NO: 336 | 321 aa | MW at 35567.8kD |
| Protein Sequence | | | |

MSVIEANNISGPVSELSSWASPACCRETKILLFVVFSLIYLLTLMGNTSIICAVWSSQKLHTPMYILL
ANFSFLEICCISSDVPMLANLISHIKSISYAGCLLQFFYFSMCAAEGYFLSVMSFDRFLTICRPLHYP
TVMTHHLCVRLVAFCRAGGFLSILMPAVLMSRVPFCGPNITDHFFCNLGPLLALSCAPVPKTTLTCAT
VSSLIIFITFLYILGSHILVLRAVLWVPAGSGRNKAFSTCASHFLVVSFFYGSVMVMYVSPGSRSRPG
TQKFVTLFYCTANPFFNPLTYSLWNKDMTDALKKVLGVPSKEISWNTLK

| | | |
|---|---|---|
| NOV27b, CG53719-01 | SEQ ID NO: 337 | 1012 bp |
| DNA Sequence | ORF Start: ATG at 25 | ORF Stop: TGA at 988 |

TCATTTCCTTCATAGATTAGAAGAATGAGTGTCATAGAAGCCAATAACATTTCTGGGCCTGTGAGTGA
ATTTATCCTCCTGGGCTTCCCTGCCTGCTGCAGGGAGACCAAGATCCTCCTCTTTGTGGTCTTCTCCC
TCATCTACCTTCTGACCCTCATGGGTAACACATCCATCATCTGCGCTGTGTGGTCAAGCCAGAAACTC
CACACACCTATGTACATCCTCTTGGCTAATTTCTCTTTCCTGGAGATCTGCTGCATTAGTTCTGATGT
CCCAATGTTGGCCAATCTCATCTCCCATATCAAGAGCATCTCCTATGCTGGCTGCCTGCTCCAGTTCT
TCTACTTCTCCATGTGTGCTGCAGAAGGCTACTTTCTGTCTGTGATGTCCTTTGATCGGTTCCTTACC
ATCTGTCGACCTTTGCATTATCCCACAGTCATGACTCACCACCTGTGTGTCCGATTAGTGGCCTTCTG
CAGGGCAGGTGGTTTTCTATCCATACTGATGCCTGCAGTGCTTATGTCCCGAGTGCCTTTCTGTGGCC
CTAACATCACTGACCATTTTTTCTGTAACCTGGGACCATTGCTGGCACTGTCCTGTGCCCCAGTTCCC
AAAACTACTCTGACTTGTGCTACAGTAAGCTCTCTCATCATCTTCATCACCTTCCTCTACATTCTTGG
GTCCCATATCTTAGTTTTGCGAGCTGTTCTGTGGGTCCCAGCTGGCTCAGGCAGGAACAAAGCTTTCT
CTACATGTGCTTCCCATTTCTTGGTTGTTTCTTTCTTCTATGGCTCAGTCATGGTGATGTATGTGAGT
CCAGGCTCCAGGAGCCGCCCTGGGACACAGAAATTTGTGACATTGTTTTACTGCACAGCAACCCCATT
CTTTAATCCCCTGACCTACAGTCTCTGGAACAAAGATATGACAGATGCCCTTAAAAAAGTGCTGGGAG
TGCCATCAAAAGAAATATATTGGAACACACTGAAATGATATACATTCTTCTACAATTATT

| | | | |
|---|---|---|---|
| NOV27b, CG53719-01 | SEQ ID NO: 338 | 321 aa | MW at 35690.1kD |
| Protein Sequence | | | |

MSVIEANNISGPVSEFILLGFPACCRETKILLFVVFSLIYLLTLMGNTSIICAVWSSQKLHTPMYILL
ANFSFLEICCISSDVPMLANLISHIKSISYAGCLLQFFYFSMCAAEGYFLSVMSFDRFLTICRPLHYP
TVMTHHLCVRLVAFCRAGGFLSILMPAVLMSRVPFCGPNITDHFFCNLGPLLALSCAPVPKTTLTCAT
VSSLIIFITFLYILGSHILVLRAVLWVPAGSGRNKAFSTCASHFLVVSFFYGSVMVMYVSPGSRSRPG
TQKFVTLFYCTATPFFNPLTYSLWNKDMTDALKKVLGVPSKEIYWNTLK

[0500] A ClustalW comparison of the above protein sequences yields the following sequence alignment shown in Table 27B.

TABLE 27B
Comparison of the NOV27 protein sequences.

NOV27a MSVIEANNISGPVSELSSWASPACCRETKILLFVVFSLIYLLTLMGNTSIICAVWSSQKL
NOV27b MSVIEANNISGPVSEFILLGFPACCRETKILLFVVFSLIYLLTLMGNTSIICAVWSSQKL
NOV27a HTPMYILLANFSFLEICCISSDVPMLANLISHIKSISYAGCLLQFFYFSMCAAEGYFLSV
NOV27b HTPMYILLANFSFLEICCISSDVPMLANLISHIKSISYAGCLLQFFYFSMCAAEGYFLSV
NOV27a MSFDRFLTICRPLHYPTVMTHHLCVRLVAFCRAGGFLSILMPAVLMSRVPFCGPNITDHF
NOV27b MSFDRFLTICRPLHYPTVMTHHLCVRLVAFCRAGGFLSILMPAVLMSRVPFCGPNITDHF
NOV27a FCNLGPLLALSCAPVPKTTLTCATVSSLIIFITFLYILGSHILVLRAVLWVPAGSGRNKA
NOV27b FCNLGPLLALSCAPVPKTTLTCATVSSLIIFITFLYILGSHILVLRAVLWVPAGSGRNKA
NOV27a FSTCASHFLVVSFFYGSVMVMYVSPGSRSRPGTQKFVTLFYCTANPFFNPLTYSLWNKDM
NOV27b FSTCASHFLVVSFFYGSVMVMYVSPGSRSRPGTQKFVTLFYCTATPFFNPLTYSLWNKDM
NOV27a TDALKKVLGVPSKEISWNTLK
NOV27b TDALKKVLGVPSKEIYWNTLK
NOV27a (SEQ ID NO: 336)
NOV27b (SEQ ID NO: 338)

[0501] Further analysis of the NOV27a protein yielded the following properties shown in Table 27C.

TABLE 27C
Protein Sequence Properties NOV27a

| | |
|---|---|
| SignalP analysis: | Cleavage site between residues 47 and 48 |
| PSORT II analysis: | |

| | |
|---|---|
| PSG: | a new signal peptide prediction method |
| | N-region: length 5; pos.chg 0; neg.chg 1 |
| | H-region: length 9; peak value 0.00 |
| | PSG score: −4.40 |
| GvH: | von Heijne's method for signal seq. recognition |
| | GvH score (threshold: −2.1): −3.31 |
| | possible cleavage site: between 43 and 44 |

>>> Seems to have no N-terminal signal peptide

| ALOM: | Klein et al's method for TM region allocation | | |
|---|---|---|---|
| | Init position for calculation: 1 | | |
| | Tentative number of TMS(s) for the threshold 0.5: 5 | | |
| | INTEGRAL | Likelihood = −9.34 | Transmembrane 30-46 |
| | INTEGRAL | Likelihood = −1.28 | Transmembrane 64-80 |
| | INTEGRAL | Likelihood = −0.96 | Transmembrane 156-172 |
| | INTEGRAL | Likelihood = −7.54 | Transmembrane 208-224 |
| | INTEGRAL | Likelihood = −2.50 | Transmembrane 248-264 |

| | |
|---|---|
| PERIPHERAL | Likelihood = 1.48 (at 180) |

| | |
|---|---|
| | ALOM score: −9.34 (number of TMSs: 5) |
| MTOP: | Prediction of membrane topology (Hartmann et al.) |
| | Center position for calculation: 37 |
| | Charge difference: 1.5 C(1.5) − N(0.0) |
| | C > N: C-terminal side will be inside |

>>> membrane topology: type 3b
MITDISC: discrimination of mitochondrial targeting seq

| | | | |
|---|---|---|---|
| R content: | 0 | Hyd Moment(75): | 0.86 |
| Hyd Moment(95): | 3.03 | G content: | 1 |
| D/E content: | 2 | S/T content: | 3 |

Score: −7.70

Gavel: prediction of cleavage sites for mitochondrial preseq

cleavage site motif not found

NUCDISC: discrimination of nuclear localization signals

pat4: none
pat7: none
bipartite: none
content of basic residues: 6.5%
NLS Score: −0.47

KDEL: ER retention motif in the C-terminus: none
ER Membrane Retention Signals: none
SKL: peroxisomal targeting signal in the C-terminus: none
PTS2: 2nd peroxisomal targeting signal: none
VAC: possible vacuolar targeting motif: none
RNA-binding motif: none
Actinin-type actin-binding motif:

type 1: none
type 2: none

NMYR: N-myristoylation pattern: none
Prenylation motif: none
memYQRL: transport motif from cell surface to Golgi: none
Tyrosines in the tail: none
Dileucine motif in the tail: none
checking 63 PROSITE DNA binding motifs: none
checking 71 PROSITE ribosomal protein motifs: none
checking 33 PROSITE prokaryotic DNA binding motifs: none

| | |
|---|---|
| NNCN: | Reinhardt's method for Cytoplasmic/Nuclear discrimination |
| | Prediction: cytoplasmic |
| | Reliability: 94.1 |
| COIL: | Lupas's algorithm to detect coiled-coil regions |
| | total: 0 residues |

Final Results (k = 9/23):

44.4%: endoplasmic reticulum
22.2%: vacuolar
11.1%: Golgi
11.1%: vesicles of secretory system
11.1%: mitochondrial

>> prediction for CG53719-02 is end (k = 9)

[0502] A search of the NOV27a protein against the Geneseq database, a proprietary database that contains sequences published in patents and patent publication, yielded several homologous proteins shown in Table 27D.

TABLE 27D
Geneseq Results for NOV27a

| | | NOV27a | Identities/ | |
|---|---|---|---|---|
| | | Residues/ | Similarities for | |
| Geneseq | Protein/Organism/Length | Match | the Matched | Expect |
| Identifier | [Patent #, Date] | Residues | Region | Value |
| AAU07092 | Human odorant receptor (OR) | 1 . . . 321 | 313/321 (97%) | 0.0 |
| | polypeptide #9 - Homo sapiens, | 1 . . . 321 | 313/321 (97%) | |
| | 321 aa. [WO200157215-A2, 09- | | | |
| | AUG-2001] | | | |
| ABP72226 | Human G-protein coupled | 1 . . . 321 | 314/322 (97%) | 0.0 |
| | receptor GCREC-20 (odorant | 1 . . . 322 | 314/322 (97%) | |
| | receptor) - Homo sapiens, 322 aa. | | | |
| | [WO2003000859-A2, 03-JAN- | | | |
| | 2003] | | | |
| AAG72445 | Human OR-like polypeptide query | 1 . . . 321 | 310/322 (96%) | 0.0 |
| | sequence, SEQ ID NO: 2126 - | 1 . . . 322 | 311/322 (96%) | |
| | Homo sapiens, 322 aa. | | | |
| | [WO200127158-A2, 19-APR- | | | |
| | 2001] | | | |
| AAG72079 | Human olfactory receptor | 1 . . . 321 | 309/322 (95%) | e−180 |
| | polypeptide, SEQ ID NO: 1760 - | 1 . . . 322 | 310/322 (95%) | |
| | Homo sapiens, 322 aa. | | | |
| | [WO200127158-A2, 19-APR- | | | |
| | 2001] | | | |
| ABP72218 | Human G-protein coupled | 29 . . . 321 | 255/295 (86%) | e−149 |
| | receptor GCREC-12 (olfactory | 39 . . . 333 | 270/295 (91%) | |
| | receptor) - Homo sapiens, 333 aa. | | | |
| | [WO2003000859-A2, 03-JAN- | | | |
| | 2003] | | | |

[0503] In a BLAST search of public sequence databases, the NOV27a protein was found to have homology to the proteins shown in the BLASTP data in Table 27E.

TABLE 27E
Public BLASTP Results for NOV27a

| | | NOV27a | Identities/ | |
|---|---|---|---|---|
| Protein | | Residues/ | Similarities for | |
| Accession | | Match | the Matched | Expect |
| Number | Protein/Organism/Length | Residues | Portion | Value |
| Q8VFT6 | Olfactory receptor MOR106-5 - | 6 . . . 309 | 181/308 (58%) | 1e−98 |
| | Mus musculus (Mouse), 312 aa. | 4 . . . 310 | 224/308 (71%) | |
| Q8NGC7 | Seven transmembrane helix | 26 . . . 310 | 169/287 (58%) | 2e−93 |
| | receptor - Homo sapiens | 39 . . . 325 | 212/287 (72%) | |
| | (Human), 330 aa. | | | |
| CAD57956 | Sequence 107 from Patent | 26 . . . 310 | 169/287 (58%) | 8e−93 |
| | WO0250276 - Homo sapiens | 16 . . . 302 | 211/287 (72%) | |
| | (Human), 307 aa. | | | |
| Q8VFT9 | Olfactory receptor MOR106-2 - | 24 . . . 308 | 168/287 (58%) | 2e−90 |
| | Mus musculus (Mouse), 309 aa. | 21 . . . 307 | 210/287 (72%) | |
| Q8VFT8 | Olfactory receptor MOR106-3 - | 24 . . . 308 | 166/287 (57%) | 4e−90 |
| | Mus musculus (Mouse), 311 aa. | 23 . . . 309 | 212/287 (73%) | |

[0504] PFam analysis indicates that the NOV27a protein contains the domains shown in the Table 27F.

TABLE 27F
Domain Analysis of NOV27a

| | | Identities/ | |
|---|---|---|---|
| | NOV27a Match | Similarities for | |
| Pfam Domain | Region | the Matched Region | Expect Value |
| 7tm_1 | 46 . . . 293 | 47/276 (17%) | 4.5e−13 |
| | | 166/276 (60%) | |

### Example 28

[0505] The NOV28 clone was analyzed, and the nucleotide and encoded polypeptide sequences are shown in Table 28A.

TABLE 28A
NOV28 Sequence Analysis

| | | |
|---|---|---|
| NOV28a, CG53746-04 | SEQ ID NO: 339 | 1604 bp |
| DNA Sequence | ORF Start: ATG at 648 | ORF Stop: TGA at 1581 |

ACTCACTATAGGGCTCGAGCGGCCGCCCGGGCAGGTTGGATATTTGGTGTACTTTTCCTCAATTGTGA
AATCTCTGGGTGGGGACCACAGCTCAGTGTTGAGTTACTGACCTCTTCTTGGTCCTGTGGATTAGCAT
GCAGCTAATCTGTTTGACCTCTGTTTGGAATTCGGAATTCTTAATGACTACACATCTTTGATACAATA
GATGATACCTCAAACATCCTTTTGAACAGCTGTTCTTTTCCATGAGTCTTGGTCTATTCTGACATTTA
TGTCTCCCTTCAATCACGTCTTTGGCCTTAGAAGATTGAGTTACTGGATTCTTTATATATTCTAGTGG
TCATCTCTGAAATGTGCTCAGAGAGCACCTAAATTAACCATCCAATACGAGTTGAGTGTGTTAAGTTA
AAAAAAAAAAAAAGATTTTTCTGAGTATTCCTGACCTTACATCAGTGAACATTTATGTTTTAAAGTCT
TACATAAGATACTGTGTGTGAAAGCATTTTCTTCCCAAATTTACATGAGTGCCTAAATTGTTATACTT
TTTGGTTAAATAGATATTGGAAAAATAAGTGTGCAATTATAGCATTTAATCCCATTATAATATTCATT
TGTTTTTCTTTCAGTTGGCACCATTCCCAATTTAGATGGGGACTGGAAATGACACCACTGTGGTAGAG
TTTACTCTTTTGGGATTATCCGAGGATACTACAGTTTGTGCTATTTTATTTCTTGTGTTTCTAGGAAT
TTATGTTGTCACCTTAATGGGTAATATCAGCATAATTGTATTGATCAGAAGAAGTCATCATCTTCATA
CACCCATGTACATTTTCCTCTGCCATTTGGCCTTTGTAGACATTGGGTACTCCTCATCAGTCACACCT
GTCATGCTCATGAGCTTCCTAAGGAAAGAAACCTCTCTCCCTATTGCTGGTTGTGTGGCCCAGCTCTG
TTCTGTAGTGACGTTTGGTACGGCCGAGTGCTTCCTGCTGGCTGCCATGGCCTATGATCGCTATGTGG
CCATCTGCTCACCCCTGCTCTACTCTACCTGCATGTCCCCTGGAGTCTGCATCATCTTAGTGGGCATG
TCCTACCTGGGTGGATGTGTGAATGCTTGGACATTCATTGGCTGCTTATTAAGACTGTCCTTCTGTGG
GCCAAATAAAGTCAATCACTTTTTCTGTGACTATTCACCACTTTTGAAGCTTGCTTGTTCCCATGATT
TTACTTTTGAAATAATTCCAGCTATCTCTTCTGGATCTATCATTGTGGCCACTGTGTGTGTCATAGCC
ATATCCTACATCTATATCCTCATCACCATCCTGAAGATGCACTCCACCAAGGGCCGCCACAAGGCCTT
CTCCACCTGCACCTCCCACCTCACTGCAGTCACTCTGTTCTATGGGACCATTACCTTCATTTATGTGA
TGCCCAAGTCCAGCTACTCAACTGACCAGAACAAGGTGGTGTCTGTGTTCTACACCGTGGTGATTCCC
ATGTTGAACCCCCTGATCTACAGCCTCAGGAACAAGGAGATTAAGGGGGCTCTGAAGAGAGAGCTTAG
AATAAAAATATTTTCTTGATGAAACTAGTTAGTTTGAAGA

| | | | |
|---|---|---|---|
| NOV28a, CG53746-04 | SEQ ID NO: 340 | 311 aa | MW at 34309.4kD |
| Protein Sequence | | | |

MGTGNDTTVVEFTLLGLSEDTTVCAILFLVFLGIYVVTLMGNISIIVLIRRSHHLHTPMYIFLCHLAF
VDIGYSSSVTPVMLMSFLRKETSLPIAGCVAQLCSVVTFGTAECFLLAAMAYDRYVAICSPLLYSTCM
SPGVCIILVGMSYLGGCVNAWTFIGCLLRLSFCGPNKVNHFFCDYSPLLKLACSHDFTFEIIPAISSG
SIIVATVCVIAISYIYILITILKMHSTKGRHKAFSTCTSHLTAVTLFYGTITFIYVMPKSSYSTDQNK
VVSVFYTVVIPMLNPLIYSLRNKEIKGALKRELRIKIFS

| | | |
|---|---|---|
| NOV28b, GG53746-01 | SEQ ID NO: 341 | 984 bp |
| DNA Sequence | ORF Start: ATG at 24 | ORF Stop: TGA at 957 |

AGTTGGCACCATTCCCAATATAGATGGGGACTGGAAATGACACCACTGTGGTAGAGTTTACTCTTTTG
GGGTTATCTGAGGATACTACAGTTTGTGCTATTTTATTTCTTGTGTTTCTAGGAATTTATGTTGTCAC
CTTAATGGGTAATATCAGCATAATTGTATTGATCAGAAGAAGTCATCATCTTCATACACCCATGTACA
TTTTCCTCTGCCATTTGGCCTTTGTAGACATTGGGTACTCCTCATCAGTCACACCTGTCATGCTCATG
AGCTTCCTAAGGAAAGAAACCTCTCTCCCTGTTGCTGGTTGTGTGGCCCAGCTCTGTTCTGTAGTGAC
GTTTGGTACGGCCGAGTGCTTCCTGCTGGCTGCCATGGCCTATGATCGCTATGTGGCCATCTGCTCAC
CCCTGCTCTACTCTACCTGCATGTCCCCTGGAGTCTGCATCATCTTAGTGGGCATGTCCTACCTGGGT
GGATGTGTGAATGCTTGGACATTCATTGGCTGCTTATTAAGACTGTCCTTCTGTGGGCCAAATAAAGT
CAATCACTTTTTCTGTGACTATTCACCACTTTTGAAGCTTGCTTGTTCCCATGATTTTACTTTTGAAA
TAATTCCAGCTATCTCTTCTGGATCTATCATTGTGGCCACTGTGTGTGTCATAGCCATATCCTACATC
TATATCCTCATCACCATCCTGAAGATGCACTCCACCAAGGGCCGCCACAAGGCCTTCTCCACCTGCAC
CTCCCACCTCACTGCAGTCACTCTGTTCTATGGGACCATTACCTTCATTTATGTGATGCCCAAGTCCA
GCTACTCAACTGACCAGAACAAGGTGGTGTCTGTGTTCTACACCGTGGTGATTCCCATGTTGAACCCC
CTGATCTACAGCCTCAGGAACAAGGAGATTAAGGGGGCTCTGAAGAGAGAGCTTAGAATAAAAATATT
TTCTTGATGAAACTAGTTAGTTTGAAGAATCT

| | | | |
|---|---|---|---|
| NOV28b, CG53746-01 | SEQ ID NO: 342 | 311 aa | MW at 34295.4kD |
| Protein Sequence | | | |

MGTGNDTTVVEFTLLGLSEDTTVCAILFLVFLGIYVVTLMGNISIIVLIRRSHHLHTPMYIFLCHLAF
VDIGYSSSVTPVMLMSFLRKETSLPVAGCVAQLCSVVTFGTAECFLLAAMAYDRYVAICSPLLYSTCM
SPGVCIILVGMSYLGGCVNAWTFIGCLLRLSFCGPNKVNHFFCDYSPLLKLACSHDFTFEIIPAISSG
SIIVATVCVIAISYIYILITILKMHSTKGRHKAFSTCTSHLTAVTLFYGTITFIYVMPKSSYSTDQNK
VVSVFYTVVIPMLNPLIYSLRNKEIKGALKRELRIKIFS

| | | |
|---|---|---|
| NOV28c, CG53746-02 | SEQ ID NO: 343 | 952 bp |
| DNA Sequence | ORF Start: ATG at 7 | ORF Stop: TGA at 940 |

ATATAGATGGGGACTGGAAATGACACCACTGTGGTAGAGTTTACTCTTTTGGGGTTATCCGAGGATAC
TACAGTTTGTGCTATTTTATTTCTTGTGTTTCTAGGAATTTATGTTGTCACCTTAATGGGTAATATCA
GCATAATTGTATTGATCAGAAGAAGTCATCATCTTCATACACCCATGTACATTTTCCTCTGCCATTTG
GCCTTTGTAGACATTGGGTACTCCTCATCAGTCACACCTGTCATGCTCATGAGCTTCCTAAGGAAAGA
AACCTCTCTCCCTGTTGCTGGTTGTGTGGCCCAGCTCTGTTCTGTGGTGACGTTTGGTACGGCCGAGT
GCTTCCTGCTGGCTGCCATGGCCTATGATCGCTATGTGGCCATCTGCTCACCCCTGCTCTACTCTACC
TGCATGTCCCCTGGAGTCTGCATCATCTTAGTGGGCATGTCCTACCTGGGTGGATGTGTGAATGCTTG
GACATTCATTGGCTGCTTATTAAGACTGTCCTTCTGTGGGCCAAATAAAGTCAATCACTTTTTCTGTG
ACTATTCACCACTTTTGAAGCTTGCTTGTTCCCATGATTTTACTTTTGAAATAATTCCAGCTATCTCT
TCTGGATCTATCATTGTGGCCACTGTGTGTGTCATAGCCATATCCTACATCTATATCCTCATCACCAT
CCTGAAGATGCACTCCACCAAGGGCCGCCACAAGGCCTTCTCCACCTGCACCTCCCACCTCACTGCAG
TCACTCTGTTTTATGGGACCATTACCTTCATTTATGTGATGCCCAAGTCCAGCTACTCAACTGACCAG
AACAAGGTGGTGTCTGTGTTCTACACCGTGGTGATTCCCATGTTGAACCCCCTGATCTACAGCCTCAG
GAACAAGGAGATTAAGGGGGCTCTGAAGAGAGAGCTTAGAATAAAAATATTTTCTTGATGAAACTAGT

| | | | |
|---|---|---|---|
| NOV28c, CG53746-02 | SEQ ID NO: 344 | 311 aa | MW at 34295.4kD |
| Protein Sequence | | | |

MGTGNDTTVVEFTLLGLSEDTTVCAILFLVFLGIYVVTLMGNISIIVLIRRSHHLHTPMYIFLCHLAF
VDIGYSSSVTPVMLMSFLRKETSLPVAGCVAQLCSVVTFGTAECFLLAAMAYDRYVAICSPLLYSTCM
SPGVCIILVGMSYLGGCVNAWTFIGCLLRLSFCGPNKVNHFFCDYSPLLKLACSHDFTFEIIPAISSG
SIIVATVCVIAISYIYILITILKMHSTKGRHKAFSTCTSHLTAVTLFYGTITFIYVMPKSSYSTDQNK
VVSVFYTVVIPMLNPLIYSLRNKEIKGALKRELRIKIFS

| | | |
|---|---|---|
| NOV28d, GG53746-03 | SEQ ID NO: 345 | 964 bp |
| DNA Sequence | ORF Start: ATG at 8 | ORF Stop: TGA at 941 |

TATATAGATGGGGACTGGAAATGACACCACTGTGGTAGAGTTTACTCTTTTGGGGTTATCCGAGGATA
CTACAGTTTGTGCTATTTTATTTCTTGTGTTTCTAGGAATTTATGTTGTCACCTTAATGGGTAATATC
AGCATAATTGTATTGATCAGAAGAAGTCATCATCTTCATACACCCATGTACATTTTCCTCTGCCATTT
GGCCTTTGTAGACATTGGGTAQTCCTCATCAGTCACACCTGTCATGAGCATGAGCTTCCTAAGGAAAG
AAACCTCTCTCCCTGTTGCTGGTTGTGTGGCCCAGCTCTGTTCTGTGGTGACGTTTGGTACGGCCGAG
TGCTTCCTGCTGGCTGCCATGGCCTATGATCGCTATGTGGCCATCTGCTCACCCCTGCTCTACTCTAC
CTGCATGTCCCCTGGAGTCTGCATCATCTTAGTGGGCATGTCCTACCTGGGTGGATGTGTGAATGCTT
GGACATTCATTGGCTGCTTATTAAGACTGTCCTTCTGTGGGCCAAATAAAGTCAATCACTTTTTCTGT
GACTATTCACCACTTTTGAAGCTTGCTTGTTCCCATGATTTTACTTTTGAAATAATTCCAGCTATCTC
TTCTGGATCTATCATTGTGGCCACTGTGTGTGTCATAGCCATATCCTACATCTATATCCTCATCACCA
TCCTGAAGATGCACTCCACCAAGGGCCGCCACAAGGCCTTCTCCACCTGCACCTCCCACCTCACTGCA
GTCACTCTGTTTTATGGGACCATTACCTTCATTTATGTGATGCCCAAGTCCAGCTACTCAACTGACCA
GAACAAGGTGGTGTCTGTGTTCTACACCGTGGTGATTCCCATGTTGAACCCCCTGATCTACAGCCTCA
GGAACAAGGAGATTAAGGGGGCTCTGAAGAGAGAGCTTAGAATAAAAATATTTTCTTGATGAAACTAG
TTAGTTTGAAGA

| | | | |
|---|---|---|---|
| NOV28d, CG53746-03 | SEQ ID NO: 346 | 311 aa | MW at 34295.4kD |
| Protein Sequence | | | |

MGTGNDTTVVEFTLLGLSEDTTVCAILFLVFLGIYVVTLMGNISIIVLIRRSHHLHTPMYIFLCHLAF
VDIGYSSSVTPVMLMSFLRKETSLPVAGCVAQLCSVVTFGTAECFLLAAMAYDRYVAICSPLLYSTCM
SPGVCIILVGMSYLGGCVNAWTFIGCLLRLSFCGPNKVNHFFCDYSPLLKLACSHDFTFEIIPAISSG
SIIVATVCVIAISYIYILITILKMHSTKGRHKAFSTCTSHLTAVTLFYGTITFIYVMPKSSYSTDQNK
VVSVFYTVVIPMLNPLIYSLRNKEIKGALKRELRIKIFS

| | | |
|---|---|---|
| NOV28e, SNP13373967 of | SEQ ID NO: 347 | 1604 bp |
| CG53746-04, DNA Sequence | ORF Start: ATG at 648 | ORF Stop: TGA at 1581 |
| | SNP Pos: 466 | SNP Change: T to C |

ACTCACTATAGGGCTCGAGCGGCCGCCCGGGCAGGTTGGATATTTGGTGTACTTTTCCTCAATTGTGA
AATCTCTGGGTGGGGACCACAGCTCAGTGTTGAGTTACTGACCTCTTCTTGGTCCTGTGGATTAGCAT
GCAGCTAATCTGTTTGACCTCTGTTTGGAATTCGGAATTCTTAATGACTACACATCTTTGATACAATA
GATGATACCTCAAACATCCTTTTGAACAGCTGTTCTTTTCCATGAGTCTTGGTCTATTCTGACATTTA
TGTCTCCCTTCAATCACGTCTTTGGCCTTAGAAGATTGAGTTACTGGATTCTTTATATATTCTAGTGG
TCATCTCTGAAATGTGCTCAGAGAGCACCTAAATTAACCATCCAATACGAGTTGAGTGTGTTAAGTTA
AAAAAAAAAAAAAGATTTTTCTGAGTATTCCTGACCTTACATCAGTGAACATTTATGCTTTAAAGTCT
TACATAAGATACTGTGTGTGAAAGCATTTTCTTCCCAAATTTACATGAGTGCCTAAATTGTTATACTT
TTTGGTTAAATAGATATTGGAAAAATAAGTGTGCAATTATAGCATTTAATCCCATTATAATATTCATT
TGTTTTTCTTTCAGTTGGCACCATTCCCAATTTAGATGGGGACTGGAAATGACACCACTGTGGTAGAG
TTTACTCTTTTGGGATTATCCGAGGATACTACAGTTTGTGCTATTTTATTTCTTGTGTTTCTAGGAAT
TTATGTTGTCACCTTAATGGGTAATATCAGCATAATTGTATTGATCAGAAGAAGTCATCATCTTCATA
CACCCATGTACATTTTCCTCTGCCATTTGGCCTTTGTAGACATTGGGTACTCCTCATCAGTCACACCT
GTCATGCTCATGAGCTTCCTAAGGAAAGAAACCTCTCTCCCTATTGCTGGTTGTGTGGCCCAGCTCTG
TTCTGTAGTGACGTTTGGTACGGCCGAGTGCTTCCTGCTGGCTGCCATGGCCTATGATCGCTATGTGG
CCATCTGCTCACCCCTGCTCTACTCTACCTGCATGTCCCCTGGAGTCTGCATCATCTTAGTGGGCATG
TCCTACCTGGGTGGATGTGTGAATGCTTGGACATTCATTGGCTGCTTATTAAGACTGTCCTTCTGTGG
GCCAAATAAAGTCAATCACTTTTTCTGTGACTATTCACCACTTTTGAAGCTTGCTTGTTCCCATGATT
TTACTTTTGAAATAATTCCAGCTATCTCTTCTGGATCTATCATTGTGGCCACTGTGTGTGTCATAGCC
ATATCCTACATCTATATCCTCATCACCATCCTGAAGATGCACTCCACCAAGGGCCGCCACAAGGCCTT
CTCCACCTGCACCTCCCACCTCACTGCAGTCACTCTGTTCTATGGGACCATTACCTTCATTTATGTGA
TGCCCAAGTCCAGCTACTCAACTGACCAGAACAAGGTGGTGTCTGTGTTCTACACCGTGGTGATTCCC
ATGTTGAACCCCCTGATCTACAGCCTCAGGAACAAGGAGATTAAGGGGGCTCTGAAGAGAGAGCTTAG
AATAAAAATATTTTCTTGATGAAACTAGTTAGTTTGAAGA

| | | | |
|---|---|---|---|
| NOV28e, SNP13373967 of | SEQ ID NO: 348 | 311 aa | MW at 34309.4kD |
| CG53746-04, Protein | | | SNP Change: no change |
| Sequence | | | |

MGTGNDTTVVEFTLLGLSEDTTVCAILFLVFLGIYVVTLMGNISIIVLIRRSHHLHTPMYIFLCHLAF
VDIGYSSSVTPVMLMSFLRKETSLPIAGCVAQLCSVVTFGTAECFLLAAMAYDRYVAICSPLLYSTCM
SPGVCIILVGMSYLGGCVNAWTFIGCLLRLSFCGPNKVNHFFCDYSPLLKLACSHDFTFEIIPAISSG
SIIVATVCVIAISYIYILITILKMHSTKGRHKAFSTCTSHLTAVTLFYGTITFIYVMPKSSYSTDQNK
VVSVFYTVVIPMLNPLIYSLRNKEIKGALKRELRIKIFS

| | | |
|---|---|---|
| NOV28f, SNP13373968 of | SEQ ID NO: 349 | 1604 bp |
| CG53746-04, DNA Sequence | ORF Start: ATG at 648 | ORF Stop: TGA at 1581 |
| | SNP Pos: 550 | SNP Change: T to C |

ACTCACTATAGGGCTCGAGCGGCCGCCCGGGCAGGTTGGATATTTGGTGTACTTTTCCTCAATTGTGA
AATCTCTGGGTGGGGACCACAGCTCAGTGTTGAGTTACTGACCTCTTCTTGGTCCTGTGGATTAGCAT
GCAGCTAATCTGTTTGACCTCTGTTTGGAATTCGGAATTCTTAATGACTACACATCTTTGATACAATA
GATGATACCTCAAACATCCTTTTGAACAGCTGTTCTTTTCCATGAGTCTTGGTCTATTCTGACATTTA
TGTCTCCCTTCAATCACGTCTTTGGCCTTAGAAGATTGAGTTACTGGATTCTTTATATATTCTAGTGG
TCATCTCTGAAATGTGCTCAGAGAGCACCTAAATTAACCATCCAATACGAGTTGAGTGTGTTAAGTTA
AAAAAAAAAAAAAGATTTTTCTGAGTATTCCTGACCTTACATCAGTGAACATTTATGCTTTAAAGTCT
TACATAAGATACTGTGTGTGAAAGCATTTTCTTCCCAAATTTACATGAGTGCCTAAATTGTTATACTT
TTTGGTTAAATAGATATTGGAAAAATAAGTGTGCAATTATAGCATTTAATCCCATTATAATATTCATT
TGTTTTTCTTTCAGTTGGCACCATTCCCAATTTAGATGGGGACTGGAAATGACACCACTGTGGTAGAG
TTTACTCTTTTGGGATTATCCGAGGATACTACAGTTTGTGCTATTTTATTTCTTGTGTTTCTAGGAAT
TTATGTTGTCACCTTAATGGGTAATATCAGCATAATTGTATTGATCAGAAGAAGTCATCATCTTCATA
CACCCATGTACATTTTCCTCTGCCATTTGGCCTTTGTAGACATTGGGTACTCCTCATCAGTCACACCT
GTCATGCTCATGAGCTTCCTAAGGAAAGAAACCTCTCTCCCTATTGCTGGTTGTGTGGCCCAGCTCTG
TTCTGTAGTGACGTTTGGTACGGCCGAGTGCTTCCTGCTGGCTGCCATGGCCTATGATCGCTATGTGG
CCATCTGCTCACCCCTGCTCTACTCTACCTGCATGTCCCCTGGAGTCTGCATCATCTTAGTGGGCATG
TCCTACCTGGGTGGATGTGTGAATGCTTGGACATTCATTGGCTGCTTATTAAGACTGTCCTTCTGTGG
GCCAAATAAAGTCAATCACTTTTTCTGTGACTATTCACCACTTTTGAAGCTTGCTTGTTCCCATGATT
TTACTTTTGAAATAATTCCAGCTATCTCTTCTGGATCTATCATTGTGGCCACTGTGTGTGTCATAGCC
ATATCCTACATCTATATCCTCATCACCATCCTGAAGATGCACTCCACCAAGGGCCGCCACAAGGCCTT
CTCCACCTGCACCTCCCACCTCACTGCAGTCACTCTGTTCTATGGGACCATTACCTTCATTTATGTGA
TGCCCAAGTCCAGCTACTCAACTGACCAGAACAAGGTGGTGTCTGTGTTCTACACCGTGGTGATTCCC
ATGTTGAACCCCCTGATCTACAGCCTCAGGAACAAGGAGATTAAGGGGGCTCTGAAGAGAGAGCTTAG
AATAAAAATATTTTCTTGATGAAACTAGTTAGTTTGAAGA

| | | | |
|---|---|---|---|
| NOV28f, SNP13373968 of | SEQ ID NO: 350 | 311 aa | MW at 34309.4kD |
| CG53746-04, Protein | | | SNP Change: no change |
| Sequence | | | |

MGTGNDTTVVEFTLLGLSEDTTVCAILFLVFLGIYVVTLMGNISIIVLIRRSHHLHTPMYIFLCHLAF
VDIGYSSSVTPVMLMSFLRKETSLPIAGCVAQLCSVVTFGTAECFLLAAMAYDRYVAICSPLLYSTCM
SPGVCIILVGMSYLGGCVNAWTFIGCLLRLSFCGPNKVNHFFCDYSPLLKLACSHDFTFEIIPAISSG
SIIVATVCVIAISYIYILITILKMHSTKGRHKAFSTCTSHLTAVTLFYGTITFIYVMPKSSYSTDQNK
VVSVFYTVVIPMLNPLIYSLRNKEIKGALKRELRIKIFS

| | | |
|---|---|---|
| NOV28g, SNP13382432 of | SEQ ID NO: 351 | 1604 bp |
| CG53746-04, DNA Sequence | ORF Start: ATG at 648 | ORF Stop: TGA at 1581 |
| | SNP Pos: 644 | SNP Change: T to A |

ACTCACTATAGGGCTCGAGCGGCCGCCCGGGCAGGTTGGATATTTGGTGTACTTTTCCTCAATTGTGA
AATCTCTGGGTGGGGACCACAGCTCAGTGTTGAGTTACTGACCTCTTCTTGGTCCTGTGGATTAGCAT
GCAGCTAATCTGTTTGACCTCTGTTTGGAATTCGGAATTCTTAATGACTACACATCTTTGATACAATA
GATGATACCTCAAACATCCTTTTGAACAGCTGTTCTTTTCCATGAGTCTTGGTCTATTCTGACATTTA
TGTCTCCCTTCAATCACGTCTTTGGCCTTAGAAGATTGAGTTACTGGATTCTTTATATATTCTAGTGG
TCATCTCTGAAATGTGCTCAGAGAGCACCTAAATTAACCATCCAATACGAGTTGAGTGTGTTAAGTTA
AAAAAAAAAAAAAGATTTTTCTGAGTATTCCTGACCTTACATCAGTGAACATTTATGCTTTAAAGTCT
TACATAAGATACTGTGTGTGAAAGCATTTTCTTCCCAAATTTACATGAGTGCCTAAATTGTTATACTT
TTTGGTTAAATAGATATTGGAAAAATAAGTGTGCAATTATAGCATTTAATCCCATTATAATATTCATT
TGTTTTTCTTTCAGTTGGCACCATTCCCAATTTAGATGGGGACTGGAAATGACACCACTGTGGTAGAG
TTTACTCTTTTGGGATTATCCGAGGATACTACAGTTTGTGCTATTTTATTTCTTGTGTTTCTAGGAAT
TTATGTTGTCACCTTAATGGGTAATATCAGCATAATTGTATTGATCAGAAGAAGTCATCATCTTCATA
CACCCATGTACATTTTCCTCTGCCATTTGGCCTTTGTAGACATTGGGTACTCCTCATCAGTCACACCT
GTCATGCTCATGAGCTTCCTAAGGAAAGAAACCTCTCTCCCTATTGCTGGTTGTGTGGCCCAGCTCTG
TTCTGTAGTGACGTTTGGTACGGCCGAGTGCTTCCTGCTGGCTGCCATGGCCTATGATCGCTATGTGG
CCATCTGCTCACCCCTGCTCTACTCTACCTGCATGTCCCCTGGAGTCTGCATCATCTTAGTGGGCATG
TCCTACCTGGGTGGATGTGTGAATGCTTGGACATTCATTGGCTGCTTATTAAGACTGTCCTTCTGTGG
GCCAAATAAAGTCAATCACTTTTTCTGTGACTATTCACCACTTTTGAAGCTTGCTTGTTCCCATGATT
TTACTTTTGAAATAATTCCAGCTATCTCTTCTGGATCTATCATTGTGGCCACTGTGTGTGTCATAGCC
ATATCCTACATCTATATCCTCATCACCATCCTGAAGATGCACTCCACCAAGGGCCGCCACAAGGCCTT
CTCCACCTGCACCTCCCACCTCACTGCAGTCACTCTGTTCTATGGGACCATTACCTTCATTTATGTGA
TGCCCAAGTCCAGCTACTCAACTGACCAGAACAAGGTGGTGTCTGTGTTCTACACCGTGGTGATTCCC
ATGTTGAACCCCCTGATCTACAGCCTCAGGAACAAGGAGATTAAGGGGGCTCTGAAGAGAGAGCTTAG
AATAAAAATATTTTCTTGATGAAACTAGTTAGTTTGAAGA

| | | | |
|---|---|---|---|
| NOV28g, SNP13382432 of | SEQ ID NO: 352 | 311 aa | MW at 34309.4kD |
| CG53746-04, Protein | | | SNP Change: no change |
| Sequence | | | |

MGTGNDTTVVEFTLLGLSEDTTVCAILFLVFLGIYVVTLMGNISIIVLIRRSHHLHTPMYIFLCHLAF
VDIGYSSSVTPVMLMSFLRKETSLPIAGCVAQLCSVVTFGTAECFLLAAMAYDRYVAICSPLLYSTCM
SPGVCIILVGMSYLGGCVNAWTFIGCLLRLSFCGPNKVNHFFCDYSPLLKLACSHDFTFEIIPAISSG
SIIVATVCVIAISYIYILITILKMHSTKGRHKAFSTCTSHLTAVTLFYGTITFIYVMPKSSYSTDQNK
VVSVFYTVVIPMLNPLIYSLRNKEIKGALKRELRIKIFS

| | | |
|---|---|---|
| NOV28h, SNP13373969 of | SEQ ID NO: 353 | 1604 bp |
| CG53746-04, DNA Sequence | ORF Start: ATG at 648 | ORF Stop: TGA at 1581 |
| | SNP Pos: 695 | SNP Change: A to G |

ACTCACTATAGGGCTCGAGCGGCCGCCCGGGCAGGTTGGATATTTGGTGTACTTTTCCTCAATTGTGA
AATCTCTGGGTGGGGACCACAGCTCAGTGTTGAGTTACTGACCTCTTCTTGGTCCTGTGGATTAGCAT
GCAGCTAATCTGTTTGACCTCTGTTTGGAATTCGGAATTCTTAATGACTACACATCTTTGATACAATA
GATGATACCTCAAACATCCTTTTGAACAGCTGTTCTTTTCCATGAGTCTTGGTCTATTCTGACATTTA
TGTCTCCCTTCAATCACGTCTTTGGCCTTAGAAGATTGAGTTACTGGATTCTTTATATATTCTAGTGG
TCATCTCTGAAATGTGCTCAGAGAGCACCTAAATTAACCATCCAATACGAGTTGAGTGTGTTAAGTTA
AAAAAAAAAAAAAGATTTTTCTGAGTATTCCTGACCTTACATCAGTGAACATTTATGCTTTAAAGTCT
TACATAAGATACTGTGTGTGAAAGCATTTTCTTCCCAAATTTACATGAGTGCCTAAATTGTTATACTT
TTTGGTTAAATAGATATTGGAAAAATAAGTGTGCAATTATAGCATTTAATCCCATTATAATATTCATT
TGTTTTTCTTTCAGTTGGCACCATTCCCAATTTAGATGGGGACTGGAAATGACACCACTGTGGTAGAG
TTTACTCTTTTGGGGTTATCCGAGGATACTACAGTTTGTGCTATTTTATTTCTTGTGTTTCTAGGAAT
TTATGTTGTCACCTTAATGGGTAATATCAGCATAATTGTATTGATCAGAAGAAGTCATCATCTTCATA
CACCCATGTACATTTTCCTCTGCCATTTGGCCTTTGTAGACATTGGGTACTCCTCATCAGTCACACCT
GTCATGCTCATGAGCTTCCTAAGGAAAGAAACCTCTCTCCCTATTGCTGGTTGTGTGGCCCAGCTCTG
TTCTGTAGTGACGTTTGGTACGGCCGAGTGCTTCCTGCTGGCTGCCATGGCCTATGATCGCTATGTGG
CCATCTGCTCACCCCTGCTCTACTCTACCTGCATGTCCCCTGGAGTCTGCATCATCTTAGTGGGCATG
TCCTACCTGGGTGGATGTGTGAATGCTTGGACATTCATTGGCTGCTTATTAAGACTGTCCTTCTGTGG
GCCAAATAAAGTCAATCACTTTTTCTGTGACTATTCACCACTTTTGAAGCTTGCTTGTTCCCATGATT
TTACTTTTGAAATAATTCCAGCTATCTCTTCTGGATCTATCATTGTGGCCACTGTGTGTGTCATAGCC
ATATCCTACATCTATATCCTCATCACCATCCTGAAGATGCACTCCACCAAGGGCCGCCACAAGGCCTT
CTCCACCTGCACCTCCCACCTCACTGCAGTCACTCTGTTCTATGGGACCATTACCTTCATTTATGTGA
TGCCCAAGTCCAGCTACTCAACTGACCAGAACAAGGTGGTGTCTGTGTTCTACACCGTGGTGATTCCC
ATGTTGAACCCCCTGATCTACAGCCTCAGGAACAAGGAGATTAAGGGGGCTCTGAAGAGAGAGCTTAG
AATAAAAATATTTTCTTGATGAAACTAGTTAGTTTGAAGA

| | | | |
|---|---|---|---|
| NOV28h, SNP13373969 of | SEQ ID NO: 354 | 311 aa | MW at 34309.4kD |
| CG53746-04, Protein | SNP Pos: 16 | | SNP Change: Gly to Gly |
| Sequence | | | |

MGTGNDTTVVEFTLLGLSEDTTVCAILFLVFLGIYVVTLMGNISIIVLIRRSHHLHTPMYIFLCHLAF
VDIGYSSSVTPVMLMSFLRKETSLPIAGCVAQLCSVVTFGTAECFLLAAMAYDRYVAICSPLLYSTCM
SPGVCIILVGMSYLGGCVNAWTFIGCLLRLSFCGPNKVNHFFCDYSPLLKLACSHDFTFEIIPAISSG
SIIVATVCVIAISYIYILITILKMHSTKGRHKAFSTCTSHLTAVTLFYGTITFIYVMPKSSYSTDQNK
VVSVFYTVVIPMLNPLIYSLRNKEIKGALKRELRIKIFS

| | | |
|---|---|---|
| NOV28i, SNP13373970 of | SEQ ID NO: 355 | 1604 bp |
| CG53746-04, DNA Sequence | ORF Start: ATG at 648 | ORF Stop: TGA at 1581 |
| | SNP Pos: 927 | SNP Change: A to G |

ACTCACTATAGGGCTCGAGCGGCCGCCCGGGCAGGTTGGATATTTGGTGTACTTTTCCTCAATTGTGA
AATCTCTGGGTGGGGACCACAGCTCAGTGTTGAGTTACTGACCTCTTCTTGGTCCTGTGGATTAGCAT
GCAGCTAATCTGTTTGACCTCTGTTTGGAATTCGGAATTCTTAATGACTACACATCTTTGATACAATA
GATGATACCTCAAACATCCTTTTGAACAGCTGTTCTTTTCCATGAGTCTTGGTCTATTCTGACATTTA
TGTCTCCCTTCAATCACGTCTTTGGCCTTAGAAGATTGAGTTACTGGATTCTTTATATATTCTAGTGG
TCATCTCTGAAATGTGCTCAGAGAGCACCTAAATTAACCATCCAATACGAGTTGAGTGTGTTAAGTTA
AAAAAAAAAAAAAGATTTTTCTGAGTATTCCTGACCTTACATCAGTGAACATTTATGCTTTAAAGTCT
TACATAAGATACTGTGTGTGAAAGCATTTTCTTCCCAAATTTACATGAGTGCCTAAATTGTTATACTT
TTTGGTTAAATAGATATTGGAAAAATAAGTGTGCAATTATAGCATTTAATCCCATTATAATATTCATT
TGTTTTTCTTTCAGTTGGCACCATTCCCAATTTAGATGGGGACTGGAAATGACACCACTGTGGTAGAG
TTTACTCTTTTGGGATTATCCGAGGATACTACAGTTTGTGCTATTTTATTTCTTGTGTTTCTAGGAAT
TTATGTTGTCACCTTAATGGGTAATATCAGCATAATTGTATTGATCAGAAGAAGTCATCATCTTCATA
CACCCATGTACATTTTCCTCTGCCATTTGGCCTTTGTAGACATTGGGTACTCCTCATCAGTCACACCT
GTCATGCTCATGAGCTTCCTAAGGAAAGAAACCTCTCTCCCTGTTGCTGGTTGTGTGGCCCAGCTCTG
TTCTGTAGTGACGTTTGGTACGGCCGAGTGCTTCCTGCTGGCTGCCATGGCCTATGATCGCTATGTGG
CCATCTGCTCACCCCTGCTCTACTCTACCTGCATGTCCCCTGGAGTCTGCATCATCTTAGTGGGCATG
TCCTACCTGGGTGGATGTGTGAATGCTTGGACATTCATTGGCTGCTTATTAAGACTGTCCTTCTGTGG
GCCAAATAAAGTCAATCACTTTTTCTGTGACTATTCACCACTTTTGAAGCTTGCTTGTTCCCATGATT
TTACTTTTGAAATAATTCCAGCTATCTCTTCTGGATCTATCATTGTGGCCACTGTGTGTGTCATAGCC
ATATCCTACATCTATATCCTCATCACCATCCTGAAGATGCACTCCACCAAGGGCCGCCACAAGGCCTT
CTCCACCTGCACCTCCCACCTCACTGCAGTCACTCTGTTCTATGGGACCATTACCTTCATTTATGTGA
TGCCCAAGTCCAGCTACTCAACTGACCAGAACAAGGTGGTGTCTGTGTTCTACACCGTGGTGATTCCC
ATGTTGAACCCCCTGATCTACAGCCTCAGGAACAAGGAGATTAAGGGGGCTCTGAAGAGAGAGCTTAG
AATAAAAATATTTTCTTGATGAAACTAGTTAGTTTGAAGA

| | | | |
|---|---|---|---|
| NOV28i, SNP13373970 of | SEQ ID NO: 356 | 311 aa | MW at 34295.4kD |
| CG53746-04, Protein | SNP Pos: 94 | | SNP Change: Ile to Val |
| Sequence | | | |

MGTGNDTTVVEFTLLGLSEDTTVCAILFLVFLGIYVVTLMGNISIIVLIRRSHHLHTPMYIFLCHLAF
VDIGYSSSVTPVMLMSFLRKETSLPVAGCVAQLCSVVTFGTAECFLLAAMAYDRYVAICSPLLYSTCM
SPGVCIILVGMSYLGGCVNAWTFIGCLLRLSFCGPNKVNHFFCDYSPLLKLACSHDFTFEIIPAISSG
SIIVATVCVIAISYIYILITILKMHSTKGRHKAFSTCTSHLTAVTLFYGTITFIYVMPKSSYSTDQNK
VVSVFYTVVIPMLNPLIYSLRNKEIKGALKRELRIKIFS

| | | |
|---|---|---|
| NOV28j, SNP13373971 of | SEQ ID NO: 357 | 1604 bp |
| CG53746-04, DNA Sequence | ORF Start: ATG at 648 | ORF Stop: TGA at 1581 |
| | SNP Pos: 959 | SNP Change: A to G |

ACTCACTATAGGGCTCGAGCGGCCGCCCGGGCAGGTTGGATATTTGGTGTACTTTTCCTCAATTGTGA
AATCTCTGGGTGGGGACCACAGCTCAGTGTTGAGTTACTGACCTCTTCTTGGTCCTGTGGATTAGCAT
GCAGCTAATCTGTTTGACCTCTGTTTGGAATTCGGAATTCTTAATGACTACACATCTTTGATACAATA
GATGATACCTCAAACATCCTTTTGAACAGCTGTTCTTTTCCATGAGTCTTGGTCTATTCTGACATTTA
TGTCTCCCTTCAATCACGTCTTTGGCCTTAGAAGATTGAGTTACTGGATTCTTTATATATTCTAGTGG
TCATCTCTGAAATGTGCTCAGAGAGCACCTAAATTAACCATCCAATACGAGTTGAGTGTGTTAAGTTA
AAAAAAAAAAAAAGATTTTTCTGAGTATTCCTGACCTTACATCAGTGAACATTTATGCTTTAAAGTCT
TACATAAGATACTGTGTGTGAAAGCATTTTCTTCCCAAATTTACATGAGTGCCTAAATTGTTATACTT
TTTGGTTAAATAGATATTGGAAAAATAAGTGTGCAATTATAGCATTTAATCCCATTATAATATTCATT
TGTTTTTCTTTCAGTTGGCACCATTCCCAATTTAGATGGGGACTGGAAATGACACCACTGTGGTAGAG
TTTACTCTTTTGGGATTATCCGAGGATACTACAGTTTGTGCTATTTTATTTCTTGTGTTTCTAGGAAT
TTATGTTGTCACCTTAATGGGTAATATCAGCATAATTGTATTGATCAGAAGAAGTCATCATCTTCATA
CACCCATGTACATTTTCCTCTGCCATTTGGCCTTTGTAGACATTGGGTACTCCTCATCAGTCACACCT
GTCATGCTCATGAGCTTCCTAAGGAAAGAAACCTCTCTCCCTATTGCTGGTTGTGTGGCCCAGCTCTG
TTCTGTGGTGACGTTTGGTACGGCCGAGTGCTTCCTGCTGGCTGCCATGGCCTATGATCGCTATGTGG
CCATCTGCTCACCCCTGCTCTACTCTACCTGCATGTCCCCTGGAGTCTGCATCATCTTAGTGGGCATG
TCCTACCTGGGTGGATGTGTGAATGCTTGGACATTCATTGGCTGCTTATTAAGACTGTCCTTCTGTGG
GCCAAATAAAGTCAATCACTTTTTCTGTGACTATTCACCACTTTTGAAGCTTGCTTGTTCCCATGATT
TTACTTTTGAAATAATTCCAGCTATCTCTTCTGGATCTATCATTGTGGCCACTGTGTGTGTCATAGCC
ATATCCTACATCTATATCCTCATCACCATCCTGAAGATGCACTCCACCAAGGGCCGCCACAAGGCCTT
CTCCACCTGCACCTCCCACCTCACTGCAGTCACTCTGTTCTATGGGACCATTACCTTCATTTATGTGA
TGCCCAAGTCCAGCTACTCAACTGACCAGAACAAGGTGGTGTCTGTGTTCTACACCGTGGTGATTCCC
ATGTTGAACCCCCTGATCTACAGCCTCAGGAACAAGGAGATTAAGGGGGCTCTGAAGAGAGAGCTTAG
AATAAAAATATTTTCTTGATGAAACTAGTTAGTTTGAAGA

| | | | |
|---|---|---|---|
| NOV28j, SNP13373971 of | SEQ ID NO: 358 | 311 aa | MW at 34309.4kD |
| CG53746-04, Protein | SNP Pos: 104 | | SNP Change: Val to Val |
| Sequence | | | |

MGTGNDTTVVEFTLLGLSEDTTVCAILFLVFLGIYVVTLMGNISIIVLIRRSHHLHTPMYIFLCHLAF
VDIGYSSSVTPVMLMSFLRKETSLPIAGCVAQLCSVVTFGTAECFLLAAMAYDRYVAICSPLLYSTCM
SPGVCIILVGMSYLGGCVNAWTFIGCLLRLSFCGPNKVNHFFCDYSPLLKLACSHDFTFEIIPAISSG
SIIVATVCVIAISYIYILITILKMHSTKGRHKAFSTCTSHLTAVTLFYGTITFIYVMPKSSYSTDQNK
VVSVFYTVVIPMLNPLIYSLRNKEIKGALKRELRIKIFS

| | | |
|---|---|---|
| NOV28k, SNP13373972 of | SEQ ID NO: 359 | 1604 bp |
| CG53746-04, DNA Sequence | ORF Start: ATG at 648 | ORF Stop: TGA at 1581 |
| | SNP Pos: 1058 | SNP Change: C to T |

ACTCACTATAGGGCTCGAGCGGCCGCCCGGGCAGGTTGGATATTTGGTGTACTTTTCCTCAATTGTGA
AATCTCTGGGTGGGGACCACAGCTCAGTGTTGAGTTACTGACCTCTTCTTGGTCCTGTGGATTAGCAT
GCAGCTAATCTGTTTGACCTCTGTTTGGAATTCGGAATTCTTAATGACTACACATCTTTGATACAATA
GATGATACCTCAAACATCCTTTTGAACAGCTGTTCTTTTCCATGAGTCTTGGTCTATTCTGACATTTA
TGTCTCCCTTCAATCACGTCTTTGGCCTTAGAAGATTGAGTTACTGGATTCTTTATATATTCTAGTGG
TCATCTCTGAAATGTGCTCAGAGAGCACCTAAATTAACCATCCAATACGAGTTGAGTGTGTTAAGTTA
AAAAAAAAAAAAAGATTTTTCTGAGTATTCCTGACCTTACATCAGTGAACATTTATGCTTTAAAGTCT
TACATAAGATACTGTGTGTGAAAGCATTTTCTTCCCAAATTTACATGAGTGCCTAAATTGTTATACTT
TTTGGTTAAATAGATATTGGAAAAATAAGTGTGCAATTATAGCATTTAATCCCATTATAATATTCATT
TGTTTTTCTTTCAGTTGGCACCATTCCCAATTTAGATGGGGACTGGAAATGACACCACTGTGGTAGAG
TTTACTCTTTTGGGATTATCCGAGGATACTACAGTTTGTGCTATTTTATTTCTTGTGTTTCTAGGAAT
TTATGTTGTCACCTTAATGGGTAATATCAGCATAATTGTATTGATCAGAAGAAGTCATCATCTTCATA
CACCCATGTACATTTTCCTCTGCCATTTGGCCTTTGTAGACATTGGGTACTCCTCATCAGTCACACCT
GTCATGCTCATGAGCTTCCTAAGGAAAGAAACCTCTCTCCCTATTGCTGGTTGTGTGGCCCAGCTCTG
TTCTGTAGTGACGTTTGGTACGGCCGAGTGCTTCCTGCTGGCTGCCATGGCCTATGATCGCTATGTGG
CCATCTGCTCACCCCTGCTCTACTCTACCTGCATGTCTCCTGGAGTCTGCATCATCTTAGTGGGCATG
TCCTACCTGGGTGGATGTGTGAATGCTTGGACATTCATTGGCTGCTTATTAAGACTGTCCTTCTGTGG
GCCAAATAAAGTCAATCACTTTTTCTGTGACTATTCACCACTTTTGAAGCTTGCTTGTTCCCATGATT
TTACTTTTGAAATAATTCCAGCTATCTCTTCTGGATCTATCATTGTGGCCACTGTGTGTGTCATAGCC
ATATCCTACATCTATATCCTCATCACCATCCTGAAGATGCACTCCACCAAGGGCCGCCACAAGGCCTT
CTCCACCTGCACCTCCCACCTCACTGCAGTCACTCTGTTCTATGGGACCATTACCTTCATTTATGTGA
TGCCCAAGTCCAGCTACTCAACTGACCAGAACAAGGTGGTGTCTGTGTTCTACACCGTGGTGATTCCC
ATGTTGAACCCCCTGATCTACAGCCTCAGGAACAAGGAGATTAAGGGGGCTCTGAAGAGAGAGCTTAG
AATAAAAATATTTTCTTGATGAAACTAGTTAGTTTGAAGA

| | | | |
|---|---|---|---|
| NOV28k, SNP13373972 of | SEQ ID NO: 360 | 311 aa | MW at 34309.4kD |
| CG53746-04, Protein | SNP Pos: 137 | | SNP Change: Ser to Ser |
| Sequence | | | |

MGTGNDTTVVEFTLLGLSEDTTVCAILFLVFLGIYVVTLMGNISIIVLIRRSHHLHTPMYIFLCHLAF
VDIGYSSSVTPVMLMSFLRKETSLPIAGCVAQLCSVVTFGTAECFLLAAMAYDRYVAICSPLLYSTCM
SPGVCIILVGMSYLGGCVNAWTFIGCLLRLSFCGPNKVNHFFCDYSPLLKLACSHDFTFEIIPAISSG
SIIVATVCVIAISYIYILITILKMHSTKGRHKAFSTCTSHLTAVTLFYGTITFIYVMPKSSYSTDQNK
VVSVFYTVVIPMLNPLIYSLRNKEIKGALKRELRIKIFS

| | | |
|---|---|---|
| NOV28l, SNP13382433 of | SEQ ID NO: 361 | 1604 bp |
| CG53746-04, DNA Sequence | ORF Start: ATG at 648 | ORF Stop: TGA at 1581 |
| | SNP Pos: 1482 | SNP Change: A to G |

ACTCACTATAGGGCTCGAGCGGCCGCCCGGGCAGGTTGGATATTTGGTGTACTTTTCCTCAATTGTGA
AATCTCTGGGTGGGGACCACAGCTCAGTGTTGAGTTACTGACCTCTTCTTGGTCCTGTGGATTAGCAT
GCAGCTAATCTGTTTGACCTCTGTTTGGAATTCGGAATTCTTAATGACTACACATCTTTGATACAATA
GATGATACCTCAAACATCCTTTTGAACAGCTGTTCTTTTCCATGAGTCTTGGTCTATTCTGACATTTA
TGTCTCCCTTCAATCACGTCTTTGGCCTTAGAAGATTGAGTTACTGGATTCTTTATATATTCTAGTGG
TCATCTCTGAAATGTGCTCAGAGAGCACCTAAATTAACCATCCAATACGAGTTGAGTGTGTTAAGTTA
AAAAAAAAAAAAAGATTTTTCTGAGTATTCCTGACCTTACATCAGTGAACATTTATGCTTTAAAGTCT
TACATAAGATACTGTGTGTGAAAGCATTTTCTTCCCAAATTTACATGAGTGCCTAAATTGTTATACTT
TTTGGTTAAATAGATATTGGAAAAATAAGTGTGCAATTATAGCATTTAATCCCATTATAATATTCATT
TGTTTTTCTTTCAGTTGGCACCATTCCCAATTTAGATGGGGACTGGAAATGACACCACTGTGGTAGAG
TTTACTCTTTTGGGATTATCCGAGGATACTACAGTTTGTGCTATTTTATTTCTTGTGTTTCTAGGAAT
TTATGTTGTCACCTTAATGGGTAATATCAGCATAATTGTATTGATCAGAAGAAGTCATCATCTTCATA
CACCCATGTACATTTTCCTCTGCCATTTGGCCTTTGTAGACATTGGGTACTCCTCATCAGTCACACCT
GTCATGCTCATGAGCTTCCTAAGGAAAGAAACCTCTCTCCCTATTGCTGGTTGTGTGGCCCAGCTCTG
TTCTGTAGTGACGTTTGGTACGGCCGAGTGCTTCCTGCTGGCTGCCATGGCCTATGATCGCTATGTGG
CCATCTGCTCACCCCTGCTCTACTCTACCTGCATGTCCCCTGGAGTCTGCATCATCTTAGTGGGCATG
TCCTACCTGGGTGGATGTGTGAATGCTTGGACATTCATTGGCTGCTTATTAAGACTGTCCTTCTGTGG
GCCAAATAAAGTCAATCACTTTTTCTGTGACTATTCACCACTTTTGAAGCTTGCTTGTTCCCATGATT
TTACTTTTGAAATAATTCCAGCTATCTCTTCTGGATCTATCATTGTGGCCACTGTGTGTGTCATAGCC
ATATCCTACATCTATATCCTCATCACCATCCTGAAGATGCACTCCACCAAGGGCCGCCACAAGGCCTT
CTCCACCTGCACCTCCCACCTCACTGCAGTCACTCTGTTCTATGGGACCATTACCTTCATTTATGTGA
TGCCCAAGTCCAGCTACTCAACTGACCAGAACAAGGTGGTGTCTGTGTTCTACGCCGTGGTGATTCCC
ATGTTGAACCCCCTGATCTACAGCCTCAGGAACAAGGAGATTAAGGGGGCTCTGAAGAGAGAGCTTAG
AATAAAAATATTTTCTTGATGAAACTAGTTAGTTTGAAGA

| | | | |
|---|---|---|---|
| NOV28l, SNP13382433 of | SEQ ID NO: 362 | 311 aa | MW at 34279.4kD |
| CG53746-04, Protein | SNP Pos: 279 | | SNP Change: Thr to Ala |
| Sequence | | | |

MGTGNDTTVVEFTLLGLSEDTTVCAILFLVFLGIYVVTLMGNISIIVLIRRSHHLHTPMYIFLCHLAF
VDIGYSSSVTPVMLMSFLRKETSLPIAGCVAQLCSVVTFGTAECFLLAAMAYDRYVAICSPLLYSTCM
SPGVCIILVGMSYLGGCVNAWTFIGCLLRLSFCGPNKVNHFFCDYSPLLKLACSHDFTFEIIPAISSG
SIIVATVCVIAISYIYILITILKMHSTKGRHKAFSTCTSHLTAVTLFYGTITFIYVMPKSSYSTDQNK
VVSVFYAVVIPMLNPLIYSLRNKEIKGALKRELRIKIFS

[0506] A ClustalW comparison of the above protein sequences yields the following sequence alignment shown in Table 28B.

TABLE 28B
Comparison of the NOV28 protein sequences.

NOV28a MGTGNDTTVVEFTLLGLSEDTTVCAILFLVFLGIYVVTLMGNISIIVLIRRSHHLHTPMY
NOV25b MGTGNDTTVVEFTLLGLSEDTTVCAILFLVFLGIYVVTLMGNISIIVLIRRSHHLHTPMY
NOV25c MGTGNDTTVVEFTLLGLSEDTTVCAILFLVFLGIYVVTLMGNISIIVLIRRSHHLHTPMY
NOV25d MGTGNDTTVVEFTLLGLSEDTTVCAILFLVFLGIYVVTLMGNISIIVLIRRSHHLNTPMY
NOV28a IFLCHLAFVDIGYSSSVTPVMLMSFLRKETSLPIAGCVAQLCSVVTFGTAECFLLAAMAY
NOV28b IFLCHLAFVDIGYSSSVTPVMLMSFLRKETSLPVAGCVAQLCSVVTFGTAECFLLAAMAY
NOV28c IFLCHLAFVDIGYSSSVTPVMLMSFLRKETSLPVAGCVAQLCSVVTFGTAECFLLAAMAY
NOV28d IFLCHLAFVDIGYSSSVTPVMLMSFLRKETSLPVAGCVAQLCSVVTFGTAECFLLAAMAY
NOV28a DRYVAICSPLLYSTCMSPGVCIILVGMSYLGGCVNAWTFIGCLLRLSFCGPNKVNHFFCD
NOV28b DRYVAICSPLLYSTcMSPGVCIILVGMSYLGGCVNAWTFIGCLLRLSFCGPNKVNHFFCD
NOV28c DRYVAICSPLLYSTcMSPGVCIILVGMSYLGGCVNAWTFIGCLLRLSFCGPNKVNHFFCD
NOV28d DRYVAICSPLLYSTCMSPGVCIILVGMSYLGGCVNAWTFIGCLLRLSFCGPNKVNHFFCD
NOV28a YSPLLKLACSHDFTFEIIPAISSGSIIVATVCVIAISYIYILITILKMHSTKGRHKAFST
NOV28b YSPLLKLACSHDFTFEIIPAISSGSIIVATVCVIAISYIYILITILKMHSTKGRHKAFST
NOV28c YSPLLKLACSHDFTFEIIPAISSGSIIVATVCVIAISYIYILITILKMHSTKGRHKAFST
NOV28d YSPLLKLACSHDFTFEIIPAISSGSIIVATVCVIAISYIYILITILKMHSTKGRHKAFST
NOV28a CTSHLTAVTLFYGTITFIYVMPKSSYSTDQNKVVSVFYTVVIPMLNPLIYSLRNKEIKGA
NOV28b CTSHLTAVTLFYGTITFIYVMPKSSYSTDQNKVVSVFYTVVIPMLNPLIYSLRNKEIKGA
NOV28c CTSHLTAVTLFYGTITFIYVMPKSSYSTDQNKVVSVFYTVVIPMLNPLIYSLRNKEIKGA
NOV28d CTSHLTAVTLFYGTITFIYVMPKSSYSTDQNKVVSVFYTVVIPMLNPLIYSLRNKEIKGA
NOV28a LKRELRIKIFS
NOV28b LKRELRIKIFS
NOV28c LKRELRIKIFS
NOV28d LKRELRIKIFS
NOV28a (SEQ ID NO: 340)
NOV28b (SEQ ID NO: 342)
NOV28c (SEQ ID NO: 344)
NOV28d (SEQ ID NO: 346)

[0507] Further analysis of the NOV28a protein yielded the following properties shown in Table 28C.

TABLE 28C
Protein Sequence Properties NOV28a

| | |
|---|---|
| SignalP analysis: | Cleavage site between residues 42 and 43 |
| PSORT II analysis: | |

| | |
|---|---|
| PSG: | a new signal peptide prediction method |
| | N-region: length 11; pos.chg 0; neg.chg 2 |
| | H-region: length 7; peak value 0.00 |
| | PSG score: −4.40 |
| GvH: | von Heijne's method for signal seq. recognition |
| | GvH score (threshold: −2.1): −5.11 |
| | possible cleavage site: between 38 and 39 |

>>> Seems to have no N-terminal signal peptide

| ALOM: | Klein et al's method for TM region allocation | | |
|---|---|---|---|
| | Init position for calculation: 1 | | |
| | Tentative number of TMS(s) for the threshold 0.5: 6 | | |
| | INTEGRAL | Likelihood = −11.46 | Transmembrane 23-39 |
| | INTEGRAL | Likelihood = −1.49 | Transmembrane 101-117 |
| | INTEGRAL | Likelihood = −2.23 | Transmembrane 140-156 |
| | INTEGRAL | Likelihood = −9.82 | Transmembrane 206-222 |
| | INTEGRAL | Likelihood = −0.85 | Transmembrane 245-261 |
| | INTEGRAL | Likelihood = −3.13 | Transmembrane 273-289 |

| | |
|---|---|
| PERIPHERAL | Likelihood = 1.48 (at 61) |

| | |
|---|---|
| | ALOM score: −11.46 (number of TMSs: 6) |
| MTOP: | Prediction of membrane topology (Hartmann et al.) |
| | Center position for calculation: 30 |
| | Charge difference: 7.5 C(3.5) − N(−4.0) |
| | C > N: C-terminal side will be inside |

>>> membrane topology: type 3b
MITDISC: discrimination of mitochondrial targeting seq

| | | | |
|---|---|---|---|
| R content: | 0 | Hyd Moment(75): | 5.92 |
| Hyd Moment(95): | 6.18 | G content: | 2 |
| D/E content: | 2 | S/T content: | 3 |

Score: −7.11

Gavel: prediction of cleavage sites for mitochondrial preseq

cleavage site motif not found

NUCDISC: discrimination of nuclear localization signals

pat4: none
pat7: none
bipartite: none
content of basic residues: 6.8%
NLS Score: −0.47

KDEL: ER retention motif in the C-terminus: none
ER Membrane Retention Signals:

KKXX-like motif in the C-terminus: IKIF

SKL: peroxisomal targeting signal in the C-terminus: none
PTS2: 2nd peroxisomal targeting signal: none
VAC: possible vacuolar targeting motif: none
RNA-binding motif: none
Actinin-type actin-binding motif:

type 1: none
type 2: none

NMYR: N-myristoylation pattern: none
Prenylation motif: none
memYQRL: transport motif from cell surface to Golgi: none
Tyrosines in the tail: none
Dileucine motif in the tail: none
checking 63 PROSITE DNA binding motifs: none
checking 71 PROSITE ribosomal protein motifs: none
checking 33 PROSITE prokaryotic DNA binding motifs: none

| | |
|---|---|
| NNCN: | Reinhardt's method for Cytoplasmic/Nuclear discrimination |
| | Prediction: cytoplasmic |
| | Reliability: 94.1 |
| COIL: | Lupas's algorithm to detect coiled-coil regions |
| | total: 0 residues |

Final Results (k = 9/23):

55.6%: endoplasmic reticulum
22.2%: vacuolar
11.1%: Golgi
11.1%: mitochondrial

>> prediction for CG53746-04 is end (k = 9)

[0508] A search of the NOV28a protein against the Geneseq database, a proprietary database that contains sequences published in patents and patent publication, yielded several homologous proteins shown in Table 28D.

TABLE 28D
Geneseq Results for NOV28a

| | | NOV28a | Identities/ | |
|---|---|---|---|---|
| | | Residues/ | Similarities for | |
| Geneseq | Protein/Organism/Length | Match | the Matched | Expect |
| Identifier | [Patent #, Date] | Residues | Region | Value |
| AAG66704 | Human GPCR2c polypeptide - | 1 . . . 311 | 311/311 (100%) | e−180 |
| | Homo sapiens, 311 aa. | 1 . . . 311 | 311/311 (100%) | |
| | [WO200160865-A2, 23-AUG- | | | |
| | 2001] | | | |
| AAU95624 | Human olfactory and pheromone | 1 . . . 311 | 310/311 (99%) | e−180 |
| | G protein-coupled receptor #111 - | 1 . . . 311 | 311/311 (99%) | |
| | Homo sapiens, 311 aa. | | | |
| | [WO200224726-A2, 28-MAR- | | | |
| | 2002] | | | |
| AAG66702 | Human GPCR2a polypeptide - | 1 . . . 311 | 310/311 (99%) | e−180 |
| | Homo sapiens, 311 aa. | 1 . . . 311 | 311/311 (99%) | |
| | [WO200160865-A2, 23-AUG- | | | |
| | 2001] | | | |
| AAE25068 | Human G-protein coupled | 1 . . . 311 | 309/311 (99%) | e−180 |
| | receptor (GCREC)-8 protein - | 1 . . . 311 | 311/311 (99%) | |
| | Homo sapiens, 311 aa. | | | |
| | [WO200246230-A2, 13-JUN- | | | |
| | 2002] | | | |
| AAG66703 | Human GPCR2b polypeptide - | 1 . . . 311 | 309/311 (99%) | e−180 |
| | Homo sapiens, 311 aa. | 1 . . . 311 | 310/311 (99%) | |
| | [WO200160865-A2, 23-AUG- | | | |
| | 2001] | | | |

[0509] In a BLAST search of public sequence databases, the NOV28a protein was found to have homology to the proteins shown in the BLASTP data in Table 28E.

TABLE 28E
Public BLASTP Results for NOV28a

| | | NOV28a | Identities/ | |
|---|---|---|---|---|
| Protein | | Residues/ | Similarities for | |
| Accession | | Match | the Matched | Expect |
| Number | Protein/Organism/Length | Residues | Portion | Value |
| Q8WZ94 | Olfactory receptor 5P3 | 1 . . . 311 | 310/311 (99%) | e−180 |
| | (Olfactory receptor-like protein | 1 . . . 311 | 311/311 (99%) | |
| | JCG1) - Homo sapiens (Human), | | | |
| | 311 aa. | | | |
| CAD37573 | Sequence 175 from Patent | 1 . . . 311 | 304/311 (97%) | e−175 |
| | WO0224726 - Homo sapiens | 1 . . . 311 | 307/311 (97%) | |
| | (Human), 311 aa. | | | |
| Q8NGM2 | Seven transmembrane helix | 59 . . . 311 | 252/253 (99%) | e−145 |
| | receptor - Homo sapiens | 1 . . . 253 | 253/253 (99%) | |
| | (Human), 253 aa. | | | |
| Q8VG42 | Olfactory receptor MOR204-6 - | 1 . . . 303 | 240/303 (79%) | e−138 |
| | Mus musculus (Mouse), 310 aa. | 1 . . . 303 | 267/303 (87%) | |
| Q8VEZ0 | Olfactory receptor MOR204-32 - | 1 . . . 303 | 236/303 (77%) | e−136 |
| | Mus musculus (Mouse), 312 aa. | 1 . . . 303 | 266/303 (86%) | |

[0510] PFam analysis indicates that the NOV28a protein contains the domains shown in the Table 28F.

TABLE 28F
Domain Analysis of NOV28a

| | NOV28a | Identities/ | |
|---|---|---|---|
| | Match | Similarities | |
| Pfam Domain | Region | for the Matched Region | Expect Value |
| 7tm_1 | 41 . . . 290 | 56/276 (20%) | 2.5e−34 |
| | | 179/276 (65%) | |

### Example 29

[0511] The NOV29 clone was analyzed, and the nucleotide and encoded polypeptide sequences are shown in Table 29A.

TABLE 29A
NOV29 Sequence Analysis

| | | |
|---|---|---|
| NOV29a, CG53767-02 | SEQ ID NO: 363 | 1378 bp |
| DNA Sequence | ORF Start: ATG at 473 | ORF Stop: TAA at 1331 |

TGAAATTGGAGAGTCATACAAAATCCAGAATGGAGAAAAGAGAGATAAACAGTGCTTTTGGGGTAAAA
TCCAGGTATAGGTATTTGGGCCCACTCTATGTCATCTATACATATTATCATATTAGAATCATTCTTCT
CTTCACTCAGGCTCCTGACCTTGACCTCTTTCCAGGTGCATTTAACTCCCTTTCCTCAGGTTCTCTAA
GAGTTGCCTGACACTTGCCCAGGTCCCCTGAATAAAATACAGGTAAATCAGTGCATAAGAAGCTTTAT
ACAGTGATCTCAGACTTGTGACCAAGAGCCCCTCTGCACCATTGATAGACAGTGGCCGTGCCCACCAG
GAGGATGGGCAATCACACTGCAGTGAGCCTATTCCTTCTGTGGGGATTTTCCAGTTTTTCAGACCTGC
AGAGTCTACTTTTTGTGGTGATTCTCTTCTACATGTGACCATCCTAGCTGCAAACGTGTCCATAATGG
GGGCCATCAAGCTCAGCCACAACCTTCACACTCCTATGTACTTTTTCCTCTGTGGCCTGTCCTTTTCA
GAAACTTGTACCACTGTGGTAGTAATCCCTCGCATGTTGGTGGACTTTCTATCAGAGAGCAAGACCAT
TTCTCTTCCTGAGTGTGCCACACAGATGTTTTTCTTTCTGGGCTTTGCATCCAACAACTGTTTCATCA
TGGCCGCTATGTCCTACGACCGCTACACGGCCATCCACAACCCACTGCAGTACCACACCCTTATGACA
AGAAAGATCTGCTTGCAGATGATGATGGCTTCTTGGATGGTTGGGTTCCTGTTTTCTCTGTGCATCAT
CGTCACTGTATTCAACTTGTCTCTTTGCGACTTGAACACTATCCAGCACTATTTCTGTGATATCTCAC
CAGTGGTCTCCCTTGCTTGTAATTACACTTTCTATCATGAAATGGCTATTTTTGTGCTCTCTGCCTTT
GTGTTGGTGGGCAGCTGTATTTTAATTATGATTTCCTATGTCTTCATTGTGTTCATAGTCATAAAGAT
GCCCTCTGCAAAGGGGAGGTCTAAGGCCTTCTCAACTTGCTCCTCCCACCTCACTGTTGTGTCCATAC
ACTATGGATTTGCTTGCTTTGTCTATTTGAGGCCCAAGAACAGCAACTCCTTCGATGAAGACATGCCG
ACGGCCATGATATATACAATACTGATGCCTCTGCTTAACCCCATCGTGTACAGTCTGAGAAACAAAGA
AATGCAGATAGCCCTAAGAAAAACACTAGGCAGTGTATTTGGGGTTTTCCCTCAGAAGACAAAAAAAG
AGCCTGAACATTTAAAAAAATTACACAGCATTGATAAATAAAGGTGAGAAAAGCGAAAAAAAAAAAAA
AAAAAAAAAAAAAAAGGG

| | | | |
|---|---|---|---|
| NOV29a, CG53767-02 | SEQ ID NO: 364 | 286 aa | MW at 32538.4kD |
| Protein Sequence | | | |

MGAIKLSHNLHTPMYFFLCGLSFSETCTTVVVIPRMLVDFLSESKTISLPECATQMFFFLGFASNNCF
IMAANSYDRYTAIHNPLQYHTLMTRKICLQMMMASWMVGFLFSLCIIVTVFNLSLCDLNTIQHYFCDI
SPVVSLACNYTFYHEMAIFVLSAFVLVGSCILIMISYVFIVFIVIKMPSAKGRSKAFSTCSSHLTVVS
IHYGFACFVYLRPKNSNSFDEDMPTAMIYTILMPLLNPIVYSLRNKEMQIALRKTLGSVFGVFPQKTK
KEPEHLKKLHSIDK

| | | |
|---|---|---|
| NOV29b, CG53767-01 | SEQ ID NO: 365 | 1028 bp |
| DNA Sequence | ORF Start: ATG at 23 | ORF Stop: TAA at 1007 |

AGTGGCCGTGCCCACCAGGAGGATGGGCAATCACACTGCAGTGAGCCTATTCCTTCTGTGGGGATTTT
CCAGTTTTTCAGACCTGCAGAGTCTACTTTGTGGTGATTCTCTTCTACATGTGACCATCCTAGCTGCA
AACGTGTCCATAATGGGGGCCATCAAGCTCAGCCACAACCTTCACACTCCTATGTACTTTTTCCTCTG
TGGCCTGTCCTTTTCAGAAACTTGTACCACTGTGGTAGTAATCCCTCGCATGTTGGTGGACTTTCTAT
CAGAGAGCAAGACCATTTCTCTTCCTGAGTGTGCCACACAGATGTTTTTCTTTCTGGGCTTTGCATCC
AACAACTGTTTCATCATGGCCGCTATGTCCTACGACCGCTACACGGCCATCCACAACCCACTGCAGTA
CCACACCCTTATGACAAGAAAGATCTGCTTGCAGATGATGATGGCTTCTTGGATGGTTGGGTTCCTGT
TTTCTCTGTGCATCATCGTCACTGTATTCAACTTGTCTCTTTGCGACTTGAACACTATCCAGCACTAT
TTCTGTGATATCTCACCAGTGGTCTCCCTTGCTTGTAATTACACTTTCTATCATGAAATGGCTATTTT
TGTGCTCTCTGCCTTTGTGTTGGTGGGCAGCTGTATTTTAATTATGATTTCCTATGTCTTCATTGTGT
TCATAGTCATAAAGATGCCCTCTGCAAAGGGGAGGTCTAAGGCCTTCTCAACTTGCTCCTCCCACCTC
ACTGTTGTGTCCATACACTATGGATTTGCTTGCTTTGTCTATTTGAGGCCCAAGAACAGCAACTCCTT
CGATGAAGACATGCTGACGGCCATGATATATACAATACTGATGCCTCTGCTTAACCCCATCGTGTACA
GTCTGAGAAACAAAGAAATGCAGATAGCCCTAAGAAAAACACTAGGCAGTGTATTTGGGGTTTTCCCT
CAGAAGACAAAAAAAGAGCCTGAACATTTAAAAAAATTACACAGCATTGATAAATAAAGGTGAGAAAA
GTGGAGTA

| | | | |
|---|---|---|---|
| NOV29b, CG53767-01 | SEQ ID NO: 366 | 328 aa | MW at 37015.5kD |
| Protein Sequence | | | |

MGNHTAVSLFLLWGFSSFSDLQSLLCGDSLLHVTILAANVSIMGAIKLSHNLHTPMYFFLCGLSFSET
CTTVVVIPRMLVDFLSESKTISLPECATQMFFFLGFASNNCFIMAAMSYDRYTAIHNPLQYHTLMTRK
ICLQMMMASWMVGFLFSLCIIVTVFNLSLCDLNTIQHYFCDISPVVSLACNYTFYHEMAIFVLSAFVL
VGSCILIMISYVFIVFIVIKMPSAKGRSKAFSTCSSHLTVVSIHYGFACFVYLRPKNSNSFDEDMLTA
MIYTILMPLLNPIVYSLRNKEMQIALRKTLGSVFGVFPQKTKKEPEHLKKLHSIDK

| | | |
|---|---|---|
| NOV29c, SNP13382437 of | SEQ ID NO: 367 | 1378 bp |
| CG53767-02, DNA Sequence | ORF Start: ATG at 473 | ORF Stop: TAA at 1331 |
| | SNP Pos: 961 | SNP Change: G to A |

TGAAATTGGAGAGTCATACAAAATCCAGAATGGAGAAAAGAGAGATAAACAGTGCTTTTGGGGTAAAA
TCCAGGTATAGGTATTTGGGCCCACTCTATGTCATCTATACATATTATCATATTAGAATCATTCTTCT
CTTCACTCAGGCTCCTGACCTTGACCTCTTTCCAGGTGCATTTAACTCCCTTTCCTCAGGTTCTCTAA
GAGTTGCCTGACACTTGCCCAGGTCCCCTGAATAAAATACAGGTAAATCAGTGCATAAGAAGCTTTAT
ACAGTGATCTCAGACTTGTGACCAAGAGCCCCTCTGCACCATTGATAGACAGTGGCCGTGCCCACCAG
GAGGATGGGCAATCACACTGCAGTGAGCCTATTCCTTCTGTGGGGATTTTCCAGTTTTTCAGACCTGC
AGAGTCTACTTTTTGTGGTGATTCTCTTCTACATGTGACCATCCTAGCTGCAAACGTGTCCATAATGG
GGGCCATCAAGCTCAGCCACAACCTTCACACTCCTATGTACTTTTTCCTCTGTGGCCTGTCCTTTTCA
GAAACTTGTACCACTGTGGTAGTAATCCCTCGCATGTTGGTGGACTTTCTATCAGAGAGCAAGACCAT
TTCTCTTCCTGAGTGTGCCACACAGATGTTTTTCTTTCTGGGCTTTGCATCCAACAACTGTTTCATCA
TGGCCGCTATGTCCTACGACCGCTACACGGCCATCCACAACCCACTGCAGTACCACACCCTTATGACA
AGAAAGATCTGCTTGCAGATGATGATGGCTTCTTGGATGGTTGGGTTCCTGTTTTCTCTGTGCATCAT
CGTCACTGTATTCAACTTGTCTCTTTGCGACTTGAACACTATCCAGCACTATTTCTGTGATATCTCAC
CAGTGGTCTCCCTTGCTTGTAATTACACTTTCTATCATGAAATGGCTATTTTTGTGCTCTCTGCCTTT
GTGTTGGTAGGCAGCTGTATTTTAATTATGATTTCCTATGTCTTCATTGTGTTCATAGTCATAAAGAT
GCCCTCTGCAAAGGGGAGGTCTAAGGCCTTCTCAACTTGCTCCTCCCACCTCACTGTTGTGTCCATAC
ACTATGGATTTGCTTGCTTTGTCTATTTGAGGCCCAAGAACAGCAACTCCTTCGATGAAGACATGCCG
ACGGCCATGATATATACAATACTGATGCCTCTGCTTAACCCCATCGTGTACAGTCTGAGAAACAAAGA
AATGCAGATAGCCCTAAGAAAAACACTAGGCAGTGTATTTGGGGTTTTCCCTCAGAAGACAAAAAAAG
AGCCTGAACATTTAAAAAAATTACACAGCATTGATAAATAAAGGTGAGAAAGCGAAAAAAAAAAAAAA
AAAAAAAAAAAAAAAGGG

| | | | |
|---|---|---|---|
| NOV29c, SNP13382437 of | SEQ ID NO: 368 | 286 aa | MW at 32538.4kD |
| CG53767-02, Protein | SNP Pos: 163 | | SNP Change: Val to Val |
| Sequence | | | |

MGAIKLSHNLHTPMYFFLCGLSFSETCTTVVVIPRNLVDFLSESKTISLPECATQMFFFLGFASNNCF
IMAANSYDRYTAIHNPLQYHTLMTRKICLQMMMASWMVGFLFSLCIIVTVFNLSLCDLNTIQHYFCDI
SPVVSLACNYTFYHEMAIFVLSAFVLVGSCILIMISYVFIVFIVIKMPSAKGRSKAFSTCSSHLTVVS
IHYGFACFVYLRPKNSNSFDEDMPTAMIYTILMPLLNPIVYSLRNKEMQIALRKTLGSVFGVFPQKTK
KEPEHLKKLHSIDK

| | | |
|---|---|---|
| NOV29d, SNP13382436 of | SEQ ID NO: 369 | 1378 bp |
| CG53767-02, DNA Sequence | ORF Start: ATG at 473 | ORF Stop: TAA at 1331 |
| | SNP Pos: 1283 | SNP Change: A to G |

TGAAATTGGAGAGTCATACAAAATCCAGAATGGAGAAAAGAGAGATAAACAGTGCTTTTGGGGTAAAA
TCCAGGTATAGGTATTTGGGCCCACTCTATGTCATCTATACATATTATCATATTAGAATCATTCTTCT
CTTCACTCAGGCTCCTGACCTTGACCTCTTTCCAGGTGCATTTAACTCCCTTTCCTCAGGTTCTCTAA
GAGTTGCCTGACACTTGCCCAGGTCCCCTGAATAAAATACAGGTAAATCAGTGCATAAGAAGCTTTAT
ACAGTGATCTCAGACTTGTGACCAAGAGCCCCTCTGCACCATTGATAGACAGTGGCCGTGCCCACCAG
GAGGATGGGCAATCACACTGCAGTGAGCCTATTCCTTCTGTGGGGATTTTCCAGTTTTTCAGACCTGC
AGAGTCTACTTTTTGTGGTGATTCTCTTCTACATGTGACCATCCTAGCTGCAAACGTGTCCATAATGG
GGGCCATCAAGCTCAGCCACAACCTTCACACTCCTATGTACTTTTTCCTCTGTGGCCTGTCCTTTTCA
GAAACTTGTACCACTGTGGTAGTAATCCCTCGCATGTTGGTGGACTTTCTATCAGAGAGCAAGACCAT
TTCTCTTCCTGAGTGTGCCACACAGATGTTTTTCTTTCTGGGCTTTGCATCCAACAACTGTTTCATCA
TGGCCGCTATGTCCTACGACCGCTACACGGCCATCCACAACCCACTGCAGTACCACACCCTTATGACA
AGAAAGATCTGCTTGCAGATGATGATGGCTTCTTGGATGGTTGGGTTCCTGTTTTCTCTGTGCATCAT
CGTCACTGTATTCAACTTGTCTCTTTGCGACTTGAACACTATCCAGCACTATTTCTGTGATATCTCAC
CAGTGGTCTCCCTTGCTTGTAATTACACTTTCTATCATGAAATGGCTATTTTTGTGCTCTCTGCCTTT
GTGTTGGTGGGCAGCTGTATTTTAATTATGATTTCCTATGTCTTCATTGTGTTCATAGTCATAAAGAT
GCCCTCTGCAAAGGGGAGGTCTAAGGCCTTCTCAACTTGCTCCTCCCACCTCACTGTTGTGTCCATAC
ACTATGGATTTGCTTGCTTTGTCTATTTGAGGCCCAAGAACAGCAACTCCTTCGATGAAGACATGCCG
ACGGCCATGATATATACAATACTGATGCCTCTGCTTAACCCCATCGTGTACAGTCTGAGAAACAAAGA
AATGCAGATAGCCCTAAGAAAAACACTAGGCAGTGTATTTGGGGTTTTCCCTCAGAAGGCAAAAAAAG
AGCCTGAACATTTAAAAAAATTACACAGCATTGATAAATAAAGGTGAGAAAAGCGAAAAAAAAAAAAA
AAAAAAAAAAAAAAAGGG

| | | | |
|---|---|---|---|
| NOV29d, SNP13382436 of | SEQ ID NO: 370 | 286 aa | MW at 32508.4kD |
| CG53767-02, Protein | SNP Pos: 271 | SNP Change: Thr to Ala | |
| Sequence | | | |

MGAIKLSHNLHTPMYFFLCGLSFSETCTTVVVIPRMLVDFLSESKTISLPECATQMFFFLGFASNNCF
IMAANSYDRYTAIHNPLQYHTLMTRKICLQMMMASWMVGFLFSLCIIVTVFNLSLCDLNTIQHYFCDI
SPVVSLACNYTFYHEMAIFVLSAFVLVGSCILIMISYVFIVFIVIKMPSAKGRSKAFSTCSSHLTVVS
IHYGFACFVYLRPKNSNSFDEDMPTAMIYTILMPLLNPIVYSLRNKEMQIALRKTLGSVFGVFPQKAK
KEPEHLKKLHSIDK

[0512] A ClustalW comparison of the above protein sequences yields the following sequence alignment shown in Table 29B.

TABLE 29B
Comparison of the NOV29 protein sequences.

NOV29a ------------------------------------------MGAIKLSHNLHTPMYFFL
NOV29b MGNHTAVSLFLLWGFSSFSDLQSLLCGDSLLHVTILAANVSIMGAIKLSHNLHTPMYFFL
NOV29a CGLSFSETCTTVVVIPRNLVDFLSESKTISLPECATQMFFFLGFASNNCFIMAAMSYDRY
NOV29b CGLSFSETCTTVVVIPRMLVDFLSESKTISLPECATQMFFFLGFASNNCFIMAAMSYDRY
NOV29a TAIHNPLQYHTLMTRKICLQMMMASWMVGFLFSLCIIVTVFNLSLCDLNTIQHYFCDISP
NOV29b TAIHNPLQYHTLMTRKICLQMMMASWMVGFLFSLCIIVTVFNLSLCDLNTIQHYFCDISP
NOV29a VVSLACNYTFYHEMAIFVLSAFVLVGSCILIMISYVFIVFIVIKMPSAKGRSKAFSTCSS
NOV29b VVSLACNYTFYMEMAIFVLSAFVLVGSCILIMISYVFIVFIVIKMPSAKGRSKAFSTCSS
NOV29a HLTVVSIHYGFACFVYLRPKNSNSFDEDMPTAMIYTILMPLLNPIVYSLRNKEMQIALRK
NOV29b HLTVVSIHYGFACFVYLRPKNSNSFDEDMLTAMIYTILMPLLNPIVYSLRNKENQIALRK
NOV29a TLGSVFGVFPQKTKKEPEHLKKLHSIDK
NOV29b TLGSVFGVFPQKTKKEPEHLKKLHSIDK
NOV29a (SEQ ID NO: 364)
NOV29b (SEQ ID NO: 366)

[0513] Further analysis of the NOV29a protein yielded the following properties shown in Table 29C.

TABLE 29C
Protein Sequence Properties NOV29a

| | |
|---|---|
| SignalP analysis: | Cleavage site between residues 25 and 26 |

PSORT II analysis:
PSG: a new signal peptide prediction method

N-region: length 5; pos.chg 1; neg.chg 0
H-region: length 19; peak value 10.63
PSG score: 6.23

GvH: von Heijne's method for signal seq. recognition

GvH score (threshold: −2.1): −2.51
possible cleavage site: between 29 and 30

>>> Seems to have no N-terminal signal peptide
ALOM: Klein et al's method for TM region allocation

| Init position for calculation: 1 | | |
|---|---|---|
| Tentative number of TMS(s) for the threshold 0.5: 4 | | |
| INTEGRAL | Likelihood = −0.43 | Transmembrane 17-33 |
| INTEGRAL | Likelihood = −7.17 | Transmembrane 105-121 |
| INTEGRAL | Likelihood = −1.33 | Transmembrane 148-164 |
| INTEGRAL | Likelihood = −12.52 | Transmembrane 165-181 |

| | |
|---|---|
| PERIPHERAL | Likelihood = 0.53 (at 231) |

ALOM score: −12.52 (number of TMSs: 4)

MTOP: Prediction of membrane topology (Hartmann et al.)

Center position for calculation: 24
Charge difference: −0.5 C(−1.0) − N(−0.5)
N >= C: N-terminal side will be inside

>>> membrane topology: type 3a
MITDISC: discrimination of mitochondrial targeting seq

| | | | |
|---|---|---|---|
| R content: | 0 | Hyd Moment(75): | 4.10 |
| Hyd Moment(95): | 4.80 | G content: | 2 |
| D/E content: | 1 | S/T content: | 4 |
| Score: −5.17 | | | |

Gavel: prediction of cleavage sites for mitochondrial preseq

R-2 motif at 45 PRM|LV

NUCDISC: discrimination of nuclear localization signals

pat4: none
pat7: PQKTKKE (4) at 268
bipartite: RKTLGSVFGVFPQKTKK at 257
content of basic residues: 7.7%
NLS Score: 0.36

KDEL: ER retention motif in the C-terminus: none
ER Membrane Retention Signals: none
SKL: peroxisomal targeting signal in the C-terminus: none
PTS2: 2nd peroxisomal targeting signal: none
VAC: possible vacuolar targeting motif: none
RNA-binding motif: none
Actinin-type actin-binding motif:

type 1: none
type 2: none

NMYR: N-myristoylation pattern: none
Prenylation motif: none
memYQRL: transport motif from cell surface to Golgi: none
Tyrosines in the tail: none
Dileucine motif in the tail: none
checking 63 PROSITE DNA binding motifs: none
checking 71 PROSITE ribosomal protein motifs: none
checking 33 PROSITE prokaryotic DNA binding motifs: none
NNCN: Reinhardt's method for Cytoplasmic/Nuclear discrimination

Prediction: cytoplasmic
Reliability: 94.1

COIL: Lupas's algorithm to detect coiled-coil regions

total: 0 residues

Final Results (k = 9/23):

55.6%: endoplasmic reticulum
44.4%: mitochondrial

>> prediction for CG53767-02 is end (k = 9)

[0514] A search of the NOV29a protein against the Geneseq database, a proprietary database that contains sequences published in patents and patent publication, yielded several homologous proteins shown in Table 29D.

TABLE 29D
Geneseq Results for NOV29a

| | | NOV29a | Identities/ | |
|---|---|---|---|---|
| | | Residues/ | Similarities for | |
| Geneseq | Protein/Organism/Length | Match | the Matched | Expect |
| Identifier | [Patent #, Date] | Residues | Region | Value |
| ABP72224 | Human G-protein coupled | 1 . . . 286 | 285/286 (99%) | e−166 |
| | receptor GCREC-18 (olfactory | 44 . . . 329 | 285/286 (99%) | |
| | receptor) - Homo sapiens, 329 aa. | | | |
| | [WO2003000859-A2, 03-JAN- | | | |
| | 2003] | | | |
| ABP95890 | Human GPCR polypeptide SEQ | 1 . . . 286 | 285/286 (99%) | e−166 |
| | ID NO 590 - Homo sapiens, 286 | 1 . . . 286 | 285/286 (99%) | |
| | aa. [WO200216548-A2, 28-FEB- | | | |
| | 2002] | | | |
| AAG66705 | Human GPCR3 polypeptide - | 1 . . . 286 | 285/286 (99%) | e−166 |
| | Homo sapiens, 328 aa. | 43 . . . 328 | 285/286 (99%) | |
| | [WO200160865-A2, 23-AUG- | | | |
| | 2001] | | | |
| AAG71567 | Human olfactory receptor | 1 . . . 271 | 270/271 (99%) | e−156 |
| | polypeptide, SEQ ID NO: 1248 - | 46 . . . 316 | 270/271 (99%) | |
| | Homo sapiens, 316 aa. | | | |
| | [WO200127158-A2, 19-APR- | | | |
| | 2001] | | | |
| ABG59965 | Human DITHP polypeptide #23 - | 1 . . . 258 | 257/258 (99%) | e−149 |
| | Homo sapiens, 328 aa. | 71 . . . 328 | 257/258 (99%) | |
| | [WO200220754-A2, 14-MAR- | | | |
| | 2002] | | | |

[0515] In a BLAST search of public sequence databases, the NOV29a protein was found to have homology to the proteins shown in the BLASTP data in Table 29E.

TABLE 29E
Public BLASTP Results for NOV29a

| | | NOV29a | Identities/ | |
|---|---|---|---|---|
| Protein | | Residues/ | Similarities for | |
| Accession | | Match | the Matched | Expect |
| Number | Protein/Organism/Length | Residues | Portion | Value |
| Q8NGM4 | Seven transmembrane helix | 1 . . . 286 | 285/286 (99%) | e−165 |
| | receptor - Homo sapiens | 54 . . . 339 | 285/286 (99%) | |
| | (Human), 339 aa. | | | |
| Q8VF20 | Olfactory receptor MOR267-14 - | 1 . . . 278 | 187/278 (67%) | e−109 |
| | Mus musculus (Mouse), 321 | 44 . . . 321 | 226/278 (81%) | |
| | aa. | | | |
| CAD42418 | Sequence 75 from Patent | 1 . . . 261 | 136/261 (52%) | 3e−75 |
| | WO0212343 - Homo sapiens | 46 . . . 306 | 182/261 (69%) | |
| | (Human), 314 aa. | | | |
| CAD42393 | Sequence 23 from Patent | 1 . . . 261 | 134/261 (51%) | 1e−73 |
| | WO0212343 - Homo sapiens | 44 . . . 304 | 177/261 (67%) | |
| | (Human), 313 aa. | | | |
| Q8NGX3 | Seven transmembrane helix | 1 . . . 261 | 132/261 (50%) | 4e−73 |
| | receptor - Homo sapiens | 47 . . . 306 | 186/261 (70%) | |
| | (Human), 314 aa. | | | |

[0516] PFam analysis indicates that the NOV29a protein contains the domains shown in the Table 29F.

TABLE 29F
Domain Analysis of NOV29a

| | NOV29a | Identities/ | |
|---|---|---|---|
| | Match | Similarities | |
| Pfam Domain | Region | for the Matched Region | Expect Value |
| 7tm_1 | 3 . . . 245 | 47/278 (17%) | 3.1e−19 |
| | | 169/278 (61%) | |

### Example 30

[0517] The NOV30 clone was analyzed, and the nucleotide and encoded polypeptide sequences are shown in Table 30A.

TABLE 30A
NOV30 Sequence Analysis

| | | |
|---|---|---|
| NOV30a, CG53776-02 | SEQ ID NO: 371 | 1072 bp |
| DNA Sequence | ORF Start: ATG at 12 | ORF Stop: TAG at 1047 |

TTAACATTTTAATGTGCTGTTCTCATTTGGGTTCATTTAGTCAGCAGCTACTTCGTCTCATGAATTCC
CTGAAGGACGGGAATCACACCGCTCTGACGGGGTTCATCCTATTGGGCTTAACAGATGATCCAATCCT
TCGAGTCATCCTCTTCATGATCATCCTATGCATCTACCTGGTAACCATATCTGGTAATCTCAGCATAA
TTATTCTTATCAGAATTTCTTCTCAGCTCCATCATCCTATGTATTTCTTTCTGAGCCACTTGGCTTTT
GCTGACATGGCCTATTCATCTTCTGTCACACCCAACATGCTTGTAAACTTCCTGGTGGAGAGAAATAC
AGTCTCCTACCTTGGATGTGCCATCCAGCTTGGTTCAGCGGCTTTCTTTGCAACAGTCGAATGCGTCT
TTCTGGCTGCCATGGCCTATGACCGCTTTGTGGCAATTTGCAGTCCACTGCTTTATTCAACCAAAATG
TCCACACAAGTCAGTGTCCAGCTACTCTTAGTAGTTTACATAGCTGGTTTTCTCATTGCTGTCTCCTA
TACTACTTCCTTCTATTTTTTACTCTTCTGTGGACCAAATCAAGTCAATCATTTTTTCTGTGATTTCG
CTCCCTTACTTGAACTCTCCTGTTCTGATATCAGTGTCTCCACAGTTGTTCTCTCATTTTCTTCTGGA
TCCATCATTGTGGTCACTGTGTGTGTCATAGCCGTCTGCTACATCTATATCCTCATCACCATCCTGAA
GATGCGCTCCACTGAGGGGCACCACAAGGCCTTCTCCACCTGCACTTCCCACCTCACTGTGGTTACCC
TGTTCTATGGGACCATTACCTTCATTTATGTGATGCCCAATTTTAGCTACTCAACTGACCAGAACAAG
GTGGTGTCTGTGTTGTACACAGTGGTGATTCCCATGTTGAACCCCTTGATCTACAGCCTCAGGAACAA
GGAGATTAAGGGGGCTCTGAAGAGAGAGCTTGTTAGAAAAATACTTTCTCATGATGCTTGTTATTTTA
GTAGAACTTCAAATAATGATATTACATAGAACCCTATCTCTTCTCTTGAGAA

| | | | |
|---|---|---|---|
| NOV30a, CG53776-02 | SEQ ID NO: 372 | 345 aa | MW at 38430.9kD |
| Protein Sequence | | | |

MCCSHLGSFSQQLLRLMNSLKDGNHTALTGFILLGLTDDPILRVILFMIILCIYLVTISGNLSIIILI
RISSQLHHPMYFFLSHLAFADMAYSSSVTPNMLVNFLVERNTVSYLGCAIQLGSAAFFATVECVFLAA
MAYDRFVAICSPLLYSTKMSTQVSVQLLLVVYIAGFLIAVSYTTSFYFLLFCGPNQVNHFFCDFAPLL
ELSCSDISVSTVVLSFSSGSIIVVTVCVIAVCYIYILITILKMRSTEGHHKAFSTCTSHLTVVTLFYG
TITFIYVMPNFSYSTDQNKVVSVLYTVVIPMLNPLIYSLRNKEIKGALKRELVRKILSHDACYFSRTS
NNDIT

| | | |
|---|---|---|
| NOV30b, CG53776-03 | SEQ ID NO: 373 | 1050 bp |
| DNA Sequence | ORF Start: at 207 | ORF Stop: end of sequence |

TTCTCAAGAGAAGAGATAGGGTTCTATGTAATATCATTATTTGAAGTTCTACTAAAATAACAAGCATC
ATGAGAAAGTATTTTTCTAACAAGCTCTCTCTTCAGAGCCCCCTTAATCTCCTTGTTCCTGAGGCTGT
AGATCAGGGGGTTCAACATGGGAATCACCACTGTGTACAACACAGACACCACCTTGTTCTGGTCAGTT
GAGTAGCTAAAATTGGGCATCACATAAATGAAGGTAATGGTCCCATAGAACAGGGTAACCACAGTGAG
GTGGGAAGTGCAGGTGGAGAAGGCCTTGTGGTGCCCCTCAGTGGAGCGCATCTTCAGGATGGTGATGA
GGATATAGATGTAGCAGACGGCTATGACACACACAGTGACCACAATGATGGATCCAGAAGAAAATGAG
AGAACAACTGTGGAGACACTGATATCAGAACAGGAGAGTTCAAGTAAGGGAGCGAAATCACAGAAAAA
ATGATTGACTTGATTTGGTCCACAGAAGAGTAAAAATAGAAGGAAGTAGTATAGGAGACAGCAATGAG
AAAACCAGCTATGTAAACTACTAAGAGTAGCTGGACACTGACTTGTGTGGACATTTTGGTTGAATAAA
GCAGTGGACTGCAAATTGCCACAAAGCGGTCATAGGCCATGGCAGCCAGAAGGACGCATTCGACTGTT
GCAAAGAAAGCCGCTGAACCAAGCTGGATGGCACATCCAAGGTAGGAGACTGTATTTCTCTCCACCAG
GAAGTTTACAAGCATGTTGGGTGTGACAGAAGATGAATAGGCCATGTCAGCAAAAGCCAAGTGGCTCA
GAAAGAAATACATAGGATGATGGAGCTGAGAAGAAATTCTGATAAGAATAATTATGCTGAGATTACCA
GATAGGATGATCATGAAGAGGATGACTCGAAGGATTGGATCATCTGTTAAGCCCAATAGGATGAACCC
CGTCAGAGCGGTGTGATTCCCGTCCTTCAGGGAATTCATGAGACGAAGTAGCTGCTGACTAAATGAAC
CCTAATGAGAACAGCACATTAAAATGTTAA

| | | | |
|---|---|---|---|
| NOV30b, CG53776-03 | SEQ ID NO: 374 | 338 aa | MW at 37640.9kD |
| Protein Sequence | | | |

MCCSHLGSFSQQLLRLMNSLKDGNHTALTGFILLGLTDDPILRVILFMIILCGNLSIIILIRISSQLH
HPMYFFLSHLAFADMAYSSSVTPNMLVNFLVERNTVSYLGCAIQLGSAAFFATVECVFLAAMAYDRFV
AICSPLLYSTKMSTQVSVQLLLVVYIAGFLIAVSYTTSFYFLLFCGPNQVNHFFCDFAPLLELSCSDI
SVSTVVLSFSSGSIIVVTVCVIAVCYIYILITILKMRSTEGHHKAFSTCTSHLTVVTLFYGTITFIYV
MPNFSYSTDQNKVVSVLYTVVIPMLNPLIYSLRNKEIKGALKRELVRKILSHDACYFSRTSNNDIT

| | | |
|---|---|---|
| NOV30c, CG53776-01 | SEQ ID NO: 375 | 1070 bp |
| DNA Sequence | ORF Start: ATG at 27 | ORF Stop: TAG at 1041 |

GAAGCCATCAAATTTATAACATTTTAATGTGCTGTTCTCATTTGGGTTCATTTAGTCAGCAGCTACTT
CGTCTCATGAATTCCCTGAAGGACGGGAATCACACCGCTCTGACGGGGTTCATCCTATTGGGCTTAAC
AGATGATCCAATCCTTCGAGTCATCCTCTTCATGATCATCCTATCTGGTAATCTCAGCATAATTATTC
TTATCAGAATTTCTTCTCAGCTCCATCATCCTATGTATTTCTTTCTGAGCCACTTGGCTTTTGCTGAC
ATGGCCTATTCATCTTCTGTCACACCCAACATGCTTGTAAACTTCCTGGTGGAGAGAAATACAGTCTC
CTACCTTGGATGTGCCATCCAGCTTGGTTCAGCGGCTTTCTTTGCAACAGTCGAATGCGTCCTTCTGG
CTGCCATGGCCTATGACCGCTTTGTGGCAATTTGCAGTCCACTGCTTTATTCAACCAAAATGTCCACA
CAAGTCAGTGTCCAGCTACTCTTAGTAGTTTACATAGCTGGTTTTCTCATTGCTGTCTCCTATACTAC
TTCCTTCTATTTTTTACTCTTCTGTGGACCAAATCAAGTCAATCATTTTTTCTGTGATTTCGCTCCCT
TACTTGAACTCTCCTGTTCTGATATCAGTGTCTCCACAGTTGTTCTCTCATTTTCTTCTGGATCCATC
ATTGTGGTCACTGTGTGTGTCATAGCCGTCTGCTACATCTATATCCTCATCACCATCCTGAAGATGCG
CTCCACTGAGGGGCACCACAAGGCCTTCTCCACCTGCACTTCCCACCTCACTGTGGTTACCCTGTTCT
ATGGGACCATTACCTTCATTTATGTGATGCCCAATTTTAGCTACTCAACTGACCAGAACAAGGTGGTG
TCTGTGTTGTACACAGTGGTGATTCCCATGTTGAACCCCCTGATCTACAGCCTCAGGAACAAGGAGAT
TAAGGGGGCTCTGAAGAGAGAGCTTGTTAGAAAAATACTTTCTCATGATGCTTGTTATTTTAGTAGAA
CTTCAAATAATGATATTACATAGAACCCTATCTCTTCTCTTGAGAATACT

| | | | |
|---|---|---|---|
| NOV30c, CG53776-01 | SEQ ID NO: 376 | 338 aa | MW at 37590.8kD |
| Protein Sequence | | | |

MCCSHLGSFSQQLLRLMNSLKDGNHTALTGFILLGLTDDPILRVILFMIILSGNLSIIILIRISSQLH
HPMYFFLSHLAFADMAYSSSVTPNMLVNFLVERNTVSYLGCAIQLGSAAFFATVECVLLAAMAYDRFV
AICSPLLYSTKMSTQVSVQLLLVVYIAGFLIAVSYTTSFYFLLFCGPNQVNHFFCDFAPLLELSCSDI
SVSTVVLSFSSGSIIVVTVCVIAVCYIYILITILKMRSTEGHHKAFSTCTSHLTVVTLFYGTITFIYV
MPNFSYSTDQNKVVSVLYTVVIPMLNPLIYSLRNKEIKGALKRELVRKILSHDACYFSRTSNNDIT

[0518] A ClustalW comparison of the above protein sequences yields the following sequence alignment shown in Table 30B.

TABLE 30B
Comparison of the NOV30 protein sequences.

NOV30a MCCSHLGSFSQQLLRLNNSLKDGNHTALTGFILLGLTDDPILRVILFMIILCIYLVTISG
NOV30b MCCSHLGSFSQQLLRLMNSLKDGNHTALTGFILLGLTDDPILRVILFMIILC-------G
NOV30c MCCSHLGSFSQQLLRLMNSLKDGNHTALTGFILLGLTDDPILRVILFMIILS-------G
NOV30a NLSIIILIRISSQLHHPMYFFLSHLAFADMAYSSSVTPNMLVNFLVERNTVSYLGCAIQL
NOV30b NLSIIILIRISSQLHHPMYFFLSHLAFADMAYSSSVTPNMLVNFLVERNTVSYLGCAIQL
NOV30c NLSIIILIRISSQLHHPMYFFLSHLAFADMAYSSSVTPNMLVNFLVERNTVSYLGCAIQL
NOV30a GSAAFFATVECVFLAAMAYDRFVAICSPLLYSTKMSTQVSVQLLLVVYIAGFLIAVSYTT
NOV30b GSAAFFATVECVFLAAMAYDRFVAICSPLLYSTKMSTQVSVQLLLVVYIAGFLIAVSYTT
NOV30c GSAAFFATVECVLLAAMAYDRFVAICSPLLYSTKMSTQVSVQLLLVVYIAGFLIAVSYTT
NOV30a SFYFLLFCGPNQVNHFFCDFAPLLELSCSDISVSTVVLSFSSGSIIVVTVCVIAVCYIYI
NOV30b SFYFLLFCGPNQVNHFFCDFAPLLELSCSDISVSTVVLSFSSGSIIVVTVCVIAVCYIYI
NOV30c SFYFLLFCGPNQVNHFFCDFAPLLELSCSDISVSTVVLSFSSGSIIVVTVCVIAVCYIYI
NOV30a LITILKMRSTEGHHKAFSTCTSHLTVVTLFYGTITFIYVMPNFSYSTDQNKVVSVLYTVV
NOV30b LITILKMRSTEGHHKAFSTCTSHLTVVTLFYGTITFIYVMPNFSYSTDQNKVVSVLYTVV
NOV30c LITILKMRSTEGHHKAFSTCTSHLTVVTLFYGTITFIYVMPNFSYSTDQNKVVSVLYTVV
NOV30a IPMLNPLIYSLRNKEIKGALKRELVRKILSHDACYFSRTSNNDIT
NOV30b IPMLNPLIYSLRNKEIKGALKRELVRKILSHDACYFSRTSNNDIT
NOV30c IPMLNPLIYSLRNKEIKGALKRELVRKILSHDACYFSRTSNNDIT
NOV30a (SEQ ID NO: 372)
NOV30b (SEQ ID NO: 374)
NOV30c (SEQ ID NO: 376)

[0519] Further analysis of the NOV30a protein yielded the following properties shown in Table 30C.

TABLE 30C
Protein Sequence Properties NOV30a

| | |
|---|---|
| SignalP analysis: | Cleavage site between residues 61 and 62 |
| PSORT II analysis: | |

PSG: a new signal peptide prediction method

N-region: length 0; pos.chg 0; neg.chg 0
H-region: length 14; peak value 5.07
PSG score: 0.67

GvH: von Heijne's method for signal seq. recognition

GvH score (threshold: −2.1): −5.40
possible cleavage site: between 57 and 58

>>> Seems to have no N-terminal signal peptide
ALOM: Klein et al's method for TM region allocation

| Init position for calculation: 1 | | |
|---|---|---|
| Tentative number of TMS(s) for the threshold 0.5: 6 | | |
| INTEGRAL | Likelihood = −10.56 | Transmembrane 41-57 |
| INTEGRAL | Likelihood = −2.07 | Transmembrane 122-138 |
| INTEGRAL | Likelihood = −7.70 | Transmembrane 159-175 |
| INTEGRAL | Likelihood = −12.68 | Transmembrane 225-241 |
| INTEGRAL | Likelihood = −2.13 | Transmembrane 264-280 |
| INTEGRAL | Likelihood = −3.66 | Transmembrane 292-308 |

| | |
|---|---|
| PERIPHERAL | Likelihood = 1.91 (at 58) |

ALOM score: −12.68 (number of TMSs: 6)

MTOP: Prediction of membrane topology (Hartmann et al.)

Center position for calculation: 48
Charge difference: 3.0 C(2.0) − N(−1.0)
C > N: C-terminal side will be inside

>>>Caution: Inconsistent mtop result with signal peptide
>>> membrane topology: type 3b
MITDISC: discrimination of mitochondrial targeting seq

| | | | |
|---|---|---|---|
| R content: | 1 | Hyd Moment(75): | 3.87 |
| Hyd Moment(95): | 1.84 | G content: | 1 |
| D/E content: | 1 | S/T content: | 4 |
| Score: −4.16 | | | |

Gavel: prediction of cleavage sites for mitochondrial preseq

R-2 motif at 25 LRL|MN

NUCDISC: discrimination of nuclear localization signals

pat4: none
pat7: none
bipartite: none
content of basic residues: 5.5%
NLS Score: −0.47

KDEL: ER retention motif in the C-terminus: none
ER Membrane Retention Signals: none
SKL: peroxisomal targeting signal in the C-terminus: none
PTS2: 2nd peroxisomal targeting signal: none
VAC: possible vacuolar targeting motif: none
RNA-binding motif: none
Actinin-type actin-binding motif:

type 1: none
type 2: none

NMYR: N-myristoylation pattern: none
Prenylation motif: none
memYQRL: transport motif from cell surface to Golgi: none
Tyrosines in the tail: none
Dileucine motif in the tail: none
checking 63 PROSITE DNA binding motifs: none
checking 71 PROSITE ribosomal protein motifs: none
checking 33 PROSITE prokaryotic DNA binding motifs: none
NNCN: Reinhardt's method for Cytoplasmic/Nuclear discrimination

Prediction: cytoplasmic
Reliability: 94.1

COIL: Lupas's algorithm to detect coiled-coil regions

total: 0 residues

Final Results (k = 9/23):

44.4%: endoplasmic reticulum
22.2%: vacuolar
11.1%: Golgi
11.1%: vesicles of secretory system
11.1%: mitochondrial

>> prediction for CG53776-02 is end (k = 9)

[0520] A search of the NOV30a protein against the Geneseq database, a proprietary database that contains sequences published in patents and patent publication, yielded several homologous proteins shown in Table 30D.

TABLE 30D
Geneseq Results for NOV30a

| | | NOV30a | Identities/ | |
|---|---|---|---|---|
| | | Residues/ | Similarities for | |
| Geneseq | Protein/Organism/Length | Match | the Matched | Expect |
| Identifier | [Patent #, Date] | Residues | Region | Value |
| AAG66706 | Human GPCR4 polypeptide - | 1 . . . 345 | 337/345 (97%) | 0.0 |
| | Homo sapiens, 338 aa. | 1 . . . 338 | 337/345 (97%) | |
| | [WO200160865-A2, 23-AUG- | | | |
| | 2001] | | | |
| ABU11199 | Human G-protein coupled | 17 . . . 345 | 321/329 (97%) | e−180 |
| | receptor GCREC-52 - Homo | 1 . . . 322 | 321/329 (97%) | |
| | sapiens, 322 aa. [WO200279448- | | | |
| | A2, 10-OCT-2002] | | | |
| AAU85166 | G-coupled olfactory receptor #27 - | 17 . . . 345 | 321/329 (97%) | e−180 |
| | Homo sapiens, 322 aa. | 1 . . . 322 | 321/329 (97%) | |
| | [WO200198526-A2, 27-DEC- | | | |
| | 2001] | | | |
| AAU95576 | Human olfactory and pheromone | 17 . . . 345 | 321/329 (97%) | e−180 |
| | G protein-coupled receptor #63 - | 1 . . . 322 | 321/329 (97%) | |
| | Homo sapiens, 322 aa. | | | |
| | [WO200224726-A2, 28-MAR- | | | |
| | 2002] | | | |
| ABP95758 | Human GPCR polypeptide SEQ | 17 . . . 345 | 321/329 (97%) | e−180 |
| | ID NO 326 - Homo sapiens, 322 | 1 . . . 322 | 321/329 (97%) | |
| | aa. [WO200216548-A2, 28-FEB- | | | |
| | 2002] | | | |

[0521] In a BLAST search of public sequence databases, the NOV30a protein was found to have homology to the proteins shown in the BLASTP data in Table 30E.

TABLE 30E
Public BLASTP Results for NOV30a

| | | NOV30a | Identities/ | |
|---|---|---|---|---|
| Protein | | Residues/ | Similarities for | |
| Accession | | Match | the Matched | Expect |
| Number | Protein/Organism/Length | Residues | Portion | Value |
| Q8WZ92 | Olfactory receptor 5P2 | 17 . . . 345 | 321/329 (97%) | e−179 |
| | (Olfactory receptor-like protein | 1 . . . 322 | 321/329 (97%) | |
| | JCG3) - Homo sapiens (Human), | | | |
| | 322 aa. | | | |
| CAD37572 | Sequence 173 from Patent | 17 . . . 345 | 320/329 (97%) | e−178 |
| | WO0224726 - Homo sapiens | 1 . . . 322 | 320/329 (97%) | |
| | (Human), 322 aa. | | | |
| Q8VG09 | Olfactory receptor MOR204-8 - | 17 . . . 330 | 253/314 (80%) | e−145 |
| | Mus musculus (Mouse), 314 aa. | 1 . . . 314 | 279/314 (88%) | |
| Q8VG04 | Olfactory receptor MOR204-13 - | 21 . . . 330 | 246/310 (79%) | e−141 |
| | Mus musculus (Mouse), 314 aa. | 5 . . . 314 | 272/310 (87%) | |
| Q8VFD3 | Olfactory receptor MOR204-16 - | 17 . . . 336 | 239/320 (74%) | e−137 |
| | Mus musculus (Mouse), 321 aa. | 1 . . . 320 | 271/320 (84%) | |

[0522] PFam analysis indicates that the NOV30a protein contains the domains shown in the Table 30F.

TABLE 30F
Domain Analysis of NOV30a

| | NOV30a | Identities/ | |
|---|---|---|---|
| | Match | Similarities | |
| Pfam Domain | Region | for the Matched Region | Expect Value |
| DUF40 | 58 . . . 299 | 43/277 (16%) | 0.22 |
| | | 152/277 (55%) | |
| 7tm_1 | 60 . . . 309 | 54/276 (20%) | 9.4e−32 |
| | | 185/276 (67%) | |

### Example 31

[0523] The NOV31 clone was analyzed, and the nucleotide and encoded polypeptide sequences are shown in Table 31A.

TABLE 31A
NOV31 Sequence Analysis

| | | |
|---|---|---|
| NOV31a, GG53803-02 | SEQ ID NO: 377 | 1049 bp |
| DNA Sequence | ORF Start: ATG at 54 | ORF Stop: TGA at 996 |

ATATTTTGCTTTGGCAGGAACAATTCTCTTCAACCCTTCCATTAAAAGGAATTATGATGATGGTTTTA
AGGAATCTGAGCATGGAGCCCACCTTTGCCCTTTTAGGTTTCACAGATTACCCAAAGCTTCAGATTCC
TCTCTTCCTTGTGTTTCTGCTCATGTATGTTATCACAGTGGTAGGAAACCTTGGGATGATCATAATAA
TCAAGATTAACCCCAAATTTCACACTCCTATGTACTTTTTCCTTAGTCACCTCTCTTTTGTTGATTTT
TGTTACTCTTCCATTGTCACTCCCAAGCTGCTTGAGAACTTGGTAATGGCAGATAAAAGCATCTTCTA
CTTTAGCTGCATGATGCAGTACTTCCTGTCCTGCACTGCTGTGGTGACAGAGTCTTTCTTGCTGGCAG
TGATGGCCTATGACCGCTTTGTGGCCATCTGCAATCCTCTGCTTTATACAGTGGCCATGTCACAGAGG
CTCTGTGCCCTGCTGGTGGCTGGGTCATATCTCTGGGGCATGTTTGGCCCCTTGGTACTCCTTTGTTA
TGCTCTCCGGTTAAACTTCTCTGGACCTAATGTAATCAACCACTTCTTTTGTGAGTATACTGCTCTCA
TCTCTGTGTCTGGCTCTGATATACTCATCCCCCACCTGCTGCTTTTCAGCTTCGCCACCTTCAATGAG
ATGTGTACACTACTGATCATCCTCACTTCCTATGTTTTCATTTTTGTGACTGTACTAAAAATCCGTTC
TGTTAGTGGGCGCCACAAAGCCTTCTCCACCTGGGCCTCCCACCTGACTGCTATCACCATCTTCCATG
GGACCATCCTTTTCCTTTACTGTGTACCCAACTCCAAAAACTCTCGGCAAACAGTCAAAGTGGCCTCT
GTATTTTACACAGTTGTCAACCCCATGCTGAACCCTCCGATCTACAGCCTAAGGAATAAAGACGTGAA
GGATGCTTTCTGGAAGTTAATACATACACAAGTTCCATTTCACTGAACCAGTCTCAAAAGTTGTTTTC
AATCCAAATGAACAACCCANNNNNNNNNN

| | | | |
|---|---|---|---|
| NOV31a, CG53803-02 | SEQ ID NO: 378 | 314 aa | MW at 35790.4kD |
| Protein Sequence | | | |

MMMVLRNLSMEPTFALLGFTDYPKLQIPLFLVFLLMYVITVVGNLGMIIIIKINPKFHTPMYFFLSHL
SFVDFCYSSIVTPKLLENLVMADKSIFYFSCMMQYFLSCTAVVTESFLLAVMAYDRFVAICNPLLYTV
AMSQRLCALLVAGSYLWGMFGPLVLLCYALRLNFSGPNVINHFFCEYTALISVSGSDILIPHLLLFSF
ATFNEMCTLLIILTSYVFIFVTVLKIRSVSGRHKAFSTWASHLTAITIFHGTILFLYCVPNSKNSRQT
VKVASVFYTVVNPMLNPPIYSLRNKDVKDAFWKLIHTQVPFH

| | | |
|---|---|---|
| NOV31b,GG53803-01 | SEQ ID NO: 379 | 1039 bp |
| DNA Sequence | ORF Start: ATG at 54 | ORF Stop: TGA at 996 |

ATATTTTGCTTTGGCAGGAACAATTCTCTTCAACCCTTCCATTAAAAGGAATTATGATGATGGTTTTA
AGGAATCTGAGCATGGAGCCCACCTTTGCCCTTTTAGGTTTCACAGATTACCCAAAGCTTCAGATTCC
TCTCTTCCTTGTGTTTCTGCTCATGTATGTTATCACAGTGGTAGGAAACCTTGGGATGATCATAATAA
TCAAGATTAACCCCAAATTTCACACTCCTATGTACTTTTTCCTTAGTCACCTCTCTTTTGTTGATTTT
TGTTACTCTTCCATTGTCACTCCCAAGCTGCTTGAGAACTTGGTAATGGCAGATAAAAGCATCTTCTA
CTTTAGCTGCATGATGCAGTACTTCCTGTCCTGCACTGCTGTGGTGACAGAGTCTTTCTTGCTGGCAG
TGATGGCCTATGACCGCTTTGTGGCCATCTGCAATCCTCTGCTTTATACAGTGGCCATGTCACAGAGG
CTCTGTGCCCTGCTGGTGGCTGGGTCATATCTCTGGGGCATGTTTGGCCCCTTGGTACTCCTTTGTTA
TGCTCTCCGGTTAAACTTCTCTGGACCTAATGTAATCAACCACTTCTTTTGTGAGTATACTGCTCTCA
TCTCTGTGTCTGGCTCTGATATACTCATCCCCCACCTGCTGCTTTTCAGCTTCGCCACCTTCAATGAG
ATGTGTACACTACTGATCATCCTCACTTCCTATGTTTTCATTTTTGTGACTGTACTAAAAATCCGTTC
TGTTAGTGGGCGCCACAAAGCCTTCTCCACCTGGGCCTCCCACCTGACTGCTATCACCATCTTCCATG
GGACCATCCTTTTCCTTTACTGTGTACCCAACTCCAAAAACTCTCGGCAAACAGTCAAAGTGGCCTCT
GTATTTTACACAGTTGTCAACCCCATGCTGAACCCTCCGATCTACAGCCTAAGGAATAAAGACGTGAA
GGATGCTTTCTGGAAGTTAATACATACACAAGTTCCATTTCACTGAACCAGTCTCAAAAGTTGTTTTC
AATCCAAATGAACAACCCA

| | | | |
|---|---|---|---|
| NOV31b, CG53803-01 | SEQ ID NO: 380 | 314 aa | MW at 35790.4kD |
| Protein Sequence | | | |

MMMVLRNLSMEPTFALLGFTDYPKLQIPLFLVFLLMYVITVVGNLGMIIIIKINPKFHTPMYFFLSHL
SFVDFCYSSIVTPKLLENLVMADKSIFYFSCMMQYFLSCTAVVTESFLLAVMAYDRFVAICNPLLYTV
AMSQRLCALLVAGSYLWGMFGPLVLLCYALRLNFSGPNVINHFFCEYTALISVSGSDILIPHLLLFSF
ATFNEMCTLLIILTSYVFIFVTVLKIRSVSGRHKAFSTWASHLTAITIFHGTILFLYCVPNSKNSRQT
VKVASVFYTVVNPMLNPPIYSLRNKDVKDAFWKLIHTQVPFH

[0524] A ClustalW comparison of the above protein sequences yields the following sequence alignment shown in Table 31B.

TABLE 31B
Comparison of the NOV31 protein sequences.

NOV31a MMMVLRNLSMEPTFALLGFTDYPKLQIPLFLVFLLMYVITVVGNLGMIIIIKINPKFHTP
NOV31b MMMVLRNLSMEPTFALLGFTDYPKLQIPLFLVFLLMYVITVVGNLGMIIIIKINPKFHTP
NOV31a MYFFLSHLSFVDFCYSSIVTPKLLENLVMADKSIFYFSCMMQYFLSCTAVVTESFLLAVM
NOV31b MYFFLSHLSFVDFCYSSIVTPKLLENLVMADKSIFYFSCMMQYFLSCTAVVTESFLLAVM
NOV31a AYDRFVAICNPLLYTVAMSQRLCALLVAGSYLWGMFGPLVLLCYALRLNFSGPNVINHFF
NOV31b AYDRFVAICNPLLYTVAMSQRLCALLVAGSYLWGMFGPLVLLCYALRLNFSGPNVINHFF
NOV31a CEYTALISVSGSDILIPHLLLFSFATFNEMCTLLIILTSYVFIFVTVLKIRSVSGRHKAF
NOV31b CEYTALISVSGSDILIPHLLLFSFATFNEMCTLLIILTSYVFIFVTVLKIRSVSGRHKAF
NOV31a STWASHLTAITIFHGTILFLYCVPNSKNSRQTVKVASVFYTVVNPMLNPPIYSLRNKDVK
NOV31b STWASHLTAITIFHGTILFLYCVPNSKNSRQTVKVASVFYTVVNPMLNPPIYSLRNKDVK
NOV31a DAFWKLIHTQVPFH
NOV31b DAFWKLIHTQVPFH
NOV31a (SEQ ID NO: 378)
NOV31b (SEQ ID NO: 380)

[0525] Further analysis of the NOV31a protein yielded the following properties shown in Table 31C.

TABLE 31C
Protein Sequence Properties NOV31a

| | |
|---|---|
| SignalP analysis: | Cleavage site between residues 44 and 45 |

PSORT II analysis:
PSG: a new signal peptide prediction method

N-region: length 11; pos.chg 1; neg.chg 1
H-region: length 9; peak value 9.41
PSG score: 5.01

GvH: von Heijne's method for signal seq. recognition

GvH score (threshold: −2.1): −1.06
possible cleavage site: between 43 and 44

>>> Seems to have a cleavable signal peptide (1 to 43)
ALOM: Klein et al's method for TM region allocation

| Init position for calculation: 44 | | |
|---|---|---|
| Tentative number of TMS(s) for the threshold 0.5: 5 | | |
| INTEGRAL | Likelihood = −2.23 | Transmembrane 104-120 |
| INTEGRAL | Likelihood = −0.64 | Transmembrane 145-161 |
| INTEGRAL | Likelihood = −0.80 | Transmembrane 186-202 |
| INTEGRAL | Likelihood = −8.39 | Transmembrane 212-228 |
| INTEGRAL | Likelihood = −2.71 | Transmembrane 247-263 |

| | |
|---|---|
| PERIPHERAL | Likelihood = 2.07 (at 63) |

ALOM score: −8.39 (number of TMSs: 5)

MTOP: Prediction of membrane topology (Hartmann et al.)

Center position for calculation: 21
Charge difference: 3.0 C(1.0) − N(−2.0)
C > N: C-terminal side will be inside

>>>Caution: Inconsistent mtop result with signal peptide
>>> membrane topology: type 3b
MITDISC: discrimination of mitochondrial targeting seq

| | | | |
|---|---|---|---|
| R content: | 1 | Hyd Moment(75): | 7.94 |
| Hyd Moment(95): | 8.95 | G content: | 1 |
| D/E content: | 2 | S/T content: | 3 |
| Score: −5.12 | | | |

Gavel: prediction of cleavage sites for mitochondrial preseq

R-2 motif at 16 LRN|LS

NUCDISC: discrimination of nuclear localization signals

pat4: none
pat7: none
bipartite: none
content of basic residues: 6.4%
NLS Score: −0.47

KDEL: ER retention motif in the C-terminus: none
ER Membrane Retention Signals: none
SKL: peroxisomal targeting signal in the C-terminus: none
PTS2: 2nd peroxisomal targeting signal: none
VAC: possible vacuolar targeting motif: none
RNA-binding motif: none
Actinin-type actin-binding motif:

type 1: none
type 2: none

NMYR: N-myristoylation pattern: none
Prenylation motif: none
memYQRL: transport motif from cell surface to Golgi: none
Tyrosines in the tail: none
Dileucine motif in the tail: none
checking 63 PROSITE DNA binding motifs:

Leucine zipper pattern (PS00029): *** found ***

LLVAGSYLWGMFGPLVLLCYAL at 145

none
checking 71 PROSITE ribosomal protein motifs: none
checking 33 PROSITE prokaryotic DNA binding motifs: none
NNCN: Reinhardt's method for Cytoplasmic/Nuclear discrimination

Prediction: cytoplasmic
Reliability: 94.1

COIL: Lupas's algorithm to detect coiled-coil regions

total: 0 residues

Final Results (k = 9/23):

44.4%: endoplasmic reticulum
22.2%: vacuolar
22.2%: mitochondrial
11.1%: Golgi

>> prediction for CG53803-02 is end (k = 9)

[0526] A search of the NOV31a protein against the Geneseq database, a proprietary database that contains sequences published in patents and patent publication, yielded several homologous proteins shown in Table 31D.

TABLE 31D
Geneseq Results for NOV31a

| | | NOV31a | Identities/ | |
|---|---|---|---|---|
| | | Residues/ | Similarities for | |
| Geneseq | Protein/Organism/Length | Match | the Matched | Expect |
| Identifier | [Patent #, Date] | Residues | Region | Value |
| AAU85141 | G-coupled olfactory receptor #2 - | 1 . . . 314 | 314/314 (100%) | 0.0 |
| | Homo sapiens, 314 aa. | 1 . . . 314 | 314/314 (100%) | |
| | [WO200198526-A2, 27-DEC- | | | |
| | 2001] | | | |
| AAG72434 | Human OR-like polypeptide | 1 . . . 314 | 314/314 (100%) | 0.0 |
| | query sequence, SEQ ID NO: | 1 . . . 314 | 314/314 (100%) | |
| | 2115 - Homo sapiens, 314 aa. | | | |
| | [WO200127158-A2, 19-APR- | | | |
| | 2001]\| | | | |
| AAG71725 | Human olfactory receptor | 1 . . . 314 | 314/314 (100%) | 0.0 |
| | polypeptide, SEQ ID NO: 1406 - | 1 . . . 314 | 314/314 (100%) | |
| | Homo sapiens, 314 aa. | | | |
| | [WO200127158-A2, 19-APR- | | | |
| | 2001] | | | |
| AAE07540 | Human G-protein coupled | 1 . . . 314 | 314/314 (100%) | 0.0 |
| | receptor 2a (GPCR2a) variant - | 1 . . . 314 | 314/314 (100%) | |
| | Homo sapiens, 314 aa. | | | |
| | [WO200159113-A2, 16-AUG- | | | |
| | 2001] | | | |
| AAU24517 | Human olfactory receptor | 1 . . . 314 | 314/314 (100%) | 0.0 |
| | AOLFR2 - Homo sapiens, 314 | 1 . . . 314 | 314/314 (100%) | |
| | aa. [WO200168805-A2, 20-SEP- | | | |
| | 2001] | | | |

[0527] In a BLAST search of public sequence databases, the NOV31a protein was found to have homology to the proteins shown in the BLASTP data in Table 31E.

TABLE 31E
Public BLASTP Results for NOV31a

| | | NOV31a | Identities/ | |
|---|---|---|---|---|
| Protein | | Residues/ | Similarities for | |
| Accession | | Match | the Matched | Expect |
| Number | Protein/Organism/Length | Residues | Portion | Value |
| CAC69325 | Sequence 3 from Patent | 1 . . . 314 | 314/314 (100%) | 0.0 |
| | WO0159113 - Homo sapiens | 1 . . . 314 | 314/314 (100%) | |
| | (Human), 314 aa. | | | |
| CAC69326 | Sequence 5 from Patent | 1 . . . 314 | 313/314 (99%) | 0.0 |
| | WO0159113 - Homo sapiens | 1 . . . 314 | 313/314 (99%) | |
| | (Human), 314 aa. | | | |
| Q8NGL3 | Seven transmembrane helix | 1 . . . 314 | 312/314 (99%) | 0.0 |
| | receptor - Homo sapiens | 1 . . . 314 | 313/314 (99%) | |
| | (Human), 314 aa. | | | |
| CAD37508 | Sequence 39 from Patent | 10 . . . 314 | 305/305 (100%) | e−177 |
| | WO0224726 - Homo sapiens | 1 . . . 305 | 305/305 (100%) | |
| | (Human), 305 aa. | | | |
| Q8VFR4 | Olfactory receptor MOR174-8 - | 7 . . . 313 | 243/307 (79%) | e−139 |
| | Mus musculus (Mouse), 316 | 7 . . . 313 | 267/307 (86%) | |
| | aa. | | | |

[0528] PFam analysis indicates that the NOV31a protein contains the domains shown in the Table 31F.

TABLE 31F
Domain Analysis of NOV31a

| | NOV31a | Identities/ | |
|---|---|---|---|
| | Match | Similarities | |
| Pfam Domain | Region | for the Matched Region | Expect Value |
| 7tm_1 | 43 . . . 292 | 58/278 (21%) | 1.4e−24 |
| | | 174/278 (63%) | |

### Example 32

[0529] The NOV32 clone was analyzed, and the nucleotide and encoded polypeptide sequences are shown in Table 32A.

TABLE 32A
NOV32 Sequence Analysis

| | | |
|---|---|---|
| NOV32a, CG53989-03 | SEQ ID NO: 381 | 1092 bp |
| DNA Sequence | ORF Start: ATG at 30 | ORF Stop: TAG at 1047 |

CCGGGACAGTCACCTCCAGCAGCATCCTGATGTTCTGGGGACACTGGTGCTGGGGGGTCAGTGGGGAA
GGGCTCCTGGGTCCTCATGACCCTCTCCCTTGGGTGAGCACAAAACACCATGGCACTTTGGGGTCTTG
GAAACAGACTAAAGGGGATGTCAAGTCCTCATTCCTTGGAGCTGCTGACGAGTCCAGAATGGGTCATG
TTTTCTTGCCCCGACCCCAGCACCTCAGGGCAGCGGAAGGTCCAGAGAGAGGTCGGGGACCGGGGCCG
CTCCTTGCATCCTGGGCTTGTGTCTGTTGCCCCCTGGCTGGTGACTTGCACTCTCCTGGAGCTGGTTC
TTGCAGCCGAGGCCGTCACGGGGCTGGGATGTCGCTGCTGCTTCTCTTCGTGGTGTTGACCATTTCTC
AGACCTCCCCCCGCCCCTGCAGGGAGGAGTTGGAGGCTTGCGCGTTTAGAGTGCAGGTGGGGCAGCTG
AGGCTCTATGAGGACGACCAGCGGACGAAGGTGGTTGAGATCGTCCGTCACCCCCAGTACAACGAGAG
CCTGTCTGCCCAGGGCGGTGCGGACATCGCCCTGCTGAAGCTGGAGGCCCCGGTGCCGCTGTCTGAGC
TCATCCACCCGGTCTCGCTCCCGTCTGCCTCCCTGGACGTGCCCTCGGGGAAGACCTGCTGGGTGACC
GGCTGGGGTGTCATTGGACGTGGAGAACTACTGCCCTGGCCCCTCAGCTTGTGGGAGGCGACGGTGAA
GGTCAGGAGCAACGTCCTCTGTAACCAGACCTGTCGCCGCCGCTTTCCTTCCAACCACACTGAGCGGT
TTGAGCGGCTCATCAAGGACGACATGCTGTGTGCCGGGGACGGGAACCACGGCTCCTGGCCAGGCGAC
AACGGGGGCCCCCTCCTGTGCGGGCGGAATTGCACCTGGGTCCAGGTGGAGGTGGTGAGCTGGGGCAA
ATTCTGCGGCCTTCGCGGCTATCCCGGCATGTACACTCGCGTGACGAGCTACGTGTCCTGGATCCGCC
AGTACGTCCCGCCGTTCCCCAGACGCTAGCTGGGGTGCAGTGGGGTCTGCATGATCCAGGAGGGCCCG
TCTT

| | | | |
|---|---|---|---|
| NOV32a, CG53989-03 | SEQ ID NO: 382 | 339 aa | MW at 37349.5kD |
| Protein Sequence | | | |

MFWGHWCWGVSGEGLLGPHDPLPWVSTKHHGTLGSWKQTKGDVKSSFLGAADESRMGHVFLPRPQHLR
AAEGPERGRGPGPLLASWACVCCPLAGDLHSPGAGSCSRGRHGAGMSLLLLFVVLTISQTSPRPCREE
LEACAFRVQVGQLRLYEDDQRTKVVEIVRHPQYNESLSAQGGADIALLKLEAPVPLSELIHPVSLPSA
SLDVPSGKTCWVTGWGVIGRGELLPWPLSLWEATVKVRSNVLCNQTCRRRFPSNHTERFERLIKDDML
CAGDGNHGSWPGDNGGPLLCGRNCTWVQVEVVSWGKFCGLRGYPGMYTRVTSYVSWIRQYVPPFPRR

| | | |
|---|---|---|
| NOV32b, CG53989-04 | SEQ ID NO: 383 | 881 bp |
| DNA Sequence | ORF Start: ATG at 31 | ORF Stop: TAG at 832 |

GCTCTGGGAAGACCCTCGTCCGTCCCCCTCATGAGCCCGGCACGGGGCGTGAGCTGGTGGGCATCACT
GGGGGCTGCGACGTCCCGGCCAGGAGGCACCCCTGGTAGGGAGGAGTTGGAGGCTTGCGCGTTTAGAG
TGCAGGTGGGGCAGCTGAGGCTCTATGAGGACGACCAGCGGACGAAGGTGGTTGAGATCGTCCGTCAC
CCCCAGTACAACGAGAGCCTGTCTGCCCAGGGCGGTGCGGACATCGCCCTGCTGAAGCTGGAGGCCCC
GGTGCCGCTGTCTGAGCTCATCCACCCGGTCTCGCTCCCGTCTGCCTCCCGGGACGTGCCCTCGGGGA
AGACCTGCTGGGCCTGGGCTCCAGACGCGTCCTGGATGGCTTCCTGCCGCTGCCGAGACGGATGGCCA
CAGGCCAGGTGGCTCAGAGCAGCAGGAATGTACTATCTCACGGCTCTGCAGGCGGAACGTCCACACTC
CAGGCGTGGGCAGGAACTACTGCCCTGGCCCCTCAGCTTGTGGGAGGCGACGGTGAAGGTCAGGAGCA
ACGTCCTCTGTAACCAGACCTGTCGCCGCCGCTTTCCTTCCAACCACACTGAGCGGTTTGAGCGGCTC
ATCAAGGACGACATGCTGTGTGCCGGGGACGGGAACCACGGCTCCTGGCCAGGCGACAACGGGGGCCC
CCTCCTGTGCAGGCGGAATTGCACCTGGGTCCAGGTGGAGGTGGTGAGCTGGGGCAAATTCTGCGGCC
TTCGCGGCTATCCCGGCATGTACACTCGCGTGACGAGCTACGTGTCCTGGATCCGCCAGTACGTCCCG
CCGTTCCCCAGACGCTAGCTGGGGTGCAGTGGGGTCTGCATGATCCAGGAGGGCCCGTCTAAGCG

| | | | |
|---|---|---|---|
| NOV32b, CG53989-04 | SEQ ID NO: 384 | 267 aa | MW at 30126.0kD |
| Protein Sequence | | | |

MSPARGVSWWASLGAATSRPGGTPGREELEACAFRVQVGQLRLYEDDQRTKVVEIVRHPQYNESLSAQ
GGADIALLKLEAPVPLSELIHPVSLPSASRDVPSGKTCWAWAPDASWMASCRCRDGWPQARWLRAAGM
YYLTALQAERPHSRRGQELLPWPLSLWEATVKVRSNVLCNQTCRRRFPSNHTERFERLIKDDMLCAGD
GNHGSWPGDNGGPLLCRRNCTWVQVEVVSWGKFCGLRGYPGMYTRVTSYVSWIRQYVPPFPRR

| | | |
|---|---|---|
| NOV32c, 306076095 | SEQ ID NO: 385 | 819 bp |
| DNA Sequence | ORF Start: at 1 | ORF Stop: end of sequence |

CGCAAGCTTATGAGCCCGGCACGGGGCGTGAGCTGGTGGGCATCACTGGGGGCTGCGACGTCTCGGCC
AGGAGGCACCCCTGGCAGGGAGGAGTTGGAGGCTTGCGCGTTTAGAGTGCAGGTGGGGCAGCTGAGGT
TCTATGAGGACGACCAGCGGACGAAGGTGGTTGAGATCGTCCGTCACCCCCAGTACAACGAGAGCCTG
TCTGCCCAGGGCGGTGCGGACATCGCCCTGCTGAAGCTGGAGGCCCCGGTGCCGCTGTCTGAGCTCAT
CCACCCGGTCTCGCTCCCGTCTGCCTCCCGGGACGTGCCCTCGGGGAAGACCTGCTGGGCCTGGGCTC
CAGACGCGTCCTGGATGGCTTCCTGCCGCTGCCGAGACGGATGGCCACAGGCCAGGTGGCTCAGAGCA
GCAGGAATGTACTATCTCACGGCTCTGCAGGCGGAACGTCCACACTCCAGGCGTGGGCAGGAACTACT
GCCCTGGCCCCTCAGCTTGTGGGAGGCGACGGTGAAGGTCAGGAGCAACGTCCTCTGTAACCAGACCT
GTCGCCGCCGCTTTCCTTCCAACCACACTGAGCGGTTTGAGCGGCTCATCAAGGACGACATGCTGTGT
GCCGGGGACGGGAACCACGGCTCCTGGCCAGGCGACAACGGGGGCCCCCTCCTGTGCAGGCGGAATTG
CACCTGGGTCCAGGTGGAGGTGGTGAGCTGGGGCAAACTCTGCGGCCTTCGCGGCTATCCCGGCATGT
ACACCCGCGTGACGAGCTACGTGTCCTGGATCCGCCAGTACGTCCCGCCGTTCCCCAGACGCGTCGAC
GCG

| | | | |
|---|---|---|---|
| NOV32c, 306076095 | SEQ ID NO: 386 | 273 aa | MW at 30808.8kD |
| Protein Sequence | | | |

RKLMSPARGVSWWASLGAATSRPGGTPGREELEACAFRVQVGQLRFYEDDQRTKVVEIVRHPQYNESL
SAQGGADIALLKLEAPVPLSELIHPVSLPSASRDVPSGKTCWAWAPDASWMASCRCRDGWPQARWLRA
AGMYYLTALQAERPHSRRGQELLPWPLSLWEATVKVRSNVLCNQTCRRRFPSNHTERFERLIKDDMLC
AGDGNHGSWPGDNGGPLLCRRNCTWVQVEVVSWGKLCGLRGYPGMYTRVTSYVSWIRQYVPPFPRRVD
A

| | | |
|---|---|---|
| NOV32d, CG53989-01 | SEQ ID NO: 387 | 858 bp |
| DNA Sequence | ORF Start: ATG at 1 | ORF Stop: TAG at 856 |

ATGCTGTGGCTACTGCTCCTGACCCTCCCCTGCCTGATGGGCTCTGTGCCCAGGAACCCAGGCGAGGG
CACGGGGCGTGAGCTGGTGGGCATCACTGGGGGCTGCGACGTCTCGGCCAGGAGGCACCCCTGGCAGG
TCAGCCTGAGGTTCTACAGCATGAAGAAGGGTCTGTGGGAGCCCATCTGTGGGGGCTCCCTCATCCAC
CCAGAGTGGGTGCTGACCGCCGCCCACTGCCTTTTGGAGGAGTTGGAGGCTTGCGCGTTTAGAGTGCA
GGTGGGGCAGCTGAGGCTCTATGAGGACGACCAGCGGACGAAGGTGGTTGAGATCGTCCGTCACCCCC
AGTACAACGAGAGCCTGTCTGCCCAGGGCGGTGCGGACATCGCCCTGCTGAAGCTGGAGGCCCCGGTG
CCGCTGTCTGAGCTCATCCACCCGGTCTCGCTCCCGTCTGCCTCCCTGGACGTGCCCTCGGGGAAGAC
CTGCTGGGTGACCGGCTGGGGTGTCATTGGACGTGGAGAACTACTGCCCTGGCCCCTCAGCTTGTGGG
AGGCGACGGTGAAGGTCAGGAGCAACGTCCTCTGTAACCAGACCTGTCGCCGCCGCTTTCCTTCCAAC
CACACTGAGCGGTTTGAGCGGCTCATCAAGGACGACATGCTGTGTGCCGGGGACGGGAACCACGGCTC
CTGGCCAGGCGACAACGGGGGCCCCCTCCTGTGCAGGCGGAATTGCACCTGGGTCCAGGTGGAGGTGG
TGAGCTGGGGCAAACTCTGCGGCCTTCGCGGCTATCCCGGCATGTACACCCGCGTGACGAGCTACGTG
TCCTGGATCCGCCAGTACGTCCCGCCGTTCCCCAGACGCTAG

| | | | |
|---|---|---|---|
| NOV32d, CG53989-01 | SEQ ID NO: 388 | 285 aa | MW at 31927.6kD |
| Protein Sequence | | | |

MLWLLLLTLPCLMGSVPRNPGEGTGRELVGITGGCDVSARRHPWQVSLRFYSMKKGLWEPICGGSLIH
PENVLTAAHCLLEELEACAFRVQVGQLRLYEDDQRTKVVEIVRHPQYNESLSAQGGADIALLKLEAPV
PLSELIHPVSLPSASLDVPSGKTCWVTGWGVIGRGELLPWPLSLWEATVKVRSNVLCNQTCRRRFPSN
HTERFERLIKDDMLCAGDGNHGSWPGDNGGPLLCRRNCTWVQVEVVSWGKLCGLRGYPGMYTRVTSYV
SWIRQYVPPFPRR

| | | |
|---|---|---|
| NOV32e, CG53989-02 | SEQ ID NO: 389 | 660 bp |
| DNA Sequence | ORF Start: at 1 | ORF Stop: end of sequence |

TCACTGGGGGCTGCGACGTCTCGGCCAGGAGGCACCCCTGGCAGGGAGGAGTTGGAGGCTTGCGCGTT
TAGAGTGCAGGTGGGGCAGCTGAGGCTCTATGAGGACGACCAGCGGACGAAGGTGGTTGAGATCGTCC
GTCACCCCCAGTACAACGAGAGCCTGTCTGCCCAGGGCGGTGCGGACATCGCCCTGCTGAAGCTGGAG
GCCCCGGTGCCGCTGTCTGAGCTCATCCACCCGGTCTCGCTCCCGTCTGCCTCCCGGGACGTGCCCTC
GGGGAAGACCTGCTGGGTGACCGGCTGGGGTGTCATTGGACGTGGAGAACTACTGCCCTGGCCCCTCA
GCTTGTGGGAGGCGACGGTGAAGGTCAGGAGCAACGTCCTCTGTAACCAGACCTGTCGCCGCCGCTTT
CCTTCCAACCACACTGAGCGGTTTGAGCGGCTCATCAAGGACGACATGCTGTGTGCCGGGGACGGGAA
CCACGGCTCCTGGCCAGGCGACAACGGGGGCCCCCTCCTGTGCAGGCGGAATTGCACCTGGGTCCAGG
TGGAGGTGGTGAGCTGGGGCAAACTCTGCGGCCTTCGCGGCTATCCCGGCATGTACACCCGCGTGACG
AGCTACGTGTCCTGGATCCGCCAGTACGTCCCGCCGTTCCCCAGACGC

| | | | |
|---|---|---|---|
| NOV32e, CG53989-02 | SEQ ID NO: 390 | 220 aa | MW at 24527.8kD |
| Protein Sequence | | | |

SLGAATSRPGGTPGREELEACAFRVQVGQLRLYEDDQRTKVVEIVRHPQYNESLSAQGGADIALLKLE
APVPLSELIHPVSLPSASRDVPSGKTCWVTGWGVIGRGELLPWPLSLWEATVKVRSNVLCNQTCRRRF
PSNHTERFERLIKDDMLCAGDGNHGSWPGDNGGPLLCRRNCTWVQVEVVSWGKLCGLRGYPGMYTRVT
SYVSWIRQYVPPFPRR

| | | |
|---|---|---|
| NOV32f, CG53989-05 | SEQ ID NO: 391 | 2847 bp |
| DNA Sequence | ORF Start: ATG at 1 | ORF Stop: TAG at 2845 |

ATGGTCAGCAAGGGGGGAGTTGCTGCAGAGCCAGAGCCACACTATTGTGAGGACAGTGAAAGAGGCCC
CAACACCCTCACAGGTCCGGGCAGCCTTCCTAGAGGAGGTGGCATTGAGGTGGGCATGGAGTTTCCGG
GATGCAGCGGTGAAGGGTGCGTGAAGCCCCATGAGGAGGCGGCCCGGGAGGGGGCGGGCAGAGGCAAG
AGGGCTGTGCCGGGACCCAAGCGACGGCAGCAGGGGTCAGCAGAGGGGCCTGCGGCGGGGTGGACGCT
GGAGCAGGAGACCAGGGGAGATGTCTTAGAGGATAAAAATGAGCGGGCAGATGAAGAGATACTCAGGC
TGGCACCAGGGAAAGGCAGGCTCCCAATAGACAGCAAACACCTGAAACCGGTGATCAGCAGCTTCCCG
GTAAGATCTCAGGAGCTGGGCGAGGGGGCTGGAGCAGGCACACTAAGAGGCAAAATGGCAGAGTTTAA
CTGGTCTATGGCCTTCAAGGGACCTGCGGCTGGTCATGAAGAGCGCCTCAACTCTGTGTCCAGCAGGG
CCAAGAAGGGCATTGGCTGGGATGTCGCTGCTGCTTCTCTTCGTGGTGTTGACCATTTCTCAGACCTC
CCCCCGCCCCTGCAGGTCAGGGAGGAGTTGGAGGCTTGCGCGTTTAGAGTGCAGGTGGGGCAGCTGAG
GCTCTATGAGGACGACCAGCGGACGAAGGTGGTTGAGATCGTCCGTCACCCCCAGTACAACGAGAGCC
TGTCTGCCCAGGGCGGTGCGGACATCGCCCTGCTGAAGCTGGAGGCCCCGGTGCCGCTGTCTGAGCTC
ATCCACCCGGTCTCGCTCCCGTCTGCCTCCCTGGACGTGCCCTCGGGGAAGACCTGCTGGGTGACCGG
CTGGGGTGTCATTGGACGTGGAGAACTACTGCCCTGGCCCCTCAGCTTGTGGGAGGCGACGGTGAAGG
TCAGGAGCAACGTCCTCTGTAACCAGACCTGTCGCCGCCGCTTTCCTTCCAACCACACTGAGCGGTTT
GAGCGGCTCATCAAGGACGACATGCTGTGTGCCGGGGACGGGAACCACGGCTCCTGGCCAGGCGACAA
CGGGGGCCCCCTCCTGTGCAGGCGGAATTGCACCTGGGTCCAGGTGGAGGTGGTGAGCTGGGGCAAAC
TCTGCGGCCTTCGCGGCTATCCCGGCATGTACACCCGCGTGACGAGCTACGTGTCCTGGATCCGCCAG
CCATGCCCCTCAGCTCAGACCCCTGCTGTGGTCCGAAGATTTGTGCTCCCCCCAAATCCAGATGTTGA
AGCCCTAACTCCCAGTGTGATGGGATCAGGAGCGCCGCTGCCCCCGGCCCCCGACCTGCAAGAGGCCG
AGGTCCCCATCATGAGGACCCGAGCTTGCGAGAGGATGTATCACAAAGGCCCCACTGCCCACGGCCAG
GTCACCATCATCAAGGCTGCCATGCCGTGTGCAGGGAGGAAGGGGCAGGGTTCCTGCCAGGCCGCTCT
GAGGACGGAGGACCTCACCCCAACCACACCCAACACGGAGGTGTCTCCACGTGCAGACCCCAGGCTGA
GCCAGCCGGAGGACATCTGGCCAGAGTGGGCTTGGCCAGTTGTGGTGGGCACCACCATGCTGCTGCTG
CTGCTGTTCCTGGCTGTCTCCTCCCTGGGGAGCTGTAGCACTGGGAGTCCAGCTCCCGTCCCCGAGAA
TGACCTGGTGGGCATTGTGGGGGGCCACAACACCCCAGGGGAAGTGGTCGTGGCAGTGGGTGCTGACC
GCCGCTCACTGCATTTTCCGGAAGGACACCGACCCGTCCACCTACCGGATTCACACCAGGGATGTGTA
TCTGTACGGGGGCCGGGGGCTGCTGAATGTCAGCCAGATCGTCGTCCACCCAACTACTCTGTCTTCTT
CCTGGGGGCAGACATCGCCCTGCTGAAGCTGGCCACCAGTTCCCTGGAGTTCACTGACAGTGACAACT
GCTGGAACACAGGCTGGGGCATGGTCGGCTTGTTGGATATGCTGCCGCCTCCTTACCGCCCGCAGCAG
GTGAAGGTCCTCACACTGAGCAATGCAGACTGTGAGCGGCAGACCTACGATGCTTTTCCTGGTGCTGG
AGACAGAAAGTTCATCCAGGATGACATGATCTGTGCCGGCCGCACGGGCCGCCGCACCTGGAAGGGTG
ACTCAGGCGGCCCCCTGGTCTGCAAGAAGAAGGGTACCTGGCTCCAGGCGGGAGTAGTGAGCTGGGGA
TTTTACAGTGATCGGCCCAGCATTGGCGTCTACACACGCCCAGAGACCAGCTGGCAGGGTGCCAACCA
TGCAGACGCCCAGAGACCAGCTGGCAGGGTGCCAACCATGCAGAGGCCCAGAGACATGGGCCAGGGCC
AGGAGTGGGTCTGCAGGCCCTTCACCCACGTCACCTGCTACCCGACGGCCATCCCCAGGCCCTTCACC
CATGTCACCTGCTACCTGATGGCTGTCCCCAGCACCCTCACCCACGTCACCTGCTACCCGACGGCCGT
CCCCAGGCCCTTCACCCATGTCACCTGCTACCTGATGGCTGTCCCCAGCACCCTCACCCATCTCACCT
GCTACATGATGGCCGTCCCCAGGCCCTTTACCCACATCACCTGCTACCCAATGGCTGTCCCCAGCACC
CTTACCCACGTCACCTGCCACCCGACGGCCATCCCCAGGCCCTTCACCCACATCACCTGCTACACGAT
GGCCATCCCCAGGCCTTCAACCACGCCACCTGCTACACGACGGCCATCCCCAGCACCCTCACCCACGT
CACCTGCTACACGATGGCCGTCCCCAGGCCCATCACCCATGTCACCTGCTACACGATAG

| | | | |
|---|---|---|---|
| NOV32f, GG53989-05 | SEQ ID NO: 392 | 948 aa | MW at 102839.3kD |
| Protein Sequence | | | |

[sequence omitted]

| | | |
|---|---|---|
| NOV32g, CG53989-06 | SEQ ID NO: 393 | 660 bp |
| DNA Sequence | ORF Start: at 1 | ORF Stop: end of sequence |

TCACTGGGGGCTGCGACGTCTCGGCCAGGAGGCACCCCTGGCAGGGAGGAGTTGGAGGCTTGCGCGTT
TAGAGTGCAGGTGGGGCAGCTGAGGCTCTATGAGGACGACCAGCGGACGAAGGTGGTTGAGATCGTCC
GTCACCCCCAGTACAACGAGAGCCTGTCTGCCCAGGGCGGTGCGGACATCGCCCTGCTGAAGCTGGAG
GCCCCGGTGCCGCTGTCTGAGCTCATCCACCCGGTCTCGCTCCCGTCTGCCTCCCGGGACGTGCCCTC
GGGGAAGACCTGCTGGGTGACCGGCTGGGGTGTCATTGGACGTGGAGAACTACTGCCCTGGCCCCTCA
GCTTGTGGGAGGCGACGGTGAAGGTCAGGAGCAACGTCCTCTGTAACCAGACCTGTCGCCGCCGCTTT
CCTTCCAACCACACTGAGCGGTTTGAGCGGCTCATCAAGGACGACATGCTGTGTGCCGGGGACGGGAA
CCACGGCTCCTGGCCAGGCGACAACGGGGGCCCCCTCCTGTGCAGGCGGAATTGCACCTGGGTCCAGG
TGGAGGTGGTGAGCTGGGGCAAACTCTGCGGCCTTCGCGGCTATCCCGGCATGTACACCCGCGTGACG
AGCTACGTGTCCTGGATCCGCCAGTACGTCCCGCCGTTCCCCAGACGC

| | | | |
|---|---|---|---|
| NOV32g, CG53989-06 | SEQ ID NO: 394 | 220 aa | MW at 24527.8kD |
| Protein Sequence | | | |

SLGAATSRPGGTPGREELEACAFRVQVGQLRLYEDDQRTKVVEIVRHPQYNESLSAQGGADIALLKLE
APVPLSELIHPVSLPSASRDVPSGKTCWVTGWGVIGRGELLPWPLSLWEATVKVRSNVLCNQTCRRRF
PSNHTERFERLIKDDMLCAGDGNHGSWPGDNGGPLLCRRNCTWVQVEVVSWGKLCGLRGYPGMYTRVT
SYVSWIRQYVPPFPRR

| | | |
|---|---|---|
| NOV32h, CG53989-07 | SEQ ID NO: 395 | 672 bp |
| DNA Sequence | ORF Start: at 7 | ORF Stop: at 667 |

AGATCTTCACTGGGGGCTGCGACGTCTCGGCCAGGAGGCACCCCTGGCAGGGAGGAGTTGGAGGCTTG
CGCGTTTAGAGTGCAGGTGGGGCAGCTGAGGCTCTATGAGGACGACCAGCGGACGAAGGTGGTTGAGA
TCGTCCGTCACCCCCAGTACAACGAGAGCCTGTCTGCCCAGGGCGGTGCGGACATCGCCCTGCTGAAG
CTGGAGGCCCCGGTGCCGCTGTCTGAGCTCATCCACCCGGTCTCGCTCCCGTCTGCCTCCCTGGACGT
GCCCTCGGGGAAGACCTGCTGGGTGACCGGCTGGGGTGTCATTGGACGTGGAGAACTACTGCCCTGGC
CCCTCAGCTTGTGGGAGGCGACGGTGAAGGTCAGGAGCAACGTCCTCTGTAACCAGACCTGTCGCCGC
CGCTTTCCTTCCAACCACACTGAGCGGTTTGAGCGGCTCATCAAGGACGACATGCTGTGTGCCGGGGA
CGGGAACCACGGCTCCTGGCCAGGCGACAACGGGGGCCCCCTCCTGTGCAGGCGGAATTGCACCTGGG
TCCAGGTGGAGGTGGTGAGCTGGGGCAAACTCTGCGGCCTTCGCGGCTATCCCGGCATGTACACCCGC
GTGACGAGCTACGTGTCCTGGATCCGCCAGTACGTCCCGCCGTTCCCCAGACGCCTCGAG

| | | | |
|---|---|---|---|
| NOV32h, CG53989-07 | SEQ ID NO: 396 | 220 aa | MW at 24484.8kD |
| Protein Sequence | | | |

SLGAATSRPGGTPGREELEACAFRVQVGQLRLYEDDQRTKVVEIVRHPQYNESLSAQGGADIALLKLE
APVPLSELIHPVSLPSASRDVPSGKTCWVTGWGVIGRGELLPWPLSLWEATVKVRSNVLCNQTCRRRF
PSNHTERFERLIKDDMLCAGDGNHGSWPGDNGGPLLCRRNCTWVQVEVVSWGKLCGLRGYPGMYTRVT
SYVSWIRQYVPPFPRR

| | | |
|---|---|---|
| NOV32i,CG53989-08 | SEQ ID NO: 397 | 1171 bp |
| DNA Sequence | ORF Start: at 187 | ORF Stop: TGA at 805 |

ATGCTGTGGCTACTGCTCCTGACCCTCCCCTGCCTGATGGGCTCTGTGCCCAGGAACCCAGGCGAGTC
CGCCCCACCCAATGCCCCTGCTGCCCAGGACCCCCTCCTTGCCCTGCCCCGGGCTCAGAGTGCCAGCC
CTGGGGTGGGTGGGGACCATCTGATTGCCGGTCTCTCCTGGTGCCCCTGAGCTCTGGGAAGACCCTCG
TCCGTCCCCCTCATGAGCCCGGCACGGGGCGTGAGCTGGTGGGCATCACTGGGGGCTGCGACGTCTCG
GCCAGGAGGCACCCCTGGCAGGGAGGAGTTGGAGGCTTGCGCGTTTAGAGTGCAGGTGGGGCAGCTGA
GGCTCTATGAGGACGACCAGCGGACGAAGGTGGTTGAGATCGTCCGTCACCCCCAGTACAACGAGAGC
CTGTCTGCCCAGGGCGGTGCGGACATCGCCCTGCTGAAGCTGGAGGCCCCGGTGCCGCTGTCTGAGCT
CATCCACCCGGTCTCGCTCCCGTCTGCCTCCCTGGACGTGCCCTCGGGGAAGACCTGCTGGGTGACCG
GCTGGGGTGTCATTGGACGTGGAGGTCAGGAGCAGGACCACTTGGGTGGGATGTGGAGAGATGACCCG
GAATGTCGGTGCAGGCCTGGGCTCCAGACGCGTCCTGGATGGCTTCCTGCCGCTGCCGAGACGGATGG
CCACAGGCCAGGTGGCTCAGAGCAGCAGGAATGTACTATCTCACGGCTCTGCAGGCGGAACGTCCACA
CTCCAGGCGTGGGCAGGAACTACTGCCCTGGCCCCTCAGCTTGTGGGAGGCGACGGTGAAGGTCAGGA
GCAACGTCCTCTGTAACCAGACCTGTCGCCGCCGCTTTCCTTCCAACCACACTGAGCGGTTTGAGCGG
CTCATCAAGGACGACATGCTGTGTGCCGGGGACGGGAACCACGGCTCCTGGCCAGGCGACAACGGGGG
CCCCCTCCTGTGCAGGCGGAATTGCACCTGGGTCCAGGTGGAGGTGGTGAGCTGGGGCAAACTCTGCG
GCCTTCGCGGCTATCCCGGCATGTACACCCGCGTGACGAGCTACGTGTCCTGGATCCGCCAGTACGTC
CCGCCGTTCCCCAGACGCTAGCTGGGGTGCAGTGGGGTCTGCATGATCCAGGAGGGCCCGTCTTCCTT
GTGGACACGCCTGCT

| | | | |
|---|---|---|---|
| NOV32i, CG53989-08 | SEQ ID NO: 398 | 206 aa | MW at 22191.8kD |
| Protein Sequence | | | |

ALGRPSSVPLMSPARGVSWWASLGAATSRPGGTPGREELEACAFRVQVGQLRLYEDDQRTKVVEIVRH
PQYNESLSAQGGADIALLKLEAPVPLSELIHPVSLPSASLDVPSGKTCWVTGWGVIGRGGQEQDHLGG
MWRDDPECRCRPGLQTRPGWLPAAAETDGHRPGGSEQQECTISRLCRRNVHTPGVGRNYCPGPSACGR
RR

| | | |
|---|---|---|
| NOV32j, CG53989-09 | SEQ ID NO: 399 | 843 bp |
| DNA Sequence | ORF Start: ATG at 26 | ORF Stop: TAG at 836 |

GAGGTGGAGGTTGCAGTAAGCCAAGATGGCGCCACTGCACTCTAGCCTGTTTCTGCTGAGCGGGACCA
TGAGCCCAAAAGTGGGCATCACTGGGGGCTGCGACGTCTCGGCCAGGAGGCACCCCTGGCAGGTCAGC
CTGAGGTTCTACAGCATGAAGAAGGGTCTGTGGGAGCCCATCTGTGGGGGCTCCCTCATCCACCCAGA
GTGGGTGCTGACCGCCGCCCACTGCGTCGAGCTTGAGGAGTTGGAGGCTTGCGCGTTTAGAGTGCAGG
TGGGGCAGCTGAGGCTCTATGAGGACGACCAGCGGACGAAGGTGGTTGAGATCGTCCGTCCCCCCCAG
TACAACGAGAGCCTGTCTGCCCAGGGCGGTGCGGACATCGCCCTGCTGAAGCTGGAGGCCCCGGTGCC
GCTGTCTGAGCTCATCCACCCGGTCTCGCTCCCGTCTGCCTCCCTGGACGTGCCCTCGGGGAAGACCT
GCTGGGTGACCGGCTGGGGTGTCATTTGGGGACACGTTTTCCTGCTCCCGCCACCCCACCTCAGGGCA
GCGGAAGGTCCAATCATGAGGACCCGAGCTTGCGAGAGGATGTATCACAAAGGCCCCACTGCCCACGT
CACCATCATCAAGGCTGCCATGCCGTGTGCAGGGGCTGAGCGCCATCTCTCCCCACAGGGCGACAACG
GGGGCCCCCTCCTGTGCAGGCGGAATTGCACCTGGGTCCAGGTGGAGGTGGTGAGCTGGGGCAAACTC
TGCGGCCTTCGCTATCCCGGCATGTACACCCGCGTGACGAGCTACGTGTCCTGGATCCGCCAGTACGT
CCCGCCGTTCCCCAGACGCTAGCTGGG

| | | | |
|---|---|---|---|
| NOV32j, CG53989-09 | SEQ ID NO: 400 | 270 aa | MW at 29993.6kD |
| Protein Sequence | | | |

MAPLHSSLFLLSGTMSPKVGITGGCDVSARRHPWQVSLRFYSMKKGLWEPICGGSLIHPEWVLTAAHC
VELEELEACAFRVQVGQLRLYEDDQRTKVVEIVRHPQYNESLSAQGGADIALLKLEAPVPLSELIHPV
SLPSASLDVPSGKTCWVTGWGVIWGHVFLLPPPHLRAAEGPIMRTRACERMYHKGPTAHVTIIKAAMP
CAGAERHLSPQGDNGGPLLCRRNCTWVQVEVVSWGKLCGLRYPGMYTRVTSYVSWIRQYVPPFPRR

| | | |
|---|---|---|
| NOV32k, CG53989-10 | SEQ ID NO: 401 | 964 bp |
| DNA Sequence | ORF Start: ATG at 67 | ORF Stop: TGA at 655 |

GACCATCTGATTGCCGGTCTCTCCTGGTGCCCCTGAGCTCTGGGAAGACCCTCGTCCGTCCCCCTCAT
GAGCCCGGCACGGGGCGTGAGCTGGTGGGCATCACTGGGGGCTGCGACGTCTCGGCCAGGAGGCACCC
CTGGCAGGGAGGAGTTGGAGGCTTGCGCGTTTAGAGTGCAGGTGGGGCAGCTGAGGCTCTATGAGGAC
GACCAGCGGACGAAGGTGGTTGAGATCGTCCGTCACCCCCAGTACAACGAGAGCCTGTCTGCCCAGGG
CGGTGCGGACATCGCCCTGCTGAAGCTGGAGGCCCCGGTGCCGCTGTCTGAGCTCATCCACCCGGTCT
CGCTCCCGTCTGCCTCCCGGGACGTGCCCTCGGGGAAGACCTGCTGGGTGACCGGCTGGGGTGTCATT
GGACGTGGAGGTCAGGAGCAGGACCACTTGGGTGGGATGTGGAGAGATGACCCGGAATGTCGGTGCAG
GCCTGGGCTCCAGACGCGTCCTGGATGGCTTCCTGCCGCTGCCGAGACGGATGGCCACAGGCCAGGTG
GCTCAGAGCAGCAGGAATGTACTATCTCACGGCTCTGCAGGCGGAACGTCCACACTCCAGGCGTGGGC
AGGAACTACTGCCCTGGCCCCTCAGCTTGTGGGAGGCGACGGTGAAGGTCAGGAGCAACGTCCTCTGT
AACCAGACCTGTCGCCGCCGCATTCCTTCCAACCACACTGAGCGGTTTGAGCGGCTCATCAAGGACGA
CATGCTGTGTGCCGGGGACGGGAACCACGGCTCCTGGCCAGGCGACAACGGGGGCCCCCTCCTGTGCA
GGCGGAATTGCACCTGGGTCCAGGTGGAGGTGGTGAGCTGGGGCAAACTCTGCGGCCTTCGCGGCTAT
CCCGGCATGTACACCCGCGTGACGAGCTACGTGTCCTGGATCCGCCAGTACGTCCCGCCGTTCCCCAG
ACGCTAGCTGGG

| | | | |
|---|---|---|---|
| NOV32k, CG53989-10 | SEQ ID NO: 402 | 196 aa | MW at 21256.7kD |
| Protein Sequence | | | |

MSPARGVSWWASLGAATSRPGGTPGREELEACAFRVQVGQLRLYEDDQRTKVVEIVRHPQYNESLSAQ
GGADIALLKLEAPVPLSELIHPVSLPSASRDVPSGKTCWVTGWGVIGRGGQEQDHLGGMWRDDPECRC
RPGLQTRPGWLPAAAETDGHRPGGSEQQECTISRLCRRNVHTPGVGRNYCPGPSACGRRR

| | | |
|---|---|---|
| NOV321, CG53989-11 | SEQ ID NO: 403 | 948 bp |
| DNA Sequence | ORF Start: ATG at 61 | ORF Stop: TAG at 931 |

TGACCCTCCCCTGCCTGATGGGCTCTGTGCCCAGGAACCCAGGCGAGTCCGCCCCACCCAATGCCCCT
GCTGCCCAGCCGGTCTCTCCTGGTGCCCCTGAGCTCTGGGAAGACCCTCGTCCGTCCCCCTCATGAGC
CCGGCACGGGGCGTGAGCTGGTGGGCATCACTGGGGGCTGCGACGTCTCGGCCAGGAGGCACCCCTGG
CAGGTCAGCCTGAGGTTCTACAGCATGAAGAAGGGTCTGTGGGAGCCCATCTGTGGGGGCTCCCTCAT
CCACCCAGAGTGGGTGCTGACCGCCGCCCACTGCCTTGGGCCTGAGGAGTTGGAGGCTTGCGCGTTTA
GAGTGCAGGTGGGGCAGCTGAGGCTCTATGAGGACGACCAGCGGACGAAGGTGGTTGAGATCGTCCGT
CACCCCCAGTACAACGAGAGCCTGTCTGCCCAGGGCGGTGCGGACATCGCCCTGCTGAAGCTGGAGGC
CCCGGTGCCGCTGTCTGAGCTCATCCACCCGGTCTCGCTCCCGTCTGCCTCCCTGGACGTGCCCTCGG
GGAAGACCTGCTGGGTGACCGGCTGGGGTGTCATTGGACGTGGAGAACTACTGCCCTGGCCCCTCAGC
TTGTGGGAGGCGACGGTGAAGGTCAGGAGCAACGTCCTCTGTAACCAGACCTGTCGCCGCCGCTTTCC
TTCCAACCACACTGAGCGGTTTGAGCGGCTCATCAAGGACGACATGCTGTGTGCCGGGGACGAGCGCC
ATCTCTCCCCACAGGGCGACAACGGGGGCCCCCTCCTGTGCAGGCGGAATTGCACCTGGGTCCAGGTG
GAGGTGGTGAGCTGGGGCAAACTCTGCGGCGTTCGCGGCTATCCCGGCATGTACACCCGCGTGACGAG
CTACGTGTCCTGGATCCGCCAGTACGTCCCGCCGTTCCCCAGACGCTAGCTGGGGTGCAGTGGG

| | | | |
|---|---|---|---|
| NOV32l, CG53989-11 | SEQ ID NO: 404 | 290 aa | MW at 32449.2kD |
| Protein Sequence | | | |

MPLLPSRSLLVPLSSGKTLVRPPHEPGTGRELVGITGGCDVSARRHPWQVSLRFYSMKKGLWEPICGG
SLIHPEWVLTAAHCLGPEELEACAFRVQVGQLRLYEDDQRTKVVEIVRHPQYNESLSAQGGADIALLK
LEAPVPLSELIHPVSLPSASLDVPSGKTCWVTGWGVIGRGELLPWPLSLWEATVKVRSNVLCNQTCRR
RFPSNHTERFERLIKDDMLCAGDERHLSPQGDNGGPLLCRRNCTWVQVEVVSWGKLCGLRGYPGMYTR
VTSYVSWIRQYVPPFPRR

| | | |
|---|---|---|
| NOV32m, CG53989-12 | SEQ ID NO: 405 | 843 bp |
| DNA Sequence | ORF Start: ATG at 11 | ORF Stop: TAG at 836 |

TGAGAGATAAATGGGCTCCCAGAGATGCCAGGGAGGAGGCCCCGGCACGGGGCGTGAGCTGGTGGGCA
TCACTGGGGGCTGCGACGTCTCGGCCAGGAGGCACCCCTGGCAGGTCAGCCTGAGGTTCTACAGCATG
AAGAAGGGTCTGTGGGAGCCCATCTGTGGGGGCTCCCTCATCCACCCAGAGTGGGTGCTGACCGCCGC
CCACTGCCTTGGCAGGGAGGAGTTGGAGGCTTGCGCGTTTAGAGTGCAGGTGGGGCAGCTGAGGCTCT
ATGAGGACGACCAGCGGACGAAGGTGGTTGAGATCGTCCGTCACCCCCAGTACAACGAGAGCCTGTCT
GCCCAGGGCGGTGCGGACATCGCCCTGCTGAAGCTGGAGGCCCCGGTGCCGCTGTCTGAGCTCATCCA
CCCGGTCTCGCTCCCGTCTGCCTCCCGGCCTGGGCTCCAGACGCGTCCTGGATGGCTTCCTGCCGCTG
CCGAGACGGATGGGCAGGAACTACTGCCCTGGCCCCTCAGCTTGTGGGAGGCGACGGTGAAGGTCAGG
AGCAACGTCCTCTGTAACCAGACCTGTCGCCGCCGCTTTCCTTCCAACCACACTGAGCGGTTTGAGCG
GCTCATCAAGGACGACATGCTGTGTGCCGGGGACGGGAACCACGGCTCCTGGCCAGGCGACAACGGGG
GCCCCCTCCTGTGCAGGCGGAATTGCACCTGGGTCCAGGTGGAGGTGGTGAGCTGGGGCAAACTCTGC
GGCCTTCGCGGCTATCCCGGCATGTACACCCGCGTGACGAGCTACGTGTCCTGGATCCGCCAGTACGT
CCCGCCGTTCCCCAGACGCTAGCTGGG

| | | | |
|---|---|---|---|
| NOV32m, CG53989-12 | SEQ ID NO: 406 | 275 aa | MW at 30683.8kD |
| Protein Sequence | | | |

MGSQRCQGGGPGTGRELVGITGGCDVSARRHPWQVSLRFYSMKKGLWEPICGGSLIHPEWVLTAAHCL
GREELEACAFRVQVGQLRLYEDDQRTKVVEIVRHPQYNESLSAQGGADIALLKLEAPVPLSELIHPVS
LPSASRPGLQTRPGWLPAAAETDGQELLPWPLSLWEATVKVRSNVLCNQTCRRRFPSNHTERFERLIK
DDMLCAGDGNHGSWPGDNGGPLLCRRNCTWVQVEVVSWGKLCGLRGYPGMYTRVTSYVSWIRQYVPPF
PRR

| | | |
|---|---|---|
| NOV32n, CG53989-13 | SEQ ID NO: 407 | 870 bp |
| DNA Sequence | ORF Start: ATG at 43 | ORF Stop: TAA at 868 |

ATCTGGCCAGAGTGGGCTTGGCCAGTTGTGGTGGGCACCACCATGCTGCTGCTGCTGCTGTTCCTGGC
TGTCTCCTCCCTGGGGAGCTGTAGCACTGGGAGTCCAGCTCCCGTCCCCGAGAATGACCTGGTGGGCA
TTGTGGGGGGCCACAACACCCAGGGGAAGTGGTCGTGGCAGGTCAGCCTGAGGATCTATAGCTACCAC
TGGGCCTCCTGGGTGCCCATCTGCGGGGGCTCCCTCATCCACCCCCAGTGGGTGCTGACCGCCGCTCA
CTGCATTTTCCGGAAGGACACCGACCCGTCCACCTACCGGATTCACACCAGGGATGTGTATCTGTACG
GGGGCCGGGGGCTGCTGAATGTCAGCCAGATCGTCGTCCACCCCAACTACTCTGTCTTCTTCCTGGGG
GCAGACATCGCCCTGCTGAAGCTGGCCACCAGTGTGAGAACAACAAACACTCTCGCGGCAGTCGCCCT
GCCGTCATTGTCCCTGGAGTTCACTGACAGTGACAACTGCTGGAACACAGGCTGGGGCATGGTCGGCT
TGTTGGATATGCTGCCGCCTCCTTACCGCCCGCAGCAGGTGAAGGTCCTCACACTGAGCAATGCAGAC
TGTGAGCGGCAGACCTACGATGCTTTTCCTGGTGCTGGAGACAGAAAGTTCATCCAGGATGACATGAT
CTGTGCCGGCCGCACGGGCCGCCGCACCTGGAAGGGTGACTCAGGCGGCCCCCTGGTCTGCAAGAAGA
AGGGTACCTGGCTCCAGGCGGGAGTAGTGAGCTGGGGATTTTACAGTGATCGGCCCAGCATTGGCGTC
TACACGTGGGTCCAGACCTATGTGCCCTGGATCCTGCAGCAAATGCACCTCTAA

| | | | |
|---|---|---|---|
| NOV32n, CG53989-13 | SEQ ID NO: 408 | 275 aa | MW at 30467.7kD |
| Protein Sequence | | | |

MLLLLLFLAVSSLGSCSTGSPAPVPENDLVGIVGGHNTQGKWSWQVSLRIYSYHWASWVPICGGSLIH
PQWVLTAAHCIFRKDTDPSTYRIHTRDVYLYGGRGLLNVSQIVVHPNYSVFFLGADIALLKLATSVRT
TNTLAAVALPSLSLEFTDSDNCWNTGWGMVGLLDMLPPPYRPQQVKVLTLSNADCERQTYDAFPGAGD
RKFIQDDMICAGRTGRRTWKGDSGGPLVCKKKGTWLQAGVVSWGFYSDRPSIGVYTWVQTYVPWILQQ
MHL

[0530] A ClustalW comparison of the above protein sequences yields the following sequence alignment shown in Table 32B.

TABLE 32B
Comparison of the NOV32 protein sequences.

NOV32a ------------------------------------------------------------
NOV32b ------------------------------------------------------------
NOV32c ------------------------------------------------------------
NOV32d ------------------------------------------------------------
NOV32e ------------------------------------------------------------
NOV32f MVSKGGVAAEPEPHYCEDSERGPNTLTGPGSLPRGGGIEVGMEFPGCSGEGCVKPHEEAA
NOV32g ------------------------------------------------------------
NOV32h ------------------------------------------------------------
NOV32i ------------------------------------------------------------
NOV32j ------------------------------------------------------------
NOV32k ------------------------------------------------------------
NOV32l ------------------------------------------------------------
NOV32m ------------------------------------------------------------
NOV32n ------------------------------------------------------------
NOV32a ---------------MFWGMWCWGVSGEGLLGPHDPLPWVSTKHHGTLGSWKQTKGDVKS
NOV32b ------------------------------------------------------------
NOV32c ------------------------------------------------------------
NOV32d --------------------------------------------------MLWLLLLTLP
NOV32e ------------------------------------------------------------
NOV32f REGAGRGKRAVPGPKRRQQGSAEGPAAGWTLEQETRGDVLEDKNERADEEILRLAPGKGR
NOV32g ------------------------------------------------------------
NOV32h ------------------------------------------------------------
NOV32i ------------------------------------------------------------
NOV32j -------------------------------------------------------MAPLH
NOV32k ------------------------------------------------------------
NOV32l -----------------------------------------------------MPLLPSR
NOV32m -------------------------------------------------------MGSQR
NOV32n --------------------------------------------------------MLLL
NOV32a SFLGAADESRMGHVFLPRPQHLRAAEGPERGRGPGPLLASWACVCCPLAGDLHSPGAGSC
NOV32b -------------------------MSPARG------VSWWA-----------SLGAATS
NOV32c ----------------------RKLMSPARG------VSWWA-----------SLGAATS
NOV32d CLMGSVPRNPG-------EGTGRELVGITGGCDVSARRHPWQVS---LR--FYSMKKGLW
NOV32e -----------------------------------------------------SLGAATS
NOV32f LPIDSKHLKPVISSFPVRSQELGEGAGAGTLRGKMAEFNWSMAFKGPAAGHEERLNSVSS
NOV32g -----------------------------------------------------SLGAATS
NOV32h -----------------------------------------------------SLGAATS
NOV32i --------------ALGRPS-SVPLMSPARG------VSWWA-----------SLGAATS
NOV32j SSLFLLS------------GTMSPKVGITGGCDVSARRHPWQVS---LR--FYSMKKGLW
NOV32k -------------------------MSPARG------VSWWA-----------SLGAATS
NOV32l SLLVPLSSGKTLVRPPHEPGTGRELVGITGGCDVSARRHPWQVS---LR--FYSMKKGLW
NOV32m CQGG--G-----------PGTGRELVGITGGCDVSARRHPWQVS---LR--FYSMKKGLW
NOV32n LLFLAVSSLGSCSTGSPAPVPENDLVGIVGGHNTQG-KWSWQVSLR-----IYSYHWASW
NOV32a SRGR-HGAGMSLLLLFVVLTISQTSPRPC-REELEACAFRVQVGQLRLYEDDQRTKVVEI
NOV32b RPG---G-----------------TPG---REELEACAFRVQVGQLRLYEDDQRTKVVEI
NOV32c RPG---G-----------------TPG---REELEACAFRVQVGQLRLYEDDQRTKVVEI
NOV32d EPIC-GG-------SLIHPEWVLTAAHCL-LEELEACAFRVQVGQLRLYEDDQRTKVVEI
NOV32e RPG---G-----------------TPG---REELEACAFRVQVGQLRLYEDDQRTKVVEI
NOV32f RAKKGIGWDVAAASLRGVDHFSDLPPPLQVREELEACAFRVQVGQLRLYEDDQRTKVVEI
NOV32g RPG--------------------GTPG---REELEACAFRVQVGQLRLYEDDQRTKVVEI
NOV32h RPG--------------------GTPG---REELEACAFRVQVGQLRLYEDDQRTKVVEI
NOV32i RPG---G-----------------TPG---REELEACAFRVQVGQLRLYEDDQRTKVVEI
NOV32j EPIC-GG-------SLIHPEWVLTAAHCVELEELEACAFRVQVGQLRLYEDDQRTKVVEI
NOV32k RPG---G-----------------TPG---REELEACAFRVQVGQLRLYEDDQRTKVVEI
NOV32l EPIC-GG-------SLIHPEWVLTAAHCLGPEELEACAFRVQVGQLRLYEDDQRTKVVEI
NOV32m EPIC-GG-------SLIHPEWVLTAAHCLGREELEACAFRVQVGQLRLYEDDQRTKVVEI
NOV32n VPIC-GG-------SLIHPQWVLTAAHCIFRKDTDPSTYRIHTRDVYLYGGRGLLNVSQI
NOV32a VRHPQYNESLSAQGGADIALLKLEAPVPLSELIHPVSLPSASLDVPSGKTCWVTG----W
NOV32b VRHPQYNESLSAQGGADIALLKLEAPVPLSELIHPVSLPSASRDVPSGKTCWAWAPDASW
NOV32c VRHPQYNESLSAQGGADIALLKLEAPVPLSELIHPVSLPSASRDVPSGKTCWAWAPDASW
NOV32d VRHPQYNESLSAQGGADIALLKLEAPVPLSELIHPVSLPSASLDVPSGKTCWVTG----W
NOV32e VRHPQYNESLSAQGGADIALLKLEAPVPLSELIHPVSLPSASRDVPSGKTCWVTG----W
NOV32f VRHPQYNESLSAQGGADIALLKLEAPVPLSELIHPVSLPSASLDVPSGKTCWVTG----W
NOV32g VRHPQYNESLSAQGGADIALLKLEAPVPLSELIHPVSLPSASLDVPSGKTCWVTG----W
NOV32h VRHPQYNESLSAQGGADIALLKLEAPVPLSELIHPVSLPSASLDVPSGKTCWVTG----W
NOV32i VRHPQYNESLSAQGGADIALLKLEAPVPLSELIHPVSLPSASLDVPSGKTCWVTG----W
NOV32j VRHPQYNESLSAQGGADIALLKLEAPVPLSELIHPVSLPSASLDVPSGKTCWVTG----W
NOV32k VRHPQYNESLSAQGGADIALLKLEAPVPLSELIHPVSLPSASRDVPSGKTCWVTG----W
NOV32l VRHPQYNESLSAQGGADIALLKLEAPVPLSELIHPVSLPSASLDVPSGKTCWVTG----W
NOV32m VRHPQYNESLSAQGGADIALLKLEAPVPLSELIHPVSLPSASRPGLQTRPGWLPA----A
NOV32n VVHPNYSVFF---LGADIALLKLATSVRTTNTLAAVALPSLSLEFTDSDNCWNTG----W
NOV32a GVIG--R-G--------ELLPWP-----------------------LSLWEATVKVRSNV
NOV32b MASCRCRDGWPQARWLRAAGMYYLTALQAERPHSR-R-GQELLPWPLSLWEATVKVRSNV
NOV32c MASCRCRDGWPQARWLRAAGMYYLTALQAERPHSR-R-GQELLPWPLSLWEATVKVRSNV
NOV32d GVIG----R-------GELLPWP-----------------------LSLWEATVKVRSNV
NOV32e GVIG--R-G--------ELLPWP-----------------------LSLWEATVKVRSNV
NOV32f GVIG---RG--------ELLPWP-----------------------LSLWEATVKVRSNV
NOV32g GVIG--R-G--------ELLPWP-----------------------LSLWEATVKVRSNV
NOV32h GVIG--R-G--------ELLPWP-----------------------LSLWEATVKVRSNV
NOV32i GVIG--RGGQEQD---HLGGMWR------DDPECRCRPGLQTRPGWLPAAAETDGHRPGG
NOV32j GVIW----G-------HVFLLPP-----------------------PHLRAAEGPIMR--
NOV32k GVIG--RGGQEQD---HLGGMWR------DDPECRCRPGLQTRPGWLPAAAETDGHRPGG
NOV32l GVIG----R-------GELLPWP-----------------------LSLWEATVKVRSNV
NOV32m AETD----G-------QELLPWP-----------------------LSLWEATVKVRSNV
NOV32n GMVG----L---------LDMLP-----------------------PPYRPQQVKVLT--
NOV32a LCNQTCRRRFPSNHTERFER-LIKDDMLCAGDGNHGSWPGDNGGPLLCGRNCTWVQVEVV
NOV32b LCNQTCRRRFPSNHTERFER-LIKDDMLCAGDGNHGSWPGDNGGPLLCGRNCTWVQVEVV
NOV32c LCNQTCRRRFPSNHTERFER-LIKDDMLCAGDGNHGSWPGDNGGPLLCGRNCTWVQVEVV
NOV32d LCNQTCRRRFPSNHTERFER-LIKDDMLCAGDGNHGSWPGDNGGPLLCGRNCTWVQVEVV
NOV32e LCNQTCRRRFPSNHTERFER-LIKDDMLCAGDGNHGSWPGDNGGPLLCGRNCTWVQVEVV
NOV32f LCNQTCRRRFPSNHTERFER-LIKDDMLCAGDGNHGSWPGDNGGPLLCGRNCTWVQVEVV
NOV32g LCNQTCRRRFPSNHTERFER-LIKDDMLCAGDGNHGSWPGDNGGPLLCGRNCTWVQVEVV
NOV32h LCNQTCRRRFPSNHTERFER-LIKDDMLCAGDGNHGSWPGDNGGPLLCGRNCTWVQVEVV
NOV32i SEQQECT----------ISR-LCRRNVHTPGVG-RNYCPG----PSACGRRR--------
NOV32j --TRACERMYHKGPTAHVT--IIKAAMPCAGAERHLSPQGDNGGPLLCRRNCTWVQVEVV
NOV32k SEQQECT----------ISR-LCRRNVHTPGVG-RNYCPG----PSACGRRR--------
NOV32l LCNQTCRRRFPSNHTERFER-LIKDDMLCAGDERHLSPQGDNGGPLLCRRNCTWVQVEVV
NOV32m LCNQTCRRRFPSNHTERFER-LIKDDMLCAGDGNHGSWPGDNGGPLLCGRNCTWVQVEVV
NOV32n LSNADCERQTYDAFPGAGDRKFIQDDMICAGRTGRRTWKGDSGGPLVCKKKGTWLQAGVV
NOV32a SWGKFCGLRGYPGMYTRVTSYVSWIRQYVPPFPRR-------------------------
NOV32b SWGKFCGLRGYPGMYTRVTSYVSWIRQYVPPFPRR-------------------------
NOV32c SWGKLCGLRGYPGMYTRVTSYVSWIRQYVPPFPRRVDA----------------------
NOV32d SWGKLCGLRGYPGMYTRVTSYVSWIRQYVPPFPRR-------------------------
NOV32e SWGKLCGLRGYPGMYTRVTSYVSWIRQYVPPFPRR-------------------------
NOV32f SWGKLCGLRGYPGMYTRVTSYVSWIRQPCPSAQTPAVVRRFVLPPNPDVEALTPSVMGSG
NOV32g SWGKLCGLRGYPGMYTRVTSYVSWIRQYVPPFPRR-------------------------
NOV32h SWGKLCGLRGYPGMYTRVTSYVSWIRQYVPPFPRR-------------------------
NOV32i ------------------------------------------------------------
NOV32j SWGKLCGLR-YPGMYTRVTSYVSWIRQYVPPFPRR-------------------------
NOV32k ------------------------------------------------------------
NOV32l SWGKLCGLRGYPGMYTRVTSYVSWIRQYVPPFPRR-------------------------
NOV32m SWGKLCGLRGYPGMYTRVTSYVSWIRQYVPPFPRR-------------------------
NOV32n SWGFYSDRP-SIGVYTWVQTYVPWILQQMHL-----------------------------
NOV32a ------------------------------------------------------------
NOV32b ------------------------------------------------------------
NOV32c ------------------------------------------------------------
NOV32d ------------------------------------------------------------
NOV32e ------------------------------------------------------------
NOV32f APLPPAPDLQEAEVPIMRTRACERMYHKGPTAHGQVTIIKAANPCAGRKGQGSCQAALRT
NOV32g ------------------------------------------------------------
NOV32h ------------------------------------------------------------
NOV32i ------------------------------------------------------------
NOV32j ------------------------------------------------------------
NOV32k ------------------------------------------------------------
NOV32l ------------------------------------------------------------
NOV32m ------------------------------------------------------------
NOV32n ------------------------------------------------------------
NOV32a ------------------------------------------------------------
NOV32b ------------------------------------------------------------
NOV32c ------------------------------------------------------------
NOV32d ------------------------------------------------------------
NOV32e ------------------------------------------------------------
NOV32f EDLTPTTPNTEVSPRADPRLSQPEDIWPEWAWPVVVGTTMLLLLLFLAVSSLGSCSTGSP
NOV32g ------------------------------------------------------------
NOV32h ------------------------------------------------------------
NOV32i ------------------------------------------------------------
NOV32j ------------------------------------------------------------
NOV32k ------------------------------------------------------------
NOV32l ------------------------------------------------------------
NOV32m ------------------------------------------------------------
NOV32n ------------------------------------------------------------
NOV32a ------------------------------------------------------------
NOV32b ------------------------------------------------------------
NOV32c ------------------------------------------------------------
NOV32d ------------------------------------------------------------
NOV32e ------------------------------------------------------------
NOV32f APVPENDLVGIVGGHNTPGEVVVAVGADRRSLHFPEGHRPVHLPDSHQGCVSVRGPGAAE
NOV32g ------------------------------------------------------------
NOV32h ------------------------------------------------------------
NOV32i ------------------------------------------------------------
NOV32j ------------------------------------------------------------
NOV32k ------------------------------------------------------------
NOV32l ------------------------------------------------------------
NOV32m ------------------------------------------------------------
NOV32n ------------------------------------------------------------
NOV32a ------------------------------------------------------------
NOV32b ------------------------------------------------------------
NOV32c ------------------------------------------------------------
NOV32d ------------------------------------------------------------
NOV32e ------------------------------------------------------------
NOV32f CQPDRRPPNYSVFFLGADIALLKLATSSLEFTDSDNCWNTGWGMVGLLDMLPPPYRPQQV
NOV32g ------------------------------------------------------------
NOV32h ------------------------------------------------------------
NOV32i ------------------------------------------------------------
NOV32j ------------------------------------------------------------
NOV32k ------------------------------------------------------------
NOV32l ------------------------------------------------------------
NOV32m ------------------------------------------------------------
NOV32n ------------------------------------------------------------
NOV32a ------------------------------------------------------------
NOV32b ------------------------------------------------------------
NOV32c ------------------------------------------------------------
NOV32d ------------------------------------------------------------
NOV32e ------------------------------------------------------------
NOV32f KVLTLSNADCERQTYDAFPGAGDRKFIQDDMICAGRTGRRTWKGDSGGPLVCKKKGTWLQ
NOV32g ------------------------------------------------------------
NOV32h ------------------------------------------------------------
NOV32i ------------------------------------------------------------
NOV32j ------------------------------------------------------------
NOV32k ------------------------------------------------------------
NOV32l ------------------------------------------------------------
NOV32m ------------------------------------------------------------
NOV32n ------------------------------------------------------------
NOV32a ------------------------------------------------------------
NOV32b ------------------------------------------------------------
NOV32c ------------------------------------------------------------
NOV32d ------------------------------------------------------------
NOV32e ------------------------------------------------------------
NOV32f AGVVSWGFYSDRPSIGVYTRPETSWQGANHADAQRPAGRVPTMQRPRDMGQGQEWVCRPF
NOV32g ------------------------------------------------------------
NOV32h ------------------------------------------------------------
NOV32i ------------------------------------------------------------
NOV32j ------------------------------------------------------------
NOV32k ------------------------------------------------------------
NOV32l ------------------------------------------------------------
NOV32m ------------------------------------------------------------
NOV32n ------------------------------------------------------------
NOV32a ------------------------------------------------------------
NOV32b ------------------------------------------------------------
NOV32c ------------------------------------------------------------
NOV32d ------------------------------------------------------------
NOV32e ------------------------------------------------------------
NOV32f THVTCYPTAIPRPFTHVTCYLMAVPSTLTHVTCYPTAVPRPFTHVTCYLMAVPSTLTHIT
NOV32g ------------------------------------------------------------
NOV32h ------------------------------------------------------------
NOV32i ------------------------------------------------------------
NOV32j ------------------------------------------------------------
NOV32k ------------------------------------------------------------
NOV32l ------------------------------------------------------------
NOV32m ------------------------------------------------------------
NOV32n ------------------------------------------------------------
NOV32a ------------------------------------------------------------
NOV32b ------------------------------------------------------------
NOV32c ------------------------------------------------------------
NOV32d ------------------------------------------------------------
NOV32e ------------------------------------------------------------
NOV32f CYMMAVPRPFTHITCYPMAVPSTLTHVTCHPTAIPRPFTHITCYTMAIPRPSTTPPATRR
NOV32g ------------------------------------------------------------
NOV32h ------------------------------------------------------------
NOV32i ------------------------------------------------------------
NOV32j ------------------------------------------------------------
NOV32k ------------------------------------------------------------
NOV32l ------------------------------------------------------------
NOV32m ------------------------------------------------------------
NOV32n ------------------------------------------------------------
NOV32a ---------------------------
NOV32b ---------------------------
NOV32c ---------------------------
NOV32d ---------------------------
NOV32e ---------------------------
NOV32f PSPAPSPTSPATRWPSPGPSPMSPATR
NOV32g ---------------------------
NOV32h ---------------------------
NOV32i ---------------------------
NOV32j ---------------------------
NOV32k ---------------------------
NOV32l ---------------------------
NOV32m ---------------------------
NOV32n ---------------------------
NOV32a (SEQ ID NO: 382)
NOV32b (SEQ ID NO: 384)
NOV32c (SEQ ID NO: 386)
NOV32d (SEQ ID NO: 388)
NOV32e (SEQ ID NO: 390)
NOV32f (SEQ ID NO: 392)
NOV32g (SEQ ID NO: 394)
NOV32h (SEQ ID NO: 396)
NOV32i (SEQ ID NO: 398)
NOV32j (SEQ ID NO: 400)
NOV32k (SEQ ID NO: 402)
NOV32l (SEQ ID NO: 404)
NOV32m (SEQ ID NO: 406)
NOV32n (SEQ ID NO: 408)

[0531] Further analysis of the NOV32a protein yielded the following properties shown in Table 32C.

TABLE 32C
Protein Sequence Properties NOV32a

| | |
|---|---|
| SignalP analysis: | Cleavage site between residues 13 and 14 |

PSORT II analysis:
PSG: a new signal peptide prediction method

N-region: length 0; pos.chg 0; neg.chg 0
H-region: length 12; peak value 6.67
PSG score: 2.27

GvH: von Heijne's method for signal seq. recognition

GvH score (threshold: −2.1): −6.63
possible cleavage site: between 34 and 35

>>> Seems to have no N-terminal signal peptide
ALOM: Klein et al's method for TM region allocation

| Init position for calculation: 1 | | |
|---|---|---|
| Tentative number of TMS(s) for the threshold 0.5: 1 | | |
| Number of TMS(s) for threshold 0.5: 1 | | |
| INTEGRAL | Likelihood = −2.76 | Transmembrane 110-126 |

| | |
|---|---|
| PERIPHERAL | Likelihood = 1.80 (at 81) |

ALOM score: −2.76 (number of TMSs: 1)

MTOP: Prediction of membrane topology (Hartmann et al.)

Center position for calculation: 117
Charge difference: −2.0 C(0.0) − N(2.0)
N >= C: N-terminal side will be inside

>>> membrane topology: type 2 (cytoplasmic tail 1 to 110)
MITDISC: discrimination of mitochondrial targeting seq

| | | | |
|---|---|---|---|
| R content: | 0 | Hyd Moment(75): | 4.93 |
| Hyd Moment(95): | 1.50 | G content: | 5 |
| D/E content: | 2 | S/T content: | 1 |
| Score: −9.83 | | | |

Gavel: prediction of cleavage sites for mitochondrial preseq

cleavage site motif not found

NUCDISC: discrimination of nuclear localization signals

pat4: none
pat7: none
bipartite: none
content of basic residues: 10.6%
NLS Score: −0.47

KDEL: ER retention motif in the C-terminus: none
ER Membrane Retention Signals: none
SKL: peroxisomal targeting signal in the C-terminus: none
PTS2: 2nd peroxisomal targeting signal: none
VAC: possible vacuolar targeting motif: none
RNA-binding motif: none
Actinin-type actin-binding motif:

type 1: none
type 2: none

NMYR: N-myristoylation pattern: none
Prenylation motif: none
memYQRL: transport motif from cell surface to Golgi: none
Tyrosines in the tail: too long tail
Dileucine motif in the tail: found

LL at 15
LL at 82

checking 63 PROSITE DNA binding motifs: none
checking 71 PROSITE ribosomal protein motifs: none
checking 33 PROSITE prokaryotic DNA binding motifs: none
NNCN: Reinhardt's method for Cytoplasmic/Nuclear discrimination

Prediction: cytoplasmic
Reliability: 89

COIL: Lupas's algorithm to detect coiled-coil regions

total: 0 residues

Final Results (k = 9/23):

```
34.8%: cytoplasmic
30.4%: mitochondrial
13.0%: Golgi
  8.7%: endoplasmic reticulum
  4.3%: extracellular, including cell wall
  4.3%: nuclear
  4.3%: vesicles of secretory system
```

>> prediction for CG53989-03 is cyt (k = 23)

[0532] A search of the NOV32a protein against the Geneseq database, a proprietary database that contains sequences published in patents and patent publication, yielded several homologous proteins shown in Table 32D.

TABLE 32D
Geneseq Results for NOV32a

| | | NOV32a | Identities/ | |
|---|---|---|---|---|
| | | Residues/ | Similarities for | |
| Geneseq | Protein/Organism/Length | Match | the Matched | Expect |
| Identifier | [Patent #, Date] | Residues | Region | Value |
| AAE14347 | Human protease PRTS-12 protein - | 130 . . . 339 | 205/210 (97%) | e−123 |
| | Homo sapiens, 262 aa. | 53 . . . 262 | 205/210 (97%) | |
| | [WO200183775-A2, 08-NOV- | | | |
| | 2001] | | | |
| AAE08591 | Human NOV12 protein - Homo | 126 . . . 339 | 205/214 (95%) | e−122 |
| | sapiens, 220 aa. [WO200161009- | 7 . . . 220 | 206/214 (95%) | |
| | A2, 23-AUG-2001] | | | |
| AAE08590 | Human NOV11 protein - Homo | 135 . . . 339 | 203/205 (99%) | e−122 |
| | sapiens, 285 aa. [WO200161009- | 81 . . . 285 | 203/205 (99%) | |
| | A2, 23-AUG-2001] | | | |
| AAU82736 | Amino acid sequence of novel | 9 . . . 334 | 237/368 (64%) | e−118 |
| | human protease #35 - Homo | 46 . . . 411 | 252/368 (68%) | |
| | sapiens, 948 aa. [WO200200860- | | | |
| | A2, 03-JAN-2002] | | | |
| AAE08587 | Human NOV8 protein - Homo | 135 . . . 339 | 198/205 (96%) | e−116 |
| | sapiens, 290 aa. [WO200161009- | 86 . . . 290 | 198/205 (96%) | |
| | A2, 23-AUG-2001] | | | |

[0533] In a BLAST search of public sequence databases, the NOV32a protein was found to have homology to the proteins shown in the BLASTP data in Table 32E.

TABLE 32E
Public BLASTP Results for NOV32a

| | | NOV32a | Identities/ | |
|---|---|---|---|---|
| Protein | | Residues/ | Similarities for | |
| Accession | | Match | the Matched | Expect |
| Number | Protein/Organism/Length | Residues | Portion | Value |
| AAP21675 | Mast cell protease-11 - Mus | 106 . . . 336 | 129/231 (55%) | 2e−60 |
| | musculus (Mouse), 318 aa. | 60 . . . 284 | 155/231 (66%) | |
| AAA30855 | Mastin precursor - Canis sp, 251 | 98 . . . 337 | 120/240 (50%) | 7e−51 |
| | aa (fragment). | 22 . . . 249 | 142/240 (59%) | |
| P19236 | Mastocytoma protease precursor | 98 . . . 337 | 120/240 (50%) | 7e−51 |
| | (EC 3.4.21.—) - Canis familiaris | 40 . . . 267 | 142/240 (59%) | |
| | (Dog), 269 aa. | | | |
| Q8SQ44 | Tryptase precursor - Sus scrofa | 143 . . . 337 | 106/195 (54%) | 1e−49 |
| | (Pig), 277 aa. | 90 . . . 275 | 128/195 (65%) | |
| Q9XSM1 | Tryptase (EC 3.4.21.59) - Ovis | 109 . . . 337 | 95/229 (41%) | 6e−43 |
| | aries (Sheep), 273 aa. | 54 . . . 273 | 129/229 (55%) | |

[0534] PFam analysis indicates that the NOV32a protein contains the domains shown in the Table 32F.

TABLE 32F
Domain Analysis of NOV32a

| | NOV32a | Identities/ | |
|---|---|---|---|
| | Match | Similarities | |
| Pfam Domain | Region | for the Matched Region | Expect Value |
| trypsin | 125 . . . 329 | 80/272 (29%) | 5.6e−32 |
| | | 156/272 (57%) | |

### Example 33

[0535] The NOV33 clone was analyzed, and the nucleotide and encoded polypeptide sequences are shown in Table 33A.

TABLE 33A
NOV33 Sequence Analysis

| | | |
|---|---|---|
| NOV33a, CG54203-02 | SEQ ID NO: 409 | 1028 bp |
| DNA Sequence | ORF Start: ATG at 18 | ORF Stop: TGA at 975 |

TGCAGAGGGGATATCACATGGAAAAAGCCAATGAGACCTCCCCTGTGATGGGGTTCGTTCTCCTGGGG
CTCTCTGCCCACCCAGAGCTGGAAAAGACATTCTTCGTGCTCATCCTGATGATGTACCTCGTGATCCT
GCTGGGCAATGGGGTCCTCATCCTGGTGACCATCCTTGACTCCCGCCTGCACACGCCCATGTACTTCT
TCCTAGGGAACCTCTCCTTCCTGGACATCTGCTTCACTACCTCCTCAGTCCCACTGGTCCTGGACAGC
TTTTTGACTCCCCAGGAAACCATCTCCTTCTCAGCCTGTGCTGTGCAGATGGCACTCTCCTTTGCCAT
GGCAGGAACAGAGTGCTTGCTCCTGAGCATGATGGCATTTGATCGCTATGTGGCCATCTGCAACCCCC
TTAGGTACTCCGTGATCATGAGCAAGGCTGCCTACATGCCCATGGCTGCCAGCTCCTGGGCTATTGGT
GGTGCTGCTTCCGTGGTACACACATCCTTGGCAATTCAGCTGCCCTTCTGTGGAGACAATGTCATCAA
CCACTTCACCTGTGAGATTCTGGCTGTTCTAAAGTTGGCCTGTGCTGACATTTCCATCAATGTGATCA
GCATGGAGGTGACGAATGTGATCTTCCTAGGAGTCCCGGTTCTGTTCATCTCTTTCTCCTATGTCTTC
ATCATCACCACCATCCTGAGGATCCCCTCAGCTGAGGGGAGGAAAAAGGTCTTCTCCACCTGCTCTGC
CCACCTCACCGTGGTGATCGTCTTCTACGGGACCTTATTCTTCATGTATGGGAAGCCTAAGTCTAAGG
ACTCCATGGGAGCAGACAAAGAGGATCTTTCAGACAAACTCATCCCCCTTTTCTATGGGGTGGTGACC
CCGATGCTCAACCCCATCATCTATAGCCTGAGGAACAAGGATGTGAAGGCTGCTGTGAGGAGACTGCT
GAGACCAAAAGGCTTCACTCAGTGATGGTGGAAGGGTCCTCTGTGATTGTCACCCACATGGAAGTAAG
GAATCACA

| | | | |
|---|---|---|---|
| NOV33a, CG54203-02 | SEQ ID NO: 410 | 319 aa | MW at 35072.3kD |
| Protein Sequence | | | |

[sequence omitted]

| | | |
|---|---|---|
| NOV33b, CG54203-01 | SEQ ID NO: 411 | 1031 bp |
| DNA Sequence | ORF Start: ATG at 22 | ORF Stop: TGA at 979 |

TGATGGCAGAGGGGATATCACATGGAAAAAGCCAATGAGACCTCCCCTGTGATGGGGTTCGTTCTCCT
GAGGCTCTCTGCCCACCCAGAGCTGGAAAAGACATTCTTCGTGCTCATCCTGCTGATGTACCTCGTGA
TCCTGCTGGGCAATGGGGTCCTCATCCTGGTGACCATCCTTGACTCCCGCCTGCACACGCCCATGTAC
TTCTTCCTAGGGAACCTCTCCTTCCTGGACATCTGCTTCACTACCTCCTCAGTCCCACTGGTCCTGGA
CAGCTTTTTGACTCCCCAGGAAACCATCTCCTTCTCAGCCTGTGCTGTGCAGATGGCACTCTCCTTTG
CCATGGCAGGAACAGAGTGCTTGCTCCTGAGCATGATGGCATTTGATCGCTATGTGGCCATCTGCAAC
CCCCTTAGGTACTCCGTGATCATGAGCAAGGCTGCCTACATGCCCATGGCTGCCAGCTCCTGGGCTAT
TGGTGGTGCTGCTTCCGTGGTACACACATCCTTGGCAATTCAGCTGCCCTTCTGTGGAGACAATGTCA
TCAACCACTTCACCTGTGAGATTCTGGCTGTTCTAAAGTTGGCCTGTGCTGACATTTCCATCAATGTG
ATCAGCATGGAGGTGACGAATGTGATCTTCCTAGGAGTCCCGGTTCTGTTCATCTCTTTCTCCTATGT
CTTCATCATCACCACCATCCTGAGGATCCCCTCAGCTGAGGGGAGGAAAAAGGTCTTCTCCACCTGCT
CTGCCCACCTCACCGTGGTGATCGTCTTCTACGGGACCTTATTCTTCATGTATGGGAAGCCTAAGTCT
AAGGACTCCATGGGAGCAGACAAAGAGGATCTTTCAGACAAACTCATCCCCCTTTTCTATGGGGTGGT
GACCCCGATGCTCAACCCCATCATCTATAGCCTGAGGAACAAGGATGTGAAGGCTGCTGTGAGGAGAC
TGCTGAGACCAAAAGGCTTCACTCAGTGATGGTGGAAGGGTCCTCTGTGATTGTCACCCACATGGAAG
TAAGGAATCAC

| | | | |
|---|---|---|---|
| NOV33b, CG54203-01 | SEQ ID NO: 412 | 319 aa | MW at 35171.4kD |
| Protein Sequence | | | |

MEKANETSPVMGFVLLRLSAHPELEKTFFVLILLMYLVILLGNGVLILVTILDSRLHTPMYFFLGNLS
FLDICFTTSSVPLVLDSFLTPQETISFSACAVQMALSFAMAGTECLLLSMMAFDRYVAICNPLRYSVI
MSKAAYMPMAASSWAIGGAASVVHTSLAIQLPFCGDNVINHFTCEILAVLKLACADISINVISMEVTN
VIFLGVPVLFISFSYVFIITTILRIPSAEGRKKVFSTCSAHLTVVIVFYGTLFFMYGKPKSKDSMGAD
KEDLSDKLIPLFYGVVTPMLNPIIYSLRNKDVKAAVRRLLRPKGFTQ

| | | |
|---|---|---|
| NOV33c, SNP13382442 of | SEQ ID NO: 413 | 1028 bp |
| CG54203-02, DNA Sequence | ORF Start: ATG at 18 | ORF Stop: TGA at 975 |
| | SNP Pos: 66 | SNP Change: G to A |

TGCAGAGGGGATATCACATGGAAAAAGCCAATGAGACCTCCCCTGTGATGGGGTTCGTTCTCCTGAGG
CTCTCTGCCCACCCAGAGCTGGAAAAGACATTCTTCGTGCTCATCCTGCTGATGTACCTCGTGATCCT
GCTGGGCAATGGGGTCCTCATCCTGGTGACCATCCTTGACTCCCGCCTGCACACGCCCATGTACTTCT
TCCTAGGGAACCTCTCCTTCCTGGACATCTGCTTCACTACCTCCTCAGTCCCACTGGTCCTGGACAGC
TTTTTGACTCCCCAGGAAACCATCTCCTTCTCAGCCTGTGCTGTGCAGATGGCACTCTCCTTTGCCAT
GGCAGGAACAGAGTGCTTGCTCCTGAGCATGATGGCATTTGATCGCTATGTGGCCATCTGCAACCCCC
TTAGGTACTCCGTGATCATGAGCAAGGCTGCCTACATGCCCATGGCTGCCAGCTCCTGGGCTATTGGT
GGTGCTGCTTCCGTGGTACACACATCCTTGGCAATTCAGCTGCCCTTCTGTGGAGACAATGTCATCAA
CCACTTCACCTGTGAGATTCTGGCTGTTCTAAAGTTGGCCTGTGCTGACATTTCCATCAATGTGATCA
GCATGGAGGTGACGAATGTGATCTTCCTAGGAGTCCCGGTTCTGTTCATCTCTTTCTCCTATGTCTTC
ATCATCACCACCATCCTGAGGATCCCCTCAGCTGAGGGGAGGAAAAAGGTCTTCTCCACCTGCTCTGC
CCACCTCACCGTGGTGATCGTCTTCTACGGGACCTTATTCTTCATGTATGGGAAGCCTAAGTCTAAGG
ACTCCATGGGAGCAGACAAAGAGGATCTTTCAGACAAACTCATCCCCCTTTTCTATGGGGTGGTGACC
CCGATGCTCAACCCCATCATCTATAGCCTGAGGAACAAGGATGTGAAGGCTGCTGTGAGGAGACTGCT
GAGACCAAAAGGCTTCACTCAGTGATGGTGGAAGGGTCCTCTGTGATTGTCACCCACATGGAAGTAAG
GAATCACA

| | | | |
|---|---|---|---|
| NOV33c, SNP13382442 of | SEQ ID NO: 414 | 319 aa | MW at 35171.4kD |
| CG54203-02, Protein | SNP Pos: 17 | | SNP Change: Gly to Arg |
| Sequence | | | |

MEKANETSPVMGFVLLRLSAHPELEKTFFVLILLMYLVILLGNGVLILVTILDSRLHTPMYFFLGNLS
FLDICFTTSSVPLVLDSFLTPQETISFSACAVQMALSFAMAGTECLLLSMMAFDRYVAICNPLRYSVI
MSKAAYMPMAASSWAIGGAASVVHTSLAIQLPFCGDNVINHFTCEILAVLKLACADISINVISMEVTN
VIFLGVPVLFISFSYVFIITTILRIPSAEGRKKVFSTCSAHLTVVIVFYGTLFFMYGKPKSKDSMGAD
KEDLSDKLIPLFYGVVTPMLNPIEYSLRNKDVKAAVRRLLRPKGFTQ

| | | |
|---|---|---|
| NOV33d, SNP13373880 of | SEQ ID NO: 415 | 1028 bp |
| CG54203-02, DNA Sequence | ORF Start: ATG at 18 | ORF Stop: TGA at 975 |
| | SNP Pos: 324 | SNP Change: G to A |

TGCAGAGGGGATATCACATGGAAAAAGCCAATGAGACCTCCCCTGTGATGGGGTTCGTTCTCCTGAGG
CTCTCTGCCCACCCAGAGCTGGAAAAGACATTCTTCGTGCTCATCCTGCTGATGTACCTCGTGATCCT
GCTGGGCAATGGGGTCCTCATCCTGGTGACCATCCTTGACTCCCGCCTGCACACGCCCATGTACTTCT
TCCTAGGGAACCTCTCCTTCCTGGACATCTGCTTCACTACCTCCTCAGTCCCACTGGTCCTGGACAGC
TTTTTGACTCCCCAGGAAACCATCTCCTTCTCAGCCTGTGCTGTGCAGATGACACTCTCCTTTGCCAT
GGCAGGAACAGAGTGCTTGCTCCTGAGCATGATGGCATTTGATCGCTATGTGGCCATCTGCAACCCCC
TTAGGTACTCCGTGATCATGAGCAAGGCTGCCTACATGCCCATGGCTGCCAGCTCCTGGGCTATTGGT
GGTGCTGCTTCCGTGGTACACACATCCTTGGCAATTCAGCTGCCCTTCTGTGGAGACAATGTCATCAA
CCACTTCACCTGTGAGATTCTGGCTGTTCTAAAGTTGGCCTGTGCTGACATTTCCATCAATGTGATCA
GCATGGAGGTGACGAATGTGATCTTCCTAGGAGTCCCGGTTCTGTTCATCTCTTTCTCCTATGTCTTC
ATCATCACCACCATCCTGAGGATCCCCTCAGCTGAGGGGAGGAAAAAGGTCTTCTCCACCTGCTCTGC
CCACCTCACCGTGGTGATCGTCTTCTACGGGACCTTATTCTTCATGTATGGGAAGCCTAAGTCTAAGG
ACTCCATGGGAGCAGACAAAGAGGATCTTTCAGACAAACTCATCCCCCTTTTCTATGGGGTGGTGACC
CCGATGCTCAACCCCATCATCTATAGCCTGAGGAACAAGGATGTGAAGGCTGCTGTGAGGAGACTGCT
GAGACCAAAAGGCTTCACTCAGTGATGGTGGAAGGGTCCTCTGTGATTGTCACCCACATGGAAGTAAG
GAATCACA

| | | | |
|---|---|---|---|
| NOV33d, SNP13373880 of | SEQ ID NO: 416 | 319 aa | MW at 35102.3kD |
| CG54203-02, Protein | SNP Pos: 103 | | SNP Change: Ala to Thr |
| Sequence | | | |

MEKANETSPVMGFVLLGLSAHPELEKTFFVLILLMYLVILLGNGVLILVTILDSRLHTPMYFFLGNLS
FLDICFTTSSVPLVLDSFLTPQETISFSACAVQMTLSFAMAGTECLLLSMMAFDRYVAICNPLRYSVI
MSKAAYMPMAASSWAIGGAASVVHTSLAIQLPFCGDNVINHFTCEILAVLKLACADISINVISMEVTN
VIFLGVPVLFISFSYVFIITTILRIPSAEGRKKVFSTCSAHLTVVIVFYGTLFFMYGKPKSKDSMGAD
KEDLSDKLIPLFYGVVTPMLNPIEYSLRNKDVKAAVRRLLRPKGFTQ

| | | |
|---|---|---|
| NOV33e, SNP13373881 of | SEQ ID NO: 417 | 1028 bp |
| CG54203-02, DNA Sequence | ORF Start: ATG at 18 | ORF Stop: TGA at 975 |
| | SNP Pos: 429 | SNP Change: A to G |

TGCAGAGGGGATATCACATGGAAAAAGCCAATGAGACCTCCCCTGTGATGGGGTTCGTTCTCCTGAGG
CTCTCTGCCCACCCAGAGCTGGAAAAGACATTCTTCGTGCTCATCCTGCTGATGTACCTCGTGATCCT
GCTGGGCAATGGGGTCCTCATCCTGGTGACCATCCTTGACTCCCGCCTGCACACGCCCATGTACTTCT
TCCTAGGGAACCTCTCCTTCCTGGACATCTGCTTCACTACCTCCTCAGTCCCACTGGTCCTGGACAGC
TTTTTGACTCCCCAGGAAACCATCTCCTTCTCAGCCTGTGCTGTGCAGATGGCACTCTCCTTTGCCAT
GGCAGGAACAGAGTGCTTGCTCCTGAGCATGATGGCATTTGATCGCTATGTGGCCATCTGCAACCCCC
TTAGGTACTCCGTGATCATGGGCAAGGCTGCCTACATGCCCATGGCTGCCAGCTCCTGGGCTATTGGT
GGTGCTGCTTCCGTGGTACACACATCCTTGGCAATTCAGCTGCCCTTCTGTGGAGACAATGTCATCAA
CCACTTCACCTGTGAGATTCTGGCTGTTCTAAAGTTGGCCTGTGCTGACATTTCCATCAATGTGATCA
GCATGGAGGTGACGAATGTGATCTTCCTAGGAGTCCCGGTTCTGTTCATCTCTTTCTCCTATGTCTTC
ATCATCACCACCATCCTGAGGATCCCCTCAGCTGAGGGGAGGAAAAAGGTCTTCTCCACCTGCTCTGC
CCACCTCACCGTGGTGATCGTCTTCTACGGGACCTTATTCTTCATGTATGGGAAGCCTAAGTCTAAGG
ACTCCATGGGAGCAGACAAAGAGGATCTTTCAGACAAACTCATCCCCCTTTTCTATGGGGTGGTGACC
CCGATGCTCAACCCCATCATCTATAGCCTGAGGAACAAGGATGTGAAGGCTGCTGTGAGGAGACTGCT
GAGACCAAAAGGCTTCACTCAGTGATGGTGGAAGGGTCCTCTGTGATTGTCACCCACATGGAAGTAAG
GAATCACA

| | | | |
|---|---|---|---|
| NOV33e, SNP13373881 of | SEQ ID NO: 418 | 319 aa | MW at 35042.3kD |
| CG54203-02, Protein | SNP Pos: 138 | | SNP Change: Ser to Gly |
| Sequence | | | |

MEKANETSPVMGFVLLGLSAHPELEKTFFVLILLMYLVILLGNGVLILVTILDSRLHTPMYFFLGNLS
FLDICFTTSSVPLVLDSFLTPQETISFSACAVQMALSFAMAGTECLLLSMMAFDRYVAICNPLRYSVI
MGKAAYMPMAASSWAIGGAASVVHTSLAIQLPFCGDNVINHFTCEILAVLKLACADISINVISMEVTN
VIFLGVPVLFISFSYVFIITTILRIPSAEGRKKVFSTCSAHLTVVIVFYGTLFFMYGKPKSKDSMGAD
KEDLSDKLIPLFYGVVTPMLNPIEYSLRNKDVKAAVRRLLRPKGFTQ

| | | |
|---|---|---|
| NOV33f, SNP13382443 of | SEQ ID NO: 419 | 1028 bp |
| CG54203-02, DNA Sequence | ORF Start: ATG at 18 | ORF Stop: TGA at 975 |
| | SNP Pos: 444 | SNP Change: A to G |

TGCAGAGGGGATATCACATGGAAAAAGCCAATGAGACCTCCCCTGTGATGGGGTTCGTTCTCCTGAGG
CTCTCTGCCCACCCAGAGCTGGAAAAGACATTCTTCGTGCTCATCCTGCTGATGTACCTCGTGATCCT
GCTGGGCAATGGGGTCCTCATCCTGGTGACCATCCTTGACTCCCGCCTGCACACGCCCATGTACTTCT
TCCTAGGGAACCTCTCCTTCCTGGACATCTGCTTCACTACCTCCTCAGTCCCACTGGTCCTGGACAGC
TTTTTGACTCCCCAGGAAACCATCTCCTTCTCAGCCTGTGCTGTGCAGATGGCACTCTCCTTTGCCAT
GGCAGGAACAGAGTGCTTGCTCCTGAGCATGATGGCATTTGATCGCTATGTGGCCATCTGCAACCCCC
TTAGGTACTCCGTGATCATGAGCAAGGCTGCCTACGTGCCCATGGCTGCCAGCTCCTGGGCTATTGGT
GGTGCTGCTTCCGTGGTACACACATCCTTGGCAATTCAGCTGCCCTTCTGTGGAGACAATGTCATCAA
CCACTTCACCTGTGAGATTCTGGCTGTTCTAAAGTTGGCCTGTGCTGACATTTCCATCAATGTGATCA
GCATGGAGGTGACGAATGTGATCTTCCTAGGAGTCCCGGTTCTGTTCATCTCTTTCTCCTATGTCTTC
ATCATCACCACCATCCTGAGGATCCCCTCAGCTGAGGGGAGGAAAAAGGTCTTCTCCACCTGCTCTGC
CCACCTCACCGTGGTGATCGTCTTCTACGGGACCTTATTCTTCATGTATGGGAAGCCTAAGTCTAAGG
ACTCCATGGGAGCAGACAAAGAGGATCTTTCAGACAAACTCATCCCCCTTTTCTATGGGGTGGTGACC
CCGATGCTCAACCCCATCATCTATAGCCTGAGGAACAAGGATGTGAAGGCTGCTGTGAGGAGACTGCT
GAGACCAAAAGGCTTCACTCAGTGATGGTGGAAGGGTCCTCTGTGATTGTCACCCACATGGAAGTAAG
GAATCACA

| | | | |
|---|---|---|---|
| NOV33f, SNP13382443 of | SEQ ID NO: 420 | 319 aa | MW at 35040.2kD |
| CG54203-02, Protein | SNP Pos: 143 | | SNP Change: Met to Val |
| Sequence | | | |

MEKANETSPVMGFVLLGLSAHPELEKTFFVLILLMYLVILLGNGVLILVTILDSRLHTPMYFFLGNLS
FLDICFTTSSVPLVLDSFLTPQETISFSACAVQMALSFAMAGTECLLLSMMAFDRYVAICNPLRYSVI
MSKAAYVPMAASSWAIGGAASVVHTSLAIQLPFCGDNVINHFTCEILAVLKLACADISINVISMEVTN
VIFLGVPVLFISFSYVFIITTILRIPSAEGRKKVFSTCSAHLTVVIVFYGTLFFMYGKPKSKDSMGAD
KEDLSDKLIPLFYGVVTPMLNPIEYSLRNKDVKAAVRRLLRPKGFTQ

| | | |
|---|---|---|
| NOV33g, SNP13373844 of | SEQ ID NO: 421 | 1028 bp |
| CG54203-02, DNA Sequence | ORF Start: ATG at 18 | ORF Stop: TGA at 975 |
| | SNP Pos: 719 | SNP Change: G to A |

TGCAGAGGGGATATCACATGGAAAAAGCCAATGAGACCTCCCCTGTGATGGGGTTCGTTCTCCTGAGG
CTCTCTGCCCACCCAGAGCTGGAAAAGACATTCTTCGTGCTCATCCTGCTGATGTACCTCGTGATCCT
GCTGGGCAATGGGGTCCTCATCCTGGTGACCATCCTTGACTCCCGCCTGCACACGCCCATGTACTTCT
TCCTAGGGAACCTCTCCTTCCTGGACATCTGCTTCACTACCTCCTCAGTCCCACTGGTCCTGGACAGC
TTTTTGACTCCCCAGGAAACCATCTCCTTCTCAGCCTGTGCTGTGCAGATGGCACTCTCCTTTGCCAT
GGCAGGAACAGAGTGCTTGCTCCTGAGCATGATGGCATTTGATCGCTATGTGGCCATCTGCAACCCCC
TTAGGTACTCCGTGATCATGAGCAAGGCTGCCTACATGCCCATGGCTGCCAGCTCCTGGGCTATTGGT
GGTGCTGCTTCCGTGGTACACACATCCTTGGCAATTCAGCTGCCCTTCTGTGGAGACAATGTCATCAA
CCACTTCACCTGTGAGATTCTGGCTGTTCTAAAGTTGGCCTGTGCTGACATTTCCATCAATGTGATCA
GCATGGAGGTGACGAATGTGATCTTCCTAGGAGTCCCGGTTCTGTTCATCTCTTTCTCCTATGTCTTC
ATCATCACCACCATCCTGAGGATCCCCTCAGCTGAGGGAAGGAAAAAGGTCTTCTCCACCTGCTCTGC
CCACCTCACCGTGGTGATCGTCTTCTACGGGACCTTATTCTTCATGTATGGGAAGCCTAAGTCTAAGG
ACTCCATGGGAGCAGACAAAGAGGATCTTTCAGACAAACTCATCCCCCTTTTCTATGGGGTGGTGACC
CCGATGCTCAACCCCATCATCTATAGCCTGAGGAACAAGGATGTGAAGGCTGCTGTGAGGAGACTGCT
GAGACCAAAAGGCTTCACTCAGTGATGGTGGAAGGGTCCTCTGTGATTGTCACCCACATGGAAGTAAG
GAATCACA

| | | | |
|---|---|---|---|
| NOV33g, SNP13373844 of | SEQ ID NO: 422 | 319 aa | MW at 35072.3kD |
| CG54203-02, Protein | SNP Pos: 234 | | SNP Change: Gly to Gly |
| Sequence | | | |

MEKANETSPVMGFVLLGLSAHPELEKTFFVLILLMYLVILLGNGVLILVTILDSRLHTPMYFFLGNLS
FLDICFTTSSVPLVLDSFLTPQETISFSACAVQMALSFAMAGTECLLLSMMAFDRYVAICNPLRYSVI
MSKAAYMPMAASSWAIGGAASVVHTSLAIQLPFCGDNVINHFTCEILAVLKLACADISINVISMEVTN
VIFLGVPVLFISFSYVFIITTILRIPSAEGRKKVFSTCSAHLTVVIVFYGTLFFMYGKPKSKDSMGAD
KEDLSDKLIPLFYGVVTPMLNPIEYSLRNKDVKAAVRRLLRPKGFTQ

| | | |
|---|---|---|
| NOV33h, SNP13373883 of | SEQ ID NO: 423 | 1028 bp |
| CG54203-02, DNA Sequence | ORF Start: ATG at 18 | ORF Stop: TGA at 975 |
| | SNP Pos: 758 | SNP Change: C to T |

TGCAGAGGGGATATCACATGGAAAAAGCCAATGAGACCTCCCCTGTGATGGGGTTCGTTCTCCTGAGG
CTCTCTGCCCACCCAGAGCTGGAAAAGACATTCTTCGTGCTCATCCTGCTGATGTACCTCGTGATCCT
GCTGGGCAATGGGGTCCTCATCCTGGTGACCATCCTTGACTCCCGCCTGCACACGCCCATGTACTTCT
TCCTAGGGAACCTCTCCTTCCTGGACATCTGCTTCACTACCTCCTCAGTCCCACTGGTCCTGGACAGC
TTTTTGACTCCCCAGGAAACCATCTCCTTCTCAGCCTGTGCTGTGCAGATGGCACTCTCCTTTGCCAT
GGCAGGAACAGAGTGCTTGCTCCTGAGCATGATGGCATTTGATCGCTATGTGGCCATCTGCAACCCCC
TTAGGTACTCCGTGATCATGAGCAAGGCTGCCTACATGCCCATGGCTGCCAGCTCCTGGGCTATTGGT
GGTGCTGCTTCCGTGGTACACACATCCTTGGCAATTCAGCTGCCCTTCTGTGGAGACAATGTCATCAA
CCACTTCACCTGTGAGATTCTGGCTGTTCTAAAGTTGGCCTGTGCTGACATTTCCATCAATGTGATCA
GCATGGAGGTGACGAATGTGATCTTCCTAGGAGTCCCGGTTCTGTTCATCTCTTTCTCCTATGTCTTC
ATCATCACCACCATCCTGAGGATCCCCTCAGCTGAGGGGAGGAAAAAGGTCTTCTCCACCTGCTCTGC
CCACCTCACTGTGGTGATCGTCTTCTACGGGACCTTATTCTTCATGTATGGGAAGCCTAAGTCTAAGG
ACTCCATGGGAGCAGACAAAGAGGATCTTTCAGACAAACTCATCCCCCTTTTCTATGGGGTGGTGACC
CCGATGCTCAACCCCATCATCTATAGCCTGAGGAACAAGGATGTGAAGGCTGCTGTGAGGAGACTGCT
GAGACCAAAAGGCTTCACTCAGTGATGGTGGAAGGGTCCTCTGTGATTGTCACCCACATGGAAGTAAG
GAATCACA

| | | | |
|---|---|---|---|
| NOV33h, SNP13373883 of | SEQ ID NO: 424 | 319 aa | MW at 35072.3kD |
| CG54203-02, Protein | SNP Pos: 247 | | SNP Change: Thr to Thr |
| Sequence | | | |

MEKANETSPVMGFVLLGLSAHPELEKTFFVLILLMYLVILLGNGVLILVTILDSRLHTPMYFFLGNLS
FLDICFTTSSVPLVLDSFLTPQETISFSACAVQMALSFAMAGTECLLLSMMAFDRYVAICNPLRYSVI
MSKAAYMPMAASSWAIGGAASVVHTSLAIQLPFCGDNVINHFTCEILAVLKLACADISINVISMEVTN
VIFLGVPVLFISFSYVFIITTILRIPSAEGRKKVFSTCSAHLTVVIVFYGTLFFMYGKPKSKDSMGAD
KEDLSDKLIPLFYGVVTPMLNPIEYSLRNKDVKAAVRRLLRPKGFTQ

[0536] A ClustalW comparison of the above protein sequences yields the following sequence alignment shown in Table 33B.

TABLE 33B
Comparison of the NOV33 protein sequences.

NOV33a MEKANETSPVMGFVLLGLSAHPELEKTFFVLILLMYLVILLGNGVLILVTILDSRLHTPM
NOV33b MEKANETSPVMGFVLLRLSAHPELEKTFFVLILLMYLVILLGNGVLILVTILDSRLHTPM
NOV33a YFFLGNLSFLDICFTTSSVPLVLDSFLTPQETISFSACAVQMALSFAMAGTECLLLSMMA
NOV33b YFFLGNLSFLDICFTTSSVPLVLDSFLTPQETISFSACAVQMALSFAMAGTECLLLSMMA
NOV33a FDRYVAICNPLRYSVIMSKAAYMPMAASSWAIGGAASVVHTSLAIQLPFCGDNVINHFTC
NOV33b FDRYVAICNPLRYSVIMSKAAYMPMAASSWAIGGAASVVHTSLAIOLPFCGDNVINHFTC
NOV33a EILAVLKLACADISINVISMEVTNVIFLGVPVLFISFSYVFIITTILRIPSAEGRKKVFS
NOV33b EILAVLKLACADISINVISMEVTNVIFLGVPVLFISFSYVFIITTILRIPSAEGRKKVFS
NOV33a TCSAHLTVVIVFYGTLFFMYGKPKSKDSMGADKEDLSDKLIPLFYGVVTPMLNPIIYSLR
NOV33b TCSAHLTVVIVFYGTLFFMYGKPKSKDSMGADKEDLSDKLIPLFYGVVTPMLNPIIYSLR
NOV33a NKDVKAAVRRLLRPKGFTQ
NOV33b NKDVKAAVRRLLRPKGFTQ
NOV33a (SEQ ID NO: 410)
NOV33b (SEQ ID NO: 412)

[0537] Further analysis of the NOV33a protein yielded the following properties shown in Table 33C.

TABLE 33C
Protein Sequence Properties NOV33a

| | |
|---|---|
| SignalP analysis: | Cleavage site between residues 45 and 46 |

PSORT II analysis:
PSG: a new signal peptide prediction method

N-region: length 6; pos.chg 1; neg.chg 2
H-region: length 16; peak value 0.00
PSG score: −4.40

GvH: von Heijne's method for signal seq. recognition

GvH score (threshold: −2.1): −3.59
possible cleavage site: between 44 and 45

>>> Seems to have no N-terminal signal peptide
ALOM: Klein et al's method for TM region allocation

| Init position for calculation: 1 | | |
|---|---|---|
| Tentative number of TMS(s) for the threshold 0.5: 7 | | |
| INTEGRAL | Likelihood = −9.50 | Transmembrane 31-47 |
| INTEGRAL | Likelihood = −0.22 | Transmembrane 67-83 |
| INTEGRAL | Likelihood = −0.32 | Transmembrane 93-109 |
| INTEGRAL | Likelihood = −3.77 | Transmembrane 182-198 |
| INTEGRAL | Likelihood = −6.95 | Transmembrane 206-222 |
| INTEGRAL | Likelihood = −1.81 | Transmembrane 242-258 |
| INTEGRAL | Likelihood = −0.22 | Transmembrane 280-296 |

| | |
|---|---|
| PERIPHERAL | Likelihood = 2.38 (at 151) |

ALOM score: −9.50 (number of TMSs: 7)

MTOP: Prediction of membrane topology (Hartmann et al.)

Center position for calculation: 38
Charge difference: 1.0 C(0.5) − N(−0.5)
C > N: C-terminal side will be inside

>>> membrane topology: type 3b
MITDISC: discrimination of mitochondrial targeting seq

| | | | |
|---|---|---|---|
| R content: | 0 | Hyd Moment(75): | 6.12 |
| Hyd Moment(95): | 11.03 | G content: | 0 |
| D/E content: | 2 | S/T content: | 0 |
| Score: −6.47 | | | |

Gavel: prediction of cleavage sites for mitochondrial preseq

cleavage site motif not found

NUCDISC: discrimination of nuclear localization signals

pat4: none
pat7: none
bipartite: none
content of basic residues: 7.2%
NLS Score: −0.47

KDEL: ER retention motif in the C-terminus: none
ER Membrane Retention Signals:

KKXX-like motif in the C-terminus: KGFT

SKL: peroxisomal targeting signal in the C-terminus: none
PTS2: 2nd peroxisomal targeting signal: none
VAC: possible vacuolar targeting motif: none
RNA-binding motif: none
Actinin-type actin-binding motif:

type 1: none
type 2: none

NMYR: N-myristoylation pattern: none
Prenylation motif: none
memYQRL: transport motif from cell surface to Golgi: none
Tyrosines in the tail: none
Dileucine motif in the tail: none
checking 63 PROSITE DNA binding motifs: none
checking 71 PROSITE ribosomal protein motifs: none
checking 33 PROSITE prokaryotic DNA binding motifs: none
NNCN: Reinhardt's method for Cytoplasmic/Nuclear discrimination

Prediction: cytoplasmic
Reliability: 94.1

COIL: Lupas's algorithm to detect coiled-coil regions

total: 0 residues

Final Results (k = 9/23):

55.6%: endoplasmic reticulum
11.1%: mitochondrial
11.1%: vacuolar
11.1%: vesicles of secretory system
11.1%: Golgi

>> prediction for CG54203-02 is end (k = 9)

[0538] A search of the NOV33a protein against the Geneseq database, a proprietary database that contains sequences published in patents and patent publication, yielded several homologous proteins shown in Table 33D.

TABLE 33D
Geneseq Results for NOV33a

| | | NOV33a | Identities/ | |
|---|---|---|---|---|
| | | Residues/ | Similarities for | |
| Geneseq | Protein/Organism/Length | Match | the Matched | Expect |
| Identifier | [Patent #, Date] | Residues | Region | Value |
| AAU85170 | G-coupled olfactory receptor #31 - | 1 . . . 319 | 318/319 (99%) | e−179 |
| | Homo sapiens, 319 aa. | 1 . . . 319 | 318/319 (99%) | |
| | [WO200198526-A2, 27-DEC- | | | |
| | 2001] | | | |
| AAU97924 | Novel odourant receptor NOV3 | 1 . . . 319 | 318/319 (99%) | e−179 |
| | protein - Unidentified, 319 aa. | 1 . . . 319 | 318/319 (99%) | |
| | [WO200236632-A2, 10-MAY- | | | |
| | 2002] | | | |
| AAG71989 | Human olfactory receptor | 1 . . . 319 | 318/319 (99%) | e−179 |
| | polypeptide, SEQ ID NO: 1670 - | 1 . . . 319 | 318/319 (99%) | |
| | Homo sapiens, 319 aa. | | | |
| | [WO200127158-A2, 19-APR- | | | |
| | 2001] | | | |
| AAU07096 | Human odorant receptor (OR) | 1 . . . 319 | 318/319 (99%) | e−179 |
| | polypeptide #13 - Homo sapiens, | 1 . . . 319 | 318/319 (99%) | |
| | 319 aa. [WO200157215-A2, 09- | | | |
| | AUG-2001] | | | |
| AAU07086 | Human odorant receptor (OR) | 1 . . . 319 | 318/319 (99%) | e−179 |
| | polypeptide #3 - Homo sapiens, | 1 . . . 319 | 318/319 (99%) | |
| | 319 aa. [WO200157215-A2, 09- | | | |
| | AUG-2001] | | | |

[0539] In a BLAST search of public sequence databases, the NOV33a protein was found to have homology to the proteins shown in the BLASTP data in Table 33E.

TABLE 33E
Public BLASTP Results for NOV33a

| | | NOV33a | Identities/ | |
|---|---|---|---|---|
| Protein | | Residues/ | Similarities for | |
| Accession | | Match | the Matched | |
| Number | Protein/Organism/Length | Residues | Portion | Expect Value |
| Q9NQN1 | Olfactory receptor 2S2 - Homo | 1 . . . 319 | 318/319 (99%) | e−179 |
| | sapiens (Human), 319 aa. | 1 . . . 319 | 318/319 (99%) | |
| CAC88321 | Sequence 3 from Patent | 1 . . . 317 | 263/317 (82%) | e−151 |
| | WO0164879 - Homo sapiens | 1 . . . 317 | 289/317 (90%) | |
| | (Human), 318 aa. | | | |
| Q9QZ22 | Olfactory receptor | 1 . . . 319 | 263/319 (82%) | e−150 |
| | GA_x5J8B7W5BNN-979337- | 1 . . . 319 | 292/319 (91%) | |
| | 980296 - Mus musculus | | | |
| | (Mouse), 319 aa. | | | |
| CAC88320 | Sequence 1 from Patent | 1 . . . 317 | 263/318 (82%) | e−149 |
| | WO0164879 - Homo sapiens | 1 . . . 318 | 288/318 (89%) | |
| | (Human), 319 aa. | | | |
| Q9QZ19 | Olfactory receptor (Olfactory | 1 . . . 317 | 257/317 (81%) | e−147 |
| | receptor MOR262-5) - Mus | 1 . . . 317 | 283/317 (89%) | |
| | musculus (Mouse), 319 aa. | | | |

[0540] PFam analysis indicates that the NOV33a protein contains the domains shown in the Table 33F.

TABLE 33F
Domain Analysis of NOV33a

| | NOV33a | Identities/ | |
|---|---|---|---|
| | Match | Similarities | |
| Pfam Domain | Region | for the Matched Region | Expect Value |
| 7tm_1 | 42 . . . 297 | 57/280 (20%) | 3.7e−35 |
| | | 179/280 (64%) | |

### Example 34

[0541] The NOV34 clone was analyzed, and the nucleotide and encoded polypeptide sequences are shown in Table 34A.

TABLE 34A
NOV34 Sequence Analysis

| | | |
|---|---|---|
| NOV34a, CG54212-02 | SEQ ID NO: 425 | 953 bp |
| DNA Sequence | ORF Start: ATG at 11 | ORF Stop: TGA at 947 |

ACTCTGCAGCATGGAGCCGCTCAACAGAACAGAGGTGTCCGAGTTCTTTCTGAAAGGATTTTCTGGCT
ACCCAGCCCTGGAGCATCTGCTCTTCCCTCTGTGCTCAGCCATGTACCTGGTGACCCTCCTGGGGAAC
ACAGCCATCATGGCGGTGAGCGTGCTAGATATCCACCTGCACACGCCTGTGTACTTCTTCCTGGGCAA
CCTCTCTACCCTGGACATCTGCTACACGCCCACCTTTGTGCCTCTGATGCTGGTCCACCTCCTGTCAT
CCCGGAAGACCATCTCCTTTGCTGTCTGTGCCATCCAGATGTGTCTGAGCCTGTCCACGGGCTCCACG
GAGTGCCTGCTACTGGCCATCACGGCCTATGACCGCTACCTGGCCATCTGCCAGCCACTCAGGTACCG
CGTGCTCATGAGCCACCGGCTCTGCGTGCTGCTGATGGGAGCTGCCTGGGTCCTCTGCCTCCTCAAGT
CGGTGACTGAGATGGTCATCTCCATGAGGCTGCCCTTCTGTGGCCACCACGTGGTCAGTCACTTCACC
TGCAAGATCCTGGCAGTGCTGAAGCTGGCATGCGGCAACACGTCGGTCAGCGAAGACTTCCTGCTGGC
GGGCTCCATCCTGCTGCTGCCTGTACCCCTGGCATTCATCTGCCTGTCCTACTTGCTCATCCTGGCCA
CCATCCTGAGGGTGCCCTCGGCCGCCAGGTGCTGCAAAGCCTTCTCCACCTGCTTGGCACACCTGGCT
GTAGTGCTGCTTTTCTACGGCACCATCATCTTCATGTACTTGAAGCCCAAGAGTAAGGAAGCCCACAT
CTCTGATGAGGTCTTCACAGTCCTCTATGCCATGGTCACGACCATGCTGAACCCCACCATCTACAGCC
TGAGGAACAAGGAGGTGAAGGAGGCCGCCAGGAAGGTGTGGGGCAGGAGTCGGGCCTCCAGGTGAGGG
A

| | | | |
|---|---|---|---|
| NOV34a, GG54212-02 | SEQ ID NO: 426 | 312 aa | MW at 34707.2kD |
| Protein Sequence | | | |

[sequence omitted]

| | | |
|---|---|---|
| NOV34b, GG54212-01 | SEQ ID NO: 427 | 1050 bp |
| DNA Sequence | ORF Start: ATG at 59 | ORF Stop: TGA at 995 |

CCCTGTACCCTCTCTCCTTCCATCCCAGCTGTGGACCATCTCTTCAGAACTCTGCAGCATGGAGCCGC
TCAACAGAACAGAGGTGTCCGAGTTCTTTCTGAAAGGATTTTCTGGCTACCCAGCCCTGGAGCATCTG
CTCTTCCCTCTGTGCTCAGCCATGTACCTGGTGACCCTCCTGGGGAACACAGCCATCATGGCGGTGAG
CGTGCTAGATATCCACCTGCACACGCCCGTGTACTTCTTCCTGGGCAACCTCTCTACCCTGGACATCT
GCTACACGCCCACCTTTGTGCCTCTGATGCTGGTCCACCTCCTGTCATCCCGGAAGACCATCTCCTTT
GCTGTCTGTGCCATCCAGATGTGTCTGAGCCTGTCCACGGGCTCCACGGAGTGCCTGCTACTGGCCAT
CACGGCCTATGACCGCTACCTGGCCATCTGCCAGCCACTCAGGTACCACGTGCTCATGAGCCACCGGC
TCTGCGTGCTGCTGATGGGAGCTGCCTGGGTCCTCTGCCTCCTCAAGTCGGTGACTGAGATGGTCATC
TCCATGAGGCTGCCCTTCTGTGGCCACCACGTGGTCAGTCACTTCACCTGCAAGATCCTGGCAGTGCT
GAAGCTGGCATGCGGCAACACGTCGGTCAGCGAAGACTTCCTGCTGGCGGGCTCCATCCTGCTGCTGC
CTGTACCCCTGGCATTCATCTGCCTGTCCTACTTGCTCATCCTGGCCACCATCCTGAGGGTGCCCTCG
GCCGCCAGGTGCTGCAAAGCCTTCTCCACCTGCTTGGCACACCTGGCTGTAGTGCTGCTTTTCTACGG
CACCATCATCTTCATGTACTTGAAGCCCAAGAGTAAGGAAGCCCACATCTCTGATGAGGTCTTCACAG
TCCTCTATGCCATGGTCACGACCATGCTGAACCCCACCATCTACAGCCTGAGGAACAAGGAGGTGAAG
GAGGCCGCCAGGAAGGTGTGGGGCAGGAGTCGGGCCTCCAGGTGAGGGAGGGCGGGGCTCTGTACAGA
CGCAGGTCTCAGGTTAGTAGCTGAGGCCAT

| | | | |
|---|---|---|---|
| NOV34b, CG54212-01 | SEQ ID NO: 428 | 312 aa | MW at 34688.2kD |
| Protein Sequence | | | |

[sequence omitted]

| | | |
|---|---|---|
| NOV34c, CG54212-03 | SEQ ID NO: 429 | 917 bp |
| DNA Sequence | ORF Start: at 3 | ORF Stop: TGA at 861 |

TGCTCTTCCCTCTGTGCTCAGCCATGTACCTGGTGACCCTCCTGGGGAACACAGCCATCATGGCGGTG
AGCGTGCTAGATATCCACCTGCACACGCCCGTGTACTTCTTCCTGGGCAACCTCTCTACCCTGGACAT
CTGCTACACGCCCACCTTTGTGCCTCTGATGCTGGTCCACCTCCTGTCATCCCGGAAGACCATCTCCT
TTGCTGTCTGTGCCATCCAGATGTGTCTGAGCCTGTCCACGGGCTCCACGGAGTGCCTGCTACTGGCC
ATCACGGCCTATGACCGCTACCTGGCCATCTGCCAGCCACTCAGGTACCACGTGCTCATGAGCCACCG
GCTCTGCGTGCTGCTGATGGGAGCTGCCTGGGTCCTCTGCCTCCTCAAGTCGGTGACTGAGATGGTCA
TCTCCATGAGGCTGCCCTTCTGTGGCCACCACGTGGTCAGTCACTTCACCTGCAAGATCCTGGCAGTG
CTGAAGCTGGCATGCGGCAACACGTCGGTCAGCGAAGACTTCCTGCTGGCGGGCTCCATCCTGCTGCT
GCCTGTACCCCTGGCATTCATCTGCCTGTCCTACTTGCTCATCCTGGCCACCATCCTGAGGGTGCCCT
CGGCCGCCAGGTGCTGCAAAGCCTTCTCCACCTGCTTGGCACACCTGGCTGTAGTGCTGCTTTTCTAC
GGCACCATCATCTTCATGTACTTGAAGCCCAAGAGTAAGGAAGCCCACATCTCTGATGAGGTCTTCAC
AGTCCTCTATGCCATGGTCACGACCATGCTGAACCCCACCATCTACAGCCTGAGGAACAAGGAGGTGA
AGGAGGCCGCCAGGAAGGTGTGGGGCAGGAGTCGGGCCTCCAGGTGAGGGAGGGCGGGGCTCTGTACA
GACGCAGGTCTCAGGTTAGTAGCTGAGGCCATC

| | | |
|---|---|---|
| NOV34c, CG54212-03 | SEQ ID NO: 430 | 286 aa MW at 31693.8kD |
| Protein Sequence | | |

LFPLCSAMYLVTLLGNTAIMAVSVLDIHLHTPVYFFLGNLSTLDICYTPTFVPLMLVHLLSSRKTISF
AVCAIQMCLSLSTGSTECLLLAITAYDRYLAICQPLRYHVLMSHRLCVLLMGAAWVLCLLKSVTEMVI
SMRLPFCGHHVVSHFTCKILAVLKLACGNTSVSEDFLLAGSILLLPVPLAFICLSYLLILATILRVPS
AARCCKAFSTCLAHLAVVLLFYGTIIFMYLKPKSKEAHISDEVFTVLYAMVTTMLNPTIYSLRNKEVK
EAARKVWGRSRASR

| | | |
|---|---|---|
| NOV34d, CG54212-04 | SEQ ID NO: 431 | 1025 bp |
| DNA Sequence | ORF Start: ATG at 33 | ORF Stop: TGA at 969 |

AGCTGTGGACCATCTCTTCAGAACTCTGCAGCATGGAGCCGCTCAACAGAACAGAGGTGTCCGAGTTC
TTTCTGAAAGGATTTTCTGGCTACCCAGCCCTGGAGCATCTGCTCTTCCCTCTGTGCTCAGCCATGTA
CCTGGTGACCCTCCTGGGGAACACAGCCATCATGGCGGTGAGCGTGCTAGATATCCACCTGCACACGC
CCGTGTACTTCTTCCTGGGCAACCTCTCTACCCTGGACATCTGCTACACGCCCACCTTTGTGCCTCTG
ATGCTGGTCCACCTCCTGTCATCCCGGAAGACCATCTCCTTTGCTGTCTGTGCCATCCAGATGTGTCT
GAGCCTGTCCACGGGCTCCACGGAGTGCCTGCTACTGGCCATCACGGCCTATGACCGCTACCTGGCCA
TCTGCCAGCCACTCAGGTACCACGTGCTCATGAGCCACCGGCTCTGCGTGCTGCTGATGGGAGCTGCC
TGGGTCCTCTGCCTCCTCAAGTCGGTGACTGAGATGGTCATCTCCATGAGGCTGCCCTTCTGTGGCCA
CCACGTGGTCAGTCACTTCACCTGCAAGATCCTGGCAGTGCTGAAGCTGGCATGCGGCAACACGTCGG
TCAGCGAAGACTTCCTGCTGGCGGGCTCCATCCTGCTGCTGCCTGTACCCCTGGCATTCATCTGCCTG
TCCTACTTGCTCATCCTGGCCACCATCCTGAGGGTGCCCTCGGCCGCCAGGTGCTGCAAAGCCTTCTC
CACCTGCTTGGCACACCTGGCTGTAGTGCTGCTTTTCTACGGCACCATCATCTTCATGTACTTGAAGC
CCAAGAGTAAGGAAGCCCACATCTCTGATGAGGTCTTCACAGTCCTCTATGCCATGGTCACGACCATG
CTGAACCCCACCATCTACAGCCTGAGGAACAAGGAGGTGAAGGAGGCCGCCAGGAAGGTGTGGGGCAG
GAGTCGGGCCTCCAGGTGAGGGAGGGCGGGGCTCTGTACAGACGCAGGTCTCAGGTTAGTAGCTGAGG
CCATC

| | | | |
|---|---|---|---|
| NOV34d, CG54212-04 | SEQ ID NO: 432 | 312 aa | MW at 34688.2kD |
| Protein Sequence | | | |

[sequence omitted]

| | | |
|---|---|---|
| NOV34e, SNP13373981 of | SEQ ID NO: 433 | 953 bp |
| CG54212-02, DNA Sequence | ORF Start: ATG at 11 | ORF Stop: TGA at 947 |
| | SNP Pos: 184 | SNP Change: T to C |

ACTCTGCAGCATGGAGCCGCTCAACAGAACAGAGGTGTCCGAGTTCTTTCTGAAAGGATTTTCTGGCT
ACCCAGCCCTGGAGCATCTGCTCTTCCCTCTGTGCTCAGCCATGTACCTGGTGACCCTCCTGGGGAAC
ACAGCCATCATGGCGGTGAGCGTGCTAGATATCCACCTGCACACGCCCGTGTACTTCTTCCTGGGCAA
CCTCTCTACCCTGGACATCTGCTACACGCCCACCTTTGTGCCTCTGATGCTGGTCCACCTCCTGTCAT
CCCGGAAGACCATCTCCTTTGCTGTCTGTGCCATCCAGATGTGTCTGAGCCTGTCCACGGGCTCCACG
GAGTGCCTGCTACTGGCCATCACGGCCTATGACCGCTACCTGGCCATCTGCCAGCCACTCAGGTACCG
CGTGCTCATGAGCCACCGGCTCTGCGTGCTGCTGATGGGAGCTGCCTGGGTCCTCTGCCTCCTCAAGT
CGGTGACTGAGATGGTCATCTCCATGAGGCTGCCCTTCTGTGGCCACCACGTGGTCAGTCACTTCACC
TGCAAGATCCTGGCAGTGCTGAAGCTGGCATGCGGCAACACGTCGGTCAGCGAAGACTTCCTGCTGGC
GGGCTCCATCCTGCTGCTGCCTGTACCCCTGGCATTCATCTGCCTGTCCTACTTGCTCATCCTGGCCA
CCATCCTGAGGGTGCCCTCGGCCGCCAGGTGCTGCAAAGCCTTCTCCACCTGCTTGGCACACCTGGCT
GTAGTGCTGCTTTTCTACGGCACCATCATCTTCATGTACTTGAAGCCCAAGAGTAAGGAAGCCCACAT
CTCTGATGAGGTCTTCACAGTCCTCTATGCCATGGTCACGACCATGCTGAACCCCACCATCTACAGCC
TGAGGAACAAGGAGGTGAAGGAGGCCGCCAGGAAGGTGTGGGGCAGGAGTCGGGCCTCCAGGTGAGGG
A

| | | | |
|---|---|---|---|
| NOV34e, SNP13373981 of | SEQ ID NO: 434 | 312 aa | MW at 34707.2kD |
| CG54212-02, Protein | SNP Pos: 58 | | SNP Change: Pro to Pro |
| Sequence | | | |

[sequence omitted]

| | | |
|---|---|---|
| NOV34f, SNP13373982 of | SEQ ID NO: 435 | 953 bp |
| CG54212-02, DNA Sequence | ORF Start: ATG at 11 | ORF Stop: TGA at 947 |
| | SNP Pos: 188 | SNP Change: T to C |

ACTCTGCAGCATGGAGCCGCTCAACAGAACAGAGGTGTCCGAGTTCTTTCTGAAAGGATTTTCTGGCT
ACCCAGCCCTGGAGCATCTGCTCTTCCCTCTGTGCTCAGCCATGTACCTGGTGACCCTCCTGGGGAAC
ACAGCCATCATGGCGGTGAGCGTGCTAGATATCCACCTGCACACGCCTGTGCACTTCTTCCTGGGCAA
CCTCTCTACCCTGGACATCTGCTACACGCCCACCTTTGTGCCTCTGATGCTGGTCCACCTCCTGTCAT
CCCGGAAGACCATCTCCTTTGCTGTCTGTGCCATCCAGATGTGTCTGAGCCTGTCCACGGGCTCCACG
GAGTGCCTGCTACTGGCCATCACGGCCTATGACCGCTACCTGGCCATCTGCCAGCCACTCAGGTACCG
CGTGCTCATGAGCCACCGGCTCTGCGTGCTGCTGATGGGAGCTGCCTGGGTCCTCTGCCTCCTCAAGT
CGGTGACTGAGATGGTCATCTCCATGAGGCTGCCCTTCTGTGGCCACCACGTGGTCAGTCACTTCACC
TGCAAGATCCTGGCAGTGCTGAAGCTGGCATGCGGCAACACGTCGGTCAGCGAAGACTTCCTGCTGGC
GGGCTCCATCCTGCTGCTGCCTGTACCCCTGGCATTCATCTGCCTGTCCTACTTGCTCATCCTGGCCA
CCATCCTGAGGGTGCCCTCGGCCGCCAGGTGCTGCAAAGCCTTCTCCACCTGCTTGGCACACCTGGCT
GTAGTGCTGCTTTTCTACGGCACCATCATCTTCATGTACTTGAAGCCCAAGAGTAAGGAAGCCCACAT
CTCTGATGAGGTCTTCACAGTCCTCTATGCCATGGTCACGACCATGCTGAACCCCACCATCTACAGCC
TGAGGAACAAGGAGGTGAAGGAGGCCGCCAGGAAGGTGTGGGGCAGGAGTCGGGCCTCCAGGTGAGGG
A

| | | | |
|---|---|---|---|
| NOV34f, SNP13373982 of | SEQ ID NO: 436 | 312 aa | MW at 34681.2kD |
| CG54212-02, Protein | SNP Pos: 60 | | SNP Change: Tyr to His |
| Sequence | | | |

MEPLNRTEVSEFFLKGFSGYPALEHLLFPLCSAMYLVTLLGNTAIMAVSVLDIHLHTPVHFFLGNLST
LDICYTPTFVPLMLVHLLSSRKTISFAVCAIQMCLSLSTGSTECLLLAITAYDRYLAICQPLRYRVLM
SHRLCVLLMGAAWVLCLLKSVTEMVISMRLPFCGHHVVSHFTCKILAVLKLACGNTSVSEDFLLAGSI
LLLPVPLAFICLSYLLILATILRVPSAARCCKAFSTCLAHLAVVLLFYGTIIFMYLKPKSKEAHISDE
VFTVLYAMVTTMLNPTIYSLRNKEVKEAARKVWGRSRASR

| | | |
|---|---|---|
| NOV34g, SNP13373984 of | SEQ ID NO: 437 | 953 bp |
| CG54212-02, DNA Sequence | ORF Start: ATG at 11 | ORF Stop: TGA at 947 |
| | SNP Pos: 408 | SNP Change: G to A |

ACTCTGCAGCATGGAGCCGCTCAACAGAACAGAGGTGTCCGAGTTCTTTCTGAAAGGATTTTCTGGCT
ACCCAGCCCTGGAGCATCTGCTCTTCCCTCTGTGCTCAGCCATGTACCTGGTGACCCTCCTGGGGAAC
ACAGCCATCATGGCGGTGAGCGTGCTAGATATCCACCTGCACACGCCTGTGTACTTCTTCCTGGGCAA
CCTCTCTACCCTGGACATCTGCTACACGCCCACCTTTGTGCCTCTGATGCTGGTCCACCTCCTGTCAT
CCCGGAAGACCATCTCCTTTGCTGTCTGTGCCATCCAGATGTGTCTGAGCCTGTCCACGGGCTCCACG
GAGTGCCTGCTACTGGCCATCACGGCCTATGACCGCTACCTGGCCATCTGCCAGCCACTCAGGTACCA
CGTGCTCATGAGCCACCGGCTCTGCGTGCTGCTGATGGGAGCTGCCTGGGTCCTCTGCCTCCTCAAGT
CGGTGACTGAGATGGTCATCTCCATGAGGCTGCCCTTCTGTGGCCACCACGTGGTCAGTCACTTCACC
TGCAAGATCCTGGCAGTGCTGAAGCTGGCATGCGGCAACACGTCGGTCAGCGAAGACTTCCTGCTGGC
GGGCTCCATCCTGCTGCTGCCTGTACCCCTGGCATTCATCTGCCTGTCCTACTTGCTCATCCTGGCCA
CCATCCTGAGGGTGCCCTCGGCCGCCAGGTGCTGCAAAGCCTTCTCCACCTGCTTGGCACACCTGGCT
GTAGTGCTGCTTTTCTACGGCACCATCATCTTCATGTACTTGAAGCCCAAGAGTAAGGAAGCCCACAT
CTCTGATGAGGTCTTCACAGTCCTCTATGCCATGGTCACGACCATGCTGAACCCCACCATCTACAGCC
TGAGGAACAAGGAGGTGAAGGAGGCCGCCAGGAAGGTGTGGGGCAGGAGTCGGGCCTCCAGGTGAGGG
A

| | | | |
|---|---|---|---|
| NOV34g, SNP13373984 of | SEQ ID NO: 438 | 312 aa | MW at 34688.2kD |
| CG54212-02, Protein | SNP Pos: 133 | | SNP Change: Arg to His |
| Sequence | | | |

MEPLNRTEVSEFFLKGFSGYPALEHLLFPLCSAMYLVTLLGNTAIMAVSVLDIHLHTPVYFFLGNLST
LDICYTPTFVPLMLVHLLSSRKTISFAVCAIQMCLSLSTGSTECLLLAITAYDRYLAICQPLRYHVLM
SHRLCVLLMGAAWVLCLLKSVTEMVISMRLPFCGHHVVSHFTCKILAVLKLACGNTSVSEDFLLAGSI
LLLPVPLAFICLSYLLILATILRVPSAARCCKAFSTCLAHLAVVLLFYGTIIFMYLKPKSKEAHISDE
VFTVLYAMVTTMLNPTIYSLRNKEVKEAARKVWGRSRASR

| | | |
|---|---|---|
| NOV34h, SNP13373985 of | SEQ ID NO: 439 | 953 bp |
| CG54212-02, DNA Sequence | ORF Start: ATG at 11 | ORF Stop: TGA at 947 |
| | SNP Pos: 501 | SNP Change: T to C |

ACTCTGCAGCATGGAGCCGCTCAACAGAACAGAGGTGTCCGAGTTCTTTCTGAAAGGATTTTCTGGCT
ACCCAGCCCTGGAGCATCTGCTCTTCCCTCTGTGCTCAGCCATGTACCTGGTGACCCTCCTGGGGAAC
ACAGCCATCATGGCGGTGAGCGTGCTAGATATCCACCTGCACACGCCTGTGTACTTCTTCCTGGGCAA
CCTCTCTACCCTGGACATCTGCTACACGCCCACCTTTGTGCCTCTGATGCTGGTCCACCTCCTGTCAT
CCCGGAAGACCATCTCCTTTGCTGTCTGTGCCATCCAGATGTGTCTGAGCCTGTCCACGGGCTCCACG
GAGTGCCTGCTACTGGCCATCACGGCCTATGACCGCTACCTGGCCATCTGCCAGCCACTCAGGTACCG
CGTGCTCATGAGCCACCGGCTCTGCGTGCTGCTGATGGGAGCTGCCTGGGTCCTCTGCCTCCTCAAGT
CGGTGACTGAGATGGTCATCTCCACGAGGCTGCCCTTCTGTGGCCACCACGTGGTCAGTCACTTCACC
TGCAAGATCCTGGCAGTGCTGAAGCTGGCATGCGGCAACACGTCGGTCAGCGAAGACTTCCTGCTGGC
GGGCTCCATCCTGCTGCTGCCTGTACCCCTGGCATTCATCTGCCTGTCCTACTTGCTCATCCTGGCCA
CCATCCTGAGGGTGCCCTCGGCCGCCAGGTGCTGCAAAGCCTTCTCCACCTGCTTGGCACACCTGGCT
GTAGTGCTGCTTTTCTACGGCACCATCATCTTCATGTACTTGAAGCCCAAGAGTAAGGAAGCCCACAT
CTCTGATGAGGTCTTCACAGTCCTCTATGCCATGGTCACGACCATGCTGAACCCCACCATCTACAGCC
TGAGGAACAAGGAGGTGAAGGAGGCCGCCAGGAAGGTGTGGGGCAGGAGTCGGGCCTCCAGGTGAGGG
A

| | | | |
|---|---|---|---|
| NOV34h, SNP13373985 of | SEQ ID NO: 440 | 312 aa | MW at 34677.1kD |
| CG54212-02, Protein | SNP Pos: 164 | | SNP Change: Met to Thr |
| Sequence | | | |

MEPLNRTEVSEFFLKGFSGYPALEHLLFPLCSAMYLVTLLGNTAIMAVSVLDIHLHTPVYFFLGNLST
LDICYTPTFVPLMLVHLLSSRKTISFAVCAIQMCLSLSTGSTECLLLAITAYDRYLAICQPLRYRVLM
SHRLCVLLMGAAWVLCLLKSVTEMVISTRLPFCGHHVVSHFTCKILAVLKLACGNTSVSEDFLLAGSI
LLLPVPLAFICLSYLLILATILRVPSAARCCKAFSTCLAHLAVVLLFYGTIIFMYLKPKSKEAHISDE
VFTVLYAMVTTMLNPTIYSLRNKEVKEAARKVWGRSRASR

[0542] A ClustalW comparison of the above protein sequences yields the following sequence alignment shown in Table 34B.

TABLE 34B
Comparison of the NOV34 protein sequences.

NOV34a MEPLNRTEVSEFFLKGFSGYPALEHLLFPLCSAMYLVTLLGNTAIMAVSVLDIHLHTPVY
NOV34b MEPLNRTEVSEFFLKGFSGYPALEHLLFPLCSAMYLVTLLGNTAIMAVSVLDIHLHTPVY
NOV34c --------------------------LFPLCSAMYLVTLLGNTAIMAVSVLDIHLHTPVY
NOV34d MEPLNRTEVSEFFLKGFSGYPALEHLLFPLCSAMYLVTLLGNTAIMAVSVLDIHLHTPVY
NOV34a FFLGNLSTLDICYTPTFVPLMLVHLLSSRKTISFAVCAIQMCLSLSTGSTECLLLAITAY
NOV34b FFLGNLSTLDICYTPTFVPLMLVHLLSSRKTISFAVCAIQMCLSLSTGSTECLLLAITAY
NOV34c FFLGNLSTLDICYTPTFVPLMLVHLLSSRKTISFAVCAIQMCLSLSTGSTECLLLAITAY
NOV34d FFLGNLSTLDICYTPTFVPLMLVHLLSSRKTISFAVCAIQMCLSLSTGSTECLLLAITAY
NOV34a DRYLAICQPLRYRVLMSHRLCVLLMGAAWVLCLLKSVTEMVISMRLPFCGHHVVSHFTCK
NOV34b DRYLAICQPLRYHVLMSHRLCVLLMGAAWVLCLLKSVTEMVISMRLPFCGHHVVSHFTCK
NOV34c DRYLAICQPLRYHVLMSHRLCVLLMGAAWVLCLLKSVTEMVISMRLPFCGHHVVSHFTCK
NOV34d DRYLAICQPLRYHVLMSHRLCVLLMGAAWVLCLLKSVTEMVISMRLPFCGHHVVSHFTCK
NOV34a ILAVLKLACGNTSVSEDFLLAGSILLLPVPLAFICLSYLLILATILRVPSAARCCKAFST
NOV34b ILAVLKLACGNTSVSEDFLLAGSILLLPVPLAFICLSYLLILATILRVPSAARCCKAFST
NOV34c ILAVLKLACGNTSVSEDFLLAGSILLLPVPLAFICLSYLLILATILRVPSAARCCKAFST
NOV34d ILAVLKLACGNTSVSEDFLLAGSILLLPVPLAFICLSYLLILATILRVPSAARCCKAFST
NOV34a CLAHLAVVLLFYGTIIFMYLKPKSKEAHISDEVFTVLYAMVTTMLNPTIYSLRNKEVKEA
NOV34b CLAHLAVVLLFYGTIIFMYLKPKSKEAHISDEVFTVLYAMVTTMLNPTIYSLRNKEVKEA
NOV34c CLAHLAVVLLFYGTIIFMYLKPKSKEAHISDEVFTVLYAMVTTMLNPTIYSLRNKEVKEA
NOV34d CLAHLAVVLLFYGTIIFMYLKPKSKEAHISDEVFTVLYAMVTTMLNPTIYSLRNKEVKEA
NOV34a ARKVWGRSRASR
NOV34b ARKVWGRSRASR
NOV34c ARKVWGRSRASR
NOV34d ARKVWGRSRASR
NOV34a (SEQ ID NO: 426)
NOV34b (SEQ ID NO: 428)
NOV34c (SEQ ID NO: 430)
NOV34d (SEQ ID NO: 432)

[0543] Further analysis of the NOV34a protein yielded the following properties shown in Table 34C.

TABLE 34C
Protein Sequence Properties NOV34a

| | |
|---|---|
| SignalP analysis: | Cleavage site between residues 48 and 49 |

PSORT II analysis:
PSG: a new signal peptide prediction method

N-region: length 11; pos.chg 1; neg.chg 3
H-region: length 3; peak value 0.00
PSG score: −4.40

GvH: von Heijne's method for signal seq. recognition

GvH score (threshold: −2.1): −2.43
possible cleavage site: between 33 and 34

>>> Seems to have no N-terminal signal peptide
ALOM: Klein et al's method for TM region allocation

| Init position for calculation: 1 | | |
|---|---|---|
| Tentative number of TMS(s) for the threshold 0.5: 6 | | |
| INTEGRAL | Likelihood = −1.86 | Transmembrane 35-51 |
| INTEGRAL | Likelihood = −0.11 | Transmembrane 92-108 |
| INTEGRAL | Likelihood = −4.88 | Transmembrane 141-157 |
| INTEGRAL | Likelihood = −0.27 | Transmembrane 173-189 |
| INTEGRAL | Likelihood = −7.80 | Transmembrane 204-220 |
| INTEGRAL | Likelihood = −6.26 | Transmembrane 241-257 |

| | |
|---|---|
| PERIPHERAL | Likelihood = 0.79 (at 71) |

ALOM score: −7.80 (number of TMSs: 6)

MTOP: Prediction of membrane topology (Hartmann et al.)

Center position for calculation: 42
Charge difference: 0.5 C(0.0) − N(−0.5)
C > N: C-terminal side will be inside

>>> membrane topology: type 3b
MITDISC: discrimination of mitochondrial targeting seq

| | | | |
|---|---|---|---|
| R content: | 1 | Hyd Moment(75): | 6.33 |
| Hyd Moment(95): | 9.16 | G content: | 0 |
| D/E content: | 2 | S/T content: | 1 |
| Score: −5.44 | | | |

Gavel: prediction of cleavage sites for mitochondrial preseq

cleavage site motif not found

NUCDISC: discrimination of nuclear localization signals

pat4: none
pat7: none
bipartite: none
content of basic residues: 8.3%
NLS Score: −0.47

KDEL: ER retention motif in the C-terminus: none
ER Membrane Retention Signals: none
SKL: peroxisomal targeting signal in the C-terminus: none
PTS2: 2nd peroxisomal targeting signal: none
VAC: possible vacuolar targeting motif: none
RNA-binding motif: none
Actinin-type actin-binding motif:

type 1: none
type 2: none

NMYR: N-myristoylation pattern: none
Prenylation motif: none
memYQRL: transport motif from cell surface to Golgi: none
Tyrosines in the tail: none
Dileucine motif in the tail: none
checking 63 PROSITE DNA binding motifs: none
checking 71 PROSITE ribosomal protein motifs: none
checking 33 PROSITE prokaryotic DNA binding motifs: none
NNCN: Reinhardt's method for Cytoplasmic/Nuclear discrimination

Prediction: cytoplasmic
Reliability: 94.1

COIL: Lupas's algorithm to detect coiled-coil regions

total: 0 residues

Final Results (k = 9/23):

55.6%: endoplasmic reticulum
11.1%: Golgi
11.1%: vacuolar
11.1%: vesicles of secretory system
11.1%: mitochondrial

>> prediction for CG54212-02 is end (k = 9)

[0544] A search of the NOV34a protein against the Geneseq database, a proprietary database that contains sequences published in patents and patent publication, yielded several homologous proteins shown in Table 34D.

TABLE 34D
Geneseq Results for NOV34a

| | | NOV34a | Identities/ | |
|---|---|---|---|---|
| | | Residues/ | Similarities | |
| Geneseq | Protein/Organism/Length | Match | the Matched | Expect |
| Identifier | [Patent #, Date] | Residues | Region | Value |
| AAU85168 | G-coupled olfactory receptor #29 - | 1 . . . 312 | 311/312 (99%) | e−178 |
| | Homo sapiens, 312 aa. | 1 . . . 312 | 311/312 (99%) | |
| | [WO200198526-A2, 27-DEC- | | | |
| | 2001] | | | |
| AAU95519 | Human olfactory and pheromone | 1 . . . 312 | 311/312 (99%) | e−178 |
| | G protein-coupled receptor #6 - | 1 . . . 312 | 311/312 (99%) | |
| | Homo sapiens, 312 aa. | | | |
| | [WO200224726-A2, 28-MAR- | | | |
| | 2002] | | | |
| AAU97925 | Novel odourant receptor NOV4 | 1 . . . 312 | 311/312 (99%) | e−178 |
| | protein - Unidentified, 312 aa. | 1 . . . 312 | 311/312 (99%) | |
| | [WO200236632-A2, 10-MAY- | | | |
| | 2002] | | | |
| AAU97923 | Novel odourant receptor NOV2 | 1 . . . 312 | 311/312 (99%) | e−178 |
| | protein - Unidentified, 312 aa. | 1 . . . 312 | 311/312 (99%) | |
| | [WO200236632-A2, 10-MAY- | | | |
| | 2002] | | | |
| AAU97922 | Novel odourant receptor NOV1 | 1 . . . 312 | 311/312 (99%) | e−178 |
| | protein - Unidentified, 312 aa. | 1 . . . 312 | 311/312 (99%) | |
| | [WO200236632-A2, 10-MAY- | | | |
| | 2002] | | | |

[0545] In a BLAST search of public sequence databases, the NOV34a protein was found to have homology to the proteins shown in the BLASTP data in Table 34E.

TABLE 34E
Public BLASTP Results for NOV34a

| | | NOV34a | Identities/ | |
|---|---|---|---|---|
| Protein | | Residues/ | Similarities for | |
| Accession | | Match | the Matched | |
| Number | Protein/Organism/Length | Residues | Portion | Expect Value |
| Q8NGT2 | Seven transmembrane helix | 1 . . . 312 | 311/312 (99%) | e−178 |
| | receptor - Homo sapiens | 1 . . . 312 | 311/312 (99%) | |
| | (Human), 312 aa. | | | |
| CAD57893 | Sequence 9 from Patent | 1 . . . 312 | 310/312 (99%) | e−177 |
| | WO0236632 - Homo sapiens | 1 . . . 312 | 311/312 (99%) | |
| | (Human), 312 aa. | | | |
| Q9QZ18 | Olfactory receptor (Olfactory | 1 . . . 312 | 256/312 (82%) | e−146 |
| | receptor MOR262-4) - Mus | 1 . . . 312 | 275/312 (88%) | |
| | musculus (Mouse), 312 aa. | | | |
| Q96R40 | Olfactory receptor - Homo | 68 . . . 283 | 215/216 (99%) | e−120 |
| | sapiens (Human), 216 aa | 1 . . . 216 | 215/216 (99%) | |
| | (fragment). | | | |
| CAD42439 | Sequence 121 from Patent | 1 . . . 307 | 167/307 (54%) | 5e−94 |
| | WO0212343 - Homo sapiens | 1 . . . 305 | 225/307 (72%) | |
| | (Human), 311 aa. | | | |

[0546] PFam analysis indicates that the NOV34a protein contains the domains shown in the Table 34F.

TABLE 34F
Domain Analysis of NOV34a

| | NOV34a | Identities/ | |
|---|---|---|---|
| Pfam | Match | Similarities | |
| Domain | Region | for the Matched Region | Expect Value |
| 7tm_1 | 41 . . . 290 | 63/276 (23%) | 2.8e−34 |
| | | 182/276 (66%) | |

### Example 35

[0547] The NOV35 clone was analyzed, and the nucleotide and encoded polypeptide sequences are shown in Table 35A.

TABLE 35A
NOV35 Sequence Analysis

| | | |
|---|---|---|
| NOV35a, CG54236-01 | SEQ ID NO: 441 | 1260 bp |
| DNA Sequence | ORF Start: ATG at 105 | ORF Stop: TAA at 1143 |

TGCTCCCTGTTTCATTAAAACCTAGAGAGATGTAATCAGTAAGCAAGAAGGAAAAAGGGAAATTCACA
AAGTAACTTTTTGTGTCTGTTTCTTTTTAACCCAGCATGGAGAGAAAATTTATGTCCTTGCAACCATC
CATCTCCGTATCAGAAATGGAACCAAATGGCACCTTCAGCAATAACAACAGCAGGAACTGCACAATTG
AAAACTTCAAGAGAGAATTTTTCCCAATTGTATATCTGATAATATTTTTCTGGGGAGTCTTGGGAAAT
GGGTTGTCCATATATGTTTTCCTGCAGCCTTATAAGAAGTCCACATCTGTGAACGTTTTCATGCTAAA
TCTGGCCATTTCAGATCTCCTGTTCATAAGCACGCTTCCCTTCAGGGCTGACTATTATCTTAGAGGCT
CCAATTGGATATTTGGAGACCTGGCCTGCAGGATTATGTCTTATTCCTTGTATGTCAACATGTACAGC
AGTATTTATTTCCTGACCGTGCTGAGTGTTGTGCGTTTCCTGGCAATGGTTCACCCCTTTCGGCTTCT
GCATGTCACCAGCATCAGGAGTGCCTGGATCCTCTGTGGGATCATATGGATCCTTATCATGGCTTCCT
CAATAATGCTCCTGGACAGTGGCTCTGAGCAGAACGGCAGTGTCACATCATGCTTAGAGCTGAATCTC
TATAAAATTGCTAAGCTGCAGACCATGAACTATATTGCCTTGGTGGTGGGCTGCCTGCTGCCATTTTT
CACACTCAGCATCTGTTATCTGCTGATCATTCGGGTTCTGTTAAAAGTGGAGGTCCCAGAATCGGGGC
TGCGGGTTTCTCACAGGAAGGCACTGACCACCATCATCATCACCTTGATCATCTTCTTCTTGTGTTTC
CTGCCCTATCACACACTGAGGACCGTCCACTTGACGACATGGAAAGTGGGTTTATGCAAAGACAGACT
GCATAAAGCTTTGGTTATCACACTGGCCTTGGCAGCAGCCAATGCCTGCTTCAATCCTCTGCTCTATT
ACTTTGCTGGGGAGAATTTTAAGGACAGACTAAAGTCTGCACTCAGAAAAGGCCATCCACAGAAGGCA
AAGACAAAGTGTGTTTTCCCTGTTAGTGTGTGGTTGAGAAAGGAAACAAGAGTATAAGGAGCTCTTAG
ATGAGACCTGTTCTTGTATCCTTGTGTCCATCTTCATTCACTCATAGTCTCCAAATGACTTTGTATTT
ACATCACTCCCAACAAATGTTGATTCTTAATATTTA

| | | | |
|---|---|---|---|
| NOV35a, CG54236-01 | SEQ ID NO: 442 | 346 aa | MW at 39634.7kD |
| Protein Sequence | | | |

MERKFMSLQPSISVSEMEPNGTFSNNNSRNCTIENFKREFFPIVYLIIFFWGVLGNGLSIYVFLQPYK
KSTSVNVFMLNLAISDLLFISTLPFRADYYLRGSNWIFGDLACRIMSYSLYVNMYSSIYFLTVLSVVR
FLAMVHPFRLLHVTSIRSAWILCGIIWILIMASSIMLLDSGSEQNGSVTSCLELNLYKIAKLQTMNYI
ALVVGCLLPFFTLSICYLLIIRVLLKVEVPESGLRVSHRKALTTIIITLIIFFLCFLPYHTLRTVHLT
TWKVGLCKDRLHKALVITLALAAANACFNPLLYYFAGENFKDRLKSALRKGHPQKAKTKCVFPVSVWL
RKETRV

| | | |
|---|---|---|
| NOV35b, CG54236-02 | SEQ ID NO: 443 | 1193 bp |
| DNA Sequence | ORF Start: ATG at 105 | ORF Stop: TAA at 1143 |

TGCTCCCTGTTTCATTAAAACCTAGAGAGATGTAATCAGTAAGCAAGAAGGAAAAAGGGAAATTCACA
AAGTAACTTTTTGTGTCTGTTTCTTTTTAACCCAGCATGGAGAGAAAATTTATGTCCTTGCAACCATC
CATCTCCGTATCAGAAATGGAACCAAATGGCACCTTCAGCAATAACAACAGCAGGAACTGCACAATTG
AAAACTTCAAGAGAGAATTTTTCCCAATTGTATATCTGATAATATTTTTCTGGGGAGTCTTGGGAAAT
GGGTTGTCCATATATGTTTTCCTGCAGCCTTATAAGAAGTCCACATCTGTGAACGTTTTCATGCTAAA
TCTGGCCATTTCAGATCTCCTGTTCATAAGCACGCTTCCCTTCAGGGCTGACTATTATCTTAGAGGCT
CCAATTGGATATTTGGAGACCTGGCCTGCAGGATTATGTCTTATTCCTTGTATGTCAACATGTACAGC
AGTATTTATTTCCTGACCGTGCTGAGTGTTGTGCGTTTCCTGGCAATGGTTCACCCCTTTCGGCTTCT
GCATGTCACCAGCATCAGGAGTGCCTGGATCCTCTGTGGGATCATATGGATCCTTATCATGGCTTCCT
CAATAATGCTCCTGGACAGTGGCTCTGAGCAGAACGGCAGTGTCACATCATGCTTAGAGCTGAATCTC
TATAAAATTGCTAAGCTGCAGACCATGAACTATATTGCCTTGGTGGTGGGCTGCCTGCTGCCATTTTT
CACACTCAGCATCTGTTATCTGCTGATCATTCGGGTTCTGTTAAAAGTGGAGGTCCCAGAATCGGGGC
TGCGGGTTTCTCACAGGAAGGCACTGACCACCATCATCATCACCTTGATCATCTTCTTCTTGTGTTTC
CTGCCCTATCACACACTGAGGACCGTCCACTTGACGACATGGAAAGTGGGTTTATGCAAAGACAGACT
GCATAAAGCTTTGGTTATCACACTGGCCTTGGCAGCAGCCAATGCCTGCTTCAATCCTCTGCTCTATT
ACTTTGCTGGGGAGAATTTTAAGGACAGACTAAAGTCTGCACTCAGAAAAGGCCATCCACAGAAGGCA
AAGACAAAGTGTGTTTTCCCTGTTAGTGTGTGGTTGAGAAAGGAAACAAGAGTATAAGGAGCTCTTAG
ATGAGACCTGTTCTTGTATCCTTGTGTCCATCTTCATTCACTCATAGTCTCCAAATGACTTTGTATTT
ACATCACTCCCAACAAATGTTGATTCTTAATATTTA

| | | | |
|---|---|---|---|
| NOV35b, CG54236-02 | SEQ ID NO: 444 | 346 aa | MW at 39634.7kD |
| Protein Sequence | | | |

MERKFMSLQPSISVSEMEPNGTFSNNNSRNCTIENFKREFFPIVYLIIFFWGVLGNGLSIYVFLQPYK
KSTSVNVFMLNLAISDLLFISTLPFRADYYLRGSNWIFGDLACRIMSYSLYVNMYSSIYFLTVLSVVR
FLAMVHPFRLLHVTSIRSAWILCGIIWILIMASSIMLLDSGSEQNGSVTSCLELNLYKIAKLQTMNYI
ALVVGCLLPFFTLSICYLLIIRVLLKVEVPESGLRVSHRKALTTIIITLIIFFLCFLPYHTLRTVHLT
TWKVGLCKDRLHKALVITLALAAANACFNPLLYYFAGENFKDRLKSALRKGHPQKAKTKCVFPVSVWL
RKETRV

[0548] A ClustalW comparison of the above protein sequences yields the following sequence alignment shown in Table 35B.

TABLE 35B
Comparison of the NOV35 protein sequences.

NOV35a MERKFMSLQPSISVSEMEPNGTFSNNNSRNCTIENFKREFFPIVYLIIFFWGVLGNGLSI
NOV35b MERKFMSLQPSISVSEMEPNGTFSNNNSRNCTIENFKREFFPIVYLIIFFWGVLGNGLSI
NOV35a YVFLQPYKKSTSVNVFMLNLAISDLLFISTLPFRADYYLRGSNWIFGDLACRIMSYSLYV
NOV35b YVFLQPYKKSTSVNVFMLNLAISDLLFISTLPFRADYYLRGSNWIFGDLACRIMSYSLYV
NOV35a NMYSSIYFLTVLSVVRFLAMVHPFRLLHVTSIRSAWILCGIIWILIMASSIMLLDSGSEQ
NOV35b NMYSSIYFLTVLSVVRFLAMVHPFRLLHVTSIRSAWILCGIIWILIMASSIMLLDSGSEQ
NOV35a NGSVTSCLELNLYKIAKLQTMNYIALVVGCLLPFFTLSICYLLIIRVLLKVEVPESGLRV
NOV35b NGSVTSCLELNLYKIAKLQTMNYIALVVGCLLPFFTLSICYLLIIRVLLKVEVPESGLRV
NOV35a SHRKALTTIIITLIIFFLCFLPYHTLRTVHLTTWKVGLCKDRLHKALVITLALAAANACF
NOV35b SHRKALTTIIITLIIFFLCFLPYHTLRTVHLTTWKVGLCKDRLHKALVITLALAAANACF
NOV35a NPLLYYFAGENFKDRLKSALRKGHPQKAKTKCVFPVSVWLRKETRV
NOV35b NPLLYYFAGENFKDRLKSALRKGHPQKAKTKCVFPVSVWLRKETRV
NOV35a (SEQ ID NO: 442)
NOV35b (SEQ ID NO: 444)

[0549] Further analysis of the NOV35a protein yielded the following properties shown in Table 35C.

TABLE 35C
Protein Sequence Properties NOV35a

| | |
|---|---|
| SignalP analysis: | Cleavage site between residues 60 and 61 |

PSORT II analysis:
PSG: a new signal peptide prediction method

N-region: length 4; pos.chg 2; neg.chg 1
H-region: length 11; peak value 5.18
PSG score: 0.78

GvH: von Heijne's method for signal seq. recognition

GvH score (threshold: −2.1): −0.37
possible cleavage site: between 55 and 56

>>> Seems to have a cleavable signal peptide (1 to 55)
ALOM: Klein et al's method for TM region allocation

| Init position for calculation: 56 | | |
|---|---|---|
| Tentative number of TMS(s) for the threshold 0.5: 6 | | |
| INTEGRAL | Likelihood = −2.81 | Transmembrane 75-91 |
| INTEGRAL | Likelihood = −3.72 | Transmembrane 125-141 |
| INTEGRAL | Likelihood = −8.86 | Transmembrane 157-173 |
| INTEGRAL | Likelihood = −7.75 | Transmembrane 204-220 |
| INTEGRAL | Likelihood = −11.36 | Transmembrane 245-261 |
| INTEGRAL | Likelihood = −1.06 | Transmembrane 287-303 |

| | |
|---|---|
| PERIPHERAL | Likelihood = 2.38 (at 222) |

ALOM score: −11.36 (number of TMSs: 6)

MTOP: Prediction of membrane topology (Hartmann et al.)

Center position for calculation: 27
Charge difference: 2.0 C(1.0) − N(−1.0)
C > N: C-terminal side will be inside

>>>Caution: Inconsistent mtop result with signal peptide
>>> membrane topology: type 3b
MITDISC: discrimination of mitochondrial targeting seq

| | | | |
|---|---|---|---|
| R content: | 1 | Hyd Moment(75): | 11.72 |
| Hyd Moment(95): | 9.21 | G content: | 0 |
| D/E content: | 2 | S/T content: | 4 |

Score: −3.79

Gavel: prediction of cleavage sites for mitochondrial preseq

R-2 motif at 13 ERK|FM

NUCDISC: discrimination of nuclear localization signals

pat4: none
pat7: none
bipartite: none
content of basic residues: 10.4%
NLS Score: −0.47

KDEL: ER retention motif in the C-terminus: none
ER Membrane Retention Signals:

XXRR-like motif in the C-terminus: ERKF
KKXX-like motif in the C-terminus: KETR

SKL: peroxisomal targeting signal in the C-terminus: none
PTS2: 2nd peroxisomal targeting signal: none
VAC: possible vacuolar targeting motif: none
RNA-binding motif: none
Actinin-type actin-binding motif:

type 1: none
type 2: none

NMYR: N-myristoylation pattern: none
Prenylation motif: none
memYQRL: transport motif from cell surface to Golgi: none
Tyrosines in the tail: none
Dileucine motif in the tail: none
checking 63 PROSITE DNA binding motifs: none
checking 71 PROSITE ribosomal protein motifs: none
checking 33 PROSITE prokaryotic DNA binding motifs: none
NNCN: Reinhardt's method for Cytoplasmic/Nuclear discrimination

Prediction: cytoplasmic
Reliability: 94.1

COIL: Lupas's algorithm to detect coiled-coil regions

total: 0 residues

Final Results (k = 9/23):

66.7%: endoplasmic reticulum
11.1%: Golgi
11.1%: vacuolar
11.1%: cytoplasmic

>> prediction for CG54236-01 is end (k = 9)

[0550] A search of the NOV35a protein against the Geneseq database, a proprietary database that contains sequences published in patents and patent publication, yielded several homologous proteins shown in Table 35D.

TABLE 35D
Geneseq Results for NOV35a

| | | NOV35a | Identities/ | |
|---|---|---|---|---|
| | | Residues/ | Similarities for | |
| Geneseq | Protein/Organism/Length | Match | the Matched | Expect |
| Identifier | [Patent #, Date] | Residues | Region | Value |
| ABU11923 | Human G-protein coupled | 1 . . . 346 | 346/346 (100%) | 0.0 |
| | receptor HGPRBMY11v1 - | 1 . . . 346 | 346/346 (100%) | |
| | Homo sapiens, 346 aa. | | | |
| | [WO200286123-A2, 31-OCT- | | | |
| | 2002] | | | |
| ABP81707 | Human cysteinyl leukotriene | 1 . . . 346 | 346/346 (100%) | 0.0 |
| | CYSLT2 receptor protein SEQ | 1 . . . 346 | 346/346 (100%) | |
| | ID NO: 589 - Homo sapiens, 346 | | | |
| | aa. [WO200261087-A2, 08- | | | |
| | AUG-2002] | | | |
| ABB05229 | Human LTD4-like G protein- | 1 . . . 346 | 346/346 (100%) | 0.0 |
| | coupled receptor protein SEQ ID | 1 . . . 346 | 346/346 (100%) | |
| | NO: 2 - Homo sapiens, 346 aa. | | | |
| | [WO200194580-A1, 13-DEC- | | | |
| | 2001] | | | |
| AAG77965 | Human G-protein coupled | 1 . . . 346 | 346/346 (100%) | 0.0 |
| | receptor PFI-017* - Homo | 1 . . . 346 | 346/346 (100%) | |
| | sapiens, 346 aa. [US2001039037- | | | |
| | A1, 08-NOV-2001] | | | |
| AAE17231 | Human CysLT2 GPCR (G- | 1 . . . 346 | 346/346 (100%) | 0.0 |
| | protein coupled receptor) - Homo | 1 . . . 346 | 346/346 (100%) | |
| | sapiens, 346 aa. [WO200192302- | | | |
| | A2, 06-DEC-2001] | | | |

[0551] In a BLAST search of public sequence databases, the NOV35a protein was found to have homology to the proteins shown in the BLASTP data in Table 35E.

TABLE 35E
Public BLASTP Results for NOV35a

| | | NOV35a | Identities/ | |
|---|---|---|---|---|
| Protein | | Residues/ | Similarities for | |
| Accession | | Match | the Matched | Expect |
| Number | Protein/Organism/Length | Residues | Portion | Value |
| Q9NS75 | Cysteinyl leukotriene receptor 2 | 1 . . . 346 | 346/346 (100%) | 0.0 |
| | (CysLTR2) (PSEC0146) (HG57) | 1 . . . 346 | 346/346 (100%) | |
| | (HPN321) (hGPCR21) - Homo | | | |
| | sapiens (Human), 346 aa. | | | |
| CAC69290 | Sequence 1 from Patent | 1 . . . 346 | 344/346 (99%) | 0.0 |
| | WO0159118 - Homo sapiens | 1 . . . 346 | 345/346 (99%) | |
| | (Human), 346 aa. | | | |
| Q95N03 | Cysteinyl leukotriene receptor 2 | 1 . . . 346 | 275/347 (79%) | e−158 |
| | (CysLTR2) - Sus scrofa (Pig), | 1 . . . 345 | 300/347 (86%) | |
| | 345 aa. | | | |
| Q8R528 | Cysteinyl leukotriene 2 receptor - | 17 . . . 324 | 226/308 (73%) | e−132 |
| | Mus musculus (Mouse), 309 aa. | 1 . . . 308 | 256/308 (82%) | |
| Q920A1 | Cysteinyl leukotriene receptor 2 | 17 . . . 324 | 224/308 (72%) | e−131 |
| | (CysLTR2) - Mus musculus | 1 . . . 308 | 255/308 (82%) | |
| | (Mouse), 309 aa. | | | |

[0552] PFam analysis indicates that the NOV35a protein contains the domains shown in the Table 35F.

TABLE 35F
Domain Analysis of NOV35a

| | NOV35a | Identities/ | |
|---|---|---|---|
| | Match | Similarities | |
| Pfam Domain | Region | for the Matched Region | Expect Value |
| 7tm_1 | 55 . . . 305 | 89/277 (32%) | 6.1e−54 |
| | | 185/277 (67%) | |
| TAS2R | 33 . . . 324 | 64/314 (20%) | 0.019 |
| | | 173/314 (55%) | |

### Example 36

[0553] The NOV36 clone was analyzed, and the nucleotide and encoded polypeptide sequences are shown in Table 36A.

TABLE 36A
NOV36 Sequence Analysis

| | | |
|---|---|---|
| NOV36a, CG54479-06 | SEQ ID NO: 445 | 2066 bp |
| DNA Sequence | ORF Start: ATG at 22 | ORF Stop: TAG at 2032 |

ACAGGTTTCACAACTTCCCGGATGGGGCTGTGGTGGGTCAAGTGCAGCCTCCAGCCAGCCAGGATGGG
GTGGCTCCCACTCCTGCTGCTTCTGACTCAATGCTTAGGGGTCCCTGGGCAGCGCTCGCCATTGAATG
ACTTCCAAGTGCTCCGGGGCACAGAGCTACAGCACCTGCTACATGCGGTGGTGCCCGGGCCTTGGCAG
GAGGATGTGGCAGATGCTGAAGAGTGTGCTGGTCGCTGTGGGCCCTTAATGGACTGCCGGGCCTTCCA
CTACAACGTGAGCAGCCATGGTTGCCAACTGCTGCCATGGACTCAACACTCGCCCCACACGAGGCTGC
GGCGTTCTGGGCGCTGTGACCTCTTCCAGAAGAAAQACTACGTACGGACCTGCATCATGAACAATGGG
GTTGGGTACCGGGGCACCATGGCCACGACCGTGGGTGGCCTGCCCTGCCAGGCTTGGAGCCACAAGTT
CCCGAATGATCACAAGTACACGCCCACTCTCCGGAATGGCCTGGAAGAGAACTTCTGCCGTAACCCTG
ATGGCGACCCCGGAGGTCCTTGGTGCTACACAACAGACCCTGCTGTGCGCTTCCAGAGCTGCGGCATC
AAATCCTGCCGGGAGGCCGCGTGTGTCTGGTGCAATGGCGAGGAATACCGCGGCGCGGTAGACCGCAC
GGAGTCAGGGCGCGAGTGCCAGCGCTGGGATCTTCAGCACCCGCACCAGCACCCCTTCGAGCCGGGCA
AGTTCCTCGACCAAGGTCTGGACGACAACTATTGCCGGAATCCTGACGGCTCCGAGCGGCCATGGTGC
TACACTACGGATCCGCAGATCGAGCGAGAGTTCTGTGACCTCCCCCGCTGCGGGTCCGAGGCACAGCC
CCGCCAAGAGGCCACAACTGTCAGCTGCTTCCGCGGGAAGGGTGAGGGCTACCGGGGCACAGCCAATA
CCACCACTGCGGGCGTACCTTGCCAGCGTTGGGACGCGCAAATCCCTCATCAGCACCGATTTACGCCA
GAAAAATACGCGTGCAAAGACCTTCGGGAGAACTTCTGCCGGAACCCCGACGGCTCAGAGGCGCCCTG
GTGCTTCACACTGCGGCCCGGCATGCGCGCGGCCTTTTGCTACCAGATCCGGCGTTGTACAGACGACG
TGCGGCCCCAGGACTGCTACCACGGCGCAGGGGAGCAGTACCGCGGCACGGTCAGCAAGACCCGCAAG
GGTGTCCAGTGCCAGCGCTGGTCCGCTGAGACGCCGCACAAGCCGCAGTTCACGTTTACCTCCGAACC
GCATGCACAACTGGAGGAGAACTTCTGCCGGAACCCAGATGGGGATAGCCATGGGCCCTGGTGCTACA
CGATGGACCCAAGGACCCCATTCGACTACTGTGCCCTGCGACGCTGCGCTGATGACCAGCCGCCATCA
ATCCTGGACCCCCCAGACCAGGTGCAGTTTGAGAAGTGTGGCAAGAGGGTGGATCGGCTGGATCAGCG
GCGTTCCAAGCTGCGCGTGGTTGGGGGCCATCCGGGCAACTCACCCTGGACAGTCAGCTTGCGGAATC
GGCAGGGCCAGCATTTCTGCGGGGGGTCTCTAGTGAAGGAGCAGTGGATACTGACTGCCCGGCAGTGC
TTCTCCTCCTGCCATATGCCTCTCACGGGCTATGAGGTATGGTTGGGCACCCTGTTCCAGAACCCACA
GCATGGAGAGCCAAGCCTACAGCGGGTCCCAGTAGCCAAGATGGTGTGTGGGCCCTCAGGCTCCCAGC
TTGTCCTGCTCAAGCTGGAGAGATCTGTGACCCTGAACCAGCGTGTGGCCCTGATCTGCCTGCCCCCT
GAATGGTATGTGGTGCCTCCAGGGACCAAGTGTGAGGGTGACTACGGGGGCCCACTTGCCTGCTTTAC
CCACAACTGCTGGGTCCTGGAAGGAATTATAATCCCCAACCGAGTATGCGCAAGGTCCCGCTGGCCAG
CTGTCTTCACGCGTGTCTCTGTGTTTGTGGACTGGATTCACAAGGTCATGAGACTGGGTTAGGCCCAG
CCTTGATGCCATATGCCTTGGGGAGG

| | | | |
|---|---|---|---|
| NOV36a, CG54479-06 | SEQ ID NO: 446 | 670 aa | MW at 76160.6kD |
| Protein Sequence | | | |

MGLWWVTVQPPARRNGWLPLLLLLTQCLGVPGQRSPLWDFQVLRGTELQHLLHAVVPGPWQEDVADAE
ECAGRCGPLMDCRAFHYNVSSHGCQLLPWTQHSPHTRLRRSGRCDLFQKKDYVRTCIMNNGVGYRGTM
ATTVGGLPCQAWSHKFPMDHKYTPTLRNGLEENFCRNPDGDPGGPWCYTTDPAVRFQSCGIKSCREAA
CVWCNGEEYRGAVDRTESGRECQRWDLQHPHQHPFEPGKFLDQGLDDNYCRNPDGSERPWCYTTDPQI
EREFCDLPRCGSEAQPRQEATTVSCFRGKGEGYRGTANTTTAGVPCQRWDAQIPHQHRFTPEKYACKD
LRENFCRNPDGSEAPWCFTLRPGMRAAFCYQIRRCTDDVRPQDCYHGAGEQYRGTVSKTRKGVQCQRW
SAETPHKPQFTFTSEPHAQLEENFCRNPDGDSHGPWCYTMDPRTPFDYCALRRCADDQPPSILDPPDQ
VQFEKCGKRVDRLDQRRSKLRVVGGHPGNSPWTVSLRNRQGQHFCGGSLVKEQWILTARQCFSSCHMP
LTGYEVWLGTLFQNPQHGEPSLQRVPVAKMVCGPSGSQLVLLKLERSVTLNQRVALICLPPEWYVVPP
GTKCEGDYGGPLACFTHMCWVLEGIIIPNRVCARSRWPAVFTRVSVFVDWIHKVMRLG

| | | |
|---|---|---|
| NOV36b, CG54479-05 | SEQ ID NO: 447 | 1698 bp |
| DNA Sequence | ORF Start: ATG at 1 | ORF Stop: TGA at 1696 |

ATGACTTCTAGGTGCTCCGGGGCACAGAGCTACCTACAAGCGGTGGTGCCCGGGCCTTGGCAGGAGGA
TGTGGCAGATGCTGAAGAGTGTGCTGGTCGCTGTGGGCCCTTAATGGACTGCGCGTTCCACTACAATG
TGAGCAGCCATGGTTGCCAACTGCTGCCATGGACTCAACACTCACCCCACACGAGGCTGCGGCATTCT
GGGCGCTGTGACCTCTTCCAGGAGAAAGACTACATACGGACCTGCATCATGAACAATGGGGTTGGGTA
CCGGGGCACCATGGCCACGACCGTGGGTGGCCTGTCCTGCCAGGCTTGGAGCCACAAGTTCCCGAACG
ATCACCAGTACATGCCCACGCTCCGGAATGGCCTGGAAGAGAACTTCTGCCGTAACCCTGATGGCGAC
CCCGGAGGTCCTTGGTGCCACACAACAGACCCTGCCGTGCGCTTCCAGAGCTGCGGCATCAAATCCTG
CCGGGTGGCCGCGTGTGTCTGGTGCAATGGCGAGGAATACCGCGGCGCGGTAGACCGCACCGAGTCAG
GGCGCGAGTGCCAGCGCTGGGATCTTCAGCACCCGCACCAGCACCCCTTCGAGCCGGGCAAGTTCCTC
GACCAAGGTCTGGACGACAACTATTGCCGGAATCCTGACGGCTCCGAGCGGCCATGGTGCTACACTAC
GGATCCGCAGATCGAGCGAGAATTCTGTGACCTCCCCCGCTGCGGTTCCGAGGCACAGCCCCGCCAAG
AGGCCACAAGTGTCAGCTGCTTCCGCGGGAAGGGTGAGGGCTACCGGGGCACAGCCAATACCACCACC
GCGGGCGTACCTTGCCAGCGTTGGGACGCGCAAATCCCGCATCAGCACCGATTTACGCCAGAAAAATA
CGCGTGCAAGGACCTTCGGGAGAACTTCTGCCGGAACCCCGACGGCTCAGAGGCGCCCTGGTGCTTCA
CACTGCGGCCCGGCATGCGCGTGGGCTTTTGCTACCAGATCCGGCGTTGTACAGACGACGTGCGGCCC
CAGGACTGCTACCACGGCGCGGGGGAGCAGTACCGCGGCACGGTCAGCAAGACCCGCAAGGGTGTCCA
GTGCCAGCGCGGGTCCGCTGAGACGCCGCACAAGCCGCAGTTCACGTTTACCTCCGAACCGCATGCAC
AACTGGAGGAGAACTTCTGCCAGGACCCAGATGGGGATAGCCATGGGCCCTGGTGCTACACGATGGAC
CCAAGGACCCCATTCGACTACTGTGCCCTGCGACGCTGCGCTGATGACCAGCCGCCATCAATCCTGGA
CCCCCCCGACCAGGTGCAGTTTGAGAAGTGTGGCAAGAGGGTGGATCGGCTGGATCAGCGTTGTTCCA
AGCTGCGCGTGGCTGGGGGCCATCCGGGCAACTCACCCTGGACAGTCAGCTTGCGGAATAGGCAGGGC
CAGCATTTCTGCGGGGGGTCTCTAGTGAAGGAGCAGTGGATACTGACTGCCCGGCAGTGCTTCTCCTC
CAGCCATATGCCTCTCACGGGCTATGAGGTATGGTTGGGCACCCTGTTCCAGAACCCACAACATGGAG
AGCCAGGCCTACAGCGGGTCCCAGTAGCCAAGATGCTGTGTGGGCCCTCAGGCTCTCAGCTTGTCCTG
CTCAAGCTGGAGAGGTCTGTGACCCTGAACCAGCGTGTGGCCCTGATCTGCCTGCCGCCTGAATGA

| | | | |
|---|---|---|---|
| NOV36b, CG54479-05 | SEQ ID NO: 448 | 565 aa | MW at 63751.8kD |
| Protein Sequence | | | |

MTSRCSGAQSYLQAVVPGPWQEDVADAEECAGRCGPLMDCAFHYNVSSHGCQLLPWTQHSPHTRLRHS
GRCDLFQEKDYIRTCIMNNGVGYRGTMATTVGGLSCQAWSHKFPNDHQYMPTLRNGLEENFCRNPDGD
PGGPWCHTTDPAVRFQSCGIKSCRVAACVWCNGEEYRGAVDRTESGRECQRWDLQHPHQHPFEPGKFL
DQGLDDNYCRNPDGSERPWCYTTDPQIEREFCDLPRCGSEAQPRQEATSVSCFRGKGEGYRGTANTTT
AGVPCQRWDAQIPHQHRFTPEKYACKDLRENFCRNPDGSEAPWCFTLRPGMRVGFCYQIRRCTDDVRP
QDCYHGAGEQYRGTVSKTRKGVQCQRGSABTPHKPQFTFTSEPHAQLEENFCQDPDGDSHGPWCYTND
PRTPFDYCALRRCADDQPPSILDPPDQVQFEKCGKRVDRLDQRCSKLRVAGGHPGNSPWTVSLRNRQG
QHFCGGSLVKEQWILTARQCFSSSHMPLTGYEVWLGTLFQNPQHGEPGLQRVPVAKMLCGPSGSQLVL
LKLERSVTLNQRVALICLPPE

| | | |
|---|---|---|
| NOV36c, CG54479-01 | SEQ ID NO: 449 | 2200 bp |
| DNA Sequence | ORF Start: ATG at 21 | ORF Stop: TAG at 2157 |

TGCAGCCTCCAGCCAGAAGGATGGGGTGGCTCCCACTCCTGCTGCTTCTGACTCAATGCTTAGGGGTC
CCTGGGCAGCGCTCGCCATTGAATGACTTCGAGGTGCTCCGGGGCACAGAGCTACAGCGGCTGCTACA
AGCGGTGGTGCCCGGGCCTTGGCAGGAGGATGTGGCAGATGCTGAAGAGTGTGCTGGTCGCTGTGGGC
CCTTAATGGACTGCCGGGCGTTCCACTACAATGTGAGCAGCCATGGTTGCCAACTGCTGCCATGGACT
CAACACTCACCCCACACGAGGCTGCGGCATTCTGGGCGCTGTGACCTCTTCCAGGAGAAAGACTACAT
ACGGACCTGCATCATGAACAATGGGGTTGGGTACCGGGGCACCATGGCCACGACCGTGGGTGGCCTGT
CCTGCCAGGCTTGGAGCCACAAGTTCCCGAACGATCACAGGTACATGCCCACGCTCCGGAATGGCCTG
GAAGAGAACTTCTGCCGTAACCCTGATGGCGACCCCGGAGGTCCTTGGTGCCACACAACAGACCCTGC
CGTGCGCTTCCAGAGCTGCGGCATCAAATCCTGCCGGTCTGCCGCGTGTGTCTGGTGCAATGGCGAGG
AATACCGCGGCGCGGTAGACCGCACCGAGTCAGGGCGCGAGTGCCAGCGCTGGGATCTTCAGCACCCG
CACCAGCACCCCTTCGAGCCGGGCAAGTACCCCGACCAAGGTCTGGACGACAACTATTGCCGGAATCC
TGACGGCTCCGAGCGGCCATGGTGCTACACTACGGATCCGCAGATCGAGCGAGAATTCTGTGACCTCC
CCCGCTGCGGTTCCGAGGCACAGCCCCGCCAAGAGGCCACAAGTGTCAGCTGCTTCCGCGGGAAGGGT
GAGGGCTACCGGGGCACAGCCAATACCACCACCGCGGGCGTACCTTGCCAGCGTTGGGACGCGCAAAT
CCCGCATCAGCACCGATTTACGCCAGAAAAATACGCGTGCAAGGACCTTCGGGAGAACTTCTGCCGGA
ACCCCGACGGCTCAGAGGCGCCCTGGTGCTTCACACTGCGGCCCGGCATGCGCGTGGGCTTTTGCTAC
CAGATCCGGCGTTGTACAGACGACGTGCGGCCCCAGGGTTGCTACCACGGCGCGGGGGAGCAGTACCG
CGGCACGGTCAGCAAGACCCGCAAGGGTGTCCAGTGCCAGCGCGCGTCCGCTGAGACGCCGCACAAGC
CGCAGTTTACCTTTACCTCCGAACCGCATGCACAACTGGAGGAGAACTTCTGCCGCGACCCAGATGGG
GATAGCTATGGGCCCTGGTGCTACACGATGGACCCAAGGACCCCATTCGACTACTGTGCCCTGCGACG
CTGCGCTGATGACCAGCCGCCATCAATCCTGGACCCCCCCGACCAGGTGCAGTTTGAGAAGTGTGGCA
AGAGGGTGGATCGGCTGGATCAGCGTTGTTCCAAGCTGCGCGTGGCTGGGGGCCATCCGGGCAACTCA
CCCTGGACAGTCAGCTTGCGGAATAGGCAGGGCCAGCATTTCTGCGGGGGGTCTCTAGTGAAGGAGCA
GTGGATACTGACTGCCCGGCAGTGCTTCTCCTCCAGCCATATGCCTCTCACGGGCTATGAGGTATGGT
TGGGCACCCTGTTCCAGAACCCACAACATGGAGAGCCAGGCCTACAGCGGGTCCCAGTAGCCAAGATG
CTGTGTGGGCCCTCAGGCTCTCAGCTTGTCCTGCTCAAGCTGGAGAGATCTGTGACCCTGAACCAGCG
TGTGGCCCTGATCTGCCTGCCGCCTGAATGGTATGTGGTGCCTCCAGGGACCAAGTGTGAGATTGCAG
GCCGGGGTGAGACCAAAGGTACGGGTAATGACACAGTCCTAAATGTGGCCTTGCTGAATGTCATCTCC
AACCAGGAGTGTAACATCAAGCACCGAGGACATGTGCGGGAGAGCGAGATGTGCACTGAGGGACTGTT
GGCCCCTGTGGGGGCCTGTGAGGGGGGTGACTACGGGGGCCCACTTGCCTGCTTTACCCACAACTGCT
GGGTCCTGGAAGGAATTAGAATCCCCAACCGAGTATGCGCAAGGTCGCGCTGGCCAGCCGTCTTCACA
CGTGTCTCTGTGTTTGTGGACTGGATTCACAAGGTCATGAGACTGGGTTAGGCCCAGCCTTGACGCCA
TATGCTTTGGGGAGGACAAAACTT

| | | | |
|---|---|---|---|
| NOV36c, CG54479-01 | SEQ ID NO: 450 | 712 aa | MW at 80097.8kD |
| Protein Sequence | | | |

MGWLPLLLLLTQCLGVPGQRSPLNDFEVLRGTELQRLLQAVVPGPWQEDVADAEECAGRCGPLMDCRA
FHYNVSSHGCQLLPWTQHSPHTRLRHSGRCDLFQEKDYIRTCIMNNGVGYRGTMATTVGGLSCQAWSH
KFPNDHRYMPTLRNGLEENFCRNPDGDPGGPWCHTTDPAVRFQSCGIKSCRSAACVWCNGEEYRGAVD
RTESGRECQRWDLQHPHQHPFEPGKYPDQGLDDNYCRNPDGSERPWCYTTDPQIEREFCDLPRCGSEA
QPRQEATSVSCFRGKGEGYRGTANTTTAGVPCQRWDAQIPHQHRFTPEKYACKDLRENFCRNPDGSEA
PWCFTLRPGMRVGFCYQIRRCTDDVRPQGCYHGAGEQYRGTVSKTRKGVQCQRASAETPHKPQFTFTS
EPHAQLEENFCRDPDGDSYGPWCYTMDPRTPFDYCALRRCADDQPPSILDPPDQVQFEKCGKRVDRLD
QRCSKLRVAGGHPGNSPWTVSLRNRQGQHFCGGSLVKEQWILTARQCFSSSHMPLTGYEVWLGTLFQN
PQHGEPGLQRVPVAKMLCGPSGSQLVLLKLERSVTLNQRVALICLPPEWYVVPPGTKCEIAGRGETKG
TGNDTVLNVALLNVISNQECNIKHRGHVRESEMCTEGLLAPVGACEGGDYGGPLACFTHNCWVLEGIR
IPNRVCARSRWPAVFTRVSVFVDWIHKVMRLG

| | | |
|---|---|---|
| NOV36d, CG54479-02 | SEQ ID NO: 451 | 1710 bp |
| DNA Sequence | ORF Start: ATG at 1 | ORF Stop: TGA at 1705 |

ATGACTTCCAGGTGCTCCGGGGCACAGAGCTACCTGCTACATGCGGTGGTGCCTGGGCCTTGGCAGGA
GGATGTGGCAGATGCTGAAGAGTGTGCTGGTCGCTGTGGGCCCTTAACGGACTGCTGGGCCTTCCACT
ACAATGTGAGCAGCCATGGTTGCCAACTGCTGCCATGGACTCAACACTCGCCCCACTCAAGGCTGTGG
CATTCTGGGCGCTGTGACCTCTTCCAGAAGAAAGACTACATACGGACCTGCATCATGAACAATGGGGT
TGGGTACCGGGGCACCATGGCCACGACCGTGGGTGGCCTGTCCTGCCAGGCTTGGAGCCACAAGTTCC
CGAATGATCACAAGTACATGCCCACGCTCCGGAATGGCCTGGAAGAGAACTTCTGCCATAACCCTGAT
GGCGACCCCGGAGGTCCTTGGTGCCACACAACAGACCCTGCCGTGCGCTTCCAGAGCTGCGGCATCAA
ATCCTGCCGGGTGGCCGCGTGTGTCTGGTGCAATGGCGAGGAATACCGCGGCGCGGTAGACCGCACCG
AGTCAGGGCGCGAGTGCCAGCGCTGGGATCTTCAGCACCCGCACCAGCACCCCTTCGAGCCGGGCAAG
TACCTCGACCAAGGTCTGGACGACAACTATTGCCGGAATCCTGACGGCTCCGAGCGGCCATGGTGCTA
CACTACGGATCCGCAGATCGAGCGAGAATTCTGTGACCTCCCCCGCTGCGGTTCCGAGGCACAGCCCC
GCCAAGAGGCCACAAGTGTCAGCTGCTTCCGCGGGAAGGGTGAGGGCTACCGGGGCACAGCCAATACC
ACCACCGCGGGCGTACCTTGCCAGCGTTGGGACGCGCAAATCCCGCATCAGCACCGATTTACGCCAGA
AAAATACGCGTGCAAGGACCTTCGGGAGAACTTCTGCCGGAACCCCGACGGCTCAGAGGCGCCCTGGT
GCTTCACACTGCGGCCCGGCATGCGCGTGGGCTTTTGCTACCAGATCCGGCGTTGTACAGACGACGTG
CGGCCCCAGGACTGCTACCACGGCGCGGGGGAGCAGTACCGCGGCACGGTCAGCAAGACCCGCAAGGG
TGTCCAGTGCCAGCGCGCGTCCGCTGAGACGCCGCACAAGCCGCAGTTCACGTTTACCTCCGAACCGC
ATGCACAACTGGAGGAGAACTTCTGCCAGGACCCAGATGGGGATAGCCATGGGCCCTGGTGCTACACG
ATGGACCCAAGGACCCCATTCGACTACTGTGCCCTGCGACGCTGCGCTGATGACCAGCCGCCATCAAT
CCTGGACCCCCCCACAGACCAGGTGCAGTTTGAGAAGTGTGGCAAGAGGGTGGATCGGCTGGATCAGC
GTCGTTCCAAGCTGCGCGTGGCTGGGGGCCATCCGGGCAACTCACCCTGGACAGTCAGCTTGGGGAAT
CGGAGGCAGGGCCAGCATTTCTGCGGGGGGTCTCTAGTGAAGGAGCAGTGGATACTGACTGCCCGGCA
GTGCTTCTCCTCCCATATGCCTCTCACGGGCTATGAGGTATGGTTGGGCACCCTGTTCCAGAACCCAC
AACATGGAGAGCCAGGCCTACAGCGGGTCCCAGTAGCCAAGATGCTGTGTGGGCCCTCAGGCTCCCAG
CTTGTCCTGCTCAAGCTGGAGAGATCTGTGACCCTGAACCAGCGTGTGGCCCTGATCTGCCTGCCGCC
TGAATGATAT

| | | | |
|---|---|---|---|
| NOV36d, CG54479-02 | SEQ ID NO: 452 | 568 aa | MW at 64180.3kD |
| Protein Sequence | | | |

MTSRCSGAQSYLLHAVVPGPWQEDVADAEECAGRCGPLTDCWAFHYNVSSHGCQLLPWTQHSPHSRLW
HSGRCDLFQKKDYIRTCIMNNGVGYRGTMATTVGGLSCQAWSHKFPNDHKYMPTLRNGLEENFCHNPD
GDPGGPWCHTTDPAVRFQSCGIKSCRVAACVWCNGEEYRGAVDRTESGRECQRWDLQHPHQHPFEPGK
YLDQGLDDNYCRNPDGSERPWCYTTDPQIEREFCDLPRCGSEAQPRQEATSVSCFRGKGEGYRGTANT
TTAGVPCQRWDAQIPHQHRFTPEKYACKDLRENFCRNPDGSEAPWCFTLRPGMRVGFCYQIRRCTDDV
RPQDCYHGAGEQYRGTVSKTRKGVQCQRASAETPHKPQFTFTSEPHAQLEENFCQDPDGDSHGPWCYT
MDPRTPFDYCALRRCADDQPPSILDPPTDQVQFEKCGKRVDRLDQRRSKLRVAGGHPGWSPWTVSLGN
RRQGQHFCGGSLVKEQWILTARQCFSSHMPLTGYEVWLGTLFQNPOHGEPGLQRVPVAKMLCGPSGSQ
LVLLKLERSVTLNQRVALICLPPE

| | | |
|---|---|---|
| NOV36e, CG54479-03 | SEQ ID NO: 453 | 1011 bp |
| DNA Sequence | ORF Start: at 7 | ORF Stop: at 1006 |

AAGCTTTGCATCATGAACAATGGGGTTGGGTACCGGGGCACCATGGCCACGACCGTGGGTGGCCTGCC
CTGCCAGGCTTGGAGCCACAAGTTCCCAAATGATCACAAGTACACGCCCACTCTCCGGAATGGCCTGG
AAGAGAACTTCTGCCGTAACCCTGATGGCGACCCCGGAGGTCCTTGGTGCTACACAACAGACCCTGCT
GTGCGCTTCCAGAGCTGCGGCATCGAATCCTGCCGGGAGGCCGCGTGTGTCTGGTGCAATGGCGAGGA
ATACCGCGGCGCGGTAGACCGCACGGAGTCAGGGCGCGAGTGCCAGCGCTGGGATCTTCAGCACCCGC
ACCAGCACCCCTTCGAGCCGGGCAAGTTCCTCGACCAAGGTCTGGACGACAACTATTGCCGGAATCCT
GACGGCTCCGAGCGGCCATGGTGCTACACTACGGATCCGCAGATCGAGCGAGAGTTCTGTGACCTCCC
CCGCTGCGGGTCCGAGGCACAGCCCCGCCAAGAGGCCACAACTGTCAGCTGCTTCCGCGGGAAGGGTG
AGGGCTACCGGGGCACAGCCAATACCACCACTGCGGGCGTACCTTGCCAGCGTTGGGACGCGCAAATC
CCTCATCAGCACCGATTTACGCCAGAAAAATACGCGTGCAAAGACCTTCGGGAGAACTTCTGCCGGAA
CCCCGACGGCTCAGAGGCGCCCTGGTGCTTCACACTGCGGCCCGGCATGCGCGCGGCCTTTTGCTACC
AGATCCGGCGTTGTACAGACGACGTGCGGCCCCAGGGGGAGCAGTACCGCGGCACGGTCAGCAAGACC
CGCAAGGGTGTCCAGTGCCAGCGCTGGTCCGCTGAGACGCCGCACAAGCCGCAGTTCACGTTTACCTC
CGAACCGCATGCACAACTGGAGGAGAACTTCTGCCGGAACCCAGATGGGGATAGCCATGGGCCCTGGT
GCTACACGATGGACCCAAGGACCCCATTCGACTACTGTGCCCTGCGACGCTGCCTCGAG

| | | | |
|---|---|---|---|
| NOV36e, CG54479-03 | SEQ ID NO: 454 | 333 aa | MW at 38129.9kD |
| Protein Sequence | | | |

CIMNNGVGYRGTMATTVGGLPCQAWSHKFPNDHKYTPTLRNGLEENFCRNPDGDPGGPWCYTTDPAVR
FQSCGIESCREAACVWCNGEEYRGAVDRTESGRECQRWDLQHPHQHPFEPGKFLDQGLDDNYCRNPDG
SERPWCYTTDPQIEREFCDLPRCGSEAQPRQEATTVSCFRGKGEGYRGTANTTTAGVPCQRWDAQIPH
QHRFTPEKYACKDLRENFCRNPDGSEAPWCFTLRPGMRAAFCYQIRRCTDDVRPQGEQYRGTVSKTRK
GVQCQRWSAETPHKPQFTFTSEPHAQLEENFCRNPDGDSHGPWCYTMDPRTPFDYCALRRC

| | | |
|---|---|---|
| NOV36f, GG54479-04 | SEQ ID NO: 455 | 1881 bp |
| DNA Sequence | ORF Start: ATG at 76 | ORF Stop: TGA at 1777 |

ACACATTACTGACATGTATGCCCACCTGACCTGCACCCACTCATGCCCACTCTGCAGGGCAGCGCTCG
+E,unc CCATTGAATGACTTCCAGGTGCTCCGGGGCACAGAGCTACCTGCTACATGCGGTGGTGCCTGGGCCTT
GGCAGGAGGATGTGGCAGATGCTGAAGAGTGTGCTGGTCGCTGTGGGCCCTTAACGGACTGCTGGGCC
TTCCACTACAATGTGAGCAGCCATGGTTGCCAACTGCTGCCATGGACTCAACACTCGCCCCACTCAAG
GCTGTGGCATTCTGGGCGCTGTGACCTCTTCCAGAAGAAAGACTACATACGGACCTGCATCATGAACA
ATGGGGTTGGGTACCGGGGCACCATGGCCACGACCGTGGGTGGCCTGTCCTGCCAGGCTTGGAGCCAC
AAGTTCCCGAATGATCACAAGTACATGCCCACGCTCCGGAATGGCCTGGAAGAGAACTTCTGCCATAA
CCCTGATGGCGACCCCGGAGGTCCTTGGTGCCACACAACAGACCCTGCCGTGCGCTTCCAGAGCTGCG
GCATCAAATCCTGCCGGGTGGCCGCGTGTGTCTGGTGCAATGGCGAGGAATACCGCGGCGCGGTAGAC
CGCACCGAGTCAGGGCGCGAGTGCCAGCGCTGGGATCTTCAGCACCCGCACCAGCACCCCTTCGAGCC
GGGCAGGTTCCTCGACCAAGGTCTGGACGACAACTATTGCCGGAATCCTGACGGCTCCGAGCGGCCAT
GGTGCTACACTACGGATCCGCAGATCGAGCGAGAATTCTGTGACCTCCCCCGCTGCGGTTCCGAGGCA
CAGCCCCGCCAAGAGGCCACAAGTGTCAGCTGCTTCCGCGGGAAGGGTGAGGGCTACCGGGGCACAGC
CAATACCACCACCGCGGGCGTACCTTGCCAGCGTTGGGACGCGCAAATCCCGCATCAGCACCGATTTA
CGCCAGAAAAATACGCGTGCAAGGACCTTCGGGAGAACTTCTGCCGGAACCTCGACGGCTCAGAGGCG
CCCTGGTGCTTCACACTGCGGCCCGGCATGCGCGTGGGCTTTTGCTACCAGATCCGGCGTTGTACAGA
CGACGTGCGGCCCCAGGACTGCTACCACGGCGCGGGGGAGCAGTACCGCGGCACGGTCAGCAAGACCC
GCAAGGGTGTCCAGTGCCAGCGCGCGTCCGCTGAGACGCCGCACAAGCCGCAGTTCACGTTTACCTCC
GAACCGCATGCACAACTGGAGGAGAACTTCTGCCAGACCCCAGATGGGGATAGCCATGGGCCCTGGTG
CTACACGATGGACCCAAGGACCCCATTCGACTACTGTGCCCTGCGACGCTGCGCTGATGACCAGCCGC
CATCAATCCTGGACCCCCCCGACCAGGTGCAGTTTGAGAAGTGTGGCAAGAGGGTGGATCGGCTGGAT
CAGCGTCGTTCCAAGCTGCGCGTGGCTGGGGGCCATCCGGGCAACTCACCCTGGACAGTCAGCTTGGG
GAATCGGCAGGGCCAGCATTTCTGCGGGGGGTCTCTAGTGAAGGAGCAGTGGATACTGACTGCCCGGC
AGTGCTTCTCCTCCCAGCATATGCCTCTCACGGGCTATGAGGTATGGTTGGGCACCCTGTTCCAGAAC
CCACAACATGGAGAGCCAGGCCTACAGCGGGTCCCAGTAGCCAAGATGCTGTGTGGGCCCTCAGGCTC
CCAGCTTGTCCTGCTCAAGCTGGAGAGGTCTGTGACCCTGAACCAGCGTGTGGCCCTGATCTGCCTGC
CGCCTGAATGATATGTGGTGCCTCCAGGGACCAAGTGTGAGATTGCAGGCCGGGGTGAGACCAAAGGT
AAGAGCATAGTGCACAGGACTGCTGGTGGCCAGGAGGCCCAGCCC

| | | | |
|---|---|---|---|
| NOV36f, CG54479-04 | SEQ ID NO: 456 | 567 aa | MW at 64065.2kD |
| Protein Sequence | | | |

MTSRCSGAQSYLLHAVVPGPWQEDVADAEECAGRCGPLTDCWAFHYNVSSHGCQLLPWTQHSPHSRLW
HSGRCDLFQKKDYIRTCIMNNGVGYRGTMATTVGGLSCQAWSHKFPNDHKYMPTLRNGLEENFCHNPD
GDPGGPWCHTTDPAVRFQSCGIKSCRVAACVWCNGEEYRGAVDRTESGRECQRWDLQHPHQHPFEPGR
FLDQGLDDNYCRNPDGSERPWCYTTDPQIEREFCDLPRCGSEAQPRQEATSVSCFRGKGEGYRGTANT
TTAGVPCQRWDAQIPHQHRFTPEKYACKDLRENFCRNLDGSEAPWCFTLRPGMRVGFCYQIRRCTDDV
RPQDCYHGAGEQYRGTVSKTRKGVQCQRASAETPHKPQFTFTSEPHAQLEENFCQTPDGDSHGPWCYT
MDPRTPFDYCALRRCADDQPPSILDPPDQVQFEKCGKRVDRLDQRRSKLRVAGGHPGNSPWTVSLGNR
QGQHFCGGSLVKEQWILTARQCFSSQHMPLTGYEVWLGTLFQNPQHGEPGLQRVPVAKMLCGPSGSQL
VLLKLERSVTLNQRVALICLPPE

[0554] A ClustalW comparison of the above protein sequences yields the following sequence alignment shown in Table 36B.

TABLE 36B
Comparison of the NOV36 protein sequences.

NOV36a MGLWWVTVQPPARRMGWLPLLLLLTQCLGVPGQRSPLNDFQVLRGTELQHLLHAVVPGPW
NOV36b ----------------------MTSRCSGAQSY------------------LQAVVPGPW
NOV36c --------------MGWLPLLLLLTQCLGVPGQRSPLWDFEVLRGTELQRLLQAVVPGPW
NOV36d ----------------------MTSRCSGAQSYL-----------------LHAVVPGPW
NOV36e ------------------------------------------------------------
NOV36f ----------------------MTSRCSGAQSYL-----------------LHAVVPGPW
NOV36a QEDVADAEECAGRCGPLMDCRAFHYNVSSHGCQLLPWTQHSPHTRLRRSGRCDLFQKKDY
NOV36b QEDVADAEECAGRCGPLMDC-AFHYNVSSHGCQLLPWTQHSPHTRLRHSGRCDLFQEKDY
NOV36c QEDVADAEECAGRCGPLMDCRAFHYNVSSHGCQLLPWTQHSPHTRLRHSGRCDLFQEKDY
NOV36d QEDVADAEECAGRCGPLTDCWAFHYNVSSHGCQLLPWTQHSPHSRLWHSGRCDLFQKKDY
NOV36e ------------------------------------------------------------
NOV36f QEDVADAEECAGRCGPLTDCWAFHYNVSSHGCQLLPWTQHSPHSRLWHSGRCDLFQKKDY
NOV36a VRTCIMNNGVGYRGTMATTVGGLPCQAWSHKFPNDHKYTPTLRNGLEENFCRNPDGDPGG
NOV36b IRTCIMNNGVGYRGTMATTVGGLSCQAWSHKFPNDHQYMPTLRNGLEENFCRNPDGDPGG
NOV36c IRTCIMNNGVGYRGTMATTVGGLSCQAWSHKFPNDHRYMPTLRNGLEENFCRNPDGDPGG
NOV36d IRTCIMNNGVGYRGTMATTVGGLSCQAWSHKFPNDHKYMPTLRNGLEENFCHNPDGDPGG
NOV36e ---CIMNNGVGYRGTMATTVGGLPCQAWSHKFPNDHKYTPTLRNGLEENFCRNPDGDPGG
NOV36f IRTCIMNNGVGYRGTMATTVGGLSCQAWSHKFPNDHKYMPTLRNGLEENFCHNPDGDPGG
NOV36a PWCYTTDPAVRFQSCGIKSCREAACVWCNGEEYRGAVDRTESGRECQRWDLQHPHQHPFE
NOV36b PWCHTTDPAVRFQSCGIKSCRVAACVWCNGEEYRGAVDRTESGRECQRWDLQHPHQHPFE
NOV36c PWCHTTDPAVRFQSCGIKSCRSAACVWCNGEEYRGAVDRTESGRECQRWDLQHPHQHPFE
NOV36d PWCHTTDPAVRFQSCGIKSCRVAACVWCNGEEYRGAVDRTESGRECQRWDLQHPHQHPFE
NOV36e PWCYTTDPAVRFQSCGIESCREAACVWCNGEEYRGAVDRTESGRECQRWDLQHPHQHPFE
NOV36f PWCHTTDPAVRFQSCGIKSCRVAACVWCNGEEYRGAVDRTESGRECQRWDLQHPHQHPFE
NOV36a PGKFLDQGLDDNYCRNPDGSERPWCYTTDPQIEREFCDLPRCGSEAQPRQEATTVSCFRG
NOV36b PGKFLDQGLDDNYCRNPDGSERPWCYTTDPQIEREFCDLPRCGSEAQPRQEATSVSCFRG
NOV36c PGKYPDQGLDDNYCRNPDGSERPWCYTTDPQIEREFCDLPRCGSEAQPRQEATSVSCFRG
NOV36d PGKYLDQGLDDNYCRNPDGSERPWCYTTDPQIEREFCDLPRCGSEAQPRQEATSVSCFRG
NOV36e PGKFLDQGLDDNYCRNPDGSERPWCYTTDPQIEREFCDLPRCGSEAQPRQEATTVSCFRG
NOV36f PGRFLDQGLDDNYCRNPDGSERPWCYTTDPQIEREFCDLPRCGSEAQPRQEATSVSCFRG
NOV36a KGEGYRGTANTTTAGVPCQRWDAQIPHQRRFTPEKYACKDLRENFCRNPDGSEAPWCFTL
NOV36b KGEGYRGTANTTTAGVPCQRWDAQIPHQHRFTPEKYACKDLRENFCRNPDGSEAPWCFTL
NOV36c KGEGYRGTANTTTAGVPCQRWDAQIPHQHRFTPEKYACKDLRENFCRNPDGSEAPWCFTL
NOV36d KGEGYRGTANTTTAGVPCQRWDAQIPHQHRFTPEKYACKDLRENFCRNPDGSEAPWCFTL
NOV36e KGEGYRGTA1TTTAGVPCQRWDAQIPHQHRFTPEKYACKDLRENFCRNPDGSEAPWCFTL
NOV36f KGEGYRGTANTTTAGVPCQRWDAQIPHQHRFTPEKYACKDLRENFCRNLDGSEAPWCFTL
NOV36a RPGMRAAFCYQIRRCTDDVRPQDCYHGAGEQYRGTVSKTRKGVQCQRWSAETPHKPQFTF
NOV36b RPGMRVGFCYQIRRCTDDVRPQDCYHGAGEQYRGTVSKTRKGVQCQRGSABTPHKPQFTF
NOV36c RPGMRVGFCYQIRRCTDDVRPQGCYHGAGEQYRGTVSKTRKGVQCQRASAETPHKPQFTF
NOV36d RPGMRVGFCYQIRRCTDDVRPQDCYHGAGEQYRGTVSKTRKGVQCQRASAETPHKPQFTF
NOV36e RPGMRAAFCYQIRRCTDDVRPQ-----G-EQYRGTVSKTRKGVQCQRWSAETPHKPQFTF
NOV36f RPGMRVGFCYQIRRCTDDVRPQDCYHGAGEQYRGTVSKTRKGVQCQRASAETPHKPQFTF
NOV36a TSEPHAQLEENFCRNPDGDSHGPWCYTMDPRTPFDYCALRRCADDQPPSILDPP-DQVQF
NOV36b TSEPHAQLEENFCQDPDGDSHGPWCYTMDPRTPFDYCALRRCADDQPPSILDPP-DQVQF
NOV36c TSEPHAQLEENFCRDPDGDSYGPWCYTMDPRTPFDYCALRRCADDQPPSILDPP-DQVQF
NOV36d TSEPHAQLEENFCQDPDGDSHGPWCYTMDPRTPFDYCALRRCADDQPPSILDPPTDQVQF
NOV36e TSEPHAQLEENFCRNPDGDSHGPWCYTMDPRTPFDYCALRRC------------------
NOV36f TSEPHAQLEENFCQTPDGDSHGPWCYTMDPRTPFDYCALRRCADDQPPSILDPP-DQVQF
NOV36a EKCGKRVDRLDQRRSKLRVVGGHPGNSPWTVSLRNR-QGQHFCGGSLVKEQWILTARQCF
NOV36b EKCGKRVDRLDORCSKLRVAGGHPGNSPWTVSLRNR-QGQHFCGGSLVKEQWILTARQCF
NOV36c EKCGKRVDRLDQRCSKLRVAGGHPGNSPWTVSLRNR-QGQHFCGGSLVKEQWILTARQCF
NOV36d EKCGKRVDRLDQRRSKLRVAGGHPGNSPWTVSLGNRRQGQHFCGGSLVKEQWILTARQCF
NOV36e ------------------------------------------------------------
NOV36f EKCGKRVDRLDQRRSKLRVAGGHPGNSPWTVSLGNR-QGQHFCGGSLVKEQWILTARQCF
NOV36a SSCHMPLTGYEVWLGTLFQNPQHGEPSLQRVPVAKMVCGPSGSQLVLLKLERSVTLNQRV
NOV36b SSSHMPLTGYEVWLGTLFQNPQHGEPGLQRVPVAKMLCGPSGSQLVLLKLERSVTLNQRV
NOV36c SSSHMPLTGYEVWLGTLFQNPQHGEPGLQRVPVAKMLCGPSGSQLVLLKLERSVTLNQRV
NOV36d SS-HMPLTGYEVWLGTLFQNPQHGEPGLQRVPVAKMLCGPSGSQLVLLKLERSVTLNQRV
NOV36e ------------------------------------------------------------
NOV36f SSQHMPLTGYEVWLGTLFQNPQHGEPGLQRVPVAKMLCGPSGSQLVLLKLERSVTLNQRV
NOV36a ALICLPPEWYVVPPGTKCEG----------------------------------------
NOV36b ALICLPPE----------------------------------------------------
NOV36c ALICLPPEWYVVPPGTKCEIAGRGETKGTGNDTVLNVALLNVISNQECNIKHRGHVRESE
NOV36d ALICLPPE----------------------------------------------------
NOV36e ------------------------------------------------------------
NOV36f ALICLPPE----------------------------------------------------
NOV36a ----------------DYGGPLACFTHNCWVLEGIIIPNRVCARSRWPAVFTRVSVFVDW
NOV36b ------------------------------------------------------------
NOV36c MCTEGLLAPVGACEGGDYGGPLACFTHNCWVLEGIRIPNRVCARSRWPAVFTRVSVFVDW
NOV36d ------------------------------------------------------------
NOV36e ------------------------------------------------------------
NOV36f ------------------------------------------------------------
NOV36a IHKVMRLG
NOV36b --------
NOV36c IHKVMRLG
NOV36d --------
NOV36e --------
NOV36f --------
NOV36a (SEQ ID NO: 446)
NOV36b (SEQ ID NO: 448)
NOV36c (SEQ ID NO: 450)
NOV36d (SEQ ID NO: 452)
NOV36e (SEQ ID NO: 454)
NOV36f (SEQ ID NO: 456)

[0555] Further analysis of the NOV36a protein yielded the following properties shown in Table 36C.

TABLE 36C
Protein Sequence Properties NOV36a

| | |
|---|---|
| SignalP analysis: | Cleavage site between residues 30 and 31 |

PSORT II analysis:
PSG: a new signal peptide prediction method

N-region: length 0; pos.chg 0; neg.chg 0
H-region: length 12; peak value 9.09
PSG score: 4.69

GvH: von Heijne's method for signal seq. recognition

GvH score (threshold: −2.1): 6.16
possible cleavage site: between 29 and 30

>>> Seems to have a cleavable signal peptide (1 to 29)
ALOM: Klein et al's method for TM region allocation

Init position for calculation: 30
Tentative number of TMS(s) for the threshold 0.5: 0
number of TMS(s) . . . fixed
PERIPHERAL Likelihood = 3.07 (at 623)
ALOM score: 3.07 (number of TMSs: 0)

MTOP: Prediction of membrane topology (Hartmann et al.)

Center position for calculation: 14
Charge difference: −3.0 C(0.0) − N(3.0)
N >= C: N-terminal side will be inside

MITDISC: discrimination of mitochondrial targeting seq

| | | | |
|---|---|---|---|
| R content: | 3 | Hyd Moment(75): | 1.11 |
| Hyd Moment(95): | 1.26 | G content: | 4 |
| D/E content: | 1 | S/T content: | 3 |

Score: −4.52

Gavel: prediction of cleavage sites for mitochondrial preseq

R-2 motif at 44 QRS|PL

NUCDISC: discrimination of nuclear localization signals

pat4: none
pat7: PHTRLRR (3) at 102
bipartite: none
content of basic residues: 11.8%
NLS Score: −0.22

KDEL: ER retention motif in the C-terminus: none
ER Membrane Retention Signals: none
SKL: peroxisomal targeting signal in the C-terminus: none
PTS2: 2nd peroxisomal targeting signal: none
VAC: possible vacuolar targeting motif: none
RNA-binding motif: none
Actinin-type actin-binding motif:

type 1: none
type 2: none

NMYR: N-myristoylation pattern: none
Prenylation motif: none
memYQRL: transport motif from cell surface to Golgi: none
Tyrosines in the tail: none
Dileucine motif in the tail: none
checking 63 PROSITE DNA binding motifs: none
checking 71 PROSITE ribosomal protein motifs: none
checking 33 PROSITE prokaryotic DNA binding motifs: none
NNCN: Reinhardt's method for Cytoplasmic/Nuclear discrimination

Prediction: nuclear
Reliability: 55.5

COIL: Lupas's algorithm to detect coiled-coil regions

total: 0 residues

Final Results (k = 9/23):

66.7%: extracellular, including cell wall
22.2%: mitochondrial
11.1%: vacuolar

>> prediction for CG54479-06 is exc (k = 9)

[0556] A search of the NOV36a protein against the Geneseq database, a proprietary database that contains sequences published in patents and patent publication, yielded several homologous proteins shown in Table 36D.

TABLE 36D
Geneseq Results for NOV36a

| | | NOV36a | Identities/ | |
|---|---|---|---|---|
| | | Residues/ | Similarities for | |
| Geneseq | Protein/Organism/Length | Match | the Matched | Expect |
| Identifier | [Patent #, Date] | Residues | Region | Value |
| AAW14270 | Human growth factor L5/3 - | 15 . . . 670 | 637/711 (89%) | 0.0 |
| | Homo sapiens, 711 aa. | 1 . . . 711 | 641/711 (89%) | |
| | [US5606029-A, 25-FEB-1997] | | | |
| AAR66602 | Human L5/3 tumour suppressor | 15 . . . 670 | 637/711 (89%) | 0.0 |
| | protein - Homo sapiens, 711 aa. | 1 . . . 711 | 641/711 (89%) | |
| | [US5315000-A, 24-MAY-1994] | | | |
| AAY31157 | Human macrophage stimulating | 15 . . . 670 | 639/716 (89%) | 0.0 |
| | protein - Homo sapiens, 711 aa. | 1 . . . 711 | 642/716 (89%) | |
| | [US5948892-A, 07-SEP-1999] | | | |
| ABB82662 | Human hepatocyte growth factor- | 15 . . . 670 | 636/711 (89%) | 0.0 |
| | like protein (HGFL) - Homo | 1 . . . 711 | 640/711 (89%) | |
| | sapiens, 711 aa. [WO200283074- | | | |
| | A2, 24-OCT-2002] | | | |
| AAB84520 | Amino acid sequence of human | 15 . . . 670 | 638/716 (89%) | 0.0 |
| | macrophage stimulating protein | 1 . . . 710 | 641/716 (89%) | |
| | (MSP) - Homo sapiens, 710 aa. | | | |
| | [WO200144294-A2, 21-JUN- | | | |
| | 2001] | | | |

[0557] In a BLAST search of public sequence databases, the NOV36a protein was found to have homology to the proteins shown in the BLASTP data in Table 36E.

TABLE 36E
Public BLASTP Results for NOV36a

| | | NOV36a | Identities/ | |
|---|---|---|---|---|
| Protein | | Residues/ | Similarities for | |
| Accession | | Match | the Matched | Expect |
| Number | Protein/Organism/Length | Residues | Portion | Value |
| AAH48330 | Macrophage stimulating 1 | 15 . . . 670 | 637/711 (89%) | 0.0 |
| | (Hepatocyte growth factor-like) - | 1 . . . 711 | 641/711 (89%) | |
| | Homo sapiens (Human), 711 aa. | | | |
| P26927 | Hepatocyte growth factor-like | 15 . . . 670 | 636/711 (89%) | 0.0 |
| | protein precursor (Macrophage | 1 . . . 711 | 640/711 (89%) | |
| | stimulatory protein) (MSP) | | | |
| | (Macrophage stimulating protein) - | | | |
| | Homo sapiens (Human), 711 aa. | | | |
| CAD48698 | Sequence 61 from Patent | 15 . . . 670 | 612/712 (85%) | 0.0 |
| | WO0229058 - Homo sapiens | 1 . . . 712 | 626/712 (86%) | |
| | (Human), 712 aa. | | | |
| CAD48697 | Sequence 59 from Patent | 15 . . . 670 | 611/712 (85%) | 0.0 |
| | WO0229058 - Homo sapiens | 1 . . . 712 | 625/712 (86%) | |
| | (Human), 712 aa. | | | |
| Q13208 | Hepatocyte growth factor-like | 50 . . . 606 | 533/557 (95%) | 0.0 |
| | protein homolog - Homo sapiens | 11 . . . 567 | 543/557 (96%) | |
| | (Human), 567 aa. | | | |

[0558] PFam analysis indicates that the NOV36a protein contains the domains shown in the Table 36F.

TABLE 36F
Domain Analysis of NOV36a

| | NOV36a | Identities/ | |
|---|---|---|---|
| | Match | Similarities | |
| Pfam Domain | Region | for the Matched Region | Expect Value |
| PAN | 32 . . . 120 | 25/110 (23%) | 1.3e−16 |
| | | 68/110 (62%) | |
| kringle | 124 . . . 200 | 46/85 (54%) | 3.3e−45 |
| | | 70/85 (82%) | |
| kringle | 205 . . . 282 | 48/85 (56%) | 2e−48 |
| | | 73/85 (86%) | |
| kringle | 297 . . . 375 | 44/85 (52%) | 3.6e−49 |
| | | 73/85 (86%) | |
| kringle | 384 . . . 462 | 44/85 (52%) | 1.5e−50 |
| | | 76/85 (89%) | |
| trypsin | 498 . . . 663 | 73/263 (28%) | 7.3e−21 |
| | | 126/263 (48%) | |

### Example 37

[0559] The NOV37 clone was analyzed, and the nucleotide and encoded polypeptide sequences are shown in Table 37A.

TABLE 37A
NOV37 Sequence Analysis

| | | |
|---|---|---|
| NOV37a, CG54539-02 | SEQ ID NO: 457 | 1567 bp |
| DNA Sequence | ORF Start: ATG at 2 | ORF Stop: TGA at 1523 |

TATGGGGTGTTGGGGTCGGAACCGGGGCCGGCTGCTGTGCATGCTGGCGCTGACCTTCATGTTCATGG
TGCTGGAGGTGGTGGTGAGCCGGGTGACCTCGTCGCTGGCGATGCTCTCCGACTCCTTCCACATGCTG
TCGGACGTGCTGGCGCTGGTGGTGGCGCTGGTGGCCGAGCGCTTCGCCCGGCGGACCCACGCCACCCA
GAAGAACACGTTCGGCTGGATCCGAGCCGAGGTAATGGGGGCTCTGGTGAACGCCATCTTCCTGACTG
GCCTCTGTTTCGCCATCCTGCTGGAGGCCATCGAGCGCTTCATCGAGCCGCACGAGATGCAGCAGCCG
CTGGTGGTCCTTGGGGTCGGCGTGGCCGGGCTGCTGGTCAACGTGCTGGGGCTCTGCCTCTTCCACCA
TCACAGCGGCTTCAGCCAGGACTCCGGCCACGGCCACTCGCACGGGGGTCACGGCTACGGCCACGGCC
TCCCCAAGGGGCCTCGCGTTAAGAGCACCCGCCCCGGGAGCAGCGACATCAACGTGGCCCCGGGCGAG
CAGGGTCCCGACCAGGAGGAGACCAACACCCTGGTGGCCAATACCAGCCAACTCAACGGGCTGAAATT
GGACCCCGCAGACCCAGAAAACCCCAGAAGTGGTGATACAGTGGAAGTACAAGTGAATGGAAATCTTG
TCAGAGAACCTGACCATATGGAACTGGAAGAAGATAGGGCTGGACAACTTAACATGCGTGGAGTTTTT
CTGCATGTCCTTGGAGATGCCTTGGGTTCAGTGATTGTAGTAGTAAATGCCTTAGTCTTTTACTTTTC
TTGGAAAGGTTGTTCTGAAGGGGATTTTTGTGTGAATCCATGTTTCCCTGACCCCTGCAAAGCATTTG
TAGAAATAATTAATAGTACTCATGCATCAGTTTATGAGGCTGGTCCTTGCTGGGTGCTATATTTAGAT
CCAACTCTTTGTGTTGTAATGGTTTGTATACTTCTTTACACAACCTATCCATTACTTAAGGAATCTGC
TCTTATTCTTCTACAAACTGTTCCTAAACAAATTGATATCAGAAATTTGATAAAAGAACTTCGAAATG
TTGAAGGAGTTGAGGAAGTTCATGAATTACATGTTTGGCAACTTGCTGGAAGCAGAATCATTGCCACT
GCTCACATAAAATGTGAAGATCCAACATCATACATGGAGGTGGCTAAAACCATTAAAGACGTTTTTCA
TAATCACGGAATTCACGCTACTACCATTCAGCCTGAATTTGCTAGTGTAGGCTCTAAATCAAGTGTAG
TTCCGTGTGAACTTGCCTGCAGAACCCAGTGTGCTTTGAAGCAATGTTGTGGGACACTACCACAAGCC
CCTTCTGGAAAGGATGCAGAAAAGACCCCAGCAGTTAGCATTTCTTGTTTAGAACTTAGTAACAATCT
AGAGAAGAAGCCCAGGAGGACTAAAGCTGAAAACATCCCTGCTGTTGTGATAGAGATTAAAAACATGC
CAAACAAACAACCTGAATCATCTTTGTGAGTCTTGAAAAAGATGTGATATTTGACTTTTGCTTTAAAC
TGC

| | | | |
|---|---|---|---|
| NOV37a, CG54539-02 | SEQ ID NO: 458 | 507 aa | MW at 55325.3kD |
| Protein Sequence | | | |

MGCWGRNRGRLLCMLALTFMFMVLEVVVSRVTSSLAMLSDSFHMLSDVLALVVALVAERFARRTHATQ
KNTFGWIRAEVMGALVNAIFLTGLCFAILLEAIERFIEPHEMQQPLVVLGVGVAGLLVNVLGLCLFHH
HSGFSQDSGHGHSHGGHGYGHGLPKGPRVKSTRPGSSDINVAPGEQGPDQEETNTLVANTSNSNGLKL
DPADPENPRSGDTVEVQVNGNLVREPDHMELEEDRAGQLNMRGVFLHVLGDALGSVIVVVNALVFYFS
WKGCSEGDFCVNPCFPDPCKAFVEIINSTHASVYEAGPCWVLYLDPTLCVVMVCILLYTTYPLLKESA
LILLQTVPKQIDIRNLIKELRNVEGVEEVHELHVWQLAGSRIIATAHIKCEDPTSYMEVAKTIKDVFH
NHGIHATTIQPEFASVGSKSSVVPCELACRTQCALKQCCGTLPQAPSGKDAEKTPAVSISCLELSNNL
EKKPRRTKAENIPAVVIEIKNMPNKQPESSL

| | | |
|---|---|---|
| NOV37b, CG54539-01 | SEQ ID NO: 459 | 1665 bp |
| DNA Sequence | ORF Start: ATG at 77 | ORF Stop: TGA at 1598 |

CGACCCTCCGCGTCCCGCCAACGCCGCCGCTGCACCAGTCTCCGGGCCGGGCTCGGCGGGCCCCGCAG
CCGCAGCCATGGGGTGTTGGGGTCGGAACCGGGGCCGGCTGCTGTGCATGCTGGCGCTGACCTTCATG
TTCATGGTGCTGGAGGTGGTGGTGAGCCGGGTGACCTCGTCGCTGGCGATGCTCTCCGACTCCTTCCA
CATGCTGTCGGACGTGCTGGCGCTGGTGGTGGCGCTGGTGGCCGAGCGCTTCGCCCGGCGGACCCACG
CCACCCAGAAGAACACGTTCGGCTGGATCCGAGCCGAGGTAATGGGGGCTCTGGTGAACGCCATCTTC
CTGACTGGCCTCTGTTTCGCCATCCTGCTGGAGGCCATCGAGCGCTTCATCGAGCCGCACGAGATGCA
GCAGCCGCTGGTGGTCCTTGGGGTCGGCGTGGCCGGGCTGCTGGTCAACGTGCTGGGGCTCTGCCTCT
TCCACCATCACAGCGGCTTCAGCCAGGACTCCGGCCACGGCCACTCGCACGGGGGTCACGGCCACGGC
CACGGCCTCCCCAAGGGGCCTCGCGTTAAGAGCACCCGCCCCGGGAGCAGCGACATCAACGTGGCCCC
GGGCGAGCAGGGTCCCGACCAGGAGGAGACCAACACCCTGGTGGCCAATACCAGCAACTCCAACGGGC
TGAAATTGGACCCCGCGGACCCAGAAAACCCCAGAAGTGGTGATACAGTGGAAGTACAAGTGAATGGA
AATCTTGTCAGAGAACCTGACCATATGGAACTGGAAGAAGATAGGGCTGGACAACTTAACATGCGTGG
AGTTTTTCTGCATGTCCTTGGAGATGCCTTGGGTTCAGTGATTGTAGTAGTAAATGCCTTAGTCTTTT
ACTTTTCTTGGAAAGGTTGTTCTGAAGGGGATTTTTGTGTGAATCCATGTTTCCCTGACCCCTGCAAA
GCATTTGTAGAAATAATTAATAGTACTCATGCATCAGTTTATGAGGCTGGTCCTTGCTGGGTGCTATA
TTTAGATCCAACTCTTTGTGTTGTAATGGTTTGTATACTTCTTTACACAACCTATCCATTACTTAAGG
AATCTGCTCTTATTCTTCTACAAACTGTTCCTAAACAAATTGATATCAGAAATTTGATAAAAGAACTT
CGAAATGTTGAAGGAGTTGAGGAAGTTCATGAATTACATGTTTGGCAACTTGCTGGAAGCAGAATCAT
TGCCACTGCTCACATAAAATGTGAAGATCCAACATCATACATGGAGGTGGCTAAAACCATTAAAGACG
TTTTTCATAATCACGGAATTCACGCTACTACCATTCAGCCTGAATTTGCTAGTGTAGGCTCTAAATCA
AGTGTAGTTCCGTGTGAACTTGCCTGCAGAACCCAGTGTGCTTTGAAGCAATGTTGTGGGACACTACC
ACAAGCCCCTTCTGGAAAGGATGCAGAAAAGACCCCAGCAGTTAGCATTTCTTGTTTAGAACTTAGTA
ACAATCTAGAGAAGAAGCCCAGGAGGACTAAAGCTGAAAACATCCCTGCTGTTGTGATAGAGATTAAA
AACATGCCAAACAAACAACCTGAATCATCTTTGTGAGTCTTGAAAAAGATGTGATATTTGACTTTTGC
TTTAAACTGCAAGAGGAAAAAGACTCCACTGAA

| | | | |
|---|---|---|---|
| NOV37b, CG54539-01 | SEQ ID NO: 460 | 507 aa | MW at 55299.3kD |
| Protein Sequence | | | |

MGCWGRNRGRLLCMLALTFMFMVLEVVVSRVTSSLAMLSDSFHMLSDVLALVVALVAERFARRTHATQ
KNTFGWIRAEVMGALVNAIFLTGLCFAILLEAIERFIEPHEMQQPLVVLGVGVAGLLVNVLGLCLFHH
HSGFSQDSGHGHSHGGHGHGHGLPKGPRVKSTRPGSSDINVAPGEQGPDQEETNTLVANTSNSNGLKL
DPADPENPRSGDTVEVQVNGNLVREPDHMELEEDRAGQLNMRGVFLHVLGDALGSVIVVVNALVFYFS
WKGCSEGDFCVNPCFPDPCKAFVEIINSTHASVYEAGPCWVLYLDPTLCVVMVCILLYTTYPLLKESA
LILLQTVPKQIDIRNLIKELRNVEGVEEVHELHVWQLAGSRIIATAHIKCEDPTSYMEVAKTIKDVFH
NHGIHATTIQPEFASVGSKSSVVPCELACRTQCALKQCCGTLPQAPSGKDAEKTPAVSISCLELSNNL
EKKPRRTKAENIPAVVIEIKNMPNKQPESSL

| | | |
|---|---|---|
| NOV37c, SNP13382438 of | SEQ ID NO: 461 | 1567 bp |
| CG54539-02, DNA Sequence | ORF Start: ATG at 2 | ORF Stop: TGA at 1523 |
| | SNP Pos: 464 | SNP Change: T to C |

TATGGGGTGTTGGGGTCGGAACCGGGGCCGGCTGCTGTGCATGCTGGCGCTGACCTTCATGTTCATGG
TGCTGGAGGTGGTGGTGAGCCGGGTGACCTCGTCGCTGGCGATGCTCTCCGACTCCTTCCACATGCTG
TCGGACGTGCTGGCGCTGGTGGTGGCGCTGGTGGCCGAGCGCTTCGCCCGGCGGACCCACGCCACCCA
GAAGAACACGTTCGGCTGGATCCGAGCCGAGGTAATGGGGGCTCTGGTGAACGCCATCTTCCTGACTG
GCCTCTGTTTCGCCATCCTGCTGGAGGCCATCGAGCGCTTCATCGAGCCGCACGAGATGCAGCAGCCG
CTGGTGGTCCTTGGGGTCGGCGTGGCCGGGCTGCTGGTCAACGTGCTGGGGCTCTGCCTCTTCCACCA
TCACAGCGGCTTCAGCCAGGACTCCGGCCACGGCCACTCGCACGGGGGTCACGGCCACGGCCACGGCC
TCCCCAAGGGGCCTCGCGTTAAGAGCACCCGCCCCGGGAGCAGCGACATCAACGTGGCCCCGGGCGAG
CAGGGTCCCGACCAGGAGGAGACCAACACCCTGGTGGCCAATACCAGCAACTCCAACGGGCTGAAATT
GGACCCCGCAGACCCAGAAAACCCCAGAAGTGGTGATACAGTGGAAGTACAAGTGAATGGAAATCTTG
TCAGAGAACCTGACCATATGGAACTGGAAGAAGATAGGGCTGGACAACTTAACATGCGTGGAGTTTTT
CTGCATGTCCTTGGAGATGCCTTGGGTTCAGTGATTGTAGTAGTAAATGCCTTAGTCTTTTACTTTTC
TTGGAAAGGTTGTTCTGAAGGGGATTTTTGTGTGAATCCATGTTTCCCTGACCCCTGCAAAGCATTTG
TAGAAATAATTAATAGTACTCATGCATCAGTTTATGAGGCTGGTCCTTGCTGGGTGCTATATTTAGAT
CCAACTCTTTGTGTTGTAATGGTTTGTATACTTCTTTACACAACCTATCCATTACTTAAGGAATCTGC
TCTTATTCTTCTACAAACTGTTCCTAAACAAATTGATATCAGAAATTTGATAAAAGAACTTCGAAATG
TTGAAGGAGTTGAGGAAGTTCATGAATTACATGTTTGGCAACTTGCTGGAAGCAGAATCATTGCCACT
GCTCACATAAAATGTGAAGATCCAACATCATACATGGAGGTGGCTAAAACCATTAAAGACGTTTTTCA
TAATCACGGAATTCACGCTACTACCATTCAGCCTGAATTTGCTAGTGTAGGCTCTAAATCAAGTGTAG
TTCCGTGTGAACTTGCCTGCAGAACCCAGTGTGCTTTGAAGCAATGTTGTGGGACACTACCACAAGCC
CCTTCTGGAAAGGATGCAGAAAAGACCCCAGCAGTTAGCATTTCTTGTTTAGAACTTAGTAACAATCT
AGAGAAGAAGCCCAGGAGGACTAAAGCTGAAAACATCCCTGCTGTTGTGATAGAGATTAAAAACATGC
CAAACAAACAACCTGAATCATCTTTGTGAGTCTTGAAAAAGATGTGATATTTGACTTTTGCTTTAAAC
TGC

| | | | |
|---|---|---|---|
| NOV37c, SNP13382438 of | SEQ ID NO: 462 | 507 aa | MW at 55299.3kD |
| CG54539-02, Protein | SNP Pos: 155 | | SNP Change: Tyr to His |
| Sequence | | | |

MGCWGRNRGRLLCMLALTFMFMVLEVVVSRVTSSLAMLSDSFHMLSDVLALVVALVAERFARRTHATQ
KNTFGWIRAEVMGALVNAIFLTGLCFAILLEAIERFIEPHEMQQPLVVLGVGVAGLLVNVLGLCLFHH
HSGFSQDSGHGHSHGGHGHGHGLPKGPRVKSTRPGSSDINVAPGEQGPDQEETNTLVANTSNSNGLKL
DPADPENPRSGDTVEVQVNGNLVREPDHMELEEDRAGQLNMRGVFLHVLGDALGSVIVVVNALVFYFS
WKGCSEGDFCVNPCFPDPCKAFVEIINSTHASVYEAGPCWVLYLDPTLCVVMVCILLYTTYPLLKESA
LILLQTVPKQIDIRNLIKELRNVEGVEEVHELHVWQLAGSRIIATAHIKCEDPTSYMEVAKTIKDVFH
NHGIHATTIQPEFASVGSKSSVVPCELACRTQCALKQCCGTLPQAPSGKDAEKTPAVSISCLELSNNL
EKKPRRTKAENIPAVVIEIKNNPNKQPESSL

[0560] A ClustalW comparison of the above protein sequences yields the following sequence alignment shown in Table 37B.

TABLE 37B
Comparison of the NOV37 protein sequences.

NOV37a MGCWGRNRGRLLCMLALTFMFMVLEVVVSRVTSSLAMLSDSFHMLSDVLALVVALVAERF
NOV37b MGCWGRNRGRLLCMLALTFMFMVLEVVVSRVTSSLAMLSDSFHMLSDVLALVVALVAERF
NOV37a ARRTHATQKNTFGWIRAEVMGALVNAIFLTGLCFAILLEAIERFIEPHEMQQPLVVLGVG
NOV37b ARRTHATQKNTFGWIRAEVMGALVNAIFLTGLCFAILLEAIERFIEPHEMQQPLVVLGVG
NOV37a VAGLLVNVLGLCLFHHHSGFSQDSGHGHSHGGHGYGHGLPKGPRVKSTRPGSSDINVAPG
NOV37b VAGLLVNVLGLCLFHHHSGFSQDSGHGHSHGGHGHGHGLPKGPRVKSTRPGSSDINVAPG
NOV37a EQGPDQEETNTLVAITSNSNGLKLDPADPENPRSGDTVEVQVNGNLVREPDHMELEEDRA
NOV37b EQGPDQEETNTLVANTSNSNGLKLDPADPENPRSGDTVEVQVNGNLVREPDHMELEEDRA
NOV37a GQLNMRGVFLHVLGDALGSVIVVVNALVFYFSWKGCSEGDFCVNPCFPDPCKAFVEIINS
NOV37b GQLNMRGVFLHVLGDALGSVIVVVNALVFYFSWKGCSEGDFCVNPCFPDPCKAFVEIINS
NOV37a THASVYEAGPCWVLYLDPTLCVVMVCILLYTTYPLLKESALILLQTVPKQIDIRNLIKEL
NOV37b THASVYEAGPCWVLYLDPTLCVVMVCILLYTTYPLLKESALILLQTVPKQIDIRNLIKEL
NOV37a RNVEGVEEVHELHVWQLAGSRIIATAHIKCEDPTSYMEVAKTIKDVFHNHGIHATTIQPE
NOV37b RNVEGVEEVHELHVWQLAGSRIIATAHIKCEDPTSYMEVAKTIKDVFHNHGIHATTIQPE
NOV37a FASVGSKSSVVPCELACRTQCALKQCCGTLPQAPSGKDAEKTPAVSISCLELSNNLEKKP
NOV37b FASVGSKSSVVPCELACRTQCALKQCCGTLPQAPSGKDAEKTPAVSISCLELSNNLEKKP
NOV37a RRTKAENIPAVVIEIKNMPNKQPESSL
NOV37b RRTKAENIPAVVIEIKNMPNKQPESSL
NOV37a (SEQ ID NO: 458)
NOV37b (SEQ ID NO: 460)

[0561] Further analysis of the NOV37a protein yielded the following properties shown in Table 37C.

TABLE 37C
Protein Sequence Properties NOV37a

| | |
|---|---|
| SignalP analysis: | Cleavage site between residues 30 and 31 |

PSORT II analysis:
PSG: a new signal peptide prediction method

N-region: length 10; pos.chg 3; neg.chg 0
H-region: length 14; peak value 12.34
PSG score: 7.94

GvH: von Heijne's method for signal seq. recognition

GvH score (threshold: −2.1): −2.29
possible cleavage site: between 29 and 30

>>> Seems to have no N-terminal signal peptide
ALOM: Klein et al's method for TM region allocation

| Init position for calculation: 1 | | |
|---|---|---|
| Tentative number of TMS(s) for the threshold 0.5: 6 | | |
| INTEGRAL | Likelihood = −8.76 | Transmembrane 12-28 |
| INTEGRAL | Likelihood = −3.66 | Transmembrane 41-57 |
| INTEGRAL | Likelihood = −7.54 | Transmembrane 82-98 |
| INTEGRAL | Likelihood = −7.43 | Transmembrane 114-130 |
| INTEGRAL | Likelihood = −5.57 | Transmembrane 248-264 |
| INTEGRAL | Likelihood = −7.01 | Transmembrane 313-329 |

| | |
|---|---|
| PERIPHERAL | Likelihood = 6.21 (at 421) |

ALOM score: −8.76 (number of TMSs: 6)

MTOP: Prediction of membrane topology (Hartmann et al.)

Center position for calculation: 19
Charge difference: −4.0 C(0.0) − N(4.0)
N >= C: N-terminal side will be inside

>>> membrane topology: type 3a
MITDISC: discrimination of mitochondrial targeting seq

| | | | |
|---|---|---|---|
| R content: | 3 | Hyd Moment(75): | 5.99 |
| Hyd Moment(95): | 2.66 | G content: | 3 |
| D/E content: | 1 | S/T content: | 1 |

Score: −3.81

Gavel: prediction of cleavage sites for mitochondrial preseq

R-2 motif at 40 SRV|TS

NUCDISC: discrimination of nuclear localization signals

pat4: KKPR (4) at 478
pat4: KPRR (4) at 479
pat7: PRRTKAE (5) at 480
bipartite: none
content of basic residues: 8.3%
NLS Score: 0.46

KDEL: ER retention motif in the C-terminus: none
ER Membrane Retention Signals: none
SKL: peroxisomal targeting signal in the C-terminus: none
PTS2: 2nd peroxisomal targeting signal: none
VAC: possible vacuolar targeting motif: none
RNA-binding motif: none
Actinin-type actin-binding motif:

type 1: none
type 2: none

NMYR: N-myristoylation pattern: none
Prenylation motif: none
memYQRL: transport motif from cell surface to Golgi: none
Tyrosines in the tail: none
Dileucine motif in the tail: none
checking 63 PROSITE DNA binding motifs: none
checking 71 PROSITE ribosomal protein motifs: none
checking 33 PROSITE prokaryotic DNA binding motifs: none
NNCN: Reinhardt's method for Cytoplasmic/Nuclear discrimination

Prediction: cytoplasmic
Reliability: 94.1

COIL: Lupas's algorithm to detect coiled-coil regions

total: 0 residues

Final Results (k = 9/23):

66.7%: endoplasmic reticulum
22.2%: mitochondrial
11.1%: nuclear

>> prediction for CG54539-02 is end (k = 9)

[0562] A search of the NOV37a protein against the Geneseq database, a proprietary database that contains sequences published in patents and patent publication, yielded several homologous proteins shown in Table 37D.

TABLE 37D
Geneseq Results for NOV37a

| | | NOV37a | Identities/ | |
|---|---|---|---|---|
| | | Residues/ | Similarities for | |
| Geneseq | Protein/Organism/Length | Match | the Matched | Expect |
| Identifier | [Patent #, Date] | Residues | Region | Value |
| ABG73033 | Human transporter polypeptide - | 1 . . . 507 | 506/507 (99%) | 0.0 |
| | Homo sapiens, 507 aa. | 1 . . . 507 | 507/507 (99%) | |
| | [US2002106721-A1, 08-AUG- | | | |
| | 2002] | | | |
| ABG73033 | Human transporter polypeptide - | 1 . . . 507 | 506/507 (99%) | 0.0 |
| | Homo sapiens, 507 aa. | 1 . . . 507 | 507/507 (99%) | |
| | [US2002106721-A1, 08-AUG- | | | |
| | 2002] | | | |
| AAG67549 | Amino acid sequence of a human | 1 . . . 507 | 504/507 (99%) | 0.0 |
| | transporter protein - Homo | 1 . . . 507 | 506/507 (99%) | |
| | sapiens, 507 aa. [WO200164878- | | | |
| | A2, 07-SEP-2001] | | | |
| AAE16348 | Human zinc transporter like | 1 . . . 507 | 506/512 (98%) | 0.0 |
| | protein, POLY12 - Homo sapiens, | 1 . . . 512 | 507/512 (98%) | |
| | 512 aa. [WO200185767-A2, 15- | | | |
| | NOV-2001] | | | |
| AAY86241 | Human secreted protein | 14 . . . 501 | 482/488 (98%) | 0.0 |
| | HOABR60, SEQ ID NO: 156 - | 1 . . . 488 | 484/488 (98%) | |
| | Homo sapiens, 490 aa. | | | |
| | [WO9966041-A1, 23-DEC-1999] | | | |

[0563] In a BLAST search of public sequence databases, the NOV37a protein was found to have homology to the proteins shown in the BLASTP data in Table 37E.

TABLE 37E
Public BLASTP Results for NOV37a

| | | NOV37a | Identities/ | |
|---|---|---|---|---|
| Protein | | Residues/ | Similarities for | |
| Accession | | Match | the Matched | Expect |
| Number | Protein/Organism/Length | Residues | Portion | Value |
| Q9Y6M5 | Zinc transporter 1 (ZnT-1) - | 1 . . . 507 | 505/507 (99%) | 0.0 |
| | Homo sapiens (Human), 507 aa. | 1 . . . 507 | 506/507 (99%) | |
| Q62720 | Zinc transporter 1 (ZnT-1) - | 1 . . . 507 | 437/511 (85%) | 0.0 |
| | Rattus norvegicus (Rat), 507 aa. | 1 . . . 507 | 468/511 (91%) | |
| Q60738 | Zinc transporter 1 (ZnT-1) - Mus | 1 . . . 507 | 431/509 (84%) | 0.0 |
| | musculus (Mouse), 503 aa. | 1 . . . 503 | 464/509 (90%) | |
| AAH46675 | Similar to solute carrier family 30 | 4 . . . 500 | 297/508 (58%) | e−156 |
| | (zinc transporter), member 1 - | 2 . . . 493 | 366/508 (71%) | |
| | Xenopus laevis (African clawed | | | |
| | frog), 494 aa. | | | |
| CAD58282 | Sequence 16 from Patent | 1 . . . 485 | 183/503 (36%) | 2e−69 |
| | WO0240656 - Homo sapiens | 1 . . . 454 | 254/503 (50%) | |
| | (Human), 485 aa. | | | |

[0564] PFam analysis indicates that the NOV37a protein contains the domains shown in the Table 37F.

TABLE 37F
Domain Analysis of NOV37a

| | NOV37a | Identities/ | |
|---|---|---|---|
| | Match | Similarities | |
| Pfam Domain | Region | for the Matched Region | Expect Value |
| Cation_efflux | 11 . . . 426 | 102/435 (23%) | 4.8e−56 |
| | | 323/435 (74%) | |

### Example 38

[0565] The NOV38 clone was analyzed, and the nucleotide and encoded polypeptide sequences are shown in Table 38A.

TABLE 38A
NOV38 Sequence Analysis

| | | |
|---|---|---|
| NOV38a, CG54683-05 | SEQ ID NO: 463 | 1416 bp |
| DNA Sequence | ORF Start: ATG at 4 | ORF Stop: TGA at 1402 |

GAGATGGTCCTGGCTTTCCAGTTAGTCTCCTTCACCTACATCTGGATCATATTGAAACCAAATGTTTG
TGCTGCTTCTAACATCAAGATGACACACCAGCGGTGCTCCTCTTCAATGAAACAAACCCAAGAAACTA
GAATGAAGAAAGATGACAGTACCAAAGCGCGGCCTCAGAAATATGAGCAACTTCTCCATATAGAGGAC
AACGATTTCGCAATGAGACCTGGATTTGGAGGGTCTCCAGTGCCAGTAGGTATAGATGTCCATGTTGA
AAGCATTGACAGCATTTCAGAGACTAACATGGTAGACTTTACAATGACTTTTTATCTCAGGCATTACT
GGAAAGACGAGAGGCTCTCCTTTCCTAGCACAGCAAACAAAAGCATGACATTTGATCATAGATTGACC
AGAAAGATCTGGGTGCCTGATATCTTTTTTGTCCACTCTAAAAGATCCTTCATCCATGATACAACTAT
GGAGAATATCATGCTGCGCGTACACCCTGATGGAAACGTCCTCCTAAGTCTCAGGATAACGGTTTCGG
CCATGTGCTTTATGGATTTCAGCAGGTTTCCTCTTGACACTCAAAATTGTTCTCTTGAACTGGAAAGC
GCCTACAATGAGGATGACCTAATGCTATACTGGAAACACGGAAACAAGTCCTTAAATACTGAAGAACA
TATGTCCCTTTCTCAGTTCTTCATTGAAGACTTCAGTGCATCTAGTGGATTAGCTTTCTATAGCAGCA
CAGGTTGGTACAATAGGCTTTTCATCAACTTTGTGCTAAGGAGGCATGTTTTCTTCTTTGTGCTGCAA
ACCTATTTCCCAGCCATATTGATGGTGATGCTTTCATGGGTTTCATTTTGGATTGACCGAAGAGCTGT
TCCTGCAAGAGTTTCCCTGGGTGGAATCACCACAGTGCTGACCATGTCCACAATCATCACTGCTGTGA
GCGCCTCCATGCCCCAGGTGTCCTACCTCAAGGCTGTGGATGTGTACCTGTGGGTCAGCTCCCTCTTT
GTGTTCCTGTCAGTCATTGAGTATGCAGCTGTGAACTACCTCACCACAGTGGAAGAGCGGAAACAATT
CAAGAAGACAGGAAAGATTTCTAGGATGTACAATATTGATGCAGTTCAAGCTATGGCCTTTGATGGTT
GTTACCATGACAGCGAGATTGACATGGACCAGACTTCCCTCTCTCTAAACTCAGAAGACTTCATGAGA
AGAAAATCGATATGCAGCCCCAGCACCGATTCATCTCGGATAAAGAGAAGAAAATCCCTAGGAGGACA
TGTTGGTAGAATCATTCTGGAAAACAACCATGTCATTGACACCTATTCTAGGATTNTATTCCCCATTG
TGTATATCTTATTTAATTTGTTTTACTGGGGTGTATATGTATGAAGGGGAATTTCA

| | | | |
|---|---|---|---|
| NOV38a, CG54683-05 | SEQ ID NO: 464 | 466 aa | MW at 53919.5kD |
| Protein Sequence | | | |

MVLAFQLVSFTYIWIILKPNVCAASNIKMTHQRCSSSMKQTQETRMKKDDSTKARPQKYEQLLHIEDN
DFAMRPGFGGSPVPVGIDVHVESIDSISETNMVDFTMTFYLRHYWKDERLSFPSTANKSMTFDHRLTR
KIWVPDIFFVHSKRSFIHDTTMENINLRVHPDGNVLLSLRITVSAMCFMDFSRFPLDTQNCSLELESA
YNEDDLMLYWKHGNKSLNTEEHMSLSQFFIEDFSASSGLAFYSSTGWYNRLFINFVLRRHVFFFVLQT
YFPAILMVMLSWVSFWIDRRAVPARVSLGGITTVLTMSTIITAVSASMPQVSYLKAVDVYLWVSSLFV
FLSVIEYAAVNYLTTVEERKQFKKTGKISRMYNIDAVQAMAFDGCYHDSEIDMDQTSLSLNSEDFMRR
KSICSPSTDSSRIKRRKSLGGHVGRIILENNHVIDTYSRIXFPIVYILFNLFYWGVYV

| | | |
|---|---|---|
| NOV38b, CG54683-01 | SEQ ID NO: 465 | 1875 bp |
| DNA Sequence | ORF Start: ATG at 10 | ORF Stop: TGA at 1411 |

TTGGAAGAGATGGTCCTGGCTTTCCAGTTAGTCTCCTTCACCTACATCTGGATCATATTGAAACCAAA
TGTTTGTGCTGCTTCTAACATCAAGATGACACACCAGCGGTGCTCCTCTTCAATGAAACAAACCTGGA
TGCAAGAAACTAGAATGAAGAAAGATGACAGTACCAAAGCGCGGCCTCAGAAATATGAGCAACTTCTC
CATATAGAGGACAACGATTTCGCAATGAGACCTGGATTTGGAGGTTCTCCAGTGCCAGTAGGTATAGA
TGTCCATGTTGAAAGCATTGACAGCATTTCAGAGACTAACATGGACTTTACAATGACTTTTTATCTCA
GGCATTACTGGAAAGACGAGAGGCTCTCCTTTCCTAGCACAGCAAACAAAAGCATGACATTTGATCAT
AGACACTTGCGGTATTCGTTATTCATCAGAAGGCTGTATCTGTTATACTGCCAGAGGTCTTTCTTCTC
ACCCTCATCCATACTTCCCTCATCTCCAGACATCCATGCACCTGGTACATCTAAAAGCAGTTTGTCTG
ATAGCCTTGTATGTATATCTGAAAAAAACTTGCCAGGACACAGTAAAAACACACCTCTTGCAATGTCA
GATGTAGCCTACAATGAGGATGACCTAATGCTATACTGGAAACACGGAAACAAGTCCTTAAATACTGA
AGAACATATGTCCCTTTCTCAGTTCTTCATTGAAGACTTCAGTGCATCTAGTGGATTAGCTTTCTATA
GCAGCACAGGTACAGCATTTTACATGGGTGATTCATCAGCATTTATTGGACATCTACTGTTTTTGATC
TGGAGTTCCAGGAAAAGACCAGGTTTAGAGATGTTGGGTTTGGGAATTCTCAGAATCTGGGTAATAAC
TAGAGCCATGGATAAGAAAATGGAAATGGGAATCACCACAGTGCTGACCATGTCCACAATCATCACTG
CTGTGAGCGCCTCCATGCCCCAGGTGTCCTACCTCAAGGCTGTGGATGTGTACCTGTGGGTCAGCTCC
CTCTTTGTGTTCCTGTCAGTCATTGAGTATGCAGCTGTGAACTACCTCACCACAGTGGAAGAGCGGAA
ACAATTCAAAAAAAGTTTTTCAAAGATTTCTAGGATGTACAATATTGATGCAGTTCAAGCTATGGCCT
TTGATGGTTGTTACCATGACAGCGAGATTGACATGGACCAGACTTCCCTCTCTCTAAACTCAGAAGAC
TTCATGAGAAGAAAATCGATATGCAGCCCCAGCACCGATTCATCTCGGATAAAGAGAAGAAAATCCCT
AGGAGGACATGTTGGTAGAATCATTCTGGAAAACAACCATGTCATTGACACCTATTCTAGGATTTTAT
TCCCCATTGTGTATATCTTTTTTAATTTGTTTTACTGGGGTGTATATGTATGAAGGGGAATTTCAAAT
GTATACAACTTTAAAGCCAGATGATGTTTAAAAACAAAACTCTTGAATATGAGTTGGATAGTCCTAGA
TGGAACTGGGAAAGAGCAAGTCACCTCTCCTGCCCTAATGAAAATTTGAAAGCTGTCTGATTTACATC
TAAGAAAGAGTTTAGGTCCTAGAAAAGTTTGACTCCATAAATAAGAGTCATAGGCATGTGTATTATGG
GAAAAACAGTTTTCCATTGGGAAGGGCTTTATAACTACTTCATCTGAACCCTCCTTCTTTCTTAATGA
AATGTTCTTTATTTAACTAGGGAAGAAAGCTGGACTATAACAATAATTCAAAGATATTTTGTTTCTTA
GTGCCAGCCAAGTGCCTGGTTATCTACCAGAGCTCAACCGTCCTAGGCAAGAACATCCACATAGAGGT
GGTATCATCCACACTCACACAGCTGAGAATCCTATGAAG

| | | | |
|---|---|---|---|
| NOV38b, CG54683-01 | SEQ ID NO: 466 | 467 aa | MW at 53522.9kD |
| Protein Sequence | | | |

MVLAFQLVSFTYIWIILKPNVCAASNIKMTHQRCSSSMKQTWMQETRMKKDDSTKARPQKYEQLLHIE
DNDFAMRPGFGGSPVPVGIDVHVESIDSISETNMDFTMTFYLRHYWKDERLSFPSTANKSMTFDHRHL
RYSLFIRRLYLLYCQRSFFSPSSILPSSPDIHAPGTSKSSLSDSLVCISEKNLPGHSKNTPLAMSDVA
YNEDDLMLYWKHGNKSLNTEEHMSLSQFFIEDFSASSGLAFYSSTGTAFYMGDSSAFIGHLLFLIWSS
RKRPGLEMLGLGILRIWVITRAMDKKMEMGITTVLTMSTIITAVSASMPQVSYLKAVDVYLWVSSLFV
FLSVIEYAAVNYLTTVEERKQFKKSFSKISRMYNIDAVQAMAFDGCYHDSEIDMDQTSLSLNSEDFMR
RKSICSPSTDSSRIKRRKSLGGHVGRIILENNHVIDTYSRILFPIVYIFFNLFYWGVYV

| | | |
|---|---|---|
| NOV38c, GG54683-02 | SEQ ID NO: 467 | 1444 bp |
| DNA Sequence | ORF Start: ATG at 21 | ORF Stop: TGA at 1425 |

GTTTTTTTGTTTTGGAAGAGATGGTCCTGGCTTTCCAGTTAGTCTCCTTCACCTACATCTGGATCATA
TTGAAACCAAATGTTTGTGCTGCTTCTAACATCAAGATGACACACCAGCGGTGCTCCTCTTCAATGAA
ACAAACCTGCAAACAAGAAACTAGAATGAAGAAAGATGACAGTACCAAAGCGCGGCCTCAGAAATATG
AGCAACTTCTCCATATAGAGGACAACGATTTCGCAATGAGACCTGGATTTGGAGGGTCTCCAGTGCCA
GTAGGTATAGATGCCCATGTTGAAAGCATTGACAGCATTTCAGAGACTAACATGGACTTTACAATGAC
TTTTTATCTCAGGCATTACTGGAAAGACGAGAGGCTCTCCTTTCCTAGCACAGCAAACAAAAGCATGA
CATTTGATCATAGATTGACCAGAAAGATCTGGGTGCCTGATATCTTTTTTGTCCACTCTAAAAGATCC
TTCATCCATGATACAACTATGGAGAATATCATGCTGCGCGTACACCCTGATGGAAACGTCCTCCTAAG
TCTCAGGATAACGGTTTCGGCCATGTGCTTTATGGATTTCAGCAGGTTTCCTCTTGACGACACTCAAA
ATTGTTCTCTTGAACTGGAAAGCTGTGCCTACAATGAGGATGACCTAATGCTATACTGGAAACACGGA
AACAAGTCCTTAAATACTGAAGAACATATGTCCCTTTCTCAGTTCTTCATTGAAGACTTCAGTGCATC
TAGTGGATTAGCTTTCTATAGCAGCACAGGTTGGTACAATAGGCTTTTCATCAACTTTGTGCTAAGGA
GGCATGTTTTCTTCTTTGTGCTGCAAACCTATTTCCCAGCCATATTGATGGTGATGCTTTCATGGGTT
TCATTTTGGATTGACCGAAGAGCTGTTCCTGCAAGAGTTTCCCTGGGTATCACCACAGTGCTGACCAT
GTCCACAATCATCACTGCTGTGAGCGCCTCCATGCCCCAGGTGTCCTACCTCAAGGCTGTGGATGTGT
ACCTGTGGGTCAGCTCCCTCTTTGTGTTCCTGTCAGTCATTGAGTATGCAGCTGTGAACTACCTCACC
ACAGTGGAAGAGCGGAAACAATTCAAGAAGACAGGAAAGGTATCTAGGATGTACAATATTGATGCAGT
TCAAGCTATGGCCTTTGATGGTTGTTACCATGACAGCGAGATTGACATGGACCAGACTTCCCTCTCTC
TAAACTCAGAAGACTTCATGAGAAGAAAATCGATATGCAGCCCCAGCACCGATTCATCTCGGATAAAG
AGAAGAAAATCCCTAGGAGGACATGTTGGTAGAATCATTCTGGAAAACAACCATGTCATTGACACCTA
TTCTAGGATTTTATTCCCCATTGTGTATATTTTATTTAATTTGTTTTACTGGGGTGTATATGTATGAA
GGGGAATTTCAAATGT

| | | | |
|---|---|---|---|
| NOV38c, CG54683-02 | SEQ ID NO: 468 | 468 aa | MW at 54283.9kD |
| Protein Sequence | | | |

MVLAFQLVSFTYIWIILKPNVCAASNIKMTHQRCSSSMKQTCKQETRMKKDDSTKARPQKYEQLLHIE
DNDFAMRPGFGGSPVPVGIDAHVESIDSISETNMDFTMTFYLRHYWKDERLSFPSTANKSMTFDHRLT
RKIWVPDIFFVHSKRSFIHDTTMENIMLRVHPDGNVLLSLRITVSAMCFMDFSRFPLDDTQNCSLELE
SCAYNEDDLMLYWKHGNKSLNTEEHMSLSQFFIEDFSASSGLAFYSSTGWYNRLFINFVLRRHVFFFV
LQTYFPAILMVMLSWVSFWIDRRAVPARVSLGITTVLTMSTIITAVSASMPQVSYLKAVDVYLWVSSL
FVFLSVIEYAAVNYLTTVEERKQFKKTGKVSRMYNIDAVQAMAFDGCYHDSEIDMDQTSLSLNSEDFM
RRKSICSPSTDSSRIKRRKSLGGHVGRIILENNHVIDTYSRILFPIVYILFNLFYWGVYV

| | | |
|---|---|---|
| NOV38d, CG54683-03 | SEQ ID NO: 469 | 1438 bp |
| DNA Sequence | ORF Start: ATG at 21 | ORF Stop: TGA at 1419 |

GTTTTTTTGTTTTGGAAGAGATGGTCCTGGCTTTCCAGTTAGTCTCCTTCACCTACATCTGGATCATA
TTGAAACCAAATGTTTGTGCTGCTTCTAACATCAAGATGACACACCAGCGGTGCTCCTCTTCAATGAA
ACAAACCTGCAAACAAGAAACTAGAATGAAGAAAGATGACAGTACCAAAGCGCGGCCTCAGAAATATG
AGCAACTTCTCCATATAGAGGACAACGATTTCGCAATGAGACCTGGATTTGGAGGGTCTCCAGTGCCA
GTAGGTATAGATGTCCATGTTGAAAGCATTGACAGCATTTCAGAGACTAACATGGACTTTACAATGAC
TTTTTATCTCAGGCATTACTGGAAAGACGAGAGGCTCTCCTTTCCTAGCACAGCAAACAAAAGCATGA
CATTTGATCATAGATTGACCAGAAAGATCTGGGTGCCTGATATCTTTTTTGTCCACTCTAAAAGATCC
TTCATCCATGATACAACTATGGAGAATATCATGCTGCGCGTACACCCTGATGGAAACGTCCTCCTAAG
TCTCAGGATAACGGTTTCGGCCATGTGCTTTATGGATTTCAGCAGGTTTCCTCTGACTCAAAATTGTT
CTCTTGAACTGGAAAGCTGTGCCTACAATGAGGATGACCTAATGCTATACTGGAAACACGGAAACAAG
TCCTTAAATACTGAAGAACATATGTCCCTTTCTCAGTTCTTCATTGAAGACTTCAGTGCATCTAGTGG
ATTAGCTTTCTATAGCAGCACAGGTTGGTACAATAGGCTTTTCATCAACTTTGTGCTAAGGAGGCATG
TTTTCTTCTTTGTGCTGCAAACCTATTTCCCAGCCATATTGATGGTGATGCTTTCATGGGTTTCATTT
TGGATTGACCGAAGAGCTGTTCCTGCAAGAGTTTCCCTGGGTATCACCACAGTGCTGACCATGTCCAC
AATCATCACTGCTGTGAGCGCCTCCATGCCCCAGGTGTCCTACCTCAAGGCTGTGGATGTGTACCTGT
GGGTCAGCTCCCTCTTTGTGTTCCTGTCAGTCATTGAGTATGCAGCTGTGAACTACCTCACCACAGTG
GAAGAGCGGAAACAATTCAAGAAGACAGGAAAGGTATCTAGGATGTACAATATTGATGCAGTTCAAGC
TATGGCCTTTGATGGTTGTTACCATGACAGCGAGATTGACATGGACCAGACTTCCCTCTCTCTAAACT
CAGAAGACTTCATGAGAAGAAAATCGATATGCAGCCCCAGCACCGATTCATCTCGGATAAAGAGAAGA
AAATCCCTAGGAGGACATGTTGGTAGAATCATTCTGGAAAACAACCATGTCATTGACACCTATTCTAG
GATTTTATTCCCCATTGTGTATATTTTATTTAATTTGTTTTACTGGGGTGTATATGTATGAAGGGGAA
TTTCAAATGT

| | | | |
|---|---|---|---|
| NOV38d, GG54683-03 | SEQ ID NO: 470 | 466 aa | MW at 54081.8kD |
| Protein Sequence | | | |

MVLAFQLVSFTYIWIILKPNVCAASNIKMTHQRCSSSMKQTCKQETRMKKDDSTKARPQKYEQLLHIE
DNDFAMRPGFGGSPVPVGIDVHVESIDSISETNMDFTMTFYLRHYWKDERLSFPSTANKSMTFDHRLT
RKIWVPDIFFVHSKRSFIHDTThENIMLRVHPDGNVLLSLRITVSAMCFMDFSRFPLTQNCSLELESC
AYNEDDLMLYWKHGNKSLNTEEHMSLSQFFIEDFSASSGLAFYSSTGWYNRLFINFVLRRHVFFFVLQ
TYFPAILMVMLSWVSFWIDRRAVPARVSLGITTVLTMSTIITAVSASMPQVSYLKAVDVYLWVSSLFV
FLSVIEYAAVNYLTTVEERKQFKKTGKVSRMYNIDAVQAMAFDGCYHDSEIDMDQTSLSLNSEDFMRR
KSICSPSTDSSRIKRRKSLGGHVGRIILENNHVIDTYSRILFPIVYILFNLFYWGVYV

| | | |
|---|---|---|
| NOV38e, CG54683-04 | SEQ ID NO: 471 | 1799 bp |
| DNA Sequence | ORF Start: ATG at 71 | ORF Stop: TGA at 1445 |

AAGAAGAAACTGTGATCACAGTATTGGTTGCGTTCACCTGCATCCTTTCTGTTTTTTTGTTTTGGAAG
AGATGGTCCTGGCTTTCCAGTTAGTCTCCTTCACCTACATCTGGATCATATTGGTTTGTGCTGCTTCT
AACATCAAGATGACACACCAGCGGTGCTCCTCTTCAATGAAACAAACCGTAAGATGCTCAATGAAGAA
AGATGACAGTACCAAAGCGCGGCCTCAGAAATATGAGCAACTTCTCCATATAGAGGACAACGATITCG
CAATGAGACCTGGATTTGGAGGTTCTCCAGTGCCAGTAGGTATAGATGTCCATGTTGAAAGCATTGAC
AGCATTTCAGAGACTAACATGGACTTTACAATGACTTTTTATCTCAGGCATTACTGGAAAGACGAGAG
GCTCTCCTTTCCTAGCACAGCAAACAAAAGCATGACATTTGATCATAGAAAGAGTATCCCCCGCCCTG
AACACTTGCGGTATTCGTTATTCATCAGAAGGCTGTATCTGTTATACTGCCAGAGGTCTTTCTTCTCA
CCCTCATCCATACTTCCCTCATCTCCAGACATCCATGCACCTGGTACATCTAAAAGCAGTTTGTCTGA
TAGCCTTGTATGTATATCTGAAAAAAACTTGCCAGGACACAGTAAAAACACACCTCTTGCAATGGCCT
ACAATGAGGATGACCTAATGCTATACTGGAAACACGGAAACAAGTCCTTAAATACTGAAGAACATATG
TCCCTTTCTCAGTTCTTCATTGAAGACTTCAGTGCATCTAGTGGATTAGCTTTCTATAGCAGCACAGG
TACAGCATTTTACATGGGTGATTCATCAGCATTTATTGGACATCTACTGTTTTTAAATAGACATTTAC
ATTTCTTCATCATAAATTTTGAAATTACTCAAATATTGATGATTGGAATCACCACAGTGCTGACCATG
TCCACAATCATCACTGCTGTGAGCGCCTCCATGCCCCAGGTGTCCTACCTCAAGGCTGTGGATGTGTA
CCTGTGGGTCAGCTCCCTCTTTGTGTTCCTGTCAGTCATTGAGTATGCAGCTGTGAACTACCTCACCA
CAGTGGAAGAGCGGAAACAATTCAAGAAGACAGGAAAGGTACAGATTTCTAGGATGTACAATATTGAT
GCAGTTCAAGCTATGGCCTTTGATGGTTGTTACCATGACAGCGAGATTGACATGGACCAGACTTCCCT
CTCTCTAAACTCAGAAGACTTCATGAGAAGAAAATCGATATGCAGCCCCAGCACCGATTCATCTCGGA
TAAAGAGAAGAAAATCCCTAGGAGGACATGTTGGTAGAATCATTCTGGAAAACAACCATGTCATTGAC
ACCTATTCTAGGATTTTATTCCCCATTGTGTATATCCCATTGTGTATATCTTTATTTAATTTGTTTTA
CTGGGGTGTATATGTATGAAGGGGAATTTCAAATGTATACAACTTTAAAGCCAGATGATGTTTAAAAA
CAAAACTCTTGAATATGAGTTGGAATTGAAGACTTCAGTGCATCTAGTGGATTAGCTTTCTATAGCAG
CACAGGTACAGCATTTTACATGGGTGATTCATCAGCATTTATTGGACATCTACTGTTTTACTTTTGGT
CTTTGATGATGGTGATGTACAGATGGGTTGGAATCACCACAGTGCTGACCATGTCCACAATCATCACT
GCTGTGAGCGCCTCCATGCCCCAGGTGTCCTACCTCAAGGCTGTGGATGTGTACCTGTGGGTCAGCTC
CCTCTTTGTGTTCCTGTCAGTCATTGAGTAT

| | | | |
|---|---|---|---|
| NOV38e, GG54683-04 | SEQ ID NO: 472 | 458 aa | MW at 52330.5kD |
| Protein Sequence | | | |

MVLAFQLVSFTYIWIILVCAASNIKMTHQRCSSSMKQTVRCSMKKDDSTKARPQKYEQLLHIEDNDFA
MRPGFGGSPVPVGIDVHVESIDSISETNMDFTMTFYLRHYWKDERLSFPSTANKSMTFDHRKSIPRPE
HLRYSLFIRRLYLLYCQRSFFSPSSILPSSPDIHAPGTSKSSLSDSLVCISEKNLPGHSKNTPLAMAY
NEDDLMLYWKHGNKSLNTEEHMSLSQFFIEDFSASSGLAFYSSTGTAFYMGDSSAFIGHLLFLNRHLH
FFIINFEITQILMIGITTVLTMSTIITAVSASMPQVSYLKAVDVYLWVSSLFVFLSVIEYAAVNYLTT
VEERKQFKKTGKVQISRMYNIDAVQAMAFDGCYHDSEIDMDQTSLSLNSEDFMRRKSICSPSTDSSRI
KRRKSLGGHVGRIILENNHVIDTYSRILFPIVYIPLCISLFNLFYWGVYV

[0566] A ClustalW comparison of the above protein sequences yields the following sequence alignment shown in Table 38B.

TABLE 38B
Comparison of the NOV38 protein sequences.

NOV38a MVLAFQLVSFTYIWIILKPNVCAASNIKMTHQRCSSSMKQT--QETRMKKDDSTKARPQK
NOV38b MVLAFQLVSFTYIWIILKPNVCAASNIKMTHQRCSSSMKQTWMQETRMKKDDSTKARPQK
NOV38c MVLAFQLVSFTYIWIILKPNVCAASNIKMTHQRCSSSMKQTCKQETRMKKDDSTKARPQK
NOV38d MVLAFQLVSFTYIWIILKPNVCAASNIKMTHQRCSSSMKQTCKQETRMKKDDSTKARPQK
NOV38e MVLAFQLVSFTYIWIIL---VCAASNIKMTHQRCSSSMKQTVRCS--MKKDDSTKARPQK
NOV38a YEQLLHIEDNDFANRPGFGGSPVPVGIDVHVESIDSISETNNVDFTMTFYLRHYWKDERL
NOV38b YEQLLHIEDNDFANRPGFGGSPVPVGIDVHVESIDSISETN-MDFTMTFYLRHYWKDERL
NOV38c YEQLLHIEDNDFANRPGFGGSPVPVGIDAHVESIDSISETN-MDFTMTFYLRHYWKDERL
NOV38d YEQLLHIEDNDFANRPGFGGSPVPVGIDVHVESIDSISETN-MDFTMTFYLRHYWKDERL
NOV38e YEQLLHIEDNDFAMRPGFGGSPVPVGIDVHVESIDSISETN-MDFTMTFYLRHYWKDERL
NOV38a SFPSTANKSMTFDHR--------LTRKIWVPDIFFVHSKRSFIHDTTMENIMLRVHPDGN
NOV38b SFPSTANKSMTFDHR-------HLRYSLFIRRLYLLYCQRSFFSPSSILPSSPDIHAPG-
NOV38c SFPSTANKSMTFDHR--------LTRKIWVPDIFFVHSKRSFIHDTTMENIMLRVHPDGN
NOV38d SFPSTANKSMTFDHR--------LTRKIWVPDIFFVHSKRSFIHDTTMENIMLRVHPDGN
NOV38e SFPSTANKSMTFDHRKSIPRPEHLRYSLFIRRLYLLYCQRSFFSPSSILPSSPDIHAPG-
NOV38a VLLSLRITVSAMCFMDFSRFPLD-TQNCSLELES-AYNEDDLMLYWKHGNKSLNTEEHMS
NOV38b --TSKSSLSDSLVCISEKNLPG-HSKNTPLAMSDVAYNEDDLMLYWKHGNKSLNTEEHMS
NOV38c VLLSLRITVSANCFMDFSRFPLDDTQNCSLELESCAYNEDDLMLYWKHGNKSLNTEEHMS
NOV38d VLLSLRITVSANCFMDFSRFPL--TQNCSLELESCAYNEDDLMLYWKHGNKSLNTEEHMS
NOV38e --TSKSSLSDSLVCISEKNLPG-HSKNTPLAM---AYNEDDLMLYWKHGNKSLNTEEHNS
NOV38a LSQFFIEDFSASSGLAFYSSTGWYNRLFINFVLRRHVFFFVLQT-YFPAILMVMLSWVSF
NOV38b LSQFFIEDFSASSGLAFYSSTGTAFYMGDSSAFIGHLLFLIWSSRKRPGLEMLGLGILRI
NOV38c LSQFFIEDFSASSGLAFYSSTGWYNRLFINFVLRRHVFFFVLQT-YFPAILMVMLSWVSF
NOV38d LSQFFIEDFSASSGLAFYSSTGWYNRLFINFVLRRHVFFFVLQT-YFPAILMVMLSWVSF
NOV38e LSQFFIEDFSASSGLAFYSSTGTAFYMGDSSAFIGHLLFLN-----R---------HLHF
NOV38a WIDRRAVPARVSLGGITTVLTNSTIITAVSASMPQVSYLKAVDVYLWVSSLFVFLSVIEY
NOV38b WVITRAMDKKMEMG-ITTVLTMSTIITAVSASMPQVSYLKAVDVYLWVSSLFVFLSVIEY
NOV38c WIDRRAVPARVSLG-ITTVLTMSTIITAVSASMPQVSYLKAVDVYLWVSSLFVFLSVIEY
NOV38d WIDRRAVPARVSLG-ITTVLTMSTIITAVSASMPQVSYLKAVDVYLWVSSLFVFLSVIEY
NOV38e FIINFEITQILMIG-ITTVLTMSTIITAVSASMPQVSYLKAVDVYLWVSSLFVFLSVIEY
NOV38a AAVNYLTTVEERKQFKKT--GKISRMYNIDAVQAMAFDGCYHDSEIDMDQTSLSLNSEDF
NOV38b AAVNYLTTVEERKQFKKS-FSKISRMYNIDAVQAMAFDGCYHDSEIDMDQTSLSLNSEDF
NOV38c AAVNYLTTVEERKQFKKT--GKVSRNYNIDAVQAMAFDGCYHDSEIDMDQTSLSLNSEDF
NOV38d AAVNYLTTVEERKQFKKT--GKVSRMYNIDAVQAMAFDGCYHDSEIDMDQTSLSLNSEDF
NOV38e AAVNYLTTVEERKQFKKTGKVQISRNYNIDAVQAMAFDGCYHDSEIDMDQTSLSLNSEDF
NOV38a MRRKSICSPSTDSSRIKRRKSLGGHVGRIILENNHVIDTYSRIXFPIVYI-----LFNLF
NOV38b MRRKSICSPSTDSSRIKRRKSLGGHVGRIILENNHVIDTYSRILFPIVYI-----FFNLF
NOV38c MRRKSICSPSTDSSRIKRRKSLGGHVGRIILENNHVIDTYSRILFPIVYI-----LFNLF
NOV38d MRRKSICSPSTDSSRIKRRKSLGGHVGRIILENNHVIDTYSRILFPIVYI-----LFNLF
NOV38e MRRKSICSPSTDSSRIKRRKSLGGHVGRIILENNHVIDTYSRILFPIVYIPLCISLFNLF
NOV38a YWGVYV
NOV38b YWGVYV
NOV38c YWGVYV
NOV38d YWGVYV
NOV38e YWGVYV
NOV38a (SEQ ID NO: 464)
NOV38b (SEQ ID NO: 466)
NOV38c (SEQ ID NO: 468)
NOV38d (SEQ ID NO: 470)
NOV38e (SEQ ID NO: 472)

[0567] Further analysis of the NOV38a protein yielded the following properties shown in Table 38C.

TABLE 38C
Protein Sequence Properties NOV38a

| | |
|---|---|
| SignalP analysis: | Cleavage site between residues 25 and 26 |

PSORT II analysis:
PSG: a new signal peptide prediction method

N-region: length 0; pos.chg 0; neg.chg 0
H-region: length 17; peak value 9.53
PSG score: 5.12

GvH: von Heijne's method for signal seq. recognition

GvH score (threshold: −2.1) −7.09
possible cleavage site: between 24 and 25

>>> Seems to have no N-terminal signal peptide
ALOM: Klein et al's method for TM region allocation

| Init position for calculation: 1 | | |
|---|---|---|
| Tentative number of TMS(s) for the threshold 0.5: 6 | | |
| INTEGRAL | Likelihood = −4.51 | Transmembrane 1-17 |
| INTEGRAL | Likelihood = −0.43 | Transmembrane 171-187 |
| INTEGRAL | Likelihood = −3.98 | Transmembrane 265-281 |
| INTEGRAL | Likelihood = −0.64 | Transmembrane 300-316 |
| INTEGRAL | Likelihood = −3.98 | Transmembrane 329-345 |
| INTEGRAL | Likelihood = −0.85 | Transmembrane 448-464 |

| | |
|---|---|
| PERIPHERAL | Likelihood = 7.48 (at 229) |

ALOM score: −4.51 (number of TMSs: 6)

MTOP: Prediction of membrane topology (Hartmann et al.)

Center position for calculation: 8
Charge difference: 1.5 C(2.5) − N(1.0)
C > N: C-terminal side will be inside

>>>Caution: Inconsistent mtop result with signal peptide
>>> membrane topology: type 3b
MITDISC: discrimination of mitochondrial targeting seq

| | | | |
|---|---|---|---|
| R content: | 1 | Hyd Moment(75): | 2.39 |
| Hyd Moment(95): | 3.90 | G content: | 0 |
| D/E content: | 1 | S/T content: | 8 |

Score: −2.44

Gavel: prediction of cleavage sites for mitochondrial preseq

R-2 motif at 43 QRC|SS

NUCDISC: discrimination of nuclear localization signals

pat4: KRRK (5) at 422
pat7: none
bipartite: RRKSICSPSTDSSRIKR at 407
bipartite: RKSICSPSTDSSRIKRR at 408
content of basic residues: 10.3%
NLS Score: 0.99

KDEL: ER retention motif in the C-terminus: none
ER Membrane Retention Signals: none
SKL: peroxisomal targeting signal in the C-terminus: none
PTS2: 2nd peroxisomal targeting signal: none
VAC: possible vacuolar targeting motif: none
RNA-binding motif: none
Actinin-type actin-binding motif:

type 1: none
type 2: none

NMYR: N-myristoylation pattern: none
Prenylation motif: none
memYQRL: transport motif from cell surface to Golgi: none
Tyrosines in the tail: none
Dileucine motif in the tail: none
checking 63 PROSITE DNA binding motifs: none
checking 71 PROSITE ribosomal protein motifs: none
checking 33 PROSITE prokaryotic DNA binding motifs: none
NNCN: Reinhardt's method for Cytoplasmic/Nuclear discrimination

Prediction: cytoplasmic
Reliability: 94.1

COIL: Lupas's algorithm to detect coiled-coil regions

total: 0 residues

Final Results (k = 9/23):

55.6%: endoplasmic reticulum
11.1%: vacuolar
11.1%: Golgi
11.1%: vesicles of secretory system
11.1%: mitochondrial

>> prediction for CG54683-05 is end (k = 9)

[0568] A search of the NOV38a protein against the Geneseq database, a proprietary database that contains sequences published in patents and patent publication, yielded several homologous proteins shown in Table 38D.

TABLE 38D
Geneseq Results for NOV38a

| | | NOV38a | Identities/ | |
|---|---|---|---|---|
| | | Residues/ | Similarities for | |
| Geneseq | Protein/Organism/Length | Match | the Matched | Expect |
| Identifier | [Patent #, Date] | Residues | Region | Value |
| AAE21956 | Human transporter protein - Homo | 1 . . . 466 | 463/469 (98%) | 0.0 |
| | sapiens, 467 aa. [US2002028773- | 1 . . . 467 | 463/469 (98%) | |
| | A1, 07-MAR-2002] | | | |
| AAU04467 | Human gamma-amino butyric | 1 . . . 466 | 463/469 (98%) | 0.0 |
| | acid (GABA) receptor protein #1 - | 1 . . . 467 | 463/469 (98%) | |
| | Homo sapiens, 467 aa. | | | |
| | [WO200153489-A1, 26-JUL- | | | |
| | 2001] | | | |
| ABU12089 | Novel human gamma | 1 . . . 466 | 461/470 (98%) | 0.0 |
| | aminobutyric acid receptor-like | 1 . . . 468 | 462/470 (98%) | |
| | protein #2 - Homo sapiens, 468 | | | |
| | aa. [US2002123612-A1, 05-SEP- | | | |
| | 2002] | | | |
| AAG68256 | Human POLY3 protein sequence | 1 . . . 466 | 461/470 (98%) | 0.0 |
| | SEQ ID NO: 6 - Homo sapiens, | 1 . . . 468 | 462/470 (98%) | |
| | 468 aa. [WO200179294-A2, 25- | | | |
| | OCT-2001] | | | |
| ABU12090 | Novel human gamma | 1 . . . 466 | 461/469 (98%) | 0.0 |
| | aminobutyric acid receptor-like | 1 . . . 466 | 462/469 (98%) | |
| | protein #2 - Homo sapiens, 466 | | | |
| | aa. [US2002123612-A1, 05-SEP- | | | |
| | 2002] | | | |

[0569] In a BLAST search of public sequence databases, the NOV38a protein was found to have homology to the proteins shown in the BLASTP data in Table 38E.

TABLE 38E
Public BLASTP Results for NOV38a

| | | NOV38a | Identities/ | |
|---|---|---|---|---|
| Protein | | Residues/ | Similarities for | |
| Accession | | Match | the Matched | Expect |
| Number | Protein/Organism/Length | Residues | Portion | Value |
| P50573 | Gamma-aminobutyric-acid | 1 . . . 466 | 392/470 (83%) | 0.0 |
| | receptor rho-3 subunit precursor | 1 . . . 464 | 417/470 (88%) | |
| | (GABA(A) receptor) - Rattus | | | |
| | norvegicus (Rat), 464 aa. | | | |
| Q9YGQ2 | Gamma-aminobutyric-acid | 1 . . . 465 | 300/478 (62%) | e−161 |
| | receptor rho-3 subunit - Morone | 4 . . . 469 | 369/478 (76%) | |
| | americana (White perch), 470 aa. | | | |
| P50572 | Gamma-aminobutyric-acid | 39 . . . 465 | 278/428 (64%) | e−155 |
| | receptor rho-1 subunit precursor | 50 . . . 473 | 326/428 (75%) | |
| | (GABA(A) receptor) - Rattus | | | |
| | norvegicus (Rat), 474 aa. | | | |
| P56475 | Gamma-aminobutyric-acid | 39 . . . 465 | 278/428 (64%) | e−154 |
| | receptor rho-1 subunit precursor | 50 . . . 473 | 326/428 (75%) | |
| | (GABA(A) receptor) - Mus | | | |
| | musculus (Mouse), 474 aa. | | | |
| P24046 | Gamma-aminobutyric-acid | 39 . . . 465 | 276/428 (64%) | e−154 |
| | receptor rho-1 subunit precursor | 49 . . . 472 | 325/428 (75%) | |
| | (GABA(A) receptor) - Homo | | | |
| | sapiens (Human), 473 aa. | | | |

[0570] PFam analysis indicates that the NOV38a protein contains the domains shown in the Table 38F.

TABLE 38F
Domain Analysis of NOV38a

| | NOV38a | Identities/ | |
|---|---|---|---|
| | Match | Similarities | Expect |
| Pfam Domain | Region | for the Matched Region | Value |
| Neur_chan_LBD | 58 . . . 265 | 74/253 (29%) | 1.6e−65 |
| | | 176/253 (70%) | |
| Neur_chan_memb | 272 . . . 462 | 45/292 (15%) | 9e−37 |
| | | 145/292 (50%) | |

### Example 39

[0571] The NOV39 clone was analyzed, and the nucleotide and encoded polypeptide sequences are shown in Table 39A.

TABLE 39A
NOV39 Sequence Analysis

| | | |
|---|---|---|
| NOV39a, CG54692-06 | SEQ ID NO: 473 | 1125 bp |
| DNA Sequence | ORF Start: ATG at 1 | ORF Stop: TGA at 1111 |

ATGGAGGCCGCTAGCCTTTCAGTGGCCACCGCCGGCGTTGCCCTTGCCCTGGGACCCGAGACCAGCAG
CGGGACCCCAAGCCCGAGAGGGATACTCGGTTCGACCCCGAGCGGCGCCGTCCTGCCGGGCCGAGGGC
CGCCCTTCTCTGTCTTCACGGTCCTGGTGGTGACGCTGCTAGTGCTGCTGATCGCTGCCACTTTCCTG
TGGAACCTGCTGGTTCCGGTCACCATCCCGCGGGTCCGTGCCTTCCACCGCGTGCCGCATAACTTGGT
GGCCTCGACGGCCGTCTCGGACGAACTAGTGGCAGCGCTGGCGATGCCACCGAGCCTGGCGAGTGAGC
TGTCGACCGGGCGACGTCGGCTGCTGGGCCGGAGCCTGTGCCACGTGTGGATCTCCTTCGACGCCCTG
TGCTGCCCCGCCGGCCTCGGGAACGTGGCGGCCATCGCCCTGGGCCGCGACGGGGCCATCACACGGCA
CCTGCAGCACACGCTGCGCACCCGCAGCCGCGCCTCGTTGCTCATGATCGCGCTCGCCCGGGTGCCGT
CGGCGCTCATCGCCCTCGCGCCGCTGCTCTTTGGCCGGGGCGAGGTGTGCGACGCTCGGCTCCAGCGC
TGCCAGGTGAGCCGGGAACCCTCCTATGCCGCCTTCTCCACCCGCGGCGCCTTCCACCTGCCGCTTGG
CGTGGTGCCGTTTGTCTACCGGAAGATCTACGAGGCGGCCAAGTTTCGTTTCGGCCGCCGCCGGAGAG
CTGTGCTGCCGTTGCCGGCCACCATGCAGGTGAAGGAAGCACCTGATGAGGCTGAAGTGGTGTTCACG
GCACATTGCAAAGCAACGGTGTCCTTCCAGGTGAGCGGGGACTCCTGGCGGGAGCAGAAGGAGAGGCG
AGCAGCCATGATGGTGGGAATTCTGATTGGCGTGTTTGTGCTGTGCTGGATCCCCTTCTTCCTGACGG
AACTCATCAGCCCACTCTGTGCCTGCAGCCTGCCCCCCATCTGGAAAAGCATATTTCTGTGGCTTGGC
TACTCCAATTCTTTCTTCAACCCCCTGATTTACACAGCTTTTAACAAGAACTACAACAATGCCTTCAA
GAGCCTCTTTACTAAGCAGAGATGAACACAGGGGTTA

| | | | |
|---|---|---|---|
| NOV39a, CG54692-06 | SEQ ID NO: 474 | 370 aa | MW at 40243.7kD |
| Protein Sequence | | | |

MEAASLSVATAGVALALGPETSSGTPSPRGILGSTPSGAVLPGRGPPFSVFTVLVVTLLVLLIAATFL
WNLLVPVTIPRVRAFHRVPHNLVASTAVSDELVAALAMPPSLASELSTGRRRLLGRSLCHVWISFDAL
CCPAGLGNVAAIALGRDGAITRHLQHTLRTRSRASLLMIALARVPSALIALAPLLFGRGEVCDARLQR
CQVSREPSYAAFSTRGAFHLPLGVVPFVYRKIYEAAKFRFGRRRRAVLPLPATMQVKEAPDEAEVVFT
AHCKATVSFQVSGDSWREQKERRAANMVGILIGVFVLCWIPFFLTELISPLCACSLPPIWKSIFLWLG
YSNSFFNPLIYTAFNKNYNNAFKSLFTKQR

| | | |
|---|---|---|
| NOV39b, CG54692-01 | SEQ ID NO: 475 | 1150 bp |
| DNA Sequence | ORF Start: ATG at 24 | ORF Stop: TGA at 1134 |

CTGGAGCTGCGATCCCAAGCGCCATGGAGGCCGCTAGCCTTTCAGTGGCCACCGCCGGCGTTGCCCTT
GCCCTGGGACCCGAGACCAGCAGCGGGACCCCAAGCCCGAGAGGGATACTCGGTTCGACCCCGAGCGG
CGCCGTCCTGCCGGGCCGAGGGCCGCCCTTCTCTGTCTTCACGGTCCTGGTGGTGACGCTGCTAGTGC
TGCTGATCGCTGCCACTTTCCTGTGGAACCTGCTGGTTCCGGTCACCATCCCGCGGGTCCGTGCCTTC
CACCGCGTGCCGCATAACTTGGTGGCCTCGACGGCCGTCTCGGACGAACTAGTGGCAGCGCTGGCGAT
GCCACCGAGCCTGGCGAGTGAGCTGTCGACCGGGCGACGTCGGCTGCTGGGCCGGAGCCTGTGCCACG
TGTGGATCTCCTTCGACGCCCTGTGCTGCCCCGCCGGCCTCGGGAACGTGGCGGCCATCGCCCTGGGC
CGCGACGGGGCCATCACACGGCACCTGCAGCACACGCTGCGCACCCGCAGCCGCGCCTCGTTGCTCAT
GATCGCGCTCGCCCGGGTGCCGTCGGCGCTCATCGCCCTCGCGCCGCTGCTCTTTGGCCGGGGCGAGG
TGTGCGACGCTCGGCTCCAGCGCTGCCAGGTGAGCCGGGAACCCTCCTATGCCGCCTTCTCCACCCGC
GGCGCCTTCCACCTGCCGCTTGGCGTGGTGCCGTTTGTCTACCGGAAGATCTACGAGGCGGCCAAGTT
TCGTTTCGGCCGCCGCCGGAGAGCTGTGCTGCCGTTGCCGGCCACCTCCAAGGTAAAGGAAGCACCTG
ATGAGGCTGAAGTGGTGTTCACGGCACATTGCAAAGCAACGGTGTCCTTCCAGGTGAGCGGGGACTCC
TGGCGGGAGCAGAAGGAGAGGCGAGCAGCCATGATGGTGGGAATTCTGATTGGCGTGTTTGTGCTGTG
CTGGATCCCCTTCTTCCTGACGGAACTCATCAGCCCACTCTGTGCCTGCAGCCTGCCCCCCATCTGGA
AAAGCATATTTCTGTGGCTTGGCTACTCCAATTCTTTCTTCAACCCCCTGATTTACACAGCTTTTAAC
AAGAACTACAACAATGCCTTCAAGAGCCTCTTTACTAAGCAGAGATGAACACAGGGGTTAGA

| | | | |
|---|---|---|---|
| NOV39b, CG54692-01 | SEQ ID NO: 476 | 370 aa | MW at 40199.7kD |
| Protein Sequence | | | |

MEAASLSVATAGVALALGPETSSGTPSPRGILGSTPSGAVLPGRGPPFSVFTVLVVTLLVLLIAATFL
WNLLVPVTIPRVRAFHRVPHNLVASTAVSDELVAALAMPPSLASELSTGRRRLLGRSLCHVWISFDAL
CCPAGLGNVAAIALGRDGAITRHLQHTLRTRSRASLLMIALARVPSALIALAPLLFGRGEVCDARLQR
CQVSREPSYAAFSTRGAFHLPLGVVPFVYRKIYEAAKFRFGRRRRAVLPLPATMQVKEAPDEAEVVFT
AHCKATVSFQVSGDSWREQKERRAANMVGILIGVFVLCWIPFFLTELISPLCACSLPPIWKSIFLWLG
YSNSFFNPLIYTAFNKNYNNAFKSLFTKQR

| | | |
|---|---|---|
| NOV39c, CG54692-02 | SEQ ID NO: 477 | 1150 bp |
| DNA Sequence | ORF Start: ATG at 24 | ORF Stop: TGA at 1134 |

CTGGAGCTGCGATCCCAAGCGCCATGGAGGCCGCTAGCCTTTCAGTGGCCACCGCCGGCGTTGCCCTT
GCCCTGGGACCCGAGACCAGCAGCGGGACCCCAAGCCCGAGAGGGATACTCGGTTCGACCCCGAGCGG
CGCCGTCCTGCCGGGCCGAGGGCCGCCCTTCTCTGTCTTCACGGTCCTGGTGGTGACGCTGCTAGTGC
TGCTGATCGCTGCCACTTTCCTGTGGAACCTGCTGGTTCCGGTCACCATCCCGCGGGTCCGTGCCTTC
CACCGCGTGCCGCATAACTTGGTGGCCTCGACGGCCGTCTCGGACGAACTAGTGGCAGCGCTGGCGAT
GCCACCGAGCCTGGCGAGTGAGCTGTCGACCGGGCGACGTCGGCTGCTGGGCCGGAGCCTGTGCCACG
TGTGGATCTCCTTCGACGCCCTGTGCTGCCCCGCCGGCCTCGGGAACGTGGCGGCCATCGCCCTGGGC
CGCGACGGGGCCATCACACGGCACCTGCAGCACACGCTGCGCACCCGCAGCCGCGCCTCGTTGCTCAT
GATCGCGCTCGCCCGGGTGCCGTCGGCGCTCATCGCCCTCGCGCCGCTGCTCTTTGGCCGGGGCGAGG
TGTGCGACGCTCGGCTCCAGCGCTGCCAGGTGAGCCGGGAACCCTCCTATGCCGCCTTCTCCACCCGC
GGCGCCTTCCACCTGCCGCTTGGCGTGGTGCCGTTTGTCTACCGGAAGATCTACGAGGCGGCCAAGTT
TCGTTTCGGCCGCCGCCGGAGAGCTGTGCTGCCGTTGCCGGCCACCTCCAAGGTAAAGGAAGCACCTG
ATGAGGCTGAAGTGGTGTTCACGGCACATTGCAAAGCAACGGTGTCCTTCCAGGTGAGCGGGGACTCC
TGGCGGGAGCAGAAGGAGAGGCGAGCAGCCATGATGGTGGGAATTCTGATTGGCGTGTTTGTGCTGTG
CTGGATCCCCTTCTTCCTGACGGAACTCATCAGCCCACTCTGTGCCTGCAGCCTGCCCCCCATCTGGA
AAAGCATATTTCTGTGGCTTGGCTACTCCAATTCTTTCTTCAACCCCCTGATTTACACAGCTTTTAAC
AAGAACTACAACAATGCCTTCAAGAGCCTCTTTACTAAGCAGAGATGAACACAGGGGTTAGA

| | | | |
|---|---|---|---|
| NOV39c, CG54692-02 | SEQ ID NO: 478 | 370 aa | MW at 40215.7kD |
| Protein Sequence | | | |

MEAASLSVATAGVALALGPETSSGTPSPRGILGSTPSGAVLPGRGPPFSVFTVLVVTLLVLLIAATFL
WNLLVPVTIPRVRAFHRVPHNLVASTAVSDELVAALAMPPSLASELSTGRRRLLGRSLCHVWISFDAL
CCPAGLGNVAAIALGRDGAITRHLQHTLRTRSRASLLMIALARVPSALIALAPLLFGRGEVCDARLQR
CQVSREPSYAAFSTRGAFHLPLGVVPFVYRKIYEAAKFRFGRRRRAVLPLPATMQVKEAPDEAEVVFT
AHCKATVSFQVSGDSWREQKERRAANMVGILIGVFVLCWIPFFLTELISPLCACSLPPIWKSIFLWLG
YSNSFFNPLIYTAFNKNYNNAFKSLFTKQR

| | | |
|---|---|---|
| NOV39d, GG54692-03 | SEQ ID NO: 479 | 1127 bp |
| DNA Sequence | ORF Start: ATG at 1 | ORF Stop: TGA at 1117 |

ATGGAGGCCGCTAGCCTTTCAGTGGCCACCGCCGGCGTTGCCCTTGCCCTGGGACCCGAGACCAGCAG
CGGGACCCCAAGCCCGAGAGGGATACTCGGTTCGACCCCGAGCGGCGCCGTCCTGCCGGGCCGAGGGC
CGCCCTTCTCTGTCTTCACGGTCCTGGTGGTGACGCTGCTAGTGCTGCTGATCGCCGCCACTTTCCTG
TGGAACCTGCTGGTTCCGGTCACCATCCCGCGGGTCCGTGCCTTCCACCGCGTGCCGCATAACTTGGT
GGCCTCGACGGCCGTCTCGGACGAACTAGTGGCAGCGCTGGCGATGCCACCGAGCCTGGCGAGTGAGC
TGTCGACCGGGCGACGTCGGCTGCTGGGCCGGAGCCTGTGCCACGTGTGGATCTCCTTCCACGGCCCA
CGGCTGTGCTGCCCCGCCGGCCTCGGGAACGTGGCGGCCATCGCCCTGGGCCGCGACGGGGCCATCAC
ACGGCACCTGCAGCACACGCTGCGCACCCGCAGCCGCGCCTCGTTGCTCATGATCGCGCTCACCCGGG
TGCCGTCGGCGCTCATCGCCCTCGCGCCGCTGCTCTTTGGCCGGGGCGAGGTGTGCGACGCTCGGCTC
CAGCGCTGCCAGGTGAGCCGGGAACCCTCCTATGCCGCCTTCTCCACCCGCGGCGCCTTCCACCTGCC
GCTTGGCGTGGTGCCGTTTGTCTACCGGAAGATCTACGAGGCGGCCAAGTTTCGTTTCGGCCGCCGCC
GGAGAGCTGTGCTGCCGTTGCCGGCCACCATGCAGGTGAAGGAAGCACCTGATGAGGCTGAAGTGGTG
TTCACGGCACATTGCAAAGCAACGGTGTCCTTCCAGGTGAGCGGGGACTCCTGGCGGGAGCAGAAGGA
GAGGCGAGCAGCCATGATGGTGGGAATTCTGATTGGCGTGTTTGTGCTGTGCTGGATCCCCTTCTTCC
TGACGGAACTCATCAGCCCACTCTGTGCCTGCAGCCTGCCCCCCATCTGGAAAAGCATATTTCTGTGG
CTTGGCTACTCCAATTCTTTCTTCAACCCCCTGATTTACACAGCTTTTAACAAGAACTACAACAATGC
CTTCAAGAGCCTCTTTACTAAGCAGAGATGAACACAGGG

| | | | |
|---|---|---|---|
| NOV39d, CG54692-03 | SEQ ID NO: 480 | 372 aa | MW at 40535.1kD |
| Protein Sequence | | | |

MEAASLSVATAGVALALGPETSSGTPSPRGILGSTPSGAVLPGRGPPFSVFTVLVVTLLVLLIAATFL
WNLLVPVTIPRVRAFHRVPHNLVASTAVSDELVAALAMPPSLASELSTGRRRLLGRSLCHVWISFHGP
RLCCPAGLGNVAAIALGRDGAITRHLQHTLRTRSRASLLMIALTRVPSALIALAPLLFGRGEVCDARL
QRCQVSREPSYAAFSTRGAFHLPLGVVPFVYRKIYEAAKFRFGRRRRAVLPLPATMQVKEAPDEAEVV
FTAHCKATVSFQVSGDSWREQKERRAAMMVGILIGVFVLCWIPFFLTELISPLCACSLPPIWKSIFLW
LGYSNSFFNPLIYTAFNKNYNNAFKSLFTKQR

| | | |
|---|---|---|
| NOV39e, GG54692-04 | SEQ ID NO: 481 | 1155 bp |
| DNA Sequence | ORF Start: ATG at 5 | ORF Stop: TGA at 1145 |

CGCCATGGAGGCCGCTAGCCTTTCAGTGGCCACCGCCGGCGTTGCCCTTGCCCCCGAGACCAGCAGCC
CGGCGTTGCCCTTGCCCTGGGACCCGAGACCAGCAGCAGGACCCGGGACCCCAAGCCCGAGAGGGATA
CTCGGTTCGACCCCGAGCGGCGCCGTCCTGCCGGGCCGAGGGCCGCCCTTCTCTGTCTTCACGGTCCT
GGTGGTGACGCTGCTAGTGCTGCTGATCGCTGCCACTTTCCTGTGGAACCTGCTGGTTCCGGTCACCA
TCCCGCGGGTCCGTGCCTTCCACCGCGTGCCGCATAACTTGGTGGCCTCGACGGCCGTCTCGGACGAA
CTAGTGGCAGCGCTGGCGATGCCACCGAGCCTGGCGAGTGAGCTGTCGACCGGGCGACGTCGGCTGCT
GGGCCGCCACGTGTGGATCTCCTTCGACGCCCTGTGCTGCCCCGCCGGCCTCGGGAACGTGGCGGCCA
TCGCCCTGGGCCGCGACGGGGCCATCACACGGCACCTGCAGCACACGCTGCGCACCCGCAGCCGCGCC
TCGTTGCTCATGATCGCGCTCGCCCGGGTGCCGTCGGCGCTCATCGCCCTCGCGCCGCTGCTCTTTGG
CCGGGGCGAGGTGTGCGACGCTCGGCTCCAGCGCTGCCAGGTGAGCCGGGAACCCTCCTATGCCGCCT
TCTCCACCCGCGGCGCCTTCCACCTGCCGCTTGGCGTGGTGCCGTTTGTCTACCGGAAGATCTACGAG
GCGGCCAAGTTTCGTTTCGGCCGCCGCCGGAGAGCTGTGCTGCCGTTGCCGGCCACCATGCAGGTGAA
GGAAGCACCTGATGAGGCTGAAGTGGTGTTCACGGCACATTGCAAAGCAACGGTGTCCTTCCAGGTGA
GCGGGGACTCCTGGCGGGAGCAGAAGGAGAGGCGAGCAGCCATGATGGTGGGAATTCTGATTGGCGTG
TTTGTGCTGTGCTGGATCCCCTTCTTCCTGACGGAACTCATCAGCCCACTCTGTGCCTGCAGCCTGCC
CCCCATCTGGAAAAGCATATTTCTGTGGCTTGGCTACTCCAATTCTTTCTTCAACCCCCTGATTTACA
CAGCTTTTAACAAGAACTACAACAATGCCTTCAAGAGCCTCTTTACTAAGCAGAGATGAACACAGGG

| | | | |
|---|---|---|---|
| NOV39e, CG54692-04 | SEQ ID NO: 482 | 380 aa | MW at 41306.9kD |
| Protein Sequence | | | |

MEAASLSVATAGVALAPETSSPALPLPWDPRPAAGPGTPSPRGILGSTPSGAVLPGRGPPFSVFTVLV
VTLLVLLIAATFLWNLLVPVTIPRVRAFHRVPHNLVASTAVSDELVAALANPPSLASELSTGRRRLLG
RHVWISFDALCCPAGLGNVAAIALGRDGAITRHLQHTLRTRSRASLLMIALARVPSALIALAPLLFGR
GEVCDARLQRCQVSREPSYAAFSTRGAFHLPLGVVPFVYRKIYEAAKFRFGRRRRAVLPLPATMQVKE
APDEAEVVFTAHCKATVSFQVSGDSWREQKERRAANMVGILIGVFVLCWIPFFLTELISPLCACSLPP
IWKSIFLWLGYSNSFFNPLIYTAFNKNYNNAFKSLFTKQR

| | | |
|---|---|---|
| NOV39f, GG54692-05 | SEQ ID NO: 483 | 1152 bp |
| DNA Sequence | ORF Start: ATG at 5 | ORF Stop: TGA at 1142 |

CGCCATGGAGGCCGCTAGCCTTTCAGTGGCCACCGCCGGCGTTGCCCTTGCCCTGGGACCCGAGACCA
GCAGCGGACCCGGGACCCCAAGCCCGAGAGGGATACTCGGTTCGACCCCGAGCGGCGCCGTCCTGCCG
GGCCGAGGGCCGCCCTTCTCTGTCTTCACGGTCCTGGTGGTGACGCTGCTAGTGCTGCTGATCGCTGC
CACTTTCCTGTGGAACCTGCTGGTTCCGGTCACCATCCCGCGGGTCCGTGCCTTCCACCGCGTGCCGC
ATAACTTGGTGGCCTCGACGGCCGTCTCGGACGAACTAGTGGCAGCGCTGGCGATGCCACCGAGCCTG
GCGAGTGAGCTGTCGACCGGGCGACGTCGGCTGCTGGGCCGGAGCCTGTGCCACGTGTGGATCTCCTT
CGACGCCGGAGCCTGTCTGTGCTGCCCCGCCGGCCTCGGGAACGTGGCGGCCATCGCCCTGGGCCGCG
ACGGGGCCATCACACGGCACCTGCAGCACACGCTGCGCACCCGCAGCCGCGCCTCGTTGCTCATGATC
GCGCTCGCCCGGGTGCCGTCGGCGCTCATCGCCCTCGCGCCGCTGCTCTTTGGCCGGGGCGAGGTGTG
CGACGCTCGGCTCCAGCGCTGCCAGGTGAGCCGGGAACCCTCCTATGCCGCCTTCTCCACCCGCGGCG
CCTTCCACCTGCCGCTTGGCGTGGTGCCGTTTGTCTACCGGAAGATCTACGAGGCGGCCAAGTTTCGT
TTCGGCCGCCGCCGGAGAGCTGTGCTGCCGTTGCCGGCCACCATGCAGGTGAGGTCCAAGGTAAAGGA
AGCACCTGATGAGGCTGAAGTGGTGTTCACGGCACATTGCAAAGCAACGGTGTCCTTCCAGGTGAGCG
GGGACTCCTGGCGGGAGCAGAAGGAGAGGCGAGCAGCCATGATGGTGGGAATTCTGATTGGCGTGTTT
GTGCTGTGCTGGATCCCCTTCTTCCTGACGGAACTCATCAGCCCACTCTGTGCCTGCAGCCTGCCCCC
CATCTGGAAAAGCATATTTCTGTGGCTTGGCTACTCCAATTCTTTCTTCAACCCCCTGATTTACACAG
CTTTTAACAAGAACTACAACAATGCCTTCAAGAGCCTCTTTACTAAGCAGAGATGAACACAGGG

| | | | |
|---|---|---|---|
| NOV39f, CG54692-05 | SEQ ID NO: 484 | 379 aa | MW at 41099.7kD |
| Protein Sequence | | | |

MEAASLSVATAGVALALGPETSSGPGTPSPRGILGSTPSGAVLPGRGPPFSVFTVLVVTLLVLLIAAT
FLWNLLVPVTIPRVRAFHRVPHNLVASTAVSDELVAALAMPPSLASELSTGRRRLLGRSLCHVWISFD
AGACLCCPAGLGNVAAIALGRDGAITRHLQHTLRTRSRASLLMIALARVPSALIALAPLLFGRGEVCD
ARLQRCQVSREPSYAAFSTRGAFHLPLGVVPFVYRKIYEAAKFRFGRRRRAVLPLPATMQVRSKVKEA
PDEAEVVFTAHCKATVSFOVSGDSWREQKERRAAMMVGILIGVFVLCWIPFFLTELISPLCACSLPPI
WKSIFLWLGYSNSFFNPLIYTAFNKNYNNAFKSLFTKQR

[0572] A ClustalW comparison of the above protein sequences yields the following sequence alignment shown in Table 39B.

TABLE 39B
Comparison of the NOV39 protein sequences.

NOV39a MEAASLSVATAGVALA-----------LGPETSSG--TPSPRGILGSTPSGAVLPGRGPP
NOV39b MEAASLSVATAGVALA-----------LGPETSSG--TPSPRGILGSTPSGAVLPGRGPP
NOV39c MEAASLSVATAGVALA-----------LGPETSSG--TPSPRGILGSTPSGAVLPGRGPP
NOV39d MEAASLSVATAGVALA-----------LGPETSSG--TPSPRGILGSTPSGAVLPGRGPP
NOV39e MEAASLSVATAGVAIAPETSSPALPLPWDPRPAAGPGTPSPRGILGSTPSGAVLPGRGPP
NOV39f MEAASLSVATAGVALA-----------LGPETSSGPGTPSPRGILGSTPSGAVLPGRGPP
NOV39a FSVFTVLVVTLLVLLIAATFLWNLLVPVTIPRVRAFHRVPHNLVASTAVSDELVAALAMP
NOV39b FSVFTVLVVTLLVLLIAATFLWNLLVPVTIPRVRAFHRVPHNLVASTAVSDELVAALAMP
NOV39c FSVFTVLVVTLLVLLIAATFLWNLLVPVTIPRVRAFHRVPHNLVASTAVSDELVAALAMP
NOV39d FSVFTVLVVTLLVLLIAATFLWNLLVPVTIPRVRAFHRVPHNLVASTAVSDELVAALAMP
NOV39e FSVFTVLVVTLLVLLIAATFLWNLLVPVTIPRVRAFHRVPHNLVASTAVSDELVAALANP
NOV39f FSVFTVLVVTLLVLLIAATFLWNLLVPVTIPRVRAFHRVPHNLVASTAVSDELVAALAMP
NOV39a PSLASELSTGRRRLLGRSLCHVWISFDA---LCCPAGLGNVAAIALGRDGAITRHLQHTL
NOV39b PSLASELSTGRRRLLGRSLCHVWISFDA---LCCPAGLGNVAAIALGRDGAITRHLQHTL
NOV39c PSLASELSTGRRRLLGRSLCHVWISFDA---LCCPAGLGNVAAIALGRDGAITRHLQHTL
NOV39d PSLASELSTGRRRLLGRSLCHVWISFHG-PRLCCPAGLGNVAAIALGRDGAITRHLQHTL
NOV39e PSLASELSTGRRRLLGR---HVWISFDA---LCCPAGLGNVAAIALGRDGAITRHLQHTL
NOV39f PSLASELSTGRRRLLGRSLCHVWISFDAGACLCCPAGLGNVAAIALGRDGAITRHLQHTL
NOV39a RTRSRASLLMIALARVPSALIALAPLLFGRGEVCDARLQRCQVSREPSYAAFSTRGAFHL
NOV39b RTRSRASLLMIALARVPSALIALAPLLFGRGEVCDARLQRCQVSREPSYAAFSTRGAFHL
NOV39c RTRSRASLLMIALARVPSALIALAPLLFGRGEVCDARLQRCQVSREPSYAAFSTRGAFHL
NOV39d RTRSRASLLMIALTRVPSALIALAPLLFGRGEVCDARLQRCQVSREPSYAAFSTRGAFHL
NOV39e RTRSRASLLMIALARVPSALIALAPLLFGRGEVCDARLQRCQVSREPSYAAFSTRGAFHL
NOV39f RTRSRASLLMIALARVPSALIALAPLLFGRGEVCDARLQRCQVSREPSYAAFSTRGAFHL
NOV39a PLGVVPFVYRKIYEAAKFRFGRRRRAVLPLPAT----MQVKEAPDEAEVVFTAHCKATVS
NOV39b PLGVVPFVYRKIYEAAKFRFGRRRRAVLPLPAT----SKVKEAPDEAEVVFTAHCKATVS
NOV39c PLGVAPFVYRKIYEAAKFRFGRRRRAVLPLPAT----MQVKEAPDEAEVVFTAHCKATVS
NOV39d PLGVVPFVYRKIYEAAKFRFGRRRRAVLPLPAT----MQVKEAPDEAEVVFTAHCKATVS
NOV39e PLGVVPFVYRKIYEAAKFRFGRRRRAVLPLPAT----MQVKEAPDEAEVVFTAHCKATVS
NOV39f PLGVVPFVYRKIYEAAKFRFGRRRRAVLPLPATMQVRSKVKEAPDEAEVVFTAHCKATVS
NOV39a FQVSGDSWREQKERRAANMVGILIGVFVLCWIPFFLTELISPLCACSLPPIWKSIFLWLG
NOV39b FQVSGDSWREQKERRAAMMVGILIGVFVLCWIPFFLTELISPLCACSLPPIWKSIFLWLG
NOV39c FQVSGDSWREQKERRAAMMVGILIGVFVLCWIPFFLTELISPLCACSLPPIWKSIFLWLG
NOV39d FQVSGDSWREQKERRAAMMVGILIGVFVLCWIPFFLTELISPLCACSLPPIWKSIFLWLG
NOV39e FQVSGDSWREQKERRAANMVGILIGVFVLCWIPFFLTELISPLCACSLPPIWKSIFLWLG
NOV39f FQVSGDSWREQKERRAAMMVGILIGVFVLCWIPFFLTELISPLCACSLPPIWKSIFLWLG
NOV39a YSNSFFNPLIYTAFNKNYNNAFKSLFTKQR
NOV39b YSNSFFNPLIYTAFNKNYNNAFKSLFTKQR
NOV39c YSNSFFNPLIYTAFNKNYNNAFKSLFTKQR
NOV39d YSNSFFNPLIYTAFNKNYNNAFKSLFTKQR
NOV39e YSNSFFNPLIYTAFNKNYNNAFKSLFTKQR
NOV39f YSNSFFNPLIYTAFNKNYNNAFKSLFTKQR
NOV39a (SEQ ID NO: 474)
NOV39b (SEQ ID NO: 476)
NOV39c (SEQ ID NO: 478)
NOV39d (SEQ ID NO: 480)
NOV39e (SEQ ID NO: 482)
NOV39f (SEQ ID NO: 484)

[0573] Further analysis of the NOV39a protein yielded the following properties shown in Table 39C.

TABLE 39C
Protein Sequence Properties NOV39a

| | |
|---|---|
| SignalP analysis: | Cleavage site between residues 25 and 26 |

PSORT II analysis:
PSG: a new signal peptide prediction method

N-region: length 2; pos.chg 0; neg.chg 1
H-region: length 17; peak value 0.00
PSG score: −4.40

GvH: von Heijne's method for signal seq. recognition

GvH score (threshold: −2.1): −4.24
possible cleavage site: between 23 and 24

>>> Seems to have no N-terminal signal peptide
ALOM: Klein et al's method for TM region allocation

| Init position for calculation: 1 | | |
|---|---|---|
| Tentative number of TMS(s) for the threshold 0.5: 5 | | |
| INTEGRAL | Likelihood = 0.32 | Transmembrane 1-17 |
| INTEGRAL | Likelihood = −12.10 | Transmembrane 48-64 |
| INTEGRAL | Likelihood = −0.48 | Transmembrane 135-151 |
| INTEGRAL | Likelihood = −4.94 | Transmembrane 172-188 |
| INTEGRAL | Likelihood = −9.66 | Transmembrane 300-316 |

| | |
|---|---|
| PERIPHERAL | Likelihood = 0.69 (at 90) |

ALOM score: −12.10 (number of TMSs: 5)

MTOP: Prediction of membrane topology (Hartmann et al.)

Center position for calculation: 8
Charge difference: 0.0 C(0.0) − N(0.0)
N >= C: N-terminal side will be inside

>>> membrane topology: type 3a
MITDISC: discrimination of mitochondrial targeting seq

| | | | |
|---|---|---|---|
| R content: | 0 | Hyd Moment(75): | 3.56 |
| Hyd Moment(95): | 5.35 | G content: | 2 |
| D/E content: | 2 | S/T content: | 3 |

Score: −7.53

Gavel: prediction of cleavage sites for mitochondrial preseq

R-2 motif at 95 HRV|PH

NUCDISC: discrimination of nuclear localization signals

pat4: RRRR (5) at 246
pat7: none
bipartite: RKIYEAAKFRFGRRRRA at 234
content of basic residues: 10.5%
NLS Score: 0.50

KDEL: ER retention motif in the C-terminus: none
ER Membrane Retention Signals:

KKXX-like motif in the C-terminus: FTKQ

SKL: peroxisomal targeting signal in the C-terminus: none
PTS2: 2nd peroxisomal targeting signal: none
VAC: possible vacuolar targeting motif: none
RNA-binding motif: none
Actinin-type actin-binding motif:

type 1: none
type 2: none

NMYR: N-myristoylation pattern: none
Prenylation motif: none
memYQRL: transport motif from cell surface to Golgi: none
Tyrosines in the tail: none
Dileucine motif in the tail: none
checking 63 PROSITE DNA binding motifs: none
checking 71 PROSITE ribosomal protein motifs: none
checking 33 PROSITE prokaryotic DNA binding motifs: none
NNCN: Reinhardt's method for Cytoplasmic/Nuclear discrimination

Prediction: cytoplasmic
Reliability: 94.1

COIL: Lupas's algorithm to detect coiled-coil regions

total: 0 residues

Final Results (k = 9/23):

66.7%: endoplasmic reticulum
22.2%: mitochondrial
11.1%: nuclear

>> prediction for CG54692-06 is end (k = 9)

[0574] A search of the NOV39a protein against the Geneseq database, a proprietary database that contains sequences published in patents and patent publication, yielded several homologous proteins shown in Table 39D.

TABLE 39D
Geneseq Results for NOV39a

| | | NOV39a | Identities/ | |
|---|---|---|---|---|
| | | Residues/ | Similarities for | |
| Geneseq | Protein/Organism/Length | Match | the Matched | Expect |
| Identifier | [Patent #, Date] | Residues | Region | Value |
| AAE18654 | Human G-protein coupled | 1 . . . 370 | 370/370 (100%) | 0.0 |
| | receptor (GCREC-15) - Homo | 1 . . . 370 | 370/370 (100%) | |
| | sapiens, 370 aa. [WO200210387- | | | |
| | A2, 07-FEB-2002] | | | |
| AAM47212 | Human NOV5b protein - Homo | 1 . . . 370 | 369/370 (99%) | 0.0 |
| | sapiens, 370 aa. [WO200174851- | 1 . . . 370 | 369/370 (99%) | |
| | A2, 11-OCT-2001] | | | |
| AAM47211 | Human NOV5a protein - Homo | 1 . . . 370 | 368/370 (99%) | 0.0 |
| | sapiens, 370 aa. [WO200174851- | 1 . . . 370 | 369/370 (99%) | |
| | A2, 11-OCT-2001] | | | |
| AAE15638 | Human G-protein coupled | 1 . . . 370 | 367/372 (98%) | 0.0 |
| | receptor-8 (GCREC-8) protein - | 1 . . . 372 | 367/372 (98%) | |
| | Homo sapiens, 372 aa. | | | |
| | [WO200198351-A2, 27-DEC- | | | |
| | 2001] | | | |
| ABB78809 | Human NOV5 protein sequence | 1 . . . 370 | 370/379 (97%) | 0.0 |
| | SEQ ID NO: 16 - Homo sapiens, | 1 . . . 379 | 370/379 (97%) | |
| | 379 aa. [WO200230974-A2, 18- | | | |
| | APR-2002] | | | |

[0575] In a BLAST search of public sequence databases, the NOV39a protein was found to have homology to the proteins shown in the BLASTP data in Table 39E.

TABLE 39E
Public BLASTP Results for NOV39a

| | | NOV39a | Identities/ | |
|---|---|---|---|---|
| Protein | | Residues/ | Similarities for | |
| Accession | | Match | the Matched | Expect |
| Number | Protein/Organism/Length | Residues | Portion | Value |
| CAD13088 | Sequence 11 from Patent | 1 . . . 370 | 369/370 (99%) | 0.0 |
| | WO0174851 - Homo sapiens | 1 . . . 370 | 369/370 (99%) | |
| | (Human), 370 aa. | | | |
| CAD13087 | Sequence 9 from Patent | 1 . . . 370 | 368/370 (99%) | 0.0 |
| | WO0174851 - Homo sapiens | 1 . . . 370 | 369/370 (99%) | |
| | (Human), 370 aa. | | | |
| P35365 | 5-hydroxytryptamine 5B receptor | 1 . . . 370 | 296/370 (80%) | e−165 |
| | (5-HT-5B) (Serotonin receptor) | 1 . . . 370 | 316/370 (85%) | |
| | (MR22) - Rattus norvegicus | | | |
| | (Rat), 370 aa. | | | |
| P31387 | 5-hydroxytryptamine 5B receptor | 1 . . . 370 | 298/370 (80%) | e−165 |
| | (5-HT-5B) (Serotonin receptor) - | 1 . . . 370 | 317/370 (85%) | |
| | Mus musculus (Mouse), 370 aa. | | | |
| S38744 | serotonin receptor 5B - rat, 369 | 1 . . . 370 | 296/370 (80%) | e−164 |
| | aa. | 1 . . . 369 | 316/370 (85%) | |

[0576] PFam analysis indicates that the NOV39a protein contains the domains shown in the Table 39F.

TABLE 39F
Domain Analysis of NOV39a

| | NOV39a | Identities/ | |
|---|---|---|---|
| | Match | Similarities | |
| Pfam Domain | Region | for the Matched Region | Expect Value |
| 7tm_1 | 69 . . . 351 | 75/314 (24%) | 1.2e−43 |
| | | 197/314 (63%) | |

### Example 40

[0577] The NOV40 clone was analyzed, and the nucleotide and encoded polypeptide sequences are shown in Table 40A.

TABLE 40A
NOV40 Sequence Analysis

| | | |
|---|---|---|
| NOV40a, CG55069-01 | SEQ ID NO: 485 | 8657 bp |
| DNA Sequence | ORF Start: ATG at 151 | ORF Stop: TAA at 8326 |

TTTGGCCTCGGGCCAGAATTCGGCACGAGGGGTCTGGAGCTTGGAGGAGAAGTCTGAACTAAGGATAA
ACTAAAGAGAGGCCAATGAGACTTGAACCCTGAGCCTAAGTTGTCACCAGCAGGACTGATGTGCACAC
AGAAGGAATGAAGTATGGATGTGAAAGAACGCAGGCCTTACTGCTCCCTGACCAAGAGCAGACGAGAG
AAGGAACGGCGCTACACAAATTCCTCCGCAGACAATGAGGAGTGCCGGGTACCCACACAGAAGTCCTA
CAGTTCCAGCGAGACATTGAAAGCTTTTGATCATGATTCCTCGCGGCTGCTTTACGGCAACAGAGTGA
AGGATTTGGTTCACAGAGAAGCAGACGAGTTCACTAGACAAGGACAGAATTTTACCCTAAGGCAGTTA
GGAGTTTGTGAACCAGCAACTCGAAGAGGACTGGCATTTTGTGCGGAAATGGGGCTCCCTCACAGAGG
TTACTCTATCAGTGCAGGGTCAGATGCTGATACTGAAAATGAAGCAGTGATGTCCCCAGAGCATGCCA
TGAGACTTTGGGGCAGGGGGGTCAAATCAGGCCGCAGCTCCTGCCTGTCAAGTCGGTCCAACTCAGCC
CTCACCCTGACAGATACGGAGCACGAAAACAAGTCCGACAGTGAGAATGAGCAACCTGCAAGCAATCA
AGGCCAGTCTACCCTGCAGCCCTTGCCGCCTTCCCATAAGCAGCACTCTGCACAGCATCATCCATCCA
TCACTTCTCTCAACAGAAACTCCCTGACCAATAGAAGGAACCAGAGTCCGGCCCCGCCGGCTGCTTTG
CCCGCCGAGCTGCAAACCACACCCGAGTCCGTCCAGCTGCAGGACAGCTGGGTCCTTGGCAGTAATGT
ACCACTGGAAAGCAGGCATTTCCTATTCAAAACAGGAACAGGTACAACGCCACTGTTCAGTACTGCAA
CCCCAGGATACACAATGGCATCTGGCTCTGTTTATTCACCACCTACTCGGCCACTACCTAGAAACACC
CTATCAAGAAGTGCTTTTAAATTCAAGAAGTCTTCAAAGTACTGTAGCTGGAAATGCACTGCACTGTG
TGCCGTAGGGGTCTCGGTGCTCCTGGCAATACTCCTGTCTTATTTTATAGCAATGCATCTCTTTGGCC
TCAACTGGCAGCTACAGCAGACTGAAAATGACACATTTGAGAATGGAAAAGTGAATTCTGATACCATG
CCAACAAACACTGTGTCATTACCTTCTGGAGACAATGGAAAATTAGGTGGATTTACGCAAGAAAATAA
CACCATAGATTCCGGAGAACTTGATATTGGCCGAAGAGCAATTCAAGAGATTCCTCCCGGGATCTTCT
GGAGATCACAGCTCTTCATTGATCAGCCACAGTTTCTTAAATTCAATATCTCTCTTCAGAAGGATGCA
TTGATTGGAGTATATGGCCGGAAGAAGTTACCGCCTTCCCATACTCAGTCCTCCCCCCAGTATGACTT
CGTGGAGCTCCTGGATGGCAGCAGGCTGATTGCCAGAGAGCAGCGGAGCCTGCTTGAGACGGAGAGAG
CCGGGCGGCAGGCGAGATCCGTCAGCCTTCATGAGGCCGGCTTTATCCAGTACTTGGATTCTGGAATC
TGGCATCTGGCTTTTTATAATGATGGGAAAAATGCAGAGCAGGTGTCTTTTAATACCATTGTTATAGA
GTCTGTGGTGGAATGTCCCCGAAATTGCCATGGAAATGGAGAATGCGTTTCTGGAACTTGCCATTGTT
TTCCAGGATTTCTGGGTCCGGATTGTTCAAGAGCCGCCTGTCCAGTGTTATGTAGTGGCAACGGGCAG
TACTCCAAGGGCCGCTGCCTGTGTTTCAGCGGCTGGAAGGGCACCGAGTGTGATGTGCCGACTACCCA
GTGTATTGACCCACAGTGTGGGGGTCGTGGGATTTGTATCATGGGCTCCTGTGCTTGCAGCTCAGGAT
ACAAAGGAGAAAGTTGTGAAGAAGCTGACTGTATAGACCCTGGGTGTTCTAATCATGGTGTGTGTATC
CACGGGGAATGTCACTGCAGTCCAGGATGGGGAGGTAGCAATTGTGAAATACTGAAGACCATGTGTCC
AGACCAGTGCTCCGGCCACGGAACGTATCTTCAAGAAAGTGGCTCCTGCACGTGTGACCCTAACTGGA
CTGGCCCAGACTGCTCAAACGAAATATGTTCTGTGGACTGTGGCTCACACGGCGTTTGCATGGGGGGG
ACGTGTCGCTGTGAAGAAGGCTGGACGGGCCCAGCCTGTAATCAGAGAGCCTGCCACCCCCGCTGTGC
CGAGCACGGGACCTGCAAGGATGGCAAGTGTGAATGCAGCCAGGGCTGGAATGGAGAGCACTGCACTA
TCGCTCACTATTTGGATAAGATAGTTAAAGACAAGATAGGATATAAAGAGGGTTGTCCTGGTCTGTGC
AACAGCAATGGAAGATGTACCCTGGACCAAAATGGCGGACATTGTGTGTGCCAGCCTGGATGGAGAGG
AGCAGGCTGTGACGTAGCCATGGAGACTCTTTGCACAGATAGCAAGGACAATGAAGGGGATGGACTCA
TTGACTGCATGGATCCCGATTGCTGCCTACAGAGTTCCTGCCAGAATCAGCCCTATTGTCGGGGACTG
CCGGATCCTCAGGACATCATTAGCCAAAGCCTTCAATCGCCTTCTCAGCAAGCTGCCAAATCCTTTTA
TGATCGAATCAGTTTCCTTATAGGATCTGATAGCACCCATGTTATACCTGGAGAAAGTCCTTTCAATA
AGAGCCTTGCATCTGTCATCAGAGGCCAAGTACTGACTGCTGATGGAACTCCACTTATTGGAGTAAAT
GTCTCGTTTTTCCATTACCCAGAATATGGATATACTATTACCCGCCAGGACGGAATGTTTGACTTGGT
GGCAAATGGTGGGGCCTCTCTAACTTTGGTATTTGAACGATCCCCATTCCTCACTCAGTATCATACTG
TGTGGATTCCATGGAATGTCTTTTATGTGATGGATACCCTAGTCATGGAGAAAGAAGAGAATGACATT
CCCAGCTGTGATCTGAGTGGATTCGTGAGGCCAAATCCCATCATTGTGTCATCACCTTTATCCACCTT
TTTCAGATCTTCTCCTGAAGACAGTCCCATCATTCCCGAAACACAGGTACTCCACGAGGAAACTACAA
TTCCAGGAACAGATTTGAAACTCTCCTACTTGAGTTCCAGAGCTGCAGGGTATAAGTCAGTTCTCAAG
ATCACCATGACCCAGTCTATTATTCCATTTAATTTAATGAAGGTTCATCTTATGGTAGCTGTAGTAGG
AAGACTCTTCCAAAAGTGGTTTCCTGCCTCACCAAACTTGGCCTATACTTTCATATGGGATAAAACAG
ATGCATATAATCAGAAAGTCTATGGTCTATCTGAAGCTGTTGTGTCAGTTGGATATGAGTATGAGTCG
TGTTTGGACCTGACTCTGTGGGAAAAGAGGACTGCCATTCTGCAGGGCTATGAATTGGATGCGTCCAA
CATGGGTGGCTGGACATTAGATAAACATCACGTGCTGGATGTACAGAACGGTATACTGTACAAGGGAA
ACGGGGAAAACCAGTTCATCTCCCAGCAGCCTCCAGTCGTGAGTAGCATCATGGGCAATGGGCGAAGG
CGCAGCATTTCCTGCCCCAGTTGCAATGGTCAAGCTGATGGTAACAAGTTACTGGCCCCAGTGGCGCT
AGCTTGTGGGATCGATGGCAGTCTGTACGTAGGCGATTTCAACTACGTGCGGCGGATATTCCCTTCTG
GAAATGTAACAAGTGTCTTAGAACTAAGAAATAAAGATTTTAGACATAGCAGCAACCCAGCTCATAGA
TACTACCTTGCAACGGATCCAGTCACGGGAGATCTGTACGTTTCTGACACAAACACCCGCAGAATTTA
TCGCCCAAAGTCACTTACGGGGGCAAAAGACTTGACTAAAAATGCAGAAGTCGTCGCAGGGACAGGGG
AGCAATGCCTTCCGTTTGACGAGGCGAGATGTGGGGATGGAGGGAAGGCCGTGGAAGCCACACTCATG
AGTCCCAAAGGAATGGCAGTTGATAAGAATGGATTAATCTACTTTGTTGATGGAACCATGATTAGGAA
AGTTGACCAAAATGGAATCATATCAACTCTTCTGGGCTCTAACGATTTGACTTCAGCCAGACCTTTAA
CTTGTGACACCAGCATGCACATCAGCCAGGTACGTCTGGAATGGCCCACTGACCTAGCCATTAACCCT
ATGGATAACTCCATTTATGTCCTGGATAATAATGTAGTTTTACAGATCACTGAAAATCGTCAAGTTCG
CATTGCTGCTGGACGGCCCATGCACTGTCAGGTTCCCGGAGTGGAATATCCTGTGGGGAAGCACGCGG
TGCAGACAACACTGGAATCAGCCACTGCCATTGCTGTGTCCTACAGTGGGGTCCTGTACATTACTGAA
ACTGATGAGAAGAAAATTAACCGGATAAGGCAGGTCACAACAGATGGAGAAATCTCCTTAGTGGCCGG
AATACCTTCAGAGTGTGACTGCAAAAATGATGCCAACTGTGACTGTTACCAGAGTGGAGATGGCTACG
CCAAGGATGCCAAACTCAGTGCCCCATCCTCCCTGGCTGCTTCTCCAGATGGTACACTGTATATTGCA
GATCTAGGGAATATCCGGATCCGGGCTGTGTCAAAGAATAAGCCTTTACTTAACTCTATGAACTTCTA
TGAAGTTGCGTCTCCAACTGATCAAGAACTCTACATCTTTGACATCAATGGTACTCACCAATATACTG
TAAGTTTAGTCACTGGTGATTACCTTTACAATTTTAGCTACAGCAATGACAATGATATTACTGCTGTG
ACAGACAGCAATGGCAACACCCTTAGAATTAGACGGGACCCAAATCGCATGCCAGTTCGAGTGGTGTC
TCCTGATAACCAAGTGATATGGTTGACAATAGGAACAAATGGATGTTTGAAAGGCATGACTGCTCAAG
GACTGGAATTAGTTTTGTTTACTTACCATGGCAATAGTGGCCTTTTAGCCACTAAAAGTGATGAAACT
GGATGGACAACGTTTTTTGACTATGACAGTGAAGGTCGTCTGACAAATGTTACGTTTCCAACTGGAGT
GGTCACAAACCTGCATGGGGACATGGACAAGGCTATCACAGTGGACATTGAGTCATCTAGCCGAGAAG
AAGATGTCAGCATCACTTCAAATCTGTCCTCGATCGATTCTTTCTACACCATGGTTCAAGATCAGTTA
AGAAACAGCTACCAGATTGGTTATGACGGCTCCCTCAGAATTATCTACGCCAGTGGCCTGGACTCACA
CTACCAAACAGAGCCGCACGTTCTGGCTGGCACCGCTAATCCGACGGTTGCCAAAAGAAACATGACTT
TGCCTGGCGAGAACGGTCAAAACTTGGTGGAATGGAGATTCCGAAAAGAGCAAGCCCAAGGGAAAGTC
AATGTCTTTGGCCGCAAGCTCAGGGTTAATGGCAGAAACCTCCTTTCAGTTGACTTTGATCGAACAAC
AAAGACAGAAAAGATCTATGACGACCACCGTAAATTTCTACTGAGGATCGCCTACGACACGTCTGGGC
ACCCGACTCTCTGGCTGCCAAGCAGCAAGCTGATGGCCGTCAATGTCACCTATTCATCCACAGGTCAA
ATTGCCAGCATCCAGCGAGGCACCACTAGCGAGAAAGTAGATTATGACGGACAGGGGAGGATCGTGTC
TCGGGTCTTTGCTGATGGTAAAACATGGAGTTACACATATTTAGAAAAGTCCATGGTTCTTCTGCTTC
ATAGCCAGCGGCAGTACATCTTCGAATACGATATGTGGGACCGCCTGTCTGCCATCACCATGCCCAGT
GTGGCTCGCCACACCATGCAGACCATCCGATCCATTGGCTACTACCGCAACATATACAACCCCCCGGA
AAGCAACGCCTCCATCATCACGGACTACAACGAGGAAGGGCTGCTTCTACAAACAGCTTTCTTGGGTA
CAAGTCGGAGGGTCTTATTCAAATACAGAAGGCAGACTAGGCTCTCAGAAATTTTATATGATAGCACA
AGAGTCAGTTTTACCTATGATGAAACAGCAGGAGTCCTAAAGACAGTAAACCTCCAGAGTGATGGTTT
TATTTGCACCATTAGATACAGGCAAATTGGTCCCCTGATTGACAGGCAGATTTTCCGCTTTAGTGAAG
ATGGGATGGTAAATGCAAGATTTGACTATAGCTATGACAACAGCTTTCGAGTGACCAGCATGCAGGGT
GTGATCAATGAAACGCCACTGCCTATTGATCTGTATCAGTTTGATGACATTTCTGGCAAAGTTGAGCA
GTTTGGAAAGTTTGGAGTTATATATTATGATATTAACCAGATCATTTCTACAGCTGTAATGACCTATA
CGAAGCACTTTGATGCTCATGGCCGTATCAAGGAGATTCAATATGAGATATTCAGGTCGCTCATGTAC
TGGATTACAATTCAGTATGATAACATGGGTCGGGTAACCAAGAGAGAGATTAAAATAGGGCCCTTTGC
CAACACCACCAAATATGCTTATGAATATGATGTTGATGGACAGCTCCAAACAGTTTACCTCAATGAAA
AGATAATGTGGCGGTACAACTACGATCTGAATGGAAACCTCCATTTACTGAACCCAAGTAACAGTGCG
CGTCTGACACCCCTTCGCTATGACCTGCGAGACAGAATCACTCGACTGGGTGATGTTCAATATCGGTT
GGATGAAGATGGTTTCCTACGTCAAAGGGGCACGGAAATCTTTGAATATAGCTCCAAGGGGCTTCTAA
CTCGAGTTTACAGTAAAGGCAGTGGCTGGACAGTGATCTACCGTTATGACGGCCTGGGAAGGCGTGTT
TCTAGCAAAACCAGTCTAGGACAGCACCTGCAGTTTTTTTATGCTGACTTAACTTATCCCACTAGGAT
TACTCATGTCTACAACCATTCGAGTTCAGAAATTACCTCCCTGTATTATGATCTCCAAGGACATCTTT
TTGCCATGGAAATCAGCAGTGGGGATGAATTCTATATTGCATCGGATAACACAGGGACACCACTGGCT
GTGTTCAGTAGCAATGGGCTTATGCTGAAACAGATTCAGTACACTGCATATGGGGAAATCTATTTTGA
CTCTAATATTGACTTTCAACTGGTAATTGGATTTCATGGTGGCCTGTATGACCCACTCACCAAATTAA
TCCACTTTGGAGAAAGAGATTATGACATTTTGGCAGGACGGTGGACAACACCTGACATAGAAATCTGG
AAAAGAATTGGGAAGGACCCAGCTCCTTTTAACTTGTACATGTTTAGGAATAACAACCCTGCAAGCAA
AATCCATGACGTGAAAGATTACATCACAGATGTTAACAGCTGGCTGGTGACATTTGGTTTCCATCTGC
ACAATGCTATTCCTGGATTCCCTGTTCCCAAATTTGATTTAACAGAACCTTCTTACGAACTTGTGAAG
AGTCAGCAGTGGGATGATATACCGCCCATCTTCGGAGTCCAGCAGCAAGTGGCGCGGCAGGCCAAGGC
CTTCCTGTCGCTGGGGAAGATGGCCGAGGTGCAGGTGAGCCGGCGCCGGGCCGGCGGCGCGCAGTCCT
GGCTGTGGTTCGCCACGGTCAAGTCGCTGATCGGCAAGGGCGTCATGCTGGCCGTCAGCCAGGGCCGC
GTGCAGACCAACGTGCTCAACATCGCCAACGAGGACTGCATCAAGGTGGCGGCCGTGCTCAACAACGC
CTTCTACCTGGAGAACCTGCACTTCACCATCGAGGGCAAGGACACGCACTACTTCATCAAGACCACCA
CGCCCGAGAGCGACCTGGGCACGCTGCGGTTGACCAGCGGCCGCAAGGCGCTGGAGAACGGCATCAAC
GTGACGGTGTCGCAGTCCACCACGGTGGTGAACGGCAGGACGCGCAGGTTCGCGGACGTGGAGATGCA
GTTCGGCGCGCTGGCGCTGCACGTGCGCTACGGCATGACCCTGGACGAGGAGAAGGCGCGCATCCTGG
AGCAGGCGCGGCAGCGCGCGCTCGCCCGGGCCTGGGCGCGCGAGCAGCAGCGCGTGCGCGACGGCGAG
GAGGGCGCGCGCCTCTGGACGGAGGGCGAGAAGCGGCAGCTGCTGAGCGCCGGCAAGGTGCAGGGCTA
CGACGGGTACTACGTACTCTCGGTGGAGCAGTACCCCGAGCTGGCCGACAGCGCCAACAACATCCAGT
TCCTGCGGCAGAGCGAGATCGGCAGGAGGTAACGCCCGGGCCGCGCCCGCCGAGCCGCTCACGCCCTG
CCCACATTGTCCTGTGGCACAACCCGAGTGGGACTCTCCAACGCCCAAGAGCCTTCCTCCCGGGGGAA
TGAGACTGCTGTTACGACCCACACCCACACCGCGAAAACAAGGACCGCTTTTTTCCGAATGACCTTAA
AGGTGATCGGCTTTAACGAATATGTTTACATATGCATAGCGCTGCACTCAGTCGGACTGAACGTAGCC
AGAGGAAAAAAAAATCATCAAGGACAAAGGCCTCGACCTGTTGCGCTGGGCCGTCTGTTCCTTCTAGG
CACTGTATTTAACTAACTTTA

| | | | |
|---|---|---|---|
| NOV40a, CG55069-01 | SEQ ID NO: 486 | 2725 aa | MW at 303959.6kD |
| Protein Sequence | | | |

MDVKERRPYCSLTKSRREKERRYTNSSADNEECRVPTQKSYSSSETLKAFDHDSSRLLYGNRVKDLVH
READEFTRQGQNFTLRQLGVCEPATRRGLAFCAEMGLPHRGYSISAGSDADTENEAVMSPEHAMRLWG
RGVKSGRSSCLSSRSNSALTLTDTEHENKSDSENEQPASNQGQSTLQPLPPSHKQHSAQHHPSITSLN
RNSLTNRRNQSPAPPAALPAELQTTPESVQLQDSWVLGSNVPLESRHFLFKTGTGTTPLFSTATPGYT
MASGSVYSPPTRPLPRNTLSRSAFKFKKSSKYCSWKCTALCAVGVSVLLAILLSYFIANHLFGLNWQL
QQTENDTFENGKVNSDTMPTNTVSLPSGDNGKLGGFTQENNTIDSGELDIGRRAIQEIPPGIFWRSQL
FIDQPQFLKFNISLQKDALIGVYGRKKLPPSHTQSSPQYDFVELLDGSRLIAREQRSLLETERAGRQA
RSVSLHEAGFIQYLDSGIWHLAFYNDGKNAEQVSFNTIVIESVVECPRNCHGNGECVSGTCHCFPGFL
GPDCSRAACPVLCSGNGQYSKGRCLCFSGWKGTECDVPTTQCIDPQCGGRGICIMGSCACSSGYKGES
CEEADCIDPGCSNHGVCINGECHCSPGWGGSNCEILKTMCPDQCSGHGTYLQESGSCTCDPNWTGPDC
SNEICSVDCGSHGVCMGGTCRCEEGWTGPACNQRACHPRCAEHGTCKDGKCECSQGWNGEHCTIAHYL
DKIVKDKIGYKEGCPGLCNSNGRCTLDQNGGHCVCQPGWRGAGCDVAMETLCTDSKDNEGDGLIDCMD
PDCCLQSSCQNQPYCRGLPDPQDIISQSLQSPSQQAAKSFYDRISFLIGSDSTHVIPGESPFNKSLAS
VIRGQVLTADGTPLIGVNVSFFHYPEYGYTITRQDGMFDLVANGGASLTLVFERSPFLTQYHTVWIPW
NVFYVMDTLVMEKEENDIPSCDLSGFVRPNPIIVSSPLSTFFRSSPEDSPIIPETQVLHEETTIPGTD
LKLSYLSSRAAGYKSVLKITMTQSIIPFNLMKVHLMVAVVGRLFQKWFPASPNLAYTFIWDKTDAYNQ
KVYGLSEAVVSVGYEYESCLDLTLWEKRTAILQGYELDASNMGGWTLDKHHVLDVQNGILYKGNGENQ
FISQQPPVVSSIMGNGRRRSISCPSCNGQANGNKLLAPVALACGIDGSLYVGDFNYVRRIFPSGNVTS
VLELRNKDFRHSSNPAHRYYLATDPVTGDLYVSDTNTRRIYRPKSLTGAKDLTKNAEVVAGTGEQCLP
FDEARCGDGGKAVEATLMSPKGMAVDKNGLIYFVDGTMIRKVDQNGIISTLLGSNDLTSARPLTCDTS
MHISQVRLEWPTDLAINPMDNSIYVLDNNVVLQITENRQVRIAAGRPMHCQVPGVEYPVGKHAVQTTL
ESATAIAVSYSGVLYITETDEKKINRIRQVTTDGEISLVAGIPSECDCKNDANCDCYQSGDGYAKDAK
LSAPSSLAASPDGTLYIADLGNIRIRAVSKNKPLLNSMNFYEVASPTDQELYIFDINGTHQYTVSLVT
GDYLYNFSYSNDNDITAVTDSNGNTLRIRRDPNRMPVRVVSPDNQVIWLTIGTNGCLKGMTAQGLELV
LFTYHGNSGLLATKSDETGWTTFFDYDSEGRLTNVTFPTGVVTNLHGDMDKAITVDIESSSREEDVSI
TSNLSSIDSFYTMVQDQLRNSYQIGYDGSLRIIYASGLDSHYQTEPHVLAGTANPTVAKRNNTLPGEN
GQNLVEWRFRKEQAQGKVNVFGRKLRVNGRNLLSVDFDRTTKTEKIYDDHRKFLLRIAYDTSGHPTLW
LPSSKLMAVNVTYSSTGQIASIQRGTTSEKVDYDGQGRIVSRVFADGKTWSYTYLEKSMVLLLHSQRQ
YIFEYDMWDRLSAITMPSVARHTMQTIRSIGYYRNIYNPPESNASIITDYNEEGLLLQTAFLGTSRRV
LFKYRRQTRLSEILYDSTRVSFTYDETAGVLKTVNLQSDGFICTIRYRQIGPLIDRQIFRFSEDGMVN
ARFDYSYDNSFRVTSMQGVINETPLPIDLYQFDDISGKVEQFGKFGVIYYDINQIISTAVMTYTKHFD
AHGRIKEIQYEIFRSLMYWITIQYDNMGRVTKREIKIGPFANTTKYAYEYDVDGQLQTVYLNEKIMWR
YNYDLNGNLHLLNPSNSARLTPLRYDLRDRITRLGDVQYRLDEDGFLRQRGTEIFEYSSKGLLTRVYS
KGSGWTVIYRYDGLGRRVSSKTSLGQHLQFFYADLTYPTRITHVYNHSSSEITSLYYDLQGHLFAMEI
SSGDEFYIASDNTGTPLAVFSSNGLMLKQIQYTAYGEIYFDSNIDFQLVIGFHGGLYDPLTKLIHFGE
RDYDILAGRWTTPDIEIWKRIGKDPAPFNLYMFRNNNPASKIHDVKDYITDVNSWLVTFGFHLHNAIP
GFPVPKFDLTEPSYELVKSQQWDDIPPIFGVQQQVARQAKAFLSLGKMAEVQVSRRRAGGAQSWLWFA
TVKSLIGKGVMLAVSQGRVQTNVLNIANEDCIKVAAVLNNAFYLENLHFTIEGKDTHYFIKTTTPESD
LGTLRLTSGRKALENGINVTVSQSTTVVNGRTRRFADVEMQFGALALHVRYGMTLDEEKARILEQARQ
RALARAWAREQQRVRDGEEGARLWTEGEKRQLLSAGKVQGYDGYYVLSVEQYPELADSANNIQFLRQS
EIGRR

| | | |
|---|---|---|
| NOV40b, CG55069-04 | SEQ ID NO: 487 | 1783 bp |
| DNA Sequence | ORF Start: at 7 | ORF Stop: at 778 |

AAGCTTTGTCCCCGAAATTGCCATGGAAATGGAGAATGCGTTTCTGGAACTTGCCATTGTTTTCCAGG
ATTTCTGGGTCCGGATTGTTCAAGAGCCGCCTGTCCAGTGTTATGTAGTGGCAACGGGCAGTACTCCA
AGGGCCGCTGCCTGTGTTTCAGCGGCTGGAAGGGCACCGAGTGTGATGTGCCGACTACCCAGTGTATT
GACCCACAGTGTGGGGGTCGTGGGATTTGTATCATGGGCTCCTGTGCTTGCAACTCAGGATACAAAGG
AGAAAGTTGTGAAGAAGCTGACTGTATAGACCCTGGGTGTTCTAATCATGGTGTGTGTATCCACGGGG
AATGTCACTGCAGTCCAGGATGGGGAGGTAGCAATTGTGAAATACTGAAGACCATGTGTCCAGACCAG
TGCTCCGGCCACGGAACGTATCTTCAAGAAAGTGGCTCCTGCACGTGTGACCCTAACTGGACTGGCCC
AGACTGCTCAAACGAAATATGTTCTGTGGACTGTGGCTCACACGGCGTTTGCATGGGGGGGACGTGTC
GCTGTGAAGAAGGCTGGACGGGCCCAGCCTGTAATCAGAGAGCCTGCCACCCCCGCTGTGCCGAGCAC
GGGACCTGCAAGGATGGCAAGTGTGAATGCAGCCAGGGCTGGAATGGAGAGCACTGCACTATCGAGGG
TTGTCCTGGTCTGTGCAACAGCAATGGAAGATGTACCCTGGACCAAAATGGCTGGCATTGTGTGTGCC
AGCCTGGATGGAGAGGAGCAGGCTGTGACGTCGAC

| | | | |
|---|---|---|---|
| NOV40b, CG55069-04 | SEQ ID NO: 488 | 257 aa | MW at 26866.7kD |
| Protein Sequence | | | |

CPRNCHGNGECVSGTCHCFPGFLGPDCSRAACPVLCSGNGQYSKGRCLCFSGWKGTECDVPTTQCIDP
QCGGRGICIMGSCACNSGYKGESCEEADCIDPGCSNHGVCIHGECHCSPGWGGSNCEILKTMCPDQCS
GHGTYLQESGSCTCDPNWTGPDCSNEICSVDCGSHGVCMGGTCRCEEGWTGPACNQRACHPRCAEHGT
CKDGKCECSQGWNGEHCTIEGCPGLCNSNGRCTLDQNGWHCVCQPGWRGAGCD

| | | |
|---|---|---|
| NOV40c, 248993047 | SEQ ID NO: 489 | 2448 bp |
| DNA Sequence | ORF Start: at 1 | ORF Stop: end of sequence |

GGTACCAACTGGCAGCTACAGCAGACTGAAAATGACACATTTGAGAATGGAAAAGTGAATTCTGATAC
CATGCCAACAAACACTGTGTCATTACCTTCTGGAGACAATGGAAAATTAGGTGGATTTACGCAAGAAA
ATAACACCATAGATTCCGGAGAACTTGATATTGGCCGAAGAGCAATTCAAGAGATTCCTCCCGGGATC
TTCTGGAGATCACAGCTCTTCATTGATCAGCCACAGTTTCTTAAATTCAATATCTCTCTTCAGAAGGA
TGCATTGATTGGAGTATATGGCCGGAAAGGCTTACCGCCTTCCCATACTCAGTATGACTTCGTGGAGC
TCCTGGATGGCAGCAGGCTGATTGCCAGAGAGCAGCGGAGCCTGCTTGAGACGGAGAGAGCCGGGCGG
CAGGCGAGATCCGTCAGCCTTCATGAGGCCGGCTTTATCCAGTACTTGGATTCTGGAATCTGGCATCT
GGCTTTTTATAATGATGGGAAAAATGCAGAGCAGGTGTCTTTTAATACCATTGTTATAGAGTCTGTGG
TGGAATGTCCCCGAAATTGCCATGGAAATGGAGAATGCGTTTCTGGAACTTGCCATTGTTTTCCAGGA
TTTCTGGGTCCGGATTGTTCAAGAGCCGCCTGTCCAGTGTTATGTAGTGGCAACGGGCAGTACTCCAA
GGGCCGCTGCCTGTGTTTCAGCGGCTGGAAGGGCACCGAGTGTGATGTGCCGACTACCCAGTGTATTG
ACCCACAGTGTGGGGGTCGTGGGATTTGTATCATGGGCTCTTGTGCTTGCAACTCAGGATACAAAGGA
GAAAGTTGTGAAGAAGCTGACTGTATAGACCCTGGGTGTTCTAATCATGGTGTGTGTATCCACGGGGA
ATGTCACTGCAGTCCAGGATGGGGAGGTAGCAATTGTGAAATACTGAAGACCATGTGTCCAGACCAGT
GCTCCGGCCACGGAACGTATCTTCAAGAAAGTGGCTCCTGCACGTGTGACCCTAACTGGACTGGCCCA
GACTGCTCAAACGAAATATGTTCTGTGGACTGTGGCTCACACGGCGTTTGCATGGGGGGGACGTGTCG
CTGTGAAGAAGGCTGGACGGGCCCAGCCTGTAATCAGAGAGCCTGCCACCCCCGCTGTGCCGAGCACG
GGACCTGCAAGGATGGCAAGTGTGAATGCAGCCAGGGCTGGAATGGAGAGCACTGCACTATCGAGGGT
TGTCCTGGTCTGTCCAACAGCAATGGAAGATGTACCCTGGACCAAAATGGCTGGCATTGTGTGTGCCA
GCCTGGATGGAGAGGAGCAGGCTGTGACGTAGCCATGGAGACTCTTTGCACAGATAGCAAGGACAATG
AAGGAGATGGACTCATTGACTGCATGGATCCCGATTGCTGCCTACAGAGTTCCTGCCAGAATCAGCCC
TATTGTCGGGGACTGCCGGATCCTCAGGACATCATTAGCCAAAGCCTTCAATCGCCTTCTCAGCAAGC
TGCCAAATCCTTTTATGATCGAATCAGTTTCCTTATAGGATCTGATAGCACCCATGTTATACCTGGAG
AAAGTCCTTTCAATAAGAGCCTTGCATCTGTCATCAGAGGCCAAGTACTGACTGCTGATGGAACTCCA
CTTATTGGAGTAAATGTCTCGTTTTTCCATTACCCAGAATATGGATATACTATTACCCGCCAGGACGG
AATGTTTGACTTGGTGGCAAATGGTGGGGCCTCTCTAACTTTGGTATTTGAACGATCCCCATTCCTCA
CTCAGTATCATACTGTGTGGATTCCATGGAATGTCTTTTATGTGATGGATACCCTAGTCATGAAGAAA
GAAGAGAATGACATTCCCAGCTGTGATCTGAGTGGATTCGTGAGGCCAAATCCCATCATTGTGTCATC
ACCTTTATCCACCTTTTTCAGATCTTCTCCTGAAGACAGTCCCATCATTCCCGAAACACAGGTACTCC
ACGAGGAAACTACAATTCCAGGAACAGATTTGAAACTCTCCTACTTGAGTTCCAGAGCTGCAGGGTAT
AAGTCAGTTCTCAAGATCACCATGACCCAGTCTATTATTCCATTTAATTTAATGAAGGTTCATCTTAT
GGTAGCTGTAGTAGGAAGACTCTTCCAAAAGTGGTTTCCTGCCTCACCAAACTTGGCCTATACTTTCA
TATGGGATAAAACAGATGCATATAATCAGAAAGTCTATGGTCTATCTGAAGCTGTTGTGTCAGTTGGA
TATGAGTATGAGTCGTGTTTGGACCTGACTcTGTGGGAAAAGAGGACTGCCATTCTGCAGGGCTATGA
ATTGGATGCGTCCAACATGGGTGGCTGGACATTAGATAAACATCACGTGCTGGATGTACAGAACGGTA
TACTGTACAAGGGAAACGGGGAAAACCAGTTCATCTCCCAGCAGCCTCCAGTCGTGAGTAGCGTCGAC

| | | | |
|---|---|---|---|
| NOV40c, 248993047 | SEQ ID NO: 490 | 816 aa | MW at 89174.1kD |
| Protein Sequence | | | |

GTNWQLQQTENDTFENGKVNSDTMPTNTVSLPSGDNGKLGGFTQENNTIDSGELDIGRRAIQEIPPGI
FWRSQLFIDQPQFLKFNISLQKDALIGVYGRKGLPPSHTQYDFVELLDGSRLIAREQRSLLETERAGR
QARSVSLHEAGFIQYLDSGIWHLAFYNDGKNAEQVSFNTIVIESVVECPRNCHGNGECVSGTCHCFPG
FLGPDCSRAACPVLCSGNGQYSKGRCLCFSGWKGTECDVPTTQCIDPQCGGRGICIMGSCACNSGYKG
ESCEEADCIDPGCSNHGVCIHGECHCSPGWGGSNCEILKTMCPDQCSGHGTYLQESGSCTCDPNWTGP
DCSNEICSVDCGSHGVCMGGTCRCEEGWTGPACNQRACHPRCAEHGTCKDGKCECSQGWNGEHCTIEG
CPGLSNSNGRCTLDQNGWHCVCQPGWRGAGCDVAMETLCTDSKDNEGDGLIDCMDPDCCLQSSCQNQP
YCRGLPDPQDIISQSLQSPSQQAAKSFYDRISFLIGSDSTHVIPGESPFNKSLASVIRGQVLTADGTP
LIGVNVSFFHYPEYGYTITRQDGMFDLVANGGASLTLVFERSPFLTQYHTVWIPWNVFYVMDTLVMKK
EENDIPSCDLSGFVRPNPIIVSSPLSTFFRSSPEDSPIIPETQVLHEETTIPGTDLKLSYLSSRAAGY
KSVLKITMTQSIIPFNLMKVHLMVAVVGRLFQKWFPASPNLAYTFIWDKTDAYNQKVYGLSEAVVSVG
YEYESCLDLTLWEKRTAILQGYELDASNMGGWTLDKHHVLDVQNGILYKGNGENQFISQQPPVVSSVD

| | | |
|---|---|---|
| NOV40d, 262802488 | SEQ ID NO: 491 | 2519 bp |
| DNA Sequence | ORF Start: at 1 | ORF Stop: TAG at 2515 |

GGTACCAACTGGCAGCTACAGCAGACTGAAAATGACGCATTTGAGAATGGAAAAGTGAATTCTGATAC
CATGCCAACAAACACTGTGTCATTACCTTCTGGAGACAATGGAAAATTAGGTGGATTTACGCAAGAAA
ATAACACCATAGATTCCGGAGAACTTGATATTGGCCGAAGAGCAATTCAAGAGATTCCTCCCGGGATC
TTCTGGAGATCACAGCTCTTCATTGATCAGCCACAGTTTCTTAAATTCAATATCTCTCTTCAGAAGGA
TGCATTGATTGGAGTATATGGCCGGAAAGGCTTACCGCCTTCCCATACTCAGTATGACTTCGTGGAGC
TCCTGGATGGCAGCAGGCTGATTGCCAGAGAGCAGCGGAGCCTGCTTGAGACGGAGAGAGCCGGGCGG
CAGGCGAGATCCGTCAGCCTTCATGAGGCCGGCTTTATCCAGTACTTGGATTCTGGAATCTGGCATCT
GGCTTTTTATAATGATGGGAAAAATGCAGAGCAGGTGTCTTTTAATACCATTGTTATAGAGTCTGTGG
TGGAATGTCCCCGAAATTGCCATGGAAATGGAGAATGCGTTTCTGGAACTTGCCATTGTTTTCCAGGA
TTTCTGGGTCCGGATTGTTCAAGAGCCGCCTGTCCAGTGTTATGTAGTGGCAACGGGCAGTACTCCAA
GGGCCGCTGCCTGTGTTTCAGCGGCTGGAAGGGCACCGAGTGTGATGTGCCGACTACCCAGTGTATTG
ACCCACAGTGTGGGGGTCGTGGGATTTGTATCATGGGCTCCTGTGCTTGCAACTCAGGATACAAAGGA
GAAAGTTGTGAAGAAGCTGACTGTATAGACCCTGGGTGTTCTAATCATGGTGTGTGTATCCACGGGGA
ATGTCACTGCAGTCCAGGATGGGGAGGTAGCAATTGTGAAATACTGAAGACCATGTGTCCAGACCAGT
GCTCCGGCCACGGAACGTATCTTCAAGAAAGTGGCTCCTGCACGTGTGACCCTAACTGGACTGGCCCA
GACTGCTCAAACGAAATATGTTCTGTGGACTGTGGCTCACACGGCGTTTGCATGGGGGGGACGTGCCG
CTGTGAAGAAGGCTGGACGGGCCCAGCCTGTAATCAGAGAGCCTGCCACCCCCGCTGTGCCGAGCACG
GGACCTGCAAGGATGGCAAGTGTGAATGCAGCCAGGGCTGGAATGGAGAGCACTGCACTATCGCTCAC
TATTTGGATAAGATAGTTAAAGACAAGATAGGATATAAAGAGGGTTGTCCTGGTCTGTGCAACAGCAA
TGGAAGATGTACCCTGGACCAAAATGGCTGGCATTGTGCGTGCCAGCCTGGATGGAGAGGAGCAGGCT
GTGACGTAGCCATGGAGACTCTTTGCACAGATAGCAAGGACAATGAAGGAGATGGACTCATTGACTGC
ATGGATCCCGATTGCTGCCTACAGAGTTCCTGCCAGAATCAGCCCTATTGTCGGGGACTGCCGGATCC
TCAGGGCATCATTAGCCAAAGCCTTCAATCGCCTTCTCAGCAAGCTGCCAAATCCTTTTATGATCGAA
TCAGTTTCCTTATAGGATCTGATAGCACCCATGTTATACCTGGAGAAAGTCCTTTCAATAAGAGCCTT
GCATCTGTCATCAGAGGCCAAGTACTGACTGCTGATGGAACTCCACTTATTGGAGTAAATGTCTCGTT
TTTCCATTACCCAGAATATGGATATACTATTACCCGCCAGGACGGAATGTTTGACTTGGTGGCAAATG
GTGGGGCCTCTCTAACTTTGGTATTTGAACGATCCCCATTCCTCACTCAGTATCATACTGTGTGGATT
CCATGGAATGTCTTTTATGTGATGGATACCCTAGTCATGAAGAAAGAAGAGAATGACATTCCCAGCTG
TGATCTGAGTGGATTCGTGAGGCCAAATCCCATCATTGTGTCATCACCTTTATCCACCTTTTTCAGAT
CTTCTCCTGAAGACAGTCCCATCATTCCCGAAACACAGGTACTCCACGAGGAAACTACAATTCCAGGA
ACAGATTTGAAACTCTCCTACTTGAGTTCCAGAGCTGCAGGGTATAAGTCAGTTCTCAAGATCACCAT
GACCCAGTCTATTATTCCATTTAATTTAATGAAGGTTCATCTTATGGTAGCTGTAGTAGGAAGACTCT
TCCAAAAGTGGTTTCCTGCCTCACCAAACTTGGCCTATACTTTCATATGGGATAAAACAGATGCATAT
AATCAGAAAGTCTATGGTCTATCTGAAGCTGTTGTGTCAGTTGGATATGAGTATGAGTCGTGTTTGGA
CCTGACTCTGTGGGAAAAGAGGACTGCCATTCTGCAGGGCTATGAATTGGATGCGTCCAACATGGGTG
GCTGGACATTAGATAAACATCACGTGCTGGATGTACAGAACGGTATACTGTACAAGGGAAACGGGGAA
AACCAGTTCATCTCCCAGCAGCCTCCAGTCGTGAGTAGCGTCGACCCAGCAGCCTCCAGTCGTGAGTA
GCG

| | | | |
|---|---|---|---|
| NOV40d, 262802488 | SEQ ID NO: 492 | 838 aa | MW at 91545.9kD |
| Protein Sequence | | | |

GTNWQLQQTENDAFENGKVNSDTMPTNTVSLPSGDNGKLGGFTQENNTIDSGELDIGRRAIQEIPPGI
FWRSQLFIDQPQFLKFNISLQKDALIGVYGRKGLPPSNTQYDFVELLDGSRLIAREQRSLLETERAGR
QARSVSLHEAGFIQYLDSGIWHLAFYNDGKNAEQVSFNTIvIESVVECPRNCHGNGECVSGTCHCFPG
FLGPDCSRAACPVLCSGNGQYSKGRCLCFSGWKGTECDVPTTQCIDPQCGGRGICIMGSCACNSGYKG
ESCEEADCIDPGCSNHGVCINGECHCSPGWGGSNCEILKTMCPDQCSGHGTYLQESGSCTCDPNWTGP
DCSNEICSVDCGSHGVCMGGTCRCEEGWTGPACNQRACHPRCAEHGTCKDGKCECSQGWNGEHCTIAH
YLDKIVKDKIGYKEGCPGLCNSNGRCTLDQNGWHCACQPGWRGAGCDVAMETLCTDSKDNEGDGLIDC
MDPDCCLQSSCQNQPYCRGLPDPQGIISQSLQSPSQQAAKSFYDRISFLIGSDSTHVIPGESPFNKSL
ASVIRGQVLTADGTPLIGVNVSFFHYPEYGYTITRQDGMFDLVANGGASLTLVFERSPFLTQYHTVWI
PWNVFYVMDTLVMKKEENDIPSCDLSGFVRPNPIIVSSPLSTFFRSSPEDSPIIPETQVLHEETTIPG
TDLKLSYLSSRAAGYKSVLKITMTQSIIPFNLMKVHLMVAVVGRLFQKWFPASPNLAYTFIWDKTDAY
NQKVYGLSEAVVSVGYEYESCLDLTLWEKRTAILQGYELDASNNGGWTLDKMHVLDVQNGILYKGNGE
NQFISQQPPVVSSVDPAASSRE

| | | |
|---|---|---|
| NOV40e, 248993606 | SEQ ID NO: 493 | 2536 bp |
| DNA Sequence | ORF Start: at 1 | ORF Stop: at 2536 |

GGTACCAACTGGCAGCTACAGCAGACTGAAAATGACACATTTGAGAATGGAAAAGTGAATTCTGATAC
CATGCCAACAAACACTGTGTCATTACCTTCTGGAGACAATGGAAAATTAGGTGGATTTACGCAAGAAA
ATAACACCATAGATTCCGGAGAACTTGATATTGGCCGAAGAGCAATTCAAGAGATTCCTCCCGGGATC
TTCTGGAGATCACAGCTCTTCATTGATCAGCCACAGTTTCTTAAATTCAATATCTCTCTTCAGAAGGA
TGCATTGATTGGAGTATATGGCCGGAAAGGCTTACCGCCTTCCCATACTCAGTATGACTTCGTGGAGC
TCCTGGATGGCAGCAGGCTGATTGCCAGAGAGCAGCGGAGCCTGCTTGAGACGGAGAGAGCCGGGCGG
CAGGCGAGATCCGTCAGCCTTCATGAGGCCGGCTTTATCCAGTACTTGGATTCTGGAATCTGGCATCT
GGCTTTTTATAATGATGGGAAAAATGCAGAGCAGGTGTCTTTTAATACCATTGTTATAGAGTCTGTGG
TGGAATGTCCCCGAAATTGCCATGGAAATGGAGAATGCGTTTCTGGAACTTGCCATTGTTTTCCAGGA
TTTCTGGGTCCGGATTGTTCAAGAGCCGCCTGTCCAGTGTTATGTAGTGGCAACGGGCAGTACTCCAA
GGGCCGCTGCCTGTGTTTCAGCGGCTGGAAGGGCACCGAGTGTGATGTGCCGACTACCCAGTGTATTG
ACCCACAGTGTGGGGGTCGTGGGATTTGTATCATGGGCTCTTGTGCTTGCAACTCAGGATACAAAGGA
GAAAGTTGTGAAGAAGCTGACTGTATAGACCCTGGGTGTTCTAATCATGGTGTGTGTATCCACGGGGA
ATGTCACTGCAGTCCAGGATGGGGAGGTAGCAATTGTGAAATACTGAAGACCATGTGTCCAGACCAGT
GCTCCGGCCACGGAACGTATCTTCAAGAAAGTGGCTCCTGCACGTGTGACCCTAACTGGACTGGCCCA
GACTGCTCAAACGAAATATGTTCTGTGGACTGTGGCTCACACGGCGTTTGCATGGGGGGGACGTGTCG
CTGTGAAGAAGGCTGGACGGGCCCAGCCTGTAATCAGAGAGCCTGCCACCCCCGCTGTGCCGAGCACG
GGACCTGCAAGGATGGCAAGTGTGAATGCAGCCAGGGCTGGAATGGAGAGCACTGCACTATCGCTCAC
TATTTGGATAAGATAGTTAAAGAGGGTTGTCCTGGTCTGTGCAACAGCAATGGAAGATGTACCCTGGA
CCAAAATGGCTGGCATTGTGTGTGCCAGCCTGGATGGAGAGGAGCAGGCTGTGACGTAGCCATGGAGA
CTCTTTGCACAGATAGTAAGGACAATGAAGGAGATGGACTCATTGACTGCATGGATCCCGATTGCTGC
CTACAGAGTTCCTGCCAGAATCAGCCCTATTGTCGGGGACTGCCGGATCCTCAGGACATCATTAGCCA
AAGCCTTCAATCGCCTTCTCAGCAAGCTGCCAAATCCTTTTATGATCGAATCAGTTTCCTTATAGGAT
CTGATAGCACCCATGTTATACCTGGAGAAAGTCCTTTCAATAAGAGCCTTGCATCTGTCATCAGAGGC
CAAGTACTGACTGCTGATGGAACTCCACTTATTGGAGTAAATGTCTCGTTTTTCCATTACCCAGAATA
TGGATATACTATTACCCGCCAGGACGGAATGTTTGACTTGGTGGCAAATGGTGGGGCCTCTCTAACTT
TGGTATTTGAACGATCCCCATTCCTCACTCAGTATCATACTGTGTGGATTCCATGGAATGTCTTTTAT
GTGATGGATACCCTAGTCATGAAGAAAGAAGAGAATGACATTCCCAGCTGTGATCTGAGTGGATTCGT
GAGGCCAAATCCCATCATTGTGTCATCACCTTTATCCACCTTTTTCAGATCTTCTCCTGAAGACAGTC
CCATCATTCCCGAAACACAGGTACTCCACGAGGAAACTACAATTCCAGGAACAGATTTGAAACTCTCC
TACTTGAGTTCCAGAGCTGCAGGGTATAAGTCAGTTCTCAAGATCACCATGACCCAGTCTATTATTCC
ATTTAATTTAATGAAGGTTCATCTTATGGTAGCTGTAGTAGGAAGACTCTTCCAAAAGTGGTTTCCTG
CCTCACCAAACTTGGCCTATACTTTCATATGGGATAAAACAGATGCATATAATCAGAAAGTCTATGGT
CTATCTGAAGCTGTTGTGTCAGTTGGATATGAGTATGAGTCGTGTTTGGACCTGACTCTGTGGGAAAA
GAGGACTGCCATTCTGCAGGGCTATGAATTGGATGCGTCCAACATGGGTGGCTGGACATTAGATAAAC
ATCACGTGCTGGATGTACAGAACGGTATACTGTACAAGGGAAACGGGGAAAACCAGTTCATCTCCCAG
CAGCCTCCAGTCGTGAGTAGCGTCGACGCTACACACGACTGGAGGCTGCTGGTCATTTTCAGCTCTGC
AGTAGCTGCCAGTTGGTACC

| | | | |
|---|---|---|---|
| NOV40e, 248993606 | SEQ ID NO: 494 | 845 aa | MW at 92534.0kD |
| Protein Sequence | | | |

GTNWQLQQTENDTFENGKVNSDTNPTNTVSLPSGDNGKIGGFTQENNTIDSGELDIGRRAIQEIPPGI
FWRSQLFIDQPQFLKFNISLQKDALIGVYGRKGLPPSHTQYDFVELLDGSRLIAREQRSLLETERAGR
QARSVSLHEAGFIQYLDSGIWHLAFYNDGKNAEQVSFNTIVIESVVECPRNCHGNGECVSGTCHCFPG
FLGPDCSRAACPVLCSGNGQYSKGRCLCFSGWKGTECDVPTTQCIDPQCGGRGICIMGSCACNSGYKG
ESCEEADCIDPGCSNHGVCIHGECHCSPGWGGSNCEILKTMCPDQCSGHGTYLQESGSCTCDPNWTGP
DCSNEICSVDCGSHGVCMGGTCRCEEGWTGPACNQRACHPRCAEHGTCKDGKCECSQGWNGEHCTIAH
YLDKIVKEGCPGLCNSNGRCTLDQNGWHCVCQPGWRGAGCDVAMETLCTDSKDNEGDGLIDCMDPDCC
LQSSCQNQPYCRGLPDPQDIISQSLQSPSQQAAKSFYDRISFLIGSDSTHVIPGESPFNKSLASVIRG
QVLTADGTPLIGVNVSFFHYPEYGYTITRQDGNFDLVANGGASLTLVFERSPFLTQYHTVWIPWNVFY
VMDTLVMKKEENDIPSCDLSGFVRPNPIIVSSPLSTFFRSSPEDSPIIPETQVLHEETTIPGTDLKLS
YLSSRAAGYKSVLKITMTQSIIPFNLMKVHLMVAVVGRLFQKWFPASPNLAYTFIWDKTDAYNQKVYG
LSEAVVSVGYEYESCLDLTLWEKRTAILQGYELDASNMGGWTLDKHHVLDVQNGILYKGNGENQFISQ
QPPVVSSVDATHDWRLLVIFSSAVAASWY

| | | |
|---|---|---|
| NOV40f, 314411758 | SEQ ID NO: 495 | 2500 bp |
| DNA Sequence | ORF Start: at 2 | ORF Stop: end of sequence |

CACCAAGCTTAACTGGCAGCTACAGCAGACTGAAAATGACGCATTTGAGAATGGAAAAGTGAATTCTG
ATACCATGCCAACAAACACTGTGTCATTACCTTCTGGAGACAATGGAAAATTAGGTGGATTTACGCAA
GAAAATAACACCATAGATTCCGGAGAACTTGATATTGGCCGAAGAGCAATTCAAGAGATTCCTCCCGG
GATCTTCTGGAGATCACAGCTCTTCATTGATCAGCCACAGTTTCTTAAATTCAATATCTCTCTTCAGA
AGGATGCATTGATTGGAGTATATGGCCGGAAAGGCTTACCGCCTTCCCATACTCAGTATGACTTCGTG
GAGCTCCTGGATGGCAGCAGGCTGATTGCCAGAGAGCAGCGGAGCCTGCTTGAGACGGAGAGAGCCGG
GCGGCAGGCGAGATCCGTCAGCCTTCATGAGGCCGGCTTTATCCAGTACTTGGATTCTGGAATCTGGC
ATCTGGCTTTTTATAATGATGGGAAAAATGCAGAGCAGGTGTCTTTTAATACCATTGTTATAGAGTCT
GTGGTGGAATGTCCCCGAAATTGCCATGGAAATGGAGAATGCGTTTCTGGAACTTGCCATTGTTTTCC
AGGATTTCTGGGTCCGGATTGTTCAAGAGCCGCCTGTCCAGTGTTATGTAGTGGCAACGGGCAGTACT
CCAAGGGCCGCTGCCTGTGTTTCAGCGGCTGGAAGGGCACCGAGTGTGATGTGCCGACTACCCAGTGT
ATTGACCCACAGTGTGGGGGTCGTGGGATTTGTATCATGGGCTCCTGTGCTTGCAACTCAGGATACAA
AGGAGAAAGTTGTGAAGAAGCTGACTGTATAGACCCTGGGTGTTCTAATCATGGTGTGTGTATCCACG
GGGAATGTCACTGCAGTCCAGGATGGGGAGGTAGCAATTGTGAAATACTGAAGACCATGTGTCCAGAC
CAGTGCTCCGGCCACGGAACGTATCTTCAAGAAAGTGGCTCCTGCACGTGTGACCCTAACTGGACTGG
CCCAGACTGCTCAAACGAAATATGTTCTGTGGACTGTGGCTCACACGGCGTTTGCATGGGGGGGACGT
GCCGCTGTGAAGAAGGCTGGACGGGCCCAGCCTGTAATCAGAGAGCCTGCCACCCCCGCTGTGCCGAG
CACGGGACCTGCAAGGATGGCAAGTGTGAATGCAGCCAGGGCTGGAATGGAGAGCACTGCACTATCGC
TCACTATTTGGATAAGATAGTTAAAGACAAGATAGGATATAAAGAGGGTTGTCCTGGTCTGTGCAACA
GCAATGGAAGATGTACCCTGGACCAAAATGGCTGGCATTGTGCGTGCCAGCCTGGATGGAGAGGAGCA
GGCTGTGACGTAGCCATGGAGACTCTTTGCACAGATAGCAAGGACAATGAAGGAGATGGACTCATTGA
CTGCATGGATCCCGATTGCTGCCTACAGAGTTCCTGCCAGAATCAGCCCTATTGTCGGGGACTGCCGG
ATCCTCAGGGCATCATTAGCCAAAGCCTTCAATCGCCTTCTCAGCAAGCTGCCAAATCCTTTTATGAT
CGAATCAGTTTCCTTATAGGATCTGATAGCACCCATGTTATACCTGGAGAAAGTCCTTTCAATAAGAG
CCTTGCATCTGTCATCAGAGGCCAAGTACTGACTGCTGATGGAACTCCACTTATTGGAGTAAATGTCT
CGTTTTTCCATTACCCAGAATATGGATATACTATTACCCGCCAGGACGGAATGTTTGACTTGGTGGCA
AATGGTGGGGCCTCTCTAACTTTGGTATTTGAACGATCCCCATTCCTCACTCAGTATCATACTGTGTG
GATTCCATGGAATGTCTTTTATGTGATGGATACCCTAGTCATGAAGAAAGAAGAGAATGACATTCCCA
GCTGTGATCTGAGTGGATTCGTGAGGCCAAATCCCATCATTGTGTCATCACCTTTATCCACCTTTTTC
AGATCTTCTCCTGAAGACAGTCCCATCATTCCCGAAACACAGGTACTCCACGAGGAAACTACAATTCC
AGGAACAGATTTGAAACTCTCCTACTTGAGTTCCAGAGCTGCAGGGTATAAGTCAGTTCTCAAGATCA
CCATGACCCAGTCTATTATTCCATTTAATTTAATGAAGGTTCATCTTATGGTAGCTGTAGTAGGAAGA
CTCTTCCAAAAGTGGTTTCCTGCCTCACCAAACTTGGCCTATACTTTCATATGGGATAAAACAGATGC
ATATAATCAGAAAGTCTATGGTCTATCTGAAGCTGTTGTGTCAGTTGGATATGAGTATGAGTCGTGTT
TGGACCTGACTCTGTGGGAAAAGAGGACTGCCATTCTGCAGGGCTATGAATTGGATGCGTCCAACATG
GGTGGCTGGACATTAGATAAACATCACGTGCTGGATGTACAGAACGGTATACTGTACAAGGGAAACGG
GGAAAACCAGTTCATCTCCCAGCAGCCTCCAGTCGTGAGTAGCCTCGAGGGC

| | | | |
|---|---|---|---|
| NOV40f, 314411758 | SEQ ID NO: 496 | 833 aa | MW at 91116.5kD |
| Protein Sequence | | | |

TKLNWQLQQTENDAFENGKVNSDTMPTNTVSLPSGDNGKLGGFTQENNTIDSGELDIGRRAIQEIPPG
IFWRSQLFIDQPQFLKFNISLQKDALIGVYGRKGLPPSHTQYDFVELLDGSRLIAREQRSLLETERAG
RQARSVSLHEAGFIQYLDSGIWHLAFYNDGKNAEQVSFNTIVIESVVECPRNCHGNGECVSGTCHCFP
GFLGPDCSRAACPVLCSGNGQYSKGRCLCFSGWKGTECDVPTTQCIDPQCGGRGICIMGSCACNSGYK
GESCEEADCIDPGCSNHGVCIHGECHCSPGWGGSNCEILKTMCPDQCSGHGTYLQESGSCTCDPNWTG
PDCSNEICSVDCGSHGVCMGGTCRCEEGWTGPACNQRACHPRCAEHGTCKDGKCECSQGWNGEHCTIA
HYLDKIVKDKIGYKEGCPGLCNSNGRCTLDQNGWHCACQPGWRGAGCDVANETLCTDSKDNEGDGLID
CMDPDCCLQSSCQNQPYCRGLPDPQGIISQSLQSPSQQAAKSFYDRISFLIGSDSTHVIPGESPFNKS
LASVIRGQVLTADGTPLIGVNVSFFHYPEYGYTITRQDGMFDLVANGGASLTLVFERSPFLTQYHTVW
IPWNVFYVMDTLVMKKEENDIPSCDLSGFVRPNPIIVSSPLSTFFRSSPEDSPIIPETQVLHEETTIP
GTDLKLSYLSSRAAGYKSVLKITMTQSIIPFNLMKVHLMVAVVGRLFQKWFPASPNLAYTFIWDKTDA
YNQKVYGLSEAVVSVGYEYESCLDLTLWEKRTAILQGYELDASNNGGWTLDKHHVLDVQNGILYKGNG
ENQFISQQPPVVSSLEG

| | | |
|---|---|---|
| NOV40g, 319067006 | SEQ ID NO: 497 | 730 bp |
| DNA Sequence | ORF Start: at 2 | ORF Stop: end of sequence |

CACCTCGCGAACAGAACCTTCTTACGAACTTGTGAAGAGTCAGCAGTGGGATGATATACCGCCCATCT
TCGGAGTCCAGCAGCAAGTGGCGCGGCAGGCCAAGGCCTTCCTGTCGCTGGGGAAGATGGCCGAGGTG
CAGGTGAGCCGGCGCCGGGCCGGCGGCGCGCAGTCCTGGCTGTGGTTCGCCACGGTCAAGTCGCTGAT
CGGCAAGGGCGTCATGCTGGCCGTCAGCCAGGGCCGCGTGCAGACCAACGTGCTCAACATCGCCAACG
AGGACTGCATCAAGGTGGCGGCCGTGCTCAACAACGCCTTCTACCTGGAGAACCTGCACTTCACCATC
GAGGGCAAGGACACGCACTACTTCATCAAGACCACCACGCCCGAGAGCGACCTGGGCACGCTGCGGTT
GACCAGCGGCCGCAAGGCGCTGGAGAACGGCATCAACGTGACGGTGTCGCAGTCCACCACGGTGGTGA
ACGGCAGGACGCGCAGGTTCGCGGACGTGGAGATGCAGTTCGGCGCGCTGGCGCTGCACGTGCGCTAC
GGCATGACCCTGGACGAGGAGAAGGCGCGCATCCTGGAGCAGGCGCAGCAGCGCGTGCGCGACGGCAA
GGTGCAGGGCTACGACGGGTACTACGTACTCTCGGTGGAGCAGTACCCCGAGCTGGCCGACAGCGCCA
ACAACATCCAGTTCCTGCGGCAGAGCGAGATCGGCAGGAGGGTCGACGGC

| | | | |
|---|---|---|---|
| NOV40g, 319067006 | SEQ ID NO: 498 | 243 aa | MW at 27175.5kD |
| Protein Sequence | | | |

TSRTEPSYELVKSQQWDDIPPIFGVQQQVARQAKAFLSLGKMAEVQVSRRRAGGAQSWLWFATVKSLI
GKGVMLAVSQGRVQTNVLNIANEDCIKVAAVLNNAFYLENLHFTIEGKDTHYFIKTTTPESDLGTLRL
TSGRKALENGINVTVSQSTTVVNGRTRRFADVEMQFGALALHVRYGMTLDEEKARILEQAQQRVRDGK
VQGYDGYYVLSVEQYPELADSANNIQFLRQSEIGRRVDG

| | | |
|---|---|---|
| NOV40h, 319506086 | SEQ ID NO: 499 | 1178 bp |
| DNA Sequence | ORF Start: at 78 | ORF Stop: end of sequence |

CACCTCGCGACCAATGAGACTTGAACCCTGAGCCTAAGTTGTCACCAGCAGGACTGATGTGCACACAG
AAGGAATGAAGTATGGATGTGAAAGAACGCAGGCCTTACTGCTCCCTGACCAAGAGCAGACGAGAGAA
GGAACGGCGCTACACAAATTCCTCCGCAGACAATGAGGAGTGCCGGGTACCCACACAGAAGTCCTACA
GTTCCAGCGAGACATTGAAAGCTTTTGATCATGATTCCTCGCGGCTGCTTTACGGCAACAGAGTGAAG
GATTTGGTTCACAGAGAAGCAGACGAGTTCACTAGACAAGAGCAACCTGCAAGCAATCAAGGCCAGTC
TACCCTGCAGCCCTTGCCGCCTTCCCATAAGCAGCACTCTGCACAGCATCATCCATCCATCACTTCTC
TCAACAGAAACTCCCTGACCAATAGAAGGAACCAGAGTCCGGCCCCGCCGGCTGCTTTGCCCGCCGAG
CTGCAAACCACACCCGAGTCCGTCCAGCTGCAGGACAGCTGGGTCCTTGGCAGTAATGTACCACTGGA
AAGCAGGCATTTCCTATTCAAAACAGGAACAGGTACAACGCCACTGTTCAGTACTGCAACCCCAGGAT
ACACAATGGCATCTGGCTCTGTTTATTCACCACCTACTCGGCCACTACCTAGAAACACCCTATCAAGA
AGTGCTTTTAAATTCAAGAAGTCTTCAAAGTACTGTAGCTGGAAATGCACTGCACTGTGTGCCGTAGG
GGTCTCGGTGCTCCTGGCAATACTCCTGTCTTATTTTATAGCAATGCATCTCTTTGOCCTCAACTGGC
AGCTACAGCAGACTGAAAATGACACATTTGAGAATGGAAAAGTGAATTCTGATACCATGCCAACAAAC
ACTGTGTCATTACCTTCTGGAGACAATGGAAAATTAGGTGGATTTACGCAAGAAAATAACACCATAGA
TTCCGGAGAACTTGATATTGGCCGAAGAGCAATTCAAGAGATTCCTCCCGGGATCTTCTGGAGATCAC
AGCTCTTCATTGATCAGCCACAGTTTCTTAAATTCAATATCTCTCTTCAGAAGGATGCATTGATTGGA
GTATATGGCCGGAAAGGCTTACCGCCTTCCCATACTCAGTATGACTTCGTGGAGCTCCTGGATGGCAG
CAGGCTGATTGCCCTCGAGGGC

| | | | |
|---|---|---|---|
| NOV40h, 319506086 | SEQ ID NO: 500 | 367 aa | MW at 40968.5kD |
| Protein Sequence | | | |

SMDVKERRPYCSLTKSRREKERRYTNSSADNEECRVPTQKSYSSSETLKAFDHDSSRLLYGNRVKDLV
HREADEFTRQEQPASNQGQSTLQPLPPSHKQHSAQHHPSITSLNRNSLTNRRNQSPAPPAALPAELQT
TPESVQLQDSWVLGSNVPLESRHFLFKTGTGTTPLFSTATPGYTMASGSVYSPPTRPLPRNTLSRSAF
KFKKSSKYCSWKCTALCAVGVSVLLAILLSYFIAMHLFGLNWQLQQTENDTFENGKVNSDTMPTNTVS
LPSGDNGKLGGFTQENNTIDSGELDIGRRAIQEIPPGIFWRSQLFIDQPQFLKFNISLQKDALIGVYG
RKGLPPSHTQYDFVELLDGSRLIALEG

| | | |
|---|---|---|
| NOV40i, CG55069-03 | SEQ ID NO: 501 | 8473 bp |
| DNA Sequence | ORF Start: ATG at 258 | ORF Stop: TAA at 8142 |

TTGACAGAAAAAGGCAGTAAACGGGGAATCTCTTTTTTTGAATAAAGAAGAAGAAGAAATAAAGTACC
TGTCATCTTGACAAGTGGCGGAGCGGAGGAGTCAAGGATTATAAATGATCACAGCCAGGTCCAGCTCG
CCCCGTGATTGGGCTCTCCCGCGATCTGCACCGGGGGAAGCGCATGAGAGGCCAATGAGACTTGAACC
CTGAGCCTAAGTTGTCACCAGCAGGACTGATGTGCACACAGAAGGAATGAAGTATGGATGTGAAAGAA
CGCAGGCCTTACTGCTCCCTGACCAAGAGCAGACGAGAGAAGGAACGGCGCTACACAAATTCCTCCGC
AGACAATGAGGAGTGCCGGGTACCCACACAGAAGTCCTACAGTTCCAGCGAGACATTGAAAGCTTTTG
ATCATGATTCCTCGCGGCTGCTTTACGGCAACAGAGTGAAGGATTTGGTTCACAGAGAAGCAGACGAG
TTCACTAGACAAGAGCAACCTGCAAGCAATCAAGGCCAGTCTACCCTGCAGCCCTTGCCGCCTTCCCA
TAAGCAGCACTCTGCACAGCATCATCCATCCATCACTTCTCTCAACAGAAACTCCCTGACCAATAGAA
GGAACCAGAGTCCGGCCCCGCCGGCTGCTTTGCCCGCCGAGCTGCAAACCACACCCGAGTCCGTCCAG
CTGCAGGACAGCTGGGTCCTTGGCAGTAATGTACCACTGGAAAGCAGGCATTTCCTATTCAAAACAGG
AACAGGTACAACGCCACTGTTCAGTACTGCAACCCCAGGATACACAATGGCATCTGGCTCTGTTTATT
CACCACCTACTCGGCCACTACCTAGAAACACCCTATCAAGAAGTGCTTTTAAATTCAAGAAGTCTTCA
AAGTACTGTAGCTGGAAATGCACTGCACTGTGTGCCGTAGGGGTCTCGGTGCTCCTGGCAATACTCCT
GTCTTATTTTATAGCAATGCATCTCTTTGGCCTCAACTGGCAGCTACAGCAGACTGAAAATGACACAT
TTGAGAATGGAAAAGTGAATTCTGATACCATGCCAACAAACACTGTGTCATTACCTTCTGGAGACAAT
GGAAAATTAGGTGGATTTACGCAAGAAAATAACACCATAGATTCCGGAGAACTTGATATTGGCCGAAG
AGCAATTCAAGAGATTCCTCCCGGGATCTTCTGGAGATCACAGCTCTTCATTGATCAGCCACAGTTTC
TTAAATTCAATATCTCTCTTCAGAAGGATGCATTGATTGGAGTATATGGCCGGAAAGGCTTACCGCCT
TCCCATACTCAGTATGACTTCGTGGAGCTCCTGGATGGCAGCAGGCTGATTGCCAGAGAGCAGCGGAG
CCTGCTTGAGACGGAGAGAGCCGGGCGGCAGGCGAGATCCGTCAGCCTTCATGAGGCCGGCTTTATCC
AGTACTTGGATTCTGGAATCTGGCATCTGGCTTTTTATAATGATGGGAAAAATGCAGAGCAGGTGTCT
TTTAATACCATTGTTATAGAGTCTGTGGTGGAATGTCCCCGAAATTGCCATGGAAATGGAGAATGCGT
TTCTGGAACTTGCCATTGTTTTCCAGGATTTCTGGGTCCGGATTGTTCAAGAGCCGCCTGTCCAGTGT
TATGTAGTGGCAACGGGCAGTACTCCAAGGGCCGCTGCCTGTGTTTCAGCGGCTGGAAGGGCACCGAG
TGTGATGTGCCGACTACCCAGTGTATTGACCCACAGTGTGGGGGTCGTGGGATTTGTATCATGGGCTC
TTGTGCTTGCAACTCAGGATACAAAGGAAAAAGTTGTGAAGAAGCTGACTGTATAGACCCTGGGTGTT
CTAATCATGGTGTGTGTATCCACGGGGAATGTCACTGCAGTCCAGGATGGGGAGGTAGCAATTGTGAA
ATACTGAAGACCATGTGTCCAGACCAGTGCTCCGGCCACGGAACGTATCTTCAAGAAAGTGGCTCCTG
CACGTGTGACCCTAACTGGACTGGCCCAGACTGCTCAAACGAAATATGTTCTGTGGACTGTGGCTCAC
ACGGCGTTTGCATGGGGGGGACGTGTCGCTGTGAAGAAGGCTGGACGGGCCCAGCCTGTAATCAGAGA
GCCTGCCACCCCCGCTGTGCCGAGCACGGGACCTGCAAGGATGGCAAGTGTGAATGCAGCCAGGGCTG
GAATGGAGAGCACTGCACTATCGCTCACTATTTGGATAAGATAGTTAAAGACAAGATAGGATATAAAG
AGGGTTGTCCTGGTCTGTGCAACAGCAATGGAAGATGTACCCTGGACCAAAATGGCGGACATTGTGTG
TGCCAGCCTGGATGGAGAGGAGCAGGCTGTGACGTAGCCATGGAGACTCTTTGCACAGATAGCAAGGA
CAATGAAGGGGATGGACTCATTGACTGCATGGATCCCGATTGCTGCCTACAGAGTTCCTGCCAGAATC
AGCCCTATTGTCGGGGACTGCCGGATCCTCAGGACATCATTAGCCAAAGCCTTCAATCGCCTTCTCAG
CAAGCTGCCAAATCCTTTTATGATCGAATCAGTTTCCTTATAGGATCTGATAGCACCCATGTTATACC
TGGAGAAAGTCCTTTCAATAAGAGCCTTGCATCTGTCATCAGAGGCCAAGTACTGACTGCTGATGGAA
CTCCACTTATTGGAGTAAATGTCTCGTTTTTCCATTACCCAGAATATGGATATACTATTACCCGCCAG
GACGGAATGTTTGACTTGGTGGCAAATGGTGGGGCCTCTCTAACTTTGGTATTTGAACGATCCCCATT
CCTCACTCAGTATCATACTGTGTGGATTCCATGGAATGTCTTTTATGTGATGGATACCCTAGTCATGG
AGAAAGAAGAGAATGACATTCCCAGCTGTGATCTGAGTGGATTCGTGAGGCCAAATCCCATCATTGTG
TCATCACCTTTATCCACCTTTTTCAGATCTTCTCCTGAAGACAGTCCCATCATTCCCGAAACACAGGT
ACTCCACGAGGAAACTACAATTCCAGGAACAGATTTGAAACTCTCCTACTTGAGTTCCAGAGCTGCAG
GGTATAAGTCAGTTCTCAAGATCACCATGACCCAGTCTATTATTCCATTTAATTTAATGAAGGTTCAT
CTTATGGTAGCTGTAGTAGGAAGACTCTTCCAAAAGTGGTTTCCTGCCTCACCAAACTTGGCCTATAC
TTTCATATGGGATAAAACAGATGCATATAATCAGAAAGTCTATGGTCTATCTGAAGCTGTTGTGTCAG
TTGGATATGAGTATGAGTCGTGTTTGGACCTGACTCTGTGGGAAAAGAGGACTGCCATTCTGCAGGGC
TATGAATTGGATGCGTCCAACATGGGTGGCTGGACATTAGATAAACATCACGTGCTGGATGTACAGAA
CGGTATACTGTACAAGGGAAACGGGGAAAACCAGTTCATCTCCCAGCAGCCTCCAGTCGTGAGTAGCA
TCATGGGCAATGGGCGAAGGCGCAGCATTTCCTGCCCCAGTTGCAATGGTCAAGCTGATGGTAACAAG
TTACTGGCCCCAGTGGCGCTAGCTTGTGGGATCGATGGCAGTCTGTACGTAGGCGATTTCAACTACGT
GCGGCGGATATTCCCTTCTGGAAATGTAACAAGTGTCTTAGAACTAAGAAATAAAGATTTTAGACATA
GCAGCAACCCAGCTCATAGATACTACCTTGCAACGGATCCAGTCACGGGAGATCTGTACGTTTCTGAC
ACAAACACCCGCAGAATTTATCGCCCAAAGTCACTTACGGGGGCAAAAGACTTGACTAAAAATGCAGA
AGTCGTCGCAGGGACAGGGGAGCAATGCCTTCCGTTTGACGAGGCGAGATGTGGGGATGGAGGGAAGG
CCGTGGAAGCCACACTCATGAGTCCCAAAGGAATGGCAGTTGATAAGAATGGATTAATCTACTTTGTT
GATGGAACCATGATTAGGAAAGTTGACCAAAATGGAATCATATCAACTCTTCTGGGCTCTAACGATTT
GACTTCAGCCAGACCTTTAACTTGTGACACCAGCATGCACATCAGCCAGGTACGTCTGGAATGGCCCA
CTGACCTAGCCATTAACCCTATGGATAACTCCATTTATGTCCTGGATAATAATGTAGTTTTACAGATC
ACTGAAAATCGTCAAGTTCGCATTGCTGCTGGACGGCCCATGCACTGTCAGGTTCCCGGAGTGGAATA
TCCTGTGGGGAAGCACGCGGTGCAGACAACACTGGAATCAGCCACTGCCATTGCTGTGTCCTACAGTG
GGGTCCTGTACATTACTGAAACTGATGAGAAGAAAATTAACCGGATAAGGCAGGTCACAACAGATGGA
GAAATCTCCTTAGTGGCCGGAATACCTTCAGAGTGTGACTGCAAAAATGATGCCAACTGTGACTGTTA
CCAGAGTGGAGATGGCTACGCCAAGGATGCCAAACTCAGTGCCCCATCCTCCCTGGCTGCTTCTCCAG
ATGGTACACTGTATATTGCAGATCTAGGGAATATCCGGATCCGGGCTGTGTCAAAGAATAAGCCTTTA
CTTAACTCTATGAACTTCTATGAAGTTGCGTCTCCAACTGATCAAGAACTCTACATCTTTGACATCAA
TGGTACTCACCAATATACTGTAAAGTTTAGTGCTGGTGATTACCTTTACAATTTTAGCTACAGCAATG
ACAATGATATTACTGCTGTGACAGACAGCAATGGCAACACCCTTAGAATTAGACGGGACCCAAATCGC
ATGCCAGTTCGAGTGGTGTCTCCTGATAACCAAGTGATATGGTTGACAATAGGAACAAATGGATGTTT
GAAAGGCATGACTGCTCAAGGACTGGAATTAGTTTTGTTTACTTACCATGGCAATAGTGGCCTTTTAG
CCACTAAAAGTGATGAAACTGGATGGACAACGTTTTTTGACTATGACAGTGAAGGTCGTCTGACAAAT
GTTACGTTTCCAACTGGAGTGGTCACAAACCTGCATGGGGACATGGACAAGGCTATCACAGTGGACAT
TGAGTCATCTAGCCGAGAAGAAGATGTCAGCATCACTTCAAATCTGTCCTCGATCGATTCTTTCTACA
CCATGGTTCAAGATCAGTTAAGAAACAGCTACCAGATTGGTTATGACGGCTCCCTCAGAATTATCTAC
GCCAGTGGCCTGGACTCACACTACCAAACAGAGCCGCACGTTCTGGCTGGCACCGCTAATCCGACGGT
TGCCAAAAGAAACATGACTTTGCCTGGCGAGAACGGTCAAAACTTGGTGGAATGGAGATTCCGAAAAG
AGCAAGCCCAAGGGAAAGTCAATGTCTTTGGCCGCAAGCTCAGGGTTAATGGCAGAAACCTCCTTTCA
GTTGACTTTGATCGAACAACAAAGACAGAAAAGATCTATGACGACCACCGTAAATTTCTACTGAGGAT
CGCCTACGACACGTCTGGGCACCCGACTCTCTGGCTGCCAAGCAGCAAGCTGATGGCCGTCAATGTCA
CCTATTCATCCACAGGTCAAATTGCCAGCATCCAGCGAGGCACCACTAGCGAGAAAGTAGATTATGAC
GGACAGGGGAGGATCGTGTCTCGGGTCTTTGCTGATGGTAAAACATGGAGTTACACATATTTAGAAAA
GTCCATGGTTCTTCTGCTTCATAGCCAGCGGCAGTACATCTTCGAATACGATATGTGGGACCGCCTGT
CTGCCATCACCATGCCCAGTGTGGCTCGCCACACCATGCAGACCATCCGATCCATTGGCTACTACCGC
AACATATACAACCCCCCGGAAAGCAACGCCTCCATCATCACGGACTACAACGAGGAAGGGCTGCTTCT
ACAAACAGCTTTCTTGGGTACAAGTCGGAGGGTCTTATTCAAATACAGAAGGCAGACTAGGCTCTCAG
AAATTTTATATGATAGCACAAGAGTCAGTTTTACCTATGATGAAACAGCAGGAGTCCTAAAGACAGTA
AACCTCCAGAGTGATGGTTTTATTTGCACCATTAGATACAGGCAAATTGGTCCCCTGATTGACAGGCA
GATTTTCCGCTTTAGTGAAGATGGGATGGTAAATGCAAGATTTGACTATAGCTATGACAACAGCTTTC
GAGTGACCAGCATGCAGGGTGTGATCAATGAAACGCCACTGCCTATTGATCTGTATCAGTTTGATGAC
ATTTCTGGCAAAGTTGAGCAGTTTGGAAAGTTTGGAGTTATATATTATGATATTAACCAGATCATTTC
TACAGCTGTAATGACCTATACGAAGCACTTTGATGCTCATGGCCGTATCAAGGAGATTCAATATGAGA
TATTCAGGTCGCTCATGTACTGGATTACAATTCAGTATGATAACATGGGTCGGGTAACCAAGAGAGAG
ATTAAAATAGGGCCCTTTGCCAACACCACCAAATATGCTTATGAATATGATGTTGATGGACAGCTCCA
AACAGTTTACCTCAATGAAAAGATAATGTGGCGGTACAACTACGATCTGAATGGAAACCTCCATTTAC
TGAACCCAAGTAACAGTGCGCGTCTGACACCCCTTCGCTATGACCTGCGAGACAGAATCACTCGACTG
GGTGATGTTCAATATCGGTTGGATGAAGATGGTTTCCTACGTCAAAGGGGCACGGAAATCTTTGAATA
TAGCTCCAAGGGGCTTCTAACTCGAGTTTACAGTAAAGGCAGTGGCTGGACAGTGATCTACCGTTATG
ACGGCCTGGGAAGGCGTGTTTCTAGCAAAACCAGTCTAGGACAGCACCTGCAGTTTTTTTATGCTGAC
TTAACTTATCCCACTAGGATTACTCATGTCTACAACCATTCGAGTTCAGAAATTACCTCCCTGTATTA
TGATCTCCAAGGACATCTTTTTGCCATGGAAATCAGCAGTGGGGATGAATTCTATATTGCATCGGATA
ACACAGGGACACCACTGGCTGTGTTCAGTAGCAATGGGCTTATGCTGAAACAGATTCAGTACACTGCA
TATGGGGAAATCTATTTTGACTCTAATATTGACTTTCAACTGGTAATTGGATTTCATGGTGGCCTGTA
TGACCCACTCACCAAATTAATCCACTTTGGAGAAAGAGATTATGACATTTTGGCAGGACGGTGGACAA
CACCTGACATAGAAATCTGGAAAAGAATTGGGAAGGACCCAGCTCCTTTTAACTTGTACATGTTTAGG
AATAACAACCCTGCAAGCAAAATCCATGACGTGAAAGATTACATCACAGATGTTAACAGCTGGCTGGT
GACATTTGGTTTCCATCTGCACAATGCTATTCCTGGATTCCCTGTTCCCAAATTTGATTTAACAGAAC
CTTCTTACGAACTTGTGAAGAGTCAGCAGTGGGATGATATACCGCCCATCTTCGGAGTCCAGCAGCAA
GTGGCGCGGCAGGCCAAGGCCTTCCTGTCGCTGGGGAAGATGGCCGAGGTGCAGGTGAGCCGGCGCCG
GGCCGGCGGCGCGCAGTCCTGGCTGTGGTTCGCCACGGTCAAGTCGCTGATCGGCAAGGGCGTCATGC
TGGCCGTCAGCCAGGGCCGCGTGCAGACCAACGTGCTCAACATCGCCAACGAGGACTGCATCAAGGTG
GCGGCCGTGCTCAACAACGCCTTCTACCTGGAGAACCTGCACTTCACCATCGAGGGCAAGGACACGCA
CTACTTCATCAAGACCACCACGCCCGAGAGCGACCTGGGCACGCTGCGGTTGACCAGCGGCCGCAAGG
CGCTGGAGAACGGCATCAACGTGACGGTGTCGCAGTCCACCACGGTGGTGAACGGCAGGACGCGCAGG
TTCGCGGACGTGGAGATGCAGTTCGGCGCGCTGGCGCTGCACGTGCGCTACGGCATGACCCTGGACGA
GGAGAAGGCGCGCATCCTGGAGCAGGCGCGGCAGCGCGCGCTCGCCCGGGCCTGGGCGCGCGAGCAGC
AGCGCGTGCGCGACGGCGAGGAGGGCGCGCGCCTCTGGACGGAGGGCGAGAAGCGGCAGCTGCTGAGC
GCCGGCAAGGTGCAGGGCTACGACGGGTACTACGTACTCTCGGTGGAGCAGTACCCCGAGCTGGCCGA
CAGCGCCAACAACATCCAGTTCCTGCGGCAGAGCGAGATCGGCAGGAGGTAACGCCCGGGCCGCGCCC
GCCGAGCCGCTCACGCCCTGCCCACATTGTCCTGTGGCACAACCCGAGTGGGACTCTCCAACGCCCAA
GAGCCTTCCTCCCGGGGGAATGAGACTGCTGTTACGACCCACACCCACACCGCGAAAACAAGGACCGC
TTTTTTCCGAATGACCTTAAAGGTGATCGGCTTTAACGAATATGTTTACATATGCATAGCGCTGCACT
CAGTCGGACTGAACGTAGCCAGAGGAAAAAAAAATCATCAAGGACAAAGGCCTCGACCTGTTGCGCTG
GGCCGTCTGTTCCTTCTAGGCACTGTATTTAACTAACTTTA

| | | | |
|---|---|---|---|
| NOV40i, CG55069-03 | SEQ ID NO: 502 | 2628 aa | MW at 293503.3kD |
| Protein Sequence | | | |

MDVKERRPYCSLTKSRREKERRYTNSSADNEECRVPTQKSYSSSETLKAFDHDSSRLLYGNRVKDLVH
READEFTRQEQPASNQGQSTLQPLPPSHKQHSAQHHPSITSLNRNSLTNRRNQSPAPPAALPAELQTT
PESVQLQDSWVLGSNVPLESRHFLFKTGTGTTPLFSTATPGYTMASGSVYSPPTRPLPRNTLSRSAFK
FKKSSKYCSWKCTALCAVGVSVLLAILLSYFIANHLFGLNWQLQQTENDTFENGKVNSDTMPTNTVSL
PSGDNGKLGGFTQENNTIDSGELDIGRRAIQEIPPGIFWRSQLFIDQPQFLKFNISLQKDALIGVYGR
KGLPPSHTQYDFVELLDGSRLIAREQRSLLETERAGRQARSVSLHEAGFIQYLDSGIWHLAFYNDGKM
AEQVSFNTIVIESVVECPRNCHGNGECVSGTCHCFPGFLGPDCSRAACPVLCSGNGQYSKGRCLCFSG
WKGTECDVPTTQCIDPQCGGRGICIMGSCACNSGYKGKSCEEADCIDPGCSNHGVCIHGECHCSPGWG
GSNCEILKTMCPDQCSGHGTYLQESGSCTCDPNWTGPDCSNEICSVDCGSHGVCMGGTCRCEEGWTGP
ACNQRACHPRCAEHGTCKDGKCECSQGWNGEHCTIAHYLDKIVKDKIGYKEGCPGLCNSNGRCTLDQN
GGHCVCQPGWRGAGCDVANETLCTDSKDNEGDGLIDCMDPDCCLQSSCQNQPYCRGLPDPQDIISQSL
QSPSQQAAKSFYDRISFLIGSDSTHVIPGESPFNKSLASVIRGQVLTADGTPLIGVNVSFFHYPEYGY
TITRQDGMFDLVANGGASLTLVFERSPFLTQYHTVWIPWNVFYVMDTLVMEKEENDIPSCDLSGFVRP
NPIIVSSPLSTFFRSSPEDSPIIPETQVLHEETTIPGTDLKLSYLSSRAAGYKSVLKITMTQSIIPFN
LMKVHLMVAVVGRLFQKWFPASPNLAYTFIWDKTDAYNQKVYGLSEAVVSVGYEYESCLDLTLWEKRT
AILQGYELDASNNGGWTLDKHHVLDVQNGILYKGNGENQFISQQPPVVSSIMGNGRRRSISCPSCNGQ
ADGNKLLAPVALACGIDGSLYVGDFNYVRRIFPSGNVTSVLELRNKDFRHSSNPAHRYYLATDPVTGD
LYVSDTNTRRIYRPKSLTGAKDLTKNAEVVAGTGEQCLPFDEARCGDGGKAVEATLMSPKGMAVDKNG
LIYFVDGTMIRKVDQNGIISTLLGSNDLTSARPLTCDTSMHISQVRLEWPTDLAINPMDNSIYVLDNN
VVLQITENRQVRIAAGRPMHCQVPGVEYPVGKHAVQTTLESATAIAVSYSGVLYITETDEKKINRIRQ
VTTDGEISLVAGIPSECDCKNDANCDCYQSGDGYAKDAKLSAPSSLAASPDGTLYIADLGNIRIRAVS
KNKPLLNSMNFYEVASPTDQELYIFDINGTHQYTVSLVTGDYLYNFSYSNDNDITAVTDSNGNTLRIR
RDPNRMPVRVVSPDNQVIWLTIGTNGCLKGMTAQGLELVLFTYHGNSGLLATKSDETGWTTFFDYDSE
GRLTNVTFPTGVVTNLHGDMDKAITVDIESSSREEDVSITSNLSSIDSFYTMVQDQLRNSYQIGYDGS
LRIIYASGLDSHYQTEPHVLAGTANPTVAKRNMTLPGENGQNLVEWRFRKEQAQGKVNVFGRKLRVNG
RNLLSVDFDRTTKTEKIYDDHRKFLLRIAYDTSGHPTLWLPSSKLMAVNVTYSSTGQIASIQRGTTSE
KVDYDGQGRIVSRVFADGKTWSYTYLEKSMVLLLHSQRQYIFEYDMWDRLSAITMPSVARHTMQTIRS
IGYYRNIYNPPESNASIITDYNEEGLLLQTAFLGTSRRVLFKYRRQTRLSEILYDSTRVSFTYDETAG
VLKTVNLQSDGFICTIRYRQIGPLIDRQIFRFSEDGMVNARFDYSYDNSFRVTSMQGVINETPLPIDL
YQFDDISGKVEQFGKFGVIYYDINQIISTAVMTYTKHFDAHGRIKEIQYEIFRSLMYWITIQYDNMGR
VTKREIKIGPFANTTKYAYEYDVDGQLQTVYLNEKIMWRYNYDLNGNLHLLNPSMSARLTPLRYDLRD
RITRLGDVQYRLDEDGFLRQRGTEIFEYSSKGLLTRVYSKGSGWTVIYRYDGLGRRVSSKTSLGQHLQ
FFYADLTYPTRITHVYNHSSSEITSLYYDLQGHLFAMEISSGDEFYIASDNTGTPLAVFSSNGLMLKQ
IQYTAYGEIYFDSNIDFQLVIGFHGGLYDPLTKLIHFGERDYDILAGRWTTPDIEIWKRIGKDPAPFN
LYMFRNNNPASKIHDVKDYITDVNSWLVTFGFHLHNAIPGFPVPKFDLTEPSYELVKSQQWDDIPPIF
GVQQQVARQAKAFLSLGKMAEVQVSRRRAGGAQSWLWFATVKSLIGKGVMLAVSQGRVQTNVLNIANE
DCIKVAAVLNWAFYLENLHFTIEGKDTHYFIKTTTPESDLGTLRLTSGRKALENGINVTVSQSTTVVN
GRTRRFADVEMQFGALALHVRYGMTLDEEKARILEQARQRALARAWAREQQRVRDGEEGARLWTEGEK
RQLLSAGKVQGYDGYYVLSVEQYPELADSANNIQFLRQSEIGRR

| | | |
|---|---|---|
| NOV40j, 219937039 | SEQ ID NO: 503 | 1854 bp |
| DNA Sequence | ORF Start: at 1 | ORF Stop: end of sequence |

AAGCTTGACCAAAATGGCGGACATTGTGTGTGCCAGCCTGGATGGAGAGGAGCAGGCTGTGACGTAGC
CATGGAGACTCTTTGCACAGATAGCAAGGACAATGAAGGAGATGGACTCATTGACTGCATGGATCCCG
ATTGCTGCCTACAGAGTTCCTGCCAGAATCAGCCCTATTGTCGGGGACTGCCGGATCCTCAGGACATC
ATTAGCCAAAGCCTTCAATCGCCTTCTCAGCAAGCTGCCAAATCCTTTTATGATCGAATCAGTTTCCT
TATAGGATCTGATAGCACCCATGTTATACCTGGAGAAAGTCCTTTCAATAAGAGCCTTGCATCTGTCA
TCAGAGGCCAAGTACTGACTGCTGATGGAACTCCACTTATTGGAGTAAATGTCTCGTTTTTCCATTAC
CCAGAATATGGATATACTATTACCCGCCAGGACGGAATGTTTGACTTGGTGGCAAATGGTGGGGCCTC
TCTAACTTTGGTATTTGAACGATCCCCATTCCTCACTCAGTATCATACTGTGTGGATTCCATGGAATG
TCTTTTATGTGATGGATACCCTAGTCATGAAGAAAGAAGAGAATGACATTCCCAGCTGTGATCTGAGT
GGATTCGTGAGGCCAAATCCCATCATTGTGTCATCACCTTTATCCACCTTTTTCAGATCTTCTCCTGA
AGACAGTCCCATCATTCCCGAAACACAGGTACTCCACGAGGAAACTACAATTCCAGGAACAGATTTGA
AACTCTCCTACTTGAGTTCCAGAGCTGCAGGGTATAAGTCAGTTCTCAAGATCACCATGACCCAGTCT
ATTATTCCATTTAATTTAATGAAGGTTCATCTTATGGTAGCTGTAGTAGGAAGACTCTTCCAAAAGTG
GTTTCCTGCCTCACCAAACTTGGCCTATACTTTCATATGGGATAAAACAGATGCATATAATCAGAAAG
TCTATGGTCTATCTGAAGCTGTTGTGTCAGTTGGATATGAGTATGAGTCGTGTTTGGACCTGACTCTG
TGGGAAAAGAGGACTGCCATTCTGCAGGGCTATGAATTGGATGCGTCCAACATGGGTGGCTGGACATT
AGATAAACATCACGTGCTGGATGTACAGAACGGTATACTGTACAAGGGAAACGGGGAAAACCAGTTCA
TCTCCCAGCAGCCTCCAGTCGTGAGTAGCATCATGGGCAATGGGCGAAGGCGCAGCATTTCCTGCCCC
AGTTGCAATGGTCAAGCTGATGGTAACAAGTTACTGGCCCCAGTGGCGCTAGCTTGTGGGATCGATGG
CAGTCTGTACGTAGGCGATTTCAACTATGTGCGGCGGATATTCCCTTCTGGAAATGTAACAAGTGTCT
TAGAACTAAGAAATAAAGATTTTAGACATAGCAGCAACCCAGCTCATAGATACTACCTTGCAACGGAT
CCAGTCACGGGAGATCTGTACGTTTCTGACACAAACACCCGCAGAATTTATCGCCCAAAGTCACTTAC
GGGGGCAAAAGACTTGACTAAAAATGCAGAAGTCGTCGCAGGGACAGGGGAGCAATGCCTTCCGTTTG
ACGAGGCGAGATGTGGGGATGGAGGGAAGGCCGTGGAAGCCACACTCATGAGTCCCAAAGGAATGGCA
GTTGATAAGAATGGATTAATCTACTTTGTTGATGGAACCATGATTAGGAAAGTTGACCAAAATGGAAT
CATATCAACTCTTCTGGGTTCTAACGATTTGACTTCAGCCAGACCTTTAACTTGTGACACCAGCATGC
ACATCAGCCAGGTACGTCTGGAATGGCCCACTGACCTAGCCATTAACCCTATGGATAACTCCATTTAT
GTCCTGGATAATGTCGAC

| | | | |
|---|---|---|---|
| NOV40j, 219937039 | SEQ ID NO: 504 | 618 aa | MW at 68016.2kD |
| Protein Sequence | | | |

KLDQNGGHCVCQPGWRGAGCDVAMETLCTDSKDNEGDGLIDCMDPDCCLQSSCQNQPYCRGLPDPQDI
ISQSLQSPSQQAAKSFYDRISFLIGSDSTHVIPGESPFNKSLASVIRGQVLTADGTPLIGVNVSFFHY
PEYGYTITRQDGMFDLVANGGASLTLVFERSPFLTQYHTVWIPWNVFYVMDTLVMKKEENDIPSCDLS
GFVRPNPIIVSSPLSTFFRSSPEDSPIIPETQVLHEETTIPGTDLKLSYLSSRAAGYKSVLKITMTQS
IIPFNLMKVHLMVAVVGRLFQKWFPASPNLAYTFIWDKTDAYNQKVYGLSEAVVSVGYEYESCLDLTL
WEKRTAILQGYELDASNMGGWTLDKMHVLDVQNGILYKGNGENQFISQQPPVVSSIMGNGRRRSISCP
SCNGQADGNKLLAPVALACGIDGSLYVGDFNYVRRIFPSGNVTSVLELRNKDFRHSSNPAHRYYLATD
PVTGDLYVSDTNTRRIYRPKSLTGAKDLTKNAEVVAGTGEQCLPFDEARCGDGGKAVEATLMSPKGMA
VDKNGLIYFVDGTMIRKVDQNGIISTLLGSNDLTSARPLTCDTSMHISQVRLEWPTDLAINPMDNSIY
VLDNVD

| | | |
|---|---|---|
| NOV40k, 219937046 | SEQ ID NO: 505 | 1854 bp |
| DNA Sequence | ORF Start: at 1 | ORF Stop: end of sequence |

AAGCTTGACCAAAATGGCGGACATTGTGTGTGCCAGCCTGGATGGAGAGGAGCAGGCTGTGACGTAGC
CATGGAGACTCTTTGCACAGATAGCAAGGACAATGAAGGAGATGGACTCATTGACTGCATGGATCCCG
ATTGTTGCCTACAGAGTTCCTGCCAGAATCAGCCCTATTGTCGGGGACTGCCGGATCCTCAGGACATC
ATTAGCCAAAGCCTTCAATCGCCTTCTCAGCAAGCTGCCAAATCCTTTTATGATCGAATCAGTTTCCT
TATAGGATCTGATAGCACCCATGTTATACCTGGAGAAAGTCCTTTCAATAAGAGCCTTGCATCTGTCA
TCAGAGGCCAAGTACTGACTGCTGATGGAACTCCACTTATTGGAGTAAATGTCTCGTTTTTCCATTAC
CCAGAATATGGATATACTATTACCCGCCAGGACGGAATGTTTGACTTGGTGGCAAGTGGTGGGGCCTC
TCTAACTTTGGTATTTGAACGATCCCCATTCCTCACTCAGTATCATACTGTGTGGATTCCATGGAATG
TCTTTTATGTGATGGATACCCTAGTCATGAAGAAAGAAGAGAATGACATTCCCAGCTGTGATCTGAGT
GGATTCGTGAGGCCAAATCCCATCATTGTGTCATCACCTTTATCCACCTTTTTCAGATCTTCTCCTGA
AGACAGTCCCATCATTCCCGAAACACAGGTACTCCACGAGGAAACTACAATTCCAGGAACAGATTTGA
AACTCTCCTACTTGAGTTCCAGAGCTGCAGGGTATAAGTCAGTTCTCAAGATCACCATGACCCAGTCT
ATTATTCCATTTAATTTAATGAAGGTTCATCTTATGGTAGCTGTAGTAGGAAGACTCTTCCAAAAGTG
GTTTCCTGCCTCACCAAACTTGGCCTATACTTTCATATGGGATAAAACAGATGCATATAATCAGAAAG
TCTATGGTCTATCTGAAGCTGTTGTGTCAGTTGGATATGAGTATGAGTCGTGTTTGGACCTGACTCTG
TGGGAAAAGAGGACTGCCATTCTGCAGGGCTATGAATTGGATGCGTCCAACATGGGTGGCTGGACATT
AGATAAACATCACGCGCTGGATGTACAGAACGGTATACTGTACAAGGGAAACGGGGAAAACCAGTTCA
TCTCCCAGCAGCCTCCAGTCGTGAGTAGCATCATGGGCAATGGGCGAAGGCGCAGCATTTCCTGCCCC
AGTTGCAATGGTCAAGCTGATGGTAACAAGTTACTGGCCCCAGTGGCGCTAGCTTGTGGGATCGATGG
CAGTCTGTACGTAGGCGATTTCAACTATGTGCGGCGGATATTCCCTTCTGGAAATGTAACAAGTGTCT
TAGAACTAAGAAATAAAGATTTTAGACATAGCAGCAACCCAGCTCATAGATACTACCTTGCAACGGAT
CCAGTCACGGGAGATCTGTACGTTTCTGACACAAACACCCGCAGAATTTATCGCCCAAAGTCACTTAC
GGGGGCAAAAGACTCGACTAAAAATGCAGAAGTCGTCGCAGGGACAGGGGAGCAATGCCTTCCGTTTG
ACGAGGCGAGATGTGGGGATGGAGGGAAGGCCGTGGAAGCCACACTCATGAGTCCCAAAGGAATGGCA
GTTGATAAGAATGGATTAATCTACTTTGTTGATGGAACCATGATTAGGAAAGTTGACCAAAATGGAAT
CATATCAACTCTTCTGGGTTCTAACGATTTGACTTCAGCCAGACCTTTAACTTGTGACACCAGCATGC
ACATCAGCCAGGTACGTCTGGAATGGCCCACTGACCTAGCCATTAACCCTATGGATAACTCCATTTAT
GTCCTGGATAATGTCGAC

| | | | |
|---|---|---|---|
| NOV40k, 219937046 | SEQ ID NO: 506 | 618 aa | MW at 67935.1kD |
| Protein Sequence | | | |

KLDQNGGHCVCQPGWRGAGCDVAMETLCTDSKDNEGDGLIDCMDPDCCLQSSCQNQPYCRGLPDPQDI
ISQSLQSPSQQAAKSFYDRISFLIGSDSTHVIPGESPFNKSLASVIRGQVLTADGTPLIGVNVSFFHY
PEYGYTITRQDGMFDLVASGGASLTLVFERSPFLTQYHTVWIPWNVFYVMDTLVMKKEENDIPSCDLS
GFVRPNPIIVSSPLSTFFRSSPEDSPIIPETQVLHEETTIPGTDLKLSYLSSRAAGYKSVLKITMTQS
IIPFNLMKVHLMVAVVGRLFQKWFPASPNLAYTFIWDKTDAYNQKVYGLSEAVVSVGYEYESCLDLTL
WEKRTAILQGYELDASNMGGWTLDKHHALDVQNGILYKGNGENQFISQQPPVVSSINGNGRRRSISCP
SCNGQADGNKLLAPVALACGIDGSLYVGDFNYVRRIFPSGNVTSVLELRNKDFRHSSNPAHRYYLATD
PVTGDLYVSDTNTRRIYRPKSLTGAKDSTKNAEVVAGTGEQCLPFDEARCGDGGKAVEATLMSPKGMA
VDKNGLIYFVDGTMIRKVDQNGIISTLLGSNDLTSARPLTCDTSMHISQVRLEWPTDLAINPMDNSIY
VLDNVD

| | | |
|---|---|---|
| NOV40l, 219937583 | SEQ ID NO: 507 | 1834 bp |
| DNA Sequence | ORF Start: at 2 | ORF Stop: end of sequence |

TAAGCTTGACCAAAATGGCGGACATTGTGTGTGCCAGCCTGGATGGAGAGGAGCAGGCTGTGACGTAG
CCATGGAGACTCTTTGCACAGATAGCAAGGACAATGAAGGAGATGGACTCATTGACTGCATGGATCCC
GATTGCTGCCTACAGAGTTCCTGCCAGAATCAGCCCTATTGTCGGGGACTGCCGGATCCTCAGGACAT
CATTAGCCAAAGCCTTCAATCGCCTTCTCAGCAAGCTGCCAAATCCTTTTATGATCGAATCAGTTTCC
TTATAGGATCTGATAGCACCCATGTTATACCTGGAGAAAGTCCTTTCAATAAGAGCCTTGCATCTGTC
ATCAGAGGCCAAGTACTGACTGCTGATGGAACTCCACTTATTGGAGTAAATGTCTCGTTTTTCCATTA
CCCAGAATATGGATATACTATTACCCGCCAGGACGGAATGTTTGACTTGGTGGCAAATGGTGGGGCCT
CTCTAACTTTGGTATTTGAACGATCCCCATTCCTCACTCAGTATCATACTGTGTGGATTCCATGGAAT
GTCTTTTATGTGATGGATACCCTAGTCATGAAGAAAGAAGAGAATGACATTCCCAGCTGTGATCTGAG
TGGATTCGTGAGGCCAAATCCCATCATTGTGTCATCACCTTTATCCACCTTTTTCAGATCTTCTCCTG
AAGACAGTCCCATCATTCCCGAAACACAGGTACTCCACGAGGAAACTACAATTCCAGGAACAGATTTG
AAACTCTCCTACTTGAGTTCCAGAGCTGCAGGGTATAAGTCAGTTCTCAAGATCACCATGACCCAGTC
TATTATTCCATTTAATTTAATGAAGGTTCATCTTATGGTAGCTGTAGTAGGAAGACTCTTCCAAAAGT
GGTTTCCTGCCTCACCAAACTTGGCCTATACTTTCATATGGGATAAAACAGATGCATATAATCAGAAA
GTCTATGGTCTATCTGAAGCTGTTGTGTCAGTTGGATATGAGTATGAGTCGTGTTTGGACCTGACTCT
GTGGGAAAAGAGGACTGCCATTCTGCAGGGCTATGAATTGGATGCGTCCAACATGGGTGGCTGGACAT
TAGATAAACATCACGTGCTGGATGTACAGAACGGTATACTGTACAAGGGAAACGGGGAAAACCAGTTC
ATCTCCCAGCAGCCTCCAGTCGTGAGTAGCATCATGGGCAATGGGCGAAGGCGCAGCATTTCCTGCCC
CAGTTGCAATGGTCAAGCTGATGGTAACAAGTTACTGGCCCCAGTGGCGCTAGCTTGTGGGATCGATG
GCAGTCTGTACGTAGGCGATTTCAACTATGTGCGGCGGATATTCCCTTCTGGAAATGTAACAAGTGTC
TTAGAACTAAGCAGCAACCCAGCTCATAGATACTACCTTGCAACGGATCCAGTCACGGGAGATCTGTA
CGTTTCTGACACAAACACCCGCAGAATTTATCGCCCAAAGTCACTTACGGGGGCAAAAGACTTGACTA
AAAATGCAGAAGTCGTCGCAGGGACAGGGGAGCAATGCCTTCCGTTTGACGAGGCGAGATGTGGGGAT
GGAGGGAAGGCCGTGGAAGCCACACTCATGAGTCCCAAAGGAATGGCAGTTGATAAGAATGGATTAAT
CTACTTTGTTGATGGAACCATGATTAGGAAAGTTGACCAAAATGGAATCATATCAACTCTTCTGGGTT
CTAACGATTTGACTTCAGCCAGACCTTTAACTTGTGACACCAGCATGCACATCAGCCAGGTACGTCTG
GAATGGCCCACTGACCTAGCCATTAACCCTATGGATAACTCCATTTATGTCCTGGATAATGTCGAC

| | | | |
|---|---|---|---|
| NOV40l, 219937583 | SEQ ID NO: 508 | 611 aa | MW at 67062.2kD |
| Protein Sequence | | | |

KLDQNGGHCVCQPGWRGAGCDVAMETLCTDSKDNEGDGLIDCMDPDCCLQSSCQNQPYCRGLPDPQDI
ISQSLQSPSQQAAKSFYDRISFLIGSDSTHVIPGESPFNKSLASVIRGQVLTADGTPLIGVNVSFFHY
PEYGYTITRQDGMFDLVASGGASLTLVFERSPFLTQYHTVWIPWNVFYVMDTLVMKKEENDIPSCDLS
GFVRPNPIIVSSPLSTFFRSSPEDSPIIPETQVLHEETTIPGTDLKLSYLSSRAAGYKSVLKITMTQS
IIPFNLMKVHLMVAVVGRLFQKWFPASPNLAYTFIWDKTDAYNQKVYGLSEAVVSVGYEYESCLDLTL
WEKRTAILQGYELDASNMGGWTLDKHHALDVQNGILYKGNGENQFISQQPPVVSSINGNGRRRSISCP
SCNGQADGNKLLAPVALACGIDGSLYVGDFNYVRRIFPSGNVTSVLELRNKDFRHSSNPAHRYYLATD
PVTGDLYVSDTNTRRIYRPKSLTGAKDSTKNAEVVAGTGEQCLPFDEARCGDGGKAVEATLMSPKGMA
VDKNGLIYFVDGTMIRKVDQNGIISTLLGSNDLTSARPLTCDTSMHISQVRLEWPTDLAINPMDNSIY
VLDNVD

| | | |
|---|---|---|
| NOV40m, 219937000 | SEQ ID NO: 509 | 1833 bp |
| DNA Sequence | ORF Start: at 1 | ORF Stop: end of sequence |

AAGCTTGACCAAAATGGCGGACATTGTGTGTGCCAGCCTGGATGGAGAGGAGCAGGCTGTGACGTAGC
CATGGAGACTCTTTGCACAGATAGCAAGGACAATGAAGGAGATGGACTCATTGACTGCATGGATCCCG
ATTGCTGCCTACAGAGTTCCTGCCAGAATCAGCCCTATTGTCGGGGACTGCCGGATCCTCAGGACATC
ATTAGCCAAAGCCTTCAATCGCCTTCTCAGCAAGCTGCCAAATCCTTTTATGATCGAATCAGTTTCCT
TATAGGATCTGATAGCACCCATGTTATACCTGGAGAAAGTCCTTTCAATAAGAGCCTTGCATCTGTCA
TCAGAGGCCAAGTACTGACTGCTGATGGAACTCCACTTATTGGAGTAAATGTCTCGTTTTTCCATTAC
CCAGAATATGGATATACTATTACCCGCCAGGACGGAATGTTTGACTTGGTGGCAAATGGTGGGGCCTC
TCTAACTTTGGTATTTGAACGATCCCCATTCCTCACTCAGTATCATACTGTGTGGATTCCATGGAATG
TCTTTTATGTGATGGATACCCTAGTCATGAAGAAAGAAGAGAATGACATTCCCAGCTGTGATCTGAGT
GGATTCGTGAGGCCAAATCCCATCATTGTGTCATCACCTTTATCCACCTTTTTCAGATCTTCTCCTGA
AGACAGTCCCATCATTCCCGAAACACAGGTACTCCACGAGGAAACTACAATTCCAGGAACAGATTTGA
AACTCTCCTACTTGAGTTCCAGAGCTGCAGGGTATAAGTCAGTTCTCAAGATCACCATGACCCAGTCT
ATTATTCCATTTAATTTAATGAAGGTTCATCTTATGGTAGCTGTAGTAGGAAGACTCTTCCAAAAGTG
GTTTCCTGCCTCACCAAACTTGGCCTATACTTTCATATGGGATAAAACAGATGCATATAATCAGAAAG
TCTATGGTCTATCTGAAGCTGTTGTGTCAGTTGGATATGAGTATGAGTCGTGTTTGGACCTGACTCTG
TGGGAAAAGAGGACTGCCATTCTGCAGGGCTATGAATTGGATGCGTCCAACATGGGTGGCTGGACATT
AGATAAACATCACGTGCTGGATGTACAGAACGGTATACTGTACAAGGGAAACGGGGAAAACCAGTTCA
TCTCCCAGCAGCCTCCAGTCGTGAGTAGCATCATGGGCAATGGGCGAAGGCGCAGCATTTCCTGCCCC
AGTTGCAATGGTCAAGCTGATGGTAACAAGTTACTGGCCCCAGTGGCGCTAGCTTGTGGGATCGATGG
CAGTCTGTACGTAGGCGATTTCAACTATGTGCGGCGGATATTCCCTTCTGGAAATGTAACAAGTGTCT
TAGAACTAAGCAGCAACCCAGCTCATAGATACTACCTTGCAACGGATCCAGTCACGGGAGATCTGTAC
GTTTCTGACACAAACACCCGCAGAATTTATCGCCCAAAGTCACTTACGGGGGCAAAAGACTTGACTAA
AAATGCAGAAGTCGTCGCAGGGACAGGGGAGCAATGCCTTCCGTTTGACGAGGCGAGATGTGGGGATG
GAGGGAAGGCCGTGGAAGCCACACTCATGAGTCCCAAAGGAATGGCAGTTGATAAGAATGGATTAATC
TACTTTGTTGATGGAACCATGATTAGGAAAGTTGACCAAAATGGAATCATATCAACTCTTCTGGGTTC
TAACGATTTGACTTCAGCCAGACCTTTAACTTGTGACACCAGCATGCACATCAGCCAGGTACGTCTGG
AATGGCCCACTGACCTAGCCATTAACCCTATGGATAACTCCATTTATGTCCTGGATAATGTCGAC

| | | | |
|---|---|---|---|
| NOV40m, 219937000 | SEQ ID NO: 510 | 611 aa | MW at 67062.2kD |
| Protein Sequence | | | |

KLDQNGGHCVCQPGWRGAGCDVAMETLCTDSKDNEGDGLIDCMDPDCCLQSSCQNQPYCRGLPDPQDI
ISQSLQSPSQQAAKSFYDRISFLIGSDSTHVIPGESPFNKSLASVIRGQVLTADGTPLIGVNVSFFHY
PEYGYTITRQDGMFDLVANGGASLTLVFERSPFLTQYHTVWIPWNVFYVMDTLVMKKEENDIPSCDLS
GFVRPNPIIVSSPLSTFFRSSPEDSPIIPETQVLHEETTIPGTDLKLSYLSSRAAGYKSVLKITMTQS
IIPFNLMKVHLMVAVVGRLFQKWFPASPMLAYTFIWDKTDAYNQKVYGLSEAVVSVGYEYESCLDLTL
WEKRTAILQGYELDASNMGGWTLDKHHVLDVQNGILYKGNGENQFISQQPPVVSSIMGNGRRRSISCP
SCNGQADGNKLLAPVAIACGIDGSLYVGDFNYVRRIFPSGNVTSVLELSSNPAHRYYLATDPVTGDLY
VSDTNTRRIYRPKSLTGAKDLTKNAEVVAGTGEQCLPFDEARCGDGGKAVEATLMSPKGMAVDKNGLI
YFVDGTMIRKVDQNGIISTLLGSNDLTSARPLTCDTSMHISQVRLEWPTDLAINPMDNSIYVLDNVD

| | | |
|---|---|---|
| NOV40n, 219937005 | SEQ ID NO: 511 | 1833 bp |
| DNA Sequence | ORF Start: at 1 | ORF Stop: end of sequence |

AAGCTTGACCAAAATGGCGGACATTGTGTGTGCCAGCCTGGATGGAGAGGAGCAGGCTGTGACGTAGC
CATGGAGACTCTTTGCACAGATAGCAAGGACAATGAAGGAGATGGACTCATTGACTGCATGGATCCCG
ATTGCTGCCTACAGAGTTCCTGCCAGAATCAGCCCTATTGTCGGGGACTGCCGGATCCTCAGGACATC
ATTAGCCAAAGCCTTCAATCGCCTTCTCAGCAAGCTGCCAAATCCTTTTATGATCGAATCAGTTTCCT
TATAGGATCTGATAGCACCCATGTTATACCTGGAGAAAGTCCTTTCAATAAGAGCCTTGCATCTGTCA
TCAGAGGCCAAGTACTGACTGCTGATGGAACTCCACTTATTGGAGTAAATGTCTCGTTTTTCCATTAC
CCAGAATATGGATATACTATTACCCGCCAGGACGGAATGTTTGACTTGGTGGCAAATGGTGGGGCCTC
TCTAACTTTGGTATTTGAACGATCCCCATTCCTCACTCAGTATCATACTGTGTGGATTCCATGGAATG
TCTTTTATGTGATGGATACCCTAGTCATGAAGAAAGAAGAGAATGACATTCCCAGCTGTGATCTGAGT
GGATTCGTGAGGCCAAATCCCATCATTGTGTCATCACCTTTATCCACCTTTTTCAGATCTTCTCCTGA
AGACAGTCCCATCATTCCCGAAACACAGGTACTCCACGAGGAAACTACAATTCCAGGAACAGATTTGA
AACTCTCCTACTTGAGTTCCAGAGCTGCAGGGTATAAGTCAGTTCTCAAGATCACCATGACCCAGTCT
ATTATTCCATTTAATTTAATGAAGGTTCATCTTATGGTAGCTGTAGTAGGAAGACTCTTCCAAAAGTG
GTTTCCTGCCTCACCAAACTTGGCCTATACTTTCATATGGGATAAAACAGATGCATATAATCAGAAAG
TCTATGGTCTATCTGAAGCTGTTGTGTCAGTTGGATATGAGTATGAGTCGTGTTTGGACCTGACTCTG
TGGGAAAAGAGGACTGCCATTCTGCAGGGCTATGAATTGGATGCGTCCAACATGGGTGGCTGGACATT
AGATAAACATCACGTGCTGGATGTACAGAACGGTATACTGTACAAGGGAAACGGGGAAAACCAGTTCA
TCTCCCAGCAGCCTCCAGTCGTGAGTAGCATCATGGGCAATGGGCGAAGGCGCAGCATTTCCTGCCCC
AGTTGCAATGGTCAAGCTGATGGTAACAAGTTACTGGCCCCAGTGGCGCTAGCTTGTGGGATCGATGG
CAGTCTGTACGTAGGCGATTTCAACTATGTGCGGCGGATATTCCCTTCTGGAAATGTAACAAGTGTCT
TAGAACTAAGCAGCAACCCAGCTCATAGATACTACCTTGCAACGGATCCAGTCACGGGAGATCTGTAC
GTTTCTGACACAAACACCCGCAGAATTTATCGCCCAAAGTCACTTACGGGGGCAAAAGACTTGACTAA
AAATGCAGAAGTCGTCGCAGGGACAGGGGAGCAATGCCTTCCGTTTGACGAGGCGAGATGTGGGGATG
GAGGGAAGGCCGTGGAAGCCACACTCATGAGTCCCAAAGGAATGGCAGTTGATAAGAATGGATTAATC
TACTTTGTTGATGGAACCATGATTAGGAAAGTTGACCAAAATGGAATCATATCAACTCTTCTGGGTTC
TAACGATTTGACTTCAGCCAGACCTTTAACTTGTGACACCAGCATGCACATCAGCCAGGTACGTCTGG
AATGGCCCACTGACCTAGCCATTAACCCTATGGATAACTCCATTTATGTCCTGGATAATGTCGAC

| | | | |
|---|---|---|---|
| NOV40n, 219937005 | SEQ ID NO: 512 | 611 aa | MW at 67062.2kD |
| Protein Sequence | | | |

KLDQNGGHCVCQPGWRGAGCDVAMETLCTDSKDNEGDGLIDCMDPDCCLQSSCQNQPYCRGLPDPQDI
ISQSLQSPSQQAAKSFYDRISFLIGSDSTHVIPGESPFNKSLASVIRGQVLTADGTPLIGVNVSFFHY
PEYGYTITRQDGMFDLVANGGASLTLVFERSPFLTQYHTVWIPWNVFYVMDTLVMKKEENDIPSCDLS
GFVRPNPIIVSSPLSTFFRSSPEDSPIIPETQVLHEETTIPGTDLKLSYLSSRAAGYKSVLKITMTQS
IIPFNLMKVHLMVAVVGRLFQKWFPASPMLAYTFIWDKTDAYNQKVYGLSEAVVSVGYEYESCLDLTL
WEKRTAILQGYELDASNMGGWTLDKHHVLDVQNGILYKGNGENQFISQQPPVVSSIMGNGRRRSISCP
SCNGQADGNKLLAPVAIACGIDGSLYVGDFNYVRRIFPSGNVTSVLELSSNPAHRYYLATDPVTGDLY
VSDTNTRRIYRPKSLTGAKDLTKNAEVVAGTGEQCLPFDEARCGDGGKAVEATLMSPKGMAVDKNGLI
YFVDGTMIRKVDQNGIISTLLGSNDLTSARPLTCDTSMHISQVRLEWPTDLAINPMDNSIYVLDNVD

| | | |
|---|---|---|
| NOV40o, 219937013 | SEQ ID NO: 513 | 1833 bp |
| DNA Sequence | ORF Start: at 1 | ORF Stop: end of sequence |

AAGCTTGACCAAAATGGCGGACATTGTGTGTGCCAGCCTGGATGGAGAGGAGCAGGCTGTGACGTAGC
CATGGAGACTCTTTGCACAGATAGCAAGGACAATGAAGGAGATGGACTCATTGACTGCATGGATCCCG
ATTGCTGCCTACAGAGTTCCTGCCAGAATCAGCCCTATTGTCGGGGACTGCCGGATCCTCAGGACATC
ATTAGCCAAAGCCTTCAATCGCCTTCTCAGCAAGCTGCCAAATCCTTTTATGATCGAATCAGTTTCCT
TATAGGATCTGATAGCACCCATGTTATACCTGGAGAAAGTCCTTTCAATAAGAGCCTTGCATCTGTCA
TCAGAGGCCAAGTACTGACTGCTGATGGAACTCCACTTATTGGAGTAAATGTCTCGTTTTTCCATTAC
CCAGAATATGGATATACTATTACCCGCCAGGACGGAATGTTTGACTTGGTGGCAAATGGTGGGGCCTC
TCTAACTTTGGTATTTGAACGATCCCCATTCCTCACTCAGTATCATACTGTGTGGATTCCATGGAATG
TCTTTTATGTGATGGATACCCTAGTCATGAAGAAAGAAGAGAATGACATTCCCAGCTGTGATCTGAGT
GGATTCGTGAGGCCAAATCCCATCATTGTGTCATCACCTTTATCCACCTTTTTCAGATCTTCTCCTGA
AGACAGTCCCATCATTCCCGAAACACAGGTACTCCACGAGGAAACTACAATTCCAGGAACAGATTTGA
AACTCTCCTACTTGAGTTCCAGAGCTGCAGGGTATAAGTCAGTTCTCAAGATCACCATGACCCAGTCT
ATTATTCCATTTAATTTAATGAAGGTTCATCTTATGGTAGCTGTAGTAGGAAGACTCTTCCAAAAGTG
GTTTCCTGCCTCACCAAACTTGGCCTATACTTTCATATGGGATAAAACAGATGCATATAATCAGAAAG
TCTATGGTCTATCTGAAGCTGTTGTGTCAGTTGGATATGAGTATGAGTCGTGTTTGGACCTGACTCTG
TGGGAAAAGAGGACTGCCATTCTGCAGGGCTATGAATTGGATGCGTCCAACATGGGTGGCTGGACATT
AGATAAACATCACGTGCTGGATGTACAGAACGGTATACTGTACAAGGGAAACGGGGAAAACCAGTTCA
TCTCCCAGCAGCCTCCAGTCGTGAGTAGCATCATGGGCAATGGGCGAAGGCGCAGCATTTCCTGCCCC
AGTTGCAATGGTCAAGCTGATGGTAACAAGTTACTGGCCCCAGTGGCGCTAGCTTGTGGGATCGATGG
CAGTCTGTACGTAGGCGATTTCAACTATGTGCGGCGGATATTCCCTTCTGGAAATGTAACAAGTGTCT
TAGAACTAAGCAGCAACCCAGCTCATAGATACTACCTTGCAACGGATCCAGTCACGGGAGATCTGTAC
GTTTCTGACACAAACACCCGCAGAATTTATCGCCCAAAGTCACTTACGGGGGCAAAAGACTTGACTAA
AAATGCAGAAGTCGTCGCAGGGACAGGGGAGCAATGCCTTCCGTTTGACGAGGCGAGATGTGGGGATG
GAGGGAAGGCCGTGGAAGCCACACTCATGAGTCCCAAAGGAATGGCAGTTGATAAGAATGGATTAATC
TACTTTGTTGATGGAACCATGATTAGGAAAGTTGACCAAAATGGAATCATATCAACTCTTCTGGGTTC
TAACGATTTGACTTCAGCCAGACCTTTAACTTGTGACACCAGCATGCACATCAGCCAGGTACGTCTGG
AATGGCCCACTGACCTAGCCATTAACCCTATGGATAACTCCATTTATGTCCTGGATAATGTCGAC

| | | | |
|---|---|---|---|
| NOV40o, 219937013 | SEQ ID NO: 514 | 611 aa | MW at 67034.1kD |
| Protein Sequence | | | |

KLDQNGGHCVCQPGWRGAGCDVAMETLCTDSKDNEGDGLIDCMDPDCCLQSSCQNQPYCRGLPDPQDI
ISQSLQSPSQQAAKSFYDRISFLIGSDSTHVIPGESPFNKSLASVIRGQVLTADGTPLIGVNVSFFHY
PEYGYTITRQDGMFDLVANGGASLTLVFERSPFLTQYHTVWIPWNVFYVMDTLVMKKEENDIPSCDLS
GFVRPNPIIVSSPLSTFFRSSPEDSPIIPETQVLHEETTIPGTDLKLSYLSSRAAGYKSVLKITMTQS
IIPFNLMKVHLMVAVVGRLFQKWFPASPMLAYTFIWDKTDAYNQKVYGLSEAVVSVGYEYESCLDLTL
WEKRTAILQGYELDASNMGGWTLDKHHVLDVQNGILYKGNGENQFISQQPPVVSSIMGNGRRRSISCP
SCNGQADGNKLLAPVAIACGIDGSLYVGDFNYVRRIFPSGNVTSVLELSSNPAHRYYLATDPVTGDLY
VSDTNTRRIYRPKSLTGAKDLTKNAEVVAGTGEQCLPFDEARCGDGGKAVEATLMSPKGMAVDKNGLI
YFVDGTMIRKVDQNGIISTLLGSNDLTSARPLTCDTSMHISQVRLEWPTDLAINPMDNSIYVLDNVD

| | | |
|---|---|---|
| NOV40p,219937063 | SEQ ID NO: 515 | 1833 bp |
| DNA Sequence | ORF Start: at 1 | ORF Stop: end of sequence |

AAGCTTGACCAAAATGGCGGACATTGTGTGTGCCAGCCTGGATGGAGAGGAGCAGGCTGTGACGTAGC
CATGGAGACTCTTTGCACAGATAGCAAGGACAATGAAGGAGATGGACTCATTGACTGCATGGATCCCG
ATTGCTGCCTACAGAGTTCCTGCCAGAATCAGCCCTATTGTCGGGGACTGCCGGATCCTCAGGACATC
ATTAGCCAAAGCCTTCAATCGCCTTCTCAGCAAGCTGCCAAATCCTTTTATGATCGAATCAGTTTCCT
TATAGGATCTGATAGCACCCATGTTATACCTGGAGAAAGTCCTTTCAATAAGAGCCTTGCATCTGTCA
TCAGAGGCCAAGTACTGACTGCTGATGGAACTCCACTTATTGGAGTAAATGTCTCGTTTTTCCATTAC
CCAGAATATGGATATACTATTACCCGCCAGGACGGAATGTTTGACTTGGTGGCAAATGGTGGGGCCTC
TCTAACTTTGGTATTTGAACGATCCCCATTCCTCACTCAGTATCATACTGTGTGGATTCCATGGAATG
TCTTTTATGTGATGGATACCCTAGTCATGAAGAAAGAAGAGAATGACATTCCCAGCTGTGATCTGAGT
GGATTCGTGAGGCCAAATCCCATCATTGTGTCATCACCTTTATCCACCTTTTTCAGATCTTCTCCTGA
AGACAGTCCCATCATTCCCGAAACACAGGTACTCCACGAGGAAACTACAATTCCAGGAACAGATTTGA
AACTCTCCTACTTGAGTTCCAGAGCTGCAGGGTATAAGTCAGTTCTCAAGATCACCATGACCCAGTCT
ATTATTCCATTTAATTTAATGAAGGTTCATCTTATGGTAGCTGTAGTAGGAAGACTCTTCCAAAAGTG
GTTTCCTGCCTCACCAAACTTGGCCTATACTTTCATATGGGATAAAACAGATGCATATAATCAGAAAG
TCTATGGTCTATCTGAAGCTGTTGTGTCAGTTGGATATGAGTATGAGTCGTGTTTGGACCTGACTCTG
TGGGAAAAGAGGACTGCCATTCTGCAGGGCTATGAATTGGATGCGTCCAACATGGGTGGCTGGACATT
AGATAAACATCACGTGCTGGATGTACAGAACGGTATACTGTACAAGGGAAACGGGGAAAACCAGTTCA
TCTCCCAGCAGCCTCCAGTCGTGAGTAGCATCATGGGCAATGGGCGAAGGCGCAGCATTTCCTGCCCC
AGTTGCAATGGTCAAGCTGATGGTAACAAGTTACTGGCCCCAGTGGCGCTAGCTTGTGGGATCGATGG
CAGTCTGTACGTAGGCGATTTCAACTATGTGCGGCGGATATTCCCTTCTGGAAATGTAACAAGTGTCT
TAGAACTAAGCAGCAACCCAGCTCATAGATACTACCTTGCAACGGATCCAGTCACGGGAGATCTGTAC
GTTTCTGACACAAACACCCGCAGAATTTATCGCCCAAAGTCACTTACGGGGGCAAAAGACTTGACTAA
AAATGCAGAAGTCGTCGCAGGGACAGGGGAGCAATGCCTTCCGTTTGACGAGGCGAGATGTGGGGATG
GAGGGAAGGCCGTGGAAGCCACACTCATGAGTCCCAAAGGAATGGCAGTTGATAAGAATGGATTAATC
TACTTTGTTGATGGAACCATGATTAGGAAAGTTGACCAAAATGGAATCATATCAACTCTTCTGGGTTC
TAACGATTTGACTTCAGCCAGACCTTTAACTTGTGACACCAGCATGCACATCAGCCAGGTACGTCTGG
AATGGCCCACTGACCTAGCCATTAACCCTATGGATAACTCCATTTATGTCCTGGATAATGTCGAC

| | | | |
|---|---|---|---|
| NOV40p, 219937063 | SEQ ID NO: 516 | 611 aa | MW at 67026.1kD |
| Protein Sequence | | | |

KLDQNGGHCVCQPGWRGAGCDVAMETLCTDSKDNEGDGLIDCMDPDCCLQSSCQNQPYCRGLPDPQDI
ISQSLQSPSQQAAKSFYDRISFLIGSDSTHVIPGESPFNKSLASVIRGQVLTADGTPLIGVNVSFFHY
PEYGYTITRQDGMFDLVANGGASLTLVFERSPFLTQYHTVWIPWNVFYVMDTLVMKKEENDIPSCDLS
GFVRPNPIIVSSPLSTFFRSSPEDSPIIPETQVLHEETTIPGTDLKLSYLSSRAAGYKSVLKITMTQS
IIPFNLMKVHLMVAVVGRLFQKWFPASPMLAYTFIWDKTDAYNQKVYGLSEAVVSVGYEYESCLDLTL
WEKRTAILQGYELDASNMGGWTLDKHHVLDVQNGILYKGNGENQFISQQPPVVSSIMGNGRRRSISCP
SCNGQADGNKLLAPVAIACGIDGSLYVGDFNYVRRIFPSGNVTSVLELSSNPAHRYYLATDPVTGDLY
VSDTNTRRIYRPKSLTGAKDLTKNAEVVAGTGEQCLPFDEARCGDGGKAVEATLMSPKGMAVDKNGLI
YFVDGTMIRKVDQNGIISTLLGSNDLTSARPLTCDTSMHISQVRLEWPTDLAINPMDNSIYVLDNVD

| | | |
|---|---|---|
| NOV40q, GG55069-09 | SEQ ID NO: 517 | 2536 bp |
| DNA Sequence | ORF Start: at 7 | ORF Stop: at 2470 |

GGTACCAACTGGCAGCTACAGCAGACTGAAAATGACACATTTGAGAATGGAAAAGTGAATTCTGATAC
CATGCCAACAAACACTGTGTCATTACCTTCTGGAGACAATGGAAAATTAGGTGGATTTACGCAAGAAA
ATAACACCATAGATTCCGGAGAACTTGATATTGGCCGAAGAGCAATTCAAGAGATTCCTCCCGGGATC
TTCTGGAGATCACAGCTCTTCATTGATCAGCCACAGTTTCTTAAATTCAATATCTCTCTTCAGAAGGA
TGCATTGATTGGAGTATATGGCCGGAAAGGCTTACCGCCTTCCCATACTCAGTATGACTTCGTGGAGC
TCCTGGATGGCAGCAGGCTGATTGCCAGAGAGCAGCGGAGCCTGCTTGAGACGGAGAGAGCCGGGCGG
CAGGCGAGATCCGTCAGCCTTCATGAGGCCGGCTTTATCCAGTACTTGGATTCTGGAATCTGGCATCT
GGCTTTTTATAATGATGGGAAAAATGCAGAGCAGGTGTCTTTTAATACCATTGTTATAGAGTCTGTGG
TGGAATGTCCCCGAAATTGCCATGGAAATGGAGAATGCGTTTCTGGAACTTGCCATTGTTTTCCAGGA
TTTCTGGGTCCGGATTGTTCAAGAGCCGCCTGTCCAGTGTTATGTAGTGGCAACGGGCAGTACTCCAA
GGGCCGCTGCCTGTGTTTCAGCGGCTGGAAGGGCACCGAGTGTGATGTGCCGACTACCCAGTGTATTG
ACCCACAGTGTGGGGGTCGTGGGATTTGTATCATGGGCTCTTGTGCTTGCAACTCAGGATACAAAGGA
GAAAGTTGTGAAGAAGCTGACTGTATAGACCCTGGGTGTTCTAATCATGGTGTGTGTATCCACGGGGA
ATGTCACTGCAGTCCAGGATGGGGAGGTAGCAATTGTGAAATACTGAAGACCATGTGTCCAGACCAGT
GCTCCGGCCACGGAACGTATCTTCAAGAAAGTGGCTCCTGCACGTGTGACCCTAACTGGACTGGCCCA
GACTGCTCAAACGAAATATGTTCTGTGGACTGTGGCTCACACGGCGTTTGCATGGGGGGGACGTGTCG
CTGTGAAGAAGGCTGGACGGGCCCAGCCTGTAATCAGAGAGCCTGCCACCCCCGCTGTGCCGAGCACG
GGACCTGCAAGGATGGCAAGTGTGAATGCAGCCAGGGCTGGAATGGAGAGCACTGCACTATCGCTCAC
TATTTGGATAAGATAGTTAAAGAGGGTTGTCCTGGTCTGTGCAACAGCAATGGAAGATGTACCCTGGA
CCAAAATGGCTGGCATTGTGTGTGCCAGCCTGGATGGAGAGGAGCAGGCTGTGACGTAGCCATGGAGA
CTCTTTGCACAGATAGTAAGGACAATGAAGGAGATGGACTCATTGACTGCATGGATCCCGATTGCTGC
CTACAGAGTTCCTGCCAGAATCAGCCCTATTGTCGGGGACTGCCGGATCCTCAGGACATCATTAGCCA
AAGCCTTCAATCGCCTTCTCAGCAAGCTGCCAAATCCTTTTATGATCGAATCAGTTTCCTTATAGGAT
CTGATAGCACCCATGTTATACCTGGAGAAAGTCCTTTCAATAAGAGCCTTGCATCTGTCATCAGAGGC
CAAGTACTGACTGCTGATGGAACTCCACTTATTGGAGTAAATGTCTCGTTTTTCCATTACCCAGAATA
TGGATATACTATTACCCGCCAGGACGGAATGTTTGACTTGGTGGCAAATGGTGGGGCCTCTCTAACTT
TGGTATTTGAACGATCCCCATTCCTCACTCAGTATCATACTGTGTGGATTCCATGGAATGTCTTTTAT
GTGATGGATACCCTAGTCATGAAGAAAGAAGAGAATGACATTCCCAGCTGTGATCTGAGTGGATTCGT
GAGGCCAAATCCCATCATTGTGTCATCACCTTTATCCACCTTTTTCAGATCTTCTCCTGAAGACAGTC
CCATCATTCCCGAAACACAGGTACTCCACGAGGAAACTACAATTCCAGGAACAGATTTGAAACTCTCC
TACTTGAGTTCCAGAGCTGCAGGGTATAAGTCAGTTCTCAAGATCACCATGACCCAGTCTATTATTCC
ATTTAATTTAATGAAGGTTCATCTTATGGTAGCTGTAGTAGGAAGACTCTTCCAAAAGTGGTTTCCTG
CCTCACCAAACTTGGCCTATACTTTCATATGGGATAAAACAGATGCATATAATCAGAAAGTCTATGGT
CTATCTGAAGCTGTTGTGTCAGTTGGATATGAGTATGAGTCGTGTTTGGACCTGACTCTGTGGGAAAA
GAGGACTGCCATTCTGCAGGGCTATGAATTGGATGCGTCCAACATGGGTGGCTGGACATTAGATAAAC
ATCACGTGCTGGATGTACAGAACGGTATACTGTACAAGGGAAACGGGGAAAACCAGTTCATCTCCCAG
CAGCCTCCAGTCGTGAGTAGCGTCGACGCTACACACGACTGGAGGCTGCTGGTCATTTTCAGCTCTGC
AGTAGCTGCCAGTTGGTACC

| | | | |
|---|---|---|---|
| NOV40q, CG55069-09 | SEQ ID NO: 518 | 821 aa | MW at 89886.1kD |
| Protein Sequence | | | |

NWQLQQTENDTFENGKVNSDTMPTNTVSLPSGDNGKLGGFTQENNTIDSGELDIGRRAIQEIPPGIFW
RSQLFIDQPQFLKFNISLQKDALIGVYGRKGLPPSHTQYDFVELLDGSRLIAREQRSLLETERAGRQA
RSVSLHEAGFIQYLDSGIWHLAFYNDGKNAEQVSFNTIVIESVVECPRNCHGNGECVSGTCHCFPGFL
GPDCSRAACPVLCSGNGQYSKGRCLCFSGWKGTECDVPTTQCIDPQCGGRGICIMGSCACNSGYKGES
CEEADCIDPGCSNHGVCIHGECHCSPGWGGSNCEILKTMCPDQCSGHGTYLQESGSCTCDPNWTGPDC
SNEICSVDCGSHGVCMGGTCRCEEGWTGPACNQRACHPRCAEHGTCKDGKCECSQGWNGEHCTIAHYL
DKIVKEGCPGLCNSNGRCTLDQNGWHCVCQPGWRGAGCDVAMETLCTDSKDNEGDGLIDCMDPDCCLQ
SSCQNQPYCRGLPDPQDIISQSLQSPSQQAAKSFYDRISFLIGSDSTHVIPGESPFNKSLASVIRGQV
LTADGTPLIGVNVSFFHYPEYGYTITRQDGMFDLVANGGASLTLVFERSPFLTQYHTVWIPWNVFYVM
DTLVMKKEENDIPSCDLSGFVRPNPIIVSSPLSTFFRSSPEDSPIIPETQVLHEETTIPGTDLKLSYL
SSRAAGYKSVLKITMTQSIIPFNLMKVHLMVAVVGRLFQKWFPASPNLAYTFIWDKTDAYNQKVYGLS
EAVVSVGYEYESCLDLTLWEKRTAILQGYELDASNMGGWTLDKHHVLDVQNGILYKGNGENQFISQOP
PVVSS

| | | |
|---|---|---|
| NOV40r, 309327410 | SEQ ID NO: 519 | 2482 bp |
| DNA Sequence | ORF Start: at 2 | ORF Stop: end of sequence |

CACCTCGCGAAACTGGCAGCTACAGCAGACTGAAAATGACACATTTGAGAATGGAAAAGTGAATTCTG
ATACCATGCCAACAAACACTGTGTCATTACCTTCTGGAGACAATGGAAAATTAGGTGGATTTACGCAA
GAAAATAACACCATAGATTCCGGAGAACTTGATATTGGCCGAAGAGCAATTCAAGAGATTCCTCCCGG
GATCTTCTGGAGATCACAGCTCTTCATTGATCAGCCACAGTTTCTTAAATTCAATATCTCTCTTCAGA
AGGATGCATTGATTGGAGTATATGGCCGGAAAGGCTTACCGCCTTCCCATACTCAGTATGACTTCGTG
GAGCTCCTGGATGGCAGCAGGCTGATTGCCAGAGAGCAGCGGAGCCTGCTTGAGACGGAGAGAGCCGG
GCGGCAGGCGAGATCCGTCAGCCTTCATGAGGCCGGCTTTATCCAGTACTTGGATTCTGGAATCTGGC
ATCTGGCTTTTTATAATGATGGGAAAAATGCAGAGCAGGTGTCTTTTAATACCATTGTTATAGAGTCT
GTGGTGGAATGTCCCCGAAATTGCCATGGAAATGGAGAATGCGTTTCTGGAACTTGCCATTGTTTTCC
AGGATTTCTGGGTCCGGATTGTTCAAGAGCCGCCTGTCCAGTGTTATGTAGTGGCAACGGGCAGTACT
CCAAGGGCCGCTGCCTGTGTTTCAGCGGCTGGAAGGGCACCGAGTGTGATGTGCCGACTACCCAGTGT
ATTGACCCACAGTGTGGGGGTCGTGGGATTTGTATCATGGGCTCTTGTGCTTGCAACTCAGGATACAA
AGGAGAAAGTTGTGAAGAAGCTGACTGTATAGACCCTGGGTGTTCTAATCATGGTGTGTGTATCCACG
GGGAATGTCACTGCAGTCCAGGATGGGGAGGTAGCAATTGTGAAATACTGAAGACCATGTGTCCAGAC
CAGTGCTCCGGCCACGGAACGTATCTTCAAGAAAGTGGCTCCTGCACGTGTGACCCTAACTGGACTGG
CCCAGACTGCTCAAACGAAATATGTTCTGTGGACTGTGGCTCACACGGCGTTTGCATGGGGGGGACGT
GTCGCTGTGAAGAAGGCTGGACGGGCCCAGCCTGTAATCAGAGAGCCTGCCACCCCCGCTGTGCCGAG
CACGGGACCTGCAAGGATGGCAAGTGTGAATGCAGCCAGGGCTGGAATGGAGAGCACTGCACTATCGC
TCACTATTTGGATAAGATAGTTAAAGAGGGTTGTCCTGGTCTGTGCAACAGCAATGGAAGATGTACCC
TGGACCAAAATGGCTGGCATTGTGTGTGCCAGCCTGGATGGAGAGGAGCAGGCTGTGACGTAGCCATG
GAGACTCTTTGCACAGATAGTAAGGACAATGAAGGAGATGGACTCATTGACTGCATGGATCCCGATTG
CTGCCTACAGAGTTCCTGCCAGAATCAGCCCTATTGTCGGGGACTGCCGGATCCTCAGGACATCATTA
GCCAAAGCCTTCAATCGCCTTCTCAGCAAGCTGCCAAATCCTTTTATGATCGAATCAGTTTCCTTATA
GGATCTGATAGCACCCATGTTATACCTGGAGAAAGTCCTTTCAATAAGAGCCTTGCATCTGTCATCAG
AGGCCAAGTACTGACTGCTGATGGAACTCCACTTATTGGAGTAAATGTCTCGTTTTTCCATTACCCAG
AATATGGATATACTATTACCCGCCAGGACGGAATGTTTGACTTGGTGGCAAATGGTGGGGCCTCTCTA
ACTTTGGTATTTGAACGATCCCCATTCCTCACTCAGTATCATACTGTGTGGATTCCATGGAATGTCTT
TTATGTGATGGATACCCTAGTCATGAAGAAAGAAGAGAATGACATTCCCAGCTGTGATCTGAGTGGAT
TCGTGAGGCCAAATCCCATCATTGTGTCATCACCTTTATCCACCTTTTTCAGATCTTCTCCTGAAGAC
AGTCCCATCATTCCCGAAACACAGGTACTCCACGAGGAAACTACAATTCCAGGAACAGATTTGAAACT
CTCCTACTTGAGTTCCAGAGCTGCAGGGTATAAGTCAGTTCTCAAGATCACCATGACCCAGTCTATTA
TTCCATTTAATTTAATGAAGGTTCATCTTATGGTAGCTGTAGTAGGAAGACTCTTCCAAAAGTGGTTT
CCTGCCTCACCAAACTTGGCCTATACTTTCATATGGGATAAAACAGATGCATATAATCAGAAAGTCTA
TGGTCTATCTGAAGCTGTTGTGTCAGTTGGATATGAGTATGAGTCGTGTTTGGACCTGACTCTGTGGG
AAAAGAGGACTGCCATTCTGCAGGGCTATGAATTGGATGCGTCCAACATGGGTGGCTGGACATTAGAT
AAACATCACGTGCTGGATGTACAGAACGGTATACTGTACAAGGGAAACGGGGAAAACCAGTTCATCTC
CCAGCAGCCTCCAGTCGTGAGTAGCCTCGAGGGC

| | | | |
|---|---|---|---|
| NOV40r, 309327410 | SEQ ID NO: 520 | 827 aa | MW at 90529.8kD |
| Protein Sequence | | | |

TSRNWQLQQTENDTFENGKVNSDTMPTNTVSLPSGDNGKIGGFTQENNTIDSGELDIGRRAIQEIPPG
IFWRSQLFIDQPQFLKFNISLQKDALIGVYGRKGLPPSHTQYDFVELLDGSRLIAREQRSLLETERAG
RQARSVSLHEAGFIQYLDSGIWHLAFYNDGKNAEQVSFNTIVIESVVECPRNCHGNGECVSGTCHCFP
GFLGPDCSRAACPVLCSGNGQYSKGRCLCFSGWKGTECDVPTTQCIDPQCGGRGICIMGSCACNSGYK
GESCEEADCIDPGCSNHGVCIHGECHCSPGWGGSNCEILKTMCPDQCSGHGTYLQESGSCTCDPNWTG
PDCSNEICSVDCGSHGVCMGGTCRCEEGWTGPACNQRACHPRCAEHGTCKDGKCECSQGWNGEHCTIA
HYLDKIVKEGCPGLCNSNGRCTLDQNGWHCVCQPGWRGAGCDVAMETLCTDSKDNEGDGLIDCMDPDC
CLQSSCQNQPYCRGLPDPQDIISQSLQSPSQQAAKSFYDRISFLIGSDSTHVIPGESPFNKSLASVIR
GQVLTADGTPLIGVNVSFFHYPEYGYTITRQDGMFDLVANGGASLTLVFERSPFLTQYHTVWIPWNVF
YVMDTLVMKKEENDIPSCDLSGFVRPNPIIVSSPLSTFFRSSPEDSPIIPETQVLHEETTIPGTDLKL
SYLSSRAAGYKSVLKITMTQSIIPFNLMKVHLMVAVVGRLFQKWFPASPNLAYTFIWDKTDAYNQKVY
GLSEAVVSVGYEYESCLDLTLWEKRTAILQGYELDASNMGGWTLDKHHVLDVQNGILYKGNGENQFIS
QQPPVVSSLEG

| | | |
|---|---|---|
| NOV40s, CG55069-02 | SEQ ID NO: 521 | 8645 bp |
| DNA Sequence | ORF Start: ATG at 151 | ORF Stop: TAA at 8314 |

TTTGGCCTCGGGCCAGAATTCGGCACGAGGGGTCTGGAGCTTGGAGGAGAAGTCTGAACTAAGGATAA
ACTAAAGAGAGGCCAATGAGACTTGAACCCTGAGCCTAAGTTGTCACCAGCAGGACTGATGTGCACAC
AGAAGGAATGAAGTATGGATGTGAAAGAACGCAGGCCTTACTGCTCCCTGACCAAGAGCAGACGAGAG
AAGGAACGGCGCTACACAAATTCCTCCGCAGACAATGAGGAGTGCCGGGTACCCACACAGAAGTCCTA
CAGTTCCAGCGAGACATTGAAAGCTTTTGATCATGATTCCTCGCGGCTGCTTTACGGCAACAGAGTGA
AGGATTTGGTTCACAGAGAAGCAGACGAGTTCACTAGACAAGGACAGAATTTTACCCTAAGGCAGTTA
GGAGTTTGTGAACCAGCAACTCGAAGAGGACTGGCATTTTGTGCGGAAATGGGGCTCCCTCACAGAGG
TTACTCTATCAGTGCAGGGTCAGATGCTGATACTGAAAATGAAGCAGTGATGTCCCCAGAGCATGCCA
TGAGACTTTGGGGCAGGGGGGTCAAATCAGGCCGCAGCTCCTGCCTGTCAAGTCGGTCCAACTCAGCC
CTCACCCTGACAGATACGGAGCACGAAAACAAGTCCGACAGTGAGAATGAGCAACCTGCAAGCAATCA
AGGCCAGTCTACCCTGCAGCCCTTGCCGCCTTCCCATAAGCAGCACTCTGCACAGCATCATCCATCCA
TCACTTCTCTCAACAGAAACTCCCTGACCAATAGAAGGAACCAGAGTCCGGCCCCGCCGGCTGCTTTG
CCCGCCGAGCTGCAAACCACACCCGAGTCCGTCCAGCTGCAGGACAGCTGGGTCCTTGGCAGTAATGT
ACCACTGGAAAGCAGGCATTTCCTATTCAAAACAGGAACAGGTACAACGCCACTGTTCAGTACTGCAA
CCCCAGGATACACAATGGCATCTGGCTCTGTTTATTCACCACCTACTCGGCCACTACCTAGAAACACC
CTATCAAGAAGTGCTTTTAAATTCAAGAAGTCTTCAAAGTACTGTAGCTGGAAATGCACTGCACTGTG
TGCCGTAGGGGTCTCGGTGCTCCTGGCAATACTCCTGTCTTATTTTATAGCAATGCATCTCTTTGGCC
TCAACTGGCAGCTACAGCAGACTGAAAATGACACATTTGAGAATGGAAAAGTGAATTCTGATACCATG
CCAACAAACACTGTGTCATTACCTTCTGGAGACAATGGAAAATTAGGTGGATTTACGCAAGAAAATAA
CACCATAGATTCCGGAGAACTTGATATTGGCCGAAGAGCAATTCAAGAGATTCCTCCCGGGATCTTCT
GGAGATCACAGCTCTTCATTGATCAGCCACAGTTTCTTAAATTCAATATCTCTCTTCAGAAGGATGCA
TTGATTGGAGTATATGGCCGGAAAGGCTTACCGCCTTCCCATACTCAGTATGACTTCGTGGAGCTCCT
GGATGGCAGCAGGCTGATTGCCAGAGAGCAGCGGAGCCTGCTTGAGACGGAGAGAGCCGGGCGGCAGG
CGAGATCCGTCAGCCTTCATGAGGCCGGCTTTATCCAGTACTTGGATTCTGGAATCTGGCATCTGGCT
TTTTATAATGATGGGAAAAATGCAGAGCAGGTGTCTTTTAATACCATTGTTATAGAGTCTGTGGTGGA
ATGTCCCCGAAATTGCCATGGAAATGGAGAATGCGTTTCTGGAACTTGCCATTGTTTTCCAGGATTTC
TGGGTCCGGATTGTTCAAGAGCCGCCTGTCCAGTGTTATGTAGTGGCAACGGGCAGTACTCCAAGGGC
CGCTGCCTGTGTTTCAGCGGCTGGAAGGGCACCGAGTGTGATGTGCCGACTACCCAGTGTATTGACCC
ACAGTGTGGGGGTCGTGGGATTTGTATCATGGGCTCCTGTGCTTGCAGCTCAGGATACAAAGGAGAAA
GTTGTGAAGAAGCTGACTGTATAGACCCTGGGTGTTCTAATCATGGTGTGTGTATCCACGGGGAATGT
CACTGCAGTCCAGGATGGGGAGGTAGCAATTGTGAAATACTGAAGACCATGTGTCCAGACCAGTGCTC
CGGCCACGGAACGTATCTTCAAGAAAGTGGCTCCTGCACGTGTGACCCTAACTGGACTGGCCCAGACT
GCTCAAACGAAATATGTTCTGTGGACTGTGGCTCACACGGCGTTTGCATGGGGGGGACGTGTCGCTGT
GAAGAAGGCTGGACGGGCCCAGCCTGTAATCAGAGAGCCTGCCACCCCCGCTGTGCCGAGCACGGGAC
CTGCAAGGATGGCAAGTGTGAATGCAGCCAGGGCTGGAATGGAGAGCACTGCACTATCGCTCACTATT
TGGATAAGATAGTTAAAGACAAGATAGGATATAAAGAGGGTTGTCCTGGTCTGTGCAACAGCAATGGA
AGATGTACCCTGGACCAAAATGGCGGACATTGTGTGTGCCAGCCTGGATGGAGAGGAGCAGGCTGTGA
CGTAGCCATGGAGACTCTTTGCACAGATAGCAAGGACAATGAAGGGGATGGACTCATTGACTGCATGG
ATCCCGATTGCTGCCTACAGAGTTCCTGCCAGAATCAGCCCTATTGTCGGGGACTGCCGGATCCTCAG
GACATCATTAGCCAAAGCCTTCAATCGCCTTCTCAGCAAGCTGCCAAATCCTTTTATGATCGAATCAG
TTTCCTTATAGGATCTGATAGCACCCATGTTATACCTGGAGAAAGTCCTTTCAATAAGAGCCTTGCAT
CTGTCATCAGAGGCCAAGTACTGACTGCTGATGGAACTCCACTTATTGGAGTAAATGTCTCGTTTTTC
CATTACCCAGAATATGGATATACTATTACCCGCCAGGACGGAATGTTTGACTTGGTGGCAAATGGTGG
GGCCTCTCTAACTTTGGTATTTGAACGATCCCCATTCCTCACTCAGTATCATACTGTGTGGATTCCAT
GGAATGTCTTTTATGTGATGGATACCCTAGTCATGGAGAAAGAAGAGAATGACATTCCCAGCTGTGAT
CTGAGTGGATTCGTGAGGCCAAATCCCATCATTGTGTCATCACCTTTATCCACCTTTTTCAGATCTTC
TCCTGAAGACAGTCCCATCATTCCCGAAACACAGGTACTCCACGAGGAAACTACAATTCCAGGAACAG
ATTTGAAACTCTCCTACTTGAGTTCCAGAGCTGCAGGGTATAAGTCAGTTCTCAAGATCACCATGACC
CAGTCTATTATTCCATTTAATTTAATGAAGGTTCATCTTATGGTAGCTGTAGTAGGAAGACTCTTCCA
AAAGTGGTTTCCTGCCTCACCAAACTTGGCCTATACTTTCATATGGGATAAAACAGATGCATATAATC
AGAAAGTCTATGGTCTATCTGAAGCTGTTGTGTCAGTTGGATATGAGTATGAGTCGTGTTTGGACCTG
ACTCTGTGGGAAAAGAGGACTGCCATTCTGCAGGGCTATGAATTGGATGCGTCCAACATGGGTGGCTG
GACATTAGATAAACATCACGTGCTGGATGTACAGAACGGTATACTGTACAAGGGAAACGGGGAAAACC
AGTTCATCTCCCAGCAGCCTCCAGTCGTGAGTAGCATCATGGGCAATGGGCGAAGGCGCAGCATTTCC
TGCCCCAGTTGCAATGGTCAAGCTGATGGTAACAAGTTACTGGCCCCAGTGGCGCTAGCTTGTGGGAT
CGATGGCAGTCTGTACGTAGGCGATTTCAACTACGTGCGGCGGATATTCCCTTCTGGAAATGTAACAA
GTGTCTTAGAACTAAGAAATAAAGATTTTAGACATAGCAGCAACCCAGCTCATAGATACTACCTTGCA
ACGGATCCAGTCACGGGAGATCTGTACGTTTCTGACACAAACACCCGCAGAATTTATCGCCCAAAGTC
ACTTACGGGGGCAAAAGACTTGACTAAAAATGCAGAAGTCGTCGCAGGGACAGGGGAGCAATGCCTTC
CGTTTGACGAGGCGAGATGTGGGGATGGAGGGAAGGCCGTGGAAGCCACACTCATGAGTCCCAAAGGA
ATGGCAGTTGATAAGAATGGATTAATCTACTTTGTTGATGGAACCATGATTAGGAAAGTTGACCAAAA
TGGAATCATATCAACTCTTCTGGGCTCTAACGATTTGACTTCAGCCAGACCTTTAACTTGTGACACCA
GCATGCACATCAGCCAGGTACGTCTGGAATGGCCCACTGACCTAGCCATTAACCCTATGGATAACTCC
ATTTATGTCCTGGATAATAATGTAGTTTTACAGATCACTGAAAATCGTCAAGTTCGCATTGCTGCTGG
ACGGCCCATGCACTGTCAGGTTCCCGGAGTGGAATATCCTGTGGGGAAGCACGCGGTGCAGACAACAC
TGGAATCAGCCACTGCCATTGCTGTGTCCTACAGTGGGGTCCTGTACATTACTGAAACTGATGAGAAG
AAAATTAACCGGATAAGGCAGGTCACAACAGATGGAGAAATCTCCTTAGTGGCCGGAATACCTTCAGA
GTGTGACTGCAAAAATGATGCCAACTGTGACTGTTACCAGAGTGGAGATGGCTACGCCAAGGATGCCA
AACTCAGTGCCCCATCCTCCCTGGCTGCTTCTCCAGATGGTACACTGTATATTGCAGATCTAGGGAAT
ATCCGGATCCGGGCTGTGTCAAAGAATAAGCCTTTACTTAACTCTATGAACTTCTATGAAGTTGCGTC
TCCAACTGATCAAGAACTCTACATCTTTGACATCAATGGTACTCACCAATATACTGTAAGTTTAGTCA
CTGGTGATTACCTTTACAATTTTAGCTACAGCAATGACAATGATATTACTGCTGTGACAGACAGCAAT
GGCAACACCCTTAGAATTAGACGGGACCCAAATCGCATGCCAGTTCGAGTGGTGTCTCCTGATAACCA
AGTGATATGGTTGACAATAGGAACAAATGGATGTTTGAAAGGCATGACTGCTCAAGGACTGGAATTAG
TTTTGTTTACTTACCATGGCAATAGTGGCCTTTTAGCCACTAAAAGTGATGAAACTGGATGGACAACG
TTTTTTGACTATGACAGTGAAGGTCGTCTGACAAATGTTACGTTTCCAACTGGAGTGGTCACAAACCT
GCATGGGGACATGGACAAGGCTATCACAGTGGACATTGAGTCATCTAGCCGAGAAGAAGATGTCAGCA
TCACTTCAAATCTGTCCTCGATCGATTCTTTCTACACCATGGTTCAAGATCAGTTAAGAAACAGCTAC
CAGATTGGTTATGACGGCTCCCTCAGAATTATCTACGCCAGTGGCCTGGACTCACACTACCAAACAGA
GCCGCACGTTCTGGCTGGCACCGCTAATCCGACGGTTGCCAAAAGAAACATGACTTTGCCTGGCGAGA
ACGGTCAAAACTTGGTGGAATGGAGATTCCGAAAAGAGCAAGCCCAAGGGAAAGTCAATGTCTTTGGC
CGCAAGCTCAGGGTTAATGGCAGAAACCTCCTTTCAGTTGACTTTGATCGAACAACAAAGACAGAAAA
GATCTATGACGACCACCGTAAATTTCTACTGAGGATCGCCTACGACACGTCTGGGCACCCGACTCTCT
GGCTGCCAAGCAGCAAGCTGATGGCCGTCAATGTCACCTATTCATCCACAGGTCAAATTGCCAGCATC
CAGCGAGGCACCACTAGCGAGAAAGTAGATTATGACGGACAGGGGAGGATCGTGTCTCGGGTCTTTGC
TGATGGTAAAACATGGAGTTACACATATTTAGAAAAGTCCATGGTTCTTCTGCTTCATAGCCAGCGGC
AGTACATCTTCGAATACGATATGTGGGACCGCCTGTCTGCCATCACCATGCCCAGTGTGGCTCGCCAC
ACCATGCAGACCATCCGATCCATTGGCTACTACCGCAACATATACAACCCCCCGGAAAGCAACGCCTC
CATCATCACGGACTACAACGAGGAAGGGCTGCTTCTACAAACAGCTTTCTTGGGTACAAGTCGGAGGG
TCTTATTCAAATACAGAAGGCAGACTAGGCTCTCAGAAATTTTATATGATAGCACAAGAGTCAGTTTT
ACCTATGATGAAACAGCAGGAGTCCTAAAGACAGTAAACCTCCAGAGTGATGGTTTTATTTGCACCAT
TAGATACAGGCAAATTGGTCCCCTGATTGACAGGCAGATTTTCCGCTTTAGTGAAGATGGGATGGTAA
ATGCAAGATTTGACTATAGCTATGACAACAGCTTTCGAGTGACCAGCATGCAGGGTGTGATCAATGAA
ACGCCACTGCCTATTGATCTGTATCAGTTTGATGACATTTCTGGCAAAGTTGAGCAGTTTGGAAAGTT
TGGAGTTATATATTATGATATTAACCAGATCATTTCTACAGCTGTAATGACCTATACGAAGCACTTTG
ATGCTCATGGCCGTATCAAGGAGATTCAATATGAGATATTCAGGTCGCTCATGTACTGGATTACAATT
CAGTATGATAACATGGGTCGGGTAACCAAGAGAGAGATTAAAATAGGGCCCTTTGCCAACACCACCAA
ATATGCTTATGAATATGATGTTGATGGACAGCTCCAAACAGTTTACCTCAATGAAAAGATAATGTGGC
GGTACAACTACGATCTGAATGGAAACCTCCATTTACTGAACCCAAGTAACAGTGCGCGTCTGACACCC
CTTCGCTATGACCTGCGAGACAGAATCACTCGACTGGGTGATGTTCAATATCGGTTGGATGAAGATGG
TTTCCTACGTCAAAGGGGCACGGAAATCTTTGAATATAGCTCCAAGGGGCTTCTAACTCGAGTTTACA
GTAAAGGCAGTGGCTGGACAGTGATCTACCGTTATGACGGCCTGGGAAGGCGTGTTTCTAGCAAAACC
AGTCTAGGACAGCACCTGCAGTTTTTTTATGCTGACTTAACTTATCCCACTAGGATTACTCATGTCTA
CAACCATTCGAGTTCAGAAATTACCTCCCTGTATTATGATCTCCAAGGACATCTTTTTGCCATGGAAA
TCAGCAGTGGGGATGAATTCTATATTGCATCGGATAACACAGGGACACCACTGGCTGTGTTCAGTAGC
AATGGGCTTATGCTGAAACAGATTCAGTACACTGCATATGGGGAAATCTATTTTGACTCTAATATTGA
CTTTCAACTGGTAATTGGATTTCATGGTGGCCTGTATGACCCACTCACCAAATTAATCCACTTTGGAG
AAAGAGATTATGACATTTTGGCAGGACGGTGGACAACACCTGACATAGAAATCTGGAAAAGAATTGGG
AAGGACCCAGCTCCTTTTAACTTGTACATGTTTAGGAATAACAACCCTGCAAGCAAAATCCATGACGT
GAAAGATTACATCACAGATGTTAACAGCTGGCTGGTGACATTTGGTTTCCATCTGCACAATGCTATTC
CTGGATTCCCTGTTCCCAAATTTGATTTAACAGAACCTTCTTACGAACTTGTGAAGAGTCAGCAGTGG
GATGATATACCGCCCATCTTCGGAGTCCAGCAGCAAGTGGCGCGGCAGGCCAAGGCCTTCCTGTCGCT
GGGGAAGATGGCCGAGGTGCAGGTGAGCCGGCGCCGGGCCGGCGGCGCGCAGTCCTGGCTGTGGTTCG
CCACGGTCAAGTCGCTGATCGGCAAGGGCGTCATGCTGGCCGTCAGCCAGGGCCGCGTGCAGACCAAC
GTGCTCAACATCGCCAACGAGGACTGCATCAAGGTGGCGGCCGTGCTCAACAACGCCTTCTACCTGGA
GAACCTGCACTTCACCATCGAGGGCAAGGACACGCACTACTTCATCAAGACCACCACGCCCGAGAGCG
ACCTGGGCACGCTGCGGTTGACCAGCGGCCGCAAGGCGCTGGAGAACGGCATCAACGTGACGGTGTCG
CAGTCCACCACGGTGGTGAACGGCAGGACGCGCAGGTTCGCGGACGTGGAGATGCAGTTCGGCGCGCT
GGCGCTGCACGTGCGCTACGGCATGACCCTGGACGAGGAGAAGGCGCGCATCCTGGAGCAGGCGCGGC
AGCGCGCGCTCGCCCGGGCCTGGGCGCGCGAGCAGCAGCGCGTGCGCGACGGCGAGGAGGGCGCGCGC
CTCTGGACGGAGGGCGAGAAGCGGCAGCTGCTGAGCGCCGGCAAGGTGCAGGGCTACGACGGGTACTA
CGTACTCTCGGTGGAGCAGTACCCCGAGCTGGCCGACAGCGCCAACAACATCCAGTTCCTGCGGCAGA
GCGAGATCGGCAGGAGGTAACGCCCGGGCCGCGCCCGCCGAGCCGCTCACGCCCTGCCCACATTGTCC
TGTGGCACAACCCGAGTGGGACTCTCCAACGCCCAAGAGCCTTCCTCCCGGGGGAATGAGACTGCTGT
TACGACCCACACCCACACCGCGAAAACAAGGACCGCTTTTTTCCGAATGACCTTAAAGGTGATCGGCT
TTAACGAATATGTTTACATATGCATAGCGCTGCACTCAGTCGGACTGAACGTAGCCAGAGGAAAAAAA
AATCATCAAGGACAAAGGCCTCGACCTGTTGCGCTGGGCCGTCTGTTCCTTCTAGGCACTGTATTTAA
CTAACTTTA

| | | | |
|---|---|---|---|
| NOV40s, CG55069-02 | SEQ ID NO: 522 | 2721 aa | MW at 303489.1kD |
| Protein Sequence | | | |

MDVKERRPYCSLTKSRREKERRYTNSSADNEECRVPTQKSYSSSETLKAFDHDSSRLLYGNRVKDLVH
READEFTRQGQNFTLRQLGVCEPATRRGLAFCAEMGLPHRGYSISAGSDADTENEAVMSPEHAMRLWG
RGVKSGRSSCLSSRSNSALTLTDTEHENKSDSENEQPASNQGQSTLQPLPPSHKQHSAQHNPSITSLN
RNSLTNRRNQSPAPPAALPAELQTTPESVQLQDSWVLGSNVPLESRHFLFKTGTGTTPLFSTATPGYT
MASGSVYSPPTRPLPRNTLSRSAFKFKKSSKYCSWKCTALCAVGVSVLLAILLSYFIAMHLFGLNWQL
QQTENDTFENGKVNSDTMPTNTVSLPSGDNGKLGGFTQENNTIDSGELDIGRRAIQEIPPGIFWRSQL
FIDQPQFLKFNISLQKDALIGVYGRKGLPPSHTQYDFVELLDGSRLIAREQRSLLETERAGRQARSVS
LHEAGFIQYLDSGIWHLAFYNDGKNAEQVSFNTIVIESVVECPRNCHGNGECVSGTCHCFPGFLGPDC
SRAACPVLCSGNGQYSKGRCLCFSGWKGTECDVPTTQCIDPQCGGRGICIMGSCACSSGYKGESCEEA
DCIDPGCSNHGVCIHGECHCSPGWGGSNCEILKTMCPDQCSGHGTYLQESGSCTCDPNWTGPDCSNEI
CSVDCGSHGVCMGGTCRCEEGWTGPACNQRACHPRCAEHGTCKDGKCECSQGWNGEHCTIAHYLDKIV
KDKIGYKEGCPGLCNSNGRCTLDQNGGHCVCQPGWRGAGCDVAMETLCTDSKDNEGDGLIDCMDPDCC
LQSSCQNQPYCRGLPDPQDIISQSLQSPSQQAAKSFYDRISFLIGSDSTHVIPGESPFNKSLASVIRG
QVLTADGTPLIGVNVSFFHYPEYGYTITRQDGMFDLVANGGASLTLVFERSPFLTQYHTVWIPWNVFY
VMDTLVMEKEENDIPSCDLSGFVRPNPIIVSSPLSTFFRSSPEDSPIIPETQVLHEETTIPGTDLKLS
YLSSRAAGYKSVLKITMTQSIIPFNLMKVHLMVAVVGRLFQKWFPASPNLAYTFIWDKTDAYNQKVYG
LSEAVVSVGYEYESCLDLTLWEKRTAILQGYELDASNNGGWTLDKHHVLDVQNGILYKGNGENQFISQ
QPPVVSSIMGNGRRRSISCPSCNGQADGNKLLAPVALACGIDGSLYVGDFNYVRRIFPSGNVTSVLEL
RNKDFRHSSNPAHRYYLATDPVTGDLYVSDTNTRRIYRPKSLTGAKDLTKNAEVVAGTGEQCLPFDEA
RCGDGGKAVEATLMSPKGMAVDKNGLIYFVDGTMIRKVDQNGIISTLLGSNDLTSARPLTCDTSMHIS
QVRLEWPTDLAINPMDNSIYVLDNNVVLQITENRQVRIAAGRPMHCQVPGVEYPVGKHAVQTTLESAT
AIAVSYSGVLYITETDEKKINRIRQVTTDGEISLVAGIPSECDCKNDANCDCYQSGDGYAKDAKLSAP
SSLAASPDGTLYIADLGNIRIRAVSKNKPLLNSMNFYEVASPTDQELYIFDINGTHQYTVSLVTGDYL
YNFSYSNDNDITAVTDSNGNTLRIRRDPNRMPVRVVSPDNQVIWLTIGTNGCLKGMTAQGLELVLFTY
HGNSGLLATKSDETGWTTFFDYDSEGRLTNVTFPTGVVTNLHGDMDKAITVDIESSSREEDVSITSNL
SSIDSFYTMVQDQLRNSYQIGYDGSLRIIYASGLDSHYQTEPHVLAGTANPTVAKRNMTLPGENGQNL
VEWRFRKEQAQGKVNVFGRKLRVNGRNLLSVDFDRTTKTEKIYDDHRKFLLRIAYDTSGHPTLWLPSS
KLMAVNVTYSSTGQIASIQRGTTSEKVDYDGQGRIVSRVFADGKTWSYTYLEKSMVLLLHSQRQYIFE
YDMWDRLSAITMPSVARHTMQTIRSIGYYRNIYNPPESNASIITDYNEEGLLLQTAFLGTSRRVLFKY
RRQTRLSEILYDSTRVSFTYDETAGVLKTVNLQSDGFICTIRYRQIGPLIDRQIFRFSEDGMVNARFD
YSYDNSFRVTSMQGVINETPLPIDLYQFDDISGKVEQFGKFGVIYYDINQIISTAVMTYTKHFDAHGR
IKEIQYEIFRSLMYWITIQYDNMGRVTKREIKIGPFANTTKYAYEYDVDGQLQTVYLNEKIMWRYNYD
LNGNLHLLNPSNSARLTPLRYDLRDRITRLGDVQYRLDEDGFLRQRGTEIFEYSSKGLLTRVYSKGSG
WTVIYRYDGLGRRVSSKTSLGQHLQFFYADLTYPTRITHVYNHSSSEITSLYYDLQGHLFAMEISSGD
EFYIASDNTGTPLAVFSSNGLMLKQIQYTAYGEIYFDSNIDFQLVIGFHGGLYDPLTKLIHFGERDYD
ILAGRWTTPDIEIWKRIGKDPAPFNLYMFRNNNPASKIHDVKDYITDVNSWLVTFGFHLHNAIPGFPV
PKFDLTEPSYELVKSQQWDDIPPIFGVQQQVARQAKAFLSLGKMAEVQVSRRRAGGAQSWLWFATVKS
LIGKGVMLAVSQGRVQTNVLNIANEDCIKVAAVLNNAFYLENLHFTIEGKDTHYFIKTTTPESDLGTL
RLTSGRKALENGINVTVSQSTTVVNGRTRRFADVEMQFGALALHVRYGMTLDEEKARILEQARQRALA
RAWAREQQRVRDGEEGARLWTEGEKRQLLSAGKVQGYDGYYVLSVEQYPELADSANNIQFLRQSEIGR
R

| | | |
|---|---|---|
| NOV40t, CG55069-05 | SEQ ID NO: 523 | 810 bp |
| DNA Sequence | ORF Start: at 7 | ORF Stop: at 805 |

AAGCTTTGTCCCCGAAATTGCCATGGAAATGGAGAATGCGTTTCTGGAACTTGCCATTGTTTTCCAGG
ATTTCTGGGTCCGGATTGTTCAAGAGCCGCCTGTCCAGTGTTATGTAGTGGCAACGGGCAGTACTCCA
AGGGCCGCTGCCTGTGTTTCAGCGGCTGGAAGGGCACCGAGTGTGATGTGCCGACTACCCAGTGTATT
GACCCACAGTGTGGGGGTCGTGGGATTTGTATCATGGGCTCTTGTGCTTGCAACTCAGGATACAAAGG
AGAAAGTTGTGAAGAAGCTGACTGTATAGACCCTGGGTGTTCTAATCATGGTGTGTGTATCCACGGGG
AATGTCACTGCAGTCCAGGATGGGGAGGTAGCAATTGTGAAATACTGAAGACCATGTGTCCAGACCAG
TGCTCCGGCCACGGAACGTATCTTCAAGAAAGTGGCTCCTGCACGTGTGACCCTAACTGGACTGGCCC
AGACTGCTCAAACGAAATATGTTCTGTGGACTGTGGCTCACACGGCGTTTGCATGGGGGGGACGTGTC
GCTGTGAAGAAGGCTGGACGGGCCCAGCCTGTAATCAGAGAGCCTGCCACCCCCGCTGTGCCGAGCAC
GGGACCTGCAAGGATGGCAAGTGTGAATGCAGCCAGGGCTGGAATGGAGAGCACTGCACTATCGCTCA
CTATTTGGATAAGATAGTTAAAGAGGGTTGTCCTGGTCTGTGCAACAGCAATGGAAGATGTACCCTGG
ACCAAAATGGCTGGCATTGTGTGTGCCAGCCTGGATGGAGAGGAGCAGGCTGTGACGTCGAC

| | | | |
|---|---|---|---|
| NOV40t, GG55069-05 | SEQ ID NO: 524 | 266 aa | MW at 27935.0kD |
| Protein Sequence | | | |

CPRNCHGNGECVSGTCHCFPGFLGPDCSRAACPVLCSGNGQYSKGRCLCFSGWKGTECDVPTTQCIDP
QCGGRGICIMGSCACNSGYKGESCEEADCIDPGCSNHGVCIHGECHCSPGWGGSNCEILKTMCPDQCS
GHGTYLQESGSCTCDPNWTGPDCSNEICSVDCGSHGVCMGGTCRCEEGWTGPACNQRACHPRCAEHGT
CKDGKCECSQGWNGEHCTIAHYLDKIVKEGCPGLCNSNGRCTLDQNGWHCVCQPGWRGAGCD

| | | |
|---|---|---|
| NOV40u, CG55069-06 | SEQ ID NO: 525 | 8204 bp |
| DNA Sequence | ORF Start: ATG at 4 | ORF Stop: TAA at 8179 |

AGTATGGATGTGAAAGAACGCAGGCCTTACTGCTCCCTGACCAAGAGCAGACGAGAGAAGGAACGGCG
CTACACAAATTCCTCCGCAGACAATGAGGAGTGCCGGGTACCCACACAGAAGTCCTACAGTTCCAGCG
AGACATTGAAAGCTTTTGATCATGATTCCTCGCGGCTGCTTTACGGCAACAGAGTGAAGGATTTGGTT
CACAGAGAAGCAGACGAGTTCACTAGACAAGGACAGAATTTTACCCTAAGGCAGTTAGGAGTTTGTGA
ACCAGCAACTCGAAGAGGACTGGCATTTTGTGCGGAAATGGGGCTCCCTCACAGAGGTTACTCTATCA
GTGCAGGGTCAGATGCTGATACTGAAAATGAAGCAGTGATGTCCCCAGAGCATGCCATGAGACTTTGG
GGCAGGGGGGTCAAATCAGGCCGCAGCTCCTGCCTGTCAAGTCGGTCCAACTCAGCCCTCACCCTGAC
AGATACGGAGCACGAAAACAAGTCCGACAGTGAGAATGAGCAACCTGCAAGCAATCAAGGCCAGTCTA
CCCTGCAGCCCTTGCCGCCTTCCCATAAGCAGCACTCTGCACAGCATCATCCATCCATCACTTCTCTC
AACAGAAACTCCCTGACCAATAGAAGGAACCAGAGTCCGGCCCCGCCGGCTGCTTTGCCCGCCGAGCT
GCAAACCACACCCGAGTCCGTCCAGCTGCAGGACAGCTGGGTCCTTGGCAGTAATGTACCACTGGAAA
GCAGGCATTTCCTATTCAAAACAGGAACAGGTACAACGCCACTGTTCAGTACTGCAACCCCAGGATAC
ACAATGGCATCTGGCTCTGTTTATTCACCACCTACTCGGCCACTACCTAGAAACACCCTATCAAGAAG
TGCTTTTAAATTCAAGAAGTCTTCAAAGTACTGTAGCTGGAAATGCACTGCACTGTGTGCCGTAGGGG
TCTCGGTGCTCCTGGCAATACTCCTGTCTTATTTTATAGCAATGCATCTCTTTGGCCTCAACTGGCAG
CTACAGCAGACTGAAAATGACACATTTGAGAATGGAAAAGTGAATTCTGATACCATGCCAACAAACAC
TGTGTCATTACCTTCTGGAGACAATGGAAAATTAGGTGGATTTACGCAAGAAAATAACACCATAGATT
CCGGAGAACTTGATATTGGCCGAAGAGCAATTCAAGAGATTCCTCCCGGGATCTTCTGGAGATCACAG
CTCTTCATTGATCAGCCACAGTTTCTTAAATTCAATATCTCTCTTCAGAAGGATGCATTGATTGGAGT
ATATGGCCGGAAGAAGTTACCGCCTTCCCATACTCAGTCCTCCCCCCAGTATGACTTCGTGGAGCTCC
TGGATGGCAGCAGGCTGATTGCCAGAGAGCAGCGGAGCCTGCTTGAGACGGAGAGAGCCGGGCGGCAG
GCGAGATCCGTCAGCCTTCATGAGGCCGGCTTTATCCAGTACTTGGATTCTGGAATCTGGCATCTGGC
TTTTTATAATGATGGGAAAAATGCAGAGCAGGTGTCTTTTAATACCATTGTTATAGAGTCTGTGGTGG
AATGTCCCCGAAATTGCCATGGAAATGGAGAATGCGTTTCTGGAACTTGCCATTGTTTTCCAGGATTT
CTGGGTCCGGATTGTTCAAGAGCCGCCTGTCCAGTGTTATGTAGTGGCAACGGGCAGTACTCCAAGGG
CCGCTGCCTGTGTTTCAGCGGCTGGAAGGGCACCGAGTGTGATGTGCCGACTACCCAGTGTATTGACC
CACAGTGTGGGGGTCGTGGGATTTGTATCATGGGCTCCTGTGCTTGCAGCTCAGGATACAAAGGAGAA
AGTTGTGAAGAAGCTGACTGTATAGACCCTGGGTGTTCTAATCATGGTGTGTGTATCCACGGGGAATG
TCACTGCAGTCCAGGATGGGGAGGTAGCAATTGTGAAATACTGAAGACCATGTGTCCAGACCAGTGCT
CCGGCCACGGAACGTATCTTCAAGAAAGTGGCTCCTGCACGTGTGACCCTAACTGGACTGGCCCAGAC
TGCTCAAACGAAATATGTTCTGTGGACTGTGGCTCACACGGCGTTTGCATGGGGGGGACGTGTCGCTG
TGAAGAAGGCTGGACGGGCCCAGCCTGTAATCAGAGAGCCTGCCACCCCCGCTGTGCCGAGCACGGGA
CCTGCAAGGATGGCAAGTGTGAATGCAGCCAGGGCTGGAATGGAGAGCACTGCACTATCGCTCACTAT
TTGGATAAGATAGTTAAAGACAAGATAGGATATAAAGAGGGTTGTCCTGGTCTGTGCAACAGCAATGG
AAGATGTACCCTGGACCAAAATGGCGGACATTGTGTGTGCCAGCCTGGATGGAGAGGAGCAGGCTGTG
ACGTAGCCATGGAGACTCTTTGCACAGATAGCAAGGACAATGAAGGGGATGGACTCATTGACTGCATG
GATCCCGATTGCTGCCTACAGAGTTCCTGCCAGAATCAGCCCTATTGTCGGGGACTGCCGGATCCTCA
GGACATCATTAGCCAAAGCCTTCAATCGCCTTCTCAGCAAGCTGCCAAATCCTTTTATGATCGAATCA
GTTTCCTTATAGGATCTGATAGCACCCATGTTATACCTGGAGAAAGTCCTTTCAATAAGAGCCTTGCA
TCTGTCATCAGAGGCCAAGTACTGACTGCTGATGGAACTCCACTTATTGGAGTAAATGTCTCGTTTTT
CCATTACCCAGAATATGGATATACTATTACCCGCCAGGACGGAATGTTTGACTTGGTGGCAAATGGTG
GGGCCTCTCTAACTTTGGTATTTGAACGATCCCCATTCCTCACTCAGTATCATACTGTGTGGATTCCA
TGGAATGTCTTTTATGTGATGGATACCCTAGTCATGGAGAAAGAAGAGAATGACATTCCCAGCTGTGA
TCTGAGTGGATTCGTGAGGCCAAATCCCATCATTGTGTCATCACCTTTATCCACCTTTTTCAGATCTT
CTCCTGAAGACAGTCCCATCATTCCCGAAACACAGGTACTCCACGAGGAAACTACAATTCCAGGAACA
GATTTGAAACTCTCCTACTTGAGTTCCAGAGCTGCAGGGTATAAGTCAGTTCTCAAGATCACCATGAC
CCAGTCTATTATTCCATTTAATTTAATGAAGGTTCATCTTATGGTAGCTGTAGTAGGAAGACTCTTCC
AAAAGTGGTTTCCTGCCTCACCAAACTTGGCCTATACTTTCATATGGGATAAAACAGATGCATATAAT
CAGAAAGTCTATGGTCTATCTGAAGCTGTTGTGTCAGTTGGATATGAGTATGAGTCGTGTTTGGACCT
GACTCTGTGGGAAAAGAGGACTGCCATTCTGCAGGGCTATGAATTGGATGCGTCCAACATGGGTGGCT
GGACATTAGATAAACATCACGTGCTGGATGTACAGAACGGTATACTGTACAAGGGAAACGGGGAAAAC
CAGTTCATCTCCCAGCAGCCTCCAGTCGTGAGTAGCATCATGGGCAATGGGCGAAGGCGCAGCATTTC
CTGCCCCAGTTGCAATGGTCAAGCTGATGGTAACAAGTTACTGGCCCCAGTGGCGCTAGCTTGTGGGA
TCGATGGCAGTCTGTACGTAGGCGATTTCAACTACGTGCGGCGGATATTCCCTTCTGGAAATGTAACA
AGTGTCTTAGAACTAAGAAATAAAGATTTTAGACATAGCAGCAACCCAGCTCATAGATACTACCTTGC
AACGGATCCAGTCACGGGAGATCTGTACGTTTCTGACACAAACACCCGCAGAATTTATCGCCCAAAGT
CACTTACGGGGGCAAAAGACTTGACTAAAAATGCAGAAGTCGTCGCAGGGACAGGGGAGCAATGCCTT
CCGTTTGACGAGGCGAGATGTGGGGATGGAGGGAAGGCCGTGGAAGCCACACTCATGAGTCCCAAAGG
AATGGCAGTTGATAAGAATGGATTAATCTACTTTGTTGATGGAACCATGATTAGGAAAGTTGACCAAA
ATGGAATCATATCAACTCTTCTGGGCTCTAACGATTTGACTTCAGCCAGACCTTTAACTTGTGACACC
AGCATGCACATCAGCCAGGTACGTCTGGAATGGCCCACTGACCTAGCCATTAACCCTATGGATAACTC
CATTTATGTCCTGGATAATAATGTAGTTTTACAGATCACTGAAAATCGTCAAGTTCGCATTGCTGCTG
GACGGCCCATGCACTGTCAGGTTCCCGGAGTGGAATATCCTGTGGGGAAGCACGCGGTGCAGACAACA
CTGGAATCAGCCACTGCCATTGCTGTGTCCTACAGTGGGGTCCTGTACATTACTGAAACTGATGAGAA
GAAAATTAACCGGATAAGGCAGGTCACAACAGATGGAGAAATCTCCTTAGTGGCCGGAATACCTTCAG
AGTGTGACTGCAAAAATGATGCCAACTGTGACTGTTACCAGAGTGGAGATGGCTACGCCAAGGATGCC
AAACTCAGTGCCCCATCCTCCCTGGCTGCTTCTCCAGATGGTACACTGTATATTGCAGATCTAGGGAA
TATCCGGATCCGGGCTGTGTCAAAGAATAAGCCTTTACTTAACTCTATGAACTTCTATGAAGTTGCGT
CTCCAACTGATCAAGAACTCTACATCTTTGACATCAATGGTACTCACCAATATACTGTAAGTTTAGTC
ACTGGTGATTACCTTTACAATTTTAGCTACAGCAATGACAATGATATTACTGCTGTGACAGACAGCAA
TGGCAACACCCTTAGAATTAGACGGGACCCAAATCGCATGCCAGTTCGAGTGGTGTCTCCTGATAACC
AAGTGATATGGTTGACAATAGGAACAAATGGATGTTTGAAAGGCATGACTGCTCAAGGACTGGAATTA
GTTTTGTTTACTTACCATGGCAATAGTGGCCTTTTAGCCACTAAAAGTGATGAAACTGGATGGACAAC
GTTTTTTGACTATGACAGTGAAGGTCGTCTGACAAATGTTACGTTTCCAACTGGAGTGGTCACAAACC
TGCATGGGGACATGGACAAGGCTATCACAGTGGACATTGAGTCATCTAGCCGAGAAGAAGATGTCAGC
ATCACTTCAAATCTGTCCTCGATCGATTCTTTCTACACCATGGTTCAAGATCAGTTAAGAAACAGCTA
CCAGATTGGTTATGACGGCTCCCTCAGAATTATCTACGCCAGTGGCCTGGACTCACACTACCAAACAG
AGCCGCACGTTCTGGCTGGCACCGCTAATCCGACGGTTGCCAAAAGAAACATGACTTTGCCTGGCGAG
AACGGTCAAAACTTGGTGGAATGGAGATTCCGAAAAGAGCAAGCCCAAGGGAAAGTCAATGTCTTTGG
CCGCAAGCTCAGGGTTAATGGCAGAAACCTCCTTTCAGTTGACTTTGATCGAACAACAAAGACAGAAA
AGATCTATGACGACCACCGTAAATTTCTACTGAGGATCGCCTACGACACGTCTGGGCACCCGACTCTC
TGGCTGCCAAGCAGCAAGCTGATGGCCGTCAATGTCACCTATTCATCCACAGGTCAAATTGCCAGCAT
CCAGCGAGGCACCACTAGCGAGAAAGTAGATTATGACGGACAGGGGAGGATCGTGTCTCGGGTCTTTG
CTGATGGTAAAACATGGAGTTACACATATTTAGAAAAGTCCATGGTTCTTCTGCTTCATAGCCAGCGG
CAGTACATCTTCGAATACGATATGTGGGACCGCCTGTCTGCCATCACCATGCCCAGTGTGGCTCGCCA
CACCATGCAGACCATCCGATCCATTGGCTACTACCGCAACATATACAACCCCCCGGAAAGCAACGCCT
CCATCATCACGGACTACAACGAGGAAGGGCTGCTTCTACAAACAGCTTTCTTGGGTACAAGTCGGAGG
GTCTTATTCAAATACAGAAGGCAGACTAGGCTCTCAGAAATTTTATATGATAGCACAAGAGTCAGTTT
TACCTATGATGAAACAGCAGGAGTCCTAAAGACAGTAAACCTCCAGAGTGATGGTTTTATTTGCACCA
TTAGATACAGGCAAATTGGTCCCCTGATTGACAGGCAGATTTTCCGCTTTAGTGAAGATGGGATGGTA
AATGCAAGATTTGACTATAGCTATGACAACAGCTTTCGAGTGACCAGCATGCAGGGTGTGATCAATGA
AACGCCACTGCCTATTGATCTGTATCAGTTTGATGACATTTCTGGCAAAGTTGAGCAGTTTGGAAAGT
TTGGAGTTATATATTATGATATTAACCAGATCATTTCTACAGCTGTAATGACCTATACGAAGCACTTT
GATGCTCATGGCCGTATCAAGGAGATTCAATATGAGATATTCAGGTCGCTCATGTACTGGATTACAAT
TCAGTATGATAACATGGGTCGGGTAACCAAGAGAGAGATTAAAATAGGGCCCTTTGCCAACACCACCA
AATATGCTTATGAATATGATGTTGATGGACAGCTCCAAACAGTTTACCTCAATGAAAAGATAATGTGG
CGGTACAACTACGATCTGAATGGAAACCTCCATTTACTGAACCCAAGTAACAGTGCGCGTCTGACACC
CCTTCGCTATGACCTGCGAGACAGAATCACTCGACTGGGTGATGTTCAATATCGGTTGGATGAAGATG
GTTTCCTACGTCAAAGGGGCACGGAAATCTTTGAATATAGCTCCAAGGGGCTTCTAACTCGAGTTTAC
AGTAAAGGCAGTGGCTGGACAGTGATCTACCGTTATGACGGCCTGGGAAGGCGTGTTTCTAGCAAAAC
CAGTCTAGGACAGCACCTGCAGTTTTTTTATGCTGACTTAACTTATCCCACTAGGATTACTCATGTCT
ACAACCATTCGAGTTCAGAAATTACCTCCCTGTATTATGATCTCCAAGGACATCTTTTTGCCATGGAA
ATCAGCAGTGGGGATGAATTCTATATTGCATCGGATAACACAGGGACACCACTGGCTGTGTTCAGTAG
CAATGGGCTTATGCTGAAACAGATTCAGTACACTGCATATGGGGAAATCTATTTTGACTCTAATATTG
ACTTTCAACTGGTAATTGGATTTCATGGTGGCCTGTATGACCCACTCACCAAATTAATCCACTTTGGA
GAAAGAGATTATGACATTTTGGCAGGACGGTGGACAACACCTGACATAGAAATCTGGAAAAGAATTGG
GAAGGACCCAGCTCCTTTTAACTTGTACATGTTTAGGAATAACAACCCTGCAAGCAAAATCCATGACG
TGAAAGATTACATCACAGATGTTAACAGCTGGCTGGTGACATTTGGTTTCCATCTGCACAATGCTATT
CCTGGATTCCCTGTTCCCAAATTTGATTTAACAGAACCTTCTTACGAACTTGTGAAGAGTCAGCAGTG
GGATGATATACCGCCCATCTTCGGAGTCCAGCAGCAAGTGGCGCGGCAGGCCAAGGCCTTCCTGTCGC
TGGGGAAGATGGCCGAGGTGCAGGTGAGCCGGCGCCGGGCCGGCGGCGCGCAGTCCTGGCTGTGGTTC
GCCACGGTCAAGTCGCTGATCGGCAAGGGCGTCATGCTGGCCGTCAGCCAGGGCCGCGTGCAGACCAA
CGTGCTCAACATCGCCAACGAGGACTGCATCAAGGTGGCGGCCGTGCTCAACAACGCCTTCTACCTGG
AGAACCTGCACTTCACCATCGAGGGCAAGGACACGCACTACTTCATCAAGACCACCACGCCCGAGAGC
GACCTGGGCACGCTGCGGTTGACCAGCGGCCGCAAGGCGCTGGAGAACGGCATCAACGTGACGGTGTC
GCAGTCCACCACGGTGGTGAACGGCAGGACGCGCAGGTTCGCGGACGTGGAGATGCAGTTCGGCGCGC
TGGCGCTGCACGTGCGCTACGGCATGACCCTGGACGAGGAGAAGGCGCGCATCCTGGAGCAGGCGCGG
CAGCGCGCGCTCGCCCGGGCCTGGGCGCGCGAGCAGCAGCGCGTGCGCGACGGCGAGGAGGGCGCGCG
CCTCTGGACGGAGGGCGAGAAGCGGCAGCTGCTGAGCGCCGGCAAGGTGCAGGGCTACGACGGGTACT
ACGTACTCTCGGTGGAGCAGTACCCCGAGCTGGCCGACAGCGCCAACAACATCCAGTTCCTGCGGCAG
AGCGAGATCGGCAGGAGGTAACGCCCGGGCCGCGCCCGCCGAGC

| | | | |
|---|---|---|---|
| NOV40u, CG55069-06 | SEQ ID NO: 526 | 2725 aa | MW at 303959.6kD |
| Protein Sequence | | | |

MDVKERRPYCSLTKSRREKERRYTNSSADNEECRVPTQKSYSSSETLKAFDHDSSRLLYGNRVKDLVH
READEFTRQGQNFTLRQLGVCEPATRRGLAFCAEMGLPHRGYSISAGSDADTENEAVMSPEHAMRLWG
RGVKSGRSSCLSSRSNSALTLTDTEHENKSDSENEQPASNOGQSTLQPLPPSHKQHSAQHHPSITSLN
RNSLTNRRNQSPAPPAALPAELQTTPESVQLQDSWVLGSNVPLESRHFLFKTGTGTTPLFSTATPGYT
MASGSVYSPPTRPLPRNTLSRSAFKFKKSSKYCSWKCTALCAVGVSVLLAILLSYFIANHLFGLNWQL
QQTENDTFENGKVNSDTMPTNTVSLPSGDNGKLGGFTQENNTIDSGELDIGRRAIQEIPPGIFWRSQL
FIDQPQFLKFNISLQKDALIGVYGRKKLPPSHTQSSPQYDFVELLDGSRLIAREQRSLLETERAGRQA
RSVSLHEAGFIQYLDSGIWHLAFThDGKNAEQVSFNTIVIESVVECPRNCHGNGECVSGTCHCFPGFL
GPDCSRAACPVLCSGNGQYSKGRCLCFSGWKGTECDVPTTQCIDPQCGGRGICIMGSCACSSGYKGES
CEEADCIDPGCSNHGVCIHGECHCSPGWGGSNCEILKTMCPDQCSGHGTYLQESGSCTCDPNWTGPDC
SNEICSVDCGSHGVCMGGTCRCEEGWTGPACNQRACHPRCAEHGTCKDGKCECSQGWNGEHCTIAHYL
DKIVKDKIGYKEGCPGLCNSNGRCTLDQNGGHCVCQPGWRGAGCDVAMETLCTDSKDNEGDGLIDCMD
PDCCLQSSCQNQPYCRGLPDPQDIISOSLQSPSQQAAKSFYDRISFLIGSDSTHVIPGESPFNKSLAS
VIRGQVLTADGTPLIGVNVSFFHYPEYGYTITRQDGMFDLVANGGASLTLVFERSPFLTQYHTVWIPW
NVFYVMDTLVMEKEENDIPSCDLSGFVRPNPIIVSSPLSTFFRSSPEDSPIIPETQVLHEETTIPGTD
LKLSYLSSRAAGYKSVLKITMTQSIIPFNLMKVHLMVAVVGRLFQKWFPASPNLAYTFIWDKTDAYNQ
KVYGLSEAVVSVGYEYESCLDLTLWEKRTAILQGYELDASNMGGWTLDKHHVLDVQNGILYKGNGENQ
FISQQPPVVSSIMGNGRRRSISCPSCNGQADGNKLLAPVALACGIDGSLYVGDFNYVRRIFPSGNVTS
VLELRNKDFRHSSNPAHRYYLATDPVTGDLYVSDTNTRRIYRPKSLTGAKDLTKNAEVVAGTGEQCLP
FDEARCGDGGKAVEATLMSPKGMAVDKNGLIYFVDGTMIRKVDQNGIISTLLGSNDLTSARPLTCDTS
MHISQVRLEWPTDLAINPMDNSIYVLDNNVVLQITENRQVRIAAGRPMHCQVPGVEYPVGKHAVQTTL
ESATAIAVSYSGVLYITETDEKKINRIRQVTTDGEISLVAGIPSECDCKNDANCDCYQSGDGYAKDAK
LSAPSSLAASPDGTLYIADLGNIRIRAVSKNKPLLNSMNFYEVASPTDQELYIFDINGTHQYTVSLVT
GDYLYNFSYSNDNDITAVTDSNGNTLRIRRDPNRNPVRVVSPDNQVIWLTIGTNGCLKGMTAQGLELV
LFTYHGNSGLLATKSDETGWTTFFDYDSEGRLTNVTFPTGVVTNLHGDMDKAITVDIESSSREEDVSI
TSNLSSIDSFYTMVQDQLRNSYQIGYDGSLRIIYASGLDSHYQTEPHVLAGTANPTVAKRNNTLPGEN
GQNLVEWRFRKEQAQGKVNVFGRKLRVNGRNLLSVDFDRTTKTEKIYDDHRKFLLRIAYDTSGHPTLW
LPSSKLMAVNVTYSSTGQIASIQRGTTSEKVDYDGQGRIVSRVFADGKTWSYTYLEKSMVLLLHSQRQ
YIFEYDMWDRLSAITMPSVARHTNQTIRSIGYYRNIYNPPESNASIITDYNEEGLLLQTAFLGTSRRV
LFKYRRQTRLSEILYDSTRVSFTYDETAGVLKTVNLQSDGFICTIRYRQIGPLIDRQIFRFSEDGMVN
ARFDYSYDNSFRVTSMQGVINETPLPIDLYQFDDISGKVEQFGKFGVIYYDINQIISTAVMTYTKHFD
AHGRIKEIQYEIFRSLMYWITIOYDNMGRVTKREIKIGPFANTTKYAYEYDVDGQLQTVYLNEKIMWR
YNYDLNGNLHLLNPSNSARLTPLRYDLRDRITRLGDVQYRLDEDGFLRQRGTEIFEYSSKGLLTRVYS
KGSGWTVIYRYDGLGRRVSSKTSLGQHLQFFYADLTYPTRITHVYNHSSSEITSLYYDLQGHLFAMEI
SSGDEFYIASDNTGTPLAVFSSNGLMLKQIQYTAYGEIYFDSNIDFQLVIGFHGGLYDPLTKLIHFGE
RDYDILAGRWTTPDIEIWKRIGKDPAPFNLYMFRNNNPASKIHDVKDYITDVNSWLVTFGFHLHNAIP
GFPVPKFDLTEPSYELVKSQQWDDIPPIFGVQQQVARQAKAFLSLGKMAEVQVSRRRAGGAQSWLWFA
TVKSLIGKGVMLAVSQGRVQTNVLNIANEDCIKVAAVLNNAFYLENLHFTIEGKDTHYFIKTTTPESD
LGTLRLTSGRKALENGINVTVSQSTTVVNGRTRRFADVEMQFGALALHVRYGMTLDEEKARILEQARQ
RALARAWAREQQRVRDGEEGARLWTEGEKRQLLSAGKVQGYDGYYVLSVEQYPELADSANNIQFLRQS
EIGRR

| | | |
|---|---|---|
| NOV40v, CG55069-07 | SEQ ID NO: 527 | 1833 bp |
| DNA Sequence | ORF Start: at 7 | ORF Stop: at 1828 |

AAGCTTGACCAAAATGGCGGACATTGTGTGTGCCAGCCTGGATGGAGAGGAGCAGGCTGTGACGTAGC
CATGGAGACTCTTTGCACAGATAGCAAGGACAATGAAGGAGATGGACTCATTGACTGCATGGATCCCG
ATTGCTGCCTACAGAGTTCCTGCCAGAATCAGCCCTATTGTCGGGGACTGCCGGATCCTCAGGACATC
ATTAGCCAAAGCCTTCAATCGCCTTCTCAGCAAGCTGCCAAATCCTTTTATGATCGAATCAGTTTCCT
TATAGGATCTGATAGCACCCATGTTATACCTGGAGAAAGTCCTTTCAATAAGAGCCTTGCATCTGTCA
TCAGAGGCCAAGTACTGACTGCTGATGGAACTCCACTTATTGGAGTAAATGTCTCGTTTTTCCATTAC
CCAGAATATGGATATACTATTACCCGCCAGGACGGAATGTTTGACTTGGTGGCAAATGGTGGGGCCTC
TCTAACTTTGGTATTTGAACGATCCCCATTCCTCACTCAGTATCATACTGTGTGGATTCCATGGAATG
TCTTTTATGTGATGGATACCCTAGTCATGAAGAAAGAAGAGAATGACATTCCCAGCTGTGATCTGAGT
GGATTCGTGAGGCCAAATCCCATCATTGTGTCATCACCTTTATCCACCTTTTTCAGATCTTCTCCTGA
AGACAGTCCCATCATTCCCGAAACACAGGTACTCCACGAGGAAACTACAATTCCAGGAACAGATTTGA
AACTCTCCTACTTGAGTTCCAGAGCTGCAGGGTATAAGTCAGTTCTCAAGATCACCATGACCCAGTCT
ATTATTCCATTTAATTTAATGAAGGTTCATCTTATGGTAGCTGTAGTAGGAAGACTCTTCCAAAAGTG
GTTTCCTGCCTCACCAAACTTGGCCTATACTTTCATATGGGATAAAACAGATGCATATAATCAGAAAG
TCTATGGTCTATCTGAAGCTGTTGTGTCAGTTGGATATGAGTATGAGTCGTGTTTGGACCTGACTCTG
TGGGAAAAGAGGACTGCCATTCTGCAGGGCTATGAATTGGATGCGTCCAACATGGGTGGCTGGACATT
AGATAAACATCACGTGCTGGATGTACAGAACGGTATACTGTACAAGGGAAACGGGGAAAACCAGTTCA
TCTCCCAGCAGCCTCCAGTCGTGAGTAGCATCATGGGCAATGGGCGAAGGCGCAGCATTTCCTGCCCC
AGTTGCAATGGTCAAGCTGATGGTAACAAGTTACTGGCCCCAGTGGCGCTAGCTTGTGGGATCGATGG
CAGTCTGTACGTAGGCGATTTCAACTATGTGCGGCGGATATTCCCTTCTGGAAATGTAACAAGTGTCT
TAGAACTAAGCAGCAACCCAGCTCATAGATACTACCTTGCAACGGATCCAGTCACGGGAGATCTGTAC
GTTTCTGACACAAACACCCGCAGAATTTATCGCCCAAAGTCACTTACGGGGGCAAAAGACTTGACTAA
AAATGCAGAAGTCGTCGCAGGGACAGGGGAGCAATGCCTTCCGTTTGACGAGGCGAGATGTGGGGATG
GAGGGAAGGCCGTGGAAGCCACACTCATGAGTCCCAAAGGAATGGCAGTTGATAAGAATGGATTAATC
TACTTTGTTGATGGAACCATGATTAGGAAAGTTGACCAAAATGGAATCATATCAACTCTTCTGGGTTC
TAACGATTTGACTTCAGCCAGACCTTTAACTTGTGACACCAGCATGCACATCAGCCAGGTACGTCTGG
AATGGCCCACTGACCTAGCCATTAACCCTATGGATAACTCCATTTATGTCCTGGATAATGTCGAC

| | | | |
|---|---|---|---|
| NOV40v, GG55069-07 | SEQ ID NO: 528 | 607 aa | MW at 66606.6kD |
| Protein Sequence | | | |

DQNGGHCVCQPGWRGAGCDVAMETLCTDSKDNEGDGLIDCMDPDCCLQSSCQNQPYCRGLPDPQDIIS
QSLQSPSQQAAKSFYDRISFLIGSDSTHVIPGESPFNKSLASVIRGOVLTADGTPLIGVNVSFFHYPE
YGYTITRQDGMFDLVANGGASLTLVFERSPFLTQYHTVWIPWNVFYVMDTLVMKKEENDIPSCDLSGF
VRPNPIIVSSPLSTFFRSSPEDSPIIPETQVLHEETTIPGTDLKLSYLSSRAAGYKSVLKITMTQSII
PFNLMKVHLMVAVVGRLFQKWFPASPNLAYTFIWDKTDAYNQKVYGLSEAVVSVGYEYESCLDLTLWE
KRTAILQGYELDASNMGGWTLDKHHVLDVQNGILYKGNGENQFISQQPPVVSSIMGNGRRRSISCPSC
NGQADGNKLLAPVALACGIDGSLYVGDFNYVRRIFPSGNVTSVLELSSNPAHRYYLATDPVTGDLYVS
DTNTRRIYRPKSLTGAKDLTKNAEVVAGTGEQCLPFDEARCGDGGKAVEATLMSPKGMAVDKNGLIYF
VDGTMIRKVDQNGIISTLLGSNDLTSARPLTCDTSMHISQVRLEWPTDLAINPMDNSIYVLDN

| | | |
|---|---|---|
| NOV40w, CG55069-08 | SEQ ID NO: 529 | 8487 bp |
| DNA Sequence | ORF Start: ATG at 299 | ORF Stop: TAA at 8138 |

ACTCACTATAGGGCTCGAGCGGCCGCCCGGGCAGGTCCCATTTGACAGAAAAAGGCAGTAAACGGGGA
ATCTCTTTTTTTGAATAAAGAAGAAGAAGAAATAAAGTACCTGTCATCTTGACAAGTGGCGGAGCGGA
GGAGTCAAGGATTATAAATGATCACAGCCAGGTCCAGCTCGCCCCGTGATTGGGCTCTCCCGCGATCT
GCACCGGGGGAAGCGCATGAGAGGCCAATGAGACTTGAACCCTGAGCCTAAGTTGTCACCAGCAGGAC
TGATGTGCACACAGAAGGAATGAAGTATGGATGTGAAAGAACGCAGGCCTTACTGCTCCCTGACCAAG
AGCAGACGAGAGAAGGAACGGCGCTACACAAATTCCTCCGCAGACAATGAGGAGTGCCGGGTACCCAC
ACAGAAGTCCTACAGTTCCAGCGAGACATTGAAAGCTTTTGATCATGATTCCTCGCGGCTGCTTTACG
GCAACAGAGTGAAGGATTTGGTTCACAGAGAAGCAGACGAGTTCACTAGACAAGAGCAACCTGCAAGC
AATCAAGGCCAGTCTACCCTGCAGCCCTTGCCGCCTTCCCATAAGCAGCACTCTGCACAGCATCATCC
ATCCATCACTTCTCTCAACAGAAACTCCCTGACCAATAGAAGGAACCAGAGTCCGGCCCCGCCGGCTG
CTTTGCCCGCCGAGCTGCAAACCACACCCGAGTCCGTCCAGCTGCAGGACAGCTGGGTCCTTGGCAGT
AATGTACCACTGGAAAGCAGGCATTTCCTATTCAAAACAGGAACAGGTACAACGCCACTGTTCAGTAC
TGCAACCCCAGGATACACAATGGCATCTGGCTCTGTTTATTCACCACCTACTCGGCCACTACCTAGAA
ACACCCTATCAAGAAGTGCTTTTAAATTCAAGAAGTCTTCAAAGTACTGTAGCTGGAAATGCACTGCA
CTGTGTGCCGTAGGGGTCTCGGTGCTCCTGGCAATACTCCTGTCTTATTTTATAGCAATGCATCTCTT
TGGCCTCAACTGGCAGCTACAGCAGACTGAAAATGACACATTTGAGAATGGAAAAGTGAATTCTGATA
CCATGCCAACAAACACTGTGTCATTACCTTCTGGAGACAATGGAAAATTAGGTGGATTTACGCAAGAA
AATAACACCATAGATTCCGGAGAACTTGATATTGGCCGAAGAGCAATTCAAGAGATTCCTCCCGGGAT
CTTCTGGAGATCACAGCTCTTCATTGATCAGCCACAGTTTCTTAAATTCAATATCTCTCTTCAGAAGG
ATGCATTGATTGGAGTATATGGCCGGAAAGGCTTACCGCCTTCCCATACTCAGTATGACTTCGTGGAG
CTCCTGGATGGCAGCAGGCTGATTGCCAGAGAGCAGCGGAGCCTGCTTGAGACGGAGAGAGCCGGGCG
GCAGGCGAGATCCGTCAGCCTTCATGAGGCCGGCTTTATCCAGTACTTGGATTCTGGAATCTGGCATC
TGGCTTTTTATAATGATGGGAAAAATGCAGAGCAGGTGTCTTTTAATACCATTGTTATAGAGTCTGTG
GTGGAATGTCCCCGAAATTGCCATGGAAATGGAGAATGCGTTTCTGGAACTTGCCATTGTTTTCCAGG
ATTTCTGGGTCCGGATTGTTCAAGAGCCGCCTGTCCAGTGTTATGTAGTGGCAACGGGCAGTACTCCA
AGGGCCGCTGCCTGTGTTTCAGCGGCTGGAAGGGCACCGAGTGTGATGTGCCGACTACCCAGTGTATT
GACCCACAGTGTGGGGGTCGTGGGATTTGTATCATGGGCTCCTGTGCTTGCAACTCAGGATACAAAGG
AGAAAGTTGTGAAGAAGCTGACTGTATAGACCCTGGGTGTTCTAATCATGGTGTGTGTATCCACGGGG
AATGTCACTGCAGTCCAGGATGGGGAGGTAGCAATTGTGAAATACTGAAGACCATGTGTCCAGACCAG
TGCTCCGGCCACGGAACGTATCTTCAAGAAAGTGGCTCCTGCACGTGTGACCCTAACTGGACTGGCCC
AGACTGCTCAAACGAAATATGTTCTGTGGACTGTGGCTCACACGGCGTTTGCATGGGGGGGACGTGTC
GCTGTGAAGAAGGCTGGACGGGCCCAACCTGTAATCAGAGAGCCTGCCACCCCCGCTGTGCCGAGCAC
GGGACCTGCAAGGATGGCAAGTGTGAATGCAGCCATGGCTGGAATGGAGAGCACTGCACTATCGAGGG
TTGTCCTGGTCTGTGCAACAGCAATGGAAGATGTACCCTGGACCAAAATGGCTGGCATTGTGTGTGCC
AGCCTGGATGGAGAGGAGCAGGCTGTGACGTAGCCATGGAGACTCTTTGCACAGATAGCAAGGACAAT
GAAGGAGATGGACTCATTGACTGCATGGATCCCGATTGCTGCCTACAGAGTTCCTGCCAGAATCAGCC
CTATTGTCGGGGACTGCCGGATCCTCAGGACATCATTAGCCAAAGCCTTCAATCGCCTTCTCAGCAAG
CTGCCAAATCCTTTTATGATCGAATCAGTTTCCTTATAGGATCTGATAGCACCCATGTTATACCTGGA
GAAAGTCCTTTCAATAAGAGCCTTGCATCTGTCATCAGAGGCCAAGTACTGACTGCTGATGGAACTCC
ACTTATTGGAGTAAATGTCTCGTTTTTCCATTACCCAGAATATGGATATACTATTACCCGCCAGGACG
GAATGTTTGACTTGGTGGCAAATGGTGGGGCCTCTCTAACTTTGGTATTTGAACGATCCCCATTCCTC
ACTCAGTATCATACTGTGTGGATTCCATGGAATGTCTTTTATGTGATGGATACCCTAGTCATGGAGAA
AGAAGAGAATGACATTCCCAGCTGTGATCTGAGTGGATTCGTGAGGCCAAATCCCATCATTGTGTCAT
CACCTTTATCCACCTTTTTCAGATCTTCTCCTGAAGACAGTCCCATCATTCCCGAAACACAGGTACTC
CACGAGGAAACTACAATTCCAGGAACAGATTTGAAACTCTCCTACTTGAGTTCCAGAGCTGCAGGGTA
TAAGTCAGTTCTCAAGATCACCATGACCCAGTCTATTATTCCATTTAATTTAATGAAGGTTCATCTTA
TGGTAGCTGTAGTAGGAAGACTCTTCCAAAAGTGGTTTCCTGCCTCACCAAACTTGGCCTATACTTTC
ATATGGGATAAAACAGATGCATATAATCAGAAAGTCTATGGTCTATCTGAAGCTGTTGTGTCAGTTGG
ATATGAGTATGAGTCGTGTTTGGACCTGACTCTGTGGGAAAAGAGGACTGCCATTCTGCAGGGCTATG
AATTGGATGCGTCCAACATGGGTGGCTGGACATTAGATAAACATCACGTGCTGGATGTACAGAACGGT
ATACTGTACAAGGGAAACGGGGAAAACCAGTTCATCTCCCAGCAGCCTCCAGTCGTGAGTAGCATCAT
GGGCAATGGGCGAAGGCGCAGCATTTCCTGCCCCAGTTGCAATGGTCAAGCTGATGGTAACAAGTTAC
TGGCCCCAGTGGCGCTAGCTTGTGGGATCGATGGCAGTCTGTACGTAGGCGATTTCAACTACGTGCGG
CGGATATTCCCTTCTGGAAATGTAACAAGTGTCTTAGAACTAAGAAATAAAGATTTTAGACATAGCAG
CAACCCAGCTCATAGATACTACCTTGCAACGGATCCAGTCACGGGAGATCTGTACGTTTCTGACACAA
ACACCCGCAGAATTTATCGCCCAAAGTCACTTACGGGGGCAAAAGACTTGACTAAAAATGCAGAAGTC
GTCGCAGGGACAGGGGAGCAATGCCTTCCGTTTGACGAGGCGAGATGTGGGGATGGAGGGAAGGCCGT
GGAAGCCACACTCATGAGTCCCAAAGGAATGGCAGTTGATAAGAATGGATTAATCTACTTTGTTGATG
GAACCATGATTAGGAAAGTTGACCAAAATGGAATCATATCAACTCTTCTGGGCTCTAACGATTTGACT
TCAGCCAGACCTTTAACTTGTGACACCAGCATGCACATCAGCCAGGTACGTCTGGAATGGCCCACTGA
CCTAGCCATTAACCCTATGGATAACTCCATTTATGTCCTGGATAATAATGTAGTTTTACAGATCACTG
AAAATCGTCAAGTTCGCATTGCTGCTGGACGGCCCATGCACTGTCAGGTTCCCGGAGTGGAATATCCT
GTGGGGAAGCACGCGGTGCAGACAACACTGGAATCAGCCACTGCCATTGCTGTGTCCTACAGTGGGGT
CCTGTACATTACTGAAACTGATGAGAAGAAAATTAACCGGATAAGGCAGGTCACAACAGATGGAGAAA
TCTCCTTAGTGGCCGGAATACCTTCAGAGTGTGACTGCAAAAATGATGCCAACTGTGACTGTTACCAG
AGTGGAGATGGCTACGCCAAGGATGCCAAACTCAGTGCCCCATCCTCCCTGGCTGCTTCTCCAGATGG
TACACTGTATATTGCAGATCTAGGGAATATCCGGATCCGGGCTGTGTCAAAGAATAAGCCTTTACTTA
ACTCTATGAACTTCTATGAAGTTGCGTCTCCAACTGATCAAGAACTCTACATCTTTGACATCAATGGT
ACTCACCAATATACTGTAAGTTTAGTCACTGGTGATTACCTTTACAATTTTAGCTACAGCAATGACAA
TGATATTACTGCTGTGACAGACAGCAATGGCAACACCCTTAGAATTAGACGGGACCCAAATCGCATGC
CAGTTCGAGTGGTGTCTCCTGATAACCAAGTGATATGGTTGACAATAGGAACAAATGGATGTTTGAAA
GGCATGACTGCTCAAGGACTGGAATTAGTTTTGTTTACTTACCATGGCAATAGTGGCCTTTTAGCCAC
TAAAAGTGATGAAACTGGATGGACAACGTTTTTTGACTATGACAGTGAAGGTCGTCTGACAAATGTTA
CGTTTCCAACTGGAGTGGTCACAAACCTGCATGGGGACATGGACAAGGCTATCACAGTGGACATTGAG
TCATCTAGCCGAGAAGAAGATGTCAGCATCACTTCAAATCTGTCCTCGATCGATTCTTTCTACACCAT
GGTTCAAGATCAGTTAAGAAACAGCTACCAGATTGGTTATGACGGCTCCCTCAGAATTATCTACGCCA
GTGGCCTGGACTCACACTACCAAACAGAGCCGCACGTTCTGGCTGGCACCGCTAATCCGACGGTTGCC
AAAAGAAACATGACTTTGCCTGGCGAGAACGGTCAAAACTTGGTGGAATGGAGATTCCGAAAAGAGCA
AGCCCAAGGGAAAGTCAATGTCTTTGGCCGCAAGCTCAGGGTTAATGGCAGAAACCTCCTTTCAGTTG
ACTTTGATCGAACAACAAAGACAGAAAAGATCTATGACGACCACCGTAAATTTCTACTGAGGATCGCC
TACGACACGTCTGGGCACCCGACTCTCTGGCTGCCAAGCAGCAAGCTGATGGCCGTCAATGTCACCTA
TTCATCCACAGGTCAAATTGCCAGCATCCAGCGAGGCACCACTAGCGAGAAAGTAGATTATGACGGAC
AGGGGAGGATCGTGTCTCGGGTCTTTGCTGATGGTAAAACATGGAGTTACACATATTTAGAAAAGTCC
ATGGTTCTTCTGCTTCATAGCCAGCGGCAGTACATCTTCGAATACGATATGTGGGACCGCCTGTCTGC
CATCACCATGCCCAGTGTGGCTCGCCACACCATGCAGACCATCCGATCCATTGGCTACTACCGCAACA
TATACAACCCCCCGGAAAGCAACGCCTCCATCATCACGGACTACAACGAGGAAGGGCTGCTTCTACAA
ACAGCTTTCTTGGGTACAAGTCGGAGGGTCTTATTCAAATACAGAAGGCAGACTAGGCTCTCAGAAAT
TTTATATGATAGCACAAGAGTCAGTTTTACCTATGATAGAACAGCAGGAGTCCTAAAGACAGTAAACC
TCCAGAGTGATGGTTTTATTTGCACCATTAGATACAGGCAAATTGGTCCCCTGATTGACAGGCAGATT
TTCCGCTTTAGTGAAGATGGGATGGTAAATGCAAGATTTGACTATAGCTATGACAACAGCTTTCGAGT
GACCAGCATGCAGGGTGTGATCAATGAAACGCCACTGCCTATTGATCTGTATCAGTTTGATGACATTT
CTGGCAAAGTTGAGCAGTTTGGAAAGTTTGGAGTTATATATTATGATATTAACCAGATCATTTCTACA
GCTGTAATGACCTATACGAAGCACTTTGATGCTCATGGCCGTATCAAGGAGATTCAATATGAGATATT
CAGGTCGCTCATGTACTGGATTACAATTCAGTATGATAACATGGGTCGGGTAACCAAGAGAGAGATTA
AAATAGGGCCCTTTGCCAACACCACCAAATATGCTTATGAATATGATGTTGATGGACAGCTCCAAACA
GTTTACCTCAATGAAAAGATAATGTGGCGGTACAACTACGATCTGAATGGAAACCTCCATTTACTGAA
CCCAAGTAACAGTGCGCGTCTGACACCCCTTCGCTATGACCTGCGAGACAGAATCACTCGACTGGGTG
ATGTTCAATATCGGTTGGATGAAGATGGTTTCCTACGTCAAAGGGGCACGGAAATCTTTGAATATAGC
TCCAAGGGGCTTCTAACTCGAGTTTACAGTAAAGGCAGTGGCTGGACAGTGATCTACCGTTATGACGG
CCTGGGAAGGCGTGTTTCTAGCAAAACCAGTCTAGGACAGCACCTGCAGTTTTTTTATGCTGACTTAA
CTTATCCCACTAGGATTACTCATGTCTACAACCATTCGAGTTCAGAAATTACCTCCCTGTATTATGAT
CTCCAAGGACATCTTTTTGCCATGGAAATCAGCAGTGGGGATGAATTCTATATTGCATCGGATAACAC
AGGGACACCACTGGCTGTGTTCAGTAGCAATGGGCTTATGCTGAAACAGATTCAGTACACTGCATATG
GGGAAATCTATTTTGACTCTAATATTGACTTTCAACTGGTAATTGGATTTCATGGTGGCCTGTATGAC
CCACTCACCAAATTAATCCACTTTGGAGAAAGAGATTATGACATTTTGGCAGGACGGTGGACAACACC
TGACATAGAAATCTGGAAAAGAATTGGGAAGGACCCAGCTCCTTTTAACTTGTACATGTTTAGGAATA
ACAACCCTGCAAGCAAAATCCATGACGTGAAAGATTACATCACAGATGTTAACAGCTGGCTGGTGACA
TTTGGTTTCCATCTGCACAATGCTATTCCTGGATTCCCTGTTCCCAAATTTGATTTAACAGAACCTTC
TTACGAACTTGTGAAGAGTCAGCAGTGGGATGATATACCGCCCATCTTCGGAGTCCAGCAGCAAGTGG
CGCGGCAGGCCAAGGCCTTCCTGTCGCTGGGGAAGATGGCCGAGGTGCAGGTGAGCCGGCGCCGGGCC
GGCGGCGCGCAGTCCTGGCTGTGGTTCGCCACGGTCAAGTCGCTGATCGGCAAGGGCGTCATGCTGGC
CGTCAGCCAGGGCCGCGTGCAGACCAACGTGCTCAACATCGCCAACGAGGACTGCATCAAGGTGGCGG
CCGTGCTCAACAACGCCTTCTACCTGGAGAACCTGCACTTCACCATCGAGGGCAAGGACACGCACTAC
TTCATCAAGACCACCACGCCCGAGAGCGACCTGGGCACGCTGCGGTTGACCAGCGGCCGCAAGGCGCT
GGAGAACGGCATCAACGTGACGGTGTCGCAGTCCACCACGGTGGTGAACGGCAGGACGCGCAGGTTCG
CGGACGTGGAGATGCAGTTCGGCGCGCTGGCGCTGCACGTGCGCTACGGCATGACCCTGGACGAGGAG
AAGGCGCGCATCCTGGAGCAGGCGCGGCAGCGCGCGCTCGCCCGGGCCTGGGCGCGCGAGCAGCAGCG
CGTGCGCGACGGCGAGGAGGGCGCGCGCCTCTGGACGGAGGGCGAGAAGCGGCAGCTGCTGAGCGCCG
GCAAGGTGCAGGGCTACGACGGGTACTACGTACTCTCGGTGGAGCAGTACCCCGAGCTGGCCGACAGC
GCCAACAACATCCAGTTCCTGCGGCAGAGCGAGATCGGCAGGAGGTAACGCCCGGGCCGCGCCCGCCG
AGCCGCTCACGCCCTGCCCACATTGTCCTGTGGCACAACCCGAGTGGGACTCTCCAACGCCCAAGAGC
CTTCCTCCCGGGGGAATGAGACTGCTGTTACGACCCACACCCACACCGCGAAAACAAGGACCGCTTTT
TTCCGAATGACCTTAAAGGTGATCGGCTTTAACGAATATGTTTACATATGCATAGCGCTGCACTCAGT
CGGACTGAACGTAGCCAGAGGAAAAAAAAATCATCAAGGACAAAGGCCTCGACCTGTTGCGCTGGGCC
GTCTGTTCCTTCTAGGCACTGTATTTAACTAACTTTAAAAAAAAAAAAAAAAAAG

| | | | |
|---|---|---|---|
| NOV40w, CG55069-08 | SEQ ID NO: 530 | 2613 aa | MW at 291899.4kD |
| Protein Sequence | | | |

MDVKERRPYCSLTKSRREKERRYTNSSADNEECRVPTQKSYSSSETLKAFDHDSSRLLYGNRVKDLVH
READEFTRQEQPASNQGQSTLQPLPPSHKQHSAQHHPSITSLNRNSLTNRRNQSPAPPAALPAELQTT
PESVQLQDSWVLGSNVPLESRHFLFKTGTGTTPLFSTATPGYTMASGSVYSPPTRPLPRNTLSRSAFK
FKKSSKYCSWKCTALCAVGVSVLLAILLSYFIAMHLFGLNWQLQQTENDTFENGKVNSDTMPTNTVSL
PSGDNGKLGGFTQENNTIDSGELDIGRRAIQEIPPGIFWRSQLFIDQPQFLKFNISLQKDALIGVYGR
KGLPPSHTQYDFVELLDGSRLIAREQRSLLETERAGRQARSVSLHEAGFIQYLDSGIWHLAFYNDGKN
AEQVSFNTIVIESVVECPRNCHGNGECVSGTCHCFPGFLGPDCSRAACPVLCSGNGQYSKGRCLCFSG
WKGTECDVPTTQCIDPQCGGRGICIMGSCACNSGYKGESCEEADCIDPGCSNHGVCIHGECHCSPGWG
GSNCEILKTMCPDQCSGHGTYLQESGSCTCDPNWTGPDCSNEICSVDCGSHGVCMGGTCRCEEGWTGP
TCNQRACHPRCAEHGTCKDGKCECSHGWNGEHCTIEGCPGLCNSNGRCTLDQNGWHCVCQPGWRGAGC
DVAMETLCTDSKDNEGDGLIDCMDPDCCLQSSCQNQPYCRGLPDPQDIISQSLQSPSQQAAKSFYDRI
SFLIGSDSTHVIPGESPFNKSLASVIRGQVLTADGTPLIGVNVSFFHYPEYGYTITRQDGMFDLVANG
GASLTLVFERSPFLTQYHTVWIPWNVFYVMDTLVMEKEENDIPSCDLSGFVRPNPIIVSSPLSTFFRS
SPEDSPIIPETQVLHEETTIPGTDLKLSYLSSRAAGYKSVLKITMTQSIIPFNLMKVHLMVAVVGRLF
QKWFPASPNLAYTFIWDKTDAYNQKVYGLSEAVVSVGYEYESCLDLTLWEKRTAILQGYELDASNMGG
WTLDKHHVLDVQNGILYKGNGENQFISQQPPVVSSIMGNGRRRSISCPSCNGQADGNKLLAPVALACG
IDGSLYVGDFNYVRRIFPSGNVTSVLELRNKDFRHSSNPAHRYYLATDPVTGDLYVSDTNTRRIYRPK
SLTGAKDLTKNAEVVAGTGEQCLPFDEARCGDGGKAVEATLMSPKGMAVDKNGLIYFVDGTMIRKVDQ
NGIISTLLGSNDLTSARPLTCDTSMHISQVRLEWPTDLAINPMDNSIYVLDNNVVLQITENRQVRIAA
GRPMHCQVPGVEYPVGKHAVQTTLESATAIAVSYSGVLYITETDEKKINRIRQVTTDGEISLVAGIPS
ECDCKNDANCDCYQSGDGYAKDAKLSAPSSLAASPDGTLYIADLGNIRIRAVSKNKPLLNSMNFYEVA
SPTDQELYIFDINGTHQYTVSLVTGDYLYNFSYSNDNDITAVTDSNGNTLRIRRDPNRMPVRVVSPDN
QVIWLTIGTNGCLKGMTAQGLELVLFTYHGNSGLLATKSDETGWTTFFDYDSEGRLTNVTFPTGVVTN
LHGDMDKAITVDIESSSREEDVSITSNLSSIDSFYTMVQDQLRNSYQIGYDGSLRIIYASGLDSHYQT
EPHVLAGTANPTVAKRNNTLPGENGQNLVEWRFRKEQAQGKVNVFGRKLRVNGRNLLSVDFDRTTKTE
KIYDDHRKFLLRIAYDTSGHPTLWLPSSKLMAVNVTYSSTGQIASIQRGTTSEKVDYDGQGRIVSRVF
ADGKTWSYTYLEKSMVLLLHSQRQYIFEYDMWDRLSAITMPSVARHTMQTIRSIGYYRNIYNPPESNA
SIITDYNEEGLLLQTAFLGTSRRVLFKYRRQTRLSEILYDSTRVSFTYDETAGVLKTVNLQSDGFICT
IRYRQIGPLIDRQIFRFSEDGMVNARFDYSYDNSFRVTSMQGVINETPLPIDLYQFDDISGKVEQFGK
FGVIYYDINQIISTAVMTYTKHFDAHGRIKEIQYEIFRSLMYWITIQYDNMGRVTKREIKIGPFANTT
KYAYEYDVDGQLQTVYLNEKINWRYNYDLNGNLHLLNPSNSARLTPLRYDLRDRITRLGDVQYRLDED
GFLRQRGTEIFEYSSKGLLTRVYSKGSGWTVIYRYDGLGRRVSSKTSLGQHLQFFYADLTYPTRITHV
YNHSSSEITSLYYDLQGHLFANEISSGDEFYIASDNTGTPLAVFSSNGLMLKQIQYTAYGEIYFDSNI
DFQLVIGFHGGLYDPLTKLIHFGERDYDILAGRWTTPDIEIWKRIGKDPAPFNLYMFRNNNPASKIHD
VKDYITDVNSWLVTFGFHLHNAIPGFPVPKFDLTEPSYELVKSQQWDDIPPIFGVQQQVARQAKAFLS
LGKMAEVQVSRRRAGGAQSWLWFATVKSLIGKGVMLAVSQGRVQTNVLMIANEDCIKVAAVLNNAFYL
ENLHFTIEGKDTHYFIKTTTPESDLGTLRLTSGRKALENGINVTVSQSTTVVNGRTRRFADVEMQFGA
LALHVRYGMTLDEEKARILEQARQRALARAWAREQQRVRDGEEGARLWTEGEKRQLLSAGKVQGYDGY
YVLSVEQYPELADSANNIQFLRQSEIGRR

| | | |
|---|---|---|
| NOV40x, CG55069-10 | SEQ ID NO: 531 | 2519 bp |
| DNA Sequence | ORF Start: at 7 | ORF Stop: at 2488 |

GGTACCAACTGGCAGCTACAGCAGACTGAAAATGACGCATTTGAGAATGGAAAAGTGAATTCTGATAC
CATGCCAACAAACACTGTGTCATTACCTTCTGGAGACAATGGAAAATTAGGTGGATTTACGCAAGAAA
ATAACACCATAGATTCCGGAGAACTTGATATTGGCCGAAGAGCAATTCAAGAGATTCCTCCCGGGATC
TTCTGGAGATCACAGCTCTTCATTGATCAGCCACAGTTTCTTAAATTCAATATCTCTCTTCAGAAGGA
TGCATTGATTGGAGTATATGGCCGGAAAGGCTTACCGCCTTCCCATACTCAGTATGACTTCGTGGAGC
TCCTGGATGGCAGCAGGCTGATTGCCAGAGAGCAGCGGAGCCTGCTTGAGACGGAGAGAGCCGGGCGG
CAGGCGAGATCCGTCAGCCTTCATGAGGCCGGCTTTATCCAGTACTTGGATTCTGGAATCTGGCATCT
GGCTTTTTATAATGATGGGAAAAATGCAGAGCAGGTGTCTTTTAATACCATTGTTATAGAGTCTGTGG
TGGAATGTCCCCGAAATTGCCATGGAAATGGAGAATGCGTTTCTGGAACTTGCCATTGTTTTCCAGGA
TTTCTGGGTCCGGATTGTTCAAGAGCCGCCTGTCCAGTGTTATGTAGTGGCAACGGGCAGTACTCCAA
GGGCCGCTGCCTGTGTTTCAGCGGCTGGAAGGGCACCGAGTGTGATGTGCCGACTACCCAGTGTATTG
ACCCACAGTGTGGGGGTCGTGGGATTTGTATCATGGGCTCCTGTGCTTGCAACTCAGGATACAAAGGA
GAAAGTTGTGAAGAAGCTGACTGTATAGACCCTGGGTGTTCTAATCATGGTGTGTGTATCCACGGGGA
ATGTCACTGCAGTCCAGGATGGGGAGGTAGCAATTGTGAAATACTGAAGACCATGTGTCCAGACCAGT
GCTCCGGCCACGGAACGTATCTTCAAGAAAGTGGCTCCTGCACGTGTGACCCTAACTGGACTGGCCCA
GACTGCTCAAACGAAATATGTTCTGTGGACTGTGGCTCACACGGCGTTTGCATGGGGGGGACGTGCCG
CTGTGAAGAAGGCTGGACGGGCCCAGCCTGTAATCAGAGAGCCTGCCACCCCCGCTGTGCCGAGCACG
GGACCTGCAAGGATGGCAAGTGTGAATGCAGCCAGGGCTGGAATGGAGAGCACTGCACTATCGCTCAC
TATTTGGATAAGATAGTTAAAGACAAGATAGGATATAAAGAGGGTTGTCCTGGTCTGTGCAACAGCAA
TGGAAGATGTACCCTGGACCAAAATGGCTGGCATTGTGCGTGCCAGCCTGGATGGAGAGGAGCAGGCT
GTGACGTAGCCATGGAGACTCTTTGCACAGATAGCAAGGACAATGAAGGAGATGGACTCATTGACTGC
ATGGATCCCGATTGCTGCCTACAGAGTTCCTGCCAGAATCAGCCCTATTGTCGGGGACTGCCGGATCC
TCAGGGCATCATTAGCCAAAGCCTTCAATCGCCTTCTCAGCAAGCTGCCAAATCCTTTTATGATCGAA
TCAGTTTCCTTATAGGATCTGATAGCACCCATGTTATACCTGGAGAAAGTCCTTTCAATAAGAGCCTT
GCATCTGTCATCAGAGGCCAAGTACTGACTGCTGATGGAACTCCACTTATTGGAGTAAATGTCTCGTT
TTTCCATTACCCAGAATATGGATATACTATTACCCGCCAGGACGGAATGTTTGACTTGGTGGCAAATG
GTGGGGCCTCTCTAACTTTGGTATTTGAACGATCCCCATTCCTCACTCAGTATCATACTGTGTGGATT
CCATGGAATGTCTTTTATGTGATGGATACCCTAGTCATGAAGAAAGAAGAGAATGACATTCCCAGCTG
TGATCTGAGTGGATTCGTGAGGCCAAATCCCATCATTGTGTCATCACCTTTATCCACCTTTTTCAGAT
CTTCTCCTGAAGACAGTCCCATCATTCCCGAAACACAGGTACTCCACGAGGAAACTACAATTCCAGGA
ACAGATTTGAAACTCTCCTACTTGAGTTCCAGAGCTGCAGGGTATAAGTCAGTTCTCAAGATCACCAT
GACCCAGTCTATTATTCCATTTAATTTAATGAAGGTTCATCTTATGGTAGCTGTAGTAGGAAGACTCT
TCCAAAAGTGGTTTCCTGCCTCACCAAACTTGGCCTATACTTTCATATGGGATAAAACAGATGCATAT
AATCAGAAAGTCTATGGTCTATCTGAAGCTGTTGTGTCAGTTGGATATGAGTATGAGTCGTGTTTGGA
CCTGACTCTGTGGGAAAAGAGGACTGCCATTCTGCAGGGCTATGAATTGGATGCGTCCAACATGGGTG
GCTGGACATTAGATAAACATCACGTGCTGGATGTACAGAACGGTATACTGTACAAGGGAAACGGGGAA
AACCAGTTCATCTCCCAGCAGCCTCCAGTCGTGAGTAGCGTCGACCCAGCAGCCTCCAGTCGTGAGTA
GCG

| | | | |
|---|---|---|---|
| NOV40x, GG55069-10 | SEQ ID NO: 532 | 827 aa | MW at 90474.8kD |
| Protein Sequence | | | |

NWQLQQTENDAFENGKVNSDTMPTNTVSLPSGDNGKLGGFTQENNTIDSGELDIGRRAIQEIPPGIFW
RSQLFIDQPQFLKFNISLQKDALIGVYGRKGLPPSHTQYDFVELLDGSRLIAREQRSLLETERAGRQA
RSVSLHEAGFIQYLDSGIWHLAFYNDGKNAEQVSFNTIVIESVVECPRNCHGNGECVSGTCHCFPGFL
GPDCSRAACPVLCSGNGQYSKGRCLCFSGWKGTECDVPTTQCIDPQCGGRGICIMGSCACNSGYKGES
CEEADCIDPGCSNHGVCIHGECHCSPGWGGSNCEILKTMCPDQCSGHGTYLQESGSCTCDPNWTGPDC
SNEICSVDCGSHGVCMGGTCRCEEGWTGPACNQRACHPRCAEHGTCKDGKCECSQGWNGEHCTIAHYL
DKIVKDKIGYKEGCPGLCNSNGRCTLDQNGWHCACQPGWRGAGCDVAMETLCTDSKDNEGDGLIDCMD
PDCCLQSSCQNQPYCRGLPDPQGIISQSLQSPSQQAAKSFYDRISFLIGSDSTHVIPGESPFNKSLAS
VIRGQVLTADGTPLIGVNVSFFHYPEYGYTITRQDGMFDLVANGGASLTLVFERSPFLTQYHTVWIPW
NVFYVMDTLVMKKEENDIPSCDLSGFVRPNPIIVSSPLSTFFRSSPEDSPIIPETQVLHEETTIPGTD
LKLSYLSSPAAGYKSVLKITMTQSIIPFNLMKVHLMVAVVGRLFQKWFPASPNLAYTFIWDKTDAYNQ
KVYGLSEAVVSVGYEYESCLDLTLWEKRTAILQGYELDASNMGGWTLDKHHVLDVQMGILYKGNGENQ
FISQQPPVVSS

| | | |
|---|---|---|
| NOV40y, CG55069-11 | SEQ ID NO: 533 | 2482 bp |
| DNA Sequence | ORF Start: at 11 | ORF Stop: at 2474 |

CACCTCGCGAAACTGGCAGCTACAGCAGACTGAAAATGACACATTTGAGAATGGAAAAGTGAATTCTG
ATACCATGCCAACAAACACTGTGTCATTACCTTCTGGAGACAATGGAAAATTAGGTGGATTTACGCAA
GAAAATAACACCATAGATTCCGGAGAACTTGATATTGGCCGAAGAGCAATTCAAGAGATTCCTCCCGG
GATCTTCTGGAGATCACAGCTCTTCATTGATCAGCCACAGTTTCTTAAATTCAATATCTCTCTTCAGA
AGGATGCATTGATTGGAGTATATGGCCGGAAAGGCTTACCGCCTTCCCATACTCAGTATGACTTCGTG
GAGCTCCTGGATGGCAGCAGGCTGATTGCCAGAGAGCAGCGGAGCCTGCTTGAGACGGAGAGAGCCGG
GCGGCAGGCGAGATCCGTCAGCCTTCATGAGGCCGGCTTTATCCAGTACTTGGATTCTGGAATCTGGC
ATCTGGCTTTTTATAATGATGGGAAAAATGCAGAGCAGGTGTCTTTTAATACCATTGTTATAGAGTCT
GTGGTGGAATGTCCCCGAAATTGCCATGGAAATGGAGAATGCGTTTCTGGAACTTGCCATTGTTTTCC
AGGATTTCTGGGTCCGGATTGTTCAAGAGCCGCCTGTCCAGTGTTATGTAGTGGCAACGGGCAGTACT
CCAAGGGCCGCTGCCTGTGTTTCAGCGGCTGGAAGGGCACCGAGTGTGATGTGCCGACTACCCAGTGT
ATTGACCCACAGTGTGGGGGTCGTGGGATTTGTATCATGGGCTCTTGTGCTTGCAACTCAGGATACAA
AGGAGAAAGTTGTGAAGAAGCTGACTGTATAGACCCTGGGTGTTCTAATCATGGTGTGTGTATCCACG
GGGAATGTCACTGCAGTCCAGGATGGGGAGGTAGCAATTGTGAAATACTGAAGACCATGTGTCCAGAC
CAGTGCTCCGGCCACGGAACGTATCTTCAAGAAAGTGGCTCCTGCACGTGTGACCCTAACTGGACTGG
CCCAGACTGCTCAAACGAAATATGTTCTGTGGACTGTGGCTCACACGGCGTTTGCATGGGGGGGACGT
GTCGCTGTGAAGAAGGCTGGACGGGCCCAGCCTGTAATCAGAGAGCCTGCCACCCCCGCTGTGCCGAG
CACGGGACCTGCAAGGATGGCAAGTGTGAATGCAGCCAGGGCTGGAATGGAGAGCACTGCACTATCGC
TCACTATTTGGATAAGATAGTTAAAGAGGGTTGTCCTGGTCTGTGCAACAGCAATGGAAGATGTACCC
TGGACCAAAATGGCTGGCATTGTGTGTGCCAGCCTGGATGGAGAGGAGCAGGCTGTGACGTAGCCATG
GAGACTCTTTGCACAGATAGTAAGGACAATGAAGGAGATGGACTCATTGACTGCATGGATCCCGATTG
CTGCCTACAGAGTTCCTGCCAGAATCAGCCCTATTGTCGGGGACTGCCGGATCCTCAGGACATCATTA
GCCAAAGCCTTCAATCGCCTTCTCAGCAAGCTGCCAAATCCTTTTATGATCGAATCAGTTTCCTTATA
GGATCTGATAGCACCCATGTTATACCTGGAGAAAGTCCTTTCAATAAGAGCCTTGCATCTGTCATCAG
AGGCCAAGTACTGACTGCTGATGGAACTCCACTTATTGGAGTAAATGTCTCGTTTTTCCATTACCCAG
AATATGGATATACTATTACCCGCCAGGACGGAATGTTTGACTTGGTGGCAAATGGTGGGGCCTCTCTA
ACTTTGGTATTTGAACGATCCCCATTCCTCACTCAGTATCATACTGTGTGGATTCCATGGAATGTCTT
TTATGTGATGGATACCCTAGTCATGAAGAAAGAAGAGAATGACATTCCCAGCTGTGATCTGAGTGGAT
TCGTGAGGCCAAATCCCATCATTGTGTCATCACCTTTATCCACCTTTTTCAGATCTTCTCCTGAAGAC
AGTCCCATCATTCCCGAAACACAGGTACTCCACGAGGAAACTACAATTCCAGGAACAGATTTGAAACT
CTCCTACTTGAGTTCCAGAGCTGCAGGGTATAAGTCAGTTCTCAAGATCACCATGACCCAGTCTATTA
TTCCATTTAATTTAATGAAGGTTCATCTTATGGTAGCTGTAGTAGGAAGACTCTTCCAAAAGTGGTTT
CCTGCCTCACCAAACTTGGCCTATACTTTCATATGGGATAAAACAGATGCATATAATCAGAAAGTCTA
TGGTCTATCTGAAGCTGTTGTGTCAGTTGGATATGAGTATGAGTCGTGTTTGGACCTGACTCTGTGGG
AAAAGAGGACTGCCATTCTGCAGGGCTATGAATTGGATGCGTCCAACATGGGTGGCTGGACATTAGAT
AAACATCACGTGCTGGATGTACAGAACGGTATACTGTACAAGGGAAACGGGGAAAACCAGTTCATCTC
CCAGCAGCCTCCAGTCGTGAGTAGCCTCGAGGGC

| | | | |
|---|---|---|---|
| NOV40y, CG55069-11 | SEQ ID NO: 534 | 821 aa | MW at 89886.1kD |
| Protein Sequence | | | |

NWQLQQTENDTFENGKVNSDTMPTNTVSLPSGDNGKLGGFTQENNTIDSGELDIGRRAIQEIPPGIFW
RSQLFIDQPQFLKFNISLQKDALIGVYGRKGLPPSHTQYDFVELLDGSRLIAREQRSLLETERAGRQA
RSVSLHEAGFIQYLDSGIWHLAFYNDGKNAEQVSFNTIVIESVVECPRNCHGMGECVSGTCHCFPGFL
GPDCSRAACPVLCSGNGQYSKGRCLCFSGWKGTECDVPTTQCIDPQCGGRGICIMGSCACNSGYKGES
CEEADCIDPGCSNHGVCIHGECHCSPGWGGSNCEILKTMCPDQCSGHGTYLQESGSCTCDPNWTGPDC
SNEICSVDCGSHGVCMGGTCRCEEGWTGPACNQRACHPRCAEHGTCKDGKCECSQGWNGEHCTIAHYL
DKIVKEGCPGLCNSNGRCTLDQNGWHCVCQPGWRGAGCDVAMETLCTDSKDNEGDGLIDCMDPDCCLQ
SSCQNQPYCRGLPDPQDIISQSLQSPSQQAAKSFYDRISFLIGSDSTHVIPGESPFNKSLASVIRGQV
LTADGTPLIGVNVSFFHYPEYGYTITRQDGMFDLVANGGASLTLVFERSPFLTQYHTVWIPWNVFYVM
DTLVMKKEENDIPSCDLSGFVRPNPIIVSSPLSTFFRSSPEDSPIIPETQVLHEETTIPGTDLKLSYL
SSRAAGYKSVLKITMTQSIIPFNLMKVHLMVAVVGRLFQKWFPASPNLAYTFIWDKTDAYNQKVYGLS
EAVVSVGYEYESCLDLTLWEKRTAILQGYELDASNMGGWTLDKHHVLDVQNGILYKGNGENQFISQQP
PVVSS

| | | |
|---|---|---|
| NOV40z, CG55069-12 | SEQ ID NO: 535 | 2500 bp |
| DNA Sequence | ORF Start: at 11 | ORF Stop: at 2492 |

CACCAAGCTTAACTGGCAGCTACAGCAGACTGAAAATGACGCATTTGAGAATGGAAAAGTGAATTCTG
ATACCATGCCAACAAACACTGTGTCATTACCTTCTGGAGACAATGGAAAATTAGGTGGATTTACGCAA
GAAAATAACACCATAGATTCCGGAGAACTTGATATTGGCCGAAGAGCAATTCAAGAGATTCCTCCCGG
GATCTTCTGGAGATCACAGCTCTTCATTGATCAGCCACAGTTTCTTAAATTCAATATCTCTCTTCAGA
AGGATGCATTGATTGGAGTATATGGCCGGAAAGGCTTACCGCCTTCCCATACTCAGTATGACTTCGTG
GAGCTCCTGGATGGCAGCAGGCTGATTGCCAGAGAGCAGCGGAGCCTGCTTGAGACGGAGAGAGCCGG
GCGGCAGGCGAGATCCGTCAGCCTTCATGAGGCCGGCTTTATCCAGTACTTGGATTCTGGAATCTGGC
ATCTGGCTTTTTATAATGATGGGAAAAATGCAGAGCAGGTGTCTTTTAATACCATTGTTATAGAGTCT
GTGGTGGAATGTCCCCGAAATTGCCATGGAAATGGAGAATGCGTTTCTGGAACTTGCCATTGTTTTCC
AGGATTTCTGGGTCCGGATTGTTCAAGAGCCGCCTGTCCAGTGTTATGTAGTGGCAACGGGCAGTACT
CCAAGGGCCGCTGCCTGTGTTTCAGCGGCTGGAAGGGCACCGAGTGTGATGTGCCGACTACCCAGTGT
ATTGACCCACAGTGTGGGGGTCGTGGGATTTGTATCATGGGCTCCTGTGCTTGCAACTCAGGATACAA
AGGAGAAAGTTGTGAAGAAGCTGACTGTATAGACCCTGGGTGTTCTAATCATGGTGTGTGTATCCACG
GGGAATGTCACTGCAGTCCAGGATGGGGAGGTAGCAATTGTGAAATACTGAAGACCATGTGTCCAGAC
CAGTGCTCCGGCCACGGAACGTATCTTCAAGAAAGTGGCTCCTGCACGTGTGACCCTAACTGGACTGG
CCCAGACTGCTCAAACGAAATATGTTCTGTGGACTGTGGCTCACACGGCGTTTGCATGGGGGGGACGT
GCCGCTGTGAAGAAGGCTGGACGGGCCCAGCCTGTAATCAGAGAGCCTGCCACCCCCGCTGTGCCGAG
CACGGGACCTGCAAGGATGGCAAGTGTGAATGCAGCCAGGGCTGGAATGGAGAGCACTGCACTATCGC
TCACTATTTGGATAAGATAGTTAAAGACAAGATAGGATATAAAGAGGGTTGTCCTGGTCTGTGCAACA
GCAATGGAAGATGTACCCTGGACCAAAATGGCTGGCATTGTGCGTGCCAGCCTGGATGGAGAGGAGCA
GGCTGTGACGTAGCCATGGAGACTCTTTGCACAGATAGCAAGGACAATGAAGGAGATGGACTCATTGA
CTGCATGGATCCCGATTGCTGCCTACAGAGTTCCTGCCAGAATCAGCCCTATTGTCGGGGACTGCCGG
ATCCTCAGGGCATCATTAGCCAAAGCCTTCAATCGCCTTCTCAGCAAGCTGCCAAATCCTTTTATGAT
CGAATCAGTTTCCTTATAGGATCTGATAGCACCCATGTTATACCTGGAGAAAGTCCTTTCAATAAGAG
CCTTGCATCTGTCATCAGAGGCCAAGTACTGACTGCTGATGGAACTCCACTTATTGGAGTAAATGTCT
CGTTTTTCCATTACCCAGAATATGGATATACTATTACCCGCCAGGACGGAATGTTTGACTTGGTGGCA
AATGGTGGGGCCTCTCTAACTTTGGTATTTGAACGATCCCCATTCCTCACTCAGTATCATACTGTGTG
GATTCCATGGAATGTCTTTTATGTGATGGATACCCTAGTCATGAAGAAAGAAGAGAATGACATTCCCA
GCTGTGATCTGAGTGGATTCGTGAGGCCAAATCCCATCATTGTGTCATCACCTTTATCCACCTTTTTC
AGATCTTCTCCTGAAGACAGTCCCATCATTCCCGAAACACAGGTACTCCACGAGGAAACTACAATTCC
AGGAACAGATTTGAAACTCTCCTACTTGAGTTCCAGAGCTGCAGGGTATAAGTCAGTTCTCAAGATCA
CCATGACCCAGTCTATTATTCCATTTAATTTAATGAAGGTTCATCTTATGGTAGCTGTAGTAGGAAGA
CTCTTCCAAAAGTGGTTTCCTGCCTCACCAAACTTGGCCTATACTTTCATATGGGATAAAACAGATGC
ATATAATCAGAAAGTCTATGGTCTATCTGAAGCTGTTGTGTCAGTTGGATATGAGTATGAGTCGTGTT
TGGACCTGACTCTGTGGGAAAAGAGGACTGCCATTCTGCAGGGCTATGAATTGGATGCGTCCAACATG
GGTGGCTGGACATTAGATAAACATCACGTGCTGGATGTACAGAACGGTATACTGTACAAGGGAAACGG
GGAAAACCAGTTCATCTCCCAGCAGCCTCCAGTCGTGAGTAGCCTCGAGGGC

| | | | |
|---|---|---|---|
| NOV40z, CG55069-12 | SEQ ID NO: 536 | 827 aa | MW at 90474.8kD |
| Protein Sequence | | | |

NWQLQQTENDAFENGKVNSDTMPTNTVSLPSGDNGKLGGFTQENNTIDSGELDIGRRAIQEIPPGIFW
RSQLFIDQPQFLKFNISLQKDALIGVYGRKGLPPSHTQYDFVELLDGSRLIAREQRSLLETERAGRQA
RSVSLHEAGFIQYLDSGIWHLAFYNDGKNAEQVSFNTIVIESVVECPRNCHGNGECVSGTCHCFPGFL
GPDCSRAACPVLCSGNGQYSKGRCLCFSGWKGTECDVPTTQCIDPQCGGRGICIMGSCACNSGYKGES
CEEADCIDPGCSNHGVCIHGECHCSPGWGGSNCEILKTMCPDQCSGHGTYLQESGSCTCDPNWTGPDC
SNEICSVDCGSHGVCMGGTCRCEEGWTGPACNQRACHPRCAEHGTCKDGKCECSQGWNGEHCTIAHYL
DKIVKDKIGYKEGCPGLCNSNGRCTLDQNGWHCACQPGWRGAGCDVAMETLCTDSKDNEGDGLIDCMD
PDCCLQSSCQNQPYCRGLPDPQGIISQSLQSPSQQAAKSFYDRISFLIGSDSTHVIPGESPFNKSLAS
VIRGQVLTADGTPLIGVNVSFFHYPEYGYTITRQDGMFDLVANGGASLTLVFERSPFLTQYHTVWIPW
NVFYVMDTLVMKKEENDIPSCDLSGFVRPNPIIVSSPLSTFFRSSPEDSPIIPETQVLHEETTIPGTD
LKLSYLSSRAAGYKSVLKITMTQSIIPFNLMKVHLMVAVVGRLFQKWFPASPNLAYTFIWDKTDAYNQ
KVYGLSEAVVSVGYEYESCLDLTLWEKRTAILQGYELDASNMGGWTLDKHHVLDVQNGILYKGNGENQ
FISQQPPVVSS

| | | |
|---|---|---|
| NOV40aa, CG55069-13 | SEQ ID NO: 537 | 2541 bp |
| DNA Sequence | ORF Start: ATG at 16 | ORF Stop: TAG at 2530 |

CACCGCGGCCGCACCATGCTGCCCGGTTTGGCACTGCTCCTGCTGGCCGCCTGGACGGCTCGGGCGAA
CTGGCAGCTACAGCAGACTGAAAATGACACATTTGAGAATGGAAAAGTGAATTCTGATACCATGCCAA
CAAACACTGTGTCATTACCTTCTGGAGACAATGGAAAATTAGGTGGATTTACGCAAGAAAATAACACC
ATAGATTCCGGAGAACTTGATATTGGCCGAAGAGCAATTCAAGAGATTCCTCCCGGGATCTTCTGGAG
ATCACAGCTCTTCATTGATCAGCCACAGTTTCTTAAATTCAATATCTCTCTTCAGAAGGATGCATTGA
TTGGAGTATATGGCCQGAAAGGCTTACCGCCTTCCCATACTCAGTATGACTTCGTGGAGCTCCTGGAT
GGCAGCAGGCTGATTGCCAGAGAGCAGCGGAGCCTGCTTGAGACGGAGAGAGCCGGGCGGCAGGCGAG
ATCCGTCAGCCTTCATGAGGCCGGCTCTATCCAGTACTTGGATTCTGGAATCTGGCATCTGGCTTTTT
ATAATGATGGGAAAAATGCAGAGCAGGTGTCTTTTAATACCATTGTTATAGAGTCTGTGGTGGAATGT
CCCCGAAATTGCCATGGAAATGGAGAATGCGTTTCTGGAACTTGCCATTGTTTTCCAGGATTTCTGGG
TCCGGATTGTTCAAGAGCCGCCTGTCCAGTGTTATGTAGTGGCAACGGGCAGTACTCCAAGGGCCGCT
GCCTGTGTTTCAGCGGCTGGAAGGGCACCGAGTGTGATGTGCCGACTACCCAGTGTATTGACCCACAG
TGTGGGGGTCGTGGGATTTGTATCATGGGCTCTTGTGCTTGCAACTCAGGATACAAAGGAGAAAGTTG
TGAAGAAGCTGACTGTATAGACCCTGGGTGTTCTAATCATGGTGTGTGTATCCACGGGGAATGTCACT
GCAGTCCAGGATGGGGAGGTAGCAATTGTGAAATACTGAAGACCATGTGTCCAGACCAGTGCTCCGGC
CACGGAACGTATCTTCAAGAAAGTGGCTCCTGCACGTGTGACCCTAACTGGACTGGCCCAGACTGCTC
AAACGAAATATGTTCTGTGGACTGTGGCTCACACGGCGTTTGCATGGGGGGGACGTGTCGCTGTGAAG
AAGGCTGGACGGGCCCAGCCTGTAATCAGAGAGCCTGCCACCCCCGCTGTGCCGAGCACGGGACCTGC
AAGGATGGCAAGTGTGAATGCAGCCAGGGCTGGAATGGAGAGCACTGCACTATCGCTCACTATTTGGA
TAAGATAGTTAAAGAGGGTTGTCCTGGTCTGTGCAACAGCAATGGAAGATGTACCCTGGACCAAAATG
GCTGGCATTGTGTGTGCCAGCCTGGATGGAGAGGAGCAGGCTGTGACGTAGCCATGGAGACTCTTTGC
ACAGATAGTAAGGACAATGAAGGAGATGGACTCATTGACTGCATGGATCCCGATTGCTGCCTACAGAG
TTCCTGCCAGAATCAGCCCTATTGTCGGGGACTGCCGGATCCTCAGGACATCATTAGCCAAAGCCTTC
AATCGCCTTCTCAGCAAGCTGCCAAATCCTTTTATGATCGAATCAGTTTCCTTATAGGATCTGATAGC
ACCCATGTTATACCTGGAGAAAGTCCTTTCAATAAGAGCCTTGCATCTGTCATCAGAGGCCAAGTACT
GACTGCTGATGGAACTCCACTTATTGGAGTAAATGTCTCGTTTTTCCATTACCCAGAATATGGATATA
CTATTACCCGCCAGGACGGAATGTTTGACTTGGTGGCAAATGGTGGGGCCTCTCTAACTTTGGTATTT
GAACGATCCCCATTCCTCACTCAGTATCATACTGTGTGGATTCCATGGAATGTCTTTTATGTGATGGA
TACCCTAGTCATGAAGAAAGAAGAGAATGACATTCCCAGCTGTGATCTGAGTGGATTCGTGAGGCCAA
ATCCCATCATTGTGTCATCACCTTTATCCACCTTTTTCAGATCTTCTCCTGAAGACAGTCCCATCATT
CCCGAAACACAGGTACTCCACGAGGAAACTACAATTCCAGGAACAGATTTGAAACTCTCCTACTTGAG
TTCCAGAGCTGCAGGGTATAAGTCAGTTCTCAAGATCACCATGACCCAGTCTATTATTCCATTTAATT
TAATGAAGGTTCATCTTATGGTAGCTGTAGTAGGAAGACTCTTCCAAAAGTGGTTTCCTGCCTCACCA
AACTTGGCCTATACTTTCATATGGGATAAAACAGATGCATATAATCAGAAAGTCTATGGTCTATCTGA
AGCTGTTGTGTCAGTTGGATATGAGTATGAGTCGTGTTTGGACCTGACTCTGTGGGAAAAGAGGACTG
CCATTCTGCAGGGCTATGAATTGGATGCGTCCAACATGGGTGGCTGGACATTAGATAAACATCACGTG
CTGGATGTACAGAACGGTATACTGTACAAGGGAAACGGGGAAAACCAGTTCATCTCCCAGCAGCCTCC
AGTCGTGAGTAGCTAGGTCGACGGC

| | | | |
|---|---|---|---|
| NOV40aa, GG55069-13 | SEQ ID NO: 538 | 838 aa | MW at 91589.1kD |
| Protein Sequence | | | |

MLPGLALLLLAAWTARANWQLQQTENDTFENGKVNSDTMPTNTVSLPSGDNGKLGGFTQENNTIDSGE
LDIGRRAIQEIPPGIFWRSQLFIDQPQFLKFNISLQKDALIGVYGRKGLPPSHTQYDFVELLDGSRLI
AREQRSLLETERAGRQARSVSLHEAGSIQYLDSGIWHLAFYNDGKNAEQVSFNTIVIESVVECPRNCH
GNGECVSGTCHCFPGFLGPDCSRAACPVLCSGMGQYSKGRCLCFSGWKGTECDVPTTQCIDPQCGGRG
ICIMGSCACNSGYKGESCEEADCIDPGCSNHGVCIHGECHCSPGWGGSNCEILKTMCPDQCSGHGTYL
QESGSCTCDPNWTGPDCSNEICSVDCGSHGVCMGGTCRCEEGWTGPACNQRACHPRCAEHGTCKDGKC
ECSQGWNGEHCTIAHYLDKIVKEGCPGLCNSNGRCTLDQNGWHCVCQPGWRGAGCDVAMETLCTDSKD
NEGDGLIDCMDPDCCLQSSCQNQPYCRGLPDPQDIISQSLQSPSQQAAKSFYDRISFLIGSDSTHVIP
GESPFNKSLASVIRGQVLTADGTPLIGVNVSFFHYPEYGYTITRQDGMFDLVANGGASLTLVFERSPF
LTQYHTVWIPWNVFYVMDTLVMKKEENDIPSCDLSGFVRPNPIIVSSPLSTFFRSSPEDSPIIPETQV
LHEETTIPGTDLKLSYLSSRAAGYKSVLKITMTQSIIPFNLMKVHLMVAVVGRLFQKWFPASPNLAYT
FIWDKTDAYNQKVYGLSEAVVSVGYEYESCLDLTLWEKRTAILQGYELDASNMGGWTLDKHHVLDVQN
GILYKGNGENQFISQQPPVVSS

| | | |
|---|---|---|
| NOV40ab, CG55069-14 | SEQ ID NO: 539 | 1755 bp |
| DNA Sequence | ORF Start: ATG at 890 | ORF Stop: TAA at 1532 |

GAGAAAGGAGATTAAAAATAACCTCTGGATATTCCTCTCATGTGATCTTTATTCTGGATGAAGCATTA
GGACAGCTAATAGCCGTGTGTCACTGTGTGATTTCTTCCCTAAGACTAAGGACCCATCATTTTAGTGC
AACCTTCTTCATTTAAATGGAGAGTTGTAATTGCCAATGCTCACAGCTACTCCTGCTCCGGCAATTTG
CTGCCAGAAGTGTGTTTTCCTTTTTAAAAGGCAGTAAATTCAAGATGTTGTGGTGGATGTAGATTTTT
GCTGCAAGGAAATAACAGCTGGTGATGGAATTTCATTCTTTTGACTTCTAGATTGCCTGTGAAGAGCT
GCTTCCTCGGAAGAGCACCCTAAGGCTGGGTGGCCACTATCCTTTGCCTTGGCAGAGCCAGCCAGAAG
GCCTAGGCACAACCCGCTGTGTTTGCTGACAGCCAACCTACCCTGGAGTTCCGGAGCGGCTTCCTAGG
AAGACTGGGGAGCGGTAGAAAAATGGCTCTGCTGAGATGAGCTCTTAATTAATGCACTGAGAGCCTGC
AAGTCCCACCTCTCAACAGGAATGATTGACGTCCAAGGATACATAAATTACACTAACTGAGCTCTGCC
TCTATATAAGCTTTCCACATCCAACTCATCAGAGAAGCTAGGCTTGTACCATAACCAATACCCCTGCT
TGGCAACTCTAATGAGCAAACTGCCGCAAAATTGAGAGAGAACACACCTTTTTGATTTCCTGCTCTTC
TAAGACACAGTGATTTAGAATTTCTGTTCAAGCAAGAGAACTAAAGACTTCTTTAAAGAAGAGAAGAG
AGGCCAATGAGACTTGAACCCTGAGCCTAAGTTGTCACCAGCAGGACTGATGTGCACACAGAAGGAAT
GAAGTATGGATGTGAAAGAACGCAGGCCTTACTGCTCCCTGACCAAGAGCAGACGAGAGAAGGAACGG
CGCTACACAAATTCCTCCGCAGACAATGAGGAGTGCCGGGTACCCACACACAACTCCTACAGTTCCAG
CGAGACATTGAAAGCTTTTGATCATGATTCCTCGCGGCTGCTTTACGGCAACAGAGTGAAGGATTTGG
TTCACAGAGAAGCAGACGAGTTCACTAGACAAGGACAGAATTTTACCCTAAGGCAGTTAGGAGTTTGT
GAACCAGCAACTCGAAGAGGACTGGCATTTTGTGCGGAAATGGGGCTCCCTCACAGAGGTTACTCTAT
CAGTGCAGGGTCAGATGCTGATACTGAAAATGAAGCAGTGATGTCCCCAGAGCATGCCATGAGACTTT
GGGGCAGGGGGTTCAAATCAGGCCGCAGCTCCTGCCTGTCAAGTCGGTCCAACTCAGCCCTCACCCTG
ACAGATACGGAGCACGAAAACAAGTCCGACAGTGAGAATGGAGGGTCAAGCAGTTGGTTCGGTTTTCA
TTGGAATTTTTATGTGAGTAAAGCTTCCTGTTTGCTGCGCTTGCCTAGGATTTTCTTATCCCACAACT
ACAATGTGAACAAAGAGATGAGAGAGAAATTATGCTAATGCATTTTGGTGGATCAAATGAGTGTTTCA
TGAGACAACTCAAATTTTTGTTAGCTATATGGTGTTGGAATATAATTTCAAAGACAACTAAGCCCTAA
AATAGGAGATTTATTTAAAACATAACTTTTCCTTGAATGAAAGGATGTTTTTGTTCTTTCTCTGACAA
ATATGATTTGAGAATAAAAGACCTGCCCGGGCAGCCGCTCGAGCCCTATAGTGAG

| | | | |
|---|---|---|---|
| NOV40ab, CG55069-14 | SEQ ID NO: 540 | 214 aa | MW at 24449.8kD |
| Protein Sequence | | | |

MDVKERRPYCSLTKSRREEKRRYTNSSADNEECRVPTHNSYSSSETLKAFDHDSSRLLYGNRVKDLVH
READEFTRQGQNFTLRQLGVCEPATRRGLAFCAEMGLPHRGYSISAGSDADTENEAVMSPERAMRLWG
RGFKSGRSSCLSSRSNSALTLTDTEHENKSDSENGGSSSWFGFHWNFYVSKASCLLRLPRIFLSHNYN
VNKEMREKLC

| | | |
|---|---|---|
| NOV40ac, CG55069-15 | SEQ ID NO: 541 | 768 bp |
| DNA Sequence | ORF Start: ATG at 65 | ORF Stop: TAA at 707 |

AGACTTGAACCCTGAGCCTAAGTTGTCACCAGCAGGACTGATGTGCACACAGAAGGAATGAAGTATGG
ATGTGAAAGAACGCAGGCCTTACTGCTCCCTGACCAAGAGCAGACGAGAGAAGGAACGGCGCTACACA
AATTCCTCCGCAGACAATGAGGAGTGCCGGGTACCCACACAGAAGTCCTACAGTTCCAGCGAGACATT
GAAAGCTTTTGATCATGATTCCTCGCGGCTGCTTTACGGCAACAGAGTGAAGGATTTGGTTCACAGAG
AAGCAGACGAGTTCACTAGACAAGGACAGAATTTTACCCTAAGGCAGTTAGGAGTTTGTGAACCAGCA
ACTCGAAGAGGACTGGCATTTTGTGCGGAAATGGGGCTCCCTCACAGAGGTTACTCTATCAGTGCAGG
GTCAGATGCTGATACTGAAAATGAAGCAGTGATGTCCCCAGAGCATGCCATGAGACTTTGGGGCAGGG
GGGTCAAATCAGGCCGCAGCTCCTGCCTGTCAAGTCGGTCCAACTCAGCCCTCACCCTGACAGATACG
GAGCACGAAAACAAGTCCGACAGTGAGAATGGAGGGTCAAGCAGTTGGTTCGGTTTTCATTGGAATTT
TTATGTGGGTAAAGCTTCCTGTTTGCTGCGCTTGCCTAGGATTTTCTTATCCCACAACTACAATGTGA
ACAAAGAGATGAGAGAGAAATTATGCTAATGCATTTTGGTGGATCAATGCTAATGCATTTTGGTGGAT
CAATGCTAATGCATTTTGGT

| | | | |
|---|---|---|---|
| NOV40ac, CG55069-15 | SEQ ID NO: 542 | 214 aa | MW at 24376.8kD |
| Protein Sequence | | | |

MDVKERRPYCSLTKSRREEKRRYTNSSADNEECRVPTHNSYSSSETLKAFDHDSSRLLYGNRVKDLVH
READEFTRQGQNFTLRQLGVCEPATRRGLAFCAEMGLPHRGYSISAGSDADTENEAVMSPERAMRLWG
RGFKSGRSSCLSSRSNSALTLTDTEHENKSDSENGGSSSWFGFHWNFYVSKASCLLRLPRIFLSHNYN
VNKEMREKLC

| | | |
|---|---|---|
| NOV40ad, SNP13374479 of | SEQ ID NO: 543 | 8657 bp |
| CG55069-01, DNA Sequence | ORF Start: ATG at 151 | ORF Stop: TAA at 8326 |
| | SNP Pos: 465 | SNP Change: C to T |

TTTGGCCTCGGGCCAGAATTCGGCACGAGGGGTCTGGAGCTTGGAGGAGAAGTCTGAACTAAGGATAA
ACTAAAGAGAGGCCAATGAGACTTGAACCCTGAGCCTAAGTTGTCACCAGCAGGACTGATGTGCACAC
AGAAGGAATGAAGTATGGATGTGAAAGAACGCAGGCCTTACTGCTCCCTGACCAAGAGCAGACGAGAG
AAGGAACGGCGCTACACAAATTCCTCCGCAGACAATGAGGAGTGCCGGGTACCCACACAGAAGTCCTA
CAGTTCCAGCGAGACATTGAAAGCTTTTGATCATGATTCCTCGCGGCTGCTTTACGGCAACAGAGTGA
AGGATTTGGTTCACAGAGAAGCAGACGAGTTCACTAGACAAGGACAGAATTTTACCCTAAGGCAGTTA
GGAGTTTGTGAACCAGCAACTCGAAGAGGACTGGCATTTTGTGCGGAAATGGGGCTTCCTCACAGAGG
TTACTCTATCAGTGCAGGGTCAGATGCTGATACTGAAAATGAAGCAGTGATGTCCCCAGAGCATGCCA
TGAGACTTTGGGGCAGGGGGGTCAAATCAGGCCGCAGCTCCTGCCTGTCAAGTCGGTCCAACTCAGCC
CTCACCCTGACAGATACGGAGCACGAAAACAAGTCCGACAGTGAGAATGAGCAACCTGCAAGCAATCA
AGGCCAGTCTACCCTGCAGCCCTTGCCGCCTTCCCATAAGCAGCACTCTGCACAGCATCATCCATCCA
TCACTTCTCTCAACAGAAACTCCCTGACCAATAGAAGGAACCAGAGTCCGGCCCCGCCGGCTGCTTTG
CCCGCCGAGCTGCAAACCACACCCGAGTCCGTCCAGCTGCAGGACAGCTGGGTCCTTGGCAGTAATGT
ACCACTGGAAAGCAGGCATTTCCTATTCAAAACAGGAACAGGTACAACGCCACTGTTCAGTACTGCAA
CCCCAGGATACACAATGGCATCTGGCTCTGTTTATTCACCACCTACTCGGCCACTACCTAGAAACACC
CTATCAAGAAGTGCTTTTAAATTCAAGAAGTCTTCAAAGTACTGTAGCTGGAAATGCACTGCACTGTG
TGCCGTAGGGGTCTCGGTGCTCCTGGCAATACTCCTGTCTTATTTTATAGCAATGCATCTCTTTGGCC
TCAACTGGCAGCTACAGCAGACTGAAAATGACACATTTGAGAATGGAAAAGTGAATTCTGATACCATG
CCAACAAACACTGTGTCATTACCTTCTGGAGACAATGGAAAATTAGGTGGATTTACGCAAGAAAATAA
CACCATAGATTCCGGAGAACTTGATATTGGCCGAAGAGCAATTCAAGAGATTCCTCCCGGGATCTTCT
GGAGATCACAGCTCTTCATTGATCAGCCACAGTTTCTTAAATTCAATATCTCTCTTCAGAAGGATGCA
TTGATTGGAGTATATGGCCGGAAGAAGTTACCGCCTTCCCATACTCAGTCCTCCCCCCAGTATGACTT
CGTGGAGCTCCTGGATGGCAGCAGGCTGATTGCCAGAGAGCAGCGGAGCCTGCTTGAGACGGAGAGAG
CCGGGCGGCAGGCGAGATCCGTCAGCCTTCATGAGGCCGGCTTTATCCAGTACTTGGATTCTGGAATC
TGGCATCTGGCTTTTTATAATGATGGGAAAAATGCAGAGCAGGTGTCTTTTAATACCATTGTTATAGA
GTCTGTGGTGGAATGTCCCCGAAATTGCCATGGAAATGGAGAATGCGTTTCTGGAACTTGCCATTGTT
TTCCAGGATTTCTGGGTCCGGATTGTTCAAGAGCCGCCTGTCCAGTGTTATGTAGTGGCAACGGGCAG
TACTCCAAGGGCCGCTGCCTGTGTTTCAGCGGCTGGAAGGGCACCGAGTGTGATGTGCCGACTACCCA
GTGTATTGACCCACAGTGTGGGGGTCGTGGGATTTGTATCATGGGCTCCTGTGCTTGCAGCTCAGGAT
ACAAAGGAGAAAGTTGTGAAGAAGCTGACTGTATAGACCCTGGGTGTTCTAATCATGGTGTGTGTATC
CACGGGGAATGTCACTGCAGTCCAGGATGGGGAGGTAGCAATTGTGAAATACTGAAGACCATGTGTCC
AGACCAGTGCTCCGGCCACGGAACGTATCTTCAAGAAAGTGGCTCCTGCACGTGTGACCCTAACTGGA
CTGGCCCAGACTGCTCAAACGAAATATGTTCTGTGGACTGTGGCTCACACGGCGTTTGCATGGGGGGG
ACGTGTCGCTGTGAAGAAGGCTGGACGGGCCCAGCCTGTAATCAGAGAGCCTGCCACCCCCGCTGTGC
CGAGCACGGGACCTGCAAGGATGGCAAGTGTGAATGCAGCCAGGGCTGGAATGGAGAGCACTGCACTA
TCGCTCACTATTTGGATAAGATAGTTAAAGACAAGATAGGATATAAAGAGGGTTGTCCTGGTCTGTGC
AACAGCAATGGAAGATGTACCCTGGACCAAAATGGCGGACATTGTGTGTGCCAGCCTGGATGGAGAGG
AGCAGGCTGTGACGTAGCCATGGAGACTCTTTGCACAGATAGCAAGGACAATGAAGGGGATGGACTCA
TTGACTGCATGGATCCCGATTGCTGCCTACAGAGTTCCTGCCAGAATCAGCCCTATTGTCGGGGACTG
CCGGATCCTCAGGACATCATTAGCCAAAGCCTTCAATCGCCTTCTCAGCAAGCTGCCAAATCCTTTTA
TGATCGAATCAGTTTCCTTATAGGATCTGATAGCACCCATGTTATACCTGGAGAAAGTCCTTTCAATA
AGAGCCTTGCATCTGTCATCAGAGGCCAAGTACTGACTGCTGATGGAACTCCACTTATTGGAGTAAAT
GTCTCGTTTTTCCATTACCCAGAATATGGATATACTATTACCCGCCAGGACGGAATGTTTGACTTGGT
GGCAAATGGTGGGGCCTCTCTAACTTTGGTATTTGAACGATCCCCATTCCTCACTCAGTATCATACTG
TGTGGATTCCATGGAATGTCTTTTATGTGATGGATACCCTAGTCATGGAGAAAGAAGAGAATGACATT
CCCAGCTGTGATCTGAGTGGATTCGTGAGGCCAAATCCCATCATTGTGTCATCACCTTTATCCACCTT
TTTCAGATCTTCTCCTGAAGACAGTCCCATCATTCCCGAAACACAGGTACTCCACGAGGAAACTACAA
TTCCAGGAACAGATTTGAAACTCTCCTACTTGAGTTCAGGAGCTGCAGGGTATAAGTCAGTTCTCAAG
ATCACCATGACCCAGTCTATTATTCCATTTAATTTAATGAAGGTTCATCTTATGGTAGCTGTAGTAGG
AAGACTCTTCCAAAAGTGGTTTCCTGCCTCACCAAACTTGGCCTATACTTTCATATGGGATAAAACAG
ATGCATATAATCAGAAAGTCTATGGTCTATCTGAAGCTGTTGTGTCAGTTGGATATGAGTATGAGTCG
TGTTTGGACCTGACTCTGTGGGAAAAGAGGACTGCCATTCTGCAGGGCTATGAATTGGATGCGTCCAA
CATGGGTGGCTGGACATTAGATAAACATCACGTGCTGGATGTACAGAACGGTATACTGTACAAGGGAA
ACGGGGAAAACCAGTTCATCTCCCAGCAGCCTCCAGTCGTGAGTAGCATCATGGGCAATGGGCGAAGG
CGCAGCATTTCCTGCCCCAGTTGCAATGGTCAAGCTGATGGTAACAAGTTACTGGCCCCAGTGGCGCT
AGCTTGTGGGATCGATGGCAGTCTGTACGTAGGCGATTTCAACTACGTGCGGCGGATATTCCCTTCTG
GAAATGTAACAAGTGTCTTAGAACTAAGAAATAAAGATTTTAGACATAGCAGCAACCCAGCTCATAGA
TACTACCTTGCAACGGATCCAGTCACGGGAGATCTGTACGTTTCTGACACAAACACCCGCAGAATTTA
TCGCCCAAAGTCACTTACGGGGGCAAAAGACTTGACTAAAAATGCAGAAGTCGTCGCAGGGACAGGGG
AGCAATGCCTTCCGTTTGACGAGGCGAGATGTGGGGATGGAGGGAAGGCCGTGGAAGCCACACTCATG
AGTCCCAAAGGAATGGCAGTTGATAAGAATGGATTAATCTACTTTGTTGATGGAACCATGATTAGGAA
AGTTGACCAAAATGGAATCATATCAACTCTTCTGGGCTCTAACGATTTGACTTCAGCCAGACCTTTAA
CTTGTGACACCAGCATGCACATCAGCCAGGTACGTCTGGAATGGCCCACTGACCTAGCCATTAACCCT
ATGGATAACTCCATTTATGTCCTGGATAATAATGTAGTTTTACAGATCACTGAAAATCGTCAAGTTCG
CATTGCTGCTGGACGGCCCATGCACTGTCAGGTTCCCGGAGTGGAATATCCTGTGGGGAAGCACGCGG
TGCAGACAACACTGGAATCAGCCACTGCCATTGCTGTGTCCTACAGTGGGGTCCTGTACATTACTGAA
ACTGATGAGAAGAAAATTAACCGGATAAGGCAGGTCACAACAGATGGAGAAATCTCCTTAGTGGCCGG
AATACCTTCAGAGTGTGACTGCAAAAATGATGCCAACTGTGACTGTTACCAGAGTGGAGATGGCTACG
CCAAGGATGCCAAACTCAGTGCCCCATCCTCCCTGGCTGCTTCTCCAGATGGTACACTGTATATTGCA
GATCTAGGGAATATCCGGATCCGGGCTGTGTCAAAGAATAAGCCTTTACTTAACTCTATGAACTTCTA
TGAAGTTGCGTCTCCAACTGATCAAGAACTCTACATCTTTGACATCAATGGTACTCACCAATATACTG
TAAGTTTAGTCACTGGTGATTACCTTTACAATTTTAGCTACAGCAATGACAATGATATTACTGCTGTG
ACAGACAGCAATGGCAACACCCTTAGAATTAGACGGGACCCAAATCGCATGCCAGTTCGAGTGGTGTC
TCCTGATAACCAAGTGATATGGTTGACAATAGGAACAAATGGATGTTTGAAAGGCATGACTGCTCAAG
GACTGGAATTAGTTTTGTTTACTTACCATGGCAATAGTGGCCTTTTAGCCACTAAAAGTGATGAAACT
GGATGGACAACGTTTTTTGACTATGACAGTGAAGGTCGTCTGACAAATGTTACGTTTCCAACTGGAGT
GGTCACAAACCTGCATGGGGACATGGACAAGGCTATCACAGTGGACATTGAGTCATCTAGCCGAGAAG
AAGATGTCAGCATCACTTCAAATCTGTCCTCGATCGATTCTTTCTACACCATGGTTCAAGATCAGTTA
AGAAACAGCTACCAGATTGGTTATGACGGCTCCCTCAGAATTATCTACGCCAGTGGCCTGGACTCACA
CTACCAAACAGAGCCGCACGTTCTGGCTGGCACCGCTAATCCGACGGTTGCCAAAAGAAACATGACTT
TGCCTGGCGAGAACGGTCAAAACTTGGTGGAATGGAGATTCCGAAAAGAGCAAGCCCAAGGGAAAGTC
AATGTCTTTGGCCGCAAGCTCAGGGTTAATGGCAGAAACCTCCTTTCAGTTGACTTTGATCGAACAAC
AAAGACAGAAAAGATCTATGACGACCACCGTAAATTTCTACTGAGGATCGCCTACGACACGTCTGGGC
ACCCGACTCTCTGGCTGCCAAGCAGCAAGCTGATGGCCGTCAATGTCACCTATTCATCCACAGGTCAA
ATTGCCAGCATCCAGCGAGGCACCACTAGCGAGAAAGTAGATTATGACGGACAGGGGAGGATCGTGTC
TCGGGTCTTTGCTGATGGTAAAACATGGAGTTACACATATTTAGAAAAGTCCATGGTTCTTCTGCTTC
ATAGCCAGCGGCAGTACATCTTCGAATACGATATGTGGGACCGCCTGTCTGCCATCACCATGCCCAGT
GTGGCTCGCCACACCATGCAGACCATCCGATCCATTGGCTACTACCGCAACATATACAACCCCCCGGA
AAGCAACGCCTCCATCATCACGGACTACAACGAGGAAGGGCTGCTTCTACAAACAGCTTTCTTGGGTA
CAAGTCGGAGGGTCTTATTCAAATACAGAAGGCAGACTAGGCTCTCAGAAATTTTATATGATAGCACA
AGAGTCAGTTTTACCTATGATGAAACAGCAGGAGTCCTAAAGACAGTAAACCTCCAGAGTGATGGTTT
TATTTGCACCATTAGATACAGGCAAATTGGTCCCCTGATTGACAGGCAGATTTTCCGCTTTAGTGAAG
ATGGGATGGTAAATGCAAGATTTGACTATAGCTATGACAACAGCTTTCGAGTGACCAGCATGCAGGGT
GTGATCAATGAAACGCCACTGCCTATTGATCTGTATCAGTTTGATGACATTTCTGGCAAAGTTGAGCA
GTTTGGAAAGTTTGGAGTTATATATTATGATATTAACCAGATCATTTCTACAGCTGTAATGACCTATA
CGAAGCACTTTGATGCTCATGGCCGTATCAAGGAGATTCAATATGAGATATTCAGGTCGCTCATGTAC
TGGATTACAATTCAGTATGATAACATGGGTCGGGTAACCAAGAGAGAGATTAAAATAGGGCCCTTTGC
CAACACCACCAAATATGCTTATGAATATGATGTTGATGGACAGCTCCAAACAGTTTACCTCAATGAAA
AGATAATGTGGCGGTACAACTACGATCTGAATGGAAACCTCCATTTACTGAACCCAAGTAACAGTGCG
CGTCTGACACCCCTTCGCTATGACCTGCGAGACAGAATCACTCGACTGGGTGATGTTCAATATCGGTT
GGATGAAGATGGTTTCCTACGTCAAAGGGGCACGGAAATCTTTGAATATAGCTCCAAGGGGCTTCTAA
CTCGAGTTTACAGTAAAGGCAGTGGCTGGACAGTGATCTACCGTTATGACGGCCTGGGAAGGCGTGTT
TCTAGCAAAACCAGTCTAGGACAGCACCTGCAGTTTTTTTATGCTGACTTAACTTATCCCACTAGGAT
TACTCATGTCTACAACCATTCGAGTTCAGAAATTACCTCCCTGTATTATGATCTCCAAGGACATCTTT
TTGCCATGGAAATCAGCAGTGGGGATGAATTCTATATTGCATCGGATAACACAGGGACACCACTGGCT
GTGTTCAGTAGCAATGGGCTTATGCTGAAACAGATTCAGTACACTGCATATGGGGAAATCTATTTTGA
CTCTAATATTGACTTTCAACTGGTAATTGGATTTCATGGTGGCCTGTATGACCCACTCACCAAATTAA
TCCACTTTGGAGAAAGAGATTATGACATTTTGGCAGGACGGTGGACAACACCTGACATAGAAATCTGG
AAAAGAATTGGGAAGGACCCAGCTCCTTTTAACTTGTACATGTTTAGGAATAACAACCCTGCAAGCAA
AATCCATGACGTGAAAGATTACATCACAGATGTTAACAGCTGGCTGGTGACATTTGGTTTCCATCTGC
ACAATGCTATTCCTGGATTCCCTGTTCCCAAATTTGATTTAACAGAACCTTCTTACGAACTTGTGAAG
AGTCAGCAGTGGGATGATATACCGCCCATCTTCGGAGTCCAGCAGCAAGTGGCGCGGCAGGCCAAGGC
CTTCCTGTCGCTGGGGAAGATGGCCGAGGTGCAGGTGAGCCGGCGCCGGGCCGGCGGCGCGCAGTCCT
GGCTGTGGTTCGCCACGGTCAAGTCGCTGATCGGCAAGGGCGTCATGCTGGCCGTCAGCCAGGGCCGC
GTGCAGACCAACGTGCTCAACATCGCCAACGAGGACTGCATCAAGGTGGCGGCCGTGCTCAACAACGC
CTTCTACCTGGAGAACCTGCACTTCACCATCGAGGGCAAGGACACGCACTACTTCATCAAGACCACCA
CGCCCGAGAGCGACCTGGGCACGCTGCGGTTGACCAGCGGCCGCAAGGCGCTGGAGAACGGCATCAAC
GTGACGGTGTCGCAGTCCACCACGGTGGTGAACGGCAGGACGCGCAGGTTCGCGGACGTGGAGATGCA
GTTCGGCGCGCTGGCGCTGCACGTGCGCTACGGCATGACCCTGGACGAGGAGAAGGCGCGCATCCTGG
AGCAGGCGCGGCAGCGCGCGCTCGCCCGGGCCTGGGCGCGCGAGCAGCAGCGCGTGCGCGACGGCGAG
GAGGGCGCGCGCCTCTGGACGGAGGGCGAGAAGCGGCAGCTGCTGAGCGCCGGCAAGGTGCAGGGCTA
CGACGGGTACTACGTACTCTCGGTGGAGCAGTACCCCGAGCTGGCCGACAGCGCCAACAACATCCAGT
TCCTGCGGCAGAGCGAGATCGGCAGGAGGTAACGCCCGGGCCGCGCCCGCCGAGCCGCTCACGCCCTG
CCCACATTGTCCTGTGGCACAACCCGAGTGGGACTCTCCAACGCCCAAGAGCCTTCCTCCCGGGGGAA
TGAGACTGCTGTTACGACCCACACCCACACCGCGAAAACAAGGACCGCTTTTTTCCGAATGACCTTAA
AGGTGATCGGCTTTAACGAATATGTTTACATATGCATAGCGCTGCACTCAGTCGGACTGAACGTAGCC
AGAGGAAAAAAAAATCATCAAGGACAAAGGCCTCGACCTGTTGCGCTGGGCCGTCTGTTCCTTCTAGG
CACTGTATTTAACTAACTTTA

| | | | |
|---|---|---|---|
| NOV40ad, SNP13374479 of | SEQ ID NO: 544 | 2725 aa | MW at 303959.6kD |
| CG55069-01, Protein | SNP Pos: 105 | | SNP Change: Leu to Leu |
| Sequence | | | |

MDVKERRPYCSLTKSRREKERRYTNSSADNEECRVPTQKSYSSSETLKAFDHDSSRLLYGNRVKDLVH
READEFTRQGQNFTLRQLGVCEPATRRGLAFCAEMGLPHRGYSISAGSDADTENEAVMSPEHAMRLWG
RGVKSGRSSCLSSRSNSALTLTDTEHENKSDSENEQPASNQGQSTLQPLPPSHKQHSAQHHPSITSLN
RNSLTNRRNQSPAPPAALPAELQTTPESVQLQDSWVLGSNVPLESRHFLFKTGTGTTPLFSTATPGYT
MASGSVYSPPTRPLPRNTLSRSAFKFKKSSKYCSWKCTALCAVGVSVLLAILLSYFIAMHLFGLMWQL
QQTENDTFENGKVNSDTMPTNTVSLPSGDNGKLGGFTQENNTIDSGELDIGRRAIQEIPPGIFWRSQL
FIDQPQFLKFNISLQKDALIGVYGRKKLPPSHTQSSPQYDFVELLDGSRLIAREQRSLLETERAGRQA
RSVSLHEAGFIQYLDSGIWHLAFYNDGKNAEQVSFNTIVIESVVECPRNCHGNGECVSGTCHCFPGFL
GPDCSRAACPVLCSGNGQYSKGRCLCFSGWKGTECDVPTTQCIDPQCGGRGICIMGSCACSSGYKGES
CEEADCIDPGCSNHGVCIHGECHCSPGWGGSNCEILKTMCPDQCSGHGTYLQESGSCTCDPNWTGPDC
SNEICSVDCGSHGVCMGGTCRCEEGWTGPACNQRACHPRCAEHGTCKDGKCECSQGWNGEHCTIAHYL
DKIVKDKIGYKEGCPGLCNSNGRCTLDQNGGHCVCQPGWRGAGCDVAMETLCTDSKDNEGDGLIDCMD
PDCCLQSSCQNOPYCRGLPDPQDIISQSLQSPSQQAAKSFYDRISFLIGSDSTHVIPGESPFNKSLAS
VIRGQVLTADGTPLIGVNVSFFHYPEYGYTITRQDGMFDLVANGGASLTLVFERSPFLTQYHTVWIPW
NVFYVMDTLVMEKEENDIPSCDLSGFVRPNPIIVSSPLSTFFRSSPEDSPIIPETQVLHEETTIPGTD
LKLSYLSSRAAGYKSVLKITMTQSIIPFNLMKVHLMVAVVGRLFQKWFPASPNLAYTFIWDKTDAYNQ
KVYGLSEAVVSVGYEYESCLDLTLWEKRTAILQGYELDASNMGGWTLDKHHVLDVQNGILYKGNGENQ
FISQQPPVVSSIMGNGRRRSISCPSCNGQADGNKLLAPVALACGIDGSLYVGDFNYVRRIFPSGNVTS
VLELRNKDFRHSSNPAHRYYLATDPVTGDLYVSDTNTRRIYRPKSLTGAKDLTKNAEVVAGTGEQCLP
FDEARCGDGGKAVEATLMSPKGMAVDKNGLIYFVDGTMIRKVDQNGIISTLLGSNDLTSARPLTCDTS
MHISQVRLEWPTDLAINPMDNSIYVLDNNVVLQITENRQVRIAAGRPMHCQVPGVEYPVGKHAVQTTL
ESATAIAVSYSGVLYITETDEKKINRIRQVTTDGEISLVAGIPSECDCKNDANCDCYQSGDGYAKDAK
LSAPSSLAASPDGTLYIADLGNIRIRAVSKNKPLLNSMNFYEVASPTDQELYIFDINGTHQYTVSLVT
GDYLYNFSYSNDNDITAVTDSNGNTLRIRRDPNRMPVRVVSPDNQVIWLTIGTNGCLKGMTAQGLELV
LFTYHGNSGLLATKSDETGWTTFFDYDSEGRLTNVTFPTGVVTNLHGDMDKAITVDIESSSREEDVSI
TSNLSSIDSFYTMVQDQLRNSYQIGYDGSLRIIYASGLDSHYQTEPHVLAGTANPTVAKRNMTLPGEN
GQNLVEWRFRKEQAQGKVNVFGRKLRVNGRNLLSVDFDRTTKTEKIYDDHRKFLLRIAYDTSGHPTLW
LPSSKLMAVNVTYSSTGQIASIQRGTTSEKVDYDGQGRIVSRVFADGKTWSYTYLEKSMVLLLHSQRQ
YIFEYDMWDRLSAITMPSVARHTMQTIRSIGYYRNIYNPPESNASIITDYNEEGLLLQTAFLGTSRRV
LFKYRRQTRLSEILYDSTRVSFTYDETAGVLKTVNLQSDGFICTIRYRQIGPLIDRQIFRFSEDGMVN
ARFDYSYDNSFRVTSMQGVINETPLPIDLYQFDDISGKVEQFGKFGVIYYDINQIISTAVMTYTKHFD
AHGRIKEIQYEIFRSLMYWITIQYDNMGRVTKREIKIGPFANTTKYAYEYDVDGQLQTVYLNEKIMWR
YNYDLNGNLHLLNPSNSARLTPLRYDLRDRITRLGDVQYRLDEDGFLRQRGTEIFEYSSKGLLTRVYS
KGSGWTVIYRYDGLGRRVSSKTSLGQHLQFFYADLTYPTRITHVYNHSSSEITSLYYDLQGHLFAMEI
SSGDEFYIASDNTGTPLAVFSSNGLMLKQIQYTAYGEIYFDSNIDFQLVIGFHGGLYDPLTKLIHFGE
RDYDILAGRWTTPDIEIWKRIGKDPAPFNLYMFRNNNPASKIHDVKDYITDVNSWLVTFGFHLHNAIP
GFPVPKFDLTEPSYELVKSQQWDDIPPIFGVQQQVARQAKAFLSLGKMAEVQVSRRRAGGAQSWLWFA
TVKSLIGKGVMLAVSQGRVQTNVLNIANEDCIKVAAVLNNAFYLENLHFTIEGKDTHYFIKTTTPESD
LGTLRLTSGRKALENGINVTVSQSTTVVNGRTRRFADVEMQFGAIALHVRYGMTLDEEKARILEQARQ
RALARAWAREQQRVRDGEEGARLWTEGEKRQLLSAGKVQGYDGYYVLSVEQYPELADSANNIQFLRQS
EIGRR

| | | |
|---|---|---|
| NOV40ae, SNP13382453 of | SEQ ID NO: 545 | 8657 bp |
| CG55069-01, DNA Sequence | ORF Start: ATG at 151 | ORF Stop: TAA at 8326 |
| | SNP Pos: 973 | SNP Change: T to C |

TTTGGCCTCGGGCCAGAATTCGGCACGAGGGGTCTGGAGCTTGGAGGAGAAGTCTGAACTAAGGATAA
ACTAAAGAGAGGCCAATGAGACTTGAACCCTGAGCCTAAGTTGTCACCAGCAGGACTGATGTGCACAC
AGAAGGAATGAAGTATGGATGTGAAAGAACGCAGGCCTTACTGCTCCCTGACCAAGAGCAGACGAGAG
AAGGAACGGCGCTACACAAATTCCTCCGCAGACAATGAGGAGTGCCGGGTACCCACACAGAAGTCCTA
CAGTTCCAGCGAGACATTGAAAGCTTTTGATCATGATTCCTCGCGGCTGCTTTACGGCAACAGAGTGA
AGGATTTGGTTCACAGAGAAGCAGACGAGTTCACTAGACAAGGACAGAATTTTACCCTAAGGCAGTTA
GGAGTTTGTGAACCAGCAACTCGAAGAGGACTGGCATTTTGTGCGGAAATGGGGCTCCCTCACAGAGG
TTACTCTATCAGTGCAGGGTCAGATGCTGATACTGAAAATGAAGCAGTGATGTCCCCAGAGCATGCCA
TGAGACTTTGGGGCAGGGGGGTCAAATCAGGCCGCAGCTCCTGCCTGTCAAGTCGGTCCAACTCAGCC
CTCACCCTGACAGATACGGAGCACGAAAACAAGTCCGACAGTGAGAATGAGCAACCTGCAAGCAATCA
AGGCCAGTCTACCCTGCAGCCCTTGCCGCCTTCCCATAAGCAGCACTCTGCACAGCATCATCCATCCA
TCACTTCTCTCAACAGAAACTCCCTGACCAATAGAAGGAACCAGAGTCCGGCCCCGCCGGCTGCTTTG
CCCGCCGAGCTGCAAACCACACCCGAGTCCGTCCAGCTGCAGGACAGCTGGGTCCTTGGCAGTAATGT
ACCACTGGAAAGCAGGCATTTCCTATTCAAAACAGGAACAGGTACAACGCCACTGTTCAGTACTGCAA
CCCCAGGATACACAATGGCACCTGGCTCTGTTTATTCACCACCTACTCGGCCACTACCTAGAAACACC
CTATCAAGAAGTGCTTTTAAATTCAAGAAGTCTTCAAAGTACTGTAGCTGGAAATGCACTGCACTGTG
TGCCGTAGGGGTCTCGGTGCTCCTGGCAATACTCCTGTCTTATTTTATAGCAATGCATCTCTTTGGCC
TCAACTGGCAGCTACAGCAGACTGAAAATGACACATTTGAGAATGGAAAAGTGAATTCTGATACCATG
CCAACAAACACTGTGTCATTACCTTCTGGAGACAATGGAAAATTAGGTGGATTTACGCAAGAAAATAA
CACCATAGATTCCGGAGAACTTGATATTGGCCGAAGAGCAATTCAAGAGATTCCTCCCGGGATCTTCT
GGAGATCACAGCTCTTCATTGATCAGCCACAGTTTCTTAAATTCAATATCTCTCTTCAGAAGGATGCA
TTGATTGGAGTATATGGCCGGAAGAAGTTACCGCCTTCCCATACTCAGTCCTCCCCCCAGTATGACTT
CGTGGAGCTCCTGGATGGCAGCAGGCTGATTGCCAGAGAGCAGCGGAGCCTGCTTGAGACGGAGAGAG
CCGGGCGGCAGGCGAGATCCGTCAGCCTTCATGAGGCCGGCTTTATCCAGTACTTGGATTCTGGAATC
TGGCATCTGGCTTTTTATAATGATGGGAAAAATGCAGAGCAGGTGTCTTTTAATACCATTGTTATAGA
GTCTGTGGTGGAATGTCCCCGAAATTGCCATGGAAATGGAGAATGCGTTTCTGGAACTTGCCATTGTT
TTCCAGGATTTCTGGGTCCGGATTGTTCAAGAGCCGCCTGTCCAGTGTTATGTAGTGGCAACGGGCAG
TACTCCAAGGGCCGCTGCCTGTGTTTCAGCGGCTGGAAGGGCACCGAGTGTGATGTGCCGACTACCCA
GTGTATTGACCCACAGTGTGGGGGTCGTGGGATTTGTATCATGGGCTCCTGTGCTTGCAGCTCAGGAT
ACAAAGGAGAAAGTTGTGAAGAAGCTGACTGTATAGACCCTGGGTGTTCTAATCATGGTGTGTGTATC
CACGGGGAATGTCACTGCAGTCCAGGATGGGGAGGTAGCAATTGTGAAATACTGAAGACCATGTGTCC
AGACCAGTGCTCCGGCCACGGAACGThTCTTCAAGAAAGTGGCTCCTGCACGTGTGACCCTAACTGGA
CTGGCCCAGACTGCTCAAACGAAATATGTTCTGTGGACTGTGGCTCACACGGCGTTTGCATGGGGGGG
ACGTGTCGCTGTGAAGAAGGCTGGACGGGCCCAGCCTGTAATCAGAGAGCCTGCCACCCCCGCTGTGC
CGAGCACGGGACCTGCAAGGATGGCAAGTGTGAATGCAGCCAGGGCTGGAATGGAGAGCACTGCACTA
TCGCTCACTATTTGGATAAGATAGTTAAAGACAAGATAGGATATAAAGAGGGTTGTCCTGGTCTGTGC
AACAGCAATGGAAGATGTACCCTGGACCAAAATGGCGGACATTGTGTGTGCCAGCCTGGATGGAGAGG
AGCAGGCTGTGACGTAGCCATGGAGACTCTTTGCACAGATAGCAAGGACAATGAAGGGGATGGACTCA
TTGACTGCATGGATCCCGATTGCTGCCTACAGAGTTCCTGCCAGAATCAGCCCTATTGTCGGGGACTG
CCGGATCCTCAGGACATCATTAGCCAAAGCCTTCAATCGCCTTCTCAGCAAGCTGCCAAATCCTTTTA
TGATCGAATCAGTTTCCTTATAGGATCTGATAGCACCCATGTTATACCTGGAGAAAGTCCTTTCAATA
AGAGCCTTGCATCTGTCATCAGAGGCCAAGTACTGACTGCTGATGGAACTCCACTTATTGGAGTAAAT
GTCTCGTTTTTCCATTACCCAGAATATGGATATACTATTACCCGCCAGGACGGAATGTTTGACTTGGT
GGCAAATGGTGGGGCCTCTCTAACTTTGGTATTTGAACGATCCCCATTCCTCACTCAGTATCATACTG
TGTGGATTCCATGGAATGTCTTTTATGTGATGGATACCCTAGTCATGGAGAAAGAAGAGAATGACATT
CCCAGCTGTGATCTGAGTGGATTCGTGAGGCCAAATCCCATCATTGTGTCATCACCTTTATCCACCTT
TTTCAGATCTTCTCCTGAAGACAGTCCCATCATTCCCGAAACACAGGTACTCCACGAGGAAACTACAA
TTCCAGGAACAGATTTGAAACTCTCCTACTTGAGTTCCAGAGCTGCAGGGTATAAGTCAGTTCTCAAG
ATCACCATGACCCAGTCTATTATTCCATTTAATTTAATGAAGGTTCATCTTATGGTAGCTGTAGTAGG
AAGACTCTTCCAAAAGTGGTTTCCTGCCTCACCAAACTTGGCCTATACTTTCATATGGGATAAAACAG
ATGCATATAATCAGAAAGTCTATGGTCTATCTGAAGCTGTTGTGTCAGTTGGATATGAGTATGAGTCG
TGTTTGGACCTGACTCTGTGGGAAAAGAGGACTGCCATTCTGCAGGGCTATGAATTGGATGCGTCCAA
CATGGGTGGCTGGACATTAGATAAACATCACGTGCTGGATGTACAGAACGGTATACTGTACAAGGGAA
ACGGGGAAAACCAGTTCATCTCCCAGCAGCCTCCAGTCGTGAGTAGCATCATGGGCAATGGGCGAAGG
CGCAGCATTTCCTGCCCCAGTTGCAATGGTCAAGCTGATGGTAACAAGTTACTGGCCCCAGTGGCGCT
AGCTTGTGGGATCGATGGCAGTCTGTACGTAGGCGATTTCAACTACGTGCGGCGGATATTCCCTTCTG
GAAATGTAACAAGTGTCTTAGAACTAAGAAATAAAGATTTTAGACATAGCAGCAACCCAGCTCATAGA
TACTACCTTGCAACGGATCCAGTCACGGGAGATCTGTACGTTTCTGACACAAACACCCGCAGAATTTA
TCGCCCAAAGTCACTTACGGGGGCAAAAGACTTGACTAAAAATGCAGAAGTCGTCGCAGGGACAGGGG
AGCAATGCCTTCCGTTTGACGAGGCGAGATGTGGGGATGGAGGGAAGGCCGTGGAAGCCACACTCATG
AGTCCCAAAGGAATGGCAGTTGATAAGAATGGATTAATCTACTTTGTTGATGGAACCATGATTAGGAA
AGTTGACCAAAATGGAATCATATCAACTCTTCTGGGCTCTAACGATTTGACTTCAGCCAGACCTTTAA
CTTGTGACACCAGCATGCACATCAGCCAGGTACGTCTGGAATGGCCCACTGACCTAGCCATTAACCCT
ATGGATAACTCCATTTATGTCCTGGATAATAATGTAGTTTTACAGATCACTGAAAATCGTCAAGTTCG
CATTGCTGCTGGACGGCCCATGCACTGTCAGGTTCCCGGAGTGGAATATCCTGTGGGGAAGCACGCGG
TGCAGACAACACTGGAATCAGCCACTGCCATTGCTGTGTCCTACAGTGGGGTCCTGTACATTACTGAA
ACTGATGAGAAGAAAATTAACCGGATAAGGCAGGTCACAACAGATGGAGAAATCTCCTTAGTGGCCGG
AATACCTTCAGAGTGTGACTGCAAAAATGATGCCAACTGTGACTGTTACCAGAGTGGAGATGGCTACG
CCAAGGATGCCAAACTCAGTGCCCCATCCTCCCTGGCTGCTTCTCCAGATGGTACACTGTATATTGCA
GATCTAGGGAATATCCGGATCCGGGCTGTGTCAAAGAATAAGCCTTTACTTAACTCTATGAACTTCTA
TGAAGTTGCGTCTCCAACTGATCAAGAACTCTACATCTTTGACATCAATGGTACTCACCAATATACTG
TAAGTTTAGTCACTGGTGATTACCTTTACAATTTTAGCTACAGCAATGACAATGATATTACTGCTGTG
ACAGACAGCAATGGCAACACCCTTAGAATTAGACGGGACCCAAATCGCATGCCAGTTCGAGTGGTGTC
TCCTGATAACCAAGTGATATGGTTGACAATAGGAACAAATGGATGTTTGAAAGGCATGACTGCTCAAG
GACTGGAATTAGTTTTGTTTACTTACCATGGCAATAGTGGCCTTTTAGCCACTAAAAGTGATGAAACT
GGATGGACAACGTTTTTTGACTATGACAGTGAAGGTCGTCTGACAAATGTTACGTTTCCAACTGGAGT
GGTCACAAACCTGCATGGGGACATGGACAAGGCTATCACAGTGGACATTGAGTCATCTAGCCGAGAAG
AAGATGTCAGCATCACTTCAAATCTGTCCTCGATCGATTCTTTCTACACCATGGTTCAAGATCAGTTA
AGAAACAGCTACCAGATTGGTTATGACGGCTCCCTCAGAATTATCTACGCCAGTGGCCTGGACTCACA
CTACCAAACAGAGCCGCACGTTCTGGCTGGCACCGCTAATCCGACGGTTGCCAAAAGAAACATGACTT
TGCCTGGCGAGAACGGTCAAAACTTGGTGGAATGGAGATTCCGAAAAGAGCAAGCCCAAGGGAAAGTC
AATGTCTTTGGCCGCAAGCTCAGGGTTAATGGCAGAAACCTCCTTTCAGTTGACTTTGATCGAACAAC
AAAGACAGAAAAGATCTATGACGACCACCGTAAATTTCTACTGAGGATCGCCTACGACACGTCTGGGC
ACCCGACTCTCTGGCTGCCAAGCAGCAAGCTGATGGCCGTCAATGTCACCTATTCATCCACAGGTCAA
ATTGCCAGCATCCAGCGAGGCACCACTAGCGAGAAAGTAGATTATGACGGACAGGGGAGGATCGTGTC
TCGGGTCTTTGCTGATGGTAAAACATGGAGTTACACATATTTAGAAAAGTCCATGGTTCTTCTGCTTC
ATAGCCAGCGGCAGTACATCTTCGAATACGATATGTGGGACCGCCTGTCTGCCATCACCATGCCCAGT
GTGGCTCGCCACACCATGCAGACCATCCGATCCATTGGCTACTACCGCAACATATACAACCCCCCGGA
AAGCAACGCCTCCATCATCACGGACTACAACGAGGAAGGGCTGCTTCTACAAACAGCTTTCTTGGGTA
CAAGTCGGAGGGTCTTATTCAAATACAGAAGGCAGACTAGGCTCTCAGAAATTTTATATGATAGCACA
AGAGTCAGTTTTACCTATGATGAAACAGCAGGAGTCCTAAAGACAGTAAACCTCCAGAGTGATGGTTT
TATTTGCACCATTAGATACAGGCAAATTGGTCCCCTGATTGACAGGCAGATTTTCCGCTTTAGTGAAG
ATGGGATGGTAAATGCAAGATTTGACTATAGCTATGACAACAGCTTTCGAGTGACCAGCATGCAGGGT
GTGATCAATGAAACGCCACTGCCTATTGATCTGTATCAGTTTGATGACATTTCTGGCAAAGTTGAGCA
GTTTGGAAAGTTTGGAGTTATATATTATGATATTAACCAGATCATTTCTACAGCTGTAATGACCTATA
CGAAGCACTTTGATGCTCATGGCCGTATCAAGGAGATTCAATATGAGATATTCAGGTCGCTCATGTAC
TGGATTACAATTCAGTATGATAACATGGGTCGGGTAACCAAGAGAGAGATTAAAATAGGGCCCTTTGC
CAACACCACCAAATATGCTTATGAATATGATGTTGATGGACAGCTCCAAACAGTTTACCTCAATGAAA
AGATAATGTGGCGGTACAACTACGATCTGAATGGAAACCTCCATTTACTGAACCCAAGTAACAGTGCG
CGTCTGACACCCCTTCGCTATGACCTGCGAGACAGAATCACTCGACTGGGTGATGTTCAATATCGGTT
GGATGAAGATGGTTTCCTACGTCAAAGGGGCACGGAAATCTTTGAATATAGCTCCAAGGGGCTTCTAA
CTCGAGTTTACAGTAAAGGCAGTGGCTGGACAGTGATCTACCGTTATGACGGCCTGGGAAGGCGTGTT
TCTAGCAAAACCAGTCTAGGACAGCACCTGCAGTTTTTTTATGCTGACTTAACTTATCCCACTAGGAT
TACTCATGTCTACAACCATTCGAGTTCAGAAATTACCTCCCTGTATTATGATCTCCAAGGACATCTTT
TTGCCATGGAAATCAGCAGTGGGGATGAATTCTATATTGCATCGGATAACACAGGGACACCACTGGCT
GTGTTCAGTAGCAATGGGCTTATGCTGAAACAGATTCAGTACACTGCATATGGGGAAATCTATTTTGA
CTCTAATATTGACTTTCAACTGGTAATTGGATTTCATGGTGGCCTGTATGACCCACTCACCAAATTAA
TCCACTTTGGAGAAAGAGATTATGACATTTTGGCAGGACGGTGGACAACACCTGACATAGAAATCTGG
AAAAGAATTGGGAAGGACCCAGCTCCTTTTAACTTGTACATGTTTAGGAATAACAACCCTGCAAGCAA
AATCCATGACGTGAAAGATTACATCACAGATGTTAACAGCTGGCTGGTGACATTTGGTTTCCATCTGC
ACAATGCTATTCCTGGATTCCCTGTTCCCAAATTTGATTTAACAGAACCTTCTTACGAACTTGTGAAG
AGTCAGCAGTGGGATGATATACCGCCCATCTTCGGAGTCCAGCAGCAAGTGGCGCGGCAGGCCAAGGC
CTTCCTGTCGCTGGGGAAGATGGCCGAGGTGCAGGTGAGCCGGCGCCGGGCCGGCGGCGCGCAGTCCT
GGCTGTGGTTCGCCACGGTCAAGTCGCTGATCGGCAAGGGCGTCATGCTGGCCGTCAGCCAGGGCCGC
GTGCAGACCAACGTGCTCAACATCGCCAACGAGGACTGCATCAAGGTGGCGGCCGTGCTCAACAACGC
CTTCTACCTGGAGAACCTGCACTTCACCATCGAGGGCAAGGACACGCACTACTTCATCAAGACCACCA
CGCCCGAGAGCGACCTGGGCACGCTGCGGTTGACCAGCGGCCGCAAGGCGCTGGAGAACGGCATCAAC
GTGACGGTGTCGCAGTCCACCACGGTGGTGAACGGCAGGACGCGCAGGTTCGCGGACGTGGAGATGCA
GTTCGGCGCGCTGGCGCTGCACGTGCGCTACGGCATGACCCTGGACGAGGAGAAGGCGCGCATCCTGG
AGCAGGCGCGGCAGCGCGCGCTCGCCCGGGCCTGGGCGCGCGAGCAGCAGCGCGTGCGCGACGGCGAG
GAGGGCGCGCGCCTCTGGACGGAGGGCGAGAAGCGGCAGCTGCTGAGCGCCGGCAAGGTGCAGGGCTA
CGACGGGTACTACGTACTCTCGGTGGAGCAGTACCCCGAGCTGGCCGACAGCGCCAACAACATCCAGT
TCCTGCGGCAGAGCGAGATCGGCAGGAGGTAACGCCCGGGCCGCGCCCGCCGAGCCGCTCACGCCCTG
CCCACATTGTCCTGTGGCACAACCCGAGTGGGACTCTCCAACGCCCAAGAGCCTTCCTCCCGGGGGAA
TGAGACTGCTGTTACGACCCACACCCACACCGCGAAAACAAGGACCGCTTTTTTCCGAATGACCTTAA
AGGTGATCGGCTTTAACGAATATGTTTACATATGCATAGCGCTGCACTCAGTCGGACTGAACGTAGCC
AGAGGAAAAAAAAATCATCAAGGACAAAGGCCTCGACCTGTTGCGCTGGGCCGTCTGTTCCTTCTAGG
CACTGTATTTAACTAACTTTA

| | | | |
|---|---|---|---|
| NOV40ae, SNP13382453 of | SEQ ID NO: 546 | 2725 aa | MW at 303969.7kD |
| CG55069-01, Protein | SNP Pos: 275 | | SNP Change: Ser to Pro |
| Sequence | | | |

MDVKERRPYCSLTKSRREKERRYTNSSADNEECRVPTQKSYSSSETLKAFDHDSSRLLYGNRVKDLVH
READEFTRQGQNFTLRQLGVCEPATRRGLAFCAEMGLPHRGYSISAGSDADTENEAVMSPEHAMRLWG
RGVKSGRSSCLSSRSNSALTLTDTEHENKSDSENEQPASNQGQSTLQPLPPSHKQHSAQHHPSITSLN
RNSLTNRRNQSPAPPAALPAELQTTPESVQLQDSWVLGSNVPLESRHFLFKTGTGTTPLFSTATPGYT
MAPGSVYSPPTRPLPRNTLSRSAFKFKKSSKYCSWKCTALCAVGVSVLLAILLSYFIAMHLFGLMWQL
QQTENDTFENGKVNSDTMPTNTVSLPSGDNGKLGGFTQENNTIDSGELDIGRRAIQEIPPGIFWRSQL
FIDQPQFLKFNISLQKDALIGVYGRKKLPPSHTQSSPQYDFVELLDGSRLIAREQRSLLETERAGRQA
RSVSLHEAGFIQYLDSGIWHLAFYNDGKNAEQVSFNTIVIESVVECPRNCHGNGECVSGTCHCFPGFL
GPDCSRAACPVLCSGNGQYSKGRCLCFSGWKGTECDVPTTQCIDPQCGGRGICIMGSCACSSGYKGES
CEEADCIDPGCSNHGVCIHGECHCSPGWGGSNCEILKTMCPDQCSGHGTYLQESGSCTCDPNWTGPDC
SNEICSVDCGSHGVCMGGTCRCEEGWTGPACNQRACHPRCAEHGTCKDGKCECSQGWNGEHCTIAHYL
DKIVKDKIGYKEGCPGLCNSNGRCTLDQNGGHCVCQPGWRGAGCDVAMETLCTDSKDNEGDGLIDCMD
PDCCLQSSCQNOPYCRGLPDPQDIISQSLQSPSQQAAKSFYDRISFLIGSDSTHVIPGESPFNKSLAS
VIRGQVLTADGTPLIGVNVSFFHYPEYGYTITRQDGMFDLVANGGASLTLVFERSPFLTQYHTVWIPW
NVFYVMDTLVMEKEENDIPSCDLSGFVRPNPIIVSSPLSTFFRSSPEDSPIIPETQVLHEETTIPGTD
LKLSYLSSRAAGYKSVLKITMTQSIIPFNLMKVHLMVAVVGRLFQKWFPASPNLAYTFIWDKTDAYNQ
KVYGLSEAVVSVGYEYESCLDLTLWEKRTAILQGYELDASNMGGWTLDKHHVLDVQNGILYKGNGENQ
FISQQPPVVSSIMGNGRRRSISCPSCNGQADGNKLLAPVALACGIDGSLYVGDFNYVRRIFPSGNVTS
VLELRNKDFRHSSNPAHRYYLATDPVTGDLYVSDTNTRRIYRPKSLTGAKDLTKNAEVVAGTGEQCLP
FDEARCGDGGKAVEATLMSPKGMAVDKNGLIYFVDGTMIRKVDQNGIISTLLGSNDLTSARPLTCDTS
MHISQVRLEWPTDLAINPMDNSIYVLDNNVVLQITENRQVRIAAGRPMHCQVPGVEYPVGKHAVQTTL
ESATAIAVSYSGVLYITETDEKKINRIRQVTTDGEISLVAGIPSECDCKNDANCDCYQSGDGYAKDAK
LSAPSSLAASPDGTLYIADLGNIRIRAVSKNKPLLNSMNFYEVASPTDQELYIFDINGTHQYTVSLVT
GDYLYNFSYSNDNDITAVTDSNGNTLRIRRDPNRMPVRVVSPDNQVIWLTIGTNGCLKGMTAQGLELV
LFTYHGNSGLLATKSDETGWTTFFDYDSEGRLTNVTFPTGVVTNLHGDMDKAITVDIESSSREEDVSI
TSNLSSIDSFYTMVQDQLRNSYQIGYDGSLRIIYASGLDSHYQTEPHVLAGTANPTVAKRNMTLPGEN
GQNLVEWRFRKEQAQGKVNVFGRKLRVNGRNLLSVDFDRTTKTEKIYDDHRKFLLRIAYDTSGHPTLW
LPSSKLMAVNVTYSSTGQIASIQRGTTSEKVDYDGQGRIVSRVFADGKTWSYTYLEKSMVLLLHSQRQ
YIFEYDMWDRLSAITMPSVARHTMQTIRSIGYYRNIYNPPESNASIITDYNEEGLLLQTAFLGTSRRV
LFKYRRQTRLSEILYDSTRVSFTYDETAGVLKTVNLQSDGFICTIRYRQIGPLIDRQIFRFSEDGMVN
ARFDYSYDNSFRVTSMQGVINETPLPIDLYQFDDISGKVEQFGKFGVIYYDINQIISTAVMTYTKHFD
AHGRIKEIQYEIFRSLMYWITIQYDNMGRVTKREIKIGPFANTTKYAYEYDVDGQLQTVYLNEKIMWR
YNYDLNGNLHLLNPSNSARLTPLRYDLRDRITRLGDVQYRLDEDGFLRQRGTEIFEYSSKGLLTRVYS
KGSGWTVIYRYDGLGRRVSSKTSLGQHLQFFYADLTYPTRITHVYNHSSSEITSLYYDLQGHLFAMEI
SSGDEFYIASDNTGTPLAVFSSNGLMLKQIQYTAYGEIYFDSNIDFQLVIGFHGGLYDPLTKLIHFGE
RDYDILAGRWTTPDIEIWKRIGKDPAPFNLYMFRNNNPASKIHDVKDYITDVNSWLVTFGFHLHNAIP
GFPVPKFDLTEPSYELVKSQQWDDIPPIFGVQQQVARQAKAFLSLGKMAEVQVSRRRAGGAQSWLWFA
TVKSLIGKGVMLAVSQGRVQTNVLNIANEDCIKVAAVLNNAFYLENLHFTIEGKDTHYFIKTTTPESD
LGTLRLTSGRKALENGINVTVSQSTTVVNGRTRRFADVEMQFGAIALHVRYGMTLDEEKARILEQARQ
RALARAWAREQQRVRDGEEGARLWTEGEKRQLLSAGKVQGYDGYYVLSVEQYPELADSANNIQFLRQS
EIGRR

| | | |
|---|---|---|
| NOV40af, SNP13382454 of | SEQ ID NO: 547 | 8657 bp |
| CG55069-01, DNA Sequence | ORF Start: ATG at 151 | ORF Stop: TAA at 8326 |
| | SNP Pos: 1953 | SNP Change: C to T |

TTTGGCCTCGGGCCAGAATTCGGCACGAGGGGTCTGGAGCTTGGAGGAGAAGTCTGAACTAAGGATAA
ACTAAAGAGAGGCCAATGAGACTTGAACCCTGAGCCTAAGTTGTCACCAGCAGGACTGATGTGCACAC
AGAAGGAATGAAGTATGGATGTGAAAGAACGCAGGCCTTACTGCTCCCTGACCAAGAGCAGACGAGAG
AAGGAACGGCGCTACACAAATTCCTCCGCAGACAATGAGGAGTGCCGGGTACCCACACAGAAGTCCTA
CAGTTCCAGCGAGACATTGAAAGCTTTTGATCATGATTCCTCGCGGCTGCTTTACGGCAACAGAGTGA
AGGATTTGGTTCACAGAGAAGCAGACGAGTTCACTAGACAAGGACAGAATTTTACCCTAAGGCAGTTA
GGAGTTTGTGAACCAGCAACTCGAAGAGGACTGGCATTTTGTGCGGAAATGGGGCTCCCTCACAGAGG
TTACTCTATCAGTGCAGGGTCAGATGCTGATACTGAAAATGAAGCAGTGATGTCCCCAGAGCATGCCA
TGAGACTTTGGGGCAGGGGGGTCAAATCAGGCCGCAGCTCCTGCCTGTCAAGTCGGTCCAACTCAGCC
CTCACCCTGACAGATACGGAGCACGAAAACAAGTCCGACAGTGAGAATGAGCAACCTGCAAGCAATCA
AGGCCAGTCTACCCTGCAGCCCTTGCCGCCTTCCCATAAGCAGCACTCTGCACAGCATCATCCATCCA
TCACTTCTCTCAACAGAAACTCCCTGACCAATAGAAGGAACCAGAGTCCGGCCCCGCCGGCTGCTTTG
CCCGCCGAGCTGCAAACCACACCCGAGTCCGTCCAGCTGCAGGACAGCTGGGTCCTTGGCAGTAATGT
ACCACTGGAAAGCAGGCATTTCCTATTCAAAACAGGAACAGGTACAACGCCACTGTTCAGTACTGCAA
CCCCAGGATACACAATGGCATCTGGCTCTGTTTATTCACCACCTACTCGGCCACTACCTAGAAACACC
CTATCAAGAAGTGCTTTTAAATTCAAGAAGTCTTCAAAGTACTGTAGCTGGAAATGCACTGCACTGTG
TGCCGTAGGGGTCTCGGTGCTCCTGGCAATACTCCTGTCTTATTTTATAGCAATGCATCTCTTTGGCC
TCAACTGGCAGCTACAGCAGACTGAAAATGACACATTTGAGAATGGAAAAGTGAATTCTGATACCATG
CCAACAAACACTGTGTCATTACCTTCTGGAGACAATGGAAAATTAGGTGGATTTACGCAAGAAAATAA
CACCATAGATTCCGGAGAACTTGATATTGGCCGAAGAGCAATTCAAGAGATTCCTCCCGGGATCTTCT
GGAGATCACAGCTCTTCATTGATCAGCCACAGTTTCTTAAATTCAATATCTCTCTTCAGAAGGATGCA
TTGATTGGAGTATATGGCCGGAAGAAGTTACCGCCTTCCCATACTCAGTCCTCCCCCCAGTATGACTT
CGTGGAGCTCCTGGATGGCAGCAGGCTGATTGCCAGAGAGCAGCGGAGCCTGCTTGAGACGGAGAGAG
CCGGGCGGCAGGCGAGATCCGTCAGCCTTCATGAGGCCGGCTTTATCCAGTACTTGGATTCTGGAATC
TGGCATCTGGCTTTTTATAATGATGGGAAAAATGCAGAGCAGGTGTCTTTTAATACCATTGTTATAGA
GTCTGTGGTGGAATGTCCCCGAAATTGCCATGGAAATGGAGAATGCGTTTCTGGAACTTGCCATTGTT
TTCCAGGATTTCTGGGTCCGGATTGTTCAAGAGCCGCCTGTCCAGTGTTATGTAGTGGCAACGGGCAG
TACTCCAAGGGCCGCTGCCTGTGTTTCAGCGGCTGGAAGGGCACCGAGTGTGATGTGCCGACTACCCA
GTGTATTGACCCACAGTGTGGGGGTCGTGGGATTTGTATCATGGGCTCTTGTGCTTGCAGCTCAGGAT
ACAAAGGAGAAAGTTGTGAAGAAGCTGACTGTATAGACCCTGGGTGTTCTAATCATGGTGTGTGTATC
CACGGGGAATGTCACTGCAGTCCAGGATGGGGAGGTAGCAATTGTGAAATACTGAAGACCATGTGTCC
AGACCAGTGCTCCGGCCACGGAACGThTCTTCAAGAAAGTGGCTCCTGCACGTGTGACCCTAACTGGA
CTGGCCCAGACTGCTCAAACGAAATATGTTCTGTGGACTGTGGCTCACACGGCGTTTGCATGGGGGGG
ACGTGTCGCTGTGAAGAAGGCTGGACGGGCCCAGCCTGTAATCAGAGAGCCTGCCACCCCCGCTGTGC
CGAGCACGGGACCTGCAAGGATGGCAAGTGTGAATGCAGCCAGGGCTGGAATGGAGAGCACTGCACTA
TCGCTCACTATTTGGATAAGATAGTTAAAGACAAGATAGGATATAAAGAGGGTTGTCCTGGTCTGTGC
AACAGCAATGGAAGATGTACCCTGGACCAAAATGGCGGACATTGTGTGTGCCAGCCTGGATGGAGAGG
AGCAGGCTGTGACGTAGCCATGGAGACTCTTTGCACAGATAGCAAGGACAATGAAGGGGATGGACTCA
TTGACTGCATGGATCCCGATTGCTGCCTACAGAGTTCCTGCCAGAATCAGCCCTATTGTCGGGGACTG
CCGGATCCTCAGGACATCATTAGCCAAAGCCTTCAATCGCCTTCTCAGCAAGCTGCCAAATCCTTTTA
TGATCGAATCAGTTTCCTTATAGGATCTGATAGCACCCATGTTATACCTGGAGAAAGTCCTTTCAATA
AGAGCCTTGCATCTGTCATCAGAGGCCAAGTACTGACTGCTGATGGAACTCCACTTATTGGAGTAAAT
GTCTCGTTTTTCCATTACCCAGAATATGGATATACTATTACCCGCCAGGACGGAATGTTTGACTTGGT
GGCAAATGGTGGGGCCTCTCTAACTTTGGTATTTGAACGATCCCCATTCCTCACTCAGTATCATACTG
TGTGGATTCCATGGAATGTCTTTTATGTGATGGATACCCTAGTCATGGAGAAAGAAGAGAATGACATT
CCCAGCTGTGATCTGAGTGGATTCGTGAGGCCAAATCCCATCATTGTGTCATCACCTTTATCCACCTT
TTTCAGATCTTCTCCTGAAGACAGTCCCATCATTCCCGAAACACAGGTACTCCACGAGGAAACTACAA
TTCCAGGAACAGATTTGAAACTCTCCTACTTGAGTTCCAGAGCTGCAGGGTATAAGTCAGTTCTCAAG
ATCACCATGACCCAGTCTATTATTCCATTTAATTTAATGAAGGTTCATCTTATGGTAGCTGTAGTAGG
AAGACTCTTCCAAAAGTGGTTTCCTGCCTCACCAAACTTGGCCTATACTTTCATATGGGATAAAACAG
ATGCATATAATCAGAAAGTCTATGGTCTATCTGAAGCTGTTGTGTCAGTTGGATATGAGTATGAGTCG
TGTTTGGACCTGACTCTGTGGGAAAAGAGGACTGCCATTCTGCAGGGCTATGAATTGGATGCGTCCAA
CATGGGTGGCTGGACATTAGATAAACATCACGTGCTGGATGTACAGAACGGTATACTGTACAAGGGAA
ACGGGGAAAACCAGTTCATCTCCCAGCAGCCTCCAGTCGTGAGTAGCATCATGGGCAATGGGCGAAGG
CGCAGCATTTCCTGCCCCAGTTGCAATGGTCAAGCTGATGGTAACAAGTTACTGGCCCCAGTGGCGCT
AGCTTGTGGGATCGATGGCAGTCTGTACGTAGGCGATTTCAACTACGTGCGGCGGATATTCCCTTCTG
GAAATGTAACAAGTGTCTTAGAACTAAGAAATAAAGATTTTAGACATAGCAGCAACCCAGCTCATAGA
TACTACCTTGCAACGGATCCAGTCACGGGAGATCTGTACGTTTCTGACACAAACACCCGCAGAATTTA
TCGCCCAAAGTCACTTACGGGGGCAAAAGACTTGACTAAAAATGCAGAAGTCGTCGCAGGGACAGGGG
AGCAATGCCTTCCGTTTGACGAGGCGAGATGTGGGGATGGAGGGAAGGCCGTGGAAGCCACACTCATG
AGTCCCAAAGGAATGGCAGTTGATAAGAATGGATTAATCTACTTTGTTGATGGAACCATGATTAGGAA
AGTTGACCAAAATGGAATCATATCAACTCTTCTGGGCTCTAACGATTTGACTTCAGCCAGACCTTTAA
CTTGTGACACCAGCATGCACATCAGCCAGGTACGTCTGGAATGGCCCACTGACCTAGCCATTAACCCT
ATGGATAACTCCATTTATGTCCTGGATAATAATGTAGTTTTACAGATCACTGAAAATCGTCAAGTTCG
CATTGCTGCTGGACGGCCCATGCACTGTCAGGTTCCCGGAGTGGAATATCCTGTGGGGAAGCACGCGG
TGCAGACAACACTGGAATCAGCCACTGCCATTGCTGTGTCCTACAGTGGGGTCCTGTACATTACTGAA
ACTGATGAGAAGAAAATTAACCGGATAAGGCAGGTCACAACAGATGGAGAAATCTCCTTAGTGGCCGG
AATACCTTCAGAGTGTGACTGCAAAAATGATGCCAACTGTGACTGTTACCAGAGTGGAGATGGCTACG
CCAAGGATGCCAAACTCAGTGCCCCATCCTCCCTGGCTGCTTCTCCAGATGGTACACTGTATATTGCA
GATCTAGGGAATATCCGGATCCGGGCTGTGTCAAAGAATAAGCCTTTACTTAACTCTATGAACTTCTA
TGAAGTTGCGTCTCCAACTGATCAAGAACTCTACATCTTTGACATCAATGGTACTCACCAATATACTG
TAAGTTTAGTCACTGGTGATTACCTTTACAATTTTAGCTACAGCAATGACAATGATATTACTGCTGTG
ACAGACAGCAATGGCAACACCCTTAGAATTAGACGGGACCCAAATCGCATGCCAGTTCGAGTGGTGTC
TCCTGATAACCAAGTGATATGGTTGACAATAGGAACAAATGGATGTTTGAAAGGCATGACTGCTCAAG
GACTGGAATTAGTTTTGTTTACTTACCATGGCAATAGTGGCCTTTTAGCCACTAAAAGTGATGAAACT
GGATGGACAACGTTTTTTGACTATGACAGTGAAGGTCGTCTGACAAATGTTACGTTTCCAACTGGAGT
GGTCACAAACCTGCATGGGGACATGGACAAGGCTATCACAGTGGACATTGAGTCATCTAGCCGAGAAG
AAGATGTCAGCATCACTTCAAATCTGTCCTCGATCGATTCTTTCTACACCATGGTTCAAGATCAGTTA
AGAAACAGCTACCAGATTGGTTATGACGGCTCCCTCAGAATTATCTACGCCAGTGGCCTGGACTCACA
CTACCAAACAGAGCCGCACGTTCTGGCTGGCACCGCTAATCCGACGGTTGCCAAAAGAAACATGACTT
TGCCTGGCGAGAACGGTCAAAACTTGGTGGAATGGAGATTCCGAAAAGAGCAAGCCCAAGGGAAAGTC
AATGTCTTTGGCCGCAAGCTCAGGGTTAATGGCAGAAACCTCCTTTCAGTTGACTTTGATCGAACAAC
AAAGACAGAAAAGATCTATGACGACCACCGTAAATTTCTACTGAGGATCGCCTACGACACGTCTGGGC
ACCCGACTCTCTGGCTGCCAAGCAGCAAGCTGATGGCCGTCAATGTCACCTATTCATCCACAGGTCAA
ATTGCCAGCATCCAGCGAGGCACCACTAGCGAGAAAGTAGATTATGACGGACAGGGGAGGATCGTGTC
TCGGGTCTTTGCTGATGGTAAAACATGGAGTTACACATATTTAGAAAAGTCCATGGTTCTTCTGCTTC
ATAGCCAGCGGCAGTACATCTTCGAATACGATATGTGGGACCGCCTGTCTGCCATCACCATGCCCAGT
GTGGCTCGCCACACCATGCAGACCATCCGATCCATTGGCTACTACCGCAACATATACAACCCCCCGGA
AAGCAACGCCTCCATCATCACGGACTACAACGAGGAAGGGCTGCTTCTACAAACAGCTTTCTTGGGTA
CAAGTCGGAGGGTCTTATTCAAATACAGAAGGCAGACTAGGCTCTCAGAAATTTTATATGATAGCACA
AGAGTCAGTTTTACCTATGATGAAACAGCAGGAGTCCTAAAGACAGTAAACCTCCAGAGTGATGGTTT
TATTTGCACCATTAGATACAGGCAAATTGGTCCCCTGATTGACAGGCAGATTTTCCGCTTTAGTGAAG
ATGGGATGGTAAATGCAAGATTTGACTATAGCTATGACAACAGCTTTCGAGTGACCAGCATGCAGGGT
GTGATCAATGAAACGCCACTGCCTATTGATCTGTATCAGTTTGATGACATTTCTGGCAAAGTTGAGCA
GTTTGGAAAGTTTGGAGTTATATATTATGATATTAACCAGATCATTTCTACAGCTGTAATGACCTATA
CGAAGCACTTTGATGCTCATGGCCGTATCAAGGAGATTCAATATGAGATATTCAGGTCGCTCATGTAC
TGGATTACAATTCAGTATGATAACATGGGTCGGGTAACCAAGAGAGAGATTAAAATAGGGCCCTTTGC
CAACACCACCAAATATGCTTATGAATATGATGTTGATGGACAGCTCCAAACAGTTTACCTCAATGAAA
AGATAATGTGGCGGTACAACTACGATCTGAATGGAAACCTCCATTTACTGAACCCAAGTAACAGTGCG
CGTCTGACACCCCTTCGCTATGACCTGCGAGACAGAATCACTCGACTGGGTGATGTTCAATATCGGTT
GGATGAAGATGGTTTCCTACGTCAAAGGGGCACGGAAATCTTTGAATATAGCTCCAAGGGGCTTCTAA
CTCGAGTTTACAGTAAAGGCAGTGGCTGGACAGTGATCTACCGTTATGACGGCCTGGGAAGGCGTGTT
TCTAGCAAAACCAGTCTAGGACAGCACCTGCAGTTTTTTTATGCTGACTTAACTTATCCCACTAGGAT
TACTCATGTCTACAACCATTCGAGTTCAGAAATTACCTCCCTGTATTATGATCTCCAAGGACATCTTT
TTGCCATGGAAATCAGCAGTGGGGATGAATTCTATATTGCATCGGATAACACAGGGACACCACTGGCT
GTGTTCAGTAGCAATGGGCTTATGCTGAAACAGATTCAGTACACTGCATATGGGGAAATCTATTTTGA
CTCTAATATTGACTTTCAACTGGTAATTGGATTTCATGGTGGCCTGTATGACCCACTCACCAAATTAA
TCCACTTTGGAGAAAGAGATTATGACATTTTGGCAGGACGGTGGACAACACCTGACATAGAAATCTGG
AAAAGAATTGGGAAGGACCCAGCTCCTTTTAACTTGTACATGTTTAGGAATAACAACCCTGCAAGCAA
AATCCATGACGTGAAAGATTACATCACAGATGTTAACAGCTGGCTGGTGACATTTGGTTTCCATCTGC
ACAATGCTATTCCTGGATTCCCTGTTCCCAAATTTGATTTAACAGAACCTTCTTACGAACTTGTGAAG
AGTCAGCAGTGGGATGATATACCGCCCATCTTCGGAGTCCAGCAGCAAGTGGCGCGGCAGGCCAAGGC
CTTCCTGTCGCTGGGGAAGATGGCCGAGGTGCAGGTGAGCCGGCGCCGGGCCGGCGGCGCGCAGTCCT
GGCTGTGGTTCGCCACGGTCAAGTCGCTGATCGGCAAGGGCGTCATGCTGGCCGTCAGCCAGGGCCGC
GTGCAGACCAACGTGCTCAACATCGCCAACGAGGACTGCATCAAGGTGGCGGCCGTGCTCAACAACGC
CTTCTACCTGGAGAACCTGCACTTCACCATCGAGGGCAAGGACACGCACTACTTCATCAAGACCACCA
CGCCCGAGAGCGACCTGGGCACGCTGCGGTTGACCAGCGGCCGCAAGGCGCTGGAGAACGGCATCAAC
GTGACGGTGTCGCAGTCCACCACGGTGGTGAACGGCAGGACGCGCAGGTTCGCGGACGTGGAGATGCA
GTTCGGCGCGCTGGCGCTGCACGTGCGCTACGGCATGACCCTGGACGAGGAGAAGGCGCGCATCCTGG
AGCAGGCGCGGCAGCGCGCGCTCGCCCGGGCCTGGGCGCGCGAGCAGCAGCGCGTGCGCGACGGCGAG
GAGGGCGCGCGCCTCTGGACGGAGGGCGAGAAGCGGCAGCTGCTGAGCGCCGGCAAGGTGCAGGGCTA
CGACGGGTACTACGTACTCTCGGTGGAGCAGTACCCCGAGCTGGCCGACAGCGCCAACAACATCCAGT
TCCTGCGGCAGAGCGAGATCGGCAGGAGGTAACGCCCGGGCCGCGCCCGCCGAGCCGCTCACGCCCTG
CCCACATTGTCCTGTGGCACAACCCGAGTGGGACTCTCCAACGCCCAAGAGCCTTCCTCCCGGGGGAA
TGAGACTGCTGTTACGACCCACACCCACACCGCGAAAACAAGGACCGCTTTTTTCCGAATGACCTTAA
AGGTGATCGGCTTTAACGAATATGTTTACATATGCATAGCGCTGCACTCAGTCGGACTGAACGTAGCC
AGAGGAAAAAAAAATCATCAAGGACAAAGGCCTCGACCTGTTGCGCTGGGCCGTCTGTTCCTTCTAGG
CACTGTATTTAACTAACTTTA

| | | | |
|---|---|---|---|
| NOV40af, SNP13382454 of | SEQ ID NO: 548 | 2725 aa | MW at 303959.6kD |
| CG55069-01, Protein | SNP Pos: 601 | | SNP Change: Ser to Ser |
| Sequence | | | |

MDVKERRPYCSLTKSRREKERRYTNSSADNEECRVPTQKSYSSSETLKAFDHDSSRLLYGNRVKDLVH
READEFTRQGQNFTLRQLGVCEPATRRGLAFCAEMGLPHRGYSISAGSDADTENEAVMSPEHAMRLWG
RGVKSGRSSCLSSRSNSALTLTDTEHENKSDSENEQPASNQGQSTLQPLPPSHKQHSAQHHPSITSLN
RNSLTNRRNQSPAPPAALPAELQTTPESVQLQDSWVLGSNVPLESRHFLFKTGTGTTPLFSTATPGYT
MASGSVYSPPTRPLPRNTLSRSAFKFKKSSKYCSWKCTALCAVGVSVLLAILLSYFIAMHLFGLMWQL
QQTENDTFENGKVNSDTMPTNTVSLPSGDNGKLGGFTQENNTIDSGELDIGRRAIQEIPPGIFWRSQL
FIDQPQFLKFNISLQKDALIGVYGRKKLPPSHTQSSPQYDFVELLDGSRLIAREQRSLLETERAGRQA
RSVSLHEAGFIQYLDSGIWHLAFYNDGKNAEQVSFNTIVIESVVECPRNCHGNGECVSGTCHCFPGFL
GPDCSRAACPVLCSGNGQYSKGRCLCFSGWKGTECDVPTTQCIDPQCGGRGICIMGSCACSSGYKGES
CEEADCIDPGCSNHGVCIHGECHCSPGWGGSNCEILKTMCPDQCSGHGTYLQESGSCTCDPNWTGPDC
SNEICSVDCGSHGVCMGGTCRCEEGWTGPACNQRACHPRCAEHGTCKDGKCECSQGWNGEHCTIAHYL
DKIVKDKIGYKEGCPGLCNSNGRCTLDQNGGHCVCQPGWRGAGCDVAMETLCTDSKDNEGDGLIDCMD
PDCCLQSSCQNOPYCRGLPDPQDIISQSLQSPSQQAAKSFYDRISFLIGSDSTHVIPGESPFNKSLAS
VIRGQVLTADGTPLIGVNVSFFHYPEYGYTITRQDGMFDLVANGGASLTLVFERSPFLTQYHTVWIPW
NVFYVMDTLVMEKEENDIPSCDLSGFVRPNPIIVSSPLSTFFRSSPEDSPIIPETQVLHEETTIPGTD
LKLSYLSSRAAGYKSVLKITMTQSIIPFNLMKVHLMVAVVGRLFQKWFPASPNLAYTFIWDKTDAYNQ
KVYGLSEAVVSVGYEYESCLDLTLWEKRTAILQGYELDASNMGGWTLDKHHVLDVQNGILYKGNGENQ
FISQQPPVVSSIMGNGRRRSISCPSCNGQADGNKLLAPVALACGIDGSLYVGDFNYVRRIFPSGNVTS
VLELRNKDFRHSSNPAHRYYLATDPVTGDLYVSDTNTRRIYRPKSLTGAKDLTKNAEVVAGTGEQCLP
FDEARCGDGGKAVEATLMSPKGMAVDKNGLIYFVDGTMIRKVDQNGIISTLLGSNDLTSARPLTCDTS
MHISQVRLEWPTDLAINPMDNSIYVLDNNVVLQITENRQVRIAAGRPMHCQVPGVEYPVGKHAVQTTL
ESATAIAVSYSGVLYITETDEKKINRIRQVTTDGEISLVAGIPSECDCKNDANCDCYQSGDGYAKDAK
LSAPSSLAASPDGTLYIADLGNIRIRAVSKNKPLLNSMNFYEVASPTDQELYIFDINGTHQYTVSLVT
GDYLYNFSYSNDNDITAVTDSNGNTLRIRRDPNRMPVRVVSPDNQVIWLTIGTNGCLKGMTAQGLELV
LFTYHGNSGLLATKSDETGWTTFFDYDSEGRLTNVTFPTGVVTNLHGDMDKAITVDIESSSREEDVSI
TSNLSSIDSFYTMVQDQLRNSYQIGYDGSLRIIYASGLDSHYQTEPHVLAGTANPTVAKRNMTLPGEN
GQNLVEWRFRKEQAQGKVNVFGRKLRVNGRNLLSVDFDRTTKTEKIYDDHRKFLLRIAYDTSGHPTLW
LPSSKLMAVNVTYSSTGQIASIQRGTTSEKVDYDGQGRIVSRVFADGKTWSYTYLEKSMVLLLHSQRQ
YIFEYDMWDRLSAITMPSVARHTMQTIRSIGYYRNIYNPPESNASIITDYNEEGLLLQTAFLGTSRRV
LFKYRRQTRLSEILYDSTRVSFTYDETAGVLKTVNLQSDGFICTIRYRQIGPLIDRQIFRFSEDGMVN
ARFDYSYDNSFRVTSMQGVINETPLPIDLYQFDDISGKVEQFGKFGVIYYDINQIISTAVMTYTKHFD
AHGRIKEIQYEIFRSLMYWITIQYDNMGRVTKREIKIGPFANTTKYAYEYDVDGQLQTVYLNEKIMWR
YNYDLNGNLHLLNPSNSARLTPLRYDLRDRITRLGDVQYRLDEDGFLRQRGTEIFEYSSKGLLTRVYS
KGSGWTVIYRYDGLGRRVSSKTSLGQHLQFFYADLTYPTRITHVYNHSSSEITSLYYDLQGHLFAMEI
SSGDEFYIASDNTGTPLAVFSSNGLMLKQIQYTAYGEIYFDSNIDFQLVIGFHGGLYDPLTKLIHFGE
RDYDILAGRWTTPDIEIWKRIGKDPAPFNLYMFRNNNPASKIHDVKDYITDVNSWLVTFGFHLHNAIP
GFPVPKFDLTEPSYELVKSQQWDDIPPIFGVQQQVARQAKAFLSLGKMAEVQVSRRRAGGAQSWLWFA
TVKSLIGKGVMLAVSQGRVQTNVLNIANEDCIKVAAVLNNAFYLENLHFTIEGKDTHYFIKTTTPESD
LGTLRLTSGRKALENGINVTVSQSTTVVNGRTRRFADVEMQFGAIALHVRYGMTLDEEKARILEQARQ
RALARAWAREQQRVRDGEEGARLWTEGEKRQLLSAGKVQGYDGYYVLSVEQYPELADSANNIQFLRQS
EIGRR

| | | |
|---|---|---|
| NOV40ag, SNP13382455 of | SEQ ID NO: 549 | 8657 bp |
| CG55069-01, DNA Sequence | ORF Start: ATG at 151 | ORF Stop: TAA at 8326 |
| | SNP Pos: 2559 | SNP Change: C to T |

TTTGGCCTCGGGCCAGAATTCGGCACGAGGGGTCTGGAGCTTGGAGGAGAAGTCTGAACTAAGGATAA
ACTAAAGAGAGGCCAATGAGACTTGAACCCTGAGCCTAAGTTGTCACCAGCAGGACTGATGTGCACAC
AGAAGGAATGAAGTATGGATGTGAAAGAACGCAGGCCTTACTGCTCCCTGACCAAGAGCAGACGAGAG
AAGGAACGGCGCTACACAAATTCCTCCGCAGACAATGAGGAGTGCCGGGTACCCACACAGAAGTCCTA
CAGTTCCAGCGAGACATTGAAAGCTTTTGATCATGATTCCTCGCGGCTGCTTTACGGCAACAGAGTGA
AGGATTTGGTTCACAGAGAAGCAGACGAGTTCACTAGACAAGGACAGAATTTTACCCTAAGGCAGTTA
GGAGTTTGTGAACCAGCAACTCGAAGAGGACTGGCATTTTGTGCGGAAATGGGGCTCCCTCACAGAGG
TTACTCTATCAGTGCAGGGTCAGATGCTGATACTGAAAATGAAGCAGTGATGTCCCCAGAGCATGCCA
TGAGACTTTGGGGCAGGGGGGTCAAATCAGGCCGCAGCTCCTGCCTGTCAAGTCGGTCCAACTCAGCC
CTCACCCTGACAGATACGGAGCACGAAAACAAGTCCGACAGTGAGAATGAGCAACCTGCAAGCAATCA
AGGCCAGTCTACCCTGCAGCCCTTGCCGCCTTCCCATAAGCAGCACTCTGCACAGCATCATCCATCCA
TCACTTCTCTCAACAGAAACTCCCTGACCAATAGAAGGAACCAGAGTCCGGCCCCGCCGGCTGCTTTG
CCCGCCGAGCTGCAAACCACACCCGAGTCCGTCCAGCTGCAGGACAGCTGGGTCCTTGGCAGTAATGT
ACCACTGGAAAGCAGGCATTTCCTATTCAAAACAGGAACAGGTACAACGCCACTGTTCAGTACTGCAA
CCCCAGGATACACAATGGCATCTGGCTCTGTTTATTCACCACCTACTCGGCCACTACCTAGAAACACC
CTATCAAGAAGTGCTTTTAAATTCAAGAAGTCTTCAAAGTACTGTAGCTGGAAATGCACTGCACTGTG
TGCCGTAGGGGTCTCGGTGCTCCTGGCAATACTCCTGTCTTATTTTATAGCAATGCATCTCTTTGGCC
TCAACTGGCAGCTACAGCAGACTGAAAATGACACATTTGAGAATGGAAAAGTGAATTCTGATACCATG
CCAACAAACACTGTGTCATTACCTTCTGGAGACAATGGAAAATTAGGTGGATTTACGCAAGAAAATAA
CACCATAGATTCCGGAGAACTTGATATTGGCCGAAGAGCAATTCAAGAGATTCCTCCCGGGATCTTCT
GGAGATCACAGCTCTTCATTGATCAGCCACAGTTTCTTAAATTCAATATCTCTCTTCAGAAGGATGCA
TTGATTGGAGTATATGGCCGGAAGAAGTTACCGCCTTCCCATACTCAGTCCTCCCCCCAGTATGACTT
CGTGGAGCTCCTGGATGGCAGCAGGCTGATTGCCAGAGAGCAGCGGAGCCTGCTTGAGACGGAGAGAG
CCGGGCGGCAGGCGAGATCCGTCAGCCTTCATGAGGCCGGCTTTATCCAGTACTTGGATTCTGGAATC
TGGCATCTGGCTTTTTATAATGATGGGAAAAATGCAGAGCAGGTGTCTTTTAATACCATTGTTATAGA
GTCTGTGGTGGAATGTCCCCGAAATTGCCATGGAAATGGAGAATGCGTTTCTGGAACTTGCCATTGTT
TTCCAGGATTTCTGGGTCCGGATTGTTCAAGAGCCGCCTGTCCAGTGTTATGTAGTGGCAACGGGCAG
TACTCCAAGGGCCGCTGCCTGTGTTTCAGCGGCTGGAAGGGCACCGAGTGTGATGTGCCGACTACCCA
GTGTATTGACCCACAGTGTGGGGGTCGTGGGATTTGTATCATGGGCTCCTGTGCTTGCAGCTCAGGAT
ACAAAGGAGAAAGTTGTGAAGAAGCTGACTGTATAGACCCTGGGTGTTCTAATCATGGTGTGTGTATC
CACGGGGAATGTCACTGCAGTCCAGGATGGGGAGGTAGCAATTGTGAAATACTGAAGACCATGTGTCC
AGACCAGTGCTCCGGCCACGGAACGThTCTTCAAGAAAGTGGCTCCTGCACGTGTGACCCTAACTGGA
CTGGCCCAGACTGCTCAAACGAAATATGTTCTGTGGACTGTGGCTCACACGGCGTTTGCATGGGGGGG
ACGTGTCGCTGTGAAGAAGGCTGGACGGGCCCAGCCTGTAATCAGAGAGCCTGCCACCCCCGCTGTGC
CGAGCACGGGACCTGCAAGGATGGCAAGTGTGAATGCAGCCAGGGCTGGAATGGAGAGCACTGCACTA
TCGCTCACTATTTGGATAAGATAGTTAAAGACAAGATAGGATATAAAGAGGGTTGTCCTGGTCTGTGC
AACAGCAATGGAAGATGTACCCTGGACCAAAATGGCGGACATTGTGTGTGCCAGCCTGGATGGAGAGG
AGCAGGCTGTGACGTAGCCATGGAGACTCTTTGCACAGATAGTAAGGACAATGAAGGGGATGGACTCA
TTGACTGCATGGATCCCGATTGCTGCCTACAGAGTTCCTGCCAGAATCAGCCCTATTGTCGGGGACTG
CCGGATCCTCAGGACATCATTAGCCAAAGCCTTCAATCGCCTTCTCAGCAAGCTGCCAAATCCTTTTA
TGATCGAATCAGTTTCCTTATAGGATCTGATAGCACCCATGTTATACCTGGAGAAAGTCCTTTCAATA
AGAGCCTTGCATCTGTCATCAGAGGCCAAGTACTGACTGCTGATGGAACTCCACTTATTGGAGTAAAT
GTCTCGTTTTTCCATTACCCAGAATATGGATATACTATTACCCGCCAGGACGGAATGTTTGACTTGGT
GGCAAATGGTGGGGCCTCTCTAACTTTGGTATTTGAACGATCCCCATTCCTCACTCAGTATCATACTG
TGTGGATTCCATGGAATGTCTTTTATGTGATGGATACCCTAGTCATGGAGAAAGAAGAGAATGACATT
CCCAGCTGTGATCTGAGTGGATTCGTGAGGCCAAATCCCATCATTGTGTCATCACCTTTATCCACCTT
TTTCAGATCTTCTCCTGAAGACAGTCCCATCATTCCCGAAACACAGGTACTCCACGAGGAAACTACAA
TTCCAGGAACAGATTTGAAACTCTCCTACTTGAGTTCCAGAGCTGCAGGGTATAAGTCAGTTCTCAAG
ATCACCATGACCCAGTCTATTATTCCATTTAATTTAATGAAGGTTCATCTTATGGTAGCTGTAGTAGG
AAGACTCTTCCAAAAGTGGTTTCCTGCCTCACCAAACTTGGCCTATACTTTCATATGGGATAAAACAG
ATGCATATAATCAGAAAGTCTATGGTCTATCTGAAGCTGTTGTGTCAGTTGGATATGAGTATGAGTCG
TGTTTGGACCTGACTCTGTGGGAAAAGAGGACTGCCATTCTGCAGGGCTATGAATTGGATGCGTCCAA
CATGGGTGGCTGGACATTAGATAAACATCACGTGCTGGATGTACAGAACGGTATACTGTACAAGGGAA
ACGGGGAAAACCAGTTCATCTCCCAGCAGCCTCCAGTCGTGAGTAGCATCATGGGCAATGGGCGAAGG
CGCAGCATTTCCTGCCCCAGTTGCAATGGTCAAGCTGATGGTAACAAGTTACTGGCCCCAGTGGCGCT
AGCTTGTGGGATCGATGGCAGTCTGTACGTAGGCGATTTCAACTACGTGCGGCGGATATTCCCTTCTG
GAAATGTAACAAGTGTCTTAGAACTAAGAAATAAAGATTTTAGACATAGCAGCAACCCAGCTCATAGA
TACTACCTTGCAACGGATCCAGTCACGGGAGATCTGTACGTTTCTGACACAAACACCCGCAGAATTTA
TCGCCCAAAGTCACTTACGGGGGCAAAAGACTTGACTAAAAATGCAGAAGTCGTCGCAGGGACAGGGG
AGCAATGCCTTCCGTTTGACGAGGCGAGATGTGGGGATGGAGGGAAGGCCGTGGAAGCCACACTCATG
AGTCCCAAAGGAATGGCAGTTGATAAGAATGGATTAATCTACTTTGTTGATGGAACCATGATTAGGAA
AGTTGACCAAAATGGAATCATATCAACTCTTCTGGGCTCTAACGATTTGACTTCAGCCAGACCTTTAA
CTTGTGACACCAGCATGCACATCAGCCAGGTACGTCTGGAATGGCCCACTGACCTAGCCATTAACCCT
ATGGATAACTCCATTTATGTCCTGGATAATAATGTAGTTTTACAGATCACTGAAAATCGTCAAGTTCG
CATTGCTGCTGGACGGCCCATGCACTGTCAGGTTCCCGGAGTGGAATATCCTGTGGGGAAGCACGCGG
TGCAGACAACACTGGAATCAGCCACTGCCATTGCTGTGTCCTACAGTGGGGTCCTGTACATTACTGAA
ACTGATGAGAAGAAAATTAACCGGATAAGGCAGGTCACAACAGATGGAGAAATCTCCTTAGTGGCCGG
AATACCTTCAGAGTGTGACTGCAAAAATGATGCCAACTGTGACTGTTACCAGAGTGGAGATGGCTACG
CCAAGGATGCCAAACTCAGTGCCCCATCCTCCCTGGCTGCTTCTCCAGATGGTACACTGTATATTGCA
GATCTAGGGAATATCCGGATCCGGGCTGTGTCAAAGAATAAGCCTTTACTTAACTCTATGAACTTCTA
TGAAGTTGCGTCTCCAACTGATCAAGAACTCTACATCTTTGACATCAATGGTACTCACCAATATACTG
TAAGTTTAGTCACTGGTGATTACCTTTACAATTTTAGCTACAGCAATGACAATGATATTACTGCTGTG
ACAGACAGCAATGGCAACACCCTTAGAATTAGACGGGACCCAAATCGCATGCCAGTTCGAGTGGTGTC
TCCTGATAACCAAGTGATATGGTTGACAATAGGAACAAATGGATGTTTGAAAGGCATGACTGCTCAAG
GACTGGAATTAGTTTTGTTTACTTACCATGGCAATAGTGGCCTTTTAGCCACTAAAAGTGATGAAACT
GGATGGACAACGTTTTTTGACTATGACAGTGAAGGTCGTCTGACAAATGTTACGTTTCCAACTGGAGT
GGTCACAAACCTGCATGGGGACATGGACAAGGCTATCACAGTGGACATTGAGTCATCTAGCCGAGAAG
AAGATGTCAGCATCACTTCAAATCTGTCCTCGATCGATTCTTTCTACACCATGGTTCAAGATCAGTTA
AGAAACAGCTACCAGATTGGTTATGACGGCTCCCTCAGAATTATCTACGCCAGTGGCCTGGACTCACA
CTACCAAACAGAGCCGCACGTTCTGGCTGGCACCGCTAATCCGACGGTTGCCAAAAGAAACATGACTT
TGCCTGGCGAGAACGGTCAAAACTTGGTGGAATGGAGATTCCGAAAAGAGCAAGCCCAAGGGAAAGTC
AATGTCTTTGGCCGCAAGCTCAGGGTTAATGGCAGAAACCTCCTTTCAGTTGACTTTGATCGAACAAC
AAAGACAGAAAAGATCTATGACGACCACCGTAAATTTCTACTGAGGATCGCCTACGACACGTCTGGGC
ACCCGACTCTCTGGCTGCCAAGCAGCAAGCTGATGGCCGTCAATGTCACCTATTCATCCACAGGTCAA
ATTGCCAGCATCCAGCGAGGCACCACTAGCGAGAAAGTAGATTATGACGGACAGGGGAGGATCGTGTC
TCGGGTCTTTGCTGATGGTAAAACATGGAGTTACACATATTTAGAAAAGTCCATGGTTCTTCTGCTTC
ATAGCCAGCGGCAGTACATCTTCGAATACGATATGTGGGACCGCCTGTCTGCCATCACCATGCCCAGT
GTGGCTCGCCACACCATGCAGACCATCCGATCCATTGGCTACTACCGCAACATATACAACCCCCCGGA
AAGCAACGCCTCCATCATCACGGACTACAACGAGGAAGGGCTGCTTCTACAAACAGCTTTCTTGGGTA
CAAGTCGGAGGGTCTTATTCAAATACAGAAGGCAGACTAGGCTCTCAGAAATTTTATATGATAGCACA
AGAGTCAGTTTTACCTATGATGAAACAGCAGGAGTCCTAAAGACAGTAAACCTCCAGAGTGATGGTTT
TATTTGCACCATTAGATACAGGCAAATTGGTCCCCTGATTGACAGGCAGATTTTCCGCTTTAGTGAAG
ATGGGATGGTAAATGCAAGATTTGACTATAGCTATGACAACAGCTTTCGAGTGACCAGCATGCAGGGT
GTGATCAATGAAACGCCACTGCCTATTGATCTGTATCAGTTTGATGACATTTCTGGCAAAGTTGAGCA
GTTTGGAAAGTTTGGAGTTATATATTATGATATTAACCAGATCATTTCTACAGCTGTAATGACCTATA
CGAAGCACTTTGATGCTCATGGCCGTATCAAGGAGATTCAATATGAGATATTCAGGTCGCTCATGTAC
TGGATTACAATTCAGTATGATAACATGGGTCGGGTAACCAAGAGAGAGATTAAAATAGGGCCCTTTGC
CAACACCACCAAATATGCTTATGAATATGATGTTGATGGACAGCTCCAAACAGTTTACCTCAATGAAA
AGATAATGTGGCGGTACAACTACGATCTGAATGGAAACCTCCATTTACTGAACCCAAGTAACAGTGCG
CGTCTGACACCCCTTCGCTATGACCTGCGAGACAGAATCACTCGACTGGGTGATGTTCAATATCGGTT
GGATGAAGATGGTTTCCTACGTCAAAGGGGCACGGAAATCTTTGAATATAGCTCCAAGGGGCTTCTAA
CTCGAGTTTACAGTAAAGGCAGTGGCTGGACAGTGATCTACCGTTATGACGGCCTGGGAAGGCGTGTT
TCTAGCAAAACCAGTCTAGGACAGCACCTGCAGTTTTTTTATGCTGACTTAACTTATCCCACTAGGAT
TACTCATGTCTACAACCATTCGAGTTCAGAAATTACCTCCCTGTATTATGATCTCCAAGGACATCTTT
TTGCCATGGAAATCAGCAGTGGGGATGAATTCTATATTGCATCGGATAACACAGGGACACCACTGGCT
GTGTTCAGTAGCAATGGGCTTATGCTGAAACAGATTCAGTACACTGCATATGGGGAAATCTATTTTGA
CTCTAATATTGACTTTCAACTGGTAATTGGATTTCATGGTGGCCTGTATGACCCACTCACCAAATTAA
TCCACTTTGGAGAAAGAGATTATGACATTTTGGCAGGACGGTGGACAACACCTGACATAGAAATCTGG
AAAAGAATTGGGAAGGACCCAGCTCCTTTTAACTTGTACATGTTTAGGAATAACAACCCTGCAAGCAA
AATCCATGACGTGAAAGATTACATCACAGATGTTAACAGCTGGCTGGTGACATTTGGTTTCCATCTGC
ACAATGCTATTCCTGGATTCCCTGTTCCCAAATTTGATTTAACAGAACCTTCTTACGAACTTGTGAAG
AGTCAGCAGTGGGATGATATACCGCCCATCTTCGGAGTCCAGCAGCAAGTGGCGCGGCAGGCCAAGGC
CTTCCTGTCGCTGGGGAAGATGGCCGAGGTGCAGGTGAGCCGGCGCCGGGCCGGCGGCGCGCAGTCCT
GGCTGTGGTTCGCCACGGTCAAGTCGCTGATCGGCAAGGGCGTCATGCTGGCCGTCAGCCAGGGCCGC
GTGCAGACCAACGTGCTCAACATCGCCAACGAGGACTGCATCAAGGTGGCGGCCGTGCTCAACAACGC
CTTCTACCTGGAGAACCTGCACTTCACCATCGAGGGCAAGGACACGCACTACTTCATCAAGACCACCA
CGCCCGAGAGCGACCTGGGCACGCTGCGGTTGACCAGCGGCCGCAAGGCGCTGGAGAACGGCATCAAC
GTGACGGTGTCGCAGTCCACCACGGTGGTGAACGGCAGGACGCGCAGGTTCGCGGACGTGGAGATGCA
GTTCGGCGCGCTGGCGCTGCACGTGCGCTACGGCATGACCCTGGACGAGGAGAAGGCGCGCATCCTGG
AGCAGGCGCGGCAGCGCGCGCTCGCCCGGGCCTGGGCGCGCGAGCAGCAGCGCGTGCGCGACGGCGAG
GAGGGCGCGCGCCTCTGGACGGAGGGCGAGAAGCGGCAGCTGCTGAGCGCCGGCAAGGTGCAGGGCTA
CGACGGGTACTACGTACTCTCGGTGGAGCAGTACCCCGAGCTGGCCGACAGCGCCAACAACATCCAGT
TCCTGCGGCAGAGCGAGATCGGCAGGAGGTAACGCCCGGGCCGCGCCCGCCGAGCCGCTCACGCCCTG
CCCACATTGTCCTGTGGCACAACCCGAGTGGGACTCTCCAACGCCCAAGAGCCTTCCTCCCGGGGGAA
TGAGACTGCTGTTACGACCCACACCCACACCGCGAAAACAAGGACCGCTTTTTTCCGAATGACCTTAA
AGGTGATCGGCTTTAACGAATATGTTTACATATGCATAGCGCTGCACTCAGTCGGACTGAACGTAGCC
AGAGGAAAAAAAAATCATCAAGGACAAAGGCCTCGACCTGTTGCGCTGGGCCGTCTGTTCCTTCTAGG
CACTGTATTTAACTAACTTTA

| | | | |
|---|---|---|---|
| NOV40ag, SNP13382455 of | SEQ ID NO: 550 | 2725 aa | MW at 303959.6kD |
| CG55069-01, Protein | SNP Pos: 803 | | SNP Change: Ser to Ser |
| Sequence | | | |

MDVKERRPYCSLTKSRREKERRYTNSSADNEECRVPTQKSYSSSETLKAFDHDSSRLLYGNRVKDLVH
READEFTRQGQNFTLRQLGVCEPATRRGLAFCAEMGLPHRGYSISAGSDADTENEAVMSPEHAMRLWG
RGVKSGRSSCLSSRSNSALTLTDTEHENKSDSENEQPASNQGQSTLQPLPPSHKQHSAQHHPSITSLN
RNSLTNRRNQSPAPPAALPAELQTTPESVQLQDSWVLGSNVPLESRHFLFKTGTGTTPLFSTATPGYT
MASGSVYSPPTRPLPRNTLSRSAFKFKKSSKYCSWKCTALCAVGVSVLLAILLSYFIAMHLFGLMWQL
QQTENDTFENGKVNSDTMPTNTVSLPSGDNGKLGGFTQENNTIDSGELDIGRRAIQEIPPGIFWRSQL
FIDQPQFLKFNISLQKDALIGVYGRKKLPPSHTQSSPQYDFVELLDGSRLIAREQRSLLETERAGRQA
RSVSLHEAGFIQYLDSGIWHLAFYNDGKNAEQVSFNTIVIESVVECPRNCHGNGECVSGTCHCFPGFL
GPDCSRAACPVLCSGNGQYSKGRCLCFSGWKGTECDVPTTQCIDPQCGGRGICIMGSCACSSGYKGES
CEEADCIDPGCSNHGVCIHGECHCSPGWGGSNCEILKTMCPDQCSGHGTYLQESGSCTCDPNWTGPDC
SNEICSVDCGSHGVCMGGTCRCEEGWTGPACNQRACHPRCAEHGTCKDGKCECSQGWNGEHCTIAHYL
DKIVKDKIGYKEGCPGLCNSNGRCTLDQNGGHCVCQPGWRGAGCDVAMETLCTDSKDNEGDGLIDCMD
PDCCLQSSCQNOPYCRGLPDPQDIISQSLQSPSQQAAKSFYDRISFLIGSDSTHVIPGESPFNKSLAS
VIRGQVLTADGTPLIGVNVSFFHYPEYGYTITRQDGMFDLVANGGASLTLVFERSPFLTQYHTVWIPW
NVFYVMDTLVMEKEENDIPSCDLSGFVRPNPIIVSSPLSTFFRSSPEDSPIIPETQVLHEETTIPGTD
LKLSYLSSRAAGYKSVLKITMTQSIIPFNLMKVHLMVAVVGRLFQKWFPASPNLAYTFIWDKTDAYNQ
KVYGLSEAVVSVGYEYESCLDLTLWEKRTAILQGYELDASNMGGWTLDKHHVLDVQNGILYKGNGENQ
FISQQPPVVSSIMGNGRRRSISCPSCNGQADGNKLLAPVALACGIDGSLYVGDFNYVRRIFPSGNVTS
VLELRNKDFRHSSNPAHRYYLATDPVTGDLYVSDTNTRRIYRPKSLTGAKDLTKNAEVVAGTGEQCLP
FDEARCGDGGKAVEATLMSPKGMAVDKNGLIYFVDGTMIRKVDQNGIISTLLGSNDLTSARPLTCDTS
MHISQVRLEWPTDLAINPMDNSIYVLDNNVVLQITENRQVRIAAGRPMHCQVPGVEYPVGKHAVQTTL
ESATAIAVSYSGVLYITETDEKKINRIRQVTTDGEISLVAGIPSECDCKNDANCDCYQSGDGYAKDAK
LSAPSSLAASPDGTLYIADLGNIRIRAVSKNKPLLNSMNFYEVASPTDQELYIFDINGTHQYTVSLVT
GDYLYNFSYSNDNDITAVTDSNGNTLRIRRDPNRMPVRVVSPDNQVIWLTIGTNGCLKGMTAQGLELV
LFTYHGNSGLLATKSDETGWTTFFDYDSEGRLTNVTFPTGVVTNLHGDMDKAITVDIESSSREEDVSI
TSNLSSIDSFYTMVQDQLRNSYQIGYDGSLRIIYASGLDSHYQTEPHVLAGTANPTVAKRNMTLPGEN
GQNLVEWRFRKEQAQGKVNVFGRKLRVNGRNLLSVDFDRTTKTEKIYDDHRKFLLRIAYDTSGHPTLW
LPSSKLMAVNVTYSSTGQIASIQRGTTSEKVDYDGQGRIVSRVFADGKTWSYTYLEKSMVLLLHSQRQ
YIFEYDMWDRLSAITMPSVARHTMQTIRSIGYYRNIYNPPESNASIITDYNEEGLLLQTAFLGTSRRV
LFKYRRQTRLSEILYDSTRVSFTYDETAGVLKTVNLQSDGFICTIRYRQIGPLIDRQIFRFSEDGMVN
ARFDYSYDNSFRVTSMQGVINETPLPIDLYQFDDISGKVEQFGKFGVIYYDINQIISTAVMTYTKHFD
AHGRIKEIQYEIFRSLMYWITIQYDNMGRVTKREIKIGPFANTTKYAYEYDVDGQLQTVYLNEKIMWR
YNYDLNGNLHLLNPSNSARLTPLRYDLRDRITRLGDVQYRLDEDGFLRQRGTEIFEYSSKGLLTRVYS
KGSGWTVIYRYDGLGRRVSSKTSLGQHLQFFYADLTYPTRITHVYNHSSSEITSLYYDLQGHLFAMEI
SSGDEFYIASDNTGTPLAVFSSNGLMLKQIQYTAYGEIYFDSNIDFQLVIGFHGGLYDPLTKLIHFGE
RDYDILAGRWTTPDIEIWKRIGKDPAPFNLYMFRNNNPASKIHDVKDYITDVNSWLVTFGFHLHNAIP
GFPVPKFDLTEPSYELVKSQQWDDIPPIFGVQQQVARQAKAFLSLGKMAEVQVSRRRAGGAQSWLWFA
TVKSLIGKGVMLAVSQGRVQTNVLNIANEDCIKVAAVLNNAFYLENLHFTIEGKDTHYFIKTTTPESD
LGTLRLTSGRKALENGINVTVSQSTTVVNGRTRRFADVEMQFGAIALHVRYGMTLDEEKARILEQARQ
RALARAWAREQQRVRDGEEGARLWTEGEKRQLLSAGKVQGYDGYYVLSVEQYPELADSANNIQFLRQS
EIGRR

| | | |
|---|---|---|
| NOV40ah, SNP13378354 of | SEQ ID NO: 551 | 8657 bp |
| CG55069-01, DNA Sequence | ORF Start: ATG at 151 | ORF Stop: TAA at 8326 |
| | SNP Pos: 7770 | SNP Change: C to T |

TTTGGCCTCGGGCCAGAATTCGGCACGAGGGGTCTGGAGCTTGGAGGAGAAGTCTGAACTAAGGATAA
ACTAAAGAGAGGCCAATGAGACTTGAACCCTGAGCCTAAGTTGTCACCAGCAGGACTGATGTGCACAC
AGAAGGAATGAAGTATGGATGTGAAAGAACGCAGGCCTTACTGCTCCCTGACCAAGAGCAGACGAGAG
AAGGAACGGCGCTACACAAATTCCTCCGCAGACAATGAGGAGTGCCGGGTACCCACACAGAAGTCCTA
CAGTTCCAGCGAGACATTGAAAGCTTTTGATCATGATTCCTCGCGGCTGCTTTACGGCAACAGAGTGA
AGGATTTGGTTCACAGAGAAGCAGACGAGTTCACTAGACAAGGACAGAATTTTACCCTAAGGCAGTTA
GGAGTTTGTGAACCAGCAACTCGAAGAGGACTGGCATTTTGTGCGGAAATGGGGCTCCCTCACAGAGG
TTACTCTATCAGTGCAGGGTCAGATGCTGATACTGAAAATGAAGCAGTGATGTCCCCAGAGCATGCCA
TGAGACTTTGGGGCAGGGGGGTCAAATCAGGCCGCAGCTCCTGCCTGTCAAGTCGGTCCAACTCAGCC
CTCACCCTGACAGATACGGAGCACGAAAACAAGTCCGACAGTGAGAATGAGCAACCTGCAAGCAATCA
AGGCCAGTCTACCCTGCAGCCCTTGCCGCCTTCCCATAAGCAGCACTCTGCACAGCATCATCCATCCA
TCACTTCTCTCAACAGAAACTCCCTGACCAATAGAAGGAACCAGAGTCCGGCCCCGCCGGCTGCTTTG
CCCGCCGAGCTGCAAACCACACCCGAGTCCGTCCAGCTGCAGGACAGCTGGGTCCTTGGCAGTAATGT
ACCACTGGAAAGCAGGCATTTCCTATTCAAAACAGGAACAGGTACAACGCCACTGTTCAGTACTGCAA
CCCCAGGATACACAATGGCATCTGGCTCTGTTTATTCACCACCTACTCGGCCACTACCTAGAAACACC
CTATCAAGAAGTGCTTTTAAATTCAAGAAGTCTTCAAAGTACTGTAGCTGGAAATGCACTGCACTGTG
TGCCGTAGGGGTCTCGGTGCTCCTGGCAATACTCCTGTCTTATTTTATAGCAATGCATCTCTTTGGCC
TCAACTGGCAGCTACAGCAGACTGAAAATGACACATTTGAGAATGGAAAAGTGAATTCTGATACCATG
CCAACAAACACTGTGTCATTACCTTCTGGAGACAATGGAAAATTAGGTGGATTTACGCAAGAAAATAA
CACCATAGATTCCGGAGAACTTGATATTGGCCGAAGAGCAATTCAAGAGATTCCTCCCGGGATCTTCT
GGAGATCACAGCTCTTCATTGATCAGCCACAGTTTCTTAAATTCAATATCTCTCTTCAGAAGGATGCA
TTGATTGGAGTATATGGCCGGAAGAAGTTACCGCCTTCCCATACTCAGTCCTCCCCCCAGTATGACTT
CGTGGAGCTCCTGGATGGCAGCAGGCTGATTGCCAGAGAGCAGCGGAGCCTGCTTGAGACGGAGAGAG
CCGGGCGGCAGGCGAGATCCGTCAGCCTTCATGAGGCCGGCTTTATCCAGTACTTGGATTCTGGAATC
TGGCATCTGGCTTTTTATAATGATGGGAAAAATGCAGAGCAGGTGTCTTTTAATACCATTGTTATAGA
GTCTGTGGTGGAATGTCCCCGAAATTGCCATGGAAATGGAGAATGCGTTTCTGGAACTTGCCATTGTT
TTCCAGGATTTCTGGGTCCGGATTGTTCAAGAGCCGCCTGTCCAGTGTTATGTAGTGGCAACGGGCAG
TACTCCAAGGGCCGCTGCCTGTGTTTCAGCGGCTGGAAGGGCACCGAGTGTGATGTGCCGACTACCCA
GTGTATTGACCCACAGTGTGGGGGTCGTGGGATTTGTATCATGGGCTCCTGTGCTTGCAGCTCAGGAT
ACAAAGGAGAAAGTTGTGAAGAAGCTGACTGTATAGACCCTGGGTGTTCTAATCATGGTGTGTGTATC
CACGGGGAATGTCACTGCAGTCCAGGATGGGGAGGTAGCAATTGTGAAATACTGAAGACCATGTGTCC
AGACCAGTGCTCCGGCCACGGAACGThTCTTCAAGAAAGTGGCTCCTGCACGTGTGACCCTAACTGGA
CTGGCCCAGACTGCTCAAACGAAATATGTTCTGTGGACTGTGGCTCACACGGCGTTTGCATGGGGGGG
ACGTGTCGCTGTGAAGAAGGCTGGACGGGCCCAGCCTGTAATCAGAGAGCCTGCCACCCCCGCTGTGC
CGAGCACGGGACCTGCAAGGATGGCAAGTGTGAATGCAGCCAGGGCTGGAATGGAGAGCACTGCACTA
TCGCTCACTATTTGGATAAGATAGTTAAAGACAAGATAGGATATAAAGAGGGTTGTCCTGGTCTGTGC
AACAGCAATGGAAGATGTACCCTGGACCAAAATGGCGGACATTGTGTGTGCCAGCCTGGATGGAGAGG
AGCAGGCTGTGACGTAGCCATGGAGACTCTTTGCACAGATAGCAAGGACAATGAAGGGGATGGACTCA
TTGACTGCATGGATCCCGATTGCTGCCTACAGAGTTCCTGCCAGAATCAGCCCTATTGTCGGGGACTG
CCGGATCCTCAGGACATCATTAGCCAAAGCCTTCAATCGCCTTCTCAGCAAGCTGCCAAATCCTTTTA
TGATCGAATCAGTTTCCTTATAGGATCTGATAGCACCCATGTTATACCTGGAGAAAGTCCTTTCAATA
AGAGCCTTGCATCTGTCATCAGAGGCCAAGTACTGACTGCTGATGGAACTCCACTTATTGGAGTAAAT
GTCTCGTTTTTCCATTACCCAGAATATGGATATACTATTACCCGCCAGGACGGAATGTTTGACTTGGT
GGCAAATGGTGGGGCCTCTCTAACTTTGGTATTTGAACGATCCCCATTCCTCACTCAGTATCATACTG
TGTGGATTCCATGGAATGTCTTTTATGTGATGGATACCCTAGTCATGGAGAAAGAAGAGAATGACATT
CCCAGCTGTGATCTGAGTGGATTCGTGAGGCCAAATCCCATCATTGTGTCATCACCTTTATCCACCTT
TTTCAGATCTTCTCCTGAAGACAGTCCCATCATTCCCGAAACACAGGTACTCCACGAGGAAACTACAA
TTCCAGGAACAGATTTGAAACTCTCCTACTTGAGTTCCAGAGCTGCAGGGTATAAGTCAGTTCTCAAG
ATCACCATGACCCAGTCTATTATTCCATTTAATTTAATGAAGGTTCATCTTATGGTAGCTGTAGTAGG
AAGACTCTTCCAAAAGTGGTTTCCTGCCTCACCAAACTTGGCCTATACTTTCATATGGGATAAAACAG
ATGCATATAATCAGAAAGTCTATGGTCTATCTGAAGCTGTTGTGTCAGTTGGATATGAGTATGAGTCG
TGTTTGGACCTGACTCTGTGGGAAAAGAGGACTGCCATTCTGCAGGGCTATGAATTGGATGCGTCCAA
CATGGGTGGCTGGACATTAGATAAACATCACGTGCTGGATGTACAGAACGGTATACTGTACAAGGGAA
ACGGGGAAAACCAGTTCATCTCCCAGCAGCCTCCAGTCGTGAGTAGCATCATGGGCAATGGGCGAAGG
CGCAGCATTTCCTGCCCCAGTTGCAATGGTCAAGCTGATGGTAACAAGTTACTGGCCCCAGTGGCGCT
AGCTTGTGGGATCGATGGCAGTCTGTACGTAGGCGATTTCAACTACGTGCGGCGGATATTCCCTTCTG
GAAATGTAACAAGTGTCTTAGAACTAAGAAATAAAGATTTTAGACATAGCAGCAACCCAGCTCATAGA
TACTACCTTGCAACGGATCCAGTCACGGGAGATCTGTACGTTTCTGACACAAACACCCGCAGAATTTA
TCGCCCAAAGTCACTTACGGGGGCAAAAGACTTGACTAAAAATGCAGAAGTCGTCGCAGGGACAGGGG
AGCAATGCCTTCCGTTTGACGAGGCGAGATGTGGGGATGGAGGGAAGGCCGTGGAAGCCACACTCATG
AGTCCCAAAGGAATGGCAGTTGATAAGAATGGATTAATCTACTTTGTTGATGGAACCATGATTAGGAA
AGTTGACCAAAATGGAATCATATCAACTCTTCTGGGCTCTAACGATTTGACTTCAGCCAGACCTTTAA
CTTGTGACACCAGCATGCACATCAGCCAGGTACGTCTGGAATGGCCCACTGACCTAGCCATTAACCCT
ATGGATAACTCCATTTATGTCCTGGATAATAATGTAGTTTTACAGATCACTGAAAATCGTCAAGTTCG
CATTGCTGCTGGACGGCCCATGCACTGTCAGGTTCCCGGAGTGGAATATCCTGTGGGGAAGCACGCGG
TGCAGACAACACTGGAATCAGCCACTGCCATTGCTGTGTCCTACAGTGGGGTCCTGTACATTACTGAA
ACTGATGAGAAGAAAATTAACCGGATAAGGCAGGTCACAACAGATGGAGAAATCTCCTTAGTGGCCGG
AATACCTTCAGAGTGTGACTGCAAAAATGATGCCAACTGTGACTGTTACCAGAGTGGAGATGGCTACG
CCAAGGATGCCAAACTCAGTGCCCCATCCTCCCTGGCTGCTTCTCCAGATGGTACACTGTATATTGCA
GATCTAGGGAATATCCGGATCCGGGCTGTGTCAAAGAATAAGCCTTTACTTAACTCTATGAACTTCTA
TGAAGTTGCGTCTCCAACTGATCAAGAACTCTACATCTTTGACATCAATGGTACTCACCAATATACTG
TAAGTTTAGTCACTGGTGATTACCTTTACAATTTTAGCTACAGCAATGACAATGATATTACTGCTGTG
ACAGACAGCAATGGCAACACCCTTAGAATTAGACGGGACCCAAATCGCATGCCAGTTCGAGTGGTGTC
TCCTGATAACCAAGTGATATGGTTGACAATAGGAACAAATGGATGTTTGAAAGGCATGACTGCTCAAG
GACTGGAATTAGTTTTGTTTACTTACCATGGCAATAGTGGCCTTTTAGCCACTAAAAGTGATGAAACT
GGATGGACAACGTTTTTTGACTATGACAGTGAAGGTCGTCTGACAAATGTTACGTTTCCAACTGGAGT
GGTCACAAACCTGCATGGGGACATGGACAAGGCTATCACAGTGGACATTGAGTCATCTAGCCGAGAAG
AAGATGTCAGCATCACTTCAAATCTGTCCTCGATCGATTCTTTCTACACCATGGTTCAAGATCAGTTA
AGAAACAGCTACCAGATTGGTTATGACGGCTCCCTCAGAATTATCTACGCCAGTGGCCTGGACTCACA
CTACCAAACAGAGCCGCACGTTCTGGCTGGCACCGCTAATCCGACGGTTGCCAAAAGAAACATGACTT
TGCCTGGCGAGAACGGTCAAAACTTGGTGGAATGGAGATTCCGAAAAGAGCAAGCCCAAGGGAAAGTC
AATGTCTTTGGCCGCAAGCTCAGGGTTAATGGCAGAAACCTCCTTTCAGTTGACTTTGATCGAACAAC
AAAGACAGAAAAGATCTATGACGACCACCGTAAATTTCTACTGAGGATCGCCTACGACACGTCTGGGC
ACCCGACTCTCTGGCTGCCAAGCAGCAAGCTGATGGCCGTCAATGTCACCTATTCATCCACAGGTCAA
ATTGCCAGCATCCAGCGAGGCACCACTAGCGAGAAAGTAGATTATGACGGACAGGGGAGGATCGTGTC
TCGGGTCTTTGCTGATGGTAAAACATGGAGTTACACATATTTAGAAAAGTCCATGGTTCTTCTGCTTC
ATAGCCAGCGGCAGTACATCTTCGAATACGATATGTGGGACCGCCTGTCTGCCATCACCATGCCCAGT
GTGGCTCGCCACACCATGCAGACCATCCGATCCATTGGCTACTACCGCAACATATACAACCCCCCGGA
AAGCAACGCCTCCATCATCACGGACTACAACGAGGAAGGGCTGCTTCTACAAACAGCTTTCTTGGGTA
CAAGTCGGAGGGTCTTATTCAAATACAGAAGGCAGACTAGGCTCTCAGAAATTTTATATGATAGCACA
AGAGTCAGTTTTACCTATGATGAAACAGCAGGAGTCCTAAAGACAGTAAACCTCCAGAGTGATGGTTT
TATTTGCACCATTAGATACAGGCAAATTGGTCCCCTGATTGACAGGCAGATTTTCCGCTTTAGTGAAG
ATGGGATGGTAAATGCAAGATTTGACTATAGCTATGACAACAGCTTTCGAGTGACCAGCATGCAGGGT
GTGATCAATGAAACGCCACTGCCTATTGATCTGTATCAGTTTGATGACATTTCTGGCAAAGTTGAGCA
GTTTGGAAAGTTTGGAGTTATATATTATGATATTAACCAGATCATTTCTACAGCTGTAATGACCTATA
CGAAGCACTTTGATGCTCATGGCCGTATCAAGGAGATTCAATATGAGATATTCAGGTCGCTCATGTAC
TGGATTACAATTCAGTATGATAACATGGGTCGGGTAACCAAGAGAGAGATTAAAATAGGGCCCTTTGC
CAACACCACCAAATATGCTTATGAATATGATGTTGATGGACAGCTCCAAACAGTTTACCTCAATGAAA
AGATAATGTGGCGGTACAACTACGATCTGAATGGAAACCTCCATTTACTGAACCCAAGTAACAGTGCG
CGTCTGACACCCCTTCGCTATGACCTGCGAGACAGAATCACTCGACTGGGTGATGTTCAATATCGGTT
GGATGAAGATGGTTTCCTACGTCAAAGGGGCACGGAAATCTTTGAATATAGCTCCAAGGGGCTTCTAA
CTCGAGTTTACAGTAAAGGCAGTGGCTGGACAGTGATCTACCGTTATGACGGCCTGGGAAGGCGTGTT
TCTAGCAAAACCAGTCTAGGACAGCACCTGCAGTTTTTTTATGCTGACTTAACTTATCCCACTAGGAT
TACTCATGTCTACAACCATTCGAGTTCAGAAATTACCTCCCTGTATTATGATCTCCAAGGACATCTTT
TTGCCATGGAAATCAGCAGTGGGGATGAATTCTATATTGCATCGGATAACACAGGGACACCACTGGCT
GTGTTCAGTAGCAATGGGCTTATGCTGAAACAGATTCAGTACACTGCATATGGGGAAATCTATTTTGA
CTCTAATATTGACTTTCAACTGGTAATTGGATTTCATGGTGGCCTGTATGACCCACTCACCAAATTAA
TCCACTTTGGAGAAAGAGATTATGACATTTTGGCAGGACGGTGGACAACACCTGACATAGAAATCTGG
AAAAGAATTGGGAAGGACCCAGCTCCTTTTAACTTGTACATGTTTAGGAATAACAACCCTGCAAGCAA
AATCCATGACGTGAAAGATTACATCACAGATGTTAACAGCTGGCTGGTGACATTTGGTTTCCATCTGC
ACAATGCTATTCCTGGATTCCCTGTTCCCAAATTTGATTTAACAGAACCTTCTTACGAACTTGTGAAG
AGTCAGCAGTGGGATGATATACCGCCCATCTTCGGAGTCCAGCAGCAAGTGGCGCGGCAGGCCAAGGC
CTTCCTGTCGCTGGGGAAGATGGCCGAGGTGCAGGTGAGCCGGCGCCGGGCCGGCGGCGCGCAGTCCT
GGCTGTGGTTCGCCACGGTCAAGTCGCTGATCGGCAAGGGCGTCATGCTGGCCGTCAGCCAGGGCCGC
GTGCAGACCAACGTGCTTAACATCGCCAACGAGGACTGCATCAAGGTGGCGGCCGTGCTCAACAACGC
CTTCTACCTGGAGAACCTGCACTTCACCATCGAGGGCAAGGACACGCACTACTTCATCAAGACCACCA
CGCCCGAGAGCGACCTGGGCACGCTGCGGTTGACCAGCGGCCGCAAGGCGCTGGAGAACGGCATCAAC
GTGACGGTGTCGCAGTCCACCACGGTGGTGAACGGCAGGACGCGCAGGTTCGCGGACGTGGAGATGCA
GTTCGGCGCGCTGGCGCTGCACGTGCGCTACGGCATGACCCTGGACGAGGAGAAGGCGCGCATCCTGG
AGCAGGCGCGGCAGCGCGCGCTCGCCCGGGCCTGGGCGCGCGAGCAGCAGCGCGTGCGCGACGGCGAG
GAGGGCGCGCGCCTCTGGACGGAGGGCGAGAAGCGGCAGCTGCTGAGCGCCGGCAAGGTGCAGGGCTA
CGACGGGTACTACGTACTCTCGGTGGAGCAGTACCCCGAGCTGGCCGACAGCGCCAACAACATCCAGT
TCCTGCGGCAGAGCGAGATCGGCAGGAGGTAACGCCCGGGCCGCGCCCGCCGAGCCGCTCACGCCCTG
CCCACATTGTCCTGTGGCACAACCCGAGTGGGACTCTCCAACGCCCAAGAGCCTTCCTCCCGGGGGAA
TGAGACTGCTGTTACGACCCACACCCACACCGCGAAAACAAGGACCGCTTTTTTCCGAATGACCTTAA
AGGTGATCGGCTTTAACGAATATGTTTACATATGCATAGCGCTGCACTCAGTCGGACTGAACGTAGCC
AGAGGAAAAAAAAATCATCAAGGACAAAGGCCTCGACCTGTTGCGCTGGGCCGTCTGTTCCTTCTAGG
CACTGTATTTAACTAACTTTA

| | | | |
|---|---|---|---|
| NOV40ah, SNP13378354 of | SEQ ID NO: 552 | 2725 aa | MW at 303959.6kD |
| CG55069-01, Protein | SNP Pos: 2540 | | SNP Change: Leu to Leu |
| Sequence | | | |

MDVKERRPYCSLTKSRREKERRYTNSSADNEECRVPTQKSYSSSETLKAFDHDSSRLLYGNRVKDLVH
READEFTRQGQNFTLRQLGVCEPATRRGLAFCAEMGLPHRGYSISAGSDADTENEAVMSPEHAMRLWG
RGVKSGRSSCLSSRSNSALTLTDTEHENKSDSENEQPASNQGQSTLQPLPPSHKQHSAQHHPSITSLN
RNSLTNRRNQSPAPPAALPAELQTTPESVQLQDSWVLGSNVPLESRHFLFKTGTGTTPLFSTATPGYT
MASGSVYSPPTRPLPRNTLSRSAFKFKKSSKYCSWKCTALCAVGVSVLLAILLSYFIAMHLFGLMWQL
QQTENDTFENGKVNSDTMPTNTVSLPSGDNGKLGGFTQENNTIDSGELDIGRRAIQEIPPGIFWRSQL
FIDQPQFLKFNISLQKDALIGVYGRKKLPPSHTQSSPQYDFVELLDGSRLIAREQRSLLETERAGRQA
RSVSLHEAGFIQYLDSGIWHLAFYNDGKNAEQVSFNTIVIESVVECPRNCHGNGECVSGTCHCFPGFL
GPDCSRAACPVLCSGNGQYSKGRCLCFSGWKGTECDVPTTQCIDPQCGGRGICIMGSCACSSGYKGES
CEEADCIDPGCSNHGVCIHGECHCSPGWGGSNCEILKTMCPDQCSGHGTYLQESGSCTCDPNWTGPDC
SNEICSVDCGSHGVCMGGTCRCEEGWTGPACNQRACHPRCAEHGTCKDGKCECSQGWNGEHCTIAHYL
DKIVKDKIGYKEGCPGLCNSNGRCTLDQNGGHCVCQPGWRGAGCDVAMETLCTDSKDNEGDGLIDCMD
PDCCLQSSCQNOPYCRGLPDPQDIISQSLQSPSQQAAKSFYDRISFLIGSDSTHVIPGESPFNKSLAS
VIRGQVLTADGTPLIGVNVSFFHYPEYGYTITRQDGMFDLVANGGASLTLVFERSPFLTQYHTVWIPW
NVFYVMDTLVMEKEENDIPSCDLSGFVRPNPIIVSSPLSTFFRSSPEDSPIIPETQVLHEETTIPGTD
LKLSYLSSRAAGYKSVLKITMTQSIIPFNLMKVHLMVAVVGRLFQKWFPASPNLAYTFIWDKTDAYNQ
KVYGLSEAVVSVGYEYESCLDLTLWEKRTAILQGYELDASNMGGWTLDKHHVLDVQNGILYKGNGENQ
FISQQPPVVSSIMGNGRRRSISCPSCNGQADGNKLLAPVALACGIDGSLYVGDFNYVRRIFPSGNVTS
VLELRNKDFRHSSNPAHRYYLATDPVTGDLYVSDTNTRRIYRPKSLTGAKDLTKNAEVVAGTGEQCLP
FDEARCGDGGKAVEATLMSPKGMAVDKNGLIYFVDGTMIRKVDQNGIISTLLGSNDLTSARPLTCDTS
MHISQVRLEWPTDLAINPMDNSIYVLDNNVVLQITENRQVRIAAGRPMHCQVPGVEYPVGKHAVQTTL
ESATAIAVSYSGVLYITETDEKKINRIRQVTTDGEISLVAGIPSECDCKNDANCDCYQSGDGYAKDAK
LSAPSSLAASPDGTLYIADLGNIRIRAVSKNKPLLNSMNFYEVASPTDQELYIFDINGTHQYTVSLVT
GDYLYNFSYSNDNDITAVTDSNGNTLRIRRDPNRMPVRVVSPDNQVIWLTIGTNGCLKGMTAQGLELV
LFTYHGNSGLLATKSDETGWTTFFDYDSEGRLTNVTFPTGVVTNLHGDMDKAITVDIESSSREEDVSI
TSNLSSIDSFYTMVQDQLRNSYQIGYDGSLRIIYASGLDSHYQTEPHVLAGTANPTVAKRNMTLPGEN
GQNLVEWRFRKEQAQGKVNVFGRKLRVNGRNLLSVDFDRTTKTEKIYDDHRKFLLRIAYDTSGHPTLW
LPSSKLMAVNVTYSSTGQIASIQRGTTSEKVDYDGQGRIVSRVFADGKTWSYTYLEKSMVLLLHSQRQ
YIFEYDMWDRLSAITMPSVARHTMQTIRSIGYYRNIYNPPESNASIITDYNEEGLLLQTAFLGTSRRV
LFKYRRQTRLSEILYDSTRVSFTYDETAGVLKTVNLQSDGFICTIRYRQIGPLIDRQIFRFSEDGMVN
ARFDYSYDNSFRVTSMQGVINETPLPIDLYQFDDISGKVEQFGKFGVIYYDINQIISTAVMTYTKHFD
AHGRIKEIQYEIFRSLMYWITIQYDNMGRVTKREIKIGPFANTTKYAYEYDVDGQLQTVYLNEKIMWR
YNYDLNGNLHLLNPSNSARLTPLRYDLRDRITRLGDVQYRLDEDGFLRQRGTEIFEYSSKGLLTRVYS
KGSGWTVIYRYDGLGRRVSSKTSLGQHLQFFYADLTYPTRITHVYNHSSSEITSLYYDLQGHLFAMEI
SSGDEFYIASDNTGTPLAVFSSNGLMLKQIQYTAYGEIYFDSNIDFQLVIGFHGGLYDPLTKLIHFGE
RDYDILAGRWTTPDIEIWKRIGKDPAPFNLYMFRNNNPASKIHDVKDYITDVNSWLVTFGFHLHNAIP
GFPVPKFDLTEPSYELVKSQQWDDIPPIFGVQQQVARQAKAFLSLGKMAEVQVSRRRAGGAQSWLWFA
TVKSLIGKGVMLAVSQGRVQTNVLNIANEDCIKVAAVLNNAFYLENLHFTIEGKDTHYFIKTTTPESD
LGTLRLTSGRKALENGINVTVSQSTTVVNGRTRRFADVEMQFGAIALHVRYGMTLDEEKARILEQARQ
RALARAWAREQQRVRDGEEGARLWTEGEKRQLLSAGKVQGYDGYYVLSVEQYPELADSANNIQFLRQS
EIGRR

[0578] A ClustalW comparison of the above protein sequences yields the following sequence alignment shown in Table 40B.

TABLE 40B
Comparison of the NOV40 protein sequences.

| | |
|---|---|
| NOV40a | ------------------------------------------------------------ |
| NOV40b | ------------------------------------------------------------ |
| NOV40c | ------------------------------------------------------------ |
| NOV40d | ------------------------------------------------------------ |
| NOV40e | ------------------------------------------------------------ |
| NOV40f | ------------------------------------------------------------ |
| NOV40g | ------------------------------------------------------------ |
| NOV40h | ------------------------------------------------------------ |
| NOV40i | ------------------------------------------------------------ |
| NOV40j | ------------------------------------------------------------ |
| NOV40k | ------------------------------------------------------------ |
| NOV40l | ------------------------------------------------------------ |
| NOV40m | ------------------------------------------------------------ |
| NOV40n | ------------------------------------------------------------ |
| NOV40o | ------------------------------------------------------------ |
| NOV40p | ------------------------------------------------------------ |
| NOV40q | ------------------------------------------------------------ |
| NOV40r | ------------------------------------------------------------ |
| NOV40s | ------------------------------------------------------------ |
| NOV40t | ------------------------------------------------------------ |
| NOV40u | ------------------------------------------------------------ |
| NOV40v | ------------------------------------------------------------ |
| NOV40w | MDVKERRPYCSLTKSRREKERRYTNSSADNEECRVPTQKSYSSSETLKAFDHDSSRLLYG |
| NOV40x | ------------------------------------------------------------ |
| NOV40y | ------------------------------------------------------------ |
| NOV40z | ------------------------------------------------------------ |
| NOV40aa | ------------------------------------------------------------ |
| NOV40ab | ------------------------------------------------------------ |
| NOV40ac | ------------------------------------------------------------ |
| NOV40a | ------------------------------------------------------------ |
| NOV40b | ------------------------------------------------------------ |
| NOV40c | ------------------------------------------------------------ |
| NOV40d | ------------------------------------------------------------ |
| NOV40e | ------------------------------------------------------------ |
| NOV40f | ------------------------------------------------------------ |
| NOV40g | ------------------------------------------------------------ |
| NOV40h | ------------------------------------------------------------ |
| NOV40i | ------------------------------------------------------------ |
| NOV40j | ------------------------------------------------------------ |
| NOV40k | ------------------------------------------------------------ |
| NOV40l | ------------------------------------------------------------ |
| NOV40m | ------------------------------------------------------------ |
| NOV40n | ------------------------------------------------------------ |
| NOV40o | ------------------------------------------------------------ |
| NOV40p | ------------------------------------------------------------ |
| NOV40q | ------------------------------------------------------------ |
| NOV40r | ------------------------------------------------------------ |
| NOV40s | ------------------------------------------------------------ |
| NOV40t | ------------------------------------------------------------ |
| NOV40u | ------------------------------------------------------------ |
| NOV40v | ------------------------------------------------------------ |
| NOV40w | NRVKDLVHREADEFTRQEQPASNQGQSTLQPLPPSHKQHSAQHHPSITSLNRNSLTNRRN |
| NOV40x | ------------------------------------------------------------ |
| NOV40y | ------------------------------------------------------------ |
| NOV40z | ------------------------------------------------------------ |
| NOV40aa | ------------------------------------------------------------ |
| NOV40ab | ------------------------------------------------------------ |
| NOV40ac | ------------------------------------------------------------ |
| NOV40a | ------------------------------------------------------------ |
| NOV40b | ------------------------------------------------------------ |
| NOV40c | ------------------------------------------------------------ |
| NOV40d | ------------------------------------------------------------ |
| NOV40e | ------------------------------------------------------------ |
| NOV40f | ------------------------------------------------------------ |
| NOV40g | ------------------------------------------------------------ |
| NOV40h | ------------------------------------------------------------ |
| NOV40i | ------------------------------------------------------------ |
| NOV40j | ------------------------------------------------------------ |
| NOV40k | ------------------------------------------------------------ |
| NOV40l | ------------------------------------------------------------ |
| NOV40m | ------------------------------------------------------------ |
| NOV40n | ------------------------------------------------------------ |
| NOV40o | ------------------------------------------------------------ |
| NOV40p | ------------------------------------------------------------ |
| NOV40q | ------------------------------------------------------------ |
| NOV40r | ------------------------------------------------------------ |
| NOV40s | ------------------------------------------------------------ |
| NOV40t | ------------------------------------------------------------ |
| NOV40u | ------------------------------------------------------------ |
| NOV40v | ------------------------------------------------------------ |
| NOV40w | QSPAPPAALPAELQTTPESVQLQDSNVLGSNVPLESRHFLFKTGTGTTPLFSTATPGYTN |
| NOV40x | ------------------------------------------------------------ |
| NOV40y | ------------------------------------------------------------ |
| NOV40z | ------------------------------------------------------------ |
| NOV40aa | ------------------------------------------------------------ |
| NOV40ab | ------------------------------------------------------------ |
| NOV40ac | ------------------------------------------------------------ |
| NOV40a | ------------------------------------------------------------ |
| NOV40b | ------------------------------------------------------------ |
| NOV40c | ------------------------------------------------------------ |
| NOV40d | ------------------------------------------------------------ |
| NOV40e | ------------------------------------------------------------ |
| NOV40f | ------------------------------------------------------------ |
| NOV40g | ------------------------------------------------------------ |
| NOV40h | ------------------------------------------------------------ |
| NOV40i | ------------------------------------------------------------ |
| NOV40j | ------------------------------------------------------------ |
| NOV40k | ------------------------------------------------------------ |
| NOV40l | ------------------------------------------------------------ |
| NOV40m | ------------------------------------------------------------ |
| NOV40n | ------------------------------------------------------------ |
| NOV40o | ------------------------------------------------------------ |
| NOV40p | ------------------------------------------------------------ |
| NOV40q | ------------------------------------------------------------ |
| NOV40r | ------------------------------------------------------------ |
| NOV40s | ------------------------------------------------------------ |
| NOV40t | ------------------------------------------------------------ |
| NOV40u | ------------------------------------------------------------ |
| NOV40v | ------------------------------------------------------------ |
| NOV40w | ASGSVYSPPTRPLPRNTLSRSAFKFKKSSKYCSWKCTALCAVGVSVLLAILLSYFIAMHL |
| NOV40x | ------------------------------------------------------------ |
| NOV40y | ------------------------------------------------------------ |
| NOV40z | ------------------------------------------------------------ |
| NOV40aa | ------------------------------------------------------------ |
| NOV40ab | ------------------------------------------------------------ |
| NOV40ac | ------------------------------------------------------------ |
| NOV40a | ------------------------------------------------------------ |
| NOV40b | ------------------------------------------------------------ |
| NOV40c | ------------------------------------------------------------ |
| NOV40d | ------------------------------------------------------------ |
| NOV40e | ------------------------------------------------------------ |
| NOV40f | ------------------------------------------------------------ |
| NOV40g | ------------------------------------------------------------ |
| NOV40h | ------------------------------------------------------------ |
| NOV40i | ------------------------------------------------------------ |
| NOV40j | ------------------------------------------------------------ |
| NOV40k | ------------------------------------------------------------ |
| NOV40l | ------------------------------------------------------------ |
| NOV40m | ------------------------------------------------------------ |
| NOV40n | ------------------------------------------------------------ |
| NOV40o | ------------------------------------------------------------ |
| NOV40p | ------------------------------------------------------------ |
| NOV40q | ------------------------------------------------------------ |
| NOV40r | ------------------------------------------------------------ |
| NOV40s | ------------------------------------------------------------ |
| NOV40t | ------------------------------------------------------------ |
| NOV40u | ------------------------------------------------------------ |
| NOV40v | ------------------------------------------------------------ |
| NOV40w | FGLNWQLQQTENDTFENGKVNSDTMPTNTVSLPSGDNGKLGGFTQENNTIDSGELDIGRR |
| NOV40x | ------------------------------------------------------------ |
| NOV40y | ------------------------------------------------------------ |
| NOV40z | ------------------------------------------------------------ |
| NOV40aa | ------------------------------------------------------------ |
| NOV40ab | ------------------------------------------------------------ |
| NOV40ac | ------------------------------------------------------------ |
| NOV40a | ------------------------------------------------------------ |
| NOV40b | ------------------------------------------------------------ |
| NOV40c | ------------------------------------------------------------ |
| NOV40d | ------------------------------------------------------------ |
| NOV40e | ------------------------------------------------------------ |
| NOV40f | ------------------------------------------------------------ |
| NOV40g | ------------------------------------------------------------ |
| NOV40h | ------------------------------------------------------------ |
| NOV40i | ------------------------------------------------------------ |
| NOV40j | ------------------------------------------------------------ |
| NOV40k | ------------------------------------------------------------ |
| NOV40l | ------------------------------------------------------------ |
| NOV40m | ------------------------------------------------------------ |
| NOV40n | ------------------------------------------------------------ |
| NOV40o | ------------------------------------------------------------ |
| NOV40p | ------------------------------------------------------------ |
| NOV40q | ------------------------------------------------------------ |
| NOV40r | ------------------------------------------------------------ |
| NOV40s | ------------------------------------------------------------ |
| NOV40t | ------------------------------------------------------------ |
| NOV40u | ------------------------------------------------------------ |
| NOV40v | ------------------------------------------------------------ |
| NOV40w | AIQEIPPGIFWRSQLFIDQPQFLKFNISLQKDALIGVYGRKGLPPSHTQYDFVELLDGSR |
| NOV40x | ------------------------------------------------------------ |
| NOV40y | ------------------------------------------------------------ |
| NOV40z | ------------------------------------------------------------ |
| NOV40aa | ------------------------------------------------------------ |
| NOV40ab | ------------------------------------------------------------ |
| NOV40ac | ------------------------------------------------------------ |
| NOV40a | ------------------------------------------------------------ |
| NOV40b | ------------------------------------------------------------ |
| NOV40c | ------------------------------------------------------------ |
| NOV40d | ------------------------------------------------------------ |
| NOV40e | ------------------------------------------------------------ |
| NOV40f | ------------------------------------------------------------ |
| NOV40g | ------------------------------------------------------------ |
| NOV40h | ------------------------------------------------------------ |
| NOV40i | ------------------------------------------------------------ |
| NOV40j | ------------------------------------------------------------ |
| NOV40k | ------------------------------------------------------------ |
| NOV40l | ------------------------------------------------------------ |
| NOV40m | ------------------------------------------------------------ |
| NOV40n | ------------------------------------------------------------ |
| NOV40o | ------------------------------------------------------------ |
| NOV40p | ------------------------------------------------------------ |
| NOV40g | ------------------------------------------------------------ |
| NOV40r | ------------------------------------------------------------ |
| NOV40s | ------------------------------------------------------------ |
| NOV40t | ------------------------------------------------------------ |
| NOV40u | ------------------------------------------------------------ |
| NOV40v | ------------------------------------------------------------ |
| NOV40w | LIAREQRSLLETERAGRQARSVSLHEAGFIQYLDSGIWHLAFYNDGKNAEQVSFNTIVIE |
| NOV40x | ------------------------------------------------------------ |
| NOV40y | ------------------------------------------------------------ |
| NOV40z | ------------------------------------------------------------ |
| NOV40aa | ------------------------------------------------------------ |
| NOV40ab | ------------------------------------------------------------ |
| NOV40ac | ------------------------------------------------------------ |
| NOV40a | ------------------------------------------------------------ |
| NOV40b | ------------------------------------------------------------ |
| NOV40c | ------------------------------------------------------------ |
| NOV40d | ------------------------------------------------------------ |
| NOV40e | ------------------------------------------------------------ |
| NOV40f | ------------------------------------------------------------ |
| NOV40g | ------------------------------------------------------------ |
| NOV40h | ------------------------------------------------------------ |
| NOV40i | ------------------------------------------------------------ |
| NOV40j | ------------------------------------------------------------ |
| NOV40k | ------------------------------------------------------------ |
| NOV40l | ------------------------------------------------------------ |
| NOV40m | ------------------------------------------------------------ |
| NOV40n | ------------------------------------------------------------ |
| NOV40o | ------------------------------------------------------------ |
| NOV40p | ------------------------------------------------------------ |
| NOV40q | ------------------------------------------------------------ |
| NOV40r | ------------------------------------------------------------ |
| NOV40s | ------------------------------------------------------------ |
| NOV40t | ------------------------------------------------------------ |
| NOV40u | ------------------------------------------------------------ |
| NOV40v | ------------------------------------------------------------ |
| NOV40w | SVVECPRNCHGNGECVSGTCHCFPGFLGPDCSRAACPVLCSGNGQYSKGRCLCFSGWKGT |
| NOV40x | ------------------------------------------------------------ |
| NOV40y | ------------------------------------------------------------ |
| NOV40z | ------------------------------------------------------------ |
| NOV40aa | ------------------------------------------------------------ |
| NOV40ab | ------------------------------------------------------------ |
| NOV40ac | ------------------------------------------------------------ |
| NOV40a | ------------------------------------------------------------ |
| NOV40b | ------------------------------------------------------------ |
| NOV40c | ------------------------------------------------------------ |
| NOV40d | ------------------------------------------------------------ |
| NOV40e | ------------------------------------------------------------ |
| NOV40f | ------------------------------------------------------------ |
| NOV40g | ------------------------------------------------------------ |
| NOV40h | ------------------------------------------------------------ |
| NOV40i | ------------------------------------------------------------ |
| NOV40j | ------------------------------------------------------------ |
| NOV40k | ------------------------------------------------------------ |
| NOV40l | ------------------------------------------------------------ |
| NOV40m | ------------------------------------------------------------ |
| NOV40n | ------------------------------------------------------------ |
| NOV40o | ------------------------------------------------------------ |
| NOV40p | ------------------------------------------------------------ |
| NOV40q | ------------------------------------------------------------ |
| NOV40r | ------------------------------------------------------------ |
| NOV40s | ------------------------------------------------------------ |
| NOV40t | ------------------------------------------------------------ |
| NOV40u | ------------------------------------------------------------ |
| NOV40v | ------------------------------------------------------------ |
| NOV40w | ECDVPTTQCIDPQCGGRGICIMGSCACNSGYKGESCEEADCIDPGCSNHGVCIHGECHCS |
| NOV40x | ------------------------------------------------------------ |
| NOV40y | ------------------------------------------------------------ |
| NOV40z | ------------------------------------------------------------ |
| NOV40aa | ------------------------------------------------------------ |
| NOV40ab | ------------------------------------------------------------ |
| NOV40ac | ------------------------------------------------------------ |
| NOV40a | ------------------------------------------------------------ |
| NOV40b | ------------------------------------------------------------ |
| NOV40c | ------------------------------------------------------------ |
| NOV40d | ------------------------------------------------------------ |
| NOV40e | ------------------------------------------------------------ |
| NOV40f | ------------------------------------------------------------ |
| NOV40g | ------------------------------------------------------------ |
| NOV40h | ------------------------------------------------------------ |
| NOV40i | ------------------------------------------------------------ |
| NOV40j | ------------------------------------------------------------ |
| NOV40k | ------------------------------------------------------------ |
| NOV40l | ------------------------------------------------------------ |
| NOV40m | ------------------------------------------------------------ |
| NOV40n | ------------------------------------------------------------ |
| NOV40o | ------------------------------------------------------------ |
| NOV40p | ------------------------------------------------------------ |
| NOV40q | ------------------------------------------------------------ |
| NOV40r | ------------------------------------------------------------ |
| NOV40s | ------------------------------------------------------------ |
| NOV40t | ------------------------------------------------------------ |
| NOV40u | ------------------------------------------------------------ |
| NOV40v | ------------------------------------------------------------ |
| NOV40w | PGWGGSNCEILKTMCPDQCSGHGTYLQESGSCTCDPNWTGPDCSNEICSVDCGSHGVCMG |
| NOV40x | ------------------------------------------------------------ |
| NOV40y | ------------------------------------------------------------ |
| NOV40z | ------------------------------------------------------------ |
| NOV40aa | ------------------------------------------------------------ |
| NOV40ab | ------------------------------------------------------------ |
| NOV40ac | ------------------------------------------------------------ |
| NOV40a | ------------------------------------------------------------ |
| NOV40b | ------------------------------------------------------------ |
| NOV40c | ------------------------------------------------------------ |
| NOV40d | ------------------------------------------------------------ |
| NOV40e | ------------------------------------------------------------ |
| NOV40f | ------------------------------------------------------------ |
| NOV40g | ------------------------------------------------------------ |
| NOV40h | ------------------------------------------------------------ |
| NOV40i | ------------------------------------------------------------ |
| NOV40j | ------------------------------------------------------------ |
| NOV40k | ------------------------------------------------------------ |
| NOV40l | ------------------------------------------------------------ |
| NOV40m | ------------------------------------------------------------ |
| NOV40n | ------------------------------------------------------------ |
| NOV40o | ------------------------------------------------------------ |
| NOV40p | ------------------------------------------------------------ |
| NOV40q | ------------------------------------------------------------ |
| NOV40r | ------------------------------------------------------------ |
| NOV40s | ------------------------------------------------------------ |
| NOV40t | ------------------------------------------------------------ |
| NOV40u | ------------------------------------------------------------ |
| NOV40v | ------------------------------------------------------------ |
| NOV40w | GTCRCEEGWTGPTCNQRACHPRCAEHGTCKDGKCECSHGWNGEHCTIEGCPGLCNSNGRC |
| NOV40x | ------------------------------------------------------------ |
| NOV40y | ------------------------------------------------------------ |
| NOV40z | ------------------------------------------------------------ |
| NOV40aa | ------------------------------------------------------------ |
| NOV40ab | ------------------------------------------------------------ |
| NOV40ac | ------------------------------------------------------------ |
| NOV40a | ------------------------------------------------------------ |
| NOV40b | ------------------------------------------------------------ |
| NOV40c | ------------------------------------------------------------ |
| NOV40d | ------------------------------------------------------------ |
| NOV40e | ------------------------------------------------------------ |
| NOV40f | ------------------------------------------------------------ |
| NOV40g | ------------------------------------------------------------ |
| NOV40h | ------------------------------------------------------------ |
| NOV40i | ------------------------------------------------------------ |
| NOV40j | ------------------------------------------------------------ |
| NOV40k | ------------------------------------------------------------ |
| NOV40l | ------------------------------------------------------------ |
| NOV40m | ------------------------------------------------------------ |
| NOV40n | ------------------------------------------------------------ |
| NOV40o | ------------------------------------------------------------ |
| NOV40p | ------------------------------------------------------------ |
| NOV40q | ------------------------------------------------------------ |
| NOV40r | ------------------------------------------------------------ |
| NOV40s | ------------------------------------------------------------ |
| NOV40t | ------------------------------------------------------------ |
| NOV40u | ------------------------------------------------------------ |
| NOV40v | ------------------------------------------------------------ |
| NOV40w | TLDQNGWHCVCQPGWRGAGCDVANETLCTDSKDNEGDGLIDCMDPDCCLQSSCQNQPYCR |
| NOV40x | ------------------------------------------------------------ |
| NOV40y | ------------------------------------------------------------ |
| NOV40z | ------------------------------------------------------------ |
| NOV40aa | ------------------------------------------------------------ |
| NOV40ab | ------------------------------------------------------------ |
| NOV40ac | ------------------------------------------------------------ |
| NOV40a | ------------------------------------------------------------ |
| NOV40b | ------------------------------------------------------------ |
| NOV40c | ------------------------------------------------------------ |
| NOV40d | ------------------------------------------------------------ |
| NOV40e | ------------------------------------------------------------ |
| NOV40f | ------------------------------------------------------------ |
| NOV40g | ------------------------------------------------------------ |
| NOV40h | ------------------------------------------------------------ |
| NOV40i | ------------------------------------------------------------ |
| NOV40j | ------------------------------------------------------------ |
| NOV40k | ------------------------------------------------------------ |
| NOV40l | ------------------------------------------------------------ |
| NOV40m | ------------------------------------------------------------ |
| NOV40n | ------------------------------------------------------------ |
| NOV40o | ------------------------------------------------------------ |
| NOV40p | ------------------------------------------------------------ |
| NOV40q | ------------------------------------------------------------ |
| NOV40r | ------------------------------------------------------------ |
| NOV40s | ------------------------------------------------------------ |
| NOV40t | ------------------------------------------------------------ |
| NOV40u | ------------------------------------------------------------ |
| NOV40v | ------------------------------------------------------------ |
| NOV40w | GLPDPQDIISQSLQSPSQQAAKSFYDRISFLIGSDSTHVIPGESPFNKSLASVIRGQVLT |
| NOV40x | ------------------------------------------------------------ |
| NOV40y | ------------------------------------------------------------ |
| NOV40z | ------------------------------------------------------------ |
| NOV40aa | ------------------------------------------------------------ |
| NOV40ab | ------------------------------------------------------------ |
| NOV40ac | ------------------------------------------------------------ |
| NOV40a | ------------------------------------------------------------ |
| NOV40b | ------------------------------------------------------------ |
| NOV40c | ------------------------------------------------------------ |
| NOV40d | ------------------------------------------------------------ |
| NOV40e | ------------------------------------------------------------ |
| NOV40f | ------------------------------------------------------------ |
| NOV40g | ------------------------------------------------------------ |
| NOV40h | ------------------------------------------------------------ |
| NOV40i | ------------------------------------------------------------ |
| NOV40j | ------------------------------------------------------------ |
| NOV40k | ------------------------------------------------------------ |
| NOV40l | ------------------------------------------------------------ |
| NOV40m | ------------------------------------------------------------ |
| NOV40n | ------------------------------------------------------------ |
| NOV40o | ------------------------------------------------------------ |
| NOV40p | ------------------------------------------------------------ |
| NOV40q | ------------------------------------------------------------ |
| NOV40r | ------------------------------------------------------------ |
| NOV40s | ------------------------------------------------------------ |
| NOV40t | ------------------------------------------------------------ |
| NOV40u | ------------------------------------------------------------ |
| NOV40v | ------------------------------------------------------------ |
| NOV40w | ADGTPLIGVNVSFFNYPEYGYTITRQDGMFDLVANGGASLTLVFERSPFLTQYHTVWIPW |
| NOV40x | ------------------------------------------------------------ |
| NOV40y | ------------------------------------------------------------ |
| NOV40z | ------------------------------------------------------------ |
| NOV40aa | ------------------------------------------------------------ |
| NOV40ab | ------------------------------------------------------------ |
| NOV40ac | ------------------------------------------------------------ |
| NOV40a | ------------------------------------------------------------ |
| NOV40b | ------------------------------------------------------------ |
| NOV40c | ------------------------------------------------------------ |
| NOV40d | ------------------------------------------------------------ |
| NOV40e | ------------------------------------------------------------ |
| NOV40f | ------------------------------------------------------------ |
| NOV40g | ------------------------------------------------------------ |
| NOV40h | ------------------------------------------------------------ |
| NOV40i | ------------------------------------------------------------ |
| NOV40j | ------------------------------------------------------------ |
| NOV40k | ------------------------------------------------------------ |
| NOV40l | ------------------------------------------------------------ |
| NOV40m | ------------------------------------------------------------ |
| NOV40n | ------------------------------------------------------------ |
| NOV40o | ------------------------------------------------------------ |
| NOV40p | ------------------------------------------------------------ |
| NOV40q | ------------------------------------------------------------ |
| NOV40r | ------------------------------------------------------------ |
| NOV40s | ------------------------------------------------------------ |
| NOV40t | ------------------------------------------------------------ |
| NOV40u | ------------------------------------------------------------ |
| NOV40v | ------------------------------------------------------------ |
| NOV40w | NVFYVMDTLVMEKEENDIPSCDLSGFVRPNPIIVSSPLSTFFRSSPEDSPIIPETQVLHE |
| NOV40x | ------------------------------------------------------------ |
| NOV40y | ------------------------------------------------------------ |
| NOV40z | ------------------------------------------------------------ |
| NOV40aa | ------------------------------------------------------------ |
| NOV40ab | ------------------------------------------------------------ |
| NOV40ac | ------------------------------------------------------------ |
| NOV40a | ------------------------------------------------------------ |
| NOV40b | ------------------------------------------------------------ |
| NOV40c | ------------------------------------------------------------ |
| NOV40d | ------------------------------------------------------------ |
| NOV40e | ------------------------------------------------------------ |
| NOV40f | ------------------------------------------------------------ |
| NOV40g | ------------------------------------------------------------ |
| NOV40h | ------------------------------------------------------------ |
| NOV40i | ------------------------------------------------------------ |
| NOV40j | ------------------------------------------------------------ |
| NOV40k | ------------------------------------------------------------ |
| NOV40l | ------------------------------------------------------------ |
| NOV40m | ------------------------------------------------------------ |
| NOV40n | ------------------------------------------------------------ |
| NOV40o | ------------------------------------------------------------ |
| NOV40p | ------------------------------------------------------------ |
| NOV40q | ------------------------------------------------------------ |
| NOV40r | ------------------------------------------------------------ |
| NOV40s | ------------------------------------------------------------ |
| NOV40t | ------------------------------------------------------------ |
| NOV40u | ------------------------------------------------------------ |
| NOV40v | ------------------------------------------------------------ |
| NOV40w | ETTIPGTDLKLSYLSSRAAGYKSVLKITMTQSIIPFNLMKVHLMVAVVGRLFQKWFPASP |
| NOV40x | ------------------------------------------------------------ |
| NOV40y | ------------------------------------------------------------ |
| NOV40z | ------------------------------------------------------------ |
| NOV40aa | ------------------------------------------------------------ |
| NOV40ab | ------------------------------------------------------------ |
| NOV40ac | ------------------------------------------------------------ |
| NOV40a | ------------------------------------------------------------ |
| NOV40b | ------------------------------------------------------------ |
| NOV40c | ------------------------------------------------------------ |
| NOV40d | ------------------------------------------------------------ |
| NOV40e | ------------------------------------------------------------ |
| NOV40f | ------------------------------------------------------------ |
| NOV40g | ------------------------------------------------------------ |
| NOV40h | ------------------------------------------------------------ |
| NOV40i | ------------------------------------------------------------ |
| NOV40j | ------------------------------------------------------------ |
| NOV40k | ------------------------------------------------------------ |
| NOV40l | ------------------------------------------------------------ |
| NOV40m | ------------------------------------------------------------ |
| NOV40n | ------------------------------------------------------------ |
| NOV40o | ------------------------------------------------------------ |
| NOV40p | ------------------------------------------------------------ |
| NOV40q | ------------------------------------------------------------ |
| NOV40r | ------------------------------------------------------------ |
| NOV40s | ------------------------------------------------------------ |
| NOV40t | ------------------------------------------------------------ |
| NOV40u | ------------------------------------------------------------ |
| NOV40v | ------------------------------------------------------------ |
| NOV40w | NLAYTFIWDKTDAYNQKVYGLSEAVVSVGYEYESCLDLTLWEKRTAILQGYELDASNMGG |
| NOV40x | ------------------------------------------------------------ |
| NOV40y | ------------------------------------------------------------ |
| NOV40z | ------------------------------------------------------------ |
| NOV40aa | ------------------------------------------------------------ |
| NOV40ab | ------------------------------------------------------------ |
| NOV40ac | ------------------------------------------------------------ |
| NOV40a | ------------------------------------------------------------ |
| NOV40b | ------------------------------------------------------------ |
| NOV40c | ------------------------------------------------------------ |
| NOV40d | ------------------------------------------------------------ |
| NOV40e | ------------------------------------------------------------ |
| NOV40f | ------------------------------------------------------------ |
| NOV40g | ------------------------------------------------------------ |
| NOV40h | ------------------------------------------------------------ |
| NOV40i | ------------------------------------------------------------ |
| NOV40j | ------------------------------------------------------------ |
| NOV40k | ------------------------------------------------------------ |
| NOV40l | ------------------------------------------------------------ |
| NOV40m | ------------------------------------------------------------ |
| NOV40n | ------------------------------------------------------------ |
| NOV40o | ------------------------------------------------------------ |
| NOV40p | ------------------------------------------------------------ |
| NOV40q | ------------------------------------------------------------ |
| NOV40r | ------------------------------------------------------------ |
| NOV40s | ------------------------------------------------------------ |
| NOV40t | ------------------------------------------------------------ |
| NOV40u | ------------------------------------------------------------ |
| NOV40v | ------------------------------------------------------------ |
| NOV40w | WTLDKHHVLDVQNGILYKGNGEMQFISQQPPVVSSIMGNGRRRSISCPSCNGQADGNKLL |
| NOV40x | ------------------------------------------------------------ |
| NOV40y | ------------------------------------------------------------ |
| NOV40z | ------------------------------------------------------------ |
| NOV40aa | ------------------------------------------------------------ |
| NOV40ab | ------------------------------------------------------------ |
| NOV40ac | ------------------------------------------------------------ |
| NOV40a | ------------------------------------------------------------ |
| NOV40b | ------------------------------------------------------------ |
| NOV40c | ------------------------------------------------------------ |
| NOV40d | ------------------------------------------------------------ |
| NOV40e | ------------------------------------------------------------ |
| NOV40f | ------------------------------------------------------------ |
| NOV40g | ------------------------------------------------------------ |
| NOV40h | ------------------------------------------------------------ |
| NOV40i | ------------------------------------------------------------ |
| NOV40j | ------------------------------------------------------------ |
| NOV40k | ------------------------------------------------------------ |
| NOV40l | ------------------------------------------------------------ |
| NOV40m | ------------------------------------------------------------ |
| NOV40n | ------------------------------------------------------------ |
| NOV40o | ------------------------------------------------------------ |
| NOV40p | ------------------------------------------------------------ |
| NOV40q | ------------------------------------------------------------ |
| NOV40r | ------------------------------------------------------------ |
| NOV40s | ------------------------------------------------------------ |
| NOV40t | ------------------------------------------------------------ |
| NOV40u | ------------------------------------------------------------ |
| NOV40v | ------------------------------------------------------------ |
| NOV40w | APVALACGIDGSLYVGDFNYVRRIFPSGNVTSVLELRNKDFRHSSNPAHRYYLATDPVTG |
| NOV40x | ------------------------------------------------------------ |
| NOV40y | ------------------------------------------------------------ |
| NOV40z | ------------------------------------------------------------ |
| NOV40aa | ------------------------------------------------------------ |
| NOV40ab | ------------------------------------------------------------ |
| NOV40ac | ------------------------------------------------------------ |
| NOV40a | ------------------------------------------------------------ |
| NOV40b | ------------------------------------------------------------ |
| NOV40c | ------------------------------------------------------------ |
| NOV40d | ------------------------------------------------------------ |
| NOV40e | ------------------------------------------------------------ |
| NOV40f | ------------------------------------------------------------ |
| NOV40g | ------------------------------------------------------------ |
| NOV40h | ------------------------------------------------------------ |
| NOV40i | ------------------------------------------------------------ |
| NOV40j | ------------------------------------------------------------ |
| NOV40k | ------------------------------------------------------------ |
| NOV40l | ------------------------------------------------------------ |
| NOV40m | ------------------------------------------------------------ |
| NOV40n | ------------------------------------------------------------ |
| NOV40o | ------------------------------------------------------------ |
| NOV40p | ------------------------------------------------------------ |
| NOV40q | ------------------------------------------------------------ |
| NOV40r | ------------------------------------------------------------ |
| NOV40s | ------------------------------------------------------------ |
| NOV40t | ------------------------------------------------------------ |
| NOV40u | ------------------------------------------------------------ |
| NOV40v | ------------------------------------------------------------ |
| NOV40w | DLYVSDTNTRRIYRPKSLTGAKDLTKNAEVVAGTGEQCLPFDEARCGDGGKAVEATLMSP |
| NOV40x | ------------------------------------------------------------ |
| NOV40y | ------------------------------------------------------------ |
| NOV40z | ------------------------------------------------------------ |
| NOV40aa | ------------------------------------------------------------ |
| NOV40ab | ------------------------------------------------------------ |
| NOV40ac | ------------------------------------------------------------ |
| NOV40a | ------------------------------------------------------------ |
| NOV40b | ------------------------------------------------------------ |
| NOV40c | ------------------------------------------------------------ |
| NOV40d | ------------------------------------------------------------ |
| NOV40e | ------------------------------------------------------------ |
| NOV40f | ------------------------------------------------------------ |
| NOV40g | ------------------------------------------------------------ |
| NOV40h | ------------------------------------------------------------ |
| NOV40i | ------------------------------------------------------------ |
| NOV40j | ------------------------------------------------------------ |
| NOV40k | ------------------------------------------------------------ |
| NOV40l | ------------------------------------------------------------ |
| NOV40m | ------------------------------------------------------------ |
| NOV40n | ------------------------------------------------------------ |
| NOV40o | ------------------------------------------------------------ |
| NOV40p | ------------------------------------------------------------ |
| NOV40q | ------------------------------------------------------------ |
| NOV40r | ------------------------------------------------------------ |
| NOV40s | ------------------------------------------------------------ |
| NOV40t | ------------------------------------------------------------ |
| NOV40u | ------------------------------------------------------------ |
| NOV40v | ------------------------------------------------------------ |
| NOV40w | KGMAVDKNGLIYFVDGTMIRKVDQNGIISTLLGSNDLTSARPLTCDTSMHISQVRLEWPT |
| NOV40x | ------------------------------------------------------------ |
| NOV40y | ------------------------------------------------------------ |
| NOV40z | ------------------------------------------------------------ |
| NOV40aa | ------------------------------------------------------------ |
| NOV40ab | ------------------------------------------------------------ |
| NOV40ac | ------------------------------------------------------------ |
| NOV40a | ------------------------------------------------------------ |
| NOV40b | ------------------------------------------------------------ |
| NOV40c | ------------------------------------------------------------ |
| NOV40d | ------------------------------------------------------------ |
| NOV40e | ------------------------------------------------------------ |
| NOV40f | ------------------------------------------------------------ |
| NOV40g | ------------------------------------------------------------ |
| NOV40h | ------------------------------------------------------------ |
| NOV40i | ------------------------------------------------------------ |
| NOV40j | ------------------------------------------------------------ |
| NOV40k | ------------------------------------------------------------ |
| NOV40l | ------------------------------------------------------------ |
| NOV40m | ------------------------------------------------------------ |
| NOV40n | ------------------------------------------------------------ |
| NOV40o | ------------------------------------------------------------ |
| NOV40p | ------------------------------------------------------------ |
| NOV40q | ------------------------------------------------------------ |
| NOV40r | ------------------------------------------------------------ |
| NOV40s | ------------------------------------------------------------ |
| NOV40t | ------------------------------------------------------------ |
| NOV40u | ------------------------------------------------------------ |
| NOV40v | ------------------------------------------------------------ |
| NOV40w | DLAINPMDNSIYVLDNNVVLQITENRQVRIAAGRPMHCQVPGVEYPVGKHAVQTTLESAT |
| NOV40x | ------------------------------------------------------------ |
| NOV40y | ------------------------------------------------------------ |
| NOV40z | ------------------------------------------------------------ |
| NOV40aa | ------------------------------------------------------------ |
| NOV40ab | ------------------------------------------------------------ |
| NOV40ac | ------------------------------------------------------------ |
| NOV40a | ------------------------------------------------------------ |
| NOV40b | ------------------------------------------------------------ |
| NOV40c | ------------------------------------------------------------ |
| NOV40d | ------------------------------------------------------------ |
| NOV40e | ------------------------------------------------------------ |
| NOV40f | ------------------------------------------------------------ |
| NOV40g | ------------------------------------------------------------ |
| NOV40h | ------------------------------------------------------------ |
| NOV40i | ------------------------------------------------------------ |
| NOV40j | ------------------------------------------------------------ |
| NOV40k | ------------------------------------------------------------ |
| NOV40l | ------------------------------------------------------------ |
| NOV40m | ------------------------------------------------------------ |
| NOV40n | ------------------------------------------------------------ |
| NOV40o | ------------------------------------------------------------ |
| NOV40p | ------------------------------------------------------------ |
| NOV40q | ------------------------------------------------------------ |
| NOV40r | ------------------------------------------------------------ |
| NOV40s | ------------------------------------------------------------ |
| NOV40t | ------------------------------------------------------------ |
| NOV40u | ------------------------------------------------------------ |
| NOV40v | ------------------------------------------------------------ |
| NOV40w | AIAVSYSGVLYITETDEKKINRIRQVTTDGEISLVAGIPSECDCKHDANCDCYQSGDGYA |
| NOV40x | ------------------------------------------------------------ |
| NOV40y | ------------------------------------------------------------ |
| NOV40z | ------------------------------------------------------------ |
| NOV40aa | ------------------------------------------------------------ |
| NOV40ab | ------------------------------------------------------------ |
| NOV40ac | ------------------------------------------------------------ |
| NOV40a | ------------------------------------------------------------ |
| NOV40b | ------------------------------------------------------------ |
| NOV40c | ------------------------------------------------------------ |
| NOV40d | ------------------------------------------------------------ |
| NOV40e | ------------------------------------------------------------ |
| NOV40f | ------------------------------------------------------------ |
| NOV40g | ------------------------------------------------------------ |
| NOV40h | ------------------------------------------------------------ |
| NOV40i | ------------------------------------------------------------ |
| NOV40j | ------------------------------------------------------------ |
| NOV40k | ------------------------------------------------------------ |
| NOV40l | ------------------------------------------------------------ |
| NOV40m | ------------------------------------------------------------ |
| NOV40n | ------------------------------------------------------------ |
| NOV40o | ------------------------------------------------------------ |
| NOV40p | ------------------------------------------------------------ |
| NOV40q | ------------------------------------------------------------ |
| NOV40r | ------------------------------------------------------------ |
| NOV40s | ------------------------------------------------------------ |
| NOV40t | ------------------------------------------------------------ |
| NOV40u | ------------------------------------------------------------ |
| NOV40v | ------------------------------------------------------------ |
| NOV40w | KDAKLSAPSSLAASPDGTLYIADLGNIRIRAVSKNKPLLNSMNFYEVASPTDQELYIFDI |
| NOV40x | ------------------------------------------------------------ |
| NOV40y | ------------------------------------------------------------ |
| NOV40z | ------------------------------------------------------------ |
| NOV40aa | ------------------------------------------------------------ |
| NOV40ab | ------------------------------------------------------------ |
| NOV40ac | ------------------------------------------------------------ |
| NOV40a | ------------------------------------------------------------ |
| NOV40b | ------------------------------------------------------------ |
| NOV40c | ------------------------------------------------------------ |
| NOV40d | ------------------------------------------------------------ |
| NOV40e | ------------------------------------------------------------ |
| NOV40f | ------------------------------------------------------------ |
| NOV40g | ------------------------------------------------------------ |
| NOV40h | ------------------------------------------------------------ |
| NOV40i | ------------------------------------------------------------ |
| NOV40j | ------------------------------------------------------------ |
| NOV40k | ------------------------------------------------------------ |
| NOV40l | ------------------------------------------------------------ |
| NOV40m | ------------------------------------------------------------ |
| NOV40n | ------------------------------------------------------------ |
| NOV40o | ------------------------------------------------------------ |
| NOV40p | ------------------------------------------------------------ |
| NOV40q | ------------------------------------------------------------ |
| NOV40r | ------------------------------------------------------------ |
| NOV40s | ------------------------------------------------------------ |
| NOV40t | ------------------------------------------------------------ |
| NOV40u | ------------------------------------------------------------ |
| NOV40v | ------------------------------------------------------------ |
| NOV40w | NGTHQYTVSLVTGDYLYNFSYSNDNDITAVTDSNGNTLRIRRDPNRMPVRVVSPDNQVIW |
| NOV40x | ------------------------------------------------------------ |
| NOV40y | ------------------------------------------------------------ |
| NOV40z | ------------------------------------------------------------ |
| NOV40aa | ------------------------------------------------------------ |
| NOV40ab | ------------------------------------------------------------ |
| NOV40ac | ------------------------------------------------------------ |
| NOV40a | ------------------------------------------------------------ |
| NOV40b | ------------------------------------------------------------ |
| NOV40c | ------------------------------------------------------------ |
| NOV40d | ------------------------------------------------------------ |
| NOV40e | ------------------------------------------------------------ |
| NOV40f | ------------------------------------------------------------ |
| NOV40g | ------------------------------------------------------------ |
| NOV40h | ------------------------------------------------------------ |
| NOV40i | ------------------------------------------------------------ |
| NOV40j | ------------------------------------------------------------ |
| NOV40k | ------------------------------------------------------------ |
| NOV40l | ------------------------------------------------------------ |
| NOV40m | ------------------------------------------------------------ |
| NOV40n | ------------------------------------------------------------ |
| NOV40o | ------------------------------------------------------------ |
| NOV40p | ------------------------------------------------------------ |
| NOV40q | ------------------------------------------------------------ |
| NOV40r | ------------------------------------------------------------ |
| NOV40s | ------------------------------------------------------------ |
| NOV40t | ------------------------------------------------------------ |
| NOV40u | ------------------------------------------------------------ |
| NOV40v | ------------------------------------------------------------ |
| NOV40w | LTIGTNGCLKGMTAQGLELVLFTYHGNSGLLATKSDETGWTTFFDYDSEGRLTNVTFPTG |
| NOV40x | ------------------------------------------------------------ |
| NOV40y | ------------------------------------------------------------ |
| NOV40z | ------------------------------------------------------------ |
| NOV40aa | ------------------------------------------------------------ |
| NOV40ab | ------------------------------------------------------------ |
| NOV40ac | ------------------------------------------------------------ |
| NOV40a | ------------------------------------------------------------ |
| NOV40b | ------------------------------------------------------------ |
| NOV40c | ------------------------------------------------------------ |
| NOV40d | ------------------------------------------------------------ |
| NOV40e | ------------------------------------------------------------ |
| NOV40f | ------------------------------------------------------------ |
| NOV40g | ------------------------------------------------------------ |
| NOV40h | ------------------------------------------------------------ |
| NOV40i | ------------------------------------------------------------ |
| NOV40j | ------------------------------------------------------------ |
| NOV40k | ------------------------------------------------------------ |
| NOV40l | ------------------------------------------------------------ |
| NOV40m | ------------------------------------------------------------ |
| NOV40n | ------------------------------------------------------------ |
| NOV40o | ------------------------------------------------------------ |
| NOV40p | ------------------------------------------------------------ |
| NOV40q | ------------------------------------------------------------ |
| NOV40r | ------------------------------------------------------------ |
| NOV40s | ------------------------------------------------------------ |
| NOV40t | ------------------------------------------------------------ |
| NOV40u | ---------MDVKERRPYCSLTKSRREKBRRYTNSSADNEECRVPTQKSYSSSETLKAFD |
| NOV40v | ------------------------------------------------------------ |
| NOV40w | VVTNLHGDMDKAITVDIESSSREEDVSITSNLSSIDSFYTMVQDQLRNSYQIGYDGSLRI |
| NOV40x | ------------------------------------------------------------ |
| NOV40y | ------------------------------------------------------------ |
| NOV40z | ------------------------------------------------------------ |
| NOV40aa | ------------------------------------------------------------ |
| NOV40ab | ------------------------------------------------------------ |
| NOV40ac | ------------------------------------------------------------ |
| NOV40a | ------------------------------------------------------------ |
| NOV40b | ------------------------------------------------------------ |
| NOV40c | ------------------------------------------------------------ |
| NOV40d | ------------------------------------------------------------ |
| NOV40e | ------------------------------------------------------------ |
| NOV40f | ------------------------------------------------------------ |
| NOV40g | ------------------------------------------------------------ |
| NOV40h | ------------------------------------------------------------ |
| NOV40i | ------------------------------------------------------------ |
| NOV40j | ------------------------------------------------------------ |
| NOV40k | ------------------------------------------------------------ |
| NOV40l | ------------------------------------------------------------ |
| NOV40m | ------------------------------------------------------------ |
| NOV40n | ------------------------------------------------------------ |
| NOV40o | ------------------------------------------------------------ |
| NOV40p | ------------------------------------------------------------ |
| NOV40q | ------------------------------------------------------------ |
| NOV40r | ------------------------------------------------------------ |
| NOV40s | ------------------------------------------------------------ |
| NOV40t | ------------------------------------------------------------ |
| NOV40u | HDSSRLLYGNRVKDLVHREADEFTRQGQNFTLRQLGVCEPATRRGLAFCAENGLPHRGYS |
| NOV40v | ------------------------------------------------------------ |
| NOV40w | IYASGLDSHYQTEPHVLAGTANPTVAKRNMTLPGENGQNLVEWRFRKEQAQGKVNVFGRK |
| NOV40x | ------------------------------------------------------------ |
| NOV40y | ------------------------------------------------------------ |
| NOV40z | ------------------------------------------------------------ |
| NOV40aa | ------------------------------------------------------------ |
| NOV40ab | ------------------------------------------------------------ |
| NOV40ac | ------------------------------------------------------------ |
| NOV40a | ------------------------------------------------------------ |
| NOV40b | ------------------------------------------------------------ |
| NOV40c | ------------------------------------------------------------ |
| NOV40d | ------------------------------------------------------------ |
| NOV40e | ------------------------------------------------------------ |
| NOV40f | ------------------------------------------------------------ |
| NOV40g | ------------------------------------------------------------ |
| NOV40h | ------------------------------------------------------------ |
| NOV40i | ------------------------------------------------------------ |
| NOV40j | ------------------------------------------------------------ |
| NOV40 k | ------------------------------------------------------------ |
| NOV40l | ------------------------------------------------------------ |
| NOV40m | ------------------------------------------------------------ |
| NOV40n | ------------------------------------------------------------ |
| NOV40o | ------------------------------------------------------------ |
| NOV40p | ------------------------------------------------------------ |
| NOV40q | ------------------------------------------------------------ |
| NOV40r | ------------------------------------------------------------ |
| NOV40s | ------------------------------------------------------------ |
| NOV40t | ------------------------------------------------------------ |
| NOV40u | ISAGSDADTENEAVMSPEHAMRLWGRGVKSGRSSCLSSRSNSALTLTDTEHENKSDSENE |
| NOV40v | ------------------------------------------------------------ |
| NOV40w | LRVNGRNLLSVDFDRTTKTEKIYDDHRKFLLRIAYDTSGHPTLWLPSSKLMAVNVTYSST |
| NOV40x | ------------------------------------------------------------ |
| NOV40y | ------------------------------------------------------------ |
| NOV40z | ------------------------------------------------------------ |
| NOV40aa | ------------------------------------------------------------ |
| NOV40ab | ------------------------------------------------------------ |
| NOV40ac | ------------------------------------------------------------ |
| NOV40a | ------------------------------------------------------------ |
| NOV40b | ------------------------------------------------------------ |
| NOV40c | ------------------------------------------------------------ |
| NOV40d | ------------------------------------------------------------ |
| NOV40e | ------------------------------------------------------------ |
| NOV40f | ------------------------------------------------------------ |
| NOV40g | ------------------------------------------------------------ |
| NOV40h | ------------------------------------------------------------ |
| NOV40i | ------------------------------------------------------------ |
| NOV40j | ------------------------------------------------------------ |
| NOV40k | ------------------------------------------------------------ |
| NOV40l | ------------------------------------------------------------ |
| NOV40m | ------------------------------------------------------------ |
| NOV40n | ------------------------------------------------------------ |
| NOV40o | ------------------------------------------------------------ |
| NOV40p | ------------------------------------------------------------ |
| NOV40q | ------------------------------------------------------------ |
| NOV40r | ------------------------------------------------------------ |
| NOV40s | ------------------------------------------------------------ |
| NOV40t | ------------------------------------------------------------ |
| NOV40u | QPASNQGQSTLQPLPPSHKQHSAQHHPSITSLNRNSLTNRRNQSPAPPAALPAELQTTPE |
| NOV40v | ------------------------------------------------------------ |
| NOV40w | GQIASIQRGTTSEKVDYDGQGRIVSRVFADGKTWSYTYLEKSMVLLLHSQRQYIFEYDMW |
| NOV40x | ------------------------------------------------------------ |
| NOV40y | ------------------------------------------------------------ |
| NOV40z | ------------------------------------------------------------ |
| NOV40aa | ------------------------------------------------------------ |
| NOV40ab | ------------------------------------------------------------ |
| NOV40ac | ------------------------------------------------------------ |
| NOV40a | --------------------MDVKERRPYCSLTKSRREKERRYTNSSADNEECRVPTQK |
| NOV40b | ------------------------------------------------------------ |
| NOV40c | ------------------------------------------------------------ |
| NOV40d | ------------------------------------------------------------ |
| NOV40e | ------------------------------------------------------------ |
| NOV40f | ------------------------------------------------------------ |
| NOV40g | ------------------------------------------------------------ |
| NOV40h | ------------------------------------------------------------ |
| NOV40i | ------------------------------------------------------------ |
| NOV40j | ------------------------------------------------------------ |
| NOV40k | ------------------------------------------------------------ |
| NOV40l | ------------------------------------------------------------ |
| NOV40m | ------------------------------------------------------------ |
| NOV40n | ------------------------------------------------------------ |
| NOV40o | ------------------------------------------------------------ |
| NOV40p | ------------------------------------------------------------ |
| NOV40q | ------------------------------------------------------------ |
| NOV40r | ------------------------------------------------------------ |
| NOV40s | ------------------------------------------------------------ |
| NOV40t | ------------------------------------------------------------ |
| NOV40u | SVQLQDSWVLGSNVPLESRHFLFKTGTGTTPLFSTATPGYTMASGSVYSPPTRPLPRNTL |
| NOV40v | ------------------------------------------------------------ |
| NOV40w | DRLSAITNPSVARHTNQTIRSIGYYRNIYNPPESNASIITDYNEEGLLLQTAFLGTSRRV |
| NOV40x | ------------------------------------------------------------ |
| NOV40y | ------------------------------------------------------------ |
| NOV40z | ------------------------------------------------------------ |
| NOV40aa | ------------------------------------------------------------ |
| NOV40ab | ------------------------------------------------------------ |
| NOV40ac | ------------------------------------------------------------ |
| NOV40a | SYSSSETLKAFDHDSSRLLYGNRVKDLVHREADEFTRQGQNFTLRQLGVCEPATRRGLAF |
| NOV40b | ------------------------------------------------------------ |
| NOV40c | ------------------------------------------------------------ |
| NOV40d | ------------------------------------------------------------ |
| NOV40e | ------------------------------------------------------------ |
| NOV40f | ------------------------------------------------------------ |
| NOV40g | ------------------------------------------------------------ |
| NOV40h | ------------------------------------------------------------ |
| NOV40i | ------------------------------------------------------MDVKER |
| NOV40j | ------------------------------------------------------------ |
| NOV40k | ------------------------------------------------------------ |
| NOV40l | ------------------------------------------------------------ |
| NOV40m | ------------------------------------------------------------ |
| NOV40n | ------------------------------------------------------------ |
| NOV40o | ------------------------------------------------------------ |
| NOV40p | ------------------------------------------------------------ |
| NOV40q | ------------------------------------------------------------ |
| NOV40r | ------------------------------------------------------------ |
| NOV40s | ------------------------------------------------------------ |
| NOV40t | ------------------------------------------------------------ |
| NOV40u | SRSAFKFKKSSKYCSWKCTALCAVGVSVLLAILLSYFIAMHLFGLNWQLQQTENDTFENG |
| NOV40v | ------------------------------------------------------------ |
| NOV40w | LFKYRRQTRLSEILYDSTRVSFTYDETAGVLKTVNLQSDGFICTIRYRQIGPLIDRQIFR |
| NOV40x | ------------------------------------------------------------ |
| NOV40y | ------------------------------------------------------------ |
| NOV40z | ------------------------------------------------------------ |
| NOV40aa | ------------------------------------------------------------ |
| NOV40ab | ------------------------------------------------------------ |
| NOV40ac | ------------------------------------------------------------ |
| NOV40a | CAEMGLPHRGYSISAGSDADTENEAVMSPEHANRLWGRGVKSGRSSCLSSRSNSALTLTD |
| NOV40b | ------------------------------------------------------------ |
| NOV40c | ------------------------------------------------------------ |
| NOV40d | ------------------------------------------------------------ |
| NOV40e | ------------------------------------------------------------ |
| NOV40f | ------------------------------------------------------------ |
| NOV40g | ------------------------------------------------------------ |
| NOV40h | ------------------------------------------------------------ |
| NOV40i | RPYCSLTKSRREKERRYTNSSADNEECRVPTQKSYSSSETLKAFDHDSSRLLYGNRVKDL |
| NOV40j | ------------------------------------------------------------ |
| NOV40k | ------------------------------------------------------------ |
| NOV40l | ------------------------------------------------------------ |
| NOV40m | ------------------------------------------------------------ |
| NOV40n | ------------------------------------------------------------ |
| NOV40o | ------------------------------------------------------------ |
| NOV40p | ------------------------------------------------------------ |
| NOV40q | ------------------------------------------------------------ |
| NOV40r | ------------------------------------------------------------ |
| NOV40s | ------------------------------------------------------------ |
| NOV40t | ------------------------------------------------------------ |
| NOV40u | KVNSDTMPTNTVSLPSGDNGKLGGFTQENNTIDSGELDIGRRAIQEIPPGIFWRSQLFID |
| NOV40v | ------------------------------------------------------------ |
| NOV40w | FSEDGMVNARFDYSYDNSFRVTSMQGVINETPLPIDLYQFDDISGKVEQFGKFGVIYYDI |
| NOV40x | ------------------------------------------------------------ |
| NOV40y | ------------------------------------------------------------ |
| NOV40z | ------------------------------------------------------------ |
| NOV40aa | ------------------------------------------------------------ |
| NOV40ab | ------------------------------------------------------------ |
| NOV40ac | ------------------------------------------------------------ |
| NOV40a | TEHENKSDSENEQPASNQGQSTLQPLPPSHKQHSAQHHPSITSLNRNSLTNRRNQSPAPP |
| NOV40b | ------------------------------------------------------------ |
| NOV40c | ------------------------------------------------------------ |
| NOV40d | ------------------------------------------------------------ |
| NOV40e | ------------------------------------------------------------ |
| NOV40f | ------------------------------------------------------------ |
| NOV40g | ------------------------------------------------------------ |
| NOV40h | ------------------------------------------------------------ |
| NOV40i | VHREADEFTRQEQPASNQGQSTLQPLPPSHKQHSAQHHPSITSLNRNSLTNRRNQSPAPP |
| NOV40j | ------------------------------------------------------------ |
| NOV40k | ------------------------------------------------------------ |
| NOV40l | ------------------------------------------------------------ |
| NOV40m | ------------------------------------------------------------ |
| NOV40n | ------------------------------------------------------------ |
| NOV40o | ------------------------------------------------------------ |
| NOV40p | ------------------------------------------------------------ |
| NOV40q | ------------------------------------------------------------ |
| NOV40r | ------------------------------------------------------------ |
| NOV40s | ------------------------------------------------------------ |
| NOV40t | ------------------------------------------------------------ |
| NOV40u | QPQFLKFNISLQKDALIGVYGRKKLPPSHTQSSPQYDFVELLDGSRLIAREQRSLLETER |
| NOV40v | ------------------------------------------------------------ |
| NOV40w | NQIISTAVMTYTKHFDAHGRIKEIQYEIFRSLMYWITIQYDNMGRVTKREIKIGPFANTT |
| NOV40x | ------------------------------------------------------------ |
| NOV40y | ------------------------------------------------------------ |
| NOV40z | ------------------------------------------------------------ |
| NOV40aa | ------------------------------------------------------------ |
| NOV40ab | ------------------------------------------------------------ |
| NOV40ac | ------------------------------------------------------------ |
| NOV40a | AALPAELQTTPESVQLQDSWVLGSNVPLESRHFLFKTGTGTTPLFSTATPGYTMASGSVY |
| NOV40b | ------------------------------------------------------------ |
| NOV40c | ------------------------------------------------------------ |
| NOV40d | ------------------------------------------------------------ |
| NOV40e | ------------------------------------------------------------ |
| NOV40f | ------------------------------------------------------------ |
| NOV40g | ------------------------------------------------------------ |
| NOV40h | ------------------------------------------------------------ |
| NOV40i | AALPAELQTTPESVQLQDSWVLGSNVPLESRHFLFKTGTGTTPLFSTATPGYTMASGSVY |
| NOV40j | ------------------------------------------------------------ |
| NOV40k | ------------------------------------------------------------ |
| NOV40l | ------------------------------------------------------------ |
| NOV40m | ------------------------------------------------------------ |
| NOV40n | ------------------------------------------------------------ |
| NOV40o | ------------------------------------------------------------ |
| NOV40p | ------------------------------------------------------------ |
| NOV40q | ------------------------------------------------------------ |
| NOV40r | ------------------------------------------------------------ |
| NOV40s | ------------------------------------------------------------ |
| NOV40t | ------------------------------------------------------------ |
| NOV40u | AGRQARSVSLHEAGFIQYLDSGIWHLAFYNDGKNAEQVSFNTIVIESVVECPRNCHGNGE |
| NOV40v | ------------------------------------------------------------ |
| NOV40w | KYAYEYDVDGQLQTVYLNEKIMWRYNYDLNGNLHLLNPSNSARLTPLRYDLRDRITRLGD |
| NOV40x | ------------------------------------------------------------ |
| NOV40y | ------------------------------------------------------------ |
| NOV40z | ------------------------------------------------------------ |
| NOV40aa | ------------------------------------------------------------ |
| NOV40ab | ------------------------------------------------------------ |
| NOV40ac | ------------------------------------------------------------ |
| NOV40a | SPPTRPLPRNTLSRSAFKFKKSSKYCSWKCTALCAVGVSVLLAILLSYFIAMHLFGLNWQ |
| NOV40b | ------------------------------------------------------------ |
| NOV40c | -------------------------------------------------------GTNWQ |
| NOV40d | -------------------------------------------------------GTNWQ |
| NOV40e | -------------------------------------------------------GTNWQ |
| NOV40f | ------------------------------------------------------TKLNWQ |
| NOV40g | ------------------------------------------------------------ |
| NOV40h | ------------------------------------------------------------ |
| NOV40i | SPPTRPLPRNTLSRSAFKFKKSSKYCSWKCTALCAVGVSVLLAILLSYFIAMHLFGLNWQ |
| NOV40j | ------------------------------------------------------------ |
| NOV40k | ------------------------------------------------------------ |
| NOV40l | ------------------------------------------------------------ |
| NOV40m | ------------------------------------------------------------ |
| NOV40n | ------------------------------------------------------------ |
| NOV40o | ------------------------------------------------------------ |
| NOV40p | ------------------------------------------------------------ |
| NOV40q | ---------------------------------------------------------NWQ |
| NOV40r | ------------------------------------------------------TSRNWQ |
| NOV40s | ------------------------------------------------------------ |
| NOV40t | ------------------------------------------------------------ |
| NOV40u | CVSGTCHCFPGFLGPDCSRAACPVLCSGNGQYSKGRCLCFSGWKGTECDVPTTQCIDPQC |
| NOV40v | ------------------------------------------------------------ |
| NOV40w | VQYRLDEDGFLRQRGTEIFEYSSKGLLTRVYSKGSGWTVIYRYDGLGRRVSSKTSLGQHL |
| NOV40x | ---------------------------------------------------------NWQ |
| NOV40y | ---------------------------------------------------------NWQ |
| NOV40z | ---------------------------------------------------------NWQ |
| NOV40aa | ----------------------------------------MLPGLALLLLAAWTARANWQ |
| NOV40ab | ------------------------------------------------------------ |
| NOV40ac | ------------------------------------------------------------ |
| NOV40a | LQQTENDTFENGKVNSDTMPTNTVSLPSGDNGKLGGFTQENNTIDSGELDIGRRAIQEIP |
| NOV40b | ------------------------------------------------------------ |
| NOV40c | LQQTENDTFENGKVNSDTMPTNTVSLPSGDNGKLGGFTQENNTIDSGELDIGRRAIQEIP |
| NOV40d | LQQTENDAFENGKVNSDTMPTNTVSLPSGDNGKLGGFTQENNTIDSGELDIGRRAIQEIP |
| NOV40e | LQQTENDTFENGKVNSDTMPTNTVSLPSGDNGKLGGFTQENNTIDSGELDIGRRAIQEIP |
| NOV40f | LQQTENDAFENGKVNSDTMPTNTVSLPSGDNGKLGGFTQENNTIDSGELDIGRRAIQEIP |
| NOV40g | ------------------------------------------------------------ |
| NOV40h | ------------------------------------------------------------ |
| NOV40i | LQQTENDTFENGKVNSDTMPTNTVSLPSGDNGKLGGFTQENNTIDSGELDIGRRAIQEIP |
| NOV40j | ------------------------------------------------------------ |
| NOV40k | ------------------------------------------------------------ |
| NOV40l | ------------------------------------------------------------ |
| NOV40m | ------------------------------------------------------------ |
| NOV40n | ------------------------------------------------------------ |
| NOV40o | ------------------------------------------------------------ |
| NOV40p | ------------------------------------------------------------ |
| NOV40q | LQQTENDTFENGKVNSDTMPTNTVSLPSGDNGKLGGFTQENNTIDSGELDIGRRAIQEIP |
| NOV40r | LQQTENDTFENGKVNSDTMPTNTVSLPSGDNGKLGGFTQENNTIDSGELDIGRRAIQEIP |
| NOV40s | ------------------------------------------------------------ |
| NOV40t | ------------------------------------------------------------ |
| NOV40u | GGRGICTMGSCACSSGYKGESCEEADCIDPGCSNHGVCIHGECHCSPGWGGSNCEILKTM |
| NOV40v | ------------------------------------------------------------ |
| NOV40w | QFFYADLTYPTRITHVYNHSSSEITSLYYDLQGHLFANEISSGDEFYIASDNTGTPLAVF |
| NOV40x | LQQTENDAFENGKVNSDTMPTNTVSLPSGDNGKLGGFTQENNTIDSGELDIGRRAIQEIP |
| NOV40y | LQQTENDTFENGKVNSDTMPTNTVSLPSGDNGKLGGFTQENNTIDSGELDIGRRAIQEIP |
| NOV40z | LQQTENDAFENGKVNSDTMPTNTVSLPSGDNGKLGGFTQENNTIDSGELDIGRRAIQEIP |
| NOV40aa | LQQTENDTFENGKVNSDTMPTNTVSLPSGDNGKLGGFTQENNTIDSGELDIGRRAIQEIP |
| NOV40ab | ------------------------------------------------------------ |
| NOV40ac | ------------------------------------------------------------ |
| NOV40a | PGIFWRSQLFIDQPQFLKFNISLQKDALIGVYGRKKLPPSHTQSSPQYDFVELLDGSRLI |
| NOV40b | ------------------------------------------------------------ |
| NOV40c | PGIFWRSQLFIDQPQFLKFNISLQKDALIGVYGRKGLPPSHT----QYDFVELLDGSRLI |
| NOV40d | PGIFWRSQLFIDQPQFLKFNISLQKDALIGVYGRKGLPPSHT----QYDFVELLDGSRLI |
| NOV40e | PGIFWRSQLFIDQPQFLKFNISLQKDALIGVYGRKGLPPSHT----QYDFVELLDGSRLI |
| NOV40f | PGIFWRSQLFIDQPQFLKFNISLQKDALIGVYGRKGLPPSHT----QYDFVELLDGSRLI |
| NOV40g | ------------------------------------------------------------ |
| NOV40h | ------------------------------------------------------------ |
| NOV40i | PGIFWRSQLFIDQPQFLKFNISLQKDALIGVYGRKGLPPSNT----QYDFVELLDGSRLI |
| NOV40j | ------------------------------------------------------------ |
| NOV40k | ------------------------------------------------------------ |
| NOV40l | ------------------------------------------------------------ |
| NOV40m | ------------------------------------------------------------ |
| NOV40n | ------------------------------------------------------------ |
| NOV40o | ------------------------------------------------------------ |
| NOV40p | ------------------------------------------------------------ |
| NOV40q | PGIFWRSQLFIDQPQFLKFNISLQKDALIGVYGRKGLPPSHT----QYDFVELLDGSRLI |
| NOV40r | PGIFWRSQLFIDQPQFLKFNISLQKDALIGVYGRKGLPPSHT----QYDFVELLDGSRLI |
| NOV40s | ------------------------------------------------------------ |
| NOV40t | ------------------------------------------------------------ |
| NOV40u | CPDQCSGHGTYLQESGSCTCDPNWTGPDCSNEICSVDCGSHG----VCMGGTCRCEEGWT |
| NOV40v | ------------------------------------------------------------ |
| NOV40w | SSNGLMLKQIQYTAYGEIYFDSNIDFQLVIGFHGGLYDPLTKLIHFGERDYDILAGRWTT |
| NOV40x | PGIFWRSQLFIDQPQFLKFNISLQKDALIGVYGRKGLPPSHT----QYDFVELLDGSRLI |
| NOV40y | PGIFWRSQLFIDQPQFLKFNISLQKDALIGVYGRKGLPPSHT----QYDFVELLDGSRLI |
| NOV40z | PGIFWRSQLFIDQPQFLKFNISLQKDALIGVYGRKGLPPSHT----QYDFVELLDGSRLI |
| NOV40aa | PGIFWRSQLFIDQPQFLKFNISLQKDALIGVYGRKGLPPSHT----QYDFVELLDGSRLI |
| NOV40ab | ------------------------------------------------------------ |
| NOV40ac | ------------------------------------------------------------ |
| NOV40a | AREQRSLLETERAGRQARSVSLHEAGFIQYLDSGIWHLAFYNDGKNAEQVSFNTIVIESV |
| NOV40b | ------------------------------------------------------------ |
| NOV40c | AREQRSLLETERAGRQARSVSLHEAGFIQYLDSGIWHLAFYNDGKNAEQVSFNTIVIESV |
| NOV40d | AREQRSLLETERAGRQARSVSLHEAGFIQYLDSGIWHLAFYNDGKNAEQVSFNTIVIESV |
| NOV40e | AREQRSLLETERAGRQARSVSLHEAGFIQYLDSGIWHLAFYNDGKNAEQVSFNTIVIESV |
| NOV40f | AREQRSLLETERAGRQARSVSLHEAGFIQYLDSGIWHLAFYNDGKNAEQVSFNTIVIESV |
| NOV40g | ------------------------------------------------------------ |
| NOV40h | ------------------------------------------------------------ |
| NOV40i | AREQRSLLETERAGRQARSVSLHEAGFIQYLDSGIWHLAFYNDGKNAEQVSFNTIVIESV |
| NOV40j | ------------------------------------------------------------ |
| NOV40k | ------------------------------------------------------------ |
| NOV40l | ------------------------------------------------------------ |
| NOV40m | ------------------------------------------------------------ |
| NOV40n | ------------------------------------------------------------ |
| NOV40o | ------------------------------------------------------------ |
| NOV40p | ------------------------------------------------------------ |
| NOV40q | AREQRSLLETERAGRQARSVSLHEAGFIQYLDSGIWHLAFYNDGKNAEQVSFNTIVIESV |
| NOV40r | AREQRSLLETERAGRQARSVSLHEAGFIQYLDSGIWHLAFYNDGKNAEQVSFNTIVIESV |
| NOV40s | ------------------------------------------------------------ |
| NOV40t | ------------------------------------------------------------ |
| NOV40u | GPACNQRACHPRCAEHGTCKDGKCECSQGWNGEHCTIAHYLDKIVKDKIGYKEGCPGLCN |
| NOV40v | ------------------------------------------------------------ |
| NOV40w | PDIEIWKRIGKDPAPFNLYMFRNNNPASKIHDVKDYITDVNSWLVTFGFHLHNAIPGFPV |
| NOV40x | AREQRSLLETERAGRQARSVSLHEAGFIQYLDSGIWHLAFYNDGKNAEQVSFNTIVIESV |
| NOV40y | AREQRSLLETERAGRQARSVSLHEAGFIQYLDSGIWHLAFYNDGKNAEQVSFNTIVIESV |
| NOV40z | AREQRSLLETERAGRQARSVSLHEAGFIQYLDSGIWHLAFYNDGKNAEQVSFNTIVIESV |
| NOV40aa | AREQRSLLETERAGRQARSVSLHEAGFIQYLDSGIWHLAFYNDGKNAEQVSFNTIVIESV |
| NOV40ab | ------------------------------------------------------------ |
| NOV40ac | ------------------------------------------------------------ |
| NOV40a | VECPRNCHGNGECVSGTCHCFPGFLGPDCSRAACPVLCSGNGQYSKGRCLCFSGWKGTEC |
| NOV40b | --CPRNCHGNGECVSGTCHCFPGFLGPDCSRAACPVLCSGNGQYSKGRCLCFSGWKGTEC |
| NOV40c | VECPRNCHGNGECVSGTCHCFPGFLGPDCSRAACPVLCSGNGQYSKGRCLCFSGWKGTEC |
| NOV40d | VECPRNCHGNGECVSGTCHCFPGFLGPDCSRAACPVLCSGNGQYSKGRCLCFSGWKGTEC |
| NOV40e | VECPRNCHGNGECVSGTCHCFPGFLGPDCSRAACPVLCSGNGQYSKGRCLCFSGWKGTEC |
| NOV40f | VECPRNCHGNGECVSGTCHCFPGFLGPDCSRAACPVLCSGNGQYSKGRCLCFSGWKGTEC |
| NOV40g | --TSRTEPSYELVKSQQWDDIPPIFGVQQQVARQAKAFLSLG---KMAEVQVSRRRAGGA |
| NOV40h | --------------------------SMDVKERRPYCSLTKSRREKERRYTNSSADNEEC |
| NOV40i | VECPRNCHGNGECVSGTCHCFPGFLGPDCSRAACPVLCSGNGQYSKGRCLCFSGWKGTEC |
| NOV40j | -----KLDQNG-----------------------------------GHCVCQPGWRGAGC |
| NOV40k | -----KLDQNG-----------------------------------GHCVCQPGWRGAGC |
| NOV40l | -----KLDQNG-----------------------------------GHCVCQPGWRGAGC |
| NOV40m | -----KLDQNG-----------------------------------GHCVCQPGWRGAGC |
| NOV40n | -----KLDQNG-----------------------------------GHCVCQPGWRGAGC |
| NOV40o | -----KLDQNG-----------------------------------GHCVCQPGWRGAGC |
| NOV40p | -----KLDQNG-----------------------------------GHCVCQPGWRGAGC |
| NOV40q | VECPRNCHGNGECVSGTCHCFPGFLGPDCSRAACPVLCSGNGQYSKGRCLCFSGWKGTEC |
| NOV40r | VECPRNCHGNGECVSGTCHCFPGFLGPDCSRAACPVLCSGNGQYSKGRCLCFSGWKGTEC |
| NOV40s | ---------------------------MDVKERRPYCSLTKSRREKERRYTNSSADNEEC |
| NOV40t | --CPRNCHGNGECVSGTCHCFPGFLGPDCSRAACPVLCSGNGQYSKGRCLCFSGWKGTEC |
| NOV40u | SNGRCTLDQNG-----------------------------------GHCVCQPGWRGAGC |
| NOV40v | -------DQNG-----------------------------------GHCVCQPGWRGAGC |
| NOV40w | PKFDLTEPSYELVKSQQWDDIPPIFGVQQQVARQAKAFLSLG---KMAEVQVSRRRAGGA |
| NOV40x | VECPRNCHGNGECVSGTCHCFPGFLGPDCSRAACPVLCSGNGQYSKGRCLCFSGWKGTEC |
| NOV40y | VECPRNCHGNGECVSGTCHCFPGFLGPDCSRAACPVLCSGNGQYSKGRCLCFSGWKGTEC |
| NOV40z | VECPRNCHGNGECVSGTCHCFPGFLGPDCSRAACPVLCSGNGQYSKGRCLCFSGWKGTEC |
| NOV40aa | VECPRNCHGNGECVSGTCHCFPGFLGPDCSRAACPVLCSGNGQYSKGRCLCFSGWKGTEC |
| NOV40ab | ---------------------------MDVKERRPYCSLTKSRREKERRYTNSSADNEEC |
| NOV40ac | ---------------------------MDVKERRPYCSLTKSRREKERRYTNSSADNEEC |
| NOV40a | DVPTTQCIDPQCGGRGICINGSCACSSGYKGESCEEADCIDPGCSNHGVCIHGECHCSPG |
| NOV40b | DVPTTQCIDPQCGGRGICIMGSCACNSGYKGESCEEADCIDPGCSNHGVCIHGECHCSPG |
| NOV40c | DVPTTQCIDPQCGGRGICIMGSCACNSGYKGESCEEADCIDPGCSNHGVCIHGECHCSPG |
| NOV40d | DVPTTQCIDPQCGGRGICIMGSCACNSGYKGESCEEADCIDPGCSNHGVCIHGECHCSPG |
| NOV40e | DVPTTQCIDPQCGGRGICIMGSCACNSGYKGESCEEADCIDPGCSNHGVCIHGECHCSPG |
| NOV40f | DVPTTQCIDPQCGGRGICIMGSCACNSGYKGESCEEADCIDPGCSNHGVCIHGECHCSPG |
| NOV40g | QSWLWFATVKSLIGKGVMLAVSQG-RVQTNVLNIANEDCIKVAAVLNNAFYLENLHFTIE |
| NOV40h | RVPTQKSYSSSE----------------TLKAFDHDSSRLLYGNRVKDLVHREADEFTRQ |
| NOV40i | DVPTTQCIDPQCGGRGICIMGSCACNSGYKGKSCEEADCIDPGCSNHGVCIHGECHCSPG |
| NOV40j | DVAMETLCTDSK-----------------DNEGDGLIDCMDPDCCLQSSCQN-QPYCRGL |
| NOV40k | DVAMETLCTDSK-----------------DNEGDGLIDCMDPDCCLQSSCQN-QPYCRGL |
| NOV40l | DVAMETLCTDSK-----------------DNEGDGLIDCMDPDCCLQSSCQN-QPYCRGL |
| NOV40m | DVANETLCTDSK-----------------DNEGDGLIDCMDPDCCLQSSCQN-QPYCRGL |
| NOV40n | DVAMETLCTDSK-----------------DNEGDGLIDCMDPDCCLQSSCQN-QPYCRGL |
| NOV40o | DVAMETLCTDSK-----------------DNEGDGLIDCMDPDCCLQSSCQN-QPYCRGL |
| NOV40p | DVAMETLCTDSK-----------------DNEGDGLIDCMDPDCCLQSSCQN-QSYCRGL |
| NOV40q | DVPTTQCIDPQCGGRGICIMGSCACNSGYKGESCEEADCIDPGCSNHGVCIHGECHCSPG |
| NOV40r | DVPTTQCIDPQCGGRGICIMGSCACNSGYKGESCEEADCIDPGCSNHGVCIHGECHCSPG |
| NOV40s | RVPTQKSYSSSE----------------TLKAFDHDSSRLLYGNRVKDLVHREADEFTRQ |
| NOV40t | DVPTTQCIDPQCGGRGICIMGSCACNSGYKGESCEEADCIDPGCSNHGVCIHGECHCSPG |
| NOV40u | DVAMETLCTDSK-----------------DNEGDGLIDCMDPDCCLQSSCQN-QPYCRGL |
| NOV40v | DVAMETLCTDSK-----------------DNEGDGLIDCMDPDCCLQSSCQN-QPYCRGL |
| NOV40w | QSWLWFATVKSLIGKGVMLAVSQG-RVQTNVLNIANEDCIKVAAVLNNAFYLENLHFTIE |
| NOV40x | DVPTTQCIDPQCGGRGICIMGSCACNSGYKGESCEEADCIDPGCSNHGVCIHGECHCSPG |
| NOV40y | DVPTTQCIDPQCGGRGICIMGSCACNSGYKGESCEEADCIDPGCSNHGVCIHGECHCSPG |
| NOV40z | DVPTTQCIDPQCGGRGICIMGSCACNSGYKGESCEEADCIDPGCSNHGVCIHGECHCSPG |
| NOV40aa | DVPTTQCIDPQCGGRGICIMGSCACNSGYKGESCEEADCIDPGCSNHGVCIHGECHCSPG |
| NOV40ab | RVPTHNSYSSSE----------------TLKAFDHDSSRLLYGNRVKDLVHREADEFTRQ |
| NOV40ac | RVPTQKSYSSSE----------------TLKAFDHDSSRLLYGNRVKDLVHREADEFTRQ |
| NOV40a | WGGSNCEILKTMCPDQCSGHGTYLQESGSCTCDPNWTGPDCSNEICSVDCGSHGVCMGGT |
| NOV40b | WGGSNCEILKTMCPDQCSGHGTYLQESGSCTCDPNWTGPDCSNEICSVDCGSHGVCMGGT |
| NOV40c | WGGSNCEILKTMCPDQCSGHGTYLQESGSCTCDPNWTGPDCSNEICSVDCGSHGVCMGGT |
| NOV40d | WGGSNCEILKTMCPDQCSGHGTYLQESGSCTCDPNWTGPDCSNEICSVDCGSHGVCMGGT |
| NOV40e | WGGSNCEILKTMCPDQCSGHGTYLQESGSCTCDPNWTGPDCSNEICSVDCGSHGVCMGGT |
| NOV40f | WGGSNCEILKTMCPDQCSGHGTYLQESGSCTCDPNWTGPDCSNEICSVDCGSHGVCMGGT |
| NOV40g | -GKDTHYFIKTTTPESDLGTLRLTSGRKALENGINVTVSQSTTVVNGRTRRFADVEMQFG |
| NOV40h | EQPASNQGQSTLQPLPPSHKQHSAQHHPSITSLNRNSLTNRRNQSPAPPAALPAELQTTP |
| NOV40i | WGGSNCEILKTMCPDQCSGHGTYLQESGSCTCDPNWTGPDCSNEICSVDCGSHGVCMGGT |
| NOV40j | PDPQDIISQSLQSPSQQAAKSFYDRISFLIGSDSTHVIPGES-----PFNKSLASVIRGQ |
| NOV40k | PDPQDIISQSLQSPSQQAAKSFYDRISFLIGSDSTHVIPGES-----PFNKSLASVIRGQ |
| NOV40l | PDPQDIISQSLQSPSQQAAKSFYDRISFLIGSDSTHVIPGES-----PFNKSLASVIRGQ |
| NOV40m | PDPQDIISQSLQSPSQQAAKSFYDRISFLIGSDSTHVIPGES-----PFNKSLASVIRGQ |
| NOV40n | PDPQDIISQSLQSPSQQAAKSFYDRISFLIGSDSTHVIPGES-----PFNKSLASVIRGQ |
| NOV40o | PDPQDIISQSLQSPSQQAAKSFYDRISFLIGSDSTHVIPGES-----PFNKSLASVIRGQ |
| NOV40p | PDPQDIISQSLQSPSQQAAKSFYDRISFLIGSDSTHVIPGES-----PFNKSLASVIRGQ |
| NOV40q | WGGSNCEILKThCPDQCSGHGTYLQESGSCTCDPNWTGPDCSNEICSVDCGSHGVCMGGT |
| NOV40r | WGGSNCEILKTMCPDQCSGHGTYLQESGSCTCDPNWTGPDCSNEICSVDCGSHGVCMGGT |
| NOV40s | GQNFTLRQLGVCEPATRRGLAFCAEMGLPHRGYSISAGSDADTENEAVMSPEHAMRLWGR |
| NOV40t | WGGSNCEILKTMCPDQCSGHGTYLQESGSCTCDPNWTGPDCSNEICSVDCGSHGVCMGGT |
| NOV40u | PDPQDIISQSLQSPSQQAAKSFYDRISFLIGSDSTHVIPGES-----PFNKSLASVIRGQ |
| NOV40v | PDPQDIISQSLQSPSQQAAKSFYDRISFLIGSDSTHVIPGES-----PFNKSLASVIRGQ |
| NOV40w | -GKDTHYFIKTTTPESDLGTLRLTSGRKALENGINVTVSQSTTVVNGRTRRFADVEMQFG |
| NOV40x | WGGSNCEILKTMCPDQCSGHGTYLQESGSCTCDPNWTGPDCSNEICSVDCGSHGVCMGGT |
| NOV40y | WGGSNCEILKTMCPDQCSGHGTYLQESGSCTCDPNWTGPDCSNEICSVDCGSHGVCMGGT |
| NOV40z | WGGSNCEILKTMCPDQCSGHGTYLQESGSCTCDPNWTGPDCSNEICSVDCGSHGVCMGGT |
| NOV40aa | WGGSNCEILKTMCPDQCSGHGTYLQESGSCTCDPNWTGPDCSNEICSVDCGSHGVCMGGT |
| NOV40ab | GQNFTLRQLGVCEPATRRGLAFCAEMGLPHRGYSISAGSDADTENEAVMSPEHAMRLWGR |
| NOV40ac | GONFTLRQLGVCEPATRRGLAFCAEMGLPHRGYSISAGSDADTENEAVMSPEHAMRLWGR |
| NOV40a | CRCEEGWTGPACNORACHPRCAEHGTCKDGKCECSQGWNGEHCTIAHYLDKIVKDKIGYK |
| NOV40b | CRCEEGWTGPACNQRACHPRCAEHGTCKDGKCECSQGWNGEHCTI--------------- |
| NOV40c | CRCEEGWTGPACNQRACHPRCAEHGTCKDGKCECSQGWNGEHCTI--------------- |
| NOV40d | CRCEEGWTGPACNQRACHPRCAEHGTCKDGKCECSQGWNGEHCTIAHYLDKIVKDKIGYK |
| NOV40e | CRCEEGWTGPACNQRACHPRCAEHGTCKDGKCECSQGWNGEHCTIAHYLDKIVK------ |
| NOV40f | CRCEEGWTGPACNQRACHPRCAEHGTCKDGKCECSQGWNGEHCTIAHYLDKIVKDKIGYK |
| NOV40g | ALALHVRYGMTLDEEKARILEQA------------QQRVRDG------------------ |
| NOV40h | ESVQLQDSWVLG-SNVPLESRHFLFKTGTGTTP--------------------------- |
| NOV40i | CRCEEGWTGPACNQRACHPRCAEHGTCKDGKCECSQGWNGEHCTIAHYLDKIVKDKIGYK |
| NOV40j | VLTADGTPLIGVNVSFFHYPEYGYTITRQ------------------------------- |
| NOV40k | VLTADGTPLIGVNVSFFHYPEYGYTITRQ------------------------------- |
| NOV40l | VLTADGTPLIGVNVSFFHYPEYGYTITRQ------------------------------- |
| NOV40m | VLTADGTPLIGVNVSFFHYPEYGYTITRQ------------------------------- |
| NOV40n | VLTADGTPLIGVNVSFFHYPEYGYTITRQ------------------------------- |
| NOV40o | VLTADGTPLIGVNVSFFHYPEYGYTITRQ------------------------------- |
| NOV40p | VLTADGTPLIGVNVSFFHYPEYGYTITRQ------------------------------- |
| NOV40q | CRCEEGWTGPACNQRACHPRCAEHGTCKDGKCECSQGWNGEHCTIAHYLDKIVK------ |
| NOV40r | CRCEEGWTGPACNQRACHPRCAEHGTCKDGKCECSQGWNGEHCTIAHYLKIVK------- |
| NOV40s | GVKSGRSSCLSSRSNSALTLTDTEHENKSDSENEQPASNQGQSTLQPLPPSHKQHSAQHH |
| NOV40t | CRCEEGWTGPACNQRACHPRCAEHGTCKDGKCECSQGWNGEHCTIAHYLDKIVK------ |
| NOV40u | VLTADGTPLIGVNVSFFHYPEYGYTITRQ------------------------------- |
| NOV40v | VLTADGTPLIGVNVSFFHYPEYGYTITRQ------------------------------- |
| NOV40w | ALALHVRYGMTLDEEKARILEQARQRALARAWAREQQRVRDGEEGARLWTEGEKRQL--- |
| NOV40x | CRCEEGWTGPACNQRACHPRCAEHGTCKDGKCECSQGWNGEHCTIAHYLDKIVKDKIGYK |
| NOV40y | CRCEEGWTGPACNQRACHPRCAEHGTCKDGKCECSQGWNGEHCTIAHYLDKIVK------ |
| NOV40z | CRCEEGWTGPACNQRACHPRCAEHGTCKDGKCECSQGWNGEHCTIAHYLDKIVKDKIGYK |
| NOV40aa | CRCEEGWTGPACNQRACHPRCABHGTCKDGKCECSQGWNGEHCTIAHYLDKIVK------ |
| NOV40ab | GFKSGRSSCLSSRSNSALTLTDTEHENKSDSEN--------------------------- |
| NOV40ac | GVKSGRSSCLSSRSNSALTLTDTEHENKSDSEN--------------------------- |
| NOV40a | ------------------------------------------------------------ |
| NOV40b | ------------------------------------------------------------ |
| NOV40c | ------------------------------------------------------------ |
| NOV40d | ------------------------------------------------------------ |
| NOV40e | ------------------------------------------------------------ |
| NOV40f | ------------------------------------------------------------ |
| NOV40g | ------------------------------------------------------------ |
| NOV40h | ------------------------------------------------------------ |
| NOV40i | ------------------------------------------------------------ |
| NOV40j | ------------------------------------------------------------ |
| NOV40k | ------------------------------------------------------------ |
| NOV40l | ------------------------------------------------------------ |
| NOV40m | ------------------------------------------------------------ |
| NOV40n | ------------------------------------------------------------ |
| NOV40o | ------------------------------------------------------------ |
| NOV40p | ------------------------------------------------------------ |
| NOV40q | ------------------------------------------------------------ |
| NOV40r | ------------------------------------------------------------ |
| NOV40s | PSITSLNRNSLTNRRNQSPAPPAALPAELQTTPESVQLQDSWVLGSNVPLESRHFLFKTG |
| NOV40t | ------------------------------------------------------------ |
| NOV40u | ------------------------------------------------------------ |
| NOV40v | ------------------------------------------------------------ |
| NOV40w | ------------------------------------------------------------ |
| NOV40x | ------------------------------------------------------------ |
| NOV40y | ------------------------------------------------------------ |
| NOV40z | ------------------------------------------------------------ |
| NOV40aa | ------------------------------------------------------------ |
| NOV40ab | ------------------------------------------------------------ |
| NOV40ac | ------------------------------------------------------------ |
| NOV40a | --EGCPGLCNSNGRCTLDQNGGHCVCQPGWRGAGCDVAMETLCTDSKDNEGDGLIDCMDP |
| NOV40b | --EGCPGLCNSNGRCTLDQNGWHCVCQPGWRGAGCD------------------------ |
| NOV40c | --EGCPGLSNSNGRCTLDQNGWHCVCQPGWRGAGCDVAMETLCTDSKDNEGDGLIDCMDP |
| NOV40d | --EGCPGLCNSNGRCTLDQNGWHCACQPGWRGAGCDVAMETLCTDSKDNEGDGLIDCMDP |
| NOV40e | --EGCPGLCNSNGRCTLDQNGWHCVCQPGWRGAGCDVAMETLCTDSKDNEGDGLIDCMDP |
| NOV40f | --EGCPGLCNSNGRCTLDQNGWHCACQPGWRGAGCDVAMETLCTDSKDNEGDGLIDCMDP |
| NOV40g | ------KVQGYDGYYVLSVEQYPELADSANNIQFLRQSEIGRRVDG-------------- |
| NOV40h | -----LFSTATPGYTMASGSVYSPPTRPLPRNTLSRSAFKFKKS-SKYCSWKCTALCAVG |
| NOV40i | --EGCPGLCNSNGRCTLDQNGGHCVCQPGWRGAGCDVAMETLCTDSKDNEGDGLIDCMDP |
| NOV40j | -----------DGMFDLVANGGASLTLVFERSP--------------------------- |
| NOV40k | -----------DGMFDLVASGGASLTLVFERSP--------------------------- |
| NOV40l | -----------DGMFDLVANGGASLTLVFERSP--------------------------- |
| NOV40m | -----------DGMFDLVANGGASLTLVFERSP--------------------------- |
| NOV40n | -----------DGMFDLVANGGASLTLVFERSP--------------------------- |
| NOV40o | -----------DGMFDLVANGGASLTLVFERSP--------------------------- |
| NOV40p | -----------DGMFDLVANGGASLTLVFERSP--------------------------- |
| NOV40q | --EGCPGLCNSNGRCTLDQNGWHCVCQPGWRGAGCDVAMETLCTDSKDNEGDGLIDCMDP |
| NOV40r | --EGCPGLCNSNGRCTLDQNGWHCVCQPGWRGAGCDVAMETLCTDSKDNEGDGLIDCMDP |
| NOV40s | TGTTPLFSTATPGYTMASGSVYSPPTRPLPRNTLSRSAFKFKKS-SKYCSWKCTALCAVG |
| NOV40t | --EGCPGLCNSNGRCTLDQNGWHCVCQPGWRGAGCD------------------------ |
| NOV40u | -----------DGMFDLVANGGASLTLVFERSP--------------------------- |
| NOV40v | -----------DGMFDLVANGGASLTLVFERSP--------------------------- |
| NOV40w | --LSAGKQGYDGYYVLSVEQYPELADSANNIQFLRQSEIGRR------------------ |
| NOV40x | --EGCPGLCNSNGRCTLDQNGWHCACQPGWRGAGCDVAMETLCTDSKDNEGDGLIDCMDP |
| NOV40y | --EGCPGLCNSNGRCTLDQNGWHCVCQPGWRGAGCDVAMETLCTDSKDNEGDGLIDCMDP |
| NOV40z | --EGCPGLCNSNGRCTLDQNGWHCACQPGWRGAGCDVAMETLCTDSKDNEGDGLIDCMDP |
| NOV40aa | --EGCPGLCNSNGRCTLDQNGWHCVCQPGWRGAGCDVANETLCTDSKDNEGDGLIDCMDP |
| NOV40ab | -----GGSSSWFGFHWNFYVSKASCLLRLPRIFLSHNYNVNKEMREKLC----------- |
| NOV40ac | -----GGSSSWFGFHWNFYVGKASCLLRLPRIFLSHNYNVNKEMREKLC----------- |
| NOV40a | DCCLQSSCQNQPYCRGLPDPQDIISOSLQSPSQQAAKSFYDRISFLIGSDSTHVIPGESP |
| NOV40b | ------------------------------------------------------------ |
| NOV40c | DCCLQSSCQNQPYCRGLPDPQDIISQSLQSPSQQAAKSFYDRISFLIGSDSTHVIPGESP |
| NOV40d | DCCLQSSCQNQPYCRGLPDPQGIISQSLQSPSQQAAKSFYDRISFLIGSDSTHVIPGESP |
| NOV40e | DCCLQSSCQNQPYCRGLPDPODIISQSLQSPSQQAAKSFYDRISFLIGSDSTHVIPGESP |
| NOV40f | DCCLQSSCQNQPYCRGLPDPQGIISQSLQSPSQQAAKSFYDRISFLIGSDSTHVIPGESP |
| NOV40g | ------------------------------------------------------------ |
| NOV40h | VSVLLAILLSYFIAMHLFGLNWQLQQTENDTFENGKVNSDTMPTNTVSLPSGDNGKLGGF |
| NOV40i | DCCLQSSCQNQPYCRGLPDPQDIISQSLQSPSQQAAKSFYDRISFLIGSDSTHVIPGESP |
| NOV40j | ------------------------------------------------------------ |
| NOV40k | ------------------------------------------------------------ |
| NOV40l | ------------------------------------------------------------ |
| NOV40m | ------------------------------------------------------------ |
| NOV40n | ------------------------------------------------------------ |
| NOV40o | ------------------------------------------------------------ |
| NOV40p | ------------------------------------------------------------ |
| NOV40q | DCCLQSSCQNQPYCRGLPDPQDIISOSLQSPSQQAAKSFYDRISFLIGSDSTHVIPGESP |
| NOV40r | DCCLQSSCQNQPYCRGLPDPQDIISQSLQSPSQQAAKSFYDRISFLIGSDSTHVIPGESP |
| NOV40s | VSVLLAILLSYFIAMHLFGLNWQLQQTENDTFENGKVNSDTMPTNTVSLPSGDNGKLGGF |
| NOV40t | ------------------------------------------------------------ |
| NOV40u | ------------------------------------------------------------ |
| NOV40v | ------------------------------------------------------------ |
| NOV40w | ------------------------------------------------------------ |
| NOV40x | DCCLQSSCQNQPYCRGLPDPQGIISQSLQSPSQQAAKSFYDRISFLIGSDSTHVIPGESP |
| NOV40y | DCCLQSSCQNQPYCRGLPDPQDIISQSLQSPSQQAAKSFYDRISFLIGSDSTHVIPGESP |
| NOV40z | DCCLQSSCQNQPYCRGLPDPQGIISQSLQSPSQQAAKSFYDRISFLIGSDSTHVIPGESP |
| NOV40aa | DCCLQSSCQNQPYCRGLPDPQDIISQSLQSPSQOAAKSFYDRISFLIGSDSTHVIPGESP |
| NOV40ab | ------------------------------------------------------------ |
| NOV40ac | ------------------------------------------------------------ |
| NOV40a | FNKSLASVIRGQVLTADGTPLIGVNVSFFHYPEYGYTITRQDGMFDLVANGGASLTLVFE |
| NOV40b | ------------------------------------------------------------ |
| NOV40c | FNKSLASVIRGQVLTADGTPLIGVNVSFFHYPEYGYTITRQDGMFDLVANGGASLTLVFE |
| NOV40d | FNKSLASVIRGQVLTADGTPLIGVNVSFFHYPEYGYTITRQDGMFDLVANGGASLTLVFE |
| NOV40e | FNKSLASVIRGQVLTADGTPLIGVNVSFFHYPEYGYTITRQDGMFDLVANGGASLTLVFE |
| NOV40f | FNKSLASVIRGQVLTADGTPLIGVNVSFFHYPEYGYTITRQDGMFDLVANGGASLTLVFE |
| NOV40g | ------------------------------------------------------------ |
| NOV40h | TQENNTIDSGELDIGRRAIQEIPPGIFWRSQLFIDQPQFLKFNISLQKDALIGVYGRKGL |
| NOV40i | FNKSLASVIRGQVLTADGTPLIGVNVSFFHYPEYGYTITRQDGMFDLVANGGASLTLVFE |
| NOV40j | ------------------------------------------------------------ |
| NOV40k | ------------------------------------------------------------ |
| NOV40l | ------------------------------------------------------------ |
| NOV40m | ------------------------------------------------------------ |
| NOV40n | ------------------------------------------------------------ |
| NOV40o | ------------------------------------------------------------ |
| NOV40p | ------------------------------------------------------------ |
| NOV40q | FNKSLASVIRGQVLTADGTPLIGVNVSFFHYPEYGYTITRQDGMFDLVANGGASLTLVFE |
| NOV40r | FNKSLASVIRGQVLTADGTPLIGVNVSFFHYPEYGYTITRQDGMFDLVANGGASLTLVFE |
| NOV40s | TQENNTIDSGELDIGRRAIQEIPPGIFWRSQLFIDQPQFLKFNISLQKDALIGVYGRKGL |
| NOV40t | ------------------------------------------------------------ |
| NOV40u | ------------------------------------------------------------ |
| NOV40v | ------------------------------------------------------------ |
| NOV40w | ------------------------------------------------------------ |
| NOV40x | FNKSLASVIRGQVLTADGTPLIGVNVSFFHYPEYGYTITRQDGMFDLVANGGASLTLVFE |
| NOV40y | FNKSLASVIRGQVLTADGTPLIGVNVSFFHYPEYGYTITRQDGMFDLVANGGASLTLVFE |
| NOV40z | FNKSLASVIRGQVLTADGTPLIGVNVSFFHYPEYGYTITRQDGMFDLVANGGASLTLVFE |
| NOV40aa | FNKSLASVIRGQVLTADGTPLIGVNVSFFHYPEYGYTITRQDGMFDLVANGGASLTLVFE |
| NOV40ab | ------------------------------------------------------------ |
| NOV40ac | ------------------------------------------------------------ |
| NOV40a | RSPFLTQYHTVWIPWNVFYVMDTLVMEKEENDIPSCDLSGFVRPNPIIVSSPLSTFFRSS |
| NOV40b | ------------------------------------------------------------ |
| NOV40c | RSPFLTQYHTVWIPWNVFYVMDTLVMKKEENDIPSCDLSGFVRPNPIIVSSPLSTFFRSS |
| NOV40d | RSPFLTQYHTVWIPWNVFYVMDTLVMKKEENDIPSCDLSGFVRPHPIIVSSPLSTFFRSS |
| NOV40e | RSPFLTQYHTVWIPWNVFYVMDTLVMKKEENDIPSCDLSGFVRPNPIIVSSPLSTFFRSS |
| NOV40f | RSPFLTQYHTVWIPWNVFYVMDTLVMKKEENDIPSCDLSGFVRPNPIIVSSPLSTFFRSS |
| NOV40g | ------------------------------------------------------------ |
| NOV40h | PPSHTQYDFVELLDGSRLIALEG------------------------------------- |
| NOV40i | RSPFLTQYHTVWIPWNVFYVMDTLVMEKEENDIPSCDLSGFVRPNPIIVSSPLSTFFRSS |
| NOV40j | ---FLTQYHTVWIPWNVFYVMDTLVMKKEENDIPSCDLSGFVRPNPIIVSSPLSTFFRSS |
| NOV40k | ---FLTQYHTVWIPWNVFYVMDTLVMKKEENDIPSCDLSGFVRPNPIIVSSPLSTFFRSS |
| NOV40l | ---FLTQYHTVWIPWNVFYVMDTLVMKKEENDIPSCDLSGFVRPNPIIVSSPLSTFFRSS |
| NOV40m | ---FLTQYHTVWIPWNVFYVMDTLVMKKEENDIPSCDLSGFVRPNPIIVSSPLSTFFRSS |
| NOV40n | ---FLTQYHTVWIPWNVFYVMDTLVMKKEENDIPSCDLSGFVRPNPIIVSSPLSTFFRSS |
| NOV40o | ---FLTQYHTVWIPWNVFYVMDTLVMKKEENDIPSCDLSGFVRPNPIIVSSPLSTFFRSS |
| NOV40p | ---FLTQYHTVWIPWNVFYVMDTLVMKKEENDIPSCDLSGFVRPNPIIVSSPLSTFFRSS |
| NOV40q | RSPFLTQYHTVWIPWNVFYVMDTLVMKKEENDIPSCDLSGFVRPNPIIVSSPLSTFFRSS |
| NOV40r | RSPFLTQYHTVWIPWNVFYVMDTLVMKKEENDIPSCDLSGFVRPNPIIVSSPLSTFFRSS |
| NOV40s | PPSHTQYDFVELLDGSRLIAREQRSLLETERAGRQARSVSLHEAGFIQYLDSGIWHLAFY |
| NOV40t | ------------------------------------------------------------ |
| NOV40u | ---FLTQYHTVWIPWNVFYVMDTLVMBKEENDIPSCDLSGFVRPNPIIVSSPLSTFFRSS |
| NOV40v | ---FLTQYHTVWIPWNVFYVNDTLVMKKEENDIPSCDLSGFVRPNPIIVSSPLSTFFRSS |
| NOV40w | ------------------------------------------------------------ |
| NOV40x | RSPFLTQYHTVWIPWNVFYVMDTLVMKKEENDIPSCDLSGFVRPNPIIVSSPLSTFFRSS |
| NOV40y | RSPFLTQYHTVWIPWNVFYVMDTLVMKKEENDIPSCDLSGFVRPNPIIVSSPLSTFFRSS |
| NOV40z | RSPFLTQYHTVWIPWNVFYVMDTLVMKKEENDIPSCDLSGFVRPNPIIVSSPLSTFFRSS |
| NOV40aa | RSPFLTQYHTVWIPWNVFYVMDTLVMKKEENDIPSCDLSGFVRPNPIIVSSPLSTFFRSS |
| NOV40ab | ------------------------------------------------------------ |
| NOV40ac | ------------------------------------------------------------ |
| NOV40a | PEDSPIIPETQVLHEETTIPGTDLKLSYLSSRAAGYKSVLKITMTQSIIPFNLMKVHLNV |
| NOV40b | ------------------------------------------------------------ |
| NOV40c | PEDSPIIPETQVLHEETTIPGTDLKLSYLSSRAAGYKSVLKITMTQSIIPFNLMKVHLMV |
| NOV40d | PEDSPIIPETQVLHEETTIPGTDLKLSYLSSRAAGYKSVLKITMTQSIIPFNLMKVHLMV |
| NOV40e | PEDSPIIPETQVLHEETTIPGTDLKLSYLSSRAAGYKSVLKITMTQSIIPFNLMKVHLMV |
| NOV40f | PEDSPIIPETQVLHEETTIPGTDLKLSYLSSRAAGYKSVLKITMTQSIIPFNLMKVHLMV |
| NOV40g | ------------------------------------------------------------ |
| NOV40h | ------------------------------------------------------------ |
| NOV40i | PEDSPIIPETQVLHEETTIPGTDLKLSYLSSRAAGYKSVLKITMTQSIIPFNLMKVHLMV |
| NOV40j | PEDSPIIPETQVLHEETTIPGTDLKLSYLSSRAAGYKSVLKITMTQSIIPFNLMKVHLMV |
| NOV40k | PEDSPIIPETQVLHEETTIPGTDLKLSYLSSRAAGYKSVLKITMTQSIIPFNLMKVHLMV |
| NOV40l | PEDSPIIPETQVLHEETTIPGTDLKLSYLSSRAAGYKSVLKITMTQSIIPFNLMKVHLMV |
| NOV40m | PEDSPIIPETQVLHEETTIPGTDLKLSYLSSRAAGYKSVLKITMTQSIIPFNLMKVHLMV |
| NOV40n | PEDSPIIPETQVLHEETTIPGTDLKLSYLSSRAAGYKSVLKITMTQSIIPFNLMKVHLMV |
| NOV40o | PEDSPIIPETQVLHEETTIPGTDLKLSYLSSRAAGYKSVLKITMTQSIIPFNLMKVHLMV |
| NOV40p | PEDSPIIPETQVLHEETTIPGTDLKLSYLSSRAAGYKSVLKITMTQSIIPFNLMKVHLMV |
| NOV40q | PEDSPIIPETQVLHEETTIPGTDLKLSYLSSRAAGYKSVLKITMTQSIIPFNLMKVHLMV |
| NOV40r | PEDSPIIPETQVLHEETTIPGTDLKLSYLSSRAAGYKSVLKITMTQSIIPFNLMKVHLMV |
| NOV40s | NDGKNAEQVSFNTIVIESVVECPRNCHGNGECVSGTCHCFPGFLGPDCSRAACPVLCSGN |
| NOV40t | ------------------------------------------------------------ |
| NOV40u | PEDSPIIPETQVLHEETTIPGTDLKLSYLSSRAAGYKSVLKITMTQSIIPFNLMKVHLMV |
| NOV40v | PEDSPIIPETQVLHEETTIPGTDLKLSYLSSRAAGYKSVLKITMTQSIIPFNLMKVHLMV |
| NOV40w | ------------------------------------------------------------ |
| NOV40x | PEDSPIIPETQVLHEETTIPGTDLKLSYLSSRAAGYKSVLKITMTQSIIPFNLMKVHLMV |
| NOV40y | PEDSPIIPETQVLHEETTIPGTDLKLSYLSSRAAGYKSVLKITMTQSIIPFNLMKVHLMV |
| NOV40z | PEDSPIIPETQVLHEETTIPGTDLKLSYLSSRAAGYKSVLKITMTQSIIPFNLMKVHLMV |
| NOV40aa | PEDSPIIPETQVLHEETTIPGTDLKLSYLSSRAAGYKSVLKITMTQSIIPFNLMKVHLMV |
| NOV40ab | ------------------------------------------------------------ |
| NOV40ac | ------------------------------------------------------------ |
| NOV40a | AVVGRLFQKWFPASPNLAYTFIWDKTDAYNQKVYGLSEAVVSVGYEYESCLDLTLWEKRT |
| NOV40b | ------------------------------------------------------------ |
| NOV40c | AVVGRLFQKWFPASPNLAYTFIWDKTDAYNQKVYGLSEAVVSVGYEYESCLDLTLWEKRT |
| NOV40d | AVVGRLFQKWFPASPNLAYTFIWDKTDAYNQKVYGLSEAVVSVGYEYESCLDLTLWEKRT |
| NOV40e | AVVGRLFQKWFPASPNLAYTFIWDKTDAYNQKVYGLSEAVVSVGYEYESCLDLTLWEKRT |
| NOV40f | AVVGRLFQKWFPASPNLAYTFIWDKTDAYNQKVYGLSEAVVSVGYEYESCLDLTLWEKRT |
| NOV40g | ------------------------------------------------------------ |
| NOV40h | ------------------------------------------------------------ |
| NOV40i | AVVGRLFQKWFPASPNLAYTFIWDKTDAYNQKVYGLSEAVVSVGYEYESCLDLTLWEKRT |
| NOV40j | AVVGRLFQKWFPASPNLAYTFIWDKTDAYNQKVYGLSEAVVSVGYEYESCLDLTLWEKRT |
| NOV40k | AVVGRLFQKWFPASPNLAYTFIWDKTDAYNQKVYGLSEAVVSVGYEYESCLDLTLWEKRT |
| NOV40l | AVVGRLFQKWFPASPNLAYTFIWDKTDAYNQKVYGLSEAVVSVGYEYESCLDLTLWEKRT |
| NOV40m | AVVGRLFQKWFPASPNLAYTFIWDKTDAYNQKVYGLSEAVVSVGYEYESCLDLTLWEKRT |
| NOV40n | AVVGRLFQKWFPASPNLAYTFIWDKTDAYNQKVYGLSEAVVSVGYEYESCLDLTLWEKRT |
| NOV40o | AVVGRLFQKWFPASPNLAYTFIWDKTDAYNQKVYGLSEAVVSVGYEYESCLDLTLWEKRT |
| NOV40p | AVVGRLFQKWFPASPNLAYTFIWDKTDAYNQKVYGLSEAVVSVGYEYESCLDLTLWEKRT |
| NOV40q | AVVGRLFQKWFPASPNLAYTFIWDKTDAYNQKVYGLSEAVVSVGYEYESCLDLTLWEKRT |
| NOV40r | AVVGRLFQKWFPASPNLAYTFIWDKTDAYNQKVYGLSEAVVSVGYEYESCLDLTLWEKRT |
| NOV40s | GQYSKGRCLCFSGWKGTECDVPTWQCIDPQCGGRGICIMGSCACSSGYKGESCEEADCID |
| NOV40t | ------------------------------------------------------------ |
| NOV40u | AVVGRLFQKWFPASPNLAYTFIWDKTDAYNQKVYGLSEAVVSVGYEYESCLDLTLWEKRT |
| NOV40v | AVVGRLFQKWFPASPNLAYTFIWDKTDAYNQKVYGLSEAVVSVGYEYESCLDLTLWEKRT |
| NOV40w | ------------------------------------------------------------ |
| NOV40x | AVVGRLFQKWFPASPNLAYTFIWDKTDAYNQKVYGLSEAVVSVGYEYESCLDLTLWEKRT |
| NOV40y | AVVGRLFQKWFPASPNLAYTFIWDKTDAYNQKVYGLSEAVVSVGYEYESCLDLTLWEKRT |
| NOV40z | AVVGRLFQKWFPASPNLAYTFIWDKTDAYNQKVYGLSEAVVSVGYEYESCLDLTLWEKRT |
| NOV40aa | AVVGRLFQKWFPASPNLAYTFIWDKTDAYNQKVYGLSEAVVSVGYEYESCLDLTLWEKRT |
| NOV40ab | ------------------------------------------------------------ |
| NOV40ac | ------------------------------------------------------------ |
| NOV40a | AILQGYELDASNMGGWTLDKHHVLDVQNGILYKGNGENQFISQQPPVVSSIMGNGRRRSI |
| NOV40b | ------------------------------------------------------------ |
| NOV40c | AILQGYELDASNMGGWTLDKHHVLDVQNGILYKGNGENQFISQQPPVVSSVD-------- |
| NOV40d | AILQGYELDASNMGGWTLDKHHVLDVQNGILYKGNGENQFISQQPPVVSSVDPAASSRE- |
| NOV40e | AILQGYELDASNMGGWTLDKHHVLDVQNGILYKGNGENQFISQQPPVVSSVDATHDWRLL |
| NOV40f | AILQGYELDASNMGGWTLDKHHVLDVQNGILYKGNGENQFISQQPPVVSSLEG------- |
| NOV40g | ------------------------------------------------------------ |
| NOV40h | ------------------------------------------------------------ |
| NOV40i | AILQGYELDASNMGGWTLDKHHVLDVQNGILYKGNGENQFISQQPPVVSSIMGNGRRRSI |
| NOV40j | AILQGYELDASNMGGWTLDKHHVLDVQNGILYKGNGENQFISQQPPVVSSIMGNGRRRSI |
| NOV40k | AILQGYELDASNMGGWTLDKHHALDVQNGILYKGNGENQFISQQPPVVSSIMGNGRRRSI |
| NOV40l | AILQGYELDASNMGGWTLDKHHALDVQNGILYKGNGENQFISQQPPVVSSIMGNGRRRSI |
| NOV40m | AILQGYELDASNNGGWTLDKHHVLDVQNGILYKGNGENQFISQQPPVVSSIMGNGRRRSI |
| NOV40n | AILQGYELDASNMGGWTLDKHHVLDVQNGILYKGNGENQFISQQPPVVSSIMGNGRRRSI |
| NOV40o | AILQGYELDASNMGGWTLDKHHVLDVQNGILYKGNGENQFISQQPPVVSSIMGNGRRRSI |
| NOV40p | AILQGYELDASNMGGWTLDKHHVLDVQNGILYKGNGENQFISQQPPVVSSIMGNGRRRSI |
| NOV40q | AILQGYELDASNMGGWTLDKHHVLDVQNGILYKGNGENQFISQQPPVVSS---------- |
| NOV40r | AILQGYELDASNMGGWTLDKHHVLDVQNGILYKGNGENQFISQQPPVVSSLEG------- |
| NOV40s | PGCSNHGVCIHGECHCSPGWGGSNCEILKTMCPDQCSGHGTYLQESGSCTCDPNWTGPDC |
| NOV40t | ------------------------------------------------------------ |
| NOV40u | AILQGYELDASNMGGWTLDKHHVLDVQNGILYKGNGENQFISQQPPVVSSIMGNGRRRSI |
| NOV40v | AILQGYELDASNMGGWTLDKHHVLDVQNGILYKGNGENQFISQQPPVVSSIMGNGRRRSI |
| NOV40w | ------------------------------------------------------------ |
| NOV40x | AILQGYELDASNMGGWTLDKHHVLDVQNGILYKGNGENQFISQQPPVVSS---------- |
| NOV40y | AILQGYELDASNMGGWTLDKHHVLDVQNGILYKGNGENQFISQQPPVVSS---------- |
| NOV40z | AILQGYELDASNMGGWTLDKHHVLDVQNGILYKGNGENQFISQQPPVVSS---------- |
| NOV40aa | AILQGYELDASNMGGWTLDKHHVLDVQNGILYKGNGENQFISQQPPVVSS---------- |
| NOV40ab | ------------------------------------------------------------ |
| NOV40ac | ------------------------------------------------------------ |
| NOV40a | SCPSCNGQADGNKLLAPVALACGIDGSLYVGDFNYVRRIFPSGNVTSVLELRNKDFRHSS |
| NOV40b | ------------------------------------------------------------ |
| NOV40c | ------------------------------------------------------------ |
| NOV40d | ------------------------------------------------------------ |
| NOV40e | VIFSSAVAASWY------------------------------------------------ |
| NOV40f | ------------------------------------------------------------ |
| NOV40g | ------------------------------------------------------------ |
| NOV40h | ------------------------------------------------------------ |
| NOV40i | SCPSCNGQADGNKLLAPVALACGIDGSLYVGDFNYVRRIFPSGNVTSVLELRNKDFRHSS |
| NOV40j | SCPSCNGQADGNKLLAPVALACGIDGSLYVGDFNYVRRIFPSGNVTSVLELRNKDFRHSS |
| NOV40k | SCPSCNGQADGNKLLAPVALACGIDGSLYVGDFNYVRRIFPSGNVTSVLELRNKDFRHSS |
| NOV40l | SCPSCNGQADGNKLLAPVALACGIDGSLYVGDFNYVRRIFPSGNVTSVLELS-------S |
| NOV40m | SCPSCNGQADGNKLLAPVALACGIDGSLYVGDFNYVRRIFPSGNVTSVLELS-------S |
| NOV40n | SCPSCNGQADGNKLLAPVALACGIDGSLYVGDFNYVRRIFPSGNVTSVLELS-------S |
| NOV40o | SCPSCNGQADGNKLLAPVALACGIDGSLYVGDFNYVRRIFPSGNVTSVLELS-------S |
| NOV40p | SCPSCNGQADGNKLLAPVALACGIDGSLHVGDFNYVRRIFPSGNVTSVLELS-------S |
| NOV40q | ------------------------------------------------------------ |
| NOV40r | ------------------------------------------------------------ |
| NOV40s | SNEICSVDCGSHGVCMGGTCRCEEGWTGPACNQRACHPRCAEHGTCKDGKCECSQGWNGE |
| NOV40t | ------------------------------------------------------------ |
| NOV40u | SCPSCNGQADGNKLLAPVALACGIDGSLYVGDFNYVRRIFPSGNVTSVLELRNKDFRHSS |
| NOV40v | SCPSCNGQADGNKLLAPVALACGIDGSLYVGDFNYVRRIFPSGNVTSVLELS-------S |
| NOV40w | ------------------------------------------------------------ |
| NOV40x | ------------------------------------------------------------ |
| NOV40y | ------------------------------------------------------------ |
| NOV40z | ------------------------------------------------------------ |
| NOV40aa | ------------------------------------------------------------ |
| NOV40ab | ------------------------------------------------------------ |
| NOV40ac | ------------------------------------------------------------ |
| NOV40a | NPAHRYYLATDPVTGDLYVSDTNTRRIYRPKSLTGAKDLTKNAEVVAGTGEQCLPFDEAR |
| NOV40b | ------------------------------------------------------------ |
| NOV40c | ------------------------------------------------------------ |
| NOV40d | ------------------------------------------------------------ |
| NOV40e | ------------------------------------------------------------ |
| NOV40f | ------------------------------------------------------------ |
| NOV40g | ------------------------------------------------------------ |
| NOV40h | ------------------------------------------------------------ |
| NOV40i | NPAHRYYLATDPVTGDLYVSDTNTRRIYRPKSLTGAKDLTKNAEVVAGTGEQCLPFDEAR |
| NOV40j | NPAHRYYLATDPVTGDLYVSDTNTRRIYRPKSLTGAKDLTKNAEVVAGTGEQCLPFDEAR |
| NOV40k | NPAHRYYLATDPVTGDLYVSDTNTRRIYRPKSLTGAKDLTKNAEVVAGTGEQCLPFDEAR |
| NOV40l | NPAHRYYLATDPVTGDLYVSDTNTRRIYRPKSLTGAKDLTKNAEVVAGTGEQCLPFDEAR |
| NOV40m | NPAHRYYLATDPVTGDLYVSDTNTRRIYRPKSLTGAKDLTKNAEVVAGTGEQCLPFDEAR |
| NOV40n | NPAHRYYLATDPVTGDLYVSDTNTRRIYRPKSLTGAKDLTKNAEVVAGTGEQCLPFDEAR |
| NOV40o | NPAHRYYLATDPVTGDLYVSDTNTRRIYRPKSLTGAKDLTKNAEVVAGTGEQCLPFDEAR |
| NOV40p | NPAHRYYLATDPVTGDLYVSDTNTRRIYRPKSLTGAKDLTKNAEVVAGTGEQCLPFDEAR |
| NOV40q | ------------------------------------------------------------ |
| NOV40r | ------------------------------------------------------------ |
| NOV40s | HCTIAHYLDKIVKDKIGYKEGCPGLCNSNGRCTLDQNGGHCVCQPGWRGAGCDVAMETLC |
| NOV40t | ------------------------------------------------------------ |
| NOV40u | NPAHRYYLATDPVTGDLYVSDTNTRRIYRPKSLTGAKDLTKNAEVVAGTGEQCLPFDEAR |
| NOV40v | NPAHRYYIATDPVTGDLYVSDTNTRRIYRPKSLTGAKDLTKNAEVVAGTGEQCLPFDEAR |
| NOV40w | ------------------------------------------------------------ |
| NOV40x | ------------------------------------------------------------ |
| NOV40y | ------------------------------------------------------------ |
| NOV40z | ------------------------------------------------------------ |
| NOV40aa | ------------------------------------------------------------ |
| NOV40ab | ------------------------------------------------------------ |
| NOV40ac | ------------------------------------------------------------ |
| NOV40a | CGDGGKAVEATLMSPKGMAVDKNGLIYFVDGTMIRKVDQNGIISTLLGSNDLTSARPLTC |
| NOV40b | ------------------------------------------------------------ |
| NOV40c | ------------------------------------------------------------ |
| NOV40d | ------------------------------------------------------------ |
| NOV40e | ------------------------------------------------------------ |
| NOV40f | ------------------------------------------------------------ |
| NOV40g | ------------------------------------------------------------ |
| NOV40h | ------------------------------------------------------------ |
| NOV40i | CGDGGKAVEATLMSPKGMAVDKNGLIYFVDGTMIRKVDQNGIISTLLGSNDLTSARPLTC |
| NOV40j | CGDGGKAVEATLMSPKGMAVDKNGLIYFVDGTMIRKVDQNGIISTLLGSNDLTSARPLTC |
| NOV40k | CGDGGKAVEATLMSPKGMAVDKNGLIYFVDGTMIRKVDQNGIISTLLGSNDLTSARPLTC |
| NOV40l | CGDGGKAVEATLMSPKGMAVDKNGLIYFVDGTMIRKVDQNGIISTLLGSNDLTSARPLTC |
| NOV40m | CGDGGKAVEATLMSPKGMAVDKNGLIYFVDGTMIRKVDQNGIISTLLGSNDLTSARPLTC |
| NOV40n | CGDGGKAVEATLMSPKGMAVDKNGLIYFVDGTMIRKVDQNGIISTLLGSNDLTSARPLTC |
| NOV40o | CGDGGKAAEATLMSPKGMAVDKNGLIYFVDGTMIRKVDQNGIISTLLGSNDLTSARPLTC |
| NOV40p | CGDGGKAVEATLMSPKGMAVDKNGLIYFVDGTMIRKVDQNGIISTLLGSNDLTSARPLTC |
| NOV40q | ------------------------------------------------------------ |
| NOV40r | ------------------------------------------------------------ |
| NOV40s | TDSKDNEGDGLIDCMDPDCCLQSSCQNQPYCRGLPDPQDIISQSLQSPSQQAAKSFYDRI |
| NOV40t | ------------------------------------------------------------ |
| NOV40u | CGDGGKAVEATLMSPKGMAVDKNGLIYFVDGTMIRKVDQNGIISTLLGSNDLTSARPLTC |
| NOV40v | CGDGGKAVEATLMSPKGMAVDKNGLIYFVDGTMIRKVDQNGIISTLLGSNDLTSARPLTC |
| NOV40w | ------------------------------------------------------------ |
| NOV40x | ------------------------------------------------------------ |
| NOV40y | ------------------------------------------------------------ |
| NOV40z | ------------------------------------------------------------ |
| NOV40aa | ------------------------------------------------------------ |
| NOV40ab | ------------------------------------------------------------ |
| NOV40ac | ------------------------------------------------------------ |
| NOV40a | DTSMHISQVRLEWPTDLAINPMDNSIYYLDNNVVLQITENRQVRIAAGRPMHCQVPGVEY |
| NOV40b | ------------------------------------------------------------ |
| NOV40c | ------------------------------------------------------------ |
| NOV40d | ------------------------------------------------------------ |
| NOV40e | ------------------------------------------------------------ |
| NOV40f | ------------------------------------------------------------ |
| NOV40g | ------------------------------------------------------------ |
| NOV40h | ------------------------------------------------------------ |
| NOV40i | DTSMHISQVRLEWPTDLAINPMDNSIYYLDNNVVLQITENRQVRIAAGRPMHCQVPGVEY |
| NOV40j | DTSMHISQVRLEWPTDLAINPMDNSIYVLDNVD--------------------------- |
| NOV40k | DTSMHISQVRLEWPTDLAINPMDNSIYVLDNVD--------------------------- |
| NOV40l | DTSMHISQVRLEWPTDLAINPMDNSIYVLDNVD--------------------------- |
| NOV40m | DTSMHISQVRLEWPTDLAINPMDNSIYVLDNVD--------------------------- |
| NOV40n | DTSMHISQVRLEWPTDLAINPMDNSIYVLDNVD--------------------------- |
| NOV40o | DTSMHISQVRLEWPTDLAINPMDNSIYVLDNVD--------------------------- |
| NOV40p | DTSMHISQVRLEWPTDLAINPMDNSIYVLDNVD--------------------------- |
| NOV40q | ------------------------------------------------------------ |
| NOV40r | ------------------------------------------------------------ |
| NOV40s | SFLIGSDSTHVIPGESPFNKSLASVIRGQVLTADGTPLIGVNVSFFHYPEYGYTITRQDG |
| NOV40t | ------------------------------------------------------------ |
| NOV40u | DTSMHISQVRLEWPTDLAINPMDNSIYYLDNNVVLQITENRQVRIAAGRPMHCQVPGVEY |
| NOV40v | DTSMHISQVRLEWPTDLAINPMDNSIYVLDN----------------------------- |
| NOV40w | ------------------------------------------------------------ |
| NOV40x | ------------------------------------------------------------ |
| NOV40y | ------------------------------------------------------------ |
| NOV40z | ------------------------------------------------------------ |
| NOV40aa | ------------------------------------------------------------ |
| NOV40ab | ------------------------------------------------------------ |
| NOV40ac | ------------------------------------------------------------ |
| NOV40a | PVGKHAVQTTLESATAIAVSYSGVLYITETDEKKINRIRQVTTDGEISLVAGIPSECDCK |
| NOV40b | ------------------------------------------------------------ |
| NOV40c | ------------------------------------------------------------ |
| NOV40d | ------------------------------------------------------------ |
| NOV40e | ------------------------------------------------------------ |
| NOV40f | ------------------------------------------------------------ |
| NOV40g | ------------------------------------------------------------ |
| NOV40h | ------------------------------------------------------------ |
| NOV40i | PVGKHAVQTTLESATAIAVSYSGVLYITETDEKKINRIRQVTTDGEISLVAGIPSECDCK |
| NOV40j | ------------------------------------------------------------ |
| NOV40k | ------------------------------------------------------------ |
| NOV40l | ------------------------------------------------------------ |
| NOV40m | ------------------------------------------------------------ |
| NOV40n | ------------------------------------------------------------ |
| NOV40o | ------------------------------------------------------------ |
| NOV40p | ------------------------------------------------------------ |
| NOV4Qq | ------------------------------------------------------------ |
| NOV40r | ------------------------------------------------------------ |
| NOV40s | MFDLVANGGASLTLVFERSPFLTQYHTVWIPWNVFYVMDTLVMEKEENDIPSCDLSGFVR |
| NOV40t | ------------------------------------------------------------ |
| NOV40u | PVGKHAVQTTLESATAIAVSYSGVLYITETDEKKINRIRQVTTDGEISLVAGIPSECDCK |
| NOV40v | ------------------------------------------------------------ |
| NOV40w | ------------------------------------------------------------ |
| NOV40x | ------------------------------------------------------------ |
| NOV40y | ------------------------------------------------------------ |
| NOV40z | ------------------------------------------------------------ |
| NOV40aa | ------------------------------------------------------------ |
| NOV40ab | ------------------------------------------------------------ |
| NOV40ac | ------------------------------------------------------------ |
| NOV40a | NDANCDCYQSGDGYAKDAKLSAPSSLAASPDGTLYIADLGNIRIRAVSKNKPLLNSMNFY |
| NOV40b | ------------------------------------------------------------ |
| NOV40c | ------------------------------------------------------------ |
| NOV40d | ------------------------------------------------------------ |
| NOV40e | ------------------------------------------------------------ |
| NOV40f | ------------------------------------------------------------ |
| NOV40g | ------------------------------------------------------------ |
| NOV40h | ------------------------------------------------------------ |
| NOV40i | NDANCDCYQSGDGYAKDAKLSAPSSLAASPDGTLYIADLGNIRIRAVSKNKPLLNSMNFY |
| NOV40j | ------------------------------------------------------------ |
| NOV40k | ------------------------------------------------------------ |
| NOV40l | ------------------------------------------------------------ |
| NOV40m | ------------------------------------------------------------ |
| NOV40n | ------------------------------------------------------------ |
| NOV40o | ------------------------------------------------------------ |
| NOV40p | ------------------------------------------------------------ |
| NOV40q | ------------------------------------------------------------ |
| NOV40r | ------------------------------------------------------------ |
| NOV40s | PNPIIVSSPLSTFFRSSPEDSPIIPETQVLHEETTIPGTDLKLSYLSSRAAGYKSVLKIT |
| NOV40t | ------------------------------------------------------------ |
| NOV40u | NDANCDCYQSGDGYAKDAKLSAPSSLAASPDGTLYIADLGNIRIRAVSKNKPLLNSMNFY |
| NOV40v | ------------------------------------------------------------ |
| NOV40w | ------------------------------------------------------------ |
| NOV40x | ------------------------------------------------------------ |
| NOV40y | ------------------------------------------------------------ |
| NOV40z | ------------------------------------------------------------ |
| NOV40aa | ------------------------------------------------------------ |
| NOV40ab | ------------------------------------------------------------ |
| NOV40ac | ------------------------------------------------------------ |
| NOV40a | EVASPTDQELYIFDINGTHQYTVSLVTGDYLYNFSYSNDNDITAVTDSNGNTLRIRRDPN |
| NOV40b | ------------------------------------------------------------ |
| NOV40c | ------------------------------------------------------------ |
| NOV40d | ------------------------------------------------------------ |
| NOV40e | ------------------------------------------------------------ |
| NOV40f | ------------------------------------------------------------ |
| NOV40g | ------------------------------------------------------------ |
| NOV40h | ------------------------------------------------------------ |
| NOV40i | EVASPTDQELYIFDINGTHQYTVSLVTGDYLYNFSYSNDNDITAVTDSNGNTLRIRRDPN |
| NOV40j | ------------------------------------------------------------ |
| NOV40k | ------------------------------------------------------------ |
| NOV40l | ------------------------------------------------------------ |
| NOV40m | ------------------------------------------------------------ |
| NOV40n | ------------------------------------------------------------ |
| NOV40o | ------------------------------------------------------------ |
| NOV40p | ------------------------------------------------------------ |
| NOV40q | ------------------------------------------------------------ |
| NOV40r | ------------------------------------------------------------ |
| NOV40s | MTQSIIPFNLMKVHLMVAVVGRLFQKWFPASPNLAYTFIWDKTDAYNQKVYGLSEAVVSV |
| NOV40t | ------------------------------------------------------------ |
| NOV40u | EVASPTDQELYIFDINGTHQYTVSLVTGDYLYNFSYSNDNDITAVTDSNGNTLRIRRDPN |
| NOV40v | ------------------------------------------------------------ |
| NOV40w | ------------------------------------------------------------ |
| NOV40x | ------------------------------------------------------------ |
| NOV40y | ------------------------------------------------------------ |
| NOV40z | ------------------------------------------------------------ |
| NOV40aa | ------------------------------------------------------------ |
| NOV40ab | ------------------------------------------------------------ |
| NOV40ac | ------------------------------------------------------------ |
| NOV40a | RMPVRVVSPDNQVIWLTIGTNGCLKGMTAQGLELVLFTYHGNSGLLATKSDETGWTTFFD |
| NOV40b | ------------------------------------------------------------ |
| NOV40c | ------------------------------------------------------------ |
| NOV40d | ------------------------------------------------------------ |
| NOV40e | ------------------------------------------------------------ |
| NOV40f | ------------------------------------------------------------ |
| NOV40g | ------------------------------------------------------------ |
| NOV40h | ------------------------------------------------------------ |
| NOV40i | RMPVRVVSPDNQVIWLTIGTNGCLKGMTAQGLELVLFTYHGNSGLLATKSDETGWTTFFD |
| NOV40j | ------------------------------------------------------------ |
| NOV40k | ------------------------------------------------------------ |
| NOV40l | ------------------------------------------------------------ |
| NOV40m | ------------------------------------------------------------ |
| NOV40n | ------------------------------------------------------------ |
| NOV40o | ------------------------------------------------------------ |
| NOV40p | ------------------------------------------------------------ |
| NOV40q | ------------------------------------------------------------ |
| NOV40r | ------------------------------------------------------------ |
| NOV40s | GYEYESCLDLTLWEKRTAILQGYELDASNMGGWTLDKHHVLDVQNGILYKGNGENQFISQ |
| NOV40t | ------------------------------------------------------------ |
| NOV40u | RMPVRVVSPDNQVIWLTIGTNGCLKGMTAQGLELVLFTYHGNSGLLATKSDETGWTTFFD |
| NOV40v | ------------------------------------------------------------ |
| NOV40w | ------------------------------------------------------------ |
| NOV40x | ------------------------------------------------------------ |
| NOV40y | ------------------------------------------------------------ |
| NOV40z | ------------------------------------------------------------ |
| NOV40aa | ------------------------------------------------------------ |
| NOV40ab | ------------------------------------------------------------ |
| NOV40ac | ------------------------------------------------------------ |
| NOV40a | YDSEGRLTNVTFPTGVVTNLHGDMDKAITVDIESSSREEDVSITSNLSSIDSFYTMVQDQ |
| NOV40b | ------------------------------------------------------------ |
| NOV40c | ------------------------------------------------------------ |
| NOV40d | ------------------------------------------------------------ |
| NOV40e | ------------------------------------------------------------ |
| NOV40f | ------------------------------------------------------------ |
| NOV40g | ------------------------------------------------------------ |
| NOV40h | ------------------------------------------------------------ |
| NOV40i | YDSEGRLTNVTFPTGVVTNLHGDMDKAITVDIESSSREEDVSITSNLSSIDSFYTMVQDQ |
| NOV40j | ------------------------------------------------------------ |
| NOV40k | ------------------------------------------------------------ |
| NOV40l | ------------------------------------------------------------ |
| NOV40m | ------------------------------------------------------------ |
| NOV40n | ------------------------------------------------------------ |
| NOV40o | ------------------------------------------------------------ |
| NOV40p | ------------------------------------------------------------ |
| NOV40q | ------------------------------------------------------------ |
| NOV40r | ------------------------------------------------------------ |
| NOV40s | QPPVVSSIMGNGRRRSISCPSCNGQADGNKLLAPVALACGIDGSLYVGDFNYVRRIFPSG |
| NOV40t | ------------------------------------------------------------ |
| NOV40u | YDSEGRLTNVTFPTGVVTNLHGDMDKAITVDIESSSREEDVSITSNLSSIDSFYTMVQDQ |
| NOV40v | ------------------------------------------------------------ |
| NOV40w | ------------------------------------------------------------ |
| NOV40x | ------------------------------------------------------------ |
| NOV40y | ------------------------------------------------------------ |
| NOV40z | ------------------------------------------------------------ |
| NOV40aa | ------------------------------------------------------------ |
| NOV40ab | ------------------------------------------------------------ |
| NOV40ac | ------------------------------------------------------------ |
| NOV40a | LRNSYQIGYDGSLRIIYASGLDSHYQTEPHVLAGTANPTVAKRNMTLPGENGQNLVEWRF |
| NOV40b | ------------------------------------------------------------ |
| NOV40c | ------------------------------------------------------------ |
| NOV40d | ------------------------------------------------------------ |
| NOV40e | ------------------------------------------------------------ |
| NOV40f | ------------------------------------------------------------ |
| NOV40g | ------------------------------------------------------------ |
| NOV40h | ------------------------------------------------------------ |
| NOV40i | LRNSYQIGYDGSLRIIYASGLDSHYQTEPHVLAGTANPTVAKRNMTLPGENGQNLVEWRF |
| NOV40j | ------------------------------------------------------------ |
| NOV40k | ------------------------------------------------------------ |
| NOV40l | ------------------------------------------------------------ |
| NOV40m | ------------------------------------------------------------ |
| NOV40n | ------------------------------------------------------------ |
| NOV40o | ------------------------------------------------------------ |
| NOV40p | ------------------------------------------------------------ |
| NOV40q | ------------------------------------------------------------ |
| NOV40r | ------------------------------------------------------------ |
| NOV40s | NVTSVLELRNKDFRHSSNPAHRYYLATDPVTGDLYVSDTNTRRIYRPKSLTGAKDLTKNA |
| NOV40t | ------------------------------------------------------------ |
| NOV40u | LRNSYQIGYDGSLRIIYASGLDSHYQTEPHVLAGTANPTVAKRNMTLPGENGQNLVEWRF |
| NOV40v | ------------------------------------------------------------ |
| NOV40w | ------------------------------------------------------------ |
| NOV40x | ------------------------------------------------------------ |
| NOV40y | ------------------------------------------------------------ |
| NOV40z | ------------------------------------------------------------ |
| NOV40aa | ------------------------------------------------------------ |
| NOV40ab | ------------------------------------------------------------ |
| NOV40ac | ------------------------------------------------------------ |
| NOV40a | RKEQAQGKVNVFGRKLRVNGRNLLSVDFDRTTKTEKIYDDHRKFLLRIAYDTSGHPTLWL |
| NOV40b | ------------------------------------------------------------ |
| NOV40c | ------------------------------------------------------------ |
| NOV40d | ------------------------------------------------------------ |
| NOV40e | ------------------------------------------------------------ |
| NOV40f | ------------------------------------------------------------ |
| NOV40g | ------------------------------------------------------------ |
| NOV40h | ------------------------------------------------------------ |
| NOV40i | RKEQAQGKVNVFGRKLRVNGRNLLSVDFDRTTKTEKIYDDHRKFLLRIAYDTSGHPTLWL |
| NOV40j | ------------------------------------------------------------ |
| NOV40k | ------------------------------------------------------------ |
| NOV40l | ------------------------------------------------------------ |
| NOV40m | ------------------------------------------------------------ |
| NOV40n | ------------------------------------------------------------ |
| NOV400 | ------------------------------------------------------------ |
| NOV40p | ------------------------------------------------------------ |
| NOV40q | ------------------------------------------------------------ |
| NOV40r | ------------------------------------------------------------ |
| NOV40s | EVVAGTGEQCLPFDEARCGDGGKAVEATLMSPKGMAVDKNGLIYFVDGTMIRKVDQNGII |
| NOV40t | ------------------------------------------------------------ |
| NOV40u | RKEQAQGKVNVFGRKLRVNGRNLLSVDFDRTTKTEKIYDDHRKFLLRIAYDTSGHPTLWL |
| NOV40v | ------------------------------------------------------------ |
| NOV40w | ------------------------------------------------------------ |
| NOV40x | ------------------------------------------------------------ |
| NOV40y | ------------------------------------------------------------ |
| NOV40z | ------------------------------------------------------------ |
| NOV40aa | ------------------------------------------------------------ |
| NOV40ab | ------------------------------------------------------------ |
| NOV40ac | ------------------------------------------------------------ |
| NOV40a | PSSKLMAVNVTYSSTGQIASIQRGTTSEKVDYDGQGRIVSRVFADGKTWSYTYLEKSMVL |
| NOV40b | ------------------------------------------------------------ |
| NOV40c | ------------------------------------------------------------ |
| NOV40d | ------------------------------------------------------------ |
| NOV40e | ------------------------------------------------------------ |
| NOV40f | ------------------------------------------------------------ |
| NOV40g | ------------------------------------------------------------ |
| NOV40h | ------------------------------------------------------------ |
| NOV40i | PSSKLMAVNVTYSSTGQIASIQRGTTSEKVDYDGQGRIVSRVFADGKTWSYTYLEKSMVL |
| NOV40j | ------------------------------------------------------------ |
| NOV40k | ------------------------------------------------------------ |
| NOV40l | ------------------------------------------------------------ |
| NOV40m | ------------------------------------------------------------ |
| NOV40n | ------------------------------------------------------------ |
| NOV40o | ------------------------------------------------------------ |
| NOV40p | ------------------------------------------------------------ |
| NOV40q | ------------------------------------------------------------ |
| NOV40r | ------------------------------------------------------------ |
| NOV40s | STLLGSNDLTSARPLTCDTSMHISQVRLEWPTDLAINPMDNSIYVLDNNVVLQITENRQV |
| NOV40t | ------------------------------------------------------------ |
| NOV40u | PSSKLMAVNVTYSSTGQIASIQRGTTSEKVDYDGQGRIVSRVFADGKTWSYTYLEKSMVL |
| NOV40v | ------------------------------------------------------------ |
| NOV40w | ------------------------------------------------------------ |
| NOV40x | ------------------------------------------------------------ |
| NOV40y | ------------------------------------------------------------ |
| NOV40z | ------------------------------------------------------------ |
| NOV40aa | ------------------------------------------------------------ |
| NOV40ab | ------------------------------------------------------------ |
| NOV40ac | ------------------------------------------------------------ |
| NOV40a | LLHSQRQYIFEYDMWDRLSAITMPSVARHTMQTIRSIGYYRNIYNPPESNASIITDYNEE |
| NOV40b | ------------------------------------------------------------ |
| NOV40c | ------------------------------------------------------------ |
| NOV40d | ------------------------------------------------------------ |
| NOV40e | ------------------------------------------------------------ |
| NOV40f | ------------------------------------------------------------ |
| NOV40g | ------------------------------------------------------------ |
| NOV40h | ------------------------------------------------------------ |
| NOV40i | LLHSQRQYIFEYDMWDRLSAITMPSVARHTNQTIRSIGYYRNIYNPPESNASIITDYNEE |
| NOV40j | ------------------------------------------------------------ |
| NOV40k | ------------------------------------------------------------ |
| NOV40l | ------------------------------------------------------------ |
| NOV40m | ------------------------------------------------------------ |
| NOV40n | ------------------------------------------------------------ |
| NOV40o | ------------------------------------------------------------ |
| NOV40p | ------------------------------------------------------------ |
| NOV40q | ------------------------------------------------------------ |
| NOV40r | ------------------------------------------------------------ |
| NOV40s | RIAAGRPMHCQVPGVEYPVGKHAVQTTLESATAIAVSYSGVLYITETDEKKINRIRQVTT |
| NOV40t | ------------------------------------------------------------ |
| NOV40u | LLHSQRQYIFEYDMWDRLSAITMPSVARHTMQTIRSIGYYRNIYNPPESNASIITDYNEE |
| NOV40v | ------------------------------------------------------------ |
| NOV40w | ------------------------------------------------------------ |
| NOV40x | ------------------------------------------------------------ |
| NOV40y | ------------------------------------------------------------ |
| NOV40z | ------------------------------------------------------------ |
| NOV40aa | ------------------------------------------------------------ |
| NOV40ab | ------------------------------------------------------------ |
| NOV40ac | ------------------------------------------------------------ |
| NOV40a | GLLLQTAFLGTSRRVLFKYRRQTRLSEILYDSTRVSFTYDETAGVLKTVNLQSDGFICTI |
| NOV40b | ------------------------------------------------------------ |
| NOV40c | ------------------------------------------------------------ |
| NOV40d | ------------------------------------------------------------ |
| NOV40e | ------------------------------------------------------------ |
| NOV40f | ------------------------------------------------------------ |
| NOV40g | ------------------------------------------------------------ |
| NOV40h | ------------------------------------------------------------ |
| NOV40i | GLLLQTAFLGTSRRVLFKYRRQTRLSEILYDSTRVSFTYDETAGVLKTVNLQSDGFICTI |
| NOV40j | ------------------------------------------------------------ |
| NOV40k | ------------------------------------------------------------ |
| NOV40l | ------------------------------------------------------------ |
| NOV40m | ------------------------------------------------------------ |
| NOV40n | ------------------------------------------------------------ |
| NOV40o | ------------------------------------------------------------ |
| NOV40p | ------------------------------------------------------------ |
| NOV40q | ------------------------------------------------------------ |
| NOV40r | ------------------------------------------------------------ |
| NOV40s | DGEISLVAGIPSECDCKNDANCDCYQSGDGYAKDAKLSAPSSLAASPDGTLYIADLGNIR |
| NOV40t | ------------------------------------------------------------ |
| NOV40u | GLLLQTAFLGTSRRVLFKYRRQTRLSEILYDSTRVSFTYDETAGVLKTVNLQSDGFICTI |
| NOV40v | ------------------------------------------------------------ |
| NOV40w | ------------------------------------------------------------ |
| NOV40x | ------------------------------------------------------------ |
| NOV40y | ------------------------------------------------------------ |
| NOV40z | ------------------------------------------------------------ |
| NOV40aa | ------------------------------------------------------------ |
| NOV40ab | ------------------------------------------------------------ |
| NOV40ac | ------------------------------------------------------------ |
| NOV40a | RYRQIGPLIDRQIFRFSEDGMVNARFDYSYDNSFRVTSMQGVINETPLPIDLYQFDDISG |
| NOV40b | ------------------------------------------------------------ |
| NOV40c | ------------------------------------------------------------ |
| NOV40d | ------------------------------------------------------------ |
| NOV40e | ------------------------------------------------------------ |
| NOV40f | ------------------------------------------------------------ |
| NOV40g | ------------------------------------------------------------ |
| NOV40h | ------------------------------------------------------------ |
| NOV40i | RYRQIGPLIDRQIFRFSEDGMVNARFDYSYDNSFRVTSMQGVINETPLPIDLYQFDDISG |
| NOV40j | ------------------------------------------------------------ |
| NOV40k | ------------------------------------------------------------ |
| NOV40l | ------------------------------------------------------------ |
| NOV40m | ------------------------------------------------------------ |
| NOV40n | ------------------------------------------------------------ |
| NOV40o | ------------------------------------------------------------ |
| NOV40p | ------------------------------------------------------------ |
| NOV40q | ------------------------------------------------------------ |
| NOV40r | ------------------------------------------------------------ |
| NOV40s | IRAVSKNKPLLNSMNFYEVASPTDQELYIFDINGTHQYTVSLVTGDYLYNFSYSNDNDIT |
| NOV40t | ------------------------------------------------------------ |
| NOV40u | RYRQIGPLIDRQIFRFSEDGMVNARFDYSYDNSFRVTSMQGVINETPLPIDLYQFDDISG |
| NOV40v | ------------------------------------------------------------ |
| NOV40w | ------------------------------------------------------------ |
| NOV40x | ------------------------------------------------------------ |
| NOV40y | ------------------------------------------------------------ |
| NOV40z | ------------------------------------------------------------ |
| NOV40aa | ------------------------------------------------------------ |
| NOV40ab | ------------------------------------------------------------ |
| NOV40ac | ------------------------------------------------------------ |
| NOV40a | KVEQFGKFGVIYYDINQIISTAVMTYTKHFDAHGRIKEIQYEIFRSLMYWITIQYDNMGR |
| NOV40b | ------------------------------------------------------------ |
| NOV40c | ------------------------------------------------------------ |
| NOV40d | ------------------------------------------------------------ |
| NOV40e | ------------------------------------------------------------ |
| NOV40f | ------------------------------------------------------------ |
| NOV40g | ------------------------------------------------------------ |
| NOV40h | ------------------------------------------------------------ |
| NOV40i | KVEQFGKFGVIYYDINQIISTAVMTYTKHFDAHGRIKEIQYEIFRSLMYWITIQYDNMGR |
| NOV40j | ------------------------------------------------------------ |
| NOV40k | ------------------------------------------------------------ |
| NOV40l | ------------------------------------------------------------ |
| NOV40m | ------------------------------------------------------------ |
| NOV40n | ------------------------------------------------------------ |
| NOV40o | ------------------------------------------------------------ |
| NOV40p | ------------------------------------------------------------ |
| NOV40q | ------------------------------------------------------------ |
| NOV40r | ------------------------------------------------------------ |
| NOV40s | AVTDSNGNTLRIRRDPNRMPVRVVSPDNQVIWLTIGTNGCLKGMTAQGLELVLFTYHGNS |
| NOV40t | ------------------------------------------------------------ |
| NOV40u | KVEQFGKFGVIYYDINQIISTAVMTYTKHFDAHGRIKEIQYEIFRSLMYWITIQYDNMGR |
| NOV40v | ------------------------------------------------------------ |
| NOV40w | ------------------------------------------------------------ |
| NOV40x | ------------------------------------------------------------ |
| NOV40y | ------------------------------------------------------------ |
| NOV40z | ------------------------------------------------------------ |
| NOV40aa | ------------------------------------------------------------ |
| NOV40ab | ------------------------------------------------------------ |
| NOV40ac | ------------------------------------------------------------ |
| NOV40a | VTKREIKIGPFANTTKYAYEYDVDGQLQTVYLNEKIMWRYNYDLNGNLHLLNPSNSARLT |
| NOV40b | ------------------------------------------------------------ |
| NOV40c | ------------------------------------------------------------ |
| NOV40d | ------------------------------------------------------------ |
| NOV40e | ------------------------------------------------------------ |
| NOV40f | ------------------------------------------------------------ |
| NOV40g | ------------------------------------------------------------ |
| NOV40h | ------------------------------------------------------------ |
| NOV40i | VTKREIKIGPFANTTKYAYEYDVDGQLQTVYLNEKIMWRYNYDLNGNLHLLNPSNSARLT |
| NOV40j | ------------------------------------------------------------ |
| NOV40k | ------------------------------------------------------------ |
| NOV40l | ------------------------------------------------------------ |
| NOV40m | ------------------------------------------------------------ |
| NOV40n | ------------------------------------------------------------ |
| NOV40o | ------------------------------------------------------------ |
| NOV40p | ------------------------------------------------------------ |
| NOV40q | ------------------------------------------------------------ |
| NOV40r | ------------------------------------------------------------ |
| NOV40s | GLLATKSDETGWTTFFDYDSEGRLTNVTFPTGVVTNLHGDMDKAITVDIESSSREEDVSI |
| NOV40t | ------------------------------------------------------------ |
| NOV40u | VTKREIKIGPFANTTKYAYEYDVDGQLQTVYLNEKIMWRYNYDLNGNLHLLNPSNSARLT |
| NOV40v | ------------------------------------------------------------ |
| NOV40w | ------------------------------------------------------------ |
| NOV40x | ------------------------------------------------------------ |
| NOV40y | ------------------------------------------------------------ |
| NOV40z | ------------------------------------------------------------ |
| NOV40aa | ------------------------------------------------------------ |
| NOV40ab | ------------------------------------------------------------ |
| NOV40ac | ------------------------------------------------------------ |
| NOV40a | PLRYDLRDRITRLGDVQYRLDEDGFLRQRGTEIFEYSSKGLLTRVYSKGSGWTVIYRYDG |
| NOV40b | ------------------------------------------------------------ |
| NOV40c | ------------------------------------------------------------ |
| NOV40d | ------------------------------------------------------------ |
| NOV40e | ------------------------------------------------------------ |
| NOV40f | ------------------------------------------------------------ |
| NOV40g | ------------------------------------------------------------ |
| NOV40h | ------------------------------------------------------------ |
| NOV40i | PLRYDLRDRITRLGDVQYRLDEDGFLRQRGTEIFEYSSKGLLTRVYSKGSGWTVIYRYDG |
| NOV40j | ------------------------------------------------------------ |
| NOV40k | ------------------------------------------------------------ |
| NOV40l | ------------------------------------------------------------ |
| NOV40m | ------------------------------------------------------------ |
| NOV40n | ------------------------------------------------------------ |
| NOV40o | ------------------------------------------------------------ |
| NOV40p | ------------------------------------------------------------ |
| NOV40q | ------------------------------------------------------------ |
| NOV40r | ------------------------------------------------------------ |
| NOV40s | TSNLSSIDSFYTMVQDQLRNSYQIGYDGSLRIIYASGLDSHYQTEPHVLAGTANPTVAKR |
| NOV40t | ------------------------------------------------------------ |
| NOV40u | PLRYDLRDRITRLGDVQYRLDEDGFLRQRGTEIFEYSSKGLLTRVYSKGSGWTVIYRYDG |
| NOV40v | ------------------------------------------------------------ |
| NOV40w | ------------------------------------------------------------ |
| NOV40x | ------------------------------------------------------------ |
| NOV40y | ------------------------------------------------------------ |
| NOV40z | ------------------------------------------------------------ |
| NOV40aa | ------------------------------------------------------------ |
| NOV40ab | ------------------------------------------------------------ |
| NOV40ac | ------------------------------------------------------------ |
| NOV40a | LGRRVSSKTSLGQHLQFFYADLTYPTRITHVYNHSSSEITSLYYDLQGHLFAMEISSGDE |
| NOV40b | ------------------------------------------------------------ |
| NOV40c | ------------------------------------------------------------ |
| NOV40d | ------------------------------------------------------------ |
| NOV40e | ------------------------------------------------------------ |
| NOV40f | ------------------------------------------------------------ |
| NOV40g | ------------------------------------------------------------ |
| NOV40h | ------------------------------------------------------------ |
| NOV40i | LGRRVSSKTSLGQHLQFFYADLTYPTRITHVYNHSSSEITSLYYDLQGHLFAMEISSGDE |
| NOV40j | ------------------------------------------------------------ |
| NOV40k | ------------------------------------------------------------ |
| NOV40l | ------------------------------------------------------------ |
| NOV40m | ------------------------------------------------------------ |
| NOV40n | ------------------------------------------------------------ |
| NOV40o | ------------------------------------------------------------ |
| NOV40p | ------------------------------------------------------------ |
| NOV40q | ------------------------------------------------------------ |
| NOV40r | ------------------------------------------------------------ |
| NOV40s | NMTLPGENGQNLVEWRFRKEQAQGKVNVFGRKLRVNGRNLLSVDFDRTTKTEKIYDDHRK |
| NOV40t | ------------------------------------------------------------ |
| NOV40u | LGRRVSSKTSLGQHLQFFYADLTYPTRITHVYNHSSSEITSLYYDLQGHLFAMEISSGDE |
| NOV40v | ------------------------------------------------------------ |
| NOV40w | ------------------------------------------------------------ |
| NOV40x | ------------------------------------------------------------ |
| NOV40y | ------------------------------------------------------------ |
| NOV40z | ------------------------------------------------------------ |
| NOV40aa | ------------------------------------------------------------ |
| NOV40ab | ------------------------------------------------------------ |
| NOV40ac | ------------------------------------------------------------ |
| NOV40a | FYIASDNTGTPLAVFSSNGLMLKQIQYTAYGEIYFDSNIDFQLVIGFHGGLYDPLTKLIH |
| NOV40b | ------------------------------------------------------------ |
| NOV40c | ------------------------------------------------------------ |
| NOV40d | ------------------------------------------------------------ |
| NOV40e | ------------------------------------------------------------ |
| NOV40f | ------------------------------------------------------------ |
| NOV40g | ------------------------------------------------------------ |
| NOV40h | ------------------------------------------------------------ |
| NOV40i | FYIASDNTGTPLAVFSSNGLMLKQIQYTAYGEIYFDSNIDFQLVIGFHGGLYDPLTKLIH |
| NOV40j | ------------------------------------------------------------ |
| NOV40k | ------------------------------------------------------------ |
| NOV40l | ------------------------------------------------------------ |
| NOV40m | ------------------------------------------------------------ |
| NOV40n | ------------------------------------------------------------ |
| NOV40o | ------------------------------------------------------------ |
| NOV40p | ------------------------------------------------------------ |
| NOV40q | ------------------------------------------------------------ |
| NOV40r | ------------------------------------------------------------ |
| NOV40s | FLLRIAYDTSGHPTLWLPSSKLMAVNVTYSSTGQIASIQRGTTSEKVDYDGQGRIVSRVF |
| NOV40t | ------------------------------------------------------------ |
| NOV40u | FYIASDNTGTPLAVFSSNGLMLKQIQYTAYGEIYFDSNIDFQLVIGFHGGLYDPLTKLIH |
| NOV40v | ------------------------------------------------------------ |
| NOV40w | ------------------------------------------------------------ |
| NOV40x | ------------------------------------------------------------ |
| NOV40y | ------------------------------------------------------------ |
| NOV40z | ------------------------------------------------------------ |
| NOV40aa | ------------------------------------------------------------ |
| NOV40ab | ------------------------------------------------------------ |
| NOV40ac | ------------------------------------------------------------ |
| NOV40a | FGERDYDILAGRWTTPDIEIWKRIGKDPAPFNLYMFRNNNPASKIHDVKDYITDVNSWLV |
| NOV40b | ------------------------------------------------------------ |
| NOV40c | ------------------------------------------------------------ |
| NOV40d | ------------------------------------------------------------ |
| NOV40e | ------------------------------------------------------------ |
| NOV40f | ------------------------------------------------------------ |
| NOV40g | ------------------------------------------------------------ |
| NOV40h | ------------------------------------------------------------ |
| NOV40i | FGERDYDILAGRWTTPDIEIWKRIGKDPAPFNLYMFRNNNPASKIHDVKDYITDVNSWLV |
| NOV40j | ------------------------------------------------------------ |
| NOV40k | ------------------------------------------------------------ |
| NOV40l | ------------------------------------------------------------ |
| NOV40m | ------------------------------------------------------------ |
| NOV40n | ------------------------------------------------------------ |
| NOV40o | ------------------------------------------------------------ |
| NOV40p | ------------------------------------------------------------ |
| NOV40q | ------------------------------------------------------------ |
| NOV40r | ------------------------------------------------------------ |
| NOV40s | ADGKTWSYTYLEKSMVLLLHSQRQYIFEYDMWDRLSAITMPSVARHTMQTIRSIGYYRNI |
| NOV40t | ------------------------------------------------------------ |
| NOV40u | FGERDYDILAGRWTTPDIEIWKRIGKDPAPFNLYMFRNNNPASKIHDVKDYITDVNSWLV |
| NOV40v | ------------------------------------------------------------ |
| NOV40w | ------------------------------------------------------------ |
| NOV40x | ------------------------------------------------------------ |
| NOV40y | ------------------------------------------------------------ |
| NOV40z | ------------------------------------------------------------ |
| NOV40aa | ------------------------------------------------------------ |
| NOV40ab | ------------------------------------------------------------ |
| NOV40ac | ------------------------------------------------------------ |
| NOV40a | TFGFHLHNAIPGFPVPKFDLTEPSYELVKSQQWDDIPPIFGVQQQVARQAKAFLSLGKMA |
| NOV40b | ------------------------------------------------------------ |
| NOV40c | ------------------------------------------------------------ |
| NOV40d | ------------------------------------------------------------ |
| NOV40e | ------------------------------------------------------------ |
| NOV40f | ------------------------------------------------------------ |
| NOV40g | ------------------------------------------------------------ |
| NOV40h | ------------------------------------------------------------ |
| NOV40i | TFGFHLHNAIPGFPVPKFDLTEPSYELVKSQQWDDIPPIFGVQQQVARQAKAFLSLGKMA |
| NOV40j | ------------------------------------------------------------ |
| NOV40k | ------------------------------------------------------------ |
| NOV40l | ------------------------------------------------------------ |
| NOV40m | ------------------------------------------------------------ |
| NOV40n | ------------------------------------------------------------ |
| NOV40o | ------------------------------------------------------------ |
| NOV40p | ------------------------------------------------------------ |
| NOV40q | ------------------------------------------------------------ |
| NOV40r | ------------------------------------------------------------ |
| NOV40s | YNPPESNASIITDYNEEGLLLQTAFLGTSRRVLFKYRRQTRLSEILYDSTRVSFTYDETA |
| NOV40t | ------------------------------------------------------------ |
| NOV40u | TFGFHLHNAIPGFPVPKFDLTEPSYELVKSQQWDDIPPIFGVQQQVARQAKAFLSLGKMA |
| NOV40v | ------------------------------------------------------------ |
| NOV40w | ------------------------------------------------------------ |
| NOV40x | ------------------------------------------------------------ |
| NOV40y | ------------------------------------------------------------ |
| NOV40z | ------------------------------------------------------------ |
| NOV40aa | ------------------------------------------------------------ |
| NOV40ab | ------------------------------------------------------------ |
| NOV40ac | ------------------------------------------------------------ |
| NOV40a | EVQVSRRRAGGAQSWLWFATVKSLIGKGVMLAVSQGRVQTNVLNIANEDCIKVAAVLNNA |
| NOV40b | ------------------------------------------------------------ |
| NOV40c | ------------------------------------------------------------ |
| NOV40d | ------------------------------------------------------------ |
| NOV40e | ------------------------------------------------------------ |
| NOV40f | ------------------------------------------------------------ |
| NOV40g | ------------------------------------------------------------ |
| NOV40h | ------------------------------------------------------------ |
| NOV40i | EVQVSRRRAGGAQSWLWFATVKSLIGKGVMLAVSQGRVQTNVLNIANEDCIKVAAVLNNA |
| NOV40j | ------------------------------------------------------------ |
| NOV40k | ------------------------------------------------------------ |
| NOV40l | ------------------------------------------------------------ |
| NOV40m | ------------------------------------------------------------ |
| NOV40n | ------------------------------------------------------------ |
| NOV40o | ------------------------------------------------------------ |
| NOV40p | ------------------------------------------------------------ |
| NOV40q | ------------------------------------------------------------ |
| NOV40r | ------------------------------------------------------------ |
| NOV40s | GVLKTVNLQSDGFICTIRYRQIGPLIDRQIFRFSEDGMVNARFDYSYDNSFRVTSMQGVI |
| NOV40t | ------------------------------------------------------------ |
| NOV40u | EVQVSRRRAGGAQSWLWFATVKSLIGKGVMLAVSQGRVQTNVLNIANEDCIKVAAVLNNA |
| NOV40v | ------------------------------------------------------------ |
| NOV40w | ------------------------------------------------------------ |
| NOV40x | ------------------------------------------------------------ |
| NOV40y | ------------------------------------------------------------ |
| NOV40z | ------------------------------------------------------------ |
| NOV40aa | ------------------------------------------------------------ |
| NOV40ab | ------------------------------------------------------------ |
| NOV40ac | ------------------------------------------------------------ |
| NOV40a | FYLENLHFTIEGKDTHYFIKTTTPESDLGTLRLTSGRKALENGINVTVSQSTTVVNGRTR |
| NOV40b | ------------------------------------------------------------ |
| NOV40c | ------------------------------------------------------------ |
| NOV40d | ------------------------------------------------------------ |
| NOV40e | ------------------------------------------------------------ |
| NOV40f | ------------------------------------------------------------ |
| NOV40g | ------------------------------------------------------------ |
| NOV40h | ------------------------------------------------------------ |
| NOV40i | FYLENLHFTIEGKDTHYFIKTTTPESDLGTLRLTSGRKALENGINVTVSQSTTVVNGRTR |
| NOV40j | ------------------------------------------------------------ |
| NOV40k | ------------------------------------------------------------ |
| NOV40l | ------------------------------------------------------------ |
| NOV40m | ------------------------------------------------------------ |
| NOV40n | ------------------------------------------------------------ |
| NOV40o | ------------------------------------------------------------ |
| NOV40p | ------------------------------------------------------------ |
| NOV40q | ------------------------------------------------------------ |
| NOV40r | ------------------------------------------------------------ |
| NOV40s | NETPLPIDLYQFDDISGKVEQFGKFGVIYYDINQIISTAVMTYTKHFDAHGRIKEIQYEI |
| NOV40t | ------------------------------------------------------------ |
| NOV40u | FYLENLHFTIEGKDTHYFIKTTTPESDLGTLRLTSGRKALENGINVTVSQSTTVVNGRTR |
| NOV40v | ------------------------------------------------------------ |
| NOV40w | ------------------------------------------------------------ |
| NOV40x | ------------------------------------------------------------ |
| NOV40y | ------------------------------------------------------------ |
| NOV40z | ------------------------------------------------------------ |
| NOV40aa | ------------------------------------------------------------ |
| NOV40ab | ------------------------------------------------------------ |
| NOV40ac | ------------------------------------------------------------ |
| NOV40a | RFADVEMQFGALALHVRYGMTLDEEKARILEQARQRALARAWAREQQRVRDGEEGARLWT |
| NOV40b | ------------------------------------------------------------ |
| NOV40c | ------------------------------------------------------------ |
| NOV40d | ------------------------------------------------------------ |
| NOV40e | ------------------------------------------------------------ |
| NOV40f | ------------------------------------------------------------ |
| NOV40g | ------------------------------------------------------------ |
| NOV40h | ------------------------------------------------------------ |
| NOV40i | RFADVEMQFGALALHVRYGMTLDEEKARILEQARQRALARAWAREQQRVRDGEEGARLWT |
| NOV40j | ------------------------------------------------------------ |
| NOV40k | ------------------------------------------------------------ |
| NOV40l | ------------------------------------------------------------ |
| NOV40m | ------------------------------------------------------------ |
| NOV40n | ------------------------------------------------------------ |
| NOV40o | ------------------------------------------------------------ |
| NOV40p | ------------------------------------------------------------ |
| NOV40q | ------------------------------------------------------------ |
| NOV40r | ------------------------------------------------------------ |
| NOV40s | FRSLMYWITIQYDNNGRVTKREIKIGPFANTTKYAYEYDVDGQLQTVYLNEKIMWRYNYD |
| NOV40t | ------------------------------------------------------------ |
| NOV40u | RFADVEMQFGALALHVRYGMTLDEEKARILEQARQRALARAWAREQQRVRDGEEGARLWT |
| NOV40V | ------------------------------------------------------------ |
| NOV40w | ------------------------------------------------------------ |
| NOV40x | ------------------------------------------------------------ |
| NOV40y | ------------------------------------------------------------ |
| NOV40z | ------------------------------------------------------------ |
| NOV40aa | ------------------------------------------------------------ |
| NOV40ab | ------------------------------------------------------------ |
| NOV40ac | ------------------------------------------------------------ |
| NOV40a | EGEKRQLLSAGKVQGYDGYYVLSVEQYPELADSANNIQFLRQSEIGRR------------ |
| NOV40b | ------------------------------------------------------------ |
| NOV40c | ------------------------------------------------------------ |
| NOV40d | ------------------------------------------------------------ |
| NOV40e | ------------------------------------------------------------ |
| NOV40f | ------------------------------------------------------------ |
| NOV40g | ------------------------------------------------------------ |
| NOV40h | ------------------------------------------------------------ |
| NOV40i | EGEKRQLLSAGKVQGYDGYYVLSVEQYPELADSANNIQFLRQSEIGRR------------ |
| NOV40j | ------------------------------------------------------------ |
| NOV40k | ------------------------------------------------------------ |
| NOV40l | ------------------------------------------------------------ |
| NOV40m | ------------------------------------------------------------ |
| NOV40n | ------------------------------------------------------------ |
| NOV40o | ------------------------------------------------------------ |
| NOV40p | ------------------------------------------------------------ |
| NOV40q | ------------------------------------------------------------ |
| NOV40r | ------------------------------------------------------------ |
| NOV40s | LNGNLHLLNPSNSARLTPLRYDLRDRITRLGDVQYRLDEDGFLRQRGTEIFEYSSKGLLT |
| NOV40t | ------------------------------------------------------------ |
| NOV40u | EGEKRQLLSAGKVQGYDGYYVLSVEQYPELADSANNIQFLRQSEIGRR------------ |
| NOV40v | ------------------------------------------------------------ |
| NOV40w | ------------------------------------------------------------ |
| NOV40x | ------------------------------------------------------------ |
| NOV40y | ------------------------------------------------------------ |
| NOV40z | ------------------------------------------------------------ |
| NOV40aa | ------------------------------------------------------------ |
| NOV40ab | ------------------------------------------------------------ |
| NOV40ac | ------------------------------------------------------------ |
| NOV40a | ------------------------------------------------------------ |
| NOV40b | ------------------------------------------------------------ |
| NOV40c | ------------------------------------------------------------ |
| NOV40d | ------------------------------------------------------------ |
| NOV40e | ------------------------------------------------------------ |
| NOV40f | ------------------------------------------------------------ |
| NOV40g | ------------------------------------------------------------ |
| NOV40h | ------------------------------------------------------------ |
| NOV40i | ------------------------------------------------------------ |
| NOV40j | ------------------------------------------------------------ |
| NOV40k | ------------------------------------------------------------ |
| NOV40l | ------------------------------------------------------------ |
| NOV40m | ------------------------------------------------------------ |
| NOV40n | ------------------------------------------------------------ |
| NOV40o | ------------------------------------------------------------ |
| NOV40p | ------------------------------------------------------------ |
| NOV40q | ------------------------------------------------------------ |
| NOV40r | ------------------------------------------------------------ |
| NOV40s | RVYSKGSGWTVIYRYDGLGRRVSSKTSLGQHLQFFYADLTYPTRITHVYNHSSSEITSLY |
| NOV40t | ------------------------------------------------------------ |
| NOV40u | ------------------------------------------------------------ |
| NOV40v | ------------------------------------------------------------ |
| NOV40w | ------------------------------------------------------------ |
| NOV40x | ------------------------------------------------------------ |
| NOV40y | ------------------------------------------------------------ |
| NOV40z | ------------------------------------------------------------ |
| NOV40aa | ------------------------------------------------------------ |
| NOV40ab | ------------------------------------------------------------ |
| NOV40ac | ------------------------------------------------------------ |
| NOV40a | ------------------------------------------------------------ |
| NOV40b | ------------------------------------------------------------ |
| NOV40c | ------------------------------------------------------------ |
| NOV40d | ------------------------------------------------------------ |
| NOV40e | ------------------------------------------------------------ |
| NOV40f | ------------------------------------------------------------ |
| NOV40g | ------------------------------------------------------------ |
| NOV40h | ------------------------------------------------------------ |
| NOV40i | ------------------------------------------------------------ |
| NOV40j | ------------------------------------------------------------ |
| NOV40k | ------------------------------------------------------------ |
| NOV40l | ------------------------------------------------------------ |
| NOV40m | ------------------------------------------------------------ |
| NOV40n | ------------------------------------------------------------ |
| NOV40o | ------------------------------------------------------------ |
| NOV40p | ------------------------------------------------------------ |
| NOV40q | ------------------------------------------------------------ |
| NOV40r | ------------------------------------------------------------ |
| NOV40s | YDLQGHLFAMEISSGDEFYIASDNTGTPLAVFSSNGLMLKQIQYTAYGEIYFDSNIDFQL |
| NOV40t | ------------------------------------------------------------ |
| NOV40u | ------------------------------------------------------------ |
| NOV40v | ------------------------------------------------------------ |
| NOV40w | ------------------------------------------------------------ |
| NOV40x | ------------------------------------------------------------ |
| NOV40y | ------------------------------------------------------------ |
| NOV40z | ------------------------------------------------------------ |
| NOV40aa | ------------------------------------------------------------ |
| NOV40ab | ------------------------------------------------------------ |
| NOV40ac | ------------------------------------------------------------ |
| NOV40a | ------------------------------------------------------------ |
| NOV40b | ------------------------------------------------------------ |
| NOV40c | ------------------------------------------------------------ |
| NOV40d | ------------------------------------------------------------ |
| NOV40e | ------------------------------------------------------------ |
| NOV40f | ------------------------------------------------------------ |
| NOV40g | ------------------------------------------------------------ |
| NOV40h | ------------------------------------------------------------ |
| NOV40i | ------------------------------------------------------------ |
| NOV40j | ------------------------------------------------------------ |
| NOV40k | ------------------------------------------------------------ |
| NOV40l | ------------------------------------------------------------ |
| NOV40m | ------------------------------------------------------------ |
| NOV40n | ------------------------------------------------------------ |
| NOV40o | ------------------------------------------------------------ |
| NOV40p | ------------------------------------------------------------ |
| NOV40q | ------------------------------------------------------------ |
| NOV40r | ------------------------------------------------------------ |
| NOV40s | VIGFHGGLYDPLTKLIHFGERDYDILAGRWTTPDIEIWKRIGKDPAPFNLYMFRNNNPAS |
| NOV40t | ------------------------------------------------------------ |
| NOV40u | ------------------------------------------------------------ |
| NOV40v | ------------------------------------------------------------ |
| NOV40w | ------------------------------------------------------------ |
| NOV40x | ------------------------------------------------------------ |
| NOV40y | ------------------------------------------------------------ |
| NOV40z | ------------------------------------------------------------ |
| NOV40aa | ------------------------------------------------------------ |
| NOV40ab | ------------------------------------------------------------ |
| NOV40ac | ------------------------------------------------------------ |
| NOV40a | ------------------------------------------------------------ |
| NOV40b | ------------------------------------------------------------ |
| NOV40c | ------------------------------------------------------------ |
| NOV40d | ------------------------------------------------------------ |
| NOV40e | ------------------------------------------------------------ |
| NOV40f | ------------------------------------------------------------ |
| NOV40g | ------------------------------------------------------------ |
| NOV40h | ------------------------------------------------------------ |
| NOV40i | ------------------------------------------------------------ |
| NOV40j | ------------------------------------------------------------ |
| NOV40k | ------------------------------------------------------------ |
| NOV40l | ------------------------------------------------------------ |
| NOV40m | ------------------------------------------------------------ |
| NOV40n | ------------------------------------------------------------ |
| NOV40o | ------------------------------------------------------------ |
| NOV40p | ------------------------------------------------------------ |
| NOV40q | ------------------------------------------------------------ |
| NOV40r | ------------------------------------------------------------ |
| NOV40s | KIHDVKDYITDVNSWLVTFGFHLHNAIPGFPVPKFDLTEPSYELVKSQQWDDIPPIFGVQ |
| NOV40t | ------------------------------------------------------------ |
| NOV40u | ------------------------------------------------------------ |
| NOV40v | ------------------------------------------------------------ |
| NOV40w | ------------------------------------------------------------ |
| NOV40x | ------------------------------------------------------------ |
| NOV40y | ------------------------------------------------------------ |
| NOV40z | ------------------------------------------------------------ |
| NOV40aa | ------------------------------------------------------------ |
| NOV40ab | ------------------------------------------------------------ |
| NOV40ac | ------------------------------------------------------------ |
| NOV40a | ------------------------------------------------------------ |
| NOV40b | ------------------------------------------------------------ |
| NOV40c | ------------------------------------------------------------ |
| NOV40d | ------------------------------------------------------------ |
| NOV40e | ------------------------------------------------------------ |
| NOV40f | ------------------------------------------------------------ |
| NOV40g | ------------------------------------------------------------ |
| NOV40h | ------------------------------------------------------------ |
| NOV40i | ------------------------------------------------------------ |
| NOV40j | ------------------------------------------------------------ |
| NOV40k | ------------------------------------------------------------ |
| NOV40l | ------------------------------------------------------------ |
| NOV40m | ------------------------------------------------------------ |
| NOV40n | ------------------------------------------------------------ |
| NOV40o | ------------------------------------------------------------ |
| NOV40p | ------------------------------------------------------------ |
| NOV40q | ------------------------------------------------------------ |
| NOV40r | ------------------------------------------------------------ |
| NOV40s | QQVARQAKAFLSLGKMAEVQVSRRRAGGAQSWLWFATVKSLIGKGVMLAVSQGRVQTNVL |
| NOV40t | ------------------------------------------------------------ |
| NOV40u | ------------------------------------------------------------ |
| NOV40v | ------------------------------------------------------------ |
| NOV40w | ------------------------------------------------------------ |
| NOV40x | ------------------------------------------------------------ |
| NOV40y | ------------------------------------------------------------ |
| NOV40z | ------------------------------------------------------------ |
| NOV40aa | ------------------------------------------------------------ |
| NOV40ab | ------------------------------------------------------------ |
| NOV40ac | ------------------------------------------------------------ |
| NOV40a | ------------------------------------------------------------ |
| NOV40b | ------------------------------------------------------------ |
| NOV40c | ------------------------------------------------------------ |
| NOV40d | ------------------------------------------------------------ |
| NOV40e | ------------------------------------------------------------ |
| NOV40f | ------------------------------------------------------------ |
| NOV40g | ------------------------------------------------------------ |
| NOV40h | ------------------------------------------------------------ |
| NOV40i | ------------------------------------------------------------ |
| NOV40j | ------------------------------------------------------------ |
| NOV40k | ------------------------------------------------------------ |
| NOV40l | ------------------------------------------------------------ |
| NOV40m | ------------------------------------------------------------ |
| NOV40n | ------------------------------------------------------------ |
| NOV40o | ------------------------------------------------------------ |
| NOV40p | ------------------------------------------------------------ |
| NOV40q | ------------------------------------------------------------ |
| NOV40r | ------------------------------------------------------------ |
| NOV40s | NIANEDCIKVAAVLNNAFYLENLHFTIEGKDTHYFIKTTTPESDLGTLRLTSGRKALENG |
| NOV40t | ------------------------------------------------------------ |
| NOV40u | ------------------------------------------------------------ |
| NOV40v | ------------------------------------------------------------ |
| NOV40w | ------------------------------------------------------------ |
| NOV40x | ------------------------------------------------------------ |
| NOV40y | ------------------------------------------------------------ |
| NOV40z | ------------------------------------------------------------ |
| NOV40aa | ------------------------------------------------------------ |
| NOV40ab | ------------------------------------------------------------ |
| NOV40ac | ------------------------------------------------------------ |
| NOV40a | ------------------------------------------------------------ |
| NOV40b | ------------------------------------------------------------ |
| NOV40c | ------------------------------------------------------------ |
| NOV40d | ------------------------------------------------------------ |
| NOV40e | ------------------------------------------------------------ |
| NOV40f | ------------------------------------------------------------ |
| NOV40g | ------------------------------------------------------------ |
| NOV40h | ------------------------------------------------------------ |
| NOV40i | ------------------------------------------------------------ |
| NOV40j | ------------------------------------------------------------ |
| NOV40k | ------------------------------------------------------------ |
| NOV40l | ------------------------------------------------------------ |
| NOV40m | ------------------------------------------------------------ |
| NOV40n | ------------------------------------------------------------ |
| NOV40o | ------------------------------------------------------------ |
| NOV40p | ------------------------------------------------------------ |
| NOV40q | ------------------------------------------------------------ |
| NOV40r | ------------------------------------------------------------ |
| NOV40s | INVTVSQSTTVVNGRTRRFADVEMQFGALALHVRYGMTLDEEKARILEQARQRALARAWA |
| NOV40t | ------------------------------------------------------------ |
| NOV40u | ------------------------------------------------------------ |
| NOV40v | ------------------------------------------------------------ |
| NOV40w | ------------------------------------------------------------ |
| NOV40x | ------------------------------------------------------------ |
| NOV40y | ------------------------------------------------------------ |
| NOV40z | ------------------------------------------------------------ |
| NOV40aa | ------------------------------------------------------------ |
| NOV40ab | ------------------------------------------------------------ |
| NOV40ac | ------------------------------------------------------------ |
| NOV40a | ------------------------------------------------------------ |
| NOV40b | ------------------------------------------------------------ |
| NOV40c | ------------------------------------------------------------ |
| NOV40d | ------------------------------------------------------------ |
| NOV40e | ------------------------------------------------------------ |
| NOV40f | ------------------------------------------------------------ |
| NOV40g | ------------------------------------------------------------ |
| NOV40h | ------------------------------------------------------------ |
| NOV40i | ------------------------------------------------------------ |
| NOV40j | ------------------------------------------------------------ |
| NOV40k | ------------------------------------------------------------ |
| NOV40l | ------------------------------------------------------------ |
| NOV40m | ------------------------------------------------------------ |
| NOV40n | ------------------------------------------------------------ |
| NOV40o | ------------------------------------------------------------ |
| NOV40p | ------------------------------------------------------------ |
| NOV40q | ------------------------------------------------------------ |
| NOV40r | ------------------------------------------------------------ |
| NOV40s | REQQRVRDGEEGARLWTEGEKRQLLSAGKVQGYDGYYVLSVEQYPELADSANNIQFLRQS |
| NOV40t | ------------------------------------------------------------ |
| NOV40u | ------------------------------------------------------------ |
| NOV40v | ------------------------------------------------------------ |
| NOV40w | ------------------------------------------------------------ |
| NOV40x | ------------------------------------------------------------ |
| NOV40y | ------------------------------------------------------------ |
| NOV40z | ------------------------------------------------------------ |
| NOV40aa | ------------------------------------------------------------ |
| NOV40ab | ------------------------------------------------------------ |
| NOV40ac | ------------------------------------------------------------ |
| NOV40a | ----- |
| NOV40b | ----- |
| NOV40c | ----- |
| NOV40d | ----- |
| NOV40e | ----- |
| NOV40f | ----- |
| NOV40g | ----- |
| NOV40h | ----- |
| NOV40i | ----- |
| NOV40j | ----- |
| NOV40k | ----- |
| NOV40l | ----- |
| NOV40m | ----- |
| NOV40n | ----- |
| NOV40o | ----- |
| NOV40p | ----- |
| NOV40q | ----- |
| NOV40r | ----- |
| NOV40s | EIGRR |
| NOV40t | ----- |
| NOV40u | ----- |
| NOV40v | ----- |
| NOV40w | ----- |
| NOV40x | ----- |
| NOV40y | ----- |
| NOV40z | ----- |
| NOV40aa | ----- |
| NOV40ab | ----- |
| NOV40ac | ----- |
| NOV40a | (SEQ ID NO: 486) |
| NOV40b | (SEQ ID NO: 488) |
| NOV40c | (SEQ ID NO: 490) |
| NOV40d | (SEQ ID NO: 492) |
| NOV40e | (SEQ ID NO: 494) |
| NOV40f | (SEQ ID NO: 496) |
| NOV40g | (SEQ ID NO: 498) |
| NOV40h | (SEQ ID NO: 500) |
| NOV40i | (SEQ ID NO: 502) |
| NOV40j | (SEQ ID NO: 504) |
| NOV40k | (SEQ ID NO: 506) |
| NOV40l | (SEQ ID NO: 508) |
| NOV40m | (SEQ ID NO: 510) |
| NOV40n | (SEQ ID NO: 512) |
| NOV40o | (SEQ ID NO: 514) |
| NOV40p | (SEQ ID NO: 516) |
| NOV40q | (SEQ ID NO: 518) |
| NOV40r | (SEQ ID NO: 520) |
| NOV40s | (SEQ ID NO: 522) |
| NOV40t | (SEQ ID NO: 524) |
| NOV40u | (SEQ ID NO: 526) |
| NOV40v | (SEQ ID NO: 528) |
| NOV40w | (SEQ ID NO: 530) |
| NOV40x | (SEQ ID NO: 532) |
| NOV40y | (SEQ ID NO: 534) |
| NOV40z | (SEQ ID NO: 536) |
| NOV40aa | (SEQ ID NO: 538) |
| NOV40ab | (SEQ ID NO: 540) |
| NOV40ac | (SEQ ID NO: 542) |

[0579] Further analysis of the NOV40a protein yielded the following properties shown in Table 40C.

TABLE 40C
Protein Sequence Properties NOV40a

| | |
|---|---|
| SignalP analysis: | No Known Signal Sequence Indicated |

PSORT II analysis:
PSG: a new signal peptide prediction method

N-region: length 7; pos.chg 3; neg.chg 2
H-region: length 6; peak value −1.30
PSG score: −5.70

GvH: von Heijne's method for signal seq. recognition

GvH score (threshold: −2.1): −13.53
possible cleavage site: between 60 and 61

>>> Seems to have no N-terminal signal peptide
ALOM: Klein et al's method for TM region allocation

| Init position for calculation: 1 | | |
|---|---|---|
| Tentative number of TMS(s) for the threshold 0.5: 3 | | |
| Number of TMS(s) for threshold 0.5: 1 | | |
| INTEGRAL | Likelihood = −9.39 | Transmembrane 309-325 |

| | |
|---|---|
| PERIPHERAL | Likelihood = 2.54 (at 2515) |

ALOM score: −9.39 (number of TMSs: 1)

MTOP: Prediction of membrane topology (Hartmann et al.)

Center position for calculation: 316
Charge difference: −6.5 C(−1.5) − N(5.0)
N >= C: N-terminal side will be inside

>>> membrane topology: type 2 (cytoplasmic tail 1 to 309)
MITDISC: discrimination of mitochondrial targeting seq

| | | | |
|---|---|---|---|
| R content: | 0 | Hyd Moment(75): | 3.03 |
| Hyd Moment(95): | 4.83 | G content: | 0 |
| D/E content: | 2 | S/T content: | 0 |

Score: −7.62

Gavel: prediction of cleavage sites for mitochondrial preseq

cleavage site motif not found

NUCDISC: discrimination of nuclear localization signals

pat4: none
pat7: none
bipartite: RRPYCSLTKSRREKERR at 6
bipartite: RKEQAQGKVNVFGRKLR at 1778
content of basic residues: 9.9%
NLS Score: 0.51

KDEL: ER retention motif in the C-terminus: none
ER Membrane Retention Signals: none
SKL: peroxisomal targeting signal in the C-terminus: none
PTS2: 2nd peroxisomal targeting signal: none
VAC: possible vacuolar targeting motif: none
RNA-binding motif: none
Actinin-type actin-binding motif:

type 1: none
type 2: none

NMYR: N-myristoylation pattern: none
Prenylation motif: none
memYQRL: transport motif from cell surface to Golgi: none
Tyrosines in the tail: too long tail
Dileucine motif in the tail: found

LL at 57

checking 63 PROSITE DNA binding motifs:

Leucine zipper pattern (PS00029): *** found ***

LTPLRYDLRDRITRLGDVQYRL at 2196

none
checking 71 PROSITE ribosomal protein motifs: none
checking 33 PROSITE prokaryotic DNA binding motifs: none
NNCN: Reinhardt's method for Cytoplasmic/Nuclear discrimination

Prediction: nuclear
Reliability: 55.5

COIL: Lupas's algorithm to detect coiled-coil regions

total: 0 residues

Final Results (k = 9/23):

```
34.8%: nuclear
26.1%: mitochondrial
13.0%: Golgi
  8.7%: cytoplasmic
  4.3%: plasma membrane
  4.3%: vesicles of secretory system
  4.3%: extracellular, including cell wall
  4.3%: peroxisomal
```

>> prediction for CG55069-01 is nuc (k = 23)

[0580] A search of the NOV40a protein against the Geneseq database, a proprietary database that contains sequences published in patents and patent publication, yielded several homologous proteins shown in Table 40D.

TABLE 40D
Geneseq Results for NOV40a

| | | NOV40a | Identities/ | |
|---|---|---|---|---|
| | | Residues/ | Similarities for | |
| Geneseq | Protein/Organism/Length | Match | the Matched | Expect |
| Identifier | [Patent #, Date] | Residues | Region | Value |
| ABP53586 | Human NOV15a protein SEQ | 1 . . . 2725 | 2725/2725 (100%) | 0.0 |
| | ID NO: 36 - Homo sapiens, | 1 . . . 2725 | 2725/2725 (100%) | |
| | 2725 aa. [WO200262999-A2, | | | |
| | 15-AUG-2002] | | | |
| ABP53587 | Human NOV15b protein SEQ | 1 . . . 2725 | 2720/2725 (99%) | 0.0 |
| | ID NO: 38 - Homo sapiens, | 1 . . . 2721 | 2720/2725 (99%) | |
| | 2721 aa. [WO200262999-A2, | | | |
| | 15-AUG-2002] | | | |
| ABP53588 | Human NOV15c protein SEQ | 148 . . . 2725 | 2553/2579 (98%) | 0.0 |
| | ID NO: 40 - Homo sapiens, | 54 . . . 2628 | 2558/2579 (98%) | |
| | 2628 aa. [WO200262999-A2, | | | |
| | 15-AUG-2002] | | | |
| ABP53589 | Human NOV15d protein SEQ | 148 . . . 2725 | 2536/2579 (98%) | 0.0 |
| | ID NO: 42 - Homo sapiens, | 54 . . . 2613 | 2540/2579 (98%) | |
| | 2613 aa. [WO200262999-A2, | | | |
| | 15-AUG-2002] | | | |
| ABB98401 | Human NOV1, a TEN-M4 like | 1 . . . 2725 | 1917/2813 (68%) | 0.0 |
| | protein - Homo sapiens, 2794 | 1 . . . 2794 | 2260/2813 (80%) | |
| | aa. [WO200255704-A2, 18- | | | |
| | JUL-2002] | | | |

[0581] In a BLAST search of public sequence databases, the NOV40a protein was found to have homology to the proteins shown in the BLASTP data in Table 40E.

TABLE 40E
Public BLASTP Results for NOV40a

| | | NOV40a | Identities/ | |
|---|---|---|---|---|
| Protein | | Residues/ | Similarities for | |
| Accession | | Match | the Matched | Expect |
| Number | Protein/Organism/Length | Residues | Portion | Value |
| Q9WTS6 | Ten-m3 - Mus musculus | 1 . . . 2725 | 2663/2725 (97%) | 0.0 |
| | (Mouse), 2715 aa. | 1 . . . 2715 | 2696/2725 (98%) | |
| Q9JLC1 | ODZ3 - Mus musculus | 354 . . . 2725 | 2308/2372 (97%) | 0.0 |
| | (Mouse), 2346 aa (fragment). | 1 . . . 2346 | 2334/2372 (98%) | |
| Q9W7R4 | Ten-m3 - Brachydanio rerio | 143 . . . 2725 | 2116/2598 (81%) | 0.0 |
| | (Zebrafish) (Danio rerio), 2590 | 27 . . . 2590 | 2352/2598 (90%) | |
| | aa. | | | |
| Q9WTS7 | Ten-m4 - Mus musculus | 1 . . . 2725 | 1867/2790 (66%) | 0.0 |
| | (Mouse), 2771 aa. | 1 . . . 2771 | 2227/2790 (78%) | |
| Q9DER5 | Teneurin-2 - Gallus gallus | 173 . . . 2725 | 1777/2561 (69%) | 0.0 |
| | (Chicken), 2802 aa (fragment). | 267 . . . 2802 | 2138/2561 (83%) | |

[0582] PFam analysis indicates that the NOV40a protein contains the domains shown in the Table 40F.

TABLE 40F
Domain Analysis of NOV40a

| Pfam | NOV40a | Identities/Similarities | Expect |
|---|---|---|---|
| Domain | Match Region | for the Matched Region | Value |
| EGF | 522 . . . 548 | 12/47 (26%) | 0.98 |
| | | 24/47 (51%) | |
| EGF | 586 . . . 613 | 10/47 (21%) | 0.43 |
| | | 19/47 (40%) | |
| EGF | 618 . . . 645 | 12/47 (26%) | 0.093 |
| | | 22/47 (47%) | |
| EGF | 652 . . . 680 | 12/47 (26%) | 0.87 |
| | | 22/47 (47%) | |
| EGF | 716 . . . 742 | 12/47 (26%) | 0.024 |
| | | 23/47 (49%) | |
| EGF | 762 . . . 792 | 11/47 (23%) | 0.66 |
| | | 21/47 (45%) | |
| NHL | 1497 . . . 1524 | 10/29 (34%) | 0.043 |
| | | 22/29 (76%) | |

### Example 41

[0583] The NOV41 clone was analyzed, and the nucleotide and encoded polypeptide sequences are shown in Table 41A.

TABLE 41A

NOV41 Sequence Analysis

| | | |
|---|---|---|
| NOV41a, CG55343-03 | SEQ ID NO: 553 | 943 bp |
| DNA Sequence | ORF Start: ATG at 2 | ORF Stop: TAA at 941 |

TATGAATTGGGTAAATGACAGCATCATACAGGAGTTTATTCTGCTGGGTTTCTCAGATCGACCTTGGC
TGGAGTTTCCACTCCTTGTGGTCTTCTTGATTTCTTACACTGTGACCATCTTTGGCAATCTGACCATT
ATTCTAGTGTCACGCCTGGACACCAAACTTCATACCCCCATGTATTTTTTTCTTACCAATCTATCACT
CCTGGATCTTTGTTACACCACATGTACAGTCCCACAAATGCTAGTAAATTTATGCAGCATCAGGAAAG
TAATCAGTTATCGTGGCTGTGTAGCCCAGCTTTTCATATTTCTGGCCTTGGGGGCTACTGAATATCTT
CTCCTGGCCGTCATGTCCTTTGATTGGTTTGTAGCTATTTGTCGGCCTCTCCATTACTCAGTTATCAT
GCACCAGAGACTCTGCCTCCAGTTGGCAGCTGCATCCTGGGTTACTGGTTTTAGTAACTCAGTGTGGT
TGTCTACCCTGACTCTCCAGCTGCCACTCTGTGACCCCTATGTGATAGATCACTTTCTCTGTGAAGTC
CCTGCACTGCTCAAGTTATCTTGTGTTGAGACAACAGCAAATGAGGCTGAACTATTCCTTGTCAGTGA
GCTCTTCCATCTAATACCCCTGACACTCATCCTTATATCATATGCTTTTATTGTCCGAGCAGTATTGA
GGATACAGTCTGCTGAAGGTCGACAAAAAGCATTTGGGACATGTGGTTCCCATCTAATTGTGGTGTCT
CTTTTTTATAGTACAGCCGTCTCTGTGTACCTGCAACCACCTTCGCCCAGCTCCAAGGACCAAGGAAA
GATGGTTTCTCTCTTCTATGGAATCATTGCACCCATGCTGAATCCCCTTATATATACACTTAGGAACA
AGGAGGTAAAGGAAGGCTTTAAAAGGTTGGTTGCAAGAGTCTTCTTAATCAAGAAATAA

| | | | |
|---|---|---|---|
| NOV41a, CG55343-03 | | | |
| Protein Sequence | SEQ ID NO: 554 | 313 aa | MW at 35443.7kD |

MNWVNDSIIQEFILLGFSDRPWLEFPLLVVFLISYTVTIFGNLTIILVSRLDTKLHTPMYFFLTNLSL
LDLCYTTCTVPQMLVNLCSIRKVISYRGCVAQLFIFLALGATEYLLLAVMSFDWFVAICRPLHYSVIM
HQRLCLQLAAASWVTGFSNSVWLSTLTLQLPLCDPYVIDHFLCEVPALLKLSCVETTANEAELFLVSE
LFHLIPLTLILISYAFIVRAVLRIQSAEGRQKAFGTCGSHLIVVSLFYSTAVSVYLQPPSPSSKDQGK
MVSLFYGIIAPMLNPLIYTLRNKEVKEGFKRLVARVFLIKK

| | | |
|---|---|---|
| NOV41b, 260568382 | SEQ ID NO: 555 | 946 bp |
| DNA Sequence | ORF Start: at 3 | ORF Stop: TAG at 936 |

ATTGGGTAAATGACAGCATCATACAGGAGTTTATTCTGCTGGGTTTCTCAGATCGACCTTGGCTGGAG
TTTCCACTCCTTGTGGTCTTCTTGATTTCTTACACTGTGACCATCTTTGGCAATCTGACCATTATTCT
AGTGTCACGCCTGGACACCAAACTTCATACCCCCATGTATTTTTTTCTTACCAATCTATCACTCCTGG
ATCTTTGTTACACCACATGTACAGTCCCACAAATGCTAGTAAATTTATGCAGCATCAGGAAAGTAATC
AGTTATCGTGGCTGTGTAGCCCAGCTTTTCATATTTCTGGCCTTGGGGGCTACTGAATATCTTCTCCT
GGCCGTCATGTCCTTTGATAGGTTTGTAGCTATTTGTCGGCCTCTCCATTACTCAGTTATCATGCACC
AGAGACTCTGCCTCCAGTTGGCAGCTGCATCCTGGGTTACTGGTTTTAGTAACTCAGTGTGGTTGTCT
ACCCTGACTCTCCAGCTGCCACTCTGTGACCCCTATGTGATAGATCACTTTCTCTGTGAAGTCCCTGC
ACTGCTCAAGTTATCTTGTGTTGAGACAACAGCAAATGAGGCTGAACTATTCCTTGTCAGTGAGCTCT
TCCATCTAATACCCCTGACACTCATCCTTATATCATATGCTTTTATTGTCCGAGCAGTATTGAGGATA
CAGTCTGCTGAAGGTCGACAAAAAGCATTTGGGACATGTGGTTCCCATCTAATTGTGGTGTCTCTTTT
TTATAGTACAGCCGTCTCTGTGTACCTGCAACCACCTTCGCCCAGCTCCAAGGACCAAGGAAAGATGG
TTTCTCTCTTCTATGGAATCATTGCACCCATGCTGAATCCCCTTATATATACACTTAGGAACAAGGAG
GTAAAGGAAGGCTTTAAAAGGTTGGTTGCAAGAGTCTTCTTAATCAAGAAATAGGGATTCGG

| | | | |
|---|---|---|---|
| NOV41b, 260568382 | | | |
| Protein Sequence | SEQ ID NO: 556 | 311 aa | MW at 35168.4kD |

WVNDSIIQEFILLGFSDRPVVLEFPLLVVFLISYTVTIFGNTIILVSRLDTKLHTPMYFFLTNLSLLD
LCYTTCTVPQMLVNLCSIRKVISYRGCVAQLFIFLALGATEYLLLAVMSFDRFVAICRPLHYSVIMHQ
RLCLQLAAASWVTGFSNSVWLSTLTLQLPLCDPYVIDHFLCEVPALLKLSCVETTANEAELFLVSELF
HLIPLTLILISYAFIVRAVLRIQSAEGRQKAFGTCGSHLIVVSLFYSTAVSVYLQPPSPSSKDQGKMV
SLFYGIIAPMLNPLIYTLRNKEVKEGFKRLVARVFLIKK

| | | |
|---|---|---|
| NOV41c, 314361391 | SEQ ID NO: 557 | 960 bp |
| DNA Sequence | ORF Start: at 1 | ORF Stop: end of sequence |

CGCGGATCCACCATGAATTGGGTAAATGACAGCATCATACAGGAGTTTATTTTGCTGGGTTTCTCAGA
TCGACCTTGGCTGGAGTTTCCACTCCTTGTGGTCTTCTTGATTTCTTACACTGTGACCATCTTTGGCA
ATCTGACCATTATTCTAGTGTCACGCCTGGACACCAAACTTCATACCCCCATGTATTTTTTTCTTACC
AATCTATCACTCCTGGATCTTTGTTACACCACATGTACAGTCCCACAAATGCTAGTAAATTTATGCAG
CATCAGGAAAGTAATCAGTTATCGTGGCTGTGTAGCCCAGCTTTTCATATTTCTGGCCAAGGGGGCTA
CTGAATATCTTCTCCTGGCCGTCATGTCCTTTGATAGGTTTGTAGCTATTTGTCGGCCTCTCCATTAC
TCAGTTATCATGCACCAGAGACTCTGCCTCCAGTTGGCAGCTGCATCCTGGGTTACTGGTTTTAGTAA
CTCAGTGTGGTTGTCTACCCTGACTCTCCAGCTGCCACTCTGTGACCCCTATGTGATAGATCACTTTC
TCTGTGAAGTCCCTGCACTGCTCAAGTTATCTTGTGTTGAGACAACAGCAAATGAGGCTGAACTATTC
CTTGTCAGTGAGCTCTTCCATCTAATACCCCTGACACTCATCCTTATATCATATGCTTTTATTGTCCG
AGCAGTATTGAGGATACAGTCTGCTGAAGGTCGACAAAAAGCATTTGGGACATGTGGTTCCCATCTAA
TTGTGGTGTCTCTTTTTTATAGTACAGCCGTCTCTGTGTACCTGCAACCACCTTCGCCCAGCTCCAAG
GACCAAGGAAAGATGGTTTCTCTCTTCTATGGAATCATTGCACCCATGCTGAATCCCCTTATATATAC
ACTTAGGAACAAGGAGGTAAGGAAGGCTTTAAAAGGTTGGTTGCAAGAGTCTTCTTAATCAAGAAAC
TCGAGGCG

| | | | |
|---|---|---|---|
| NOV41c, 314361391 | | | |
| Protein Sequence | SEQ ID NO: 558 | 320 aa | MW at 36128.5kD |

RGSTMNWVNDSIIQEFILLGFSDRPWLEFPLLVVFLISYTVTIFGNLTIILVSRLDTKLHTPMYFFLT
NLSLLDLCYTTCTVPQMLVNLCSIRKVISYRGCVAQLFIFLALGATEYLLLAVMSFDRFVAICRPLHY
SVIMHQRLCLQLAAASWVTGFSNSVWLSTLTLQLPLCDPYVIDHFLCEVPALLKLSCVETTANEAELF
LVSELFHLIPLTLILISYAFIVRAVLRIQSAEGRQKAFGTCGSHLIVVSLFYSTAVSVYLQPPSPSSK
DQGKMVSLFYGIIAPMLNPLIYTLRNKEVKEGFKRLVARVFLIKKLEA

| | | |
|---|---|---|
| NOV41d, 317286137 | SEQ ID NO: 559 | 321 bp |
| DNA Sequence | ORF Start: at 1 | ORF Stop: end of sequence |

CGCGGATCCACCATGAATTGGGTAAATGACAGCATCATACAGGAGTTTATTCTGCTGGGTTTCTCAGA
TCGACCTTGGCTGGAGTTTCCACTCCTTGTGGTCTTCTTGATTTCTTACACTGTGACCATCTTTGGCA
ATCTGACCATTATTCTAGTGTCACGCCTGGACACCAAACTTCATACCCCCATGTATTTTTTTCTTACC
AATCTATCACTCCTGGATCTTTGTTACACCACATGTACAGTCCCACAAATGCTAGTAAATTTATGCAG
CATCAGGAAAGTAATCAGTTATCGTGGCTGTGTAGCCCAGCTCGAGGCG

| | | | |
|---|---|---|---|
| NOV41d, 317286137 | | | |
| Protein Sequence | SEQ ID NO: 560 | 107 aa | MW at 12270.4kD |

RGSTMNWVNDSIIQEFILLGFSDRPWLEFPLLVVFLISYTVTIFGNLTIILVSRLDTKLHTPMYFFLT
NLSLLDLCYTTCTVPQMLVNLCSIRKVISYRGCVAQLEA

| | | |
|---|---|---|
| NOV41e, CG55343-01 | SEQ ID NO: 561 | 943 bp |
| DNA Sequence | ORF Start: ATG at 2 | ORF Stop: TAA at 941 |

TATGAATTGGGTAAATGACAGCATCATACAGGAGTTTATTCTGCTGGGTTTCTCAGATCGACCTTGGC
TGGAGTTTCCACTCCTTGTGGTCTTCTTGATTTCTTACACTGTGACCATCTTTGGCAATCTGACCATT
ATTCTAGTGTCACGCCTGGACACCAAACTTCATACCCCCATGTATTTTTTTCTTACCAATCTATCACT
CCTGGATCTTTGTTACACCACATGTACAGTCCCACAAATGCTAGTAAATTTATGCAGCATCAGGAAAG
TAATCAGTTATCGTGGCTGTGTAGCCCAGCTTTTCATATTTCTGGCCTTGGGGGCTACTGAATATCTT
CTCCTGGCCGTCATGTCCTTTGATTGGTTTGTAGCTATTTGTCGGCCTCTCCATTACTCAGTTATCAT
GCACCAGAGACTCTGCCTCCAGTTGGCAGCTGCATCCTGGGTTACTGGTTTTAGTAACTCAGTGTGGT
TGTCTACCCTGACTCTCCAGCTGCCACTCTGTGACCCCTATGTGATAGATCACTTTCTCTGTGAAGTC
CCTGCACTGCTCAAGTTATCTTGTGTTGAGACAACAGCAAATGAGGCTGAACTATTCCTTGTCAGTGA
GCTCTTCCATCTAATACCCCTGACACTCATCCTTATATCATATGCTTTTATTGTCCGAGCAGTATTGA
GGATACAGTCTGCTGAAGGTCGACAAAAAGCATTTGGGACATGTGGTTCCCATCTAATTGTGGTGTCT
CTTTTTTATAGTACAGCCGTCTCTGTGTACCTGCAACCACCTTCGCCCAGCTCCAAGGACCCGGAAAA
GATGGTTTCTCTCTTCTATGGAATCATTGCACCCATGCTGAATCCCCTTATATATACACTTAGGAACA
AGGAGGTAAAGGAAGGCTTTAAAAGGTTGGTTGCAAGAGTCTTCTTAATCAAGAAATAA

| | | | |
|---|---|---|---|
| NOV41e, CG55343-01 | | | |
| Protein Sequence | SEQ ID NO: 562 | 313 aa | MW at 35443.7kD |

MNWVNDSIIQEFILLGFSDRPWLEFPLLVVFLISYTVTIFGNLTIILVSRLDTKLHTPMYFFLTNLSL
LDLCYTTCTVPQMLVNLCSIRKVISYRGCVAQLFIFLALGATEYLLLAVMSFDWFVAICRPLHYSVIM
HQRLCLQLAAASWVTGFSNSVWSTLTLQLPLCDPYVIADHFLCEVPALLKLSCVETTANEAELFLVSE
LFHLIPLTLILISYAFIVRAVLRIQSABGRQKAFGTCGSHLIVVSLFYSTAVSVYLQPPSPSSKDQGK
MVSLFYGIIAPMLNPLIYTLRNKEVKBGFKRLVARVFLIKK

| | | |
|---|---|---|
| NOV41f, CG55343-02 | SEQ ID NO: 563 | 933 bp |
| DNA Sequence | ORF Start: ATG at 15 | ORF Stop: TAA at 954 |

TTGAAACATTAATCATGAATTGGGTAAATGACAGCATCATACAGGAGTTTATTCTGCTGGGTTTCTCA
GATCGACCTTGGCTGGAGTTTCCACTCCTTGTGGTCTTCTTGATTTCTTACACTGTGACCATCTTTGG
CAATCTGACCATTATTCTAGTGTCACGCCTGGACACCAACTTCATACCCCCAATGTATTTTTTTCTTA
CCAATCTATCACTCCTGGATCTTTGTTACACCACATGTACAGTCCCACAAATGCTAGTAAATTTATGC
AGCATCAGGAAAGTAATCAGTTATCGTGGCTGTGTAGCCCAGCTTTTCATATTTCTGGCCTTGGGGGC
TACTGAATATCTTCTCCTGGCCGTCATGTCCTTTGATAGGTTTGTAGCTATTTGTCGGCCTCTCCATT
ACTCAGTTATCATGCACCAGAGACTCTGCCTCCAGTTGGCAGCTGCATCCTGGGTTACTGGTTTTAGT
AACTCAGTGTGGTTGTCTACCCTGACTCTCCAGCTGCCACTCTGTGACCCCTATGTGATAGATCACTT
TCTCTGTGAAGTCCCTGCACTGCTCAAGTTATCTTGTGTTGAGACAACAGCAAATGAGGCTGAACTAT
TCCTTGATCAGTGAGCTCTTCCATCTAATACCCCTGACACTCATCCTTATATGTATGCTTTTATTGTC
CGAGCAGTATTGAGGATACAGTCTGCTGAAGGTCGACAAAAAGCATTTGGGACATGTGGTTCCCATCT
AATTGTGGTGTCTCTTTTTTATAGTACAGCCGTCTCTGTGTACCTGCAACCACCTTCGCCCAGCTCCA
AGGACCAAGGAAAGATGGTTTCTCTCTTCTATGGAATCATTGCACCCATGCTGAATCCCCTTATATAT
ACACTTAGGAACAAGGAGGTAAAGGAAGGCTTTAAAAGGTTGGTTGCAAGAGTCTTCTTAATCAAGAA
ATAAGAAATATGCAAATGATAAGCTTTGCTAAAGACAAAAT

| | | | |
|---|---|---|---|
| NOV41f, CG55343-02 | | | |
| Protein Sequence | SEQ ID NO: 564 | 313 aa | MW at 35413.7kD |

MNWVNDSIIQEFILLGFSDRPWLEFPLLVVFLISYTVTIFGNLTIILVSRLDTKLHTPMYFFLTNLSL
LDLCYTTCTVPQMLVNLCSIRKVISYRGCVAQLFIFLALGATEYLLLAVMSFDRFVAICRPLHYSVIM
HQRLCLQLAAASWVTGFSNSVWLSTLTLQLPLCDPYVIDHFLCEVPALLKLSCVETTANEAELFLVSE
LFHLIPLTLILISYAFIVRAVLRIQSAEGRQKAFGTCGSHLIVVSLFYSTAVSVYLQPPSPSSKDQGK
MVSLFYGIIAPMLNPLIYTLRNKEVKEGFKRLVARVFLIKK

| | | |
|---|---|---|
| NOV41g, CG55343-04 | SEQ ID NO: 565 | 60 bp |
| DNA Sequence | ORF Start: at 1 | ORF Stop: end of sequence |

GACAGCATCATACAGGAGTTTATTCTGCTGGGTTTCTCAGATCGACCTTGGCTGGAGTTT

| | | | |
|---|---|---|---|
| NOV41g, CG55343-04 | | | |
| Protein Sequence | SEQ ID NO: 566 | 20 aa | MW at 2425.7kD |

DSIIQEFILLGFSDRPWLEF

| | | |
|---|---|---|
| NOV41h, CG55343-05 | SEQ ID NO: 567 | 60 bp |
| DNA Sequence | ORF Start: at 1 | ORF Stop: end of sequence |

GAAGTCCCTGCACTGCTCAAGTTATCTTGTGTTGAGACAACAGCAAATGAGGCTGAACTA

| | | | |
|---|---|---|---|
| NOV41h, GG55343-05 | | | |
| Protein Sequence | SEQ ID NO: 567 | 20 aa | MW at 2130.4kD |

EVPALLKLSCVETTANEAEL

| | | |
|---|---|---|
| NOV41i, CG55343-06 | SEQ ID NO: 569 | 946 bp |
| DNA Sequence | ORF Start: at 3 | ORF Stop: TAG at 936 |

ATTGGGTAAATGACAGCATCATACAGGAGTTTATTCTGCTGGGTTTCTCAGATCGACCTTGGCTGGAG
TTTCCACTCCTTGTGGTCTTCTTGATTTCTTACACTGTGACCATCTTTGGCAATCTGACCATTATTCT
AGTGTCACGCCTGGACACCAAACTTCATACCCCCATGTATTTTTTTCTTACCAATCTATCACTCCTGG
ATCTTTGTTACACCACATGTACAGTCCCACAAATGCTAGTAAATTTATGCAGCATCAGGAAAGTAATC
AGTTATCGTGGCTGTGTAGCCCAGCTTTTCATATTTCTGCCTTGGGGGCTACTGAATATACTTCTCCT
GGCCGTCATGTCCTTTGATAGGTTTGTAGCTATTTGTCGGCCTCTCCATTACTCAGTTATCATGCACC
AGAGACTCTGCCTCCAGTTGGCAGCTGCATCCTGGGTTACTGGTTTTAGTAACTCAGTGTGGTTGTCT
ACCCTGACTCTCCAGCTGCCACTCTGTGACCCCTATGTGATAGATCACTTTCTCTGTGAAGTCCCTGC
ACTGCTCAAGTTATCTTGTGTTGAGACAACAGCAAATGAGGCTGAACTATTCCTTGTCAGTGAGCTCT
TCCATCTAATACCCCTGACACTCATCCTTATATCATATGCTTTTATTGTCCGAGCAGTATTGAGGATA
CAGTCTGCTGAAGGTCGACAAAAAGCATTTGGGACATGTGGTTCCCATCTAATTGTGGTGTCTCTTTT
TTATAGTACAGCCGTCTCTGTGTACCTGCAACCACCTTCGCCCAGCTCCAAGGACCAAGGAAAGATGG
TTTCTCTCTTCTATGGAATCATTGCACCCATGCTGAATCCCCTTATATATACACTTAGGAACAAGGAG
GTAAAGGAAGGCTTTAAAAGGTTGGTTGCAAGAGTCTTCTTAATCAAGAAATAGGGATTCGG

| | | | |
|---|---|---|---|
| NOV41i, CG55343-06 | | | |
| Protein Sequence | SEQ ID NO: 570 | 311 aa | MW at 35168.4kD |

WVNDSIIQEFILLGFSDRPWLEFPLLVVFLISYTVTIFGNLTIILVSRLDTKLHTPMYFFLTNLSLLD
LCYTTCTVPQMLVNLCSIRKVISYRGCVAQLFIFLALGATEYLLLAVMSFDRFVAICRPLHYSVIMHQ
RLCLQLAAASWVTGFSNSVWLSTLTLQLPLCDPYVIDHFLCEVPALLKLSCVETTANEAELFLVSELF
HLIPLTLILISYAFIVRAVLRIQSABGRQKAFGTCGSHLIVVSLFYSTAVSVYLQPPSPSSKDQGKMV
SLFYGIIAPMLNPLIYTLRNKEVKEGFKRLVARVFLIKK

| | | |
|---|---|---|
| NOV41j, | | |
| SNP13373740 of | SEQ ID NO: 571 | 943 bp |
| CG55343-03, | ORF Start: ATG at 2 | ORF Stop: TAA at 941 |
| DNA Sequence | SNP Pos: 568 | SNP Change: T to C |

TATGAATTGGGTAAATGACAGCATCATACAGGAGTTTATTCTGCTGGGTTTCTCAGATCGACCTTGGC
TGGAGTTTCCACTCCTTGTGGTCTTCTTGATTTCTTACACTGTGACCATCTTTGGCAATCTGACCATT
ATTCTAGTGTCACGCCTGGACACCAAACTTCATACCCCCATGTATTTTTTTCTTACCAATCTATCACT
CCTGGATCTTTGTTACACCACATGTACAGTCCCACAAATGCTAGTAAATTTATGCAGCATCAGGAAAG
TAATCAGTTATCGTGGCTGTGTAGCCCAGCTTTTCATATTTCTGGCCTTGGGGGCTACTGAATATCTT
CTCCTGGCCGTCATGTCCTTTGATTGGTTTGTAGCTATTTGTCGGCCTCTCCATTACTCAGTTATCAT
GCACCAGAGACTCTGCCTCCAGTTGGCAGCTGCATCCTGGGTTACTGGTTTTAGTAACTCAGTGTGGT
TGTCTACCCTGACTCTCCAGCTGCCACTCTGTGACCCCTATGTGATAGATCACTTTCTCTGTGAAGTC
CCTGCACTGCTCAAGTTATCTTGCGTTGAGACAACAGCAAATGAGGCTGAACTATTCCTTGTCAGTGA
GCTCTTCCATCTAATACCCCTGACACTCATCCTTATATCATATGCTTTTATTGTCCGAGCAGTATTGA
GGATACAGTCTGCTGAAGGTCGACAAAAAGCATTTGGGACATGTGGTTCCCATCTAATTGTGGTGTCT
CTTTTTTATAGTACAGCCGTCTCTGTGTACCTGCAACCACCTTCGCCCAGCTCCAAGGACCAAGGAAA
GATGGTTTCTCTCTTCTATGGAATCATTGCACCCATGCTGAATCCCCTTATATATACACTTAGGAACA
AGGAGGTAAAGGAAGGCTTTAAAAGGTTGGTTGCAAGAGTCTTCTTAATCAAGAAATAA

| | | | |
|---|---|---|---|
| NOV41j, | | | |
| SNP13373740 of | | | |
| CG55343-03, | SEQ ID NO: 572 | | MW at 35443.7kD |
| Protein Sequence | SNP Pos: 189 | 313 aa | SNP Change: Cys to Cys |

MNWVNDSIIQEFILLGFSDRPWLEFPLLVVFLISYTVTIFGNLTIILVSRLDTKLHTPMYFFLTNLSL
LDLCYTTCTVPQMLVNLCSIRKVISYRGCVAQLFIFLALGATEYLLLAVMSFDWFVAICRPLHYSVIM
HQRLCLQLAAASWVTGFSNSVWLSTLTLQLPLCDPYVIDHFLCEVPALLKLSCVETTANEAELFLVSE
LFHLIPLTLILISYAFIVRAVLRIQSAEGRQKAFGTCGSHLIVVSLFYSTAVSVYLQPPSPSSKDQGK
MVSLFYGIIAPMLNPLIYTLRNKEVKEGFKRLVARVFLIKK

| | | |
|---|---|---|
| NOV41k, | | |
| SNP13376425 of | SEQ ID NO: 573 | 943 bp |
| CG55343-03, | ORF Start: ATG at 2 | ORF Stop: TAA at 941 |
| DNA Sequence | SNP Pos: 758 | SNP Change: A to G |

TATGAATTGGGTAAATGACAGCATCATACAGGAGTTTATTCTGCTGGGTTTCTCAGATCGACCTTGGC
TGGAGTTTCCACTCCTTGTGGTCTTCTTGATTTCTTACACTGTGACCATCTTTGGCAATCTGACCATT
ATTCTAGTGTCACGCCTGGACACCAAACTTCATACCCCCATGTATTTTTTTCTTACCAATCTATCACT
CCTGGATCTTTGTTACACCACATGTACAGTCCCACAAATGCTAGTAAATTTATGCAGCATCAGGAAAG
TAATCAGTTATCGTGGCTGTGTAGCCCAGCTTTTCATATTTCTGGCCTTGGGGGCTACTGAATATCTT
CTCCTGGCCGTCATGTCCTTTGATTGGTTTGTAGCTATTTGTCGGCCTCTCCATTACTCAGTTATCAT
GCACCAGAGACTCTGCCTCCAGTTGGCAGCTGCATCCTGGGTTACTGGTTTTAGTAACTCAGTGTGGT
TGTCTACCCTGACTCTCCAGCTGCCACTCTGTGACCCCTATGTGATAGATCACTTTCTCTGTGAAGTC
CCTGCACTGCTCAAGTTATCTTGTGTTGAGACAACAGCAAATGAGGCTGAACTATTCCTTGTCAGTGA
GCTCTTCCATCTAATACCCCTGACACTCATCCTTATATCATATGCTTTTATTGTCCGAGCAGTATTGA
GGATACAGTCTGCTGAAGGTCGACAAAAAGCATTTGGGACATGTGGTTCCCATCTAATTGTGGTGTCT
CTTTTTTATGGTACAGCCGTCTCTGTGTACCTGCAACCACCTTCGCCCAGCTCCAAGGACCAAGGAAA
GATGGTTTCTCTCTTCTATGGAATCATTGCACCCATGCTGAATCCCCTTATATATACACTTAGGAACA
AGGAGGTAAAGGAAGGCTTTAAAAGGTTGGTTGCAAGAGTCTTCTTAATCAAGAAATAA

| | | | |
|---|---|---|---|
| NOV41k, | | | |
| SNP13376425 of | | | |
| CG55343-03, | SEQ ID NO: 574 | | MW at 35413.7kD |
| Protein Sequence | SNP Pos: 253 | 313 aa | SNP Change: Set to Gly |

MNWVNDSIIQEFILLGFSDRPWLEFPLLVVFLISYTVTIFGNLTIILVSRLDTKLHTPMYFFLTNLSL
LDLCYTTCTVPQMLVNLCSIRKVISYRGCVAQLFIFLALGATEYLLLAVMSFDWFVAICRPLHYSVIM
HQRLCLQLAAASWVTGFSNSVWLSTLTLQLPLCDPYVIDHFLCEVPALLKLSCVETTANEAELFLVSE
LFHLIPLTLILISYAFIVRAVLRIQSAEGRQKAFGTCGSHLIVVSLFYGTAVSVYLQPPSPSSKDQGK
MVSLFYGIIAPMLNPLIYTLRNKEVKEGFKRLVARVFLIKK

| | | |
|---|---|---|
| NOV41l, | | |
| SNP13376424 of | SEQ ID NO: 575 | 943 bp |
| CG55343-03, | ORF Start: ATG at 2 | ORF Stop: TAA at 941 |
| DNA Sequence | SNP Pos: 810 | SNP Change: A to G |

TATGAATTGGGTAAATGACAGCATCATACAGGAGTTTATTCTGCTGGGTTTCTCAGATCGACCTTGGC
TGGAGTTTCCACTCCTTGTGGTCTTCTTGATTTCTTACACTGTGACCATCTTTGGCAATCTGACCATT
ATTCTAGTGTCACGCCTGGACACCAAACTTCATACCCCCATGTATTTTTTTCTTACCAATCTATCACT
CCTGGATCTTTGTTACACCACATGTACAGTCCCACAAATGCTAGTAAATTTATGCAGCATCAGGAAAG
TAATCAGTTATCGTGGCTGTGTAGCCCAGCTTTTCATATTTCTGGCCTTGGGGGCTACTGAATATCTT
CTCCTGGCCGTCATGTCCTTTGATTGGTTTGTAGCTATTTGTCGGCCTCTCCATTACTCAGTTATCAT
GCACCAGAGACTCTGCCTCCAGTTGGCAGCTGCATCCTGGGTTACTGGTTTTAGTAACTCAGTGTGGT
TGTCTACCCTGACTCTCCAGCTGCCACTCTGTGACCCCTATGTGATAGATCACTTTCTCTGTGAAGTC
CCTGCACTGCTCAAGTTATCTTGTGTTGAGACAACAGCAAATGAGGCTGAACTATTCCTTGTCAGTGA
GCTCTTCCATCTAATACCCCTGACACTCATCCTTATATCATATGCTTTTATTGTCCGAGCAGTATTGA
GGATACAGTCTGCTGAAGGTCGACAAAAAGCATTTGGGACATGTGGTTCCCATCTAATTGTGGTGTCT
CTTTTTTATAGTACAGCCGTCTCTGTGTACCTGCAACCACCTTCGCCCAGCTCCAAGGACCGAGGAAA
GATGGTTTCTCTCTTCTATGGAATCATTGCACCCATGCTGAATCCCCTTATATATACACTTAGGAACA
AGGAGGTAAAGGAAGGCTTTAAAAGGTTGGTTGCAAGAGTCTTCTTAATCAAGAAATAA

| | | | |
|---|---|---|---|
| NOV41l, | | | |
| SNP13376424 of | | | |
| CG55343-03, | SEQ ID NO: 576 | | MW at 35471.8kD |
| Protein Sequence | SNP Pos: 270 | 313 aa | SNP Change: Gln to Arg |

MNWVNDSIIQEFILLGFSDRPWLEFPLLVVFLISYTVTIFGNLTIILVSRLDTKLHTPMYFFLTNLSL
LDLCYTTCTVPQMLVNLCSIRKVISYRGCVAQLFIFLALGATEYLLLAVMSFDWFVAICRPLHYSVIM
HQRLCLQLAAASWVTGFSNSVWLSTLTLQLPLCDPYVIDHFLCEVPALLKLSCVETTANEAELFLVSE
LFHLIPLTLILISYAFIVRAVLRIQSABGRQKAFGTCGSHLIVVSLFYSTAVSVYLQPPSPSSKDRGK
MVSLFYGIIAPMLNPLIYTLRNKEVKEGFKRLVARVFLIKK

| | | |
|---|---|---|
| NOV41m, | | |
| SNP13376423 of | SEQ ID NO: 577 | 943 bp |
| CG55343-03, | ORF Start: ATG at 2 | ORF Stop: TAA at 941 |
| DNA Sequence | SNP Pos: 908 | SNP Change: A to G |
| TATGAATTGGGTAAATGACAGCATCATACAGGAGTTTATTCTGCTGGGTTTCTCAGATCGACCTTGGC | | |
| TGGAGTTTCCACTCCTTGTGGTCTTCTTGATTTCTTACACTGTGACCATCTTTGGCAATCTGACCATT | | |
| ATTCTAGTGTCACGCCTGGACACCAAACTTCATACCCCCATGTATTTTTTTCTTACCAATCTATCACT | | |
| CCTGGATCTTTGTTACACCACATGTACAGTCCCACAAATGCTAGTAAATTTATGCAGCATCAGGAAAG | | |
| TAATCAGTTATCGTGGCTGTGTAGCCCAGCTTTTCATATTTCTGGCCTTGGGGGCTACTGAATATCTT | | |
| CTCCTGGCCGTCATGTCCTTTGATTGGTTTGTAGCTATTTGTCGGCCTCTCCATTACTCAGTTATCAT | | |
| GCACCAGAGACTCTGCCTCCAGTTGGCAGCTGCATCCTGGGTTACTGGTTTTAGTAACTCAGTGTGGT | | |
| TGTCTACCCTGACTCTCCAGCTGCCACTCTGTGACCCCTATGTGATAGATCACTTTCTCTGTGAAGTC | | |
| CCTGCACTGCTCAAGTTATCTTGTGTTGAGACAACAGCAAATGAGGCTGAACTATTCCTTGTCAGTGA | | |
| GCTCTTCCATCTAATACCCCTGACACTCATCCTTATATCATATGCTTTTATTGTCCGAGCAGTATTGA | | |
| GGATACAGTCTGCTGAAGGTCGACAAAAAGCATTTGGGACATGTGGTTCCCATCTAATTGTGGTGTCT | | |
| CTTTTTTATAGTACAGCCGTCTCTGTGTACCTGCAACCACCTTCGCCCAGCTCCAAGGACCAAGGAAA | | |
| GATGGTTTCTCTCTTCTATGGAATCATTGCACCCATGCTGAATCCCCTTATATATACACTTAGGAACA | | |
| AGGAGGTAAAGGAAGGCTTTAAAGGGTTGGTTGCAAGAGTCTTCTTAATCAAGAAATAA | | |

| | | | |
|---|---|---|---|
| NOV41m, | | | |
| SNP13376423 of | | | |
| CG55343-03, | SEQ ID NO: 578 | | MW at 35344.6kD |
| Protein Sequence | SNP Pos: 303 | 313 aa | SNP Change: Arg to Gly |

MNWVNDSIIQEFILLGFSDRPWLEFPLLVVFLISYTVTIFGNLTIILVSRLDTKLHTPMYFFLTNLSL
LDLCYTTCTVPQMLVNLCSIRKVISYRGCVAQLFIFLALGATEYLLLAVMSFDWFVAICRPLHYSVIM
HQRLCLQLAAASWVTGFSNSVWLSTLTLQLPLCDPYVIDHFLCEVPALLKLSCVETTANEAELFLVSE
LFHLIPLTLILISYAFIVRAVLRIQSAEGRQKAFGTCGSHLIVVSLFYSTAVSVYLQPPSPSSKDQGK
MVSLFYGIIAPMLNPLIYTLRNKEVKEGFKGLVARVFLIKK

[0584] A ClustalW comparison of the above protein sequences yields the following sequence alignment shown in Table 41B.

TABLE 41B

Comparison of the NOV41 protein sequences.

| | |
|---|---|
| NOV41a | ----MNWVNDSIIQEFILLGFSDRPWLEFPLLVVFLISYTVTIFGNLTIILVSRLDTKLH |
| NOV41b | ------WVNDSIIQEFILLGFSDRPWLEFPLLVVFLISYTVTIFGNLTIILVSRLDTKLH |
| NOV41c | RGSTMNWVNDSIIQEFILLGFSDRPWLEFPLLVVFLISYTVTIFGNLTIILVSRLDTKLH |
| NOV41d | RGSTMNWVNDSIIQEFILLGFSDRPWLEFPLLVVFLISYTVTIFGNLTIILVSRLDTKLH |
| NOV41e | ----MNWVNDSIIQEFILLGFSDRPWLEFPLLVVFLISYTVTIFGNLTIILVSRLDTKLH |
| NOV41f | ----MNWVNDSIIQEFILLGFSDRPWLEFPLLVVFLISYTVTIFGNLTIILVSRLDTKLH |
| NOV41g | ---------DSIIQEFILLGFSDRPWLEF------------------------------- |
| NOV41h | ------------------------------------------------------------ |
| NOV41i | ------WVNDSIIQEFILLGFSDRPWLEFPLLVVFLISYTVTIFGNLTIILVSRLDTKLH |
| NOV41a | TPMYFFLTNLSLLDLCYTTCTVPQMLVNLCSIRKVISYRGCVAQLFIFLALGATEYLLLA |
| NOV41b | TPMYFFLTNLSLLDLCYTTCTVPQMLVNLCSIRKVISYRGCVAQLFIFLALGATEYLLLA |
| NOV41c | TPMYFFLTNLSLLDLCYTTCTVPQMLVNLCSIRKVISYRGCVAQLFIFLALGATEYLLLA |
| NOV41d | TPMYFFLTNLSLLDLCYTTCTVPQMLVNLCSIRKVISYRGCVAQLEA------------- |
| NOV41e | TPMYFFLTNLSLLDLCYTTCTVPQMLVNLCSIRKVISYRGCVAQLFIFLALGATEYLLLA |
| NOV41f | TPMYFFLTNLSLLDLCYTTCTVPQMLVNLCSIRKVISYRGCVAQLFIFLALGATEYLLLA |
| NOV41g | ------------------------------------------------------------ |
| NOV41h | ------------------------------------------------------------ |
| NOV41i | TPMYFFLTNLSLLDLCYTTCTVPQMLVNLCSIRKVISYRGCVAQLFIFLALGATEYLLLA |
| NOV41a | VMSFDWFVAICRPLHYSVIMHQRLCLQLAAASWVTGFSNSVWLSTLTLQLPLCDPYVIDH |
| NOV41b | VMSFDRFVAICRPLHYSVIMHQRLCLQLAAASWVTGFSNSVWLSTLTLQLPLCDPYVIDH |
| NOV41c | VMSFDRFVAICRPLHYSVIMHQRLCLQLAAASWVTGFSNSVWLSTLTLQLPLCDPYVIDH |
| NOV41d | ------------------------------------------------------------ |
| NOV41e | VMSFDWFVAICRPLHYSVIMHQRLCLQLAAASWVTGFSNSVWLSTLTLQLPLCDPYVIDH |
| NOV41f | VMSFDRFVAICRPLHYSVIMHQRLCLQLAAASWVTGFSNSVWLSTLTLQLPLCDPYVIDH |
| NOV41g | ------------------------------------------------------------ |
| NOV41h | ------------------------------------------------------------ |
| NOV41i | VMSFDRFVAICRPLHYSVIMHQRLCLQLAAASWVTGFSNSVWLSTLTLQLPLCDPYVIDH |
| NOV41a | FLCEVPALLKLSCVETTANEAELFLVSELFHLIPLTLILISYAFIVRAVLRIQSAEGRQK |
| NOV41b | FLCEVPALLKLSCVETTANEAELFLVSELFHLIPLTLILISYAFIVRAVLRIQSAEGRQK |
| NOV41c | FLCEVPALLKLSCVETTANEAELFLVSELFHLIPLTLILISYAFIVRAVLRIQSAEGRQK |
| NOV41d | ------------------------------------------------------------ |
| NOV41e | FLCEVPALLKLSCVETTANEAELFLVSELFHLIPLTLILISYAFIVRAVLRIQSAEGRQK |
| NOV41f | FLCEVPALLKLSCVETTANEAELFLVSELFHLIPLTLILISYAFIVRAVLRIQSAEGRQK |
| NOV41g | ------------------------------------------------------------ |
| NOV41h | ---EVPALLKLSCVETTANEAEL------------------------------------- |
| NOV41i | FLCEVPALLKLSCVETTANEAELFLVSELFHLIPLTLILISYAFIVRAVLRIQSAEGRQK |
| NOV41a | AFGTCGSHLIVVSLFYSTAVSVYLQPPSPSSKDQGKMVSLFYGIIAPMLNPLIYTLRNKE |
| NOV41b | AFGTCGSHLIVVSLFYSTAVSVYLQPPSPSSKDQGKMVSLFYGIIAPMLNPLIYTLRNKE |
| NOV41c | AFGTCGSHLIVVSLFYSTAVSVYLQPPSPSSKDQGKMVSLFYGIIAPMLNPLIYTLRNKE |
| NOV41d | ------------------------------------------------------------ |
| NOV41e | AFGTCGSHLIVVSLFYSTAVSVYLQPPSPSSKDQGKMVSLFYGIIAPMLNPLIYTLRNKE |
| NOV41f | AFGTCGSHLIVVSLFYSTAVSVYLQPPSPSSKDQGKMVSLFYGIIAPMLNPLIYTLRNKE |
| NOV41g | ------------------------------------------------------------ |
| NOV41h | ------------------------------------------------------------ |
| NOV41i | AFGTCGSHLIVVSLFYSTAVSVYLQPPSPSSKDQGKMVSLFYGIIAPMLNPLIYTLRNKE |
| NOV41a | VKEGFKRLVARVFLIKK--- |
| NOV41b | VKEGFKRLVARVFLIKK--- |
| NOV41c | VKEGFKRLVARVFLIKKLEA |
| NOV41d | -------------------- |
| NOV41e | VKEGFKRLVARVFLIKK--- |
| NOV41f | VKEGFKRLVARVFLIKK--- |
| NOV41g | -------------------- |
| NOV41h | -------------------- |
| NOV41i | VKEGFKRLVARVFLIKK--- |
| NOV41a | (SEQ ID NO: 554) |
| NOV41b | (SEQ ID NO: 556) |
| NOV41c | (SEQ ID NO: 558) |
| NOV41d | (SEQ ID NO: 560) |
| NOV41e | (SEQ ID NO: 562) |
| NOV41f | (SEQ ID NO: 564) |
| NOV41g | (SEQ ID NO: 566) |
| NOV41h | (SEQ ID NO: 568) |
| NOV41i | (SEQ ID NO: 570) |

[0585] Further analysis of the NOV41a protein yielded the following properties shown in Table 41C.

TABLE 41C
Protein Sequence Properties NOV41a

| | |
|---|---|
| SignalP analysis: | Cleavage site between residues 39 and 40 |
| PSORT II analysis: | |

| PSG: | a new signal peptide prediction method | | | |
|---|---|---|---|---|
| | N-region: | length 11; | pos.chg 0; | neg.chg 2 |
| | H-region: | length 7; | peak value | 0.00 |
| | PSG score: | −4.40 | | |

| | |
|---|---|
| GvH: | von Heijne's method for signal seq. recognition |
| | GvH score (threshold: −2.1): −4.39 |
| | possible cleavage site: between 38 and 39 |

>>> Seems to have no N-terminal signal peptide

| ALOM: | Klein et al's method for TM region allocation | | |
|---|---|---|---|
| | Init position for calculation: 1 | | |
| | Tentative number of TMS(s) for the threshold 0.5: 5 | | |
| | INTEGRAL | Likelihood =−4.78 | Transmembrane 25-41 |
| | INTEGRAL | Likelihood =−5.15 | Transmembrane 101-117 |
| | INTEGRAL | Likelihood =−5.47 | Transmembrane 206-222 |
| | INTEGRAL | Likelihood =−0.80 | Transmembrane 244-260 |
| | INTEGRAL | Likelihood =−0.75 | Transmembrane 273-289 |

| | |
|---|---|
| PERIPHERAL | Likelihood = 3.02 (at 173) |

| | ALOM score: −5.47 (number of TMSs: 5) |
|---|---|
| MTOP: | Prediction of membrane topology (Hartmann et al.) |
| | Center position for calculation: 32 |
| | Charge difference: 3.5 C(1.5) − N(−2.0) |
| | C > N: C-terminal side will be inside |

>>> membrane topology: type 3b
MITDISC: discrimination of mitochondrial targeting seq

| | | | |
|---|---|---|---|
| R content: | 0 | Hyd Moment(75): | 8.26 |
| Hyd Moment(95): | 10.83 | G content: | 0 |
| D/E content: | 2 | S/T content: | 1 |
| Score: −5.89 | | | |

Gavel: prediction of cleavage sites for mitochondrial preseq

cleavage site motif not found

NUCDISC: discrimination of nuclear localization signals

pat4: none
pat7: none
bipartite: none
content of basic residues: 7.3%
NLS Score: −0.47

KDEL: ER retention motif in the C-terminus: none
ER Membrane Retention Signals:

KKXX-like motif in the C-terminus: FLIK

SKL: peroxisomal targeting signal in the C-terminus: none
PTS2: 2nd peroxisomal targeting signal: none
VAC: possible vacuolar targeting motif: none
RNA-binding motif: none
Actinin-type actin-binding motif:

type 1: none
type 2: none

NMYR: N-myristoylation pattern: none
Prenylation motif: none
memYQRL: transport motif from cell surface to Golgi: none
Tyrosines in the tail: none
Dileucine motif in the tail: none
checking 63 PROSITE DNA binding motifs: none
checking 71 PROSITE ribosomal protein motifs: none
checking 33 PROSITE prokaryotic DNA binding motifs: none

| | |
|---|---|
| NNCN: | Reinhardt's method for Cytoplasmic/Nuclear discrimination |
| | Prediction: cytoplasmic |
| | Reliability: 94.1 |
| COIL: | Lupas's algorithm to detect coiled-coil regions |
| | total: 0 residues |

Final Results (k = 9/23):

55.6%: endoplasmic reticulum
22.2%: vacuolar
11.1%: Golgi
11.1%: mitochondrial

>> prediction for CG55343-03 is end (k = 9)

[0586] A search of the NOV41a protein against the Geneseq database, a proprietary database that contains sequences published in patents and patent publication, yielded several homologous proteins shown in Table 41D.

TABLE 41D
Geneseq Results for NOV41a

| | | NOV41a | Identities/ | |
|---|---|---|---|---|
| | | Residues/ | Similarities for | |
| Geneseq | Protein/Organism/Length | Match | the Matched | Expect |
| Identifier | [Patent #, Date] | Residues | Region | Value |
| AAE09961 | G-protein coupled-receptor | 1 . . . 313 | 313/313 (100%) | e−180 |
| | (GPCR)NOV1b protein - | 1 . . . 313 | 313/313 (100%) | |
| | Unidentified, 313 aa. | | | |
| | [WO200166746-A2, 13-SEP- | | | |
| | 2001] | | | |
| AAU95518 | Human olfactory and pheromone | 1 . . . 313 | 312/313 (99%) | e−178 |
| | G protein-coupled receptor #5 - | 1 . . . 313 | 312/313 (99%) | |
| | Homo sapiens, 313 aa. | | | |
| | [WO200224726-A2, 28-MAR- | | | |
| | 2002] | | | |
| ABP95746 | Human GPCR polypeptide SEQ | 1 . . . 313 | 312/313 (99%) | e−178 |
| | ID NO 302 - Homo sapiens, 313 | 1 . . . 313 | 312/313 (99%) | |
| | aa. [WO200216548-A2, 28-FEB- | | | |
| | 2002] | | | |
| AAE09960 | G-protein coupled-receptor | 1 . . . 313 | 312/313 (99%) | e−178 |
| | (GPCR) NOV1a protein - | 1 . . . 313 | 312/313 (99%) | |
| | Unidentified, 313 aa. | | | |
| | [WO200166746-A2, 13-SEP- | | | |
| | 2001] | | | |
| AAG71842 | Human olfactory receptor | 1 . . . 313 | 312/313 (99%) | e−178 |
| | polypeptide, SEQ ID NO: 1523 - | 1 . . . 313 | 312/313 (99%) | |
| | Homo sapiens, 313 aa. | | | |
| | [WO200127158-A2, 19-APR- | | | |
| | 2001] | | | |

[0587] In a BLAST search of public sequence databases, the NOV41a protein was found to have homology to the proteins shown in the BLASTP data in Table 41E.

TABLE 41E
Public BLASTP Results for NOV41a

| | | NOV41a | Identities/ | |
|---|---|---|---|---|
| Protein | | Residues/ | Similarities for | |
| Accession | | Match | the Matched | Expect |
| Number | Protein/Organism/Length | Residues | Portion | Value |
| P58173 | Olfactory receptor 2B6 (Hs6M1- | 1 . . . 313 | 312/313 (99%) | e−178 |
| | 32) (Olfactory receptor 6-31) | 1 . . . 313 | 312/313 (99%) | |
| | (OR6-31) - Homo sapiens | | | |
| | (Human), 313 aa. | | | |
| Q8VFH1 | Olfactory receptor MOR256-11 - | 1 . . . 312 | 254/312 (81%) | e−145 |
| | Mus musculus (Mouse), 313 aa. | 1 . . . 312 | 273/312 (87%) | |
| Q9GZK3 | Olfactory receptor 2B2 (Olfactory | 1 . . . 310 | 252/310 (81%) | e−143 |
| | receptor 6-1) (OR6-1) (Hs6M1- | 1 . . . 310 | 277/310 (89%) | |
| | 10) - Homo sapiens (Human), 357 aa. | | | |
| Q8VFH2 | Olfactory receptor MOR256-10 - | 1 . . . 313 | 247/313 (78%) | e−140 |
| | Mus musculus (Mouse), 313 aa. | 1 . . . 313 | 275/313 (86%) | |
| Q63394 | OL1 receptor - Rattus norvegicus | 1 . . . 313 | 244/313 (77%) | e−139 |
| | (Rat), 313 aa. | 1 . . . 313 | 273/313 (86%) | |

[0588] PFam analysis indicates that the NOV41a protein contains the domains shown in the Table 41F.

TABLE 41F
Domain Analysis of NOV41a

| Pfam | NOV41a | Identities/Similarities | Expect |
|---|---|---|---|
| Domain | Match Region | for the Matched Region | Value |
| 7tm_1 | 41 . . . 290 | 56/276 (20%) | 1.3e−33 |
| | | 176/276 (64%) | |
| TAS2R | 99 . . . 308 | 51/309 (17%) | 0.27 |
| | | 126/309 (41%) | |

### Example 42

[0589] The NOV42 clone was analyzed, and the nucleotide and encoded polypeptide sequences are shown in Table 42A.

TABLE 42A

NOV42 Sequence Analysis

| | | |
|---|---|---|
| NOV42a, CG55358-04 | SEQ ID NO: 579 | 947 bp |
| DNA Sequence | ORF Start: ATG at 2 | ORF Stop: TAG at 938 |

TATGGAAAACGATAATACAAGTTCTTTCGAAGGCTTCATCCTGGTGGGCTTCTCTGATCGTCCCCACC
TAGAGCTGATCGTCTTTGTGGTTGTCCTCATCTTTTATCTGCTGACTCTTCTTGGCAACATGACCATT
GTCTTGCTTTCAGCTCTGGATTCCCGGCTGCACACACCAATGTATTTCTTTTTGGCAAACCTCTCATT
CCTGGACATGTGTTTCACCACAGGTTCCATCCCTCAGATGCTCTACAACCTTTGGGGTCCAGATAAGA
CCATCAGCTATGTGGGTTGTGCCATCCAGCTGTACTTTGTCCTGGCCCTGGGAGGGGTGGAGTGTGTC
CTCCTGGCTGTCATGGCATATGACCGCTATGCTGCAGTCTGCAAACCCCTGCACTACACCATCATCAT
GCACCCACGTCTCTGTGGACAGCTGGCTTCAGTGGCATGGCTGAGTGGCTTTGGCAATTCTCTCATAA
TGGCACCCCAGACATTGATGCTACCCCGCTGTGGGCACAGACGAGTTGACCACTTTCTCTGTGAGATG
CCAGCACTAATTGGTATGGCCTGTGTAGACACCATGATGCTTGAGGCACTGGCTTTTGCCCTGGCAAT
CTTTATCATCCTGGCACCACTCATCCTCATTCTCATTTCTTATGGTTACGTTGGAGGAACAGTGCTTA
GGATCAAGTCAGCTGCTGGGCGAAAGAAAGCCTTCAACACTTGCAGCTCGCATCTAATTGTTGTCTCT
CTCTTCTATGGTACAATCATATACATGTACCTCCAGCCAGCAAATACTTATTCCCAGGACCAGGGCAA
GTTTCTTACCCTTTTCTACACAATTGTCACTCCCAGTGTTAACCCCTTGATCTATACACTAAGAAACA
AAGATGTTAAAGAGGCCATGAAGAAGGTGCTAGGGAAGGGGAGTGCAGAAATATAGTAAGGGA

| | | | |
|---|---|---|---|
| NOV42a, | | | |
| CG55358-04 | | | |
| Protein Sequence | SEQ ID NO: 580 | 312 aa | MW at 34640.9kD |

MENDNTSSFEGFILVGFSDRPHLELIVFVVVLIFYLLTLLGNMTIVLLSALDSRLHTPMYFFLANLSF
LDMCFTTGSIPQMLYNLWGPDKTISYVGCAIQLYFVLALGGVECVLLAVMAYDRYAAVCKPLHYTIIM
HPRLCGQLASVAWLSGFGNSLIMAPQTLMLPRCGHRRVDHFLCEMPALIGMACVDTMMLEALAFALAI
FIVLAPLILILISYGYVGGTVLRIKSAAGRKKAFNTCSSHLIVVSLFYGTIIYMYLQPANTYSODQGK
FLTLFYTIVTPSVNPLIYTLRNKDVKEAMKKVLGKGSAEI

| | | |
|---|---|---|
| NOV42b, CG55358-03 | SEQ ID NO: 581 | 932 bp |
| DNA Sequence | ORF Start: at 3 | ORF Stop: TAG at 924 |

ATACAAGTTCTTTCGAAGGCTTCATCCTGGTGGGCTTCTCTGATCGTCCCCACCTAGAGCTGATCGTC
TTTGTGGTTGTCCTCATCTTTTATCTGCTGACTCTTCTTGGCAACATGACCATTGTCTTGCTTTCAGC
TCTGGATTCCCGGCTGCACACACCAATGTATTTCTTTTTGGCAAACCTCTCATTCCTGGACATGTGTT
TCACCACAGGTTCCATCCCTCAGATGCTCTACAACCTTTGGGGTCCAGATAAGACCATCAGCTATGTG
GGTTGTGCCATCCAGCTGTACTTTGTCCTGGCCCTGGGAGGGGTGGAGTGTGTCCTCCTGGCTGTCAT
GGCATATGACCGCTATGCTGCAGTCTGCAAACCCCTGCACTACACCATCATCATGCACCCACGTCTCT
GTGGACAGCTGGCTTCAGTGGCATGGCTGAGTGGCTTTGGCAATTCTCTCATAATGGCACCCCAGACA
TTGATGCTACCCCGCTGTGGGCACAGACGAGTTGACCACTTTCTCTGTGAGATGCCAGCACTAATTGG
TATGGCCTGTGTAGACACCATGATGCTTGAGGCACTGGCTTTTGCCCTGGCAATCTTTATCATCCTGG
CACCACTCATCCTCATTCTCATTTCTTATGGTTACGTTGGAGGAACAGTGCTTAGGATCAAGTCAGCT
GCTGGGCGAAAGAAAGCCTTCAACACTTGCAGCTCGCATCTAATTGTTGTCTCTCTCTTCTATGGTAC
AATTATATACATGTACCTCCAGCCAGCAAATACTTATTCCCAGGACCAGGGCAAGTTTCTTACCCTTT
TCTACACAATTGTCACTCCCAGTGTTAACCCCCTGATCTATACACTAAGAAACAAAGATGTTAAAGAG
GCCATGAAGAAGGTGCTAGGGAAGGGGAGTGCAGAAATATAGTAAGGG

| | | | |
|---|---|---|---|
| NOV42b, CG55358-03 | | | |
| Protein Sequence | SEQ ID NO: 582 | 307 aa | MW at 34051.3kD |
| TSSFEGFILVGFSDRPHLELIVFVVVLIFYLLTLLGNNTIVLLSALDSRLHTPMYFFLANLSFLDMCF | | | |
| TTGSIPQMLYNLWGPDKTISYVGCAIQLYFVLALGGVECVLLAVMAYDRYAAVCKPLHYTIIMHPRLC | | | |
| GQLASVAWLSGFGNSLIMAPQTLMLPRCGHRRVDHFLCEMPALIGMACVDTMMLEALAFALAIFIILA | | | |
| PLILILISYGYVGGTVLRIKSAAGRKKAFNTCSSHLIVVSLFYGTIIYMYLQPANTYSQDQGKFLTLF | | | |
| YTIVTPSVNPLIYTLRNKDVKEANKKVLGKGSAEI | | | |

| | | |
|---|---|---|
| NOV42c, 317863291 | SEQ ID NO: 583 | 693 bp |
| DNA Sequence | ORF Start: at 1 | ORF Stop: end of sequence |

CGCGGATCCACCATGTACAAGTTCTTTCGAGGCTTCATCCTGGTGGGCTTCTCTGATCGTCCCCACCT
AGAGCTGATCGTCTTTGTGGTTGTCCTCATCTTTTATCTGCTGACTCTTCTTGGCAACATGACCATTG
TCTTGCTTTCAGCTCTGGATTCCCGGCTGCACACACCAATGTATTTCTTTTTGGCAAACCTCTCATTC
CTGGACATGTGTTTCACCACAGGTTCCATCCCTCAGATGCTCTACAACCTTTGGGGTCCAGATAAGAC
CATCAGCTATGTGGGTTGTGCCATCCAGCTGTACTTTGTCCTGCCCTGGGAGGGGTGGAGTGTAGTCC
TCCTGGCTGTCATGGCATATGACCGCTATGCTGCAGTCTGCAAACCCCTGCACTACACCATCATCATG
CACCCACGTCTCTGTGGACAGCTGGTTTCAGTGGCATGGCTGAGTGGCTTTGGCAATTCTCTCATAAT
GGCACCCCAGACATTGATGCTACCCCGCTGTGGGCACAGACGAGTTGACCACTTTCTCTGTGAGATGC
CAGCACTAATTGGTATGGCCTGTGTAGACACCATGATGCTTGAGGCACTGGCTTTTGCCCTGGCAATC
TTTATCATCCTGGCACCACTCATCCTCATTCTCATTTCTTATGGTTACGTTGGAGGAACAGTGCTTAG
GATCCTCGAGGCG

| | | | |
|---|---|---|---|
| NOV42c, 317863291 | | | |
| Protein Sequence | SEQ ID NO: 584 | 231 aa | MW at 25750.8kD |

RGSTMYKFFRGFILVGFSDRPHLELIVFVVVLIFYLLTLLGNMTIVLLSALDSRLHTPMYFFLANSLF
LDMCFTTGSIPQMLYNLWGPDKTISYVGCAIQLYFVALGGVECVLLAVMAYDRYAAVCKPLHYTAIIM
HPRLCGQLVSVAWLSGFGNSLIMAPQTLMLPRCGHRRVDHFLCEMPALIGMACVDTMMLEALAFALAI
FlILAPLILILISYGYVGGTVLRILEA

| | | |
|---|---|---|
| NOV42d, 317863328 | SEQ ID NO: 585 | 609 bp |
| DNA Sequence | ORF Start: at 1 | ORF Stop: end of sequence |

CGCGGATCCCTCATCTTTTATCTGCTGACTCTTCTTGGCAACATGACCATTGTCTTGCTTTCAGCTCT
GGATTCCCGGCTGCACACACCAATGTATTTCTTTTTGGCAAACCTCTCATTCCTGGACATGTGTTTCA
CCACAGGTTCCATCCCTCAGATGCTCTACAACCTTTGGGGTCCAGATAAGACCATCAGCTATGTGGGT
TGTGCCATCCAGCTGTACTTTGTCCTGGCCCTGGGAGGGGTGGAGTGTGTCCTCCTGGCTGTCATGGC
ATATGACCGCTATGCTGCAGTCTGCAAACCCCTGCACTACACCATCATCATGCACCCACGTCTCTGTG
GACAGCTGGTTTCAGTGGCATGGCTGAGTGGCTTTGGCAATTCTCTCATAATGGCACCCCAGACATTG
ATGCTACCCCGCTGTGGGGCACAGACGAGTTGACCACTTTCTCTGTGAGATGCAGCACTAATTGGTAT
GGCCTGTGTAGACACCATGATGCTTGAGGCACTGGCTTTTGCCCTGGCAATCTTTATCATCCTGGCAC
CACTCATCCTCATTCTCATTTCTTATGGTTACGTTGGAGGAACAGTGCTTAGGATCCTCGAGGCG

| | | | |
|---|---|---|---|
| NOV42d, 317863328 | | | |
| Protein Sequence | SEQ ID NO: 586 | 203 aa | MW at 22437.8kD |

RGSLIFYLLTLLGNMTIVLLSALDSRLHTPMYFFLANLSFLDMCFTTGSIPQMLYNLWGPDKTISYVG
CAIQLYFVLALGGVECVLLAVMAYDRYAAVCKPLHYTIIMHPRLCGQLVSVAWLSGFGNSLIMAPQTL
MLPRCGHRRVDHFLCEMPALIGMACVDTMMLEALAFALAIFIILAPLILILISYGYVGGTVLRILEA

| | | |
|---|---|---|
| NOV42e, 317863350 | SEQ ID NO: 587 | 433 bp |
| DNA Sequence | ORF Start: at 1 | ORF Stop: at 433 |

CGCGGATCCGCCATCCAGCTGTACTTTGTCCTGGCCCTGGGAGGGGTGGAGTGTGTCCTCCTGGCTGT
CATGGCATATGACCGCTATGCTGCAGTCTGCAAACCCCTGCACTACACCATCATCATGCACCCACGTC
TCTGTGGACAGCTGGTTTCATGGCATGGCTGAGTGGCTTTGGCAATTCTCTCATAATGGCACCCCAAG
ACATTGATGCTACCCCGCTGTGGGCACAGACGAGTTGACCACTTTCTCTGTGAGATGCCAGCACTAAT
TGGTATGGCCTGTGTAGACACCATGATGCTTGAGGCACTGGCTTTTGCCCTGGCAATCTTTATCATCC
TGGCACCACTCATCCTCATTCTCATTTCTTATGGTTACGTTGGAGGAACAGTGCTTAGGATCCTCGAG
GCGAAGGGCGAATTCCAGCACACTG

| | | | |
|---|---|---|---|
| NOV42e, 317863350 | | | |
| Protein Sequence | SEQ ID NO: 588 | 144 aa | MW at 15783.9kD |

FGSAIQLYFVLALGGVECVLLAVMAYDRYAAVCKPLHYTIIMHPRLCGQLVSVAWLSGFGNSLIMAPQ
TLMLPRCGHRRVDHFLCEMPALIGMACVDTMMLEALAFALAIFIILAPLILILISYGYVGGTVARILE
AKGEFQHT

| | | |
|---|---|---|
| NOV42f, 271624076 | SEQ ID NO: 589 | 953 bp |
| DNA Sequence | ORF Start: at 1 | ORF Stop: TAG at 934 |

GAAAACGATAATACAAGTTCTTTCGAAGGCTTCATCCTGGTGGGCTTCTCTGATCGTCCCCACCTAGA
GCTGATCGTCTTTGTGGTTGTCCTCATCTTTTATCTGCTGACTCTTCTTGGCAACATGACCATTGTCT
TGCTTTCAGCTCTGGATTCCCGGCTGCACACACCAATGTATTTCTTTTTGGCAAACCTCTCATTCCTG
GACTGTGTTTCACCACAGGTTCCATCCCTCAGATGCTCTACAACCTTTGGGGTCCAGATAAGGACCAT
CAGCTATGTGGGTTGTGCCATCCAGCTGTACTTTGTCCTGGCCCTGGGAGGGGTGGAGTGTGTCCTCC
TGGCTGTCATGGCATATGACCGCTATGCTGCAGTCTGCAAACCCCTGCACTACACCATCATCATGCAC
CCACGTCTCTGTGGACAGCTGGCTTCAGTGGCATGGCTGAGTGGCTTTGGCAATTCTCTCATAATGGC
ACCCCAGACATTGATGCTACCCCGCTGTGGGCACAGACGAGTTGACCACTTTCTCTGTGAGATGCAAG
CACTAATTGGTATGGCCTGTGTAGACACCATGATGCTTGAGGCACTGGCTTTTGCCCTGGCAATCTTT
ATCATCCTGGCACCACTCATCCTCATTCTCATTTCTTATGGTTACGTTGGAGGAACAGTGCTTAGGAT
CAAGTCAGCTGCTGGGCGAAAGAAAGCCTTCAACACTTGCAGCTCGCATCTTTTTGTTGTCTCTCTCT
TCTATGGTACAATCATATACATGTACCTCCAGCCAGCAAATACTTATTCCCAGGACCAGGGCAAGTTT
CTTACCCTTTTCTACACAATCGTCACTCCCAGTGTTAACCCCCTGATCTATACACTAAGAAACAAAGA
TGTTAAAGAGGCCATGAAGAAGGTGCTAGGGAAGGGGAGTGCAGAAATATAGGAATTCGGAAGGGCGA
A

| | | | |
|---|---|---|---|
| NOV42f, 271624076 | | | |
| Protein Sequence | SEQ ID NO: 590 | 311 aa | MW at 34523.7kD |

ENDNTSSFEGFILVGFSDRPHLELIVFVVVLIFYLLTLLGNMTIVLLSALDSRLHTPMYFFLANLSFL
DMCFTTGSIPQMLYNLWGPDKTISYVGCAIQLYFVLALGGVECVLLAVMAYDRYAAVCKPLHYTIIMH
PRLCGQLASVAWLSFGNSLIMAPQTLMLPRCGHRRVDHFLCEMPALIGMACVDTMMLEALAFAALAIF
IILAPLILILISYGYVGGTVLRIKSAAGRKKAFNTCSSHLIVVSLFYGTIIYMYLQPANTYSQDQGKF
LTLFYTIVTPSVNPLIYTLRNKDVKEAMKKVLGKGSAEI

| | | |
|---|---|---|
| NOV42g, CG55358-01 | SEQ ID NO: 591 | 945 bp |
| DNA Sequence | ORF Start: ATG at 1 | ORF Stop: TAG at 937 |

ATGGAAAACGATAATACAAGTTCTTTCGAAGGCTTCATCCTGGTGGGCTTCTCTGATCGTCCCCACCT
AGAGCTGATCGTCTTTGTGGTTGTCCTCATCTTTTATCTGCTGACTCTTCTTGGCAACATGACCATTG
TCTTGCTTTCAGCTCTGGATTCCCGGCTGCACACACCAATGTATTTCTTTTTGGCAAACCTCTCATTC
CTGGACATGTGTTTCACCACAGGTTCCATCCCTCAGATGCTCTACAACCTTTGGGGTCCAGATAAGAC
CATCAGCTATGTGGGTTGTGCCATCCAGCTGTACTTTGTCCTGGCCCTGGGAGGGGTGGAGTGTGTCC
TCCTGGCTGTCATGGCATATGACCGCTATGCTGCAGTCTGCAAACCCCTGCACTACACCATCATCATG
CACCCACGTCTCTGTGGACAGCTGGCTTCAGTGGCATGGCTGAGTGGCTTTGGCAATTCTCTCATAAT
GGCACCCCAGACATTGATGCTACCCCGCTGTGGGCACAGACGAGTTGACCACTTTCTCTGTGAGATGC
CAGCACTAATTGGTATGGCCTGTGTAGACACCATGATGCTTGAGGCACTGGCTTTTGCCCTGGCAATC
TTTATCATCCTGGCACCACTCATCCTCATTCTCATTTCTTATGGTTACGTTGGAGGAACAGTGCTTAG
GATCAAGTCAGCTGCTGGGCGAAAGAAAGCCTTCAACACTTGCAGCTCGCATCTAATTGTTGTCTCTC
TCTTCTATGGTACAATCATATACATGTACCTCCAGCCAGCAAATACTTATTCCCAGGACCAGGGCAAG
TTTCTTACCCTTTTCTACACAATTGTCACTCCCAGTGTTAACCCCCTGATCTATACACTAAGAAACAA
AGATGTTAAAGAGGCCATGAAGAAGGTGCTAGGGAAGGGGAGTGCAGAAATATAGTAAGGG

| | | | |
|---|---|---|---|
| NOV42g, CG55358-01 | | | |
| Protein Sequence | SEQ ID NO: 592 | 312 aa | MW at 34654.9kD |

MENDNTSSFEGFILVGFSDRPHLELIVFVVVLIFYLLTLLGNMTIVLLSALDSRLHTPMYFFLANLSF
LDMCFTTGSIPQMLYNLWGPDKTISYVGCAIQLYFVLALGGVECVLLAVMAYDRYAAVCKPLHYTIIM
HPRLCGQLASVAWLSGFGNSLIMAPQTLMLPRCGHRRVDHFLCEMPALIGMACVDTMMLEALAFALAI
FIILAPLILILISYGYVGGTVLRIKSAAGRKKAFNTCSSHLIVVSLFYGTIIYNYLQPANTYSQDQGK
FLTLFYTIVTPSVNPLIYTLRNKDVKEAMKKVLGKGSAEI

| | | |
|---|---|---|
| NOV42h, CG55358-02 | SEQ ID NO: 593 | 947 bp |
| DNA Sequence | ORF Start: ATG at 3 | ORF Stop: TAG at 939 |

GTATGGAAAACGATAATACAAGTTCTTTCGAAGGCTTCATCCTGGTGGGCTTCTCTGATCGTCCCCAC
CTAGAGCTGATCGTCTTTGTGGTTGTCCTCATCTTTTATCTGCTGACTCTTCTTGGCAACATGACCAT
TGTCTTGCTTTCAGCTCTGGATTCCCGGCTGCACACACCAATGTATTTCTTTTTGGCAAACCTCTCAT
TCCTGGACATGTGTTTCACCACAGGTTCCATCCCTCAGATGCTCTACAACCTTTGGGGTCCAGATAAG
ACCATCAGCTATGTGGGTTGTGCCATCCAGCTGTACTTTGTCCTGGCCCTGGGAGGGGTGGAGTGTGT
CCTCCTGGCTGTCATGGCATATGACCGCTATGCTGCAGTCTGCAAACCCCTGCACTACACCATCATCA
TGCACCCACGTCTCTGTGGACAGCTGGCTTCAGTGGCATGGCTGAGTGGCTTTGGCAATTCTCTCATA
ATGGCACCCCAGACATTGATGCTACCCCGCTGTGGGCACAGACGAGTTGACCACTTTCTCTGTGAGAT
GCCAGCACTAATTGGTATGGCCTGTGTAGACACCATGATGCTTGAGGCACTGGCTTTTGCCCTGGCAA
TCTTTATCATCCTGGCACCACTCATCCTCATTCTCATTTCTTATGGTTACGTTGGAGGAACAGTGCTT
AGGATCAAGTCAGCTGCTGGGCGAAAGAAAGCCTTCAACACTTGCAGCTCGCATCTAATTGTTGTCTC
TCTCTTCTATGGTACAATCATATACATGTACCTCCAGCCAGCAAATACTTATTCCCAGGACCAGGGCA
AGTTTCTTACCCTTTTCTACACAATTGTCACTCCCAGTGTTAACCCCCTGATCTATACACTAAGAAAC
AAAGATGTTAAAGAGGCCATGAAGAAGGTGCTAGGGAAGGGGAGTGCAGAAATATAGTAAGGG

| | | | |
|---|---|---|---|
| NOV42h, CG55358-02 | | | |
| Protein Sequence | SEQ ID NO: 594 | 312 aa | MW at 34654.9kD |

MENDNTSSFEGFILVGFSDRPHLELIVFVVVLIFYLLTLLGNMTIVLLSALDSRLHTPMYFFLANLSF
LDMCFTTGSIPQMLYNLWGPDKTISYVGCAIQLYFVLALGGVECVLLAVMAYDRYAAVCKPLHYTIIM
HPRLCGQLASVAWLSGFGNSLIMAPQTLMLPRCGHRRVDHFLCEMPALIGMACVDTMMLEALAFALAI
FlILAPLILILISYGYVGGTVLRIKSAAGRKKAFNTCSSHLIVVSLFYGTIIYMYLQPANTYSQDQGK
FLTLFYTIVTPSVNPLIYTLRNKDVKEANKKVLGKGSAEI

| | | |
|---|---|---|
| NOV42i, CG55358-05 | SEQ ID NO: 595 | 63 bp |
| DNA Sequence | ORF Start: ATG at 1 | ORF Stop: end of sequence |

ATGGAAAACGATAATACAAGTTCTTTCGAAGGCTTCATCCTGGTGGGCTTCTCTGATCGTCCC

| | | | |
|---|---|---|---|
| NOV42i, CG55358-05 | | | |
| Protein Sequence | SEQ ID NO: 596 | 21 aa | MW at 2362.5kD |

MENDNTSSFEGFILVGFSDRP

| | | |
|---|---|---|
| NOV42j, GG55358-06 | SEQ ID NO: 597 | 60 bp |
| DNA Sequence | ORF Start: at 1 | ORF Stop: end of sequence |

ACATTGATGCTACCCCGCTGTGGGCACAGACGAGTTGACCACTTTCTCTGTGAGATGCCA

| | | | |
|---|---|---|---|
| NOV42j, CG55358-06 | | | |
| Protein Sequence | SEQ ID NO: 598 | 20 aa | MW at 2411.9kD |

TLMLPRCGHRRVDHFLCEMP

| | | |
|---|---|---|
| NOV42k, GG55358-07 | SEQ ID NO: 599 | 953 bp |
| DNA Sequence | ORF Start: at 1 | ORF Stop: TAG at 934 |

GAAAACGATAATACAAGTTCTTTCGAAGGCTTCATCCTGGTGGGCTTCTCTGATCGTCCCCACCTAGA
GCTGATCGTCTTTGTGGTTGTCCTCATCTTTTATCTGCTGACTCTTCTTGGCAACATGACCATTGTCT
TGCTTTCAGCTCTGGATTCCCGGCTGCACACACCAATGTATTTCTTTTTGGCAAACCTCTCATTCCTG
GACATGTGTTTCACCACAGGTTCCATCCCTCAGATGCTCTACAACCTTTGGGGTCCAGATAAGACCAT
CAGCTATGTGGGTTGTGCCATCCAGCTGTACTTTGTCCTGGCCCTGGGGAGGGTGGAGTGTGTCCTCC
TGGCTGTCATGGCATATGACCGCTATGCTGCAGTCTGCCAAACCCCTGCACTACACCATCATCATGGC
CCACGTCTCTGTGGACAGCTGGCTTCAGTGGCATGGCTGAGTGGCTTTGGCAATTCTCTCATAATGGC
ACCCCAGACATTGATGCTACCCCGCTGTGGGCACAGACGAGTTGACCACTTTCTCTGTGAGATGCCAG
CACTAATTGGTATGGCCTGTGTAGACACCATGATGCTTGAGGCACTGGCTTTTGCCCTGGCAATCTTT
ATCATCCTGGCACCACTCATCCTCATTCTCATTTCTTATGGTTACGTTGGAGGAACAGTGCTTAGGAT
CAAGTCAGCTGTGGGCGAAAGAAAGCCTTCAACACTTGCAGTCTCGCATCTAATTGTTGTCTCTCTCT
TCTATGGTACAATCATATACATGTACCTCCAGCCAGCAAATACTTATTCCCAGGACCAGGGCAAGTTT
CTTACCCTTTTCTACACAATCGTCACTCCCAGTGTTAACCCCCTGATCTATACACTAAGAAACAAAGA
TGTTAAAGAGGCCATGAAGAAGGTGCTAGGGAAGGGGAGTGCAGAAATATAGGAATTCGGAAGGGCGA
A

| | | | |
|---|---|---|---|
| NOV42k, CG55358-07 | | | |
| Protein Sequence | SEQ ID NO: 600 | 311 aa | MW at 34523.7kD |

ENDNTSSFEGFILVGFSDRPHLELIVFVVVLIFYLLTLLGNMTIVLLSALDSRLHTPMYFFLANLSFL
DMCFTTGSIPQMLYNLWGPDKTISYVGCAIQLYFVLALGGVECVLLAVMAYDRYAAVCKPLHYTIIMH
PRLCGQLASVAWLSGFGNSLIMAPQTLMLPRCGHRRVDHFLCEMPALIGMACVDTMMLEALAFALAIF
IILAPLILILISYGYVGGTVLRIKSAAGRKKAFNTCSSHLIVVSLFYGTIIYMYLQPANTYSQDQGKF
LTLFYTIVTPSVNPLIYTLRNKDVKEAMKKVLGKGSAEI

| | | |
|---|---|---|
| NOV42l, | | +TL,26 |
| SNP13375122 of | SEQ ID NO: 601 | 932 bp |
| CG55358-03, | ORF Start: at 3 | ORF Stop: TAG at 924 |
| DNA Sequence | SNP Pos: 64 | SNP Change: T to C |

ATACAAGTTCTTTCGAAGGCTTCATCCTGGTGGGCTTCTCTGATCGTCCCCACCTAGAGCTGACCGTC
TTTGTGGTTGTCCTCATCTTTTATCTGCTGACTCTTCTTGGCAACATGACCATTGTCTTGCTTTCAGC
TCTGGATTCCCGGCTGCACACACCAATGTATTTCTTTTTGGCAAACCTCTCATTCCTGGACATGTGTT
GGTTGTGCCATCCAGCTGTACTTTGTCCTGGCCCTGGGAGGGGTGGAGTGTGTCCTCCTGGCTGTCAT
GGCATATGACCGCTATGCTGCAGTCTGCAAACCCCTGCACTACACCATCATCATGCACCCACGTCTCT
GTGGACAGCTGGCTTCAGTGGCATGGCTGAGTGGCTTTGGCAATTCTCTCATAATGGCACCCCAGACA
TTGATGCTACCCCGCTGTGGGCACAGACGAGTTGACCACTTTCTCTGTGAGATGCCAGCACTAATTGG
TATGGCCTGTGTAGACACCATGATGCTTGAGGCACTGGCTTTTGCCCTGGCAATCTTTATCATCCTGG
CACCACTCATCCTCATTCTCATTTCTTATGGTTACGTTGGAGGAACAGTGCTTAGGATCAAGTCAGCT
GCTGGGCGAAAGAAAGCCTTCAACACTTGCAGCTCGCATCTAATTGTTGTCTCTCTCTTCTATGGTAC
AATTATATACATGTACCTCCAGCCAGCAAATACTTATTCCCAGGACCAGGGCAAGTTTCTTACCCTTT
TCTACACAATTGTCACTCCCAGTGTTAACCCCCTGATCTATACACTAAGAAACAAAGATGTTAAAGAG
GCCATGAAGAAGGTGCTAGGGAAGGGGAGTGCAGAAATATAGTAAGGG

| | | | |
|---|---|---|---|
| NOV42L, | | | |
| SNP13375122 of | | | |
| CG55358-03, | SEQ ID NO: 602 | | MW at 34039.2kD |
| Protein Sequence | SNP Pos: 21 | 307 aa | SNP Change: Ile to Thr |

TSSFEGFILVGFSDRPHLELTee VFVVVLIFYLLTLLGNMTIVLLSALDSRLHTPMYFFLANLSFLDMCF
TTGSIPQMLYNLWGPDKTISYVGCAIQLYFVLALGGVECVLLAVMAYDRYAAVCKPLHYTIIMHPRLC
GQLASVAWLSGFGNSLIMAPQTLMLPRCGHRRVDHFLCEMPALIGMACVDTMMLEALAFALAIFIILA
PLILILISYGYVGGTVLRIKSAAGRKKAFNTCSSHLIVVSLFYGTIIYMYLQPANTYSQDQGKFLTLF

| | | |
|---|---|---|
| NOV42m | | |
| CG55358-03, | ORF Start: at 3 | ORF Stop: TAG at 924 |
| DNA Sequence | SNP Pos: 124 | SNP Change: T to C |

ATACAAGTTCTTTCGAAGGCTTCATCCTGGTGGGCTTCTCTGATCGTCCCCACCTAGAGCTGATCGTC
TTTGTGGTTGTCCTCATCTTTTATCTGCTGACTCTTCTTGGCAACATGACCATTGCCTTGCTTTCAGC
TCTGGATTCCCGGCTGCACACACCAATGTATTTCTTTTTGGCAAACCTCTCATTCCTGGACATGTGTT
TCACCACAGGTTCCATCCCTCAGATGCTCTACAACCTTTGGGGTCCAGATAAGACCATCAGAAATGTG
GGTTGTGCCATCCAGCTGTACTTTGTCCTGGCCCTGGGAGGGGTGGAGTGTGTCCTCCTAACTGTCAT
GGCATATGACCGCTATGCTGCAGTCTGCAAACCCCTGCACTACACCATCATCATGCACCCACGTCTCT
GTGGACAGCTGGCTTCAGTGGCATGGCTGAGTGGCTTTGGCAATTCTCTCATAATGGCACCCCAGACA
TTGATGCTACCCCGCTGTGGGCACAGACGAGTTGACCACTTTCTCTGTGAGATGCCAGCACTAATTAA
TATGGCCTGTGTAGACACCATGATGCTTGAGGCACTGGCTTTTGCCCTGGGGTCTTTATCATCCTTAA
CACCACTCATCCTCATTCTCATTTCTTATGGTTACTTGGAGGAACAGTGCTTAGGATCAAAGTCAGCT
GCTGGGCGAAAGAAAGCCTTCAACACTTGCAGCTCGCATCTAATTGTTGTCTCTCTCTTCTATGGTAC
AATTATATACATGTACCTCCAGCCAGCAAATACTTATTCCCAGGACCAGGGCAAGTTTCTTACCCTTT
TCTACACAATTGTCACTCCCAGTGTTAACCCCCTGATCTATACACTAAGAAACAAAGATGTTAAAGAG
GCCATGAAGAAGGTGCTAGGGAAGGGGAGTGCAGAAATATAGTAAGGG

| | | | |
|---|---|---|---|
| NOV42m, | | | |
| SNP13375 123 of | | | |
| CG55358-03, | SEQ ID NO: 604 | | MW at 34023.2kD |
| Protein Sequence | SNP Pos: 41 | 307 aa | SNP Change: Val to Ala |

TSSFEGFILVGFSDRPHLELIVFVVVLIFYLLTLLGNMTIAee LLSALDSRLHTPMYFFLANLSFLDMCF
TTGSIPQMLYNLWGPDKTISYVGCAIQLYFVLALGGVECVLLAVMAYDRYAAVCKPLHYTIINHPRLC
GQLASVAWLSGFGNSLIMAPQTLMLPRCGHRRVDHFLCEMPALIGMACVDTMMLEALAFALAIFIILA
PLILILISYGYVGGTVLRIKSAAGRKKAFNTCSSHLIVVSLFYGTIIYMYLQPANTYSQDQGKFLTLF
YTIVTPSVNPLIYTLRNKDVKEANKKVLGKGSAEI

| | | |
|---|---|---|
| NOV42n, | | |
| SNP13382494 of | SEQ ID NO: 605 | 932 bp |
| CG55358-03, | ORF Start: at 3 | ORF Stop: TAG at 924 |
| DNA Sequence | SNP Pos: 254 | SNP Change: T to C |

ATACAAGTTCTTTCGAAGGCTTCATCCTGGTGGGCTTCTCTGATCGTCCCCACCTAAGGCTGATCGTC
TTTGTGGTTGTCCTCATCTTTTATCTGCTGACTCTTCTTGGCAACATGACCATTGTCTTGCTTTCAGC
TCTGGATTCCCGGCTGCACACACCAATGTATTTCTTTTTGGCAAACCTCTCATTCCTGGACATGTGTT
TCACCACAGGTTCCATCCCTCAGATGCTCTACAACCTTTGGGGTCCAGACee AAGACCATCAGCTATGTG
GGTTGTGCCATCCAGCTGTACTTTGTCCTGGCCCTGGGAGGGGTAAAGTGTGTCCTCCTAACTGTCAT
GGCATATGACCGCTATGCTGCAGTCTGCAAACCCCTGCACTACACAATCATCATGCACCAACGTCTCT
GTGGACAGCTGGCTTCAGTGGCATGGCTGAGTGGCTTTGGCAATTCTCTCATAATGGCACCCCAGACA
TTGATGCTACCCCGCTGTGGGCACAGACGAGTTGACCACTTTCTCTGTGAGATGCCAGCACTAATTGG
TATGGCCTGTGTAGACACCATGATGCTTGAGGCACTGGCTTTTGCCCTGGCAATCTTTATCATCCTGG
CACCACTCATCCTCATTCTCATTTCTTATGGTTACGTTGGAGGAACAGTGCTTAGGATCAAGTCAGCT
GCTGGGCGAAAGAAAGCCTTCAACACTTGCAGCTCGCATCTAATTGTTGTCTCTCTCTTCTATGGTAC
AATTATATACATGTACCTCCAGCCAGCAAATACTTATTCCCAGGACCAGGGCAAGTTTCTTACCCTTT
TCTACACAATTGTCACTCCCAGTGTTACCCCCTGATCTATACACTAAGAAAACAAAGATGTTAAACAG
GCCATGAAGAAGGTGCTAGGGAAGGGGAGTGCAGAAATATAGTAAGGG

| | | | |
|---|---|---|---|
| NOV42n, | | | |
| SNP13382494 of | | | |
| CG55358-03, | SEQ ID NO: 606 | | MW at 34051.3kD |
| Protein Sequence | SNP Pos: 84 | 307 aa | SNP Change: Asp to Asp |

TSSFEGFILVGFSDRPHLELIVFVVVLIFYLLTLLGNMTIVLLSALDSRLHTPMYFFLANLSFLDMCF
TTGSIPQMLYNLWGPDKTISYVGCAIQLYFVLALGGVECVLLAVMAYDRYAAVCKPLHYTIINHPRLC
GQLASVAWLSGFGNSLIMAPQTLMLPRCGHRRVDHFLCEMPALIGMACVDTMMLEALAFALAIFIILA
PLILILISYGYVGGTVLRIKSAAGRKKAFNTCSSHLIVVSLFYGTIIYMYLQPANTYSQDQGKFLTLF
YTIVTPSVNPLIYTLRNKDVKEAMKKVLGKGSAEI

| | | |
|---|---|---|
| NOV42o, | | |
| SN1P13375124 of | SEQ ID NO: 607 | 932 bp |
| GG55358-03, | ORF Start: at 3 | ORF Stop: TAG at 924 |
| DNA Sequence | SNP Pos: 283 | SNP Change: T to C |

ATACAAGTTCTTTCGAAGGCTTCATCCTGGTGGGCTTCTCTGATCGTCCCCACCTAGAGCTGATCGTC
TTTGTGGTTGTCCTCATCTTTTATCTGCTGACTCTTCTTGGCAACATGACCAAAGTCTTGCTTTCAGC
TCTGGATTCCCGGCTGCACACACCAATGTATTTCTTTTTGGCAAACCTCTCATTCCTGGAAATGTGTT
TCACCACAGGTTCCATCCCTCAGATGCTCTACAACCTTTGGGGTCCAGATAAGACCATAAGCTATGTG
GGTTGTGCCACee CCAGCTGTACTTTGTCCTGGCCCTGGGAGGGGTGGAGTGTGTCCTCCTGGCTGTCAT
GGCATATGACCGCTATGCTGCAGTCTGCAAACCCCTGCACTACACCATCATCATGCACCCACGTCTCT
GTGGACAGCTGGCTTCAGTGGCATGGCTGAGTGGCTTTGGCAATTCTCTCAAATGGCAACCCCAGACA
TTGATGCTACCCCGCTGTGGGCACAGACGAGTTGACCACTTTCTCTGTGAGATGCCAGCACTAATTGG
TATGGCCTGTGTAGACACCATGATGCTTGAGGCACTGGCTTTTGCCCTGGCAATCTTTATCATCCTGG
CACCACTCATCCTCATTCTCATTTCTTATGGTTACGTTGGAGGAACAGTGCTTAGGATCAAGTCAGCT
GCTGGGCGAAAAGAAAGCCTTCAACACTTGCAGTCTCGCATCTAATTGTTGTCTCTCTTCTATGGTAC
AATTATATACATGTACCTCCAGCCAGCAAATACTTATTCCCAGGACCAGGGCAAGTTTCTTACCCTTT
TCTACACAATTGTCACTCCCAGTGTTAACCCCCTGATCTATACACTAAGAAACAAAGATGTTAAAGAG
GCCATGAAGAAGGTGCTAGGGAAGGGGAGTGCAGAAATATAGTAAGGG

| | | | |
|---|---|---|---|
| NOV42o, | | | |
| SNP13375124 of | | | |
| CG55358-03, | SEQ ID NO: 608 | | MW at 34039.2kD |
| Protein Sequence | SNP Pos: 94 | 307 aa | SNP Change: Ile to Thr |

TSSFEGFILVGFSDRPHLELIVFVVVLIFYLLTLLGNMTIVLLSALDSRLHTPMYFFLANLSFLDMCF
TTGSIPQMLYNLWGPDKTISYVGCATQLYFVLALGGVECVLLMTMAYDRYAAVCKPLHYTIIMHPRLC
GQLASVAWLSGFGNSLIMAPQTLMLPRCGHRRVDHFLCEMPALIGMACVDTMMLEALAFALAIFIILA
PLILILISYGYVGGTVLRIKSAAGRKKAFNTCSSHLIVVSLFYGTIIYMYLQPANTYSQDQGKFLTLF
YTIVTPSVNPLIYTLRNKDVKEANKKVLGKGSAEI

| | | |
|---|---|---|
| NOV42p, | | |
| SNP13375125 of | SEQ ID NO: 609 | 932 bp |
| CG55358-03, | ORF Start: at 3 | ORF Stop: TAG at 924 |
| DNA Sequence | SNP Pos: 336 | SNP Change: G to A |

ATACAAGTTCTTTCGAAGGCTTCATCCTGGTGGGCTTCTCTGATCGTCCCCACCTAGAGCTGATCGTC
TTTGTGGTTGTCCTCATCTTTTATCTGCTGACTCTTCTTGGCAACATGACCATTGTCTTGCTTTCAGC
TCTGGATTCCCGGCTGCACACACCAATGTATTTCTTTTTGGCAAACCTCTCATTCCTGGACATGTGTT
TCACCACAGGTTCCATCCCTCAGATGCTCTACAACCTTTGGGGTCCAGATAAGACCATCAGCTATGTG
GGTTGTGCCATCCAGCTGTACTTTGTCCTGGCCCTGGGAGGGGTGGAGTGTGTCCTCCTGGCTATCAT
GGCATATGACCGCTATGCTGCAGTCTGCAAACCCCTGCACTACACCATCATCATGCACCCACGTCTCT
GTGGACAGCTGGCTTCAGTGGCATGGCTGAGTGGCTTTGGCAATTCTCTCATAATGGCACCCCAGACA
TTGATGCTACCCCGCTGTGGGCACAGACGAGTTGACCACTTTCTCTGTGAGATGCCAGCACTAATTGG
TATGGCCTGTGTAGACACCATGATGCTTGAGGCCTGGCTTTTGCCCTGGCAATCTTTATCATCCTTGG
CACCACTCATCCTCATTCTCATTTCTTATGGTTACGTTGGAGGAACAGTGCTTAGGATCAAGTCAGCT
GCTGGGCGAAAGAAAGCCTTCAACACTTGCAGCTCGCATCTAATTGTTGTCTCTCTCTTCTATGGTAC
AATTATATACATGTACCTCCAGCCAGCAAATACTTATTCCCAGGACCAGGGCAAGTTTCTTACCCTTT
TCTACACAATTGTCACTCCCAGTGTTAACCCCCTGATCTATACACTAAGAAACAAAGATGTTAAAGAG
GCCATGAAGAAGGTGCTAGGGAAGGGGAGTGCAGAAATATAGTAAGGG

| | | | |
|---|---|---|---|
| NOV42p, | | | |
| SNP13375125 of | | | |
| CG55358-03, | SEQ ID NO: 610 | | MW at 34065.3kD |
| Protein Sequence | SNP Pos: 112 | 307 aa | SNP Change: Val to Ile |

TSSFEGFILVGFSDRPHLELIVFVVVLIFYLLTLLGNMTIVLLSALDSRLHTPMYFFLANLSFLDMCF
TTGSIPQMLYNLWGPDKTISYVGCAIQLYFVLALGGVECVLLAIMAYDRYAAVCKPLHYTIIMHPRLC
GQLASVAWLSGFGNSLIMAPQTLMLPRCGHRVDHFLCEMPALIGMACVDTMMLEALAAFALAIFIILA
PLILILISYGYVGGTVLRIKSAAGRKKAFNTCSSHLIVVSLFYGTIIYMYLQPANTYSQDQGKFLTLF
YTIVTPSVNPLIYTLRNKDVKEANKKVLGKGSAEI

| | | |
|---|---|---|
| NOV42q, | | |
| SNP13376426 of | SEQ ID NO: 611 | 932 bp |
| CG55358-03, | ORF Start: at 3 | ORF Stop: TAG at 924 |
| DNA Sequence | SNP Pos: 415 | SNP Change: A to G |

ATACAAGTTCTTTCGAAGGCTTCATCCTGGTGGGCTTCTCTGATCGTCCCCACCTAGAGCTGATCGTC
TTTGTGGTTGTCCTCATCTTTTATCTGCTGACTCTTCTTGGCAACATGACCATTGTCTTGCTTTCAGC
TCTGGATTCCCGGCTGCACACACCAATGTATTTCTTTTTGGCAAACCTCTCATTCCTGGACATGTGTT
TCACCACAGGTTCCATCCCTCAGATGCTCTACAACCTTTGGGGTCCAGATAAGACCATCAGCTATGTG
GGTTGTGCCATCCAGCTGTACTTTGTCCTGGCCCTGGGAGGGGTGGAGTGTGTCCTCCTGGCTGTCAT
GGCATATGACCGCTATGCTGCAGTCTGCAAACCCCTGCACTACACCATCATCATGCACCCACGTCTCT
GTGGACGGCTGGCTTCAGTGGCATGGCTGAGTGGCTTTGGCAATTCTCTCATAATGGCACCCCAGACA
TTGATGCTACCCCGCTGTGGGCACAGACGAGTTGACCACTTTCTCTGTGAGATGCCAGCACTAATTGG
TATGGCCTGTGTAGACACCATGATGCTTGAGGCACTGGCTTTTGCCCTGGCAATCTTTATCATCCTGG
CACCACTCATCCTCATTCTCATTTCTTATGGTTACGTTGGAGGAACAGTGCTTAGGATCAAGTCAGCT
GCTGGGCGAAAGAAAGCCTTCAACACTTGCAGCTCGCATCTATTGTTGTCTCTCTCTTCTAATGGTAC
AATTATATACATGTACCTCCAGCCAGCAAATACTTATTCCCAGGACCAGGGCAAGTTTCTTACCCTTT
TCTACACAATTGTCACTCCCAGTGTTAACCCCTGATCTATACACTAAGAAACAAAGATGTTAAAAGAG
GCCATGAAGAAGGTGCTAGGGAAGGGGAGTGCAGAAATATAGTAAGGG

| | | | |
|---|---|---|---|
| NOV42q, | | | |
| SNP13376426 of | | | |
| CG55358-03, | SEQ ID NO: 612 | | MW at 34079.3kD |
| Protein Sequence | SNP Pos: 138 | 307 aa | SNP Change: Gln to Arg |

TSSFEGFILVGFSDRPHLELIVFVVVLIFYLLTLLGNMTIVLLSALDSRLHTPMYFFLANLSFLDMCF
TTGSIPQMLYNLWGPDKTISYVGCAIQLYFVLALGGVECVLLAVMAYDRYAAVCKPLHYTIIMHPRLC
GRLASVAWLSGFGNSLIMAPQTLMLPRCGHRRVDHFLCEMPALIGMACVDTMMLEALAFALAIFIILA
PLILILISYGYVGGTVLRIKSAAGRKKAFNTCSSHLIVVSLFYGTIIYMYLQPANTYSQDQGKFLTLF
YTIVTPSVNPLIYTLRNKDVKEAMKKVLGKGSAEI

| | | |
|---|---|---|
| NOV42r, | | |
| SNP13376427 of | SEQ ID NO: 613 | 932 bp |
| CG55358-03, | ORF Start: at 3 | ORF Stop: TAG at 924 |
| DNA Sequence | SNP Pos: 421 | SNP Change: C to T |

ATACAAGTTCTTTCGAAGGCTTCATCCTGGTGGGCTTCTCTGATCGTCCCCACCTAGAGCTGATCGTC
TTTGTGGTTGTCCTCATCTTTTATCTGCTGACTCTTCTTGGCAACATGACCATTGTCTTGCTTTCAGC
TCTGGATTCCCGGCTGCACACACCAATGTATTTCTTTTTGGCAAACCTCTCATTCCTGGACATGTGTT
TCACCACAGGTTCCATCCCTCAGATGCTCTACAACCTTTGGGGTCCAGATAAGACCATCAGCTATGTG
GGTTGTGCCATCCAGCTGTACTTTGTCCTGGCCCTGGGAGGGGTGGAGTGTGTCCTCCTGGCTGTCAT
GGCATATGACCGCTATGCTGCAGTCTGCAAACCCCTGCACTACACCATCATCATGCACCCACGTCTCT
GTGGACGGCTGGTTTCAGTGGCATGGCTGAGTGGCTTTGGCAATTCTCTCATAATGGCACCCCAGACA
TTGATGCTACCCCGCTGTGGGCACAGACGAGTTGACCACTTTCTCTGTGAGATGCCAGCACTAATTGG
TATGGCCTGTGTAGACACCATGATGCTTGAGGCACTGGCTTTTGCCCTGGCAATCTTTATCATCCTGG
CACCACTCATCCTCATTCTCATTTCTTATGGTTACGTTGGAGGAACAGTGCTTAGGATCAAGTCAGCT
GCTGGGCGAAAGAAAGCCTTCAACACTTGCAGCTCGCATCTATTGTTGTCTCTCTCTTCTAATGGTAC
AATTATATACATGTACCTCCAGCCAGCAAATACTTATTCCCAGGACCAGGGCAAGTTTCTTACCCTTT
TCTACACAATTGTCACTCCCAGTGTTAACCCCTGATCTATACACTAAGAAACAAAGATGTTAAAAGAG
GCCATGAAGAAGGTGCTAGGGAAGGGGAGTGCAGAAATATAGTAAGGG

| | | | |
|---|---|---|---|
| NOV42r, | | | |
| SNP13376427 of | | | |
| CG55358-03, | SEQ ID NO: 614 | | MW at 34079.3kD |
| Protein Sequence | SNP Pos: 140 | 307 aa | SNP Change: Ala to Val |

TSSFEGFILVGFSDRPHLELIVFVVVLIFYLLTLLGNMTIVLLSALDSRLHTPMYFFLANLSFLDMCF
TTGSIPQMLYNLWGPDKTISYVGCAIQLYFVLALGGVBCVLIAVMAYDRYAAVCKPLHYTIIMHPRLC
GQLVSVAWLSGFGNSLIMAPQTLMLPRCGHRRVDHFLCEMPALIGMACVDTMMLEALAFALAIFIILA
PLILILISYGYVGGTVLRIKSAAGRKKAFNTCSSHLIVVSLFYGTITYMYLQPANTYSQDQGKFLTLF
YTIVTPSVNPLIYTLRNKDVKEANKKVLGKGSAEI

| | | |
|---|---|---|
| NOV42s, | | |
| SNP13375126 of | SEQ ID NO: 615 | 932 bp |
| CG55358-03, | ORF Start: at 3 | ORF Stop: TAG at 924 |
| DNA Sequence | SNP Pos: 700 | SNP Change: T to C |

ATACAAGTTCTTTCGAAGGCTTCATCCTGGTGGGCTTCTCTGATCGTCCCCACCTAGAGCTGATCGTC
TTTGTGGTTGTCCTCATCTTTTATCTGCTGACTCTTCTTGGCAACATGACCATTGTCTTGCTTTCAGC
TCTGGATTCCCGGCTGCACACACCAATGTATTTCTTTTTGGCAAACCTCTCATTCCTGGACATGTGTT
TCACCACAGGTTCCATCCCTCAGATGCTCTACAACCTTTGGGGTCCAGATAAGACCATCAGCTATGTG
GGTTGTGCCATCCAGCTGTACTTTGTCCTGGCCCTGGGAGGGGTGGAGTGTGTCCTCCTGGCTGTCAT
GGCATATGACCGCTATGCTGCAGTCTGCAAACCCCTGCACTACACCATCATCATGCACCCACGTCTCT
GTGGACAGCTGGCTTCAGTGGCATGGCTGAGTGGCTTTGGCAATTCTCTCATAATGGCACCCCAGACA
TTGATGCTACCCCGCTGTGGGCACAGACGAGTTGACCACTTTCTCTGTGAGATGCCAGCACTAATTGG
TATGGCCTGTGTAGACACCATGATGCTTGAGGCACTGGCTTTTGCCCTGGCAATCTTTATCATCCTGG
CACCACTCATCCTCATTCTCATTTCTTATGGTTACGTTGGAGGAACAGTGCTTAGGATCAAGTCAGCT
GCTGGGCGAAAGAAAGCCTCee CAACACTTGCAGCTCGCATCTAATTGTTGTCTCTCTCTTCTATGGTAC
AATTATATACATGTACCTCCAGCCAGCAAATACTTATTCCCAGGACCAGGGCAAGTTTCTTACCCTTT
TCTACACAATTGTCACTCCCAGTGTTAACCCCCTGATCTATACACTAAGAAACAAAGATGTTAAAGAG
GCCATGAAGAAGGTGCTAGGGAAGGGGAGTGCAGAAATATAGTAAGGG

| | | | |
|---|---|---|---|
| NOV42s, | | | |
| SNP13375126 of | | | |
| CG55358-03, | SEQ ID NO: 616 | | MW at 33991.2kD |
| Protein Sequence | SNP Pos: 233 | 307 aa SNP Change: Phe to Ser | |

TSSFEGFILVGFSDRPHLELIVFVVVLIFYLLTLLGNMTIVLLSALDSRLHTPMYFFLANLSFLDMCF
TTGSIPQMLYNLWGPDKTISYVGCAIQLYFVLALGGVECVLLAVMAYDRYAAVCKPLHYTIIMHPRLC
GQLASVAWLSGFGNSLIMAPQTLMLPRCGHRRVDHFLCEMPALIGMACVDTMMLEALAFALAIFIILA
PLILILISYGYVGGTVLRIKSAAGRKKASNTCSSHLIVVSLFYGTIIYMYLQPANTYSQDQGKFLTLF
YTIVTPSVNPLIYTLRNKDVKEAMKKVLGKGSAEI

[0590] A ClustalW comparison of the above protein sequences yields the following sequence alignment shown in Table 42B.

TABLE 42B
Comparison of the NOV42 protein sequences.

| | |
|---|---|
| NOV42a | MENDNTSSFEGFILVGFSDRPHLELIVFVVVLIFYLLTLLGNMTIVLLSALDSRLHTPMY |
| NOV42b | -----TSSFEGFILVGFSDRPHLELIVFVVVLIFYLLTLLGNMTIVLLSALDSRLHTPMY |
| NOV42c | RGSTMYKFFRGFILVGFSDRPHLELIVFVVVLIFYLLTLLGNMTIVLLSALDSRLHTPMY |
| NOV42d | ----------------------------RGSLIFYLLTLLGNMTIVLLSALDSRLHTPMY |
| NOV42e | ------------------------------------------------------------ |
| NOV42f | -ENDNTSSFEGFILVGFSDRPHLELIVFVVVLIFYLLTLLGNMTIVLLSALDSRLHTPMY |
| NOV42g | MENDNTSSFEGFILVGFSDRPHLELIVFVVVLIFYLLTLLGNMTIVLLSALDSRLHTPMY |
| NOV42h | MENDNTSSFEGFILVGFSDRPHLELIVFVVVLIFYLLTLLGNMTIVLLSALDSRLHTPMY |
| NOV42i | ------------------------------------------------------------ |
| NOV42j | ------------------------------------------------------------ |
| NOV42k | -ENDNTSSFEGFILVGFSDRPHLELIVFVVVLIFYLLTLLGNMTIVLLSALDSRLHTPMY |
| NOV42a | FFLANLSFLDMCFTTGSIPQMLYNLWGPDKTISYVGCAIQLYFVLALGGVECVLLAVMAY |
| NOV42b | FFLANLSFLDMCFTTGSIPQMLYNLWGPDKTISYVGCAIQLYFVLALGGVECVLLAVMAY |
| NOV42c | FFLANLSFLDMCFTTGSIPQMLYNLWGPDKTISYVGCAIQLYFVLALGGVECVLLAVMAY |
| NOV42d | FFLANLSFLDMCFTTGSIPQMLYNLWGPDKTISYVGCAIQLYFVLALGGVECVLLAVMAY |
| NOV42e | ----------------------------------RGSAIQLYFVLALGGVECVLLAVMAY |
| NOV42f | FFLANLSFLDMCFTTGSIPQMLYNLWGPDKTISYVGCAIQLYFVLALGGVECVLLAVMAY |
| NOV42g | FFLANLSFLDMCFTTGSIPQMLYNLWGPDKTISYVGCAIQLYFVLALGGVECVLLAVMAY |
| NOV42h | FFLANLSFLDMCFTTGSIPQMLYNLWGPDKTISYVGCAIQLYFVLALGGVECVLLAVMAY |
| NOV42i | ------------------------------------------------------------ |
| NOV42j | ------------------------------------------------------------ |
| NOV42k | FFLANLSFLDMCFTTGSIPQMLYNLWGPDKTISYVGCAIQLYFVLALGGVECVLLAVMAY |
| NOV42a | DRYAAVCKPLHYTIIMHPRLCGQLASVAWLSGFGNSLIMAPQTLMLPRCGHRRVDHFLCE |
| NOV42b | DRYAAVCKPLHYTIIMHPRLCGQLASVAWLSGFGNSLIMAPQTLMLPRCGHRRVDHFLCE |
| NOV42c | DRYAAVCKPLHYTIIMHPRLCGQLVSVAWLSGFGNSLIMAPQTLMLPRCGHRRVDHFLCE |
| NOV42d | DRYAAVCKPLHYTIIMHPRLCGQLVSVAWLSGFGNSLIMAPQTLMLPRCGHRRVDHFLCE |
| NOV42e | DRYAAVCKPLHYTIIMHPRLCGQLVSVAWLSGFGNSLIMAPQTLMLPRCGHRRVDHFLCE |
| NOV42f | DRYAAVCKPLHYTIIMHPRLCGQLASVAWLSGFGNSLIMAPQTLMLPRCGHRRVDHFLCE |
| NOV42g | DRYAAVCKPLHYTIIMHPRLCGQLASVAWLSGFGNSLIMAPQTLMLPRCGHRRVDHFLCE |
| NOV42h | DRYAAVCKPLHYTIIMHPRLCGQLASVAWLSGFGNSLIMAPQTLMLPRCGHRRVDHFLCE |
| NOV42i | --------------------------------MENDNTSSFEGFILVGFSDRP------- |
| NOV42j | ------------------------------------------TLMLPRCGHRRVDHFLCE |
| NOV42k | DRYAAVCKPLHYTIIMHPRLCGQLASVAWLSGFGNSLIMAPQTLMLPRCGHRRVDHFLCE |
| NOV42a | MPALIGMACVDTMMLEALAFALAIFIVLAPLILILISYGYVGGTVLRIKSAAGRKKAFNT |
| NOV42b | MPALIGMACVDTMMLEALAFALAIFIILAPLILILISYGYVGGTVLRIKSAAGRKKAFNT |
| NOV42c | MPALIGMACVDTMMLEALAFALAIFIILAPLILILISYGYVGGTVLRILEA--------- |
| NOV42d | MPALIGMACVDTMMLEALAFALAIFIILAPLILILISYGYVGGTVLRILEA--------- |
| NOV42e | MPALIGMACVDTMMLEALAFALAIFIILAPLILILISYGYVGGTVLRILEAKGEFQHT-- |
| NOV42f | MPALIGMACVDTMMLEALAFALAIFIILAPLILILISYGYVGGTVLRIKSAAGRKKAFNT |
| NOV42g | MPALIGMACVDTMMLEALAFALAIFIILAPLILILISYGYVGGTVLRIKSAAGRKKAFNT |
| NOV42h | MPALIGMACVDTMMLEALAFALAIFIILAPLILILISYGYVGGTVLRIKSAAGRKKAFNT |
| NOV42i | ------------------------------------------------------------ |
| NOV42j | MP---------------------------------------------------------- |
| NOV42k | MPALIGMACVDTMMLEALAFALAIFIILAPLILILISYGYVGGTVLRIKSAAGRKKAFNT |
| NOV42a | CSSHLIVVSLFYGTIIYMYLQPANTYSQDQGKFLTLFYTIVTPSVNPLIYTLRNKDVKEA |
| NOV42b | CSSHLIVVSLFYGTIIYMYLQPANTYSQDQGKFLTLFYTIVTPSVNPLIYTLRNKDVKEA |
| NOV42c | ------------------------------------------------------------ |
| NOV42d | ------------------------------------------------------------ |
| NOV42e | ------------------------------------------------------------ |
| NOV42f | CSSHLIVVSLFYGTIIYMYLQPANTYSQDQGKFLTLFYTIVTPSVNPLIYTLRNKDVKEA |
| NOV42g | CSSHLIVVSLFYGTIIYMYLQPANTYSQDQGKFLTLFYTIVTPSVNPLIYTLRNKDVKEA |
| NOV42h | CSSHLIVVSLFYGTIIYMYLQPANTYSQDQGKFLTLFYTIVTPSVNPLIYTLRNKDVKEA |
| NOV42i | ------------------------------------------------------------ |
| NOV42j | ------------------------------------------------------------ |
| NOV42k | CSSHLIVVSLFYGTIIYMYLQPANTYSQDQGKFLTLFYTIVTPSVNPLIYTLRNKDVKEA |
| NOV42a | MKKVLGKGSAEI |
| NOV42b | MKKVLGKGSAEI |
| NOV42c | ------------ |
| NOV42d | ------------ |
| NOV42e | ------------ |
| NOV42f | MKKVLGKGSAEI |
| NOV42g | MKKVLGKGSAEI |
| NOV42h | MKKVLGKGSAEI |
| NOV42i | ------------ |
| NOV42j | ------------ |
| NOV42k | MKKVLGKGSAEI |
| NOV42a | (SEQ ID NO: 580) |
| NOV42b | (SEQ ID NO: 582) |
| NOV42c | (SEQ ID NO: 584) |
| NOV42d | (SEQ ID NO: 586) |
| NOV42e | (SEQ ID NO: 588) |
| NOV42f | (SEQ ID NO: 590) |
| NOV42g | (SEQ ID NO: 592) |
| NOV42h | (SEQ ID NO: 594) |
| NOV42i | (SEQ ID NO: 596) |
| NOV42j | (SEQ ID NO: 598) |
| NOV42k | (SEQ ID NO: 600) |

[0591] Further analysis of the NOV42a protein yielded the following properties shown in Table 42C.

TABLE 42C
Protein Sequence Properties NOV42a

| | |
|---|---|
| SignalP analysis: | Cleavage site between residues 42 and 43 |
| PSORT II analysis: | |

| PSG: | a new signal peptide prediction method | | | |
|---|---|---|---|---|
| | N-region: | length 10; | pos.chg 0; | neg.chg 3 |
| | H-region: | length 8; | peak value | 0.00 |

| | PSG score: −4.40 |
|---|---|
| GvH: | von Heijne's method for signal seq. recognition |
| | GvH score (threshold: −2.1): −2.80 |
| | possible cleavage site: between 41 and 42 |

>>> Seems to have no N-terminal signal peptide

| ALOM: | Klein et al's method for TM region allocation | | |
|---|---|---|---|
| | Init position for calculation: 1 | | |
| | Tentative number of TMS(s) for the threshold 0.5: 5 | | |
| | INTEGRAL | Likelihood =−13.21 | Transmembrane 25-41 |
| | INTEGRAL | Likelihood = −7.11 | Transmembrane 103-119 |
| | INTEGRAL | Likelihood = −0.27 | Transmembrane 183-199 |
| | INTEGRAL | Likelihood =−14.97 | Transmembrane 200-216 |
| | INTEGRAL | Likelihood = −1.12 | Transmembrane 244-260 |

| | |
|---|---|
| PERIPHERAL | Likelihood = 1.80 (at 273) |

| | ALOM score: −14.97 (number of TMSs: 5) |
|---|---|
| MTOP: | Prediction of membrane topology (Hartmann et al.) |
| | Center position for calculation: 32 |
| | Charge difference: 2.0 C(0.5) − N(−1.5) |
| | C > N: C-terminal side will be inside |

>>> membrane topology: type 3b
MITDISC: discrimination of mitochondrial targeting seq

| | | | |
|---|---|---|---|
| R content: | 0 | Hyd Moment(75): | 6.56 |
| Hyd Moment(95): | 3.47 | G content: | 0 |
| D/E content: | 2 | S/T content: | 0 |
| Score: −7.29 | | | |

Gavel: prediction of cleavage sites for mitochondrial preseq

cleavage site motif not found

NUCDISC: discrimination of nuclear localization signals

pat4: none
pat7: none
bipartite: none
content of basic residues: 6.7%
NLS Score: −0.47

KDEL: ER retention motif in the C-terminus: none
ER Membrane Retention Signals: none
SKL: peroxisomal targeting signal in the C-terminus: none
PTS2: 2nd peroxisomal targeting signal: none
VAC: possible vacuolar targeting motif: none
RNA-binding motif: none
Actinin-type actin-binding motif:

type 1: none
type 2: none

NMYR: N-myristoylation pattern: none
Prenylation motif: none
memYQRL: transport motif from cell surface to Golgi: none
Tyrosines in the tail: none
Dileucine motif in the tail: none
checking 63 PROSITE DNA binding motifs: none
checking 71 PROSITE ribosomal protein motifs: none
checking 33 PROSITE prokaryotic DNA binding motifs: none

| | |
|---|---|
| NNCN: | Reinhardt's method for Cytoplasmic/Nuclear discrimination |
| | Prediction: cytoplasmic |
| | Reliability: 94.1 |
| COIL: | Lupas's algorithm to detect coiled-coil regions |
| | total: 0 residues |

Final Results (k = 9/23):

55.6%: endoplasmic reticulum
22.2%: vacuolar
11.1%: vesicles of secretory system
11.1%: Golgi

>> prediction for CG55358-04 is end (k = 9)

[0592] A search of the NOV42a protein against the Geneseq database, a proprietary database that contains sequences published in patents and patent publication, yielded several homologous proteins shown in Table 42D.

TABLE 42D
Geneseq Results for NOV42a

| | | NOV42a | Identities/ | |
|---|---|---|---|---|
| | | Residues/ | Similarities for | |
| Geneseq | Protein/Organism/Length | Match | the Matched | Expect |
| Identifier | [Patent #, Date] | Residues | Region | Value |
| AAE10685 | G-protein coupled receptor 4a | 1 . . . 312 | 311/312 (99%) | e−180 |
| | (GPCR4a) - Unidentified, 312 aa. | 1 . . . 312 | 312/312 (99%) | |
| | [WO200164879-A2, 07-SEP- | | | |
| | 2001] | | | |
| AAG72062 | Human olfactory receptor | 1 . . . 312 | 310/312 (99%) | e−179 |
| | polypeptide, SEQ ID NO: 1743 - | 3 . . . 314 | 312/312 (99%) | |
| | Homo sapiens, 334 aa. | | | |
| | [WO200127158-A2, 19-APR- | | | |
| | 2001] | | | |
| AAE10686 | G-protein coupled receptor 4b | 6 . . . 312 | 306/307 (99%) | e−177 |
| | (GPCR4b) - Unidentified, 307 aa. | 1 . . . 307 | 307/307 (99%) | |
| | [WO200164879-A2, 07-SEP- | | | |
| | 2001] | | | |
| ABP95745 | Human GPCR polypeptide SEQ | 43 . . . 312 | 269/270 (99%) | e−155 |
| | ID NO 300 - Homo sapiens, 270 | 1 . . . 270 | 270/270 (99%) | |
| | aa. [WO200216548-A2, 28-FEB- | | | |
| | 2002] | | | |
| AAG71998 | Human olfactory receptor | 43 . . . 312 | 269/270 (99%) | e−155 |
| | polypeptide, SEQ ID NO: 1679 - | 1 . . . 270 | 270/270 (99%) | |
| | Homo sapiens, 270 aa. | | | |
| | [WO200127158-A2, 19-APR- | | | |
| | 2001] | | | |

[0593] In a BLAST search of public sequence databases, the NOV42a protein was found to have homology to the proteins shown in the BLASTP data in Table 42E.

TABLE 42E
Public BLASTP Results for NOV42a

| | | NOV42a | Identities/ | |
|---|---|---|---|---|
| Protein | | Residues/ | Similarities for | |
| Accession | | Match | the Matched | Expect |
| Number | Protein/Organism/Length | Residues | Portion | Value |
| CAC88325 | Sequence 11 from Patent | 1 . . . 312 | 311/312 (99%) | e−179 |
| | WO0164879 - Homo sapiens | 1 . . . 312 | 312/312 (99%) | |
| | (Human), 312 aa. | | | |
| Q8NHA6 | Seven transmembrane helix | 12 . . . 312 | 300/301 (99%) | e−173 |
| | receptor - Homo sapiens | 18 . . . 318 | 301/301 (99%) | |
| | (Human), 318 aa. | | | |
| Q8VFH0 | Olfactory receptor MOR256-12 - | 1 . . . 312 | 295/312 (94%) | e−172 |
| | Mus musculus (Mouse), 317 | 6 . . . 317 | 304/312 (96%) | |
| | aa. | | | |
| Q8VG14 | Olfactory receptor MOR256-8 - | 1 . . . 307 | 212/307 (69%) | e−125 |
| | Mus musculus (Mouse), 308 aa. | 1 . . . 307 | 251/307 (81%) | |
| Q8VFG9 | Olfactory receptor MOR256-13 - | 5 . . . 305 | 205/301 (68%) | e−120 |
| | Mus musculus (Mouse), 314 | 11 . . . 311 | 247/301 (81%) | |
| | aa. | | | |

[0594] PFam analysis indicates that the NOV42a protein contains the domains shown in the Table 42F.

TABLE 42F
Domain Analysis of NOV42a

| Pfam | NOV42a | Identities/Similarities | Expect |
|---|---|---|---|
| Domain | Match Region | for the Matched Region | Value |
| 7tm_1 | 41 . . . 290 | 57/276 (21%) | 3.2e−41 |
| | | 177/276 (64%) | |

### Example 43

[0595] The NOV43 clone was analyzed, and the nucleotide and encoded polypeptide sequences are shown in Table 43A.

TABLE 43A

NOV43 Sequence Analysis

| | | |
|---|---|---|
| NOV43a, CG55604-04 | SEQ ID NO: 617 | 968 bp |
| DNA Sequence | ORF Start: ATG at 8 | ORF Stop: TGA at 950 |

TATATCAATGGGAGAAGAAAACCAAACCTTTGTGTCCAAGTTTATCTTCCTGGGTCTTTCACAGGACT
TGCAGACCCAGATCCTGCTATTTATCCTTTTCCTCATCATTTATCTGCTGACCGTGCTTGGAAACCAG
CTCATCATCATTCTCATCTTCCTGGATTCTCGCCTTCACACTCCCATGTATTTTTTTCTTAGAAATAT
CTCCTTTGCAGATCTCTGTTTCTCTACTAGCATTGTCCCTCAAGTGTTGGTTCACTTCTTGGTAAAGA
GGAAAACCATTTCTTTTTATGGGTGTATGACACAGATAATTGTCTTTCTTCTGGTTGGGTGTACAGAG
TGTGCGCTGCTGGCAGTGATGTCCTATGACCGGTATGTGGCTGTCTGCAAGCCCCTGTACTACTCTAC
CATCATGACACAACGGGTGTGTCTCTGGCTGTCCTTCAGGTCCTGGGCCAGTGGGGCACTAGTGTCTT
TAGTAGATACCAGCTTTACTTTCCATCTTCCCTACTGGGGACAGAATATAATCAATCACTACTTTTGT
GAACCTCCTGCCCTCCTGAAGCTGGCTTCCATAGACACTTACAGCACAGAAATGGCCATCTTTTCAAT
GGGCGTGGTAATCCTCCTGGCCCCTATCTCCCTGATTCTTGGTTCTTATTGGAATATTATCTCCACTG
TTATGGAGATGCAGTCTGGGGAAGGGAGACTCAAGGCTTTTTCCACCTGTGGCTCCCATCTTATTGTT
GTTGTCCTCTTCTATGGGTCAGGAATATTCACCTACATGCGACCAAACTCCAAGACTACAAAAGAACT
GGATAAAATGATATCTGTGTTCTATACAGCGGTGACTCCAATGTTGAACCCCATAATTTATAGCTTGA
GGAACAAAGATGTCAAAGGGGCTCTCAGGAAACTAGTTGGGAGAAAGTGCTTCTCTCATAGGCAGTGA
CCTCTGAGTCTGACTA

| | | | |
|---|---|---|---|
| NOV43a, CG55604-04 | | | |
| Protein Sequence | SEQ ID NO: 618 | 314 aa | MW at 35728.1kD |

MGEENQTFVSKFIFLGLSQDLQTQILLFILFLIIYLLTVLGNQLIIILIFLDSRLHTPMYFFLRNISF
ADLCFSTSIVPQVLVHFLVKRKTISFYGCMTQIIVFLLVGCTECALLAVMSYDRYVAVCKPLYYSTIM
TQRVCLWLSFRSWASGALVSLVDTSFTFHLPYWGQNIINHYFCEPPALLKLASIDTYSTEMAIFSMGV
VILLAPISLILGSYWNIISTVIQMQSGEGRLKAFSTCGSHLIVVVLFYGSGIFTYMRPNSKTTKELDK
MISVFYTAVTPMLNPIIYSLRNKDVKGALRKLVGRKCFSHRQ

| | | |
|---|---|---|
| NOV43b, GG55604-01 | SEQ ID NO: 619 | 840 bp |
| DNA Sequence | ORF Start: ATG at 42 | ORF Stop: TGA at 810 |

TCATCATTCTCATCTTCCTGGATTCTCGCCTTCACACTCCCATGTATTTTTTTTCTTAGAAACTCTCC
TTTGCAGATCTCTGTTTCTCTACTAGCATTGTCCCTCAAGTGTTGGTTCACTTCTTGGTAAAGAGGAA
AACCATTTCTTTTTATGGGTGTATGACACAGATAATTGTCTTTCTTCTGGTTGGGTGTACAGAGTGTG
CGCTGCTGGCAGTGATGTCCTATGACCGGTATGTGGCTGTCTGCAAGCCCCTGTACTACTCTACCATC
ATGACACAACGGGTGTGTCTCTGGCTGTCCTTCAGGTCCTGGGCCAGTGGGGCACTAGTGTCTTTAGT
AGATACCAGCTTTACTTTCCATCTTCCCTACTGGGGACAGAATATAATCAATCACTACTTTTGTGAAC
CTCCTGCCCTCCTGAAGCTGGCTTCCATAGACACTTACAGCACAGAAATGGCCATCTTTTCAATGGGC
GTGGTAATCCTCCTGGCCCCTGTCTCCCTGATTCTTGGTTCTTATTGGAATATTATCTCCACTGTTAT
CCAGATGCAGTCTGGGGAAGGGAGACTCAAGGCTTTTTCCACCTGTGGCTCCCATCTTATTGTTGTTG
TCCTCTTCTATGGGTCAGGAATATTCACCTACATGCGACCAAACTCCAAGACTACAAAAGAACTGGAT
AAAATGATATCTGTGTTCTATACAGCGGTGACTCCAATGTTGAACCCCATAATTTATAGCTTGAGGAA
CAAAGATGTCAAAGGGGCTCTCAGGAAACTAGTTGGGAGAAAGTGCTTCTCTCATAGGCAGTGACCTC
TGAGTCTGACTTTTAGAGCTATGG

| | | | |
|---|---|---|---|
| NOV43b, CG55604-01 | | | |
| Protein Sequence | SEQ ID NO: 620 | 256 aa | MW at 29023.1kD |

MYFFLRNLSFADLCFSTSIVPQVLVHFLVKRTISFYGCMTQIIVFLLVGCTECALLAVMSYDRYAVAV
CKPLYYSTIMTQRVCLWLSFRSWASGALVSLVDTSFTFHLPWGQNIINHYFCEPPALLKLASIADTYS
TEMAIFSMGVVILLAPVSILGSYWNIISTVIQMQSGEGRLKAFSTCGSHLIVVVLFYGSGIFATYMRP
NSKTTKELDKMISVFYTAVTPMLNPIIYSLRNKDVKGALRKLVGRKCFSHRQ

| | | |
|---|---|---|
| NOV43c, GG55604-02 | SEQ ID NO: 621 | 944 bp |
| DNA Sequence | ORF Start: ATG at 31 | ORF Stop: TGA at 973 |

TGCCAAACAGGTAAACAGGCAAAAATATCAATGGGAGAAGAAAACCAAACCTTTGTGTCCAAGTTTAT
CTTCCTGGGTCTTTCACAGGACTTGCAGACCCAGATCCTGCTATTTATCCTTTTCCTCATCATTTATC
TGCTGACCGTGCTTGGAAACCAGCTCATCATCATTCTCATCTTCCTGGATTCTCGCCTTCACACTCCC
ATGTATTTTTTTCTTAGAAATATCTCCTTTGCAGATCTCTGTTTCTCTACTAGCATTGTCCCTCAAGT
GTTGGTTCACTTCTTGGTAAAGAGGAAAACCATTTCTTTTTATGGGTGTATGACACAGATAATTGTCT
TTCTTCTGGTTGGGTGTACAGAGTGTGCGCTGCTGGCAGTGATGTCCTATGACCGGTATGTGGCTGTC
TGCAAGCCCCTGTACTACTCTACCATCATGACACAACGGGTGTGTCTCTGGCTGTCCTTCAGGTCCTG
GGCCAGTGGGGCACTAGTGTCTTTAGTAGATACCAGCTTTACTTTCCATCTTCCCTACTGGGGACAGA
ATATAATCAATCACTACTTTTGTGAACCTCCTGCCCTCCTGAAGCTGGCTTCCATAGACACTTACAGC
ACAGAAATGGCCATCTTTTCAATGGGCGTGGTAATCCTCCTGGCCCCTGTCTCCCTGATTCTTGGTTC
TTATTGGAATATTATCTCCACTGTTATCCAGATGCAGTCTGGGGAAGGGAGACTCAAGGCTTTTTCCA
CCTGTGGCTGGGATCTTATTGTTGTTGTCCTCTTCTATGGGTCAGGAATATTCACCTACATGCGACCA
AACTCCAAGACTACAAAAGAACTGGATAAAATGATATCTGTGTTCTATACAGCGGTGACTCCAATGTT
GAACCCCATAATTTATAGCTTGAGGAACAAAGATGTCAAAGGGGCTCTCAGGAAACTAGTTGGGAGAA
AGTGCTTCTCTCATAGGCATGACCTCTGAGTCTGACTTTTA

| | | | |
|---|---|---|---|
| NOV43c, GG55604-02 | | | |
| Protein Sequence | SEQ ID NO: 622 | 314 aa | MW at 35714.lkD |

MGEENQTFVSKFIFLGLSQDLQTQILLFILFLIIYLLTVLGNQLIIILIFLDSRLHTPMYFFLRNISF
ADLCFSTSIVPQVLVHFLVKRKTISFYGCMTQIIVFLLVGCTECALLAVMSYDRYVAVCKPLYYSTIM
TQRVCLWLSFRSWASGALVSLVDTSFTFHLPYWGQNIINHYFCEPPALLKLASIDTYSTEMAIFSMGV
VILLAPVSLILGSYWNIISTVIQMQSGEGRLKAFSTCGSHLIVVVLFYGSGIFTYMRPNSKTTKELDK
MISVFYTAVTPMLNPIIYSLRNKDVKGALRKLVGRKCFSHRQ

| | | |
|---|---|---|
| NOV43d, CG55604-03 | SEQ ID NO: 623 | 960 bp |
| DNA Sequence | ORF Start: ATG at 1 | ORF Stop: TGA at 943 |

ATGGGAGAAGAAAACCAAACCTTTGTGTCCAAGTTTATCTTCCTGGGTCTTTCACAGGACTTGCAGAC
CCAGATCCTGCTATTTATCCTTTTCCTCATCATTTTATCTGTGACCGTGCTTGGAAACCAGCTCATCA
TCATTCTCATCTTCCTGGATTCTCGCCTTCACACTCCCATGTATTTTTTTCTTAGAAATATCTCCTTT
GCAGATCTCTGTTTCTCTACTAGCATTGTCCCTCAAGTGTTGGTTCACTTCTTGGTAAAGAGGAAAAC
CATTTCTTTTTATGGGTGTATGACACAGATAATTGTCTTTCTTCTGGTTGGGTGTACAGAGTGTGCGC
TGCTGGCAGTGATGTCCTATGACCGGTATGTGGCTGTCTGCAAGCCCCTGTACTACTCTACCATCATG
ACACAACGGGTGTGTCTCTGGCTGTCCTTCAGGTCCTGGGCCAGTGGGGCACTAGTGTCTTTAGTAGA
TACCAGCTTTACTTTCCATCTTCCCTACTGGGGACAGAATATAATCAATCACTACTTTTGTGAACCTC
CTGCCCTCCTGAAGCTGGCTTCCATAGACACTTACAGCACAGAAATGGCCATCTTTTCAATGGGCGTG
GTAATCCTCCTGGCCCCTATCTCCCTGATTCTTGGTTCTTATTGGAATATTATCTCCACTGTTATCCA
GATGCAGTCTGGGGAAGGGAGACTCAAGGCTTTTTCCACCTGTGGCTCCCATCTTATTGTTGTTGTCC
TCTTCTATGGGTCAGGAATATTCACCTACATGCGACCAAACTCCAAGACTACAAAAGAACTGGATAAA
ATGATATCTGTGTTCTATACAGCGGTGACTCCAATGTTGAACCCCATAATTTATAGCTTGAGGAACAA
AGATGTCAAAGGGGCTCTCAGGAAACTAGTTGGGAGAAAGTGCTTCTCTCATAGGCAGTGACCTCTGA
GTCTGACT

| | | | |
|---|---|---|---|
| NOV43d, CG55604-03 | | | |
| Protein Sequence | SEQ ID NO: 624 | 314 aa | MW at 35728.1kD |

MGEENQTFVSKFIFLGLSQDLQTQILLFILFLIIYLLTVLGNQLIIILIFLDSRLHTPMYFFLRNISF
ADLCFSTSIVPQVLVHFLVKRKTISFYGCMTQIIVFLLVGCTECALLAVMSYDRYVAVCKPLYYSTIM
TQRVCLWLSFRSWASGALVSLVDTSFTFHLPYWGQNIINHYFCEPPALLKLASIDTYSTEMAIFSMGV
VILLAPVSLILGSYWNIISTVIQMQSGEGRLKAFSTCGSHLIVVVLFYGSGIFTYMRPNSKTTKELDK
MISVFYTAVTPMLNPIIYSLRNKDVKGALRKLVGRKCFSHRQ

| | | |
|---|---|---|
| NOV43e, GG55604-05 | SEQ ID NO: 625 | 995 bp |
| DNA Sequence | ORF Start: ATG at 31 | ORF Stop: TGA at 973 |

TGCCAAACAGGTAAACAGGCAAAAATATCAATGGGAGAAGAAAACCAAACCTTTGTGTCCAAGTTTAT
CTTCCTGGGTCTTTCACAGGACTTGCAGACCCAGATCCTGCTATTTATCCTTTTCCTCATCATTTATC
TGCTGACCGTGCTTGGAAACCAGCTCATCATCATTCTCATCTTCCTGGATTCTCGCCTTCACACTCCC
ATGTATTTTTTTCTTAGAAATCTCTCCTTTGCAGATCTCTGTTTCTCTACTAGCATTGTCCCTCAAGT
GTTGGTTCACTTCTTGGTAAAGAGGAAAACCATTTCTTTTTATGGGTGTATGACACAGATAATTGTCT
TTCTTCTGGTTGGGTGTACAGAGTGTGCGCTGCTGGCCGTGATGTCCTATGACCGGTATGTGGCTGTC
TGCAAGCCCCTGTACTACTCTACCATCATGACACAACGGGTGTGTCTCTGGCTGTCCTTCAGGTCCTG
GGCCAGTGGGGCACTAGTGTCTTTAGTAGATACCAGCTTTACTTTCCATCTTCCCTACTGGGGACAGA
ATATAATCAATCACTACTTTTGTGAACCTCCTGCCCTCCTGAAGCTGGCTTCCATAGACACTTACAGC
ACAGAAATGGCCATCTTTTCAATGGGCGTGGTAATCCTCCTGGCCCCTATCTCCCTGATTCTTGGTTC
TTATTGGAATATTATCTCCACTGTTATCCAGATGCAGTCTGGGGAAGGGAGACTCAAGGCTTTTTCCA
CCTGTGGCTCCCATCTTATTGTTGTTGTCCTCTTCTATGGGTCAGGAATATTCACCTACATGCGACCA
AACTCCAAGACTACAAAAGAACTGGATAAAATGATATCTGTGTTCTATACAGCGGTGACTCCAATGTT
GAACCCCATAATTTATAGCTTGAGGAACAAAGATGTCAAAGGGGCTCTCAGGAAACTAGTTGGGAGAA
AGTGCTTCTCTCATAGGCAGTGACCTCTGAGTCTGACTTTTAA

| | | | |
|---|---|---|---|
| NOV43e, CG55604-05 | | | |
| Protein Sequence | SEQ ID NO: 626 | 314 aa | MW at 35728.1kD |

MGEENQTFVSKFIFLGLSQDLQTQILLFILFLIIYLLTVLGNQLIIILIFLDSRLHTPMYFFLRNISF
ADLCFSTSIVPQVLVHFLVKRKTISFYGCMTQIIVFLLVGCTECALLAVMSYDRYVAVCKPLYYSTIM
TQRVCLWLSFRSWASGALVSLVDTSFTFHLPYWGQNIINHYFCEPPALLKLASIDTYSTEMAIFSMGV
VILLAPVSLILGSYWNIISTVIQMQSGEGRLKAFSTCGSHLIVVVLFYGSGIFTYMRPNSKTTKELDK
MISVFYTAVTPMLNPIIYSLRNKDVKGALRKLVGRKCFSHRQ

| | | |
|---|---|---|
| NOV43f, CG55604-06 | SEQ ID NO: 627 | 946 bp |
| DNA Sequence | ORF Start: ATG at 2 | ORF Stop: TGA at 944 |

TATGGGAGAAGAAAACCAAACCTTTGTGTCCAAGTTTATCTTCCTGGGTCTTTCACAGGACTTGCAGA
CCCAGATCCTGCTATTTATCCTTTTCCTCATCATTTATCTGCTGACCGTGCTTGGAAACCAGCTCATC
ATCATTCTCATCTTCCTGGATTCTCGCCTTCACACTCCCATGTATTTTTTTCTTAGAAATATCTCCTT
TGCAGATCTCTGTTTTCTCTACTAGCATTGTCCCTCAAGTGTTGGTTCACTTCTTGGTAAAGAGGAAA
CCATTTCTTTTTATGGGTGTATGACACAGATAATTGTCTTTCTTCTGGTTGGGTGTACAGAGTGTGCG
CTGCTGGCATTGATGTCCTATGACCGGTATGTGGCTGTCTGCAAGCCCCTGTACTACTCTACCATCAT
GACACAACGGGTGTGTCTCTGGCTGTCCTTCAGGTCCTCGGCCAGTGGGGCACTAGTGTCTTTAGTAG
ATACCAGCTTTACTTTCCATCTTCCCTACTGGGGACAGAATATAATCAATCACTACTTTTGTGAACCT
CCTGCCCTCCTGAAGCTGGCTTCCATAGACACTTACAGCACAGAAATGGCCATCTTTTCAATGGGCGT
GGTAATCCTCCTGGCCCCTGTCTCCCTGATTCTTGGTTCTTATTGGAATATTATCTCCACTGTTATCC
AGATGCAGTCTGGGGAAGGGAGACTCAAGGCTTTTTCCACCTGTGGCTCCCATCTTATTGTTGTTGTC
CTCTTCTATGGGTCAGGAATATTCACCTACATGCGACCAAACTCCAAGACTACAAAAGAACTGGATAA
AATGATATCTGTGTTCTATACAGCGGTGACTCCAATGTTGAACCCCATAATTTATAGCTTGAGGAACA
AAGATGTCAAAGGGGTCTCAGGAAACTAGTTGGGAGAAAGTGCTTCTCTCATAGGCAGTGA

| | | | |
|---|---|---|---|
| NOV43f, CG55604-06 | | | |
| Protein Sequence | SEQ ID NO: 628 | 314 aa | MW at 35614.9kD |

MGEENQTFVSKFIFLGLSQDLQTQILLFILFLIIYLLTVLGNQLIIILIFLDSRLHTPMYFFLRNISF
ADLCFSTSIVPQVLVHFLVKRKTISFYGCMTQIIVFLLVGCTECALLAVMSYDRYVAVCKPLYYSTIM
TQRVCLWLSFRSWASGALVSLVDTSFTFHLPYWGQNIINHYFCEPPALLKLASIDTYSTEMAIFSMGV
VILLAPVSLILGSYWNIISTVIQMQSGEGRLKAFSTCGSHLIVVVLFYGSGIFTYMRPNSKTTKELDK
MISVFYTAVTPMLNPIIYSLRNKDVKGALRKLVGRKCFSHRQ

| | | |
|---|---|---|
| NOV43g, CG55604-07 | SEQ ID NO: 629 | 962 bp |
| DNA Sequence | ORF Start: ATG at 2 | ORF Stop: TGA at 944 |

TATGGGAGAAGAAAACCAAACCTTTGTGTCCAAGTTTATCTTCCTGGGTCTTTCACAGGACTTGCAGA
CCCAGATCCTGCTATTTATCCTTTTCCTCATCATTTATCTGCTGACCGTGCTTGGAAACCAGCTCATC
ATCATTCTCATCTTCCTGGATTCTCGCCTTCACACTCCCATGTATTTTTTTCTTAGAAATATCTCCTT
TGCAGATCTCTGTTTTCTCTACTAGCATTGTCCCTCAAGTGTTGGTTCACTTCTTGGTAAAGAGGAAA
CCATTTCTTTTTATGGGTGTATGACACAGATAATTGTCTTTCTTCTGGTTGGGTGTACAGAGTGTGCG
CTGCTGGCATTGATGTCCTATGACCGGTATGTGGCTGTCTGCAAGCCCCTGTACTACTCTACCATCAT
GACACAACGGGTGTGTCTCTGGCTGTCCTTCAGGTCCTCGGCCAGTGGGGCACTAGTGTCTTTAGTAG
ATACCAGCTTTACTTTCCATCTTCCCTACTGGGGACAGAATATAATCAATCACTACTTTTGTGAACCT
CCTGCCCTCCTGAAGCTGGCTTCCATAGACACTTACAGCACAGAAATGGCCATCTTTTCAATGGGCGT
GGTAATCCTCCTGGCCCCTGTCTCCCTGATTCTTGGTTCTTATTGGAATATTATCTCCACTGTTATCC
AGATGCAGTCTGGGGAAGGGAGACTCAAGGCTTTTTCCACCTGTGGCTCCCATCTTATTGTTGTTGTC
CTCTTCTATGGGTCAGGAATATTCACCTACATGCGACCAAACTCCAAGACTACAAAAGAACTGGATAA
AATGATATCTGTGTTCTATACAGCGGTGACTCCAATGTTGAACCCCATAATTTATAGCTTGAGGAACA
AAGATGTCAAAGGGGCTCTCAGGAAACTAGTTGGGAGAAAGTGCTTCTCTCATAGGCAGTGACCTCTG
AGTCTGACTA

| | | | |
|---|---|---|---|
| NOV43g, CG55604-07 | | | |
| Protein Sequence | SEQ ID NO: 630 | 314 aa | MW at 35728.1kD |

MGEENQTFVSKFIFLGLSQDLQTQILLFILFLIIYLLTVLGNQLIIILIFLDSRLHTPMYFFLRNISF
ADLCFSTSIVPQVLVHFLVKRKTISFYGCMTQIIVFLLVGCTECALLAVMSYDRYVAVCKPLYYSTIM
TQRVCLWLSFRSWASGALVSLVDTSFTFHLPYWGQNIINHYFCEPPALLKLASIDTYSTEMAIFSMGV
VILLAPVSLILGSYWNIISTVIQMQSGEGRLKAFSTCGSHLIVVVLFYGSGIFTYMRPNSKTTKELDK
MISVFYTAVTPMLNPIIYSLRNKDVKGALRKLVGRKCFSHRQ

| | | |
|---|---|---|
| NOV43h, | | |
| SNP13019742 of | SEQ ID NO: 631 | 968 bp |
| CG55604-04, | ORF Start: ATG at 8 | ORF Stop: TGA at 950 |
| DNA Sequence | SNP Pos: 203 | SNP Change: A to C |

TATATCAATGGGAGAAGAAAACCAAACCTTTGTGTCCAAGTTTATCTTCCTGGGTCTTTCACAGGACT
TGCAGACCCAGATCCTGCTATTTATCCTTTTCCTCATCATTTATCTGCTGACCGTGCTTGGAAACCAG
CTCATCATCATTCTCATCTTCCTGGATTCTCGCCTTCACACTCCCATGTATTTTTTTCTTAGAAATCT
CTCCTTTGCAGATCTCTGTTTCTCTACTAGCATTGTCCCTCAAGTGTTGGTTCACTTCTTGGTAAAGA
GGAAAACCATTTCTTTTTATGGGTGTATGACACAGATAATTGTCTTTCTTCTGGTTGGGTGTACAGAG
TGTGCGCTGCTGGCAGTGATGTCCTATGACCGGTATGTGGCTGTCTGCAAGCCCCTGTACTACTCTAC
CATCATGACACAACGGGTGTGTCTCTGGCTGTCCTTCAGGTCCTGGGCCAGTGGGGCACTAGTGTCTT
TAGTAGATACCAGCTTTACTTTCCATCTTCCCTACTGGGGACAGAATATAATCAATCACTACTTTTGT
GAACCTCCTGCCCTCCTGAAGCTGGCTTCCATAGACACTTACAGCACAGAAATGGCCATCTTTTCAAT
GGGCGTGGTAATCCTCCTGGCCCCTATCTCCCTGATTCTTGGTTCTTATTGGAATATTATCTCCACTG
TTATCCAGATGCAGTCTGGGGAAGGGAGACTCAAGGCTTTTTCCACCTGTGGCTCCCATCTTATTGTT
GTTGTCCTCTTCTATGGGTCAGGAATATTCACCTACATGCGACCAAACTCCAAGACTACAAAAGAACT
GGATAAAATGATATCTGTGTTCTATACAGCGGTGACTCCAATGTTGAACCCCATAATTTATAGCTTGA
GGAACAAAGATGTCAAAGGGGCTCTCAGGAAACTAGTTGGGAGAAAGTGCTTCTCTCATAGGCAGTGA
CCTCTGAGTCTGACTA

| | | | |
|---|---|---|---|
| NOV43h, | | | |
| SNP13019742 of | | | |
| CG55604-04, | SEQ ID NO: 632 | | |
| Protein Sequence | SNP Pos: 66 | 314 aa | MW at 35728.1kD |

MGEENQTFVSKFIFLGLSQDLQTQILLFILFLIIYLLTVLGNQLIIILIFLDSRLHTPMYFFLRNISF
ADLCFSTSIVPQVLVHFLVKRKTISFYGCMTQIIVFLLVGCTECALLAVMSYDRYVAVCKPLYYSTIM
TQRVCLWLSFRSWASGALVSLVDTSFTFHLPYWGQNIINHYFCEPPALLKLASIDTYSTEMAIFSMGV
VILLAPVSLILGSYWNIISTVIQMQSGEGRLKAFSTCGSHLIVVVLFYGSGIFTYMRPNSKTTKELDK
MISVFYTAVTPMLNPIIYSLRNKDVKGALRKLVGRKCFSHRQ

| | | |
|---|---|---|
| NOV43i, | | |
| SNP13373776 of | SEQ ID NO: 633 | 968 bp |
| CG55604-04, | ORF Start: ATG at 8 | ORF Stop: TGA at 950 |
| DNA Sequence | SNP Pos: 355 | SNP Change: A to C |

TATATCAATGGGAGAAGAAAACCAAACCTTTGTGTCCAAGTTTATCTTCCTGGGTCTTTCACAGGACT
TGCAGACCCAGATCCTGCTATTTATCCTTTTCCTCATCATTTATCTGCTGACCGTGCTTGGAAACCAG
CTCATCATCATTCTCATCTTCCTGGATTCTCGCCTTCACACTCCCATGTATTTTTTTCTTAGAAATCT
CTCCTTTGCAGATCTCTGTTTCTCTACTAGCATTGTCCCTCAAGTGTTGGTTCACTTCTTGGTAAAGA
GGAAAACCATTTCTTTTTATGGGTGTATGACACAGATAATTGTCTTTCTTCTGGTTGGGTGTACAGAG
TGTGCGCTGCTGGCAGTGATGTCCTATGACCGGTATGTGGCTGTCTGCAAGCCCCTGTACTACTCTAC
CATCATGACACAACGGGTGTGTCTCTGGCTGTCCTTCAGGTCCTGGGCCAGTGGGGCACTAGTGTCTT
TAGTAGATACCAGCTTTACTTTCCATCTTCCCTACTGGGGACAGAATATAATCAATCACTACTTTTGT
GAACCTCCTGCCCTCCTGAAGCTGGCTTCCATAGACACTTACAGCACAGAAATGGCCATCTTTTCAAT
GGGCGTGGTAATCCTCCTGGCCCCTATCTCCCTGATTCTTGGTTCTTATTGGAATATTATCTCCACTG
TTATCCAGATGCAGTCTGGGGAAGGGAGACTCAAGGCTTTTTCCACCTGTGGCTCCCATCTTATTGTT
GTTGTCCTCTTCTATGGGTCAGGAATATTCACCTACATGCGACCAAACTCCAAGACTACAAAAGAACT
GGATAAAATGATATCTGTGTTCTATACAGCGGTGACTCCAATGTTGAACCCCATAATTTATAGCTTGA
GGAACAAAGATGTCAAAGGGGCTCTCAGGAAACTAGTTGGGAGAAAGTGCTTCTCTCATAGGCAGTGA
CCTCTGAGTCTGACTA

| | | | |
|---|---|---|---|
| NOV43i, | | | |
| SNP13373776 of | | | |
| CG55604-04, | SEQ ID NO: 634 | | MW at 35728.1kD |
| Protein Sequence | SNP Pos: 116 | 314 aa | SNP Change: Ala to Ala |

MGEENQTFVSKFIFLGLSQDLQTQILLFILFLIIYLLTVLGNQLIIILIFLDSRLHTPMYFFLRNISF
ADLCFSTSIVPQVLVHFLVKRKTISFYGCMTQIIVFLLVGCTECALLAVMSYDRYVAVCKPLYYSTIM
TQRVCLWLSFRSWASGALVSLVDTSFTFHLPYWGQNIINHYFCEPPALLKLASIDTYSTEMAIFSMGV
VILLAPVSLILGSYWNIISTVIQMQSGEGRLKAFSTCGSHLIVVVLFYGSGIFTYMRPNSKTTKELDK
MISVFYTAVTPMLNPIIYSLRNKDVKGALRKLVGRKCFSHRQ

| | | |
|---|---|---|
| NOV43j, | | |
| SNP13373777 of | SEQ ID NO: 635 | 968 bp |
| CG55604-04, | ORF Start: ATG at 8 | ORF Stop: TGA at 950 |
| DNA Sequence | SNP Pos: 372 | SNP Change: G to A |

TATATCAATGGGAGAAGAAAACCAAACCTTTGTGTCCAAGTTTATCTTCCTGGGTCTTTCACAGGACT
TGCAGACCCAGATCCTGCTATTTATCCTTTTCCTCATCATTTATCTGCTGACCGTGCTTGGAAACCAG
CTCATCATCATTCTCATCTTCCTGGATTCTCGCCTTCACACTCCCATGTATTTTTTTCTTAGAAATCT
CTCCTTTGCAGATCTCTGTTTCTCTACTAGCATTGTCCCTCAAGTGTTGGTTCACTTCTTGGTAAAGA
GGAAAACCATTTCTTTTTATGGGTGTATGACACAGATAATTGTCTTTCTTCTGGTTGGGTGTACAGAG
TGTGCGCTGCTGGCAGTGATGTCCTATGACCAGGTTGTGGCTGTCTGCAAGCCCCTGTACTACTCTAC
CATCATGACACAACGGGTGTGTCTCTGGCTGTCCTTCAGGTCCTGGGCCAGTGGGGCACTAGTGTCTT
TAGTAGATACCAGCTTTACTTTCCATCTTCCCTACTGGGGACAGAATATAATCAATCACTACTTTTGT
GAACCTCCTGCCCTCCTGAAGCTGGCTTCCATAGACACTTACAGCACAGAAATGGCCATCTTTTCAAT
GGGCGTGGTAATCCTCCTGGCCCCTATCTCCCTGATTCTTGGTTCTTATTGGAATATTATCTCCACTG
TTATCCAGATGCAGTCTGGGGAAGGGAGACTCAAGGCTTTTTCCACCTGTGGCTCCCATCTTATTGTT
GTTGTCCTCTTCTATGGGTCAGGAATATTCACCTACATGCGACCAAACTCCAAGACTACAAAAGAACT
GGATAAAATGATATCTGTGTTCTATACAGCGGTGACTCCAATGTTGAACCCCATAATTTATAGCTTGA
GGAACAAAGATGTCAAAGGGGCTCTCAGGAAACTAGTTGGGAGAAAGTGCTTCTCTCATAGGCAGTGA
CCTCTGAGTCTGACTA

| | | | |
|---|---|---|---|
| NOV43j, | | | |
| SNP13373777 of | | | |
| CG55604-04, | SEQ ID NO: 636 | | MW at 35700.0kD |
| Protein Sequence | SNP Pos: 122 | 314 aa | SNP Change: Arg to Gln |

MGEENQTFVSKFIFLGLSQDLQTQILLFILFLIIYLLTVLGNQLIIILIFLDSRLHTPMYFFLRNISF
ADLCFSTSIVPQVLVHFLVKRKTISFYGCMTQIIVFLLVGCTECALLAVMSYDQYVAVCKPLYYSTIM
TQRVCLWLSFRSWASGALVSLVDTSFTFHLPYWGQNIINHYFCEPPALLKLASIDTYSTEMAIFSMGV
VILLAPISLILGSYWNIISTVIQMQSGEGRLKAFSTCGSHLIVVVLFYGSGIFTYMRPNSKTTKELDK
MISVFYTAVTPMLNPIIYSLRNKDVKGALRKLVGRKCFSHRQ

| | | |
|---|---|---|
| NOV43k, | | |
| SNP13373778 of | SEQ ID NO: 637 | 968 bp |
| CG55604-04, | ORF Start: ATG at 8 | ORF Stop: TGA at 950 |
| DNA Sequence | SNP Pos: 422 | SNP Change: C to T |

TATATCAATGGGAGAAGAAAACCAAACCTTTGTGTCCAAGTTTATCTTCCTGGGTCTTTCACAGGACT
TGCAGACCCAGATCCTGCTATTTATCCTTTTCCTCATCATTTATCTGCTGACCGTGCTTGGAAACCAG
CTCATCATCATTCTCATCTTCCTGGATTCTCGCCTTCACACTCCCATGTATTTTTTTCTTAGAAATCT
CTCCTTTGCAGATCTCTGTTTCTCTACTAGCATTGTCCCTCAAGTGTTGGTTCACTTCTTGGTAAAGA
GGAAAACCATTTCTTTTTATGGGTGTATGACACAGATAATTGTCTTTCTTCTGGTTGGGTGTACAGAG
TGTGCGCTGCTGGCAGTGATGTCCTATGACCGGTATGTGGCTGTCTGCAAGCCCCTGTACTACTCTAC
CATCATGACACAATGGGTGTGTCTCTGGCTGTCCTTCAGGTCCTGGGCCAGTGGGGCACTAGTGTCTT
TAGTAGATACCAGCTTTACTTTCCATCTTCCCTACTGGGGACAGAATATAATCAATCACTACTTTTGT
GAACCTCCTGCCCTCCTGAAGCTGGCTTCCATAGACACTTACAGCACAGAAATGGCCATCTTTTCAAT
GGGCGTGGTAATCCTCCTGGCCCCTATCTCCCTGATTCTTGGTTCTTATTGGAATATTATCTCCACTG
TTATCCAGATGCAGTCTGGGGAAGGGAGACTCAAGGCTTTTTCCACCTGTGGCTCCCATCTTATTGTT
GTTGTCCTCTTCTATGGGTCAGGAATATTCACCTACATGCGACCAAACTCCAAGACTACAAAAGAACT
GGATAAAATGATATCTGTGTTCTATACAGCGGTGACTCCAATGTTGAACCCCATAATTTATAGCTTGA
GGAACAAAGATGTCAAAGGGGCTCTCAGGAAACTAGTTGGGAGAAAGTGCTTCTCTCATAGGCAGTGA
CCTCTGAGTCTGACTA

| | | | |
|---|---|---|---|
| NOV43k, | | | |
| SNP13373778 of | | | |
| CG55604-04, | SEQ ID NO: 638 | | MW at 35758.1kD |
| Protein Sequence | SNP Pos: 139 | 314 aa | SNP Change: Arg to Trp |

MGEENQTFVSKFIFLGLSQDLQTQILLFILFLIIYLLTVLGNQLIIILIFLDSRLHTPMYFFLRNISF
ADLCFSTSIVPQVLVHFLVKRKTISFYGCMTQIIVFLLVGCTECALLAVMSYDRYVAVCKPLYYSTIM
TQWVCLWLSFRSWASGALVSLVDTSFTFHLPYWGQNIINHYFCEPPALLKLASIDTYSTEMAIFSMGV
VILLAPISLILGSYWNIISTVIQMQSGEGRLKAFSTCGSHLIVVVLFYGSGIFTYMRPNSKTTKELDK
MISVFYTAVTPMLNPIIYSLRNKDVKGALRKLVGRKCFSHRQ

| | | |
|---|---|---|
| NOV43l, | | |
| SNP13373838 of | SEQ ID NO: 639 | 968 bp |
| CG55604-04, | ORF Start: ATG at 8 | ORF Stop: TGA at 950 |
| DNA Sequence | SNP Pos: 453 | SNP Change: G to C |

TATATCAATGGGAGAAGAAAACCAAACCTTTGTGTCCAAGTTTATCTTCCTGGGTCTTTCACAGGACT
TGCAGACCCAGATCCTGCTATTTATCCTTTTCCTCATCATTTATCTGCTGACCGTGCTTGGAAACCAG
CTCATCATCATTCTCATCTTCCTGGATTCTCGCCTTCACACTCCCATGTATTTTTTTCTTAGAAATCT
CTCCTTTGCAGATCTCTGTTTCTCTACTAGCATTGTCCCTCAAGTGTTGGTTCACTTCTTGGTAAAGA
GGAAAACCATTTCTTTTTATGGGTGTATGACACAGATAATTGTCTTTCTTCTGGTTGGGTGTACAGAG
TGTGCGCTGCTGGCAGTGATGTCCTATGACCGGTATGTGGCTGTCTGCAAGCCCCTGTACTACTCTAC
CATCATGACACAACGGGTGTGTCTCTGGCTGTCCTTCAGGTCCTCGGCCAGTGGGGCACTAGTGTCTT
TAGTAGATACCAGCTTTACTTTCCATCTTCCCTACTGGGGACAGAATATAATCAATCACTACTTTTGT
GAACCTCCTGCCCTCCTGAAGCTGGCTTCCATAGACACTTACAGCACAGAAATGGCCATCTTTTCAAT
GGGCGTGGTAATCCTCCTGGCCCCTATCTCCCTGATTCTTGGTTCTTATTGGAATATTATCTCCACTG
TTATCCAGATGCAGTCTGGGGAAGGGAGACTCAAGGCTTTTTCCACCTGTGGCTCCCATCTTATTGTT
GTTGTCCTCTTCTATGGGTCAGGAATATTCACCTACATGCGACCAAACTCCAAGACTACAAAAGAACT
GGATAAAATGATATCTGTGTTCTATACAGCGGTGACTCCAATGTTGAACCCCATAATTTATAGCTTGA
GGAACAAAGATGTCAAAGGGGCTCTCAGGAAACTAGTTGGGAGAAAGTGCTTCTCTCATAGGCAGTGA
CCTCTGAGTCTGACTA

| | | | |
|---|---|---|---|
| NOV43l, | | | |
| SNP13373838 of | | | |
| CG55604-04, | SEQ ID NO: 640 | | MW at 35628.9kD |
| Protein Sequence | SNP Pos: 149 | 314 aa | SNP Change: Trp to Ser |

MGEENQTFVSKFIFLGLSQDLQTQILLFILFLIIYLLTVLGNQLIIILIFLDSRLHTPMYFFLRNISF
ADLCFSTSIVPQVLVHFLVKRKTISFYGCMTQIIVFLLVGCTECALLAVMSYDRYVAVCKPLYYSTIM
TQRVCLWLSFRSSASGALVSLVDTSFTFHLPYWGQNIINHYFCEPPALLKLASIDTYSTEMAIFSMGV
VILLAPISLILGSYWNIISTVIQMQSGEGRLKAFSTCGSHLIVVVLFYGSGIFTYMRPNSKTTKELDK
MISVFYTAVTPMLNPIIYSLRNKDVKGALRKLVGRKCFSHRQ

| | | |
|---|---|---|
| NOV43m, | | |
| SNP13373837 of | SEQ ID NO: 641 | 968 bp |
| CG55604-04, | ORF Start: ATG at 8 | ORF Stop: TGA at 950 |
| DNA Sequence | SNP Pos: 461 | SNP Change: G to A |

TATATCAATGGGAGAAGAAAACCAAACCTTTGTGTCCAAGTTTATCTTCCTGGGTCTTTCACAGGACT
TGCAGACCCAGATCCTGCTATTTATCCTTTTCCTCATCATTTATCTGCTGACCGTGCTTGGAAACCAG
CTCATCATCATTCTCATCTTCCTGGATTCTCGCCTTCACACTCCCATGTATTTTTTTCTTAGAAATCT
CTCCTTTGCAGATCTCTGTTTCTCTACTAGCATTGTCCCTCAAGTGTTGGTTCACTTCTTGGTAAAGA
GGAAAACCATTTCTTTTTATGGGTGTATGACACAGATAATTGTCTTTCTTCTGGTTGGGTGTACAGAG
TGTGCGCTGCTGGCAGTGATGTCCTATGACCGGTATGTGGCTGTCTGCAAGCCCCTGTACTACTCTAC
CATCATGACACAACGGGTGTGTCTCTGGCTGTCCTTCAGGTCCTGGGCCAGTAGGGCACTAGTGTCTT
TAGTAGATACCAGCTTTACTTTCCATCTTCCCTACTGGGGACAGAATATAATCAATCACTACTTTTGT
GAACCTCCTGCCCTCCTGAAGCTGGCTTCCATAGACACTTACAGCACAGAAATGGCCATCTTTTCAAT
GGGCGTGGTAATCCTCCTGGCCCCTATCTCCCTGATTCTTGGTTCTTATTGGAATATTATCTCCACTG
TTATCCAGATGCAGTCTGGGGAAGGGAGACTCAAGGCTTTTTCCACCTGTGGCTCCCATCTTATTGTT
GTTGTCCTCTTCTATGGGTCAGGAATATTCACCTACATGCGACCAAACTCCAAGACTACAAAAGAACT
GGATAAAATGATATCTGTGTTCTATACAGCGGTGACTCCAATGTTGAACCCCATAATTTATAGCTTGA
GGAACAAAGATGTCAAAGGGGCTCTCAGGAAACTAGTTGGGAGAAAGTGCTTCTCTCATAGGCAGTGA
CCTCTGAGTCTGACTA

| | | | |
|---|---|---|---|
| NOV43m, | | | |
| SNP13373837 of | | | |
| CG55604-04, | SEQ ID NO: 642 | | MW at 35827.2kD |
| Protein Sequence | SNP Pos: 152 | 314 aa | SNP Change: Gly to Arg |

MGEENQTFVSKFIFLGLSQDLQTQILLFILFLIIYLLTVLGNQLIIILIFLDSRLHTPMYFFLRNISF
ADLCFSTSIVPQVLVHFLVKRKTISFYGCMTQIIVFLLVGCTECALLAVMSYDRYVAVCKPLYYSTIM
TQRVCLWLSFRSWASRALVSLVDTSFTFHLPYWGQNIINHYFCEPPALLKLASIDTYSTEMAIFSMGV
VILLAPISLILGSYWNIISTVIQMQSGEGRLKAFSTCGSHLIVVVLFYGSGIFTYMRPNSKTTKELDK
MISVFYTAVTPMLNPIIYSLRNKDVKGALRKLVGRKCFSHRQ

| | | |
|---|---|---|
| NOV43n, | | |
| SN1P13373836 of | SEQ ID NO: 643 | 968 bp |
| CG55604-04, | ORF Start: ATG at 8 | ORF Stop: TGA at 950 |
| DNA Sequence | SNP Pos: 587 | SNP Change: A to G |

TATATCAATGGGAGAAGAAAACCAAACCTTTGTGTCCAAGTTTATCTTCCTGGGTCTTTCACAGGACT
TGCAGACCCAGATCCTGCTATTTATCCTTTTCCTCATCATTTATCTGCTGACCGTGCTTGGAAACCAG
CTCATCATCATTCTCATCTTCCTGGATTCTCGCCTTCACACTCCCATGTATTTTTTTCTTAGAAATCT
CTCCTTTGCAGATCTCTGTTTCTCTACTAGCATTGTCCCTCAAGTGTTGGTTCACTTCTTGGTAAAGA
GGAAAACCATTTCTTTTTATGGGTGTATGACACAGATAATTGTCTTTCTTCTGGTTGGGTGTACAGAG
TGTGCGCTGCTGGCAGTGATGTCCTATGACCGGTATGTGGCTGTCTGCAAGCCCCTGTACTACTCTAC
CATCATGACACAACGGGTGTGTCTCTGGCTGTCCTTCAGGTCCTGGGCCAGTAGGGCACTAGTGTCTT
TAGTAGATACCAGCTTTACTTTCCATCTTCCCTACTGGGGACAGAATATAATCAATCACTACTTTTGT
GAACCTCCTGCCCTCCTGAAGCTGGCTTCCATAGACACTTACGGCACAGAAATGGCCATCTTTTCAAT
GGGCGTGGTAATCCTCCTGGCCCCTATCTCCCTGATTCTTGGTTCTTATTGGAATATTATCTCCACTG
TTATCCAGATGCAGTCTGGGGAAGGGAGACTCAAGGCTTTTTCCACCTGTGGCTCCCATCTTATTGTT
GTTGTCCTCTTCTATGGGTCAGGAATATTCACCTACATGCGACCAAACTCCAAGACTACAAAAGAACT
GGATAAAATGATATCTGTGTTCTATACAGCGGTGACTCCAATGTTGAACCCCATAATTTATAGCTTGA
GGAACAAAGATGTCAAAGGGGCTCTCAGGAAACTAGTTGGGAGAAAGTGCTTCTCTCATAGGCAGTGA
CCTCTGAGTCTGACTA

| | | | |
|---|---|---|---|
| NOV43n, | | | |
| SNP13373836 of | | | |
| CG55604-04, | SEQ ID NO: 644 | | MW at 35698.1kD |
| Protein Sequence | SNP Pos: 194 | 314 aa | SNP Change: Ser to Gly |

MGEENQTFVSKFIFLGLSQDLQTQILLFILFLIIYLLTVLGNQLIIILIFLDSRLHTPMYFFLRNISF
ADLCFSTSIVPQVLVHFLVKRKTISFYGCMTQIIVFLLVGCTECALLAVMSYDRYVAVCKPLYYSTIM
TQRVCLWLSFRSWASGALVSLVDTSFTFHLPYWGQNIINHYFCEPPALLKLASIDTYGTEMAIFSMGV
VILLAPISLILGSYWNIISTVIQMQSGEGRLKAFSTCGSHLIVVVLFYGSGIFTYMRPNSKTTKELDK
MISVFYTAVTPMLNPIIYSLRNKDVKGALRKLVGRKCFSHRQ

| | | |
|---|---|---|
| NOV43o, | | |
| SNP13373780 of | SEQ ID NO: 645 | 968 bp |
| CG55604-04, | ORF Start: ATG at 8 | ORF Stop: TGA at 950 |
| DNA Sequence | SNP Pos: 615 | SNP Change: G to A |

TATATCAATGGGAGAAGAAAACCAAACCTTTGTGTCCAAGTTTATCTTCCTGGGTCTTTCACAGGACT
TGCAGACCCAGATCCTGCTATTTATCCTTTTCCTCATCATTTATCTGCTGACCGTGCTTGGAAACCAG
CTCATCATCATTCTCATCTTCCTGGATTCTCGCCTTCACACTCCCATGTATTTTTTTCTTAGAAATCT
CTCCTTTGCAGATCTCTGTTTCTCTACTAGCATTGTCCCTCAAGTGTTGGTTCACTTCTTGGTAAAGA
GGAAAACCATTTCTTTTTATGGGTGTATGACACAGATAATTGTCTTTCTTCTGGTTGGGTGTACAGAG
TGTGCGCTGCTGGCAGTGATGTCCTATGACCGGTATGTGGCTGTCTGCAAGCCCCTGTACTACTCTAC
CATCATGACACAACGGGTGTGTCTCTGGCTGTCCTTCAGGTCCTGGGCCAGTAGGGCACTAGTGTCTT
TAGTAGATACCAGCTTTACTTTCCATCTTCCCTACTGGGGACAGAATATAATCAATCACTACTTTTGT
GAACCTCCTGCCCTCCTGAAGCTGGCTTCCATAGACACTTACGGCACAGAAATGGCCATCTTTTCAAT
GGACGTGGTAATCCTCCTGGCCCCTATCTCCCTGATTCTTGGTTCTTATTGGAATATTATCTCCACTG
TTATCCAGATGCAGTCTGGGGAAGGGAGACTCAAGGCTTTTTCCACCTGTGGCTCCCATCTTATTGTT
GTTGTCCTCTTCTATGGGTCAGGAATATTCACCTACATGCGACCAAACTCCAAGACTACAAAAGAACT
GGATAAAATGATATCTGTGTTCTATACAGCGGTGACTCCAATGTTGAACCCCATAATTTATAGCTTGA
GGAACAAAGATGTCAAAGGGGCTCTCAGGAAACTAGTTGGGAGAAAGTGCTTCTCTCATAGGCAGTGA
CCTCTGAGTCTGACTA

| | | | |
|---|---|---|---|
| NOV43o, | | | |
| SNP13373780 of | | | |
| CG55604-04, | SEQ ID NO: 646 | | MW at 35786.1kD |
| Protein Sequence | SNP Pos: 203 | 314 aa | SNP Change: Gly to Asp |

MGEENQTFVSKFIFLGLSQDLQTQILLFILFLIIYLLTVLGNQLIIILIFLDSRLHTPMYFFLRNISF
ADLCFSTSIVPQVLVHFLVKRKTISFYGCMTQIIVFLLVGCTECALLAVMSYDRYVAVCKPLYYSTIM
TQRVCLWLSFRSWASGALVSLVDTSFTFHLPYWGQNIINHYFCEPPALLKLASIDTYSTEMAIFSMDV
VILLAPISLILGSYWNIISTVIQMQSGEGRLKAFSTCGSHLIVVVLFYGSGIFTYMRPNSKTTKELDK
MISVFYTAVTPMLNPIIYSLRNKDVKGALRKLVGRKCFSHRQ

| | | |
|---|---|---|
| NOV43p, | | |
| SNP13373781 of | SEQ ID NO: 647 | 968 bp |
| CG55604-04, | ORF Start: ATG at 8 | ORF Stop: TGA at 950 |
| DNA Sequence | SNP Pos: 638 | SNP Change: A to G |

TATATCAATGGGAGAAGAAAACCAAACCTTTGTGTCCAAGTTTATCTTCCTGGGTCTTTCACAGGACT
TGCAGACCCAGATCCTGCTATTTATCCTTTTCCTCATCATTTATCTGCTGACCGTGCTTGGAAACCAG
CTCATCATCATTCTCATCTTCCTGGATTCTCGCCTTCACACTCCCATGTATTTTTTTCTTAGAAATCT
CTCCTTTGCAGATCTCTGTTTCTCTACTAGCATTGTCCCTCAAGTGTTGGTTCACTTCTTGGTAAAGA
GGAAAACCATTTCTTTTTATGGGTGTATGACACAGATAATTGTCTTTCTTCTGGTTGGGTGTACAGAG
TGTGCGCTGCTGGCAGTGATGTCCTATGACCGGTATGTGGCTGTCTGCAAGCCCCTGTACTACTCTAC
CATCATGACACAACGGGTGTGTCTCTGGCTGTCCTTCAGGTCCTGGGCCAGTAGGGCACTAGTGTCTT
TAGTAGATACCAGCTTTACTTTCCATCTTCCCTACTGGGGACAGAATATAATCAATCACTACTTTTGT
GAACCTCCTGCCCTCCTGAAGCTGGCTTCCATAGACACTTACGGCACAGAAATGGCCATCTTTTCAAT
GGGCGTGGTAATCCTCCTGGCCCCTGTCTCCCTGATTCTTGGTTCTTATTGGAATATTATCTCCACTG
TTATCCAGATGCAGTCTGGGGAAGGGAGACTCAAGGCTTTTTCCACCTGTGGCTCCCATCTTATTGTT
GTTGTCCTCTTCTATGGGTCAGGAATATTCACCTACATGCGACCAAACTCCAAGACTACAAAAGAACT
GGATAAAATGATATCTGTGTTCTATACAGCGGTGACTCCAATGTTGAACCCCATAATTTATAGCTTGA
GGAACAAAGATGTCAAAGGGGCTCTCAGGAAACTAGTTGGGAGAAAGTGCTTCTCTCATAGGCAGTGA
CCTCTGAGTCTGACTA

| | | | |
|---|---|---|---|
| NOV43p, | | | |
| SNP13373781 of | | | |
| CG55604-04, | SEQ ID NO: 648 | | MW at 35714.1kD |
| Protein Sequence | SNP Pos: 211 | 314 aa | SNP Change: Ile to Val |

MGEENQTFVSKFIFLGLSQDLQTQILLFILFLIIYLLTVLGNQLIIILIFLDSRLHTPMYFFLRNISF
ADLCFSTSIVPQVLVHFLVKRKTISFYGCMTQIIVFLLVGCTECALLAVMSYDRYVAVCKPLYYSTIM
TQRVCLWLSFRSWASGALVSLVDTSFTFHLPYWGQNIINHYFCEPPALLKLASIDTYSTEMAIFSMGV
VILLAPVSLILGSYWNIISTVIQMQSGEGRLKAFSTCGSHLIVVVLFYGSGIFTYMRPNSKTTKELDK
MISVFYTAVTPMLNPIIYSLRNKDVKGALRKLVGRKCFSHRQ

| | | |
|---|---|---|
| NOV43q, | | |
| SNP13373782 of | SEQ ID NO: 649 | 968 bp |
| CG55604-04, | ORF Start: ATG at 8 | ORF Stop: TGA at 950 |
| DNA Sequence | SNP Pos: 679 | SNP Change: T to C |

TATATCAATGGGAGAAGAAAACCAAACCTTTGTGTCCAAGTTTATCTTCCTGGGTCTTTCACAGGACT
TGCAGACCCAGATCCTGCTATTTATCCTTTTCCTCATCATTTATCTGCTGACCGTGCTTGGAAACCAG
CTCATCATCATTCTCATCTTCCTGGATTCTCGCCTTCACACTCCCATGTATTTTTTTCTTAGAAATCT
CTCCTTTGCAGATCTCTGTTTCTCTACTAGCATTGTCCCTCAAGTGTTGGTTCACTTCTTGGTAAAGA
GGAAAACCATTTCTTTTTATGGGTGTATGACACAGATAATTGTCTTTCTTCTGGTTGGGTGTACAGAG
TGTGCGCTGCTGGCAGTGATGTCCTATGACCGGTATGTGGCTGTCTGCAAGCCCCTGTACTACTCTAC
CATCATGACACAACGGGTGTGTCTCTGGCTGTCCTTCAGGTCCTGGGCCAGTAGGGCACTAGTGTCTT
TAGTAGATACCAGCTTTACTTTCCATCTTCCCTACTGGGGACAGAATATAATCAATCACTACTTTTGT
GAACCTCCTGCCCTCCTGAAGCTGGCTTCCATAGACACTTACGGCACAGAAATGGCCATCTTTTCAAT
GGGCGTGGTAATCCTCCTGGCCCCTATCTCCCTGATTCTTGGTTCTTATTGGAATATTATCTCCACCG
TTATCCAGATGCAGTCTGGGGAAGGGAGACTCAAGGCTTTTTCCACCTGTGGCTCCCATCTTATTGTT
GTTGTCCTCTTCTATGGGTCAGGAATATTCACCTACATGCGACCAAACTCCAAGACTACAAAAGAACT
GGATAAAATGATATCTGTGTTCTATACAGCGGTGACTCCAATGTTGAACCCCATAATTTATAGCTTGA
GGAACAAAGATGTCAAAGGGGCTCTCAGGAAACTAGTTGGGAGAAAGTGCTTCTCTCATAGGCAGTGA
CCTCTGAGTCTGACTA

| | | | |
|---|---|---|---|
| NOV43q, | | | |
| SNP13373782 of | | | |
| CG55604-04, | SEQ ID NO: 650 | | MW at 35728.1kD |
| Protein Sequence | SNP Pos: 224 | 314 aa | SNP Change: Thr to Thr |

MGEENQTFVSKFIFLGLSQDLQTQILLFILFLIIYLLTVLGNOLIIILIFLDSRLHTPMYFFLRNISF
ADLCFSTSIVPQVLVHFLVKRKTISFYGCMTQIIVFLLVGCTECALLAVMSYDRYVAVCKPLYYSTIM
TQRVCLWLSFRSWASGALVSLVDTSFTFHLPYWGONIINHYFCEPPALLKLASIDTYSTEMAIFSMGV
VILLAPISLILGSYWNIISTVIQMQSGEGRLKAFSTCGSHLIVVVLFYGSGIFTYMRPNSKTTKELDK
MISVFYTAVTPMLNPIIYSLRNKDVKGALRKLVGRKCFSHRQ

| | | |
|---|---|---|
| NOV43r, | | |
| SNP13373783 of | SEQ ID NO: 651 | 1968 bp |
| CG55604-04, | ORF Start: ATG at 8 | ORF Stop: TGA at 950 |
| DNA Sequence | SNP Pos: 844 | SNP Change: A to G |

TATATCAATGGGAGAAGAAAACCAAACCTTTGTGTCCAAGTTTATCTTCCTGGGTCTTTCACAGGACT
TGCAGACCCAGATCCTGCTATTTATCCTTTTCCTCATCATTTATCTGCTGACCGTGCTTGGAAACCAG
CTCATCATCATTCTCATCTTCCTGGATTCTCGCCTTCACACTCCCATGTATTTTTTTCTTAGAAATCT
CTCCTTTGCAGATCTCTGTTTCTCTACTAGCATTGTCCCTCAAGTGTTGGTTCACTTCTTGGTAAAGA
GGAAAACCATTTCTTTTTATGGGTGTATGACACAGATAATTGTCTTTCTTCTGGTTGGGTGTACAGAG
TGTGCGCTGCTGGCAGTGATGTCCTATGACCGGTATGTGGCTGTCTGCAAGCCCCTGTACTACTCTAC
CATCATGACACAACGGGTGTGTCTCTGGCTGTCCTTCAGGTCCTGGGCCAGTAGGGCACTAGTGTCTT
TAGTAGATACCAGCTTTACTTTCCATCTTCCCTACTGGGGACAGAATATAATCAATCACTACTTTTGT
GAACCTCCTGCCCTCCTGAAGCTGGCTTCCATAGACACTTACGGCACAGAAATGGCCATCTTTTCAAT
GGGCGTGGTAATCCTCCTGGCCCCTATCTCCCTGATTCTTGGTTCTTATTGGAATATTATCTCCACTG
TTATCCAGATGCAGTCTGGGGAAGGGAGACTCAAGGCTTTTTCCACCTGTGGCTCCCATCTTATTGTT
GTTGTCCTCTTCTATGGGTCAGGAATATTCACCTACATGCGACCAAACTCCAAGACTACAAAAGAACT
GGATAAAATGATATCTGTGTTCTATACGGCGGTGACTCCAATGTTGAACCCCATAATTTATAGCTTGA
GGAACAAAGATGTCAAAGGGGCTCTCAGGAAACTAGTTGGGAGAAAGTGCTTCTCTCATAGGCAGTGA
CCTCTGAGTCTGACTA

| | | | |
|---|---|---|---|
| NOV43r, | | | |
| SNP13373783 of | | | |
| CG55604-04, | SEQ ID NO: 652 | | MW at 35728.1kD |
| Protein Sequence | SNP Pos: 279 | 314 aa | SNP Change: Thr to Thr |

MGEENQTFVSKFIFLGLSQDLQTQILLFILFLIIYLLTVLGNOLIIILIFLDSRLHTPMYFFLRNISF
ADLCFSTSIVPQVLVHFLVKRKTISFYGCMTQIIVFLLVGCTECALLAVMSYDRYVAVCKPLYYSTIM
TQRVCLWLSFRSWASGALVSLVDTSFTFHLPYWGQNIINHYFCEPPALLKLASIDTYSTEMAIFSMGV
VILLAPISLILGSYWNIISTVIQMQSGEGRLKAFSTCGSHLIVVVLFYGSGIFTYMRPNSKTTKELDK
MISVFYTAVTPMLNPIIYSLRNKDVKGALRKLVGRKCFSHRO

| | | |
|---|---|---|
| NOV43s, | | |
| SNP13373833 of | SEQ ID NO: 653 | 968 bp |
| CG55604-04, | ORF Start: ATG at 8 | ORF Stop: TGA at 950 |
| DNA Sequence | SNP Pos: 850 | SNP Change: G to A |

TATATCAATGGGAGAAGAAAACCAAACCTTTGTGTCCAAGTTTATCTTCCTGGGTCTTTCACAGGACT
TGCAGACCCAGATCCTGCTATTTATCCTTTTCCTCATCATTTATCTGCTGACCGTGCTTGGAAACCAG
CTCATCATCATTCTCATCTTCCTGGATTCTCGCCTTCACACTCCCATGTATTTTTTTCTTAGAAATCT
CTCCTTTGCAGATCTCTGTTTCTCTACTAGCATTGTCCCTCAAGTGTTGGTTCACTTCTTGGTAAAGA
GGAAAACCATTTCTTTTTATGGGTGTATGACACAGATAATTGTCTTTCTTCTGGTTGGGTGTACAGAG
TGTGCGCTGCTGGCAGTGATGTCCTATGACCGGTATGTGGCTGTCTGCAAGCCCCTGTACTACTCTAC
CATCATGACACAACGGGTGTGTCTCTGGCTGTCCTTCAGGTCCTGGGCCAGTAGGGCACTAGTGTCTT
TAGTAGATACCAGCTTTACTTTCCATCTTCCCTACTGGGGACAGAATATAATCAATCACTACTTTTGT
GAACCTCCTGCCCTCCTGAAGCTGGCTTCCATAGACACTTACGGCACAGAAATGGCCATCTTTTCAAT
GGGCGTGGTAATCCTCCTGGCCCCTATCTCCCTGATTCTTGGTTCTTATTGGAATATTATCTCCACTG
TTATCCAGATGCAGTCTGGGGAAGGGAGACTCAAGGCTTTTTCCACCTGTGGCTCCCATCTTATTGTT
GTTGTCCTCTTCTATGGGTCAGGAATATTCACCTACATGCGACCAAACTCCAAGACTACAAAAGAACT
GGATAAAATGATATCTGTGTTCTATACAGCGGTAACTCCAATGTTGAACCCCATAATTTATAGCTTGA
GGAACAAAGATGTCAAAGGGGCTCTCAGGAAACTAGTTGGGAGAAAGTGCTTCTCTCATAGGCAGTGA
CCTCTGAGTCTGACTA

| | | | |
|---|---|---|---|
| NOV43s, | | | |
| SNP13373833 of | | | |
| CG55604-04, | SEQ ID NO: 654 | | MW at 35728.1kD |
| Protein Sequence | SNP Pos: 281 | 314 aa | SNP Change: Val to Val |

MGEENQTFVSKFIFLGLSQDLQTQILLFILFLIIYLLTVLGNOLIIILIFLDSRLHTPMYFFLRNISF
ADLCFSTSIVPQVLVHFLVKRKTISFYGCMTQIIVFLLVGCTECALLAVMSYDRYVAVCKPLYYSTIM
TQRVCLWLSFRSWASGALVSLVDTSFTFHLPYWGQNIINHYFCEPPALLKLASIDTYSTEMAIFSMGV
VILLAPISLILGSYWNIISTVIQMQSGEGRLKAFSTCGSHLIVVVLFYGSGIFTYMRPNSKTTKELDK
MISVFYTAVTPMLNPIIYSLRNKDVKGALRKLVGRKCFSHRO

| | | |
|---|---|---|
| NOV43t, | | |
| SNP13373784 of | SEQ ID NO: 655 | 968 bp |
| CG55604-04, | ORF Start: ATG at 8 | ORF Stop: TGA at 950 |
| DNA Sequence | SNP Pos: 857 | SNP Change: A to G |

TATATCAATGGGAGAAGAAAACCAAACCTTTGTGTCCAAGTTTATCTTCCTGGGTCTTTCACAGGACT
TGCAGACCCAGATCCTGCTATTTATCCTTTTCCTCATCATTTATCTGCTGACCGTGCTTGGAAACCAG
CTCATCATCATTCTCATCTTCCTGGATTCTCGCCTTCACACTCCCATGTATTTTTTTCTTAGAAATCT
CTCCTTTGCAGATCTCTGTTTCTCTACTAGCATTGTCCCTCAAGTGTTGGTTCACTTCTTGGTAAAGA
GGAAAACCATTTCTTTTTATGGGTGTATGACACAGATAATTGTCTTTCTTCTGGTTGGGTGTACAGAG
TGTGCGCTGCTGGCAGTGATGTCCTATGACCGGTATGTGGCTGTCTGCAAGCCCCTGTACTACTCTAC
CATCATGACACAACGGGTGTGTCTCTGGCTGTCCTTCAGGTCCTGGGCCAGTAGGGCACTAGTGTCTT
TAGTAGATACCAGCTTTACTTTCCATCTTCCCTACTGGGGACAGAATATAATCAATCACTACTTTTGT
GAACCTCCTGCCCTCCTGAAGCTGGCTTCCATAGACACTTACGGCACAGAAATGGCCATCTTTTCAAT
GGGCGTGGTAATCCTCCTGGCCCCTATCTCCCTGATTCTTGGTTCTTATTGGAATATTATCTCCACTG
TTATCCAGATGCAGTCTGGGGAAGGGAGACTCAAGGCTTTTTCCACCTGTGGCTCCCATCTTATTGTT
GTTGTCCTCTTCTATGGGTCAGGAATATTCACCTACATGCGACCAAACTCCAAGACTACAAAAGAACT
GGATAAAATGATATCTGTGTTCTATACAGCGGTGACTCCAGTGTTGAACCCCATAATTTATAGCTTGA
GGAACAAAGATGTCAAAGGGGCTCTCAGGAAACTAGTTGGGAGAAAGTGCTTCTCTCATAGGCAGTGA
CCTCTGAGTCTGACTA

| | | | |
|---|---|---|---|
| NOV43t, | | | |
| SNP13373784 of | | | |
| CG55604-04, | SEQ ID NO: 656 | | MW at 35696.0kD |
| Protein Sequence | SNP Pos: 284 | 314 aa | SNP Change: Met to Val |

MGEENQTFVSKFIFLGLSQDLQTOILLFILFLIIYLLTVLGNQLIIILIFLDSRLHTPMYFFLRNISF
ADLCFSTSIVPQVLVHFLVKRKTISFYGCMTQIIVFLLVGCTECALLAVMSYDRYVAVCKPLYYSTIM
TQRVCLWLSFRSWASGALVSLVDTSFTFHLPWGQNIINHYFCEPPALLKLASAIDTYSTEMAIFSMGV
VILLAPISLILGSYWNIISTVIQMQSGEGRLKAFSTCGSHLIVVVLFYGSGIFTYMRPNSKTTKELDK
MISVFYTAVTPVLNPIIYSLRNKDVKGALRKLVGRKCFSHRQ

| | | |
|---|---|---|
| NOV43u, | | |
| SNP13373832 of | SEQ ID NO: 657 | 968 bp |
| CG55604-04, | ORF Start: ATG at 8 | ORF Stop: TGA at 950 |
| DNA Sequence | SNP Pos: 885 | SNP Change: G to A |

TATATCAATGGGAGAAGAAAACCAAACCTTTGTGTCCAAGTTTATCTTCCTGGGTCTTTCACAGGACT
TGCAGACCCAGATCCTGCTATTTATCCTTTTCCTCATCATTTATCTGCTGACCGTGCTTGGAAACCAG
CTCATCATCATTCTCATCTTCCTGGATTCTCGCCTTCACACTCCCATGTATTTTTTTCTTAGAAATCT
CTCCTTTGCAGATCTCTGTTTCTCTACTAGCATTGTCCCTCAAGTGTTGGTTCACTTCTTGGTAAAGA
GGAAAACCATTTCTTTTTATGGGTGTATGACACAGATAATTGTCTTTCTTCTGGTTGGGTGTACAGAG
TGTGCGCTGCTGGCAGTGATGTCCTATGACCGGTATGTGGCTGTCTGCAAGCCCCTGTACTACTCTAC
CATCATGACACAACGGGTGTGTCTCTGGCTGTCCTTCAGGTCCTGGGCCAGTAGGGCACTAGTGTCTT
TAGTAGATACCAGCTTTACTTTCCATCTTCCCTACTGGGGACAGAATATAATCAATCACTACTTTTGT
GAACCTCCTGCCCTCCTGAAGCTGGCTTCCATAGACACTTACGGCACAGAAATGGCCATCTTTTCAAT
GGGCGTGGTAATCCTCCTGGCCCCTATCTCCCTGATTCTTGGTTCTTATTGGAATATTATCTCCACTG
TTATCCAGATGCAGTCTGGGGAAGGGAGACTCAAGGCTTTTTCCACCTGTGGCTCCCATCTTATTGTT
GTTGTCCTCTTCTATGGGTCAGGAATATTCACCTACATGCGACCAAACTCCAAGACTACAAAAGAACT
GGATAAAATGATATCTGTGTTCTATACAGCGGTGACTCCCGTGTTGAACCCCATAATTTATAGCTTGA
AGAACAAAGATGTCAAAGGGGCTCTCAGGAAACTAGTTGGGAGAAAGTGCTTCTCTCATAGGCAGTGA
CCTCTGAGTCTGACTA

| | | | |
|---|---|---|---|
| NOV43u, | | | |
| SNP13373832 of | | | |
| CG55604-04, | SEQ ID NO: 658 | | MW at 35700.1kD |
| Protein Sequence | SNP Pos: 293 | 314 aa | SNP Change: Arg to Lys |

MGEENQTFVSKFIFLGLSQDLQTOILLFILFLIIYLLTVLGNQLIIILIFLDSRLHTPMYFFLRNISF
ADLCFSTSIVPQVLVHFLVKRKTISFYGCMTQIIVFLLVGCTECALLAVMSYDRYVAVCKPLYYSTIM
TQRVCLWLSFRSWASGALVSLVDTSFTFHLPWGQNIINHYFCEPPALLKLASAIDTYSTEMAIFSMGV
VILLAPISLILGSYWNIISTVIQMQSGEGRLKAFSTCGSHLIVVVLFYGSGIFTYMRPNSKTTKELDK
MISVFYTAVTPVLNPIIYSLKNKDVKGALRKLVGRKCFSHRQ

[0596] A ClustalW comparison of the above protein sequences yields the following sequence alignment shown in Table 43B.

TABLE 43B

Comparison of the NOV43 protein sequences.

| | |
|---|---|
| NOV43a | MGEENQTFVSKFIFLGLSQDLQTQILLFILFLIIYLLTVLGNQLIIILIFLDSRLHTPMY |
| NOV43b | ------------------------------------------------------------ |
| NOV43c | MGEENQTFVSKFIFLGLSQDLQTQILLFILFLIIYLLTVLGNQLIIILIFLDSRLHTPMY |
| NOV43d | MGEENQTFVSKFIFLGLSQDLQTQILLFILFLIIYLLTVLGNQLIIILIFLDSRLHTPMY |
| NOV43e | MGEENQTFVSKFIFLGLSQDLQTQILLFILFLIIYLLTVLGNQLIIILIFLDSRLHTPMY |
| NOV43f | MGEENQTFVSKFIFLGLSQDLQTQILLFILFLIIYLLTVLGNQLIIILIFLDSRLHTPMY |
| NOV43g | MGEENQTFVSKFIFLGLSQDLQTQILLFILFLIIYLLTVLGNQLIIILIFLDSRLHTPMY |
| NOV43a | FFLRNISFADLCFSTSIVPQVLVHFLVKRKTISFYGCMTQIIVFLLVGCTECALLAVMSY |
| NOV43b | FFLRNISFADLCFSTSIVPQVLVHFLVKRKTISFYGCMTQIIVFLLVGCTECALLAVMSY |
| NOV43c | FFLRNISFADLCFSTSIVPQVLVHFLVKRKTISFYGCMTQIIVFLLVGCTECALLAVMSY |
| NOV43d | FFLRNISFADLCFSTSIVPQVLVHFLVKRKTISFYGCMTQIIVFLLVGCTECALLAVMSY |
| NOV43e | FFLRNISFADLCFSTSIVPQVLVHFLVKRKTISFYGCMTQIIVFLLVGCTECALLAVMSY |
| NOV43f | FFLRNISFADLCFSTSIVPQVLVHFLVKRKTISFYGCMTQIIVFLLVGCTECALLAVMSY |
| NOV43g | FFLRNISFADLCFSTSIVPQVLVHFLVKRKTISFYGCMTQIIVFLLVGCTECALLAVMSY |
| NOV43a | DRYVAVCKPLYYSTIMTQRVCLWLSFRSWASGALVSLVDTSFTFHLPYWGQNIINHYFCE |
| NOV43b | DRYVAVCKPLYYSTIMTQRVCLWLSFRSWASGALVSLVDTSFTFHLPYWGQNIINHYFCE |
| NOV43c | DRYVAVCKPLYYSTIMTQRVCLWLSFRSWASGALVSLVDTSFTFHLPYWGQNIINHYFCE |
| NOV43d | DRYVAVCKPLYYSTIMTQRVCLWLSFRSWASGALVSLVDTSFTFHLPYWGQNIINHYFCE |
| NOV43e | DRYVAVCKPLYYSTIMTQRVCLWLSFRSWASGALVSLVDTSFTFHLPYWGQNIINHYFCE |
| NOV43f | DRYVAVCKPLYYSTIMTQRVCLWLSFRSWASGALVSLVDTSFTFHLPYWGQNIINHYFCE |
| NOV43g | DRYVAVCKPLYYSTIMTQRVCLWLSFRSWASGALVSLVDTSFTFHLPYWGQNIINHYFCE |
| NOV43a | PPALLKLASIDTYSTEMAIFSMGVVILLAPVSLILGSYWNIISTVIQMQSGEGRLKAFST |
| NOV43b | PPALLKLASIDTYSTEMAIFSMGVVILLAPVSLILGSYWNIISTVIQMQSGEGRLKAFST |
| NOV43c | PPALLKLASIDTYSTEMAIFSMGVVILLAPVSLILGSYWNIISTVIQMQSGEGRLKAFST |
| NOV43d | PPALLKLASIDTYSTEMAIFSMGVVILLAPVSLILGSYWNIISTVIQMQSGEGRLKAFST |
| NOV43e | PPALLKLASIDTYSTEMAIFSMGVVILLAPVSLILGSYWNIISTVIQMQSGEGRLKAFST |
| NOV43f | PPALLKLASIDTYSTEMAIFSMGVVILLAPVSLILGSYWNIISTVIQMQSGEGRLKAFST |
| NOV43g | PPALLKLASIDTYSTEMAIFSMGVVILLAPVSLILGSYWNIISTVIQMQSGEGRLKAFST |
| NOV43a | CGSHLIVVVLFYGSGIFTYMRPNSKTTKELDKMISVFYTAVTPMLNPIIYSLRNKDVKGA |
| NOV43b | CGSHLIVVVLFYGSGIFTYMRPNSKTTKELDKMISVFYTAVTPMLNPIIYSLRNKDVKGA |
| NOV43c | CGSHLIVVVLFYGSGIFTYMRPNSKTTKELDKMISVFYTAVTPMLNPIIYSLRNKDVKGA |
| NOV43d | CGSHLIVVVLFYGSGIFTYMRPNSKTTKELDKMISVFYTAVTPMLNPIIYSLRNKDVKGA |
| NOV43e | CGSHLIVVVLFYGSGIFTYMRPNSKTTKELDKMISVFYTAVTPMLNPIIYSLRNKDVKGA |
| NOV43f | CGSHLIVVVLFYGSGIFTYMRPNSKTTKELDKMISVFYTAVTPMLNPIIYSLRNKDVKGA |
| NOV43g | CGSHLIVVVLFYGSGIFTYMRPNSKTTKELDKMISVFYTAVTPMLNPIIYSLRNKDVKGA |
| NOV43a | LRKLVGRKCFSHRQ |
| NOV43b | LRKLVGRKCFSHRQ |
| NOV43c | LRKLVGRKCFSHRQ |
| NOV43d | LRKLVGRKCFSHRQ |
| NOV43e | LRKLVGRKCFSHRQ |
| NOV43f | LRKLVGRKCFSHRQ |
| NOV43g | LRKLVGRKCFSHRQ |
| NOV43a | (SEQ ID NO: 618) |
| NOV43b | (SEQ ID NO: 620) |
| NOV43c | (SEQ ID NO: 622) |
| NOV43d | (SEQ ID NO: 624) |
| NOV43e | (SEQ ID NO: 626) |
| NOV43f | (SEQ ID NO: 628) |
| NOV43g | (SEQ ID NO: 630) |

[0597] Further analysis of the NOV43a protein yielded the following properties shown in Table 43C.

TABLE 43C
Protein Sequence Properties NOV43a

| | |
|---|---|
| SignalP analysis: | Cleavage site between residues 42 and 43 |
| PSORT II analysis: | |

| PSG: | a new signal peptide prediction method | | | |
|---|---|---|---|---|
| | N-region: | length 11; | pos.chg 1; | neg.chg 2 |
| | H-region: | length 8; | peak value | 0.00 |

| | PSG score: −4.40 |
|---|---|
| GvH: | von Heijne's method for signal seq. recognition |
| | GvH score (threshold: −2.1): 0.24 |
| | possible cleavage site: between 41 and 42 |

>>> Seems to have no N-terminal signal peptide

| ALOM: | Klein et al's method for TM region allocation | | |
|---|---|---|---|
| | Init position for calculation: 1 | | |
| | Tentative number of TMS(s) for the threshold 0.5: 5 | | |
| | INTEGRAL | Likelihood =−13.32 | Transmembrane 25-41 |
| | INTEGRAL | Likelihood = −1.75 | Transmembrane 71-87 |
| | INTEGRAL | Likelihood = −8.86 | Transmembrane 101-117 |
| | INTEGRAL | Likelihood = −9.34 | Transmembrane 199-215 |
| | INTEGRAL | Likelihood = −1.65 | Transmembrane 241-257 |

| | |
|---|---|
| PERIPHERAL | Likelihood = 1.59 (at 273) |

| | ALOM score: −13.32 (number of TMSs: 5) |
|---|---|
| MTOP: | Prediction of membrane topology (Hartmann et al.) |
| | Center position for calculation: 32 |
| | Charge difference: 1.5 C(1.5) − N(0.0) |
| | C > N: C-terminal side will be inside |

>>> membrane topology: type 3b
MITDISC: discrimination of mitochondrial targeting seq

| | | | |
|---|---|---|---|
| R content: | 0 | Hyd Moment(75): | 8.77 |
| Hyd Moment(95): | 7.26 | G content: | 1 |
| D/E content: | 2 | S/T content: | 0 |
| Score: −7.02 | | | |

Gavel: prediction of cleavage sites for mitochondrial preseq

cleavage site motif not found

NUCDISC: discrimination of nuclear localization signals

pat4: none
pat7: none
bipartite: none
content of basic residues: 8.0%
NLS Score: −0.47

KDEL: ER retention motif in the C-terminus: none
ER Membrane Retention Signals: none
SKL: peroxisomal targeting signal in the C-terminus: none
PTS2: 2nd peroxisomal targeting signal: none
VAC: possible vacuolar targeting motif: none
RNA-binding motif: none
Actinin-type actin-binding motif:

type 1: none
type 2: none

NMYR: N-myristoylation pattern: none
Prenylation motif: none
memYQRL: transport motif from cell surface to Golgi: none
Tyrosines in the tail: none
Dileucine motif in the tail: none
checking 63 PROSITE DNA binding motifs:

Leucine zipper pattern (PS00029): *** found ***
LFLIIYLLTVLGNQLIIILIFL at 30

none
checking 71 PROSITE ribosomal protein motifs: none
checking 33 PROSITE prokaryotic DNA binding motifs: none

| | |
|---|---|
| NNCN: | Reinhardt's method for Cytoplasmic/Nuclear discrimination |
| | Prediction: cytoplasmic |
| | Reliability: 94.1 |
| COIL: | Lupas's algorithm to detect coiled-coil regions |
| | total: 0 residues |

Final Results (k = 9/23):

44.4%: endoplasmic reticulum
22.2%: vacuolar
11.1%: Golgi
11.1%: vesicles of secretory system
11.1%: mitochondrial

>> prediction for CG55604-04 is end (k = 9)

[0598] A search of the NOV43a protein against the Geneseq database, a proprietary database that contains sequences published in patents and patent publication, yielded several homologous proteins shown in Table 43D.

TABLE 43D
Geneseq Results for NOV43a

| | | NOV43a | Identities/ | |
|---|---|---|---|---|
| | | Residues/ | Similarities for | |
| Geneseq | Protein/Organism/Length | Match | the Matched | Expect |
| Identifier | [Patent #, Date] | Residues | Region | Value |
| AAG66338 | Human NOV 18 protein | 1 . . . 314 | 314/314 (100%) | 0.0 |
| | sequence - Homo sapiens, 314 aa. | 1 . . . 314 | 314/314 (100%) | |
| | [WO200155179-A2, 02- | | | |
| | AUG-2001] | | | |
| AAG66331 | Human NOV 11 protein | 1 . . . 314 | 314/314 (100%) | 0.0 |
| | sequence - Homo sapiens, 314 | 1 . . . 314 | 314/314 (100%) | |
| | aa. [WO200155179-A2, 02- | | | |
| | AUG-2001] | | | |
| AAG66337 | Human NOV 17 protein | 1 . . . 314 | 313/314 (99%) | 0.0 |
| | sequence - Homo sapiens, 314 | 1 . . . 314 | 314/314 (99%) | |
| | aa. [WO200155179-A2, 02- | | | |
| | AUG-2001] | | | |
| AAG66333 | Human NOV 13 protein | 1 . . . 314 | 313/314 (99%) | 0.0 |
| | sequence - Homo sapiens, 314 | 1 . . . 314 | 314/314 (99%) | |
| | aa. [WO200155179-A2, 02- | | | |
| | AUG-2001] | | | |
| AAG66332 | Human NOV 12 protein | 1 . . . 314 | 313/314 (99%) | 0.0 |
| | sequence - Homo sapiens, 314 | 1 . . . 314 | 314/314 (99%) | |
| | aa. [WO200155179-A2, 02- | | | |
| | AUG-2001] | | | |

[0599] In a BLAST search of public sequence databases, the NOV43a protein was found to have homology to the proteins shown in the BLASTP data in Table 43E.

TABLE 43E
Public BLASTP Results for NOV43a

| | | NOV43a | Identities/ | |
|---|---|---|---|---|
| Protein | | Residues/ | Similarities for | |
| Accession | | Match | the Matched | Expect |
| Number | Protein/Organism/Length | Residues | Portion | Value |
| CAC69632 | Sequence 21 from Patent | 1 . . . 314 | 314/314 (100%) | e−180 |
| | WO0155179 - Homo sapiens | 1 . . . 314 | 314/314 (100%) | |
| | (Human), 314 aa. | | | |
| CAC69634 | Sequence 25 from Patent | 1 . . . 314 | 313/314 (99%) | e−180 |
| | WO0155179 - Homo sapiens | 1 . . . 314 | 314/314 (99%) | |
| | (Human), 314 aa. | | | |
| CAC69637 | Sequence 31 from Patent | 1 . . . 314 | 313/314 (99%) | e−180 |
| | WO0155179 - Homo sapiens | 1 . . . 314 | 314/314 (99%) | |
| | (Human), 314 aa. | | | |
| Q8NGH3 | Seven transmembrane helix | 1 . . . 314 | 312/314 (99%) | e−180 |
| | receptor - Homo sapiens | 1 . . . 314 | 314/314 (99%) | |
| | (Human), 314 aa. | | | |
| Q9EP67 | B5 olfactory receptor - | 1 . . . 304 | 253/304 (83%) | e−144 |
| | Mus musculus (Mouse), 307 aa. | 1 . . . 304 | 275/304 (90%) | |

[0600] PFam analysis indicates that the NOV43a protein contains the domains shown in the Table 43F.

TABLE 43F
Domain Analysis of NOV43a

| Pfam | NOV43a | Identities/Similarities | Expect |
|---|---|---|---|
| Domain | Match Region | for the Matched Region | Value |
| 7tm_1 | 41 . . . 290 | 58/277 (21%) | 8.4e−36 |
| | | 179/277 (65%) | |

### Example 44

[0601] The NOV44 clone was analyzed, and the nucleotide and encoded polypeptide sequences are shown in Table 44A.

TABLE 44A

NOV44 Sequence Analysis

| | | |
|---|---|---|
| NOV44a, CG55752-07 | SEQ ID NO: 659 | 1998 bp |
| DNA Sequence | ORF Start: ATG at 1 | ORF Stop: TGA at 1969 |

ATGGGCATTTATGGTTCAGTACCTTATCTCCTGGCCCACAAACTGGGCAGAACTATAGGTATTTTCTG
GCTGAATGCCTCGGAAACACTGGTGGAGATCAATACAGAGCCTGCAGTAGAGTACACACTGACCCAGA
TGGGCCCAGTTGCTGCTAAACAAAAGGTCAGATCTCGCACTCATGTGCACTGGATGTCAGAGAGTGGC
ATCATTGATGTTTTTCTGCTGACAGGACCTACACCTTCTGATGTCTTCAAACAGTACTCACACCTTAC
AGGTACACAAGCCATGCCCCCTCTTTTCTCTTTGGGATACCACCAGTGCCGCTGGAACTATGAAGATG
AGCAGGATGTAAAAGCAGTGGATGCAGGGTTTGATGAGCATGACATTCCTTATGATGCCATGTGGCTG
GACATAGAGCACACTGAGGGCAAGAGGTACTTCACCTGGGACAAAAACAGATTCCCAAACCCCAAGAG
GATGCAAGAGCTGCTCAGGAGCAAAAAGCGTAAGCTTGTGGTCATCAGTGATCCCCACATCAAGATTG
ATCCTGACTACTCAGTATATGTGAAGGCCAAAGATCAGGGCTTCTTTGTGAAGAATCGAGGAAGGGAA
GACTTTGAAGGGGTGTGTTGGCCAGGTCTCTCCTCTTACCTGGATTTCACCAATCCCAAGGTCAGAGA
GTGGTATTCAAGTCTTTTTGCTTTCCCTGTTTATCAGGGATCTACGGACATCCTCTTCCTTTGGAATG
ACATGAATGAGCCTTCTGTCTTTAGAGGGCCAGAGCAAACCATGCAGAAGAATGCCATTCATCATGGC
AATTGGGAGCACAGAGAGCTCCACAACATCTACGGTTTTTATCATCAAATGGCTACTGCAGAAGGACT
GATAAAACGATCTAAAGGGAAGGAGAGACCCTTTGTTCTTACACGTTCTTTCTTTGCTGGATCACAAA
AGTATGGTGGTGCCGTGTGGACAGGCGACAACACAGCAGAATGGAGCAACTTGAAAATTTCTATCCCA
ATGTTACTCACTCTCAGCATTACTGGGATCTCTTTTTGCGGAGCTGACATAGGCGGGTTCATTGGGAA
TCCAGAGACAGAGCTGCTAGTGCGTTGGTACCAGGCTGGAGCCTACCAGCCCTTCTTCCGTGGCCATG
CCACCATGAACACCAAGCGACGAGAGCCCTGGCTCTTTGGGGAGGAACACACCCGACTCATCCGAGAA
GCCATCAGAGAGCGCTATGGCCTCCTGCCATATTGGTATTCTCTGTTCTACCATGCACACGTGGCTTC
CCAACCTGTCATGAGGCCTCTGTGGGTAGAGTTCCCTGATGAACTAAAGACTTTTGATATGGAAGATG
AATACATGCTGGGTAGTGCATTATTGGTTCATCCAGTCACAGAACCAAAAGCCACCACAGTTGATGTG
TTTCTTCCAGGATCAAATGAGGTATGGTATGACTATAAGACATTTGCTCATTGGGAAGGAGGGTGTAC
TGTAAGATCCCAGTAGCCTTGGACACTATTCCAGTGTTTCAGCGAGGTGGAAGTGTGATACCCAATAA
AGACAACTGTAGGAAAATCCACAGGCTGGATGACTGAATCCTCCTATGGACTCCGGGTTGCTCTAAGC
ACTAAGGGTTCTTCATGGGTGAGTTATATCTTGATGATGGCCATTCATTCCAATACCTCACACCAGAA
GCAATTTTTGCACAGGAAGTTTTCATTCTGTTCCAGTGTTCTGATCAATTCCAGTTAAGCTGACCAGA
GGGGTCATTATCCCAGCAAGTGTGTGGTGGAGAAGATCTTGGTCTTAGGCTTCAGGAAGGAGCCATCT
TCTGTGACTACCCACTCATCTGGTGATGGTAAAGATCAGCCTGTGGCTTTTACGTATTGTGCCAAAAC
ATCCATCCTGAGCCTGGAGAAGCTCTCACTCAACATTGCCACTGACTGGGAGGTCCGCATAATATGAC
AAAGAACTGCCCCTGGTGATGTGAGC

| | | | |
|---|---|---|---|
| NOV44a, GG55752-07 | | | |
| Protein Sequence | SEQ ID NO: 660 | 656 aa | MW at 74971.6kD |

MGIYGSVPYLLAHKLGRTIGIFWLNASETLVEINTEPAVEYTLTQMGPVAAKQKVRSRTHVHWMSESG
IIDVFLLTGPTPSDVFKQYSHLTGTQANPPLFSLGYHQCRWNYEDEQDVKAVDAGFDEHDIPYDAMWL
DIEHTEGKRYFTWDKMRFPNPKRNQELLRSKXRKLVVISDPHIKIDPDYSVYVKAKDQGFFVKNQEGE
DFEGVCWPGLSSYLDFTNPKVREWYSSLFAFPVYQGSTDILFLWNDMNEPSVFRGPEQTMQKNAIHHG
NWEHRELHNIYGFYHQMATAEGLIKRSKGKERPFVLTRSFFAGSQKYGGAVWTGDNTAEWSNLKISIP
MLLTLSITGISFCGADIGGFIGNPETELLVRWYQAGAYQPFFRGHATMNTKRREPWLFGEEHTRLIRE
AIRERYGLLPYWYSLFYHAHVASQPVMRPLWVEFPDELKTFDMEDEYMLGSALLVHPVTEPKATTVDV
FLPGSNEVWYDYKTFAHWEGGCTVKIPVALDTIPVFQRGGSVIPIKTTVGKSTGWMTESSYGLRVALS
TKGSSVGELYLDDGHSFQYLHQKQFLHRKFSFCSSVLINSSFADQRGHYPSKCVVEKILVLGFRKEPS
SVTTHSSGDGKDQPVAFTYCAKTSILSLEKLSLNIATDWEVRII

| | | |
|---|---|---|
| NOV44b, CG55752-06 | SEQ ID NO: 661 | 2001 bp |
| DNA Sequence | ORF Start: ATG at 1 | ORF Stop: TGA at 1972 |

ATGGGCATTTATGGTTCAGTACCTTATCTCCTGGCCCACAAACTGGGCAGAACTATAGGTATTTTCTG
GCTGAATGCCTCGGAAACACTGGTGGAGATCAATACAGAGCCTGCAGTAGAGTACACACTGACCCAGA
TGGGCCCAGTTGCTGCTAAACAAAAGGTCAGATCTCGCACTCATGTGCACTGGATGTCAGAGAGTGGC
ATCATTGATGTTTTTCTGCTGACAGGACCTACACCTTCTGATGTCTTCAAACAGTACTCACACCTTAC
AGGTACACAAGCCATGCCCCCTCTTTTCTCTTTGGGATACCACCAGTGCCGCTGGAACTATGAAGATG
AGCAGGATGTAAAAGCAGTGGATGCAGGGTTTGATGAGCATGACATTCCTTATGATGCCATGTGGCTG
GACATAGAGCACACTGAGGGCAAGAGGTACTTCACCTGGGACAAAAACAGATTCCCAAACCCCAAGAG
GATGCAAGAGCTGCTCAGGAGCAAAAAGCGTAAGGTACTTGTGGTCATCAGTGATCCCCACATCAAGA
TTGATCCTGACTACTCAGTATATGTGAAGGCCAAAGATCAGGGCTTCTTTGTGAAGAATCAGGAAGGG
GAAGACTTTGAAGGGGTGTGTTGGCCAGGTTCTCCTCTTACCTGGATTTCACCAATCCCAAGGTACAG
AGAGTGGTATTCAAGTCTTTTTGCTTTCCCTGTTTATCAGGGATCTACGGACATCCTCTTCCTTTGGA
ATGACATGAATGAGCCTTCTGTCTTTAGAGGGCCAGAGCAAACCATGCAGAAGAATGCCATTCATCAT
GGCAATTGGGAGCACAGAGAGCTCCACAACATCTACGGTTTTTATCATCAAATGGCTACTGCAGAAGG
ACTGATAAAACGATCTAAAGGGAAGGAGAGACCCTTTGTTCTTACACGTTCTTTCTTTGCTGGATCAC
AAAAGTATGGTGCCGTGTGGACAGGCGACAACACAGCAGAATGGAGCAACTTGAAAATTTCTATCCCA
ATGTTACTCACTCTCAGCATTACTGGGATCTCTTTTTGCGGAGCTGACATAGGCGGGTTCATTGGGAA
TCCAGAGACAGAGCTGCTAGTGCGTTGGTACCAGGCTGGAGCCTACCAGCCCTTCTTCCGTGGCCATG
CCACCATGAACACCAAGCGACGAGAGCCCTGGCTCTTTGGGGAGGAACACACCCGACTCATCCGAGAA
GCCATCAGAGAGCGCTATGGCCTCCTGCCATATTGGATTCTCTGTTCTACCATGCACACGTGGCATTC
CCAACCTGTCATGAGGAGGCCTCTGTGGGTAGAGTTCCCTGATGAACTAAAGACTTTTGATATGGAAG
ATGAATACATGCTGGGTTTAGGGAGTGCATTATTGGTTCATCCAGTCACAGAACCAAAAGCCACCACA
GTTGATGTGTTTCTTTCCAGGATCAAATGAGGTATGGTATGACTATAAGACATTGCTCATTGGGAAGG
AGGGTGTACTGTAAAGATCCCAGTAGCCTTGGACACTATTCCAGTGTTTCAGCGAGGTGGAAGTGTGA
TACCAATAAAGACAACTGTAGGAAAATCCACAGGCTGGATGACTGAATCCTCCTATGGACTCCGGGTT
GCTCTAAGCACTGGTTCTTCAGTGGGTGAGTTATATCTTGATGATGGCCATTCATTCCAATACCTCCA
CCAGAAGCAATTTTTGCACAGGAAGTTTTCATTCTGTTCCAGTGTTCTGATCAATTCCAGTTTTGCTG
ACCAGAGGGGTCATTATCCCAGCAAGTGTGTGGTGGAGAAGATCTTGGTCTTAGGCTTCAGGAAGGAG
CCATCTTCTGTGACTACCCACTCATCTGATGGTAAAGATCAGCCTGTGGCTTTTACGTATTGTGCCAA
AACATCCATCCTGAGCCTGGAGAAGCTCTCACTCAACATTGCCACTGACTGGGAGGTCCGCATCATAT
GACAAAGAACTGCCCCTGGTGATGTGAGC

| | | | |
|---|---|---|---|
| NOV44b, CG55752-06 | | | |
| Protein Sequence | SEQ ID NO: 662 | 657 aa | MW at 75166.9kD |

MGIYGSVPYLLAHKLGRTIGIFWLNASETLVEINTEPAVETLTQMGPVAAKQKVRSRTHVHWAMSESG
IIDVFLLTGPTPSDVFKQYSHLTGIQAMPPLFSLGYHQCRWNYEDEQDVKAVDAGFDEHDIPYDAMWL
DIEHTEGKRYFTWDKNRFPNPKRMQELLRSKKRKVLVVISDPHIKIDPDYSVYKVAKDQGFFVKNQEG
EDFEGVCWPGLSSYLDFTNPKVREWYSSLFAFPVYQGSTDILFLWNDMNEPSVRGPEQTMQKNAAIHH
GNWEHRELHNIYGFYHQMATAEGLIKRSKGKERPFVLTRSFFAGSQKYGAVWTGDNTAEWSNLKISIP
MLLTLSITGISFCGADIGGFIGNPETELLVRWYQAGAYQPFFRGHATMNTKRREPWLFGEEHTRLIRE
AIRERYGLLPYWYSLFYHAHVASQPVMRRPLWVEFPDELKTFDMEDEYMLGLGSALLVHPVTEPKATT
VDVFLPGSNEVWYDYKTFAHWEGGCTVKIPVALDTIPVFQRGGSVIPIKTTVGKSTGWMTESSYGLRV
ALSTGSSVGELYDDGHSFQYLHQKQFLHRKFSFCSSVLINSSFADQRGHYPSKCVVEAKILVLGFRKE
PSSVTTHSSDGKDQPVAFTYCAKTSILSLEKSLNIATDWEVRII

| | | |
|---|---|---|
| NOV44c, CG55752-01 | SEQ ID NO: 663 | 3025 bp |
| DNA Sequence | ORF Start: ATG at 28 | ORF Stop: TGA at 2929 |

ACAGTGCCTGGGGGTCAGGCTTCCGCATGCGGGCTGCAGTTGCTGGCATTGCCTTCCGCAGGGAGGCG
TCAGAAACAGTGGCTTTCCAAGAAGTCCACCTATCAGGCATTATTGGATTCAGTCACAACAGATAAAG
ACAGCACCAGGTTCCAAATCATCAATGAAGCAAGTAAGGTGAGGCGTCAGAAACAGTGGCTTTCCAAG
AAGTCCACCTATCAGGCATTATTGGATTCAGTCACAACAGATGAAGACAGCACCAGGTTCCAAATCAT
CAATGAAGCAAGTAAGGTGCCTCTCCTGGCTGAAATTTATGGTATAGAAGGAAACATTTTCAGGCTTA
AAATTAATGAAGAGACTCCTCTAAAACCCAGATTTGAAGTTCCGGATGTCCTCACAAGCAAGCCAAGC
ACTGTAAGGATTTCATGCTCTGGGGACACAGGCAGTCTGATATTGGCAGATGGAAAAGGAGACCTGAA
GTGCCATATCACAGCAAACCCATTCAAGGTAGACTTGGTGTCTGAAGAAGAGGTTGTGATTAGCATAA
ATTCCCTGGGCCAATTATACTTTGAGCATGGCAGGGCCCCTAGGGTCTCTTTCTCGGATAAGGTTAAT
CTCACGCTTGGTAGCATATGGGATAAGATCAAGAACCTTTTCTCTAGGCAAGGATCAAAAGACCCAGC
TGAGGGCGATGGGGCCCAGCCTGAGGAAACACCCAGGGATGGCGACAAGCCAGAGGAGACTCAGGGGA
AGGCAGAGAAAGATGAGCCAGGAGCCTGGGAGGAGACATTCAAAACTCACTCTGACAGCAAGCCGTAT
GGCCCTTCTTCTATTGGTTTGGATTTCTCCTTGCATGGATTTGAGCATCTTTATGGGATCCCACAACA
TGCAGAATCACACCAACTTAAAAATACTGGGGATGGAGATGCTTACCGTCTTTATAACCTGGATGTCT
ATGGATACCAAATATATGATAAATGGGCATTTATGGTTCAGTACCTTATCTCCTGGCCCAACAAACTG
GGCAGAACTATAGGTATTTTCTGGCTGAATGCCTCGGAACACTGGTGGAGATCAATACAGAGCACTGC
AGGGATAGTCATCTTTGGTCCTGTCTCTTTGATTTATCAAAGCCAGGGAGATACACCTCTAACAACTC
ATGTGCACTGGATGTCAGAGAGTGGCATCATTGATGTTTTTCTGCTGACAGGACCTACACCTTCTGAT
GTCTTCAAACAGTACTCACACCTTACAGGTACACAAGCCATGCCCCCTCTTTTCTCTTTGGGATACCA
CCAGTGCCGTCGGAACTATGAAGATGAGCAGGATGTAAAAGCAGTGGATGCAGGGTTTGATGAGCATG
ACATTCCTTATGATGCCATGTGGCTGGACATAGAGCACACTGAGGGCAAGAGGTACTTCACCTGGGAC
AAAAACAGATTCCCAAACCCCAAGAGGATGCAAGAGCTGCTCAGGAGCAAAAAGCGTAAGCTTGTGGT
CATCAGTGATCCCCACATCAAGATTGAACCTGACTACTCAGTATATGTGAAGGCCAAAGATCAGGGCT
TCTTTGTGAAGAATCAGGAAGGGGAAGACTTTGAAGGGGTGTGTTGGCCAGGTATGAAATCATACCTG
GATTCACCAATCCCAAGGTCAGAGAGTGGTATTCAAGTATGTTCAGTTCCAATTGTGAATGGATCTAC
GGACATCCTCTTCCTTTGGAATGACATGAATGAGCCTTCTGTCTTTAGAGGGCCAGAGCAAACCATGC
AGAAGAATGCCATTCATCATGGCAATTGGGAGCAGAGAGAGCTCCACAACATCTACGGTTTTTATATG
GCTACTGCAGAAGGACTGTAAAACGATCTAAAGGGAAGGAGAGACCCTTTGTTCTTAACACGTTCTTT
CTTTGCTGGATCACAAAAGTATGGTGCCGTGTGGACAGGCGACAACACAGCAGAATGGAGCAACTTGA
AAATTTCTATCCCAATGTTACTCACTCTCAGCATTACTGGGATCTCTTTTTGCGGAGCTGACATAGGC
GGGTTCATTGGGAATCCAGAGAGCAGAGCTGCTAGTGCGGTGGTACCAGGCTGGGACCTACGCACCTT
CTTCCGTGGCCATGCCACCATGAACACCAAGCGCGAGAGCCCTGGCTCTTTGGGGAGGAACACAACCC
GACTCATCCGAGAAGCCATCAGAGAGCGCTATGGCCTCCTGCCATATTGGTATTCTCTCTTCTACCAT
GCACACGTGGCTTCCCAACCTGTCATGAGGCCTCTGTGGGTAGAGTTCCCTGATGAACTAAAGACTTT
TGATATGGAAGATGAATACATGTTAGGGAGTGCATTATTGGTTCATCCAGTCACAGAACCAAAAGCCA
CCACAGTTGATGTGTTTCTTCCAGGATCAAATGAGGTAGTCTGGTATGACTATAAGACATTTGCTCAT
TGGGAAGGAGGGTGTACTGTAAAGATCCCAGTACTGTTACAGATTCCAGTGTTTCAGCGAGGTGGAAG
GGGTTGCTCTAAGCACTCTCCAGGGTTCTTCAGTGGGTGAGTTATATCTTGATGATGGCCATTCATTC
CAATACCTCCACCAGAAGCAATTTTTGCACAGGAAGTTTTCATTCTGTTCCAGTGTTCTGGTGGCCTC
CTCTCCAGTATCTCAAGGACACTTACATACCCCACTCAGCATGACAAAAGCCCTGCTTTTCACTGTAT
CGTCTCCAGCCAGCGTGAAAATGCGGCTTCACTACAGCCCAGAGAAAAGGGCCAGGTTTAGTCATTGT
GCCAAAACATCCATCCTGAGCCTGGAGAAGCTCTCACTCAACATTGCCACTGACTGGGAGGTCCGCAT
CATATGACAAAGAACTGCCCCTGGTGATGTGAGCAGGGACCTGCCTGCCCCTTTCAACCTTTCCCCTC
ACCTTTTTTGAGATTTTTGCTGCAATCTGTTTG

| | | | |
|---|---|---|---|
| NOV44c, CG55752-01 | | | |
| Protein Sequence | SEQ ID NO: 664 | 967 aa | MW at 109801.3kD |

MRAAVAGIAFRRRRQKQWLSKKSTYQALLDSVTTDEDSTRFQIINEASKVRRQKQWLSKKSTYQALLD
SVTTDEDSTRFQIINEASKVPLLAEIYGIEGNIFRLKINEETPLKPRFEVPDVLTSKPSTVRISCSGD
TGSLILADGKGDLKCHITANPFKVDLVSEEEVVISINSLGQLYFEHGRAPRVSFSDKVNLTLGSIWDK
IKNLFSRQGSKDPAEGDGAQPEETPRDDKPEETQGKAEKDEPGAWEETFKTHSDSKPYGPSSAIGLDF
SLHGFEHLYGIPQHAESHQLKNTGDGDAYRLYNLDVYGYQIYDKMGIYGSVPYLLAHKLGRTIGIFWL
NASETLVEINTEPAGIVIFGPVSLIYQSQGDTPLTTHVHWMSESGIIDVFLLTGPTPSDVFKQYSHLT
GTQAMPPLFSLGYHQCRWNYEDEQDVKAVDAGFDEHDIPYDAMWLDIEHTEGKRYFTWDKNRFPNPKR
MQELLRSKKRKLVVISDPHIKIEPDYSVYVKAKDQGFFVKNQEGEDFEGDVCWPGMKSYLFTNPKVRE
WYSSMFSSNCDGSTDILFLWNDMNEPSVFRGPEQTMQKNAIHHGNWEHRELHNIYGFYMATEAGLIKR
SKGKERPFVLTRSFFAGSQKYGAVWTGDNTAEWSNLKISIPMLLTLSITGISFCGADIGGFIGNPETE
LLVRWYQAGAYQPFFRGHATMNTKRREPWLFGEEHTRLIREAIRERYGLLPYWYSLFYHAHVASQPVM
RPLWVEFPDELKTFDMEDEYMLGSALLVHPVTEPKATTVDVFLPGSNEVVWYDYKTFAHWEGGCTVKI
PVLLQIPVFQRGGSVIPIKTTVGKSTGWMTESSYGLRVALSTLQGSSVGELYLDDGHSFQYLHQKQFL
HRKFSFCSSVLVASSPVSQGHLHTPLSMTKALLFTVSSPASVKMRLHYSPEKRARFSHCAATSISSLE
KLSNIATDWEVRII

| | | |
|---|---|---|
| NOV44d, CG55752-02 | SEQ ID NO: 665 | 4483 bp |
| DNA Sequence | ORF Start: ATG at 204 | ORF Stop: TGA at 2946 |

AACGCTAGTTTGGGCCTGAAAAATTCCAGGAGCAAGAGTCAAGATTTGTCACTCCATGAGAATCTGGA
GGGGACTCCCTTCCCAGAAACTTGACGATGAAGTACTGGTTGTAATTTTAGAAAGACACCCAATCGGC
TTTTTTAAAAGATCGCCCAGGGCCCTTGTCCTGAGAGCTGGGAGCTGGTCGGAGTGACAGAGAAGCCA
TGGAAGCAGCAGTGAAAGAGGAAATAAGTGTTGAAGATGAAGCTGTAGATAAAAACATTTTCAGAGAC
TGTAACAAGATCGCATTTTACAGGCGTCAGAAACAGTGGCTTTCCAAGAAGTCCACCTATCAGGCATT
ATTGGATTCAGTCACAACAGATGAAGACAGCACCAGGTTCCAAATCATCAATGAAGCAAGTAAGGTTC
CTCTCCTGGCTGAAATTTATGGTATAGAAGGAAACATTTTCAGGCTTAAAATTAACGAAGAGACTCCT
CTAAAACCCAGATTTGAAGTTCCGGATGTCCTCACAAGCAAGCCAAGCACTGTAAGGCTGATTTCATG
CTCTGGGGACACAGGCAGTCTGATATTGGCAGATGGAAAAGGAGACCTGAAGTGCCATATCACAGCAA
ACCCATTCAAGGTAGACTTGGTGTCTGAAGAAGAGGTTGTGATTAGCATAAATTCCCTGGGCCAATTA
TACTTTGAGCATCTACAGATTCTTCACAAACAAAGAGCTGCTAAAGAAAATGAGGAGGAGACATCAGT
GGACACCTCTCAGGAAAATCAAGAAGATCTGGGCCTGTGGGAAGAGAAATTTGGAAAATTTGTGGATA
TCAAAGCTAATGGCCCTCTTCTATTGGTTTGGATTTCTCCTTAGCATGGATTTGAGCATCTTTATGGG
ATCCCACAACATGCAGAATCACACCAACTTAAAAATACTGGTGATGGAGATGCTTACCGTCTTTATAA
CCTGGATGTCTATGGATACCAAATATATGATAAAATGGGCATTTATGTTCAGTACCTTATCTCCTAGG
CCCACAAACTGGGCAGAACTATAGGTATTTTCTGGCTGAATGCCTCGGAAACACTGGTGGAGATCAAT
ACAGAGCCTGCAGTAGAGTACACACTGACCCAGATGGGCCCAGTTGCTGCTAAACAAAAGGTCAGATC
TCGCACTCATGTGCACTGGATGTCAGAGAGTGGCATCATTGATGTTTTTCTGCTGACATTACCTACAC
CTTCTGATGCTTCAAACAGTACTCACACCTTACAGGCACACAAGCCATGCCCCCTCTTTTTCTCTTTG
GGATACCACCAGTGCCGCTGGAACTATGAAGATGAGCAGGATGTAAAAGCAGTGGATGCAGGGTTTGA
TGAGCATGACATTCCTTATGATGCCATGTGGCTGGACATAGAGCACACTGAGGGCAAGAGGTACTTCA
CCTGGGACAAAAACAGTTCCCAAACCCCAAGAGGATGCAAGAGCTGCTCAGGAGCAAAAAAGCGTAAG
CTTGTGGTCATCAGTGAATCCCCACATCAAGATTGATCCTGACTACTCAGTATATGTGAAGGCCAAAG
CAGGGATCTACGGACATCCTCTTCCTTTGGAATGACATGAATGAGCCTTCTGTCTTTAGAGGGCCAGA
GCAAACCATGCAGAAGAATGCCATTCATCATGGCAATTGGGAGCACAGAGAGCTCCACAACATCTACG
GTTTTTATCATCAAATGGCTACTGCAGAAGGACTGATAAAACGATCTAAAGGGAAGGAGAGACCCTTT
GTTCTTACACGTTCTTTCTTTGCTGGATCACAAAAGTATGGTGCCGTGTGGACAGGCGACAACACAGC
AGAATGGAGCAACTTGAAAATTTCTATCCCAATGTTACTCACTCTCAGCATTACTGGGATCTCTTTTT
GCGGAGCTGACATAGGCGGGTTCATTGGGAATCCAGAGACAGAGCTGCTAGTGCGTTGGTACCAGGCT
GGAGCCTACCAGCCCTTCTTCCGTGGCCATGCACCATGAACACCAAGCGACGAGAGCCCTGAGCTCTT
TGGGGAGGAACACACCCGACTCATCCGAGAACCATCAGAGAGCGCTATGGCCTCCTGCCATAATTGGT
ATTCTCTGTTCTACCATGCACACGTGGCTTCCCAACCTGTCATGAGGCCTCTGTGGGTAGAGTTCCCT
GATGAACTAAAGACTTTTGATATGGAAGATGAATACATGCTGGGGAGTGCATTATTGGTTCATCCAGT
CACAGAACCAAAAGCCACCACAGTTGATGTGTTTCTTCCAGGATCAAATGAGGTCTGTATGCACTATA
AGACATTTGCTCATTGGGAAGGAGGGTGTACTGTAAAGATCCCAGTAGCCTTGGACACTATTCCAGTG
TTTCAGCGAGGTGGAAGTGTGATACCAATAAAGACAACTGTAGGAAAATCCACAGGCTGGATGACTGA
ATCCTCCTATGGACTCCGGGTTGCTCTAAGCACTAAGGGTTCTTCAGTGGGTGAGTTATATCTTGATG
ATGGCCATTCATTCCAATACCTCCACCAGAAGCAATTTTTGCACAGGAAGTTTTCATTCTGTTCCAGT
GTTCTGATCAATAGTTTTGCTGACCAGAGGGGTCATTATCCCAGCAAGTGTGTGGTGGAGAAGATCTT
GGTCTTAGGCTTCAGGAAGGAGCCATCTTCTGTGACTACCCACTCATCTGATGGTAAAGATCAGCCTG
TGGCTTTTACGTATTGTGCCAAAACATCCATCCTGAGCCTGGAGAAGCTCTCACTCAACATTGCCACT
GACTGGGAGGTCCGCATCATATGACAAAGAACTGCCCCTGGTGATGTGAGCAGGGACCTGCCTGCCCC
TTTCAACCTTTCCCCTCACCTTTTTTGAGATTTTTGCTGCAATCTGTTTGCCTTCCCTGAATCAAAAT
AATCTTTCATTCGTCACCATTATACTAATGAACAATAGATTATCATGTTCAAAATTTCAGATTTTACA
TGTTAAGATGTACTAACAATATTCCTTGTATCAAACATCTCCTTTTCTCCCTGATACATAGCCCTGAG
ACATTTATAGCGTTCAGGAGTCTTCTATTGCTTCCATTCCTTCAGCAGGGCTGCGTGGGTCTGTTTTA
ACGTGGGCCAAGCCTACCTGGGCAGCCCATTTGCCAGGGCTTGCCTCAGGCCATGCAGCATTGGCGCT
CTGGCTGCAGCAGCTGAGTTGCTCAAGGCCAGTGTCCAAGTGGACAGCAGCCTCTGGTACTCCCCCCA
GTTATCTTCCACCCACATGGACTGGGCAGAGCAGCCCTCTTCTGTGTGCACTGCATACGTGCAGCCCG
TGGGAGTTATTCTCCCCTAGAGATCGACTTGGCAGCACGAAGGATTCTTTTCTCTTTCATGCTTCTCA
GGCTCAATAGTTTCTAATTAATCTTAAAATCCATGTCTTTTACATTGTTTTTTTAATTAAGTGCTGTT
TACTAACCAATAATATTTATAACATGAGTAAGCTATAATTAATAACAATGAAATAAAAATACCATGTA
CCCACCACTGGACTTCAGAAGTAGAACTCATGACTGGGCTAGGATGAGGCAAGGGAGAACCCTGGCCT
TGGGCACAAAATGTAAGGGATGCCAAAAAAATACAGTAATCAAAGTAAGTAATATTTCAATCCAATAT
GGATTAGTATTACTGAGTTTCCTTTTGTCCCAGGCTTTAAATATGGCTTGGCATGGGGCAGAACATTA
CAACATACCAGTCGTGTCATGGTGCCCAAGGCTCCACAGACCTCAGTGGCTCCCTGCTGCCTGCCACA
GCATCTGTTTTAGCAGCCTCGACTCCTCAGCACTCCTCAGCACACACCTCTTCTTATCAGGCTTCCTC
CACTTAGCAACTTGCTAACGGCCACCTCTGTGCCTTCTGATCCCTGGGCGCCAATATCCTCCTGCCCT
TACCATCCTTCCAGGCCCAACTTAAATCCCATTTCCCATGAAGCCTAAGCTGAACACCCCTACCAGAT
CCCATACCATTAGCAGTGATTTTGCCTTCCCCGTAATGCTGTCCCACTTATAACTGTAAGCTCTACTT
GCTGTGATTAGTTAGCTGGTGGATTTAATTGATTAAAAAAATTACGATTGAATGTAAAAAAAAA

| | | | |
|---|---|---|---|
| NOV44d, CG55752-02 | | | |
| Protein Sequence | SEQ ID NO: 666 | 914 aa | MW at 104319.2kD |

[sequence omitted]
PLLAEIYGIEGNIFRLKINEETPLKPRFEVPDVLTSKPSTVRLISCDGDTGSLILADGKGDLKCHITA
NPFKVDLVSEEEVVISINSLGQLYFEHLQILHKQRAAKENEEETSVDTSQENQEDLGLWEEKFGKFVD
IKANGPSSIGLDFSLHGFEHLYGIPQHAESHQLKNTGDGDAYRLYNLDVYGYQIYDKMGIYGSVPYLL
AHKLGRTIGIFWLNASETLVEINTEPAVEYTLTQMGPVAAKQKVRSRTHVHWMSESGIIDVFLLTGPT
PSDVFKQYSHLTGTQAMPPLFSLGYHQCRWNYEDEQDVKAVDAGFDEHDIPYDAMWLDIEHEEGKRYF
TWDKNRFPNPKRIVIQELLRSKKRKLWISDPHIKIDPDYSVVKAKDQGFFVKNQEGEDFEGVCWPGLS
SYLDFTNPKVREWYSSLFAFPVYQGSTDILFLWNDMNEPSVFRGPEQTMQKNAIHHGNWEHRILHNIY
GFYHQMATAEGLIKRSKGKERPFVLTRSFFAGSQKYGAVWTGDNTAEWSNLKISIPMLLTLSITGISP
CGADIGGFIGNPETELLVRWYQAGAYQPFFRGHATMNTKRREPWLFGEEHTRLIREAIRERYGLLPYW
YSLFYHAHVASQPVMRPLWVEFPDELKTFDMEDEYMLGSALLVHPVTEPKATTVDVFLPGSNEVWYDY
KTFAHWEGGCTVKIPVALDTIPVFQRGGSVIPIKTTVGKSTGWMTESSYGLRVALSTKGSSVGELYLD
DGHSFQYLHQKQFLHRKFSFCSSVLINSFADQRGHYPSKCVVEKILVLGFRKEPSSVTTHSSDGKDQP
VAFTYCAKTSILSLEKLSLNIATDWEVRII

| | | |
|---|---|---|
| NOV44e, CG55752-03 | SEQ ID NO: 667 | 3015 bp |
| DNA Sequence | ORF Start: ATG at 204 | ORF Stop: TGA at 2946 |

AACGCTAGTTTGGGCCTGAAAAATTCCAGGAGCAAGAGTCAAGATTTGTCACTCCATGAGAATCTGGA
GGGACTCCCTTCCCAGAAACTTGACGATGAAGTACTGGTTGTAATTTTAGAAAGACACCCAATCAGGC
TTTTTTAAAAGATCGCCCAGGGCCCTTGTCCTGAGAGCTGGGAGCTGGTCGGAGTGACAGAGAAGCCA
TGGAAGCAGCAGTGAAAGAGGAAATAAGTGTTGAAGATGAAGCTGTAGATAAAAACATTTTCAGAGAC
TGTAACAAGATCGCATTTTACAGGCGTCAGAAACAGTGGCTTTCCAAGAAGTCCACCTATCAGGCATT
ATTGGATTCAGTCACAACAGATGAAGACAGCACCAGGTTCCAAATCATCAATGAAGCAAGTAAGGTTC
CTCTCCTGGCTGAAATTTATGGTATAGAAGGAAACATTTTCAGGCTTAAAATTAACGAAGAGACTCCT
CTAAAACCCAGATTTGAAGTTCCGGATGTCCTCACAAGCAAGCCAAGCACTGTAAGGCTGATTTCATG
CTCTGGGGACACAGGCAGTCTGATATTGGCAGATGGAAAAGGAGACCTGAAGTGCCATATCACAGCAA
ACCCATTCAAGGTAGACTTGGTGTCTGAAGAAGAGGTTGTGATTAGCATAAATTCCCTGGGAAAATTA
GTTCTTACACGTTCTTTCTTTGCTGGATCACAAAAGTATGGTGCCGTGTGGACAGGCGACAACACAGC
AGAATGGAGCAACTTGAAAATTTCTATCCCAATGTTACTCACTCTCAGCATTACTGGGATCTCTTTTT
GCGGAGCTGACATAGGCGGGTTCATTGGGAATCCAGAGACAGAGCTGCTAGTGCGTTGGTACCAGGCT
GGAGCCTACCAGCCCTTCTTCCGTGGCCATGCACCATGAACACCAAGCGACGAGAGCCCTGAGCTCTT
TGGGGAGGAACACACCCGACTCATCCGAGAACCATCAGAGAGCGCTATGGCCTCCTGCCATAATTGGT
ATTCTCTGTTCTACCATGCACACGTGGCTTCCCAACCTGTCATGAGGCCTCTGTGGGTAGAGTTCCCT
GATGAACTAAAGACTTTTGATATGGAAGATGAATACATGCTGGGGAGTGCATTATTGGTTCATCCAGT
CACAGAACCAAAAGCCACCACAGTTGATGTGTTTCTTCCAGGATCAAATGAGGTCTGTATGCACTATA
AGACATTTGCTCATTGGGAAGGAGGGTGTACTGTAAAGATCCCAGTAGCCTTGGACACTATTCCAGTG
TTTCAGCGAGGTGGAAGTGTGATACCAATAAAGACAACTGTAGGAAAATCCACAGGCTGGATGACTGA
ATCCTCCTATGGACTCCGGGTTGCTCTAAGCACTAAGGGTTCTTCAGTGGGTGAGTTATATCTTGATG
ATGGCCATTCATTCCAATACCTCCACCAGAAGCAATTTTTGCACAGGAAGTTTTCATTCTGTTCCAGT
GTTCTGATCAATAGTTTTGCTGACCAGAGGGGTCATTATCCCAGCAAGTGTGTGGTGGAGAAGATCTT
GGTCTTAGGCTTCAGGAAGGAGCCATCTTCTGTGACTACCCACTCATCTGATGGTAAAGATCAGCCTG
TGGCTTTTACGTATTGTGCCAAAACATCCATCCTGAGCCTGGAGAAGCTCTCACTCAACATTGCCACT
GTTCTTACACGTTCTTTCTTTGCTGGATCACAAAAGTATGGTGCCGTGTGGACAGGCGACAACACAGC
AGAATGGAGCAACTTGAAAATTTCTATCCCAATGTTACTCACTCTCAGCATTACTGGGATCTCTTTTT
GCGGAGCTGACATAGGCGGGTTCATTGGGAATCCAGAGACAGAGCTGCTAGTGCGTTGGTACCAGGCT
GGAGCCTACCAGCCCTTCTTCCGTGGCCATGCACCATGAACACCAAGCGACGAGAGCCCTGAGCTCTT
TGGGGAGGAACACACCCGACTCATCCGAGAACCATCAGAGAGCGCTATGGCCTCCTGCCATAATTGGT
ATTCTCTGTTCTACCATGCACACGTGGCTTCCCAACCTGTCATGAGGCCTCTGTGGGTAGAGTTCCCT
GATGAACTAAAGACTTTTGATATGGAAGATGAATACATGCTGGGGAGTGCATTATTGGTTCATCCAGT
CACAGAACCAAAAGCCACCACAGTTGATGTGTTTCTTCCAGGATCAAATGAGGTCTGTATGCACTATA
AGACATTTGCTCATTGGGAAGGAGGGTGTACTGTAAAGATCCCAGTAGCCTTGGACACTATTCCAGTG
TTTCAGCGAGGTGGAAGTGTGATACCAATAAAGACAACTGTAGGAAAATCCACAGGCTGGATGACTGA
ATCCTCCTATGGACTCCGGGTTGCTCTAAGCACTAAGGGTTCTTCAGTGGGTGAGTTATATCTTGATG
ATGGCCATTCATTCCAATACCTCCACCAGAAGCAATTTTTGCACAGGAAGTTTTCATTCTGTTCCAGT
GTTCTGATCAATAGTTTTGCTGACCAGAGGGGTCATTATCCCAGCAAGTGTGTGGTGGAGAAGATCTT
GGTCTTAGGCTTCAGGAAGGAGCCATCTTCTGTGACTACCCACTCATCTGATGGTAAAGATCAGCCTG
TGGCTTTTACGTATTGTGCCAAAACATCCATCCTGAGCCTGGAGAAGCTCTCACTCAACATTGCCACT
GTTCTGATCAATAGTTTTGCTGACCAGAGGGGTCACTATCCAGCAAGTGTGGGTGGAGAAAGATCTAT
GGTCTTAGGCTTCAGGAAGGAGCCATCTTCTGTGACTACCCACTCATCTGATGGTAAAGATCAGCCTG
TGGCTTTTACGTATTGTGCCAAAACATCCATCCTGAGCCTGGAGAAGCTCTCACTCAACATTGCCACT
GACTGGGAGGTCCGCATCATATGACAAAGAACTGCCCCTGGTGATGTGAGAGGGACCATGCCTGCCCC
TTTCAACCTTTCCCCTCACCTTT

| | | | |
|---|---|---|---|
| NOV44e, CG55752-03 | | | |
| Protein Sequence | SEQ ID NO: 668 | 914 aa | MW at 104206.0kD |

[sequence omitted]
PLLAEIYGIEGNIFRLKINEETPLKPRFEVPDVLTSKPSTVRLISCDGDTGSLILADGKGDLKCHITA
NPFKVDLVSEEEVVISINSLGQLYFEHLQILHKQRAAKENEEETSVDTSQENQEDLGLWEEKFGKFVD
IKANGPSSIGLDFSLHGFEHLYGIPQHAESHQLKNTGDGDAYRLYNLDVYGYQIYDKMGIYGSVPYLL
AHKLGRTIGIFWLNASETLVEINTEPAVEYTLTQMGPVAAKQKVRSRTHVHWMSESGIIDVFLLTGPT
PSDVFKQYSHLTGTQAMPPLFSLGYHQCRWNYEDEQDVKAVDAGFDEHDIPYDAMWLDIEHEEGKRYF
TWDKNRFPNPKRIVIQELLRSKKRKLWISDPHIKIDPDYSVVKAKDQGFFVKNQEGEDFEGVCWPGLS
SYLDFTNPKVREWYSSLFAFPVYQGSTDILFLWNDMNEPSVFRGPEQTMQKNAIHHGNWEHRILHNIY
GFYHQMATAEGLIKRSKGKERPFVLTRSFFAGSQKYGAVWTGDNTAEWSNLKISIPMLLTLSITGISP
CGADIGGFIGNPETELLVRWYQAGAYQPFFRGHATMNTKRREPWLFGEEHTRLIREAIRERYGLLPYW
YSLFYHAHVASQPVMRPLWVEFPDELKTFDMEDEYMLGSALLVHPVTEPKATTVDVFLPGSNEVWYDY
KTFAHWEGGCTVKIPVALDTIPVFQRGGSVIPIKTTVGKSTGWMTESSYGLRVALSTKGSSVGELYLD
DGHSFQYLHQKQFLHRKFSFCSSVLINSFADQRGHYPSKCVVEKILVLGFRKEPSSVTTHSSDGKDQP
VAFTYCAKTSILSLEKLSLNIATDWEVRII

| | | |
|---|---|---|
| NOV44f, CG55752-04 | SEQ ID NO: 669 | 3102 bp |
| DNA Sequence | ORF Start: ATG at 103 | ORF Stop: TGA at 2839 |

TACTGGTTGTAATTTTAGAAAGACACCCAATCGGCTTTTTTAAAAGATCGCCCAGGGCCCTTGTCCTG
AGAGCTGGGAGCTGGTCGGAGTGACAGAGAAGCCATGGAAGCAGCAGTGAAAGAGGAAATAAGTGTTG
AAGATGAAGCTGTAGATAAAAACATTTTCAGAGACTGTAACAAGATCGCATTTTACAGGCGTCAGAAA
CAGTGGCTTTCCAAGAAGTCCACCTATCGGGCATTATTGGATTCAGTCACAACAGATGAAGACAGCAC
CAGGTTCCAAATCATCAATGAAGCAAGTAAGGTTCCTCTCCTGGCTGAAATTTATGGTATAGAAGGAA
AGACATTTGCTCATTGGGAAGGAGGGTGTACTGTAAAGATCCCAGTAGCCTTGGACACTATTCCAGTG
TTTCAGCGAGGTGGAAGTGTGATACCAATAAAGACAACTGTAGGAAAATCCACAGGCTGGATGACTGA
ATCCTCCTATGGACTCCGGGTTGCTCTAAGCACTAAGGGTTCTTCAGTGGGTGAGTTATATCTTGATG
ATGGCCATTCATTCCAATACCTCCACCAGAAGCAATTTTTGCACAGGAAGTTTTCATTCTGTTCCAGT
GTTCTGATCAATAGTTTTGCTGACCAGAGGGGTCATTATCCCAGCAAGTGTGTGGTGGAGAAGATCTT
GGTCTTAGGCTTCAGGAAGGAGCCATCTTCTGTGACTACCCACTCATCTGATGGTAAAGATCAGCCTG
TGGCTTTTACGTATTGTGCCAAAACATCCATCCTGAGCCTGGAGAAGCTCTCACTCAACATTGCCACT
GTTCTTACACGTTCTTTCTTTGCTGGATCACAAAAGTATGGTGCCGTGTGGACAGGCGACAACACAGC
AGAATGGAGCAACTTGAAAATTTCTATCCCAATGTTACTCACTCTCAGCATTACTGGGATCTCTTTTT
GCGGAGCTGACATAGGCGGGTTCATTGGGAATCCAGAGACAGAGCTGCTAGTGCGTTGGTACCAGGCT
GGAGCCTACCAGCCCTTCTTCCGTGGCCATGCACCATGAACACCAAGCGACGAGAGCCCTGAGCTCTT
TGGGGAGGAACACACCCGACTCATCCGAGAACCATCAGAGAGCGCTATGGCCTCCTGCCATAATTGGT
ATTCTCTGTTCTACCATGCACACGTGGCTTCCCAACCTGTCATGAGGCCTCTGTGGGTAGAGTTCCCT
GATGAACTAAAGACTTTTGATATGGAAGATGAATACATGCTGGGGAGTGCATTATTGGTTCATCCAGT
CACAGAACCAAAAGCCACCACAGTTGATGTGTTTCTTCCAGGATCAAATGAGGTCTGTATGCACTATA
AGACATTTGCTCATTGGGAAGGAGGGTGTACTGTAAAGATCCCAGTAGCCTTGGACACTATTCCAGTG
TTTCAGCGAGGTGGAAGTGTGATACCAATAAAGACAACTGTAGGAAAATCCACAGGCTGGATGACTGA
ATCCTCCTATGGACTCCGGGTTGCTCTAAGCACTAAGGGTTCTTCAGTGGGTGAGTTATATCTTGATG
ATGGCCATTCATTCCAATACCTCCACCAGAAGCAATTTTTGCACAGGAAGTTTTCATTCTGTTCCAGT
GTTCTGATCAATAGTTTTGCTGACCAGAGGGGTCATTATCCCAGCAAGTGTGTGGTGGAGAAGATCTT
GGTCTTAGGCTTCAGGAAGGAGCCATCTTCTGTGACTACCCACTCATCTGATGGTAAAGATCAGCCTG
TGGCTTTTACGTATTGTGCCAAAACATCCATCCTGAGCCTGGAGAAGCTCTCACTCAACATTGCCACT
GTTCTGATCAATAGTTTTGCTGACCAGAGGGGTCACTATCCAGCAAGTGTGGGTGGAGAAAGATCTAT
GGTCTTAGGCTTCAGGAAGGAGCCATCTTCTGTGACTACCCACTCATCTGATGGTAAAGATCAGCCTG
TGGCTTTTACGTATTGTGCCAAAACATCCATCCTGAGCCTGGAGAAGCTCTCACTCAACATTGCCACT
CTCTGGGGACACAGGCAGTCTGATATTGGCAGATGGAAAAGGAGACCTGAAGTGCCATATCACAGCAA
ACCCATTCAAGGTAGACTTGGTGTCTGAAGAAGAGGTTGTGATTAGCATAAATTCCCTGGGAAAATTA
GTTCTTACACGTTCTTTCTTTGCTGGATCACAAAAGTATGGTGCCGTGTGGACAGGCGACAACACAGC
AGAATGGAGCAACTTGAAAATTTCTATCCCAATGTTACTCACTCTCAGCATTACTGGGATCTCTTTTT
GCGGAGCTGACATAGGCGGGTTCATTGGGAATCCAGAGACAGAGCTGCTAGTGCGTTGGTACCAGGCT
GGAGCCTACCAGCCCTTCTTCCGTGGCCATGCACCATGAACACCAAGCGACGAGAGCCCTGAGCTCTT
TTCTTCATGGGTGAGTTATATCTTGATGATGGCCATTCATTCCAATACCTCCACCAGAAGCAAATTTT
TGCACAGGAAGTTTTCATTCTGTTCAGTGGCTGATCAATAGTTTTGCTGACCAGAGGAAGGTCATTAT
CCCAGCAAGTGTGTGGTGGAGAAGATCTTGGTCTTAGGCTTCAGGAAGGAGCCATCTTCTGTGACTAC
CCACTCATCTGATGGTAAAGATCAGCCTGTGGCTTTTACGTATTGTGCCAAAACATCCATCCTGAGCC
TGGAGAAGCTCTCACTCAACATTGCCACTGACTGGGAGGTCCGCATCATATGACAAAGAACTGCCCCT
GGTGATGTGAGCAGGGACCTGCCTGCCCCTTTCAACCTTTCCCCTCACCTTTTTTGAGATTTTTGCTG
CAATCTGTTTGTCTTCCCTGAATCAAAATAATCTTTCATTCGTCACCATTATACTAATGAACAATAGA
TTTCATGTTTCAAAATTTCAGATTTTACATGTTAAGATGTACTAACAATATTCCTTGTATCAAACATC
TCCTTTTCTCCCTGATACATAGCCCTGAGACATTATAGCGTC

| | | | |
|---|---|---|---|
| dNOV44f, CG55752-04 | | | |
| Protein Sequence | SEQ ID NO: 670 | 912 aa | MW at 104189.1kD |

MEAAVKEEISVEDEAVDKNIFRDCNKIAFYRRQKQWLSKKSTYRALLDSVTTDEDSTRFQIINEASKV
PLLAEIYGIEGNIFRLKINEETPLKPRFEVPDVLTSKPSTVRLISCSGDTGSLILADGKGDLKCHITA
NPFKVDLVSEEEVVISINSLGQLYFEHLQILHKQRAAKENEEETSVDTSQENQEDLGLWEEKFGKFVD
IKANGPSSIGLDFSLHGFEHLYGIPQHAESHQLKNTGDAYRLYNLDVYGYQIYDIGGIYGSVPYLLAH
KLGRTIGIFWLNASETLVEINTEPAVEYTLTQMGPVAAKQKVRSRTHVHWMSESGIIDVFLLTGPTPS
DVFKQYSHLTGTAQANPPLFSLGHQCRWNYEDEQDVKAVDAGFDEHDIPYDAMWLDIEHTEGKRYFTW
DKNRFPNPKRMQELLRSKKRKLVVISDPHIKIEPDYSVYVKAKDQGFFVKNQEGEDFEGVCWPGLSSY
LDFThPKVREWYSSLFAFPVYQGSTDILFLWNDMNEPSVFRGPEQTMQKNAIHHGNWEHRELHNIYGF
YHQMATAEGLIKRSKGKERPFVLTRSFFAGSQKYGAVWTGDNTAEWSNLKISIPMLLTLSITGISFCG
ADIGGFIGNPETELLVRWYQAGAYQPFFRGHATMNTKRREPWLFGEEHTRLIREAIRERYGLLPYWYS
LFYHAHVASQPVMRPLWVEFPDELKTFDMEDEYMLGSALLVHPVTEPKATTVDVFLPGSNEVWYDYKT
FAHWEGGCTVKIPVALDTIPVFQRGGSVIPIKTTVGKSTGWMTESSYGLRVALSTQGSSVGELYLDDG
HSFQYLHQKQFLHRKFSFCSSVLINSFADQRGHYPSKCVVEKILVLGFRKEPSSVTTHSSDGKDQPVA
FTYCAKTSILSLEKLSLNIATDWEVRII

| | | |
|---|---|---|
| NOV44g, CG55752-05 | SEQ ID NO: 671 | 2951 bp |
| DNA Sequence | ORF Start: ATG at 210 | ORF Stop: TGA at 2688 |

TACTGGTTGTAATTTTAGAAAGACACCCAATCGGCTTTTTTAAAAGATCGCCCAGGGCCCTTGTCCTG
AGAGCTGGGAGCTGGTCGGAGTGACAGAGAAGCCATGGAAGCAGCAGTGAAAGAGGAAATAAGTGTTG
AAGATGAAGCTGTAGATAAAAACATTTTCAGAGACTGTAACAAGATCGCATTTTACAGGAAGAAAAGC
GTATTATGTTAATTCTGAACAGGCGTCAGAAACAGTGGCTTTCCAAGAAGTCCACCTATCGGGCATTA
TTGGATTCAGTCACAACAGATGAAGACAGCACCAGGTTCCAAATCATCAATGAAGCAAGTAAGGTTCC
TCTCCTGGCTGAAATTTATGGTATAGAAGGAAACATTTTCAGGCTTAAAATTAACGAAGAGACTCCTC
TAAAACCCAGATTTGAAGTTCCGGATGTCCTCACAAGCAAGCCAAGCACTGTAAGAGCTGCTAAAGAA
AATGAGGAGGAGACATCAGTGGACACCTCTCAGGAAAATCAAGAAGATCTGGGCCTGTGGGAAGAGAA
ATTTGGAAAATTTGTGGATATCACAGCTAATGGCCCTTCTTCTATTGGTTTGGATTTCTCCTTGCATG
GATTTGAGCATCTTTATGGGATCCCACAACATGCAGAATCACACCAACTTAAAAATACTGGAGATGCT
TACCGTCTTTATAACCTGGATGTCTATGGATACCAAATATATGATAAAATGGGCATTTATGGTTCAGT
ACCTTATCTCCTGGCCCACAAACTGGGCAGAACTATAGGTATTTTCTGGCTGAATGCCTCGGAAACAC
TGGTGGAGATCAATACAGAGCCTGCAGTAGAGTACACACTGACCCAGATGGGCCCAGTTGCTGCTAAA
CAAAAGGTCAGATCTCGCACTCATGTGCACTGGATGTCAGAGAGTGGCATCATTGATGTTTTTCTGCT
GACAGGACCTACACCTTCTGATGTCTTCAAACAGTACTCACACCTTACAGGTACGCAAGCCATGCCCC
CTCTTTTCTCTTTGGGATACCACCAGTGCCGCTGGAACTATGAAGATGAGCAGGATGTAAAAGCAGTG
GATGCAGGGTTTGATGAGCATGACATTCCTTATGATGCCATGTGGCTGGACATAGAGCACACTGAGGG
CAAGAGGTACTTCACCTGGGACAAAAACAGATTCCCAAACCCCAAGAGGATGCAAGAGCTGCTCAGGA
GCAAAAAGCGTAAGCTTGTGGTCATCAGTGATCCCCACATCAAGATTGAACCTGACTACTCAGTATAT
GTGAAGGCCAAAGATCAGGGCTTCTTTGTGAAGAATCAGGAAGGGGAAGACTTTGAAGGGGTGTGTTG
GCCAGGTCTCTCCTCTTACCTGGATTTCACCAATCCCAAGGTCAGAGAGTGGTATTCAAGTCTTTTTG
CTTTCCCTGTTTATCAGGGATCTACGGACATCCTCTTCCTTTGGAATGACATGAATGAGCCTTCTGTC
TTTAGAGGGCCAGAGCAAACCATGCAGAAGAATGCCATTCATCATGGCAATTGGGAGCACAGAGAGCT
CCACAACATCTACGGTTTTTATCATCAAATGGCTACTGCAGAAGGACTGATAAAACGATCTAAAGGGA
AGGAGAGACCCTTTGTTCTTACACGTTCTTTCTTTGCTGGATCACAAAAGTATGGTGCCGTGTGGACA
GGCGACAACACAGCAGAATGGAGCAACTTGAAAATTTCTATCCCAATGTTACTCACTCTCAGCATTAC
TGGGATCTCTTTTTGCGGAGCTGACATAGGCGGGTTCATTGGGAATCCAGAGACAGAGCTGCTAGTGC
GTTGGTACCAGGCTGGAGCCTACCAGCCCTTCTTCCGTGGCCATGCCACCATGAACACCAAGCGACGA
GAGCCCTGGCTCTTTGGGGAGGAACACACCCGACTCATCCGAGAAGCCATCAGAGAGCGCTATGGCCT
CCTGCCATATTGGTATTCTCTGTTCTACCATGCACACGTGGCTTCCCAACCTGTCATGAGGCCTCTGT
GGGTAGAGTTCCCTGATGAACTAAAGACTTTTGATATGGAAGATGAATACATGTTAGGGAGTGCATTA
TTGGTTCATCCAGTCACAGAACCAAAAGCCACCACAGTTGATGTGTTTCTTCCAGGATCAAATGAGGT
ATGGTATGACTATAAGACATTTGCTCATTGGGAAGGAGGGTGTACTGTAAAGATCCCAGTAGCCTTGG
ACACTATTCCAGTGTTTCAGCGAGGTGGAAGTGTGATACCAATAAAGACAACTGTAGGAAAATCCACA
GGCTGGATGACTGAATCCTCCTATGGACTCCGGGTTGCTCTAAGCACTCAGGGTTCTTCAGTGGGTGA
GTTATATCTTGATGATGGCCATTCATTCCAATACCTCCACCAGAAGCAATTTTTGCACAGGAAGTTTT
CATTCTGTTCCAGTGTTCTGATCAATAGTTTTGCTGACCAGAGGGGTCATTATCCCAGCAAGTGTGTG
GTGGAGAAGATCTTGGTCTTAGGCTTCAGGAAGGAGCCATCTTCTGTGACTACCCACTCATCTGATGG
TAAAGATCAGCCTGTGGCTTTTACGTATTGTGCCAAAACATCCATCCTGAGCCTGGAGAAGCTCTCAC
TCAACATTGCCACTGACTGGGAGGTCCGCATCATATGACAAAGAACTGCCCCTGGTGATGTGAGCAGG
GACCTGCCTGCCCCTTTCAACGTTTCCCCTCACCTTTTTTGAGATTTTTGCTGCAATCTGTTTGTCTT
CCCTGAATCAAAATAATCTTTCATTCGTCACCATTATACTAATGAACAATAGATTTCATGTTTCAAAA
TTTCAGATTTTACATGTTAAGATGTACTAACAATATTCCTTGTATCAAACATCTCCTTTTCTCCCTGA
TACATAGCCCTGAGACATTATAGCGTC

| | | | |
|---|---|---|---|
| NOV44g, CG55752-05 | | | |
| Protein Sequence | SEQ ID NO: 672 | 826 aa | MW at 94610.4kD |

MLILNRRQKQWLSKKSTYRALLDSVTTDEDSTRFQIINEASKVPLLAEIYGIEGNIFRLKINEETPLK
PRFEVPDVLTSKPSTVRAAKENEEETSVDTSQENQEDLGLWEEKFGKFVDITANGPSSIGLDFSLHGF
EHLYGIPQHESHQLKNTGDAYRLYNLDVYGYQIYDKMGAIYGSVPYLLANKLGRTIGIFWLNASETLV
EINTEPAVEYTLTQMGPVAAKQKVRSRTHVHWMSESGIIDVFLLTGPTPSDVFKQYSHLTGTQANPPL
FSLGYHQCRWNYEDEQDVKAVDAGFDEHDIPYDAMWLDIEHTEGKRYFTWDKNRFPNPKRMQELLRSK
KRKLVVISDPHIKIEPDYSVYVKAKDQGFFVKNQEGEDFEGVCWPGLSSYLDFTNPKVREWYSSLFAF
PVYQGSTDILFLWNDMNEPSVFRGPEQTMQKNAIHHGNWEHRELHNIYGFYHQMATAEGLIKRSKGKE
RPFVLTRSFFAGSQKYGAVWTGDNTAEWSNLKISIPMLLTLSITGISFCGADIGGFIGNPETELLVRW
YQAGAYQPFFRGHATMNTKRREPWLFGEEHTRILREAIRERYGLLPYWYSLFYHAHVASQPVMRPLWV
EFPDELKTFDMEDEYMLGSALLVHPVTEPKATTVDVFLPGSNEVWYDYKTFAHWEGGCTVKIPVALDT
IPVFQRGGSVIPIKTTVGKSTGWMTESSYGLRVALSTQGSSVGELYLDDGHSFQYLHQKQFLHRKFSF
CSSVLINSFADQRGHYPSKCVVEKILVLGFRKEPSSVTTHSSDGKDQPVAFTYCAKTSILSLEKLSLN
IATDWEVRII

| | | |
|---|---|---|
| NOV44h, | | |
| SNP13379656 of | SEQ ID NO: 673 | 2001 bp |
| CG55752-06, | ORF Start: ATG at 1 | ORF Stop: TGA at 1972 |
| DNA Sequence | SNP Pos: 617 | SNP Change: A to G |

ATGGGCATTTATGGTTCAGTACCTTATCTCCTGGCCCACAAACTGGGCAGAACTATAGGTATTTTCTG
GCTGAATGCCTCGGAAACACTGGTGGAGATCAATACAGAGCCTGCAGTAGAGTACACACTGACCCAGA
TGGGCCCAGTTGCTGCTAAACAAAAGGTCAGATCTCGCACTCATGTGCACTGGATGTCAGAGAGTGGC
ATCATTGATGTTTTTCTGCTGACAGGACCTACACCTTCTGATGTCTTCAAACAGTACTCACACCTTAC
AGGTATTCAAGCCATGCCCCCTCTTTTCTCTTTGGGATACCACCAGTGCCGCTGGAACTATGAAGATG
AGCAGGATGTAAAAGCAGTGGATGCAGGGTTTGATGAGCATGACATTCCTTATGATGCCATGTGGCTG
GACATAGAGCACACTGAGGGCAAGAGGTACTTCACCTGGGACAAAAACAGATTCCCAAACCCCAAGAG
GATGCAAGAGCTGCTCAGGAGCAAAAAGCGTAAGGTACTTGTGGTCATCAGTGATCCCCACATCAAGA
TTGATCCTGACTACTCAGTATATGTGAAGGCCAAAGATCAGGGCTTCTTTGTGAAGAATCAGGAAGGG
GAAGGCTTTGAAGGGGTGTGTTGGCCAGGTCTCTCCTCTTACCTGGATTTCACCAATCCCAAGGTCAG
AGAGTGGTATTCAAGTCTTTTTGCTTTCCCTGTTTATCAGGGATCTACGGACATCCTCTTCCTTTGGA
ATGACATGAATGAGCCTTCTGTCTTTAGAGGGCCAGAGCAAACCATGCAGAAGAATGCCATTCATCAT
GGCAATTGGGAGCACAGAGAGCTCCACAACATCTACGGTTTTTATCATCAAATGGCTACTGCAGAAGG
ACTGATAAAACGATCTAAAGGGAAGGAGAGACCCTTTGTTCTTACACGTTCTTTCTTTGCTGGATCAC
AAAAGTATGGTGCCGTGTGGACAGGCGACAACACAGCAGAATGGAGCAACTTGAAAATTTCTATCCCA
ATGTTACTCACTCTCAGCATTACTGGGATCTCTTTTTGCGGAGCTGACATAGGCGGGTTCATTGGGAA
TCCAGAGACAGAGCTGCTAGTGCGTTGGTACCAGGCTGGAGCCTACcAGCCCTTCTTCCGTGGCCATG
CCACCATGAACACCAAGCGACGAGAGCCCTGGCTCTTTGGGGAGGAACACACCCGACTCATCCGAGAA
GCCATCAGAGAGCGCTATGGCCTCCTGCCATATTGGTATTCTCTGTTCTACCATGCACACGTGGCTTC
CCAACCTGTCATGAGGAGGCCTCTGTGGGTAGAGTTCCCTGATGAACTAAAGACTTTTGATATGGAAG
ATGAATACATGCTGGGTTTAGGGAGTGCATTATTGGTTCATCCAGTCACAGAACCAAAAGCCACCACA
GTTGATGTGTTTCTTCCAGGATCAAATGAGGTATGGTATGACTATAAGACATTTGCTCATTGGGAAGG
AGGGTGTACTGTAAAGATCCCAGTAGCCTTGGACACTATTCCAGTGTTTCAGCGAGGTGGAAGTGTGA
TACCAATAAAGACAACTGTAGGAAAATCCACAGGCTGGATGACTGAATCCTCCTATGGACTCCGGGTT
GCTCTAAGCACTGGTTCTTCAGTGGGTGAGTTATATCTTGATGATGGCCATTCATTCCAATACCTCCA
CCAGAAGCAATTTTTGCACAGGAAGTTTTCATTCTGTTCCAGTGTTCTGATCAATTCCAGTITTGCTG
ACCAGAGGGGTCATTATCCCAGCAAGTGTGTGGTGGAGAAGATCTTGGTCTTAGGCTTCAGGAAGGAG
CCATCTTCTGTGACTACCCACTCATCTGATGGTAAAGATCAGCCTGTGGCTTTTACGTATTGTGCCAA
AACATCCATCCTGAGCCTGGAGAAGCTCTCACTCAACATTGCCACTGACTGGGAGGTCCGCATCATAT
GACAAAGAACTGCCCCTGGTGATGTGAGC

| | | | |
|---|---|---|---|
| NOV44h, | | | |
| SNP13379656 of | | | |
| CG55752-06, | SEQ ID NO: 674 | | MW at 75108.9kD |
| Protein Sequence | SNP Pos: 206 | 657 aa | SNP Change: Asp to Gly |

MGIYGSVPYLLAHKLGRTIGIFWLNASETLVEINTEPAVEYTLTQMGPVAAKQKVRSRTHVHWMSESG
IIDVFLLTGPTPSDVFKQYSHLTGIQAMPPLFSLGYHQCRWNYEDEQDVKAVDAGFDEHDIPYDAMWL
DIEHTEGKRYFTWDKNRFPNPKRMQELLRSKKRKVLVVISDPHIKIDPDYSVYVKAKDQGFFVKNQEG
EGFEGVCWPGLSSYLDFTNPKVREWYSSLFAFPVYQGSTDILFLWNDMNEPSVFRGPEQTMQKNAIHH
GNWEHRELHNIYGFYHQMATAEGLIKRSKGKAAERPAFVLTRSQFFAGSQKGTGDNTAEWSNLKISIP
MLLTLSITGISFCGADIGGFIGNPETELLVRWYQAGAYQPFFRGHATMNTKRREPWLFGEEHTRLIRE
AIRERYGLLPYWYSLFYHAHVASQPVMRRPLWVEFPDELKTFDMEDEYMLGLGSALLVHPVTEPKATT
VDVFLPGSNEVWYDYKTFAHWEGGCTVKIPVALDTIPVFQRGGSVIPIKTTVGKSTGWMTESSYGLRV
ALSTGSSVGELYLDDGHSFQYLHQKQFLHRKFSFCSSVLINSSFADQRGHYPSKCVVEKILVLGFRKE
PSSVTTHSSDGKDQPVAFTYCAKTSILSLEKLSLNIATDWEVRII

| | | |
|---|---|---|
| NOV44i, | | |
| SNP13379655 of | SEQ ID NO: 675 | 2001 bp |
| CG55752-06, | ORF Start: ATG at 1 | ORF Stop: TGA at 1972 |
| DNA Sequence | SNP Pos: 1763 | SNP Change: T to C |

| | |
|---|---|
| ATGGGCATTTATGGTTCAGTACCTTATCTCCTGGCCCACAAACTGGGCAGAACTATAGGTATTTTCTG | |
| GCTGAATGCCTCGGAAACACTGGTGGAGATCAATACAGAGCCTGCAGTAGAGTACACACTGACCCAGA | |
| TGGGCCCAGTTGCTGCTAAACAAAAGGTCAGATCTCGCACTCATGTGCACTGGATGTCAGAGAGTGGC | |
| ATCATTGATGTTTTTCTGCTGACAGGACCTACACCTTCTGATGTCTTCAAACAGTACTCACACCTTAC | |
| AGGATTCAAGCCATGCCCCTCTTTTCTCTTTTGGGATACCACCAGTGCCGCTGGAACTATGAAAGATG | |
| AGCAGGATGTAAAAGCAGTGGATGCAGGGTTTGATGAGCATGACATTCCTTATGATGCCATGTAACTG | |
| GACATAGAGCACACTGAGGGCAAGAGGTACTTCACCTGGGACAAAAACAGATTCCCAAACCCCAAGAG | |
| GATGCAAGAGCTGCTCAGGAGCAAAAAGCGTAAGGTACTTGTGGTCATCAGTGATCCCCACATCAAGA | |
| TTGATCCTGACTACTCAGTATATGTGAAGGCCAAAGATCAGGGCTTCTTTGTGAAGAATCAGGAAGGG | |
| GAAGACTTTGAAGGGGTGTGTTGGCCAGGTCTCTCCTCTTACCTGGATTTCACCAATCCCAAGGTCAG | |
| ATGACATGAATGAGCCTTCTGTCTTTAGAGGGCCAGAGCAAACCATGCAGAAGAATGCCATTCATCAT | |
| GGCAATTGGGAGCACAGAGAGCTCCACAACATCTACGGTTTTTATCATCAAATGGCTACTGCAGAAGG | |
| ACTGATAAAACGATCTAAAGGGAAGGAGAGACCCTTTGTTCTTACACGTTCTTTCTTTGCTGGATCAC | |
| AAAAGTATGGTGCCGTGTGGACAGGCGACAACACAGCAGAATGGAGCAACTTGAAAATTTCTATCCCA | |
| ATGTTACTCACTCTCAGCATTACTGGGATCTCTTTTTGCGGAGCTGACATAGGCGGGTTCATTGGGAA | |
| TCCAGAGACAGAGCTGCTAGTGCGTTGGTACCAGGCTGGAGCCTACcAGCCCTTCTTCCGTGGCCATG | |
| CCACCATGAACACCAAGCGACGAGAGCCCTGGCTCTTTGGGGAGGAACACACCCGACTCATCCGAGAA | |
| GCCATCAGAGAGCGCTATGGCCTCCTGCCATATTGGTATTCTCTGTTCTACCATGCACACGTGGCTTC | |
| CCAACCTGTCATGAGGAGGCCTCTGTGGGTAGAGTTCCCTGATGAACTAAAGACTTTTGATATGGAAG | |
| ATGAATACATGCTGGGTTTAGGGAGTGCATTATTGGTTCATCCAGTCACAGAACCAAAAGCCACCACA | |
| GTTGATGTGTTTCTTCCAGGATCAAATGAGGTATGGTATGACTATAAGACATTTGCTCATTGGGAAGG | |
| AGGGTGTACTGTAAAGATCCCAGTAGCCTTGGACACTATTCCAGTGTTTCAGCGAGGTGGAAGTGTGA | |
| TACCAATAAAGACAACTGTAGGAAAATCCACAGGCTGGATGACTGAATCCTCCTATGGACTCCGGGTT | |
| GCTCTAAGCACTGGTTCTTCAGTGGGTGAGTTATATCTTGATGATGGCCATTCATTCCAATACCTCCA | |
| CCAGAAGCAATTTTTGCACAGGAAGTTTTCATTCTGTTCCAGTGTTCTGATCAATTCCAGTTTTGCTG | |
| ACCAGAGGGGTCATTATCCCAGCAAGTGTGTGGTGGAGAAGATCTTGGTCTTAGGCTTCAGTCTGGAG | 44j |
| CCATCTTCTGTGACTACCCACTCATCTGATGGTAAAGATCAGCCTGTGGCTTTTACGTATTGTGCCAA | |
| CCATCTTCTGTGACTACCCACTCATCTGATGGTAAAGATCAGCCTGTGGCTTTTACGTATTGTGCCAA | |
| AACATCCATCCTGAGCCTGGAGAAGCTCTCACTCAACATTGCCACTGACTGGGAGGTCCGCATCATAT | |
| GACAAAGAACTGCCCCTGGTGATGTGAGC | |

| | | | |
|---|---|---|---|
| NOV44i, | | | |
| SNP13379655 of | | | |
| CG55752-06, | SEQ ID NO: 676 | | MW at 75106.8kD |
| Protein Sequence | SNP Pos: 588 | 657 aa | SNP Change: Phe to Ser |

MGIYGSVPYLLAHKLGRTIGIFWLNASETLVEINTEPAVEYTLTQMGPVAAKQKVRSRTHVHWMSESG
IIDVFLLTGPTPSDVFKQYSHLTGIQAMPPLFSLGYHQCRWNYEDEQDVKAVDAGFDEHDIPYDAMWL
DIEHTEGKRYFTWDKNRFPNPKRMQELLRSKKRKVLVVISDPHIKIDPDYSVYVKAKDQGFFVKNQEG
EDFEGVCWPGLSSYLDFTNPKVREWYSSLFAFPVYQGSTDILFLWNDMNEPSVFRGPEQTMQKNAIHH
GNWEHRELHNIYGFYHQMATAEGLIKRSKGKERPFVLTRSFFAGSQKYGAVWTGDNTAEWSNLKISIP
MLLTLSITGISFCGAIGGFIGNPETELLVRWYQAGAYQPFFRGHATMNTKRREPWLFGEAEHTRLIRE
AIRERYGLLPYWYSLFYHAHVASQPVMRRPLWVEFPDELKTFDMEDEYMLGLGSALLVHPVTEPKATT
VDVFLPGSNEVWYDYKTFAHWEGGCTVKIPVALDTIPVFQRGGSVIPIKTTVGKSTGWMTESSYGLRV
ALSTGSSVGELYLDDGHSFQYLHQKQFLHRKFSFCSSVLINSSSADQRGHYPSKCVVEKILVLGFRKE
PSSVTTHSSDGKDQPVAFTYCAKTSILSLEKLSLNIATDWEVRII

| | | |
|---|---|---|
| NOV44j, | | |
| SNP13379654 of | SEQ ID NO: 677 | 2001 bp |
| CG55752-06, | ORF Start: ATG at 1 | ORF Stop: TGA at 1972 |
| DNA Sequence | SNP Pos: 1772 | SNP Change: A to G |

ATGGGCATTTATGGTTCAGTACCTTATCTCCTGGCCCACAAACTGGGCAGAACTATAGGTATTTTCTG
GCTGAATGCCTCGGAAACACTGGTGGAGATCAATACAGAGCCTGCATAGAGTACACACTAGACCCAGA
ATGACATGAATGAGCCTTCTGTCTTTAGAGGGCCAGAGCAAACCATGCAGAAGAATGCCATTCATCAT
GGCAATTGGGAGCACAGAGAGCTCCACAACATCTACGGTTTTTATCATCAAATGGCTACTGCAGAAGG
ACTGATAAAACGATCTAAAGGGAAGGAGAGACCCTTTGTTCTTACACGTTCTTTCTTTGCTGGATCAC
AAAAGTATGGTGCCGTGTGGACAGGCGACAACACAGCAGAATGGAGCAACTTGAAAATTTCTATCCCA
ATGTTACTCACTCTCAGCATTACTGGGATCTCTTTTTGCGGAGCTGACATAGGCGGGTTCATTGGGAA
TCCAGAGACAGAGCTGCTAGTGCGTTGGTACCAGGCTGGAGCCTACcAGCCCTTCTTCCGTGGCCATG
CCACCATGAACACCAAGCGACGAGAGCCCTGGCTCTTTGGGGAGGAACACACCCGACTCATCCGAGAA
GCCATCAGAGAGCGCTATGGCCTCCTGCCATATTGGTATTCTCTGTTCTACCATGCACACGTGGCTTC
CCAACCTGTCATGAGGAGGCCTCTGTGGGTAGAGTTCCCTGATGAACTAAAGACTTTTGATATGGAAG
ATGAATACATGCTGGGTTTAGGGAGTGCATTATTGGTTCATCCAGTCACAGAACCAAAAGCCACCACA
GTTGATGTGTTTCTTCCAGGATCAAATGAGGTATGGTATGACTATAAGACATTTGCTCATTGGGAAGG
AGGGTGTACTGTAAAGATCCCAGTAGCCTTGGACACTATTCCAGTGTTTCAGCGAGGTGGAAGTGTGA
TACCAATAAAGACAACTGTAGGAAAATCCACAGGCTGGATGACTGAATCCTCCTATGGACTCCGGGTT
GCTCTAAGCACTGGTTCTTCAGTGGGTGAGTTATATCTTGATGATGGCCATTCATTCCAATACCTCCA
CCAGAAGCAATTTTTGCACAGGAAGTTTTCATTCTGTTCCAGTGTTCTGATCAATTCCAGTTTTGCTG
ACCAGAGGGGTCATTATCCCAGCAAGTGTGTGGTGGAGAAGATCTTGGTCTTAGGCTTCAGGAAGGAG
CCATCTTCTGTGACTACCCACTCATCTGATGGTAAAGATCAGCCTGTGGCTTTTACGTATTGTGCCAA
TGGGCCCAGTTGCTGCTAAACAAAAGGTCAGATCTCGCACTCATGTGCACTGGATGTCAGAGAGTGGC
ATCATTGATGTTTTTCTGCTGACAGGACCTACACCTTCTGATGTCTTCAAACAGTACTCACACCTTAC
AGGTATTCAAGCCATGCCCCCTCTTTTCTCTTTGGGATACCACCAGTGCCGCTGGAACTATGAAGATG
AGCAGGATGTAAAAGCAGTGGATGCAGGGTTTGATGAGCATGACATTCCTTATGATGCCATGTGGCTG
GACATAGAGCACACTGAGGGCAAGAGGTACTTCACCTGGGACAAAAACAGATTCCCAAACCCCAAGAG
GATGCAAGAGCTGCTCAGGAGCAAAAAGCGTAAGGTACTTGTGGTCATCAGTGATCCCCACATCAAGA
ACCGGAGGGGTCATTATCCCAGCAAGTGTGTGGTGGAGAAGATCTTGGTCTTAGGCTTCAGGAAGGAG
CCATCTTCTGTGACTACCCACTCATCTGATGGTAAAGATCAGCCTGTGGCTTTTACGTATTGTGCCAA
AACATCCATCCTGAGCCTGGAGAAGCTCTCACTCAACATTGCCACTGACTGGGAGGTCCGCATCATAT
GACAAAGAACTGCCCCTGGTGATGTGAGC

| | | | |
|---|---|---|---|
| NOV44j, | | | |
| SNP13379654 of | | | |
| CG55752-06, | SEQ ID NO: 678 | | MW at 75194.9kD |
| Protein Sequence | SNP Pos: 591 | 657 aa | SNP Change: Gln to Arg |

MGIYGSVPYLLAHKLGRTIGIFWLNASETLVEINTEPAVEYTLTQMGPVAAKQKVRSRTHVHWMSESG
IIDVFLLTGPTPSDVFKQYSHLTGIQAMPPLFSLGYHQCRWNYEDEQDVKAVDAGFDEHDIPYDAMWL
DIEHTEGKRYFTWDKNRFPNPKRMQELLRSKKRKVLVVISDPHIKIDPDYSVYVKAKDQGFFVKNQEG
EGFEGVCWPGLSSYLDFTNPKVREWYSSLFAFPVYQGSTDILFLWNDMNEPSVFRGPEQTMQKNAIHH
GNWEHRELHNIYGFYHQMATAEGLIKRSKGKAAERPAFVLTRSQFFAGSQKGTGDNTAEWSNLKISIP
MLLTLSITGISFCGADIGGFIGNPETELLVRWYQAGAYQPFFRGHATMNTKRREPWLFGEEHTRLIRE
AIRERYGLLPYWYSLFYHAHVASQPVMRRPLWVEFPDELKTFDMEDEYMLGLGSALLVHPVTEPKATT
VDVFLPGSNEVWYDYKTFAHWEGGCTVKIPVALDTIPVFQRGGSVIPIKTTVGKSTGWMTESSYGLRV
ALSTGSSVGELYLDDGHSFQYLHQKQFLHRKFSFCSSVLINSSFADRRGHYPSKCVVEKILVLGFRKE
PSSVTTHSSDGKDQPVAFTYCAKTSILSLEKLSLNIATDWEVRII

[0602] TABLE 44B

Comparison of the NOV44 protein sequences.

| | |
|---|---|
| NOV44a | ------------------------------------------------------------ |
| NOV44b | ------------------------------------------------------------ |
| NOV44c | MRAAVAGIAFRRRRQKQWLSKKSTYQALLDSVTTDEDSTRFQIINEASKVRRQKQWLSKK |
| NOV44d | MEAAVKEEIS------------------VEDEAVDKN--IFRDCNKIAFYRRQKQWLSKK |
| NOV44e | MEAAVKEEIS------------------VEDEAVDKN--IFRDCNKIAFYRRQKQWLSKK |
| NOV44f | MEAAVKEEIS------------------VEDEAVDKN--IFRDCNKIAFYRRQKQWLSKK |
| NOV44g | ---------------------------------------------MLILNRRQKQWLSKK |
| NOV44a | ------------------------------------------------------------ |
| NOV44b | ------------------------------------------------------------ |
| NOV44c | STYQALLDSVTTDEDSTRFQIINEASKVPLLAEIYGIEGNIFRLKINEETPLKPRFEVPD |
| NOV44d | STYQALLDSVTTDEDSTRFQIINEASKVPLLAEIYGIEGNIFRLKINEETPLKPRFEVPD |
| NOV44e | STYQALLDSVTTDEDSTRFQIINEASKVPLLAEIYGIEGNIFRLKINEETPLKPRFEVPD |
| NOV44f | STYRALLDSVTTDEDSTRFQIINEASKVPLLAEIYGIEGNIFRLKINEETPLKPRFEVPD |
| NOV44g | STYRALLDSVTTDEDSTRFQIINEASKVPLLAEIYGIEGNIFRLKINEETPLKPRFEVPD |
| NOV44a | ------------------------------------------------------------ |
| NOV44b | ------------------------------------------------------------ |
| NOV44c | VLTSKPSTVR-ISCSGDTGSLILADGKGDLKCHITANPFKVDLVSEEEVVISINSLGQLY |
| NOV44d | VLTSKPSTVRLISCSGDTGSLILADGKGDLKCHITANPFKVDLVSEEEVVISINSLGQLY |
| NOV44e | VLTSKPSTVRLISCSGDTGSLILADGKGDLKCHITANPFKVDLVSEEEVVISINSLGQLY |
| NOV44f | VLTSKPSTVRLISCSGDTGSLILADGKGDLKCHITANPFKVDLVSEEEVVISINSLGQLY |
| NOV44g | VLTSKP------------------------------------------------------ |
| NOV44a | ------------------------------------------------------------ |
| NOV44b | ------------------------------------------------------------ |
| NOV44c | FEHGRAPRVSFSDKVNLTLGSIWDKIKNLFSRQGSKDPAEGDGAQPEETPRDGDKPEETQ |
| NOV44d | FEH----------------------LQILHKQRAAKENEE-------ETSVDTS--QENQ |
| NOV44e | FEH----------------------LQILHKQRAAKENEE-------ETSVDTS--QENQ |
| NOV44f | FEH----------------------LQILHKQRAAKENEE-------ETSVDTS--QENQ |
| NOV44g | ---------------------------S--TVRAAKENEE-------ETSVDTS--QENQ |
| NOV44a | ------------------------------------------------------------ |
| NOV44b | ------------------------------------------------------------ |
| NOV44c | GKAEKDEPGAWEETFKTHSDSKPYGPSSIGLDFSLHGFEHLYGIPQHAESHQLKNTGDGD |
| NOV44d | -----EDLGLWEEKFGKFVDIKANGPSSIGLDFSLHGFEHLYGIPQHAESHQLKNTGDGD |
| NOV44e | -----EDLGLWEEKFGKFVDIKANGPSSIGLDFSLHGFEHLYGIPQHAESHQLKNTGDGD |
| NOV44f | -----EDLGLWEEKFGKFVDIKANGPSSIGLDFSLHGFEHLYGIPQHAESHQLKNTG--D |
| NOV44g | -----EDLGLWEEKFGKFVDITANGPSSIGLDFSLHGFEHLYGIPQHAESHQLKNTG--D |
| NOV44a | -----------------MGIYGSVPYLLAHKLGRTIGIFWLNASETLVEINTEPAVEYTL |
| NOV44b | -----------------MGIYGSVPYLLAHKLGRTIGIFWLNASETLVEINTEPAVEYTL |
| NOV44c | AYRLYNLDVYGYQIYDKMGIYGSVPYLLAHKLGRTIGIFWLNASETLVEINTEPAGIVIF |
| NOV44d | AYRLYNLDVYGYQIYDKMGIYGSVPYLLAHKIGRTIGIFWLNASETLVEINTEPAVEYTL |
| NOV44e | AYRLYNLDVYGYQIYDKMGIYGSVPYLLAHKIGRTIGIFWLNASETLVEINTEPAVEYTL |
| NOV44f | AYRLYNLDVYGYQIYDKMGIYGSVPYLLAHKLGRTIGIFWLNASETLVEINTEPAVEYTL |
| NOV44g | AYRLYNLDVYGYQIYDKMGIYGSVPYLLAHKLGRTIGIFWLNASETLVEINTEPAVEYTL |
| NOV44a | TQMGPVAAKQK-VRSRTHVHWMSESGIIDVFLLTGPTPSDVFKQYSHLTGTQAMPPLFSL |
| NOV44b | TQMGPVAAKQK-VRSRTHVHWMSESGIIDVFLLTGPTPSDVFKQYSHLTGIQAMPPLFSL |
| NOV44c | GPVSLIYQSQGDTPLTTHVHWMSESGIIDVFLLTGPTPSDVFKQYSHLTGTQANPPLFSL |
| NOV44d | TQMGPVAAKQK-VRSRTHVHWMSESGIIDVFLLTGPTPSDVFKQYSHLTGTQANPPLFSL |
| NOV44e | TQMGPVAAKQK-VGSRTHVHWMSESGIIDVFLLTGPTPSDVFKQYSHLTGTQANPPLFSL |
| NOV44f | TQMGPVAAKQK-VRSRTHVHWMSESGIIDVFLLTGPTPSDVFKQYSHLTGTQANPPLFSL |
| NOV44g | TQMGPVAAKQK-VRSRTHVHWMSESGIIDVFLLTGPTPSDVFKQYSHLTGTQANPPLFSL |
| NOV44a | GYHQCRNNYEDEQDVKAVDAGFDEHDIPYDANWLDIEHTEGKRYFTWDKNRFPNPKRMQE |
| NOV44b | GYHQCRWNYEDEQDVKAVDAGFDEHDIPYDAMWLDIEHTEGKRYFTWDKNRFPNPKRMQE |
| NOV44c | GYHQCRWNYEDEQDVKAVDAGFDEHDIPYDAIWLDIEHTEGKRYFTWDKNRFPNPKRMQE |
| NOV44d | GYHQCRWNYEDEODVKAVDAGFDEHDIPYDAMWLDIEHTEGKRYFTWDKNRFPNPKRMQE |
| NOV44e | GYHQCRWNYEDEQDVKAVDAGFDEHDIPYDAMWLDIEHTEGKRYFTWDKNRFPNPKRMQE |
| NOV44f | GYHQCRWNYEDEQDVKAVDAGFDEHDIPYDANWLDIEHTEGKRYFTWDKNRFPNPKRMOE |
| NOV44g | GYHQCRWNYEDEQDVKAVDAGFDEHDIPYDAMWLDIEHTEGKRYFTWDKNRFPNPKRMQE |
| NOV44a | LLRSKKR-KLVVISDPHIKIDPDYSVYVKAKDQGFFVKNQEGEDFEGVCWPGLSSYLDFT |
| NOV44b | LLRSKKRKVLVVISDPHIKIDPDYSVYVKAKDQGFFVKNQEGEDFEGVCWPGLSSYLDFT |
| NOV44c | LLRSKKR-KLVVISDPHIKIEPDYSVYVKAKDOGFFVKNQEGEDFEGVCWPGMKSYLDFT |
| NOV44d | LLRSKKR-KLVVISDPHIKIDPDYSVYVKAKDQGFFVKNQEGEDFEGVCWPGLSSYLDFT |
| NOV44e | LLRSKKR-KLVVISDPHIKIDPDYSVYVKAKDQGFFVKNQEGEDFEGVCWPGLSSYLDFT |
| NOV44f | LLRSKKR-KLVVISDPHIKIEPDYSVYVKAKDQGFFVKNQEGEDFEGVCWPGLSSYLDFT |
| NOV44g | LLRSKKR-KLVVISDPHIKIEPDYSVYVKAKDQGFFVKNQEGEDFEGVCWPGLSSThDFT |
| NOV44a | NPKVREWYSSLFAFPVYQGSTDILFLWNDMNEPSVFRGPEQTMQKNAIHHGNWEHRELHN |
| NOV44b | NPKVREWYSSLFAFPVYQGSTDILFLWNDMNEPSVFRGPEQTMQKNAIHHGNWEHRELHN |
| NOV44c | NPKVREWYSSLFAFPVYQGSTDILFLWNDMNEPSVFRGPEQTMQKNAIHHGNWEHRELHN |
| NOV44d | NPKVREWYSSLFAFPVYQGSTDILFLWNDMNEPSVFRGPEQTMQKNAIHHGNWEHRELHN |
| NOV44e | NPKVREWYSSLFAFPVYQGSTDILFLWNDMNEPSVFRGPEQTMQKNAIHHGNWEHRELHN |
| NOV44f | NPKVREWYSSLFAFPVYQGSTDILFLWNDMNEPSVFRGPEQTMQKNAIHHGNWEHRELHN |
| NOV44g | NPKVREWYSSLFAFPVYQGSTDILFLWNDMNEPSVFRGPEQTMQKNAIHHGNWEHRELHN |
| NOV44a | IYGFYHQMATAEGLIKRSKGKERPFVLTRSFFAGSQKYGGAVWTGDNTAEWSNLKISIPM |
| NOV44b | IYGFYHQMATAEGLIKRSKGKERPFVLTRSFFAGSQKYG-AVWTGDNTAEWSNLKISIPM |
| NOV44c | IYGFY--MATAEGLIKRSKGKERPFVLTRSFFAGSQKYG-AVWTGDNTAEWSNLKISIPM |
| NOV44d | IYGFYHQMATAEGLIKRSKGKERPFVLTRSFFAGSQKYG-AVWTGDNTAEWSNLKISIPM |
| NOV44e | IYGFYHQMATAEGLIKRSKGKERPFVLTRSFFAGSQKYG-AVWTGDNTAEWSNLKISIPM |
| NOV44f | IYGFYHQMATAEGLIKRSKGKERPFVLTRSFFAGSQKYG-AVWTGDNTAEWSNLKISIPM |
| NOV44g | IYGFYHQMATAEGLIKRSKGKERPFVLTRSFFAGSQKYG-AVWTGDNTAEWSNLKISIPM |
| NOV44a | LLTLSITGISFCGADIGGFIGNPETELLVRWYQAGAYQPFFRGHATMNTKRREPWLFGEE |
| NOV44b | LLTLSITGISFCGADIGGFIGNPETELLVRWYQAGAYQPFFRGHATMNTKRREPWLFGEE |
| NOV44c | LLTLSITGISFCGADIGGFIGNPETELLVRWYQAGAYQPFFRGHATMNTKRREPWLFGEE |
| NOV44d | LLTLSITGISFCGADIGGFIGNPETELLVRWYQAGAYQPFFRGHATMNTKRREPWLFGEE |
| NOV44e | LLTLSITGISFCGADIGGFIGNPETELLVRWYQAGAYQPFFRGHATMNTKRREPWLFGEE |
| NOV44f | LLTLSITGISFCGADIGGFIGNPETELLVRWYQAGAYQPFFRGHATMNTKRREPWLFGEE |
| NOV44g | LLTLSITGISFCGADIGGFIGNPETELLVRWYQAGAYQPFFRGHATMNTKRREPWLFGEE |
| NOV44a | HTRLIREAIRERYGLLPYWYSLFYHAHVASQPVMR-PLWVEFPDELKTFDMEDEYMLG-- |
| NOV44b | HTRLIREAIRERYGLLPYWYSLFYHAHVASQPVMRRPLWVEFPDELKTFDMEDEYMLGLG |
| NOV44c | HTRLIREAIRERYGLLPYWYSLFYHAHVASQPVMR-PLWVEFPDELKTFDMEDEYMLG-- |
| NOV44d | HTRLIREAIRERYGLLPYWYSLFYHAHVASQPVMR-PLWVEFPDELKTFDMEDEYMLG-- |
| NOV44e | HTRLIREAIRERYGLLPYWYSLFYHAHVASQPVMR-PLWVEFPDELKTFDMEDEYMLG-- |
| NOV44f | HTRLIREAIRERYGLLPYWYSLFYHAHVASQPVMR-PLWVEFPDELKTFDMEDEYMLG-- |
| NOV44g | HTRLIREAIRERYGLLPYWYSLFYHAHVASQPVMR-PLWVEFPDELKTFDMEDEYMLG-- |
| NOV44a | SALLVHPVTEPKATTVDVFLPGSNE-VWYDYKTFAHWEGGCTVKIPVALDTIPVFQRGGS |
| NOV44b | SALLVHPVTEPKATTVDVFLPGSNE-VWYDYKTFAHWEGGCTVKIPVALDTIPVFQRGGS |
| NOV44c | SALLVHPVTEPKATTVDVFLPGSNEVVWYDYKTFAHWEGGCTVKIPVLLQ-IPVFQRGGS |
| NOV44d | SALLVHPVTEPKATTVDVFLPGSNE-VWYDYKTFAHWEGGCTVKIPVALDTIPVFQRGGS |
| NOV44e | SALLVHPVTEPKATTVDVFLPGSNE-VWYDYKTFAHWEGGCTVKIPVALDTIPVFQRGGS |
| NOV44f | SALLVHPVTEPKATTVDVFLPGSNE-VWYDYKTFAHWEGGCTVKIPVALDTIPVFQRGGS |
| NOV44g | SALLVHPVTEPKATTVDVFLPGSNE-VWYDYKTFAHWEGGCTVKIPVALDTIPVFQRGGS |
| NOV44a | VIPIKTTVGKSTGWMTESSYGLRVALSTK-GSSVGELYLDDGHSFQYLHQKQFLHRKFSF |
| NOV44b | VIPIKTTVGKSTGWMTESSYGLRVALST--GSSVGELYLDDGHSFQYLHQKQFLHRKFSF |
| NOV44c | VIPIKTTVGKSTGWMTESSYGLRVALSTKQGSSVGELYLDDGHSFQYLHQKQFLHRKFSF |
| NOV44d | VIPIKTTVGKSTGWMTESSYGLRVALSTK-GSSVGELYLDDGHSFQYLHQKQFLHRKFSF |
| NOV44e | VIPIKTTVGKSTGWMTESSYGLRVALSTK-GSSVGELYLDDGHSFQYLHQKQFLHRKFSF |
| NOV44f | VIPIKTTVGKSTGWMTESSYGLRVALSTQ-GSSVGELYLDDGHSFQYLHQKQFLHRKFSF |
| NOV44g | VIPIKTTVGKSTGWMTESSYGLRVALSTQ-GSSVGELYLDDGHSFQYLHQKQFLHRKFSF |
| NOV44a | CSSVLINSSFADQRGHYPSKCVVEKILVLGFRKEPSSVTTHSSGDGKDQPVAFTYCAKTS |
| NOV44b | CSSVLINSSFADQRGHYPSKCVVEKILVLGFRKEPSSVTTHSS-DGKDQPVAFTYCAKTS |
| NOV44c | CSSVLI-SSPVSQGHLHTPLSMTKALLLFTVSS-PASVTTHSS-DGKDQPVAFTYCAKTS |
| NOV44d | CSSVLI-SSFADQRGHYPSKCVVEKILVLGFRKEPSSVTTHSS-DGKDQPVAFTYCAKTS |
| NOV44e | CSSVLI-SSFADQRGHYPSKCVVEKILVLGFRKEPSSVTTHSS-DGKDQPVAFTYCAKTS |
| NOV44f | CSSVLI-SSFADQRGHYPSKCVVEKILVLGFRKEPSSVTTHSS-DGKDQPVAFTYCAKTS |
| NOV44g | CSSVLI-SSFADQRGHYPSKCVVEKILVLGFRKEPSSVTTHSS-DGKDQPVAFTYCAKTS |
| NOV44a | ILSLEKLSLNIATDWEVRII |
| NOV44b | ILSLEKLSLNIATDWEVRII |
| NOV44c | ILSLEKLSLNIATDWEVRII |
| NOV44d | ILSLEKLSLNIATDWEVRII |
| NOV44e | ILSLEKLSLNIATDWEVRII |
| NOV44f | ILSLEKLSLNIATDWEVRII |
| NOV44g | ILSLEKLSLNIATDWEVRII |
| NOV44a | (SEQ ID NO: 660) |
| NOV44b | (SEQ ID NO: 662) |
| NOV44c | (SEQ ID NO: 664) |
| NOV44d | (SEQ ID NO: 666) |
| NOV44e | (SEQ ID NO: 668) |
| NOV44f | (SEQ ID NO: 670) |
| NOV44g | (SEQ ID NO: 672) |

[0603] Further analysis of the NOV44a protein yielded the following properties shown in Table 44C.

TABLE 44C
Protein Sequence Properties NOV44a

| | |
|---|---|
| SignalP analysis: | No Known Signal Sequence Indicated |
| PSORT II analysis: | |

| PSG: | a new signal peptide prediction method | | | |
|---|---|---|---|---|
| | N-region: | length 0; | pos.chg 0; | neg.chg 0 |
| | H-region: | length 13; | peak value | 5.66 |

| | PSG score: 1.26 |
|---|---|
| GvH: | von Heijne's method for signal seq. recognition |
| | GvH score (threshold: −2.1): −7.02 |
| | possible cleavage site: between 51 and 52 |

>>> Seems to have no N-terminal signal peptide

| ALOM: | Klein et al's method for TM region allocation | | |
|---|---|---|---|
| | Init position for calculation: 1 | | |
| | Tentative number of TMS(s) for the threshold 0.5: 1 | | |
| | Number of TMS(s) for threshold 0.5: 1 | | |
| | INTEGRAL | Likelihood = −2.07 | Transmembrane 337-353 |

| | |
|---|---|
| PERIPHERAL | Likelihood = 3.82 (at 496) |

| | ALOM score: −2.07 (number of TMSs: 1) |
|---|---|
| MTOP: | Prediction of membrane topology (Hartmann et al.) |
| | Center position for calculation: 344 |
| | Charge difference: −2.0 C(−3.0) − N(−1.0) |
| | N >= C: N-terminal side will be inside |

>>> membrane topology: type 2 (cytoplasmic tail 1 to 337)
MITDISC: discrimination of mitochondrial targeting seq

| | | | |
|---|---|---|---|
| R content: | 1 | Hyd Moment (75): | 2.91 |
| Hyd Moment(95): | 0.96 | G content: | 4 |
| D/E content: | 1 | S/T content: | 3 |
| Score: −6.13 | | | |

Gavel: prediction of cleavage sites for mitochondrial preseq

R-2 motif at 27 GRT|IG

NUCDISC: discrimination of nuclear localization signals

pat4: KKRK (5) at 167
pat7: none
bipartite: none
content of basic residues: 10.4%
NLS Score: −0.16

KDEL: ER retention motif in the C-terminus: none
ER Membrane Retention Signals: none
SKL: peroxisomal targeting signal in the C-terminus: none
PTS2: 2nd peroxisomal targeting signal: none
VAC: possible vacuolar targeting motif: none
RNA-binding motif: none
Actinin-type actin-binding motif:

type 1: none
type 2: none

NMYR: N-myristoylation pattern: MGIYGSV
Prenylation motif: none
memYQRL: transport motif from cell surface to Golgi: none
Tyrosines in the tail: too long tail
Dileucine motif in the tail: found

LL at 10
LL at 74
LL at 163

checking 63 PROSITE DNA binding motifs: none
checking 71 PROSITE ribosomal protein motifs: none
checking 33 PROSITE prokaryotic DNA binding motifs: none

| | |
|---|---|
| NNCN: | Reinhardt's method for Cytoplasmic/Nuclear discrimination |
| | Prediction: cytoplasmic |
| | Reliability: 94.1 |
| COIL: | Lupas's algorithm to detect coiled-coil regions |
| | total: 0 residues |

Final Results (k = 9/23):

```
30.4%: cytoplasmic
30.4%: mitochondrial
17.4%: Golgi
  8.7%: endoplasmic reticulum
  4.3%: extracellular, including cell wall
  4.3%: nuclear
  4.3%: vesicles of secretory system
```

>> prediction for CG55752-07 is cyt (k = 23)

[0604] A search of the NOV44a protein against the Geneseq database, a proprietary database that contains sequences published in patents and patent publication, yielded several homologous proteins shown in Table 44D.

TABLE 44D
Geneseq Results for NOV44a

| | | NOV44a | Identities/ | |
|---|---|---|---|---|
| | | Residues/ | Similarities for | |
| Geneseq | Protein/Organism/Length | Match | the Matched | Expect |
| Identifier | [Patent #, Date] | Residues | Region | Value |
| ABG69611 | Human NOV11b protein - Homo | 1 . . . 656 | 653/656 (99%) | 0.0 |
| | sapiens, 914 aa. [WO200250277- | 262 . . . 914 | 653/656 (99%) | |
| | A2, 27-JUN-2002] | | | |
| ABG69613 | Human NOV11d protein - Homo | 1 . . . 656 | 651/656 (99%) | 0.0 |
| | sapiens, 912 aa. [WO200250277- | 260 . . . 912 | 653/656 (99%) | |
| | A2, 27-JUN-2002] | | | |
| ABG69612 | Human NOV11c protein - Homo | 1 . . . 656 | 651/656 (99%) | 0.0 |
| | sapiens, 914 aa. [WO200250277- | 262 . . . 914 | 652/656 (99%) | |
| | A2, 27-JUN-2002] | | | |
| AAG79779 | Carbohydrate-associated protein | 1 . . . 652 | 648/652 (99%) | 0.0 |
| | (CHOP)-1 - Homo sapiens, 912 | 262 . . . 910 | 648/652 (99%) | |
| | aa. [WO200297060-A2, 05-DEC- | | | |
| | 2002] | | | |
| ABP52437 | Human carbohydrate metabolism | 1 . . . 656 | 634/656 (96%) | 0.0 |
| | enzyme CME-2 protein SEQ ID | 262 . . . 914 | 636/656 (96%) | |
| | NO: 2 - Homo sapiens, 914 aa. | | | |
| | [WO200261059-A2, 08-AUG- | | | |
| | 2002] | | | |

[0605] In a BLAST search of public sequence databases, the NOV44a protein was found to have homology to the proteins shown in the BLASTP data in Table 44E.

TABLE 44E
Public BLASTP Results for NOV44a

| | | NOV44a | Identities/ | |
|---|---|---|---|---|
| Protein | | Residues/ | Similarities for | |
| Accession | | Match | the Matched | Expect |
| Number | Protein/Organism/Length | Residues | Portion | Value |
| Q8IWZ0 | Glucosidase - Homo sapiens | 1 . . . 656 | 653/656 (99%) | 0.0 |
| | (Human), 769 aa (fragment). | 117 . . . 769 | 653/656 (99%) | |
| Q8TET4 | FLJ00088 protein - Homo | 1 . . . 656 | 653/656 (99%) | 0.0 |
| | sapiens (Human), 925 aa | 273 . . . 925 | 653/656 (99%) | |
| | (fragment). | | | |
| Q8IZM5 | Neutral alpha glucosidase C | 1 . . . 656 | 653/656 (99%) | 0.0 |
| | type 2 - Homo sapiens | 262 . . . 914 | 653/656 (99%) | |
| | (Human), 914 aa. | | | |
| AAN74755 | Neutral alpha glucosidase C - | 1 . . . 656 | 652/656 (99%) | 0.0 |
| | synthetic construct, 914 aa. | 262 . . . 914 | 653/656 (99%) | |
| Q8IZM4 | Neutral alpha-glucosidase C | 1 . . . 656 | 652/656 (99%) | 0.0 |
| | type 3 - Homo sapiens (Human), | 262 . . . 914 | 653/656 (99%) | |
| | 914 aa. | | | |

[0606] PFam analysis indicates that the NOV44a protein contains the domains shown in the Table 44F.

TABLE 44F
Domain Analysis of NOV44a

| | NOV44a | Identities/Similarities | Expect |
|---|---|---|---|
| Pfam Domain | Match Region | for the Matched Region | Value |
| Glyco_hydro_31 | 1 . . . 616 | 259/856 (30%) | 3.4e−235 |
| | | 517/856 (60%) | |

### Example 45

[0607] The NOV45 clone was analyzed, and the nucleotide and encoded polypeptide sequences are shown in Table 45A.

TABLE 45A

NOV45 Sequence Analysis

| | | |
|---|---|---|
| NOV45a, CG55778-03 | SEQ ID NO: 679 | 1752 bp |
| DNA Sequence | ORF Start: ATG at 23 | ORF Stop: TAA at 653 |

GGCGGGGCGGCCGGCGGCGGCCATGGGAGATATCCCAGCCGTGGGCCTCAGCTCCTGGAAGCAGGCTT
CTCCAGGTAAAGTGACCGAGGCAGTGAAAGAGGCCATTGACGCAGGGTACCGGCACTTCGACTGTGCT
TACTTTTACCACAATGAGAGGGAGGTTGGAGCAGGGATCCGTTGCAAGATCAAGGAAGGCGCTGTAAG
ACGGGAGGATCTGTTCATTGCCACTAAGCTGTGGTGCACCTGCCATAAGAAGTCCTTGGTGGAAACAG
CATGCAGAAAGAGTCTCAAGGCCTTGAAGCTGAACTATTTGGACCTCTACCTCATACACTGGCCCATG
GGTTTCAAGCCTCCTCATCCAGAATGGATCATGAGCTGCAGTGAACTTTCCTTCTGCCTCTCACATCC
TCGAGTGCAGGACTTGCCTCTGGACGAGAGCAACATGGTTATTCCCAGTGACACGGACTTCCTGGACA
CGTGGGAGATTTTGATCCGATTTCAAATCCAGAGGAATGTGATAGTGATCCCCGGATCTATCACCCCA
AGTCACATTAAAGAGAATATCCAGGTGTTTGATTTTGAATTAACACAGCACGATATGGATAACATCCT
CAGCCTAAACAAGAATCTCCGACTGGCCATGTTCCCCATGTAAATATGGCTCCTTCTTTTTAAAACAG
AGGGAAGAATATACAGATTGAATGATTGGTGTCTGAATAGAACTAAAAATCACAAAGACTATCCTTTC
CACA

| | | | |
|---|---|---|---|
| NOV45a, GG55778-03 | | | |
| Protein Sequence | SEQ ID NO: 680 | 210 aa | MW at 24136.7kD |

MGDIPAVGLSSWKQASPGKVTEAVKEAIDAGYRHFDCAYFYHNEREVGAGIRCKIKEGAVRREDLFIA
TKLWCTCHKKSLVETACRKSLKALKLNYLDLYLIHWPMGFKPPHPEWIMSCSELSFCLSHPRVQDLPL
DESNNVIPSDTDFLDTWEILIRFQIQRNVIVIPGSITPSHIKENIQVFDFELTQHDMDNILSLNKNLR
LAMFPM

| | | |
|---|---|---|
| NOV45b, CG55778-06 | SEQ ID NO: 681 | 569 bp |
| DNA Sequence | ORF Start: ATG at 1 | ORF Stop: TGA at 550 |

ATGGGAGATATCCCAGCCGTGGGCCTCAGCTCCTGGAAGGCTTCTCCAGGAAAAGTGACCGAGGCAGT
GAAAGAGGCCATTGACGCAGGGTACCGGCACTTCGACTGTGCTTACTTTTACCACAATGAGAGGGAGG
TTGGAGCAGGGATCCGTTGCAAGATCAAGGAAGGCGCTGTAAGACGGGAGGATCTGTTCATTGCCACT
AAGCCTCCTCATCCAGAATGGATCATGAGCTGCAGTGAACTTTCCTTCTGCCTCTCACATCCTCGAGT
GCAGGACTTGCCTCTGGACGAGAGCAACATGGTTATTCCCAGTGACACGGACTTCCTGGACACGTGGG
AGATTTTGATCCGATTTCAAATCCAGAGGAATGTGATAGTGATCCCCGGATCTATCACCCCAAGTCAC
ATTAAAGAGAATATCCAGGTGTTTGATTTTGAATTAACACAGCACGATATGGATAACATCCACAGCCT
AAACAGGAATCTCCGACTGGCCATGTTCCCCATAACTAAAAATCACAAAGACTATCCTTTCCACATAG
AATACTGAGGACGCTTCCCCTTCCT

| | | | |
|---|---|---|---|
| NOV45b, CG55778-06 | | | |
| Protein Sequence | SEQ ID NO: 682 | 183 aa | MW at 21057.81kD |

MGDIPAVGLSSWKASPGKVTEAVKEAIDAGYRHFDCAYFYHNEREVGAGIRCKIKEGAVRREDLFIAT
KPPHPEWIMSCSELSFCLSHPRVQDLPLDESNMVIPSDTDFLDTWEILIRFQIQRNVIVIPGSITPSH
IKENIQVFDFELTQHDMDNILSLNRNLRLAMFPITKNHKDYPFHIEY

| | | |
|---|---|---|
| NOV45c, 275480984 | SEQ ID NO: 683 | 655 bp |
| DNA Sequence | ORF Start: at 2 | ORF Stop: end of sequence |

CACCAGATCTCCCACCATGGGAGATATCCCAGCCGTGGGCCTCAGCTCCTGGAAGCAGGCTTCTCCAG
GGAAAGTGACCGAGGCAGTGAAAGAGGCCATTGACGCAGGGTACCGGCACTTCGACTGTGCTTACTTT
TACCACAATGAGAGGGAGGTTGGAGCAGGGATCCGTTGCAAGATCAAGGAAGGCGCTGTAAGACGGGA
GGATCTGTTCATTGCCACTAAGCTGTGGTGCACCTGCCATAAGAAGTCCTTGGTGGAAACAGCATGCA
GAAAGAGTCTCAAGGCCTTGAAGCTGAACTATTTGGACCTCTACCTCATACACTGGCCCATGGGTTTC
AAGCCTCCTCATCCAGAATGGATCATGAGCTGCAGTGAACTTTCCTTCTGCCTCTCACATCCTCGAGT
GCAGGACTTGCCTCTGGACGAGAGCAACGTGGTTATTCCCAGTGACACGGACTTCCTGGACACGTGGG
AGATTTTGATCCGATTTCAAATCCAGAGGAATGTGATAGTGATCCCCGGATCTATCACCCCAAGTCAC
ATTAAAGAGAATATCCAGGTGTTTGATTTTGAATTAACACAGCACGATATGGATAACATCCTCAGCCT
AAACAGGAACCTCCGACTGGCCATGTTCCCCATGGTCGACGGC

| | | | |
|---|---|---|---|
| NOV45c, 275480984 | | | |
| Protein Sequence | SEQ ID NO: 684 | 218 aa | MW at 24946.5kD |

TRSPTMGDIPAVGLSSWKQASPGKVTEAVKEAIDAGYRHFDCAYFYHNEREVGAGIRCKIKEGAVRRE
DLFIATKLWCTCHKKSLVETACRKSLKALKLNYLDLYLIHWPMGFKPPHPEWIMSCSELSFCLSHPRV
QDLPLDESNVVIPSDTDFLDTWEILIRFQIQRNVIVIPGSITPSHIKENIQVFDFELTQHDMDNILSL
NRNLRLAMFPMVDG

| | | |
|---|---|---|
| NOV45d, CG55778-01 | SEQ ID NO: 685 | 1956 bp |
| DNA Sequence | ORF Start: ATG at 31 | ORF Stop: TGA at 937 |

GGCGGGGCGGCGGGGCGGCCGGCGGCGGCCATGGGAGATATCCCAGCCGTGGGCCTCAGCTCCTGGAA
GCAGGCTTCTCCAGGGAAAGTGACCGAGGCAGTGAAAGAGGCCATTGACGCAGGGTACCGGCACTTCG
ACTGTGCTTACTTTTACCACAATGAGAGGGAGGTTGGAGCAGGGATCCGTTGCAAGATCAAGGAAGGC
GCTGTAAGACGGGAGGATCTGTTCATTGCCACTAAGCTGTGGTGCACCTGCCATAAGAAGTCCTTGGT
GGAAACAGCATGCAGAAAGAGTCTCAAGGCCTTGAAGCTGAACTATTTGGACCTCTACCTCATACACT
GGCCCATGGGTTTCAAGCCTCGAGTGCAGGACTTGCCTCTGGACGAGAGCAACATGGTTATTCCCAGT
GACACGGACTTCCTGGACACGTGGGAGGCCATGGAGGACCTGGTGATCACCGGGCTGGTGAAGAACAT
CGGGGTGTCAAACTTCAACCATGAACAGCTTGAGAGGCTTTTGAATAAGCCTGGGTTGAGGTTCAAGC
CACTAACCAACCAGATTGAGTGCCACCCATATCTTACTCAGAAGAATCTGATCAGTTTTTGCCAATCC
AGAGATGTGTCCGTGACTGCTTACCGTCCTCTTGGTGGCTCTAGTGAGGGGGTTGACCTGATAGACAA
CCCTGTGATCAAGAGGATTGCAAAGGAGCACGGCAAGTCTCCTGCTCAGATTTTGATCCGATTTCAAA
TCCAGAGGAATGTGATAGTGATCCCCGGATCTATCACCCCAAGTCACATTAAAGAGAATATCCAGGTG
TTTGATTTTGAATTAACACAGCACGATATGGATAACATCCTCAGCCTAAACAGGAATCTCCGACTGGC
CATGTTCCCCAGAACTAAAAATCACAAAGACTATCCTTTCCACATAGAATACTGAGGACGCTTCCCCT
TCCT

| | | | |
|---|---|---|---|
| NOV45d, CG55778-01 | | | |
| Protein Sequence | SEQ ID NO: 686 | 302 aa | MW at 34561.5kD |

MGDIPAVGLSSWKQASPGKVTEAVKEAIDAGYRHFDCAYFYHNEREVGAGIRCKIKEGAVRREDLFIA
TKLWCTCHKKSLVETACRKSLKALKLNYLDLYLIHWPMGFKPRVQDLPLDESNMVIPSDTDFLDTWEA
MEDLVITGLVKNIGVSNFNHEQLERLLNKPGLRFKPLTNQIECHPYLTQKNLISFCQSRDVSVTAYRP
LGGSSEGVDLIDNPVIKRIAKEHGKSPAQILIRFQIQRNVIVIPGSITPSHIKENIQVFDFELTQHDM
DNILSLNRNLRLANFPRTKNHKDYPFHIEY

| | | |
|---|---|---|
| NOV45e, CG55778-02 | SEQ ID NO: 687 | 875 bp |
| DNA Sequence | ORF Start: ATG at 23 | ORF Stop: TAA at 776 |

GGCGGGGCGGCCGGCGGCGGCCATGGGAGATATCCCAGCCGTGGGCCTCAGCTCCTGGAAGCAGGCTT
CTCCAGGAAAAGTGACCGAGGCAGTGAAAGAGGCCATTGACGCAGGGTACCGGCACTTCGACTGTGCT
TACTTTTACCACAATGAGAGGGAGGTTGGAGCAGGGATCCGTTGCAAGATCAAGGAAGGCGCTGTAAG
ACGGGAGGATCTGTTCATTGCCACTAAGCTGTGGTGCACCTGCCATAAGAAGTCCTTGGTGGAAACAG
CATGCAGAAAGGGTCTCAAGGCCTTGAAGCTGAACTATTTGGACCTCTACCTCATACACTGGCCCATG
GGTTTCAAGCCTCCTCATCCAGAATGGATCATGAGCTGCAGTGAACTTTCCTTCTGCCTCTCACATCC
TCGAGTGCAGGACTTGCCTCTGGACGAGAGCAACATGGTTATTCCCAGTGACACGGACTTCCTGGACA
CGTGGGAGGCCATGGAGGACCTGGTGATCACCGGGCTGGTGAAGAACATCGGGGTGTCAAACTTCAAC
CATGAACAGCTTGAGAGGCTTTTGAATAAGCCTGGGTTGAGGTTCAAGCCACTAACCAACCAGATTTT
GATCCGATTTCAAATCCAGAGGAATGTGATAGTGATCCCCGGATCTATCACCCCAAGTCACATTAAAG
AGAATATCCAGGTGTTTGATTTTGAATTAACACAGCACGATATGGATAACATCCTCAGCCTAAACAGG
AATCTCCGACTGGCCATGTTCCCCATGTAAATATGGCTCCTTCTTTTTAAAACAGAGGGAAGAATATA
CAGATTGAATGATTGGTGTCTGAATAGAACTAAAAATCACAAAGACTATCCTTTCCACA

| | | | |
|---|---|---|---|
| NOV45e, GG55778-02 | | | |
| Protein Sequence | SEQ ID NO: 688 | 251 aa | MW at 28765.1kD |

MGDIPAVGLSSWKQASPGKVTEAVKEAIDAGYRHFDCAYFYHNEREVGAGIRCKIKEGAVRREDLFIA
TKLWCTCHKKSLVETACRKGLKALKLNYLDLYLIHWPMGFKPPHPEWIMSCSELSFCLSHPRVQDLPL
DESNMVIPSDTDFLDTWEAMEDLVITGLVKNIGVSNFNHEQLERLLNKPGLRFKPLThQILIRFQIQR
NVIVIPGSITPSHIKENIQVFDFELTQHDMDNILSLNRNLRLAMFPM

| | | |
|---|---|---|
| NOV45f, GG55778-04 | SEQ ID NO: 689 | 785 bp |
| DNA Sequence | ORF Start: ATG at 31 | ORF Stop: TGA at 766 |

GGCGGGGCGGCGGGGCGGCCGGCGGCGGCCATGGGAGATATCCCAGCCGTGGGCCTCAGCTCCTGGAA
GCAGGCTTCTCCAGGGAAAGTGACCGAGGCAGTGAAAGAGGCCATTGACGCAGGGTACCGGCACTTCG
ACTGTGCTTACTTTTACCACAATGAGAGGGAGGTTGGAGCAGGGATCCGTTGCAAGATCAAGGAAGGC
GCTGTAAGACGGGAGGATCTGTTCATTGCCACTAAGCTGTGGTGCACCTGCCATAAGAAGTCCTTGGT
GGAAACAGCATGCAGAAAGAGTCTCAAGGCCTTGAAGCTGAACTATTTGGACCTCTACCTCATACACT
GGCCCATGGGTTTCAAGCCTCGAGTGCAGGACTTGCCTCTGGACGAGAGCAACATGGTTATTCCCAGT
GACACGGACTTCCTGGACACGTGGGAGGCCATGGAGGACCTGGTGATCACCGGGCTGGTGAAGAACAT
CGGGGTGTCAAACTTCAACCATGAACAGCTTGAGAGGCTTTTGAATAAGCCTGGGTTGAGGTTCAAGC
CACTAACCAACCAGATTTTGATCCGATTTCAAATCCAGAGGAATGTGATAGTGATCCCCGGATCTATC
ACCCCAAGTCACATTAAAGAGAATATCCAGGTGTTTGATTTTGAATTAACACAGCACGATATGGATAA
CATCCTCAGCCTAAACAGGAATCTCCGACTGGCCATGTTCCCCAGAACTAAAAATCACAAAGACTATC
CTTTCCACATAGAATACTGAGGACGCTTCCCCTTCCT

| | | | |
|---|---|---|---|
| NOV45f, CG55778-04 | | | |
| Protein Sequence | SEQ ID NO: 690 | 245 aa | MW at 28311.4kD |

MGDIPAVGLSSWKQASPGKVTEAVKEAIDAGYRHFDCAYFYHNEREVGAGIRCKIKEGAVRREDLFIA
TKLWCTCHKKSLVETACRKSLKALKLNYLDLYLIHWPMGFKPRVQDLPLDESNNVIPSDTDFLDTWEA
MEDLVITGLVKNIGVSNFNHEQLERLLNKPGLRFKPLTNQILIRFQIQRNVIVIPGSITPSHIKENIQ
VFDFELTQHDMDNILSLNRNLRLANFPRTKNHKDYPFHIEY

| | | |
|---|---|---|
| NOV45g, CG55778-05 | SEQ ID NO: 691 | 937 bp |
| DNA Sequence | ORF Start: ATG at 31 | ORF Stop: TAA at 838 |

GGCGGGGCGGCGGGGCGGCCGGCGGCGGCCATGGGAGATATCCCAGCCGTGGGCCTCAGCTCCTGGAA
GCAGGCTTCTCCAGGGAAAGTGACCGAGGCAGTGAAAGAGGCCATTGACGCAGGGTACCGGCACTTCG
ACTGTGCTTACTTTTACCACAATGAGAGGGAGGTTGGAGCAGGGATCCGTTGCAAGATCAAGGAAGGC
GCTGTAAGACGGGAGGATCTGTTCATTGCCACTAAGCCTCCTCATCCAGAATGGATCATGAGCTGCAG
TGAACTTTCCTTCTGCCTCTCACATCCTCGAGTGCAGGACTTGCCTCTGGACGAGAGCAACATGGTTA
TTCCCAGTGACACGGACTTCCTGGACACGTGGGAGGCCATGGAGGACCTGGTGATCACCGGGCTGGTG
AAGAACATCGGGGTGTCAAACTTCAACCATGAACAGCTTGAGAGGCTTTTGAATAAGCCTGGGTTGAG
GTTCAAGCCACTAACCAACCAGATTGAGTGCCACCCATATCTTACTCAGAAGAATCTGATCAGTTTTT
GCCAATCCAGAGATGTGTCCGTGACTGCTTACCGTCCTCTTGGTGGCTCGTGTGAGGGGGTTGACCTG
ATAGACAACCCTGTGATCAAGAGGATTGCAAAGGAGCACGGCAAGTCTCCTGCTCAGATTTTGATCCG
ATTTCAAATCCAGAGGAATGTGATAGTGATCCCCGGATCTATCACCCCAAGTCACATTAAAGAGAATA
TCCAGGTGTTTGATTTTGAATTAACACAGCACGATATGGATAACATCCTCAGCCTAAACAGGAATCTC
CGACTGGCCATGTTCCCCATGTAAATATGGCTCCTTCTTTTTAAAACAGAGGGAAGAATATACAGATT
GAATGATTGGTGTCTGAATAGAACTAAAAATCACAAAGACTATCCTTTCCACA

| | | | |
|---|---|---|---|
| NOV45g, CG55778-05 | | | |
| Protein Sequence | SEQ ID NO: 692 | 269 aa | MW at 30426.6kD |

MGDIPAVGLSSWKQASPGKVTEAVKEAIDAGYRHFDCAYFYHNEREVGAGIRCKIKEGAVRREDLFIA
TKPPHPEWIMSCSELSFCLSHPRVQDLPLDESNMVIPSDTDFLDTWEANEDLVITGLVKNIGVSNFNH
EQLERLLNKPGLRFKPLTNQIECHPYLTQKNLISFCQSRDVSVTAYRPLGGSCEGVDLIDNPVIKRIA
KEHGKSPAQILIRFQIQRNVIVIPGSITPSHIKENIQVFDFELTQHDMDNILSLNRNLRLANFPM

| | | |
|---|---|---|
| NOV45h, CG55778-07 | SEQ ID NO: 693 | 1527 bp |
| DNA Sequence | ORF Start: ATG at 21 | ORF Stop: TGA at 981 |

CGGGGCGGCCGGCGGCGGCCATGGGAGATATCCCAGCCGTGGGCCTCAGCTCCTGGAAGGCTTCTCCA
GGGAAAGTGACCGAGGCAGTGAAAGAGGCCATTGACGCAGGGTACCGGCACTTCGACTGTGCTTACTT
TTACCACAATGAGAGGGAGGTTGGAGCAGGGATCCGTTGCAAGATCAAGGAAGGCGCTGTAAGACGGG
AGGATCTGTTCATTGCCACTAAGCTGTGGTGCACCTGCCATAAGAAGTCCTTGGTGGAAACAGCATGC
AGAAAGAGTCTCAAGGCCTTGAAGCTGAACTATTTGGACCTCTACCTCATACACTGGCCCATGGGTTT
CAAGCCTCCTCATCCAGAATGGATCATGAGCTGCAGTGAACTTTCCTTCTGCCTCTCACATCCTCGAG
TGCAGGACTTGCCTCTGGACGAGAGCAACATGGTTATTCCCAGTGACACGGACTTCCTGGACACGTGG
GAGGCCATGGAGGACCTGGTGATCACCGGGCTGGTGAAGAACATCGGGGTGTCAAACTTCAACCATGA
ACAGCTTGAGAGGCTTTTGAATAAGCCTGGGTTGAGGTTCAAGCCACTAACCAACCAGATTGAGTGCC
ACCCATATCTTACTCAGAAGAATCTGATCAGTTTTTGCCAATCCAGAGATGTGTCCGTGACTGCTTAC
CGTCCTCTTGGTGGCTCGTGTGAGGGGGTTGACCTGATAGACAACCCTGTGATCAAGAGGATTGCAAA
GGAGCACGGCAAGTCTCCTGCTCAGATTTTGATCCGATTTCAAATCCAGAGGAATGTGATAGTGATCC
CCGGATCTATCACCCCAAGTCACATTAAAGAGAATATCCAGGTGTTTGATTTTGAATTAACACAGCAC
GATATGGATAACATCCTCAGCCTAAACAGGAATCTCCGACTGGCCATGTTCCCCATAACTAAAAATCA
CAATGACTATCCTTTCCACATAGAATACTGAGGACGCTTCCCCTTCCTTGTTTCTGCTCAGCCCAGAT
GCACAGACACTATTGGCAATGTTGACCCTCCTCTGTCATCACAGCGCCAGGGCAGCTGTGCCTGGGAC
AGGAGCCACACAGTCAGAGGGGGATGTAAGAGCCACCTTCTCTGACAAATCTGGAGAATTGAGTGTGT
TCTAAGTGAAGGCAATGGGGTTTCTCCAAGACAGCCTGTGTGGCCTCTACTCTGAACAAATACACTGA
TGAGTCATCAGTGAAATTTGCCTTCACATTTTAAGAAAACTTTATCTTATGGAGTTATTTAAGCCATC
TACAGAGCTGAGGAAACAGTGTAATGTGTCTCTGCCCCATTGCGCAGCTCCACCCATTGTGCCCCAGG
CCAGCCCGCGTCACCTACACTTCCTTCTGTGCCCTGCCAGTGACCCCCAGGTTATTCTAAAGCAGAGT
CCTTCCCTTCCCCCAGTGAGAAGGAAAATGGGATAAGTCTGGGACACTGTTTCAGTTCAATAAAGAGG
CTTTTTTCTTCCTTAAAAAAAAAAAAAAAAA

| | | | |
|---|---|---|---|
| NOV45h, CG55778-07 | | | |
| Protein Sequence | SEQ ID NO: 694 | 320 aa | MW at 36574.8kD |

MGDIPAVGLSSWKASPGKVTEAVKEAIDAGYRHFDCAYFYHNEREVGAGIRCKIKEGAVRREDLFIAT
KLWCTCHKKSLVETACRKSLKALKLNYLDLYLIHWPMGFKPPHPEWIMSCSELSFCLSHPRVQDLPLD
ESNMVIPSDTDFLDTWEAMEDLVITGLVKNIGVSNFNHEQLERLLNKPGLRFKPLTNQIECHPYLTQK
NLISFCQSRDVSVTAYRPLGGSCEGVDLIDNPVIKRIAKEHGKSPAQILIRFQIQRNVIVIPGSITPS
HIKENIQVFDFELTQHDMDNILSLNRNLRLANFPITKNHNDYPFHIEY

| | | |
|---|---|---|
| NOV45i, CG55778-08 | SEQ ID NO: 695 | 1680 bp |
| DNA Sequence | ORF Start: ATG at 101 | ORF Stop: TAA at 1022 |

GGCACGAGGACGGCGGGTCGCCAGCGCCTCAGTAGCTCGCGCGGTGCCTGTCGGTAGTCGCGTGCGGG
GCGGCGGGGCGGCGGGGCGGCCGGCGGCGGCCATGGGAGATATCCCAGCCGTGGGCCTCAGCTCCTGG
AAGGCTTCTCCAGGGAAAGTGACCGAGGCAGTGAAAGAGGCCATTGACGCAGGGTACCGGCACTTCGA
CTGTGCTTACTTTTACCACAATGAGAGGGAGGTTGGAGCAGGGATCCGTTGCAAGATCAAGGAAGGCG
CTGTAAGACGGGAGGATCTGTTCATTGCCACTAAGCTGTGGTGCACGTGCCATAAGAAGTCCTTGGTG
GAAACAGCATGCAGAAAGAGTCTCAAGGCCTTGAAGCTGAACTATTTGGACCTCTACCTCATACACTG
GCCCATGGGTTTCAAGCCTCCTCATCCAGAATGGATCATGAGCTGCAGTGAACTTTCCTTCTGCCTCT
CACATCCTCGAGTGCAGGACTTGCCTCTGGACGAGAGCAACATGGTTATTCCCAGTGACACGGACTTC
CTGGACACGTGGGAGGCCATGGAGGACCTGGTGATCACCGGGCTGGTGAAGAACATCGGGGTGTCAAA
CTTCAACCATGAACAGCTTGAGAGGCTTTTGAATAAGCCTGGGTTGAGGTTCAAGCCACTAACCAACC
AGATTGAGTGCCACCCATATCTTACTCAGAAGAATCTGATCAGTTTTTGCCAATCCAGAGATGTGTCC
GTGACTGCTTACCGTCCTCTTGGTGGCTCGTGTGAGGGGGTTGACCTGATAGACAACCCTGTGATCAA
GAGGATTGCAAAGGAGCACGGCAAGTCTCCTGCTCAGATTTTGATCCGATTTCAAATCCAGAGGAATG
TGATAGTGATCCCCGGATCTATCACCCCAAGTCACATTAAAGAGAATATCCAGGTGTTTGATTTTGAA
TTAACACAGCACGATATGGATAACATCCTCAGCCTAAACAGGAATCTCCGACTGGCCATGTTCCCCAT
GTAAATATGGCTCCTTCTTTTTAAAACAGAGGGAAGAATATACAGATTGAATGATTGGTGTCTGAATA
GAACTAAAAATCACAAAGACTATCCTTTCCACATAGAATACTGAGGACGCTTCCCCTTCCTTGTTTCT
GCTCAGCCCAGATGCACAGACACTATTGGCAATGTTGACCCTCCTCTGTCATCACAGCGCCAGGGCAG
CTGTGCCTGGGACAGGAGCCACACAGTCAGAGGGGGATGTAAGAGCCACCTTCTCTGACAAATCTGGA
GAATTGAGTGTGTTCTAAGTGAAGGCAATGGGGTTTCTCCAAGACAGCCTGTGTGGCCTCTACTCTGA
ACAAATACACTGATGAGTCATCAGTGAAATTTGCCTTCACATTTTAAGAAAACTTTATCTTATGGAGT
TATTTAAGCCATCTACAGAGCTGAGGAAACAGTGTAATGTGTCTCTGCCCCATTGCGCAGCTCCACCC
ATTGTGCCCCAGGCCAGCCCGCGTCACCTACACTTCCTTCTGTGCCCTGCCAGTGACCCCCAGGTTAT
TCTAAAGCAGAGTCCTTCCCTTCCCCCAGTGAGAAGGAAAATGGGATAAGTCTGGGACACTGTTTCAG
TTCAATAAGAGGCTTTTTTCTTCCTTAAAAAAAAAAAAAAAAAAAAAA

| | | | |
|---|---|---|---|
| NOV45i, CG55778-08 | | | |
| Protein Sequence | SEQ ID NO: 696 | 307 aa | MW at 34933.0kD |

MGDIPAVGLSSWKASPGKVTEAVKEAIDAGYRHFDCAYFYHNEREVGAGIRCKIKEGAVRREDLFIAT
KLWCTCHKKSLVETACRKSLKALKLNYLDLYLIHWPMGFKPPHPEWIMSCSELSFCLSHPRVQDLPLD
ESNMVIPSDTDFLDTWEAMEDLVITGLVKNIGVSNFNHEQLERLLNKPGLRFKPLTNQIECHPYLTQK
LISFCQSRDVSVTAYRPLGGSCEGVDLIDNPAVIKRIAKEHGKSPAQILIRFQIQRNVIVIPGSITPS
HIKENIQVFDFELTQHDMDNILSLNRNLRLAMFPM

| | | |
|---|---|---|
| NOV45j, | | |
| SNP13375813 of | SEQ ID NO: 697 | 752 bp |
| CG55778-03, | ORF Start: ATG at 23 | ORF Stop: TAA at 653 |
| DNA Sequence SNP Pos: 624 | SNP Change: A to G | |

GGCGGGGCGGCCGGCGGCGGCCATGGGAGATATCCCAGCCGTGGGCCTCAGCTCCTGGAAGCAGGCTT
CTCCAGGTAAAGTGACCGAGGCAGTGAAAGAGGCCATTGACGCAGGGTACCGGCACTTCGACTGTGCT
TACTTTTACCACAATGAGAGGGAGGTTGGAGCAGGGATCCGTTGCAAGATCAAGGAAGGCGCTGTAAG
ACGGGAGGATCTGTTCATTGCCACTAAGCTGTGGTGCACCTGCCATAAGAAGTCCTTGGTGGAAACAG
CATGCAGAAAGAGTCTCAAGGCCTTGAAGCTGAACTATTTGGACCTCTACCTCATACACTGGCCCATG
GGTTTCAAGCCTCCTCATCCAGAATGGATCATGAGCTGCAGTGAACTTTCCTTCTGCCTCTCACATCC
TCGAGTGCAGGACTTGCCTCTGGACGAGAGCAACATGGTTATTCCCAGTGACACGGACTTCCTGGACA
CGTGGGAGATTTTGATCCGATTTCAAATCCAGAGGAATGTGATAGTGATCCCCGGATCTATCACCCCA
AGTCACATTAAAGAGAATATCCAGGTGTTTGATTTTGAATTAACACAGCACGATATGGATAACATCCT
CAGCCTAAACAGGAATCTCCGACTGGCCATGTTCCCCATGTAAATATGGCTCCTTCTTTTTAAAACAG
AGGGAAGAATATACAGATTGAATGATTGGTGTCTGAATAGAACTAAAAATCACAAAGACTATCCTTTC
CACA

| | | | |
|---|---|---|---|
| NOV45j, | | | |
| SNP13375813 of | | | |
| CG55778-03, | SEQ ID NO: 698 | | MW at24164.7kD |
| Protein Sequence SNP Pos: 201 | 210 aa | SNP Change: Lys to Arg | |

MGDIPAVGLSSWKQASPGKVTEAVKEAIDAGYRHFDCAYFYHNEREVGAGIRCKIKEGAVRREDLFIA
TKLWCTCHKKSLVETACRKSLKALKLNYLDLYLIHWPMGFKPPHPEWIMSCSELSFCLSHPRVQDLPL
DESNMVIPSDTDFLDTWEILIRFQIQRNVIVIPGSITPSHIKENIQVFDFELTQHDMDNILSLNRNLR
LAMFPM

[0608] A ClustalW comparison of the above protein sequences yields the following sequence alignment shown in Table 45B.

TABLE 45B

Comparison of the NOV45 protein sequences.

| | |
|---|---|
| NOV45a | -----MGDIPAVGLSSWKQASPGKVTEAVKEAIDAGYRHFDCAYFYHNEREVGAGIRCKI |
| NOV45b | -----MGDIPAVGLSSWKAS-PGKVTEAVKEAIDAGYRHFDCAYFYHNEREVGAGIRCKI |
| NOV45c | TRSPTMGDIPAVGLSSWKQASPGKVTEAVKEAIDAGYRHFDCAYFYHNEREVGAGIRCKI |
| NOV45d | -----MGDIPAVGLSSWKQASPGKVTEAVKEAIDAGYRHFDCAYFYHNEREVGAGIRCKI |
| NOV45e | -----MGDIPAVGLSSWKQASPGKVTEAVKEAIDAGYRHFDCAYFYHNEREVGAGIRCKI |
| NOV45f | -----MGDIPAVGLSSWKQASPGKVTEAVKEAIDAGYRHFDCAYFYHNEREVGAGIRCKI |
| NOV45g | -----MGDIPAVGLSSWKQASPGKVTEAVKEAIDAGYRJHFDCAYFYHNERVGAGIRCKI |
| NOV45h | -----MGDIPAVGLSSWKAS-PGKVTEAVKEAIDAGYRHFDCAYFYHNEREVGAGIRCKI |
| NOV45i | -----MGDIPAVGLSSWKAS-PGKVTEAVKEAIDAGYRHFDCAYFYHNEREVGAGIRCKI |
| NOV45a | KEGAVRREDLFIATKLWCTCHKKSLVETACRKSLKALKLNYLDLYLIHWPMGFKPPHPEW |
| NOV45b | KEGAVRREDLFIAT---------------------------------------KPPHPEW |
| NOV45c | KEGAVRREDLFIATKLWCTCHKKSLVETACRKSLKALKLNYLDLYLIHWPMGFKPPHPEW |
| NOV45d | KEGAVRREDLFIATKLWCTCHKKSLVETACR-------------------KSLKALKLNY |
| NOV45e | KEGAVRREDLFIATKLWCTCHKKSLVETACRKGLKALKLNYLDLYLIHWPMGFKPPHPEW |
| NOV45f | KEGAVRREDLFIATKLWCTCHKKSLVETACR-------------------KSLKALKLNY |
| NOV45g | KEGAVRREDLFIAT---------------------------------------KPPHPEW |
| NOV45h | KEGAVRREDLFIATKLWCTCHKKSLVETACRKSLKALKLNYLDLYLIHWPMGFKPPHPEW |
| NOV45i | KEGAVRREDLFIATKLWCTCHKKSLVETACRKSLKALKLNYLDLYLIHWPMGFKPPHPEW |
| NOV45a | IMSCSELSFCLSHPRVQDLPLDESNMVIPSDTDFLDTWE--------------------- |
| NOV45b | IMSCSELSFCLSHPRVQDLPLDESNNVIPSDTDFLDTWE--------------------- |
| NOV45c | IMSCSELSFCLSHPRVQDLPLDESNVVIPSDTDFLDTWE--------------------- |
| NOV45d | LDLYLIHWPMGFKPRVQDLPLDESNMVIPSDTDFLDTWEAMEDLVITGLVKNIGVSNFNH |
| NOV45e | IMSCSELSFCLSHPRVQDLPLDESNMVIPSDTDFLDTWEAMEDLVITGLVKNIGVSNFNH |
| NOV45f | LDLYLIHWPMGFKPRVQDLPLDESNNVIPSDTDFLDTWEAMEDLVITGLVKNIGVSNFNH |
| NOV45g | IMSCSELSFCLSHPRVQDLPLDESNMVIPSDTDFLDTWEANEDLVITGLVKNIGVSNFNH |
| NOV45h | IMSCSELSFCLSHPRVQDLPLDESNNVIPSDTDFLDTWEAMEDLVITGLVKNIGVSNFNH |
| NOV45i | IMSCSELSFCLSHPRVQDLPLDESNNVIPSDTDFLDTWEAMEDLVITGLVKNIGVSNFNH |
| NOV45a | ------------------------------------------------------------ |
| NOV45b | ---------------------------------------------------------IL- |
| NOV45c | ------------------------------------------------------------ |
| NOV45d | EQLERLLNKPGLRFKPLTNQIECHPYLTQKNLISFCQSRDVSVTAYRPLGGSSEGVDLID |
| NOV45e | EQLERLLNKPGLRFKPLTN----------------------------------------- |
| NOV45f | EQLERLLNKPGLRFKPLT------------------------------------------ |
| NOV45g | EQLERLLNKPGLRFKPLTNQIECHPYLTQKNLISFCQSRDVSVTAYRPLGGSCEGVDLID |
| NOV45h | EQLERLLNKPGLRFKPLTNQIECHPYLTQKNLISFCQSRDVSVTAYRPLGGSCEGVDLID |
| NOV45i | EQLERLLNKPGLRFKPLTNQIECHPYLTQKNLISFCQSRDVSVTAYRPLGGSCEGVDLID |
| NOV45a | -----------------ILIRFQIQRNVIVIPGSITPSHIKENIQVFDFELTQHDMDNIL |
| NOV45b | ---------------I--LIRFQIQRNVIVIPGSITPSHIKENIQVFDFELTQHDMDNIL |
| NOV45c | -----------------ILIRFQIQRNVIVIPGSITPSHIKENIQVFDFELTQHDMDNIL |
| NOV45d | NPVIKRIAKEHGKSPAQILIRFQIQRNVIVIPGSITPSHIKENIQVFDFELTQHDMDNIL |
| NOV45e | ----------------QILIRFQIQRNVIVIPGSITPSHIKENIQVFDFELTQHDMDNIL |
| NOV45f | --------N-------QILIRFQIQRNVIVIPGSITPSHIKENIQVFDFELTQHDMDNIL |
| NOV45g | NPVIKRIAKEHGKSPAQILIRFQIQRNVIVIPGSITPSHIKENIQVFDFELTQHDMDNIL |
| NOV45h | NPVIKRIAKEHGKSPAQILIRFQIQRNVIVIPGSITPSHIKENIQVFDFELTQHDMDNIL |
| NOV45i | NPVIKRIAKEHGKSPAQILIRFQIQRNVIVIPGSITPSHIKENIQVFDFELTQHDMDNIL |
| NOV45a | SLNKNLRLAMFPM------------- |
| NOV45b | SLNRNLRLAMFPITKNHKDYPFHIEY |
| NOV45c | SLNRNLRLANFPMVDG---------- |
| NOV45d | SLNRNLRLAMFPRTKNHKDYPFHIEY |
| NOV45e | SLNRNLRLANFPM------------- |
| NOV45f | SLNRNLRLAMFPRTKNHKDYPFHIEY |
| NOV45g | SLNRNLRLAMFPM------------- |
| NOV45h | SLNRNLRLAMFPITKNHNDYPFHIEY |
| NOV45i | SLNRNLRLAMFPM------------- |
| NOV45a | (SEQ ID NO: 680) |
| NOV45b | (SEQ ID NO: 682) |
| NOV45C | (SEQ ID NO: 684) |
| NOV45d | (SEQ ID NO: 686) |
| NOV4Se | (SEQ ID NO: 688) |
| NOV45f | (SEQ ID NO: 690) |
| NOV45g | (SEQ ID NO: 692) |
| NOV45h | (SEQ ID NO: 694) |
| NOV45i | (SEQ ID NO: 696) |

[0609] Further analysis of the NOV45a protein yielded the following properties shown in Table 45C.

TABLE 45C
Protein Sequence Properties NOV45a

| | |
|---|---|
| SignalP analysis: | No Known Signal Sequence Indicated |
| PSORT II analysis: | |

| PSG: | a new signal peptide prediction method | | | |
|---|---|---|---|---|
| | N-region: | length 3; | pos.chg 0; | neg.chg 1 |
| | H-region: | length 9; | peak value | 0.00 |

| | PSG score: −4.40 |
|---|---|
| GvH: | von Heijne's method for signal seq. recognition |
| | GvH score (threshold: −2.1): −6.56 |
| | possible cleavage site: between 18 and 19 |

>>> Seems to have no N-terminal signal peptide

| | |
|---|---|
| ALOM: | Klein et al's method for TM region allocation |
| | Init position for calculation: 1 |
| | Tentative number of TMS(s) for the threshold 0.5: 0 |
| | number of TMS(s) . . . fixed |
| | PERIPHERAL Likelihood = 6.21 (at 155) |
| | ALOM score: 6.21 (number of TMSs: 0) |

MITDISC: discrimination of mitochondrial targeting seq

| | | | |
|---|---|---|---|
| R content: | 0 | Hyd Moment(75): | 5.33 |
| Hyd Moment(95): | 5.59 | G content: | 3 |
| D/E content: | 2 | S/T content: | 4 |
| Score: −7.44 | | | |

| | |
|---|---|
| Gavel: | prediction of cleavage sites for mitochondrial preseq |
| | cleavage site motif not found |

NUCDISC: discrimination of nuclear localization signals

pat4: none
pat7: none
bipartite: none
content of basic residues: 11.4%
NLS Score: −0.47

KDEL: ER retention motif in the C-terminus: none
ER Membrane Retention Signals: none
SKL: peroxisomal targeting signal in the C-terminus: none
PTS2: 2nd peroxisomal targeting signal: none
VAC: possible vacuolar targeting motif: none
RNA-binding motif: none
Actinin-type actin-binding motif:

type 1: none
type 2: none

NMYR: N-myristoylation pattern: none
Prenylation motif: none
memYQRL: transport motif from cell surface to Golgi: none
Tyrosines in the tail: none
Dileucine motif in the tail: none
checking 63 PROSITE DNA binding motifs: none
checking 71 PROSITE ribosomal protein motifs: none
checking 33 PROSITE prokaryotic DNA binding motifs: none
NNCN: Reinhardt's method for Cytoplasmic/Nuclear discrimination

| | Prediction: cytoplasmic |
|---|---|
| | Reliability: 89 |
| COIL: | Lupas's algorithm to detect coiled-coil regions |
| | total: 0 residues |

Final Results (k = 9/23):

52.2%: cytoplasmic
34.8%: nuclear
13.0%: mitochondrial

>> prediction for CG55778-03 is cyt (k = 23)

[0610] A search of the NOV45a protein against the Geneseq database, a proprietary database that contains sequences published in patents and patent publication, yielded several homologous proteins shown in Table 45D.

TABLE 45D
Geneseq Results for NOV45a

| | | NOV45a | Identities/ | |
|---|---|---|---|---|
| | | Residues/ | Similarities for | |
| Geneseq | Protein/Organism/Length | Match | the Matched | Expect |
| Identifier | [Patent #, Date] | Residues | Region | Value |
| ABP53592 | Human NOV16c protein SEQ | 1 . . . 210 | 210/210 (100%) | e−124 |
| | ID NO: 48 - Homo sapiens, 210 | 1 . . . 210 | 210/210 (100%) | |
| | aa. [WO200262999-A2, 15- | | | |
| | AUG-2002] | | | |
| ABP53591 | Human NOV16b protein SEQ | 1 . . . 210 | 208/251 (82%) | e−117 |
| | ID NO: 46 - Homo sapiens, 251 | 1 . . . 251 | 209/251 (82%) | |
| | aa. [WO200262999-A2, 15- | | | |
| | AUG-2002] | | | |
| AAM79279 | Human protein SEQ ID NO | 1 . . . 210 | 205/251 (81%) | e−114 |
| | 1941 - Homo sapiens, 263 aa. | 1 . . . 250 | 207/251 (81%) | |
| | [WO200157190-A2, 09-AUG- | | | |
| | 2001] | | | |
| ABU11795 | Human MDDT polypeptide SEQ | 1 . . . 156 | 152/156 (97%) | 5e−89 |
| | ID 742 - Homo sapiens, 215 aa. | 31 . . . 185 | 154/156 (98%) | |
| | [WO200279449-A2, 10-OCT- | | | |
| | 2002] | | | |
| AAM80263 | Human protein SEQ ID NO | 1 . . . 156 | 151/156 (96%) | 3e−88 |
| | 3909 - Homo sapiens, 264 aa. | 11 . . . 165 | 152/156 (96%) | |
| | [WO200157190-A2, 09-AUG- | | | |
| | 2001] | | | |

[0611] In a BLAST search of public sequence databases, the NOV45a protein was found to have homology to the proteins shown in the BLASTP data in Table 45E.

TABLE 45E
Public BLASTP Results for NOV45a

| | | NOV45a | Identities/ | |
|---|---|---|---|---|
| Protein | | Residues/ | Similarities for | |
| Accession | | Match | the Matched | Expect |
| Number | Protein/Organism/Length | Residues | Portion | Value |
| BAC54567 | Aldo-keto reductase related | 1 . . . 210 | 207/210 (98%) | e−121 |
| | protein 3 - Homo sapiens | 1 . . . 209 | 209/210 (98%) | |
| | (Human), 222 aa. | | | |
| BAC54565 | Aldo-keto reductase related | 1 . . . 210 | 208/251 (82%) | e−115 |
| | protein 1 - Homo sapiens | 1 . . . 250 | 209/251 (82%) | |
| | (Human), 250 aa. | | | |
| BAC54566 | Aldo-keto reductase related | 1 . . . 210 | 207/251 (82%) | e−115 |
| | protein 2 - Homo sapiens | 1 . . . 250 | 209/251 (82%) | |
| | (Human), 263 aa. | | | |
| Q9BU71 | Similar to aldo-keto reductase - | 1 . . . 156 | 153/156 (98%) | 6e−89 |
| | Homo sapiens (Human), 307 aa. | 1 . . . 155 | 154/156 (98%) | |
| Q96JD6 | Aldo-keto reductase loopADR - | 1 . . . 156 | 153/156 (98%) | 6e−89 |
| | Homo sapiens (Human), 320 aa. | 1 . . . 155 | 154/156 (98%) | |

[0612] PFam analysis indicates that the NOV45a protein contains the domains shown in the Table 45F.

TABLE 45F
Domain Analysis of NOV45a

| | NOV45a | Identities/Similarities | Expect |
|---|---|---|---|
| Pfam Domain | Match Region | for the Matched Region | Value |
| aldo_ket_red | 2 . . . 203 | 87/369 (24%) | 8.2e−37 |
| | | 157/369 (43%) | |

### Example 46

[0613] The NOV46 clone was analyzed, and the nucleotide and encoded polypeptide sequences are shown in Table 46A.

TABLE 46A

NOV46 Sequence Analysis

| | | |
|---|---|---|
| NOV46a, CG55794-03 | SEQ ID NO: 699 | 1222 bp |
| DNA Sequence | ORF Start: ATG at 41 | ORF Stop: TAA at 1163 |

CCAGAGAGGCCCAGAATTTTCTAACTTACTGTGTGGCAGAATGAAGCCTCTGCTTGAAACCCTTTATC
TTTTGGGGATGCTGGTTCCTGGAGGGCTGGGATATGATAGATCCTTAGCCCAACACAGACAAGAGATT
GTGGACAAGTCAGTGAGTCCATGGAGCCTGGAGACGTATTCCTATAACATATACCACCCCATGGGAGA
GATCTATGAGTGGATGAGAGAGATCAGTGAGAAGTACAAGGAAGTGGTGACACAGCAATTCCTAGGAG
TGACCTATGAGACCCACCCCATATATTATCTGAAGATCAGCCAACCATCTGGTAATCCCAAGAAAATC
ATTTGGATGGACTGTGGAATTCACGCCAGAGAATGGATTGCTCCTGCTTTTTGCCAATGGTTCGTCAA
AGAAATTCTACAAAACCATAAAGACAACTCAAGGATACGCAAGCTCCTTAGGAACCTGGACTTCTATG
TCCTTCCAGTTCTTAACATAGATGGTTATATCTACACTTGGACAACTGATCGTCTTTGGAGGAAATCC
CGTTCACCCCATAATAATGGCACATGTTTTGGGACGGATCTCAATCGAAATTTCAATGCTTCTTGGTG
TAGTATTGGTGCCTCTAGAAACTGCCAAGATCAAACATTCTGTGGGACAGGGCCAGTGTCTGAACCAG
AGACTAAAGCTGTTGCCAGCTTCATAGAGAGCAAGAAGGATGATATTTTGTGCTTCCTGACCATGCAC
TCTTATGGGCAGTTAATTCTCACACCTTACGGCTACACCAAAAATAAATCAAGTAACCACCCAGAAAT
GATTCAAGTTGGACAGAAGGCAGCAAATGCATTGAAAGCAAAGTATGGAACCAATTATAGAGTTGGAT
CGAGTGCAGATATTTTATATGCCTCATCAGGGTCTTCAAGAGATTGGGCCCGAGACATTGGGATTCCC
TTCTCATATACGTTTGAGCTGAGGGACAGTGGAACATATGGGTTTGTTCTGCCAGAAGCTCAGATCCA
GCCCACCTGTGAGGAGACCATGGAGGCTGTGCTGTCAGTCCTGGATGATGTGTATGCGAAACACTGGC
ACTCGGACAGTGCTGGAAGGGTGACATCTGCCACTATGCTGCTGGGCCTGCTGGTGTCCTGCATGTCT
CTTCTCTAAGTGCATTCTGCCCAGGCCTGCTCAACCCCAGTGGCATGAGTGTGGCTTGGAGGAACG

| | | | |
|---|---|---|---|
| NOV46a, CG55794-03 | | | |
| Protein Sequence | SEQ ID NO: 700 | 1374 aa | MW at 42580.0kD |

MKPLLETLYLLGMLVPGGLGYDRSLAQHRQEIVDKSVSPWSLETYSYNIYHPMGEIYEWNREISEKYK
EVVTQHFLGVTYETHPIYYLKISQPSGNPKKIIWMDCGIHAREWIAPAFCQWFVKEILQNHKDNSRIR
KLLRNLDFYVLPVLNIDGYIYTWTTDRLWRKSRSPHNNGTCFGTDLNRNFNASWCSIGASRNCQDQTF
CGTGPVSEPETKAVASFIESKKDDILCFLTMHSYGQLILTPYGYTKNKSSNHPEMIQVGQKAANALKA
KYGTNYRVGSSADILYASSGSSRDWARDIGIPFSYTFELRLSGTYGFVLPEAQIQPTCEETMEAVLSV
LDDVYAKHWHSDSAGRVTSATMLLGLLVSCMSLL

| | | |
|---|---|---|
| NOV46b, 210223559 | SEQ ID NO: 701 | 1579 bp |
| DNA Sequence | ORF Start: at 67 | ORf Stop: TAA at 1396 |

CCAATTGACAAGCTTTTGATTTTAACGACTTTTAACGACAACTTGAGAAGATCAAAAAACAACTAATT
ATTCGAAACGATGAGATTTCCTTCAATTTTTACTGCTGTTTTATTCGCAGCATCCTCCGCATTAGCTG
CTCCAGTCAACACTACAACAGAAGATGAAACGGCACAAATTCCGGCTGAAGCTGTCATCGGTTACTCA
GATTTAGAAGGGGATTTCGATGTTGCTGTTTTGCCATTTTCCAACAGCACAAATAACGGGTTATTGTT
TATAAATACTACTATTGCCAGCATTGCTGCTAAAGAAGAAGGGGTATCTCTCGAGAAAAGATATGATA
GATCCTTAGCCCAACACAGACAAGAGATTGTGGACAAGTCAGTGAGTCCATGGAGCCTGGAGACGTAT
TCCTATAACATATACCACCCCATGGGAGAGATCTATGAGTGGATGAGAGAGATCAGTGAGAAGTACAA
GGAAGTGGTGACACAGCATTTCCTAGGAGTGACCTATGAGACCCACCCCATGTATTATCTGAAGATCA
GCCAACCATCTGGTAATCCCAAGAAAATCATTTGGATGGACTGTGGAATTCACGCCAGAGAATGGATT
GCTCCTGCTTTTTGCCAATGGTTCGTCAAAGAAATTCTACAAAACCATAAAGACAACTCAAGTATACG
CAAGCTTCTTAGGAACCTGGACTTCTATGTCCTTCCAGTTCTTAACATAGATGGTTATATCTACACTT
GGACAACTGATCGTCTTTGGAGGAAATCCCGTTCACCCCATAATAATGGCACATGTTTTGGGACGGAT
CTCAATCGAAATTTCAATGCATCTTGGTGTAGTATTGGTGCCTCTAGAAACTGCCAAGATCAAACATT
CTGTGGGACAGGGCCAGTGTCTGAACCAGAGACTAAAGCTGTTGCCAGCTTCATAGAGAGCAAGAAGG
ATGATATTTTGTGCTTCCTGACCATGCACTCTTATGGGCAGTTAATTCTCACACCTTACGGCTACACC
AAAAATAAATCAAGTAACCACCCAGAAATGATTCAAGTTGGACAGAAGGCAGCAAATGCATTGAAAGC
AAAGTATGGAACCAATTATAGAGTTGGATCGAGTGCAGATATTTTATATGCcTCATCAGGGTCTTCAA
GAGATTGGGCCCGAGACATTGGGATTCCCTTCTCATATACGTTTGAGCTGAGGGACAGTGGAACGTAT
GGGTTTGTTCTGCCAGAAGCTCAGATCCAGCCCACCTGTGAGGAGACCATGGAGGCTGTGCTGTCAGT
CCTGGATGATGTGTATGCGAAACACTGGCACTCGGACAGTGCTGGAAGGGTGACATCTGCCACTATGC
TGCTGGGCCTGCTGGTGTCCTGCATGTCTCTTCTCTAAGCGGCCGCCAGCTTTCTAGAACAAAAACTC
ATCTCAGAAGAGGATCTGAATAGCGCCGTCGACCATCATCATCATCATCATTGAGTTTGTAGCCTTAG
ACATGACTGTTCCTCAGTTCAAGTTGGGCACTTACGAGAAGACCGGTCTTGCTAGATTCTAATCAAGA
GGATGTCAGAATGCC

| | | | |
|---|---|---|---|
| NOV46b, 210223559 | | | |
| Protein Sequence | SEQ ID NO: 702 | 443 aa | MW at 49842.7kD |

LFETMRFPSIFTAVLFAASSALAAPVNTTTEDETAQIPAEAVIGYSDLEGDFDVAVLPFSNSTNNGLL
FINTTIASIAAKEEGVSLEKRYDRSLAQHRQEIVDKSVSPWSLETYSYNIYHPMGEIYEWMREISEKY
KEVVTQHFLGVTYETHPMYYLKISQPSGNPKKIIWMDCGIHAREWIAPAFCQWFVKEILQNHKDNSSI
RKLLRNLDFYVLPVLNIDGYIYTWTTDRLWRKSRSPHNNGTCFGTDLNRNFNASWCSIGASRNCQDQT
FCGTGPVSEPETKAVASFIESKKDDILCFLTMHSYGQLILTPYGYTKNKSSNHPEMIQVGQKAANALK
AKYGTNYRVGSSADILYASSGSSRDWARDIGPFSYTFELRDSGTYGFVLPEAQIQPTCEAETMEAVLS
VLDDVYAKHWHSDSAGRVTSATMLLGLLVSCMSLL

| | | |
|---|---|---|
| NOV46c, 210223626 | SEQ ID NO: 703 | 1607 bp |
| DNA Sequence | ORF Start: at 74 | ORF Stop: TAA at 1421 |

ACTGGTTCCAATTGACAAGCTTTTGATTTTAACGACTTTTAACGACAACTTGAGAAGATCAAAAAACA
ACTAATTATTCGAAACGATGAGATTTCCTTCAATTTTTACTGCTGTTTTATTCGCAGCATCCTCCGCA
TTAGCTGCTCCAGTCAACACTACAACAGAAGATGAAACGGCACAAATTCCGGCTGAAGCTGTCATCGG
TTACTCAGATTTAGAAGGGGATTTCGATGTTGCTGTTTTGCCATTTTCCAACAGCACAAATAACGGGT
TATTGTTTATAAATACTACTATTGCCAGCATTGCTGCTAAAGAAGAAGGGGTATCTCTCGAGAAAAGA
TATGATAGATCCTTAGCCCAACACAGACAAGAGATTGTGGACAAGTCAGTGAGTCCATGGAGCCTGGA
GACGTATTCCTATAACATATACCACCCCATGGGAGAGATCTATGAGTGGATGAGAGAGATCAGTGAGA
AGTACAAGGAAGTGGTGACACAGCATTTCCTAGGAGTGACCTATGAGACCAACCCCATGTATTATCTG
AAGATCAGCCAACCATCTGGTAATCCCAAGAAAATCATTTGGATGGACTGTGGAATTCACGCCAGAGA
ATGGATTGCTCCTGCTTTTTGCCAATGGTTCGTCAAAGAAATTCTACAAAACCATAAAGACAACTCAA
GTATACGCAAGCTTCTTAGGAACCTGGACTTCTATGTCCTTCCAGTTCTTAACATAGATGGTTATATC
TACACTTGGACAACTGATCGTCTTTGGAGGAAATCCCGTTCACCCCATAATAATGGCACATGTTTTGG
GACGGATCTCAATCGAAATTTCAATGCATCTTGGTGTAGTATTGGTGCCTCTAGAAACTGCCAAGATC
AAACATTCTGTGGGACAGGGCCAGTGTCTGAACCAGAGACTAAAGCTGTTGCCAGCTTCATAACAGGG
CTACACCAAAAATAAATCAAGTAACCACCCAGAAATGATTCAAGTTGGACAGAAGGCAGCAAATGCAT
TGAAAGCAAAGTATGGAACCAATTATAGAGTTGGATCGAGTGCAGATATTTTATATGCCTCATCAGGG
TCTTCAAGAGATTGGGCCCGAGACATTGGGATTCCCTTCTCATATACGTTTGAGCTGAGGGACAGTGG
TCTTCAAGAGATTGGGCCCGAGACATTGGGATTCCCTTCTCATATACGTTTGAGCTGAGGGAAAGTGG
AACGTATGGGTTTGTTCTGCCAGAAGCTCAGATCCAGCCCACCTGTGAGGAGACCATGGAGGCTGTGC
TGTCAGTCCTGGATGATGTGTATGCGAAACACTGGCACTCGGACAGTGCTGGAAGGGTGACATCTGCC
ACTATGCTGCTGGGCCTGCTGGTGTCCTGCATGTCTCTTCTCCACCATCACCACCATCACTAAGCGGC
CGCCAGCTTTCTAGAACAAAAACTCATCTCAGAAGAGGATCTGAATAGCGCCGTCGACCATCATCATC
ATCATCATTGAGTTTGTAGCCTTAGACATGACTGTTCCTCAGTTCAAGTTGGGCACTTACGAGAAGAC
CGGTCTTGCTAGCATTCTAATCAAGAGGATGTCAGAATGCCATT

| | | | |
|---|---|---|---|
| NOV46c, 210223626 | | | |
| Protein Sequence | SEQ ID NO: 704 | 449 aa | MW at 50665.6kD |

LFETMRFPSIFTAVLFAASSALAAPVNTTTEDETAQIPAEAVIGYSDLEGDFDVAVLPFSNSTNNGLL
FINTTIASIAAKEEGVSLEKRYDRSLAQHRQEIVDKSVSPWSLETYSYNIYHPMGEIYENMREISEKY
KEVVTQHFLGVTYETHPMYYLKISQPSGNPKKIIWMDCGIHAREWIAPAFCQWFVKEILQNHKDNSSI
RKLLRNLDFYVLPVLNIDGYIYTWTTDRLWRKSRSPHNNGTCFGTDLNRNFNASWCSIGASRNCQDQT
FCGTGPVSEPETKAVASFIESKKDDILCFLTMHSYGQLILTPYGYTKNKSSNHPEMIQVGQKAANALK
AKYGTNYRVGSSADILYASSGSSRDWARDIGIPFSYTFELRDSGTYGFVLPEAQIQPTCEETMEAVLS
VLDDVYAKHWHSDSAGRVTSATMLLGLLVSCMSLLHHHHHH

| | | |
|---|---|---|
| NOV46d, 171095097 | SEQ ID NO: 705 | 1148 bp |
| DNA Sequence | ORF Start: at 2 | ORF Stop: TAA at 1127 |

CACCATGAAGCCTCTGCTTGAAACCCTTTATCTTTTGGGGATGCTGGTTCCTGGAGGGCTGGGATATG
ATAGATCCTTAGCCCAACACAGACAAGAGATTGTGGACAAGTCAGTGAGTCCATGGAGCCTGGAGACG
TATTCCTATAACATATACCACCCCATGGGAGAGATCTATGAGTGGATGAGAGAGATCAGTGAGAAGTA
CAAGGAAGTGGTGACACAGCATTTCCTAGGAGTGACCTATGAGACCCACCCCATGTATTATCTGAAGA
TCAGCCACCATCTGGTAATCCCAAGAAAATCATTTGGATGGACTGTGGAATTCACGCCAGAAGAATGG
ATTGCTCCTGCTTTTTGCCAATGGTTCGTCAAAGAAATTCTACAAAACCATAAAGACAACTCAAGTAT
ACGCAAGCTTCTTAGGAACCTGGACTTCTATGTCCTTCCAGTTCTTAACATAGATGGTTATATCTACA
CTTGGACAACTGATCGTCTTTGGAGGAAATCCCGTTCACCCCATAATAATGGCACATGTTTTGGGACG
GATCTCAATCGAAATTTCAATGCATCTTGGTGTAGTATTGGTGCCTCTAGAAACTGCCAAGATCAAAC
ATTCTGTGGGACAGGGCCAGTGTCTGAACCAGAGACTAAAGCTGTTGCCAGCTTCATAGAGAGCAAGA
AGGATGATATTTTGTGCTTCCTGACCATGCACTCTTATGGGCAGTTAATTCTCACACCTTACGGCTAC
ACCAAAAATAAATCAAGTAACCACCCAGAAATGATTCAAGTTGGACAGAAGGCAGCAAATGCATTGAA
AGCAAAGTATGGAACCAATTATAGAGTTGGATCGAGTGCAGATATTTTATATGCCTCATCAGGGTCTT
CAAGAGATTGGGCCCGAGACATTGGGATTCCCTTCTCATATACGTTTGAGCTGAGGGACAGTGGAACG
TATGGGTTTGTTCTGCCAGAAGCTCAGATCCAGCCCACCTGTGAGGAGACCATGGAGGCTGTGCTGTC
AGTCCTGGATGATGTGTATGCGAAACACTGGCACTCGGACAGTGCTGGAAGGGTGACATCTGCCACTA
TGCTGCTGGGCCTGCTGGTGTCCTGCATGTCTCTTCTCTAAGCGGCCGCTCGAGTCTAGA

| | | | |
|---|---|---|---|
| NOV46d, 171095097 | | | |
| Protein Sequence | SEQ ID NO: 706 | 375 aa | MW at 42630.1kD |

TMKPLLETLYLLGMLVPGGLGYDRSLAQHRQEIVDKSVSPWSLETYSYNIYHPMGEIYEWMREISEKY
KEVVTQHFLGVTYETHPMYYLKISQPSGNPKKIIWMDCGIHAREWIAPAFCQWFVKEILQNHKDNSSI
RKLLRNLDFYVLPVLNIDGYIYTWTTDRLWRKSRSPHNNGTCFGTDLNRNFNASWCSIGASRNCQDQT
FCGTGPVSEPETKAVASFIESKKDDILCFLTMHSYGQLILTPYGYTKNKSSNHPEMIQVGQKAANALK
AKYGTNYRVGSSADILYASSGSSRDWARDIGIPFSYTFELRDSGTYGFVLPEAQIQPTCEETMEAVLS
VLDDVYAKHWHSDSAGRVTSATMLLGLLVSCMSLL

| | | |
|---|---|---|
| NOV46e, 183852229 | SEQ ID NO: 707 | 1148 bp |
| DNA Sequence | ORF Start: at 3 | ORF Stop: TAA at 1146 |

CCACCATGAAGCCTCTGCTTGAAACCCTTTATCTTTTGGGGATGCTGGTTCCTGGAGGGCTGGGATAT
GATAGATCCTTAGCCCAACACAGACAAGAGATTGTGGACAAGTCAGTGAGTCCATGGAGCCTGGAGAC
GTATTCCTATAACATATACCACCCCATGGGAGAGATCTATGAGTGGATGAGAGAGATCAGTGAGAAGT
ACAAGGAAGTGGTGACACAGCATTTCCTAGGAGTGACCTATGAGACCCACCCCATGTATTATCTGAAG
ATCAGCCAACCATCTGGTAATCCCAAGAAAATCATTTGGATGGACTGTGGAATTCACGCCAGAGAATG
GATTGCTCCTGCTTTTTGCCAATGGTTCGTCAAAGAAATTCTACAAAACCATAAAGACAACTCAAGTA
TACGCAAGCTTCTTAGGAACCTGGACTTCTATGTCCTTCCAGTTCTTAACATAGATGGTTATATCTAC
ACTTGGACAACTGATCGTCTTTGGAGGAAATCCCGTTCACCCCATAATAATGGCACATGTTTTGGGAC
GGATCTCAATCGAAATTTCAATGCATCTIGGTGTAGTATTGGTGCCTCTAGAAACTGCCAAGATCAAA
CATTCTGTGGGACAGGGCCAGTGTCTGAACCAGAGACTAAAGCTGTTGCCAGCTTCATAGAGAGCAAG
AAGGATGATATTTTGTGCTTCCTGACCATGCACTCTTATGGGCAGTTAATTCTCACACCTTACGGCTA
CACCAAAAATAAATCAAGTAACCACCCAGAAATGATTCAAGTTGGACAGAAGGCAGCAAATGCATTGA
AAGCAAAGTATGGAACCAATTATAGAGTTGGATCGAGTGCAGATATTTTATATGCCTCATCAGGGTCT
TCAAGAGATTGGGCCCGAGACATTGGGATTCCCTTCTCATATACGTTTGAGCTGAGGGACAGTGGAAC
GTATGGGTTTGTTCTGCCAGAAGCTCAGATCCAGCCCACCTGTGAGGAGACCATGGAGGCTGTGCTGT
CAGTCCTGGATGATGTGTATGCGAAACACTGGCACTCGGACAGTGCTGGAAGGGTGACATCTGCCACT
ATGCTGCTGGGCCTGCTGGTGTCCTGCATGTCTCTTCTCCACCATCACCACCATCACTAA

| | | | |
|---|---|---|---|
| NOV46e, 183852229 | | | |
| Protein Sequence | SEQ ID NO: 708 | 381 aa | MW at 43452.9kD |

TMKPLLETLYLLGMLVPGGLGYDRSLAQHRQEIVDKSVSPWSLETYSYNIYHPMGEIYEWMREISEKY
KEVVTQHFLGVTYETHPMYYLKISQPSGNPKKIIWMDCGIHAREWIAPAFCOWFVKEILQNHKDNSSI
RKLLRNLDFYVLPVLNIDGYIYTWTTDRLWRKSRSPHNNGTCFGTDLNRNFNASWCSIGASRNCQDQT
FCGTGPVSEPETKAVASFIESKKDDILCFLTMHSYGQLILTPYGYTKNKSSnHPEMIQVGQKAANALK
AKYGTNYRVGSSADILYASSGSSRDWARDIGIPFSYTFELRDSGTYGFVLPEAQIQPTCEETMEAVLS
VLDDVYAKHWHSDSAGRVTSATMLLGLLVSCMSLLHHHHHH

| | | |
|---|---|---|
| NOV46f, 183852264 | SEQ ID NO: 709 | 1151 bp |
| DNA Sequence | ORF Start: at 3 | ORF Stop: TAA at 1149 |

CCACCATGGGCCACCATCACCACCATCACAAGCCTCTGCTTGAAACCCTTTATCTTTTGGGGATGCTG
GTTCCTGGAGGGCTGGGATATGATAGATCCTTAGCCCAACACAGACAAGAGATTGTGGACAAGTCAGT
GAGTCCATGGAGCCTGGAGACGTATTCCTATAACATATACCACCCCATGGGAGAGATCTATGAGTGGA
TGAGAGAGATCAGTGAGAAGTACAAGGAAGTGGTGACACAGCATTTCCTAGGAGTGACCTATGAGACC
CACCCCATGTATTATCTGAAGATCAGCCAACCATCTGGTAATCCCAAGAAAATCATTTGGATGGACTG
TGGAATTCACGCCAGAGAATGGATTGCTCCTGCTTTTTGCCAATGGTTCGTCAAAGAAATTCTACAAA
ACCATAAAGACAACTCAAGTATACGCAAGCTTCTTAGGAACCTGGACTTCTATGTCCTTCCAGTTCTT
AACATAGATGGTTATATCTACACTTGGACAACTGATCGTCTTTGGAGGAAATCCCGTTCACCCCATAA
TAATGGCACATGTTTTGGGACGGATCTCAATCGAAATTTCAATGCATCTTGGTGTAGTATTGGTGCCT
CTAGAAACTGCCAAGATCAAACATTCTGTGGGACAGGGCCAGTGTCTGAACCAGAGACTAAAGCTGTT
GCCAGCTTCATAGAGAGCAAGAAGGATGATATTTTGTGCTTCCTGACCATGCACTCTTATGGGCAGTT
AATTCTCACACCTTACGGCTACACCAAAAATAAATCAAGTAACCACCCAGAAATGATTCAAGTTGGAC
AGAAGGCAGCAAATGCATTGAAAGCAAAGTATGGAACCAATTATAGAGTTGGATCGAGTGCAGATATT
TTATATGCCTCATCAGGGTCTTCAAGAGATTGGGCCCGAGACATTGGGATTCCCTTCTCATATACGTT
TGAGCTGAGGGACAGTGGAACGTATGGGTTTGTTCTGCCAGAAGCTCAGATCCAGCCCACCTGTGAGG
AGACCATGGAGGCTGTGCTGTCAGTCCTGGATGATGTGTATGCGAAACACTGGCACTCGGACAGTGCT
GGAAGGGTGACATCTGCCACTATGCTGCTGGGCCTGCTGGTGTCCTGCATGTCTCTTCTCTAA

| | | | |
|---|---|---|---|
| NOV46f, 183852264 | | | |
| Protein Sequence | SEQ ID NO: 710 | 382 aa | MW at 43510.0kD |

TMGHHHHHHKPLLETLYLLGMLVPGGLGYDRSLAQHRQEIVDKSVSPWSLETYSYNIYHPMGEIYEWM
REISEKYKEVVTQHFLGVTYETHPMYYLKISQPSGNPKKIIWMDCGIHAREWIAPAFCQWFVKEILQN
HKDNSSIRKLLRNLDFYVLPVLNIDGYIYTWTTDRLWRKSRSPHNNGTCFGTDLNRNFNASWCSIGAS
RNCQDQTFCGTGPVSEPETKAVASFIESKKDDILCFLTMHSYGQLILTPYGYTKNKSSNHPEMIQVGQ
KAANALKAKYGTNYRVGSSANILYASSGSSRNWARDIGIPFSYTFELRDSGTYGFVLPEAQIQPTCEE
TMEAVLSVLDDVYAKHWHSDSAGRVTSATMLLGLLVSCMSLL

| | | |
|---|---|---|
| NOV46g, 183852410 | SEQ ID NO: 711 | 1162 bp |
| DNA Sequence | ORF Start: at 2 | ORF Stop: TAA at 1148 |

CACCATGGGCCACCATCACCACCATCACAAGCCTCTGCTTGAAACCCTTTATCTTTTGGGGATGCTGG
TTCCTGGAGGGCTGGGATATGATAGATCCTTAGCCCAACACAGACAAGAGATTGTGGACAAGTCAGTG
AGTCCATGGAGCCTGGAGACGTATTCCTATAACATATACCACCCCATGGGAGAGATCTATGAGTGGAT
GAGAGAGATCAGTGAGAAGTACAAGGAAGTGGTGACACAGCATTTCCTAGGAGTGACCTATGAGACCC
ACCCCATGTATTATCTGAAGATCAGCCAACCATCTGGTAATCCCAAGAAAATCATTTGGATGGACTGT
GGAATTCACGCCAGAGAATGGATTGCTCCTGCTTTTTGCCAATGGTTCGTCAAAGAAATTCTACAAAA
CCATAAAGACAACTCAAGTATACGCAAGCTTCTTAGGAACCTGGACTTCTATGTCCTTCCAGTTCTTA
ACATAGATGGTTATATCTACACTTGGACAACTGATCGTCTTTGGAGGAAATCCCGTTCACCCCATAAT
AATGGCACATGTTTTGGGACGGATCTCAATCGAAATTTCAATGCATCTTGGTGTAGTATTGGTGCCTC
TAGAAACTGCCAAGATCAAACATTCTGTGGGACAGGGCCAGTGTCTGAACCAGAGACTAAAGCTGTTG
CCAGCTTCATAGAGAGCAAGAAGGATGATATTTTGTGCTTCCTGACCATGCACTCTTATGGGCAGTTA
ATTCTCACACCTTACGGCTACACCAAAAATAAATCAAGTAACCACCCAGAAATGATTCAAGTTGGACA
GAAGGCAGCAAATGCATTGAAAGCAAAGTATGGAACCAATTATAGAGTTGGATCGAGTGCAGATATTT
TATATGCCTCATCAGGGTCTTCAAGAGATTGGGCCCGAGACATTGGGATTCCCTTCTCATATACGTTT
GAGCTGAGGGACAGTGGAACGTATGGGTTTGTTCTGCCAGAAGCTCAGATCCAGCCCACCTGTGAGGA
GACCATGGAGGCTGTGCTGTCAGTCCTGGATGATGTGTATGCGAAACACTGGCACTCGGACAGTGCTG
GAAGGGTGACATCTGCCACTATGCTGCTGGGCCTGCTGGTGTCCTGCATGTCTCTTCTCTAAGCGGCC
GCTTTC

| | | | |
|---|---|---|---|
| NOV46g, 183852410 | | | |
| Protein Sequence | SEQ ID NO: 712 | 382 aa | MW at 43510.0kD |

TMGHHHHHHKPLLETLYLLGMLVPGGLGYDRSLAQHRQEEVDKSVSPWSLETYSYNIYHPMGEIYEWN
REISEKYKEVVTQHFLGVTYETHPMYYLKISQPSGNPKKIIWMDCGIHAREWIAPAFCQWFVKEILQN
HKDNSSIRKLLRNLDFYVLPVLNIDGYIYTWTTDRLWRKSRSPHNNGTCFGTDLNRNFNASWCSIGAS
RNCQDQTFCGTGPVSEPETKAVASFIESKKDDILCFLTMHSYGQLILTPYGYTKNKSSNHPEMIQVGQ
KAANALKAKYGTNYRVGSSADILYASSGSSRDWARDIGIPFSYTFELRDSGTYGFVLPEAQIQPTCEE
TMEAVLSVLDDVYAKHWHSDSAGRVTSATMLLGLLVSCMSLL

| | | |
|---|---|---|
| NOV46h, 183523337 | SEQ ID NO: 713 | 1162 bp |
| DNA Sequence | ORF Start: at 2 | ORF Stop: TAA at 1148 |

CACCATGGGCCACCATCACCACCATCACAAGCCTCTGCTTGAAACCCTTTATCTTTTGGGGATGCTGG
TTCCTGGAGGGCTGGGATATGATAGATCCTTAGCCCAACACAGACAAGAGATTGTGGACAAGTCAGTG
AGTCCATGGAGCCTGGAGACGTATTCCTATAACATATACCACCCCATGGGAGAGATCTATGAGTGGAT
GAGAGAGATCAGTGAGAAGTACAAGGAAGTGGTGACACAGCATTTCCTAGGAGTGACCTATGAGACCC
ACCCCATGTATTATCTGAAGATCAGCCAACCATCTGGTAATCCCAAGAAAATCATTTGGATGGACTGT
GGAATTCACGCCAGAGAATGGATTGCTCCTGCTTTTTGCCAATGGTTCGTCAAAGAAATTCTACAAAA
CCATAAAGACAACTCAAGTATACGCAAGCTTCTTAGGAACCTGGACTTCTATGTCCTTCCAGTTCTTA
ACATAGATGGTTATATCTACACTTGGACAACTGATCGTCTTTGGAGGAAATCCCGTTCACCCCATAAT
AATGGCACATGTTTTGGGACGGATCTCAATCGAAATTTCAATGCATCTTGGTGTAGTATTGGTGCCTC
TAGAAACTGCCAAGATCAAACATTCTGTGGGACAGGGCCAGTGTCTGAACCAGAGACTAAAGCTGTTG
CCAGCTTCATAGAGAGCAAGAAGGATGATATTTTGTGCTTCCTGACCATGCACTCTTATGGGCAGTTA
ATTCTCACACCTTACGGCTACACCAAAAATAAATCAAGTAACCACCCAGAAATGATTCAAGTTGGACA
GAAGGCAGCAAATGCATTGAAAGCAAAGTATGGAACCAATTATAGAGTTGGATCGAGTGCAGATATTT
TATATGCCTCATCAGGGTCTTCAAGAGATTGGGCCCGAGACATTGGGATTCCCTTCTCATATACGTTT
GAGCTGAGGGACAGTGGAACGTATGGGTTTGTTCTGCCAGAAGCTCAGATCCAGCCCACCTGTGAGGA
GACCATGGAGGCTGTGCTGTCAGTCCTGGATGATGTGTATGCGAAACACTGGCACTCGGACAGTGCTG
GAAGGGTGACATCTGCCACTATGCTGCTGGGCCTGCTGGTGTCCTGCATGTCTCTTCTCTAAGCGGCC
GCTTTC

| | | | |
|---|---|---|---|
| NOV46h, 183523337 | | | |
| Protein Sequence | SEQ ID NO: 714 | 382 aa | MW at 43510.0kD |

TMGHHHHHHKPLLETLYLLGMLVPGGLGYDRSLAQHRQEIVDKSVSPWSLETYSYNIYHPMGEIYEWM
REISEKYKEVVTQHFLGVTYETHPMYYLKISQPSGNPKKIIWMDCGIRAREWIAPAFCQWFVKEILQN
HKDNSSIRKLLRNLDFYVLPVLNIDGYIYTWTTDRLWRKSRSPHNNGTCFGTDLNRNFNASWCSIGAS
RNCQDQTFCGTGPVSEPETKAVASFIESKKDDILCFLTMHSYGQLILTPYGYTKNKSSNHPEMIQVGQ
KAANALKAKYGTNYRVGSSADILYASSGSSRDWARDIGIPFSYTFELRDSGTYGFVLPEAQIQPTCEE
TMEAVLSVLDDVYAKHWHSDSAGRVTSATMLLGLLVSCMSLL

| | | |
|---|---|---|
| NOV46i, CG55794-01 | SEQ ID NO: 715 | 1196 bp |
| DNA Sequence | ORF Start: ATG at 16 | ORF Stop: TAA at 1138 |

TTACTGTGTGGCAGAATGAAGCCTCTGCTTGAAACCCTTTATCTTTTGGGGATGCTGGTTCCTGGAGG
GCTGGGATATGATAGATCCTTAGCCCAACACAGACAAGAGATTGTGGACAAGTCAGTGAGTCCATGGA
GCCTGGAGACGTATTCCTATAACATATACCACCCCATGGGAGAGATCAATGAGTGGATGAGAGAGATC
AGTGAGAAGTACAAGGAAGTGGTGACACAGCATTTCCTAGGAGTGACCTATGAGACCCACCCCATATA
TTATCTGAAGATCAGCCAACCATCTGGTAATCCCAAGAAAATCATTTGGATGGGCTGTGGAATTCACG
GTTTTGGGACGGATCTCAATCGAAATTTCAATGCATCTTGGTGTAGTATTGGTGCCTCTAGAAACTGC
CAAGATCAAACATTCTGTGGGACAGGGCCAGTGTCTGAACCAGAGACTAAAGCTGTTGCCAGCTTCAT
AGAGAGCAAGAAGGATGATATTTTGTGCTTCCTGACCATGCACTCTTATGGGCAGTTAATTCTCACAC
GTTTTGGGACGGATCTCAATCGAAATTTCAATGCATCTTGGTGTAGTATTGGTGCCTCTAGAAACTGC
CAAGATCAAACATTCTGTGGGACAGGGCCAGTGTCTGAACCAGAGACTAAAGCTGTTGCCAGCTTCAT
AGAGAGCAAGAAGGATGATATTTTGTGCTTCCTGACCATGCACTCTTATGGGGCAGTTAATTCTCACA
CTTACGGCTACACCAAAAATAAATCAAGTAACCACCCAGAAATGATTCAAGTTGGACAGAAGGCAGCA
AATGCATTGAAAGCAAAGTATGGAACCAATTATAGAGTTGGATCGAGTGCAGATATTTTATATGCCTC
ATCAGGGTCTTCAAGAGATTGGGCCCGAGACATTGGGATTCCCTTCTCATATACGTTTGAGCTGAGGG
ACAGTGGAACATATGGGTTTGTTCTGCCAGAAGCTCAGATCCAGCCCACCTGTGAGGAGACCATGGAG
GCTGTGCTGTCAGTCCTGGATGATGTGTATGCGAAACACTGGCACTCGGACAGTGCTGGAAGGGTGAC
ATCTGCCACTATGCTGCTGGGCCTGCTGGTGTCCTGCATGTCTCTTCTCTAAGTGCATCCTGCCCAGG
CCTGCTCAACCCCAGTGGCATGAGTGTGGCTGGAGGAACG

| | | | |
|---|---|---|---|
| NOV46i, GG55794-01 | | | |
| Protein Sequence | SEQ ID NO: 716 | 374 aa | MW at 42472.9kD |

MKPLLETLYLLGMLVPGGLGYDRSLAQHRQEIVDKSVSPWSLETYSYNIYHPMGEINEWMREISEKYK
EVVTQHFLGVTYETHPIYYLKISQPSGNPKKIIWMGCGIHAREWIAPAFCQWFVKEILQNHKDNSRIR
KLLRNLDFYVLPVLNIDGYIYTWTTDRLWRKSRSPHNNGTCFGTDLNRNFNASWCSIGASRNCQDQTF
CGTGPVSEPETKAVASFIESKKDDILCFLTMHSYGQLILTPYGYTKNKSSNHPEMIQVGQKAANLAKA
KYGTNYRVGSSADILYASSGSSRDWARDIGIPFSYTFELRDSGTYGFVLPEAQIQPTCEETMEAVLSV
LDDVYAKHWHSDSAGRVTSATMLLGLLVSCMSLL

| | | |
|---|---|---|
| NOV46j, CG55794-02 | SEQ ID NO: 717 | 1008 bp |
| DNA Sequence | ORF Start: at 1 | ORF Stop: end of sequence |

TATGATAGATCCTTAGCCCAACACAGACAAGAGATTGTGGACAAGTCAGTGAGTCCATGGAGCCTGGA
GACGTATTCCTATAACATATACCACCCCATGGGAGAGATCTATGAGTGGATGAGAGAGATCAGTGAGA
AGTACAAGGAAGTGGTGACACAGCATTTCCTAGGAGTGACCTATGAGACCCACCCCATGTATTATCTG
AAGATCAGCCAACCATCTGGTAATCCCAAGAAAATCATTTGGATGGACTGTGGAATTCACGCCAGAGA
ATGGATTGCTCCTGCTTTTTGCCAATGGTTCGTCAAAGAAATTCTACAAAACCATAAAGACAACTCAA
GTATACGCAAGCTCCTTAGGAACCTGGACTTCTATGTCCTTCCAGTTCTTAACATAGATGGTTATATC
TACACTTGGACAACTGATCGTCTTTGGAGGAAATCCCGTTCACCCCATAATAATGGCACATGTTTTGG
GACGGATCTCAATCGAAATTTCAATGCATCTTGGTGTAGTATTGGTGCCTCTAGAAACTGCCAAGATC
AAACATTCTGTGGGACAGGGCCAGTGTCTGAACCAGAGACTAAAGCTGTTGCCAGCTTCATAGAGAGC
AAGAAGGATGATATTTTGTGCTTCCTGACCATGCACTCTTATGGGCAGTTAATTCTCACACCTTACGG
CTACACCAAAAATAAATCAAGTAACCACCCAGAAATGATTCAAGTTGGACAGAAGGCAGCAAATGCAT
TGAAAGCAAAGTATGGAACCAATTATAGAGTTGGATCGAGTGCAGATATTTTATATGCCTCATCAGGG
TCTTCAAGAGATTGGGCCCGAGACATTGGGATTCCCTTCTCATATACGTTTGAGCTGAGGGACAGTGG
AACATATGGGTTTGTTCTGCCAGAAGCTCAGATCCAGCCCACCTGTGAGGAGACCATGGAGGCTGTGC
TGTCAGTCCTGGATGATGTGTATGCGAAACACTGGCACTCGGACAGTGCTGGAAGG

| | | | |
|---|---|---|---|
| NOV46j, CG55794-02 | | | |
| Protein Sequence | SEQ ID NO: 718 | 336 aa | MW at 38597.1kD |

YDRSLAQHROEIVDKSVSPWSLETYSYNIYHPMGEIYEWMREISEKYKBVVTQHFLGVTYETHPMYYL
KISQPSGNPKKIIWMDCGIHAREWIAPAFCQWFVKEILQNHKDNSSIRKLLRNLDFYVLPVLNIDGYI
YTWTTDRLWRKSRSPHNNGTCFGTDLNRNFNASWCSIGASRNCQDQTFCGTGPVSEPETKAVASFIES
KKDDILCFLTMHSYGQLILTPYGYTKNKSSNHPEMIQVGQKAANALKAKYGTNYRVGSSADILYASSG
SSRDWARDIGIPFSYTFELRDSGTYGFTLPEAQIQPTCEETMEAVLSVLDDVYAKHWHSDSAGR

| | | |
|---|---|---|
| NOV46k, CG55794-04 | SEQ ID NO: 719 | 1579 bp |
| DNA Sequence | ORF Start: at 334 | ORF Stop: TAA at 1396 |

CCAATTGACAAGCTTTTGATTTTAACGACTTTTAACGACAACTTGAGAAGATCAAAAAACAACTAATT
ATTCGAAACGATGAGATTTCCTTCAATTTTTACTGCTGTTTTATTCGCAGCATCCTCCGCATTAGCTG
CTCCAGTCAACACTACAACAGAAGATGAAACGGCACAAATTCCGGCTGAAGCTGTCATCGGTTACTCA
GATTTAGAAGGGGATTTCGATGTTGCTGTTTTGCCATTTTCCAACAGCACAAATAACGGGTTATTGTT
TATAAATACTACTATTGCCAGCATTGCTGCTAAAGAAGAAGGGGTATCTCTCGAGAAAAGATATGATA
GATCCTTAGCCCAACACAGACAAGAGATTGTGGACAAGTCAGTGAGTCCATAAAGCCTGGAGACGTAT
TCCTATAACATATACCACCCCATGGGAGAGATCTATGAGTGGATGAGAGAGATCAGTGAGAAGTACAA
GGAAGTGGTGACACAGCATTTCCTAGGAGTGACCTATGAGACCCACCCCATGTATTATCTGAAGATAA
GCCAACCATCTGGTAATCCCAAGAAAATCATTTGGATGGACTGTGGAATTCACGCCAGAGAATGGATT
GCTCCTGCTTTTTGCCAATGGTTCGTCAAAGAAATTCTACAAAACCATAAAGACAACTCAAGTATACG
CAAGCTTCTTAGGAACCTGGACTTCTATGTCCTTCCAGTTCTTAACATAGATGGTTATATCTACACAA
GGACAACTGATCGTCTTTGGAGGAAATCCCGTTCACCCCATAATAATGGCACATGTTTTGGGACGGAT
CTCAATCGAAATTTCAATGCATCTTGGTGTAGTATTGGTGCCTCTAGAAACTGCCAAGATCAAACATT
CTGTGGGACAGGGCCAGTGTCTGAACCAGAGACTAAAGCTGTTGCCAGCTTCATAGAGAGCAAGAAGG
ATGATATTTTGTGCTTCCTGACCATGCACTCTTATGGGCAGTTAATTCTCACACCTTACGGAAACACC
AAAAATAAATCAAGTAACCACCCAGAAATGATTCAAGTTGGACAGAAGGCAGCAAATGCATTGAAAGC
AAAGTATGGAACCAATTATAGAGTTGGATCGAGTGCAGATATTTTATATGCCTCATCAGGGTCTTCAA
GAGATTGGGCCCGAGACATTGGGATTCCCTTCTCATATACGTTTGAGCTGAGGGACAGTGGAACGTAT
GGGTTTGTTCTGCCAGAAGCTCAGATCCAGCCCACCTGTGAGGAGACCATGGAGGCTGTGCTGTAAGT
CCTGGATGATGTGTATGCGAAACACTGGCACTCGGACAGTGCTGGAAGGGTGACATCTGCCACTATGC
TGCTGGGCCTGCTGGTGTCCTGCATGTCTCTTCTCTAAGCGGCCGCCAGCTTTCTAGAACAAAAACTC
ATCTCAGAAGAGGATCTGAATAGCGCCGTCGACCATCATCATCATCATCATTGAGTTTGTAGCCTTAG
ACATGACTGTTCCTCAGTTCAAGTTGGGCACTTACGAGAAGACCGGTCTTGCTAGATTCTAATCAAGA
GGATGTCAGAATGCC

| | | | |
|---|---|---|---|
| NOV46k, CG55794-04 | | | |
| Protein Sequence | SEQ ID NO: 720 | 354 aa | MW at 40431.3kD |

YDRSLAQHRQEIVDKSVSPWSLETYSYNIYHPMGEIYEWMREISEKYKEVVTQHFLGVTYETHPMYYL
KISQPSGNPKKIIWMDCGIHAREWIAPAFCQWFVKEILQNHKDNSSIRKLLRNLDFYVLPVLNIDGYI
YTWTTDRLWRKSRSPHNNGTCFGTDLNRNFNASWCSIGASRNCQDQTFCGTGPVSEPETKAVASFIES
KKDDILCFLTMHSYGQLILTPYGYTKNKSSNHPEMIQVGQKAANALKAKYGTNYRVGSSADILYASSG
SSRDWARDIGIPFSYTFELRDSGTYGFVLPEAQIQPTCEETMEAVLSVLDDVYAKWHSDSAGRAVTSA
TMLLGLLVSCMSLL

| | | |
|---|---|---|
| NOV461, CG55794-05 | SEQ ID NO: 721 | 1607 bp |
| DNA Sequence | ORF Start: at 341 | ORF Stop: at 1403 |

ACTGGTTCCAATTGACAAGCTTTTGATTTTAACGACTTTTAACGACAACTTGAGAAGATCAAAAAACA
ACTAATTATTCGAAACGATGAGATTTCCTTCAATTTTTACTGCTGTTTTATTCGCAGCATCCTCCGCA
TTAGCTGCTCCAGTCAACACTACAACAGAAGATGAAACGGCACAAATTCCGGCTGAAGCTGTCATCGG
TTACTCAGATTTAGAAGGGGATTTCGATGTTGCTGTTTTGCCATTTTCCAACAGCACAAATAACGGGT
TATTGTTTATAAATACTACTATTGCCAGCATTGCTGCTAAAGAAGAAGGGGTATCTCTCGAGAAAAGA
TATGATAGATCCTTAGCCCAACACAGACAAGAGATTGTGGACAAGTCAGTGAGTCCATGGAGCCTGGA
GACGTATTCCTATAACATATACCACCCCATGGGAGAGATCTATGAGTGGATGAGAGAGATCAGTGAGA
AGTACAAGGAAGTGGTGACACAGCATTTCCTAGGAGTGACCTATGAGACCCACCCCATGTATTATCTG
AAGATCAGCCAACCATCTGGTAATCCCAAGAAAATCATTTGGATGGACTGTGGAATTCACGCCAGAGA
ATGGATTGCTCCTGCTTTTTGCCAATGGTTCGTCAAAGAAATTCTACAAAACCATAAAGACAACTCAA
GTATACGCAAGCTTCTTAGGAACCTGGACTTCTATGTCCTTCCAGTTCTTAACATAGATGGTTATATC
TACACTTGGACAACTGATCGTCTTTGGAGGAAATCCCGTTCACCCCATAATAATGGCACATGTTTTGG
GACGGATCTCAATCGAAATTTCAATGCATCTTGGTGTAGTATTGGTGCCTCTAGAAACTGCCAAGATC
AAACATTCTGTGGGACAGGGCCAGTGTCTGAACCAGAGACTAAAGCTGTTGCCAGCTTCATAGAGAGC
AAGAAGGATGATATTTTGTGCTTCCTGACCATGCACTCTTATGGGCAGTTAATTCTCACACCTTACGG
CTACACCAAAAATAAATCAAGTAACCACCCAGAAATGATTCAAGTTGGACAGAAGGCAGCAAATGCAT
TGAAAGCAAAGTATGGAACCAATTATAGAGTTGGATCGAGTGCAGATATTTTATATGCCTCATCAGGG
TCTTCAAGAGATTGGGCCCGAGACATTGGGATTCCCTTCTCATATACGTTTGAGCTGAGGGACAGTGG
AACGTATGGGTTTGTTCTGCCAGAAGCTCAGATCCAGCCCACCTGTGAGGAGACCATGGAGGCTGTGC
TGTCAGTCCTGGATGATGTGTATGCGAAACACTGGCACTCGGACAGTGCTGGAAGGGTGACATCTGCC
ACTATGCTGCTGGGCCTGCTGGTGTCCTGCATGTCTCTTCTCCACCATCACCACCATCACTAAGCGGC
CGCCAGCTTTCTAGAACAAAAACTCATCTCAGAAGAGGATCTGAATAGCGCCGTCGACCATCATCATC
ATCATCATTGAGTTTGTAGCCTTAGACATGACTGTTCCTCAGTTCAAGTTGGGCACTTACGAGAAGAC
CGGTCTTGCTAGATTCTAATCAAGAGGATGTCAGAATGCCATT

| | | | |
|---|---|---|---|
| NOV461, CG55794-05 | | | |
| Protein Sequence | SEQ ID NO: 722 | 354 aa | MW at 40431.3kD |

YDRSLAQHRQEIVDKSVSPWSLETYSYNIYHPMGEIYEWMREISEKYKEVVTQHFLGVTYETHPMYYL
KISQPSGNPKKIIWMDCGIHAREWIAPAFCQWFVKEILQNHKDNSSIRKLLRNLDFYVLPVLNIDGYI
YTWTTDRLWRKSRSPHNNGTCFGTDLNRNFNASWCSIGASRNCQDQTFCGTGPVSEPETKAVASFIES
KKDDILCFLTMHSYGQLILTPYGYTKNKSSNHPEMIQVGQKAANALKAKYGTNYRVGSSADILYASSG
SSRDWARDIGIPFSYTFELRDSGTYGFVLPEAQIQPTCEETMEAVLSVLDDVYAKHWHSDSAGRVTSA
TMLLGLLVSCMSLL

| | | |
|---|---|---|
| NOV46m, GG55794-06 | SEQ ID NO: 723 | 1977 bp |
| DNA Sequence | ORF Start: ATG at 41 | ORF Stop: TAG at 671 |

CCAGAGAGGCCCAGAATTTTCTAACTTACTGTGTGGCAGAATGAAGCCTCTGCTTGAAACCCTTTATC
TTTTGGGGATGCTGGTTCCTGGAGGGCTGGGATATGATAGATCCTTAGCCCAACACAGACAAGAGATT
GTGGACAAGTCAGTGAGTCCATGGAGCCTGGAAACGTATTCCTATAACATATACCACCCCATGGGAGA
GATCTATGAGTGGATGAGAGAGATCAGTGAGAAGTACAAGGAAGTGGTGACACAGCATTTCCTAGGAG
TGACCTATGAGACCCACCCATATATTATCTGAAGATCAGCCAACCATACTGGTAATCCCAAGAAAATC
ATTTGGATGGACTGTGGAATTCACGCCAGAGAATGGATTGCTCCTGCTTTTTGCCAATGGTTCGTCAA
AGAAATTCTACAAAACCATAAAGACAACTCAAGGATACGCAAGCTCCTTAGGAACCTGGACTTCTATG
TCCTTCCAGTTCTTAACATAGATGGTTATATCTACACTTGGACAACTGATCGTCTTTGGAGGAAATCC
CGTTCACCCCATAATAATGGCACATGTTTTGGGACGGATCTCAATCGAAATTTCAATGCTTCTTGGTG
TAATTCAAGTTGGACAGAAGGCAGCAAATGCATTGAAAGCAAAGTATGGAACCAATTATAGAGTTGGA
TCGAGTGCAGATATTTTATATGCCTCATCAGGGTCTTCAAGAGATTGGGCCCGAGACATTGGGATTCC
CTTCTCATATACGTTTGAGCTGAGGGACAGTGGAACATATGGGTTTGTTCTGCCAGAAGCTCAGATCC
AGCCCACCTGTGAGGAGACCATGGAGGCTGTGCTGTCAGTCCTGGATGATGTGTATGCCGAACACTGG
CACTCGGACAGTGCTGGAAGGGTGACATCTGCCACTATGCTGTGGGCCTGTCTGGTGTCCTGCATGTC
TCTTCTCTAAGTGCATCCTGCCCAG

| | | | |
|---|---|---|---|
| NOV46m, CG55794-06 | | | |
| Protein Sequence | SEQ ID NO: 724 | 210 aa | MW at 24848.2kD |

MKPLLETLYLLGMLVPGGLGYDRSLAQHRQEIVDKSVSPWSLETYSYNIYHPMGEIYEWMREISEKYK
EVVTQHFLGVTYETHPIYYLKISQPSGNPKKIIWMDCGIHAREWIAPAFCQWFVKEILQNHKDNSRIR
KLLRNLDFYVLPVLNIDGYIYTWTTDRLWRKSRSPHNNGTCFGTDLNRNFNASWCNSSWTEGSKCIES
KVWNQL

| | | |
|---|---|---|
| NOV46n, CG55794-07 | SEQ ID NO: 725 | 1378 bp |
| DNA Sequence | ORF Start: ATG at 259 | ORF Stop: TAA at 1225 |

ACTCACTATAGGGCTCGAGCGGCCGCCCGGGCAGGTGAAAATACATCAGCATGTGGGAAAGAGCAACG
TTGATCGTCTTCACGGAAAGGCTGAGGACCCTGCGCCTACCACATGTTGGCCAGGGTGAGCAAGCAGT
GAAAGAGAAAACACTTTTTTCAAAAAGCCAACTGATCCTTAGCCCAACACAGACAAGAGATTGTGGAC
AAGTCAGTGAGTCCATGGAGCCTGGAGACGTATTCCTATAACATATACCACCCCATGGGAGAGATCTA
TGAGTGGATGAGAGAGATCAGTGAGAAGTACAAGGAAGTGGTGACACAGCATTTCCTAGGAGTGACCT
ATGAGACCCACCCCATATATTATCTGAAGATCAGCCAACCATCTGGTAATCCCAAGAAAATCATTTGG
ATGGACTGTGGAATTCACGCCAGAGAATGGATTGCTCCTGCTTTTTGCCAATGGTTCGTCAAAGAAAT
TCTACAAAACCATAAAGACAACTCAAGGATACGCAAGCTCCTTAGGAACCTGGACTTCTATGTCCTTC
CAGTTCTTAACATAGATGGTTATATCTACACTTGGACAACTGATCGTCTTTGGAGGAAATCCCGTTCA
CCCCATAATAATGGCACATGTTTTGGGACGGATCTCAATCGAAATTTCAATGCTTCTTGGTGTAGTAT
TGGTGCCTCTAGAAACTGCCAAGATCAAACATTCTGTGGGACAGGGCCAGTGTCTGAACCAGAGACTA
AAGCTGTTGCCAGCTTCATAGAGAGCAAGAAGGATGATATTTTGTGCTTCCTGACCATGCACTCTTAT
GGGCAGTTAATTCTCACACCTTACGGCTACACCAAAAATAAATCAAGTAACCACCCAGAAATGATTCA
AGTTGGACAGAAGGCAGCAAATGCATTGAAAGCAAAGTATGGAACCAATTATAGAGTTGGATCGAGTG
CAGATATTTTATATGCCTCATCAGGGTCTTCAAGAGATTGGGCCCGAGACATTGGGATTCCCTTCTCA
TATACGTTTGAGCTGAGGGACAGTGGAACATATGGGTTTGTTCTGCCAGAAGCTCAGATCCAGCCCAC
CTGTGAGGAGACCATGGAGGCTGTGCTGTCAGTCCTGGATGATGTGTATGCGAAACACTGGCACTCGG
ACAGTGCTGGAAGGGTGACATCTGCCACTATGCTGCTGGGCCTGCTGGTGTCCTGCATGTCTCTTCTC
TAAGTGCATTCTGCCCAGGCCTGCTCAACCCCAGTGGCATGAGTGTGGCTGGAGGAACGGTGTGTTAT
GGTTGTAAAGAAACCAAATAATTTAACTAAAAATACTTCCTATTTCAATAAAAAAAAAAAAAAAAAAA
AAAAAAAAAAAAA

| | | | |
|---|---|---|---|
| NOV46n, CG55794-07 | | | |
| Protein Sequence | SEQ ID NO: 726 | 1322 aa | MW at 36617.2kD |

MGEIYEWMREISEKYKEVVTQHFLGVTYETHPIYYLKISQPSGMPKKIIWMDCGIHAREWIAPAFCQW
FVKEILQNHKDNSRIRKLLRNLDFYVLPVLNIDGYIYTWTTDRLWRKSRSPHNNGTCFGTDLNRNFNA
SWCSIGASRNCQDQTFCGTGPVSEPETKAVASFIESKKDDILCFLTMHSYGQLILTPYGYTKNKSSNH
PEMIQVGQKAANALKAKYGTNYRVGSSADILYASSGSSRDWARDIGIPFSYTFELRDSGTYGFVLPEA
QIQPTCEETMEAVLSVLDDVYAKHWIISDSAGRVRSATMLLGLLVSCMSLL

| | | |
|---|---|---|
| NOV46o, CG55794-08 | SEQ ID NO: 727 | 128 bp |
| DNA Sequence | ORF Start: at 1 | ORF Stop: TAA at 1126 |

ACCATGAAGCCTCTGCTTGAAACCCTTTATCTTTTGGGGATGCTGGTTCCTGGAGGGCTGGGATATGA
TAGATCCTTAGCCCAACACAGACAAGAGATTGTGGACAAGTCAGTGAGTCCATGGAGCCTGGAGACGT
ATTCCTATAACATATACCACCCCATGGGAGAGATCTATGAGTGGATGAGAGAGATCAGTGAGAAGTAC
AAGGAAGTGGTGACACAGCATTTCCTAGGAGTGACCTATGAGACCCACCCCATGTATTATCTGAAGAT
CAGCCAACCATCTGGTAATCCCAAGAAAATCATTTGGATGGACTGTGGAATTCACGCCAGAGAATGGA
TTGCTCCTGCTTTTTGCCAATGGTTCGTCAAAGAAATTCTACAAAACCATAAAGACAACTCAAGTATA
CGCAAGCTTCTTAGGAACCTGGACTTCTATGTCCTTCCAGTTCTTAACATAGATGGTTATATCTACAC
TTGGACAACTGATCGTCTTTGGAGGAAATCCCGTTCACCCCATAATAATGGCACATGTTTTGGGACGG
ATCTCAATCGAAATTTCAATGCATCTTGGTGTAGTATTGGTGCCTCTAGAAACTGCCAAGATCAAACA
TTCTGTGGGACAGGGCCAGTGTCTGAACCAGAGACTAAAGCTGTTGCCAGCTTCATAGAGAGCAAGAA
GGATGATATTTTGTGCTTCCTGACCATGCACTCTTATGGGCAGTTAATTCTCACACCTTACGGCTACA
CCAAAAATAATCAAGTAACCACCCAGAAATGATTCAAAGTTGGACAGAAGGCAGCAAATGCATTGAAA
GCAAAGTATGGAACCAATTATAGAGTTGGATCGAGTGCAGATATTTTATATGCCTCATCAGGGTCTTC
AAGAGATTGGGCCCGAGACATTGGGATTCCCTTCTCATATACGTTTGAGCTGAGGGACAGTGGAACGT
ATGGGTTTGTTCTGCCAGAAGCTCAGATCCAGCCCACCTGTGAGGAGACCATGGAGGCTGTGCTGTCA
GTCCTGGATGATGTGTATGCGAAACACTGGCACTCGGACAGTGCTGGAAGGGTGACATCTGCCACTAT
GCTGCTGGGCCTGCTGGTGTCCTGCATGTCTCTTCTCTAA

| | | | |
|---|---|---|---|
| NOV46o, CG55794-08 | | | |
| Protein Sequence | SEQ ID NO: 728 | 375 aa | MW at 42630.1kD |

TMKPLLETLYLLGMLVPGGLGYDRSLAQHRQEIVDKSVSPWSLETYSYNIYHPMGEIYEWMREISEKY
KEVVTQHFLGVTYETHPMYYLKISQPSGNPKKIIWMDCGIHAREWIAPAFCQWFVKEILQNHKDNSSI
RKLLRNLDFYVLPVLNIDGYIYTWTTDRLWRKSRSPHNNGTCFGTDLNRNFNASWCSIGASRNCQDQT
FCGTGPVSEPETKAVASFIESKKDDILCFLTMHSYGQLILTPYGYTKNKSSNHPEMIQVGQKAANALK
AKYGTNYRVGSSADILYASSGSSRDWARDIGIPFSYTFELRDSGTYGFVLPEAQIQPTCEETMEAVLS
VLDDVYAKHWHSDSAGRVTSATMLLGLLVSCMSLL

| | | |
|---|---|---|
| NOV46p, CG55794-09 | SEQ ID NO: 729 | 1151 bp |
| DNA Sequence | ORF Start: at 3 | ORF Stop: TAA at 1149 |

CCACCATGGGCCACCATCACCACCATCACAAGCCTCTGCTTGAAACCCTTTATCTTTTGGGGATGCTG
GTTCCTGGAGGGCTGGGATATGATAGATCCTTAGCCCAACACAGACAAGAGATTGTGGACAAGTCAGT
GAGTCCATGGAGCCTGGAGACGTATTCCTATAACATATACCACCCCATGGGAGAGATCTATGAGTGGA
TGAGAGAGATCAGTGAGAAGTACAAGGAAGTGGTGACACAGCATTTCCTAGGAGTGACCTATGAGACC
CACCCCATGTATTATCTGAAGATCAGCCAACCATCTGGTAATCCCAAGAAAATCATTTGGATGGACTG
TGGAATTCACGCCAGAGAATGGATTGCTCCTGCTTTTTGCCAATGGTTCGTCAAAGAAATTCTACAAA
ACCATAAAGACAACTCAAGTATACGCAAGCTTCTTAGGAACCTGGACTTCTATGTCCTTCCAGTTCTT
AACATAGATGGTTATATCTACACTTGGACAACTGATCGTCTTTGGAGGAAATCCCGTTCACCCCATAA
TAATGGCACATGTTTTGGGACGGATCTCAATCGAAATTTCAATGCATCTTGGTGTAGTATTGGTGCCT
CTAGAAACTGCCAAGATCAAACATTCTGTGGGACAGGGCCAGTGTCTGAACCAGAGACTAAAGCTGTT
GCCAGCTTCATAGAGAGCAAGAAGGATGATATTTTGTGCTTCCTGACCATGCACTCTTATGGGCAGTT
AATTCTCACACCTTACGGCTACACCAAAAATAAATCAAGTAACCACCCAGAAATGATTCAAGTTGGAC
AGAAGGCAGCAAATGCATTGAAAGCAAAGTATGGAACCAATTATAGAGTTGGATCGAGTGCAGATATT
TTATATGCCTCATCAGGGTCTTCAAGAGATTGGGCCCGAGACATTGGGATTCCCTTCTCATATACGTT
TGAGCTGAGGGACAGTGGAACGTATGGGTTTGTTCTGCCAGAAGCTCAGATCCAGCCCACCTGTGAGG
AGACCATGGAGGCTGTGCTGTCAGTCCTGGATGATGTGTATGCGAAACACTGGCACTCGGACAGTGCT
GGAAGGGTGACATCTGCCACTATGCTGCTGGGCCTGCTGGTGTCCTGCATGTCTCTTCTCTAA

| | | | |
|---|---|---|---|
| NOV46p, CG55794-09 | | | |
| Protein Sequence | SEQ ID NO: 730 | 382 aa | MW at 43510.0kD |

TMGHHHHHHKPLLETLYLLGMLVPGGLGYDRSLAQHRQEIVDKSVSPWSLETYSYNIYHPMGEIYEWM
REISEKYKEVVTQHFLGVTYETHPMYYLKISQPSGNPKKIIWMDCGIHAREWIAPAFCQWFVKEILQN
HKDNSSIRKLLRNLDFYVLPVLNIDGYIYTWTTDRLWRKSRSPHNNGTCFGTDLNRNFNASWCSIGAS
RNCQDQTFCGTGPVSEPETKAVASFIESKKDDILCFLTMHSYGQLILTPYGYTKNKSSNHPEMIQVGQ
KAANALKAKYGTNYRVGSSADILYASSGSSRDWARDIGIPFSYTFELRDSGTYGFVLPEAQIQPTCEE
TMEAVLSVLDDVYAKHWHSDSAGRVTSATMLLGLLVSCMSLL

| | | |
|---|---|---|
| NOV46q, CG55794-10 | SEQ ID NO: 731 | 1148 bp |
| DNA Sequence | ORF Start: at 3 | ORF Stop: TAA at 1146 |

CCACCATGAAGCCTCTGCTTGAAACCCTTTATCTTTTGGGGATGCTGGTTCCTGGAGGGCTGGGATAT
GATAGATCCTTAGCCCAACACAGACAAGAGATTGTGGACAAGTCAGTGAGTCCATGGAGCCTGGAGAC
GTATTCCTATAACATATACCACCCCATGGGAGAGATCTATGAGTGGATGAGAGAGATCAGTGAGAAGT
ACAAGGAAGTGGTGACACAGCATTTCCTAGGAGTGACCTATGAGACCCACCCCATGTATTATCTGAAG
ATCAGCCAACCATCTGGTAATCCCAAGAAAATCATTTGGATGGACTGTGGAATTCACGCCAGAGAATG
GATTGCTCCTGCTTTTTGCCAATGGTTCGTCAAAGAAATTCTACAAAACCATAAAGACAACTCAAGTA
TACGCIAGCTTCTTAGGAACCTGGACTTCTATGTCCTTCCAGTTCTTAACATAGATGGTTATATCTAC
ACTTGGACAACTGATCGTCTTTGGAGGAAATCCCGTTCACCCCATAATAATGGCACATGTTTTGGGAC
GGATCTCAATCGAAATTTCAATGCATCTTGGTGTAGTATTGGTGCCTCTAGAAACTGCCAAGATCAAA
CATTCTGTGGGACAGGGCCAGTGTCTGAACCAGAGACTAAAGCTGTTGCCAGCTTCATAGAGAGCAAG
AAGGATGATATTTTGTGCTTCCTGACCATGCACTCTTATGGGCAGTTAATTCTCACACCTTACGGCTA
CACCAAAAATAAATCAAGTAACCACCCAGAAATGATTCAAGTTGGACAGAAGGCAGCAAATGCATTGA
AAGCAAAGTATGGAACCAATTATAGAGTTGGATCGAGTGCAGATATTTTATATGCCTCATCAGGGTCT
TCAAGAGATTGGGCCCGAGACATTGGGATTCCCTTCTCATATACGTTTGAGCTGAGGGACAGTGGAAC
GTATGGGTTTGTTCTGCCAGAAGCTCAGATCCAGCCCACCTGTGAGGAGACCATGGAGGCTGTGCTGT
CAGTCCTGGATGATGTGTATGCGAAACACTGGCACTCGGACAGTGCTGGAAGGGTGACATCTGCCACT
ATGCTGCTGGGCCTGCTGGTGTCCTGCATGTCTCTTCTCCACCATCACCACCATCACTAA

| | | | |
|---|---|---|---|
| NOV46q, CG55794-10 | | | |
| Protein Sequence | SEQ ID NO: 732 | 381 aa | MW at 43452.9kD |

TMKPLLETLYLLGMLVPGGLGYDRSLAQHRQEIVDKSVSPWSLETYSYNIYHPMGEIYEWMREISEKY
KEVVTQHFLGVTYETHPMYYLKISQPSGNPKKIIWMDCGIHAREWIAPAFCQWFVKEILQNHKDNSSI
RKLLRNLDFYVLPVLNIDGYIYTWTTDRLWRKSRSPHNNGTCFGTDLNRNFNASWCSIGASRNCQDQT
FCGTGPVSEPETKAVASFIESKKDDILCFLTMHSYGQLILTPYGYTKNKSSNHPEMIQVGQKAANALK
AKYGTNYRVGSSADILYASSGSSRDWARDIGIPFSYTFELRDSGTYGFVLPEAQIQPTCEETMEAVLS
VLDDVYAKHWHSDSAGRVTSATMLLGLLVSCMSLLHHHHHH

| | | |
|---|---|---|
| NOV46r,CG55794-11 | SEQ ID NO: 733 | 1146 bp |
| DNA Sequence | ORF Start: at 1 | ORF Stop: TAA at 1144 |

ACCATGGTAAGCGCTATTGTTTTATATGTGCTTTTGGCGGCGGCGGCGCATTCTGCCTTTGCGTATGA
TAGATCCTTAGCCCAACACAGACAAGAGATTGTGGACAAGTCAGTGAGTCCATGGAGCCTGGAGACGT
ATTCCTATAACATATACCACCCCATGGGAGAGATCTATGAGTGGATGAGAGAGATCAGTGAGAAGTAC
AAGGAAGTGGTGACACAGCATTTCCTAGGAGTGACCTATGAGACCCACCCCATGTATTATCTGAAGAT
CAGCCAACCATCTGGTAATCCCAAGAAAATCATTTGGATGGACTGTGGAATTCACGCCAGAGAATGGA
TTGCTCCTGCTTTTTGCCAATGGTTCGTCAAAGAAATTCTACAAAACCATAAAGACAACTCAAGTATA
CGCAAGCTTCTTAGGAACCTGGACTTCTATGTCCTTCCAGTTCTTAACATAGATGGTTATATCTACAC
TTGGACAACTGATCGTCTTTGGAGGAAATCCCGTTCACCCCATAATAATGGCACATGTTTTGGGACGG
ATCTCAATCGAAATTTCAATGCATCTTGGTGTAGTATTGGTGCCTCTAGAAACTGCCAAGATCAAACA
TTCTGTGGGACAGGGCCAGTGTCTGAACCAGAGACTAAAGCTGTTGCCAGCTTCATAGAGAGCAAGAA
GGATGATATTTTGTGCTTCCTGACCATGCACTCTTATGGGCAGTTAATTCTCACACCTTACGGCTACA
CCAAAAATAAATCAAGTAACCACCCAGAAATGATTCAAGTTGGACAGAAGGCAGCAAATGCATTGAAA
GCAAAGTATGGAACCAATTATAGAGTTGGATCGAGTGCAGATATTTTATATGCCTCATCAGGGTCTTC
AAGAGATTGGGCCCGAGACATTGGGATTCCCTTCTCATATACGTTTGAGCTGAGGGACAGTGGAACGT
ATGGGTTTGTTCTGCCAGAAGCTCAGATCCAGCCCACCTGTGAGGAGACCATGGAGGCTGTGCTGTCA
GTCCTGGATGATGTGTATGCGAAACACTGGCACTCGGACAGTGCTGGAAGGGTGACATCTGCCACTAT
GCTGCTGGGCCTGCTGGTGTCCTGCATGTCTCTTCTCCACCATCACCACCATCACTAA

| | | | |
|---|---|---|---|
| NOV46r, CG55794-11 | | | |
| Protein Sequence | SEQ ID NO: 734 | 381 aa | MW at 43355.7kD |

TMVSAIVLYVLLAAAAHSAFAYDRSLAQHRQEIVDKSVSPWSLETYSYNIYHPMGEIYEWMREISEKY
KEVVTQHFLGVTYETHPMYYLKISQPSGNPKKIIWMDCGIHAREWIAPAFCQWFVKEILQNHKDNSSI
RKLLRNLDFYVLPVLNIDGYIYTWTTDRLWRKSRSPHNNGTCFGTDLNRNFNASWCSIGASRNCQDQT
FCGTGPVSEPETKAVASFIESKKDDILCFLTMHSYGQLILTPYGYTKNKSSNHPEMIQVGQKAANALK
AKYGTNYRVGSSADILYASSGSSRDWARDIGIPFSYTFELRDSGTYGFVLPEAQIQPTCEETMEAVLS
VLDDVYAKHWHSDSAGRVTSATMLLGLLVSCMSLLHHHHHH

| | | |
|---|---|---|
| NOV46s, CG55794-12 | SEQ ID NO: 735 | 1161 bp |
| DNA Sequence | ORF Start: at 1 | ORF Stop: TAA at 1159 |

ATTATTATACCTCCCACCATCGGGCGCGGATCCACCATGGTAAGCGCTATTGTTTTATATGTGCTTTT
GGCGGCGGCGGCGCATTCTGCCTTTGCGTATGATAGATCCTTAGCCCAACACAGACAAGAGATTGTGG
ACAAGTCAGTGAGTCCATGGAGCCTGGAGACGTATTCCTATAACATATACCACCCCATGGGAGAGATC
TATGAGTGGATGAGAGAGATCAGTGAGAAGTACAAGGAAGTGGTGACACAGCATTTCCTAGGAGTGAC
CTATGAGACCCACCCCATGTATTATCTGAAGATCAGCCAACCATCTGGTAATCCCAAGAAAATCATTT
GGATGGACTGTGGAATTCACGCCAGAGAATGGATTGCTCCTGCTTTTTGCCAATGGTTCGTCAAAGAA
ATTCTACAAAACCATAAAGACAACTCAAGTATACGCAAGCTTCTTAGGAACCTGGACTTCTATGTCCT
TCCAGTTCTTAACATAGATGGTTATATCTACACTTGGACAACTGATCGTCTTTGGAGGAAATCCCGTT
CACCCCATAATAATGGCACATGTTTTGGGACGGATCTCAATCGAAATTTCAATGCATCTTGGTGTAGT
ATTGGTGCCTCTAGAAACTGCCAAGATCAAACATTCTGTGGGACAGGGCCAGTGTCTGAACCAGAGAC
TAAAGCTGTTGCCAGCTTCATAGAGAGCAAGAAGGATGATATTTTGTGCTTCCTGACCATGCACTCTT
ATGGGCAGTTAATTCTCACACCTTACGGCTACACCAAAAATAAATCAAGTAACCACCCAGAAATGATT
CAAGTTGGACAGAAGGCAGCAAATGCATTGAAAGCAAAGTATGGAACCAATTATAGAGTTGGATCGAG
TGCAGATATTTTATATGCCTCATCAGGGTCTTCAAGAGATTGGGCCCGAGACATTGGGATTCCCTTCT
CATATACGTTTGAGCTGAGGGACAGTGGAACGTATGGGTTTGTTCTGCCAGAAGCTCAGATCCAGCCC
ACCTGTGAGGAGACCATGGAGGCTGTGGAACGTATGGGTTTGTTCTGCCAGAAGCTCAGATCCAGCCC
GGACAGTGCTGGAAGGGTGACATCTGCCACTATGCTGCTGGGCCTGCTGGTGTCCTGCATGTCTCTTC
TCTAA

| | | | |
|---|---|---|---|
| NOV46s, CG55794-12 | | | |
| Protein Sequence | SEQ ID NO: 736 | 386 aa | MW at 43638.1kD |

IIIPPTIGRGSTMVSAIVLYVLLAAAAHSAFAYDRSLAQHRQEIVDKSVSPWSLETYSYNIYHPMGEI
YEWMRBISEKYKEVVTQHFLGVTYETHPMYYLKISQPSGNPKKIIWMDCGIHAREWIAPAFCQWFVKE
ILQNHKDNSSIRKLLRNLDFYVLPVLNIDGYIYTWTTDRLWRKSRSPHNNGTCFGTDLNRNFNASWCS
IGASRNCQDQTFCGTGPVSEPETKAVASFIESKKDDILCFLTMHSYGQLILTPYGYTKNKSSNHPEMI
QVGQKAANALKAKYGTNYRVGSSADILYASSGSSRDWARDIGIPFSYTFELRDSGTYGFVLPEAQIQP
TCEETMEAVLSVLDDVYAKHWHSDSAGRVTSATMLLGLLVSCMSLL

| | | |
|---|---|---|
| NOV46t, CG55794-13 | SEQ ID NO: 737 | 1212 bp |
| DNA Sequence | ORF Start: at 1 | ORF Stop: TAA at 1210 |

CGCGGATCCACCATGGTAAGCGCTATTGTTTTATATGTGCTTTTGGCGGCGGCGGCGCATTCTGCCTT
TGCGAAGCCTCTGCTTGAAACCCTTTATCTTTTGGGGATGCTGGTTCCTGGAGGGCTGGGATATGATA
GATCCTTAGCCCAACACAGACAAGAGATTGTGGACAAGTCAGTGAGTCCATGGAGCCTGGAGACGTAT
TCCTATAACATATACCACCCCATGGGAGAGATCTATGAGTGGATGAGAGAGATCAGTGAGAAGTACAA
GGAAGTGGTGACACAGCATTTCCTAGGAGTGACCTATGAGACCCACCCCATGTATTATCTGAAGATCA
GCCAACCATCTGGTAATCCCAAGAAAATCATTTGGATGGACTGTGGAATTCACGCCAGAGAATGGATT
GCTCCTGCTTTTTGCCAATGGTTCGTCAAAGAAATTCTACAAAACCATAAAGACAACTCAAGTATACG
CAAGCTTCTTAGGAACCTGGACTTCTATGTCCTTCCAGTTCTTAACATAGATGGTTATATCTACACTT
GGACAACTGATCGTCTTTGGAGGAAATCCCGTTCACCCCATAATAATGGCACATGTTTTGGGACGGAT
CTCAATCGAAATTTCAATGCATCTTGGTGTAGTATTGGTGCCTCTAGAAACTGCCAAGATCAAACATT
CTGTGGGACAGGGCCAGTGTCTGAACCAGAGACTAAAGCTGTTGCCAGCTTCATAGAGAGCAAGAAGG
ATGATATTTTGTGCTTCCTGACCATGCACTCTTATGGGCAGTTAATTCTCACACCTTACGGCTACACC
AAAAATAAATCAAGTAACCACCCAGAAATGATTCAAGTTGGACAGAAGGCAGCAAATGCATTGAAAGC
AAAGTATGGAACCAATTATAGAGTTGGATCGAGTGCAGATATTTTATATGCCTCATCAGGGTCTTCAA
GAGATTGGGCCCGAGACATTGGGATTCCCTTCTCATATACGTTTGAGCTGAGGGACAGTGGAACGTAT
GGGTTTGTTCTGCCAGAAGCTCAGATCCAGCCCACCTGTGAGGAGACCATGGAGGCTGTGCTGTCAGT
CCTGGATGATGTGTATGCGAAACACTGGCACTCGGACAGTGCTGGAAGGGTGACATCTGCCACTATGC
TGCTGGGCCTGCTGGTGTCCTGCATGTCTCTTCTCCACCATCACCACCATCACTAA

| | | | |
|---|---|---|---|
| NOV46t, CG55794-13 | | | |
| Protein Sequence | SEQ ID NO: 738 | 403 aa | MW at 45622.4kD |

RGSTMVSAIVLYVLLAAAAHSAFAKPLLETLYLLGMLVPGGLGYDRSLAQHRQEIVDKSVSPWSLETY
SYNIYHPMGEIYEWMREISEKYKEVVTQHFLGVTYETHPMYYLKISQPSGNPKKIIWMDCGIHAREWI
APAFCQWFVKEILQNHKDNSSIRKLLRNLDFYVLPVINIDGYIYTWTTDRLWRKSRSPHNNGTCFGTD
LNRNFNASWCSIGASRNCQDQTFCGTGPVSEPETKAVASFIESKKDDILCFLTMHSYGQLILTPYGYT
KNKSSNHPEMIQVGQKAANALKAKYGTNYRVGSSADILYASSGSSRDWARDIGIPFSYTFELRDSGTY
GFVLPEAQIQPTCEETMEAVLSVLDDVYAKHWHSDSAGRVTSATMLLGLLVSCMSLLHHHHHH

| | | |
|---|---|---|
| NOV46u, | | |
| SNP13375362 of | SEQ ID NO: 739 | 1222 bp |
| CG55794-03, | ORF Start: ATG at 41 | ORF Stop: TAA at 1163 |
| DNA Sequence SNP Pos: 240 | SNP Change: A to G | |

CCAGAGAGGCCCAGAATTTTCTAACTTACTGTGTGGCAGAATGAAGCCTCTGCTTGAAACCCTTTATC
TTTTGGGGATGCTGGTTCCTGGAGGGCTGGGATATGATAGATCCTTAGCCCAACACAGACAAGAGATT
GTGGACAAGTCAGTGAGTCCATGGAGCCTGGAGACGTATTCCTATAACATATACCACCCCATGGGAGA
GATCTATGAGTGGATGAGAGAGATCAGTGAGAAGTGCAAGGAAGTGGTGACACAGCATTTCCTAGGAG
TGACCTATGAGACCCACCCCATATATTATCTGAAGATCAGCCAACCATCTGGTAATCCCAAGAAAATC
ATTTGGATGGACTGTGGAATTCACGCCAGAGAATGGATTGCTCCTGCTTTTTGCCAATGGTTCGTCAA
AGAAATTCTACAAAACCATAAAGACAACTCAAGGATACGCAAGCTCCTTAGGAACCTGGACTTCTATG
TCCTTCCAGTTCTTAACATAGATGGTTATATCTACACTTGGACAACTGATCGTCTTTGGAGGAAATCC
CGTTCACCCCATAATAATGGCACATGTTTTGGGACGGATCTCAATCGAAATTTCAATGCTTCTTGGTG
TAGTATTGGTGCCTCTAGAAACTGCCAAGATCAAACATTCTGTGGGACAGGGCCAGTGTCTGAACCAG
TAGACTAAGCTGTTGCCAGCTTCATAGAGAGCAAGAAGGATGATATTTTGTGCTTCCTGACCATGCAC
TCTTATGGGCAGTTAATTCTCACACCTTACGGCTACACCAAAAATAAATCAAGTAACCACCCAGAAAT
GATTCAAGTTGGACAGAAGGCAGCAAATGCATTGAAAGCAAAGTATGGAACCAATTATAGAGTTGGAT
CGAGTGCAGATATTTTATATGCCTCATCAGGGTCTTCAAGAGATTGGGCCCGAGACATTGGGATTCCC
TTCTCATATACGTTTGAGCTGAGGGACAGTGGAACATATGGGTTTGTTCTGCCAGAAGCTCAGATCCA
GCCCACCTGTGAGGAGACCATGGAGGCTGTGCTGTCAGTCCTGGATGATGTGTATGCGAAACACTGGC
ACTCGGACAGTGCTGGAAGGGTGACATCTGCCACTATGCTGCTGGGCCTGCTGGTGTCCTGCATGTCT
CTTCTCTAAGTGCATTCTGCCCAGGCCTGCTCAACCCCAGTGGCATGAGTGTGGCTTGGAGGAACG

| | | | |
|---|---|---|---|
| NOV46u, | | | |
| SNP13375362 of | | | |
| CG55794-03, | SEQ ID NO: 740 | | MW at 42520.0kD |
| Protein Sequence | SNP Pos: 67 | 374 aa | SNP Change: Tyr to Cys |

MKPLLETLYLLGMLVPGGLGYDRSLAQHRQEIVDKSVSPWSLETYSYNIYHPMGEIYEWMREISEKCK
EVVTQHFLGVTYETHPIYYLKISQPSGNPKKIIWMDCGIHAREWIAPAFCQWFVKEILQNHKDNSRIR
KLLRNLDFYVLPVLNIDGYIYTWTTDRLWRKSRSPHNNGTCFGTDLNRNFNASWCSIGASRNCQDQTF
CGTGPVSEPETKAVASFIESKKDDILCFLTMHSYGQLILTPYGYTKNKSSNHPEMIQVGQKAANALKA
KYGTNYRVGSSADILYASSGSSRDWARDIGIPFSYTFELRDSGTYGFVLPEAQIQPTCEETMEAVLSV
LDDVYAKHWHSDSAGRVTSATMLLGLLVSCMSLL

| | | |
|---|---|---|
| NOV46v, | | |
| SNP13379598 of | SEQ ID NO: 741 | 1222 bp |
| CG55794-03, | ORF Start: ATG at 41 | ORF Stop: TAA at 1163 |
| DNA Sequence | SNP Pos: 988 | SNP Change: A to G |

CCAGAGAGGCCCAGAATTTTCTAACTTACTGTGTGGCAGAATGAAGCCTCTGCTTGAAACCCTTTATC
TTTTGGGGATGCTGGTTCCTGGAGGGCTGGGATATGATAGATCCTTAGCCCAACACAGACAAGAGATT
GTGGACAAGTCAGTGAGTCCATGGAGCCTGGAGACGTATTCCTATAACATATACCACCCCATGGGAGA
GATCTATGAGTGGATGAGAGAGATCAGTGAGAAGTACAAGGAAGTGGTGACACAGCATTTCCTAGGAG
TGACCTATGAGACCCACCCCATATATTATCTGAAGATCAGCCAACCATCTGGTAATCCCAAGAAAATC
ATTTGGATGGACTGTGGAATTCACGCCAGAGAATGGATTGCTCCTGCTTTTTGCCAATGGTTCGTCAA
AGAAATTCTACAAAACCATAAAGACAACTCAAGGATACGCAAGCTCCTTAGGAACCTGGACTTCTATG
TCCTTCCAGTTCTTAACATAGATGGTTATATCTACACTTGGACAACTGATCGTCTTTGGAGGAAATCC
CGTTCACCCCATAATAATGGCACATGTTTTGGGACGGATCTCAATCGAAATTTCAATGCTTCTTGGTG
TAGTATTGGTGCCTCTAGAAACTGCCAAGATCAAACATTCTGTGGGACAGGGCCAGTGTCTGAACCAG
AGACTAAAGCTGTTGCCAGCTTCATAGAGAGCAAGAAGGATGATATTTTGTGCTTCCTGACCATGCAC
TCTTATGGGCAGTTAATTCTCACACCTTACGGCTACACCAAAAATAAATCAAGTAACCACCCAGAAAT
GATTCAAGTTGGACAGAAGGCAGCAAATGCATTGAAAGCAAAGTATGGAACCAATTATAGAGTTGGAT
CGAGTGCAGATATTTTATATGCCTCATCAGGGTCTTCAAGAGATTGGGCCCGAGACATTGGGATTCCC
TTCTCATATACGTTTGAGCTGAGGGACAGTGGAACGTATGGGTTTGTTCTGCCAGAAGCTCAGATCCA
GCCCACCTGTGAGGAGACCATGGAGGCTGTGCTGTCAGTCCTGGATGATGTGTATGCGAAACACTGGC
ACTCGGACAGTGCTGGAAGGGTGACATCTGCCACTATGCTGCTGGGCCTGCTGGTGTCCTGCATGTCT
CTTCTCTAAGTGCATTCTGCCCAGGCCTGCTCAACCCCAGTGGCATGAGTGTGGCTTGGAGGAACG

| | | | |
|---|---|---|---|
| NOV46v, | | | |
| SNP13379598 of | | | |
| CG55794-03, | SEQ ID NO: 742 | | MW at 42580.OkD |
| Protein Sequence | SNP Pos: 316 | 374 aa | SNP Change: Thr to Thr |

MKPLLETLYLLGMLVPGGLGYDRSLAQHRQEIVDKSVSPWSLETYSYNIYHPMGEIYEWMREISEKYK
EVVTQHFLGVTYETHPIYYLKISQPSGNPKKIIWMDCGIHAREWIAPAFCQWFVKEILQNHKDNSRIR
KLLRNLDFYVLPVLNIDGYIYTWTTDRLWRKSRSPHNNGTCFGTDLNRNFNASWCSIGASRNCQDQTF
CGTGPVSEPETKAVASFIESKKDDILCFLTMHSYGQLILTPYGYTKNKSSNHPEMIQVGQKAANALKA
KYGTNYRVGSSADILYASSGSSRDWARDIGIPFSYTFELRDSGTYGFVLPEAQIQPTCEETMEAVLSV
LDDVYAKHWHSDSAGRVTSATMLLGLLVSCNSLL

| | | |
|---|---|---|
| NOV46w, | | |
| SNP13375066 of | SEQ ID NO: 743 | 1222 bp |
| CG55794-03, | ORF Start: ATG at 41 | ORF Stop: TAA at 1163 |
| DNA Sequence | SNP Pos: 1152 | SNP Change: T to C |

CCAGAGAGGCCCAGAATTTTCTAACTTACTGTGTGGCAGAATGAAGCCTCTGCTTGAAACCCTTTATC
TTTTGGGGATGCTGGTTCCTGGAGGGCTGGGATATGATAGATCCTTAGCCCAACACAGACAAGAGATT
GTGGACAAGTCAGTGAGTCCATGGAGCCTGGAGACGTATTCCTATAACATATACCACCCCATGGGAGA
GATCTATGAGTGGATGAGAGAGATCAGTGAGAAGTACAAGGAAGTGGTGACACAGCATTTCCTAGGAG
TGACCTATGAGACCCACCCCATATATTATCTGAAGATCAGCCAACCATCTGGTAATCCCAAGAAAATC
ATTTGGATGGACTGTGGAATTCACGCCAGAGAATGGATTGCTCCTGCTTTTTGCCAATGGTTCGTCAA
AGAAATTCTACAAAACCATAAAGACAACTCAAGGATACGCAAGCTCCTTAGGAACCTGGACTTCTATG
TCCTTCCAGTTCTTAACATAGATGGTTATATCTACACTTGGACAACTGATCGTCTTTGGAGGAAATCC
CGTTCACCCCATAATAATGGCACATGTTTTGGGACGGATCTCAATCGAAATTTCAATGCTTCTTGGTG
TAGTATTGGTGCCTCTAGAAACTGCCAAGATCAAACATTCTGTGGGACAGGGCCAGTGTCTGAACCAG
AGACTAAAGCTGTTGCCAGCTTCATAGAGAGCAAGAAGGATGATATTTTGTGCTTCCTGACCATGCAC
TCTTATGGGCAGTTAATTCTCACACCTTACGGCTACACCAAAAATAAATCAAGTAACCACCCAGAAAT
GATTCAAGTTGGACAGAAGGCAGCAAATGCATTGAAAGCAAAGTATGGAACCAATTATAGAGTTGGAT
CGAGTGCAGATATTTTATATGCCTCATCAGGGTCTTCAAGAGATTGGGCCCGAGACATTGGGATTCCC
TTCTCATATACGTTTGAGCTGAGGGACAGTGGGAACATATGGGTTTGTTCTGCCAGAGCTCAGATCCA
GCCCACCTGTGAGGAGACCATGGAGGCTGTGCTGTCAGTCCTGGATGATGTGTATGCGAAACACTGGC
ACTCGGACAGTGCTGGAAGGGTGACATCTGCCACTATGCTGCTGGGCCTGCTGGTGTCCTGCACGTCT
CTTCTCTAAGTGCATTCTGCCCAGGCCTGCTCAACCCCAGTGGCATGAGTGTGGCTTGGAGGAACG

| | | | |
|---|---|---|---|
| NOV46w, | | | |
| SNP13375066 of | | | |
| CG55794-03, | SEQ ID NO: 744 | | MW at 42549.9kD |
| Protein Sequence | SNP Pos: 371 | 374 aa | SNP Change: Met to Thr |

MKPLLETLYLLGMLVPGGLGYDRSLAQHRQEIVDKSVSPWSLETYSYNIYHPMGEIYEWMREISEKYK
EVVTQHFLGVTYETHPIYYLKISQPSGNPKKIIWMDCGIHAREWIAPAFCQWFVKEILQNHKDNSRIR
KLLRNLDFYVLPVLNIDGYIYTWTTDRLWRKSRSPHNNGTCFGTDLNRNFNASWCSIGASRNCQDQTF
CGTGPAVSEPETKAVASFIESKKDDILCFLTHSYGQLILTPYGYTKNKSSNHPEMIQVGQKAANALKA
KYGTNYRVGSSADILYASSGSSRDWARDIGIPFSYTFELRDSGTYGFVLPEAQIQPTCEETMEAVLSV
LDDVYAKHWHSDSAGRVTSATMLLGLLVSCTSLL

| | | |
|---|---|---|
| NOV46x, | | |
| SNP13375067 of | SEQ ID NO: 745 | 1222 bp |
| CG55794-03, | ORF Start: ATG at 41 | ORF Stop: TAA at 1163 |
| DNA Sequence | SNP Pos: 1161 | SNP Change: T to C |

CCAGAGAGGCCCAGAATTTTCTAACTTACTGTGTGGCAGAATGAAGCCTCTGCTTGAAACCCTTTATC
TTTTGGGGATGCTGGTTCCTGGAGGGTGGGATATGATAGAATCCTTAGCCCAACACAGACAAGAGATT
GTGGACAAGTCAGTGAGTCCATGGAGCCTGGAGACGTATTCCTATAACATATACCACCCCATGGGAGA
GATCTATGAGTGGATGAGAGAGATCAGTGAGAAGTACAAGGAAGTGGTGACACAGCATTTCCTAGGAG
TGACCTATGAGACCCACCCCATATATTATCTGAAGATCAGCCAACCATCTGGTAATCCCAAGAAAATC
ATTTGGATGGACTGTGGAATTCACGCCAGAGAATGGATTGCTCCTGCTTTTTGCCAATGGTTCGTCAA
AGAAATTCTACAAAACCATAAAGACAACTCAAGGATACGCAAGCTCCTTAGGAACCTGGACTTCTATG
TCCTTCCAGTTCTTAACATAGATGGTTATATCTACACTTGGACAACTGATCGTCTTTGGAGGAAATCC
CGTTCACCCCATAATAATGGCACATGTTTTGGGACGGATCTCAATCGAAATTTCAATGCTTCTTGGTG
TAGTATTGGTGCCTCTAGAAACTGCCAAGATCAAACATTCTGTGGGACAGGGCCAGTGTCTGAACCAG
AGACTAAAGCTGTTGCCAGCTTCATAGAGAGCAAGAAGGATGATATTTTGTGCTTCCTGACCATGCAC
TCTTATGGGCAGTTAATTCTCACACCTTACGGCTACACCAAAAATAAATCAAGTAACCACCCAGAAAT
GATTCAAGTTGGACAGAAGGCAGCAAATGCATTGAAAGCAAAGTATGGAACCAATTATAGAGTTGGAT
CGAGTGCAGATATTTTATATGCCTCATCAGGGTCTTCAAGAGATTGGGCCCGAGACATTGGGATTCCC
TTCTCATATACGTTTGAGCTGAGGGACAGTGGAACATATGGGTTTGTTCTGCCAGAAGCTCAGATCCA
GCCCACCTGTGAGGAGACCATGGAGGCTGTGCTGTCAGTCCTGGATGATGTGTATGCGAAACACTGGC
ACTCGGACAGTGCTGGAAGGGTGACATCTGCCACTATGCTGCTGGGCCTGCTGGTGTCCTGCATGTCT
CTTCCCTAAGTGCCTGCCCAGGCCTGCTCAACCCCAGTGGCATGAGTGTGGCTTGGAGGAACG

| | | | |
|---|---|---|---|
| NOV46x, | | | |
| SNP13375067 of | | | |
| CG55794-03, | SEQ ID NO: 746 | | MW at 42564.0kD |
| Protein Sequence | SNP Pos: 374 | 374 aa | SNP Change: Leu to Pro |

MKPLLETLYLLGMLVPGGLGYDRSLAQHRQEIVDKSVSPWSLETYSYNIYHPMGEIYEWMREISEKYK
EVVTQHFLGVTYETHPIYYLKISQPSGNPKKIIWMDCGIHAREWIAPAFCQWFVKEILQNHKDNSRIR
KLLRNLDFYVLPVLNIDGYIYTWTTDRLWRKSRSPHNNGTCFGTDLNRNFNASWCSIGASRNCQDQTF
CGTGPVSEPETKAVASFIESKKDDILCFLTMHSYGQLILTPYGYTKNKSSNHPEMIQVGQKAANALKA
KYGTNYRVGSSADILYASSGSSRDWARDIGIPFSYTFELRDSGTYGFVLPEAQIQPTCEETMEAVLSV
LDDVYAKHWHSDSAGRVTSATMLLGLLVSCMSLP

[0614] A ClustalW comparison of the above protein sequences yields the following sequence alignment shown in Table 46B.

TABLE 46B

Comparison of the NOV46 protein sequences.

| | |
|---|---|
| NOV46a | ------------------------------------------------------------ |
| NOV46b | LFETMRFPSIFTAVLFAASSALAAPVNTTTEDETAQIPAEAVIGYSDLEGDFDVAVLPFS |
| NOV46c | LFETMRFPSIFTAVLFAASSALAAPVNTTTEDETAQIPAEAVIGYSDLEGDFDVAVLPFS |
| NOV46d | ------------------------------------------------------------ |
| NOV4Ee | ------------------------------------------------------------ |
| NOV46f | ----------------------------------------------------------TM |
| NOV46g | ----------------------------------------------------------TM |
| NOV46h | ------------------------------------------------------------ |
| NOV46i | ------------------------------------------------------------ |
| NOV46j | ------------------------------------------------------------ |
| NOV46k | ------------------------------------------------------------ |
| NOV46l | ------------------------------------------------------------ |
| NOV46m | ------------------------------------------------------------ |
| NOV46n | ------------------------------------------------------------ |
| NOV46o | ------------------------------------------------------------ |
| NOV46p | ----------------------------------------------------------TM |
| NOV46q | ------------------------------------------------------------ |
| NOV46r | ------------------------------------------------------------ |
| NOV46s | -----------------------------------------------------IIIPPTI |
| NOV46t | ------------------------------------------------------------ |
| NOV46a | ------MKPLLETLYLLGMLVPG------------------GLGYDRSLAQHRQEIVDKS |
| NOV46b | NSTNNGLLFINTTIASIAAKEEGVSL---------------EKRYDRSLAQHRQEIVDKS |
| NOV46c | NSTNNGLLFINTTIASIAAKEEGVSL---------------EKRYDRSLAQHRQEIVDKS |
| NOV46d | ----TMKPLLETLYLLGMLVPGG-------------------LGYDRSLAQHRQEIVDKS |
| NOV46e | ----TMKPLLETLYLLGMLVPGG-------------------LGYDRSLAQHRQEIVDKS |
| NOV46f | GHHHHHHKPLLETLYLLGMLVPG------------------GLGYDRSLAQHRQEIVDKS |
| NOV46g | GHHHHHHKPLLETLYLLGMLVPG------------------GLGYDRSLAQHRQEIVDKS |
| NOV46h | GHHHHHHKPLLETLYLLGMLVPG------------------GLGYDRSLAQHROEIVDKS |
| NOV46i | ------MKPLLETLYLLGMLVPG------------------GLGYDRSLAQHRQEIVDKS |
| NOV46j | --------------------------------------------YDRSLAQHRQEIVDKS |
| NOV46k | --------------------------------------------YDRSLAQHRQEIVDKS |
| NOV46l | --------------------------------------------YDRSLAQHRQEIVDKS |
| NOV46m | ------MKPLLETLYLLGMLVPG------------------GLGYDRSLAQHRQEIVDKS |
| NOV46n | ------------------------------------------------------------ |
| NOV46o | ----TMKPLLETLYLLGMLVPGG-------------------LGYDRSLAQHRQEIVDKS |
| NOV46p | GHHHHHHKPLLETLYLLGMLVPG------------------GLGYDRSLAQHRQEIVDKS |
| NOV46q | ----TMKPLLETLYLLGMLVPGG-------------------LGYDRSLAQHRQEIVDKS |
| NOV46r | ----TMVSAIVLYVLLAAAAHS-------------------AFAYDRSLAQHRQEIVDKS |
| NOV46s | GRGSTMVSAIVLYVLLAAAAHS-------------------AFAYDRSLAQHRQEIVDKS |
| NOV46t | -RGSTMVSAIVLYVLLAAAAHSAFAKPLLETLYLLGMLVPGGLGYDRSLAQHRQEIVDKS |
| NOV46a | VSPWSLETYSYNIYHPMGEIYEWMREISEKYKEVVTQHFLGVTYETHPIYYLKISQPSGN |
| NOV46b | VSPWSLETYSYNIYMPMGEIYEWMREISEKYKEVVTQHFLGVTYETHPMYYLKISQPSGN |
| NOV46c | VSPWSLETYSYNIYHPMGEIYEWMREISEKYKEVVTQHFLGVTYETHPMYYLKISQPSGN |
| NOV46d | VSPWSLETYSYNIYHPMGEIYEWMREISEKYKEVVTQHFLGVTYETHPMYYLKISQPSGN |
| NOV46e | VSPWSLETYSYNIYHPMGEIYEWMREISEKYKEVVTQHFLGVTYETHPMYYLKISQPSGN |
| NOV46f | VSPWSLETYSYNIYHPMGEIYEWMREISEKYKEVVTQHFLGVTYETHPMYYLKISQPSGN |
| NOV46g | VSPWSLETYSYNIYHPMGEIYEWMREISEKYKEVVTQHFLGVTYETHPMYYLKISQPSGN |
| NOV46h | VSPWSLETYSYNIYHPMGEIYEWMREISEKYKEVVTQHFLGVTYETHPMYYLKISQPSGN |
| NOV46i | VSPWSLETYSYNIYHPMGEINEWMREISEKYKEVVTQHFLGVTYETHPMYYLKISQPSGN |
| NOV46j | VSPWSLETYSYNIYHPMGEIYEWMREISEKYKEVVTQHFLGVTYETHPMYYLKISQPSGN |
| NOV46k | VSPWSLETYSYNIYHPMGEIYEWMREISEKYKEVVTQHFLGVTYETHPMYYLKISQPSGN |
| NOV46l | VSPWSLETYSYNIYHPMGEIYEWMREISEKYKEVVTQHFLGVTYETHPMYYLKISQPSGN |
| NOV46m | VSPWSLETYSYNIYHPMGEIYEWMREISEKYKEVVTQHFLGVTYETHPIYYLKISQPSGN |
| NOV46n | ----------------MGEIYEWMREISEKYKEVVTQHFLGVTYEThPIYYLKISQPSGN |
| NOV46o | VSPWSLETYSYNIYHPMGEIYEWMREISEKYKEVVTQHFLGVTYETHPMYYLKISQPSGN |
| NOV46p | VSPWSLETYSYNIYHPMGEIYEWMREISEKYKEVVTQHFLGVTYETHPMYYLKISQPSGN |
| NOV46q | VSPWSLETYSYNIYHPMGEIYEWMREISEKYKEVVTQHFLGVTYETHPMYYLKISQPSGN |
| NOV46r | VSPWSLETYSYNIYHPMGEIYEWMREISEKYKEVVTQHFLGVTYETHPMYYLKISQPSGN |
| NOV46s | VSPWSLETYSYNIYHPMGEIYEWMREISEKYKEVVTQHFLGVTYETHPMYYLKISQPSGN |
| NOV46t | VSPWSLETYSYNIYHPMGEIYEWMREISEKYKEVVTQHFLGVTYETHPMYYLKISQPSGN |
| NOV46a | PKKIIWMDCGIHAREWIAPAFCQWFVKEILQNHKDNSRIRKLLRNLDFYVLPVLNIDGYI |
| NOV46b | PKKIIWMDCGIHAREWIAPAFCQWFVKEILQNHKDNSRIRKLLRNLDFYVLPVLNIDGYI |
| NOV46c | PKKIIWMDCGIHAREWIAPAFCQWFVKEILQNHKDNSRIRKLLRNLDFYVLPVLNIDGYI |
| NOV46d | PKKIIWMDCGIHAREWIAPAFCQWFVKEILQNHKDNSRIRKLLRNLDFYVLPVLNIDGYI |
| NOV46e | PKKIIWMDCGIHAREWIAPAFCQWFVKEILQNHKDNSRIRKLLRNLDFYVLPVLNIDGYI |
| NOV46f | PKKIIWMDCGIHAREWIAPAFCQWFVKEILQNHKDNSRIRKLLRNLDFYVLPVLNIDGYI |
| NOV46g | PKKIIWMDCGIHAREWIAPAFCQWFVKEILQNHKDNSRIRKLLRNLDFYVLPVLNIDGYI |
| NOV46h | PKKIIWMDCGIHAREWIAPAFCQWFVKEILQNHKDNSRIRKLLRNLDFYVLPVLNIDGYI |
| NOV46i | PKKIIWMDCGIHAREWIAPAFCQWFVKEILQNHKDNSRIRKLLRNLDFYVLPVLNIDGYI |
| NOV46j | PKKIIWMDCGIHAREWIAPAFCQWFVKEILQNHKDNSRIRKLLRNLDFYVLPVLNIDGYI |
| NOV46k | PKKIIWMDCGIHAREWIAPAFCQWFVKEILQNHKDNSRIRKLLRNLDFYVLPVLNIDGYI |
| NOV46l | PKKIIWMDCGIHAREWIAPAFCQWFVKEILQNHKDNSRIRKLLRNLDFYVLPVLNIDGYI |
| NOV46m | PKKIIWMDCGIHAREWIAPAFCQWFVKEILQNHKDNSRIRKLLRNLDFYVLPVLNIDGYI |
| NOV46n | PKKIIWMDCGIHAREWIAPAFCQWFVKEILQNHKDNSRIRKLLRNLDFYVLPVLNIDGYI |
| NOV46o | PKKIIWMDCGIHAREWIAPAFCQWFVKEILQNHKDNSRIRKLLRNLDFYVLPVLNIDGYI |
| NOV46p | PKKIIWMDCGIHAREWIAPAFCQWFVKEILQNHKDNSRIRKLLRNLDFYVLPVLNIDGYI |
| NOV46q | PKKIIWMDCGIHAREWIAPAFCQWFVKEILQNHKDNSRIRKLLRNLDFYVLPVLNIDGYI |
| NOV46r | PKKIIWMDCGIHAREWIAPAFCQWFVKEILQNHKDNSRIRKLLRNLDFYVLPVLNIDGYI |
| NOV46s | PKKIIWMDCGIHAREWIAPAFCQWFVKEILQNHKDNSRIRKLLRNLDFYVLPVLNIDGYI |
| NOV46t | PKKIIWMDCGIHAREWIAPAFCQWFVKEILQNHKDNSRIRKLLRNLDFYVLPVLNIDGYI |
| NOV46a | YTWTTDRLWRKSRSPHNNGTCFGTDLNRNFNASWCSIGASRNCQDQTFCGTGPVSEPETK |
| NOV46b | YTWTTDRLWRKSRSPHNNGTCFGTDLNRNFNASWCSIGASRNCQDQTFCGTGPVSEPETK |
| NOV46c | YTWTTDRLWRKSRSPHNNGTCFGTDLNRNFNASWCSIGASRNCQDQTFCGTGPVSEPETK |
| NOV46d | YTWTTDRLWRKSRSPHNNGTCFGTDLNRNFNASWCSIGASRNCQDQTFCGTGPVSEPETK |
| NOV46e | YTWTTDRLWRKSRSPHNNGTCFGTDLNRNFNASWCSIGASRNCQDQTFCGTGPVSEPETK |
| NOV46f | YTWTTDRLWRKSRSPHNNGTCFGTDLNRNFNASWCSIGASRNCQDQTFCGTGPVSEPETK |
| NOV46g | YTWTTDRLWRKSRSPHNNGTCFGTDLNRNFNASWCSIGASRNCQDQTFCGTGPVSEPETK |
| NOV46h | YTWTTDRLWRKSRSPHNNGTCFGTDLNRNFNASWCSIGASRNCQDQTFCGTGPVSEPETK |
| NOV46i | YTWTTDRLWRKSRSPHNNGTCFGTDLNRNFNASWCSIGASRNCQDQTFCGTGPVSEPETK |
| NOV46j | YTWTTDRLWRKSRSPHNNGTCFGTDLNRNFNASWCSIGASRNCQDQTFCGTGPVSEPETK |
| NOV46k | YTWTTDRLWRKSRSPHNNGTCFGTDLNRNFNASWCSIGASRNCQDQTFCGTGPVSEPETK |
| NOV46l | YTWTTDRLWRKSRSPHNNGTCFGTDLNRNFNASWCSIGASRNCQDQTFCGTGPVSEPETK |
| NOV46m | YTWTTDRLWRKSRSPHNNGTCFGTDLNRNFNASWCNSSWTEGSKCIESKVWNQL------ |
| NOV46n | YTWTTDRLWRKSRSPHNNGTCFGTDLNRNFNASWCSIGASRNCQDQTFCGTGPVSEPETK |
| NOV46o | YTWTTDRLWRKSRSPHNNGTCFGTDLNRNFNASWCSIGASRNCQDQTFCGTGPVSEPETK |
| NOV46p | YTWTTDRLWRKSRSPHNNGTCFGTDLNRNFNASWCSIGASRNCQDQTFCGTGPVSEPETK |
| NOV46q | YTWTTDRLWRKSRSPHNNGTCFGTDLNRNFNASWCSIGASRNCQDQTFCGTGPVSEPETK |
| NOV46r | YTWTTDRLWRKSRSPHNNGTCFGTDLNRNFNASWCSIGASRNCQDQTFCGTGPVSEPETK |
| NOV46s | YTWTTDRLWRKSRSPHNNGTCFGTDLNRNFNASWCSIGASRNCQDQTFCGTGPVSEPETK |
| NOV46t | YTWTTDRLWRKSRSPHNNGTCFGTDLNRNFNASWCSIGASRNCQDQTFCGTGPVSEPETK |
| NOV46a | AVASFIESKKDDILCFLTMHSYGQLILTPYGYTKNKSSNHPEMIQVGQKAANALKAKYGT |
| NOV46b | AVASFIESKKDDILCFLTMHSYGQLILTPYGYTKNKSSNHPEMIQVGQKAANALKAKYGT |
| NOV46c | AVASFIESKKDDILCFLTMHSYGQLILTPYGYTKNKSSNHPEMIQVGQKAANALKAKYGT |
| NOV46d | AVASFIESKKDDILCFLTMHSYGQLILTPYGYTKNKSSNHPEMIQVGQKAANALKAKYGT |
| NOV46e | AVASFIESKKDDILCFLTMHSYGQLILTPYGYTKNKSSNHPEMIQVGQKAANALKAKYGT |
| NOV46f | AVASFIESKKDDILCFLTMHSYGQLILTPYGYTKNKSSNHPEMIQVGQKAANALKAKYGT |
| NOV46g | AVASFIESKKDDILCFLTMHSYGQLILTPYGYTKNKSSNHPEMIQVGQKAANALKAKYGT |
| NOV46h | AVASFIESKKDDILCFLTMHSYGQLILTPYGYTKNKSSNHPEMIQVGQKAANALKAKYGT |
| NOV46i | AVASFIESKKDDILCFLTMHSYGQLILTPYGYTKNKSSNHPEMIQVGQKAANALKAKYGT |
| NOV46j | AVASFIESKKDDILCFLTMHSYGQLILTPYGYTKNKSSNHPEMIQVGQKAANALKAKYGT |
| NOV46k | AVASFIESKKDDILCFLTMHSYGQLILTPYGYTKNKSSNHPEMIQVGQKAANALKAKYGT |
| NOV46l | AVASFIESKKDDILCFLTMHSYGQLILTPYGYTKNKSSNHPEMIQVGQKAANALKAKYGT |
| NOV46m | ------------------------------------------------------------ |
| NOV46n | AVASFIESKKDDILCFLTMHSYGQLILTPYGYTKNKSSNHPEMIQVGQKAANALKAKYGT |
| NOV46o | AVASFIESKKDDILCFLTMHSYGQLILTPYGYTKNKSSNHPEMIQVGQKAANALKAKYGT |
| NOV46p | AVASFIESKKDDILCFLTMHSYGQLILTPYGYTKNKSSNHPEMIQVGQKAANALKAKYGT |
| NOV46q | AVASFIESKKDDILCFLTMHSYGQLILTPYGYTKNKSSNHPEMIQVGQKAANALKAKYGT |
| NOV46r | AVASFIESKKDDILCFLTMHSYGQLILTPYGYTKNKSSNHPEMIQVGQKAANALKAKYGT |
| NOV46s | AVASFIESKKDDILCFLTMHSYGQLILTPYGYTKNKSSNHPEMIQVGQKAANALKAKYGT |
| NOV46t | AVASFIESKKDDILCFLTMHSYGQLILTPYGYTKNKSSNHPEMIQVGQKAANALKAKYGT |
| NOV46a | NYRVGSSADILYASSGSSRDWARDIGIPFSYTFELRDSGTYGFVLPEAQIQPTCEETMEA |
| NOV46b | NYRVGSSADILYASSGSSRDWARDIGIPFSYTFELRDSGTYGFVLPEAQIQPTCEETMEA |
| NOV46c | NYRVGSSADILYASSGSSRDWARDIGIPFSYTFELRDSGTYGFVLPEAQIQPTCEETMEA |
| NOV46d | NYRVGSSADILYASSGSSRDWARDIGIPFSYTFELRDSGTYGFVLPEAQIQPTCEETMEA |
| NOV46e | NYRVGSSADILYASSGSSRDWARDIGIPFSYTFELRDSGTYGFVLPEAQIQPTCEETMEA |
| NOV46f | NYRVGSSADILYASSGSSRDWARDIGIPFSYTFELRDSGTYGFVLPEAQIQPTCEETMEA |
| NOV46g | NYRVGSSADILYASSGSSRDWARDIGIPFSYTFELRDSGTYGFVLPEAQIQPTCEETMEA |
| NOV46h | NYRVGSSADILYASSGSSRDWARDIGIPFSYTFELRDSGTYGFVLPEAQIQPTCEETMEA |
| NOV46i | NYRVGSSADILYASSGSSRDWARDIGIPFSYTFELRDSGTYGFVLPEAQIQPTCEETMEA |
| NOV46j | NYRVGSSADILYASSGSSRDWARDIGIPFSYTFELRDSGTYGFVLPEAQIQPTCEETMEA |
| NOV46k | NYRVGSSADILYASSGSSRDWARDIGIPFSYTFELRDSGTYGFVLPEAQIQPTCEETMEA |
| NOV46l | NYRVGSSADILYASSGSSRDWARDIGIPFSYTFELRDSGTYGFVLPEAQIQPTCEETMEA |
| NOV46m | ------------------------------------------------------------ |
| NOV46n | NYRVGSSADILYASSGSSRDWARDIGIPFSYTFELRDSGTYGFVLPEAQIQPTCEETMEA |
| NOV4Go | NYRVGSSADILYASSGSSRDWARDIGIPFSYTFELRDSGTYGFVLPEAQIQPTCEETMEA |
| NOV46p | NYRVGSSADILYASSGSSRDWARDIGIPFSYTFELRDSGTYGFVLPEAQIQPTCEETMEA |
| NOV46q | NYRVGSSADILYASSGSSRDWARDIGIPFSYTFELRDSGTYGFVLPEAQIQPTCEETMEA |
| NOV46r | NYRVGSSADILYASSGSSRDWARDIGIPFSYTFELRDSGTYGFVLPEAQIQPTCEETMEA |
| NOV46s | NYRVGSSADILYASSGSSRDWARDIGIPFSYTFELRDSGTYGFVLPEAQIQPTCEETMEA |
| NOV46t | NYRVGSSADILYASSGSSRDWARDIGIPFSYTFELRDSGTYGFVLPEAQIQPTCEETMEA |
| NOV46a | VLSVLDDVYAKHWHSDSAGRVTSATMLLGLLVSCMSLL------ |
| NOV46b | VLSVLDDVYAKHWHSDSAGRVTSATMLLGLLVSCMSLL------ |
| NOV46c | VLSVLDDVYAKHWHSDSAGRVTSATMLLGLLVSCMSLLHHHHHH |
| NOV46d | VLSVLDDVYAKHWHSDSAGRVTSATMLLGLLVSCMSLL------ |
| NOV46e | VLSVLDDVYAKHWHSDSAGRVTSATMLLGLLVSCMSLLHHHHHH |
| NOV46f | VLSVLDDVYAKHWHSDSAGRVTSATMLLGLLVSCMSLL------ |
| NOV46g | VLSVLDDVYAKHWHSDSAGRVTSATMLLGLLVSCMSLL------ |
| NOV46h | VLSVLDDVYAKHWHSDSAGRVTSATMLLGLLVSCMSLL------ |
| NOV46i | VLSVLDDVYAKHWHSDSAGRVTSATMLLGLLVSCMSLL------ |
| NOV46j | VLSVLDDVYAKHWHSDSAGR------------------------ |
| NOV46k | VLSVLDDVYAKHWHSDSAGRVTSATMLLGLLVSCMSLL------ |
| NOV46l | VLSVLDDVYAKHWHSDSAGRVTSATMLLGLLVSCMSLL------ |
| NOV46m | -------------------------------------------- |
| NOV46n | VLSVLDDVYAKHWHSDSAGRVTSATMLLGLLVSCMSLL------ |
| NOV46o | VLSVLDDVYAKHWHSDSAGRVTSATMLLGLLVSCMSLL------ |
| NOV46p | VLSVLDDVYAKHWHSDSAGRVTSATMLLGLLVSCMSLL------ |
| NOV46q | VLSVLDDVYAKHWHSDSAGRVTSATMLLGLLVSCMSLLHHHHHH |
| NOV46r | VLSVLDDVYAKHWHSDSAGRVTSATMLLGLLVSCMSLLHHHHHH |
| NOV46s | VLSVLDDVYAKHWHSDSAGRVTSATMLLGLLVSCMSLL------ |
| NOV46t | VLSVLDDVYAKHWHSDSAGRVTSATMLLGLLVSCMSLLHHHHHH |
| NOV46a | (SEQ ID NO: 700) |
| NOV46b | (SEQ ID NO: 702) |
| NOV46c | (SEQ ID NO: 704) |
| NOV46d | (SEQ ID NO: 706) |
| NOV46e | (SEQ ID NO: 708) |
| NOV46f | (SEQ ID NO: 710) |
| NOV46g | (SEQ ID NO: 712) |
| NOV46h | (SEQ ID NO: 714) |
| NOV46i | (SEQ ID NO: 716) |
| NOV46j | (SEQ ID NO: 718) |
| NOV46k | (SEQ ID NO: 720) |
| NOV46l | (SEQ ID NO: 722) |
| NOV46m | (SEQ ID NO: 724) |
| NOV46n | (SEQ ID NO: 726) |
| NOV46o | (SEQ ID NO: 728) |
| NOV46p | (SEQ ID NO: 730) |
| NOV46q | (SEQ ID NO: 732) |
| NOV46r | (SEQ ID NO: 734) |
| NOV46s | (SEQ ID NO: 736) |
| NOV46t | (SEQ ID NO: 738) |

[0615] Further analysis of the NOV46a protein yielded the following properties shown in Table 46C.

TABLE 46C
Protein Sequence Properties NOV46a

| | |
|---|---|
| SignalP analysis: | Cleavage site between residues 21 and 22 |
| PSORT II analysis: | |

| PSG: | a new signal peptide prediction method | | | |
|---|---|---|---|---|
| | N-region: | length 6; | pos.chg 1; | neg.chg 1 |
| | H-region: | length 15; | peak value | 9.15 |

| | PSG score: 4.75 |
|---|---|
| GvH: | von Heijne's method for signal seq. recognition |
| | GvH score (threshold: −2.1): −0.52 |
| | possible cleavage site: between 20 and 21 |

>>> Seems to have a cleavable signal peptide (1 to 20)

| ALOM: | Klein et al's method for TM region allocation | | |
|---|---|---|---|
| | Init position for calculation: 21 | | |
| | Tentative number of TMS(s) for the threshold 0.5: 1 | | |
| | Number of TMS(s) for threshold 0.5: 1 | | |
| | INTEGRAL | Likelihood = −2.34 | Transmembrane 357-373 |

| | |
|---|---|
| PERIPHERAL | Likelihood = 4.08 (at 229) |

ALOM score: −2.34 (number of TMSs: 1)

MTOP: Prediction of membrane topology (Hartmann et al.)

Center position for calculation: 10
Charge difference: −0.5 C(0.5) − N(1.0)
N >= C: N-terminal side will be inside

>>> membrane topology: type 1a (cytoplasmic tail 374 to 374)
>>> Seems to be GPI anchored
MITDISC: discrimination of mitochondrial targeting seq

| | | | |
|---|---|---|---|
| R content: | 0 | Hyd Moment(75): | 8.63 |
| Hyd Moment(95): | 12.49 | G content: | 4 |
| D/E content: | 2 | S/T content: | 1 |
| Score: −7.55 | | | |

Gavel: prediction of cleavage sites for mitochondrial preseq

cleavage site motif not found

NUCDISC: discrimination of nuclear localization signals

pat4: none
pat7: none
bipartite: none
content of basic residues: 9.9%
NLS Score: −0.47

KDEL: ER retention motif in the C-terminus: none
ER Membrane Retention Signals: none
SKL: peroxisomal targeting signal in the C-terminus: none
PTS2: 2nd peroxisomal targeting signal: none
VAC: possible vacuolar targeting motif: none
RNA-binding motif: none
Actinin-type actin-binding motif:

type 1: none
type 2: none

NMYR: N-myristoylation pattern: none
Prenylation motif: none
memYQRL: transport motif from cell surface to Golgi: none
Tyrosines in the tail: none
Dileucine motif in the tail: none
checking 63 PROSITE DNA binding motifs: none
checking 71 PROSITE ribosomal protein motifs: none
checking 33 PROSITE prokaryotic DNA binding motifs: none

| | |
|---|---|
| NNCN: | Reinhardt's method for Cytoplasmic/Nuclear discrimination |
| | Prediction: cytoplasmic |
| | Reliability: 70.6 |
| COIL: | Lupas's algorithm to detect coiled-coil regions |
| | total: 0 residues |

Final Results (k = 9/23):

55.6%: extracellular, including cell wall
22.2%: endoplasmic reticulum
11.1%: Golgi
11.1%: plasma membrane

>> prediction for CG55794-03 is exc (k = 9)

[0616] A search of the NOV46a protein against the Geneseq database, a proprietary database that contains sequences published in patents and patent publication, yielded several homologous proteins shown in Table 46D.

TABLE 46D
Geneseq Results for NOV46a

| | | NOV46a | Identities/ | |
|---|---|---|---|---|
| | | Residues/ | Similarities for | |
| Geneseq | Protein/Organism/Length | Match | the Matched | Expect |
| Identifier | [Patent #, Date] | Residues | Region | Value |
| AAG66547 | Human secreted | 1 . . . 374 | 374/374 (100%) | 0.0 |
| | metallocarboxypeptidase-like | 1 . . . 374 | 374/374 (100%) | |
| | polypeptide - Homo sapiens, 374 | | | |
| | aa. [WO200157265-A1, 09- | | | |
| | AUG-2001] | | | |
| AAG66565 | Human secreted | 1 . . . 374 | 373/374 (99%) | 0.0 |
| | metallocarboxypeptidase-like | 1 . . . 374 | 374/374 (99%) | |
| | variant polypeptide - Homo | | | |
| | sapiens, 374 aa. [WO200157265- | | | |
| | A1, 09-AUG-2001] | | | |
| AAU82703 | Amino acid sequence of novel | 1 . . . 374 | 372/374 (99%) | 0.0 |
| | human protease #2 - Homo | 1 . . . 374 | 373/374 (99%) | |
| | sapiens, 374 aa. [WO200200860- | | | |
| | A2, 03-JAN-2002] | | | |
| AAB74682 | Human protease and protease | 13 . . . 374 | 360/362 (99%) | 0.0 |
| | inhibitor PPIM-15 - Homo | 1 . . . 362 | 361/362 (99%) | |
| | sapiens, 362 aa. [WO200110903- | | | |
| | A2, 15-FEB-2001] | | | |
| AAG66560 | Human secreted | 21 . . . 374 | 354/354 (100%) | 0.0 |
| | metallocarboxypeptidase-like | 1 . . . 354 | 354/354 (100%) | |
| | polypeptide - Homo sapiens, 354 | | | |
| | aa. [WO200157265-A1, 09- | | | |
| | AUG-2001] | | | |

[0617] In a BLAST search of public sequence databases, the NOV46a protein was found to have homology to the proteins shown in the BLASTP data in Table 46E.

TABLE 46E
Public BLASTP Results for NOV46a

| | | NOV46a | Identities/ | |
|---|---|---|---|---|
| Protein | | Residues/ | Similarities for | |
| Accession | | Match | the Matched | Expect |
| Number | Protein/Organism/Length | Residues | Portion | Value |
| Q8IVL8 | Zn-carboxypeptidase - Homo | 1 . . . 374 | 372/374 (99%) | 0.0 |
| | sapiens (Human), 374 aa. | 1 . . . 374 | 373/374 (99%) | |
| Q9PUF2 | Carboxypeptidase homolog - | 13 . . . 337 | 152/326 (46%) | 7e−87 |
| | Bothrops jararaca (Jararaca), 416 | 82 . . . 405 | 219/326 (66%) | |
| | aa. | | | |
| Q8AXN3 | Carboxypeptidase B - | 41 . . . 337 | 146/297 (49%) | 8e−86 |
| | Paralichthys olivaceus (Flounder), | 100 . . . 396 | 203/297 (68%) | |
| | 408 aa (fragment). | | | |
| CAA03381 | SEQUENCE 85 FROM PATENT | 45 . . . 352 | 148/312 (47%) | 1e−85 |
| | WO9620011 - unidentified, 349 | 26 . . . 336 | 204/312 (64%) | |
| | aa. | | | |
| Q9JHH6 | Carboxypeptidase R (Thrombin- | 30 . . . 350 | 145/323 (44%) | 2e−85 |
| | activatable fibrinolysis inhibitor) | 103 . . . 417 | 210/323 (64%) | |
| | (1110032P04Rik protein) - Mus | | | |
| | musculus (Mouse), 422 aa. | | | |

[0618] PFam analysis indicates that the NOV46a protein contains the domains shown in the Table 46F.

TABLE 46F
Domain Analysis of NOV46a

| | | Identities/ | |
|---|---|---|---|
| | NOV46a | Similarities for | |
| Pfam Domain | Match Region | the Matched Region | Expect Value |
| Zn_carbOpept | 48..249 | 82/215 (38%) | 1.2e-74 |
| | | 168/215 (78%) | |

### Example 47

[0619] The NOV47 clone was analyzed, and the nucleotide and encoded polypeptide sequences are shown in Table 47A.

TABLE 47A

NOV47 Sequence Analysis
NOV47a,

| | | |
|---|---|---|
| CG55806-04 | SEQ ID NO: 747 | 1300 bp |
| DNA Sequence | ORF Start: ATG at 20 | ORF Stop: TGA at 1274 |

TGACTGTATCGCCGGATTCATGCAGCGCGTGAACATGATCATGGCAGAATCACCAGGCCTCATCACCA
TCTGCCTTTTAGGATATCTACTCAGTGCTGAATGTACAGTTTTTCTTGATCATGAAAACGCCAACAAA
ATTCTGAATCGGCCAAAGAGGTATAATTCAGGTAAATTGGAGGAGTTTGTTCATGGGAACCTTGAGAG
AGAATGTATGGAAGAAAAGTGCAGTTTTGAAGAAGCACGAGAAGTTTTTGAAAACACTGAAAGAACAA
CTGAATTTTGGAAGCAGTATGTTGATGGAGATCAGTGTGAGTCCAATCCATGTTTAAATGGCGGCAGT
TGCAAGGATGTCATTAATTCCTATGAATGTTGGTGTCCCTTTGGATTTGAAGGAAAGAACTGTGAATT
AGTGCCATTTCCATGTGGAAGAGTTTCTGTTTCACAAACTTCTAAGCTCACCCGTGCTGAGACTGTTT
TTCCTGATGTGGACTATGTAAATTCTACTGAAGCTGAAACCATTTTGGATAACATCACTCAAAGCACC
CAATCATTTAATGACTTCACTCGGGTTGTTGGTGGAGAAGATGCCAAACCAGGTCAATTCCCTTGGCA
GGTTGTTTTGAATGGTAAAGTTGATGCATTCTGTGGAGGCTCTATCGTTAATGAAAAATGGATTGTAA
CTGCTGCCCACTGTGTTGAAACTGGTGTTAAAATTACAGTTGTCGCAGGTGAACATAATATTGAGGAG
ACAGAACATACAGAGCAAAAGCGAAATGTGATTCGAATTATTCCTCACCACAACTACAATGCAGCTAT
TAATAAGTACAACCATGACATTGCCCTTCTGGAACTGGACGAACCCTTAGTGCTAAACAGCTACGTTA
CACCTATTTGCATTGCTGACAAGGAATACACGAACATCTTCCTCAAATTTGGATCTGGCTATGTAAGT
GGCTGGGGAAGAGTCTTCCACAAAGGGAGATCAGCTTTAGTTCTTCAGTACCTTAGAGTTCCACTTGT
TGACCGAGCCACATGTCTTGATCTACAAAGTTCACCATCTATAACAACATGTTCTGTGCTAGGCTTCC
ATGAAGGAGGTAGAGATTCATGTCAAGGAGATAGTGGGGGACCCCATGTTACTGAAGTGGAAGGGACC
AGTTTCTTAACTGGAATTATTAGCTGGGGTGAAGAGTGTGCAATGAAAGGCAAATATGGAATATATAC
CAAGGTATCCCGGTATGTCAACTGGATTAAGGAAAAAACAAAGCTCACTTGACTGCAGCCAAGCTAAT
TCCGGAAG

| | | | |
|---|---|---|---|
| NOV47a, | | | |
| GG55806-04 | | | |
| Protein Sequence | SEQ ID NO: 748 | 418 aa | MW at 47031.8kD |

MQRVNMIMAESPGLITICLLGYLLSAECTVFLDHENANKILNRPKRYNSGKLEEFVHGNLERECMEEK
CSFEEAREVFENTERTTEFWKQYVDGDQCESNPCLNGGSCKDVINSYECWCPFGFEGKNCELVPFPCG
RVSVSQTSKLTRAETVFPDVDYVNSTEAETILDNITQSTQSFNDFTRVVGGEDAKPGQFPWQVVLNGK
VDAFCGGSIVNEKWIVTAAHCVETGVKITVVAGEHNIEETEHTEQKRIVIRIIPHNNYNAAINKYNHD
IALLELDEPLVLNSYVTPICIADKEYLIIFLKFGSGYVSGWGRVFHKGRSALVLQYLRVPLVDRATCL
RSTKFTIYNNMFCAGFHEGGRDSCQGDSGGPHVTEVEGTSFLTGIISWGEECAMKGKYGIYTKVSRYV
NWIKEKTKLT

| | | |
|---|---|---|
| NOV47b, | | |
| CG55806-01 | SEQ ID NO: 749 | 1438 bp |
| DNA Sequence | ORF Start: ATG at 2 | ORF Stop: TAA at 1184 |

TATGCAGCGCGTGAACATGATCATGGCAGAATCACCAGGCCTCATCACCATCTGCCTTTTAGGATATC
TACTCAGTGCTGAATGTACAGTTTTTCTTGATCATGAAAACGCCAACAAAATTCTGAATCGGCCAAAG
AGGTATAATTCAGGTAAATTGGAAGAGTTTGTTCAAGGGGAACCTTGAGAGAGAATGTCTGGAGGAAA
GTGTAGTTTTGAAGAAGCACGAGAAGTTTTTGAAAACACTGAAAGAACAACTGAATTTTGGAAGCAGT
ATGTTGATGGAGATCAGTGTGAGTCCAATCCATGTTTAAATGGCGGCAGTTGCAAGGATGACATTAAT
TCCTATGAATGTTGGTGTCCCTTTGGATTTGAAGGAAAGAACTGTGAATTAGATGTGGACTATGTAAA
TTCTACTGAAGCTGAAACCATTTTGGATAACATCACTCAAAGCACCCAATCATTTAATGACTTCACTC
GGGTTGTTGGTGGAGAAGATGCCAAACCAGGTCAATTCCCTTGGCAGGTTGTTTTGAATGGTAAAGTT
GATGCATTCTGTGGAGGCTCTATCGTTAATGAAAAATGGATTGTAACTGCTGCCCACTGTGTTGAAAC
TGGTGTTAAAATTACAGTTGTCGCAGGTGAACATAATATTGAGGAGACAGAACATACAGAGCAAAAGC
GAAATGTGATTCGAATTATTCCTCACCACAACTACAATGCAGCTATTAATAAGTACAACCATGACATT
GCCCTTCTGGAACTGGACGAACCCTTAGTGCTAAACAGCTACGTTACACCTATTTGCATTGCTGACAA
GGAATACACGAACATCTTCCTCAAATTTGGATCTGGCTATGTAAGTGGCTGGGGAAGAGTCTTCCACA
AAGGGAGATCAGCTTTAGTTCTTCAGTACCTTAGAGTTCCACTTGTTGACCGAGCCACATGTCTTCGA
TCTACAAAGTTCACCATCTATAACAACATGTTCTGTGCTGGCTTCCATGAAGGAGGTAGAGATTCATG
TCAAGGAGATAGTGGGGGACCCCATGTTACTGAAGTGGAAGGGACCAGTTTCTTAACTGGAATTATTA
GCTGGGGTGAAGAGTGTGCAATGAAAGGCAAATATGGAATATATACCAAGGTATCCCGGTATGTCAAC
TGGATTAAGGAAAAAACAAAGCTCACTTAATGAAAGATGGATTTCCAAGGTTAATTCATTGGAATTGA
AAATTAACAGGGCCTCTCACTAACTAATCACTTTCCCATCTTTTGTTAGATTTGAATATATACATTCT
ATGATCATTGCTTTTTCTCTTTACAGGGGAGAATTTCATATTTTACCTGAGCAAATTGATTAGAAAAT
GGAACCACTAGAGGAATATAATGTGTTAGGAAATTACAGTCATTTCTAAGGGCCCAGCCTTGACAAAT
TGTGAGTAAA

| | | | |
|---|---|---|---|
| NOV47B, CG55806-01 | | | |
| Protein Sequence | SEQ ID NO: 750 | 394 aa | MW at 44431.7kD |

MQRVNMIMAESPGLITICLLGYLLSAECTVFLDHENANKILNRPKRYNSGKLEEFVQGNLERECLEEK
CSFEEAREVFENTERTTEFWKQYVDGDQCESNPCLNGGSCKDDINSYECWCPFGFEGKNCELDVDYVN
STEAETILDNITQSTQSFNDFTRVVGGEDAKPGQFPWQVVLNGKVDAFCGGSIVNEKWIVTAAHCVET
GVKITVVAGEHNIEETEHTEQKRNVIRIIPHHNYNAAINKYNHDIALLELDEPLVLNSYVTPICIADK
EYTNIFLKFGSGYVSGWGRVFHKGRSALVLQYLRVPLVDRATCLRSTKFTIYNNMFCAGFHEGGRDSC
QGDSGGPHVTEVEGTSFLTGIISWGEECAMKGKYGIYTKVSRYVNWIKEKTKLT

| | | |
|---|---|---|
| NOV47c, CG55806-02 | SEQ ID NO: 751 | 2807 bp |
| DNA Sequence | ORF Start: ATG at 20 | ORF Stop: TAA at 1403 |

CAATCTGCTAGCAAAGGTTATGCAGCGCGTGAACATGATCATGGCAGAATCACCAGGCCTGATCACCA
TCTGCCTTTTAGGATATCTACTCAGTGCTGAATGTACAGTTTTTCTTGATCATGAAAACGCCAACAAA
ATTCTGAATCGGCCAAAGAGGTATAATTCAGGTAAATTGGAAGAGTTTGTTCAAGGGAACCTTGAGAG
AGAATGTATGGAAGAAAAGTGTAGTTTTGAAGAAGCACGAGAAGTTTTTGAAAACACTGAAAGAACAA
CTGAATTTTGGAAGCAGTATGTTGATGGAGATCAGTGTGAGTCCAATCCATGTTTAAATGGCGGCAGT
TGCAAGGATGACATTAATTCCTATGAATGTTGGTGTCCCTTTGGATTTGAAGGAAAGAACTGTGAATT
AGATGTAACATGTAACATTAAGAATGGCAGATGAGCAGTTTTGTAAAAATAGTGCTGATAACACAAGG
TGGTTTGCTCCTGTACTGAGGGATATCGACTTGCAGAAAACCAGAAGTCCTGTGAACCAGCAGTGCCA
TTTCCATGTGGAAGAGTTTCTGTTTCACAAACTTCTAAGCTCACCCGTGCTGAGACTGTTTTTCCTGA
TGTGGACTATGTAAATTCTACTGAAGCTGAAACCATTTTGGATAACATCACTCAAAGCACCCAATCAT
TTAATGACTTCACTCGGGTTGTTGGTGGAGAAGATGCCAAACCAGGTCAATTCCCTTGGCAGGTTGTT
TTGAATGGTAAAGTTGATGCATTCTGTGGAGGCTCTATCGTTAATGAAAAATGGATTGTAACTGCTGC
CCACTGTGTTGAAACTGGTGTTAAAATTACAGTTGTCGCAGGTGAACATAATATTGAGGAGACAGAAC
ATACAGAGCAAAGCGAAATGTGATTCGAATTATTCCTCACCACAACTACAATGCAGCTAATTAATAAG
TACAACCATGCATTGCCCTTCTGGAACTGGACGAACCCTTAGTGCTAAACAGCTACGTTACAACCTAT
TTGCATTGCTGACAAGGAATACACGAACATCTTCCTCAAATTTGGATCTGGCTATGTAAGTGGCTGGG
GAAGAGTCTTCCACAAAGGGAGATCAGCTTTAGTTCTTCAGTACCTTAGAGTTCCACTTGTTGACCGA
GCCACATGTCTTCGATCTACAAAGTTCACCATCTATAACAACATGTTCTGTGCTGGCTTCCATGAAGG
AGGTAGAGATTCATGTCAAGGAGATAGTGGGGGACCCCATGTTACTGAAGTGGAAGGGACCAGTTTCT
TAACTGGAATTATTAGCTGGGGTGAAGAGTGTGCAATGAAAGGCAAATATGGAATATATACCAAGGTA
TCCCGGTATGTCAACTGGATTAAGGAAAAAACAAAGCTCACTTAATGAAAGATGGATTTCCAAGGTTA
ATTCATTGGAATTGAAAATTAACAGGGCCTCTCACTAACTAATCACTTTCCCATCTTTTGTTAGATTT
GAATATATACATTCTATGATCATTGCTTTTTCTCTTTACAGGGGAGAATTTCATATTTTACCTGAGCA
AATTGATTAGAAAATGGAACCACTAGAGGAATATAATGTGTTAGGAAATTACAGTCATTTCTGAAGCC
CAGCCCTTGACAAAATTGTGAAGTTAAATTCTCCACTCTGTCCATCAGATACTATGGTTCTCCACTAT
GGCAACTAACTCACTCAATTTTCCCTCCTTAGCAGCATTCCATCTTCCCGATCTTCTTTGCTTCTCCA
ACCAAAACATCATGTTTATTAGTTCTGTATACAGTACAGGATCTTTGGTCTACTCTATCACGAGAAGG
CTCAGTACCACACTCATGAAGAAAGAACACAGGAGTAGCTGAGAGGCTAAAACTCATCAAAAACACTA
CTCCTTTTCCTCTACCCTATTCCTCAATCTTTTACCTTTTCCAAATTCCCAATTCCCCAAATCAGTTT
TTCTCTTTCTTACTCCCTCTCTCCCTTTTACCCTCCATGGTCGTTAAAGGAGAGATGGGGAGCATCAT
TCTGTTATACTTCTGTACACAGTTATACATGTCTATCAAACCCAGACTTGCTTCCATAGTGGAGACTT
GCTTTTCAGAACATAGGGATGAAGTAAGGTGCCTGAAAAGTTTGGGGGAAAAGTTTCTTTCAGAGAGT
TAAGTTATTTTATATATATAATATATATATAAAATATATAATATACAATATAAATATATAGTGTGTGT
GTGTATGCGTGTGTGTAGACACACACGCATACACACATATAATGGAAGCAATAAGCCATTCTTAAGAG
CTTGTATGGTTATGCAGGTCTGACTAGGCATGATTTCACGAAGGCAAGATTGGCATATCAGTTGTAAC
TAAAAAAGCTGACATTGACCCAGACATATTGTACTCTTTCTAAAAATAATAATAATAATGCTAACAGA
AAGAAGAGAACCGTTCGTTTGCAATCTACAGCTAGTAGAGACTTGAGGAAGAATTCAACAGTGTGTCT
TCAGCAGTGTTCAGAGCCAAGCAAGAAGTTGAAGTTGCCTAGACCAGAGGACATAAGTATCATGTCTC
CTTTAACTAGCATACCCCGAAGTGGAGAAGGATGCAGCAGGCTCAAAGGCATAAGTCATTCCAATCAG
CCAACTAAGTTGTCCTTTTCTGGTTTCGTGTTCACCATGGAACATTTTGATTATAGTTAATCCTTCTA
TCTTGAATCTTCTAGAGAGTTGCTGACCAACTGACGTATGTTTCCCTTTGTGAATTAATAAACTGGTG
TTCTGGTTCAAAAAAAAAA

| | | | |
|---|---|---|---|
| NOV47c, CG55806-02 | | | |
| Protein Sequence | SEQ ID NO: 752 | 461 aa | MW at 51778.0kD |

MQRVNMIMAESPGLITICLLGYLLSAECTVFLDHENANKILNRPKRYNSGKLEEFVQGNLERECMEEK
CSFEEAREVFENTERTTEFWKQYVDGDQCESNPCLNGGSCKDDINSYECWCPFGFEGKNCELDVTCNI
KNGRCEQFCKNSADNKVVCSCTEGYRLAENQKSCEPAVPFPCGRVSVSQTSKLTRAETVFPDVDYVNS
TEAETILDNITQSTQSFNDFTRVVGGEDAKPGQFPWQVVLNGKVDAFCGGSIVNEKWIVTAAHCVETG
VKITVVAGEHNIEETEHTEQKRNVIRIIPHHNYNAAINKYNHDIALLELDEPLVLNSYVTPICIADKE
YTNIFLKFGSGYVSGWGRVFHKGRSALVLQYLRVPLVDRATCLRSTKFTIYNNMFCAGFHEGGRDSCQ
GDSGGPHVTEVEGTSFLTGIISWGEECAMKGKYGIYTKVSRYVNWIKEKTKLT

| | | |
|---|---|---|
| NOV47d, CG55806-03 | SEQ ID NO: 753 | 1612 bp |
| DNA Sequence | ORF Start: ATG at 22 | ORF Stop: TAA at 1405 |

TTGACTGTATCGCCGGAATTCATGCAGCGCGTGAACATGATCATGGCAGAATCACCAGGCCTCATCAC
CATCTGCCTTTTAGGATATCTACTCAGTGCTGAATGTACAGTTTTTCTTGATCATGAAAACGCCAACA
AAATTCTGAATCGGCCAAAGAGGTATAATTCAGGTAAATTGGAAGAGTTTGTTCAAGGGAACCTTGAG
AGAGAATGTATGGAAGAAAAGTGTAGTTTTGAAGAAGCACGAGAAGTTTTTGAAAACACTGAAAGAAC
AACTGAATTTTGGAAGCAGTATGTTGATGGAGATCAGTGTGAGTCCAATCCATGTTTAAATGGCGGCA
GTTGCAAGGATGACATTAATTCCTATGAATGTTGGTGTCCCTTTGGATTTGAAGGAAAGAACTGTGAA
TTAGATGTAACATGTAACATTAAGAATGGCAGATGCGAGCAGTTTTGTAAAAATAGTGCTGATAACAA
GGTGGTTTGCTCCTGTACTGAGGGATATCGACTTGCAGAAAACCAGAAGTCCTGTGAACCAGCAGTGC
CATTTCCATGTGGAAGAGTTTCTGTTTCACAAACTTCTAAGCTCACCCGTGCTGAGACTGTTTTTCCT
GATGTGGACTATGTAAATTCTACTGAAGCTGAAACCATTTTGGATAACATCACTCAAAGCACCCAATC
ATTTAATGACTTCACTCGGGTTGTTGGTGGAGAAGATGCCAAACCAGGTCAATTCCCTTGGCAGGTTG
TTTTGAATGGTAAAGTTGATGCATTCTGTGGAGGCTCTATCGTTAATGAAAAATGGATTGTAACTGCT
GCCCACTGTGTTGAAACTGGTGTTAAAATTACAGTTGTCGCAGGTGAACATAATATTGAGGAGACAGA
ACATACAGAGCAAAAGCGAAATGTGATTCGAATTATTCCTCACCACAACTACAATGCAGCTATTAATA
AGTACAACCATGACATTGCCCTTCTGGAACTGGACGAACCCTTAGTGCTAAACAGCTACGTTACACCT
ATTTGCATTGCTGACAAGGAATACACGAACATCTTCCTCAAATTTGGATCTGGCTATGTAAGTGGCTG
GGGAAGAGTCTTCCACAAAGGGAGATCAGCTTTAGTTCTTCAGTACCTTAGAGTTCCACTTGTTGACC
GAGCCACATGTCTTCGATCTACAAAGTTCACCATCTATAACAACATGTTCTGTGCTGGCTTCCATGAA
GGAGGTAGAGATTCATGTCAAGGAGATAGTGGGGGACCCCATGTTACTGAAGTGGAAGGGACCAGTTT
CTTAACTGGAATTATTAGCTGGGGTGAAGAGTGTGCAATGAAAGGCAAATATGGAATATATACCAAGG
TATCCCGGTATGTCAACTGGATTAAGGAAAAAACAAAGCTCACTTAATGAAAGATGGATTTCCAAGGT
TAATTCATTGAAATTGAAAATTAATAGGGCCTCTCACTAACTAATCACTTTCCCATCTTTTGTTAGAT
TTGAATATATACATTCTATGATCATTGCTTTTTCTCTTTACAGGGGAGAATTTCATATTTTACCTGAG
CAAATTGATTAGAAAATGGAACCACTAGAGGAATATAATGTGTTAGGA

| | | | |
|---|---|---|---|
| NOV47d, CG55806-03 | | | |
| Protein Sequence | SEQ ID NO: 754 | 461 aa | MW at 51778.0kD |

MQRVNNIMAESPGLITICLLGYLLSAECTVFLDHENANKILNRPKRYNSGKLEEFVQGNLERECMEEK
CSFEEAREVFENTERTTEFWKQYVDGDQCESNPCLNGGSCKDDINSYECWCPFGFEGKNCELDVTCNI
KNGRCEQFCKNSADNKVVCSCTEGYRLAENQKSCEPAVPFPCGRVSVSQTSKLTRAETVFPDVDYVNS
TEAETILDNITQSTQSFNDFTRVVGGEDAKPGQFPWQVVLNGKVDAFCGGSIVNEKWIVTAAHCVETG
VKITVVAGEHNIEETEHTEQKRNVIRIIPHHNYNAAINKYNHDIALLELDEPLVLNSYVTPICIADKE
YTNIFLKFGSGYVSGWGRVFHKGRSALVLQYLRVPLVDRATCLRSTKFTIYNNMFCAGFHEGGRDSCQ
GDSGGPHVTEVEGTSFLTGIISWGEECAMKGKYGIYTKVSRYVNWIKEKTKLT

| | | |
|---|---|---|
| NOV47e, | | |
| SNP13382503 of | SEQ ID NO: 755 | 1300 bp |
| CG55806-04, | ORF Start: ATG at 20 | ORF Stop: TGA at 1274 |
| DNA Sequence | SNP Pos: 470 | SNP Change: A to G |

TGACTGTATCGCCGGATTCATGCAGCGCGTGAACATGATCATGGCAGAATCACCAGGCCTCATCACCA
TCTGCCTTTTAGGATATCTACTCAGTGCTGAATGTACAGTTTTTCTTGATCATGAAAACGCCAACAAA
ATTCTGAATCGGCCAAAGAGGTATAATTCAGGTAAATTGGAGGAGTTTGTTCATGGGAACCTTGAGAG
AGAATGTATGGAAGAAAAGTGCAGTTTTGAAGAAGCACGAGAAGTTTTTGAAAACACTGAAAGAACAA
CTGAATTTTGGAAGCAGTATGTTGATGGAGATCAGTGTGAGTCCAATCCATGTTTAAATGGCGGCAGT
TGCAAGGATGTCATTAATTCCTATGAATGTTGGTGTCCCTTTGGATTTGAAGGAAAGAACTGTGAATT
AGTGCCATTTCCATGTGGAAGAGTTTCTGTTTCACAAACTTCTAAGCTCACCCGTGCTGAGGCTGTTT
TTCCTGATGTGGACTATGTAAATTCTACTGAAGCTGAAACCATTTTGGATAACATCACTCAAAGCACC
CAATCATTTAATGACTTCACTCGGGTTGTTGGTGGAGAAGATGCCAAACCAGGTCAATTCCCTTGGCA
GGTTGTTTTGAATGGTAAAGTTGATGCATTCTGTGGAGGCTCTATCGTTAATGAAAAATGGATTGTAA
CTGCTGCCCACTGTGTTGAAACTGGTGTTAAAATTACAGTTGTCGCAGGTGAACATAATATTGAGGAG
ACAGAACATACAGAGCAAAAGCGAAATGTGATTCGAATTATTCCTCACCACAACTACAATGCAGCTAT
TAATAAGTACAACCATGACATTGCCCTTCTGGAACTGGACGAACCCTTAGTGCTAAACAGCTACGTTA
CACCTATTTGCATTGCTGACAAGGAATACACGAACATCTTCCTCAAATTTGGATCTGGCTATGTAAGT
GGCTGGGGAAGAGTCTTCCACAAAGGGAGATCAGCTTTAGTTCTTCAGTACCTTAGAGTTCCACTTGT
TGACCGAGCCACATGTCTTCGATCTACAAAGTTCACCATCTATAACAACATGTTCTGTGCTGGCTTCC
ATGAAGGAGGTAGAGATTCATGTCAAGGAGATAGTGGGGGACCCCATGTTACTGAAGTGGAAGGGACC
AGTTTCTTAACTGGAATTATTAGCTGGGGTGAAGAGTGTGCAATGAAAGGCAAATATGGAATATATAC
CAAGGTATCCCGGTATGTCAACTGGATTAAGGAAAAAACAAAGCTCACTTGACTGCAGCCAAGCTAAT
TCCGGAAG

| | | | |
|---|---|---|---|
| NOV47e, | | | |
| SNP13382503 of | | | |
| CG55806-04, | SEQ ID NO: 756 | | MW at 47001.8kD |
| Protein Sequence | SNP Pos: 151 | 418 aa | SNP Change: Thr to Ala |

MQRVNMIMAESPGLITICLLGYLLSAECTVFLDHENANKILNRAPKRYNSGKLEEFVGNLERECMEEK
CSFEEAREVFENTERTTEFWKQYVDGDCESNPCLNGGSCKDVINSAYECWCPFGFEGKNCELVPFPCG
RVSVSQTSKLTRAEAVFPDVDYVNSTAEETILDNITQSTQSFNDFTRVVGGEDAKPGQFPWQVVLNGK
VDAFCGGSIVNEKWIVTAAHCVETGVKITVVAGEHNIEETEHTEQKRNVIRIIPHHNYNAAINKYNHD
IALLELDEPLVLNSYVTPICIADKEYTNIFLKFGSGYVSGWGRVFHKGRSALVLQYLRVPLVDRATCL
RSTKFTIYNNMFCAGFHEGGRDSCQGDSGGPHVTEVEGTSFLTGIISWGEECAMKGKYGIYTKVSRYV
NWIKEKTKLT

| | | |
|---|---|---|
| NOV47f, | | |
| SNP13382492 of | SEQ ID NO: 757 | 1300 bp |
| CG55806-04, | ORF Start: at 2 | ORF Stop: at 1253 |
| DNA Sequence | SNP Pos: 673 | SNP Change: G to A |

TGACTGTATCGCCGGATTCATGCAGCGCGTGAACATGATCATGGCAGAATCACCAGGCCTCATCACCA
TCTGCCTTTTAGGATATCTACTCAGTGCTGAATGTACAGTTTTTCTTGATCATGAAAACGCCAACAAA
ATTCTGAATCGGCCAAAGAGGTATAATTCAGGTAAATTGGAGGAGTTTGTTCATGGGAACCTTGAGAG
AGAATGTATGGAAGAAAAGTGCAGTTTTGAAGAAGCACGAGAAGTTTTTGAAAACCTGAAAGAAACAA
CTGAATTTTGGAAGCAGTATGTTGATGGAGATCAGTGGAGTCCAATCCATGTTTAAATAGGCGGCAGT
TGCAAGGATGTCATTAATTCCTATGAATGTTGGTGTCCCTTTGGATTTGAAGGAAAGAACTGTGAATT
AGTGCCATTTCCATGTGGAAGAGTTTCTGTTTCACAAACTTCTAAGCTCACCCGTGCTGAGACTGTTT
TTCCTGATGTGGACTATGTAAATTCTACTGAAGCTGAAACCATTTTGGATAACATCACTCAAAGCACC
CAATCATTTAATGACTTCACTCGGGTTGTTGGTGGAGAAGATGCCAAACCAGGTCAATTCCCTTGGCA
GGTTGTTTTGAATGGTAAAGTTGATGCATTCTGTGGAGGCTCTATCGTTAATGAAAAATGAATTGTAA
CTGCTGCCCACTGTGTTGAAACTGGTGTTAAAATTACAGTTGTCGCAGGTGAACATAATATTGAGGAG
ACAGAACATACAGAGCAAAAGCGAAATGTGATTCGAATTATTCCTCACCACAACTACAATGCAGCTAT
TAATAAGTACAACCATGACATTGCCCTTCTGGAACTGGACGAACCCTTAGTGCTAAACAGTAACGTTA
CACCTATTTGCATTGCTGACAAGGAATACACGAACATCTTCCTCAAATTTGGATCTGGCTATGTAAGT
GGCTGGGGAAGAGTCTTCCACAAAGGGAGATCAGCTTTAGTTCTTCAGTACCTTAGAGTTCCACTTGT
TGACCGAGCCACATGTCTTCGATCTACAAAGTTCACCATCTATAACAACATGTTCTGTGCTGGCTTCC
ATGAAGGAGGTAGAGATTCATGTCAAGGAGATAGTGGGGGACCCCATGTTACTGAAGTGGAAGGGACC
AGTTTCTTAACTGGAATTATTAGCTGGGGTGAAGAGTGTGCAATGAAAGGCAAATATGGAATATATAC
CAAGGTATCCCGGTATGTCAACTGGATTAAGGAAAAAACAAAGCTCACTTGACTGCAGCCAAGCTAAT
TCCGGAAG

| | | | |
|---|---|---|---|
| NOV47f, | | | |
| SNP13382492 of | | | |
| CG55806-04, | SEQ ID NO: 758 | | MW at46845.6kD |
| Protein Sequence | SNP Pos: 218 | 1417 aa | SNP Change: Trp to End |

MQRVNMIMAESPGLITICLLGYLLSAECTVFLDHENANKILNRPKRYNSGKLEEFVHGNLERECMEEK
CSFEEAREVFENTERTTEFWKQYVDGDQCESNPCLNGGSCKDVINSYECWCPFGFEGKNCELVPFPCG
RVSVSQTSKLTRAETVFPDVDYVNSTEAETILDNITQSTQSFNDFTRVVGGEDAKPGQFPWQVVLNGK
VDAFCGGSIVNEKIVTAAHCVETGVKITVVAGEHNIEETEHTEQKRNVIRIIPHHNYNAAINKYNHDI
ALLELDEPLVLNSYVTPICIADKEYTNIFLKFGSGYVSGWGRVFHKGRSALVLQYLRVPLVDRATCLR
STKFTIYNNMFCAGFHEGGRDSCQGDSGGPHVTEVEGTSFLTGIISWGEECAMKGKYGIYTKVSRYVN
WIKEKTKLT

[0620] A ClustalW comparison of the above protein sequences yields the following sequence alignment shown in Table 47B.

TABLE 47B

Comparison of the NOV47 protein sequences.

| | |
|---|---|
| NOV47a | MQRVNMIMAESPGLITICLLGYLLSAECTVFLDHENANKILNRPKRYNSGKLEEFVHGNL |
| NOV47b | MQRVNNIMAESPGLITICLLGYLLSABCTVFLDHENANKILNRPKRYNSGKLEEFVQGNL |
| NOV47c | MQRVNMIMABSPGLITICLLGYLLSAECTVFLDHENANKILNRPKRYNSGKLEEFVQGNL |
| NOV47d | MQRVNNIMABSPGLITICLLGYLLSAECTVFLDHENANKILNRPKRYNSGKLEEFVQGNL |
| NOV47a | ERECMEEKCSFEEAREVFENTERTTEFWKQYVDGDQCESNPCLNGGSCKDVINSYECWCP |
| NOV47b | ERECLEEKCSFEEAREVFENTERTTEFWKQYVDGDQCESNPCLNGGSCKDDINSYECWCP |
| NOV47c | ERECMEEKCSFEEAREVFENTERTTEFWKOYVDGDQCESNPCLNGGSCKDDINSYECWCP |
| NOV47d | ERECMEEKCSFEEAREVFENTERTTEFWKQYVDGDQCESNPCLNGGSCKDDINSYECWCP |
| NOV47a | FGFEGKNCELVP-----------------------------------------FP--CGR |
| NOV47b | FGFEGKNCELDV-----------------------------------------D------ |
| NOV47c | FGFEGKNCELDVTCNIKNGRCEQFCKNSADNKVVCSCTEGYRLAENQKSCEPAVPFPCGR |
| NOV47d | FGFEGKNCELDVTCNIKNGRCEQFCKNSADNKVVCSCTEGYRLABNQKSCEPAVPFPCGR |
| NOV47a | VSVSQTSKLTRAETVFPDVDYVNSTEAETILDNITQSTQSFNDFTRVVGGEDAKPGQFPW |
| NOV47b | --------------------YVNSTEAETILDNITQSTQSFNDFTRVVGGEDAKPGQFPW |
| NOV47c | VSVSQTSKLTRAETVFPDVDYVNSTEAETILDNITQSTQSFNDFTRVVGGEDAKPGQFPW |
| NOV47d | VSVSQTSKLTRAETVFPDVDYVNSTEAETILDNITQSTQSFNDFTRVVGGEDAKPGQFPW |
| NOV47a | QVVLNGKVDAFCGGSIVNEKWIVTAAHCVETGVKITVVAGEHNIEETEHTEQKRNVIRII |
| NOV47b | QVVLNGKVDAFCGGSIVNEKWIVTAAHCVETGVKITVVAGEHNIEETEHTEQKRNVIRII |
| NOV47c | QVVLNGKVDAFCGGSIVNEKWIVTAAHCVETGVKITVVAGEHNIEETEHTEQKRNVIRII |
| NOV47d | QVVLNGKVDAFCGGSIVNEKWIVTAAHCVETGVKITVVAGEHNIEETEHTEQKRNVIRII |
| NOV47a | PHHNYNAAINKYNHDIALLELDEPLVLNSYVTPICIADKEYTNIFLKFGSGYVSGWGRVF |
| NOV47b | PHHNYNAAINKYNHDIALLELDEPLVLNSYVTPICIADKEYTNIFLKFGSGYVSGWGRVF |
| NOV47c | PHHNYNAAINKYNHDIALLELDEPLVIMSYVTPICIADKEYTNIFLKFGSGYVSGWGRVF |
| NOV47d | PHHNYNAAINKYNHDIALLELDEPLVLNSYVTPICIADKEYTNIFLKFGSGYVSGWGRVF |
| NOV47a | HKGRSALVLQYLRVPLVDRATCLRSTKFTIYNNMFCAGFHEGGRDSCQGDSGGPHVTEVE |
| NOV47b | HKGRSALVLQYLRVPLVDRATCLRSTKFTIYNNMFCAGFHEGGRDSCQGDSGGPHVTEVE |
| NOV47c | HKGRSALVLQYLRVPLVDRATCLRSTKFTIYNNMFCAGFHEGGRDSCQGDSGGPHVTEVE |
| NOV47d | HKGRSALVLQYLRVPLVDRATCLRSTKFTIYNNMFCAGFHEGGRDSCQGDSGGPHVTEVE |
| NOV47a | GTSFLTGIISWGEECAMKGKYGIYTKVSRYVNWIKEKTKLT |
| NOV47b | GTSFLTGIISWGEECAMKGKYGIYTKVSRYVNWIKEKTKLT |
| NOV47c | GTSFLTGIISWGEECAMKGKYGIYTKVSRYVNWIKEKTKLT |
| NOV47d | GTSFLTGIISWGEECAMKGKYGIYTKVSRYVNWIKEKTKLT |
| NOV47a | (SEQ ID NO: 748) |
| NOV47b | (SEQ ID NO: 750) |
| NOV47c | (SEQ ID NO: 752) |
| NOV47d | (SEQ ID NO: 754) |

[0621] Further analysis of the NOV47a protein yielded the following properties shown in Table 47C.

TABLE 47C
Protein Sequence Properties NOV47a

| | |
|---|---|
| SignalP analysis: | Cleavage site between residues 26 and 27 |
| PSORT II analysis: | |

| | |
|---|---|
| PSG: | a new signal peptide prediction method |
| | N-region: length 10; pos.chg 1; neg.chg 1 |
| | H-region: length 16; peak value 9.84 |
| | PSG score: 5.44 |
| GvH: | von Heijne's method for signal seq. recognition |
| | GvH score (threshold: −2.1) : −2.46 |
| | possible cleavage site: between 25 and 26 |

>>> Seems to have no N-terminal signal peptide

| ALOM: | Klein et al's method for TM region allocation |
|---|---|
| | Init position for calculation: 1 |
| | Tentative number of TMS(s) for the threshold 0.5: 1 |
| | Number of TMS(s) for threshold 0.5: 1 |
| | INTEGRAL Likelihood = −2.50 Transmembrane 14-30 |
| | PERIPHERAL Likelihood = 2.07 (at 219) |
| | ALOM score: −2.50 (number of TMSs: 1) |
| MTOP: | Prediction of membrane topology (Hartmann et al.) |
| | Center position for calculation: 21 |
| | Charge difference: −2.5 C(−1.5) - N( 1.0) |
| | N >= C: N-terminal side will be inside |

>>> membrane topology: type 2 (cytoplasmic tail 1 to 14)

| MITDISC: | discrimination of mitochondrial targeting seq | | | |
|---|---|---|---|---|
| | R content: | 1 | Hyd Moment(75): | 4.83 |
| | Hyd Moment(95): | 6.44 | G content: | 2 |
| | D/E content: | 2 | S/T content: | 3 |
| | Score: −6.32 | | | |

Gavel: prediction of cleavage sites for mitochondrial preseq

R-2 motif at 13 QRV|NM

NUCDISC: discrimination of nuclear localization signals

| | pat4: RPKR (4) at 43 |
|---|---|
| | pat7: none |
| | bipartite: none |
| | content of basic residues: 10.0% |
| | NLS Score: −0.22 |
| KDEL: | ER retention motif in the C-terminus: none |

ER Membrane Retention Signals:

XXRR-like motif in the N-terminus: QRVN
KKXX-like motif in the C-terminus: KTKL

SKL: peroxisomal targeting signal in the C-terminus: none
PTS2: 2nd peroxisomal targeting signal: none
VAC: possible vacuolar targeting motif: none
RNA-binding motif: none
Actinin-type actin-binding motif:

type 1: none
type 2: none

NMYR: N-myristoylation pattern : none
Prenylation motif: none
memYQRL: transport motif from cell surface to Golgi: none
Tyrosines in the tail: none
Dileucine motif in the tail: none
checking 63 PROSITE DNA binding motifs: none
checking 71 PROSITE ribosomal protein motifs: none
checking 33 PROSITE prokaryotic DNA binding motifs: none

| NNCN: | Reinhardt's method for Cytoplasmic/Nuclear discrimination |
|---|---|
| | Prediction: cytoplasmic |
| | Reliability: 94.1 |

```
COIL: Lupas's algorithm to detect coiled-coil regions
  58 N 0.51
  59 L 0.51
  60 E 0.51
  61 R 0.51
  62 E 0.51
  63 C 0.51
  64 M 0.51
  65 E 0.51
  66 E 0.51
  67 K 0.51
  68 C 0.51
  69 S 0.51
  70 F 0.51
  71 E 0.51
  72 E 0.51
  73 A 0.51
  74 R 0.51
  75 E 0.51
  76 V 0.51
  77 F 0.51
  78 E 0.51
  79 N 0.51
  80 T 0.51
  81 E 0.51
  82 R 0.51
  83 T 0.51
  84 T 0.51
  85 E 0.51
```

total: 28 residues

-------------------------
Final Results (k = 9/23):

```
34.8%: mitochondrial
30.4%: cytoplasmic
  8.7%: Golgi
  8.7%: nuclear
  4.3%: vacuolar
  4.3%: extracellular, including cell wall
  4.3%: vesicles of secretory system
  4.3%: endoplasmic reticulum
```

>> prediction for CG55806-04 is mit (k = 23)

[0622] A search of the NOV47a protein against the Geneseq database, a proprietary database that contains sequences published in patents and patent publication, yielded several homologous proteins shown in Table 47D.

TABLE 47D
Geneseq Results for NOV47a

| | | NOV47a | Identities/ | |
|---|---|---|---|---|
| | | Residues/ | Similarities for | |
| Geneseq | Protein/Organism/Length | Match | the Matched | Expect |
| Identifier | [Patent #, Date] | Residues | Region | Value |
| ABB99529 | Amino acid sequence of human | 1..418 | 416/461 (90%) | 0.0 |
| | Factor IX - Homo sapiens, 461 | 1..461 | 416/461 (90%) | |
| | aa. [W020028609]-A2, 31-Oct.- | | | |
| | 2002] | | | |
| ABB81908 | Protein relating to the invention | 1..418 | 416/461 (90%) | 0.0 |
| | #1 - Unidentified, 461 aa. | 1..461 | 416/461 (90%) | |
| | [RU2181147-C2, 10-Apr.-2002] | | | |
| AAY97295 | Human clotting factor IX - Homo | 1..418 | 416/461 (90%) | 0.0 |
| | sapiens, 461 aa. [W0200049147- | 1..461 | 416/461 (90%) | |
| | A1, 24-Aug.-2000] | | | |
| AAO21524 | Protein of human factor IX - | 1..418 | 408/462 (88%) | 0.0 |
| | Homo sapiens, 461 aa. | 1..461 | 409/462 (88%) | |
| | [WO200240544-A2, 23-May- | | | |
| | 2002] | | | |
| ABP53571 | Human NOV3 protein SEQ ID | 1..418 | 391/418 (93%) | 0.0 |
| | NO:6 - Homo sapiens, 394 aa. | 1..394 | 392/418 (93%) | |
| | [WO200262999-A2, 15-Aug.- | | | |
| | 2002] | | | |

[0623] In a BLAST search of public sequence databases, the NOV47a protein was found to have homology to the proteins shown in the BLASTP data in Table 47E.

TABLE 47E
Public BLASTP Results for NOV47a

| | | NOV47a | Identities/ | |
|---|---|---|---|---|
| Protein | | Residues/ | Similarities for | |
| Accession | Protein/ | Match | the Matched | Expect |
| Number | /Organism/Length | Residues | Portion | Value |
| CAA00205 | FACTOR IX - | 1..418 | 416/461 (90%) | 0.0 |
| | Homo sapiens | 1..461 | 416/461 (90%) | |
| | (Human), 461 aa. | | | |
| Q95ND7 | Coagulation factor | 1..418 | 415/461 (90%) | 0.0 |
| | XI - Pan | | | |
| | troglodytes | 1..461 | 416/461 (90%) | |
| | (Chimpanzee), | | | |
| | 461 aa. | | | |
| P00740 | Coagulation factor | 1..418 | 415/461 (90%) | 0.0 |
| | IX precursor | 1..461 | 415/461 (90%) | |
| | (EC 3.4.21.22) | | | |
| | (Christmas factor) - | | | |
| | Homo sapiens | | | |
| | (Human), 461 aa. | | | |
| Q14316 | F9 (Coagulation | 6..418 | 411/456 (90%) | 0.0 |
| | factor IX (Plasma | 1..456 | 411/456 (90%) | |
| | THROMBO- | | | |
| | PLASTIC | | | |
| | component, | | | |
| | christmas | | | |
| | disease, | | | |
| | HAEMOPHILIA | | | |
| | B)) | | | |
| | (Factor IX) - | | | |
| | Homo sapiens | | | |
| | (Human), 456 aa. | | | |
| CAA01607 | FACTOR IX | 6..418 | 408/456 (89%) | 0.0 |
| | PROTEIN - Homo | 1..456 | 408/456 (89%) | |
| | sapiens (Human), | | | |
| | 456 aa. | | | |

[0624] PFam analysis indicates that the NOV47a protein contains the domains shown in the Table 47F.

TABLE 47F
Domain Analysis of NOV47a

| | | Identities/ | |
|---|---|---|---|
| | NOV47a | Similarities for | |
| Pfam Domain | Match Region | the Matched Region | Expect Value |
| gla | 52..93 | 26/42 (62%) | 1.1e-18 |
| | | 40/42 (95%) | |
| EGF | 97..128 | 16/47 (34%) | 1.9e-06 |
| | | 25/47 (53%) | |
| trypsin | 184..411 | 109/263 (41%) | 4.4e-92 |
| | | 197/263 (75%) | |

### Example 48

[0625] The NOV48 clone was analyzed, and the nucleotide and encoded polypeptide sequences are shown in Table 48A.

TABLE 48A

NOV48 Sequence Analysis

| | | |
|---|---|---|
| NOV48a, CG55828-02 | SEQ ID NO: 759 | 1439 bp |
| DNA Sequence | ORF Start: ATG at 35 | ORF Stop: TGA at 1406 |

TCATCCACAGCCATCATATAAAGGTTTTGGCATCATGTTTGGGAAGAAAAAGAAAAAGATTGAAATAT
CTGGCCCGTCCAACTTTGAACACAGGGTTCATACTGGGTTTGATCCACAAGAGCAGAAGTTTACCGGC
CTTCCCCAGCAGTGGCACAGCCTGTTAGCAGATACGGCCAACAGGCCAAAGCCTATGGTGGACCCTTC
ATGCATCACACCCATCCAGCTGGCTCCTATGAAGGTGGATTACGATCGAGCACAGATGGTCCTCAGCC
CTCCACTGTCAGGGTCTGACACCTACCCCAGGGGCCCTGCCAAACTACCTCAAAGTCAAAGCAAATCG
GGCTATTCCTCAAGCAGTCACCAGTACCCGTCTGGGTACCACAAAGCCACCTTGTACCATCACCCCTC
CCTGCAGAGCAGTTCGCAGTACATCTCCACGGCTTCCTACCTGAGCTCCCTCAGCCTCTCATCCAGCA
CCTACCCGCCGCCCAGCTGGGGCTCCTCCTCCGACCAGCAGCCCTCCAGGGTGTCCCATGAACAGTTT
CGGGCGGCCCTGCAGCTGGTGGTCAGCCCAGGAGACCCCAGGGAATACTTGGCCAACTTTATCAAAAT
CGGGGAAGGCTCAACCGGCATCGTATGCATCGCCACCGAGAAACACACAGGGAAACAAGTTGCAGTGA
AGAAAATGGACCTCCGGAAGCAACAGAGACGAGAACTGCTTTTCAATGAGGTCGTGATCATGCGGGAT
TACCACCATGACAATGTGGTTGACATGTACAGCAGCTACCTTGTCGGCGATGAGCTCTGGGTGGTCAT
GGAGTTTCTAGAAGGTGGTGCCTTGACAGACATTGTGACTCACACCAGAATGAATGAAGAACAGATAG
CTACTGTCTGCCTGTCAGTTCTGAGAGCTCTCTCCTACCTTCATAACCAAGGAGTGATTCACAGGGAC
ATAAAAAGTGACTCCATTCTCCTGACAAGCGATGGCCGGATAAAGTTGTCTGATTTTGGTTTCTGTGC
TCAAGTTTCCAAAGAGGTGCCGAAGAGGAAATCATTGGTTGGCACTCCCTACTGGATGGCCCCTGAGG
TGATTTCTAGGCTACCTTATGGGACAGAGGTGGACATCTGGTCCCTCGGGATCATGGTGATAGAAATG
ATTGATGGCGAGCCCCCCTACTTCAATGAGCCTCCCCTCCAGGCGATGCGGAGGATCCGGGACAGTTT
ACCTCCAAGAGTGAAGGACCTACACAAGGTTTCTTCAGTGCTCCGGGGATTCCTAGACTTGATGTTGG
TGAGGGAGCCCTCTCAGAGAGCAACAGCCCAGGAACTCCTCGGACATCCATTCTTAAAACTAGCAGGT
CCACCGTCTTGCATCGTCCCCCTCATGAGACAATACAGGCATCACTGAGCAGAGGATTCGTGTAGGTG
GCAAAGCTAGA

| | | | |
|---|---|---|---|
| NOV48a, | | | |
| CG55828-02 | | | |
| Protein Sequence | SEQ ID NO: 760 | 457 aa | MW at 51352.3kD |

MFGKKKKKIEISGPSNFEHRVHTGFDPQEQKFTGLPQOWHSLLADTANRPKPMVDPSCITPIQLAPMK
VDYDRAQMVLSPPLSGSDTYPRGPAKLPQSQSKSGYSSSSHQYPSGYHKATLYHHPSLQSSSQYISTA
SYLSSLSLSSSTYPPPSWGSSSDQQPSRVSHEQFRAALQLVVSPGDPREYLANFIKIGEGSTGIVCIA
TEKHTGKQVAVKKMDLRKQQRRELLFNEVVIMRDYHHDNVVDMYSSYLVGDELWVVMEFLEGGALTDI
VTHTRNNEEQIATVCLSVLRALSYLHNQGVIHRDIKSDSILLTSDGRIKLSDFGFCAQVSKEVPKRKS
LVGTPYWMAPEVISRLPYGTEVDIWSLGIMVIEMIDGEPPYFNEPPLQAMRRIRDSLPPRVKDLHKVS
SVLRGFLDLMLVREPSQRATAQELLGHPFLKLAGPPSCIVPLMRQYRHH

| | | |
|---|---|---|
| NOV48b, CG55828-01 | SEQ ID NO: 761 | 4796 bp |
| DNA Sequence | ORF Start: ATG at 549 | ORF Stop: TGA at 1833 |

NCGAAAACCCGGAGCAGCTGCGTACGCTCATGGACAGTCCTCCGAGGGGCGAAGCCGGGCAGCTGGGC
ATGCTCAGTAGCTGGGGGAGGTTTGGGTGGAGAGTAGAAAGCTGTGGCTCTGCCTCTCATCCCCTCCC
GCTGGCCCCCGCCCCCCTTGCCCCTACCCAGCCAGTAGTAGTTCCCCAGCGTGCGCCCGGGGAGACCG
GGAACATGGCGCTGGGAGCGCTGTAGCAGCTGAGAAGGGGCTGAGGCACCGCCGCTTCGCTGACAGCC
GGCCACCAGATGTTCATGCATTCTAGAGAAAGTGGAAAACTTAGAAGCCTAATTAATGACTGTCTTCT
GGACCTCTGAGACCATGTTTCTAGTGTTTTCCGTGGAATATTATCAGAAATACACTGTGGTGAAATGC
TTCCACCTCTTGCTAAAATGAACACTGAGGAAAAATGAAGAAGACTGACAAGCACCAGCGAAAAGTTG
CAGAATAGAAATAGCCACACTCCTCTGGAGTCTTTAATTCATCCACAGCCATCATATAAAGGTTTTGG
CATCATGTTTGGGAAGAAAAAGAAAAAGATTGAAATATCTGGCCCGTCCAACTTTGAACACAGGGTTC
ATACTGGGTTTGATCCACAAGAGCAGAAGTTTACCGGCCTTCCCCAGCAGTGGCACAGCCTGTTAGCA
GATACGGCCAACAGGCCAAAGCCTATGGTGGACCCTTCATGCATCACACCCATCCAGCTGGCTCCTAT
GAAGACAATCGTTAGAGGAAACAAACCCTGCAAGGAAACCTCCATCAACGGCCTGCTAGAGGATTTTG
ACAACATCTCGGTGACTCGCTCCAACTCCCTAAGGAAAGAAAGCCCACCCACCCCAGATCAGGGAGCC
TCCAGCCACGGTCCAGGCCACGCGGAAGAAAATGGCTTCATCACCTTCTCCCAGTATTCCAGCGAATC
CGATACTACTGCTGACTACACGACCGAAAAGTACAGGGAGAAGAGTCTCTATGGAGATGATCTGGATC
CGTATTATAGAGGCAGCCACGCAGCCAAGCAAAATGGGCACGTAATGAAAATGAAGCACGGGGAGGCC
TACTATTCTGAGGTGAAGCCTTTGAAATCCGATTTTGCCAGATTTTCTGCCGATTATCACTCACATTT
GGACTCACTGAGCAAACCAAGTGAATACAGTGACCTCAAGTGGGAGTATCAGAGAGCCTCGAGTAGCT
CCCCTCTGGATTATTCATTCCAATTCACACCTTCTAGAACTGCAGGGCCAGCGGGTGCTCCAAAGGAG
AGCCTGGCGTACAGTGAAAGTGAATGGGGACCCAGCCTGGATGACTATGACAGGAGGCCAAAGTCTTC
GTACCTGAATCAGACAAGCCCTCAGCCCACCATGCGGCAGAGGTCCAGGTCAGGCTCGGGACTCCAGG
AACCGATGATGCCATTTGGAGCAAGTGCATTTAAAACCCATCCCCAAGGACACTCCTACAACTCCTAC
ACCTACCCTCGCTTGTCCGAGCCCACAATGTGCATTCCAAAGGTGGATTACGATCCAGAACAGATGGT
CCTCAGCCCTCCACTGTCAGGGTCTGACACCTACCCCAGGGGCCCTGCCAAACTACCTCAAAGTCAAA
GCAAATCGGGCTATTCCTCAAGCAGTCACCAGTACCCGTCTGGGTACCACAAAGCCACCTTGTACCAT
CACCCCTCCCTGCAGAGCAGTTCGCAGTACATCTCCACGGCTTCCTACCTGAGCTCCCTAAGCCTCTC
ATCCAGCATACCCGCCGCCCAGCTGGGGCTCCTCCTCCGACCAGCAGCCCTCCAGGGTGTCCCATGAA
CAGTTTCGGGCGGCCCTGCAGCTGGTGGTCAGCCCAGGAGACCCCAGGGAATACTTGGCCAACTTTAT
CAAAATCGGGGAAGGCTCAACCGGCATCGTATGCATCGCCACCGAGAAACACACAGGGAAACAAGTTG
CAGTGAAGAAAATGGACCTCCGGAAGCAACAGAGACGAGAACTGCTTTTCAATGAGGTCGTGATCATG
CGGGATTACCACCATGACAATGTGGTTGACATGTACAGCAGCTACCTTGTCGGCGATGAGCTCTGGGT
GGTCATGGAGTTTCTAGAAGGTGGTGCCTTGACAGACATTGTGACTCACACCAGAATGAATGAAGAAC
AGATAGCTACTGTCTGCCTGTCAGTTCTGAGAGCTCTGTCCTACCTTCATAACCAAGGAGTGATTCAC
AGGGACATAAAAAGTGACTCCATCCTCCTGACAAGCGATGGCCGGATAAAGTTGTCTGATTTTGGTTT
CTGTGCTCAAGTTTCCAAAGAGGTGCCGAAGAGGAAATCATTGGTTGGCACTCCCTACTGGATGGCCC
CTGAGGTGATTrCTAGGCTACCTTATGGGACAGAGGTGGACATCTGGTCCCTCGGGATCATGGTGATA
GAAATGATTGATGGCGAGCCCCCCTACTTCAATGAGCCTCCCCTCCAGGCGATGCGGAGGATCCGGGA
CAGTTTACCTCCAAGAGTGAAGGACCTACACAAGGTTTCTTCAGTGCTCCGGGGATTCCTAGACTTGA
TGTTGGTGAGGGAGCCCTCTCAGAGAGCAACAGCCCAGGAACTCCTCGGACATCCATTCTTAAAACTA
GCAGGTCCACCGTCTTGCATCGTCCCCCTCATGAGACAATACAGGCATCACTGAGCAGAGGATTCGTG
TAGGTGGCAAAGCTAGATGAGGACATGAGAATAATTCAGGAGAACAAAAGGAAACACAGAACATGCAA
AAGGCCTGTGCATTCTAGACCAGCCAATTGGTGGGACAGCGTGATGACCGGCAGGGTTCAACAGACCA
GGGCATCTTCTTGTGTCTTAAACAGGCATCTCTCCACTGACAGCCGGTGTGGTCACTTGGAGAACGGC
TTTAATAAGTCATTATTATATTTTTCAGCCCTTCATCCAGCAAATCAGAAGGACTCAGTACAAACTCC
GTTATGATATATCCTAGCCACATGCAGGGTAACATGTAGGATTTTCTATATTGAAAGAATACTTTTCT
GGCAAAAAAAAAAAAAAAAAGAAAGAAAGGAAAACAAAAAGCACTTTTTTCTTAATGGTAGCAGTATA
ATGTATTTTGCAACGAATTTGTAATTTTTCTGTACGATAGTTTTGATAATTTATAGTACTTTGATGTC
ATGTAGCCATTGTATCAGTTGAAGTAATACTTGTTTACTAGAGGAGTTTGAACAAAGCCTTTCCTACT
TTTTTATCCCTTTAAGAGAACCAATGATTCTTTAGGAACTTTGAATACTGAATGACTCTCAATCACCG
TCAGCTTTAGTAAAATCTCTTTCTTATCCTAACAAGTGTCTTATTTGGTGGAAGAAGAATTAAGAGTG
ATGGTGATGGTGTGCACGTTTCATTAATCCAACCAAAAATAATGAAATAAAATTTGAGCCACAGTATA
CCACTCCTTGGGATAAAGTTAAATATTTTTAAAGATCACATTTTCCATGAACGCCTCTAGTAGCAAAC
CATTCTTTTGCACACCACAATGTTTCCCTCAGTGCCCTTTCTCAAATGGGTACAATGTTCCCTTGTGG
CACAGTATTAATCGCTATTGTTCATGTATCGTGCTGGAAGTCTGAACTGACTCTAGAGGATGAATTAG
CAAGAGGGTATTTTACCAGGTATGATCTGACTTCAGTTGTGCCCATGTTATAATGTGTTTCCGACATA
CATTTGTCACCATTTTTAAACTCTGTATGCTAGCACACCAAACTCTTGTCTATAATTTACCTTTGTAC
CACAGTATTAATCGCTATTGTTCATGTATCGTGCTGGAAGTCTGAACTGACTCTAGAGGATGAATTAG
CAAGAGGGTATTTTACCAGGTATGATCTGACTTCAGTTGTGCCCATGTTATAATGTGTTTCCGACATA
GGAGAGTCGTGCTGCTGTCTAGATCTTCTTGAATGTTGATAAAAATGAATGACTACTACAATACATTT
TGTGTTGCTTGTTGGATGAATTTGCATGTTAACTGTAGGCCAATATAGATTTGCCTTTAAAACTCTGG
AAGAGCTACATAGTCATCATTAGTTTCTATTAATTATGCATCAGACAAAAGCCATTTGTTACCAAACT
GGGAAAACAGAGGCTTTTCTTAACTATTTCACATACTGTAACAAATATGAATTTAAATTTGTGATAGC
GCTCTGGTTGCTCTAAGCATAATTAAGAATTTTTGTAATTAATAGGTTGCTAATTATTTATCACTGCT
AAAAAGGAAAAAAGGCATAAAATGACCTTCTACTGATTAGATTTTCAGTTTTCTTTCAAACTGGAAAT
GCCTCCATAAATATGATCTATGATTTTGCTTCATAAAACAGCAAATCAATGTTTTATGTAAAATATTA
AAGCATTAATATAAATATGTGAGAATAAAAACAATCTAAATCCAGAAAATGGCAGTCCTAAATGTTCA
TGAGACAGATTGTATTAATTTAACCAGGACTATGTAGAAGTAGAAAGAAAAGAAAAAGAAAATCTTTT
TTAAACCAGAATAAACATTAAAAACTATTGCAGAAAATAGTGGATTTTGGATTCCAAACATTTTCGAC
AGTGTAATGGAAATTTTTCTGTAATTTTCTTACCATCGGGTATTTTTTAAAGTATTCATTGAGTTTAC
CAAAAGTTACTGTAGCTTAAAAGGTTTTGTGAGCACTAACTATTGGCAGAAACTGCATTTGCAAATAA
AAATAAATGTTTGCCTTTTAAAAAAAAAAAAAAAAA

| | | | |
|---|---|---|---|
| NOV48b, CG55828-01 | | | |
| Protein Sequence | SEQ ID NO: 762 | 428 aa | MW at 47439.0kD |

MFGKKKKKIEISGPSNFEHRVHTGFDPQEQKFTGLPQQWHSLLADTANRPKPMVDPSCITPIQLAPMK
TIVRGNKPCKETSINGLLEDFDNISVTRSNSLRKESPPTPDQGASSHGPGHAEENGFITFSQYSSESD
TTADYTTEKYREKSLYGDDLDPYYRGSHAAKQNGHVMKMKHGEAYYSEVKPLKSDFARFSADYHSHLD
SLSKPSEYSDLKWEYQRASSSSPLDYSFQFTPSRTAGTSGCSKESLAYSESEWGPSLDDYDRRPKSSY
LNQTSPQPTMRQRSRSGSGLQEPMMPFGASAFICIHPQGHSYNSYTYPRLSEPLCIPKVDYDPAQHVL
SPPLSGSDTYPRGPAKLPQSOSKSGYSSSSHQYPSGYHKATLYHHPSLQSSSQYISTASYLSSLSLSS
SIPAAQLGLLLRPAALQGVP

| | | |
|---|---|---|
| NOV48c, | | |
| SNP13379517 of | SEQ ID NO: 763 | 1439 bp |
| CG55828-02, | ORF Start: ATG at 35 | ORF Stop: TGA at 1406 |
| DNA Sequence | SNP Pos: 149 | SNP Change: T to C |

TCATCCACAGCCATCATATAAAGGTTTTGGCATCATGTTTGGGAAGAAAAAGAAAAAGATTGAAATAT
CTGGCCCGTCCAACTTTGAACACAGGGTTCATACTGGGTTTGATCCACAAGAGCAGAAGTTTACCGGC
CTTCCCCAGCAGCGGCACAGCCTGTTAGCAGATACGGCCAACAGGCCAAAGCCTATGGTGGACCCTTC
ATGCATCACACCCATCCAGCTGGCTCCTATGAAGGTGGATTACGATCGAGCACAGATGGTCCTCAGCC
CTCCACTGTCAGGGTCTGACACCTACCCCAGGGGCCCTGCCAAACTACCTCAAAGTCAAAGCAAATCG
GGCTATTCCTCAAGCAGTCACCAGTACCCGTCTGGGTACCACAAAGCCACCTTGTACCATCACCCCTC
CCTGCAGAGCAGTTCGCAGTACATCTCCACGGCTTCCTACCTGAGCTCCCTCAGCCTCTCATCCAGCA
CCTACCCGCCGCCCAGCTGGGGCTCCTCCTCCGACCAGCAGCCCTCCAGGGTGTCCCATGAACAGTTT
CGGGCGGCCCTGCAGCTGGTGGTCAGCCCAGGAGACCCCAGGGAATACTTGGCCAACTTTATCAAAAT
CGGGGAAGGCTCAACCGGCATCGTATGCATCGCCACCGAGAAACACACAGGGAAACAAGTTGCAGTGA
AGAAAATGGACCTCCGGAAGCAACAGAGACGAGAACTGCTTTTCAATGAGGTCGTGATCATGCGGGAT
TACCACCATGACAATGTGGTTGACATGTACAGCAGCTACCTTGTCGGCGATGAGCTCTGGGTGGTCAT
GGAGTTTCTAGAAGGTGGTGCCTTGACAGACATTGTGACTCACACCAGAATGAATGAAGAACAGATAG
CTACTGTCTGCCTGTCAGTTCTGAGAGCTCTCTCCTACCTTCATAACCAAGGAGTGATTCACAGGGAC
ATAAAAAGTGACTCCATTCTCCTGACAAGCGATGGCCGGATAAAGTTGTCTGATTTTGGTTTCTGTGC
TCAAGTTTCCAAAGAGGTGCCGAAGAGGAAATCATTGGTTGGCACTCCCTACTGGATGGCCCCTGAGG
TGATTTCTAGGCTACCTTATGGGACAGAGGTGGACATCTGGTCCCTCGGGATCATGGTGATAGAAATG
ATTGATGGCGAGCCCCCCTACTTCAATGAGCCTCCCCTCCAGGCGATGCGGAGGATCCGGGACAGTTT
ACCTCCAAGAGTGAAGGACCTACACAAGGTTTCTTCAGTGCTCCGGGGATTCCTAGACTTGATGTTGG
TGAGGGAGCCCTCTCAGAGAGCAACAGCCCAGGAACTCCTCGGACATCCATTCTTAAAACTAGCAGGT
CCACCGTCTTGCATCGTCCCCCTCATGAGACAATACAGGCATCACTGAGCAGAGGATTCGTGTAGGTG
GCAAAGCTAGA

| | | | |
|---|---|---|---|
| NOV48c, | | | |
| SNP13379517 of | | | |
| CG55828-02, | SEQ ID NO: 764 | | MW at 51322.3kD |
| Protein Sequence | SNP Pos: 39 | 457 aa | SNP Change: Trp to Arg |

MFGKKKKKIEISGPSNFEHRVHTGFDPQEQKFTGLPQQRHSLLADTANRPKPMVDPSCITPIQLAPMK
VDYDRAQMVLSPPLSGSDTYPRGPAKLPQSQSKSGYSSSSHQYPSGYHKATLYHHPSLQSSSQYISTA
SYLSSLSLSSSTYPPPSWGSSSDQQPSRVSHEQFRAALQLVVSPGDPREYLANFIKIGEGSTGIVCIA
TEKHTGKQVAVKKMDLRKQQRRELLFNEVVIMRDYHHDNVVDMYSSYLVGDELWVVMEFLEGGALTDI
VTHTRMNEEQIATVCLSVLRALSYLHNQGVUIRDIKSDSILLTSDGRIKLSDFGFCAQVSKEVPKRKS
LVGTPYWMAPEVISRLPYGTEVDIWSLGIMVIENIDGEPPYFNEPPLQAMRRIRDSLPPRVKDLHKVS
SVLRGFLDLMLVREPSQRATAQELLGHPFLKLAGPPSCIVPLMRQYRHH

| | | |
|---|---|---|
| NOV48d, | | |
| SNP13376535 of | SEQ ID NO: 765 | 1439 bp |
| CG55828-02, | ORF Start: ATG at 35 | ORF Stop: TGA at 1406 |
| DNA Sequence | SNP Pos: 222 | SNP Change: A to G |

TCATCCACAGCCATCATATAAAGGTTTTGGCATCATGTTTGGGAAGAAAAAGAAAAAGATTGAAATAT
CTGGCCCGTCCAACTTTGAACACAGGGTTCATACTGGGTTTGATCCACAAGAGCAGAAGTTTACCGGC
CTTCCCCAGCAGTGGCACAGCCTGTTAGCAGATACGGCCAACAGGCCAAAGCCTATGGTGGACCCTTC
ATGCATCACACCCATCCGGCTGGCTCCTATGAAGGTGGATTACGATCGAGCACAGATGGTCCTCAGCC
CTCCACTGTCAGGGTCTGACACCTACCCCAGGGGCCCTGCCAAACTACCTCAAAGTCAAAGCAAATCG
GGCTATTCCTCAAGCAGTCACCAGTACCCGTCTGGGTACCACAAAGCCACCTTGTACCATCACCCCTC
CCTGCAGAGCAGTTCGCAGTACATCTCCACGGCTTCCTACCTGAGCTCCCTCAGCCTCTCATCCAGCA
CCTACCCGCCGCCCAGCTGGGGCTCCTCCTCCGACCAGCAGCCCTCCAGGGTGTCCCATGAACAGTTT
CGGGCGGCCCTGCAGCTGGTGGTCAGCCCAGGAGACCCCAGGGAATACTTGGCCAACTTTATCAAAAT
CGGGGAAGGCTCAACCGGCATCGTATGCATCGCCACCGAGAAACACACAGGGAAACAAGTTGCAGTGA
AGAAAATGGACCTCCGGAAGCAACAGAGACGAGAACTGCTTTTCAATGAGGTCGTGATCATGCGGGAT
TACCACCATGACAATGTGGTTGACATGTACAGCAGCTACCTTGTCGGCGATGAGCTCTGGGTGGTCAT
GGAGTTTCTAGAAGGTGGTGCCTTGACAGACATTGTGACTCACACCAGAATGAATGAAGAACAGATAG
CTACTGTCTGCCTGTCAGTTCTGAGAGCTCTCTCCTACCTTCATAACCAAGGAGTGATTCACAGGGAC
ATAAAAAGTGACTCCATTCTCCTGACAAGCGATGGCCGGATAAAGTTGTCTGATTTTGGTTTCTGTGC
TCAAGTTTCCAAAGAGGTGCCGAAGAGGAAATCATTGGTTGGCACTCCCTACTGGATGGCCCCTGAGG
TGATTTCTAGGCTACCTTATGGGACAGAGGTGGACATCTGGTCCCTCGGGATCATGGTGATAGAAATG
ATTGATGGCGAGCCCCCCTACTTCAATGAGCCTCCCCTCCAGGCGATGCGGAGGATCCGGGACAGTTT
ACCTCCAAGAGTGAAGGACCTACACAAGGTTTCTTCAGTGCTCCGGGGATTCCTAGACTTGATGTTGG
TGAGGGAGCCCTCTCAGAGAGCAACAGCCCAGGAACTCCTCGGACATCCATTCTTAAAACTAGCAGGT
CCACCGTCTTGCATCGTCCCCCTCATGAGACAATACAGGCATCACTGAGCAGAGGATTCGTGTAGGTG
GCAAAGCTAGA

| | | | |
|---|---|---|---|
| NOV48d, | | | |
| SNP13376535 of | | | |
| CG55828-02, | SEQ ID NO: 766 | | MW at 51380.3kD |
| Protein Sequence | SNP Pos: 63 | 457 aa | SNP Change: Gln to Arg |

MFGKKKKKIEISGPSNFEHRVHTGFDPQEOKFTGLPQQWHSLLADTANRPKPMVDPSCITPIRLAPMK
VDYDRAQMVLSPPLSGSDTYPRGPAKLPQSQSKSGYSSSSHQYPSGYHKATLYHHPSLQSSSQYISTA
SYLSSLSLSSSTYPPPSWGSSSDQQPSRVSHEQFRAALQLVVSPGDPREYLANFIKIGEGSTGIVCIA
TEKHTGQVAVKKMDLRKQQRRELLFNEVVIMRDYHHDNVVDMYSSYLVGDELWVVMEFLEGGAALTDI
VTHTRNNEEQIATVCLSVLRALSYLHNQGVIHRDIKSDSILLTSDGRIKLSDFGFCAQVSKEVPKRKS
LVGTPYWMAPEVISRLPYGTEVDIWSLGIMVIEMIDGEPPYFNEPPLQANRRIRDSLPPRVKDLHKVS
SVLRGFLDLMLVREPSQRATAQELLGHPFLKLAGPPSCIVPLMRQYRHH

| | | |
|---|---|---|
| NOV48e, | | |
| SNP13382500 of | SEQ ID NO: 767 | 1439 bp |
| CG55828-02, | ORF Start: ATG at 35 | ORF Stop: TGA at 1406 |
| DNA Sequence | SNP Pos: 970 | SNP Change: T to C |

TCATCCACAGCCATCATATAAAGGTTTTGGCATCATGTTTGGGAAGAAAAAGAAAAAGATTGAAATAT
CTGGCCCGTCCAACTTTGAACACAGGGTTCATACTGGGTTTGATCCACAAGAGCAGAAGTTTACCGGC
CTTCCCCAGCAGTGGCACAGCCTGTTAGCAGATACGGCCAACAGGCCAAAGCCTATGGTGGACCCTTC
ATGCATCACACCCATCCAGCTGGCTCCTATGAAGGTGGATTACGATCGAGCACAGATGGTCCTCAGCC
CTCCACTGTCAGGGTCTGACACCTACCCCAGGGGCCCTGCCAAACTACCTCAAAGTCAAAGCAAATCG
GGCTATTCCTCAAGCAGTCACCAGTACCCGTCTGGGTACCACAAAGCCACCTTGTACCATCACCCCTC
CCTGCAGAGCAGTTCGCAGTACATCTCCACGGCTTCCTACCTGAGCTCCCTCAGCCTCTCATCCAGCA
CCTACCCGCCGCCCAGCTGGGGCTCCTCCTCCGACCAGCAGCCCTCCAGGGTGTCCCATGAACAGTTT
CGGGCGGCCCTGCAGCTGGTGGTCAGCCCAGGAGACCCCAGGGAATACTTGGCCAACTTTATCAAAAT
CGGGGAAGGCTCAACCGGCATCGTATGCATCGCCACCGAGAAACACACACCCAACAAGTTGCAAGTGA
AGAAAATGGACCTCCGGAAGCAACAGAGACGAGAACTGCTTTTCAATGAGGTCGTGATCATGCGGGAT
TACCACCATGACAATGTGGTTGACATGTACAGCAGCTACCTTGTCGGCGATGAGCTCTGGGTGGTCAT
GGAGTTTCTAGAAGGTGGTGCCTTGACAGACATTGTGACTCACACCAGAATGAATGAAGAACAGATAG
CTACTGTCTGCCTGTCAGTTCTGAGAGCTCTCTCCTACCTTCATAACCAAGGAGTGATTCACAGGGAC
ATAAAAAGTGACTCCATCCTCCTGACAAGCGATGGCCGGATAAAGTTGTCTGATTTTGGTTTCTGTGC
TCAAGTTTCCAAAGAGGTGCCGAAGAGGAAATCATTGGTTGGCACTCCCTACTGGATGGCCCCTGAGG
TGATTTCTAGGCTACCTTATGGGACAGAGGTGGACATCTGGTCCCTCGGGATCATGGTGATAGAAATG
ATTGATGGCGAGCCCCCCTACTTCAATGAGCCTCCCCTCCAGGCGATGCGGAGGATCCGGGACAGTTT
ACCTCCAAGAGTGAAGGACCTACACAAGGTTTCTTCAGTGCTCCGGGGATTCCTAGACTTGATGTTGG
TGAGGGAGCCCTCTCAGAGAGCAACAGCCCAGGAACTCCTCGGACATCCATTCTTAAAACTAGCAGGT
CCACCGTCTTGCATCGTCCCCCTCATGAGACAATACAGGCATCACTGAGCAGAGGATTCGTGTAGGTG
GCAAAGCTAGA

| | | | |
|---|---|---|---|
| NOV48e, | | | |
| SNP13382500 of | | | |
| CG55828-02, | SEQ ID NO: 768 | | MW at 51352.3kD |
| Protein Sequence | SNP Pos: 312 | 457 aa | SNP Change: Ile to Ile |

MFGKKKKKIEISGPSNFEHRVHTGFDPQEQKFTGLPQQWHSLLADTANRPKPMVDPSCITPIQLAPMK
VDYDRAQMVLSPPLSGSDTYPRGPAKLPQSQSKSGYSSSSHQYPSGYHKATLYHHPSLQSSSQYISTA
SYLSSLSLSSSTYPPPSWGSSSDQQPSRVSHEQFRAALQLVVSPGDPREYLANFIKIGEGSTGIVCIA
TEKHTGKQVAVKKMDLRKQQRRELLFNEVVIMRDYHHDNVVDMYSSYLVGDELWVVMEFLEGGALTDI
VTHTRNNEEQIATVCLSVLRALSYLHNQGVIHRDIKSDSILLTSDGRIKLSDFGFCAQVSKEVPKRKS
LVGTPYWMAPEVISRLPYGTEVDIWSLGIMVIEMIDGEPPYFNEPPLQANRRIRDSLPPRVKDLHKVS
SVLRGFLDLMLVREPSQRATAQELLGHPFLKLAGPPSCIVPLMRQYRHH

| | | |
|---|---|---|
| NOV48f, | | |
| SN1P13375705 of | SEQ ID NO: 769 | 1439 bp |
| CG55828-02, | ORF Start: ATG at 35 | ORF Stop: TGA at 1406 |
| DNA Sequence | SNP Pos: 1375 | SNP Change: C to T |

TCATCCACAGCCATCATATAAAGGTTTTGGCATCATGTTTGGGAAGAAAAAGAAAAAGATTGAAATAT
CTGGCCCGTCCAACTTTGAACACAGGGTTCATACTGGGTTTGATCCACAAGAGCAGAAGTTTACCGGC
CTTCCCCAGCAGTGGCACAGCCTGTTAGCAGATACGGCCAACAGGCCAAAGCCTATGGTGGACCCTTC
ATGCATCACACCCATCCAGCTGGCTCCTATGAAGGTGGATTACGATCGAGCACAGATGGTCCTCAGCC
CTCCACTGTCAGGGTCTGACACCTACCCCAGGGGCCCTGCCAAACTACCTCAAAGTCAAAGCAAATCG
GGCTATTCCTCAAGCAGTCACCAGTACCCGTCTGGGTACCACAAAGCCACCTTGTACCATCACCCCTC
CCTGCAGAGCAGTTCGCAGTACATCTCCACGGCTTCCTACCTGAGCTCCCTCAGCCTCTCATCCAGCA
CCTACCCGCCGCCCAGCTGGGGCTCCTCCTCCGACCAGCAGCCCTCCAGGGTGTCCCATGAACAGTTT
CGGGCGGCCCTGCAGCTGGTGGTCAGCCCAGGAGACCCCAGGGAATACTTGGCCAACTTTATCAAAAT
CGGGGAAGGCTCAACCGGCATCGTATGCATCGCCACCGAGAAACACACAGGGAAACAAGTTGCAGTGA
AGAAAATGGACCTCCGGAAGCAACAGAGACGAGAACTGCTTTTCAATGAGGTCGTGATCATGCGGGAT
TACCACCATGACAATGTGGTTGACATGTACAGCAGCTACCTTGTCGGCGATGAGCTCTGGGTGGTCAT
GGAGTTTCTAGAAGGTGGTGCCTTGACAGACATTGTGACTCACACCAGAATGAATGAAGAACAGATAG
CTACTGTCTGCCTGTCAGTTCTGAGAGCTCTCTCCTACCTTCATAACCAAGGAGTGATTCACAGGGAC
ATAAAAAGTGACTCCATTCTCCTGACAAGCGATGGCCGGATAAAGTTGTCTGATTTTGGTTTCTGTGC
TCAAGTTTCCAAAGAGGTGCCGAAGAGGAAATCATTGGTTGGCACTCCCTACTGGATGGCCCCTGAGG
TGATTTCTAGGCTACCTTATGGGACAGAGGTGGACATCTGGTCCCTCGGGATCATGGTGATAGAAATG
ATTGATGGCGAGCCCCCCTACTTCAATGAGCCTCCCCTCCAGGCGATGCGGAGGATCCGGGACAGTTT
CCTCCAAAGAGTGAAGGACCTACACAAGGTTTCTTCAGTGCTCCGGGGATTCCTAGACTTGATGTTGG
TGAGGGAGCCCTCTCAGAGAGCAACAGCCCAGGAACTCCTCGGACATCCATTCTTAAAACTAGCAGGT
CCACCGTCTTGCATTGTCCCCCTCATGAGACAATACAGGCATCACTGAGCAGAGGATTCGTGTAGGTG
GCAAAGCTAGA

| | | | |
|---|---|---|---|
| NOV48f, | | | |
| SNP13375705 of | | | |
| CG55828-02, | SEQ ID NO: 770 | | MW at 51352.3kD |
| Protein Sequence | SNP Pos: 447 | 457 aa | SNP Change: Ile to Ile |

MFGKKKKKIEISGPSNFEHRVHTGFDPQEQKFTGLPQQWHSLLADTANRPKPMVDPSCITPIQLAPMK
VDYDRAQMVLSPPLSGSDTYPRGPAKLPQSQSKSGYSSSSHQYPSGYHKATLYHHPSLQSSSQYISTA
SYLSSLSLSSSTYPPPSWGSSSDQQPSRVSHEQFRAALQLVVSPGDPREYLANFIKIGEGSTGIVCIA
TEKHTGKQVAVKKMDLRKQQRRELLFNEVVIMRDYHHDNVVDMYSSYLVGDELWVVMEFLEGGALTDI
VTHTRMNEEQIATVCLSVLRALSYLHNQGVIHRDIKSDSILLTSDGRIKLSDFGFCAQVSKEVPKRKS
LVGTPYWMAPEVISRLPYGTEVDIWSLGIMVIEMIDGEPPYFNEPPLQANRRIRDSLPPRVKDLHKVS
SVLRGFLDLMILVREPSQRATAQELLGHPFLKLAGPPSCIVPLMRQYRHH

[0626] A ClustalW comparison of the above protein sequences yields the following sequence alignment shown in Table 48B.

TABLE 48B

Comparison of the NOV48 protein sequences.

| | |
|---|---|
| NOV48a | MFGKKKKKIEISGPSNFEHRVHTGFDPQEQKFTGLPQQWHSLLADTANRPKPMVDPSCIT |
| NOV48b | MFGKKKKKIEISGPSNFEHRVHTGFDPQEQKFTGLPQQWHSLLADTANRPKPMVDPSCIT |
| NOV48a | PIQLAPMKVDYDRAQMVLSPPLSGSDTYPRGPAKLPQSQSKSGYSSSSHQYPSGYHKATL |
| NOV48b | PIQLAPMKTIVRGNKPCKETSING-LLEDFDNISVTRSNSLRKESPPTPDQGASSHGPGH |
| NOV48a | YHHPSLQSSSQYISTASYLSSLSLSSSTYPPPSWGSSSDQQPSRVSHEQFRAALQLVVSP |
| NOV48b | AEENGFITFSQYSSESD--TTADYTTEKYREKSLYGDDLDPYYRGSHAAKQNGHVMKMKH |
| NOV48a | GDPREYLANFIKIGEGSTGIVCIATEKHTGKQVAVKKMDLRKQQRRELLFNEVVIMRDYH |
| NOV48b | G-----EAYYSEVKPLKSDFARFSADYHSHLDSLSKPSEYS-DLKWEYQRASSSSPLDYS |
| NOV48a | HDNVVDMYS-SYLVGDELWVVMEFLEGGALTDIVTHTRMNEEQIATVCLSVLRALSYLHN |
| NOV48b | FQFTPSRTAGTSGCSKESLAYSESEWGPSLDDYDRRPKSS-------------YLNQTSP |
| NOV48a | QGVIHRDIKSDSILLTSDGRIKLSDFGFCAQVSKEVPKRKSLVGTPYWMAPEVISRLPYG |
| NOV48b | QPTMRQRSRS------GSG-LQEPMMPFGASAFKTHPQGHSYNSYTYPRLSEPTMCIP-- |
| NOV48a | TEVDIWSLGIMVIEMIDGEPPYFNEPPLQAMRRIRDSLPPRVKDLHKVSSVLRGFLDLML |
| NOV48b | -KVDYDPAQMVLSPPLSGSDTYPRGP--AKLPQSQSKSGYSSSSHQYPSGYHKATLYHHP |
| NOV48a | VREPS-QRATAQELLGHPFLKLAGPPSCIVPLMRQYRHH--- |
| NOV48b | SLQSSSQYISTASYLSSLSLSSSIPAAQLGLLLRPAALQGVP |
| NOV48a | (SEQ ID NO: 760) |
| NOV48b | (SEQ ID NO: 762) |

[0627] Further analysis of the NOV48a protein yielded the following properties shown in Table 48C.

TABLE 48C
Protein Sequence Properties NOV48a

| | |
|---|---|
| SignalP analysis: | No Known Signal Sequence Indicated |
| PSORT II analysis: | |

| PSG: | a new signal peptide prediction method |
|---|---|
| | N-region: length 10; pos.chg 5; neg.chg 1 |
| | H-region: length 7; peak value −2.19 |
| | PSG score: −6.59 |
| GvH: | von Heijne's method for signal seq. recognition |
| | GvH score (threshold: −2.1): −7.22 |
| | possible cleavage site: between 44 and 45 |

>>> Seems to have no N-terminal signal peptide

| | |
|---|---|
| ALOM: | Klein et al's method for TM region allocation |
| | Init position for calculation: 1 |
| | Tentative number of TMS(s) for the threshold 0.5: 0 |
| | number of TMS(s) .. fixed |
| | PERIPHERAL Likelihood = 2.54 (at 257) |
| | ALOM score: 2.54 (number of TMSs: 0) |

MITDISC: discrimination of mitochondrial targeting seq

| | | | |
|---|---|---|---|
| R content: | 0 | Hyd Moment (75): | 3.66 |
| Hyd Moment(95): | 6.70 | G content: | 2 |
| D/E content: | 2 | S/T content: | 2 |
| Score: −7.66 | | | |

Gavel: prediction of cleavage sites for mitochondrial preseq

cleavage site motif not found

NUCDISC: discrimination of nuclear localization signals

pat4: KKKK (5) at 4
pat4: KKKK (5) at 5
pat4: PKRK (4) at 336
pat7: PKRKSLV (5) at 336
bipartite: none
content of basic residues: 11.2%
NLS Score: 0.84

KDEL: ER retention motif in the C-terminus: none
ER Membrane Retention Signals: none
SKL: peroxisomal targeting signal in the C-terminus: none
PTS2: 2nd peroxisomal targeting signal: none
VAC: possible vacuolar targeting motif: none
RNA-binding motif: none
Actinin-type actin-binding motif:

type 1: none
type 2: none

NMYR: N-myristoylation pattern : none
Prenylation motif: none
memYQRL: transport motif from cell surface to Golgi: none
Tyrosines in the tail: none
Dileucine motif in the tail: none
checking 63 PROSITE DNA binding motifs: none
checking 71 PROSITE ribosomal protein motifs: none
checking 33 PROSITE prokaryotic DNA binding motifs: none
NNCN: Reinhardt's method for Cytoplasmic/Nuclear discrimination

Prediction: nuclear
Reliability: 76.7

COIL: Lupas's algorithm to detect coiled-coil regions

total: 0 residues

--------------------------
Final Results (k = 9/23):

```
78.3%: nuclear
13.0%: cytoplasmic
  4.3%: mitochondrial
  4.3%: peroxisomal
```

>> prediction for CG55828-02 is nuc (k = 23)

[0628] A search of the NOV48a protein against the Geneseq database, a proprietary database that contains sequences published in patents and patent publication, yielded several homologous proteins shown in Table 48D.

TABLE 48D
Geneseq Results for NOV48a

| | | NOV48a | Identities/ | |
|---|---|---|---|---|
| | | Residues/ | Similarities for | |
| Geneseq | Protein/Organism/Length | Match | the Matched | Expect |
| Identifier | [Patent #, Date] | Residues | Region | Value |
| AAB65705 | Novel protein kinase, SEQ ID | 56..457 | 393/402 (97%) | 0.0 |
| | NO: 234 - Homo sapiens, 719 aa. | 319..719 | 393/402 (97%) | |
| | [WO200073469-A2, 07-Dec.- | | | |
| | 2000] | | | |
| AAM38963 | Human polypeptide SEQ ID NO | 56..457 | 392/402 (97%) | 0.0 |
| | 2108 - Homo sapiens, 719 aa. | 319..719 | 393/402 (97%) | |
| | [WO200153312-A1, 26-Jul.- | | | |
| | 2001] | | | |
| AAE02187 | Human p2l-activatedkinase 5 | 56..457 | 391/402 (97%) | 0.0 |
| | (PAK5) protein - Homo sapiens, | 319..719 | 392/402 (97%) | |
| | 719 aa. [WO200136602-A2, 25- | | | |
| | May-2001] | | | |
| AAG67825 | Human P21-active kinase 60 | 56..457 | 355/402 (88%) | 0.0 |
| | protein - Homo sapiens, 547 aa. | 147..547 | 358/402 (88%) | |
| | [CN1298009-A, 06-Jun.-2001] | | | |
| ABG19308 | Novel human diagnostic protein | 150..455 | 253/306 (82%) | e-146 |
| | #19299 -Homo sapiens, 620 aa. | 313..618 | 276/306(89%) | |
| | [WO200175067-A2, 11-Oct.- | | | |
| | 2001] | | | |

[0629] In a BLAST search of public sequence databases, the NOV48a protein was found to have homology to the proteins shown in the BLASTP data in Table 48E.

TABLE 48E
Public BLASTP Results for NOV48a

| | | NOV48a | Identities/ | |
|---|---|---|---|---|
| Protein | | Residues/ | Similarities for | |
| Accession | | Match | the Matched | Expect |
| Number | Protein/Organism/Length | Residues | Portion | Value |
| Q9P286 | Serine/threonine-protein kinase | 56..457 | 393/402 (97%) | 0.0 |
| | PAK 7 (EC 2.7.1.-) (p21-activated | 319..719 | 393/402 (97%) | |
| | kinase 7) (PAK-7) (PAK-5) - | | | |
| | Homo sapiens (Human), 719 aa. | | | |
| Q8TB93 | P21(CDKN1A)-activated kinase | 56..457 | 392/402 (97%) | 0.0 |
| | 7 - Homo sapiens (Human), | 319..719 | 392/402 (97%) | |
| | 719 aa. | | | |
| Q8C015 | Serine/threonine-protein kinase | 56..457 | 382/402 (95%) | 0.0 |
| | PAK 5 - Mus musculus (Mouse), | 319..719 | 389/402 (96%) | |
| | 719 aa. | | | |
| Q8BVB0 | Serine/threonine-protein kinase | 56..457 | 381/402 (94%) | 0.0 |
| | PAK 5 - Mus musculus (Mouse), | 319..719 | 388/402 (95%) | |
| | 719 aa. | | | |
| Q9ULS8 | Hypothetical protein KIAA1142 - | 1..455 | 317/460 (68%) | e-174 |
| | Homo sapiens (Human), 467 aa | 30..465 | 359/460 (77%) | |
| | (fragment). | | | |

[0630] PFam analysis indicates that the NOV48a protein contains the domains shown in the Table 48F.

TABLE 48F
Domain Analysis of NOV48a

| | | Identities/ | |
|---|---|---|---|
| Pfam | | Similarities | Expect |
| Domain | NOV48a Match Region | for the Matched Region | Value |
| PBD | 11..69 | 22/64(34%) | 1.3e-10 |
| | | 44/64 (69%) | |
| pkinase | 187..438 | 91/297 (31%) | 7.8e-83 |
| | | 200/297 (67%) | |

### Example 49

[0631] The NOV49 clone was analyzed, and the nucleotide and encoded polypeptide sequences are shown in Table 49A.

TABLE 49A

NOV49 Sequence Analysis

| | | |
|---|---|---|
| NOV49a, CG55980-02 | SEQ ID NO: 771 | 972 bp |
| DNA Sequence | ORF Start: ATG at 18 | ORF Stop: TAA at 954 |

CTCATATCTCCCTCATTATGTCTGTTCTCAATAACTCCGAAGTCAAGCTTTTCCTTCTGATTGGGATC
CCAGGACTGGAACATGCCCACATTTGGTTCTCCATCCCCATTTGCCTCATGTACCTGCTTGCCATCAT
GGGCAACTGCACCATTCTCTTTATTATAAAGACAGAGCCCTCGCTTCATGAGCCCATGTATTATTTCC
TTGCCATGTTGGCTGTCTCTGACATGGGCCTGTCCCTCTCCTCCCTTCCTACCATGTTGAGGGTCTTC
TTGTTCAATGCCATGGGAATTTCACCTAATGCCTGCTTTGCTCAAGAATTCTTCATTCATGGATTCAC
TGTCATGGAATCCTCAGTACTTCTAATTATGTCTTTGGACCGCTTTCTTGCCATTCACAATCCCTTAA
GATACAGTTCTATCCTCACTAGCAACAGGGTTGCTAAAATGGGACTTATTTTAGCCATTAGGAGCATT
CTCTTAGTGATTCCATTTCCCTTCACCTTAAGGAGATTAAAATATTGTCAAAAGAATCTTCTTTCTCA
CTCATACTGTCTTCATCAGGATACCATGAAGCTGGCCTGCTCTGACAACAAGACCAATGTCATCTATG
GCTTCTTCATTGCTCTCTGTACTATGCTGGACTTGGCACTGATTGTTTTGTCTTATGTGCTGATCTTG
AAGACTATACTCAGCATTGCATCTTTGGCAGAGAGGCTTAAGGCCCTAAATACCTGTGTCTCCCACAT
CTGTGCTGTGCTCACCTTCTATGTGCCCATCATCACCCTGGCTGCCATGCATCACTTTGCCAAGCACA
AAAGCCCTCTTGTTGTGATCCTTATTGCAGATATGTTCTTGTTGGTGCCGCCCCTTATGAACCCCATT
GTGTACTGTGTAAAGACTCGACAAATCTGGGAGAAGATCTTGGGGAAGTTGCTTAATGTATGTGGGAG
ATAAGAACTTGAACAATTAG

| | | | |
|---|---|---|---|
| NOV49a, CG55980-02 | | | |
| Protein Sequence | SEQ ID NO: 772 | 312 aa | MW at 35131.1kD |

MSVLNNSEVKLFLLIGIPGLEHAHIWFSIPICLMYLLAIMGNCTILFIIKTEPSLHEPMYYFLAMLAV
SDMGLSLSSLPTMLRVFLFNAMGISPNACFAQEFFIHGFTVMESSVLLIMSLDRFLAIHNPLRYSSIL
TSNRVAXMGLILAIRSILLVIPFPFTLRRLKYCQKNLLSHSYCLHQDTMKLACSDNKTNVIYGFFIAL
CTMLDLALIVLSYVLILKTILSIASLAERLKALNTCVSHICAVITFYVPIITLAAMHHFAKHKSPLVV
ILIADMFLLVPPLNNPIVYCVKTRQIWEKILGKLLNVCGR

| | | |
|---|---|---|
| NOV49b, CG55980-01 | SEQ ID NO: 773 | 972 bp |
| DNA Sequence | ORF Start: ATG at 18 | ORF Stop: TAA at 954 |

CTCATATCTCCCTCATTATGTCTGTTCTCAATAACTCCGAAGTCAAGCTTTTCCTTCTGATTGGGATC
CCAGGACTGGAACATGCCCACATTTGGTTCTCCATCCCCATTTGCCTCATGTACCTGCTTGCCATCAT
GGGCAACTGCACCATTCTCTTTATTATAAAGACAGAGCCCTCGCTTCATGAGCCCATGTATTATTTCC
TTGCCATGTTGGCTGTCTCTGACATGGGCCTGTCCCTCTCCTCCCTTCCTACCATGTTGAGGGTCTTC
TGTCATGGAATCCTCAGTACTTCTAATTATGTCTTTGGACCGCTTTCTTGCCATTCACAATCCCTTAA
TGTCATGGAATCCTCAGTACTTCTAATTATGTCTTTGGACCGCTTTCTTGCCATTCACAATCCCTTAA
GATACAGTTCTATCCTCACTAGCAACAGGGTTGCTAAAATGGGACTTATTTTAGCCATTAGGAGCATT
CTCTTAGTGATTCCATTTCCCTTCACCTTAAGGAGATTAAAATATTGTCAAAAGAATCTTCTTTCTCA
CTCATACTGTCTTCATCAGGATACCATGAAGCTGGCCTGCTCTGACAACAAGACCAATGTAATCTATG
GCTTcTTCATTGCTCTCTGTACTATGCTGGACTTGGCACTGATTGTTTTGTCTTATGTGCTGATCTTG
AAGACTATACTCAGCATTGCATCTTTGGCAGAGAGGCTTAAGGCCCTAAATACCTGTGTCTCCCACAT
CTGTGCTGTGCTCACCTTCTATGTGCCCATCATCACCCTGGCTGCCATGCATCACTTTGCCAAGCACA
AAAGCCCTCTTGTTGTGATCCTTATTGCAGATATGTTCTTGTTGGTGCCGCCCCTTATGAACCCCATT
GTGTACTGTGTAAAGACTCGACAAATCTGGGAGAAGATCTTGGGGAAGTTGCTTAATGTATGTGGGAG
ATAAGAACTTGAACAATTAG

| | | | |
|---|---|---|---|
| NOV49b, GG55980-01 | | | |
| Protein Sequence | SEQ ID NO: 774 | 312 aa | MW at 35131.1kD |

MSVLNNSEVKLFLLIGIPGLEHAHIWFSIPICLMYLLAIMGNCTILFIIKTEPSLHEPMYYFLAMLAV
SDMGLSLSSLPTMLRVFLFNANGISPNACFAQEFFIHGFTVMESSVLLIMSLDRFLAIHNPLRYSSIL
TSNRVAXMGLILAIRSILLVIPFPFTLRRLKYCQKNLLSHSYCLHQDTMKLACSDNKTNVIYGFFIAI
CTMLDLALIVLSYVLILKTILSIASLAERLKALNTCVSHICAVLTFYVPIITLAAMHHFAKHKSPLVV
ILIADMFLLVPPLMNPIVYCVKTRQIWEKILGKLLNVCGR

[0632] A ClustalW comparison of the above protein sequences yields the following sequence alignment shown in Table 49B.

TABLE 49B

Comparison of the NOV49 protein sequences.

| | |
|---|---|
| NOV49a | MSVLNNSEVKLFLLIGIPGLEHAHIWFSIPICLMYLLAIMGNCTILFIIKTEPSLHEPMY |
| NOV49b | MSVLNNSEVKLFLLIGIPGLEHAHIWFSIPICLMYLLAIMGNCTILFIIKTEPSLHEPMY |
| NOV49a | YFLAMLAVSDMGLSLSSLPTMLRVFLFNAMGISPNACFAQEFFIHGFTVMESSVLLIMSL |
| NOV49b | YFLAMLAVSDMGLSLSSLPTMLRVFLFNAMGISPNACFAQEFFIHGFTVMESSVLLIMSL |
| NOV49a | DRFLAIHNPLRYSSILTSNRVAKMGLILAIRSILLVIPFPFTLRRLKYCQKNLLSHSYCL |
| NOV49b | DRFLAIHNPLRYSSILTSNRVAKMGLILAIRSILLVIPFPFTLRRLKYCQKNLLSHSYCL |
| NOV49a | HQDTMKLACSDNKTNVIYGFFIALCTMLDLALIVLSYVLILKTILSIASLAERLKALNTC |
| NOV49b | HQDTMKLACSDNKTNVIYGFFIALCTMLDLALIVLSYVLILKTILSIASLAERLKALNTC |
| NOV49a | VSHICAVLTFYVPIITLAAMHHFAKHKSPLVVILIADMFLLVPPLMNPIVYCVKTRQIWE |
| NOV49b | VSHICAVLTFYVPIITLAAMHHFAKHKSPLVVILIADMFLLVPPLMNPIVYCVKTRQIWE |
| NOV49a | KILGKLLNVCGR |
| NOV49b | KILGKLLNVCGR |
| NOV49a | (SEQ ID NO: 772) |
| NOV49b | (SEQ ID NO: 774) |

[0633] Further analysis of the NOV49a protein yielded the following properties shown in Table 49C.

TABLE 49C
Protein Sequence Properties NOV49a

| | |
|---|---|
| SignalP analysis: | Cleavage site between residues 42 and 43 |

PSORT II analysis:

| PSG: | a new signal peptide prediction method |
|---|---|
| | N-region: length 10; pos.chg 1; neg.chg 1 |
| | H-region: length 10; peak value 10.00 |
| | PSG score: 5.60 |
| GvH: | von Heijne's method for signal seq. recognition |
| | GvH score (threshold: −2.1): −3.28 |
| | possible cleavage site: between 23 and 24 |

>>> Seems to have no N-terminal signal peptide

| ALOM: | Klein et al's method for TM region allocation | |
|---|---|---|
| | Init position for calculation: 1 | |
| | Tentative number of TMS(s) for the threshold 0.5: 8 | |
| | INTEGRAL Likelihood = −6.00 | Transmembrane 33-49 |
| | INTEGRAL Likelihood = 0.32 | Transmembrane 62-78 |
| | INTEGRAL Likelihood = −0.48 | Transmembrane 102-118 |
| | INTEGRAL Likelihood = −5.63 | Transmembrane 141-157 |
| | INTEGRAL Likelihood = −7.59 | Transmembrane 199-215 |
| | INTEGRAL Likelihood = 0.42 | Transmembrane 218-234 |
| | INTEGRAL Likelihood = −5.79 | Transmembrane 244-260 |
| | INTEGRAL Likelihood = −8.17 | Transmembrane 270-286 |

| | PERIPHERAL Likelihood = 2.12 (at 11) |
|---|---|
| | ALOM score: −8.17 (number of TMSs: 8) |
| MTOP: | Prediction of membrane topology (Hartmann et al.) |
| | Center position for calculation: 40 |
| | Charge difference: −1.5 C(−0.5) - N( 1.0) |
| | N >= C: N-terminal side will be inside |
| | >>> membrane topology: type 3a |

MITDISC: discrimination of mitochondrial targeting seq

| | | | |
|---|---|---|---|
| R content: | 0 | Hyd Moment (75): | 0.68 |
| Hyd Moment (95): | 3.43 | G content: | 2 |
| D/E content: | 2 | S/T content: | 2 |

Score: −8.46

Gavel: prediction of cleavage sites for mitochondrial preseq

cleavage site motif not found

NUCDISC: discrimination of nuclear localization signals

pat4: none
pat7: none
bipartite: none
content of basic residues: 7.7%
NLS Score: −0.47

KDEL: ER retention motif in the C-terminus: none
ER Membrane Retention Signals: none
SKL: peroxisomal targeting signal in the C-terminus: none
PTS2: 2nd peroxisomal targeting signal: none
VAC: possible vacuolar targeting motif: none
RNA-binding motif: none
Actinin-type actin-binding motif:

type 1: none
type 2: none

NMYR: N-myristoylation pattern : none
Prenylation motif: none
memYQRL: transport motif from cell surface to Golgi: none
Tyrosines in the tail: none
Dileucine motif in the tail: none
checking 63 PROSITE DNA binding motifs:

Leucine zipper pattern (PS00029): *** found ***
LKYCQKNLLSHSYCLHQDTMKL at 166

none
checking 71 PROSITE ribosomal protein motifs: none
checking 33 PROSITE prokaryotic DNA binding motifs: none

| | |
|---|---|
| NNCN: | Reinhardt's method for Cytoplasmic/Nuclear discrimination |
| | Prediction: cytoplasmic |
| | Reliability: 94.1 |
| COIL: | Lupas's algorithm to detect coiled-coil regions |
| | total: 0 residues |

--------------------------
Final Results (k = 9/23):

66.7%: endoplasmic reticulum
22.2%: mitochondrial
11.1%: vesicles of secretory system

>> prediction for CG55980-02 is end (k = 9)

[0634] A search of the NOV49a protein against the Geneseq database, a proprietary database that contains sequences published in patents and patent publication, yielded several homologous proteins shown in Table 49D.

TABLE 49D
Geneseq Results for NOV49a

| | | NOV49a | Identities/ | |
|---|---|---|---|---|
| | | Residues/ | Similarities for | |
| Geneseq | Protein/Organism/Length | Match | the Matched | Expect |
| Identifier | [Patent #, Date] | Residues | Region | Value |
| AAU85302 | G-coupled olfactory | 1..312 | 312/312 (100%) | e-178 |
| | receptor #163 - Homo | 1..312 | 312/312 (100%) | |
| | sapiens, 312 aa. | | | |
| | [WO200198526-A2, 27- | | | |
| | Dec.-2001] | | | |
| AAU95741 | Human olfactory and | 1..312 | 312/312 (100%) | e-178 |
| | pheromone Gprotein- | 1..312 | 312/312 (100%) | |
| | coupled receptor #228 - | | | |
| | Homo sapiens, 312 aa. | | | |
| | [WO200224726-A2, 28- | | | |
| | Mar.-2002] | | | |
| AAB71167 | Human GPCRX protein | 1..312 | 312/312 (100%) | e-178 |
| | SEQ ID 10 - Homo | 1..312 | 312/312 (100%) | |
| | sapiens, 312 aa. | | | |
| | [WO200250275-A2, 27- | | | |
| | Jun.-2002] | | | |
| AAB71166 | Human GPGRX protein | 1..312 | 312/312 (100%) | e-178 |
| | SEQ ID 8 - Homo sapiens, | 1..312 | 312/312 (100%) | |
| | 312 aa. [WO200250275- | | | |
| | A2, 27-Jun.-2002] | | | |
| AAB71344 | Human GCREC-23 | 1..312 | 312/312 (100%) | e-178 |
| | INCYTE ID 7472087GD1 | 1..312 | 312/312 (100%) | |
| | SEQ ID 23 - Homo | | | |
| | sapiens, 312 aa. | | | |
| | [WO200263004-A2, 15- | | | |
| | Aug.-2002] | | | |

[0635] In a BLAST search of public sequence databases, the NOV49a protein was found to have homology to the proteins shown in the BLASTP data in Table 49E.

TABLE 49E
Public BLASTP Results for NOV49a

| | | NOV49a | Identities/ | |
|---|---|---|---|---|
| Protein | | Residues/ | Similarities for | Ex- |
| Accession | Protein/ | Match | the Matched | pect |
| Number | /Organism/Length | Residues | Portion | Value |
| Q8NH64 | Seven trans- | 1..312 | 312/312 (100%) | e-178 |
| | membrane helix | 1..312 | 312/312 (100%) | |
| | receptor - Homo | | | |
| | sapiens (Human), | | | |
| | 312 aa. | | | |
| Q8VH16 | Olfactory receptor | 1..306 | 242/308 (78%) | e-141 |
| | MOR8-1 - | 8..315 | 272/308 (87%) | |
| | Mus musculus | | | |
| | (Mouse), 318 | | | |
| | aa. | | | |
| Q8VH12 | Olfactory receptor | 3..306 | 233/306 (76%) | e-134 |
| | MOR8-3 - | 2..307 | 262/306 (85%) | |
| | Mus musculus | | | |
| | (Mouse), 312 | | | |
| | aa. | | | |
| GAD37707 | Sequence 449 from | 1..306 | 222/308 (72%) | e-130 |
| | Patent | 1..308 | 268/308 (86%) | |
| | WO0224726 - | | | |
| | Homo sapiens | | | |
| | (Human), 313 aa. | | | |
| Q8NGJ6 | Seven trans- | 1..306 | 221/308 (71%) | e-129 |
| | membrane helix | 1..308 | 267/308 (85%) | |
| | receptor - | | | |
| | Homo sapiens | | | |
| | (Human), 313 aa. | | | |

[0636] PFam analysis indicates that the NOV49a protein contains the domains shown in the Table 49F.

TABLE 49F
Domain Analysis of NOV49a

| | NOV49a | Identities/ | |
|---|---|---|---|
| | Match | Similarities | |
| Pfam Domain | Region | for the Matched Region | Expect Value |
| 7tm_1 | 41..291 | 57/277 (21%) | 7.4e-13 |
| | | 169/277 (61%) | |

### Example 50

[0637] The NOV50 clone was analyzed, and the nucleotide and encoded polypeptide sequences are shown in Table 50A.

TABLE 50A

NOV50 Sequence Analysis

| | | |
|---|---|---|
| NOV50a, CG55988-03 | SEQ ID NO: 775 | 1630 bp |
| DNA Sequence | ORF Start: ATG at 1 | ORF Stop: TGA at 1528 |

ATGGGGTCCCGCCACTTCGAGGGGATTTATGACCACGTGGGGCACTTCGGCAGATTCCAGAGAGTCCT
CTATTTCATATGTGCCTTCCAGAACATCTCTTGTGGTATTCACTACTTGGCTTCTGTGTTCATGGGAG
TCACCCCTCATCATGTCTGCAGGCCCCCAGGCAATGTGAGTCAGGTTGTTTTCCATAATCACTCTAAT
TGGAGTTTGGAGGACACCGGGGCCCTGTTGTCTTCAGGCCAGAAAGATTATGTTACGGTGCAGTTGCA
GAATGGTGAGATCTGGGAGCTCTCAAGGTGTAGCAGGAATAAGAGGGAGAACACATCGAGTTTGGGCT
ATGAATACACTGGCAGTAAGAAAGAGTTTCCTTGTGTGGATGGCTACATATATGACCAGAACACATGG
AAAAGCACTGCGGTGACCCAGTGGAACCTGGTCTGTGACCGAAAATGGCTTGCAATGCTGATCCAGCC
CCTATTTATGTTTGGAGTCCTACTGGGATCGGTGACTTTTGGCTACTTTTCTGAGGCTAAGGAACGCC
GGGTGGTCTTGTGGGCCACAAGCAGTAGCATGTTTTTGTTTGGAATAGCAGCGGCGTTTGCAGTTGAT
TATTACACCTTCATGGCTGCTCGCTTTTTTCTTGCCATGGTTGCAAGTGGCTATCTTGTGGTGGGGTT
TGTCTATGTGATGGAATTCATTGGCATGAAGTCTCGGAAATGGGCGTCTGTCCATTTGCATTCCTTTT
TTGCAGTTGGAACCCTGCTGGTGGCTTTGACAGGATACTTGGTCAGGACCTGGTGGCTTTACCAGATG
ATCCTCTCCACAGTGACTGTCCCCTTTATCCTGTGCTGTTGGGTGCTCCCAGAGACACCTTTTTGGCT
TCTCTCAGAGGGACGATATGAAGAAGCACAAAAAATAGTTGACATCATGGCCAAGTGGAACAGGGCAA
GCTCCTGTAAACTGTCAGAACTTTATCACTGGACCTACAAGGTCCTGTTAGTAATAGCCCCACTGAAT
GTTCAGAAGCACAACCTATCATATCTGTTTTATAACTGGAGCATTACGAAAAGGACACTTACCGTTTG
GCTAATCTGGTTCACTGGAAGTTTGGGATTCTACTCGTTTTCCTTGAATTCTGTTAACTTAGGAGGCA
ATGAATACTTAAACCTCTTCCTCCTGGGTGTAGTGGAAATTCCCGCCTACACCTTCGTGTGCATCGCC
ACGGACAAGGTCGGGAGGAGAACAGTCCTGGCCTACTAACTTTTCTGCAGTGCACTGGCCTGTGGTGT
CGTTATGGTGATCCCCCAGATCGCTGGCTGTGGGAAGCGGCAGCATGGTGTGTCGCCTGGCCAGCATC
CTGGCGCCGTTCTCTGTGGACCTCAGCAGCATTTGGATCTTCATACCACAGTTGTTTGTTGGGACTAT
GGCCCTCCTGAGTGGAGTGTTAACACTAAAGCTTCCAGAAACCCTTGGGAAACGGCTAGCAACTACTT
GGGAGGAGGCTGCAAAACTGGAGTCAGAGAATGAAAGCAAGTCAAGCAAATTACTTCTCACAACTAAT
AATAGTGGGCTGGAAAAAACGGAAGCGATTACCCCCAGGGATTCTGGTCTTGGTGAATAAATGTGC

| | | | |
|---|---|---|---|
| NOV50a, CG55988-03 | | | |
| Protein Sequence | SEQ ID NO: 776 | 509 aa | MW at 57300.6kD |

MGSRHFEGIYDHVGHPGRPQRVLYFICAFQNISCGIHYLASVFMGVTPHHVCRPPGNVSQVVFHNHSN
WSLEDTGALLSSGQKDYVTVQLQNGEIWELSRCSRNKRENTSSLGYEYTGSKKEFPCVDGYIYDQNTW
KSTAVTQWNLVCDRKWLAMLIQPLFMFGVLLGSVTFGYFSDRLGRRVVLWATSSSMFLFGIAAAFAVD
YYTFMAARFFLAMVASGYLVVGFVYVMEFIGMKSRTWASVHLHSFFAVGTLLVALTGYLVRTWWLYQM
ILSTVTVPFILCCWVLPETPFWLLSEGRYEEAQKIVDIMAKWNRASSCKLSELLSLDLQGPVSNSPTE
VQKHNLSYLFYNWSITKRTLTVWLIWFTGSLGFYSFSLNSVNLGGNEYLNLFLLGVVEIPAYTFVCIA
TDKVGRRTVLAYSLFCSALACGVVMVIPQIAGCGKRQHGVSPGQHPGAVLCGPQQHLDLHTTVVCWDY
GPPEWSVNTKASRNPWETASNYLGGGCKTGVRE

| | | |
|---|---|---|
| NOV50b, GG55988-04 | SEQ ID NO: 777 | 1599 bp |
| DNA Sequence | ORF Start: ATG at 1 | ORF Stop: TAA at 1546 |

ATGGGGTCCCGCCACTTCGAGGGGATTTATGACCACGTGGGGCACTTCGGCAGATTCCAGAGAGTCCT
CTATTTCATATGTGCCTTCCAGAACATCTCTTGTGGTATTCACTACTTGGCTTCTGTGTTCATGGGAG
TCACCCCTCATCATGTCTGCAGGCCCCCAGGCAATGTGAGTCAGGTTGTTTTCCATAATCACTCTAAT
TGGAGTTTGGAGGACACCGGGGCCCTGTTGTCTTCAGGCCAGAAAGATTATGTTACGGTGCAGTTGCA
GAATGGTGAGATCTGGGAGCTCTCAAGGTGTAGCAGGAATAAGAGGGAGAACACATCGAGTTTGGGCT
ATGAATACACTGGCAGTAAGAAAGAGTTTCCTTGTGTGGATGGCTACATATATGACCAGAACACATGG
AAAAGCACTGCGGTGACCCAGTGGAACCTGGTCTGTGACCGAAAATGGCTTGCAATGCTGATCCAGCC
CCTATTTATGTTTGGAGTCCTACTGGGATCGGTGACTTTTGGCTACTTTTCTGACAGGCTAGGACGCC
GGGTGGTCTTGTGGGCCACAAGCAGTAGCATGTTTTTGTTTGGAATAGCAGCGGCGTTTGCAGTTGAT
TATTACACCTTCATGGCTGCTCGCTTTTTTCTTGCCATGGTTGCAAGTGGCTATCTTGTGGTGGGGTT
TGTCTATGTGATGGAATTCATTGGCATGAAGTCTCGGACATGGGCGTCTGTCCATTTGCATTCCTTTT
TTGCAGTTGGAACCCTGCTGGTGGCTTTGACAGGATACTTGGTCAGGACCTGGTGGCTTTACCAGATG
ATCCTCTCCACAGTGACTGTCCCCTTTATCCTGTGCTGTTGGGTGCTCCCAGAGACACCTTTTTGGCT
TCTCTCAGAGGGACGATATGAAGAAGCACAAAAAATAGTTGACATCATGGCCAAGTGGAACAGGGCAA
GCTCCTGTAAACTGTCAGAACTTTTATCACTGGACCTACAAGGTCCTGTTAGTAATAGCCCCACTGAA
GTTCAGAACACAACCTATCATATCTGTTTTATAACTGGAGCATTACGAAAAGGACACTTAACCGTTTG
GCTAATCTGGTTCACTGGAAGTTTGGGATTCTACTCGTTTTCCTTGAATTCTGTTAACTTAGGAGGCA
ATGAATACTTAAACCTCTTCCTCCTGGGTGTAGTGGAAATTCCCGCCTACACCTTCGTGTGCATCGCC
ACGGACAAGGTCGGGAGGAGAACAGTCCTGGCCTACTCTCTTTTCTGCAGTGCACTGGCCTGTGGTGT
CGTTATGGTGATCCCCCAGAAACATTATATTTTGGGTGTGGTGACAGCTATGGTTGGAAAATTTGCCA
TCGGGGCAGCATTTGGTCTCATTTATCTTTATACAGCTGAGCTGTATCCAACCATTGTAAGATCGCTG
GCTGTGGGAAGCGGCAGCATGGTGTGTCGCCTGGCCAGCATCCTGGCGCCGTTCTCTGTGGACCTCAG
CAGCATTTGGATCTTCATACCACAGCTCCTAGGACAGCACCTTCAGGAGTAATAATGCAGGCAGTCGC
TGGCAATTAAGGAGGCGCTCCATGGTGGGTCATGA

| | | | |
|---|---|---|---|
| NOV50b, CG55988-04 | | | |
| Protein Sequence | SEQ ID NO: 778 | 515 aa | MW at 58030.0kD |

MGSRHFEGIYDHVGHFGRFQRVLYFICAFQNISCGIHYLASVFMGVTPHHVCRPPGNVSQVVFHNGSN
WSLEDTGALLSSGQKDYVTVQLQNGEIWELSRCSRNKRENTSSLGYEYTGSKKEFPCVDGYIYDQNTW
KSTAVTQWNLVCDRKWLAMLIQPLFMFGVLLGSVTFGYFSDRLGRRVVLWATSSSMFLFGIAAAFAVD
YYTFMAARFFLAMVASGYLVVGFVYVMEFIGMKSRTWASVHLHSFFAVGTLLVALTGYLVRTWWLYQM
ILSTVTVPFILCCWVLPETPFWLLSEGRYEEAQKIVDIMAKWNRASSCKLSELLSLDLQGPVSNSPTE
VQKHNLSYLFYNWSITKRTLTVWLIWFTGSLGFYSFSLNSVNLGGNEYLNLFLLGVVEIPAYTFVCIA
TDKVGRRTVLAYSLFCSALACGVVMVIPQKHYILGVVTAMVGKFAIGAAFGLEYLETAELYTIVARSL
AVGSGSMVCRLASILAPFSVDLSSIWIFIPQLLGQHLQE

| | | |
|---|---|---|
| NOY50c, CG55988-01 | SEQ ID NO: 779 | 2069 bp |
| DNA Sequence | ORF Start: ATG at 279 | ORF Stop: TAA at 1881 |

GCTTCTAGGCCTTCTCAGTAGATGGAGCTAAGTAATATATGTATATATACTAACCCACAGATATAAAT
ATGCTATAATTATTTCTATATTTATCCATTCGTGTATATGTTAAGATAAACATGATGGAGACCCATTC
AAATTTGCTTATGTTCTTTTTCAGCCTATAGACCAGATATAATAATTAGCTTTTCTTCTCTTGCAGAT
TCCAGAGAGTCCTCTATTTCATATGTGCCTTCCAGAACATCTCTTGTGGTATTCACTACTTGGCTTCT
GTGTTCATGGGAGTCACCCCTCATCATGTCTGCAGGCCCCCAGGCAATGTGAGTCAGGTTGTTTTCCA
TAATCACTCTAATTGGAGTTTGGAGGACACCGGGGCCCTGTTGTCTTCAGGCCAGAAAGATTATGTTA
CGGTGCAGTTGCAGAATGGTGAGATCTGGGAGCTCTCAAGGTGTAGCAGGAATAAGAGGGAGAACACA
TCGAGTTTGGGCTATGAATACACTGGCAGTAAGAAAGAGTTTCCTTGTGTGGATGGCTACATATATGA
CCAGAACACATGGAAAAGCACTGCGGTGACCCAGTGGAACCTGGTCTGTGACCGAAATGAGCTTGCAA
TGCTGATCCAGCCCCTATTTATGTTTGGAGTGCCTACTGGGATCGGTGACTTTTGGCTACTTTCTGAC
AGGCTAGGACGCCGGGTGGTCTTGTGGGCCACAAGCAGTAGCATGTTTTTGTTTGGAATAGCAGCGGC
GTTTGCAGTTGATTATTACACCTTCATGGCTGCTCGCTTTTTTCTTGCCATGGTTGCAAGTGGCTATC
TTGTGGTGGGGTTTTGTCTATGTGATGGAATTCATTGGCATGAAGTCTCGGACATGGGCTCTGTCCAT
TTGCATTCCTTTTTTGCAGTTGGAACCCTGCTGGTGGCTTTGACAGGATACTTGGTCAGGACCTGGTG
GCTTTACCAGATGATCCTCTCCACAGTGACTGTCCCCTTTATCCTGTGCTGTTGGGTGCTCCCAGAGA
CACCTTTTTGGCTTCTCTCAGAGGGACGATATGAAGAAGCACAAAAAATAGTTGACATCATGGCCAAG
TGGAACAGGGCAAGCTCCTGTAAACTGTCAGAACTTTTATCACTGGACCTACAAGGTCCTGTTAGTAA
TAGCCCCACTGAAGTTCAGAAGCACAACCTATCATATCTGTTTTATAACTGGAGCATTACGAAAAGGA
CACTTACCGTTTGGCTAATCTGGTTCACTGGAAGTTTGGGATTCTACTCGTTTTCCTTGAATTCTGTT
AACTTAGGAGGCAATGAATACTTAAACCTCTTCCTCCTGGGTGTAGTGGAAATTCCCGCCTACACCTT
CGTGTGCATCGCCATGGACAAGGTCGGGAGGAGAACAGTCCTGGCCTACTCTCTTTTCTGCAGTGCAC
TGGCCTGTGGTGTCGTTATGGTGATCCCCCAGAAACATTATATTTTGGGTGTGGTGACAGCTATGGTT
GGAAAATTTGCCATCGGGGCAGCATTTGGCCTCATTTATCTTTATACAGCTGAGCTGTATCCAACCAT
TGTAAGATCGCTGGCTGTGGGAACGGCAGCATGGTGTGTCGCCTGGCCAGCATCCTGGCAGCCGTTCT
CTGTGGACCTCAGCAGCATTTGGATCTTCATACCACAGTTGTTTGTTGGGACTATGGCCCTCCTGAGT
GGAGTGTTAACACTAAAGCTTCCAGAAACCCTTGGGAAACGGCTAGCAACTACTTGGGAGGAGGCTGC
AAAACTGGAGTCAGAGAATGAAAGCAAGTCAAGCAAATTACTTCTCACAACTAATAATAGTGGGCTGG
AAAAAACGGAAGCGATTACCCCCAGGGATTCTGGTCTTGGTGAATAAATGTGCCATGCCTGGTGTCTA
GCACCTGAAATATTATTTACCCCTAATGCCTTTGTATTAGAGGAATCTTATTCTCATCTCCATATGTT
GTTTGTATGTCTTTTTAATAAATTTTGTAAGAAAATTTTAAAGCAAATATGTTATAAAAGAAATAAAA
ACTAAGATGAAAATTCTCAGTTTTAAAAA

| | | | |
|---|---|---|---|
| NOV50c, GG55988-01 | | | |
| Protein Sequence | SEQ ID NO: 780 | 534 aa | MW at 59606.7kD |

MGVTPHHVCRPPGNVSQVVGHNHSNWSLEDTGALLSSGQKDYVTVQLQNGEIWELSRCSRNKRENTSS
LGYEYTGSKKEFPCVDGYIYDQNTWKSTAVTQWNLVCDRKWLAMLIQPLFMFGVLLGSVTFGYFSDRL
GRRVVLWATSSSMFLFGIAAAFAVDYYTFMAARFFLAMVASGYLVVGFVYVMEFIGMKSRTWASVHLH
RASSCKLSELLSLDLQGPVSNSPTEVQKHNLSYLFYNWSITKRTLTVWLIWFTGSLGFYSFSLNSVML
GGNEYLNLFLLGVVEIPAYTFVCIAMDKVGRRTVLAYSLFCSALACGVVMVIPQKHYILGVVTANVGK
FAIGAAGFLIYLYTAELYPTIVRSLAVGSGSMVCRLASILAPFSVDLSSIWIFIPQLFVGTMALLSGV
LTLKLPETLGKRLATTWEEAAKLESENESKSSKLLLTTNNSGLEKTEAITPRDSGLGE

| | | |
|---|---|---|
| NOV50d, GG55988-02 | SEQ ID NO: 781 | 1666 bp |
| DNA Sequence | ORF Start: ATG at 76 | ORF Stop: TAA at 1654 |

TTCCAGAGAGTCCTCTATTTCATATGTGCCTTCCAGAACATCTCTTGTGGTATTCACTACTTGGCTTC
TGTGTTCATGGGAGTCACCCCTCATCATGTCTGCAGGCCCCCAGGCAATGTGAGTCAGGTTGTTTTCC
ATAATCACTCTAATTGGAGTTTGGAGGACACCGGGGCCCTGTTGTCTTCAGGCCAGAAAGATTATGTT
ACGGTGCAGTTGCAGAATGGTGAGATCTGGGAGCTCTCAAGGTGCAGATGGAATAAGAGGGAGAACAC
ATCGAGTTTGGGCTATGAATACACTGGCAGTAAGAAAGAGTTTCCTTGTGTGGATGGCTACATATATG
ACCAGAACACATGGAAAAGCACTGCGGTGACCCAGTGGAACCTGGTCTGTGACCGAAAATCGGTTGCA
ATGCTGATCCAGCCCCTATTTATGTTTGGAGTCCTACTGGGATGCGGTGACTTTTGGCTACTTTCTGA
CAGGCTTTTTTGCCTATATGTGATTTGCAATGGGTCAGACTCCTCAATAGTTATAAATGTGAACCTTG
AATATAAATCCCTATTATTTGTTTTTCAGGTTGCAAGTGGCTATCTTGTGGTGGGGTTTGTCTATGTG
ATGGAATTCATTGGCATGAAGTCTCGGACATGGGCGTCTGTCCATTTGCATTCCTTTTTGCAAGTTGG
AACCCTGCTGGTGGCTTTGACAGGATACTTGGTCAGGACCTGGTGGCTTTACCAGATGATCCTCTCCA
CAGTGACTGTCCCCTTTATCCTGTGCTGTTGGGTGCTTCCCAGAGACACCTTTTGGCTTCTCTGCAGA
GGACGATATGAAGAAGCACAAAAAATAGTTGACATCATGGCCAAGTGGAACAGGGCAAGCTCCTGTAA
ACTGTCAGAACTTTTATCACTGGACCTACAAGGTCCTGTTAGTAATAGCCCACTGAAGTTCAGAAGCA
ACAACCTATCATATCTGTTTTATAACTGGAGCATTACGAAAAGGACACTTACCGTTTGGCTAATCTGG
TTCACTGGAAGTTTGGGATTCTACTCGTTTTCCTTGAATTCTGTTAACTTAGGAGGCAATGAATACTT
AAACCTCTTCCTCACAGGTGTAGTGGAAATTCCCGCCTACACCTTCGTGTGCATCGCCATGGACAAGG
TCGGGAGGAGAACAGTCCTGGCCTACTCTCTTTTCTGCAGTGCACTGGCCTGTGGTGTCGTTATGGTG
ATCCCCCAGGTGAGTTATCTTCTGGGTGTGGTGACAGCTATGGTTGGAAAATTTGCCATCGGGGCAGC
ATTTGGCCTCATTTATCTTTATACAGCTGAGCTGTATCCAACCATTGTAAGGTCGCTGGCTGTGGGAA
GCGGCAGCATGGTGTGTCGCCTGGCCAGCATCCTGGCGCCGTTCTCTGTGGACCTCAGCAGCATTTGG
ATCTTCATACCACAGTTGTTTGTTGGGACTATGGCCCTCCTGAGTGGAGTGTTAACACTAAAGCTTCC
AGAAACCCTTGGGAAACGGCTAGCAACTACTTGGGACCAGGCTGCAAAACTGGAGTCAGAGAATGAAA
GCAAGTCAAGCAAATTACTTCTCACAACTAATAATAGTGGGCTGGAAAAAACGGAAGCGATTACCCCC
AGGGATTCTGGTCTTGGTGAATAAATGTGCCATG

| | | | |
|---|---|---|---|
| NOV50d, CG55988-02 | | | |
| Protein Sequence | SEQ ID NO: 782 | 526 aa | MW at 58820.8kD |

MGVTPHHVCRPPGNVSQVVFHNHSNWSLEDTGALLSSGQKDYVTVQLQNGEIWELSRCSRNKRENTSS
LGYEYTGSKKEFPCVDGYIYDQNTWSTAVTQWNLVCDRKWLAMLIQPLFMFGVLLGSVTFGYAFSDRL
FCLYVICNGVRLLNSYKCDLEYKSLLFVFQVASGYLVVGFVYVMEFIGMKSRTWASVHLHSFFAVGTL
LVALTGYLVRTWWLYQMILSTVTVPFILCCWVLPETPFWLLSEGRYEEAQKIVDIMAKWNRASSCKLS
ELLSLDLQGPVSNSPTEVQKHNLSYLFYNWSITKRTLTVWLIWFTGSLGYSFSLNSVNLGGNEYALNL
FLTGVVEIPAYTFVCIAMDKVGRRTVLAYSLFCSALACGVVMVIPQVSYLLGVVTAMVGKFAIGAAFG
LIYLYTAELYPTIVRSLAVGSGSMVCRLASILAPFSVDLSSIWIFIPQLFVGTMALLSGVLTLKLPET
LGKRLATTWEEAAKLESENESKSSKLLLTTNNSGLEKTEAITPRDSGLGE

[0638] A ClustalW comparison of the above protein sequences yields the following sequence alignment shown in Table 50B.

TABLE 50B

Comparison of the NOV50 protein sequences.

| | |
|---|---|
| NOV50a | MGSRHFEGIYDHVGHFGRFQRVLYFICAFQNISCGIHYLASVFMGVTPHHVCRPPGNVSQ |
| NOV50b | MGSRHFEGIYDHVGHFGRFQRVLYFICAFQNISCGIHYLASVFMGVTPHHVCRPPGNVSQ |
| NOV50c | -------------------------------------------MGVTPHHVCRPPGNVSQ |
| NOV50d | -------------------------------------------MGVTPHHVCRPPGNVSQ |
| NOV50a | VVFHNHSNWSLEDTGALLSSGQKDYVTVQLQNGEIWELSRCSRNKRENTSSLGYEYTGSK |
| NOV50b | VVFHNHSNWSLEDTGALLSSGQKDYVTVQLQNGEIWELSRCSRNKRENTSSLGYEYTGSK |
| NOV50c | VVFHNHSNWSLEDTGALLSSGQKDYVTVQLQNGEIWELSRCSRNKRENTSSLGYEYTGSK |
| NOV50d | VVFHNHSNWSLEDTGALLSSGQKDYVTVQLQNGEIWELSRCSRNKRENTSSLGYEYTGSK |
| NOV50a | KEFPCVDGYIYDQNTWKSTAVTQWNLVCDRKWLAMLIQPLFMFGVLLGSVTFGYFSDRLG |
| NOV50b | KEFPCVDGYIYDQNTWKSTAVTQWNLVCDRKWLAMLIQPLFMFGVLLGSVTFGYFSDRLG |
| NOV50c | KEFPCVDGYIYDQNTWKSTAVTQWNLVCDRKWLAMLIQPLFMFGVLLGSVTFGYFSDRLG |
| NOV50d | KEFPCVDGYIYDQNTWKSTAVTQWNLVCDRKWLANLIQPLFMFGVLLGSVTFGYFSDRLF |
| NOV50a | RRVVLWATSSSMFLFGIAAAFAVDYYTFMAARFFLAMVASGYLVVGFVYVMEFIGMKSRT |
| NOV50b | RRVVLWATSSSMFLFGIAAAFAVDYYTFMAARFFLAMVASGYLVVGFVYVMEFIGMKSRT |
| NOV50c | RRVVLWATSSSMFLFGIAAAFAVDYYTFMAARFFLANVASGYLVVGFVYVMEFIGMKSRT |
| NOV50d | CLYVICN--------GVRLLNSYKCDLEYKSLLFVFQVASGYLVVGFVYVMEFIGMKSRT |
| NOV50a | WASVHLHSFFAVGTLLVALTGYLVRTWWLYQMILSTVTVPFILCCWVLPETPFWLLSEGR |
| NOV50b | WASVHLHSFFAVGTLLVALTGYLVRTWWLYQMILSTVTVPFILCCWVLPETPFWLLSEGR |
| NOV50c | WASVHLHSFFAVGTLLVALTGYLVRTWWLYQMILSTVTVPFILCCWVLPETPFWLLSEGR |
| NOV50d | WASVHLHSFFAVGTLLVALTGYLVRTWWLYQMILSTVTVPFILCCWVLPETPFWLLSEGR |
| NOV50a | YEEAQKIVDIMAKWNRASSCKLSELLSLDLQGPVSNSPTEVQKHNLSYLFYNWSITKRTL |
| NOV50b | YEEAQKIVDIMAKWNRASSCKLSELLSLDLQGPVSNSPTEVQKHNLSYLFYNWSITKRTL |
| NOV50c | YEEAQKIVDIMAKWNRASSCKLSELLSLDLQGPVSNSPTEVQKHNLSYLFYNWSITKRTL |
| NOV50d | YEEAQKIVDIMAKWNRASSCKLSELLSLDLQGPVSNSPTEVQKHNLSYLFYNWSITKRTL |
| NOV50a | TVWLIWFTGSLGFYSFSLNSVNLGGNEYLNLFLLGVVEIPAYTFVCIATDKVGRRTVLAY |
| NOV50b | TVWLIWFTGSLGFYSFSLNSVNLGGNEYLNLFLLGVVEIPAYTFVCIATDKVGRRTVLAY |
| NOV50c | TVWLIWFTGSLGFYSFSLNSVNLGGNEYLNLFLLGVVEIPAYTFVCIAMDKVGRRTVLAY |
| NOV50d | TVWLIWFTGSLGFYSFSLNSVNLGGNEYLNLFLTGVVEIPAYTFVCIAMDKVGRRTVLAY |
| NOV50a | SLFCSALACGVVMVIPQI--------AGCGKRQHGVSPG--------QHP--------G- |
| NOV50b | SLFCSALACGVVMVIPQKHYILGVVTAMVGKFAIGAAFGLIYLYTAELYPTIVRSLAVGS |
| NOV50c | SLFCSALACGVVMVIPQKHYILGVVTAMVGKFAIGAAFGLIYLYTAELYPTIVRSLAVGS |
| NOV50d | SLFCSALACGVVMVIPQVSYLLGVVTAMVGKFAIGAAFGLIYLYTAELYPTIVRSLAVGS |
| NOV50a | -AVLCGPQQHLDLHTTVVC--WDYGP------------------PE---------WSVNT |
| NOV50b | GSMVCRLASILAPFSVDLSSIWIFIPQLLGQHLQE------------------------- |
| NOV50c | GSMVCRLASILAPFSVDLSSIWIFIPQLFVGTMALLSGVLTLKLPETLGKRLATTWEEAA |
| NOV50d | GSMVCRLASILAPFSVDLSSIWIFIPQLFVGTMALLSGVLTLKLPETLGKRLATTWEEAA |
| NOV50a | KASRNPWETASNYLGGGCKTGVRE------------- |
| NOV50b | ------------------------------------- |
| NOV50c | KLESENESKSSKLLLTTNNSGLEKTEAITPRDSGLGE |
| NOV50d | KLESENESKSSKLLLTTNNSGLEKTEAITPRDSGLGE |
| NOV50a | (SEQ ID NO: 776) |
| NOV50b | (SEQ ID NO: 778) |
| NOV50c | (SEQ ID NO: 780) |
| NOV50d | (SEQ ID NO: 782) |

[0639] Further analysis of the NOV50a protein yielded the following properties shown in Table 50C.

TABLE 50C
Protein Sequence Properties NOV50a

| | |
|---|---|
| SignalP analysis: | No Known Signal Sequence Indicated |

PSORT II analysis:

| | |
|---|---|
| PSG: | a new signal peptide prediction method |

N-region: length 11; pos.chg 1; neg.chg 2
H-region: length 6; peak value 0.00
PSG score: −4.40

| | |
|---|---|
| GvH: | von Heijne's method for signal seq. recognition |
| | GvH score (threshold: −2.1): −1.51 |
| | possible cleavage site: between 34 and 35 |

>>> Seems to have no N-terminal signal peptide

| ALOM: | Klein et al's method for TM region allocation | |
|---|---|---|
| | Init position for calculation: 1 | |
| | Tentative number of TMS(s) for the threshold 0.5: 7 | |
| | INTEGRAL Likelihood =−3.03 | Transmembrane 154-170 |
| | INTEGRAL Likelihood =−1.12 | Transmembrane 183-199 |
| | INTEGRAL Likelihood =−4.57 | Transmembrane 214-230 |
| | INTEGRAL Likelihood =−3.08 | Transmembrane 248-264 |
| | INTEGRAL Likelihood =−5.89 | Transmembrane 272-288 |
| | INTEGRAL Likelihood =−4.51 | Transmembrane 391-407 |
| | INTEGRAL Likelihood =−5.10 | Transmembrane 419-435 |

| | PERIPHERAL Likelihood = 2.81 (at 360) |
|---|---|
| | ALOM score: −5.89 (number of TMSs: 7) |
| MTOP: | Prediction of membrane topology (Hartmann et al.) |
| | Center position for calculation: 161 |
| | Charge difference: 0.0 C( 2.0) - N( 2.0) |
| | N >= C: N-terminal side will be inside |

>>> membrane topology: type 3a
MITDISC: discrimination of mitochondrial targeting seq

| | | | |
|---|---|---|---|
| R content: | 1 | Hyd Moment (75): | 7.38 |
| Hyd Moment (95): | 9.73 | G content: | 2 |
| D/E content: | 2 | S/T content: | 1 |
| Score: −6.19 | | | |

Gavel: prediction of cleavage sites for mitochondrial preseq

R-2 motif at 14 SRH|FE

NUCDISC: discrimination of nuclear localization signals

pat4: none
pat7: none
bipartite: none
content of basic residues: 7.5%
NLS Score: −0.47

KDEL: ER retention motif in the C-terminus: none
ER Membrane Retention Signals:

XXRR-like motif in the N-terminus: GSRH

none
SKL: peroxisomal targeting signal in the C-terminus: none
PTS2: 2nd peroxisomal targeting signal: none
VAC: possible vacuolar targeting motif: none
RNA-binding motif: none
Actinin-type actin-binding motif:

type 1: none
type 2: none

NMYR: N-myristoylatiOn pattern : none
Prenylation motif: none
memYQRL: transport motif from cell surface to Golgi: none
Tyrosines in the tail: none
Dileucine motif in the tail: none
checking 63 PROSITE DNA binding motifs:

Leucine zipper pattern (PS00029): *** found ***
LVCDRKWLAMLIQPLFMFGVLL at 146

none
checking 71 PROSITE ribosomal protein motifs: none
checking 33 PROSITE prokaryotic DNA binding motifs: none
NNCN: Reinhardt's method for Cytoplasmic/Nuclear discrimination

Prediction: cytoplasmic
Reliability: 94.1

COIL: Lupas's algorithm to detect coiled-coil regions

total: 0 residues

--------------------------
Final Results (k = 9/23):

77.8%: endoplasmic reticulum
22.2%: mitochondrial

>> prediction for CG55988-03 is end (k = 9)

[0640] A search of the NOV50a protein against the Geneseq database, a proprietary database that contains sequences published in patents and patent publication, yielded several homologous proteins shown in Table 50D.

TABLE 50D
Geneseq Results for NOV50a

| | | NOV50a | Identities/ | |
|---|---|---|---|---|
| | | Residues/ | Similarities for | |
| Geneseq | Protein/Organism/Length | Match | the Matched | Expect |
| Identifier | [Patent #, Date] | Residues | Region | Value |
| ABP74100 | Human TRICH SEQ ID NO 5 - | 1..437 | 436/437 (99%) | 0.0 |
| | Homo sapiens, 577 aa. | 1..437 | 436/437 (99%) | |
| | [WO200246415-A2, 13-Jun.- | | | |
| | 2002] | | | |
| AAM00930 | Human bone marrow protein, | 1..437 | 436/437 (99%) | 0.0 |
| | SEQ ID NO: 406 - Homo sapiens, | 7..443 | 436/437 (99%) | |
| | 584 aa. [WO200153453-A2, 26- | | | |
| | Jul.-2001] | | | |
| AAM78367 | Human protein SEQ ID NO 1029 | 1..437 | 436/437 (99%) | 0.0 |
| | - Homo sapiens, 577 aa. | 1..437 | 43 6/437 (99%) | |
| | [WO200157190-A2, 09-Aug.- | | | |
| | 2001] | | | |
| AAM79351 | Human protein SEQ ID NO 2997 | 1..437 | 432/438 (98%) | 0.0 |
| | - Homo sapiens, 585 aa. | 7..444 | 432/438 (98%) | |
| | [WO200157190-A2, 09-Aug.- | | | |
| | 2001] | | | |
| AAB43038 | Human OREX 0RiF2802 | 18..437 | 419/420 (99%) | 0.0 |
| | polypeptide sequence SEQ ID | 1..420 | 419/420 (99%) | |
| | NO:5604 - Homo sapiens, 560 aa. | | | |
| | [WO200058473-A2, 05-Oct.- | | | |
| | 2000] | | | |

[0641] In a BLAST search of public sequence databases, the NOV50a protein was found to have homology to the proteins shown in the BLASTP data in Table 50E.

TABLE 50E
Public BLASTP Results for NOV50a

| | | NOV50a | Identities/ | |
|---|---|---|---|---|
| Protein | | Residues/ | Similarities for | Ex- |
| Accession | Protein/ | Match | the Matched | pect |
| Number | /Organism/Length | Residues | Portion | Value |
| Q96RU0 | Organic cation | 1..437 | 437/437 (100%) | 0.0 |
| | transporter | 1..437 | 437/437 (100%) | |
| | OKB1 - Homo | | | |
| | sapiens (Human), | | | |
| | 577 aa. | | | |
| AAH47565 | Organic cation | 1..437 | 436/437 (99%) | 0.0 |
| | transporter OKB1 - | 1..437 | 436/437 (99%) | |
| | Homo sapiens | | | |
| | (Human), 577 aa. | | | |
| Q8IZD5 | Putative | 1..437 | 436/437 (99%) | 0.0 |
| | transmembrane | 1..437 | 436/437 (99%) | |
| | transporter FLIPT | | | |
| | 2 - Homo | | | |
| | sapiens (Human), | | | |
| | 577 aa. | | | |
| 014567 | WUGSC: | 18..437 | 419/420 (99%) | 0.0 |
| | RG331P03.1 | | | |
| | protein - | | | |
| | Homo sapiens | 1..420 | 419/420 (99%) | |
| | (Human), 456 aa | | | |
| | (fragment). | | | |
| QSIUG8 | Carnitine transporter | 18..437 | 387/420 (92%) | 0.0 |
| | 2 - Homo | 16..403 | 387/420 (92%) | |
| | sapiens (Human), | | | |
| | 543 aa. | | | |

[0642] PFam analysis indicates that the NOV50a protein contains the domains shown in the Table 50F.

TABLE 50F
Domain Analysis of NOV50a

| | | Identities/ | |
|---|---|---|---|
| | NOV50a | Similarities for | |
| Pfam Domain | Match Region | the Matched Region | Expect Value |
| sugar_tr | 120..499 | 67/493 (14%) | 7.8e-05 |
| | | 242/493 (49%) | |

### Example 51

[0643] The NOV51 clone was analyzed, and the nucleotide and encoded polypeptide sequences are shown in Table 51A.

TABLE 51A
NOV51 Sequence Analysis

| | | |
|---|---|---|
| NOV51a, CG56071-01 | SEQ ID NO: 783 | 3092 bp |

| | | |
|---|---|---|
| DNA Sequence | ORF Start: ATG at 1 | ORF Stop: TAG at 3073 |

ATGGAGCCCTCCAGAGCGCTTCTCGGCTGCCTAGCGAGCGCCGCCGCTGCCGCCCCGCCGGGGGAGGA
TGGAGCAGGGGCCGGGGCCGAGGAGGAGGAGGAGGAGGAGGAGGAGGCGGCGGCGGCGGTGGGCCCCG
GGGAGCTGGGCTGCGACGCGCCGCTGCCCTACTGGACGGCCGTGTTCGAGTACGAGGCGGCGGGCGAG
GACGAGCTGACCCTGCGGCTGGGCGACGTGGTGGAGGTGCTGTCCAAGGACTCGCAGGTGTCCGGCGA
CGAGGGCTGGTGGACCGGGCAGCTGAACCAGCGGGTGGGCATCTTCCCCAGCAACTACGTGACCCCGC
GCAGCGCCTTCTCCAGCCGCTGCCAGCCCGGCGGCGAAATTGATTTTGCGGAGCTCACCTTGGAAGAG
ATTATTGGCATCGGGGGCTTTGGGAAGGTCTATCGTGCTTTCTGGATAGGGGATGAGGTTGCTGTGAA
AGCAGCTCGCCACGACCCTGATGAGGACATCAGCCAGACCATAGAGAATGTTCGCCAAGAGGCCAAGC
TCTTCGCCATGCTGAAGCACCCCAACATCATTGCCCTAAGAGGGGTATGTCTGAAGGAGCCCAACCTC
TGCTTGGTCATGGAGTTTGCTCGTGGAGGACCTTTGAATAGAGTGTTATCTGGGAAAAGGATTCCCCC
AGACATCCTGGTGAATTGGGCTGTGCAGATTGCCAGAGGGATGAACTACTTACATGATGAGGCAATTG
TTCCCATCATCCACCGCGACCTTAAGTCCAGCAACGTATTGATCCTCCAGAAGGTGGAGAATGGAGAC
CTGAGCAACAAGATTCTGAAGATCACTGATTTTGGCCTGGCTCGGGAATGGCACCGAACCACCAAGAT
GAGTGCGGCAGGGACGTATGCTTGGATGGCACCCGAAGTCATCCGGGCCTCCATGTTTTCCAAAGGCA
GTGATGTGTGGAGCTATGGGGTGCTACTTTGGGAGTTGCTGACTGGTGAGGTGCCCTTTCGAGGCATT
GATGGCTTAGCAGTCGCTTATGGAGTGGCCATGAACAAACTCGCCCTTCCTATTCCTTCTACGTGCCC
AGAACCTTTTGCCAAACTCATGGAAGACTGCTGGAATCCTGATCCCCACTCACGACCATCTTTCACGA
ATATCCTGGACCAGCTAACCACCATAGAGGAGTCTGGTTTCTTTGAAATGCCCAAGGACTCCTTCCAC
TGCCTGCAGGACAACTGGAAACACGAGATTCAGGAGATGTTTGACCAACTCAGGGCCAAAGAAAAGGA
ACTTCGCACCTGGGAGGAGGAGCTGACGCGGGCTGCACTGCAGCAGAAGAACCAGGAGGAACTGCTGC
GGCGTCGGGAGCAGGAGCTGGCCGAGCGGGAGATTGACATCCTGGAACGGGAGCTCAACATCATCATC
CACCAGCTGTGCCAGGAGAAGCCCCGGGTGAAGAAACGCAAGGGCAAGTTCAGGAAGAGCCGGCTGAA
GCTCAAGGATGGCAACCGCATCAGCCTCCCTTCTGGTTTCCAGCACAAGTTCACGGTGCAGGCCTCCC
CTACCATGGATAAAAGGAAGAGTCTTATCAACAGCCGCTCCAGTCCTCCTGCAAGCCCCACCATCATT
CCTCGCCTTCGAGCCATCCAGTGTGAGACTGTTTCCCAAATTAGCTGGGGCCAGAACACACAGGGGCA
CCTGTCCGAAAGCAGCAAAACCTGGGGCAGGAGCTCAGTCGTCCCAAAGGAGGAAGGGGAGGAGGAGG
AGAAGAGGGCCCCAAAGAAGAAGGGACGGACGTGGGGGCCAGGGACGCTTGGTCAGAAGGAGCTTGCC
TCGGGAGATGAACTCAAGTCCCTGGTAGATGGATATAAGCAGTGGTCGTCCAGTGCCCCCAACCTGGT
GAAGGGCCCAAGGAGTACCCCGGCCCTGCCAGGGTTCACCAGCCTTATGGAGATGGAGGATGAGGACA
GTGAAGGCCCAGGGAGTGGAGAGAGTCGCCTACAGCATTCACCCAGCCAGTCCTACCTCTGTATCCCA
TTCCCTCGTGGAGAGCCCACCCCAGTCAACTCGGCCACGAGTACCCCTCAGCTGACGCCAACCAACAG
CCTCAAGCGGGGCGGTGCCCACCACCGCCGCTGCGAGGTGGCTCTGCTCGGCTGTGGGGCTGTTCTGG
CAGCCACAGGCCTAGGGTTTGACTTGCTGGAAGCTGGCAAGTGCCAGCTGCTTCCCCTGGAGGAGCCT
GAGCCACCAGCCCGGGAGGAGAAGAAAAGACGGGAGGGTCTTTTTCAGAGGTCCAGCCGTCCTCGTCG
GAGCACCAGCCCCCCATCCCGAAAGCTTTTCAAGAAGGAGGAGCCCATGCTGTTGCTAGGAGACCCCT
CTGCCTCCCTGACGCTGCTCTCCCTCTCCTCCATCTCCGAGTGCAACTCCACACGCTCCCTGCTGCAG
TCCGACAGCGATGAAATTGTCGTGTATGAGATGCCAGTCAGCCCAGTCGAGGCCCCTCCCCTGAGTCC
ATGTACCCACAACCCCCTGGTCAATGTCCGAGTAGAGCGCTTCAAACGAGATCCTAACCAATCTCTGA
CTCCCACCCATGTCACCCTCACCACCCCCTCGCAGCCCAGCAGTCACCGGCGGACTCCTTCTGATGGG
GCCCTTAAGCCAGAGACTCTCCTAGCCAGCAGGAGCCCCAGTCCCAGCCGAGACCCAGGTGAATTCCC
CCGTCTCCCTGACCCCAATGTGGTCTTCCCCCCAACCCCAAGGCGCTGGAACACTCAGCAGGACTCTA
CCTTGGAGAGACCCAAGACTCTGGAGTTTCTGCCTCGGCCGCGTCCTTCTGCCAACCGGCAACGGCTG
GACCCTTGGTGGTTTGTGTCCCCCAGCCATGCCCGCAGCACCTCCCCAGCCAACAGCTCCAGCACAGA
GACGCCCGGGCCGCTGCCCCCGACTGAGCGGACGCTCCTGGACCTGGATGCAGAGGGGCAGAGTCAGG
ACAGCACCGTGCCGCTGTGCAGAGCGGAACTGAACACACACAGGCCTGCCCCTTATGAGATCCAGCAG
GAGTTCTGGTCTTAGCACGAAAAGGATTGGGG

NOV51a, CG56071-01

| | | | |
|---|---|---|---|
| Protein Sequence | SEQ ID NO: 784 | 1024 aa | MW at 113682.1kD |

MEPSRALLGCLASAAAAAPPGEDGAGAGAEEEEEEEEEAAAAVGPGELGCDAPLPYWTAVFEYEAAGE
DELTLRLGDVVEVLSKDSQVSGDEGWWTGQLNQRVGIFPSNYVTPRSAFSSRCQPGGEIDFAELTLEE
IIGIGGFGKVYRAFWIGDEVAVKAARHDPDEDISQTIENVRQEAKLFAMLKHPNIIALRGVCLKEPNL
CLVMEFARGGPLNRVLSGKRIPPDILVNWAVQIARGMNYLHDEAIVPIIHRDLKSSNVLILQKVENGD
LSNKILKITDFGLAREWHRTTKMSAAGTYAWMAPEVIRASMFSKGSDVWSYGVLLWELLTGEVPFRGI
DGLAVAYGVANNKLALPIPSTCPEPFAKLMEDCWNPDPHSRPSFTNILDQLTTIEESGFFEMPKDSFH
CLQDNWKHEIQEMFDQLRAKEKELRTWEEELTRAALQQKNQEELLRRREQELAEREIDILERELNIII
HQLCQEKPRVKKRKGKFRKSRLKLKDGNRISLPSGFQHKFTVQASPTMDKRKSLINSRSSPPASPTII
PRLRAIQCETVSQISWGQNTQGMLSESSKTWGRSSVVPKEEGEEEEKRAPKKKGRTWGPGTLGQKELA
SGDELKSLVDGYKQWSSSAPNLVKGPRSTPALPGFTSLMEMEDEDSEGPGSGESRLQHSPSQSYLCIP
FPRGEPTPVNSATSTPQLTPTNSLKRGGAHHRRCEVALLGCGAVLAATGLGFDLLEAGKCQLLPLEEP
EPPAREEKKRREGLFQRSSRPRRSTSPPSRKLFKKEEPMLLLGDPSASLTLLSLSSISECNSTRSLLQ
SDSDEIVVYEMPVSPVEAPPLSPCTHNPLVNVRVERFKRDPNQSLTPTHVTLTTPSQPSSHRRTPSDG
ALKPETLLASRSPSPSRDPGEFPRLPDPNVVFPPTPRRWNTQQDSTLERPKTLEFLPRPRPSANRQRL
DPWWFVSPSHARSTSPANSSSTETPGPLPPTERTLLDLDAEGOSQDSTVPLCRAELNTHRPAPYEIQQ
EFWS

| | | |
|---|---|---|
| NOV51b, 274082270 | SEQ ID NO: 785 | 807 bp |

| | | |
|---|---|---|
| DNA Sequence | ORF Start: at 1 | ORF Stop: end of sequence |

ACCGGATCCCTCACCTTGGAAGAGATTATTGGCATCGGGGGCTTTGGGAAGGTCTATCGTGCTTTCTG
GATAGGGGATGAGGTTGCTGTGAAAGCAGCTCGCCACGACCCTGATGAGGACATCAGCCAGACCATAG
AGAATGTTCGCCAAGAGGCCAAGCTCTTCGCCATGCTGAAGCACCCCAACATCATTGCCCTAAGAGGG
GTATGTCTGAAGGAGCCCAACCTCTGCTTGGTCATGGAGTTTGCTCGTGGAGGACCTTTGAATAGAGT
GTTATCTGGGAAAAGGATTCCCCCAGACATCCTGGTGAATTGGGCTGTGCAGATTGCCAGAGGGATGA
ACTACTTACATGATGAGGCAATTGTTCCCATCATCCACCGCGACCTTAAGTCCAGCAACATATTGATC
CTCCAGAAGGTGGAGAATGGAGACCTGAGCAACAAGATTCTGAAGATCACTGATTTTGGCCTGGCTCG
GGAATGGCACCGAACCACCAAGATGAGTGCGGCAGGGACGTATGCTTGGATGGCACCCGAAGTCATCC
GGGCCTCCATGTTTTCCAAAGGCAGTGATGTGTGGAGCTATGGGGTGCTACTTTGGGAGTTGCTGACT
GGTGAGGTGCCCTTTCGAGGCATTGATGGCTTAGCAGTCGCTTATGGAGTGGCCATGAACAAACTCGC
CCTTCCTATTCCTTCTACGTGCCCAGAACCTTTTGCCAAACTCATGGAAGACTGCTGGAATCCTGATC
CCCACTCACGACCATCTTTCACGAATATCCTGGACCAGCTAACCACCTACTCGAGGGC

NOV51b, 274082270

| | | | |
|---|---|---|---|
| Protein Sequence | SEQ ID NO: 786 | 269 aa | MW at 29861.3kD |

TGSLTLEEIIGIGGFGKVYRAFWIGDEVAVKAARHDPDEDISQTIENVRQEAKLFAMLKHPNIIALRG
VCLKEPNLCLVMEFARGGPLNRVLSGKRIPPDILVNWAVQIARGMNYLHDEAIVPIIHRDLKSSNILI
LQKVENGDLSNKILKITDFGLAREWHRTTKMSAAGTYAWMAPEVIRASMFSKGSDVWSYGVLLWELLT
GEVPFRGIDGLAVAYGVAMNKLALPIPSTCPEPFAKLMEDCWNPDPHSRPSFTNILDQLTTILEG

| | |
|---|---|
| SEQ ID NO: 787 | 3092 bp |

| | | |
|---|---|---|
| NOV51c, SNP13376041 of | ORF Start: ATG at 1 | ORF Stop: TAG at 3073 |

| | | |
|---|---|---|
| CG56071-01, DNA Sequence | SNP Pos: 2712 | SNP Change: T to C |

ATGGAGCCCTCCAGAGCGCTTCTCGGCTGCCTAGCGAGCGCCGCCGCTGCCGCCCCGCCGGAAGAGGA
TGGAGCAGGGGCCGGGGCCGAGGAGGAGGAGGAGGAGGAGGAGGAGGCGGCGGCGGCGGTGGGCCCCG
GGGAGCTGGGCTGCGACGCGCCGCTGCCCTACTGGACGGCCGTGTTCGAGTACGAGGCGGCGGGCGAG
GACGAGCTGACCCTGCGGCTGGGCGACGTGGTGGAGGTGCTGTCCAAGGACTCGCAGGTGTCCGGCGA
CGAGGGCTGGTGGACCGGGCAGCTGAACCAGCGGGTGGGCATCTTCCCCAGCAACTACGTGACCCCGC
GCAGCGCCTTCTCCAGCCGCTGCCAGCCCGGCGGCGAAATTGATTTTGCGGAGCTCACCTTGGAAGAG
ATTATTGGCATCGGGGGCTTTGGGAAGGTCTATCGTGCTTTCTGGATAGGGGATGAGGTTGCTGTGAA
AGCAGCTCGCCACGACCCTGATGAGGACATCAGCCAGACCATAGAGAATGTTCGCCAAGAGGCCAAGC
TCTTCGCCATGCTGAAGCACCCCAACATCATTGCCCTAAGAGGGGTATGTCTGAAGGAGCCCAACCTC
TGCTTGGTCATGGAGTTTGCTCGTGGAGGACCTTTGAATAGAGTGTTATCTGGGAAAAGGATTCCCCC
AGACATCCTGGTGAATTGGGCTGTGCAGATTGCCAGAGGGATGAACTACTTACATGATGAGGCAATTG
TTCCCATCATCCACCGCGACCTTAAGTCCAGCAACGTATTGATCCTCCAGAAGGTGGAGAATGGAGAC
CTGAGCAACAAGATTCTGAAGATCACTGATTTTGGCCTGGCTCGGGAATGGCACCGAACCACCAAGAT
GAGTGCGGCAGGGACGTATGCTTGGATGGCACCCGAAGTCATCCGGGCCTCCATGTTTTCCAAAGGCA
GTGATGTGTGGAGCTATGGGGTGCTACTTTGGGAGTTGCTGACTGGTGAGGTGCCCTTTCGAGGCATT
GATGGCTTAGCAGTCGCTTATGGAGTGGCCATGAACAAACTCGCCCTTCCTATTCCTTCTACGTGCCC
AGAACCTTTTGCCAAACTCATGGAAGACTGCTGGAATCCTGATCCCCACTCACGACCATCTTTCACGA
ATATCCTGGACCAGCTAACCACCATAGAGGAGTCTGGTTTCTTTGAAATGCCCAAGGACTCCTTCCAC
TGCCTGCAGGACAACTGGAAACACGAGATTCAGGAGATGTTTGACCAACTCAGGGCCAAAGAAAAGGA
ACTTCGCACCTGGGAGGAGGAGCTGACGCGGGCTGCACTGCAGCAGAAGAACCAGGAGGAACTGCTGC
GGCGTCGGGAGCAGGAGCTGGCCGAGCGGGAGATTGACATCCTGGAACGGGAGCTCAACATCATCATC
CACCAGCTGTGCCAGGAGAAGCCCCGGGTGAAGAAACGCAAGGGCAAGTTCAGGAAGAGCCGGCTGAA
GCTCAAGGATGGCAACCGCATCAGCCTCCCTTCTGGTTTCCAGCACAAGTTCACGGTGCAGGCCTCCC
CTACCATGGATAAAAGGAAGAGTCTTATCAACAGCCGCTCCAGTCCTCCTGCAAGCCCCACCATCATT
CCTCGCCTTCGAGCCATCCAGTGTGAGACTGTTTCCCAAATTAGCTGGGGCCAGAACACACAGGGGCA
CCTGTCCGAAAGCAGCAAAACCTGGGGCAGGAGCTCAGTCGTCCCAAAGGAGGAAGGGGAGGAGGAGG
AGAAGAGGGCCCCAAAGAAGAAGGGACGGACGTGGGGGCCAGGGACGCTTGGTCAGAAGGAGCTTGCC
TCGGGAGATGAACTCAAGTCCCTGGTAGATGGATATAAGCAGTGGTCGTCCAGTGCCCCCAACCTGGT
GAAGGGCCCAAGGAGTACCCCGGCCCTGCCAGGGTTCACCAGCCTTATGGAGATGGAGGATGAGGACA
GTGAAGGCCCAGGGAGTGGAGAGAGTCGCCTACAGCATTCACCCAGCCAGTCCTACCTCTGTATCCCA
TTCCCTCGTGGAGAGCCCACCCCAGTCAACTCGGCCACGAGTACCCCTCAGCTGACGCCAACCAACAG
CCTCAAGCGGGGCGGTGCCCACCACCGCCGCTGCGAGGTGGCTCTGCTCGGCTGTGGGGCTGTTCTGG
CAGCCACAGGCCTAGGGTTTGACTTGCTGGAAGCTGGCAAGTGCCAGCTGCTTCCCCTGGAGGAGCCT
GAGCCACCAGCCCGGGAGGAGAAGAAAAGACGGGAGGGTCTTTTTCAGAGGTCCAGCCGTCCTCGTCG
GAGCACCAGCCCCCCATCCCGAAAGCTTTTCAAGAAGGAGGAGCCCATGCTGTTGCTAGGAGACCCCT
CTGCCTCCCTGACGCTGCTCTCCCTCTCCTCCATCTCCGAGTGCAACTCCACACGCTCCCTGCTGCAG
TCCGACAGCGATGAAATTGTCGTGTATGAGATGCCAGTCAGCCCAGTCGAGGCCCCTCCCCTGAGTCC
ATGTACCCACAACCCCCTGGTCAATGTCCGAGTAGAGCGCTTCAAACGAGATCCTAACCAATCTCTGA
CTCCCACCCATGTCACCCTCACCACCCCCTCGCAGCCCAGCAGTCACCGGCGGACTCCTGCTGATGGG
GCCCTTAAGCCAGAGACTCTCCTAGCCAGCAGGAGCCCCAGTCCCAGCCGAGACCCAGGCGAATTCCC
CCGTCTCCCTGACCCCAATGTGGTCTTCCCCCCAACCCCAAGGCGCTGGAACACTCAGCAGGACTCTA
CCTTGGAGAGACCCAAGACTCTGGAGTTTCTGCCTCGGCCGCGTCCTTCTGCCAACCGGCAACGGCTG
GACCCTTGGTGGTTTGTGTCCCCCAGCCATGCCCGCAGCACCTCCCCAGCCAACAGCTCCAGCACAGA
GACGCCCGGGCCGCTGCCCCCGACTGAGCGGACGCTCCTGGACCTGGATGCAGAGGGGCAGAGTCAGG
ACAGCACCGTGCCGCTGTGCAGAGCGGAACTGAACACACACAGGCCTGCCCCTTATGAGATCCAGCAG
GAGTTCTGGTCTTAGCACGAAAAGGATTGGGG

| | | |
|---|---|---|
| NOV51c, SNP13376041 of | SEQ ID NO: 788 | MW at 113682.1kD |

| | | | |
|---|---|---|---|
| CG56071-01, Protein Sequence | SNP Pos: 904 | 1024 aa | SNP Change: Gly to Gly |

MEPSRALLGCLASAAAAAPPGEDGAGAGAEEEEEEEEEAAAAVGPGELGCDAPLPYWTAVFEYEAAGE
DELTLRLGDVVEVLSKDSQVSGDEGWWTGQLNQRVGIFPSNYVTPRSAFSSRCQPGGEIDFAELTLEE
IIGIGGFGKVYRAFWIGDEVAVKAARHDPDEDISQTIENVRQEAKLFAMLKHPNIIALRGVCLKEPNL
CLVMEFARGGPLNRVLSGKRIPPDILVNWAVQIARGMNYLHDEAIVPIIHRDLKSSNVLILQKVENGD
LSNKILKITDFGLAREWHRTTKMSAAGTYAWMAPEVIRASMFSKGSDVWSYGVLLWELLTGEVPFRGI
DGLAVAYGVANNKLALPIPSTCPEPFAKLMEDCWNPDPHSRPSFTNILDQLTTIEESGFFEMPKDSFH
CLQDNWKHEIQEMFDQLRAKEKELRTWEEELTRAALQOKNQEELLRRREQELAEREIDILERELNIII
HQLCQEKPRVKKRKGKFRKSRLKLKDGNRISLPSGFQHKFTVQASPTMDKRKSLINSRSSPPASPTII
PRLRAIQCETVSQISWGQNTQGHLSESSKTWGRSSVVPKEEGEEEEKRAPKKKGRTWGPGTLGQKELA
SGDELKSLVDGYKQWSSSAPNLVKGPRSTPALPGFTSLMEMEDEDSEGPGSGESRLQHSPSQSYLCIP
FPRGEPTPVNSATSTPQLTPTNSLKRGGAHHRRCEVALLGCGAVLAATGLGFDLLEAGKCQLLPLEEP
EPPAREEKKRREGLFQRSSRPRRSTSPPSRKLFKKEEPMLLLGDPSASLTLLSLSSISECNSTRSLLQ
SDSDEIVVYEMPVSPVEAPPLSPCTHNPLVNVRVERFKRDPNQSLTPTHVTLTTPSQPSSHRRTPSDG
ALKPETLLASRSPSPSRDPGEFPRLPDPNVVFPPTPRRWNTQQDSTLERPKTLEFLPRPRPSANRQRL
DPWWFVSPSHARSTSPANSSSTETPGPLPPTERTLLDLDAEGQSQDSTVPLCRAELNTHRPAPYEIQQ
EFWS

[0644] A ClustalW comparison of the above protein sequences yields the following sequence alignment shown in Table 51B.

TABLE 51B
Comparison of the NOV51 protein sequences.

| | |
|---|---|
| NOV51a | MEPSRALLGCLASAAAAAPPGEDGAGAGAEEEEEEEEEAAAAVGPGELGCDAPLPYWTAV |
| NOV51b | ------------------------------------------------------------ |
| NOV51a | FEYEAAGEDELTLRLGDVVEVLSKDSQVSGDEGWWTGQLNQRVGIFPSNYVTPRSAFSSR |
| NOV51b | ------------------------------------------------------------ |
| NOV51a | CQPGGEIDFAELTLEEIIGIGGFGKVYRAFWIGDEVAVKAARHDPDEDISQTIENVRQEA |
| NOV51b | --------TGSLTLEEIIGIGGFGKVYRAFWIGDEVAVKAARHDPDEDISQTIENVRQEA |
| NOV51a | KLFANLKHPNIIALRGVCLKEPNLCLVMEFARGGPLNRVLSGKRIPPDILVNWAVQIARG |
| NOV51b | KLFANLKHPNIIALRGVCLKEPNLCLVMEFARGGPLNRVLSGKRIPPDILVNWAVQIARG |
| NOV51a | MNYLHDEAIVPIIHRDLKSSNVLILQKVENGDLSNKILKITDFGLAREWHRTTKMSAAGT |
| NOV51b | MNYLHDEAIVPIIHRDLKSSNILILQKVENGDLSNKILKITDFGLAREWHRTTKMSAAGT |
| NOV51a | YAWMAPEVIRASMFSKGSDVWSYGVLLWELLTGEVPFRGIDGLAVAYGVAMNKLALPIPS |
| NOV51b | YAWMAPEVIRASMFSKGSDVWSYGVLLWELLTGEVPFRGIDGLaVAYGVAMNKLALPIPS |
| NOV51a | TCPEPFAKLMEDCWNPDPHSRPSFTNILDQLTTIEESGFFEMPKDSFHCLQDNWKHEIQE |
| NOV51b | TCPEPFAKLMEDCWNPDPHSRPSFTNILDQLTTILEG----------------------- |
| NOV51a | MFDQLRAKEKELRTWEEELTRAALQQKNQEELLRRREQELAEREIDILERELNIIIHQLC |
| NOV51b | ------------------------------------------------------------ |
| NOV51a | QEKPRVKKRKGKFRKSRLKLKDGNRISLPSGFQHKFTVQASPTMDKRKSLINSRSSPPAS |
| NOV51b | ------------------------------------------------------------ |
| NOV51a | PTIIPRLRAIQCETVSQISWGQNTQGHLSESSKTWGRSSVVPKEEGEEEEKRAPKKKGRT |
| NOV51b | ------------------------------------------------------------ |
| NOV51a | WGPGTLGQKELASGDELKSLVDGYKQWSSSAPNLVKGPRSTPALPGFTSLMEMEDEDSEG |
| NOV51b | ------------------------------------------------------------ |
| NOV51a | PGSGESRLQHSPSQSYLCIPFPRGEPTPVNSATSTPQLTPTNSLKRGGAHHRRCEVALLG |
| NOV51b | ------------------------------------------------------------ |
| NOV51a | CGAVLAATGLGFDLLEAGKCQLLPLEEPEPPAREEKKRREGLFQRSSRPRRSTSPPSRKL |
| NOV51b | ------------------------------------------------------------ |
| NOV51a | FKKEEPMLLLGDPSASLTLLSLSSISECNSTRSLLQSDSDEIVVYEMPVSPVEAPPLSPC |
| NOV51b | ------------------------------------------------------------ |
| NOV51a | THNPLVNRVERFKRDPNQSLTPTHVTLTTPSQPSSHRRTPSDGALKPETLLASSRSPSPS |
| NOV51b | ------------------------------------------------------------ |
| NOV51a | RDPGEFPRLPDPNVVFPPTPRRWNTQQDSTLERPKTLEFLPRPRPSANRQRLDPWWFVSP |
| NOV51b | ------------------------------------------------------------ |
| NOV51a | SHARSTSPANSSSTETPGPLPPTERTLLDLDAEGQSQDSTVPLCRAELNTHRPAPYEIQQ |
| NOV51b | ------------------------------------------------------------ |
| NOV51a | EFWS |
| NOV51b | ---- |
| NOV51a | (SEQ ID NO: 784) |
| NOV51b | (SEQ ID NO: 786) |

[0645] Further analysis of the NOV51a protein yielded the following properties shown in Table 51C.

TABLE 51C
Protein Sequence Properties NOV51a

| | |
|---|---|
| SignalP analysis: | Cleavage site between residues 18 and 19 |

PSORT II analysis:

| | |
|---|---|
| PSG: | a new signal peptide prediction method |
| | N-region: length 5; pos.chg 1; neg.chg 1 |
| | H-region: length 16; peak value 7.95 |
| | PSG score: 3.55 |
| GvH: | von.Heijne's method for signal seq. recognition |
| | GvH score (threshold: −2.1): 0.45 |
| | possible cleavage site: between 17 and 18 |

>>> Seems to have a cleavable signal peptide (1 to 17)

| | |
|---|---|
| ALOM: | Klein et al's method for TM region allocation |
| | Init position for calculation: 18 |
| | Tentative number of TMS(s) for the threshold 0.5: 1 |
| | Number of TMS(s) for threshold 0.5: 1 |
| | INTEGRAL Likelihood = −3.66 Transmembrane 716 - 732 |
| | PERIPHERAL Likelihood = 2.44 (at 342) |
| | ALOM score: −3.66 (number of TMSs: 1) |
| MTOP: | Prediction of membrane topology (Hartmann et al.) |
| | Center position for calculation: 8 |
| | Charge difference: −10.0 C(−9.0) - N( 1.0) |
| | N >= C: N-terminal side will be inside |

>>>membrane topology: type 1a (cytoplasmic tail 733 to 1024)
MITDISC: discrimination of mitochondrial targeting seq

| | | | |
|---|---|---|---|
| R content: | 1 | Hyd Moment (75): | 4.60 |
| Hyd Moment (95): | 9.12 | G content: | 2 |
| D/E content: | 2 | S/T content: | 2 |
| Score: −6.34 | | | |

Gavel: prediction of cleavage sites for mitochondrial preseq

R-2 motif at 15 SRA|LL

NUCDISC: discrimination of nuclear localization signals

pat4: KKRK (5) at 487
pat4: PKKK (4) at 594
pat4: KKRR (5) at 756
pat4: RPRR (4) at 768
pat7: PRVKKRK (5) at 484
pat7: PTMDKRK (3) at 522
pat7: PKKKGRT (5) at 594
bipartite: KKRREGLFQRSSRPRRS at 756
content of basic residues: 12.1%
NLS Score: 2.27

KDEL: ER retention motif in the C-terminus: none
ER Membrane Retention Signals:

XXRR-like motif in the N-terminus: EPSR

none
SKL: peroxisomal targeting signal in the C-terminus: none
PTS2: 2nd peroxisomal targeting signal: none
VAC: possible vacuolar targeting motif: none
RNA-binding motif: none
Actinin-type actin-binding motif:

type 1: none
type 2: none

NMYR: N-myristoylation pattern: none
Prenylation motif: none
memYQRL: transport motif from cell surface to Golgi: none
Tyrosines in the tail: too long tail
Dileucine motif in the tail: found

LL at 734
LL at 742
LL at 788
LL at 789
LL at 799
LL at 814
LL at 891

checking 63 PROSITE DNA binding motifs: none
checking 71 PROSITE ribosomal protein motifs: none
checking 33 PROSITE prokaryotic DNA binding motifs: none
NNCN: Reinhardt≡s method for Cytoplasmic/Nuclear discrimination

Prediction: nuclear
Reliability: 89

```
COIL: Lupas's algorithm to detect coiled-coil regions
  409 L 0.51
  410 Q 0.87
  411 D 0.99
  412 N 0.99
  413 W 0.99
  414 K 1.00
  415 H 1.00
  416 E 1.00
  417 I 1.00
  418 Q 1.00
  419 E 1.00
  420 M 1.00
  421 F 1.00
  422 D 1.00
  423 Q 1.00
  424 L 1.00
  425 R 1.00
  426 A 1.00
  427 K 1.00
  428 E 1.00
  429 K 1.00
  430 E 1.00
  431 L 1.00
  432 R 1.00
  433 T 1.00
  434 W 1.00
  435 E 1.00
  436 E 1.00
  437 E 1.00
  438 L 1.00
  439 T 1.00
  440 R 1.00
  441 A 1.00
  442 A 0.97
  443 L 0.97
  444 0 0.96
  445 Q 0.96
  446 K 0.96
  447 N 0.96
  448 0 0.96
  449 E 0.96
  450 E 0.96
  451 L 0.81
  452 L 0.81
  453 R 0.81
  454 R 0.81
  455 R 0.71
  456 E 0.71
  457 0 0.71
  458 E 0.71
  459 L 0.71
  460 A 0.71
  461 E 0.71
  462 R 0.64
  463 E 0.64
  464 I 0.64
  465 D 0.64
  466 I 0.64
  467 L 0.64
  468 E 0.64
  469 R 0.64
  470 E 0.64
  471 L 0.64
  472 N 0.64
  473 I 0.64
  474 I 0.64
  475 I 0.64
  476 H 0.64
  477 0 0.64
  478 L 0.64
  479 C 0.64
  480 Q 0.64
  481 E 0.64
  482 K 0.64
```

total: 74 residues

--------------------------
Final Results (k = 9/23):

44.4%: extracellular, including cell wall
22.2%: Golgi
22.2%: endoplasmic reticulum
11.1%: plasma membrane

>> prediction for CG56071-01 is exc (k = 9)

[0646] A search of the NOV51a protein against the Geneseq database, a proprietary database that contains sequences published in patents and patent publication, yielded several homologous proteins shown in Table 51D.

TABLE 51a
Geneseq Results for NOV51a

| | | NOV51a | Identities/ | |
|---|---|---|---|---|
| | | Residues/ | Similarities for | |
| Geneseq | Protein/Organism/Length | Match | the Matched | Expect |
| Identifier | [Patent #, Date] | Residues | Region | Value |
| ABB98408 | Human NOV7, a mixed lineage | 1..1024 | 1024/1024 (100%) | 0.0 |
| | kinase 2-like protein - Homo | 1..1024 | 1024/1024 (100%) | |
| | sapiens, 1024 aa. | | | |
| | [WO200255704-A2, 18-Jul.- | | | |
| | 2002] | | | |
| AAE21717 | Human PKIN-12 protein- | 1..1024 | 1003/1111 (90%) | 0.0 |
| | Homo sapiens, 1097 aa. | 1..1097 | 1006/1111(90%) | |
| | [WO200218557-A2, 07-Mar.- | | | |
| | 2002] | | | |
| AAE11775 | Human kinase (PKJN)-9 protein | 1..1024 | 994/1072 (92%) | 0.0 |
| | - Homo sapiens, 1046 aa. | 1..1046 | 997/1072 (92%) | |
| | [WO200181555-A2, 01-Nov.- | | | |
| | 2001] | | | |
| ABP61000 | Novel human protein. SEQ ID | 24..1024 | 540/1061 (50%) | 0.0 |
| | 87 - Homo sapiens, 1021 aa. | 19..1021 | 682/1061 (63%) | |
| | [WO200250105-A1, 27-Jun.- | | | |
| | 2002] | | | |
| ABB80923 | Novel human protein (NHP) | 24.. 1024 | 537/1076 (49%) | 0.0 |
| | kinase - Homo sapiens, 1036 aa. | 19..1036 | 684/1076 (62%) | |
| | [WO200255685-A2, 18-Jul.- | | | |
| | 2002] | | | |

[0647] In a BLAST search of public sequence databases, the NOV51a protein was found to have homology to the proteins shown in the BLASTP data in Table 51E.

TABLE 51E
Public BLASTP Results for NOV51a

| | | NOV51a | Identities/ | |
|---|---|---|---|---|
| Protein | | Residues/ | Similarities for | Ex- |
| Accession | Protein/ | Match | the Matched | pect |
| Number | /Organism/Length | Residues | Portion | Value |
| Q9H2N5 | Mixed lineage kinase | 53..1024 | 952/1080 (88%) | 0.0 |
| | MLK1 - Homo sapiens | 1..1066 | 955/1080 (88%) | |
| | (Human), 1066 aa | | | |
| | (fragment). | | | |
| Q8K2L2 | Similar to mitogen- | 341..1024 | 634/746 (84%) | 0.0 |
| | activated protein | 1..732 | 649/746 (86%) | |
| | kinase kinase 9 - | | | |
| | Mus musculus | | | |
| | (Mouse), 732 aa | | | |
| | (fragment). | | | |
| Q8BIG8 | Mixed lineage kinase | 1..616 | 572/628 (91%) | 0.0 |
| | MLKI homolog - Mus | 1..607 | 581/628 (92%) | |
| | musculus (Mouse), | | | |
| | 608 aa. | | | |
| Q02779 | Mitogen-activated | 35..1006 | 579/988 (58%) | 0.0 |
| | protein kinase | 2..950 | 699/988 (70%) | |
| | kinase kinase 10 | | | |
| | (EC 2.7.1.37) (Mixed | | | |
| | lineage kinase 2) | | | |
| | (Protein kinase | | | |
| | MST) - Homo sapiens | | | |
| | (Human), 954 aa. | | | |
| Q8WWN1 | Mixed lineage | 24..1024 | 537/1076 (49%) | 0.0 |
| | kinase 4beta - | 19..1036 | 680/1076 (62%) | |
| | Homo sapiens | | | |
| | (Human), 1036 aa. | | | |

[0648] PFam analysis indicates that the NOV51a protein contains the domains shown in the Table 51F.

TABLE 51F
Domain Analysis of NOV51a

| | | Identities/ | |
|---|---|---|---|
| | NOV51a | Similarities for | |
| Pfam Domain | Match Region | the Matched Region | Expect Value |
| SH3 | 55..114 | 26/63 (41%) | 4.7e-15 |
| | | 50/63 (79%) | |
| pkinase | 132..393 | 100/307 (33%) | 7e-95 |
| | | 216/307 (70%) | |

### Example 52

[0649] The NOV52 clone was analyzed, and the nucleotide and encoded polypeptide sequences are shown in Table 52A.

TABLE 52A

| NOV52 Sequence Analysis | | |
|---|---|---|
| NOV52a, CG56142-01 | SEQ ID NO: 789 | 866 bp |

| | | |
|---|---|---|
| DNA Sequence | ORF Start: ATG at 19 | ORF Stop: TGA at 820 |

CCCAGCCTTGAAGACAGAATGAGAGGGGTTTCCTGTCTCCAGGTCCTGCTCCTTCTGGTGCTGGCCTG
CGGGCAGCCCCGCATGTCCAGTCGGATCGTTGGGGGCCGGGATGGCCGGGACGGAGAGTGGCCGTGGC
AGGCGAGCATCCAGCATCGTGGGGCACACGTGTGCGGGGGGTCGCTCATCGCCCCCCAGTGGGTGCTG
ACAGCGGCGCACTGCTTCCCCAGGGCACTGCCAGCTGAGTACCGCGTGCGCCTGGGGGCGCTGCGTCT
GGGCTCCACCTCGCCCCGCACGCTCTCGGTGCCCGTGCGACGGGTGCCGCTGCCCCCGGACTACTCCG
AGGACGGGGCCCGCGGCGACCTGGCACTGCTGCAGCTGCGTCGCCCGGTGCCCCTGAGCGCTCGCGTC
CAACCCGTCTGCCTGCCCGTGCCCGGCGCCCGCCCGCCGCCCGGCACACCATGCCGGGTCACCGGCTG
GGGCAGCCTCCGCCCAGGAGTGCCCCTCCCAGAGTGGCGACCGCTACAAGGAGTAAGGGTGCCGCTGC
TGGACTCGCGCACCTGCGACGGCCTCTACCACGTGGGCGCGGACGTGCCCCAGGCTGAGCGCATTGTG
CTGCCTGGGAGTCTGTGTGCCGGCTACCCCCAGGGCCACAAGGACGCCTGCCAGGTGTGCACCCAGCC
TCCCCAGCCTCCGGAGTCCCCTCCCTGTGCCCAGCACCCTCCCTCCCTGAACTCCAGGACCCAGGACA
TCCCAACTCAGGCTCAGGATCCTGGCCTCCAACCTAGAGGCACCACGCCAGGGGTCTGGAACCCTGAG
AACTGAAGTCCTGGGAGGGCTGGGACTTAGGCTCCTCTTTCTCCTGCAGG

NOV52a, CG56142-01

| | | | |
|---|---|---|---|
| Protein Sequence | SEQ ID NO: 790 | 267 aa | MW at 28699.8kD |

MRGVSCLQVLLLLVLACGQPRNSSRIVGGRDGRDGEWPWQASEQHRGAHVCGGSLIAPQWVLTAAHCF
PRALPAEYRVRLGALRLGSTSPRTLSVPVRRVLLPPDYSEDGARGDLALLQLRRPVPLSARVQPVCLP
VPGARPPPGTPCRVTGWGSLRPGVPLPEWRPLQGVRVPLLDSRTCDGLYHVGADVPQAERIVLPGSLC
AGYPQGHKDACQVCTQPPQPPESPPCAQHPPSLNSRTQDIPTQAQDPGLQPRGTTPGVWNPEN

| | | |
|---|---|---|
| NOV52b, CG56142-04 | SEQ ID NO: 791 | 638 bp |

| | | |
|---|---|---|
| DNA Sequence | ORF Start: ATG at 14 | ORF Stop: TGA at 578 |

CCTTGAAGACAGAATGAGAGGGGTTTCCTGTCTCCAGGTCCTGCTCCTTCTGGTGCTGGGAGCTGCTG
GGACTCAGGGAAGGAAGTCTGCAGCCTGCGGGCAGCCCCGCATGTCCAGTCGGATCGTTGGGGGCCGG
GATGGCCGGGACGGAGAGTGGCCGTGGCAGGCGAGCATCCAGCATCGTGGGGCACACGTGTGCGGGGG
GTCGCTCATCGCCCCCCAGTGGGTGCTGACAGCGGCGCACTGCTTCCCCAGTGCCCCTCCAGAGTGGC
GACCGCTACAAGGAGTAAGGGTGCCGCTGCTGGACTCGCGCACCTGCGACGGCCTCTACCACGTGGGC
GCGGACGTGCCCCAGGCTGAGCGCATTGTGCTGCCTGGGAGTCTGTGTGCCGGCTACCCCCAGGGCCA
CAAGGACGCCTGCCAGGTGTGCACCCAGCCTCCCCAGCCTCCGGAGTCCCCTCCCTGTGCCCAGCACC
CTCCCTCCCTGAACTCCAGGACCCAGGACATCCCAACTCAGGCTCAGGATCCTGGCCTCCAACCTAGA
GGCACCACGCCAGGGGTCTGGAACCCTGAGAACTGAAGTCCTGGGAGGGCTGGGACTTAGGCTCCTCT
TTCTCCTGGAGGGTGATTCTGGGGGA

NOV52b, CG56142-04

| | | | |
|---|---|---|---|
| Protein Sequence | SEQ ID NO: 792 | 188 aa | MW at 19994.5kD |

MRGVSCLQVLLLLVLGAAGTQGRKSAACGQPRMSSRIVGGRDGRDGEWPWQASIQHRGAHVCGGSLIA
PQWVLTAAHCFPSAPPEWRPLQGVRVPLLDSRTCDGLYHVGADVPQAERIVLPGSLCAGYPQGHKDAC
QVCTQPPQPPESPPCAQHPPSLNSRTQDIPTQAQDPGLQPRGTTPGVWNPEN

| | | |
|---|---|---|
| NOV52c, 276873337 | SEQ ID NO: 793 | 1165 bp |

| | | |
|---|---|---|
| DNA Sequence | ORF Start: at 606 | ORF Stop: TGA at 948 |

CACCAAGCTTTGGGACTACGAGACGCCCAAGGTGATCGTGGTGAGGAACCGGCGCCTGGGGGTCCTGT
ACCGCGCCGTGCAGCTGCTCATCCTGCTCTACTTCGTGTGGTACGTATTCATCGTGCAGAAAAGCTAC
CAGGAGAGCGAGACGGGCCCCGAGAGCTCCATCATCACCAAGGTCAAGGGGATCACCACGTCCGAGCA
CAAAGTGTGGGACGTGGAGGAGTACGTGAAGCCCCCCGAGGGGGGCAGCGTGTTCAGCATCATCACCA
GGGTCGAGGCCACCCACTCCCAGACCCAGGGAACCTGCCCCGAGAGCATAAGGGTCCACAACGCCACC
TGCCTCTCCGACGCCGACTGCGTGGCTGGGGAGCTGGACATGCTGGGAAACGGCCTGAGGACCGGGCG
CTGTGTGCCCTATTACCAGGGGCCCTCCAAGACCTGCGAGGTGTTCGGCTGGTGCCCGGTGGAAGATG
GGGCCTCTGTCAGCGAATTTCTGGGTACGATGGCCCCAAATTTCACCATCCTCATCAAGAACAGCATC
CACTACCCCAAATTCCACTTCTCCAAGGGCAACATCGCCGACCGCACAGACGGGTACCTGAAGCGCTG
CACGTTCCACGAGGCCTCCGACCTCTACTGCCCCATCTTCAAGCTGGGCTTTATCGTGGAGAAGGCTG
GGGAGAGCTTCACAGAGCTCGCACACAAGGGTGGTGTCATCGGGGTCATTATCAACTGGGACTGTGAC
CTGGACCTGCCTGCATCGGAGTGCAACCCCAAGTACTCCTTCCGGAGGCTTGACCCCAAGCACGTGCC
TGCCTCGTCAGGCTACAACTTCAGGTTTGCCAAATACTACAAGATCAATGGCACCACCACCCGCACGC
TCATCAAGGCCTACGGGATCCACATTGACGTCATTGTGCATGGACAGGTCGGGAAGTTCAGCCTGATT
CCCACCATTATTAATCTGGCCACAGCTCTGACTTCCGTCGGGGTGGTAAGGAACCCTCTCTGGGGTCC
CAGCGGGTGCGGGGGGTCCACCAGGCCCTTACACACCGGTCTCTGCTGGCCCCAGGGCTCCTTCCTGT
GCGACTGGATCTTGCTAACATTCATGAACAAAAACAAGGTCTACAGCCATAAGAAATTTGACAAGGTG
GTCGACGGC

NOV52c, 276873337

| | | | |
|---|---|---|---|
| Protein Sequence | SEQ ID NO: 794 | 114 aa | MW at 11702.8kD |

SAARSTRPPTSTAPSSSWALSWRRLGRASQSSHTRVVSSGSLSTGTVTWTCLHRSATPSTPSGGLTPS
TCLPRQATTSGLPNTTRSMAPPPARSSRPTGSTLTSLCMDRSGSSA

| | | |
|---|---|---|
| NOV52d, 276863970 | SEQ ID NO: 795 | 1164 bp |

| | | |
|---|---|---|
| DNA Sequence | ORF Start: at 605 | ORF Stop: TGA at 947 |

CACAAGCTTTGGGACTACGAGACGCCCAAGGTGATCGTGGTGAGGAACCGGCGCCTGGGGGTCCTGTA
CCGCGCCGTGCAGCTGCTCATCCTGCTCTACTTCGTGTGGTACGTATTCATCGTGCAGAAAAGCTACC
AGGAGAGCGAGACGGGCCCCGAGAGCTCCATCATCACCAAGGTCAAGGGGATCACCACGTCCGAGCAC
AAAGTGTGGGACGTGGAGGAGTACGTGAAGCCCCCCGAGGGGGGCAGCGTGTTCAGCATCATCACAGG
GGTCGAGGCCACCCACTCCCAGACCCAGGGAACCTGCCCCGAGAGCATAAGGGTCCACAACGCCACCT
GCCTCTCCGACGCCGACTGCGTGGCTGGGGAGCTGGACATGCTGGGAAACGGCCTGAGGACCGGGCGC
TGTGTGCCCTATTACCAGGGGCCCTCCAAGACCTGCGAGGTGTTCGGCTGGTGCCCGGTGGAAGATGG
GGCCTCTGTCAGCCAATTTCTGGGTACGATGGCCCCAAATTTCACCATCCTCATCAAGAACAGCATCC
ACTACCCCAAATTCCACTTCTCCAAGGGCAACATCGCCGACCGCACAGACGGGTACCTGAAGCGCTGC
ACGTTCCACGAGGCCTCCGACCTCTACTGCCCCATCTTCAAGCTGGGCTTTATCGTGGAGAAGGCTGG
GGAGAGCTTCACAGAGCTCGCACACAAGGGTGGTGTCATCGGGGTCATTATCAACTGGGACTGTGACC
TGGACCTGCCTGCATCGGAGTGCAACCCCAAGTACTCCTTCCGGAGGCTTGACCCCAAGCACGTGCCT
GCCTCGTCAGGCTACAACTTCAGGTTTGCCAAATACTACAAGATCAATGGCACCACCACCCGCACGCT
CATCAAGGCCTACGGGATCCGCATTGACGTCATTGTGCATGGACAGGTCGGGAAGTTCAGCCTGATTC
CCACCATTATTAATCTGGCCACAGCTCTGACTTCCGTCGGGGTGGTAAGGAACCCTCTCTGGGGTCCC
AGCGGGTGCGGGGGGTCCACCAGGCCCTTACACACCGGTCTCTGCTGGCCCCAGGGCTCCTTCCTGTG
CGACTGGATCTTGCTAACATTCATGAACAAAAACAAGGTCTACAGCCATAAGAAATTTGACAAGGTGG
TCGACGGC

NOV52d, 276863970

| | | | |
|---|---|---|---|
| Protein Sequence | SEQ ID NO: 796 | 114 aa | MW at 11672.8kD |

SARSTRPPTSTAPSSSWALSWRRLGRASQSSHTRWSSGSLSTGTVTWTCLHRSATPSTPSGGLTPS
TCLPRQATTSGLPNTTRSMAPPPARSSRPTGSALTSLCMDRSGSSA

| | | |
|---|---|---|
| NOV52e, 276863992 | SEQ ID NO: 797 | 1087 bp |
| DNA Sequence | ORF Start: at 606 | ORF Stop: TGA at 948 |

CACCAAGCTTTGGGACTACGAGACGCCCAAGGTGATCGTGGTGAGGAACCGGCGCCTGGGGGTCCTGT
ACCGCGCCGTGCAGCTGCTCATCCTGCTCTACTTCGTGTGGTACGTATTCATCGTGCAGAAAAGCTAC
CAGGAGAGCGAGACGGGCCCCGAGAGCTCCATCATCACCAAGGTCAAGGGGATCACCACGTCCGAGCA
CAAAGTGTGGGACGTGGAGGAGTACGTGAAGCCCCCCGAGGGGGGCAGCGTGTTCAGCATCATCACCA
GGGTCGAGGCCACCCACTCCCAGACCCAGGGAACCTGCCCCGAGAGCATAAGGGTCCACAACGCCACC
TGCCTCTCCGACGCCGACTGCGTGGCTGGGGAGCTGGACATGCTGGGAAACGGCCTGAGGACCGGGCG
CTGTGTGCCCTATTACCAGGGGCCCTCCAAGACCTGCGAGGTGTTCGGCTGGTGCCCGGTGGAAGATG
GGGCCTCTGTCAGCCAATTTCTGGGTACGATGGCCCCAAATTTCACCATCCTCATCAAGAACAGCATC
CACTACCCCAAATTCCACTTCTCCAAGGGCAACATCGCCGACCGCACAGACGGGTACCTGAAGCGCTG
CACGTTCCACGAGGCCTCCGACCTCTACTGCCCCATCTTCAAGCTGGGCTTTATCGTGGAGAAGGCTG
GGGAGAGCTTCACAGAGCTCGCACAAGAGGGTGGTGTCATCGGGGTCATTATCAACTGGGACTGTGAC
CTGGACCTGCCTGCATCGGAGTGCAACCCCAAGTACTCCTTCCGGAGGCTTGACCCCAAGCACGTGCC
TGCCTCGTCAGGCTACAACTTCAGGTTTGCCAAATACTACAAGATCAATGGCACCACCACCCGCACGC
TCATCAAGGCCTACGGGATCCGCATTGACGTCATTGTGCATGGACAGGCCGGGAAGTTCAGCCTGATT
CCCACCATTATTAATCTGGCCACAGCTCTGACTTCCGTCGGGGTGGGCTCCTTCCTGTGCGACTGGAT
CTTGCTAACATTCATGAACAAAAACAAGGTCTACAGCCATAAGAAATTTGACAAGGTGGTCGACGGC

NOV52e, 276863992

| | | | |
|---|---|---|---|
| Protein Sequence | SEQ ID NO: 798 | 114 aa | MW at 11682.8kD |

SAARSTRPPTSTAPSSSWALSWRRLGRASQSSHTRVVSSGSLSTGTVTWTCLHRSATPSTPSGGLTPS
TCLPRQATTSGLPNTTRSMAPPPARSSRPTGSALTSLCMDRPGSSA

| | | |
|---|---|---|
| NOV52f, 2768733301 | SEQ ID NO: 799 | 1087 bp |

| | | |
|---|---|---|
| DNA Sequence | ORF Start: at 606 | ORF Stop: TGA at 948 |

CACCAAGCTTTGGGACTACGAGACGCCCAAGGTGATCGTGGTGAGGAACCGGCGCCTGGGGGTCCTGT
ACCGCGCCGTGCAGCTGCTCATCCTGCTCTACTTCGTGTGGTACGTATTCATCGTGCAGAAAAGCTAC
CAGGAGAGCGAGACGGGCCCCGAGAGCTCCATCATCACCAAGGTCAAGGGGATCACCACGTCCGAGCA
CAAAGTGTGGGACGTGGAGGAGTACGTGAAGCCCCCCGAGGGGGGCAGCGTGTTCAGCATCATCACCA
GGGTCGAGGCCACCCACTCCCAGACCCAGGGAACCTGCCCCGAGAGCATAAGGGTCCACAACGCCACC
TGCCTCTCCGACGCCGACTGCGTGGCTGGGGAGCTGGACATGCTGGGAAACGGCCTGAGGACCGGGCG
CTGTGTGCCCTATTACCAGGGGCCCTCCAAGACCTGCGAGGTGTTCGGCTGGTGCCCGGTGGAAGATG
GGGCCTCTGTCAGCCAATTTCTGGGTACGATGGCCCCAAATTTCACCATCCTCATCAAGAACAGCATC
CACTACCCCAAATTCCACTTCTCCAAGGGCAACATCGCCGACCGCACAGACGGGTACCTGAAGCGCTG
CACGTTCCACGAGGCCTCCGACCTCTACTGCCCCATCTTCAAGCTGGGCTTTATCGTGGAGAAGGCTG
GGGAGAGCTTCACAGAGCTCGCACACAAGGGTGGTGTCATCGGGGTCATTATCAACTGGGACTGTGAC
CTGGACCTGCCTGCATCGGAGTGCAACCCCAAGTACTCCTTCCGGAGGCTTGACCCCAAGCACGTGCC
TGCCTCGTCAGGCTACAACTTCAGGTTTGCCAAATACTACAAGATCAATGGCACCACCACCCGCACGC
TCATCAAGGCCTACGGGATCCGCATTGACGTCATTGTGCATGGACAGGCCGGGAAGTTCATCCTGATT
CCCACCATTATTAATCTGGCCACAGCTCTGACTTCCGTCGGGGTGGGCTCCTTCCTGTGCGACTGGAT
CTTGCTAACATTCATGAACAAAAACAAGGTCTACAGCCATAAGAAATTTGACAAGGTGGTCGACGGC

NOV52f, 276873330

| | | | |
|---|---|---|---|
| Protein Sequence | SEQ ID NO: 800 | 114 aa | MW at 11698.8kD |

SAARSTRPPTSTAPSSSWALSWRRLGRASQSSHTRVVSSGSLSTGTVTWTCLHRSATPSTPSGGLTPS
TCLPRQATTSGLPNTTRSMAPPPARSSRPTGSALTSLCMDRPGSSS

| | | |
|---|---|---|
| NOV52g, CG56142-02 | SEQ ID NO: 801 | 1020 bp |

| | | |
|---|---|---|
| DNA Sequence | ORF Start: ATG at 91 | ORF Stop: TAA at 931 |

AGGACTCTCCTCTCTTCTCCCTGCTGGCTCCAGACCAGAGTCCAAGCCCTAGGCAGTGCCACCCTTAC
CCAGCCCAGCCTTGAAGACAGAATGAGAGGGGTTTCCTGTCTCCAGGTCCTGCTCCTTCTGGTGCTGG
GAGCTGCTGGGACTCAGGGAAGGAAGTCTGCAGCCTGCGGGCAGCCCCGCATGTCCAGTCGGATCGTT
GGGGGCCGGGATGGCCGGGACGGAGAGTGGCCGTGGCAGGCGAGCATCCAGCATCGTGGGGCACACGT
GTGCGGGGGGTCGCTCATCGCCCCCCAGTGGGTGCTGACAGCGGCGCACTGCTTCCCCAGGAGGGCAC
TGCCAGCTGAGTACCGCGTGCGCCTGGGGGCGCTGCGTCTGGGCTCCACCTCGCCCCGCACGCTCTCG
GTGCCCGTGCGACGGGTGCTGCTGCCCCCGGACTACTCCGAGGACGGGGCCCGCGGCGACCTGGCACT
GCTGCAGCTGCGTCGCCCGGTGCCCCTGAGCGCTCGCGTCCAACCCGTCTGCCTGCCCGTGCCCGGCG
CCCGCCCGCCGCCCGGCACACCATGCCGGGTCACCGGCTGGGGCAGCCTCCGCCCAGGAGTGCCCCTC
CCAGAGTGGCGACCGCTACAAGGAGTAAGGGTGCCGCTGCTGGACTCGCGCACCTGCGACGGCCTCTA
CCACGTGGGCGCGGACGTGCCCCAGGCTGAGCGCATTGTGCTGCCTGGGAGTCTGTGTGCCGGCTACC
CCCAGGGCCACAAGGACGCCTGCCAGGGTGATTCTGGGGGACCTCTGACCTGCCTGCAGTCTGGGAGC
TGGGTCCTGGTGGGCGTGGTGAGCTGGGGCAAGGGTTGTGCCCTGCCCAACCGTCCAGGGGTCTACAC
CAGTGTGGCCACATATAGCCCCTGGATTCAGGCTCGCGTCAGCTTCTAATGCTAGCCGGTGAGGCTGA
CCTGGAGCCAGCTGCTGGGGTCCCTCAGCCTCCTGGTTCATCCAGGCACCTGCCTATACCCCACATCC

NOV52g, CG56142-02

| | | | |
|---|---|---|---|
| Protein Sequence | SEQ ID NO: 802 | 280 aa | MW at 29786.2kD |

MRGVSCLQVLLLLVLGAAGTQGRKSAACGQPRMSSRIVGGRDGRDGEWPWQASIQHRGAHVCGGSLIA
PQWVLTAAHCFPRRALPAEYRVRLGALRLGSTSPRTLSVPVRRVLLPPDYSEDGARGDLALLQLRRPV
PLSARVQPVCLPVPGARPPPGTPCRVTGWGSLRPGVPLPEWRPLQGVRVPLLDSRTCDGLYHVGADVP
QAERIVLPGSLCAGYPQGHKDACQGDSGGPLTCLQSGSWVLVGVVSWGKGCALPNRPGVYTSVATYSP
WIQARVSF

| | | |
|---|---|---|
| NOV52h, CG56142-03 | SEQ ID NO: 803 | 1606 bp |

| | | |
|---|---|---|
| DNA Sequence | ORF Start: ATG at 69 | ORF Stop: TGA at 921 |

CCACGCGTCCGACCAGAGTCCAAGCCCTAGGCAGTGCCACCCTTACCCAGCCCAGCCTTGAAGACAGA
ATGAGAGGGGTTTCCTGTCTCCAGGTCCTGCTCCTTCTGGTGCTGGGAGCTGCTGGGACTCAGGGAAG
GAAGTCTGCAGCCTGCGGGCAGCCCCGCATGTCCAGTCGGATCGTTGGGGGCCGGGATGGCCGGGACG
GAGAGTGGCCGTGGCAGGCGAGCATCCAGCATCCTGGGGCACACGTGTGCGGGGGGTCGCTCATCGCC
CCCCAGTGGGTGCTGACAGCGGCGCACTGCTTCCCCAGGAGGGCACTGCCAGCTGAGTACCGCGTGCG
CCTGGGGGCGCTGCGTCTGGGCTCCACCTCGCCCCGCACGCTCTCGGTGCCCGTGCGACGGGTGCTGC
TGCCCCCGGACTACTCCGAGGACGGGGCCCGCGGCGACCTGGCACTGCTGCAGCTGCGTCGCCCGGTG
CCCCTGAGCGCTCGCGTCCAACCCGTCTGCCTGCCCGTGCCCGGCGCCCGCCCGCCGCCCGGCACACC
ATGCCGGGTCACCGGCTGGGGCAGCCTCCGCCCAGGAGTGCCCCTCCCAGAGTGGCGACCGCTACAAG
GAGTAAGGGTGCCGCTGCTGGACTCGCGCACCTGCGACGGCCTCTACCACGTGGGCGCGGACGTGCCC
CAGGCTGAGCGCATTGTGCTGCCTGGGAGTCTGTGTGCCGGCTACCCCCAGGGCCACAAGGACGCCTG
CCAGGGTGATTCTGGGGGACCTCTGACCTGCCTGCAGTCTGGGAGCTGGGTCCTGGTGGGCGTGGTGA
GCTGGGGCAAGGGTTGTGCCCTGCCCAACCGTCCAGGGGTCTACACCAGTGTGGCCACATATAGCCCC
TGGATTCAGGCTCGCGTCACTTCTAATGCTAGCCGGTGAGGCTGACCTGGAGCCAGCTGCTGGGGTCC
CTCAGCCTCCTGGTTCATCCAGGCACCTGCCTATACCCCACATCCCTTCTGCCTCGAGGCCAAGATGC
CTAAAAAAGCTAAAGGCCACCCCACCCCCCACCCACCACCTTCTGGCTCCTCTCCTCTTTGGGGATCA
CCAGCTCTGACTCCACCAACCCTCATCCAGGAATCTGCCATGAGTCCCAGGGAGTCACACTCCCCACT
CCCTTCCTGGCTTGTATTTACTTTTCTTGGCCCTGGCCAGGGCTGGGCGCAAGGCACGCAGTGATGGG
CAAACGAATTGCTGCCCATCTGGCCTGTGTGCCCATCTTTTTCTGGAGAAAGTCAGATTCACAGCATG
ACAGAGATTTGACACCAGGGAGATCCTCCATAGCTGGCTTTGAGGACACGGGGACCACAGCCATGAGC
GGCCTCTAAGAGCTGAGAGACAGCCGGCAGGGAATCGGAACCCTCAGACCCACAGCCGCAAGGCACTG
GATTCTGGCAGCACCCTGAAGGAGCTGGGAAGTAAGTTCTTCCCCAGCCTCCAGATAAGAGCCCCGCC
GGCCAATCCCTTCATTTCAACCTAAAGAGACCCTAAGCAGAGAACCTAGCTGAGCCACTCCTGACCTA
CAAAGTTGTGACTTAATAAATGTGTGCTTTAAGCTGCCAAAA

NOV52h, CG56142-03

| | | | |
|---|---|---|---|
| Protein Sequence | SEQ ID NO: 804 | 284 aa | MW at 30109.5kD |

MRGVSCLQVLLLLVLGAAGTQGRKSAACGQPRMSSRIVGGRDGRDGEWPWQASIQHPGAHVCGGSLIA
PQWVLTAAHCFPRRALPAEYRVRLGALRLGSTSPRTLSVPVRRVLLPPDYSEDGARGDLALLQLRRPV
PLSARVQPVCLPVPGARPPPGTPCRVTGWGSLRPGVPLPEWRPLQGVRVPLLDSRTCDGLYHVGADVP
QAERIVLPGSLCAGYPQGHKDACQGDSGGPLTCLQSGSWVLVGVVSWGKGCALPNRPGVYTSVATYSP
WIQARVTSNASR

| | | |
|---|---|---|
| NOV52i, CG56142-05 | SEQ ID NO: 805 | 762 bp |

| | | |
|---|---|---|
| DNA Sequence | ORF Start: at 7 | ORF Stop: at 757 |

AGATCTCAGCCCCGCATGTCCAGTCGGATCGTTGGGGGCCGGGATGGCCGGGACGGAGAGTGGCCGTG
GCAGGCGAGCATCCAGCATCGTGGGGCACACGTGTGCGGGGGGTCGCTCATCGCCCCCCAGTGGGTGC
TGACAGCGGCGCACTGCTTCCCCAGGAGGGCACTGCCAGCTGAGTACCGCGTGCGCCTGGGGGCGCTG
CGTCTGGGCTCCACCTCGCCCCGCACGCTCTCGGTGCCCGTGCGACGGGTGCTGCTGCCCCCGGACTA
CTCCGAGGACGGGGCCCGCGGCGACCTGGCACTGCTGCAGCTGCGTCGCCCGGTGCCCCTGAGCGCTC
GCGTCCAACCCGTCTGCCTGCCCGTGCCCGCCGCCCGCCCGCCGCCCGGCACACCATGCCGGGTCACC
GGCTGGGGCAGCCTCCGCCCAGGAGTGCCCCTCCCAGAGGGGCGACCGCTACAAGGAGTAAGGGTGCC
GCTGCTGGACTCGCGCACCTGCGACGGCCTCTACCACGTGGGCGCGGACGTGCCCCAGGCTGAGCGCA
TTGTGCTGCCTGGGAGTCTGTGTGCCGGCTACCCCCAGGTCCACAAGGACGCCTGCCAGGTGTGCACC
CAGCCTCCCCAGCCTCCGGAGTCCCCTCCCTGTGCCCAGCTCCCTCCCTCCCTGAACTCCAGGACCCA
GGACATCCCAACTCAGGCTCAGGATCCTGGCCTCCAACCTAGAGGCACCACGCCAGGGGTCTGGAACC
CTGAGAACCTCGAG

NOV52i, CG56142-05

| | | | |
|---|---|---|---|
| Protein Sequence | SEQ ID NO: 806 | 250 aa | MW at 26888.5kD |

QPRMSSRIVGGRDGRDGEWPWQASIQHRGAHVCGGSLIAPQWVLTAAHCFPRRALPAEYRVRLGALRL
GSTSPRTLSVPVRRVLLPPDYSEDGARGDLALLQLRRPVPLSARVQPVCLPVPAARPPPGTPCRVTGW
GSLRPGVPLPEGRPLQGVRVPLLDSRTCDGLYHVGADVPQAERIVLPGSLCAGYPQVHKDACQVCTQP
PQPPESPPCAQLPPSLNSRTQDIPTQAQDPGLQPRGTTPGVWNPEN

| | | |
|---|---|---|
| NOV52j, CG56142-06 | SEQ ID NO: 807 | 762 bp |

| | | |
|---|---|---|
| DNA Sequence | ORF Start: at 7 | ORF Stop: at 757 |

AGATCTCAGCCCCGCATGTCCAGTCGGATCGTTGGGGGCCGGGATGGCCGGGACGGAGAGTGGCCGTG
GCAGGCGAGCATCCAGCATCGTGGGGCACACGTGTGCGGGGGGTCGCTCATCGCCCCCCAGTGGGTGC
TGACAGCGGCGCACTGCTTCCCCAGGAGGGCACTGCCAGCTGAGTACCGCGTGCGCCTGGGGGCGCTG
CGTCTGGGCTCCACCTCGCCCCGCACGCTCTCGGTGCCCGTGCGACGGGTGCTGCTGCCCCCGGACTA
CTCCGAGGACGGGGCCCGCGGCGACCTGGCACTGCTGCAGCTGCGTCGCCCGGTGCCCCTGAGCGCTC
GCGTCCAACCCGTCTGCCTGCCCGTGCCCGGCGCCCGCCCGCCGCCCGGCACACCATGCCGGGTCACC
GGCTGGGGCAGCCTCCGCCCAGGAGTGCCCCTCCCAGAGTGGCGACCGCTACAAGGAGTAAGGGTGCC
GCTGCTGGACTCGCGCACCTGCGACGGCCTCTACCACGTGGGCGCGGACGTGCCCCAGGCTGAGCGCA
TTGTGCTGCCTGGGAGTCTGTGTGCCGGCTACCCCCAGGGCCACAAGGACGCCTGCCAGGTGTGCACC
CAGCCTCCCCAGCCTCCGGAGTCCCCTCCCTGTGCCCAGCTCCCTCCCTCCCTGAACTCCAGGACCCA
GGACATCCCAACTCAGGCTCAGGATCCTGGCCTCCAACCTAGAGGCACCACGCCAGGGGTCTGGAACC
CTGAGAACCTCGAG

NOV52j, CG56142-06

| | | | |
|---|---|---|---|
| Protein Sequence | SEQ ID NO: 808 | 250 aa | MW at 26961.6kD |

QPRMSSRIVGGRDGRDGEWPWQASIQHRGAHVCGGSLIAPQWVLTAAHCFPRRALPAEYRVRLGALRL
GSTSPRTLSVPVRRVLLPPDYSEDGARGDLALLQLRRPVPLSARVQPVCLPVPGARPPPGTPCRVTGW
GSLRPGVPLPEWRPLQGVRVPLLDSRTCDGLYHVGADVPQAERIVLPGSLCAGYPQGHKDACQVCTQP
PQPPESPPCAQLPPSLNSRTQDIPTQAQDPGLQPRGTTPGVWNPEN

[0650] A ClustalW comparison of the above protein sequences yields the following sequence alignment shown in Table 52B.

TABLE 52B
Comparison of the NOV52 protein sequences.

| | |
|---|---|
| NOV52a | MRGVSCLQVLLLLVL-----------ACGQPRMSSRIVGGRDGRDGEWPWQASIQHRGAH |
| NOV52b | MRGVSCLQVLLLLVLGAAGTQGRKSAACGQPRMSSRIVGGRDGRDGEWPWQASIQHRGAH |
| NOV52c | ------------------------------------------------------------ |
| NOV52d | ------------------------------------------------------------ |
| NOV52e | ------------------------------------------------------------ |
| NOV52f | ------------------------------------------------------------ |
| NOV52g | MRGVSCLQVLLLLVLGAAGTQGRKSAACGQPRMSSRIVGGRDGRDGEWPWQASIQHRGAH |
| NOV52h | MRGVSCLQVLLLLVLGAAGTQGRKSAACGQPRMSSRIVGGRDGRDGEWPWQASIQHRGAH |
| NOV52i | -----------------------------QPRMSSRIVGGRDGRDGEWPWQASIQHRGAH |
| NOV52j | -----------------------------QPRMSSRIVGGRDGRDGEWPWQASIQHRGAH |
| NOV52a | VCGGSLIAPQWVLTAAHCFPR-ALPAEYRVRLGALRLGSTSPRTLSVPVRRVLLPPDYSE |
| NOV52b | VCGGSLIAPQWVLTAAHCFPS--------------------------------------- |
| NOV52c | ------------------------------------------------------------ |
| NOV52d | ------------------------------------------------------------ |
| NOV52e | ------------------------------------------------------------ |
| NOV52f | ------------------------------------------------------------ |
| NOV52g | VCGGSLIAPQWVLTAAHCFPRRALPAEYRVRLGALRLGSTSPRTLSVPVRRVLLPPDYSE |
| NOV52h | VCGGSLIAPQWVLTAAHCFPRRALPAEYRVRLGALRLGSTSPRTLSVPVRRVLLPPDYSE |
| NOV52i | VCGGSLIAPQWVLTAAHCFPRRALPAEYRVRLGALRLGSTSPRTLSVPVRRVLLPPDYSE |
| NOV52j | VCGGSLIAPQWVLTAAHCFPRRALPAEYRVRLGALRLGSTSPRTLSVPVRRVLLPPDYSE |
| NOV52a | DGARGDLALLQLRRPVPLSARVQPVCLPVPGARPPPGTPCRVTGWGSLRPGVPLPEWRPL |
| NOV52b | ---------------------------------------AP-------------PEWRPL |
| NOV52c | --------------------------SAARSTRPPTST-APSSSWA--------LSWRRL |
| NOV52d | --------------------------SAARSTRPPTST-APSSSWA--------LSWRRL |
| NOV52e | --------------------------SAARSTRPPTST-APSSSWA--------LSWRRL |
| NOV52f | --------------------------SAARSTRPPTST-APSSSWA--------LSWRRL |
| NOV52g | DGARGDLALLQLRRPVPLSARVQPVCLPVPGARPPPGTPCRVTGWGSLRPGVPLPEWRPL |
| NOV52h | DGARGDLALLQLRRPVPLSARVQPVCLPVPGARPPPGTPCRVTGWGSLRPGVPLPEWRPL |
| NOV52i | DGARGDLALLQLRRPVPLSARVQPVCLPVPGARPPPGTPCRVTGWGSLRPGVPLPEWRPL |
| NOV52j | DGARGDLALLQLRRPVPLSARVQPVCLPVPGARPPPGTPCRVTGWGSLRPGVPLPEWRPL |
| NOV52a | QGVRVPLLDSRTCDGLYHVG-ADVPQAERIVLPGSLCAGYPQGHKDACQVCTQ-PPQPPE |
| NOV52b | QGVRVPLLDSRTCDGLYHVG-ADVPQAERIVLPGSLCAGYPQGHKDACQVCTQ-PPQPPE |
| NOV52c | GRASQSSHTRVVSSGSLSTGTVTWTCLHRSATPSTPSGGLTPSTCLPRQATTSGLPNTTR |
| NOV52d | GRASQSSHTRVVSSGSLSTGTVTWTCLHRSATPSTPSGGLTPSTCLPRQATTSGLPNTTR |
| NOV52e | GRASQSSHTRVVSSGSLSTGTVTWTCLHRSATPSTPSGGLTPSTCLPRQATTSGLPNTTR |
| NOV52f | GRASQSSHTRVVSSGSLSTGTVTWTCLHRSATPSTPSGGLTPSTCLPRQATTSGLPNTTR |
| NOV52g | QGVRVPLLDSRTCDGLYHVG-ADVPQAERIVLPGSLCAGYPQGHKDACQGDSGGPLTCLQ |
| NOV52h | QGVRVPLLDSRTCDGLYHVG-ADVPQAERIVLPGSLCAGYPQGHKDACQGDSGGPLTCLQ |
| NOV52i | QGVRVPLLDSRTCDGLYHVG-ADVPQAERIVLPGSLCAGYPQVHKDACQVCTQ-PPQPPE |
| NOV52j | QGVRVPLLDSRTCDGLYHVG-ADVPQAERIVLPGSLCAGYPQGHKDACQVCTQ-PPQPPE |
| NOV52a | SPPCAQHPPSLNSRTQDIPTQAQDPGLQPRGTTPGVWNPEN------- |
| NOV52b | SPPCAQHPPSLNSRTQDIPTQAQDPGLQPRGTTPGVWNPEN------- |
| NOV52c | SM--APP-PARSSRPTGSTLTSL-CMDRSGSSA--------------- |
| NOV52d | SM--APP-PARSSRPTGSTLTSL-CMDRSGSSA--------------- |
| NOV52e | SM--APP-PARSSRPTGSTLTSL-CMDRSGSSA--------------- |
| NOV52f | SM--APP-PARSSRPTGSTLTSL-CMDRSGSSA--------------- |
| NOV52g | SG--SWVLVGVVSWGKGCALPNR-PGVYTSVATYSPWIQARVSF---- |
| NOV52h | SG--SWVLVGVVSWGKGCALPNR-PGVYTSVATYSPWIQARVTSNASR |
| NOV52i | SPPCAQLPPSLNSRTQDIPTQAQDPGLQPRGTTPGVWNPEN------- |
| NOV52j | SPPCAQLPPSLNSRTQDIPTQAQDPGLQPRGTTPGVWNPEN------- |
| NOV52a | (SEQ ID NO: 790) |
| NOV52b | (SEQ ID NO: 792) |
| NOV52c | (SEQ ID NO: 794) |
| NOV52d | (SEQ ID NO: 796) |
| NOV52e | (SEQ ID NO: 798) |
| NOV52f | (SEQ ID NO: 800) |
| NOV52g | (SEQ ID NO: 802) |
| NOV52h | (SEQ ID NO: 804) |
| NOV52i | (SEQ ID NO: 806) |
| NOV52j | (SEQ ID NO: 808) |

[0651] Further analysis of the NOV52a protein yielded the following properties shown in Table 52C.

TABLE 52C
Protein Sequence Properties NOV52a

| | |
|---|---|
| SignalP analysis: | Cleavage site between residues 19 and 20 |
| PSORT II analysis: | |

| | |
|---|---|
| PSG: | a new signal peptide prediction method |
| | N-region: length 2; pos.chg 1; neg.chg 0 |
| | H-region: length 18; peak value 10.88 |
| | PSG score: 6.48 |
| GvH: | von Heijne's method for signal seq. recognition |
| | GvH score (threshold: −2.1): 1.06 |
| | possible cleavage site: between 18 and 19 |

>>> Seems to have a cleavable signal peptide (1 to 18)

| | |
|---|---|
| ALOM: | Klein et al's method for TM region allocation |
| | Init position for calculation: 19 |
| | Tentative number of TMS(s) for the threshold 0.5: 0 |
| | number of TMS(s) .. fixed |
| | PERIPHERAL Likelihood = 5.30 (at 48) |
| | ALOM score: 5.30 (number of TMSs: 0) |
| MTOP: | Prediction of membrane topology (Hartmann et al.) |
| | Center position for calculation: 9 |
| | Charge difference: 0.0 C( 2.0) - N( 2.0) |
| | N >= C: N-terminal side will be inside |

MITDISC: discrimination of mitochondrial targeting seq

| | | | |
|---|---|---|---|
| R content: | 4 | Hyd Moment (75): | 6.32 |
| Hyd Moment (95): | 5.75 | G content: | 4 |
| D/E content: | 1 | S/T content: | 3 |
| Score: −2.36 | | | |

Gavel: prediction of cleavage sites for mitochondrial preseq

R-2 motif at 35 SRI|VG

NUCDISC: discrimination of nuclear localization signals

pat4: none
pat7: none
bipartite: none
content of basic residues: 10.1%
NLS Score: −0.47

KDEL: ER retention motif in the C-terminus: none
ER Membrane Retention Signals:

XXRR-like motif in the N-terminus: RGVS

none
SKL: peroxisomal targeting signal in the C-terminus: none
PTS2: 2nd peroxisomal targeting signal: none
VAC: possible vacuolar targeting motif: none
RNA-binding motif: none
Actinin-type actin-binding motif:

type 1: none
type 2: none

NMYR: N-myristoylation pattern none
Prenylation motif: none
memYQRL: transport motif from cell surface to Golgi: none
Tyrosines in the tail: none
Dileucine motif in the tail: none
checking 63 PROSITE DNA binding motifs: none
checking 71 PROSITE ribosomal protein motifs: none
checking 33 PROSITE prokaryotic DNA binding motifs: none
NNCN: Reinhardt's method for Cytoplasmic/Nuclear discrimination

Prediction: nuclear
Reliability: 76.7

COIL: Lupas's algorithm to detect coiled-coil regions

total: 0 residues

--------------------------
Final Results (k = 9/23):

55.6%: extracellular, including cell wall
33.3%: mitochondrial
11.1%: nuclear

>> prediction for CG56142-01 is exc (k = 9)

[0652] A search of the NOV52a protein against the Geneseq database, a proprietary database that contains sequences published in patents and patent publication, yielded several homologous proteins shown in Table 52D.

TABLE 50D
Geneseq Results for NOV52a

| | | NOV50a | Identities/ | |
|---|---|---|---|---|
| | | Residues/ | Similarities for | |
| Geneseq | Protein/Organism/Length | Match | the Matched | Expect |
| Identifier | [Patent #, Date] | Residues | Region | Value |
| AAU74742 | Human protease PRTS-2 protein | 1..267 | 267/279 (95%) | e-159 |
| | sequence - Homo sapiens, 365 aa. | 87..365 | 267/279 (95%) | |
| | [WO200 1 98468-A2, 27-Dec.- | | | |
| | 2001] | | | |
| ABP61012 | Novel human protein. | 1..267 | 267/279 (95%) | e-159 |
| | SEQ ID 99 - | 1..279 | 267/279 (95%) | |
| | Homo sapiens, 279 aa. | | | |
| | [WO200250 105-Al, 27-Jun.- | | | |
| | 2002] | | | |
| AAE00290 | Human plasminogen-like protein | 1..267 | 267/279 (95%) | e- 159 |
| | from clone HEOQBO8 - Homo | 1..279 | 267/279 (95%) | |
| | sapiens, 279 aa. [WO200124815- | | | |
| | Al, 12-Apr.-2001] | | | |
| ABB07286 | Human prostasin-like serine | 1..216 | 216/217 (99%) | e-127 |
| | protease - Homo sapiens, 272 aa. | 1..217 | 216/217 (99%) | |
| | [WO2001 98466-A2, 27-Dec.- | | | |
| | 2001] | | | |
| ABP61010 | Novel human protein. | 1..216 | 216/228 (94%) | e-125 |
| | SEQ ID 97 - | 1..228 | 216/228 (94%) | |
| | Homo sapiens, 280 aa. | | | |
| | [WO200250105-A1, 27-Jun.- | | | |
| | 2002] | | | |

[0653] In a BLAST search of public sequence databases, the NOV52a protein was found to have homology to the proteins shown in the BLASTP data in Table 52E.

TABLE 52E
Public BLASTP Results for NOV52a

| | | NOV52a | Identities/ | |
|---|---|---|---|---|
| Protein | | Residues/ | Similarities for | Ex- |
| Accession | Protein/ | Match | the Matched | pect |
| Number | Organism/Length | Residues | Portion | Value |
| Q8N171 | Similar to protease, | 1..216 | 216/228 (94%) | e-124 |
| | serine, 8 | 48..275 | 216/228 (94%) | |
| | (Prostasin) - | | | |
| | Homo sapiens | | | |
| | (Human), 327 aa | | | |
| | (fragment). | | | |
| Q8NF86 | Serine protease | 1..216 | 215/228 (94%) | e-123 |
| | EOS - Homo sapiens | 1..228 | 215/228 (94%) | |
| | (Human), 284 aa. | | | |
| AAP20885 | Tryptase-6 - | 1..216 | 175/225 (77%) | 3e-98 |
| | Mus musculus | 1..225 | 186/225 (81%) | |
| | (Mouse), 277 aa. | | | |
| Q9ER10 | Brain-specific serine | 17..215 | 91/202 (45%) | 1e-46 |
| | protease 4 precursor | 41..238 | 125/202 (61%) | |
| | (EG 3.4.21.-) | | | |
| | (BSSP-4) - | | | |
| | Mus musculus | | | |
| | (Mouse), 306 aa. | | | |
| Q9ES87 | Prostasin precursor | 16..216 | 93/202 (46%) | 1e-46 |
| | (EC 3.4.21.-) - | 36..235 | 125/202 (61%) | |
| | Rattus norvegicus | | | |
| | (Rat), 342 aa. | | | |

[0654] PFam analysis indicates that the NOV52a protein contains the domains shown in the Table 52F.

TABLE 52F
Domain Analysis of NOV52a

| | | Identities/ | |
|---|---|---|---|
| | NOV52a | Similarities | Expect |
| Pfam Domain | Match Region | for the Matched Region | Value |
| trypsin | 26 . . . 241 | 83/269 (31%) | 1e−38 |
| | | 165/269 (61%) | |

### Example 53

[0655] The NOV53 clone was analyzed, and the nucleotide and encoded polypeptide sequences are shown in Table 53A.

TABLE 53A
NOV53 Sequence Analysis

| | | |
|---|---|---|
| NOV53a, CG56144-01 | SEQ ID NO: 809 | 1151 bp |

| | | |
|---|---|---|
| DNA Sequence | ORF Start: ATG at 90 | ORF Stop: TAG at 1056 |

TAATCTTTGCAGGTGGGATAGCACAGGTTGAACTCTAATCATATATACTGTAGAAGGTATATATAGAA
GGTGAAGAAGCCCTGTAAAAAATGACAAGGAGATTTCCAGGAGCCATGCTTCCCTCTAATATCACCTC
AACACATCCAGCTGTCTTTTTGTTGGTAGGAATTCCTGGTTTGGAACACCTGCATGCCTGGATCTCCA
TCCCCTTCTGCTTTGCTTATACTCTGGCCCTGCTAGGCAACTGTACCCTTCTCTTCATTATCCAGGCT
GATGCAGCCCTCCATGAACCCATGTACCTCTTTCTGGCCATGTTGGCAACCATTGACTTGGTTCTTTC
TTCTACAACGCTGCCCAAAATGCTTGCCATATTCTGGTTCAGGGATCAGGAGATCAACTTCTTTGCCT
GTCTGGTCCAGATGTTCTTCCTTCACTCCTTCTCCATCATGGAGTCAGCAGTGCTGCTGGCCATGGCC
TTTGACCGCTATGTGGCCATCTGCAAGCCATTGCACTACACGACGGTCCTGACTGGGTCCCTCATCAC
CAAGATTGGCATGGCTGCTGTGGCCCGGGCTGTGACACTAATGACTCCACTCCCCTTCCTGCTCAGAC
GCTTCCACTACTGCCGAGGCCCAGTGATTGCCCATTGCTACTGTGAACACATGGCTGTGGTAAGGCTG
GCGTGTGGGGACACTAGCTTCAACAATATCTATGGCATTGCTGTGGCCATGTTTAGTGTGGTGTTGGA
CCTGCTCTTTGTTATCCTGTCTTATGTCTTCATCCTTCAGGCAGTTCTCCAGCTTGCCTCTCAGGAGG
CCCGCTACAAAGCATTTGGGACATGTGTGTCTCACATAGGTGCCATCCTGTCCACCTACACTCCAGTA
GTCATCTCTTCAGTCATGCACCGTGTAGCCCGCCATGCTGCCCCTCGTGTCCACATACTCCTTGCTAT
TTTCTATCTCCTTTTCCCACCCATGGTCAATCCTATCATATATGGAGTCAAGACCAAGCAGATTCGTG
AGTATGTGCTCAGTCTATTCCAGAGAAAGAACATGTAGATGGATAGTTCTCTTTTTTTATCCCACTTG
CCAAGTAATGAGAATGCTGGATTGGGGTTGAGGGGAAAAATCTAAATAGGAAAATTGCAGAGT

NOV53a, CG56144-01

| | | | |
|---|---|---|---|
| Protein Sequence | SEQ ID NO: 810 | 322 aa | MW at 36121.9kD |

MTRRFPGAMLPSNITSTHPAVFLLVGIPGLEHLHAWISIPFCFAYTLALLGNCTLLFIIQADAALHEP
MYLFLAMLATIDLVLSSTTLPKMLAIFWFRDQEINFFACLVQHFFLHSFSIMESAVLLAMAFDRYVAI
CKPLHYTTVLTGSLITKIGMAAVARAVTLMTPLPFLLRRFHYCRGPVIAHCYCEHMAVVRLACGDTSF
NNIYGIAVAMFSVVLDLLFVILSYVFILQAVLQLASQEARYKAFGTCVSHIGAILSTYTPVVISSVMH
RVARHAAPRVHILLAIFYLLFPPMVNPIIYGVKTKQIREYVLSLFQRKNM

| | | |
|---|---|---|
| NOV53b, 170645965 | SEQ ID NO: 811 | 981 bp |

| | | |
|---|---|---|
| DNA Sequence | ORF Start: at 1 | ORF Stop: end of sequence |

GGATCCACCATGACAAGGAGATTTCCAGGAGCCATGCTTCCCTCTAATATCACCTCAACACATCCAGC
TGTCTTTTTGTTGGTAGGAATTCCTGGTTTGGAACACCTGCATGCCTGGATCTCCATCCCCTTCTGCT
TTGCTTATACTCTGGCCCTGCTAGGCAACTGTACCCTTCTCTTCATTATCCAGGCTGATGCAGCCCTC
CATGAACCCATGTACCTCTTTCTGGCCATGTTGGCAACCATTGACTTGGTTCTTTCTTCTACAACGCT
GCCCAAAATGCTTGCCATATTCTGGTTCAGGGATCAGGAGATCAACTTCTTTGCCTGTCTGGTCCAGA
TGTTCTTCCTTCACTCCTTCTCCATCATGGAGTCAGCAGTGCTGCTGGCCATGGCCTTTGACCGCTAT
GTGGCCATCTGCAAGCCATTGCACTACACGACGGTCCTGACTGGGTCCCTCATCACCAAGATTGGCAT
GGCTGCTGTGGCCCGGGCTGTGACACTAATGACTCCACTCCCCTTCCTGCTCAGACGCTTCCACTACT
GCCGAGGCCCAGTGATTGCCCATTGCTACTGTGAACACATGGCTGTGGTAAGGCTGGCGTGTGGGGAC
ACTAGCTTCAACAATATCTATGGCATTGCTGTGGCCATGTTTATTGTGGTGTTGGACCTGCTCTTTGT
TATCCTGTCTTATGTCTTCATCCTTCAGGCAGTTCTCCAGCTTGCCTCTCAGGAGGCCCGCTACAAGG
CATTTGGGACATGTGTGTCTCACATAGGTGCCATCCTGTCCACCTACACTCCAGTAGTCATCTCTTCA
GTCATGCACCGTGTAGCCCGCCATGCTGCCCCTCGTGTCCACATACTCCTTGCTATTTTCTATCTCCT
TTTCCCACCCATGGTCAATCCTATCATATATGGAGTCAAGACCAAGCAGATTCGTGAGTATGTGCTCA
GTCTATTCCAGAGAAAGAACATGCTCGAG

NOV53b, 170645965

| | | | |
|---|---|---|---|
| Protein Sequence | SEQ ID NO: 812 | 327 aa | MW at 36635.5kD |

GSTMTRRFPGAMLPSNITSTHPAVFLLVGIPGLEHLHAWISIPFCFAYTLALLGNCTLLFIIQADAAL
HEPMYLFLAMLATIDLVLSSTTLPKMLAIFWFRDQEINFFACLVQMFFLHSFSIMESAVLLAMAFDRY
VAICKPLHYTTVLTGSLITKIGMAAVARAVTLMTPLPFLLRRFHYCRGPVIAHCYCEHMAVVRLACGD
TSFNNIYGIAVAMFIVVLDLLFVILSYVFILQAVLQLASQEARYKAFGTCVSHIGAILSTYTPVVISS
VMHRVARHAAPRVHILLAIFYLLFPPMVNPIIYGVKTKQIREYVLSLFQRKNMLE

| | | |
|---|---|---|
| NOV53c, 168869277 | SEQ ID NO: 813 | 981 bp |

| | | |
|---|---|---|
| DNA Sequence | ORF Start: at 1 | ORF Stop: end of sequence |

GGATCCACCATGACAAGGAGATTTCCAGGAGCCATGCTTCCCTCTAATATCACCTCAACACATCCAGC
TGTCTTTTTGTTGGTAGGAATTCCTGGTTTGGAACACCTGCATGCCTGGATCTCCATCCCCTTCTGCT
TTGCTTATACTCTGGCCCTGCTAGGCAACTGTACCCTTCTCTTCATTATCCAGGCTGATGCAGCCCTC
CATGAACCCATGTACCTCTTTCTGGCCATGTTGGCAACCATTGACTTGGTTCTTTCTTCTACAACGCT
GCCCAAAATGCTTGCCATATTCTGGTTCAGGGATCAGGAGATCAACTTCTTTGCCTGTCTGGTCCAGA
TGTTCTTCCTTCACTCCTTCTCCATCATGGAGTCAGCAGTGCTGCTGGCCATGGCCTTTGACCGCTAT
GTGGCCATCTGCAAGCCATTGCACTACACGACGGTCCTGACTGGGTCCCTCATCACCAAGATTGGCAT
GGCTGCTGTGGCCCGGGCTGTGACACTAATGACTCCACTCCCCTTCCTGCTCAGACGCTTCCACTACT
GCCGAGGCCCAGTGATTGCCCATTGCTACTGTGAACACATGGCTGTGGTAAGGCTGGCGTGTGGGGAC
ACTAGCTTCAACAATATCTATGGCATTGCTGTGGCCATGTTTATTGTGGTGTTGGACCTGCTCTTTGT
TATCCTGTCTTATGTCTTCATCCTTCAGGCAGTTCTCCAGCTTGCCTCTCAGGAGGCCCGCTACAAGG
CATTTGGGACATGTGCGTCTCACATAGGTGCCATCCTGTCCACCTACACTCCAGTAGTCATCTCTTCA
GTCATGCACCGTGTAGCCCGCCATGCTGCCCCTCGTGTCCACATACTCCTTGCTATTTTCTATCTCCT
TTTCCCACCCATGGTCAATCCTATCATATATGGAGTCAAGACCAAGCAGATTCGTGAGTATGTGCTCA
GTCTATTCCAGAGAAAGAACATGCTCGAG

NOV53c, 168869277

| | | | |
|---|---|---|---|
| Protein Sequence | SEQ ID NO: 814 | 327 aa | MW at 36607.4kD |

GSTMTRRFPGAMLPSNITSTHPAVFLLVGIPGLEHLHAWISIPFCFAYTLALLGNCTLLFIIQADAAL
HEPMYLFLAMLATIDLVLSSTTLPKMLAIFWFRDQEINFFACLVQMFFLHSFSIMESAVLLAMAFDRY
VAICKPLHYTTVLTGSLITKIGMAAVARAVTLMTPLPFLLRRFHYCRGPVIAHCYCEHMAVVRLACGD
TSFNNIYGIAVAMFIVVLDLLFVILSYVFILQAVLQLASQEARYKAFGTCASHIGAILSTYTPVVISS
VMHRVARHAAPRVHILLAIFYLLFPPMVNPIIYGVKTKQIREYVLSLFQRKNNLE

| | | |
|---|---|---|
| NOV53d, 170645981 | SEQ ID NO: 815 | 981 bp |

| | | |
|---|---|---|
| DNA Sequence | ORF Start: at 1 | ORF Stop: end of sequence |

GGATCCACCAAGACAAGGAGATTTCCAGGAGCCATGCTTCCCTCTAATATCACCTCAACACATCCAGC
TGTCTTTTTGTTGGTAGGAATTCCTGGTTTGGAACACCTGGATGCCTGGATCTCCATCCCCTTCTGCT
TTGCTTATACTCTGGCCCTGCTAGGCAACTGTACCCTTCTCTTCATTATCCAGGCTGATGCAGCCCTC
CATGAACCCATGTACCTCTTTCTGGCCATGTTGGCAACCATTGACTTGGTTCTTTCTTCTACAACGCT
GCCCAAAATGCTTGCCATATTCTGGTTCAGGGATCAGGAGATCAACTTCTTTGCCTGTCTGGTCCAGA
TGTTCTTCCTTCACTCCTTCTCCATCATGGAGTCAGCAGTGCTGCTGGCCATGGCCTTTGACCGCTAT
GTGGCCATCTGCAAGCCATTGCACTACACGACGGTCCTGACTGGGTCCCTCATCACCAAGATTGGCAT
GGCTGCTGTGGCCCGGGCTGTGACACTAATGACTCCACTCCCCTTCCTGCTCAGACGCTTCCACTACT
GCCGAGACCCAGTGATTGCCCATTGCTACTGTGAACACATGGCTGTGGTAAGGCTGGCGTGTGGGGAC
ACTAGCTTCAACAATATCTATGGCATTGCTGTGGCCATGTTTATTGTGGTGTTGGACCTGCTCTTTGT
TATCCTGTCTTATGTCTTCATCCTTCAGGCAGTTCTCCAGCTTGCCTCTCAGGAGGCCCGCTACAAGG
CATTTGGGACATGTGTGTCTCACATAGGTACCATCCTGTCCACCTACACTCCAGTAGTCATCTCTTCA
GTCATGCACCGTGTAGCCCGCCATGCTGCCCCTCGTGTCCACATACTCCTTGCTATTTTCTATCTCCT
TTTCCCACCCATGGTCAATCCTATCATATATGGAGTCAAGACCAAGCAGATTCGTGAGTATGTGCTCA
GTCTATTCCAGAGAAAGAACATGCTCGAG

NOV53d, 170645981

| | | | |
|---|---|---|---|
| Protein Sequence | SEQ ID NO: 816 | 327 aa | MW at 36720.5kD |

GSTKTRRFPGAMLPSNITSTHPAVFLLVGIPGLEHLHAWISIPFCFAYTLALLGNCTLLFIIQADAAL
HEPMYLFLAMLATIDLVLSSTTLPKMLAIFWFRDQEINFFACLVQMFFLHSFSIMESAVLLAMAFDRY
VAICKPLHYTTVLTGSLITKIGMAAVARAVTLMTPLPFLLRRFHYCRDPVIAHCYCEHMAVVRLACGD
TSFNNIYGIAVAMFIVVLDLLFVILSYVFILQAVLQLASQEARYKAFGTCVSHIGTILSTYTPVVISS
VMHRVARHAAPRVHILLAIFYLLFPPMVNPIIYGVKTKQIREYVLSLFQRKNMLE

| | | |
|---|---|---|
| NOV53e, 168869262 | SEQ ID NO: 817 | 981 bp |

| | | |
|---|---|---|
| DNA Sequence | ORF Start: at 1 | ORF Stop: end of sequence |

GGATCCACCATGACAAGGAGATTTCCAGGAGCCATGCTTCCCTCTAATATCACCTCAACACATCCAGC
TGTCTTTTTGTTGGTAGGAATTCCTGGTTTGGAACACCTGCATGCCTGGATCTCCATCCCCTTCTGCT
TTGCTTATACTCTGGCCCTGCTAGGCAACTGTACCCTTCTCTTCATTATCCGGGCTGATGCAGCCCTC
CATGAACCCATGTACCTCTTTCTGGCCATGTTGGCAACCATTGACTTGGTTCTTTCTTCTACAACGCT
GCCCAAAATGCTTGCCATATTCTGGTTCAGGGATCAGGAGATCAACTTCTTTGCCTGTCTGGTCCAGA
TGTTCTTCCTTCACTCCTTCTCCATCATGGAGTCAGCAGTGCTGCTGGCCATGGCCTTTGACCGCTAT
GTGGCCATCTGCAAGCCATTGCACTACACGACGGTCCTGACTGGGTCCCTCATCACCAAGATTGGCAT
GGCTGCTGTGGCCTGGGCTGTGACACTAATGACTCCACTCCCCTTCCTGCTCAGACGCTTCCACTACT
GCCGAGGCCCAGTGATTGCCCATTGCTACTGTGAACACATGGCTGTGGTAAGGCTGGCGTGTGGGGAC
ACTAGCTTCAACAATATCTATGGCATTGCTGTGGCCATGTTTATTGTGGTGTTGGACCTGCTCTTTGT
TATCCTGTCTTATGTCTTCATCCTTCAGGCAGTTCTCCAGCTTGCCTCTCAGGAGGCCCGCTACAAGG
CATTTGGGACATGTGTGTCTCACATAGGTGCCATCCTGTCCACCTACACTCCAGTAGTCATCTCTTCA
GTCATGCACCGTGTAGCCCGCCATGCTGCCCCTCGTGTCCACATACTCCTTGCTATTTTCTATCTCCT
TTTCCCACCCATGGTCAATCCTATCATATATGGAGTCAAGACCAAGCAGATTCGTGAGTATGTGCTCA
GTCTATTCCAGAGAAAGAACATGCTCGAG

NOV53e, 168869262

| | | | |
|---|---|---|---|
| Protein Sequence | SEQ ID NO: 818 | 327 aa | MW at 36693.5kD |

GSTHTRRFPGAMLPSNITSTHPAVFLLVGIPGLEHLHAWISIPFCFAYTLALLGMCTLLFIIRADAAL
HEPMYLFLAMLATIDLVLSSTTLPKMLAIFWFRDQEINFFACLVQMFFLHSFSIMESAVLLAMAFDRY
VAICKPLHYTTVLTGSLITKIGMAAVAWAVTLMTPLPFLLRRFHYCRGPVIAHCYCEHMAVVRLACGD
TSFNNIYGIAVAMFIVVLDLLFVILSYVFILQAVLQLASQEARYKAFGTCVSHIGAILSTYTPVVISS
VMHRVARHAAPRVHILLAIFYLLFPPMVNPIIYGVKTKQIREYVLSLFQRKNMLE

| | | |
|---|---|---|
| NOV53f, 168869254 | SEQ ID NO:819 | 981 bp |

| | | |
|---|---|---|
| DNA Sequence | ORF Start: at 1 | ORF Stop: end of sequence |

GGATCCACCATGACAAGGAGATTTCCAGGAGCCATGCTTCCCTCTAATATCACCTCAACACATCCAGC
TGTCTTTTTGTTGGTAGGAATTCCTGGTTTGGAACACCTGCATGCCTGGATCTCCATCCCCCTCTGCT
TTGCTTATACTCTGGCCCTGCTAGGCAACTGTACCCTTCTCTTCATTATCCAGGCTGATGCAGCCCTC
CATGAACCCATGTACCTCTTTCTGGCCATGTTGGCAACCATTGACTTGGTTCTTTCTTCTACAACGCT
GCCCAAAATGCTTGCCATATTCTGGTTCAGGGATCAGGAGATCAACTTCTTTGCCTGTCTGGTCCAGA
TGTTCTTCCTTCACTCCTTCTCCATCATGGAGTCAGCAGTGCTGCTGGCCATGGCCTTTGACCGCTAT
GTGGCCATCTGCAAGCCATTGCACTACACGACGGTCCTGACTGGGTCCCTCATCACCAAGATTGGCAT
GGCTGCTGTGGCCCGGGCTGTGACACTAATGACTCCACTCCCCTTCCTGCTCAGACGCTTCCACTACT
GCCGAGGCCCAGTGATTGCCCATTGCTACTGTGAACACATGGCTGTGGTAAGGCTGGCGTGTGGGGAC
ACTAGCTTCAACAATATCTATGGCATTGCTGTGGCCATGTTTATTGTGGTGTTGGACCTGCTCTTTGT
TATCCTGTCTTATGTCTTCATCCTTCAGGCAGTTCTCCAGCTTGCCTCTCAGGAGGCCCGCTACAAGG
CATTTGGGACATGTGTGTCTCACATAGGTGCCATCCTGTCCACCTACACTCCAGTAGTCATCTCTTCA
GTCATGCACCGTGTAGCCCGCCATGCTGCCCCTCGTGTCCACATACTCCTTGCTATTTTCTATCTCCT
TTTCCCACCCATGGTCAATCCTATCATATATGGAGTCAAGACCAAGCAGATTCGTGAGTATGTGCTCA
GTCTATTCCAGAGAAAGAACATGCTCGAG

NOV53f, 168869254

| | | | |
|---|---|---|---|
| Protein Sequence | SEQ ID NO: 820 | 327 aa | MW at 36601.4kD |

GSTMTRRFPGANLPSNITSTHPAVFLLVGIPGLEHLHAWISIPLCFAYTLALLGNCTLLFIIQADAAL
HEPMYLFLAMLATIDLVLSSTTLPKMLAIFWFRDQEINFFACLVQMFFLHSFSIMESAVLLAMAFDRY
VAICKPLHYTTVLTGSLITKIGMAAVARAVTLMTPLPFLLRRFHYCRGPVIAHCYCEHMAVVRLACGD
TSFNNIYGIAVANFIVVLDLLFVILSYVFILQAVLQLASQEARYKAFGTCVSHIGAILSTYTPVVISS
VMHRVARHAAPRVHILLAIFYLLFPPMVNPIIYGVKTKQIREYVLSLFQRKNMLE

| | | |
|---|---|---|
| NOV53g, CG56144-02 | SEQ ID NO: 821 | 966 bp |

| | | |
|---|---|---|
| DNA Sequence | ORF Start: ATG at 1 | ORF Stop: end of sequence |

ATGACAAGGAGATTTCCAGGAGCCATGCTTCCCTCTAATATCACCTCAACACATCCAGCTGTCTTTTT
GTTGGTAGGAATTCCTGGTTTGGAACACCTGCATGCCTGGATCTCCATCCCCTTCTGCTTTGCTTATA
CTCTGGCCCTGCTAGGCAACTGTACCCTTCTCTTCATTATCCAGGCTGATGCAGCCCTCCATGAACCC
ATGTACCTCTTTCTGGCCATGTTGGCAACCATTGACTTGGTTCTTTCTTCTACAACGCTGCCCAAAAT
GCTTGCCATATTCTGGTTCAGGGATCAGGAGATCAACTTCTTTGCCTGTCTGGTCCAGATGTTCTTCC
TTCACTCCTTCTCCATCATGGAGTCAGCAGTGCTGCTGGCCATGGCCTTTGACCGCTATGTGGCCATC
TGCAAGCCATTGCACTACACGACGGTCCTGACTGGGTCCCTCATCACCAAGATTGGCATGGCTGCTGT
GGCCCGGGCTGTGACACTAATGACTCCACTCCCCTTCCTGCTCAGACGCTTCCACTACTGCCGAGGCC
CAGTGATTGCCCATTGCTACTGTGAACACATGGCTGTGGTAAGGCTGGCGTGTGGGGACACTAGCTTC
AACAATATCTATGGCATTGCTGTGGCCATGTTTATTGTGGTGTTGGACCTGCTCTTTGTTATCCTGTC
TTATGTCTTCATCCTTCAGGCAGTTCTCCAGCTTGCCTCTCAGGAGGCCCGCTACAAGGCATTTGGGA
CATGTGTGTCTCACATAGGTGCCATCCTGTCCACCTACACTCCAGTAGTCATCTCTTCAGTCATGCAC
CGTGTAGCCCGCCATGCTGCCCCTCGTGTCCACATACTTCTTGCTATTTTCTATCTCCTTTTCCCACC
CATGGTCAATCCTATCATATATGGAGTCAAGACCAAGCAGATTCGTGAGTATGTGCTCAGTCTATTCC
AGAGAAAGAACATG

NOV53g, CG56144-02

| | | | |
|---|---|---|---|
| Protein Sequence | SEQ ID NO: 822 | 322 aa | MW at 36148.0kD |

MTRRFPGAMLPSNITSTHPAVFLLVGIPGLEHLHAWISIPFCFAYTLALLGNCTLLFIIQADAALHEP
MYLFLAMLATIDLVLSSTTLPKMLAIFWFRDQEINFFACLVQMFFLHSFSIMESAVLLAMAFDRYVAI
CKPLHYTTVLTGSLITKIGMAAVARAVTLMTPLPFLLRRFHYCRGPVIAHCYCEHMAVVRLACGDTSF
NNIYGIAVAMFIVVLDLLFVILSYVFILQAVLQLASQEARYKAFGTCVSHIGAILSTYTPVVISSVMH
RVARHAAPRVHILLAIFYLLFPPMVNPIIYGVKTKQIREYVLSLFQRKNM

| | | |
|---|---|---|
| NOV53h, CG56144-03 | SEQ ID NO: 823 | 777 bp |

| | | |
|---|---|---|
| DNA Sequence | ORF Start: at 1 | ORF Stop: end of sequence |

GCCCTCCATGAACCCATGTACCTCTTTCTGGCCATGTTGGCAACCATTGACTTGGTTCTTTCTTCTAC
AACGCTGCCCAAAATGCTTGCCATATTCTGGTTCAGGGATCAGGAGATCAACTTCTTTGCCTGTCTGG
TCCAGATGTTCTTCCTTCACTCCTTCTCCATCATGGAGTCAGCAGTGCTGCTGGCCATGGCCTTTGAC
CGCTATGTGGCCATCTGCAAGCCATTGCACTACACGACGGTCCTGACTGGGTCCCTCATCACCAAGAT
TGGCATGGCTGCTGTGGCCTGGGCTGTGACACTAATGACTCCACTCCCCTTCCTGCTCAGACGCTTCC
ACTACTGCCGAGGCCCAGTGATTGCCCATTGCTACTGTGAACACATGGCTGTGGTAAGGCTGGCGTGT
GGGGACACTAGCTTCAACAATATCTATGGCATTGCTGTGGCCATGTCTATTGTGGTGTTGGACCTGCT
CTTTGTTATCCTGTCTTATGTCTTCATCCTTCAGGCAGTTCTCCAGCTTGCCTCTCAGGAGGCCCGCT
ACAAGGCATTTGGGACATGTGTGTCTCACATAGGTGCCATCCTGTCCACCTACACTCCAGTAGTCATC
TCTTCAGTCATGCACCGTGTAGCCCGCCATGCTGCCCCTCGTGTCCACATACTCCTTGCTATTTTCTA
TCTCCTTTTCCCACCCATGGTCAATCCTATCATATATGGAGTCAAGACCAAGCAGATTCGTGAGTATG
TGCTCAGTCTATTCCAGAGAAAGAACATG

NOV53h, CG56144-03

| | | | |
|---|---|---|---|
| Protein Sequence | SEQ ID NO: 824 | 259 aa | MW at 29252.8kD |

ALHEPMYLFLAMLATIDLVLSSTTLPKMLAIFWFRDQEINFFACLVQMFFLHSFSIMESAVLLAMAFD
RYVAICKPLHYTTVLTGSLITKIGMAAVAWAVTLMTPLPFLLRRFHYCRGPVIAHCYCEHMAVVRLAC
GDTSFNNIYGIAVAMSIVVLDLLFVILSYVFILQAVLQLASQEARYKAFGTCVSHIGAILSTYTPVVI
SSVMHRVARHAAPRVHILLAIFYLLFPPMVNPIIYGVKTKQIREYVLSLFQRKNM

| | | |
|---|---|---|
| NOV53i, CG56144-04 | SEQ ID NO: 825 | 777 bp |

| | | |
|---|---|---|
| DNA Sequence | ORF Start: at 1 | ORF Stop: end of sequence |

GCCCTCCATGAACCCATGTACCTCTTTCTGGCCATGTTGGCAACCATTGACTTGGTTCTTTCTTCTAC
AACGCTGCCCAAAATGCTTGCCATATTCTGGTTCAGGGATCAGGAGATCAACTTCTTTGCCTGTCTGG
TCCAGATGTTCTTCCTTCACTCCTTCTCCATCATGGAGTCAGCAGTGCTGCTGGCCATGGCCTTTGAC
CGCTATGTGGCCATCTGCAAGCCATTGCACTACACGACGGTCCTGACTGGGTCCCTCATCACCAAGAT
TGGCATGGCTGCTGTGGCCTGGGCTGTGACACTAATGACTCCACTCCCCTTCCTGCTCAGACGCTTCC
ACTACTGCCGAGGCCCAGTGATTGCCCATTGCTACTGTGAACACATGGCTGTGGTAAGGCTGGCGTGT
GGGGACACTAGCTTCAACAATATCTATGGCATTGCTGTGGCCATGTCTATTGTGGTGTTGGACCTGCT
CTTTGTTATCCTGTCTTATGTCTTCATCCTTCAGGCAGTTCTCCAGCTTGCCTCTCAGGAGGCCCGCT
ACAAGGCATTTGGGACATGTGTGTCTCACATAGGTGCCATCCTGTCCACCTACACTCCAGTAGTCATC
TCTTCAGTCATGCACCGTGTAGCCCGCCATGCTGCCCCTCGTGTCCACATACTCCTTGCTATTTTCTA
TCTCCTTTTCCCACCCATGGTCAATCCTATCATATATGGAGTCAAGACCAAGCAGATTCGTGAGTATG
TGCTCAGTCTATTCCAGAGAAAGAACATG

NOV53i, CG56144-04

| | | | |
|---|---|---|---|
| Protein Sequence | SEQ ID NO: 826 | 259 aa | MW at 29252.8kD |

ALHEPMYLFLAMLATIDLVLSSTTLPKMLAIFWFRDQEINFFACLVQMFFLHSFSIMESAVLLAMAFD
RYVAICKPLHYTTVLTGSLITKIGMAAVAWAVTLMTPLPFLLRRFHYCRGPVIAHCYCEHMAVVRLAC
GDTSFNNIYGIAVAMSIVVLDLLFVILSYVFILQAVLQLASQEARYKAFGTCVSHIGAILSTYTPVVI
SSVMHRVARHAAPRVHILLAIFYLLFPPMVNPIIYGVKTKQIREYVLSLFQRKNM

| | | |
|---|---|---|
| NOV53j, CG56144-05 | SEQ ID NO: 827 | 789 bp |

| | | |
|---|---|---|
| DNA Sequence | ORF Start: at 7 | ORF Stop: at 784 |

GGATCCGCCCTCCATGAACCCATGTACCTCTTTCTGGCCATGTTGGCAACCATTGACTTGGTTCTTTC
TTCTACAACGCTGCCCAAAATGCTTGCCATATTCTGGTTCAGGGATCAGGAGATCAACTTCTTTGCCT
GTCTGGTCCAGATGTTCTTCCTTCACTCCTTCTCCATCATGGAGTCAGCAGTGCTGCTGGCCATGGCC
TTTGACCGCTATGTGGCCATCTGCAAGCCATTGCACTACACGACGGTCCTGACTGGGTCCCTCATCAC
CAAGATTGGCATGGCTGCTGTGGCCCGGGCTGTGACACTAATGACTCCACTCCCCTTCCTGCTCAGAC
GCTTCCACTACTGCCGAGGCCCAGTGATTGCCCATTGCTACTGTGAACACATGGCTGTGGTAAGGCTG
GCGTGTGGGGACACTAGCTTCAACAATATCTATGGCATTGCTGTGGCCATGTTTATTGTGGTGTTGGA
CCTGCTCTTTGTTATCCTGTCTTATGTCTTCATCCTTCAGGCAGTTCTCCAGCTTGCCTCTCAGGAGG
CCCGCTACAAGGCATTTGGGACATGTGTGTCTCACATAGGTGCCATCCTGTCCACCTACACTCCAGTA
GTCATCTCTTCAGTCATGCACCGTGTAGCCCGCCATGCTGCCCCTCGTGTCCACATACTCCTTGCTAT
TTTCTATCTCCTTTTCCCACCCATGGTCAATCCTATCATATATGGAGTCAAGACCAAGCAGATTCGTG
AGTATGTGCTCAGTCTATTCCAGAGAAAGAACATGCTCGAG

NOV53j, CG56144-05

| | | | |
|---|---|---|---|
| Protein Sequence | SEQ ID NO: 828 | 259 aa | MW at 29282.9kD |

ALHEPMYLFLAMLATIDLVLSSTTLPKNLAIFWFRDQEINFFACLVQMFFLHSFSIMESAVLLAMAFD
RYVAICKPLHYTTVLTGSLITKIGMAAVARAVTLMTPLPFLLRRFHYCRGPVIAHCYCEHMAVVRLAC
GDTSFNNIYGIAVAMFIVVLDLLFVILSYVFILQAVLQLASQEARYKAFGTCVSHIGAILSTYTPVVI
SSVMHRVARHAAPRVHILLAIFYLLFPPMVNPIEYGVKTKQIREYVLSLFQRKNM

| | | |
|---|---|---|
| NOV53k, CG56144-06 | SEQ ID NO: 829 | 789 bp |

| | | |
|---|---|---|
| DNA Sequence | ORF Start: at 7 | ORF Stop: at 784 |

GGATCCGCCCTCCATGAACCCATGTACCTCTTTCTGGCCATGTTGGCAACCATTGACTTGGTTCTTTC
TTCTACAACGCTGCCCAAAATGCTTGCCATATTCTGGTTCAGGGATCAGGAGATCAACTTCTTTGCCT
GTCTGGTCCAGATGTTCTTCCTTCACTCCTTCTCCATCATGGAGTCAGCAGTGCTGCTGGCCATGGCC
TTTGACCGCTATGTGGCCATCTGCAAGCCATTGCACTACACGACGGTCCTGACTGGGTCCCTCATCAC
CAAGATTGGCATGGCTGCTGTGGCCCGGGCTGTGACACTAATGACTCCACTCCCCTTCCTGCTCAGAC
GCTTCCACTACTGCCGAGGCCCAGTGATTGCCCATTGCTACTGTGAACACATGGCTGTGGTAAGGCTG
GCGTGTGGGGACACTAGCTTCAACAATATCTATGGCATTGCTGTGGCCATGTTTATTGTGGTGTTGGA
CCTGGTCTTTGTTATCCTGTCTTATGTCTTCATCCTTCAGGCAGTTCTCCAGCTTGCCTCTCAGGAGG
CCCGCTACAAGGCATTTGGGACATGTGTGTCTCACATAGGTGCCATCCTGTCCACCTACACTCCAGTA
GTCATCTCTTCAGTCATGCACCGTGTAGCCCGCCATGCTGCCCCTCGTGTCCACATACTCCTTGCTAT
TTTCTATCTCCTTTTCCCACCCATGGTCAATCCTATCATATATGGAGTCAAGACCAAGCAGATTCGTG
AGTATGTGCTCAGTCTATTCCAGAGAAAGAACATGCTCGAG

NOV53k, CG56144-06

| | | | |
|---|---|---|---|
| Protein Sequence | SEQ ID NO: 830 | 259 aa | MW at 29282.91W |

ALHEPMYLFLAMLATIDLVLSSTTLPKMLAIFWFRDQEINFFACLVQMFFLHSFSIMESAVLLAMAFD
RYVAICKPLHYTTVLTGSLITKIGMAAVARAVTLMTPLPFLLRRFHYCRGPVIAHCYCEHMAVVRLAC
GDTSFNNIYGIAVAMFIVVLDLLFVILSYVFILQAVLQLASQEARYKAFGTCVSHIGAILSTYTPVVI
SSVNHRVARHAAPRVHILLAIFYLLFPPMVNPIIYGVKTKQIREYVLSLFQRKNM

[0656] A ClustalW comparison of the above protein sequences yields the following sequence alignment shown in Table 53B.

TABLE 53B
Comparison of the NOV53 protein sequences.

| | |
|---|---|
| NOV53a | ---MTRRFPGAMLPSNITSTHPAVFLLVGIPGLEHLHAWISIPFCFAYTLALLGNCTLLF |
| NOV53b | GSTMTRRFPGAMLPSNITSTHPAVFLLVGIPGLEHLHAWISIPFCFAYTLALLGNCTLLF |
| NOV53c | GSTMTRRFPGANLPSNITSTHPAVFLLVGIPGLEHLHAWISIPFCFAYTLALLGNCTLLF |
| NOV53d | GSTKTRRFPGAMLPSNITSTHPAVFLLVGIPGLEHLHAWISIPFCFAYTLALLGNCTLLF |
| NOV53e | GSTMTRRFPGAMLPSNITSTHPAVFLLVGIPGLEHLHAWISIPFCFAYTLALLGNCTLLF |
| NOV53f | GSTMTRRFPGAMLPSNITSTHPAVFLLVGIPGLENLHAWISIPLCFAYTLALLGNCTLLF |
| NOV53g | ---MTRRFPGAMLPSNITSTHPAVFLLVGIPGLEHLHAWISIPFCFAYTLALLGNCTLLF |
| NOV53h | ------------------------------------------------------------ |
| NOV53i | ------------------------------------------------------------ |
| NOV53j | ------------------------------------------------------------ |
| NOV53k | ------------------------------------------------------------ |
| NOV53a | IIQADAALHEPMYLFLAMLATIDLVLSSTTLPKMLAIFWFRDQEINFFACLVQMFFLHSF |
| NOV53b | IIQADAALHEPMYLFLAMLATIDLVLSSTTLPKMLAIFWFRDQEINFFACLVQMFFLHSF |
| NOV53c | IIQADAALHEPMYLFLAMLATIDLVLSSTTLPKMLAIFWFRDQEINFFACLVQMFFLHSF |
| NOV53d | IIQADAALHEPMYLFLAMLATIDLVLSSTTLPKMLAIFWFRDQEINFFACLVQMFFLHSF |
| NOV53e | IIRAnAALHEPMYLFLAMLATIDLVLSSTTLPKMLAIFWFRDQEINFFACLVQMFFLHSF |
| NOV53f | IIQADAALHEPMYLFLAMLATIDLVLSSTTLPKMLAIFWFRDQEINFFACLVQMFFLHSF |
| NOV53g | IIQADAALHEPMYLFLANLATIDLVLSSTTLPKMLAIFWFRDQEINFFACLVQMFFLHSF |
| NOV53h | ------ALHEPMYLFLAMLATIDLVLSSTTLPKMLAIFWFRDQEINFFACLVQMFFLHSF |
| NOV53i | ------ALHEPMYLFLAMLATIDLVLSSTTLPKMLAIFWFRDQEINFFACLVQMFFLHSF |
| NOV53j | ------ALHEPMYLFLAMLATIDLVLSSTTLPKMLAIFWFRDQEINFFACLVQMFFLHSF |
| NOV53k | ------ALHEPMYLFLAMLATIDLVLSSTTLPKMLAIFWFRDQEINFFACLVQMFFLHSF |
| NOV53a | SIMESAVLLAMAFDRYVAICKPLHYTTVLTGSLITKIGMAAVARAVTLMTPLPFLLRRFH |
| NOV53b | SIMESAVLLAMAFDRYVAICKPLHYTTVLTGSLITKIGMAAVARAVTLMTPLPFLLRRFH |
| NOV53c | SIMESAVLLAMAFDRYVAICKPLHYTTVLTGSLITKIGMAAVARAVTLMTPLPFLLRRFH |
| NOV53d | SIMESAVLLAMAFDRYVAICKPLHYTTVLTGSLITKIGMAAVARAVTLMTPLPFLLRRFH |
| NOV53e | SIMESAVLLAMAFDRYVAICKPLHYTTVLTGSLITKIGMAAVAWAVTLMTPLPFLLRRFH |
| NOV53f | SIMESAVLLAMAFDRYVAICKPLHYTTVLTGSLITKIGMAAVARAVTLMTPLPFLLRRFH |
| NOV53g | SIMESAVLLAMAFDRYVAICKPLHYTTVLTGSLITKIGMAAVARAVTLMTPLPFLLRRFH |
| NOV53h | SINESAVLLAMAFDRYVAICKPLHYTTVLTGSLITKIGMAAVAWAVTLMTPLPFLLRRFH |
| NOV53i | SIMESAVLLAMAFDRYVAICKPLHYTTVLTGSLITKIGMAAVAWAVTLMTPLPFLLRRFH |
| NOV53j | SIMESAVLLAMAFDRYVAICKPLHYTTVLTGSLITKIGMAAVARAVTLMTPLPFLLRRFH |
| NOV53k | SIMESAVLLAMAFDRYVAICKPLHYTTVLTGSLITKIGMAAVARAVTLMTPLPFLLRRFH |
| NOV53a | YCRGPVIAHCYCEHMAVVRLACGDTSFNNIYGIAVAMFSVVLDLLFVILSYVFILQAVLQ |
| NOV53b | YCRGPVIAHCYCEHMAVVRLACGDTSFNNIYGIAVAMFIVVLDLLFVILSYVFILQAVLQ |
| NOV53c | YCRGPVIAHCYCEHMAVVRLACGDTSFNNIYGIAVAMFIVVLDLLFVILSYVFILQAVLQ |
| NOV53d | YCRDPVIAHCYCEHMAVVRLACGDTSFNNIYGIAVAMFIVVLDLLFVILSYVFILQAVLQ |
| NOV53e | YCRGPVIAHCYCEHMAVVRLACGDTSFNNIYGIAVAMFIVVLDLLFVILSYVFILQAVLQ |
| NOV53f | YCRGPVIAHCYCEHMAVVRLACGDTSFNNIYGIAVAMFIVVLDLLFVILSYVFILQAVLQ |
| NOV53g | YCRGPVIAHCYCEHMAVVRLACGDTSFNNIYGIAVAMFIVVLDLLFVILSYVFILQAVLQ |
| NOV53h | YCRGPVIAHCYCEHMAVVRLACGDTSFNNIYGIAVAMSIVVLDLLFVILSYVFILQAVLQ |
| NOV53i | YCRGPVIAHCYCEHMAVVRLACGDTSFNNIYGIAVAMSIVVLDLLFVILSYVFILQAVLQ |
| NOV53j | YCRGPVIAHCYCEHMAVVRLACGDTSFNNIYGIAVAMFIVVLDLLFVILSYVFILQAVLQ |
| NOV53k | YCRGPVIAHCYCEHMAVVRLACGDTSFNNIYGIAVAMFIVVLDLLFVILSYVFILQAVLQ |
| NOV53a | LASQEARYKAFGTCVSHIGAILSTYTPVVISSVMHRVARHAAPRVHILLAIFYLLFPPMV |
| NOV53b | LASQEARYKAFGTCVSHIGAILSTYTPVVISSVMHRVARHAAPRVHILLAIFYLLFPPMV |
| NOV53c | LASQEARYKAFGTCASHIGAILSTYTPVVISSVNHRVARHAAPRVHILLAIFYLLFPPMV |
| NOV53d | LASQEARYKAFGTCVSHIGTILSTYTPVVISSVMHRVARHAAPRVHILLAIFYLLFPPMV |
| NOV53e | LASQEARYKAFGTCVSHIGAILSTYTPVVISSVMHRVARHAAPRVHILLAIFYLLFPPMV |
| NOV53f | LASQEARYKAFGTCVSHIGAILSTYTPVVISSVMHRVARHAAPRVHILLAIFYLLFPPMV |
| NOV53g | LASQEARYKAFGTCVSHIGAILSTYTPVVISSVMHRVARHAAPRVHILLAIFYLLFPPMV |
| NOV53h | LASQEARYKAFGTCVSHIGAILSTYTPVVISSVMHRVARHAAPRVHILLAIFYLLFPPMV |
| NOV53i | LASQEARYKAFGTCVSHIGAILSTYTPVVISSVNHRVARHAAPRVHILLAIFYLLFPPMV |
| NOV53j | LASQEARYKAFGTCVSHIGAILSTYTPVVISSVMHRVARHAAPRVHILLAIFYLLFPPMV |
| NOV53k | LASQEARYKAFGTCVSHIGAILSTYTPVVISSVNHRVARHAAPRVHILLAIFYLLFPPMV |
| NOV53a | NPIIYGVKTKQIREYVLSLFQRKNM-- |
| NOV53b | NPIIYGVKTKQIREYVLSLFQRKNMLE |
| NOV53c | NPIIYGVKTKQIREYVLSLFQRKNMLE |
| NOV53d | NPIIYGVKTKQIREYVLSLFQRKNMLE |
| NOV53e | NPIIYGVKTKQIREYVLSLFQRKNMLE |
| NOV53f | NPIIYGVKTKQIREYVLSLFQRKNMLE |
| NOV53g | NPIIYGVKTKQIREYVLSLFQRKNM-- |
| NOV53h | NPIIYGVKTKQIREYVLSLFQRKNM-- |
| NOV53i | NPIIYGVKTKQIREYVLSLFQRKNM-- |
| NOV53j | NPIIYGVKTKQIREYVLSLFQRKNM-- |
| NOV53k | NPIIYGVKTKQIREYVLSLFQRKNM-- |
| NOV53a | (SEQ ID NO: 810) |
| NOV53b | (SEQ ID NO: 812) |
| NOV53c | (SEQ ID NO: 814) |
| NOV53d | (SEQ ID NO: 816) |
| NOV53e | (SEQ ID NO: 818) |
| NOV53f | (SEQ ID NO: 820) |
| NOV53g | (SEQ ID NO: 822) |
| NOV53h | (SEQ ID NO: 824) |
| NOV53i | (SEQ ID NO: 826) |
| NOV53j | (SEQ ID NO: 828) |
| NOV53k | (SEQ ID NO: 830) |

[0657] Further analysis of the NOV53a protein yielded the following properties shown in Table 53C.

TABLE 53C
Protein Sequence Properties NOV53a

| | |
|---|---|
| SignalP analysis: | Cleavage site between residues 64 and 65 |
| PSORT II analysis: | |

| | |
|---|---|
| PSG: | a new signal peptide prediction method |
| | N-region: length 4; pos.chg 2; neg.chg 0 |
| | H-region: length 26; peak value 10.58 |
| | PSG score: 6.18 |
| GvH: | von Heijne's method for signal seq. recognition |
| | GvH score (threshold: −2.1): −3.34 |
| | possible cleavage site: between 61 and 62 |

>>> Seems to have no N-terminal signal peptide

| ALOM: | Klein et al's method for TM region allocation | | |
|---|---|---|---|
| | Init position for calculation: 1 | | |
| | Tentative number of TMS(s) for the threshold 0.5: 7 | | |
| | INTEGRAL | Likelihood = −3.29 | Transmembrane 43-59 |
| | INTEGRAL | Likelihood = −2.07 | Transmembrane 69-85 |
| | INTEGRAL | Likelihood = −1.70 | Transmembrane 104-120 |
| | INTEGRAL | Likelihood = 0.26 | Transmembrane 157-173 |
| | INTEGRAL | Likelihood = −11.09 | Transmembrane 210-226 |
| | INTEGRAL | Likelihood = 0.21 | Transmembrane 255-271 |
| | INTEGRAL | Likelihood = −3.03 | Transmembrane 284-300 |

| | |
|---|---|
| PERIPHERAL | Likelihood = 1.54 (at 21) |

| | ALOM score: −11.09 (number of TMSs: 7) |
|---|---|
| MTOP: | Prediction of membrane topology (Hartmann et al.) |
| | Center position for calculation: 50 |
| | Charge difference: −1.5 C(−1.5) − N(0.0) |
| | N >= C: N-terminal side will be inside |

>>> membrane topology: type 3a
MITDISC: discrimination of mitochondrial targeting seq

| | | | |
|---|---|---|---|
| R content: | 2 | Hyd Moment(75): | 12.17 |
| Hyd Moment(95): | 11.23 | G content: | 3 |
| D/E content: | 1 | S/T content: | 5 |
| Score: −1.65 | | | |

Gavel: prediction of cleavage sites for mitochondrial preseq

R-2 motif at 14 RRF|PG

NUCDISC: discrimination of nuclear localization signals

pat4: none
pat7: none
bipartite: none
content of basic residues: 6.8%
NLS Score: −0.47

KDEL: ER retention motif in the C-terminus: none
ER Membrane Retention Signals:

XXRR-like motif in the N-terminus: TRRF
KKXX-like motif in the C-terminus: QRKN

SKL: peroxisomal targeting signal in the C-terminus: none
PTS2: 2nd peroxisomal targeting signal: none
VAC: possible vacuolar targeting motif: found

TLPK at 87

RNA-binding motif: none
Actinin-type actin-binding motif:

type 1: none
type 2: none

NMYR: N-myristoylation pattern: none
Prenylation motif: none
memYQRL: transport motif from cell surface to Golgi: none
Tyrosines in the tail: none
Dileucine motif in the tail: none
checking 63 PROSITE DNA binding motifs: none
checking 71 PROSITE ribosomal protein motifs: none
checking 33 PROSITE prokaryotic DNA binding motifs: none
NNCN: Reinhardt's method for Cytoplasmic/Nuclear discrimination

Prediction: cytoplasmic
Reliability: 94.1

COIL: Lupas's algorithm to detect coiled-coil regions

total: 0 residues

Final Results (k = 9/23):

77.8%: endoplasmic reticulum
11.1%: nuclear
11.1%: mitochondrial

>> prediction for CG56144-01 is end (k = 9)

[0658] A search of the NOV53a protein against the Geneseq database, a proprietary database that contains sequences published in patents and patent publication, yielded several homologous proteins shown in Table 53D.

TABLE 53D
Geneseq Results for NOV53a

| | | NOV53a | Identities/ | |
|---|---|---|---|---|
| | | Residues/ | Similarities for | |
| Geneseq | Protein/Organism/Length | Match | the Matched | Expect |
| Identifier | [Patent #, Date] | Residues | Region | Value |
| AAE11904 | Human G-protein coupled | 1 . . . 322 | 318/322 (98%) | 0.0 |
| | receptor 10b (GPCR10b) protein - | 1 . . . 322 | 321/322 (98%) | |
| | Homo sapiens, 322 aa. | | | |
| | [WO200181378-A2, 01-NOV- | | | |
| | 2001] | | | |
| AAE11903 | Human G-protein coupled | 1 . . . 322 | 321/322 (99%) | 0.0 |
| | receptor 10a (GPCR10a) protein - | 1 . . . 321 | 321/322 (99%) | |
| | Homo sapiens, 321 aa. | | | |
| | [WO200181378-A2, 01-NOV- | | | |
| | 2001] | | | |
| AAU85178 | G-coupled olfactory receptor #39 - | 9 . . . 322 | 314/314 (100%) | e−180 |
| | Homo sapiens, 314 aa. | 1 . . . 314 | 314/314 (100%) | |
| | [WO200198526-A2, 27-DEC- | | | |
| | 2001] | | | |
| ABP95675 | Human GPCR polypeptide SEQ | 9 . . . 322 | 314/314 (100%) | e−180 |
| | ID NO 160 - Homo sapiens, 314 | 1 . . . 314 | 314/314 (100%) | |
| | aa. [WO200216548-A2, 28-FEB- | | | |
| | 2002] | | | |
| AAU24558 | Human olfactory receptor | 9 . . . 322 | 314/314 (100%) | e−180 |
| | AOLFR45 - Homo sapiens, 314 | 1 . . . 314 | 314/314 (100%) | |
| | aa. [WO200168805-A2, 20-SEP- | | | |
| | 2001] | | | |

[0659] In a BLAST search of public sequence databases, the NOV53a protein was found to have homology to the proteins shown in the BLASTP data in Table 53E.

TABLE 53E
Public BLASTP Results for NOV53a

| | | NOV53a | Identities/ | |
|---|---|---|---|---|
| Protein | | Residues/ | Similarities for | |
| Accession | | Match | the Matched | Expect |
| Number | Protein/Organism/Length | Residues | Portion | Value |
| Q8NGK4 | Seven transmembrane helix | 9 . . . 322 | 311/314 (99%) | e−178 |
| | receptor - Homo sapiens | 1 . . . 314 | 312/314 (99%) | |
| | (Human), 314 aa. | | | |
| Q8NGK3 | Seven transmembrane helix | 9 . . . 322 | 283/314 (90%) | e−161 |
| | receptor - Homo sapiens | 1 . . . 314 | 290/314 (92%) | |
| | (Human), 314 aa. | | | |
| Q8VH04 | Olfactory receptor MOR28-1 - | 9 . . . 322 | 273/314 (86%) | e−157 |
| | Mus musculus (Mouse), 317 aa. | 1 . . . 314 | 291/314 (91%) | |
| CAD20423 | Sequence 1 from Patent | 9 . . . 316 | 276/308 (89%) | e−154 |
| | WO0179295 Homo sapiens | 1 . . . 307 | 287/308 (92%) | |
| | (Human), 316 aa. | | | |
| Q8VG23 | Olfactory receptor MOR29-1 - | 9 . . . 319 | 172/311 (55%) | 3e−96 |
| | Mus musculus (Mouse), 315 aa. | 1 . . . 310 | 224/311 (71%) | |

[0660] PFam analysis indicates that the NOV53a protein contains the domains shown in the Table 53F.

TABLE 53F
Domain Analysis of NOV53a

| | | Identities/ | |
|---|---|---|---|
| | | Similarities | |
| Pfam | NOV53a | for the Matched | Expect |
| Domain | Match Region | Region | Value |
| 7tm_1 | 51 . . . 302 | 50/277 (18%) | 4.5e−13 |
| | | 163/277 (59%) | |

### Example 54

[0661] The NOV54 clone was analyzed, and the nucleotide and encoded polypeptide sequences are shown in Table 54A.

TABLE 54A
NOV54 Sequence Analysis

| | | |
|---|---|---|
| NOV54a, CG56146-02 | SEQ ID NO: 831 | 807 bp |

| | | |
|---|---|---|
| DNA Sequence | ORF Start: ATG at 1 | ORF Stop: end of sequence |

ATGATTCTGGACCATCGTCTCCACATGGCAATGTACTTTTTCCTCCGACATTTGTCCTTCTTAGACCT
GTGTCTCATTTCTGACACAGTCCCCAAATCCATCCTCAACTCTGTCGCCTCCACTGACTCCATCTCCT
TCCTGGGGTGTGTGTTGCAGCTCTTCTTGGTGGTACTGCTGGCTGGATCAGAGATTGGCATCCTTACT
GCCATGTCCTATGACCGCTATGCTGCCATCTGCTGCCCCCTACACTGTGAGGCTGTCATGAGCAGAGG
GCTCTGTGTCCAGTTGATGGCTCTGTCCTGGCTCAACAGAGGGGCCTTGGGACTCTTGTACACAGCTG
GAACATTCTCTCTGAATTTTTATGGCTCTGATGAGCTACATCAGTTCTTCTGCGATGTCCCTGCCCTA
CTAAAGCTCACTTGTTCTAAAGAACATGCCATCATTAGTGTCAGTGTGGCCATTGGGGTCTGTTATGC
ATTTTCATGTTTAGTTTGCATTGTAGTTTCCTATGTGTACATTTTCTCTGCTGTGTTAAGGATATCAC
AGAGACAGAGACAATCCAAAGCCTTTTCCAACTGTGTGCCTCACCTCATTGTTGTCACTGTGTTTCTT
GTAACAGGTGCTGTTGCTTATTTAAAGCCAGGGTCTGATGCACCTTCTATTCTAGACTTGCTGGTGTC
TGTGTTCTATTCTGTCGCACCTCCAACCTTGAACCCTGTTATCTACTGTCTGAAGAACAAGGACATTA
AATCCGCTCTGAGTAAAGTCCTGTGGAATGTTAGAAGCAGTGGGGTAATGAAAGATGAC

NOV54a, CG56146-02

| | | | |
|---|---|---|---|
| Protein Sequence | SEQ ID NO: 832 | 269 aa | MW at 29515.5kD |

MILDHRLHMAHYFFLRHLSFLDLCLISDTVPKSILNSVASTDSISFLGCVLQLFLVVLLAGSEIGILT
AMSYDRYAAICCPLHCEAVMSRGLCVQLMALSWLNRGALGLLYTAGTFSLNFYGSDELHQFFCDVPAL
LKLTCSKEHAIISVSVAIGVCYAFSCLVCIVVSYVYIFSAVLRISQRQRQSKAFSNCVPHLIVVTVFL
VTGAVAYLKPGSDAPSILDLLVSVFYSVAPPTLNPVIYCLKKNDIKSALSKVLNNVRSSGVMKDD

| | | |
|---|---|---|
| NOV54b, CG56146-01 | SEQ ID NO: 833 | 995 bp |

| | | |
|---|---|---|
| DNA Sequence | ORF Start: ATG at 21 | ORF Stop: TAA at 966 |

GGCGCTTATAATTTTGAACTATGACCAATCAGACACAGATGATGGAATTCTTGCTTGTGAGATTTACT
GAGAATTGGGTGCTCCTGAGGCTGCATGCTTTGCTCTTCTCACTGATCTACCTCACGGCTGTGCTGAT
GAATTTAGTCATCATTCTCCTCATGATTCTGGACCATCGTCTCCACATGGCAATGTACTTTTTCCTCC
GACATTTGTCCTTCTTAGACCTGTGTCTCATTTCTGCCACAGTCCCCAAATCCATCCTCAACTCTGTC
GCCTCCACTGACTCCATCTCCTTCCTGGGGTGTGTGTTGCAGCTCTTCTTGGTGGTACTGCTGGCTGG
ATCAGAGATTGGCATCCTTACTGCCATGTCCTATGACCGCTATGCTGCCATCTGCTGCCCCCTACACT
GTGAGGCTGTCATGAGCAGAGGGCTCTGTGTCCAGTTGATGGCTCTGTCCTGGCTCAACAGAGGGGCC
TTGGGACTCTTGTACACAGCTGGAACATTCTCTCTGAATTTTTATGGCTCTGATGAGCTACATCAGTT
CTTCTGCGATGTCCCTGCCCTACTAAAGCTCACTTGTTCTAAAGAACATGCCATCATTAGTGTCAGTG
TGGCCATTGGGGTCTGTTATGCATTTTCATGTTTAGTTTGCATTGTAGTTTCCTATGTGTACATTTTC
TCTGCTGTGTTAAGGATATCACAGAGACAGAGACAATCCAAAGCCTTTTCCAACTGTGTGCCTCACCT
CATTGTTGTCACTGTGTTTCTTGTAACAGGTGCTGTTGCTTATTTAAAGCCAGGGTCTGATGCACCTT
CTATTCTAGACTTGCTGGTGTCTGTGTTCTATTCTGTCGCACCTCCAACCTTGAACCCTGTTATCTAC
TGTCTGAAGAACAAGGACATTAAATCCGCTCTGAGTAAAGTCCTGTGGAATGTTAGAAGCAGTGGGGT
AATGAAAGATGACTAAAGTTGAAGATGGGAAGTACTTTTTTTG

NOV54b, CG56146-01

| | | | |
|---|---|---|---|
| Protein Sequence | SEQ ID NO: 834 | 315 aa | MW at 34934.2kD |

MTNQTQMMEFLLVRFTENWVLLRLHALLFSLIYLTAVLMNLVIILLMILDHRLHMAMYFFLRHLSFLD
LCLISATVPKSILNSVASTDSISFLGCVLQLFLVVLLAGSEIGILTANSYDRYAAICCPLHCEAVMSR
GLCVQLMALSWLNRGALGLLYTAGTFSLNFYGSDELHQFFCDVPALLKLTCSKEHAIISVSVAIGVCY
AFSCLVCIVVSYVYIFSAVLRISQRQRQSKAFSNCVPHLIVVTVFLVTGAVAYLKPGSDAPSILDLLV
SVFYSVAPPTLNPVIYCLKNKDIKSALSKVLWNVRSSGVMKDD

| | | |
|---|---|---|
| NOV54c, 170646057 | SEQ ID NO: 835 | 819 bp |

| | | |
|---|---|---|
| DNA Sequence | ORF Start: at 1 | ORF Stop: end of sequence |

GGATCCATGATTCTGGACCATCGTCTCCACATGGCAATGTACTTTTTCCTCCGACATTTGTCCTTCTT
AGACCTGTGTCTCATTTCTGCCACAGTCCCCAAATCCATCCTCAACTCTGTCGCCTCCACTGACTCCA
TCTCCTTCCTGGGGTGTGTGTTGCAGCTCTTCTTGGTGGTACTGCTGGCTGGATCAGAGATTGGCATC
CTTACTGCCATGTCCTATGACCGCTATGCTGCCATCTGCTGCCCCCTACACTGTGAGGCTGTCATGAG
CAGAGGGCTCTGTGTCCAGTTGATGGCTCTGTCCTGGCTCAACAGAGGGGCCTTGGGACTCTTGTACA
CAGCTGGAACATTCTCTCTGAATTTTTATGGCTCTGATGAGCTACATCAGTTCTTCTGCGATGTCCCT
GCCCTACTAAAGCTCACTTGTTCTAAAGAACATGCCATCATTAGTGTCAGTGTGGCCATTGGGGTCTG
TTATGCATTTTCATGTTTAGTTTGCATTGTAGTTTCCTATGTGTACATTTTCTCTGCTGTGTTAAGGA
TATCACAGAGACAGAGACAATCCAAAGCCTTTTCCAACTGTGTGCCTCACCTCATTGTTGTCACTGTG
TTTCTTGTAACAGGTGCTGTTGCTTATTTAAAGCCAGGGTCTGATACACCTTCTATTCTAGACTTGCT
GGTGTCTGTGTTCTATTCTGTCGCACCTCCAACCTTGAACCCTGTTATCTACTGTCTGAAGAACAAGG
ACATTAAATCCGCTCTGAGTAAAGTCCTGTGGAATGTTAGAAGCAGTGGGGTAATGAAAGATGACCTC
GAG

NOV54c, 170646057

| | | | |
|---|---|---|---|
| Protein Sequence | SEQ ID NO: 836 | 273 aa | MW at 29888.0kD |

GSMILDHRLHMAMYFFLRHLSFLDLCLISATVPKSILNSVASTDSISFLGCVLQLFLVVLLAGSEIGI
LTAMSYDRYAAICCPLHCEAVMSRGLCVQLMALSWLNRGALGLLYTAGTFSLNFYGSDELHQFFCDVP
ALLKLTCSKEHAIISVSVAIGVCYAFSCLVCIVVSYVYIFSAVLRISQRQRQSKAFSNCVPHLIVVTV
FLVTGAVAYLKPGSDTPSILDLLVSVFYSVAPPTLNPVIYCLKNKDIKSALSKVLWNVRSSGVMKDDL
E

| | | |
|---|---|---|
| NOV54d, 170646049 | SEQ ID NO: 837 | 819 bp |

| | | |
|---|---|---|
| DNA Sequence | ORF Start: at 1 | ORF Stop: end of sequence |

GGATCCATGATTCTGGACCATCGTCTCCACATGGCAATGTACTTTTTCCTCCGACATTTGTCCTTCTT
AGACCTGTGTCTCATTTCTGCCGCAGTCCCCAAATCCATCCTCAACTCTGTCGCCTCCACTGACTCCA
TCTCCTTCCTGGGGTGTGTGTTGCAGCTCTTCTTGGTGGTACTGCTGGCTGGATCAGAGATTGGCATC
CTTACTGCCATGTCCTATGACCGCTATGCTGCCATCTGCTGCCCCCTACACTGTGAGGCTGTCATGAG
CAGAGGGCTCTGTGTCCAGTTGATGGCTCTGTCCTGGCTCAACAGAGGGGCCTTGGGACTCTTGTACA
CAGCTGGAACATTCTCTCTGAATTTTTATGGCTCTGATGAGCTACATCAGTTCTTCTGCGATGTCCCT
GCCCTACTAAAGCTCACTTGTTCTAAAGAACATGCCATCATTAGTGTCAGTGTGGCCATTGGGGTCTG
TTATGCATTTTCATGTTTAGTTTGCATTGTAGTTTCCTATGTGTACATTTTCTCTGCTGTGTTAAGGA
TATCACAGAGACAGAGACAATCCAAAGCCTTTTCCAACTGTGTGCCTCACCTCATTGTTGTCACTGTG
TTTCTTGTAACAGGTGCTGTTGCTTATTTAAAGCCAGGGTCTGATGCACCTTCTATTCTAGACTTGCT
GGTGTCTGTGTTCTATTCTGTCGCACCTCCAACCTTGAACCCTGTTATCTACTGTCTGAAGAACAAGG
ACATTAAATCCGCTCTGAGTAAAGTCCTGTGGAATGTTAGAAGCAGTGGGGTAATGAAAGATGACCTC
GAG

NOV54d, 170646049

| | | | |
|---|---|---|---|
| Protein Sequence | SEQ ID NO: 838 | 273 aa | MW at 29827.9kD |

GSMILDHRLHMAMYFFLRHLSFLDLCLISAAVPKSILNSVASTDSISFLGCVLQLFLVVLLAGSEIGI
LTAMSYDRYAAICCPLHCEAVMSRGLCVQLMALSWLNRGALGLLYTAGTFSLNFYGSDELHQFFCDVP
ALLKLTCSKEHAIISVSVAIGVCYAFSCLVCIVVSYVYIFSAVLRISQRQRQSKAFSNCVPHLIVVTV
FLVTGAVAYLKPGSDAPSILDLLVSVFYSVAPPTLNPVIYCLKNKDIKSALSKVLWNVRSSGVMKDDL
E

| | | |
|---|---|---|
| NOV54e, 170646053 | SEQ ID NO: 839 | 819 bp |

| | | |
|---|---|---|
| DNA Sequence | ORF Start: at 1 | ORF Stop: end of sequence |

GGATCCATGATTCTGGACCATCGTCTCCACATGGCAATGTACTTTTTCCTCCGACATTTGTCCTTCTT
AGACCTGTGTCTCATTTCTGCCACAGTCCCCAAATCCATCCTCAACTCTGTCGCCTCCACTGACTCCA
TCTCCTTCCTGGGGTGTGTGTTGCAGCTCTTCTTGGTGGTACTGCCGGCTGGATCAGAGATTGGCATC
CTTACTGCCATGTCCTATGACCGCTATGCTGCCATCTGCTGCCCCCTACACTGTGAGGCTGTCATGAG
CAGAGGGCTCTGTGTCCAGTTGATGGCTCTGTCCTGGCTCAACAGAGGGGCCTTGGGACTCTTGTACA
CAGCTGGAACATTCTCTCTGAATTTTTATGGCTCTGATGAGCTACATCAGTTCTTCTGCGATGTCCCT
GCCCTACTAAAGCTCACTTGTTCTAAAGAACATGCCATCATTAGTGTCAGTGGGGCCATTGGGGTCTG
TTATGCATTTTCATGTTTAGTTTGCATTGTAGTTTCCTATGTGTACATTTTCTCTGCTGTGTTAAGGA
TATCACAGAGACAGAGACAATCCAAAGCCTTTTCCAACTGTGTGCCTCACCTCATTGTTGTCACTGTG
TTTCTTGTAACAGGTGCTGTTGCTTATTTAAAGCCAGGGTCTGATGCACCTTCTATTCTAGACTTGCT
GGTGTCTGTGTTCTATTCTGTCGCACCTCCAACCTTGAACCCTGTTATCTACTGTCTGAAGAACAAGG
ACATTAAATCCGCTCTGAGTAAAGTCCTGTGGAATGTTAGAAGCAGTGGGGTAATGAAAGATGACCTC
GAG

NOV54e, 170646053

| | | | |
|---|---|---|---|
| Protein Sequence | SEQ ID NO: 840 | 273 aa | MW at 29799.8kD |

GSMILDHRLHMAMYFFLRHLSFLDLCLISATVPKSILNSVASTDSISFLGCVLQLFLVVLPAGSEIGI
LTAMSYDRYAAICCPLHCEAVMSRGLCVQLMALSWLNRGALGLLYTAGTFSLNFYGSDELHQFFCDVP
ALLKLTCSKEHAIISVSGAIGVCYAFSCLVCIVVSYVYIFSAVLRISQRQRQSKAFSNCVPHLIVVTV
FLVTGAVAYLKPGSDAPSILDLLVSVFYSVAPPTLNPVIYCLKNKDIKSALSKVLWNVRSSGVMKDDL
E

| | | |
|---|---|---|
| NOV54f, 174307717 | SEQ ID NO: 841 | 960 bp |

| | | |
|---|---|---|
| DNA Sequence | ORF Start: at 1 | ORF Stop: end of sequence |

GGATCCACCATGACCAATCAGACACAGATGATGGAATTCTTGCTTGTGAGATTTACTGAGAATTGGGT
GCTCCTGAGGCTGCATGCTTTGCTCTTCTCACTGATCTACCTCACGGCTGTGCTGATGAATTTAGTCA
TCATTCTCCTCATGATTCTGGACCATCGTCTCCACATGGCAATGTACTTTTTCCTCCGACATTTGTCC
TTCTTAGACCTGTGTCTCATTTCTGCCACAGTCCCGAAATCCATCCTCAACTCTGTCGCCTCCACTGA
CTCCATCTCCTTCCTGGGGTGTGTGTTGCAGCTCTTCTTGGTGGTACTGCTGGCTGGATCAGAGATTG
GCATCCCTACTGCCATGTCCTATGACCGCTATGCTGCCATCTGCTGCCCCCTACACTGTAAGGCTGTC
ATGAGCAGAGGGCTCTGTGTCCAGTTGATGGCTCTGTCCTGGCTCAACAGAGGGGCCTTGGGACTCTT
GTACACAGCTGGAACATTCTCTCTGAATTTTTATGGCTCTGATGAGCTACATCAGTTCTTCTGCGATG
TCCCTGCCCTACTAAAGCTCACTTGTTCTAAAGAACATGCCATCATTAGTGTCAGTGTGGCCATTGGG
GTCTGTTATGCATTTTCATGTTTAGTTTGCATTGTAGTTTCCTATGTGTACATTTTCTCTGCTGTGTT
AAGGATATCACAGAGACAGAGACAATCCAAAGCCTTTTCCAACTGTGTGCCTCACCTCATTGTTGTCA
CTGTGTTTCTTGTAACAGGTGCTGTTGCTTATTTAAAGCCAGGGTCTGATGCACCTTCTATTCTAGAC
TTGCTGGTGTCTGTGTTCTATTCTGTCGCACCTCCAACCTTGAACCCTGTTATCTACTGTCTGAAGAA
CAAGGACATTAAATCCGCTCTGAGTAAAGTCCTGTGGAATGTTAGAAGCAGTGGGGTAATGAAAGATG
ACCTCGAG

NOV54f, 174307717

| | | | |
|---|---|---|---|
| Protein Sequence | SEQ ID NO: 842 | 320 aa | MW at 35404.7kD |

GSTMTNQTQMMEFLLVRFTENWVLLRLHALLFSLIYLTAVLNNLVIILLMILDHRLHMAMYFFLRHLS
FLDLCLISATVPKSILNSVASTDSISFLGCVLQLFLVVLLAGSEIGIPTANSYDRYAAICCPLHCKAV
MSRGLCVQLMALSWLNRGALGLLYTAGTFSLNFYGSDELHQFFCDVPALLKLTCSKEHAIISVSVAIG
VCYAFSCLVCIVVSYVYIFSAVLRISQRQRQSKAFSNCVPHLIVVTVFLVTGAVAYLKPGSDAPSILD
LLVSVFYSVAPPTLNPVIYCLKNKDIKSALSKVLWNVRSSGVMKDDLE

| | | |
|---|---|---|
| NOV54g, 168869383 | SEQ ID NO: 843 | 820 bp |

| | | |
|---|---|---|
| DNA Sequence | ORF Start: at 296 | ORF Stop: end of sequence |

GGATCCATGATTCTGGACCATCGTCTCCACATGGCAATGTACTTTTTCCTCCGACATTTGTCCTTCTT
AGACCTGTGTCTCATTTCTGCCACAGTCCCCAAATCCATCCTCAACTCTGTCGCCTCCACTGACTCCA
TCTCCTTCCTGGGGTGTGTGTTGCAGCTCTTCTTGGTGGTACTGCTGGCTGGATCAGAGATTGGCATC
CTTACTGCCATGTCCTATGACCGCTATGCTGCCATCTGCTGCCCCCTACACTGTGAGGCTGTCATGAG
CAGAGGGCTCTGTGTCCAGTTGATGGCTCTGTCCTGGCTCAACAGAGGGGCCTTGGGACTCTTGTACA
CAGCTGGAACATTCTCTTCTGAATTTTTATGGCTCTGATGAGCTACATCAGTTCTTCTGCGATGTCCC
TGCCCTACTAAAGCTCACTTGTTCTAAAGAACATGCCATCATTAGTGTCAGTGTGGCCATTGGGGTCT
GTTATGCATTTTCATGTTTAGTTTGCATTGTAGTTTCCTATGTGTACATTTTCTCTGCTGTGTTAAGG
ATATCACAGAGACAGAGACAATCCAAAGCCTTTTCCAACTGTGTGCCTCACCTCATTGTTGTCACTGT
GTTTCTTGTAACAGGTGCTGTTGCTTATTTAAAGCCAGGGTCTGATGCACCTTCTATTCTAGACTTGC
TGGTGTCTGTGTTCTATTCTGTCGCACCTCCAACCTTGAACCCTGTTATCTACTGTCTGAAGAACAAG
GACATTAAATCCGCTCTGAGTAAAGTCCTGTGGAATGTTAGAAGCAGTGGGGTAATGAAAGATGACCT
CGAG

NOV54g, 168869383

| | | | |
|---|---|---|---|
| Protein Sequence | SEQ ID NO: 844 | 175 aa | MW at 19239.2kD |

WLCPGSTEGPWDSCTQLEHSLLNFYGSDELHQFFCDVPALLKLTCSKEHAIISVSVAIGVCYAFSCLV
CIVVSYVYIFSAVLRISQRQRQSKAFSNCVPHLIVVTVFLVTGAVAYLKPGSDAPSILDLLVSVFYSV
APPTLNPVIYCLKNKDIKSALSKVLWNVRSSGVMKDDLE

| | | |
|---|---|---|
| NOV54h, CG56146-03 | SEQ ID NO: 845 | 945 bp |

| | | |
|---|---|---|
| DNA Sequence | ORF Start: ATG at 1 | ORF Stop: end of sequence |

ATGACCAATCAGACACAGATGATGGAATTCTTGCTTGTGAGATTTACTGAGAATTGGGTGCTCCTGAG
GCTGCATGCTTTGCTCTTCTCACTGATCTACCTCACGGCTGTGCTGATGAATTTAGTCATCATTCTCC
TCATGATTCTGGACCATCGTCTCCACATGGCAATGTACTTTTTCCTCCGACATTTGTCCTTCTTAGAC
CTGTGTCTCATTTCTGCCACAGTCCCCAAATCCATCCTCAACTCTGTCGCCTCCACTGACTCCATCTC
CTTCCTGGGGTGTGTGTTGCAGCTCTTCTTGGTGGTACTGCTGGCTGGATCAGAGATTGGCATCCTTA
CTGCCATGTCCTATGACCGCTATGCTGCCATCTGCTGCCCCCTACACTGTGAGGCTGTCATGAGCAGA
GGGCTCTGTGTCCAGTTGATGGCTCTGTCCTGGCTCAACAGAGGGGCCTTGGGACTCTTGTACACAGC
TGGAACATTCTCTCTGAATTTTTATGGCTCTGATGAGCTACATCAGTTCTTCTGCGATGTCCCTGCCC
TACTAAAGCTCACTTGTTCTAAAGAACATGCCATCATTAGTGTCAGTGTGGCCATTGGGGTCTGTTAT
GCATTTTCATGTTTAGTTTGCATTGTAGTTTCCTATGTGTACATTTTCTCTGCTGTGTTAAGGATATC
ACAGAGACAGAGACAATCCAAAGCCTTTTCCAACTGTGTGCCTCACCTCATTGTTGTCACTGTGTTTC
TTGTAACAGGTGCTGTTGCTTATTTAAAGCCAGGGTCTGATGCACCTTCTATTCTAGACTTGCTGGTG
TCTGTGTTCTATTCTGTCGCACCTCCAACCTTGAACCCTGTTATCTACTGTCTGAAGAACAAGGACAT
TAAATCCGCTCTGAGTAAAGTCCTGTGGAATGTTAGAAGCAGTGGGGTAATGAAAGATGAC

NOV54h, CG56146-03

| | | | |
|---|---|---|---|
| Protein Sequence | SEQ ID NO: 846 | 315 aa | MW at 34934.2kD |

MTNQTQMNEFLLVRFTENWVLLRLHALLFSLIYLTAVLMNLVIILLMILDHRLHMAMYFFLRHLSFLD
LCLISATVPKSILNSVASTDSISFLGCVLQLFLVVLLAGSEIGILTAMSYDRYAAICCPLHCEAVMSR
GLCVQLMALSWLNRGALGLLYTAGTFSLNFYGSDELHQFFCDVPALLKLTCSKEHAIISVSVAIGVCY
AFSCLVCIVVSYVYIFSAVLRISQRQRQSKAFSNCVPHLIVVTVFLVTGAVAYLKPGSDAPSILDLLV
SVFYSVAPPTLNPVIYCLKNKDIKSALSKVLWNVRSSGVMKDD

| | | |
|---|---|---|
| NOV54i, 262939640 | SEQ ID NO: 847 | 952 bp |

| | | |
|---|---|---|
| DNA Sequence | ORF Start: at 3 | ORF Stop: TAG at 942 |

CCAATCAGACACAGATGATGGAATTCTTGCTTGTGAGATTTACTGAGAATTGGGTGCTCCTGAGGCTG
CATGCTTTGCTCTTCTCACTGATCTACCTCACGGCTGTGCTGATGAATTTAGTCATCATTCTCCTCAT
GATTCTGGACCATCGTCTCCACATGGCAATGTACTTTTTCCTCCGACATTTGTCCTTCTTAGACCTGT
GTCTCATTTCTGCCACAGTCCCCAAATCCATCCTCAACTCTGTCGCCTCCACTGACTCCATCTCCTTC
CTGGGGTGTGTGTTGCAGCTCTTCTTGGTGGTACTGCTGGCTGGATCAGAGATTGGCATCCTTACTGC
CATGTCCTATGACCGCTATGCTGCCATCTGCTGCCCCCTACACTGTGAGGCTGTCATGAGCAGAGGGC
TCTGTGTCCAGTTGATGGCTCTGTCCTGGCTCAACAGAGGGGCCTTGGGACTCTTGTACACAGCTGGA
ACATTCTCTCTGAATTTTTATGGCTCTGATGAGCTACATCAGTTCTTCTGCGATGTCCCTGCCCTACT
AAAGCTCACTTGTTCTAAAGAACATGCCATCATTAGTGTCAGTGTGGCCATTGGGGTCTGTTATGCAT
TTTCATGTTTAGTTTGCATTGTAGTTTCCTATGTGTACATTTTCTCTGCTGTGTTAAGGATATCACAG
AGACAGAGACAATCCAAAGCCTTTTCCAACTGTGTGCCTCACCTCATTGTTGTCACTGTGTTTCTTGT
AACAGGTGCTGTTGCTTATTTAAAGCCAGGGTCTGATGCACCTTCTATTCTAGACTTGCTGGTGTCTG
TGTTCTATTCTGTCGCACCTCCAACCTTGAACCCTGTTATCTACTGTCTGAAGAACAAGGACATTAAA
TCCGCTCTGAGTAAAGTCCTGTGGAATGTTAGAAGCAGTGGGGTAATGAAAGATGACTAGCAATTGGG

NOV54i, 262939640

| | | | |
|---|---|---|---|
| Protein Sequence | SEQ ID NO: 848 | 313 aa | MW at 34701.9kD |

NQTQMMEFLLVRFTENWVLLRLHALLFSLIYLTAVLMNLVIILLMILDHRLHMAMYFFLRHLSFLDLC
LISATVPKSILNSVASTDSISFLGCVLQLFLVVLLAGSEIGILTAMSYDRYAAICCPLHCEAVMSRGL
CVQLMALSWLNRGALGLLYTAGTFSLNFYGSDELHQFFCDVPAlLKLTCSKEHAIISVSVAIGVCYAF
SCLVCIVVSYVYIFSAVIRISQRQRQSKAFSNCVPHLIVVTVFLVTGAVAYLKPGSDAPSILDLLVSV
FYSVAPPTLNPVIYCLKNKDIKSALSKVLWNVRSSGVMKDD

| | | |
|---|---|---|
| NOV54j, CG56146-04 | SEQ ID NO: 849 | 60 bp |

| | | |
|---|---|---|
| DNA Sequence | ORF Start: ATG at 1 | ORF Stop: end of sequence |

ATGATGGAATTCTTGCTTGTGAGATTTACTGAGAATTGGGTGCTCCTGAGGCTGCATGCT

NOV54j, CG56146-04

| | | | |
|---|---|---|---|
| Protein Sequence | SEQ ID NO: 850 | 20 aa | MW at 2519.0kD |

MMEFLLVRFTENWVLLRLHA

| | | |
|---|---|---|
| NOV54k, CG56146-05 | SEQ ID NO: 851 | 60 bp |

| | | |
|---|---|---|
| DNA Sequence | ORF Start: at 1 | ORF Stop: end of sequence |

GATGTCCCTGCCCTACTAAAGCTCACTTGTTCTAAAGAACATGCCATCATTAGTGTCAGT

| | | |
|---|---|---|
| NOV54l, CG561146-06 | SEQ ID NO: 853 | 952 bp |

| | | |
|---|---|---|
| DNA Sequence | ORF Start: at 3 | ORF Stop: TAG at 942 |

CCAATCAGACACAGATGATGGAATTCTTGCTTGTGAGATTTACTGAGAATTGGGTGCTCCTGAGGCTG
CATGCTTTGCTCTTCTCACTGATCTACCTCACGGCTGTGCTGATGAATTTAGTCATCATTCTCCTCAT
GATTCTGGACCATCGTCTCCACATGGCAATGTACTTTTTCCTCCGACATTTGTCCTTCTTAGACCTGT
GTCTCATTTCTGCCACAGTCCCCAAATCCATCCTCAACTCTGTCGCCTCCACTGACTCCATCTCCTTC
CTGGGGTGTGTGTTGCAGCTCTTCTTGGTGGTACTGCTGGCTGGATCAGAGATTGGCATCCTTACTGC
CATGTCCTATGACCGCTATGCTGCCATCTGCTGCCCCCTACACTGTGAGGCTGTCATGAGCAGAGGGC
TCTGTGTCCAGTTGATGGCTCTGTCCTGGCTCAACAGAGGGGCCTTGGGACTCTTGTACACAGCTGGA
ACATTCTCTCTGAATTTTTATGGCTCTGATGAGCTACATCAGTTCTTCTGCGATGTCCCTGCCCTACT
AAAGCTCACTTGTTCTAAAGAACATGCCATCATTAGTGTCAGTGTGGCCATTGGGGTCTGTTATGCAT
TTTCATGTTTAGTTTGCATTGTAGTTTCCTATGTGTACATTTTCTCTGCTGTGTTAAGGATATCACAG
AGACAGAGACAATCCAAAGCCTTTTCCAACTGTGTGCCTCACCTCATTGTTGTCACTGTGTTTCTTGT
AACAGGTGCTGTTGCTTATTTAAAGCCAGGGTCTGATGCACCTTCTATTCTAGACTTGCTGGTGTCTG
TGTTCTATTCTGTCGCACCTCCAACCTTGAACCCTGTTATCTACTGTCTGAAGAACAAGGACATTAAA
TCCGCTCTGAGTAAAGTCCTGTGGAATGTTAGAAGCAGTGGGGTAATGAAAGATGACTAGCAATTGGG

NOV54l, CG56146-06

| | | | |
|---|---|---|---|
| Protein Sequence | SEQ ID NO: 854 | 313 aa | MW at 34701.9kD |

NQTQMMEFLLVRFTENWVLLRLHALLFSLIYLTAVLMNLVIILLMILDHRLHMAMYFFLRHLSFLDLC
LISATVPKSILNSVASTDSISFLGCVLQLFLVVLLAGSEIGILTANSYDRYAAICCPLHCEAVMSRGL
CVQLMALSWLNRGALGLLYTAGTFSLNFYGSDELHQFFCDVPALLKLTCSKEHAIISVSVAIGVCYAF
SCLVCIVVSYVYIFSAVLRISQRQRQSKAFSNCVPHLIVVTVFLVTGAVAYLKPGSDAPSILDLLVSV
FYSVAPPTLNPVIYCLKNKDIKSALSKVLWNVRSSGVMKDD

[0662] A ClustalW comparison of the above protein sequences yields the following sequence alignment shown in Table 54B.

TABLE 54B
Comparison of the NOV54 protein sequences.

| | |
|---|---|
| NOV54a | -------------------------------------------------MILDHRLHMAM |
| NOV54b | ---MTNQTQMMEFLLVRFTENWVLLRLHALLFSLIYLTAVLMNLVIILLMILDHRLHMAM |
| NOV54c | -----------------------------------------------GSMILDHRLHMAM |
| NOV54d | -----------------------------------------------GSMILDHRLHMAM |
| NOV54e | -----------------------------------------------GSMILDHRLHMAM |
| NOV54f | GSTMTNQTQMMEFLLVRFTENWVLLRLHALLFSLIYLTAVLMNLVIILLMILDHRLHMAM |
| NOV54g | ------------------------------------------------------------ |
| NOV54h | ---MTNQTQMMEFLLVRFTENWVLLRLHALLFSLIYLTAVLMNLVIILLMILDHRLHMAM |
| NOV54i | -----NQTQMMEFLLVRFTENWVLLRLHALLFSLIYLTAVLMNLVIILLMILDHRLHMAM |
| NOV54j | ------------------------------------------------------------ |
| NOV54k | ------------------------------------------------------------ |
| NOV54l | -----NQTQMMEFLLVRFTENWVLLRLHALLFSLIYLTAVLMNLVIILLMILDHRLHMAM |
| NOV54a | YFFLRHLSFLDLCLISDTVPKSILNSVASTDSISFLGCVLQLFLVVLLAGSEIGILTAMS |
| NOV54b | YFFLRHLSFLDLCLISATVPKSILNSVASTDSISFLGCVLQLFLVVLLAGSEIGILTAMS |
| NOV54c | YFFLRHLSFLDLCLISATVPKSILNSVASTDSISFLGCVLQLFLVVLLAGSEIGILTAMS |
| NOV54d | YFFLRHLSFLDLCLISAAVPKSILNSVASTDSISFLGCVLQLFLVVLLAGSEIGILTAMS |
| NOV54e | YFFLRHLSFLDLCLISATVPKSILNSVASTDSISFLGCVLQLFLVVLPAGSEIGILTAMS |
| NOV54f | YFFLRHLSFLDLCLISATVPKSILNSVASTDSISFLGCVLQLFLVVLLAGSEIGIPTAMS |
| NOV54g | ------------------------------------------------------------ |
| NOV54h | YFFLRHLSFLDLCLISATVPKSILNSVASTDSISFLGCVLQLFLVVLLAGSEIGILTAMS |
| NOV54i | YFFLRHLSFLDLCLISATVPKSILNSVASTDSISFLGCVLQLFLVVLLAGSEIGILTAMS |
| NOV54j | ------------------------------------------------------------ |
| NOV54k | ------------------------------------------------------------ |
| NOV54l | YFFLRHLSFLDLCLISATVPKSILNSVASTDSISFLGCVLQLFLVVLLAGSEIGILTAMS |
| NOV54a | YDRYAAICCPLHCEAVMSRGLCVQLMALSWLNRGALGLLYTAGTFSLNFYGSDELHQFFC |
| NOV54b | YDRYAAICCPLHCEAVMSRGLCVQLMALSWLNRGALGLLYTAGTFSLNFYGSDELHQFFC |
| NOV54c | YDRYAAICCPLHCEAVMSRGLCVQLMALSWLNRGALGLLYTAGTFSLNFYGSDELHQFFC |
| NOV54d | YDRYAAICCPLHCEAVMSRGLCVQLMALSWLNRGALGLLYTAGTFSLNFYGSDELHQFFC |
| NOV54e | YDRYAAICCPLHCEAVMSRGLCVQLMALSWLNRGALGLLYTAGTFSLNFYGSDELHQFFC |
| NOV54f | YDRYAAICCPLHCKAVMSRGLCVQLMALSWLNRGALGLLYTAGTFSLNFYGSDELHQFFC |
| NOV54g | ------WLCPGSTEGPWDS--CTQLEHS-----------------LLNFYGSDELHQFFC |
| NOV54h | YDRYAAICCPLHCEAVMSRGLCVQLMALSWLNRGALGLLYTAGTFSLNFYGSDELHQFFC |
| NOV54i | YDRYAAICCPLHCEAVMSRGLCVQLMALSWLNRGALGLLYTAGTFSLNFYGSDELHQFFC |
| NOV54j | --------------------------------------------------MMEFLLVRFT |
| NOV54k | ------------------------------------------------------------ |
| NOV54l | YDRYAAICCPLHCEAVMSRGLCVQLMALSWLNRGALGLLYTAGTFSLNFYGSDELHQFFC |
| NOV54a | DVPALLKLTCSKEHAIISVSVAIGVCYAFSCLVCIVVSYVYIFSAVLRISQRQRQSKAFS |
| NOV54b | DVPALLKLTCSKEHAIISVSVAIGVCYAFSCLVCIVVSYVYIFSAVLRISQRQRQSKAFS |
| NOV54c | DVPALLKLTCSKEHAIISVSVAIGVCYAFSCLVCIVVSYVYIFSAVLRISQRQRQSKAFS |
| NOV54d | DVPALLKLTCSKEHAIISVSVAIGVCYAFSCLVCIVVSYVYIFSAVLRISQRQRQSKAFS |
| NOV54e | DVPALLKLTCSKEHAIISVSGAIGVCYAFSCLVCIVVSYVYIFSAVLRISQRQRQSKAFS |
| NOV54f | DVPALLKLTCSKEHAIISVSVAIGVCYAFSCLVCIVVSYVYIFSAVLRISQRQRQSKAFS |
| NOV54g | DVPALLKLTCSKEHAIISVSVAIGVCYAFSCLVCIVVSYVYIFSAVLRISQRQRQSKAFS |
| NOV54h | DVPALLKLTCSKEHAIISVSVAIGVCYAFSCLVCIVVSYVYIFSAVLRISQRQRQSKAFS |
| NOV54i | DVPALLKLTCSKEHAIISVSVAIGVCYAFSCLVCIVVSYVYIFSAVLRISQRQRQSKAFS |
| NOV54j | ENWVLLRLHA-------------------------------------------------- |
| NOV54k | DVPALLKLTCSKEHAIISVS---------------------------------------- |
| NOV54l | DVPALLKLTCSKEHAIISVSVAIGVCYAFSCLVCIVVSYVYIFSAVLRISQRQRQSKAFS |
| NOV54a | NCVPHLIVVTVFLVTGAVAYLKPGSDAPSILDLLVSVFYSVAPPTLNPVIYCLKNKDIKS |
| NOV54b | NCVPHLIVVTVFLVTGAVAYLKPGSDAPSILDLLVSVFYSVAPPTLNPVIYCLKNKDIKS |
| NOV54c | NCVPHLIVVTVFLVTGAVAYLKPGSDTPSILDLLVSVFYSVAPPTLNPVIYCLKNKDIKS |
| NOV54d | NCVPHLIVVTVFLVTGAVAYLKPGSDAPSILDLLVSVFYSVAPPTLNPVIYCLKNKDIKS |
| NOV54e | NCVPHLIVVTVFLVTGAVAYLKPGSDAPSILDLLVSVFYSVAPPTLNPVIYCLKNKDIKS |
| NOV54f | NCVPHLIVVTVFLVTGAVAYLKPGSDAPSILDLLVSVFYSVAPPTLNPVIYCLKNKDIKS |
| NOV54g | NCVPHLIVVTVFLVTGAVAYLKPGSDAPSILDLLVSVFYSVAPPTLNPVIYCLKNKDIKS |
| NOV54h | NCVPHLIVVTVFLVTGAVAYLKPGSDAPSILDLLVSVFYSVAPPTLNPVIYCLKNKDIKS |
| NOV54i | NCVPHLIVVTVFLVTGAVAYLKPGSDAPSILDLLVSVFYSVAPPTLNPVIYCLKNKDIKS |
| NOV54j | ------------------------------------------------------------ |
| NOV54k | ------------------------------------------------------------ |
| NOV54l | NCVPHLIVVTVFLVTGAVAYLKPGSDAPSILDLLVSVFYSVAPPTLNPVIYCLKNKDIKS |
| NOV54a | ALSKVLWNVRSSGVMKDD-- |
| NOV54b | ALSKVLWNVRSSGVMKDD-- |
| NOV54c | ALSKVLWNVRSSGVMKDDLE |
| NOV54d | ALSKVLWNVRSSGVMKDDLE |
| NOV54e | ALSKVLWNVRSSGVMKDDLE |
| NOV54f | ALSKVLWNVRSSGVMKDDLE |
| NOV54g | ALSKVLWNVRSSGVMKDDLE |
| NOV54h | ALSKVLWNVRSSGVMKDD-- |
| NOV54i | ALSKVLWNVRSSGVMKDD-- |
| NOV54j | -------------------- |
| NOV54k | -------------------- |
| NOV54l | ALSKVLWNVRSSGVMKDD-- |
| NOV54a | (SEQ ID NO: 832) |
| NOV54b | (SEQ ID NO: 834) |
| NOV54c | (SEQ ID NO: 836) |
| NOV54d | (SEQ ID NO: 838) |
| NOV54e | (SEQ ID NO: 840) |
| NOV54f | (SEQ ID NO: 842) |
| NOV54g | (SEQ ID NO: 844) |
| NOV54h | (SEQ ID NO: 846) |
| NOV54i | (SEQ ID NO: 848) |
| NOV54j | (SEQ ID NO: 850) |
| NOV54k | (SEQ ID NO: 852) |
| NOV54l | (SEQ ID NO: 854) |

[0663] Further analysis of the NOV54a protein yielded the following properties shown in Table 54C.

TABLE 54C
Protein Sequence Properties NOV54a

| | |
|---|---|
| SignalP analysis: | Cleavage site between residues 70 and 71 |
| PSORT II analysis: | |

| | |
|---|---|
| PSG: | a new signal peptide prediction method |
| | N-region: length 6; pos.chg 1; neg.chg 1 |
| | H-region: length 9; peak value 7.79 |
| | PSG score: 3.39 |
| GvH: | von Heijne's method for signal seq. recognition |
| | GvH score (threshold: −2.1): −2.72 |
| | possible cleavage site: between 59 and 60 |

>>> Seems to have no N-terminal signal peptide

| ALOM: | Klein et al's method for TM region allocation | | |
|---|---|---|---|
| | Init position for calculation: 1 | | |
| | Tentative number of TMS(s) for the threshold 0.5: 4 | | |
| | INTEGRAL | Likelihood = −9.66 | Transmembrane 44-60 |
| | INTEGRAL | Likelihood = −9.71 | Transmembrane 152-168 |
| | INTEGRAL | Likelihood = −5.79 | Transmembrane 193-209 |
| | INTEGRAL | Likelihood = 0.16 | Transmembrane 221-237 |

| | |
|---|---|
| PERIPHERAL | Likelihood = 1.11 (at 10) |

| | ALOM score: −9.71 (number of TMSs: 4) |
|---|---|
| MTOP: | Prediction of membrane topology (Hartmann et al.) |
| | Center position for calculation: 51 |
| | Charge difference: 0.0 C(−1.0) − N(−1.0) |
| | N >= C: N-terminal side will be inside |

>>> membrane topology: type 3a
MITDISC: discrimination of mitochondrial targeting seq

| | | | |
|---|---|---|---|
| R content: | 2 | Hyd Moment(75): | 6.56 |
| Hyd Moment(95): | 1.99 | G content: | 0 |
| D/E content: | 2 | S/T content: | 1 |
| Score: −5.34 | | | |

Gavel: prediction of cleavage sites for mitochondrial preseq

R-2 motif at 26 LRH|LS

NUCDISC: discrimination of nuclear localization signals

pat4: none
pat7: none
bipartite: none
content of basic residues: 7.1%
NLS Score: −0.47

KDEL: ER retention motif in the C-terminus: none
ER Membrane Retention Signals:

KKXX-like motif in the C-terminus: VMKD

SKL: peroxisomal targeting signal in the C-terminus: none
PTS2: 2nd peroxisomal targeting signal: none
VAC: possible vacuolar targeting motif: none
RNA-binding motif: none
Actinin-type actin-binding motif:

type 1: none
type 2: none

NMYR: N-myristoylation pattern: none
Prenylation motif: none
memYQRL: transport motif from cell surface to Golgi: none
Tyrosines in the tail: none
Dileucine motif in the tail: none
checking 63 PROSITE DNA binding motifs: none
checking 71 PROSITE ribosomal protein motifs: none
checking 33 PROSITE prokaryotic DNA binding motifs: none
NNCN: Reinhardt's method for Cytoplasmic/Nuclear discrimination

Prediction: cytoplasmic
Reliability: 94.1

COIL: Lupas's algorithm to detect coiled-coil regions

total: 0 residues

Final Results (k = 9/23):

66.7%: endoplasmic reticulum
33.3%: mitochondrial

>> prediction for CG56146-02 is end (k = 9)

[0664] A search of the NOV54a protein against the Geneseq database, a proprietary database that contains sequences published in patents and patent publication, yielded several homologous proteins shown in Table 54D.

TABLE 54D
Geneseq Results for NOV54a

| | | NOV54a | Identities/ | |
|---|---|---|---|---|
| | | Residues/ | Similarities for | |
| Geneseq | Protein/Organism/Length | Match | the Matched | Expect |
| Identifier | [Patent #, Date] | Residues | Region | Value |
| AAU11100 | Human novel G protein-coupled | 1 . . . 269 | 268/269 (99%) | e−152 |
| | receptor, NOV7 - Homo sapiens, | 47 . . . 315 | 268/269 (99%) | |
| | 315 aa. [WO200177177-A2, 18- | | | |
| | OCT-2001] | | | |
| AAU85251 | G-coupled olfactory receptor #112 - | 1 . . . 269 | 268/269 (99%) | e−152 |
| | Homo sapiens, 315 aa. | 47 . . . 315 | 268/269 (99%) | |
| | [WO200198526-A2, 27-DEC- | | | |
| | 2001] | | | |
| AAU95586 | Human olfactory and pheromone | 1 . . . 269 | 268/269 (99%) | e−152 |
| | G protein-coupled receptor #73 - | 47 . . . 315 | 268/269 (99%) | |
| | Homo sapiens, 315 aa. | | | |
| | [WO200224726-A2, 28-MAR- | | | |
| | 2002] | | | |
| AAU24631 | Human olfactory receptor | 1 . . . 269 | 268/269 (99%) | e−152 |
| | AOLFR125 - Homo sapiens, 315 | 47 . . . 315 | 268/269 (99%) | |
| | aa. [WO200168805-A2, 20-SEP- | | | |
| | 2001] | | | |
| ABP95851 | Human GPCR polypeptide SEQ | 1 . . . 267 | 266/267 (99%) | e−151 |
| | ID NO 512 - Homo sapiens, 314 | 47 . . . 313 | 266/267 (99%) | |
| | aa. [WO200216548-A2, 28-FEB- | | | |
| | 2002] | | | |

[0665] In a BLAST search of public sequence databases, the NOV54a protein was found to have homology to the proteins shown in the BLASTP data in Table 54E.

TABLE 54E
Public BLASTP Results for NOV54a

| | | NOV54a | Identities/ | |
|---|---|---|---|---|
| Protein | | Residues/ | Similarities for | |
| Accession | | Match | the Matched | |
| Number | Protein/Organism/Length | Residues | Portion | Expect Value |
| Q8NGZ2 | Seven transmembrane helix | 1 . . . 269 | 268/269 (99%) | e−152 |
| | receptor - Homo sapiens | 47 . . . 315 | 268/269 (99%) | |
| | (Human), 315 aa. | | | |
| Q96R53 | Olfactory receptor - Homo | 20 . . . 236 | 216/217 (99%) | e−120 |
| | sapiens (Human), 217 aa | 1 . . . 217 | 216/217 (99%) | |
| | (fragment). | | | |
| CAD35484 | Sequence 23 from Patent | 3 . . . 257 | 134/255 (52%) | 6e−77 |
| | WO0208289 - Homo sapiens | 49 . . . 303 | 181/255 (70%) | |
| | (Human), 314 aa. | | | |
| Q8NHC5 | Seven transmembrane helix | 3 . . . 257 | 138/259 (53%) | 2e−76 |
| | receptor - Homo sapiens | 49 . . . 302 | 192/259 (73%) | |
| | (Human), 309 aa. | | | |
| CAD35483 | Sequence 21 from Patent | 3 . . . 257 | 134/255 (52%) | 3e−76 |
| | WO0208289 - Homo sapiens | 49 . . . 303 | 180/255 (70%) | |
| | (Human), 314 aa. | | | |

[0666] PFam analysis indicates that the NOV54a protein contains the domains shown in the Table 54F.

TABLE 54F
Domain Analysis of NOV54a

| | | Identities/ | |
|---|---|---|---|
| | | Similarities | |
| Pfam | NOV54a | for the Matched | Expect |
| Domain | Match Region | Region | Value |
| 7tm_1 | 1 . . . 242 | 53/277 (19%) | 8.5e−07 |
| | | 162/277 (58%) | |

### Example 55

[0667] The NOV55 clone was analyzed, and the nucleotide and encoded polypeptide sequences are shown in Table 55A.

TABLE 55A
NOV55 Sequence Analysis

| | | |
|---|---|---|
| NOV55a, CG56258-04 | SEQ ID NO: 855 | 2828 bp |

| | | |
|---|---|---|
| DNA Sequence | ORF Start: ATG at 63 | ORF Stop: TAA at 2826 |

GTCTCTGGCCTATCAGGAGGACAACTGGTGCTGCAATAGAAGCCAGTGGCTAAGTCTCGTGTATGGCG
TGGTTAAGGTTGCAGCCTCTCACCTCTGCCTTCCTCCATTTTGGGCTGGTTACCTTTGTGCTCTTCCT
GAATGGTCTTCGAGCAGAGGCTGGTGGCTCAGGGGACGTGCCAAGCACAGGGCAGAACAATGAGTCCT
GTTCAGGGTCATCGGACTGCAAGGAGGGTGTCATCCTGCCAATCTGGTACCCGGAGAACCCTTCCCTT
GGGGACAAGATTGCCAGGGTCATTGTCTATTTTGTGGCCCTGATATACATGTTCCTTGGGGTGTCCAT
CATTGCTGACCGCTTCATGGCATCTATTGAAGTCATCACCTCTCAAGAGAGGGAGGTGACAATTAAGA
AACCCAATGGAGAAACCAGCACAACCACTATTCGGGTCTGGAATGAAACTGTCTCCAACCTGACCCTT
ATGGCCCTGGGTTCCTCTGCTCCTGAGATACTCCTCTCTTTAATTGAGGTGTGTGGTCATGGGTTCAT
TGCTGGTGATCTGGGACCTTCTACCATTGTAGGGAGTGCAGCCTTCAACATGTTCATCATCATTGGCA
TCTGTGTCTACGTGATCCCAGACGGAGAGACTCGCAAGATCAAACATCTACGAGTCTTCTTCATCACC
GCTGCTTGGAGTATCTTTGCCTACATCTGGCTCTATATGATTCTGGCAGTCTTCTCCCCTGGTGTGGT
CCAGGTTTGGGAAGGCCTCCTCACTCTCTTCTTCTTTCCAGTGTGTGTCCTTCTGGCCTGGGTGGCAG
ATAAACGACTGCTCTTCTACAAATACATGCACAAAAAGTACCGCACAGACAAACACCGAGGAATTATC
ATAGAGACAGAGGGTGACCACCCTAAGGGCATTGAGATGGATGGGAAAATGATGAATTCCCATTTTCT
GATGGGAACCTGGTGCCCCTGGAAGGGAAGGAAGTGGATGAGTCCCGCAGAGAGATGATCCGGAATTC
TCAAGGATCTGAAGCAAAAACACCCAGAGAAGGACTTAGATCAGCTGGTGGAGATGGCCAATTACTAT
GCTCTTTCCCACCAACAGAAGAGCCGCGCCTTCTACCGTATCCAAGCCACTCGTATGATGACTGGTGC
AGGCAATATCCTGAAGAAACATGCAGCAGAACAAGCCAAGAAGGCCTCCAGCATGAGCGAGGTGCACA
CCGATGAGCCTGAGGACTTTATTTCCAAGGTCTTCTTTGACCCATGTTCTTACCAGTGCCTGGAGAAC
TGTGGGGCTGTACTCCTGACAGTGGTGAGGAAAGGGGGAGACATGTCAAAGACCATGTATGTGGACTA
CAAAACAGAGGATGGTTCTGCCAATGCAGGGGCTGACTATGAGTTCACAGAGGGCACGGTGGTTCTGA
AGCCAGGAGAGACCCAGAAGGAGTTCTCCGTGGGCATAATTGATGACGACATTTTTGAGGAGGATGAA
CACTTCTTTGTAAGGTTGAGCAATGTCCGCATAGAGGAGGAGCAGCCAGAGGAGGGGATGCCTCCAGC
AATATTCAACAGTCTTCCCTTGCCTCGGGCTGTCCTAGCCTCCCCTTGTGTGGCCACAGTTACCATCT
TGGATGATGACCATGCAGGCATCTTCACTTTTGAATGTGATACTATTCATGTCAGTGAGAGTATTGGT
GTTATGGAGGTCAAGGTTCTGCGGACATCAGGTGCCCGGGGTACAGTCATCGTCCCCTTTAGGACAGT
AGAAGGGACAGCCAAGGGTGGCGGTGAGGACTTTGAAGACACATATGGGGAGTTGGAATTCAAGAATG
ATGAAACTGTGAAAACCATAAGGGTTAAAATAGTAGATGAGGAGGAATACGAAAGGCAAGAGAATTTC
TTCATTGCCCTTGGTGAACCGAAATGGATGGAACGTGGAATATCAGATGTGACAGACAGGAAGCTGAC
TATGGAAGAAGAGGAGGCCAAGAGGATAGCAGAGATGGGAAAGCCAGTATTGGGTGAACACCCCAAAC
TAGAACTCATCATTGAAGAGTCCTATGAGTTCAAGACTACGGTGGACAAACTGATCAAGAAGACAAAC
CTGGCCTTGGTTGTGGGGACCCATTCCTGGAGGGACCAGTTCATGGAGGCCATCACCGTCAGTGCAGC
AGGGGATGAGGATGAGGATGAATCCGGGGAGGAGAGGCTGCCCTCCTGCTTTGACTACGTCATGCACT
TCCTGACTGTCTTCTGGAAGGTGCTGTTTGCCTGTGTGCCCCCCACAGAGTACTGCCACGGCTGGGCC
TGCTTCGCCGTCTCCATCCTCATCATTGGCATGCTCACCGCCATCATTGGGGACCTGGCCTCGCACTT
CGGCTGCACCATTGGTCTCAAAGATTCAGTCACAGCTGTTGTTTTCGTGGCATTTGGCACCTCTGTCC
CAGATACGTTTGCCAGCAAAGCTGCTGCCCTCCAGGATGTATATGCAGACGCCTCCATTGGCAACGTG
ACGGGCAGCAACGCCGTCAATGTCTTCCTGGGCATCGGCCTGGCCTGGTCCGTGGCCGCCATCTACTG
GGCTCTGCAGGGACAGGAGTTCCACGTGTCGGCCGGCACACTGGCCTTCTCCGTCACCCTCTTCACCA
TCTTTGCATTTGTCTGCATCAGCGTGCTCTTGTACCGAAGGCGGCCGCACCTGGGAGGGGAGCTTGGT
GGCCCCCGTGGCTGCAAGCTCGCCACAACATGGCTCTTTGTGAGCCTGTGGCTCCTCTACATACTCTT
TGCCACACTAGAGGCCTATTGCTACATCAAGGGGTTCTAA

NOV55a, CG56258-04

| | | | |
|---|---|---|---|
| Protein Sequence | SEQ ID NO: 856 | 921 aa | MW at 1024 13.7kD |

MAWLRLQPLTSAFLHFGLVTFVLFLNGLRAEAGGSGDVPSTGQNNESCSGSSDCKEGVILPIWYPENP
SLGDKIARVIVYFVALIYMFLGVSIIADRFMASIEVITSQEREVTIKKPNGETSTTTIRVWNETVSNL
TLMALGSSAPEILLSLIEVCGHGFIAGDLGPSTIVGSAAFNMFIIIGICVYVIPDGETRKIKHLRVFF
ITAAWSIFAYIWLYMILAVFSPGVVQVWEGLLTLFFFPVCVLLAWVADKRLLFYKYMHKKYRTDKHRG
IIIETEGDHPKGIEMDGKMMNSHFLDGNLVPLEGKEVDESRREMIRILKDLKQKHPEKDLDQLVEMAN
YYALSHQQKSRAFYRIQATRMMTGAGNILKKHAAEQAKKASSMSEVHTDEPEDFISKVFFDPCSYQCL
ENCGAVLLTVVRKGGDMSKTMYVDYKTEDGSANAGADYEFTEGTVVLKPGETQKEFSVGIIDDDIFEE
DEHFFVRLSNVRIEEEQPEEGMPPAIFNSLPLPRAVLASPCVATVTILDDDHAGIFTFECDTIHVSES
IGVMEVKVLRTSGARGTVIVPFRTVEGTAKGGGEDFEDTYGELEFKNDETVKTIRVKIVDEEEYERQE
NFFIALGEPKWMERGISDVTDRKLTMEEEEAKRIAEMGKPVLGEHPKLEVIIEESYEFKTTVDKLIKK
TNLALVVGTHSWRDQFMEAITVSAAGDEDEDESGEERLPSCFDYVMHFLTVFWKVLFACVPPTEYCHG
WACFAVSILIIGMLTAIIGDLASHFGCTIGLKDSVTAVVFVAFGTSVPDTFASKAAALQDVYADASIG
NVTGSNAVNVFLGIGLAWSVAAIYWALQGQEFHVSAGTLAFSVTLFTIFAFVCISVLLYRRRPHLGGE
LGGPRGCKLATTWLFVSLWLLYILFATLEAYCYIKGF

| | | |
|---|---|---|
| NOV55b, CG56258-02 | SEQ ID NO: 857 | 2840 bp |

| | | |
|---|---|---|
| DNA Sequence | ORF Start: ATG at 63 | ORF Stop: TAA at 2838 |

GTCTCTGGCCTATCAGGAGGACAACTGGTGCTGCAATAGAAGCCAGTGGCTAAGTCTCGTGTATGGCG
TGGTTAAGGTTGCAGCCTCTCACCTCTGCCTTCCTCCATTTTGGGCTGGTTACCTTTGTGCTCTTCCT
GAATGGTCTTCGAGCAGAGGCTGGTGGCTCAGGGGACGTGCCAAGCACAGGGCAGAACAATGAGTCCT
GTTCAGGGTCATCGGACTGCAAGGAGGGTGTCATCCTGCCAATCTGGTACCCGGAGAACCCTTCCCTT
GGGGACAAGATTGCCAGGGTCATTGTCTATTTTGTGGCCCTGATATACATGTTCCTTGGGGTGTCCAT
CATTGCTGACCGCTTCATGGCATCTATTGAAGTCATCACCTCTCAAGAGAGGGAGGTGACAATTAAGA
AACCCAATGGAGAAACCAGCACAACCACTATTCGGGTCTGGAATGAAACTGTCTCCAACCTGACCCTT
ATGGCCCTGGGTTCCTCTGCTCCTGAGATACTCCTCTCTTTAATTGAGGTGTGTGGTCATGGGTTCAT
TGCTGGTGATCTGGGACCTTCTACCATTGTAGGGAGTGCAGCCTTCAACATGTTCATCATCATTGGCA
TCTGTGTCTACGTGATCCCAGACGGAGAGACTCGCAAGATCAAGCATCTACGAGTCTTCTTCATCACC
GCTGCTTGGAGTATCTTTGCCTACATCTGGCTCTATATGATTCTGGCAGTCTTCTCCCCTGGTGTGGT
CCAGGTTTGGGAAGGCCTCACTGCTCTCTTCTTCTTTCCAGTGTGTGTCCTTCTGGCCTGGGTGGCAG
ATAAACGACTGCTCTTCTACAAATACATGCACAAAAAGTACCGCACAGACAAACACCGAGGAATTATC
ATAGAGACAGAGGGTGACCACCCTAAGGGCATTGAGATGGGAAAATGGGTGATGAATTCCCATTTTCT
AGATGGGAACCTGGTGCCCCTGGAGGGAAGGGAAGTGGATGAGTCCCGCAGAGAGATGATCCGGATTC
TCAAGGATCTGAAGCAAAAACACCCAGAGAAGGACTTAGATCAGCTGGTGGAGATGGCCAATTACTAT
GCTCTTTCCCACCAACAGAAGAGCCGTGCCTTCTACCGTATCCAAGCCACTCGTATGATGACTGGTGC
AGGCAATATCCTGAAGAAACATGCAGCAGAACAAGCCAAGAAGGCCTCCAGCATGAGCGAGGTGCACA
CCGATGAGCCTGAGGACTTTATTTCCAAGGTCTTCTTTGACCCATGTTCTTACCAGTGCCTGGAGAAC
TGTGGGGCTGTACTCCTGACAGTGGTGAGGAAAGGGGGAGACATGTCAAAGACCATGTATGTGGACTA
CAAAACAGAGGATGGTTCTGCCAATGCAGGGGCTGACTATGAGTTCACAGAGGGCACGGTGGTTCTGA
AGCCAGGAGAGACCCAGAAGGAGTTCTCCGTGGGCATAATTGATGACGACATTTTTGAGGAGGATGAA
CACTTCTTTGTAAGGTTGAGCAATGTCCGCATAGAGGAGGAGCAGCCAGAGGAGGGGATGCCTCCAGC
AATATTCAACAGTCTTCCCTTGCCTCGGGCTGTCCTAGCCTCCCCTTGTGTGGCCACAGTTACCATCT
TGGATGATGACCATGCAGGCATCTTCACTTTTGAATGTGATACTATTCATGTCAGTGAGAGTATTGGT
GTTATGGAGGTCAAGGTTCTGCGGACATCAGGTGCCCGGGGTACAGTCATCGTCCCCTTTAGGACAGT
AGAAGGGACAGCCAAGGGTGGCGGTGAGGACTTTGAAGACACATATGGGGAGTTGGAATTCAAGAATG
ATGAAACTGTCAAAACAATTCACATCAAGGTAATTGATGATGAGGCATATGAGAAAAACAAGAATTAC
TTCATTGAGATGATGGGCCCCCGCATGGTGGATATGAGTTTTCAGAAAGCGCTCCTGTTATCTCCAGA
CAGGAAGCTGACTATGGAAGAAGAGGAGGCCAAGAGGATAGCAGAGATGGGAAAGCCAGTATTGGGTG
AACACCCCAAACTAGAAGTCATCATTGAAGAGTCCTATGAGTTCAAGACTACGGTGGACAAACTGATC
AAGAAGACAAACCTGGCCTTGGTTGTGGGGACCCATTCCTGGAGGGACCAGTTCATGGAGGCCATCAC
CGTCAGTGCAGCAGGGGATGAGGATGAGGATGAATCCGGGGAGGAGAGGCTGCCCTCCTGCTTTGACT
ACGTCATGCACTTCCTGACTGTCTTCTGGAAGGTGCTGTTTGCCTGTGTGCCCCCCACAGAGTACTGC
CACGGCTGGGCCTGCTTCGCCGTCTCCATCCTCATCATTGGCATGCTCACCGCCATCATTGGGGACCT
GGCCTCGCACTTCGGCTGCACCATTGGTCTCAAAGATTCAGTCACAGCTGTTGTTTTCGTGGCATTTG
GCACCTCTGTCCCAGATACGTTTGCCAGCAAAGCTGCTGCCCTCCAGGATGTATATGCAGACGCCTCC
ATTGGCAACGTGACGGGCAGCAACGCCGTCAATGTCTTCCTGGGCATCGGCCTGGCCTGGTCCGTGGC
CGCCATCTACTGGGCTCTGCAGGGACAGGAGTTCCACGTGTCGGCCGGCACACTGGCCTTCTCCGTCA
CCCTCTTCACCATCTTTGCATTTGTCTGCATCAGCGTGCTCTTGTACCGAAGGCGGCCGCACCTGGGA
GGGGAGCTTGGTGGCCCCCGTGGCTGCAAGCTCGCCACAACATGGCTCTTTGTGAGCCTGTGGCTCCT
CTACATACTCTTTGCCACACTAGAGGCCTATTGCTACATCAAGGGGTTCTAA

NOV55b, CG56258-02

| | | | |
|---|---|---|---|
| Protein Sequence | SEQ ID NO: 858 | 925 aa | MW at 102802.3kD |

MAWLRLQPLTSAFLHFGLVTFVLFLNGLRAEAGGSGDVPSTGQNNESCSGSSDCKEGVILPIWYPENP
SLGDKIARVIVYFVALIYMFLGVSIIADRFMASIEVITSQEREVTIKKPNGETSTTTIRVWNETVSNL
TLMALGSSAPEILLSLIEVCGHGFIAGDLGPSTIVGSAAFNMFIIIGICVYVIPDGETRKIKHLRVFF
ITAAWSIFAYIWLYMILAVFSPGVVQVWEGLLTLFFFPVCVLLAWVADKRLLFYKYMHKKYRTDKHRG
IIIETEGDHPKGIEMDGKMMNSHFLDGNLVPLEGKEVDESRREMIRILKDLKQKHPEKDLDQLVEMAN
YYALSHQQKSRAFYRIQATRMMTGAGNILKKHAAEQAKKASSMSEVHTDEPEDFISKVFFDPCSYQCL
ENCGAVLLTVVRKGGDMSKTMYVDYKTEDGSANAGADYEFTEGTVVLKPGETQKEFSVGIIDDDIFEE
DEHFFVRLSNVRIEEEQPEEGMPPAIFNSLPLPRAVLASPCVATVTILDDDHAGIFTFECDTIHVSES
IGVMEVKVLRTSGARGTVIVPFRTVEGTAKGGGEDFEDTYGELEFKNDETVKTIHIKVIDDEAYEKNK
NYFIEMMGPRMVDMSFQKALLLSPDRKLTMEEEEAKRIAEMGKPVLGEHPKLEVIIEESYEFKTTVDK
LIKKTNLALVVGTHSWRDQFMEAITVSAAGDEDEDESGEERLPSCFDYVMHFLTVFWKVLFACVPPTE
YCHGWACFAVSILIIGMLTAIIGDLASHFGCTIGLKDSVTAVVFVAFGTSVPDTFASKAAALQDVYAD
ASIGNVTGSNAVNVFLGIGLAWSVAAIYWALQGQEFHVSAGTLAFSVTLFTIFAFVCISVLLYRRRPH
LGGELGGPRGCKLATTWLFVSLWLLYILFATLEAYCYIKGF

| | | |
|---|---|---|
| NOV55c, 258076220 | SEQ ID NO: 859 | 2778 bp |

| | | |
|---|---|---|
| DNA Sequence | ORF Start: at 1 | ORF Stop: end of sequence |

GGATCCACCATGGCGTGGTTAAGGTTGCAGCCTCTCACCTCTGCCTTCCTCCATTTTGGGCTGGTTAC
CTTTGTGCTCTTCCTGAATGGTCTTCGAGCAGAGGCTGGTGGCTCAGGGGACGTGCCAAGCACAGGGC
AGAACAATGAGTCCTGTTCAGGGTCATCGGACTGCAAGGAGGGTGTCATCCTGCCAATCTGGTACCCG
GAGAACCCTTCCCTTGGGGACAAGATTGCCAGGGTCATTGTCTATTTTGTGGCCCTGATATACATGTT
CCTTGGGGTGTCCATCATTGCTGACCGCTTCATGGCATCTATTGAAGTCATCACCTCTCAAGAGAGGG
AGGTGACAATTAAGAAACCCAATGGAGAAACCAGCACAACCACTATTCGGGTCTGGAATGAAACTGTC
TCCAACCTGACCCTTATGGCCCTGGGTTCCTCTGCTCCTGAGATACTCCTCTCTTTAATTGAGGTGTG
TGGTCATGGGTTCATTGCTGGTGATCTGGGACCTTCTACCATTGTAGGGAGTGCAGCCTTCAACATGT
TCATCATCATTGGCATCTGTGTCTACGTGATCCCAGACGGAGAGACTCGCAAGATCAAGCATCTACGA
GTCTTCTTCATCACCGCTGCTTGGAGTATCTTTGCCTACATCTGGCTCTATATGATTCTGGCAGTCTT
CTCCCCTGGTGTGGTCCAGGTTTGGGAAGGCCTCCTCACTCTCTTCTTCTTTCCAGTGTGTGTCCTTC
TGGCCTGGGTGGCAGATAAACGACTGCTCTTCTACAAATACATGCACAAAAAGTACCGCACAGACAAA
CACCGAGGAATTATCATAGAGACAGAGGGTGACCACCCTAAGGGCATTGAGATGGATGGGAAAATGAT
GAATTCCCATTTTCTAGATGGGAACCTGGTGCCCCTGGAAGGGAAGGAAGTGGATGAGTCCCGCAGAG
AGATGATCCGGATTCTCAAGGATCTGAAGCAAAAACACCCAGAGAAGGACTTAGATCAGCTGGTGGAG
ATGGCCAATTACTATGCTCTTTCCCACCAACAGAAGAGCCGCGCCTTCTACCGTATCCAAGCCACTCG
TATGATGACTGGTGCAGGCAATATCCTGAAGAAACATGCAGCAGAACAAGCCAAGAAGGCCTCCAGCA
TGAGCGAGGTGCACACCGATGAGCCTGAGGACTTTATTTCCAAGGTCTTCTTTGACCCATGTTCTTAC
CAGTGCCTGGAGAACTGTGGGGCTGTACTCCTGACAGTGGTGAGGAAAGGGGGAGACATGTCAAAGAC
CATGTATGTGGACTACAAAACAGAGGATGGTTCTGCCAATGCAGGGGCTGACTATGAGTTCACAGAGG
GCACGGTGGTTCTGAAGCCAGGAGAGACCCAGAAGGAGTTCTCCGTGGGCATAATTGATGACGACATT
TTTGAGGAGGATGAACACTTCTTTGTAAGGTTGAGCAATGTCCGCATAGAGGAGGAGCAGCCAGAGGA
GGGGATGCCTCCAGCAATATTCAACAGTCTTCCCTTGCCTCGGGCTGTCCTAGCCTCCCCTTGTGTGG
CCACAGTTACCATCTTGGATGATGACCATGCAGGCATCTTCACTTTTGAATGTGATACTATTCATGTC
AGTGAGAGTATTGGTGTTATGGAGGTCAAGGTTCTGCGGACATCAGGTGCCCGGGGTACAGTCATCGT
CCCCTTTAGGACAGTAGAAGGGACAGCCAAGGGTGGCGGTGAGGACTTTGAAGACACATATGGGGAGT
TGGAATTCAAGAATGATGAAACTGTGAAAACCATAAGGGTTAAAATAGTAGATGAGGAGGAATACGAA
AGGCAAGAGAATTTCTTCATTGCCCTTGGTGAACCGAAATGGATGGAACGTGGAATATCAGATGTGAC
AGACAGGAAGCTGACTATGGAAGAAGAGGAGGCCAAGAGGATAGCAGAGATGGGAAAGCCAGTATTGG
GTGAACACCCCAAACTAGAAGTCATCATTGAAGAGTCCTATGAGTTCAAGACTACGGTGGACAAACTG
ATCAAGAAGACAAACCTGGCCTTGGTTGTGGGGACCCATTCCTGGAGGGACCAGTTCATGGAGGCCAT
CACCGTCAGTGCAGCAGGGGATGAGGATGAGGATGAATCCGGGGAGGAGAGGCTGCCCTCCTGCTTTG
ACTACGTCATGCACTTCCTGACTGTCTTCTGGAAGGTGCTGTTTGCCTGTGTGCCCCCCACAGAGTAC
TGCCACGGCTGGGCCTGCTTCGCCGTCTCCATCCTCATCATTGGCATGCTCACCGCCATCATTGGGGA
CCTGGCCTCGCACTTCGGCTGCACCATTGGTCTCAAAGATTCAGTCACAGCTGTTGTTTTCGTGGCAT
TTGGCACCTCTGTCCCAGATACGTTTGCCAGCAAAGCTGCTGCCCTCCAGGATGTATATGCAGACGCC
TCCATTGGCAACGTGACGGGCAGCAACGCCGTCAATGTCTTCCTGGGCATCGGCCTGGCCTGGTCCGT
GGCCGCCATCTACTGGGCTCTGCAGGGACAGGAGTTCCACGTGTCGGCCGGCACACTGGCCTTCTCCG
TCACCCTCTTCACCATCTTTGCATTTGTCTGCATCAGCGTGCTCTTGTACCGAAGGCGGCCGCACCTG
GGAGGGGAGCTTGGTGGCCCCCGTGGCTGCAAGCTCGCCACAACATGGCTCTTTGTGAGCCTGTGGCT
CCTCTACATACTCTTTGCCACACTAGAGGCCTATTGCTACATCAAGGGGTTCCTCGAG

NOV55c, 258076220

| | | | |
|---|---|---|---|
| Protein Sequence | SEQ ID NO: 860 | 926 aa | MW at 102901.2kD |

GSTMAWLRLQPLTSAFLHFGLVTFVLFLNGLRAEAGGSGDVPSTGQNNESCSGSSDCKEGVILPIWYP
ENPSLGDKIARVIVYFVALIYMFLGVSIIADRFMASIEVITSQEREVTIKKPNGETSTTTIRVWNETV
SNLTLMALGSSAPEILLSLIEVCGHGFIAGDLGPSTIVGSAAFNMFIIIGICVYVIPDGETRKIKHLR
VFFITAAWSIFAYIWLYMILAVFSPGVVQVWEGLLTLFFFPVCVLLAWVADKRLLFYKRMHKKYRTDK
HRGIIIETEGDHPKGIEMDGKMMNSHFLDGNLVPLEGKEVDESRREMIRILKDLKQKHPEKDLDQLVE
MANYYALSHQQKSRAFYRIQATRMMTGAGNILKKHAAEQAKKASSMSEVHTDEPEDFISKVFFDPCSY
QCLENCGAVLLTVVRKGGDMSKTMYVDYKTEDGSANAGADYEFTEGTVVLKPGETQKEFSVGIIDDDI
FEEDEHFFVRLSNVRIEEEQPEEGMPPAIFNSLPLPRAVLASPCVATVTILDDDHAGIFTFECDTIHV
SESIGVMEVKVLRTSGARGTVIVPFRTVEGTAKGGGEDFEDTYGELEFKNDETVKTIRVKIVDEEEYE
RQENFFIALGEPKWMERGISDVTDRKLTMEEEEAKRIAEMGKPVLGEHPKLEVIIEESYEFKTTVDKL
IKKTNLALVVGTHSWRDQFMEAITVSAAGDEDEDESGEERLPSCFDYVMHFLTVFWKVLFACVPPTEY
CHGWACFAVSILIIGMLTAIIGDLASHFGCTIGLKDSVTAVVFVAFGTSVPDTFASKAAALQDVYADA
SIGNVTGSNAVNVFLGIGLAWSVAAIYWALQGQEFHVSAGTLAFSVTLFTIFAFVCISVLLYRRRPHL
GGELGGPRGCKLATTWLFVSLWLLYILFATLEAYCYIKGFLE

| | | |
|---|---|---|
| NOV55d, 248057963 | SEQ ID NO: 861 | 2685 bp |

| | | |
|---|---|---|
| DNA Sequence | ORF Start: at 1 | ORF Stop: end of sequence |

GGATCCGAGGCTGGTGGCTCAGGGGACGTGCCAAGCACAGGGCAGAACAATGAGTCCTGTTCAGGGTC
ATCGGACTGCAAGGAGGGTGTCATCCTGCCAATCTGGTACCCGGAGAACCCTTCCCTTGGGGACAAGA
TTGCCAGGGTCATTGTCTATTTTGTGGCCCTGATATACATGTTCCTTGGGGTGTCCATCATTGCTGAC
CGCTTCATGGCATCTATTGAGTCATCACCTCTCAAGAGAGGGAGGTGACAATTAAGAAACCCAATTGG
AGAAACCAGCACAACCACTATTCGGGTCTGGAATGAAACTGTCTCCAACCTGACCCTTATGGCCCTGG
GTTCCTCTGCTCCTGAGATACTCCTCTCTTTAATTGAGGTGTGTGGTCATGGGTTCATTGCTGGTGAT
CTGGGACCTTCTACCATTGTAGGGAGTGCAGCCTTCAACATGTTCATCATCATTGGCATCTGTGTCTA
CGTGATCCCAGACGGAGAGACTCGCAAGATCAAACATCTACGAGTCTTCTTCATCACCGCTGCTTGGA
GTATCTTTGCCTACATCTGGCTCTATATGATTCTGGCAGTCTTCTCCCCTGGTGTGGTCCAGGTTTGG
GAAGGCCTCCTCACTCTCTTCTTCTTTCCAGTGTGTGTCCTTCTGGCCTGGGTGGCAGATAAACGACT
GCTCTTCTACAAATACATGCACAAAAAGTACCGCACAGACAAACACCGAGGAATTATCATAGAGACAG
AGGGTGACCACCCTAAGGGCATTGAGATGGATGGGAAAATGATGAATTCCCATTTTCTAGATGGGAAC
CTGGTGCCCCTGGAAGGGAAGGAAGTGGATGAGTCCCGCAGAGAGATGATCCGGATTCTCAAGGATCT
GAAGCAAAAACACCCAGAGAAGGACTTAGATCAGCTGGTGGAGATGGCCAATTACTATGCTCTTTCCC
ACCAACAGAAGAGCCGCGCCTTCTACCGTATCCAAGCCACTCGTATGATGACTGGTGCAGGCAATATC
CTGAAGAAACATGCAGCAGAACAAGCCAAGAAGGCCTCCAGCATGAGCGAGGTGCACACCGATGAGCC
TGAGGACTTTATTTCCAAGGTCTTCTTTGACCCATGTTCTTACCAGTGCCTGGAGAACTGTGGGGCTG
TACTCCTGACAGTGGTGAGGAAAGGGGGAGACATGTCAAAGACCATGTATGTGGACTACAAAACAGAG
GATGGTTCTGCCAATGCAGGGGCTGACTATGAGTTCACAGAGGGCACGGTGGTTCTGAAGCCAGGAGA
GACCCAGAAGGAGTTCTCCGTGGGCATAATTGATGACGACATTTTTGAGGAGGATGAACACTTCTTTG
TAAGGTTGAGCAATGTCCGCATAGAGGAGGAGCAGCCAGAGGAGGGGATGCCTCCAGCAATATTCAAC
AGTCTTCCCTTGCCTCGGGCTGTCCTAGCCTCCCCTTGTGTGGCCACAGTTACCATCTTGGATGATGA
CCATGCAGGCATCTTCACTTTTGAATGTGATACTATTCATGTCAGTGAGAGTATTGGTGTTATGGAGG
TCAAGGTTCTGCGGACATCAGGTGCCCGGGGTACAGTCATCGTCCCCTTTAGGACAGTAGAAGGGACA
GCCAAGGGTGGCGGTGAGGACTTTGAAGACACATATGGGGAGTTGGAATTCAAGAATGATGAAACTGT
GAAAACCATAAGGGTTAAAATAGTAGATGAGGAGGAATACGAAAGGCAAGAGAATTTCTTCATTGCCC
TTGGTGAACCGAAATGGATGGAACGTGGAATATCAGATGTGACAGACAGGAAGCTGACTATGGAAGAA
GAGGAGGCCAAGAGGATAGCAGAGATGGGAAAGCCAGTATTGGGTGAACACCCCAAACTAGAAGTCAT
CATTGAAGAGTCCTATGAGTTCAAGACTACGGTGGACAAACTGATCAAGAAGACAAACCTGGCCTTGG
TTGTGGGGACCCATTCCTGGAGGGACCAGTTCATGGAGGCCATCACCGTCAGTGCAGCAGGGGATGAG
GATGAGGATGAATCCGGGGAGGAGAGGCTGCCCTCCTGCTTTGACTACGTCATGCACTTCCTGACTGT
CTTCTGGAAGGTGCTGTTTGCCTGTGTGCCCCCCACAGAGTACTGCCACGGCTGGGCCTGCTTCGCCG
TCTCCATCCTCATCATTGGCATGCTCACCGCCATCATTGGGGACCTGGCCTCGCACTTCGGCTGCACC
ATTGGTCTCAAAGATTCAGTCACAGCTGTTGTTTTCGTGGCATTTGGCACCTCTGTCCCAGATACGTT
TGCCAGCAAAGCTGCTGCCCTCCAGGATGTATATGCAGACGCCTCCATTGGCAACGTGACGGGCAGCA
ACGCCGTCAATGTCTTCCTGGGCATCGGCCTGGCCTGGTCCGTGGCCGCCATCTACTGGGCTCTGCAG
GGACAGGAGTTCCACGTGTCGGCCGGCACACTGGCCTTCTCCGTCACCCTCTTCACCATCTTTGCATT
TGTCTGCATCAGCGTGCTCTTGTACCGAAGGCGGCCGCACCTGGGAGGGGAGCTTGGTGGCCCCCGTG
GCTGCAAGCTCGCCACAACATGGCTCTTTGTGAGCCTGTGGCTCCTCTACATACTCTTTGCCACACTA
GAGGCCTATTGCTACATCAAGGGGTTCCTCGAG

NOV55d, 248057963

| | | | |
|---|---|---|---|
| Protein Sequence | SEQ ID NO: 862 | 895 aa | MW at 99385.0kD |

GSEAGGSGDVPSTGQNNESCSGSSDCKEGVILPIWYPENPSLGDKIARVIVYFVALIYMFLGVSIIAD
RFMASIEVITSQEREVTIKKPNGETSTTTIRVWNETVSNLTLMALGSSAPEILLSLIEVCGHGFIAGD
LGPSTIVGSAAFNNFIIIGICVYVIPDGETRKIKHLRVFFITAAWSIFAYIWLYMILAVFSPGVVQVW
EGLLTLFFFPVCVLLAWVADKRLLFYKYMHKKYRTDKHRGIIIETEGDHPKGIEMDGKMMNSHFLDGN
LVPLEGKEVDESRREMIRILKDLKQKHPEKDLDQLVEMANYYALSHQQKSRAFYRIQATRNMTGAGNI
LKKHAAEQAKKASSMSEVNTDEPEDFISKVFFDPCSYQCLENCGAVLLTVVRKGGDMSKTMYVDYKTE
DGSANAGADYEFTEGTVVLKPGETQKEFSVGIIDDDIFEEDEHFFVRLSNVRIEEEQPEEGMPPAIFN
SLPLPRAVLASPCVATVTILDDDHAGIFTFECDTIHVSESIGVMEVKVLRTSGARGTVIVPFRTVEGT
AKGGGEDFEDTYGELEFKNDETVKTIRVKIVDEEEYERQENFFIALGEPKWMERGISDVTDRKLTMEE
EEAKRIAEMGKPVLGEHPKLEVIIEESYEFKTTVDKLIKKTNLALVVGTHSWRDQFMEAITVSAAGDE
DEDESGEERLPSCFDYVMHFLTVFWKVLFACVPPTEYCHGWACFAVSILIIGMLTAIIGDLASHFGCT
IGLKDSVTAVVFVAFGTSVPDTFASKAAALQDVYADASIGNVTGSNAVNVFLGIGLAWSVAAIYWALQ
GQEFHVSAGTLAFSVTLFTIFAFVCISVLLYRRRPHLGGELGGPRGCKLATTWLFVSLWLLYILFATL
EAYCYIKGFLE

| | | |
|---|---|---|
| NOV55e, CG56258-01 | SEQ ID NO: 863 | 2813 bp |

| | | |
|---|---|---|
| DNA Sequence | ORF Start: ATG at 9 | ORF Stop: TAG at 2793 |

TCTCGTGTATGGCGTGGTTAAGGTTGCAGCCTCTCACCTCTGCCTTCCTCCATTTTGGGCTGGTTACC
TTTGTGCTCTTCCTGAATGGTCTTCGAGCAGAGGCTGGTGGCTCAGGGGACGTGCCAAGCACAGGGCA
GAACAATGAGTCCTGTTCAGGGTCATCGGACTGCAAGGAGGGTGTCATCCTGCCAATCTGGTACCCGG
AGAACCCTTCCCTTGGGGACAAGATTGCCAGGGTCATTGTCTATTTTGTGGCCCTGATATACATGTTC
CTTGGGGTGTCCATCATTGCTGACCGCTTCATGGCATCTATTGAAGTCATCACCTCTCAAGAGAGGGA
GGTGACAATTAAGAAACCCAATGGAGAAACCAGCACAACCACTATTCGGGTCTGGAATGAAACTGTCT
CCAACCTGACCCTTATGGCCCTGGGTTCCTCTGCTCCTGAGATACTCCTCTCTTTAATTGAGGTGTGT
GGTCATGGGTTCATTGCTGGTGATCTGGGACCTTCTACCATTGTAGGGAGTGCAGCCTTCAACATGTT
CATCATCATTGGCATCTGTGTCTACGTGATCCCAGACGGAGAGACTCGCAAGATCAAGCATCTACGAG
TCTTCTTCATCACCGCTGCTTGGAGTATCTTTGCCTACATCTGGCTCTATATGATTCTGGCAGTCTTC
CCCCCTGGTGTGGTCCAGGTTTGGGAAGGCCTCCTCACTCTCTTCTTCTTTCCAGTGTGTGTCCTTCT
GGCCTGGGTGGCAGATAAACGACTGCTCTTCTACAAATACATGCACAAAAAGTACCGCACAGACAAAC
ACCGAGGAATTATCATAGAGACAGAGGGTGACCACCCTAAGGGCATTGAGATGGATGGGAAAATGATG
AATTCCCATTTTCTAGATGGGAACCTGGTGCCCCTGGAAGGGAAGGAAGTGGATGAGTCCCGCAGAGA
GATGATCCGGATTCTCAAGGATCTGAAGCAAAAACACCCAGAGAAGGACTTAGATCAGCTGGTGGAGA
TGGCCAATTACTATGCTCTTTCCCACCAACAGAAGAGCCGTGCCTTCTACCGTATCCAAGCCACTCGT
ATGATGACTGGTGCAGGCAATATCCTGAAGAAACATGCAGCAGAACAAGCCAAGAAGGCCTCCAGCAT
GAGCGAGGTGCACACCGATGAGCCTGAGGACTTTATTTCCAAGGTCTTCTTTGACCCATGTTCTTACC
AGTGCCTGGAGAACTGTGGGGCTGTACTCCTGACAGTGGTGAGGAAAGGGGGAGACATGTCAAAGACC
ATGTATGTGGACTACAAAACAGAGGATGGTTCTGCCAATGCAGGGGCTGACTATGAGTTCACAGAGGG
CACGGTGGTTCTGAAGCCAGGAGAGACCCAGAAGGAGTTCTCCGTGGGCATAATTGATGACGACATTT
TTGAGGAGGATGAACACTTCTTTGTAAGGTTGAGCAATGTCCGCATAGAGGAGGAGCAGCCAGAGGAG
GGGATGCCTCCAGCAATATTCAACAGTCTTCCCTTGCCTCGGGCTGTCCTAGCCTCCCCTTGTGTGGC
CACAGTTACCATCTTGGATGATGACCATGCAGGCATCTTCACTTTTGAATGTGATACTATTCATGTCA
GTGAGAGTATTGGTGTTATGGAGGTCAAGGTTCTGCGGACATCAGGTGCCCGGGGTACAGTCATCGTC
CCCTTTAGGACAGTAGAAGGGACAGCCAAGGGTGGCGGTGAGGACTTTGAAGACACATATGGGGAGTT
GGAATTCAAGAATGATGAAACTGTGAAAACTCTTCAGGTGAAGATAGTTGATGACGAGGAATATGAGA
AAAAGGATAATTTCTTCATTGAGCTGGGCCAGCCCCAGTGGCTTAAGCGAGGGATTTCAGCTCTGCTA
CTCAATCAAGGGGATGGGGACAGGAAGCTAACAGCCGAGGAGGAGGAGGCTCGGAGGATAGCAGAGAT
GGGCAAGCCAGTTCTTGGGGAGAACTGCCGGCTGGAGGTCATCATCGAGGAGTCATATGATTTTAAGA
ACACGGTGGATAAACTCATCAAGAAAACGAACTTGGCCTTGGTAATTGGGACCCATTCATGGAGGGAG
CAGTTTTTAGAGGCAATTACGGTGAGCGCAGGGGACGAGGAGGAGGAGGAGGACGGGTCCCGGGAGGA
GCGGCTGCCGTCGTGCTTTGACTACGTGATGCACTTCCTGACGGTGTTCTGGAAGGTGCTCTTCGCCT
GTGTGCCCCCCACCGAGTACTGCCACGGCTGGGCCTGCTTTGGTGTCTCCATCCTGGTCATCGGCCTG
CTCACCGCCCTCATTGGGGACCTCGCCTCCCACTTCGGCTGCACCGTTGGCCTCAAGGACTCTGTCAA
TGCTGTTGTCTTCGTTGCCCTGGGCACCTCCATCCCTGACACGTTCGCCAGCAAGGTGGCGGCGCTGC
AGGACCAGTGCGCCGACGCGTCCATCGGCAACGTGACCGGCTCCAACGCGGTGAACGTGTTCCTTGGC
CTGGGCGTCGCCTGGTCTGTGGCCGCCGTGTACTGGGCGGTGCAGGGCCGCCCCTTCGAGGTGCGCAC
TGGCACGCTGGCCTTCTCCGTCACGCTCTTCACCGTCTTCGCCTTCGTGGGCATTGCCGTGCTGCTGT
ACCGGCGCCGGCCGCACATCGGCGGCGAGCTGGGCGGCCCGCGCGGACCCAAGCTCGCCACCACCGCG
CTCTTCCTGGGCCTCTGGCTCCTGTACATCCTCTTCGCCAGCCTGGAGGCGTACTGCCACATCCGGGG
CTTCTAGGGCCTCGCGCAGAGACTC

NOV55e, CG56258-01

| | | | |
|---|---|---|---|
| Protein Sequence | SEQ ID NO: 864 | 928 aa | MW at 102900.1kD |

MAWLRLQPLTSAFLHFGLVTFVLFLNGLRAEAGGSGDVPSTGQNNESCSGSSDCKEGVILPIWYPENP
SLGDKIARVIVYFVALIYMFLGVSIIADRFMASIEVITSQEREVTIKKPNGETSTTTIRVWNETVSNL
TLMALGSSAPEILLSLIEVCGHGFIAGDLGPSTIVGSAAFNNFIIIGICVYVIPDGETRKIKHLRVFF
ITAAWSIFAYIWLYMILAVFSPGVVQVWEGLLTLFFFPVCVLLAWVADKRLLFYKYMHKKYRTDKHRG
IIIETEGDHPKGIEMDGKMMNSHFLDGNLVPLEGKEVDESRREMIRILKDLKQKHPEKDLDQLVEMAN
YYALSHQQKSRAFYRIQATRMMTGAGNILKKHAAEQAKKASSMSEVHTDEPEDFISKVFFDPCSYQCL
ENCGAVLLTVVRKGGDMSKTMYVDYKTEDGSANAGADYEFTEGTVVLKPGETQKEFSVGIIDDDIFEE
DEHFFVRLSNVRIEEEQPEEGMPPAIFNSLPLPRAVLASPCVATVTILDDDHAGIFTFECDTIHVSES
IGVMEVKVLRTSGARGTVIVPFRTVEGTAKGGGEDFEDTYGELEFKNDETVKTLQVKIVDDEEYEKKD
NFFIELGQPQWLKRGISALLLNQGDGDRKLTAEEEEARRIAEMGKPVLGENCRLEVIIEESYDFKNTV
DKLIKKTNLALVIGTHSWREQFLEAITVSAGDEEEEEDGSREERLPSCFDYVMHFLTVFWKVLFACVP
PTEYCHGWACFGVSILVIGLLTALIGDLASHFGCTVGLKDSVNAVVFVALGTSIPDTFASKVAALQDQ
CADASIGNVTGSNAVNVFLGLGVAWSVAAVYWAVQGRPFEVRTGTLAFSVTLFTVFAFVGIAVLLYRR
RPHIGGELGGPRGPKLATTALFLGLWLLYILFASLEAYCHIRGF

| | | |
|---|---|---|
| NOV55f, CG56258-03 | SEQ ID NO: 865 | 2685 bp |

| | | |
|---|---|---|
| DNA Sequence | ORF Start: at 7 | ORF Stop: at 2680 |

GGATCCGAGGCTGGTGGCTCAGGGGACGTGCCAAGCACAGGGCAGAACAATGAGTCCTGTTCAGGGTC
ATCGGACTGCAAGGAGGGTGTCATCCTGCCAATCTGGTACCCGGAGAACCCTTCCCTTGGGGACAAGA
TTGCCAGGGTCATTGTCTATTTTGTGGCCCTGATATACATGTTCCTTGGGGTGTCCATCATTGCTGAC
CGCTTCATGGCATCTATTGAAGTCATCACCTCTCAAGAGAGGGAGGTGACAATTAAGAAACCCAATGG
AGAAACCAGCACAACCACTATTCGGGTCTGGAATGAAACTGTCTCCAACCTGACCCTTATGGCCCTGG
GTTCCTCTGCTCCTGAGATACTCCTCTCTTTAATTGAGGTGTGTGGTCATGGGTTCATTGCTGGTGAT
CTGGGACCTTCTACCATTGTAGGGAGTGCAGCCTTCAACATGTTCATCATCATTGGCATCTGTGTCTA
CGTGATCCCAGACGGAGAGACTCGCAAGATCAAACATCTACGAGTCTTCTTCATCACCGCTGCTTGGA
GTATCTTTGCCTACATCTGGCTCTATATGATTCTGGCAGTCTTCTCCCCTGGTGTGGTCCAGGTTTGG
GAAGGCCTCCTCACTCTCTTCTTCTTTCCAGTGTGTGTCCTTCTGGCCTGGGTGGCAGATAAACGACT
GCTCTTCTACAAATACATGCACAAAAAGTACCGCACAGACAAACACCGAGGAATTATCATAGAGACAG
AGGGTGACCACCCTAAGGGCATTGAGATGGATGGGAAAATGATGAATTCCCATTTTCTAGATGGGAAC
CTGGTGCCCCTGGAAGGGAAGGAAGTGGATGAGTCCCGCAGAGAGATGATCCGGATTCTCAAGGATCT
GAAGCAAAAACACCCAGAGAAGGACTTAGATCAGCTGGTGGAGATGGCCAATTACTATGCTCTTTCCC
ACCAACAGAAGAGCCGCGCCTTCTACCGTATCCAAGCCACTCGTATGATGACTGGTGCAGGCAATATC
CTGAAGAAACATGCAGCAGAACAAGCCAAGAAGGCCTCCAGCATGAGCGAGGTGCACACCGATGAGCC
TGAGGACTTTATTTCCAAGGTCTTCTTTGACCCATGTTCTTACCAGTGCCTGGAGAACTGTGGGGCTG
TACTCCTGACAGTGGTGAGGAAAGGGGGAGACATGTCAAAGACCATGTATGTGGACTACAAAACAGAG
GATGGTTCTGCCAATGCAGGGGCTGACTATGAGTTCACAGAGGGCACGGTGGTTCTGAAGCCAGGAGA
GACCCAGAAGGAGTTCTCCGTGGGCATAATTGATGACGACATTTTTGAGGAGGATGAACACTTCTTTG
TAAGGTTGAGCAATGTCCGCATAGAGGAGGAGCAGCCAGAGGAGGGGATGCCTCCAGCAATATTCAAC
AGTCTTCCCTTGCCTCGGGCTGTCCTAGCCTCCCCTTGTGTGGCCACAGTTACCATCTTGGATGATGA
CCATGCAGGCATCTTCACTTTTGAATGTGATACTATTCATGTCAGTGAGAGTATTGGTGTTATGGAGG
TCAAGGTTCTGCGGACATCAGGTGCCCGGGGTACAGTCATCGTCCCCTTTAGGACAGTAGAAGGGACA
GCCAAGGGTGGCGGTGAGGACTTTGAAGACACATATGGGGAGTTGGAATTCAAGAATGATGAAACTGT
GAAAACCATAAGGGTTAAAATAGTAGATGAGGAGGAATACGAAAGGCAAGAGAATTTCTTCATTGCCC
TTGGTGAACCGAAATGGATGGAACGTGGAATATCAGATGTGACAGACAGGAAGCTGACTATGGAAGAA
GAGGAGGCCAAGAGGATAGCAGAGATGGGAAAGCCAGTATTGGGTGAACACCCCAAACTAGAAGTCAT
CATTGAAGAGTCCTATGAGTTCAAGACTACGGTGGACAAACTGATCAAGAAGACAAACCTGGCCTTGG
TTGTGGGGACCCATTCCTGGAGGGACCAGTTCATGGAGGCCATCACCGTCAGTGCAGCAGGGGATGAG
GATGAGGATGAATCCGGGGAGGAGAGGCTGCCCTCCTGCTTTGACTACGTCATGCACTTCCTGACTGT
CTTCTGGAAGGTGCTGTTTGCCTGTGTGCCCCCCACAGAGTACTGCCACGGCTGGGCCTGCTTCGCCG
TCTCCATCCTCATCATTGGCATGCTCACCGCCATCATTGGGGACCTGGCCTCGCACTTCGGCTGCACC
ATTGGTCTCAAAGATTCAGTCACAGCTGTTGTTTTCGTGGCATTTGGCACCTCTGTCCCAGATACGTT
TGCCAGCAAAGCTGCTGCCCTCCAGGATGTATATGCAGACGCCTCCATTGGCAACGTGACGGGCAGCA
ACGCCGTCAATGTCTTCCTGGGCATCGGCCTGGCCTGGTCCGTGGCCGCCATCTACTGGGCTCTGCAG
GGACAGGAGTTCCACGTGTCGGCCGGCACACTGGCCTTCTCCGTCACCCTCTTCACCATCTTTGCATT
TGTCTGCATCAGCGTGCTCTTGTACCGAAGGCGGCCGCACCTGGGAGGGGAGCTTGGTGGCCCCCGTG
GCTGCAAGCTCGCCACAACATGGCTCTTTGTGAGCCTGTGGCTCCTCTACATACTCTTTGCCACACTA
GAGGCCTATTGCTACATCAAGGGGTTCCTCGAG

NOV55f, CG56258-03

| | | | |
|---|---|---|---|
| Protein Sequence | SEQ ID NO: 866 | 891 aa | MW at 98998.6kD |

EAGGSGDVPSTGQNNESCSGSSDCKEGVILPIWYPENPSLGDKIARVIVYFVALIYMFLGVSIIADRF
MASIEVITSQEREVTIKKPNGETSTTTIRVWNETVSNLTLMALGSSAPEILLSLIEVCGHGFIAGDLG
PSTIVGSAAFNMFIIIGICVYVIPDGETRKIKHLRVFFITAAWSIFAYIWLYMILAVFSPGVVQVWEG
LLTLFFFPVCVLLAWVADKRLLFYKYMHKKYRTDKHRGIIIETEGDHPKGIEMDGKMMNSHFLDGNLV
PLEGKEVDESRREMIRILKDLKQKHPEKDLDQLVEMANYYALSHQQKSRAFYRIQATRNMTGAGNILK
KHAAEQAKKASSMSEVHTDEPEDFISKVFFDPCSYQCLENCGAVLLTVVRKGGDMSKTMYVDYKTEDG
SANAGADYEFTEGTVVLKPGETQKEFSVGIIDDDIFEEDEHFFVRLSNVRIEEEQPEEGMPPAIFNSL
PLPRAVLASPCVATVTILDDDHAGIFTFECDTIHVSESIGVMEVKVLRTSGARGTVIVPFRTVEGTAK
GGGEDFEDTYGELEFKNDETVKTIRVKIVDEEEYERQENFFIALGEPKWMERGISDVTDRKLTMEEEE
AKRIAEMGKPVLGEHPKLEVIIEESYEFKTTVDKLIKKTNLALVVGTHSWRDQFMEAITVSAAGDEDE
DESGEERLPSCFDYVMHFLTVFWKVLFACVPPTEYCHGWACFAVSILlIGMLTAIIGDLASHFGCTIG
LKDSVTAVVFVAFGTSVPDTFASKAAALQDVYADASIGNVTGSNAVNVFLGIGLAWSVAAIYWALQGQ
EFHVSAGTLAFSVTLFTIFAFVCISVLLYRRRPHLGGELGGPRGCKLATTWLFVSLWLLYILFATLEA
YCYIKGF

| | | |
|---|---|---|
| NOV55g, CG56258-05 | SEQ ID NO: 867 | 2778 bp |

| | | |
|---|---|---|
| DNA Sequence | ORF Start: ATG at 10 | ORF Stop: at 2773 |

GGATCCACCATGGCGTGGTTAAGGTTGCAGCCTCTCACCTCTGCCTTCCTCCATTTTGGGCTGGTTAC
CTTTGTGCTCTTCCTGAATGGTCTTCGAGCAGAGGCTGGTGGCTCAGGGGACGTGCCAAGCACAGGGC
AGAACAATGAGTCCTGTTCAGGGTCATCGGACTGCAAGGAGGGTGTCATCCTGCCAATCTGGTACCCG
GAGAACCCTTCCCTTGGGGACAAGATTGCCAGGGTCATTGTCTATTTTGTGGCCCTGATATACATGTT
CCTTGGGGTGTCCATCATTGCTGACCGCTTCATGGCATCTATTGAAGTCATCACCTCTCAAGAGAGGG
AGGTGACAATTAAGAAACCCAATGGAGAAACCAGCACAACCACTATTCGGGTCTGGAATGAAACTGTC
TCCAACCTGACCCTTATGGCCCTGGGTTCCTCTGCTCCTGAGATACTCCTCTCTTTAATTGAGGTGTG
TGGTCATGGGTTCATTGCTGGTGATCTGGGACCTTCTACCATTGTAGGGAGTGCAGCCTTCAACATGT
TCATCATCATTGGCATCTGTGTCTACGTGATCCCAGACGGAGAGACTCGCAAGATCAAGCATCTACGA
GTCTTCTTCATCACCGCTGCTTGGAGTATCTTTGCCTACATCTGGCTCTATATGATTCTGGCAGTCTT
CTCCCCTGGTGTGGTCCAGGTTTGGGAAGGCCTCCTCACTCTCTTCTTCTTTCCAGTGTGTGTCCTTC
TGGCCTGGGTGGCAGATAAACGACTGCTCTTCTACAAATACATGCACAAAAAGTACCGCACAGACAAA
CACCGAGGAATTATCATAGAGACAGAGGGTGACCACCCTAAGGGCATTGAGATGGATGGGAAAATGAT
GAATTCCCATTTTCTAGATGGGAACCTGGTGCCCCTGGAAGGGAAGGAAGTGGATGAGTCCCGCAGAG
AGATGATCCGGATTCTCAAGGATCTGAAGCAAAAACACCCAGAGAAGGACTTAGATCAGCTGGTGGAG
ATGGCCAATTACTATGCTCTTTCCCACCAACAGAAGAGCCGCGCCTTCTACCGTATCCAAGCCACTCG
TATGATGACTGGTGCAGGCAATATCCTGAAGAAACATGCAGCAGAACAAGCCAAGAAGGCCTCCAGCA
TGAGCGAGGTGCACACCGATGAGCCTGAGGACTTTATTTCCAAGGTCTTCTTTGACCCATGTTCTTAC
CAGTGCCTGGAGAACTGTGGGGCTGTACTCCTGACAGTGGTGAGGAAAGGGGGAGACATGTCAAAGAC
CATGTATGTGGACTACAAAACAGAGGATGGTTCTGCCAATGCAGGGGCTGACTATGAGTTCACAGAGG
GCACGGTGGTTCTGAAGCCAGGAGAGACCCAGAAGGAGTTCTCCGTGGGCATAATTGATGACGACATT
TTTGAGGAGGATGAACACTTCTTTGTAAGGTTGAGCAATGTCCGCATAGAGGAGGAGCAGCCAGAGGA
GGGGATGCCTCCAGCAATATTCAACAGTCTTCCCTTGCCTCGGGCTGTCCTAGCCTCCCCTTGTGTGG
CCACAGTTACCATCTTGGATGATGACCATGCAGGCATCTTCACTTTTGAATGTGATACTATTCATGTC
AGTGAGAGTATTGGTGTTATGGAGGTCAAGGTTCTGCGGACATCAGGTGCCCGGGGTACAGTCATCGT
CCCCTTTAGGACAGTAGAAGGGACAGCCAAGGGTGGCGGTGAGGACTTTGAAGACACATATGGGGAGT
TGGAATTCAAGAATGATGAAACTGTGAAAACCATAAGGGTTAAAATAGTAGATGAGGAGGAATACGAA
AGGCAAGAGAATTTCTTCATTGCCCTTGGTGAACCGAAATGGATGGAACGTGGAATATCAGATGTGAC
AGACAGGAAGCTGACTATGGAAGAAGAGGAGGCCAAGAGGATAGCAGAGATGGGAAAGCCAGTATTGG
GTGAACACCCCAAACTAGAAGTCATCATTGAAGAGTCCTATGAGTTCAAGACTACGGTGGACAAACTG
ATCAAGAAGACAAACCTGGCCTTGGTTGTGGGGACCCATTCCTGGAGGGACCAGTTCATGGAGGCCAT
CACCGTCAGTGCAGCAGGGGATGAGGATGAGGATGAATCCGGGGAGGAGAGGCTGCCCTCCTGCTTTG
ACTACGTCATGCACTTCCTGACTGTCTTCTGGAAGGTGCTGTTTGCCTGTGTGCCCCCCACAGAGTAC
TGCCACGGCTGGGCCTGCTTCGCCGTCTCCATCCTCATCATTGGCATGCTCACCGCCATCATTGGGGA
CCTGGCCTCGCACTTCGGCTGCACCATTGGTCTCAAAGATTCAGTCACAGCTGTTGTTTTCGTGGCAT
TTGGCACCTCTGTCCCAGATACGTTTGCCAGCAAAGCTGCTGCCCTCCAGGATGTATATGCAGACGCC
TCCATTGGCAACGTGACGGGCAGCAACGCCGTCAATGTCTTCCTGGGCATCGGCCTGGCCTGGTCCGT
GGCCGCCATCTACTGGGCTCTGCAGGGACAGGAGTTCCACGTGTCGGCCGGCACACTGGCCTTCTCCG
TCACCCTCTTCACCATCTTTGCATTTGTCTGCATCAGCGTGCTCTTGTACCGAAGGCGGCCGCACCTG
GGAGGGGAGCTTGGTGGCCCCCGTGGCTGCAAGCTCGCCACAACATGGCTCTTTGTGAGCCTGTGGCT
CCTCTACATACTCTTTGCCACACTAGAGGCCTATTGCTACATCAAGGGGTTCCTCGAG

NOV55g, CG56258-05

| | | | |
|---|---|---|---|
| Protein Sequence | SEQ ID NO: 868 | 921 aa | MW at 102413.7kD |

MAWLRLQPLTSAFLHFGLVTFVLFLNGLRAEAGGSGDVPSTGQNNESCSGSSDCKEGVILPIWYPENP
SLGDKIARVIVYFVALIYMFLGVSIIADRFMASIEVITSOEREVTIKKPNGETSTTTIRVWNETVSNL
TLMALGSSAPEILLSLIEVCGHGFIAGDLGPSTIVGSAAFNMFIIIGICVYVIPDGETRKIKHLRVFF
ITAAWSIFAYIWLYMILAVFSPGVVQVWEGLLTLFFFPVCVLIAWVADKRLLFYKYMHKKYRTDKHRG
IIIETEGDHPKGIEMDGKMMNSHFLDGNLVPLEGKEVDESRREMIRILKDLKQKHPEKDLDQLVEMAN
YYALSHQQKSRAFYRIQATRMMTGAGNILKKHAAEQAKKASSMSEVHTDEPEDFISKVFFDPCSYQCL
ENCGAVLLTVVRKGGDMSKTMYVDYKTEDGSANAGADYEFTEGTVVLKPGETQKEFSVGIIDDDIFEE
DEHFFVRLSNVRIEEEQPEEGMPPAIFNSLPLPRAVLASPCVATVTILDDDHAGIFTFECDTIHVSES
IGVMEVKVLRTSGARGTVIVPFRTVEGTAKGGGEDFEDTYGELEFKNDETVKTIRVKIVDEEEYERQE
NFFIALGEPKWMERGISDVTDRKLTMEEEEAKRIAEMGKPVLGEHPKLEVIIEESYEFKTTVDKLIKK
TNLALVVGTHSWRDQFMEAITVSAAGDEDEDESGEERLPSCFDYVMHFLTVFWKVLFACVPPTEYCHG
WACFAVSILIIGMLTAIIGDLASHFGCTIGLKDSVTAVVFVAFGTSVPDTFASKAAALQDVYADASIG
NVTGSNAVNVFLGIGLAWSVAAIYWALQGQEFHVSAGTLAFSVTLFTIFAFVCISVLLYRRRPHLGGE
LGGPRGCKLATTWLFVSLWLLYILFATLEAYCYIKGF

| | | |
|---|---|---|
| NOV55h, CG56258-06 | SEQ ID NO: 869 | 2813 bp |

| | | |
|---|---|---|
| DNA Sequence | ORF Start: ATG at 9 | ORF Stop: TAG at 2793 |

TCTCGTGTATGGCGTGGTTAAGGTTGCAGCCTCTCACCTCTGCCTTCCTCCATTTTGGGCTGGTTACC
TTTGTGCTCTTCCTGAATGGTCTTCGAGCAGAGGCTGGTGGCTCAGGGGACGTGCCAAGCACAGGGCA
GAACAATGAGTCCTGTTCAGGGTCATCGGACTGCAAGGAGGGTGTCATCCTGCCAATCTGGTACCCGG
AGAACCCTTCCCTTGGGGACAAGATTGCCAGGGTCATTGTCTATTTTGTGGCCCTGATATACATGTTC
CTTGGGGTGTCCATCATTGCTGACCGCTTCATGGCATCTATTGAAGTCATCACCTCTCAAGAGAGGGA
GGTGACAATTAAGAAACCCAATGGAGAAACCAGCACAACCACTATTCGGGTCTGGAATGAAACTGTCT
CCAACCTGACCCTTATGGCCCTGGGTTCCTCTGCTCCTGAGATACTCCTCTCTTTAATTGAGGTGTGT
GGTCATGGGTTCATTGCTGGTGATCTGGGACCTTCTACCATTGTAGGGAGTGCAGCCTTCAACATGTT
CATCATCATTGGCATCTGTGTCTACGTGATCCCAGACGGAGAGACTCGCAAGATCAAGCATCTACGAG
TCTTCTTCATCACCGCTGCTTGGAGTATCTTTGCCTACATCTGGCTCTATATGATTCTGGCAGTCTTC
TCCCCTGGTGTGGTCCAGGTTTGGGAAGGCCTCCTCACTCTCTTCTTCTTTCCAGTGTGTGTCCTTCT
GGCCTGGGTGGCAGATAAACGACTGCTCTTCTACAAATACATGCACAAAAAGTACCGCACAGACAAAC
ACCGAGGAATTATCATAGAGACAGAGGGTGACCACCCTAAGGGCATTGAGATGGATGGGAAAATGATG
AATTCCCATTTTCTAGATGGGAACCTGGTGCCCCTGGAAGGGAAGGAAGTGGATGAGTCCCGCAGAGA
GATGATCCGGATTCTCAAGGATCTGAAGCAAAAACACCCAGAGAAGGACTTAGATCAGCTGGTGGAGA
TGGCCAATTACTATGCTCTTTCCCACCAACAGAAGAGCCGTGCCTTCTACCGTATCCAAGCCACTCGT
ATGATGACTGGTGCAGGCAATATCCTGAAGAAACATGCAGCAGAACAAGCCAAGAAGGCCTCCAGCAT
GAGCGAGGTGCACACCGATGAGCCTGAGGACTTTATTTCCAAGGTCTTCTTTGACCCATGTTCTTACC
AGTGCCTGGAGAACTGTGGGGCTGTACTCCTGACAGTGGTGAGGAAAGGGGGAGACATGTCAAAGACC
ATGTATGTGGACTACAAAACAGAGGATGGTTCTGCCAATGCAGGGGCTGACTATGAGTTCACAGAGGG
CACGGTGGTTCTGAAGCCAGGAGAGACCCAGAAGGAGTTCTCCGTGGGCATAATTGATGACGACATTT
TTGAGGAGGATGAACACTTCTTTGTAAGGTTGAGCAATGTCCGCATAGAGGAGGAGCAGCCAGAGGAG
GGGATGCCTCCAGCAATATTCAACAGTCTTCCCTTGCCTCGGGCTGTCCTAGCCTCCCCTTGTGTGGC
CACAGTTACCATCTTGGATGATGACCATGCAGGCATCTTCACTTTTGAATGTGATACTATTCATGTCA
GTGAGAGTATTGGTGTTATGGAGGTCAAGGTTCTGCGGACATCAGGTGCCCGGGGTACAGTCATCGTC
CCCTTTAGGACAGTAGAAGGGACAGCCAAGGGTGGCGGTGAGGACTTTGAAGACACATATGGGGAGTT
GGAATTCAAGAATGATGAAACTGTGAAAACTCTTCAGGTGAAGATAGTTGATGACGAGGAATATGAGA
AAAAGGATAATTTCTTCATTGAGCTGGGCCAGCCCCAGTGGCTTAAGCGAGGGATTTCAGCTCTGCTA
CTCAATCAAGGGGATGGGGACAGGAAGCTAACAGCCGAGGAGGAGGAGGCTCGGAGGATAGCAGAGAT
GGGCAAGCCAGTTCTTGGGGAGAACTGCCGGCTGGAGGTCATCATCGAGGAGTCATATGATTTTAAGA
ACACGGTGGATAAACTCATCAAGAAAACGAACTTGGCCTTGGTAATTGGGACCCATTCATGGAGGGAG
CAGTTTTTAGAGGCAATTACGGTGAGCGCAGGGGACGAGGAGGAGGAGGAGGACGGGTCCCGGGAGGA
GCGGCTGCCGTCGTGCTTTGACTACGTGATGCACTTCCTGACGGTGTTCTGGAAGGTGCTCTTCGCCT
GTGTGCCCCCCACCGAGTACTGCCACGGCTGGGCCTGCTTTGGTGTCTCCATCCTGGTCATCGGCCTG
CTCACCGCCCTCATTGGGGACCTCGCCTCCCACTTCGGCTGCACCGTTGGCCTCAAGGACTCTGTCAA
TGCTGTTGTCTTCGTTGCCCTGGGCACCTCCATCCCTGACACGTTCGCCAGCAAGGTGGCGGCGCTGC
AGGACCAGTGCGCCGACGCGTCCATCGGCAACGTGACCGGCTCCAACGCGGTGAACGTGTTCCTTGGC
CTGGGCGTCGCCTGGTCTGTGGCCGCCGTGTACTGGGCGGTGCAGGGCCGCCCCTTCGAGGTGCGCAC
TGGCACGCTGGCCTTCTCCGTCACGCTCTTCACCGTCTTCGCCTTCGTGGGCATTGCCGTGCTGCTGT
ACCGGCGCCGGCCGCACATCGGCGGCGAGCTGGGCGGCCCGCGCGGACCCAAGCTCGCCACCACCGCG
CTCTTCCTGGGCCTCTGGCTCCTGTACATCCTCTTCGCCAGCCTGGAGGCGTACTGCCACATCCGGGG
CTTCTAGGGCCTCGCGCAGAGACTC

NOV55h, CG56258-06

| | | | |
|---|---|---|---|
| Protein Sequence | SEQ ID NO: 870 | 928 aa | MW at 102900.1kD |

MAWLRLQPLTSAFLHFGLVTFVLFLNGLRAEAGGSGDVPSTGQNNESCSGSSDCKEGVILPIWYPENP
SLGKDIARVIVYFVALIYMFLGVSIIADRFMASIEVITSQEREVTIKKPNGETSTTTIRVWNETVSNL
TLMALGSSAPEILLSLIEVCGHGFIAGDLGPSTIVGSAAFNMFIIIGICVYVIPDGETRKIKHLRVFF
ITAAWSIFAYIWLYMILAVFSPGVVQVWEGLLTLFFFPVCVLLAWVADKRLLFYKYMHKKYRTDKHRG
IIIETEGDHPKGIEMDGKMMNSHFLDGNLVPLEGKEVDESRREMIRILKDLKQKHPEKDLDQLVEMAN
YYALSHQQKSRAFYRIQATRMMTGAGNILKKHAAEQAKKASSMSEVHTDEPEDFISKVFFDPCSYQCL
ENCGAVLLTVVRKGGDMSKTMYVDYKTEDGSANAGADYEFTEGYVVLKPGETQKEFSVGIIDDDIFEE
DEHFFVRLSNVRIEEEQPEEGMPPAIFNSLPLPRAVLASPCVATVTILDDDHAGIFTFECDTIHVSES
IGVMEVKVLRTSGARGTVIVPFRTVEGTAKGGGEDFEDTYGELEFKNDETVKTLQVKIVDDEEYEKKD
NFFIELGQPQWLKRGISALLLNQGDGDRKLTAEEEEARRIAEMGKPVLGENCRLEVIIEESYDFKNTV
DKLIKKTNLALVIGTHSWREQFLEAITVSAGDEEEEEDGSREERLPSCFDYVMHFLTVFWKVLFACVP
PTEYCHGWACFGVSILVIGLLTALIGDLASHFGCTVGLKDSVNAVVFVALGTSIPDTFASKVAALQDQ
CADASIGNVTGSNAVNVFLGLGVAWSVAAVYWAVQGRPFEVRTGTLAFSVTLFTVFAFVGIAVLLYRR
RPHIGGELGGPRGPKLATTALFLGLWLLYILFASLEAYCHIRGF

[0668] A ClustalW comparison of the above protein sequences yields the following sequence alignment shown in Table 55B.

TABLE 55B
Comparison of the NOV55 protein sequences.

| | |
|---|---|
| NOV55a | ---MAWLRLQPLTSAFLHFGLVTFVLFNGLRAEAGGSGDVPSTGQNNESCSGSSDCKEG |
| NOV55b | ---MAWLRLQPLTSAFLHFGLVTFVLFNGLRAEAGGSGDVPSTGQNNESCSGSSDCKEG |
| NOV55c | GSTMAWLRLQPLTSAFLHFGLVTFVLFNGLRAEAGGSGDVPSTGQNNESCSGSSDCKEG |
| NOV55d | -------------------------------GSEAGGSGDVPSTGQNNESCSGSSDCKEG |
| NOV55e | ---MAWLRLQPLTSAFLHFGLVTFVLFNGLRAEAGGSGDVPSTGQNNESCSGSSDCKEG |
| NOV55f | ---------------------------------EAGGSGDVPSTGQNNESCSGSSDCKEG |
| NOV55g | ---MAWLRLQPLTSAFLHFGLVTFVLFNGLRAEAGGSGDVPSTGQNNESCSGSSDCKEG |
| NOV55h | ---MAWLRLQPLTSAFLHFGLVTFVLFNGLRAEAGGSGDVPSTGQNNESCSGSSDCKEG |
| NOV55a | VILPIWYPENPSLGDKIARVIVYFVALIYMFLGVSIIADRFMASIEVITSQEREVTIKKP |
| NOV55b | VILPIWYPENPSLGDKIARVIVYFVALIYMFLGVSIIADRFMASIEVITSQEREVTIKKP |
| NOV55c | VILPIWYPENPSLGDKIARVIVYFVALIYMFLGVSIIADRFMASIEVITSQEREVTIKKP |
| NOV55d | VILPIWYPENPSLGDKIARVIVYFVALIYMFLGVSIIADRFMASIEVITSQEREVTIKKP |
| NOV55e | VILPIWYPENPSLGDKIARVIVYFVALIYMFLGVSIIADRFMASIEVITSQEREVTIKKP |
| NOV55f | VILPIWYPENPSLGDKIARVIVYFVALIYMFLGVSIIADRFMASIEVITSQEREVTIKKP |
| NOV55g | VILPIWYPENPSLGDKIARVIVYFVALIYMFLGVSIIADRFMASIEVITSQEREVTIKKP |
| NOV55h | VILPIWYPENPSLGDKIARVIVYFVALIYMFLGVSIIADRFMASIEVITSQEREVTIKKP |
| NOV55a | NGETSTTTIRVWNETVSNLTLMALGSSAPEILLSLIEVCGHGFIAGDLGPSTIVGSAAFN |
| NOV55b | NGETSTTTIRVWNETVSNLTLMALGSSAPEILLSLIEVCGHGFIAGDLGPSTIVGSAAFN |
| NOV55c | NGETSTTTIRVWNETVSNLTLMALGSSAPEILLSLIEVCGHGFIAGDLGPSTIVGSAAFN |
| NOV55d | NGETSTTTIRVWNETVSNLTLMALGSSAPEILLSLIEVCGHGFIAGDLGPSTIVGSAAFN |
| NOV55e | NGETSTTTIRVWNETVSNLTLMALGSSAPEILLSLIEVCGHGFIAGDLGPSTIVGSAAFN |
| NOV55f | NGETSTTTIRVWNETVSNLTLMALGSSAPEILLSLIEVCGHGFIAGDLGPSTIVGSAAFN |
| NOV55g | NGETSTTTIRVWNETVSNLTLMALGSSAPEILLSLIEVCGNGFIAGDLGPSTIVGSAAFN |
| NOV55h | NGETSTTTIRVWNETVSNLTLMALGSSAPEILLSLIEVCGHGFIAGDLGPSTIVGSAAFN |
| NOV55a | MFIIIGICVYVIPDGETRKIKHLRVFFITAAWSIFAYIWLYMILAVFSPGVVQVWEGLLT |
| NOV55b | MFIIIGICVYVIPDGETRKIKHLRVFFITAAWSIFAYIWLYMILAVFSPGVVQVWEGLLT |
| NOV55c | MFIIIGICVYVIPDGETRKIKHLRVFFITAAWSIFAYIWLYMILAVFSPGVVQVWEGLLT |
| NOV55d | MFIIIGICVYVIPDGETRKIKHLRVFFITAAWSIFAYIWLYMILAVFSPGVVQVWEGLLT |
| NOV55e | MFIIIGICVYVIPDGETRKIKHLRVFFITAAWSIFAYIWLYMILAVFSPGVVQVWEGLLT |
| NOV55f | MFIIIGICVYVIPDGETRKIKHLRVFFITAAWSIFAYIWLYMILAVFSPGVVQVWEGLLT |
| NOV55g | MFIIIGICVYVIPDGETRKIKHLRVFFITAAWSIFAYIWLYMILAVFSPGVVQVWEGLLT |
| NOV55h | MFIIIGICVYVIPDGETRKIKHLRVFFITAAWSIFAYIWLYMILAVFSPGVVQVWEGLLT |
| NOV55a | LFFFPVCVLLAWVADKRLLFYKYMHKKYRTDKHRGIIIETEGDHPKGIEMDGKMMNSHFL |
| NOV55b | LFFFPVCVLLAWVADKRLLFYKYMHKKYRTDKHRGIIIETEGDHPKGIEMDGKMMNSHFL |
| NOV55c | LFFFPVCVLLAWVADKRLLFYKYMHKKYRTDKHRGIIIETEGDHPKGIEMDGKMMNSHFL |
| NOV55d | LFFFPVCVLLAWVADKRLLFYKYMHKKYRTDKHRGIIIETEGDHPKGIEMDGKMMNSHFL |
| NOV55e | LFFFPVCVLLAWVADKRLLFYKYMHKKYRTDKHRGIIIETEGDHPKGIEMDGKMMNSHFL |
| NOV55f | LFFFPVCVLLAWVADKRLLFYKYMHKKYRTDKHRGIIIETEGDHPKGIEMDGKMMNSHFL |
| NOV55g | LFFFPVCVLLAWVADKRLLFYKYMHKKYRTDKHRGIIIETEGDHPKGIEMDGKMMNSHFL |
| NOV55h | LFFFPVCVLLAWVADKRLLFYKYMHKKYRTDKHRGIIIETEGDHPKGIEMDGKMMNSHFL |
| NOV55a | DGNLVPLEGKEVDESRREMIRILKDLKQKHPEKDLDQLVEMANYYALSHQQKSRAFYRIQ |
| NOV55b | DGNLVPLEGKEVDESRREMIRILKDLKQKHPEKDLDQLVEMANYYALSHQQKSRAFYRIQ |
| NOV55c | DGNLVPLEGKEVDESRREMIRILKDLKQKHPEKDLDQLVEMANYYALSHQQKSRAFYRIQ |
| NOV55d | DGNLVPLEGKEVDESRREMIRILKDLKQKHPEKDLDQLVEMANYYALSHQQKSRAFYRIQ |
| NOV55e | DGNLVPLEGKEVDESRREMIRILKDLKQKHPEKDLDQLVEMANYYALSHQQKSRAFYRIQ |
| NOV55f | DGNLVPLEGKEVDESRREMIRILKDLKQKHPEKDLDQLVEMANYYALSHQQKSRAFYRIQ |
| NOV55g | DGNLVPLEGKEVDESRREMIRILKDLKQKHPEKDLDQLVEMANYYALSHQQKSRAFYRIQ |
| NOV55h | DGNLVPLEGKEVDESRREMIRILKDLKQKHPEKDLDQLVEMANYYALSHQQKSRAFYRIQ |
| NOV55a | ATRMMTGAGNILKKHAAEQAKKASSMSEVHTDEPEDFISKVFFDPCSYQCLENCGAVLLT |
| NOV55b | ATRMMTGAGNILKKHAAEQAKKASSMSEVHTDEPEDFISKVFFDPCSYQCLENCGAVLLT |
| NOV55c | ATRMMTGAGNILKKHAAEQAKKASSMSEVHTDEPEDFISKVFFDPCSYQCLENCGAVLLT |
| NOV55d | ATRMMTGAGNILKKHAAEQAKKASSMSEVHTDEPEDFISKVFFDPCSYQCLENCGAVLLT |
| NOV55e | ATRMMTGAGNILKKHAAEQAKKASSMSEVHTDEPEDFISKVFFDPCSYQCLENCGAVLLT |
| NOV55f | ATRMMTGAGNILKKHAAEQAKKASSMSEVHTDEPEDFISKVFFDPCSYQCLENCGAVLLT |
| NOV55g | ATRMMTGAGNILKKHAAEQAKKASSMSEVHTDEPEDFISKVFFDPCSYQCLENCGAVLLT |
| NOV55h | ATRMMTGAGNILKKHAAEQAKKASSMSEVHTDEPEDFISKVFFDPCSYQCLENCGAVLLT |
| NOV55a | VVRKGGDMSKTMYVDYKTEDGSANAGADYEFTEGTVVLKPGETQKEFSVGIIDDDIFEED |
| NOV55b | VVRKGGDMSKTMYVDYKTEDGSANAGADYEFTEGTVVLKPGETQKEFSVGIIDDDIFEED |
| NOV55c | VVRKGGDMSKTMYVDYKTEDGSANAGADYEFTEGTVVLKPGETQKEFSVGIIDDDIFEED |
| NOV55d | VVRKGGDMSKTMYVDYKTEDGSANAGADYEFTEGTVVLKPGETQKEFSVGIIDDDIFEED |
| NOV55e | VVRKGGDMSKTMYVDYKTEDGSANAGADYEFTEGTVVLKPGETQKEFSVGIIDDDIFEED |
| NOV55f | VVRKGGDMSKTMYVDYKTEDGSANAGADYEFTEGTVVLKPGETQKEFSVGIIDDDIFEED |
| NOV55g | VVRKGGDMSKTMYVDYKTEDGSANAGADYEFTEGTVVLKPGETQKEFSVGIIDDDIFEED |
| NOV55h | VVRKGGDMSKTMYVDYKTEDGSANAGADYEFTEGTVVLKPGETQKEFSVGIIDDDIFEED |
| NOV55a | EHFFVRLSNVRIEEEQPEEGMPPAIFNSLPLPRAVLASPCVATVTILDDDHAGIFTFECD |
| NOV55b | EHFFVRLSNVRIEEEQPEEGMPPAIFNSLPLPRAVLASPCVATVTILDDDHAGIFTFECD |
| NOV55c | EHFFVRLSNVRIEEEQPEEGMPPAIFNSLPLPRAVLASPCVATVTILDDDHAGIFTFECD |
| NOV55d | EHFFVRLSNVRIEEEQPEEGMPPAIFNSLPLPRAVLASPCVATVTILDDDHAGIFTFECD |
| NOV55e | EHFFVRLSNVRIEEEQPEEGMPPAIFNSLPLPRAVLASPCVATVTILDDDHAGIFTFECD |
| NOV55f | EHFFVRLSNVRIEEEQPEEGMPPAIFNSLPLPRAVLASPCVATVTILDDDHAGIFTFECD |
| NOV55g | EHFFVRLSNVRIEEEQPEEGMPPAIFNSLPLPRAVLASPCVATVTILDDDHAGIFTFECD |
| NOV55h | EHFFVRLSNVRIEEEQPEEGMPPAIFNSLPLPRAVLASPCVATVTILDDDHAGIFTFECD |
| NOV55a | TIHVSESIGVMEVKVLRTSGARGTVIVPFRTVEGTAKGGGEDFEDTYGELEFKNDETVKT |
| NOV55b | TIHVSESIGVMEVKVLRTSGARGTVIVPFRTVEGTAKGGGEDFEDTYGELEFKNDETVKT |
| NOV55c | TIHVSESIGVMEVKVLRTSGARGTVIVPFRTVEGTAKGGGEDFEDTYGELEFKNDETVKT |
| NOV55d | TIHVSESIGVMEVKVLRTSGARGTVIVPFRTVEGTAKGGGEDFEDTYGELEFKNDETVKT |
| NOV55e | TIHVSESIGVMEVKVLRTSGARGTVIVPFRTVEGTAKGGGEDFEDTYGELEFKNDETVKT |
| NOV55f | TIHVSESIGVMEVKVLRTSGARGTVIVPFRTVEGTAKGGGEDFEDTYGELEFKNDETVKT |
| NOV55g | TIHVSESIGVMEVKVLRTSGARGTVIVPFRTVEGTAKGGGEDFEDTYGELEFKNDETVKT |
| NOV55h | TIHVSESIGVMEVKVLRTSGARGTVIVPFRTVEGTAKGGGEDFEDTYGELEFKNDETVKT |
| NOV55a | IRVKIVDEEEYERQENFFIALGEP----KWMERGISDVT---DRKLTMEEEEAKRIAEMG |
| NOV55b | IHIKVIDDEAYEKNKNYFIEMMGPRMVDMSFQKALLLSP---DRKLTMEEEEAKRIAEMG |
| NOV55c | IRVKIVDEEEYERQENFFIALGEP----KWMERGISDVT---DRKLTMEEEEAKRIAEMG |
| NOV55d | IRVKIVDEEEYERQENFFIALGEP----KWMERGISDVT---DRKLTMEEEEAKRIAEMG |
| NOV55e | LQVKIVDDEEYEKKDNFFIELGQPQ-WLKRGISALLLNQGDGDRKLTAEEEEARRIAEMG |
| NOV55f | IRVKIVDEEEYERQENFFIALGEP----KWMERGISDVT---DRKLTMEEEEAKRIAEMG |
| NOV55g | IRVKIVDEEEYERQENFFIALGEP----KWMERGISDVT---DRKLTMEEEEAKRIAEMG |
| NOV55h | LQVKIVDDEEYEKKDNFFIELGQPQ-WLKRGISALLLNQGDGDRKLTAEEEEARRIAEMG |
| NOV55a | KPVLGEHPKLEVIIEESYEFKTTVDKLIKKTNLALVVGTHSWRDQFMEAITVSAAGDEDE |
| NOV55b | KPVLGEHPKLEVIIEESYEFKTTVDKLIKKTNLALVVGTHSWRDQFMEAITVSAAGDEDE |
| NOV55c | KPVLGEHPKLEVIIEESYEFKTTVDKLIKKTNLALVVGTHSWRDQFMEAITVSAAGDEDE |
| NOV55d | KPVLGEHPKLEVIIEESYEFKTTVDKLIKKTNLALVVGTHSWRDQFMEAITVSAAGDEDE |
| NOV55e | KPVLGENCKLEVIIEESYDFKNTVDKLIKKTNLALVIGTHSWREQFLEAITVSAG-DEEE |
| NOV55f | KPVLGEHPKLEVIIEESYEFKTTVDKLIKKTNLALVVGTHSWRDQFMEAITVSAAGDEDE |
| NOV55g | KPVLGEHPKLEVIIEESYEFKTTVDKLIKKTNLALVVGTHSWRDQFMEAITVSAAGDEDE |
| NOV55h | KPVLGENCKLEVIIEESYDFKNTVDKLIKKTNLALVIGTHSWREQFLEAITVSAG-DEEE |
| NOV55a | DESG--EERLPSCFDYVMHFLTVFWKVLFACVPPTEYCHGWACFAVSILIIGMLTAIIGD |
| NOV55b | DESG--EERLPSCFDYVMHFLTVFWKVLFACVPPTEYCHGWACFAVSILIIGMLTAIIGD |
| NOV55c | DESG--EERLPSCFDYVMHFLTVFWKVLFACVPPTEYCHGWACFAVSILIIGMLTAIIGD |
| NOV55d | DESG--EERLPSCFDYVMHFLTVFWKVLFACVPPTEYCHGWACFAVSILIIGMLTAIIGD |
| NOV55e | EEDGSREERLPSCFDYVMHFLTVFWKVLFACVPPTEYCHGWACFAVSILIIGMLTAIIGD |
| NOV55f | DESG--EERLPSCFDYVMHFLTVFWKVLFACVPPTEYCHGWACFAVSILIIGMLTAIIGD |
| NOV55g | DESG--EERLPSCFDYVMHFLTVFWKVLFACVPPTEYCHGWACFAVSILIIGMLTAIIGD |
| NOV55h | EEDGSREERLPSCFDYVMHFLTVFWKVLFACVPPTEYCHGWACFAVSILIIGMLTAIIGD |
| NOV55a | LASHFGCTIGLKDSVTAVVFVAFGTSVPDTFASKAAALQDVYADASIGNVTGSNAVNVFL |
| NOV55b | LASHFGCTIGLKDSVTAVVFVAFGTSVPDTFASKAAALQDVYADASIGNVTGSNAVNVFL |
| NOV55c | LASHFGCTIGLKDSVTAVVFVAFGTSVPDTFASKAAALQDVYADASIGNVTGSNAVNVFL |
| NOV55d | LASHFGCTIGLKDSVTAVVFVAFGTSVPDTFASKAAALQDVYADASIGNVTGSNAVNVFL |
| NOV55e | LASHFGCTVGLKDSVNAVVFVALGTSIPDTFASKVAALQDQCADASIGNVTGSNAVNVFL |
| NOV55f | LASHFGCTIGLKDSVTAVVFVAFGTSVPDTFASKAAALQDVYADASIGNVTGSNAVNVFL |
| NOV55g | LASHFGCTIGLKDSVTAVVFVAFGTSVPDTFASKAAALQDVYADASIGNVTGSNAVNVFL |
| NOV55h | LASHFGCTVGLKDSVNAVVFVALGTSIPDTFASKVAALQDQCADASIGNVTGSNAVNVFL |
| NOV55a | GIGLAWSVAAIYWALQGQEFHVSAGTLAFSVTLFTIFAFVCICVLLYRRRPHLGGELGGP |
| NOV55b | GIGLAWSVAAIYWALQGQEFHVSAGTLAFSVTLFTIFAFVCICVLLYRRRPHLGGELGGP |
| NOV55c | GIGLAWSVAAIYWALQGQEFHVSAGTLAFSVTLFTIFAFVCICVLLYRRRPHLGGELGGP |
| NOV55d | GIGLAWSVAAIYWALQGQEFEVSAGTLAFSVTLFTIFAFVCICVLLYRRRPHLGGELGGP |
| NOV55e | GLGVAWSVAAVYWALQGRPFHVSARTTAFSVTLFTVFAFVGIAVLLYRRRPHIGGELGGP |
| NOV55f | GIGLAWSVAAIYWALQGQEFHVSAGTLAFSVTLFTIFAFVCICVLLYRRRPHLGGELGGP |
| NOV55g | GIGLAWSVAAIYWALQGQEFHVSAGTLAFSVTLFTIFAFVCICVLLYRRRPHLGGELGGP |
| NOV55h | GLGVAWSVAAVYWALQGRPFEVSARTTAFSVTLFTVFAFVGIAVLLYRRRPHIGGELGGP |
| NOV55a | RGCKLATTWLFVSLWLLYILFATLEAYCYIKGF-- |
| NOV55b | RGCKLATTWLFVSLWLLYILFATLEAYCYIKGF-- |
| NOV55c | RGCKLATTWLFVSLWLLYILFATLEAYCYIKGFLE |
| NOV55d | RGCKLATTWLFVSLWLLYILFATLEAYCYIKGFLE |
| NOV55e | RGPKLATTALFLGLWLLYILFASLEAYCHIRGF-- |
| NOV55f | RGCKLATTWLFVSLWLLYILFATLEAYCYIKGF-- |
| NOV55g | RGCKLATTWLFVSLWLLYILFATLEAYCYIKGF-- |
| NOV55h | RGPKLATTALFLGLWLLYILFASLEAYCHIRGF-- |
| NOV55a | (SEQ ID NO: 856) |
| NOV55b | (SEQ ID NO: 858) |
| NOV55C | (SEQ ID NO: 860) |
| NOV55d | (SEQ ID NO: 862) |
| NOV55e | (SEQ ID NO: 864) |
| NOV55f | (SEQ ID NO: 866) |
| NOV55g | (SEQ ID NO: 868) |
| NOV55h | (SEQ ID NO: 870) |

[0669] Further analysis of the NOV55a protein yielded the following properties shown in Table 55C.

TABLE 55C
Protein Sequence Properties NOV55a

| | |
|---|---|
| SignalP analysis: | Cleavage site between residues 31 and 32 |
| PSORT II analysis: | |

| | |
|---|---|
| PSG: | a new signal peptide prediction method |
| | N-region: length 5; pos.chg 1; neg.chg 0 |
| | H-region: length 23; peak value 11.61 |
| | PSG score: 7.21 |
| GvH: | von Heijne's method for signal seq. recognition |
| | GvH score (threshold: −2.1): 0.67 |
| | possible cleavage site: between 30 and 31 |

>>> Seems to have a cleavable signal peptide (1 to 30)
ALOM: Klein et al's method for TM region allocation

| Init position for calculation: 31 | | |
|---|---|---|
| Tentative number of TMS(s) for the threshold 0.5: 11 | | |
| INTEGRAL | Likelihood = −8.92 | Transmembrane 78-94 |
| INTEGRAL | Likelihood = −6.64 | Transmembrane 170-186 |
| INTEGRAL | Likelihood = −3.24 | Transmembrane 208-224 |
| INTEGRAL | Likelihood = −8.49 | Transmembrane 235-251 |
| INTEGRAL | Likelihood = 0.21 | Transmembrane 508-524 |
| INTEGRAL | Likelihood = −1.12 | Transmembrane 724-740 |
| INTEGRAL | Likelihood = −9.61 | Transmembrane 750-766 |
| INTEGRAL | Likelihood = 0.05 | Transmembrane 775-791 |
| INTEGRAL | Likelihood = −3.35 | Transmembrane 823-839 |
| INTEGRAL | Likelihood = −8.39 | Transmembrane 858-874 |
| INTEGRAL | Likelihood = −3.56 | Transmembrane 893-909 |

| | |
|---|---|
| PERIPHERAL | Likelihood = 1.06 (at 137) |

| | ALOM score: −9.61 (number of TMSs: 11) |
|---|---|
| MTOP: | Prediction of membrane topology (Hartmann et al.) |
| | Center position for calculation: 15 |
| | Charge difference: −3.5 C(−1.0) − N(2.5) |
| | N >= C: N-terminal side will be inside |

>>> membrane topology: type 3a
MITDISC: discrimination of mitochondrial targeting seq

| | | | |
|---|---|---|---|
| R content: | 2 | Hyd Moment(75): | 4.35 |
| Hyd Moment(95): | 3.78 | G content: | 2 |
| D/E content: | 1 | S/T content: | 3 |
| Score: −3.73 | | | |

Gavel: prediction of cleavage sites for mitochondrial preseq

R-2 motif at 39 LRA|EA

NUCDISC: discrimination of nuclear localization signals

pat4: RRRP (4) at 876
pat7: none
bipartite: none
content of basic residues: 9.0%
NLS Score: −0.22

KDEL: ER retention motif in the C-terminus: none
ER Membrane Retention Signals:

XXRR-like motif in the N-terminus: AWLR
KKXX-like motif in the C-terminus: YIKG

SKL: peroxisomal targeting signal in the C-terminus: none
PTS2: 2nd peroxisomal targeting signal: none
VAC: possible vacuolar targeting motif: found

ILPI at 59

RNA-binding motif: none
Actinin-type actin-binding motif:

type 1: none
type 2: none

NMYR: N-myristoylation pattern: none
Prenylation motif: none
memYQRL: transport motif from cell surface to Golgi: none
Tyrosines in the tail: none
Dileucine motif in the tail: none
checking 63 PROSITE DNA binding motifs: none
checking 71 PROSITE ribosomal protein motifs: none
checking 33 PROSITE prokaryotic DNA binding motifs: none
NNCN: Reinhardt's method for Cytoplasmic/Nuclear discrimination

Prediction: cytoplasmic
Reliability: 94.1

COIL: Lupas's algorithm to detect coiled-coil regions

total: 0 residues

Final Results (k = 9/23):

66.7%: endoplasmic reticulum
11.1%: nuclear
11.1%: vesicles of secretory system
11.1%: mitochondrial

>> prediction for CG56258-04 is end (k = 9)

[0670] A search of the NOV55a protein against the Geneseq database, a proprietary database that contains sequences published in patents and patent publication, yielded several homologous proteins shown in Table 55D.

TABLE 55D
Geneseq Results for NOV55a

| | | NOV55a | Identities/ | |
|---|---|---|---|---|
| | | Residues/ | Similarities for | |
| Geneseq | Protein/Organism/Length | Match | the Matched | Expect |
| Identifier | [Patent #, Date] | Residues | Region | Value |
| ABB83246 | Human transporter protein - | 1 . . . 921 | 921/921 (100%) | 0.0 |
| | Homo sapiens, 921 aa. | 1 . . . 921 | 921/921 (100%) | |
| | [WO200233086-A2, 25-APR- | | | |
| | 2002] | | | |
| ABB81913 | Human ion exchanger protein #1 - | 1 . . . 921 | 921/921 (100%) | 0.0 |
| | Homo sapiens, 921 aa. | 1 . . . 921 | 921/921 (100%) | |
| | [WO200259316-A2, 01-AUG- | | | |
| | 2002] | | | |
| ABP74104 | Human TRICH SEQ ID NO 9 - | 1 . . . 921 | 921/921 (100%) | 0.0 |
| | Homo sapiens, 921 aa. | 1 . . . 921 | 921/921 (100%) | |
| | [WO200246415-A2, 13-JUN- | | | |
| | 2002] | | | |
| ABB81915 | Human ion exchanger protein #1 | 1 . . . 921 | 920/921 (99%) | 0.0 |
| | Asp/Gly mutant - Homo sapiens, | 1 . . . 921 | 920/921 (99%) | |
| | 921 aa. [WO200259316-A2, 01- | | | |
| | AUG-2002] | | | |
| ABB81916 | Human ion exchanger protein #1 | 1 . . . 921 | 921/922 (99%) | 0.0 |
| | Ala mutant - Homo sapiens, 922 | 1 . . . 922 | 921/922 (99%) | |
| | aa. [WO200259316-A2, 01- | | | |
| | AUG-2002] | | | |

[0671] In a BLAST search of public sequence databases, the NOV55a protein was found to have homology to the proteins shown in the BLASTP data in Table 55E.

TABLE 55E
Public BLASTP Results for NOV55a

| | | NOV55a | Identities/ | |
|---|---|---|---|---|
| Protein | | Residues/ | Similarities for | |
| Accession | | Match | the Matched | Expect |
| Number | Protein/Organism/Length | Residues | Portion | Value |
| Q8IUF0 | Na+/Ca2+ exchanger isoform 3 | 1 . . . 921 | 921/921 (100%) | 0.0 |
| | splice variant 2 - Homo sapiens | 1 . . . 921 | 921/921 (100%) | |
| | (Human), 921 aa. | | | |
| CAD12716 | Sequence 1 from Patent | 1 . . . 921 | 921/927 (99%) | 0.0 |
| | WO0183744 - Homo sapiens | 1 . . . 927 | 921/927 (99%) | |
| | (Human), 927 aa (fragment). | | | |
| Q8NFI7 | Na+/Ca2+ exchanger isoform 3 - | 1 . . . 921 | 921/927 (99%) | 0.0 |
| | Homo sapiens (Human), 927 aa. | 1 . . . 927 | 921/927 (99%) | |
| Q96QG1 | Sodium/calcium exchanger | 1 . . . 921 | 918/924 (99%) | 0.0 |
| | SCL8A3 - Homo sapiens | 1 . . . 924 | 919/924 (99%) | |
| | (Human), 924 aa. | | | |
| P70549 | Sodium/calcium exchanger 3 | 1 . . . 921 | 897/927 (96%) | 0.0 |
| | precursor (Na(+)/Ca(2+)- | 1 . . . 927 | 911/927 (97%) | |
| | exchange protein 3) - Rattus | | | |
| | norvegicus (Rat), 927 aa. | | | |

[0672] PFam analysis indicates that the NOV55a protein contains the domains shown in the Table 55F.

TABLE 55F
Domain Analysis of NOV55a

| | | Identities/ | |
|---|---|---|---|
| Pfam | NOV55a | Similarities | |
| Domain | Match Region | for the Matched Region | Expect Value |
| Na_Ca_Ex | 89 . . . 248 | 41/181 (23%) | 1.6e−33 |
| | | 134/181 (74%) | |
| Calx-beta | 386 . . . 485 | 50/106 (47%) | 1.4e−45 |
| | | 88/106 (83%) | |
| Calx-beta | 519 . . . 619 | 51/106 (48%) | 3.5e−46 |
| | | 95/106 (90%) | |
| Na_Ca_Ex | 757 . . . 910 | 44/178 (25%) | 8.7e−31 |
| | | 128/178 (72%) | |

### Example 56

[0673] The NOV56 clone was analyzed, and the nucleotide and encoded polypeptide sequences are shown in Table 56A.

TABLE 56A
NOV56 Sequence Analysis

| | | |
|---|---|---|
| NOV56a, CG56262-01 | SEQ ID NO: 871 | 1551 bp |

| | | |
|---|---|---|
| DNA Sequence | ORF Start: ATG at 108 | ORF Stop: TGA at 1512 |

GCGGCCGCGGGAGCTGACCCTGCGGGGTCCCGGGGGGGGAGGGGGAGCCGCGAAGCCCCCACTGACGC
CGCCGCTGCCGGGCCTCCCCTCCCCCCCGGGCGGGCGCCATGCGGGGGAGCCCGGGCGACGCGGAGCG
GCGGCAGCGCTGGGGTCGCCTGTTCGAGGAGCTGGACAGTAACAAGGATGGCCGCGTGGACGTGCACG
AGTTGCGCCAGGGGCTGGCCAGGCTGGGCGGGGGCAACCCAGACCCCGGCGCCCAACAGGGTATCTCC
TCTGAGGGTGATGCTGACCCAGATGGCGGGCTCGACCTGGAGGAATTTTCCCGCTATCTGCAGGAGCG
GGAACAGCGTCTGCTGCTCATGTTTCACAGTCTTGACCGGAACCAGGATGGTCACATTGATGTCTCTG
AGATCCAACAGAGTTTCCGAGCTCTGGGCATTTCCATCTCGCTGGAGCAGGCTGAGAAAATTTTGCAC
AGCATGGACCGAGACGGCACAATGACCATTGACTGGCAAGAATGGCGCGACCACTTCCTGTTGCATTC
GCTGGAAAATGTGGAGGACGTGCTGTATTTCTGGAAGCATTCCACGGTCCTGGACATTGGCGAGTGCC
TGACAGTGCCGGACGAGTTCTCAAAGCAAGAGAAGCTGACGGGCATGTGGTGGAAACAGCTGGTGGCC
GGCGCAGTGGCAGGTGCCGTGTCACGGACAGGCACGGCCCCTCTGGACCGCCTCAAGGTCTTCATTCA
GGTCCATGCCTCAAAGACCAACCGGCTGAACATCCTTGGGGGGCTTCGAAGCATGGTCCTTGAGGGAG
GCATCCGCTGCCTGTGGCGCGGCAATGGTATTAATGTACTCAAGATTGCCCCCGAGTCAGCTATCAAG
TTCATGGCCTATGAACAGGTGAGGAGGGCCATCCTGGGGCAGCAGGAGACACTGCATGTGCAGGAGCG
CTTCGTGGCTGGCTCCCTGGCTGGTGCCACAGCCCAAACCATCATTTACCCTATGGAGGTGCTGAAGA
CGCGGCTGACCTTGCGCCGGACGGGCCAGTATAAGGGGCTGCTGGACTGCGCCAGGCGTATCCTGGAG
AGGGAGGGGCCCCGTGCCTTCTACCGCGGCTACCTCCCCAACGTGCTGGGCATCATCCCCTATGCGGG
CATCGACCTGGCCGTCTACGAGGTCCTGAAGAACTGGTGGCTTCAGCAGTACAGCCACGACTCGGCAG
ACCCAGGCATCCTCGTGCTCCTGGCCTGCGGTACCATATCCAGCACCTGCGGCCAGATAGCCAGTTAC
CCGCTGGCCCTGGTCCGGACCCGCATGCAGGCACAAGCCTCCATCGAGGGTGGCCCCCAGCTGTCCAT
GCTGGGTCTGCTACGTCACATCCTGTCCCAGGAGGGCATGCGGGGCCTCTACCGGGGGATCGCCCCCA
ACTTCATGAAGGTTATTCCAGCTGTGAGCATCTCCTATGTGGTCTACGAGAACATGAAGCAGGCCTTG
GGGGTCACGTCCAGGTGAGGGACCCGGAGCCCGTCCCCCCAATCCCTCACCCCCC

NOV56a, CG56262-01

| | | | |
|---|---|---|---|
| Protein Sequence | SEQ ID NO: 872 | 468 aa | MW at 52387.5kD |

MRGSPGDAERRQRWGRLFEELDSNKDGRVDVHELRQGLARLGGGNPDPGAQQGISSEGDADPDGGLDL
EEFSRYLQEREQRLLLMFHSLDRNQDGHIDVSEIQQSFRALGISISLEQAEKILHSMDRDGTMTIDWQ
EWRDHFLLHSLENVEDVLYFWKHSTVLDIGECLTVPDEFSKQEKLTGMWWKQLVAGAVAGAVSTRGTA
PLDRLKVFIQVHASKTNRLNILGGLRSMVLEGGIRCLWRGNGINVLKIAPESAIKFMAYEQVRRAILG
QQETLHVQERFVAGSLAGATAQTIIYPMEVLKTRLTLRRTGQYKGLLDCARRILEREGPRAFTRGYLP
NVLGIIPYAGIDLAVYEVLKNWWLQQYSHDSADPGILVLLACGTISSTCGQIASYPLALVRTRMQAQA
SIEGGPQLSMLGLLRHILSQEGMRGLYRGIAPNFMKVIPAVSISYVVYENMKQALGVTSR

| | | |
|---|---|---|
| NOV56b, 266120550 | SEQ ID NO: 873 | 1426 bp |

| | | |
|---|---|---|
| DNA Sequence | ORF Start: at 2 | ORF Stop: end of sequence |

CACCGGATCCACCATGCGGGGGAGCCCGGGCGACGCGGAGCGGCGGCAGCGCTGGGGTCGCCTGTTCG
AGGAGCTGGACAGTAACAAGGATGGCCGCGTGGACGTGCACGAGTTGCGCCAGGGGCTGGCCAGGCTG
GGCGGGGGCAACCCAGACCCCGGCGCCCAACAGGGTATCTCCTCTGAGGGTGATGCTGACCCAGATGG
CGGGCTCGACCTGGAGGAATTTTCCCGCTATCTGCAGGAGCGGGAACAGCGTCTGCTGCTCATGTTTC
ACAGTCTTGACCGGAACCAGGATGGTCACATTGATGTCTCTGAGATCCAACAGAGTTTCCGAGCTCTG
GGCATTTCCATCTCGCTGGAGCAGGCTGAGAAAATTTTGCACAGCATGGACCGAGACGGCACAATGAC
CATTGACTGGCAAGAATGGCGCGACCACTTCCTGTTGCATTCGCTGGAAAATGTGGAGGACGTGCTGT
ATTTCTGGAAGCATTCCACGGTCCTGGACATTGGCGAGTGCCTGACAGTGCCGGACGAGTTCTCAAAG
CAAGAGAAGCTGACGGGCATGTGGTGGAAACAGCTGGTGGCCGGCGCAGTGGCAGGTGCCGTGTCACG
GACAGGCACGGCCCCTCTGGACCGCCTCAAGGTCTTCATGCAGGTCCATGCCTCAAAGACCAACCGGC
TGAACATCCTTGGGGGGCTTCGAAGCATGGTCCTTGAGGGAGGCATCCGCTCCCTGTGGCGCGGCAAT
GGTATTAATGTACTCAAGATTGCCCCCGAGTCAGCTATCAAGTTCATGGCCTATGAACAGATCAAGAG
GGCCATCCTGGGGCAGCAGGAGACACTGCATGTGCAGGAGCGCTTCGTGGCTGGCTCCCTGGCTGGTG
CCACAGCCCAAACCATCATTTACCCTATGGAGGTGCTGAAGACGCGGCTGACCTTGCGCCGGACGGGC
CAGTATAAGGGGCTGCTGGACTGCGCCAGGCGTATCCTGGAGAGGGAGGGGCCCCGTGCCTTCTACCG
CGGCTACCTCCCCAACGTGCTGGGCATCATCCCCTATGCGGGCATCGACCTGGCCGTCTACGAGACTC
TGAAGAACTGGTGGCTTCAGCAGTACAGCCACGACTCGGCAGACCCAGGCATCCTCGTGCTCCTGGCC
TGCGGTACCATATCCAGCACCTGCGGCCAGATAGCCAGTTACCCGCTGGCCCTGGTCCGGACCCGCAT
GCAGGCACAAGCCTCCATCGAGGGTGGCCCCCAGCTGTCCATGCTGGGTCTGCTACGTCACATCCTGT
CCCAGGAGGGCATGCGGGGCCTCTACCGGGGGATCGCCCCCAACTTCATGAAGGTTATTCCAGCTGTG
AGCATCTCCTATGTGGTCTACGAGAACATGAAGCAGGCCTTGGGGGTCACGTCCAGGCTCGAGGGC

NOV56b, 266120550

| | | | |
|---|---|---|---|
| Protein Sequence | SEQ ID NO: 874 | 475 aa | MW at 53023.1kD |

TGSTMRGSPGDAERRQRWGRLFEELDSNKDGRVDVHELRQGLARLGGGNPDPGAQQGISSEGDADPDG
GLDLEEFSRYLQEREQRLLLMFHSLDRNQDGHIDVSEIQQSFRALGISISLEQAEKILHSMDRDGTMT
IDWQEWRDHFLLHSLENVEDVLYFWKHSTVLDIGECLTVPDEFSKQEKLTGMWWKQLVAGAVAGAVSR
TGTAPLDRLKVFMQVHASKTNRLNILGGLRSMVLEGGIRSLWRGNGINVLKIAPESAIKFMAYEQIKR
AILGQQETLHVQERFVAGSLAGATAQTIIYPMEVLKTRLTLRRTGQYKGLLDCARRILEREGPRAFYR
GYLPNVLGIIPYAGIDLAVYETLKNWWLQQYSHDSADPGILVLLACGTISSTCGQIASYPLALVRTRM
QAQASIEGGPQLSMLGLLRHILSQEGMRGLYRGIAPNFMKVIPAVSISYVVYENMKQALGVTSRLEG

[0674] A ClustalW comparison of the above protein sequences yields the following sequence alignment shown in Table 56B.

TABLE 56B
Comparison of the NOV56 protein sequences.

| | |
|---|---|
| NOV56a | ----MRGSPGDAERRQRWGRLFEELDSNKDGRVDVHELRQGLARLGGGNPDPGAQQGISS |
| NOV56b | TGSTMRGSPGDAERRQRWGRLFEELDSNKDGRVDVHELRQGLARLGGGNPDPGAQQGISS |
| NOV56a | EGDADPDGGLDLEEFSRYLQEREQRLLLMFHSLDRNQDGHIDVSEIQQSFRALGISISLE |
| NOV56b | EGDADPDGGLDLEEFSRYLQEREQRLLLMFHSLDRNQDGHIDVSEIQQSFRALGISISLE |
| NOV56a | QAEKILHSMDRDGTMTIDWQEWRDHFLLHSLENVEDVLYFWKHSTVLDIGECLTVPDEFS |
| NOV56b | QAEKILHSMDRDGTMTIDWQEWRDHFLLHSLENVEDVLYFWKHSTVLDIGECLTVPDEFS |
| NOV56a | KQEKLTGNWWKQLVAGAVAGAVSRTGTAPLDRLKVFIQVHASKTNRLNILGGLRSMVLEG |
| NOV56b | KQEKLTGNWWKQLVAGAVAGAVSRTGTAPLDRLKVFIQVHASKTNRLNILGGLRSMVLEG |
| NOV56a | GIRCLWRGNGINVLKIAPESAIKFMAYEQVRRAILGQQETLHVQERFVAGSLAGATAQTI |
| NOV56b | GIRSLWRGNGINVLKIAPESAIKFMAYEQIKRAILGQQETLHVQERFVAGSLAGATAQTI |
| NOV56a | IYPMEVLKTRLTLRRTGQYKGLLDCARRILEREGPRAFYRGYLPNVLGIIPYAGIDLAVY |
| NOV56b | IYPMEVLKTRLTLRRTGQYKGLLDCARRILEREGPRAFYRGYLPNVLGIIPYAGIDLAVY |
| NOV56a | EVLKNWWLQQYSHDSADPGILVLLACGTISSTCGQIASYPLALVRTRMQAQASIEGGPQL |
| NOV56b | ETLKNWWLQQYSHDSADPGILVLLACGTISSTCGQIASYPLALVRTRMQAQASIEGGPQL |
| NOV56a | SMLGLLRHILSQEGMRGLYRGIAPNFMKVIPAVSISYVVYENMKQALGVTSR--- |
| NOV56b | SMLGLLRHILSQEGMRGLYRGIAPNFMKVIPAVSISYVVYENMKQALGVTSRLEG |
| NOV56a | (SEQ ID NO: 872) |
| NOV56b | (SEQ ID NO: 874) |

[0675] Further analysis of the NOV56a protein yielded the following properties shown in Table 56C.

TABLE 56C
Protein Sequence Properties NOV56a

| | |
|---|---|
| SignalP analysis: | No Known Signal Sequence Indicated |
| PSORT II analysis: | |

| | |
|---|---|
| PSG: | a new signal peptide prediction method |
| | N-region: length 11; pos.chg 3; neg.chg 2 |
| | H-region: length 1; peak value −14.40 |
| | PSG score: −18.80 |
| GvH: | von Heijne's method for signal seq. recognition |
| | GvH score (threshold: −2.1): −7.60 |
| | possible cleavage site: between 46 and 47 |

>>> Seems to have no N-terminal signal peptide

| | |
|---|---|
| ALOM: | Klein et al's method for TM region allocation |
| | Init position for calculation: 1 |
| | Tentative number of TMS(s) for the threshold 0.5: 1 |
| | Number of TMS(s) for threshold 0.5: 0 |
| | PERIPHERAL Likelihood = 0.85 (at 342) |
| | ALOM score: −0.90 (number of TMSs: 0) |

MITDISC: discrimination of mitochondrial targeting seq

| | | | |
|---|---|---|---|
| R content: | 1 | Hyd Moment(75): | 10.59 |
| Hyd Moment(95): | 7.77 | G content: | 2 |
| D/E content: | 2 | S/T content: | 1 |
| Score: −5.97 | | | |

Gavel: prediction of cleavage sites for mitochondrial preseq

R-2 motif at 12 MRG|SP

NUCDISC: discrimination of nuclear localization signals

pat4: none
pat7: none
bipartite: none
content of basic residues: 11.3%
NLS Score: −0.47

KDEL: ER retention motif in the C-terminus: none
ER Membrane Retention Signals:

XXRR-like motif in the N-terminus: RGSP

none
SKL: peroxisomal targeting signal in the C-terminus: none
PTS2: 2nd peroxisomal targeting signal: none
VAC: possible vacuolar targeting motif: none
RNA-binding motif: none
Actinin-type actin-binding motif:

type 1: none
type 2: none

NMYR: N-myristoylation pattern: none
Prenylation motif: none
memYQRL: transport motif from cell surface to Golgi: none
Tyrosines in the tail: none
Dileucine motif in the tail: none
checking 63 PROSITE DNA binding motifs:

Leucine zipper pattern (PS00029): *** found ***

LEEFSRYLQEREQRLLLMFHSL at 68

none
checking 71 PROSITE ribosomal protein motifs: none
checking 33 PROSITE prokaryotic DNA binding motifs: none

| | |
|---|---|
| NNCN: | Reinhardt's method for Cytoplasmic/Nuclear discrimination |
| | Prediction: cytoplasmic |
| | Reliability: 94.1 |
| COIL: | Lupas's algorithm to detect coiled-coil regions |
| | total: 0 residues |

Final Results (k = 9/23):

```
52.2%: cytoplasmic
30.4%: nuclear
  8.7%: mitochondrial
  4.3%: vacuolar
  4.3%: vesicles of secretory system
```

>> prediction for CG56262-01 is cyt (k = 23)

[0676] A search of the NOV56a protein against the Geneseq database, a proprietary database that contains sequences published in patents and patent publication, yielded several homologous proteins shown in Table 56D.

TABLE 56D
Geneseq Results for NOV56a

| | | NOV56a | Identities/ | |
|---|---|---|---|---|
| | | Residues/ | Similarities for | |
| Geneseq | Protein/Organism/Length | Match | the Matched | Expect |
| Identifier | [Patent #, Date] | Residues | Region | Value |
| AAE22927 | Human transporter and ion | 1 . . . 468 | 463/468 (98%) | 0.0 |
| | channel (TRICH) 26 - Homo | 1 . . . 468 | 466/468 (98%) | |
| | sapiens, 468 aa. [WO200222684- | | | |
| | A2, 21-MAR-2002] | | | |
| AAU27869 | Human contig polypeptide | 1 . . . 468 | 463/468 (98%) | 0.0 |
| | sequence #22 - Homo sapiens, 509 | 39 . . . 506 | 466/468 (98%) | |
| | aa. [WO200164834-A2, 07-SEP- | | | |
| | 2001] | | | |
| AAU27697 | Human full-length polypeptide | 1 . . . 468 | 463/468 (98%) | 0.0 |
| | sequence #22 - Homo sapiens, 471 | 1 . . . 468 | 466/468 (98%) | |
| | aa. [WO200164834-A2, 07-SEP- | | | |
| | 2001] | | | |
| ABG22637 | Novel human diagnostic protein | 1 . . . 468 | 442/470 (94%) | 0.0 |
| | #22628 - Homo sapiens, 508 aa. | 39 . . . 508 | 450/470 (95%) | |
| | [WO200175067-A2, 11-OCT- | | | |
| | 2001] | | | |
| ABG30434 | Human protein sequence #2 used | 1 . . . 409 | 403/409 (98%) | 0.0 |
| | for determining sequence of | 1 . . . 409 | 406/409 (98%) | |
| | unknown gene - Homo sapiens, | | | |
| | 456 aa. [JP2002176980-A, 25- | | | |
| | JUN-2002] | | | |

[0677] In a BLAST search of public sequence databases, the NOV56a protein was found to have homology to the proteins shown in the BLASTP data in Table 56E.

TABLE 56E
Public BLASTP Results for NOV56a

| | | NOV56a | Identities/ | |
|---|---|---|---|---|
| Protein | | Residues/ | Similarities for | |
| Accession | | Match | the Matched | Expect |
| Number | Protein/Organism/Length | Residues | Portion | Value |
| CAD55563 | Putative calcium binding | 1 . . . 407 | 402/407 (98%) | 0.0 |
| | transporter - Homo sapiens | 1 . . . 407 | 405/407 (98%) | |
| | (Human), 438 aa. | | | |
| Q96NQ4 | Hypothetical protein FLJ30339 - | 85 . . . 468 | 379/384 (98%) | 0.0 |
| | Homo sapiens (Human), 384 aa. | 1 . . . 384 | 382/384 (98%) | |
| CAD20531 | Sequence 1 from Patent | 1 . . . 407 | 374/407 (91%) | 0.0 |
| | WO0174854 - Homo sapiens | 1 . . . 406 | 388/407 (94%) | |
| | (Human), 460 aa (fragment). | | | |
| AAH43834 | Similar to hypothetical protein | 6 . . . 468 | 302/463 (65%) | e−177 |
| | MGC36388 - Xenopus laevis | 53 . . . 514 | 368/463 (79%) | |
| | (African clawed frog), 514 aa. | | | |
| Q8BHG0 | Weakly similar to peroxisomal | 6 . . . 468 | 305/463 (65%) | e−176 |
| | CA-dependent solute carrier - | 41 . . . 502 | 366/463 (78%) | |
| | Mus musculus (Mouse), 502 aa. | | | |

[0678] PFam analysis indicates that the NOV56a protein contains the domains shown in the Table 56F.

TABLE 56F
Domain Analysis of NOV56a

| | | Identities/ | |
|---|---|---|---|
| | | Similarities | |
| Pfam | NOV56a | for the Matched | Expect |
| Domain | Match Region | Region | Value |
| efhand | 13 . . . 41 | 8/29 (28%) | 0.00022 |
| | | 26/29 (90%) | |
| efhand | 81 . . . 109 | 8/29 (28%) | 0.012 |
| | | 21/29 (72%) | |
| mito_carr | 184 . . . 276 | 38/124 (31%) | 2.1e−24 |
| | | 78/124 (63%) | |
| mito_carr | 278 . . . 369 | 38/124 (31%) | 3.4e−32 |
| | | 81/124 (65%) | |
| mito_carr | 375 . . . 468 | 31/124 (25%) | 2.4e−23 |
| | | 76/124 (61%) | |

### Example 57

[0679] The NOV57 clone was analyzed, and the nucleotide and encoded polypeptide sequences are shown in Table 57A.

TABLE 57A
NOV57 Sequence Analysis

| | | |
|---|---|---|
| NOV57a, CG56315-01 | SEQ ID NO: 875 | 728 bp |

| | | |
|---|---|---|
| DNA Sequence | ORF Start: ATG at 28 | ORF Stop: TGA at 697 |

AGTCTTGCCTTCTTTTGAGCCTAAGTCATGAGTTGGATGTTCCTCAGAGATCTCCTGAGTGGAGTAAA
TAAATACTCCACTGGGACTGGATGGATTTGGCTGGCTGTCGTGTTTGTCTTCCGTTTGCTGGTCTACA
TGGTGGCAGCAGAGCACGTGTGGAAAGATGAGCAGAAAGAGTTTGAGTGCAACAGTAGACAGCCCGGT
TGCAAAAATGTGTGTTTTGATGACTTCTTCCCCATTTCCCAAGTCAGACTTTGGGCCTTACAACTGAT
AATGGTCTCCACACCTTCACTTCTGGTGGTTTTACATGTAGCCTATCATGAGGGTAGAGAGAAAAGGC
ACAGAAAGAAACTCTATGTCAGCCCAGGTACAATGGATGGGGGCCTATGGTACGCTTATCTTATCAGC
CTCATTGTTAAAACTGGTTTTGAAATTGGCTTCCTTGTTTTATTTTATAAGCTATATGATGGCTTTAG
TGTTCCCTACCTTATAAAGTGTGATTTGAAGCCTTGTCCCAACACTGTGGACTGCTTCATCTCCAAAC
CCACTGAGAAGACGATCTTCATCCTCTTCTTGGTCATCACCTCATGCTTGTGTATTGTGTTGAATTTC
ATTGAACTGAGTTTTTTGGTTCTCAAGTGCTTTATTAAGTGCTGTCTCCAAAAATATTTAAAAAAACC
TCAAGTCCTCAGTGTGTGAGTGCCACAGCCTCAGATATGTTGAATGTG

NOV57a, CG56315-01

| | | | |
|---|---|---|---|
| Protein Sequence | SEQ ID NO: 876 | 223 aa | MW at 25859.7kD |

MSWMFLRDLLSGVNKYSTGTGWIWLAVVFVFRLLVYMVAAEHVWKDEQKEFECNSRQPGCKNVCFDDF
FPISQVRLWALQLIMVSTPSLLVVLHVAYHEGREKRHRKKLYVSPGTMDGGLWYAYLISLIVKTGFEI
GFLVLFYKLYDGFSVPYLIKCDLKPCPNTVDCFISKPTEKTIFILFLVITSCLCIVLNFIELSFLVLK
CFIKCCLQKYLKKPQVLSV

| | | |
|---|---|---|
| NOV57b, 247679382 | SEQ ID NO: 877 | 700 bp |

| | | |
|---|---|---|
| DNA Sequence | ORF Start: at 2 | ORF Stop: end of sequence |

AGGCTCCGCGGCCGCCCCCTTCACCGGATCCATGAGTTGGATGTTCCTCAGAGATCTCCTGAGTGGAG
TAAATAAATACTCCACTGGGATTGGATGGATTTGGCTGGCTGTCGTGTTTGTCTTCCGTTTGCTGGTC
TACATGGTGGCAGCAGAGCACGTGTGGAAAGATGAGCAGAAAGAGTTTGAGTGCAACAGTAGACAGCC
CGGTTGCAAAAATGTGTGTTTTGATGACTTCTTCCCCATTTCCCAAGTCAGACTTTGGGCCGTACAAC
TGATAATGGTCTCCACACCTTCACTTCTGGTGGTTTTACATGTAGCCTATCATGAGGGTAGAGAGAAA
AGGCACAGAAAGAAACTCTATGTCAGCCCAGGTACAATGGATGGGGGCCTATGGTACGCTTATCTTAT
CAGCCTCATTGTTAAAACTGGTTTTGAAATTGGCTTCCTTGTTTTATTTTATAAGCTATATGATGGCT
TTAGTGTTCCCTACCTTATAAAGTGTGATTTGAAGCCTTGTCCCAACACTGTGGACTGCTTCATCTCC
AAACCCACTGAGAAGACGATCTTCATCCTCTTCTTGGTCATCACCTCATGCTTGCGTATTGTGTTGAA
TTTCATTGAACTGAGTTTTTTGCTCGAGGGCAAGGGTGGGCGCGCCGACCCAGCTTTCTTGTACAAAA
GTTGGCATTTTATAAGAAAA

NOV57b, 247679382

| | | | |
|---|---|---|---|
| Protein Sequence | SEQ ID NO: 878 | 233 aa | MW at 26752.3kD |

GSAAAPFTGSMSWMFLRDLLSGVNKYSTGIGWIWLAVVFVFRLLVYMVAAEHVWKDEQKEFECNSRQP
GCKNVCFDDFFPISQVRLWAVQLIMVSTPSLLVVLHVAYHEGREKRHRKKLYVSPGTMDGGLWYAYLI
SLIVKTGFEIGFLVLFYKLYDGFSVPYLIKCDLKPCPNTVDCFISKPTEKTIFILFLVITSCLRIVLN
FIELSFLLEGKGGRADPAFLYKSWHFIRK

| | | |
|---|---|---|
| NOV57c, 247678321 | SEQ ID NO: 879 | 724 bp |

| | | |
|---|---|---|
| DNA Sequence | ORF Start: at 2 | ORF Stop: end of sequence |

AGGCTCCGCGGCCGCCCCCTTCACCGGATCCATGAGTTGGATGTTCCTCAGAGATCTCCTGAGTGGAG
TAAATAAATACTCCACTGGGATTGGATGGATTTGGCTGGCTGTCGTGTTTGTCTTCCGTTTGCTGGTC
TACATGGTGGCAGCAGAGCACGTGTGGAAAGATGAGCAGAAAGAGTTTGAGTGCAACAGTAGACAGCC
CGGTTGCAAAAATGTGTGTTTTGATGACTTCTTCCCCATTTCCCAAGTCAGACTTTGGGCCTTACAAC
TGATAATGGTCTCCACACCTTCACTTCTGGTGGTTTTACATGTAGCCTATCATGAGGGTAGAGAGAAA
AGGCACAGAAAGAAACTCTATGTCAGCCCAGGTACAATGGATGGGGGCCTATGGTACGCTTATCTTAT
CAGCCTCATTGTTAAAACTGGTTTTGAAATTGGCTTCCTTGTTTTATTTTATAAGCTATATGATGGCT
TTAGTGTTCCCTACCTTATAAAGTGTGATTTGAAGCCTTGTCCCAACACTGTGGACTGCTTCATCTCC
AAACCCACTGAGAAGACGATCTTCATCCTCTTCTTGGTCATCACCTCATGCTTGCGTATTGTGTTGAA
TTCCATTGAACTGAGTTTTTTGGTTCTCAAGTGCCTTATTAAGTGCTGTCTCCAAAAATATTTAAAAA
AACCTCAAGTCCTCAGTGTGCTCGAGGGCAAGGGTGGGCGCGCC

NOV57c, 247678321

| | | | |
|---|---|---|---|
| Protein Sequence | SEQ ID NO: 880 | 241 aa | MW at 27446.4kD |

GSAAAPFTGSMSWMFLRDLLSGVMKYSTGIGWIWLAVVFVFRLLVYMVAAEHVWKDEQKEFEGNSRQP
GCKNVCFDDFFPISQVRLWALQLIMVSTPSLLVVLHVAYHEGREKRHRKKLYVSPGTMDGGLWYAYLI
SLIVKTGFEIGFLVLFYKLYDGFSVPYLIKCDLKPCPNTVDCFISKPTEKTIFILFLVITSCLRIVLN
SIELSFLVLKCLIKCCLQKYLKKPQVLSVLEGKGGRA

| | | |
|---|---|---|
| NOV57d, 247679418 | SEQ ID NO: 881 | 538 bp |

| | | |
|---|---|---|
| DNA Sequence | ORF Start: at 2 | ORF Stop: end of sequence |

AGGCTCCGCGGCCGCCCCCTTCACCGGATCCGAGCACGTGTGGAAAGATGAGCAGAAAGAGTTTGAGT
GCAACAGTAGACAGCCCGGTTGCAAAAATGTGTGTTTTGATGACTTCTTCCCCATTTCCCAAGTCAGA
CTTTGGGCCTTACAACTGATAATGGTCTCCACACCTTCACTTCTGGTGGTTTTACATGTAGCCTATCA
TGAGGGTAGAGAGAAAAGGCACAGAAAGAAACTCTATGTCAGCCCAGGTACAATGGATGGGGGCCTAT
GGTACGCTTATCTTATCAGCCTCATTGTTAAAACTGGTTTTGAAATTGGCTTCCTTGTTTTATTTTA2
AAGCTATATGATGGCTTTAGTGTTCCCTACCTTATAAAGTGTGATTTGAAGCCTTGTCCCAACACTGT
GGACTGCTTCATCTCCAAACCCACTGAGAAGACGATCTTCATCCTCTTCTTGGTCATCACCTCATGCT
TGCGTATTGTGTTGAATTTCATTGAACTGAGTTTTTTGCTCGAGGGCAAGGGTGGGCGCGCC

NOV57d, 247679418

| | | | |
|---|---|---|---|
| Protein Sequence | SEQ ID NO: 882 | 179 aa | MW at 20339.7kD |

GSAAAPFTGSEHVWKDEQKEFECNSRQPGCIQNCFDDFFPISQVRLWALQLIMVSTPSLLVVLHVAYH
EGREKRHRKKLYVSPGTMDGGLWYAYLISLIVKTGFEIGFLVLFYKLYDGFSVPYLIKCDLKPCPNTV
DCFISKPTEKTIFILFLVITSCLRIVLNFIELSFLLEGKGGRA

| | | |
|---|---|---|
| NOV57e, 247679395 | SEQ ID NO: 883 | 658 bp |

| | | |
|---|---|---|
| DNA Sequence | ORF Start: at 2 | ORF Stop: end of sequence |

AGGCTCCGCGGCCGCCCCCTTCACCGGATCCATGAGTTGGATGTTCCTCAGAGATCTCCTGAGTGGAG
TAAATAAATACTCCACTGGGATTGGATGGATTTGGCTGGCTGTCGTGTTTGTCTTCCGTTTGCTGGTC
TACATGGTGGCAGCAGAGCACGTGTGGAAAGATGAGCAGAAAGAGTTTGAGTGCAACAGTAGACAGCC
CGGTTGCAAAAATGTGTGTTTTGATGACTTCTTCCCCATTTCCCAAGTCAGACTTTGGGCCTTACAAC
TGATAATGGTCTCCACACCTTCACTTCTGGTGGTTTTACATGTAGCCTATCATGAGGGTAGAGAGAAA
AGGCACAGAAAGAAACTCTATGTCAGCCCAGGTACAATGGATGGGGGCCTATGGTACGCTTATCTTAT
CAGCCTCATTGTTAAAACTGGTTTTGAAATTGGCTTCCTTGTTTTATTTTATAAGCTATATGATGGCT
TTAGTGTTCCCTACCTTATAAAGTGTGATTTGAAGCCTTGTCCCAACACTGTGGACTGCTTCATCTCC
AAACCCACTGAGAAGACGATCTTCATCCTCTTCTTGGTCATCACCTCATGCTTGCGTATTGTGTTGAA
TTTCATTGAACTGAGTTTTTTGCTCGAGGGCAAGGGTGGGCGCGCC

NOV57e, 247679395

| | | | |
|---|---|---|---|
| Protein Sequence | SEQ ID NO: 884 | 219 aa | MW at 24976.2kD |

GSAAAPFTGSMSWMFLRDLLSGVNKYSTGIGWIWLAVVFVFRLLVYMVAAEHVWKDEQKEFECNSRQP
GCKNVCFDDFFPISQVRLWALQLIMVSTPSLLVVLHVAYHEGREKRHRKKLYVSPGTMDGGLWYAYLI
SLIVKTGFEIGFLVLFYKLYDGFSVPYLIKCDLKPCPNTVDCFISKPTEKTIFILFLVITSCLRIVLN
FIELSFLLEGKGGRA

| | | |
|---|---|---|
| NOV57f, 247679328 | SEQ ID NO: 885 | 604 bp |

| | | |
|---|---|---|
| DNA Sequence | ORF Start: at 2 | ORF Stop: end of sequence |

AGGCTCCGCGGCCGCCCCCTTCACCGGATCCGAGCACGTGTGGAAAGATGAGCAGAAAGAGTTTGAGT
GCAACAGTAGACAGCCCGGTTGCAAAAATGTGTGTTTTGATGACTTCTTCCCCATTTCCCAAGTCAGA
CTTTGGGCCTTACAACTGATAATGGTCTCCACACCTTCACTTCTGGTGGTTTTACATGTAGCCTATCA
TGAGGGTAGAGAGAAAAGGCACAGAAAGAAACTCTATGTCAGCCCAGGTACAATGGATGGGGGCCTAT
GGTACGCTTATCTTATCAGCCTCATTGTTAAAACTGGTTTTGAAATTGGCTTCCTTGTTTTATTTTAT
AAGCTATATGATGGCTTTAGTGTTCCCTACCTTATAAAGTGTGATTTGAAGCCTTGTCCCAACACTGT
GGACTGCTTCATCTCCAAACCCACTGAGAAGACGATCTTCATCCTCTTCTTGGTCATCACCTCATGCT
TGCGTATTGTGTTGAATTCCATTGAACTGAGTTTTTTGGTTCTCAAGTGCCTTATTAAGTGCTGTCTC
CAAAAATATTTAAAAAAACCTCAAGTCCTCAGTGTGCTCGAGGGCAAGGGTGGGCGCGCC

NOV57f, 247679328

| | | | |
|---|---|---|---|
| Protein Sequence | SEQ ID NO: 886 | 201 aa | MW at 22809.8kD |

GSAAAPFTGSEHVWKDEQKEFECNSRQPGCKNVCFDDFFPISQVRLWALQLIMVSTPSLLVVLHVAYH
EGREKRHRKKLYVSPGTMDGGLWYAYLISLIVKTGFEIGFLVLFYKLYDGFSVPYLIKCDLKPCPNTV
DCFISKPTEKTIFILFLVITSCLRIVLNSIELSFLVLKCLIKCCLQKYLKKPQVLSVLEGKGGHA

| | | |
|---|---|---|
| NOV57g, CG56315-02 | SEQ ID NO: 887 | 727 bp |

| | | |
|---|---|---|
| DNA Sequence | ORF Start: ATG at 27 | ORF Stop: TGA at 696 |

AGTCTTGCTTCTTTTGAGCCTAAGTCATGAGTTGGATGTTCCTCAGAGATCTCCTGAGTGGAGTAAAT
AAATACTCCACTGGGATTGGATGGATTTGGCTGGCTGTCGTGTTTGTCTTCCGTTTGCTGGTCTACAT
GGTGGCAGCAGAGCACGTGTGGAAAGATGAGCAGAAAGAGTTTGAGTGCAACAGTAGACAGCCCGGTT
GCAAAAATGTGTGTTTTGATGACTTCTTCCCCATTTCCCAAGTCAGACTTTGGGCCTTACAACTGATA
ATGGTCTCCACACCTTCACTTCTGGTGGTTTTACATGTAGCCTATCATGAGGGTAGAGAGAAAAGGCA
CAGAAAGAAACTCTATGTCAGCCCAGGTACAATGGATGGGGGCCTATGGTACGCTTATCTTATCAGCC
TCATTGTTAAAACTGGTTTTGAAATTGGCTTCCTTGTTTTATTTTATAAGCTATATGATGGCTTTAGT
GTTCCCTACCTTATAAAGTGTGATTTGAAGCCTTGTCCCAACACTGTGGACTGCTTCATCTCCAAACC
CACTGAGAAGACGATCTTCATCCTCTTCTTGGTCATCACCTCATGCTTGTGTATTGTGTTGAATTTCA
TTGAACTGAGTTTTTTGGTTCTCAAGTGCTTTATTAAGTGCTGTCTCCAAAAATATTTAAAAAAACCT
CAAGTCCTCAGTGTGTGAGTGCCACAGCCTCAGATATGTTGAATGTG

NOV57g, CG56315-02

| | | | |
|---|---|---|---|
| Protein Sequence | SEQ ID NO: 888 | 223 aa | MW at 25871.7kD |

[sequence omitted]

| | | |
|---|---|---|
| NOV57h, CG56315-03 | SEQ ID NO: 889 | 24 bp |

| | | |
|---|---|---|
| DNA Sequence | ORF Start: at 1 | ORF Stop: end of sequence |

TTTGAGCAAAACAGAAGACAGCCC

NOV57h, CG56315-03

| | | | |
|---|---|---|---|
| Protein Sequence | SEQ ID NO: 890 | 8 aa | MW at 1074.2kD |

FEQNRRQP

| | | |
|---|---|---|
| NOV57i, CG56315-04 | SEQ ID NO: 891 | 24 bp |

| | | |
|---|---|---|
| DNA Sequence | ORF Start: at 1 | ORF Stop: end of sequence |

TTTGAGTGCAACAGGAGACAGCCC

NOV57i, CG56315-04

| | | | |
|---|---|---|---|
| Protein Sequence | SEQ ID NO: 892 | 8 aa | MW at 1049.2kD |

FECNRRQP

| | | |
|---|---|---|
| NOV57j, CG56315-05 | SEQ ID NO: 893 | 24 bp |

| | | |
|---|---|---|
| DNA Sequence | ORF Start: at 1 | ORF Stop: end of sequence |

TTTGAGCAAAACAGTAGACAGCCC

NOV57j, CG56315-05

| | | | |
|---|---|---|---|
| Protein Sequence | SEQ ID NO: 894 | 8 aa | MW at 1005.1kD |

FEQNSRQP

| | | |
|---|---|---|
| NOV57k, CG56315-06 | SEQ ID NO: 895 | 24 bp |

| | | |
|---|---|---|
| DNA Sequence | ORF Start: at 1 | ORF Stop: end of sequence |

TTTGAGTGCAACAGTAGACAGCCC

NOV57k, CG56315-06

| | | | |
|---|---|---|---|
| Protein Sequence | SEQ ID NO: 896 | 8 aa | MW at 980.1kD |

FECNSRQP

| | | |
|---|---|---|
| NOV57l, CG56315-07 | SEQ ID NO: 897 | 24 bp |

| | | |
|---|---|---|
| DNA Sequence | ORF Start: at 1 | ORF Stop: end of sequence |

TTTGAGCAAAACAGTAGACAGGCC

NOV57l, CG56315-07

| | | | |
|---|---|---|---|
| Protein Sequence | SEQ ID NO: 898 | 8 aa | MW at 979.0kD |

FEQNSRQA

| | | |
|---|---|---|
| NOV57m, CG56315-08 | SEQ ID NO: 899 | 24 bp |

| | | |
|---|---|---|
| DNA Sequence | ORF Start: at 1 | ORF Stop: end of sequence |

TTTGAGTGCAACAGTAGACAGGCC

NOV57m, CG56315-08

| | | | |
|---|---|---|---|
| Protein Sequence | SEQ ID NO: 900 | 8 aa | MW at 954.0kD |

FECNSRQA

| | |
|---|---|
| SEQ ID NO: 901 | 728 bp |

| | | |
|---|---|---|
| NOV57n, SNP13381650 of | ORF Start: ATG at 28 | ORF Stop: TGA at 697 |

| | | |
|---|---|---|
| CG56315-01, DNA Sequence | SNP Pos: 86 | SNP Change: C to T |

AGTCTTGCCTTCTTTTGAGCCTAAGTCATGAGTTGGATGTTCCTCAGAGATCTCCTGAGTGGAGTAAA
TAAATACTCCACTGGGATTGGATGGATTTGGCTGGCTGTCGTGTTTGTCTTCCGTTTGCTGGTCTACA
TGGTGGCAGCAGAGCACGTGTGGAAAGATGAGCAGAAAGAGTTTGAGTGCAACAGTAGACAGCCCGGT
TGCAAAAATGTGTGTTTTGATGACTTCTTCCCCATTTCCCAAGTCAGACTTTGGGCCTTACAACTGAT
AATGGTCTCCACACCTTCACTTCTGGTGGTTTTACATGTAGCCTATCATGAGGGTAGAGAGAAAAGGC
ACAGAAAGAAACTCTATGTCAGCCCAGGTACAATGGATGGGGGCCTATGGTACGCTTATCTTATCAGC
CTCATTGTTAAAACTGGTTTTGAAATTGGCTTCCTTGTTTTATTTTATAAGCTATATGATGGCTTTAG
TGTTCCCTACCTTATAAAGTGTGATTTGAAGCCTTGTCCCAACACTGTGGACTGCTTCATCTCCAAAC
CCACTGAGAAGACGATCTTCATCCTCTTcTTGGTCATCACCTCATGCTTGTGTATTGTGTTGAATTTC
ATTGAACTGAGTTTTTTGGTTCTCAAGTGCTTTATTAAGTGCTGTCTCCAAAAATATTTAAAAAAACC
TCAAGTCCTCAGTGTGTGAGTGCCACAGCCTCAGATATGTTGAATGTG

| | | |
|---|---|---|
| NOV57n, SNP13381650 of | SEQ ID NO: 902 | MW at 25871.7kD |

| | | | |
|---|---|---|---|
| CG56315-01, Protein Sequence | SNP Pos: 20 | 223 aa | SNP Change: Thr to Ile |

[sequence omitted]

| | |
|---|---|
| SEQ ID NO: 903 | 728 bp |

| | | |
|---|---|---|
| NOV57o, SNP13381651 of | ORF Start: ATG at 28 | ORF Stop: TGA at 697 |

| | | |
|---|---|---|
| CG56315-01, DNA Sequence | SNP Pos: 154 | SNP Change: G to A |

AGTCTTGCCTTCTTTTGAGCCTAAGTCATGAGTTGGATGTTCCTCAGAGATCTCCTGAGTGGAGTAAA
TAAATACTCCACTGGGACTGGATGGATTTGGCTGGCTGTCGTGTTTGTCTTCCGTTTGCTGGTCTACA
TGGTGGCAGCAGAGCACATGTGGAAAGATGAGCAGAAAGAGTTTGAGTGCAACAGTAGACAGCCCGGT
TGCAAAAATGTGTGTTTTGATGACTTCTTCCCCATTTCCCAAGTCAGACTTTGGGCCTTACAACTGAT
AATGGTCTCCACACCTTCACTTCTGGTGGTTTTACATGTAGCCTATCATGAGGGTAGAGAGAAAAGGC
ACAGAAAGAAACTCTATGTCAGCCCAGGTACAATGGATGGGGGCCTATGGTACGCTTATCTTATCAGC
CTCATTGTTAAAACTGGTTTTGAAATTGGCTTCCTTGTTTTATTTTATAAGCTATATGATGGCTTTAG
TGTTCCCTACCTTATAAAGTGTGATTTGAAGCCTTGTCCCAACACTGTGGACTGCTTCATCTCCAAAC
CCACTGAGAAGACGATCTTCATCCTCTTCTTGGTCATCACCTCATGCTTGTGTATTGTGTTGAATTTC
ATTGAACTGAGTTTTTTGGTTCTCAAGTGCTTTATTAAGTGCTGTCTCCAAAAATATTTAAAAAAACC
TCAAGTCCTCAGTGTGTGAGTGCCACAGCCTCAGATATGTTGAATGTG

| | | |
|---|---|---|
| NOV57o, SNP13381651 of | SEQ ID NO: 904 | MW at 25891.7kD |

| | | | |
|---|---|---|---|
| CG56315-01, Protein Sequence | SNP Pos: 43 | 223 aa | SNP Change: Val to Met |

[sequence omitted]

| | |
|---|---|
| SEQ ID NO: 905 | 728 bp |

| | | |
|---|---|---|
| NOV57p, SNP13381652 of | ORF Start: ATG at 28 | ORF Stop: TGA at 697 |

| | | |
|---|---|---|
| CG56315-01, DNA Sequence | SNP Pos: 276 | SNP Change: G to A |

AGTCTTGCCTTCTTTTGAGCCTAAGTCATGAGTTGGATGTTCCTCAGAGATCTCCTGAGTGGAGTAAA
TAAATACTCCACTGGGACTGGATGGATTTGGCTGGCTGTCGTGTTTGTCTTCCGTTTGCTGGTCTACA
TGGTGGCAGCAGAGCACGTGTGGAAAGATGAGCAGAAAGAGTTTGAGTGCAACAGTAGACAGCCCGGT
TGCAAAAATGTGTGTTTTGATGACTTCTTCCCCATTTCCCAAGTCAGACTTTGGGCCTTACAACTGAT
AATAGTCTCCACACCTTCACTTCTGGTGGTTTTACATGTAGCCTATCATGAGGGTAGAGAGAAAAGGC
ACAGAAAGAAACTCTATGTCAGCCCAGGTACAATGGATGGGGGCCTATGGTACGCTTATCTTATCAGC
CTCATTGTTAAAACTGGTTTTGAAATTGGCTTCCTTGTTTTATTTTATAAGCTATATGATGGCTTTAG
TGTTCCCTACCTTATAAAGTGTGATTTGAAGCCTTGTCCCAACACTGTGGACTGCTTCATCTCCAAAC
CCACTGAGAAGACGATCTTCATCCTCTTCTTGGTCATCACcTCATGCTTGTGTATTGTGTTGAATTTC
ATTGAACTGAGTTTTTTGGTTCTCAAGTGCTTTATTAAGTGCTGTCTCCAAAAATATTTAAAAAAACC
TCAAGTCCTCAGTGTGTGAGTGCCACAGCCTCAGATATGTTGAATGTG

| | | |
|---|---|---|
| NOV57p, SNP13381652 of | SEQ ID NO: 906 | MW at 25841.6kD |

| | | | |
|---|---|---|---|
| CG56315-01, Protein Sequence | SNP Pos: 83 | 223 aa | SNP Change: Met to Ile |

[sequence omitted]

| | |
|---|---|
| SEQ ID NO: 907 | 728 bp |

| | | |
|---|---|---|
| NOV57q, SNP13381653 of | ORF Start: ATG at 28 | ORF Stop: TGA at 697 |

| | | |
|---|---|---|
| CG56315-01, DNA Sequence | SNP Pos: 557 | SNP Change: C to T |

AGTCTTGCCTTCTTTTGAGCCTAAGTCATGAGTTGGATGTTCCTCAGAGATCTCCTGAGTGGAGTAAA
TAAATACTCCACTGGGACTGGATGGATTTGGCTGGCTGTCGTGTTTGTCTTCCGTTTGCTGGTCTACA
TGGTGGCAGCAGAGCACGTGTGGAAAGATGAGCAGAAAGAGTTTGAGTGCAACAGTAGACAGCCCGGT
TGCAAAAATGTGTGTTTTGATGACTTCTTCCCCATTTCCCAAGTCAGACTTTGGGCCTTACAACTGAT
AATAGTCTCCACACCTTCACTTCTGGTGGTTTTACATGTAGCCTATCATGAGGGTAGAGAGAAAAGGC
ACAGAAAGAAACTCTATGTCAGCCCAGGTACAATGGATGGGGGCCTATGGTACGCTTATCTTATCAGC
CTCATTGTTAAAACTGGTTTTGAAATTGGCTTCCTTGTTTTATTTTATAAGCTATATGATGGCTTTAG
TGTTCCCTACCTTATAAAGTGTGATTTGAAGCCTTGTCCCAACACTGTGGACTGCTTCATCTCCAAAC
CCACTGAGAAGACGATCTTCATCCTCTTCTTGGTCATCACcTCATGCTTGTGTATTGTGTTGAATTTC
ATTGAACTGAGTTTTTTGGTTCTCAAGTGCTTTATTAAGTGCTGTCTCCAAAAATATTTAAAAAAACC
TCAAGTCCTCAGTGTGTGAGTGCCACAGCCTCAGATATGTTGAATGTG

| | | |
|---|---|---|
| NOV57q, SNP13381653 of | SEQ ID NO: 908 | MW at 25889.8kD |

| | | | |
|---|---|---|---|
| CG56315-01, Protein Sequence | SNP Pos: 177 | 223 aa | SNP Change: Thr to Met |

MSWMFLRDLLSGVNKYSTGTGWIWLAVVFVFRLLVYMVAAEHMWKDEQKEFECNSRQPGCKNVCFDDF
FPISQVRLWALQLIMVSTPSLLVVLHVAYHEGREKRHRKKLYVSPGTMDGGLWYAYLISLIVKTGFEI
GFLVLFYKLYDGFSVPYLIKCDLKPCPNTVDCFISKPTEKMIFILFLVITSCLCIVLNFIELSFLVLK
CFIKCCLQKYLKKPQVLSV

| | |
|---|---|
| SEQ ID NO: 909 | 728 bp |

| | | |
|---|---|---|
| NOV57r, SNP13381654 of | ORF Start: ATG at 28 | ORF Stop: TGA at 697 |

| | | |
|---|---|---|
| CG56315-01, DNA Sequence | SNP Pos: 643 | SNP Change: T to C |

AGTCTTGCCTTCTTTTGAGCCTAAGTCATGAGTTGGATGTTCCTCAGAGATCTCCTGAGTGGAGTAAA
TAAATACTCCACTGGGACTGGATGGATTTGGCTGGCTGTCGTGTTTGTCTTCCGTTTGCTGGTCTACA
TGGTGGCAGCAGAGCACGTGTGGAAAGATGAGCAGAAAGAGTTTGAGTGCAACAGTAGACAGCCCGGT
TGCAAAAATGTGTGTTTTGATGACTTCTTCCCCATTTCCCAAGTCAGACTTTGGGCCTTACAACTGAT
AATAGTCTCCACACCTTCACTTCTGGTGGTTTTACATGTAGCCTATCATGAGGGTAGAGAGAAAAGGC
ACAGAAAGAAACTCTATGTCAGCCCAGGTACAATGGATGGGGGCCTATGGTACGCTTATCTTATCAGC
CTCATTGTTAAAACTGGTTTTGAAATTGGCTTCCTTGTTTTATTTTATAAGCTATATGATGGCTTTAG
TGTTCCCTACCTTATAAAGTGTGATTTGAAGCCTTGTCCCAACACTGTGGACTGCTTCATCTCCAAAC
CCACTGAGAAGACGATCTTCATCCTCTTCTTGGTCATCACCTCATGCTTGTGTATTGTGTTGAATTTC
ATTGAACTGAGTTTTTTGGTTCTCAAGTGCCTTATTAAGTGCTGTCTCCAAAAATATTTAAAAAAACC
TCAAGTCCTCAGTGTGTGAGTGCCACAGCCTCAGATATGTTGAATGTG

| | | |
|---|---|---|
| NOV57r, SNP13381654 of | SEQ ID NO: 910 | MW at 25825.6kD |

| | | | |
|---|---|---|---|
| CG56315-01, Protein Sequence | SNP Pos: 206 | 223 aa | SNP Change: Phe to Leu |

[sequence omitted]

[0680] A ClustalW comparison of the above protein sequences yields the following sequence alignment shown in Table 57B.

TABLE 57B
Comparison of the NOV57 protein sequences.

| | |
|---|---|
| NOV57a | ----------MSWMFLRDLLGVNKYSTGTGWIWLAVVFVFRLLVYMVAAEHVWKDEQKE |
| NOV57b | GSAAAPFTGSMSWMFLRDLLGVNKYSTGTGWIWLAVVFVFRLLVYMVAAEHVWKDEQKE |
| NOV57c | GSAAAPFTGSMSWMFLRDLLGVNKYSTGTGWIWLAVVFVFRLLVYMVAAEHVWKDEQKE |
| NOV57d | GSAAAPFTG---------------------------------------SEHVWKDEQKE |
| NOV57e | GSAAAPFTGSMSWMFLRDLLGVNKYSTGTGWIWLAVVFVFRLLVYMVAAEHVWKDEQKE |
| NOV57f | GSAAAPFTG---------------------------------------SEHVWKDEQKE |
| NOV57g | ----------MSWMFLRDLLGVNKYSTGTGWIWLAVVFVFRLLVYMVAAEHVWKDEQKE |
| NOV57h | ------------------------------------------------------------ |
| NOV57i | ------------------------------------------------------------ |
| NOV57j | ------------------------------------------------------------ |
| NOV57k | ------------------------------------------------------------ |
| NOV57l | ------------------------------------------------------------ |
| NOV57m | ------------------------------------------------------------ |
| NOV57a | FECNSRQPGCKNVCFDDFFPISQVRLWALQLIMVSTPSLLVVLHVAYHEGREKRHRKKLY |
| NOV57b | FECNSRQPGCKNVCFDDFFPISQVRLWALQLIMVSTPSLLVVLHVAYHEGREKRHRKKLY |
| NOV57c | FECNSRQPGCKNVCFDDFFPISQVRLWALQLIMVSTPSLLVVLHVAYHEGREKRHRKKLY |
| NOV57d | FECNSRQPGCKNVCFDDFFPISQVRLWALQLIMVSTPSLLVVLHVAYHEGREKRHRKKLY |
| NOV57e | FECNSRQPGCKNVCFDDFFPISQVRLWALQLIMVSTPSLLVVLHVAYHEGREKRHRKKLY |
| NOV57f | FECNSRQPGCKNVCFDDFFPISQVRLWALQLIMVSTPSLLVVLHVAYHEGREKRHRKKLY |
| NOV57g | FECNSRQPGCKNVCFDDFFPISQVRLWALQLIMVSTPSLLVVLHVAYHEGREKRHRKKLY |
| NOV57h | FEQNRRQP---------------------------------------------------- |
| NOV57i | FECNRRQP---------------------------------------------------- |
| NOV57j | FEQNSRQP---------------------------------------------------- |
| NOV57k | FECNSRQP---------------------------------------------------- |
| NOV57l | FEQNSRQA---------------------------------------------------- |
| NOV57m | FECNSRQA---------------------------------------------------- |
| NOV57a | VSPGTMDGGLWYAYLISLIVKTGFEIGFLVLFYKLYDGFSVPYLIKCDLKPCPNTVDCFI |
| NOV57b | VSPGTMDGGLWYAYLISLIVKTGFEIGFLVLFYKLYDGFSVPYLIKCDLKPCPNTVDCFI |
| NOV57c | VSPGTMDGGLWYAYLISLIVKTGFEIGFLVLFYKLYDGFSVPYLIKCDLKPCPNTVDCFI |
| NOV57d | VSPGTMDGGLWYAYLISLIVKTGFEIGFLVLFYKLYDGFSVPYLIKCDLKPCPNTVDCFI |
| NOV57e | VSPGTMDGGLWYAYLISLIVKTGFEIGFLVLFYKLYDGFSVPYLIKCDLKPCPNTVDCFI |
| NOV57f | VSPGTMDGGLWYAYLISLIVKTGFEIGFLVLFYKLYDGFSVPYLIKCDLKPCPNTVDCFI |
| NOV57g | VSPGTMDGGLWYAYLISLIVKTGFEIGFLVLFYKLYDGFSVPYLIKCDLKPCPNTVDCFI |
| NOV57h | ------------------------------------------------------------ |
| NOV57i | ------------------------------------------------------------ |
| NOV57j | ------------------------------------------------------------ |
| NOV57k | ------------------------------------------------------------ |
| NOV57l | ------------------------------------------------------------ |
| NOV57m | ------------------------------------------------------------ |
| NOV57a | SKPTEKTIFILFLVITSCLCIVLNFIELSFLVLKCFIKCCLQKYLKKPQVLSV------- |
| NOV57b | SKPTEKTIFILFLVITSCLRIVLNFIELSFLLEGKGGRADPAFLYKSWHFIRK------- |
| NOV57c | SKPTEKTIFILFLVITSCLRIVLNSIELSFLVLKCLIKCCLQKYLKKPQVLSVLEGKGGR |
| NOV57d | SKPTEKTIFILFLVITSCLRIVLNFIELSFLLEGKGGRA--------------------- |
| NOV57e | SKPTEKTIFILFLVITSCLRIVLNFIELSFLLEGKGGRA--------------------- |
| NOV57f | SKPTEKTIFILFLVITSCLRIVLNSIELSFLVLKCLIKCCLQKYLKKPQVLSVLEGKGGR |
| NOV57g | SKPTEKTIFILFLVITSCLCIVLNFIELSFLVLKCFIKCCLQKYLKKPQVLSV------- |
| NOV57h | ------------------------------------------------------------ |
| NOV57i | ------------------------------------------------------------ |
| NOV57j | ------------------------------------------------------------ |
| NOV57k | ------------------------------------------------------------ |
| NOV57l | ------------------------------------------------------------ |
| NOV57m | ------------------------------------------------------------ |
| NOV57a | - |
| NOV57b | - |
| NOV57c | A |
| NOV57d | - |
| NOV57e | - |
| NOV57f | A |
| NOV57g | - |
| NOV57h | - |
| NOV57i | - |
| NOV57j | - |
| NOV57k | - |
| NOV57l | - |
| NOV57m | - |
| NOV57a | (SEQ ID NO: 876) |
| NOV57b | (SEQ ID NO: 878) |
| NOV57c | (SEQ ID NO: 880) |
| NOV57d | (SEQ ID NO: 882) |
| NOV57e | (SEQ ID NO: 884) |
| NOV57f | (SEQ ID NO: 886) |
| NOV57g | (SEQ ID NO: 888) |
| NOV57h | (SEQ ID NO: 890) |
| NOV57i | (SEQ ID NO: 892) |
| NOV57j | (SEQ ID NO: 894) |
| NOV57k | (SEQ ID NO: 896) |
| NOV57l | (SEQ ID NO: 898) |
| NOV57m | (SEQ ID NO: 900) |

[0681] Further analysis of the NOV57a protein yielded the following properties shown in Table 57C.

TABLE 57C
Protein Sequence Properties NOV57a

| | |
|---|---|
| SignalP analysis: | Cleavage site between residues 41 and 42 |
| PSORT II analysis: | |

| | |
|---|---|
| PSG: | a new signal peptide prediction method |
| | N-region: length 8; pos.chg 1; neg.chg 1 |
| | H-region: length 6; peak value −2.35 |
| | PSG score: −6.75 |
| GvH: | von Heijne's method for signal seq. recognition |
| | GvH score (threshold: −2.1): −4.71 |
| | possible cleavage site: between 40 and 41 |

>>> Seems to have no N-terminal signal peptide

| ALOM: | Klein et al's method for TM region allocation | | |
|---|---|---|---|
| | Init position for calculation: 1 | | |
| | Tentative number of TMS(s) for the threshold 0.5: 5 | | |
| | INTEGRAL | Likelihood = −7.64 | Transmembrane 23-39 |
| | INTEGRAL | Likelihood = −2.60 | Transmembrane 81-97 |
| | INTEGRAL | Likelihood = −3.24 | Transmembrane 125-141 |
| | INTEGRAL | Likelihood = −12.26 | Transmembrane 177-193 |
| | INTEGRAL | Likelihood = −2.81 | Transmembrane 195-211 |

| | |
|---|---|
| PERIPHERAL | Likelihood = 6.36 (at 63) |

| | ALOM score: −12.26 (number of TMSs: 5) |
|---|---|
| MTOP: | Prediction of membrane topology (Hartmann et al.) |
| | Center position for calculation: 30 |
| | Charge difference: −1.5 C(0.5) − N(2.0) |
| | N >= C: N-terminal side will be inside |

>>> membrane topology: type 3a
MITDISC: discrimination of mitochondrial targeting seq

| | | | |
|---|---|---|---|
| R content: | 2 | Hyd Moment(75): | 11.62 |
| Hyd Moment(95): | 9.22 | G content: | 3 |
| D/E content: | 2 | S/T content: | 5 |
| Score: −4.01 | | | |

Gavel: prediction of cleavage sites for mitochondrial preseq

R-2 motif at 42 FRL|LV

NUCDISC: discrimination of nuclear localization signals

pat4: KRHR (3) at 103
pat4: RHRK (3) at 104
pat4: HRKK (3) at 105
pat7: none
bipartite: none
content of basic residues: 11.2%
NLS Score: 0.09

KDEL: ER retention motif in the C-terminus: none
ER Membrane Retention Signals: none
SKL: peroxisomal targeting signal in the C-terminus: none
PTS2: 2nd peroxisomal targeting signal: none
VAC: possible vacuolar targeting motif: none
RNA-binding motif: none
Actinin-type actin-binding motif:

type 1: none
type 2: none

NMYR: N-myristoylation pattern: none
Prenylation motif: none
memYQRL: transport motif from cell surface to Golgi: none
Tyrosines in the tail: none
Dileucine motif in the tail: none
checking 63 PROSITE DNA binding motifs: none
checking 71 PROSITE ribosomal protein motifs: none
checking 33 PROSITE prokaryotic DNA binding motifs: none

| | |
|---|---|
| NNCN: | Reinhardt's method for Cytoplasmic/Nuclear discrimination |
| | Prediction: cytoplasmic |
| | Reliability: 94.1 |
| COIL: | Lupas's algorithm to detect coiled-coil regions |
| | total: 0 residues |

Final Results (k = 9/23):

55.6%: endoplasmic reticulum
33.3%: mitochondrial
11.1%: nuclear

>> prediction for CG56315-01 is end (k = 9)

[0682] A search of the NOV57a protein against the Geneseq database, a proprietary database that contains sequences published in patents and patent publication, yielded several homologous proteins shown in Table 57D.

TABLE 57D
Geneseq Results for NOV57a

| | | NOV57a | Identities/ | |
|---|---|---|---|---|
| | | Residues/ | Similarities for | |
| Geneseq | Protein/Organism/Length | Match | the Matched | Expect |
| Identifier | [Patent #, Date] | Residues | Region | Value |
| AAE26418 | Human transmembrane protein | 1 . . . 223 | 221/223 (99%) | e−131 |
| | (TMP)-4 protein - Homo sapiens, | 1 . . . 223 | 221/223 (99%) | |
| | 223 aa. [WO200234783-A2, 02- | | | |
| | MAY-2002] | | | |
| ABU56673 | Lung cancer-associated | 1 . . . 209 | 123/216 (56%) | 6e−73 |
| | polypeptide #266 - Unidentified, | 1 . . . 216 | 161/216 (73%) | |
| | 273 aa. [WO200286443-A2, 31- | | | |
| | OCT-2002] | | | |
| ABU56449 | Lung cancer-associated | 1 . . . 209 | 123/216 (56%) | 6e−73 |
| | polypeptide #42 - Unidentified, | 1 . . . 216 | 161/216 (73%) | |
| | 273 aa. [WO200286443-A2, 31- | | | |
| | OCT-2002] | | | |
| AAY36192 | Human secreted protein #64 - | 1 . . . 209 | 123/216 (56%) | 6e−73 |
| | Homo sapiens, 273 aa. | 1 . . . 216 | 161/216 (73%) | |
| | [WO9925825-A2, 27-MAY- | | | |
| | 1999] | | | |
| AAY36145 | Human secreted protein #17 - | 1 . . . 209 | 123/216 (56%) | 6e−73 |
| | Homo sapiens, 273 aa. | 1 . . . 216 | 161/216 (73%) | |
| | [WO9925825-A2, 27-MAY- | | | |
| | 1999] | | | |

[0683] In a BLAST search of public sequence databases, the NOV57a protein was found to have homology to the proteins shown in the BLASTP data in Table 57E.

TABLE 57E
Public BLASTP Results for NOV57a

| | | NOV57a | Identities/ | |
|---|---|---|---|---|
| Protein | | Residues/ | Similarities for | |
| Accession | | Match | the Matched | Expect |
| Number | Protein/Organism/Length | Residues | Portion | Value |
| Q96KP0 | Connexin25 - Homo sapiens | 1 . . . 223 | 222/223 (99%) | e−131 |
| | (Human), 223 aa. | 1 . . . 223 | 223/223 (99%) | |
| Q91XA4 | Similar to gap junction membrane | 1 . . . 209 | 123/214 (57%) | 6e−73 |
| | channel protein beta 5 (Gap | 1 . . . 214 | 166/214 (77%) | |
| | junction protein) (Connexin) - | | | |
| | Mus musculus (Mouse), 271 aa. | | | |
| Q02739 | Gap junction beta-5 protein | 1 . . . 209 | 123/214 (57%) | 6e−73 |
| | (Connexin 31.1) (Cx31.1) - Mus | 1 . . . 214 | 166/214 (77%) | |
| | musculus (Mouse), 271 aa. | | | |
| O95377 | Gap junction beta-5 protein | 1 . . . 209 | 123/216 (56%) | 2e−72 |
| | (Connexin 31.1) (Cx31.1) - Homo | 1 . . . 216 | 161/216 (73%) | |
| | sapiens (Human), 273 aa. | | | |
| P28232 | Gap junction beta-5 protein | 1 . . . 213 | 122/218 (55%) | 4e−72 |
| | (Connexin 31.1) (Cx31.1) - Rattus | 1 . . . 218 | 167/218 (75%) | |
| | norvegicus (Rat), 271 aa. | | | |

[0684] PFam analysis indicates that the NOV57a protein contains the domains shown in the Table 57F.

TABLE 57F
Domain Analysis of NOV57a

| | | Identities/ | |
|---|---|---|---|
| | | Similarities | |
| Pfam | NOV57a | for the Matched | Expect |
| Domain | Match Region | Region | Value |
| connexin | 2 . . . 201 | 109/247 (44%) | 2.2e−111 |
| | | 166/247 (67%) | |

### Example 58

[0685] The NOV58 clone was analyzed, and the nucleotide and encoded polypeptide sequences are shown in Table 58A.

TABLE 58A
NOV58 Sequence Analysis

| | | |
|---|---|---|
| NOV58a, CG56398-01 | SEQ ID NO: 911 | 2105 bp |

| | | |
|---|---|---|
| DNA Sequence | ORF Start: ATG at 31 | ORF Stop: TAG at 2056 |

CCTCAGGATCCAGAGGTCTCGTTCAGGACCATGGAGAGCGGCACCAGCAGCCCTCAGCCTCCACAGTT
AGATCCCCTGGATGCGTTTCCCCAGAAGGGCTTGGAGCCTGGGGACATCGCGGTGCTAGTTCTGTACT
TCCTCTTTGTCCTGGCTGTTGGACTATGGTCCACAGTGAAGACCAAAAGAGACACAGTGAAAGGCTAC
TTCCTGGCTGGAGGGGACATGGTGTGGTGGCCAGTGGGTGCATCCTTGTTTGCCAGCAATGTTGGAAG
TGGACATTTCATTGGCCTGGCAGGGTCAGGTGCTGCTACGGGCATTTCTGTATCAGCTTATGAACTTA
ATGGCTTGTTTTCTGTGCTGATGTTGGCCTGGATCTTCCTACCCATCTACATTGCTGGTCAGGTGACC
ACGATGCCAGAATACCTACGGAAGCGCTTCGGTGGCATCAGAATCCCCATCATCCTGGCTGTACTCTA
CCTATTTATCTACATCTTCACCAAGATCTCGGTAGACATGTATGCAGGTGCCATCTTCATCCAGCAGT
CTTTGCACCTGGATCTGTACCTGGCCATAGTTGGGCTACTGGCCATCACTGCTGTATACACGGTTGCT
GGTGGCCTGGCTGCTGTGATCTACACGGATGCCCTGCAGACGCTGATCATGCTTATAGGAGCGCTCAC
CTTGATGGGCTACAGTTTCGCCGCGGTTGGTGGGATGGAAGGACTGAAGGAGAAGTACTTCTTGGCCC
TGGCTAGCAACCGGAGTGAGAACAGCAGCTGCGGGCTGCCCCGGGAAGATGCCTTCCATATTTTCCGA
GATCCGCTGACATCTGATCTCCCGTGGCCGGGGGTCCTATTTGGAATGTCCATCCCATCCCTCTGGTA
CTGGTGCACGGATCAGGTAATTGTCCAGCGGACTCTGGCTGCCAAGAACCTGTCCCATGCCAAAGGAG
GTGCTCTGATGGCTGCATACCTGAAGGTGCTGCCCCTCTTCATAATGGTGTTCCCTGGGATGGTCAGC
CGCATCCTCTTCCCAGATCAAGTGGCCTGTGCAGATCCAGAGATCTGCCAGAAGATCTGCAGCAACCC
CTCAGGCTGTTCGGACATCGCGTATCCCAAACTCGTGCTGGAACTCCTGCCCACAGGTCTCCGTGGGC
TGATGATGGCTGTGATGGTGGCGGCTCTCATGTCCTCCCTCACCTCCATCTTTAACAGTGCCAGCACC
ATCTTCACCATGGACCTCTGGAATCACCTCCGGCCTCGGGCATCTGAGAAGGAGCTCATGATTGTGGG
CAGGGTGTTTGTGCTGCTGCTGGTCCTGGTCTCCATCCTCTGGATCCCTGTGGTCCAGGCCAGCCAGG
GCGGCCAGCTCTTCATCTATATCCAGTCCATCAGCTCCTACCTGCAGCCGCCTGTGGCGGTGGTCTTC
ATCATGGGATGTTTCTGGAAGAGGACCAATGAAAAGGGTGCCTTCTGGGGCCTGATCTCGGGCCTGCT
CCTGGGCTTGGTTAGGCTGGTCCTGGACTTTATTTACGTGCAGCCTCGATGCGACCAGCCAGATGAGC
GCCCGGTCCTGGTGAAGAGCATTCACTACCTCTACTTCTCCATGATCCTGTCCACGGTCACCCTCATC
ACTGTCTCCACCGTGAGCTGGTTCACAGAGCCACCCTCCAAGGAGATGGTCAGCCACCTGACCTGGTT
TACTCGTCACGACCCCGTGGTCCAGAAGGAACAAGCACCACCAGCAGCTCCCTTGTCTCTTACCCTCT
CTCAGAACGGGATGCCAGAGGCCAGCAGCAGCAGCAGCGTCCAGTTCGAGATGGTTCAAGAAAACACG
TCTAAAACCCACAGCGGTGACATGACCCCAAAGCAGTCCAAAGTGGTGAAGGCCATCCTGTGGCTCTG
TGGAATACAGGAGAAGGGCAAGGAAGAGCTCCCGGCCAGAGCAGAAGCCATCATAGTTTCCCTGGAAG
AAAACCCCTTGGTGAAGACCCTCCTGGACGTCAACCTCATTTTCTGCGTGAGCTGCGCCATCTTTATC
TGGGGCTATTTTGCTTAGTGTGGGGTGAACCCAGGGGTCCAAACTCTGTTTCTCTTCAGTGCTCC

NOV58a, CG56398-01

| | | | |
|---|---|---|---|
| Protein Sequence | SEQ ID NO: 912 | 675 aa | MW at 73989.3kD |

MESGTSSPQPPQLDPLDAFPQKGLEPGDIAVLVLYFLFVLAVGLWSTVKTKRDTVKGYFLAGGDMVWW
PVGASLFASNVGSGHFIGLAGSGAATGISVSAYELNGLFSVLMLAWIFLPIYIAGQVTTMPEYLRKRF
GGIRIPIILAVLYLFIYIFTKISVDMYAGAIFIQQSLHLDLYLAIVGLLAITAVYTVAGGLAAVIYRD
ALQTLIMLIGALTLMGYSFAAVGGMEGLKEKYFLALASNRSENSSCGLPREDAFHIFRDPLTSDLPWP
GVLFGMSIPSLWYWCTDQVIVQRTIAAKNLSHAKGGALMAAYLKVLPLFIMVFPGMVSRILFPDQVAC
ADPEICQKICSNPSGCSDIAYPKLVLELLPTGLRGLMMAVMVAALMSSLTSIFNSASTIFTMDLWNHL
RPRASEKELMIVGRVFVLLLVLVSILWIPVVQASQGGQLFIYIQSISSYLQPPVAVVFIMGCFWKRTN
EKGAFWGLISGLLLGLVRLVLDFIYVQPRCDQPDERPVLVKSIHYLYFSMILSTVTLITVSTVSWFTE
PPSKEMVSHLTWFTRHDPVVQKEQAPPAAPLSLTLSQNGMPEASSSSSVQFEMVQENTSKTHSGDMTP
KQSKVVKAILWLCGIQEKGKEELPARAEAIIVSLEENPLVKTLLDVNLIFCVSCAIFIWGYFA

| | | |
|---|---|---|
| NOV58b, 265726152 | SEQ ID NO: 913 | 1309 bp |

| | | |
|---|---|---|
| DNA Sequence | ORF Start: at 2 | ORF Stop: end of sequence |

CACCGGATCCTACTTCCTGGCTGGAGGGGACATGGTGTGGTGGCCAGTGGGTGCATCCTTGTTTGCCA
GCAATGTTGGAAGTGGACATTTCATTGGCCTGGCAGGGTCAGGTGCTGCTACGGGCATTTCTGTATCA
GCTTATGAACTTAATGGCTTGTTTTCTGTGCTGATGTTGGCCTGGATCTTCCTACCCATCTACATTGC
TGGTCAGGTCACCACGATGCCAGAATACCTACGGAAGCGCTTCGGTGGCATCAGAATCCCCATCATCC
TGGCTGTACTCTACCTATTTATCTACATCTTCACCAAGATCTCGGTAGACATGTATGCAGGTGCCATC
TTCATCCAGCAGTCTTTGCACCTGGATCTGTACCTGGCCATAGTTGGGCTACTGGCCATCACTGCTGT
ATACACGGTTGCTGGTGGCCTGGCTGCTGTGATCTACACGGATGCCCTGCAGACGCTGATCATGCTTA
TAGGAGCGCTCACCTTGATGGGCTACAGTTTCGCCGCGGTTGGTGGGATGGAAGGACTGAAGGAGAAG
TACTTCTTGGCCCTGGCTAGCAACCGGAGTGAGAACAGCAGCTGCGGGCTGCCCCGGGAAGATGCCTT
CCATATTTTCCGAGATCCGCTGACATCTGATCTCCCGTGGCCGGGGGTCCTATTTGGAATGTCCATCC
CATCCCTCTGGTACTGGTGCACGGATCAGGTGATTGTCCAGCGGACTCTGGCTGCCAAGAACCTGTCC
CATGCCAAAGGAGGTGCTCTGATGGCTGCATACCTGAAGGTGCTGCCCCTCTTCATAATGGTGTTCCC
TGGGATGGTCAGCCGCATCCTCTTCCCAGATCAAGTGGCCTGTGCAGATCCAGAGATCTGCCAGAAGA
TCTGCAGCAACCCCTCAGGCTGTTCGGACATCGCGTATCCCAAACTCGTGCTGGAACTCCTGCCCACA
GGGCTCCGTGGGCTGATGATGGCTGTGATGGTGGCGGCTCTCATGTCCTCCCTCACCTCCATCTTTAA
CAGTGCCAGCACCATCTTCACCATGGACCTCTGGAATCACCTCCGGCCTCGGGCATCTGAGAAGGAGC
TCATGATTGTGGGCAGGGTGTTTGTGCTGCTGCTGGTCCTGGTCTCCATCCTCTGGATCCCTGTGGTC
CAGGCCAGCCAGGGCGGCCAGCTCTTCATCTATATCCAGTCCATCAGCTCCTACCTGCAGCCGCCTGT
GGCGGTGGTCTTCATCATGGGATGTTTCTGGAAGAGGACCAATGAAAAGGGTGCCTTCTGGGGCCTGA
TCTCGGGCCTCGAGGGC

NOV58b, 265726152

| | | | |
|---|---|---|---|
| Protein Sequence | SEQ ID NO: 914 | 436 aa | MW at 47358.5kD |

TGSYFLAGGDMVWWPVGASLFASNVGSGHFIGLAGSGAATGISVSAYELNGLFSVLMLAWIFLPIYIA
GQVTTMPEYLRKRFGGIRIPIILAVLYLFIYIFTKISVDMYAGAIFIQQSLHLDLYLAIVGLLAITAV
YTVAGGLAAVIYTDALQTLIMLIGALTLMGYSFAAVGGMEGLKEKYFLALASNRSENSSCGLPREDAF
HIFRDPLTSDLPWPGVLFGMSIPSLWYWCTDQVIVQRTLAAKNLSHAKGGALMAAYLKVLPLFIMVFP
GMVSRILFPDQVACADPEICQKICSNPSGCSDIAYPKLVLELLPTGLRGLMMAVMVAALMSSLTSIFN
SASTIFTMDLWNHLRPRASEKELMIVGRVFVLLLVLVSILWIPVVQASQGGQLFIYIQSISSYLQPPV
AVVFIMGCFWKRTNEKGAFWGLISGLEG

| | | |
|---|---|---|
| NOV58c, 267254040 | SEQ ID NO: 915 | 1912 bp |

| | | |
|---|---|---|
| DNA Sequence | ORF Start: at 2 | ORF Stop: end of sequence |

AGAATTCGCCTTCACCGGATCCAAAAGAGACACAGTGAAAGGCTACTTCCTGGCTGGAGGGGACATGG
TGTGGTGGCCAGTGGGTGCATCCTTGTTTGCCAGCAATGTTGGAAGTGGACATTTCATTGGCCTGGCA
GGGTCAGGTGCTGCTACGGGCATTTCTGTATCAGCTTATGAACTTAATGGCTTGTTTTCTGTGCTGAT
GTTGGCCTGGATCTTCCTACCCATCTACATTGCTGGTCAGGTCACCACGATGCCAGAATACCTACGGA
AGCGCTTCGGTGGCATCAGAATCCCCATCATCCTGGCTGTACTCTACCTATTTATCTACATCTTCACC
AAGATCTCGGTAGACATGTATGCAGGTGCCATCTTCATCCAGCAGTCTTTGCACCTGGATCTGTACCT
GGCCATAGTTGGGCTACTGGCCATCACTGCTGTATACACGGTTGCTGGTGGCCTGGCTGGTGTGATCT
ACACGGATGCCCTGCAGACGCTGATCATGCTTATAGGAGCGCTCACCTTGATGGGCTACAGTTTCGCC
GCGGTTGGTGGGATGGAAGGACTGAAGGAGAAGTACTTCTTGGCCCTGGCTAGCAACCGGAGTGAGAA
CAGCAGCTGCGGGCTGCCCCGGGAAGATGCCTTCCATATTTTCCGAGATCCGCTGACATCTGATCTCC
CGTGGCCGGGGGTCCTATTTGGAATGTCCATCCCATCCCTCTGGTACTGGTGCACGGATCAGGTGATT
GTCCAGCGGACTCTGGCTGCCAAGAACCTGTCCCATGCCAAAGGAGGTGCTCTGATGGCTGCATACCT
GAAGGTGCTGCCCCTCTTCATAATGGTGTTCCCTGGGATGGTCAGCCGCATCCTCTTCCCAGATCAAG
TGGCCTGTGCAGATCCAGAGATCTGCCAGAAGATCTGCAGCAACCCCTCAGGCTGTTCGGACATCGCG
TATCCCAAACTCGTGCTGGAACTCCTGCCCACAGGGCTCCGTGGGCTGATGATGGCTGTGATGGTGGC
GGCTCTCATGTCCTCCCTCACCTCCATCTTTAACAGTGCCAGCACCATCTTCACCATGGACCTCTGGA
ATCACCTCCGGCCTCGGGCATCTGAGAAGGAGCTCATGATTGTGGGCAGGGTGTTTGTGCTGCTGCTG
GTCCTGGTCTCCATCCTCTGGATCCCTGTGGTCCAGGCCAGCCAGGGCGGCCAGCTCTTCATCTATAT
CCAGTCCATCAGCTCCTACCTGCAGCCGCCTGTGGCGGTGGTCTTCATCATGGGATGTTTCTGGAAGA
GGACCAATGAAAAGGGTGCCTTCTGGGGCCTGATCTCGGGCCTGCTCCTGGGCTTGGTTAGGCTGGTC
CTGGACTTTATTTACGTGCAGCCTCGATGCGACCAGCCAGATGAGCGCCCGGTCCTGGTGAAGAGCAT
TCACTACCTCTACTTCTCCATGATCCTGTCCACGGTCACCCTCATCACTGTCTCCACCGTGAGCTGGT
TCACAGAGCCACCCTCCAAGGAGATGGTCAGCCACCTGACCTGGTTTACTCGTCACGACCCCGTGGTC
CAGAAGGAACAAGCACCACCAGCAGCTCCCTTGTCTCTTACCCTCTCTCAGAACGGGATGCCAGAGGC
CAGCAGCAGCAGCAGCGTCCAGTTCGAGATGGTTCAAGAAAACACGTCTAAAACCCACAGCTGTGACA
TGACCCCAAAGCAGTCCAAAGTGGTGAAGGCCATCCTGTGGCTCTGTGGAATACAGGAGAAGGGCAAG
GAAGAGCTCCCGGCCAGAGCAGAAGCCATCATAGTTTCCCTGGAAGAAAACCCCTTGGTGAAGACCCT
CCTGGACGTCAACCTCATTTTCTGCGTGAGCTGCGCCATCTTTATCTGGGGCTATTTTGCTCTCGAGG
GCAGGGCG

NOV58c, 267254040

| | | | |
|---|---|---|---|
| Protein Sequence | SEQ ID NO: 916 | 637 aa | MW at 69945.6kD |

EFAFTGSKRDTVKGYFLAGGDMVWWPVGASLFASNVGSGHFIGLAGSGAATGISVSAYELNGLFSVLM
LAWIFLPIYIAGQVTTMPEYLRKRFGGIRIPIILAVLYLFIYIFTKISVDMYAGAIFIQQSLHLDLYL
AIVGLLAITAVYTVAGGLAAVIYTDALQTLIMLIGALTLMGYSFAAVGGMEGLKEKYFLALASNRSEN
SSCGLPREDAFHIFRDPLTSDLPWPGVLFGMSIPSLWYWCTDQVIVQRTLAAKNLSHAKGGALMAAYL
KVLPLFIMVFPGMVSRILFPDQVACADPEICQKICSNPSGCSDIAYPKLVLELLPTGLRGLMMAVMVA
ALMSSLTSIFNSASTIFTMDLWNHLRPRASEKELMIVGRVFVLLLVLVSIILWIPWQASQGGQLFIYI
QSISSYLQPPVAVVFIMGCFWKRTNEKGAFWGLISGLLLGLVRLVLDFIYVQPRCDQPDERPVLVKSI
HYLYFSMILSTVTLITVSTVSWFTEPPSKEMVSHLTWFTRHDPVVQKEQAPPAAPLSLTLSQNGMPEA
SSSSSVQFEMVQENTSKTHSCDMTPKQSKVVKAILWLCGIQEKGKEELPARAEAIIVSLEENPLVKTL
LDVNLIFCVSCAIFIWGYFALEGRA

| | |
|---|---|
| SEQ ID NO: 917 | 2105 bp |

| | | |
|---|---|---|
| NOV58d, SNP13379242 of | ORF Start: ATG at 31 | ORF Stop: TAG at 2056 |

| | | |
|---|---|---|
| CG56398-01, DNA Sequence | SNP Pos: 804 | SNP Change: C to G |

CCTCAGGATCCAGAGGTCTCGTTCAGGACCATGGAGAGCGGCACCAGCAGCCCTCAGCCTCCACAGTT
AGATCCCCTGGATGCGTTTCCCCAGAAGGGCTTGGAGCCTGGGGACATCGCGGTGCTAGTTCTGTACT
TCCTCTTTGTCCTGGCTGTTGGACTATGGTCCACAGTGAAGACCAAAAGAGACACAGTGAAAGGCTAC
TTCCTGGCTGGAGGGGACATGGTGTGGTGGCCAGTGGGTGCATCCTTGTTTGCCAGCAATGTTGGAAG
TGGACATTTCATTGGCCTGGCAGGGTCAGGTGCTGCTACGGGCATTTCTGTATCAGCTTATGAACTTA
ATGGCTTGTTTTCTGTGCTGATGTTGGCCTGGATCTTCCTACCCATCTACATTGCTGGTCAGGTGACC
ACGATGCCAGAATACCTACGGAAGCGCTTCGGTGGCATCAGAATCCCCATCATCCTGGCTGTACTCTA
CCTATTTATCTACATCTTCACCAAGATCTCGGTAGACATGTATGCAGGTGCCATCTTCATCCAGCAGT
CTTTGCACCTGGATCTGTACCTGGCCATAGTTGGGCTACTGGCCATCACTGCTGTATACACGGTTGCT
GGTGGCCTGGCTGCTGTGATCTACACGGATGCCCTGCAGACGCTGATCATGCTTATAGGAGCGCTCAC
CTTGATGGGCTACAGTTTCGCCGCGGTTGGTGGGATGGAAGGACTGAAGGAGAAGTACTTCTTGGCCC
TGGCTAGCAACCGGAGTGAGAACAGCAGCTGCGGGCTGCCCCGGGAAGATGCCTTGCATATTTTCCGA
GATCCGCTGACATCTGATCTCCCGTGGCCGGGGGTCCTATTTGGAATGTCCATCCCATCCCTCTGGTA
CTGGTGCACGGATCAGGTAATTGTCCAGCGGACTCTGGCTGCCAAGAACCTGTCCCATGCCAAAGGAG
GTGCTCTGATGGCTGCATACCTGAAGGTGCTGCCCCTCTTCATAATGGTGTTCCCTGGGATGGTCAGC
CGCATCCTCTTCCCAGATCAAGTGGCCTGTGCAGATCCAGAGATCTGCCAGAAGATCTGCAGCAACCC
CTCAGGCTGTTCGGACATCGCGTATCCCAAACTCGTGCTGGAACTCCTGCCCACAGGTCTCCGTGGGC
TGATGATGGCTGTGATGGTGGCGGCTCTCATGTCCTCCCTCACCTCCATCTTTAACAGTGCCAGCACC
ATCTTCACCATGGACCTCTGGAATCACCTCCGGCCTCGGGCATCTGAGAAGGAGCTCATGATTGTGGG
CAGGGTGTTTGTGCTGCTGCTGGTCCTGGTCTCCATCCTCTGGATCCCTGTGGTCCAGGCCAGCCAGG
GCGGCCAGCTCTTCATCTATATCCAGTCCATCAGCTCCTACCTGCAGCCGCCTGTGGCGGTGGTCTTC
ATCATGGGATGTTTCTGGAAGAGGACCAATGAAAAGGGTGCCTTCTGGGGCCTGATCTCGGGCCTGCT
CCTGGGCTTGGTTAGGCTGGTCCTGGACTTTATTTACGTGCAGCCTCGATGCGACCAGCCAGATGAGC
GCCCGGTCCTGGTGAAGAGCATTCACTACCTCTACTTCTCCATGATCCTGTCCACGGTCACCCTCATC
ACTGTCTCCACCGTGAGCTGGTTCACAGAGCCACCCTCCAAGGAGATGGTCAGCCACCTGACCTGGTT
TACTCGTCACGACCCCGTGGTCCAGAAGGAACAAGCACCACCAGCAGCTCCCTTGTCTCTTACCCTCT
CTCAGAACGGGATGCCAGAGGCCAGCAGCAGCAGCAGCGTCCAGTTCGAGATGGTTCAAGAAAACACG
TCTAAAACCCACAGCGGTGACATGACCCCAAAGCAGTCCAAAGTGGTGAAGGCCATCCTGTGGCTCTG
TGGAATACAGGAGAAGGGCAAGGAAGAGCTCCCGGCCAGAGCAGAAGCCATCATAGTTTCCCTGGAAG
AAAACCCCTTGGTGAAGACCCTCCTGGACGTCAACCTCATTTTCTGCGTGAGCTGCGCCATCTTTATC
TGGGGCTATTTTGCTTAGTGTGGGGTGAACCCAGGGGTCCAAACTCTGTTTCTCTTCAGTGCTCC

| | | |
|---|---|---|
| NOV58d, SNP13379242 of | SEQ ID NO: 918 | MW at 73955.2kD |

| | | | |
|---|---|---|---|
| CG56398-01, Protein Sequence | SNP Pos: 258 | 675 aa | SNP Change: Phe to Leu |

MESGTSSPQPPQLDPLDAFPQKGLEPGDIAVLVLYFLFVLAVGLWSTVKTKRDTVKGYFLAGGDMVWW
PVGASLFASNVGSGHFIGLAGSGAATGISVSAYELNGLFSVLMLAWIFLPIYIAGQVTTMPEYLRKRF
GGIRIPIILAVLYLFIYIFTKISVDMYAGAIFIQQSLHLDLYLAIVGLLAITAVYTVAGGLAAVIYTD
ALQTLIMLIGALTLMGYSFAAVGGMEGLKEKYFLALASNRSENSSCGLPREDALHIFRDPLTSDLPWP
GVLFGMSIPSLWYWCTDQVIVQRTLAAKNLSHAKGGALMAAYLKVLPLFIMVFPGMVSRILFPDQVAC
ADPEICQKICSNPSGCSDIAYPKLVLELLPTGLRGLMMAVMVAALMSSLTSIFNSASTIFTMDLWNHL
RPRASEKELMIVGRVFVLLLVLVSILWIPVVQASQGGQLFIYIQSISSYLQPPVAVVFIMGCFWKRTN
EKGAFWGLISGLLLGLVRLVLDFIYVQPRCDQPDERPVLVKSIHYLYFSMILSTVTLITVSTVSWFTE
PPSKENVSHLTWFTRHDPVVQKEQAPPAAPLSLTLSQNGMPEASSSSSVQFEMVQENTSKTHSGDMTP
KQSKVVKAILWLCGIQEKGKEELPARAEAIIVSLEENPLVKTLLDVNLIFCVSCAIFIWGYFA

[0686] A ClustalW comparison of the above protein sequences yields the following sequence alignment shown in Table 58B.

TABLE 58B
Comparison of the NOV58 protein sequences.

| | |
|---|---|
| NOV58a | MESGTSSPQPPQLDPLDAFPQKGLEPGDIAVLVLYFLFVLAVGLWSTVKTKRDTVKGYFL |
| NOV58b | ------------------------------------------------------TGSYFL |
| NOV58c | -------------------------------------------EFAFTGSKRDTVKGYFL |
| NOV58a | AGGDMVWWPVGASLFASNVGSGHFIGLAGSGAATGISVSAYELNGLFSVLNLAWIFLPIY |
| NOV58b | AGGDMVWWPVGASLFASNVGSGHFIGLAGSGAATGISVSAYELNGLFSVLHLAWIFLPIY |
| NOV58c | AGGDMVWWPVGASLFASNVGSGHFIGLAGSGAATGISVSAYELNGLFSVLMLAWIFLPIY |
| NOV58a | IAGQVTTMPEYLRKRFGGIRIPIILAVLYLFIYIFTKISVDMYAGAIFIQQSLHLDLYLA |
| NOV58b | IAGQVTTMPEYLRKRFGGIRIPIILAVLYLFIYIFTKISVDMYAGAIFIQQSLHLDLYLA |
| NOV58c | IAGQVTTMPEYLRKRFGGIRIPIILAVLYLFIYIFTKISVDMYAGAIFIQQSLHLDLYLA |
| NOV58a | IVGLLAITAVYTVAGGLAAVIYTDALQTLIMLIGALTLMGYSFAAVGGMEGLKEKYFLAL |
| NOV58b | IVGLLAITAVYTVAGGLAAVIYTDALQTLIMLIGALTLMGYSFAAVGGMEGLKEKYFLAL |
| NOV58c | IVGLLAITAVYTVAGGLAAVIYTDALQTLIMLIGALTLMGYSFAAVGGMEGLKEKYFLAL |
| NOV58a | ASNRSENSSCGLPREDAFHIFRDPLTSDLPWPGVLFGMSIPSLWYWCTDQVIVQRTLAAK |
| NOV58b | ASNRSENSSCGLPREDAFHIFRDPLTSDLPWPGVLFGMSIPSLWYWCTDQVIVQRTLAAK |
| NOV58c | ASNRSENSSCGLPREDAFHIFRDPLTSDLPWPGVLFGMSIPSLWYWCTDQVIVQRTLAAK |
| NOV58a | NLSHAKGGALMAAYLKVLPLFIMVFPGMVSRILFPDQVACADPEICQKICSNPSGCSDIA |
| NOV58b | NLSHAKGGALMAAYLKVLPLFIMVFPGMVSRILFPDQVACADPEICQKICSNPSGCSDIA |
| NOV58c | NLSHAKGGALMAAYLKVLPLFIMVFPGMVSRILFPDQVACADPEICQKICSNPSGCSDIA |
| NOV58a | YPKLVLELLPTGLRGLMMAVMVAALMSSLTSIFNSASTIFTMDLWNHLRPRASEKELMIV |
| NOV58b | YPKLVLELLPTGLRGLMMAVMVAALMSSLTSIFNSASTIFTMDLWNHLRPRASEKELMIV |
| NOV58c | YPKLVLELLPTGLRGLMMAVMVAALMSSLTSIFNSASTIFTMDLWNHLRPRASEKELMIV |
| NOV58a | GRVFVLLLVLVSILWIPVVQASQGGQLFIYIQSISSYLQPPVAVVFIMGCFWKRTNEKGA |
| NOV58b | GRVFVLLLVLVSILWIPVVQASQGGQLFIYIQSISSYLQPPVAVVFIMGCFWKRTNEKGA |
| NOV58c | GRVFVLLLVLVSILWIPVVQASQGGQLFIYIQSISSYLQPPVAVVFIMGCFWKRTNEKGA |
| NOV58a | FWGLISGLLLGLVRLVLDFIYVQPRCDQPDERPVLVKSIHYLYFSMILSTVTLITVSTVS |
| NOV58b | FWGLISGLEG-------------------------------------------------- |
| NOV58c | FWGLISGLLLGLVRLVLDFIYVQPRCDQPDERPVLVKSIHYLYFSMILSTVTLITVSTVS |
| NOV58a | WFTEPPSKEMVSHLTWFTRHDPVVQKEQAPPAAPLSLTLSQNGMPEASSSSSVQFEMVQE |
| NOV58b | ------------------------------------------------------------ |
| NOV58c | WFTEPPSKEMVSHLTWFTRHDPVVQKEQAPPAAPLSLTLSQNGMPEASSSSSVQFEMVQE |
| NOV58a | NTSKTHSGDMTPKQSKVVKAILWLCGIQEKGKEELPARAEAIIVSLEENPLVKTLLDVNL |
| NOV58b | ------------------------------------------------------------ |
| NOV58c | NTSKTHSCDMTPKQSKVVKAILWLCGIQEKGKEELPARAEAIIVSLEENPLVKTLLDVNL |
| NOV58a | IFCVSCAIFIWGYFA----- |
| NOV58b | -------------------- |
| NOV58c | IFCVSCAIFIWGYFALEGRA |
| NOV58a | (SEQ ID NO: 912) |
| NOV58b | (SEQ ID NO: 914) |
| NOV58c | (SEQ ID NO: 916) |

[0687] Further analysis of the NOV58a protein yielded the following properties shown in Table 58C.

TABLE 58C
Protein Sequence Properties NOV58a

| | |
|---|---|
| SignalP analysis: | Cleavage site between residues 51 and 52 |
| PSORT II analysis: | |

| | |
|---|---|
| PSG: | a new signal peptide prediction method |
| | N-region: length 2; pos.chg 0; neg.chg 1 |
| | H-region: length 11; peak value 0.00 |
| | PSG score: −4.40 |
| GvH: | von Heijne's method for signal seq. recognition |
| | GvH score (threshold: −2.1): −0.94 |
| | possible cleavage site: between 41 and 42 |

>>> Seems to have no N-terminal signal peptide
ALOM: Klein et al's method for TM region allocation

| Init position for calculation: 1 | | |
|---|---|---|
| Tentative number of TMS(s) for the threshold 0.5: 11 | | |
| INTEGRAL | Likelihood = −10.61 | Transmembrane 29-45 |
| INTEGRAL | Likelihood = −6.64 | Transmembrane 106-122 |
| INTEGRAL | Likelihood = −7.64 | Transmembrane 139-155 |
| INTEGRAL | Likelihood = −5.79 | Transmembrane 177-193 |
| INTEGRAL | Likelihood = −3.24 | Transmembrane 210-226 |
| INTEGRAL | Likelihood = −4.88 | Transmembrane 309-325 |
| INTEGRAL | Likelihood = −3.88 | Transmembrane 376-392 |
| INTEGRAL | Likelihood = −13.69 | Transmembrane 423-439 |
| INTEGRAL | Likelihood = −5.47 | Transmembrane 484-500 |
| INTEGRAL | Likelihood = −0.53 | Transmembrane 524-540 |
| INTEGRAL | Likelihood = −5.47 | Transmembrane 654-670 |

| | |
|---|---|
| PERIPHERAL | Likelihood = 1.32 (at 454) |

| | ALOM score: −13.69 (number of TMSs: 11) |
|---|---|
| MTOP: | Prediction of membrane topology (Hartmann et al.) |
| | Center position for calculation: 36 |
| | Charge difference: 6.0 C(3.0) − N(−3.0) |
| | C > N: C-terminal side will be inside |

>>> membrane topology: type 3b
MITDISC: discrimination of mitochondrial targeting seq

| | | | |
|---|---|---|---|
| R content: | 0 | Hyd Moment(75): | 4.59 |
| Hyd Moment(95): | 4.89 | G content: | 1 |
| D/E content: | 2 | S/T content: | 4 |
| Score: −6.67 | | | |

Gavel: prediction of cleavage sites for mitochondrial preseq

cleavage site motif not found

NUCDISC: discrimination of nuclear localization signals

pat4: none
pat7: PEYLRKR (3) at 129
bipartite: none
content of basic residues: 6.7%
NLS Score: −0.22

KDEL: ER retention motif in the C-terminus: none
ER Membrane Retention Signals: none
SKL: peroxisomal targeting signal in the C-terminus: none
PTS2: 2nd peroxisomal targeting signal: none
VAC: possible vacuolar targeting motif: none
RNA-binding motif: none
Actinin-type actin-binding motif:

type 1: none
type 2: none

NMYR: N-myristoylation pattern: none
Prenylation motif: none
memYQRL: transport motif from cell surface to Golgi: none
Tyrosines in the tail: none
Dileucine motif in the tail: none
checking 63 PROSITE DNA binding motifs: none
checking 71 PROSITE ribosomal protein motifs: none
checking 33 PROSITE prokaryotic DNA binding motifs: none

| | |
|---|---|
| NNCN: | Reinhardt's method for Cytoplasmic/Nuclear discrimination |
| | Prediction: cytoplasmic |
| | Reliability: 94.1 |
| COIL: | Lupas's algorithm to detect coiled-coil regions |
| | total: 0 residues |

Final Results (k = 9/23):

66.7%: endoplasmic reticulum
11.1%: vacuolar
11.1%: mitochondrial
11.1%: Golgi

>> prediction for CG56398-01 is end (k = 9)

[0688] A search of the NOV58a protein against the Geneseq database, a proprietary database that contains sequences published in patents and patent publication, yielded several homologous proteins shown in Table 58D.

TABLE 58D
Geneseq Results for NOV58a

| | | NOV58a | Identities/ | |
|---|---|---|---|---|
| | | Residues/ | Similarities for | |
| Geneseq | Protein/Organism/Length | Match | the Matched | Expect |
| Identifier | [Patent #, Date] | Residues | Region | Value |
| ABB80599 | Human sbg1007026SGLT protein - | 1 . . . 675 | 674/675 (99%) | 0.0 |
| | Homo sapiens, 675 aa. | 1 . . . 675 | 674/675 (99%) | |
| | [WO200222802-A1, 21-MAR- | | | |
| | 2002] | | | |
| AAB60093 | Human transport protein TPPT-13 - | 1 . . . 675 | 674/675 (99%) | 0.0 |
| | Homo sapiens, 675 aa. | 1 . . . 675 | 674/675 (99%) | |
| | [WO200078953-A2, 28-DEC- | | | |
| | 2000] | | | |
| AAB85102 | Novel human transporter protein | 1 . . . 675 | 673/675 (99%) | 0.0 |
| | (NHP) - Homo sapiens, 675 aa. | 1 . . . 675 | 673/675 (99%) | |
| | [WO200142469-A1, 14-JUN- | | | |
| | 2001] | | | |
| ABP69833 | Human polypeptide SEQ ID NO | 1 . . . 675 | 672/675 (99%) | 0.0 |
| | 1880 - Homo sapiens, 675 aa. | 1 . . . 675 | 672/675 (99%) | |
| | [WO200270539-A2, 12-SEP- | | | |
| | 2002] | | | |
| AAU77134 | Human sodium-sugar symporter | 1 . . . 675 | 671/675 (99%) | 0.0 |
| | 32620 polypeptide - Homo | 1 . . . 675 | 672/675 (99%) | |
| | sapiens, 675 aa. [WO200216582- | | | |
| | A2, 28-FEB-2002] | | | |

[0689] In a BLAST search of public sequence databases, the NOV58a protein was found to have homology to the proteins shown in the BLASTP data in Table 58E.

TABLE 58E
Public BLASTP Results for NOV58a

| | | NOV58a | Identities/ | |
|---|---|---|---|---|
| Protein | | Residues/ | Similarities for | |
| Accession | | Match | the Matched | |
| Number | Protein/Organism/Length | Residues | Portion | Expect Value |
| Q8WWX8 | Sodium/glucose cotransporter | 1 . . . 675 | 674/675 (99%) | 0.0 |
| | KST1 - Homo sapiens (Human), | 1 . . . 675 | 674/675 (99%) | |
| | 675 aa. | | | |
| CAC83728 | Sodium-dependent glucose | 1 . . . 675 | 673/675 (99%) | 0.0 |
| | transporter - Homo sapiens | 1 . . . 675 | 673/675 (99%) | |
| | (Human), 675 aa. | | | |
| Q96PP5 | Putative sodium-coupled | 1 . . . 675 | 672/675 (99%) | 0.0 |
| | cotransporter RKST1 - Homo | 1 . . . 675 | 672/675 (99%) | |
| | sapiens (Human), 675 aa. | | | |
| CAD43585 | Sequence 1 from Patent | 1 . . . 675 | 671/675 (99%) | 0.0 |
| | WO0216582 - Homo sapiens | 1 . . . 675 | 672/675 (99%) | |
| | (Human), 675 aa. | | | |
| Q8K0E3 | Similar to putative sodium- | 1 . . . 675 | 583/675 (86%) | 0.0 |
| | coupled cotransporter RKST1 - | 1 . . . 673 | 627/675 (92%) | |
| | Mus musculus (Mouse), 673 aa. | | | |

[0690] PFam analysis indicates that the NOV58a protein contains the domains shown in the Table 58F.

TABLE 58F
Domain Analysis of NOV58a

| | NOV58a | Identities/ | |
|---|---|---|---|
| | Match | Similarities | |
| Pfam Domain | Region | for the Matched Region | Expect Value |
| SSF | 58 . . . 487 | 199/447 (45%) | 1.9e−199 |
| | | 370/447 (83%) | |

### Example 59

[0691] The NOV59 clone was analyzed, and the nucleotide and encoded polypeptide sequences are shown in Table 59A.

TABLE 59A
NOV59 Sequence Analysis

| | | |
|---|---|---|
| NOV59a, CG56605-03 | SEQ ID NO: 919 | 557 bp |

| | | |
|---|---|---|
| DNA Sequence | ORF Start: ATG at 26 | ORF Stop: TAG at 524 |

ATGGTGGCAGAGTCTACATAGAACTATGCTTCGTGGTGTTCTGGGGAAAACCTTTCGACTTGTTGGCT
ATACTATTCAATATGGCTGTATAGCTCATTGTGCTTTTGAATACGTTGGTGGTGTTGTCATGTGTTCT
GGACCATCAATGGAGCCTACAATTCAAAATTCAGATATTGTCTTTGCAGAAAATCTTAGTCGACATTT
TTATGGTATCCAAAGAGGTGACATTGTGATTGCAAAAAGCCCAAGTGATCCAAAATCAAATATTTGTA
AAAGAGTAATTGGTTTGGAAGGAGACAAAATCCTCACCACTAGTCCATCAGATTTCTTTAAAAGCCAT
AGTTATGTGCCAATGGGTCATGTTTGGTTAGAAGGTGACAATCTACAGAATTCTACAGATTCCAGGTG
CTATGGACCTATTCCATATGGACTAATAAGAGGACGAATCTTCTTTAAGATTTGGCCTCTGAGTGATT
TTGGATTTTTACGTGCCAGCCCTAATGGCCACAGATTTTCTGATGATTAGTAAGCATTTATTCTTTTG
ACTTGATTATTGT

NOV59a, CG56605-03

| | | | |
|---|---|---|---|
| Protein Sequence | SEQ ID NO: 920 | 166 aa | MW at 18504.0kD |

MLRGVLGKTFRLVGYTIQYGCIAHCAFEYVGGVVMCSGPSMETPIQNSDIVFAENLSRHFYGIQRGDI
VIAKSPSDPKSNICKRVIGLEGDKILTTSPSDFFKSHSYVPMGHVWLEGDNLQNSTDSRCYGPIPYGL
IRGRIFFKIWPLSDFGFLRASPNGHRFSDD

| | | |
|---|---|---|
| NOV59b, CG56605-01 | SEQ ID NO: 921 | 513 bp |

| | | |
|---|---|---|
| DNA Sequence | ORF Start: ATG at 16 | ORF Stop: TAA at 445 |

AGTCTACATAGAACTATGCTTCGTGGTGCTCTGGGGAAACCTTCTGACCTTGTTGGCTATGCTATTCA
GTATGGCTGTATAGCTCACTGTGCTTCTGAATACGTTGGTGGTGTTGTCATGTGTTCTGGACCATCAA
TGGAGCCTACAATTCAAAATTCAGATACTGTCTTTGCACAAAATCTTAGTCGACATTTTGATAGTATC
CAAAGAGGTGACATTGTGATTGCAAAAAGCCCAAGTGATCCAACATCAAATATTTGTAAAAGAGTAAC
TGGTTTGGAAGGAGACAAAATCCTCACCACTAGTCCATCAGATTTCTTTAAAAGCTACAGTTATGTCC
CAGTGGGTCATGTTTGGTTAGAAGGTGATAATCTACAGAATTCTACAGATTCCAGTTACTATGGACCT
ATTCCATATGAACTAATAAGAGGACGAATCTTCTTTTAAGATTCGGCCTCTGAGTGATTTTGGATTTT
TATGTGCCAGCCTTAATGGCCACAGATTTTCTGATGA

NOV59b, CG56605-01

| | | | |
|---|---|---|---|
| Protein Sequence | SEQ ID NO: 922 | 143 aa | MW at 15622.4kD |

MLRGAIGKPSDLVGYAIQYGCIAHCASEYVGGVVMCSGPSMEPTIQNSDTVFAQNLSRHFDSIQRGDI
VIAKSPSDPTSNICKRVTGLEGDKILTTSPSDFFKSYSYVPVGHVWLEGDNLQNSTDSSYYGPIPYEL
IRGRIFF

| | | |
|---|---|---|
| NOV59c, CG56605-02 | SEQ ID NO: 923 | 507 bp |

| | | |
|---|---|---|
| DNA Sequence | ORF Start: ATG at 11 | ORF Stop: at 506 |

ACATAGAACTATGCTTCGTGGTGCTCTGGGGAAAACCTTTCGACTTGTTGGCTATACTATTCAATATG
GCTGTATAGCTCATTGTGCTTTTGAATACGTTGGTGGTGTTGTCATGTGTTCTGGACCATCAATGGAG
CCTACAATTCAAAATTCAGATATTGTCTTTGCAGAAAATCTTAGTCGACATTTTTATGGTATCCAAAG
AGGTGACATTGTGATTGCAAAAAGCCCAAGTGATCCAAAATCAAATATTTGTAAAAGAGTAATTGGTT
TGGAAGGAGACAAAATCCTCACCACTAGTCCATCAGATTTCTTTAAAAGCCATAGTTATGTGCCAATG
GGTCATGTTTGGTTAGAAGGTGACAATCTACAGAATTCTACAGATTCCAGGTGCTATGGACCTATTCC
ATATGGACTAATAAGAGGACGAATCTTCTTTAAGATTTGGCCTCTGAGTGATTTTGGATTTTTACGTG
CCAGCCTTAATGGCCACAGATTTTCTGATGA

NOV59c, CG56605-02

| | | | |
|---|---|---|---|
| Protein Sequence | SEQ ID NO: 924 | 165 aa | MW at 18376.9kD |

MLRGALGKTFRLVGYTIQYGCIAHCAFEYVGGVVMCSGPSMEPTIQNSDIVFAENLSRHFYGIQRGDI
VIAKSPSDPKSNICKRVIGLEGDKILTTSPSDFFKSHSYVPMGHVWLEGDNLQNSTDSRCYGPIPYGL
IRGRIFFKIWPLSDFGFLRASLNGHRFSD

[0692] A ClustalW comparison of the above protein sequences yields the following sequence alignment shown in Table 59B.

TABLE 59B
Comparison of the NOV59 protein sequences.

| | |
|---|---|
| NOV59a | MLRGVLGKTFRLVGYTIQYGCIAHCAFEYVGGVVMCSGPSMEPTIQNSDIVFAENLSRHF |
| NOV59b | MLRGALGKPSDLVGYAIQYGCIAHCASEYVGGVVMCSGPSMEPTIQNSDTVFAQNLSRHF |
| NOV59c | MLRGVLGKTFRLVGYTIQYGCIAHCAFEYVGGVVMCSGPSMEPTIQNSDIVFAENLSRHF |
| NOV59a | YGIQRGDIVIAKSPSDPKSNICKRVIGLEGDKILTTSPSDFFKSHSYVPMGHVWLEGDNL |
| NOV59b | DSIQRGDIVIAKSPSDPTSNICKRVTGLEGDKILTTSPSDFFKSYSYVPVGHVWLEGDNL |
| NOV59c | YGIQRGDIVIAKSPSDPKSNICKRVIGLEGDKILTTSPSDFFKSHSYVPMGHVWLEGDNL |
| NOV59a | QNSTDSRCYGPIPYGLIRGRIFFKIWPLSDFGFLRASPNGHRFSDD |
| NOV59b | QNSTDSSYYGPIPYELIRGRIFF----------------------- |
| NOV59c | QNSTDSRCYGPIPYGLIRGRIFFKIWPLSDFGFLRASLNGHRFSD- |
| NOV59a | (SEQ ID NO: 920) |
| NOV59b | (SEQ ID NO: 922) |
| NOV59c | (SEQ ID NO: 924) |

[0693] Further analysis of the NOV59a protein yielded the following properties shown in Table 59C.

TABLE 59C
Protein Sequence Properties NOV59a

| | |
|---|---|
| SignalP analysis: | No Known Signal Sequence Indicated |

```
PSORT II analysis:
PSG: a new signal peptide prediction method
    N-region: length 11; pos.chg 3; neg.chg 0
    H-region: length 16; peak value 6.29
    PSG score: 1.89
GvH: von Heijne's method for signal seq. recognition
    GvH score (threshold: −2.1): −7.69
    possible cleavage site: between 32 and 33
>>> Seems to have no N-terminal signal peptide
ALOM: Klein et al's method for TM region allocation
    Init position for calculation: 1
    Tentative number of TMS(s) for the threshold 0.5: 0
    number of TMS(s) .. fixed
    PERIPHERAL Likelihood = 1.70 (at 20)
    ALOM score: 1.70 (number of TMSs: 0)
MTOP: Prediction of membrane topology (Hartmann et al.)
    Center position for calculation: 6
    Charge difference: 0.0 C(2.0) − N(2.0)
    N >= C: N-terminal side will be inside
MITDISC: discrimination of mitochondrial targeting seq
```

| | | | |
|---|---|---|---|
| R content: | 2 | Hyd Moment(75): | 14.36 |
| Hyd Moment(95): | 9.31 | G content: | 4 |
| D/E content: | 1 | S/T content: | 2 |
| Score: −2.96 | | | |

```
Gavel: prediction of cleavage sites for mitochondrial preseq
    R-2 motif at 21 FRL|VG
NUCDISC: discrimination of nuclear localization signals
    pat4: none
    pat7: none
    bipartite: none
    content of basic residues: 10.2%
    NLS Score: −0.47
KDEL: ER retention motif in the C-terminus: none
ER Membrane Retention Signals:
    XXRR-like motif in the N-terminus: LRGV
none
SKL: peroxisomal targeting signal in the C-terminus: none
PTS2: 2nd peroxisomal targeting signal: none
VAC: possible vacuolar targeting motif: none
RNA-binding motif: none
Actinin-type actin-binding motif:
    type 1: none
    type 2: none
NMYR: N-myristoylation pattern: none
Prenylation motif: none
memYQRL: transport motif from cell surface to Golgi: none
Tyrosines in the tail: none
Dileucine motif in the tail: none
checking 63 PROSITE DNA binding motifs: none
checking 71 PROSITE ribosomal protein motifs: none
checking 33 PROSITE prokaryotic DNA binding motifs: none
NNCN: Reinhardt's method for Cytoplasmic/Nuclear discrimination
    Prediction: cytoplasmic
    Reliability: 89
COIL: Lupas's algorithm to detect coiled-coil regions
    total: 0 residues
Final Results (k = 9/23):
    43.5%: cytoplasmic
    34.8%: mitochondrial
      8.7%: nuclear
      8.7%: peroxisomal
      4.3%: plasma membrane
>> prediction for CG56605-03 is cyt (k = 23)
```

[0694] A search of the NOV59a protein against the Geneseq database, a proprietary database that contains sequences published in patents and patent publication, yielded several homologous proteins shown in Table 59D.

TABLE 59D
Geneseq Results for NOV59a

| | | NOV59a | Identities/ | |
|---|---|---|---|---|
| | | Residues/ | Similarities for | |
| Geneseq | Protein/Organism/Length | Match | the Matched | Expect |
| Identifier | [Patent #, Date] | Residues | Region | Value |
| ABG70899 | Human S26 signal peptidase | 1 . . . 166 | 166/166 (100%) | 2e−97 |
| | family member 33449 - Homo | 1 . . . 166 | 166/166 (100%) | |
| | sapiens, 166 aa. [US2002115630- | | | |
| | A1, 22-AUG-2002] | | | |
| AAB47563 | Protease PRTS-5 - Homo sapiens, | 1 . . . 166 | 166/166 (100%) | 2e−97 |
| | 166 aa. [WO200171004-A2, 27- | 1 . . . 166 | 166/166 (100%) | |
| | SEP-2001] | | | |
| ABG08149 | Novel human diagnostic protein | 1 . . . 166 | 166/166 (100%) | 2e−97 |
| | #8140 - Homo sapiens, 166 aa. | 1 . . . 166 | 166/166 (100%) | |
| | [WO200175067-A2, 11-OCT- | | | |
| | 2001] | | | |
| ABB64326 | Drosophila melanogaster | 5 . . . 150 | 76/160 (47%) | 2e−38 |
| | polypeptide SEQ ID NO 19770 - | 3 . . . 162 | 100/160 (62%) | |
| | Drosophila melanogaster, 166 aa. | | | |
| | [WO200171042-A2, 27-SEP- | | | |
| | 2001] | | | |
| AAB74688 | Human protease and protease | 108 . . . 166 | 58/59 (98%) | 6e−30 |
| | inhibitor PPIM-21 - Homo | 36 . . . 94 | 58/59 (98%) | |
| | sapiens, 94 aa. [WO200110903- | | | |
| | A2, 15-FEB-2001] | | | |

[0695] In a BLAST search of public sequence databases, the NOV59a protein was found to have homology to the proteins shown in the BLASTP data in Table 59E.

TABLE 59E
Public BLASTP Results for NOV59a

| | | NOV59a | Identities/ | |
|---|---|---|---|---|
| Protein | | Residues/ | Similarities for | |
| Accession | | Match | the Matched | Expect |
| Number | Protein/Organism/Length | Residues | Portion | Value |
| Q96LU5 | Hypothetical protein FLJ25059 - | 1 . . . 166 | 166/166 (100%) | 5e−97 |
| | Homo sapiens (Human), 166 aa. | 1 . . . 166 | 166/166 (100%) | |
| Q9CQU8 | 1500034J20Rik protein | 1 . . . 166 | 156/166 (93%) | 1e−89 |
| | (2610528O17Rik protein) | 1 . . . 166 | 157/166 (93%) | |
| | (RIKEN cDNA 1500034J20 gene) | | | |
| | (Unknown EST) - Mus musculus | | | |
| | (Mouse), 166 aa. | | | |
| Q96SH9 | DJ1137O17.1 (Similar to putative | 1 . . . 144 | 144/144 (100%) | 2e−82 |
| | mitochondrial inner membrane | 1 . . . 144 | 144/144 (100%) | |
| | protease subnunit 2) - Homo | | | |
| | sapiens (Human), 144 aa | | | |
| | (fragment). | | | |
| Q9VXR8 | CG9240 protein - Drosophila | 5 . . . 150 | 76/160 (47%) | 5e−38 |
| | melanogaster (Fruit fly), 166 aa. | 3 . . . 162 | 100/160 (62%) | |
| Q8SZ24 | RE22928p - Drosophila | 5 . . . 150 | 76/160 (47%) | 1e−37 |
| | melanogaster (Fruit fly), 166 aa. | 3 . . . 162 | 99/160 (61%) | |

[0696] PFam analysis indicates that the NOV59a protein contains the domains shown in the Table 59F.

TABLE 59F
Domain Analysis of NOV59a

| | NOV59a | Identities/ | |
|---|---|---|---|
| | Match | Similarities | |
| Pfam Domain | Region | for the Matched Region | Expect Value |
| Peptidase_S26 | 1 . . . 152 | 37/221 (17%) | 9.1e−07 |
| | | 104/221 (47%) | |

### Example 60

[0697] The NOV60 clone was analyzed, and the nucleotide and encoded polypeptide sequences are shown in Table 60A.

TABLE 60A
NOV60 Sequence Analysis

| | | |
|---|---|---|
| NOV60a, CG56645-03 | SEQ ID NO: 925 | 1862 bp |

| | | |
|---|---|---|
| DNA Sequence | ORF Start: ATG at 35 | ORF Stop: TGA at 1829 |

CGGGCTCATACCTAGTGCCTGCGGCAGGACAGCCATGGCCGCCAACTCCACCAGCGACCTCCACACTC
CCGGGACGCAGCTGAGCGTGGCTGACATCATCGTCATCACTGTGTATTTTGCTCTGAACGTGGCCGTG
GGCATATGGTCCTCTTGTCGGGCCAGTAGGAACACGGTGAATGGCTACTTCCTGGCAGGCCGGGACAT
GACGTGGTGGCCGATTGGAGCCTCCCTCTTCGCCAGCAGCGAGGGCTCTGGCCTCTTCATTGGACTGG
CGGGCTCAGGCGCGGCAGGAGGTCTGGCCGTGGCAGGCTTCGAGTGGAATGCCACGTACGTGCTGCTG
GCACTGGCATGGGTGTTCGTGCCCATCTACATCTCCTCAGAGATCGTCACCTTACCTGAGTACATTCA
GAAGCGCTACGGGGGCCAGCGGATCCGCATGTACCTGTCTGTCCTGTCCCTGCTACTGTCTGTCTTCA
CCAAGATATCGCTGGACCTGTACGCGGGGGCTCTGTTTGTGCACATCTGCCTGGGCTGGAACTTCTAC
CTCTCCACCATCCTCACGCTCGGCATCACAGCCCTGTACACCATCGCAGGGGGCCTGGCTGCTGTAAT
CTACACGGACGCCCTGCAGACGCTCATCATGGTGGTGGGGGCTGTCATCCTGACAATCAAAGCTTTTG
ACCAGATCGGTGGTTACGGGCAGCTGGAGGCAGCCTACGCCCAGGCCATTCCCTCCAGGACCATTGCC
AACACCACCTGCCACCTGCCACGTACAGACGCCATGCACATGTTTCGAGACCCCCACACAGGGGACCT
GCCGTGGACCGGGATGACCTTTGGCCTGACCATCATGGCCACCTGGTACTGGTGCACCGACCAGGTCA
TCGTGCAGCGATCACTGTCAGCCCGGGACCTGAACCATGCCAAGGCGGGCTCCATCCTGGCCAGCTAC
CTCAAGATGCTCCCCATGGGCCTGATCATCATGCCGGGCATGATCAGCCGCGCATTGTTCCCAGGTGC
TCATGTCTATGAGGAGAGACACCAAGTGTCCGTCTCTCGAACAGATGATGTGGGCTGCGTGGTGCCGT
CCGAGTGCCTGCGGGCCTGCGGGGCCGAGGTCGGCTGCTCCAACATCGCCTACCCCAAGCTGGTCATG
GAACTGATGCCCATCGGTCTGCGGGGGCTGATGATCGCAGTGATGCTGGCGGCGCTCATGTCGTCGCT
GACCTCCATCTTCAACAGCAGCAGCACCCTCTTCACTATGGACATCTGGAGGCGGCTGCGTCCCCGCT
CCGGCGAGCGGGAGCTCCTGCTGGTGGGACGGCTGGTCATAGTGGCACTCATCGGCGTGAGTGTGGCC
TGGATCCCCGTCCTGCAGGACTCCAACAGCGGGCAACTCTTCATCTACATGCAGTCAGTGACCAGCTC
CCTGGCCCCACCAGTGACTGCAGTCTTTGTCCTGGGCCTGATAGCAGGGCTGGTGGTGGGGGCCACGA
GGCTGGTCCTGGAATTCCTGAACCCAGCCCCACCGTGCGGAGAGCCAGACACGCGGCCAGCCGTCCTG
GGGAGCATCCACTACCTGCACTTCGCTGTCGCCCTCTTTGCACTCAGTGGTGCTGTTGTGGTGGCTGG
AAGCCTGCTGACCCCACCCCCACAGAGTGTCCAGATTGAGAACCTTACCTGGTGGAACCTGGCTCAGG
ATGTGCCCTTGGGAACTAAAGCAGGTGATGGCCAAACACCCCAGAAACACGCCTTCTGGGCCCGTGTC
TGTGGCTTCAATGCCATCCTCCTCATGTGTGTCAACATATTCTTTTATGCCTACTTCGCCTGACACTG
CCATCCTGGACAGAAAGGCAGGAGCT

NOV60a, CG56645-03

| | | | |
|---|---|---|---|
| Protein Sequence | SEQ ID NO: 926 | 598 aa | MW at 64485.7kD |

MAANSTSDLHTPGTQLSVADIIVITVYFALNVAVGIWSSCRASRNTVNGYFLAGRDMTWWPIGASLFA
SSEGSGLFIGLAGSGAAGGLAVAGFEWNATYVLLALAWVFVPIYISSEIVTLPEYIQKRYGGQRIRNY
LSVLSLLLSVFTKISLDLYAGALFVHICLGWNFYLSTILTLGITALYTIAGGLAAVIYTDALQTLIMV
VGAVILTIKAFDQIGGYGQLEAAYAQAIPSRTIANTTCHLPRTDAMHMFRDPHTGDLPWTGMTFGLTI
MATWYWCTDQVIVQRSLSARDLNHAKAGSILASYLKMLPMGLIIMPGMISRALFPGAHVYEERHQVSV
SRTDDVGCVVPSECLRACGAEVGCSNIAYPKLVMELMPIGLRGLMIAVMLAALMSSLTSIFNSSSTLF
TMDIWRRLRPRSGERELLLVGRLVIVALIGVSVAWIPVLQDSNSGQLFIYMQSVTSSLAPPVTAVFVL
GLIAGLVVGATRLVLEFLNPAPPCGEPDTRPAVLGSIHYLHFAVALFALSGAVVVAGSLLTPPPQSVQ
IENLTWWNLAQDVPLGTKAGDGQTPQKHAFWARVCGFNAILLMCVNIFFYAYFA

| | | |
|---|---|---|
| NOV60b, CG56645-04 | SEQ ID NO: 927 | 1801 bp |

| | | |
|---|---|---|
| DNA Sequence | ORF Start: ATG at 35 | ORF Stop: TGA at 1790 |

CGGGCTCATACCTAGTGCCTGCGGCAGGACAGCCATGGCCGCCAACTCCACCAGCGACCTCCACACTC
CCGGGACGCAGCTGAGCGTGGCTGACATCATCGTCATCACTGTGTATTTTGCTCTGAACGTGGCCGTG
GGCATATGGTCCTCTTGTCGGGCCAGTAGGAACACGGTGAATGGCTACTTCCTGGCAGGCCGGGACAT
GACGTGGTGGCCGGATTGGAGCCTCCCTCTTCGCCAGCGCGAGGGCTCTGGCCTCTTCATTGGACTGG
CGGGCTCAGGCGCGGCAGGAGGTCTGGCCGTGGCAGGCTTCGAGTGGAATGCCACGTACGTGCTGCTG
GCACTGGCATGGGTGTTCGTGCCCATCTACATCTCCTCAGAGATCGTCACCTTACCTGAGTACATTCA
GAAGCGCTACGGGGGCCAGCGGATCCGCATGTACCTGTCTGTCCTGTCCCTGCTACTGTCTGTCTTCA
CCAAGATATCGCTGGACCTGTACGCGGGGGCTCTGTTTGTGCACATCTGCCTGGGCTGGAACTTCTAC
CTCTCCACCATCCTCACGCTCGGCATCACAGCCCTGTACACCATCGCAGCTTTTGACCAGATCGGTGG
TTACGGGCAGCTGGAGGCAGCCTACGCCCAGGCCATTCCCTCCAGGACCATTGCCAACACCACCTGCC
AGCTGCCACGTACAGACGCCATGCACATGTTTCGAGACCCCCACACAGGGGACCTGCCGTGGACCGGG
ATGACCTTTGGCCTGACCATCATGGCCACCTGGTACTGGTGCACCGACCAGGTCATCGTGGAGGGATC
ACTGTCAGCCCGGGACCTGAACCATGCCAAGGGGGGCTCCATCCTGGGCAGCTACCTCAAGATGCTCC
CCATGGGCCTGATCATCATGCCGGGCATGATCAGCCGCGCATTGTTCCCAGGTGCTCATGTCTATGAG
GAGAGACACCAAGTGTCCGTCTCTCGAACAGATGATGTGGGCTGCGTGGTGCCGTCCGAGTGCCTGCG
GGCCTGCGGGGCCGAGGTCGGCTGCTCCAACATCGCCTACCCCAAGCTGGTCATGGAACTGATGCCCA
TCGGTCTGCGGGGGCTGATGATCGCAGTGATGCTGGCGGCGCTCATGTCGTCGCTGACCTCCATCTTC
AACAGCAGCAGCACCCTCTTCACTATGGACATCTGGAGGCGGCTGCGTCCCCGCTCCGGCGAGCGGGA
GCTCCTGCTGGTGGGACGGCTGGTCATAGTGGCACTCATCGGCGTGAGTGTGGCCTGGATCCCCGTCC
TGCAGGACTCCAACAGCGGGCAACTCTTCATCTACATGCAGTCAGTGACCAGCTCCCTGGCCCCACCA
GTGACTGCAGTCTTTGTCCTGGGCGTCTTCTGGCGACGTGCCAACGAGCAGGGGGCCTTCTGGGGCCT
GATAGCAGGGCTGGTGGTGGGGGCCACGAGGCTGGTCCTGGAATTCCTGAACCCGGCCCCACCGTGCG
GAGAGCCAGACACGCGGCCAGCCGTCCTGGGGAGCATCCACTACCTGCACTTCGCTGTCGCCCTCTTT
GCACTCAGTGGTGCTGTTGTGGTGGCTGGAAGCCTGCTGACCCCACCCCCACAGAGTGTCCAGATTGA
GAACCTTACCTGGTGGACCCTGGCTCAGGATGTGCCCTTGGGAACTAAAGCAGGTGATGGCCAAACAC
CCCAGAAACACGCCTTCTGGGCCCGTGTCTGTGGCTTCAATGCCATCCTCCTCATGTGTGTCAACATA
TTCTTTTATGCCTACTTCGCCTGACACTGCCAT

NOV60b, CG56645-04

| | | | |
|---|---|---|---|
| Protein Sequence | SEQ ID NO: 928 | 585 aa | MW at 63317.1kD |

MAANSTSDLHTPGTQLSVADIIVITVYFALNVAVGIWSSCRASRNTVNGYFLAGRDMTWWPIGASLFA
SSEGSGLFIGLAGSGAAGGLAVAGFEWNATYVLLALANVFVPIYISSEIVTLPEYIQKRYGGQRIRMY
LSVLSLLLSVFTKISLDLYAGALFVHICLGWNFYLSTILTLGITALYTIAAFDQIGGYGOLEAAYAQA
IPSRTIANTTCQLPRTDAMHMFRDPHTGDLPWTGMTFGLTIMATWYWCTDQVIVEGSLSARDLNHAKG
GSILGSYLKMLPMGLIIMPGMISRALFPGAHVYEERHQVSVSRTDDVGCVVPSECLRACGAEVGCSNI
AYPKLVMELMPIGLRGLMIAVMLAALMSSLTSIFNSSSTLFTMDIWRRLRPRSGERELLLVGRLVIVA
LIGVSVAWIPVLQDSNSGQLFIYMQSVTSSLAPPVTAVFVLGVFWRRANEQGAFWGLIAGLVVGATRL
VLEFLNPAPPCGEPDTRPAVLGSIHYLHFAVALFALSGAVVVAGSLLTPPPQSVQIENLTWWTLAQDV
PLGTKAGDGQTPQKHAFWARVCGFNAILLMCVNIFFYAYFA

| | | |
|---|---|---|
| NOV60c, CG56645-01 | SEQ ID NO: 929 | 1914 bp |

| | | |
|---|---|---|
| DNA Sequence | ORF Start: ATG at 51 | ORF Stop: TGA at 1839 |

TTGCCCCTCAGTCCCTCGGGCTCATACCTAGTGCCTGCGGCAGGACAGCCATGGCCGCCAACTCCACC
AGCGACCTCCACACTCCCGGGACGCAGCTGAGCGTGGCTGACATCATCGTCATCACTGTGTATTTTGC
TCTGAACGTGGCCGTGGGCATATGGTCCTCTTGTCGGGCCAGTAGGAACACGGTGAATGGCTACTTCC
TGGCAGGCCGGGACATGACGTGGTGGCCGATTGGAGCCTCCCTCTTCGCCAGCAGCGAGGGCTCTGGC
CTCTTCATTGGACTGGCGGGCTCAGGCGCGGCAGGAGGTCTGGCCGTGGCAGGCTTCGAGTGGAATGC
CACGTACGTGCTGCTGGCACTGGCATGGGTGTTCGTGCCCATCTACATCTCCTCAGAGATCGTCACCT
TACCTGAGTACATTCAGAAGCGCTACGGGGGCCAGCGGATCCGCATGTACCTGTCTGTCCTGTCCCTG
CTACTGTCTGTCTTCACCAAGATATCGCTGGACCTGTACGCGGGGGCTCTGTTTGTGCACATCTGCCT
GGGCTGGAACTTCTACCTCTCCACCATCCTCACGCTCGGCATCACAGCCCTGTACACCATCGCAGGGG
GCCTGGCTGCTGTAATCTACACGGACGCCCTGCAGACGCTCATCATGGTGGTGGGGGCTGTCATCCTG
ACAATCAAAGCTTTTGACCAGATCGGTGGTTACGGGCAGCTGGAGGCAGCCTACGCCCAGGCCATTCC
CTCCAGGACCATTGCCAACACCACCTGCCACCTGCCACGTACAGACGCCATGCACATGTTTCGAGACC
CCCACACAGGGGACCTGCCGTGGACCGGGATGACCTTTGGCCTGACCATCATGGCCACCTGGTACTGG
TGCACCGACCAGGTGATCGTGCAGCGATCACTGTCAGCCCGGGACCTGAACCATGCCAAGGCGGGCTC
CATCCTGGCCAGCTACCTCAAGATGCTCCCCATGGGCCTGATCATAATGCCGGGCATGATCAGCCGCG
CATTGTTCCCAGATGATGTGGGCTGCGTGGTGCCGTCCGAGTGCCTGCGGGCCTGCGGGGCCGAGGTC
GGCTGCTCCAACATCGCCTACCCCAAGCTGGTCATGGAACTGATGCCCATCGGTCTGCGGGGGCTGAT
GATCGCAGTGATGCTGGCGGCGCTCATGTCGTCGCTGACCTCCATCTTCAACAGCAGCAGCACCCTCT
TCACTATGGACATCTGGAGGCGGCTGCGTCCCCGCTCCGGCGAGCGGGAGCTCCTGCTGGTGGGACGG
CTGGTCATAGTGGCACTCATCGGCGTGAGTGTGGCCTGGATCCCCGTCCTGCAGGACTCCAACAGCGG
GCAACTCTTCATCTACATGCAGTCAGTGACCAGCTCCCTGGCCCCACCAGTGACTGCAGTCTTTGTCC
TGGGCGTCTTCTGGCGACGTGCCAACGAGCAGGGGGCCTTCTGGGGCCTGATAGCAGGGCTGGTGGTG
GGGGCCACGAGGCTGGTCCTGGAATTCCTGAACCCAGCCCCACCGTGCGGAGAGCCAGACACGCGGCC
AGCCGTCCTGGGGAGCATCCACTACCTGCACTTCGCTGTCGCCCTCTTTGCACTCAGTGGTGCTGTTG
TGGTGGCTGGAAGCCTGCTGACCCCACCCCCACAGAGTGTCCAGATTGAGAACCTTACCTGGTGGACC
CTGGCTCAGGATGTGCCCTTGGGAACTAAAGCAGGTGATGGCCAAACACCCCAGAAACACGCCTTCTG
GGCCCGTGTCTGTGGCTTCAATGCCATCCTCCTCATGTGTGTCAACATATTCTTTTATGCCTACTTCG
CCTGACACTGCCATCCTGGACAGAAAGGCAGGAGCTCTGAGTCCTCAGGTCCACCCATTTCCCTCATG
GGGATCCCGA

NOV60c, CG56645-01

| | | | |
|---|---|---|---|
| Protein Sequence | SEQ ID NO: 930 | 596 aa | MW at 64341.6kD |

MAANSTSDLHTPGTQLSVADIIVITVYFALNVAVGIWSSCRASRNTVNGYFLAGRDMTWWPIGASLFA
SSEGSGLFIGLAGSGAAGGLAVAGFEWNATYVLLALAWVFVPIYISSEIVTLPEYIQKRYGGQRIRNY
LSVLSLLLSVFTKISLDLYAGALFVHICLGWNFYLSTILTLGITAIYTIAGGLAAVIYTDALQTLIMV
VGAVILTIKAFDQIGGYGQLEAAYAQAIPSRTIANTTCHLPRTDAMHMFRDPHTGDLPWTGMTFGLTI
MATWYWCTDQVIVQRSLSARDLNHAKAGSILASYLKMLPMGLIIMPGMISRALFPDDVGCVVPSECLR
ACGAEVGCSNIAYPKLVMELMPIGLRGLMIAVMLAALMSSLTSIFNSSSTLFTMDIWRRLRPRSGERE
LLLVGRLVIVALIGVSVAWIPVLQDSNSGQLFIYMQSVTSSLAPPVTAVFVLGVFWRRANEQGAFWGL
IAGLVVGATRLVLEFLNPAPPCGEPDTRPAVLGSIHYLHFAVALFALSGAVVVAGSLLTPPPQSVQIE
NLTWWTLAQDVPLGTKAGDGQTPQKIIAFWARVCGFNAILLMCVNIFFYAYFA

| | | |
|---|---|---|
| NOV60d, CG56645-02 | SEQ ID NO: 931 | 1912 bp |

| | | |
|---|---|---|
| DNA Sequence | ORF Start: ATG at 35 | ORF Stop: TGA at 1871 |

CGGGCTCATACCTAGTGCCTGCGGCAGGACAGCCATGGCCGCCAACTCCACCAGCGACCTCCACACTC
CCGGGACGCAGCTGAGCGTGGCTGACATCATCGTCATCACTGTGTATTTTGCTCTGAACGTGGCCGTG
GGCATATGGTCCTCTTGTCGGGCCAGTAGGAACACGGTGAATGGCTACTTCCTGGCAGGCCGGGACAT
GACGTGGTGGCCGATTGGAGCCTCCCTCTTCGCCAGCAGCGAGGGCTCTGGCCTCTTCATTGGACTGC
CGGGCTCAGGCGCGGCAGGAGGTCTGGCCGTGGCAGGCTTCGAGTGGAATGCCACGTACGTGCTGCTG
GCACTGGCATGGGTGTTCGTGCCCATCTACATCTCCTCAGAGATCGTCACCTTACCTGAGTACATTCA
GAAGCGCTACGGGGGCCAGCGGATCCGCATGTACCTGTCTGTCCTGTCCCTGCTACTGTCTGTCTTCA
CCAAGATATCGCTGGACCTGTACGCGGGGGCTCTGTTTGTGCACATCTGCCTGGGCTGGAACTTCTAC
CTCTCCACCATCCTCACGCTCGGCATCACAGCCCTGTACACCATCGCAGGGGGCCTGGCTGCTGTAAT
CTACACGGACGCCCTGCAGACGCTCATCATGGTGGTGGGGGCTGTCATCCTGACAATCAAAGCTTTTG
ACCAGATCGGTGGTTACGGGCAGCTGGAGGCAGCCTACGCCCAGGCCATTCCCTCCAGGACCATTGCC
AACACCACCTGCCACCTGCCACGTACAGACGCCATGCACATGTTTCGAGACCCCCACACAGGGGACCT
GCCGTGGACCGGGATGACCTTTGGCCTGACCATCATGGCCACCTGGTACTGGTGCACCGACCAGGTCA
TCGTGCAGCGATCACTGTCAGCCCGGGACCTGAACCATGCCAAGGCGGGCTCCATCCTGGCCAGCTAC
CTCAAGATGCTCCCCATGGGCCTGATCATCATGCCGGGCATGATCAGCCGCGCATTGTTCCCAGGTGC
TCATGTCTATGAGGAGAGACACCAAGTGTCCGTCTCTCGAACAGATGATGTGGGCTGCGTGGTGCCGT
CCGAGTGCCTGCGGGCCTGCGGGGCCGAGGTCGGCTGCTCCAACATCGCCTACCCCAAGCTGGTCATG
GAACTGATGCCCATCGGTCTGCGGGGGCTGATGATCGCAGTGATGCTGGCGGCGCTCATGTCGTCGCT
GACCTCCATCTTCAACAGCAGCAGCACCCTCTTCACTATGGACATCTGGAGGCGGCTGCGTCCCCGCT
CCGGCGAGCGGGAGCTCCTGCTGGTGGGACGGCTGGTCATAGTGGCACTCATCGGCGTGAGTGTGGCC
TGGATCCCCGTCCTGCAGGACTCCAACAGCGGGCAACTCTTCATCTACATGCAGTCAGTGACCAGCTC
CCTGGCCCCACCAGTGACTGCAGTCTTTGTCCTGGGCGTCTTCTGGCGACGTGCCAACGAGCAGGGGG
CCTTCTGGGGCCTGATAGCAGGGCTGGTGGTGGGGGCCACGAGGCTGGTCCTGGAATTCCTGAACCCA
GCCCCACCGTGCGGAGAGCCAGACACGCGGCCAGCCGTCCTGGGGAGCATCCACTACCTGCACTTCGC
TGTCGCCCTCTTTGCACTCAGTGGTGCTGTTGTGGTGGCTGGAAGCCTGCTGACCCCACCCCCACAGA
GTGTCCAGATTGAGAACCTTACCTGGTGGACCCTGGCTCAGGATGTGCCCTTGGGAACTAAAGCAGGT
GATGGCCAAACACTCCAGAAACACGCCTTCTGGGCCCGTGTCTGTGGCTTCAATGCCATCCTCCTCAT
GTGTGTCAACATATTCTTTTATGCCTACTTCGCCTGACACTGCCATCCTGGACAGAAAGGCAGGAGCT
CTGAGTCC

NOV60d, CG56645-02

| | | | |
|---|---|---|---|
| Protein Sequence | SEQ ID NO: 932 | 612 aa | MW at 66194.7kD |

MAANSTSDLHTPGTQLSVADIIVITVYFALNVAVGIWSSCRASRNTVNGYFLAGRDMTWWPIGASLFA
SSEGSGLFIGLAGSGAAGGLAVAGFEWNATYVLLAIAWVFVPIYISSEIVTLPEYIQKRYGGQRIRMY
LSVLSLLLSVFTKISLDLYAGALFVHICLGWNFYLSTILTLGITALYTIAGGLAAVIYTDALQTLIMV
VGAVILTIKAFDQIGGYGQLEAAYAQAIPSRTIANTTCHLPRTDAMHMFRDPHTGDLPWTGMTFGLTI
MATWYWCTDQVIVQRSLSARDLNHAKAGSSILASYLKMLPNGLIIMPGMISRALFPGANVYEERHQVSV
SRTDDVGCVVPSECLRACGAEVGCSNIAYPKLVMELMPIGLRGLMIAVMLAALMSSLTSIFNSSSTLF
TMDIWRRLRPRSGERELLLVGRLVIVALIGVSVAWIPVLQDSNSGQLFIYMQSVTSSLAPPVTAVFVL
GVFWRRANEQGAFWGLIAGLVVGATRLVLEFLNPAPPCGEPDTRPAVLGSIHYLHFAVALFALSGAVV
VAGSLLTPPPQSVQIENLTWWTLAQDVPLGTKAGDGQTLQKHAFWARVCGFNAILLMCVMIFFYAYFA

[0698] A ClustalW comparison of the above protein sequences yields the following sequence alignment shown in Table 60B.

TABLE 60B
Comparison of the NOV60 protein sequences.

| | |
|---|---|
| NOV60a | MAANSTSDLHTPGTQLSVADIIVITVYFALNVAVGIWSSCRASRNTVNGYFLAGRDMTWW |
| NOV60b | MAANSTSDLHTPGTQLSVADIIVITVYFALNVAVGIWSSCRASRNTVNGYFLAGRDMTWW |
| NOV60c | MAANSTSDLHTPGTQLSVADIIVITVYFALNVAVGIWSSCRASRNTVNGYFLAGRDMTWW |
| NOV60d | MAANSTSDLHTPGTQLSVADIIVITVYFALNVAVGIWSSCRASRNTVNGYFLAGRDMTWW |
| NOV60a | PIGASLFASSEGSGLFIGLAGSGAAGGLAVAGFEWNATYVLLALAWVFVPIYISSEIVTL |
| NOV60b | PIGASLFASSEGSGLFIGLAGSGAAGGLAVAGFEWNATYVLLALAWVFVPIYISSEIVTL |
| NOV60c | PIGASLFASSEGSGLFIGLAGSGAAGGLAVAGFEWNATYVLLALAWVFVPIYISSEIVTL |
| NOV60d | PIGASLFASSEGSGLFIGLAGSGAAGGLAVAGFEWNATYVLLALAWVFVPIYISSEIVTL |
| NOV60a | PEYIQKRYGGQRIRMYLSVLSLLLSVFTKISLDLYAGALFVHICLGWNFYLSTILTLGIT |
| NOV60b | PEYIQKRYGGQRIRMYLSVLSLLLSVFTKISLDLYAGALFVHICLGWNFYLSTILTLGIT |
| NOV60c | PEYIQKRYGGQRIRMYLSVLSLLLSVFTKISLDLYAGALFVHICLGWNFYLSTILTLGIT |
| NOV60d | PEYIQKRYGGQRIRMYLSVLSLLLSVFTKISLDLYAGALFVHICLGWNFYLSTILTLGIT |
| NOV60a | ALYTIAGGLAAVIYTDALQTLIMVVGAVILTIKAFDQIGGYGQLEAAYAQAIPSRTIANT |
| NOV60b | ALYTIA---------------------------AFDQIGGYGQLEAAYAQAIPSRTIANT |
| NOV60c | ALYTIAGGLAAVIYTDALQTLIMVVGAVILTIKAFDQIGGYGQLEAAYAQAIPSRTIANT |
| NOV60d | ALYTIAGGLAAVIYTDALQTLIMVVGAVILTIKAFDQIGGYGQLEAAYAQAIPSRTIANT |
| NOV60a | TCHLPRTDAMHMFRDPHTGDLPWTGMTFGLTIMATWYWCTDQVIVQRSLSARDLNHAKAG |
| NOV60b | TCQLPRTDAMHMFRDPHTGDLPWTGMTFGLTIMATWYWCTDQVIVEGSLSARDLNHAKAG |
| NOV60c | TCHLPRTDAMHMFRDPHTGDLPWTGMTFGLTIMATWYWCTDQVIVQRSLSARDLNHAKAG |
| NOV60d | TCHLPRTDAMHMFRDPHTGDLPWTGMTFGLTIMATWYWCTDQVIVQRSLSARDLNHAKAG |
| NOV60a | SILASYLKMLPMGLIIMPGMISRALFPGAHVYEERHQVSVSRTDDVGCVVPSECLRACGA |
| NOV60b | SILASYLKMLPMGLIIMPGMISRALFPGAHVYEERHQVSVSRTDDVGCVVPSECLRACGA |
| NOV60c | SILASYLKMLPMGLIIMPGMISRALFP----------------DDVGCVVPSECLRACGA |
| NOV60d | SILASYLKMLPMGLIIMPGMISRALFPGAHVYEERHQVSVSRTDDVGCVVPSECLRACGA |
| NOV60a | EVGCSNIAYPKLVMELMPIGLRGLMIAVMLAALMSSLTSIFNSSSTLFTMDIWRRLRPRS |
| NOV60b | EVGCSNIAYPKLVMELMPIGLRGLMIAVMLAALMSSLTSIFNSSSTLFTMDIWRRLRPRS |
| NOV60c | EVGCSNIAYPKLVMELMPIGLRGLMIAVMLAALMSSLTSIFNSSSTLFTMDIWRRLRPRS |
| NOV60d | EVGCSNIAYPKLVMELMPIGLRGLMIAVMLAALMSSLTSIFNSSSTLFTMDIWRRLRPRS |
| NOV60a | GERELLLVGRLVIVALIGVSVAWIPVLQDSNSGQLFIYMQSVTSSLAPPVTAVFVL---- |
| NOV60b | GERELLLVGRLVIVALIGVSVAWIPVLQDSNSGQLFIYMQSVTSSLAPPVTAVFVLGVFW |
| NOV60c | GERELLLVGRLVIVALIGVSVAWIPVLQDSNSGQLFIYMQSVTSSLAPPVTAVFVLGVFW |
| NOV60d | GERELLLVGRLVIVALIGVSVAWIPVLQDSNSGQLFIYMQSVTSSLAPPVTAVFVLGVFW |
| NOV60a | ----------GLIAGLVVGATRLVLEFLNPAPPCGEPDTRPAVLGSIHYLHFAVALFALS |
| NOV60b | RRANEQGAFWGLIAGLVVGATRLVLEFLNPAPPCGEPDTRPAVLGSIHYLHFAVALFALS |
| NOV60c | RRANEQGAFWGLIAGLVVGATRLVLEFLNPAPPCGEPDTRPAVLGSIHYLHFAVALFALS |
| NOV60d | RRANEQGAFWGLIAGLVVGATRLVLEFLNPAPPCGEPDTRPAVLGSIHYLHFAVALFALS |
| NOV60a | GAVVVAGSLLTPPPQSVQIENLTWWTLAQDVPLGTKAGDGQTPQKHAFWARVCGFNAILL |
| NOV60b | GAVVVAGSLLTPPPQSVQIENLTWWTLAQDVPLGTKAGDGQTPQKHAFWARVCGFNAILL |
| NOV60c | GAVVVAGSLLTPPPQSVQIENLTWWTLAQDVPLGTKAGDGQTPQKHAFWARVCGFNAILL |
| NOV60d | GAVVVAGSLLTPPPQSVQIENLTWWTLAQDVPLGTKAGDGQTPQKHAFWARVCGFNAILL |
| NOV60a | MCVNIFFYAYFA |
| NOV60b | MCVNIFFYAYFA |
| NOV60c | MCVNIFFYAYFA |
| NOV60d | MCVNIFFYAYFA |
| NOV60a | (SEQ ID NO: 926) |
| NOV60b | (SEQ ID NO: 928) |
| NOV60c | (SEQ ID NO: 930) |
| NOV60d | (SEQ ID NO: 932) |

[0699] Further analysis of the NOV60a protein yielded the following properties shown in Table 60C.

TABLE 60C
Protein Sequence Properties NOV60a

| | |
|---|---|
| SignalP analysis: | Cleavage site between residues 43 and 44 |

```
PSORT II analysis:
PSG: a new signal peptide prediction method
    N-region: length 8; pos.chg 0; neg.chg 1
    H-region: length 11; peak value 0.00
    PSG score: −4.40
GvH: von Heijne's method for signal seq. recognition
    GvH score (threshold: −2.1): −2.19
    possible cleavage site: between 42 and 43
>>> Seems to have no N-terminal signal peptide
    ALOM: Klein et al's method for TM region allocation
    Init position for calculation: 1
    Tentative number of TMS(s) for the threshold 0.5: 12
```

| | | |
|---|---|---|
| INTEGRAL | Likelihood = −6.00 | Transmembrane 21-37 |
| INTEGRAL | Likelihood = −1.17 | Transmembrane 75-91 |
| INTEGRAL | Likelihood = −4.51 | Transmembrane 97-113 |
| INTEGRAL | Likelihood = −1.33 | Transmembrane 136-152 |
| INTEGRAL | Likelihood = −2.92 | Transmembrane 177-193 |
| INTEGRAL | Likelihood = −3.88 | Transmembrane 196-212 |
| INTEGRAL | Likelihood = −0.27 | Transmembrane 301-317 |
| INTEGRAL | Likelihood = −5.04 | Transmembrane 384-400 |
| INTEGRAL | Likelihood = −10.03 | Transmembrane 431-447 |
| INTEGRAL | Likelihood = −8.65 | Transmembrane 470-486 |
| INTEGRAL | Likelihood = −6.74 | Transmembrane 520-536 |
| INTEGRAL | Likelihood = −3.45 | Transmembrane 578-594 |

| | |
|---|---|
| PERIPHERAL | Likelihood = 0.63 (at 159) |

```
    ALOM score: −10.03 (number of TMSs: 12)
MTOP: Prediction of membrane topology (Hartmann et al.)
    Center position for calculation: 28
    Charge difference: 4.5 C(3.0) − N(−1.5)
    C > N: C-terminal side will be inside
>>> membrane topology: type 3b
MITDISC: discrimination of mitochondrial targeting seq
```

| | | | |
|---|---|---|---|
| R content: | 0 | Hyd Moment(75): | 8.68 |
| Hyd Moment(95): | 8.07 | G content: | 1 |
| D/E content: | 2 | S/T content: | 6 |
| Score: −5.13 | | | |

```
Gavel: prediction of cleavage sites for mitochondrial preseq
    cleavage site motif not found
NUCDISC: discrimination of nuclear localization signals
    pat4: none
    pat7: none
    bipartite: none
    content of basic residues: 5.5%
    NLS Score: −0.47
KDEL: ER retention motif in the C-terminus: none
ER Membrane Retention Signals: none
SKL: peroxisomal targeting signal in the C-terminus: none
PTS2: 2nd peroxisomal targeting signal: none
VAC: possible vacuolar targeting motif: none
RNA-binding motif: none
Actinin-type actin-binding motif:
    type 1: none
    type 2: none
NMYR: N-myristoylation pattern: none
Prenylation motif: none
memYQRL: transport motif from cell surface to Golgi: none
Tyrosines in the tail: none
Dileucine motif in the tail: none
checking 63 PROSITE DNA binding motifs: none
checking 71 PROSITE ribosomal protein motifs: none
checking 33 PROSITE prokaryotic DNA binding motifs: none
NNCN: Reinhardt's method for Cytoplasmic/Nuclear discrimination
    Prediction: cytoplasmic
    Reliability: 94.1
COIL: Lupas's algorithm to detect coiled-coil regions
    total: 0 residues
Final Results (k = 9/23):
    77.8%: endoplasmic reticulum
    11.1%: mitochondrial
    11.1%: vacuolar
>> prediction for CG56645-03 is end (k = 9)
```

[0700] A search of the NOV60a protein against the Geneseq database, a proprietary database that contains sequences published in patents and patent publication, yielded several homologous proteins shown in Table 60D.

TABLE 60D
Geneseq Results for NOV60a

| | | NOV60a | Identities/ | |
|---|---|---|---|---|
| | | Residues/ | Similarities for | |
| Geneseq | Protein/Organism/Length | Match | the Matched | Expect |
| Identifier | [Patent #, Date] | Residues | Region | Value |
| ABB99496 | Amino acid sequence of | 1 . . . 598 | 597/612 (97%) | 0.0 |
| | sodium/glucose cotransporter | 48 . . . 659 | 597/612 (97%) | |
| | Fbh68723pat - Homo sapiens, 664 | | | |
| | aa. [WO200283857-A2, 24-OCT- | | | |
| | 2002] | | | |
| ABB99497 | Amino acid sequence of | 1 . . . 598 | 581/612 (94%) | 0.0 |
| | sodium/glucose cotransporter | 48 . . . 643 | 581/612 (94%) | |
| | h68723 - Homo sapiens, 643 aa. | | | |
| | [WO200283857-A2, 24-OCT- | | | |
| | 2002] | | | |
| AAO14199 | Human transporter and ion | 1 . . . 598 | 581/612 (94%) | 0.0 |
| | channel TRICH-16 - Homo | 1 . . . 596 | 581/612 (94%) | |
| | sapiens, 596 aa. [WO200204520- | | | |
| | A2, 17-JAN-2002] | | | |
| ABB80588 | Human sbg1020829SGLT protein - | 1 . . . 598 | 581/612 (94%) | 0.0 |
| | Homo sapiens, 596 aa. | 1 . . . 596 | 581/612 (94%) | |
| | [WO200222802-A1, 21-MAR- | | | |
| | 2002] | | | |
| ABG31594 | Human transporter protein - Homo | 1 . . . 598 | 581/612 (94%) | 0.0 |
| | sapiens, 596 aa. [US2002081678- | 1 . . . 596 | 581/612 (94%) | |
| | A1, 27-JUN-2002] | | | |

[0701] In a BLAST search of public sequence databases, the NOV60a protein was found to have homology to the proteins shown in the BLASTP data in Table 60E.

TABLE 60E
Public BLASTP Results for NOV60a

| | | NOV60a | Identities/ | |
|---|---|---|---|---|
| Protein | | Residues/ | Similarities for | |
| Accession | | Match | the Matched | Expect |
| Number | Protein/Organism/Length | Residues | Portion | Value |
| CAC51188 | Sequence 144 from Patent | 1 . . . 598 | 581/612 (94%) | 0.0 |
| | WO0149728 - Homo sapiens | 1 . . . 596 | 581/612 (94%) | |
| | (Human), 596 aa. | | | |
| Q28610 | Na+/glucose cotransporter- | 1 . . . 598 | 518/612 (84%) | 0.0 |
| | related protein - Oryctolagus | 2 . . . 597 | 544/612 (88%) | |
| | cuniculus (Rabbit), 597 aa. | | | |
| Q96LQ1 | Hypothetical protein FLJ25217 - | 157 . . . 598 | 441/456 (96%) | 0.0 |
| | Homo sapiens (Human), 517 aa. | 62 . . . 517 | 441/456 (96%) | |
| Q8BZW1 | Weakly similar to NA+-glucose | 6 . . . 551 | 339/560 (60%) | 0.0 |
| | cotransporter type 1 - Mus | 19 . . . 562 | 425/560 (75%) | |
| | musculus (Mouse), 685 aa. | | | |
| Q8BGU9 | Weakly similar to NA+-glucose | 6 . . . 551 | 338/560 (60%) | 0.0 |
| | cotransporter type 1 - Mus | 19 . . . 562 | 424/560 (75%) | |
| | musculus (Mouse), 685 aa. | | | |

[0702] PFam analysis indicates that the NOV60a protein contains the domains shown in the Table 60F.

TABLE 60F
Domain Analysis of NOV60a

| | NOV60a | Identities/ | |
|---|---|---|---|
| | Match | Similarities | |
| Pfam Domain | Region | for the Matched Region | Expect Value |
| SSF | 50 . . . 485 | 187/463 (40%) | 1.3e−167 |
| | | 362/463 (78%) | |

### Example 61

[0703] The NOV61 clone was analyzed, and the nucleotide and encoded polypeptide sequences are shown in Table 61A.

TABLE 61A
NOV61 Sequence Analysis

| | | |
|---|---|---|
| NOV61a, CG56667-01 | SEQ ID NO: 933 | 1027 bp |

| | | |
|---|---|---|
| DNA Sequence | ORF Start: ATG at 1 | ORF Stop: TAG at 940 |

ATGATCTGCTCAGCTATCAACCTACACTTACTACTGGCAGTTAAGATGATTCACCCTGTCTGGATTCT
TTGCAGTCATCACTCTCGATCAGCATCTTCACACACCCATGTACTTCTTCCTGAAGAACCTCTCCGTT
TTGGATCTGTGCTACATCTCAGTCACTGTGCCTAAATCCATCCGTAACTCCCTGACTCGCAGAAGCTC
CATCTCTTATCTTGGCTGTGTGGCTCAAGTCTATTTTTTCTCTGCCTTTGCATCTGCTGAGCTGGCCT
TCCTTACTGTCATGTCTTATGACCGCTATGTTGCCATTTGCCACCCCCTCCAATACAGAGCCGTGATG
ACATCAGGAGGGTGCTATCAGATGGCAGTCACCACCTGGCTAAGCTGCTTTTCCTACGCAGCCGTCCA
CACTGGCAACATGTTTCGGGAGCACGTTTGCAGATCCAGTGTGATCCACCAGTTCTTCCGTGACATCC
CTCATGTGTTGGCCCTGGTTTCCTGTGAGGTTTTCTTTGTAGAGTTTTTGACCCTGGCCCTGAGCTCA
TGCTTGGTTCTGGGATGCTTTATTCTCATGATGATCTCCTATTTCCAAATCTTCTCAACGGTGCTCAG
AATCCCTTCAGGACAGAGTCGAGCAAAAGCCTTCTCCACCTGCTCCCCCCAGCTCATTGTCATCATGC
TCTTTCTTACCACAGGGCTCTTTGCTGCCTTAGGACCAATTGCAAAAGCTCTGTCCATTCAGGATTTA
GTGATTGCTCTGACATACACAGTTTTGCCTCCCTTCCTCAATCCCATCATATATAGTCTTAGGAATAA
GGAGATTAAAACAGCCATGTGGAGACTCTTTGTGAAGATATATTTTCTGCAAAAGTAGAACATCCTGG
TCTTTACTATAGAAGATCTGCAACAAAACCCCAAAAAAGCATAAATACTTTATGACAAAAAAAGATGA
AAAAATT

NOV61a, CG56667-01

| | | | |
|---|---|---|---|
| Protein Sequence | SEQ ID NO: 934 | 313 aa | MW at 35319.9kD |

MICSAINLHLLLAVKMIHPVWILAPREQGLFLLIYLAVLVGNLLIIAVITLDQHLHTPMYFFLKNLSV
LDLCYISVTVPKSIRNSLTRRSSISYLGCVAQVYFFSAFASAELAFLTVMSYDRYVAICHPLQYRAVM
TSGGCYQMAVTTWLSCFSYAAVHTGNMFREHVCRSSVIHQFFRDIPHVLALVSCEVFFVEFLTLALSS
CLVLGCFILMMISYFQIFSTVLRIPSGQSRAKAFSTCSPQLIVIMLFLTTGLFAALGPIAKALSIQDL
VIALTYTVLPPFLNPIIYSLRNKEIKTANWRLFVKIYFLQK

| | | |
|---|---|---|
| NOV61b, 268952113 | SEQ ID NO: 935 | 817 bp |

| | | |
|---|---|---|
| DNA Sequence | ORF Start: at 2 | ORF Stop: end of sequence |

CACCGGATCCGTCATCACTCTCGATCAGCATCTTCACACACCCATGTACTTCTTCCTGAAGAACCTCT
CTGTTTTGGATCTGTGCTACATCTCAGTCACTGTGCCTAAATCCATCCGTAACTCCCTGACTCGCAGA
AGCTCCATCTCTTATCTTGGCTGTGTGGCTCAAGTCTATTTTTTCTCTGCCTTTGCATCTGCTGAGCT
GGCCTTCCTTACTGTCATGTCTTATGACCGCTATGTTGCCATTTGCCACCCCCTCCAATACAGAGCCG
TGATGACATCAGGAGGGTGCTATCAGATGGCAGTCACCACCTGGCTAAGCTGCTTTTCCTACGCAGCC
GTCCACACTGGCAACATGTTTCGGGAGCACGTTTGCAGATCCAATGTGATCCACCAGTTCTTCCGTGA
CATCCCTCATGTGTTGGCCCTGGTTTCCTGTGAGGTTTTCTTTGTAGAGTTTTTGACCCTGGCCCTGA
GCTCATGCTTGGTTCTGGGATGCTTTATTCTCATGATGATCTCCTATTTCCAAATCTTCTCAACGGTG
CTCAGAATCCCTTCAGGACAGAGTCGAGCAAAAGCCTTCTCCACCTGCTCCCCCCAGCTCATTGTCAT
CATGCTCTTTCTTACCACAGGGCTCTTTGCTGCCTTAGGACCAATTGCAAAAGCTCTGTCCATTCAGG
ATTTAGTGATTGCTCTGACATACACAGTTTTGCCTCCCTTCCTCAATCCCATCATATATAGTCTTAGG
AAATAAGGAGATTAAACAGCCATGTGGAGACTCTTTGTGAAGATATATTTTCTGCAAAAGCTCGAGGG
C

NOV61b, 268952113

| | | | |
|---|---|---|---|
| Protein Sequence | SEQ ID NO: 936 | 272 aa | MW at 30688.0kD |

TGSVITLDQHLHTPNYFFLKNLSVLDLCYISVTVPKSIRNSLTRRSSISYLGCVAQVYFFSAFASAEL
AFLTVMSYDRYVAICHPLQYRAVMTSGGCYQMAVTTWLSCFSYAAVHTGNMFREHVCRSNVIHQFFRD
IPHVLALVSCEVFFVEFLTLALSSCLVLGCFILMMISYFQIFSTVLRIPSGQSRAKAFSTCSPQLIVI
MLFLTTGLFAALGPIAKALSIQDLVIALTYTVLPPFLNPIIYSLRNKEIKTAMWRLFVKIYFLQKLEG

[0704] A ClustalW comparison of the above protein sequences yields the following sequence alignment shown in Table 61B.

TABLE 61B
Comparison of the NOV61 protein sequences.

| | |
|---|---|
| NOV61a | MICSAINLHLLLAVKMIHPVWILAPREQGLFLLIYLAVLVGNLLIIAVITLDQHLHTPMY |
| NOV61b | --------------------------------------------TGSVITLDQHLHTPMY |
| NOV61a | FFLKNLSVLDLCYISVTVPKSIRNSLTRRSSISYLGCVAQVYFFSAFASAELAFLTVMSY |
| NOV61b | FFLKNLSVLDLCYISVTVPKSIRNSLTRRSSISYLGCVAQVYFFSAFASAELAFLTVMSY |
| NOV61a | DRYVAICHPLQYRAVMTSGGCYQMAVTTWLSCFSYAAVHTGNMFREHVCRSSVIHQFFRD |
| NOV61b | DRYVAICHPLQYRAVMTSGGCYQMAVTTWLSCFSYAAVHTGNMFREHVCRSNVIHQFFRD |
| NOV61a | IPHVLALVSCEVFFVEFLTLALSSCLVLGCFILMMISYFQIFSTVLRIPSGQSRAKAFST |
| NOV61b | IPHVLALVSCEVFFVEFLTLALSSCLVLGCFILMMISYFQIFSTVLRIPSGQSRAKAFST |
| NOV61a | CSPQLIVIMLFLTTGLFAALGPIAKALSIQDLVIALTYTVLPPFLNPIIYSLRNKEIKTA |
| NOV61b | CSPQLIVIMLFLTTGLFAALGPIAKALSIQDLVIALTYTVLPPFLNPIIYSLRNKEIKTA |
| NOV61a | MWRLFVKIYFLQK--- |
| NOV61b | MWRLFVKIYFLQKLEG |
| NOV61a | (SEQ ID NO: 934) |
| NOV61b | (SEQ ID NO: 936) |

[0705] Further analysis of the NOV61a protein yielded the following properties shown in Table 61C.

TABLE 61C
Protein Sequence Properties NOV61a

| | |
|---|---|
| SignalP analysis: | Cleavage site between residues 48 and 49 |
| PSORT II analysis: | |

```
PSG: a new signal peptide prediction method
    N-region: length 0; pos.chg 0; neg.chg 0
    H-region: length 14; peak value 6.18
    PSG score: 1.78
GvH: von Heijne's method for signal seq. recognition
    GvH score (threshold: −2.1): −3.68
    possible cleavage site: between 41 and 42
>>> Seems to have no N-terminal signal peptide
ALOM: Klein et al's method for TM region allocation
    Init position for calculation: 1
    Tentative number of TMS(s) for the threshold 0.5: 7
```

| | | |
|---|---|---|
| INTEGRAL | Likelihood = −2.39 | Transmembrane 1-17 |
| INTEGRAL | Likelihood = −11.20 | Transmembrane 33-49 |
| INTEGRAL | Likelihood = −0.22 | Transmembrane 101-117 |
| INTEGRAL | Likelihood = −1.22 | Transmembrane 183-199 |
| INTEGRAL | Likelihood = −8.86 | Transmembrane 200-216 |
| INTEGRAL | Likelihood = −7.54 | Transmembrane 245-261 |
| INTEGRAL | Likelihood = −0.00 | Transmembrane 273-289 |

| | |
|---|---|
| PERIPHERAL | Likelihood = 2.01 (at 62) |

```
    ALOM score: −11.20 (number of TMSs: 7)
MTOP: Prediction of membrane topology (Hartmann et al.)
    Center position for calculation: 8
    Charge difference: 0.5 C(2.0) − N(1.5)
    C > N: C-terminal side will be inside
>>>Caution: Inconsistent mtop result with signal peptide
>>> membrane topology: type 3b
MITDISC: discrimination of mitochondrial targeting seq
```

| | | | |
|---|---|---|---|
| R content: | 1 | Hyd Moment(75): | 1.74 |
| Hyd Moment(95): | 4.81 | G content: | 0 |
| D/E content: | 1 | S/T content: | 1 |
| Score: −4.54 | | | |

```
Gavel: prediction of cleavage sites for mitochondrial preseq
    R-2 motif at 99 RRS|SI
NUCDISC: discrimination of nuclear localization signals
    pat4: none
    pat7: none
    bipartite: none
    content of basic residues: 7.0%
    NLS Score: −0.47
KDEL: ER retention motif in the C-terminus: none
ER Membrane Retention Signals: none
SKL: peroxisomal targeting signal in the C-terminus: none
PTS2: 2nd peroxisomal targeting signal: none
VAC: possible vacuolar targeting motif: none
RNA-binding motif: none
Actinin-type actin-binding motif:
    type 1: none
    type 2: none
NMYR: N-myristoylation pattern: none
Prenylation motif: none
memYQRL: transport motif from cell surface to Golgi: none
Tyrosines in the tail: none
Dileucine motif in the tail: none
checking 63 PROSITE DNA binding motifs: none
checking 71 PROSITE ribosomal protein motifs: none
checking 33 PROSITE prokaryotic DNA binding motifs: none
NNCN: Reinhardt's method for Cytoplasmic/Nuclear discrimination
    Prediction: cytoplasmic
    Reliability: 94.1
COIL: Lupas's algorithm to detect coiled-coil regions
    total: 0 residues
Final Results (k = 9/23):
    55.6%: endoplasmic reticulum
    11.1%: mitochondrial
    11.1%: vacuolar
    11.1%: vesicles of secretory system
    11.1%: Golgi
>> prediction for CG56667-01 is end (k = 9)
```

[0706] A search of the NOV61a protein against the Geneseq database, a proprietary database that contains sequences published in patents and patent publication, yielded several homologous proteins shown in Table 61D.

TABLE 61D
Geneseq Results for NOV61a

| | | NOV61a | Identities/ | |
|---|---|---|---|---|
| | | Residues/ | Similarities for | |
| Geneseq | Protein/Organism/Length | Match | the Matched | Expect |
| Identifier | [Patent #, Date] | Residues | Region | Value |
| AAG72316 | Human olfactory receptor | 47 . . . 219 | 149/173 (86%) | 2e−80 |
| | polypeptide, SEQ ID NO: 1997 - | 1 . . . 173 | 151/173 (87%) | |
| | Homo sapiens, 177 aa. | | | |
| | [WO200127158-A2, 19-APR- | | | |
| | 2001] | | | |
| ABB77320 | Human G-protein coupled | 30 . . . 304 | 148/275 (53%) | 8e−78 |
| | receptor SEQ ID NO 4 - Homo | 28 . . . 301 | 189/275 (67%) | |
| | sapiens, 309 aa. [WO200198323- | | | |
| | A2, 27-DEC-2001] | | | |
| AAU95571 | Human olfactory and pheromone | 30 . . . 304 | 148/275 (53%) | 8e−78 |
| | G protein-coupled receptor #58 - | 28 . . . 301 | 189/275 (67%) | |
| | Homo sapiens, 309 aa. | | | |
| | [WO200224726-A2, 28-MAR- | | | |
| | 2002] | | | |
| ABP51618 | Human G protein coupled receptor | 30 . . . 304 | 149/275 (54%) | 8e−78 |
| | SEQ ID NO: 118 - Homo sapiens, | 28 . . . 300 | 191/275 (69%) | |
| | 308 aa. [WO200250276-A2, 27- | | | |
| | JUN-2002] | | | |
| ABG76784 | Human G-protein coupled | 30 . . . 304 | 148/275 (53%) | 8e−78 |
| | receptor (GPCR) protein #18 - | 28 . . . 301 | 189/275 (67%) | |
| | Homo sapiens, 309 aa. | | | |
| | [WO200259313-A2, 01-AUG- | | | |
| | 2002] | | | |

[0707] In a BLAST search of public sequence databases, the NOV61a protein was found to have homology to the proteins shown in the BLASTP data in Table 61E.

TABLE 61E
Public BLASTP Results for NOV61a

| | | NOV61a | Identities/ | |
|---|---|---|---|---|
| Protein | | Residues/ | Similarities for | |
| Accession | | Match | the Matched | Expect |
| Number | Protein/Organism/Length | Residues | Portion | Value |
| Q8NHC8 | Seven transmembrane helix | 20 . . . 307 | 164/291 (56%) | 3e−81 |
| | receptor - Homo sapiens | 18 . . . 308 | 200/291 (68%) | |
| | (Human), 309 aa. | | | |
| Q8VF67 | Olfactory receptor MOR218-3 - | 30 . . . 305 | 146/276 (52%) | 1e−78 |
| | Mus musculus (Mouse), 315 aa. | 32 . . . 307 | 182/276 (65%) | |
| CAD57961 | Sequence 117 from Patent | 30 . . . 304 | 149/275 (54%) | 2e−77 |
| | WO0250276 - Homo sapiens | 28 . . . 300 | 191/275 (69%) | |
| | (Human), 308 aa. | | | |
| Q8NHC5 | Seven transmembrane helix | 30 . . . 304 | 148/275 (53%) | 2e−77 |
| | receptor - Homo sapiens | 28 . . . 301 | 189/275 (67%) | |
| | (Human), 309 aa. | | | |
| Q8VEU5 | Olfactory receptor MOR218-8 - | 30 . . . 313 | 143/284 (50%) | 4e−75 |
| | Mus musculus (Mouse), 320 aa. | 27 . . . 310 | 185/284 (64%) | |

[0708] PFam analysis indicates that the NOV61a protein contains the domains shown in the Table 61F.

TABLE 61F
Domain Analysis of NOV61a

| | NOV61a | Identities/ | |
|---|---|---|---|
| | Match | Similarities | |
| Pfam Domain | Region | for the Matched Region | Expect Value |
| 7tm_1 | 41 . . . 290 | 53/278 (19%) | 3.9e−31 |
| | | 174/278 (63%) | |

### Example 62

[0709] The NOV62 clone was analyzed, and the nucleotide and encoded polypeptide sequences are shown in Table 62A.

TABLE 62A
NOV62 Sequence Analysis

| | | |
|---|---|---|
| NOV62a, CG56868-01 | SEQ ID NO: 937 | 2422 bp |

| | | |
|---|---|---|
| DNA Sequence | ORF Start: ATG at 51 | ORF Stop: TAG at 2382 |

GAACTCCTTTTCTCAAGCACTTCTGCTCTCCTCTACCAGAATCACTCAGAATGCTTCCCGGGTGTATA
TTCTTGATGATTTTACTCATTCCTCAGGTTAAAGAAAAGTTCATCCTTGGAGTAGAGGGTCAACAACT
GGTTCGTCCTAAAAAGCTTCCTCTGATACAGAAGCGAGATACTGGACACACCCATGATGATGACATAC
TGAAAACGTATGAAGAAGAATTGTTGTATGAAATAAAACTAAATAGAAAAACCTTAGTCCTTCATCTT
CTAAGATCCAGGGAGTTCCTAGGCTCAAATTACAGTGAAACATTCTACTCCATGAAAGGAGAAGCGTT
CACCAGGCATCCTCAGATCATGGAACACTGTTACTATAAAGGAAACATCCTAAATGAAAAGAATTCTG
TTGCCAGCATCAGTACTTGTGACGGGTTGAGGGGATTCTTCAGAATAAACGACCAAAGATACCTCATT
GAACCAGTGAAATACTCAGATGAGGGAGAACATTTGGTGTTCAAATATAACCTGAGGGTGCCGTATGG
TGCCAATTATTCCTGTACAGAGCTTAATTTTACCAGAAAAACTGTTCCAGGGGATAATGAATCTGAAG
AAGACTCCAAAATAAAAGGCATCCATGATGAAAAGTATGTTGAATTGTTCATTGTTGCTGATGATACT
GTGTATCGCAGAAATGGTCATCCTCACAATAAACTAAGGAACCGAATTTGGGGAATGGTCAATTTTGT
CAACATGATTTATAAAACCTTAAACATCCATGTGACGTTGGTTGGCATTGAAATATGGACACATGAAG
ATAAAATAGAACTATATTCAAATATAGAAACTACCTTATTGCGTTTTTCATTTTGGCAAGAAAAGATC
CTTAAAACACGGAAGGATTTTGATCATGTTGTATTACTCAGTGGGAAGTGGCTCTACTCACATGTGCA
AGGAATTTCTTATCCAGGGGGTATGTGCCTGCCCTATTATTCCACCAGTATCATTAAGGATCTTTTAC
CTGACACAAACATAATTGCAAACAGAATGGCACATCAACTGGGGCATAACCTTGGGATGCAGCATGAC
GAGTTCCCATGCACCTGTCCTTCAGGAAAATGCGTGATGGACAGTGATGGAAGCATTCCTGCACTGAA
ATTCAGTAAATGCAGCCAAAACCAATACCACCAGTACTTGAAGGATTATAAGCCAACATGCATGCTCA
ACATTCCATTTCCTTACAATTTTCATGATTTCCAATTrTGTGGAAACAAGAAGTTGGATGAGGGTGAA
GAGTGTGACTGTGGCCCTGCTCAGGAGTGTACTAATCCTTGCTGTGATGCACACACATGTGTACTGAA
GCCAGGATTTACTTGTGCAGAAGGAGAATGCTGTGAATCTTGTCAGATAAAAAAAGCAGGGTCCATAT
GCAGACCGGCGAAAGATGAATGTGATTTTCCTGAGATGTGCACTGGCCACTCGCCTGCCTGTCCTAAG
GACCAGTTCAGGGTCAATGGATTTCCTTGCAAGAACTCAGAAGGCTACTGTTTCATGGGGAAATGTCC
AACTCGTGAGGATCAGTGCTCTGAACTATTTGATGATGAGGCAATAGAGAGTCATGATATCTGCTACA
AGATGAATACAAAAGGAAATAAATTTGGATACTGCAAAAACAAGGAAAACAGATTTCTTCCCTGTGAG
GAGAAGGATGTCAGATGTGGAAAGATCTACTGCACTGGAGGGGAGCTTTCCTCTCTCCTTGGAGAAGA
CAAGACTTATCACCTTAAGGATCCCCAGAAGAATGCTACTGTCAAATGCAAAACTATTTTTTTATACC
ATGATTCTACAGACATTGGCCTGGTGGCGTCAGGAACAAAATGTGGAGAGGGAATGGTGTGCAACAAT
GGTGAATGTCTAAACATGGAAAAGGTCTATATCTCAACCAATTGCCCCTCTCAGTGCAATGAAAATCC
TGTGGATGGCCACGGACTCCAGTGCCACTGTGAGGAAGGACAGGCACCTGTAGCCTGTGAAGAAACCT
TACATGTTACCAGTATCACCATCTTGGTTGTTGTGCTTGTCCTGGTTATTGTCGGTATCGGAGTTCTT
ATACTATTAGTTCGTTACCGAAAATGTATCAAGTTGAAGCAAGTTCAGAGCCCACCTACAGAAACCCT
GGGAGTGGAGAACAAAGGATACTTTGGTGATGAGCAGCAGATAAGGACTGAGCCAATCCTGCCAGAAA
TTCATTTCCTAAATCAGAGAACTCCAGAATCCTTGGAAAGCCTGCCCACTAGTTTTTCAAGTCCCCAC
TACATCACACTGAAACCTGCAAGTAAAGATTCAAGAGGAATCGCAGATCCCAATCAAAGTGCCAAGTG
GTAGGTTACCCTGACAGATAGTACCTCCCTTTTTTATTTTTC

NOV62a, CG56868-01

| | | | |
|---|---|---|---|
| Protein Sequence | SEQ ID NO: 938 | 777 aa | MW at 88341.2kD |

MLPGCIFLMILLIPQVKEKFILGVEGQQLVRPKKLPLIQKRDTGHTHDDDILKTYEEELLYEIKLNRK
TLVLNLLRSREFLGSNYSETFYSMKGEAFTRHPQIMEHCYYKGNILNEKNSVASISTCDGLRGFFRIN
DQRYLIEPVKYSDEGEHLVFKYNLRVPYGANYSCTELNFTRKTVPGDNESEEDSKIKGIHDEKYVELF
IVADDTVYRRNGHPHNKLRNRIWGMVNFVNNIYKTLNIHVTLVGIEIWTHEDKIELYSNIETTLLRFS
FWQEKILKTRKDFDHVVLLSGKWLYSHVQGISYPGGMCLPYYSTSIIKDLLPDTNIIANRMAHQLGHN
LGNQHDEFPCTCPSGKCVMDSDGSIPALKFSKCSQNQYHQYLKDYKPTCMLNIPFPYNFHDFQFCGNK
KLDEGEECDCGPAQECTNPCCDAHTCVLKPGFTCAEGECCESCQIKKAGSICRPAKDECDFPEMCTGH
SPACPKDQFRVNGFPCKNSEGYCFMGKCPTREDQCSELFDDEAIESHDICYKMNTKGNKFGYCKNKEN
RFLPCEEKDVRCGKIYCTGGELSSLLGEDKTYHLKDPQKNATVKCKTIFLYHDSTDIGLVASGTKCGE
GMVCNNGECLNMEKVYISTNCPSQCNENPVDGHGLQCHCEEGQAPVACEETLHVTSITILVVVLVLVI
VGIGVLILLVRYRKCIKLKQVQSPPTETLGVENKGYFGDEQQIRTEPILPEIHFLNQRTPESLESLPT
SFSSPHYITLKPASKDSRGIADPNQSAKW

| | | |
|---|---|---|
| NOV62b, 276580332 | SEQ ID NO: 939 | 247 bp |

| | | |
|---|---|---|
| DNA Sequence | ORF Start: at 2 | ORF Stop: end of sequence |

CACCGGTACCGATGAGGGTGAAGAGTGTGACTGTGGCCCTGCTCAGGAGTGTACTAATCCTTGCTGTG
ATGCACACACATGTGTACTGAAGCCAGGATTTACTTGTGCAGAAGGAGAATGCTGTGAATCTTGTCAG
ATAAAAAAAGCAGGGTCCATATGCAGACCGGCGAAAGATGAATGTGATTTTCCTGAGATGTGCACTGG
CCACTCGCCTGCCTGTCCTAAGGACCAGTTCAGGGTCGACGGC

NOV62b, 276580332

| | | | |
|---|---|---|---|
| Protein Sequence | SEQ ID NO: 940 | 82 aa | MW at 8696.6kD |

TGTDEGEECDCGPAQECTNPCCDAHTCVLKPGFTCAEGECCESCQIKKAGSICRPAKDECDFPEMCTG
HSPACPKDQFRVDG

[0710] A ClustalW comparison of the above protein sequences yields the following sequence alignment shown in Table 62B.

TABLE 62B
Comparison of the NOV62 protein sequences.

| | |
|---|---|
| NOV62a | MLPGCIFLNILLIPQVKEKFILGVEGQQLVRPKKLPLIQKRDTGHTHDDDILKTYEEELL |
| NOV62b | ------------------------------------------------------------ |
| NOV62a | YEIKLNRKTLVLHLLRSREFLGSNYSETFYSMKGEAFTRHPQIMEHCYYKGNILNEKNSV |
| NOV62b | ------------------------------------------------------------ |
| NOV62a | ASISTCDGLRGFFRINDQRYLIEPVKYSDEGEHLVFKYNLRVPYGANYSCTELNFTRKTV |
| NOV62b | ------------------------------------------------------------ |
| NOV62a | PGDNESEEDSKIKGIHDEKYVELFIVADDTVYRRNGHPHNKLRNRIWGMVNFVNMIYKTL |
| NOV62b | ------------------------------------------------------------ |
| NOV62a | NIHVTLVGIEIWTHEDKIELYSNIETTLLRFSFWQEKILKTRKDFDHVVLLSGKWLYSHV |
| NOV62b | ------------------------------------------------------------ |
| NOV62a | QGISYPGGMCLPYYSTSIIKDLLPDTNIIANRMAHQLGHNLGMQHDEFPCTCPSGKCVMD |
| NOV62b | ------------------------------------------------------------ |
| NOV62a | SDGSIPALKFSKCSQNQYHQYLKDYKPTCMLNIPFPYNFHDFQFCGNKKLDEGEECDCGP |
| NOV62b | -----------------------------------------------TGTDEGEECDCGP |
| NOV62a | AQECTNPCCDAHTCVLKPGFTCAEGECCESCQIKKAGSICRPAKDECDFPEMCTGHSPAC |
| NOV62b | AQECTNPCCDAHTCVLKPGFTCAEGECCESCQIKKAGSICRPAKDECDFPEMCTGHSPAC |
| NOV62a | PKDQFRVNGFPCKNSEGYCFMGKCPTREDQCSELFDDEAIESHDICYKMNTKGNKFGYCK |
| NOV62b | PKDQFRVDG--------------------------------------------------- |
| NOV62a | NKENRFLPCEEKDVRCGKIYCTGGELSSLLGEDKTYHLKDPQKNATVKCKTIFLYHDSTD |
| NOV62b | ------------------------------------------------------------ |
| NOV62a | IGLVASGTKCGEGMVCNNGECLNNEKVYISTNCPSQCNENPVDGHGLQCHCEEGQAPVAC |
| NOV62b | ------------------------------------------------------------ |
| NOV62a | EETLHVTSITILVVVLVLVIVGIGVLILLVRYRKCIKLKQVQSPPTETLGVENKGYFGDE |
| NOV62b | ------------------------------------------------------------ |
| NOV62a | QQIRTEPILPEIHFLNQRTPESLESLPTSFSSPHYITLKPASKDSRGIADPNQSAKW |
| NOV62b | --------------------------------------------------------- |
| NOV62a | (SEQ ID NO: 938) |
| NOV62b | (SEQ ID NO: 940) |

[0711] Further analysis of the NOV62a protein yielded the following properties shown in Table 62C.

TABLE 62C
Protein Sequence Properties NOV62a

| | |
|---|---|
| SignalP analysis: | Cleavage site between residues 19 and 20 |
| PSORT II analysis: | |

```
PSG: a new signal peptide prediction method
    N-region: length 0; pos.chg 0; neg.chg 0
    H-region: length 16; peak value 12.97
PSG sc ore: 8.57
GvH: von Heijne's method for signal seq. recognition
    GvH score (threshold: −2.1): −5.58
    possible cleavage site: between 18 and 19
>>> Seems to have no N-terminal signal peptide
ALOM: Klein et al's method for TM region allocation
    Init position for calculation: 1
    Tentative number of TMS(s) for the threshold 0.5: 2
```

| | | |
|---|---|---|
| INTEGRAL | Likelihood = −2.18 | Transmembrane 1-17 |
| INTEGRAL | Likelihood = −18.52 | Transmembrane 671-687 |

| | |
|---|---|
| PERIPHERAL | Likelihood = 4.35 (at 235) |

```
    ALOM score: −18.52 (number of TMSs: 2)
MTOP: Prediction of membrane topology (Hartmann et al.)
    Center position for calculation: 8
    Charge difference: 0.0 C(1.0) − N(1.0)
    N >= C: N-terminal side will be inside
>>> membrane topology: type 3a
MITDISC: discrimination of mitochondrial targeting seq
```

| | | | |
|---|---|---|---|
| R content: | 0 | Hyd Moment(75): | 3.80 |
| Hyd Moment(95): | 1.48 | G content: | 1 |
| D/E content: | 1 | S/T content: | 0 |
| Score: −6.33 | | | |

```
Gavel: prediction of cleavage sites for mitochondrial preseq
    cleavage site motif not found
NUCDISC: discrimination of nuclear localization signals
    pat4: RPKK (4) at 31
    pat7: none
    bipartite: none
    content of basic residues: 11.3%
    NLS Score: −0.22
KDEL: ER retention motif in the C-terminus: none
ER Membrane Retention Signals:
    KKXX-like motif in the C-terminus: QSAK
SKL: peroxisomal targeting signal in the C-terminus: none
PTS2: 2nd peroxisomal targeting signal: none
VAC: possible vacuolar targeting motif: none
RNA-binding motif: none
Actinin-type actin-binding motif:
    type 1: none
    type 2: none
NMYR: N-myristoylation pattern: none
Prenylation motif: none
memYQRL: transport motif from cell surface to Golgi: none
Tyrosines in the tail: none
Dileucine motif in the tail: none
checking 63 PROSITE DNA binding motifs: none
checking 71 PROSITE ribosomal protein motifs: none
checking 33 PROSITE prokaryotic DNA binding motifs:
    Bacterial regulatory proteins, gntR family signature (PS00043):
***found***
        EEELLYEIKLNRKTLVLHLLRS at 56
NNCN: Reinhardt's method for Cytoplasmic/Nuclear discrimination
    Prediction: nuclear
    Reliability: 55.5
COIL: Lupas's algorithm to detect coiled-coil regions
    total: 0 residues
Final Results (k = 9/23):
    34.8%: nuclear
    30.4%: endoplasmic reticulum
    21.7%: mitochondrial
      4.3%: vesicles of secretory system
      4.3%: cytoplasmic
      4.3%: peroxisomal
>> prediction for CG56868-01 is nuc (k = 23)
```

[0712] A search of the NOV62a protein against the Geneseq database, a proprietary database that contains sequences published in patents and patent publication, yielded several homologous proteins shown in Table 62D.

TABLE 62D
Geneseq Results for NOV62a

| | | NOV62a | Identities/ | |
|---|---|---|---|---|
| | | Residues/ | Similarities for | |
| Geneseq | Protein/Organism/Length | Match | the Matched | Expect |
| Identifier | [Patent #, Date] | Residues | Region | Value |
| AAB47567 | Protease PRTS-9 - Homo sapiens, | 1 . . . 776 | 771/776 (99%) | 0.0 |
| | 776 aa. [WO200171004-A2, 27- | 1 . . . 776 | 773/776 (99%) | |
| | SEP-2001] | | | |
| AAU77409 | Human NOV4b protein, | 1 . . . 777 | 776/780 (99%) | 0.0 |
| | homologue of ADAM proteins - | 1 . . . 779 | 776/780 (99%) | |
| | Homo sapiens, 779 aa. | | | |
| | [WO200206329-A2, 24-JAN- | | | |
| | 2002] | | | |
| AAU77408 | Human NOV4a protein, | 1 . . . 777 | 766/779 (98%) | 0.0 |
| | homologue of ADAM proteins - | 1 . . . 778 | 774/779 (99%) | |
| | Homo sapiens, 778 aa. | | | |
| | [WO200206329-A2, 24-JAN- | | | |
| | 2002] | | | |
| AAU16950 | Human novel secreted protein, | 1 . . . 677 | 664/677 (98%) | 0.0 |
| | SEQ ID 191 - Homo sapiens, 695 | 17 . . . 693 | 675/677 (99%) | |
| | aa. [WO200155441-A2, 02-AUG- | | | |
| | 2001] | | | |
| AAB64744 | Gene 16 human secreted protein | 336 . . . 710 | 353/375 (94%) | 0.0 |
| | homologous amino acid sequence | 1 . . . 375 | 364/375 (96%) | |
| | #138 - Macaca fascicularis, 375 | | | |
| | aa. [WO200077237-A1, 21-DEC- | | | |
| | 2000] | | | |

[0713] In a BLAST search of public sequence databases, the NOV62a protein was found to have homology to the proteins shown in the BLASTP data in Table 62E.

TABLE 62E
Public BLASTP Results for NOV62a

| | | NOV62a | Identities/ | |
|---|---|---|---|---|
| Protein | | Residues/ | Similarities for | |
| Accession | | Match | the Matched | Expect |
| Number | Protein/Organism/Length | Residues | Portion | Value |
| Q9H2U9 | ADAM 7 precursor (A disintegrin | 1 . . . 776 | 741/776 (95%) | 0.0 |
| | and metalloproteinase domain 7) | 1 . . . 754 | 751/776 (96%) | |
| | (Sperm maturation-related | | | |
| | glycoprotein GP-83) - Homo | | | |
| | sapiens (Human), 754 aa. | | | |
| Q28475 | ADAM 7 precursor (A disintegrin | 1 . . . 776 | 717/776 (92%) | 0.0 |
| | and metalloproteinase domain 7) | 1 . . . 776 | 748/776 (95%) | |
| | (Epididymal apical protein I) (EAP | | | |
| | I) - Macaca fascicularis (Crab | | | |
| | eating macaque) (Cynomolgus | | | |
| | monkey), 776 aa. | | | |
| O35227 | ADAM 7 precursor (A disintegrin | 1 . . . 774 | 523/774 (67%) | 0.0 |
| | and metalloproteinase domain 7) - | 1 . . . 771 | 638/774 (81%) | |
| | Mus musculus (Mouse), 788 aa. | | | |
| AAH43207 | Hypothetical protein - Homo | 212 . . . 736 | 524/525 (99%) | 0.0 |
| | sapiens (Human), 561 aa | 29 . . . 553 | 525/525 (99%) | |
| | (fragment). | | | |
| Q63180 | ADAM 7 precursor (A disintegrin | 1 . . . 774 | 520/774 (67%) | 0.0 |
| | and metalloproteinase domain 7) | 1 . . . 772 | 632/774 (81%) | |
| | (Epididymal apical protein I) (EAP | | | |
| | I) - Rattus norvegicus (Rat), 789 | | | |
| | aa. | | | |

[0714] PFam analysis indicates that the NOV62a protein contains the domains shown in the Table 62F.

TABLE 62F
Domain Analysis of NOV62a

| | NOV62a | Identities/ | |
|---|---|---|---|
| | Match | Similarities | Expect |
| Pfam Domain | Region | for the Matched Region | Value |
| Pep_M12B_propep | 73 . . . 188 | 38/119 (32%) | 6.7e−45 |
| | | 100/119 (84%) | |
| Reprolysin | 199 . . . 394 | 88/203 (43%) | 5.5e−104 |
| | | 173/203 (85%) | |
| disintegrin | 411 . . . 486 | 41/76 (54%) | 1.6e−25 |
| | | 53/76 (70%) | |

### Example 63

[0715] The NOV63 clone was analyzed, and the nucleotide and encoded polypeptide sequences are shown in Table 63A.

TABLE 63A
NOV63 Sequence Analysis

| | | |
|---|---|---|
| NOV63a, CG56870-01 | SEQ ID NO: 941 | 1268 bp |

| | | |
|---|---|---|
| DNA Sequence | ORF Start: ATG at 71 | ORF Stop: TAA at 1196 |

ACTTCTTTCTTTTCTGTTTCAGAGTTACTGATTTATTCTTGAGATTCCTCTACTCTCGTTATCTGACC
TCATGGATGAACTTCAGGATGTTCAGCTCACAGAGATCAAACCACTTCTAAATGATAAGAATGGTACA
AGAAACTTCCAGGACTTTGACTGTCAGGAACATGATATAGAAACAACTCATGGTGTGGTCGACGTCAC
TATAAGAGGCTTACCCAAAGGAAACAGACCAGTTATACTAACATATCATGACATTGGCCTCAACCGTA
AATCCTGTTTCAATGCATTCTTTAACTTTGAGGATATGCAAGAGATCACCCAGCACTTTGCTGTCTGT
CATGTGGATGCCCCAGGCCAGCAGGAAGGTGCACCCTCTTTCCCAACAGGGTATCAGTACCCCACAAT
GGATGAGCTGGCTGAAATGCTGCCTCCTGTTCTTACCCACCTAAGCCTGAAAAGCATCATTGGAATTG
GAGTTGGAGCTGGAGCTTACATCCTCAGCAGATTTGCACTCAACCATCCAGAGCTTGTGGAAGGCCTT
GTGCTCATTAATGTTGACCCTTGCGCTAAAGGCTGGATTGACTGGGCAGCTTCCAAACTCTCTGGCCT
GACAACCAATGTTGTGGACATTATTTTGGCTCATCACTTTGGGCAGGAAGAGTTACAGGCCAACCTGG
ACCTGATCCAAACCTACAGAATGCATATTGCCCAAGACATCAACCAAGACAACCTGCAGCTCTTCTTG
AATTCCTACAATGGGCGCAGAGACCTGGAGATCGAAAGACCCATACTGGGCCAAAATGATAACAAATC
AAAAACATTAAAGTGTTCTACTTTACTGGTGGTAGGGGACAATTCGCCTGCAGTTGAGGCTGTGGTCG
AATGCAATTCCCGCCTGAACCCTATAAATACAACTTTGCTAAAGATGGCGGACTGTGGGGGACTGCCC
CAGGTAGTTCAGCCTGGGAAGCTCACCGAGGCCTTCAAGTACTTTTTGCAGGGAATGGGCTACGTCCC
GTCTGCCAGCATGACTCGGCTCGCCCGATCACGAACCCACTCAACCTCGAGTAGCCTCGGCTCTGGAG
AAAGTCCCTTCAGCCGGTCTGTCACCAGCAATCAGTCAGATGGAACTCAAGAATCCTGTGAGTCCCCT
GATGTCCTGGACAGACACCAGACCATGGAGGTGTCCTGCTAAGCAGATGCTCCTCCCCTGGACCATTG
CAAGTCCATCCTTCAAATGACCACTCCATAATATAACATTTCAT

NOV63a, CG56870-01

| | | | |
|---|---|---|---|
| Protein Sequence | SEQ ID NO: 942 | 375 aa | MW at 41413.3kD |

MDELQDVQLTEIKPLLNDKNGTRNFQDFDCQEHDIETTHGVVHVTIRGLPKGNRPVILTYHDIGLNRK
SCFNAFFNFEDMQEITQHFAVCHVDAPGQQEGAPSFPTGYQYPTMDELAEMLPPVLTHLSLKSIIGIG
VGAGAYILSRFALNHPELVEGLVLINVDPCAKGWIDWAASKLSGLTTNVVDIILAHHFGQEELQANLD
LIQTYRMHIAQDINQDNLQLFLNSYNGRRDLEIERPILGQNDNKSKTLKCSTLLVVGDNSPAVEAVVE
CNSRLNPINTTLLKMADCGGLPQVVQPGKLTEAFKYFLQGMGYVPSASMTRLARSRTHSTSSSLGSGE
SPFSRSVTSNQSDGTQESCESPDVLDRHQTMEVSC

| | | |
|---|---|---|
| NOV63b, CG56870-06 | SEQ ID NO: 943 | 1041 bp |

| | | |
|---|---|---|
| DNA Sequence | ORF Start: ATG at 120 | ORF Stop: TAA at 969 |

ACTTCTTTCTTTTCTGTTTCAGAGTTACTGATTTATTCTTGAGATTCCTCTACTCTCGTTATCTGACC
TCATGGATGAACTTCAGGATGTTCAGCTCACAGAGATCAAACCACTTCTAAATGATAAGAATGGTACA
AGAAACTTCCAGGACTTTGACTGTCAGGTATCAGTACCCCACAATGGATGAGCTGGCTGAAATGCTGC
CTCCTGTTCTTACCCACCTAAGCCTGAAAAGCATCATTGGAATTGGAGTTGGAGCTGGAGCTTACATC
CTCAGCAGATTTGCACTCAACCATCCAGAGCTTGTGGAAGGCCTTGTGCTCATTAATGTTGACCCTTG
CGCTAAAGGCTGGATTGACTGGGCAGCTTCCAAACTCTCTGGCCTGACAACCAATGTTGTGGACATTA
TTTTGGCTCATCACTTTGGGCAGGAAGAGTTACAGGCCAACCTGGACCTGATCCAAACCTACAGAATG
CATATTGCCCAAGACATCAACCAAGACAACCTGCAGCTCTTCTTGAATTCCTACAATGGGCGCAGAGA
CCTGGAGATCGAAAGACCCATACTGGGCCAAAATGATAACAAATCAAAAACATTAAAGTGTTCTACTT
TACTGGTGGTAGGGGACAATTCGCCTGCAGTTGAGGCTGTGGTCGAATGCAATTCCCGCCTGAACCCT
ATAAATACAACTTTGCTAAAGATGGCGGACTGTGGGGGACTGCCCCAGGTAGTTCAGCCTGGGAAGCT
CACCGAGGCCTTCAAGTACTTTTTGCAGGGAATGGGCTACGTCCCGTCTGCCAGCATGACTCGGCTCG
CCCGATCACGAACCCACTCAACCTCGAGTAGCCTCGGCTCTGGAGAAAGTCCCTTCAGCCGGTCTGTC
ACCAGCAATCAGTCAGATGGAACTCAAGAATCCTGTGAGTCCCCTGATGTCCTGGACAGACACCAGAC
CATGGAGGTGTCCTGCTAAGCAGATGCTCCTCCCCTGGACCATTGCAAGTCCATCCTTCAAATGACCA
CTCCATAATATAACATTTCAT

NOV63b, CG56870-06

| | | | |
|---|---|---|---|
| Protein Sequence | SEQ ID NO: 944 | 283 aa | MW at 31109.1kD |

MIRMVQETSRTLTVRYQYPTMDELAEMLPPVLTHLSLKSIIGIGVGAGAYILSRFALNHPELVEGLVL
INVDPCAKGWIDWAASKLSGLTTNVVDIILAHHFGQEELQANLDLIQTYRMHIAQDINQDNLQLFLNS
YNGRRDLEIERPILGQNDNKSKTLKCSTLLVVGDNSPAVEAVVECNSRLNPINTTLLKMADCGGLPQV
VQPGKLTEAFKYFLQGMGYVPSASMTRLARSRTHSTSSSLGSGESPFSRSVTSNQSDGTQESCESPDV
LDRHQTMEVSC

| | | |
|---|---|---|
| NOV63c, 276585681 | SEQ ID NO: 945 | 994 bp |

| | | |
|---|---|---|
| DNA Sequence | ORF Start: at 2 | ORF Stop: end of sequence |

CACCAAGCTTACAAGAAACTTCCAGGACTTTGACTGTCAGGAACATGATATAGAAACAACTCATGGTG
TGGTCCACGTCACTATAAGAGGCTTACCCAAAGGAAACAGACCAGTTATACTAACATATCATGACATT
GGCCTCAACCATAAATCCTGTTTCAATGCATTCTTTAACTTTGAGGATATGCAAGAGATCACCCAGCA
CTTTGCTGTCTGTCATGTGGATGCCCCAGGCCAGCAGGAAGGTGCACCCTCTTTCCCAACAGGGTATC
AGTACCCCACAATGGATGAGCTGGCTGAAGTGCTGCCTCCTGTTCTTACCCACCTAAGCCTGAAAAGC
ATCATTGGAATTGGAGTTGGAGCTGGAGCTTACATCCTCAGCAGATTTGCACTCAACCATCCAGAGCT
TGTGGAAGGCCTTGTGCTCATTAATGTTGACCCTTGCGCTAAAGGCTGGATTGACTGGGCAGCTTCCA
AACTCTCTGGCCTGACAACCAATGTTGTGGACATTATTTTGGCTCATCACTTTGGGCAGGAAGAGTTA
CAGGCCAACCTGGACCTGATCCAAACCTACAGAATGCATATTGCCCAAGACATCAACCAAGACAACCT
GCAGCTCTTCTTGAATTCCTACAATGGACGCAGAGACCTGGAGATCGAAAGACCCATACTGGGCCAAA
ATGATAACAAATCAAAAACATTAAAGTGTTCTACTTTACTGGTGGTAGGGGACAATTCGCCTGCAGTT
GAGGCTGTGGTCGAATGCAATTCCCGCCTGAACCCTATAAATACAACTTTGCTAAAGATGGCGGACTG
TGGGGGACTGCCCCAGGTAGTTCAGCCTGGGAAGCTCACCGAGGCCTTCAAGTACTTTTTGCAGGGAA
TGGGCTACATACCATCTGCCAGCATGACTCGGCTCGCCCGATCACGAACCCACTCAACCTCGAGTAGC
CTCGGCTCTGGAGAAAGTCCCTTCAGCCGGTCTGTCGACGGC

NOV63c, 276585681

| | | | |
|---|---|---|---|
| Protein Sequence | SEQ ID NO: 946 | 331 aa | MW at 36428.9kD |

TKLTRNFQDFDCQEHDIETTHGVVHVTIRGLPKGNRPVILTYHDIGLNHKSCFNAFFNFEDMQEITQH
FAVCHVDAPGQQEGAPSFPTGYQYPTNDELAEVLPPVLTHLSLKSIIGIGVGAGAYILSRFALNHPEL
VEGLVLINVDPCAKGWIDWAASKLSGLTTNVVDIILAHHFGQEELQANLDLIQTYRMHIAQDINQDNL
QLFLNSYNGRRDLEIERPILGQNDNKSKTLKCSTLLVVGDNSPAVEAVVECNSRLNPINTTLLKMADC
GGLPQVVQPGKLTEAFKYFLQGMGYIPSASMTRLARSRTHSTSSSLGSGESPFSRSVDG

| | | |
|---|---|---|
| NOV63d, CG56870-02 | SEQ ID NO: 947 | 1175 bp |

| | | |
|---|---|---|
| DNA Sequence | ORF Start: ATG at 16 | ORF Stop: TAA at 1141 |

TCGTTATCTGACCTCATGGATGAACTTCAGGATGTTCAGCTCACAGAGATCAAACCACTTCTAAATGA
TAAGAATGGTACAAGAAACTTCCAGGACTTTGACTGTCAGGAACATGATATAGAAACAACTCATGGTG
TGGTCCACGTCACTATAAGAGGCTTACCCAAAGGAAACAGACCAGTTATACTAACATATCATGACATT
GGCCTCAACCATAAATCCTGTTTCAATGCATTCTTTAACTTTGAGGATATGCAAGAGATCACCCAGCA
CTTTGCTGTCTGTCATGTGGATGCCCCAGGCCAGCAGGAAGGTGCACCCTCTTTCCCAACAGGGTATC
AGTACCCCACAATGGATGAGCTGGCTGAAGTGCTGCCTCCTGTTCTTACCCACCTAAGCCTGAAAAGC
ATCATTGGAATTGGAGTTGGAGCTGGAGCTTACATCCTCAGCAGATTTGCACTCAACCATCCAGAGCT
TGTGGAAGGCCTTGTGCTCATTAATGTTGACCCTTGCGCTAAAGGCTGGATTGACTGGGCAGCTTCCA
AACTCTCTGGCCTGACAACCAATGTTGTGGACATTATTTTGGCTCATCACTTTGGGCAGGAAGAGTTA
CAGGCCAACCTGGACCTGATCCAAACCTACAGAATGCATATTGCCCAAGACATCAACCAAGACAACCT
GCAGCTCTTCTTGAATTCCTACAATGGACGCAGAGACCTGGAGATCGAAAGACCCATACTGGGCCAAA
ATGATAACAAATCAAAAACATTAAAGTGTTCTACTTTACTGGTGGTAGGGGACAATTCGCCTGCAGTT
GAGGCTGTGGTCGAATGCAATTCCCGCCTGAACCCTATAAATACAACTTTGCTAAAGATGGCGGACTG
TGGGGGACTGCCCCAGGTAGTTCAGCCTGGGAAGCTCACCGAGGCCTTCAAGTACTTTTTGCAGGGAA
TGGGCTACATACCATCTGCCAGCATGACTCGGCTCGCCCGATCACGAACCCACTCAACCTCGAGTAGC
CTCGGCTCTGGAGAAAGTCCCTTCAGCCGGTCTGTCACCAGCAATCAGTCACATGGAACTCAAGAATC
CTGTGAGTCCCCTGATGTCCTGGACAGACACCAGACCATGGAGGTGTCCTGCTAAGCAGATGCTCCTC
CCCTGGACCATTGCAAGTC

NOV63d, CG56870-02

| | | | |
|---|---|---|---|
| Protein Sequence | SEQ ID NO: 948 | 375 aa | MW at 41376.2kD |

MDELQDVQLTEIKPLLNDKNGTRNFQDFDCQEHDIETTHGVVHVTIRGLPKGNRPVILTYHDIGLNHK
SCFNAFFNFEDMQEITQHFAVCHVDAPGQQEGAPSFPTGYQYPTMDELAEVLPPVLTHLSLKSIIGIG
VGAGAYILSRFALNHPELVEGLVLINVDPCAKGWIDWAASKLSGLTTNVVDIILAHHFGQEELQANLD
LIQTYRNHIAQDINQDNLQLFLNSYNGRRNLEIERPILGQNDNKSKTLKCSTLLVVGDNSPAVEAVVE
CNSRLNPINTTLLKMADCGGLPQVVQPGKLTEAFKYFLQGMGYIPSASMTRLARSRTHSTSSSLGSGE
SPFSRSVTSNQSDGTQESCESPDVLDRHQTMEVSC

| | | |
|---|---|---|
| NOV63e, CG56870-03 | SEQ ID NO: 949 | 1232 bp |

| | | |
|---|---|---|
| DNA Sequence | ORF Start: ATG at 71 | ORF Stop: TAA at 1160 |

ACTTCTTTCTTTTCTGTTTCAGAGTTACTGATTTATTCCTGAGATTCCTCTACTCTCGTTATCTGACC
TCATGGATGAACTTCAGGATGTTCAGCTCACAGAGATCAAACCACTTCTAAATGATAAGGAACATGAT
ATAGAAACAACTCATGGTGTGGTCCACGTCACTATAAGAGGCTTACCCAAAGGAAACAGACCAGTTAT
ACTAACATATCATGACATTGGCCTCAACCATAAATCCTGTTTCAATGCATTCTTTAACTTTGAGGATA
TGCAAGAGATCACCCAGCACTTTGCTGTCTGTCATGTGGATGCCCCAGGCCAGCAGGAAGGTGCACCC
TCTTTCCCAACAGGGTATCAGTACCCCACAATGGATGAGCTGGCTGAAATGCTGCCTCCTGTTCTTAC
CCACCTAAGCCTGAAAAGCATCATTGGAATTGGAGTTGGAGCTGGAGCTTACATCCTCAGCAGATTTG
CACTCAACCATCCAGAGCTTGTGGAAGGCCTTGTGCTCATTAATGTTGACCCTTGCGCTAAAGGCTGG
ATTGACTGGGCAGCTTCCAAACTCTCTGGCCTGACAACCAATGTTGTGGACATTATTTTGGCTCATCA
CTTTGGGCAGGAAGAGTTACAGGCCAACCTGGACCTGATCCAAACCTACAGAATGCATATTGCCCAAG
ACATCAACCAAGACAACCTGCAGCTCTTCTTGAATTCCTACAATGGGCGCAGAGACCTGGAGATCGAA
AGACCCATACTGGGCCAAAATGATAACAAATCAAAAACATTAAAGTGTTCTACTTTACTGGTGGTAGG
GGACAATTCGCCTGCAGTTGAGGCTGTGGTCGAATGCAATTCCCGCCTGAACCCTATAAATACAACTT
TGCTAAAGATGGCGGACTGTGGGAAACTGCCCCAGGTAGTTCAGCCTGGGAAGCTCACCGAGGCCTTC
AAGTACTTTTTGCAGGGAATGGGCTACGTCCCGTCTGCCAGCATGACTCGGCTCGCCCGATCACGAAC
CCACTCAACCTCGAGTAGCCTCGGCTCTGGAGAAAGTCCCTTCAGCCGGTCTGTCACCAGCAATCAGT
CAGATGGAACTCAAGAATCCTGTGAGTCCCCTGATGTCCTGGACAGACACCAGACCATGGAGGTGTCC
TGCTAAGCAGATGCTCCTCCCCTGGACCATTGCAAGTCCATCCTTCAAATGACCACTCCATAATATAA
CATTTCAT

NOV63e, CG56870-03

| | | | |
|---|---|---|---|
| Protein Sequence | SEQ ID NO: 950 | 363 aa | MW at 39967.8kD |

MDELQDVQLTEIKPLLNDKEHDIETTHGVVHVTIRGLPKGNRPVILTYHDIGLNHKSCFNAFFNFEDM
QEITQHFAVCHVDAPGQQEGAPSFPTGYQYPTMDELAEMLPPVLTHLSLKSIIGIGVGAGAYILSRFA
LNHPELVEGLVLINVDPCAKGWIDWAASKLSGLTTNVVDIILAHHFGQEELQANLDLIQTYRMHIAQD
INQDNLQLFLNSYNGRRDLEIERPILGQNDNKSKTLKCSTLLVVGDNSPAVEAVVECNSRLNPINTTL
LKMADCGGLPQVVQPGKLTEAFKYFLQGMGYVPSASMTRLATSRTHSTSSSLGSGESPFSRSVTSNQS
DGTQESCESPDVLDRHQTMEVSC

| | | |
|---|---|---|
| NOV63f, CG56870-04 | SEQ ID NO: 951 | 1220 bp |

| | | |
|---|---|---|
| DNA Sequence | ORF Start: ATG at 71 | ORF Stop: TAA at 1148 |

ACTTCTTTCTTTTCTGTTTCAGAGTTACTGATTTATTCTTGAGATTCCTCTACTCTCGTTATCTGACC
TCATGGATGAACTTCAGGATGTTCAGCTCACAGAGATCAAACCACTTCTAAATGATAAGAATGGTACA
AGAAACTTCCAGGACTTTGACTGTCAGGAACATGATATAGAAACAACTCATGGTGTGGTCCACGTCAC
TATAAGAGGCTTACCCAAAGGAAACAGACCAGTTATACTAACATATCATGACATTGGCCTCAACCGTA
AATCCTGTTTCAATGCATTCTTTAACTTTGAGGATATGCAAGAGATCACCCAGCACTTTGCTGTCTGT
CATGTGGATGCCCCAGGCCAGCAGGAAGGTGCACCCTCTTTCCCAACAGGGTATCAGTACCCCACAAT
GGATGAGCTGGCTGAAATGCTGCCTCCTGTTCTTACCCACCTAAGCCTGAAAAGCATCATTGGAATTG
GAGTTGGAGCTGGAGCTTACATCCTCAGCAGATTTGCACTCAACCATCCAGAGCTTGTGGAAGGCCTT
GTGCTCATTAATGTTGACCCTTGCGCTAAAGGCTGGATTGACTGGGCAGCTTCCAAACTCTCTGGCCT
GACAACCAATGTTGTGGACATTATTTTGGCTCATCACTTTGGGCAGGAAGAGTTACAGGCCAACCTGG
ACCTGATCCAAACCTACAGAATGCATATTGCCCAAGACATCAACCAAGACAACCTGCAGCTCTTCTTG
AATTCCTACAATGGACGCAGAGACCTGGAGATCGAAAGACCCATACTGGGCCAAAATGATAACAAATC
AAAAACATTAAAGTGTTCTACTTTACTGGTGGTAGGGGACAATTCGCCTGCAGTTGAGGCTGTGATGG
CGGACTGTGGGGGACTGCCCCAGGTAGTTCAGCCTGGGAAGTTCACCGAGGCCTTCAAGTACTTTTTG
CAGGGAATGGGCTACACACCATCTGCCAGCATGACTCGGCTCGCCCGATCACGAACCCACTCAACCTC
GAGTAGCCTCGGCTCTGGAGAAAGTCCCTTCAGCCGGTCTGTCACCAGCAATCAGTCAGATGGAACTC
AAGAATCCTGTGAGTCCCCTGATGTCCTGGACAGACACCAGACCATGGAGGTGTCCTGCTAAGCAGAT
GCTCCTCCCCTGGACCATTGCAAGTCCATCCTTCAAATGACCACTCCATAATATAACATTTCAT

NOV63f, CG56870-04

| | | | |
|---|---|---|---|
| Protein Sequence | SEQ ID NO: 952 | 359 aa | MW at 39652.2kD |

MDELQDVQLTEIKPLLNDKNGTRNFQDFDCQEHDIETTHGVVHVTIRGLPKGNRPVILTYHDIGLNRK
SCFNAFFNFEDMQEITQHFAVCHVDAPGQQEGAPSFPTGYQYPTMDELAEMLPPVLTHLSLKSIIGIG
VGAGAYILSRFALNHPELVEGLVLINVDPCAKGWIDWAASKLSGLTTNVVDIILAHHFGQEELQANLD
LIQTYRNHIAQDINQDNLQLFLNSYNGRRDLEIERPILGQNDNKSKTLKCSTLLVVGDNSPAVEAVMA
DCGGLPQVVQPGKFTEAFKYFLQGMGYTPSASMTRLARSRTHSTSSSLGSGESPFSRSVTSNQSDGTQ
ESCESPDVLDRHQTMEVSC

| | | |
|---|---|---|
| NOV63g, CG56870-05 | SEQ ID NO: 953 | 1970 bp |

| | | |
|---|---|---|
| DNA Sequence | ORF Start: ATG at 1 | ORF Stop: TAA at 898 |

ATGGATGAACTTCAGGATGTTCAGCTCACAGAGATCAAACCACTTCTAAATGATAAGAATGGTACAAG
AAACTTCCAGGACTTTGACTGTCAGTATCAGTACCCCACAATGGATGAGCTGGCTGAAATGCTGCCTC
CTGTTCTTACCCACCTAAGCCTGAAAAGCATCATTGGAATTGGAGTTGGAGCTGGAGCTTACATCCTC
AGCAGATTTGCACTCAACCATCCAGAGCTTGTGGAAGGCCTTGTGCTCATTAATGTTGACCCTTGCGC
TAAAGGCTGGATTGACTGGGCAGCTTCCAAACTCTCTGGCCTGACAACCAATGTTGTGGACATTATTT
TGGCTCATCACTTTGGGCAGGAAGAGTTACAGGCCAACCTGGACCTGATCCAAACCTACAGAATGCAT
ATTGCCCAAGACATCAACCAAGACAACCTGCAGCTCTTCTTGAATTCCTACAATGGGCGCAGAGACCT
GGAGATCGAAAGACCCATACTGGGCCAAAATGATAACAAATCAAAAACATTAAAGTGTTCTACTTTAC
TGGTGGTAGGGGACAATTCGCCTGCAGTTGAGGCTGTGGTCGAATGCAATTCCCGCCTGAACCCTATA
AATACAACTTTGCTAAAGATGGCGGACTGTGGGGGACTGCCCCAGGTAGTTCAGCCTGGGAAGCTCAC
CGAGGCCTTCAAGTACTTTTTGCAGGGAATGGGCTACGTCCCGTCTGCCAGCATGACTCGGCTCGCCC
GATCACGAACCCACTCAACCTCGAGTAGCCTCGGCTCTGGAGAAAGTCCCTTCAGCCGGTCTGTCACC
AGCAATCAGTCAGATGGAACTCAAGAATCCTGTGAGTCCCCTGATGTCCTGGACAGACACCAGACCAT
GGAGGTGTCCTGCTAAGCAGATGCTCCTCCCCTGGACCATTGCAAGTCCATCCTTCAAATGACCACTC
CATAATATAACATTTCAT

NOV63g, CG56870-05

| | | | |
|---|---|---|---|
| Protein Sequence | SEQ ID NO: 954 | 299 aa | MW at 32956.9kD |

MDELQDVQLTEIKPLLNDKNGTRNFQDFDCQYQYPTMDELAEMLPPVLTHLSLKSIIGIGVGAGAYIL
SRFALNHPELVEGLVLINVDPCAKGWIDWAASKLSGLTTNVVDIILAHHFGQEELQANLDLIQTYRMH
IAQDINQDNLQLFLNSYNGRRDLEIERPILGQNDNKSKTLKCSTLLVVGDNSPAVEAVVECNSRLNPI
NTTLLKMADCGGLPQVVQPGKLTEAFKYFLQGMGYVPSASMTRLARSRTHSTSSSLGSGESPFSRSVT
SNQSDGTQESCESPDVLDRHQTMEVSC

[0716] A ClustalW comparison of the above protein sequences yields the following sequence alignment shown in Table 63B.

TABLE 63B
Comparison of the NOV63 protein sequences.

| | |
|---|---|
| NOV63a | MDELQDVQLTEIKPLLNDKNGTRNFQDFDCQEHDIETTHGVVHVTIRGLPKGNRPVILTY |
| NOV63b | ------------------------------------------------------------ |
| NOV63c | ------------------TKLTRNFQDFDCQEHDIETTHGVVHVTIRGLPKGNRPVILTY |
| NOV63d | MDELQDVQLTEIKPLLNDKNGTRNFQDFDCQEHDIETTHGVVHVTIRGLPKGNRPVILTY |
| NOV63e | ------------MDELQDVQLTEIKPLLNDKEHDIETTHGVVHVTIRGLPKGNRPVILTY |
| NOV63f | MDELQDVQLTEIKPLLNDKNGTRNFQDFDCQEHDIETTHGVVHVTIRGLPKGNRPVILTY |
| NOV63g | ------------------------------------------------------------ |
| NOV63a | HDIGLNRKSCFNAFFNFEDMQEITQHFAVCHVDAPGQQEGAPSFPTGYQYPTMDELAEML |
| NOV63b | ---------------------------MIRMVQETS-----RTLTVRYQYPTMDELAEML |
| NOV63c | HDIGLNHKSCFNAFFNFEDMQEITQHFAVCHVDAPGQQEGAPSFPTGYQYPTMDELAEVL |
| NOV63d | HDIGLNHKSCFNAFFNFEDMQEITQHFAVCHVDAPGQQEGAPSFPTGYQYPTMDELAEVL |
| NOV63e | HDIGLNHKSCFNAFFNFEDMQEITQHFAVCHVDAPGQQEGAPSFPTGYQYPTMDELAEVL |
| NOV63f | HDIGLNRKSCFNAFFNFEDMQEITQHFAVCHVDAPGQQEGAPSFPTGYQYPTMDELAEVL |
| NOV63g | ----------------MDELQDVQLTEIKPLLNDKNGTRNFQDFDCQYQYPTMDELAEVL |
| NOV63a | PPVLTHLSLKSIIGIGVGAGAYILSRFALNHPELVEGLVLINVDPCAKGWIDWAASKLSG |
| NOV63b | PPVLTHLSLKSIIGIGVGAGAYILSRFALNHPELVEGLVLINVDPCAKGWIDWAASKLSG |
| NOV63c | PPVLTHLSLKSIIGIGVGAGAYILSRFALNHPELVEGLVLINVDPCAKGWIDWAASKLSG |
| NOV63d | PPVLTHLSLKSIIGIGVGAGAYILSRFALNHPELVEGLVLINVDPCAKGWIDWAASKLSG |
| NOV63e | PPVLTHLSLKSIIGIGVGAGAYILSRFALNHPELVEGLVLINVDPCAKGWIDWAASKLSG |
| NOV63f | PPVLTHLSLKSIIGIGVGAGAYILSRFALNHPELVEGLVLINVDPCAKGWIDWAASKLSG |
| NOV63g | PPVLTHLSLKSIIGIGVGAGAYILSRFALNHPELVEGLVLINVDPCAKGWIDWAASKLSG |
| NOV63a | LTTNVVDIILAHHFGQEELQANLDLIQTYRMHIAQDINQDNLQLFLNSYNGRRDLEIERP |
| NOV63b | LTTNVVDIILAHHFGQEELQANLDLIQTYRMHIAQDINQDNLQLFLNSYNGRRDLEIERP |
| NOV63c | LTTNVVDIILAHHFGQEELQANLDLIQTYRMHIAQDINQDNLQLFLNSYNGRRDLEIERP |
| NOV63d | LTTNVVDIILAHHFGQEELQANLDLIQTYRMHIAQDINQDNLQLFLNSYNGRRDLEIERP |
| NOV63e | LTTNVVDIILAHHFGQEELQANLDLIQTYRMHIAQDINQDNLQLFLNSYNGRRDLEIERP |
| NOV63f | LTTNVVDIILAHHFGQEELQANLDLIQTYRMHIAQDINQDNLQLFLNSYNGRRDLEIERP |
| NOV63g | LTTNVVDIILAHHFGQEELQANLDLIQTYRMHIAQDINQDNLQLFLNSYNGRRDLEIERP |
| NOV63a | ILGQNDNKSKTLKCSTLLVVGDNSPAVEAVVECNSRLNPINTTLLKMADCGGLPQVVQPG |
| NOV63b | ILGQNDNKSKTLKCSTLLVVGDNSPAVEAVVECNSRLNPINTTLLKMADCGGLPQVVQPG |
| NOV63c | ILGQNDNKSKTLKCSTLLVVGDNSPAVEAVVECNSRLNPINTTLLKMADCGGLPQVVQPG |
| NOV63d | ILGQNDNKSKTLKCSTLLVVGDNSPAVEAVVECNSRLNPINTTLLKMADCGGLPQVVQPG |
| NOV63e | ILGQNDNKSKTLKCSTLLVVGDNSPAVEAVVECNSRLNPINTTLLKMADCGGLPQVVQPG |
| NOV63f | ILGQNDNKSKTLKCSTLLVVGDNSPAVEAV----------------MADCGGLPQVVQPG |
| NOV63g | ILGQNDNKSKTLKCSTLLVVGDNSPAVEAVVECNSRLNPINTTLLKMADCGGLPQVVQPG |
| NOV63a | KLTEAFKYFLQGMGYVPSASMTRLARSRTHSTSSSLGSGESPFSRSVTSNQSDGTQESCE |
| NOV63b | KLTEAFKYFLQGMGYVPSASMTRLARSRTHSTSSSLGSGESPFSRSVTSNQSDGTQESCE |
| NOV63c | KLTEAFKYFLQGMGYVPSASMTRLARSRTHSTSSSLGSGESPFSRSVDG----------- |
| NOV63d | KLTEAFKYFLQGMGYVPSASMTRLARSRTHSTSSSLGSGESPFSRSVTSNQSDGTQESCE |
| NOV63e | KLTEAFKYFLQGMGYVPSASMTRLARSRTHSTSSSLGSGESPFSRSVTSNQSDGTQESCE |
| NOV63f | KLTEAFKYFLQGMGYVPSASMTRLARSRTHSTSSSLGSGESPFSRSVTSNQSDGTQESCE |
| NOV63g | KLTEAFKYFLQGMGYVPSASMTRLARSRTHSTSSSLGSGESPFSRSVTSNQSDGTQESCE |
| NOV63a | SPDVLDRHQTMEVSC |
| NOV63b | SPDVLDRHQTMEVSC |
| NOV63c | --------------- |
| NOV63d | SPDVLDRHQTMEVSC |
| NOV63e | SPDVLDRHQTMEVSC |
| NOV63f | SPDVLDRHQTMEVSC |
| NOV63g | SPDVLDRHQTMEVSC |
| NOV63a | (SEQ ID NO: 942) |
| NOV63b | (SEQ ID NO: 944) |
| NOV63c | (SEQ ID NO: 946) |
| NOV63d | (SEQ ID NO: 948) |
| NOV63e | (SEQ ID NO: 950) |
| NOV63f | (SEQ ID NO: 952) |
| NOV63g | (SEQ ID NO: 954) |

[0717] Further analysis of the NOV63a protein yielded the following properties shown in Table 63C.

TABLE 63C
Protein Sequence Properties NOV63a

| | |
|---|---|
| SignalP analysis: | No Known Signal Sequence Indicated |
| PSORT II analysis: | |

```
PSG: a new signal peptide prediction method
    N-region: length 11; pos.chg 0; neg.chg 4
    H-region: length 1; peak value 0.00
    PSG score: −4.40
GvH: von Heijne's method for signal seq. recognition
    GvH score (threshold: −2.1): −14.03
    possible cleavage site: between 48 and 49
>>> Seems to have no N-terminal signal peptide
ALOM: Klein et al's method for TM region allocation
    Init position for calculation: 1
    Tentative number of TMS(s) for the threshold 0.5: 1
    Number of TMS(s) for threshold 0.5: 0
    PERIPHERAL Likelihood = 4.67 (at 174)
    ALOM score:  0.47 (number of TMSs: 0)
MITDISC: discrimination of mitochondrial targeting seq
```

| | | | |
|---|---|---|---|
| R content: | 0 | Hyd Moment(75): | 8.01 |
| Hyd Moment(95): | 7.59 | G content: | 0 |
| D/E content: | 2 | S/T content: | 0 |
| Score: −6.61 | | | |

```
Gavel: prediction of cleavage sites for mitochondrial preseq
    cleavage site motif not found
NUCDISC: discrimination of nuclear localization signals
    pat4: none
    pat7: none
    bipartite: none
    content of basic residues: 7.5%
    NLS Score: −0.47
KDEL: ER retention motif in the C-terminus: none
ER Membrane Retention Signals: none
SKL: peroxisomal targeting signal in the C-terminus: none
PTS2: 2nd peroxisomal targeting signal: none
VAC: possible vacuolar targeting motif: none
RNA-binding motif: none
Actinin-type actin-binding motif:
    type 1: none
    type 2: none
NMYR: N-myristoylation pattern: none
Prenylation motif: none
memYQRL: transport motif from cell surface to Golgi: none
Tyrosines in the tail: none
Dileucine motif in the tail: none
checking 63 PROSITE DNA binding motifs: none
checking 71 PROSITE ribosomal protein motifs: none
checking 33 PROSITE prokaryotic DNA binding motifs: none
NNCN: Reinhardt's method for Cytoplasmic/Nuclear discrimination
    Prediction: cytoplasmic
    Reliability: 55.5
COIL: Lupas's algorithm to detect coiled-coil regions
    total: 0 residues
Final Results (k = 9/23):
    39.1%: cytoplasmic
    39.1%: nuclear
    13.0%: mitochondrial
      4.3%: Golgi
      4.3%: endoplasmic reticulum
>> prediction for CG56870-01 is cyt (k = 23)
```

[0718] A search of the NOV63a protein against the Geneseq database, a proprietary database that contains sequences published in patents and patent publication, yielded several homologous proteins shown in Table 63D.

TABLE 63D
Geneseq Results for NOV63a

| | | NOV63a | Identities/ | |
|---|---|---|---|---|
| | | Residues/ | Similarities for | |
| Geneseq | Protein/Organism/Length | Match | the Matched | Expect |
| Identifier | [Patent #, Date] | Residues | Region | Value |
| AAB94494 | Human protein sequence SEQ ID | 1 . . . 375 | 360/375 (96%) | 0.0 |
| | NO: 15186 - Homo sapiens, 363 | 1 . . . 363 | 361/375 (96%) | |
| | aa. [EP1074617-A2, 07-FEB- | | | |
| | 2001] | | | |
| AAG64392 | Human reducing agent and | 1 . . . 375 | 360/375 (96%) | 0.0 |
| | tunicamycin-responsive protein | 1 . . . 363 | 361/375 (96%) | |
| | 40 - Homo sapiens, 363 aa. | | | |
| | [WO200155375-A1, 02-AUG- | | | |
| | 2001] | | | |
| AAM94019 | Human stomach cancer expressed | 1 . . . 375 | 360/375 (96%) | 0.0 |
| | polypeptide SEQ ID NO 108 - | 1 . . . 363 | 361/375 (96%) | |
| | Homo sapiens, 363 aa. | | | |
| | [WO200109317-A1, 08-FEB- | | | |
| | 2001] | | | |
| ABG10563 | Novel human diagnostic protein | 68 . . . 374 | 283/323 (87%) | e−155 |
| | #10554 - Homo sapiens, 382 aa. | 1 . . . 307 | 287/323 (88%) | |
| | [WO200175067-A2, 11-OCT- | | | |
| | 2001] | | | |
| AAU31598 | Novel human secreted protein | 68 . . . 374 | 282/323 (87%) | e−154 |
| | #2089 - Homo sapiens, 395 aa. | 1 . . . 307 | 286/323 (88%) | |
| | [WO200179449-A2, 25-OCT- | | | |
| | 2001] | | | |

[0719] In a BLAST search of public sequence databases, the NOV63a protein was found to have homology to the proteins shown in the BLASTP data in Table 63E.

TABLE 63E
Public BLASTP Results for NOV63a

| | | NOV63a | Identities/ | |
|---|---|---|---|---|
| Protein | | Residues/ | Similarities for | |
| Accession | | Match | the Matched | Expect |
| Number | Protein/Organism/Length | Residues | Portion | Value |
| Q9UGV2 | NDRG3 protein - Homo sapiens | 1 . . . 375 | 373/375 (99%) | 0.0 |
| | (Human), 375 aa. | 1 . . . 375 | 374/375 (99%) | |
| Q9QYF9 | NDRG3 protein (Ndr3 protein) - | 1 . . . 375 | 358/375 (95%) | 0.0 |
| | Mus musculus (Mouse), 375 aa. | 1 . . . 375 | 368/375 (97%) | |
| Q8VCV2 | Similar to N-myc downstream | 1 . . . 375 | 359/388 (92%) | 0.0 |
| | regulated 3 - Mus musculus | 1 . . . 388 | 368/388 (94%) | |
| | (Mouse), 388 aa. | | | |
| Q96SM2 | Hypothetical protein FLJ14759 - | 1 . . . 375 | 360/375 (96%) | 0.0 |
| | Homo sapiens (Human), 363 aa. | 1 . . . 363 | 361/375 (96%) | |
| AAH44139 | Similar to N-myc downstream | 1 . . . 375 | 290/375 (77%) | e−169 |
| | regulated 3 - Brachydanio rerio | 2 . . . 371 | 324/375 (86%) | |
| | (Zebrafish) (Danio rerio), 371 aa. | | | |

[0720] PFam analysis indicates that the NOV63a protein contains the domains shown in the Table 63F.

TABLE 63F
Domain Analysis of NOV63a

| | NOV63a | Identities/ | |
|---|---|---|---|
| | Match | Similarities | |
| Pfam Domain | Region | for the Matched Region | Expect Value |
| abhydrolase | 87 . . . 307 | 46/237 (19%) | 0.0014 |
| | | 142/237 (60%) | |
| Ndr | 32 . . . 317 | 181/301 (60%) | 5.6e−186 |
| | | 275/301 (91%) | |

### Example 64

[0721] The NOV64 clone was analyzed, and the nucleotide and encoded polypeptide sequences are shown in Table 64A.

TABLE 64A
NOV64 Sequence Analysis

| | | |
|---|---|---|
| NOV64a, CG57109-01 | SEQ ID NO: 955 | 2536 bp |

| | | |
|---|---|---|
| DNA Sequence | ORF Start: ATG at 150 | ORF Stop: TAG at 2094 |

GGGACACTGACATGGACTGAAGGAGTAGAAAAGAAGCCTTGGGCTCTCCCAGATGGAAGAATGACCGT
GTGAGGAAACTGTTTAACCTCAAGGGCAGGGAAATCAGGAGCGTCTCTGATTTCTTCAGGGAAGGGGA
TGCTTTCATAGCTATGGGCAAAGAACCACTGACACTGAAGAGCATTCAGGTGGCTGTAGAAGAACTGT
ACCCCAACAAAGCCCGGGCCCTGACACTGGCCCAGCACAGCCGTGCCCCTTCTCCAAGGCTGAGGAGC
AGGCTGTTTAGCAAGGCTCTGAAAGGAGACCACCGCTGTGGGGAGACCGAGACCCCCAAGAGCTGCAG
CGAAGTTGCAGGATGCAAGGCAGCCATGAGGCACCAGGGGAAGATCCCCGAGGAGCTTTCACTAGATG
ACAGAGCGAGGACCCAGAAGAAGTGGGGGAGGGGGAAATGGGAGCCAGAACCCAGTAGCAAGCCCCCC
ACAGAGCGAGGACCCAGAAGAAGTGGGGGAGGGGGAAATGGGAGCCAGAACCCAGTAGCAAGCCCCCC
CTCGGGTGAAATTATCAGATGCGAGAAGTGCAAGAGAGAGAGGGAGCTTCAGCAGAGCCTGGAGCGTG
AGAGGCTTTCTCTGGGGACCAGTGAGCTGGATATGGGGAAGGGCCCAATGTATGATGTGGAGAAGCTG
GTGAGGACCAGAAGCTGCAGGAGGTCTCCCGAGGCAAATCCTGCAAGTGGGGAGGAAGGGTGGAAGGG
TGACAGCCACAGGAGCAGCCCCAGGAATCCCACTCAAGAGCTGAGGAGACCCAGCAAGAGCATGGACA
AGAAAGAGGACAGAGGCCCAGAGGATCAAGAAAGCCATGCTCAGGGAGCAGCCAAGGCCAAGAAGGAC
CTTGTGGAAGTTCTTCCTGTCACAGAGGAGGGGCTGAGGGAGGTGAAGAAGGACACCAGGCCCATGAG
CAGGAGCAAACATGGTGGCTGGCTCCTGAGAGAGCACCAGGCGGGCTTTGAGAAGCTCCGCAGGACCC
GAGGAGAAGAGAAGGAGGCAGAGAAGGAGAAAAAGCCATGTATGTCTGGAGGCAGAAGGATGACTCTC
AGAGATGACCAACCTGCAAAGCTAGAAAAGGAGCCCAAGACGAGGCCAGAAGAGAACAAGCCAGAGCG
GCCCAGCGGTCGGAAGCCACGGCCCATGGGCATCATTGCCGCCAATGTGGAAAAGCATTATGAGACTG
GCCGGGTCATTGGGGATGGGAACTTTGCTGTCGTGAAGGAGTGCAGACACCGCGAGACCAGGCAGGCC
TATGCGATGAAGATCATTGACAAGTCCAGACTCAAGGGCAAGGAGGACATGGTGGACAGTGAGATCTT
GATCATCCAGAGCCTCTCTCACCCCAACATCGTGAAATTGCATGAAGTCTACGAAACAGACATGGAAA
TCTACCTGATCCTGGAGTACGTGCAGGGAGGAGACCTTTTTGACGCCATCATAGAAAGTGTGAAGTTC
CCGGAGCCCGATGCTGCCCTCATGATCATGGACTTATGCAAAGCCCTCGTCCACATGCACGACAAGAG
CATTGTCCACCGGGACCTCAAGCCGGAAAACCTTTTGGTTCAGCGAAATGAGGACAAATCTACTACCT
TGAAATTGGCTGATTTTGGACTTGCAAAGCATGTGGTGAGACCTATATTTACTGTGTGTGGGACCCCA
ACTTACGTAGCTCCCGAAATTCTTTCTGAGAAAGGTTATGGACTGGAGGTGGACATGTGGGCGGCTGG
CGTGATCCTCTATATCCTGCTGTGTGGCTTTCCCCCATTCCGCAGCCCTGAGAGGGACCAGGACGAGC
TCTTTAACATCATCCAGCTGGGCCACTTTGAGTTCCTCCCCCCTTACTGGGACAATATCTCTGATGCT
GCTAAAGATCTGGTGAGCCGGTTGCTGGTGGTAGACCCCAAAAAGCGCTACACAGCTCATCAGGTTCT
TCAGCACCCCTGGATCGAAACAGCTGGCAAGACCAATACAGTGAAACGACAGAAGCAGGTGTCCCCCA
GCAGCGAGGGTCACTTCCGGAGCCAGCACAAGAGGGTTGTGGAGCAGGTATCATAGTCACCACCTTGG
GAATCTGTCCAGCCCCCAGTTCTGCTCAAGGACAGAGAAAAGGATAGAAGTTTGAGAGAAAAACAATG
AAAGAGGCTTCTTCACATAATTGGTGAATCAGAGGGAGAGACACTGAGTATATTTTAAAGCATATTAA
AAAAATTAAGTCAATGTTAAATGTCACAACATATTTTTAGATTTGTATATTTAAAGCCTTTAATACAT
TTTTGGGGGGTAAGCATTGTCATCAGTGAGGAATTTTGGTAATAATGATGTGTTTTGCTTCCCCTTTG
TAACCAAGTTTATTCTGTACTACAGGAGTGGTGCTTACCAGGGTCTAAACTCCCCCTGTGAGATTAAT
AAGGTGCATTGTGGTCTTTCTGTGTTAATAAAATGTGCTCTGAATAACAGAAAAAAAAAAAAAAAAAA
AAAAAAAAAAAAAAAAAAGG

+TL, NOV64a, CG57109-01

| | | | |
|---|---|---|---|
| Protein Sequence | SEQ ID NO: 956 | 648 aa | MW at 73813.6kD |

MGKEPLTLKSIQVAVEELYPNKARALTLAQHSRAPSPRLRSRLFSKALKGDHRCGETETPKSCSEVAG
CKAAMRHQGKIPEELSLDDRARTQKKWGRGKWEPEPSSKPPREATLEERHARGEKHLGVEIEKTSGEI
IRCEKCKRERELQQSLERERLSLGTSELDMGKGPMYDVEKLVRTRSCRRSPEANPASGEEGWKGDSHR
SSPRNPTQELRRPSKSMDKKEDRGPEDQESHAQGAAKAKKDLVEVLPVTEEGLREVKKDTRPMSRSKH
GGWLLREHQAGFEKLRRTRGEEKEAEKEKKPCMSGGRRMTLRDDQPAKLEKEPKTRPEENKPERPSGR
KPRPMGIIAANVEKHYETGRVIGDGNFAVVKECRHRETRQAYAMKIIDKSRLKGKEDMVDSEILIIQS
LSHPNIVKLHEVYETDMEIYLILEYVQGGDLFDAIIESVKFPEPDAALMIMDLCKALVHMHDKSIVHR
DLKPENLLVQRNEDKSTTLKLADFGLAKHVVRPIFTVCGTPTYVAPEILSEKGYGLEVDMWAAGVILY
ILLCGFPPFRSPERDQDELFNIIQLGHFEFLPPYWDNISDAAKDLVSRLLVVDPKKRYTAHQVLQHPW
IETAGKTNTVKRQKQVSPSSEGHFRSQHKRVVEQVS

| | | |
|---|---|---|
| NOV64b, 260457400 | SEQ ID NO: 957 | 793 bp |

| | | |
|---|---|---|
| DNA Sequence | ORF Start: at 2 | ORF Stop: end of sequence |

CACCGGATCCTATGAGACTGGCCGGGTCATTGGGGATGGGAACTTTGCTGTCGTGAAGGAGTGCAGAC
ACCGCGAGACCAGGCAGGCCTATGCGATGAAGATCATTGACAAGTCCAGACTCAAGGGCAAGGAGGAC
ATGGTGGACAGTGAGATCTTGATCATCCAGAGCCTCTCTCACCCCAACATCGTGAAATTGCATGAAGT
CTACGAAACAGACATGGAAATCTACCTGATCCTGGAGTACGTGCAGGGAGGAGACCTTTTTGACGCCA
TCATAGAAAGTGTGAAGTTCCCGGAGCCCGATGCTGCCCTCATGATCATGGACTTATGCAAAGCCCTC
GTCCACATGCACGACAAGAGCATTGTCCACCGGGACCTCAAGCCGGAAAACCTTTTGGTTCAGCGAAA
TGAGGACAAATCTACTACCTTGAAATTGGCTGATTTTGGACTTGCAAAGCATGTGGTGAGACCTATAT
TTACTGTGTGTGGGACCCCAACTTACGTAGCTCCCGAAATTCTTTCTGAGAAAGGTTATGGACTGGAG
GTGGACATGTGGGCTGCTGGCGTGATCCTCTATATCCTGCTGTGTGGCTTTCCCCCATTCCGCAGCCC
TGAGAGGGACCAGGACGAGCTCTTTAACATCATCCAGCTGGGCCACTTTGAGTTCCTCCCCCCTTACT
GGGACAATATCTCTGATGCTGCTAAAGATCTGGTGAGCCGGTTGCTGGTGGTAGACCCCAAAAAGCGC
TACACAGCTCATCAGGTTCTTCAGCACCCCTGGATCCTCGAGGGC

NOV64b, 260457400

| | | | |
|---|---|---|---|
| Protein Sequence | SEQ ID NO: 958 | 264 aa | MW at 30106.4kD |

TGSYETGRVIGDGNFAVVKECRHRETRQAYAMKIIDKSRLKGKEDMVDSEILIIQSLSHPNIVKLHEV
YETDMEIYLILEYVQGGDLFDAIIESVKFPEPDAALMIMDLCKALVHMHDKSIVHRDLKPENLLVQRN
EDKSTTLKLADFGLAKHVVRPIFTVCGTPTYVAPEILSEKGYGLEVDMWAAGVILYILLCGFPPFRSP
ERDQDELFNIIQLGHFEFLPPYWDNISDAAKDLVSRLLVVDPKKRYTAHQVLQHPWILEG

| | | |
|---|---|---|
| NOV64c, 260457409 | SEQ ID NO: 959 | 625 bp |

| | | |
|---|---|---|
| DNA Sequence | ORF Start: at 2 | ORF Stop: end of sequence |

CACCGGATCCTATGAGACTGGCCGGGTCATTGGGGATGGGAACTTTGCTGTCGTGAAGGAGTGCAGAC
ACCGCGAGACCAGGCAGGCCTATGCGATGAAGATCATTGACAAGTCCAGACTCAAGGGCAAGGAGGAC
ATGGTGGACAGTGAGATCTTGATCATCCAGAGCCTCTCTCACCCCAACATCGTGAAATTGCATGAAGT
CTACGAAACAGACATGGAAATCTACCTGATCCTGGAGTACGTGCAGGGAGGAGACCTTTTTGACGCCA
TCATAGAAAGTGTGAAGTTCCCGGAGCCCGATGCTGCCCTCATGATCATGGACTTATGCAAAGCCCTC
GTCCACATGCACGACAAGAGCATTGTCCACCGGGACCTCAAGCCGGAAAACCTTTTGGTTCAGCGAAA
TGAGGACAAATCTACTACCTTGAAATTGGCTGATTTTGGACTTGCAAAGCATGTGGTGAGACCTATAT
TTACTGTGTGTGGGACCCCAACTTACGTAGCTCCCGAAATTCTTTCTGAGAAAGCTGCTAAAGATCTG
GTGAGCCGGTTGCTGGTGGTAGACCCCAAAAAGCGCTACACAGCTCATCAGGTTCTTCAGCACCCCTG
GATCCTCGAGGGC

NOV64c, 260457409

| | | | |
|---|---|---|---|
| Protein Sequence | SEQ ID NO: 960 | 208 aa | MW at 23605.1kD |

TGSYETGRVIGDGNFAVVKECRHRETRQAYAMKIIDKSRLKGKEDMVDSEILIIQSLSHPNIVKLHEV
YETDMEIYLILEYVQGGDLFDAIIESVKFPEPDAALMIMDLCKALVHMHDKSIVHRDLKPENLLVQRN
EDKSTTLKLADFGLAKHVVRPIFTVCGTPTYVAPEILSEKAAKDLVSRLLVVDPKKRYTAHQVLQHPW
ILEG

| | | |
|---|---|---|
| NOV64d, CG57109-05 | SEQ ID NO: 961 | 2133 bp |

| | | |
|---|---|---|
| DNA Sequence | ORF Start: ATG at 90 | ORF Stop: TAG at 2034 |

TTGACCGTGTGAGGAAACTGTTTAACCTCAAGGGCAGGGAAATCAGGAGCGTCTCTGATTTCTTCAGG
GAAGGGGATGCTTTCATAGCTATGGGCAAAGAACCACTGACACTGAAGAGCATTCAGGTGGCTGTAGA
AGAACTGTACCCCAACAAAGCCCGGGCCCTGACACTGGCCCAGCACAGCCGTGCCCCTTCTCCAAGGC
TGAGGAGCAGGCTGTTTAGCAAGGCTCTGAAAGGAGACCACCGCTGTGGGGAGACCGAGACCCCCAAG
AGCTGCAGCGAAGTTGCAGGATGCAAGGCAGCCATGAGGCACCAGGGGAAGATCCCCGAGGAGCTTTC
ACTAGATGACAGAGCGAGGACCCAGAAGAAGTGGGGGAGGGGGAAATGGGAGCCAGAACCCAGTAGCA
AGCCCCCCAGGGAAGCCACTCTGGAAGAGAGGCACGCAAGGGGAGAGAAGCATCTTGGGGTGGAGATT
GAAAAGACCTCGGGTGAAATTATCAGATGCGAGAAGTGCAAGAGAGAGAGGGAGCTCCAGCAGAGCCT
GGAGCGTGAGAGGCTTTCTCTGGGGACCAGTGAGCTGGATATGGGGAAGGGCCCAATGTATGATGTGG
AGAAGCTGGTGAGGACCAGAAGCTGCAGGAGGTCTCCCGAGGCAAATCCTGCAAGTGGGGAGGAAGGG
TGGAAGGGTGACAGCCACAGGAGCAGCCCCAGGAATCCCACTCAAGAGCTGAGGAGACCCAGCAAGAG
CATGGACAAGAAAGAGGACAGAGGCCCAGAGGATCAAGAAAGCCATGCTCAGGGAGCGGCCAAGGCCA
AGAAGGACCTTGTGGAAGTTCTTCCTGTCACAGAGGAGGGGCTGAGAGAGGTGAAGAAGGACACCAGG
CCCATGAGCAGGAGCAAACATGGTGGCTGGCTCCTGAGAGAGCACCAGGCGGGCTTTGAGAAGCTCCG
CAGGACCCGAGGAGAAGAGAAGGAGGCAGAGAAGGAGAAAAAGCCATGTATGTCTGGAGGCAGAAGGA
TGACTCTCAGAGACGACCAACCTGCAAAGCTAGAAAAGGAGCCCAAGACGAGGCCAGAAGAGAACAAG
CCAGAGCGGCCCAGCGGTCGGAAGCCACGGCCCATGGGCATCATTGCCGCCAATGTGGAAAAGCATTA
TGAGACTGGCCGGGTCATTGGGGATGGGAACTTTGCTGTCGTGAAGGAGTGCAGACACCGCGAGACCA
GGCAGGCCTATGCGATGAAGATCATTGACAAGTCCAGACTCAAGGGCAAGGAGGACATGGTGGACAGT
GAGATCTTGATCATCCAGAGCCTCTCTCACCCCAACATCGTGAAATTGCATGAAGTCTACGAAACAGA
CATGGAAATCTACCTGATCCTGGAGTACGTGCAGGGAGGAGACCTTTTTGACGCCATCATAGAAAGTG
TGAAGTTCCCGGAGCCCGATGCTGCCCTCATGATCATGGACTTATGCAAAGCCCTCGTCCACATGCAC
GACAAGAGCATTGTCCACCGGGACCTCAAGCCGGAAAACCTTTTGGTTCAGCGAAATGAGGACAAATC
TACTACCTTGAAATTGGCTGATTTTGGACTTGCAAAGCATGTGGTGAGACCTATATTTACTGTGTGTG
GGACCCCAACTTACGTAGCTCCCGAAATTCTTTCTGAGAAAGGTTATGGACTGGAGGTGGACATGTGG
GCTGCTGGCGTGATCCTCTATATCCTGCTGTGTGGCTTTCCCCCATTCCGCAGCCCTGAGAGGGACCA
GGACGAGCTCTTTAACATCATCCAGCTGGGCCACTTTGAGTTCCTCCCCCCTTACTGGGACAATATCT
CTGATGCTGCTAAAGATCTGGTGAGCCGGTTGCTGGTGGTAGACCCCAAAAAGCGCTACACAGCTCAT
CAGGTTCTTCAGCACCCCTGGATCGAAACAGCTGGCAAGACCAATACAGTGAAACGACAGAAGCAGGT
GTCCCCCAGCAGCGAGGGTCACTTCCGGAGCCAGCACAAGAGGGTTGTGGAGCAGGTATCATAGTCAC
CACCTTGGGAATCTGTCCAGCCCCCAGTTCTGCTCAAGGACAGAGAAAAGGATAGAAGTTTGAGAGAA
AAACAATGAAAGAGGCTTCTTCACA
NOV64d, CG57109-05

| | | | |
|---|---|---|---|
| Protein Sequence | SEQ ID NO: 962 | 648 aa | MW at 73813.6kD |

MGKEPLTLKSIQVAVEELYPNKARALTLAQHSRAPSPRLRSRLFSKALKGDHRCGETETPKSCSEVAG
CKAAMRHQGKIPEELSLDDRARTQKKWGRGKWEPEPSSKPPREATLEERHARGEKHLGVEIEKISGEI
IRCEKCKRERELQQSLERERLSLGTSELDMGKGPMYDVEKLVRTRSCRRSPEANPASGEEGWKGDSHR
SSPRNPTQELRRPSKSMDKKEDRGPEDQESHAQGAAKAKKDLVEVLPVTEEGLREVKKDTRPMSRSKH
GGWLLREHQAGFEKLRRTRGEEKEAEKEKKPCMSGGRRMTLRDDQPAKLEKEPKTRPEENKPERPSGR
KPRPMGIIAANVEKHYETGRVIGDGNFAVVKECRHRETRQAYAMKIIDKSRLKGKEDMVDSEILIIQS
LSHPNIVKLHEVYETDMEIYLILEYVQGGDLFDAIIESVKFPEPDAALMIMDLCKALVHMHDKSIVHR
DLKPENLLVQRNEDKSTTLKLADFGLAKHVVRPIFTVCGTPTYVAPEILSEKGYGLEVDMWAAGVILY
ILLCGFPPFRSPERDQDELFMIIQLGHFEFLPPYWDNISDAAKDLVSRLLVVDPKKRYTAHQVLQHPW
IETAGKTNTVKRQKQVSPSSEGHFRSQHKRVVEQVS

| | | |
|---|---|---|
| NOV64e, 267253965 | SEQ ID NO: 963 | 1966 bp |

| | | |
|---|---|---|
| DNA Sequence | ORF Start: at 2 | ORF Stop: end of sequence |

CACCGGATCCACCATGGGCAAAGAACCACTGACACTGAAGAGCATTCAGGTGGCTGTAGAAGAACTGT
ACCCCAACAAAGCCCGGGCCCTGACACTGGCCCAGCACAGCCGTGCCCCTTCTCCAAGGCTGAGGAGC
AGGCTGTTTAGCAAGGCTCTGAAAGGAGACCACCGCTGTGGGGAGACCGAGACCCCCAAGAGCTGCAG
CGAAGTTGCAGGATGCAAGGCAGCCATGAGGCACCAGGGGAAGATCCCCGAGGAGCTTTCACTAGATG
ACAGAGCGAGGACCCAGAAGAAGTGGGGGAGGGGGAAATGGGAGCCAGAACCCAGTAGCAAGCCCCCC
AGGGAAGCCACTCTGGAAGAGAGGCACGCAAGGGGAGAGAAGCATCTTGGGGTGGAGATTGAAAAGAC
CTCGGGTGAAATTATCAGATGCGAGAAGTGCAAGAGAGAGAGGGAGCTCCAGCAGAGCCTGGAGCGTG
AGAGGCTTTCTCTGGGGACCAGTGAGCTGGATATGGGGAAGGGCCCAATGTATGATGTGGAGAAGCTG
GTGAGGACCAGAAGCTGCAGGAGGTCTCCCGAGGCAAATCCTGCAAGTGGGGAGGAAGGGTGGAAGGG
TGACAGCCACAGGAGCAGCCCCAGGAATCCCACTCAAGAGCTGAGGAGACCCAGCAAGAGCATGGACA
AGAAAGAGGACAGAGGCCCAGAGGATCAAGAAAGCCATGCTCAGGGAGCGGCCAAGGCCAAGAAGGAC
CTTGTGGAAGTTCTTCCTGTCACAGAGGAGGGGCTGAGAGAGGTGAAGAAGGACACCAGGCCCATGAG
CAGGAGCAAACATGGTGGCTGGCTCCTGAGAGAGCACCAGGCGGGCTTTGAGAAGCTCCGCAGGACCC
GAGGAGAAGAGAAGGAGGCAGAGAAGGAGAAAAAGCCATGTATGTCTGGAGGCAGAAGGATGACTCTC
AGAGACGACCAACCTGCAAAGCTAGAAAAGGAGCCCAAGACGAGGCCAGAAGAGAACAAGCCAGAGCG
GCCCAGCGGTCGGAAGCCACGGCCCATGGGCATCATTGCCGCCAATGTGGAAAAGCATTATGAGACTG
GCCGGGTCATTGGGGATGGGAACTTTGCTGTCGTGAAGGAGTGCAGACACCGCGAGACCAGGCAGGCC
TATGCGATGAAGATCATTGACAAGTCCAGACTCAAGGGCAAGGAGGACATGGTGGACAGTGAGATCTT
GATCATCCAGAGCCTCTCTCACCCCAACATCGTGAAATTGCATGAAGTCTACGAAACAGACATGGAAA
TCTACCTGATCCTGGAGTACGTGCAGGGAGGAGACCTTTTTGACGCCATCATAGAAAGTGTGAAGTTC
CCGGAGCCCGATGCTGCCCTCATGATCATGGACTTATGCAAAGCCCTCGTCCACATGCACGACAAGAG
CATTGTCCACCGGGACCTCAAGCCGGAAAACCTTTTGGTTCAGCGAAATGAGGACAAATCTACTACCT
TGAAATTGGCTGATTTTGGACTTGCAAAGCATGTGGTGAGACCTATATTTACTGTGTGTGGGACCCCA
ACTTACGTAGCTCCCGAAATTCTTTCTGAGAAAGGTTATGGACTGGAGGTGGACATGTGGGCTGCTGG
CGTGATCCTCTATATCCTGCTGTGTGGCTTTCCCCCATTCCGCAGCCCTGAGAGGGACCAGGACGAGC
TCTTTAACATCATCCAGCTGGGCCACTTTGAGTTCCTCCCCCCTTACTGGGACAATATCTCTGATGCT
GCTAAAGATCTGGTGAGCCGGTTGCTGGTGGTAGACCCCAAAAAGCGCTACACAGCTCATCAGGTTCT
TCAGCACCCCTGGATCGAAACAGCTGGCAAGACCAATACAGTGAAACGACAGAAGCAGGTGTCCCCCA
GCAGCGAGGGTCACTTCCGGAGCCAGCACAAGAGGGTTGTGGAGCAGGTATCACTCGAGGGC

NOV64e, 267253965

| | | | |
|---|---|---|---|
| Protein Sequence | SEQ ID NO: 964 | 655 aa | MW at 74459.2kD |

TGSTMGKEPLTLKSIQVAVEELYPNKARALTLAQHSRAPSPRLRSRLFSKALKGDHRCGETETPKSCS
EVAGCKAAMRHQGKIPEELSLDDRARTQKKWGRGKWEPEPSSKPPREATLEERHARGEKHLGVEIEKT
SGEIIRCEKCKRERELQQSLERERLSLGTSELDMGKGPMYDVEKLVRTRSCRRSPEANPASGEEGWKG
DSHRSSPRNPTQELRRPSKSMDKKEDRGPEDQESHAQGAAKAKKDLVEVLPVTEEGLREVKKDTRPMS
RSKHGGWLLREHQAGFEKLRRTRGEEKEAEKEKKPCMSGGRRMTLRDDQPAKLEKEPKTRPEENKPER
PSGRKPRPMGIIAANVEKHYETGRVIGDGNFAVVKECRHRETRQAYANKIIDKSRLKGKEDMVDSEIL
IIQSLSHPNIVKLHEVYETDMEIYLILEYVQGGDLFDAIIESVKFPEPDAALMIMDLCKALVHMHDKS
IVHRDLKPENLLVQRNEDKSTTLKLADFGLAKHVVRPIFTVCGTPTYVAPEILSEKGYGLEVDMWAAG
VILYILLCGFPPFRSPERDQDELFNIIQLGHFEFLPPYWDNISDAAKDLVSRLLVVDPKKRYTAHQVL
QHPWIETAGKTNTVKRQKQVSPSSEGHFRSQHKRVVEQVSLEG

| | | |
|---|---|---|
| NOV64f, 267254000 | SEQ ID NO: 965 | 1621 bp |

| | | |
|---|---|---|
| DNA Sequence | ORF Start: at 2 | ORF Stop: end of sequence |

CACCGGATCCACCATGGGCAAAGAACCACTGACACTGAAGAGCATTCAGGTGGCTGTAGAAGAACTGT
ACCCCAACAAAGCCCGGGCCCTGACACTGGCCCAGCACAGCCGTGCCCCTTCTCCAAGGCTGAGGAGC
AGGCTGTTTAGCAAGGCTCTGAAAGGAGACCACCGCTGTGGGGAGACCGAGACCCCCAAGAGCTGCAG
CGAAGTTGCAGGATGCAAGGCAGCCATGAGGCACCAGGGGAAGATCCCCGAGGAGCTTTCACTAGATG
ACAGAGCGAGGACCCAGAAGAAGTGGGGGAGGGGGAAATGGGAGCCAGAACCCAGTAGCAAGCCCCCC
AGGGAAGCCACTCTGGAAGAGAGGCACGCAAGGGGAGAGAAGCATCTTGGGGTGGAGATTGAAAAGAC
CTCGGGTGAAATTATCAGATGCGAGAAGTGCAAGAGAGAGAGGGAGCTCCAGCAGAGCCTGGAGCGTG
AGAGGCTTTCTCTGGGGACCAGTGAGCTGGATATGGGGAAGGGCCCAATGTATGATGTGGAGAAGCTG
GTGAGGACCAGAAGCTGCAGGAGGTCTCCCGAGGCAAATCCTGCAAGTGGGGAGGAAGGGTGGAAGGG
TGACAGCCACAGGAGCAGCCCCAGGAATCCCACTCAAGAGCTGAGGAGACCCAGCAAGAGCATGGACA
AGAAAGAGGACAGAGGCCCAGAGGATCAAGAAAGCCATGCTCAGGGAGCGGCCAAGGCCAAGAAGGAC
CTTGTGGAAGTTCTTCCTGTCACAGAGGAGGGGCTGAGAGAGGTGAAGAAGGACACCAGGCCCATGAG
CAGGAGCAAACATGGTGGCTGGCTCCTGAGAGAGCACCAGGCGGGCTTTGAGAAGCTCCGCAGGACCC
GAGGAGAAGAGAAGGAGGCAGAGAAGGAGAAAAAGCCATGTATGTCTGGAGGCAGAAGGATGACTCTC
AGAGACGACCAACCTGCAAAGCTAGAAAAGGAGCCCAAGACGAGGCCAGAAGAGAACAAGCCAGAGCG
GCCCAGCGGTCGGAAGCCACGGCCCATGGGCATCATTGCCGCCAATGTGGAAAAGCATTATGAGACTG
GCCGGGTCATTGGGGATGGGAACTTTGCTGTCGTGAAGGAGTGCAGACACCGCGAGACCAGGCAGGCC
TATGCGATGAAGATCATTGACAAGTCCAGACTCAAGGGCAAGGAGGACATGGTGGACAGTGAGATCTT
GATCATCCAGAGCCTCTCTCACCCCAACATCGTGAAATTGCATGAAGTCTACGAAACAGACATGGAAA
TCTACCTGATCCTGGAGTACGTGCAGGGAGGAGACCTTTTTGACGCCATCATAGAAAGTGTGAAGTTC
CCGGAGCCCGATGCTGCCCTCATGATCATGGACTTATGCAAAGCCCTCGTCCACATGCACGACAAGAG
CATTGTCCACCGGGACCTCAAGCCGGAAAACCTTTTGGTTCAGCGAAATGAGGACAAATCTACTACCT
TGAAATTGGCTGATTTTGGACTTGCAAAGCATGTGGTGAGACCTATATTTACTGTGTGTGGGACCCCA
ACTTACGTAGCTCCCGAAATTCTTTCTGAGAAAGGTTATGGACTGGAGCTCGAGGGC

NOV64f, 267254000

| | | | |
|---|---|---|---|
| Protein Sequence | SEQ ID NO: 966 | 540 aa | MW at 61179.2kD |

TGSTMGKEPLTLKSIQVAVEELYPNKARALTLAQHSRAPSPRLRSRLFSKALKGDHRCGETETPKSCS
EVAGCKAAMRHQGKIPEELSLDDRARTQKKWGRGKWEPEPSSKPPREATLEERHARGEKHLGVEIEKT
SGEIIRCEKCKRERELQQSLERERLSLGTSELDMGKGPMYDVEKLVRTRSCRRSPEANPASGEEGWKC
DSHRSSPRNPTQELRRPSKSMDKKEDRGPEDQESHAQGAAKAKKDLVEVLPVTEEGLREVKKDTRPMS
RSKHGGWLLREHQAGFEKLRRTRGEEKEAEKEKKPCMSGGRRMTLRDDQPAKLEKEPKTRPEENKPER
PSGRKPRPMGIIAANVEKHYETGRVIGDGNFAVVKECRHRETRQAYANKIIDKSRLKGKEDMVDSEIL
IIQSLSHPNIVKLHEVYETDMEIYLILEYVQGGDLFDAIIESVKFPEPDAALMIMDLCKALVHMHDKS
IVHRDLKPENLLVQRNEDKSTTLKLADFGLAKHVVRPIFTVCGTPTYVAPEILSEKGYGLELEG

| | | |
|---|---|---|
| NOV64g, 267253987 | SEQ ID NO: 967 | 793 bp |

| | | |
|---|---|---|
| DNA Sequence | ORF Start: at 1 | ORF Stop: at 793 |

ACCGGATCCTATGAGACTGGCCGGGTCATTGGGGATGGGAACTTTGCTGTCGTGAAGGAGTGCAGACA
CCGCGAGACCAGGCAGGCCTATGCGATGAAGATCATTGACAAGTCCAGACTCAAGGGCAAGGAGGACA
TGGTGGACAGTGAGATCTTGATCATCCAGAGCCTCTCTCACCCCAACATCGTGAAATTGCATGAAGTC
TACGAAACAGACATGGAAATCTACCTGATCCTGGAGTACGTGCAGGGAGGAGACCTTTTTGACGCCAT
CATAGAAAGTGTGAAGTTCCCGGAGCCCGATGCTGCCCTCATGATCATGGACTTATGCAAAGCCCTCG
TCCACATGCACGACAAGAGCATTGTCCACCGGGACCTCAAGCCGGAAAACCTTTTGGTTCAGCGAAAT
GAGGACAAATCTACTACCTTGAAATTGGCTGATTTTGGACTTGCAAAGCATGTGGTGAGACCTATATT
TACTGTGTGTGGGACCCCAACTTACGTAGCTCCCGAAATTCTTTCTGAGAAAGGTTATGGACTGGAGG
TGGACATGTGGGCTGCTGGCGTGATCCTCTATATCCTGCTGTGTGGCTTTCCCCCATTCCGCAGCCCT
GAGAGGGACCAGGACGAGCTCTTTAACATCATCCAGCTGGGCCACTTTGAGTTCCTCCCCCCTTACTG
GGACAATATCTCTGATGCTGCTAAAGATCTGGTGAGCCGGTTGCTGGTGGTAGACCCCAAAAAGCGCT
ACACAGCTCATCAGGTTCTTCAGCACCCCTGGATCCTCGAGGGCC

NOV64g, 267253987

| | | | |
|---|---|---|---|
| Protein Sequence | SEQ ID NO: 968 | 264 aa | MW at 30106.4kD |

TGSYETGRVIGDGNFAVVKECRHRETRQAYANKIIDKSRLKGKEDMVDSEILIIQSLSHPNIVKLHEV
YETDMEIYLILEYVQGGDLFDAIIESVKFPEPDAALMIMDLCKALVHMHDKSIVHRDLKPENLLVQRN
EDKSTTLKLADFGLAKHVVRPIFTVCGTPTYVAPEILSEKGYGLEVDMWAAGVILYILLCGFPPFRSP
ERDQDELFNIIQLGHFEFLPPYWDNISDAAKDLVSRLLVVDPKKRYTAHQVLQHPWILEG

| | | |
|---|---|---|
| NOV64h, CG57109-02 | SEQ ID NO: 969 | 2808 bp |

| | | |
|---|---|---|
| DNA Sequence | ORF Start: ATG at 151 | ORF Stop: TAG at 2659 |

TTTACAGAGTCAGGCCTCACCGTGAGAGGGCTCCTGTATTAGTCCCTTTTCATGCTGCTTATAGAGAC
ATACCTGAGACTGGGCAATTTGCAGAGAAAGGTTTTCTTGGACTTACAGTTAGTTCCACGTGGCTGGG
GAAGCCTCACAATCATGGCGGAAGGCAAGGAAGGGCAAGTCCCATCTTACATGGATGGCAGCAGGCAA
AGAGAGAATGAGGAAGATGCAAAAGCGGAAACCCCTGATGTAACCATCAGATCTTATGAGATTTATTC
ACTACCATGGAACAGACAGCAAGGCGTATGTGACCATTCTCTAGAATATTTAAGCTCGAGAATCTCAG
AGCGGAAGCTGCAAGGCTCCTGGCTGCCTGCCAGCCGAGGGAATCTGGAGAAACCATTCCTGGGGCCG
CGTGGCCCCGTCGTGCCCTTGTTCTGCCCTCGGAATGGCCTTCACTCAGCACATCCTGAGAACAGCCC
TCTGAAGCCCAGGGTCGTGACCGTAGTGAAGCTGGGTGGGCAGCGCCCCCGAAAGATCACTCTGCTCC
TCAACAGGCGATCAGTGCAGACGTTCGAGCAGCTCTTAGCTGACATCTCAGAAGCCTTGGGCTCTCCC
AGATGGAAGAATGACCGTGTGAGGAAACTGTTTAACCTCAAGGGCAGGGAAATCAGGAGCGTCTCTGA
TTTCTTCAGGGAAGGGGATGCTTTCATAGCTATGGGCAAAGAACCACTGACACTGAAGAGCATTCAGG
TGGCTGTAGAAGAACTGTACCCCAACAAAGCCCGGGCCCTGACACTGGCCCAGCACAGCCGTGCCCCT
TCTCCAAGGCTGAGGAGCAGGCTGTTTAGCAAGGCTCTGAAAGGAGACCACCGCTGTGGGGAGACCGA
GACCCCCAAGAGCTGCAGCGAAGTTGCAGGATGCAAGGCAGCCATGAGGCACCAGGGGAAGATCCCCG
AGGAGCTTTCACTAGATGACAGAGCGAGGACCCAGAAGAAGTGGGGGAGGGGGAAATGGGAGCCAGAA
CCCAGTAGCAAGCCCCCCAGGGAAGCCACTCTGGAAGAGAGGCACGCAAGGGGAGAGAAGCATCTTGG
GGTGGAGATTGAAAAGACCTCGGGTGAAATTATCAGATGCGAGAAGTGCAAGAGAGAGAGGGAGCTCC
AGCAGAGCCTGGAGCGTGAGAGGCTTTCTCTGGGGACCAGTGAGCTGGATATGGGGAAGGGCCCAATG
TATGATGTGGAGAAGCTGGTGAGGACCAGAAGCTGCAGGAGGTCTCCCGAGGCAAATCCTGCAAGTGG
GGAGGAAGGGTGGAAGGGTGACAGCCACAGGAGCAGCCCCAGGAATCCCACTCAAGAGCTGAGGAGAC
CCAGCAAGAGCATGGACAAGAAAGAGGACAGAGGCCCAGAGGATCAAGAAAGCCATGCTCAGGGAGCA
GCCAAGGCCAAGAAGGACCTTGTGGAAGTTCTTCCTGTCACAGAGGAGGGGCTGAGGGAGGTGAAGAA
GGACACCAGGCCCATGAGCAGGAGCAAACATGGTGGCTGGCTCCTGAGAGAGCACCAGGCGGGCTTTG
AGAAGCTCCGCAGGACCCGAGGAGAAGAGAAGGAGGCAGAGAAGGAGAAAAAGCCATGTATGTCTGGA
GGCAGAAGGATGACTCTCAGAGATGACCAACCTGCAAAGCTAGAAAAGGAGCCCAAGACGAGGCCAGA
AGAGAACAAGCCAGAGCGGCCCAGCGGTCGGAAGCCACGGCCCATGGGCATCATTGCCGCCAATGTGG
AAAAGCATTATGAGACTGGCCGGGTCATTGGGGATGGGAACTTTGCTGTCGTGAAGGAGTGCAGACAC
CGCGAGACCAGGCAGGCCTATGCGATGAAGATCATTGACAAGTCCAGACTCAAGGGCAAGGAGGACAT
GGTGGACAGTGAGATCTTGATCATCCAGAGCCTCTCTCACCCCAACATCGTGAAATTGCATGAAGTCT
ACGAAACAGACATGGAAATCTACCTGATCCTGGAGTACGTGCAGGGAGGAGACCTTTTTGACGCCATC
ATAGAAAGTGTGAAGTTCCCGGAGCCCGATGCTGCCCTCATGATCATGGACTTATGCAAAGCCCTCGT
CCACATGCACGACAAGAGCATTGTCCACCGGGACCTCAAGCCGGAAAACCTTTTGGTTCAGCGAAATG
AGGACAAATCTACTACCTTGAAATTGGCTGATTTTGGACTTGCAAAGCATGTGGTGAGACCTATATTT
ACTGTGTGTGGGACCCCAACTTACGTAGCTCCCGAAATTCTTTCTGAGAAAGGTTATGGACTGGAGGT
GGACATGTGGGCTGCTGGCGTGATCCTCTATATCCTGCTGTGTGGCTTTCCCCCATTCCGCAGCCCTG
AGAGGGACCAGGACGAGCTCTTTAACATCATCCAGCTGGGCCACTTTGAGTTCCTCCCCCCTTACTGG
GACAATATCTCTGATACAGCTGCTAAAGATCTGGTGAGCCGGTTGCTGGTGGTAGACCCCAAAAAGCG
CTACACAGCTCATCAGGTTCTTCAGCACCCCTGGATCGAAACAGCTGGCAAGACCAATACAGTGAAAC
GACAGAAGCAGGTGTCCCCCAGCAGCGAGGGTCACTTCCGGAGCCAGCACAAGAGGGTTGTGGAGCAG
GTATCATAGTCACCACCTTGGGAATCTGTCCAGCCCCCAGTTCTGCTCAAGGACAGAGAAAAGGATAG
AAGTTTGAGAGAAAAACAATGAAAGAGGCTTCTTCACATAATTGGTGAATCAGAGGGAGAGACACTGA
GTATATTTTAAAGCATATTA

NOV64h, CG57109-02

| | | | |
|---|---|---|---|
| Protein Sequence | SEQ ID NO: 970 | 836 aa | MW at 95152.6kD |

MAEGKEGQVPSYMDGSRQRENEEDAKAETPDVTIRSYEIYSLPWNRQQGVCDHSLEYLSSRISERKLQ
GSWLPASRGNLEKPFLGPRGPVVPLFCPRNGLHSAHPENSPLKPRVVTVVKLGGQRPRKITLLLNRRS
VQTFEQLLADISEALGSPRWKNDRVRKLFNLKGREIRSVSDFFREGDAFIAMGKEPLTLKSIQVAVEE
LYPNKARALTLAQHSRAPSPRLRSRLFSKALKGDHRCGETETPKSCSEVAGCKAAMRHQGKIPEELSL
DDRARTQKKWGRGKWEPEPSSKPPREATLEERHARGEKHLGVEIEKTSGEIIRCEKCKRERELQQSLE
RERLSLGTSELDMGKGPMYDVEKLVRTRSCRRSPEANPASGEEGWKGDSHRSSPRNPTQELRRPSKSM
DKKEDRGPEDQESHAQGAAKAKKDLVEVLPVTEEGLREVKKDTRPMSRSKHGGWLLREHQAGFEKLRR
TRGEEKEAEKEKKPCMSGGRRNTLRDDQPAKLEKEPKTRPEENKPERPSGRKPRPMGIIAANVEKHYE
THRVIGDGNFAVVKECRHRETRQAYAMKIIDKSRLKGKEDMVDSEILIIQSLSHPNIVKLHEVYETDM
EIYLILEYVQGGDLFDAIIESVKFPEPDAALMIMDLCKALVHMDDKSIVHRDLKPENLLVQRNEDKST
TLKLADFGLAKHVVRPIFTVCGTPTYVAPEILSEKGYGLEVDMWAAGVILYILLCGFPPFRSPERDQD
ELFNIIQLGHFEFLPPYWDNISDTAAKDLVSRLLVVDPKKRYTAHQVLQHPWIETAGKTNTVKRQKQV
SPSSEGHFRSQHKRVVEQVS

| | | |
|---|---|---|
| NOV64i, CG57109-03 | SEQ ID NO: 971 | 3016 bp |

| | | |
|---|---|---|
| DNA Sequence | ORF Start: ATG at 52 | ORF Stop: TAG at 2617 |

TTTACAGAGTCAGGCCTCACCGTGAGAGGGCTCCTGTATTAGTCCCTTTTCATGCTGCTTATAGAGAC
ATACCTGAGACTGGGCAATTTGCAGAGAAAGGTTTTCTTGGACTTACAGTTAGTTCCACGTGGCTGGG
GAAGCCTCACAATCATGGCGGAAGGCAAGGAAGGGCAAGTCCCATCTTACATGGATGGCAGCAGGCAA
AGAGAGAATGAGGAAGATGCAAAAGCGGAAACCCCTGATGTAACCATCAGATCTTATGAGATTTATTC
ACTACCATGGAACAGACAGCAAGGCGTATGTGACCATTCTCTAGAATATTTAAGCTCGAGAATCTCAG
AGCGGAAGCTGCAAGGCTCCTGGCTGCCTGCCAGCCGAGGGAATCTGGAGAAACCATTCCTGGGGCCG
CGTGGCCCCGTCGTGCCCTTGTTCTGCCCTCGGAATGGCCTTCACTCAGCACATCCTGAGAACAGCCC
TCTGAAGCCCAGGGTCGTGACCGTAGTGAAGCTGGGTGGGCAGCGCCCCCGAAAGATCACTCTGCTCC
TCAACAGGCGATCAGTGCAGACGTTCGAGCAGCTCTTAGCTGACATCTCAGAAGCCTTGGGCTCTCCC
AGATGGAAGAATGACCGTGTGAGGAAACTGTTTAACCTCAAGGGCAGGGAAATCAGGAGCGTCTCTGA
TTTCTTCAGGGAAGGGGATGCTTTCATAGCTATGGGCAAAGAACCACTGACACTGAAGAGCATTCAGG
TGGCTGTAGAAGAACTGTACCCCAACAAAGCCCGGGCCCTGACACTGGCCCAGCACAGCCGTGCCCCT
TCTCCAAGGCTGAGGAGCAGGCTGTTTAGCAAGGCTCTGAAAGGAGACCACCGCTGTGGGGAGACCGA
GACCCCCAAGAGCTGCAGCGAAGTTGCAGGATGCAAGGCAGCTATGAGGCACCAGGGGAAGATCCCCG
AGGAGCTTTCACTAGATGACAGAGCGAGGACCCAGAAGAAGTGGGGGAGGGGGAAATGGGAGCCAGAA
CCCAGTAGCAAGCCCCCCAGGGAAGCCACTCTGGAAGAGAGGCACGCAAGGGGAGAGAAGCATCTTGG
GGTGGAGATTGAAAAGACCTCGGGTGAAATTATCAGATGCGAGAAGTGCAAGAGAGAGAGGGAGCTTC
AGCAGAGCCTGGAGCGTGAGAGGCTTTCTCTGGGGACCAGTGAGCTGGATATGGGGAAGGGCCCAATG
TATGATGTGGAGAAGCTGGTGAGGACCAGAAGCTGCAGGAGGTCTCCCGAGGCAAATCCTGCAAGTGG
GGAGGAAGGGTGGAAGGGTGACAGCCACAGGAGCAGCCCCAGGAATCCCACTCAAGAGCTGAGGAGAC
CCAGCAAGAGCATGGACAAGAAAGAGGACAGAGGCCCAGAGGATCAAGAAAGCCATGCTCAGGGAGCA
GCCAAGGCCAAGAAGGACCTTGTGGAAGTTCTTCCTGTCACAGAGGAGGGGCTGAGGGAGGTGAAGAA
GGACACCAGGCCCATGAGCAGGAGCAAACATGGTGGCTGGCTCCTGAGAGAGCACCAGGCGGGCTTTG
AGAAGCTCCGCAGGACCCGAGGAGAAGAGAAGGAGGCAGAGAAGGAGAAAAAGCCATGTATGTCTGGA
GGCAGAAGGATGACTCTCAGAGATGACCAACCTGCAAAGCTAGAAAAGGAGCCCAAGACGAGGCCAGA
AGAGAACAAGCCAGAGCGGCCCAGCGGTCGGAAGCCACGGCCCATGGGCATCATTGCCGCCAATGTGG
AAAAGCATTATGAGACTGGCCGGGTCATTGGGGATGGGAACTTTGCTGTCGTGAAGGAGTGCAGACAC
CGCGAGACCAGGCAGGCCTATGCGATGAAGATCATTGACAAGTCCAGACTCAAGGGCAAGGAGGACAT
GGTGGACAGTGAGATCTTGCATGAAGTCTACGAAACAGACATGGAAATCTACCTGATCCTGGAGTACG
TGCAGGGAGGAGACCTTTTTGACGCCATCATAGAAAGTGTGAAGTTCCCGGAGCCCGATGCTGCCCTC
ATGATCATGGACTTATGCAAAGCCCTCGTCCACATGCACGACAAGAGCATTGTCCACCGGGACCTCAA
GCCGGAAAACCTTTTGGTTCAGCGAAATGAGGACAAATCTACTACCTTGAAATTGGCTGATTTTGGAC
TTGCAAAGCATGTGGTGAGACCTATATTTACTGTGTGTGGGACCCCAACTTACGTAGCTCCCGAAATT
CTTTCTGAGAAAGGTTATGGACTGGAGGTGGACATGTGGGCTGCTGGCGTGATCCTCTATATCCTGCT
GTGTGGCTTTCCCCCATTCCGCAGCCCTGAGAGGGACCAGGACGAGCTCTTTAACATCATCCAGCTGG
GCCACTTTGAGTTCCTCCCCCCTTACTGGGACAATATCTCTGATGCTGCTAAAGATCTGGTGAGCCGG
TTGCTGGTGGTAGACCCCAAAAAGCGCTACACAGCTCATCAGGTTCTTCAGCACCCCTGGATCGAAAC
AGCTGGCAAGACCAATACAGTGAAACGACAGAAGCAGGTGTCCCCCAGCAGCGAGGGTCACTTCCGGA
GCCAGCACAAGAGGGTTGTGGAGCAGGTATCATAGTCACCACCTTGGGAATCTGTCCAGCCCCCAGTT
CTGCTCAAGGACAGAGAAAAGGATAGAAGTTTGAGAGAAAAACAATGAAAGAGGCTTCTTCACATAAT
TGGTGAATCAGAGGGAGAGACACTGAGTATATTTTAAAGCATATTAAAAAAATTAAGTCAATGTTAAA
TGTCACAACATATTTTTAGATTTGTATATTTAAAGCCTTTAATACATTTTTGGGGGGTAAGCATTGTC
ATCAGTGAGGAATTTTGGTAATAATGATGTGTTTTGCTTCCCCTTTGTAACCAAGTTTATTCTGTACT
ACAGGAGTGGTGCTTACCAGGGTCTAAACTCCCCCTGTGAGATTAATAAGGTGCACTGTGGTCTTTCT
GTGTTAATAAAATGTGCTCTGAAT

NOV64i, CG57109-03

| | | | |
|---|---|---|---|
| Protein Sequence | SEQ ID NO: 972 | 855 aa | MW at 97447.3kD |

MLLIETYLRLGNLQRKVFLDLQLVPRGWGSLTIMAEGKEGQVPSYMDGSRQRENEEDAKAETPDVTIR
SYEIYSLPWNRQQGVCDHSLEYLSSRISERKLQGSWLPASRGNLEKPFLGPRGPVVPLFCPRNGLHSA
HPENSPLKPRVVTVVKLGGQRPRKITLLLNRRSVQTFEQLLADISEALGSPRWKNDRVRKLFNLKGRE
IRSVSDFFREGDAFIAMGKEPLTLKSIQVAVEELYPNKARALTLAQHSRAPSPRLRSRLFSKALKGDH
RCGETETPKSCSEVAGCKAAMRHQGKIPEELSLDDRARTQKKWGRGKWEPEPSSKPPREATLEERHAR
GEKHLGVEIEKTSGEIIRCEKCKRERELQQSLERERLSLGTSELDMGKGPMYDVEKLVRTRSCRRSPE
ANPASGEEGWKGDSHRSSPRNPTQELRRPSKSMDKKEDRGPEDQESHAQGAAKAKKDLVEVLPVTEEG
LREVKKDTRPMSRSKHGGWLLREHQAGFEKLRRTRGEEKEAEKEKKPCMSGGRRNTLRDDQPAKLEKE
PKTRPEENKPERPSGRKPRPMGIIAANVEKHYETGRVIGDGNFAVVKECRHRETRQAYAMKIIDKSRL
KGKEDMVDSEILHEVYETDMEIYLILEYVQGGDLFDAIIESVKFPEPDAALMIMDLCKALVHMHDKSI
VHRDLKPENLLVQRNEDKSTTLKLADFGLAKHVVRPIFTVCGTPTYVAPEILSEKGYGLEVDMWAAGV
ILYILLCGFPPFRSPERDQDELFNIIQLGHFEFLPPYWDNISDAAKDLVSRLLVVDPKKRYTAHQVLQ
HPWIETAGKTNTVKRQKQVSPSSEGHFRSQHKRVVEQVS

| | | |
|---|---|---|
| NOV64j, CG57109-04 | SEQ ID NO: 973 | 2433 bp |

| | | |
|---|---|---|
| DNA Sequence | ORF Start: ATG at 52 | ORF Stop: TAG at 2284 |

TTTACAGAGTCAGGCCTCACCGTGAGAGGGCTCCTGTATTAGTCCCTTTTCATGCTGCTTATAGAGAC
ATACCTGAGACTGGGCAATTTGCAGAGAAAGGTTTTCTTGGACTTACAGTTAGTTCCACGTGGCTGGG
GAAGCCTCACAATCATGGCGGAAGGCAAGGAAGGGCAAGTCCCATCTTACATGGATGGCAGCAGGCAA
AGAGAGAATGAGGAAGATGCAAAAGCGGAAACCCCTGATGTAACCATCAGATCTTATGAGATTTATTC
ACTACCATGGAACAGACAGCAAGGCGTATGTGACCATTCTCTAGAATATTTAAGCTCGAGAATCTCAG
AGCGGAAGCTGCAAGGCTCCTGGCTGCCTGCCAGCCGAGGGAATCTGGAGAAACCATTCCTGGGGCCG
CGTGGCCCCGTCGTGCCCTTGTTCTGCCCTCGGAATGGCCTTCACTCAGCACATCCTGAGAACAGCCC
TCTGAAGCCCAGGGTCGTGACCGTAGTGAAGCTGGGTGGGCAGCGCCCCCGAAAGATCACTCTGCTCC
TCAACAGGCGATCAGTGCAGACGTTCGAGCAGCTCTTAGCTGACATCTCAGAAGCCTTGGGCTCTCCC
AGATGGAAGAATGACCGTGTGAGGAAACTGTTTAACCTCAAGGGCAGGGAAATCAGGAGCGTCTCTGA
TTTCTTCAGGGAAGGGGATGCTTTCATAGCTATGGGCAAAGAACCACTGACACTGAAGAGCATTCAGG
TGGCTGTAGAAGAACTGTACCCCAACAAAGCCCGGGCCCTGACACTGGCCCAGCACAGCCGTGCCCCT
TCTCCAAGGCTGAGGAGCAGGCTGTTTAGCAAGGCTCTGAAAGGAGACCACCGCTGTGGGGAGACCGA
GACCCCCAAGAGCTGCAGCGAAGTTGCAGGATGCAAGGCAGCCATGAGGCACCAGGGGAAGATCCCCG
AGGAGCTTTCACTAGATGACAGAGCGAGGACCCAGAAGAAGTGGGGGAGGGGGAAATGGGAGCCAGAA
CCCAGTAGCAAGCCCCCCAGGGAAGCCACTCTGGAAGAGAGGCACGCAAGGGGAGAGAAGCATCTTGG
GGTGGAGATTGAAAAGACCTCGGGTGAAATTATCAGATGCGAGAAGTGCAAGAGAGAGAGGGAGCTCC
AGCAGAGCCTGGAGCGTGAGAGGCTTTCTCTGGGGACCAGTGAGCTGGATATGGGGAAGGGCCCAATG
TATGATGTGGAGAAAAAGCCATGTATGTCTGGAGGCAGAAGGATGACTCTCAGAGATGACCAACCTGC
AAAGCTAGAAAAGGAGCCCAAGACGAGGCCAGAAGAGAACAAGCCAGAGCGGCCCAGCGGTCGGAAGC
CACGGCCCATGGGCATCATTGCCGCCAATGTGGAAAAGCATTATGAGACTGGCCGGGTCATTGGGGAT
GGGAACTTTGCTGTCGTGAAGGAGTGCAGACACCGCGAGACCAGGCAGGCCTATGCGATGAAGATCAT
TGACAAGTCCAGACTCAAGGGCAAGGAGGACATGGTGGACAGTGAGATCTTGATCATCCAGAGCCTCT
CTCACCCCAACATCGTGAAATTGCATGAAGTTTACGAAACAGACATGGAAATCTACCTGATCCTGGAG
TACGTGCAGGGAGGAGACCTTTTTGACGCCATCATAGAAAGTGTGAAGTTCCCGGAGCCCGATGCTGC
CCTCATGATCATGGACTTATGCAAAGCCCTCGTCCACATGCACGACAAGAGCATTGTCCACCGGGACC
TCAAGCCGGAAAACCTTTTGGTTCAGCGAAATGAGGACAAATCTACTACCTTGAAATTGGCTGATTTT
GGACTTGCAAAGCATGTGGTGAGACCTATATTTACTGTGTGTGGGACCCCAACTTACGTAGCTCCCGA
AATTCTTTCTGAGAAAGGTTATGGACTGGAGGTGGACATGTGGGCTGCTGGCGTGATCCTCTATATCC
TGCTGTGTGGCTTTCCCCCATTCCGCAGCCCTGAGAGGGACCAGGACGAGCTCTTTAACATCATCCAG
CTGGGCCACTTTGAGTTCCTCCCCCCTTACTGGGACAATATCTCTGATACAGCTGCTAAAGATCTGGT
GAGCCGGTTGCTGGTGGTAGACCCCAAAAAGCGCTACACAGCTCATCAGGTTCTTCAGCACCCCTGGA
TCGAAACAGCTGGCAAGACCAATACAGTGAAACGACAGAAGCAGGTGTCCCCCAGCAGCGAGGGTCAC
TTCCGGAGCCAGCACAAGAGGGTTGTGGAGCAGGTATCATAGTCACCACCTTGGGAATCTGTCCAGCC
CCCAGTTCTGCTCAAGGACAGAGAAAAGGATAGAAGTTTGAGAGAAAAACAATGAAAGAGGCTTCTTC
ACATAATTGGTGAATCAGAGGGAGAGACACTGAGTATATTTTAAAGCATATTA

NOV64j, CG57109-04

| | | | |
|---|---|---|---|
| Protein Sequence | SEQ ID NO: 974 | 744 aa | MW at 84729.4kD |

MLLIETYLRLGNLQRKVFLDLQLVPRGWGSLTIMAEGKEGQVPSYMDGSRQRENEEDAKAETPDVTIR
SYEIYSLPWNRQQGVCDHSLEYLSSRISERKLQGSWLPASRGNLEKPFLGPRGPVVPLFCPRNGLHSA
HPENSPLKPRVVTVVKLGGQRPRKITLLINRRSVQTFEQLLADISEALGSPRWKNDRVRKLFNLKGRE
IRSVSDFFREGDAFIAMGKEPLTLKSIQVAVEELYPNKARALTLAQHSRAPSPRLRSRLFSKALKGDH
RCGETETPKSCSEVAGCKAAMRHQGKIPEELSLDDRARTQKKWGRGKWEPEPSSKPPREATLEERHAR
GEKHLGVEIEKTSGEIIRCEKCKRERELQQSLERERLSLGTSELDMGKGPMYDVEKKPCMSGGRRMTL
RDDQPAKLEKEPKTRPEENKPERPSGRKPRPMGIEAANVEKHYETGRVIGDGNFAVVKECRHRETRQA
YAMKIIDKSRLKGKEDMVDSEILIIQSLSHPNIVKLHEVYETDMEIYLILEYVQGGDLFDAIIESVKF
PEPDAALMIMDLCKALVHMHDKSIVHRDLKPENLLVQRNEDKSTTLKLADFGLAKHVVRPIFTVCGTP
TYVAPEILSEKGYGLEVDMWAAGVILYILLCGFPPFRSPERDQDELFNIIQLGHFEFLPPYWDNISDT
AAKDLVSRLLVVDPKKRYTAHQVLQHPWIETAGKTNTVKRQKQVSPSSEGHFRSQHKRVVEQVS

| | | |
|---|---|---|
| NOV64k, CG57109-06 | SEQ ID NO: 975 | 2720 bp |

| | | |
|---|---|---|
| DNA Sequence | ORF Start: ATG at 149 | ORF Stop: TGA at 1826 |

GGACACTGACATGGACTGAAGGAGTAGAAAAGAAGCCTTGGGCTCTCCCAGATGGAAGAATGACCGTG
TGAGGAAACTGTTTAACCTCAAGGGCAGGGAAATCAGGAGCGTCTCTGATTTCTTCAGGGAAGGGGAT
GCTTTCATAGCTATGGGCAAAGAACCACTGACACTGAAGAGCATTCAGGTGGCTGTAGAAGAACTGTA
CCCCAACAAAGCCCGGGCCCTGACACTGGCCCAGCACAGCCGTGCCCCTTCTCCAAGGCTGAGGAGCA
GGCTGTTTAGCAAGGCTCTGAAAGGAGACCACCGCTGTGGGGAGACCGAGACCCCCAAGAGCTGCAGC
GAAGTTGCAGGATGCAAGGCAGCTATGAGGCACCAGGGGAAGATCCCCGAGGAGCTTTCACTAGATGA
CAGAGCGAGGACCCAGAAGAAGTGGGGGAGGGGGAAATGGGAGCCAGAACCCAGTAGCAAGCCCCCCA
GGGAAGCCACTCTGGAAGAGAGGCACGCAAGGGGAGAGAAGCATCTTGGGGTGGAGATTGAAAAGACC
TCGGGTGAAATTATCAGATGCGAGAAGTGCAAGAGAGAGAGGGAGCTTCAGCAGAGCCTGGAGCGTGA
GAGGCTTTCTCTGGGGACCAGTGAGCTGGATATGGGGAAGGGCCCAATGTATGATGTGGAGAAGCTGG
TGAGGACCAGAAGCTGCAGGAGGTCTCCCGAGGCAAATCCTGCAAGTGGGGAGGAAGGGTGGAAGGGT
GACAGCCACAGGAGCAGCCCCAGGAATCCCACTCAAGAGCTGAGGAGACCCAGCAAGAGCATGGACAA
GAAAGAGGACAGAGGCCCAGAGGATCAAGAAAGCCATGCTCAGGGAGCAGCCAAGGCCAAGAAGGACC
TTGTGGAAGTTCTTCCTGTCACAGAGGAGGGGCTGAGGGAGGTGAAGAAGGACACCAGGCCCATGAGC
AGGAGCAAACATGGTGGCTGGCTCCTGAGAGAGCACCAGGCGGGCTTTGAGAAGCTCCGCAGGACCCG
AGGAGAAGAGAAGGAGGCAGAGAAGGAGAAAAAGCCATGTATGTCTGGAGGCAGAAGGATGACTCTCA
GAGATGACCAACCTGCAAAGCTAGAAAAGGAGCCCAAGACGAGGCCAGAAGAGAACAAGCCAGAGCGG
CCCAGCGGTCGGAAGCCACGGCCCATGGGCATCATTGCCGCCAATGTGGAAAAGCATTATGAGACTGG
CCGGGTCATTGGGGATGGGAACTTTGCTGTCGTGAAGGAGTGCAGACACCGCGAGACCAGGCAGGCCT
ATGCGATGAAGATCATTGACAAGTCCAGACTCAAGGGCAAGGAGGACATGGTGGACAGTGAGATCTTG
CATGAAGTCTACGAAACAGACATGGAAATCTACCTGATCCTGGAGTACGTGCAGGGAGGAGACCTTTT
TGACGCCATCATAGAAAGTGTGAAGTTCCCGGAGCCCGATGCTGCCCTCATGATCATGGACTTATGCA
AAGCCCTCGTCCACATGCACGACAAGAGCATTGTCCACCGGGACCTCAAGCCGGAAAACCTTTTGGTT
CAGCGAAATGAGGACAAATCTACTACCTTGAAATTGGCTGATTTTGGACTTGCAAAGCATGTGGTGAG
ACCTATATTTACTGTGTGTGGGACCCCAACTTACGTAGCTCCCGAAATTCTTTCTGAGAAAGGTAAGT
GTTACACATCGATCTGTGGGACTCTAGTTCCCTTACTAACAAATGTTTCATTTGTCATATTTACTAGT
TTTCAATATGGAATAAATCTCAGAGAACTGACACTTAGGCTTGGATTTGGACTTCAATGAAAATATTT
GAAGTAGGCTTGACCAAAGCATGAGAGCTTTCTCCTCATTAGGGCTGCCCTTGTTACAGTCAATGGAT
CAGTGTGTGTGCATGTGTGTGTGTGTGTGTGTGTTTATTGTGTTTAGGCAGGACAGTGAGATGAAAGA
TGATGGAGAATTGGGTGGGGAACTCAAGCAAGCAAGGCTACTTGACCCAAGGCTATCTCTAATAGGAG
AGAATTGAAGCAGTCCTTATGGTACTTGGTTTAAAAATTTCTTCACCAACCTTGCATTTAAAGGAAAA
GGATCCCATTTTCCTCCATGAACTCTATGAATATTTATTACCTACTTGTATATTATGCAAGGATCCAA
TGAGCTGTTTTAGTGACAAACTTTCTAAAACATTTAAAAAGGAAATAATAGTTATGATATGGCTCTAA
ATATATGAATGACTATTTGACTACTGTGGCACTCCAGGAGAAACCAATTTACCCACCATTGGTAAGAT
GGGAAGACTCTCATTGGGTTGCAGGGTTGGTGACAGGGAGAAGGGATGGACGGATAGTTTCCCAGCAG
CAGAAGCATCAGGATAATTAAGATGAGGAGATGGCCAGGGATGGTGGCTCATGCCTGTAATCCCAGCT
CTTTGGGAGGCTGAGGCAGGTGGATCACCTGAGGTCAGGCGTTTGAAACCATCCTGGCCAACATGGTG
AAACCCTGTCTGTACTAAAACTACAAAAAAATTAGCTGGGCGTGGTGGCACATGCCTGTAATCTGAGC
TACTCGGGAGGCTGAGGCAGGAGAATTGCTTGAACCGGGGAGGTGGAGTTTGCAGTGAGCCAAGATCG
TGCCATTGCACTCCAGCCTGGGCAACAAGAGTGAAACTTCATCTCAAAAAAAAAAAAAAAAAAAAAAC

NOV64k, CG57109-06

| | | | |
|---|---|---|---|
| Protein Sequence | SEQ ID NO: 976 | 559 aa | MW at 63436.9kD |

MGKEPLTLKSIQVAVEELYPNKARALTLAQHSRAPSPRLRSRLFSKALKGDHRCGETETPKSCSEVAG
CKAAMRHQGKIPEELSLDDRARTQKKWGRGKWEPEPSSKPPREATLEERHARGEKHLGVEIEKTSGEI
IRCEKCKRERELQQSLERERLSLGTSELDMGKGPMYDVEKLVRTRSCRRSPEANPASGEEGWKGDSHR
SSPRNPTQELRRPSKSMDKKEDRGPEDQESHAQGAAKAKKDLVEVLPVTEEGLREVKKDTRPMSRSKH
GGWLLREHQAGFEKLRRTRGEEKEAEKEKKPCMSGGRRMTLRDDQPAKLEKEPKTRPEENKPERPSGR
KPRPMGIIAANVEKHYETGRVIGDGNFAVVKECRHRETRQAYAMKIIDKSRLKGKEDMVDSEILHEVY
ETDMEIYLILEYVQGGDLFDAIEESVKFPEPDAALMIMDLCKALVHMHDKSIVHRDLKPENLLVQRNE
DKSTTLKLADFGLAKHVVRPIFTVCGTPTYVAPEILSEKGKCYTSICGTLVPLLTNVSFVIFTSFQYG
INLRELTLRLGFGLQ

[0722] A ClustalW comparison of the above protein sequences yields the following sequence alignment shown in Table 64B.

TABLE 64B
Comparison of the NOV64 protein sequences.

| | |
|---|---|
| NOV64a | ------------------------------------------------------------ |
| NOV64b | ------------------------------------------------------------ |
| NOV64c | ------------------------------------------------------------ |
| NOV64d | ------------------------------------------------------------ |
| NOV64e | ------------------------------------------------------------ |
| NOV64f | ------------------------------------------------------------ |
| NOV64g | ------------------------------------------------------------ |
| NOV64h | ---------------------------------MAEGKEGQVPSYMDGSRQRENEEDAKA |
| NOV64i | MLLIETYLRLGNLQRKVFLDLQLVPRGWGSLTIMAEGKEGQVPSYMDGSRQRENEEDAKA |
| NOV64j | MLLIETYLRLGNLQRKVFLDLQLVPRGWGSLTIMAEGKEGQVPSYMDGSRQRENEEDAKA |
| NOV64k | ------------------------------------------------------------ |
| NOV64a | ------------------------------------------------------------ |
| NOV64b | ------------------------------------------------------------ |
| NOV64c | ------------------------------------------------------------ |
| NOV64d | ------------------------------------------------------------ |
| NOV64e | ------------------------------------------------------------ |
| NOV64f | ------------------------------------------------------------ |
| NOV64g | ------------------------------------------------------------ |
| NOV64h | ETPDVTIRSYEIYSLPWNRQQGVCDHSLEYLSSRISERKLQGSWLPASRGNLEKPFLGPR |
| NOV64i | ETPDVTIRSYEIYSLPWNRQQGVCDHSLEYLSSRISERKLQGSWLPASRGNLEKPFLGPR |
| NOV64j | ETPDVTIRSYEIYSLPWNRQQGVCDHSLEYLSSRISERKLQGSWLPASRGNLEKPFLGPR |
| NOV64k | ------------------------------------------------------------ |
| NOV64a | ------------------------------------------------------------ |
| NOV64b | ------------------------------------------------------------ |
| NOV64c | ------------------------------------------------------------ |
| NOV64d | ------------------------------------------------------------ |
| NOV64e | ------------------------------------------------------------ |
| NOV64f | ------------------------------------------------------------ |
| NOV64g | ------------------------------------------------------------ |
| NOV64h | GPVVPLFCPRNGLHSAHPENSPLKPRVVTVVKLGGQRPRKITLLLNRRSVQTFEQLLADI |
| NOV64i | GPVVPLFCPRNGLHSAHPENSPLKPRVVTVVKLGGQRPRKITLLLNRRSVQTFEQLLADI |
| NOV64j | GPVVPLFCPRNGLHSAHPENSPLKPRVVTVVKLGGQRPRKITLLLNRRSVQTFEQLLADI |
| NOV64k | ------------------------------------------------------------ |
| NOV64a | ----------------------------------------MGKEPLTLKSIQVAVEELYP |
| NOV64b | ------------------------------------------------------------ |
| NOV64c | ------------------------------------------------------------ |
| NOV64d | ----------------------------------------MGKEPLTLKSIQVAVEELYP |
| NOV64e | ------------------------------------TGSTMGKEPLTLKSIQVAVEELYP |
| NOV64f | ------------------------------------TGSTMGKEPLTLKSIQVAVEELYP |
| NOV64g | ------------------------------------------------------------ |
| NOV64h | SEALGSPRWKNDRVRKLFNLKGREIRSVSDFFREGDAFIAMGKEPLTLKSIQVAVEELYP |
| NOV64i | SEALGSPRWKNDRVRKLFNLKGREIRSVSDFFREGDAFIAMGKEPLTLKSIQVAVEELYP |
| NOV64j | SEALGSPRWKNDRVRKLFNLKGREIRSVSDFFREGDAFIAMGKEPLTLKSIQVAVEELYP |
| NOV64k | ----------------------------------------MGKEPLTLKSIQVAVEELYP |
| NOV64a | NKARALTLAQHSRAPSPRLRSRLFSKALKGDHRCGETETPKSCSEVAGCKAAMRHQGKIP |
| NOV64b | ------------------------------------------------------------ |
| NOV64c | ------------------------------------------------------------ |
| NOV64d | NKARALTLAQHSRAPSPRLRSRLFSKALKGDNRCGETETPKSCSEVAGCKAAMRHQGKIP |
| NOV64e | NKARALTLAQHSRAPSPRLRSRLFSKALKGDHRCGETETPKSCSEVAGCKAANRHQGKIP |
| NOV64f | NKARALTLAQHSRAPSPRLRSRLFSKALKGDHRCGETETPKSCSEVAGCKAAMRHQGKIP |
| NOV64g | ------------------------------------------------------------ |
| NOV64h | NKARALTLAQHSRAPSPRLRSRLFSKALKGDHRCGETETPKSCSEVAGCKAAMRHQGKIP |
| NOV64i | NKARALTLAQHSRAPSPRLRSRLFSKALKGDHRCGETETPKSCSEVAGCKAANRHQGKIP |
| NOV64j | NKARALTLAQHSRAPSPRLRSRLFSKALKGDHRCGETETPKSCSEVAGCKAANRHQGKIP |
| NOV64k | NKARALTLAQHSRAPSPRLRSRLFSKALKGDHRCGETETPKSCSEVAGCKAANRHQGKIP |
| NOV64a | EELSLDDRARTQKKWGRGKWEPEPSSKPPREATLEERHARGEKHLGVEIEKTSGEIIRCE |
| NOV64b | ------------------------------------------------------------ |
| NOV64c | ------------------------------------------------------------ |
| NOV64d | EELSLDDRARTQKKWGRGKWEPEPSSKPPREATLEERHARGEKHLGVEIEKTSGEIIRCE |
| NOV64e | EELSLDDRARTQKKWGRGKWEPEPSSKPPREATLEERHARGEKHLGVEIEKTSGEIIRCE |
| NOV64f | EELSLDDRARTQKKWGRGKWEPEPSSKPPREATLEERHARGEKHLGVEIEKTSGEIIRCE |
| NOV64g | ------------------------------------------------------------ |
| NOV64h | EELSLDDRARTQKKWGRGKWEPEPSSKPPREATLEERHARGEKHLGVEIEKTSGEIIRCE |
| NOV64i | EELSLDDRARTQKKWGRGKWEPEPSSKPPREATLEERHARGEKHLGVEIEKTSGEIIRCE |
| NOV64j | EELSLDDRARTQKKWGRGKWEPEPSSKPPREATLEERHARGEKHLGVEIEKTSGEIIRCE |
| NOV64k | EELSLDDRARTQKKWGRGKWEPEPSSKPPREATLEERHARGEKHLGVEIEKTSGEIIRCE |
| NOV64a | KCKRERELQQSLERERLSLGTSELDMGKGPMYDVEKLVRTRSCRRSPEANPASGEEGWKG |
| NOV64b | ------------------------------------------------------------ |
| NOV64c | ------------------------------------------------------------ |
| NOV64d | KCKRERELQQSLERERLSLGTSELDMGKGPMYDVEKLVRTRSCRRSPEANPASGEEGWKG |
| NOV64e | KCKRERELQQSLERERLSLGTSELDMGKGPMYDVEKLVRTRSCRRSPEANPASGEEGWKG |
| NOV64f | KCKRERELQQSLERERLSLGTSELDNGKGPMYDVEKLVRTRSCRRSPEANPASGEEGWKG |
| NOV64g | ------------------------------------------------------------ |
| NOV64h | KCKRERELQQSLERERLSLGTSELDNGKGPMYDVEKLVRTRSCRRSPEANPASGEEGWKG |
| NOV64i | KCKRERELQQSLERERLSLGTSELDMGKGPMYDVEKLVRTRSCRRSPEANPASGEEGWKG |
| NOV64j | KCKRERELQQSLERERLSLGTSELDMGKGPMYDVE------------------------- |
| NOV64k | KCKRERELQQSLERERLSLGTSELDMGKGPMYDVEKLVRTRSCRRSPEANPASGEEGWKG |
| NOV64a | DSHRSSPRNPTQELRRPSKSMDKKEDRGPEDQESHAQGAAKAKKDLVEVLPVTEEGLREV |
| NOV64b | ------------------------------------------------------------ |
| NOV64c | ------------------------------------------------------------ |
| NOV64d | DSHRSSPRNPTQELRRPSKSMDKKEDRGPEDQESHAQGAAKAKKDLVEVLPVTEEGLREV |
| NOV64e | DSHRSSPRNPTQELRRPSKSMDKKEDRGPEDQESHAQGAAKAKKDLVEVLPVTEEGLREV |
| NOV64f | DSHRSSPRNPTQELRRPSKSMDKKEDRGPEDQESHAQGAAKAKKDLVEVLPVTEEGLREV |
| NOV64g | ------------------------------------------------------------ |
| NOV64h | DSHRSSPRNPTQELRRPSKSMDKKEDRGPEDQESHAQGAAKAKKDLVEVLPVTEEGLREV |
| NOV64i | DSHRSSPRNPTQELRRPSKSMDKKEDRGPEDQESHAQGAAKAKKDLVEVLPVTEEGLREV |
| NOV64j | ------------------------------------------------------------ |
| NOV64k | DSHRSSPRNPTQELRRPSKSMDKKEDRGPEDQESHAQGAAKAKKDLVEVLPVTEEGLREV |
| NOV64a | KKDTRPMSRSKHGGWLLREHQAGFEKLRRTRGEEKEAEKEKKPCMSGGRRNTLRDDQPAK |
| NOV64b | ------------------------------------------------------------ |
| NOV64c | ------------------------------------------------------------ |
| NOV64d | KKDTRPMSRSKHGGWLLREHQAGFEKLRRTRGEEKEAEKEKKPCMSGGRRMTLRDDQPAK |
| NOV64e | KKDTRPMSRSKHGGWLLREHQAGFEKLRRTRGEEKEAEKEKKPCMSGGRRMTLRDDQPAK |
| NOV64f | KKDTRPMSRSKHGGWLLREHQAGFEKLRRTRGEEKEAEKEKKPCMSGGRRMTLRDDQPAK |
| NOV64g | ------------------------------------------------------------ |
| NOV64h | KKDTRPMSRSKHGGWLLREHQAGFEKLRRTRGEEKEAEKEKKPCMSGGRRMTLRDDQPAK |
| NOV64i | KKDTRPMSRSKHGGWLLREHQAGFEKLRRTRGEEKEAEKEKKPCMSGGRRMTLRDDQPAK |
| NOV64j | ----------------------------------------KKPCMSGGRRMTLRDDQPAK |
| NOV64k | KKDTRPMSRSKHGGWLLREHQAGFEKLRRTRGEEKEAEKEKKPCMSGGRRNTLRDDQPAK |
| NOV64a | LEKEPKTRPEENKPERPSGRKPRPMGIIAANVEKHYETGRVIGDGNFAVVKECRHRETRQ |
| NOV64b | --------------------------------TGSYETGRVIGDGNFAVVKECRHRETRQ |
| NOV64c | --------------------------------TGSYETGRVIGDGNFAVVKECRHRETRQ |
| NOV64d | LEKEPKTRPEENKPERPSGRKPRPMGIIAANVEKHYETGRVIGDGNFAVVKECRHRETRQ |
| NOV64e | LEKEPKTRPEENKPERPSGRKPRPMGIIAANVEKHYETGRVIGDGNFAVVKECRHRETRQ |
| NOV64f | LEKEPKTRPEENKPERPSGRKPRPMGIIAANVEKHYETGRVIGDGNFAVVKECRHRETRQ |
| NOV64g | --------------------------------TGSYETGRVIGDGNFAVVKECRHRETRQ |
| NOV64h | LEKEPKTRPEENKPERPSGRKPRPMGIIAANVEKHYETGRVIGDGNFAWKECRHRETRQ |
| NOV64i | LEKEPKTRPEENKPERPSGRKPRPMGIIAANVEKHYETGRVIGDGNFAVVKECRHRETRQ |
| NOV64j | LEKEPKTRPEENKPERPSGRKPRPMGIIAANVEKHYETGRVIGDGNFAVVKECRHRETRQ |
| NOV64k | LEKEPKTRPEENKPERPSGRKPRPMGIIAANVEKHYETGRVIGDGNFAVVKECRHRETRQ |
| NOV64a | AYAMKIIDKSRLKGKEDMVDSEILIIQSLSHPNIVKLHEVYETDMEIYLILEYVQGGDLF |
| NOV64b | AYANKIIDKSRLKGKEDMVDSEILIIQSLSHPNIVKLHEVYETDMEIYLILEYVQGGDLF |
| NOV64c | AYAMKIIDKSRLKGKEDMVDSEILIIQSLSHPNIVKLHEVYETDMEIYLILEYVQGGDLF |
| NOV64d | AYAMKIIDKSRLKGKEDMVDSEILIIQSLSHPNIVKLHEVYETDMEIYLILEYVQGGDLF |
| NOV64e | AYAMKIIDKSRLKGKEDMVDSEILIIQSLSHPNIVKLHEVYETDMEIYLILEYVQGGDLF |
| NOV64f | AYAMKIIDKSRLKGKEDMVDSEILIIQSLSHPNIVKLHEVYETDMEIYLILEYVQGGDLF |
| NOV64g | AYAMKIIDKSRLKGKEDMVDSEILIIQSLSHPNIVKLHEVYETDMEIYLILEYVQGGDLF |
| NOV64h | AYAMKIIDKSRLKGKEDMVDSEILIIQSLSHPNIVKLHEVYETDMEIYLILEYVQGGDLF |
| NOV64i | AYAMKIIDKSRLKGKEDMVDSEI-------------LHEVYETDMEIYLILEYVQGGDLF |
| NOV64j | AYAMKIIDKSRLKGKEDMVDSEILIIQSLSHPNIVKLHEVYETDMEIYLILEYVQGGDLF |
| NOV64k | AYANKIIDKSRLKGKEDMVDSEIL-------------HEVYETDMEIYLILEYVQGGDLF |
| NOV64a | DAIIESVKFPEPDAALMIMDLCKALVHMHDKSIVHRDLKPENLLVQRNEDKSTTLKLADF |
| NOV64b | DAIIESVKFPEPDAALMIMDLCKALVHMHDKSIVHRDLKPENLLVQRNEDKSTTLKLADF |
| NOV64c | DAIIESVKFPEPDAALMIMDLCKALVHMHDKSIVHRDLKPENLLVQRNEDKSTTLKLADF |
| NOV64d | DAIIESVKFPEPDAALMIMDLCKALVHMHDKSIVHRDLKPENLLVQRNEDKSTTLKLADF |
| NOV64e | DAIIESVKFPEPDAALMIMDLCKALVHMHDKSIVHRDLKPENLLVQRNEDKSTTLKLADF |
| NOV64f | DAIIESVKFPEPDAALMIMDLCKALVHMHDKSIVHRDLKPENLLVQRNEDKSTTLKLADF |
| NOV64g | DAIIESVKFPEPDAALMIMDLCKALVHMHDKSIVHRDLKPENLLVQRNEDKSTTLKLADF |
| WOV64h | DAIIESVKFPEPDAALMIMDLCKALVHMHDKSIVHRDLKPENLLVQRNEDKSTTLKLADF |
| NOV64i | DAIIESVKFPEPDAALMIMDLCKALVHMHDKSIVHRDLKPENLLVQRNEDKSTTLKLADF |
| NOV64j | DAIIESVKFPEPDAALMIMDLCKALVHMHDKSIVHRDLKPENLLVQRNEDKSTTLKLADF |
| NOV64k | DAIIESVKFPEPDAALMIMDLCKALVHMHDKSIVHRDLKPENLLVQRNEDKSTTLKLADF |
| NOV64a | GLAKHVVRPIFTVCGTPTYVAPEILSEKGYGLEVDMWAAGVILYILLCGFPPFRSPERDQ |
| NOV64b | GLAKHVVRPIFTVCGTPTYVAPEILSEKGYGLEVDMWAAGVILYILLCGFPPFRSPERDQ |
| NOV64c | GLAKHVVRPIFTVCGTPTYVAPEILSEK-------------------------------- |
| NOV64d | GLAKHVVRPIFTVCGTPTYVAPEILSEKGYGLEVDMWAAGVILYILLCGFPPFRSPERDQ |
| NOV64e | GLAKHVVRPIFTVCGTPTYVAPEILSEKGYGLEVDMWAAGVILYILLCGFPPFRSPERDQ |
| NOV64f | GLAKHVVRPIFTVCGTPTYVAPEILSEKG------------------------------- |
| NOV64g | GLAKHVVRPIFTVCGTPTYVAPEILSEKGYGLEVDMWAAGVILYILLCGFPPFRSPERDQ |
| NOV64h | GLAKHVVRPIFTVCGTPTYVAPEILSEKGYGLEVDMWAAGVILYILLCGFPPFRSPERDQ |
| NOV64i | GLAKHVVRPIFTVCGTPTYVAPEILSEKGYGLEVDMWAAGVILYILLCGFPPFRSPERDQ |
| NOV64j | GLAKHVVRPIFTVCGTPTYVAPEILSEKGYGLEVDMWAAGVILYILLCGFPPFRSPERDQ |
| NOV64a | DELFNIIQLGHFEFLPPYWDNISD-AAKDLVSRLLVVDPKKRYTAHQVLQHPWIETAGKT |
| NOV64b | DELFNIIQLGHFEFLPPYWDNISD-AAKDLVSRLLVVDPKKRYTAHQVLQHPWILEG--- |
| NOV64c | ---------------------AAK----DLVSRLLVVDPKKRYTAHQVLQHPWILEG--- |
| NOV64d | DELFNIIQLGHFEFLPPYWDNISD-AAKDLVSRLLVVDPKKRYTAHQVLQHPWIETAGKT |
| NOV64e | DELFNIIQLGHFEFLPPYWDNISD-AAKDLVSRLLVVDPKKRYTAHQVLQHPWIETAGKT |
| NOV64f | -------------------------------YGLELEG---------------------- |
| NOV64g | DELFNIIQLGHFEFLPPYWDNISD-AAKDLVSRLLVVDPKKRYTAHQVLQHPWILEG--- |
| NOV64h | DELFNIIQLGHFEFLPPYWDNISDTAAKDLVSRLLVVDPKKRYTAHQVLQHPWIETAGKT |
| NOV64i | DELFNIIQLGHFEFLPPYWDNISD-AAKDLVSRLLVVDPKKRYTAHQVLQHPWIETAGKT |
| NOV64j | DELFNIIQLGHFEFLPPYWDNISDTAAKDLVSRLLVVDPKKRYTAHQVLQHPWIETAGKT |
| NOV64k | --------T-----LVPLLTNVSFVIFTSFQYGINLRELTLRLGFGLQ------------ |
| NOV64a | NTVKRQKQVSPSSEGHFRSQHKRVVEQVS--- |
| NOV64b | -------------------------------- |
| NOV64c | -------------------------------- |
| NOV64d | NTVKRQKQVSPSSEGHFRSQHKRVVEQVS--- |
| NOV64e | NTVKRQKQVSPSSEGHFRSQHKRVVEQVSLEG |
| NOV64f | -------------------------------- |
| NOV64g | -------------------------------- |
| NOV64h | NTVKRQKQVSPSSEGHFRSQHKRVVEQVS--- |
| NOV64i | NTVKRQKQVSPSSEGHFRSQHKRVVEQVS--- |
| NOV64j | NTVKRQKQVSPSSEGHFRSQHKRVVEQVS--- |
| NOV64k | -------------------------------- |
| NOV64a | (SEQ ID NO: 956) |
| NOV64b | (SEQ ID NO: 958) |
| NOV64c | (SEQ ID NO: 960) |
| NOV64d | (SEQ ID NO: 962) |
| NOV64e | (SEQ ID NO: 964) |
| NOV64f | (SEQ ID NO: 966) |
| NOV64g | (SEQ ID NO: 968) |
| NOV64h | (SEQ ID NO: 970) |
| NOV64i | (SEQ ID NO: 972) |
| NOV64j | (SEQ ID NO: 974) |
| NOV64k | (SEQ ID NO: 976) |

[0723] Further analysis of the NOV64a protein yielded the following properties shown in Table 64C.

TABLE 64C
Protein Sequence Properties NOV64a

| | |
|---|---|
| SignalP analysis: | No Known Signal Sequence Indicated |
| PSORT II analysis: | |

```
PSG: a new signal peptide prediction method
    N-region: length 9; pos.chg 2; neg.chg 1
    H-region: length 6; peak value −5.22
    PSG score: −9.62
GvH: von Heijne's method for signal seq. recognition
    GvH score (threshold: −2.1): −7.85
    possible cleavage site: between 34 and 35
>>> Seems to have no N-terminal signal peptide
ALOM: Klein et al's method for TM region allocation
    Init position for calculation: 1
    Tentative number of TMS(s) for the threshold 0.5: 1
    Number of TMS(s) for threshold 0.5: 1
```

| | | |
|---|---|---|
| INTEGRAL | Likelihood = −3.29 | Transmembrane 534-550 |

| | |
|---|---|
| PERIPHERAL | Likelihood = 4.72 (at 452) |

```
    ALOM score: −3.29 (number of TMSs: 1)
MTOP: Prediction of membrane topology (Hartmann et al.)
    Center position for calculation: 541
    Charge difference: 1.0 C(−2.0) − N(−3.0)
    C > N: C-terminal side will be inside
>>> Single TMS is located near the C-terminus
>>> membrane topology: type Nt (cytoplasmic tail 1 to 533)
MITDISC: discrimination of mitochondrial targeting seq
```

| | | | |
|---|---|---|---|
| R content: | 0 | Hyd Moment(75): | 9.28 |
| Hyd Moment(95): | 7.07 | G content: | 1 |
| D/E content: | 2 | S/T content: | 2 |
| Score: −6.37 | | | |

```
Gavel: prediction of cleavage sites for mitochondrial preseq
    R-10 motif at 52 SRL FS
NUCDISC: discrimination of nuclear localization signals
    pat4: RKPR (4) at 340
    pat4: PKKR (4) at 598
    pat7: PSGRKPR (3) at 337
    pat7: PKKRYTA (5) at 598
    bipartite: none
    content of basic residues: 17.9%
    NLS Score: 0.72
KDEL: ER retention motif in the C-terminus: none
ER Membrane Retention Signals: none
SKL: peroxisomal targeting signal in the C-terminus: none
PTS2: 2nd peroxisomal targeting signal: none
VAC: possible vacuolar targeting motif: none
RNA-binding motif: none
Actinin-type actin-binding motif:
    type 1: none
    type 2: none
NMYR: N-myristoylation pattern: none
Prenylation motif: none
memYQRL: transport motif from cell surface to Golgi: none
Tyrosines in the tail: too long tail
Dileucine motif in the tail: found
    LL at 276
    LL at 483
checking 63 PROSITE DNA binding motifs: none
checking 71 PROSITE ribosomal protein motifs: none
checking 33 PROSITE prokaryotic DNA binding motifs: none
NNCN: Reinhardt's method for Cytoplasmic/Nuclear discrimination
    Prediction: nuclear
    Reliability: 89
COIL: Lupas's algorithm to detect coiled-coil regions
    total: 0 residues
Final Results (k = 9/23):
    30.4%: nuclear
    26.1%: cytoplasmic
    13.0%: Golgi
      8.7%: mitochondrial
      8.7%: vesicles of secretory system
      8.7%: endoplasmic reticulum
      4.3%: peroxisomal
>> prediction for CG57109-01 is nuc (k = 23)
```

[0724] A search of the NOV64a protein against the Geneseq database, a proprietary database that contains sequences published in patents and patent publication, yielded several homologous proteins shown in Table 64D.

TABLE 64D
Geneseq Results for NOV64a

| | | NOV64a | Identities/ | |
|---|---|---|---|---|
| | | Residues/ | Similarities for | |
| Geneseq | Protein/Organism/Length | Match | the Matched | Expect |
| Identifier | [Patent #, Date] | Residues | Region | Value |
| AAE24133 | Human kinase (PKIN)-4 protein - | 1 . . . 648 | 648/648 (100%) | 0.0 |
| | Homo sapiens, 835 aa. | 188 . . . 835 | 648/648 (100%) | |
| | [WO200233099-A2, 25-APR- | | | |
| | 2002] | | | |
| ABB82471 | Human serine/threonine protein | 1 . . . 648 | 648/648 (100%) | 0.0 |
| | kinase - Homo sapiens, 835 aa. | 188 . . . 835 | 648/648 (100%) | |
| | [WO200270678-A2, 12-SEP- | | | |
| | 2002] | | | |
| AAO15419 | Novel human kinase protein 2 - | 1 . . . 648 | 647/648 (99%) | 0.0 |
| | Homo sapiens, 817 aa. | 170 . . . 817 | 648/648 (99%) | |
| | [WO200242438-A2, 30-MAY- | | | |
| | 2002] | | | |
| ABB82474 | Human serine/threonine protein | 1 . . . 484 | 484/484 (100%) | 0.0 |
| | kinase fragment - Homo sapiens, | 188 . . . 671 | 484/484 (100%) | |
| | 751 aa. [WO200270678-A2, 12- | | | |
| | SEP-2002] | | | |
| AAY42696 | Rat serine-threonine protein | 1 . . . 648 | 495/649 (76%) | 0.0 |
| | kinase PK80 sequence - Rattus | 98 . . . 733 | 535/649 (82%) | |
| | norvegicus, 733 aa. | | | |
| | [WO9950395-A1, 07-OCT- | | | |
| | 1999] | | | |

[0725] In a BLAST search of public sequence databases, the NOV64a protein was found to have homology to the proteins shown in the BLASTP data in Table 64E.

TABLE 64E
Public BLASTP Results for NOV64a

| | | NOV64a | Identities/ | |
|---|---|---|---|---|
| Protein | | Residues/ | Similarities for | |
| Accession | | Match | the Matched | Expect |
| Number | Protein/Organism/Length | Residues | Portion | Value |
| Q9C098 | Hypothetical protein KIAA1765 - | 41 . . . 648 | 608/608 (100%) | 0.0 |
| | Homo sapiens (Human), 608 aa | 1 . . . 608 | 608/608 (100%) | |
| | (fragment). | | | |
| Q8BWQ5 | Hypothetical eukaryotic protein | 1 . . . 632 | 467/633 (73%) | 0.0 |
| | kinase containing protein - Mus | 1 . . . 619 | 510/633 (79%) | |
| | musculus (Mouse), 619 aa. | | | |
| O15075 | Serine/threonine-protein kinase | 348 . . . 641 | 155/294 (52%) | 3e−87 |
| | DCAMKL1 (EC 2.7.1.-) | 382 . . . 674 | 212/294 (71%) | |
| | (Doublecortin-like and CAM | | | |
| | kinase-like 1) - Homo sapiens | | | |
| | (Human), 740 aa. | | | |
| Q8BQN2 | Double cortin and | 348 . . . 641 | 154/294 (52%) | 1e−86 |
| | calcium/calmodulin-dependent | 75 . . . 367 | 212/294 (71%) | |
| | protein kinase-like 1 - Mus | | | |
| | musculus (Mouse), 452 aa. | | | |
| Q8CCN4 | Double cortin and | 348 . . . 641 | 154/294 (52%) | 1e−86 |
| | calcium/calmodulin-dependent | 91 . . . 383 | 212/294 (71%) | |
| | protein kinase-like 1 - Mus | | | |
| | musculus (Mouse), 449 aa. | | | |

[0726] PFam analysis indicates that the NOV64a protein contains the domains shown in the Table 64F.

TABLE 64F
Domain Analysis of NOV64a

| | | Identities/ | |
|---|---|---|---|
| | NOV64a | Similarities | |
| | Match | for the | |
| Pfam Domain | Region | Matched Region | Expect Value |
| pkinase | 356 . . . 613 | 109/301 (36%) | 8.1e-102 |
| | | 220/301 (73%) | |

### Example 65

[0727] The NOV65 clone was analyzed, and the nucleotide and encoded polypeptide sequences are shown in Table 65A.

TABLE 65A
NOV65 Sequence Analysis

| | | |
|---|---|---|
| NOV65a, CG57399-04 | SEQ ID NO: 977 | 947 bp |

| | | |
|---|---|---|
| DNA Sequence | ORF Start: ATG at 7 | ORF Stop: TGA at 937 |

GACCTGATGAAGAATGACACGAGGATACACTTTCAGGAAGACTGGAAGATAATAACCCTGTTTATAGG
CGGCAATGACCTCTGTGATTTCTGCAATGATCTGGTCCACTATTCTCCCCAGAACTTCACAGACAACA
TTGGAAAGGCCCTGGACATCCTCCATGCTGAGGTTCCTCGGGCATTTGTGAACCTGGTGACGGTGCTT
GAGATCGTCAACCTGAGGGAGCTGTACCAGGAGAAAAAAGTCTACTGCCCAAGGATGATCCTCAGGTC
TCTGTGTCCCTGTGTCCTGAAGTTTGATGATAACTCAACAGAACTTGCTACCCTCATCGAATTCAACA
AGAAGTTTCAGGAGAAGACCCACCAACTGATTGAGAGTGGGCGATATGACACAAGGGAAGATTTTACT
GTGGTTGTGCGGCCGTTCTTTGAAAACGTGGACATGCCAAAGACCTCGGAAGGATTGCCTGACAACTC
TTTCTTCGCTCCTGACTGTTTCCACTTCAGCAGCAAGTCTCACTCCCGAGCAGCCAGTGCTCTCTGGA
ACAATATGCTGGAGCCTGTTGGCCAGAAGACGACTCGTCATAAGTTTGAAAACAAGATCAATATCACA
TGTCCGAACCAGGTCCAGCCGTTTCTGAGGACCTACAAGAACAGCATGCAGGGTCATGGGACCTGGCT
GCCATGCAGGGACAGAGCCCCTTCTGCCTTGCACCCTACCTCAGTGCATGCCCTGAGACCTGCAGACA
TCCAAGTTGTGGCTGCTCTGGGGGATTCTCTGACCGCTGGCAATGGAATTGGCTCCAAACCAGACGAC
CTCCCCGATGTCACCACACAGTATCGGGGACTGTCATACAGAGAAAGTAAACCAGGGTTCTTATCAGA
CTCCTGGGTCAGCAAATCCAACAGGAAATGCACCAGAAAAGCACCAAATCCCTGAATCTACAC

| | |
|---|---|
| NOV65a, CG57399-04 | +TL,14 |

| | | | |
|---|---|---|---|
| Protein Sequence | SEQ ID NO: 978 | 310 aa | MW at 35268.7kD |

MKNDTRIHFQEDWKIITLFIGGNDLCDFCNDLVHYSPQNFTDNIGKALDILHAEVPRAFVNLVTVLEI
VNLRELYQEKKVYCPRMILRSLCPCVLKFDDNSTELATLIEFNKKFQEKTHQLIESGRYDTREDFTVV
VRPFFENVDMPKTSEGLPDNSFFAPDCFHFSSKSHSRAASALWNNMLEPVGQKTTRHKFENKINITCP
NQVQPFLRTYKNSMQGHGTWLPCRDRAPSALHPTSVHALRPADIQVVAALGDSLTAGNGIGSKPDDLP
DVTTQYRGLSYRESKPGFLSDSWVSKSNRKCTRKAPNP

| | | |
|---|---|---|
| NOV65b, CG57399-01 | SEQ ID NO: 979 | 4268 bp |

| | | |
|---|---|---|
| DNA Sequence | ORF Start: ATG at 1 | ORF Stop: TAG at 4258 |

ATGACCTGGGACACAGCTCTCTGGACCTCAGTTTTTCTGATTGGGCTCCTTCCTACCCTTGGTTTCGC
TAATTGCATCCTCCAGACTTCTGGTAAAATGTGTACTTTAAGAGGTAGATACCCCCAGCCCCCACAAC
CACCTCTCTGCTTGTCTCCCCTAGTCCACCAGCTCCGACCAGCAGACATCAAAGTGGTGGCCGCCCTG
GGTAATGATGAAACCTTCCAGGAAAGTGGTGCAGGGCAGCTAAGTGAGCCTGACCCCAGGCAGTGGTC
CTGGCCACAGGCCTGCTTGCCTGGGGTAAAAAAGGAAATGCAAGATGTGGTAGGTGAGAGAACGCCGA
GCCGTCGCCGCAGCCTCCGCCGCCGAGAAGCCCTTGTTCCCGCTGCTGGGAAGGAGAGTCTGTGCCGA
CAAGATATTTTCATTTCCTTGTTGGAAATTATCAAGCATTTTCCTCCCTCCCCTCAGGACATCAACCT
GGAGAAAGACTGGAAGCTGGTCACACTCTTCATTGGGGTCAACGACTTGTGTCATTACTGTCCACTTG
TTCAGGGCCCCGTTATAGACCTGGGTGGGATGGATACCCTCCACTCCCTGCAGCTCCCAAGGGCTTTC
GTCAACGTGGTGGAGGTCATGGAGCTGGCTAGCCTGTACCAGGGCCAAGGCGGGAAATGTGCCATGCT
GGCAGCTCAGGAAGCCTGGAACAGCCTCCTGGCCTCCAGCAGGTACAGTGAGCAGGAGTCCTTCACCG
TGGTTTTCCAGCCTTTCTTCTATGAGACCACCCCATCTGACCCCCGACTCCAGGATTCTACCACGCTG
GCCTGGCATCTCTGGAATAGGATGATGGAGCCAGCAGGAGAGAAAGATGAGCCATTGAGTGTAAAACA
CGGGAGGCCAATGAAGTGTCCCTCTCAGGAGAGCCCCTATCTGTTCAGCTACAGAAACAGCAACTACC
TGACCAGACTGCAGAAACCCCAAGACAAGCTTGTAAGAGAAGGAGCGGAAATCAGATGTCCTGACAAA
GACCCCTCCGATACGGTTCCCACCTCAGTTCATAGGCTGAAGCCGGCTGACATCAACGTAATTGGAGC
CCTGGGTGACTCTCTCACGGCAGGCAATGGGGCCGGGTCCACACCTGGGAACGTCTTGGACGTCTTGA
CTCAGTACCGAGGCCTGTCCTGGAGCGTCGGCGGAGATGAGAACATCGGCACCGTTACCACCCTGGCA
GACATCCTCCGGGAATTCAACCCTTCCCTGAAGGGCTTCTCTGTTGGCACTGGGAAAGAAACCAGTCC
TAATGCCTTCTTAAACCAGGCTGTGGCAGGAGGCCGAGCTGAGCAGGCCAGGAGGCTGGTGGACCTGA
TGAAGAATGACACGAGGATACACTTTCAGGAAGACTGGAAGATAATAACCCTGTTTATAGGCGGCAAT
GACCTCTGTGATTTCTGCAATGATCTGGTACACTATTCTCCCCAGAACTTCACAGACAACATTGGAAA
GGCCCTGGACATCCTCCATGCTGAGTCTCAGGTTCCTCGGGCATTTGTGAACCTGGTGACGGTGCTTG
AGATCGTCAACCTGAGGGAGCTGTACCAGGAGAAAAAAGTCTACTGCCCAAGGATGATCCTCAGGTCA
CTGTGTCCCTGTGTCCTGAAGTTTGATGATAACTCAACAGAACTTGCTACCCTCATCGAATTCAACAA
GAAGTTTCAGGAGAAGACCCACCAACTGATTGAGAGTGGGCGATATGACACAAGGGAAGATTTTACTG
TGGTTGTGCAGCCGTTCTTTGAAAACGTGGACATGCCAAAGACCCAGGAAGGATTGCCTGACAACTCT
TTCTTCGCTCCTGACTGTTTCCACTTCAGCAGCAAGTCTCACTCCCGAGCAGCCAGTGCTCTCTGGAA
CAATATGCTGGAGCCTGTTGGCCAGAAGACGACTCGTCATAAGTTTGAAAACAAGATCAATATCACAT
GTCCGTCACAGGTCCAGCCGTTTCTGAGGACCTACAAGAACAGCATGCAGGGTCATGGGACCTGGCTG
CCATGCAGGGACAGAGCCCCTTCTGCCTTGCACCCTACCTCAGTGCATGCCCTGAGACCTGCAGACAT
CCAAGTTGTGGCTGCTCTGGGGGATTCTCTGACCGCTGGCAATGGAATTGGCTCCAAACCAGACGACC
TCCCCGATGTCACCACACAGTATCGGGGACTGTCATACAGTGCAGGAGGGGACGGCTCCCTGGAGAAT
GTGACCACCTTACCTAGTTCTATCCTTCGGGAGTTTAACAGAAACCTCACAGGCTACGCCGTGGGCAC
GGGTGATGCCAATGACACGAATGCATTCCTCAATCAAGCTGTTCCCGGAGCAAAGGCTAGGGATCTTA
TGAGCCAAGTCCAAACTCTGATGCAGAAGATGAAAGATGATCATAGAGTAAATTTCCATGAAGACTGG
AAGGTCATCACAGTGCTGATCGGAGGCAGCGATTTATGTGACTACTGCACAGATTCGAATCTGTATTC
TGCAGCCAACTTTGTTCACCATCTCCGCAATGCCTTGGACGTCCTGCATAGAGAGGTGCCCAGAGTCC
TGGTCAACCTCGTGGACTTCCTGAACCCCACTATCATGCGGCAGGTGTTCCTGGGAAACCCAGACAAG
TGCCCAGTGCAGCAGGCCAGCGTTTTGTGTAACTGCGTTCTGACCCTGCGGGAGAACTCCCAAGAGCT
AGCCAGGCTGGAGGCCTTCAGCCGAGCCTACCAGAGCAGCATGCGCGAGCTGGTGGGGTCAGGCCGCT
ATGACACGCAGGAGGACTTCTCTGTGGTGCTGCAGCCCTTCTTCCAGAACATCCAGCTCCCTGTCCTG
CAGGATGGGCTCCCAGATACGTCCTTCTTTGCCCCAGACTGCATCCACCCAAATCAGAAATTCCACTC
CCAGCTGGCCAGAGCCCTTTGGACCAATATGCTTGAACCACTTGGAAGCAAAACAGAGACCCTGGACC
TGAGAGCAGAGATGCCCATCACCTGTCCCACTCAGAATGAGCCCTTCCTGAGAACCCCTCGGAATAGT
AACTACACGTACCCCATCAAGCCAGCCATTGAGAACTGGGGCAGTGACTTCCTGTGTACAGAGTGGAA
GGCTTCCAATAGTGTTCCAACCTCTGTCCACCAGCTCCGACCAGCAGACATCAAAGTGGTGGCCGCCC
TGGGTGACTCTCTGACTACAGCAGTGGGAGCTCGACCAAACAACTCCAGTGACCTACCCACATCTTGG
AGGGGACTCTCTTGGAGCATTGGAGGGGATGGGAACTTGGAGACTCACACCACACTGCCCAGTATTCT
GAAGAAGTTCAACCCTTACCTCCTTGGCTTCTCTACCAGCACCTGGGAGGGGACAGCAGGACTAAATG
TGGCAGCGGAAGGGGCCAGAGCTAGGAGGGACATGCCAGCCCAGGCCTGGGACCTGGTAGAGCGAATG
AAAAACAGCCCCATACACTTTCAGGAAGACTGGAAGATAATAACCCTGTTTATAGGCGGCAATGACCT
CTGTGATTTCTGCAATGATCTGGTAGGTGAATATGTTCAGCACATCCAACAGGCCCTGGACATCCTCT
CTGAGGAGCTCCCAAGGGCTTTCGTCAACGTGGTGGAGGTCATGGAGCTGGCTAGCCTGTACCAGGGC
CAAGGCGGGAAATGTGCCATGCTGGCAGCTCAGAACAACTGCACTTGCCTCAGACACTCGCAAAGCTC
CCTGGAGAAGCAAGAACTGAAGAAAGTGAACTGGAACCTCCAGCATGGCATCTCCAGTTTCTCCTACT
GGCACCAATACACACAGCGTGAGGACTTTGCGGTTGTGGTGCAGCCTTTCTTCCAAAACACACTCACC
CCACTGAACAGAGGGGACACTGACCTCACCTTCTTCTCCGAGGACTGTTTTCACTTCTCAGACCGCGG
GCATGCCGAGATGGCCATCGCACTCTGGAACAACATGCTGGAACCAGTGGGCCGCAAGACTACCTCCA
ACAACTTCACCCACAGCCGAGCCAAACTCAAGTGCCCCTCTCCTGTGAGTCCTTACCTCTACACCCTG
CGGAACAGCCGATTGCTCCCAGACCAGGCTGAAGAAGCCCCCGAGGTGCTCTACTGGGCTGTCCCAGT
GGCAGCGGGAGTCGGCCTTGTGGTGGGCATCATCGGGACAGTGGTCTGGAGGTGCAGGAGAGGTGGCC
GGAGGGAAGATCCTCCAATGAGCCTGCGCACTGTGGCCCTCTAGGCCCGGGG

NOV65b, CG57399-01

| | | | |
|---|---|---|---|
| Protein Sequence | SEQ ID NO: 980 | 1419 aa | MW at 158435.1kD |

MTWDTALWTSVFLIGLLPTLGFANCILQTSGKMCTLRGRYPQPPQPPLCLSPLVHQLRPADIKVVAAL
GNDETFQESGAGQLSEPDPRQWSWPQACLPGVKKEMQDVVGERTPSRRRSLRRREALVPAAGKESLCR
QDIFISLLEIIKHFPPSPQDINLEKDWKLVTLFIGVNDLCHYCPLVQGPVIDLGGMDTLHSLQLPRAF
VNVVEVMELASLYQGQGGKCAMLAAQEAWNSLLASSRYSEQESFTVVFQPFFYETTPSDPRLQDSTTL
AWHLWNRMMEPAGEKDEPLSVKHGRPMKCPSQESPYLFSYRNSNYLTRLQKPQDKLVREGAEIRCPDK
DPSDTVPTSVHRLKPADINVIGALGDSLTAGNGAGSTPGNVLDVLTQYRGLSWSVGGDENIGTVTTLA
DILREFNPSLKGFSVGTGKETSPNAFLNQAVAGGRAEQARRLVDLMKNDTRIHFQEDWKIITLFIGGN
DLCDFCNDLVHYSPQNFTDNIGKALDILHAESQVPRAFVNLVTVLEIVNLRELYQEKKVYCPRMILRS
LCPCVLKFDDNSTELATLIEFNKKFQEKTHQLIESGRYDTREDFTVVVQPFFENVDMPKTQEGLPDNS
FFAPDCFHFSSKSHSRAASALWNNNLEPVGQKTTRHKFENKINITCPSQVQPFLRTYKNSMQGHGTWL
PCRDRAPSALHPTSVHALRPADIQVVAALGDSLTAGNGIGSKPDDLPDVTTQYRGLSYSAGGDGSLEN
VTTLPSSILREFNRNLTGYAVGTGDANDTNAFLNQAVPGAKARDLMSQVQTLMQKMKDDHRVNFHEDW
KVITVLIGGSDLCDYCTDSNLYSAANFVHHLRNALDVLHREVPRVLVNLVDFLNPTIMRQVFLGNPDK
CPVQQASVLCNCVLTLRENSQELARLEAFSRAYQSSMRELVGSGRYDTQEDFSVVLQPFFQNIQLPVL
QDGLPDTSFFAPDCIHPNQKFHSQLARALWTNMLEPLGSKTETLDLRAEMPITCPTQNEPFLRTPRNS
NYTYPIKPAIENWGSDFLCTEWKASNSVPTSVHQLRPADIKVVAALGDSLTTAVGARPNNSSDLPTSW
RGLSWSIGGDGNLETHTTLPSILKKFNPYLLGFSTSTWEGTAGLNVAAEGARARRDMPAQAWDLVERM
KNSPIHFQEDWKIITLFIGGNDLCDFCNDLVGEYVQHIQQALDILSEELPRAFVNVVEVMELASLYQG
QGGKCAMLAAQNNCTCLRHSQSSLEKQELKKVNWNLQHGISSFSYWHQYTQREDFAVVVQPFFQNTLT
PLNRGDTDLTFFSEDCFHFSDRGHAEMAIALWNNMLEPVGRKTTSNNFTHSRAKLKCPSPVSPYLYTL
RNSRLLPDQAEEAPEVLYWAVPVAAGVGLVVGIIGTVVWRCRRGGRREDPPMSLRTVAL

| | | |
|---|---|---|
| NOV65c, CG57399-02 | SEQ ID NO: 981 | 1624 bp |

| | | |
|---|---|---|
| DNA Sequence | ORF Start: ATG at 311 | ORF Stop: TGA at 1241 |

GCCGGCTGACATCAATGTAATTGGAGCCCTGGGTGACTCTCTCACGGCAGGCAATGGGGCCGGGTCCA
CACCTGGGAACGTCTTGGACGTCTTGACTCAGTACCGAGGCCTGTCCTGGAGCGTCGGCGGAGATGAG
AACATCGGCACCGTTACCACCCTGGCGAACATCCTCCGGGAATTCAACCCTTCCCTGAAGGGCTTCTC
TGTTGGCACTGGGAAAGAAACCAGTCCTAATGCCTTCTTAAACCAGGCTGTGGCAGGAGGCCGAGCTG
AGGATCTACCTGTCCAGGCCAGGAGGCTGGTGGACCTGATGAAGAATGACACGAGGATACACTTTCAG
GAAGACTGGAAGATAATAACCCTGTTTATAGGCGGCAATGACCTCTGTGATTTcTGCAATGATCTGGT
CCACTATTCTCCCCAGAACTTCACAGACAACATTGGAAAGGCCCTGGACATCCTCCATGCTGAGGTTC
CTCGGGCATTTGTGAACCTGGTGACGGTGCTTGAGATCGTCAACCTGAGGGAGCTGTACCAGGAGAAA
AAAGTCTACTGCCCAAGGATGATCCTCAGGTCTCTGTGTCCCTGTGTCCTGAAGTTTGATGATAACTC
AACAGAACTTGCTACCCTCATCGAATTCAACAAGAAGTTTCAGGAGAAGACCCACCAACTGATTGAGA
GTGGGCGATATGACACAAGGGAAGATTTTACTGTGGTTGTGCAGCCGTTCTTTGAAAACGTGGACATG
CCAAAGACCTCGGAAGGATTGCCTGACAACTCTTTCTTCGCTCCTGACTGTTTCCACTTCAGCAGCAA
GTCTCACTCCCGAGCAGCCAGTGCTCTCTGGAACAATATGCTGGAGCCTGTTGGCCAGAAGACGACTC
GTCATAAGTTTGAAAACAAGATCAATATCACATGTCCGAACCAGGTCCAGCCGTTTCTGAGGACCTAC
AAGAACAGCATGCAGGGTCATGGGACCTGGCTGCCATGCAGGGACAGAGCCCCTTCTGCCTTGCACCC
TACCTCAGTGCATGCCCTGAGACCTGCAGACATCCAAGTTGTGGCTGCTCTGGGGGATTCTCTGACCG
CTGGCAATGGAATTGGCTCCAAACCAGACGACCTCCCCGATGTCACCACACAGTATCGGGGACTGTCA
TACAGAGAAAGTAAACCAGGGTTCTTATCAGACTCCTGGGTCAGCAAATCCAACAGGAAATGCACCAG
AAAAGCACCAAATCCCTGAATCTTCACCTCCCCGCTTGCATGTATACGTGTACACGTGGTGTTCCTAC
GTCTCTGTTTACTGTCTTTATGTGTTTATTCATGTTGTCTTGTAGTCACACAGCTGCCTTTACATATA
TGTACACATCTGCACAGAAAACCTCTGAAACCCATCGCACACTTCGAGAGGCCATAACCAAGACACAA
TCACAATCAGCCATGTCTTGAAAGATTAGCAATTCGACAAGAGGAAAGGGTGAGAAAGGGCATCCCGA
ACACGGAAGTGGAGAAGCTCAGGGTGTGTCAGGCGAGCGGTTGCGTGTAGATATTCTCAAGTTTCTTT
CTCTCCTAATAAAGTTCTCATTCCTGTAGGCTTCAAAGTAAGTGGCGAGTAGCTCAGAAT

NOV65c, CG57399-02

| | | | |
|---|---|---|---|
| Protein Sequence | SEQ ID NO: 982 | 310 aa | MW at 35240.6kD |

MKNDTRIHFQEDWKIITLFIGGNDLCDFCNDLVHYSPQNFTDNIGKALDILHAEVPRAFVNLVTVLEI
VNLRELYQEKKVYCPRMILRSLCPCVLKFDDNSTELATLIEFNKKFQEKTHQLIESGRYDTREDFTVV
VQPFFENVDMPKTSEGLPDNSFFAPDCFHFSSKSHSRAASALWNNMLEPVGQKTTRHKFEMKINITCP
NQVQPFLRTYKNSMQGHGTWLPCRDRAPSALHPTSVHALRPADIQVVAALGDSLTAGNGIGSKPDDLP
DVTTQYRGLSYRESKPGFLSDSWVSKSNRKCTRKAPNP

| | | |
|---|---|---|
| NOV65d, CG57399-03 | SEQ ID NO: 983 | 4425 bp |

| | | |
|---|---|---|
| DNA Sequence | ORF Start: ATG at 16 | ORF Stop: TAG at 4285 |

CTGGAGCATTCTGGCATGGGGCTGCGGCCAGGCATTTTCCTCCTGGAGCTGCTGCTGCTTCTGGGGCA
AGGTACCCCTCAGATCCATACCTCTCCTAGAAAGAGTACATTGGAAGGGCAGCTATGGCCAGAGACAG
TTCACTCTCTGAAGCCTTCTGATATTAAATTTGTGGCAGCCATTGGCAATCTGGAAATTGTGCCAGAC
CCAGGGACGGGCGATCTGGAGAAGCAAGACGAAAGGCCACAGCAGGTGTGCATGGGAGTGATGACAGT
CCTTTCAGACATCATCAGATATTTCAGTCCTTCTGTTCCAATGCCTGTGTGCCACACTGGAAAGAGAG
TCATACCCCACGATGGTGCTGAGGACTTGTGGATTCAGGCTCAAGAACTGGTGAGAAACATGAAAGAG
AACCAACTTGACTTTCAATTTGACTGGAAGCTCATCAATGTGTTCTTCAGTAATGCAAGCCAGTGTTA
CCTGTGCCCCTCTGCTCAACAGAATGGGCTTGCGGCGGGCGGCGTGGATGAGCTGATGGGGGTGCTGG
ACTACCTGCAGCAGGAGGTGCCCAGAGCATTTGTAAACCTGGTGGACCTCTCTGAGGTTGCAGAGGTC
TCTCGTCAGTATCACGGCACTTGGCTCAGCCCTGCACCAGAGCCCTGTAATTGCTCAGAGGAGACCAC
CCGGCTGGCCAAGGTGGTGATGCAGTGGTCTTATCAGGAAGCCTGGAACAGCCTCCTGGCCTCCAGCA
GGTACAGTGAGCAGGAGTCCTTCACCGTGGTTTTCCAGCCTTTCTTCTATGAGACCACCCCATCTGAC
CCCCGACTCCAGGATTCTACCACGCTGGCCTGGCATCTCTGGAATAGGATGATGGAGCCAGCAGGAGA
GAAAGATGAGCCATTGAGTGTAAAACACGGGAGGCCAATGAAGTGTCCCTCTCAGGAGAGCCCCTATC
TGTTCAGCTACAGAAACAGCAACTACCTGACCAGACTGCAGAAACCCCAAGACAAGCTTGAGGTAAGA
GAAGGAGCGGAAATCAGATGTCCTGACAAAGACCCCTCCGATACGGTTCCCACCTCAGTTCATAGGCT
GAAGCCGGCTGACATCAACGTAATTGGAGCCCTGGGTGACTCTCTCACGGCAGGCAATGGGGCCGGGT
CCACACCTGGGAACGTCTTGGACGTCTTGACTCAGTACCGAGGCCTGTCCTGGAGCGTCGGCGGAGAT
GAGAACATCGGCACCGTTACCACCCTGGCGGACATCCTCCGGGAATTCAACCCTTCCCTGAAGGGCTT
CTCTGTTGGCACTGGGAAAGAAACCAGTCCTAATGCCTTCTTAAACCAGGCTGTGGCAGGAGGCCGAG
CTGAGCAGGCCAGGAGGCTGGTGGACCTGATGAAGAATGACACGAGGATACACTTTCAGGAAGACTGG
AAGATAATAACCCTGTTTATAGGCGGCAATGACCTCTGTGATTTCTGCAATGATCTGGTACACTATTC
TCCCCAGAACTTCACAGACAACATTGGAAAGGCCCTGGACATCCTCCATGCTGAGGTTCCTCGGGCAT
TTGTGAACCTGGTGACGGTGCTTGAGATCGTCAACCTGAGGGAGCTGTACCAGGAGAAAAAAGTCTAC
TGCCCAAGGATGATCCTCAGGTCACTGTGTCCCTGTGTCCTGAAGTTTGATGATAACTCAACAGAACT
TGCTACCCTCATCGAATTCAACAAGAAGTTTCAGGAGAAGACCCACCAACTGATTGAGAGTGGGCGAT
ATGACACAAGGGAAGATTTTACTGTGGTTGTGCAGCCGTTCTTTGAAAACGTGGACATGCCAAAGACC
CAGGAAGGATTGCCTGACAACTCTTTCTTCGCTCCTGACTGTTTCCACTTCAGCAGCAAGTCTCACTC
CCGAGCAGCCAGTGCTCTCTGGAACAATATGCTGGAGCCTGTTGGCCAGAAGACGACTCGTCATAAGT
TTGAAAACAAGATCAATATCACATGTCCGAACCAGGTAGAGTGGCCGTTTCTGAGGACCTACAAGAAC
AGCATGCAGGGTCATGGGACCTGGCTGCCATGCAGGGACAGAGCCCCTTCTGCCTTGCACCCTACCTC
AGTGCATGCCCTGAGACCTGCAGACATCCAAGTTGTGGCTGCTCTGGGGGATTCTCTGACCGCTGGCA
ATGGAATTGGCTCCAAACCAGACGACCTCCCCGATGTCACCACACAGTATCGGGGACTGTCATACAGT
GCAGGAGGGGACGGCTCCCTGGAGAATGTGACCACCTTACCTGATATCCTTCGGGAGTTTAACAGAAA
CCTCACAGGCTACGCCGTGGGCACGGGTGATGCCAATGACACGAATGCATTCCTCAATCAAGCTGTTC
CCGGAGCAAAGGCTAGGGATCTTATGAGCCAAGTCCAAACTCTGATGCAGAAGATGAAAGATGATCAT
AGAGTAAATTTCCATGAAGACTGGAAGGTCATCACAGTGCTGATCGGAGGCAGCGATTTATGTGACTA
CTGCACAGATTCGAATCTGTATTCTGCAGCCAACTTTGTTCACCATCTCCGCAATGCCTTGGACGTCC
TGCATAGAGAGGTGCCCAGAGTCCTGGTCAACCTCGTGGACTTCCTGAACCCCACTATCATGCGGCAG
GTGTTCCTGGGAAACCCAGACAAGTGCCCAGTGCAGCAGGCCAGCGTTTTGTGTAACTGCGTTCTGAC
CCTGCGGGAGAACTCCCAAGAGCTAGCCAGGCTGGAGGCCTTCAGCCGAGCCTACCAGAGCAGCATGC
GCGAGCTGGTGGGGTCAGGCCGCTATGACACGCAGGAGGACTTCTCTGTGGTGCTGCAGCCCTTCTTC
CAGAACATCCAGCTCCCTGTCCTGCAGGATGGGCTCCCAGATACGTCCTTCTTTGCCCCAGACTGCAT
CCACCCAAATCAGAAATTCCACTCCCAGCTGGCCAGAGCCCTTTGGACCAATATGCTTGAACCACTTG
GAAGCAAAACAGAGACCCTGGACCTGAGAGCAGAGATGCCCATCACCTGTCCCACTCAGAATGAGCCC
TTCCTGAGAACCCCTCGGAATAGTAACTACACGTACCCCATCAAGCCAGCCATTGAGAACTGGGGCAG
TGACTTCCTGTGTACAGAGTGGAAGGCTTCCAATAGTGTTCCAACCTCTGTCCACCAGCTCCGACCAG
CAGACATCAAAGTGGTGGCCGCCCTGGGTGACTCTCTGACTGTGGCAGTGGGAGCTCGACCAAACAAC
TCCAGTGACCTACCCACATCTTGGAGGGGACTCTCTTGGAGCATTGGAGGGGATGGGAACTTGGAGAC
TCACACCACACTGCCCGACATTCTGAAGAAGTTCAACCCTTACCTCCTTGGCTTCTCTACCAGCACCT
GGGAGGGGACAGCAGGACTAAATGTGGCAGCGGAAGGGGCCAGAGCTAGGGACATGCCAGCCCAGGCC
TGGGACCTGGTAGAGCGAATGAAAAACAGCCCCCAGGACATCAACCTGGAGAAAGACTGGAAGCTGGT
CACACTCTTCATTGGGGTCAACGACTTGTGTCATTACTGTGAGAATCCGGTAGGCGAATATGTTCAGC
ACATCCAACAGGCCCTGGACATCCTCTCTGAGGAGCTCCCAAGGGCTTTCGTCAACGTGGTGGAGGTC
ATGGAGCTGGCTAGCCTGTACCAGGGCCAAGGCGGGAAATGTGCCATGCTGGCAGCTCAGAACAACTG
CACTTGCCTCAGACACTCGCAAAGCTCCCTGGAGAAGCAAGAACTGAAGAAAGTGAACTGGAACCTCC
AGCATGGCATCTCCAGTTTCTCCTACTGGCACCAATACACACAGCGTGAGGACTTTGCGGTTGTGGTG
CAGCCTTTCTTCCAAAACACACTCACCCCACTGAACAGAGGGGACACTGACCTCACCTTCTTCTCCGA
GGACTGTTTTCACTTCTCAGACCGCGGGCATGCCGAGATGGCCATCGCACTCTGGAACAACATGCTGG
AACCAGTGGGCCGCAAGACTACCTCCAACAACTTCACCCACAGCCGAGCCAAACTCAAGTGCCCCTCT
CCTGAGAGCCCTTACCTCTACACCCTGCGGAACAGCCGATTGCTCCCAGACCAGGCTGAAGAAGCCCC
CGAGGTGCTCTACTGGGCTGTCCCAGTGGCAGCGGGAGTCGGCCTTGTGGTGGGCATCATCGGGACAG
TGGTCTGGAGGTGCAGGAGAGGTGGCCGGAGGGAAGATCCTCCAATGAGCCTGCGCACTGTGGCCCTC
TAGGCCCGGGGGTGGGTCCTCACCCTAAACTCCCTATAGCCACTCTCTTCACCGCCCTCTGCCCCAGC
CACTCCCGGCCACCAGGACATGCTTCAATGCCTGGTGCCATAGGAAGCCCAGGGGACAGTCACAACTT
CTTGG

NOV65d, CG57399-03

| | | | |
|---|---|---|---|
| Protein Sequence | SEQ ID NO: 984 | 1423 aa | MW at 159352.7kD |

MGLRPGIFLLELLLLLGQGTPQIHTSPRKSTLEGQLWPETVHSLKPSDIKFVAAIGNLEIVPDPGTGD
LEKQDERPQQVCMGVMTVLSDIIRYFSPSVPMPVCHTGKRVIPHDGAEDLWIQAQELVRNMKENQLDF
QFDWKLINVFFSNASQCYLCPSAQQNGLAAGGVDELNGVLDYLQQEVPRAFVNLVDLSEVAEVSRQYH
GTWLSPAPEPCNCSEETTRLAKVVMQWSYQEAWNSLLASSRYSEQESFTVVFQPFFYETTPSDPRLQD
STTLAWHLWNRMMEPAGEKDEPLSVKHGRPMKCPSQESPYLFSYRNSNYLTRLQKPQDKLEVREGAEI
RCPDKDPSDTVPTSVHRLKPADINVIGALGDSLTAGNGAGSTPGNVLDVLTQYRGLSWSVGGDENIGT
VTTLADILREFNPSLKGFSVGTGKETSPNAFLNQAVAGGRAEQARRLVDLMKNDTRIHFQEDWKIITL
FIGGNDLCDFCNDLVHYSPQNFTDNIGKALDILHAEVPRAFVNLVTVLEIVNLRELYQEKKVYCPRMI
LRSLCPCVLKFDDNSTELATLIEFNKKFQEKTEQLIESGRYDTREDFTVVVQPFFENVDMPKTQEGLP
DNSFFAPDCFHFSSKSHSRAASALWNNMLEPVGQKTTRHKFENKINITCPNQVEWPFLRTYKNSMQGH
GTWLPCRDRAPSALHPTSVHALRPADIQVVAALGDSLTAGNGIGSKPDDLPDVTTQYRGLSYSAGGDG
SLENVTTLPDILREFNRNLTGYAVGTGDANDTNAFLNQAVPGAKARDLMSQVQTLMQKMKDDHRVNFH
EDWKVITVLIGGSDLCDYCTDSNLYSAANFVHHLRNALDVLHREVPRVLVNLVDFLNPTIMRQVFLGN
PDKCPVQQASVLCNCVLTLRENSQELARLEAFSRAYQSSMRELVGSGRYDTQEDFSVVLQPFFQNIQL
PVLQDGLPDTSFFAPDCIHPNQKFHSQLARALWTNNLEPLGSKTETLDLRAEMPITCPTQMEPFLRTP
RNSNYTYPIKPAIENWGSDFLCTEWKASNSVPTSVHQLRPADIKVVAALGDSLTVAVGARPNNSSDLP
TSWRGLSWSIGGDGNLETHTTLPDILKKFNPYLLGFSTSTWEGTAGLNVAAEGARARDMPAQAWDLVE
RMKNSPQDINLEKDWKLVTLFIGVNDLCHYCENPVGEYVQHIQQALDILSEELPRAFVNVVEVMELAS
LYQGQGGKCANLAAQNNCTCLRHSQSSLEKQELKKVNWNLQHGISSFSYWHQYTQREDFAVVVQPFFQ
NTLTPLNRGDTDLTFFSEDCFHFSDRGHAEMAIALWNNMLEPVGRKTTSNNFTHSRAKLKCPSPESPY
LYTLRNSRLLPDQAEEAPEVLYWAVPVAAGVGLVVGIIGTVVWRCRRGGRREDPPMSLRTVAL

[0728] A ClustalW comparison of the above protein sequences yields the following sequence alignment shown in Table 65B.

TABLE 65B
Comparison of the NOV65 protein sequences.

| | |
|---|---|
| NOV65a | ------------------------------------------------------------ |
| NOV65b | MTWDTALWTSVFLIGLLPTLGFANCILQTSGKMCTLRGRYPQPPQPPLCLSPLVHQLRPA |
| NOV65c | ------------------------------------------------------------ |
| NOV65d | ----MGLRPGIFLLELLLLLGQGTPQIHTSPRKSTLEGQLWP---------ETVHSLKPS |
| NOV65a | ------------------------------------------------------------ |
| NOV65b | DIKVVAALGNDETFQESGAGQLSEPDPRQWSWPQACLPGVKKEMQDVVGERTPSRRRSLR |
| NOV65c | ------------------------------------------------------------ |
| NOV65d | DIKFVAAIGNLEIVPDPGTGDLEKQDER----PQQVCMGVMTVLSDIIRYFSPSVPMPVC |
| NOV65a | ------------------------------------------------------------ |
| NOV65b | RR-EALVPAAGKESLCRQDIFISLLEIIKHFPPSPQDINLEKDWKLVTLFIGVNDLCHYC |
| NOV65c | ------------------------------------------------------------ |
| NOV65d | HTGKRVIPHDG-----AEDLWIQAQELVRNMKEN--QLDFQFDWKLINVFFSNASQCYLC |
| NOV65a | ------------------------------------------------------------ |
| NOV65b | PLVQGPVIDLGGMDTLH-----S-LQLPRAFVNVVEVMELASLYQGQGG----------- |
| NOV65c | ------------------------------------------------------------ |
| NOV65d | PSAQQNGLAAGGVDELMGVLDYLQQEVPRAFVNLVDLSEVAEVSRQYHGTWLSPAPEPCN |
| NOV65a | ------------------------------------------------------------ |
| NOV65b | -------K---CAMLAAQEAWNSLLASSRYSEQESFTVVFQPFFYETTPSDPRLQDSTTL |
| NOV65c | ------------------------------------------------------------ |
| NOV65d | CSEETTRLAKVVMQWSYQEAWNSLLASSRYSEQESFTVVFQPFFYETTPSDPRLQDSTTL |
| NOV65a | ------------------------------------------------------------ |
| NOV65b | AWHLWNRMMEPAGEKDEPLSVKHGRPMKCPSQESPYLFSYRNSNYLTRLQKPQDK-LVRE |
| NOV65c | ------------------------------------------------------------ |
| NOV65d | AWHLWNRMMEPAGEKDEPLSVKHGRPMKCPSQESPYLFSYRNSNYLTRLQKPQDKLEVRE |
| NOV65a | ------------------------------------------------------------ |
| NOV65b | GAEIRCPDKDPSDTVPTSVHRLKPADINVIGALGDSLTAGNGAGSTPGNVLDVLTQYRGL |
| NOV65c | ------------------------------------------------------------ |
| NOV65d | GAEIRCPDKDPSDTVPTSVHRLKPADINVIGALGDSLTAGNGAGSTPGNVLDVLTQYRGL |
| NOV65a | ------------------------------------------------------------ |
| NOV65b | SWSVGGDENIGTVTTLADILREFNPSLKGFSVGTGKETSPNAFLNQAVAGGRAEQARRLV |
| NOV65c | ------------------------------------------------------------ |
| NOV65d | SWSVGGDENIGTVTTLADILREFNPSLKGFSVGTGKETSPNAFLNQAVAGGRAEQARRLV |
| NOV65a | --MKNDTRIHFQEDWKIITLFIGGNDLCDFCNDLVHYSPQNFTDNIGKALDILHAE--VP |
| NOV65b | DLMKNDTRIHFQEDWKIITLFIGGNDLCDFCNDLVHYSPQNFTDNIGKALDILHAESQVP |
| NOV65c | --MKNDTRIHFQEDWKIITLFIGGNDLCDFCNDLVHYSPQNFTDNIGKALDILHAE--VP |
| NOV65d | DLMKNDTRIHFQEDWKIITLFIGGNDLCDFCNDLVHYSPQNFTDNIGKALDILHAE--VP |
| NOV65a | RAFVNLVTVLEIVNLRELYQEKKVYCPRMILRSLCPCVLKFDDNSTELATLIEFNKKFQE |
| NOV65b | RAFVNLVTVLEIVNLRELYQEKKVYCPRMILRSLCPCVLKFDDNSTELATLIEFNKKFQE |
| NOV65c | RAFVNLVTVLEIVNLRELYQEKKVYCPRMILRSLCPCVLKFDDNSTELATLIEFNKKFQE |
| NOV65d | RAFVNLVTVLEIVNLRELYQEKKVYCPRNILRSLCPCVLKFDDNSTELATLIEFNKKFQE |
| NOV65a | KTHQLIESGRYDTREDFTVVVRPFFENVDMPKTSEGLPDNSFFAPDCFHFSSKSHSRAAS |
| NOV65b | KTHQLIESGRYDTREDFTVVVQPFFENVDMPKTQEGLPDNSFFAPDCFHFSSKSHSRAAS |
| NOV65c | KTHQLIESGRYDTREDFTVVVQPFFENVDMPKTSEGLPDNSFFAPDCFHFSSKSHSRAAS |
| NOV65d | KTHQLIESGRYDTREDFTVVVQPFFENVDMPKTQEGLPDNSFFAPDCFHFSSKSHSRAAS |
| NOV65a | ALWNNMLEPVGQKTTRHKFENKINITCPNQVQP-FLRTYKNSMQGHGTWLPCRDRAPSAL |
| NOV65b | ALWNNMLEPVGQKTTRHKFENKINITCPSQVQP-FLRTYKNSMQGHGTWLPCRDRAPSAL |
| NOV65c | ALWNNMLEPVGQKTTRHKFENKINITCPNQVQP-FLRTYKNSMQGHGTWLPCRDRAPSAL |
| NOV65d | ALWNNMLEPVGQKTTRHKFENKINITCPNQVEWPFLRTYKNSMQGHGTWLPCRDRAPSAL |
| NOV65a | HPTSVHALRPADIQVVAALGDSLTAGNGIGSKPDDLPDVTTQYRGLSYRESKPG------ |
| NOV65b | HPTSVHALRPADIQVVAALGDSLTAGNGIGSKPDDLPDVTTQYRGLSYSAGGDGSLENVT |
| NOV65c | HPTSVHALRPADIQVVAALGDSLTAGNGIGSKPDDLPDVTTQYRGLSYRESKPG------ |
| NOV65d | HPTSVHALRPADIQVVAALGDSLTAGNGIGSKPDDLPDVTTQYRGLSYSAGGDGSLENV- |
| NOV65a | FLSDSWVSKSNRKCTRKAPNP--------------------------------------- |
| NOV65b | TLPSSILREFNRNLTGYAVGTGDANDTNAFLNQAVPGAKARDLMSQVQTLMQKMKDDHRV |
| NOV65c | FLSDSWVSKSNRKCTRKAPNP--------------------------------------- |
| NOV65d | TTLPDILREFNRLTGYAVGTGDANDTNAFLNQAVPGAKARDLMSQVQTLMQKMKDDHRV |
| NOV65a | ------------------------------------------------------------ |
| NOV65b | NFHEDWKVITVLIGGSDLCDYCTDSNLYSAANFVHHLRNALDVLHREVPRVLVNLVDFLN |
| NOV65c | ------------------------------------------------------------ |
| NOV65d | NFHEDWKVITVLIGGSDLCDYCTDSNLYSAANFVHHLRNALDVLHREVPRVLVNLVDFLN |
| NOV65a | ------------------------------------------------------------ |
| NOV65b | PTIMRQVFLGNPDKCPVQQASVLCNCVLTLRENSQELARLEAFSRAYQSSMRELVGSGRY |
| NOV65c | ------------------------------------------------------------ |
| NOV65d | PTIMRQVFLGNPDKCPVQQASVLCNCVLTLRENSQELARLEAFSRAYQSSMRELVGSGRY |
| NOV65a | ------------------------------------------------------------ |
| NOV65b | DTQEDFSVVLQPFFQNIQLPVLQDGLPDTSFFAPDCIHPNQKFHSQLARALWTNMLEPLG |
| NOV65c | ------------------------------------------------------------ |
| NOV65d | DTQEDFSVVLQPFFQNIQLPVLQDGLPDTSFFAPDCIHPNQKFHSQLARALWTNMLEPLG |
| NOV65a | ------------------------------------------------------------ |
| NOV65b | SKTETLDLRAEMPITCPTQNEPFLRTPRNSNYTYPIKPAIENWGSDFLCTEWKASNSVPT |
| NOV65c | ------------------------------------------------------------ |
| NOV65d | SKTETLDLRAEMPITCPTQNEPFLRTPRNSNYTYPIKPAIENWGSDFLCTEWKASNSVPT |
| NOV65a | ------------------------------------------------------------ |
| NOV65b | SVHQLRPADIKVVAALGDSLTTAVGARPNNSSDLPTSWRGLSWSIGGDGNLETHTTLPSI |
| NOV65c | ------------------------------------------------------------ |
| NOV65d | SVHQLRPADIKVVAALGDSLTVAVGARPNNSSDLPTSWRGLSWSIGGDGNLETHTTLPDI |
| NOV65a | ------------------------------------------------------------ |
| NOV65b | LKKFNPYLLGFSTSTWEGTAGLNVAAEGARARRDMPAQAWDLVERMKNSP--IHFQEDWK |
| NOV65c | ------------------------------------------------------------ |
| NOV65d | LKKFNPYLLGFSTSTWEGTAGLNVAAEGARAR-DMPAQAWDLVERMKNSPQDINLEKDWK |
| NOV65a | ------------------------------------------------------------ |
| NOV65b | IITLFIGGNDLCDFCNDLVGEYVQHIQQALDILSEELPRAFVNVVEVMELASLYQGQGGK |
| NOV65c | ------------------------------------------------------------ |
| NOV65d | LVTLFIGVNDLCHYCENPVGEYVQHIQQALDILSEELPRAFVNVVEVMELASLYQGQGGK |
| NOV65a | ------------------------------------------------------------ |
| NOV65b | CAMLAAQNNCTCLRHSQSSLEKQELKKVNWNLQHGISSFSYWHQYTQREDFAVVVQPFFQ |
| NOV65c | ------------------------------------------------------------ |
| NOV65d | CAMLAAQNNCTCLRHSQSSLEKQELKKVNWNLQHGISSFSYWHQYTQREDFAVVVQPFFQ |
| NOV65a | ------------------------------------------------------------ |
| NOV65b | NTLTPLNRGDTDLTFFSEDCFHFSDRGHAEMAIALWNNMLEPVGRKTTSNNFTHSRAKLK |
| NOV65c | ------------------------------------------------------------ |
| NOV65d | NTLTPLNRGDTDLTFFSEDCFHFSDRGHAEMAIALWNNMLEPVGRKTTSNNFTHSRAKLK |
| NOV65a | ------------------------------------------------------------ |
| NOV65b | CPSPVSPYLYTLRNSRLLPDQAEEAPEVLYWAVPVAAGVGLVVGIIGTVVWRCRRGGRRE |
| NOV65c | ------------------------------------------------------------ |
| NOV65d | CPSPESPYLYTLRNSRLLPDQAEEAPEVLYWAVPVAAGVGLVVGIIGTVVWRCRRGGRRE |
| NOV65a | ----------- |
| NOV65b | DPPMSLRTVAL |
| NOV65c | ----------- |
| NOV65d | DPPMSLRTVAL |
| NOV65a | (SEQ ID NO: 978) |
| NOV65b | (SEQ ID NO: 980) |
| NOV65c | (SEQ ID NO: 982) |
| NOV65d | (SEQ ID NO: 984) |

[0729] Further analysis of the NOV65a protein yielded the following properties shown in Table 65C.

TABLE 65C
Protein Sequence Properties NOV65a

| | |
|---|---|
| SignalP analysis: | No Known Signal Sequence Indicated |
| PSORT II analysis: | |

| PSG: | a new signal peptide prediction method |
|---|---|
| | N-region: length 11; pos.chg 2; neg.chg 2 |
| | H-region: length 0; peak value −1.15 |
| | PSG score: −5.55 |
| GvH: | von Heijne's method for signal seq. recognition |
| | GvH score (threshold: −2.1): −10.77 |
| | possible cleavage site: between 28 and 29 |

>>> Seems to have no N-terminal signal peptide
ALOM: Klein et al's method for TM region allocation

Init position for calculation: 1
Tentative number of TMS(s) for the threshold 0.5: 0
number of TMS(s) . . . fixed
PERIPHERAL Likelihood = 1.43 (at 55)
ALOM score: 1.43 (number of TMSs: 0)

MITDISC: discrimination of mitochondrial targeting seq

| | | | |
|---|---|---|---|
| R content: | 1 | Hyd Moment (75): | 3.74 |
| Hyd Moment (95): | 6.40 | G content: | 0 |
| D/E content: | 2 | S/T content: | 1 |

Score: −6.13

Gavel: prediction of cleavage sites for mitochondrial preseq

cleavage site motif not found

NUCDISC: discrimination of nuclear localization signals

pat4: none
pat7: none
bipartite: none
content of basic residues: 12.3%
NLS Score: −0.47

KDEL: ER retention motif in the C-terminus: none
ER Membrane Retention Signals:

KKXX-like motif in the C-terminus: KAPN

SKL: peroxisomal targeting signal in the C-terminus: none
PTS2: 2nd peroxisomal targeting signal: none
VAC: possible vacuolar targeting motif: none
RNA-binding motif: none
Actinin-type actin-binding motif:

type 1: none
type 2: none

NMYR: N-myristoylation pattern : none
Prenylation motif: none
memYQRL: transport motif from cell surface to Golgi: none
Tyrosines in the tail: none
Dileucine motif in the tail: none
checking 63 PROSITE DNA binding motifs: none
checking 71 PROSITE ribosomal protein motifs: none
checking 33 PROSITE prokaryotic DNA binding motifs: none

| NNCN: | Reinhardt's method for Cytoplasmic/Nuclear discrimination |
|---|---|
| | Prediction: nuclear |
| | Reliability: 70.6 |
| COIL: | Lupas's algorithm to detect coiled-coil regions |
| | total: 0 residues |

--------------------------
Final Results (k = 9/23):

```
87.0%: nuclear
  8.7%: mitochondrial
  4.3%: peroxisomal
```

>> prediction for CG57399-04 is nuc (k = 23)

[0730] A search of the NOV65a protein against the Geneseq database, a proprietary database that contains sequences published in patents and patent publication, yielded several homologous proteins shown in Table 65D.

TABLE 65D
Geneseq Results for NOV65a

| | | NOV65a | Identities/ | |
|---|---|---|---|---|
| | | Residues/ | Similarities for | |
| Geneseq | Protein/Organism/Length | Match | the Matched | Expect |
| Identifier | [Patent #, Date] | Residues | Region | Value |
| ABB09556 | Human lipase NHL (Val 1318 | 1 . . . 293 | 284/293 (96%) | e-170 |
| | variant) - Homo sapiens, 1458 aa. | 491 . . . 783 | 286/293 (96%) | |
| | [WO200259328-A1, 01-Aug.- | | | |
| | 2002] | | | |
| ABB09555 | Human lipase NHL (Ala 1318 | 1 . . . 293 | 284/293 (96%) | e-170 |
| | variant) - Homo sapiens, 1458 aa. | 491 . . . 783 | 286/293 (96%) | |
| | [WO200259328-A1, 01-Aug.- | | | |
| | 2002] | | | |
| AAE22860 | Human phospholipase-like | 1 . . . 293 | 273/298 (91%) | e-160 |
| | enzyme - Homo sapiens, 1216 aa. | 247 . . . 544 | 279/298 (93%) | |
| | [WO200231 161-A2, 18-Apr.- | | | |
| | 2002] | | | |
| AAW30751 | Rat phospholipase-Bllipase - | 1 . . . 293 | 203/293 (69%) | e-118 |
| | Rattus rattus, 1450 aa. | 495 . . . 787 | 236/293 (80%) | |
| | [JP09248190-A, 22-Sep.-1997] | | | |
| ABP53556 | Human phospholipase protein | 1 . . . 217 | 92/218 (42%) | 8e-44 |
| | SEQ ID NO:2 - Homo sapiens, | 203 . . . 416 | 130/218 (59%) | |
| | 472 aa. [WO200262977-A2, 15- | | | |
| | Aug.-2002] | | | |

[0731] In a BLAST search of public sequence databases, the NOV65a protein was found to have homology to the proteins shown in the BLASTP data in Table 65E.

TABLE 65E
Public BLASTP Results for NOV65a

| | | NOV65a | Identities/ | |
|---|---|---|---|---|
| Protein | | Residues/ | Similarities for | |
| Accession | | Match | the Matched | Expect |
| Number | Protein/Organism/Length | Residues | Portion | Value |
| Q96DP9 | Hypothetical protein FLJ30866 - | 1 . . . 259 | 258/259 (99%) | e-154 |
| | Homo sapiens (Human), 270 aa. | 1 . . . 259 | 259/259 (99%) | |
| Q05017 | Phospholipase ADRAB-B | 1 . . . 293 | 238/293 (81%) | e-140 |
| | precursor (EC 3.1.-.-)- | 491 . . . 783 | 260/293 (88%) | |
| | Oryctolagus cuniculus (Rabbit), | | | |
| | 1458 aa. | | | |
| 070320 | Phospholipase B - Cavia | 1 . . . 291 | 221/291 (75%) | e-131 |
| | porcellus (Guinea pig), 1463 aa. | 490 . . . 780 | 254/291 (86%) | |
| 054728 | Phospholipase B - Rattus | 1 . . . 293 | 203/293 (69%) | e-117 |
| | norvegicus (Rat), 1450 aa. | 495 . . . 787 | 236/293 (80%) | |
| Q8IUP7 | Similar to phospholipase B - | 1 . . . 217 | 92/218 (42%) | 2e-43 |
| | Homo sapiens (Human), 423 aa. | 154 . . . 367 | 130/218 (59%) | |

[0732] PFam analysis indicates that the NOV65a protein contains the domains shown in the Table 65F.

TABLE 65F
Domain Analysis of NOV65a

| | NOV65a | Identities/ | |
|---|---|---|---|
| | Match | Similarities | |
| Pfam Domain | Region | for the Matched Region | Expect Value |
| Lipase_GDSL | 1 . . . 178 | 39/370 (11%) | 1.3e-10 |
| | | 141/370 (38%) | |

### Example 66

[0733] The NOV66 clone was analyzed, and the nucleotide and encoded polypeptide sequences are shown in Table 66A.

TABLE 66A
NOV66 Sequence Analysis

| | | |
|---|---|---|
| NOV66a, CG57562-02 | SEQ ID NO: 985 | 3517 bp |

| | | |
|---|---|---|
| DNA Sequence | ORF Start: ATG at 5 | ORF Stop: TGA at 3506 |

AAAGATGGCGGCAGCGGCGGCGGTGGGCAACGCGGTGCCCTGCGGGGCCCGGCCTTGCGGGGTCCGGC
CTGACGGGCAGCCCAAGCCCGGGCCGCAGCCGCGCGCGCTCCTTGCCGCCGGGCCGGCGCTCATAGCG
AACGGTGACGAGCTGGTGGCTGCCGTGTGGCCGTACCGGCGGTTGGCGCTGTTGCGGCGCCTCACGGT
GCTGCCATTCGCCGGGCTGCTTTACCCGGCCTGGTTGGGTGCCGCAGCCGCTGGCTGCTGGGGCTGGG
GCAGCAGTTGGGTGCAGATCCCCGAAGCTGCGCTGCTCGTGCTTGCCACCATCTGCCTCGCGCACGCG
CTCACTGTCCTCTCGGGGCATTGGTCTGTGCACGCGCATTGCGCGCTCACCTGCACCCCGGAGTACGA
CCCCAGCAAAGCGACCTTTGTGAAGGTGGTGCCAACCCCCAACAATGGCTCCACGGAGCTCGTGGCCC
TGCACCGCAATGAGGGCGAAGACGGGCTTGAGGTGCTGTCCTTCGAATTCCAGAAGATCAAGTATTCC
TACGATGCCCTGGAGAAGAAGCAGTTTCTCCCCGTGGCCTTTCCTGTGGGAAACGCCTTCTCATACTA
TCAGAGCAACAGAGGCTTCCAGGAAGACTCAGAGATCCGAGCAGCTGAGAAGAAATTTGGGAGCAACA
AGGCCGAGATGGTGGTGCCTGACTTCTCGGAGCTTTTCAAGGAGAGAGCCACAGCCCCCTTCTTTGTA
TTTCAGGTGTTCTGTGTGGGGCTCTGGTGCCTGGATGAGTACTGGTACTACAGCGTCTTTACGCTATC
CATGCTGGTGGCGTTCGAGGCCTCGCTGGTGCAGCAGCAGATGCGGAACATGTCGGAGATCCGGAAGA
TGGGCAACAAGCCCCACATGATCCAGGTCTACCGAAGCCGCAAGTGGAGGCCCATTGCCAGTGATGAG
ATCGTACCAGGGGACATCGTCTCCATCGGCCGCTCCCCACAGGAGAACCTGGTGCCATGTGACGTGCT
TCTGCTGCGAGGCCGCTGCATCGTAGACGAGGCCATGCTCACGGGGGAGTCCGTGCCACAGATGAAGG
AGCCCATCGAAGACCTCAGCCCAGACCGGGTGCTGGACCTCCAGGCTGATTCCCGGCTGCACGTCATC
TTCGGGGGCACCAAGGTGGTGCAGCACATCCCCCCACAGAAAGCCACCACGGGCCTGAAGCCGGTTGA
CAGCGGGTGCGTGGCCTACGTCCTGCGGACCGGATTCAACACATCCCAGGGCAAGCTGCTGCGCACCA
TCCTCTTCGGGGTCAAGAGGGTGACTGCGAACAACCTGGAGACCTTCATCTTCATCCTCTTCCTCCTG
GTGTTTGCCATCGCTGCAGCTGCCTATGTATGGATTGAAGGTACCAAGGACCCCAGCCGGAACCGCTA
CAAGCTGTTTCTGGAGTGCACCCTGATCCTCACCTCGGTCGTGCCTCCTGAGCTGCCCATCGAGCTGT
CCCTGGCCGTCAACACCTCCCTCATCGCCCTGGCCAAGCTCTACATGTACTGCACAGAGCCCTTCCGG
ATCCCCTTTGCTGGCAAGGTCGAGGTGTGCTGCTTTGACAAGACGGGGACGTTGACCAGTGACAGCCT
GGTGGTGCGCGGTGTGGCCGGGCTGAGAGACGGGAAGGAGGTGACCCCAGTGTCCAGCATCCCTGTAG
AAACACACCGGGCCCTGGCCTCGTGCCACTCGCTCATGCAGCTGGACGACGGCACCCTCGTGGGTGAC
CCTCTAGAGAAGGCCATGCTGACGGCCGTGGACTGGACGCTGACCAAAGATGAGAAAGTATTCCCCCG
AAGTATTAAAACTCAGGGGCTGAAAATTCACCAGCGCTTTCATTTTGCCAGTGCCCTGAAGCGAATGT
CCGTGCTTGCCTCGTATGAGAAGCTGGGCTCCACCGACCTTTGTTACATCGCGGCCGTGAAGGGGGCC
CCCGAAACTCTGCACTCCATGGCCCGGGAGGTCAAGCGGGAGGCCCTGGAGTGCAGCCTCAAGTTCGT
CGGCTTCATTGTGGTCTCCTGCCCGCTCAAGGCTGACTCGAAGGCCGTGATCCGGGAGATCCAGAATG
CGTCCCACCGGGTGTTCATGATCACGGGAGACAACCCGCTCACTGCATGCCACGTGGCCCAGGAGCTG
CACTTCATTGAAAAGGCCCACACGCTGATCCTGCAGCCTCCCTCCGAGAAAGGCCGGCAGTGCGAGTG
GCGCTCCATTGACGGCAGCATCGTGCTGCCCCTGGCCCGGGGCTCCCCAAAGGCACTGGCCCTGGAGT
ACGCACTGTGCCTCACAGGCGACGGCTTGGCCCACCTGCAGGCCACCGACCCCCAGCAGCTGCTCCGC
CTCATCCCCCATGTGCAGGTGTTCGCCCGTGTGGCTCCCAAGCAGAAGGAGTTTGTCATCACCAGCCT
GAAGGAGCTGGGCTACGTGACCCTCATGTGTGGGGATGGCACCAACGACGTGGGCGCCCTGAAGCATG
CTGACGTGGGTGTGGCGCTCTTGGCCAATGCCCCTGAGCGGGTTGTCGAGCGGCGACGGCGGCCCCGG
GACAGCCCAACCCTGAGCAACAGTGGCATCAGAGCCACCTCCAGGACAGCCAAGCAGCGGTCGGGGCT
CCCTCCCTCCGAGGAGCAGCCAACCTCCCAGAGGGACCGCCTGAGCCAGGTGCTGCGAGACCTCGAGG
ACGAGAGTACGCCCATTGTGAAACTGGGGGATGCCAGCATCGCAGCACCCTTCACCTCCAAGCTCTCA
TCCATCCAGTGCATCTGCCACGTGATCAAGCAGGGCCGCTGCACGCTGGTGACCACGCTACAGATGTT
CAAGATCCTGGCGCTCAATGCCCTCATCCTGGCCTACAGCCAGAGCGTCCTCTACCTGGAGGGAGTCA
AGTTCAGTGACTTCCAGGCCACCCTACAGGGGCTGCTGCTGGCCGGCTGCTTCCTCTTCATCTCCCGT
TCCAAGCCCCTCAAGACCCTCTCCCGAGAACGGCCCCTGCCCAACATCTTCAACCTGTACACCATCCT
CACCGTCATGCTCCAGTTCTTTGTGCACTTCCTGAGCCTTGTCTACCTGTACCGTGAGGCCCAGGCCC
GGAGCCCCGAGAAGCAGGAGCAGTTCGTGGACTTGTACAAGGAGTTTGAGCCAAGCCTGGTCAACAGC
ACCGTCTACATCATGGCCATGGCCATGCAGATGGCCACCTTCGCCATCAATTACAAAGGCCCGCCCTT
CATGGAGAGCCTGCCCGAGAACAAGCCCCTGGTGTGGAGTCTGGCAGTTTCACTCCTGGCCATCATTG
GCCTGCTCCTCGGCTCCTCGCCCGACTTCAACAGCCAGTTTGGCCTCGTGGACATCCCTGTGGAGTTC
AAGCTGGTCATTGCCCAGGTCCTGCTCCTGGACTTCTGCCTGGCGCTCCTGGCCGACCGCGTCCTGCA
GTTCTTCCTGGGGACCCCGAAGCTGAAAGTGCCTTCCTGAGATGGCAGT

NOV66a, CG57562-02

| | | | |
|---|---|---|---|
| Protein Sequence | SEQ ID NO: 986 | 1167 aa | MW at 128749.4kD |

MAAAAAVGNAVPCGARPCGVRPDGQPKPGPQPRALLAAGPALIANGDELVAAVWPYRRLALLRRLTVL
PFAGLLYPAWLGAAAAGCWGWGSSWVQIPEAALLVLATICLAHALTVLSGHWSVHAHCALTCTPEYDP
SKATFVKVVPTPNNGSTELVALHRNEGEDGLEVLSFEFQKIKYSYDALEKKQFLPVAFPVGNAFSYYQ
SNRGFQEDSEIRAAEKKFGSNKAEMVVPDFSELFKERATAPFFVFQVFCVGLWCLDEYWYYSVFTLSM
LVAFEASLVQQQMRNMSEIRKMGNKPHMIQVYRSRKWRPIASDEIVPGDIVSIGRSPQENLVPCDVLL
LRGRCIVDEAMLTGESVPQMKEPIEDLSPDRVLDLQADSRLHVIFGGTKVVQHIPPQKATTGLKPVDS
GCVAYVLRTGFNTSQGKLLRTILFGVKRVTANNLETFIFILFLLVFAIAAAAYVWIEGTKDPSRNRYK
LFLECTLILTSVVPPELPIELSLAVNTSLIALAKLYMYCTEPFRIPFAGKVEVCCFDKTGTLTSDSLV
VRGVAGLRDGKEVTPVSSIPVETHRALASCHSLMQLDDGTLVGDPLEKAMLTAVDWTLTKDEKVFPRS
IKTQGLKIHQRFHFASALKRNSVLASYEKLGSTDLCYIAAVKGAPETLHSMAREVKREALECSLKFVG
FIVVSCPLKADSKAVIREIQNASHRVFMITGDNPLTACHVAQELHFIEKAHTLILQPPSEKGRQCEWR
SIDGSIVLPLARGSPKALALEYALCLTGDGLAHLQATDPQQLLRLIPHVQVFARVAPKQKEFVITSLK
ELGYVTLMCGDGTNDVGALKHADVGVALLANAPERVVERRRRPRDSPTLSNSGIRATSRTAKQRSGLP
PSEEQPTSQRDRLSQVLRDLEDESTPIVKLGDASIAAPFTSKLSSIQCICHVIKQGRCTLVTTLQMFK
ILALNALILAYSQSVLYLEGVKFSDFQATLQGLLLAGCFLFISRSKPLKTLSRERPLPNIFNLYTILT
VHLQFFVHFLSLVYLYREAQARSPEKQEQFVDLYKEFEPSLVNSTVYIMAMAMQMATFAINYKGPPFM
ESLPENKPLVWSLAVSLLAIIGLLLGSSPDFNSQFGLVDIPVEFKLVIAQVLLLDFCLALLADRVLQF
FLGTPKLKVPS

| | | |
|---|---|---|
| NOV66b, CG57562-01 | SEQ ID NO: 987 | 3904 bp |

| | | |
|---|---|---|
| DNA Sequence | ORF Start: ATG at 68 | ORF Stop: TGA at 3680 |

TTACCGGAAGTAAAACTTCGGAAGTGAGGCGTTCCTCTGCCCGGAAGTGAGCGCGGCGCTAGGAAAGA
TGGCGGCAGCGGCGGCGGTGGGCAACGCGGTGCCCTGCGGGGCCCGGCCTTGCGGGGTCCGGCCTGAC
GGGCAGCCCAAGCCCGGGCGCAGCCGGCGCGCGCTCCTTGCCGCCGGGCCGGCGCTCATAGCGAACGG
TGACGAGCTGGTGGCTGCCGTGTGGCCGTACCGGCGGTTGGCGCTGTTGCGGCGCCTCACGGTGCTGC
CATTCGCCGGGCTGCTTTACCCGGCCTGGTTGGGTGCCGCAGCCGCTGGCTGCTGGGGCTGGGGCAGC
AGTTGGGTGCAGATCCCCGAAGCTGCGCTGCTCGTGCTTGCCACCATCTGCCTCGCGCACGCGCTCAC
TGTCCTCTCGGGGCATTGGTCTGTGCACGCGCATTGCGCGCTCACCTGCACCCCGGAGTACGACCCCA
GCAAAGCGACCTTTGTGAAGGTGGTGCCAACCCCCAACAATGGCTCCACGGAGCTCGTGGCCCTGCAC
CGCAATGAGGGCGAAGACGGGCTTGAGGTGCTGTCCTTCGAATTCCAGAAGATCAAGTATTCCTACGA
TGCCCTGGAGAAGAAGCAGTTTCTCCCCGTGGCCTTTCCTGTGGGAAACGCCTTCTCATACTATCAGA
GCAACAGAGGCTTCCAGGAAGACTCAGAGATCCGAGCAGCTGAGAAGAAATTTGGGAGCAACAAGGCC
GAGATGGTGGTGCCTGACTTCTCGGAGCTTTTCAAGGAGAGAGCCACAGCCCCCTTCTTTGTATTTCA
GGTGTTCTGTGTGGGGCTCTGGTGCCTGGATGAGTACTGGTACTACAGCGTCTTTACGCTATCCATGC
TGGTGGCGTTCGAGGCCTCGCTGGTGCAGCAGCAGATGCGGAACATGTCGGAGATCCGGAAGATGGGC
AACAAGCCCCACATGATCCAGGTCTACCGAAGCCGCAAGTGGAGGCCCATTGCCAGTGATGAGATCGT
ACCAGGGGACATCGTCTCCATCGGCCGCTCCCCACAGGAGAACCTGGTGCCATGTGACGTGCTTCTGC
TGCGAGGCCGCTGCATCGTAGACGAGGCCATGCTCACGGGGGAGTCCGTGCCACAGATGAAGGAGCCC
ATCGAAGACCTCAGCCCAGACCGGGTGCTGGACCTCCAGGCTGATTCCCGGCTGCACGTCATCTTCGG
GGGCACCAAGGTGGTGCAGCACATCCCCCCACAGAAAGCCACCACGGGCCTGAAGCCGGTTGACAGCG
GGTGCGTGGCCTACGTCCTGCGGACCGGATTCAACACATCCCAGGGCAAGCTGCTGCGCACCATCCTC
TTCGGGGTCAAGAGGGTGACTGCGAACAACCTGGAGACCTTCATCTTCATCCTCTTCCTCCTGGTGTT
TGCCATCGCTGCAGCTGCCTATGTATGGATTGAAGGTACCAAGGACCCCAGCCGGAACCGCTACAAGC
TGTTTCTGGAGTGCACCCTGATCCTCACCTCGGTCGTGCCTCCTGAGCTGCCCATCGAGCTGTCCCTG
GCCGTCAACACCTCCCTCATCGCCCTGGCCAAGCTCTACATGTACTGCACAGAGCCCTTCCGGATCCC
CTTTGCTGGCAAGGTCGAGGTGTGCTGCTTTGACAAGACGGGGACGTTGACCAGTGACAGCCTGGTGG
TGCGCGGTGTGGCCGGGCTGAGAGACGGGAAGGAGGTGACCCCAGTGTCCAGCATCCCTGTAGAAACA
CACCGGGCCCTGGCCTCGTGCCACTCGCTCATGCAGCTGGACGACGGCACCCTCGTGGGTGACCCTCT
AGAGAAGGCCATGCTGACGGCCGTGGACTGGACGCTGACCAAAGATGAGAAAGTATTCCCCCGAAGTA
TTAAAACTCAGGGGCTGAAAATTCACCAGCGCTTTCATTTTGCCAGTGCCCTGAAGCGAATGTCCGTG
CTTGCCTCGTATGAGAAGCTGGGCTCCACCGACCTCTGCTACATCGCGGCCGTGAAGGGGGCCCCCGA
AACTCTGCACTCCATGTTCTCCCAGTGCCCGCCCGACTACCACCACATCCACACCGAGATCTCCCGGG
AAGGAGCCCGCGTCCTGGCGCTGGGGTACAAGGAGCTGGGACACCTCACTCACCAGCAGGCCCGGGAG
GTCAAGCGGGAGGCCCTGGAGTGCAGCCTCAAGTTCGTCGGCTTCATTGTGGTCTCCTGCCCGCTCAA
GGCTGACTCCAAGGCCGTGATCCGGGAGATCCAGAATGCGTCCCACCGGGTGGTCATGATCACGGGAG
ACAACCCGCTCACTGCATGCCACGTGGCCCAGGAGCTGCACTTCATTGAAAAGGCCCACACGCTGATC
CTGCAGCCTCCCTCCGAGAAAGGCCGGCAGTGCGAGTGGCGCTCCATTGACGGCAGCATCGTGCTGCC
CCTGGCCCGGGGCTCCCCAAAGGCACTGGCCCTGGAGTACGCACTGTGCCTCACAGGCGACGGCTTGG
CCCACCTGCAGGCCACCGACCCCCAGCAGCTGCTCCGCCTCATCCCCCATGTGCAGGTGTTCGCCCGT
GTGGCTCCCAAGCAGAAGGAGTTTGTCATCACCAGCCTGAAGGAGCTGGGCTACGTGACCCTCATGTG
TGGGGATGGCACCAACGACGTGGGCGCCCTGAAGCATGCTGACGTGGGTGTGGCGCTCTTGGCCAATG
CCCCTGAGCGGGTTGTCGAGCGGCGACGGCGGCCCCGGGACAGCCCAACCCTGAGCAACAGTGGCATC
AGAGCCACCTCCAGGACAGCCAAGCAGCGGTCGGGGCTCCCTCCCTCCGAGGAGCAGCCAACCTCCCA
GAGGGACCGCCTGAGCCAGGTGCTGCGAGACCTCGAGGACGAGAGTACGCCCATTGTGAAACTGGGGG
ATGCCAGCATCGCAGCACCCTTCACCTCCAAGCTCTCATCCATCCAGTGCATCTGCCACGTGATCAAG
CAGGGCCGCTGCACGCTGGTGACCACGCTACAGATGTTCAAGATCCTGGCGCTCAATGCCCTCATCCT
GGCCTACAGCCAGAGCGTCCTCTACCTGGAGGGAGTCAAGTTCAGTGACTTCCAGGCCACCCTACAGG
GGCTGCTGCTGGCCGGCTGCTTCCTCTTCATCTCCCGTTCCAAGCCCCTCAAGACCCTCTCCCGAGAA
CGGCCCCTGCCCAACATCTTCAACCTGTACACCATCCTCACCGTCATGCTCCAGTTCTTTGTGCACTT
CCTGAGCCTTGTCTACCTGTACCGTGAGGCCCAGGCCCGGAGCCCCGAGAAGCAGGAGCAGTTCGTGG
ACTTGTACAAGGAGTTTGAGCCAAGCCTGGTCAACAGCACCGTCTACATCATGGCCATGGCCATGCAG
ATGGCCACCTTCGCCATCAATTACAAAGGCCCGCCCTTCATGGAGAGCCTGCCCGAGAACAAGCCCCT
GGTGTGGAGTCTGGCAGTTTCACTCCTGGCCATCATTGGCCTGCTCCTCGGCTCCTCGCCCGACTTCA
ACAGCCAGTTTGGCCTCGTGGACATCCCTGTGGAGTTCAAGCTGGTCATTGCCCAGGTCCTGCTCCTG
GACTTCTGCCTGGCGCTCCTGGCCGACCGCGTCCTGCAGTTCTTCCTGGGGACCCCGAAGCTGAAAGT
GCCTTCCTGAGATGGCAGTGCTGGTACCCACTGCCCACCCTGGCTGCCGCTGGGCGGGAACCCCAACA
GGGCCCCGGGAGGGAACCCTGCCCCCAACCCCCCACAGCAAGGCTGTACAGTCTCGCCCTTGGAAGAC
TGAGCTGGGACCCCCACAGCCATCCGCTGGCTTGGCCAGCAGAACCAGCCCCAAGCCAGCACCTTTGG
TAAATAAAGCAGCATCTGAGATTTTAAA

NOV66b, CG57562-01

| | | | |
|---|---|---|---|
| Protein Sequence | SEQ ID NO: 988 | 1204 aa | MW at 133030.2kD |

MAAAAAVGNAVPCGARPCGVRPDGQPKPGRSRRALLAAGPALIANGDELVAAVWPYRRLALLRRLTVL
PFAGLLYPAWLGAAAAGCWGWGSSWVQIPEAALLVLATICLAHALTVLSGHWSVHAHCALTCTPEYDP
SKATFVKVVPTPNNGSTELVALHRNEGEDGLEVLSFEFQKIKYSYDALEKKQFLPVAFPVGNAFSYYQ
SNRGFQEDSEIRAAEKKFGSNKAEMVVPDFSELFKERATAPFFVFQVFCVGLWCLDEYWYYSVFTLSM
LVAFEASLVQQQMRNMSEIRKMGNKPHMIQVYRSRKWRPIASDEIVPGDIVSIGRSPQENLVPCDVLL
LRGRCIVDEAMLTGESVPQMKEPIEDLSPDRVLDLQADSRLHVIFGGTKVVQHIPPQKATTGLKPVDS
GCVAYVLRTGFNTSQGKLLRTILFGVKRVTANNLETFIFILFLLVFAIAAAAYVWIEGTKDPSRNRYK
LFLECTLILTSVVPPELPIELSLAVNTSLIALAKLYMYCTEPFRIPFAGKVEVCCFDKTGTLTSDSLV
VRGVAGLRDGKEVTPVSSIPVETHRALASCHSLMQLDDGTLVGDPLEKAMLTAVDWTLTKDEKVFPRS
IKTQGLKIHQRFHFASALKRMSVLASYEKLGSTDLCYIAAVKGAPETLHSMFSQCPPDYHHIHTEISR
EGARVLALGYKELGHLTHQQAREVKREALECSLKFVGFIVVSCPLKADSKAVIREIQNASHRVVMITG
DNPLTACHVAQELHFIEKAHTLILQPPSEKGRQCEWRSIDGSIVLPLARGSPKALALEYALCLTGDGL
AHLQATDPQQLLRLIPHVQVFARVAPKQKEFVITSLKELGYVTLMCGDGTNDVGALKHADVGVALLAN
APERVVERRRRPRDSPTLSNSGIRATSRTAKQRSGLPPSEEQPTSQRDRLSQVLRDLEDESTPIVKLG
DASIAAPFTSKLSSIQCICHVIKQGRCTLVTTLQMFKILALNALILAYSQSVLYLEGVKFSDFQATLQ
GLLLAGCFLFISRSKPLKTLSRERPLPNIFNLYTILTVMLQFFVHFLSLVYLYREAQARSPEKQEQFV
DLYKEFEPSLVNSTVYIMAMAMQMATFAINYKGPPFMESLPENKPLVWSLAVSLLAIIGLLLGSSPDF
NSQFGLVDIPVEFKLVIAQVLLLDFCLALLADRVLQFFLGTPKLKVPS

| | |
|---|---|
| SEQ ID NO: 989 | 3517 bp |

| | | |
|---|---|---|
| NOV66c, SNP13380762 of | ORF Start: ATG at 5 | ORF Stop: TGA at 3506 |

| | | |
|---|---|---|
| CG57562-02, DNA Sequence | SNP Pos: 756 | SNP Change: T to C |

AAAGATGGCGGCAGCGGCGGCGGTGGGCAACGCGGTGCCCTGCGGGGCCCGGCCTTGCGGGGTCCGGC
CTGACGGGCAGCCCAAGCCCGGGCCGCAGCCGCGCGCGCTCCTTGCCGCCGGGCCGGCGCTCATAGCG
AACGGTGACGAGCTGGTGGCTGCCGTGTGGCCGTACCGGCGGTTGGCGCTGTTGCGGCGCCTCACGGT
GCTGCCATTCGCCGGGCTGCTTTACCCGGCCTGGTTGGGTGCCGCAGCCGCTGGCTGCTGGGGCTGGG
GCAGCAGTTGGGTGCAGATCCCCGAAGCTGCGCTGCTCGTGCTTGCCACCATCTGCCTCGCGCACGCG
CTCACTGTCCTCTCGGGGCATTGGTCTGTGCACGCGCATTGCGCGCTCACCTGCACCCCGGAGTACGA
CCCCAGCAAAGCGACCTTTGTGAAGGTGGTGCCAACCCCCAACAATGGCTCCACGGAGCTCGTGGCCC
TGCACCGCAATGAGGGCGAAGACGGGCTTGAGGTGCTGTCCTTCGAATTCCAGAAGATCAAGTATTCC
TACGATGCCCTGGAGAAGAAGCAGTTTCTCCCCGTGGCCTTTCCTGTGGGAAACGCCTTCTCATACTA
TCAGAGCAACAGAGGCTTCCAGGAAGACTCAGAGATCCGAGCAGCTGAGAAGAAATTTGGGAGCAACA
AGGCCGAGATGGTGGTGCCTGACTTCTCGGAGCTTTTCAAGGAGAGAGCCACAGCCCCCTTCTTTGTA
TTTCAGGCGTTCTGTGTGGGGCTCTGGTGCCTGGATGAGTACTGGTACTACAGCGTCTTTACGCTATC
CATGCTGGTGGCGTTCGAGGCCTCGCTGGTGCAGCAGCAGATGCGGAACATGTCGGAGATCCGGAAGA
TGGGCAACAAGCCCCACATGATCCAGGTCTACCGAAGCCGCAAGTGGAGGCCCATTGCCAGTGATGAG
ATCGTACCAGGGGACATCGTCTCCATCGGCCGCTCCCCACAGGAGAACCTGGTGCCATGTGACGTGCT
TCTGCTGCGAGGCCGCTGCATCGTAGACGAGGCCATGCTCACGGGGGAGTCCGTGCCACAGATGAAGG
AGCCCATCGAAGACCTCAGCCCAGACCGGGTGCTGGACCTCCAGGCTGATTCCCGGCTGCACGTCATC
TTCGGGGGCACCAAGGTGGTGCAGCACATCCCCCCACAGAAAGCCACCACGGGCCTGAAGCCGGTTGA
CAGCGGGTGCGTGGCCTACGTCCTGCGGACCGGATTCAACACATCCCAGGGCAAGCTGCTGCGCACCA
TCCTCTTCGGGGTCAAGAGGGTGACTGCGAACAACCTGGAGACCTTCATCTTCATCCTCTTCCTCCTG
GTGTTTGCCATCGCTGCAGCTGCCTATGTATGGATTGAAGGTACCAAGGACCCCAGCCGGAACCGCTA
CAAGCTGTTTCTGGAGTGCACCCTGATCCTCACCTCGGTCGTGCCTCCTGAGCTGCCCATCGAGCTGT
CCCTGGCCGTCAACACCTCCCTCATCGCCCTGGCCAAGCTCTACATGTACTGCACAGAGCCCTTCCGG
ATCCCCTTTGCTGGCAAGGTCGAGGTGTGCTGCTTTGACAAGACGGGGACGTTGACCAGTGACAGCCT
GGTGGTGCGCGGTGTGGCCGGGCTGAGAGACGGGAAGGAGGTGACCCCAGTGTCCAGCATCCCTGTAG
AAACACACCGGGCCCTGGCCTCGTGCCACTCGCTCATGCAGCTGGACGACGGCACCCTCGTGGGTGAC
CCTCTAGAGAAGGCCATGCTGACGGCCGTGGACTGGACGCTGACCAAAGATGAGAAAGTATTCCCCCG
AAGTATTAAAACTCAGGGGCTGAAAATTCACCAGCGCTTTCATTTTGCCAGTGCCCTGAAGCGAATGT
CCGTGCTTGCCTCGTATGAGAAGCTGGGCTCCACCGACCTTTGTTACATCGCGGCCGTGAAGGGGGCC
CCCGAAACTCTGCACTCCATGGCCCGGGAGGTCAAGCGGGAGGCCCTGGAGTGCAGCCTCAAGTTCGT
CGGCTTCATTGTGGTCTCCTGCCCGCTCAAGGCTGACTCGAAGGCCGTGATCCGGGAGATCCAGAATG
CGTCCCACCGGGTGTTCATGATCACGGGAGACAACCCGCTCACTGCATGCCACGTGGCCCAGGAGCTG
CACTTCATTGAAAAGGCCCACACGCTGATCCTGCAGCCTCCCTCCGAGAAAGGCCGGCAGTGCGAGTG
GCGCTCCATTGACGGCAGCATCGTGCTGCCCCTGGCCCGGGGCTCCCCAAAGGCACTGGCCCTGGAGT
ACGCACTGTGCCTCACAGGCGACGGCTTGGCCCACCTGCAGGCCACCGACCCCCAGCAGCTGCTCCGC
CTCATCCCCCATGTGCAGGTGTTCGCCCGTGTGGCTCCCAAGCAGAAGGAGTTTGTCATCACCAGCCT
GAAGGAGCTGGGCTACGTGACCCTCATGTGTGGGGATGGCACCAACGACGTGGGCGCCCTGAAGCATG
CTGACGTGGGTGTGGCGCTCTTGGCCAATGCCCCTGAGCGGGTTGTCGAGCGGCGACGGCGGCCCCGG
GACAGCCCAACCCTGAGCAACAGTGGCATCAGAGCCACCTCCAGGACAGCCAAGCAGCGGTCGGGGCT
CCCTCCCTCCGAGGAGCAGCCAACCTCCCAGAGGGACCGCCTGAGCCAGGTGCTGCGAGACCTCGAGG
ACGAGAGTACGCCCATTGTGAAACTGGGGGATGCCAGCATCGCAGCACCCTTCACCTCCAAGCTCTCA
TCCATCCAGTGCATCTGCCACGTGATCAAGCAGGGCCGCTGCACGCTGGTGACCACGCTACAGATGTT
CAAGATCCTGGCGCTCAATGCCCTCATCCTGGCCTACAGCCAGAGCGTCCTCTACCTGGAGGGAGTCA
AGTTCAGTGACTTCCAGGCCACCCTACAGGGGCTGCTGCTGGCCGGCTGCTTCCTCTTCATCTCCCGT
TCCAAGCCCCTCAAGACCCTCTCCCGAGAACGGCCCCTGCCCAACATCTTCAACCTGTACACCATCCT
CACCGTCATGCTCCAGTTCTTTGTGCACTTCCTGAGCCTTGTCTACCTGTACCGTGAGGCCCAGGCCC
GGAGCCCCGAGAAGCAGGAGCAGTTCGTGGACTTGTACAAGGAGTTTGAGCCAAGCCTGGTCAACAGC
ACCGTCTACATCATGGCCATGGCCATGCAGATGGCCACCTTCGCCATCAATTACAAAGGCCCGCCCTT
CATGGAGAGCCTGCCCGAGAACAAGCCCCTGGTGTGGAGTCTGGCAGTTTCACTCCTGGCCATCATTG
GCCTGCTCCTCGGCTCCTCGCCCGACTTCAACAGCCAGTTTGGCCTCGTGGACATCCCTGTGGAGTTC
AAGCTGGTCATTGCCCAGGTCCTGCTCCTGGACTTCTGCCTGGCGCTCCTGGCCGACCGCGTCCTGCA
GTTCTTCCTGGGGACCCCGAAGCTGAAAGTGCCTTCCTGAGATGGCAGT

| | | |
|---|---|---|
| NOV66c, SNP13380762 of | SEQ ID NO: 990 | MW at 128721.4kD |

| | | | |
|---|---|---|---|
| CG57562-02, Protein Sequence | SNP Pos: 251 | 1167 aa | SNP Change: Val to Ala |

MAAAAAVGNAVPCGARPCGVRPDGQPKPGPQPRALLAAGPALIANGDELVAAVWPYRRLALLRRLTVL
PFAGLLYPAWLGAAAAGCWGWGSSWVQIPEAALLVLATICLAHALTVLSGHWSVHAHCALTCTPEYDP
SKATFVKVVPTPNNGSTELVALHRNEGEDGLEVLSFEFQKIKYSYDALEKKQFLPVAFPVGNAFSYYQ
SNRGFQEDSEIRAAEKKFGSNKAEMVVPDFSELFKERATAPFFVFQAFCVGLWCLDEYWYYSVFTLSM
LVAFEASLVQQQMRNMSEIRKMGNKPHMIQVYRSRKWRPIASDEIVPGDIVSIGRSPQENLVPCDVLL
LRGRCIVDEANLTGESVPQMKEPIEDLSPDRVLDLQADSRLHVIFGGTKVVQHIPPQKATTGLKPVDS
GCVAYVLRTGFNTSQGKLLRTILFGVKRVTANNLETFIFILFLLVFAIAAAAYVWIEGTKDPSRNRYK
LFLECTLILTSVVPPELPIELSLAVNTSLIALAKLYMYCTEPFRIPFAGKVEVCCFDKTGTLTSDSLV
VRGVAGLRDGKEVTPVSSIPVETHRALASCHSLMQLDDGTLVGDPLEKAMLTAVDWTLTKDEKVFPRS
IKTQGLKIHQRFHFASALKRMSVLASYEKLGSTDLCYIAAVKGAPETLHSMAREVKREALECSLKFVG
FIVVSCPLKADSKAVIREIQNASHRVFMITGDNPLTACHVAQELHFIEKAHTLILQPPSEKGRQCEWR
SIDGSIVLPLARGSPKALALEYALCLTGDGLAHLQATDPQQLLRLIPHVQVFARVAPKQKEFVITSLK
ELGYVTLMCGDGTNDVGALKHADVGVALLANAPERVVERRRRPRDSPTLSNSGIRATSRTAKQRSGLP
PSEEQPTSQRDRLSQVLRDLEDESTPIVKLGDASIAAPFTSKLSSIQCICHVIKQGRCTLVTTLQMFK
ILALNALILAYSQSVLYLEGVKFSDFQATLQGLLLAGCFLFISRSKPLKTLSRERPLPNIFNLYTILT
VMLQFFVHFLSLVYLYREAQARSPEKQEQFVDLYKEFEPSLVNSTVYIMAMANQMATFAINYKGPPFM
ESLPENKPLVWSLAVSLLAIIGLLLGSSPDFNSQFGLVDIPVEFKLVIAQVLLLDFCLALLADRVLQF
FLGTPKLKVPS

| | |
|---|---|
| SEQ ID NO: 991 | 3517 bp |

| | | |
|---|---|---|
| NOV66d, SNP13380787 of | ORF Start: ATG at 5 | ORF Stop: TGA at 3506 |

| | | |
|---|---|---|
| CG57562-02, DNA Sequence | SNP Pos: 2732 | SNP Change: C to A |

AAAGATGGCGGCAGCGGCGGCGGTGGGCAACGCGGTGCCCTGCGGGGCCCGGCCTTGCGGGGTCCGGC
CTGACGGGCAGCCCAAGCCCGGGCCGCAGCCGCGCGCGCTCCTTGCCGCCGGGCCGGCGCTCATAGCG
AACGGTGACGAGCTGGTGGCTGCCGTGTGGCCGTACCGGCGGTTGGCGCTGTTGCGGCGCCTCACGGT
GCTGCCATTCGCCGGGCTGCTTTACCCGGCCTGGTTGGGTGCCGCAGCCGCTGGCTGCTGGGGCTGGG
GCAGCAGTTGGGTGCAGATCCCCGAAGCTGCGCTGCTCGTGCTTGCCACCATCTGCCTCGCGCACGCG
CTCACTGTCCTCTCGGGGCATTGGTCTGTGCACGCGCATTGCGCGCTCACCTGCACCCCGGAGTACGA
CCCCAGCAAAGCGACCTTTGTGAAGGTGGTGCCAACCCCCAACAATGGCTCCACGGAGCTCGTGGCCC
TGCACCGCAATGAGGGCGAAGACGGGCTTGAGGTGCTGTCCTTCGAATTCCAGAAGATCAAGTATTCC
TACGATGCCCTGGAGAAGAAGCAGTTTCTCCCCGTGGCCTTTCCTGTGGGAAACGCCTTCTCATACTA
TCAGAGCAACAGAGGCTTCCAGGAAGACTCAGAGATCCGAGCAGCTGAGAAGAAATTTGGGAGCAACA
AGGCCGAGATGGTGGTGCCTGACTTCTCGGAGCTTTTCAAGGAGAGAGCCACAGCCCCCTTCTTTGTA
TTTCAGGTGTTCTGTGTGGGGCTCTGGTGCCTGGATGAGTACTGGTACTACAGCGTCTTTACGCTATC
CATGCTGGTGGCGTTCGAGGCCTCGCTGGTGCAGCAGCAGATGCGGAACATGTCGGAGATCCGGAAGA
TGGGCAACAAGCCCCACATGATCCAGGTCTACCGAAGCCGCAAGTGGAGGCCCATTGCCAGTGATGAG
ATCGTACCAGGGGACATCGTCTCCATCGGCCGCTCCCCACAGGAGAACCTGGTGCCATGTGACGTGCT
TCTGCTGCGAGGCCGCTGCATCGTAGACGAGGCCATGCTCACGGGGGAGTCCGTGCCACAGATGAAGG
AGCCCATCGAAGACCTCAGCCCAGACCGGGTGCTGGACCTCCAGGCTGATTCCCGGCTGCACGTCATC
TTCGGGGGCACCAAGGTGGTGCAGCACATCCCCCCACAGAAAGCCACCACGGGCCTGAAGCCGGTTGA
CAGCGGGTGCGTGGCCTACGTCCTGCGGACCGGATTCAACACATCCCAGGGCAAGCTGCTGCGCACCA
TCCTCTTCGGGGTCAAGAGGGTGACTGCGAACAACCTGGAGACCTTCATCTTCATCCTCTTCCTCCTG
GTGTTTGCCATCGCTGCAGCTGCCTATGTATGGATTGAAGGTACCAAGGACCCCAGCCGGAACCGCTA
CAAGCTGTTTCTGGAGTGCACCCTGATCCTCACCTCGGTCGTGCCTCCTGAGCTGCCCATCGAGCTGT
CCCTGGCCGTCAACACCTCCCTCATCGCCCTGGCCAAGCTCTACATGTACTGCACAGAGCCCTTCCGG
ATCCCCTTTGCTGGCAAGGTCGAGGTGTGCTGCTTTGACAAGACGGGGACGTTGACCAGTGACAGCCT
GGTGGTGCGCGGTGTGGCCGGGCTGAGAGACGGGAAGGAGGTGACCCCAGTGTCCAGCATCCCTGTAG
AAACACACCGGGCCCTGGCCTCGTGCCACTCGCTCATGCAGCTGGACGACGGCACCCTCGTGGGTGAC
CCTCTAGAGAAGGCCATGCTGACGGCCGTGGACTGGACGCTGACCAAAGATGAGAAAGTATTCCCCCG
AAGTATTAAAACTCAGGGGCTGAAAATTCACCAGCGCTTTCATTTTGCCAGTGCCCTGAAGCGAATGT
CCGTGCTTGCCTCGTATGAGAAGCTGGGCTCCACCGACCTTTGTTACATCGCGGCCGTGAAGGGGGCC
CCCGAAACTCTGCACTCCATGGCCCGGGAGGTCAAGCGGGAGGCCCTGGAGTGCAGCCTCAAGTTCGT
CGGCTTCATTGTGGTCTCCTGCCCGCTCAAGGCTGACTCGAAGGCCGTGATCCGGGAGATCCAGAATG
CGTCCCACCGGGTGTTCATGATCACGGGAGACAACCCGCTCACTGCATGCCACGTGGCCCAGGAGCTG
CACTTCATTGAAAAGGCCCACACGCTGATCCTGCAGCCTCCCTCCGAGAAAGGCCGGCAGTGCGAGTG
GCGCTCCATTGACGGCAGCATCGTGCTGCCCCTGGCCCGGGGCTCCCCAAAGGCACTGGCCCTGGAGT
ACGCACTGTGCCTCACAGGCGACGGCTTGGCCCACCTGCAGGCCACCGACCCCCAGCAGCTGCTCCGC
CTCATCCCCCATGTGCAGGTGTTCGCCCGTGTGGCTCCCAAGCAGAAGGAGTTTGTCATCACCAGCCT
GAAGGAGCTGGGCTACGTGACCCTCATGTGTGGGGATGGCACCAACGACGTGGGCGCCCTGAAGCATG
CTGACGTGGGTGTGGCGCTCTTGGCCAATGCCCCTGAGCGGGTTGTCGAGCGGCGACGGCGGCCCCGG
GACAGCCCAACCCTGAGCAACAGTGGCATCAGAGCCACCTCCAGGACAGCCAAGCAGCGGTCGGGGCT
CCCTCCCTCCGAGGAGCAGCCAACCTCCCAGAGGGACCGCCTGAGCCAGGTGCTGCGAGACCTCGAGG
ACGAGAGTACGACCATTGTGAAACTGGGGGATGCCAGCATCGCAGCACCCTTCACCTCCAAGCTCTCA
TCCATCCAGTGCATCTGCCACGTGATCAAGCAGGGCCGCTGCACGCTGGTGACCACGCTACAGATGTT
CAAGATCCTGGCGCTCAATGCCCTCATCCTGGCCTACAGCCAGAGCGTCCTCTACCTGGAGGGAGTCA
AGTTCAGTGACTTCCAGGCCACCCTACAGGGGCTGCTGCTGGCCGGCTGCTTCCTCTTCATCTCCCGT
TCCAAGCCCCTCAAGACCCTCTCCCGAGAACGGCCCCTGCCCAACATCTTCAACCTGTACACCATCCT
CACCGTCATGCTCCAGTTCTTTGTGCACTTCCTGAGCCTTGTCTACCTGTACCGTGAGGCCCAGGCCC
GGAGCCCCGAGAAGCAGGAGCAGTTCGTGGACTTGTACAAGGAGTTTGAGCCAAGCCTGGTCAACAGC
ACCGTCTACATCATGGCCATGGCCATGCAGATGGCCACCTTCGCCATCAATTACAAAGGCCCGCCCTT
CATGGAGAGCCTGCCCGAGAACAAGCCCCTGGTGTGGAGTCTGGCAGTTTCACTCCTGGCCATCATTG
GCCTGCTCCTCGGCTCCTCGCCCGACTTCAACAGCCAGTTTGGCCTCGTGGACATCCCTGTGGAGTTC
AAGCTGGTCATTGCCCAGGTCCTGCTCCTGGACTTCTGCCTGGCGCTCCTGGCCGACCGCGTCCTGCA
GTTCTTCCTGGGGACCCCGAAGCTGAAAGTGCCTTCCTGAGATGGCAGT

| | | |
|---|---|---|
| NOV66d, SNP13380787 of | SEQ ID NO: 992 | MW at 128753.4kD |

| | | | |
|---|---|---|---|
| CG57562-02, Protein Sequence | SNP Pos: 910 | 1167 aa | SNP Change: Pro to Thr |

MAAAAAVGNAVPCGARPCGVRPDGQPKPGPQPRALLAAGPALIANGDELVAAVWPYRRLALLRRLTVL
PFAGLLYPAWLGAAAAGCWGWGSSWVQIPEAALLVLATICLAHALTVLSGHWSVHAHCALTCTPEYDP
SKATFVKVVPTPNNGSTELVALHRNEGEDGLEVLSFEFQKIKYSYDALEKKQFLPVAFPVGNAFSYYQ
SNRGFQEDSEERAAEKKFGSNKAEMVVPDFSELFKERATAPFFVFQVFCVGLWCLDEYWYYSVFTLSM
LVAFEASLVQQQMRNMSEIRKMGNKPHMIQVYRSRKWRPIASDEIVPGDIVSIGRSPQENLVPCDVLL
LRGRCIVDEAMLTGESVPQMKEPIEDLSPDRVLDLQADSRLHVIFGGTKVVQHIPPQKATTGLKPVDS
GCVAYVLRTGFNTSQGKLLRTILFGVKRVTANNLETFIFILFLLVFAIAAAAYVWIEGTKDPSRNRYK
LFLECTLILTSVVPPELPIELSLAVNTSLIALAKLYMYCTEPFRIPFAGKVEVCCFDKTGTLTSDSLV
VRGVAGLRDGKEVTPVSSIPVETHRALASCHSLMQLDDGTLVGDPLEKAMLTAVDWTLTKDEKVFPRS
IKTQGLKIHQRFHFASALKRMSVLASYEKLGSTDLCYIAAVKGAPETLHSMAREVKREALECSLKFVG
FIVVSCPLKADSKAVIREIQNASHRVFMITGDNPLTACHVAQELHFIEKAHTLILQPPSEKGRQCEWR
SIDGSIVLPLARGSPKALALEYALCLTGDGLAHLQATDPQQLLRLIPHVQVFARVAPKQKEFVITSLK
ELGYVTLMCGDGTNDVGALKHADVGVALLANAPERVVERRRRPRDSPTLSNSGIRATSRTAKQRSGLP
PSEEQPTSQRDRLSQVLRDLEDESTTIVKLGDASIAAPFTSKLSSIQCICHVIKQGRCTLVTTLQMFK
ILALNALILAYSQSVLYLEGVKFSDFQATLQGLLLAGCFLFISRSKPLKTLSRERPLPNIFNLYTILT
VMLQFFVHFLSLVYLYREAQARSPEKQEQFVDLYKEFEPSLVNSTVYIMAMANQMATFAINYKGPPFM
ESLPENKPLVWSLAVSLLAIIGLLLGSSPDFNSQFGLVDIPVEFKLVIAQVLLLDFCLALLADRVLQF
FLGTPKLKVPS

[0734] A ClustalW comparison of the above protein sequences yields the following sequence alignment shown in Table 66B.

TABLE 66B
Comparison of the NOV66 protein sequences.

| | |
|---|---|
| NOV66a | MAAAAAVGNAVPCGARPCGVRPDGQPKPGPQPRALLAAGPALIANGDELVAAVWPYRRLA |
| NOV66b | MAAAAAVGNAVPCGARPCGVRPDGQPKPGRSRRALLAAGPALIANGDELVAAVWPYRRLA |
| NOV66a | LLRRLTVLPFAGLLYPAWLGAAAAGCWGWGSSWVQIPEAALLVLATICLAHALTVLSGHW |
| NOV66b | LLRRLTVLPFAGLLYPAWLGAAAAGCWGWGSSWVQIPEAALLVLATICLAHALTVLSGHW |
| NOV66a | SVHAHCALTCTPEYDPSKATFVKVVPTPNNGSTELVALHRNEGEDGLEVLSFEFQKIKYS |
| NOV66b | SVRAHCALTCTPEYDPSKATFVKVVPTPNNGSTELVALHRNEGEDGLEVLSFEFQKIKYS |
| NOV66a | YDALEKKQFLPVAFPVGNAFSYYQSNRGFQEDSEIRAAEKKFGSNKAEMVVPDFSELFKE |
| NOV66b | YDALEKKQFLPVAFPVGNAFSYYQSNRGFQEDSEIRAAEKKFGSNKAEMVVPDFSELFKE |
| NOV66a | RATAPFFVFQVFCVGLWCLDEYWYYSVFTLSMLVAFEASLVQQQMRNMSEIRKMGNKPHM |
| NOV66b | RATAPFFVFQVFCVGLWCLDEYWYYSVFTLSMLVAFEASLVQQQMRNMSEIRKMGNKPHM |
| NOV66a | IQVYRSRKWRPIASDEIVPGDIVSIGRSPQENLVPCDVLLLRGRCIVDEANLTGESVPQM |
| NOV66b | IQVYRSRKWRPIASDEIVPGDIVSIGRSPQENLVPCDVLLLRGRCIVDEAMLTGESVPQM |
| NOV66a | KEPIEDLSPDRVLDLQADSRLHVIFGGTKVVQHIPPQKATTGLKPVDSGCVAYVLRTGFN |
| NOV66b | KEPIEDLSPDRVLDLQADSRLHVIFGGTKVVQHIPPQKATTGLKPVDSGCVAYVLRTGFN |
| NOV66a | TSQGKLLRTILFGVKRVTANNLETFIFILFLLVFAIAAAAYVWIEGTKDPSRNRYKLFLE |
| NOV66b | TSQGKLLRTILFGVKRVTANNLETFIFILFLLVFAIAAAAYVWIEGTKDPSRNRYKLFLE |
| NOV66a | CTLILTSVVPPELPIELSLAVNTSLIALAKLYMYCTEPFRIPFAGKVEVCCFDKTGTLTS |
| NOV66b | CTLILTSVVPPELPIELSLAVNTSLIALAKLYMYCTEPFRIPFAGKVEVCCFDKTGTLTS |
| NOV66a | DSLVVRGVAGLRDGKEVTPVSSIPVETHRALASCHSLMQLDDGTLVGDPLEKAMLTAVDW |
| NOV66b | DSLVVRGVAGLRDGKEVTPVSSIPVETHRALASCHSLMQLDDGTLVGDPLEKAMLTAVDW |
| NOV66a | TLTKDEKVFPRSIKTQGLKIHQRFHFASALKRMSVLASYEKLGSTDLCYIAAVKGAPETL |
| NOV66b | TLTKDEKVFPRSIKTQGLKIHQRFHFASALKRMSVLASYEKLGSTDLCYIAAVKGAPETL |
| NOV66a | HSM-------------------------------------AREVKREALECSLKFVGFIV |
| NOV66b | HSMFSQCPPDYHHIHTEISREGARVLALGYKELGHLTHQQAREVKREALECSLKFVGFIV |
| NOV66a | VSCPLKADSKAVIREIQNASHRVFMITGDNPLTACHVAQELHFIEKAHTLILQPPSEKGR |
| NOV66b | VSCPLKADSKAVIREIQNASHRVVMITGDNPLTACHVAQELHFIEKAHTLILQPPSEKGR |
| NOV66a | QCEWRSIDGSIVLPLARGSPKALALEYALCLTGDGLAHLQATDPQQLLRLIPHVQVFARV |
| NOV66b | QCEWRSIDGSIVLPLARGSPKALALEYALCLTGDGLAHLQATDPQQLLRLIPHVQVFARV |
| NOV66a | APKQKEFVITSLKELGYVTLMCGDGTNDVGALKHADVGVALLANAPERVVERRRRPRDSP |
| NOV66b | APKQKEFVITSLKELGYVTLMCGDGTNDVGALKHADVGVALLANAPERVVERRRRPRDSP |
| NOV66a | TLSNSGIRATSRTAKQRSGLPPSEEQPTSQRDRLSQVLRDLEDESTPIVKLGDASIAAPF |
| NOV66b | TLSNSGIRATSRTAKQRSGLPPSEEQPTSQRDRLSQVLRDLEDESTPIVKLGDASIAAPF |
| NOV66a | TSKLSSIQCICHVIKQGRCTLVTTLQMFKILALNALILAYSQSVLYLEGVKFSDFQATLQ |
| NOV66b | TSKLSSIQCICHVIKQGRCTLVTTLQMFKILAINALILAYSQSVLYLEGVKFSDFQATLQ |
| NOV66a | GLLLAGCFLFISRSKPLKTLSRERPLPNIFNLYTILTVMLQFFVHFLSLVYLYREAQARS |
| NOV66b | GLLLAGCFLFISRSKPLKTLSRERPLPNIFNLYTILTVMLQFFVHFLSLVYLYREAQARS |
| NOV66a | PEKQEQFVDLYKEFEPSLVNSTVYIMAMANQMATFAINYKGPPFMESLPENKPLVWSLAV |
| NOV66b | PEKQEQFVDLYKEFEPSLVNSTVYIMAMANQMATFAINYKGPPFMESLPENKPLVWSLAV |
| NOV66a | SLLAIIGLLLGSSPDFNSQFGLVDIPVEFKLVIAQVLLLDFCLALLADRVLQFFLGTPKL |
| NOV66b | SLLAIIGLLLGSSPDFNSQFGLVDIPVEFKLVIAQVLLLDFCLALLADRVLQFFLGTPKL |
| NOV66a | KVPS |
| NOV66b | KVPS |
| NOV66a | (SEQ ID NO: 986) |
| NOV66b | (SEQ ID NO: 988) |

[0735] Further analysis of the NOV66a protein yielded the following properties shown in Table 66C.

TABLE 66C
Protein Sequence Properties NOV66a

| | |
|---|---|
| SignalP analysis: | Cleavage site between residues 16 and 17 |
| PSORT II analysis: | |

| | |
|---|---|
| PSG: | a new signal peptide prediction method |
| | N-region: length 0; pos.chg 0; neg.chg 0 |
| | H-region: length 15; peak value 7.85 |
| | PSG score: 3.45 |
| GvH: | von Heijne's method for signal seq. recognition |
| | GvH score (threshold: −2.1): −4.35 |
| | possible cleavage site: between 46 and 47 |

>>> Seems to have no N-terminal signal peptide

| ALOM: | Klein et al's method for TM region allocation |
|---|---|
| | Init position for calculation: 1 |
| | Tentative number of TMS(s) for the threshold 0.5: 11 |
| | INTEGRAL Likelihood = −7.38 Transmembrane 100-116 |
| | INTEGRAL Likelihood = −2.23 Transmembrane 243-259 |
| | INTEGRAL Likelihood = −0.16 Transmembrane 265-281 |
| | INTEGRAL Likelihood = −11.94 Transmembrane 446-462 |
| | INTEGRAL Likelihood = 0.10 Transmembrane 493-509 |
| | INTEGRAL Likelihood = −0.64 Transmembrane 672-688 |
| | INTEGRAL Likelihood = −0.69 Transmembrane 944-960 |
| | INTEGRAL Likelihood = −1.38 Transmembrane 978-994 |
| | INTEGRAL Likelihood = −3.61 Transmembrane 1017-1033 |
| | INTEGRAL Likelihood = −9.45 Transmembrane 1097-1113 |
| | INTEGRAL Likelihood = −8.65 Transmembrane 1134-1150 |
| | PERIPHERAL Likelihood = 1.01 (at 67) |
| | ALOM score: −11.94 (number of TMSs: 11) |
| MTOP: | Prediction of membrane topology (Hartmann et al.) |
| | Center position for calculation: 107 |
| | Charge difference: 3.0 C( 2.0) - N(−l.0) |
| | C > N: C-terminal side will be inside |

>>> Caution: Inconsistent mtop result with signal peptide
>>> membrane topology: type 3b
MITDISC: discrimination of mitochondrial targeting seq

| | | | |
|---|---|---|---|
| R content: | 2 | Hyd Moment (75): | 2.14 |
| Hyd Moment (95): | 0.67 | G content: | 3 |
| D/E content: | 1 | S/T content: | 0 |
| Score: −5.79 | | | |

Gavel: prediction of cleavage sites for mitochondrial preseq

R-2 motif at 43 PRA|LL

NUCDISC: discrimination of nuclear localization signals

pat4: RRRR (5) at 855
pat4: RRRP (4) at 856
pat4: RRPR (4) at 857
pat7: none
bipartite: RKMGNKPHMIQVYRSRK at 292
content of basic residues: 10.4%
NLS Score: 0.83

KDEL: ER retention motif in the C-terminus: none
ER Membrane Retention Signals:

KKXX-like motif in the C-terminus: LKVP
SKL: peroxisomal targeting signal in the C-terminus: none
PTS2: 2nd peroxisomal targeting signal: none
VAC: possible vacuolar targeting motif: none
RNA-binding motif: none
Actinin-type actin-binding motif:
type 1: none
type 2: none

NMYR: N-myristoylation pattern : none
Prenylation motif: none
memYQRL: transport motif from cell surface to Golgi: none
Tyrosines in the tail: none
Dileucine motif in the tail: none
checking 63 PROSITE DNA binding motifs: none
checking 71 PROSITE ribosomal protein motifs: none
checking 33 PROSITE prokaryotic DNA binding motifs: none

| | |
|---|---|
| NNCN: | Reinhardt's method for Cytoplasmic/Nuclear discrimination |
| | Prediction: cytoplasmic |
| | Reliability: 94.1 |
| COIL: | Lupas's algorithm to detect coiled-coil regions |
| | total: 0 residues |

--------------------------
Final Results (k = 9/23):

77.8%: endoplasmic reticulum
11.1%: mitochondrial
11.1%: vacuolar

>> prediction for CG57562-02 is end (k = 9)

[0736] A search of the NOV66a protein against the Geneseq database, a proprietary database that contains sequences published in patents and patent publication, yielded several homologous proteins shown in Table 66D.

TABLE 66D
Geneseq Results for NOV66a

| | | NOV66a | Identities/ | |
|---|---|---|---|---|
| | | Residues/ | Similarities for | Ex- |
| Geneseq | Protein/Organism/Length | Match | the Matched | pect |
| Identifier | [Patent #, Date] | Residues | Region | Value |
| AAU91186 | Human HEAT-3 polypeptide - | 1 . . . 1167 | 1165/1204 (96%) | 0.0 |
| | Homo sapiens, 1204 aa. | 1 . . . 1204 | 1165/1204 (96%) | |
| | [WO200216591-A2, 28-Feb.- | | | |
| | 2002] | | | |
| AAE16780 | Human transporter and ion | 1 . . . 1167 | 1159/1204 (96%) | 0.0 |
| | channel-17 (TRIGH-17) protein - | 1 . . . 1197 | 1159/1204 (96%) | |
| | Homo sapiens, 1197 aa. | | | |
| | [WO200192304-A2, 06-Dec.- | | | |
| | 2001] | | | |
| ABG30096 | Novel human diagnostic protein | 328 . . . 1167 | 829/915 (90%) | 0.0 |
| | #30087 - Homo sapiens, 914 aa. | 7 . . . 914 | 830/915 (90%) | |
| | [WO200175067-A2, 11-Oct.- | | | |
| | 2001] | | | |
| AAB42279 | Human ORFX ORF2043 | 418 . . . 1167 | 734/789 (93%) | 0.0 |
| | polypeptide sequence SEQ ID | 1 . . . 789 | 737/789 (93%) | |
| | NO:4086 - Homo sapiens, 789 | | | |
| | aa. [WO200058473-A2, 05- | | | |
| | Oct.-2000] | | | |
| AAM93412 | Human polypeptide, SEQ ID | 633 . . . 1167 | 530/572 (92%) | 0.0 |
| | NO: 3024 - Homo sapiens, 572 | 1 . . . 572 | 530/572 (92%) | |
| | aa. [EP1130094-A2, 05-Sep.- | | | |
| | 2001] | | | |

[0737] In a BLAST search of public sequence databases, the NOV66a protein was found to have homology to the proteins shown in the BLASTP data in Table 66E.

TABLE 66E
Public BLASTP Results for NOV66a

| | | NOV66a | Identities/ | |
|---|---|---|---|---|
| Protein | | Residues/ | Similarities for | Ex- |
| Accession | | Match | the Matched | pect |
| Number | Protein/Organism/Length | Residues | Portion | Value |
| Q9HD20 | Probable cation-transporting | 1..1167 | 1166/1204 (96%) | 0.0 |
| | ATPase 2 (EC 3.6.3.-) (CGI- | 1 . . . 1204 | 1166/1204 (96%) | |
| | 152) - Homo sapiens (Human), | | | |
| | 1204 aa. | | | |
| CAD29018 | Sequence 8 from Patent | 1 . . . 1167 | 1165/1204 (96%) | 0.0 |
| | WO0216591 - Homo sapiens | 1 . . . 1204 | 1165/1204 (96%) | |
| | (Human), 1204 aa. | | | |
| Q9EPE9 | Probable cation-transporting | 5 . . . 1167 | 1103/1200 (91%) | 0.0 |
| | ATPase 2 (EC 3.6.3.-) (CATP) - | 2 . . . 1200 | 1127/1200 (93%) | |
| | Mus musculus (Mouse), 1200 | | | |
| | aa. | | | |
| Q9VKJ6 | BCDNA:GH06032 protein - | 98 . . . 1164 | 594/1123 (52%) | 0.0 |
| | Drosophila melanogaster (Fruit | 105 . . . 1219 | 770/1123 (67%) | |
| | fly), 1225 aa. | | | |
| Q8NC73 | Hypothetical protein FLJ90439 - | 633 . . . 1167 | 530/572 (92%) | 0.0 |
| | Homo sapiens (Human), 572 | 1 . . . 572 | 530/572 (92%) | |
| | aa. | | | |

[0738] PFam analysis indicates that the NOV66a protein contains the domains shown in the Table 66F.

TABLE 66F
Domain Analysis of NOV66a

| | | Identities/ | |
|---|---|---|---|
| | NOV66a | Similarities | |
| | Match | for the | |
| | Region | Matched Region | Expect Value |
| E1-E2_ATPase | 266..511 | 62/284 (22%) | 7.4e-05 |
| | | 166/284 (58%) | |
| Hydrolase | 527 . . . 848 | 35/327 (11%) | 2.8e-06 |
| | | 199/327 (61%) | |

### Example 67

[0739] The NOV67 clone was analyzed, and the nucleotide and encoded polypeptide sequences are shown in Table 67A.

TABLE 67A
NOV67 Sequence Analysis

| | | |
|---|---|---|
| NOV67a, CG57758-03 | SEQ ID NO: 993 | 3147 bp |

| | | |
|---|---|---|
| DNA Sequence | ORF Start: ATG at 2 | ORF Stop: TAG at 1706 |

GATGGCCTCGGCGCTGAGCTATGTCTCCAAGTTCAAGTCCTTCGTGATCTTGTTCGTCACCCCGCTCC
TGCTGCTGCCACTCGTCATTCTGATGCCCGCCAAGTTTGTCAGGTGTGCCTACGTCATCATCCTCATG
GCCATTTACTGGTGCACAGAAGTCATCCCTCTGGCTGTCACCTCTCTCATGCCTGTCTTGCTTTTCCC
ACTCTTCCAGATTCTGGACTCCAGGCAGGTGTGTGTCCAGTACATGAAGGACACCAACATGCTGTTCC
TGGGCGGCCTCATCGTGGCCGTGGCTGTGGAGCGCTGGAACCTGCACAAGAGGATCGCCCTGCGCACG
CTCCTCTGGGTGGGGGCCAAGCCTGCACGGCTGATGCTGGGCTTCATGGGCGTCACAGCCCTCCTGTC
CATGTGGATCAGTAACACGGCAACCACGGCCATGATGGTGCCCATCGTGGAGGCCATATTGCAGCAGA
TGGAAGCCACAAGCGCAGCCACCGAGGCCGGCCTGGAGCTGGTGGACAAGGGCAAGGCCAAGGAGCTG
CCAGGGAGTCAAGTGATTTTTGAAGGCCCCACTCTGGGGCAGCAGGAAGACCAAGAGCGGAAGAGGTT
GTGTAAGGCCATGACCCTGTGCATCTGCTACGCGGCCAGCATCGGGGGCACCGCCACCCTGACCGGGA
CGGGACCCAACGTGGTGCTCCTGGGCCAGATGAACGAGTTGTTTCCTGACAGCAAGGACCTCGTGAAC
TTTGCTTCCTGGTTTGCATTTGCCTTTCCCAACATGCTGGTGATGCTGCTGTTCGCCTGGCTGTGGCT
CCAGTTTGTTTACATGAGATTCAATTTTAAAAAGTCCTGGGGCTGCGGGCTAGAGAGCAAGAAAAACG
AGAAGGCTGCCCTCAAGGTGCTGCAGGAGGAGTACCGGAAGTTGGGGCCCTTGTCCTTCGCGGAGATC
AACGTGCTGATCTGCTTCTTCCTGCTGGTCATCCTGTGGTTCTCCCGAGACCCCGGCTTCATGCCCGG
CTGGCTGACTGTTGCCTGGGTGGAGGGTGAGACAAAGTATGTCTCCGATGCCACTGTGGCCATCTTTG
TGGCCACCCTGCTATTCATTGTGCCTTCACAGAAGCCCAAGTTTAACTTCCGCAGCCAGACTGAGGAA
GAAAGGAAAACTCCATTTTATCCCCCTCCCCTGCTGGATTGGAAGGTAACCCAGGAGAAAGTGCCCTG
GGGCATCGTGCTGCTACTAGGGGGCGGATTTGCTCTGGCTAAAGGATCCGAGGCCTCGGGGCTGTCCG
TGTGGATGGGGAAGCAGATGGAGCCCTTGCACGCAGTGCCCCCGGCAGCCATCACCTTGATCTTGTCC
TTGCTCGTTGCCGTGTTCACTGAGTGCACAAGCAACGTGGCCACCACCACCTTGTTCCTGCCCATCTT
TGCCTCCATGTCTCGCTCCATCGGCCTCAATCCGCTGTACATCATGCTGCCCTGTACCCTGAGTGCCT
CCTTTGCCTTCATGTTGCCTGTGGCCACCCCTCCAAATGCCATCGTGTTCACCTATGGGCACCTCAAG
GTTGCTGACATGGTGAAAACAGGAGTCATAATGAACATAATTGGAGTCTTCTGTGTGTTTTTGGCTGT
CAACACCTGGGGACGGGCCATATTTGACTTGGATCATTTCCCTGACTGGGCTAATGTGACACATATTG
AGACTTAGGAAGAGCCACAAGACCACACACACAGCCCTTACCCTCCTCAGGACTACCGAACCTTCTGG
CACACCTTGTACAGAGTTTTGGGGTTCACACCCCAAAATGACCCAACGATGTCCACACACCACCAAAA
CCCAGCCAATGGGCCACCTCTTCCTCCAAGCCCAGATGCAGAGATGGTCATGGGCAGCTGGAGGGTAG
GCTCAGAAATGAAGGGAACCCCTCAGTGGGCTGCTGGACCCATCTTTCCCAAGCCTTGCCATTATCTC
TGTGAGGGAGGCCAGGTAGCCGAGGGATCAGGATGCAGGCTGCTGTACCCGCTCTGCCTCAAGCATCC
CCCACACAGGGCTCTGGTTTTCACTCGCTTCGTCCTAGATAGTTTAAATGGGAATCGGATCCCCTGGT
TGAGAGCTAAGACAACCACCTACCAGTGCCCATGTCCCTTCCAGCTCACCTTGAGCAGCCTCAGATCA
TCTCTGTCACTCTGGAAGGGACACCCCAGCCAGGGACGGAATGCCTGGTCTTGAGCAACCTCCCACTG
CTGGAGTGCGAGTGGGAATCAGAGCCTCCTGAAGCCTCTGGGAACTCCTCCTGTGGCCACCACCAAAG
GATGAGGAATCTGAGTTGCCAACTTCAGGACGACACCTGGCTTGCCACCCACAGTGCACCACAGGCCA
ACCTACGCCCTTCATCACTTGGTTCTGTTTTAATCGACTGGCCCCCTGTCCCACCTCTCCAGTGAGCC
TCCTTCAACTCCTTGGTCCCCTGTTGTCTGGGTCAACATTTGCCGAGACGCCTTGGCTGGCACCCTCT
GGGGTCCCCCTTTTCTCCCAGGCAGGTCATCTTTTCTGGGAGATGCTTCCCCTGCCATCCCCAAATAG
CTAGGATCACACTCCAAGTATGGGCAGTGATGGCGCTCTGGGGGCCACAGTGGGCTATCTAGGCCCTC
CCTCACCTGAGGCCCAGAGTGGACACAGCTGTTAATTTCCACTGGCTATGCCACTTCAGAGTCTTTCA
TGCCAGCGTTTGAGCTCCTCTGGGTAAAATCTTCCCTTTGTTGACTGGCCTTCACAGCCATGGCTGGT
GACAACAGAGGATCGTTGAGATTGAGCAGCGCTTGGTGATCTCTCAGCAAACAACCCCTGCCCGTGGG
CCAATCTACTTGAAGTTACTCGGACAAAGACCCCAAAGTGGGGCAACAACTCCAGAGAGGCTGTGGGA
ATCTTCAGAAGCCCCCCTGTAAGAGACAGACATGAGAGACAAGCATCTTCTTTCCCCCGCAAGTCCAT
TTTATTTCCTTCTTGTGCTGCTCTGGAAGAGAGGCAGTAGCAAAGAGATGAGCTCCTGGATGGCATTT
TCCAGGGCAGGAGAAAGTATGAGAGCCTCAGGAAACCCCATCAAGGACCGAGTATGTGTCTGGTTCCT
TTGGTGGTTGGCTTCTGGC

NOV67a, CG57758-03

| | | | |
|---|---|---|---|
| Protein Sequence | SEQ ID NO: 994 | 568 aa | MW at 63061.4kD |

MASALSYVSKFKSFVILFVTPLLLLPLVILMPAKFVRCAYVIILMAIYWCTEVIPLAVTSLMPVLLFP
LFQILDSRQVCVQYMKDTNMLFLGGLIVAVAVERWNLHKRIALRTLLWVGAKPARLMLGFMGVTALLS
MWISNTATTAMMVPIVEAILQQMEATSAATEAGLELVDKGKAKELPGSQVIFEGPTLGQOEDQERKRL
CKANTLCICYAASIGGTATLTGTGPNVVLLGQNNELFPDSKDLVNFASWFAFAFPNMLVNLLFAWLWL
QFVYMRFNFKKSWGCGLESKKNEKAALKVLQEEYRKLGPLSFAEINVLICFFLLVILWFSRDPGFMPG
WLTVAWVEGETKYVSDATVAIFVATLLFIVPSQKPKFNFRSQTEEERKTPFYPPPLLDWKVTQEKVPW
GIVLLLGGGFALAKGSEASGLSVWMGKQMEPLHAVPPAAITLILSLLVAVFTECTSNVATTTLFLPIF
ASMSRSIGLNPLYIMLPCTLSASFAFMLPVATPPNAIVFTYGHLKVADMVKTGVIMNIIGVFCVFLAV
NTWGRAIFDLDHFPDWANVTHIET

| | | |
|---|---|---|
| NOV66b, 308537854 | SEQ ID NO: 995 | 1729 bp |

| | | |
|---|---|---|
| DNA Sequence | ORF Start: at 2 | ORF Stop: end of sequence |

CACCAGATCTCCCACCATGGCCTCGGCGCTGAGCTATGTCTCCAAGTTCAAGTCCTTCGTGATCTTGT
TCGTCACCCCGCTCCTGCTGCTGCCACTCGTCATTCTGATGCCCGCCAAGTTTGTCAGGTGTGCCTAC
GTCATCATCCTCATGGCCATTTACTGGTGCACAGAAGTCATCCCTCTGGCTGTCACCTCTCTCATGCC
TGTCTTGCTTTTCCCACTCTTCCAGATTCTGGACTCCAGGCAGGTGTGTGTCCAGTACATGAAGGACA
CCAACATGCTGTTCCTGGGCGGCCTCATCGTGGCCGTGGCTGTGGAGCGCTGGAACCTGCACAAGAGG
ATCGCCCTGCGCACGCTCCTCTGGGTGGGGGCCAAGCCTGCACGGCTGATGCTGGGCTTCATGGGCGT
CACAGCCCTCCTGTCCATGTGGATCAGTAACACGGCAACCACGGCCATGATGGTGCCCATCGTGGAGG
CCATATTGCAGCAGATGGAAGCCACAAGCGCAGCCACCGAGGCCGGCCTGGAGCTGGTGGACAAGGGC
AAGGCCAAGGAGCTGCCAGGGAGTCAAGTGATTTTTGAAGGCCCCACTCTGGGGCAGCAGGAAGACCA
AGAGCGGAAGAGGTTGTGTAAGGCCATGACCCTGTGCATCTGCTACGCGGCCAGCATCGGGGGCACCG
CCACCCTGACCGGGACGGGACCCAACGTGGTGCTCCTGGGCCAGATGAACGAGTTGTTTCCTGACAGC
AAGGACCTCGTGAACTTTGCTTCCTGGTTTGCATTTGCCTTTCCCAACATGCTGGTGATGCTGCTGTT
CGCCTGGCTGTGGCTCCAGTTTGTTTACATGAGATTCAATTTTAAAAAGTCCTGGGGCTGCGGGCTAG
AGAGCAAGAAAAACGAGAAGGCTGCCCTCAAGGTGCTGCAGGAGGAGTACCGGAAGTTGGGGCCCTTG
TCCTTCGCGGAGATCAACGTGCTGATCTGCTTCTTCCTGCTGGTCATCCTGTGGTTCTCCCGAGACCC
CGGCTTCATGCCCGGCTGGCTGACTGTTGCCTGGGTGGAGGGTGAGACAAAGTATGTCTCCGATGCCA
CTGTGGCCATCTTTGTGGCCACCCTGCTATTCATTGTGCCTTCACAGAAGCCCAAGTTTAACTTCCGC
AGCCAGACTGAGGAAGAAAGGAAAACTCCATTTTATCCCCCTCCCCTGCTGGATTGGAAGGTAACCCA
GGAGAAAGTGCCCTGGGGCATCGTGCTGCTACTAGGGGGCGGATTTGCTCTGGCTAAAGGATCCGAGG
CCTCGGGGCTGTCCGTGTGGATGGGGAAGCAGATGGAGCCCTTGCACGCAGTGCCCCCGGCAGCCATC
ACCTTGATCTTGTCCTTGCTCGTTGCCGTGTTCACTGAGTGCACAAGCAACGTGGCCACCACCACCTT
GTTCCTGCCCATCTTTGCCTCCATGTCTCGCTCCATCGGCCTCAATCCGCTGTACATCATGCTGCCCT
GTACCCTGAGTGCCTCCTTTGCCTTCATGTTGCCTGTGGCCACCCCTCCAAATGCCATCGTGTTCACC
TATGGGCACCTCAAGGTTGCTGACATGGTGAAAACAGGAGTCATAATGAACATAATTGGAGTCTTCTG
TGTGTTTTTGGCTGTCAACACCTGGGGACGGGCCATATTTGACTTGGATCATTTCCCTGACTGGGCTA
ATGTGACACATATTGAGACTCTCGAGGGC

NOV67b, 308537854

| | | | |
|---|---|---|---|
| Protein Sequence | SEQ ID NO: 996 | 576 aa | MW at 63903.4kD |

TRSPTMASALSYVSKFKSFVILFVTPLLLLPLVILMPAKFVRCAYVIILMAIYWCTEVIPLAVTSLMP
VLLFPLFQILDSRQVCVQYMKDTNMLFLGGLIVAVAVERWNLHKRIALRTLLWVGAKPARLMLGFMGV
TALLSMWISNTATTANNVPIVEAILQQMEATSAATEAGLELVDKGKAKELPGSQVIFEGPTLGQQEDQ
ERKRLCKAMTLCICYAASIGGTATLTGTGPNVVLGQMNELFPDSKDLVNFASWFAFAFPPNMLVMLLF
AWLWLQFVYNRFNFKKSWGCGLESKKNEKAALKVLQEEYRKLGPLSFAEINVLICFFLLVILWFSRDP
GFMPGWLTVAWVEGETKYVSDATVAIFVATLLFIVPSQKPKFNFRSQTEEERKTPFYPPPLLDWKVTQ
EKVPWGIVLLLGGGFALAKGSEASGLSVWMGKQMEPLHAVPPAAITLILSLLVAVFTECTSNVATTTL
FLPIFASMSRSIGLNPLYIMLPCTLSASFAFMLPVATPPNAIVFTYGHLKVADMVKTGVIMNIIGVFC
VFLAVNTWGRAIFDLDHFPDWANVTHIETLEG

| | | |
|---|---|---|
| NOV67c, CG57758-01 | SEQ ID NO: 997 | 1790 bp |

| | | |
|---|---|---|
| DNA Sequence | ORF Start: ATG at 16 | ORF Stop: TAG at 1720 |

TCTCCCTCCCGCGCGATGGCCTCGGCGCTGAGCTATGTCTCCAAGTTCAAGTCCTTCGTGATCTTGTT
CGTCACCCCGCTCCTGCTGCTGCCACTCGTCATTCTGATGCCCGCCAAGGTCAGTTGTGCCTACGTCA
TCATCCTCATGGCCATTTACTGGTGCACAGAAGTCATCCCTCTGGCTGTCACCTCTCTCATGCCTGTC
TTGCTTTTCCCACTCTTCCAGATTCTGGACTCCAGGCAGGTGTGTGTCCAGTACATGAAGGACACCAA
CATGCTGTTCCTGGGCGGCCTCATCGTGGCCGTGGCTGTGGAGCGCTGGAACCTGCACAAGAGGATCG
CCCTGCGCACGCTCCTCTGGGTGGGGGCCAAGCCTGCACGGCTGATGCTGGGCTTCATGGGCGTCACA
GCCCTCCTGTCCATGTGGATCAGTAACACGGCAACCACGGCCATGATGGTGCCCATCGTGGAGGCCAT
ATTGCAGCAGATGGAAGCCACAAGCGCAGCCACCGAGGCCGGCCTGGAGCTGGTGGACAAGGGCAAGG
CCAAGGAGCTGCCAGGGAGTCAAGTGATTTTTGAAGGCCCCACTCTGGGGCAGCAGGAAGACCAAGAG
CGGAAGAGGTTGTGTAAGGCCATGACCCTGTGCATCTGCTACGCGGCCAGCATCGGGGGCACCGCCAC
CCTGACCGGGACGGGACCCAACGTGGTGCTCCTGGGCCAGATGAACGAGTTGTTTCCTGACAGCAAGG
ACCTCGTGAACTTTGCTTCCTGGTTTGCATTTGCCTTTCCCAACATGCTGGTGATGCTGCTGTTCGCC
TGGCTGTGGCTCCAGTTTGTTTACATGTTCTCCAGTTTTAAAAAGTCCTGGGGCTGCGGGCTAGAGAG
CAAGAAAAACGAGAAGGCTGCCCTCAAGGTGCTGCAGGAGGAGTACCGGAAGCTGGGGCCCTTGTCCT
TCGCGGAGATCAACGTGCTGATCTGCTTCTTCCTGCTGGTCATCCTGTGGTTCTCCCGAGACCCCGGC
TTCATGCCCGGCTGGCTGACTGTTGCCTGGGTGGAGGGTGAGACAAAGTATGTCTCCGATGCCACTGT
GGCCATCTTTGTGGCCACCCTGCTATTCATTGTGCCTTCACAGAAGCCCAAGTTTAACTTCCGCAGCC
AGACTGAGGAAGGTAAGTCTCCTGTTCTGATCGCCCCCCCTCCCCTGCTGGATTGGAAGGTAACCCAG
GAGAAAGTGCCCTGGGGCATCGTGCTGCTACTAGGGGGCGGATTTGCTCTGGCTAAAGGATCCGAGGC
CTCGGGGCTGTCCGTGTGGATGGGGAAGCAGATGGAGCCCTTGCACGCAGTGCCCCCGGCAGCCATCA
CCTTGATCTTGTCCTTGCTCGTTGCCGTGTTCACTGAGTGCACAAGCAACGTGGCCACCACCACCTTG
TTCCTGCCCATCTTTGCCTCCATGTCTCGCTCCATCGGCCTCAATCCGCTGTACATCATGCTGCCCTG
TACCCTGAGTGCCTCCTTTGCCTTCATGTTGCCTGTGGCCACCCCTCCAAATGCCATCGTGTTCACCT
ATGGGCACCTCAAGGTTGCTGACATGGTGAAAACAGGAGTCATAATGAACATAATTGGAGTCTTCTGT
GTGTTTTTGGCTGTCAACACCTGGGGACGGGCCATATTTGACTTGGATCATTTCCCTGACTGGGCTAA
TGTGACACATATTGAGACTTAGGAAGAGCCACAAGACCACACACACAGCCCTTACCCTCCTCAGGACT
ACCGAACCTTCTGGCACACCTT

NOV67c, CG57758-01

| | | | |
|---|---|---|---|
| Protein Sequence | SEQ ID NO: 998 | 568 aa | MW at 62592.9kD |

MASALSYVSKFKSFVILFVTPLLLLPLVILMPAKVSCAYVIILMAIYWCTEVIPLAVTSLMPVLLFPL
FQILDSRQVCVQYMKDTNMLFLGGLIVAVAVERWNLHKRIALRTLLWVGAKPARLMLGFMGVTALLSM
WISNTATTANMVPIVEAILQQMEATSAATEAGLELVDKGKAKELPGSQVIFEGPTLGQQEDQERKRLC
KAMTLCICYAASIGGTATLTGTGPNVVLLGQMNELFPDSKDLVNFASWFAFAFPNNLVMLLFAWLWLQ
FVYMFSSFKKSWGCGLESKKNEKAALKVLQEEYRKLGPLSFAEINVLICFFLLVILWFSRDPGFMPGW
LTVAWVEGETKYVSDATVAIFVATLLFIVPSQKPKFNFRSQTEEGKSPVLIAPPPLLDWKVTQEKVPW
GIVLLLGGGFALAKGSEASGLSVWMGKQMEPLHAVPPAAITLILSLLVAVFTECTSNVATTTLFLPIF
ASMSRSIGLNPLYIMLPCTLSASFAFMLPVATPPNAIVFTYGHLKVADMVKTGVIMNIIGVFCVFLAV
NTWGRAIFDLDHFPDWANVTHIET

| | | |
|---|---|---|
| NOV67d, CG57758-02 | SEQ ID NO: 999 | 1899 bp |

| | | |
|---|---|---|
| DNA Sequence | ORF Start: ATG at 31 | ORF Stop: TAG at 1879 |

CGTCTCGCCCGCCAGTCTCCCTCCCGCGCGATGGCCTCGGCGCTGAGCTATGTCTCCAAGTTCAAGTC
CTTCGTGATCTTGTTCGTCACCCCGCTCCTGCTGCTGCCACTCGTCATTCTGATGCCCGCCAAGGTCA
GTTGCTGTGCCTACGTCATCATCCTCATGGCCATTTACTGGTGCACAGAAGTCATCCCTCTGGCTGTC
ACCTCTCTCATGCCTGTCTTGCTTTTCCCACTCTTCCAGATTCTGGACTCCAGGCAGGTGTGTGTCCA
GTACATGAAGGACACCAACATGCTGTTCCTGGGCGGCCTCATCGTGGCCGTGGCTGTGGAGCGCTGGA
ACCTGCACAAGAGGATCGCCCTGCGCACGCTCCTCTGGGTGGGGGCCAAGCCTGCACGGCTGATGCTG
GGCTTCATGGGCGTCACAGCCCTCCTGTCCATGTGGATCAGTAACACGGCAACCACGGCCATGATGGT
GCCCATCGTGGAGGCCATATTGCAGCAGATGGAAGCCACAAGCGCAGCCACCGAGGCCGGCCTGGAGG
GACAAGGTACCACAATAAACAACCTGAATGCACTGGAGGATGATACAGTGAAAGCAGTACTAGGAGGA
AAGTGTGTAGCTATAATAAGCACTTACGTCAAAAAAGTAGAAAAACTTCAAATAAACAATCTAATGAC
ACCTCTTAAAAAACTAGAAAAGCAAGAGCAACAGGACCTAGGGCCTGGCATCAGGCCTCAGGACTCTG
CCCAGTGCCAGGAAGACCAAGAGCGGAAGAGGTTGTGTAAGGCCATGACCCTGTGCATCTGCTACGCG
GCCAGCATCGGGGGCACCGCCACCCTGACCGGGACGGGACCCAACGTGGTGCTCCTGGGCCAGATGAA
CGAGTTGTTTCCTGACAGCAAGGACCTCGTGAACTTTGCTTCCTGGTTTGCATTTGCCTTTCCCAACA
TGCTGGTGATGCTGCTGTTCGCCTGGCTGTGGCTCCAGTTTGTTTACATGTTCTCCAGTTTTAAAAAG
TCCTGGGGCTGCGGGCTAGAGAGCAAGAAAAACGAGAAGGCTGCCCTCAAGGTGCTGCAGGAGGAGTA
CCGGAAGCTGGGGCCCTTGTCCTTCGCGGAGATCAACGTGCTGATCTGCTTCTTCCTGCTGGTCATCC
TGTGGTTCTCCCGAGACCCCGGCTTCATGCCCGGCTGGCTGACTGTTGCCTGGGTGGAGGGTGAGACA
AAGTCAGTCTCCGATGCCACTGTGGCCATCTTTGTGGCCACCCTGCTATTCATTGTGCCTTCACAGAA
GCCCAAGTTTAACTTCCGCAGCCAGACTGAGGAAGGTAAGTCTCCTGTTCTGATCGCCCCCCCTCCCC
TGCTGGATTGGAAGGTAACCCAGGAGAAAGTGCCCTGGGGCATCGTGCTGCTACTAGGGGGCGGATTT
GCTCTGGCTAAAGGATCCGAGGCCTCGGGGCTGTCCGTGTGGATGGGGAAGCAGATGGAGCCCTTGCA
CGCAGTGCCCCCGGCAGCCATCACCTTGATCTTGTCCTTGCTCGTTGCCGTGTTCACTGAGTGCACAA
GCAACGTGGCCACCACCACCTTGTTCCTGCCCATCTTTGCCTCCATGTCTCGCTCCATCGGCCTCAAT
CCGCTGTACATCATGCTGCCCTGTACCCTGAGTGCCTCCTTTGCCTTCATGTTGCCTGTGGCCACCCC
TCCAAATGCCATCGTGTTCACCTATGGGCACCTCAAGGTTGCTGACATGGTAAAAACAGGAGTCATAA
TGAACATAATTGGAGTCTTCTGTGTGTTTTTGGCTGTCAACACCTGGGGACGGGCCATATTTGACTTG
GATCATTTCCCTGACTGGGCTAATGTGACACATATTGAGACTTAGGAAGAGCCACAAGACCAC

NOV67d, CG57758-02

| | | | |
|---|---|---|---|
| Protein Sequence | SEQ ID NO: 1000 | 616 aa | MW at 67816.9kD |

MASALSYVSKFKSFVILFVTPLLLLPLVILMPAKVSCCAYVIILMAIYWCTEVIPLAVTSLMPVLLFP
LFQILDSRQVCVQYMKDTNMLFLGGLIVAVAVERWNLHKRIALRTLLWVGAKPARIMLGFMGVTALLS
MWISNTATTANMVPIVEAILQQMEATSAATEAGLEGQGTTINNLNALEDDTVKAVLGGKCVAIISTYV
KKVEKLQINNLMTPLKKLEKQEQQDLGPGIRPQDSAQCQEDQERKRLCKAMTLCICYAASIGGTATLT
GTGPNVVLLGQMNELFPDSKDLVNFASWFAFAFPNMLVMLLFAWLWLQFVYMFSSFKKSWGCGLESKK
NEKAALKVLQEEYRKLGPLSFAEINVLICFFLLVILWFSRDPGFMPGWLTVAWVEGETKSVSDATVAI
FVATLLFIVPSQKPKFNFRSQTEEGKSPVLIAPPPLLDWKVTQEKVPWGIVLLLGGGFALAKGSEASG
LSVWMGKQMEPLHAVPPAAITLILSLLVAVFTECTSNVATTTLFLPIFASMSRSIGLNPLYIMLPCTL
SASFAFMLPVATPPNAIVFTYGHLKVADMVKTGVIMNIIGVFCVFLAVNTWGRAIFDLDHFPDWANVT
HIET

| | | |
|---|---|---|
| NOV67e, CG57758-04 | SEQ ID NO: 1001 | 1606 bp |

| | | |
|---|---|---|
| DNA Sequence | ORF Start: ATG at 2 | ORF Stop: TAG at 1568 |

GATGGCCTCGGCGCTGAGCTATGTCTCCAAGTTCAAGTCCTTCGTGATCTTGTTCGTCACCCCGCTCC
TGCTGCTGCCACTCGTCATTCTGATGCCCGCCAAGTTTGTCAGGTGTGCCTACGTCATCATCCTCATG
GCCATTTACTGGTGCACAGAAGTCATCCCTCTGGCTGTCACCTCTCTCATGCCTGTCTTGCTTTTCCC
ACTCTTCCAGATTCTGGACTCCAGGCAGGTGTGTGTCCAGTACATGAAGGACACCAACATGCTGTTCC
TGGGCGGCCTCATCGTGGCCGTGGCTGTGGAGCGCTGGAACCTGCACAAGAGGATCGCCCTGCGCACG
CTCCTCTGGGTGGGGGCCAAGCCTGCACGGCTGATGCTGGGCTTCATGGGCGTCACAGCCCTCCTGTC
CATGTGGATCAGTAACACGGCAACCACGGCCATGATGGTGCCCATCGTGGAGGCCATATTGCAGCAGA
TGGAAGCCACAAGCGCAGCCACCGAGGCCGGCCTGGAGCTGGTGGACAAGGGCAAGGCCAAGGAGCTG
CCAGGGAGTCAAGTGATTTTTGAAGGCCCCACTCTGGGGCAGCAGGAAGACCAAGAGCGGAAGAGGTT
GTGTAAGGCCATGACCCTGTGCATCTGCTACGCGGCCAGCATCGGGGGCACCGCCACCCTGACCGGGA
CGGGACCCAACGTGGTGCTCCTGGGCCAGATGAACGAGTTGTTTCCTGACAGCAAGGACCTCGTGAAC
TTTGCTTCCTGGTTTGCATTTGCCTTTCCCAACATGCTGGTGATGCTGCTGTTCGCCTGGCTGTGGCT
CCAGTTTGTTTACATGAGATTCAATTTTAAAAAGTCCTGGGGCTGCGGGCTAGAGAGCAAGAAAAACG
AGAAGGCTGCCCTCAAGGTGCTGCAGGAGGAGTACCGGAAGTTGGGGCCCTTGTCCTTCGCGGAGATC
AACGTGCTGATCTGCTTCTTCCTGCTGGTCATCCTGTGGTTCTCCCGAGACCCCGGCTTCATGCCCGG
CTGGCTGACTGTTGCCTGGGTGGAGGGTGAGACAAAGTATGTCTCCGATGCCACTGTGGCCATCTTTG
TGGCCACCCTGCTATTCATTGTGCCTTCACAGAAGCCCAAGTTTAACTTCCGCAGCCAGACTGAGGAA
GAAAGGAAAACTCCATTTTATCCCCCTCCCCTGCTGGATTGGAAGGTAACCCAGGAGAAAGTGCCCTG
GGGCATCGTGCTGCTACTAGGGGGCGGATTTGCTCTGGCTAAAGGATCCGAGGCCTCGGGGCTGTCCG
TGTGGATGGGGAAGCAGATGGAGCCCTTGCACGCAGTGCCCCCGGCAGCCATCACCTTGATCTTGTCC
TTGCTCGTTGCCGTGTTCACTGAGTGCACAAGCAACGTGGCCACCACCACCTTGTTCCTGCCCATCTT
TGCCTCCATGGTGAAAACAGGAGTCATAATGAACATAATTGGAGTCTTCTGTGTGTTTTTGGCTGTCA
ACACCTGGGGACGGGCCATATTTGACTTGGATCATTTCCCTGACTGGGCTAATGTGACACATATTGAG
ACTTAGGAAGAGCCACAAGACCACACACATAGCCCTTACCCT

NOV67e, CG57758-04

| | | | |
|---|---|---|---|
| Protein Sequence | SEQ ID NO: 1002 | 522 aa | MW at 58109.6kD |

MASALSYVSKFKSFVILFVTPLLLLPLVILMPAKFVRCAYVIILMAIYWCTEVIPLAVTSLMPVLLFP
LFQILDSRQVCVQYMKDTNMLFLGGLIVAVAVERWNLHKRIALRTLLWVGAKPARLMLGFMGVTALLS
MWISNTATTAMMVPIVEAILQQMEATSAATEAGLELVDKGKAKELPGSQVIFEGPTLGQQEDQERKRL
CKANTLCICYAASIGGTATLTGTGPNVVLLGQMNELFPDSKDLVNFASWFAFAFPNMLVMLLFAWLWL
QFVYMRFNFKKSWGCGLESKKNEKAALKVLQEEYRKLGPLSFAEINVLICFFLLVILWFSRDPGFMPG
WLTVAWVEGETKYVSDATVAIFVATLLFIVPSQKPKFNFRSQTEEERKTPFYPPPLLDWKVTQEKVPW
GIVLLLGGGFALAKGSEASGLSVWMGKQMEPLHAVPPAAITLILSLLVAVFTECTSNVATTTLFLPIF
ASMVKTGVIMNIIGVFCVFLAVNTWGRAIFDLDHFPDWANVTHIET

| | | |
|---|---|---|
| NOV67f, CG57758-05 | SEQ ID NO: 1003 | 1781 bp |

| | | |
|---|---|---|
| DNA Sequence | ORF Start: ATG at 2 | ORF Stop: TGA at 1550 |

GATGGCCTCGGCGCTGAGCTATGTCTCCAAGTTCAAGTCCTTCGTGATCTTGTTCGTCACCCCGCTCC
TGCTGCTGCCACTCGTCATTCTGATGCCCGCCAAGTTTGTCAGGTGTGCCTACGTCATCATCCTCATG
GCCATTTACTGGTGCACAGAAGTCATCCCTCTGGCTGTCACCTCTCTCATGCCTGTCTTGCTTTTCCC
ACTCTTCCAGATTCTGGACTCCAGGCAGGTGTGTGTCCAGTACATGAAGGACACCAACATGCTGTTCC
TGGGCGGCCTCATCGTGGCCGTGGCTGTGGAGCGCTGGAACCTGCACAAGAGGATCGCCCTGCGCACG
CTCCTCTGGGTGGGGGCCAAGCCTGCACGGCTGATGCTGGGCTTCATGGGCGTCACAGCCCTCCTGTC
CATGTGGATCAGTAACACGGCAACCACGGCCATGATGGTGCCCATCGTGGAGGCCATATTGCAGCAGA
TGGAAGCCACAAGCGCAGCCACCGAGGCCGGCCTGGAGCTGGTGGACAAGGGCAAGGCCAAGGAGCTG
CCAGGGAGTCAAGTGATTTTTGAAGGCCCCACTCTGGGGCAGCAGGAAGACCAAGAGCGGAAGAGGTT
GTGTAAGGCCATGACCCTGTGCATCTGCTACGCGGCCAGCATCGGGGGCACCGCCACCCTGACCGGGA
CGGGACCCAACGTGGTGCTCCTGGGCCAGATGAACGAGTTGTTTCCTGACAGCAAGGACCTCGTGAAC
TTTGCTTCCTGGTTTGCATTTGCCTTTCCCAACATGCTGGTGATGCTGCTGTTCGCCTGGCTGTGGCT
CCAGTTTGTTTACATGAGATTCAATTTTAAAAAGTCCTGGGGCTGCGGGCTAGAGAGCAAGAAAAACG
AGAAGGCTGCCCTCAAGGTGCTGCAGGAGGAGTACCGGAAGTTGGGGCCCTTGTCCTTCGCGGAGATC
AACGTGCTGATCTGCTTCTTCCTGCTGGTCATCCTGTGGTTCTCCCGAGACCCCGGCTTCATGCCCGG
CTGGCTGACTGTTGCCTGGGTGGAGGGTGAGACAAAGTATGTCTCCGATGCCACTGTGGCCATCTTTG
TGGCCACCCTGCTATTCATTGTGCCTTCACAGAAGCCCAAGTTTAACTTCCGCAGCCAGACTGAGGAA
GAAAGGAAAACTCCATTTTATCCCCCTCCCCTGCTGGATTGGAAGGTAACCCAGGAGAAAGTGCCCTG
GGGCATCGTGCTGCTACTAGGGGGCGGATTTGCTCTGGCTAAAGGATCCGAGGCCTCGGGGCTGTCCG
TGTGGATGGGGAAGCAGATGGAGCCCTTGCACGCAGTGCCCCCGGCAGCCATCACCTTGATCTTGTCC
TTGCTCGTTGCCGTGTTCACTGAGTGCACAAGCAACGTGGCCACCACCACCTTGTTCCTGCCCATCTT
TGCCTCCATGAATCACGTCCCCAAGAGCTTCTGTGTTCTGTACGGTGATGTTGCAGTGCTGTCTTTCC
GCAGTCTCGCTCCATCGGCCTCAATCCGCTGTACATCATGCTGCCCTGTACCCTGAGTGCCTCCTTTG
CCTTCATGTTGCCTGTGGCCACCCCTCCAAATGCCATCGTGTTCACCTATGGGCACCTCAAGGTTGCT
GACATGGTGAAAACAGGAGTCATAATGAACATAATTGGAGTCTTCTGTGTGTTTTTGGCTGTCAACAC
CTGGGGACGGGCCATATTTGACTTGGATCATTTCCCTGACTGGGCTAATGTGACACATATTGAGACTT
AGGAAGAGCCACA

NOV67f, CG57758-05

| | | | |
|---|---|---|---|
| Protein Sequence | SEQ ID NO: 1004 | 516 aa | MW at 57173.5kD |

MASALSYVSKFKSFVILFVTPLLLLPLVILMPAKFVRCAYVIILMAIYWCTEVIPLAVTSLMPVLLFP
LFQILDSRQVCVQYMKDTNMLFLGGLIVAVAVERWNLHKRIALRTLLWVGAKPARLMLGFMGVTALLS
MWISNTATTANMVPIVEAILQQMEATSAATEAGLELVDKGKAKELPGSQVIFEGPTLGQQEDQERKRL
CKAMTLCICYAASIGGTATLTGTGPNVVLLGQMNELFPDSKDLVNFASWFAFAFPNMLVMLLFAWLWL
QFVYMRFNFKKSWGCGLESKKNEKAALKVLQEEYRKLGPLSFAEINVLICFFLLVILWFSRDPGFMPG
WLTVAWVEGETKYVSDATVAIFVATLLFIVPSQKPKFNFRSQTEEERKTPFYPPPLLDWKVTQEKVPW
GIVLLLGGGFALAKGSEASGLSVWMGKQMEPLHAVPPAAITLILSLLVAVFTECTSNVATTTLFLPIF
ASMNHVPKSFCVLYGDVAVLSFRSLAPSASIRCTSCCPVP

[0740] A ClustalW comparison of the above protein sequences yields the following sequence alignment shown in Table 67B.

TABLE 67B
Comparison of the NOV67 protein sequences.

| | |
|---|---|
| NOV67a | -----MASALSYVSKFKSFVILFVTPLLLLPLVILMPAKFVRCAYVIILMAIYWCTEVIP |
| NOV67b | TRSPTMASALSYVSKFKSFVILFVTPLLLLPLVILMPAKFVRCAYVIILMAIYWCTEVIP |
| NOV67c | -----MASALSYVSKFKSFVILFVTPLLLLPLVILMPAKVS-CAYVIILMAIYWCTEVIP |
| NOV67d | -----MASALSYVSKFKSFVILFVTPLLLLPLVILMPAKVSCCAYVIILMAIYWCTEVIP |
| NOV67e | -----MASALSYVSKFKSFVILFVTPLLLLPLVILMPAKFVRCAYVIILMAIYWCTEVIP |
| NOV67f | -----MASALSYVSKFKSFVILFVTPLLLLPLVILMPAKFVRCAYVIILMAIYWCTEVIP |
| NOV67a | LAVTSLMPVLLFPLFQILDSRQVCVQYMKDTNMLFLGGLIVAVAVERWNLHKRIALRTLL |
| NOV67b | LAVTSLMPVLLFPLFQILDSRQVCVQYNKDTNMLFLGGLIVAVAVERWNLHKRIALRTLL |
| NOV67c | LAVTSLMPVLLFPLFQILDSRQVCVQYMKDTNMLFLGGLIVAVAVERWNLHKRIALRTLL |
| NOV67d | LAVTSLMPVLLFPLFQILDSRQVCVQYMKDTNMLFLGGLIVAVAVERWNLHKRIALRTLL |
| NOV67e | LAVTSLMPVLLFPLFQILDSRQVCVQYMKDTNMLFLGGLIVAVAVERWNLHKRIALRTLL |
| NOV67f | LAVTSLMPVLLFPLFQILDSRQVCVQYMKDTNMLFLGGLIVAVAVERWNLHKRIALRTLL |
| NOV67a | WVGAKPARLMLGFMGVTALLSMWISNTATTAMMVPIVEAILQQMEATSAATEAGLELVDK |
| NOV67b | WVGAKPARLMLGFMGVTALLSMWISNTATTAMMVPIVEAILQQMEATSAATEAGLELVDK |
| NOV67c | WVGAKPARLMLGFMGVTALLSMWISNTATTAMMVPIVEAILQQMEATSAATEAGLELVDK |
| NOV67d | WVGAKPARLMLGFMGVTALLSMWISNTATTAMMVPIVEAILQQMEATSAATEAGLEGQGT |
| NOV67e | WVGAKPARLMLGFMGVTALLSMWISNTATTAMMVPIVEAILQQMEATSAATEAGLELVDK |
| NOV67f | WVGAKPARLMLGFMGVTALLSMWISNTATTAMMVPIVEAILQQMEATSAATEAGLELVDK |
| NOV67a | GK-----------------------------------------AKELPGSQVIFEGPTLG |
| NOV67b | GK-----------------------------------------AKELPGSQVIFEGPTLG |
| NOV67c | GK-----------------------------------------AKELPGSQVIFEGPTLG |
| NOV67d | TINNLNALEDDTVKAVLGGKCVAIISTYVKKVEKLQINNLMTPLKKLEKQEQQDLGPGIR |
| NOV67e | GK-----------------------------------------AKELPGSQVIFEGPTLG |
| NOV67f | GK-----------------------------------------AKELPGSQVIFEGPTLG |
| NOV67a | -Q-----QEDQERKRLCKAMTLCICYAASIGGTATLTGTGPNVVLLGQMNELFPDSKDLV |
| NOV67b | -Q-----QEDQERKRLCKAMTLCICYAASIGGTATLTGTGPNVVLLGQMNELFPDSKDLV |
| NOV67c | -Q-----QEDQERKRLCKAMTLCICYAASIGGTATLTGTGPNVVLLGQMNELFPDSKDLV |
| NOV67d | PQDSAQCQEDQERKRLCKAMTLCICYAASIGGTATLTGTGPNVVLLGQMNELFPDSKDLV |
| NOV67e | -Q-----QEDQERKRLCKANTLCICYAASIGGTATLTGTGPNVVLLGQMNELFPDSKDLV |
| NOV67f | -Q-----QEDQERKRLCKAMTLCICYAASIGGTATLTGTGPNVVLLGQMNELFPDSKDLV |
| NOV67a | NFASWFAFAFPNMLVMLLFAWLWLQFVYMRFNFKKSWGCGLESKKNEKAALKVLQEEYRK |
| NOV67b | NFASWFAFAFPNMLVMLLFAWLWLQFVYMRFNFKKSWGCGLESKKNEKAALKVLQEEYRK |
| NOV67c | NFASWFAFAFPNMLVMLLFAWLWLQFVYMFSSFKKSWGCGLESKKNEKAALKVLQEEYRK |
| NOV67d | NFASWFAFAFPNMLVMLLFAWLWLQFVYMFSSFKKSWGCGLESKKNEKAALKVLQEEYRK |
| NOV67e | NFASWFAFAFPNMLVMLLFAWLWLQFVYMRFNFKKSWGCGLESKKNEKAALKVLQEEYRK |
| NOV67f | NFASWFAFAFPNMLVMLLFAWLWLQFVYMRFNFKKSWGCGLESKKNEKAALKVLQEEYRK |
| NOV67a | LGPLSFAEINVLICFFLLVILWFSRDPGFNPGWLTVAWVEGETKYVSDATVAIFVATLLF |
| NOV67b | LGPLSFAEINVLICFFLLVILWFSRDPGFMPGWLTVAWVEGETKYVSDATVAIFVATLLF |
| NOV67c | LGPLSFAEINVLICFFLLVILWFSRDPGFMPGWLTVAWVEGETKYVSDATVAIFVATLLF |
| NOV67d | LGPLSFAEINVLICFFLLVILWFSRDPGFMPGWLTVAWVEGETKSVSDATVAIFVATLLF |
| NOV67e | LGPLSFAEINVLICFFLLVILWFSRDPGFMPGWLTVAWVEGETKYVSDATVAIFVATLLF |
| NOV67f | LGPLSFAEINVLICFFLLVILWFSRDPGFMPGWLTVAWVEGETKYVSDATVAIFVATLLF |
| NOV67a | IVPSQKPKFNFRSQTEEERK-TPFYPPPLLDWKVTQEKVPWGIVLLLGGGFALAKGSEAS |
| NOV67b | IVPSQKPKFNFRSQTEEERK-TPFYPPPLLDWKVTQEKVPWGIVLLLGGGFALAKGSEAS |
| NOV67c | IVPSQKPKFNFRSQTEEGKSPVLIAPPPLLDWKVTQEKVPWGIVLLLGGGFALAKGSEAS |
| NOV67d | IVPSQKPKFNFRSQTEEGKSPVLIAPPPLLDWKVTQEKVPWGIVLLLGGGFALAKGSEAS |
| NOV67e | IVPSQKPKFNFRSQTEEERK-TPFYPPPLLDWKVTQEKVPWGIVLLLGGGFALAKGSEAS |
| NOV67f | IVPSQKPKFNFRSQTEEERK-TPFYPPPLLDWKVTQEKVPWGIVLLLGGGFALAKGSEAS |
| NOV67a | GLSVWMGKQMEPLHAVPPAAITLILSLLVAVFTECTSNVATTTLFLPIFASMSR---SIG |
| NOV67b | GLSVWMGKQMEPLHAVPPAAITLILSLLVAVFTECTSNVATTTLFLPIFASMSR---SIG |
| NOV67c | GLSVWMGKQMEPLHAVPPAAITLILSLLVAVFTECTSNVATTTLFLPIFASMSR---SIG |
| NOV67d | GLSVWMGKQMEPLHAVPPAAITLILSLLVAVFTECTSNVATTTLFLPIFASMSR---SIG |
| NOV67e | GLSVWMGKQMEPLHAVPPAAITLILSLLVAVFTECTSNVATTTLFLPIFASMVKTGVIMN |
| NOV67f | GLSVWMGKQMEPLHAVPPAAITLILSLLVAVFTECTSNVATTTLFLPIFASMN------H |
| NOV67a | LNPLYIMLPCTLSASFAFMLPVATPPNAIVFTYGHLKVADMVKTGVIMNIIGVFCVFLAV |
| NOV67b | LNPLYIMLPCTLSASFAFMLPVATPPNAIVFTYGHLKVADMVKTGVIMNIIGVFCVFLAV |
| NOV67c | LNPLYIMLPCTLSASFAFMLPVATPPNAIVFTYGHLKVADMVKTGVIMNIIGVFCVFLAV |
| NOV67d | LNPLYIMLPCTLSASFAFMLPVATPPNAIVFTYGHLKVADMVKTGVIMNIIGVFCVFLAV |
| NOV67e | IIGVFCVFLAVNTWGRAIFDLDHFPDWANVTHIET------------------------- |
| NOV67f | VPKSFCVLYGD----VAVLSFRSLAPSASIRCTSCCPVP--------------------- |
| NOV67a | NTWGRAIFDLDHFPDWANVTHIET--- |
| NOV67b | NTWGRAIFDLDHFPDWANVTHIETLEG |
| NOV67c | NTWGRAIFDLDHFPDWANVTHIET--- |
| NOV67d | NTWGRAIFDLDHFPDWANVTHIET--- |
| NOV67e | --------------------------- |
| NOV67f | --------------------------- |
| NOV67a | (SEQ ID NO: 994) |
| NOV67b | (SEQ ID NO: 996) |
| NOV67c | (SEQ ID NO: 998) |
| NOV67d | (SEQ ID NO: 1000) |
| NOV67e | (SEQ ID NO: 1002) |
| NOV67f | (SEQ ID NO: 1004) |

[0741] Further analysis of the NOV67a protein yielded the following properties shown in Table 67C.

TABLE 67C
Protein Sequence Properties NOV67a

| | |
|---|---|
| SignalP analysis: | Cleavage site between residues 39 and 40 |

PSORT II analysis:

| PSG: | a new signal peptide prediction method |
|---|---|
| | N-region: length 10; pos.chg 1; neg.chg 0 |
| | H-region: length 1; peak value 5.97 |
| | PSG score: 1.57 |
| GvH: | von Heijne's method for signal seq. recognition |
| | GvH score (threshold: −2.1): −2.36 |
| | possible cleavage site: between 30 and 31 |

>>> Seems to have no N-terminal signal peptide

| ALOM: | Klein et al's method for TM region allocation | |
|---|---|---|
| | Init position for calculation: 1 | |
| | Tentative number of TMS(s) for the threshold 0.5: 11 | |
| | INTEGRAL Likelihood = −12.21 | Transmembrane 14-30 |
| | INTEGRAL Likelihood = −1.81 | Transmembrane 35-51 |
| | INTEGRAL Likelihood = −4.99 | Transmembrane 53-69 |
| | INTEGRAL Likelihood = −1.75 | Transmembrane 124-140 |
| | INTEGRAL Likelihood = −3.72 | Transmembrane 261-277 |
| | INTEGRAL Likelihood = −8.01 | Transmembrane 312-328 |
| | INTEGRAL Likelihood = −6.26 | Transmembrane 354-370 |
| | INTEGRAL Likelihood = 0.21 | Transmembrane 405-421 |
| | INTEGRAL Likelihood = −7.11 | Transmembrane 443-459 |
| | INTEGRAL Likelihood = −1.70 | Transmembrane 490-506 |
| | INTEGRAL Likelihood = −7.43 | Transmembrane 528-544 |

| | PERIPHERAL Likelihood = 0.74 (at 89) |
|---|---|
| | ALOMscore: −12.21 (number of TMSs: 11) |
| MTOP: | Prediction of membrane topology (Hartmann et al.) |
| | Center position for calculation: 21 |
| | Charge difference: −1.0 C( 2.0) - N( 3.0) |
| | N >= C: N-terminal side will be inside |
| | >>> membrane topology: type 3a |

MITDISC: discrimination of mitochondrial targeting seq

| | | | |
|---|---|---|---|
| R content: | 1 | Hyd Moment (75): | 1.18 |
| Hyd Moment (95): | 3.95 | G content: | 0 |
| D/E content: | 1 | S/T content: | 6 |
| Score: −3.21 | | | |

Gavel: prediction of cleavage sites for mitochondrial preseq

R-2 motif at 47 VRC|AY

NUCDISC: discrimination of nuclear localization signals

pat4: none
pat7: none
bipartite: none
content of basic residues: 7.7%
NLS Score: −0.47

KDEL: ER retention motif in the C-terminus: none
ER Membrane Retention Signals: none
SKL: peroxisomal targeting signal in the C-terminus: none
PTS2: 2nd peroxisomal targeting signal: none
VAC: possible vacuolar targeting motif: none
RNA-binding motif: none
Actinin-type actin-binding motif:

type 1: none
type 2: none

NMYR: N-myristoylation pattern : none
Prenylation motif: none
memYQRL: transport motif from cell surface to Golgi: none
Tyrosines in the tail: none
Dileucine motif in the tail: none
checking 63 PROSITE DNA binding motifs: none
checking 71 PROSITE ribosomal protein motifs: none
checking 33 PROSITE prokaryotic DNA binding motifs: none
NNCN: Reinhardt's method for Cytoplasmic/Nuclear discrimination

Prediction: cytoplasmic
Reliability: 94.1

COIL: Lupas's algorithm to detect coiled-coil regions

total: 0 residues

--------------------------
Final Results (k = 9/23):

66.7%: endoplasmic reticulum
22.2%: mitochondrial
11.1%: nuclear

>> prediction for CG57758-03 is end (k = 9)

[0742] A search of the NOV67a protein against the Geneseq database, a proprietary database that contains sequences published in patents and patent publication, yielded several homologous proteins shown in Table 67D.

TABLE 67D
Geneseq Results for NOV67a

| | | NOV67a | Identities/ | |
|---|---|---|---|---|
| | | Residues/ | Similarities for | |
| Geneseq | Protein/Organism/Length | Match | the Matched | Expect |
| Identifier | [Patent #, Date] | Residues | Region | Value |
| AAU79946 | Human transporter protein | 1 . . . 568 | 566/568 (99%) | 0.0 |
| | sequence - Homo sapiens, 568 aa. | 1 . . . 568 | 566/568 (99%) | |
| | [US2002019028-A1, 14-Feb.- | | | |
| | 2002] | | | |
| AAE21181 | Human TRICH-25 protein - Homo | 1 . . . 568 | 531/576 (92%) | 0.0 |
| | sapiens, 539 aa. [WO200212340- | 1 . . . 539 | 531/576 (92%) | |
| | A2, 14-Feb.-2002] | | | |
| ABB82951 | Human SLC13A related protein | 1 . . . 561 | 317/579 (54%) | 0.0 |
| | (GenBank Identifier No. | 1 . . . 572 | 423/579 (72%) | |
| | GI#4506979) - Homo sapiens, 592 | | | |
| | aa. [WO200298468-A1, 12-Dec.- | | | |
| | 2002] | | | |
| ABB82950 | Human SLC13A related protein | 1 . . . 561 | 317/579 (54%) | 0.0 |
| | (GenBank Identifier No. | 1 . . . 572 | 423/579 (72%) | |
| | GI#2499523) - Homo sapiens, 592 | | | |
| | aa. [WO200298468-A1, 12-Dec.- | | | |
| | 2002] | | | |
| ABB82952 | Human SLC13A related protein | 1 . . . 563 | 284/591 (48%) | e-156 |
| | (GenBank Identifier No. | 4 . . . 582 | 387/591 (65%) | |
| | GI#13653602) - Homo sapiens, | | | |
| | 602 aa. [WO200298468-A1, 12- | | | |
| | Dec.-2002] | | | |

[0743] In a BLAST search of public sequence databases, the NOV67a protein was found to have homology to the proteins shown in the BLASTP data in Table 67E.

TABLE 67E
Public BLASTP Results for NOV67a

| | | NOV67a | Identities/ | |
|---|---|---|---|---|
| Protein | | Residues/ | Similarities for | Ex- |
| Accession | | Match | the Matched | pect |
| Number | Protein/Organism/Length | Residues | Portion | Value |
| AAN86530 | Na+−coupled citrate transporter | 1 . . . 568 | 568/568 (100%) | 0.0 |
| | protein - Homo sapiens (Human), | 1 . . . 568 | 568/568 (100%) | |
| | 568 aa. | | | |
| Q8CJ44 | Sodium-coupled citrate | 1 . . . 568 | 442/572 (77%) | 0.0 |
| | transporter - Rattus norvegicus | 1 . . . 572 | 502/572 (87%) | |
| | (Rat), 572 aa. | | | |
| AAH44437 | Similar to solute carrier family | 5 . . . 564 | 331/598 (55%) | 0.0 |
| | 13, member 2 - Brachydanio rerio | 10 . . . 605 | 437/598 (72%) | |
| | (Zebrafish) (Danio rerio), 613 aa. | | | |
| AA027449 | Sodium dicarboxylate co- | 11 . . . 563 | 318/582 (54%) | 0.0 |
| | transporter - Didelphis | 11 . . . 587 | 422/582 (71%) | |
| | marsupialis virginiana (North | | | |
| | American opossum), 605 aa. | | | |
| Q13183 | Solute carrier family 13, member | 1 . . . 561 | 317/579 (54%) | 0.0 |
| | 2 (Renal sodium/dicarboxylate | 1 . . . 572 | 423/579 (72%) | |
| | cotransporter) | | | |
| | (Na(+)/dicarboxylate | | | |
| | cotransporter 1) (NaDC-1) - | | | |
| | Homo sapiens (Human), 592 aa. | | | |

[0744] PFam analysis indicates that the NOV67a protein contains the domains shown in the Table 67F.

TABLE 67F
Domain Analysis of NOV67a

| | | Identities/ | |
|---|---|---|---|
| | NOV67a | Similarities | |
| | Match | for the | |
| Pfam Domain | Region | Matched Region | Expect Value |
| DcuC | 30 . . . 548 | 88/593 (15%) | 0.73 |
| | | 324/593 (55%) | |
| Na_sulph_symp | 6 . . . 554 | 159/603 (26%) | 2e-143 |
| | | 423/603 (70%) | |

### Example 68

[0745] The NOV68 clone was analyzed, and the nucleotide and encoded polypeptide sequences are shown in Table 68A.

TABLE 68A
NOV68 Sequence Analysis

| | | |
|---|---|---|
| NOV68a, CG58504-01 | SEQ ID NO: 1005 | 5115 bp |

| | | |
|---|---|---|
| DNA Sequence | ORF Start: ATG at 327 | ORF Stop: TAA at 5106 |

GAATTCCGGGAGCGGGCGGGCTGCGAGGCCGCGGGGCATGCGGGAGGCGGAGGGGTGGGACCGGGTGG
CTGCGCCCATTCCACACCCGCCGAAAGCGGACACTGTCAGCTGAATCACTCCCCTTTTAGGAGGAGGG
AGGGGGAAAAGGTGTCTAGCTAATTTCTGCTTAAAAAAGCACAGGAGATCGCGGGTCAGCTTTGCAGT
CGCTGCCTTCTCGCGCCTGACCATGCACCCCTGCATCTTCCTGCTGGGCACAGGCGAGCGCTTTATTT
CTGGAGCTGAGGGCTAAAACTTTTTTCACTTTTCTTCTCCTCAACATCTGAATCATGCCATGTGCCCA
GAGGAGCTGGCTTGCAAACCTTTCCGTGGTGGCTCAGCTCCTTAACTTTGGGGCGCTTTGCTATGGGA
GACAGCCTCAGCCAGGCCCGGTTCGCTTCCCGGACAGGAGGCAAGAGCATTTTATCAAGGGCCTGCCA
GAATACCACGTGGTGGGTCCAGTCCGAGTAGATGCCAGTGGGCATTTTTTGTCATATGGCTTGCACTA
TCCCATCACGAGCAGCAGGAGGAAGAGAGATTTGGATGGCTCAGAGGACTGGGTGTACTACAGAATTT
CTCACGAGGAGAAGGACCTGTTTTTTAACTTGACGGTCAATCAAGGATTTCTTTCCAATAGCTACATC
ATGGAGAAGAGATATGGGAACCTCTCCCATGTTAAGATGATGGCTTCCTCTGCCCCCCTCTGCCATCT
CAGTGGCACGGTTCTACAGCAGGGCACCAGAGTTGGGACGGCAGCCCTCAGTGCCTGCCATGGACTGA
CTGGATTTTTCCAACTACCACATGGAGACTTTTTCATTGAACCCGTGAAGAAGCATCCACTGGTTGAG
GGAGGGTACCACCCGCACATCGTTTACAGGAGGCAGAAAGTTCCAGAAACCAAGGAGCCAACCTGTGG
ATTAAAGGACAGTGTTAACATCTCCCAGAAGCAAGAGCTATGGCGGGAGAAGTGGGAGAGGCACAACT
TGCCAAGCAGAAGCCTCTCTCGGCGTTCCATCAGCAAGGAGAGATGGGTGGAGACACTGGTGGTGGCC
GACACAAAGATGATTGAATACCATGGGAGTGAGAATGTGGAGTCCTACATCCTCACCATCATGAACAT
GGTCACTGGGTTGTTCCATAACCCAAGCATTGGCAATGCAATTCACATTGTTGTGGTTCGGCTCATTC
TACTCGAAGAAGAAGAGCAAGGACTGAAAATAGTTCACCATGCAGAAAAGACACTGTCTAGCTTCTGC
AAGTGGCAGAAGAGTATCAATCCCAAGAGTGACCTCAATCCTGTTCATCACGACGTGGCTGTCCTTCT
CACCAGAAAGGACATCTGTGCTGGTTTCAATCGCCCCTGCGAGACCCTGGGCCTGTCTCACCTTTCAG
GAATGTGTCAGCCTCACCGCAGTTGTAACATCAATGAAGATTCGGGACTCCCTCTGGCTTTCACAATT
GCCCATGAGCTAGGACACAGCTTCGGCATCCAGCATGATGGGAAAGAAAATGACTGTGAGCCTGTGGG
CAGACATCCGTACATCATGTCCCGCCAGCTCCAGTACGATCCCACTCCGCTGACATGGTCCAAGTGCA
GCGAGGAGTACATCACCCGCTTCTTGGACCGAGGCTGGGGGTTCTGTCTTGATGACATACCTAAAAAG
AAAGGCTTGAAGTCCAAGGTCATTGCCCCCGGAGTGATCTATGATGTTCACCACCAGTGCCAGCTACA
ATATGGACCCAATGCTACCTTCTGCCAGGAAGTAGAAAACGTCTGCCAGACACTGTGGTGCTCCGTGA
AGGGCTTTTGTCGCTCTAAGCTGGACGCTGCTGCAGATGGAACTCAATGTGGTGAGAAGAAGTGGTGT
ATGGCAGGCAAGTGCATCACAGTGGGGAAGAAACCAGAGAGCATTCCTGGAGGCTGGGGCCGCTGGTC
ACCCTGGTCCCACTGTTCCAGGACCTGTGGGGCTGGAGTCCAGAGCGCAGAGAGGCTCTGCAACAACC
CCGAGCCAAAGTTTGGAGGGAAATATTGCACTGGAGAAAGAAAACGCTATCGCTTGTGCAACGTCCAC
CCCTGTCGCTCAGAGGCACCAACATTTCGGCAGATGCAGTGCAGTGAATTTGACACTGTTCCCTACAA
GAATGAACTCTACCACTGGTTTCCCATTTTTAACCCAGCACATCCTTGTGAGCTCTACTGCCGACCCA
TAGATGGCCAGTTTTCTGAGAAAATGCTGGATGCTGTCATTGATGGTACCCCTTGCTTTGAAGGCGGC
AACAGCAGAAATGTCTGTATTAATGGCATATGTAAGATGGTTGGCTGTGACTATGAGATCGATTCCAA
TGCCACCGAGGATCGCTGCGGTGTGTGCCTGGGAGATGGCTCTTCCTGCCAGACTGTGAGAAAGATGT
TTAAGCAGAAGGAAGGATCTGGTTATGTTGACATTGGGCTCATTCCAAAAGGAGCAAGGGACATAAGA
GTGATGGAAATTGAGGGAGCTGGAAACTTCCTGGCCATCAGGAGTGAAGATCCTGAAAAATATTACCT
GAATGGAGGGTTTATTATCCAGTGGAACGGGAACTATAAGCTGGCAGGGACTGTCTTTCAGTATGACA
GGAAAGGAGACCTGGAAAAGCTGATGGCCACAGGTCCCACCAATGAGTCTGTGTGGATCCAGCTTCTA
TTCCAGGTGACTAACCCTGGCATCAAGTATGAGTACACAATCCAGAAAGATGGCCTTGACAATGATGT
TGAGCAGATGTACTTCTGGCAGTACGGCCACTGGACAGAGTGCAGTGTGACCTGCGGGACAGGTATCC
GCCGCCAAACTGCCCATTGCATAAAGAAGGGCCGCGGGATGGTGAAAGCTACATTCTGTGACCCAGAA
ACACAGCCCAATGGGAGACAGAAGAAGTGCCATGAAAAGGCTTGTCCACCCAGGTGGTGGGCAGGGGA
GTGGGAAGCATGCTCGGCGACATGCGGGCCCCACGGGGAGAAGAAGCGAACCGTGCTGTGCATCCAGA
CCATGGTCTCTGACGAGCAGGCTCTCCCGCCCACAGACTGCCAGCACCTGCTGAAGCCCAAGACCCTC
CTTTCCTGCAACAGAGACATCCTGTGCCCCTCGGACTGGACAGTGGGCAACTGGAGTGAGTGTTCTGT
TTCCTGTGGTGGTGGAGTGCGGATTCGCAGTGTCACATGTGCCAAGAACCATGATGAACCTTGCGATG
TGACAAGGAAACCCAACAGCCGAGCTCTGTGTGGCCTCCAGCAATGCCCTTCTAGCCGGAGAGTTCTG
AAACCAAACAAAGGCACTATTTCCAATGGAAAAAACCCACCAACACTAAAGCCCGTCCCTCCACCTAC
ATCCAGGCCCAGAATGCTGACCACACCCACAGGGCCTGAGTCTATGAGCACAAGCACTCCAGCAATCA
GCAGCCCTAGTCCTACCACAGCCTCCAAAGAAGGAdACCTGGGTGGGAAACAGTGGCAAGATAGCTCA
ACCCAACCTGAGCTGAGCTCTCGCTATCTCATTTCCACTGGAAGCACTTCCCAGCCCATCCTCACTTC
CCAATCCTTGAGCATTCAGCCAAGTGAGGAAAATGTTTCCAGTTCAGATACTGGTCCTACCTCGGAGG
GAGGCCTTGTAGCTACAACAACAAGTGGTTCTGGCTTGTCATCTTCCCGCAACCCTATCACTTGGCCT
GTGACTCCATTTTACAATACCTTGACCAAAGGTCCAGAAATGGAGATTCACAGTGGCTCAGGGGAAGA
AAGAGAACAGCCTGAGGACAAAGATGAAAGCAATCCTGTAATATGGACCAAGATCAGAGTACCTGGAA
ATGACGCTCCAGTGGAAAGTACAGAAATGCCACTTGCACCTCCACTAACACCAGATCTCAGCAGGGAG
TCCTGGTGGCCACCCTTCAGCACAGTAATGGAAGGACTGCTCCCCAGCCAAAGGCCCACTACTTCCGA
AACTGGGACACCCAGAGTTGAGGGGATGGTTACTGAAAAGCCAGCCAACACTCTGCTCCCTCTGGGAG
GAGACCACCAGCCAGAACCCTCAGGAAAGACGGCAAACCGTAACCACCTGAAACTTCCAAACAACATG
AACCAAACAAAAAGTTCTGAACCAGTCCTGACTGAGGAGGATGCAACAAGTCTGATTACTGAGGGCTT
TTTGCTAAATGCCTCCAATTACAAGCAGCTCACAAACGGCCACGGCTCTGCACACTGGATCGTCGGAA
ACTGGAGCGAGTGCTCCACCACATGTGGCCTGGGGGCCTACTGGAAAAGGGTGGAGTGCACCACCCAG
ATGGATTCTGACTGTGCGGCCATCCAGAGACCTGACCCTGCAAAAAGATGCCACCTCCGTCCCTGTGC
TGGCTGGAAAGTGGGAAACTGGAGCAAGTGCTCCAGAAACTGCAGTGGGGGCTTCAAGATACGCGAGA
TTCAGTGCGTGGACAGCCGGGACCACCGGAACCTGAGGCCATTTCACTGCCAGTTCCTGGCCGGCATT
CCTCCCCCATTGAGCATGAGCTGTAACCCGGAGCCCTGTGAGGCGTGGCAGGTGGAGCCTTGGAGCCA
GTGCTCCAGGTCCTGTGGAGGTGGAGTTCAGGAGAGAGGAGTGTTCTGTCCAGGAGGCCTCTGTGATT
GGACAAAAAGACCCACATCCACCATGTCTTGCAATGAGCACCTGTGCTGTCACTGGGCCACTGGGAAC
TGGGACCTGTGTTCCACTTCCTGTGGAGGTGGCTTTCAGAAGAGGATTGTCCAATGTGTGCCCTCAGA
GGGCAATAAAACTGAAGACCAAGACCAATGTCTATGTGATCACAAACCCAGACCTCCAGAATTCAAAA
AATGCAACCAGCAGGCCTGCAAGAAAAGTGCCGATTTACTTTGCACTAAGGACAAACTGTCAGCCAGT
TTCTGCCAGACACTGAAAGCCATGAAGAAATGTTCTGTGCCCACCGTGAGGGCTGAGTGCTGCTTCTC
GTGTCCCCAGACACACATCACACACACCCAAAGGCAAAGAAGGCAACGGTTGCTCCAAAAGTCAAAAG
AACTCTAAGCCCAAA

NOV68a, CG58504-01

| | | | |
|---|---|---|---|
| Protein Sequence | SEQ ID NO: 1006 | 1593 aa | MW at 177543.9kD |

MPCAQRSWLANLSVVAQLLNFGALCYGRQPQPGPVRFPDRRQEHFIKGLPEYHVVGPVRVDASGHFLS
YGLHYPITSSRRKRDLDGSEDWWIYRISHEEKDLFFNLTVNQGFLSNSYIMEKRYGNLSHVKMMASSA
PLCHLSGTVLQQGTRVGTAALSACHGLTGFFQLPHGDFFIEPVKKHPLVEGGYHPHIVYRRQKVPETK
EPTCGLKDSVNISQKQELWREKWERHNLPSRSLSRRSISKERWVETLVVADTKMIEYHGSENVESYIL
TIMNMVTGLFHNPSIGNAIHIVVVRLILLEEEEQGLKIVHHAEKTLSSFCKWQKSINPKSDLNPVHHD
VAVLLTRKDICAGFNRPCETLGLSHLSGMCQPHRSCNINEDSGLPLAFTIAHELGHSFGIQHDGKEND
CEPVGRHPYIMSRQLQYDPTPLTWSKCSEEYITRFLDRGWGFCLDDIPKKKGLKSKVIAPGVIYDVHH
QCQLQYGPNATFCQEVENVCQTLWCSVKGFCRSKLDAAADGTQCGEKKWCMAGKCITVGKKPESIPGG
WGRWSPWSHCSRTCGAGVQSAERLCNNPEPKFGGKYCTGERKRYRLCNVHPCRSEAPTFRQMQCSEFD
TVPYKNELYHWFPIFNPAHPCELYCRPIDGQFSEKMLDAVIDGTPCFEGGNSRNVCINGICKMVGCDY
EIDSNATEDRCGVCLGDGSSCQTVRKMFKQKEGSGYVDIGLIPKGARDIRVMEIEGAGNFLAIRSEDP
EKYYLNGGFIIQWNGNYKLAGTVFQYDRKGDLEKLMATGPTNESVWIQLLFQVTNPGIKYEYTIQKDG
LDNDVEQMYFWQYGHWTECSVTCGTGIRRQTAHCIKKGRGMVKATFCDPETQPNGRQKKCHEKACPPR
WWAGEWEACSATCGPHGEKKRTVLCIQTMVSDEQALPPTDCQHLLKPKTLLSCNRDILCPSDWTVGNW
SECSVSCGGGVRIRSVTCAKNHDEPCDVTRKPNSRALCGLQQCPSSRRVLKPNKGTISNGKNPPTLKP
VPPPTSRPRMLTTPTGPESMSTSTPAISSPSPTTASKEGDLGGKQWQDSSTQPELSSRYLISTGSTSQ
PILTSQSLSIQPSEENVSSSDTGPTSEGGLVATTTSGSGLSSSRNPITWPVTPFYNTLTKGPEMEIHS
GSGEEREQPEDKDESNPVIWTKIRVPGNDAPVESTEMPLAPPLTPDLSRESWWPPFSTVMEGLLPSQR
PTTSETGTPRVEGMVTEKPANTLLPLGGDHQPEPSGKTANRNHLKLPNNMNQTKSSEPVLTEEDATSL
ITEGFLLNASNYKQLTNGHGSAHWIVGNWSECTTCGLAGAYWKRVECTTQMDSDCAAIQRPDPAKRCH
LRPCAGWKVGNWSKCSRNCSGGFKIREIQCVDSRDHRNLRPFHCQFLAGIPPPLSMSCNPEPCEAWQV
EPWSQCSRSCGGGVQERGVFCPGGLCDWTKRPTSTMSCNEHLCCHWATGNWDLCSTSCGGGFQKRIVQ
CVPSEGNKTEDQDQCLCDHKPRPPEFKKCNQQACKKSADLLCTKDKLSASFCQTLKAMKKCSVPTVRA
ECCFSCPQTHITHTQRQRRQRLLQKSKEL

| | | |
|---|---|---|
| NOV68b, 169648376 | SEQ ID NO: 1007 | 1068 bp |

| | | |
|---|---|---|
| DNA Sequence | ORF Start: at 1 | ORF Stop: end of sequence |

AAGCTTAACTTGACGGTCAATCAAGGATTTCTTTCCAATAGCTACATCATGGAGAAGAGATATGGGAA
CCTCTCCCATGTTAAGATGATGGCTTCCTCTGCCCCCCTCTGCCATCTCAGTGGCACGGTTCTACAGC
AGGGCACCAGAGTTGGGATGGCAGCCCTCAGTGCCTGCCATGGACTGACTGGATTTTTCCAACTACCA
CATGGAGACTTTTTCATTGAACCCGTGAAGAAGCATCCACTGGTTGAGGGAGGGTACCACCCGCACAT
CGTTTACAGGAGGCAGAAAGTTCCAGAAACCAAGGAGCCAACCTGTGGATTAAAGGACAGTGTTAACA
TCTCCCAGAAGCAAGAGCTATGGCGGGAGAAGTGGGAGAGGCACAACTTGCCAAGCAGAAGCCTCTCT
CGGCGTTCCATCAGCAAGGAGAGATGGGTGGAGACACTGGTGGTGGCCGACACAAAGATGATTGAATA
CCATGGGAGTGAGAATGTGGAGTCCTGCATCCTCACCATCATGAACATGGTCACTGGGTTGTTCCATA
ACCCAAGCATTGGCAATGCAATTCACATTGTTGTGGTTCGGCTCATTCTACTCGAAGAAGAAGAGCAA
GGACTGAAAATAGTTCACCATGCAGAAAAGACACTGTCTAGCTTCTGCAAGTGGCAGAAGAGTATCAA
TCCCAAGAGTGACCTCAATCCTGTTCATCACGACGTGGCTGTCCTTCTCACCAGAAAGGACATCTGTG
CTGGTTTCAATCGCCCCTGCGAGACCCTGGGCCTGTCTCACCTTTCAGGAATGTGTCAGCCTCACCGC
AGTTGTAACATCAATGAAGATTCGGGACTCCCTCTGGCTTTCACAATTGCCCATGAGCTAGGACACAG
CTTCGGCATCCAGCATGATGGGAAAGAAAATGACTGTGAGCCTGTGGGCAGACATCCGTACATCATGT
CCCGCCAGCTCCAGTACGATCCCACTCCGCTGACATGGTCCAAGTGCAGCGAGGAGTACATCACCCGC
TTCTTGGACCGAGGCTGGGGGTTCTGTCTTGATGACATACCTCTCGAG

NOV68b, 169648376

| | | | |
|---|---|---|---|
| Protein Sequence | SEQ ID NO: 1008 | 356 aa | MW at 40336.9kD |

KLNLTVNQGFLSNSYIMEKRYGNLSHVKMMASSAPLCHLSGTVLQQGTRVGMAALSACHGLTGFFQLP
HGDFFIEPVKKHPLVEGGYHPHIVYRRQKVPETKEPTCGLKDSVNISQKQELWREKWERHNLPSRSLS
RRSISKERWVETLVVADTKMIEYHGSENVESCILTIMNMVTGLFHNPSIGNAIHIVVVRLILLEEEEQ
GLKIVHHAEKTLSSFCKWQKSINPKSDLNPVHHDVAVLLTRKDICAGFNRPCETLGLSHLSGMCQPHR
SCNINEDSGLPLAFTIAHELGHSFGIQHDGKENDCEPVGRHPYIMSRQLQYDPTPLTWSKCSEEYITR
FLDRGWGFCLDDIPLE

| | | |
|---|---|---|
| NOV68c, 169648388 | SEQ ID NO: 1009 | 1068 bp |

| | | |
|---|---|---|
| DNA Sequence | ORF Start: at 1 | ORF Stop: end of sequence |

AAGCTTAACTTGACGGTCAATCAAGGATTTCTTTCCAATAGCTACATCATGGAGAAGAGATATGGGAA
CCTCTCCCATGTTAAGATGATGGCTTCCTCTGCCCCCCTCTGCCATCTCAGTGGCACGGTTCTACAGC
AGGGCACCAGAGTTGGGACGGCAGCCCTCAGTGCCTGCCATGGACTGACTGGATTTTTCCAACTACCA
CATGGAGACTTTTTCATTGAACCCGTGAAGAAGCATCCACTGGTTGAGGGAGGGTACCACCCGCACAT
CGTTTACAGGAGGCAGAAAGTTCCAGAAACCAAGGAGCCAACCTGTGGATTAAAGGACAGTGTTAACA
TCTCCCAGAAGCAAGAGCTATGGCGGGAGAAGTGGGAGAGGCACAACTTGCCAAGCAGAAGCCTCTCT
CGGCGTTCCATCAGCAAGGAGAGATGGGTGGAGACACTGGTGGTGGCCGACACAAAGATGATTGAATA
CCATGGGAGTGAGAATGTGGAGTCCTACATCCTCACCATCATGAACATGATCACTGGGTTGTTCCATA
ACCCAAGCATTGGCAATGCAATTCACATTGTTGTGGTTCGGCTCATTCTACTCGAAGAAGAAGAGCAA
GGACTGAAAATAGTTCACCATGCAGAAAAGACACTGTCTAGCTTCTGCAAGTGGCAGAAGAGTATCAA
TCCCAAGAGTGACCTCAATCCTGTTCATCACGACGTGGCTGTCCTTCTCACCAGAAAGGACATCTGTG
CTGGTTTCAATCGCCCCTGCGAGACCCTGGGCCTGTCTCACCTTTCAGGAATGTGTCAGCCTCACCGC
AGTTGTAACATCAATGAAGATTCGGGACTCCCTCTGGCTTTCACAATTGCCCATGAGCTAGGACACAG
CTTCGGCATCCAGCATGATGGGAAAGAAAATGACTGTGAGCCTGTGGGCAGACATCCGTACATCATGT
CCCGCCAGCTCCAGTACGATCCCACTCCGCTGACATGGTCCAAGTGCAGCGAGGAGTACATCACCCGC
TTCTTGGACCGAGGCTGGGGGTTCTGTCTTGATGACATACCTCTCGAG

NOV68c, 169648388

| | | | |
|---|---|---|---|
| Protein Sequence | SEQ ID NO: 1010 | 356 aa | MW at 40380.8kD |

KLNLTVNQGFLSNSYIMEKRYGNLSHVKMMASSAPLCHLSGTVLQQGTRVGTAALSACHGLTGFFQLP
HGDFFIEPVKKHPLVEGGYHPHIVYRRQKVPETKEPTCGLKDSVNISQKQELWREKWERHNLPSRSLS
RRSISKERWVETLVVADTKMIEYHGSENVESYILTIMNMITGLFHNPSIGNAIHIVVVRLILLEEEEQ
GLKIVHHAEKTLSSFCKWQKSINPKSDLNPVHHDVAVLLTRKDICAGFNRPCETLGLSHLSGMCQPHR
SCNINEDSGLPLAFTIAHELGHSFGIQHDGKENDCEPVGRHPYIMSRQLQYDPTPLTWSKCSEEYITR
FLDRGWGFCLDDIPLE

| | | |
|---|---|---|
| NOV68d, 169648365 | SEQ ID NO: 1011 | 1068 bp |

| | | |
|---|---|---|
| DNA Sequence | ORF Start: at 1 | ORF Stop: end of sequence |

AAGCTTAACTTGACGGTCAATCAAGGATTTCTTTCCAATAGCTACATCATGGAGAAGAGATATGGGAA
CCTCTCCCATGTTAAGATGATGGCTTCCTCTGCCCCCCTCTGCCATCICAGTGGCACGGTTCTACAGC
AGGGCACCAGAGTTGGGACGGCAGCCCTCAGTGCCTGCCATGGACTGACTGGATTTTTCCAACTACCA
CATGGAGACTTTTTCATTGAACCCGTGAAGAAGCATCCACTGGTTGAGGGAGGGTACCACCCGCACAT
CGTTTACAGGAGGCAGAAAGTTCCAGAAACCAAGGAGCCAACCTGTGGATTAAAGGACAGTGTTAACA
TCTCCCAGAAGCAAGAGCTATGGCGGGAGAAGTGGGAGAGGCACAAATTGCCAAGCAGAAGCCTCTCT
CGGCGTTCCATCAGCAAGGAGAGATGGGTGGAGACACTGGTGGTGGCCGACACAAAGATGATTGAATA
CCATGGGAGTGAGAATGTGGAGTCCTACATCCTCACCATCATGAACATGGTCACTGGGTTGTTCCATA
ACCCAAGCATTGGCAATGCAATTCACATTGTTGTGGTTCGGCTCATTCTACTCGAAGAAGAAGAGCAA
GGACTGAAAATAGTTCACCATGCAGAAAAGACACTGTCTAGCTTCTGCAAGTGGCAGAAGAGTATCAA
TCCCAAGAGTGACCTCAATCCTGTTCATCACGACGTGGCTGTCCTTCTCACCAGAAAGGACATCTGTG
CTGGTTTCAATCGCCCCTGCGAGACCCTGGGCCTGTCTCACCTTTCAGGAATGTGTCAGCCTCACCGC
AGTTGTAACATCAATGAAGATTCGGGACTCCCTCTGGCTTTCACAATTGCCCATGAGCTAGGACACAG
CTTCGGCATCCAGCATGATGGGAAAGAAAATGACTGTGAGCCTGTGGGCAGACATCCGTACATCATGT
CCCGCCAGCTCCAGTACGATCCCACTCCGCTGACATGGTCCAAGTGCAGCGAGGAGTACATCACCCGC
TTCTTGGACCGAGGCTGGGGGTTCTGTCTTGATGACATACCTCTCGAG

NOV68d, 169648365

| | | | |
|---|---|---|---|
| Protein Sequence | SEQ ID NO: 1012 | 356 aa | MW at 40366.8kD |

KLNLTVNQGFLSNSYIMEKRYGNLSHVKMMASSAPLCHLSGTVLQQGTRVGTAALSACHGLTGFFQLP
HGDFFIEPVKKHPLVEGGYHPHIVYRRQKVPETKEPTCGLKDSVNISQKQELWREKWERHNLPSRSLS
RRSISKERWVETLVVADTKMIEYHGSENVESYILTINNMVTGLFHNPSIGNAIHIVVVRLILLEEEEQ
GLKIVHHAEKTLSSFCKWQKSINPKSDLNPVHHDVAVLLTRKDICAGFNRPCETLGLSHLSGMCQPHR
SCNINEDSGLPLAFTIAHELGHSFGIQHDGKENDCEPVGRHPYIMSRQLQYDPTPLTWSKCSEEYITR
FLDRGWGFCLDDIPLE

| | | |
|---|---|---|
| NOV68e, 284068250 | SEQ ID NO: 1013 | 4777 bp |

| | | |
|---|---|---|
| DNA Sequence | ORF Start: at 1 | ORF Stop: TGA at 4729 |

AGATCTTATGGGAGACAGCCTCAGCCAGGCCCGGTTCGCTTCCCGGACAGGAGGCAAGAGCATTTTAT
CAAGGGCCTGCCAGAATACCACGTGGTGGGTCCAGTCCGAGTAGATGCCAGTGGGCATTTTTTGTCAT
ATGGCTTGCACTATCCCATCACGAGCAGCAGGAGGAAGAGAGATTTGGATGGCTCAGAGGACTGGGTG
TACTACAGAATTTCTCACGAGGAGAAGGACCTGTTTTTTAACTTGACGGTCAATCAAGGATTTCTTTC
CAATAGCTACATCATGGAGAAGAGATATGGGAACCTCTCCCATGTTAAGATGATGGCTTCTTCTGCCC
CCCTCTGCCATCTCAATGGCACGGTTCTACAGCAGGGCACCAGAGTTGGGACGGCAGCCCTCAGTGCC
TGCCATGGACTGACTGGATTTTTCCAACTACCACATGGAGACTTTTTCATTGAACCCGTGAAGAAGCA
TCCACTGGTTGAGGGAGGGTACCACCCGCACATCGTTTACAGGAGGCAGAAAGTTCCAGAAACCAAGG
AGCCAACCTGTGGATTAAAGGACAGTGTTAACATCTCCCAGAAGCAAGAGCTATGGCGGGAGAAGTGG
GAGAGGCACAACTTGCCAAGCAGAAGCCTCTCTCGGCGTTCCATCAGCAAGGAGAGATGGGTGGAGAC
ACTGGTGGTGGCCGACACAAAGATGATTGAATACCATGGGAGTGAGAATGTGGAGTCCTACATCCTCA
CCATCATGAACATGGTCACTGGGTTGTTCCATAACCCAAGCATTGGCAATGCAATTCACATTGTTGTG
GTTCGGCTCATTCTACTCGAAGAAGAAGAGCAAGGACTGAAAATAGTTCACCATGCAGAAAAGACACT
GTCTAGCTTCTGCAAGTGGCAGAAGAGTATCAATCCCAAGAGTGACCTCAATCCTGTTCATCACGACG
TGGCTGTCCTTCTCACCAGAAAGGACATCTGTGCTGGTTTCAATCGCCCGTGCGAGACCCTGGGCCTG
TCTCACCTTTCAGGAATGTGTCAGCCTCACCGCAGTTGTAACATCAATGAAGATTCGGGACTCCCTCT
GGCTTTCACAATTGCCCATGAGCTAGGACACAGCTTCGGCATCCAGCATGATGGGAAAGAAAATGACT
GTGAGCCTGTGGGCAGACATCCGTACATCATGTCCCGCCAGCTCCAGTACGATCCCACTCCGCTGACA
TGGTCCAAGTGCAGCGAGGAGTACATCACCCGCTTCTTGGACCGAGGCTGGGGGTTCTGTCTTGATGA
CATACCTAAAAAGAAAGGCTTGAAGTCCAAGGTCATTGCCCCCGGAGTGATCTATGATGTTCACCACC
AGTGCCAGCTACAATATGGACCCAATGCTACCCTCTGCCAGGAAGTAGAAAACGTCTGCCAGACACTG
TGGTGCTCCGTGAAGGGCTTTTGTCGCTCTAAGCTGGACGCTGCTGCAGATGGAACTCAATGTGGTGA
GAAGAAGTGGTGTATGGCAGGCAAGTGCATCACAGTGGGGAAGAAACCAGAGAGCATTCCTGGAGGCT
GGGGCCGCTGGTCACCCTGGTCCCACTGTTCCAGGACCTGTGGGGCTGGAGTCCAGAGCGCAGAGAGG
CTCTGCAACAACCCCGAGCCAAAGTTTGGAGGGAAATATTGCACTGGAGAAAGAAAACGCTATCGCTT
GTGCAACGTCCACCCCTGTCGCTCAGAGGCACCAACATTTCGGCAGATGCAGTGCAGTGAATTTGACA
CTGTTCCCTACAAGAATGAACTCTACCACTGGTTTCCCATTTTTAACCCAGCACATCCTTGTGAGCTC
TACTGCCGACCCATAGATGGCCAGTTTTCTGAGAAAATGCTGGATGCTGTCATTGATGGTACCCCTTG
CTTTGAAGGCGGCAACAGCAGAAATGTCTGTATTAATGGCATATGTAAGATGGTTGGCTGTGACTATG
AGATCGATTCCAATGCCACCGAGGATCGCTGCGGTGTGTGCCTGGGAGATGGCTCTTCCTGCCAGACT
GTGAGAAAGATGTTTAAGCAGAAGGAAGGATCTGGTTATGTTGACATTGGGCTCATTCCAAAAGGAGC
AAGGGACATAAGAGTGATGGAAATTGAGGGAGCTGGAAACTTCCTGGCCATCAGGAGTGAAGATCCTG
AAAAATATTACCTGAATGGAGGGTTTATTATCCAGTGGAACGGGAACTATAAGCTGGCAGGGACTGTC
TTTCAGTATGACAGGAAAGGAGACCTGGAAAAGCTGATGGCCACAGGTCCCACCAATGAGTCTGTGTG
GATCCAGCTTCTATTCCAGGTGACTAACCCTGGCATCAAGTATGAGTACACAATCCAGAAAGATGGCC
TTGACAATGATGTTGAGCAGCAGATGTACTTCTGGCAGTACGGCCACTGGACAGAGTGCAGTGTGACC
TGCGGGACAGGTATCCGCCGCCAAACTGCCCATTGCATAAAGAAGGGCCGCGGGATGGTGAAAGCTAC
ATTCTGTGACCCAGAAACACAGCCCAATGGGAGACAGAAGAAGTGCCATGAAAAGGCTTGTCCACCCA
GGTGGTGGGCAGGGGAGTGGGAAGCATGCTCGGCGACATGCGGGCCCCACGGGGAGAAGAAGCGAACC
GTGCTGTGCATCCAGACCATGGTCTCTGACGAGCAGGCTCTCCCGCCCACAGACTGCCAGCACCTGCT
GAAGCCCAAGACCCTCCTTTCCTGCAACAGAGACATCCTGTGCCCCTCGGACTGGACAGTGGGCAACT
GGAGTGAGTGTTCTGTTTCCTGTGGTGGTGGAGTGCGGATTCGCAGTGTCACATGTGCCAAGAACCAT
GATGAACCTTGCGATGTGACAAGGAAACCCAACAGCCGAGCTCTGTGTGGCCTCCAGCAATGCCCTTC
TAGCCGGAGAGTTCTGAAACCAAACAAAGGCACTATTTCCAATGGAAAAAACCCACCAACACTAAAGC
CCGTCCCTCCACCTACATCCAGGCCCAGAATGCTGACCACACCCACAGGGCCTGAGTCTATGAGCACA
AGCACTCCAGCAATCAGCAGCCCTAGTCCTACCACAGCCTCCAAAGAAGGAGACCTGGGTGGGAAACA
GTGGCAAGATAGCTCAACCCAACCTGAGCTGAGCTCTCGCTATCTCATTTCCACTGGAAGCACTTCCC
AGCCCATCCTCACTTCCCAATCCTTGAGCATTCAGCCAAGTGAGGAAAATGTTTCCAGTTCAGATACT
GGTCCTACCTCGGAGGGAGGCCTTGTAGCTACAACAACAAGTGGTTCTGGCTTGTCATCTTCCCGCAA
CCCTATCACTTGGCCTGTGACTCCATTTTACAATACCTTGACCAAAGGTCCAGAAATGGAGATTCACA
GTGGCTCAGGGGAAGAAAGAGAACAGCCTGAGGACAAAGATGAAAGCAATCCTGTAATATGGACCAAG
ATCAGAGTACCTGGAAATGACGCTCCAGTGGAAAGTACAGAAATGCCACTTGCACCTCCACTAACACC
AGATCTCAGCAGGGAGTCCTGGTGGCCACCCTTCAGCACAGTAATGGAAGGACTGCTCCCCAGCCAAA
GGCCCACTACTTCCGAAACTGGGACACCCAGAGTTGAGGGGATGGTTACTGAAAAGCCAGCCAACACT
CTGCTCCCTCTGGGAGGAGACCACCAGCCAGAACCCTCAGGAAAGACGGCAAACCGTAACCACCTGAA
ACTTCCAAACAACATGAACCAAACAAAAAGTTCTGAACCAGTCCTGACTGAGGAGGATGCAACAAGTC
TGATTACTGAGGGCTTTTTGCTAAATGCCTCCAATTACAAGCAGCTCACAAACGGCCACGGCTCTGCA
CACTGGATCGTCGGAAACTGGAGCGAGTGCTCCACCACATGTGGCCTGGGGGCCTACTGGAGAAGGGT
GGAGTGCAGCACCCAGATGGATTCTGACTGTGCGGCCATCCAGAGACCTGACCCTGCAAAAAGATGCC
ACCTCCGTCCCTGTGCTGGCTGGAAAGTGGGAAACTGGAGCAAGTGCTCCAGAAACTGCAGTGGGGGC
TTCAAGATACGCGAGATTCAGTGCGTGGACAGCCGGGACCACCGGAACCTGAGGCCATTTCACTGCCA
GTTCCTGGCCGGCATTCGTCCCCCATTGAGCATGAGCTGTAACCCGGAGCCCTGTGAGGCGTGGCAGG
TGGAGCCTTGGAGCCAGTGCTCCAGGTCCTGTGGAGGTGGAGTTCAGGAGAGAGGAGTGTTCTGTCCA
GGAGGCCTCTGTGATTGGACAAAAAGACCCACATCCACCATGTCTTGCAATGAGCACCTGTGCTGTCA
CTGGGCCACTGGGAACTGGGACCTGTGTTCCACTTCCTGTGGAGGTGGCTTTCAGAAGAGGACTGTCC
AATGTGTGCCCTCAGAGGGCAATAAAACTGAAGACCAAGACCAATGTCTATGTGATCACAAACCCAGA
CCTCCAGAATTCAAAAAATGCAACCAGCAGGCCTGCAAGAAAAGTGCCGATTTACTTTGCACTAAGGA
CAAACTGTCAGCCAGTTTCTGCCAGACACTGAAAGCCATGAAGAAATGTTCTGTGCCCACCGTGAGGG
CTGAGTGCTGCTTCTCGTGTCCCCAGACACACATCACACACACCCAAAGGCAAAGAAGGCAACGGTTG
CTCCAAAAGTCAAAAGAACTCCTCGAGGAGTTCTTTTGACTTTTGGAGCAACCGGGCCTGGCTGAGGC
TGTCTCCCATAAGATCT

NOV68e, 284068250

| | | | |
|---|---|---|---|
| Protein Sequence | SEQ ID NO: 1014 | 1576 aa | MW at 175887.8kD |

RSYGRQPQPGPVRFPDRRQEHFIKGLPEYHVVGPVRVDASGHFLSYGLHYPITSSRRKRDLDGSEDWV
YYRISHEEKDLFFNLTVNQGFLSNSYIMEKRYGNLSHVKNMASSAPLCHLNGTVLQQGTRVGTAALSA
CHGLTGFFQLPHGDFFIEPVKKHPLVEGGYHPHIVYRRQKVPETKEPTCGLKDSVNISQKQELWREKW
ERHNLPSRSLSRRSISKERWVETLVVADTKMIEYHGSENVESYILTINNMVTGLFHNPSIGNAIHIVV
VRLILLEEEEQGLKIVHHAEKTLSSFCKWQKSINPKSDLNPVHHDVAVLLTRKDICAGFNRPCETLGL
SHLSGMCQPHRSCNINEDSGLPLAFTIAHELGHSFGIQHDGKENDCEPVGRHPYIMSRQLQYDPTPLT
WSKCSEEYITRFLDRGWGFCLDDIPKKKGLKSKVIAPGVIYDVHHQCQLQYGPNATLCQEVENVCQTL
WCSVKGFCRSKLDAAADGTQCGEKKWCMAGKCITVGKKPESIPGGWGRWSPWSHCSRTCGAGVQSAER
LCNNPEPKFGGKYCTGERKRYRLCNVHPCRSEAPTFRQMQCSEFDTVPYKNELYHWFPIFNPAHPCEL
YCRPIDGQFSEKMLDAVIDGTPCFEGGNSRNVCINGICKMVGCDYEIDSNATEDRCGVCLGDGSSCQT
VRKMFKQKEGSGYVDIGLIPKGARDIRVMEIEGAGNFLAIRSEDPEKYYLNGGFIIQWNGNYKLAGTV
FQYDRKGDLEKLMATGPTNESVWIQLLFQVTNPGIKYEYTIQKDGLDNDVEQQMYFWQYGHWTECSVT
CGTGIRRQTAHCIKKGRGMVKATFCDPETQPNGRQKKCHEKACPPRWWAGEWEACSATCGPHGEKKRT
VLCIQTMVSDEQALPPTDCQHLLKPKTLLSCNRDILCPSDWTVGNWSECSVSCGGGVRIRSVTCAKNH
DEPCDVTRKPNSRALCGLQQCPSSRRVLKPNKGTISNGKNPPTLKPVPPPTSRPRMLTTPTGPESMST
STPAISSPSPTTASKEGDLGGKQWQDSSTQPELSSRYLISTGSTSQPILTSQSLSIQPSEENVSSSDT
GPTSEGGLVATTTSGSGLSSSRNPITWPVTPFYNTLTKGPEMEIHSGSGEEREQPEDKDESNPVIWTK
IRVPGNDAPVESTEMPLAPPLTPDLSRESWWPPFSTVMEGLLPSQRPTTSETGTPRVEGMVTEKPANT
LLPLGGDHQPEPSGKTANRNHLKLPNNMNQTKSSEPVLTEEDATSLITEGFLLNASNYKQLTNGHGSA
HWIVGNWSECSTTCGLGAYWRRVECSTQMDSDCAAIQRPDPAKRCHLRPCAGWKVGNWSKCSRNCSGG
FKIREIQCVDSRDHRNLRPFHCQFLAGIPPPLSMSCNPEPCEAWQVEPWSQCSRSCGGGVQERGVFCP
GGLCDWTKRPTSTMSCNEHLCCHWATGNWDLCSTSCGGGFQKRTVQCVPSEGNKTEDQDQCLCDHKPR
PPEFKKCNQQACKKSADLLCTKDKLSASFCQTLKAMKKCSVPTVRAECCFSCPQTHITHTQRQRRQRL
LQKSKELLEEFF

| | | |
|---|---|---|
| NOV68f, 305867866 | SEQ ID NO: 1015 | 4777 bp |

| | | |
|---|---|---|
| DNA Sequence | ORF Start: at 1 | ORF Stop: TGA at 4729 |

AGATCTTATGGGAGACAGCCTCAGCCAGGCCCGGTTCGCTTCCCGGACAGGAGGCAAGAGCATTTTAT
CAAGGGCCTGCCAGAATACCACGTGGTGGGTCCAGTCCGAGTAGATGCCAGTGGGCATTTTTTGTCAT
ATGGCTTGCACTATCCCATCACGAGCAGCAGGAGGAAGAGAGATTTGGATGGCTCAGAGGACTGGGTG
TACTACAGAATTTCTCACGAGGAGAAGGACCTGTTTTTTAACTTGACGGTCAATCAAGGATTTCTTTC
CAATAGCTACATCATGGAGAAGAGATATGGGAACCTCTCCCATGTTAAGATGATGGCTTCCTCTGCCC
CCCTCTGCCATCTCAGTGGCACGGTTCTACAGCAGGGCACCAGAGTTGGGACGGCAGCCCTCAGTGCC
TGCCATGGACTGACTGGATTTTTCCAACTACCACATGGAGACTTTTTCATTGAACCCGTGAAGAAGCA
TCCACTGGTTGAGGGAGGGTACCACCCGCACATCGTTTACAGGAGGCAGAAAGTTCCAGAAACCAAGG
AGCCAACCTGTGGATTAAAGGACAGTGTTAACATCTCCCAGAAGCAAGAGCTATGGCGGGAGAAGTGG
GAGAGGCACAACTTGCCAAGCAGAAGCCTCTCTCGGCGTTCCATCAGCAAGGAGAGATGGGTGGAGAC
ACTGGTGGTGGCCGACACAAAGATGATTGAATACCATGGGAGTGAGAATGTGGAGTCCTACATCCTCA
CCATCATGAACATGGTCACTGGGTTGTTCCATAACCCAAGCATTGGCAATGCAATTCACATTGTTGTG
GTTCGGCTCATTCTACTCGAAGAAGAAGAGCAAGGACTGAAAATAGTTCACCATGCAGAAAAGACACT
GTCTAGCTTCTGCAAGTGGCAGAAGAGTATCAATCCCAAGAGTGACCTCAATCCTGTTCATCACGACG
TGGCTGTCCTTCTCACTAGAAAGGACATCTGTGCTGGTTTCAATCGCCCCTGCGAGACCCTGGGCCTG
TCTCACCTTTCAGGAATGTGTCAGCCTCACCGCAGTTGTAACATCAATGAAGATTCGGGACTCCCTCT
GGCTTTCACAATTGCCCATGAGCTAGGACACAGCTTCGGCATCCAGCATGATGGGAAAGAAAATGACT
GTGAGCCTGTGGGCAGACATCCGTACATCATGTCCCGCCAGCTCCAGTACGATCCCACTCCGCTGACA
TGGTCCAAGTGCAGCGAGGAGTACATCACCCGCTTCTTGGACCGAGGCTGGGGGTTCTGTCTTGATGA
CATACCTAAAAAGAAAGGCTTGAAGTCCAAGGTCATTGCCCCCGGAGTGATCTATGATGTTCACCACC
AGTGCCAGCTACAATATGGACCCAATGCTACCTTCTGCCAGGAAGTAGAAAACGTCTGCCAGACACTG
TGGTGCTCCGTGAAGGGCTTTTGTCGCTCTAAGCTGGACGCTGCTGCAGATGGAACTCAATGTGGTGA
GAAGAAGTGGTGTATGGCAGGCAAGTGCATCACAGTGGGGAAGAAACCAGAGAGCATTCCTGGAGGCT
GGGGCCGCTGGTCACCCTGGTCCCACTGTTCCAGGACCTGTGGGGCTGGAGTCCAGAGCGCAGAGAGG
CTCTGCAACAACCCCGAGCCAAAGTTTGGAGGGAAATATTGCACTGGAGAAAGAAAACGCTATCGCTT
GTGCAACGTCCACCCCTGTCGCTCAGAGGCACCAACATTTCGGCAGATGCAGTGCAGTGAATTTGACA
CTGTTCCCTACAAGAATGAACTCTACCACTGGTTTCCCATTTTTAACCCAGCACATCCTTGTGAGCTC
TACTGCCGACCCATAGATGGCCAGTTTTCTGAGAAAATGCTGGATGCTGTCATTGATGGTACCCCTTG
CTTTGAAGGCGGCAACAGCAGAAATGTCTGTATTAATGGCATATGTAAGATGGTTGGCTGTGACTATG
AGATCGATTCCAATGCCACCGAGGATCGCTGCGGTGTGTGCCTGGGAGATGGCTCTTCCTGCCAGACT
GTGAGAAAGATGTTTAAGCAGAAGGAAGGATCTGGTTATGTTGACATTGGGCTCATTCCAAAAGGAGC
AAGGGACATAAGAGTGATGGAAATTGAGGGAGCTGGAAACTTCCTGGCCATCAGGAGTGAAGATCCTG
AAAAATATTACCTGAATGGAGGGTTTATTATCCAGTGGAACGGGAACTATAAGCTGGCAGGGACTGTC
TTTCAGTATGACAGGAAAGGAGACCTGGAAAAGCTGATGGCCACAGGTCCCACCAATGAGTCTGTGTG
GATCCAGCTTCTATTCCAGGTGACTAACCCTGGCATCAAGTATGAGTACACAATCCAGAAAGATGGCC
TTGACAATGATGTTGAGCAGCAGATGTACTTCTGGCAGTACGGCCACTGGACAGAGTGCAGTGTGACC
TGCGGGACAGGTATCCGCCGCCAAACTGCCCATTGCATAAAGAAGGGCCGCGGGATGGTGAAAGCTAC
ATTCTGTGACCCAGAAACACAGCCCAATGGGAGACAGAAGAAGTGCCATGAAAAGGCTTGTCCACCCA
GGTGGTGGGCAGGGGAGTGGGAAGCATGCTCGGCGACATGCGGGCCCCACGGGGAGAAGAAGCGAACC
GTGCTGTGCATCCAGACCATGGTCTCTGACGAGCAGGCTCTCCCGCCCACAGACTGCCAGCACCTGCT
GAAGCCCAAGACCCTCCTTTCCTGCAACAGAGACATCCTGTGCCCCTCGGACTGGACAGTGGGCAACT
GGAGTGAGTGTTCTGTTTCCTGTGGTGGTGGAGTGCGGATTCGCAGTGTCACATGTGCCAAGAACCAT
GATGAACCTTGCGATGTGACAAGGAAACCCAACAGCCGAGCTCTGTGTGGCCTCCAGCAATGCCCTTC
TAGCCGGAGAGTTCTGAAACCAAACAAAGGCACTATTTCCAATGGAAAAAACCCACCAACACTAAAGC
CCGTCCCTCCACCTACATCCAGGCCCAGAATGCTGACCACACCCACAGGGCCTGAGTCTATGAGCACA
AGCACTCCAGCAATCAGCAGCCCTAGTCCTACCACAGCCTCCAAAGAAGGAGACCTGGGTGGGAAACA
GTGGCAAGATAGCTCAACCCAACCTGAGCTGAGCTCTCGCTATCTCATTTCCACTGGAAGCACTTCCC
AGCCCATCCTCACTTCCCAATCCTTGAGCATTCAGCCAAGTGAGGAAAATGTTTCCAGTTCAGATACT
GGTCCTACCTCGGAGGGAGGCCTTGTAGCTACAACAACAAGTGGTTCTGGCTTGTCATCTTCCCGCAA
CCCTATCACTTGGCCTGTGACTCCATTTTACAATACCTTGACCAAAGGTCCAGAAATGGAGATTCACA
GTGGCTCAGGGGAAGAAAGAGAACAGCCTGAGGACAAAGATGAAAGCAATCCTGTAATATGGACCAAG
ATCAGAGTACCTGGAAATGACGCTCCAGTGGAAAGTACAGAAATGCCACTTGCACCTCCACTAACACC
AGATCTCAGCAGGGAGTCCTGGTGGCCACCCTTCAGCACAGTAATGGAAGGACTGCTCCCCAGCCAAA
GGCCCACTACTTCCGAAACTGGGACACCCAGAGTTGAGGGGATGGTTACTGAAAAGCCAGCCAACACT
CTGCTCCCTCTGGGAGGAGACCACCAGCCAGAACCCTCAGGAAAGACGGCAAACCGTAACCACCTGAA
ACTTCCAAACAACATGAACCAAACAAAAAGTTCTGAACCAGTCCTGACTGAGGAGGATGCAACAAGTC
TGATTACTGAGGGCTTTTTGCTAAATGCCTCCAATTACAAGCAGCTCACAAACGGCCACGGCTCTGCA
CACTGGATCGTCGGAAACTGGAGCGAGTGCTCCACCACATGTGGCCTGGGGGCCTACTGGAGAAGGGT
GGAGTGCAGCACCCAGATGGATTCTGACTGTGCGGCCATCCAGAGACCTGACCCTGCAAAAAGATGCC
ACCTCCGTCCCTGTGCTGGCTGGAAAGTGGGAAACTGGAGCAAGTGCTCCAGAAACTGCAGTGGGGGC
TTCAAGATACGCGAGATTCAGTGCGTGGACAGCCGGGACCACCGGAACCTGAGGCCATTTCACTGCCA
GTTCCTGGCCGGCATTCCTCCCCCATTGAGCATGAGCTGTAACCCGGAGCCCTGTGAGGCGTGGCAGG
TGGAGCCTTGGAGCCAGTGCTCCAGGTCCTGTGGAGGTGGAGTTCAGGAGAGAGGAGTGTTCTGTCCA
GGAGGCCTCTGTGATTGGACAAAAAGACCCACATCCACCATGTCTTGCAATGAGCACCTGTGCTGTCA
CTGGGCCACTGGGAACTGGGACCTGTGTTCCACTTCCTGTGGAGGTGGCTTTCAGAAGAGGACTGTCC
AATGTGTGCCCTCAGAGGGCAATAAAACTGAAGACCAAGACCAATGTCTATGTGATCACAAACCCAGA
CCTCCAGAATTCAAAAAATGCAACCAGCAGGCCTGCAAGAAAAGTGCCGATTTACTTTGCACTAAGGA
CAAACTGTCAGCCAGTTTCTGCCAGACACTGAAAGCCATGAAGAAATGTTCTGTGCCCACCGTGAGGG
CTGAGTGCTGCTTCTCGTGTCCCCAGACACACATCACACACACCCAAAGGCAAAGAAGGCAACGGTTG
CTCCAAAAGTCAAAAGGACTCCTCGAGGAGTTCTTTTGACTTTTGGAGCAACCGGGCCTGGCTGAGGC
TGTCTCCCATAAGATCT

NOV68f, 305867866

| | | | |
|---|---|---|---|
| Protein Sequence | SEQ ID NO: 1016 | 1576 aa | MW at 175822.7kD |

RSYGRQPQPGPVRFPDRRQEHFIKGLPEYHVVGPVRVDASGHFLSYGLHYPITSSRRKRDLDGSEDWV
YYRISHEEKDLFFNLTVNQGFLSNSYIMEKRYGNLSHVKMMASSAPLCHLSGTVLQQGTRVGTAALSA
CHGLTGFFQLPHGDFFIEPVKKHPLVEGGYHPHIVYRRQKVPETKEPTCGLKDSVNISQKQELWREKW
ERHNLPSRSLSRRSISKERWVETLVVADTKMIEYHGSENVESYILTIMNMVTGLFHNPSIGNAIHIVV
VRLILLEEEEQGLKIVHHAEKTLSSFCKWQKSINPKSDLNPVHHDVAVLLTRKDICAGFNRPCETLGL
SHLSGMCQPHRSCNINEDSGLPLAFTIAHELGHSFGIQHDGKENDCEPVGRHPYIMSRQLQYDPTPLT
WSKCSEEYITRFLDRGWGFCLDDIPKKKGLKSKVIAPGVIYDVHHQCQLQYGPNATFCQEVENVCQTL
WCSVKGFCRSKLDAAADGTQCGEKKWCMAGKCITVGKKPESIPGGWGRWSPWSHCSRTCGAGVQSAER
LCNNPEPKFGGKYCTGERKRYRLCNVHPCRSEAPTFRQMQCSEFDTVPYKNELYHWFPIFNPAHPCEL
YCRPIDGQFSEKMLDAVIDGTPCFEGGNSRNVCINGICKMVGCDYEIDSNATEDRCGVCLGDGSSCQT
VRKMFKQKEGSGYVDIGLIPKGARDIRVMEIEGAGNFLAIRSEDPEKYYLNGGFIIQWNGNYKLAGTV
FQYDRKGDLEKLMATGPTNESVWIQLLFQVTNPGIKYEYTIQKDGLDNDVEQQMYFWQYGHWTECSVT
CGTGIRRQTAHCIKKGRGNVKATFCDPETQPNGRQKKCHEKACPPRWWAGEWEACSATCGPHGEKKRT
VLCIQTMVSDEQALPPTDCQHLLKPKTLLSCNRDILCPSDWTVGNWSECSVSCGGGVRIRSVTCAKNH
DEPCDVTRKPNSRALCGLQQCPSSRRVLKPNKGTISNGKNPPTLKPVPPPTSRPRMLTTPTGPESMST
STPAISSPSPTTASKEGDLGGKQWQDSSTQPELSSRYLISTGSTSQPILTSQSLSIQPSEENVSSSDT
GPTSEGGLVATTTSGSGLSSSRNPITWPVTPFYNTLTKGPEMEIHSGSGEEREQPEDKDESNPVIWTK
IRVPGNDAPVESTEMPLAPPLTPDLSRESWWPPFSTVMEGLLPSQRPTTSETGTPRVEGMVTEKPAWI
LLPLGGDHQPEPSGKTANRNHLKLPNNMNQTKSSEPVLTEEDATSLITEGFLLNASNYKQLTNGHGSA
HWIVGNWSECSTTCGLGAYWRRVECSTQMDSDCAAIQRPDPAKRCHLRPCAGWKVGNWSKCSRNCSGG
FKIREIQCVDSRDHRNLRPFHCQFLAGIPPPLSMSCNPEPCEAWQVEPWSQCSRSCGGGVQERGVFCP
GGLCDWTKRPTSTMSCNEHLCCHWATGNWDLCSTSCGGGFQKRTVQCVPSEGNKTEDQDQCLCDHKPR
PPEFKKCNQQACKKSADLLCTKDKLSASFCQTLKAMKKCSVPTVRAECCFSCPQTHITHTQRQRRQRL
LQKSKGLLEEFF

| | | |
|---|---|---|
| NOV68g, 318176397 | SEQ ID NO: 1017 | 3174 bp |

| | | |
|---|---|---|
| DNA Sequence | ORF Start: at 1 | ORF Stop: end of sequence |

CTGGAATGCGCCCTTAGATCTGGCCGCTGGTCACCCTGGTCCCACTGTTCCAGGACCTGTGGGGCTGG
AGTCCAGAGCGCAGAGAGGCTCTGCAACAACCCCGAGCCAAAGTTTGGAGGGAAATATTGCACTGGAG
AAAGAAAACGCTATCGCTTGTGCAACGTCCACCCCTGTCGCTCAGAGGCACCAACATTTCGGCAGATG
CAGTGCAGTGAATTTGACACTGTTCCCTACAAGAATGAACTCTACCACTGGTTTCCCATTTTTAACCC
AGCACATCCTTGTGAGCTCTACTGCCGACCCATAGATGGCCAGTTTTCTGAGAAAATGCTGGATGCTG
TCATTGATGGTACCCCTTGCTTTGAAGGCGGCAACAGCAGAAATGTCTGTATTAATGGCATATGTAAG
ATGGTTGGCTGTGACTATGAGATCGATTCCAATGCCACCGAGGATCGCTGCGGTGTGTGCCTGGGAGA
TGGCTCTTCCTGCCAGACTGCGAGAAAGATGTTTAAGCAGAAGGAAGGATCTGGTTATGTTGACATTG
GGCTCATTCCAAAAGGAGCAAGGGACATAAGAGTGATGGAAATTGAGGGAGCTGGAAACTTCCTGGCC
ATCAGGAGTGAAGATCCTGAAAAATATTACCTGAATGGAGGGTTTATTATCCAGTGGAACGGGAACTA
TAAGCTGGCAGGGACTGTCTTTCAGTATGACAGGAAAGGAGACCTGGAAAAGCTGATGGCCACAGGTC
CCACCAATGAGTCTGTGTGGATCCAGCTTCTATTCCAGGTGACTAACCCTGGCATCAAGTATGAGTAC
ACAATCCAGAAAGATGGCCTTGACAATGATGTTGAGCAGCAGATGTACTTCTGGCAGTACGGCCACTG
GACAGAGTGCAGTGTGACCTGCGGGACAGGTATCCGCCGCCAAACTGCCCATTGCATAAAGAAGGGCC
GCGGGATGGTGAAAGCTACATTCTGTGACCCAGAAACACAGCCCAATGGGAGACAGAAGAAGTGCCAT
GAAAAGGCTTGTCCACCCAGGTGGTGGGCAGGGGAGTGGGAAGCATGCTCGGCGACATGCGGGCCCCA
CGGGGAGAAGAAGCGAACCGTGcTGTGCATCCAGACCATGGTCTCTGACGAGCAGGCTCTCCCGCCCA
CAGACTGCCAGCACCTGCTGAAGCCCAAGACCCTCCTTTCCTGCAACAGAGACATCCTGTGCCCCTCG
GACTGGACAGTGGGCAACTGGAGTGAGTGTTCTGTTTCCTGTGGTGGTGGAGTGCGGATTCGCAGTGT
CACATGTGCCAAGAACCATGATGAACCTTGCGATGTGACAAGGAAACCCAACAGCCGAGCTCTGTGTG
GCCTCCAGCAATGCCCTTCTAGCCGGAGAGTTCTGAAACCAAACAAAGGCACTATTTCCAATGGAAAA
AACCCACCAACACTAAAGCCCGTCCCTCCACCTACATCCAGGCCCAGAATGCTGACCACACCCACAGG
GCCTGAGTCTATGAGCACAAGCACTCCGGCAATCAGCAGCCCTAGTCCTACCACAGCCTCCAAAGAAG
GAGACCTGGGTGGGAAACAGTGGCAAGATAGCTCAACCCAACCTGAGCTGAGCTCTCGCTATCTCATT
TCCACTGGAAGCACTTCCCAGCCCATCCTCACTTCCCAATCCTTGAGCATTCAGCCAAGTGAGGAAAA
TGTTTCCAGTTCAGATACTGGTCCTACCTCGGAGGGAGGCCTTGTAGCTACAACAACAAGTGGTTCTG
GCTTGTCATCTTCCCGCAACCCTATCACTTGGCCTGTGACTCCATTTTACAATACCTTGACCAAAGGT
CCAGAAATGGAGATTCACAGTGGCTCAGGGGAAGAAAGAGAACAGCCTGAGGACAAAGATGAAAGCAA
TCCTGTAATATGGACCAAGATCAGAGTACCTGGAAATGACGCTCCAGTGGAAAGTACAGAAATGCCAC
TTGCACCTCCACTAACACCAGATCTCAGCAGGGAGTCCTGGTGGCCACCCTTCAGCACAGTAATGGAA
GGACTGCTCCCCAGCCAAAGGCCCACTACTTCCGAAACTGGGACACCCAGAGTTGAGGGGATGGTTAC
TGAAAAGCCAGCCAACACTCTGCTCCCTCTGGGAGGAGACCACCAGCCAGAACCCTCAGGAAAGACGG
CAAACCGTAACCACCTGAAACTTCCAAACAACATGAACCAAACAAAAAGTTCTGAACCAGTCCTGACT
GAGGAGGATGCAACAAGTCTGATTACTGAGGGCTTTTTGCTAAATGCCTCCAATTACAAGCAGCTCAC
AAACGGCTACGGCTCTGCACACTGGATCGTCGGAAACTGGAGCGAGTGCTCCACCACATGTGGCCTGG
GGGCCTACTGGAGAAGGGTGGAGTGCAGCACCCAGATGGATTCTGACTGTGCGGCCATCCAGAGACCT
GACCCTGCAAAAAGATGCCACCTCCGTCCCTGTGCTGGCTGGAAAGTGGGAAACTGGAGCAAGTGCTC
CAGAAACTGCAGTGGGGGCTTCAAGATACGCGAGATTCAGTGCGTGGACAGCCGGGACCACCGGAACC
TGAGGCCATTTCACTGCCAGTTCCTGGCCGGCATTCCTCCCCCATTGAGCATGAGCTGTAACCCGGAG
CCCTGTGAGGCGTGGCAGGTGGAGCCTTGGAGCCAGTGCTCCAGGTCCTGTGGAGGTGGAGTTCAGGA
GAGAGGAGTGTTCTGTCCAGGAGGCCTCTGTGATTGGACAAAAAGACCCACATCCACCATGTCTTGCA
ATGAGCACCTGTGCTGTCACTGGGCCACTGGGAACTGGGACCTGTGTTCCACTTCCTGTGGAGGCGGC
TTTCAGAAGAGGACTGTCCAATGTGTGCCCTCAGAGGGCAATAAAACTGAAGACCAAGACCAATGTCT
ATGTGATCACAAACCCAGACCTCCAGAATTCAAAAAATGCAACCAGCAGGCCTGCAAGAAAAGTGCCG
ATTTACTTTGCACTAAGGACAAACTGTCAGCCAGTTTCTGCCAGACACTGAAAGCCATGAAGAAATGT
TCTGTGCCCACCGTGAGGGCTGAGTGCTGCTTCTCGTGTCCCCAGACACACATCACACACACCCAAAG
GCAAAGAAGGCAACGGTTGCTCCAAAAGTCAAAAGAACTCCTCGAG

NOV68g, 318176397

| | | | |
|---|---|---|---|
| Protein Sequence | SEQ ID NO: 1018 | 1058 aa | MW at 117062.0kD |

LECALRSGRWSPWSHCSRTCGAGVQSAERLCNNPEPKFGGKYCTGERKRYRLCNVHPCRSEAPTFRQM
QCSEFDTVPYKNELYHWFPIFNPAHPCELYCRPIDGQFSEKMLDAVIDGTPCFEGGNSRNVCINGICK
MVGCDYEIDSNATEDRCGVCLGDGSSCQTARKMFKQKEGSGYVDIGLIPKGARDIRVMEIEGAGNFLA
IRSEDPEKYYLNGGFIIQWNGNYKLAGTVFQYDRKGDLEKLMATGPTNESVWIQLLFQVTNPGIKYEY
TIQKDGLDNDVEQQMYFWQYGHWTECSVTCGTGIRRQTAHCIKKGRGMVKATFCDPETQPNGRQKKCH
EKACPPRWWAGEWEACSATCGPHGEKKRTVLCIQTMVSDEQALPPTDCQHLLKPKTLLSCNRDILCPS
DWTVGNWSECSVSCGGGVRIRSVTCAKNHDEPCDVTRKPNSRALCGLQQCPSSRRVLKPNKGTISNGK
NPPTLKPVPPPTSRPRMLTTPTGPESMSTSTPAISSPSPTTASKEGDLGGKQWODSSTQPELSSRYLI
STGSTSQPILTSQSLSIQPSEENVSSSDTGPTSEGGLVATTTSGSGLSSSRNPITWPVTPFYNTLTKG
PEMEIHSGSGEEREOPEDKDESNPVIWTKIRVPGNDAPVESTEMPLAPPLTPDLSRESWWPPFSTVME
GLLPSQRPTTSETGTPRVEGMVTEKPANTLLPLGGDHQPEPSGKTANRNHLKLPNNMNQTKSSEPVLT
EEDATSLITEGFLLNASNYKQLTNGYGSAHWIVGNWSECSTTCGLGAYWRRVECSTQMDSDCAAIQRP
DPAKRCHLRPCAGWKVGNWSKCSRNCSGGFKIREIQCVDSRDHRNLRPFHCQFLAGIPPPLSMSCNPE
PCEAWQVEPWSQCSRSCGGGVQERGVFCPGGLCDWTKRPTSTMSCNEHLCCHWATGNWDLCSTSCGGG
FQKRTVQCVPSEGNKTEDQDQCLCDHKPRPPEFKKCNQQACKKSADLLCTKDKLSASFCQTLKANKKC
SVPTVRAECCFSCPQTHITHTQRQRRQRLLQKSKELLE

| | | |
|---|---|---|
| NOV68h, CG58504-02 | SEQ ID NO: 1019 | 1068 bp |

| | | |
|---|---|---|
| DNA Sequence | ORF Start: at 7 | ORF Stop: at 1063 |

AAGCTTAACTTGACGGTCAATCAAGGATTTCTTTCCAATAGCTACATCATGGAGAAGAGATATGGGAA
CCTCTCCCATGTTAAGATGATGGCTTCCTCTGCCCCCCTCTGCCATCTCAGTGGCACGGTTCTACAGC
AGGGCACCAGAGTTGGGATGGCAGCCCTCAGTGCCTGCCATGGACTGACTGGATTTTTCCAACTACCA
CATGGAGACTTTTTCATTGAACCCGTGAAGAAGCATCCACTGGTTGAGGGAGGGTACCACCCGCACAT
CGTTTACAGGAGGCAGAAAGTTCCAGAAACCAAGGAGCCAACCTGTGGATTAAAGGACAGTGTTAACA
TCTCCCAGAAGCAAGAGCTATGGCGGGAGAAGTGGGAGAGGCACAACTTGCCAAGCAGAAGCCTCTCT
CGGCGTTCCATCAGCAAGGAGAGATGGGTGGAGACACTGGTGGTGGCCGACACAAAGATGATTGAATA
CCATGGGAGTGAGAATGTGGAGTCCTGCATCCTCACCATCATGAACATGGTCACTGGGTTGTTCCATA
ACCCAAGCATTGGCAATGCAATTCACATTGTTGTGGTTCGGCTCATTCTACTCGAAGAAGAAGAGCAA
GGACTGAAAATAGTTCACCATGCAGAAAAGACACTGTCTAGCTTCTGCAAGTGGCAGAAGAGTATCAA
TCCCAAGAGTGACCTCAATCCTGTTCATCACGACGTGGCTGTCCTTCTCACCAGAAAGGACATCTGTG
CTGGTTTCAATCGCCCCTGCGAGACCCTGGGCCTGTCTCACCTTTCAGGAATGTGTCAGCCTCACCGC
AGTTGTAACATCAATGAAGATTCGGGACTCCCTCTGGCTTTCACAATTGCCCATGAGCTAGGACACAG
CTTCGGCATCCAGCATGATGGGAAAGAAAATGACTGTGAGCCTGTGGGCAGACATCCGTACATCATGT
CCCGCCAGCTCCAGTACGATCCCACTCCGCTGACATGGTCCAAGTGCAGCGAGGAGTACATCACCCGC
TTCTTGGACCGAGGCTGGGGGTTCTGTCTTGATGACATACCTCTCGAG

NOV68h, CG58504-02

| | | | |
|---|---|---|---|
| Protein Sequence | SEQ ID NO: 1020 | 352 aa | MW at 39853.3kD |

NLTVNQGFLSNSYIMEKRYGNLSHVKMMASSAPLCHLSGTVLQQGTRVGMAALSACHGLTGFFQLPHG
DFFIEPVKKHPLVEGGYHPHIVYRRQKVPETKEPTCGLKDSVNISQKQELWREKWERHNLPSRSLSRR
SISKERWVETLVVADTKMIEYHGSENVESCILTIMNMVTGLFHNPSIGNAIHIVVVRLILLEEEEQGL
KIVHHAEKTLSSFCKWQKSINPKSDLNPVHHDVAVLLTRKDICAGFNRPCETLGLSHLSGMCQPHRSC
NINEDSGLPLAFTIAHELGHSFGIQHDGKENDCEPVGRHPYIMSRQLQYDPTPLTWSKCSEEYITRFL
DRGWGFCLDDIP

| | | |
|---|---|---|
| NOV68i, CG58504-03 | SEQ ID NO: 1021 | 1068 bp |

| | | |
|---|---|---|
| DNA Sequence | ORF Start: at 7 | ORF Stop: at 1063 |

AAGCTTAACTTGACGGTCAATCAAGGATTTCTTTCCAATAGCTACATCATGGAGAAGAGATATGGGAA
CCTCTCCCATGTTAAGATGATGGCTTCCTCTGCCCCCCTCTGCCATCTCAGTGGCACGGTTCTACAGC
AGGGCACCAGAGTTGGGACGGCAGCCCTCAGTGCcTGCCATGGACTGACTGGATTTTTCCAACTACCA
CATGGAGACTTTTTCATTGAACCCGTGAAGAAGCATCCACTGGTTGAGGGAGGGTACCACCCGCACAT
CGTTTACAGGAGGCAGAAAGTTCCAGAAACCAAGGAGCCAACCTGTGGATTAAAGGACAGTGTTAACA
TCTCCCAGAAGCAAGAGCTATGGCGGGAGAAGTGGGAGAGGCACAACTTGCCAAGCAGAAGCCTCTCT
CGGCGTTCCATCAGCAAGGAGAGATGGGTGGAGACACTGGTGGTGGCCGACACAAAGATGATTGAATA
CCATGGGAGTGAGAATGTGGAGTCCTACATCCTCACCATCATGAACATGATCACTGGGTTGTTCCATA
ACCCAAGCATTGGCAATGCAATTCACATTGTTGTGGTTCGGCTCATTCTACTCGAAGAAGAAGAGCAA
GGACTGAAAATAGTTCACCATGCAGAAAAGACACTGTCTAGCTTCTGCAAGTGGCAGAAGAGTATCAA
TCCCAAGAGTGACCTCAATCCTGTTCATCACGACGTGGCTGTCCTTCTCACCAGAAAGGACATCTGTG
CTGGTTTCAATCGCCCCTGCGAGACCCTGGGCCTGTCTCACCTTTCAGGAATGTGTCAGCCTCACCGC
AGTTGTAACATCAATGAAGATTCGGGACTCCCTCTGGCTTTCACAATTGCCCATGAGCTAGGACACAG
CTTCGGCATCCAGCATGATGGGAAAGAAAATGACTGTGAGCCTGTGGGCAGACATCCGTACATCATGT
CCCGCCAGCTCCAGTACGATCCCACTCCGCTGACATGGTCCAAGTGCAGCGAGGAGTACATCACCCGC
TTCTTGGACCGAGGCTGGGGGTTCTGTCTTGATGACATACCTCTCGAG

NOV68i, CG58504-03

| | | | |
|---|---|---|---|
| Protein Sequence | SEQ ID NO: 1022 | 352 aa | MW at 39897.2kD |

NLTVNQGFLSNSYIMEKRYGNLSHVKMMASSAPLCHLSGTVLQQGTRVGTAALSACHGLTGFFQLPHG
DFFIEPVKKHPLVEGGYHPHIVYRRQKVPETKEPTCGLKDSVNISQKQELWREKWERHNLPSRSLSRR
SISKERWVETLVVADTKMIEYHGSENVESYILTIMNNITGLFHNPSIGNAIHIVVVRLILLEEEEQGL
KIVHHAEKTLSSFCKWQKSINPKSDLNPVHHDVAVLLTRKDICAGFNRPCETLGLSHLSGMCQPHRSC
NINEDSGLPLAFTIAHELGHSFGIQHDGKENDCEPVGRHPYIMSRQLQYDPTPLTWSKCSEEYITRFL
DRGWGFCLDDIP

| | | |
|---|---|---|
| NOV68j, CG58504-04 | SEQ ID NO: 1023 | 252 bp |

| | | |
|---|---|---|
| DNA Sequence | ORF Start: at 7 | ORF Stop: at 247 |

AAGCTTCACCAGTGCCAGCTACAATATGGACCCAATGCTACCTTCTGCCAGGAAGTAGAAAACGTCTG
CCAGACACTGTGGTGCTCCGTGAAGGGCTTTTGTCGCTCTAAGCTGGACGCTGCTGCAGATGGAACTC
AATGTGGTGAGAAGAAGTGGTGTATGGCAGGCAAGTGCATCACAGTGGGGAAGAAACCAGAGAGCATT
CCTGGAGGCTGCGGCCGCTGGTCACCCTGGTCCCACTGTTCCCTCGAG

NOV68j, CG58504-04

| | | | |
|---|---|---|---|
| Protein Sequence | SEQ ID NO: 1024 | 80 aa | MW at 8757.0kD |

HQCQLQYGPNATFCQEVENVCQTLWCSVKGFCRSKLDAAADGTQCGEKKWCMAGKCITVGKKPESIPG
GCGRWSPWSHCS

| | | |
|---|---|---|
| NOV68k, CG58504-05 | SEQ ID NO: 1025 | 4777 bp |

| | | |
|---|---|---|
| DNA Sequence | ORF Start: at 7 | ORF Stop: TGA at 4729 |

AGATCTTATGGGAGACAGCCTCAGCCAGGCCCGGTTCGCTTCCCGGACAGGAGGCAAGAGCATTTTAT
CAAGGGCCTGCCAGAATACCACGTGGTGGGTCCAGTCCGAGTAGATGCCAGTGGGCATTTTTTGTCAT
ATGGCTTGCACTATCCCATCACGAGCAGCAGGAGGAAGAGAGATTTGGATGGCTCAGAGGACTGGGTG
TACTACAGAATTTCTCACGAGGAGAAGGACCTGTTTTTTAACTTGACGGTCAATCAAGGATTTCTTTC
CAATAGCTACATCATGGAGAAGAGATATGGGAACCTCTCCCATGTTAAGATGATGGCTTCCTCTGCCC
CCCTCTGCCATCTCAGTGGCACGGTTCTACAGCAGGGCACCAGAGTTGGGACGGCAGCCCTCAGTGCC
TGCCATGGACTGACTGGATTTTTCCAACTACCACATGGAGACTTTTTCATTGAACCCGTGAAGAAGCA
TCCAcTGGTTGAGGGAGGGTACCACCCGCACATCGTTTACAGGAGGCAGAAAGTTCCAGAAACCAAGG
AGCCAACCTGTGGATTAAAGGACAGTGTTAACATCTCCCAGAAGCAAGAGCTATGGCGGGAGAAGTGG
GAGAGGCACAACTTGCCAAGCAGAAGCCTCTCTCGGCGTTCCATCAGCAAGGAGAGATGGGTGGAGAC
ACTGGTGGTGGCCGACACAAAGATGATTGAATACCATGGGAGTGAGAATGTGGAGTCCTACATCCTCA
CCATCATGAACATGGTCACTGGGTTGTTCCATAACCCAAGCATTGGCAATGCAATTCACATTGTTGTG
GTTCGGCTCATTCTACTCGAAGAAGAAGAGCAAGGACTGAAAATAGTTCACCATGCAGAAAAGACACT
GTCTAGCTTCTGCAAGTGGCAGAAGAGTATCAATCCCAAGAGTGACCTCAATCCTGTTCATCACGACG
TGGCTGTCCTTCTCACTAGAAAGGACATCTGTGCTGGTTTCAATCGCCCCTGCGAGACCCTGGGCCTG
TCTCACCTTTCAGGAATGTGTCAGCCTCACCGCAGTTGTAACATCAATGAAGATTCGGGACTCCCTCT
GGCTTTCACAATTGCCCATGAGCTAGGACACAGCTTCGGCATCCAGCATGATGGGAAAGAAAATGACT
GTGAGCCTGTGGGCAGACATCCGTACATCATGTCCCGCCAGCTCCAGTACGATCCCACTCCGCTGACA
TGGTCCAAGTGCAGCGAGGAGTACATCACCCGCTTCTTGGACCGAGGCTGGGGGTTCTGTCTTGATGA
CATACCTAAAAAGAAAGGCTTGAAGTCCAAGGTCATTGCCCCCGGAGTGATCTATGATGTTCACCACC
AGTGCCAGCTACAATATGGACCCAATGCTACCTTCTGCCAGGAAGTAGAAAACGTCTGCCAGACACTG
TGGTGCTCCGTGAAGGGCTTTTGTCGCTCTAAGCTGGACGCTGCTGCAGATGGAACTCAATGTGGTGA
GAAGAAGTGGTGTATGGCAGGCAAGTGCATCACAGTGGGGAAGAAACCAGAGAGCATTCCTGGAGGCT
GGGGCCGCTGGTCACCCTGGTCCCACTGTTCCAGGACCTGTGGGGCTGGAGTCCAGAGCGCAGAGAGG
CTCTGCAACAACCCCGAGCCAAAGTTTGGAGGGAAATATTGCACTGGAGAAAGAAAACGCTATCGCTT
GTGCAACGTCCACCCCTGTCGCTCAGAGGCACCAACATTTCGGCAGATGCAGTGCAGTGAATTTGACA
CTGTTCCCTACAAGAATGAACTCTACCACTGGTTTCCCATTTTTAACCCAGCACATCCTTGTGAGCTC
TACTGCCGACCCATAGATGGCCAGTTTTCTGAGAAAATGCTGGATGCTGTCATTGATGGTACCCCTTG
CTTTGAAGGCGGCAACAGCAGAAATGTCTGTATTAATGGCATATGTAAGATGGTTGGCTGTGACTATG
AGATCGATTCCAATGCCACCGAGGATCGCTGCGGTGTGTGCCTGGGAGATGGCTCTTCCTGCCAGACT
GTGAGAAAGATGTTTAAGCAGAAGGAAGGATCTGGTTATGTTGACATTGGGCTCATTCCAAAAGGAGC
AAGGGACATAAGAGTGATGGAAATTGAGGGAGCTGGAAACTTCCTGGCCATCAGGAGTGAAGATCCTG
AAAAATATTACCTGAATGGAGGGTTTATTATCCAGTGGAACGGGAACTATAAGCTGGCAGGGACTGTC
TTTCAGTATGACAGGAAAGGAGACCTGGAAAAGCTGATGGCCACAGGTCCCACCAATGAGTCTGTGTG
GATCCAGCTTCTATTCCAGGTGACTAACCCTGGCATCAAGTATGAGTACACAATCCAGAAAGATGGCC
TTGACAATGATGTTGAGCAGCAGATGTACTTCTGGCAGTACGGCCACTGGACAGAGTGCAGTGTGACC
TGCGGGACAGGTATCCGCCGCCAAACTGCCCATTGCATAAAGAAGGGCCGCGGGATGGTGAAAGCTAC
ATTCTGTGACCCAGAAACACAGCCCAATGGGAGACAGAAGAAGTGCCATGAAAAGGCTTGTCCACCCA
GGTGGTGGGCAGGGGAGTGGGAAGCATGCTCGGCGACATGCGGGCCCCACGGGGAGAAGAAGCGAACC
GTGCTGTGCATCCAGACCATGGTCTCTGACGAGCAGGCTCTCCCGCCCACAGACTGCCAGCACCTGCT
GAAGCCCAAGACCCTCCTTTCCTGCAACAGAGACATCCTGTGCCCCTCGGACTGGACAGTGGGCAACT
GGAGTGAGTGTTCTGTTTCCTGTGGTGGTGGAGTGCGGATTCGCAGTGTCACATGTGCCAAGAACCAT
GATGAACCTTGCGATGTGACAAGGAAACCCAACAGCCGAGCTCTGTGTGGCCTCCAGCAATGCCCTTC
TAGCCGGAGAGTTCTGAAACCAAACAAAGGCACTATTTCCAATGGAAAAAACCCACCAACACTAAAGC
CCGTCCCTCCACCTACATCCAGGCCCAGAATGCTGACCACACCCACAGGGCCTGAGTCTATGAGCACA
AGCACTCCAGCAATCAGCAGCCCTAGTCCTACCACAGCCTCCAAAGAAGGAGACCTGGGTGGGAAACA
GTGGCAAGATAGCTCAACCCAACCTGAGCTGAGCTCTCGCTATCTCATTTCCACTGGAAGCACTTCCC
AGCCCATCCTCACTTCCCAATCCTTGAGCATTCAGCCAAGTGAGGAAAATGTTTCCAGTTCAGATACT
GGTCCTACCTCGGAGGGAGGCCTTGTAGCTACAACAACAAGTGGTTCTGGCTTGTCATCTTCCCGCAA
CCCTATCACTTGGCCTGTGACTCCATTTTACAATACCTTGACCAAAGGTCCAGAAATGGAGATTCACA
GTGGCTCAGGGGAAGAAAGAGAACAGCCTGAGGACAAAGATGAAAGCAATCCTGTAATATGGACCAAG
ATCAGAGTACCTGGAAATGACGCTCCAGTGGAAAGTACAGAAATGCCACTTGCACCTCCACTAACACC
AGATCTCAGCAGGGAGTCCTGGTGGCCACCCTTCAGCACAGTAATGGAAGGACTGCTCCCCAGCCAAA
GGCCCACTACTTCCGAAACTGGGACACCCAGAGTTGAGGGGATGGTTACTGAAAAGCCAGCCAACACT
CTGCTCCCTCTGGGAGGAGACCACCAGCCAGAACCCTCAGGAAAGACGGCAAACCGTAACCACCTGAA
ACTTCCAAACAACATGAACCAAACAAAAAGTTCTGAACCAGTCCTGACTGAGGAGGATGCAACAAGTC
TGATTACTGAGGGCTTTTTGCTAAATGCCTCCAATTACAAGCAGCTCACAAACGGCCACGGCTCTGCA
CACTGGATCGTCGGAAACTGGAGCGAGTGCTCCACCACATGTGGCCTGGGGGCCTACTGGAGAAGGGT
GGAGTGCAGCACCCAGATGGATTCTGACTGTGCGGCCATCCAGAGACCTGACCCTGCAAAAAGATGCC
ACCTCCGTCCCTGTGCTGGCTGGAAAGTGGGAAACTGGAGCAAGTGCTCCAGAAACTGCAGTGGGGGC
TTCAAGATACGCGAGATTCAGTGCGTGGACAGCCGGGACCACCGGAACCTGAGGCCATTTCACTGCCA
GTTCCTGGCCGGCATTCCTCCCCCATTGAGCATGAGCTGTAACCCGGAGCCCTGTGAGGCGTGGCAGG
TGGAGCCTTGGAGCCAGTGCTCCAGGTCCTGTGGAGGTGGAGTTCAGGAGAGAGGAGTGTTCTGTCCA
GGAGGCCTCTGTGATTGGACAAAAAGACCCACATCCACCATGTCTTGCAATGAGCACCTGTGCTGTCA
CTGGGCCACTGGGAACTGGGACCTGTGTTCCACTTCCTGTGGAGGTGGCTTTCAGAAGAGGACTGTCC
AATGTGTGCCCTCAGAGGGCAATAAAACTGAAGACCAAGACCAATGTCTATGTGATCACAAACCCAGA
CCTCCAGAATTCAAAAAATGCAACCAGCAGGCCTGCAAGAAAAGTGCCGATTTACTTTGCACTAAGGA
CAAACTGTCAGCCAGTTTCTGCCAGACACTGAAAGCCATGAAGAAATGTTCTGTGCCCACCGTGAGGG
CTGAGTGCTGCTTCTCGTGTCCCCAGACACACATCACACACACCCAAAGGCAAAGAAGGCAACGGTTG
CTCCAAAAGTCAAAAGGACTCCTCGAGGAGTTCTTTTGACTTTTGGAGCAACCGGGCCTGGCTGAGGC
TGTCTCCCATAAGATCT

NOV68k, CG58504-05

| | | | |
|---|---|---|---|
| Protein Sequence | SEQ ID NO: 1026 | 1574 aa | MW at 175579.4kD |

YGRQPQPGPVRFPDRRQEHFIKGLPEYHVVGPVRVDASGHFLSYGLHYPITSSRRKRDLDGSEDWVYY
RISHEEKDLFFNLTVNQGFLSNSYIMEKRYGNLSHVKMMASSAPLCHLSGTVLQQGTRVGTAALSACH
GLTGFFQLPHGDFFIEPVKKHPLVEGGYHPHIVYRRQKVPETKEPTCGLKDSVNISQKQELWREKWER
HNLPSRSLSRRSISKERWVETLVVADTKMIEYHGSENVESYILTIMNMVTGLFHNPSIGNAIHIVVVR
LILLEEEEQGLKIVHHAEKTLSSFCKWQKSINPKSDLNPVHHDVAVLLTRKDICAGFNRPCETLGLSH
LSGMCQPHRSCNINEDSGLPLAFTIAHELGHSFGIQHDGKENDCEPVGRHPYIMSRQLQYDPTPLTWS
KCSEEYITRFLDRGWGFCLDDIPKKKGLKSKVIAPGVIYDVHHQCQLQYGPNATFCQEVENVCQTLWC
SVKGFCRSKLDAAADGTQCGEKKWCMAGKCITVGKKPESIPGGWGRWSPWSHCSRTCGAGVOSAERLC
NNPEPKFGGKYCTGERKRYRLCNVHPCRSEAPTFRQMQCSEFDTVPYKNELYHWFPIFNPAHPCELYC
RPIDGQFSEKMLDAVIDGTPCFEGGNSRNVCINGICKMVGCDYEIDSNATEDRCGVCLGDGSSCQTVR
KMFKQKEGSGYVDIGLIPKGARDIRVMEIEGAGNFLAIRSEDPEKYYLNGGFIIQWNGNYKLAGTVFQ
YDRKGDLEKLMATGPTNESVWIQLLFQVTNPGIKYEYTIQKDGLDNDVEQQMYFWQYGHWTECSVTCG
TGIRRQTAHCIKKGRGMVKATFCDPETQPNGRQKKCHEKACPPRWWAGEWEACSATCGPHGEKKRTVL
CIQTMVSDEQALPPTDCQHLLKPKTLLSCNRDILCPSDWTVGNWSECSVSCGGGVRIRSVTCAKNHDE
PCDVTRKPNSRALCGLQQCPSSRRVLKPNKGTISNGKNPPTLKPVPPPTSRPRMLTTPTGPESMSTST
PAISSPSPTTASKEGDLGGKQWQDSSTQPELSSRYLISTGSTSQPILTSQSLSIQPSEENVSSSDTGP
TSEGGLVATTTSGSGLSSSRNPITWPVTPFYNTLTKGPEMEIHSGSGEEREQPEDKDESNPVIWTKIR
VPGNDAPVESTEMPLAPPLTPDLSRESWWPPFSTVMEGLLPSQRPTTSETGTPRVEGMVTEKPANTLL
PLGGDHQPEPSGKTANRNHLKLPNNNNQTKSSEPVLTEEDATSLITEGFLLNASNYKQLTNGHGSAHW
IVGNWSECSTTCGLGAYWRRVECSTQMDSDCAAIQRPDPAKRCHLRPCAGWKVGNWSKCSRNCSGGFK
IREIQCVDSRDHRNLRPFHCQFLAGIPPPLSMSCNPEPCEAWQVEPWSQCSRSCGGGVQERGVFCPGG
LCDWTKRPTSTMSCNEHLCCHWATGNWDLCSTSCGGGFQKRTVQCVPSEGNKTEDQDQCLCDHKPRPP
EFKKCNQQACKKSADLLCTKDKLSASFCQTLKAMKKCSVPTVRAECCFSCPQTHITHTQRQRRQRLLQ
KSKGLLEEFF

| | | |
|---|---|---|
| NOV68l, CG58504-06 | SEQ ID NO: 1027 | 1068 bp |

| | | |
|---|---|---|
| DNA Sequence | ORF Start: at 1 | ORF Stop: end of sequence |

AAGCTTAACTTGACGGTCAATCAAGGATTTCTTTCCAATAGCTACATCATGGAGAAGAGATATGGGAA
CCTCTCCCATGTTAAGATGATGGCTTCCTCTGCCCCCCTCTGCCATCTCAGTGGCACGGTTCTACAGC
AGGGCACCAGAGTTGGGACGGCAGCCCTCAGTGCCTGCCATGGACTGACTGGATTTTTCCAACTACCA
CATGGAGACTTTTTCATTGAACCCGTGAAGAAGCATCCACTGGTTGAGGGAGGGTACCACCCGCACAT
CGTTTACAGGAGGCAGAAAGTTCCAGAAACCAAGGAGCCAACCTGTGGATTAAAGGACAGTGTTAACA
TCTCCCAGAAGCAAGAGCTATGGCGGGAGAAGTGGGAGAGGCACAACTTGCCAAGCAGAAGCCTCTCT
CGGCGTTCCATCAGCAAGGAGAGATGGGTGGAGACACTGGTGGTGGCCGACACAAAGATGATTGAATA
CCATGGGAGTGAGAATGTGGAGTCCTACATCCTCACCATCATGAACATGGTCACTGGGTTGTTCCATA
ACCCAAGCATTGGCAATGCAATTCACATTGTTGTGGTTCGGCTCATTCTACTCGAAGAAGAAGAGCAA
GGACTGAAAATAGTTCACCATGCAGAAAAGACACTGTCTAGCTTCTGCAAGTGGCAGAAGAGTATCAA
TCCCAAGAGTGACCTCAATCCTGTTCATCACGACGTGGCTGTCCTTCTCACCAGAAAGGACATCTGTG
CTGGTTTCAATCGCCCCTGCGAGACCCTGGGCCTGTCTCACCTTTCAGGAATGTGTCAGCCTCACCGC
AGTTGTAACATCAATGAAGATTCGGGACTCCCTCTGGCTTTCACAATTGCCCATGAGCTAGGACACAG
CTTCGGCATCCAGCATGATGGGAAAGAAAATGACTGTGAGCCTGTGGGCAGACATCCGTACATCATGT
CCCGCCAGCTCCAGTACGATCCCACTCCGCTGACATGGTCCAAGTGCAGCGAGGAGTACATCACCCGC
TTCTTGGACCGAGGCTGGGGGTTCTGTCTTGATGACATACCTCTCGAG

NOV68l, CG58504-06

| | | | |
|---|---|---|---|
| Protein Sequence | SEQ ID NO: 1028 | 356 aa | MW at 40366.8kD |

KLNLTVNQGFLSNSYIMEKRYGNLSHVKNMASSAPLCHLSGTVLQOGTRVGTAALSACHGLTGFFQLP
HGDFFIEPVKKHPLVEGGYHPHIVYRRQKVPETKEPTCGLKDSVNISQKQELWREKWERHNLPSRSLS
RRSISKERWVETLVVADTKMIEYHGSENVESYILTIMNNVTGLFHNPSIGNAIHIVVVRLILLEEEEQ
GLKIVHHAEKTLSSFCKWQKSINPKSDLNPVHHDVAVLLTRKDICAGFNRPCETLGLSHLSGMCQPHR
SCNINEDSGLPLAFTIAHELGHSFGIQHDGKENDCEPVGRHPYIMSRQLQYDPTPLTWSKCSEEYITR
FLDRGWGFCLDDIPLE

| | | |
|---|---|---|
| NOV68m, CG58504-07 | SEQ ID NO: 1029 | 252 bp |

| | | |
|---|---|---|
| DNA Sequence | ORF Start: at 1 | ORF Stop: end of sequence |

AAGCTTCACCAGTGCCAGCTACAATATGGACCCAATGCTACCTTCTGCCAGGAAGTAGAAAACGTCTG
CCAGACACTGTGGTGCTCCGTGAAGGGCTTTTGTCGCTCTAAGCTGGACGCTGCTGCAGATGGAACTC
AATGTGGTGAGAAGAAGTGGTGTATGGCAGGCAAGTGCATCACAGTGGGGAAGAAACCAGAGAGCATT
CCTGGAGGCTGGGGCCGCTGGTCACCCTGGTCCCACTGTTCCCTCGAG

NOV68m, CG58504-07

| | | | |
|---|---|---|---|
| Protein Sequence | SEQ ID NO: 1030 | 84 aa | MW at 9323.7kD |

KLHQCQLQYGPNATFCQEVENVCQTLWCSVKGFCRSKLDAAADGTQCGEKKWCMAGKCITVGKKPESI
PGGWGRWSPWSHCSLE

[0746] A ClustalW comparison of the above protein sequences yields the following sequence alignment shown in Table 68B.

TABLE 68B
Comparison of the NOV68 protein sequences.

| | |
|---|---|
| NOV68a | MPCAQRSWLANLSVVAQLLNFGALCYGRQPQPGPVRFPDRRQEHFIKGLPEYHVVGPVRV |
| NOV68b | ------------------------------------------------------------ |
| NOV68c | ------------------------------------------------------------ |
| NOV68d | ------------------------------------------------------------ |
| NOV68e | ------------------------------------------------------------ |
| NOV68f | ------------------------------------------------------------ |
| NOV68g | ------------------------------------------------------------ |
| NOVS8h | ------------------------------------------------------------ |
| NOV68i | ------------------------------------------------------------ |
| NOV68j | ------------------------------------------------------------ |
| NOV68k | ------------------------------------------------------------ |
| NOV68l | ------------------------------------------------------------ |
| NOV68m | ------------------------------------------------------------ |
| NOV68a | DASGHFLSYGLHYPITSSRRKRDLDGSEDWVYYRISHEEKDLFFNLTVNQGFLSNSYIME |
| NOV68b | ------------------------------------------------------------ |
| NOV68c | ------------------------------------------------------------ |
| NOV68d | ------------------------------------------------------------ |
| NOV68e | ------------------------------------------------------------ |
| NOV68f | ------------------------------------------------------------ |
| NOV68g | ------------------------------------------------------------ |
| NOV68h | ------------------------------------------------------------ |
| NOV68i | ------------------------------------------------------------ |
| NOV68j | ------------------------------------------------------------ |
| NOV68k | ------------------------------------------------------------ |
| NOV68l | ------------------------------------------------------------ |
| NOV68m | ------------------------------------------------------------ |
| NOV68a | KRYGNLSHVKMMASSAPLCHLSGTVLQQGTRVGTAALSACHGLTGFFQLPHGDFFIEPVK |
| NOV68b | ------------------------------------------------------------ |
| NOV68c | ------------------------------------------------------------ |
| NOV68d | ------------------------------------------------------------ |
| NOV68e | ------------------------------------------------------------ |
| NOV68f | ------------------------------------------------------------ |
| NOV68g | --------------------------------LECALRSGRWSPWSHCSRTCGAGVQSAE |
| NOV68h | ------------------------------------------------------------ |
| NOV68i | ------------------------------------------------------------ |
| NOV68j | ------------------------------------------------------------ |
| NOV68k | ------------------------------------------------------------ |
| NOV68l | ------------------------------------------------------------ |
| NOV68m | ------------------------------------------------------------ |
| NOV68a | KHPLVEGGYHPHIVYRRQKVPETKEPTCGLKDSVNISQKQELWREKWERHNLPSRSLSRR |
| NOV68b | ------------------------------------------------------------ |
| NOV68c | ------------------------------------------------------------ |
| NOV68d | ------------------------------------------------------------ |
| NOV68e | ------------------------------------------------------------ |
| NOV68f | ------------------------------------------------------------ |
| NOV68g | RLCNNPEPKFGGKYCTGERKRYRLCNVHPCRSEAPTFRQMQCSEFDTVPYKNELYHWFPI |
| NOV68h | ------------------------------------------------------------ |
| NOV68i | ------------------------------------------------------------ |
| NOV68j | ------------------------------------------------------------ |
| NOV68k | ------------------------------------------------------------ |
| NOV68l | ------------------------------------------------------------ |
| NOV68m | ------------------------------------------------------------ |
| NOV68a | SISKERWVETLVVADTKMIEYHGSENVESYILTIMNMVTGLFHNPSIGNAIHIVVVRLIL |
| NOV68b | ------------------------------------------------------------ |
| NOV68c | ------------------------------------------------------------ |
| NOV68d | ------------------------------------------------------------ |
| NOV68e | ------------------------------------------------------------ |
| NOV68f | ------------------------------------------------------------ |
| NOV68g | FNPAHPCELYCRPIDGQFSEKMLDAVIDGTPCFEGGNSRNVCINGICKMVGCDYEIDSNA |
| NOV68h | ------------------------------------------------------------ |
| NOV68i | ------------------------------------------------------------ |
| NOV68j | ------------------------------------------------------------ |
| NOV68k | ------------------------------------------------------------ |
| NOV68l | ------------------------------------------------------------ |
| NOV68m | ------------------------------------------------------------ |
| NOV68a | LEEEEQGLKIVHHAEKTLSSFCKWQKSINPKSDLNPVHHDVAVLLTRKDICAGFNRPCET |
| NOV68b | ------------------------------------------------------------ |
| NOV68c | ------------------------------------------------------------ |
| NOV68d | ------------------------------------------------------------ |
| NOV68e | -----------------------------------------RSYGRQPQPGPVRFPDRRQ |
| NOV68f | -----------------------------------------RSYGRQPQPGPVRFPDRRQ |
| NOV68g | TEDRCGVCLGDGSSCQTARKMFKQKEGSGYVDIGLIPKGARDIRVHEIEGAGNFLAIRSE |
| NOV68h | ------------------------------------------------------------ |
| NOV68i | ------------------------------------------------------------ |
| NOV68j | ------------------------------------------------------------ |
| NOV68k | -------------------------------------------YGRQPQPGPVRFPDRRQ |
| NOV68l | ------------------------------------------------------------ |
| NOV68m | ------------------------------------------------------------ |
| NOV68a | LGLSHLSGMCQPHRSCNINEDSGLPLAFTIAHELGHSFGIQHDGKENDCEPVGRHPYIMS |
| NOV68b | ------------------------------------------------------------ |
| NOV68c | ------------------------------------------------------------ |
| NOV68d | ------------------------------------------------------------ |
| NOV68e | EHFIKGLPEYHVVGPVRVDASGHFLSYGLHYPITSSRRKRDLDGSEDWVYYRISHEEKDL |
| NOV68f | ENFIKGLPEYHVVGPVRVDASGHFLSYGLHYPITSSRRKRDLDGSEDWVYYRISHEEKDL |
| NOV68g | DPEKYYLNGGFIIQWNGNYKLAGTVFQYDRKGDLEKLMATGPTNESVWIQLLFQVTNPGI |
| NOV68h | ------------------------------------------------------------ |
| NOV68i | ------------------------------------------------------------ |
| NOV68j | ------------------------------------------------------------ |
| NOV68k | EHFIKGLPEYHVVGPVRVDASGHFLSYGLHYPITSSRRKRDLDGSEDWVYYRISHEEKDL |
| NOV68l | ------------------------------------------------------------ |
| NOV68m | ------------------------------------------------------------ |
| NOV68a | RQLQYDPTPLTWSKCSEEYITRFLDRGWGFCLDDIPKKKGLKSKVIAPGVIYDVHHQCQL |
| NOV68b | KLNLTVNQGFLSNSYIMEKRYGNLSHVKMMASSAPLCHLSGTVLQQGTRVGMAALSACHG |
| NOV68c | KLNLTVNQGFLSNSYIMEKRYGNLSHVKMMASSAPLCHLSGTVLQQGTRVGTAALSACHG |
| NOV68d | KLNLTVNQGFLSNSYIMEKRYGNLSHVKMMASSAPLCHLSGTVLQQGTRVGTAALSACHG |
| NOV68e | FFNLTVNQGFLSNSYIMEKRYGNLSHVKMMASSAPLCHLNGTVLQQGTRVGTAALSACHG |
| NOV68f | FFNLTVNQGFLSNSYIMEKRYGNLSHVKMMASSAPLCHLSGTVLQQGTRVGTAALSACHG |
| NOV68g | KYEYTIQKDGLDNDVEQQMYFWQYGHWTECSVTCGTGIRRQTAHCIKKGRGMVKATFCDP |
| NOV68h | --NLTVNQGFLSNSYIMEKRYGNLSHVKMMASSAPLCHLSGTVLQQGTRVGMAALSACHG |
| NOV68i | --NLTVNQGFLSNSYIMEKRYGNLSHVKMMASSAPLCHLSGTVLQQGTRVGTAALSACHG |
| NOV68j | -------------------------------------------------------HQCQL |
| NOV68k | FFNLTVNQGFLSNSYIMEKRYGNLSHVKMMASSAPLCHLSGTVLQQGTRVGTAALSACHG |
| NOV68l | KLNLTVNQGFLSNSYIMEKRYGNLSHVKMMASSAPLCHLSGTVLQQGTRVGTAALSACHG |
| NOV68m | -----------------------------------------------------KLHQCQL |
| NOV68a | QYGPNATFCQEVENVCQTLWCSVKGFCRSKLDAAA------------------------- |
| NOV68b | LTGFFQLPHGDFFIEPVKKHPLVEGGYHPHIVYRR------------------------- |
| NOV68c | LTGFFQLPHGDFFIEPVKKHPLVEGGYHPHIVYRR------------------------- |
| NOV68d | LTGFFQLPHGDFFIEPVKKHPLVEGGYHPHIVYRR------------------------- |
| NOV68e | LTGFFQLPHGDFFIEPVKKHPLVEGGYHPHIVYRR------------------------- |
| NOV68f | LTGFFQLPHGDFFIEPVKKHPLVEGGYHPHIVYRR------------------------- |
| NOV68g | ETQPNGRQKKCHEKACPPRWWAGEWEACSATCGPHGEKKRTVLCIQTMVSDEQALPPTDC |
| NOV68h | LTGFFQLPHGDFFIEPVKKHPLVEGGYHPHIVYRR------------------------- |
| NOV68i | LTGFFQLPHGDFFIEPVKKHPLVEGGYHPHIVYRR------------------------- |
| NOV68j | QYGPNATFCQEVENVCQTLWCSVKGFCRSKLDAAA------------------------- |
| NOV68k | LTGFFQLPHGDFFIEPVKKHPLVEGGYHPHIVYRR------------------------- |
| NOV68l | LTGFFQLPHGDFFIEPVKKHPLVEGGYHPHIVYRR------------------------- |
| NOV68m | QYGPNATFCQEVENVCQTLWCSVKGFCRSKLDAAA------------------------- |
| NOV68a | --------------------------------------------------DGTQCGEKK- |
| NOV68b | --------------------------------------------------QKVPETKEP- |
| NOV68c | --------------------------------------------------QKVPETKEP- |
| NOV68d | --------------------------------------------------QKVPETKEP- |
| NOV68e | --------------------------------------------------QKVPETKEP- |
| NOV68f | --------------------------------------------------QKVPETKEP- |
| NOV68g | QHLLKPKTLLSCNRDILCPSDWTVGNWSECSVSCGGGVRIRSVTCAKNHDEPCDVTRKPN |
| NOV68h | --------------------------------------------------QKVPETKEP- |
| NOV68i | --------------------------------------------------QKVPETKEP- |
| NOV68j | --------------------------------------------------DGTQCGEKK- |
| NOV68k | --------------------------------------------------QKVPETKEP- |
| NOV68l | --------------------------------------------------QKVPETKEP- |
| NOV68m | --------------------------------------------------DGTQCGEKK- |
| NOV68a | ---WCMAGKC-------------------------------------------------- |
| NOV68b | ---TCGLKDS-------------------------------------------------- |
| NOV68c | ---TCGLKDS-------------------------------------------------- |
| NOV68d | ---TCGLKDS-------------------------------------------------- |
| NOV68e | ---TCGLKDS-------------------------------------------------- |
| NOV68f | ---TCGLKDS-------------------------------------------------- |
| NOV68g | SRALCGLQQCPSSRRVLKPNKGTISNGKNPPTLKPVPPPTSRPRMLTTPTGPESMSTSTP |
| NOV68h | ---TCGLKDS-------------------------------------------------- |
| NOV68i | ---TCGLKDS-------------------------------------------------- |
| NOV68j | ---WCMAGKC-------------------------------------------------- |
| NOV68k | ---TCGLKDS-------------------------------------------------- |
| NOV68l | ---TCGLKDS-------------------------------------------------- |
| NOV68m | ---WCMAGKC-------------------------------------------------- |
| NOV68a | -------ITVGKKPESIPGGWGRWSPWSHCSRTCGAGVQSAERLCNNPEPKFGGKYCT-- |
| NOV68b | -------VNISQKQELWREKWERHNLPSRSLSRRSISKERWVETLVVADTKMIEYHGS-- |
| NOV68c | -------VNISQKQELWREKWERHNLPSRSLSRRSISKERWVETLVVADTKMIEYHGS-- |
| NOV68d | -------VNISQKQELWREKWERHNLPSRSLSRRSISKERWVETLVVADTKMIEYHGS-- |
| NOV68e | -------VNISQKQELWREKWERHNLPSRSLSRRSISKERWVETLVVADTKMIEYHGS-- |
| NOV68f | -------VNISQKQELWREKWERHNLPSRSLSRRSISKERWVETLVVADTKMIEYHGS-- |
| NOV68g | AISSPSPTTASKEGDLGGKQWQDSSTQPELSSRYLISTGSTSQPILTSQSLSIQPSEENV |
| NOV68h | -------VNISQKQELWREKWERHNLPSRSLSRRSISKERWVETLVVADTKMIEYHGS-- |
| NOV68i | -------VNISQKQELWREKWERHNLPSRSLSRRSISKERWVETLVVADTKMIEYHGS-- |
| NOV68j | -------ITVGKKPESIPGGCGRWSPWSHCS----------------------------- |
| NOV68k | -------VNISQKQELWREKWERHNLPSRSLSRRSISKERWVETLVVADTKMIEYHGS-- |
| NOV68l | -------VNISQKQELWREKWERHNLPSRSLSRRSISKERWVETLVVADTKMIEYHGS-- |
| NOV68m | -------ITVGKKPESIPGGWGRWSPWSHCSLE--------------------------- |
| NOV68a | --------------------GERKRYRLCNVHPCRSEAPTFRQMQCSEFDTVPYKNELYH |
| NOV68b | --------------------ENVESCILTIMNMVTGLFHNPSIGNAIHIVVVRLILLEEE |
| NOV68c | --------------------ENVESYILTIMNMVTGLFHNPSIGNAIHIVVVRLILLEEE |
| NOV68d | --------------------ENVESYILTIMNMVTGLFHNPSIGNAIHIVVVRLILLEEE |
| NOV68e | --------------------ENVESYILTIMNMVTGLFHNPSIGNAIHIVVVRLILLEEE |
| NOV68f | --------------------ENVESYILTIMNMVTGLFHNPSIGNAIHIVVVRLILLEEE |
| NOV68g | SSSDTGPTSEGGLVATTTSGSGLSSSRNPITWPVTPFYNTLTKGPEMEIHSGSGEEREQP |
| NOV68h | --------------------ENVESCILTIMNMVTGLFMNPSIGNAIHIVVVRLILLEEE |
| NOV68i | --------------------ENVESYILTIMNMITGLFHNPSIGNAIHIVVVRLILLEEE |
| NOV68j | ------------------------------------------------------------ |
| NOV68k | --------------------ENVESYILTIMNMVTGLFHNPSIGNAIHIVVVRLILLEEE |
| NOV68l | --------------------ENVESYILTIMNNVTGLFHNPSIGNAIHIVVVRLILLEEE |
| NOV68m | ------------------------------------------------------------ |
| NOV68a | WFP--------------------------------------------------------- |
| NOV68b | EQG--------------------------------------------------------- |
| NOV68c | EQG--------------------------------------------------------- |
| NOV68d | EQG--------------------------------------------------------- |
| NOV68e | EQG--------------------------------------------------------- |
| NOV68f | EQG--------------------------------------------------------- |
| NOV68g | EDKDESNPVIWTKIRVPGNDAPVESTEMPLAPPLTPDLSRESWWPPFSTVMEGLLPSQRP |
| NOV68h | EQG--------------------------------------------------------- |
| NOV68i | EQG--------------------------------------------------------- |
| NOV68j | ------------------------------------------------------------ |
| NOV68k | EQG--------------------------------------------------------- |
| NOV68l | EQG--------------------------------------------------------- |
| NOV68m | ------------------------------------------------------------ |
| NOV68a | ------------------------------------------IFNPAHPCELYCR----- |
| NOV68b | ------------------------------------------LKIVHHAEKTLSS----- |
| NOV68c | ------------------------------------------LKIVNHAEKTLSS----- |
| NOV68d | ------------------------------------------LKIVHHAEKTLSS----- |
| NOV68e | ------------------------------------------LKIVHHAEKTLSS----- |
| NOV68f | ------------------------------------------LKIVHHAEKTLSS----- |
| NOV68g | TTSETGTPRVEGMVTEKPANTLLPLGGDHQPEPSGKTANRNHLKLPNNMNQTKSSEPVLT |
| NOV68h | ------------------------------------------LKIVHHAEKTLSS----- |
| NOV68i | ------------------------------------------LKIVHHAEKTLSS----- |
| NOV68j | ------------------------------------------------------------ |
| NOV68k | ------------------------------------------LKIVHHAEKTLSS----- |
| NOV68l | ------------------------------------------LKIVHHAEKTLSS----- |
| NOV68m | ------------------------------------------------------------ |
| NOV68a | ----------------------------------------------------------PIDGQFSEKMLD |
| NOV68b | ----------------------------------------------------------FCKWQKSINPKS |
| NOV68c | ----------------------------------------------------------FCKWQKSINPKS |
| NOV68d | ----------------------------------------------------------FCKWQKSINPKS |
| NOV68e | ----------------------------------------------------------FCKWQKSINPKS |
| NOV68f | ----------------------------------------------------------FCKWQKSINPKS |
| NOV68g | EEDATSLITEGFLLNASNYKQLTNGYGSAHWIVGNWSECSTTCGLGAYWRRVECSTQMDS |
| NOV68h | ----------------------------------------------------------FCKWQKSINPKS |
| NOV68i | ----------------------------------------------------------FCKWQKSINPKS |
| NOV68j | ------------------------------------------------------------ |
| NOV68k | ----------------------------------------------------------FCKWQKSINPKS |
| NOV68l | ----------------------------------------------------------FCKWQKSINPKS |
| NOV68m | ------------------------------------------------------------ |
| NOV68a | AVIDGTPCFEGGNSRNVCINGICKMVGCDYEIDSNATEDRCGVCLGDG-SSCQTVRKMFK |
| NOV68b | DLNPVHHDVAVLLTRKDICAGFNRPCETLGLSHLSGMCQPHRSCNINE-DSGLPLAFTIA |
| NOV68c | DLNPVHHDVAVLLTRKDICAGFNRPCETLGLSHLSGMCQPHRSCNINE-DSGLPLAFTIA |
| NOV68d | DLNPVHHDVAVLLTRKDICAGFNRPCETLGLSHLSGNCQPHRSCNINE-DSGLPLAFTIA |
| NOV68e | DLNPVHHDVAVLLTRKDICAGFNRPCETLGLSHLSGMCQPHRSCNINE-DSGLPLAFTIA |
| NOV68f | DLNPVHHDVAVLLTRKDICAGFNRPCETLGLSHLSGMCQPHRSCNINE-DSGLPLAFTIA |
| NOV68g | DCAAIQRPDPAKRCHLRPCAGWKVGNWSKCSRNCSGGFKIREIQCVDSRDHRNLRPFHCQ |
| NOV68h | DLNPVHHDVAVLLTRKDICAGFNRPCETLGLSHLSGMCQPHRSCNINE-DSGLPLAFTIA |
| NOV68i | DLNPVHHDVAVLLTRKDICAGFNRPCETLGLSHLSGMCQPHRSCNINE-DSGLPLAFTIA |
| NOV68j | ------------------------------------------------------------ |
| NOV68k | DLNPVHHDVAVLLTRKDICAGFNRPCETLGLSHLSGMCQPHRSCNINE-DSGLPLAFTIA |
| NOV68l | DLNPVHHDVAVLLTRKDICAGFNRPCETLGLSHLSGMCQPHRSCNINE-DSGLPLAFTIA |
| NOV68m | ------------------------------------------------------------ |
| NOV68a | QKEGSGYVDIGLIPKGARDIRVMEIEGAGNFLAIRSE-----------------DPEKYY |
| NOV68b | HELGHSFGIQHDGKENDCEPVGRHPYIMSRQLQYDPT-----------------PLTWSK |
| NOV68c | HELGHSFGIQHDGKENDCEPVGRHPYIMSRQLQYDPT-----------------PLTWSK |
| NOV68d | HELGHSFGIQHDGKENDCEPVGRHPYIMSRQLQYDPT-----------------PLTWSK |
| NOV68e | HELGHSFGIQHDGKENDCEPVGRHPYIMSRQLQYDPT-----------------PLTWSK |
| NOV68f | HELGHSFGIQHDGKENDCEPVGRHPYIMSRQLQYDPT-----------------PLTWSK |
| NOV68g | FLAGIPPPLSMSCNPEPCEAWQVEPWSQCSRSCGGGVOERGVFCPGGLCDWTKRPTSThS |
| NOV68h | HELGHSFGIQHDGKENDCEPVGRHPYIMSRQLQYDPT-----------------PLTWSK |
| NOV68i | HELGHSFGIQHDGKENDCEPVGRHPYIMSRQLQYDPT-----------------PLTWSK |
| NOV68j | ------------------------------------------------------------ |
| NOV68k | HELGHSFGIQHDGKENDCEPVGRHPYIMSRQLQYDPT-----------------PLTWSK |
| NOV68l | HELGHSFGIQHDGKENDCEPVGRHPYIMSRQLQYDPT-----------------PLTWSK |
| NOV68m | ------------------------------------------------------------ |
| NOV68a | LNGGFIIQWNGNYKLAGTVFQYDRKGDLEKLMATGPTNESVWIQLLFQVTNPGIKYEYTI |
| NOV68b | CSEEYITRFLDRGWGFCLDDIPLE------------------------------------ |
| NOV68c | CSEEYITRFLDRGWGFCLDDIPLE------------------------------------ |
| NOV68d | CSEEYITRFLDRGWGFCLDDIPLE------------------------------------ |
| NOV68e | CSEEYITRFLDRGWGFCLDDIPKKKGLKSKVIAPGVIYDVHHQCQLQYGPNATLCQEVEN |
| NOV68f | CSEEYITRFLDRGWGFCLDDIPKKKGLKSKVIAPGVIYDVHHQCQLQYGPNATLCQEVEN |
| NOV68g | CNEHLCCHWATGNWDLCSTSCGGGFQKRTVQCVPSEGNKTEDQDQCLCDHKPRPPEFKKC |
| NOV68h | CSEEYITRFLDRGWGFCLDDIP-------------------------------------- |
| NOV68i | CSEEYITRFLDRGWGFCLDDIP-------------------------------------- |
| NOV68j | ------------------------------------------------------------ |
| NOV68k | CSEEYITRFLDRGWGFCLDDIPKKKGLKSKVIAPGVIYDVHHQCQLQYGPNATFCQEVEN |
| NOV68l | CSEEYITRFLDRGWGFCLDDIPLE------------------------------------ |
| NOV68m | ------------------------------------------------------------ |
| NOV68a | QKDGLDNDVEQMYFWQYGHWTECSVTCGTGIRRQTAHCIKKGRGMVKATFCDPETQPNGR |
| NOV68b | ------------------------------------------------------------ |
| NOV68c | ------------------------------------------------------------ |
| NOV68d | ------------------------------------------------------------ |
| NOV68e | VCQTLWCSVKGFCRSKLDAAADGTQCGEKKWCMAGKCITVGKKPESIPGGWGRWSPWSHC |
| NOV68f | VCQTLWCSVKGFCRSKLDAAADGTQCGEKKWCMAGKCITVGKKPESIPGGWGRWSPWSHC |
| NOV68g | NQQACKKSADLLCTKDKLSASFCQTLKAMKKCSVPTVRAECCFSCPQTHITHTQRQRRQR |
| NOV68h | ------------------------------------------------------------ |
| NOV68i | ------------------------------------------------------------ |
| NOV68j | ------------------------------------------------------------ |
| NOV68k | VCQTLWCSVKGFCRSKLDAAADGTQCGEKKWCMAGKCITVGKKPESIPGGWGRWSPWSHC |
| NOV68l | ------------------------------------------------------------ |
| NOV68m | ------------------------------------------------------------ |
| NOV68a | QKKCHEKACPPRWWAGEWEACSATCGPHGEKKRTVLCIQTMVSDEQALPPTDCQHLLKPK |
| NOV68b | ------------------------------------------------------------ |
| NOV68c | ------------------------------------------------------------ |
| NOV68d | ------------------------------------------------------------ |
| NOV68e | SRTCGAGVQSAERLCNNPEPKFGGKYCTGERKRYRLCNVHPCRSEAPTFRQMQCSEFDTV |
| NOV68f | SRTCGAGVQSAERLCNNPEPKFGGKYCTGERKRYRLCNVHPCRSEAPTFRQMQCSEFDTV |
| NOV68g | LLQKSKELLE-------------------------------------------------- |
| NOV68h | ------------------------------------------------------------ |
| NOV68i | ------------------------------------------------------------ |
| NOV68j | ------------------------------------------------------------ |
| NOV68k | SRTCGAGVQSAERLCNNPEPKFGGKYCTGERKRYRLCNVHPCRSEAPTFRQMQCSEFDTV |
| NOV68l | ------------------------------------------------------------ |
| NOV68m | ------------------------------------------------------------ |
| NOV68a | TLLSCNRDILCPSDWTVGNWSECSVSCGGGVRIRSVTCAKNHDEPCDVTRKPNSRALCGL |
| NOV68b | ------------------------------------------------------------ |
| NOV68c | ------------------------------------------------------------ |
| NOV68d | ------------------------------------------------------------ |
| NOV68e | PYKNELYHWFPIFNPAHPCELYCRPIDGQFSEKMLDAVIDGTPCFEGGNSRNVCINGICK |
| NOV68f | PYKNELYHWFPIFNPAHPCELYCRPIDGQFSEKMLDAVIDGTPCFEGGNSRNVCINGICK |
| NOV68g | ------------------------------------------------------------ |
| NOV68h | ------------------------------------------------------------ |
| NOV68i | ------------------------------------------------------------ |
| NOV68j | ------------------------------------------------------------ |
| NOV68k | PYKNELYHWFPIFNPAHPCELYCRPIDGQFSEKMLDAVIDGTPCFEGGNSRNVCINGICK |
| NOV68l | ------------------------------------------------------------ |
| NOV68m | ------------------------------------------------------------ |
| NOV68a | QQCPSSRRVLKPNKGTISNGKNPPTLKPVPPPTSRPRMLTTPTGPESMSTSTPAISSPSP |
| NOV68b | ------------------------------------------------------------ |
| NOV68c | ------------------------------------------------------------ |
| NOV68d | ------------------------------------------------------------ |
| NOV68e | MVGCDYEIDSNATEDRCGVCLGDGSSCQTVRKMFKQKEGSGYVDIGLIPKGARDIRVMEI |
| NOV68f | MVGCDYEIDSNATEDRCGVCLGDGSSCQTVRKMFKQKEGSGYVDIGLIPKGARDIRVMEI |
| NOV68g | ------------------------------------------------------------ |
| NOV68h | ------------------------------------------------------------ |
| NOV68i | ------------------------------------------------------------ |
| NOV68j | ------------------------------------------------------------ |
| NOV68k | MVGCDYEIDSNATEDRCGVCLGDGSSCQTVRKMFKQKEGSGYVDIGLIPKGARDIRVMEI |
| NOV68l | ------------------------------------------------------------ |
| NOV68m | ------------------------------------------------------------ |
| NOV68a | TTASKEGDLGGKQWQDSSTQPELSSRYLISTGSTSQPILTSQSLSIQPSEENVSSSDTGP |
| NOV68b | ------------------------------------------------------------ |
| NOV68c | ------------------------------------------------------------ |
| NOV68d | ------------------------------------------------------------ |
| NOV68e | EGAGNFLAIRSEDPEKYYLNGGFIIQWNGNYKLAGTVFQYDRKGDLEKLMATGPTNESVW |
| NOV68f | EGAGNFLAIRSEDPEKYYLNGGFIIQWNGNYKLAGTVFQYDRKGDLEKLMATGPTNESVW |
| NOV68g | ------------------------------------------------------------ |
| NOV68h | ------------------------------------------------------------ |
| NOV68i | ------------------------------------------------------------ |
| NOV68j | ------------------------------------------------------------ |
| NOV68k | EGAGNFLAIRSEDPEKYYLNGGFIIQWNGNYKLAGTVFQYDRKGDLEKLMATGPTNESVW |
| NOV68l | ------------------------------------------------------------ |
| NOV68m | ------------------------------------------------------------ |
| NOV68a | TSEGGLVATTTSGSGLSSSRNPITWPVTPFYNTLTKGPEMEIHSGSGEEREQPEDKDESN |
| NOV68b | ------------------------------------------------------------ |
| NOV68c | ------------------------------------------------------------ |
| NOV68d | ------------------------------------------------------------ |
| NOV68e | IQLLFQVTNPGIKYEYTIQKDGLDNDVEQQMYFWQYGHWTECSVTCGTGIRRQTAHCIKK |
| NOV68f | IQLLFQVTNPGIKYEYTIQKDGLDNDVEQQMYFWQYGHWTECSVTCGTGIRRQTAHCIKK |
| NOV68g | ------------------------------------------------------------ |
| NOV68h | ------------------------------------------------------------ |
| NOV68i | ------------------------------------------------------------ |
| NOV68j | ------------------------------------------------------------ |
| NOV68k | IQLLFQVTNPGIKYEYTIQKDGLDNDVEQQMYFWQYGHWTECSVTCGTGIRRQTAHCIKK |
| NOV68l | ------------------------------------------------------------ |
| NOV68m | ------------------------------------------------------------ |
| NOV68a | PVIWTKIRVPGNDAPVESTEMPLAPPLTPDLSRESWWPPFSTVMEGLLPSQRPTTSETGT |
| NOV68b | ------------------------------------------------------------ |
| NOV68c | ------------------------------------------------------------ |
| NOV68d | ------------------------------------------------------------ |
| NOV68e | GRGMVKATFCDPETQPNGRQKKCHEKACPPRWWAGEWEACSATCGPHGEKKRTVLCIQTM |
| NOV68f | GRGMVKATFCDPETQPNGRQKKCHEKACPPRWWAGEWEACSATCGPHGEKKRTVLCIQTM |
| NOV68g | ------------------------------------------------------------ |
| NOV68h | ------------------------------------------------------------ |
| NOV68i | ------------------------------------------------------------ |
| NOV68j | ------------------------------------------------------------ |
| NOV68k | GRGMVKATFCDPETQPNGRQKKCHEKACPPRWWAGEWEACSATCGPHGEKKRTVLCIQTM |
| NOV68l | ------------------------------------------------------------ |
| NOV68m | ------------------------------------------------------------ |
| NOV68a | PRVEGMVTEKPANTLLPLGGDHQPEPSGKTANRNHLKLPNNMNQTKSSEPVLTEEDATSL |
| NOV68b | ------------------------------------------------------------ |
| NOV68c | ------------------------------------------------------------ |
| NOV68d | ------------------------------------------------------------ |
| NOV68e | VSDEQALPPTDCQHLLKPKTLLSCNRDILCPSDWTVGNWSECSVSCGGGVRIRSVTCAKN |
| NOV68f | VSDEQALPPTDCQHLLKPKTLLSCNRDILCPSDWTVGNWSECSVSCGGGVRIRSVTCAKN |
| NOV68g | ------------------------------------------------------------ |
| NOV68h | ------------------------------------------------------------ |
| NOV68i | ------------------------------------------------------------ |
| NOV68j | ------------------------------------------------------------ |
| NOV68k | VSDEQALPPTDCQHLLKPKTLLSCNRDILCPSDWTVGNWSECSVSCGGGVRIRSVTCAKN |
| NOV68l | ------------------------------------------------------------ |
| NOV68m | ------------------------------------------------------------ |
| NOV68a | ITEGFLLNASNYKQLTNGHGSAHWIVGNWSECSTTCGLGAYWKRVECTTQMDSDCAAIQR |
| NOV68b | ------------------------------------------------------------ |
| NOV68c | ------------------------------------------------------------ |
| NOV68d | ------------------------------------------------------------ |
| NOV68e | HDEPCDVTRKPNSRALCGLQQCPSSRRVLKPNKGTISNGKNPPTLKPVPPPTSRPRMLTT |
| NOV68f | HDEPCDVTRKPNSRALCGLQQCPSSRRVLKPNKGTISNGKNPPTLKPVPPPTSRPRMLTT |
| NOV68g | ------------------------------------------------------------ |
| NOV68h | ------------------------------------------------------------ |
| NOV68i | ------------------------------------------------------------ |
| NOV68j | ------------------------------------------------------------ |
| NOV68k | HDEPCDVTRKPNSRALCGLQQCPSSRRVLKPNKGTISNGKNPPTLKPVPPPTSRPRMLTT |
| NOV68l | ------------------------------------------------------------ |
| NOV68m | ------------------------------------------------------------ |
| NOV68a | PDPAKRCHLRPCAGWKVGNWSKCSRNCSGGFKIREIQCVDSRDHRNLRPFHCQFLAGIPP |
| NOV68b | ------------------------------------------------------------ |
| NOV68c | ------------------------------------------------------------ |
| NOV68d | ------------------------------------------------------------ |
| NOV68e | PTGPESMSTSTPAISSPSPTTASKEGDLGGKQWQDSSTQPELSSRTLISTGSTSQPILTS |
| NOV68f | PTGPESMSTSTPAISSPSPTTASKEGDLGGKQWQDSSTQPELSSRYLISTGSTSQPILTS |
| NOV68g | ------------------------------------------------------------ |
| NOV68h | ------------------------------------------------------------ |
| NOV68i | ------------------------------------------------------------ |
| NOV68j | ------------------------------------------------------------ |
| NOV68k | PTGPESMSTSTPAISSPSPTTASKEGDLGGKQWQDSSTQPELSSRYLISTGSTSQPILTS |
| NOV68l | ------------------------------------------------------------ |
| NOV68m | ------------------------------------------------------------ |
| NOV68a | PLSMSCNPEPCEAWQVEPWSQCSRSCGGGVQERGVFCPGGLCDWTKRPTSTMSCNEHLCC |
| NOV68b | ------------------------------------------------------------ |
| NOV68c | ------------------------------------------------------------ |
| NOV68d | ------------------------------------------------------------ |
| NOV68e | QSLSIQPSEENVSSSDTGPTSEGGLVATTTSGSGLSSSRNPITWPVTPFYNTLTKGPEME |
| NOV68f | QSLSIQPSEENVSSSDTGPTSEGGLVATTTSGSGLSSSRNPITWPVTPFYNTLTKGPEME |
| NOV68g | ------------------------------------------------------------ |
| NOV68h | ------------------------------------------------------------ |
| NOV68i | ------------------------------------------------------------ |
| NOV68j | ------------------------------------------------------------ |
| NOV68k | QSLSIQPSEENVSSSDTGPTSEGGLVATTTSGSGLSSSRNPITWPVTPFYNTLTKGPEME |
| NOV68l | ------------------------------------------------------------ |
| NOV68m | ------------------------------------------------------------ |
| NOV68a | HWATGNWDLCSTSCGGGFQKRIVQCVPSEGNKTEDQDQCLCDHKPRPPEFKKCNQQACKK |
| NOV68b | ------------------------------------------------------------ |
| NOV68c | ------------------------------------------------------------ |
| NOV68d | ------------------------------------------------------------ |
| NOV68e | IHSGSGEEREQPEDKDESNPVIWTKIRVPGNDAPVESTEMPLAPPLTPDLSRESWWPPFS |
| NOV68f | IHSGSGEEREQPEDKDESNPVIWTKIRVPGNDAPVESTEMPLAPPLTPDLSRESWWPPFS |
| NOV68g | ------------------------------------------------------------ |
| NOV68h | ------------------------------------------------------------ |
| NOV68i | ------------------------------------------------------------ |
| NOV68j | ------------------------------------------------------------ |
| NOV68k | IHSGSGEEREQPEDKDESNPVIWTKIRVPGNDAPVESTEMPLAPPLTPDLSRESWWPPFS |
| NOV68l | ------------------------------------------------------------ |
| NOV68m | ------------------------------------------------------------ |
| NOV68a | SADLLCTKDKLSASFCQTLKAMKKCSVPTVRAECCFSCPQTHITHTQRQRRQRLLQKSKE |
| NOV68b | ------------------------------------------------------------ |
| NOV68c | ------------------------------------------------------------ |
| NOV68d | ------------------------------------------------------------ |
| NOV68e | TVMEGLLPSQRPTTSETGTPRVEGMVTEKPANTLLPLGGDHQPEPSGKTANRNHLKLPNN |
| NOV68f | TVMEGLLPSQRPTTSETGTPRVEGMVTEKPANTLLPLGGDHQPEPSGKTANRNHLKLPNN |
| NOV68g | ------------------------------------------------------------ |
| NOV68h | ------------------------------------------------------------ |
| NOV68i | ------------------------------------------------------------ |
| NOV68j | ------------------------------------------------------------ |
| NOV68k | TVMEGLLPSQRPTTSETGTPRVEGMVTEKPANTLLPLGGDHQPEPSGKTANRNHLKLPNN |
| NOV68l | ------------------------------------------------------------ |
| NOV68m | ------------------------------------------------------------ |
| NOV68a | L----------------------------------------------------------- |
| NOV68b | ------------------------------------------------------------ |
| NOV68c | ------------------------------------------------------------ |
| NOV68d | ------------------------------------------------------------ |
| NOV68e | MNQTKSSEPVLTEEDATSLITEGFLLNASNYKQLTNGHGSAHWIVGNWSECSTTCGLGAY |
| NOV68f | MNQTKSSEPVLTEEDATSLITEGFLLNASNYKQLTNGHGSAHWIVGNWSECSTTCGLGAY |
| NOV68g | ------------------------------------------------------------ |
| NOV68h | ------------------------------------------------------------ |
| NOV68i | ------------------------------------------------------------ |
| NOV68j | ------------------------------------------------------------ |
| NOV68k | MNQTKSSEPVLTEEDATSLITEGFLLNASNYKQLTNGHGSAHWIVGNWSECSTTCGLGAY |
| NOV68l | ------------------------------------------------------------ |
| NOV68m | ------------------------------------------------------------ |
| NOV68a | ------------------------------------------------------------ |
| NOV68b | ------------------------------------------------------------ |
| NOV68c | ------------------------------------------------------------ |
| NOV68d | ------------------------------------------------------------ |
| NOV68e | WRRVECSTQMDSDCAAIQRPDPAKRCHLRPCAGWKVGNWSKCSRNCSGGFKIREIQCVDS |
| NOV68f | WRRVECSTQMDSDCAAIQRPDPAKRCHLRPCAGWKVGNWSKCSRNCSGGFKIREIQCVDS |
| NOV68g | ------------------------------------------------------------ |
| NOV68h | ------------------------------------------------------------ |
| NOV68i | ------------------------------------------------------------ |
| NOV68j | ------------------------------------------------------------ |
| NOV68k | WRRVECSTQMDSDCAAIQRPDPAKRCHLRPCAGWKVGNWSKCSRNCSGGFKIREIQCVDS |
| NOV68l | ------------------------------------------------------------ |
| NOV68m | ------------------------------------------------------------ |
| NOV68a | ------------------------------------------------------------ |
| NOV68b | ------------------------------------------------------------ |
| NOV68c | ------------------------------------------------------------ |
| NOV68d | ------------------------------------------------------------ |
| NOV68e | RDHRNLRPFHCQFLAGIPPPLSMSCNPEPCEAWQVEPWSQCSRSCGGGVQERGVFCPGGL |
| NOV68f | RDHRNLRPFHCQFLAGIPPPLSMSCNPEPCEAWQVEPWSQCSRSCGGGVQERGVFCPGGL |
| NOV68g | ------------------------------------------------------------ |
| NOV68h | ------------------------------------------------------------ |
| NOV68i | ------------------------------------------------------------ |
| NOV68j | ------------------------------------------------------------ |
| NOV68k | RDHRNLRPFHCQFLAGIPPPLSMSCNPEPCEAWQVEPWSQCSRSCGGGVQERGVFCPGGL |
| NOV68l | ------------------------------------------------------------ |
| NOV68m | ------------------------------------------------------------ |
| NOV68a | ------------------------------------------------------------ |
| NOV68b | ------------------------------------------------------------ |
| NOV68c | ------------------------------------------------------------ |
| NOV68d | ------------------------------------------------------------ |
| NOV68e | CDWTKRPTSTMSCNEHLCCHWATGNWDLCSTSCGGGFQKRTVQCVPSEGNKTEDQDQCLC |
| NOV68f | CDWTKRPTSTMSCNEHLCCHWATGNWDLCSTSCGGGFQKRTVQCVPSEGNKTEDQDQCLC |
| NOV68g | ------------------------------------------------------------ |
| NOV68h | ------------------------------------------------------------ |
| NOV68i | ------------------------------------------------------------ |
| NOV68j | ------------------------------------------------------------ |
| NOV68k | CDWTKRPTSTMSCNEHLCCHWATGNWDLCSTSCGGGFQKRTVQCVPSEGNKTEDQDQCLC |
| NOV68l | ------------------------------------------------------------ |
| NOV68m | ------------------------------------------------------------ |
| NOV68a | ------------------------------------------------------------ |
| NOV68b | ------------------------------------------------------------ |
| NOV68c | ------------------------------------------------------------ |
| NOV68d | ------------------------------------------------------------ |
| NOV68e | DHKPRPPEFKKCNQQACKKSADLLCTKDKLSASFCQTLKAMKKCSVPTVRAECCFSCPQT |
| NOV68f | DHKPRPPEFKKCNQQACKKSADLLCTKDKLSASFCQTLKAMKKCSVPTVRAECCFSCPQT |
| NOV68g | ------------------------------------------------------------ |
| NOV68h | ------------------------------------------------------------ |
| NOV68i | ------------------------------------------------------------ |
| NOV68j | ------------------------------------------------------------ |
| NOV68k | DHKPRPPEFKKCNQQACKKSADLLCTKDKLSASFCQTLKAMKKCSVPTVRAECCFSCPQT |
| NOV68l | ------------------------------------------------------------ |
| NOV68m | ------------------------------------------------------------ |
| NOV68a | ------------------------- |
| NOV68b | ------------------------- |
| NOV68c | ------------------------- |
| NOV68d | ------------------------- |
| NOV68e | HITHTQRQRRQRLLQKSKELLEEFF |
| NOV68f | HITHTQRQRRQRLLQKSKGLLEEFF |
| NOV68g | ------------------------- |
| NOV68h | ------------------------- |
| NOV68i | ------------------------- |
| NOV68j | ------------------------- |
| NOV68k | HITHTQRQRRQRLLQKSKGLLEEFF |
| NOV68l | ------------------------- |
| NOV68m | ------------------------- |
| NOV68a | (SEQ ID NO: 1006) |
| NOV68b | (SEQ ID NO: 1008) |
| NOV68c | (SEQ ID NO: 1010) |
| NOV68d | (SEQ ID NO: 1012) |
| NOV68e | (SEQ ID NO: 1014) |
| NOV68f | (SEQ ID NO: 1016) |
| NOV68g | (SEQ ID NO: 1018) |
| NOV68h | (SEQ ID NO: 1020) |
| NOV68i | (SEQ ID NO: 1022) |
| NOV68j | (SEQ ID NO: 1024) |
| NOV68k | (SEQ ID NO: 1026) |
| NOV68l | (SEQ ID NO: 1028) |
| NOV68m | (SEQ ID NO: 1030) |

[0747] Further analysis of the NOV68a protein yielded the following properties shown in Table 68C.

TABLE 68C
Protein Sequence Properties NOV68a

| | |
|---|---|
| SignalP analysis: | Cleavage site between residues 26 and 27 |

PSORT II analysis:

| | |
|---|---|
| PSG: | a new signal peptide prediction method |
| | N-region: length 6; pos.chg 1; neg.chg 0 |
| | H-region: length 21; peak value 6.23 |
| | PSG score: 1.83 |
| GvH: | von Heijne's method for signal seq. recognition |
| | GvH score (threshold: −2.1): −3.11 |
| | possible cleavage site: between 27 and 28 |

>>> Seems to have no N-terminal signal peptide

| | |
|---|---|
| ALOM: | Klein et al's method for TM region allocation |
| | Init position for calculation: 1 |
| | Tentative number of TMS(s) for the threshold 0.5: 2 |
| | Number of TMS(s) for threshold 0.5: 0 |
| | PERIPHERAL Likelihood = 4.98 (at 267) |
| | ALOM score: −1.54 (number of TMSs: 0) |
| MTOP: | Prediction of membrane topology (Hartmann et al.) |
| | Center position for calculation: 6 |
| | Charge difference: 1.0 C( 3.0) - N( 2.0) |
| | C > N: C-terminal side will be inside |

>>>Caution: Inconsistent mtop result with signal peptide
MITDISC: discrimination of mitochondrial targeting seq

| | | | |
|---|---|---|---|
| R content: | 3 | Hyd Moment (75): | 8.02 |
| Hyd Moment (95): | 8.85 | G content: | 3 |
| D/E content: | 1 | S/T content: | 2 |
| Score: −2.50 | | | |

Gavel: prediction of cleavage sites for mitochondrial preseq

R-2 motif at 46 VRF|PD

NUCDISC: discrimination of nuclear localization signals

pat4: RRKR (5) at 79
pat4: PKKK (4) at 456
pat7: PKKKGLK (5) at 456
pat7: PNGRQKK (3) at 869
pat7: PHGEKKR (3) at 899
bipartite: none
content of basic residues: 11.5%
NLS Score: 1.04

KDEL: ER retention motif in the C-terminus: none
ER Membrane Retention Signals:

KKXX-like motif in the C-terminus: KSKE

SKL: peroxisomal targeting signal in the C-terminus: none
PTS2: 2nd peroxisomal targeting signal: none
VAC: possible vacuolar targeting motif: found

KLPN at 1269

RNA-binding motif: none
Actinin-type actin-binding motif:

type 1: none
type 2: none

NMYR: N-myristoylation pattern: none
Prenylation motif: none
memYQRL: transport motif from cell surface to Golgi: none
Tyrosines in the tail: none
Dileucine motif in the tail: none
checking 63 PROSITE DNA binding motifs: none
checking 71 PROSITE ribosomal protein motifs: none
checking 33 PROSITE prokaryotic DNA binding motifs: none
NNCN: Reinhardt's method for Cytoplasmic/Nuclear discrimination

Prediction: nuclear
Reliability: 89

COIL: Lupas's algorithm to detect coiled-coil regions

total: 0 residues

--------------------------
Final Results (k = 9/23):

65.2%: nuclear
21.7%: mitochondrial
13.0%: cytoplasmic

>> prediction for CG58504-01 is nuc (k = 23)

[0748] A search of the NOV68a protein against the Geneseq database, a proprietary database that contains sequences published in patents and patent publication, yielded several homologous proteins shown in Table 68D.

TABLE 68D
Geneseq Results for NOV68a

| | | NOV68a | Identities/ | |
|---|---|---|---|---|
| | | Residues/ | Similarities for | Ex- |
| Geneseq | Protein/Organism/Length | Match | the Matched | pect |
| Identifier | [Patent #, Date] | Residues | Region | Value |
| AAB74944 | Human ADAM type metal | 24 . . . 1574 | 733/1718 (42%) | 0.0 |
| | protease MDTS1 protein SEQ ID | 21 . . . 1673 | 941/1718 (54%) | |
| | NO:1 - Homo sapiens, 1686 aa. | | | |
| | [JP2001008687-A, 16-Jan.-2001] | | | |
| AAE00913 | Human 27875 ADAM-TS | 24 . . . 1574 | 731/1718 (42%) | 0.0 |
| | protein, alternative version - | 21 . . . 1673 | 939/1718 (54%) | |
| | Homo sapiens, 1686 aa. | | | |
| | [WO200131034-A1, 03-May- | | | |
| | 2001] | | | |
| AAE00934 | Human 27875 ADAM-TS | 24 . . . 1574 | 731/1718 (42%) | 0.0 |
| | disintegrin and metalloproteinase) - | 21 . . . 1673 | 939/1718 (54%) | |
| | Homo sapiens, 1686 aa. | | | |
| | [WO200131034-A1, 03-May- | | | |
| | 2001] | | | |
| AAB86949 | Human metalloprotease MPTS- | 24 . . . 1574 | 731/1718 (42%) | 0.0 |
| | 19 protein - Homo sapiens, 1690 | 25 . . . 1677 | 938/1718 (54%) | |
| | aa. [DE10107360-A1, 06-Sep.- | | | |
| | 2001] | | | |
| AAB72283 | Human ADAMTS-7 amino acid | 24 . . . 903 | 483/935 (51%) | 0.0 |
| | sequence - Homo sapiens, 997 aa. | 21 . . . 936 | 609/935 (64%) | |
| | [WO200111074-A2, 15-Feb.- | | | |
| | 2001] | | | |

[0749] In a BLAST search of public sequence databases, the NOV68a protein was found to have homology to the proteins shown in the BLASTP data in Table 68E.

TABLE 68E
Public BLASTP Results for NOV68a

| | | NOV68a | Identities/ | |
|---|---|---|---|---|
| Protein | | Residues/ | Similarities for | |
| Accession | | Match | the Matched | Expect |
| Number | Protein/Organism/Length | Residues | Portion | Value |
| P58397 | ADAMTS-12 precursor (EC | 1 . . . 1593 | 1593/1593 (100%) | 0.0 |
| | 3.4.24.-) (A disintegrin and | 1 . . . 1593 | 1593/1593 (100%) | |
| | metalloproteinase with | | | |
| | thrombospondin motifs 12) | | | |
| | (ADAM-TS 12) (ADAM-TS 12) - | | | |
| | Homo sapiens (Human), 1593 | | | |
| | aa. | | | |
| CAD60967 | Metalloprotease disintegrin 12 | 1 . . . 1588 | 1283/1600 (80%) | 0.0 |
| | protein - Mus musculus | 1 . . . 1595 | 1399/1600 (87%) | |
| | (Mouse), 1600 aa. | | | |
| Q8BKYI | ADAMTS-12 precursor - Mus | 1 . . . 1004 | 889/1009 (88%) | 0.0 |
| | musculus (Mouse), 1009 aa | 1 . . . 1009 | 939/1009 (92%) | |
| | (fragment). | | | |
| CAC38921 | Sequence 2 from Patent | 24 . . . 1574 | 731/1718 (42%) | 0.0 |
| | W0013 1034 - Homo sapiens | 21 . . . 1673 | 939/1718 (54%) | |
| | (Human), 1686 aa. | | | |
| Q9UKP4 | ADAMTS-7 precursor (EC | 24 . . . 903 | 485/935 (51%) | 0.0 |
| | 3.4.24.-) (A disintegrin and | 21 . . . 936 | 611/935 (64%) | |
| | metalloproteinase with | | | |
| | thrombospondin motifs 7) | | | |
| | (ADAM-TS 7) (ADAM-TS7) - | | | |
| | Homo sapiens (Human), 997 aa. | | | |

[0750] PFam analysis indicates that the NOV68a protein contains the domains shown in the Table 68F.

TABLE 68F
Domain Analysis of NOV68a

| | | Identities/ | |
|---|---|---|---|
| | | Similarities | |
| Pfam Domain | NOV68a Match Region | for the Matched Region | Expect Value |
| Pep_M12B_propep | 105 . . . 222 | 27/128(21%) | 9.2e-05 |
| | | 80/128 (62%) | |
| Reprolysin | 246 . . . 456 | 66/224 (29%) | 1.3e-15 |
| | | 149/224 (67%) | |
| tsp_1 | 546 . . . 596 | 23/53 (43%) | 2.2e-13 |
| | | 38/53 (72%) | |
| tsp_1 | 827 . . . 881 | 15/64 (23%) | 0.054 |
| | | 39/64 (61%) | |
| tsp_1 | 945 . . . 995 | 17/58(29%) | 7.1e-05 |
| | | 39/58 (67%) | |
| tsp_1 | 1314 . . . 1364 | 13/56 (23%) | 0.036 |
| | | 29/56 (52%) | |
| tsp_1 | 1426 . . . 1471 | 14/54 (26%) | 0.055 |
| | | 32/54 (59%) | |
| tsp_1 | 1474 . . . 1530 | 14/63 (22%) | 0.0045 |
| | | 40/63 (63%) | |

### Example 69

[0751] The NOV69 clone was analyzed, and the nucleotide and encoded polypeptide sequences are shown in Table 69A.

TABLE 69A
NOV69 Sequence Analysis

| | | |
|---|---|---|
| NOV69a, CG58510-01 | SEQ ID NO: 1031 | 933 bp |

| | | |
|---|---|---|
| DNA Sequence | ORF Start: ATG at 8 | ORF Stop: at 932 |

GGATTAAATGGAAAACGATCACAATCATAATCATACACATGGCGCGAACAAAAAGACTTTATTAATTA
GTTTTATTATTATTACAAGTTACATGATTGTAGAAGGGTTAGGTGGTTTCTTTACTAACAGTCTTGCG
TTAATTTCAGATGCTGGTCATATGTTAAGTGATTCTATTTCTTTAGGTATTGCTTTAATTGCATTTAC
TTTAGGAGCGAAGCAAGCTAATACAAATAAAACTTTTGGCTACAAAAGGTTTGAAATACTAGCAGCTG
TACTTAATGGTATTACTTTGATGTTAATAGCTATCTATATTTTTTATGAAGCTATTGAGAGATTTAAA
AACCCCCCTGAGGTAGCTTCTACAGGCATGTTAATTATCGCCTTGGTAGGCTTGTTTATTAATATTAT
TGTGGCTTGGATAATGCTGCGCGGGAGCGATGTAGAAGAAAACTTAAATATGCGTGGAGCATATTTGC
ATGTAATAAGCGACATGCTTGGATCTATAGGTGCAGTTATAGCAGCCCTTCTCATTATATTTTTTAGA
TGGGGGTGGGCGGATCCTTTAGCAAGTGTGATTGTAGCAATTTTAGTACTACGTAGCGGCTTTTATGT
AACAAAATCAAGTCTTCATGTATTAATGGAGGGAGCACCAAGCAATATAAATACAAAAGACATTATTA
AAACTATTAAAAAATTCAAAGAAGTTAAAAATATTCATGACTTTCATGTTTGGTCAGTAACTAGCGGA
TTAAACGCGTTATCTTGTCATATTGTTGTAGAAGATACAATGACCATTACTGAAAATGAGTTTTTACT
TAAACGTATAGAACATGAATTCAATCATCAAAATATTCAACATGTCACAATACAGACTGAAACTTCTA
ACAATAATCATAGTGAAAAATTGTTTTGTATCGTGAAAGAAGAAGACAG

NOV69a, CG58510-01

| | | | |
|---|---|---|---|
| Protein Sequence | SEQ ID NO: 1032 | 308 aa | MW at 34326.6kD |

MENDHNHNHTHGANKKTLLISFIIITSYMIVEGLGGFFTNSLALISDAGHMLSDSISLGIALIAFTLG
AKQANTNKTFGYKRFEILAAVLNGITLMLIAIYIFYEAIERFKNPPEVASTGMLIIALVGLFINIIVA
WIMLRGSDVEENLNMRGAYLHVISDMLGSIGAVIAALLIIFFRWGWADPLASVIVAILVLRSGFYVTK
SSLHVLMEGAPSNINTKDIIKTIKKFKEVKNIHDFHVWSVTSGLNALSCHIVVEDTMTITENEFLLKR
IEHEFNHQNIQHVTIQTETSNNNHSEKLFCIVKEED

[0752] Further analysis of the NOV69a protein yielded the following properties shown in Table 69B.

TABLE 69B
Protein Sequence Properties NOV69a

| | |
|---|---|
| SignalP analysis: | Cleavage site between residues 34 and 35 |
| PSORT II analysis: | |

| PSG: | a new signal peptide prediction method | |
|---|---|---|
| | N-region: length 4; pos.chg 0; neg.chg 2 | |
| | H-region: length 10; peak value 0.00 | |
| | PSG score: −4.40 | |
| GvH: | von Heijne's method for signal seq. recognition | |
| | GvH score (threshold: −2.1): −6.24 | |
| | possible cleavage site: between 43 and 44 | |
| | >>> Seems to have no N-terminal signal peptide | |
| ALOM: | Klein et al's method for TM region allocation | |
| | Init position for calculation: 1 | |
| | Tentative number of TMS(s) for the threshold 0.5: 6 | |
| | INTEGRAL Likelihood = −4.46 | Transmembrane 18-34 |
| | INTEGRAL Likelihood = −1.65 | Transmembrane 51-67 |
| | INTEGRAL Likelihood = −6.32 | Transmembrane 85-101 |
| | INTEGRAL Likelihood = −11.41 | Transmembrane 122-138 |
| | INTEGRAL Likelihood = −9.55 | Transmembrane 162-178 |
| | INTEGRAL Likelihood = −4.73 | Transmembrane 186-202 |

| | PERIPHERAL Likelihood = 2.54 (at 241) |
|---|---|
| | ALOM score: −11.41 (number of TMSs: 6) |
| MTOP: | Prediction of membrane topology (Hartmann et al.) |
| | Center position for calculation: 25 |
| | Charge difference: −3.0 C(−1.0) - N( 2.0) |
| | N >= C: N-terminal side will be inside |

>>> membrane topology: type 3a
MITDISC: discrimination of mitochondrial targeting seq

| | | | |
|---|---|---|---|
| R content: | 0 | Hyd Moment (75): | 6.56 |
| Hyd Moment (95): | 3.47 | G content: | 0 |
| D/E content: | 2 | S/T content: | 0 |
| Score: −7.29 | | | |

Gavel: prediction of cleavage sites for mitochondrial preseq

cleavage site motif not found

NUCDISC: discrimination of nuclear localization signals

pat4: none
pat7: none
bipartite: none
content of basic residues: 7.5%
NLS Score: −0.47

KDEL: ER retention motif in the C-terminus: none
ER Membrane Retention Signals:

KKXX-like motif in the C-terminus: VKEE

SKL: peroxisomal targeting signal in the C-terminus: none
PTS2: 2nd peroxisomal targeting signal: none
VAC: possible vacuolar targeting motif: none
RNA-binding motif: none
Actinin-type actin-binding motif:

type 1: none
type 2: none

NMYR: N-myristoylation pattern : none
Prenylation motif: none
memYQRL: transport motif from cell surface to Golgi: none
Tyrosines in the tail: none
Dileucine motif in the tail: none
checking 63 PROSITE DNA binding motifs: none
checking 71 PROSITE ribosomal protein motifs: none
checking 33 PROSITE prokaryotic DNA binding motifs: none
NNCN: Reinhardt's method for Cytoplasmic/Nuclear discrimination

Prediction.: cytoplasmic
Reliability: 94.1

COIL: Lupas's algorithm to detect coiled-coil regions

total: 0 residues

--------------------------
Final Results (k = 9/23):

66.7%: endoplasmic reticulum
22.2%: mitochondrial
11.1%: vesicles of secretory system

>> prediction for CG58510-01 is end (k = 9)

[0753] A search of the NOV69a protein against the Geneseq database, a proprietary database that contains sequences published in patents and patent publication, yielded several homologous proteins shown in Table 69C.

TABLE 69C
Geneseq Results for NOV69a

| | | NOV69a | Identities/ | |
|---|---|---|---|---|
| | | Residues/ | Similarities for | |
| Geneseq | Protein/Organism/Length | Match | the Matched | Expect |
| Identifier | [Patent #, Date] | Residues | Region | Value |
| ABB48454 | Listeria monocytogenes protein | 5 . . . 296 | 163/294 (55%) | 2e-91 |
| | #1158 - Listeria monocytogenes, | 11 . . . 299 | 225/294 (76%) | |
| | 303 aa. [WO200177335-A2, 18- | | | |
| | Oct.-2001] | | | |
| ABP39345 | Staphylococcus epidermidis ORF | 3 . . . 302 | 157/300 (52%) | 3e-91 |
| | amino acid sequence SEQ ID | 35 . . . 334 | 220/300 (73%) | |
| | NO:4190 - Staphylococcus | | | |
| | epidermidis, 342 aa. [US6380370- | | | |
| | B1, 30-Apr.-2002] | | | |
| ABP40773 | Staphylococcus epidermidis ORF | 1 . . . 299 | 112/305 (36%) | 4e-56 |
| | amino acid sequence SEQ ID | 47 . . . 351 | 188/305 (60%) | |
| | NO:5618 - Staphylococcus | | | |
| | epidermidis, 359 aa. [US6380370- | | | |
| | B1, 30-Apr.-2002] | | | |
| AAU61849 | Propionibacterium acnes | 6 . . . 298 | 108/299 (36%) | 8e-52 |
| | immunogenic protein #22745 - | 10 . . . 306 | 185/299 (61%) | |
| | Propionibacterium acnes, 310 aa. | | | |
| | [WO200181581-A2, 01-Nov.- | | | |
| | 2001] | | | |
| AAB76797 | Corynebacterium glutamicum | 3 . . . 300 | 107/302 (35%) | 2e-51 |
| | MCT protein SEQ ID NO:576 - | 18 . . . 317 | 180/302 (59%) | |
| | Corynebacterium glutamicum, 318 | | | |
| | aa. [WO200100805-A2, 04-Jan.- | | | |
| | 2001] | | | |

[0754] In a BLAST search of public sequence databases, the NOV69a protein was found to have homology to the proteins shown in the BLASTP data in Table 69D.

TABLE 69D
Public BLASTP Results for NOV69a

| | | NOV69a | Identities/ | |
|---|---|---|---|---|
| Protein | | Residues/ | Similarities for | Ex- |
| Accession | | Match | the Matched | pect |
| Number | Protein/Organism/Length | Residues | Portion | Value |
| O07084 | Cation transport protein YRDO - | 7 . . . 307 | 206/301 (68%) | e-122 |
| | Bacillus subtilis, 311 aa. | 3 . . . 303 | 253/301 (83%) | |
| P71023 | CzcD - Bacillus subtilis, 295 aa | 21 . . . 307 | 194/287 (67%) | e-115 |
| | (fragment). | 1 . . . 287 | 242/287 (83%) | |
| Q8NVF2 | CzrB protein - Staphylococcus | 3 . . . 302 | 161/300 (53%) | 2e-95 |
| | aureus (strain MW2), 326 aa. | 8 . . . 307 | 225/300 (74%) | |
| Q99SB4 | CzrB protein (Cation-efflux | 3 . . . 302 | 161/300 (53%) | 2e-95 |
| | system membrane protein | 7 . . . 306 | 225/300 (74%) | |
| | homolog) - Staphylococcus aureus | | | |
| | (strain Mu50 / ATCC 700699), | | | |
| | and, 325 aa. | | | |
| Q9ZNF5 | CzrB protein - Staphylococcus | 3 . . . 302 | 161/300 (53%) | 2e-95 |
| | aureus, 325 aa. | 7 . . . 306 | 225/300 (74%) | |

[0755] PFam analysis indicates that the NOV69a protein contains the domains shown in the Table 69E.

TABLE 69E
Domain Analysis of NOV69a

| | | Identities/ | |
|---|---|---|---|
| | NOV69a | Similarities | |
| | Match | for the | |
| Pfam Domain | Region | Matched Region | Expect Value |
| Cation_efflux | 18 . . . 296 | 102/303 (34%) | 1.5e-106 |
| | | 245/303 (81%) | |

### Example 70

[0756] The NOV70 clone was analyzed, and the nucleotide and encoded polypeptide sequences are shown in Table 70A.

TABLE 70A
NOV70 Sequence Analysis

| | | |
|---|---|---|
| NOV70a, CG59309-01 | SEQ ID NO: 1033 | 1375 bp |

| | | |
|---|---|---|
| DNA Sequence | ORF Start: ATG at 96 | ORF Stop: TAA at 1362 |

GGGACGCCGGACGCCGTCCGGACATTCGGCGCGCTTGCCACGATCTTGGACGGGTCTCGGGCCTCGAC
CTTTGAATTCCCCGCTCCGGCTCCAAGATGTCAGCAACGCTGATCCTGGAGCCCCCAGGCCGCTGCTG
CTGGAACGAGCCGGTGCGCATTGCCGTGCGCGGCCTGGCCCCGGAGCAGCGGGTTACGCTGCGCGCGT
CCCTGCGCGACGAGAAGGGCGCGCTCTTCCGGGCCCACGCGCGCTACTGCGCCGACGCCCGCGGCGAG
CTGGACCTGGAGCGCGCACCCGCGCTGGGCGGCAGCTTCGCGGGACTCGAGCCCATGGGGCTGCTCTG
GGCCCTGGAACCCGAGAAGCCTTTTTGGCGCTTCCTGAAGCGGGACGTACAGATTCCTTTTGTCGTGG
AGTTGGAGGTGCTGGACGGCCACGACCCCGAGCCTGGACGGCTGCTGTGCCAGGCGCAGCACGAGCGC
CACTTCCTCCCGCCAGGGGTGCGGCGCCAGTCGGTGCGAGCGGGCCGGGTGCGCGCCACGCTCTTCCT
GCCGCCAGGTGAGCCTGGACCCTTCCCAGGGATCATTGACATCTTTGGTATTGGAGGGGGCCTCTTGG
AATATCGAGCCAGCCTCCTTGCTGGCCATGGCTTTGCCACGTTGGCTCTAGCTTATTATAACTTTGAA
GATCTCCCCAATAACATGGACAACATATCCCTGGAGTACTTCGAAGAAGCCGTATGCTACATGCTTCA
ACATCCCCAGGTTAAAGGCCCAGGCATTGGGCTTTTGGGCATTTCTCTAGGAGCTGATATTTGTCTCT
CAATGGCCTCATTCTTGAAGAATGTCTCAGCCACAGTTTCCATCAATGGATCTGGGATCAGTGGGAAC
ACAGCCATCAACTATAAGCACAGTAGCATTCCACCATTGGGCTATGACCTGAGGAGAATCAAGGTAGC
TTTCTCAGGCCTCGTGGACATTGTGGATATAAGGAATGCTCTCGTAGGAGGGTACAAGAACCCCAGCA
TGATTCCAATAGAGAAGGCCCAGGGGCCCATCCTGCTCATTGTTGGTCAGGATGACCATAACTGGAGA
AGTGAGTTGTATGCCCAAACAGTCTCTGAACGGTTACAGGCCCATGGAAAGGAAAAACCCCAGATCAT
CTGTTACCCTGGGACTGGGCATTACATCGAGCCTCCTTACTTCCCCCTGTGCCCAGCTTCCCTTCACA
GATTACTGAACAAACATGTTATATGGGGTGGGGAGCCCAGGGCTCATTCTAAGGCCCAGGAAGATGCC
TGGAAGCAAATTCTAGCCTTCTTCTGCAAACACCTGGGAGGTACCCAGAAAACAGCTGTCCCTAAATT
GTAATGCATTTGTCT

NOV70a, CG59309-01

| | | | |
|---|---|---|---|
| Protein Sequence | SEQ ID NO: 1034 | 422 aa | MW at 46455.1kD |

MSATLILEPPGRCCWNEPVRIAVRGLAPEQRVTLRASLRDEKGALFRAHARYCADARGELDLERAPAL
GGSFAGLEPMGLLWALEPEKPFWRFLKRDVQIPFVVELEVLDGHDPEPGRLLCQAQHERHFLPPGVRR
QSVRAGRVRATLFLPPGEPGPFPGIIDIFGIGGGLLEYRASLLAGHGFATLALAYYNFEDLPNNMDNI
SLEYFEEAVCYMLQHPQVKGPGIGLLGISLGADICLSMASFLKNVSATVSINGSGISGNTAINYKHSS
IPPLGYDLRRIKVAFSGLVDIVDIRNALVGGYKNPSMIPIEKAQGPILLIVGQDDHNWRSELYAQTVS
ERLQAHGKEKPQIICYPGTGHYIEPPYFPLCPASLHRLLNKHVIWGGEPRAHSKAOEDAWKQILAFFC
KHLGGTQKTAVPKL

| | | |
|---|---|---|
| NOV70b, 278901386 | SEQ ID NO: 1035 | 1285 bp |

| | | |
|---|---|---|
| DNA Sequence | ORF Start: at 2 | ORF Stop: end of sequence |

CACCGGATCCACCATGTCAGCAACGCTGATCCTGGAGCCCCCAGGCCGCTGCTGCTGGAACGAGCCGG
TGCGCATTGCCGTGCGCGGCCTGGCCCCGGAGCAGCGGGTTACGCTGCGCGCGTCCCTGCGCGACGAG
AAGGGCGCGCTCTTCCGGGCCCACGCGCGCTACTGCGCCGACGCCTGCGGCGAGCTGGACCTGGAGCG
CGCACCCGCGCTGGGCGGCAGCTTCGCGGGACTCGAGCCCATGGGGCTGCTCTGGGCCCTGGAACCCG
AGAAGCCTTTTTGGCGCTTCCTGAAGCGGGACGTACAGATTCCTTTTGTCGTGGAGTTGGAGGTGCTG
GACGGCCACGACCCCGAGCCTGGACGGCTGCTGTGCCAGGCGCAGCACGAGCGCCACTTCCTCCCGCC
AGGGGTGCGGCGCCAGTCGGTGCGAGCGGGCCGGGTGCGCGCCACGCTCTTCCTGCCGCCAGGACCTG
GACCCTTCCCAGGGATCATTGACATCTTTGGTATTGGAGGGGGCCTCTTGGAATATCGAGCCAGCCTC
CTTGCTGGCCATGGCTTTGCCACGTTGGCTCTAGCTTATTATAACTTTGAAGATCTCCCCAATAACAT
GGACAACATATCCCTGGAGTACTTCGAAGAAGCCGTATGCTACATGCTTCAACATCCCCAGGTAAAAG
GCCCAGGCATTGGGCTTTTGGGCATTTCTCTAGGAGCTGATATTTGTCTCTCAATGGCCTCATTCTTG
AAGAATGTCTCAGCCACAGTTTCCATCAATGGATCTGGGATCAGTGGGAACACAGCCATCAACTATAA
GCACAGTAGCATTCCACCATTGGGCTATGACCTGAGGAGAATCAAGGTAGCTTTCTCAGGCCTCGTGG
ACATCGTGGATATAAGGAATGCTCTCGTAGGAGGGTACAAGAACCCCAGCATGATTCCAATAGAGAAG
GCCCAGGGGCCCATCCTGCTCATTGTTGGTCAGGATGACCATAACTGGAGAAGTGAGTTGTATGCCCA
AACAGTCTCTGAACGGTTACAGGCCCATGGAAAGGAAAAACCCCAGATCATCTGTTACCCTGGGACTG
GGCATTACATCGAGCCTCCTTACTTCCCCCTGTGCCCAGCTTCCCTTCACAGATTACTGAACAAACAT
GTTATATGGGGTGGGGAGCCCAGGGCTCATTCTAAGGCCCAGGAAGATGCCTGGAAGCAAATTCTAGC
CTTCTTCTGCAAACACCTGGGAGGTACCCAGAAAACAGCTGTCCCTAAATTGGTCGACGGC

NOV70b, 278901386

| | | | |
|---|---|---|---|
| Protein Sequence | SEQ ID NO: 1036 | 428 aa | MW at 46890.5kD |

TGSTMSATLILEPPGRCCWNEPVRIAVRGLAPEQRVTLRASLRDEKGALFRAHARYCADACGELDLER
APALGGSFAGLEPMGLLWALEPEKPFWRFLKRDVQIPFVVELEVLDGHDPEPGRLLCQAQHERHFLPP
GVRRQSVRAGRVRATLFLPPGPGPFPGIIDIFGIGGGLLEYRASLLAGHGFATLALAYYNFEDLPNNM
DNISLEYFEEAVCYMLQHPQVKGPGIGLLGISLGADICLSMASFLKNVSATVSINGSGISGNTAINYK
HSSIPPLGYDLRRIKVAFSGLVDIVDIRNALVGGYKNPSMIPIEKAQGPILLIVGQDDHNWRSELYAQ
TVSERLQAHGKEKPQIICYPGTGHYIEPPYFPLCPASLHRLLNKNVIWGGEPRAHSKAQEDAWKQILA
FFCKHLGGTQKTAVPKLVDG

[0757] A ClustalW comparison of the above protein sequences yields the following sequence alignment shown in Table 70B.

TABLE 70B
Comparison of the NOV70 protein sequences.

| | |
|---|---|
| NOV70a | ----MSATLILEPPGRCCWNEPVRIAVRGLAPEQRVTLRASLRDEKGALFRAHARYCADA |
| NOV70b | TGSTMSATLILEPPGRCCWNEPVRIAVRGLAPEQRVTLRASLRDEKGALFRAHARYCADA |
| NOV7ca | RGELDLERAPALGGSFAGLEPMGLLWALEPEKPFWRFLKRDVQIPFVVELEVLDGHDPEP |
| NOV70b | CGELDLERAPALGGSFAGLEPMGLLWALEPEKPFWRFLKRDVQIPFVVELEVLDGHDPEP |
| NOV70a | GRLLCQAQHERHFLPPGVRRQSVRAGRVRATLFLPPGEPGPFPGIIDIFGIGGGLLEYRA |
| NOV70b | GRLLCQAQHERHFLPPGVRRQSVRAGRVRATLFLPPG-PGPFPGIIDIFGIGGGLLEYRA |
| NOV70a | SLLAGHGFATLALAYYNFEDLPNNNDNISLEYFEEAVCYMLQHPQVKGPGIGLLGISLGA |
| NOV70b | SLLAGHGFATLALAYYNFEDLPNNMDNISLEYFEEAVCYMLQHPQVKGPGIGLLGISLGA |
| NOV70a | DICLSMASFLKNVSATVSINGSGISGNTAINYKHSSIPPLGYDLRRIKVAFSGLVDIVDI |
| NOV70b | DICLSMASFLKNVSATVSINGSGISGNTAINYKHSSIPPLGYDLRRIKVAFSGLVDIVDI |
| NOV70a | RNALVGGYKNPSMIPIEKAQGPILLIVGQDDHNWRSELYAQTVSERLQAHGKEKPQIICY |
| NOV70b | RNALVGGYKNPSMIPIEKAQGPILLIVGQDDHNWRSELYAQTVSERLQAHGKEKPQIICY |
| NOV70a | PGTGHYIEPPYFPLCPASLHRLLNKHVIWGGEPRAHSKAQEDAWKQILAFFCKHLGGTQK |
| NOV70b | PGTGHYIEPPYFPLCPASLHRLLNKHVIWGGEPRAHSKAQEDAWKQILAFFCKHLGGTQK |
| NOV70a | TAVPKL--- |
| NOV70b | TAVPKLVDG |
| NOV70a | (SEQ ID NO: 1034) |
| NOV70b | (SEQ ID NO: 1036) |

[0758] Further analysis of the NOV70a protein yielded the following properties shown in Table 70C.

TABLE 70C
Protein Sequence Properties NOV7Oa

| | |
|---|---|
| SignalP analysis: | No Known Signal Sequence Indicated |
| PSORT II analysis: | |

| PSG: | a new signal peptide prediction method |
|---|---|
| | N-region: length 8; pos..chg 0; neg.chg 1 |
| | H-region: length 3; peak value 0.00 |
| | PSG score: −4.40 |
| GvH: | von Heijne's method for signal seq. recognition |
| | GvH score (threshold: −2.1): −7.81 |
| | possible cleavage site: between 13 and 14 |

>>> Seems to have no N-terminal signal peptide

| ALOM: | Klein et al≡s method for TM region allocation |
|---|---|
| | Init position for calculation: 1 |
| | Tentative number of TMS(s) for the threshold 0.5: 1 |
| | Number of TMS(s) for threshold 0.5: 0 |
| | PERIPHERAL Likelihood = 1.75 (at 285) |
| | ALOM score: −1.86 (number of TMSs: 0) |

MITDISC: discrimination of mitochondrial targeting seq

| | | | |
|---|---|---|---|
| R content: | 1 | Hyd Moment (75): | 7.13 |
| Hyd Moment (95): | 4.74 | G content: | 1 |
| D/E content: | 2 | S/T content: | 2 |
| Score: −6.03 | | | |

Gavel: prediction of cleavage sites for mitochondrial preseq

cleavage site motif not found

NUCDISC: discrimination of nuclear localization signals

pat4: none
pat7: none
bipartite: none
content of basic residues: 10.4%
NLS Score: −0.47

KDEL: ER retention motif in the C-terminus: none
ER Membrane Retention Signals:

KXXX-like motif in the C-terminus: AVPK

SKL: peroxisomal targeting signal in the C-terminus: none
PTS2: 2nd peroxisomal targeting signal: none
VAC: possible vacuolar targeting motif: none
RNA-binding motif: none
Actinin-type actin-binding motif:

| | type 1: none |
|---|---|
| | type 2: none |
| NMYR: | N-myristoylation pattern : none |

Prenylation motif: none
memYQRL: transport motif from cell surface to Golgi: none
Tyrosines in the tail: none
Dileucine motif in the tail: none
checking 63 PROSITE DNA binding motifs: none
checking 71 PROSITE ribosomal protein motifs: none
checking 33 PROSITE prokaryotic DNA binding motifs: none

| NNCN: | Reinhardt's method for Cytoplasmic/Nuclear discrimination |
|---|---|
| | prediction: cytoplasmic |
| | Reliability: 94.1 |
| COIL: | Lupas's algorithm to detect coiled-coil regions |
| | total: 0 residues |

--------------------------
Final Results (k = 9/23):

```
65.2%: cytoplasmic
13.0%: nuclear
  8.7%: mitochondrial
  8.7%: peroxisomal
  4.3%: plasma membrane
```

>> prediction for CG59309-01 is cyt (k = 23)

[0759] A search of the NOV70a protein against the Geneseq database, a proprietary database that contains sequences published in patents and patent publication, yielded several homologous proteins shown in Table 70D.

TABLE 70D
Geneseq Results for NOV70a

| | | NOV70a | Identities/ | |
|---|---|---|---|---|
| | | Residues/ | Similarities for | |
| Geneseq | Protein/Organism/Length | Match | the Matched | Expect |
| Identifier | [Patent #, Date] | Residues | Region | Value |
| AAE25382 | Human NZMS-6 protein - Homo | 1 . . . 422 | 421/422 (99%) | 0.0 |
| | sapiens, 421 aa. [WO200246385- | 1 . . . 421 | 421/422 (99%) | |
| | A2, 13-Jun.-2002] | | | |
| AAU76350 | Human Acyl-CoA thioesterase | 1 . . . 422 | 420/422 (99%) | 0.0 |
| | 56939 - Homo sapiens, 421 aa. | 1 . . . 421 | 420/422 (99%) | |
| | [WO200208274-A2, 31-Jan.- | | | |
| | 2002] | | | |
| AAM41490 | Human polypeptide SEQ ID NO | 1 . . . 422 | 296/422 (70%) | e-178 |
| | 6421 - Homo sapiens, 494 aa. | 74 . . . 494 | 341/422 (80%) | |
| | [WO2001533 12-A1, 26-Jul.- | | | |
| | 2001] | | | |
| AAM39704 | Human polypeptide SEQ ID NO | 1 . . . 422 | 296/422 (70%) | e-178 |
| | 2849 - Homo sapiens, 483 aa. | 63 . . . 483 | 341/422 (80%) | |
| | [WO2001 53312-A1, 26-Jul.- | | | |
| | 2001] | | | |
| AAY71112 | Human Hydrolase protein- 10 | 1 . . . 422 | 296/422 (70%) | e- 178 |
| | (HYDRL-10) - Homo sapiens, | 63 . . . 483 | 341/422 (80%) | |
| | 483 aa. [WO200028045-A2, 18- | | | |
| | May-2000] | | | |

[0760] In a BLAST search of public sequence databases, the NOV70a protein was found to have homology to the proteins shown in the BLASTP data in Table 70E.

TABLE 70E
Public BLASTP Results for NOV70a

| | | NOV70a | Identities/ | |
|---|---|---|---|---|
| Protein | | Residues/ | Similarities for | |
| Accession | | Match | the Matched | Expect |
| Number | Protein/Organism/Length | Residues | Portion | Value |
| CAD35497 | Sequence 1 from Patent | 1 . . . 422 | 420/422 (99%) | 0.0 |
| | WO0208274 - Homo sapiens | 1 . . . 421 | 420/422 (99%) | |
| | (Human), 421 aa. | | | |
| Q8N9L9 | Hypothetical protein FLJ36904 - | 1 . . . 422 | 417/422 (98%) | 0.0 |
| | Homo sapiens (Human), 421 aa. | 1 . . . 421 | 417/422 (98%) | |
| CAD62354 | Human full-length cDNA clone | 70 . . . 422 | 352/353 (99%) | 0.0 |
| | CSODIO29YHO6 of Placenta of | 1 . . . 352 | 352/353 (99%) | |
| | Homo sapiens (human) - Homo | | | |
| | sapiens (Human), 352 aa | | | |
| | (fragment). | | | |
| Q8BWN8 | Peroxisomal long chain acyl-CoA | 1 . . . 422 | 313/422 (74%) | 0.0 |
| | thioesterase IB - Mus musculus | 1 . . . 421 | 363/422 (85%) | |
| | (Mouse), 421 aa. | | | |
| Q8BL20 | Peroxisomal long chain acyl-CoA | 1 . . . 422 | 313/422 (74%) | 0.0 |
| | thioesterase IB - Mus musculus | 1 . . . 421 | 362/422 (85%) | |
| | (Mouse), 421 aa. | | | |

[0761] PFam analysis indicates that the NOV70a protein contains the domains shown in the Table 70F.

TABLE 70F
Domain Analysis of NOV70a

| | NOV70a | Identities/Similarities | Expect |
|---|---|---|---|
| Pfam Domain | Match Region | for the Matched Region | Value |
| Bile_Hydr_Trans | 3 . . . 152 | 84/157 (54%) | 1.9e−82 |
| | | 140/157 (89%) | |
| DLH | 144 . . . 411 | 65/309 (21%) | 0.33 |
| | | 170/309 (55%) | |

### Example 71

[0762] The NOV71 clone was analyzed, and the nucleotide and encoded polypeptide sequences are shown in Table 71A.

TABLE 71A
NOV71 Sequence Analysis

| | | |
|---|---|---|
| NOV71a, CG59490-01 | SEQ ID NO: 1037 | 660 bp |

| | | |
|---|---|---|
| DNA Sequence | ORF Start: at 1 | ORF Stop: end of sequence |

TCACTGGGGGCTGCGACGTCTCGGCCAGGAGGCACCCCTGGCAGGGAGGAGTTGGAGGCTTGCGCGTT
TAGAGTGCAGGTGGGGCAGCTGAGGCTCTATGAGGACGACCAGCGGACGAAGGTGGTTGAGATCGTCC
GTCACCCCCAGTACAACGAGAGCCTGTCTGCCCAGGGCGGTGCGGACATCGCCCTGCTGAAGCTGGAG
GCCCCGGTGCCGCTGTCTGAGCTCATCCACCCGGTCTCGCTCCCGTCTGCCTCCCGGGACGTGCCCTC
GGGGAAGACCTGCTGGGTGACCGGCTGGGGTGTCATTGGACGTGGAGAACTACTGCCCTGGCCCCTCA
GCTTGTGGGAGGCGACGGTGAAGGTCAGGAGCAACGTCCTCTGTAACCAGACCTGTCGCCGCCGCTTT
CCTTCCAACCACACTGAGCGGTTTGAGCGGCTCATCAAGGACGACATGCTGTGTGCCGGGGACGGGAA
CCACGGCTCCTGGCCAGGCGACAACGGGGGCCCCCTCCTGTGCAGGCGGAATTGCACCTGGGTCCAGG
TGGAGGTGGTGAGCTGGGGCAAACTCTGCGGCCTTCGCGGCTATCCCGGCATGTACACCCGCGTGACG
AGCTACGTGTCCTGGATCCGCCAGTACGTCCCGCCGTTCCCCAGACGC

NOV71a, CG59490-01

| | | | |
|---|---|---|---|
| Protein Sequence | SEQ ID NO: 1038 | 220 aa | MW at 24527.8kD |

SLGAATSRPGGTPGREELEACAFRVQVGQLRLYEDDQRTKVVEIVRHPQYNESLSAQGGADIALLKLE
APVPLSELIHPVSLPSASRDVPSGKTCWVTGWGVIGRGELLPWPLSLWEATVKVRSNVLCNQTCRRRF
PSNHTERFERLIKDDMLCAGDGNHGSWPGDNGGPLLCRRNOTWVQVEVVSWGKLCGLRGYPGMYTRVT
SYVSWIRQYVPPFPRR

| | | |
|---|---|---|
| NOV71b, 207639512 | SEQ ID NO: 1039 | 672 bp |

| | | |
|---|---|---|
| DNA Sequence | ORF Start: at 1 | ORF Stop: end of sequence |

AGATCTTCACTGGGGGCTGCGACGTCTCGGCCAGGAGGCACCCCTGGCAGGGAGGAGTTGGAGGCTTG
CGCGTTTAGAGTGCAGGTGGGGCAGCTGAGGCTCTATGAGGACGACCAGCGGACGAAGGTGGTTGAGA
TCGTCCGTCACCCCCAGTACAACGAGAGCCTGTCTGCCCAGGGCGGTGCGGACATCGCCCTGCTGAAG
CTGGAGGCCCCGGTGCCGCTGTCTGAGCTCATCCACCCGGTCTCGCTCCCGTCTGCCTCCCTGGACGT
GCCCTCGGGGAAGACCTGCTGGGTGACCGGCTGGGGTGTCATTGGACGTGGAGAACTACTGCCCTGGC
CCCTCAGCTTGTGGGAGGCGACGGTGAAGGTCAGGAGCAGCGTCCTCTGTAACCAGACCTGTCGCCGC
CGCTTTCCTTCCAACCACACTGAGCGGTTTGAGCGGCTCATCAAGGACGACATGCTGTGTGCCGGGGA
CGGGAACCACGGCTCCTGGCCAGGCGACAACGGGGGCCCCCTCCTGTGCAGGCGGAATTGCACCTGGG
TCCAGGTGGAGGTGGTGAGCTGGGGCAAACTCTGCGGCCTTCGCGGCTATCCCGGCATGTACACCCGC
GTGACGAGCTACGTGTCCTGGATCCGCCAGTACGTCCCGCCGTTCCCCAGACGCCTCGAG

NOV71b, 207639512

| | | | |
|---|---|---|---|
| Protein Sequence | SEQ ID NO: 1040 | 224 aa | MW at 24943.3kD |

RSSLGAATSRPGGTPGREELEACAFRVQVGQLRLYEDDQRTKVVEIVRHPQYNESLSAQGGADIALLK
LEAPVPLSELIHPVSLPSASLDVPSGKTCWVTGWGVIGRGELLPWPLSLWEATVKVRSSVLCNQTCRR
RFPSNHTERFERLIKDDMLCAGDGNHGSWPGDNGGPLLCRRNCTWVQVEVVSWGKLCGLRGYPGMYTR
VTSYVSWIRQYVPPFPRRLE

| | | |
|---|---|---|
| NOV71c, 207639476 | SEQ ID NO: 1041 | 672 bp |

| | | |
|---|---|---|
| DNA Sequence | ORF Start: at 1 | ORF Stop: end of sequence |

AGATCTTCACTGGGGGCTGCGACGTCTCGGCCAGGAGGCACCCCTGGCAGGGAGGAGTTGGAGGCTTG
CGCGTTTAGAGTGCAGGTGGGGCAGCTGAGGCTCTATGAGGACGACCAGCGGACGAAGGTGGTTGAGA
TCGTCCGTCACCCCCAGTACAACGAGAGCCTGTCTGCCCAGGGCGGTGCGGACATCGCCCTGCTGAAG
CTGGAGGCCCCGGTGCCGCTGTCTGAGCTCATCCACCCGGTCTCGCTCCCGTCTGCCTCCCTGGACGT
GCCCTCGGGGAAGACCTGCTGGGTGACCGGCTGGGGTGTCATTGGACGTGGAGAACTACTGCCCTGGC
CCCTCAGCTTGTGGGAGGCGACGGTGAAGGTCAGGAGCAACGTCCTCTGTAACCAGACCTGTCGCCGC
CGCTTTCCTTCCAACCACACTGAGCGGTTTGAGCGGCTCATCAAGGACGACATGCTGTGTGCCGGGGA
CGGGAACCACGGCTCCTGGCCAGGCGACAACGGGGGCCCCCTCCTGTGCAGGCGGAATTGCACCTGGG
TCCAGGTGGAGGTGGTGAGCTGGGGCAAACTCTGCGGCCTTCGCGGCTATCCCGGCATGTACACCCGC
GTGACGAGCTACGTGTCCTGGATCCGCCAGTACGTCCCGCCGTTCCCCAGACGCCTCGAG

NOV71c, 207639476

| | | | |
|---|---|---|---|
| Protein Sequence | SEQ ID NO: 1042 | 224 aa | MW at 24970.3kD |

RSSLGAATSRPGGTPGREELEACAFRVQVGQLRLYEDDQRTKVVEIVRHPQYNESLSAQGGADIALLK
LEAPVPLSELIHPVSLPSASLDVPSGKTCWVTGWGVIGRGELLPWPLSLWEATVKVRSNVLCNQTCRR
RFPSNHTERFERLIKDDMLCAGDGNHGSWPGDNGGPLLCRRNCTWVQVEVVSWGKLCGLRGYPGMYTR
VTSYVSWIRQYVPPFPRRLE

| | | |
|---|---|---|
| NOV71d, 207639523 | SEQ ID NO: 1043 | 672 bp |

| | | |
|---|---|---|
| DNA Sequence | ORF Start: at 1 | ORF Stop: end of sequence |

AGATCTTCACTGGGGGCTGCGACGTCTCGGCCAGGAGGCACCCCTGGCAGGGAGGAGTTGGAGGCTTG
CGCGTTTAGAGTGCAGGTGGGGCAGCTGAGGCTCTATGAGGACGACCAGCGGACGAAGGTGGTTGAGA
TCGTCCGTCACCCCCAGTACAACGAGAGCCTGTCTGCCCAGGCCGGTGCGGACATCGCCCTGCTGAAG
CTGGAGGCCCCGGTGCCGCTGTTGAGCTCATCCACCCGGTCTCGTCTCCCGTCTGCCTCCCTGGACGT
GCCCTCGGGGAAGACCTGCTGGGTGACCGGCTGGGGTGTCATTGGACGTGGAGAACTACTGCCCTGGC
CCCTCAGCTTGTGGGAGGCGACGGTGAAGGTCAGGAGCAACGTCCTCTGTAACCAGACCTGTCGCCGC
CGCTTTCCTTCCAACCACACTGAGCGGTTTGAGCGGCTCATCAAGGACGACATGCTGTGTGCCGGGGA
CGGGAACCACGGCTCCTGGCCAGGCGACAACGGGGGCCCCCTCCTGTGCAGGCGGAATTGCACCTGGG
TCCAGGTGGAGGTGGTGAGCTGGGGCAAACTCTGCGGCCTTCGCGGCTATCCCGGCATGTACACCCGC
GTGACGAGCTACGTGTCCTGGATCCGCCAGTACGTCCCGCCGTTCCCCAGACGCCTCGAG

NOV71d, 207639523

| | | | |
|---|---|---|---|
| Protein Sequence | SEQ ID NO: 1044 | 224 aa | MW at 24984.3kD |

RSSLGAATSRPGGTPGREELEACAFRVQVGQLRLYEDDQRTKVVEIVRHPQYNESLSAQAGADIALLK
LEAPVPLSELIHPVSLPSASLDVPSGKTCWVTGWGVIGRGELLPWPLSLWEATVKVRSNVLCNQTCRR
RFPSNHTERFERLIKDDMLCAGDGNHGSWPGDNGGPLLCRRNCTWVQVEVVSWGKLCGLRGYPGMYTR
VTSYVSWIRQYVPPFPRRLE

| | | |
|---|---|---|
| NOV71e, CG59490-02 | SEQ ID NO: 1045 | 672 bp |

| | | |
|---|---|---|
| DNA Sequence | ORF Start: at 7 | ORF Stop: at 667 |

AGATCTTCACTGGGGGCTGCGACGTCTCGGCCAGGAGGCACCCCTGGCAGGGAGGAGTTGGAGGCTTG
CGCGTTTAGAGTGCAGGTGGGGCAGCTGAGGCTCTATGAGGACGACCAGCGGACGAAGGTGGTTGAGA
TCGTCCGTCACCCCCAGTACAACGAGAGCCTGTCTGCCCAGGGCGGTGCGGACATCGCCCTGCTGAAG
CTGGAGGCCCCGGTGCCGCTGTCTGAGCTCATCCACCCGGTCTCGCTCCCGTCTGCCTCCCTGGACGT
GCCCTCGGGGAAGACCTGCTGGGTGACCGGCTGGGGTGTCATTGGACGTGGAGAACTACTGCCCTGGC
CCCTCAGCTTGTGGGAGGCGACGGTGAAGGTCAGGAGCAACGTCCTCTGTAACCAGACCTGTCGCCGC
CGCTTTCCTTCCAACCACACTGAGCGGTTTGAGCGGCTCATCAAGGACGACATGCTGTGTGCCGGGGA
CGGGAACCACGGCTCCTGGCCAGGCGACAACGGGGGCCCCCTCCTGTGCAGGCGGAATTGCACCTGGG
TCCAGGTGGAGGTGGTGAGCTGGGGCAAACTCTGCGGCTATCGCGGCTATCCCGGCATGTACACCCGC
GTGACGAGCTACGTGTCCTGGATCCGCCAGTACGTCCCGCCGTTCCCCAGACGCCTCGAG

NOV71e, CG59490-02

| | | | |
|---|---|---|---|
| Protein Sequence | SEQ ID NO: 1046 | 220 aa | MW at 24484.8kD |

SLGAATSRPGGTPGREELEACAFRVQVGQLRLYEDDQRTKVVEIVRHPQYNESLSAQGGADIALLKLE
APVPLSELIHPVSLPSASLDVPSGKTCWVTGWGVIGRGELLPWPLSLWEATVKVRSNVLCNQTCRRRF
PSNHTERFERLIKDDMLCAGDGNHGSWPGDNGGPLLCRRNCTWVQVEVVSWGKLCGLRGYPGMYTRVT
SYVSWIRQYVPPFPRR

[0763] A ClustalW comparison of the above protein sequences yields the following sequence alignment shown in Table 71B.

TABLE 71B
Comparison of the NOV71 protein sequences.

| | |
|---|---|
| NOV71a | --SLGAATSRPGGTPGREELEACAFRVQVGQLRLYEDDQRTKVVEIVRHPQYNESLSAQG |
| NOV71b | RSSLGAATSRPGGTPGREELEACAFRVQVGQLRLYEDDQRTKVVEIVRHPQYNESLSAQG |
| NOV71c | RSSLGAATSRPGGTPGREELEACAFRVQVGQLRLYEDDQRTKVVEIVRHPQYNESLSAQG |
| NOV71d | RSSLGAATSRPGGTPGREELEACAFRVQVGQLRLYEDDQRTKVVEIVRHPQYNESLSAQG |
| NOV71e | --SLGAATSRPGGTPGREELEACAFRVQVGQLRLYEDDQRTKVVEIVRHPQYNESLSAQG |
| NOV71a | GADIALLKLEAPVPLSELIHPVSLPSASRDVPSGKTCWVTGWGVIGRGELLPWPLSLWEA |
| NOV71b | GADIALLKLEAPVPLSELIHPVSLPSASRDVPSGKTCWVTGWGVIGRGELLPWPLSLWEA |
| NOV71c | GADIALLKLEAPVPLSELIHPVSLPSASRDVPSGKTCWVTGWGVIGRGELLPWPLSLWEA |
| NOV71d | GADIALLKLEAPVPLSELIHPVSLPSASRDVPSGKTCWVTGWGVIGRGELLPWPLSLWEA |
| NOV71e | GADIALLKLEAPVPLSELIHPVSLPSASRDVPSGKTCWVTGWGVIGRGELLPWPLSLWEA |
| NOV71a | TVKVRSNVLCNQTCRRRFPSNHTERFERLIKDDMLCAGDGNHGSWPGDNGGPLLCRRNCT |
| NOV71b | TVKVRSNVLCNQTCRRRFPSNHTERFERLIKDDMLCAGDGNHGSWPGDNGGPLLCRRNCT |
| NOV71c | TVKVRSNVLCNQTCRRRFPSNHTERFERLIKDDMLCAGDGNHGSWPGDNGGPLLCRRNCT |
| NOV71d | TVKVRSNVLCNQTCRRRFPSNHTERFERLIKDDMLCAGDGNHGSWPGDNGGPLLCRRNCT |
| NOV71e | TVKVRSNVLCNQTCRRRFPSNHTERFERLIKDDMLCAGDGNHGSWPGDNGGPLLCRRNCT |
| NOV71a | WVQVEVVSWGKLCGLRGYPGMYTRVTSYVSWIRQYVPPFPRR-- |
| NOV71b | WVQVEVVSWGKLCGLRGYPGMYTRVTSYVSWIRQYVPPFPRRLE |
| NOV71c | WVQVEVVSWGKLCGLRGYPGMYTRVTSYVSWIRQYVPPFPRRLE |
| NOV71d | WVQVEVVSWGKLCGLRGYPGMYTRVTSYVSWIRQYVPPFPRRLE |
| NOV71e | WVQVEVVSWGKLCGLRGYPGMYTRVTSYVSWIRQYVPPFPRR-- |
| NOV71a | (SEQ ID NO: 1038) |
| NOV71b | (SEQ ID NO: 1040) |
| NOV71c | (SEQ ID NO: 1042) |
| NOV71d | (SEQ ID NO: 1044) |
| NOV71e | (SEQ ID NO: 1046) |

[0764] Further analysis of the NOV71a protein yielded the following properties shown in Table 71C.

TABLE 71C
Protein Sequence Properties NOV71a

| | |
|---|---|
| SignalP analysis: | No Known Signal Sequence Indicated |

PSORT II analysis:

| PSG: | a new signal peptide prediction method | | | |
|---|---|---|---|---|
| | N-region: | length 8; | pos.chg 1; | neg.chg 0 |
| | H-region: | length 6; | peak value | −8.72 |
| | PSG score: | −13.12 | | |

| | |
|---|---|
| GvH: | von Heijne's method for signal seq. recognition |
| | GvH score (threshold: −2.1): −7.58 |
| | possible cleavage site: between 14 and 15 |

>>> Seems to have no N-terminal signal peptide

| | |
|---|---|
| ALOM: | Klein et al's method for TM region allocation |
| | Init position for calculation: 1 |
| | Tentative number of TMS(s) for the threshold 0.5: 0 |
| | number of TMS(s) . . . fixed |
| | PERIPHERAL Likelihood = 4.88 (at 62) |
| | ALOM score: 4.88 (number of TMSs: 0) |

MITDISC: discrimination of mitochondrial targeting seq

| | | | |
|---|---|---|---|
| R content: | 2 | Hyd Moment (75): | 6.94 |
| Hyd Moment (95): | 7.43 | G content: | 4 |
| D/E content: | 1 | S/T content: | 4 |
| Score: −3.60 | | | |

Gavel: prediction of cleavage sites for mitochondrial preseq

R-2 motif at 18 SRP|GG

NUCDISC: discrimination of nuclear localization signals

pat4: none
pat7: none
bipartite: none
content of basic residues: 12.3%
NLS Score: −0.47

KDEL: ER retention motif in the C-terminus: none
ER Membrane Retention Signals: none
SKL: peroxisomal targeting signal in the C-terminus: none
PTS2: 2nd peroxisomal targeting signal: none
VAC: possible vacuolar targeting motif: none
RNA-binding motif: none
Actinin-type actin-binding motif:

type 1: none
type 2: none

NMYR: N-myristoylation pattern: none
Prenylation motif: none
memYQRL: transport motif from cell surface to Golgi: none
Tyrosines in the tail: none
Dileucine motif in the tail: none
checking 63 PROSITE DNA binding motifs: none
checking 71 PROSITE ribosomal protein motifs: none
checking 33 PROSITE prokaryotic DNA binding motifs: none

| | |
|---|---|
| NNCN: | Reinhardt's method for Cytoplasmic/Nuclear discrimination |
| | Prediction: cytoplasmic |
| | Reliability: 89 |
| COIL: | Lupas's algorithm to detect coiled-coil regions |
| | total: 0 residues |

Final Results (k = 9/23):

```
  39.1%: cytoplasmic
  30.4%: mitochondrial
  17.4%: nuclear
    8.7%: vesicles of secretory system
    4.3%: vacuolar
```

>> prediction for CG59490-01 is cyt (k = 23)

[0765] A search of the NOV71a protein against the Geneseq database, a proprietary database that contains sequences published in patents and patent publication, yielded several homologous proteins shown in Table 71D.

TABLE 71D
Geneseq Results for NOV71a

| | | NOV71a | Identities/ | |
|---|---|---|---|---|
| | | Residues/ | Similarities for | |
| Geneseq | Protein/Organism/Length | Match | the Matched | Expect |
| Identifier | [Patent #, Date] | Residues | Region | Value |
| AAE08591 | Human NOV12 protein - Homo | 1 . . . 220 | 220/220 (100%) | e−133 |
| | sapiens, 220 aa. [WO200161009- | 1 . . . 220 | 220/220 (100%) | |
| | A2, 23-AUG-2001] | | | |
| AAE14347 | Human protease PRTS-12 | 15 . . . 220 | 205/206 (99%) | e−123 |
| | protein - Homo sapiens, 262 aa. | 57 . . . 262 | 205/206 (99%) | |
| | [WO200183775-A2, 08-NOV- | | | |
| | 2001] | | | |
| AAE08590 | Human NOV11 protein - Homo | 16 . . . 220 | 204/205 (99%) | e−123 |
| | sapiens, 285 aa. [WO200161009- | 81 . . . 285 | 204/205 (99%) | |
| | A2, 23-AUG-2001] | | | |
| AAU82736 | Amino acid sequence of novel | 15 . . . 215 | 198/201 (98%) | e−118 |
| | human protease #35 - Homo | 211 . . . 411 | 198/201 (98%) | |
| | sapiens, 948 aa. [WO200200860- | | | |
| | A2, 03-JAN-2002] | | | |
| AAE08587 | Human NOV8 protein - Homo | 14 . . . 220 | 200/207 (96%) | e−118 |
| | sapiens, 290 aa. [WO200161009- | 84 . . . 290 | 200/207 (96%) | |
| | A2, 23-AUG-2001] | | | |

[0766] In a BLAST search of public sequence databases, the NOV71a protein was found to have homology to the proteins shown in the BLASTP data in Table 71E.

TABLE 71E
Public BLASTP Results for NOV71a

| | | NOV71a | Identities/ | |
|---|---|---|---|---|
| Protein | | Residues/ | Similarities for | |
| Accession | | Match | the Matched | Expect |
| Number | Protein/Organism/Length | Residues | Portion | Value |
| AAP21675 | Mast cell protease-11 - Mus | 16 . . . 217 | 118/202 (58%) | 2e−59 |
| | musculus (Mouse), 318 aa. | 86 . . . 284 | 142/202 (69%) | |
| AAA30855 | Mastin precursor - Canis sp, 251 | 16 . . . 218 | 110/203 (54%) | 9e−51 |
| | aa (fragment). | 53 . . . 249 | 127/203 (62%) | |
| P19236 | Mastocytoma protease precursor | 16 . . . 218 | 110/203 (54%) | 9e−51 |
| | (EC 3.4.21.—) - Canis | 71 . . . 267 | 127/203 (62%) | |
| | familiaris (Dog), 269 aa. | | | |
| Q8SQ44 | Tryptase precursor - Sus scrofa | 24 . . . 218 | 105/195 (53%) | 7e−49 |
| | (Pig), 277 aa. | 90 . . . 275 | 127/195 (64%) | |
| Q9XSM1 | Tryptase (EC 3.4.21.59) - Ovis | 14 . . . 218 | 89/205 (43%) | 1e−43 |
| | aries (Sheep), 273 aa. | 75 . . . 273 | 120/205 (58%) | |

[0767] PFam analysis indicates that the NOV71a protein contains the domains shown in the Table 71F.

TABLE 71F
Domain Analysis of NOV71a

| Pfam | NOV71a | Identities/Similarities | Expect |
|---|---|---|---|
| Domain | Match Region | for the Matched Region | Value |
| trypsin | 8 . . . 210 | 81/272 (30%) | 1.9e−32 |
| | | 152/272 (56%) | |

### Example 72

[0768] The NOV72 clone was analyzed, and the nucleotide and encoded polypeptide sequences are shown in Table 72A.

TABLE 72A
NOV72 Sequence Analysis

| | | |
|---|---|---|
| NOV72a, CG59693-01 | SEQ ID NO: 1047 | 972 bp |

| | | |
|---|---|---|
| DNA Sequence | ORF Start: ATG at 1 | ORF Stop: TAA at 970 |

ATGGATTCGAAATATCAGTGTGTGAAGCTGAATGATGGTCACTTCATGCCTGTCCTGGGATTTGGCAC
CTATGCGCCTGCAGAGGTTCCTAAAAGTAAAGCTTTAGAGGCCACCAAATTGGCAATTGAAGCTGGCT
TCCGCCATATTGATTCTGCTCATTTATACAATAATGAGGAGCAGGTTGGACTGGCCATCCGAAGCAAG
ATTGCAGATGGCAGTGTGAAGAGAGAAGACATATTCTACACTTCAAAGCTTTGGTGCAATTCCCATCG
ACCAGAGTTGGTCCGACCAGCCTTGGAAAGGTCACTGAAAAATCTTCAATTGGATTATGTTGACCTCT
ACCTTATTCATTTTCCAGTGTCTGTAAAGCCAGGTGAGGAAGTGATCCCAAAAGATGAAAATGGAAAA
ATACTATTTGACACAGTGGATCTCTGTGCCACGTGGGAGGCCGTGGAGAAGTGTAAAGATGCAGGATT
GGCCAAGTCCATCGGGGTGTCCAACTTCAACCGCAGGCAGCTGGAGATGATCCTCAACAAGCCAGGGC
TCAAGTACAAGCCTGTCTGCAACCAGGTGGAATGTCATCCTTACTTCAACCAGAGAAAACTGCTGGAT
TTCTGCAAGTCAAAAGACATTGTTCTGGTTGCCTATAGTGCTCTGGGATCCCACCGAGAAGAACCATG
GGTGGACCCGAACTCCCCGGTGCTCTTGGAGGACCCAGTCCTTTGTGCCTTGGCAAAAAAGCACAAGC
GAACCCCAGCCCTGATTGCCCTGCGCTACCAGCTACAGCGTGGGGTTGTGGTCCTGGCCAAGAGCTAC
AATGAGCAGCGCATCAGACAGAACGTGCAGGTGTTTGAATTCCAGTTGACTTCAGAGGAGATGAAAGC
CATAGATGGCCTAAACAGAAATGTGCGATATTTGACCCTTGATATTTTTGCTGGCCCCCCTAATTATC
CATTTTCTGATGAATATTAA

NOV72a, CG59693-01

| | | | |
|---|---|---|---|
| Protein Sequence | SEQ ID NO: 1048 | 323 aa | MW at 36787.9kD |

MDSKYQCVKLNDGHFMPVLGFGTYAPAEVPKSKALEATKLAIEAGFRHIDSAHLYNNEEQVGLAIRSK
IADGSVKREDIFYTSKLWCNSHRPELVRPALERSLKNLQLDYVDLYLIHFPVSVKPGEEVIPKDENGK
ILFDTVDLCATWEAVEKCKDAGLAKSIGVSNFNRRQLEMILNKPGLKYKPVCNQVECHPYFNQRKLLD
FCKSKDIVLVAYSALGSHREEPWVDPNSPVLLEDPVLCALAKKHKRTPALIALRYQLQRGVVVLAKSY
NEQRIRQNVQVFEFQLTSEEMKAIDGLNRNVRYLTLDIFAGPPNYPFSDEY

| | | |
|---|---|---|
| NOV72b, CG59693-03 | SEQ ID NO: 1049 | 972 bp |

| | | |
|---|---|---|
| DNA Sequence | ORF Start: ATG at 1 | ORF Stop: TAA at 970 |

ATGGATTCGAAATATCAGTGTGTGAAGCTGAATGATGGTCACTTCATGCCTGTCCTGGGATTTGGCAC
CTATGCGCCTGCAGAGGTTCCTAAAAGTAAAGCTTTAGAGGCCACCAAATTGGCAATTGAAGCTGGCT
TCCGCCATATTGATTCTGCTCATTTATACAATAATGAGGAGCAGGTTGGACTGGCCATCCGAAGCAAG
ATTGCAGATGGCAGTGTGAAGAGAGAAGACATATTCTACACTTCAAAGCTTTGGTGCAATTCCCATCG
ACCAGAGTTGGTCCGACCAGCCTTGGAAAGGTCACTGAAAAATCTTCAATTGGATTATGTTGACCTCT
ACCTTATTCATTTTCCAGTGTCTGTAAAGCCAGGTGAGGAAGTGATCCCAAAAGATGAAAATGGAAAA
ATACTATTTGACACAGTGGATCTCTGTGCCACGTGGGAGGCCGTGGAGAAGTGTAAAGATGCAGGATT
GGCCAAGTCCATCGGGGTGTCCAACTTCAACCGCAGGCAGCTGGAGATGATCCTCAACAAGCCAGGGC
TCAAGTACAAGCCTGTCTGCAACCAGGTGGAATGTCATCCTTACTTCAACCAGAGAAAACTGCTGGAT
TTCTGCAAGTCAAAAGACATTGTTCTGGTTGCCTATAGTGCTCTGGGATCCCACCGAGAAGAACCATG
GGTGGACCCGAACTCCCCGGTGCTCTTGGAGGACCCAGTCCTTTGTGCCTTGGCAAAAAAGCACAAGC
GAACCCCAGCCCTGATTGCCCTGCGCTACCAGCTACAGCGTGGGGTTGTGGTCCTGGCCAAGAGATAC
AATGAGCAGCGCATCAGACAGAACGTGCAGGTGTTTGAATTCCAGTTGACTTCAGAGGAGATGAAAGC
CATAGATGGCCTAAACAGAAATGTGCGATATTTGACCCTTGATATTTTTGCTGGCCCCCCTAATTATC
CATTTTCTGATGAATATTAA

NOV72b, CG59693-03

| | | | |
|---|---|---|---|
| Protein Sequence | SEQ ID NO: 1050 | 323 aa | MW at 36857.0kD |

MDSKYQCVKLNDGHFMPVLGFGTYAPAEVPKSKALEATKLAIEAGFRHIDSAHLYNNEEQVGLAIRSK
IADGSVKREDIFYTSKLWCNSHRPELVRPALERSLKNLQLDYVDLYLIHFPVSVKPGEEVIPKDENGK
ILFDTVDLCATWEAVEKCKDAGLAKSIGVSNFNRRQLEMILNKPGLKYKPVCNQVECHPYFNQRKLLD
FCKSKDIVLVAYSALGSHREEPWVDPNSPVLLEDPVLCALAKKHKRTPALIALRYQLQRGVVVLAKRY
NEQRIRQNVQVFEFQLTSEEMKAIDGLNRNVRYLTLDIFAGPPNYPFSDEY

| | | |
|---|---|---|
| NOV72c, 277637252 | SEQ ID NO: 1051 | 1001 bp |

| | | |
|---|---|---|
| DNA Sequence | ORF Start: at 8 | ORF Stop: TAA at 989 |

CATCTAGGCCACCATGGCCATGGATTCGAAATATCAGTGTGTGAAGCTGAATGATGGTCACTTCATGC
CTGTCCTGGGATTTGGCACCTATGCGCCTGCAGAGGTTCCTAAAAGTAAAGCTTTAGAGGCCACCAAA
TTGGCAATTGAAGCTGGCTTCCGCCATATTGATTCTGCTCATTTATACAATAATGAGGAGCAGGTTGG
ACTGGCCATCCGAAGCAAGATTGCAGATGGCAGTGTGAAGAGAGAAGACATATTCTACACTTCAAAGC
TTTGGTGCAATTCCCATCGACCAGAGTTGGTCCGACCAGCCTTGGAAAGGTCACTGAAAAATCTTCAA
TTGGATTATGTTGACCTCTACCTTATTCATTTTCCAGTGTCTGTAAAGCCAGGTGAGGAAGTGATCCC
AAAAGATGAAAATGGAAAAATACTATTTGACACAGTGGATCTCTGTGCCACGTGGGAGGCCGTGGAGA
AGTGTAAAGATGCAGGATTGGCCAAGTCCATCGGGGTGTCCAACTTCAACCGCAGGCAGCTGGAGATG
ATCCTCAACAAGCCAGGGCTCAAGTACAAGCCTGTCTGCAACCAGGTGGAATGTCATCCTTACTTCAA
CCAGAGAAAAGTGCTGGATTTCTGCAAGTCAAAAGACATTGTTCTGGTTGCCTATAGTGCTCTGGGAT
CCCACCGAGAAGAACCATGGGTGGACCCGAACTCCCCGGTGCTCTTGGAGGACCCAGTCCTTTGTGCC
TTGGCAAAAAGCACAAGCGAACCCCAGCCCTGATTGCCCTGCGCTACCCAGCTACAGCGTGGGGTTGT
GGTCCTGGCCAAGAGCTACAATGAGCAGCGCATCAGACAGAACGTGCAGGTGTTTGAATTCCAGTTGA
CTTCAGAGGAGATGAAAGCCATAGATGGCCTAAACAGAAATGTGCGATATTTGACCCTTGATATTTTT
GCTGGCCCCCCTAATTATCCATTTTCTGATGAATATTAAACGCGTGATC

NOV72c, 277637252

| | | | |
|---|---|---|---|
| Protein Sequence | SEQ ID NO: 1052 | 327 aa | MW at 37162.4kD |

ATMAMDSKYQCVKLNDGHFMPVLGFGTYAPAEVPKSKALEATKLAIEAGFRHIDSAHLYNNEEQVGLA
IRSKIADGSVKREDIFYTSKLWCNSHRPELVRPALERSLKNLQLDYVDLYLIHFPVSVKPGEEVIPKD
ENGKILFDTVDLCATWEAVEKCKDAGLAKSIGVSNFNRRQLEMILNKPGLKYKPVCNQVECHPYFNQR
KLLDFCKSKDIVLVAYSALGSHREEPWVDPNSPVLLEDPVLCALAKKHKRTPALIALRYQLQRGVVVL
AKSYNEQRIRQNVQVFEFQLTSEEMKAIDGLNRNVRYLTLDIFAGPPNYPFSDEY

| | | |
|---|---|---|
| NOV72d, CG59693-02 | SEQ ID NO: 1053 | 983 bp |

| | | |
|---|---|---|
| DNA Sequence | ORF Start: ATG at 30 | ORF Stop: TAA at 981 |

ATGGATTCGATATCAGTGTGTGAAGCTGAATGATGGTCACTTCGTGCCTGTCCTGGGATTTGGCACCT
ATGCGCCTGCAGAGGTTACTCCCCCAGGTTCCTAAAAGTAAAGCTTTAGAGGCCACCAAATTGGCAAT
TGAAGCTGGCTTCCGCCATATTGATTCTGCTCATTTATACAATAATGAGGAGCAGGTTGGACTGGCCA
TCCGAAGCAAGATTGCAGATGGCAGTGTGAAGAGAGAAGACATATTCTACACTTCAAAGCTTTGGTGC
AATTCCCATCGACCAGAGTTGGTCCGACCAGCCTTGGAAAGGTCACTGAAAAATCTTCAATTGGATTA
TGTTGACCTCTACCTTATTCATTTTCCAGTGTCTGTAAAGCCAGGTGAGGAAGTGATCCCAAAAGATG
AAGTGGAAAAATACTATTTGACACAGTGGATCTCTGTGCCACGTGCCAAGGCCGTGGAGAAGTGTAAA
GATGCAGGATTGGCCAAGTCCATCGGGGTGTCCAACTTCAACCGCAGGCAGCTGGAGATGATCCTCAA
CAAGCCAGGGCTCAAGTACAAGCCTGTCTGCAACCAGGTGGAATGTCATCCTTACTTCAACCAGAGAA
AACTGCTGGATTTCTGCAAGTCAAAAGACATTGTTCTGGTTGCCTATAGTGCTCTGGGATCCCACCGA
GAAGAACCATGGGTGGACCCGAACTCCCCGGTGCTCTTGGAGGACCCAGTCCTTTGTGCCTTGGCAAA
AAAGCACAAGCGAACCCCAGCCCTGGTTGCCCTGCGCTACCAGCTACAGCGTGGGGTTGTGGTCCTGG
CCAAGAGCTACAATGAGCAGCGCATCAGACAGAACGTGCAGGTGTTTGAATTCCAGTTGACTTCAGAG
GAGATGAAAGCCATAGATGGCCTAAACAGAAATGTGCGATATTTGACCCTTGATATTTTTGCTGGCCC
CCCTAATTATCCATTTTCTGATGAATATTAA

NOV72d, CG59693-02

| | | | |
|---|---|---|---|
| Protein Sequence | SEQ ID NO: 1054 | 317 aa | MW at 36217.5kD |

MMVTSCLSWDLAPMRLQRLLPQVPKSKALEATKLAIEAGRFHIDSAHLYNNEEQVGLAIRSKIADGSV
KREDIFYTSKLWCNSHRPELVRPALERSLKNLQLDYVDLYLIHFPVSVKPGEEVIPKDESGKILFDTV
DLCATWEAVEKCKDAGLAKSIGVSNFNRRQLEMILNKPGIKYKPVCNQVECHPYFNQRKLLDFCKSKD
IVLVAYSALGSHREEPWVDPNSPVLLEDPVLCALAKKHKRTPALVALRYQLQRGVVVIAKSYNEQRIR
QNVQVFEFQLTSEEMKAIDGLNRNVRYLTLDIFAGPPNYPFSDEY

| | | |
|---|---|---|
| NOV72e, CG59693-04 | SEQ ID NO: 1055 | 994 bp |

| | | |
|---|---|---|
| DNA Sequence | ORF Start: ATG at 16 | ORF Stop: at 979 |

GCCAGATCTCCCACCATGGATTCGAAATATCAGTGTGTGAAGCTGAATGATGGTCACTTCATGCCTGT
CCTGGGATTTGGCACCTATGCGCCTGCAGAGGTTCCTAAAAGTAAAGCTTTAGAGGCCACCAAATTGG
CAATTGAAGCTGGCTTCCGCCATATTGATTCTGCTCATTTATACAATAATGAGGAGCAGGTTGGACTG
GCCATCCGAAGCAAGATTGCAGATGGCAGTGTGAAGAGAGAAGACATATTCTACACTTCAAAGCTTTG
GTGCAATTCCCATCGACCAGAGTTGGTCCGACCAGCCTTGGAAAGGTCACTGAAAAATCTTCAATTGG
ATTATGTTGACCTCTACCTTATTCATTTTCCAGTGTCTGTAAAGCCAGGTGAGGAAGTGATCCCAAAA
GATGAAAATGGAAAAATACTATTTGACACAGTGGATCTCTGTGCCACGTGGGAGGCCGTGGAGAAGTG
TAAAGATGCAGGATTGGCCAAGTCCATCGGGGTGTCCAACTTCAACCGCAGGCAGCTGGAGATGATCC
TCAACAAGCCAGGGCTCAAGTACAAGCCTGTCTGCAACCAGGTGGAATGTCATCCTTACTTCAACCAG
AGAAAACTGCTGGATTTCTGCAAGTCAAAAGACATTGTTCTGGTTGCCTATAGTGCTCTGGGATCCCA
CCGAGAAGAACCATGGGTGGACCCGAACTCCCCGGTGCTCTTGGAGGACCCAGTCCTTTGTGCCTTGG
CAAAAAAGCACAAGCGAACCCCAGCCCTGATTGCCCTGCGCTACCAGCTACAGCGTGGGGTTGTGGTC
CTGGCCAAGAGCTACAATGAGCAGCGCATCAGACAGAACGTGCAGGTGTTTGAATTCCAGTTGACTTC
AGAGGAGATGAAAGCCATAGATGGCCTAAACAGAAATGTGCGATATTTGACCCTTGATATTTTTGCTG
GCCCCCCTAATTATCCATTTTCTGATGAATATGTCGAGGGTG

NOV72e, CG59693-04

| | | | |
|---|---|---|---|
| Protein Sequence | SEQ ID NO: 1056 | 321 aa | MW at 36495.6kD |

MDSKYQCVKLNDGHFMPVLGFGTYAPAEVPKSKALEATKLAIEAGFRHIDSAHLYNNEEQVGLAIRSK
IADGSVKREDIFYTSKLWCNSHRPELVRPALERSLKNLQLDYVDLYLIHFPVSVKPGEEVIPKDENGK
ILFDTVDLCATWEAVEKCKDAGLAKSIGVSNFNRRQLEMILNKPGLKYKPVCNQVECHPYFNQRKLLD
FCKSKDIVIVAYSALGSHREEPWVDPNSPVLLEDPVLCALAKKHKRTPALIALRYQLQRGVVVLAKSY
NEQRIRQNVQVFEFQLTSEEMKAIDGLNRNVRYLTLDIFAGPPNYPFSD

| | | |
|---|---|---|
| NOV72f, CG59693-05 | SEQ ID NO: 1057 | 1219 bp |

| | | |
|---|---|---|
| DNA Sequence | ORF Start: ATG at 24 | ORF Stop: TAA at 993 |

TGCTAACCAGGCCAGTGACAGAAATGGATTCGAAATACCAGTGTGTGAAGCTGAATGATGGTCACTTC
ATGCCTGTCCTGGGATTTGGCACCTATGCGCCTGCAGAGGTTCCTAAAAGTAAAGCTCTAGAGGCCGT
CAAATTGGCAATAGAAGCCGGGTTCCACCATATTGATTCTGCACATGTTTACAATAATGAGGAGCAGG
TTGGACTGGCCATCCGAAGCAAGATTGCAGATGGCAGTGTGAAGAGAGAAGACATATTCTACACTTCA
AAGCTTTGGAGCAATTCCCATCGACCAGAGTTGGTCCGACCAGCCTTGGAAAGGTCACTGAAAAATCT
TCAATTGGACTATGTTGACCTCTATCTTATTCATTTTCCAGTGTCTGTAAAGCCAGGTGAGGAAGTGA
TCCCAAAAGATGAAAATGGAAAAATACTATTTGACACAGTGGATCTCTGTGCCACGTGGGAGGCCATG
GAGAAGTGTAAAGATGCAGGATTGGCCAAGTCCATCGGGGTGTCCAACTTCAACCACAGGCTGCTGGA
GATGATCCTCAACAAGCCAGGGCTCAAGTACAAGCCTGTCTGCAACCAGGTGGAATGTCATCCTTACT
TCAACCAGAGAAAACTGCTGGATTTCTGCAAGTCAAAAGACATTGTTCTGGTTGCCTATAGTGCTCTG
GGATCCCATCGAGAAGAACCATGGGTGGACCCGAACTCCCCGGTGCTCTTGGAGGACCCAGTCCTTTG
TGCCTTGGCAAAAAAGCACAAGCGAACCCCAGCCCTGATTGCCCTGCGCTACCAGCTGCAGCGTGGGG
TTGTGGTCCTGGCCAAGAGCTACAATGAGCAGCGCATCAGACAGAACGTGCAGGTGTTTGAATTCCAG
TTGACTTCAGAGGAGATGAAAGCCATAGATGGCCTAAACAGAAATGTGCGATATTTGACCCTTGATAT
TTTTGCTGGCCCCCCTAATTATCCATTTTCTGATGAATATTAACATGGAGGGCATTGCATGAGGTCTG
CCAGAAGGCCCTGCGTGTGGATGGTGACACAGAGGATGGCTCTATGCTGGTGACTGGACACATCGCCT
CTGGTTAAATCTCTCCTGCTTGGCGACTTCAGTAAGCTACAGCTAAGCCCATCGGCCGGAAAAGAAAG
ACAATAATTTTGTTTTTTCATTTTGAAAAAATTAAATGCTCTCTCCTAAAGATTCTTCACCTA

NOV72f, CG59693-05

| | | | |
|---|---|---|---|
| Protein Sequence | SEQ ID NO: 1058 | 323 aa | MW at 36734.9kD |

MDSKYQCVKLNDGHFNPVLGFGTYAPAEVPKSKALEAVKLAIEAGFHHIDSAHVYNNEEQVGLAIRSK
IADGSVKREDIFYTSKLWSNSHRPELVRPALERSLKNLQLDYVDLYLIHFPVSVKPGEEVIPKDENGK
ILFDTVDLCATWEAMEKCKDAGLAKSIGVSNFNHRLLEMILNKPGLKYKPVCNQVECHPYFNQRKLLD
FCKSKDIVLVAYSALGSHREEPWVDPNSPVLLEDPVLCALAKKHKRTPALIALRYQLQRGVVVLAKSY
NEQRIRQNVQVFEFQLTSEEMKAIDGLNRNVRYLTLDIFAGPPNYPFSDEY

| | | |
|---|---|---|
| NOV72g, CG59693-06 | SEQ ID NO: 1059 | 1001 bp |

| | | |
|---|---|---|
| DNA Sequence | ORF Start: at 11 | ORF Stop: at 983 |

CATCTAGGCCACCATGGCCATGGATTCGAAATATCAGTGTGTGAAGCTGAATGATGGTCACTTCATGC
CTGTCCTGGGATTTGGCACCTATGCGCCTGCAGAGGTTCCTAAAAGTAAAGCTTTAGAGGCCACCAAA
TTGGCAATTGAAGCTGGCTTCCGCCATATTGATTCTGCTCATTTATACAATAATGAGGAGCAGGTTGG
ACTGGCCATCCGAAGCAAGATTGCAGATGGCAGTGTGAAGAGAGAAGACATATTCTACACTTCAAAGC
TTTGGTGCAATTCCCATCGACCAGAGTTGGTCCGACCAGCCTTGGAAAGGTCACTGAAAAATCTTCAA
TTGGATTATGTTGACCTCTACCTTATTCATTTTCCAGTGTCTGTAAAGCCAGGTGAGGAAGTGATCCC
AAAAGATGAAAATGGAAAAATACTATTTGACACAGTGGATCTCTGTGCCACGTGGGAGGCCGTGGAGA
AGTGTAAAGATGCAGGATTGGCCAAGTCCATCGGGGTGTCCAACTTCAACCGCAGGCAGCTGGAGATG
ATCCTCAACAAGCCAGGGCTCAAGTACAAGCCTGTCTGCAACCAGGTGGAATGTCATCCTTACTTCAA
CCAGAGAAAACTGCTGGATTTCTGCAAGTCAAAAGACATTGTTCTGGTTGCCTATAGTGCTCTGGGAT
CCCACCGAGAAGAACCATGGGTGGACCCGAACTCCCCGGTGCTCTTGGAGGACCCAGTCCTTTGTGCC
TTGGCAAAAAAGCACAAGCGAACCCCAGCCCTGATTGCCCTGCGCTACCAGCTACAGCGTGGGGTTGT
GGTCCTGGCCAAGAGCTACAATGAGCAGCGCATCAGACAGAACGTGCAGGTGTTTGAATTCCAGTTGA
CTTCAGAGGAGATGAAAGCCATAGATGGCCTAAACAGAAATGTGCGATATTTGACCCTTGATATTTTT
GCTGGCCCCCCTAATTATCCATTTTCTGATGAATATTAAACGCGTGATC

NOV72g, CG59693-06

| | | | |
|---|---|---|---|
| Protein Sequence | SEQ ID NO: 1060 | 324 aa | MW at 36799.0kD |

TMAMDSKYQCVKLNDGHFMPVLGFGTYAPAEVPKSKALEATKLAIEAGFRHIDSAHLYNNEEQVGLAI
RSKIADGSVKREDIFYTSKLWCNSHRPELVRPALERSLKNLQLDYVDLYLIHFPVSVKPGEEVIPKDE
NGKILFDTVDLCATWEAVEKCKDAGLAKSIGVSNFNRRQLEMILNKPGLKYKPVCNQVECHPYFNQRK
LLDFCKSKDIVLVAYSALGSHREEPWVDPNSPVLLEDPVLCALAKKHKRTPALIALRYQLQRGVVVLA
KSYNEQRIRQNVQVFEFQLTSEEMKAIDGLNRNVRYLTLDIFAGPPNYPFSD

| | | |
|---|---|---|
| NOV72h, CG59693-07 | SEQ ID NO: 1061 | 1012 bp |

| | | |
|---|---|---|
| DNA Sequence | ORF Start: at 1 | ORF Stop: at 1012 |

GCCGGTACCACCATGGGCCACCATCACCACCATCACGATTCGAAATATCAGTGTGTGAAGCTGAATGA
TGGTCACTTCATGCCTGTCCTGGGATTTGGCACCTATGCGCCTGCAGAGGTTCCTAAAAGTAAAGCTT
TAGAGGCCACCAAATTGGCAATTGAAGCTGGCTTCCGCCATATTGATTCTGCTCATTTATACAATAAT
GAGGAGCAGGTTGGACTGGCCATCCGAAGCAAGATTGCAGATGGCAGTGTGAAGAGAGAAGACATATT
CTACACTTCAAAGCTTTGGTGCAATTCCCATCGACCAGAGTTGGTCCGACCAGCCTTGGAAAGGTCAC
TGAAAAATCTTCAATTGGATTATGTTGACCTCTACCTTATTCATTTTCCAGTGTCTGTAAAGCCAGGT
GAGGAAGTGATCCCAAAAGATGAAAATGGAAAAATACTATTTGACACAGTGGATCTCTGTGCCACGTG
GGAGGCCGTGGAGAAGTGTAAAGATGCAGGATTGGCCAAGTCCATCGGGGTGTCCAACTTCAACCGCA
GGCAGCTGGAGATGATCCTCAACAAGCCAGGGCTCAAGTACAAGCCTGTCTGCAACCAGGTGGAATGT
CATCCTTACTTCAACCAGAGAAAACTGCTGGATTTCTGCAAGTCAAAAGACATTGTTCTGGTTGCCTA
TAGTGCTCTGGGATCCCACCGAGAAGAACCATGGGTGGACCCGAACTCCCCGGTGCTCTTGGAGGACC
CAGTCCTTTGTGCCTTGGCAAAAAAGCACAAGCGAACCCCAGCCCTGATTGCCCTGCGCTACCAGCTA
CAGCGTGGGGTTGTGGTCCTGGCCAAGAGCTACAATGAGCAGCGCATCAGACAGAACGTGCAGGTGTT
TGAATTCCAGTTGACTTCAGAGGAGATGAAAGCCATAGATGGCCTAAACAGAAATGTGCGATATTTGA
CCCTTGATATTTTTGCTGGCCCCCCTAATTATCCATTTTCTGATGAATATCTCGAGGGTG

NOV72h, CG59693-07

| | | | |
|---|---|---|---|
| Protein Sequence | SEQ ID NO: 1062 | 337 aa | MW at 38297.5kD |

AGTTMGHHHHHHDSKYQCVKLNDGHFMPVLGFGTYAPAEVPKSKALEATKLAIEAGFRHIDSAHLYNN
EEQVGLAIRSKIADGSVKREDIFYTSKLWCNSHRPELVRPALERSLKNLQLDYVDLYLIHFPVSVKPG
EEVIPKDENGKILFDTVDLCATWEAVEKCKDAGLAKSIGVSNFNRRQLEMILNKPGLKYKPVCNQVEC
HPYFNQRKLLDFCKSKDIVLVAYSALGSHREEPWVDPNSPVLLEDPVLCALAKKHKRTPALIALRYQL
QRGVVVLAKSYNEQRIRQNVQVFEFQLTSEEMKAIDGLNRNVRYLTLDIFAGPPNYPFSDEYLEG

| | | |
|---|---|---|
| NOV72i, CG59693-08 | SEQ ID NO: 1063 | 1225 bp |

| | | |
|---|---|---|
| DNA Sequence | ORF Start: ATG at 24 | ORF Stop: TAA at 993 |

TGCTAACCAGGCCAGTGACAGAAATGGATTCGAAATACCAGTGTGTGAAGCTGAATGATGGTCACTTC
ATGCCTGTCCTGGGATTTGGCACCTATGCGCCTGCAGAGGTTCCTAAAAGTAAAGCTCTAGAGGCCGT
CAAATTGGCAATAGAAGCCGGGTTCCACCATATTGATTCTGCACATGTTTACAATAATGAGGAGCAGG
TTGGACTGGCCATCCGAAGCAAGATTGCAGATGGCAGTGTGAAGAGAGAAGACATATTCTACACTTCA
AAGCTTTGGAGCAATTCCCATCGACCAGAGTTGGTCCGACCAGCCTTGGAAAGGTCACTGAAAAATCT
TCAATTGGACTATGTTGACCTCTATCTTATTCATTTTCCAGTGTCTGTAAAGCCAGGTGAGGAAGTGA
TCCCAAAAGATGAAAATGGAAAAATACTATTTGACACAGTGGATCTCTGTGCCACGTGGGAGGCCATG
GAGAAGTGTAAAGATGCAGGATTGGCCAAGTCCATCGGGGTGTCCAACTTCAACCACAGGCTGCTGGA
GATGATCCTCAACAAGCCAGGGCTCAAGTACAAGCCTGTCTGCAACCAGGTGGAATGTCATCCTTACT
TCAACCAGAGAAAACTGCTGGATTTCTGCAAGTCAAAAGACATTGTTCTGGTTGCCTATAGTGCTCTG
GGATCCCATCGAGAAGAACCATGGGTGGACCCGAACTCCCCGGTGCTCTTGGAGGACCCAGTCCTTTG
TGCCTTGGCAAAAAAGCACAAGCGAACCCCAGCCCTGATTGCCCTGCGCTACCAGCTGCAGCGTGGGG
TTGTGGTCCTGGCCAAGAGCTACAATGAGCAGCGCATCAGACAGAACGTGCAGGTGTTTGAATTCCAG
TTGACTTCAGAGGAGATGAAAGCCATAGATGGCCTAAACAGAAATGTGCGATATTTGACCCTTGATAT
TTTTGCTGGCCCCCCTAATTATCCATTTTCTGATGAATATTAACATGGAGGGCATTGCATGAGGTCTG
CCAGAAGGCCCTGCGTGTGGATGGTGACACAGAGGATGGCTCTATGCTGGTGACTGGACACATCGCCT
CTGGTTAAATCTCTCCTGCTTGGCGACTTCAGTAAGCTACAGCTAAGCCCATCGGCCGGAAAAGAAAG
ACAATAATTTTGTTTTTTCATTTTGAAAAAATTAAATGCTCTCTCCTAAAGATTCTTCACCTAAAAAA
A

NOV72i, CG59693-08

| | | | |
|---|---|---|---|
| Protein Sequence | SEQ ID NO: 1064 | 323 aa | MW at 36734.9kD |

MDSKYQCVKLNDGHFMPVLGFGTYAPAEVPKSKALEAVKLAIEAGFHHIDSAHVYNNEEQVGLAIRSK
IADGSVKREDIFYTSKLWSNSHRPELVRPALERSLKNLQLDYVDLTLIHFPVSVKPGEEVIPKDENGK
ILFDTVDLCATWEAMEKCKDAGLAKSIGVSNFNHRLLEMILNKPGLKYKPVCNQVECHPYFNQRKLLD
FCKSKDIVLVAYSALGSHREEPWVDPNSPVLLEDPVLCALAKKHKRTPALIALRYQLQRGVVVLAKSY
NEQRIRQNVQVFEFQLTSEEMKAIDGLNRNVRYLTLDIFAGPPNYPFSDEY

| | | |
|---|---|---|
| NOV72j, CG59693-09 | SEQ ID NO: 1065 | 996 bp |

| | | |
|---|---|---|
| DNA Sequence | ORF Start: ATG at 16 | ORF Stop: TAG at 985 |

CACCGCGGCCGCACCATGGATTCGAAATATCAGTGTGTGAAGCTGAATGATGGTCACTTCATGCCTGT
CCTGGGATTTGGCACCTATGCGCCTGCAGAGGTTCCTAAAAGTAAAGCTTTAGAGGCCACCAAATTGG
CAATTGAAGCTGGCTTCCGCCATATTGATTCTGCTCATTTATACAATAATGAGGAGCAGGTTGGACTG
GCCATCCGAAGCAAGATTGCAGATGGCAGTGTGAAGAGAGAAGACATATTCTACACTTCAAAGCTTTG
GTGCAATTCCCATCGACCAGAGTTGGTCCGACCAGCCTTGGAAAGGTCACTGAAAAATCTTCAATTGG
ATTATGTTGACCTCTACCTTATTCATTTTCCAGTGTCTGTAAAGCCAGGTGAGGAAGTGATCCCAAAA
GATGAAAATGGAAAAATACTATTTGACACAGTGGATCTCTGTGCCACGTGGGAGGCCGTGGAGAAGTG
TAAAGATGCAGGATTGGCCAAGTCCATCGGGGTGTCCAACTTCAACCGCAGGCAGCTGGAGATGATCC
TCAACAAGCCAGGGCTCAAGTACAAGCCTGTCTGCAACCAGGTGGAATGTCATCCTTACTTCAACCAG
AGAAAACTGCTGGATTTCTGCAAGTCAAAAGACATTGTTCTGGTTGCCTATAGTGCTCTGGGATCCCA
CCGAGAAGAACCATGGGTGGACCCGAACTCCCCGGTGCTCTTGGAGGACCCAGTCCTTTGTGCCTTGG
CAAAAAAGCACAAGCGAACCCCAGCCCTGATTGCCCTGCGCTACCAGCTACAGCGTGGGGTTGTGGTC
CTGGCCAAGAGCTACAATGAGCAGCGCATCAGACAGAACGTGCAGGTGTTTGAATTCCAGTTGACTTC
AGAGGAGATGAAAGCCATAGATGGCCTAAACAGAAATGTGCGATATTTGACCCTTGATATTTTTGCTG
GCCCCCCTAATTATCCATTTTCTGATGAATATTAGGTCGACGGC

NOV72j, CG59693-09

| | | | |
|---|---|---|---|
| Protein Sequence | SEQ ID NO: 1066 | 323 aa | MW at 36787.9kD |

MDSKYQCVKLNDGHFMPVLGFGTYAPAEVPKSKALEATKLAIEAGFRHIDSAHLYNEEQVGLAIRSK
IADGSVKREDIFYTSKLWNSHRPELVRPALERSLKNLQLDYVDLYLIHFPVSVKPGEEVIPKDENGK
ILFDTVDLCATWEAVEKCKDAGLAKSIGVSNFNRRQLEMILNKPGLKYKPVCNQVECHPYFNQRKLLD
FCKSKDIVLVAYSALGSHREEPWVDPNSPVLLEDPVLCALAKKHKRTPALIALRYQLQRGVVVLAKSY
NEQRIRQNVQVFEFQLTSEEMKAIDGLNRNVRYLTLDIFAGPPNYPFSDEY

[0769] A ClustalW comparison of the above protein sequences yields the following sequence alignment shown in Table 72B.

TABLE 72B
Comparison of the NOV72 protein sequences.

| | |
|---|---|
| NOV72a | -----------MDSKYQCVKLNDGHFNPVLGFGTYAPAEVPKSKALEATKLAIEAGFRHI |
| NOV72b | -----------MDSKYQCVKLNDGHFMPVLGFGTYAPAEVPKSKALEATKLAIEAGFRHI |
| NOV72c | -------ATMAMDSKYQCVKLNDGHFMPVLGFGTYAPAEVPKSKALEATKLAIEAGFRHI |
| NOV72d | ----------------MMVTSCLSWDLAPMRLQRLLP-QVPKSKALEATKLAIEAGFRHI |
| NOV72e | -----------MDSKYQCVKLNDGHFNPVLGFGTYAPAEVPKSKALEATKLAIEAGFRHI |
| NOV72f | -----------MDSKYQCVKLNDGHFMPVLGFGTYAPAEVPKSKALEATKLAIEAGFHHI |
| NOV72g | --------TMAMDSKYQCVKLNDGHFMPVLGFGTYAPAEVPKSKALEATKLAIEAGFRHI |
| NOV72h | AGTTMGHHHHHHDSKYQCVKLNDGHFMPVLGFGTYAPAEVPKSKALEATKLAIEAGFRHI |
| NOV72i | -----------MDSKYQCVKLNDGHFMPVLGFGTYAPAEVPKSKALEAVKLAIEAGFHHI |
| NOV72j | -----------MDSKYQCVKLNDGHFMPVLGFGTYAPAEVPKSKALEATKLAIEAGFRHI |
| NOV72a | DSAHLYNNEEQVGLAIRSKIADGSVKREDIFYTSKLWCNSHRPELVRPALERSLKNLQLD |
| NOV72b | DSAHLYNNEEQVGLAIRSKIADGSVKREDIFYTSKLWCNSHRPELVRPALERSLKNLQLD |
| NOV72c | DSAHLYNNEEQVGLAIRSKIADGSVKREDIFYTSKLWCNSHRPELVRPALERSLKNLQLD |
| NOV72d | DSAHLYNNEEQVGLAIRSKIADGSVKREDIFYTSKLWCNSHRPELVRPALERSLKNLQLD |
| NOV72e | DSAHLYNNEEQVGLAIRSKIADGSVKREDIFYTSKLWCNSHRPELVRPALERSLKNLQLD |
| NOV72f | DSAHLYNNEEQVGLAIRSKIADGSVKREDIFYTSKLWCNSHRPELVRPALERSLKNLQLD |
| NOV72g | DSAHLYNNEEQVGLAIRSKIADGSVKREDIFYTSKLWCNSHRPELVRPALERSLKNLQLD |
| NOV72h | DSAHLYNNEEQVGLAIRSKIADGSVKREDIFYTSKLWCNSHRPELVRPALERSLKNLQLD |
| NOV72i | DSAHVYNNEEQVGLAIRSKIADGSVKREDIFYTSKLWCNSHRPELVRPALERSLKNLQLD |
| NOV72j | DSAHLYNNEEQVGLAIRSKIADGSVKREDIFYTSKLWCNSHRPELVRPALERSLKNLQLD |
| NOV72a | YVDLYLIHFPVSVKPGEEVIPKDENGKILFDTVDLCATWEAVEKCKDAGLAKSIGVSNFN |
| NOV72b | YVDLYLIHFPVSVKPGEEVIPKDENGKILFDTVDLCATWEAVEKCKDAGLAKSIGVSNFN |
| NOV72c | YVDLYLIHFPVSVKPGEEVIPKDENGKILFDTVDLCATWEAVEKCKDAGLAKSIGVSNFN |
| NOV72d | YVDLYLIHFPVSVKPGEEVIPKDENGKILFDTVDLCATWEAVEKCKDAGLAKSIGVSNFN |
| NOV72e | YVDLYLIHFPVSVKPGEEVIPKDENGKILFDTVDLCATWEAVEKCKDAGLAKSIGVSNFN |
| NOV72f | YVDLYLIHFPVSVKPGEEVIPKDENGKILFDTVDLCATWEAMEKCKDAGLAKSIGVSNFN |
| NOV72g | YVDLYLIHFPVSVKPGEEVIPKDENGKILFDTVDLCATWEAVEKCKDAGLAKSIGVSNFN |
| NOV72h | YVDLYLIHFPVSVKPGEEVIPKDENGKILFDTVDLCATWEAVEKCKDAGLAKSIGVSNFN |
| NOV72i | YVDLYLIHFPVSVKPGEEVIPKDENGKILFDTVDLCATWEAMEKCKDAGLAKSIGVSNFN |
| NOV72j | YVDLYLIHFPVSVKPGEEVIPKDENGKILFDTVDLCATWEAVEKCKDAGLAKSIGVSNFN |
| NOV72a | RRQLEMILNKPGLKYKPVCNQVECHPYFNQRKLLDFCKSKDIVLVAYSALGSHREEPWVD |
| NOV72b | RRQLEMILNKPGLKYKPVCNQVECHPYFNQRKLLDFCKSKDIVLVAYSALGSHREEPWVD |
| NOV72c | RRQLEMILNKPGLKYKPVCNQVECHPYFNQRKLLDFCKSKDIVLVAYSALGSHREEPWVD |
| NOV72d | RRQLEMILNKPGLKYKPVCNQVECHPYFNQRKLLDFCKSKDIVLVAYSALGSHREEPWVD |
| NOV72e | RRQLEMILNKPGLKYKPVCNQVECHPYFNQRKLLDFCKSKDIVLVAYSALGSHREEPWVD |
| NOV72f | HRLLEMILNKPGLKYKPVCNQVECHPYFNQRKLLDFCKSKDIVLVAYSALGSHREEPWVD |
| NOV72g | RRQLEMILNKPGLKYKPVCNQVECHPYFNQRKLLDFCKSKDIVLVAYSALGSHREEPWVD |
| NOV72h | RRQLEMILNKPGLKYKPVCNQVECHPYFNQRKLLDFCKSKDIVLVAYSALGSHREEPWVD |
| NOV72i | HRLLEMILNKPGLKYKPVCNQVECHPYFNQRKLLDFCKSKDIVLVAYSALGSHREEPWVD |
| NOV72j | RRQLEMILNKPGLKYKPVCNQVECHPYFNQRKLLDFCKSKDIVLVAYSALGSHREEPWVD |
| NOV72a | PNSPVLLEDPVLCALADDHKRTPALIALRYQLQRGVVVLAKSYNEQRIRQNVQVFEFQLT |
| NOV72b | PNSPVLLEDPVLCALADDHKRTPALIALRYQLQRGVVVLAKRYNEQRIRQNVQVFEFQLT |
| NOV72c | PNSPVLLEDPVLCALADDHKRTPALIALRYQLQRGVVVLAKSYNEQRIRQNVQVFEFQLT |
| NOV72d | PNSPVLLEDPVLCALADDHKRTPALIALRYQLQRGVVVLAKSYNEQRIRQNVQVFEFQLT |
| NOV72e | PNSPVLLEDPVLCALADDHKRTPALIALRYQLQRGVVVLAKSYNEQRIRQNVQVFEFQLT |
| NOV72f | PNSPVLLEDPVLCALADDHKRTPALIALRYQLQRGVVVLAKSYNEQRIRQNVQVFEFQLT |
| NOV72g | PNSPVLLEDPVLCALADDHKRTPALIALRYQLQRGVVVLAKSYNEQRIRQNVQVFEFQLT |
| NOV72h | PNSPVLLEDPVLCALADDHKRTPALIALRYQLQRGVVVLAKSYNEQRIRQNVQVFEFQLT |
| NOV72i | PNSPVLLEDPVLCALADDHKRTPALIALRYQLQRGVVVLAKSYNEQRIRQNVQVFEFQLT |
| NOV72j | PNSPVLLEDPVLCALADDHKRTPALIALRYQLQRGVVVLAKSYNEQRIRQNVQVFEFQLT |
| NOV72a | SEEMKAIDGLNRNVRYLTLDIFAGPPNYPFSDEY--- |
| NOV72b | SEEMKAIDGLNRNVRYLTLDIFAGPPNYPFSDEY--- |
| NOV72c | SEEMKAIDGLNRNVRYLTLDIFAGPPNYPFSDEY--- |
| NOV72d | SEEMKAIDGLNRNVRYLTLDIFAGPPNYPFSDEY--- |
| NOV72e | SEEMKAIDGLNRNVRYLTLDIFAGPPNYPFSD----- |
| NOV72f | SEEMKAIDGLNRNVRYLTLDIFAGPPNYPFSDEY--- |
| NOV72g | SEEMKAIDGLNRNVRYLTLDIFAGPPNYPFSD----- |
| NOV72h | SEEMKAIDGLNRNVRYLTLDIFAGPPNYPFSDEYLEG |
| NOV72i | SEEMKAIDGLNRNVRYLTLDIFAGPPNYPFSDEY--- |
| NOV72j | SEEMKAIDGLNRNVRYLTLDIFAGPPNYPFSDEY--- |
| NOV72a | (SEQ ID NO: 1048) |
| NOV72b | (SEQ ID NO: 1050) |
| NOV72c | (SEQ ID NO: 1052) |
| NOV72d | (SEQ ID NO: 1054) |
| NOV72e | (SEQ ID NO: 1056) |
| NOV72f | (SEQ ID NO: 1058) |
| NOV72g | (SEQ ID NO: 1060) |
| NOV72h | (SEQ ID NO: 1062) |
| NOV72i | (SEQ ID NO: 1064) |
| NOV72j | (SEQ ID NO: 1066) |

[0770] Further analysis of the NOV72a protein yielded the following properties shown in Table 72C.

TABLE 72C
Protein Sequence Properties NOV72a

| | |
|---|---|
| SignalP analysis: | No Known Signal Sequence Indicated |

PSORT II analysis:

| PSG: | a new signal peptide prediction method | | | |
|---|---|---|---|---|
| | N-region: | length 9; | pos.chg 2; | neg.chg 1 |
| | H-region: | length 2; | peak value | −3.30 |
| | PSG score: | −7.70 | | |

| | |
|---|---|
| GvH: | von Heijne's method for signal seq. recognition |
| | GvH score (threshold: −2.1): −5.32 |
| | possible cleavage site: between 27 and 28 |

>>> Seems to have no N-terminal signal peptide

| | |
|---|---|
| ALOM: | Klein et al's method for TM region allocation |
| | Init position for calculation: 1 |
| | Tentative number of TMS(s) for the threshold 0.5: 0 |
| | number of TMS(s) . . . fixed |
| | PERIPHERAL Likelihood = 3.66 (at 253) |
| | ALOM score: 3.66 (number of TMSs: 0) |

MITDISC: discrimination of mitochondrial targeting seq

| | | | |
|---|---|---|---|
| R content: | 0 | Hyd Moment(75): | 0.10 |
| Hyd Moment(95): | 4.27 | G content: | 0 |
| D/E content: | 2 | S/T content: | 1 |
| Score: −7.79 | | | |

Gavel: prediction of cleavage sites for mitochondrial preseq

cleavage site motif not found

NUCDISC: discrimination of nuclear localization signals

pat4: KKHK (3) at 246
pat4: KHKR (3) at 247
pat7: none
bipartite: none
content of basic residues: 13.3%
NLS Score: −0.10

KDEL: ER retention motif in the C-terminus: none
ER Membrane Retention Signals: none
SKL: peroxisomal targeting signal in the C-terminus: none
PTS2: 2nd peroxisomal targeting signal: none
VAC: possible vacuolar targeting motif: none
RNA-binding motif: none
Actinin-type actin-binding motif:

type 1: none
type 2: none

NMYR: N-myristoylation pattern: none
Prenylation motif: none
memYQRL: transport motif from cell surface to Golgi: none
Tyrosines in the tail: none
Dileucine motif in the tail: none
checking 63 PROSITE DNA binding motifs: none
checking 71 PROSITE ribosomal protein motifs: none
checking 33 PROSITE prokaryotic DNA binding motifs: none

| | |
|---|---|
| NNCN: | Reinhardt's method for Cytoplasmic/Nuclear discrimination |
| | Prediction: cytoplasmic |
| | Reliability: 76.7 |
| COIL: | Lupas's algorithm to detect coiled-coil regions |
| | total: 0 residues |

Final Results (k = 9/23):

```
  34.8%: cytoplasmic
  30.4%: mitochondrial
  30.4%: nuclear
    4.3%: vacuolar
```

>> prediction for CG59693-01 is cyt (k = 23)

[0771] A search of the NOV72a protein against the Geneseq database, a proprietary database that contains sequences published in patents and patent publication, yielded several homologous proteins shown in Table 72D.

TABLE 72D
Geneseq Results for NOV72a

| | | NOV72a | Identities/ | |
|---|---|---|---|---|
| | | Residues/ | Similarities for | |
| Geneseq | Protein/Organism/Length | Match | the Matched | Expect |
| Identifier | [Patent #, Date] | Residues | Region | Value |
| AAB43444 | Human cancer associated protein | 1 . . . 323 | 318/323 (98%) | 0.0 |
| | sequence SEQ ID NO: 889 - Homo | 14 . . . 336 | 318/323 (98%) | |
| | sapiens, 336 aa. [WO200055350- | | | |
| | A1, 21-SEP-2000] | | | |
| AAU85559 | Clone #59314 (L1426P) of lung | 1 . . . 323 | 311/323 (96%) | 0.0 |
| | tumour protein - Homo sapiens, | 1 . . . 323 | 316/323 (97%) | |
| | 323 aa. [WO200204514-A2, 17- | | | |
| | JAN-2002] | | | |
| ABB75050 | Human lung tumour L773P | 29 . . . 323 | 288/295 (97%) | e−168 |
| | recombinant protein sequence | 77 . . . 371 | 290/295 (97%) | |
| | SEQ ID NO: 433 - Homo sapiens, | | | |
| | 371 aa. [WO200200174-A2, 03- | | | |
| | JAN-2002] | | | |
| ABB74958 | Human lung tumour L773P | 29 . . . 323 | 288/295 (97%) | e−168 |
| | protein sequence SEQ ID NO: 172 - | 70 . . . 364 | 290/295 (97%) | |
| | Homo sapiens, 364 aa. | | | |
| | [WO200200174-A2, 03-JAN- | | | |
| | 2002] | | | |
| AAU85520 | L773P lung tumour protein - | 29 . . . 323 | 288/295 (97%) | e−168 |
| | Homo sapiens, 364 aa. | 70 . . . 364 | 290/295 (97%) | |
| | [WO200204514-A2, 17-JAN- | | | |
| | 2002] | | | |

[0772] In a BLAST search of public sequence databases, the NOV72a protein was found to have homology to the proteins shown in the BLASTP data in Table 72E.

TABLE 72E
Public BLASTP Results for NOV72a

| | | NOV72a | Identities/ | |
|---|---|---|---|---|
| Protein | | Residues/ | Similarities for | |
| Accession | | Match | the Matched | Expect |
| Number | Protein/Organism/Length | Residues | Portion | Value |
| Q04828 | Aldo-keto reductase family 1 | 1 . . . 323 | 323/323 (100%) | 0.0 |
| | member C1 (EC 1.1.1.—) (Trans-1,2- | 1 . . . 323 | 323/323 (100%) | |
| | dihydrobenzene-1,2-diol | | | |
| | dehydrogenase) (EC 1.3.1.20) (High- | | | |
| | affinity hepatic bile acid-binding | | | |
| | protein) (HBAB) (Chlordecone | | | |
| | reductase homolog HAKRC) | | | |
| | (Dihydrodiol dehydrogenase 2) | | | |
| | (DD2) (20 alpha-hydroxysteroid | | | |
| | dehydrogenase) - Homo sapiens | | | |
| | (Human), 323 aa. | | | |
| P52895 | Aldo-keto reductase family 1 | 1 . . . 323 | 316/323 (97%) | 0.0 |
| | member C2 (EC 1.1.1.—) (Trans-1,2- | 1 . . . 323 | 318/323 (97%) | |
| | dihydrobenzene-1,2-diol | | | |
| | dehydrogenase) (EC 1.3.1.20) | | | |
| | (Chlordecone reductase homolog | | | |
| | HAKRD) (Dihydrodiol | | | |
| | dehydrogenase/bile acid-binding | | | |
| | protein) (DD/BABP) (Dihydrodiol | | | |
| | dehydrogenase 2) (DD2) - Homo | | | |
| | sapiens (Human), 323 aa. | | | |
| I73676 | chlordecone reductase homolog | 1 . . . 323 | 313/323 (96%) | 0.0 |
| | (clone HAKRd) - human, 323 aa. | 1 . . . 323 | 317/323 (97%) | |
| I73675 | chlordecone reductase homolog | 4 . . . 323 | 312/320 (97%) | 0.0 |
| | (clone HAKRc) - human, 320 aa | 1 . . . 320 | 313/320 (97%) | |
| | (fragment). | | | |
| Q95JH6 | 3(20)alpha- | 1 . . . 323 | 304/323 (94%) | 0.0 |
| | hydroxysteroid/dihydrodiol/indanol | 1 . . . 323 | 319/323 (98%) | |
| | dehydrogenase (EC 1.1.1.112) - | | | |
| | Macaca fuscata (Japanese macaque), | | | |
| | 323 aa. | | | |

[0773] PFam analysis indicates that the NOV72a protein contains the domains shown in the Table 72F.

TABLE 72F
Domain Analysis of NOV72a

| | NOV72a | Identities/Similarities | Expect |
|---|---|---|---|
| Pfam Domain | Match Region | for the Matched Region | Value |
| aldo_ket_red | 10 . . . 303 | 164/369 (44%) | 3.4e−156 |
| | | 274/369 (74%) | |

### Example 73

[0774] The NOV73 clone was analyzed, and the nucleotide and encoded polypeptide sequences are shown in Table 73A.

TABLE 73A
NOV73 Sequence Analysis

| | | |
|---|---|---|
| NOV73a, CG59839-02 | SEQ ID NO: 1067 | 4052 bp |

| | | |
|---|---|---|
| DNA Sequence | ORF Start: ATG at 786 | ORF Stop: TAG at 4023 |

CTTCTGCCTCAGCCTCCCGAGTAGCTGGGATGGGACTACAGATGCACGCCACCACACCTGGCAATTTT
TTTTAGTTTTGTGGAGACAAGGTCCCATGTGAGCCACTGTGCCCCACCTTTTAAAGAAATTACCATAA
GGAAGCAACTGTCTTTAGCAAATAGAAGATCATAAACATCCTTCTGGAGATCTTGAGATGTTGACTGC
GGTTTATAGGGCAATGAAAATCTGCCTACCTGAGTGGGCAATGAGACGGGAGTGCCACCTGTGATCCT
TCCAGGGAGCAATTCTTTCTGGTGCCAGGAGCCCAAAGGAAACTCAGTCAACAAGCTACAGATGGGCT
TGCTCCGAGTTTGTTCTAGAAGTCAGAACTGCCAGCTCTGAAAATAGGTCACAAGTGACAGGCCGTCC
CTGGGCTGCTCACAGGAAGTAGCTGCAAAGGTCAGGGAAAGTTTTTAACGACTATACAGGCCAGTGAA
TGACAGGCTTTGAGGAGCTTCTCTTCTTGGCATCTGAAACAGCATACTTTCTGACTACCGCTGTGTGC
TGTGAGGGGCTGAGGATCCAGACGTGGCTGAGGAAGGTCCCGGCTCATGAGGAGGTGGAAGCCTGGGT
GCTTAAACAGATAATCCAGAGTTTGGATGTGAGGTGGTGAATCACTCTGGCTTCATTTGGTTATACTG
GTCAAGAGTTTGGCTCTGGAGCAACGTGTCTGGGTTTGAATCCTGGCTGTGCTTTTGGTGATCCTCCA
TTGTTTTGAAGCACAAGACCTTTAAACCACTGTAGGTATGGACAAGGAAGAAAGGAAGATCATCAATC
AGGGTCAAGAAGATGAAATGGAGATTTATGGTTACAATTTGAGTCGCTGGAAGCTTGCCATAGTTTCT
TTAGGAGTGATTTGCACTGGTGGGTTTCTCCTCCTCCTCCTCTATTGGATGCCTGAGTGGCGGGTGAA
AGCGACCTGTGTCAGAGCTGCAATTAAAGACTGTGACGTAGTGCTGCTGAGGACTACTGATGAATTCA
AAATGTGGTTTTGTGCAAAAATTCGCGTTCTTTCTTTGGAAACTCACCCAATTTCAAGTCCAAAATCT
ATGTCTAATAAGCTTTCAAATGGCCATGCAGTTTGTTTAACTGAGAATCCCACTGGAGAAAATAGGCA
CGGGATCAGTAAATATTCACAGGCTGAATCACAACAGATTCGTTATTTCACCCATCATAGTGTAAAAT
ATTTCTGGAATGATACCATTCACAATTTTGATTTCTTAAAGGGACTGGATGAAGGTGTTTCTTGTACG
TCAATTTATGAAAAGCATAGTGCAGGACTGACAAAGGGGATGCATGCCTACAGAAAACTGCTTTATGG
AGTAAATGAAATTGCTGTAAAAGTGCCTTCTGTTTTTAAGCTTCTAATTAAAGAGGTTCTCAACCCAT
TTTACATTTTCCAGCTGTTCAGTGTTATACTGTGGAGCACTGATGAATACTATTACTATGCTCTAGCT
ATTGTGGTTATGTCCATAGTATCAATCTGTAGCTCACTGTATTCCATTAGAAAGCAATATGTTATGTT
GCATGACATGGTGGCAACTCATAGTACTGTAAGAGTTTCAGTTTGTAGAGTAAATGAAGAAATAGAAG
AAATCTTTTCTACTGACCTTGTGCCAGGAGATGTCATGGTCATTCCATTAAATGGGACAATAATGCCT
TGCGATGCTGTACTTATTAATGGTACCTGCATTGTAAATGAAAGCATGTTAACAGGAGAAAGTGTTCC
AGTGACAAAGACTAACTTGCCAAATCCTTCGGTGGATGTGAAAGGAATAGGAGATGAATTATATAATC
CAGAAACACATAAACGACATACTTTGTTTTGTGGGACAACTGTTATTCAGACTCGTTTCTACACCGGA
GAACTCGTCAAAGCCATAGTTGTTAGAACAGGATTTAGTACTTCCAAAGGACAGCTTGTTCGTTCCAT
ATTGTATCCCAAACCAACTGATTTTAAACTCTACAGAGATGCCTACTTGTTTCTACTATGTCTTGTGG
CAGTTGCTGGCATTGGGTTTATCTACACTATTATTAATAGCATTTTAAATGAGGTACAAGTTGGGGTC
ATAATTATCGAGTCTCTTGATATTATCACAATTACTGTGCCCCCTGCACTTCCTGCTGCAATGACTGC
TGGTATTGTGTATGCTCAGAGAAGACTGAAAAAAATCGGTATTTTCTGTATCAGTCCTCAAAGAATAA
ATATTTGTGGACAGCTCAATCTTGTTTGCTTTGACAAGACTGGAACTCTAACTGAAGATGGTTTAAAT
CTTTGGGGGATTCAACGAGTGGAAAATGCACGGTTTCTTTCACCAGAAGAAAATGTGTGCAATGAGAT
GTTGGTAAAATCCCAGTTTGTTGCTTGTATGGCTACTTGTCATTCACTTACAAAAATTGAAGGAGTGC
TCTCTGGTGATCCACTTGATCTGAAAATGTTTGAGGCTATTGGATGGATTCTGGAAGAAGCAACTGAA
GAAGAAACAGCACTTCATAATCGAATTATGCCCACAGTGGTTCGTCCTCCCAAACAACTGCTTCCTGA
ATCTACCCCTGCAGGAAACCAAGAAATGGCTACTTATGAGATAGGAATTGTTCGCCAGTTCCCATTTT
CTTCTGCTTTGCAACGTATGAGTGTGGTTGCCAGGGTGCTGGGGGATAGGAAAATGGACGCCTACATG
AAAGGAGCGCCCGAGGCCATTGCCGGTCTCTGTAAACCTGAAACAGTTCCTGTCGATTTTCAAAACGT
TTTGGAAGACTTCACTAAACAGGGCTTCCGTGTGATTGCTCTTGCACACAGAAAATTGGAGTCAAAAC
TGACATGGCATAAAGTACAGAATATTAGCAGGGATGCAATTGAGAACAACATGGATTTTATGGGATTA
ATTATAATGCAGAACAAATTAAAGCAAGAAACCCCTGCAGTACTTGAAGATTTGCATAAAGCCAACAT
TCGCACCGTCATGGTCACAGGTGACAGTATGTTGACTGCTGTCTCTGTGGCCAGAGATTGTGGAATGA
TTCTACCTCAGGATAAAGTGATTATTGCTGAAGCATTACCTCCAAAGGATGGGAAAGTTGCCAAAATA
AATTGGCATTATGCAGACTCCCTCACGCAGTGCAGTCATCCATCAGCAATTGACCCAGAGGCTATTCC
GGTTAAATTGGTCCATGATAGCTTAGAGGATCTTCAAATGACTCGTTATCATTTTGCAATGAATGGAA
AATCATTCTCAGTGATACTGGAGCATTTTCAAGACCTTGTTCCTAAGTTGATGTTGCATGGCACCGTG
TTTGCCCGTATGGCACCTGATCAGAAGACACAGTTGATAGAAGCATTGCAAAATGTTGAGTATTTTGT
TGGGATGTGTGGTGATGGCGCAAATGATTGTGGTGCTTTGAAGAGGGCACACGGAGGCATTTCCTTAT
CGGAGCTCGAAGCTTCAGTGGCATCTCCCTTTACCTCTAAGACTCCTAGTATTTCCTGTGTGCCAAAC
CTTATCAGGGAAGGCCGTGCTGCTTTAATAACTTCCTTCTGTGTGTTTAAATTCATGGCATTGTACAG
CATTATCCAGTACTTCAGTGTTACTCTGCTGTATTCTATCTTAAGTAACCTAGGAGACTTCCAGTTTC
TCTTCATTGATCTGGCAATCATTTTGGTAGTGGTATTTACAGTGAGTTTAAATCCTGCCTGGAAAGAA
CTTGTGGCACAAAGACCACCTTCGGGTCTTATATCTGGGGCCCTTCTCTTCTCCGTTTTGTCTCAGAT
TATCATCTGCATTGGATTTCAATCTTTGGGTTTTTTTTGGGTCAAACAGCAACCTTGGTATGAAGTGT
GGCATCCAAAATCAGAGGCTTGTAATACAACAGGAAGCGGGTTTTGGAATTCTTCACACGTAGACAAT
GAAACCGAACTTGATGAAATAATATACAAAATTATGAAAATACCACAGTGTTTTTTATTTCCAGTTTT
CAGTACCTCATAGTGGCAATTGCCTTTTCAAAAGGAAAAC

NOV73a, CG59839-02

| | | | |
|---|---|---|---|
| Protein Sequence | SEQ ID NO: 1068 | 1079 aa | MW at 120773.2kD |

MDKEERKIINQGQEDEMEIYGYNLSRWKLAIVSLGVICTGGFLLLLLYWMPEWRVKATCVRAAIKDCD
VVLLRTTDEFKMWFCAKIRVLSLETHPISSPKSMSNKLSNGHAVCLTENPTGENRHGISKYSQAESQQ
IRYFTHHSVKYFWNDTIHNFDFLKGLDEGVSCTSIYEKHSAGLTKGMHAYRKLLYGVNEIAVKVPSVF
KLLIKEVLNPFYIFQLFSVILWSTDEYYYYALAIVVMSIVSIVSSLYSIRKQYVMLHDMVATHSTVRV
SVCRVNEEIEEIFSTDLVPGDVMVIPLNGTIMPCDAVLINGTCIVNESMLTGESVPVTKTNLPNPSVD
VKGIGDELYNPETHKRHTLFCGTTVIQTRFYTGELVKAIVVRTGFSTSKGQLVRSILYPKPTDFKLYR
DAYLFLLCLVAVAGIGFIYTIINSILNEVQVGVIIIESLDIITITVPPALPAAMTAGIVYAQRRLKKI
GIFCISPQRINICGOLNLVCFDKTGTLTEDGLNLWGIQRVENARFLSPEENVCNEMLVKSQFVACMAT
CHSLTKIEGVLSGDPLDLKMFEAIGWILEEATEEETALHNRIMPTVVRPPKQLLPESTPAGNQEMATY
EIGIVRQFPFSSALQRMSVVARVLGDRKMDAYMKGAPEAIAGLCKPETVPVDFQNVLEDFTKQGFRVI
ALAHRKLESKLTWHKVQNISRDAIENNMDFMGLIIMQNKLKQETPAVLEDLHKANIRTVMVTGDSMLT
AVSVARDCGMILPQDKVIIAEALPPKDGKVAKINWHYADSLTQCSHPSAIDPEAIPVKLVHDSLEDLQ
MTRYHFAMNGKSFSVILEHFQDLVPKLMLHGTVFARMAPDQKTQLIEALQNVEYFVGMCGDGANDCGA
LKRAHGGISLSELEASVASPFTSKTPSISCVPNLIREGRAALITSFCVFKFMALYSIIQYFSVTLLYS
ILSNLGDFQFLFIDLAIILVVVFTVSLNPAWKELVAQRPPSGLISGALLFSVLSQIIICIGFQSLGFF
WVKQQPWYEVWHPKSEACNTTGSGFWNSSHVDNETELDEIIYKIMKIPQCFLFPVFSTS

| | | |
|---|---|---|
| NOV73b, CG59839-01 | SEQ ID NO: 1069 | 2649 bp |

| | | |
|---|---|---|
| DNA Sequence | ORF Start: ATG at 183 | ORF Stop: TAG at 2055 |

CAACTGATTTTAAACTCTACAGAGATGCCTACTTGTTTCTACTATGTCTTGTGGCAGTTGCTGGCATT
GGGTTTATCTACACTATTATTAATAGCATTTTAAATGAGGTACAAGTTGGGGTCATAATTATCGAGTC
TCTTGATATTATCACAATTACTGTGCCCCCTGCACTTCCTGCTGCAATGACTGCTGGTATTGTGTATG
CTCAGAGAAGACTGAAAAAAATCGGTATTTTCTGTATCAGTCCTCAAAGAATAAATATTTGTGGACAG
CTCAATCTTGTTTGCTTTGACAAGACTGGAACTCTAACTGAAGATGGTTTAGATCTTTGGGGGATTCA
ACGAGTGGAAAATGCACGATTTCTTTCACCAGAAGAAAATGTGTGCAATGAGATGTTGGTAAAATCCC
AGTTTGTTGCTTGTATGGCTACTTGTCATTCACTTACAAAAATTGAAGGAGTGCTCTCTGGTGATCCA
CTTGATCTGAAAATGTTTGAGGCTATTGGATGGATTCTGGAAGAAGCAACTGAAGAAGAAACAGCACT
TCATAATCGAATTATGCCCACAGTGGTTCGTCCTCCCAAACAACTGCTTCCTGAATCTACCCCTGCAG
GAAACCAAGAAATGGAGCTGTTTGAACTTCCAGCTACTTATGAGATAGGAATTGTTCGCCAGTTCCCA
TTTTCTTCTGCTTTGCAACGTATGAGTGTGGTTGCCAGGGTGCTGGGGGATAGGAAAATGGACGCCTA
CATGAAAGGAGCGCCCGAGGCCATTGCCGGTCTCTGTAAACCTGAAACAGTTCCTGTCGATTTTCAAA
ACGTTTTGGAAGACTTCACTAAACAGGGCTTCCGTGTGATTGCTCTTGCACACAGAAAATTGGAGTCA
AAACTGACATGGCATAAAGTACAGAATATTAGCAGAGATGCAATTGAGAACAACATGGATTTTATGGG
ATTAATTATAATGCAGAACAAATTAAAGCAAGAAACCCCTGCAGTACTTGAAGATTTGCATAAAGCCA
ACATTCGCACCGTCATGGTCACAGGTGACAGTATGTTGACTGCTGTCTCTGTGGCCAGAGATTGTGGA
ATGATTCTACCTCAGGATAAAGTGATTATTGCTGAAGCATTACCTCCAAAGGATGGGAAAGTTGCCAA
AATAAATTGGCATTATGCAGACTCCCTCACGCAGTGCAGTCATCCATCAGCAATTGACCCAGAGGCTA
TTCCGGTTAAATTGGTCCATGATAGCTTAGAGGATCTTCAAATGACTCGTTATCATTTTGCAATGAAT
GGAAAATCATTCTCAGTGATACTGGAGCATTTTCAAGACCTTGTTCCTAAGTTGATGTTGCATGGCAC
CGTGTTTGCCCGTATGGCACCTGATCAGAAGACACAGTTGATAGAAGCATTGCAAAATGTTGATTATT
TTGTTGGGATGTGTGGTGATGGCGCAAATGATTGTGGTGCTTTGAAGAGGGCACACGGAGGCATTTCC
TTATCGGAGCTCGAAGCTTCAGTGGCATCTCCCTTTACCTCTAAGACTCCTAGTATTTCCTGTGTGCC
AAACCTTATCAGGGAAGGCCGTGCTGCTTTAATAACTTCCTTCTGTGTGTTTAAATTCATGGCATTGT
ACAGCATTATCCAGTACTTCAGTGTTACTCTGCTGTATTCTATCTTAAGTAACCTAGGAGACTTCCAG
TTTCTCTTCATTGATCTGGCAATCATTTTGGTAGTGGTATTTACAATGAGTTTAAATCCTGCCTGGAA
AGAACTTGTGGCACAAAGACCACCTTCGGGTCTTATATCTGGGGCCCTTCTCTTCTCCGTTTTGTCTC
AGATTATCATCTGCATTGGATTTCAATCTTTGGGTTTTTTTTGGGTCAAACAGCAACCTTGGTATGAA
GTGTGGCATCCAAAATCAGATGCTTGTAATACAACAGGAAGCGGGTTTTGGAATTCTTCACACGTAGA
CAATGAAACCGAACTTGATGAACTAATATACAAAATTATGAAAATACCACAGTGTTTTTTATTTCCAG
TTTTCAGTACCTCATAGTGGCAATTGCCTTTTCAAAAGGAAAACCCTTCAGGCAACCTTGCTACAAAA
ATTATTTTTTTGTTTTTTCTGTGATTTTTTTATATATTTTTATATTATTCATCATGTTGTATCCAGTT
GCCTCTGTTGACCAGGTTCTTCAGATAGTGTGTGTACCATATCAGTGGCGTGTAACTATGCTCATCAT
TGTTCTTGTCAATGCCTTTGTGTCTATCACAGTGGAGGAGTCAGTGGATCGGTGGGGAAAATGCTGCT
TACCCTGGGCCCTGGGCTGTAGAAAGAAGACACCAAAGGCAAAGTACATGTATCTGGCGCAGGAGCTC
TTGGTTGATCCAGAATGGCCACCAAAACCTCAGACAACCACAGAAGCTAAAGCTTTAGTTAAGGAGAA
TGGATCATGTCAAATCATCACCATAACATAGCAGTGAATCAGTCTCAGTGGTATTGCTGATAGCAGTA
TTCAGGAATATGTGATTTTAGGAGTTTCTGATCCTGTGTGTCAGAATGGCACTAGTTCAGTTTATGTC
CCTTCTGATATAGTAGCTTATTTGACAGCTTTGCTCTTCCTTAAAATAAAAAAAAAAAAAAAAAA

NOV73b, CG59839-01

| | | | |
|---|---|---|---|
| Protein Sequence | SEQ ID NO: 1070 | 624 aa | MW at 69590.1kD |

MTAGIVYAQRRLKKIGIFCISPQRINICGQLNLVCFDKTGTLTEDGLDLWGIQRVENARFLSPEENVC
NEMLVKSQFVACMATCHSLTKIEGVLSGDPLDLKMFEAIGWILEEATEEETALHNRIMPTVVRPPKQL
LPESTPAGNQEMELFELPATYEIGIVRQFPFSSALQRMSVVARVLGDRKMDAYMKGAPEAIAGLCKPE
TVPVDFQNVLEDFTKQGFRVIALAHRKLESKLTWHKVQNISRDAIENNMDFMGLIIMQNKLKQETPAV
LEDLHKANIRTVMVTGDSMLTAVSVARDCGMILPQDKVIIAEALPPKDGKVAKINWHYADSLTQCSHP
SAIDPEAIPVKLVHDSLEDLQMTRYHFAMNGKSFSVILEHFQDLVPKLMLHGTVFARMAPDQKTGLIE
ALQNVDYFVGMCGDGANDCGALKRAHGGISLSELEASVASPFTSKTPSISCVPNLIREGRAALITSFC
VFKFMALYSIIQYFSVTLLYSILSNLGDFQFLFIDLAIILVVVFTMSLNPAWKELVAQRPPSGLISGA
LLFSVLSQIIICIGFQSLGFFWVKQQPWYEVWHPKSDACNTTGSGFWNSSHVDNETELDELIYKIMKI
PQCFLFPVFSTS

[0775] A ClustalW comparison of the above protein sequences yields the following sequence alignment shown in Table 73B.

TABLE 73B
Comparison of the NOV73 protein sequences.

| | |
|---|---|
| NOV73a | MDKEERKIINQGQEDEMEIYGYNLSRWKLAIVSLGVICTGGFLLLLLYWMPEWRVKATCV |
| NOV73b | ------------------------------------------------------------ |
| NOV73a | RAAIKDCDVVLLRTTDEFKMWFCAKIRVLSLETHPISSPKSMSNKLSNGHAVCLTENPTG |
| NOV73b | ------------------------------------------------------------ |
| NOV73a | ENRHGISKYSQAESQQIRYFTHHSVKYFWNDTIHNFDFLKGLDEGVSCTSIYEKHSAGLT |
| NOV73b | ------------------------------------------------------------ |
| NOV73a | KGMHAYRKLLYGVNEIAVKVPSVFKLLIKEVLNPFYIFQLFSVILWSTDEYYYYALAIVV |
| NOV73b | ------------------------------------------------------------ |
| NOV73a | MSIVSIVSSLYSIRKQYVMLHDMVATHSTVRVSVCRVNEEIEEIFSTDLVPGDVMVIPLN |
| NOV73b | ------------------------------------------------------------ |
| NOV73a | GTIMPCDAVLINGTCIVNESMLTGESVPVTKTNLPNPSVDVKGIGDELYNPETHKRHTLF |
| NOV73b | ------------------------------------------------------------ |
| NOV73a | CGTTVIQTRFYTGELVKAIVVRTGFSTSKGQLVRSILYPKPTDFKLYRDAYLFLLCLVAV |
| NOV73b | ------------------------------------------------------------ |
| NOV73a | AGIGFIYTIINSILNEVQVGVIIIESLDIITITVPPALPAAMTAGIVYAQRRLKKIGIFC |
| NOV73b | -----------------------------------------MTAGIVYAQRRLKKIGIFC |
| NOV73a | ISPQRINICGQLNLVCFDKTGTLTEDGLNLWGIQRVENARFLSPEENVCNEMLVKSQFVA |
| NOV73b | ISPQRINICGQLNLVCFDKTGTLTEDGLDLWGIQRVENARFLSPEENVCNEMLVKSQFVA |
| NOV73a | CMATCHSLTKIEGVLSGDPLDLKMFEAIGWILEEATEEETALHNRIMPTVVRPPKQLLPE |
| NOV73b | CMATCHSLTKIEGVLSGDPLDLKMFEAIGWILEEATEEETALHNRIMPTVVRPPKQLLPE |
| NOV73a | STPAGNQ------EMATYEIGIVRQFPFSSALQRMSVVARVLGDRKMDAYMKGAPEAIAG |
| NOV73b | STPAGNQEMELFELPATYEIGIVRQFPFSSALQRMSVVARVLGDRKMDAYMKGAPEAIAG |
| NOV73a | LCKPETVPVDFQNVLEDFTKQGFRVIALAHRKLESKLTWHKVQNISRDAIENNMDFMGLI |
| NOV73b | LCKPETVPVDFQNVLEDFTKQGFRVIALAHRKLESKLTWHKVQNISRDAIENNMDFMGLI |
| NOV73a | IMQNKLKQETPAVLEDLHKANIRTVMVTGDSMLTAVSVARDCGMILPQDKVIIAEALPPK |
| NOV73b | IMQNKLKQETPAVLEDLHKANIRTVMVTGDSMLTAVSVARDCGMILPQDKVIIAEALPPK |
| NOV73a | DGKVAKINWHYADSLTQCSHPSAIDPEAIPVKLVHDSLEDLQMTRYHFANNGKSFSVILE |
| NOV73b | DGKVAKINWHYADSLTQCSHPSAIDPEAIPVKLVHDSLEDLQMTRYHFANNGKSFSVILE |
| NOV73a | HFQDLVPKLMLHGTVFARMAPDQKTQLIEALQNVDYFVGMCGDGANDCGALKRAHGGISL |
| NOV73b | HFQDLVPKLMLHGTVFARMAPDQKTQLIEALQNVDYFVGMCGDGANDCGALKRAHGGISL |
| NOV73a | SELEASVASPFTSKTPSISCVPNLIREGRAALITSFCVFKFMALYSIIQYFSVTLLYSIL |
| NOV73b | SELEASVASPFTSKTPSISCVPNLIREGRAALITSFCVFKFMALYSIIQYFSVTLLYSIL |
| NOV73a | SNLGDFQFLFIDLAIILVVVFTVSLNPAWKELVAQRPPSGLISGALLFSVLSQIIICIGF |
| NOV73b | SNLGDFQFLFIDLAIILVVVFTMSLNPAWKELVAQRPPSGLISGALLFSVLSQIIICIGF |
| NOV73a | QSLGFFWVKQQPWYEVWHPKSEACNTTGSGFWNSSHVDNETELDEIIYKIMKIPQCFLFP |
| NOV73b | QSLGFFWVKQQPWYEVWHPKSDACNTTGSGFNNSSHVDNETELDELIYKIMKIPQCFLFP |
| NOV73a | VFSTS |
| NOV73b | VFSTS |
| NOV73a | (SEQ ID NO: 1068) |
| NOV73b | (SEQ ID NO: 1070) |

[0776] Further analysis of the NOV73a protein yielded the following properties shown in Table 73C.

TABLE 73C
Protein Sequence Properties NOV73a

| | |
|---|---|
| SignalP analysis: | Cleavage site between residues 58 and 59 |

PSORT II analysis:

| PSG: | a new signal peptide prediction method | | | |
|---|---|---|---|---|
| | N-region: | length 7; | pos.chg 3; | neg.chg 3 |
| | H-region: | length 6; | peak value | −12.14 |
| | PSG score: | −16.54 | | |

| | |
|---|---|
| GvH: | von Heijne's method for signal seq. recognition |
| | GvH score (threshold: −2.1): −4.30 |
| | possible cleavage site: between 41 and 42 |

>>> Seems to have no N-terminal signal peptide

| ALOM: | Klein et al's method for TM region allocation | |
|---|---|---|
| | Init position for calculation: 1 | |
| | Tentative number of TMS(s) for the threshold 0.5: 8 | |
| | INTEGRAL | Likelihood = −8.44 Transmembrane 31-47 |
| | INTEGRAL | Likelihood = −6.37 Transmembrane 234-250 |
| | INTEGRAL | Likelihood = 0.32 Transmembrane 295-311 |
| | INTEGRAL | Likelihood = −9.08 Transmembrane 410-426 |
| | INTEGRAL | Likelihood = −2.81 Transmembrane 439-455 |
| | INTEGRAL | Likelihood = −2.92 Transmembrane 926-942 |
| | INTEGRAL | Likelihood =−11.15 Transmembrane 963-979 |
| | INTEGRAL | Likelihood = −6.37 Transmembrane 996-1012 |
| | PERIPHERAL | Likelihood = 1.11 (at 211) |
| | ALOM score: | −11.15 (number of TMSs: 8) |

| | |
|---|---|
| MTOP: | Prediction of membrane topology (Hartmann et al.) |
| | Center position for calculation: 38 |
| | Charge difference: 4.0 C(2.0) − N(−2.0) |
| | C > N: C-terminal side will be inside |

>>> membrane topology: type 3b
MITDISC: discrimination of mitochondrial targeting seq

| | | | |
|---|---|---|---|
| R content: | 0 | Hyd Moment(75): | 8.50 |
| Hyd Moment(95): | 5.62 | G content: | 0 |
| D/E content: | 2 | S/T content: | 0 |
| Score: −6.77 | | | |

Gavel: prediction of cleavage sites for mitochondrial preseq

cleavage site motif not found

NUCDISC: discrimination of nuclear localization signals

pat4: none
pat7: none
bipartite: none
content of basic residues: 9.1%
NLS Score: −0.47

KDEL: ER retention motif in the C-terminus: none
ER Membrane Retention Signals: none
SKL: peroxisomal targeting signal in the C-terminus: none
PTS2: 2nd peroxisomal targeting signal: none
VAC: possible vacuolar targeting motif: none
RNA-binding motif: none
Actinin-type actin-binding motif:

type 1: none
type 2: none

NMYR: N-myristoylation pattern: none
Prenylation motif: none
memYQRL: transport motif from cell surface to Golgi: none
Tyrosines in the tail: none
Dileucine motif in the tail: none
checking 63 PROSITE DNA binding motifs: none
checking 71 PROSITE ribosomal protein motifs: none
checking 33 PROSITE prokaryotic DNA binding motifs: none

| | |
|---|---|
| NNCN: | Reinhardt's method for Cytoplasmic/Nuclear discrimination |
| | Prediction: cytoplasmic |
| | Reliability: 94.1 |
| COIL: | Lupas's algorithm to detect coiled-coil regions |
| | total: 0 residues |

Final Results (k = 9/23):

```
  55.6%: endoplasmic reticulum
  11.1%: mitochondrial
  11.1%: vacuolar
  11.1%: vesicles of secretory system
  11.1%: Golgi
```

>> prediction for CG59839-02 is end (k = 9)

[0777] A search of the NOV73a protein against the Geneseq database, a proprietary database that contains sequences published in patents and patent publication, yielded several homologous proteins shown in Table 73D.

TABLE 73D
Geneseq Results for NOV73a

| | | NOV73a | Identities/ | |
|---|---|---|---|---|
| | | Residues/ | Similarities for | |
| Geneseq | Protein/Organism/Length | Match | the Matched | Expect |
| Identifier | [Patent #, Date] | Residues | Region | Value |
| AAU91185 | Human HEAT-2 polypeptide - | 1 . . . 1059 | 1044/1065 (98%) | 0.0 |
| | Homo sapiens, 1256 aa. | 1 . . . 1065 | 1053/1065 (98%) | |
| | [WO200216591-A2, 28-FEB- | | | |
| | 2002] | | | |
| AAO14197 | Human transporter and ion | 1 . . . 1059 | 1039/1065 (97%) | 0.0 |
| | channel TRICH-14 - Homo | 1 . . . 1065 | 1049/1065 (97%) | |
| | sapiens, 1256 aa. | | | |
| | [WO200204520-A2, 17-JAN- | | | |
| | 2002] | | | |
| ABU11063 | Human protein NOV27 - Homo | 183 . . . 1059 | 784/883 (88%) | 0.0 |
| | sapiens, 973 aa. | 1 . . . 812 | 792/883 (88%) | |
| | [WO200281629-A2, 17-OCT- | | | |
| | 2002] | | | |
| ABP69451 | Human polypeptide SEQ ID NO | 462 . . . 1059 | 593/604 (98%) | 0.0 |
| | 1498 - Homo sapiens, 765 aa. | 1 . . . 604 | 598/604 (98%) | |
| | [WO200270539-A2, 12-SEP- | | | |
| | 2002] | | | |
| AAB40996 | Human ORFX ORF760 | 509 . . . 1059 | 547/557 (98%) | 0.0 |
| | polypeptide sequence SEQ ID | 2 . . . 558 | 551/557 (98%) | |
| | NO: 1520 - Homo sapiens, 692 | | | |
| | aa. [WO200058473-A2, 05- | | | |
| | OCT-2000] | | | |

[0778] In a BLAST search of public sequence databases, the NOV73a protein was found to have homology to the proteins shown in the BLASTP data in Table 73E.

TABLE 73E
Public BLASTP Results for NOV73a

| | | NOV73a | | |
|---|---|---|---|---|
| Protein | | Residues/ | Identities/ | |
| Accession | | Match | Similarities for the | Expect |
| Number | Protein/Organism/Length | Residues | Matched Portion | Value |
| Q9H7F0 | Probable cation- | 1 . . . 1059 | 1045/1065 (98%) | 0.0 |
| | transporting ATPase 3 (EC | 1 . . . 1065 | 1054/1065 (98%) | |
| | 3.6.3.—) (ATPase family | | | |
| | homolog up-regulated in | | | |
| | senescence cells 1) - Homo | | | |
| | sapiens (Human), 1130 aa. | | | |
| CAD29017 | Sequence 5 from Patent | 1 . . . 1059 | 1044/1065 (98%) | 0.0 |
| | WO0216591 - Homo | 1 . . . 1065 | 1053/1065 (98%) | |
| | sapiens (Human), 1256 aa. | | | |
| Q96KS1 | Hypothetical protein - | 280 . . . 954 | 655/681 (96%) | 0.0 |
| | Homo sapiens (Human), | 3 . . . 680 | 662/681 (97%) | |
| | 701 aa. | | | |
| Q95JN5 | Hypothetical 56.9 kDa | 1 . . . 492 | 492/492 (100%) | 0.0 |
| | protein - Macaca | 1 . . . 492 | 492/492 (100%) | |
| | fascicularis (Crab eating | | | |
| | macaque) (Cynomolgus | | | |
| | monkey), 504 aa | | | |
| | (fragment). | | | |
| Q95JN5 | Probable cation- | 1 . . . 492 | 492/492 (100%) | 0.0 |
| | transporting ATPase 3 (EC | 1 . . . 492 | 492/492 (100%) | |
| | 3.6.3.—) (ATPase family | | | |
| | homolog up-regulated in | | | |
| | senescence cells 1) - | | | |
| | Macaca fascicularis (Crab | | | |
| | eating macaque) | | | |
| | (Cynomolgus monkey), | | | |
| | 492 aa (fragment). | | | |

[0779] PFam analysis indicates that the NOV73a protein contains the domains shown in the Table 73F.

TABLE 73F
Domain Analysis of NOV73a

| | | Identities/ | |
|---|---|---|---|
| | NOV73a | Similarities | Expect |
| Pfam Domain | Match Region | for the Matched Region | Value |
| Cation_ATPase_N | 160 . . . 227 | 15/87 (17%) | 0.041 |
| | | 41/87 (47%) | |
| E1-E2_ATPase | 239 . . . 488 | 58/267 (22%) | 4.3e−07 |
| | | 162/267 (61%) | |
| Hydrolase | 492 . . . 898 | 40/417 (10%) | 0.0073 |
| | | 243/417 (58%) | |

### Example 74

[0780] The NOV74 clone was analyzed, and the nucleotide and encoded polypeptide sequences are shown in Table 74A.

TABLE 74A
NOV74 Sequence Analysis

| | | |
|---|---|---|
| NOV74a, CG90866-04 | SEQ ID NO: 1071 | 2937 bp |

| | | |
|---|---|---|
| DNA Sequence | ORF Start: ATG at 1 | ORF Stop: TAA at 2935 |

ATGCAGCCCCTGGACTTTAGTTCAGGGGGAAGTGACCCCAACATCAGCCTCTCAGAAAAGATCCGAGA
TCAGCTTGTTGTTGGACAGCTGATTCCAGACTGCTATGTAGAACTTGAAAAAATCATTTTATCGGAGC
GTAAAAATGTGCCAATTGAATTTCCCGTAATTGACCGGAAACGATTATTACAACTAGTGAGAGAAAAT
CAGCTGCAGTTAGATGAAAATGAGCTTCCTCACGCAGTTCACTTTCTAAATGAATCAGGAGTCCTTCT
TCATTTTCAAGACCCAGCACTGCAGTTAAGTGACTTGTACTTTGTGGAACCCAAGTGGCTTTGTAAAA
TCATGGCACAGGATGTTAGCAGCATTTTTGGCCTTTATATTCGAGACATTTTGACAGTGAAAGTGGAA
GGTTGTCCAAAACACCCTAAGGGCATTATTTCGCGTAGAGATGTGGAAAAATTTCTTTCAAAAAAAAG
GAAATTTCCAAAGAACTACATGTCACAGTATTTTAAGCTCCTAGAAAAATTCCAGATTGCTTTGCCAA
TAGGAGAAGAATATTTGCTGGTTCCAAGCATTTTGTCTGACCACAGGCCTGTGATAGAGCTTCCCCAT
TGTGAGAACTCTGAAATTATCATCCGACTATATGAAATGCCTTATTTTCCAATGGGATTTTGGTCAAG
ATTAATCAATCGATTACTTGAGATTTCACCTTACATGCTTTCAGGGAGAGGCTGTATTCTTTTGGGCC
AAGTTGTGGACCACATTGATTCTCTCATGGAAGAATGGTTTCCTGGGTTGCTGGAGATTGATATTTGT
GGTGAAGGAGAAACTCTGTTGAAGAAATGGGCATTATATAGTTTTAATGATGGTGAAGAACATCAAAA
AATCTTACTTGATGACTTGATGAAGAAAGCAGAGGAAGGAGATCTCTTAGTAAATCCAGATCAACCAA
GGCTCACCATTCCAATATCTCAGATTGCCCCTGACTTGATTTTGGCTGACCCGCCTAGAAATATTATG
TTGAATAATGATGAGTTGGAATTTGAACAAGCTCCAGAGTTTCTCCTAGACTGTTTTGTGTGTATTCA
CTTATATCCATCAAGTGACTACATTTCAAGGCACTATATGAGAACCATAAATATTGTACAAACAGGAT
TTGCTAAATGTCGGTGGAGAGTAACAGTCCACGGGGCTGATCATGGTGATGGCAGTTTTGGATCAGTT
TACCGAGCAGCCTATGAAGGAGAAGAAGTGGCTGTGAAGATTTTTAATAAACATACATCACTCAGGCT
GTTAAGACAAGAGCTTGTGGTGCTTTGCCACCTCCACCACCCCAGTTTGATATCTTTGCTGGCAGCTG
GGATTCGTCCCCGGATGTTGGTGATGGAGTTAGCCTCCAAGGGTTCCTTGGATCGCCTGCTTCAGCAG
GACAAAGCCAGCCTCACTAGAACCCTACAGCACAGGATTGCACTCCACGTAGCTGATGGTTTGAGATA
CCTCCACTCAGCCATGATTATATACCGAGACCTGAAACCCCACAATGTGCTGCTTTTCACACTGTATC
CCAATGCTGCCATCATTGCAAAGATTGCTGACTACGGCATTGCTCAGTACTGCTGTAGAATGGGGATA
AAAACATCAGAGGGCACACCAGGTTTTCGTGCACCTGAAGTTGCCAGAGGAAATGTCATTTATAACCA
ACAGGCTGATGTTTATTCATTTGGTTTACTACTCTATGACATTTTGACAACTGGAGGTAGAATAGTAG
AGGGTTTGAAGTTTCCAAATGAGTTTGATGAATTAGAAATACAAGGAAAATTACCTGATCCAGTTAAA
GAATATGGTTGTGCCCCATGGCCTATGGTTGAGAAATTAATTAAACAGTGTTTGAAAGAAAATCCTCA
AGAAAGGCCTACTTCTGCCCAGGTATTCGACATTTTGAATTCAGCTGAATTAGTCTGTCTGACGAGAC
GCATTTTATTACCTAAAAACGTAATTGTTGAATGCATGGTTGCTACACATCACAACAGCAGGAATGCA
AGCATTTGGCTGGGCTGTGGGCACACCGACAGAGGACAGCTCTCATTTCTTGACTTAAATACTGAAGG
ATACACTTCTGAGAGCAAACAAAAAAATTTTCTTTTGGTTGGAACCGCTGATGGCAAGTTAGCAATTT
TTGAAGATAAGACTGTTAAGCTTAAAGGAGCTGCTCCTTTGAAGATACTAAATATAGGAAATGTCAGT
ACTCCATTGATGTGTTTGAGTGAATCCACAAATTCAACGGAAAGAAATGTAATGTGGGGAGGATGTGG
CACAAAGATTTTCTCCTTTTCTAATGATTTCACCATTCAGAAACTCATTGAGACAAGAACAAGCCAAC
TGTTTTCTTATGCAGCTTTCAGTGATTCCAACATCATAACAGTGGTGGTAGACACTGCTCTCTATATT
GCTAAGCAAAATAGCCCTGTTGTGGAAGTGTGGGATAAGAAAACTGAAAAACTCTGTGGACTAATAGA
CTGCGTGCACTTTTTAAGGGAGGTAATGGTAAAAGAAAACAAGGAATCAAAACACAAAATGTCTTATT
CTGGGAGAGTGAAAACCCTCTGCCTTCAGAAGAACACTGCTCTTTGGATAGGAACTGGAGGAGGCCAT
ATTTTACTCCTGGATCTTTCAACTCGTCGACTTATACGTGTAATTTACAACTTTTGTAATTCGGTCAG
AGTCATGATGACAGCACAGCTAGGCAGCCTTAAAAATGTCATGCTGGTATTGGGCTACAACCGGAAAA
ATACTGAAGGTACACAAAAGCAGAAGAGATACAATCTTGCTTGACCGTTTGGGACATCCAATCTTCCA
CATGAAGTGCAAAATTTAGAAAAACACATTGAAGTGAGAAAAGAATTAGCTGAAAAAATGAGACGAAC
ATCTGTTGAGTAA

NOV74a, CG90866-04

| | | | |
|---|---|---|---|
| Protein Sequence | SEQ ID NO: 1072 | 978 aa | MW at 111173.8kD |

MQPLDFSSGGSDPNISLSEKIRDQLVVGQLIPDCYVELEKIILSERKNVPIEFPVIDRKRLLQLVREN
QLQLDENELPHAVHFLNESGVLLHFQDPALQLSDLYFVEPKWLCKIMAQDVSSIFGLYIRDILTVKVE
GCPKHPKGIISRRDVEKFLSKKRKFPKNYMSQYFKLLEKFQIALPIGEEYLLVPSSLSDHRPVIELPH
CENSEIIIRLYEMPYFPMGFWSRLINRLLEISPYMLSGRGCILLGQVVDHIDSLMEEWFPGLLEIDIC
GEGETLLKKWALYSFNDGEEHQKILLDDLMKKAEEGDLLVNPDQPRLTIPISQIAPDLILADPPRNIM
LNNDELEFEQAPEFLLDCFVCIHLYPSSDYISRHYMRTINIVQTGFAKCRWRVTVHGADHGDGSFGSV
YRAAYEGEEVAVKIFNKHTSLRLLRQELVVLCHLHHPSLISLLAAGIRPRNLVMELASKGSLDRLLQQ
DKASLTRTLQHRIALHVADGLRYLHSAMIIYRDLKPHNVLLFTLYPNAAIIAKIADYGIAQYCCRMGI
KTSEGTPGFRAPEVARGNVIYNQQADVYSFGLLLYDILTTGGRIVEGLKFPNEFDELEIQGKLPDPVK
EYGCAPWPMVEKLIKQCLKENPQERPTSAQVFDILNSAELVCLTRRILLPKNVIVECMVATHHNSRNA
SIWLGCGHTDRGQLSFLDLNTEGYTSESKQKNFLLVGTADGKIAIFEDKTVKLKGAAPLKILNIGNVS
TPLMCLSESTNSTERNVMWGGCGTKIFSFSNDFTIQKLIETRTSQLFSYAAFSDSNIITVVVDTALYI
AKQNSPVVEVWDKKTEKLCGLIDCVHFLREVMVKENKESKHKMSYSGRVKTLCLQKNTALWIGTGGGH
ILLLDLSTRRLIRVIYNFCNSVRVMMTAQLGSLKNVMLVLGYNRKNTEGTQKQKEIQSCLTVWDINLP
HEVQNLEKHIEVRKELAEKMRRTSVE

| | | |
|---|---|---|
| NOV74b, CG90866-03 | SEQ ID NO: 1073 | 2687 bp |

| | | |
|---|---|---|
| DNA Sequence | ORF Start: ATG at 108 | ORF Stop: TAA at 2658 |

ACGCAGTTCACTTTCTAAATGAATCAGGAGTCCTTCTTCATTTTCAAGACCCAGCACTGCAGTTAAGT
GACTTGTACTTTGTGGAACCCAAGTGGCTTTGTAAAATCATGGCACAGATTTTGACAGTGAAAGTGGA
AGGTTGTCCAAAACACCCTAAGGGCATTATTTCGCGTAGAGATGTGGAAAAATTTCTTTCAAAAAAAA
GGAAATTTCCAAAGAACTACATGTCACAGTATTTTAAGCTCCTAGAAAAATTCCAGATTGCTTTGCCA
ATAGGAGAAGAATATTTGCTGGTTCCAAGCAGTTTGTCTGACCACAGGCCTGTGATAGAGCTTCCCCA
TTGTGAGAACTCTGAAATTATCATCCGACTATATGAAATGCCTTATTTTCCAATGGGATTTTGGTCAA
GATTAATCAATCGATTACTTGAGATTTCACCTTACATGCTTTCAGGGAGAGAACGAGCACTTCGCCCA
AACAGAATGTATTGGCGACAAGGCATTTACTTAAATTGGTCTCCTGAAGCTTATTGTCTGGTAGGATC
TGAAGTCTTAGACAATCATCCAGAGAGTTTCTTAAAAATTACAGTTCTTCTTCTTGTAGAAAACTGTA
TTCTTTTGGGCCAAGTTGTGGACCACATTGATTCTCTCATGGAAGAATGGTTTCCTGGGTTGCTGGAG
ATTGATATTTGTGGTGAAGGAGAAACTCTGTTGAAGAAATGGGCATTATATAGTTTTAATGATGGCGA
AGAACATCAAAAAATCTTACTTGATGACTTGATGAAGAAAGCAGAGGAAGGAGATCTCTTAGTAAATC
CAGATCAACCAAGGCTCACCATTCCAATATCTCAGATTGCCCCTGACTTGATTTTGGCTGACCTGCCT
AGAAATATTATGTTGAATAATGATGAGTTGGAATTTGAACAAGCTCCAGAGTTTCTCCTAGGTGATGG
CAGTTTTGGATCAGTTTACCGAGCAGCCTATGAAGGAGAAGAAGTGGCTGTGAAGATTTTTAATAAAC
ATACATCACTCAGGCTGTTAAGACAAGAGCTTGTGGTGCTTTGCCACCTCCACCACCCCAGTTTGATA
TCTTTGCTGGCAGCTGGGATTCGTCCCCGGATGTTGGTGATGGAGTTAGCCTCCAAGGGTTCCTTGGA
TCGCCTGCTTCAGCAGGACAAAGCCAGCCTCACTAGAACCCTACAGCACAGGATTGCACTCCACGTAG
CTGATGGTTTGAGATACCTCCACTCAGCCATGATTATATACCGAGACCTGAAACCCCACAATGTGCTG
CTTTTCACACTGTATCCCAATGCTGCCATCATTGCAAAGATTGCTGACTACGGCATTGCTCAGTACTG
CTGTAGAATGGGGATAAAAACATCAGAGGGCACACCAGGTTTTCGTGCACCTGAAGTTGCCAGAGGAA
ATGTCATTTATAACCAACAGGCTGATGTTTATTCATTTGGTTTACTACTCTATGACATTTTGACAACT
GGAGGTAGAATAGTAGAGGGTTTGAAGTTTCCAAATGAGTTTGATGAATTAGAAATACAAGGAAAATT
ACCTGATCCAGTTAAAGAATATGGTTGTGCCCCATGGCCTATGGTTGAGAAATTAATTAAACAGTGTT
TGAAAGAAAATCCTCAAGAAAGGCCTACTTCTGCCCAGGTATTCGACATTTTGAATTCAGCTGAATTA
GTCTGTCTGACGAGACGCATTTTATTACCTAAAAACGTAATTGTTGAATGCATGGTTGCTACACATCA
CAACAGCAGGAATGCAAGCATTTGGCTGGGCTGTGGGCACACCGACAGAGGACAGCTCTCATTTCTTG
ACTTAAATACTGAAGGATACACTTCTGAGGAAGTTGCTGATAGTAGAATATTGTGCTTAGCCTTGGTG
CATCTTCCTGTTGAAAAGGAAAGCTGGATTGTGTCTGGGACACAGTCTGGTACTCTCCTGGTCATCAA
TACCGAAGATGGGAAAAAGAGACATACCCTAGAAAAGATGACTGATTCTGTCACTTGTTTGTATTGCA
ATTCCTTTTCCAAGCAAAGCAAACAAAAAAATTTTCTTTTGGTTGGAACCGCTGATGGCAAGTTAGCA
ATTTTTGAAGATAAGACTGTTAAGCTTAAAGGAGCTGCTCCTTTGAAGATACTAAATATAGGAAATGT
CAGTACTCCATTGATGTGTTTGAGTGAATCCACAAATTCAACGGAAAGAAATGTAATGTGGGGAGGAT
GTGGCACAAAGATTTTCTCCTTTTCTAATGATTTCACCATTCAGAAACTCATTGAGACAAGAACAAGC
CAACTGTTTTCTTATGCAGCTTTCAGTGATTCCAACATCATAACAGTGGTGGTAGACACTGCTCTCTA
TATTGCTAAGCAAAATAGCCCTGTTGTGGAAGTGTGGGATAAGAAAACTGAAAAACTCTGTGGACTAA
TAGACTGCGTGCACTTTTTAAGCCTTAAAAATGTCATGCTGGTATTGGGCTACAACCGGAAAAATACT
GAAGGTACACAAAAGCAGAAAGAGATACAATCTTGCTTGACCGTTTGGGACATCAATCTTCCACATGA
AGTGCAAAATTTAGAAAAACACATTGAAGTGAGAAAAGAATTAGCTGAAAAAATGAGACGAACATCTG
TTGAGTAAGAGAGAAATAGGAATTGTCTTTGGATA

NOV74b, CG90866-03

| | | | |
|---|---|---|---|
| Protein Sequence | SEQ ID NO: 1074 | 850 aa | MW at 96332.5kD |

MAQILTVKVEGCPKHPKGIISRRDVEKFLSKKRKFPKNYMSQYFKLLEKFQIALPIGEEYLLVPSSLS
DHRPVIELPHCENSEIIIRLYEMPYFPMGFWSRLINRLLEISPYMLSGRERALRPNRMYWRQGIYLNW
SPEAYCLVGSEVLDNHPESFLKITVPSCRKGCILLGQVVDHIDSLMEEWFPGLLEIDICGEGETLLKK
WALYSFNDGEEHQKILLDDLMKKAEEGDLLVNPDQPRLTIPISQIAPDLILADLPRNIMLNNDELEFE
QAPEFLLGDGSFGSVYRAAYEGEEVAVKIFNKHTSLRLLRQELVVLCHLHHPSLISLLAAGIRPRMLV
MELASKGSLDRLLQQDKASLTRTLQHRIALHVALGLRYLHSAMIIYRDLKPHNVLLFTLYPNAAIIAK
IADYGIAQYCCRMGIKTSEGTPGFRAPEVARGNVIYNQQADVYSFGLLLYDILTTGGRIVEGLKFPNE
FDELEIQGKLPDPVKEYGCAPWPMVEKLIKQCLKENPQERPTSAQVFDILNSAELVCLTRRILLPKNV
IVECMVATHHNSRNASIWLGCGHTDRGQLSFLDLNTEGYTSEEVADSRILCLALVHLPVEKESWIVSG
TQSGTLLVINTEDGKKRHTLEKMTDSVTCLYCNSFSKQSKQKNFLLVGTADGKLAIFEDKTVKLKGAA
PLKILNIGNVSTPLMCLSESTNSTERNVMWGGCGTKIFSFSNDFTIQKLIETRTSQLFSYAAFSDSNI
ITVVVDTALYIAKQNSPVVEVWDKKTEKICGLIDCVHFLSLKNVMLVLGYNRKNTEGTQKQKEIQSCL
TVWDINLPHEVQNLEKMIEVRKELAEKMRRTSVE

| | | |
|---|---|---|
| NOV74c, CG90866-01 | SEQ ID NO: 1075 | 3052 bp |

| | | |
|---|---|---|
| DNA Sequence | ORF Start: ATG at 108 | ORF Stop: TAA at 2853 |

ACGCAGTTCACTTTCTAAATGAATCAGGAGTCCTTCTTCATTTTCAAGACCCAGCACTGCAGTTAAGT
GACTTGTACTTTGTGGAACCCAAGTGGCTTTGTAAAATCATGGCACAGATTTTGACAGTGAAAGTGGA
AGGTTGTCCAAAACACCCTAAGGGCATTATTTCGCGTAGAGATGTGGAAAAATTTCTTTCAAAAAAAA
GGAAATTTCCAAAGAACTACATGTCACAGTATTTTAAGCTCCTAGAAAAATTCCAGATTGCTTTGCCA
ATAGGAGAAGAATATTTGCTGGTTCCAAGCAGTTTGTCTGACCACAGGCCTGTGATAGAGCTTCCCCA
TTGTGAGAACTCTGAAATTATCATCCGACTATATGAAATGCCTTATTTTCCAATGGGATTTTGGTCAA
GATTAATCAATCGATTACTTGAGATTTCACCTTACATGCTTTCAGGGAGAGAACGAGCACTTCGCCCA
AACAGAATGTATTGGCGACAAGGCATTTACTTAAATTGGTCTCCTGAAGCTTATTGTCTGGTAGGATC
TGAAGTCTTAGACAATCATCCAGAGAGTTTCTTAAAAATTACAGTTCTTCTTCTTGTAGAAAACTGTA
TTCTTTTGGGCCAAGTTGTGGACCACATTGATTCTCTCATGGAAGAATGGTTTCCTGGGTTGCTGGAG
ATTGATATTTGTGGTGAAGGAGAAACTCTGTTGAAGAAATGGGCATTATATAGTTTTAATGATGGCGA
AGAACATCAAAAAATCTTACTTGATGACTTGATGAAGAAAGCAGAGGAAGGAGATCTCTTAGTAAATC
CAGATCAACCAAGGCTCACCATTCCAATATCTCAGATTGCCCCTGACTTGATTTTGGCTGACCTGCCT
AGAAATATTATGTTGAATAATGATGAGTTGGAATTTGAACAAGCTCCAGAGTTTCTCCTAGGTGATGG
CAGTTTTGGATCAGTTTACCGAGCAGCCTATGAAGGAGAAGAAGTGGCTGTGAAGATTTTTAATAAAC
ATACATCACTCAGGCTGTTAAGACAAGAGCTTGTGGTGCTTTGCCACCTCCACCACCCCAGTTTGATA
TCTTTGCTGGCAGCTGGGATTCGTCCCCGGATGTTGGTGATGGAGTTAGCCTCCAAGGGTTCCTTGGA
TCGCCTGCTTCAGCAGGACAAAGCCAGCCTCACTAGAACCCTACAGCACAGGATTGCACTCCACGTAG
CTGATGGTTTGAGATACCTCCACTCAGCCATGATTATATACCGAGACCTGAAACCCCACAATGTGCTG
CTTTTCACACTGTATCCCAATGCTGCCATCATTGCAAAGATTGCTGACTACGGCATTGCTCAGTACTG
CTGTAGAATGGGGATAAAAACATCAGAGGGCACACCAGGTTTTCGTGCACCTGAAGTTGCCAGAGGAA
ATGTCATTTATAACCAACAGGCTGATGTTTATTCATTTGGTTTACTACTCTATGACATTTTGACAACT
GGAGGTAGAATAGTAGAGGGTTTGAAGTTTCCAAATGAGTTTGATGAATTAGAAATACAAGGAAAATT
ACCTGATCCAGTTAAAGAATATGGTTGTGCCCCATGGCCTATGGTTGAGAAATTAATTAAACAGTGTT
TGAAAGAAAATCCTCAAGAAAGGCCTACTTCTGCCCAGGTATTCGACATTTTGAATTCAGCTGAATTA
TCAGCTGAATTAGTCTGTCTGACGAGACGCATTTTATTACCTAAAAACGTAATTGTTGAATGCATGGT
TGCTACACATCACAACAGCAGGAATGCAAGCATTTGGCTGGGCTGTGGGCACACCGACAGAGGACAGC
TCTCATTTCTTGACTTAAATACTGAAGGATACACTTCTGAGGAAGTTGCTGATAGTAGAATATTGTGC
TTAGCCTTGGTGCATCTTCCTGTTGAAAAGGAAAGCTGGATTGTGTCTGGGACACAGTCTGGTACTCT
ACGCAGTTCACTTTCTAAATGAATCAGGAGTCCTTCTTCATTTTCAAGACCCAGCACTGCAGTTAAGT
GACTTGTACTTTGTGGAACCCAAGTGGCTTTGTAAAATCATGGCACAGATTTTGACAGTGAAAGTGGA
AGGTTGTCCAAAACACCCTAAGGGCATTATTTCGCGTAGAGATGTGGAAAAATTTCTTTCAAAAAAAA
GGAAATTTCCAAAGAACTACATGTCACAGTATTTTAAGCTCCTAGAAAAATTCCAGATTGCTTTGCCA
ATAGGAGAAGAATATTTGCTGGTTCCAAGCAGTTTGTCTGACCACAGGCCTGTGATAGAGCTTCCCCA
TTGTGAGAACTCTGAAATTATCATCCGACTATATGAAATGCCTTATTTTCCAATGGGATTTTGGTCAA
GATTAATCAATCGATTACTTGAGATTTCACCTTACATGCTTTCAGGGAGAGAACGAGCACTTCGCCCA
AACAGAATGTATTGGCGACAAGGCATTTACTTAAATTGGTCTCCTGAAGCTTATTGTCTGGTAGGATC
TGAAGTCTTAGACAATCATCCAGAGAGTTTCTTAAAAATTACAGTTCTTCTTCTTGTAGAAAACTGTA
TTCTTTTGGGCCAAGTTGTGGACCACATTGATTCTCTCATGGAAGAATGGTTTCCTGGGTTGCTGGAG
ATTGATATTTGTGGTGAAGGAGAAACTCTGTTGAAGAAATGGGCATTATATAGTTTTAATGATGGCGA
AGAACATCAAAAAATCTTACTTGATGACTTGATGAAGAAAGCAGAGGAAGGAGATCTCTTAGTAAATC
CAGATCAACCAAGGCTCACCATTCCAATATCTCAGATTGCCCCTGACTTGATTTTGGCTGACCTGCCT
AGAAATATTATGTTGAATAATGATGAGTTGGAATTTGAACAAGCTCCAGAGTTTCTCCTAGGTGATGG
CAGTTTTGGATCAGTTTACCGAGCAGCCTATGAAGGAGAAGAAGTGGCTGTGAAGATTTTTAATAAAC
ATACATCACTCAGGCTGTTAAGACAAGAGCTTGTGGTGCTTTGCCACCTCCACCACCCCAGTTTGATA
TCTTTGCTGGCAGCTGGGATTCGTCCCCGGATGTTGGTGATGGAGTTAGCCTCCAAGGGTTCCTTGGA
TCGCCTGCTTCAGCAGGACAAAGCCAGCCTCACTAGAACCCTACAGCACAGGATTGCACTCCACGTAG
CTGATGGTTTGAGATACCTCCACTCAGCCATGATTATATACCGAGACCTGAAACCCCACAATGTGCTG
CTTTTCACACTGTATCCCAATGCTGCCATCATTGCAAAGATTGCTGACTACGGCATTGCTCAGTACTG
CTGTAGAATGGGGATAAAAACATCAGAGGGCACACCAGGTTTTCGTGCACCTGAAGTTGCCAGAGGAA
ATGTCATTTATAACCAACAGGCTGATGTTTATTCATTTGGTTTACTACTCTATGACATTTTGACAACT
GGAGGTAGAATAGTAGAGGGTTTGAAGTTTCCAAATGAGTTTGATGAATTAGAAATACAAGGAAAATT
ACCTGATCCAGTTAAAGAATATGGTTGTGCCCCATGGCCTATGGTTGAGAAATTAATTAAACAGTGTT
TGAAAGAAAATCCTCAAGAAAGGCCTACTTCTGCCCAGGTATTCGACATTTTGAATTCAGCTGAATTA
CCTGGTCATCAATACCGAAGATGGGAAAAAGAGACATACCCTAGAAAAGATGACTGATTCTGTCACTT
GTTTGTATTGCAATTCCTTTTCCAAGCAAAGCAAACAAAAAAATTTTCTTTTGGTTGGAACCGCTGAT
GGCAAGTTAGCAATTTTTGAAGATAAGACTGTTAAGCTTAAAGGAGCTGCTCCTTTGAAGATACTAAA
TATAGGAAATGTCAGTACTCCATTGATGTGTTTGAGTGAATCCACAAATTCAACGGAAAGAAATGTAA
TGTGGGGAGGATGTGGCACAAAGATTTTCTCCTTTTCTAATGATTTCACCATTCAGAAACTCATTGAG
ACAAGAACAAGCCAACTGTTTTCTTATGCAGCTTTCAGTGATTCCAACATCATAACAGTGGTGGTAGA
CACTGCTCTCTATATTGCTAAGCAAAATAGCCCTGTTGTGGAAGTGTGGGATAAGAAAACTGAAAAAC
TCTGTGGACTAATAGACTGCGTGCACTTTTTAAGGTTAGTAAAACCAAATAGAAAAAAATTATCTAAC
CTTATGATGTCTTTGGCTTTACATCCTATATGTTTAAAATCAAAGTTAAGATGCAGTTCATCCAAAGG
AAGATCCCATATTTTGCTTCGTGTAATTTACAACTTTTGTAATTCGGTCAGAGTCATGATGACAGCAC
AGCTAGGCGGAAGCCTTAAAAATGTCATGCTGGTATTGGGCTACAACCGGAAAAATACTGAAGGTACA
CAAAAGCAGAAAGAGATACAATCTTGCTTGACCGTTTGGGACATCAATCTTCCACATGAAGTGCAAAA
TTTAGAAAAACACATTGAAGTGAGAAAAGAATTAGCTGAAAAAATGAGACGAACATCTGTTGAGTAAG
AGAGAAATAGGAATTGTCTTTGGATAGGAAAATTATTCTCTCCTCTTGTAAATATTTATTTTAAAAAT
GTTCACATGGAAAGGGTACTCACATTTTTTGAAATAGCTCGTGTGTATGAAGGAATGTTATTATTTTT
AATTTAAATATATGTAAAAATACTTACCAGTAAATGTGTATTTTAAAGAACTATTTAAAA

NOV74c, CG90866-01

| | | | |
|---|---|---|---|
| Protein Sequence | SEQ ID NO: 1076 | 915 aa | MW at 103676.4kD |

MAQILTVKVEGCPKHPKGIISRRDVEKFLSKKRKFPKNYMSQYFKLLEKFQIALPIGEEYLLVPSSLS
DHRPVIELPHCENSEIIIRLYEMPYFPMGFWSRLINRLLEISPYMLSGRERALRPNRMYWRQGIYLNW
SPEAYCLVGSEVLDNHPESFLKITVPSCRKGCILLGQVVDHIDSLMEEWFPGLLEIDICGEGETLLKK
WALYSFNDGEEHQKILLDDLMKKAEEGDLLVNPDQPRLTIPISQIAPDLILADLPRNIMLNNDELEFE
QAPEFLLGDGSFGSVYRAAYEGEEVAVKIFNKHTSLRLLRQELVVLCHLHHPSLISLLAAGIRPRMLV
MELASKGSLDRLLQQDKASLTRTLQHRIALHVADGLRYLHSAMIIYRDLKPHNVLLFTLYPNAAIIAK
IADYGIAQYCCRMGIKTSEGTPGFRAPEVARGNVIYNQQADVYSFGLLLYDILTTGGRIVEGLKFPNE
FDELEIQGKLPDPVKEYGCAPWPMVEKLIKQCLKENPQERPTSAQVFSQVFDILNSAELVCLTRRILL
PKNVIVECMVATHHNSRNASIWLGCGHTDRGQLSFLDLNTEGYTSEEVADSRILCLALVHLPVEKESW
IVSGTQSGTLLVINTEDGKKRHTLEKMTDSVTCLYCNSFSKQSKQKNFLLVGTADGKLAIFEDKTVKL
KGAAPLKILNIGNVSTPLMCLSESTNSTERNVMWGGCGTKIFSFSNDFTIQKLIETRTSQLFSYAAFS
DSNIITVVVDTALYIAKQNSPVVEVWDKTEKLCGLIDCVHFLRLVKPNRKKLSNLMMSLALHPICKLK
SKLRCSSSKGRSHILLRVIYNFCNSVRVMMTAQLGGSLKNVMLVLGYNRKNTEGTQKQKEIQSCLTVW
DINLPHEVQNLEKHIEVRKELAEKMRTSVE

| | | |
|---|---|---|
| NOV74d, CG90866-02 | SEQ ID NO: 1077 | 3040 bp |

| | | |
|---|---|---|
| DNA Sequence | ORF Start: ATG at 108 | ORF Stop: TAA at 2841 |

ACGCAGTTCACTTTCTAAATGAATCAGGAGTCCTTCTTCATTTTCAAGACCCAGCACTGCAGTTAAGT
GACTTGTACTTTGTGGAACCCAAGTGGCTTTGTAAAATCATGGCACAGATTTTGACAGTGAAAGTGGA
AGGTTGTCCAAAACACCCTAAGGGCATTATTTCGCGTAGAGATGTGGAAAAATTTCTTTCAAAAAAAA
GGAAATTTCCAAAGAACTACATGTCACAGTATTTTAAGCTCCTAGAAAAATTCCAGATTGCTTTGCCA
ATAGGAGAAGAATATTTGCTGGTTCCAAGCAGTTTGTCTGACCACAGGCCTGTGATAGAGCTTCCCCA
TTGTGAGAACTCTGAAATTATCATCCGACTATATGAAATGCCTTATTTTCCAATGGGATTTTGGTCAA
GATTAATCAATCGATTACTTGAGATTTCACCTTACATGCTTTCAGGGAGAGAACGAGCACTTCGCCCA
AACAGAATGTATTGGCGACAAGGCATTTACTTAAATTGGTCTCCTGAAGCTTATTGTCTGGTAGGATC
TGAAGTCTTAGACAATCATCCAGAGAGTTTCTTAAAAATTACAGTTCTTCTTCTTGTAGAAAACTGTA
TTCTTTTGGGCCAAGTTGTGGACCACATTGATTCTCTCATGGAAGAATGGTTTCCTGGGTTGCTGGAG
ATTGATATTTGTGGTGAAGGAGAAACTCTGTTGAAGAAATGGGCATTATATAGTTTTAATGATGGCGA
AGAACATCAAAAAATCTTACTTGATGACTTGATGAAGAAAGCAGAGGAAGGAGATCTCTTAGTAAATC
CAGATCAACCAAGGCTCACCATTCCAATATCTCAGATTGCCCCTGACTTGATTTTGGCTGACCTGCCT
AGAAATATTATGTTGAATAATGATGAGTTGGAATTTGAACAAGCTCCAGAGTTTCTCCTAGGTGATGG
CAGTTTTGGATCAGTTTACCGAGCAGCCTATGAAGGAGAAGAAGTGGCTGTGAAGATTTTTAATAAAC
ATACATCACTCAGGCTGTTAAGACAAGAGCTTGTGGTGCTTTGCCACCTCCACCACCCCAGTTTGATA
TCTTTGCTGGCAGCTGGGATTCGTCCCCGGATGTTGGTGATGGAGTTAGCCTCCAAGGGTTCCTTGGA
TCGCCTGCTTCAGCAGGACAAAGCCAGCCTCACTAGAACCCTACAGCACAGGATTGCACTCCACGTAG
CTGATGGTTTGAGATACCTCCACTCAGCCATGATTATATACCGAGACCTGAAACCCCACAATGTGCTG
CTTTTCACACTGTATCCCAATGCTGCCATCATTGCAAAGATTGCTGACTACGGCATTGCTCAGTACTG
CTGTAGAATGGGGATAAAAACATCAGAGGGCACACCAGGTTTTCGTGCACCTGAAGTTGCCAGAGGAA
ATGTCATTTATAACCAACAGGCTGATGTTTATTCATTTGGTTTACTACTCTATGACATTTTGACAACT
GGAGGTAGAATAGTAGAGGGTTTGAAGTTTCCAAATGAGTTTGATGAATTAGAAATACAAGGAAAATT
ACCTGATCCAGTTAAAGAATATGGTTGTGCCCCATGGCCTATGGTTGAGAAATTAATTAAACAGTGTT
TGAAAGAAAATCCTCAAGAAAGGCCTACTTCTGCCCAGGTATTCGACATTTTGAATTCAGCTGAATTA
GTCTGTCTGACGAGACGCATTTTATTACCTAAAAACGTAATTGTTGAATGCATGGTTGCTACACATCA
CAACAGCAGGAATGCAAGCATTTGGCTGGGCTGTGGGCACACCGACAGAGGACAGCTCTCATTTCTTG
ACTTAAATACTGAAGGATACACTTCTGAGGAAGTTGCTGATAGTAGAATATTGTGCTTAGCCTTGGTG
CATCTTCCTGTTGAAAAGGAAAGCTGGATTGTGTCTGGGACACAGTCTGGTACTCTCCTGGTCATCAA
TACCGAAGATGGGAAAAAGAGACATACCCTAGAAAAGATGACTGATTCTGTCACTTGTTTGTATTGCA
ATTCCTTTTCCAAGCAAAGCAAACAAAAAAATTTTCTTTTGGTTGGAACCGCTGATGGCAAGTTAGCA
ATTTTTGAAGATAAGACTGTTAAGCTTAAAGGAGCTGCTCCTTTGAAGATACTAAATATAGGAAATGT
CAGTACTCCATTGATGTGTTTGAGTGAATCCACAAATTCAACGGAAAGAAATGTAATGTGGGGAGGAT
GTGGCACAAAGATTTTCTCCTTTTCTAATGATTTCACCATTCAGAAACTCATTGAGACAAGAACAAGC
CAACTGTTTTCTTATGCAGCTTTCAGTGATTCCAACATCATAACAGTGGTGGTAGACACTGCTCTCTA
TATTGCTAAGCAAAATAGCCCTGTTGTGGAAGTGTGGGATAAGAAAACTGAAAAACTCTGTGGACTAA
TAGACTGCGTGCACTTTTTAAGCCTTAAAAATGTCATGCTGGTATTGGGCTACAACCGGAAAAATACT
TTGGCTTTACATCCTATATGTTTAAAATCAAAGTTAAGATGCAGTTCATCCAAAGGAAGATCCCATAT
TTTGCTTCGTGTAATTTACAACTTTTGTAATTCGGTCAGAGTCATGATGACAGCACAGCTAGGCGGAA
GCCTTAAAAATGTCATGCTGGTATTGGGCTACAACCGGAAAAATACTGAAGGTACACAAAAGCAGAAA
GAGATACAATCTTGCTTGACCGTTTGGGACATCAATCTTCCACATGAAGTGCAAAATTTAGAAAAACA
CATTGAAGTGAGAAAAGAATTAGCTGAAAAAATGAGACGAACATCTGTTGAGTAAGAGAGAAATAGGA
ATTGTCTTTGGATAGGAAAATTATTCTCTCCTCTTGTAAATATTTATTTTAAAAATGTTCACATGGAA
AGGGTACTCACATTTTTTGAAATAGCTCGTGTGTATGAAGGAATGTTATTATTTTTAATTTAAATATA
TGTAAAAATACTTACCAGTAAATGTGTATTTTAAAGAACTATTTAAAA

NOV74d, CG90866-02

| | | | |
|---|---|---|---|
| Protein Sequence | SEQ ID NO: 1078 | 911 aa | MW at 103214.9kD |

MAQILTVKVEGCPKHPKGIISRRDVEKFLSKKRKFPKNYMSQYFKLLEKFQIALPIGEEYLLVPSSLS
DHRPVIELPHCENSEIIIRLYEMPYFPMGFWSRLINRLLEISPYMLSGRERALRPNRMYWRQGIYLNW
SPEAYCLVGSEVLDNHPESFLKITVPSCRKGCILLGQVVDHIDSLMEEWFPGLLEIDICGEGETLLKK
WALYSFNDGEEHQKILLDDLMKKAEEGDLLVNPDQPRLTIPISQIAPDLILADLPRNIMLNNDELEFE
QAPEFLLGDGSFGSVYRAAYEGEEVAVKIFNKHTSLRLLRQELVVLCHLHHPSLISLLAAGIRPRMLV
MELASKGSLDRLLQQDKASLTRTLQHRIALHVALGLRYLHSAMIIYRDLKPHNVLLFTLYPNAAIIAK
IADYGIAQYCCRMGIKTSEGTPGFRAPEVARGNVIYNQQADVYSFGLLLYDILTTGGRIVEGLKFPNE
FDELEIQGKLPDPVKEYGCAPWPMVEKLIKQCLKENPQERPTSAQVFDILNSAELVCLTRRILLPKNV
IVECMVATHHNSRNASIWLGCGHTDRGQLSFLDLNTEGYTSEEVADSRILCLALVHLPVEKESWIVSG
TQSGTLLVINTEDGKKRHTLEKMTDSVTCLYCNSFSKQSKQKNFLLVGTADGKLAIFEDKTVKLKGAA
PLKILNIGNVSTPLMCLSESTNSTERNVMWGGCGTKIFSFSNDFTIQKLIETRTSQLFSYAAFSDSNI
ITVVVDTALYIAKQNSPVVEVWDKKTEKLCGLIDCVHFLRLVKPNRKKLSNLMMSLALHPICLKSKLR
CSSSKGRSHILLRVIYNFCNSVRVMMTAQLGGSLKNVMLVLGYNRKNTEGTQKQKEIQSCLTVWDINL
PHEVQNLEKHIEVRKELAEKMRRTSVE

| | | |
|---|---|---|
| NOV74e, CG90866-05 | SEQ ID NO: 1079 | 2955 bp |

| | | |
|---|---|---|
| DNA Sequence | ORF Start: ATG at 81 | ORF Stop: TAA at 2844 |

GAGTCCTTCTTCATTTTCAAGACCCAGCACTGCAGTTAAGTGACTTGTACTTTGTGGAACCCAAGTGG
CTTTGTAAAATCATGGCACAGATTTTGACAGTGAAAGTGGAAGGTTGTCCAAAACACCCTAAGGGAAT
TATTTCGCGTAGAGATGTGGAAAAATTTCTTTCAAAAAAAAGGAAATTTCCAAAGAACTACATGTCAC
AGTATTTTAAGCTCCTAGAAAAATTCCAGATTGCTTTGCCAATAGGAGAAGAATATTTGCTGGTTCCA
AGCAGTTTGTCTGACCACAGGCCTGTGATAGAGCTTCCCCATTGTGAGAACTCTGAAATTATCATCCG
AGCAGTTTGTCTGACCACAGGCCTGTGATAGAGCTTCCCCATTGTGAGAACTCTGAAATTATCATCCG
ACTATATGAAATGCCTTATTTTCCAATGGGATTTTGGTCAAGATTAATCAATCGATTACTTGAGATTT
CACCTTACATGCTTTCAGGGAGAGAACGAGCACTTCGCCCAAACAGAATGTATTGGCGACAAGGCATT
TACTTAAATTGGTCTCCTGAAGCTTATTGTCTGGTAGGATCTGAAGTCTTAGACAATCATCCAGAGAG
TTTCTTAAAAATTACAGTTCCTTCTTGTAGAAAAGGCTGTATTCTTTTGGGCCAAGTTGTGGACCACA
TTGATTCTCTCATGGAAGAATGGTTTCCTGGGTTGCTGGAGATTGATATTTGTGGTGAAGGAGAAACT
CTGTTGAAGAAATGGGCATTATATAGTTTTAATGATGGTGAAGAACATCAAAAAATCTTACTTGATGA
CTTGATGAAGAAAGCAGAGGAAGGAGATCTCTTAGTAAATCCAGATCAACCAAGGCTCACCATTCCAA
TATCTCAGATTGCCCCTGACTTGATTTTGGCTGACCTGCCTAGAAATATTATGTTGAATAATGATGAG
TTGGAATTTGAACAAGCTCCAGAGTTTCTCCTAGGTGATGGCAGTTTTGGATCAGTTTACCGAGCAGC
CTATGAAGGAGAAGAAGTGGCTGTGAAGATTTTTAATAAACATACATCACTCAGGCTGTTAAGACAAG
AGCTTGTGGTGCTTTGCCACCTCCACCACCCCAGTTTGATATCTTTGCTGGCAGCTGGGATTCGTCCC
CGGATGTTGGTGATGGAGTTAGCCTCCAAGGGTTCCTTGGATCGCCTGCTTCAGCAGGACAAAGCCAG
CCTCACTAGAACCCTACAGCACAGGATTGCACTCCACGTAGCTGATGGTTTGAGATACCTCCACTCAG
CCATGATTATATACCGAGACCTGAAACCCCACAATGTGCGGCTTTTCACACTGTATCCCAATGCTGCC
ATCATTGCAAAGATTGCTGACTACGGCATTGCTCAGTACTGCTGTAGAATGGGGATAAAAACATCAGA
GGGCACACCAGGGTTTCGTGCACCTGAAGTTGCCAGAGGAAATGTCATTTATAACCAACAGGCTGATG
TTTATTCATTTGGTTTACTACTCTATGACATTTTGACAACTGGAGGTAGAATAGTAGAGGGTTTGAAG
TTTCCAAATGAGTTTGATGAATTAGAAATACAAGGAAAATTACCTGATCCAGTTAAAGAATATGGTTG
TGCCCCATGGCCTATGGTTGAGAAATTAATTAAACAGTGTTTGAAAGAAAATCCTCAAGAAAGGCCTA
CTTCTGCCCAGGTCTTTGACATTTTGAATTCAGCTGATTAGTCTGTCTGACGAGACGCATTTTTATTA
CCTAAAAACGTAATTGTTGAATGCATGGTTGCTACACATCACAACAGCAGGAATGCAAGCATTTGGCT
GGGCTGTGGGCACACCGACAGAGGACAGCTCTCATTTCTTGACTTAAATACTGAAGGATACACTTCTG
AGGAAGTTGCTGATAGTAGAATATTGTGCTTAGCCTTGGTGCATCTTCCTGTTGAAAAGGAAAGCTGG
ATTGTGTCTGGGACACAGTCTGGTACTCTCCTGGTCATCAATACCGAAGATGGGAAAAAGAGACATAC
CCTAGAAAAGATGACTGATTCTGTCACTTGTTTGTATTGCAATTCCTTTTCCAAGCAAAGCAAACAAA
AAAATTTTCTTTTGGTTGGAACCGCTGATGGCAAGTTAGCAATTTTTGAAGATAAGACTGTTAAGCTT
AAAGGAGCTGCTCCTTTGAAGATACTAAATATAGGAATGTCAGGTACTCCATTGATGTGTTTGAGTGA
ATCCACAAATTCAACGGAAAGAAATGTAATGTGGGGAGGATGTGGCACAAAGATTTTCTCCTTTTCTA
ATGATTTCACCATTCAGAAACTCATTGAGACAAGAACAAGCCAACTGTTTTCTTATGCAGCTTTCAGT
GATTCCAACATCATAACAGTGGTGGTAGACACTGCTCTCTATATTGCTAAGCAAAATAGCCCTGTTGT
GGAAGTGTGGGATAAGAAAACTGAAAAACTCTGTGGGCTAATAGACTGCGTGCACTTTTTAAGGGAGG
TAACGGTAAAAGAAAACAAGGAATCAAAACACAAAATGTCTTATTCTGGGAGAGTGAAAACCCTCTGC
CTTCAGAAGAACACTGCTCTTTGGATAGGAACTGGAGGAGGCCATATTTTACTCCTGGATCTTTCAAC
TCGTCGACTTATACGTGTAATTTACAACTTTTGTAATTCGGTCAGAGTCATGATGACAGCACAGCTAG
GAAGCCTTAAAAATGTCATGCTGGTATTGGGCTACAACCGGAAAAATACTGAAGGTACACAAAAGCAG
AAAGAGATACAATCTTGCTTGACCGTTTGGGACATCAATCTTCCACATGAAGTGCAAAATTTAGAAAA
ACACATTGAAGTGAGAAAAGAATTAGCTGAAAAAATGAGACGAACATCTGTTGAGTAAGAGAGAAATA
GGAATTGTCTTTGGATAGGAAAATTATTCTCTCCTCTTGTAAATATTTATTTTAAAAATGTTCACATG
GAAAGGGTACTCACATTTTTAAGGGCGAATC

NOV74e, CG90866-05

| | | | |
|---|---|---|---|
| Protein Sequence | SEQ ID NO: 1080 | 921 aa | MW at 104423.0kD |

MAQILTVKVEGCPKHPKGIISRRDVEKFLSKKRKFPKNYMSQYFKLLEKFQIALPIGEEYLLVPSSLS
DHRPVIELPHCENSEIIIRLYEMPYFPMGFWSRLINRLLEISPYMLSGRERALRPNRMYWRQGIYLNW
SPEAYCLVGSEVLDNHPESFLKITVPSCRKGCILLGQVVDHIDSLMEEWFPGLLEIDICGEGETLLKK
WALYSFNDGEEHQKILLDDLMKKAEEGDLLVNPDQPRLTIPISQIAPDLILADLPRNIMLNNDELEFE
QAPEFLLGDGSFGSVYRAAYEGEEVAVKIFNKHTSLRLLRQELVVLCHLHHPSLISLLAAGIRPRMLV
MELASKGSLDRLLQQDKASLTRTLQHRIALHVALGLRYLHSAMIIYRDLKPHNVLLFTLYPNAAIIAK
IADYGIAQYCCRMGIKTSEGTPGFRAPEVARGNVIYNQQADVYSFGLLLYDILTTGGRIVEGLKFPNE
FDELEIQGKLPDPVKEYGCAPWPMVEKLIKQCLKENPQERPTSAQVFDILNSAELVCLTRRILLPKNV
IVECMVATHHNSRNASIWLGCGHTDRGQLSFLDLNTEGYTSEEVADSRILCLALVHLPVEKESWIVSG
TQSGTLLVINTEDGKKRHTLEKMTDSVTCLYCNSFSKQSKQKNFLLVGTADGKLAIFEDKTVKLKGAA
PLKILNIGNVSTPLMCLSESTNSTERNVMWGGCGTKIFSFSNDFTIQKLIETRTSQLFSYAAFSDSNI
ITVVVDTALYIAKQNSPVVEVWDKKTEKICGLIDCVHFLSLKNVMLVLGYNRKNTEGTQKQKEIQSCL
TALWIGTGGGHILLLDLSTRRLIRVIYNFCNSVRVMMTAQLGSLKNVMLVLGYNRKNTEGTQKQKEIQ
SCLTVWDINLPHEVQNLEKMIEVRKELAEKMRRTSVE

[0781] A ClustalW comparison of the above protein sequences yields the following sequence alignment shown in Table 74B.

TABLE 74B
Comparison of the NOV74 protein sequences.

| | |
|---|---|
| NOV74a | MQPLDFSSGGSDPNISLSEKIRDQLVVGQLIPDCYVELEKIILSERKNVPIEFPVIDRKR |
| NOV74b | ------------------------------------------------------------ |
| NOV74c | ------------------------------------------------------------ |
| NOV74d | ------------------------------------------------------------ |
| NOV74e | ------------------------------------------------------------ |
| NOV74a | LLQLVRENQLQLDENELPHAVHFLNESGVLLHFQDPALQLSKLYFVEPKWLCKIMAQDVS |
| NOV74b | ------------------------------------------------------MAQ--- |
| NOV74c | ------------------------------------------------------MAQ--- |
| NOV74d | ------------------------------------------------------MAQ--- |
| NOV74e | ------------------------------------------------------MAQ--- |
| NOV74a | SIFGLYIRDILTVKVEGCPKHPKGIISRRDVEKFLSKKRKFPKNYMSQYFKLLEKFQIAL |
| NOV74b | ---------ILTVKVEGCPKHPKGIISRRDVEKFLSKKRKFPKMYMSQYFKLLEKFQIAL |
| NOV74c | ---------ILTVKVEGCPKHPKGIISRRDVEKFLSKKRKFPKMYMSQYFKLLEKFQIAL |
| NOV74d | ---------ILTVKVEGCPKHPKGIISRRDVEKFLSKKRKFPKMYMSQYFKLLEKFQIAL |
| NOV74e | ---------ILTVKVEGCPKHPKGIISRRDVEKFLSKKRKFPKMYMSQYFKLLEKFQIAL |
| NOV74a | PIGEEYLLVPSSLSDHRPVIELPHCENSEIIIRLYEMPYFPMGFWSRLINRLLEISPYML |
| NOV74b | PIGEEYLLVPSSLSDHRPVIELPHCENSEIIIRLYEMPYFPMGFWSRLINRLLEISPYML |
| NOV74c | PIGEEYLLVPSSLSDHRPVIELPHCENSEIIIRLYEMPYFPMGFWSRLINRLLEISPYML |
| NOV74d | PIGEEYLLVPSSLSDHRPVIELPHCENSEIIIRLYEMPYFPMGFWSRIINRLLEISPYML |
| NOV74e | PIGEEYLLVPSSLSDHRPVIELPHCENSEIIIRLYEMPYFPMGFWSRIINRLLEISPYML |
| NOV74a | SG--R-----------------------------------------------GCILLGQV |
| NOV74b | SGRERALRPNRMYWRQGIYLNWSPEAYCLVGSEVLDNHPESFLKITVPSCRKGCILLGQV |
| NOV74c | SGRERALRPNRMYWRQGIYLNWSPEAYCLVGSEVLDNHPESFLKITVPSCRKGCILLGQV |
| NOV74d | SGRERALRPNRNYWRQGIYLNWSPEAYCLVGSEVLDNHPESFLKITVPSCRKGCILLGQV |
| NOV74e | SGRERALRPNRMYWRQGIYLNWSPEAYCLVGSEVLDNHPESFLKITVPSCRKGCILLGQV |
| NOV74a | VDHIDSLMEEWFPGLLEIDICGEGETLLKKWALYSFNDGEEHQKILLDDLMKKAEEGDLL |
| NOV74b | VDHIDSLMEEWFPGLLEIDICGEGETLLKKWALYSFNDGEEHQKILLDDLMKKAEEGDLL |
| NOV74c | VDHIDSLMEEWFPGLLEIDICGEGETLLKKWALYSFNDGEEHQKILLDDLMKKAEEGDLL |
| NOV74d | VDHIDSLMEEWFPGLLEIDICGEGETLLKKWALYSFNDGEEHQKILLDDLMKKAEEGDLL |
| NOV74e | VDHIDSLMEEWFPGLLEIDICGEGETLLKKWALYSFNDGEEHQKILLDDLMKKAEEGDLL |
| NOV74a | VNPDQPRLTIPISQIAPDLILADPPRNIMLNNDELEFEQAPEFLLDCFVCIHLYPSSDYI |
| NOV74b | VNPDQPRLTIPISQIAPDLILADLPRNIMLNNDELEFEQAPEFLL--------------- |
| NOV74c | VNPDQPRLTIPISQIAPDLILADLPRNIMLNNDELEFEQAPEFLL--------------- |
| NOV74d | VNPDQPRLTIPISQIAPDLILADLPRNIMLNNDELEFEQAPEFLL--------------- |
| NOV74e | VNPDQPRITIPISQIAPDLILADLPRNIMLNNDELEFEQAPEFLL--------------- |
| NOV74a | SRHYMRTINIVQTGFAKCRWRVTVHGADHGDGSFGSVYRAAYEGEEVAVKIFNKHTSLRL |
| NOV74b | -----------------------------GDGSFGSVYRAAYEGEEVAVKIFNKHTSLRL |
| NOV74c | -----------------------------GDGSFGSVYRAAYEGEEVAVKIFNKHTSLRL |
| NOV74d | -----------------------------GDGSFGSVYRAAYEGEEVAVKIFNKHTSLRL |
| NOV74e | -----------------------------GDGSFGSVYRAAYEGEEVAVKIFNKHTSLRL |
| NOV74a | LRQELVVLCHLHHPSLISLLAAGIRPRMLVMELASKGSLDRLLQQDKASLTRTLQHRIAL |
| NOV74b | LRQELVVLCHLHHPSLISLLAAGIRPRMLVMELASKGSLDRLLQQDKASLTRTLQHRIAL |
| NOV74c | LRQELVVLCHLHHPSLISLLAAGIRPRMLVMELASKGSLDRLLQQDKASLTRTLQHRIAL |
| NOV74d | LRQELVVLCHLHHPSLISLLAAGIRPRMLVMELASKGSLDRLLQQDKASLTRTLQHRIAL |
| NOV74e | LRQELVVLCHLHHPSLISLLAAGIRPRMLVMELASKGSLDRLLQQDKASLTRTLQHRIAL |
| NOV74a | HVADGLRYLHSAMIIYRDLKPHNVLLFTLYPNAAIIAKIADYGIAQYCCRMGIKTSEGTP |
| NOV74b | HVADGLRYLHSAMIIYRDLKPHNVLLFTLYPNAAIIAKIADYGIAQYCCRMGIKTSEGTP |
| NOV74c | HVADGLRYLHSANIIYRDLKPHNVLLFTLYPNAAIIAKIADYGIAQYCCRMGIKTSEGTP |
| NOV74d | HVADGLRYLHSANIIYRDLKPHNVLLFTLYPNAAIIAKIADYGIAQYCCRMGIKTSEGTP |
| NOV74e | HVADGLRYLHSAMIIYRDLKPHNVRLFTLYPNAAIIAKIADYGIAQYCCRNGIKTSEGTP |
| NOV74a | GFRAPEVARGNVIYNQQADVYSFGLLLYDILTTGGRIVEGLKFPNEFDELEIQGKLPDPV |
| NOV74b | GFRAPEVARGNVIYNQQADVYSFGLLLYDILTTGGRIVEGLKFPNEFDELEIQGKLPDPV |
| NOV74c | GFRAPEVARGNVIYNQQADVYSFGLLLYDILTTGGRIVEGLKFPNEFDELEIQGKLPDPV |
| NOV74d | GFRAPEVARGNVIYNQQADVYSFGLLLYDILTTGGRIVEGLKFPNEFDELEIQGKLPDPV |
| NOV74e | GFRAPEVARGNVIYNQQADVYSFGLLLYDILTTGGRIVEGLKFPNEFDELEIQGKLPDPV |
| NOV74a | KEYGCAPWPMVEKLIKQCLKENPQERPTSAQVF----DILNSAELVCLTRRILLPKNVIV |
| NOV74b | KEYGCAPWPMVEKLIKQCLKENPQERPTSAQVF----DILNSAELVCLTRRILLPKNVIV |
| NOV74c | KEYGCAPWPMVEKLIKQCLKENPQERPTSAQVFSQVFDILNSAELVCLTRRILLPKNVIV |
| NOV74d | KEYGCAPWPMVEKLIKQCLKENPQERPTSAQVF----DILNSAELVCLTRRILLPKNVIV |
| NOV74e | KEYGCAPWPMVEKLIKQCLKENPQERPTSAQVF----DILNSAELVCLTRRILLPKNVIV |
| NOV74a | ECMVATHHNSRNASIWLGCGHTDRGQLSFLDLNTEGYTSE-------------------- |
| NOV74b | ECMVATHHNSRNASIWLGCGHTDRGQLSFLDLNTEGYTSEEVADSRILCLALVHLPVEKE |
| NOV74c | ECMVATHHNSRNASIWLGCGHTDRGQLSFLDLNTEGYTSEEVADSRILCLALVHLPVEKE |
| NOV74d | ECMVATHHNSRNASIWLGCGHTDRGQLSFLDLNTEGYTSEEVADSRILCLALVHLPVEKE |
| NOV74e | ECMVATHHNSRNASIWLGCGHTDRGQLSFLDLNTEGYTSEEVADSRILCLALVHLPVEKE |
| NOV74a | --------------------------------------------SKQKNFLLVGTADGKL |
| NOV74b | SWIVSGTQSGTLLVINTEDGKKRHTLEKMTDSVTCLYCNSFSKQSKQKNFLLVGTADGKL |
| NOV74c | SWIVSGTQSGTLLVINTEDGKKRHTLEKMTDSVTCLYCNSFSKQSKQKNFLLVGTADGKL |
| NOV74d | SWIVSGTQSGTLLVINTEDGKKRHTLEKMTDSVTCLYCNSFSKQSKQKNFLLVGTADGKL |
| NOV74e | SWIVSGTQSGTLLVINTEDGKKRHTLEKMTDSVTCLYCNSFSKQSKQKNFLLVGTADGKL |
| NOV74a | AIFEDKTVKLKGAAPLKILNIGNVSTPLMCLSESTNSTERNVMWGGCGTKIFSFSNDFTI |
| NOV74b | AIFEDKTVKLKGAAPLKILNIGNVSTPLMCLSESTNSTERNVMWGGCGTKIFSFSNDFTI |
| NOV74c | AIFEDKTVKLKGAAPLKILNIGNVSTPLMCLSESTNSTERNVMWGGCGTKIFSFSNDFTI |
| NOV74d | AIFEDKTVKLKGAAPLKILNIGNVSTPLMCLSESTNSTERNVMWGGCGTKIFSFSNDFTI |
| NOV74e | AIFEDKTVKLKGAAPLKILNIGNVSTPLMCLSESTNSTERNVMWGGCGTKIFSFSNDFTI |
| NOV74a | QKLIETRTSQLFSYAAFSDSNIITVVVDTALYIAKQNSPVVEVWDKKTEKLCGLIDCVHF |
| NOV74b | QKLIETRTSQLFSYAAFSDSNIITVVVDTALYIAKQNSPVVEVWDKKTEKLCGLIDCVHF |
| NOV74c | QKLIETRTSQLFSYAAFSDSNIITVVVDTALYIAKQNSPVVEVWDKKTEKLCGLIDCVHF |
| NOV74d | QKLIETRTSQLFSYAAFSDSNIITVVVDTALYIAKQNSPVVEVWDKKTEKLCGLIDCVHF |
| NOV74e | QKLIETRTSQLFSYAAFSDSNIITVVVDTALYIAKQNSPVVEVWDKKTEKLCGLIDCVHF |
| NOV74a | LREVMVKENKESKHKMSYSGRVKTLCLQKNTALWIGTGGGHILLLDLSTRRLIRVIYNFC |
| NOV74b | L----------S------------------------------------------------ |
| NOV74c | LRLVKPNRKKLSNLMMSLA--LHPICLKSKLRCSSSKGRSHILL---------RVIYNFC |
| NOV74d | LRLVKPNRKKLSNLMMSLA--LHPICLKSKLRCSSSKGRSHILL---------RVIYNFC |
| NOV74e | LREVMVKENKESKHKMSYSGRVKTLCLQKNTALWIGTGGGHILLLDLSTRRLIRVIYNFC |
| NOV74a | NSVRVMMTAQLG-SLKNVMLVLGYNRKNTEGTQKQKEIQSCLTVWDINLPHEVQNLEKHI |
| NOV74b | --------------LKNVMLVLGYNRKNTEGTQKQKEIQSCLTVWDINLPHEVQNLEKHI |
| NOV74c | NSVRVMMTAQLGGSLKNVMLVLGYNRKNTEGTQKQKEIQSCLTVWDINLPHEVQNLEKHI |
| NOV74d | NSVRVMMTAQLGGSLKNVMLVLGYNRKNTEGTQKQKEIQSCLTVWDINLPHEVQNLEKHI |
| NOV74e | NSVRVMMTAQLG-SLKNVMLVLGYNRKNTEGTQKQKEIQSCLTVWDINLPHEVQNLEKHI |
| NOV74a | EVRKELAEKMRRTSVE |
| NOV74b | EVRKELAEKMRRTSVE |
| NOV74c | EVRKELAEKMRRTSVE |
| NOV74d | EVRKELAEKMRRTSVE |
| NOV74e | EVRKELAEKMRRTSVE |
| NOV74a | (SEQ ID NO: 1072) |
| NOV74b | (SEQ ID NO: 1074) |
| NOV74c | (SEQ ID NO: 1076) |
| NOV74d | (SEQ ID NO: 1078) |
| NOV74e | (SEQ ID NO: 1080) |

[0782] Further analysis of the NOV74a protein yielded the following properties shown in Table 74C.

TABLE 74C
Protein Sequence Properties NOV74a

| | |
|---|---|
| SignalP analysis: | No Known Signal Sequence Indicated |

PSORT II analysis:

| PSG: | a new signal peptide prediction method | | | |
|---|---|---|---|---|
| | N-region: | length 5; | pos.chg 0; | neg.chg 1 |
| | H-region: | length 6; | peak value | 0.00 |
| | PSG score: | −4.40 | | |

| | |
|---|---|
| GvH: | von Heijne's method for signal seq. recognition |
| | GvH score (threshold: −2.1): −11.05 |
| | possible cleavage site: between 13 and 14 |

>>> Seems to have no N-terminal signal peptide

| | |
|---|---|
| ALOM: | Klein et al's method for TM region allocation |
| | Init position for calculation: 1 |
| | Tentative number of TMS(s) for the threshold 0.5: 2 |
| | Number of TMS(s) for threshold 0.5: 0 |
| | PERIPHERAL Likelihood = 1.96 (at 794) |
| | ALOM score: −0.64 (number of TMSs: 0) |

MITDISC: discrimination of mitochondrial targeting seq

| | | | |
|---|---|---|---|
| R content: | 0 | Hyd Moment (75): | 1.98 |
| Hyd Moment(95): | 4.87 | G content: | 2 |
| D/E content: | 2 | S/T content: | 3 |
| Score: −7.81 | | | |

Gavel: prediction of cleavage sites for mitochondrial preseq

cleavage site motif not found

NUCDISC: discrimination of nuclear localization signals

pat4: KKRK (5) at 157
pat7: PVIDRKR (3) at 54
bipartite: RKNVPIEFPVIDRKRLL at 46
content of basic residues: 11.6%
NLS Score: 0.59

KDEL: ER retention motif in the C-terminus: none
ER Membrane Retention Signals: none
SKL: peroxisomal targeting signal in the C-terminus: none
PTS2: 2nd peroxisomal targeting signal: none
VAC: possible vacuolar targeting motif: none
RNA-binding motif: none
Actinin-type actin-binding motif:

type 1: none
type 2: none

NMYR: N-myristoylation pattern: none
Prenylation motif: none
memYQRL: transport motif from cell surface to Golgi: none
Tyrosines in the tail: none
Dileucine motif in the tail: none
checking 63 PROSITE DNA binding motifs:

Leucine zipper pattern (PS00029): ***found***
LQLDENELPHAVHFLNESGVLL at 70
Regulator of chromosome condensation (RCC1) signature 2

(PS00626): ***found***

IGTGGGHILLL at 878

checking 71 PROSITE ribosomal protein motifs: none
checking 33 PROSITE prokaryotic DNA binding motifs: none

| | |
|---|---|
| NNCN: | Reinhardt's method for Cytoplasmic/Nuclear discrimination |
| | Prediction: cytoplasmic |
| | Reliability: 89 |
| COIL: | Lupas's algorithm to detect coiled-coil regions |
| | total: 0 residues |

Final Results (k = 9/23):

```
  52.2%: cytoplasmic
  39.1%: nuclear
    8.7%: mitochondrial
```

>> prediction for CG90866-04 is cyt (k = 23)

[0783] A search of the NOV74a protein against the Geneseq database, a proprietary database that contains sequences published in patents and patent publication, yielded several homologous proteins shown in Table 74D.

TABLE 74D
Geneseq Results for NOV74a

| | | NOV74a | Identities/ | |
|---|---|---|---|---|
| | | Residues/ | Similarities for | |
| Geneseq | Protein/Organism/Length | Match | the Matched | Expect |
| Identifier | [Patent #, Date] | Residues | Region | Value |
| AAU03554 | Human protein kinase #54 | 1 . . . 845 | 835/909 (91%) | 0.0 |
| | Homo sapiens, 909 aa. | 1 . . . 909 | 839/909 (91%) | |
| | [WO200138503-A2, 31-MAY- | | | |
| | 2001] | | | |
| ABU11054 | Human protein NOV19b - Homo | 130 . . . 978 | 754/963 (78%) | 0.0 |
| | sapiens, 911 aa. [WO200281629- | 4 . . . 911 | 765/963 (79%) | |
| | A2, 17-OCT-2002] | | | |
| ABU11053 | Human protein NOV19a - Homo | 130 . . . 978 | 754/967 (77%) | 0.0 |
| | sapiens, 915 aa. [WO200281629- | 4 . . . 915 | 765/967 (78%) | |
| | A2, 17-OCT-2002] | | | |
| AAE16259 | Human kinase PKIN-5 protein - | 401 . . . 978 | 567/642 (88%) | 0.0 |
| | Homo sapiens, 656 aa. | 15 . . . 656 | 571/642 (88%) | |
| | [WO200196547-A2, 20-DEC- | | | |
| | 2001] | | | |
| AAU11287 | Human transducin polypeptide | 670 . . . 978 | 298/373 (79%) | e−162 |
| | 41 - Homo sapiens, 373 aa. | 1 . . . 373 | 302/373 (80%) | |
| | [CN1306988-A, 08-AUG-2001] | | | |

[0784] In a BLAST search of public sequence databases, the NOV74a protein was found to have homology to the proteins shown in the BLASTP data in Table 74E.

TABLE 74E
Public BLASTP Results for NOV74a

| | | NOV74a | Identities/ | |
|---|---|---|---|---|
| Protein | | Residues/ | Similarities for | |
| Accession | | Match | the Matched | Expect |
| Number | Protein/Organism/Length | Residues | Portion | Value |
| Q8K062 | Similar to RIKEN cDNA | 208 . . . 978 | 642/884 (72%) | 0.0 |
| | 4921513O20 gene - Mus | 1 . . . 840 | 694/884 (77%) | |
| | musculus (Mouse), 840 aa | | | |
| | (fragment). | | | |
| Q9CQG8 | 4921513O20Rik protein - Mus | 499 . . . 978 | 401/545 (73%) | 0.0 |
| | musculus (Mouse), 561 aa. | 18 . . . 561 | 441/545 (80%) | |
| Q8NCX9 | Hypothetical protein - Homo | 643 . . . 978 | 326/400 (81%) | e−178 |
| | sapiens (Human), 400 aa | 1 . . . 400 | 330/400 (82%) | |
| | (fragment). | | | |
| Q8CI84 | Hypothetical protein - Mus | 669 . . . 978 | 239/329 (72%) | e−133 |
| | musculus (Mouse), 327 aa | 1 . . . 327 | 269/329 (81%) | |
| | (fragment). | | | |
| Q8BZJ6 | Hypothetical serine/threonine | 14 . . . 224 | 183/211 (86%) | 1e−99 |
| | protein kinase containing protein - | 345 . . . 543 | 190/211 (89%) | |
| | Mus musculus (Mouse), 546 aa. | | | |

[0785] PFam analysis indicates that the NOV74a protein contains the domains shown in the Table 74F.

TABLE 74F
Domain Analysis of NOV74a

| | NOV74a | Identities/Similarities | Expect |
|---|---|---|---|
| Pfam Domain | Match Region | for the Matched Region | Value |
| pkinase | 394 . . . 644 | 90/302 (30%) | 1.4e−33 |
| | | 169/302 (56%) | |

### Example 75

[0786] The NOV75 clone was analyzed, and the nucleotide and encoded polypeptide sequences are shown in Table 75A.

TABLE 75A
NOV75 Sequence Analysis

| | | |
|---|---|---|
| NOV75a, CG91708-02 | SEQ ID NO: 1081 | 1580 bp |

| | | |
|---|---|---|
| DNA Sequence | ORF Start: ATG at 51 | ORF Stop: TGA at 1482 |

CAAGACAGCAAGGCATAGAGACAACATAGAGCTAAGTAAAGCCAGTGGAAATGAAGAGTCTTCCAATC
CTACTGTTGCTGTGCGTGGCAGTTTGCTCAGCCTATCCATTGGATGGAGCTGCAAGGGGTGAGGACAC
CAGCATGAACCTTGTTCAGAAATATCTAGAAAACTACTACGACCTCGAAAAAGATGTGAAACAGTTTG
TTAGGAGAAAGGACAGTGGTCCTGTTGTTAAAAAAATCCGAGAAATGCAGAAGTTCCTTGGATTGGAG
GTGACGGGGAAGCTGGACTCCGACACTCTGGAGGTGATGCGCAAGCCCATGTGTGGAGTTCCTGACGT
TGGTCACTTCAGAACCTTTCCTGGCATCCCGAAGTGGAGGAAAACCCACCTTACATACAGGATTGTGA
ATTATACACCAGATTTGCCAAAAGATGCTGTTGATTCTGCTGTTGAGAAAGCTCTGAAAGTCTGGGAA
GAGGTGACTCCACTCACATTCTCCAGGCTGTATGAAGGAGAGACTGATATAATGATCTCTTTTGCAGT
TAGAGAACATGGAGACTTTTACCCTTTTGATGGACCTGGAAATGTTTTGGCCCATGCCTATGCCCCTG
GGCCAGGGATTAATGGAGATGCCCACTTTGATGATGATGAACAATGGACAAAGGATACAACAGGGACC
AATTTATTTCTCGTTGCTGCTCATGAAATTGGCCACTCCCTGGGTCTCTTTCACTCAGCCAACACTGA
AGCTTTGATGTACCCACTCTATCACTCACTCACAGACCTGACTCGGTTCCGCCTGTCTCAAGATGATA
TAAATGGCATTCAGTCCCTCTATGGACCTCCCCCTGACTCCCCTGAGACCCCCCTGGTACCCACGGAA
CCTGTCCCTCCAGAACCTGGGACGCCAGCCAACTGTGATCCTGCTTTGTCCTTTGATGCTGTCAGCAC
TCTGAGGGGAGAAATCCTGATCTTTAAAGACAGGCACTTTTGGCGCAAATCCCTCAGGAAGCTTGAAC
CTGAATTGCATTTGATCTCTTCATTTTGGCCATCTCTTCCTTCAGGCGTGGATGCCGCATATGAAGTT
ACTAGCAAGGACCTCGTTTTCATTTTTAAAGGAAATCAATTCTGGGCCATCAGAGGAAATGAGGTACG
AGCTGGATACCCAAGAGGCATCCACACCCTAGGTTTCCCTCCAACCGTGAGGAAAATCGATGCAGCCA
TTTCTGATAAGGAAAAGAACAAAACATATTTCTTTGTAGAGGACAAATACTGGAGATTTGATGAGAAG
AGAAATTCCATGGAGCCAGGCTTTCCCAAGCAAATAGCTGAAGACTTTCCAGGGATTGACTCAAAGAT
TGATGCTGTTTTTGAAGAATTTGGGTTCTTTTATTTCTTTACTGGATCTTCACAGTTGGAGTTTGACC
CAAATGCAAAGAAAGTGACACACACTTTGAAGAGTAACAGCTGGCTTAATTGTTGAAAGAGATATGTA
GAAGGCACAATATGGGCACTTTAAATGAAGCTAATAATTCTTCACCTAAGTCTCTGTGAATTGAAATG
TTCGTTTTCTCCTGCT

NOV75a, CG91708-02

| | | | |
|---|---|---|---|
| Protein Sequence | SEQ ID NO: 1082 | 477 aa | MW at 53982.7kD |

MKSLPILLLLCVAVCSAYPLDGAARGEDTSMNLVQKYLENYYDLEKDVKQFVRRKDSGPVVKKIREMQ
KFLGLEVTGKLDSDTLEVMRKPMCGVPDVGHFRTFPGIPKWRKTHLTYRIVNYTPDLPKDAVDSAVEK
ALKVWEEVTPLTFSRLYEGETDIMISFAVREHGDFYPFDGPGNVLAHAYAPGPGINGDAHFDDDEQWT
KDTTGTNLFLVAAHEIGHSLGLFHSARTEALMYPLYHSLTDLTRFRLSQDDINGIQSLYGPPPDSPET
PLVPTEPVPPEPGTPANCDPALSFDAVSTLRGEILIFKDRHFWRKSLRKLEPELHLISSFWPSLPSGV
DAAYEVTSKDLVFIFKGNQFWAIRGNEVRAGYPRGIHTLGFPPTVRKIDAAISDKEKNKTYFFVEDKY
WRFDEKRNSMEPGFPKQIAEDFPGIDSKIDAVFEEFGFFYFFTGSSQLEFDPNAKKVTHTLKSNSWLN
C

| | | |
|---|---|---|
| NOV75b, 262751856 | SEQ ID NO: 1083 | 1446 bp |

| | | |
|---|---|---|
| DNA Sequence | ORF Start: at 1 | ORF Stop: end of sequence |

GGATCCACCATGAAGAGTCTTCCAATCCTACTGTTGCTGTGCGTGGCAGTTTGCTCAGCCTATCCATT
GGATGGAGCTGCAAGGGGTGAGGACACCAGCATGAACCTTGTTCAGAAATATCTAGAAAACTACTACG
ACCTCGAAAAAGATGTGAAACAGTTTGTTAGGAGAAAGGACAGTGGTCCTGTTGTTAAAAAAATCCGA
GAAATGCAGAAGTTCCTTGGATTGGAGGTGACGGGGAAGCTGGACTCCGACACTCTGGAGGTGATGCG
CAAGCCCAGGTGTGGAGTTCCTGACGTTGGTCACTTCAGAACCTTTCCTGGCATCCCGAAGTGGAGGA
AAACCCACCTTACATACAGGATTGTGAATTATACACCAGATTTGCCAAAAGATGCTGTTGATTCTGCT
GTTGAGAAAGCTCTGAAAGTCTGGGAAGAGGTGACTCCACTCACATTCTCCAGGCTGTATGAAGGAGA
GGCTGATATAATGATCTCTTTTGCAGTTAGAGAACATGGAGACTTTTACCCTTTTGATGGACCTGGAA
ATGTTTTGGCCCATGCCTATGCCCCTGGGCCAGGGATTAATGGAGATGCCCACTTTGATGATGATGAA
CAATGGACAAAGGATACAACAGGGACCAATTTATTTCTCGTTGCTGCTCATGAAATTGGCCACTCCCT
GGGTCTCTTTCACTCAGCCAACACTGAAGCTTTGATGTACCCACTCTATCACTCACTCACAGACCTGA
CTCGGTTCCGCCTGTCTCAAGATGATATAAATGGCATTCAGTCCCTCTATGGACCTCCCCCTGACTCC
CCTGAGACCCCCCTGGTACCCACGGAACCTGTCCCTCCAGAACCTGGGACGCCAGCCAACTGTGATCC
TGCTTTGTCCTTTGATGCTGTCAGCACTCTGAGGGGAGAAATCCTGATCTTTAAAGACAGGCACTTTT
GGCGCAAATCCCTCAGGAAGCTTGAACCTGAATTGCATTTGATCTCTTCATTTTGGCCATCTCTTCCT
TCAGGCGTGGATGCCGCATATGAAGTTACTAGCAAGGACCTCGTTTTCATTTTTAAAGGAAATCAATT
CTGGGCCATCAGAGGAAATGAGGTACGAGCTGGATACCCAAGAGGCATCCACACCCTAGGTTTCCCTC
CAACCGTGAGGAAAATCGATGCAGCCATTTCTGATAAGGAAAAGAACAAAACATATTTCTTTGTAGAG
GACAAATACTGGAGATTTGATGAGAAGAGAAATTCCATGGAGCCAGGCTTTCCCAAGCAAATAGCTGA
AGACTTTCCAGGGATTGACTCAAAGATTGATGCTGTTTTTGAAGAATTTGGGTTCTTTTATTTCTTTA
CTGGATCTTCACAGTTGGAGTTTGACCCAAATGCAAAGAAAGTGACACACACTTTGAAGAGTAACAGC
TGGCTTAATTGTCTCGAG

NOV75b, 262751856

| | | | |
|---|---|---|---|
| Protein Sequence | SEQ ID NO: 1084 | 482 aa | MW at 54465.2kD |

GSTMKSLPILLLLCVAVCSAYPLDGAARGEDTSMNLVQKYLENYYDLEKDVKQFVRRKDSGPVVKKIR
EMQKFLGLEVTGKLDSDTLEVMRKPRCGVPDVGHFRTFPGIPKWRKTHLTYRIVNYTPDLPKDAVDSA
VEKALKVWEEVTPLTFSRLYEGEADIMISFAVREHGDFYPFDGPGNVLAHAYAPGPGINGDAHFDDDE
QWTKDTTGTNLFLVAAHEIGHSLGLFHSANTEALMYPLYHSLTDLTRFRLSQDDINGIQSLYGPPPDS
PETPLVPTEPVPPEPGTPAMCDPALSFDAVSTLRGEILIFKDRHFWRKSLRKLEPELHLISSFWPSLP
SGVDAAYEVTSKDLVFIFKGNQFWAIRGNEVRAGYPRGIHTLGFPPTVRKIDAAISDKEKNKTYFFVE
DKYWRFDEKRNSMEPGFPKQIAEDFPGIDSKIDAVFEEFGFFYFFTGSSQLEFDPNAKKVTHTLKSNS
WLNCLE

| | | |
|---|---|---|
| NOV75c, CG91708-01 | SEQ ID NO: 1085 | 1821 bp |

| | | |
|---|---|---|
| DNA Sequence | ORF Start: ATG at 64 | ORF Stop: TGA at 1495 |

ACAAGGAGGCAGGCAAGACAGCAAGGCATAGAGACAACATAGAGCTAAGTAAAGCCAGTGGAAATGAA
GAGTCTTCCAATCCTACTGTTGCTGTGCGTGGCAGTTTGCTCAGCCTATCCATTGGATGGAGCTGCAA
GGGGTGAGGACACCAGCATGAACCTTGTTCAGAAATATCTAGAAAACTACTACGACCTCAAAAAAGAT
GTGAAACAGTTTGTTAGGAGAAAGGACAGTGGTCCTGTTGTTAAAAAAATCCGAGAAATGCAGAAGTT
CCTTGGATTGGAGGTGACGGGGAAGCTGGACTCCGACACTCTGGAGGTGATGCGCAAGCCCAGGTGTG
GAGTTCCTGATGTTGGTCACTTCAGAACCTTTCCTGGCATCCCGAAGTGGAGGAAAACCCACCTTACA
TACAGGATTGTGAATTATACACCAGATTTGCCAAAAGATGCTGTTGATTCTGCTGTTGAGAAAGCTCT
GAAAGTCTGGGAAGAGGTGACTCCACTCACATTCTCCAGGCTGTATGAAGGAGAGGCTGATATAATGA
TCTCTTTTGCAGTTAGAGAACATGGAGACTTTTACCCTTTTGATGGACCTGGAAATGTTTTGGCCCAT
GCCTATGCCCCTGGGCCAGGGATTAATGGAGATGCCCACTTTGATGATGATGAACAATGGACAAAGGA
TACAACAGGGACCAATTTATTTCTCGTTGCTGCTCATGAAATTGGCCACTCCCTGGGTCTCTTTCACT
CAGCCAACACTGAAGCTTTGATGTACCCACTCTATCACTCACTCACAGACCTGACTCGGTTCCGCCTG
TCTCAAGATGATATAAATGGCATTCAGTCCCTCTATGGACCTCCCCCTGACTCCCCTGAGACCCCCCT
GGTACCCACGGAACCTGTCCCTCCAGAACCTGGGACGCCAGCCAACTGTGATCCTGCTTTGTCCTTTG
ATGCTGTCAGCACTCTGAGGGGAGAAATCCTGATCTTTAAAGACAGGCACTTTTGGCGCAAATCCCTC
AGGAAGCTTGAACCTGAATTGCATTTGATCTCTTCATTTTGGCCATCTCTTCCTTCAGGCGTGGATGC
CGCATATGAAGTTACTAGCAAGGACCTCGTTTTCATTTTTAAAGGAAATCAATTCTGGGCCATCAGAG
GAAATGAGGTACGAGCTGGATACCCAAGAGGCATCCACACCCTAGGTTTCCCTCCAACCGTGAGGAAA
ATCGATGCAGCCATTTCTGATAAGGAAAAGAACAAAACATATrTCTTTGTAGAGGACAAATACTGGAG
ATTTGATGAGAAGAGAAATTCCATGGAGCCAGGCTTTCCCAAGCAAATAGCTGAAGACTTTCCAGGGA
TTGACTCAAAGATTGATGCTGTTTTTGAAGAATTTGGGTTCTTTTATTTCTTTACTGGATCTTCACAG
TTGGAGTTTGACCCAAATGCAAAGAAAGTGACACACACTTTGAAGAGTAACAGCTGGCTTAATTGTTG
AAAGAGATATGTAGAAGGCACAATATGGGCACTTTAAATGAAGCTAATAATTCTTCACCTAAGTCTCT
GTGAATTGAAATGTTCGTTTTCTCCTGCCTGTGCTGTGACTCGAGTCACACTCAAGGGAACTTGAGCG
TGAATCTGTATCTTGCCGGTCATTTTTATGTTATTACAGGGCATTCAAATGGGCTGCTGCTTAGCTTG
CACCTTGTCACATAGAGTGATCTTTCCCAAGAGAAGGGGAAGCACTCGTGTGCAACAGACAAGTGACT
GTATCTGTGTAGACTATTTGCTTATTTAATAAAGACGATTTGTCAGTTGTTTT

NOV75c, CG91708-01

| | | | |
|---|---|---|---|
| Protein Sequence | SEQ ID NO: 1086 | 477 aa | MW at 53976.7kD |

MKSLPILLLLCVAVCSAYPLDGAARGEDTSMNLVQKYLENYYDLEKDVKQFVRRKDSGPVVKKIREMQ
KFLGLEVTGKLDSDTLEVMRKPMCGVPDVGHFRTFPGIPKWRKTHLTYRIVNYTPDLPKDAVDSAVEK
ALKVWEEVTPLTFSRLYEGETDIMISFAVREHGDFYPFDGPGNVLAHAYAPGPGINGDAHFDDDEQWT
KDTTGTNLFLVAAHEIGHSLGLFHSARTEALMYPLYHSLTDLTRFRLSQDDINGIQSLYGPPPDSPET
PLVPTEPVPPEPGTPANCDPALSFDAVSTLRGEILIFKDRHFWRKSLRKLEPELHLISSFWPSLPSGV
DAAYEVTSKDLVFIFKGNQFWAIRGNEVRAGYPRGIHTLGFPPTVRKIDAAISDKEKNKTYFFVEDKY
WRFDEKRNSMEPGFPKQIAEDFPGIDSKIDAVFEEFGFFYFFTGSSQLEFDPNAKKVTHTLKSNSWLN
C

| | | |
|---|---|---|
| NOV75d, CG91708-03 | SEQ ID NO: 1087 | 1446 bp |

| | | |
|---|---|---|
| DNA Sequence | ORF Start: ATG at 10 | ORF Stop: at 1441 |

GGATCCACCATGAAGAGTCTTCCAATCCTACTGTTGCTGTGCGTGGCAGTTTGCTCAGCCTATCCATT
GGATGGAGCTGCAAGGGGTGAGGACACCAGCATGAACCTTGTTCAGAAATATCTAGAAAACTACTACG
ACCTCGAAAAAGATGTGAAACAGTTTGTTAGGAGAAAGGACAGTGGTCCTGTTGTTAAAAAAATCCGA
GAAATGCAGAAGTTCCTTGGATTGGAGGTGACGGGGAAGCTGGACTCCGACACTCTGGAGGTGATGCG
CAAGCCCAGGTGTGGAGTTCCTGACGTTGGTCACTTCAGAACCTTTCCTGGCATCCCGAAGTGGAGGA
AAACCCACCTTACATACAGGATTGTGAATTATACACCAGATTTGCCAAAAGATGCTGTTGATTCTGCT
GTTGAGAAAGCTCTGAAAGTCTGGGAAGAGGTGACTCCACTCACATTCTCCAGGCTGTATGAAGGAGA
GGCTGATATAATGATCTCTTTTGCAGTTAGAGAACATGGAGACTTTTACCCTTTTGATGGACCTGGAA
ATGTTTTGGCCCATGCCTATGCCCCTGGGCCAGGGATTAATGGAGATGCCCACTTTGATGATGATGAA
CAATGGACAAAGGATACAACAGGGACCAATTTATTTCTCGTTGCTGCTCATGAAATTGGCCACTCCCT
GGGTCTCTTTCACTCAGCCAACACTGAAGCTTTGATGTACCCACTCTATCACTCACTCACAGACCTGA
CTCGGTTCCGCCTGTCTCAAGATGATATAAATGGCATTCAGTCCCTCTATGGACCTCCCCCTGACTCC
CCTGAGACCCCCCTGGTACCCACGGAACCTGTCCCTCCAGAACCTGGGACGCCAGCCAACTGTGATCC
TGCTTTGTCCTTTGATGCTGTCAGCACTCTGAGGGGAGAAATCCTGATCTTTAAAGACAGGCACTTTT
GGCGCAAATCCCTCAGGAAGCTTGAACCTGAATTGCATTTGATCTCTTCATTTTGGCCATCTCTTCCT
TCAGGCGTGGATGCCGCATATGAAGTTACTAGCAAGGACCTCGTTTTCATTTTTAAAGGAAATCAATT
CTGGGCCATCAGAGGAAATGAGGTACGAGCTGGATACCCAAGAGGCATCCACACCCTAGGTTTCCCTC
CAACCGTGAGGAAAATCGATGCAGCCATTTCTGATAAGGAAAAGAACAAAACATATTTCTTTGTAGAG
GACAAATACTGGAGATTTGATGAGAAGAGAAATTCCATGGAGCCAGGCTTTCCCAAGCAAATAGCTGA
AGACTTTCCAGGGATTGACTCAAAGATTGATGCTGTTTTTGAAGAATTTGGGTTCTTTTATTTCTTTA
CTGGATCTTCACAGTTGGAGTTTGACCCAAATGCAAAGAAAGTGACACACACTTTGAAGAGTAACAGC
TGGCTTAATTGTCTCGAG

NOV75d, CG91708-03

| | | | |
|---|---|---|---|
| Protein Sequence | SEQ ID NO: 1088 | 477 aa | MW at 53977.6kD |

MKSLPILLLLCVAVCSAYPLDGAARGEDTSMNLVQKYLENYYDLEKDVKQFVRRKDSGPVVKKIREMQ
KFLGLEVTGKLDSDTLEVMRKPRCGVPDVGHFRTFPGIPKWRKTHLTYRIVNYTPDLPKDAVDSAVEK
ALKVWEEVTPLTFSRLYEGEADIMISFAVREHGDFYPFDGPGNVLAHAYAPGPGINGDAHFDDDEQWT
KDTTGTNLFLVAAHEIGHSLGLFHSANTEALMYPLYHSLTDLTRFRLSQDDINGIQSLYGPPPDSPET
PLVPTEPVPPEPGTPANCDPALSFDAVSTLRGEILIFKDRHFWRKSLRKLEPELHLISSFWPSLPSGV
DAAYEVTSKDLVFIFKGNQFWAIRGNEVRAGYPRGIHTLGFPPTVRKIDAAISDKEKNKTYFFVEDKY
WRFDEKRNSMEPGFPKQIAEDFPGIDSKIDAVFEEFGFFYFFTGSSQLEFDPNAKKVTHTLKSNSWLN
C

| | | |
|---|---|---|
| NOV75e, CG91708-04 | SEQ ID NO: 1089 | 1446 bp |

| | | |
|---|---|---|
| DNA Sequence | ORF Start: ATG at 10 | ORF Stop: at 1441 |

GGATCCACCATGAAGAGTCTTCCAATCCTACTGTTGCTGTGCGTGGCAGTTTGCTCAGCCTATCCATT
GGATGGAGCTGCAAGGGGTGAGGACACCAGCATGAACCTTGTTCAGAAATATCTAGAAAACTACTACG
ACCTCAAAAAAGATGTGAAACAGTTTGTTAGGAGAAAGGACAGTGGTCCTGTTGTTAAAAAAATCCGA
GAAATGCAGAAGTTCCTTGGATTGGAGGTGACGGGGAAGCTGGACTCCGACACTCTGGAGGTGATGCG
CAAGCCCAGGTGTGGAGTTCCTGACGTTGGTCACTTCAGAACCTTTCCTGGCATCCCGAAGTGGAGGA
AAACCCACCTTACATACAGGATTGTGAATTATACACCAGATTTGCCAAAAGATGCTGTTGATTCTGCT
GTTGAGAAAGCTCTGAAAGTCTGGGAAGAGGTGACTCCACTCACATTCTCCAGGCTGTATGAAGGAGA
GGCTGATATAATGATCTCTTTTGCAGTTAGAGAACATGGAGACTTTTACCCTTTTGATGGACCTGGAA
ATGTTTTGGCCCATGCCTATGCCCCTGGGCCAGGGATTAATGGAGATGCCCACTTTGATGATGATGAA
CAATGGACAAAGGATACAACAGGGACCAATTTATTTCTCGTTGCTGCTCATGAAATTGGCCACTCCCT
GGGTCTCTTTCACTCAGCCAACACTGAAGCTTTGATGTACCCACTCTATCACTCACTCACAGACCTGA
CTCGGTTCCGCCTGTCTCAAGATGATATAAATGGCATTCAGTCCCTCTATGGACCTCCCCCTGACTCC
CCTGAGACCCCCCTGGTACCCACGGAACCTGTCCCTCCAGAACCTGGGACGCCAGCCAACTGTGATCC
TGCTTTGTCCTTTGATGCTGTCAGCACTCTGAGGGGAGAAATCCTGATCTTTAAAGACAGGCACTTTT
GGCGCAAATCCCTCAGGAAGCTTGAACCTGAATTGCATTTGATCTCTTCATTCTGGCCATCTCTTCCT
TCAGGCGTGGATGCCGCATATGAAGTTACTAGCAAGGACCTCGTTTTCATTTTTAAAGGAAATCAATT
CTGGGCCATCAGAGGAAATGAGGTACGAGCTGGATACCCAAGAGGCATCCACACCCTAGGTTTCCCTC
CAACCGTGAGGAAAATCGATGCAGCCATTTCTGATAAGGAAAAGAACAAAACATATTTCTTTGTAGAG
GACAAATACTGGAGATTTGATGAGAAGAGAAATTCCATGGAGCCAGGCTTTCCCAAGCAAATAGCTGA
AGACTTTCCAGGGATTGACTCAAAGATTGATGCTGTTTTTGAAGAATTTGGGTTCTTTTATTTCTTTA
CTGGATCTTCACAGTTGGAGTTTGACCCAAATGCAAAGAAAGTGACACACACTTTGAAGAGTAACAGC
TGGCTTAATTGTCTCGAG

NOV75e, CG91708-04

| | | | |
|---|---|---|---|
| Protein Sequence | SEQ ID NO: 1090 | 477 aa | MW at 53976.7kD |

MKSLPILLLLCVAVCSAYPLDGAARGEDTSMNLVQKYLENYYDLKKDVKQFVRRKDSGPVVKKIREMQ
KFLGLEVTGKLDSDTLEVMRKPRCGVPDVGHFRTFPGIPKWRKTHLTYRIVNYTPDLPKDAVDSAVEK
ALKVWEEVTPLTFSRLYEGEADIMISFAVREHGDFYPFDGPGNVLAHAYAPGPGINGDAHFDDDEQWT
KDTTGTNLFLVAAHEIGHSLGLFHSANTEALMYPLYHSLTDLTRFRLSQDDINGIQSLYGPPPDSPET
PLVPTEPVPPEPGTPANCDPALSFDAVSTLRGEILIFKDRHFWRKSLRKLEPELHLISSFWPSLPSGV
DAAYEVTSKDLVFIFKGNQFWAIRGNEVRAGYPRGIHTLGFPPTVRKIDAAISDKEKNKTYFFVEDKY
WRFDEKRNSMEPGFPKQIAEDFPGIDSKIDAVFEEFGFFYFFTGSSQLEFDPNAKKVTHTLKSNSWLN
C

| | |
|---|---|
| SEQ ID NO: 1091 | 1580 bp |

| | | |
|---|---|---|
| NOV75f, SNP13380740 of | ORF Start: ATG at 51 | ORF Stop: TGA at 1482 |

| | | |
|---|---|---|
| CG91708-02, DNA Sequence | SNP Pos: 183 | SNP Change: G to A |

CAAGACAGCAAGGCATAGAGACAACATAGAGCTAAGTAAAGCCAGTGGAAATGAAGAGTCTTCCAATC
CTACTGTTGCTGTGCGTGGCAGTTTGCTCAGCCTATCCATTGGATGGAGCTGCAAGGGGTGAGGACAC
CAGCATGAACCTTGTTCAGAAATATCTAGAAAACTACTACGACCTCAAAAAAGATGTGAAACAGTTTG
TTAGGAGAAAGGACAGTGGTCCTGTTGTTAAAAAAATCCGAGAAATGCAGAAGTTCCTTGGATTGGAG
GTGACGGGGAAGCTGGACTCCGACACTCTGGAGGTGATGCGCAAGCCCATGTGTGGAGTTCCTGACGT
TGGTCACTTCAGAACCTTTCCTGGCATCCCGAAGTGGAGGAAAACCCACCTTACATACAGGATTGTGA
ATTATACACCAGATTTGCCAAAAGATGCTGTTGATTCTGCTGTTGAGAAAGCTCTGAAAGTCTGGGAA
GAGGTGACTCCACTCACATTCTCCAGGCTGTATGAAGGAGAGACTGATATAATGATCTCTTTTGCAGT
TAGAGAACATGGAGACTTTTACCCTTTTGATGGACCTGGAAATGTTTTGGCCCATGCCTATGCCCCTG
GGCCAGGGATTAATGGAGATGCCCACTTTGATGATGATGAACAATGGACAAAGGATACAACAGGGACC
AATTTATTTCTCGTTGCTGCTCATGAAATTGGCCACTCCCTGGGTCTCTITCACTCAGCCAACACTGA
AGCTTTGATGTACCCACTCTATCACTCACTCACAGACCTGACTCGGTTCCGCCTGTCTCAAGATGATA
TAAATGGCATTCAGTCCCTCTATGGACCTCCCCCTGACTCCCCTGAGACCCCCCTGGTACCCACGGAA
CCTGTCCCTCCAGAACCTGGGACGCCAGCCAACTGTGATCCTGCTTTGTCCTTTGATGCTGTCAGCAC
TCTGAGGGGAGAAATCCTGATCTTTAAAGACAGGCACTTTTGGCGCAAATCCCTCAGGAAGCTTGAAC
CTGAATTGCATTTGATCTCTTCATTTTGGCCATCTCTTCCTTCAGGCGTGGATGCCGCATATGAAGTT
ACTAGCAAGGACCTCGTTTTCATTTTTAAAGGAAATCAATTCTGGGCCATCAGAGGAAATGAGGTACG
AGCTGGATACCCAAGAGGCATCCACACCCTAGGTTTCCCTCCAACCGTGAGGAAAATCGATGCAGCCA
TTTCTGATAAGGAAAAGAACAAAACATATTTCTTTGTAGAGGACAAATACTGGAGATTTGATGAGAAG
AGAAATTCCATGGAGCCAGGCTTTCCCAAGCAAATAGCTGAAGACTTTCCAGGGATTGACTCAAAGAT
TGATGCTGTTTTTGAAGAATTTGGGTTCTTTTATTTCTTTACTGGATCTTCACAGTTGGAGTTTGACC
CAAATGCAAAGAAAGTGACACACACTTTGAAGAGTAACAGCTGGCTTAATTGTTGAAAGAGATATGTA
GAAGGCACAATATGGGCACTTTAAATGAAGCTAATAATTCTTCACCTAAGTCTCTGTGAATTGAAATG
TTCGTTTTCTCCTGCT

| | | |
|---|---|---|
| NOV75f, SNP13380740 of | SEQ ID NO: 1092 | MW at 53981.8kD |

| | | | |
|---|---|---|---|
| CG91708-02, Protein Sequence | SNP Pos: 45 | 477 aa | SNP Change: Glu to Lys |

MKSLPILLLLCVAVCSAYPLDGAARGEDTSMNLVQKYLENYYDLKKDVKQFVRRKDSGPVVKKIREMQ
KFLGLEVTGKLDSDTLEVMRKPMCGVPDVGHFRTFPGIPKWRKTHLTYRIVNYTPDLPKDAVDSAVEK
ALKVWEEVTPLTFSRLYEGETDIMISFAVREHGDFYPFDGPGNVLAHAYAPGPGINGDAHFDDDEQWT
KDTTGTNLFLVAAHEIGHSLGLFHSANTEALMYPLYHSLTDLTRFRLSQDDINGIQSLYGPPPDSPET
PLVPTEPVPPEPGTPANCDPALSFDAVSTLRGEILIFKDRHFWRKSLRKLEPELHLISSFWPSLPSGV
DAAYEVTSKDLVFIFKGNQFWAIRGNEVRAGYPRGIHTLGFPPTVRKIDAAISDKEKNKTYFFVEDKY
WRFDEKRNSMEPGFPKQIAEDFPGIDSKIDAVFEEFGFFYFFTGSSQLEFDPNAKKVTHTLKSNSWLN
C

[0787] A ClustalW comparison of the above protein sequences yields the following sequence alignment shown in Table 75B.

TABLE 75B
Comparison of the NOV75 protein sequences.

| | |
|---|---|
| NOV75a | ---MKSLPILLLLCVAVCSAYPLDGAARGEDTSMNLVQKYLENYYDLEKDVKQFVRRKDS |
| NOV75b | GSTMKSLPILLLLCVAVCSAYPLDGAARGEDTSMNLVQKYLENYYDLEKDVKQFVRRKDS |
| NOV75c | ---MKSLPILLLLCVAVCSAYPLDGAARGEDTSMNLVQKYLENYYDLKKDVKQFVRRKDS |
| NOV75d | ---MKSLPILLLLCVAVCSAYPLDGAARGEDTSMNLVQKYLENYYDLEKDVKQFVRRKDS |
| NOV75e | ---MKSLPILLLLCVAVCSAYPLDGAARGEDTSMNLVQKYLENYYDLKKDVKQFVRRKDS |
| NOV75a | GPVVKKIREMQKFLGLEVTGKLDSDTLEVMRKPMCGVPDVGHFRTFPGIPKWRKTHLTYR |
| NOV75b | GPVVKKIREMQKFLGLEVTGKLDSDTLEVMRKPRCGVPDVGHFRTFPGIPKWRKTHLTYR |
| NOV75c | GPVVKKIREMQKFLGLEVTGKLDSDTLEVMRKPRCGVPDVGHFRTFPGIPKWRKTHLTYR |
| NOV75d | GPVVKKIREMQKFLGLEVTGKLDSDTLEVMRKPRCGVPDVGHFRTFPGIPKWRKTHLTYR |
| NOV75e | GPVVKKIREMQKFLGLEVTGKLDSDTLEVMRKPRCGVPDVGHFRTFPGIPKWRKTHLTYR |
| NOV75a | IVNYTPDLPKDAVDSAVEKALKVWEEVTPLTFSRLYEGETDIMISFAVREHGDFYPFDGP |
| NOV75b | IVNYTPDLPKDAVDSAVEKALKVWEEVTPLTFSRLYEGEADIMISFAVREHGDFYPFDGP |
| NOV75c | IVNYTPDLPKDAVDSAVEKALKVWEEVTPLTFSRLYEGEADIMISFAVREHGDFYPFDGP |
| NOV75d | IVNYTPDLPKDAVDSAVEKALKVWEEVTPLTFSRLYEGEADIMISFAVREHGDFYPFDGP |
| NOV75e | IVNYTPDLPKDAVDSAVEKALKVWEEVTPLTFSRLYEGEADIMISFAVREHGDFYPFDGP |
| NOV75a | GNVLAHAYAPGPGINGDAHFDDDEQWTKDTTGTNLFLVAAHEIGHSLGLFHSANTEALMY |
| NOV75b | GNVLAHAYAPGPGINGDAHFDDDEQWTKDTTGTNLFLVAAHEIGHSLGLFHSANTEALMY |
| NOV75c | GNVLAHAYAPGPGINGDAHFDDDEQWTKDTTGTNLFLVAAHEIGHSLGLFHSANTEALMY |
| NOV75d | GNVLAHAYAPGPGINGDAHFDDDEQWTKDTTGTNLFLVAAHEIGHSLGLFHSANTEALMY |
| NOV75e | GNVLAHAYAPGPGINGDAHFDDDEQWTKDTTGTNLFLVAAHEIGHSLGLFHSANTEALMY |
| NOV75a | PLYHSLTDLTRFRLSQDDINGIQSLYGPPPDSPETPLVPTEPVPPEPGTPANCDPALSFD |
| NOV75b | PLYHSLTDLTRFRLSQDDINGIQSLYGPPPDSPETPLVPTEPVPPEPGTPANCDPALSFD |
| NOV75c | PLYHSLTDLTRFRLSQDDINGIQSLYGPPPDSPETPLVPTEPVPPEPGTPANCDPALSFD |
| NOV75d | PLYHSLTDLTRFRLSQDDINGIQSLYGPPPDSPETPLVPTEPVPPEPGTPANCDPALSFD |
| NOV75e | PLYHSLTDLTRFRLSQDDINGIQSLYGPPPDSPETPLVPTEPVPPEPGTPANCDPALSFD |
| NOV75a | AVSTLRGEILIFKDRHFWRKSLRKLEPELHLISSFWPSLPSGVDAAYEVTSKDLVFIFKG |
| NOV75b | AVSTLRGEILIFKDRHFWRKSLRKLEPELHLISSFWPSLPSGVDAAYEVTSKDLVFIFKG |
| NOV75c | AVSTLRGEILIFKDRHFWRKSLRKLEPELHLISSFWPSLPSGVDAAYEVTSKDLVFIFKG |
| NOV75d | AVSTLRGEILIFKDRHFWRKSLRKLEPELHLISSFWPSLPSGVDAAYEVTSKDLVFIFKG |
| NOV75e | AVSTLRGEILIFKDRHFWRKSLRKLEPELHLISSFWPSLPSGVDAAYEVTSKDLVFIFKG |
| NOV75a | NQFWAIRGNEVRAGYPRGIHTLGFPPTVRKIDAAISDKEKNKTYFFVEDKYWRFDEKRNS |
| NOV75b | NQFWAIRGNEVRAGYPRGIHTLGFPPTVRKIDAAISDKEKNKTYFFVEDKYWRFDEKRNS |
| NOV75c | NQFWAIRGNEVRAGYPRGIHTLGFPPTVRKIDAAISDKEKNKTYFFVEDKYWRFDEKRNS |
| NOV75d | NQFWAIRGNEVRAGYPRGIHTLGFPPTVRKIDAAISDKEKNKTYFFVEDKYWRFDEKRNS |
| NOV75e | NQFWAIRGNEVRAGYPRGIHTLGFPPTVRKIDAAISDKEKNKTYFFVEDKYWRFDEKRNS |
| NOV75a | MEPGFPKQIAEDFPGIDSKIDAVFEEFGFFYFFTGSSQLEFDPNAKKVTHTLKSNSWLNC |
| NOV75b | MEPGFPKQIAEDFPGIDSKIDAVFEEFGFFYFFTGSSQLEFDPNAKKVTHTLKSNSWLNC |
| NOV75c | MEPGFPKQIAEDFPGIDSKIDAVFEEFGFFYFFTGSSQLEFDPNAKKVTHTLKSNSWLNC |
| NOV75d | MEPGFPKQIAEDFPGIDSKIDAVFEEFGFFYFFTGSSQLEFDPNAKKVTHTLKSNSWLNC |
| NOV75e | MEPGFPKQIAEDFPGIDSKIDAVFEEFGFFYFFTGSSQLEFDPNAKKVTHTLKSNSWLNC |
| NOV75a | -- |
| NOV75b | LE |
| NOV75c | -- |
| NOV75d | -- |
| NOV75e | -- |
| NOV75a | (SEQ ID NO: 1082) |
| NOV75b | (SEQ ID NO: 1084) |
| NOV75c | (SEQ ID NO: 1086) |
| NOV75d | (SEQ ID NO: 1088) |
| NOV75e | (SEQ ID NO: 1090) |

[0788] Further analysis of the NOV75a protein yielded the following properties shown in Table 75C.

TABLE 75C
Protein Sequence Properties NOV75a

| | |
|---|---|
| SignalP analysis: | Cleavage site between residues 18 and 19 |

PSORT II analysis:

| PSG: | a new signal peptide prediction method | | | |
|---|---|---|---|---|
| | N-region: | length 2; | pos.chg 1; | neg.chg 0 |

| | |
|---|---|
| H-region: | length 18; peak value 10.73 |

| | PSG score: 6.33 |
|---|---|
| GvH: | von Heijne's method for signal seq. recognition |
| | GvH score (threshold: −2.1): 3.45 |
| | possible cleavage site: between 17 and 18 |

>>> Seems to have a cleavable signal peptide (1 to 17)

| | |
|---|---|
| ALOM: | Klein et al's method for TM region allocation |
| | Init position for calculation: 18 |
| | Tentative number of TMS(s) for the threshold 0.5: 0 |
| | number of TMS(s) . . . fixed |
| | PERIPHERAL Likelihood = 3.87 (at 293) |
| | ALOM score: 3.87 (number of TMSs: 0) |
| MTOP: | Prediction of membrane topology (Hartmann et al.) |
| | Center position for calculation: 8 |
| | Charge difference: −4.0 C(−2.0) − N(2.0) |
| | N >= C: N-terminal side will be inside |

MITDISC: discrimination of mitochondrial targeting seq

| | | | |
|---|---|---|---|
| R content: | 0 | Hyd Moment (75): | 3.04 |
| Hyd Moment (95): | 6.62 | G content: | 0 |
| D/E content: | 1 | S/T content: | 2 |
| Score: −4.76 | | | |

Gavel: prediction of cleavage sites for mitochondrial preseq

cleavage site motif not found

NUCDISC: discrimination of nuclear localization signals

pat4: none
pat7: PVVKKIR (3) at 59
pat7: PKWRKTH (5) at 107
bipartite: none
content of basic residues: 11.3%
NLS Score: 0.22

KDEL: ER retention motif in the C-terminus: none
ER Membrane Retention Signals: none
SKL: peroxisomal targeting signal in the C-terminus: none
PTS2: 2nd peroxisomal targeting signal: none
VAC: possible vacuolar targeting motif: none
RNA-binding motif: none
Actinin-type actin-binding motif:

type 1: none
type 2: none

NMYR: N-myristoylation pattern: none
Prenylation motif: none
memYQRL: transport motif from cell surface to Golgi: none
Tyrosines in the tail: none
Dileucine motif in the tail: none
checking 63 PROSITE DNA binding motifs: none
checking 71 PROSITE ribosomal protein motifs: none
checking 33 PROSITE prokaryotic DNA binding motifs: none

| | |
|---|---|
| NNCN: | Reinhardt's method for Cytoplasmic/Nuclear discrimination |
| | Prediction: cytoplasmic |
| | Reliability: 94.1 |
| COIL: | Lupas's algorithm to detect coiled-coil regions |
| | total: 0 residues |

Final Results (k = 9/23):

```
  33.3%: extracellular, including cell wall
  22.2%: mitochondrial
  22.2%: endoplasmic reticulum
  11.1%: Golgi
  11.1%: vacuolar
```

>> prediction for CG91708-02 is exc (k = 9)

[0789] A search of the NOV75a protein against the Geneseq database, a proprietary database that contains sequences published in patents and patent publication, yielded several homologous proteins shown in Table 75D.

TABLE 75D
Geneseq Results for NOV75a

| | | NOV75a | Identities/ | |
|---|---|---|---|---|
| | | Residues/ | Similarities for | |
| Geneseq | Protein/Organism/Length | Match | the Matched | Expect |
| Identifier | [Patent #, Date] | Residues | Region | Value |
| ABB04752 | Human MMP3 protein SEQ ID | 1 . . . 477 | 475/477 (99%) | 0.0 |
| | NO: 3 - Homo sapiens, 477 aa. | 1 . . . 477 | 475/477 (99%) | |
| | [WO200179238-A2, 25-OCT- | | | |
| | 2001] | | | |
| AAB84608 | Amino acid sequence of matrix | 1 . . . 477 | 475/477 (99%) | 0.0 |
| | metalloproteinase-3 stromelysin 1 - | 1 . . . 477 | 475/477 (99%) | |
| | Homo sapiens, 477 aa. | | | |
| | [WO200149309-A2, 12-JUL- | | | |
| | 2001] | | | |
| AAO20482 | Prostromelysin protein - Homo | 1 . . . 477 | 475/477 (99%) | 0.0 |
| | sapiens, 477 aa. [US6284513-B1, | 1 . . . 477 | 475/477 (99%) | |
| | 04-SEP-2001] | | | |
| ABP54461 | Matrix metalloproteinase 3 amino | 1 . . . 477 | 474/477 (99%) | 0.0 |
| | acid sequence SEQ ID NO: 2919 - | 1 . . . 477 | 475/477 (99%) | |
| | Homo sapiens, 477 aa. | | | |
| | [WO200278516-A2, 10-OCT- | | | |
| | 2002] | | | |
| ABU03473 | Angiogenesis-associated human | 1 . . . 477 | 474/477 (99%) | 0.0 |
| | protein sequence #18 - Homo | 1 . . . 477 | 475/477 (99%) | |
| | sapiens, 477 aa. [WO200279492- | | | |
| | A2, 10-OCT-2002] | | | |

[0790] In a BLAST search of public sequence databases, the NOV75a protein was found to have homology to the proteins shown in the BLASTP data in Table 75E.

TABLE 75E
Public BLASTP Results for NOV75a

| | | NOV75a | Identities/ | |
|---|---|---|---|---|
| Protein | | Residues/ | Similarities for | |
| Accession | | Match | the Matched | Expect |
| Number | Protein/Organism/Length | Residues | Portion | Value |
| P08254 | Stromelysin-1 precursor (EC | 1 . . . 477 | 474/477 (99%) | 0.0 |
| | 3.4.24.17) (Matrix | 1 . . . 477 | 475/477 (99%) | |
| | metalloproteinase-3) (MMP-3) | | | |
| | (Transin-1) (SL-1) - Homo sapiens | | | |
| | (Human), 477 aa. | | | |
| P28863 | Stromelysin-1 precursor (EC | 1 . . . 477 | 401/478 (83%) | 0.0 |
| | 3.4.24.17) (Matrix | 1 . . . 478 | 433/478 (89%) | |
| | metalloproteinase-3) (MMP-3) | | | |
| | (Transin-1) (SL-1) - Oryctolagus | | | |
| | cuniculus (Rabbit), 478 aa. | | | |
| Q28397 | Stromelysin-1 precursor (EC | 1 . . . 477 | 386/477 (80%) | 0.0 |
| | 3.4.24.17) (Matrix | 1 . . . 477 | 427/477 (88%) | |
| | metalloproteinase-3) (MMP-3) - | | | |
| | Equus caballus (Horse), 477 aa. | | | |
| P09238 | Stromelysin-2 precursor (EC | 1 . . . 477 | 372/477 (77%) | 0.0 |
| | 3.4.24.22) (Matrix | 1 . . . 476 | 418/477 (86%) | |
| | metalloproteinase-10) (MMP-10) | | | |
| | (Transin-2) (SL-2) - Homo sapiens | | | |
| | (Human), 476 aa. | | | |
| Q922W6 | Matrix metalloproteinase 3 - Mus | 1 . . . 477 | 366/477 (76%) | 0.0 |
| | musculus (Mouse), 479 aa. | 3 . . . 479 | 413/477 (85%) | |

[0791] PFam analysis indicates that the NOV75a protein contains the domains shown in the Table 75F.

TABLE 75F
Domain Analysis of NOV75a

| | NOV75a | Identities/Similarities | Expect |
|---|---|---|---|
| Pfam Domain | Match Region | for the Matched Region | Value |
| Peptidase_M10_N | 18 . . . 96 | 44/84 (52%) | 1.2e−42 |
| | | 75/84 (89%) | |
| Peptidase_M10 | 102 . . . 208 | 78/107 (73%) | 1.6e−80 |
| | | 105/107 (98%) | |
| Astacin | 107 . . . 267 | 37/230 (16%) | 0.17 |
| | | 106/230 (46%) | |
| hemopexin | 296 . . . 338 | 16/50 (32%) | 5.1e−12 |
| | | 37/50 (74%) | |
| hemopexin | 340 . . . 383 | 16/50 (32%) | 5.6e−13 |
| | | 39/50 (78%) | |
| hemopexin | 388 . . . 435 | 25/50 (50%) | 6.6e−19 |
| | | 41/50 (82%) | |
| hemopexin | 437 . . . 477 | 17/50 (34%) | 1.5e−09 |
| | | 33/50 (66%) | |

### Example 76

[0792] The NOV76 clone was analyzed, and the nucleotide and encoded polypeptide sequences are shown in Table 76A.

TABLE 76A
NOV76 Sequence Analysis

| | | |
|---|---|---|
| NOV76a, CG92078-02 | SEQ ID NO: 1093 | 1983 bp |

| | | |
|---|---|---|
| DNA Sequence | ORF Start: ATG at 6 | ORF Stop: TGA at 1836 |

GCAGCATGAGCCGATCACCCCTCAATCCCAGCCAACTCCGATCAGTGGGCTCCCAGGATGCCCTGGCC
CCCTTGCCTCCACCTGCTCCCCAGAATCCCTCCACCCACTCTTGGGACCCTTTGTGTGGATCTCTGCC
TTGGGGCCTCAGCTGTCTTCTGGCTCTGCAGCATGTCTTGGTCATGGCTTCTCTGCTCTGTGTCTCCC
ACCTGCTCCTGCTTTGCAGTCTCTCCCCAGGAGGACTCTCTTACTCCCCTTCTCAGCTCCTGGCCTCC
AGCTTCTTTTCATGTGGTATGTCTACCATCCTGCAAACTTGGATGGGCAGCAGGCTGCCTCTTGTCCA
GGCTCCATCCTTAGAGTTCCTTATCCCTGCTCTGGTGCTGACCAGCCAGAAGCTACCCCGGGCCATCC
AGACACCTGGAAACTCCTCCCTCATGCTGCACCTTTGTAGGGGACCTAGCTGCCATGGCCTGGGGCAC
TGGAACACTTCTCTCCAGGAGGTGTCCGGGGCAGTGGTAGTATCTGGGCTGCTGCAGGGCATGATGGG
GCTGCTGGGGAGTCCCGGCCACGTGTTCCCCCACTGTGGGCCCCTGGTGCTGGCTCCCAGCCTGGTTG
TGGCAGGGCTCTCTGCCCACAGGGAGGTAGCCCAGTTCTGCTTCACACACTGGGGGTTGGCCTTGCTG
GTTATCCTGCTCATGGTGGTCTGTTCTCAGCACCTGGGCTCCTGCCAGTTTCATGTGTGCCCCTGGAG
GCGAGCTTCAACGTCATCAACTCACACTCCTCTCCCTGTCTTCCGGCTCCTTTCGGTGCTGATCCCAG
TGGCCTGTGTGTGGATTGTTTCTGCCTTTGTGGGATTCAGTGTTATCCCCCAGGAACTGTCTGCCCCC
ACCAAGGCACCATGGATTTGGCTGCCTCACCCAGGTGAGTGGAATTGGCCTTTGCTGACGCCCAGAGC
TCTGGCTGCAGGCATCTCCATGGCCTTGGCAGCCTCCACCAGTTCCCTGGGCTGCTATGCCCTGTGTG
GCCGGCTGCTGCATTTGCCTCCCCCACCTCCACATGCCTGCAGTCGAGGGCTGAGCCTGGAGGGGCTG
GGCAGTGTGCTGGCCGGGCTGCTGGGAAGCCCCATGGGCACTGCATCCAGCTTCCCCAGCGTGGGCAA
AGTGGGTCTTATCCAGGCTGGATCTCAGCAAGTGGCTCACTTAGTGGGGCTACTCTGCGTGGGGCTTG
GACTCTCCCCCAGGTTGGCTCAGCTCCTCACCACCATCCCACTGCCTGTTGTTGGTGGGGTGCTGGGC
GTGACCCAGGCTGTGGTTTTGTCTGCTGGATTCTCCAGCTTCTACCTGGCTGACATAGACTCTGGGCG
AAATATCTTCATTGTGGGCTTCTCCATCTTCATGGCCTTGCTGCTGCCAAGATGGTTTCGGGAAGCCC
CAGTCCTGTTCAGCACAGGCTGGAGCCCCTTGGATGTATTACTGCACTCACTGCTGACACAGCCCATC
TTCCTGGCTGGACTCTCAGGCTTCCTACTAGAGAACACGATTCCTGGCACACAGCTTGAGCGAGGCCT
AGGTCAAGGGCTACCATCTCCTTTCACTGCCCAAGAGGCTCGAATGCCTCAGAAGCCCAGGGAGAAGG
CTGCTCAAGTGTACAGACTTCCTTTCCCCATCCAAAACCTCTGTCCCTGCATCCCCCAGCCTCTCCAC
TGCCTCTGCCCACTGCCTGAAGACCCTGGGGATGAGGAAGGAGGCTCCTCTGAGCCAGAAGAGATGGC
AGACTTGCTGCCTGGCTCAGGGGAGCCATGCCCTGAATCTAGCAGAGAAGGGTTTAGGTCCCAGAAAT
GACCAGAACGCCTACTTCTGCCCTGGTTAATTTAGCCCTAACTCTCATCTGCTGGAGAGTCAGCTCCC
AAACTGTTCTTTCTTGTAGGCAGAGGATATGTGTGTGTGTATTACATGGGACTGTCTAGAGGTTCCAT
TTCCCAATAGG

NOV76a, CG92078-02

| | | | |
|---|---|---|---|
| Protein Sequence | SEQ ID NO: 1094 | 610 aa | MW at 64502.7kD |

MSRSPLNPSQLRSVGSQDALAPLPPPAPQNPSTHSWDPLCGSLPWGLSCLLALQHVLVMASLLCVSHL
LLLCSLSPGGLSYSPSQLLASSFFSCGMSTILQTWNGSRLPLVQAPSLEFLIPALVLTSQKLPRAIQT
PGNSSLMLHLCRGPSCHGLGHWNTSLQEVSGAVVVSGLLQGMMGLLGSPGHVFPHCGPLVLAPSLVVA
GLSAHREVAQFCFTHWGLALLVILLMVVCSQHLGSCQFHVCPWRRASTSSTHTPLPVFRLLSVLIPVA
CVWIVSAFVGFSVIPQELSAPTKAPWIWLPHPGEWNWPLLTPRALAAGISMALAASTSSLGCYALCGR
LLHLPPPPPHACSRGLSLEGLGSVLAGLLGSPMGTASSFPSVGKVGLIQAGSQQVAHLVGLLCVGLGL
SPRLAQLLTTIPLPVVGGVLGVTQAVVLSAGFSSFYLADIDSGRNIFIVGFSIFMALLLPRWFREAPV
LFSTGWSPLDVLLHSLLTQPIFLAGLSGFLLENTIPGTQLERGLGQGLPSPFTAQEARMPQKPREKAA
QVYRLPFPIQNLCPCIPQPLHCLCPLPEDPGDEEGGSSEPEEMADLLPGSGEPCPESSREGFRSQK

| | | |
|---|---|---|
| NOV76b, CG92078-01 | SEQ ID NO: 1095 | 2014 bp |

| | | |
|---|---|---|
| DNA Sequence | ORF Start: ATG at 6 | ORF Stop: TAG at 1992 |

GCAGCATGAGCCGATCACCCCTCAATCCCAGCCAACTCCGATCAGTGGGCTCCCAGGATGCCCTGGCC
CCCTTGCCTCCACCTGCTCCCCAGAATCCCTCCACCCACTCTTGGGACCCTTTGTGTGGATCTCTGCC
TTGGGGCCTCAGCTGTCTTCTGGCTCTGCAGCATGTCTTGGTCATGGCTTCTCTGCTCTGTGTCTCCC
ACCTGCTCCTGCTTTGCAGTCTCTCCCCAGGAGGACTCTCTTACTCCCCTTCTCAGCTCCTGGCCTCC
AGCTTCTTTTCATGTGGTATGTCTACCATCCTGCAAACTTGGATGGGCAGCAGGAGGCTGCCTCTTGT
CCAGGCTCCATCCTTAGAGTTCCTTATCCCTGCTCTGGTGCTGACCAGCCAGAAGCTACCCCGGGCCA
TCCAGACACCTGGAAACGCCTCCCTCATGCTGCACCTTTGTAGGGGACCTAGCTGCCATGGCCTGGGG
CACTGGAACACTTCTCTCCAGGAGGTGGTGGTAGTATCTGGGCTGCTGCAGGGCATGATGGGGCTGCT
GGGGAGTCCCGGCCACGTGTTCCCCCACTGTGGGCCCCTGGTGCTGGCTCCCAGCCTGGTTGTGGCAG
GGCTCTCTGCCTTTCCCCAAGAGGGAGTTTTGCTCCTGTCACCCAGCCTGGAGTGCAATGGCATGATC
TCGGCTCACCACTGGGGAGAAGCCAGCCAGCTCTGCCTCCTGGCCCTGGAGTGCTCACTCCATCCCCT
ACCTTTTGGCTTCTGTCTACCCCTGCAAGGCTGGCTCAGAAGGTTCTGGGGGAGGAGTTCTTTTCTCA
GTCTCGCCCCTCAGGTGCTGATCCCAGTGGCCTGTGTGTGGATTGTTTCTGCCTTTGTGGGATTCAGT
GTTATCCCCCAGGAACTGTCTGCCCCCACCAAGGCACCATGGATTTGGCTGCCTCACCCAGGTGTGTG
GAATTGGCCTTTGCTGACGCCCAGAGCTCTGGCTGCAGGCATCTCCATGGCCTTGGCAGCCTCCACCA
GTTCCCTGGGCTGCTATGCCCTGTGTGGCCGGCTGCTGCATTTGCCTCCCCCACCTCCACATGCCTGC
AGTCGAGGGCTGAGCCTGGAGGGGCTGGGCAGTGTGCTGGCCGGGCTGCTGGGAAGCCCCATGGGCAC
TGCATCCAGCTTCCCCAACGTGGGCAAAGTGGGTCTTATCCAGCAGGCTGGATCTCAGCAAGTGGCTC
ACTTAGTGGGGCTACTCTGCGTGGGGCTTGGACTCTCCCCCAGGTTGGCTCAGCTCCTCACCACCATC
CCACTGCCTGTTGTTGGTGGTGGGGTGCTGGGGGTGACCCAGGCTGTGGTTTTGTCTGCTGGATTCTC
CAGCTTCTACCTGGCTGACATAGACTCTGGGCGAAATATCTTCATTGTGGGCTTCTCCATCTTCATGG
CCTTGCTGCTGCCAAGATGGTTTCGGGAAGCCCCAGTCCTGTTCAGCACAGGTCACTCACTGCTGATG
GAGCCCCTTGGATGTATTACTGCACAGCCCATCTTCCTGGCTGGACTCTCAGGCTTCCTACTAGAGAA
CACGATTCGGGGCACACAGCTTGAGCGAGGCCTAGGTCAAGGGCTACCATCTCCTTTCACTGCCCAAG
AGGCTCGAATGCCTCAGAAGCCCAGGGAGAAGGCTGCTCAAGTGTACAGACTTCCTTTCCCCATCCAA
AACCTCTGTCCCTGCATCCCCCAGCCTCTCCACTGCCTCTGCCCACTGCCTGAAGACCCTGGGGATGA
GGAAGGAGGCTCCTCTGAGCAGCAAGAGATGGCAGACTTGCTGCGTGGCTCAGGGGAGCATGCCCTGA
ATCTAGCAGAGAAGGGTTTAGGTCCAGAAATGACCAGAACGCGTACTTCTGCCCTGGTTAATTTAGCC
CTAACTCTCATCTGCTGGAGAGTCAGCTCCCAAACTGTTCTTTCTTGTAGGCAGAGGATATGTGTGTG
TGTATTACATGGGACTGTCTAGAGGTTCCATTTCCCAATAGG

NOV76b, CG92078-01

| | | | |
|---|---|---|---|
| Protein Sequence | SEQ ID NO: 1096 | 662 aa | MW at 70138.5kD |

MSRSPLNPSQLRSVGSQDALAPLPPPAPQNPSTHSWDPLCGSLPWGLSCLLALQHVLVMASLLCVSHL
LLLCSLSPGGLSYSPSQLLASSFFSCGMSTILQTWMGSRRLPLVQAPSLEFLIPALVLTSQKLPRAIQ
TPGNASLMLHLCRGPSCHGLGHWNTSLQEVVVVSGLLQGMMGLLGSPGHVFPHCGPLVLAPSLVVAGL
SAFPQEGVLLLSPSLECNGMISAHHWGEASQLCLLALECSLHPLPFGFCLPLQGWLRRFWGRSSFLSL
APQVLIPVACVWIVSAFVGFSVIPQELSAPTKAPWIWLPHPGVWNWPLLTPRALAAGISMAIAASTSS
LGCYALCGRLLHLPPPPPHACSRGLSLEGLGSVLAGLLGSPMGTASSFPNVGKVGLIQQAGSQQVAHL
VGLLCVGLGLSPRLAQLLTTIPLPVVGGGVLGVTQAVVLSAGFSSFYLADIDSGRNIFlVGFSIFMAL
LLPRWFREAPVLFSTGHSLLMEPLGCITAQPIFLAGLSGFLLENTIRGTQLERGLGQGLPSPFTAQEA
RMPQKPREKAAQVYRLPFPIQNLCPCIPQPLHCLCPLPEDPGDEEGGSSEQQEMADLLRGSGEHALNL
AEKGLGPEMTRTRTSALVNLALTLICWRVSSQTVLSCRQRICVCVLHGTV

[0793] A ClustalW comparison of the above protein sequences yields the following sequence alignment shown in Table 76B.

TABLE 76B
Comparison of the NOV76 protein sequences.

| | |
|---|---|
| NOV76a | MSRSPLNPSQLRSVGSQDALAPLPPPAPQNPSTHSWDPLCGSLPWGLSCLLALQHVLVMA |
| NOV76b | MSRSPLNPSQLRSVGSQDALAPLPPPAPQNPSTHSWDPLCGSLPWGLSCLLALQHVLVMA |
| NOV76a | SLLCVSHLLLLCSLSPGGLSYSPSQLLASSFFSCGMSTILQTWMGSRRLPLVQAPSLEFL |
| NOV76b | SLLCVSHLLLLCSLSPGGLSYSPSQLLASSFFSCGMSTILQTWMGSRRLPLVQAPSLEFL |
| NOV76a | IPALVLTSQKLPRAIQTPGNSSLMLHLCRGPSCHGLGNWNTSLQEVSGAVVVSGLLQGMM |
| NOV76b | IPALVLTSQKLPRAIQTPGNASLMLHLCRGPSCHGLGHWNTSLQEV---VVVSGLLQGMM |
| NOV76a | GLLGSPGHVFPHCGPLVLAPSLVVAGLSAHREVAQFCFT------------HWGLALLVI |
| NOV76b | GLLGSPGHVFPHCGPLVLAPSLVVAGLSAFPQEGVLLLSPSLECNGMISAHHWGEASQLC |
| NOV76a | LLMVVCSQH---LGSCQFHVCPWRRASTSSTHTPLPVFRLLSVLIPVACVWIVSAFVGFS |
| NOV76b | LLALECSLHPLPFGFCLPLQGWLRRFWGRSSFLSLAP----QVLIPVACVWIVSAFVGFS |
| NOV76a | VIPQELSAPTKAPWIWLPHPGEWNWPLLTPRALAAGISMALAASTSSLGCYALCGRLLHL |
| NOV76b | VIPQELSAPTKAPWIWLPHPGVWNWPLLTPRALAAGISMALAASTSSLGCYALCGRLLHL |
| NOV76a | PPPPPHACSRGLSLEGLGSVLAGLLGSPMGTASSFPSVGKVGLIQAG-SQQVAHLVGLLC |
| NOV76b | PPPPPHACSRGLSLEGLGSVLAGLLGSPMGTASSFPNVGKVGLIQQAGSQQVAHLVGLLC |
| NOV76a | VGLGLSPRLAQLLTTIPLPVVGG-VLGVTQAVVLSAGFSSFYLADIDSGRNIFIVGFSIF |
| NOV76b | VGLGLSPRLAQLLTTIPLPVVGGGVLGVTQAVVLSAGFSSFYLADIDSGRNIFIVGFSIF |
| NOV76a | MALLLPRWFREAPVLFSTGWSPLDVLLHSLLTQPIFLAGLSGFLLENTIPGTQLERGLGQ |
| NOV76b | MALLLPRWFREAPVLFSTGHSLLMEPLGCITAQPIFLAGLSGFLLENTIRGTQLERGLGQ |
| NOV76a | GLPSPFTAQEARMPQKPREKAAQVYRLPFPIQNLCPCIPQPLHCLCPLPEDPGDEEGGSS |
| NOV76b | GLPSPFTAQEARMPQKPREKAAQVYRLPFPIQNLCPCIPQPLHCLCPLPEDPGDEEGGSS |
| NOV76a | EPEEMADLLPGSGEPCPESSREGFRSQK-------------------------------- |
| NOV76b | EQQEMADLLRGSGEHALNLAEKGLGPEMTRTRTSALVNLALTLICWRVSSQTVLSCRQRI |
| NOV76a | --------- |
| NOV76b | CVCVLHGTV |
| NOV76a | (SEQ ID NO: 1094) |
| NOV76b | (SEQ ID NO: 1096) |

[0794] Further analysis of the NOV76a protein yielded the following properties shown in Table 76C.

TABLE 76C
Protein Sequence Properties NOV76a

| | |
|---|---|
| SignalP analysis: | Cleavage site between residues 17 and 18 |

PSORT II analysis:

| | |
|---|---|
| PSG: | a new signal peptide prediction method |
| | N-region: length 3; pos.chg 1; neg.chg 0 |
| | H-region: length 8; peak value −1.31 |
| | PSG score: −5.71 |
| GvH: | von Heijne's method for signal seq. recognition |
| | GvH score (threshold: −2.1): −4.74 |
| | possible cleavage site: between 48 and 49 |

>>> Seems to have no N-terminal signal peptide.

| ALOM: | Klein et al's method for TM region allocation | | |
|---|---|---|---|
| | Init position for calculation: 1 | | |
| | Tentative number of TMS(s) for the threshold 0.5: 9 | | |
| | INTEGRAL | Likelihood = −8.60 | Transmembrane 56-72 |
| | INTEGRAL | Likelihood = 0.16 | Transmembrane 110-126 |
| | INTEGRAL | Likelihood = −0.11 | Transmembrane 167-183 |
| | INTEGRAL | Likelihood = −1.70 | Transmembrane 192-208 |
| | INTEGRAL | Likelihood = −6.90 | Transmembrane 216-232 |
| | INTEGRAL | Likelihood = −8.23 | Transmembrane 265-281 |
| | INTEGRAL | Likelihood = −1.97 | Transmembrane 421-437 |
| | INTEGRAL | Likelihood = −3.24 | Transmembrane 454-470 |
| | INTEGRAL | Likelihood = 0.21 | Transmembrane 491-507 |

| | |
|---|---|
| PERIPHERAL | Likelihood = 0.69 (at 394) |

| | ALOM score: −8.60 (number of TMSs: 9) |
|---|---|
| MTOP: | Prediction of membrane topology (Hartmann et al.) |
| | Center position for calculation: 63 |
| | Charge difference: 0.0 C(0.5) − N(0.5) |
| | N >= C: N-terminal side will be inside |

>>> membrane topology: type 3a
MITDISC: discrimination of mitochondrial targeting seq

| | | | |
|---|---|---|---|
| R content: | 2 | Hyd Moment(75): | 10.11 |
| Hyd Moment(95): | 10.29 | G content: | 1 |
| D/E content: | 1 | S/T content: | 5 |
| Score: −1.10 | | | |

Gavel: prediction of cleavage sites for mitochondrial preseq

R-2 motif at 421 PRL|AQ

NUCDISC: discrimination of nuclear localization signals

pat4: none
pat7: none
bipartite: none
content of basic residues: 4.6%
NLS Score: −0.47

KDEL: ER retention motif in the C-terminus: none
ER Membrane Retention Signals:

XXRR-like motif in the N-terminus: SRSP

none
SKL: peroxisomal targeting signal in the C-terminus: none
PTS2: 2nd peroxisomal targeting signal: none
VAC: possible vacuolar targeting motif: none
RNA-binding motif: none
Actinin-type actin-binding motif:

type 1: none
type 2: none

NMYR: N-myristoylation pattern: none
Prenylation motif: none
memYQRL: transport motif from cell surface to Golgi: none
Tyrosines in the tail: none
Dileucine motif in the tail: none
checking 63 PROSITE DNA binding motifs:

Leucine zipper pattern (PS00029): *** found ***

LDVLLHSLLTQPIFLAGLSGFL at 485

none
checking 71 PROSITE ribosomal protein motifs: none
checking 33 PROSITE prokaryotic DNA binding motifs: none

| | |
|---|---|
| NNCN: | Reinhardt's method for Cytoplasmic/Nuclear discrimination |
| | Prediction: cytoplasmic |
| | Reliability: 76.7 |
| COIL: | Lupas's algorithm to detect coiled-coil regions |
| | total: 0 residues |

Final Results (k = 9/23):

77.8%: endoplasmic reticulum
11.1%: nuclear
11.1%: mitochondrial

>> prediction for CG92078-02 is end (k = 9)

[0795] A search of the NOV76a protein against the Geneseq database, a proprietary database that contains sequences published in patents and patent publication, yielded several homologous proteins shown in Table 76D.

TABLE 76D
Geneseq Results for NOV76a

| | | NOV76a | Identities/ | |
|---|---|---|---|---|
| | | Residues/ | Similarities for | |
| Geneseq | Protein/Organism/Length | Match | the Matched | Expect |
| Identifier | [Patent #, Date] | Residues | Region | Value |
| AAE22904 | Human transporter and ion channel | 1 . . . 610 | 609/610 (99%) | 0.0 |
| | (TRICH) 3 - Homo sapiens, 610 | 1 . . . 610 | 610/610 (99%) | |
| | aa. [WO200222684-A2, 21-MAR- | | | |
| | 2002] | | | |
| ABB77088 | Human transporter protein related | 1 . . . 610 | 609/610 (99%) | 0.0 |
| | to permease subfamily - Homo | 1 . . . 610 | 610/610 (99%) | |
| | sapiens, 610 aa. [US2002028915- | | | |
| | A1, 07-MAR-2002] | | | |
| AAE29905 | Human transporter and ion channel | 1 . . . 610 | 607/618 (98%) | 0.0 |
| | (TRICH) protein #5 - Homo | 1 . . . 618 | 609/618 (98%) | |
| | sapiens, 618 aa. [WO200277237- | | | |
| | A2, 03-OCT-2002] | | | |
| AAW73924 | Nucleobase permease Yspl1 - Mus | 1 . . . 609 | 476/613 (77%) | 0.0 |
| | sp, 611 aa. [US5858707-A, 12- | 1 . . . 611 | 519/613 (84%) | |
| | JAN-1999] | | | |
| ABG70340 | Human MDDT protein Incyte ID | 1 . . . 610 | 390/611 (63%) | 0.0 |
| | No: LI:230711.5.orf2:2001JAN12 - | 12 . . . 519 | 413/611 (66%) | |
| | Homo sapiens, 519 aa. | | | |
| | [WO200255738-A2, 18-JUL- | | | |
| | 2002] | | | |

[0796] In a BLAST search of public sequence databases, the NOV76a protein was found to have homology to the proteins shown in the BLASTP data in Table 76E.

TABLE 76E
Public BLASTP Results for NOV76a

| | | NOV76a | Identities/ | |
|---|---|---|---|---|
| Protein | | Residues/ | Similarities for | |
| Accession | | Match | the Matched | Expect |
| Number | Protein/Organism/Length | Residues | Portion | Value |
| Q60850 | Yolk SAC permease-like YSPL-1 | 1 . . . 609 | 476/613 (77%) | 0.0 |
| | form 1 (Yolk SAC permease-like | 1 . . . 611 | 519/613 (84%) | |
| | YSPL-1 form 4) (Yolk SAC | | | |
| | permease-like YSPL-1 form 3) | | | |
| | (Yolk SAC permease-like YSPL-1 | | | |
| | form 2) - Mus musculus (Mouse), | | | |
| | 611 aa. | | | |
| CAC51146 | Sequence 22 from Patent | 1 . . . 227 | 225/227 (99%) | e−130 |
| | WO0149728 - Homo sapiens | 1 . . . 227 | 226/227 (99%) | |
| | (Human), 243 aa. | | | |
| AAH30243 | Similar to sodium-coupled | 1 . . . 225 | 225/225 (100%) | e−130 |
| | ascorbic acid transporter 2 - Homo | 1 . . . 225 | 225/225 (100%) | |
| | sapiens (Human), 492 aa. | | | |
| Q96NA6 | Hypothetical protein FLJ31168 - | 1 . . . 227 | 194/227 (85%) | e−107 |
| | Homo sapiens (Human), 212 aa. | 1 . . . 196 | 195/227 (85%) | |
| Q9WTW8 | Solute carrier family 23, member | 44 . . . 520 | 163/496 (32%) | 3e−76 |
| | 2 (Sodium-dependent vitamin C | 42 . . . 523 | 271/496 (53%) | |
| | transporter 2) (Na(+)/L-ascorbic | | | |
| | acid transporter 2) - Rattus | | | |
| | norvegicus (Rat), 592 aa. | | | |

[0797] PFam analysis indicates that the NOV76a protein contains the domains shown in the Table 76F.

TABLE 76F
Domain Analysis of NOV76a

| | | Identities/ | |
|---|---|---|---|
| | | Similarities | |
| Pfam Domain | NOV76a Match Region | for the Matched Region | Expect Value |
| xan_ur_permease | 46 . . . 473 | 116/461 (25%) | 5e−87 |
| | | 336/461 (73%) | |

### Example 77

[0798] The NOV77 clone was analyzed, and the nucleotide and encoded polypeptide sequences are shown in Table 77A.

TABLE 77A
NOV77 Sequence Analysis

| | | |
|---|---|---|
| NOV77a, CG93669-04 | SEQ ID NO: 1097 | 1542 bp |
| DNA Sequence | ORF Start: ATG at 1 | ORF Stop: at 1468 |

ATGGATGACTACATGGTCCTGAGAATGATTGGGGAGGGCTCCTTCGGCAGAGCTCTTTTGGTTCAGCA
TGAAAGCAGTAATCAGATGTTTGCCATGAAAGAAATAAGGCTTCCCAAGTCTAATACACAGAATTCTA
GGAAGGAGGCTGTTCTTTTAGCCAAAATGAAACACCCTAATATTGTTGCCTTCAAAGAATCATTTGAA
GCTGAAGGACACTTGTATATTGTGATGGAATACTGTGATGGAGGGGATCTAATGCAAAAGATTAAACA
GCAGAAAGGAAAGTTATTTCCTGAAGACATACTTAATTGGTTTACCCAAATGTGCCTTGGAGTAAATC
ACATTCACAAGAAACGTGTGCTACACAGAGATATCAAGTCCAAGAATATCTTCCTCACTCAGAATGGA
AAAGTGAAATTGGGAGACTTTGGATCTGCCCGTCTTCTCTCCAGTCCGATGGCATTTGCTTGTACCTA
TGTGGGAACTCCTTATTATGTGCCTCCAGAAATTTGGGAAAACCTGCCTTATAACAATAAAAGTGACA
TCTGGTCCTTGGGTTGCATCCTGTATGAACTCTGTACCCTTAAGCATCCATTTCAGGCAAATAGTTGG
AAAAATCTTATCCTCAAAGTATGTCAAGGGTGCATCAGTCCACTGCCGTCTCATTACTCCTATGAACT
TCAGTTCCTAGTCAAGCAGATGTTTAAAAGGAATCCCTCACATCGCCCCTCGGCTACAACGCTTCTCT
CTCGAGGCATCGTAGCTCGGCTTGTCCAGAAGTGCTTACCCCCCCAGATCATCATGGAATATGGTGAG
GAAGTATTAGAAGAAATAAAAAATTCGAAGCATAACACACCAAGAAAAAAATCTCTTTTAAAGCAAGA
GGAAGAACAAGATAGAAAGGGTAGCCATACTGATTTGGAAAGCATTAATGAAAATTTAGTTGAAAGTG
CATTGAGAAGAGTAAACAGAAAATCAGGTAATAAGTCAGTCCATCTGAGGAAAGCCAGTTCACCAAAT
CTTCATAGACGACAGTGGGAGAAAAATGTACCCAATACAGCTCTTACAGCTTTGGAAAATGCATCCAT
ACTCACCTCCAGTTTAACAGCAGAGGACGATAGAGGTGGTGGTTCTGTAATAAAGTACAGCAAAAATA
CTACTCGTAAGCAGTGGCTCAAAGAGACCCCTGACACTTTGTTGAACATCCTTAAGAATGCTGATCTC
AGCTTGGCTTTTCAAACATACACAATATATAGACCAGGTTCAGAAGGGTTCTTGAAAGGCCCCCTGTC
TGAAGAAACAGAAGCATCGGACAGTGTTGATGGAGGTCACGATTCTGTCATTTTGGATCCAGAGCGAC
TTGAGCCTGGGCTAGATGAGGAGGACACGGACTTTGAGGAGGAAGATGACAACCCCGACTGGGTGTCA
GAGCTGAAGAAGCGAGCTGGATGGCAAGGCCTGTGCGACAGATAATGCCTGAGGAAATGTTCCTGAGT
CACGCTGAGGAGAGGCTTCACTCAGGAGTTCATGCTGAGATGATCA

| | | | |
|---|---|---|---|
| NOV77a, CG93669-04 | SEQ ID NO: 1098 | 489 aa | MW at 55700.9kD |
| Protein Sequence | | | |

MDDYMVLRMIGEGSFGRALLVQHESSNQMFANKEIRLPKSNTQNSRKEAVLLAKMKHPNIVAFKESFE
AEGHLYIVMEYCDGGDLMQKIKQQKGKLFPEDILNWFTQMCLGVNHIHKKRVLHRDIKSKNIFLTQNG
KVKLGDFGSARLLSSPMAFACTYVGTPYYVPPEIWENLPYNNKSDIWSLGCILYELCTLKHPFQANSW
KNLILKVCQGCISPLPSHYSYELQFLVKQMFKRNPSHRPSATTLLSRGIVARLVQKCLPPQIIMEYGE
EVLEEIKNSKHNTPRKKSLLKQEEEQDRKGSHTDLESINENLVESALRRVNRKSGNKSVHLRKASSPN
LHRRQWEKNVPNTALTALENASILTSSLTAEDDRGGGSVIKYSKNTTRKQWLKETPDTLLNILKNADL
SLAFQTYTIYRPGSEGFLKGPLSEETEASDSVDGGHDSVILDPERLEPGLDEEDTDFEEEDDNPDWVS
ELKKRAGWQGLCD

| | | |
|---|---|---|
| NOV77b, CG93669-01 | SEQ ID NO: 1099 | 2257 bp |
| DNA Sequence | ORF Start: ATG at 246 | ORF Stop: TAA at 1764 |

CCGCAAGTCCCTCGCCGCCTTGGGGTCTGGGCGCGCGGTCCGTGGGGGTCAGCAGGGCGAGCGGCTTT
TCCAGGAGAAAGGGCCCTCACGGGTGAGCGGGGCGACTGGGCTCCCCCGCGGTGCAGTTGCCCCGCGC
GACCGGCCCCGGCTTCAACGGATTCTTCTCGCTCGCTGCCCGGAAAGAACCATTTGGGAGAGCCCATG
GTGACTGCGTGAGTGGAGCCCAGCTGTGTGGATGCCCCAGCATGGATGACTACATGGTCCTGAGAATG
ATTGGGGAGGGCTCCTTCGGCAGAGCTCTTTTGGTTCAGCATGAAAGCAGTAATCAGATGTTTGCCAT
GAAAGAAATAAGGCTTCCCAAGGTCACTACTAATACACAGAATTCTAGGAAGGAGGCTGTTCTTTTAG
CCAAAATGAAACACCCTAATATTGTTGCCTTCAAAGAATCATTTGAAGCTGAAGGACACTTGTATATT
GTGATGGAATACTGTGATGGAGGGGATCTAATGCAAAAGATTAAACAGCAGAAAGGAAAGTTATTTCC
TGAAGACCAGATACTTAATTGGTTTACCCAAATGTGCCTTGGAGTAAATCACATTCACAAGAAACGTG
TGCTACACAGAGATATCAAGTCCCAGAATATCTTCCTCACTCAGAATGGAAAAGTGAAATTGGGAGAC
TTTGGATCTGCCCGTCTTCTCTCCAATCCGATGGCATTTGCTTGTACCTATGTGGGAACTCCTTATTA
TGTGCCTCCAGAAATTTGGGAAAACCTGCCTTATAACAATAAAAGTGACATCTGGTCCTTGGGTTGCA
TCCTGTATGAACTCTGTACCCTTAAGCATCCATTTCAGGCAAATAGTTGGAAAAATCTTATCCTCAAA
GTATGTCAAGGGTGCATCAGTCCACTGCCGTCTCATTACTCCTATGAACTTCAGTTCCTAGTCAAGCA
GATGTTTAAAAGGAATCCCTCACATCGCCCCTCGGCTACAACGCTTCTCTCTCGAGGCATCGTAGCTC
GGCTTGTCCAGAAGTGCTTACCCCCCGAGATCATCATGGAATATGGTGAGGAAGTATTAGAAGAAATA
AAAAATTCGAAGCATAACACACCAAGAAAAAAAACAAACCCCAGCAGAATCAGGATAGCTTTGGGAAA
TGAAGCAAGCACAGTGCAAGAGGAAGAACAAGATAGAAAGGGTAGCCATACTGATTTGGAAAGCATTA
ATGAAAATTTAGTTGAAAGTGCATTGAGAAGAGTAAACAGAGAAGAAAAAGGTAATAAGTCAGTCCAT
CTGAGGAAAGCCAGTTCACCAAATCTTCATAGACGACAGTGGGAGAAAAATGTACCCAATACAGCTCT
TACAGCTTTGGAAAATGCATCCATACTCACCTCCAGTTTAACAGCAGAGGACGATAGAGGTGGTTCTG
TAATAAAGTACAGCAAAAATACTACTCGTAAGCAGTGGCTCAAAGAGACCCCTGACACTTTGTTGAAC
ATCCTTAAGAATGCTGATCTCAGCTTGGCTTTTCAAACATACACAATATATAGACCAGGTTCAGAAGG
GTTCTTGAAAGGCCCCCTGTCTGAAGAAACAGAAGCATCGGACAGTGTTGATGGAGGTCACGATTCTG
TCATTTTGGATCCAGAGCGACTTGAGCCTGGGCTAGATGAGGAGGACACGGACTTTGAGGAGGAAGAT
GACAACCCCGACTGGGTGTCAGAGCTGAAGAAGCGAGCTGGATGGCAAGGCCTGTGCGACAGATAATG
CCTGAGGAAATGTTCCTGAGTCACGCTGAGGAGAGCCTTCACTCAGGAGTTCATGCTGAGATGATCAT
GAGTTCATGCGACGTATATTTTCCTTTGGAAACAGAATGAAGCAGAGGAAACTCTTAATACTTAAAAT
CGTTCTTGATTAGTATCGTGAGTTTGAAAAGTCTAGAACTCCTGTAAGTTTTTGAACTCAAGGGAGAA
GGTATAGTGGAATGAGTGTGAGCATCGGGCTTTGCAGTCCCATAGAACAGAAATGGGATGCTAGCGTG
CCACTACCTACTTGTGTGATTGTGGGAAATTACTTAACCTCTTCAAGCCCCAATTTCCTCAACCATAA
AATGAAGATAATAATGCCTACCTCAGAGGGATGCTGACCACAGACCTTTATAGCAGCCCGTATGATAT
TATTCACATTATGATATGTGTTTATTATTATGTGACTCTTTTTACATTTCCTAAAGGTTTGAGAATTA
AATATATTTAATT

| | | | |
|---|---|---|---|
| NOV77b, CG93669-01 | SEQ ID NO: 1100 | 506 aa | MW at 57681.0kD |
| Protein Sequence | | | |

MDDYMVLRMIGEGSFGRALLVQHESSNQMFA4KEIRLPKVTTNTQMSRKEAVLLAKMKHPNIVAFKES
FEAEGHLYIVMEYCDGGDLMQKIKQQKGKLFPEDQILNWFTQMCLGVNHIHKKRVLHRDIKSQNIFLT
QNGKVKLGDFGSAPLLSNPMAFACTYVGTPYYVPPEIWENLPYNNKSDIWSLGCILYELCTLKHPFQA
NSWKNLILKVCQGCISPLPSHYSYELQFLVKQMFKRNPSHRPSATTLLSRGIVARLVQKCLPPEIIME
YGEEVLEEIKNSKHNTPRKKTNPSRIRIALGNEASTVQEEEQDRKGSHTDLESINENLVESALRRVNR
EEKGNKSVHLRKASSPNLHRRQWEKNVPNTALTALENASILTSSLTAEDDRGGSVIKYSKNTTRKQWL
KETPDTLLNILKNADLSLAFQTYTIYRPGSEGFLKGPLSEETEASDSVDGGHDSVILDPERLEPGLDE
EDTDFEEEDDNPDWVSELKKRAGWQGLCDR

| | | |
|---|---|---|
| NOV77c,CG93669-02 | SEQ ID NO: 1101 | 1781 bp |
| DNA Sequence | ORF Start: ATG at 246 | ORF Stop: TAA at 1713 |

CCGCAAGTCCCTCGCCGCCTTGGGGTCTGGGCGCGCGGTCCGTGGGGGTCAGCAGGGCGAGCGGCTTT
TCCAGGAGAAAGGGCCCTCACGGGTGAGCGGGGCGACTGGGCTCCCCCGCGGTGCAGTTGCCCCGCGC
GACCGGCCCCGGCTTCAACGGATTCTTCTCGCTCGCTGCCCGGAAAGAACCATTTGGGAGAGCCCATG
GTGACTGCGTGAGTGGAGCCCAGCTGTGTGGATGCCCCAGCATGGATGACTACATGGTCCTGAGAATG
ATTGGGGAGGGCTCCTTCGGCAGAGCTCTTTTGGTTCAGCATGAAAGCAGTAATCAGATGTTTGCCAT
GAAAGAAATAAGGCTTCCCAAGGTCACTACTAATACACAGAATTCTAGGAAGGAGGCTGTTCTTTTAG
CCAAAATGAAACACCCTAATATTGTTGCCTTCAAAGAATCATTTGAAGCTGAAGGACACTTGTATATT
GTGATGGAATACTGTGATGGAGGGGATCTAATGCAAAAGATTAAACAGCAGAAAGGAAAGTTATTTCC
TGAAGACCAGATACTTAATTGGTTTACCCAAATGTGCCTTGGAGTAAATCACATTCACAAGAAACGTG
TGCTACACAGAGATATCAAGTCCCAGAATATCTTCCTCACTCAGAATGGAAAAGTGAAATTGGGAGAC
TTTGGATCTGCCCGTCTTCTCTCCAATCCGATGGCATTTGCTTGTACCTATGTGGGAACTCCTTATTA
TGTGCCTCCAGAAATTTGGGAAAACCTGCCTTATAACAATAAAAGTGACATCTGGTCCTTGGGTTGCA
TCCTGTATGAACTCTGTACCCTTAAGCATCCATTTCAGGCAAATAGTTGGAAAAATCTTATCCTCAAA
GTATGTCAAGGGTGCATCAGTCCACTGCCGTCTCATTACTCCTATGAACTTCAGTTCCTAGTCAAGCA
GATGTTTAAAAGGAATCCCTCACATCGCCCCTCGGCTACAACGCTTCTCTCTCGAGGCATCGTAGCTC
GGCTTGTCCAGAAGTGCTTACCCCCCGAGATCATCATGGAATATGGTGAGGAAGTATTAGAAGAAATA
AAAAATTCGAAGCATAACACACCAAGAAAAAAACAAGAGGAAGAACAAGATAGAAAGGGTAGCCATAC
TGATTTGGAAAGCATTAATGAAAATTTAGTTGAAAGTGCATTGAGAAGAGTAAACAGAGAAGAAAAAG
GTAATAAGTCAGTCCATCTGAGGAAAGCCAGTTCACCAAATCTTCATAGACGACAGTGGGAGAAAAAT
GTACCCAATACAGCTCTTACAGCTTTGGAAAATGCATCCATACTCACCTCCAGTTTAACAGCAGAGGA
CGATAGAGGTGGTTCTGTAATAAAGTACAGCAAAAATACTACTCGTAAGCAGTGGCTCAAAGAGACCC
CTGACACTTTGTTGAACATCCTTAAGAATGCTGATCTCAGCTTGGCTTTTCAAACATACACAATATAT
AGACCAGGTTCAGAAGGGTTCTTGAAAGGCCCCCTGTCTGAAGAAACAGAAGCATCGGACAGTGTTGA
TGGAGGTCACGATTCTGTCATTTTGGATCCAGAGCGACTTGAGCCTGGGCTAGATGAGGAGGACACGG
ACTTTGAGGAGGAAGATGACAACCCCGACTGGGTGTCAGAGCTGAAGAAGCGAGCTGGATGGCAAGGC
CTGTGCGACAGATAATGCCTGAGGAAATGTTCCTGAGTCACGCTGAGGAGAGGCTTCACTCTAGGAGT
TCATGCTGAGATG

| | | | |
|---|---|---|---|
| NOV77c, CG93669-02 | SEQ ID NO: 1102 | 489 aa | MW at 55900.0kD |
| Protein Sequence | | | |

MDDYMVLRMIGEGSFGRALLVQHESSNQMFANKEIRLPKVTTNTQNSRKEAVLLAKMKHPNIVAFKES
FEAEGHLYIVMEYCDGGDLMQKIKQQKGKLFPEDQILNWFTQMCLGVNHIHKKRVLHRDIKSQNIFLT
QNGKVKLGDFGSARLLSNPMAFACTYVGTPYYVPPEIWENLPYNNKSDIWSLGCILYELCTLKHPFQA
NSWKNLILKVCQGCISPLPSHYSYELQFLVKQNFKRNPSHRPSATTLLSRGIVARLVQKCLPPEIIME
YGEEVLEEIKNSKHNTPRKKQEEEQDRKGSHTDLESINENLVESALRRVNREEKGNKSVHLRKASSPN
LHRRQWEKNVPNTALTALENASILTSSLTAEDDRGGSVIKYSKNTTRKQWLKETPDTLLNILKNADLS
LAFQTYTIYRPGSEGFLKGPLSEETEASDSVDGGHDSVILDPERLEPGLDEEDTDFEEEDDNPDWVSE
LKKRAGWQGLCDR

| | | |
|---|---|---|
| NOV77d, GG93669-03 | SEQ ID NO: 1103 | 1588 bp |
| DNA Sequence | ORF Start: ATG at 246 | ORF Stop: TAA at 1521 |

CCGCAAGTCCCTCGCCGCCTTGGGGTCTGGGCGCGCGGTCCGTGGGGGTCAGCAGGGCGAGCGGCTTT
TCCAGGAGAAAGGGCCCTCACGGGTGAGCGGGGCGACTGGGCTCCCCCGCGGTGCAGTTGCCCCGCGC
GACCGGCCCCGGCTTCAACGGATTCTTCTCGCTCGCTGCCCGGAAAGAACCATTTGGGAGAGCCCATG
GTGACTGCGTGAGTGGAGCCCAGCTGTGTGGATGCCCCAGCATGGATGACTACATGGTCCTGAGAATG
ATTGGGGAGGGCTCCTTCGGCAGAGCTCTTTTGGTTCAGCATGAAAGCAGTAATCAGATGTTTGCCAT
GAAAGAAATAAGGCTTCCCAAGGTCACTACTAATACACAGAATTCTAGGAAGGAGGCTGTTCTTTTAG
CCAAAATGAAACACCCTAATATTGTTGCCTTCAAAGAATCATTTGAAGCTGAAGGACACTTGTATATT
GTGATGGAATACTGTGATGGAGGGGATCTAATGCAAAAGATTAAACAGCAGAAAGGAAAGTTATTTCC
TGAAGACCAGATACTTAATTGGTTTACCCAAATGTGCCTTGGAGTAAATCACATTCACAAGAAACGTG
TGCTACACAGAGATATCAAGTCCCAGAATATCTTCCTCACTCAGAATGGAAAAGTGAAATTGGGAGAC
TTTGGATCTGCCCGTCTCCTCTCCAATCCGATGGCATTTGCTTGTACCTATGTGGGAACTCCTTATTA
TGTGCCTCCAGAAATTTGGGAAAACCTGCCTTATAACAATAAAAGTGACATCTGGTCCTTGGGTTGCA
TCCTGTATGAACTCTGTACCCTTAAGCATCCATTTCAGGCAAATAGTTGGAAAAATCTTATCCTCAAA
GTATGTCAAGGGTGCATCAGTCCACTGCCGTCTCATTACTCCTATGAACTTCAGTTCCTAGTCAAGCA
GATGTTTAAAAGGAATCCCTCACATCGCCCCTCGGCTACAGCGCTTCTCTCTCGAGGCATCGTAGCTC
GGCTTGTCCAGAAGTGCTTACCCCCCGAGATCATCATGGAATATGGTGAGGAAGTATTAGAAGAAATA
AAAAATTCGAAGCATAACACACCAAGAAAAAAACAAGAGGAAGAACAAGATAGAAAGGGTAGCCATAC
TGATTTGGAAAGCATTAATGAAAATTTAGTTGAAAGTGCATTGAGAAGAGTAAACAGAGAAGAAAAAG
GTAATAAGTCAGTCCATCTGAGGAAAGCCAGTTCACCAAATCTTCATAGACGACAGTGGGAGAAAAAT
GTACCCAATACAGCTCTTACAGCTTTGGAAAATGCATCCATACTCACCTCCAGTTTAACAGCAGAGGA
CGATAGAGGTTCAGAAGGGTTCTTGAAAGGCCCCCTGTCTGAAGAAACAGAAGCATCGGACAGTGTTG
AGGAGGACACGGACTTTGAGGAGGAAGATGACAACCCCGACTGGGTGTCAGAGCTGAAGAAGCGAGCT
GGATGGCAAGGCCTGTGCGACAGATAATGCCTGAGGAAATGTACCTGAGTCACGCTGAGGAGAGGCTT
CACTCAGGAGTTCATGCTGAGATG

| | | | |
|---|---|---|---|
| NOV77d, CG93669-03 | SEQ ID NO: 1104 | 425 aa | MW at 48684.0kD |
| Protein Sequence | | | |

MDDYMVLRMIGEGSFGRALLVQHESSNQMFAMKEIRLPKVTTNTQNSRKEAVLLAKMKHPNIVAFKES
FEAEGHLYIVMEYCDGGDLMQKIKQQKGKLFPEDQILNWFTQMCLGVNHIHKKRVLHRDIKSQNIFLT
QNGKVKLGDFGSARLLSNPMAFACTYVGTPYYVPPEIWENLPYNNKSDIWSLGCILYELCTLKHPFQA
NSWKNLILKVCQGCISPLPSHYSYELQFLVKQMFKRNPSHRPSATALLSRGIVARLVQKCLPPEIIME
YGEEVLEEIKNSKHNTPRKKQEEEQDRKGSHTDLESINENLVESALRRVNREEKGNKSVHLRKASSPN
LHRRQWEKNVPNTALTALENASILTSSLTAEDDRGSEGFLKGPLSEETEASDSVEEDTDFEEEDDNPD
WVSELKKRAGWQGLCDR

| | | |
|---|---|---|
| NOV77e, SNP13376464 | SEQ ID NO: 1105 | 1542 bp |
| of CG93669-04, | ORF Start: ATG at 1 | ORF Stop: at 1468 |
| DNA Sequence | SNP Pos: 94 | SNP Change: A to G |

ATGGATGACTACATGGTCCTGAGAATGATTGGGGAGGGCTCCTTCGGCAGAGCTCTTTTGGTTCAGCA
TGAAAGCAGTAATCAGATGTTTGCCGTGAAAGAAATAAGGCTTCCCAAGTCTAATACACAGAATTCTA
GGAAGGAGGCTGTTCTTTTAGCCAAAATGAAACACCCTAATATTGTTGCCTTCAAAGAATCATTTGAA
GCTGAAGGACACTTGTATATTGTGATGGAATACTGTGATGGAGGGGATCTAATGCAAAAGATTAAACA
GCAGAAAGGAAAGTTATTTCCTGAAGACATACTTAATTGGTTTACCCAAATGTGCCTTGGAGTAAATC
ACATTCACAAGAAACGTGTGCTACACAGAGATATCAAGTCCAAGAATATCTTCCTCACTCAGAATGGA
AAAGTGAAATTGGGAGACTTTGGATCTGCCCGTCTTCTCTCCAGTCCGATGGCATTTGCTTGTACCTA
TGTGGGAACTCCTTATTATGTGCCTCCAGAAATTTGGGAAAACCTGCCTTATAACAATAAAAGTGACA
TCTGGTCCTTGGGTTGCATCCTGTATGAACTCTGTACCCTTAAGCATCCATTTCAGGCAAATAGTTGG
AAAAATCTTATCCTCAAAGTATGTCAAGGGTGCATCAGTCCACTGCCGTCTCATTACTCCTATGAACT
TCAGTTCCTAGTCAAGCAGATGTTTAAAAGGAATCCCTCACATCGCCCCTCGGCTACAACGCTTCTCT
CTCGAGGCATCGTAGCTCGGCTTGTCCAGAAGTGCTTACCCCCCCAGATCATCATGGAATATGGTGAG
GAAGTATTAGAAGAAATAAAAAATTCGAAGCATAACACACCAAGAAAAAAATCTCTTTTAAAGCAAGA
GGAAGAACAAGATAGAAAGGGTAGCCATACTGATTTGGAAAGCATTAATGAAAATTTAGTTGAAAGTG
CATTGAGAAGAGTAAACAGAAAATCAGGTAATAAGTCAGTCCATCTGAGGAAAGCCAGTTCACCAAAT
CTTCATAGACGACAGTGGGAGAAAAATGTACCCAATACAGCTCTTACAGCTTTGGAAAATGCATCCAT
ACTCACCTCCAGTTTAACAGCAGAGGACGATAGAGGTGGTGGTTCTGTAATAAAGTACAGCAAAAATA
CTACTCGTAAGCAGTGGCTCAAAGAGACCCCTGACACTTTGTTGAACATCCTTAAGAATGCTGATCTC
AGCTTGGCTTTTCAAACATACACAATATATAGACCAGGTTCAGAAGGGTTCTTGAAAGGCCCCCTGTC
TGAAGAAACAGAAGCATCGGACAGTGTTGATGGAGGTCACGATTCTGTCATTTTGGATCCAGAGCGAC
TTGAGCCTGGGCTAGATGAGGAGGACACGGACTTTGAGGAGGAAGATGACAACCCCGACTGGGTGTCA
GAGCTGAAGAAGCGAGCTGGATGGCAAGGCCTGTGCGACAGATAATGCCTGAGGAAATGTTCCTGAGT
CACGCTGAGGAGAGGCTTCACTCAGGAGTTCATGCTGAGATGATCA

| | | | |
|---|---|---|---|
| NOV77e, SNP13376464 | SEQ ID NO: 1106 | 489 aa | MW at 55668.8kD |
| of CG93669-04, | SNP Change: 32 | | SNP Change: Met to Val |
| Protein Sequence | | | |

MDDYMVLRMIGEGSFGRALLVQHESSNQMFAVKEIRLPKSNTQNSRKEAVLLAKMKHPNIVAFKESFE
AEGHLYIVMEYCDGGDLMOKIKQQKGKLFPEDILNWFTQMCLGVNHIHKKRVLHRDIKSKNIFLTQNG
KVKLGDFGSARLLSSPMAFACTYVGTPYYVPPEIWENLPYNNKSDIWSLGCILYELCTLKHPFQANSW
KNLILKVCQGCISPLPSHYSYELQFLVKQMFKRNPSHRPSATTLLSRGIVARLVQKCLPPQIIMEYGE
EVLEEIKNSKHNTPRKKSLLKQEEEQDRKGSRTDLESINENLVESALRRVNRKSGNKSVHLRKASSPN
LHRRQWEKNVPNTALTALENASILTSSLTAEDDRGGGSVIKYSKNTTRKQWLKETPDTLLNILKNADL
SLAFQTYTIYRPGSEGFLKGPLSEETEASDSVDGGHDSVILDPERLEPGLDEEDTDFEEEDDNPDWVS
ELKKRAGWQGLCD

| | | |
|---|---|---|
| NOV77f, SNP13376462 | SEQ ID NO: 1107 | 1542 bp |
| of CG93669-04, | ORF Start: ATG at 1 | ORF Stop: at 1468 |
| DNA Sequence | SNP Pos: 284 | SNP Change: A to G |

ATGGATGACTACATGGTCCTGAGAATGATTGGGGAGGGCTCCTTCGGCAGAGCTCTTTTGGTTCAGCA
TGAAAGCAGTAATCAGATGTTTGCCATGAAAGAAATAAGGCTTCCCAAGTCTAATACACAGAATTCTA
GGAAGGAGGCTGTTCTTTTAGCCAAAATGAAACACCCTAATATTGTTGCCTTCAAAGAATCATTTGAA
GCTGAAGGACACTTGTATATTGTGATGGAATACTGTGATGGAGGGGATCTAATGCAAAAGATTAAACA
GCAGAAAGGAAGGTTATTTCCTGAAGACATACTTAATTGGTTTACCCAAATGTGCCTTGGAGTAAATC
ACATTCACAAGAAACGTGTGCTACACAGAGATATCAAGTCCAAGAATATCTTCCTCACTCAGAATGGA
AAAGTGAAATTGGGAGACTTTGGATCTGCCCGTCTTCTCTCCAGTCCGATGGCATTTGCTTGTACCTA
TGTGGGAACTCCTTATTATGTGCCTCCAGAAATTTGGGAAAACCTGCCTTATAACAATAAAAGTGACA
TCTGGTCCTTGGGTTGCATCCTGTATGAACTCTGTACCCTTAAGCATCCATTTCAGGCAAATAGTTGG
AAAAATCTTATCCTCAAAGTATGTCAAGGGTGCATCAGTCCACTGCCGTCTCATTACTCCTATGAACT
TCAGTTCCTAGTCAAGCAGATGTTTAAAAGGAATCCCTCACATCGCCCCTCGGCTACAACGCTTCTCT
CTCGAGGCATCGTAGCTCGGCTTGTCCAGAAGTGCTTACCCCCCCAGATCATCATGGAATATGGTGAG
GAAGTATTAGAAGAAATAAAAAATTCGAAGCATAACACACCAAGAAAAAAATCTCTTTTAAAGCAAGA
GGAAGAACAAGATAGAAAGGGTAGCCATACTGATTTGGAAAGCATTAATGAAAATTTAGTTGAAAGTG
CATTGAGAAGAGTAAACAGAAAATCAGGTAATAAGTCAGTCCATCTGAGGAAAGCCAGTTCACCAAAT
CTTCATAGACGACAGTGGGAGAAAAATGTACCCAATACAGCTCTTACAGCTTTGGAAAATGCATCCAT
ACTCACCTCCAGTTTAACAGCAGAGGACGATAGAGGTGGTGGTTCTGTAATAAAGTACAGCAAAAATA
CTACTCGTAAGCAGTGGCTCAAAGAGACCCCTGACACTTTGTTGAACATCCTTAAGAATGCTGATCTC
AGCTTGGCTTTTCAAACATACACAATATATAGACCAGGTTCAGAAGGGTTCTTGAAAGGCCCCCTGTC
TGAAGAAACAGAAGCATCGGACAGTGTTGATGGAGGTCACGATTCTGTCATTTTGGATCCAGAGCGAC
TTGAGCCTGGGCTAGATGAGGAGGACACGGACTTTGAGGAGGAAGATGACAACCCCGACTGGGTGTCA
GAGCTGAAGAAGCGAGCTGGATGGCAAGGCCTGTGCGACAGATAATGCCTGAGGAAATGTTCCTGAGT
CACGCTGAGGAGAGGCTTCACTCAGGAGTTCATGCTGAGATGATCA

| | | | |
|---|---|---|---|
| NOV77f, SNP13376462 | SEQ ID NO: 1108 | 489 aa | MW at 55728.9kD |
| of CG93669-04, | SNP Pos: 95 | | SNP Change: Lys to Arg |
| Protein Sequence | | | |

MDDYMVLRMIGEGSFGRALLVQHESSNQMFANKEIRLPKSNTQNSRKEAVLLAKMKHPNIVAFKESFE
AEGHLYIVMEYCDGGDLMQKIKQQKGRLFPEDILNWFTQMCLGVNHIHKKRVLHRDIKSKNIFLTQNG
KVKLGDFGSARLLSSPMAFACTYVGTPYYVPPEIWENLPYNNKSDIWSLGCILYELCTLKHPFQANSW
KNLILKVCQGCISPLPSHYSYELQFLVKQMFKRNPSHRPSATTLLSRGIVARLVQKCLPPQIIMEYGE
EVLEEIKNSKHNTPRKKSLLKQEEEQDRKGSHTDLESINENLVESALRRVNRKSGNKSVHLRKASSPN
LHRRQWEKNVPNTALTALENASILTSSLTAEDDRGGGSVIKYSKNTTRKQWLKETPDTLLNILKNADL
SLAFQTYTIYRPGSEGFLKGPLSEETEASDSVDGGHDSVILDPERLEPGLDEEDTDFEEEDDNPDWVS
ELKKRAGWQGLCD

| | | |
|---|---|---|
| NOV77g, SNP13382521 | SEQ ID NO: 1109 | 1542 bp |
| of CG93669-04, | ORF Start: ATG at 1 | ORF Stop: at 1468 |
| DNA Sequence | SNP Pos: 1511 | SNP Change: G to C |

ATGGATGACTACATGGTCCTGAGAATGATTGGGGAGGGCTCCTTCGGCAGAGCTCTTTTGGTTCAGCA
TGAAAGCAGTAATCAGATGTTTGCCATGAAAGAAATAAGGCTTCCCAAGTCTAATACACAGAATTCTA
GGAAGGAGGCTGTTCTTTTAGCCAAAATGAAACACCCTAATATTGTTGCCTTCAAAGAATCATTTGAA
GCTGAAGGACACTTGTATATTGTGATGGAATACTGTGATGGAGGGGATCTAATGCAAAAGATTAAACA
GCAGAAAGGAAAGTTATTTCCTGAAGACATACTTAATTGGTTTACCCAAATGTGCCTTGGAGTAAATC
ACATTCACAAGAAACGTGTGCTACACAGAGATATCAAGTCCAAGAATATCTTCCTCACTCAGAATGGA
AAAGTGAAATTGGGAGACTTTGGATCTGCCCGTCTTCTCTCCAGTCCGATGGCATTTGCTTGTACCTA
TGTGGGAACTCCTTATTATGTGCCTCCAGAAATTTGGGAAAACCTGCCTTATAACAATAAAAGTGACA
TCTGGTCCTTGGGTTGCATCCTGTATGAACTCTGTACCCTTAAGCATCCATTTCAGGCAAATAGTTGG
AAAAATCTTATCCTCAAAGTATGTCAAGGGTGCATCAGTCCACTGCCGTCTCATTACTCCTATGAACT
TCAGTTCCTAGTCAAGCAGATGTTTAAAAGGAATCCCTCACATCGCCCCTCGGCTACAACGCTTCTCT
CTCGAGGCATCGTAGCTCGGCTTGTCCAGAAGTGCTTACCCCCCCAGATCATCATGGAATATGGTGAG
GAAGTATTAGAAGAAATAAAAAATTCGAAGCATAACACACCAAGAAAAAAATCTCTTTTAAAGCAAGA
GGAAGAACAAGATAGAAAGGGTAGCCATACTGATTTGGAAAGCATTAATGAAAATTTAGTTGAAAGTG
CATTGAGAAGAGTAAACAGAAAATCAGGTAATAAGTCAGTCCATCTGAGGAAAGCCAGTTCACCAAAT
CTTCATAGACGACAGTGGGAGAAAAATGTACCCAATACAGCTCTTACAGCTTTGGAAAATGCATCCAT
ACTCACCTCCAGTTTAACAGCAGAGGACGATAGAGGTGGTGGTTCTGTAATAAAGTACAGCAAAAATA
CTACTCGTAAGCAGTGGCTCAAAGAGACCCCTGACACTTTGTTGAACATCCTTAAGAATGCTGATCTC
AGCTTGGCTTTTCAAACATACACAATATATAGACCAGGTTCAGAAGGGTTCTTGAAAGGCCCCCTGTC
TGAAGAAACAGAAGCATCGGACAGTGTTGATGGAGGTCACGATTCTGTCATTTTGGATCCAGAGCGAC
TTGAGCCTGGGCTAGATGAGGAGGACACGGACTTTGAGGAGGAAGATGACAACCCCGACTGGGTGTCA
GAGCTGAAGAAGCGAGCTGGATGGCAAGGCCTGTGCGACAGATAATGCCTGAGGAAATGTTCCTGAGT
CACGCTGAGGAGAGCCTTCACTCAGGAGTTCATGCTGAGATGATCA

| | | | |
|---|---|---|---|
| NOV77g, SNP13382521 | SEQ ID NO: 1110 | 489 aa | MW at 55700.9kD |
| of CG93669-04, | | | SNP Change: no change |
| Protein Sequence | | | |

MDDYMVLRNIGEGSFGRALLVQHESSNQMFAMKEIRLPKSNTQNSRKEAVLLAKMKHPNIVAFKESFE
AEGHLYIVMEYCDGGDLMQKIKQQKGKLFPEDILNWFTQMCLGVNHIHKKRVLHRDIKSKNIFLTQNG
KVKLGDFGSARLLSSPMAFACTYVGTPYYVPPEIWENLPYNNCSDIWSLGCILYELCTLKHPFQANSW
KNLILKVCQGCISPLPSHYSYELQFLVKQMFKRNPSHRPSATTLLSRGIVARLVQKCLPPQIIMEYGE
EVLEEIKNSKHNTPRKKSLLKQEEEQDRKGSHTDLESINENLVESALRRVNRKSGNKSVHLRKASSPN
LHRRQWEKNVPNTALTALENASILTSSLTAEDDRGGGSVIKYSKNTTRKQWLKETPDTLLNILKNADL
SLAFQTYTIYRPGSEGFLKGPLSEETEASDSVDGGHDSVILDPERLEPGLDEEDTDFEEEDDNPDWVS
ELKKRAGWQGLCD

[0799] A ClustalW comparison of the above protein sequences yields the following sequence alignment shown in Table 77B.

TABLE 77B
Comparison of the NOV77 protein sequences.

| | |
|---|---|
| NOV77a | MDDYMVLRMIGEGSFGRALLVQHESSNQMFAMKEIRLPKS--NTQNSRKEAVLLAKMKHP |
| NOV77b | MDDYMVLRMIGEGSFGRALLVQHESSNQMFAMKEIRLPKVTTNTQNSRKEAVLLAKMKMP |
| NOV77c | MDDYMVLRMIGEGSFGRALLVQHESSNQMFAMKEIRLPKVTTNTQNSRKEAVLLAKMKHP |
| NOV77d | MDDYMVLRMIGEGSFGRALLVOHESSNQMFAMKEIRLPKVTTNTQNSRKEAVLLAKMKHP |
| NOV77a | NIVAFKESFEAEGHLYIVMEYCDGGDLMQKIKQQKGKIFPED-ILNWFTQMCLGVNHIHK |
| NOV77b | NIVAFKESFEAEGHLYIVMEYCDGGDLMQKIKQQKGKIFPEDQILNWFTOMCLGVNHINK |
| NOV77c | NIVAFKESFEAEGHLYIVMEYCDGGDLMQKIKQQKGKLFPEDQILNWFTQMCLGVNHIHK |
| NOV77d | NIVAFKESFEAEGHLYIVMEYCDGGDLMQKIKQQKGKLFPEDQILNWFTQMCLGVNHIHK |
| NOV77a | KRVLHRDIKSKNIFLTQNGKVKLGDFGSARLLSSPMAFACTYVGTPYYVPPEIWENLPYN |
| NOV77b | KRVLHRDIKSQNIFLTQNGKVKLGDFGSARLLSNPMAFACTYVGTPYYVPPEIWENLPYN |
| NOV77c | KRVLHRDIKSQNIFLTQNGKVKLGDFGSARLLSNPMAFACTYVGTPYYVPPEIWENLPYN |
| NOV77d | KRVLHRDIKSQNIFLTQNGKVKLGDFGSARLLSNPMAFACTYVGTPYYVPPEIWENLPYN |
| NOV77a | NKSDIWSLGCILYELCTLKHPFQANSWKNLILKVCQGCISPLPSHYSYELQFLVKQMFKR |
| NOV77b | NKSDIWSLGCILYELCTLKHPFQANSWKNLILKVCQGCISPLPSHYSYELQFLVKQMFKR |
| NOV77c | NKSDIWSLGCILYELCTLKHPFQANSWKNLILKVCQGCISPLPSHYSYELQFLVKQMFKR |
| NOV77d | NKSDIWSLGCILYELCTLKHPFQANSWKNLILKVCQGCISPLPSHYSYELQFLVKQMFKR |
| NOV77a | NPSHRPSATTLLSRGIVARLVQKCLPPEIIMEYGEEVLEEIKNSKHNTPRKKSLLK---- |
| NOV77b | NPSHRPSATTLLSRGIVARLVQKCLPPEIIMEYGEEVLEEIKNSKHNTPRKKTNPSRIRI |
| NOV77c | NPSHRPSATTLLSRGIVARLVQKCLPPEIIMEYGEEVLEEIKNSKHNTPRKKQ------- |
| NOV77d | NPSHRPSATTLLSRGIVARLVQKCLPPEIIMEYGEEVLEEIKNSKHNTPRKKQ------- |
| NOV77a | ---------QEEEQDRKGSHTDLESINENLVESALRRVNRKS-GNKSVHLRKASSPNLHR |
| NOV77b | ALGNEASTVQEEEQDRKGSHTDLESINENLVESALRRVNREEKGNKSVHLRKASSPNLHR |
| NOV77c | ----------EEEQDRKGSHTDLESINENLVESALRRVNREEKGNKSVHLRKASSPNLHR |
| NOV77d | ----------EEEQDRKGSHTDLESINENLVESALRRVNREEKGNKSVHLRKASSPNLHR |
| NOV77a | RQWEKNVPNTALTALENASILTSSLTAEDDRGGGSVIKYSKNTTRKQWLKETPDTLLNIL |
| NOV77b | RQWEKNVPNTALTALENASILTSSLTAEDDRGG-SVIKYSKNTTRKQWLKETPDTLLNIL |
| NOV77c | RQWEKNVPNTALTALENASILTSSLTABDDRGG-SVIKYSKNTTRKQWLKETPDTLLNIL |
| NOV77d | RQWEKNVPNTALTALENASILTSSLTAEDDRG---------------------------- |
| NOV77a | KNADLSLAFQTYTIYRPGSEGFLKGPLSEETEASDSVDGGHDSVILDPERLEPGLDEEDT |
| NOV77b | KNADLSLAFQTYTIYRPGSEGFLKGPLSEETEASDSVDGGHDSVILDPERLEPGLDEEDT |
| NOV77c | KNADLSLAFQTYTIYRPGSEGFLKGPLSEETEASDSVDGGHDSVILDPERLEPGLDEEDT |
| NOV77d | ------------------SEGFLKGPLSEETEASDSVE-------------------EDT |
| NOV77a | DFEEEDDNPDWVSELKKRAGWQGLCD- |
| NOV77b | DFEEEDDNPDWVSELKKRAGWQGLCDR |
| NOV77c | DFEEEDDNPDWVSELKKRAGWQGLCDR |
| NOV77d | DFEEEDDNPDWVSELKKRAGWQGLCDR |
| NOV77a | (SEQ ID NO: 1098) |
| NOV77b | (SEQ ID NO: 1100) |
| NOV77c | (SEQ ID NO: 1102) |
| NOV77d | (SEQ ID NO: 1104) |

[0800] Further analysis of the NOV77a protein yielded the following properties shown in Table 77C.

TABLE 77C
Protein Sequence Properties NOV77a

| | |
|---|---|
| SignalP analysis: | No Known Signal Sequence Indicated |

PSORT II analysis:

| | |
|---|---|
| PSG: | a new signal peptide prediction method |
| | N-region: length 8; pos.chg 1; neg.chg 2 |
| | H-region: length 3; peak value 0.00 |
| | PSG score: −4.40 |
| GvH: | von Heijne's method for signal seq. recognition |
| | GvH score (threshold: −2.1): −8.46 |
| | possible cleavage site: between 16 and 17 |

>>> Seems to have no N-terminal signal peptide

| | |
|---|---|
| ALOM: | Klein et al's method for TM region allocation |
| | Init position for calculation: 1 |
| | Tentative number of TMS(s) for the threshold 0.5: 0 |
| | number of TMS(s) . . . fixed |
| | PERIPHERAL Likelihood = 4.61 (at 5) |
| | ALOM score: 4.61 (number of TMSs: 0) |

MITDISC: discrimination of mitochondrial targeting seq

| | | | |
|---|---|---|---|
| R content: | 0 | Hyd Moment(75): | 8.48 |
| Hyd Moment(95): | 7.98 | G content: | 0 |
| D/E content: | 2 | S/T content: | 0 |

| | Score: −6.50 |
|---|---|
| Gavel: | prediction of cleavage sites for mitochondrial preseq |
| | cleavage site motif not found |

NUCDISC: discrimination of nuclear localization signals

pat4: HKKR (3) at 116
pat4: PRKK (4) at 286
pat7: PRKKSLL (5) at 286
bipartite: none
content of basic residues: 13.3%
NLS Score: 0.40

KDEL: ER retention motif in the C-terminus: none
ER Membrane Retention Signals: none
SKL: peroxisomal targeting signal in the C-terminus: none
PTS2: 2nd peroxisomal targeting signal: none
VAC: possible vacuolar targeting motif: none
RNA-binding motif: none
Actinin-type actin-binding motif:

type 1: none
type 2: none

NMYR: N-myristoylation pattern: none
Prenylation motif: none
memYQRL: transport motif from cell surface to Golgi: none
Tyrosines in the tail: none
Dileucine motif in the tail: none
checking 63 PROSITE DNA binding motifs: none
checking 71 PROSITE ribosomal protein motifs: none
checking 33 PROSITE prokaryotic DNA binding motifs: none

| | |
|---|---|
| NNCN: | Reinhardt's method for Cytoplasmic/Nuclear discrimination |
| | Prediction: nuclear |
| | Reliability: 76.7 |
| COIL: | Lupas's algorithm to detect coiled-coil regions |
| | total: 0 residues |

Final Results (k = 9/23):

```
69.6%: nuclear
21.7%: cytoplasmic
  4.3%: mitochondrial
  4.3%: peroxisomal
```

>> prediction for CG93669-04 is nuc (k = 23)

[0801] A search of the NOV77a protein against the Geneseq database, a proprietary database that contains sequences published in patents and patent publication, yielded several homologous proteins shown in Table 77D.

TABLE 77D
Geneseq Results for NOV77a

| | | NOV77a | Identities/ | |
|---|---|---|---|---|
| | | Residues/ | Similarities for | |
| Geneseq | Protein/Organism/Length | Match | the Matched | Expect |
| Identifier | [Patent #, Date] | Residues | Region | Value |
| ABP60668 | Human serine/threonine protein | 1 . . . 489 | 480/506 (94%) | 0.0 |
| | kinase 55.66 - Homo sapiens, 506 | 1 . . . 505 | 484/506 (94%) | |
| | aa. [CN1360042-A, 24-JUL- | | | |
| | 2002] | | | |
| AAM78344 | Human protein SEQ ID NO 1006 - | 1 . . . 489 | 480/506 (94%) | 0.0 |
| | Homo sapiens, 506 aa. | 1 . . . 505 | 484/506 (94%) | |
| | [WO200157190-A2, 09-AUG- | | | |
| | 2001] | | | |
| ABB97224 | Novel human protein SEQ ID | 1 . . . 489 | 479/506 (94%) | 0.0 |
| | NO: 492 - Homo sapiens, 527 aa. | 22 . . . 526 | 483/506 (94%) | |
| | [WO200222660-A2, 21-MAR- | | | |
| | 2002] | | | |
| AAM79328 | Human protein SEQ ID NO 2974 - | 1 . . . 489 | 479/506 (94%) | 0.0 |
| | Homo sapiens, 527 aa. | 22 . . . 526 | 483/506 (94%) | |
| | [WO200157190-A2, 09-AUG- | | | |
| | 2001] | | | |
| AAE24136 | Human kinase (PKIN)-7 protein - | 1 . . . 489 | 479/506 (94%) | 0.0 |
| | Homo sapiens, 506 aa. | 1 . . . 505 | 483/506 (94%) | |
| | [WO200233099-A2, 25-APR- | | | |
| | 2002] | | | |

[0802] In a BLAST search of public sequence databases, the NOV77a protein was found to have homology to the proteins shown in the BLASTP data in Table 77E.

TABLE 77E
Public BLASTP Results for NOV77a

| | | NOV77a | Identities/ | |
|---|---|---|---|---|
| Protein | | Residues/ | Similarities for | |
| Accession | | Match | the Matched | Expect |
| Number | Protein/Organism/Length | Residues | Portion | Value |
| Q8J023 | NIMA-related protein kinase 3 - | 1 . . . 489 | 479/493 (97%) | 0.0 |
| | Homo sapiens (Human), 489 aa. | 1 . . . 488 | 482/493 (97%) | |
| P51956 | Serine/threonine-protein kinase | 1 . . . 489 | 480/506 (94%) | 0.0 |
| | NEK3 (EC 2.7.1.37) (NimA- | 1 . . . 505 | 484/506 (94%) | |
| | related protein kinase 3) (HSPK | | | |
| | 36) - Homo sapiens (Human), 506 | | | |
| | aa. | | | |
| CAD34740 | Sequence 48 from Patent | 1 . . . 489 | 479/506 (94%) | 0.0 |
| | WO0222660 - Homo sapiens | 22 . . . 526 | 483/506 (94%) | |
| | (Human), 527 aa. | | | |
| Q9R0A5 | Serine/threonine-protein kinase | 1 . . . 484 | 368/501 (73%) | 0.0 |
| | NEK3 (EC 2.7.1.37) (NimA- | 1 . . . 498 | 413/501 (81%) | |
| | related protein kinase 3) - Mus | | | |
| | musculus (Mouse), 511 aa. | | | |
| Q99K72 | Similar to NIMA (never in mitosis | 1 . . . 484 | 367/499 (73%) | 0.0 |
| | gene a)-related expressed kinase 3 - | 1 . . . 496 | 411/499 (81%) | |
| | Mus musculus (Mouse), 509 aa. | | | |

[0803] PFam analysis indicates that the NOV77a protein contains the domains shown in the Table 77F.

TABLE 77F
Domain Analysis of NOV77a

| | | Identities/ | |
|---|---|---|---|
| | NOV77a Match | Similarities | Expect |
| Pfam Domain | Region | for the Matched Region | Value |
| pkinase | 4 . . . 254 | 97/297 (33%) | 5.4e−87 |
| | | 207/297 (70%) | |

### Example 78

[0804] The NOV78 clone was analyzed, and the nucleotide and encoded polypeptide sequences are shown in Table 78A.

TABLE 78A
NOV78 Sequence Analysis

| | | |
|---|---|---|
| NOV78a, CG94235-01 | SEQ ID NO: 1111 | 2856 bp |
| DNA Sequence | ORF Start: ATG at 28 | ORF Stop: TAG at 1294 |

GGGCGGCGCGGGGTCTGCGCTGGGGCCATGGCTCCGCCGCGCCGCTTCGTCCTGGAGCTTCCCGACTG
CACCCTGGCTCACTTCGCCCTAGGCGCCGACGCCCCCGGCGACGCAGACGCCCCCGACCCCCGCCTGG
CGGCGCTGCTGGGGCCCCCGGAGCGCAGCTACTCGCTGTGCGTGCCCGTGACCCCGGACGCCGGCTGC
GGGGCCCGGGTCCGGGCGGCGCGGCTGCACCAGCGCCTGCTGCACCAGCTGCGCCGCGGCCCCTTCCA
GCGGTGCCAGCTGCTCAGGCTGCTCTGCTACTGCCCGGGCGGCCAGGCCGGCGGCGCACAGCAAGGCT
TCCTGCTGCGCGACCCCCTGGATGACCCTGACACCCGGCAAGCGCTGCTCGAGCTGCTGGGCGCCTGT
CAGGAGGCACCACGCCCGCACTTGGGCGAGTTCGAGGCCGACCCGCGCGGCCAGCTGTGGCAGCGCCT
CTGGGAGGTGCAAGACGGCAGGCGGCTGCAGGTGGGCTGCGCACAGGTCGTGCCCGTCCCGGAGCCCC
CGCTGCACCCGGTGGTGCCAGACTTGCCCAGTTCCGTGGTCTTCCCGGACCGGGAAGCCGCCCGGGCC
GTTTTGGAGGAGTGTACCTCCTTTATTCCTGAAGCCCGGGCAGTGCTTGACCTGGTCGACCAGTGCCC
AAAACAGATCCAGAAAGGAAAGTTCCAGGTTGTTGCCATCGAAGGACTGGATGCCACGGGTGGTAAAA
CCACGGTGACCCAGTCAGTGGCAGATTCACTTAAGGCTGTCCTCTTAAAGTCACCACCCTCTTGCATT
GGCCAGTGGAGGAAGATCTTTGATGATGAACCAACTATCATTAGAAGAGCTTTTTACTCTTTGGGCAA
TTATATTGTGGCCTCCGAAATAGCTAAAGAATCTGCCAAATCTCCTGTGATTGTAGACAGGCACAGCA
CGGCCACCTATGCCATAGCCACTGAGGTGAGTGGGGGTCTCCAGCACCTGCCCCCAGCCCATCACCCT
GTGTACCAGTGGCCAGAGGACCTGCTCAAACCTGACCTTATCCTGCTGCTCACTGTGAGTCCTGAGGA
GAGGTTGCAGAGGCTGCAGGGCCGGGGCATGGAGAAGACCAGGGAAGAAGCAGAACTTGAGGCCAACA
GTGTGTTTCGTCAAAAGGTAGAAATGTCCTACCAGCGGATGGAGAATCCTGGCTGCCATGTGGTTGAT
GCCAGCCCCTCCAGAGAAAAGGTCCTGCAGACGGTATTAAGCCTAATCCAGAATAGTTTTAGTGAACC
GTAGTTACTCTGGCCAGGTGCCACGTCTAACTAGATTAGATGTTGTTTGAAACATCTACATCCACCAT
TTGTTATGCAGTGTTCCCAAATTTCTGTTCTACAAGCATGTTGTGTGGCAGAAAACTGGAGACCAGGC
ATCTTAATTTTACTTCAGCCATCGTACCCTCTTCTGACTGATGGACCCGTCATCACAAAGGTCCCTCT
CATCATGTTCCAGTGAGAGGCCAGCGATTGCTTTCTTCCTGGCATAGTAAACATTTTCTTGGAACATA
TGTTTCACTTAATCACTACCAAATATCTGGAAGACCTGTCTTACTCAGACAGCACCAGGTGTACAGAA
GCAGCAGACAAGATCTTCCAGATCAGCAGGGAGACCCCGGAGCCTCTGCTTCTCCTACACTGGCATGC
TGATGAGATCGTGACATGCCCACATTGGCTTCTTCCACATCTGGTTGCACTCGTCATGATGGGCTCGC
TGCATCTCCCTCAGTCCCAAATTCTAGAGCCAAGTGTTCCTGCAGAGGCTGTCTATGTGTCCTGGCTG
CCCAAGGACACTCCTGCAGAGCCATTTTTGGGTAAGGAACACTTACAAAGAAGGCATTGATCTTGTGT
CTGAGGCTCAGAGCCCTTTTGATAGGCTTCTGAGTCATATATAAAGACATTCAAGCCAAGATGCTCCA
ACTGCAAATATACCAACCTTCTCTGAATTATATTTTGCTTATTTATATTTCTTTTCTTTTTTTCTAAA
GTATGGCTCTGAATAGAATGCACATTTTCCATTGAACTGGATGCATTTCATTTAGCCAATCCAGTAAT
TTATTTATATTAATCTATACATAATATGTTTCCTCAGCATAGGAGCTATGATTCATTAATTAAAAGTG
GAGTCAAAACGCTAAATGCAATGTTTGTTGTGTATTTTCATTACACAAACTTAATTTGTCTTGTTAAA
TAAGTACAGTGGATCTTGGAGTGGGATTTCTTGGTAAATTATCTTGCACTTGAATGTCTCATGATTAC
ATATGAAATCGCTTTGACATATCTTTAGACAGAAAAAAGTAGCTGAGTGAGGGGGAAATTATAGAGCT
GTGTGACTTTAGGGAGTAGGTTGAACCAGGTGATTACCTAAAATTCCTTCCAGTTCAAAGGCAGATAA
ATCTGTAAATTATTTTATCCTATCTACCATTTCTTAAGAAGACATTACTCCAAAATAATTAAATTTAA
GGCTTTATCAGGTCTGCATATAGAATCTTAAATTCTAATAAAGTTTCATGTTAATGTCATAGGATTTT
TAAAAGAGCTATAGGTAATTTCTATATAATATGTGTATATTAAAATGTAATTGATTTCAGTTGAAAGT
ATTTTAAAGCTGATAAATAGCATTAGGGTTCTTTGCAATGTGGTATCTAGCTGTATTATTGGTTTTAT
TTACTTTAAACATTTTGAAAAGCTTATACTGGCAGCCTAGAAAAACAAACAATTAATGTATCTTTATG
TCCCTGGCACATGAATAAACTTTGCTGTGGTTTACTAATCTAAAAAAAAAAAAAAAAGGGCGGCCGCT

| | | | |
|---|---|---|---|
| NOV78a, CG94235-01 | SEQ ID NO: 1112 | 422 aa | MW at 46476.6kD |
| Protein Sequence | | | |

MAPPRRFVLELPDCTLAHFALGADAPGDADAPDPRLAALLGPPERSYSLCVPVTPDAGCGARVRAARL
HQRLLHQLRRGPFQRCQLLRLLCYCPGGQAGGAQQGFLLRDPLDDPDTRQALLELLGACQEAPRPHLG
EFEADPRGQLWQRLWEVQDGRRLQVGCAQVVPVPEPPLHPVVPDLPSSVVFPDREAARAVLEECTSFI
PEARAVLDLVDQCPKQIQKGKFQVVAIEGLDATGGKTTVTQSVADSLKAVLLKSPPSCIGQWRKIFDD
EPTIIRRAFYSLGNYIVASEIAKESAKSPVIVDRHSTATYAIATEVSGGLQHLPPAHHPVYQWPEDLL
KPDLILLLTVSPEERLQRLQGRGMEKTREEAELEANSVFRQKVEMSYQRMENPGCHVVDASPSREKVL
QTVLSLIQNSFSEP

| | | |
|---|---|---|
| NOV78b, 254647864 | SEQ ID NO: 1113 | 601 bp |
| DNA Sequence | ORF Start: at 2 | ORF Stop: |
| | | end of sequence |

CACCGGATCCATCGAAGGACTGGATGCCACGGGTGGTAAAACCACGGTGACCCAGTCAGTGGCAGATT
CACTTAAGGCTGTCCTCTTAAAGTCACCACCCTCTTGCATTGGCCAGTGGAGGAAGATCTTTGATGAT
GAACCAACTATCATTAGAAGAGCTTTTTACTCTTTGGGCAATTATATTGTGGCCTCCGAAATAGCTAA
AGAATCTGCCAAATCTCCTGTGATTGTAGACAGGTACTGGCACAGCACGGCCACCTATGCCATAGCCA
CTGAGGTGAGTGGGGGTCTCCAGCACCTGCCCCCAGCCCATCACCCTGTGTACCAGTGGCCAGAGGAC
CTGCTCAAACCTGACCTTATCCTGCTGCTCACTGTGAGTCCTGAGGAGAGGTTGCAGAGGCTGCAGGG
CCGGGGCATGGAGAAGACCAGGGAAGAAGCAGAACTTGAGGCCAACAGTGTGTTTCGTCAAAAGGTAG
AAATGTCCTACCAGCGGATGGAGAATCCTGGCTGCCATGTGGTTGATGCCAGCCCCTCCAGAGAAAAG
GTCCTGCAGACGGTATTAAGCCTAATCCAGAATAGTTTTAGTGAACCGGGTACCGGC

| | | | |
|---|---|---|---|
| NOV78b, 254647864 | SEQ ID NO: 1114 | 200 aa | MW at 22132.8kD |
| Protein Sequence | | | |

TGSIEGLDATGGKTTVTQSVADSLKAVLLKSPPSCIGQWRKIFDDEPTIIRRAFYSLGNYIVASEIAK
ESAKSPVIVDRYWHSTATYAIATEVSGGLQHLPPAHHPVYQWPEDLLKPDLILLLTVSPEERLQRLQG
RGMEKTREEABLEANSVFRQKVEMSYQRMENPGCHVVDASPSREKVLQTVLSLIQNSFSEPGTG

| | | |
|---|---|---|
| NOV78c, 254347797 | SEQ ID NO: 1115 | 601 bp |
| DNA Sequence | ORF Start: at 2 | ORF Stop: |
| | | end of sequence |

CACCGGATCCATCGAAGGACTGGATGCCACGGGTGGTAAAACCACGGTGACCCAGTCAGTGGCAGATT
CACTTAAGGCTGTCCTCTTAAAGTCACCACCCTCTTGCATTGGCCAGTGGAGGAAGATCTTTGATGAT
GAACCAACTATCATTAGAAGAGCTTTTTACTCTTTGGGCAATTATATTGTGGCCTCCGAAATAGCTAA
AGAATCTGCCAAATCTCCTGTGATTGTAGACAGGTACTGGCACAGCACGGCCACCTATGCCATAGCCA
CTGAGGTGAGTGGGGGTCTCCAGCACCTGCCCCCAGCCCATCACCCTGTGTACCAGTGGCCAGAGGAC
CTGCTCAAACCTGACCTTATCCTGCTGCTCACTGTGAGTCCTGAGGAGAGGTTGCAGAGGCTGCAGGG
CCGGGGCATGGAGAAGACCAGGGAAGAAGCAGAACTTGAGGCCAACAGTGTGTTTCGTCAAAAGGTAG
AAATGTCCTACCAGCGGATGGAGAATCCTGGCTGCCATGTGGTTGATGCCAGCCCCTCCAGAGAAAAG
GTCCTGCAGACGGTATTAAGCCTAATCCAGAATAGTTTTAGTGAACCGGGTACCGGC

| | | | |
|---|---|---|---|
| NOV78c, 254347797 | SEQ ID NO: 1116 | 200 aa | MW at 22132.8kD |
| Protein Sequence | | | |

TGSIEGLDATGGKTTVTQSVADSLKAVLLKSPPSCIGQWRKIFDDEPTIIRRAFYSLGNYIVASEIAK
ESAKSPVIVDRYNHSTATYAIATEVSGGLQHLPPAHHPVYQWPEDLLKPDLILLLTVSPEERLQRLQG
RGMEKTREEAELEANSVFRQKVEMSYQRNENPGCHVVDASPSREKVLQTVLSLIQNSFSEPGTG

| | | |
|---|---|---|
| NOV78d, CG94235-02 | SEQ ID NO: 1117 | 2331 bp |
| DNA Sequence | ORF Start: ATG at 16 | ORF Stop: TAG at 769 |

GTCTGCGCTGGGGCCATGGCTCCGCCGCGCCGCTTCGTCCTGGAGCTTCCTGACTGCACCCTGGCTCA
CTTCGCCCTAGGCGCCGTTTTGGAGGAGTGTACCTCCTTTATTCCTGAAGCCCGGGCAGTGCTTGACC
TGGTCGACCAGTGCCCAAAACAGATCCAGAAAGGAAAGTTCCAGGTTGTTGCCATCGAAGGACTGGAT
GCCACGGGTAAAACCACGGTGACCCAGTCAGCGGCAGATTCACTTAAGGCTGTCCTCTTAAAGTCACC
ACCCTCTTGCATTGGCCAGTGGAGGAAGATCTTTGATGATGAACCAACTATCATTAGAAGAGCTTTTT
ACTCTTTGGGCAATTATATTGTGGCCTCCGAAATAGCTAAAGAATCTGCCAAATCTCCTGTGATTGTA
GACAGGTACTGGCACAGCACGGCCACCTATGCCATAGCCACTGAGGTGAGTGGGGGTCTCCAGCACCT
GCCCCCAGCCCATCACCCTGTGTACCAGTGGCCAGAGGACCTGCTCAAACCTGACCTTATCCTGCTGC
TCACTGTGAGTCCTGAGGAGAGGTTGCAGAGGCTGCAGGGCCGGGGCATGGAGAAGACCAGGGAAGAA
GCAGAACTTGAGGCCAACAGTGTGTTTCGTCAAAAGGTAGAAATGTCCTACCAGCGGATGGAGAATCC
TGGCTGCCATGTGGTTGATGCCAGCCCCTCCAGAGAAAAGGTCCTGCAGACGGTATTAAGCCTAATCC
AGAATAGTTTTAGTGAACCGTAGTTACTCTGGCCAGGTGCCACGTCTAACTAGATTAGATGTTGTTTG
AAACATCTACATCCACCATTTGTTATGCAGTGTTCCCAAATTTCTGTTCTACAAGCATGTTGTGTGGC
AGAAAACTGGAGACCAGGCATCTTAAGTTTACTTCAGCCATCGTACCCTCTTCTGACTGATGGACCCG
TCATCACAAAGGTCCCTCTCATCATGTTCCAGTGAGAGGCCAGCGATTGCTTTCTTCCTGGCATAGTA
AACATTTTCTTGGAACATATGTTTCACTTAATCACTACCAAATATCTGGAAGACCTGTCTTACTCAGA
CAGCACCAGGTGTACAGAAGCAGCAGACAAGATCTTCCAGATCAGCAGGGAGACCCCGGAGCCTCTGC
TTCTCCTACACTGGCATGCTGATGAGATCGTGACATGCCCACATTGGCTTCTTCCACATCTGGTTGCA
CTCGTCATGATGGGCTCGCTGCATCTCCCTCAGTCCCAAATTCTAGAGCCAAGTGTTCCTGCAGAGGC
TGTCTATGTGTCCTGGCTGCCCAAGGACACTCCTGCAGAGCCATTTTTGGGTAAGGAACACTTACAAA
GAAGGCATTGATCTTGTGTCTGAGGCTCAGAGCCCTTTTGATAGGCTTCTGAGTCATATATAAAGACA
TTCAAGCCAAGATGCTCCAACTGCAAATATACCAACCTTCTCTGAATTATATTTTGCTTATTTATATT
TCTTTTCTTTTTTTCTAAAGTATGGCTCTGAATAGAATGCACATTTTCCATTGAACTGGATGCATTTC
ATTTAGCCAATCCAGTAATTTATTTATATTAATCTATACATAATATGTTTCCTCAGCATAGGAGCTAT
GATTCATTAATTAAAAGTGGAGTCAAAACGCTAAATGCAATGTTTGTTGTGTATTTTCATTACACAAA
CTTAATTTGTCTTGTTAAATAAGTACAGTGGATCTTGGAGTGGGATTTCTTGGTAAATTATCTTGCAC
TTGAATGTCTCATGATTACATATGAAATCGCTTTGACATATCTTTAGACAGAAAAAAGTAGCTGAGTG
AGGGGGAAATTATAGAGCTGTGTGACTTTAGGGAGTAGGTTGAACCAGGTGATTACCTAAAATTCCTT
CCAGTTCAAAGGCAGATAAATCTGTAAATTATTTTATCCTATCTACCATTTCTTAAGAAGACATTACT
CCAAAATAATTAAATTTAAGGCTTTATCAGGTCTGCATATAGAATCTTAAATTCTAATAAAGTTTCAT
GTTAATGTCATAGGATTTTTAAAAGAGCTATAGGTAATTTCTGTATAATATGTGTATATTAAAATGTA
ATTGATTTCAGTTGAAAGTATTTTAAAGCTGATAAATAGCATTAGGGTTCTTTGCAATGTGGTATCTA
GCTGTATTATTGGTTTTATTTACTTTAAACATTTTGAAAAGCTTATACTGGCAGCCTAGAAAAACAAA
CAATTAATGTATCTTTATGTCCCTGGCACATGAATAAACTTTGCTGTGGTTTACTAAAAAAAAAAAAA
AAAAAAAAGGGCGGCCGCT

| | | | |
|---|---|---|---|
| NOV78d, CG94235-02 | SEQ ID NO: 1118 | 251 aa | MW at 27980.8kD |
| Protein Sequence | | | |

MAPPRRFVLELPDCTLAHFALGAVLEECTSFIPEARAVLDLVDQCPKQIQKGKFQVVAIEGLDATGKT
TVTQSAADSLKAVLLKSPPSCIGQWRKIFDDEPTIIRRAFYSLGNYIVASEIAKESAKSPVIVDRYWH
STATYAIATEVSGGLQHLPPAHHPVYQWPEDLLKPDLILLLTVSPEERLQRLQGRGMEKTREEAELEA
NSVFRQKVEMSYQRMENPGCHVVDASPSREKVLQTVLSLIQNSFSEP

[0805] A ClustalW comparison of the above protein sequences yields the following sequence alignment shown in Table 78B.

TABLE 78B
Comparison of the NOV78 protein sequences.

| | |
|---|---|
| NOV78a | MAPPRRFVLELPDCTLAHFALGADAPGDADAPDPRLAALLGPPERSYSLCVPVTPDAGCG |
| NOV78b | ------------------------------------------------------------ |
| NOV78c | ------------------------------------------------------------ |
| NOV78d | ------------------------------------------------------------ |
| NOV78a | ARVRAARLHQRLLHQLRRGPFQRCQLLRLLCYCPGGQAGGAQQGFLLRDPLDDPDTRQAL |
| NOV78b | ------------------------------------------------------------ |
| NOV78c | ------------------------------------------------------------ |
| NOV78d | ------------------------------------------------------------ |
| NOV78a | LELLGACQEAPRPHLGEFEADPRGQLWQRLWEVQDGRRLQVGCAQVVPVPEPPLHPVVPD |
| NOV78b | ------------------------------------------------------------ |
| NOV78c | ------------------------------------------------------------ |
| NOV78d | --------------------------------------------------MAPPRRFVLE |
| NOV78a | LPSSVVFPDREAARAVLEECTSFIPEARAVLDLVDQCPKQIQKGKFQVVAIEGLDATGGK |
| NOV78b | -----------------------------------------------TGSIEGLDATGGK |
| NOV78c | -----------------------------------------------TGSIEGLDATGGK |
| NOV78d | LPDCTLA--HFALGAVLEECTSFIPEARAVLDLVDQCPKQIQKGKFQVVAIEGLDATG-K |
| NOV78a | TTVTQSVADSLKAVLLKSPPSCIGQWRKIFDDEPTIIRRAFYSLGNYIVASEIAKESAKS |
| NOV78b | TTVTQSVADSLKAVLLKSPPSCIGQWRKIFDDEPTIIRRAFYSLGNYIVASEIAKESAKS |
| NOV78c | TTVTQSVADSLKAVLLKSPPSCIGQWRKIFDDEPTIIRRAFYSLGNYIVASEIAKESAKS |
| NOV78d | TTVTQSAADSLKAVLLKSPPSCIGQWRKIFDDEPTIIRRAFYSLGNYIVASEIAKESAKS |
| NOV78a | PVIVDR--HSTATYAIATEVSGGLQHLPPAHHPVYQWPEDLLKPDLILLLTVSPEERLQR |
| NOV78b | PVIVDRYWHSTATYAIATEVSGGLQHLPPAHHPVYQWPEDLLKPDLILLLTVSPEERLQR |
| NOV78c | PVIVDRYWHSTATYAIATEVSGGLQHLPPAHHPVYQWPEDLLKPDLILLLTVSPEERLQR |
| NOV78d | PVIVDRYWHSTATYAIATEVSGGLQHLPPAHHPVYQWPEDLLKPDLILLLTVSPEERLQR |
| NOV78a | LQGRGMEKTREEAELEANSVFRQKVEMSYQRMENPGCHVVDASPSREKVLQTVLSLIQNS |
| NOV78b | LQGRGMEKTREEAELEANSVFRQKVEMSYQRMENPGCHVVDASPSREKVLQTVLSLIQNS |
| NOV78c | LQGRGMEKTREEAELEANSVFRQKVEMSYQRMENPGCHVVDASPSREKVLQTVLSLIQNS |
| NOV78d | LQGRGMEKTREEAELEANSVFRQKVEMSYQRMENPGCHVVDASPSREKVLQTVLSLIQNS |
| NOV78a | FSEP--- |
| NOV78b | FSEPGTG |
| NOV78c | FSEPGTG |
| NOV78d | FSEP--- |
| NOV78a | (SEQ ID NO: 1112) |
| NOV78b | (SEQ ID NO: 1114) |
| NOV78c | (SEQ ID NO: 1116) |
| NOV78d | (SEQ ID NO: 1118) |

[0806] Further analysis of the NOV78a protein yielded the following properties shown in Table 78C.

TABLE 78C
Protein Sequence Properties NOV78a

| | |
|---|---|
| SignalP analysis: | No Known Signal Sequence Indicated |

PSORT II analysis:

| | |
|---|---|
| PSG: | a new signal peptide prediction method |
| | N-region: length 10; pos.chg 2; neg.chg 1 |
| | H-region: length 2; peak value −1.05 |
| | PSG score: −5.45 |
| GvH: | von Heijne's method for signal seq. recognition |
| | GvH score (threshold: −2.1): −5.20 |
| | possible cleavage site: between 22 and 23 |

>>> Seems to have no N-terminal signal peptide

| | |
|---|---|
| ALOM: | Klein et al's method for TM region allocation |
| | Init position for calculation: 1 |
| | Tentative number of TMS(s) for the threshold 0.5: 0 |
| | number of TMS(s) . . . fixed |
| | PERIPHERAL Likelihood = 3.66 (at 7) |
| | ALOM score: 3.66 (number of TMSs: 0) |

MITDISC: discrimination of mitochondrial targeting seq

| | | | |
|---|---|---|---|
| R content: | 2 | Hyd Moment(75): | 11.11 |
| Hyd Moment(95): | 9.49 | G content: | 0 |
| D/E content: | 2 | S/T content: | 0 |

Score: −4.13

Gavel: prediction of cleavage sites for mitochondrial preseq

R-3 motif at 48 ERSY|S

NUCDISC: discrimination of nuclear localization signals

pat4: none
pat7: none
bipartite: none
content of basic residues: 10.9%
NLS Score: −0.47

KDEL: ER retention motif in the C-terminus: none
ER Membrane Retention Signals:

XXRR-like motif in the N-terminus: APPR

none
SKL: peroxisomal targeting signal in the C-terminus: none
PTS2: 2nd peroxisomal targeting signal: none
VAC: possible vacuolar targeting motif: none
RNA-binding motif: none
Actinin-type actin-binding motif:

type 1: none
type 2: none

NMYR: N-myristoylation pattern: none
Prenylation motif: none
memYQRL: transport motif from cell surface to Golgi: none
Tyrosines in the tail: none
Dileucine motif in the tail: none
checking 63 PROSITE DNA binding motifs: none
checking 71 PROSITE ribosomal protein motifs: none
checking 33 PROSITE prokaryotic DNA binding motifs: none

| | |
|---|---|
| NNCN: | Reinhardt's method for Cytoplasmic/Nuclear discrimination |
| | Prediction: cytoplasmic |
| | Reliability: 70.6 |
| COIL: | Lupas's algorithm to detect coiled-coil regions |
| | total: 0 residues |

Final Results (k = 9/23):

47.8%: cytoplasmic
26.1%: mitochondrial
17.4%: nuclear
8.7%: peroxisomal

>> prediction for CG94235-01 is cyt (k = 23)

[0807] A search of the NOV78a protein against the Geneseq database, a proprietary database that contains sequences published in patents and patent publication, yielded several homologous proteins shown in Table 78D.

TABLE 78D
Geneseq Results for NOV78a

| | | NOV78a | Identities/ | |
|---|---|---|---|---|
| | | Residues/ | Similarities for | |
| Geneseq | Protein/Organism/Length | Match | the Matched | Expect |
| Identifier | [Patent #, Date] | Residues | Region | Value |
| ABB57297 | Mouse ischaemic condition related | 199 . . . 384 | 131/193 (67%) | 3e−64 |
| | protein sequence SEQ ID NO: 834 - | 157 . . . 344 | 150/193 (76%) | |
| | Mus musculus, 431 aa. | | | |
| | [WO200188188-A2, 22-NOV- | | | |
| | 2001] | | | |
| AAB72201 | E. coli thymidylate kinase amino | 229 . . . 421 | 51/212 (24%) | 0.062 |
| | acid sequence - Escherichia coli, | 6 . . . 210 | 88/212 (41%) | |
| | 213 aa. [WO200111025-A2, 15- | | | |
| | FEB-2001] | | | |
| AAU34536 | E. coli cellular proliferation | 229 . . . 421 | 51/212 (24%) | 0.062 |
| | protein #117 - Escherichia coli, | 6 . . . 210 | 88/212 (41%) | |
| | 213 aa. [WO200170955-A2, 27- | | | |
| | SEP-2001] | | | |
| AAY28786 | E. coli thymidylate kinase-1 - | 229 . . . 421 | 51/212 (24%) | 0.062 |
| | Escherichia coli, 213 aa. | 6 . . . 210 | 88/212 (41%) | |
| | [WO9941404-A2, 19-AUG-1999] | | | |
| AAY23912 | Amino acid sequence of a heat | 183 . . . 277 | 26/97 (26%) | 0.71 |
| | shock protein - Mycobacterium | 199 . . . 293 | 49/97 (49%) | |
| | leprae, 537 aa. [WO9935270-A1, | | | |
| | 15-JUL-1999] | | | |

[0808] In a BLAST search of public sequence databases, the NOV78a protein was found to have homology to the proteins shown in the BLASTP data in Table 78E.

TABLE 78E
Public BLASTP Results for NOV78a

| | | NOV78a | Identities/ | |
|---|---|---|---|---|
| Protein | | Residues/ | Similarities for | |
| Accession | | Match | the Matched | Expect |
| Number | Protein/Organism/Length | Residues | Portion | Value |
| Q9DC34 | 1200004E04Rik protein - Mus | 42 . . . 418 | 292/379 (77%) | e−168 |
| | musculus (Mouse), 395 aa. | 16 . . . 393 | 328/379 (86%) | |
| Q62316 | Thymidylate kinase homologue - | 199 . . . 384 | 131/193 (67%) | 1e−63 |
| | Mus musculus (Mouse), 431 aa. | 157 . . . 344 | 150/193 (76%) | |
| Q96AL8 | Hypothetical protein - Homo | 365 . . . 422 | 58/58 (100%) | 4e−25 |
| | sapiens (Human), 58 aa | 1 . . . 58 | 58/58 (100%) | |
| | (fragment). | | | |
| O60970 | TKRP1 - Leishmania major, 274 | 199 . . . 418 | 73/220 (33%) | 1e−21 |
| | aa. | 44 . . . 254 | 108/220 (48%) | |
| Q8P3Y6 | Thymidylate kinase (EC 2.7.4.9) | 228 . . . 415 | 53/204 (25%) | 2e−04 |
| | (dTMP kinase) - Xanthomonas | 11 . . . 196 | 89/204 (42%) | |
| | campestris (pv. campestris), 227 | | | |
| | aa. | | | |

[0809] PFam analysis indicates that the NOV78a protein contains the domains shown in the Table 78F.

TABLE 78F
Domain Analysis of NOV78a

| | NOV78a | Identities/ | |
|---|---|---|---|
| | Match | Similarities for | |
| Pfam Domain | Region | the Matched Region | Expect Value |
| Thymidylate_kin | 231 . . . 411 | 54/210 (26%) | 2.2e−07 |
| | | 131/210 (62%) | |

### Example 79

[0810] The NOV79 clone was analyzed, and the nucleotide and encoded polypeptide sequences are shown in Table 79A.

TABLE 79A
NOV79 Sequence Analysis

| | | |
|---|---|---|
| NOV79a, CG95175-01 | SEQ ID NO: 1119 | 3117 bp |
| DNA Sequence | ORF Start: ATG at 21 | ORF Stop: TGA at 3078 |

CCTCCCCAGTAGCTGGGACTATGGGAGCGTGCCACCATGCCTGGTTAATTTTTGTATTTTTAGTAGAG
ATGGGGTTTCACCATGTTGGCCAGGCTTGTCTTCCCCTCTCCTTAGTTATCCTCCTGGATTCCAAAGC
CTCCCAGGCCGAGCTGGGCTGGACTGCACTGCCAAGTAATGGGTGGGAGGAGATCAGCGGCGTGGATG
AACACGACCGTCCCATCCGCACGTACCAAGTGTGCAATGTGCTGGAGCCCAACCAGGACAACTGGCTG
CAGACTGGCTGGATAAGCCGTGGCCGCGGGCAGCGCATCTTCGTGGAACTGCAGTTCACACTCCGTGA
CTGCAGCAGCATCCCTGGCGCCGCGGGTACCTGCAAGGAGACCTTCAACGTCTACTACCTGGAAACTG
AGGCCGACCTGGGCCGTGGGCGTCCCCGCCTAGGCGGCAAAATCGACACGATCGCGGCGGACGAGAGC
TTCACGCAGGGCGACCTGGGTGAGCGCAAGATGAAGCTGAACACAGAGGTGCGCGAGATCGGACCGCT
CAGCCGGCGGGGTTTCCACCTGGCCTTTCAGGACGTGGGCGCATGCGTGGCGCTTGTCTCGGTGCGCG
TCTACTACAAGCAGTGCCGCGCCACCGTGCGGGGCCTGGCCACGTTCCCAGCCACCGCAGCCGAGAGC
GCCTTCTCCACACTGGTGGAAGTGGCCGGAACGTGCGTGGCGCACTCGGAAGGGGAGCCTGGCAGCCC
CCCACGCATGCACTGCGGCGCCGACGGCGAGTGGCTGGTGCCTGTGGGCCGCTGCAGCTGCAGCGCGG
GATTCCAGGAGCGTGGTGACTTCTGCGAAGGTATCTGTCCCCCAGGGTTTTACAAGGTGTCCCCGCGG
CGGCCCCTCTGCTCACCGTGCCCAGAGCACAGCCGGGCCCTGGAAAACGCCTCCACCTTCTGCGTGTG
CCAGGACAGCTATGCGCGCTCACCCACCGACCCGCCCTCGGCTTCCTGCACCCGTCCGCCGTCGGCGC
CGCGGGACCTGCAGTACAGCCTGAGCCGCTCGCCGCTGGTGCTGCGACTGCGCTGGCTGCCGCCGGCC
GACTCGGGAGGCCGCTCGGACGTCACCTACTCGCTGCTGTGCCTGCGCTGCGGCCGCGAGGGCCCGGC
GGGCGCCTGCGAGGGGCCGCGCGTGGCCTTCCTACCGCGCCAGGCAGGGCTGCGGGAGCGAGCCGCCA
CGCTGCTGCACCTGCGGCCCGGCGCGCGCTACACCGTGCGCGTGGCCGCGCTCAACGGCGTCTCGGGC
CCGGCGGCCGCCGCGGGAACCACCTACGCGCAGGTCACCGTCTCCACCGGGCCCGGGGGTAAGGCCGT
CCGCGCCCCCCACCCCGAGGCCACCGCGCCTGCCGCCCCTGCGCCCTCTTGGGGCCGCCCCGTCGGTC
CTGCGGGATCAGCGCCCTGGGAGGAGGATGAGATCCGCAGGGACCGAGTGGAACCCCAGAGCGTGTCC
CTGTCGTGGCGGGAGCCCATCCCTGCCGGAGCCCCTGGGGCCAATGACACGGAGTACGAGATCCGATA
CTACGAGAAGGTGAGTGCGCAGAGTGAGCAGACTTACTCCATGGTGAAGACAGGGGCGCCCACAGTCA
CCGTGATTTTCCTCCCAGCTGCCTCAGGGTCCAGGGACCAGAGCCCCGCCATTGTCGTCACCGTAGTG
ACCATCTCGGCCCTCCTCGTCCTGGGCTCCGTGATGAGTGTGCTGGCCATTTGGAGGAGGAGGCCCTG
CAGCTATGGCAAAGGAGGAGGGGATGCCCATGATGAAGAGGAGCTGTATTTCCACTGTGAGTTGGCTG
GGAAAGTCCCAACACGTCGCACATTCCTGGACCCCCAGAGCTGTGGGGACCTGCTGCAGGCTGTGCAT
CTGTTCGCCAAGGAACTGGATGCGAAAAGCGTCACGCTGGAGAGGAGCCTTGGAGGAGGCAAGCTGGG
CGGGCGGTTTGGGGAGCTGTGCTGTGGCTGCTTGCAGCTCCCCGGTCGCCAGGAGCTGCTCGTAGCCG
TGCACATGCTGAGGGACAGCGCCTCCGACTCACAGAGGCTCGGCTTCCTGGCCGAGGCCCTCACGCTG
GGCCAGTTTGACCATAGCCACATCGTGCGGCTGGAGGGCGTTGTTACCCGAGGTAGGGGAAGCACCTT
GATGATTGTCACCGAGTACATGAGCCATGGGGCCCTGGACGGCTTCCTCAGGCAGCGGCACGAGGGGC
AGCTGGTGGCTGGGCAACTGATGGGGTTGCTGCCTGGGCTGGCATCAGCCATGAAGTATCTGTCAGAG
ATGGGCTACGTTCACCGGGGCCTGGCAGCTCGCCATGTGCTGGTCAGCAGCGACCTTGTCTGCAAGAT
CTCTGGCTTCGGGCGGGGCCCCCGGGACCGATCAGAGGCTGTCTACACCACTATGGTGAGGCTACAGA
GTGGCCGGAGCCCAGCGCTATGGGCCGCTCCCGAGACACTTCAGTTTGGCCACTTCAGCTCTGCCAGT
GACGTGTGGAGCTTCGGCATCATCATGTGGGAGGTGATGGCCTTTGGGGAGCGGCCTTACTGGGACAT
GTCTGGCCAAGACGTGGTGATCAAGGCTGTGGAGGATGGCTTCCGGCTGCCACCCCCCAGGAACTGTC
CTAACCTTCTGCACCGACTAATGCTCGACTGCTGGCAGAAGGACCCAGGTGAGCGGCCCAGGTTCTCC
CAGATCCACAGCATCCTGAGCAAGATGGTGCAGGACCCAGAGCCCCCCAAGTGTGCCCTGACTACCTG
TCCCAGGCCTCTGACCCGCAGGCCTCCCACTCCACTAGCCGACCGTGCCTTCTCCACCTTCCCCTCCT
TTGGCTCTGTGGGCGCGTGGCTGGAGGCCCTGGACCTGTGCCGCTACAAGGACAGCTTCGCGGCTGCT
GGCTATGGGAGCCTGGAGGCCGTGGCCGAGATGACTAGCCAGGACCTGGTGAGCCTAGGCATCTCTTT
GGCTGAACATCGAGAGGCCCTCCTCAGCGGGATCAGCGCCCTGCAGGCACGAGTGCTCCAGCTGCAGG
GCCAGGGGGTGCAGGTGTGAGTGGACCCCATTCTTCCAAGGCAGGACTCCGGTGGGG

| | | | |
|---|---|---|---|
| NOV79a, CG95175-01 | SEQ ID NO: 1120 | 1019 aa | MW at 110412.5kD |
| Protein Sequence | | | |

MGACHHAWLIFVFLVEMGFHHVGQACLPLSLVILLDSKASQAELGWTALPSNGWEEISGVDEHDRPIR
TYQVCNVLEPNQDNWLQTGWISRGRGQRIFVELQFTLRDCSSIPGAAGTCKETFNVYYLETEADLGRG
RPRLGGKIDTIAADESFTQGDLGERKMKLNTEVREIGPLSRRGFHLAFQDVGACVALVSVRVYYKQCR
ATVRGLATFPATAAESAFSTLVEVAGTCVAHSEGEPGSPPRMHCGADGEWLVPVGRCSCSAGFQERGD
FCEGICPPGFYKVSPRRPLCSPCPEHSRALENASTFCVCQDSYARSPTDPPSASCTRPPSAPRDLQYS
LSRSPLVLRLRWLPPADSGGRSDVTYSLLCLRCGREGPAGACEGPRVAFLPRQAGLRERAATLLHLRP
GARYTVRVAALNGVSGPAAAAGTTYAQVTVSTGPGGKAVRAPHPEATAPAAPAPSWGRPVGPAGSAPW
EEDEIRRDRVEPQSVSLSWREPIPAGAPGANDTEYEIRYYEKVSAQSEQTYSMVKTGAPTVTVIFLPA
ASGSRDQSPAIVVTVVTISALLVLGSVMSVLAIWRRRPCSYGKGGGDAHDEEELYFHCELAGKVPTRR
TFLDPQSCGDLLQAVHLFAKELDAKSVTLERSLGGGKLGGRFGELCCGCLQLPGRQELLVAVHMLRDS
ASDSQRLGFLABALTLGQFDHSHIVRLEGVVTRGRGSTLMIVTEYMSHGALDGFLRQRHEGQLVAGQL
MGLLPGLASAMKYLSEMGYVHRGLAARHVLVSSDLVCKISGFGRGPRDRSEAVYTTMVRLQSGRSPAL
WAAPETLQFGHFSSASDVWSFGIIMWEVMAFGERPYWDMSGQDVVIKAVEDGFRLPPPRNCPMLLHRL
MLDCWQKDPGERPRFSQIHSILSKMVODPEPPKCALTTCPRPLTRRPPTPLADRAFSTFPSFGSVGAW
LEALDLCRYKDSFAAAGYGSLEAVAEMTSQDLVSLGISLAEHREALLSGISALQARVLQLQGQGVQV

| | | |
|---|---|---|
| NOV79b, 275697118 | SEQ ID NO: 1121 | 547 bp |
| DNA Sequence | ORF Start: at 2 | ORF Stop: |
| | | end of sequence |

CACCGGATCCGTTATCCTCCTGGATTCCAAAGCCTCCCAGGCCGAGCTGGGCTGGACTGCACTGCCAA
GTAATGGGTGGGAGGAGATCAGCGGCGTGGATGAACACGACCGTCCCATCCGCACGTACCAAGTGTGC
AATGTGCTGGAGCCCAACCAGGACAACTGGCTGCAGACTGGCTGGATAAGCCGTGGCCGCGGGCAGCG
CATCTTCGTGGAACTGCAGTTCACACTCCGTGACTGCAGCAGCATCCCTGGCGCCGCGGGTACCTGCA
AGGAGACCTTCAACGTCTACTACCTGGAAACTGAGGCCGACCTGGGCCGTGGGCGTCCCCGCCTAGGC
GGCAGCCGGCCCCGCAAAATCGACACGATCGCGGCGGACGAGAGCTTCACGCAGGGCGACCTGGGTGA
GCGCAAGATGAAGCTGAACACAGAGGTGCGCGAGATCGGACCGCTCAGCCGGCGGGGTTTCCACCTGG
CCTTTCAGGACGTGGGCGCATGCGTGGCGCTTGTCTCGGTGCGCGTCTACTACAAGCAGTGCGTCGAC
GGC

| | | | |
|---|---|---|---|
| NOV79b, 275697118 | SEQ ID NO: 1122 | 182 aa | MW at 20253.6kD |
| Protein Sequence | | | |

TGSVILLDSKASQAELGWTALPSNGWEEISGVDEHDRPIRTYQVCNVLEPNQDNWLQTGWISRGRGQR
IFVELQFTLRDCSSIPGAAGTCKETFNVYYLETEADLGRGRPRLGGSRPRKIDTIAADESFTQGDLGE
RKMKLNTEVREIGPLSRRGFHLAFQDVGACVALVSVRVYYKQCVDG

| | | |
|---|---|---|
| NOV79c, 275697150 | SEQ ID NO: 1123 | 694 bp |
| DNA Sequence | ORF Start: at 2 | ORF Stop: |
| | | end of sequence |

CACCGGATCCCTCGTAGCCGTGCACATGCTGAGGGACAGCGCCTCCGACTCACAGAGGCTCGGCTTCC
TGGCCGAGGCCCTCACGCTGGGCCAGTTTGACCATAGCCACATCGTGCGGCTGGAGGGCGTTGTTACC
CGAGGAAGCACCTTGATGATTGTCACCGAGTACATGAGCCATGGGGCCCTGGACGGCTTCCTCAGGCG
GCACGAGGGGCAGCTGGTGGCTGGGCAACTGATGGGGTTGCTGCCTGGGCTGGCATCAGCCATGAAGT
ATCTGTCAGAGATGGGCTACGTTCACCGGGGCCTGGCAGCTCGCCATGTGCTGGTCAGCAGCGACCTT
GTCTGCAAGATCTCTGGCTTCGGGCGGGGCCCCCGGGACCGATCAGAGGCTGTCTACACCACTATGAG
TGGCCGGAGCCCAGCGCTATGGGCCGCTCCCGAGACACTTCAGTTTGGCCACTTCAGCTCTGCCAGTG
ACGTGTGGAGCTTCGGCATCATCATGTGGGAGGTGATGGCCTTTGGGGAGCGGCCTTACTGGGACATG
TCTGGCCAAGACGTGATCAAGGCTGTGGAGGATGGCTTCCGGCTGCCACCCCCCAGGAACTGTCCTAA
CCTTCTGCACCGACTAATGCTCGACTGCTGGCAGAAGGACCCAGGTGAGCGGCCCAGGTTCTCCCAGA
TCCACGTCGACGGC

| | | | |
|---|---|---|---|
| NOV79c, 275697150 | SEQ ID NO: 1124 | 231 aa | MW at25557.0kD |
| Protein Sequence | | | |

TGSLVAVHNLRDSASDSQRLGFLAEALTLGQFDHSHIVRLEGVVTRGSTLMIVTEYMSHGALDGFLRR
HEGQLVAGQLMGLLPGLASAMKYLSEMGYVHRGLAARHVLVSSDLVCKISGFGRGPRDRSEAVYTTMS
GRSPALWAAPETLQFGHFSSASDVWSFGIIMWEVMAFGERPYWDMSGQDVIKAVEDGFRLPPPRNCPN
LLHRLMLDCWQKDPGERPRFSQIHVDG

[0811] A ClustalW comparison of the above protein sequences yields the following sequence alignment shown in Table 79B.

TABLE 79B
Comparison of the NOV79 protein sequences.

| | |
|---|---|
| NOV79a | MGACHHAWLIFVFLVEMGFHHVGQACLPLSLVILLDSKASQAELGWTALPSNGWEEISGV |
| NOV79b | ----------------------------TSGVILLDSKASQAELGWTALPSNGWEEISGV |
| NOV79c | ------------------------------------------------------------ |
| NOV79a | DEHDRPIRTYQVCNVLEPNQDNWLQTGWISRGRGQRIFVELQFTLRDCSSIPGAAGTCKE |
| NOV79b | DEHDRPIRTYQVCNVLEPNQDNWLQTGWISRGRGQRIFVELQFTLRDCSSIPGAAGTCKE |
| NOV79c | ------------------------------------------------------------ |
| NOV79a | TFNVYYLETEADLGRGRPRLGG----KIDTIAADESFTQGDLGERKMKLNTEVREIGPLS |
| NOV79b | TFNVYYLETEADLGRGRPRLGGSRPRKIDTIAADESFTQGDLGERKMKLNTEVREIGPLS |
| NOV79c | ------------------------------------------------------------ |
| NOV79a | RRGFHLAFQDVGACVALVSVRVYYKQCRATVRGLATFPATAAESAFSTLVEVAGTCVAHS |
| NOV79b | RRGFHLAFQDVGACVALVSVRVYYKQCVDG------------------------------ |
| NOV79c | ------------------------------------------------------------ |
| NOV79a | EGEPGSPPRMHCGADGEWLVPVGRCSCSAGFQERGDFCEGICPPGFYKVSPRRPLCSPCP |
| NOV79b | ------------------------------------------------------------ |
| NOV79c | ------------------------------------------------------------ |
| NOV79a | EHSRALENASTFCVCQDSYARSPTDPPSASCTRPPSAPRDLQYSLSRSPLVLRLRWLPPA |
| NOV79b | ------------------------------------------------------------ |
| NOV79c | ------------------------------------------------------------ |
| NOV79a | DSGGRSDVTYSLLCLRCGREGPAGACEGPRVAFLPRQAGLRERAATLLHLRPGARYTVRV |
| NOV79b | ------------------------------------------------------------ |
| NOV79c | ------------------------------------------------------------ |
| NOV79a | AALNGVSGPAAAAGTTYAQVTVSTGPGGKAVRAPHPEATAPAAPAPSWGRPVGPAGSAPW |
| NOV79b | ------------------------------------------------------------ |
| NOV79c | ------------------------------------------------------------ |
| NOV79a | EEDEIRRDRVEPQSVSLSWREPIPAGAPGANDTEYEIRYYEKVSAQSEQTYSMVKTGAPT |
| NOV79b | ------------------------------------------------------------ |
| NOV79c | ------------------------------------------------------------ |
| NOV79a | VTVIFLPAASGSRDQSPAIVVTVVTISALLVLGSVMSVLAIWRRRPCSYGKGGGDAHDEE |
| NOV79b | ------------------------------------------------------------ |
| NOV79c | ------------------------------------------------------------ |
| NOV79a | ELYFHCELAGKVPTRRTFLDPQSCGDLLQAVHLFAKELDAKSVTLERSLGGGKLGGRFGE |
| NOV79b | ------------------------------------------------------------ |
| NOV79c | ------------------------------------------------------------ |
| NOV79a | LCCGCLQLPGRQELLVAVHMLRDSASDSQRLGFLAEALTLGQFDHSHIVRLEGVVTRGRG |
| NOV79b | ------------------------------------------------------------ |
| NOV79c | -----------TGSLVAVHMLRDSASDSQRLGFLAEALTLGQFDHSHIVRLEGVVTRGRG |
| NOV79a | STLMIVTEYMSHGALDGFLRQRHEGQLVAGQLMGLLPGLASAMKYLSEMGYVHRGLAARH |
| NOV79b | ------------------------------------------------------------ |
| NOV79c | STLMIVTEYMSHGALDGFLRR-HEGQLVAGQLMGLLPGLASAMKYLSEMGYVHRGLAARH |
| NOV79a | VLVSSDLVCKISGFGRGPRDRSEAVYTTMVRLQSGRSPALWAAPETLQFGHFSSASDVWS |
| NOV79b | ------------------------------------------------------------ |
| NOV79c | VLVSSDLVCKISGFGRGPRDRSEAVYTTMS----GRSPALWAAPETLQFGHFSSASDVWS |
| NOV79a | FGIIMWEVMAFGERPYWDMSGQDVVIKAVEDGFRLPPPRNCPNLLHRLMLDCWQKDPGER |
| NOV79b | ------------------------------------------------------------ |
| NOV79c | FGIIMWEVMAFGERPYWDMSGQ-DVIKAVEDGFRLPPPRNCPNLLHRLMLDCWQKDPGER |
| NOV79a | PRFSQIHSILSKMVQDPEPPKCALTTCPRPLTRRPPTPLADRAFSTFPSFGSVAGWLEAL |
| NOV79b | ------------------------------------------------------------ |
| NOV79c | PRFSQIHVDG |
| NOV79a | DLCRYKDSFAAAGYGSLEAVAEMTSQDLVSLGISLAEHREALLSGISALQARVLQLQGQG |
| NOV79b | ------------------------------------------------------------ |
| NOV79c | ------------------------------------------------------------ |
| NOV79a | VQV |
| NOV79b | --- |
| NOV79c | --- |
| NOV79a | (SEQ ID NO: 1120) |
| NOV79b | (SEQ ID NO: 1122) |
| NOV79c | (SEQ ID NO: 1124) |

[0812] Further analysis of the NOV79a protein yielded the following properties shown in Table 79C.

TABLE 79C
Protein Sequence Properties NOV79a

| | |
|---|---|
| SignalP analysis: | Cleavage site between residues 43 and 44 |

PSORT II analysis:

| | |
|---|---|
| PSG: | a new signal peptide prediction method |
| | N-region: length 0; pos.chg 0; neg.chg 0 |
| | H-region: length 15; peak value 12.14 |
| | PSG score: 7.74 |
| GvH: | von Heijne's method for signal seq. recognition |
| | GvH score (threshold: −2.1): −2.44 |
| | possible cleavage site: between 41 and 42 |

>>> Seems to have no N-terminal signal peptide

| ALOM: | Klein et al's method for TM region allocation | |
|---|---|---|
| | Init position for calculation: 1 | |
| | Tentative number of TMS(s) for the threshold 0.5: 3 | |
| | Number of TMS(s) for threshold 0.5: 1 | |
| | INTEGRAL | Likelihood = −9.08 Transmembrane 555-571 |
| | PERIPHERAL | Likelihood = 0.85 (at 743) |

| | ALOM score: −9.08 (number of TMSs: 1) |
|---|---|
| MTOP: | Prediction of membrane topology (Hartmann et al.) |
| | Center position for calculation: 562 |
| | Charge difference: 3.5 C(3.5) − N(0.0) |
| | C > N: C-terminal side will be inside |

>>>Caution: Inconsistent mtop result with signal peptide
>>>membrane topology: type 1b (cytoplasmic tail 555 to 1019)
MITDISC: discrimination of mitochondrial targeting seq

| | | | |
|---|---|---|---|
| R content: | 0 | Hyd Moment(75): | 3.60 |
| Hyd Moment(95): | 3.84 | G content: | 1 |
| D/E content: | 1 | S/T content: | 0 |

Score: −6.09

Gavel: prediction of cleavage sites for mitochondrial preseq

cleavage site motif not found

NUCDISC: discrimination of nuclear localization signals

pat4: RRRP (4) at 579
pat7: none
bipartite: none
content of basic residues: 10.1%
NLS Score: −0.22

KDEL: ER retention motif in the C-terminus: none
ER Membrane Retention Signals: none
SKL: peroxisomal targeting signal in the C-terminus: none
PTS2: 2nd peroxisomal targeting signal: none
VAC: possible vacuolar targeting motif: none
RNA-binding motif: none
Actinin-type actin-binding motif:

type 1: none
type 2: none

NMYR: N-myristoylation pattern: none
Prenylation motif: none
memYQRL: transport motif from cell surface to Golgi: none
Tyrosines in the tail: too long tail
Dileucine motif in the tail: found

LL at 565
LL at 623
LL at 670
LL at 751
LL at 880
LL at 998

checking 63 PROSITE DNA binding motifs:

Leucine zipper pattern (PS00029): *** found ***

LGGRFGELCCGCLQLPGRQELL at 650
LVSLGISLAEHREALLSGISAL at 984

none
checking 71 PROSITE ribosomal protein motifs: none
checking 33 PROSITE prokaryotic DNA binding motifs: none
NNCN: Reinhardt's method for Cytoplasmic/Nuclear discrimination

Prediction: cytoplasmic
Reliability: 89

COIL: Lupas's algorithm to detect coiled-coil regions

total: 0 residues

Final Results (k = 9/23):

```
34.8%: nuclear
21.7%: mitochondrial
21.7%: cytoplasmic
  8.7%: vesicles of secretory system
  4.3%: vacuolar
  4.3%: peroxisomal
  4.3%: endoplasmic reticulum
```

>> prediction for CG95175-01 is nuc (k = 23)

[0813] A search of the NOV79a protein against the Geneseq database, a proprietary database that contains sequences published in patents and patent publication, yielded several homologous proteins shown in Table 79D.

TABLE 79D
Geneseq Results for NOV79a

| | | NOV79a | Identities/ | |
|---|---|---|---|---|
| | | Residues/ | Similarities for | |
| Geneseq | Protein/Organism/Length | Match | the Matched | Expect |
| Identifier | [Patent #, Date] | Residues | Region | Value |
| AAM47209 | Human NOV3 protein - Homo | 7 . . . 1019 | 933/1054 (88%) | 0.0 |
| | sapiens, 1000 aa. | 9 . . . 1000 | 936/1054 (88%) | |
| | [WO200174851-A2, 11-OCT- | | | |
| | 2001] | | | |
| AAU76874 | Human EphA full length kinase - | 33 . . . 1019 | 925/1027 (90%) | 0.0 |
| | Homo sapiens, 974 aa. | 1 . . . 974 | 926/1027 (90%) | |
| | [WO200208253-A2, 31-JAN- | | | |
| | 2002] | | | |
| ABB98843 | Human NEPHA - Homo | 24 . . . 1019 | 931/1046 (89%) | 0.0 |
| | sapiens, 1008 aa. | 18 . . . 1008 | 932/1046 (89%) | |
| | [WO200283735-A1, 24-OCT- | | | |
| | 2002] | | | |
| AAE19158 | Human kinase polypeptide | 24 . . . 1019 | 913/1048 (87%) | 0.0 |
| | (PKIN-16) - Homo sapiens, | 18 . . . 1009 | 916/1048 (87%) | |
| | 1009 aa. [WO200208399-A2, | | | |
| | 31-JAN-2002] | | | |
| AAU03553 | Human protein kinase #53 - | 24 . . . 1019 | 913/1048 (87%) | 0.0 |
| | Homo sapiens, 1009 aa. | 18 . . . 1009 | 916/1048 (87%) | |
| | [WO200138503-A2, 31-MAY- | | | |
| | 2001] | | | |

[0814] In a BLAST search of public sequence databases, the NOV79a protein was found to have homology to the proteins shown in the BLASTP data in Table 79E.

TABLE 79E
Public BLASTP Results for NOV79a

| | | NOV79a | Identities/ | |
|---|---|---|---|---|
| Protein | | Residues/ | Similarities for | |
| Accession | | Match | the Matched | Expect |
| Number | Protein/Organism/Length | Residues | Portion | Value |
| CAD13085 | Sequence 5 from Patent | 7 . . . 1019 | 933/1054 (88%) | 0.0 |
| | WO0174851 - Homo sapiens | 9 . . . 1000 | 936/1054 (88%) | |
| | (Human), 1000 aa. | | | |
| CAD23752 | Sequence 1 from Patent | 33 . . . 1019 | 925/1027 (90%) | 0.0 |
| | WO0208253 - Homo sapiens | 1 . . . 974 | 926/1027 (90%) | |
| | (Human), 974 aa (fragment). | | | |
| CAD23753 | Sequence 3 from Patent | 33 . . . 1019 | 930/1071 (86%) | 0.0 |
| | WO0208253 - Homo sapiens | 1 . . . 1022 | 931/1071 (86%) | |
| | (Human), 1022 aa (fragment). | | | |
| CAD23754 | Sequence 5 from Patent | 33 . . . 653 | 575/661 (86%) | 0.0 |
| | WO0208253 - Homo sapiens | 1 . . . 623 | 576/661 (86%) | |
| | (Human), 647 aa (fragment). | | | |
| CAD23755 | Sequence 7 from Patent | 33 . . . 653 | 580/705 (82%) | 0.0 |
| | WO0208253 - Homo sapiens | 1 . . . 671 | 581/705 (82%) | |
| | (Human), 695 aa (fragment). | | | |

[0815] PFam analysis indicates that the NOV79a protein contains the domains shown in the Table 79F.

TABLE 79F
Domain Analysis of NOV79a

| | | Identities/ | |
|---|---|---|---|
| | NOV79a Match | Similarities for | |
| Pfam Domain | Region | the Matched Region | Expect Value |
| EPH_lbd | 32 . . . 203 | 115/177 (65%) | 2.6e−119 |
| | | 156/177 (88%) | |
| fn3 | 331 . . . 426 | 25/98 (26%) | 2e−06 |
| | | 66/98 (67%) | |
| pkinase | 639 . . . 906 | 78/309 (25%) | 1.7e−37 |
| | | 186/309 (60%) | |
| SAM | 942 . . . 1006 | 27/68 (40%) | 2.9e−15 |
| | | 50/68 (74%) | |

### Example 80

[0816] The NOV80 clone was analyzed, and the nucleotide and encoded polypeptide sequences are shown in Table 80A.

TABLE 80A
NOV80 Sequence Analysis

| | | |
|---|---|---|
| NOV80a, CG99638-01 | SEQ ID NO: 1125 | 2131 bp |
| DNA Sequence | ORF Start: ATG at 93 | ORF Stop: TGA at 2088 |

CTAAATGAAGAGCGCTTGGGACCTGAACAACCAGCAGCGATACCCAGGTACAAAGGACCTCCAGACCA
GAGCCAGCCAGCAGCAAAAAGAGCATGGAGCTGAGGAGTACAGCAGCCCCCAGAGCTGAGGGCTACAG
CAACGTGGGCTTCCAGAATGAAGAAAACTTTCTTGAGAACGAGAACACATCAGGAAACAACTCAATAA
GAAGCAGAGCTGTGCAAAGCAGGGAGCACACAAACACCAAACAGGATGAAGAACAGGTCACAGTTGAG
CAGGATTCTCCAAGAAACAGAGAACACATGGAGGATGATGATGAGGAGATGCAACAAAAAGGGTGTTT
GGAAAGGAGGTATGACACAGTATGTGGTTTCTGTAGGAAACACAAAACAACTCTTCGGCACATCATCT
GGGGCATTTTATTAGCAGGTTATCTGGTTATGGTGATTTCGGCCTGTGTGCTGAACTTTCACAGAGCC
CTTCCTCTTTTTGTGATCACCGTGGCTGCCATCTTCTTTGTTGTCTGGGATCACCTGATGGCCAAATA
CGAACATCGAATTGATGAGATGCTGTCTCCTGGCAGAAGGCTTCTAAACAGCCATTGGTTCTGGCTGA
AGTGGGTGATCTGGAGCTCCCTGGTCCTAGCAGTTATTTTCTGGTTGGCCTTTGACACTGCCAAATTG
GGTCAACAGCAGCTGGTGTCCTTCGGTGGGCTCATAATGTACATTGTCCTGTTATTTCTATTTTCCAA
GTACCCAACCAGAGTTTACTGGAGACCTGTCTTATGGGGAATCGGGCTACAGTTTCTTCTTGGGCTCT
TGATTCTAAGGACTGACCCTGGATTTATAGCTTTTGATTGGTTGGGCAGACTAGTTCAGGTCCTGCCG
ATCGTGGTTTTCTTCAGCACTGTGATGTCCATGCTGTACTACCCTGGACTGATGCAGTGGATTATTAG
AAAGGTTGGATGGATCATGCTAGTTACTACGGGATCATCTCCTATTGAATCTGTAGTTGCTTCTGGGC
ATATATTTGTTGGACAAACGGAGTCTCCACTGCTGGTCCGACCATATTTACCTTACATCACCAAGTCT
GAACTCCACGCCATCATGACCGCCGGGTTCTCTACCATTGCTAGGTGCGTGCTAGGTGCATACATTTC
TTTTGGGGTTCCATCCTCCCACTTGTTAACAGCGTCAGTTATGTCAGCACCTGCGTCATTGGCTGCTG
CTAAACTCTTTTGGCCTGAGACAGAAAAACCTAAAATAACCCTCAAGAATGCCATGAAAATGGAAAGT
GGTGATTCAGGGAATCTTCTAGAAGCTGCAACACAGGGAGCATCCTCCTCCATCTCCCTGGTGGCCAA
CATCGCTGTGAATCTGATTGCCTTCCTGGCCCTGCTGTCTTTTATGAATTCAGCCCTGTCCTGGTTTG
GAAACATGTTTGACTACCCACAGCTGAGTTTTGAGCTAATCTGCTCCTACATCTTCATGCCCTTTTCC
TTCATGATGGGAGTGGAATGGCAGGACAGCTTTATGGTTGCCAGACTCATAGGTTATAAGACCTTCTT
CAATGAATTTGTGGCTTATGAGCACCTCTCAAAATGGATCCACTTGAGGAAAGAAGGTGGACCCAAAT
TTGTAAACGGTGTGCAGCAATATATATCAATTCGTTCTGAGATAATCGCCACTTACGCTCTCTGTGGT
TTTGCCAATATCGGGTCCCTAGGAATCGTGATCGGCGGACTCACATCCATGGCTCCTTCCAGAAAGCG
TGATATCGCCTCGGGGGCAGTGAGAGCTCTGATTGCGGGGACCGTGGCCTGCTTCATGACAGCCTGCA
TCGCAGGCATACTCTCCAGCACTCCTGTGGACATCAACTGCCATCACGTTTTAGAGAATGCCTTCAAC
TCCACTTTCCCTGGAAACACAACCAAGGTGATAGCTTGTTGCCAAAGTCTGTTGAGCAGCACTGTTGC
CAAGGGTCCTGGTGAAGTCATCCCAGGAGGAAACCACAGTCTGTATTCTTTGAAGGGCTGCTGCACAT
TGTTGAATCCATCGACCTTTAACTGCAATGGGATCTCTAATACATTTTGAGGTCAGCCACTTCTCCAG
TGGAACTCTGAAGTACAGATGCT

| | | | |
|---|---|---|---|
| NOV80a, CG99638-01 | SEQ ID NO: 1126 | 665 aa | MW at 73873.1kD |
| Protein Sequence | | | |

MELRSTAAPRABGYSNVGFQNEENFLENBNTSGNNSIRSRAVQSREHTNTKQDEEQVTVEQDSPRNRE
HMEDDDEEMQQKGCLERRYDTVCGFCRKHKTTLRHIIWGILLAGYLVMVISACVLNFHRALPLFVITV
AAIFFVVWDHLMAKYEHRIDEMLSPGRRLLNSHWFWLKWVIWSSLVLAVIFWLAFDTAKLGQQQLVSF
GGLIMYIVLLFLFSKYPTRVYWRPVLWGIGLQFLLGLLILRTDPGFIAFDWLGRLVQVLPIVVFFSTV
MSMLYYPGLMQWIIRKVGWIMLVTTGSSPIESVVASGHIFVGQTESPLLVRPYLPYITKSELHAIMTA
GFSTIAGSVLGAYISFGVPSSHLLTASVMSAPASLAAAKLFWPETEKPKITLKNAMKMESGDSGNLLE
AATQGASSSISLVANIAVNLIAFLALLSFMNSALSWFGNNFDYPQLSFELICSYIFMPFSFMMGVEWQ
DSFMVARLIGYKTFFNEFVAYEHLSKWIHLRKEGGPKFVNGVQQYISIRSEIIATYALCGFANIGSLG
IVIGGLTSMAPSRKRDIASGAVRALIAGTVACFMTACIAGILSSTPVDINCHHVLENAFNSTFPGNTT
KVIACCQSLLSSTVAKGPGEVIPGGNHSLYSLKGCCTLLNPSTFNCNGISNTF

[0817] Further analysis of the NOV80a protein yielded the following properties shown in Table 80B.

TABLE 80B
Protein Sequence Properties NOV80a

| | |
|---|---|
| SignalP analysis: | No Known Signal Sequence Indicated |

PSORT II analysis:

| | |
|---|---|
| PSG: | a new signal peptide prediction method |
| | N-region: length 10; pos.chg 2; neg.chg 1 |
| | H-region: length 1; peak value −3.60 |
| | PSG score: −8.00 |
| GvH: | von Heijne's method for signal seq. recognition |
| | GvH score (threshold: −2.1): −9.75 |
| | possible cleavage site: between 13 and 14 |

>>> Seems to have no N-terminal signal peptide

| ALOM: | Klein et al's method for TM region allocation | | |
|---|---|---|---|
| | Init position for calculation: 1 | | |
| | Tentative number of TMS(s) for the threshold 0.5: 9 | | |
| | INTEGRAL | Likelihood = −7.96 | Transmembrane 107-123 |
| | INTEGRAL | Likelihood = −9.08 | Transmembrane 128-144 |
| | INTEGRAL | Likelihood = −5.84 | Transmembrane 175-191 |
| | INTEGRAL | Likelihood = −8.97 | Transmembrane 201-217 |
| | INTEGRAL | Likelihood = −4.51 | Transmembrane 228-244 |
| | INTEGRAL | Likelihood = −4.35 | Transmembrane 259-275 |
| | INTEGRAL | Likelihood = −6.58 | Transmembrane 418-434 |
| | INTEGRAL | Likelihood = −1.59 | Transmembrane 534-550 |
| | INTEGRAL | Likelihood = −4.94 | Transmembrane 569-585 |

| | |
|---|---|
| PERIPHERAL | Likelihood = 0.85 (at 454) |
| ALOM score: | −9.08 (number of TMSs: 9) |

| | |
|---|---|
| MTOP: | Prediction of membrane topology (Hartmann et al.) |
| | Center position for calculation: 114 |
| | Charge difference: −3.5 C(1.5) − N(5.0) |
| | N >= C: N-terminal side will be inside |

>>> membrane topology: type 3a
MITDISC: discrimination of mitochondrial targeting seq

| | | | |
|---|---|---|---|
| R content: | 2 | Hyd Moment(75): | 4.42 |
| Hyd Moment(95): | 1.72 | G content: | 0 |
| D/E content: | 2 | S/T content: | 2 |

Score: −5.36

Gavel: prediction of cleavage sites for mitochondrial preseq

cleavage site motif not found

NUCDISC: discrimination of nuclear localization signals

pat4: RKHK (3) at 95
pat7: PSRKRDI (5) at 555
bipartite: none
content of basic residues: 7.5%
NLS Score: 0.15

KDEL: ER retention motif in the C-terminus: none
ER Membrane Retention Signals:

XXRR-like motif in the N-terminus: ELRS

none
SKL: peroxisomal targeting signal in the C-terminus: none
PTS2: 2nd peroxisomal targeting signal: none
VAC: possible vacuolar targeting motif: none
RNA-binding motif: none
Actinin-type actin-binding motif:

type 1: none
type 2: none

NMYR: N-myristoylation pattern: none
Prenylation motif: none
memYQRL: transport motif from cell surface to Golgi: none
Tyrosines in the tail: none
Dileucine motif in the tail: none
checking 63 PROSITE DNA binding motifs: none
checking 71 PROSITE ribosomal protein motifs: none
checking 33 PROSITE prokaryotic DNA binding motifs: none

| | |
|---|---|
| NNCN: | Reinhardt's method for Cytoplasmic/Nuclear discrimination |
| | Prediction: cytoplasmic |
| | Reliability: 94.1 |

COIL: Lupas's algorithm to detect coiled-coil regions

total: 0 residues

Final Results (k = 9/23):

77.8%: endoplasmic reticulum
11.1%: vesicles of secretory system
11.1%: nuclear

>> prediction for CG99638-01 is end (k = 9)

[0818] A search of the NOV80a protein against the Geneseq database, a proprietary database that contains sequences published in patents and patent publication, yielded several homologous proteins shown in Table 80C.

TABLE 80C
Geneseq Results for NOV80a

| | | NOV80a | Identities/ | |
|---|---|---|---|---|
| | | Residues/ | Similarities for | |
| Geneseq | Protein/Organism/Length | Match | the Matched | Expect |
| Identifier | [Patent #, Date] | Residues | Region | Value |
| AAE21150 | Human 52991 protein - Homo | 1 . . . 665 | 661/665 (99%) | 0.0 |
| | sapiens, 665 aa. [WO200218439- | 1 . . . 665 | 662/665 (99%) | |
| | A2, 07-MAR-2002] | | | |
| ABP69062 | Human polypeptide SEQ ID NO | 1 . . . 665 | 662/691 (95%) | 0.0 |
| | 1109 - Homo sapiens, 691 aa. | 1 . . . 691 | 663/691 (95%) | |
| | [WO200270539-A2, 12-SEP- | | | |
| | 2002] | | | |
| AAE22915 | Human transporter and ion | 1 . . . 665 | 661/691 (95%) | 0.0 |
| | channel (TRICH) 14 - Homo | 1 . . . 691 | 662/691 (95%) | |
| | sapiens, 691 aa. [WO200222684- | | | |
| | A2, 21-MAR-2002] | | | |
| AAW49106 | Rat jejunal concentrative | 93 . . . 652 | 261/588 (44%) | e−139 |
| | nucleoside transporter 1 (CNT1) - | 74 . . . 643 | 372/588 (62%) | |
| | Rattus sp, 648 aa. [WO9835990- | | | |
| | A1, 20-AUG-1998] | | | |
| AAW70260 | Human concentrative nucleoside | 93 . . . 652 | 261/589 (44%) | e−138 |
| | transporter 1 hCNT1c - Homo | 74 . . . 643 | 369/589 (62%) | |
| | sapiens, 649 aa. [WO9835990- | | | |
| | A1, 20-AUG-1998] | | | |

[0819] In a BLAST search of public sequence databases, the NOV80a protein was found to have homology to the proteins shown in the BLASTP data in Table 80D.

TABLE 80D
Public BLASTP Results for NOV80a

| | | NOV80a | Identities/ | |
|---|---|---|---|---|
| Protein | | Residues/ | Similarities for | |
| Accession | | Match | the Matched | Expect |
| Number | Protein/Organism/Length | Residues | Portion | Value |
| CAD42381 | Sequence 1 from Patent | 1 . . . 665 | 661/665 (99%) | 0.0 |
| | WO0218439 - Homo sapiens | 1 . . . 665 | 662/665 (99%) | |
| | (Human), 665 aa. | | | |
| Q9HAS3 | Concentrative Na+-nucleoside | 1 . . . 665 | 662/691 (95%) | 0.0 |
| | cotransporter hCNT3 - Homo | 1 . . . 691 | 663/691 (95%) | |
| | sapiens (Human), 691 aa. | | | |
| Q9ERH8 | Concentrative Na+-nucleoside | 1 . . . 663 | 514/689 (74%) | 0.0 |
| | cotransporter mCNT3 - Mus | 19 . . . 701 | 584/689 (84%) | |
| | musculus (Mouse), 703 aa. | | | |
| Q8BWE2 | Solute carrier family 28 - Mus | 1 . . . 663 | 513/689 (74%) | 0.0 |
| | musculus (Mouse), 703 aa. | 19 . . . 701 | 583/689 (84%) | |
| Q91VD7 | Solute carrier family 28 (Sodium- | 1 . . . 663 | 511/689 (74%) | 0.0 |
| | coupled nucleoside transporter), | 19 . . . 701 | 584/689 (84%) | |
| | member 3 (Concentrative Na+- | | | |
| | nucleoside cotransporter) - Mus | | | |
| | musculus (Mouse), 703 aa. | | | |

[0820] PFam analysis indicates that the NOV80a protein contains the domains shown in the Table 80E.

TABLE 80E
Domain Analysis of NOV80a

| | | Identities/ | |
|---|---|---|---|
| | NOV80a | Similarities for | |
| Pfam Domain | Match Region | the Matched Region | Expect Value |
| NrfD | 97 . . . 357 | 67/387 (17%) | 0.23 |
| | | 179/387 (46%) | |
| Nucleoside_tra2 | 198 . . . 587 | 175/427 (41%) | 1.1e−157 |
| | | 312/427 (73%) | |

### Example 81

[0821] The NOV81 clone was analyzed, and the nucleotide and encoded polypeptide sequences are shown in Table 81A.

TABLE 81A
NOV81 Sequence Analysis

| | | |
|---|---|---|
| NOV81a, CG99650-01 | SEQ ID NO: 1127 | 1258 bp |
| DNA Sequence | ORF Start: ATG at 83 | ORF Stop: TGA at 1160 |

TGTTACCTGGAGACCCTCTGAGCTCTCACCTGCTACTTCIGCCGCTGCTTCTGCACAGAGCCCGGGCG
AGGACCCCTCCAGGATGCAGGTCCCGAACAGCACCGGCCCGGACAACGCGACGCTGCAGATGCTGCGG
AACCCGGCGATCGCGGTGGCCCTGCCCGTGGTGTACTCGCTGGTGGCGGCGGTCAGCATCCCGGGCAA
CCTCTTCTCTCTGTGGGTGCTGTGCCGGCGCATGGGGCCCAGATCCCCGTCGGTCATCTTCATGATCA
ACCTGAGCGTCACGGACCTGATGCTGGCCAGCGTGTTGCCTTTCCAAATCTACTACCATTGCAACCGC
CACCACTGGGTATTCGGGGTGCTGCTTTGCAACGTGGTGACCGTGGCCTTTTACGCAAACATGTATTC
CAGCATCCTCACCATGACCTGTATCAGCGTGGAGCGCTTCCTGGGGGTCCTGTACCCGCTCAGCTCCA
AGCGCTGGCGCCGCCGTCGTTACGCGGTGGCCGCGTGTGCAGGGACCTGGCTGCTGCTCCTGACCGCC
CTGTCCCCGCTGGCGCGCACCGATCTCACCTACCCGGTGCACGCCCTGGGCATCATCACCTGCTTCGA
CGTCCTCAAGTGGACGATGCTCCCCAGCGTGGCCATGTGGGCCGTGTTCCTCTTCACCATCTTCATCC
TGCTGTTCCTCATCCCGTTCGTGATCACCGTGGCTTGTTACACGGCCACCATCCTCAAGCTGTTGCGC
ACGGAGGAGGCGCACGGCCGGGAGCAGCGGAGGCGCGCGGTGGGCCTGGCCGCGGTGGTCTTGCTGGC
CTTTGTCACCTGCTTCGCCCCCAACAACTTCGTGCTCCTGGCGCACATCGTGAGCCGCCTGTTCTACG
GCAAGAGCTACTACCACGTGTACAAAGTCACGCTGTGTCTCAGCTGCCTCAACAACTGTCTGGACCCG
TTTGTTTATTACTTTGCGTCCCGGGAATTCCAGCTGCGCCTGCGGGAATATTTGGGCTGCCGCCGGGT
GCCCAGAGACACCCTGGACACGCGCCGCGAGAGCCTCTTCTCCGCCAGGACCACGTCCGTGCGCTCCG
AGGCCGGTGCGCACCCTGAAGGGATGGAGGGAGCCACCAGGCCCGGCCTCCAGAGGCAGGAGAGTGTG
TTCTGAGTCCCGGGGGCGCAGCTTGGAGAGCCGGGGGCGCAGCTTGGAGATCCAGGGGCGCATGGAGA
GGCCACGGTGCCAGAGGTTCAGGGAGAACAGCTG

| | | | |
|---|---|---|---|
| NOV81a, CG99650-01 | SEQ ID NO: 1128 | 359 aa | MW at 40620.4kD |
| Protein Sequence | | | |

MQVPNSTGPDNATLQMLRNPAIAVALPVVYSLVAAVSIPGNLFSLWVLCRRNGPRSPSVIFMINLSVT
DLMLASVLPFQIYYHCNRHHWVFGVLLCNVVTVAFYANMYSSILTMTCISVERFLGVLYPLSSKRWRR
RRYAVAACAGTWLLLLTALSPLARTDLTYPVHALGIITCFDVLKWTMLPSVAMWAVFLFTIFILLFLI
PFVITVACYTATILKLLRTEEAHGREQRRRAVGLAAVVLLAFVTCFAPNNFVLLAHIVSRLFYGKSYY
HVYKVTLCLSCLNNCLDPFVYYFASREFQLRLREYLGCRRVPRDTLDTRRESLFSARTTSVRSEAGAH
PEGMEGATRPGLQRQESVF

| | | |
|---|---|---|
| NOV81b, SNP13382525 | SEQ ID NO: 1129 | 1258 bp |
| of CG99650-01, | ORF Start: ATG at 83 | ORF Stop: TGA at 1160 |
| DNA Sequence | SNP Pos: 910 | SNP Change: A to G |

TGTTACCTGGAGACCCTCTGAGCTCTCACCTGCTACTTCTGCCGCTGCTTCTGCACAGAGCCCGGGCG
AGGACCCCTCCAGGATGCAGGTCCCGAACAGCACCGGCCCGGACAACGCGACGCTGCAGATGCTGCGG
AACCCGGCGATCGCGGTGGCCCTGCCCGTGGTGTACTCGCTGGTGGCGGCGGTCAGCATCCCGGGCAA
CCTCTTCTCTCTGTGGGTGCTGTGCCGGCGCATGGGGCCCAGATCCCCGTCGGTCATCTTCATGATCA
ACCTGAGCGTCACGGACCTGATGCTGGCCAGCGTGTTGCCTTTCCAAATCTACTACCATTGCAACCGC
CACCACTGGGTATTCGGGGTGCTGCTTTGCAACGTGGTGACCGTGGCCTTTTACGCAAACATGTATTC
CAGCATCCTCACCATGACCTGTATCAGCGTGGAGCGCTTCCTGGGGGTCCTGTACCCGCTCAGCTCCA
AGCGCTGGCGCCGCCGTCGTTACGCGGTGGCCGCGTGTGCAGGGACCTGGCTGCTGCTCCTGACCGCC
CTGTCCCCGCTGGCGCGCACCGATCTCACCTACCCGGTGCACGCCCTGGGCATCATCACCTGCTTCGA
CGTCCTCAAGTGGACGATGCTCCCCAGCGTGGCCATGTGGGCCGTGTTCCTCTTCACCATCTTCATCC
TGCTGTTCCTCATCCCGTTCGTGATCACCGTGGCTTGTTACACGGCCACCATCCTCAAGCTGTTGCGC
ACGGAGGAGGCGCACGGCCGGGAGCAGCGGAGGCGCGCGGTGGGCCTGGCCGCGGTGGTCTTGCTGGC
CTTTGTCACCTGCTTCGCCCCCAACAACTTCGTGCTCCTGGCGCACATCGTGAGCCGCCTGTTCTACG
GCAAGAGCTACTACCACGTGTACAAGGTCACGCTGTGTCTCAGCTGCCTCAACAACTGTCTGGACCCG
TTTGTTTATTACTTTGCGTCCCGGGAATTCCAGCTGCGCCTGCGGGAATATTTGGGCTGCCGCCGGGT
GCCCAGAGACACCCTGGACACGCGCCGCGAGAGCCTCTTCTCCGCCAGGACCACGTCCGTGCGCTCCG
AGGCCGGTGCGCACCCTGAAGGGATGGAGGGAGCCACCAGGCCCGGCCTCCAGAGGCAGGAGAGTGTG
TTCTGAGTCCCGGGGGCGCAGCTTGGAGAGCCGGGGGCGCAGCTTGGAGATCCAGGGGCGCATGGAGA
GGCCACGGTGCCAGAGGTTCAGGGAGAACAGCTG

| | | | |
|---|---|---|---|
| NOV81b, SNP13382525 | SEQ ID NO: 1130 | 359 aa | MW at 40620.4kD |
| of CG99650-01, | SNP Pos: 276 | | SNP Change: Lys to Lys |
| Protein Sequence | | | |

MQVPNSTGPDNATLQMLRNPAIAVALPVVYSLVAAVSIPGNLFSLWVLCRRMGPRSPSVIFMINLSVT
DLMLASVLPFQIYYHCNRHHWVFGVLLCNVVTVAFYANNYSSILTMTCISVERFLGVLYPLSSKRWRR
RRYAVAACAGTWLLLLTALSPLARTDLTYPVHALGIITCFDVLKWTMLPSVAMWAVFLFTIFILLFLI
PFVITVACYTATILKLLRTEEAHGREQRRRAVGLAAVVLLAFVTCFAPNNFVLLAHIVSRLFYGKSYY
HVYKVTLCLSCLNNCLDPFVYYFASREFQLRLREYLGCRRVPRDTLDTRRESLFSARTTSVRSEAGAH
PEGMEGATRPGLQRQESVF

| | | |
|---|---|---|
| NOV81c, SNP13382526 | SEQ ID NO: 1131 | 1258 bp |
| of CG99650-01, | ORF Start: ATG at 83 | ORF Stop: TGA at 1160 |
| DNA Sequence | SNP Pos: 911 | SNP Change: G to C |

TGTTACCTGGAGACCCTCTGAGCTCTCACCTGCTACTTCTGCCGCTGCTTCTGCACAGAGCCCGGGCG
AGGACCCCTCCAGGATGCAGGTCCCGAACAGCACCGGCCCGGACAACGCGACGCTGCAGATGCTGCGG
AACCCGGCGATCGCGGTGGCCCTGCCCGTGGTGTACTCGCTGGTGGCGGCGGTCAGCATCCCGGGCAA
CCTCTTCTCTCTGTGGGTGCTGTGCCGGCGCATGGGGCCCAGATCCCCGTCGGTCATCTTCATGATCA
ACCTGAGCGTCACGGACCTGATGCTGGCCAGCGTGTTGCCTTTCCAAATCTACTACCATTGCAACCGC
CACCACTGGGTATTCGGGGTGCTGCTTTGCAACGTGGTGACCGTGGCCTTTTACGCAAACATGTATTC
CAGCATCCTCACCATGACCTGTATCAGCGTGGAGCGCTTCCTGGGGGTCCTGTACCCGCTCAGCTCCA
AGCGCTGGCGCCGCCGTCGTTACGCGGTGGCCGCGTGTGCAGGGACCTGGCTGCTGCTCCTGACCGCC
CTGTCCCCGCTGGCGCGCACCGATCTCACCTACCCGGTGCACGCCCTGGGCATCATCACCTGCTTCGA
CGTCCTCAAGTGGACGATGCTCCCCAGCGTGGCCATGTGGGCCGTGTTCCTCTTCACCATCTTCATCC
TGCTGTTCCTCATCCCGTTCGTGATCACCGTGGCTTGTTACACGGCCACCATCCTCAAGCTGTTGCGC
ACGGAGGAGGCGCACGGCCGGGAGCAGCGGAGGCGCGCGGTGGGCCTGGCCGCGGTGGTCTTGCTGGC
CTTTGTCACCTGCTTCGCCCCCAACAACTTCGTGCTCCTGGCGCACATCGTGAGCCGCCTGTTCTACG
GCAAGAGCTACTACCACGTGTACAAACTCACGCTGTGTCTCAGCTGCCTCAACAACTGTCTGGACCCG
TTTGTTTATTACTTTGCGTCCCGGGAATTCCAGCTGCGCCTGCGGGAATATTTGGGCTGCCGCCGGGT
GCCCAGAGACACCCTGGACACGCGCCGCGAGAGCCTCTTCTCCGCCAGGACCACGTCCGTGCGCTCCG
AGGCCGGTGCGCACCCTGAAGGGATGGAGGGAGCCACCAGGCCCGGCCTCCAGAGGCAGGAGAGTGTG
TTCTGAGTCCCGGGGGCGCAGCTTGGAGAGCCGGGGGCGCAGCTTGGAGATCCAGGGGCGCATGGAGA
GGCCACGGTGCCAGAGGTTCAGGGAGAACAGCTG

| | | | |
|---|---|---|---|
| NOV81c, SNP13382526 | SEQ ID NO: 1132 | 359 aa | MW at 40634.5kD |
| of CG99650-01, | SNP Pos: 277 | | SNP Change: Val to Leu |
| Protein Sequence | | | |

MQVPNSTGPDNATLQMLRNPAIAVALPVVYSLVAAVSIPGNLFSLWVLCRRNGPRSPSVIFMINLSVT
DLMLASVLPFQIYYHCNRHHWVFGVLLCNVVTVAFYANMYSSILTMTCISVBRFLGVLYPLSSKRWRR
RRYAVAACAGTWLLLLTALSPLARTDLTYPVHALGIITCFDVLKWTMLPSVAMWAVFLFTIFILLFLI
PFVITVACYTATILKLLRTEEAHGREQRRRAVGLAAVVLLAFVTCFAPNNFVLLAHIVSRLFYGKSYY
HVYKLTLCLSCLNNCLDPFVYYFASREFQLRLREYLGCRRVPRDTLDTRRESLFSARTTSVRSEAGAH
PEGMEGATRPGLQRQESVF

[0822] A ClustalW comparison of the above protein sequences yields the following sequence alignment shown in Table 81B.

TABLE 81B
Comparison of the NOV81 protein sequences.

| | |
|---|---|
| NOV79a | MGACHHAWLIFVFLVEMGFHHVGQACLPLSLVILLDSKASQAELGWTALPSNGWEEISGV |
| NOV79b | ----------------------------TGSVILLDSKASQAELGWTALPSNGWEEISGV |
| NOV79c | ------------------------------------------------------------ |
| NOV79a | DEHDRPIRTYQVCNVLEPNQDNWLQTGWISRGRGQRIFVELQFTLRDCSSIPGAAGTCKE |
| NOV79b | DEHDRPIRTYQVCNVLEPNQDNWLQTGWISRGRGQRIFVELQFTLRDCSSIPGAAGTCKE |
| NOV79c | ------------------------------------------------------------ |
| NOV79a | TFNVYYLETEADLGRGRPRLGG----KIDTIAADESFTQGDLGERKMKLNTEVREIGPLS |
| NOV79b | TFNVYYLETEADLGRGRPRLGGSRPRKIDTIAADESFTQGDLGERKMKLNTEVREIGPLS |
| NOV79c | ------------------------------------------------------------ |
| NOV79a | RRGFHLAFQDVGACVALVSVRVYYKQCRATVRGLATFPATAAESAFSTLVEVAGTCVAHS |
| NOV79b | RRGFHLAFQDVGACVALVSVRVYYKQCVDG------------------------------ |
| NOV79c | ------------------------------------------------------------ |
| NOV79a | EGEPGSPPRMHCGADGEWLVPVGRCSCSAGFQERGDFCEGICPPGFYKVSPRRPLCSPCP |
| NOV79b | ------------------------------------------------------------ |
| NOV79c | ------------------------------------------------------------ |
| NOV79a | EHSRALENASTFCVCQDSYARSPTDPPSASCTRPPSAPRDLQYSLSRSPLVLRLRWLPPA |
| NOV79b | ------------------------------------------------------------ |
| NOV79c | ------------------------------------------------------------ |
| NOV79a | DSGGRSDVTYSLLCLRCGREGPAGACEGPRVAFLPRQAGLRERAATLLHLRPGARYTVRV |
| NOV79b | ------------------------------------------------------------ |
| NOV79c | ------------------------------------------------------------ |
| NOV79a | AALNGVSGPAAAAGTTYAQVTVSTGPGGKAVRAPHPEATAPAAPAPSWGRPVGPAGSAPW |
| NOV79b | ------------------------------------------------------------ |
| NOV79c | ------------------------------------------------------------ |
| NOV79a | EEDEIRRDRVEPQSVSLSWREPIPAGAPGANDTEYEIRYYEKVSAQSEQTYSMVKTGAPT |
| NOV79b | ------------------------------------------------------------ |
| NOV79c | ------------------------------------------------------------ |
| NOV79a | VTVIFLPAASGSRDQSPAIVVTVVTISALLVLGSVMSVLAIWRRRPCSYGKGGGDAHDEE |
| NOV79b | ------------------------------------------------------------ |
| NOV79c | ------------------------------------------------------------ |
| NOV79a | ELYFHCELAGKVPTRRTFLDPQSCGDLLQAVHLFAKELDAKSVTLERSLGGGKLGGRFGE |
| NOV79b | ------------------------------------------------------------ |
| NOV79c | ------------------------------------------------------------ |
| NOV79a | LCCGCLQLPGRQELLVAVHMLRDSASDSQRLGFLAEALTLGQFDHSHIVRLEGVVTRGRG |
| NOV79b | ------------------------------------------------------------ |
| NOV79c | -----------TGSLVAVHMLRDSASDSQRLGFLAEALTLGQFDHSHIVRLEGVVTRG-- |
| NOV79a | STLMIVTEYMSHGALDGFLRQRHEGQLVAGQLMGLLPGLASAMKYLSEMGYVHRGLAARH |
| NOV79b | ------------------------------------------------------------ |
| NOV79c | STLMIVTEYMSHGALDGFLRR-HEGQLVAGQLMGLLPGLASAMKYLSEMGYVHRGLAARH |
| NOV79a | VLVSSDLVCKISGFGRGPRDRSEAVYTTMVRLQSGRSPALWAAPETLQFGHFSSASDVWS |
| NOV79b | ------------------------------------------------------------ |
| NOV79c | VLVSSDLVCKISGFGRGPRDRSEAVYTTMS----GRSPALWAAPETLQFGHFSSASDVWS |
| NOV79a | FGIIMWEVMAFGERPYWDMSGQDVVIKAVEDGFRLPPPRNCPNLLHRLMLDCWQKDPGER |
| NOV79b | ------------------------------------------------------------ |
| NOV79c | FGIIMWEVMAFGERPYWDMSGQ-DVIKAVEDGFRLPPPRNCPNLLHRLMLDCWQKDPGER |
| NOV79a | PRFSQIHSILSKMVQDPEPPKCALTTCPRPLTRRPPTPLADRAFSTFPSFGSVGAWLEAL |
| NOV79b | ------------------------------------------------------------ |
| NOV79c | PRFSQIHVDG-------------------------------------------------- |
| NOV79a | DLCRYKDSFAAAGYGSLEAVAEMTSQDLVSLGISLAEHREALLSGISALQARVLQLQGQG |
| NOV79b | ------------------------------------------------------------ |
| NOV79c | ------------------------------------------------------------ |
| NOV79a | VQV |
| NOV79b | --- |
| NOV79c | --- |
| NOV81a | (SEQ ID NO: 1128) |

[0823] Further analysis of the NOV81a protein yielded the following properties shown in Table 81C.

TABLE 81C
Protein Sequence Properties NOV81a

| | |
|---|---|
| SignalP analysis: | Cleavage site between residues 38 and 39 |

PSORT II analysis:

| | |
|---|---|
| PSG: | a new signal peptide prediction method |
| | N-region: length 10; pos.chg 0; neg.chg 1 |
| | H-region: length 7; peak value 0.00 |
| | PSG score: −4.40 |
| GvH: | von Heijne's method for signal seq. recognition |
| | GvH score (threshold: −2.1): −4.98 |
| | possible cleavage site: between 49 and 50 |

>>> Seems to have no N-terminal signal peptide

| ALOM: | Klein et al's method for TM region allocation | | |
|---|---|---|---|
| | Init position for calculation: 1 | | |
| | Tentative number of TMS(s) for the threshold 0.5: 6 | | |
| | INTEGRAL | Likelihood = −7.11 | Transmembrane 22-38 |
| | INTEGRAL | Likelihood = −2.76 | Transmembrane 59-75 |
| | INTEGRAL | Likelihood = −3.50 | Transmembrane 89-105 |
| | INTEGRAL | Likelihood = −2.28 | Transmembrane 140-156 |
| | INTEGRAL | Likelihood = −14.01 | Transmembrane 192-208 |
| | INTEGRAL | Likelihood = −9.18 | Transmembrane 235-251 |

| | |
|---|---|
| PERIPHERAL | Likelihood = 1.22 (at 110) |

| | ALOM score: −14.01 (number of TMSs: 6) |
|---|---|
| MTOP: | Prediction of membrane topology (Hartmann et al.) |
| | Center position for calculation: 29 |
| | Charge difference: 3.0 C(3.0) − N(0.0) |
| | C > N: C-terminal side will be inside |

>>> membrane topology: type 3b
MITDISC: discrimination of mitochondrial targeting seq

| | | | |
|---|---|---|---|
| R content: | 4 | Hyd Moment(75): | 2.17 |
| Hyd Moment(95): | 4.19 | G content: | 3 |
| D/E content: | 2 | S/T content: | 10 |

| | Score: −2.58 |
|---|---|
| Gavel: | prediction of cleavage sites for mitochondrial preseq |
| | R-2 motif at 232 LRT\|EE |

NUCDISC: discrimination of nuclear localization signals

pat4: RRRR (5) at 135
pat7: none
bipartite: none
content of basic residues: 9.7%
NLS Score: −0.16

KDEL: ER retention motif in the C-terminus: none
ER Membrane Retention Signals: none
SKL: peroxisomal targeting signal in the C-terminus: none
PTS2: 2nd peroxisomal targeting signal: none
VAC: possible vacuolar targeting motif: none
RNA-binding motif: none
Actinin-type actin-binding motif:

type 1: none
type 2: none

NMYR: N-myristoylation pattern: none
Prenylation motif: none
memYQRL: transport motif from cell surface to Golgi: none
Tyrosines in the tail: none
Dileucine motif in the tail: none
checking 63 PROSITE DNA binding motifs: none
checking 71 PROSITE ribosomal protein motifs: none
checking 33 PROSITE prokaryotic DNA binding motifs: none

| | |
|---|---|
| NNCN: | Reinhardt's method for Cytoplasmic/Nuclear discrimination |
| | Prediction: cytoplasmic |
| | Reliability: 94.1 |
| COIL: | Lupas's algorithm to detect coiled-coil regions |
| | total: 0 residues |

Final Results (k = 9/23):

44.4%: endoplasmic reticulum
22.2%: vacuolar
11.1%: Golgi
11.1%: vesicles of secretory system
11.1%: mitochondrial

>> prediction for CG99650-01 is end (k = 9)

[0824] A search of the NOV81a protein against the Geneseq database, a proprietary database that contains sequences published in patents and patent publication, yielded several homologous proteins shown in Table 81D.

TABLE 81D
Geneseq Results for NOV81a

| | | NOV81a | Identities/ | |
|---|---|---|---|---|
| | | Residues/ | Similarities for | |
| Geneseq | Protein/Organism/Length | Match | the Matched | Expect |
| Identifier | [Patent #, Date] | Residues | Region | Value |
| ABB82503 | Human TGR341 polypeptide - | 1 . . . 359 | 358/359 (99%) | 0.0 |
| | Homo sapiens, 359 aa. | 1 . . . 359 | 359/359 (99%) | |
| | [WO200277001-A2, 03-OCT- | | | |
| | 2002] | | | |
| ABG73502 | Human G protein coupled | 1 . . . 359 | 358/359 (99%) | 0.0 |
| | receptor HGPRBMY1 - Homo | 1 . . . 359 | 359/359 (99%) | |
| | sapiens, 359 aa. [WO200268591- | | | |
| | A2, 06-SEP-2002] | | | |
| ABP81677 | Human LS160435 receptor | 1 . . . 359 | 358/359 (99%) | 0.0 |
| | protein SEQ ID NO: 530 - Homo | 1 . . . 359 | 359/359 (99%) | |
| | sapiens, 359 aa. [WO200261087- | | | |
| | A2, 08-AUG-2002] | | | |
| ABG93784 | Human G protein-coupled | 1 . . . 359 | 358/359 (99%) | 0.0 |
| | receptor protein, nGPCR-5- | 1 . . . 359 | 359/359 (99%) | |
| | Homo sapiens, 359 aa. | | | |
| | [WO200264789-A1, 22-AUG- | | | |
| | 2002] | | | |
| AAB62285 | Human G-protein coupled | 1 . . . 359 | 358/359 (99%) | 0.0 |
| | receptor, PAUL - Homo sapiens, | 1 . . . 359 | 359/359 (99%) | |
| | 359 aa. [WO200125280-A1, 12- | | | |
| | APR-2001] | | | |

[0825] In a BLAST search of public sequence databases, the NOV81a protein was found to have homology to the proteins shown in the BLASTP data in Table 81E.

TABLE 81E
Public BLASTP Results for NOV81a

| | | NOV81a | Identities/ | |
|---|---|---|---|---|
| Protein | | Residues/ | Similarities for | |
| Accession | | Match | the Matched | Expect |
| Number | Protein/Organism/Length | Residues | Portion | Value |
| AAH43610 | Hypothetical protein - Homo | 1 . . . 359 | 358/359 (99%) | 0.0 |
| | sapiens (Human), 359 aa. | 1 . . . 359 | 359/359 (99%) | |
| Q8NH25 | Seven transmembrane helix | 16 . . . 218 | 200/203 (98%) | e−112 |
| | receptor - Homo sapiens | 1 . . . 203 | 200/203 (98%) | |
| | (Human), 258 aa. | | | |
| P47749 | Proteinase activated receptor 1 | 15 . . . 313 | 111/300 (37%) | 4e−54 |
| | precursor (PAR-1) (Thrombin | 93 . . . 386 | 172/300 (57%) | |
| | receptor) - Xenopus laevis | | | |
| | (African clawed frog), 420 aa. | | | |
| A37912 | thrombin receptor precursor - | 22 . . . 311 | 106/292 (36%) | 5e−53 |
| | human, 425 aa. | 101 . . . 389 | 167/292 (56%) | |
| P56488 | Proteinase activated receptor 1 | 22 . . . 311 | 106/292 (36%) | 9e−53 |
| | precursor (PAR-1) (Thrombin | 101 . . . 389 | 166/292 (56%) | |
| | receptor) - Papio hamadryas | | | |
| | (Hamadryas baboon), 425 aa. | | | |

[0826] PFam analysis indicates that the NOV81a protein contains the domains shown in the Table 81F.

TABLE 81F
Domain Analysis of NOV81a

| | | Identities/ | |
|---|---|---|---|
| | NOV81a Match | Similarities for | |
| Pfam Domain | Region | the Matched Region | Expect Value |
| Acyl_transf_3 | 9 . . . 274 | 44/468 (9%) | 0.76 |
| | | 178/468 (38%) | |
| 7tm_1 | 40 . . . 293 | 76/276 (28%) | 5.3e−50 |
| | | 193/276 (70%) | |

### Example B

### Sequencing Methodology and Identification of NOVX Clones

[0827] 1. GeneCalling™ Technology: This is a proprietary method of performing differential gene expression profiling between two or more samples developed at CuraGen and described by Shimkets, et al., “Gene expression analysis by transcript profiling coupled to a gene database query” Nature Biotechnology 17:198-803 (1999). cDNA was derived from various human samples representing multiple tissue types, normal and diseased states, physiological states, and developmental states from different donors. Samples were obtained as whole tissue, primary cells or tissue cultured primary cells or cell lines. Cells and cell lines may have been treated with biological or chemical agents that regulate gene expression, for example, growth factors, chemokines or steroids. The cDNA thus derived was then digested with up to as many as 120 pairs of restriction enzymes and pairs of linker-adaptors specific for each pair of restriction enzymes were ligated to the appropriate end. The restriction digestion generates a mixture of unique cDNA gene fragments. Limited PCR amplification is performed with primers homologous to the linker adapter sequence where one primer is biotinylated and the other is fluorescently labeled. The doubly labeled material is isolated and the fluorescently labeled single strand is resolved by capillary gel electrophoresis. A computer algorithm compares the electropherograms from an experimental and control group for each of the restriction digestions. This and additional sequence-derived information is used to predict the identity of each differentially expressed gene fragment using a variety of genetic databases. The identity of the gene fragment is confirmed by additional, gene-specific competitive PCR or by isolation and sequencing of the gene fragment.

[0828] 2. SeqCalling™ Technology: cDNA was derived from various human samples representing multiple tissue types, normal and diseased states, physiological states, and developmental states from different donors. Samples were obtained as whole tissue, primary cells or tissue cultured primary cells or cell lines. Cells and cell lines may have been treated with biological or chemical agents that regulate gene expression, for example, growth factors, chemokines or steroids. The cDNA thus derived was then sequenced using CuraGen's proprietary SeqCalling technology. Sequence traces were evaluated manually and edited for corrections if appropriate. cDNA sequences from all samples were assembled together, sometimes including public human sequences, using bioinformatic programs to produce a consensus sequence for each assembly. Each assembly is included in CuraGen Corporation's database. Sequences were included as components for assembly when the extent of identity with another component was at least 95% over 50 bp. Each assembly represents a gene or portion thereof and includes information on variants, such as splice forms single nucleotide polymorphisms (SNPs), insertions, deletions and other sequence variations.

[0829] 3. PathCalling™ Technology: The NOVX nucleic acid sequences are derived by laboratory screening of cDNA library by the two-hybrid approach. cDNA fragments covering either the full length of the DNA sequence, or part of the sequence, or both, are sequenced. In silico prediction was based on sequences available in CuraGen Corporation's proprietary sequence databases or in the public human sequence databases, and provided either the full length DNA sequence, or some portion thereof.

[0830] The laboratory screening was performed using the methods summarized below: cDNA libraries were derived from various human samples representing multiple tissue types, normal and diseased states, physiological states, and developmental states from different donors. Samples were obtained as whole tissue, primary cells or tissue cultured primary cells or cell lines. Cells and cell lines may have been treated with biological or chemical agents that regulate gene expression, for example, growth factors, chemokines or steroids. The cDNA thus derived was then directionally cloned into the appropriate two-hybrid vector (Gal4-activation domain (Gal4-AD) fusion). Such cDNA libraries as well as commercially available cDNA libraries from Clontech (Palo Alto, Calif.) were then transferred from E. coli into a CuraGen Corporation proprietary yeast strain (disclosed in U.S. Pat. Nos. 6,057,101 and 6,083,693, incorporated herein by reference in their entireties).

[0831] Gal4-binding domain (Gal4-BD) fusions of a CuraGen Corportion proprietary library of human sequences was used to screen multiple Gal4-AD fusion cDNA libraries resulting in the selection of yeast hybrid diploids in each of which the Gal4-AD fusion contains an individual cDNA. Each sample was amplified using the polymerase chain reaction (PCR) using non-specific primers at the cDNA insert boundaries. Such PCR product was sequenced; sequence traces were evaluated manually and edited for corrections if appropriate. cDNA sequences from all samples were assembled together, sometimes including public human sequences, using bioinformatic programs to produce a consensus sequence for each assembly. Each assembly is included in CuraGen Corporation's database. Sequences were included as components for assembly when the extent of identity with another component was at least 95% over 50 bp. Each assembly represents a gene or portion thereof and includes information on variants, such as splice forms single nucleotide polymorphisms (SNPs), insertions, deletions and other sequence variations.

[0832] Physical clone: the cDNA fragment derived by the screening procedure, covering the entire open reading frame is, as a recombinant DNA, cloned into pACT2 plasmid (Clontech) used to make the cDNA library. The recombinant plasmid is inserted into the host and selected by the yeast hybrid diploid generated during the screening procedure by the mating of both CuraGen Corporation proprietary yeast strains N106′ and YULH (U.S. Pat. Nos. 6,057,101 and 6,083,693).

[0833] 4. RACE: Techniques based on the polymerase chain reaction such as rapid amplification of cDNA ends (RACE), were used to isolate or complete the sequence of the cDNA of the invention. Usually multiple clones were sequenced from one or more human samples to derive the sequences for fragments. Various human tissue samples from different donors were used for the RACE reaction. The sequences derived from these procedures were included in the SeqCalling Assembly process described in preceding paragraphs.

[0834] 5. Exon Linking: The NOVX target sequences identified in the present invention were subjected to the exon linking process to confirm the sequence. PCR primers were designed by starting at the most upstream sequence available, for the forward primer, and at the most downstream sequence available for the reverse primer. In each case, the sequence was examined, walking inward from the respective termini toward the coding sequence, until a suitable sequence that is either unique or highly selective was encountered, or, in the case of the reverse primer, until the stop codon was reached. Such primers were designed based on in silico predictions for the full length cDNA, part (one or more exons) of the DNA or protein sequence of the target sequence, or by translated homology of the exons to closely related human sequences from other species. These primers were then employed in PCR amplification based on the following pool of human cDNAs: adrenal gland, bone marrow, brain—amygdala, brain—cerebellum, brain—hippocampus, brain—substantia nigra, brain—thalamus, brain—hole, fetal brain, fetal kidney, fetal liver, fetal lung, heart, kidney, lymphoma—Raji, mammary gland, pancreas, pituitary gland, placenta, prostate, salivary gland, skeletal muscle, small intestine, spinal cord, spleen, stomach, testis, thyroid, trachea, uterus. Usually the resulting amplicons were gel purified, cloned and sequenced to high redundancy. The PCR product derived from exon linking was cloned into the pCR2.1 vector from Invitrogen. The resulting bacterial clone has an insert covering the entire open reading frame cloned into the pCR2.1 vector. The resulting sequences from all clones were assembled with themselves, with other fragments in CuraGen Corporation's database and with public ESTs. Fragments and ESTs were included as components for an assembly when the extent of their identity with another component of the assembly was at least 95% over 50 bp. In addition, sequence traces were evaluated manually and edited for corrections if appropriate. These procedures provide the sequence reported herein.

[0835] 6. Physical Clone: Exons were predicted by homology and the intron/exon boundaries were determined using standard genetic rules. Exons were further selected and refined by means of similarity determination using multiple BLAST (for example, tBlastN, BlastX, and BlastN) searches, and, in some instances, GeneScan and Grail. Expressed sequences from both public and proprietary databases were also added when available to further define and complete the gene sequence. The DNA sequence was then manually corrected for apparent inconsistencies thereby obtaining the sequences encoding the full-length protein.

[0836] The PCR product derived by exon linking, covering the entire open reading frame, was cloned into the pCR2.1 vector from Invitrogen to provide clones used for expression and screening purposes.

### Example C

### Quantitative Expression Analysis of Clones in Various Cells and Tissues

[0837] The quantitative expression of various clones was assessed using microtiter plates containing RNA samples from a variety of normal and pathology-derived cells, cell lines and tissues using real time quantitative PCR (RTQ PCR). RTQ PCR was performed on an Applied Biosystems ABI PRISM® 7700 or an ABI PRISM® 7900 HT Sequence Detection System. Various collections of samples are assembled on the plates, and referred to as Panel 1 (containing normal tissues and cancer cell lines), Panel 2 (containing samples derived from tissues from normal and cancer sources), Panel 3 (containing cancer cell lines), Panel 4 (containing cells and cell lines from normal tissues and cells related to inflammatory conditions), Panel 5D/5I (containing human tissues and cell lines with an emphasis on metabolic diseases), AI_comprehensive_panel (containing normal tissue and samples from autoinflammatory diseases), Panel CNSD.01 (containing samples from normal and diseased brains) and CNS_neurodegeneration panel (containing samples from normal and Alzheimer's diseased brains).

[0838] RNA integrity from all samples is controlled for quality by visual assessment of agarose gel electropherograms using 28S and 18S ribosomal RNA staining intensity ratio as a guide (2:1 to 2.5:1 28s:18s) and the absence of low molecular weight RNAs that would be indicative of degradation products. Samples are controlled against genomic DNA contamination by RTQ PCR reactions run in the absence of reverse transcriptase using probe and primer sets designed to amplify across the span of a single exon.

[0839] First, the RNA samples were normalized to reference nucleic acids such as constitutively expressed genes (for example, β-actin and GAPDH). Normalized RNA (5 ul) was converted to cDNA and analyzed by RTQ-PCR using One Step RT-PCR Master Mix Reagents (Applied Biosystems; Catalog No. 4309169) and gene-specific primers according to the manufacturer's instructions.

[0840] In other cases, non-normalized RNA samples were converted to single strand cDNA (sscDNA) using Superscript II (Invitrogen Corporation; Catalog No. 18064-147) and random hexamers according to the manufacturer's instructions. Reactions containing up to 10 μg of total RNA were performed in a volume of 20 μl and incubated for 60 minutes at 42° C. This reaction can be scaled up to 50 μg of total RNA in a final volume of 100 μl. sscDNA samples are then normalized to reference nucleic acids as described previously, using 1× TaqMan® Universal Master mix (Applied Biosystems; catalog No. 4324020), following the manufacturer's instructions.

[0841] Probes and primers were designed for each assay according to Applied Biosystems Primer Express Software package (version I for Apple Computer's Macintosh Power PC) or a similar algorithm using the target sequence as input. Default settings were used for reaction conditions and the following parameters were set before selecting primers: primer concentration=250 nM, primer melting temperature (Tₘ) range=58°-60° C., primer optimal Tₘ=59° C., maximum primer difference=2° C., probe does not have 5′ G, probe Tₘ must be 10° C. greater than primer Tₘ, amplicon size 75 bp to 100 bp. The probes and primers selected (see below) were synthesized by Synthegen (Houston, Tex., USA). Probes were double purified by HPLC to remove uncoupled dye and evaluated by mass spectroscopy to verify coupling of reporter and quencher dyes to the 5′ and 3′ ends of the probe, respectively. Their final concentrations were: forward and reverse primers, 900 nM each, and probe, 200 nM.

[0842] PCR conditions: When working with RNA samples, normalized RNA from each tissue and each cell line was spotted in each well of either a 96 well or a 384-well PCR plate (Applied Biosystems). PCR cocktails included either a single gene specific probe and primers set, or two multiplexed probe and primers sets (a set specific for the target clone and another gene-specific set multiplexed with the target probe). PCR reactions were set up using TaqMan® One-Step RT-PCR Master Mix (Applied Biosystems, Catalog No. 4313803) following manufacturer's instructions. Reverse transcription was performed at 48° C. for 30 minutes followed by amplification/PCR cycles as follows: 95° C. 10 min, then 40 cycles of 95° C. for 15 seconds, 60° C. for 1 minute. Results were recorded as CT values (cycle at which a given sample crosses a threshold level of fluorescence) using a log scale, with the difference in RNA concentration between a given sample and the sample with the lowest CT value being represented as 2 to the power of delta CT. The percent relative expression is then obtained by taking the reciprocal of this RNA difference and multiplying by 100. CT values below 28 indicate high expression, CT values between 28 and 32 indicate moderate expression, and CT values between 32 and 35 indicate low expression. CT values above 35 reflect levels of expression that are too low to be reliably measured.

[0843] When working with sscDNA samples, normalized sscDNA was used as described previously for RNA samples. PCR reactions containing one or two sets of probe and primers were set up as described previously, using 1× TaqMan® Universal Master mix (Applied Biosystems; catalog No. 4324020), following the manufacturer's instructions. PCR amplification was performed as follows: 95° C. 10 min, then 40 cycles of 95° C. for 15 seconds, 60° C. for 1 minute. Results were analyzed and processed as described previously.

Panels 1, 1.1, 1.2, and 1.3D

[0844] The plates for Panels 1, 1.1, 1.2 and 1.3D include 2 control wells (genomic DNA control and chemistry control) and 94 wells containing cDNA from various samples. The samples in these panels are broken into 2 classes: samples derived from cultured cell lines and samples derived from primary normal tissues. The cell lines are derived from cancers of the following types: lung cancer, breast cancer, melanoma, colon cancer, prostate cancer, CNS cancer, squamous cell carcinoma, ovarian cancer, liver cancer, renal cancer, gastric cancer and pancreatic cancer. Cell lines used in these panels are widely available through the American Type Culture Collection (ATCC), a repository for cultured cell lines, and were cultured using the conditions recommended by the ATCC. The normal tissues found on these panels are comprised of samples derived from all major organ systems from single adult individuals or fetuses. These samples are derived from the following organs: adult skeletal muscle, fetal skeletal muscle, adult heart, fetal heart, adult kidney, fetal kidney, adult liver, fetal liver, adult lung, fetal lung, various regions of the brain, the spleen, bone marrow, lymph node, pancreas, salivary gland, pituitary gland, adrenal gland, spinal cord, thymus, stomach, small intestine, colon, bladder, trachea, breast, ovary, uterus, placenta, prostate, testis and adipose.

[0845] In the results for Panels 1, 1.1, 1.2 and 1.3D, the following abbreviations are used:
[0846] ca.=carcinoma,
[0847] *=established from metastasis,
[0848] met=metastasis,
[0849] s cell var=small cell variant,
[0850] non-s=non-sm=non-small,
[0851] squam=squamous,
[0852] pl. eff=pl effusion=pleural effusion,
[0853] glio=glioma,
[0854] astro=astrocytoma, and
[0855] neuro=neuroblastoma.
   General_Screening_Panel_V1.4, V1.5, V1.6 and 1.7

[0856] The plates for Panels 1.4, 1.5, 1.6 and 1.7 include 2 control wells (genomic DNA control and chemistry control) and 88 to 94 wells containing cDNA from various samples. The samples in Panels 1.4, 1.5, 1.6 and 1.7 are broken into 2 classes: samples derived from cultured cell lines and samples derived from primary normal tissues. The cell lines are derived from cancers of the following types: lung cancer, breast cancer, melanoma, colon cancer, prostate cancer, CNS cancer, squamous cell carcinoma, ovarian cancer, liver cancer, renal cancer, gastric cancer and pancreatic cancer. Cell lines used in Panels 1.4, 1.5, 1.6 and 1.7 are widely available through the American Type Culture Collection (ATCC), a repository for cultured cell lines, and were cultured using the conditions recommended by the ATCC. The normal tissues found on Panels 1.4, 1.5, 1.6 and 1.7 are comprised of pools of samples derived from all major organ systems from 2 to 5 different adult individuals or fetuses. These samples are derived from the following organs: adult skeletal muscle, fetal skeletal muscle, adult heart, fetal heart, adult kidney, fetal kidney, adult liver, fetal liver, adult lung, fetal lung, various regions of the brain, the spleen, bone marrow, lymph node, pancreas, salivary gland, pituitary gland, adrenal gland, spinal cord, thymus, stomach, small intestine, colon, bladder, trachea, breast, ovary, uterus, placenta, prostate, testis and adipose. Abbreviations are as described for Panels 1, 1.1, 1.2, and 1.3D.

Panels 2D, 2.2, 2.3, and 2.4

[0857] The plates for Panels 2D, 2.2, 2.3 and 2.4 generally include 2 control wells and 94 test samples composed of RNA or cDNA isolated from human tissue procured by surgeons working in close cooperation with the National Cancer Institute's Cooperative Human Tissue Network (CHTN) or the National Disease Research Initiative (NDRI) or from Ardais or Clinomics). The tissues are derived from human malignancies and in cases where indicated many malignant tissues have “matched margins” obtained from noncancerous tissue just adjacent to the tumor. These are termed normal adjacent tissues and are denoted “NAT” in the results below. The tumor tissue and the “matched margins” are evaluated by two independent pathologists (the surgical pathologists and again by a pathologist at NDRI/CHTN/Ardais/Clinomics). Unmatched RNA samples from tissues without malignancy (normal tissues) were also obtained from Ardais or Clinomics. This analysis provides a gross histopathological assessment of tumor differentiation grade. Moreover, most samples include the original surgical pathology report that provides information regarding the clinical stage of the patient. These matched margins are taken from the tissue surrounding (i.e. immediately proximal) to the zone of surgery (designated “NAT”, for normal adjacent tissue, in Table RR). In addition, RNA and cDNA samples were obtained from various human tissues derived from autopsies performed on elderly people or sudden death victims (accidents, etc.). These tissues were ascertained to be free of disease and were purchased from various commercial sources such as Clontech (Palo Alto, Calif.), Research Genetics, and Invitrogen.

HASS Panel V 1.0

[0858] The HASS panel v 1.0 plates are comprised of 93 cDNA samples and two controls. Specifically, 81 of these samples are derived from cultured human cancer cell lines that had been subjected to serum starvation, acidosis and anoxia for different time periods as well as controls for these treatments, 3 samples of human primary cells, 9 samples of malignant brain cancer (4 medulloblastomas and 5 glioblastomas) and 2 controls. The human cancer cell lines are obtained from ATCC (American Type Culture Collection) and fall into the following-tissue groups: breast cancer, prostate cancer, bladder carcinomas, pancreatic cancers and CNS cancer cell lines. These cancer cells are all cultured under standard recommended conditions. The treatments used (serum starvation, acidosis and anoxia) have been previously published in the scientific literature. The primary human cells were obtained from Clonetics (Walkersville, Md.) and were grown in the media and conditions recommended by Clonetics. The malignant brain cancer samples are obtained as part of a collaboration (Henry Ford Cancer Center) and are evaluated by a pathologist prior to CuraGen receiving the samples. RNA was prepared from these samples using the standard procedures. The genomic and chemistry control wells have been described previously.

ARDAIS Panel V 1.0

[0859] The plates for ARDAIS panel v 1.0 generally include 2 control wells and 22 test samples composed of RNA isolated from human tissue procured by surgeons working in close cooperation with Ardais Corporation. The tissues are derived from human lung malignancies (lung adenocarcinoma or lung squamous cell carcinoma) and in cases where indicated many malignant samples have “matched margins” obtained from noncancerous lung tissue just adjacent to the tumor. These matched margins are taken from the tissue surrounding (i.e. immediately proximal) to the zone of surgery (designated “NAT”, for normal adjacent tissue) in the results below. The tumor tissue and the “matched margins” are evaluated by independent pathologists (the surgical pathologists and again by a pathologist at Ardais). Unmatched malignant and non-malignant RNA samples from lungs were also obtained from Ardais. Additional information from Ardais provides a gross histopathological assessment of tumor differentiation grade and stage. Moreover, most samples include the original surgical pathology report that provides information regarding the clinical state of the patient.

ARDAIS Prostate V 1.0

[0860] The plates for ARDAIS prostate 1.0 generally include 2 control wells and 68 test samples composed of RNA isolated from human tissue procured by surgeons working in close cooperation with Ardais Corporation. The tissues are derived from human prostate malignancies and in cases where indicated malignant samples have “matched margins” obtained from noncancerous prostate tissue just adjacent to the tumor. These matched margins are taken from the tissue surrounding (i.e. immediately proximal) to the zone of surgery (designated “NAT”, for normal adjacent tissue) in the results below. The tumor tissue and the “matched margins” are evaluated by independent pathologists (the surgical pathologists and again by a pathologist at Ardais). RNA from unmatched malignant and non-malignant prostate samples were also obtained from Ardais. Additional information from Ardais provides a gross histopathological assessment of tumor differentiation grade and stage. Moreover, most samples include the original surgical pathology report that provides information regarding the clinical state of the patient.

ARDAIS Kidney V 1.0

[0861] The plates for ARDAIS kidney 1.0 generally include 2 control wells and 44 test samples composed of RNA isolated from human tissue procured by surgeons working in close cooperation with Ardais Corporation. The tissues are derived from human prostate malignancies and in cases where indicated malignant samples have “matched margins” obtained from noncancerous prostate tissue just adjacent to the tumor. These matched margins are taken from the tissue surrounding (i.e. immediately proximal) to the zone of surgery (designated “NAT”, for normal adjacent tissue) in the results below. The tumor tissue and the “matched margins” are evaluated by independent pathologists (the surgical pathologists and again by a pathologist at Ardais). RNA from unmatched malignant and non-malignant prostate samples were also obtained from Ardais. Additional information from Ardais provides a gross histopathological assessment of tumor differentiation grade and stage. Moreover, most samples include the original surgical pathology report that provides information regarding the clinical state of the patient.

Panel 3D and 3.1 and 3.2

[0862] The plates of Panel 3D, 3.1, and 3.2 are comprised of 94 cDNA samples and two control samples. Specifically, 92 of these samples are derived from cultured human cancer cell lines, 2 samples of human primary cerebellar tissue and 2 controls. The human cell lines are generally obtained from ATCC (American Type Culture Collection), NCI or the German tumor cell bank and fall into the following tissue groups: Squamous cell carcinoma of the tongue, breast cancer, prostate cancer, melanoma, epidermoid carcinoma, sarcomas, bladder carcinomas, pancreatic cancers, kidney cancers, leukemias/lymphomas, ovarian/uterine/cervical, gastric, colon, lung and CNS cancer cell lines. In addition, there are two independent samples of cerebellum. These cells are all cultured under standard recommended conditions and RNA extracted using the standard procedures. The cell lines in panel 3D, 3.1, 3.2, 1, 1.1, 1.2, 1.3D, 1.4, 1.5, and 1.6 are of the most common cell lines used in the scientific literature.

Panels 4D, 4R, and 4.1D

[0863] Panel 4 includes samples on a 96 well plate (2 control wells, 94 test samples) composed of RNA (Panel 4R) or cDNA (Panels 4D/4.1D) isolated from various human cell lines or tissues related to inflammatory conditions. Total RNA from control normal tissues such as colon and lung (Stratagene, La Jolla, Calif.) and thymus and kidney (Clontech) was employed. Total RNA from liver tissue from cirrhosis patients and kidney from lupus patients was obtained from BioChain (Biochain Institute, Inc., Hayward, Calif.). Intestinal tissue for RNA preparation from patients diagnosed as having Crohn's disease and ulcerative colitis was obtained from the National Disease Research Interchange (NDRI) (Philadelphia, Pa.).

[0864] Astrocytes, lung fibroblasts, dermal fibroblasts, coronary artery smooth muscle cells, small airway epithelium, bronchial epithelium, microvascular dermal endothelial cells, microvascular lung endothelial cells, human pulmonary aortic endothelial cells, human umbilical vein endothelial cells were all purchased from Clonetics (Walkersville, Md.) and grown in the media supplied for these cell types by Clonetics. These primary cell types were activated with various cytokines or combinations of cytokines for 6 and/or 12-14 hours, as indicated. The following cytokines were used; IL-1 beta at approximately 1-5 ng/ml, TNF alpha at approximately 5-10 ng/ml, IFN gamma at approximately 20-50 ng/ml, IL-4 at approximately 5-10 ng/ml, IL-9 at approximately 5-10 ng/ml, IL-13 at approximately 5-10 ng/ml. Endothelial cells were sometimes starved for various times by culture in the basal media from Clonetics with 0.1% serum.

[0865] Mononuclear cells were prepared from blood of employees at CuraGen Corporation, using Ficoll. LAK cells were prepared from these cells by culture in DMEM 5% FCS (Hyclone), 100 μM non essential amino acids (Gibco/Life Technologies, Rockville, Md.), 1 mM sodium pyruvate (Gibco), mercaptoethanol 5.5×10⁻⁵ M (Gibco), and 10 mM Hepes (Gibco) and Interleukin 2 for 4-6 days. Cells were then either activated with 10-20 ng/ml PMA and 1-2 μg/ml ionomycin, IL-12 at 5-10 ng/ml, IFN gamma at 20-50 ng/ml and IL-18 at 5-10 ng/ml for 6 hours. In some cases, mononuclear cells were cultured for 4-5 days in DMEM 5% FCS (Hyclone), 100 μM non essential amino acids (Gibco), 1 mM sodium pyruvate (Gibco), mercaptoethanol 5.5×10⁻⁵ M (Gibco), and 10 mM Hepes (Gibco) with PHA (phytohemagglutinin) or PWM (pokeweed mitogen) at approximately 5 μg/ml. Samples were taken at 24,48 and 72 hours for RNA preparation. MLR (mixed lymphocyte reaction) samples were obtained by taking blood from two donors, isolating the mononuclear cells using Ficoll and mixing the isolated mononuclear cells 1:1 at a final concentration of approximately 2×10⁶ cells/ml in DMEM 5% FCS (Hyclone), 100 μM non essential amino acids (Gibco), 1 mM sodium pyruvate (Gibco), mercaptoethanol (5.5×10⁻⁵ M) (Gibco), and 10 mM Hepes (Gibco). The MLR was cultured and samples taken at various time points ranging from 1-7 days for RNA preparation.

[0866] Monocytes were isolated from mononuclear cells using CD14 Miltenyi Beads, +ve VS selection columns and a Vario Magnet according to the manufacturer's instructions. Monocytes were differentiated into dendritic cells by culture in DMEM 5% fetal calf serum (FCS) (Hyclone, Logan, Utah), 100 4M non essential amino acids (Gibco), 1 mM sodium pyruvate (Gibco), mercaptoethanol 5.5×10⁻⁵ M (Gibco), and 10 mM Hepes (Gibco), 50 ng/ml GMCSF and 5 ng/ml IL-4 for 5-7 days. Macrophages were prepared by culture of monocytes for 5-7 days in DMEM 5% FCS (Hyclone), 100 μM non essential amino acids (Gibco), 1 mM sodium pyruvate (Gibco), mercaptoethanol 5.5×10⁻⁵ M (Gibco), 10 mM Hepes (Gibco) and 10% AB Human Serum or MCSF at approximately 50 ng/ml. Monocytes, macrophages and dendritic cells were stimulated for 6 and 12-14 hours with lipopolysaccharide (LPS) at 100 ng/ml. Dendritic cells were also stimulated with anti-CD40 monoclonal antibody (Pharmingen) at 10 μg/ml for 6 and 12-14 hours.

[0867] CD4 lymphocytes, CD8 lymphocytes and NK cells were also isolated from mononuclear cells using CD4, CD8 and CD56 Miltenyi beads, positive VS selection columns and a Vario Magnet according to the manufacturer's instructions. CD45RA and CD45RO CD4 lymphocytes were isolated by depleting mononuclear cells of CD8, CD56, CD14 and CD19 cells using CD8, CD56, CD14 and CD19 Miltenyi beads and positive selection. CD45RO beads were then used to isolate the CD45RO CD4 lymphocytes with the remaining cells being CD45RA CD4 lymphocytes. CD45RA CD4, CD45RO CD4 and CD8 lymphocytes were placed in DMEM 5% FCS (Hyclone), 100 μM non essential amino acids (Gibco), 1 mM sodium pyruvate (Gibco), mercaptoethanol 5.5×10⁻⁵ M (Gibco), and 10 mM Hepes (Gibco) and plated at 10⁶ cells/ml onto Falcon 6 well tissue culture plates that had been coated overnight with 0.5 μg/ml anti-CD28 (Pharmingen) and 3 ug/ml anti-CD3 (OKT3, ATCC) in PBS. After 6 and 24 hours, the cells were harvested for RNA preparation. To prepare chronically activated CD8 lymphocytes, we activated the isolated CD8 lymphocytes for 4 days on anti-CD28 and anti-CD3 coated plates and then harvested the cells and expanded them in DMEM 5% FCS (Hyclone), 100 μM non essential amino acids (Gibco), 1 mM sodium pyruvate (Gibco), mercaptoethanol 5.5×10⁻⁵ M (Gibco), and 10 mM Hepes (Gibco) and IL-2. The expanded CD8 cells were then activated again with plate bound anti-CD3 and anti-CD28 for 4 days and expanded as before. RNA was isolated 6 and 24 hours after the second activation and after 4 days of the second expansion culture. The isolated NK cells were cultured in DMEM 5% FCS (Hyclone), 100 μM non essential amino acids (Gibco), 1 mM sodium pyruvate (Gibco), mercaptoethanol 5.5×10⁻⁵ M (Gibco), and 10 mM Hepes (Gibco) and IL-2 for 4-6 days before RNA was prepared.

[0868] To obtain B cells, tonsils were procured from NDRI. The tonsil was cut up with sterile dissecting scissors and then passed through a sieve. Tonsil cells were then spun down and resupended at 10⁶ cells/ml in DMEM 5% FCS (Hyclone), 100 μM non essential amino acids (Gibco), 1 mM sodium pyruvate (Gibco), mercaptoethanol 5.5×10⁻⁵ M (Gibco), and 10 mM Hepes (Gibco). To activate the cells, we used PWM at 5 μg/ml or anti-CD40 (Pharmingen) at approximately 10 μg/ml and IL-4 at 5-10 ng/ml. Cells were harvested for RNA preparation at 24, 48 and 72 hours.

[0869] To prepare the primary and secondary Th1/Th2 and Tr1 cells, six-well Falcon plates were coated overnight with 10 μg/ml anti-CD28 (Pharmingen) and 2 μg/ml OKT3 (ATCC), and then washed twice with PBS. Umbilical cord blood CD4 lymphocytes 6 (Poietic Systems, German Town, Md.) were cultured at 10⁵-10⁶ cells/ml in DMEM 5% FCS (Hyclone), 100 μM non essential amino acids (Gibco), 1 mM sodium pyruvate (Gibco), mercaptoethanol 5.5×10⁻⁵ M (Gibco), 10 mM Hepes (Gibco) and IL-2 (4 ng/ml). IL-12 (5 ng/ml) and anti-IL-4 (1 μg/ml) were used to direct to Th1, while IL-4 (5 ng/ml) and anti-IFN gamma (1 μg/ml) were used to direct to Th2 and IL-10 at 5 ng/ml was used to direct to Tr1. After 4-5 days, the activated Th1, Th2 and Tr1 lymphocytes were washed once in DMEM and expanded for 4-7 days in DMEM 5% FCS (Hyclone), 100 μM non essential amino acids (Gibco), 1 mM sodium pyruvate (Gibco), mercaptoethanol 5.5×10⁻⁵ M (Gibco), 10 mM Hepes (Gibco) and IL-2 (1 ng/ml). Following this, the activated Th1, Th2 and Tr1 lymphocytes were re-stimulated for 5 days with anti-CD28/OKT3 and cytokines as described above, but with the addition of anti-CD95L (1 μg/ml) to prevent apoptosis. After 4-5 days, the Th1, Th2 and Tr1 lymphocytes were washed and then expanded again with IL-2 for 4-7 days. Activated Th1 and Th2 lymphocytes were maintained in this way for a maximum of three cycles. RNA was prepared from primary and secondary Th1, Th2 and Tr1 after 6 and 24 hours following the second and third activations with plate bound anti-CD3 and anti-CD28 mAbs and 4 days into the second and third expansion cultures in Interleukin 2.

[0870] The following leukocyte cells lines were obtained from the ATCC: Ramos, EOL-1, KU-812. EOL cells were further differentiated by culture in 0.1 mM dbcAMP at 5×10⁵ cells/ml for 8 days, changing the media every 3 days and adjusting the cell concentration to 5×10⁵ cells/ml. For the culture of these cells, we used DMEM or RPMI (as recommended by the ATCC), with the addition of 5% FCS (Hyclone), 100 μM non essential amino acids (Gibco), 1 mM sodium pyruvate (Gibco), mercaptoethanol 5.5×10⁻⁵ M (Gibco), 10 mM Hepes (Gibco). RNA was either prepared from resting cells or cells activated with PMA at 10 ng/ml and ionomycin at 1 μg/ml for 6 and 14 hours. Keratinocyte line CCD106 and an airway epithelial tumor line NCI-H292 were also obtained from the ATCC. Both were cultured in DMEM 5% FCS (Hyclone), 100 μM non essential amino acids (Gibco), 1 mM sodium pyruvate (Gibco), mercaptoethanol 5.5×10⁻⁵ M (Gibco), and 10 mM Hepes (Gibco). CCD1106 cells were activated for 6 and 14 hours with approximately 5 ng/ml TNF alpha and 1 ng/ml IL-1 beta, while NCI-H292 cells were activated for 6 and 14 hours with the following cytokines: 5 ng/ml IL-4, 5 ng/ml IL-9, 5 ng/ml IL-13 and 25 ng/ml IFN gamma.

[0871] For these cell lines and blood cells, RNA was prepared by lysing approximately 10⁷ cells/ml using Trizol (Gibco BRL). Briefly, 1/10 volume of bromochloropropane (Molecular Research Corporation) was added to the RNA sample, vortexed and after 10 minutes at room temperature, the tubes were spun at 14,000 rpm in a Sorvall SS34 rotor. The aqueous phase was removed and placed in a 15 ml Falcon Tube. An equal volume of isopropanol was added and left at −20 degrees C. overnight. The precipitated RNA was spun down at 9,000 rpm for 15 min in a Sorvall SS34 rotor and washed in 70% ethanol. The pellet was redissolved in 300 μl of RNAse-free water and 35 μl buffer (Promega) 5 μl DTT, 7 μl RNAsin and 8 μl DNAse were added. The tube was incubated at 37 degrees C. for 30 minutes to remove contaminating genomic DNA, extracted once with phenol chloroform and re-precipitated with 1/10 volume of 3 M sodium acetate and 2 volumes of 100% ethanol. The RNA was spun down and placed in RNAse free water. RNA was stored at −80 degrees C.

AI_comprehensive panel_v1.0

[0872] The plates for AI_comprehensive panel_v1.0 include two control wells and 89 test samples comprised of cDNA isolated from surgical and postmortem human tissues obtained from the Backus Hospital and Clinomics (Frederick, Md.). Total RNA was extracted from tissue samples from the Backus Hospital in the Facility at CuraGen. Total RNA from other tissues was obtained from Clinomics.

[0873] Joint tissues including synovial fluid, synovium, bone and cartilage were obtained from patients undergoing total knee or hip replacement surgery at the Backus Hospital. Tissue samples were immediately snap frozen in liquid nitrogen to ensure that isolated RNA was of optimal quality and not degraded. Additional samples of osteoarthritis and rheumatoid arthritis joint tissues were obtained from Clinomics. Normal control tissues were supplied by Clinomics and were obtained during autopsy of trauma victims.

[0874] Surgical specimens of psoriatic tissues and adjacent matched tissues were provided as total RNA by Clinomics. Two male and two female patients were selected between the ages of 25 and 47. None of the patients were taking prescription drugs at the time samples were isolated.

[0875] Surgical specimens of diseased colon from patients with ulcerative colitis and Crohns disease and adjacent matched tissues were obtained from Clinomics. Bowel tissue from three female and three male Crohn's patients between the ages of 41-69 were used. Two patients were not on prescription medication while the others were taking dexamethasone, phenobarbital, or tylenol. Ulcerative colitis tissue was from three male and four female patients. Four of the patients were taking lebvid and two were on phenobarbital.

[0876] Total RNA from post mortem lung tissue from trauma victims with no disease or with emphysema, asthma or COPD was purchased from Clinomics. Emphysema patients ranged in age from 40-70 and all were smokers, this age range was chosen to focus on patients with cigarette-linked emphysema and to avoid those patients with alpha-lanti-trypsin deficiencies. Asthma patients ranged in age from 36-75, and excluded smokers to prevent those patients that could also have COPD. COPD patients ranged in age from 35-80 and included both smokers and non-smokers. Most patients were taking corticosteroids, and bronchodilators.

[0877] In the labels employed to identify tissues in the AI_comprehensive panel_v1.0 panel, the following abbreviations are used:
[0878] AI=Autoimmunity
[0879] Syn=Synovial
[0880] Normal=No apparent disease
[0881] Rep22/Rep20=individual patients
[0882] RA=Rheumatoid arthritis
[0883] Backus=From Backus Hospital
[0884] OA=Osteoarthritis
[0885] (SS) (BA) (MF)=Individual patients
[0886] Adj=Adjacent tissue
[0887] Match control=adjacent tissues
[0888] −M=Male
[0889] −F=Female
[0890] COPD=Chronic obstructive pulmonary disease
   AI.05 Chondrosarcoma

[0891] The AI.05 chondrosarcoma plates are comprised of SW1353 cells that had been subjected to serum starvation and treatment with cytokines that are known to induce MMP (1, 3 and 13) synthesis (eg. IL1beta). These treatments include: IL-1β (10 ng/ml), IL-1β, +TNF-α (50 ng/ml), IL-1β+Oncostatin (50 ng/ml) and PMA (100 ng/ml). The SW1353 cells were obtained from the ATCC (American Type Culture Collection) and were all cultured under standard recommended conditions. The SW1353 cells were plated at 3×10⁵ cells/ml (in DMEM medium-10% FBS) in 6-well plates. The treatment was done in triplicate, for 6 and 18 h. The supernatants were collected for analysis of MMP 1, 3 and 13 production and for RNA extraction. RNA was prepared from these samples using the standard procedures.

Panels 5D and 5I

[0892] The plates for Panel 5D and 5I include two control wells and a variety of cDNAs isolated from human tissues and cell lines with an emphasis on metabolic diseases. Metabolic tissues were obtained from patients enrolled in the Gestational Diabetes study. Cells were obtained during different stages in the differentiation of adipocytes from human mesenchymal stem cells. Human pancreatic islets were also obtained.

[0893] In the Gestational Diabetes study subjects are young (18-40 years), otherwise healthy women with and without gestational diabetes undergoing routine (elective) Caesarean section. After delivery of the infant, when the surgical incisions were being repaired/closed, the obstetrician removed a small sample (<1 cc) of the exposed metabolic tissues during the closure of each surgical level. The biopsy material was rinsed in sterile saline, blotted and fast frozen within 5 minutes from the time of removal. The tissue was then flash frozen in liquid nitrogen and stored, individually, in sterile screw-top tubes and kept on dry ice for shipment to or to be picked up by CuraGen. The metabolic tissues of interest include uterine wall (smooth muscle), visceral adipose, skeletal muscle (rectus) and subcutaneous adipose. Patient descriptions are as follows:
[0894] Patient 2 Diabetic Hispanic, overweight, not on insulin
[0895] Patient 7-9 Nondiabetic Caucasian and obese (BMI>30)
[0896] Patient 10 Diabetic Hispanic, overweight, on insulin
[0897] Patient 11 Nondiabetic African American and overweight
[0898] Patient 12 Diabetic Hispanic on insulin

[0899] Adipocyte differentiation was induced in donor progenitor cells obtained from Osirus (a division of Clonetics/BioWhittaker) in triplicate, except for Donor 3U which had only two replicates. Scientists at Clonetics isolated, grew and differentiated human mesenchymal stem cells (HuMSCs) for CuraGen based on the published protocol found in Mark F. Pittenger, et al., Multilineage Potential of Adult Human Mesenchymal Stem Cells Science Apr. 2, 1999: 143-147. Clonetics provided Trizol lysates or frozen pellets suitable for mRNA isolation and ds cDNA production. A general description of each donor is as follows:

| | | |
|---|---|---|
| Donor 2 and 3 U | Mesenchymal | Undifferentiated Adipose |
| | Stem cells | |
| Donor 2 and 3 AM | Adipose | AdiposeMidway Differentiated |
| Donor 2 and 3 AD | Adipose | Adipose Differentiated |

[0900] Human cell lines were generally obtained from ATCC (American Type Culture Collection), NCI or the German tumor cell bank and fall into the following tissue groups: kidney proximal convoluted tubule, uterine smooth muscle cells, small intestine, liver HepG2 cancer cells, heart primary stromal cells, and adrenal cortical adenoma cells. These cells are all cultured under standard recommended conditions and RNA extracted using the standard procedures. All samples were processed at CuraGen to produce single stranded cDNA.

[0901] Panel 5I contains all samples previously described with the addition of pancreatic islets from a 58 year old female patient obtained from the Diabetes Research Institute at the University of Miami School of Medicine. Islet tissue was processed to total RNA at an outside source and delivered to CuraGen for addition to panel 5I.

[0902] In the labels employed to identify tissues in the 5D and 5I panels, the following abbreviations are used:
[0903] GO Adipose=Greater Omentum Adipose
[0904] SK=Skeletal Muscle
[0905] UT=Uterus
[0906] PL=Placenta
[0907] AD=Adipose Differentiated
[0908] AM=Adipose Midway Differentiated.
[0909] U=Undifferentiated Stem Cells
   Human Metabolic RTQ-PCR Panel

[0910] The plates for the Human Metabolic RTQ-PCR Panel include two control wells (genomic DNA control and chemistry control) and 211 cDNAs isolated from human tissues and cell lines with an emphasis on metabolic diseases. This panel is useful for establishing the tissue and cellular expression profiles for genes believed to play a role in the etiology and pathogenesis of obesity and/or diabetes and to confirm differential expression of such genes derived from other methods.

[0911] Metabolic tissues were obtained from patients enrolled in the CuraGen Gestational Diabetes study and from autopsy tissues from Type II diabetics and age, sex and race-matched control patients. One or more of the following were used to characterize the patients: body mass index [BMI=wt (kg)/ht (m²)], serum glucose, HgbA1c. Cell lines used in this panel are widely available through the American Type Culture Collection (ATCC), a repository for cultured cell lines. RNA from human Pancreatic Islets was also obtained.

[0912] In the Gestational Diabetes study, subjects are young (18-40 years), otherwise healthy women with and without gestational diabetes undergoing routine (elective) Caesarian section. After delivery of the infant, when the surgical incisions were being repaired/closed, the obstetrician removed a small sample (<1 cc) of the exposed metabolic tissues during the closure of each surgical level. The biopsy material was rinsed in sterile saline, blotted, and then flash frozen in liquid nitrogen and stored, individually, in sterile screw-top tubes and kept on dry ice for shipment to or to be picked up by CuraGen. The metabolic tissues of interest include uterine wall (smooth muscle), visceral adipose, skeletal muscle (rectus), and subcutaneous adipose. Patient descriptions are as follows:
[0913] Patient 7 Non-diabetic Caucasian and obese
[0914] Patient 8 Non-diabetic Caucasian and obese
[0915] Patient 12 Diabetic Caucasian with unknown BMI and on insulin
[0916] Patient 13 Diabetic Caucasian, overweight, not on insulin
[0917] Patient 15 Diabetic Caucasian, obese, not on insulin
[0918] Patient 17 Diabetic Caucasian, normal weight, not on insulin
[0919] Patient 18 Diabetic Hispanic, obese, not on insulin
[0920] Patient 19 Non-diabetic Caucasian and normal weight
[0921] Patient 20 Diabetic Caucasian, overweight, and on insulin
[0922] Patient 21 Non-diabetic Caucasian and overweight
[0923] Patient 22 Diabetic Caucasian, normal weight, on insulin
[0924] Patient 23 Non-diabetic Caucasian and overweight
[0925] Patient 25 Diabetic Caucasian, normal weight, not on insulin
[0926] Patient 26 Diabetic Caucasian, obese, on insulin
[0927] Patient 27 Diabetic Caucasian, obese, on insulin

[0928] Total RNA was isolated from metabolic tissues of 12 Type II diabetic patients and 12 matched control patients included hypothalamus, liver, pancreas, small intestine, psoas muscle, diaphragm muscle, visceral adipose, and subcutaneous adipose. The diabetics and non-diabetics were matched for age, sex, ethnicity, and BMI where possible.

[0929] The panel also contains pancreatic islets from a 22 year old male patient (with a BMI of 35) obtained from the Diabetes Research Institute at the University of Miami School of Medicine. Islet tissue was processed to total RNA at CuraGen.

[0930] Cell lines used in this panel are widely available through the American Type Culture Collection (ATCC), a repository for cultured cell lines, and were cultured at an outside facility. The RNA was extracted at CuraGen according to CuraGen protocols. All samples were then processed at CuraGen to produce single stranded cDNA.

[0931] In the labels used to identify tissues in the Human Metabolic panel, the following abbreviations are used:
[0932] Pl=placenta
[0933] Go=greater omentum
[0934] Sk=skeletal muscle
[0935] Ut=uterus
[0936] CC=Caucasian
[0937] HI=Hispanic
[0938] AA=African American
[0939] AS=Asian
[0940] Diab=Type H diabetic
[0941] Norm=Non-diabetic
[0942] Overwt=Overweight; med BMI
[0943] Obese=Hi BMI
[0944] Low BM=20-25
[0945] Med BM=26-30
[0946] Hi BMI=Greater than 30
[0947] M=Male
[0948] #=Patient identifier
[0949] Vis.=Visceral
[0950] SubQ=Subcutaneous
   Panel CNSD.01

[0951] The plates for Panel CNSD.01 include two control wells and 94 test samples comprised of cDNA isolated from postmortem human brain tissue obtained from the Harvard Brain Tissue Resource Center. Brains are removed from calvaria of donors between 4 and 24 hours after death, sectioned by neuroanatomists, and frozen at −80° C. in liquid nitrogen vapor. All brains are sectioned and examined by neuropathologists to confirm diagnoses with clear associated neuropathology.

[0952] Disease diagnoses are taken from patient records. The panel contains two brains from each of the following diagnoses: Alzheimer's disease, Parkinson's disease, Huntington's disease, Progressive Supernuclear Palsy, Depression, and “Normal controls”. Within each of these brains, the following regions are represented: cingulate gyrus, temporal pole, globus palladus, substantia nigra, Brodman Area 4 (primary motor strip), Brodman Area 7 (parietal cortex), Brodman Area 9 (prefrontal cortex), and Brodman area 17 (occipital cortex). Not all brain regions are represented in all cases; e.g., Huntington's disease is characterized in part by neurodegeneration in the globus palladus, thus this region is impossible to obtain from confirmed Huntington's cases. Likewise Parkinson's disease is characterized by degeneration of the substantia nigra making this region more difficult to obtain. Normal control brains were examined for neuropathology and found to be free of any pathology consistent with neurodegeneration.

[0953] In the labels employed to identify tissues in the CNS panel, the following abbreviations are used:
[0954] PSP=Progressive supranuclear palsy
[0955] Sub Nigra=Substantia nigra
[0956] Glob Palladus=Globus palladus
[0957] Temp Pole=Temporal pole
[0958] Cing Gyr=Cingulate gyrus
[0959] BA 4=Brodman Area 4
   Panel CNS_Neurodegeneration_V1.0

[0960] The plates for Panel CNS_Neurodegeneration_V1.0 include two control wells and 47 test samples comprised of cDNA isolated from postmortem human brain tissue obtained from the Harvard Brain Tissue Resource Center (McLean Hospital) and the Human Brain and Spinal Fluid Resource Center (VA Greater Los Angeles Healthcare System). Brains are removed from calvaria of donors between 4 and 24 hours after death, sectioned by neuroanatomists, and frozen at −80° C. in liquid nitrogen vapor. All brains are sectioned and examined by neuropathologists to confirm diagnoses with clear associated neuropathology.

[0961] Disease diagnoses are taken from patient records. The panel contains six brains from Alzheimer's disease (AD) patients, and eight brains from “Normal controls” who showed no evidence of dementia prior to death. The eight normal control brains are divided into two categories: Controls with no dementia and no Alzheimer's like pathology (Controls) and controls with no dementia but evidence of severe Alzheimer's like pathology, (specifically senile plaque load rated as level 3 on a scale of 0-3; 0=no evidence of plaques, 3=severe AD senile plaque load). Within each of these brains, the following regions are represented: hippocampus, temporal cortex (Brodman Area 21), parietal cortex (Brodman area 7), and occipital cortex (Brodman area 17). These regions were chosen to encompass all levels of neurodegeneration in AD. The hippocampus is a region of early and severe neuronal loss in AD; the temporal cortex is known to show neurodegeneration in AD after the hippocampus; the parietal cortex shows moderate neuronal death in the late stages of the disease; the occipital cortex is spared in AD and therefore acts as a “control” region within AD patients. Not all brain regions are represented in all cases.

[0962] In the labels employed to identify tissues in the CNS_Neurodegeneration_V1.0 panel, the following abbreviations are used:
[0963] AD=Alzheimer's disease brain; patient was demented and showed AD-like pathology upon autopsy
[0964] Control=Control brains; patient not demented, showing no neuropathology
[0965] Control (Path)=Control brains; pateint not demented but showing sever AD-like pathology
[0966] SupTemporal Ctx=Superior Temporal Cortex
[0967] Inf Temporal Ctx=Inferior Temporal Cortex

[0968] The expression of the gene was analyzed after normalization using scaling factor. The scaling factor is calculated from the Grand mean of CT values for a panel and the Well mean which is specific to the tissue. The Grand mean is the average CT value for all wells across all runs. For example, if a panel has 50 samples and has had 100 probe/primer sets run on it, the grand mean would be the average of these 5000 CT scores. The well mean is tissue-specific. On the above described panel there would be 50 different well means, each taking the average of the 100 CT values generated for each sample on the panel from the 100 probe/primer sets.

[0969] The asumption is that across a large number of genes, all samples should have the same CT value. If a well is lower than the average across a large number of genes, it is “scaled up” by that difference or the “scaling factor”.
Scaling Factor=Grand mean−Well mean
The new CT value for the well is:
Scaled CT value=Raw CT+Scaling Factor.
Statistical Analysis of CNS_Neurodegeneration_V1.0 Data

[0970] All data were analyzed by analysis of covariance (ANCOVA). As a covariate, the average CT value (or number of rounds of PCR until signal from the well was detected) was calculated for 1000 PCR runs on different genes. This number is therefore an estimate of total cDNA quantity and quality for each sample. When RTQ PCR is run for a given gene, CT values are therefore compared to these average values to correct for differences in well loading or original RNA quality. Stats were run on data from the temporal cortex, as this regions shows sever neurodegeneration in the mid to late stages of the disease, and because the largest number of samples were available for this region giving the most statistical power. Covariates for each well corresponding to Temporal Cortex samples are listed below. The well numbers (10-25) are listed under “Order” in the table of CT values given for each gene run. For this analysis, Controls and Control (Path) cases were grouped together as the intention was to find genes associated with dementia as opposed to amyloid deposition.

| | | |
|---|---|---|
| 10 | AD1 | 33.014 |
| 11 | AD2 | 32.309 |
| 12 | AD3 | 34.195 |
| 13 | AD4 | 32.689 |
| 14 | AD5 Inf | 30.829 |
| 15 | AD5 Sup | 31.519 |
| 16 | AD6 Inf | 31.517 |
| 17 | AD6 Sup | 31.415 |
| 18 | Con1 | 34.236 |
| 19 | Con2 | 32.352 |
| 20 | Con3 | 33.215 |
| 21 | Con4 | 33.661 |
| 22 | Con5 (Path) | 31.685 |
| 23 | Con6 (Path) | 32.187 |
| 24 | Con7 (Path) | 34.427 |
| 25 | Con8 (Path) | 32.238 |

Panel CNS_Neurodegeneration_V2.0

[0971] The plates for Panel CNS_Neurodegeneration_V2.0 include two control wells and 47 test samples comprised of cDNA isolated from postmortem human brain tissue obtained from the Harvard Brain Tissue Resource Center (McLean Hospital) and the Human Brain and Spinal Fluid Resource Center (VA Greater Los Angeles Healthcare System). Brains are removed from calvaria of donors between 4 and 24 hours after death, sectioned by neuroanatomists, and frozen at −80° C. in liquid nitrogen vapor. All brains are sectioned and examined by neuropathologists to confirm diagnoses with clear associated neuropathology.

[0972] Disease diagnoses are taken from patient records. The panel contains sixteen brains from Alzheimer's disease (AD) patients, and twenty-nine brains from “Normal controls” who showed no evidence of dementia prior to death. The twenty-nine normal control brains are divided into two categories: Fourteen controls with no dementia and no Alzheimer's like pathology (Controls) and fifteen controls with no dementia but evidence of severe Alzheimer's like pathology, (specifically senile plaque load rated as level 3 on a scale of 0-3; 0=no evidence of plaques, 3=severe AD senile plaque load). Tissue from the temporal cotex (Broddmann Area 21) was selected for all samples from the Harvard Brain Tissue Resource Center; from the two sample from the Human Brain and Spinal Fluid Resource Center (samples 1 and 2) tissue from the inferior and superior temporal cortex was used; each sample on the panel represents a pool of inferior and superior temporal cortex from an individual patient. The temporal cortex was chosen as it shows a loss of neurons in the intermediate stages of the disease. Selection of a region which is affected in the early stages of Alzheimer's disease (e.g., hippocampus or entorhinal cortex) could potentially result in the examination of gene expression after vulnerable neurons are lost, and missing genes involved in the actual neurodegeneration process.

[0973] In the labels employed to identify tissues in the CNS_Neurodegeneration_V2.0 panel, the following abbreviations are used:
[0974] AD=Alzheimer's disease brain; patient was demented and showed AD-like pathology upon autopsy
[0975] Control=Control brains; patient not demented, showing no neuropathology
[0976] AH3=Control brains; pateint not demented but showing sever AD-like pathology
[0977] Inf & Sup Temp Ctx Pool=Pool of inferior and superior temporal cortex for a given individual

[0978] A. CG101340-01: Putative G Protein-Coupled Receptor 92

[0979] Expression of full-length physical clone CG101340-01 was assessed using the primer-probe set Gpcr41, described in Table AA. Results of the RTQ-PCR runs are shown in Tables AB and AC.

TABLE AA
Probe Name Gpcr41

| | | | Start | SEQ ID |
|---|---|---|---|---|
| Primers | Sequences | Length | Position | No |
| Forward | 5′-ggtggtgagcgtgtacatgtg-3′ | 21 | 240 | 1133 |
| Probe | TET-5′-cagcgacctgctcttcaccctctcg-3′- | 25 | 273 | 1134 |
| | TAMRA | | | |
| Reverse | 5′-gtaggagagacgaacgggca-3′ | 20 | 299 | 1135 |

[0980] TABLE AB
Panel 1.3D
Column A - Rel. Exp.(%) Gpcr41, Run 158144249

| Tissue Name | A | Tissue Name | A |
|---|---|---|---|
| Liver adenocarcinoma | 4.6 | Kidney (fetal) | 0.7 |
| Pancreas | 0.9 | Renal ca. 786-0 | 0.3 |
| Pancreatic ca. CAPAN 2 | 21.2 | Renal ca. A498 | 0.4 |
| Adrenal gland | 8.1 | Renal ca. RXF 393 | 0.7 |
| Thyroid | 13.0 | Renal ca. ACHN | 0.0 |
| Salivary gland | 6.2 | Renal ca. UO-31 | 0.0 |
| Pituitary gland | 5.5 | Renal ca. TK-10 | 0.0 |
| Brain (fetal) | 3.4 | Liver | 1.0 |
| Brain (whole) | 14.9 | Liver (fetal) | 8.4 |
| Brain (amygdala) | 39.2 | Liver ca. (hepatoblast) HepG2 | 3.6 |
| Brain (cerebellum) | 6.7 | Lung | 10.2 |
| Brain (hippocampus) | 100.0 | Lung (fetal) | 2.2 |
| Brain (substantia nigra) | 13.7 | Lung ca. (small cell) LX-1 | 21.2 |
| Brain (thalamus) | 21.0 | Lung ca. (small cell) NCI-H69 | 0.4 |
| Cerebral Cortex | 22.8 | Lung ca. (s. cell var.) SHP-77 | 0.5 |
| Spinal cord | 22.4 | Lung ca. (large cell)NCI-H460 | 0.0 |
| glio/astro U87-MG | 0.0 | Lung ca. (non-sm. cell) A549 | 1.5 |
| glio/astro U-118-MG | 0.4 | Lung ca. (non-s. cell) NCI-H23 | 0.3 |
| astrocytoma SW 1783 | 0.8 | Lung ca. (non-s. cell) HOP-62 | 3.4 |
| neuro*; met SK-N-AS | 1.0 | Lung ca. (non-s. cl) NCI-H522 | 0.0 |
| astrocytoma SF-539 | 2.9 | Lung ca. (squam.) SW 900 | 0.0 |
| astrocytoma SNB-75 | 0.5 | Lung ca. (squam.) NCI-H596 | 0.0 |
| glioma SNB-19 | 0.0 | Mammary gland | 7.2 |
| glioma U251 | 0.0 | Breast ca.* (pl. ef) MCF-7 | 0.4 |
| glioma SF-295 | 1.5 | Breast ca.* (pl. ef) | 11.8 |
| | | MDA-MB-231 | |
| Heart (Fetal) | 45.1 | Breast ca.* (pl. ef) T47D | 0.0 |
| Heart | 4.2 | Breast ca. BT-549 | 2.5 |
| Skeletal muscle (Fetal) | 36.6 | Breast ca. MDA-N | 0.5 |
| Skeletal muscle | 1.5 | Ovary | 29.5 |
| Bone marrow | 7.7 | Ovarian ca. OVCAR-3 | 0.3 |
| Thymus | 10.2 | Ovarian ca. OVCAR-4 | 0.0 |
| Spleen | 50.0 | Ovarian ca. OVCAR-5 | 12.6 |
| Lymph node | 17.9 | Ovarian ca. OVCAR-8 | 6.9 |
| Colorectal | 95.9 | Ovarian ca. IGROV-1 | 0.5 |
| Stomach | 18.6 | Ovarian ca. (ascites) SK-OV-3 | 0.4 |
| Small intestine | 25.5 | Uterus | 2.6 |
| Colon ca. SW480 | 21.9 | Placenta | 17.0 |
| Colon ca.* SW620 | 9.9 | Prostate | 1.9 |
| (SW480 met) | | | |
| Colon ca. HT29 | 1.7 | Prostate ca.* (bone met) PC-3 | 1.6 |
| Colon ca. HCT-116 | 9.9 | Testis | 15.3 |
| Colon ca. CaCo-2 | 1.0 | Melanoma Hs688(A).T | 0.0 |
| CC Well to Mod Diff | 72.7 | Melanoma* (met) Hs688(B).T | 0.0 |
| (ODO3866) | | | |
| Colon ca. HCC-2998 | 31.2 | Melanoma UACC-62 | 0.0 |
| Gastric ca. (liver met) | 51.4 | Melanoma M14 | 0.0 |
| NCI-N87 | | | |
| Bladder | 10.8 | Melanoma LOX IMVI | 1.4 |
| Trachea | 20.0 | Melanoma* (met) SK-MEL-5 | 1.2 |
| Kidney | 1.1 | Adipose | 16.7 |

[0981] TABLE AC
Panel 4D
Column A - Rel. Exp. (%) Gpcr41, Run 142878269
Column B - Rel. Exp. (%) Gpcr41, Run 144060624

| Tissue Name | A | B | Tissue Name | A | B |
|---|---|---|---|---|---|
| Secondary Th1 act | 19.6 | 72.7 | HUVEC IL-1beta | 0.0 | 0.0 |
| Secondary Th2 act | 20.2 | 76.8 | HUVEC IFN gamma | 0.0 | 1.8 |
| Secondary Tr1 act | 20.7 | 39.2 | HUVEC TNF alpha + IFN gamma | 0.0 | 0.0 |
| Secondary Th1 rest | 23.0 | 22.5 | HUVEC TNF alpha +IL4 | 0.0 | 1.3 |
| Secondary Th2 rest | 44.4 | 31.0 | HUVEC IL-11 | 0.6 | 0.2 |
| Secondary Tr1 rest | 20.9 | 18.8 | Lung Microvascular EC none | 0.7 | 1.7 |
| Primary Th1 act | 14.9 | 8.7 | Lung Microvascular EC TNF alpha + | 0.2 | 1.1 |
| | | | IL-1beta | | |
| Primary Th2 act | 33.7 | 17.4 | Microvascular Dermal EC none | 0.0 | 0.0 |
| Primary Tr1 act | 25.7 | 12.2 | Microsvasular Dermal EC TNFalpha | 0.0 | 0.0 |
| | | | + IL-1beta | | |
| Primary Th1 rest | 89.5 | 36.6 | Bronchial epithelium TNFalpha + | 25.5 | 18.4 |
| | | | IL1beta | | |
| Primary Th2 rest | 56.3 | 19.5 | Small airway epithelium none | 8.3 | 6.3 |
| Primary Tr1 rest | 64.2 | 35.8 | Small airway epithelium TNFalpha + | 71.7 | 29.9 |
| | | | IL-1beta | | |
| CD45RA CD4 | 4.6 | 18.6 | Coronery artery SMG rest | 0.0 | 0.0 |
| lymphocyte act | | | | | |
| CD45RO CD4 | 18.2 | 57.4 | Coronery artery SMC TNFalpha + | 0.0 | 0.0 |
| lymphocyte act | | | IL-1beta | | |
| CD8 lymphocyte act | 20.3 | 48.3 | Astrocytes rest | 0.2 | 0.0 |
| Secondary CD8 | 13.9 | 18.0 | Astrocytes TNFalpha + IL-1beta | 0.7 | 1.0 |
| lymphocyte rest | | | | | |
| Secondary CD8 | 17.7 | 14.2 | KU-812 (Basophil) rest | 18.3 | 34.2 |
| lymphocyte act | | | | | |
| CD4 lymphocyte none | 7.4 | 6.3 | KU-812 (Basophil) PMA/ionomycin | 68.3 | 71.2 |
| 2ry Th1/Th2/Tr1 anti- | 59.5 | 49.3 | CCD1106 (Keratinocytes) none | 17.2 | 21.9 |
| CD95 CH11 | | | | | |
| LAK cells rest | 23.5 | 10.2 | 93580 CCD1106 (Keratinocytes) | 100.0 | 43.5 |
| | | | TNFa and IFNg | | |
| LAK cells IL-2 | 30.4 | 20.4 | Liver cirrhosis | 2.7 | 2.8 |
| LAK cells IL-2 + IL-12 | 24.8 | 15.7 | Lupus kidney | 3.0 | 2.1 |
| LAK cells IL-2 + IFN | 45.1 | 16.3 | NCI-H292 none | 21.3 | 16.4 |
| gamma | | | | | |
| LAK cells IL-2 + IL-18 | 23.2 | 12.2 | NCI-H292 IL-4 | 16.2 | 15.3 |
| LAK cells PMA/ | 2.1 | 11.9 | NCI-H292 IL-9 | 21.3 | 9.5 |
| ionomycin | | | | | |
| NK Cells IL-2 rest | 31.0 | 100.0 | NCI-H292 IL-13 | 14.8 | 69.7 |
| Two Way MLR 3 day | 21.9 | 42.3 | NCI-H292 IFN gamma | 9.6 | 36.9 |
| Two Way MLR 5 day | 14.2 | 12.6 | HPAEC none | 0.3 | 2.0 |
| Two Way MLR 7 day | 14.8 | 9.6 | HPAEC TNF alpha + IL-1 beta | 0.0 | 0.5 |
| PBMC rest | 10.2 | 9.1 | Lung fibroblast none | 0.0 | 0.0 |
| PBMC PWM | 34.6 | 19.8 | Lung fibroblast TNF alpha + IL-1 | 0.0 | 0.0 |
| | | | beta | | |
| PBMC PHA-L | 45.1 | 32.1 | Lung fibroblast IL-4 | 0.5 | 0.0 |
| Ramos (B cell) none | 18.0 | 18.8 | Lung fibroblast IL-9 | 0.0 | 0.0 |
| Ramos (B cell) | 37.9 | 11.0 | Lung fibroblast IL-13 | 0.3 | 0.0 |
| ionomycin | | | | | |
| B lymphocytes PWM | 51.8 | 14.0 | Lung fibroblast IFN gamma | 0.1 | 0.6 |
| B lymphocytes CD40L | 32.3 | 20.2 | Dermal fibroblast CCD1070 rest | 0.4 | 0.0 |
| and IL-4 | | | | | |
| EOL-1 dbcAMP | 7.3 | 18.6 | Dermal fibroblast CCD1070 TNF | 30.8 | 13.8 |
| | | | alpha | | |
| EOL-1 dbcAMP | 0.2 | 2.5 | Dermal fibroblast CCD1070 IL-1 | 0.0 | 0.0 |
| PMA/ionomycin | | | beta | | |
| Dendritic cells none | 2.0 | 4.8 | Dermal fibroblast IFN gamma | 0.0 | 0.0 |
| Dendritic cells LPS | 0.4 | 0.0 | Dermal fibroblast IL-4 | 0.2 | 0.0 |
| Dendritic cells anti-CD40 | 0.3 | 0.6 | IBD Colitis 2 | 4.0 | 5.5 |
| Monocytes rest | 0.8 | 0.0 | IBD Crohn's | 2.0 | 4.5 |
| Monocytes LPS | 2.1 | 1.5 | Colon | 22.5 | 20.2 |
| Macrophages rest | 10.4 | 5.2 | Lung | 5.8 | 5.7 |
| Macrophages LPS | 0.5 | 1.8 | Thymus | 2.5 | 2.0 |
| HUVEC none | 0.0 | 0.0 | Kidney | 7.7 | 7.0 |
| HUVEC starved | 0.0 | 0.0 | | | |

[0982] Panel 1.3D Summary: Gpcr41 Expression of the CG101340-01 gene was highest in hippocampus (CT=29.1) and occured at moderate to low levels throughout the brain. This gene encodes a putative GPCR. Several neurotransmitter receptors are GPCRs, including the dopamine receptor family, the serotonin receptor family, the GABAB receptor, muscarinic acetylcholine receptors, and others; thus this GPCR represents novel neurotransmitter receptor. Targeting various neurotransmitter receptors (dopamine, serotonin) has proven to be an effective therapy in psychiatric illnesses such as schizophrenia, bipolar disorder, and depression. Furthermore, the cerebral cortex and hippocampus are regions of the brain that are known to be involved in Alzheimer's disease, seizure disorders, and in the normal process of memory formation. Therapeutic modulation of this gene or its protein product is beneficial in the treatment of one or more of these diseases, as is stimulation and/or blockade of the receptor coded for by the gene.

[0983] This gene was also moderately expressed in a number of other normal tissues including colon, ovary and spleen. Expression of this gene was higher in normal cells than in cancer cell lines and CG101340-01 expression was downregulated in ovarian and brain cancer cell lines. Expression of this gene or its protein product is useful as a marker to distinguish normal tissue from ovarian or brain tumors.

[0984] Among tissues with metabolic or endocrine function, this gene was expressed at low levels in adipose, adrenal gland, thyroid, pituitary gland, skeletal muscle, heart, and liver. Therapeutic modulation of the activity of this gene or its protein product is useful in the treatment of endocrine/metabolically related diseases, such as obesity and diabetes.

[0985] In addition, expression of the CG101340-01 gene was upregulated in fetal skeletal muscle and heart when compared to adult tissues. The overexpression of this gene in fetal tissue shows that the protein product enhances skeletal muscle or heart growth and development in the fetus and also acts in a regenerative capacity in the adult. Therapeutic modulation of this gene or its protein product is useful in the treatment of muscular dystrophies or heart disease.

[0986] Panel 4D Summary: Gpcr41 Expression of the CG101340-01 gene was upregulated in several tissues and cell types after activation, including lymphocytes, keratinocytes, basophils, small airway epithelium and T cells. The GPCR encoded by this gene functions in the inflammatory process by promoting leukocyte extravasation or initiating a signaling cascade that results in the release of immunomodulatory products such as cytokines. Antibody or small molecule therapeutics designed against the protein encoded by this gene are useful for the reduction or inhibition of inflammation due to psoriasis, delayed type hypersensitivity, asthma, or emphysema.

[0987] B. CG101396-01: Glutamate Receptor Delta-1

[0988] Expression of gene CG101396-01 was assessed using the primer-probe set Ag4211, described in Table BA. Results of the RTQ-PCR runs are shown in Tables BB, BC and BD.

TABLE BA
Probe Name Ag4211

| | | | Start | SEQ ID |
|---|---|---|---|---|
| Primers | Sequences | Length | Position | No |
| Forward | 5′-aggacagttcgaatccctatgt-3′ | 22 | 1239 | 1136 |
| Probe | TET-5′-ccagtttgaaatccttggcactacct-3′- | 26 | 1261 | 1137 |
| | TAMRA | | | |
| Reverse | 5′-gcatgtctttgccaaaagtct3′ | 21 | 1293 | 1138 |

[0989] TABLE BB
General_screening_panel_v1.4
Column A - Rel. Exp.(%) Ag4211, Run 221252466

| Tissue Name | A | Tissue Name | A |
|---|---|---|---|
| Adipose | 4.6 | Renal ca. TK-10 | 0.0 |
| Melanoma* Hs688(A).T | 2.2 | Bladder | 6.2 |
| Melanoma* Hs688(B).T | 1.8 | Gastric ca. (liver met.) NCI-N87 | 0.0 |
| Melanoma* M14 | 0.0 | Gastric ca. KATO III | 0.1 |
| Melanoma* LOXIMVI | 0.0 | Colon ca. SW-948 | 0.0 |
| Melanoma* SK-MEL-5 | 18.6 | Colon ca. SW480 | 14.2 |
| Squamous cell carcinoma | 0.2 | Colon ca.* (SW480 met) SW620 | 0.0 |
| SCC-4 | | | |
| Testis Pool | 5.2 | Colon ca. HT29 | 0.0 |
| Prostate ca.* (bone met) | 0.2 | Colon ca. HCT-116 | 19.2 |
| PC-3 | | | |
| Prostate Pool | 3.2 | Colon ca. CaCo-2 | 58.6 |
| Placenta | 6.0 | Colon cancer tissue | 2.6 |
| Uterus Pool | 6.0 | Colon ca. SW1116 | 0.0 |
| Ovarian ca. OVCAR-3 | 3.3 | Colon ca. Colo-205 | 0.0 |
| Ovarian ca. SK-OV-3 | 97.3 | Colon ca. SW-48 | 0.0 |
| Ovarian ca. OVCAR-4 | 0.1 | Colon Pool | 4.6 |
| Ovarian ca. OVCAR-5 | 10.6 | Small Intestine Pool | 6.9 |
| Ovarian ca. IGROV-1 | 16.6 | Stomach Pool | 7.2 |
| Ovarian ca. OVCAR-8 | 3.2 | Bone Marrow Pool | 7.9 |
| Ovary | 2.9 | Fetal Heart | 15.6 |
| Breast ca. MCF-7 | 0.2 | Heart Pool | 5.3 |
| Breast ca. MDA-MB-231 | 0.0 | Lymph Node Pool | 20.6 |
| Breast ca. BT 549 | 1.0 | Fetal Skeletal Muscle | 5.8 |
| Breast ca. T47D | 15.0 | Skeletal Muscle Pool | 2.5 |
| Breast ca. MDA-N | 0.1 | Spleen Pool | 0.0 |
| Breast Pool | 3.8 | Thymus Pool | 6.8 |
| Trachea | 3.3 | CNS cancer (glio/astro) | 0.1 |
| | | U87-MG | |
| Lung | 1.2 | CNS cancer (glio/astro) | 0.3 |
| | | U-118-MG | |
| Fetal Lung | 52.5 | CNS cancer (neuro; met) | 2.5 |
| | | SK-N-AS | |
| Lung ca. NCI-N417 | 1.0 | CNS cancer (astro) SF-539 | 0.0 |
| Lung ca. LX-1 | 0.2 | CNS cancer (astro) SNB-75 | 9.7 |
| Lung ca. NCI-H146 | 14.3 | CNS cancer (glio) SNB-19 | 17.6 |
| Lung ca. SHP-77 | 0.0 | CNS cancer (glio) SF-295 | 3.1 |
| Lung ca. A549 | 2.0 | Brain (Amygdala) Pool | 63.3 |
| Lung ca. NCI-H526 | 0.5 | Brain (cerebellum) | 60.7 |
| Lung ca. NCI-H23 | 21.8 | Brain (fetal) | 100.0 |
| Lung ca. NCI-H460 | 1.0 | Brain (Hippocampus) Pool | 52.1 |
| Lung ca. HOP-62 | 0.0 | Cerebral Cortex Pool | 83.5 |
| Lung ca. NCI-H522 | 6.0 | Brain (Substantia nigra) Pool | 74.7 |
| Liver | 0.1 | Brain (Thalamus) Pool | 90.8 |
| Fetal Liver | 0.6 | Brain (whole) | 77.9 |
| Liver ca. HepG2 | 0.0 | Spinal Cord Pool | 64.6 |
| Kidney Pool | 21.5 | Adrenal Gland | 13.7 |
| Fetal Kidney | 4.3 | Pituitary gland Pool | 1.5 |
| Renal ca. 786-0 | 0.0 | Salivary Gland | 1.0 |
| Renal ca. A498 | 14.7 | Thyroid (female) | 26.1 |
| Renal ca. ACHN | 0.1 | Pancreatic ca. CAPAN2 | 26.1 |
| Renal ca. UO-31 | 0.0 | Pancreas Pool | 9.9 |

[0990] TABLE BC
Panel 4.1D
Column A - Rel. Exp.(%) Ag4211, Run 174261196

| Tissue Name | A | Tissue Name | A |
|---|---|---|---|
| Secondary Th1 act | 0.0 | HUVEC IL-1 beta | 0.0 |
| Secondary Th2 act | 1.1 | HUVEC IFN gamma | 0.0 |
| Secondary Tr1 act | 0.0 | HUVEC TNF alpha + IFN gamma | 0.0 |
| Secondary Th1 rest | 0.0 | HUVEC TNF alpha + IL4 | 2.5 |
| Secondary Th2 rest | 0.0 | HUVEC IL-11 | 0.0 |
| Secondary Tr1 rest | 0.0 | Lung Microvascular EC none | 58.6 |
| Primary Th1 act | 2.5 | Lung Microvascular EC TNFalpha + IL- | 41.2 |
| | | 1 beta | |
| Primary Th2 act | 0.0 | Microvascular Dermal EC none | 8.1 |
| Primary Tr1 act | 0.0 | Microsvasular Dermal EC TNFalpha + IL- | 0.0 |
| | | 1 beta | |
| Primary Th1 rest | 0.0 | Bronchial epithelium TNFalpha + IL1 beta | 0.0 |
| Primary Th2 rest | 0.0 | Small airway epithelium none | 1.7 |
| Primary Tr1 rest | 0.0 | Small airway epithelium TNFalpha + IL- | 0.0 |
| | | 1 beta | |
| CD45RA CD4 lymphocyte act | 0.0 | Coronery artery SMC rest | 0.0 |
| CD45RO CD4 lymphocyte act | 0.0 | Coronery artery SMC TNFalpha + IL-1 beta | 0.0 |
| CD8 lymphocyte act | 0.0 | Astrocytes rest | 9.2 |
| Secondary CD8 lymphocyte rest | 0.0 | Astrocytes TNFalpha + IL-1 beta | 6.6 |
| Secondary CD8 lymphocyte act | 0.0 | KU-812 (Basophil) rest | 0.0 |
| CD4 lymphocyte none | 0.0 | KU-812 (Basophil) PMA/ionomycin | 0.0 |
| 2ry Th1/Th2/Tr1 anti-CD95 | 0.0 | CCD1106 (Keratinocytes) none | 1.3 |
| CH11 | | | |
| LAK cells rest | 0.0 | CCD1106 (Keratinocytes) TNFalpha + IL- | 0.0 |
| | | 1 beta | |
| LAK cells IL-2 | 0.0 | Liver cirrhosis | 3.2 |
| LAK cells IL-2 + IL-12 | 1.4 | NCI-H292 none | 0.0 |
| LAK cells IL-2 + IFN gamma | 1.4 | NCI-H292 IL-4 | 0.0 |
| LAK cells IL-2 + IL-18 | 0.0 | NCI-H292 IL-9 | 0.0 |
| LAK cells PMA/ionomycin | 0.0 | NCI-H292 IL-13 | 2.7 |
| NK Cells IL-2 rest | 0.0 | NCI-H292 IFN gamma | 0.0 |
| Two Way MLR 3 day | 0.0 | HPAEC none | 0.0 |
| Two Way MLR 5 day | 0.0 | HPAEC TNF alpha + IL-1 beta | 2.0 |
| Two Way MLR 7 day | 0.0 | Lung fibroblast none | 4.2 |
| PBMC rest | 0.0 | Lung fibroblast TNF alpha + IL-1 beta | 0.0 |
| PBMC PWM | 0.0 | Lung fibroblast IL-4 | 1.6 |
| PBMC PHA-L | 0.0 | Lung fibroblast IL-9 | 4.6 |
| Ramos (B cell) none | 29.1 | Lung fibroblast IL-13 | 2.5 |
| Ramos (B cell) ionomycin | 14.4 | Lung fibroblast IFN gamma | 1.4 |
| B lymphocytes PWM | 0.0 | Dermal fibroblast CCD1070 rest | 5.3 |
| B lymphocytes CD40L and IL-4 | 0.0 | Dermal fibroblast CCD1070 TNF alpha | 2.7 |
| EOL-1 dbcAMP | 5.0 | Dermal fibroblast CCD1070 IL-1 beta | 0.0 |
| EOL-1 dbcAMP | 4.2 | Dermal fibroblast IFN gamma | 1.3 |
| PMA/ionomycin | | | |
| Dendritic cells none | 0.0 | Dermal fibroblast IL-4 | 0.0 |
| Dendritic cells LPS | 0.0 | Dermal Fibroblasts rest | 4.4 |
| Dendritic cells anti-CD40 | 1.0 | Neutrophils TNFa + LPS | 0.0 |
| Monocytes rest | 0.0 | Neutrophils rest | 2.6 |
| Monocytes LPS | 0.0 | Colon | 9.5 |
| Macrophages rest | 0.8 | Lung | 77.4 |
| Macrophages LPS | 0.0 | Thymus | 18.7 |
| HUVEC none | 0.0 | Kidney | 100.0 |
| HUVEC starved | 0.0 | | |

[0991] TABLE BD
general oncology screening panel_v_2.4
Column A - Rel. Exp.(%) Ag4211, Run 268624930

| Tissue Name | A | Tissue Name | A |
|---|---|---|---|
| Colon cancer 1 | 21.0 | Bladder NAT 2 | 0.0 |
| Colon NAT 1 | 7.5 | Bladder NAT 3 | 0.0 |
| Colon cancer 2 | 4.2 | Bladder NAT 4 | 4.9 |
| Colon NAT 2 | 6.9 | Prostate adenocarcinoma 1 | 40.1 |
| Colon cancer 3 | 8.2 | Prostate adenocarcinoma 2 | 6.1 |
| Colon NAT 3 | 17.0 | Prostate adenocarcinoma 3 | 13.7 |
| Colon malignant cancer 4 | 20.9 | Prostate adenocarcinoma 4 | 5.7 |
| Colon NAT 4 | 6.1 | Prostate NAT 5 | 0.7 |
| Lung cancer 1 | 5.3 | Prostate adenocarcinoma 6 | 9.2 |
| Lung NAT 1 | 4.1 | Prostate adenocarcinoma 7 | 5.6 |
| Lung cancer 2 | 20.7 | Prostate adenocarcinoma 8 | 0.8 |
| Lung NAT 2 | 6.9 | Prostate adenocarcinoma 9 | 18.3 |
| Squamous cell carcinoma 3 | 9.9 | Prostate NAT 10 | 1.6 |
| Lung NAT 3 | 0.0 | Kidney cancer 1 | 27.2 |
| Metastatic melanoma 1 | 46.7 | Kidney NAT 1 | 20.9 |
| Melanoma 2 | 2.4 | Kidney cancer 2 | 100.0 |
| Melanoma 3 | 8.1 | Kidney NAT 2 | 9.8 |
| Metastatic melanoma 4 | 37.9 | Kidney cancer 3 | 12.1 |
| Metastatic melanoma 5 | 94.0 | Kidney NAT 3 | 1.4 |
| Bladder cancer 1 | 0.7 | Kidney cancer 4 | 21.6 |
| Bladder NAT 1 | 0.0 | Kidney NAT 4 | 7.5 |
| Bladder cancer 2 | 0.0 | | |

[0992] General_screening_panel_v1.4 Summary: Ag4211 Highest expression of the CG101396-01 gene was seen in the fetal brain (CT=29). This gene was expressed at moderate levels in all regions of the CNS examined. This gene encodes a protein that is homologous to the delta2 glutamate receptor, which is expressed in the cerebellum. This receptor is involved in motor learning and coordination, and synapse plasticity. Based on the prominent expression of this gene product in the CNS, therapeutic modulation of the expression or function of this gene product is useful for the treatment of CNS disorders involving memory deficits, including Alzheimer's disease and aging as well as for motor impairments and learning following stroke-related brain damage.

[0993] Among tissues with metabolic function, this gene was expressed at moderate to low levels in pituitary, adipose, adrenal gland, pancreas, thyroid, and adult and fetal skeletal muscle and heart. This widespread expression among these tissues shows that this gene product plays a role in normal neuroendocrine and metabolic function and that disregulated expression of this gene contributes to neuroendocrine disorders or metabolic diseases, such as obesity and diabetes.

[0994] In addition, moderate levels of expression were seen in a cluster of samples derived from ovarian, colon, melanoma and lung cancer cell lines. Thus, expression of this gene is useful as a marker to detect the presence of these cancers. Therapeutic modulation of the expression or function of this gene or gene product is effective in the treatment of ovarian, colon, melanoma and lung cancers.

[0995] This gene was also expressed at much higher levels in fetal lung tissue (CT=30) when compared to expression in the adult counterpart (CT=35.5). Expression of this gene is useful as a marker to differentiate between the fetal and adult source of this tissue.

[0996] Panel 4.1D Summary: Ag4211 Highest expression of this gene was seen in the kidney (CT=30.8). Moderate levels of expression were also seen in the lung and untreated lung microvascular endothelial cells. Low but significant levels of expression were seen in untreated and treated astrocytes and Ramos B cells and activated lung microvascular endothelial cells. Expression in astrocytes was in agreement with the prominent CNS expression seen in Panel 1.4. This expression demonstrates that this gene product is involved in the homeostasis of the lung and kidney. Therapeutic modulation of the expression of this protein is useful for restoring or maintaining function in these organs during inflammation.

[0997] general oncology screening panel_v_{—}2.4 Summary: Ag4211 Expression of the CG101396-01 gene was detected in a kidney cancer sample (CT=31). Moderate to low expression of this gene was detected in melanoma and prostate cancers. Expression of this gene or its protein product is useful as a marker to detect the presence of these cancers. Therapeutic modulation of the expression or function of this gene product is effective in the treatment of melanoma, kidney and lung cancers.

[0998] C. CG102348-01: C1r-Like Proteinase Precursor

[0999] Expression of gene CG102348-01 was assessed using the primer-probe set Ag650, described in Table CA. Results of the RTQ-PCR runs are shown in Table CB.

TABLE GA
Probe Name Ag650

| | | | Start | SEQ ID |
|---|---|---|---|---|
| Primers | Sequences | Length | Position | No |
| Forward | 5′-gttttcattgcattgcatttct-3′ | 22 | 1883 | 1139 |
| Probe | TET-5′-cattcctaagaccctttagttgaccttca- | 29 | 1909 | 1140 |
| | 3′-TAMRA | | | |
| Reverse | 5′-atcttggagctgcagaatagct-3′ | 22 | 1946 | 1141 |

[1000] TABLE CB
Panel 1.1
Column A - Rel. Exp.(%) Ag650, Run 109485832

| Tissue Name | A | Tissue Name | A |
|---|---|---|---|
| Adrenal gland | 39.2 | Renal ca. UO-31 | 8.8 |
| Bladder | 42.6 | Renal ca. RXF 393 | 2.2 |
| Brain (amygdala) | 0.7 | Liver | 76.8 |
| Brain (cerebellum) | 2.1 | Liver (fetal) | 17.4 |
| Brain (hippocampus) | 2.8 | Liver ca. (hepatoblast) HepG2 | 4.0 |
| Brain (substantia nigra) | 6.0 | Lung | 9.0 |
| Brain (thalamus) | 2.3 | Lung (fetal) | 19.9 |
| Cerebral Cortex | 4.0 | Lung ca. (non-s. cell) HOP-62 | 100.0 |
| Brain (fetal) | 2.9 | Lung ca. (large cell) | 11.3 |
| | | NCI-H460 | |
| Brain (whole) | 2.4 | Lung ca. (non-s. cell) | 23.0 |
| | | NCI-H23 | |
| glio/astro U-118-MG | 5.4 | Lung ca. (non-s. cl) | 56.3 |
| | | NCI-H522 | |
| astrocytoma SF-539 | 11.6 | Lung ca. (non-sm. cell) A549 | 22.5 |
| astrocytoma SNB-75 | 2.9 | Lung ca. (s. cell var.) SHP-77 | 0.5 |
| astrocytoma SW1783 | 1.5 | Lung ca. (small cell) LX-1 | 14.3 |
| glioma U251 | 6.9 | Lung ca. (small cell) | 10.3 |
| | | NCI-H69 | |
| glioma SF-295 | 19.5 | Lung ca. (squam.) SW 900 | 10.0 |
| glioma SNB-19 | 5.4 | Lung ca. (squam.) NCI-H596 | 5.5 |
| glio/astro U87-MG | 6.3 | Lymph node | 11.1 |
| neuro*; met SK-N-AS | 11.9 | Spleen | 6.6 |
| Mammary gland | 18.0 | Thymus | 2.8 |
| Breast ca. BT-549 | 1.4 | Ovary | 13.6 |
| Breast ca. MDA-N | 6.6 | Ovarian ca. IGROV-1 | 5.5 |
| Breast ca.* (pl. ef) T47D | 3.5 | Ovarian ca. OVCAR-3 | 12.7 |
| Breast ca.* (pl. ef) MCF-7 | 0.0 | Ovarian ca. OVCAR-4 | 3.2 |
| Breast ca.* (pl. ef) | 0.9 | Ovarian ca. OVCAR-5 | 19.3 |
| MDA-MB-231 | | | |
| Small intestine | 17.2 | Ovarian ca. OVCAR-8 | 8.0 |
| Colorectal | 3.3 | Ovarian ca. (ascites) | 6.3 |
| | | SK-OV-3 | |
| Colon ca. HT29 | 6.6 | Pancreas | 72.7 |
| Colon ca. CaCo-2 | 14.8 | Pancreatic ca. CAPAN 2 | 2.8 |
| Colon ca. HCT-15 | 4.7 | Pituitary gland | 14.7 |
| Colon ca. HCT-116 | 2.6 | Placenta | 5.7 |
| Colon ca. HCC-2998 | 11.7 | Prostate | 12.1 |
| Colon ca. SW480 | 4.3 | Prostate ca.* (bone met) PC-3 | 5.7 |
| Colon ca.* SW620 | 6.4 | Salivary gland | 49.3 |
| (SW480 met) | | | |
| Stomach | 10.4 | Trachea | 12.1 |
| Gastric ca. (liver met) | 27.7 | Spinal cord | 5.1 |
| NCI-N87 | | | |
| Heart | 17.4 | Testis | 2.2 |
| Skeletal muscle (Fetal) | 5.2 | Thyroid | 11.5 |
| Skeletal muscle | 11.3 | Uterus | 15.6 |
| Endothelial cells | 12.1 | Melanoma M14 | 2.1 |
| Heart (Fetal) | 1.2 | Melanoma LOX IMVI | 0.3 |
| Kidney | 20.9 | Melanoma UACC-62 | 4.4 |
| Kidney (fetal) | 11.6 | Melanoma SK-MEL-28 | 9.3 |
| Renal ca. 786-0 | 10.8 | Melanoma* (met) SK-MEL-5 | 1.6 |
| Renal ca. A498 | 9.0 | Melanoma Hs688(A).T | 1.6 |
| Renal ca. ACHN | 8.1 | Melanoma* (met) Hs688(B).T | 4.6 |
| Renal ca. TK-10 | 11.5 | | |

[1001] Panel 1.1 Summary: Ag650 Highest expression of this gene was detected in a lung cancer HOP-62 cell line (CT=22). High levels of expression of this gene were also seen in cluster of cancer cell lines derived from pancreatic, gastric, colon, lung, liver, renal, breast, ovarian, prostate, melanoma and brain cancers. Epression of this gene is useful as a marker to detect the presence of these cancers. Therapeutic modulation of the expression or function of this gene is effective in the treatment of pancreatic, gastric, colon, lung, liver, renal, breast, ovarian, prostate, squamous cell carcinoma, melanoma and brain cancers.

[1002] Among tissues with metabolic or endocrine function, this gene was expressed at high levels in pancreas, adrenal gland, thyroid, pituitary gland, skeletal muscle, heart, liver and the gastrointestinal tract. Therapeutic modulation of the activity of this gene or its protein product is useful in the treatment of endocrine/metabolically related diseases, such as obesity and diabetes.

[1003] In addition, this gene was expressed at high levels in all regions of the central nervous system examined, including amygdala, hippocampus, substantia nigra, thalamus, cerebellum, cerebral cortex, and spinal cord. Therapeutic modulation of this gene product is useful in the treatment of central nervous system disorders such as Alzheimer's disease, Parkinson's disease, epilepsy, multiple sclerosis, schizophrenia and depression.

[1004] D. CG125860-02: Transmembrane Protease, Serine 5

[1005] Expression of gene CG125860-02 was assessed using the primer-probe set Ag1674, described in Table DA. Results of the RTQ-PCR runs are shown in Tables DC, DD, DE and DF.

TABLE DA
Probe Name Ag1674

| | | | Start | SEQ ID |
|---|---|---|---|---|
| Primers | Sequences | Length | Position | No |
| Forward | 5′-ctcactcaccacaagggagtaa-3′ | 22 | 612 | 1142 |
| Probe | TET-5′-tgacatcaaactcaacagttcccagga- | 27 | 641 | 1143 |
| | 3′-TAMRA | | | |
| Reverse | 5′-gtctaggagagagctgagcaaa-3′ | 22 | 669 | 1144 |

[1006] TABLE DB
Ardais Prostate 1.0
Column A - Rel. Exp.(%) Ag1674, Run 370302285

| Tissue Name | A |
|---|---|
| 151135 Prostate NAT(B87) | 31.2 |
| 151143 Prostate NAT(B8A) | 27.7 |
| 153669 Prostate NAT(D5E) | 26.4 |
| 153677 Prostate NAT(D66) | 12.8 |
| 153685 Prostate NAT(D6E) | 14.7 |
| 145905 Prostate NAT(A0C) | 4.0 |
| 153670 Prostate NAT(D5F) | 18.0 |
| 153678 Prostate NAT(D67) | 24.0 |
| 153686 Prostate NAT(D6F) | 6.1 |
| 145906 Prostate NAT(A09) | 28.7 |
| 151129 Prostate NAT(B93) | 44.8 |
| 151137 Prostate NAT(B86) | 42.3 |
| 153671 Prostate NAT(D60) | 18.0 |
| 151145 Prostate NAT(B91) | 30.8 |
| 153679 Prostate NAT(D68) | 12.9 |
| 153687 Prostate NAT(D70) | 31.4 |
| 153672 Prostate NAT(D61) | 23.8 |
| 153680 Prostate NAT(D69) | 35.1 |
| 151131 Prostate NAT(B85) | 7.4 |
| 153673 Prostate NAT(D62) | 12.0 |
| 153681 Prostate NAT(D6A) | 11.5 |
| 145910 Prostate NAT(9C3) | 27.4 |
| 153674 Prostate NAT(D63) | 28.7 |
| 153682 Prostate NAT(D6B) | 14.4 |
| 151133 Prostate NAT(B94) | 31.9 |
| 153675 Prostate NAT(D64) | 20.6 |
| 153683 Prostate NAT(D6C) | 31.9 |
| 153668 Prostate NAT(D5D) | 39.5 |
| 153676 Prostate NAT(D65) | 18.7 |
| 153684 Prostate NAT(D6D) | 30.4 |
| 145904 Prostate cancer(9E2) | 40.3 |
| 149776 Prostate cancer(AD5) | 100.0 |
| 153653 Prostate cancer(D4E) | 26.1 |
| 153661 Prostate cancer(D56) | 48.3 |
| 151128 Prostate cancer(B8C) | 47.3 |
| 151136 Prostate cancer(B8B) | 86.5 |
| 151144 Prostate cancer(B8F) | 25.3 |
| 153654 Prostate cancer(D4F) | 45.7 |
| 153662 Prostate cancer(D57) | 16.0 |
| 153655 Prostate cancer(D50) | 44.8 |
| 145907 Prostate cancer(A0A) | 18.3 |
| 153663 Prostate cancer(D58) | 20.7 |
| 151130 Prostate cancer(B90) | 54.7 |
| 153648 Prostate cancer(D49) | 24.7 |
| 153656 Prostate cancer(D51) | 11.1 |
| 153664 Prostate cancer(D59) | 26.2 |
| 155799 Prostate cancer(EA8) | 14.8 |
| 145909 Prostate cancer(9E7) | 18.6 |
| 153649 Prostate cancer(D4A) | 16.8 |
| 153657 Prostate cancer(D52) | 28.7 |
| 153665 Prostate cancer(D5A) | 25.7 |
| 151132 Prostate cancer(B88) | 60.7 |
| 153650 Prostate cancer(D4B) | 14.9 |
| 153658 Prostate cancer(D53) | 23.8 |
| 153666 Prostate cancer(D5B) | 22.5 |
| 153651 Prostate cancer(D4C) | 22.4 |
| 153659 Prostate cancer(D54) | 41.8 |
| 153667 Prostate cancer(D5C) | 43.5 |
| 151134 Prostate cancer(B92) | 51.1 |
| 151142 Prostate cancer(B89) | 33.7 |
| 153652 Prostate cancer(D4D) | 36.3 |
| 153660 Prostate cancer(D55) | 18.3 |
| 149773 Prostate NAT(AD8) | 0.0 |
| 149774 Prostate cancer(AD7) | 34.9 |
| 151139 Prostate NAT(B8E) | 35.8 |
| 151138 Prostate cancer(B8D) | 30.4 |
| 115141 Prostate NAT(B96) | 24.5 |
| 151140 Prostate cancer(B95) | 24.0 |

[1007] TABLE DC
Panel 1.3D
Column A - Rel. Exp.(%) Ag1674, Run 158189117

| Tissue Name | A |
|---|---|
| Liver adenocarcinoma | 2.7 |
| Pancreas | 0.7 |
| Pancreatic ca. CAPAN 2 | 0.4 |
| Adrenal gland | 1.3 |
| Thyroid | 0.2 |
| Salivary gland | 5.4 |
| Pituitary gland | 3.4 |
| Brain (fetal) | 3.4 |
| Brain (whole) | 7.1 |
| Brain (amygdala) | 28.1 |
| Brain (cerebellum) | 3.6 |
| Brain (hippocampus) | 100.0 |
| Brain (substantia nigra) | 6.9 |
| Brain (thalamus) | 20.0 |
| Cerebral Cortex | 9.7 |
| Spinal cord | 21.9 |
| glio/astro U87-MG | 0.6 |
| glio/astro U-118-MG | 4.1 |
| astrocytoma SW1783 | 0.8 |
| neuro*; met SK-N-AS | 3.6 |
| astrocytoma SF-539 | 1.6 |
| astrocytoma SNB-75 | 3.1 |
| glioma SNB-19 | 19.6 |
| glioma U251 | 1.9 |
| glioma SF-295 | 1.9 |
| Heart (Fetal) | 0.7 |
| Heart | 0.4 |
| Skeletal muscle (Fetal) | 40.3 |
| Skeletal muscle | 0.8 |
| Bone marrow | 0.7 |
| Thymus | 1.4 |
| Spleen | 2.4 |
| Lymph node | 0.9 |
| Colorectal | 1.0 |
| Stomach | 1.8 |
| Small intestine | 1.6 |
| Colon ca. SW480 | 0.6 |
| Colon ca.* SW620 (SW480 met) | 11.8 |
| Colon ca. HT29 | 0.4 |
| Colon ca. HCT-116 | 1.7 |
| Colon ca. CaCo-2 | 1.3 |
| CC Well to Mod Diff (ODO3866) | 1.6 |
| Colon ca. HCC-2998 | 2.1 |
| Gastric ca. (liver met) NCI-N87 | 1.7 |
| Bladder | 0.5 |
| Trachea | 7.4 |
| Kidney | 0.4 |
| Kidney (fetal) | 1.6 |
| Renal ca. 786-0 | 0.4 |
| Renal ca. A498 | 2.6 |
| Renal ca. RXF 393 | 0.3 |
| Renal ca. ACHN | 0.0 |
| Renal ca. UO-31 | 0.3 |
| Renal ca. TK-10 | 0.2 |
| Liver | 0.1 |
| Liver (fetal) | 0.8 |
| Liver ca. (hepatoblast) HepG2 | 1.1 |
| Lung | 2.9 |
| Lung (fetal) | 3.1 |
| Lung ca. (small cell) LX-1 | 5.2 |
| Lung ca. (small cell) NCI-H69 | 4.5 |
| Lung ca. (s. cell var.) SHP-77 | 0.7 |
| Lung ca. (large cell)NCI-H460 | 0.3 |
| Lung ca. (non-sm. cell) A549 | 0.9 |
| Lung ca. (non-s. cell) NCI-H23 | 0.8 |
| Lung ca. (non-s. cell) HOP-62 | 0.7 |
| Lung ca. (non-s. cl) NCI-H522 | 0.2 |
| Lung ca. (squam.) SW 900 | 0.4 |
| Lung ca. (squam.) NCI-H596 | 0.0 |
| Mammary gland | 2.9 |
| Breast ca.* (pl. ef) MCF-7 | 0.9 |
| Breast ca.* (pl. ef) MDA-MB-231 | 2.8 |
| Breast ca.* (pl. ef) T47D | 0.9 |
| Breast ca. BT-549 | 4.5 |
| Breast ca. MDA-N | 9.7 |
| Ovary | 0.5 |
| Ovarian ca. OVCAR-3 | 0.3 |
| Ovarian ca. OVCAR-4 | 1.0 |
| Ovarian ca. OVCAR-5 | 0.9 |
| Ovarian ca. OVCAR-8 | 3.4 |
| Ovarian ca. IGROV-l | 0.7 |
| Ovarian ca. (ascites) SK-OV-3 | 3.2 |
| Uterus | 1.3 |
| Placenta | 0.2 |
| Prostate | 0.9 |
| Prostate ca.* (bone met) PC-3 | 0.5 |
| Testis | 6.2 |
| Melanoma Hs688(A).T | 0.0 |
| Melanoma* (met) Hs688(B).T | 0.0 |
| Melanoma UACC-62 | 2.8 |
| Melanoma M14 | 0.7 |
| Melanoma LOX IMVI | 0.4 |
| Melanoma* (met) SK-MEL-5 | 0.4 |
| Adipose | 0.1 |

[1008] TABLE DD
Panel 2D
Column A - Rel. Exp.(%) Ag1674, Run 158191134

| Tissue Name | A | Tissue Name | A |
|---|---|---|---|
| Normal Colon | 7.8 | Kidney Margin 8120608 | 0.3 |
| CC Well to Mod Diff (ODO3866) | 1.9 | Kidney Cancer 8120613 | 5.4 |
| CC Margin (ODO3866) | 1.1 | Kidney Margin 8120614 | 1.6 |
| CC Gr.2 rectosigmoid (ODO3868) | 2.9 | Kidney Cancer 9010320 | 3.1 |
| CC Margin (ODO3868) | 0.4 | Kidney Margin 9010321 | 4.2 |
| CC Mod Diff (ODO3920) | 46.7 | Normal Uterus | 1.4 |
| CC Margin (ODO3920) | 2.7 | Uterine Cancer 064011 | 13.3 |
| CC Gr.2 ascend colon (ODO3921) | 24.8 | Normal Thyroid | 1.9 |
| CC Margin (ODO3921) | 1.2 | Thyroid Cancer | 1.0 |
| CC from Partial Hepatectomy | 10.0 | Thyroid Cancer A302152 | 1.3 |
| (ODO4309) Mets | | | |
| Liver Margin (ODO4309) | 2.4 | Thyroid Margin A302153 | 4.8 |
| Colon mets to lung (OD04451-01) | 50.3 | Normal Breast | 10.4 |
| Lung Margin (OD04451-02) | 2.1 | Breast Cancer | 8.4 |
| Normal Prostate 6546-1 | 1.0 | Breast Cancer (OD04590-01) | 6.0 |
| Prostate Cancer (OD04410) | 2.3 | Breast Cancer Mets (0D04590-03) | 6.2 |
| Prostate Margin (OD04410) | 3.3 | Breast Cancer Metastasis | 20.9 |
| Prostate Cancer (OD04720-01) | 11.4 | Breast Cancer | 4.7 |
| Prostate Margin (OD04720-02) | 6.5 | Breast Cancer | 6.2 |
| Normal Lung | 6.0 | Breast Cancer 9100266 | 3.7 |
| Lung Met to Muscle (ODO4286) | 0.7 | Breast Margin 9100265 | 3.3 |
| Muscle Margin (ODO4286) | 6.4 | Breast Cancer A209073 | 5.7 |
| Lung Malignant Cancer (OD03126) | 3.1 | Breast Margin A209073 | 6.7 |
| Lung Margin (OD03126) | 3.3 | Normal Liver | 1.3 |
| Lung Cancer (OD04404) | 1.5 | Liver Cancer | 3.1 |
| Lung Margin (OD04404) | 3.2 | Liver Cancer 1025 | 1.5 |
| Lung Cancer (OD04565) | 1.1 | Liver Cancer 1026 | 0.8 |
| Lung Margin (OD04565) | 2.3 | Liver Cancer 6004-T | 0.4 |
| Lung Cancer (OD04237-01) | 100.0 | Liver Tissue 6004-N | 2.3 |
| Lung Margin (OD04237-02) | 2.9 | Liver Cancer 6005-T | 0.0 |
| Ocular Mel Met to Liver (ODO4310) | 7.9 | Liver Tissue 6005-N | 0.3 |
| Liver Margin (OD04310) | 0.4 | Normal Bladder | 5.4 |
| Melanoma Metastasis | 47.3 | Bladder Cancer | 5.0 |
| Lung Margin (OD04321) | 3.5 | Bladder Cancer | 2.0 |
| Normal Kidney | 10.2 | Bladder Cancer (OD04718-01) | 1.7 |
| Kidney Ca, Nuclear grade 2 (OD04338) | 4.7 | Bladder Normal Adjacent | 2.4 |
| | | (OD04718-03) | |
| Kidney Margin (OD04338) | 4.9 | Normal Ovary | 0.4 |
| Kidney Ca Nuclear grade 1/2 (OD04339) | 3.5 | Ovarian Cancer | 5.6 |
| Kidney Margin (OD04339) | 1.6 | Ovarian Cancer (OD04768-07) | 2.8 |
| Kidney Ca, Clear cell type (OD04340) | 4.2 | Ovary Margin (OD04768-08) | 2.1 |
| Kidney Margin (OD04340) | 5.0 | Normal Stomach | 3.2 |
| Kidney Ca, Nuclear grade 3 (OD04348) | 2.4 | Gastric Cancer 9060358 | 2.6 |
| Kidney Margin (OD04348) | 3.2 | Stomach Margin 9060359 | 2.4 |
| Kidney Cancer (OD04622-01) | 1.4 | Gastric Cancer 9060395 | 0.5 |
| Kidney Margin (OD04622-03) | 0.7 | Stomach Margin 9060394 | 1.3 |
| Kidney Cancer (OD04450-01) | 0.2 | Gastric Cancer 9060397 | 3.0 |
| Kidney Margin (OD04450-03) | 2.0 | Stomach Margin 9060396 | 0.0 |
| Kidney Cancer 8120607 | 0.4 | Gastric Cancer 064005 | 6.6 |

[1009] TABLE DE
Panel 4D
Column A - Rel. Exp.(%) Ag1674, Run 158191436

| Tissue Name | A | Tissue Name | A |
|---|---|---|---|
| Secondary Th1 act | 18.4 | HUVEC IL-1 beta | 4.2 |
| Secondary Th2 act | 22.7 | HUVEC IFN gamma | 34.2 |
| Secondary Tr1 act | 33.2 | HUVEC TNF alpha + IFN gamma | 22.1 |
| Secondary Th1 rest | 10.5 | HUVEC TNF alpha + IL4 | 14.9 |
| Secondary Th2 rest | 6.9 | HUVEC IL-11 | 6.8 |
| Secondary Tr1 rest | 24.8 | Lung Microvascular EC none | 26.2 |
| Primary Th1 act | 28.1 | Lung Microvascular EC TNFalpha + IL- | 22.7 |
| | | 1 beta | |
| Primary Th2 act | 21.6 | Microvascular Dermal EC none | 33.7 |
| Primary Tr1 act | 29.5 | Microsvasular Dermal EC TNFalpha + IL- | 21.3 |
| | | 1 beta | |
| Primary Th1 rest | 77.4 | Bronchial epithelium TNFalpha + IL1 beta | 31.4 |
| Primary Th2 rest | 31.9 | Small airway epithelium none | 5.9 |
| Primary Tr1 rest | 22.2 | Small airway epithelium TNFalpha + IL- | 40.3 |
| | | 1 beta | |
| CD45RA CD4 lymphocyte act | 22.4 | Coronery artery SMC rest | 10.5 |
| CD45RO CD4 lymphocyte act | 57.8 | Coronery artery SMC TNFalpha + IL-1 beta | 5.4 |
| CD8 lymphocyte act | 20.2 | Astrocytes rest | 22.1 |
| Secondary CD8 lymphocyte rest | 31.2 | Astrocytes TNFalpha + IL-1 beta | 6.9 |
| Secondary CD8 lymphocyte act | 10.7 | KU-812 (Basophil) rest | 48.3 |
| CD4 lymphocyte none | 17.0 | KU-812 (Basophil) PMA/ionomycin | 79.6 |
| 2ry Th1/Th2/Tr1 anti-CD95 | 40.6 | CCD1106 (Keratinocytes) none | 14.7 |
| CH11 | | | |
| LAK cells rest | 26.1 | CCD1106 (Keratinocytes) TNFalpha + IL- | 16.8 |
| | | 1 beta | |
| LAK cells IL-2 | 22.2 | Liver cirrhosis | 20.6 |
| LAK cells IL-2 + IL-12 | 17.1 | Lupus kidney | 4.1 |
| LAK cells IL-2 + IFN gamma | 16.0 | NCI-H292 none | 75.3 |
| LAK cells IL-2 + IL-18 | 23.5 | NCI-H292 IL-4 | 70.2 |
| LAK cells PMA/ionomycin | 7.2 | NCI-H292 IL-9 | 27.9 |
| NK Cells IL-2 rest | 19.9 | NCI-H292 IL-13 | 40.3 |
| Two Way MLR 3 day | 35.1 | NCI-H292 IFN gamma | 33.7 |
| Two Way MLR 5 day | 5.8 | HPAEC none | 12.1 |
| Two Way MLR 7 day | 11.0 | HPAEC TNF alpha + IL-1 beta | 19.9 |
| PBMC rest | 10.7 | Lung fibroblast none | 9.3 |
| PBMC PWM | 57.4 | Lung fibroblast TNF alpha + IL-1 beta | 15.8 |
| PBMC PHA-L | 18.3 | Lung fibroblast IL-4 | 20.3 |
| Ramos (B cell) none | 14.4 | Lung fibroblast IL-9 | 14.8 |
| Ramos (B cell) ionomycin | 11.9 | Lung fibroblast IL-13 | 18.3 |
| B lymphocytes PWM | 35.4 | Lung fibroblast IFN gamma | 16.0 |
| B lymphocytes CD40L and IL-4 | 29.3 | Dermal fibroblast CCD1070 rest | 21.0 |
| EOL-1 dbcAMP | 39.8 | Dermal fibroblast CCD1070 TNF alpha | 38.7 |
| EOL-1 dbcAMP | 39.0 | Dermal fibroblast CCD1070 IL-1 beta | 9.3 |
| PMA/ionomycin | | | |
| Dendritic cells none | 6.3 | Dermal fibroblast IFN gamma | 17.4 |
| Dendritic cells LPS | 7.4 | Dermal fibroblast IL-4 | 35.4 |
| Dendritic cells anti-CD40 | 6.8 | IBD Colitis 2 | 9.2 |
| Monocytes rest | 13.9 | IBD Crohn's | 1.2 |
| Monocytes LPS | 8.4 | Colon | 35.4 |
| Macrophages rest | 37.6 | Lung | 18.9 |
| Macrophages LPS | 2.3 | Thymus | 43.5 |
| HUVEC none | 15.2 | Kidney | 100.0 |
| HUVEC starved | 35.8 | | |

[1010] Ardais Prostate 1.0 Summary: Ag1674 Expression of the CG125860-02 gene was highest in a prostate cancer sample (CT=29.3). This gene was expressed at moderate levels in the majority of samples on this panel, with no apparent disregulation in prostate cancer.

[1011] Panel 1.3D Summary: Ag1674 Expression of this gene was highest in the hippocampus (CT=29.3). In addition, this gene was expressed at moderate levels in all other regions of the central nervous system examined, including amygdala, substantia nigra, thalamus, cerebellum, cerebral cortex, and spinal cord. Expression of this gene or its protein product is useful as a marker for brain tissue. Therapeutic modulation of the activity of this gene or its protein product plays a role in central nervous system disorders such as Alzheimer's disease, Parkinson's disease, epilepsy, multiple sclerosis, schizophrenia and depression.

[1012] Expression of the CG125860-02 gene was also upregulated in fetal skeletal muscle compared to adult skeletal muscle. The relative overexpression of this gene in fetal tissue demonstrated that the protein product enhances skeletal muscle growth or development in the fetus and also acts in a regenerative capacity in the adult. Therapeutic modulation of this gene or its protein product is useful in the treatment of muscle degenerative diseases, such as muscular dystrophy.

[1013] Panel 2D Summary: Ag1674 Expression of this gene was highest in a lung cancer sample (CT=29.1) and was significantly downregulated (about 50-fold) in the normal adjacent lung tissue. The CG125860-02 gene was also overexpressed in 4 colon cancer samples when compared to the appropriate normal matched colon tissue. Therefore, the CG125860-02 gene or protein expression levels are useful as a marker for lung or colon cancer. Gene, protein, antibody or small molecule therapeutics targeting this gene or its protein product are useful in the treatment of lung or colon cancer. Expression of this gene was higher in a number of metastatic tumor samples on this panel, showing that it plays a role in metastasis and is useful as a marker of disease prognosis.

[1014] Panel 4D Summary: Ag1674 Expression of this gene was highest in normal kidney (CT=31.8). This gene was expressed at low but ubiquitous levels in the majority of the samples on this panel.

[1015] E. CG50235-04: Tolloid-Like 2

[1016] Expression of gene CG50235-04 was assessed using the primer-probe set Ag4737, described in Table EA. Results of the RTQ-PCR runs are shown in Tables EB and EC.

TABLE EB
General_screening_panel_v1.4
Column A - Rel. Exp.(%) Ag4737, Run 222904895

| Tissue Name | A | Tissue Name | A |
|---|---|---|---|
| Adipose | 0.0 | Renal ca. TK-10 | 1.1 |
| Melanoma* Hs688(A).T | 4.3 | Bladder | 6.8 |
| Melanoma* Hs688(B).T | 1.3 | Gastric ca. (liver met.) NCI-N87 | 5.2 |
| Melanoma* M14 | 0.0 | Gastric ca. KATO III | 2.0 |
| Melanoma* LOXIMVI | 0.0 | Colon ca. SW-948 | 0.0 |
| Melanoma* SK-MEL-5 | 1.0 | Colon ca. SW480 | 9.9 |
| Squamous cell carcinoma | 7.3 | Colon ca.* (SW480 met) SW620 | 0.3 |
| SCC-4 | | | |
| Testis Pool | 0.9 | Colon ca. HT29 | 0.0 |
| Prostate ca.* (bone met) | 0.5 | Colon ca. HCT-116 | 8.6 |
| PC-3 | | | |
| Prostate Pool | 5.6 | Colon ca. CaCo-2 | 0.5 |
| Placenta | 2.0 | Colon cancer tissue | 0.5 |
| Uterus Pool | 0.8 | Colon ca. SW1116 | 16.2 |
| Ovarian ca. OVCAR-3 | 9.1 | Colon ca. Colo-205 | 1.1 |
| Ovarian ca. SK-OV-3 | 67.8 | Colon ca. SW-48 | 0.0 |
| Ovarian ca. OVCAR-4 | 88.3 | Colon Pool | 0.0 |
| Ovarian ca. OVCAR-5 | 0.0 | Small Intestine Pool | 6.9 |
| Ovarian ca. IGROV-1 | 6.6 | Stomach Pool | 1.2 |
| Ovarian ca. OVCAR-8 | 8.7 | Bone Marrow Pool | 0.0 |
| Ovary | 3.3 | Fetal Heart | 26.1 |
| Breast ca. MCF-7 | 0.8 | Heart Pool | 21.9 |
| Breast ca. MDA-MB-231 | 1.1 | Lymph Node Pool | 1.6 |
| Breast ca. BT 549 | 0.0 | Fetal Skeletal Muscle | 2.7 |
| Breast ca. T47D | 3.1 | Skeletal Muscle Pool | 17.3 |
| Breast ca. MDA-N | 0.0 | Spleen Pool | 2.4 |
| Breast Pool | 0.3 | Thymus Pool | 1.4 |
| Trachea | 5.5 | CNS cancer (glio/astro) | 0.0 |
| | | U87-MG | |
| Lung | 0.9 | CNS cancer (glio/astro) | 0.0 |
| | | U-118-MG | |
| Fetal Lung | 0.5 | CNS cancer (neuro; met) | 2.9 |
| | | SK-N-AS | |
| Lung ca. NCI-N417 | 0.0 | CNS cancer (astro) SF-539 | 0.5 |
| Lung ca. LX-1 | 0.5 | CNS cancer (astro) SNB-75 | 1.4 |
| Lung ca. NCI-H146 | 0.9 | CNS cancer (glio) SNB-19 | 5.3 |
| Lung ca. SHP-77 | 44.4 | CNS cancer (glio) SF-295 | 0.0 |
| Lung ca. A549 | 0.9 | Brain (Amygdala) Pool | 7.8 |
| Lung ca. NCI-H526 | 54.7 | Brain (cerebellum) | 3.6 |
| Lung ca. NCI-H23 | 8.8 | Brain (fetal) | 1.1 |
| Lung ca. NCI-H460 | 0.3 | Brain (Hippocampus) Pool | 7.2 |
| Lung ca. HOP-62 | 0.0 | Cerebral Cortex Pool | 5.6 |
| Lung ca. NCI-H522 | 8.0 | Brain (Substantia nigra) Pool | 19.2 |
| Liver | 0.5 | Brain (Thalamus) Pool | 18.0 |
| Fetal Liver | 2.0 | Brain (whole) | 6.3 |
| Liver ca. HepG2 | 1.0 | Spinal Cord Pool | 42.0 |
| Kidney Pool | 1.4 | Adrenal Gland | 0.0 |
| Fetal Kidney | 1.2 | Pituitary gland Pool | 7.8 |
| Renal ca. 786-0 | 100.0 | Salivary Gland | 7.4 |
| Renal ca. A498 | 17.0 | Thyroid (female) | 1.8 |
| Renal ca. ACHN | 45.1 | Pancreatic ca. CAPAN2 | 0.0 |
| Renal ca. UO-31 | 82.9 | Pancreas Pool | 2.8 |

[1017] TABLE EC
Panel 4.1D
Column A - Rel. Exp.(%) Ag4737, Run 204154022

| Tissue Name | A | Tissue Name | A |
|---|---|---|---|
| Secondary Th1 act | 0.0 | HUVEC IL-1 beta | 0.0 |
| Secondary Th2 act | 0.0 | HUVEC IFN gamma | 3.3 |
| Secondary Tr1 act | 0.0 | HUVEC TNF alpha + IFN gamma | 0.0 |
| Secondary Th1 rest | 0.0 | HUVEC TNF alpha + IL4 | 0.0 |
| Secondary Th2 rest | 0.0 | HUVEC IL-11 | 0.0 |
| Secondary Tr1 rest | 0.0 | Lung Microvascular EC none | 0.0 |
| Primary Th1 act | 0.0 | Lung Microvascular EC TNFalpha + IL- | 0.0 |
| | | 1 beta | |
| Primary Th2 act | 2.5 | Microvascular Dermal EC none | 0.0 |
| Primary Tr1 act | 0.0 | Microsvasular Dermal EC TNFalpha + IL- | 0.0 |
| | | 1 beta | |
| Primary Th1 rest | 0.0 | Bronchial epithelium TNFalpha + IL1 beta | 39.8 |
| Primary Th2 rest | 0.0 | Small airway epithelium none | 43.2 |
| Primary Tr1 rest | 0.0 | Small airway epithelium TNFalpha + IL- | 12.3 |
| | | 1 beta | |
| CD45RA CD4 lymphocyte act | 0.0 | Coronery artery SMC rest | 0.0 |
| CD45RO CD4 lymphocyte act | 0.0 | Coronery artery SMC TNFalpha + IL-1 beta | 0.0 |
| CD8 lymphocyte act | 0.0 | Astrocytes rest | 73.7 |
| Secondary CD8 lymphocyte rest | 0.0 | Astrocytes TNFalpha + IL-1 beta | 100.0 |
| Secondary CD8 lymphocyte act | 0.0 | KU-812 (Basophil) rest | 0.0 |
| CD4 lymphocyte none | 0.0 | KU-812 (Basophil) PMA/ionomycin | 2.7 |
| 2ry Th1/Th2/Tr1 anti-CD95 | 0.0 | CCD1106 (Keratinocytes) none | 29.5 |
| CH11 | | | |
| LAK cells rest | 0.0 | CCD1106 (Keratinocytes) TNFalpha + IL- | 5.6 |
| | | 1 beta | |
| LAK cells IL-2 | 0.0 | Liver cirrhosis | 0.0 |
| LAK cells IL-2 + IL-12 | 0.0 | NCI-H292 none | 12.5 |
| LAK cells IL-2 + IFN gamma | 0.0 | NCI-H292 IL-4 | 0.0 |
| LAK cells IL-2 + IL-18 | 0.0 | NCI-H292 IL-9 | 11.3 |
| LAK cells PMA/ionomycin | 0.0 | NCI-H292 IL-13 | 0.0 |
| NK Cells IL-2 rest | 0.0 | NCI-H292 IFN gamma | 0.0 |
| Two Way MLR 3 day | 0.0 | HPAEC none | 0.0 |
| Two Way MLR 5 day | 0.0 | HPAEC TNF alpha + IL-1 beta | 2.9 |
| Two Way MLR 7 day | 0.0 | Lung fibroblast none | 0.0 |
| PBMC rest | 0.0 | Lung fibroblast TNF alpha + IL-1 beta | 0.0 |
| PBMC PWM | 3.6 | Lung fibroblast IL-4 | 0.0 |
| PBMC PHA-L | 0.0 | Lung fibroblast IL-9 | 4.9 |
| Ramos (B cell) none | 3.0 | Lung fibroblast IL-13 | 0.0 |
| Ramos (B cell) ionomycin | 2.4 | Lung fibroblast IFN gamma | 3.4 |
| B lymphocytes PWM | 0.0 | Dermal fibroblast CCD1070 rest | 0.0 |
| B lymphocytes CD40L and IL-4 | 3.1 | Dermal fibroblast CCD1070 TNF alpha | 0.0 |
| EOL-1 dbcAMP | 0.0 | Dermal fibroblast CCD1070 IL-1 beta | 0.0 |
| EOL-1 dbcAMP | 0.0 | Dermal fibroblast IFN gamma | 0.0 |
| PMA/ionomycin | | | |
| Dendritic cells none | 2.7 | Dermal fibroblast IL-4 | 0.0 |
| Dendritic cells LPS | 0.0 | Dermal Fibroblasts rest | 0.0 |
| Dendritic cells anti-CD40 | 0.0 | Neutrophils TNFa + LPS | 0.0 |
| Monocytes rest | 0.0 | Neutrophils rest | 0.0 |
| Monocytes LPS | 0.0 | Colon | 4.1 |
| Macrophages rest | 0.8 | Lung | 0.0 |
| Macrophages LPS | 0.0 | Thymus | 2.5 |
| HUVEC none | 0.0 | Kidney | 2.7 |
| HUVEC starved | 0.0 | | |

[1018] General_screening_panel_v1.4 Summary: Ag4737 Highest expression of this gene was seen in a sample derived from a renal cancer cell line (CT=29.9). This gene showed specific expression restricted to cell lines derived from renal cancer, ovarian cancer and lung cancer. The expression of this gene is useful as marker to detect these cancers. Modulation of this gene, encoded protein and use of small molecule drugs or antibodies is useful in the treatment of renal, ovarian or lung cancer.

[1019] This gene was also moderately expressed in several metabolic tissues including adult and fetal heart, pituitary, and skeletal muscle. Thus, this gene is important for the pathogenesis, diagnosis and/or treatment of metabolic diseases, including obesity.

[1020] This gene was expressed at low levels in the CNS, except in the spinal cord where expression levels were moderate. Thus, modulation of this gene is useful in treating spinal cord related disorders including spinal cord trauma or spinocerebellar ataxia.

[1021] Panel 4.1D Summary: Ag4737 This gene was expressed at moderate levels in TNF-alpha and IL-1 beta treated and resting astrocytes (CTs=32). It was also expressed at a low level in small airway epithelium, and keratinocytes. Expression of this gene was down regulated in both cell types upon treatment with the inflammatory cytokines TNF-alpha and IL-1 beta. This gene encodes for a tolloid like 2 protein, a BMP-1-related proteinase which was shown to play a role in extracellular matrix biosynthesis (Uzel M I, J Biol Chem 276(25):22537-43). Therefore, modulation of this gene, encoded protein and/or use of antibodies or small molecule drug targeting this gene or gene product is useful to reduce or eliminate the symptoms of inflammatory reactions that occur in multiple sclerosis, and also in chronic obstructive pulmonary disease, asthma, or emphysema, and in inflammatory skin diseases.

[1022] F. CG50249-01: Voltage-Gated Potassium Channel Protein KV3.2 (KSHIIIA)

[1023] Expression of gene CG50249-01 was assessed using the primer-probe set Ag2503, described in Table FA. Results of the RTQ-PCR runs are shown in Tables FB, FC, FD, FE, FF and FG.

TABLE FA
Probe Name Ag2503

| | | | Start | SEQ ID |
|---|---|---|---|---|
| Primers | Sequences | Length | Position | No |
| Forward | 5′-gaggctctctccagtaacatca-3′ | 22 | 1851 | 1148 |
| Probe | TET-5′-actctccttgtcctctgaggcgctct-3′- | 26 | 1880 | 1149 |
| | TAMRA | | | |
| Reverse | 5′-gcagtttggttgtttggtttac-3′ | 22 | 1929 | 1150 |

[1024] TABLE FB
Ardais Breast 1.0
Column A - Rel. Exp.(%) Ag2503, Run 399643618

| Tissue Name | A | Tissue Name | A |
|---|---|---|---|
| 111297 Breast cancer metastasis (9369)* | 0.0 | 153636 Breast cancer (D3D) | 0.0 |
| 108830 Breast cancer metastasis (OD06855)* | 0.0 | 164668 Breast cancer (6314) | 0.0 |
| 97764 Breast cancer node metastasis (OD06083) | 0.0 | 164677 Breast cancer (5272) | 0.3 |
| 97739 Breast cancer (CHTN20676) | 0.0 | 164685 Breast cancer (0170) | 0.0 |
| 145848 Breast cancer (9B6) | 0.2 | 98857 Breast cancer (OD06397-12) | 0.0 |
| 145859 Breast cancer (9EC) | 0.0 | 153628 Breast cancer (D35) | 0.0 |
| 153632 Breast cancer (D39) | 0.0 | 153637 Breast cancer (D3E) | 0.5 |
| 153643 Breast cancer (D44) | 0.1 | 164669 Breast cancer (6992) | 0.0 |
| 164672 Breast cancer (7464) | 0.0 | 164678 Breast cancer (5297) | 0.2 |
| 164681 Breast cancer (5787) | 97.3 | 164686 Breast cancer (0732) | 0.0 |
| 97748 Breast cancer (CHTN20931) | 0.8 | 145857 Breast cancer (9F0) | 0.0 |
| 145850 Breast cancer (9C7) | 0.0 | 153630 Breast cancer (D37) | 0.1 |
| 149844 Breast cancer (24178) | 0.0 | 153638 Breast cancer (D3F) | 27.4 |
| 153633 Breast cancer (D3A) | 0.1 | 164670 Breast cancer (7078) | 0.0 |
| 153644 Breast cancer (D45) | 0.3 | 164679 Breast cancer (5486) | 0.0 |
| 164673 Breast cancer (8452) | 0.6 | 164687 Breast cancer (5881) | 0.0 |
| 164682 Breast cancer (6342)* | 0.1 | 145846 Breast cancer (9B7) | 0.1 |
| 97751 Breast cancer (CHTN21053) | 0.0 | 145858 Breast cancer (9B4) | 0.0 |
| 116417 Breast cancer (3367)* | 0.0 | 153631 Breast cancer (D38) | 0.0 |
| 145852 Breast cancer (A1A) | 0.0 | 153639 Breast cancer (D40) | 100.0 |
| 151097 Breast cancer (CHTN24298) | 0.0 | 164671 Breast cancer (7082) | 0.0 |
| 153634 Breast cancer (D3B) | 0.0 | 164680 Breast cancer (5705) | 0.0 |
| 155797 Breast cancer (EA6) | 0.0 | 164688 Breast cancer (7222) | 0.0 |
| 164674 Breast cancer (8811) | 0.2 | 111288 Breast NAT (3367) | 0.0 |
| 164683 Breast cancer (6470) | 0.0 | 111302 Breast NAT (6314) | 0.4 |
| 97763 Breast cancer (OD06083) | 0.1 | 105687 Breast cancer 1B | 0.0 |
| 116418 Breast cancer (3378)* | 0.0 | 105688 Breast NAT 1A | 0.0 |
| 145853 Breast cancer (9F3) | 0.0 | 105689 Breast cancer 2B | 0.0 |
| 153432 Breast cancer (CHTN 24652) | 0.2 | 105690 Breast NAT 2A | 0.0 |
| 153635 Breast cancer (D3C) | 0.0 | 111289 Breast cancer 3B* | 0.0 |
| 164667 Breast cancer (5785) | 0.0 | 111290 Breast NAT 3A* | 0.0 |
| 164676 Breast cancer (5070) | 1.4 | 116424 Breast cancer 4B* | 0.0 |
| 164684 Breast cancer (6509) | 0.2 | 116425 Breast NAT 4A | 0.0 |
| 116421 Breast cancer (6314) | 0.0 | 108847 Breast cancer | 0.0 |
| 145854 Breast cancer (9B8) | 0.0 | 105694 Breast NAT | 0.0 |
| 153627 Breast cancer (D34) | 0.0 | | |

[1025] TABLE FC
Ardais Panel v.1.0
Column A - Rel. Exp.(%) Ag2503, Run 263526557

| Tissue Name | A | Tissue Name | A |
|---|---|---|---|
| 136799 Lung cancer(362) | 0.0 | 136787 lung cancer(356) | 0.0 |
| 136800 LungNAT(363) | 1.1 | 136788 lung NAT(357) | 0.2 |
| 136813 Lung cancer(372) | 0.1 | 136804 Lung cancer(369) | 100.0 |
| 136814 Lung NAT(373) | 0.0 | 136805 Lung NAT(36A) | 0.0 |
| 136815 Lung cancer(374) | 0.1 | 136806 Lung cancer(36B) | 0.0 |
| 136816 Lung NAT(375) | 0.1 | 136807 Lung NAT(36C) | 0.0 |
| 136791 Lung cancer(35A) | 0.2 | 136789 lung cancer(358) | 0.2 |
| 136795 Lung cancer(35E) | 0.1 | 136802 Lung cancer(365) | 0.1 |
| 136797 Lung cancer(360) | 0.1 | 136803 Lung cancer(368) | 0.0 |
| 136794 lung NAT(35D) | 0.2 | 136811 Lung cancer(370) | 0.0 |
| 136818 Lung NAT(377) | 10.0 | 136810 Lung NAT(36F) | 0.2 |

[1026] TABLE FD
Ardais Prostate 1.0
Column A - Rel. Exp.(%) Ag2503, Run 320416115

| Tissue Name | A | Tissue Name | A |
|---|---|---|---|
| 151135 Prostate NAT(B87) | 0.8 | 151128 Prostate cancer(B8C) | 0.3 |
| 151143 Prostate NAT(B8A) | 2.5 | 151136 Prostate cancer(B8B) | 100.0 |
| 153669 Prostate NAT(D5E) | 2.3 | 151144 Prostate cancer(B8F) | 0.1 |
| 153677 Prostate NAT(D66) | 2.5 | 153654 Prostate cancer(D4F) | 10.2 |
| 153685 Prostate NAT(D6E) | 1.7 | 153662 Prostate cancer(D57) | 2.9 |
| 145905 Prostate NAT(A0C) | 8.6 | 153655 Prostate cancer(D50) | 8.8 |
| 153670 Prostate NAT(D5F) | 1.2 | 145907 Prostate cancer(A0A) | 1.0 |
| 153678 Prostate NAT(D67) | 4.2 | 153663 Prostate cancer(D58) | 1.0 |
| 153686 Prostate NAT(D6F) | 1.2 | 151130 Prostate cancer(B90) | 27.7 |
| 145906 Prostate NAT(A09) | 6.0 | 153648 Prostate cancer(D49) | 0.2 |
| 151129 Prostate NAT(B93) | 4.1 | 153656 Prostate cancer(D51) | 8.8 |
| 151137 Prostate NAT(B86) | 2.1 | 153664 Prostate cancer(D59) | 0.1 |
| 153671 Prostate NAT(D60) | 0.7 | 155799 Prostate cancer(EA8) | 0.1 |
| 151145 Prostate NAT(B91) | 1.4 | 145909 Prostate cancer(9E7) | 0.7 |
| 153679 Prostate NAT(D68) | 5.9 | 153649 Prostate cancer(D4A) | 11.0 |
| 153687 Prostate NAT(D70) | 4.1 | 153657 Prostate cancer(D52) | 36.3 |
| 153672 Prostate NAT(D61) | 1.0 | 153665 Prostate cancer(D5A) | 0.3 |
| 153680 Prostate NAT(D69) | 6.1 | 151132 Prostate cancer(B88) | 41.5 |
| 151131 Prostate NAT(B85) | 3.5 | 153650 Prostate cancer(D4B) | 3.1 |
| 153673 Prostate NAT(D62) | 6.9 | 153658 Prostate cancer(D53) | 12.3 |
| 153681 Prostate NAT(D6A) | 0.8 | 153666 Prostate cancer(D5B) | 26.8 |
| 145910 Prostate NAT(9C3) | 7.5 | 153651 Prostate cancer(D4C) | 0.5 |
| 153674 Prostate NAT(D63) | 5.3 | 153659 Prostate cancer(D54) | 25.0 |
| 153682 Prostate NAT(D6B) | 0.1 | 153667 Prostate cancer(D5C) | 3.5 |
| 151133 Prostate NAT(B94) | 4.0 | 151134 Prostate cancer(B92) | 4.7 |
| 153675 Prostate NAT(D64) | 0.2 | 151142 Prostate cancer(B89) | 0.2 |
| 153683 Prostate NAT(D6C) | 0.5 | 153652 Prostate cancer(D4D) | 1.7 |
| 153668 Prostate NAT(D5D) | 1.5 | 153660 Prostate cancer(D55) | 0.1 |
| 153676 Prostate NAT(D65) | 0.9 | 149773 Prostate NAT(AD8) | 2.3 |
| 153684 Prostate NAT(D6D) | 9.3 | 149774 Prostate cancer(AD7) | 2.8 |
| 145904 Prostate cancer(9E2) | 0.0 | 151139 Prostate NAT(B8E) | 4.3 |
| 149776 Prostate cancer(AD5) | 2.0 | 151138 Prostate cancer(B8D) | 0.1 |
| 153653 Prostate cancer(D4E) | 1.0 | 115141 Prostate NAT(B96) | 4.2 |
| 153661 Prostate cancer(D56) | 1.7 | 151140 Prostate cancer(B95) | 1.2 |

[1027] TABLE FE
General_screening_panel_v1.4
Column A - Rel. Exp.(%) Ag2503, Run 208015585
Column B - Rel. Exp.(%) Ag2503, Run 212142287

| Tissue Name | A | B | Tissue Name | A | B |
|---|---|---|---|---|---|
| Adipose | 0.0 | 0.0 | Renal ca. TK-10 | 0.0 | 0.0 |
| Melanoma* Hs688(A).T | 0.0 | 0.0 | Bladder | 0.1 | 0.1 |
| Melanoma* Hs688(B).T | 0.0 | 0.0 | Gastric ca. (liver met.) NCI-N87 | 0.1 | 0.1 |
| Melanoma* M14 | 0.0 | 0.0 | Gastric ca. KATO III | 0.0 | 0.0 |
| Melanoma* LOXIMVI | 0.0 | 0.1 | Colon ca. SW-948 | 0.0 | 0.0 |
| Melanoma* SK-MEL-5 | 0.0 | 0.1 | Colon ca. SW480 | 0.0 | 0.1 |
| Squamous cell carcinoma SCC-4 | 0.0 | 0.0 | Colon ca.* (SW480 met) SW620 | 0.0 | 0.0 |
| Testis Pool | 0.2 | 0.3 | Colon ca. HT29 | 0.1 | 0.1 |
| Prostate ca.* (bone met) PC-3 | 0.0 | 0.0 | Colon ca. HCT-116 | 0.0 | 0.0 |
| Prostate Pool | 6.4 | 7.8 | Colon ca. CaCo-2 | 0.0 | 0.0 |
| Placenta | 0.0 | 0.0 | Colon cancer tissue | 0.1 | 0.2 |
| Uterus Pool | 0.0 | 0.0 | Colon ca. SW1116 | 0.0 | 0.0 |
| Ovarian ca. OVCAR-3 | 0.0 | 0.0 | Colon ca. Colo-205 | 0.0 | 0.0 |
| Ovarian ca. SK-OV-3 | 0.0 | 0.1 | Colon ca. SW-48 | 0.0 | 0.0 |
| Ovarian ca. OVCAR-4 | 0.0 | 0.0 | Colon Pool | 0.2 | 0.1 |
| Ovarian ca. OVCAR-5 | 8.4 | 7.2 | Small Intestine Pool | 0.2 | 0.4 |
| Ovarian ca. IGROV-1 | 0.0 | 0.0 | Stomach Pool | 0.2 | 0.0 |
| Ovarian ca. OVCAR-8 | 0.0 | 0.0 | Bone Marrow Pool | 0.0 | 0.0 |
| Ovary | 0.0 | 0.1 | Fetal Heart | 0.0 | 0.0 |
| Breast ca. MCF-7 | 0.0 | 0.2 | Heart Pool | 0.0 | 0.1 |
| Breast ca. MDA-MB-231 | 0.0 | 0.0 | Lymph Node Pool | 0.1 | 0.1 |
| Breast ca. BT 549 | 0.0 | 0.0 | Fetal Skeletal Muscle | 0.1 | 0.0 |
| Breast ca. T47D | 8.1 | 15.4 | Skeletal Muscle Pool | 0.0 | 0.1 |
| Breast ca. MDA-N | 0.0 | 0.0 | Spleen Pool | 0.0 | 0.0 |
| Breast Pool | 0.9 | 0.5 | Thymus Pool | 0.4 | 0.7 |
| Trachea | 0.2 | 0.4 | CNS cancer (glio/astro) U87-MG | 0.0 | 0.0 |
| Lung | 0.0 | 0.0 | CNS cancer (glio/astro) U-118-MG | 0.1 | 0.1 |
| Fetal Lung | 0.0 | 0.1 | CNS cancer (neuro; met) SK-N-AS | 0.0 | 0.0 |
| Lung ca. NCI-N417 | 0.0 | 0.0 | CNS cancer (astro) SF-539 | 0.0 | 0.0 |
| Lung ca. LX-1 | 0.0 | 0.0 | CNS cancer (astro) SNB-75 | 0.0 | 0.0 |
| Lung ca. NCI-H146 | 1.8 | 1.8 | CNS cancer (glio) SNB-19 | 0.0 | 0.0 |
| Lung ca. SHP-77 | 0.5 | 0.5 | CNS cancer (glio) SF-295 | 0.0 | 0.0 |
| Lung ca. A549 | 0.0 | 0.0 | Brain (Amygdala) Pool | 55.9 | 49.7 |
| Lung ca. NCI-H526 | 0.0 | 0.0 | Brain (cerebellum) | 1.1 | 1.1 |
| Lung ca. NCI-H23 | 0.0 | 0.9 | Brain (fetal) | 25.9 | 38.4 |
| Lung ca. NCI-H460 | 2.0 | 0.1 | Brain (Hippocampus) Pool | 31.0 | 35.8 |
| Lung ca. HOP-62 | 0.1 | 0.0 | Cerebral Cortex Pool | 100.0 | 80.7 |
| Lung ca. NCI-H522 | 0.0 | 0.0 | Brain (Substantia nigra) Pool | 64.2 | 64.6 |
| Liver | 0.1 | 0.0 | Brain (Thalamus) Pool | 97.3 | 100.0 |
| Fetal Liver | 0.0 | 0.3 | Brain (whole) | 66.9 | 65.5 |
| Liver ca. HepG2 | 0.0 | 0.0 | Spinal Cord Pool | 6.4 | 5.3 |
| Kidney Pool | 0.0 | 0.1 | Adrenal Gland | 0.0 | 0.0 |
| Fetal Kidney | 1.1 | 2.2 | Pituitary gland Pool | 6.6 | 5.5 |
| Renal ca. 786-0 | 0.0 | 0.0 | Salivary Gland | 0.2 | 0.1 |
| Renal ca. A498 | 0.0 | 0.0 | Thyroid (female) | 0.0 | 0.0 |
| Renal ca. ACHN | 0.4 | 0.0 | Pancreatic ca. CAPAN2 | 0.0 | 0.1 |
| Renal ca. UO-31 | 0.0 | 0.0 | Pancreas Pool | 0.2 | 0.7 |

[1028] TABLE FF
Panel 2D
Column A - Rel. Exp.(%) Ag2503, Run 160838287
Column B - Rel. Exp.(%) Ag2503, Run 164993346

| Tissue Name | A | B | Tissue Name | A | B |
|---|---|---|---|---|---|
| Normal Colon | 2.7 | 2.3 | Kidney Margin 8120608 | 0.0 | 0.0 |
| CC Well to Mod Diff (ODO3866) | 0.1 | 0.2 | Kidney Cancer 8120613 | 0.0 | 0.0 |
| CC Margin (ODO3866) | 0.1 | 0.3 | Kidney Margin 8120614 | 0.0 | 0.1 |
| CC Gr.2 rectosigmoid (ODO3868) | 0.1 | 0.0 | Kidney Cancer 9010320 | 0.0 | 0.1 |
| CC Margin (ODO3868) | 0.0 | 0.1 | Kidney Margin 9010321 | 0.0 | 0.0 |
| CC Mod Diff (ODO3920) | 0.1 | 0.1 | Normal Uterus | 0.0 | 0.0 |
| CC Margin (ODO3920) | 0.0 | 0.1 | Uterine Cancer 064011 | 0.0 | 0.0 |
| CC Gr.2 ascend colon (ODO3921) | 0.1 | 0.2 | Normal Thyroid | 0.0 | 0.1 |
| CC Margin (ODO3921) | 0.2 | 0.0 | Thyroid Cancer | 0.0 | 0.0 |
| CC from Partial Hepatectomy | 0.2 | 0.1 | Thyroid Cancer A302152 | 0.0 | 0.0 |
| (ODO4309) Mets | | | | | |
| Liver Margin (ODO4309) | 0.1 | 0.1 | Thyroid Margin A302153 | 0.0 | 0.0 |
| Colon mets to lung (ODO4451-01) | 0.0 | 0.0 | Normal Breast | 3.1 | 2.4 |
| Lung Margin (ODO4451-02) | 0.0 | 0.0 | Breast Cancer | 0.0 | 0.0 |
| Normal Prostate 6546-1 | 2.8 | 15.9 | Breast Cancer (ODO4590-01) | 100.0 | 71.7 |
| Prostate Cancer (ODO4410) | 22.4 | 30.1 | Breast Cancer Mets | 39.8 | 33.9 |
| | | | (ODO4590-03) | | |
| Prostate Margin (ODO4410) | 9.7 | 9.9 | Breast Cancer Metastasis | 4.5 | 7.1 |
| Prostate Cancer (ODO4720-01) | 6.0 | 8.5 | Breast Cancer | 0.4 | 0.0 |
| Prostate Margin (ODO4720-02) | 3.9 | 3.7 | Breast Cancer | 1.2 | 0.9 |
| Normal Lung | 0.0 | 0.0 | Breast Cancer 9100266 | 93.3 | 100.0 |
| Lung Met to Muscle (ODO4286) | 0.0 | 0.0 | Breast Margin 9100265 | 28.7 | 33.0 |
| Muscle Margin (ODO4286) | 0.0 | 0.0 | Breast Cancer A209073 | 2.9 | 3.4 |
| Lung Malignant Cancer | 0.0 | 0.1 | Breast Margin A209073 | 5.9 | 7.0 |
| (ODO3126) | | | | | |
| Lung Margin (ODO3126) | 0.0 | 0.0 | Normal Liver | 0.4 | 0.4 |
| Lung Cancer (ODO4404) | 0.0 | 0.0 | Liver Cancer | 0.0 | 0.0 |
| Lung Margin (ODO4404) | 0.0 | 0.0 | Liver Cancer 1025 | 0.0 | 0.1 |
| Lung Cancer (ODO4565) | 0.0 | 0.0 | Liver Cancer 1026 | 0.0 | 0.0 |
| Lung Margin (ODO4565) | 0.1 | 0.0 | Liver Cancer 6004-T | 0.1 | 0.0 |
| Lung Cancer (ODO4237-01) | 0.0 | 0.1 | Liver Tissue 6004-N | 0.7 | 0.4 |
| Lung Margin (ODO4237-02) | 0.1 | 0.0 | Liver Cancer 6005-T | 0.0 | 0.0 |
| Ocular Mel Met to Liver | 0.0 | 0.0 | Liver Tissue 6005-N | 0.2 | 0.0 |
| (ODO4310) | | | | | |
| Liver Margin (ODO4310) | 0.0 | 0.1 | Normal Bladder | 0.0 | 0.2 |
| Melanoma Metastasis | 0.0 | 0.0 | Bladder Cancer | 0.1 | 0.0 |
| Lung Margin (ODO4321) | 0.0 | 0.0 | Bladder Cancer | 0.2 | 0.4 |
| Normal Kidney | 0.0 | 0.0 | Bladder Cancer (ODO4718- | 0.0 | 0.0 |
| | | | 01) | | |
| Kidney Ca, Nuclear grade 2 | 0.1 | 0.3 | Bladder Normal Adjacent | 0.0 | 0.0 |
| (ODO4338) | | | (ODO4718-03) | | |
| Kidney Margin (ODO4338) | 0.1 | 0.0 | Normal Ovary | 0.0 | 0.0 |
| Kidney Ca Nuclear grade 1/2 | 0.1 | 0.3 | Ovarian Cancer | 0.0 | 0.0 |
| (ODO4339) | | | | | |
| Kidney Margin (ODO4339) | 0.0 | 0.0 | Ovarian Cancer (ODO4768- | 0.0 | 0.0 |
| | | | 07) | | |
| Kidney Ca, Clear cell type | 0.0 | 0.1 | Ovary Margin (ODO4768-08) | 0.0 | 0.0 |
| (ODO4340) | | | | | |
| Kidney Margin (ODO4340) | 0.0 | 0.0 | Normal Stomach | 0.0 | 0.1 |
| Kidney Ca, Nuclear grade 3 | 0.0 | 0.0 | Gastric Cancer 9060358 | 0.0 | 0.0 |
| (ODO4348) | | | | | |
| Kidney Margin (ODO4348) | 0.0 | 0.0 | Stomach Margin 9060359 | 0.0 | 0.2 |
| Kidney Cancer (ODO4622-01) | 0.0 | 0.0 | Gastric Cancer 9060395 | 0.0 | 0.0 |
| Kidney Margin (ODO4622-03) | 0.0 | 0.1 | Stomach Margin 9060394 | 0.0 | 0.0 |
| Kidney Cancer (ODO4450-01) | 0.0 | 0.0 | Gastric Cancer 9060397 | 0.0 | 0.3 |
| Kidney Margin (ODO4450-03) | 0.0 | 0.0 | Stomach Margin 9060396 | 0.0 | 0.0 |
| Kidney Cancer 8120607 | 0.0 | 0.0 | Gastric Cancer 064005 | 0.1 | 0.7 |

[1029] Table FG
Panel 3D
Column A - Rel. Exp.(%) Ag2503, Run 164629451
Column B - Rel. Exp.(%) Ag2503, Run 182113494

| Tissue Name | A | B | Tissue Name | A | B |
|---|---|---|---|---|---|
| 94905 Daoy | 0.0 | 0.0 | 94954 Ca Ski Cervical | 0.0 | 17.9 |
| Medulloblastoma/Cerebellum | | | epidermoid carcinoma | | |
| | | | (metastasis | | |
| 94906 TE671 | 0.0 | 0.0 | 94955 ES-2 Ovarian clear cell | 0.0 | 0.0 |
| Medulloblastoni/Cerebellum | | | carcinoma | | |
| 94907 D283 Med | 7.7 | 12.2 | 94957 Ramos Stimulated with | 0.0 | 0.0 |
| Medulloblastoma/Cerebellum | | | PMA/ionomycin 6h | | |
| 94908 PFSK-1 Primitive | 10.5 | 57.0 | 94958 Ramos Stimulated with | 0.0 | 0.0 |
| Neuroectodermal/Cerebellum | | | PMA/ionomycin 14h | | |
| 94909 XF-498 CNS | 0.0 | 0.0 | 94962 MEG-01 Chronic | 5.9 | 12.3 |
| | | | myelogenous leukemia | | |
| | | | (megokaryoblast) | | |
| 94910 SNB-78 CNS/glioma | 0.0 | 0.0 | 94963 Raji Burkitt's lymphoma | 0.0 | 0.0 |
| 94911 SF-268 CNS/glioblastoma | 0.0 | 0.0 | 94964 Daudi Burkitt's | 0.0 | 0.0 |
| | | | lymphoma | | |
| 94912 T98G Glioblastoma | 0.0 | 0.0 | 94965 U266 B-cell | 0.0 | 0.0 |
| | | | plasmacytoma/myeloma | | |
| 96776 SK-N-SH Neuroblastoma | 0.0 | 7.9 | 94968 CA46 Burkitt's | 0.0 | 0.0 |
| (metastasis) | | | lymphoma | | |
| 94913 SF-295 CNS/glioblastoma | 0.0 | 0.0 | 94970 RL non-Hodgkin's B- | 0.0 | 0.0 |
| | | | cell lymphoma | | |
| 94914 Cerebellum | 24.5 | 63.3 | 94972 JM1 pre-B-cell | 0.0 | 0.0 |
| | | | lymphoma/leukemia | | |
| 96777 Cerebellum | 8.5 | 12.9 | 94973 Jurkat T cell leukemia | 0.0 | 0.0 |
| 94916 NCI-H292 | 0.0 | 0.0 | 94974 TF-1 Erythroleukemia | 2.0 | 0.0 |
| Mucoepidermoid lung carcinoma | | | | | |
| 94917 DMS-114 Small cell lung | 4.1 | 0.0 | 94975 HUT 78 T-cell | 2.7 | 0.0 |
| cancer | | | lymphoma | | |
| 94918 DMS-79 Small cell lung | 1.9 | 0.0 | 94977 U937 Histiocytic | 0.0 | 0.0 |
| cancer/neuroendocrine | | | lymphoma | | |
| 94919 NCI-H146 Small cell lung | 100.0 | 100.0 | 94980 KU-812 Myelogenous | 0.0 | 0.0 |
| cancer/neuroendocrine | | | leukemia | | |
| 94920 NCI-H526 Small cell lung | 0.0 | 0.0 | 769-P-Clear cell renal | 0.0 | 0.0 |
| cancer/neuroendocrine | | | carcinoma | | |
| 94921 NCI-N417 Small cell lung | 0.0 | 6.3 | 94983 Caki-2 Clear cell renal | 0.0 | 0.0 |
| cancer/neuroendocrine | | | carcinoma | | |
| 94923 NCI-H82 Small cell lung | 0.0 | 1.7 | 94984 SW 839 Clear cell renal | 0.0 | 0.0 |
| cancer/neuroendocrine | | | carcinoma | | |
| 94924 NCI-H157 Squamous cell | 0.0 | 0.0 | 94986 G401 Wilms' tumor | 0.0 | 0.0 |
| lung cancer (metastasis) | | | | | |
| 94925 NCI-H1155 Large cell lung | 30.6 | 23.7 | 94987 Hs766T Pancreatic | 0.0 | 0.0 |
| cancer/neuroendocrine | | | carcinoma (LN metastasis) | | |
| 94926 NCI-H1299 Large cell lung | 0.0 | 0.0 | 94988 CAPAN-1 Pancreatic | 0.0 | 0.0 |
| cancer/neuroendocrine | | | adenocarcinoma (liver | | |
| | | | metastasis) | | |
| 94927 NCI-H727 Lung carcinoid | 0.0 | 0.0 | 94989 SU86.86 Pancreatic | 0.0 | 0.0 |
| | | | carcinoma (liver metastasis) | | |
| 94928 NCI-UMC-11 Lung | 13.3 | 6.4 | 94990 BxPC-3 Pancreatic | 0.0 | 0.0 |
| carcinoid | | | adenocarcinoma | | |
| 94929 LX-1 Small cell lung | 0.0 | 57 | 94991 HPAC Pancreatic | 0.0 | 0.0 |
| cancer | | | adenocarcinoma | | |
| 94930 Colo-205 Colon cancer | 0.0 | 0.0 | 94992 MIA PaCa-2 Pancreatic | 0.0 | 0.0 |
| | | | carcinoma | | |
| 94931 KM12 Colon cancer | 1.2 | 0.0 | 94993 CFPAC-1 Pancreatic | 3.8 | 16.0 |
| | | | ductal adenocarcinoma | | |
| 94932 KM20L2 Colon cancer | 0.0 | 0.0 | 94994 PANG-1 Pancreatic | 0.0 | 0.0 |
| | | | epithelioid ductal carcinoma | | |
| 94933 NCI-H716 Colon cancer | 2.8 | 0.0 | 94996 T24 Bladder carcinma | 1.9 | 0.0 |
| | | | (transitional cell | | |
| 94935 SW-48 Colon | 0.0 | 0.0 | 5637- Bladder carcinoma | 0.0 | 0.0 |
| adenocarcinoma | | | | | |
| 94936 SW1116 Colon | 0.0 | 0.0 | 94998 HT-1197 Bladder | 0.0 | 0.0 |
| adenocarcinoma | | | carcinoma | | |
| 94937 LS 174T Colon | 0.0 | 0.0 | 94999 UM-UC-3 Bladder | 0.0 | 0.0 |
| adenocarcinoma | | | carcinma (transitional cell) | | |
| 94938 SW-948 Colon | 0.0 | 0.0 | 95000 A204 | 0.0 | 0.0 |
| adenocarcinoma | | | Rhabdomyosarcoma | | |
| 94939 SW-480 Colon | 0.0 | 0.0 | 95001 HT-1080 Fibrosarcoma | 0.0 | 0.0 |
| adenocarcinoma | | | | | |
| 94940 NCI-SNU-5 Gastric | 0.0 | 0.0 | 95002 MG-63 Osteosarcoma | 0.0 | 0.0 |
| carcinoma | | | (bone) | | |
| KATO III- Gastric carcinoma | 5.5 | 15.3 | 95003 SK-LMS-1 | 1.3 | 0.0 |
| | | | Leiomyosarcoma (vulva) | | |
| 94943 NCI-SNU-16 Gastric | 0.0 | 0.0 | 95004 SJRH30 | 2.5 | 0.0 |
| carcinoma | | | Rhabdomyosarcoma (met to | | |
| | | | bone marrow) | | |
| 94944 NCI-SNU-1 Gastric | 0.0 | 0.0 | 95005 A431 Epidermoid | 0.0 | 0.0 |
| carcinoma | | | carcinoma | | |
| 94946 RF-1 Gastric | 0.0 | 0.0 | 95007 WM266-4 Melanoma | 1.6 | 0.0 |
| adenocarcinoma | | | | | |
| 94947 RF-48 Gastric | 0.0 | 0.0 | DU 145- Prostate carcinoma | 0.0 | 0.0 |
| adenocarcinoma | | | (brain metastasis) | | |
| 96778 MKN-45 Gastric carcinoma | 0.0 | 0.0 | 95012 MDA-MB-468 Breast | 0.0 | 0.0 |
| | | | adenocarcinoma | | |
| 94949 NCI-N87 Gastric | 0.0 | 0.0 | SCC-4- Squamous cell | 0.0 | 0.0 |
| carcinoma | | | carcinoma of tongue | | |
| 94951 OVCAR-5 Ovarian | 3.1 | 0.0 | SCC-9- Squamous cell | 0.0 | 0.0 |
| carcinoma | | | carcinoma of tongue | | |
| 94952 RL95-2 Uterine carcinoma | 0.0 | 0.0 | SCC-15 Squamous cell | 0.0 | 0.0 |
| | | | carcinoma of tongue | | |
| 94953 HelaS3 Cervical | 0.0 | 0.0 | 95017 CAL 27 Squamous cell | 0.0 | 0.0 |
| adenocarcinoma | | | carcinoma of tongue | | |

[1030] Ardais Breast1.0 Summary: Ag2503 Highest expression of this gene was seen in three breast cancer samples (CTs=23.9-25). Modulation of this gene, encoded protein and/or use of antibodies or small molecule drug targeting this gene or gene product is of use in the treatment of breast cancers.

[1031] Ardais Panel v.1.0 Summary: Ag2503 Highest expression of this gene was seen in a lung cancer (369) sample (CT=25). Modulation of this gene, encoded protein and/or use of antibodies or small molecule drug targeting this gene or gene product is of use in the treatment of lung cancers.

[1032] Ardais Prostate 1.0 Summary: Ag2503 Highest expression of this gene was seen in a prostate cancer (B8B) sample (CT=21). This gene showed relatively higher expression in the prostate cancer samples compared to the other samples on this panel. Modulation of this gene, encoded protein and/or use of antibodies or small molecule drug targeting this gene or gene product is of use in the treatment of prostate cancers.

[1033] General_screening_panel_v1.4 Summary: Ag2503 Highest expression of this gene was detected in the thalamus and the cerebral cortex (CTs=25). This gene showed brain preferential expression, with high expression in hippocampus, cortex, amygdala, substantia nigra and thalamus. These regions are susceptible to the neurodegeneration associated with Alzheimer's Disease, Parkinson's disease, Huntington's disease and other pathological neurodegenerative conditions. This gene encodes a protein that is homologous to a potassium channel. Potassium channels play a role in neurodegenerative diseases, including Alzheimer's Disease (Chi X Neurosci Lett 2000 Aug. 18; 290(1):9-12; Yu SP Neurobiol Dis 1998 August; 5(2):81-8). Therefore, modulation of this gene or its protein product is useful to reduce the neuronal degeneration in patients with Alzheimer's Disease and other neurodegenerative diseases. Defective potassium channels are known to cause several CNS disorders, including epilepsy and episodic ataxia with myokymia. Therefore, modulation of this gene and/or expressed protein is useful as a treatment for the symptoms produced by ataxia and epilepsy.

[1034] Moderate to low expression was also seen in normal prostate and in cell lines derived from breast, lung, and ovarian cancer. Thus, expression of this gene is useful as a diagnostic marker to detect the presence of these cancers. Use of antibodies or small molecule drug targeting this gene or gene product is useful in the treatment of these cancers.

[1035] This gene showed significantly higher levels of expression in the fetal kidney (CTs=30-31) relative to the adult kidney (CTs=35-36). The higher levels of expression in the fetal kidney demonstrate that this gene product is involved in the development of this organ. Modulation of this gene and/or encoded protein is useful in the treatment of kidney related diseases such as lupus erythematus and glomerulonephritis.

[1036] Among tissues with metabolic function, the expression of this potassium channel homolog was highest in the pituitary gland. Potassium channels are involved in regulation of secretion in pituitary cells and their modulation by use of small molecule inhibitors or antibodies is important to modulate specific secretory activities in the pituitary.

[1037] Panel 2D Summary: Ag2503 The highest level of expression was seen in a breast cancer sample (CTs=25-27). Higher expression of this gene was seen in breast and prostate cancer samples compared to the corresponding normal adjacent tissue. Expression of this gene is useful as a diagnostic marker of these cancers and use of antibodies or small molecule drug targeting this gene or gene product is useful in the treatment of these cancers.

[1038] Panel 3D Summary: Ag2503 The highest level of expression was seen in a lung cancer cell line (NCI-H146) (CTs=30-33.4). Low expression of this gene was observed in normal cerebellum and cell lines derived from lung cancer, and medulloblastoma. The expression of this gene is useful as a diagnostic marker for lung cancer and use of antibodies, protein therapeutics or small molecule drug is beneficial in the treatment of lung cancer.

[1039] G. CG50307-03: Steroid Dehydrogenase

[1040] Expression of full-length physical clone CG50307-03 was assessed using the primer-probe sets Ag2248 and Ag2548, described in Tables GA and GB. Results of the RTQ-PCR runs are shown in Tables GC, GD, GE, GF and GG.

TABLE GA
Probe Name Ag2248

| | | | Start | SEQ ID |
|---|---|---|---|---|
| Primers | Sequences | Length | Position | No |
| Forward | 5′-agcctacgctgaagagttagc-3′ | 21 | 804 | 1151 |
| Probe | TET-5′-aagccgaggtctcaatataatcctga-3′- | 26 | 778 | 1152 |
| | TAMRA | | | |
| Reverse | 5′-acctgcaacttctcctcgtt-3′ | 20 | 750 | 1153 |

[1041] TABLE GC
Panel 1.3D
Column A - Rel. Exp.(%) Ag2248, Run 159035206
Column B - Rel. Exp.(%) Ag2548, Run 162292266

| Tissue Name | A | B | Tissue Name | A | B |
|---|---|---|---|---|---|
| Liver adenocarcinoma | 8.7 | 25.5 | Kidney (fetal) | 5.0 | 14.1 |
| Pancreas | 1.1 | 1.7 | Renal Ca. 786-0 | 5.3 | 7.5 |
| Pancreatic ca. CAPAN-2 | 2.2 | 6.3 | Renal Ca. A498 | 10.2 | 9.0 |
| Adrenal gland | 6.6 | 6.0 | Renal Ca. RXF 393 | 1.5 | 9.0 |
| Thyroid | 9.0 | 19.3 | Renal ca. ACHN | 1.7 | 12.8 |
| Salivary gland | 2.9 | 3.7 | Renal ca. UO-31 | 5.4 | 15.1 |
| Pituitary gland | 19.8 | 16.2 | Renal Ca. TK-10 | 1.5 | 6.7 |
| Brain (fetal) | 28.3 | 14.3 | Liver | 1.3 | 0.4 |
| Brain (whole) | 22.7 | 25.2 | Liver (fetal) | 3.1 | 2.3 |
| Brain (amygdala) | 24.7 | 24.3 | Liver ca. (hepatoblast) HepG2 | 8.1 | 18.7 |
| Brain (cerebellum) | 11.6 | 14.6 | Lung | 10.2 | 7.4 |
| Brain (hippocampus) | 100.0 | 45.1 | Lung (fetal) | 9.5 | 12.5 |
| Brain (substantia nigra) | 5.1 | 7.2 | Lung Ca. (small cell) LX-1 | 11.0 | 16.0 |
| Brain (thalamus) | 19.2 | 25.2 | Lung Ca. (small cell) NCI-H69 | 7.5 | 6.3 |
| Cerebral Cortex | 44.8 | 100.0 | Lung Ca. (s.cell var.) SHP-77 | 42.9 | 73.7 |
| Spinal cord | 4.8 | 14.9 | Lung Ca. (large cell) NCI-H460 | 2.7 | 10.1 |
| glio/astro U87-MG | 11.7 | 42.3 | Lung Ca. (non-sm. cell) A549 | 1.8 | 4.1 |
| glio/astro U-118-MG | 20.7 | 12.0 | Lung Ca. (non-s.cell) NCI-H23 | 11.7 | 28.5 |
| astrocytoma SW1783 | 8.1 | 38.2 | Lung Ca. (non-s.cell) HOP-62 | 5.3 | 24.0 |
| neuro*; met SK-N-AS | 14.2 | 6.5 | Lung Ca. (non-s.cl) NCI-H522 | 5.0 | 15.1 |
| astrocytoma SF-539 | 3.9 | 15.2 | Lung Ca. (squam.) SW 900 | 3.4 | 12.6 |
| astrocytoma SNB-75 | 8.8 | 11.3 | Lung Ca. (squam.) NCI-H596 | 1.5 | 1.9 |
| glioma SNB-19 | 4.1 | 20.0 | Mammary gland | 7.5 | 9.6 |
| glioma U251 | 2.5 | 5.8 | Breast ca.* (pl.ef) MCF-7 | 25.3 | 88.9 |
| glioma SF-295 | 3.4 | 24.0 | Breast ca.* (pl.ef) MDA-MB- | 21.8 | 6.4 |
| | | | 231 | | |
| Heart (Fetal) | 9.7 | 35.1 | Breast ca.* (pl.ef) T47D | 13.6 | 29.3 |
| Heart | 3.6 | 11.4 | Breast ca. BT-549 | 22.1 | 7.4 |
| Skeletal muscle (Fetal) | 8.2 | 44.1 | Breast Ca. MDA-N | 5.7 | 11.1 |
| Skeletal muscle | 5.6 | 47.6 | Ovary | 5.4 | 26.6 |
| Bone marrow | 3.2 | 1.7 | Ovarian Ca. OVCAR-3 | 2.5 | 4.8 |
| Thymus | 3.5 | 40.6 | Ovarian Ca. OVCAR-4 | 0.6 | 3.6 |
| Spleen | 5.4 | 10.9 | Ovarian Ca. OVCAR-5 | 3.8 | 13.1 |
| Lymph node | 2.8 | 4.4 | Ovarian Ca. OVCAR-8 | 5.9 | 21.2 |
| Colorectal | 1.9 | 9.4 | Ovarian Ca. IGROV-1 | 1.4 | 3.1 |
| Stomach | 2.2 | 2.7 | Ovarian Ca. (ascites) SK-OV-3 | 5.3 | 13.1 |
| Small intestine | 5.0 | 7.3 | Uterus | 3.9 | 6.0 |
| Colon Ca. SW480 | 6.0 | 12.6 | Placenta | 5.2 | 8.8 |
| Colon Ca.* SW620 (SW480 | 4.7 | 11.1 | Prostate | 2.0 | 6.7 |
| met) | | | | | |
| Colon Ca. HT29 | 2.6 | 7.1 | Prostate Ca.* (bone met) PC-3 | 5.4 | 9.7 |
| Colon Ca. HCT-116 | 9.5 | 22.4 | Testis | 7.7 | 24.8 |
| Colon Ca. CaCo-2 | 6.7 | 18.0 | Melanoma Hs688(A).T | 3.3 | 7.7 |
| CC Well to Mod Duff | 4.8 | 13.2 | Melanoma* (met) Hs688(B).T | 1.2 | 6.9 |
| (ODO3866) | | | | | |
| Colon Ca. HCC-2998 | 17.2 | 10.2 | Melanoma UACC-62 | 1.5 | 5.6 |
| Gastric ca. (liver met) NCI-N87 | 10.8 | 14.7 | Melanoma M14 | 4.3 | 8.1 |
| Bladder | 2.6 | 11.0 | Melanoma LOX IMVI | 4.8 | 2.9 |
| Trachea | 6.4 | 13.8 | Melanoma* (met) SK-MEL-5 | 6.9 | 10.4 |
| Kidney | 1.7 | 14.1 | Adipose | 2.3 | 6.0 |

[1042] TABLE GD
Panel 2D
Column A - Rel. Exp.(%) Ag2248, Run 159035545
Column B - Rel. Exp.(%) Ag2548, Run 162326203

| Tissue Name | A | B | Tissue Name | A | B |
|---|---|---|---|---|---|
| Normal Colon | 49.3 | 39.5 | Kidney Margin 8120608 | 4.7 | 6.3 |
| CC Well to Mod Diff (ODO3866) | 14.2 | 10.7 | Kidney Cancer 8120613 | 7.1 | 14.0 |
| CC Margin (ODO3866) | 10.7 | 8.9 | Kidney Margin 8120614 | 8.8 | 10.7 |
| CC Gr.2 rectosigmoid (ODO3868) | 6.5 | 5.9 | Kidney Cancer 9010320 | 10.9 | 13.7 |
| CC Margin (ODO3868) | 5.8 | 6.9 | Kidney Margin 9010321 | 9.7 | 18.4 |
| CC Mod Diff (ODO3920) | 38.4 | 21.5 | Normal Uterus | 6.5 | 8.0 |
| CC Margin (ODO3920) | 14.5 | 9.5 | Uterine Cancer 064011 | 42.9 | 24.1 |
| CC Gr.2 ascend colon (ODO3921) | 25.5 | 15.8 | Normal Thyroid | 40.3 | 31.0 |
| CC Margin (ODO3921) | 7.7 | 5.9 | Thyroid Cancer | 21.0 | 21.0 |
| CC from Partial Hepatectomy | 32.5 | 28.5 | Thyroid Cancer A302152 | 21.9 | 18.4 |
| (ODO4309) Mets | | | | | |
| Liver Margin (ODO4309) | 12.2 | 9.0 | Thyroid Margin A302153 | 37.9 | 39.0 |
| Colon mets to lung (ODO4451-01) | 15.6 | 8.5 | Normal Breast | 18.9 | 23.8 |
| Lung Margin (ODO4451-02) | 12.6 | 9.2 | Breast Cancer | 14.2 | 20.2 |
| Normal Prostate 6546-1 | 6.6 | 57.4 | Breast Cancer (ODO4590-01) | 100.0 | 100.0 |
| Prostate Cancer (ODO4410) | 40.3 | 30.1 | Breast Cancer Mets | 87.1 | 90.1 |
| | | | (ODO4590-03) | | |
| Prostate Margin (ODO4410) | 27.0 | 21.8 | Breast Cancer Metastasis | 37.6 | 37.4 |
| Prostate Cancer (ODO4720-01) | 28.5 | 18.3 | Breast Cancer | 14.6 | 14.1 |
| Prostate Margin (ODO4720-02) | 35.8 | 25.0 | Breast Cancer | 27.4 | 28.9 |
| Normal Lung | 56.6 | 39.0 | Breast Cancer 9100266 | 46.7 | 41.5 |
| Lung Met to Muscle (ODO4286) | 33.4 | 22.7 | Breast Margin 9100265 | 15.5 | 16.7 |
| Muscle Margin (ODO4286) | 22.1 | 12.3 | Breast Cancer A209073 | 42.3 | 42.9 |
| Lung Malignant Cancer | 33.4 | 27.0 | Breast Margin A209073 | 21.3 | 17.2 |
| (ODO3126) | | | | | |
| Lung Margin (ODO3126) | 27.5 | 21.9 | Normal Liver | 5.4 | 4.6 |
| Lung Cancer (ODO4404) | 13.3 | 14.9 | Liver Cancer | 3.8 | 3.0 |
| Lung Margin (ODO4404) | 12.0 | 11.6 | Liver Cancer 1025 | 4.2 | 2.3 |
| Lung Cancer (ODO4565) | 14.1 | 14.3 | Liver Cancer 1026 | 3.0 | 1.3 |
| Lung Margin (ODO4565) | 6.9 | 11.0 | Liver Cancer 6004-T | 3.6 | 1.6 |
| Lung Cancer (ODO4237-01) | 95.9 | 82.4 | Liver Tissue 6004-N | 11.7 | 9.0 |
| Lung Margin (ODO4237-02) | 15.5 | 13.7 | Liver Cancer 6005-T | 2.2 | 2.9 |
| Ocular Mel Met to Liver | 27.4 | 19.9 | Liver Tissue 6005-N | 4.4 | 3.8 |
| (ODO4310) | | | | | |
| Liver Margin (ODO4310) | 5.1 | 3.4 | Normal Bladder | 26.6 | 16.0 |
| Melanoma Metastasis | 24.8 | 18.8 | Bladder Cancer | 5.0 | 3.0 |
| Lung Margin (ODO4321) | 23.8 | 20.0 | Bladder Cancer | 17.1 | 8.8 |
| Normal Kidney | 40.1 | 48.0 | Bladder Cancer (ODO4718- | 22.2 | 15.5 |
| | | | 01) | | |
| Kidney Ca, Nuclear grade 2 | 30.6 | 41.8 | Bladder Normal Adjacent | 21.2 | 15.6 |
| (ODO4338) | | | (ODO4718-03) | | |
| Kidney Margin (ODO4338) | 16.4 | 15.9 | Normal Ovary | 12.6 | 8.8 |
| Kidney Ca Nuclear grade 1/2 | 11.3 | 15.8 | Ovarian Cancer | 21.6 | 16.5 |
| (ODO4339) | | | | | |
| Kidney Margin (ODO4339) | 19.6 | 24.5 | Ovarian Cancer (ODO4768- | 40.1 | 33.9 |
| | | | 07) | | |
| Kidney Ca, Clear cell type | 20.4 | 30.8 | Ovary Margin (ODO4768-08) | 11.3 | 4.0 |
| (ODO4340) | | | | | |
| Kidney Margin (ODO4340) | 18.4 | 13.9 | Normal Stomach | 12.2 | 8.8 |
| Kidney Ca, Nuclear grade 3 | 13.3 | 6.1 | Gastric Cancer 9060358 | 5.0 | 3.0 |
| (ODO4348) | | | | | |
| Kidney Margin (ODO4348) | 21.2 | 19.3 | Stomach Margin 9060359 | 16.0 | 11.0 |
| Kidney Cancer (ODO4622-01) | 19.3 | 19.2 | Gastric Cancer 9060395 | 16.3 | 12.6 |
| Kidney Margin (ODO4622-03) | 4.4 | 5.3 | Stomach Margin 9060394 | 13.9 | 10.6 |
| Kidney Cancer (ODO4450-01) | 23.8 | 27.0 | Gastric Cancer 9060397 | 24.0 | 12.1 |
| Kidney Margin (ODO4450-03) | 15.2 | 20.0 | Stomach Margin 9060396 | 6.4 | 7.1 |
| Kidney Cancer 8120607 | 5.6 | 4.2 | Gastric Cancer 064005 | 37.1 | 20.3 |

[1043] TABLE GE
Panel 3D
Column A - Rel. Exp.(%) Ag2548, Run 164886193

| Tissue Name | A | Tissue Name | A |
|---|---|---|---|
| 94905 Daoy | 8.7 | 94954 Ca Ski Cervical epidermoid | 10.6 |
| Medulloblastoma/Cerebellum | | carcinoma (metastasis | |
| 94906 TE671 | 10.7 | 94955 ES-2 Ovarian clear cell | 11.3 |
| Medulloblastom/Cerebellum | | carcinoma | |
| 94907 D283 Med | 40.6 | 94957 Ramos Stimulated with | 2.0 |
| Medulloblastoma/Cerebellum | | PMA/ionomycin 6 h | |
| 94908 PFSK-l Primitive | 9.0 | 94958 Ramos Stimulated with | 8.8 |
| Neuroectodermal/Cerebellum | | PMA/ionomycin 14 h | |
| 94909 XF-498 CNS | 9.3 | 94962 MEG-01 Chronic | 11.5 |
| | | myelogenous leukemia | |
| | | (megokaryoblast) | |
| 94910 SNB-78 CNS/glioma | 12.9 | 94963 Raji Burkitt's lymphoma | 4.5 |
| 94911 SF-268 CNS/glioblastoma | 9.4 | 94964 Daudi Burkitt's lymphoma | 12.0 |
| 94912 T98G Glioblastoma | 13.7 | 94965 U266 B-cell | 28.1 |
| | | plasmacytoma/myeloma | |
| 96776 SK-N-SH Neuroblastoma | 14.9 | 94968 CA46 Burkitt's lymphoma | 9.2 |
| (metastasis) | | | |
| 94913 SF-295 CNS/glioblastoma | 9.9 | 94970 RL non-Hodgkin's B-cell | 2.2 |
| | | lymphoma | |
| 94914 Cerebellum | 21.5 | 94972 JM1 pre-B-cell | 6.3 |
| | | lymphoma/leukemia | |
| 96777 Cerebellum | 6.0 | 94973 Jurkat T cell leukemia | 18.7 |
| 94916 NCI-H292 Mucoepidermoid | 25.7 | 94974 TF-l Erythroleukemia | 9.7 |
| lung carcinoma | | | |
| 94917 DMS-114 Small cell lung | 16.3 | 94975 HUT 78 T-cell lymphoma | 17.1 |
| cancer | | | |
| 94918 DMS-79 Small cell lung | 100.0 | 94977 U937 Histiocytic lymphoma | 11.2 |
| cancer/neuroendocrine | | | |
| 94919 NCI-H146 Small cell lung | 20.9 | 94980 KU-812 Myelogenous | 5.3 |
| cancer/neuroendocrine | | leukemia | |
| 94920 NCI-H526 Small cell lung | 36.6 | 769-P-Clear cell renal carcinoma | 6.2 |
| cancer/neuroendocrine | | | |
| 94921 NCI-N417 Small cell lung | 9.7 | 94983 Caki-2 Clear cell renal | 8.1 |
| cancer/neuroendocrine | | carcinoma | |
| 94923 NCI-H82 Small cell lung | 14.2 | 94984 SW 839 Clear cell renal | 2.9 |
| cancer/neuroendocrine | | carcinoma | |
| 94924 NCI-H157 Squamous cell lung | 19.6 | 94986 G401 Wilms' tumor | 8.8 |
| cancer (metastasis) | | | |
| 94925 NCI-H1155 Large cell lung | 34.6 | 94987 Hs766T Pancreatic carcinoma | 13.3 |
| cancer/neuroendocrine | | (LN metastasis) | |
| 94926 NCI-H1299 Large cell lung | 19.9 | 94988 CAPAN-1 Pancreatic | 7.7 |
| cancer/neuroendocrine | | adenocarcinoma (liver metastasis) | |
| 94927 NCI-H727 Lung carcinoid | 14.2 | 94989 SU86.86 Pancreatic carcinoma | 10.0 |
| | | (liver metastasis) | |
| 94928 NCI-UMC-11 Lung carcinoid | 12.6 | 94990 BxPC-3 Pancreatic | 4.3 |
| | | adenocarcinoma | |
| 94929 LX-1 Small cell lung cancer | 20.0 | 94991 HPAC Pancreatic | 6.6 |
| | | adenocarcinoma | |
| 94930 Colo-205 Colon cancer | 15.8 | 94992 MIA PaCa-2 Pancreatic | 4.6 |
| | | carcinoma | |
| 94931 KM12 Colon cancer | 9.3 | 94993 CFPAC-1 Pancreatic ductal | 19.5 |
| | | adenocarcinoma | |
| 94932 KM20L2 Colon cancer | 3.0 | 94994 PANC-1 Pancreatic epithelioid | 9.5 |
| | | ductal carcinoma | |
| 94933 NCI-H716 Colon cancer | 19.1 | 94996 T24 Bladder carcinma | 9.9 |
| | | (transitional cell | |
| 94935 SW-48 Colon adenocarcinoma | 7.9 | 5637- Bladder carcinoma | 4.7 |
| 94936 SW1116 Colon | 7.4 | 94998 HT-1197 Bladder carcinoma | 6.1 |
| adenocarcinoma | | | |
| 94937 LS 174T Colon | 4.6 | 94999 UM-UC-3 Bladder carcimia | 2.8 |
| adenocarcinoma | | (transitional cell) | |
| 94938 SW-948 Colon | 1.1 | 95000 A204 Rhabdomyosarcoma | 3.4 |
| adenocarcinoma | | | |
| 94939 SW-480 Colon | 2.7 | 95001 HT-1080 Fibrosarcoma | 10.7 |
| adenocarcinoma | | | |
| 94940 NCI-SNU-5 Gastric carcinoma | 9.3 | 95002 MG-63 Osteosarcoma (bone) | 1.3 |
| KATO III-Gastric carcinoma | 24.0 | 95003 SK-LMS-1 Leiomyosarcoma | 9.5 |
| | | (vulva) | |
| 94943 NCI-SNU-16 Gastric | 9.5 | 95004 SJRH30 Rhabdomyosarcoma | 10.2 |
| carcinoma | | (met to bone marrow) | |
| 94944 NCI-SNU-1 Gastric carcinoma | 12.2 | 95005 A431 Epidermoid carcinoma | 5.0 |
| 94946 RF-1 Gastric adenocarcinoma | 5.1 | 95007 WM266-4 Melanoma | 10.5 |
| 94947 RF-48 Gastric adenocarcinoma | 8.1 | DU 145-Prostate carcinoma (brain | 0.0 |
| | | metastasis) | |
| 96778 MKN-45 Gastric carcinoma | 5.3 | 95012 MDA-MB-468 Breast | 20.7 |
| | | adenocarcinoma | |
| 94949 NCI-N87 Gastric carcinoma | 7.4 | SCC-4-Squamous cell carcinoma of | 0.0 |
| | | tongue | |
| 94951 OVCAR-5 Ovarian carcinoma | 2.7 | SCC-9-Squamous cell carcinoma of | 0.0 |
| | | tongue | |
| 94952 RL95-2 Uterine carcinoma | 3.8 | SCC-15-Squamous cell carcinoma of | 0.0 |
| | | tongue | |
| 94953 HelaS3 Cervical | 10.7 | 95017 CAL 27 Squamous cell | 5.5 |
| adenocarcinoma | | carcinoma of tongue | |

[1044] TABLE GF
Panel 4D
Column A - Rel. Exp.(%) Ag2248, Run 159034717

| Tissue Name | A | Tissue Name | A |
|---|---|---|---|
| Secondary Th1 act | 27.2 | HUVEC IL-1 beta | 8.4 |
| Secondary Th2 act | 33.4 | HUVEC IFN gamma | 14.4 |
| Secondary Tr1 act | 37.4 | HUVEC TNF alpha + IFN gamma | 7.4 |
| Secondary Th1 rest | 11.7 | HUVEC TNF alpha + IL4 | 6.6 |
| Secondary Th2 rest | 10.4 | HUVEC IL-11 | 11.8 |
| Secondary Tr1 rest | 12.5 | Lung Microvascular EC none | 9.9 |
| Primary Th1 act | 28.5 | Lung Microvascular EC TNFalpha + IL- | 18.2 |
| | | 1 beta | |
| Primary Th2 act | 29.3 | Microvascular Dermal EC none | 28.9 |
| Primary Tr1 act | 29.3 | Microsvasular Dermal EC TNFalpha + IL- | 20.2 |
| | | 1 beta | |
| Primary Th1 rest | 62.4 | Bronchial epithelium TNFalpha + IL1 beta | 20.7 |
| Primary Th2 rest | 39.8 | Small airway epithelium none | 6.9 |
| Primary Tr1 rest | 15.3 | Small airway epithelium TNFalpha + IL- | 40.3 |
| | | 1 beta | |
| CD45RA CD4 lymphocyte act | 18.6 | Coronery artery SMC rest | 15.4 |
| CD45RO CD4 lymphocyte act | 20.9 | Coronery artery SMC TNFalpha + IL-1 beta | 6.8 |
| CD8 lymphocyte act | 14.7 | Astrocytes rest | 20.0 |
| Secondary CD8 lymphocyte rest | 11.9 | Astrocytes TNFalpha + IL-1 beta | 15.8 |
| Secondary CD8 lymphocyte act | 19.9 | KU-812 (Basophil) rest | 8.1 |
| CD4 lymphocyte none | 8.2 | KU-812 (Basophil) PMA/ionomycin | 20.2 |
| 2ry Th1/Th2/Tr1 anti-CD95 | 17.4 | CCD1106 (Keratinocytes) none | 11.5 |
| CH11 | | | |
| LAK cells rest | 19.2 | CCD1106 (Keratinocytes) TNFalpha + IL- | 5.3 |
| | | 1 beta | |
| LAK cells IL-2 | 18.2 | Liver cirrhosis | 2.4 |
| LAK cells IL-2 + IL-12 | 11.0 | Lupus kidney | 1.8 |
| LAK cells IL-2 + IFN gamma | 19.5 | NCI-H292 none | 39.5 |
| LAK cells IL-2 + IL-18 | 17.7 | NCI-H292 IL-4 | 38.2 |
| LAK cells PMA/ionomycin | 3.6 | NCI-H292 IL-9 | 40.1 |
| NK Cells IL-2 rest | 11.0 | NCI-H292 IL-13 | 18.2 |
| Two Way MLR 3 day | 19.2 | NCI-H292 IFN gamma | 14.7 |
| Two Way MLR 5 day | 8.9 | HPAEC none | 19.2 |
| Two Way MLR 7 day | 6.7 | HPAEC TNF alpha + IL-1 beta | 28.5 |
| PBMC rest | 5.8 | Lung fibroblast none | 17.4 |
| PBMC PWM | 40.6 | Lung fibroblast TNF alpha + IL-1 beta | 17.1 |
| PBMC PHA-L | 25.9 | Lung fibroblast IL-4 | 30.4 |
| Ramos (B cell) none | 26.6 | Lung fibroblast IL-9 | 20.2 |
| Ramos (B cell) ionomycin | 100.0 | Lung fibroblast IL-13 | 16.3 |
| B lymphocytes PWM | 35.6 | Lung fibroblast LFN gamma | 28.1 |
| B lymphocytes CD40L and IL-4 | 29.7 | Dermal fibroblast CCD1070 rest | 32.3 |
| EOL-1 dbcAMP | 10.5 | Dermal fibroblast CCD1070 TNF alpha | 57.0 |
| EOL-1 dbcAMP | 7.5 | Dermal fibroblast CCD1070 IL-1 beta | 15.3 |
| PMA/ionomycin | | | |
| Dendritic cells none | 11.6 | Dermal fibroblast IFN gamma | 12.1 |
| Dendritic cells LPS | 7.7 | Dermal fibroblast IL-4 | 20.3 |
| Dendritic cells anti-CD40 | 9.6 | IBD Colitis 2 | 2.3 |
| Monocytes rest | 12.6 | IBD Crohn's | 2.6 |
| Monocytes LPS | 21.0 | Colon | 11.5 |
| Macrophages rest | 24.5 | Lung | 16.2 |
| Macrophages LPS | 14.8 | Thymus | 38.7 |
| HUVEC none | 25.9 | Kidney | 71.2 |
| HUVEC starved | 40.9 | | |

[1045] TABLE GG
Panel 5 Islet
Column A - Rel. Exp.(%) Ag2248, Run 233070521

| Tissue Name | A | Tissue Name | A |
|---|---|---|---|
| 97457 Patient-02go adipose | 23.7 | 94709 Donor 2 AM - A adipose | 10.5 |
| 97476 Patient-07sk skeletal muscle | 12.3 | 94710 Donor 2 AM - B adipose | 5.0 |
| 97477 Patient-07ut uterus | 18.9 | 94711 Donor 2 AM - C adipose | 5.3 |
| 97478 Patient-07pl placenta | 35.6 | 94712 Donor 2 AD - A adipose | 14.5 |
| 99167 Bayer Patient 1 | 25.0 | 94713 Donor 2 AD - B adipose | 25.2 |
| 97482 Patient-08ut uterus | 23.2 | 94714 Donor 2 AD - C adipose | 18.7 |
| 97483 Patient-08pl placenta | 25.5 | 94742 Donor 3 U - A Mesenchymal | 7.4 |
| | | Stem Cells | |
| 97486 Patient-09sk skeletal muscle | 0.7 | 94743 Donor 3 U - B Mesenchymal | 11.2 |
| | | Stem Cells | |
| 97487 Patient-09ut uterus | 23.0 | 94730 Donor 3 AM - A adipose | 14.6 |
| 97488 Patient-09pl placenta | 15.3 | 94731 Donor 3 AM - B adipose | 4.5 |
| 97492 Patient-10ut uterus | 15.1 | 94732 Donor 3 AM - C adipose | 10.5 |
| 97493 Patient-10pl placenta | 52.9 | 94733 Donor 3 AD - A adipose | 40.1 |
| 97495 Patient-11go adipose | 9.1 | 94734 Donor 3 AD - B adipose | 16.0 |
| 97496 Patient-11sk skeletal muscle | 10.2 | 94735 Donor 3 AD - C adipose | 14.0 |
| 97497 Patient-11ut uterus | 21.8 | 77138 Liver HepG2untreated | 100.0 |
| 97498 Patient-11pl placenta | 36.3 | 73556 Heart Cardiac stromal cells | 9.5 |
| | | (primary) | |
| 97500 Patient-12go adipose | 21.0 | 81735 Small Intestine | 8.7 |
| 97501 Patient-12sk skeletal muscle | 35.4 | 72409 Kidney Proximal Convoluted | 16.7 |
| | | Tubule | |
| 97502 Patient-12ut uterus | 15.5 | 82685 Small intestine Duodenum | 5.1 |
| 97503 Patient-12p1 placenta | 9.5 | 90650 Adrenal Adrenocortical | 18.0 |
| | | adenoma | |
| 94721 Donor 2 U - A Mesenchymal | 8.3 | 72410 Kidney HRCE | 42.0 |
| Stem Cells | | | |
| 94722 Donor 2 U - B Mesenchymal | 8.3 | 72411 Kidney HRE | 27.0 |
| Stem Cells | | | |
| 94723 Donor 2 U - C Mesenchymal | 20.4 | 73139 Uterus Uterine smooth muscle | 41.5 |
| Stem Cells | | cells | |

[1046] Panel 1.3D Summary: Ag2248/Ag2548 Highest expression of this gene was detected seen in regions of the brain (CTs=28-29).

[1047] This gene encodes a protein that is homologous to steroid dehydrogenase. Steroid treatment is used in a number of clinical conditions including Alzheimer's disease (estrogen), treatment of symptoms associated with menopause (estrogen), multiple sclerosis (glucocorticoids), and spinal cord injury (methylprednisolone). Treatment with an antagonst of this gene product, or reduction of the levels of this gene product is useful for the inhibition of steroid degredation and for lowering the necessary amount given for a therapeutic effect, thus reducing peripheral side effects.

[1048] This gene was moderately expressed in a variety of metabolic tissues including pancreas, adrenal, thyroid, pituitary, adult and fetal heart, adult and fetal skeletal muscle, fetal liver, and adipose. This gene product is a small molecule drug target for the treatment of metabolic disease, including obesity and Types 1 and 2 diabetes.

[1049] The ubiquitous expression of this gene in this panel also showed that the protein encoded by this gene plays a role in cell survival and proliferation for a majority of cell types. There are significant levels of expression in the lung cancer cell line SHP-77. Expression of this gene is of use as a diagnostic marker for lung cancer. Modulation of the gene product is useful in the treatment of lung cancer

[1050] Panel 2D Summary: Ag2248/Ag2548 The highest level of expression was seen in a breast cancer sample (CTs=27-29). In addition, this gene was overexpressed in ovarian, gastric, breast, uterine, lung and colon cancers relative to the normal adjacent tissues from these patients. The expression of this gene is of use as a diagnostic marker for the presence of these cancers. Therapeutic inhibition of the activity of this gene product is effective in the treatment of these cancers.

[1051] Panel 3D Summary: Ag2548 This gene was expressed at a low to moderate level in most of the cells and tissues used in this panel, with highest expression in the small cell lung cancer cell line DMS-79 (CT=27.79). This ubiquitous expression showed that the gene product plays a role in cell survival and proliferation for a majority of cell types except cell lines derived from tongue squamous cell carcinoma.

[1052] Panel 4D Summary: Ag2248 This gene encodes a steroid dehydrogenase-like protein and was expressed at moderate levels (CT=28-32) in numerous immune cell types and tissues. Small molecule antagonists that block the function of the steroid dehydrogenase-like protein encoded by this gene are useful as therapeutics that reduce or eliminate the symptoms of patients suffering from autoimmune and inflammatory diseases such as asthma, allergies, inflammatory bowel disease, lupus erythematosus, or rheumatoid arthritis.

[1053] Panel 5 Islet Summary: Ag2248 The expression of this novel steroid dehydrogenase-like gene was highest in the liver HepG2 cell line, (CT=32.1). Lower but still significant levels of expression were seen in several placenta samples, uterine smooth muscle, adipose samples, differentiated mesenchymal stem cells, and kidney and skeletal muscle from a diabetic patient. Expression in liver cells and placenta showed that the role of this novel steroid dehydrogenase is similar to the role of other steroid dehydrogenases which are involved in steroid and bile acid metabolism. Very low expression of this gene was also seen in a human pancreatic islet sample. Therefore, small molecule therapeutics against this gene product are effective in disorders in which expression of this gene is dysregulated.

[1054] H. CG50315-01: Olfactory Receptor

[1055] Expression of full-length physical clone CG50315-01 was assessed using the primer-probe sets Ag1665 and Ag2542, described in Tables HA and HB. Results of the RTQ-PCR runs are shown in Tables HC, HD, and HE.

TABLE HA
Probe Name Ag1665

| | | | Start | SEQ ID |
|---|---|---|---|---|
| Primers | Sequences | Length | Position | No |
| Forward | 5′-atcttctttggcaattttgtga-3′ | 22 | 332 | 1157 |
| Probe | TET-5′-aatgcctccgtcatcctgatttcct-3′- | 25 | 299 | 1158 |
| | TAMRA | | | |
| Reverse | 5′-atggtcttgatgatgagcagat-3′ | 22 | 277 | 1159 |

[1056] TABLE HB
Probe Name Ag2542

| | | | Start | SEQ ID |
|---|---|---|---|---|
| Primers | Sequences | Length | Position | No |
| Forward | 5′-ggaatgtggggatgattatgtt-3′ | 22 | 808 | 1160 |
| Probe | TET-5′-tccaagtagatgtcaaactctacacccca- | 29 | 777 | 1161 |
| | 3′-TAMRA | | | |
| Reverse | 5′-gaggtggctcaggaagaagtac-3′ | 22 | 753 | 1162 |

[1057] TABLE HC
PGI1.0
Column A - Rel. Exp.(%) Ag2542, Run 395549579

| Tissue Name | A | Tissue Name | A |
|---|---|---|---|
| 162191 Normal Lung 1 (IBS) | 0.2 | 162185 Emphysema Lung 12 (Ardais) | 2.4 |
| 160468 MD lung | 1.9 | 162184 Emphysema Lung 13 (Ardais) | 1.5 |
| 156629 MD Lung 13 | 2.7 | 162183 Emphysema Lung 14 (Ardais) | 2.0 |
| 162570 Normal Lung 4 (Aastrand) | 1.6 | 162188 Emphysema Lung 15 (Genomic | 41.2 |
| | | Collaborative) | |
| 162571 Normal Lung 3 (Aastrand) | 0.5 | 162177 NAT UC Colon 1(Ardais) | 0.0 |
| 162187 Fibrosis Lung 2 (Genomic | 100.0 | 162176 UC Colon 1(Ardais) | 0.5 |
| Collaborative) | | | |
| 151281 Fibrosis lung 11(Ardais) | 3.0 | 162179 NAT UC Colon 2(Ardais) | 1.6 |
| 162186 Fibrosis Lung 1 (Genomic | 34.6 | 162178 UC Colon 2(Ardais) | 0.0 |
| Collaborative) | | | |
| 162190 Asthma Lung 4 (Genomic | 70.7 | 162181 NAT UC Colon 3(Ardais) | 1.7 |
| Collaborative) | | | |
| 160467 Asthma Lung 13 (MD) | 1.5 | 162180 UC Colon 3(Ardais) | 0.0 |
| 137027 Emphysema Lung 1 | 0.0 | 162182 NAT UC Colon 4 (Ardais) | 1.2 |
| (Ardais) | | | |
| 137028 Emphysema Lung 2 | 0.0 | 137042 UC Colon 1108 | 1.3 |
| (Ardais) | | | |
| 137040 Emphysema Lung 3 | 1.7 | 137029 UC Colon 8215 | 1.1 |
| (Ardais) | | | |
| 137041 Emphysema Lung 4 | 5.4 | 137031 UC Colon 8217 | 1.6 |
| (Ardais) | | | |
| 137043 Emphysema Lung 5 | 6.0 | 137036 UC Colon 1137 | 0.0 |
| (Ardais) | | | |
| 142817 Emphysema Lung 6 | 3.5 | 137038 UC Colon 1491 | 2.4 |
| (Ardais) | | | |
| 142818 Emphysema Lung 7 | 6.3 | 137039 UC Colon 1546 | 2.8 |
| (Ardais) | | | |
| 142819 Emphysema Lung 8 | 4.6 | 162593 Crohn's 47751 (NDRI) | 0.0 |
| (Ardais) | | | |
| 142820 Emphysema Lung 9 | 3.9 | 162594 NAT Crohn's 47751 (NDRI) | 0.0 |
| (Ardais) | | | |
| 142821 Emphysema Lung 10 | 6.5 | | |
| (Ardais) | | | |

[1058] TABLE HD
Panel 2D
Column A - Rel. Exp.(%) Ag2542, Run 165910338

| Tissue Name | A | Tissue Name | A |
|---|---|---|---|
| Normal Colon | 0.0 | Kidney Margin 8120608 | 5.5 |
| CC Well to Mod Diff (ODO3866) | 5.1 | Kidney Cancer 8120613 | 0.0 |
| CC Margin (ODO3866) | 0.0 | Kidney Margin 8120614 | 5.9 |
| CC Gr.2 rectosigmoid (ODO3868) | 0.0 | Kidney Cancer 9010320 | 0.0 |
| CC Margin (ODO3868) | 0.0 | Kidney Margin 9010321 | 5.1 |
| CC Mod Diff (ODO3920) | 0.0 | Normal Uterus | 0.0 |
| CC Margin (ODO3920) | 0.0 | Uterine Cancer 064011 | 0.0 |
| CC Gr.2 ascend colon (ODO3921) | 0.0 | Normal Thyroid | 0.0 |
| CC Margin (ODO3921) | 9.9 | Thyroid Cancer | 8.1 |
| CC from Partial Hepatectomy | 0.0 | Thyroid Cancer A302152 | 0.0 |
| (ODO4309) Mets | | | |
| Liver Margin (ODO4309) | 0.0 | Thyroid Margin A302153 | 0.0 |
| Colon mets to lung (OD04451-01) | 0.0 | Normal Breast | 0.0 |
| Lung Margin (OD04451-02) | 4.0 | Breast Cancer | 0.0 |
| Normal Prostate 6546-1 | 0.0 | Breast Cancer (OD04590-01) | 0.0 |
| Prostate Cancer (OD04410) | 0.0 | Breast Cancer Mets (0D04590-03) | 9.3 |
| Prostate Margin (OD04410) | 0.0 | Breast Cancer Metastasis | 4.8 |
| Prostate Cancer (OD04720-01) | 0.0 | Breast Cancer | 0.0 |
| Prostate Margin (OD04720-02) | 0.0 | Breast Cancer | 0.0 |
| Normal Lung | 0.0 | Breast Cancer 9100266 | 0.0 |
| Lung Met to Muscle (ODO4286) | 5.1 | Breast Margin 9100265 | 0.0 |
| Muscle Margin (ODO4286) | 0.0 | Breast Cancer A209073 | 3.1 |
| Lung Malignant Cancer (OD03126) | 0.0 | Breast Margin A209073 | 0.0 |
| Lung Margin (OD03126) | 0.0 | Normal Liver | 0.0 |
| Lung Cancer (OD04404) | 22.8 | Liver Cancer | 0.0 |
| Lung Margin (OD04404) | 0.0 | Liver Cancer 1025 | 0.0 |
| Lung Cancer (OD04565) | 0.0 | Liver Cancer 1026 | 0.0 |
| Lung Margin (OD04565) | 0.0 | Liver Cancer 6004-T | 0.0 |
| Lung Cancer (OD04237-01) | 0.0 | Liver Tissue 6004-N | 7.7 |
| Lung Margin (OD04237-02) | 0.0 | Liver Cancer 6005-T | 0.0 |
| Ocular Mel Met to Liver (ODO4310) | 7.9 | Liver Tissue 6005-N | 0.0 |
| Liver Margin (OD04310) | 0.0 | Normal Bladder | 15.7 |
| Melanoma Metastasis | 0.0 | Bladder Cancer | 0.0 |
| Lung Margin (OD04321) | 0.0 | Bladder Cancer | 12.6 |
| Normal Kidney | 100.0 | Bladder Cancer (OD04718-01) | 0.0 |
| Kidney Ca, Nuclear grade 2 (OD04338) | 0.0 | Bladder Normal Adjacent | 0.0 |
| | | (OD04718-03) | |
| Kidney Margin (OD04338) | 0.0 | Normal Ovary | 4.8 |
| Kidney Ca Nuclear grade 1/2 (OD04339) | 16.6 | Ovarian Cancer | 0.0 |
| Kidney Margin (OD04339) | 37.6 | Ovarian Cancer (OD04768-07) | 0.0 |
| Kidney Ca, Clear cell type (OD04340) | 11.2 | Ovary Margin (OD04768-08) | 0.0 |
| Kidney Margin (OD04340) | 4.8 | Normal Stomach | 0.0 |
| Kidney Ca, Nuclear grade 3 (OD04348) | 0.0 | Gastric Cancer 9060358 | 0.0 |
| Kidney Margin (OD04348) | 3.9 | Stomach Margin 9060359 | 0.0 |
| Kidney Cancer (OD04622-01) | 0.0 | Gastric Cancer 9060395 | 0.0 |
| Kidney Margin (OD04622-03) | 0.0 | Stomach Margin 9060394 | 0.0 |
| Kidney Cancer (OD04450-01) | 0.0 | Gastric Cancer 9060397 | 0.0 |
| Kidney Margin (OD04450-03) | 11.2 | Stomach Margin 9060396 | 0.0 |
| Kidney Cancer 8120607 | 0.0 | Gastric Cancer 064005 | 8.7 |

[1059] TABLE HE
Panel 4D
Column A - Rel. Exp.(%) Ag1665, Run 165974950
Column B - Rel. Exp.(%) Ag1665, Run 165974996
Column C - Rel. Exp.(%) Ag2542, Run 164392485
Column D - Rel. Exp.(%) Ag2542, Run 165871865

| Tissue Name | A | B | C | D |
|---|---|---|---|---|
| Secondary Th1 act | 0.0 | 0.0 | 0.0 | 0.0 |
| Secondary Th2 act | 0.0 | 0.0 | 0.0 | 0.0 |
| Secondary Tr1 act | 3.5 | 4.2 | 0.0 | 0.0 |
| Secondary Th1 rest | 0.0 | 0.0 | 0.0 | 0.0 |
| Secondary Th2 rest | 0.0 | 0.0 | 0.0 | 0.0 |
| Secondary Tr1 rest | 0.0 | 0.0 | 0.0 | 0.0 |
| Primary Th1 act | 0.0 | 0.0 | 0.0 | 0.0 |
| Primary Th2 act | 0.0 | 0.0 | 0.0 | 0.0 |
| Primary Tr1 act | 0.0 | 7.3 | 0.0 | 0.0 |
| Primary Th1 rest | 0.0 | 0.0 | 0.0 | 0.0 |
| Primary Th2 rest | 0.0 | 0.0 | 0.0 | 0.0 |
| Primary Tr1 rest | 0.0 | 8.4 | 0.0 | 0.0 |
| CD45RA CD4 lymphocyte act | 0.0 | 14.3 | 0.0 | 0.0 |
| CD45RO CD4 lymphocyte act | 0.0 | 0.0 | 0.0 | 0.0 |
| CD8 lymphocyte act | 0.0 | 0.0 | 0.0 | 0.0 |
| Secondary CD8 lymphocyte rest | 0.0 | 5.4 | 0.0 | 0.0 |
| Secondary CD8 lymphocyte act | 0.0 | 13.3 | 0.0 | 0.0 |
| CD4 lymphocyte none | 0.0 | 0.0 | 0.0 | 0.0 |
| 2ry Th1/Th2/Tr1 anti-CD95 CH11 | 0.0 | 9.0 | 0.0 | 0.0 |
| LAK cells rest | 0.0 | 0.0 | 0.0 | 0.0 |
| LAK cells IL-2 | 0.0 | 0.0 | 0.0 | 0.0 |
| LAK cells IL-2 + IL-12 | 0.0 | 0.0 | 0.0 | 0.0 |
| LAK cells IL-2 + IFN gamma | 0.0 | 0.0 | 0.0 | 0.0 |
| LAK cells IL-2 + IL-18 | 0.0 | 0.0 | 0.0 | 0.0 |
| LAK cells PMA/ionomycin | 0.0 | 0.0 | 0.0 | 0.0 |
| NK Cells IL-2 rest | 0.0 | 0.0 | 0.0 | 0.0 |
| Two Way MLR 3 day | 0.0 | 7.3 | 0.0 | 0.0 |
| Two Way MLR 5 day | 0.0 | 20.2 | 0.0 | 0.0 |
| Two Way MLR 7 day | 0.0 | 0.0 | 0.0 | 0.0 |
| PBMC rest | 0.0 | 0.0 | 0.1 | 0.0 |
| PBMC PWM | 0.0 | 0.0 | 0.0 | 0.0 |
| PBMC PHA-L | 3.1 | 0.0 | 0.0 | 0.0 |
| Ramos (B cell) none | 0.0 | 6.5 | 0.0 | 0.0 |
| Ramos (B cell) ionomycin | 0.0 | 49.3 | 0.0 | 0.0 |
| B lymphocytes PWM | 0.0 | 0.0 | 0.0 | 6.3 |
| B lymphocytes CD40L and IL-4 | 0.0 | 0.0 | 0.0 | 0.0 |
| EOL-1 dbcAMP | 0.0 | 0.0 | 0.0 | 0.0 |
| EOL-1 dbcAMP PMA/ionomycin | 0.0 | 0.0 | 0.0 | 0.0 |
| Dendritic cells none | 0.0 | 7.5 | 0.0 | 0.0 |
| Dendritic cells LPS | 0.0 | 0.0 | 0.0 | 0.0 |
| Dendritic cells anti-CD40 | 0.0 | 0.0 | 0.0 | 0.0 |
| Monocytes rest | 0.0 | 0.0 | 0.0 | 0.0 |
| Monocytes LPS | 0.0 | 0.0 | 0.0 | 0.0 |
| Macrophages rest | 0.0 | 14.4 | 0.0 | 0.0 |
| Macrophages LPS | 0.0 | 12.6 | 0.0 | 0.0 |
| HUVEC none | 0.0 | 0.0 | 7.6 | 0.0 |
| HUVEC starved | 0.0 | 0.0 | 0.0 | 0.0 |
| HUVEC IL-1 beta | 0.0 | 0.0 | 0.0 | 10.4 |
| HUVEC IFN gamma | 0.0 | 0.0 | 0.0 | 0.0 |
| HUVEC TNF alpha + IFN gamma | 0.0 | 0.0 | 0.0 | 0.0 |
| HUVEC TNF alpha + IL4 | 0.0 | 0.0 | 0.0 | 0.0 |
| HUVEC IL-11 | 0.0 | 0.0 | 0.0 | 0.0 |
| Lung Microvascular EC none | 0.0 | 0.0 | 0.0 | 1.5 |
| Lung Microvascular EC TNFalpha + | 0.0 | 0.0 | 0.0 | 0.0 |
| IL-1 beta | | | | |
| Microvascular Dermal EC none | 0.0 | 10.5 | 0.0 | 0.0 |
| Microsvasular Dermal EC TNFalpha + | 0.0 | 0.0 | 0.0 | 0.0 |
| IL-1 beta | | | | |
| Bronchial epithelium TNFalpha + IL1 beta | 3.5 | 0.0 | 0.0 | 23.0 |
| Small airway epithelium none | 2.9 | 4.4 | 100.0 | 0.0 |
| Small airway epithelium TNFalpha + | 6.2 | 9.2 | 0.1 | 25.2 |
| IL-1 beta | | | | |
| Coronery artery SMC rest | 0.0 | 20.4 | 0.0 | 0.0 |
| Coronery artery SMC TNFalpha + IL-1 beta | 2.9 | 8.2 | 0.1 | 13.0 |
| Astrocytes rest | 0.0 | 0.0 | 0.0 | 0.0 |
| Astrocytes TNFalpha + IL-1 beta | 0.0 | 0.0 | 0.0 | 0.0 |
| KU-812 (Basophil) rest | 0.0 | 0.0 | 0.0 | 0.0 |
| KU-812 (Basophil) PMA/ionomycin | 0.0 | 0.0 | 0.0 | 0.0 |
| CCD1106 (Keratinocytes) none | 0.0 | 0.0 | 0.0 | 0.0 |
| CCD1106 (Keratinocytes) TNFalpha + | 7.1 | 0.0 | 0.0 | 7.8 |
| IL-1 beta | | | | |
| Liver cirrhosis | 100.0 | 100.0 | 0.2 | 100.0 |
| Lupus kidney | 3.0 | 0.0 | 0.0 | 4.0 |
| NCI-H292 none | 0.0 | 0.0 | 0.0 | 0.0 |
| NCI-H292 IL-4 | 0.0 | 4.8 | 0.0 | 0.0 |
| NCI-H292 IL-9 | 0.0 | 0.0 | 0.0 | 5.7 |
| NCI-H292 IL-13 | 0.0 | 0.0 | 0.0 | 0.0 |
| NCI-H292 IFN gamma | 0.0 | 0.0 | 0.0 | 0.0 |
| HPAEC none | 0.0 | 0.0 | 0.0 | 0.0 |
| HPAEC TNF alpha + IL-1 beta | 0.0 | 0.0 | 0.0 | 0.0 |
| Lung fibroblast none | 0.0 | 0.0 | 0.0 | 0.0 |
| Lung fibroblast TNF alpha + IL-1 beta | 2.1 | 0.0 | 0.0 | 0.0 |
| Lung fibroblast IL-4 | 0.0 | 0.0 | 0.0 | 0.0 |
| Lung fibroblast IL-9 | 0.0 | 0.0 | 0.0 | 4.3 |
| Lung fibroblast IL-13 | 0.0 | 0.0 | 0.0 | 0.0 |
| Lung fibroblast IFN gamma | 0.0 | 0.0 | 0.0 | 0.0 |
| Dermal fibroblast CCD1070 rest | 0.0 | 0.0 | 0.0 | 6.2 |
| Dermal fibroblast CCD1070 TNF alpha | 0.0 | 0.0 | 0.0 | 0.0 |
| Dermal fibroblast CCD1070 IL-1 beta | 0.0 | 0.0 | 0.0 | 0.0 |
| Dermal fibroblast IFN gamma | 0.0 | 0.0 | 0.0 | 0.0 |
| Dermal fibroblast IL-4 | 0.0 | 0.0 | 0.0 | 0.0 |
| IBD Colitis 2 | 20.2 | 38.7 | 0.0 | 16.8 |
| IBD Crohn's | 4.0 | 16.8 | 0.0 | 0.0 |
| Colon | 2.8 | 12.9 | 0.0 | 10.4 |
| Lung | 3.8 | 0.0 | 0.0 | 4.7 |
| Thymus | 20.6 | 35.6 | 0.2 | 27.0 |
| Kidney | 0.0 | 0.0 | 0.0 | 0.0 |

[1060] PGI1.0 Summary: Ag2542 Expression of this gene was highest in a lung fibrosis sample (CT=31). Expression of this gene was also significantly upregulated in another lung fibrosis sample as well as an asthmatic lung sample; more modest overexpression was seen in lung samples from patients with emphysema. Thus, gene or protein levels are useful for the detection of lung diseases such as lung fibrosis, emphysema and asthma. Furthermore, therapeutic modulation of the activity of this gene or its protein product is useful in the treatment of lung fibrosis, emphysema or asthma.

[1061] Panel 2D Summary: Ag1665 The expression of this gene was low in the samples on Panel 2D. The highest expression was associated with a sample of normal kidney (CT=32.9). In addition, there was a cluster of expression associated with normal kidney tissue when compared to malignant kidney tissue. Thus, the loss of expression of this gene was associated with kidney cancer, and as such, therapeutic application of the protein or its replacement by gene therapy is of use in the treatment of kidney cancer.

[1062] Panel 4D Summary: Ag1665/Ag2542 Mmoderate expression of this gene was seen in one IBD colitis sample, with lower expression in a second colitis sample in 3 (of 4 possible) experiments. In addition, low expression was detected in liver cirrhosis (CT=32.7) and thymus (CT=35) in 3 (of 4 possible) determinations. The function of the GPCR encoded by this gene is important in the disease processes in both inflammatory bowel disease and in liver cirrhosis. Therefore, blocking antibodies or small molecule antagonists targeted to this GPCR are useful as therapeutics in colitis and in cirrhosis.

[1063] I. CG50341-01: GPCR

[1064] Expression of gene CG50341-01 was assessed using the primer-probe set Ag1201, described in Table IA. Results of the RTQ-PCR runs are shown in Tables IB, IC and ID.

TABLE IA
Probe Name Ag1201

| | | | Start | SEQ ID |
|---|---|---|---|---|
| Primers | Sequences | Length | Position | No |
| Forward | 5′-agagacaatccaaagccttttc-3′ | 22 | 709 | 1163 |
| Probe | TET-5′-caactgtgtgcctcacctcattgttg-3′- | 26 | 731 | 1164 |
| | TAMRA | | | |
| Reverse | 5′-agaccctggctttaaataagca-3′ | 22 | 785 | 1165 |

[1065] TABLE IB
Panel 1.3D
Column A - Rel. Exp.(%) Ag1201, Run 147490505
Column B - Rel. Exp.(%) Ag1201, Run 152628232
Column C - Rel. Exp.(%) Ag1201, Run 165528215

| Tissue Name | A | B | C | Tissue Name | A | B | C |
|---|---|---|---|---|---|---|---|
| Liver adenocarcinoma | 0.0 | 13.7 | 0.0 | Kidney (fetal) | 15.7 | 19.6 | 0.0 |
| Pancreas | 0.0 | 0.0 | 0.0 | Renal Ca. 786-0 | 0.0 | 0.0 | 0.0 |
| Pancreatic ca. CAPAN 2 | 0.0 | 0.0 | 66.9 | Renal ca. A498 | 0.0 | 0.0 | 0.0 |
| Adrenal gland | 0.0 | 0.0 | 0.0 | Renal ca. RXF 393 | 0.0 | 0.0 | 0.0 |
| Thyroid | 0.0 | 26.2 | 0.0 | Renal ca. ACHN | 0.0 | 0.0 | 0.0 |
| Salivary gland | 0.0 | 14.7 | 0.0 | Renal ca. UO-31 | 0.0 | 0.0 | 0.0 |
| Pituitary gland | 7.5 | 0.0 | 0.0 | Renal ca. TK-10 | 0.0 | 0.0 | 0.0 |
| Brain (fetal) | 0.0 | 0.0 | 0.0 | Liver | 0.0 | 0.0 | 0.0 |
| Brain (whole) | 3.3 | 0.0 | 0.0 | Liver (fetal) | 0.0 | 0.0 | 0.0 |
| Brain (amygdala) | 0.0 | 0.0 | 0.0 | Liver ca. (hepatoblast) | 0.0 | 0.0 | 0.0 |
| | | | | HepG2 | | | |
| Brain (cerebellum) | 0.0 | 0.0 | 21.0 | Lung | 9.2 | 0.0 | 0.0 |
| Brain (hippocampus) | 0.0 | 0.0 | 0.0 | Lung (fetal) | 0.0 | 0.0 | 11.4 |
| Brain (substantia nigra) | 0.0 | 0.0 | 0.0 | Lung ca. (small cell) LX- | 0.0 | 0.0 | 0.0 |
| | | | | 1 | | | |
| Brain (thalamus) | 0.0 | 0.0 | 0.0 | Lung ca. (small cell) NCI- | 0.0 | 0.0 | 0.0 |
| Cerebral Cortex | 0.0 | 0.0 | 0.0 | Lung ca. (s.cell var.) | 0.0 | 0.0 | 0.0 |
| | | | | SHP-77 | | | |
| Spinal cord | 8.3 | 0.0 | 21.2 | Lung ca. (large cell) NCI- | 0.0 | 0.0 | 0.0 |
| | | | | H460 | | | |
| glio/astro U87-MG | 0.0 | 0.0 | 0.0 | Lung ca. (non-sm. cell) | 1.5 | 0.0 | 0.0 |
| | | | | A549 | | | |
| glio/astro U-118-MG | 0.0 | 0.0 | 0.0 | Lung Ca. (non-s.cell) | 6.2 | 94.0 | 0.0 |
| | | | | NCI-H23 | | | |
| astrocytoma SW1783 | 0.0 | 0.0 | 0.0 | Lung Ca. (non-s.cell) | 20.9 | 27.0 | 17.9 |
| | | | | HOP-62 | | | |
| neuro*; met SK-N-AS | 0.0 | 0.0 | 0.0 | Lung Ca. (non-s.cl) NCI- | 0.0 | 0.0 | 0.0 |
| | | | | H522 | | | |
| astrocytoma SF-539 | 0.0 | 15.6 | 0.0 | Lung ca. (squam.) SW | 0.0 | 0.0 | 0.0 |
| | | | | 900 | | | |
| astrocytoma SNB-75 | 0.0 | 0.0 | 0.0 | Lung Ca. (squam.) NCI- | 0.0 | 0.0 | 0.0 |
| | | | | H596 | | | |
| glioma SNB-19 | 0.0 | 12.0 | 0.0 | Mammary gland | 15.6 | 12.9 | 0.0 |
| glioma U251 | 0.0 | 0.0 | 27.0 | Breast ca.* (pl.ef) MCF-7 | 0.0 | 0.0 | 0.0 |
| glioma SF-295 | 0.0 | 0.0 | 0.0 | Breast ca.* (pl.ef) MDA- | 0.0 | 0.0 | 0.0 |
| | | | | MB-231 | | | |
| Heart (Fetal) | 0.0 | 0.0 | 0.0 | Breast ca.* (pl.ef) T47D | 0.0 | 0.0 | 0.0 |
| Heart | 7.7 | 0.0 | 0.0 | Breast Ca. BT-549 | 6.7 | 0.0 | 0.0 |
| Skeletal muscle (Fetal) | 11.2 | 10.7 | 0.0 | Breast Ca. MDA-N | 0.0 | 0.0 | 0.0 |
| Skeletal muscle | 0.0 | 0.0 | 0.0 | Ovary | 0.0 | 0.0 | 0.0 |
| Bone marrow | 0.0 | 20.7 | 15.5 | Ovarian ca. OVCAR-3 | 6.2 | 0.0 | 0.0 |
| Thymus | 8.6 | 0.0 | 0.0 | Ovarian ca. OVCAR-4 | 0.0 | 0.0 | 0.0 |
| Spleen | 11.3 | 28.1 | 14.0 | Ovarian ca. OVCAR-5 | 0.0 | 0.0 | 0.0 |
| Lymph node | 7.4 | 0.0 | 17.3 | Ovarian ca. OVCAR-8 | 33.7 | 83.5 | 28.1 |
| Colorectal | 10.8 | 0.0 | 0.0 | Ovarian ca. IGROV-1 | 0.0 | 15.3 | 0.0 |
| Stomach | 5.9 | 12.4 | 33.9 | Ovarian ca. (ascites) SK- | 0.0 | 0.0 | 0.0 |
| | | | | OV-3 | | | |
| Small intestine | 0.0 | 11.7 | 0.0 | Uterus | 0.0 | 0.0 | 0.0 |
| Colon ca. SW480 | 0.0 | 0.0 | 0.0 | Placenta | 0.0 | 0.0 | 0.0 |
| Colon ca.* SW620 (SW480 | 0.0 | 0.0 | 0.0 | Prostate | 0.0 | 22.2 | 30.1 |
| met) | | | | | | | |
| Colon ca. HT29 | 0.0 | 0.0 | 0.0 | Prostate ca.* (bone met) | 14.4 | 19.5 | 85.3 |
| | | | | PC-3 | | | |
| Colon ca. HCT-116 | 0.0 | 0.0 | 0.0 | Testis | 100.0 | 100.0 | 100.0 |
| Colon ca. CaCo-2 | 0.0 | 0.0 | 0.0 | Melanoma Hs688(A).T | 0.0 | 0.0 | 0.0 |
| CC Well to Mod Duff | 0.0 | 0.0 | 0.0 | Melanoma* (met) | 6.9 | 0.0 | 0.0 |
| (ODO3866) | | | | Hs688(B).T | | | |
| Colon ca. HCC-2998 | 0.0 | 0.0 | 0.0 | Melanoma UACC-62 | 0.0 | 0.0 | 0.0 |
| Gastric ca. (liver met) NCI- | 0.0 | 0.0 | 0.0 | Melanoma M14 | 0.0 | 0.0 | 0.0 |
| N87 | | | | | | | |
| Bladder | 0.0 | 0.0 | 0.0 | Melanoma LOX IMVI | 0.0 | 0.0 | 11.3 |
| Trachea | 71.2 | 0.0 | 0.0 | Melanoma* (met) SK- | 0.0 | 0.0 | 0.0 |
| | | | | MEL-5 | | | |
| Kidney | 0.0 | 0.0 | 0.0 | Adipose | 0.0 | 12.0 | 0.0 |

[1066] TABLE IC
Panel 2D
Column A - Rel. Exp.(%) Ag1201, Run 147490530
Column B - Rel. Exp.(%) Ag1201, Run 148032505

| Tissue Name | A | B | Tissue Name | A | B |
|---|---|---|---|---|---|
| Normal Colon | 14.2 | 12.9 | Kidney Margin 8120608 | 0.0 | 0.0 |
| CC Well to Mod Diff (ODO3866) | 10.1 | 14.6 | Kidney Cancer 8120613 | 0.0 | 4.0 |
| CC Margin (ODO3866) | 0.0 | 10.7 | Kidney Margin 8120614 | 0.0 | 0.0 |
| CC Gr.2 rectosigmoid (ODO3868) | 0.0 | 4.5 | Kidney Cancer 9010320 | 0.0 | 0.0 |
| CC Margin (ODO3868) | 0.0 | 4.9 | Kidney Margin 9010321 | 0.0 | 0.0 |
| CC Mod Diff (ODO3920) | 0.1 | 5.4 | Normal Uterus | 0.0 | 3.6 |
| CC Margin (ODO3920) | 13.4 | 5.6 | Uterine Cancer 064011 | 66.4 | 54.0 |
| CC Gr.2 ascend colon (ODO3921) | 4.0 | 3.3 | Normal Thyroid | 9.5 | 0.0 |
| CC Margin (ODO3921) | 5.1 | 18.7 | Thyroid Cancer | 0.0 | 3.4 |
| CC from Partial Hepatectomy | 0.0 | 0.0 | Thyroid Cancer A302152 | 11.9 | 33.0 |
| (ODO4309) Mets | | | | | |
| Liver Margin (ODO4309) | 0.0 | 0.0 | Thyroid Margin A302153 | 28.5 | 39.5 |
| Colon mets to lung (ODO4451-01) | 4.3 | 0.0 | Normal Breast | 18.2 | 28.3 |
| Lung Margin (ODO4451-02) | 5.0 | 0.0 | Breast Cancer | 42.3 | 65.5 |
| Normal Prostate 6546-1 | 0.0 | 12.8 | Breast Cancer (ODO4590-01) | 0.0 | 0.0 |
| Prostate Cancer (ODO4410) | 100.0 | 100.0 | Breast Cancer Mets | 0.0 | 0.0 |
| | | | (ODO4590-03) | | |
| Prostate Margin (ODO4410) | 8.0 | 9.6 | Breast Cancer Metastasis | 31.6 | 35.6 |
| Prostate Cancer (ODO4720-01) | 50.0 | 64.2 | Breast Cancer | 18.4 | 28.7 |
| Prostate Margin (ODO4720-02) | 47.0 | 29.7 | Breast Cancer | 37.6 | 35.8 |
| Normal Lung | 2.8 | 10.6 | Breast Cancer 9100266 | 31.4 | 36.9 |
| Lung Met to Muscle (ODO4286) | 3.9 | 11.1 | Breast Margin 9100265 | 14.5 | 48.3 |
| Muscle Margin (ODO4286) | 0.0 | 0.0 | Breast Cancer A209073 | 51.8 | 68.3 |
| Lung Malignant Cancer | 0.0 | 0.0 | Breast Margin A209073 | 41.5 | 22.7 |
| (ODO3126) | | | | | |
| Lung Margin (ODO3126) | 0.0 | 5.2 | Normal Liver | 13.5 | 0.0 |
| Lung Cancer (ODO4404) | 28.5 | 6.0 | Liver Cancer | 0.0 | 0.0 |
| Lung Margin (ODO4404) | 5.4 | 19.2 | Liver Cancer 1025 | 4.7 | 5.0 |
| Lung Cancer (ODO4565) | 0.0 | 0.0 | Liver Cancer 1026 | 0.0 | 0.0 |
| Lung Margin (ODO4565) | 1.8 | 0.0 | Liver Cancer 6004-T | 0.0 | 3.8 |
| Lung Cancer (ODO4237-01) | 0.0 | 0.0 | Liver Tissue 6004-N | 3.6 | 0.0 |
| Lung Margin (ODO4237-02) | 6.2 | 4.9 | Liver Cancer 6005-T | 0.0 | 0.0 |
| Ocular Mel Met to Liver | 0.0 | 10.4 | Liver Tissue 6005-N | 0.0 | 0.0 |
| (ODO4310) | | | | | |
| Liver Margin (ODO4310) | 2.5 | 3.5 | Normal Bladder | 9.8 | 11.2 |
| Melanoma Metastasis | 0.0 | 0.0 | Bladder Cancer | 0.0 | 0.0 |
| Lung Margin (ODO4321) | 0.0 | 0.0 | Bladder Cancer | 5.5 | 24.1 |
| Normal Kidney | 6.3 | 11.7 | Bladder Cancer (ODO4718- | 0.0 | 0.0 |
| | | | 01) | | |
| Kidney Ca, Nuclear grade 2 | 4.7 | 13.1 | Bladder Normal Adjacent | 5.0 | 13.6 |
| (ODO4338) | | | (ODO4718-03) | | |
| Kidney Margin (ODO4338) | 29.5 | 94.6 | Normal Ovary | 20.6 | 0.0 |
| Kidney Ca Nuclear grade 1/2 | 29.5 | 94.6 | Ovarian Cancer | 92.7 | 99.3 |
| (ODO4339) | | | | | |
| Kidney Margin (ODO4339) | 0.0 | 17.1 | Ovarian Cancer (ODO4768- | 0.0 | 9.5 |
| | | | 07) | | |
| Kidney Ca, Clear cell type | 3.6 | 0.0 | Ovary Margin (ODO4768-08) | 0.0 | 5.3 |
| (ODO4340) | | | | | |
| Kidney Margin (ODO4340) | 0.0 | 0.0 | Normal Stomach | 0.0 | 0.0 |
| Kidney Ca, Nuclear grade 3 | 7.9 | 5.1 | Gastric Cancer 9060358 | 0.0 | 0.0 |
| (ODO4348) | | | | | |
| Kidney Margin (ODO4348) | 7.4 | 0.0 | Stomach Margin 9060359 | 10.4 | 0.0 |
| Kidney Cancer (ODO4622-01) | 0.0 | 0.0 | Gastric Cancer 9060395 | 2.6 | 0.0 |
| Kidney Margin (ODO4622-03) | 0.0 | 0.1 | Stomach Margin 9060394 | 4.3 | 0.0 |
| Kidney Cancer (ODO4450-01) | 0.0 | 0.0 | Gastric Cancer 9060397 | 0.0 | 0.0 |
| Kidney Margin (ODO4450-03) | 0.0 | 0.0 | Stomach Margin 9060396 | 0.0 | 0.0 |
| Kidney Cancer 8120607 | 0.0 | 0.0 | Gastric Cancer 064005 | 4.8 | 0.7 |

[1067] TABLE ID
Panel 4D
Column A - Rel. Exp. (%) Ag1201, Run 140237534
Column B - Rel. Exp. (%) Ag1201, Run 144180636

| Tissue Name | A | B | Tissue Name | A | B |
|---|---|---|---|---|---|
| Secondary Th1 act | 0.0 | 0.0 | HUVEC IL-1beta | 0.0 | 0.0 |
| Secondary Th2 act | 0.0 | 0.0 | HUVEC IFN gamma | 0.0 | 0.0 |
| Secondary Tr1 act | 0.0 | 0.0 | HUVEC TNF alpha + IFN gamma | 0.0 | 0.0 |
| Secondary Th1 rest | 0.0 | 0.0 | HUVEC TNF alpha +IL4 | 0.0 | 0.0 |
| Secondary Th2 rest | 0.0 | 0.0 | HUVEC IL-11 | 0.0 | 0.0 |
| Secondary Tr1 rest | 0.0 | 0.0 | Lung Microvascular EC none | 0.0 | 0.0 |
| Primary Th1 act | 0.0 | 0.0 | Lung Microvascular EC TNF alpha + | 0.0 | 0.0 |
| | | | IL-1beta | | |
| Primary Th2 act | 0.0 | 0.0 | Microvascular Dermal EC none | 0.0 | 0.0 |
| Primary Tr1 act | 0.0 | 0.0 | Microsvasular Dermal EC TNFalpha | 0.0 | 0.0 |
| | | | + IL-1beta | | |
| Primary Th1 rest | 0.0 | 0.0 | Bronchial epithelium TNFalpha + | 0.0 | 0.0 |
| | | | IL1beta | | |
| Primary Th2 rest | 0.0 | 0.0 | Small airway epithelium none | 0.0 | 0.0 |
| Primary Tr1 rest | 0.0 | 0.0 | Small airway epithelium TNFalpha + | 0.0 | 0.0 |
| | | | IL-1beta | | |
| CD45RA CD4 | 0.0 | 0.0 | Coronery artery SMG rest | 0.0 | 0.0 |
| lymphocyte act | | | | | |
| CD45RO CD4 | 0.0 | 0.0 | Coronery artery SMC TNFalpha + | 0.0 | 0.0 |
| lymphocyte act | | | IL-1beta | | |
| CD8 lymphocyte act | 2.3 | 0.0 | Astrocytes rest | 0.0 | 0.0 |
| Secondary CD8 | 0.0 | 0.0 | Astrocytes TNFalpha + IL-1beta | 4.3 | 0.0 |
| lymphocyte rest | | | | | |
| Secondary CD8 | 0.0 | 0.0 | KU-812 (Basophil) rest | 7.9 | 29.1 |
| lymphocyte act | | | | | |
| CD4 lymphocyte none | 0.0 | 0.0 | KU-812 (Basophil) PMA/ionomycin | 100.0 | 100.0 |
| 2ry Th1/Th2/Tr1 anti- | 0.0 | 0.0 | CCD1106 (Keratinocytes) none | 0.0 | 0.0 |
| CD95 CH11 | | | | | |
| LAK cells rest | 3.3 | 4.4 | 93580 CCD1106 (Keratinocytes) | 0.0 | 0.0 |
| | | | TNFa and IFNg | | |
| LAK cells IL-2 | 0.0 | 0.0 | Liver cirrhosis | 11.3 | 15.2 |
| LAK cells IL-2 + IL-12 | 0.0 | 0.0 | Lupus kidney | 0.0 | 0.0 |
| LAK cells IL-2 + IFN | 0.0 | 0.0 | NCI-H292 none | 0.0 | 0.0 |
| gamma | | | | | |
| LAK cells IL-2 + IL-18 | 0.0 | 0.0 | NCI-H292 IL-4 | 0.0 | 0.0 |
| LAK cells PMA/ | 0.0 | 0.0 | NCI-H292 IL-9 | 0.0 | 0.0 |
| ionomycin | | | | | |
| NK Cells IL-2 rest | 0.0 | 0.0 | NCI-H292 IL-13 | 0.0 | 0.0 |
| Two Way MLR 3 day | 3.4 | 0.0 | NCI-H292 IFN gamma | 0.0 | 0.0 |
| Two Way MLR 5 day | 8.3 | 0.0 | HPAEC none | 0.0 | 0.0 |
| Two Way MLR 7 day | 0.0 | 0.0 | HPAEC TNF alpha + IL-1 beta | 0.0 | 0.0 |
| PBMC rest | 0.0 | 0.0 | Lung fibroblast none | 0.0 | 0.0 |
| PBMC PWM | 0.0 | 0.0 | Lung fibroblast TNF alpha + IL-1 | 0.0 | 0.0 |
| | | | beta | | |
| PBMC PHA-L | 0.0 | 0.0 | Lung fibroblast IL-4 | 0.0 | 0.0 |
| Ramos (B cell) none | 0.0 | 0.0 | Lung fibroblast IL-9 | 0.0 | 0.0 |
| Ramos (B cell) | 0.0 | 0.0 | Lung fibroblast IL-13 | 0.0 | 0.0 |
| ionomycin | | | | | |
| B lymphocytes PWM | 0.0 | 0.0 | Lung fibroblast IFN gamma | 0.0 | 0.0 |
| B lymphocytes CD40L | 0.0 | 0.0 | Dermal fibroblast CCD1070 rest | 0.0 | 0.0 |
| and IL-4 | | | | | |
| EOL-1 dbcAMP | 0.0 | 0.0 | Dermal fibroblast CCD1070 TNF | 0.0 | 0.0 |
| | | | alpha | | |
| EOL-1 dbcAMP | 0.0 | 0.0 | Dermal fibroblast CCD1070 IL-1 | 0.0 | 0.0 |
| PMA/ionomycin | | | beta | | |
| Dendritic cells none | 0.0 | 4.5 | Dermal fibroblast IFN gamma | 0.0 | 0.0 |
| Dendritic cells LPS | 0.0 | 0.0 | Dermal fibroblast IL-4 | 0.0 | 0.0 |
| Dendritic cells anti-CD40 | 7.9 | 4.7 | IBD Colitis 2 | 5.3 | 0.0 |
| Monocytes rest | 0.0 | 0.0 | IBD Crohn's | 0.0 | 0.0 |
| Monocytes LPS | 0.0 | 0.0 | Colon | 0.0 | 0.0 |
| Macrophages rest | 3.7 | 13.4 | Lung | 3.1 | 0.0 |
| Macrophages LPS | 0.0 | 4.2 | Thymus | 7.4 | 12.0 |
| HUVEC none | 0.0 | 0.0 | Kidney | 3.9 | 3.6 |
| HUVEC starved | 0.0 | 0.0 | | | |

[1068] Panel 1.3D Summary: Ag1201 Tissue expression of this was detected at a low level in many tissues. The highest expression was seen in testis. Expression of this gene or its protein product is useful as a marker for male germ cells and has therapeutic applications in fertility disorders as a potential target.

[1069] Panel 2D Summary: Ag1201 This gene was overexpressed in tumors derived from tissues responsive to steroid hormones—ovarian, uterine and prostate cancers as shown by panel 2D. It is therefore a marker for cells, especially tumor cells responsive to steroid hormones. Expression of this gene or its protein product are used to differentiate hormone-responsive and non-hormone responsive tumors, that are known to lead to different clinical outcomes. Being a GPCR, the protein is useful to screen candidate therapeutics for molecules able to modulate tumor growth, preferably small molecule therapeutic and human monoclonal antibodies.

[1070] Panel 4D Summary: Ag1201 The pattern of expression in panel 4 showed that Ag1201 has a potential role in inflammation, since this gene was expressed in activated basophils. Basophils are one of the key cell mediators of inflammation during asthma and allergy (Oliver J, Immunopharmacology 2000 Jul. 25; 48(3):269-81). This molecule is important in allowing these cells to extravasate into the site of inflammation and/or in the activation of these cells. Antibody therapeutics to Ag1201 are useful for the inhibition of nasal and lung inflammation due to basophil activation and effectively reduce or eliminate symptoms of asthma, emphysema, and allergic rhinitis.

[1071] J. CG50365-01: Carbonate Dehydratase

[1072] Expression of gene CG50365-01 was assessed using the primer-probe sets Ag2575 and Ag2644, described in Tables JA and JB. Results of the RTQ-PCR runs are shown in Tables JC, JD, JE and JF.

TABLE JA
Probe Name Ag2575

| | | | Start | SEQ ID |
|---|---|---|---|---|
| Primers | Sequences | Length | Position | No |
| Forward | 5′-tcagcaatctccaattgagatt-3′ | 22 | 96 | 1166 |
| Probe | TET-5′-tgaaatatgactcttccctccgacca-3′- | 26 | 131 | 1167 |
| | TAMRA | | | |
| Reverse | 5′-ttttagctgagcttgggtcata-3′ | 22 | 169 | 1168 |

[1073] TABLE JB
Probe Name Ag2644

| | | | Start | SEQ ID |
|---|---|---|---|---|
| Primers | Sequences | Length | Position | No |
| Forward | 5′-tcagcaatctccaattgagatt-3′ | 22 | 96 | 1169 |
| Probe | TET-5′-tgaaatatgactcttccctccgacca-3′- | 26 | 131 | 1170 |
| | TAMRA | | | |
| Reverse | 5′-ttttagctgagcttgggtcata-3′ | 22 | 169 | 1171 |

[1074] TABLE JC
Panel 1.3D
Column A - Rel. Exp.(%) Ag2575, Run 162430827
Column B - Rel. Exp.(%) Ag2575, Run 162431039

| Tissue Name | A | B | Tissue Name | A | B |
|---|---|---|---|---|---|
| Liver adenocarcinoma | 0.4 | 0.4 | Kidney (fetal) | 6.0 | 6.0 |
| Pancreas | 0.4 | 0.4 | Renal Ca. 786-0 | 13.5 | 13.5 |
| Pancreatic ca. CAPAN-2 | 4.0 | 4.0 | Renal Ca. A498 | 11.2 | 11.2 |
| Adrenal gland | 1.5 | 1.5 | Renal Ca. RXF 393 | 1.0 | 1.0 |
| Thyroid | 5.4 | 5.4 | Renal ca. ACHN | 2.9 | 2.9 |
| Salivaxy gland | 0.9 | 0.9 | Renal ca. UO-31 | 5.8 | 5.8 |
| Pituitary gland | 4.8 | 4.8 | Renal Ca. TK-10 | 6.9 | 6.9 |
| Brain (fetal) | 1.2 | 1.2 | Liver | 0.9 | 0.9 |
| Brain (whole) | 1.2 | 1.2 | Liver (fetal) | 3.7 | 3.7 |
| Brain (amygdala) | 3.1 | 3.1 | Liver ca. (hepatoblast) HepG2 | 10.0 | 10.0 |
| Brain (cerebellum) | 5.6 | 5.6 | Lung | 6.3 | 6.3 |
| Brain (hippocampus) | 5.4 | 5.4 | Lung (fetal) | 6.7 | 6.7 |
| Brain (substantia nigra) | 0.3 | 0.3 | Lung Ca. (small cell) LX-1 | 0.0 | 0.0 |
| Brain (thalamus) | 1.7 | 1.7 | Lung Ca. (small cell) NCI-H69 | 6.7 | 6.7 |
| Cerebral Cortex | 21.2 | 21.2 | Lung Ca. (s.cell var.) SHP-77 | 21.2 | 21.2 |
| Spinal cord | 2.8 | 2.8 | Lung Ca. (large cell) NCI-H460 | 4.4 | 4.4 |
| glio/astro U87-MG | 25.9 | 25.9 | Lung Ca. (non-sm. cell) A549 | 2.7 | 2.7 |
| glio/astro U-118-MG | 9.5 | 9.5 | Lung Ca. (non-s.cell) NCI-H23 | 3.0 | 3.0 |
| astrocytoma SW1783 | 17.4 | 17.4 | Lung Ca. (non-s.cell) HOP-62 | 4.8 | 4.8 |
| neuro*; met SK-N-AS | 0.0 | 0.0 | Lung Ca. (non-s.cl) NCI-H522 | 0.4 | 0.4 |
| astrocytoma SF-539 | 12.9 | 12.9 | Lung Ca. (squam.) SW 900 | 3.4 | 3.4 |
| astrocytoma SNB-75 | 2.8 | 2.8 | Lung Ca. (squam.) NCI-H596 | 2.7 | 2.7 |
| glioma SNB-19 | 27.0 | 27.0 | Mammary gland | 4.0 | 4.0 |
| glioma U251 | 4.6 | 4.6 | Breast ca.* (pl.ef) MCF-7 | 0.0 | 0.0 |
| glioma SF-295 | 5.2 | 5.2 | Breast ca.* (pl.ef) MDA-MB- | 7.5 | 7.5 |
| | | | 231 | | |
| Heart (Fetal) | 2.1 | 2.1 | Breast ca.* (pl.ef) T47D | 0.7 | 0.7 |
| Heart | 3.1 | 3.1 | Breast ca. BT-549 | 0.5 | 0.5 |
| Skeletal muscle (Fetal) | 3.6 | 3.6 | Breast Ca. MDA-N | 8.2 | 8.2 |
| Skeletal muscle | 0.0 | 0.0 | Ovary | 2.7 | 2.7 |
| Bone marrow | 0.8 | 0.8 | Ovarian Ca. OVCAR-3 | 5.9 | 5.9 |
| Thymus | 6.8 | 6.8 | Ovarian Ca. OVCAR-4 | 0.5 | 0.5 |
| Spleen | 1.6 | 1.6 | Ovarian Ca. OVCAR-5 | 35.1 | 35.1 |
| Lymph node | 1.4 | 1.4 | Ovarian Ca. OVCAR-8 | 12.8 | 12.8 |
| Colorectal | 5.7 | 5.7 | Ovarian Ca. IGROV-1 | 0.0 | 0.0 |
| Stomach | 2.6 | 2.6 | Ovarian Ca. (ascites) SK-OV-3 | 2.0 | 2.0 |
| Small intestine | 8.8 | 8.8 | Uterus | 1.4 | 1.4 |
| Colon Ca. SW480 | 0.0 | 0.0 | Placenta | 0.0 | 0.0 |
| Colon Ca.* SW620 (SW480 | 0.0 | 0.0 | Prostate | 0.8 | 0.8 |
| met) | | | | | |
| Colon Ca. HT29 | 8.4 | 8.4 | Prostate Ca.* (bone met) PC-3 | 7.0 | 7.0 |
| Colon Ca. HCT-116 | 5.7 | 5.7 | Testis | 2.2 | 2.2 |
| Colon Ca. CaCo-2 | 84.1 | 84.1 | Melanoma Hs688(A).T | 2.3 | 2.3 |
| CC Well to Mod Duff | 40.3 | 40.3 | Melanoma* (met) Hs688(B).T | 2.8 | 2.8 |
| (ODO3866) | | | | | |
| Colon Ca. HCC-2998 | 14.7 | 14.7 | Melanoma UACC-62 | 1.5 | 1.5 |
| Gastric ca. (liver met) NCI-N87 | 100.0 | 100.0 | Melanoma M14 | 4.3 | 4.3 |
| Bladder | 11.2 | 11.2 | Melanoma LOX IMVI | 7.6 | 7.6 |
| Trachea | 9.9 | 9.9 | Melanoma* (met) SK-MEL-5 | 13.0 | 13.0 |
| Kidney | 8.9 | 8.9 | Adipose | 11.0 | 11.0 |

[1075] TABLE JD
Panel 2D
Column A - Rel. Exp.(%) Ag2644, Run 162423326

| Tissue Name | A | Tissue Name | A |
|---|---|---|---|
| Normal Colon | 36.1 | Kidney Margin 8120608 | 2.9 |
| CC Well to Mod Diff (ODO3866) | 27.9 | Kidney Cancer 8120613 | 4.0 |
| CC Margin (ODO3866) | 11.1 | Kidney Margin 8120614 | 3.7 |
| CC Gr.2 rectosigmoid (ODO3868) | 19.1 | Kidney Cancer 9010320 | 10.2 |
| CC Margin (ODO3868) | 2.2 | Kidney Margin 9010321 | 8.0 |
| CC Mod Diff (ODO3920) | 21.0 | Normal Uterus | 0.0 |
| CC Margin (ODO3920) | 18.3 | Uterine Cancer 064011 | 12.2 |
| CC Gr.2 ascend colon (ODO3921) | 37.9 | Normal Thyroid | 12.8 |
| CC Margin (ODO3921) | 7.8 | Thyroid Cancer | 53.2 |
| CC from Partial Hepatectomy | 74.7 | Thyroid Cancer A302152 | 33.7 |
| (ODO4309) Mets | | | |
| Liver Margin (ODO4309) | 15.7 | Thyroid Margin A302153 | 13.6 |
| Colon mets to lung (OD04451-01) | 5.0 | Normal Breast | 27.7 |
| Lung Margin (OD04451-02) | 8.2 | Breast Cancer | 1.7 |
| Normal Prostate 6546-1 | 21.5 | Breast Cancer (OD04590-01) | 2.7 |
| Prostate Cancer (OD04410) | 10.7 | Breast Cancer Mets (0D04590-03) | 2.8 |
| Prostate Margin (OD04410) | 4.0 | Breast Cancer Metastasis | 35.1 |
| Prostate Cancer (OD04720-01) | 8.7 | Breast Cancer | 13.2 |
| Prostate Margin (OD04720-02) | 12.1 | Breast Cancer | 7.0 |
| Normal Lung | 24.8 | Breast Cancer 9100266 | 2.9 |
| Lung Met to Muscle (ODO4286) | 15.4 | Breast Margin 9100265 | 4.8 |
| Muscle Margin (ODO4286) | 1.5 | Breast Cancer A209073 | 18.6 |
| Lung Malignant Cancer (OD03126) | 7.9 | Breast Margin A209073 | 14.4 |
| Lung Margin (OD03126) | 22.4 | Normal Liver | 6.2 |
| Lung Cancer (OD04404) | 3.8 | Liver Cancer | 1.8 |
| Lung Margin (OD04404) | 10.6 | Liver Cancer 1025 | 3.4 |
| Lung Cancer (OD04565) | 2.2 | Liver Cancer 1026 | 3.6 |
| Lung Margin (OD04565) | 5.5 | Liver Cancer 6004-T | 4.8 |
| Lung Cancer (OD04237-01) | 14.7 | Liver Tissue 6004-N | 1.8 |
| Lung Margin (OD04237-02) | 18.0 | Liver Cancer 6005-T | 3.3 |
| Ocular Mel Met to Liver (ODO4310) | 1.0 | Liver Tissue 6005-N | 2.1 |
| Liver Margin (OD04310) | 5.4 | Normal Bladder | 10.7 |
| Melanoma Metastasis | 4.3 | Bladder Cancer | 1.3 |
| Lung Margin (OD04321) | 18.7 | Bladder Cancer | 4.6 |
| Normal Kidney | 35.4 | Bladder Cancer (OD04718-01) | 7.2 |
| Kidney Ca, Nuclear grade 2 (OD04338) | 26.6 | Bladder Normal Adjacent | 10.2 |
| | | (OD04718-03) | |
| Kidney Margin (OD04338) | 14.6 | Normal Ovary | 2.0 |
| Kidney Ca Nuclear grade 1/2 (OD04339) | 23.7 | Ovarian Cancer | 23.3 |
| Kidney Margin (OD04339) | 30.4 | Ovarian Cancer (OD04768-07) | 48.3 |
| Kidney Ca, Clear cell type (OD04340) | 19.3 | Ovary Margin (OD04768-08) | 2.7 |
| Kidney Margin (OD04340) | 22.7 | Normal Stomach | 21.0 |
| Kidney Ca, Nuclear grade 3 (OD04348) | 1.4 | Gastric Cancer 9060358 | 3.8 |
| Kidney Margin (OD04348) | 20.3 | Stomach Margin 9060359 | 15.8 |
| Kidney Cancer (OD04622-01) | 13.9 | Gastric Cancer 9060395 | 17.0 |
| Kidney Margin (OD04622-03) | 2.7 | Stomach Margin 9060394 | 15.8 |
| Kidney Cancer (OD04450-01) | 16.6 | Gastric Cancer 9060397 | 49.0 |
| Kidney Margin (OD04450-03) | 17.8 | Stomach Margin 9060396 | 12.2 |
| Kidney Cancer 8120607 | 2.9 | Gastric Cancer 064005 | 100.0 |

[1076] TABLE JE
Panel 3D
Column A - Rel. Exp.(%) Ag2644, Run 164886194

| Tissue Name | A | Tissue Name | A |
|---|---|---|---|
| 94905 Daoy | 5.5 | 94954 Ca Ski Cervical epidermoid | 16.5 |
| Medulloblastoma/Cerebellum | | carcinoma (metastasis | |
| 94906 TE671 | 0.0 | 94955 ES-2 Ovarian clear cell | 24.7 |
| Medulloblastom/Cerebellum | | carcinoma | |
| 94907 D283 Med | 15.3 | 94957 Ramos Stimulated with | 0.0 |
| Medulloblastoma/Cerebellum | | PMA/ionomycin 6 h | |
| 94908 PFSK-1 Primitive | 1.6 | 94958 Ramos Stimulated with | 2.2 |
| Neuroectodermal/Cerebellum | | PMA/ionomycin 14 h | |
| 94909 XF-498 CNS | 4.9 | 94962 MEG-01 Chronic | 30.8 |
| | | myelogenous leukemia | |
| | | (megokaryoblast) | |
| 94910 SNB-78 CNS/glioma | 8.8 | 94963 Raji Burkitt's lymphoma | 3.4 |
| 94911 SF-268 CNS/glioblastoma | 1.7 | 94964 Daudi Burkitt's lymphoma | 3.6 |
| 94912 T98G Glioblastoma | 0.0 | 94965 U266 B-cell | 5.9 |
| | | plasmacytoma/myeloma | |
| 96776 SK-N-SH Neuroblastoma | 0.0 | 94968 CA46 Burkitt's lymphoma | 3.2 |
| (metastasis) | | | |
| 94913 SF-295 CNS/glioblastoma | 10.3 | 94970 RL non-Hodgkin's B-cell | 0.0 |
| | | lymphoma | |
| 94914 Cerebellum | 8.1 | 94972 JM1 pre-B-cell | 0.0 |
| | | lymphoma/leukemia | |
| 96777 Cerebellum | 2.0 | 94973 Jurkat T cell leukemia | 3.3 |
| 94916 NCI-H292 Mucoepidermoid | 22.2 | 94974 TF-1 Erythroleukemia | 28.3 |
| lung carcinoma | | | |
| 94917 DMS-114 Small cell lung | 1.1 | 94975 HUT 78 T-cell lymphoma | 1.8 |
| cancer | | | |
| 94918 DMS-79 Small cell lung | 100.0 | 94977 U937 Histiocytic lymphoma | 4.4 |
| cancer/neuroendocrine | | | |
| 94919 NCI-H146 Small cell lung | 4.9 | 94980 KU-812 Myelogenous | 2.2 |
| cancer/neuroendocrine | | leukemia | |
| 94920 NCI-H526 Small cell lung | 6.9 | 769-P-Clear cell renal carcinoma | 3.8 |
| cancer/neuroendocrine | | | |
| 94921 NCI-N417 Small cell lung | 6.2 | 94983 Caki-2 Clear cell renal | 1.8 |
| cancer/neuroendocrine | | carcinoma | |
| 94923 NCI-H82 Small cell lung | 0.0 | 94984 SW 839 Clear cell renal | 4.1 |
| cancer/neuroendocrine | | carcinoma | |
| 94924 NCI-H157 Squamous cell lung | 30.6 | 94986 G401 Wilms' tumor | 0.0 |
| cancer (metastasis) | | | |
| 94925 NCI-H1155 Large cell lung | 14.9 | 94987 Hs766T Pancreatic carcinoma | 26.2 |
| cancer/neuroendocrine | | (LN metastasis) | |
| 94926 NCI-H1299 Large cell lung | 33.9 | 94988 CAPAN-1 Pancreatic | 14.4 |
| cancer/neuroendocrine | | adenocarcinoma (liver metastasis) | |
| 94927 NCI-H727 Lung carcinoid | 1.2 | 94989 SU86.86 Pancreatic carcinoma | 39.8 |
| | | (liver metastasis) | |
| 94928 NCI-UMC-11 Lung carcinoid | 4.1 | 94990 BxPC-3 Pancreatic | 3.3 |
| | | adenocarcinoma | |
| 94929 LX-1 Small cell lung cancer | 0.0 | 94991 HPAC Pancreatic | 1.4 |
| | | adenocarcinoma | |
| 94930 Colo-205 Colon cancer | 1.4 | 94992 MIA PaCa-2 Pancreatic | 2.1 |
| | | carcinoma | |
| 94931 KM12 Colon cancer | 31.9 | 94993 CFPAC-1 Pancreatic ductal | 32.8 |
| | | adenocarcinoma | |
| 94932 KM20L2 Colon cancer | 15.1 | 94994 PANC-1 Pancreatic epithelioid | 22.4 |
| | | ductal carcinoma | |
| 94933 NCI-H716 Colon cancer | 17.1 | 94996 T24 Bladder carcinma | 2.8 |
| | | (transitional cell | |
| 94935 SW-48 Colon adenocarcinoma | 28.5 | 5637-Bladder carcinoma | 11.4 |
| 94936 SW1116 Colon | 13.5 | 94998 HT-1197 Bladder carcinoma | 0.0 |
| adenocarcinoma | | | |
| 94937 LS 174T Colon | 56.3 | 94999 UM-UC-3 Bladder carcinma | 1.9 |
| adenocarcinoma | | (transitional cell) | |
| 94938 SW-948 Colon | 2.9 | 95000 A204 Rhabdomyosarcoma | 0.0 |
| adenocarcinoma | | | |
| 94939 SW-480 Colon | 10.9 | 95001 HT-1080 Fibrosarcoma | 4.5 |
| adenocarcinoma | | | |
| 94940 NCI-SNU-5 Gastric carcinoma | 0.0 | 95002 MG-63 Osteosarcoma (bone) | 2.2 |
| KATO III-Gastric carcinoma | 59.0 | 95003 SK-LMS-1 Leiomyosarcoma | 13.3 |
| | | (vulva) | |
| 94943 NCI-SNU-16 Gastric | 29.5 | 95004 SJRH30 Rhabdomyosarcoma | 5.6 |
| carcinoma | | (met to bone marrow) | |
| 94944 NCI-SNU-1 Gastric carcinoma | 15.8 | 95005 A431 Epidermoid carcinoma | 0.0 |
| 94946 RE-1 Gastric adenocarcinoma | 4.8 | 95007 WM266-4 Melanoma | 7.4 |
| 94947 RF-48 Gastric adenocarcinoma | 6.8 | DU 145-Prostate carcinoma (brain | 0.0 |
| | | metastasis) | |
| 96778 MKN-45 Gastric carcinoma | 1.8 | 95012 MDA-MB-468 Breast | 0.0 |
| | | adenocarcinoma | |
| 94949 NCI-N87 Gastric carcinoma | 24.7 | SCC-4-Squamous cell carcinoma of | 0.0 |
| | | tongue | |
| 94951 OVCAR-5 Ovarian carcinoma | 19.9 | SCC-9-Squamous cell carcinoma of | 0.0 |
| | | tongue | |
| 94952 RL95-2 Uterine carcinoma | 0.0 | SCC-15-Squamous cell carcinoma of | 0.0 |
| | | tongue | |
| 94953 HelaS3 Cervical | 0.0 | 95017 CAL 27 Squamous cell | 4.0 |
| adenocarcinoma | | carcinoma of tongue | |

[1077] TABLE JF
Panel 4D
Column A - Rel. Exp.(%) Ag2644, Run 158664089

| Tissue Name | A | Tissue Name | A |
|---|---|---|---|
| Secondary Th1 act | 0.5 | HUVEC IL-1beta | 3.3 |
| Secondary Th2 act | 0.4 | HUVEC IFN gamma | 14.4 |
| Secondary Tr1 act | 0.4 | HUVEC TNF alpha + IFN gamma | 27.7 |
| Secondary Th1 rest | 0.9 | HUVEC TNF alpha + IL4 | 12.2 |
| Secondary Th2 rest | 0.7 | HUVEC IL-11 | 1.0 |
| Secondary Tr1 rest | 0.9 | Lung Microvascular EC none | 1.1 |
| Primary Th1 act | 0.6 | Lung Microvascular EC TNF alpha + IL- | 6.2 |
| | | 1beta | |
| Primary Th2 act | 1.6 | Microvascular Dermal EC none | 1.9 |
| Primary Tr1 act | 1.4 | Microsvasular Dermal EC TNF alpha + IL- | 2.0 |
| | | 1beta | |
| Primary Th1 rest | 4.6 | Bronchial epithelium TNF alpha + IL1beta | 3.3 |
| Primary Th2 rest | 1.0 | Small airway epithelium none | 2.4 |
| Primary Tr1 rest | 1.8 | Small airway epithelium TNF alpha + IL- | 33.9 |
| | | 1beta | |
| CD45RA CD4 lymphocyte act | 1.9 | Coronery artery SMC rest | 6.1 |
| CD45RO CD4 lymphocyte act | 2.4 | Coronery artery SMC TNF alpha + IL-1beta | 2.4 |
| CD8 lymphocyte act | 1.0 | Astrocytes rest | 3.9 |
| Secondary CD8 lymphocyte rest | 1.4 | Astrocytes TNF alpha + IL-1beta | 2.1 |
| Secondary CD8 lymphocyte act | 0.8 | KU-812 (Basophil) rest | 1.3 |
| CD4 lymphocyte none | 0.8 | KU-812 (Basophil) PMA/ionomycin | 17.8 |
| 2ry Th1/Th2/Tr1 anti-CD95 | 0.6 | CCD1106 (Keratinocytes) none | 9.2 |
| CH11 | | | |
| LAK cells rest | 2.0 | CCD1106 (Keratinocytes) TNF alpha + IL- | 6.0 |
| | | 1beta | |
| LAK cells IL-2 | 5.4 | Liver cirrhosis | 2.1 |
| LAK cells IL-2 + IL-12 | 0.8 | Lupus kidney | 4.2 |
| LAK cells IL-2 + IFN gamma | 3.5 | NCI-H292 none | 35.8 |
| LAK cells IL-2 + IL-18 | 6.6 | NCI-H292 IL-4 | 52.9 |
| LAK cells PMA/ionomycin | 7.4 | NCI-H292 IL-9 | 45.1 |
| NK Cells IL-2 rest | 4.4 | NCI-H292 IL-13 | 25.7 |
| Two Way MLR 3 day | 3.4 | NCI-H292 IFN gamma | 42.9 |
| Two Way MLR 5 day | 1.4 | HPAEC none | 5.2 |
| Two Way MLR 7 day | 0.8 | HPAEC TNF alpha + IL-1beta | 16.3 |
| PBMC rest | 2.6 | Lung fibroblast none | 6.3 |
| PBMC PWM | 14.5 | Lung fibroblast TNF alpha + IL-1beta | 3.3 |
| PBMC PHA-L | 6.2 | Lung fibroblast IL-4 | 25.3 |
| Ramos (B cell) none | 4.9 | Lung fibroblast IL-9 | 7.6 |
| Ramos (B cell) ionomycin | 10.7 | Lung fibroblast IL-13 | 11.3 |
| B lymphocytes PWM | 9.1 | Lung fibroblast IFN gamma | 75.8 |
| B lymphocytes CD40L and IL-4 | 4.6 | Dermal fibroblast CCD1070 rest | 9.2 |
| EOL-1 dbcAMP | 0.0 | Dermal fibroblast CCD1070 TNF alpha | 11.0 |
| EOL-1 dbcAMP | 1.5 | Dermal fibroblast CCD1070 IL-1beta | 4.3 |
| PMA/ionomycin | | | |
| Dendritic cells none | 1.4 | Dermal fibroblast IFN gamma | 17.8 |
| Dendritic cells LPS | 1.1 | Dermal fibroblast IL-4 | 10.0 |
| Dendritic cells anti-CD40 | 0.9 | IBD Colitis 2 | 2.5 |
| Monocytes rest | 5.3 | IBD Crohn's | 15.8 |
| Monocytes LPS | 10.5 | Colon | 100.0 |
| Macrophages rest | 0.9 | Lung | 14.1 |
| Macrophages LPS | 1.1 | Thymus | 55.5 |
| HUVEC none | 7.3 | Kidney | 17.6 |
| HUVEC starved | 4.2 | | |

[1078] Panel 1.3D Summary: Ag2575 The expression of the CG50365-01 gene highest in a sample derived from a gastric cancer cell line (NCI-H87)(CTs=31). In addition, there was substantial expression in several colon cancer cell lines, ovarian cancer cell lines and brain cancer cell lines. Thus, the expression of this gene is useful as a marker to distinguish NCI-H87 cells from other samples in the panel. Therapeutic modulation of this gene, through the use of small molecule drugs, antibodies or protein therapeutics is of benefit in the treatment of colon cancer, brain cancer or ovarian cancer.

[1079] In addition, this gene was expressed at low levels in the cerebral cortex. Carbonate dehydratase plays an important role in modulating excitatory synaptic transmission in brain. (Parkkila S. Proc Natl Acad Sci USA 2001 Feb. 13; 98(4): 1918-23) Therefore, this molecule is of use in the treatment of schizophrenia, epilepsy, Alzheimer's disease, bipolar disorder, depression, or any clinical condition associated with impaired or altered neurotransmission.

[1080] Panel 2D Summary: Ag2644 The expression of the CG50365-01 gene was highest in a sample derived from a gastric cancer. In addition there was substantial expression associated with other gastric cancers, when compared to their adjacent normal tissues, as well as expression associated with ovarian cancer, breast cancer, thyroid cancer and colon cancer. This expression conformed with expression in Panel 1.3D. Expression of this is useful as a marker to distinguish this gastric cancer sample from other samples in the panel. Moreover, therapeutic modulation of this gene, through the use of small molecule drugs, antibodies or protein therapeutics is of benefit in the treatment of colon cancer, breast cancer, ovarian cancer, gastric cancer or thyroid cancer.

[1081] Panel 3D Summary: Ag2644 The expression of the CG50365-01 gene was highest in a sample derived from a lung cancer cell line (DMS-79). In addition there was expression associated with a colon cancer cell line, a gastric cancer cell line and a pancreatic cancer cell line. Thus, the expression of this gene is useful as a marker to distinguish DMS-79 cells from other samples in the panel. Moreover, therapeutic modulation of this gene, through the use of small molecule drugs, antibodies or protein therapeutics is of benefit in the treatment of colon cancer, pancreatic cancer, gastric cancer or lung cancer.

[1082] Panel 4D Summary: Ag2644 The CG50365-01 transcript was expressed in lung fibroblasts treated with gamma interferon, NCI-H292 cells regardless of treatment, activated basophil cell line, and gamma interferon treated HUVECs. It was also expressed in normal colon and thymus. The regulation of the transcript expression in fibroblasts and HUVECs showed that the protein encoded by this transcript contributes to the inflammatory changes due to gamma interferon. Therefore, therapies designed with the protein encoded by this transcript are important for the treatment of emphysema, psoriasis, arthritis and IBD.

[1083] K. CG50367-01: adam13

[1084] Expression of gene CG50367-01 was assessed using the primer-probe set Ag2425, described in Table KA. Results of the RTQ-PCR runs are shown in Tables KB, KC, KD and KE.

TABLE KA
Probe Name Ag2425

| | | | Start | SEQ ID |
|---|---|---|---|---|
| Primers | Sequences | Length | Position | No |
| Forward | 5′-ggctcctgctgaccatattc-3′ | 20 | 2342 | 1172 |
| Probe | TET-5′-catttaccctccaccatttctcccag-3′- | 26 | 2366 | 1173 |
| | TAMRA | | | |
| Reverse | 5′-gctgggctcatgagagttct-3′ | 20 | 2398 | 1174 |

[1085] TABLE KB
Ardais Prostate 1.0
Column A - Rel. Exp.(%) Ag2425, Run 321632641

| Tissue Name | A | Tissue Name | A |
|---|---|---|---|
| 151135 Prostate NAT(B87) | 22.8 | 151128 Prostate cancer(B8C) | 8.2 |
| 151143 Prostate NAT(B8A) | 28.5 | 151136 Prostate cancer(B8B) | 1.3 |
| 153669 Prostate NAT(D5E) | 18.8 | 151144 Prostate cancer(B8F) | 8.1 |
| 153677 Prostate NAT(D66) | 8.1 | 153654 Prostate cancer(D4F) | 3.5 |
| 153685 Prostate NAT(D6E) | 14.0 | 153662 Prostate cancer(D57) | 0.9 |
| 145905 Prostate NAT(A0C) | 14.8 | 153655 Prostate cancer(D50) | 27.2 |
| 153670 Prostate NAT(D5F) | 3.3 | 145907 Prostate cancer(A0A) | 13.0 |
| 153678 Prostate NAT(D67) | 12.2 | 153663 Prostate cancer(D58) | 100.0 |
| 153686 Prostate NAT(D6F) | 1.8 | 151130 Prostate cancer(B90) | 9.1 |
| 145906 Prostate NAT(A09) | 9.1 | 153648 Prostate cancer(D49) | 9.9 |
| 151129 Prostate NAT(B93) | 60.3 | 153656 Prostate cancer(D51) | 9.8 |
| 151137 Prostate NAT(B86) | 18.7 | 153664 Prostate cancer(D59) | 1.8 |
| 153671 Prostate NAT(D60) | 4.4 | 155799 Prostate cancer(EA8) | 6.2 |
| 151145 Prostate NAT(B91) | 26.8 | 145909 Prostate cancer(9E7) | 4.9 |
| 153679 Prostate NAT(D68) | 19.2 | 153649 Prostate cancer(D4A) | 2.4 |
| 153687 Prostate NAT(D70) | 10.2 | 153657 Prostate cancer(D52) | 1.3 |
| 153672 Prostate NAT(D61) | 8.1 | 153665 Prostate cancer(D5A) | 3.9 |
| 153680 Prostate NAT(D69) | 23.7 | 151132 Prostate cancer(B88) | 3.2 |
| 151131 Prostate NAT(B85) | 5.2 | 153650 Prostate cancer(D4B) | 1.8 |
| 153673 Prostate NAT(D62) | 8.2 | 153658 Prostate cancer(D53) | 1.8 |
| 153681 Prostate | 7.4 | 153666 Prostate cancer(D5B) | 0.4 |
| NAT(D6A) | | | |
| 145910 Prostate NAT(9C3) | 18.8 | 153651 Prostate cancer(D4C) | 2.4 |
| 153674 Prostate NAT(D63) | 24.0 | 153659 Prostate cancer(D54) | 7.2 |
| 153682 Prostate NAT(D6B) | 6.4 | 153667 Prostate cancer(D5C) | 7.6 |
| 151133 Prostate NAT(B94) | 7.6 | 151134 Prostate cancer(B92) | 1.4 |
| 153675 Prostate NAT(D64) | 3.6 | 151142 Prostate cancer(B89) | 5.5 |
| 153683 Prostate NAT(D6C) | 5.1 | 153652 Prostate cancer(D4D) | 7.1 |
| 153668 Prostate | 4.7 | 153660 Prostate cancer(D55) | 0.9 |
| NAT(D5D) | | | |
| 153676 Prostate NAT(D65) | 1.2 | 149773 Prostate NAT(AD8) | 0.0 |
| 153684 Prostate | 6.9 | 149774 Prostate cancer(AD7) | 6.5 |
| NAT(D6D) | | | |
| 145904 Prostate | 21.2 | 151139 Prostate NAT(B8E) | 15.1 |
| cancer(9E2) | | | |
| 149776 Prostate | 4.5 | 151138 Prostate cancer(B8D) | 2.2 |
| cancer(AD5) | | | |
| 153653 Prostate | 2.7 | 151141 Prostate NAT(B96) | 6.8 |
| cancer(D4E) | | | |
| 153661 Prostate | 6.2 | 151140 Prostate cancer(B95) | 4.7 |
| cancer(D56) | | | |

[1086] TABLE KC
Panel 1.3D
Column A - Rel. Exp.(%) Ag2425, Run 155561580

| Tissue Name | A | Tissue Name | A |
|---|---|---|---|
| Liver adenocarcinoma | 0.0 | Kidney (fetal) | 3.9 |
| Pancreas | 1.8 | Renal ca. 786-0 | 0.0 |
| Pancreatic ca. | 0.0 | Renal ca. A498 | 0.0 |
| CAPAN 2 | | | |
| Adrenal gland | 0.9 | Renal ca. RXF 393 | 0.0 |
| Thyroid | 2.7 | Renal ca. ACHN | 1.6 |
| Salivary gland | 1.1 | Renal ca. UO-31 | 0.0 |
| Pituitary gland | 0.5 | Renal ca. TK-10 | 0.0 |
| Brain (fetal) | 4.6 | Liver | 0.0 |
| Brain (whole) | 2.3 | Liver (fetal) | 1.2 |
| Brain (amygdala) | 4.2 | Liver ca. (hepatoblast) HepG2 | 0.0 |
| Brain (cerebellum) | 0.0 | Lung | 2.8 |
| Brain (hippocampus) | 25.3 | Lung (fetal) | 17.9 |
| Brain | 2.4 | Lung ca. (small cell) LX-1 | 0.0 |
| (substantia nigra) | | | |
| Brain (thalamus) | 9.4 | Lung ca. (small cell) NCI-H69 | 0.0 |
| Cerebral Cortex | 1.5 | Lung ca. (s. cell var.) SHP-77 | 1.0 |
| Spinal cord | 3.9 | Lung ca. (large cell)NCI-H460 | 0.0 |
| glio/astro U87-MG | 0.0 | Lung ca. (non-sm. cell) A549 | 1.7 |
| glio/astro U-118-MG | 1.1 | Lung ca. (non-s. cell) NCI-H23 | 1.8 |
| astrocytoma SW1783 | 0.0 | Lung ca. (non-s. cell) HOP-62 | 0.0 |
| neuro*; met SK-N-AS | 0.0 | Lung ca. (non-s. cl) NCI-H522 | 0.0 |
| astrocytoma SF-539 | 0.0 | Lung ca. (squam.) SW 900 | 0.0 |
| astrocytoma SNB-75 | 0.0 | Lung ca. (squam.) NCI-H596 | 0.0 |
| glioma SNB-19 | 0.8 | Mammary gland | 13.5 |
| glioma U251 | 0.0 | Breast ca.* (pl.ef) MCF-7 | 0.0 |
| glioma SF-295 | 0.0 | Breast ca.* (pl.ef) MDA-MB-231 | 0.0 |
| Heart (Fetal) | 3.4 | Breast ca.* (pl.ef) T47D | 0.0 |
| Heart | 1.1 | Breast ca. BT-549 | 1.6 |
| Skeletal muscle (Fetal) | 100.0 | Breast ca. MDA-N | 0.0 |
| Skeletal muscle | 0.9 | Ovary | 1.9 |
| Bone marrow | 3.3 | Ovarian ca. OVCAR-3 | 0.0 |
| Thymus | 4.1 | Ovarian ca. OVCAR-4 | 0.0 |
| Spleen | 2.7 | Ovarian ca. OVCAR-5 | 0.0 |
| Lymph node | 4.6 | Ovarian ca. OVCAR-8 | 0.0 |
| Colorectal | 5.9 | Ovarian ca. IGROV-1 | 0.0 |
| Stomach | 7.3 | Ovarian ca. (ascites) SK-OV-3 | 0.0 |
| Small intestine | 18.4 | Uterus | 37.4 |
| Colon ca. SW480 | 0.0 | Placenta | 1.8 |
| Colon ca.* SW620 | 0.0 | Prostate | 8.8 |
| (SW480 met) | | | |
| Colon ca. HT29 | 0.0 | Prostate ca.* (bone met) PC-3 | 0.0 |
| Colon ca. HCT-116 | 0.0 | Testis | 7.5 |
| Colon ca. CaCo-2 | 0.0 | Melanoma Hs688(A).T | 5.0 |
| CC Well to Mod Diff | 0.0 | Melanoma* (met) Hs688(B).T | 3.3 |
| (ODO3866) | | | |
| Colon ca. HCC-2998 | 0.0 | Melanoma UACC-62 | 0.0 |
| Gastric ca. (liver met) | 0.0 | Melanoma M14 | 0.0 |
| NCI-N87 | | | |
| Bladder | 0.0 | Melanoma LOX IMVI | 0.0 |
| Trachea | 15.8 | Melanoma* (met) SK-MEL-5 | 0.0 |
| Kidney | 1.8 | Adipose | 1.6 |

[1087] TABLE KD
Panel 2D
Column A - Rel. Exp.(%) Ag2425, Run 155562155

| Tissue Name | A | Tissue Name | A |
|---|---|---|---|
| Normal Colon | 100.0 | Kidney Margin 8120608 | 0.0 |
| CC Well to Mod Diff (ODO3866) | 5.6 | Kidney Cancer 8120613 | 0.0 |
| CC Margin (ODO3866) | 4.5 | Kidney Margin 8120614 | 2.1 |
| CC Gr.2 rectosigmoid (ODO3868) | 20.7 | Kidney Cancer 9010320 | 2.2 |
| CC Margin (ODO3868) | 21.9 | Kidney Margin 9010321 | 6.1 |
| CC Mod Diff (ODO3920) | 6.7 | Normal Uterus | 49.3 |
| CC Margin (ODO3920) | 61.6 | Uterine Cancer 064011 | 92.7 |
| CC Gr.2 ascend colon (ODO3921) | 1.0 | Normal Thyroid | 18.3 |
| CC Margin (ODO3921) | 6.2 | Thyroid Cancer | 0.0 |
| CC from Partial Hepatectomy | 0.0 | Thyroid Cancer A302152 | 2.8 |
| (ODO4309) Mets | | | |
| Liver Margin (ODO4309) | 0.0 | Thyroid Margin A302153 | 20.4 |
| Colon mets to lung (OD04451-01) | 0.0 | Normal Breast | 53.2 |
| Lung Margin (OD04451-02) | 0.0 | Breast Cancer | 0.0 |
| Normal Prostate 6546-1 | 66.4 | Breast Cancer (OD04590-01) | 2.6 |
| Prostate Cancer (OD04410) | 25.9 | Breast Cancer Mets (OD04590-03) | 11.5 |
| Prostate Margin (OD04410) | 72.7 | Breast Cancer Metastasis | 0.0 |
| Prostate Cancer (OD04720-01) | 45.4 | Breast Cancer | 24.7 |
| Prostate Margin (OD04720-02) | 33.7 | Breast Cancer | 51.8 |
| Normal Lung | 84.1 | Breast Cancer 9100266 | 3.1 |
| Lung Met to Muscle (ODO4286) | 9.4 | Breast Margin 9100265 | 12.9 |
| Muscle Margin (ODO4286) | 0.0 | Breast Cancer A209073 | 17.3 |
| Lung Malignant Cancer (OD03126) | 0.0 | Breast Margin A209073 | 99.3 |
| Lung Margin (OD03126) | 10.6 | Normal Liver | 0.0 |
| Lung Cancer (OD04404) | 0.0 | Liver Cancer | 4.0 |
| Lung Margin (OD04404) | 0.0 | Liver Cancer 1025 | 4.9 |
| Lung Cancer (OD04565) | 13.7 | Liver Cancer 1026 | 0.0 |
| Lung Margin (OD04565) | 10.6 | Liver Cancer 6004-T | 0.0 |
| Lung Cancer (OD04237-01) | 0.0 | Liver Tissue 6004-N | 8.5 |
| Lung Margin (OD04237-02) | 0.0 | Liver Cancer 6005-T | 0.0 |
| Ocular Mel Met to Liver (ODO4310) | 0.0 | Liver Tissue 6005-N | 0.0 |
| Liver Margin (ODO4310) | 0.0 | Normal Bladder | 11.1 |
| Melanoma Metastasis | 0.0 | Bladder Cancer | 3.1 |
| Lung Margin (OD04321) | 2.9 | Bladder Cancer | 14.6 |
| Normal Kidney | 9.7 | Bladder Cancer (OD04718-01) | 2.4 |
| Kidney Ca, Nuclear grade 2 (OD04338) | 0.0 | Bladder Normal Adjacent | 10.6 |
| | | (OD04718-03) | |
| Kidney Margin (OD04338) | 6.0 | Normal Ovary | 0.0 |
| Kidney Ca Nuclear grade ½ (OD04339) | 0.0 | Ovarian Cancer | 0.0 |
| Kidney Margin (OD04339) | 0.0 | Ovarian Cancer (OD04768-07) | 3.2 |
| Kidney Ca, Clear cell type (OD04340) | 0.0 | Ovary Margin (OD04768-08) | 6.0 |
| Kidney Margin (OD04340) | 4.0 | Normal Stomach | 12.7 |
| Kidney Ca, Nuclear grade 3 (OD04348) | 0.0 | Gastric Cancer 9060358 | 9.9 |
| Kidney Margin (OD04348) | 6.7 | Stomach Margin 9060359 | 0.0 |
| Kidney Cancer (OD04622-01) | 0.0 | Gastric Cancer 9060395 | 39.2 |
| Kidney Margin (OD04622-03) | 7.4 | Stomach Margin 9060394 | 26.4 |
| Kidney Cancer (OD04450-01) | 0.0 | Gastric Cancer 9060397 | 6.2 |
| Kidney Margin (OD04450-03) | 0.0 | Stomach Margin 9060396 | 3.3 |
| Kidney Cancer 8120607 | 0.0 | Gastric Cancer 064005 | 25.3 |

[1088] TABLE KE
Panel 4D
Column A - Rel. Exp.(%) Ag2425, Run 155562267

| Tissue Name | A | Tissue Name | A |
|---|---|---|---|
| Secondary Th1 act | 0.0 | HUVEC IL-1beta | 0.0 |
| Secondary Th2 act | 0.0 | HUVEC IFN gamma | 0.0 |
| Secondary Tr1 act | 0.0 | HUVEC TNF alpha + IFN gamma | 0.0 |
| Secondary Th1 rest | 0.0 | HUVEC TNF alpha + IL4 | 0.0 |
| Secondary Th2 rest | 0.0 | HUVEC IL-11 | 0.0 |
| Secondary Tr1 rest | 0.0 | Lung Microvascular EC none | 0.0 |
| Primary Th1 act | 0.0 | Lung Microvascular EC TNF alpha + IL- | 0.0 |
| | | 1beta | |
| Primary Th2 act | 0.0 | Microvascular Dermal EC none | 0.0 |
| Primary Tr1 act | 1.3 | Microsvasular Dermal EC TNF alpha + IL- | 0.0 |
| | | 1beta | |
| Primary Th1 rest | 0.0 | Bronchial epithelium TNF alpha + IL1beta | 0.0 |
| Primary Th2 rest | 0.0 | Small airway epithelium none | 0.0 |
| Primary Tr1 rest | 0.0 | Small airway epithelium TNF alpha + IL- | 0.0 |
| | | 1beta | |
| CD45RA CD4 lymphocyte act | 1.8 | Coronery artery SMC rest | 0.0 |
| CD45RO CD4 lymphocyte act | 1.4 | Coronery artery SMC TNF alpha + IL-1beta | 0.0 |
| CD8 lymphocyte act | 0.0 | Astrocytes rest | 0.0 |
| Secondary CD8 lymphocyte rest | 0.0 | Astrocytes TNF alpha + IL-1beta | 0.0 |
| Secondary CD8 lymphocyte act | 0.0 | KU-812 (Basophil) rest | 0.0 |
| CD4 lymphocyte none | 1.3 | KU-812 (Basophil) PMA/ionomycin | 0.0 |
| 2ry Th1/Th2/Tr1 anti-CD95 | 3.9 | CCD1106 (Keratinocytes) none | 0.0 |
| CH11 | | | |
| LAK cells rest | 0.0 | CCD1106 (Keratinocytes) TNF alpha + IL- | 0.0 |
| | | 1beta | |
| LAK cells IL-2 | 0.0 | Liver cirrhosis | 4.9 |
| LAK cells IL-2 + IL-12 | 0.0 | Lupus kidney | 0.0 |
| LAK cells IL-2 + IFN gamma | 0.0 | NCI-H292 none | 0.0 |
| LAK cells IL-2 + IL-18 | 0.0 | NCI-H292 IL-4 | 0.0 |
| LAK cells PMA/ionomycin | 0.0 | NCI-H292 IL-9 | 0.0 |
| NK Cells IL-2 rest | 0.0 | NCI-H292 IL-13 | 0.0 |
| Two Way MLR 3 day | 0.0 | NCI-H292 IFN gamma | 0.0 |
| Two Way MLR 5 day | 0.0 | HPAEC none | 0.0 |
| Two Way MLR 7 day | 0.0 | HPAEC TNF alpha + IL-1beta | 0.0 |
| PBMC rest | 0.0 | Lung fibroblast none | 13.0 |
| PBMC PWM | 0.0 | Lung fibroblast TNF alpha + IL-1beta | 2.7 |
| PBMC PHA-L | 0.0 | Lung fibroblast IL-4 | 3.4 |
| Ramos (B cell) none | 0.0 | Lung fibroblast IL-9 | 10.7 |
| Ramos (B cell) ionomycin | 0.0 | Lung fibroblast IL-13 | 5.9 |
| B lymphocytes PWM | 0.0 | Lung fibroblast IFN gamma | 3.3 |
| B lymphocytes CD40L and IL-4 | 0.0 | Dermal fibroblast CCD1070 rest | 23.7 |
| EOL-1 dbcAMP | 0.0 | Dermal fibroblast CCD1070 TNF alpha | 5.6 |
| EOL-1 dbcAMP | 0.0 | Dermal fibroblast CCD1070 IL-1beta | 12.5 |
| PMA/ionomycin | | | |
| Dendritic cells none | 0.0 | Dermal fibroblast IFN gamma | 64.6 |
| Dendritic cells LPS | 0.0 | Dermal fibroblast IL-4 | 100.0 |
| Dendritic cells anti-CD40 | 0.0 | IBD Colitis 2 | 0.0 |
| Monocytes rest | 0.0 | IBD Crohn's | 0.0 |
| Monocytes LPS | 0.0 | Colon | 28.3 |
| Macrophages rest | 0.0 | Lung | 21.6 |
| Macrophages LPS | 0.0 | Thymus | 0.0 |
| HUVEC none | 0.0 | Kidney | 0.0 |
| HUVEC starved | 0.0 | | |

[1089] Ardais Prostate 1.0 Summary: Ag2425 Expression of the CG50367-01 gene was highest in a prostate cancer sample (CT=28.3), with expression of this gene slightly downregulated in most of the prostate cancer samples.

[1090] Panel 1.3D Summary: Ag2425 Highest expression of the CG50367-01 gene was seen in fetal skeletal muscle (CT=31.1). This gene was highly expressed in fetal skeletal muscle when compared to expression in adult skeletal muscle (CT=40). Thus expression of this gene is useful as a marker differentiate between fetal and adult skeletal muscle. Furthermore, the higher levels of expression in the fetal source of the tissue show that the protein encoded by this gene is involved in the development of the skeletal muscle in the fetus. Therapeutic modulation of the expression or function of this gene is useful for restoring muscle mass or function to weak or dystrophic muscle in the adult.

[1091] This gene was expressed at a very low level in all the cancer cell lines used in this panel. The absence of exprssion of this gene in the cancer cell lines showed that modulation of the function of the gene product through the use of peptides, polypeptides, chimeric molecules or small molecule drugs, aree useful in the therapy of cancer.

[1092] This gene is a cell-surface metalloprotease expressed at low levels in the hippocampus. It is useful in the treatment of diseases in which the hippocampus is involved, such as Alzheimer's disease, Parkinson's disease, schizophrenia, bipolar disorder, or temporal lobe epilepsy.

[1093] Panel 2D Summary: Ag2425 The CG50367-01 gene was expressed at low levels in this panel, with highest expression in the colon (CT=32.2). Moderately higher levels of expression were seen in normal breast, uterine and thyroid tissues compared to the adjacent cancers. Expression of this gene is useful as a marker to identify normal tissue from cancerous tissue in these organs. Therapeutic modulation of the activity of the product of this gene, through the use of peptides, polypeptides, chimeric molecules or small molecule drugs, is useful in the therapy of these cancers.

[1094] Panel 4D Summary: Ag2425 The CG50367-01 transcript was most highly expressed in dermal fibroblast upon treatment with either Il-4 or IFN gamma (CTs=31-32) and at lower levels in resting dermal fibroblasts. This transcript was also expressed in lung fibroblasts and normal lung and thymus. This transcript encodes for a ADAM like protein, a member of membrane-anchored glycoproteins that play a role in diverse cellular processes from cell-cell interaction to shedding of cell surface proteases. The expression of this transcript in dermal and lung fibroblasts showed that the protein encoded by this transcript is involved in diseases associated with fibrosis or fibroplasia. Modulation of the expression or the function of this molecule is useful for the treatment of psoriasis, chronic obstructive pulmonary diseases and potentially for osteoarthritis and rheumatoid arthritis.

[1095] L. CG50718-02 and CG50718-06: Glomerular Mesangial Cell Receptor Protein-Tyrosine Phosphatase Precursor,

[1096] Expression of gene CG50718-02 and variant CG50718-06 was assessed using the primer-probe sets Ag1555 and Ag2315, described in Tables LA and LB. Results of the RTQ-PCR runs are shown in Tables LC, LD, LE, and LF.

TABLE LA
Probe Name Ag1555

| | | | Start | SEQ ID |
|---|---|---|---|---|
| Primers | Sequences | Length | Position | No |
| Forward | 5′-gaagtgaaagaatgtgcatggt-3′ | 22 | 6707 | 1175 |
| Probe | TET-5′-caccagtgcattctggatctcttatca- | 27 | 6757 | 1176 |
| | 3′-TAMRA | | | |
| Reverse | 5′-tgggctgattacttcccttatt-3′ | 22 | 6784 | 1177 |

[1097] TABLE LB
Probe Name Ag2315

| | | | Start | SEQ ID |
|---|---|---|---|---|
| Primers | Sequences | Length | Position | No |
| Forward | 5′-agatgagtcagtgccgttagc-3′ | 21 | 3711 | 1178 |
| Probe | TET-5′-cctccacaaaatttgactttaatcaactg- | 29 | 3733 1179 | |
| | 3′-TAMRA | | | |
| Reverse | 5′-tccatttcagccatacaaagtc-3′ | 22 | 3769 | 1180 |

[1098] TABLE LC
Panel 1.3D
Column A - Rel. Exp.(%) Ag1555, Run 146380268
Column B - Rel. Exp.(%) Ag1555, Run 147775028

| Tissue Name | A | B | Tissue Name | A | B |
|---|---|---|---|---|---|
| Liver adenocarcinoma | 0.0 | 0.0 | Kidney (fetal) | 33.9 | 37.6 |
| Pancreas | 5.8 | 1.6 | Renal Ca. 786-0 | 0.0 | 0.0 |
| Pancreatic ca. CAPAN 2 | 0.0 | 0.0 | Renal Ca. A498 | 0.0 | 0.0 |
| Adrenal gland | 0.0 | 1.9 | Renal Ca. RXF 393 | 0.0 | 0.0 |
| Thyroid | 8.3 | 24.7 | Renal ca. ACHN | 0.0 | 0.0 |
| Salivary gland | 1.0 | 0.0 | Renal ca. UO-31 | 0.0 | 1.4 |
| Pituitary gland | 0.0 | 0.0 | Renal Ca. TK-10 | 0.0 | 0.0 |
| Brain (fetal) | 0.6 | 0.0 | Liver | 0.0 | 0.0 |
| Brain (whole) | 1.3 | 1.6 | Liver (fetal) | 0.0 | 3.6 |
| Brain (amygdala) | 3.4 | 4.0 | Liver ca. (hepatoblast) HepG2 | 0.0 | 0.0 |
| Brain (cerebellum) | 0.0 | 0.0 | Lung | 51.1 | 52.5 |
| Brain (hippocampus) | 1.2 | 0.6 | Lung (fetal) | 100.0 | 100.0 |
| Brain (substantia nigra) | 0.0 | 0.0 | Lung Ca. (small cell) LX-1 | 0.0 | 0.0 |
| Brain (thalamus) | 3.2 | 1.3 | Lung Ca. (small cell) NCI-H69 | 2.4 | 0.0 |
| Cerebral Cortex | 0.0 | 0.0 | Lung Ca. (s.cell var.) SHP-77 | 0.0 | 0.0 |
| Spinal cord | 1.1 | 0.0 | Lung Ca. (large cell) NCI-H460 | 0.0 | 0.0 |
| glio/astro U87-MG | 0.0 | 2.7 | Lung Ca. (non-sm. cell) A549 | 0.0 | 0.0 |
| glio/astro U-118-MG | 27.2 | 34.6 | Lung Ca. (non-s.cell) NCI-H23 | 0.0 | 0.0 |
| astrocytoma SW1783 | 5.4 | 13.8 | Lung Ca. (non-s.cell) HOP-62 | 0.7 | 0.9 |
| neuro*; met SK-N-AS | 0.0 | 0.6 | Lung Ca. (non-s.cl) NCI-H522 | 9.9 | 5.4 |
| astrocytoma SF-539 | 0.8 | 0.0 | Lung Ca. (squam.) SW 900 | 0.0 | 0.0 |
| astrocytoma SNB-75 | 0.0 | 0.0 | Lung Ca. (squam.) NCI-H596 | 1.3 | 2.2 |
| glioma SNB-19 | 0.0 | 0.0 | Mammary gland | 13.0 | 26.6 |
| glioma U251 | 0.0 | 0.0 | Breast ca.* (pl.ef) MCF-7 | 3.9 | 0.9 |
| glioma SF-295 | 1.3 | 3.3 | Breast ca.* (pl.ef) MDA-MB- | 0.0 | 0.0 |
| | | | 231 | | |
| Heart (Fetal) | 0.0 | 0.0 | Breast ca.* (pl.ef) T47D | 0.0 | 0.0 |
| Heart | 0.0 | 5.7 | Breast ca. BT-549 | 0.0 | 0.0 |
| Skeletal muscle (Fetal) | 3.5 | 1.6 | Breast Ca. MDA-N | 0.0 | 0.0 |
| Skeletal muscle | 0.0 | 1.4 | Ovary | 5.2 | 1.6 |
| Bone marrow | 1.0 | 4.1 | Ovarian Ca. OVCAR-3 | 0.0 | 0.0 |
| Thymus | 1.0 | 0.0 | Ovarian Ca. OVCAR-4 | 0.0 | 0.0 |
| Spleen | 0.0 | 0.0 | Ovarian Ca. OVCAR-5 | 0.0 | 0.0 |
| Lymph node | 3.7 | 4.8 | Ovarian Ca. OVCAR-8 | 0.0 | 0.0 |
| Colorectal | 0.0 | 0.0 | Ovarian Ca. IGROV-1 | 0.0 | 0.0 |
| Stomach | 1.2 | 2.3 | Ovarian Ca. (ascites) SK-OV-3 | 0.0 | 0.0 |
| Small intestine | 2.2 | 6.7 | Uterus | 0.0 | 0.9 |
| Colon Ca. SW480 | 0.0 | 0.0 | Placenta | 11.8 | 27.7 |
| Colon Ca.* SW620 (SW480 | 0.0 | 0.0 | Prostate | 3.5 | 0.9 |
| met) | | | | | |
| Colon Ca. HT29 | 0.0 | 0.0 | Prostate Ca.* (bone met) PC-3 | 0.0 | 0.0 |
| Colon Ca. HCT-116 | 0.0 | 0.0 | Testis | 58.2 | 67.4 |
| Colon Ca. CaCo-2 | 0.0 | 0.0 | Melanoma Hs688(A).T | 22.7 | 52.1 |
| CC Well to Mod Duff | 0.0 | 0.0 | Melanoma* (met) Hs688(B).T | 4.8 | 4.2 |
| (ODO3866) | | | | | |
| Colon Ca. HCC-2998 | 0.0 | 0.0 | Melanoma UACC-62 | 0.0 | 1.5 |
| Gastric ca. (liver met) NCI-N87 | 0.0 | 0.0 | Melanoma M14 | 0.0 | 0.0 |
| Bladder | 2.0 | 0.0 | Melanoma LOX IMVI | 0.0 | 0.0 |
| Trachea | 2.4 | 3.6 | Melanoma* (met) SK-MEL-5 | 0.0 | 0.0 |
| Kidney | 15.5 | 17.8 | Adipose | 38.2 | 40.6 |

[1099] TABLE LD
Panel 2D
Column A - Rel. Exp.(%) Ag1555, Run 147775063
Column B - Rel. Exp.(%) Ag1555, Run 159601974
Column C - Rel. Exp.(%) Ag2315, Run 159200827

| Tissue Name | A | B | C | Tissue Name | A | B | C |
|---|---|---|---|---|---|---|---|
| Normal Colon | 3.8 | 7.1 | 12.4 | Kidney Margin 8120608 | 2.9 | 1.2 | 1.7 |
| CC Well to Mod Diff | 1.0 | 0.0 | 2.3 | Kidney Cancer 8120613 | 0.0 | 0.0 | 0.0 |
| (ODO3866) | | | | | | | |
| CC Margin (ODO3866) | 0.0 | 0.0 | 0.7 | Kidney Margin 8120614 | 1.2 | 2.6 | 1.8 |
| CC Gr.2 rectosigmoid | 0.0 | 0.0 | 0.0 | Kidney Cancer 9010320 | 2.7 | 2.6 | 2.1 |
| (ODO3868) | | | | | | | |
| CC Margin (ODO3868) | 0.0 | 0.7 | 0.0 | Kidney Margin 9010321 | 6.6 | 5.9 | 4.9 |
| CC Mod Diff (ODO3920) | 0.0 | 0.0 | 0.0 | Normal Uterus | 0.0 | 0.0 | 1.8 |
| CC Margin (ODO3920) | 0.0 | 0.0 | 2.2 | Uterine Cancer 064011 | 0.0 | 0.0 | 4.5 |
| CC Gr.2 ascend colon | 0.0 | 0.0 | 0.0 | Normal Thyroid | 34.9 | 27.4 | 11.4 |
| (ODO3921) | | | | | | | |
| CC Margin (ODO3921) | 0.0 | 0.0 | 0.0 | Thyroid Cancer | 2.9 | 7.2 | 7.9 |
| CC from Partial | 1.6 | 1.1 | 0.0 | Thyroid Cancer | 1.3 | 3.3 | 2.0 |
| Hepatectomy (ODO4309) | | | | A302152 | | | |
| Mets | | | | | | | |
| Liver Margin (ODO4309) | 0.0 | 0.0 | 2.0 | Thyroid Margin | 49.7 | 69.7 | 72.2 |
| | | | | A302153 | | | |
| Colon mets to lung | 2.0 | 1.0 | 0.5 | Normal Breast | 10.0 | 8.9 | 25.3 |
| (ODO4451-01) | | | | | | | |
| Lung Margin (ODO4451-02) | 8.6 | 10.0 | 10.9 | Breast Cancer | 10.2 | 3.0 | 1.1 |
| Normal Prostate 6546-1 | 4.2 | 12.2 | 1.4 | Breast Cancer | 0.0 | 2.8 | 3.9 |
| | | | | (ODO4590-01) | | | |
| Prostate Cancer (ODO4410) | 0.0 | 0.0 | 3.4 | Breast Cancer Mets | 7.8 | 7.3 | 7.9 |
| | | | | (ODO4590-03) | | | |
| Prostate Margin (ODO4410) | 0.8 | 6.4 | 2.2 | Breast Cancer | 4.1 | 8.0 | 3.5 |
| | | | | Metastasis | | | |
| Prostate Cancer (ODO4720- | 9.5 | 11.7 | 19.6 | Breast Cancer | 0.0 | 0.0 | 1.2 |
| 01) | | | | | | | |
| Prostate Margin (ODO4720- | 10.0 | 11.3 | 24.5 | Breast Cancer | 3.7 | 2.9 | 0.9 |
| 02) | | | | | | | |
| Normal Lung | 59.9 | 61.1 | 87.7 | Breast Cancer 9100266 | 2.2 | 1.1 | 1.5 |
| Lung Met to Muscle | 0.0 | 0.0 | 0.0 | Breast Margin 9100265 | 0.0 | 0.0 | 0.5 |
| (ODO4286) | | | | | | | |
| Muscle Margin (ODO4286) | 0.9 | 0.0 | 1.8 | Breast Cancer A209073 | 0.7 | 1.1 | 1.9 |
| Lung Malignant Cancer | 1.9 | 2.8 | 1.7 | Breast Margin A209073 | 0.0 | 1.2 | 0.9 |
| (ODO3126) | | | | | | | |
| Lung Margin (ODO3126) | 36.3 | 3.6 | 43.8 | Normal Liver | 0.0 | 0.0 | 0.0 |
| Lung Cancer (ODO4404) | 2.2 | 4.4 | 4.3 | Liver Cancer | 0.0 | 0.0 | 0.6 |
| Lung Margin (ODO4404) | 9.5 | 4.2 | 8.4 | Liver Cancer 1025 | 0.0 | 0.0 | 0.0 |
| Lung Cancer (ODO4565) | 0.0 | 0.0 | 00 | Liver Cancer 1026 | 0.0 | 0.0 | 0.0 |
| Lung Margin (ODO4565) | 10.8 | 9.7 | 14.1 | Liver Cancer 6004-T | 0.0 | 1.0 | 0.6 |
| Lung Cancer (OD04237-01) | 0.0 | 0.0 | 0.0 | Liver Tissue 6004-N | 0.0 | 0.0 | 0.0 |
| Lung Margin (ODO4237-02) | 30.1 | 18.4 | 29.3 | Liver Cancer 6005-T | 0.0 | 0.0 | 0.0 |
| Ocular Mel Met to Liver | 0.0 | 0.0 | 0.6 | Liver Tissue 6005-N | 0.0 | 0.0 | 0.0 |
| (ODO4310) | | | | | | | |
| Liver Margin (ODO4310) | 1.0 | 2.0 | 0.0 | Normal Bladder | 4.7 | 2.2 | 2.9 |
| Melanoma Metastasis | 0.0 | 0.0 | 0.0 | Bladder Cancer | 0.0 | 0.0 | 0.0 |
| Lung Margin (ODO4321) | 25.7 | 47.0 | 49.0 | Bladder Cancer | 0.0 | 4.2 | 5.5 |
| Normal Kidney | 86.5 | 100.0 | 100.0 | Bladder Cancer | 0.7 | 1.6 | 1.1 |
| | | | | (ODO4718-01) | | | |
| Kidney Ca, Nuclear grade 2 | 2.2 | 0.0 | 1.1 | Bladder Normal | 4.4 | 0.9 | 6.3 |
| (ODO4338) | | | | Adjacent (ODO4718-03) | | | |
| Kidney Margin (ODO4338) | 55.1 | 35.8 | 58.2 | Normal Ovary | 1.7 | 0.0 | 0.9 |
| Kidney Ca Nuclear grade 1/2 | 0.0 | 0.0 | 0.0 | Ovarian Cancer | 0.0 | 4.2 | 3.3 |
| (ODO4339) | | | | | | | |
| Kidney Margin (ODO4339) | 77.9 | 63.7 | 77.9 | Ovarian Cancer | 0.0 | 0.0 | 0.0 |
| | | | | (ODO4768-07) | | | |
| Kidney Ca, Clear cell type | 1.7 | 0.0 | 0.0 | Ovary Margin | 9.4 | 5.5 | 6.9 |
| (ODO4340) | | | | (ODO4768-08) | | | |
| Kidney Margin (ODO4340) | 100.0 | 53.2 | 62.4 | Normal Stomach | 0.0 | 0.0 | 0.0 |
| Kidney Ca, Nuclear grade 3 | 25.9 | 23.2 | 0.0 | Gastric Cancer 9060358 | 0.0 | 0.0 | 1.5 |
| (ODO4348) | | | | | | | |
| Kidney Margin (ODO4348) | 40.9 | 50.3 | 54.7 | Stomach Margin | 0.0 | 0.0 | 2.0 |
| | | | | 9060359 | | | |
| Kidney Cancer (ODO4622- | 0.6 | 0.0 | 0.0 | Gastric Cancer 9060395 | 0.9 | 1.2 | 1.8 |
| 01) | | | | | | | |
| Kidney Margin (ODO4622- | 0.0 | 0.0 | 1.4 | Stomach Margin | 0.0 | 1.0 | 0.7 |
| 03) | | | | 9060394 | | | |
| Kidney Cancer (ODO4450- | 0.0 | 0.0 | 0.0 | Gastric Cancer 9060397 | 0.0 | 0.0 | 0.0 |
| 01) | | | | | | | |
| Kidney Margin (ODO4450- | 40.3 | 51.1 | 50.7 | Stomach Margin | 0.0 | 0.0 | 0.0 |
| 03) | | | | 9060396 | | | |
| Kidney Cancer 8120607 | 0.0 | 0.0 | 0.0 | Gastric Cancer 064005 | 0.0 | 0.0 | 2.5 |

[1100] TABLE LE
Panel 4D
Column A - Rel. Exp. (%) Ag1555, Run 147775116
Column B - Rel. Exp. (%) Ag2315, Run 159202089

| Tissue Name | A | B | Tissue Name | A | B |
|---|---|---|---|---|---|
| Secondary Th1 act | 0.0 | 0.0 | HUVEC IL-1beta | 0.0 | 0.0 |
| Secondary Th2 act | 0.0 | 0.0 | HUVEC IFN gamma | 0.0 | 0.0 |
| Secondary Tr1 act | 0.0 | 0.7 | HUVEC TNF alpha + IFN gamma | 0.0 | 0.0 |
| Secondary Th1 rest | 0.0 | 0.0 | HUVEC TNF alpha +IL4 | 0.0 | 0.0 |
| Secondary Th2 rest | 0.0 | 0.0 | HUVEC IL-11 | 0.0 | 0.0 |
| Secondary Tr1 rest | 0.0 | 0.0 | Lung Microvascular EC none | 0.0 | 0.0 |
| Primary Th1 act | 0.0 | 0.0 | Lung Microvascular EC TNF alpha + | 0.0 | 0.0 |
| | | | IL-1beta | | |
| Primary Th2 act | 0.0 | 0.0 | Microvascular Dermal EC none | 0.0 | 0.0 |
| Primary Tr1 act | 0.0 | 0.0 | Microsvasular Dermal EC TNFalpha | 0.0 | 0.0 |
| | | | + IL-1beta | | |
| Primary Th1 rest | 0.0 | 0.0 | Bronchial epithelium TNFalpha + | 0.0 | 0.0 |
| | | | IL1beta | | |
| Primary Th2 rest | 0.0 | 0.0 | Small airway epithelium none | 0.0 | 0.0 |
| Primary Tr1 rest | 0.0 | 0.0 | Small airway epithelium TNFalpha + | 0.0 | 0.0 |
| | | | IL-1beta | | |
| CD45RA CD4 | 3.3 | 5.0 | Coronery artery SMG rest | 1.0 | 2.3 |
| lymphocyte act | | | | | |
| CD45RO CD4 | 0.0 | 0.0 | Coronery artery SMC TNFalpha + | 3.7 | 1.2 |
| lymphocyte act | | | IL-1beta | | |
| CD8 lymphocyte act | 0.0 | 0.0 | Astrocytes rest | 3.2 | 0.5 |
| Secondary CD8 | 0.0 | 0.0 | Astrocytes TNFalpha + IL-1beta | 1.0 | 1.5 |
| lymphocyte rest | | | | | |
| Secondary CD8 | 0.0 | 0.0 | KU-812 (Basophil) rest | 0.0 | 0.0 |
| lymphocyte act | | | | | |
| CD4 lymphocyte none | 0.0 | 0.0 | KU-812 (Basophil) PMA/ionomycin | 0.0 | 0.0 |
| 2ry Th1/Th2/Tr1 anti- | 0.0 | 0.0 | CCD1106 (Keratinocytes) none | 0.0 | 0.0 |
| CD95 CH11 | | | | | |
| LAK cells rest | 0.0 | 0.0 | 93580 CCD1106 (Keratinocytes) | 0.0 | 0.0 |
| | | | TNFa and IFNg | | |
| LAK cells IL-2 | 0.0 | 0.0 | Liver cirrhosis | 1.4 | 3.8 |
| LAK cells IL-2 + IL-12 | 0.0 | 0.0 | Lupus kidney | 0.0 | 0.8 |
| LAK cells IL-2 + IFN | 0.0 | 0.0 | NCI-H292 none | 0.0 | 0.0 |
| gamma | | | | | |
| LAK cells IL-2 + IL-18 | 0.0 | 0.0 | NCI-H292 IL-4 | 0.0 | 2.3 |
| LAK cells PMA/ | 0.0 | 0.0 | NCI-H292 IL-9 | 0.0 | 0.5 |
| ionomycin | | | | | |
| NK Cells IL-2 rest | 0.0 | 0.0 | NCI-H292 IL-13 | 0.0 | 1.3 |
| Two Way MLR 3 day | 0.0 | 0.0 | NCI-H292 IFN gamma | 0.0 | 0.0 |
| Two Way MLR 5 day | 0.0 | 0.0 | HPAEC none | 0.0 | 0.0 |
| Two Way MLR 7 day | 0.0 | 0.0 | HPAEC TNF alpha + IL-1 beta | 0.0 | 0.0 |
| PBMC rest | 0.0 | 0.0 | Lung fibroblast none | 0.0 | 0.9 |
| PBMC PWM | 0.0 | 0.0 | Lung fibroblast TNF alpha + IL-1 | 0.0 | 0.0 |
| | | | beta | | |
| PBMC PHA-L | 0.0 | 0.0 | Lung fibroblast IL-4 | 0.0 | 0.0 |
| Ramos (B cell) none | 0.0 | 0.0 | Lung fibroblast IL-9 | 5.7 | 1.3 |
| Ramos (B cell) | 0.0 | 0.0 | Lung fibroblast IL-13 | 1.5 | 1.5 |
| ionomycin | | | | | |
| B lymphocytes PWM | 0.0 | 0.0 | Lung fibroblast IFN gamma | 0.0 | 1.7 |
| B lymphocytes CD40L | 0.0 | 0.0 | Dermal fibroblast CCD1070 rest | 12.9 | 17.2 |
| and IL-4 | | | | | |
| EOL-1 dbcAMP | 0.0 | 0.0 | Dermal fibroblast CCD1070 TNF | 18.6 | 12.0 |
| | | | alpha | | |
| EOL-1 dbcAMP | 0.0 | 0.0 | Dermal fibroblast CCD1070 IL-1 | 6.1 | 2.9 |
| PMA/ionomycin | | | beta | | |
| Dendritic cells none | 0.0 | 0.0 | Dermal fibroblast IFN gamma | 0.0 | 0.0 |
| Dendritic cells LPS | 0.0 | 0.0 | Dermal fibroblast IL-4 | 1.4 | 0.6 |
| Dendritic cells anti-CD40 | 0.0 | 0.0 | IBD Colitis 2 | 0.0 | 1.4 |
| Monocytes rest | 0.0 | 0.0 | IBD Crohn's | 0.0 | 0.0 |
| Monocytes LPS | 0.0 | 0.0 | Colon | 0.6 | 0.0 |
| Macrophages rest | 0.0 | 0.0 | Lung | 4.0 | 11.7 |
| Macrophages LPS | 0.0 | 0.0 | Thymus | 100.0 | 100.0 |
| HUVEC none | 0.0 | 0.0 | Kidney | 4.2 | 5.3 |
| HUVEC starved | 0.0 | 0.0 | | | |

[1101] TABLE LF
Panel 5D
Column A - Rel. Exp.(%) Ag2315, Run 169275446

| Tissue Name | A | Tissue Name | A |
|---|---|---|---|
| 97457 Patient-02go adipose | 84.1 | 94709 Donor 2 AM - A adipose | 13.6 |
| 97476 Patient-07sk skeletal muscle | 0.6 | 94710 Donor 2 AM - B adipose | 9.3 |
| 97477 Patient-07ut uterus | 0.0 | 94711 Donor 2 AM - C adipose | 3.6 |
| 97478 Patient-07pl placenta | 7.2 | 94712 Donor 2 AD - A adipose | 8.7 |
| 97481 Patient-08sk skeletal muscle | 4.4 | 94713 Donor 2 AD - B adipose | 17.1 |
| 97482 Patient-08ut uterus | 0.5 | 94714 Donor 2 AD - C adipose | 21.6 |
| 97483 Patient-08pl placenta | 6.5 | 94742 Donor 3 U - A Mesenchymal | 9.0 |
| | | Stem Cells | |
| 97486 Patient-09sk skeletal muscle | 0.0 | 94743 Donor 3 U - B Mesenchymal | 7.3 |
| | | Stem Cells | |
| 97487 Patient-09ut uterus | 0.5 | 94730 Donor 3 AM - A adipose | 14.8 |
| 97488 Patient-09pl placenta | 6.1 | 94731 Donor 3 AM - B adipose | 13.9 |
| 97492 Patient-10ut uterus | 0.0 | 94732 Donor 3 AM - C adipose | 5.9 |
| 97493 Patient-10pl placenta | 7.8 | 94733 Donor 3 AD - A adipose | 5.4 |
| 97495 Patient-11go adipose | 100.0 | 94734 Donor 3 AD - B adipose | 4.7 |
| 97496 Patient-11sk skeletal muscle | 0.6 | 94735 Donor 3 AD - C adipose | 9.3 |
| 97497 Patient-11ut uterus | 1.0 | 77138 Liver HepG2untreated | 6.9 |
| 97498 Patient-11pl placenta | 7.3 | 73556 Heart Cardiac stromal cells | 0.0 |
| | | (primary) | |
| 97500 Patient-12go adipose | 61.6 | 81735 Small Intestine | 1.5 |
| 97501 Patient-12sk skeletal muscle | 3.2 | 72409 Kidney Proximal Convoluted | 0.0 |
| | | Tubule | |
| 97502 Patient-12ut uterus | 1.4 | 82685 Small intestine Duodenum | 0.0 |
| 97503 Patient-12pl placenta | 1.5 | 90650 Adrenal Adrenocortical | 0.0 |
| | | adenoma | |
| 94721 Donor 2 U - A Mesenchymal | 14.4 | 72410 Kidney HRCE | 0.0 |
| Stem Cells | | | |
| 94722 Donor 2 U - B Mesenchymal | 6.7 | 72411 Kidney HRE | 0.0 |
| Stem Cells | | | |
| 94723 Donor 2 U - C Mesenchymal | 6.0 | 73139 Uterus Uterine smooth muscle | 0.0 |
| Stem Cells | | cells | |

[1102] Panel 1.3D Summary: Ag1555 Highest expression of this gene was seen in the fetal lung (CTs=32). Modulation of this gene is useful in the treatment of lung related diseases.

[1103] Low but significant expression was also seen in the thyroid. Biologic cross-talk between the thyroid and adipose tissue is believed to be a component of some forms of obesity. Modulation of this gene and/or encoded protein is useful in the treatment of endocrine/metabolically related diseases, such as obesity and diabetes.

[1104] Panel 2D Summary: Ag1555/2315 Highest expression of this gene was detected in normal kidney tissue (CTs=30.7-32.4). Significant levels of expression of this was also seen in samples derived from normal lung tissue. This gene was preferentially expressed in healthy tissue relative to adjacent cancerous tissue. Modulation of this gene, encoded protein and/or use of small molecule drugs or antibodies targeting this gene is useful in the treatment of kidney cancer and lung cancer.

[1105] Panel 4D Summary: Ag1555/Ag2315 This gene was detected at significant levels in the thymus (CT=31.5) and dermal fibroblasts (CT=34). Modulation of this gene, encoded protein and/or use of antibodies or small molecule drug targeting this gene or gene product is useful in maintaining or restoring the normal function to these organs during inflammation.

[1106] Panel 5D Summary: Ag2315 This gene showed significant expression in human adipose tissue and in cultured human adipocytes (CT=31-34). Modulation of this gene or gene product is useful in the treatment of obesity.

[1107] M. CG50934-03: Mastocytoma Protease Precursor

[1108] Expression of full-length physical clone CG50934-03 was assessed using the primer-probe set Ag6974, described in Table MA. Results of the RTQ-PCR runs are shown in Table MB.

TABLE MA
Probe Name Ag6974

| | | | Start | SEQ ID |
|---|---|---|---|---|
| Primers | Sequences | Length | Position | No |
| Forward | 5′-gagacggatggccacag-3′ | 17 | 520 | 1181 |
| Probe | TET-5′-ccaggtggctcagagcagcaggaatgtac- | 29 | 538 | 1182 |
| | 3′-TAMRA | | | |
| Reverse | 5′-cgttccgcctgcagag-3′ | 16 | 577 | 1183 |

[1109] TABLE MB
General_screening_panel_v1.6
Column A - Rel. Exp.(%) Ag6974, Run 278389211

| Tissue Name | A | Tissue Name | A |
|---|---|---|---|
| Adipose | 0.0 | Renal ca. TK-10 | 0.0 |
| Melanoma* | 0.0 | Bladder | 0.2 |
| Hs688(A).T | | | |
| Melanoma* | 0.0 | Gastric ca. (liver met.) NCI-N87 | 34.4 |
| Hs688(B).T | | | |
| Melanoma* M14 | 0.0 | Gastric ca. KATO III | 0.0 |
| Melanoma* LOXIMVI | 0.0 | Colon ca. SW-948 | 0.0 |
| Melanoma* | 0.0 | Colon ca. SW480 | 1.2 |
| SK-MEL-5 | | | |
| Squamous cell | 0.0 | Colon ca.* (SW480 met) SW620 | 1.8 |
| carcinoma SCC-4 | | | |
| Testis Pool | 0.0 | Colon ca. HT29 | 0.2 |
| Prostate ca.* | 0.0 | Colon ca. HCT-116 | 0.0 |
| (bone met) PC-3 | | | |
| Prostate Pool | 0.0 | Colon ca. CaCo-2 | 0.9 |
| Placenta | 0.6 | Colon cancer tissue | 11.9 |
| Uterus Pool | 0.0 | Colon ca. SW1116 | 0.0 |
| Ovarian ca. OVCAR-3 | 0.0 | Colon ca. Colo-205 | 2.7 |
| Ovarian ca. SK-OV-3 | 0.0 | Colon ca. SW-48 | 0.0 |
| Ovarian ca. OVCAR-4 | 0.1 | Colon Pool | 0.3 |
| Ovarian ca. OVCAR-5 | 100.0 | Small Intestine Pool | 0.3 |
| Ovarian ca. IGROV-1 | 0.0 | Stomach Pool | 0.0 |
| Ovarian ca. OVCAR-8 | 0.0 | Bone Marrow Pool | 0.1 |
| Ovary | 0.0 | Fetal Heart | 0.0 |
| Breast ca. MCF-7 | 9.3 | Heart Pool | 0.0 |
| Breast ca. | 0.0 | Lymph Node Pool | 0.2 |
| MDA-MB-231 | | | |
| Breast ca. BT 549 | 0.0 | Fetal Skeletal Muscle | 0.0 |
| Breast ca. T47D | 0.4 | Skeletal Muscle Pool | 0.0 |
| Breast ca. MDA-N | 0.0 | Spleen Pool | 0.0 |
| Breast Pool | 0.0 | Thymus Pool | 0.0 |
| Trachea | 0.0 | CNS cancer (glio/astro) U87-MG | 0.0 |
| Lung | 0.0 | CNS cancer (glio/astro) U-118-MG | 0.2 |
| Fetal Lung | 0.0 | CNS cancer (neuro; met) SK-N-AS | 0.0 |
| Lung ca. NCI-N417 | 0.0 | CNS cancer (astro) SF-539 | 0.0 |
| Lung ca. LX-1 | 21.5 | CNS cancer (astro) SNB-75 | 0.0 |
| Lung ca. NCI-H146 | 0.0 | CNS cancer (glio) SNB-19 | 0.0 |
| Lung ca. SHP-77 | 4.0 | CNS cancer (glio) SF-295 | 0.5 |
| Lung ca. A549 | 0.0 | Brain (Amygdala) Pool | 0.0 |
| Lung ca. NCI-H526 | 0.0 | Brain (cerebellum) | 0.0 |
| Lung ca. NCI-H23 | 0.2 | Brain (fetal) | 0.2 |
| Lung ca. NCI-H460 | 0.0 | Brain (Hippocampus) Pool | 0.0 |
| Lung ca. HOP-62 | 0.0 | Cerebral Cortex Pool | 0.1 |
| Lung ca. NCI-H522 | 0.0 | Brain (Substantia nigra) Pool | 0.0 |
| Liver | 0.0 | Brain (Thalamus) Pool | 0.0 |
| Fetal Liver | 1.5 | Brain (whole) | 0.0 |
| Liver ca. HepG2 | 1.1 | Spinal Cord Pool | 0.0 |
| Kidney Pool | 0.1 | Adrenal Gland | 0.0 |
| Fetal Kidney | 0.4 | Pituitary gland Pool | 1.3 |
| Renal ca. 786-0 | 0.0 | Salivary Gland | 0.0 |
| Renal ca. A498 | 0.0 | Thyroid (female) | 0.0 |
| Renal ca. ACHN | 0.0 | Pancreatic ca. CAPAN2 | 8.5 |
| Renal ca. UO-31 | 0.0 | Pancreas Pool | 0.0 |

[1110] General_screening_panel_v1.6 Summary: Ag6974 Highest expression of this gene was detected in an ovarian cancer OVCAR-5 cell line (CT=28). This gene showed preferential expression in colon cancer tissue and a number of cancer cell lines derived from pancreatic, colon, gastric, lung, breast and ovarian cancers. Expression of this gene is useful as diagnostic marker to detect these cancers and also, modulation of this gene, encoded protein and/or use of antibodies or small molecule drug targeting this gene or gene product is useful in the treatment of these cancers.

[1111] N. CG51213-01 and CG51213-04: Zinc Metalloendopeptidase

[1112] Expression of gene CG51213-01 and CG51213-04 was assessed using the primer-probe sets Ag813, and Ag3985, described in Tables NA and NB. Results of the RTQ-PCR runs are shown in Tables NC, ND NE and NF. Please note that the primer-probe set Ag3985 is specific for CG51213-04 only.

TABLE NA
Probe Name Ag813

| | | | Start | SEQ ID |
|---|---|---|---|---|
| Primers | Sequences | Length | Position | No |
| Forward | 5′-tgtagaatttcccacggaaag-3′ | 21 | 1185 | 1184 |
| Probe | TET-5′-cactgcacttctctgaagtcctggga-3′- | 26 | 1139 | 1185 |
| | TAMRA | | | |
| Reverse | 5′-ctgcaacacggatgactgt-3′ | 19 | 1111 | 1186 |

[1113] TABLE NB
Probe Name Ag3985

| | | | Start | SEQ ID |
|---|---|---|---|---|
| Primers | Sequences | Length | Position | No |
| Forward | 5′-tgggaaattctacaagtggaaa-3′ | 22 | 1192 | 1187 |
| Probe | TET-5′-ctcgctcacgagcctagcggaag-3′- | 23 | 1243 | 1188 |
| | TAMRA | | | |
| Reverse | 5′-cctctccgtgtagaagttgaag-3′ | 22 | 1267 | 1189 |

[1114] TABLE NC
AI_comprehensive panel_v1.0
Column A - Rel. Exp.(%) Ag3985, Run 226203363
Column B - Rel. Exp.(%) Ag813, Run 234222162
Column C - Rel. Exp.(%) Ag813, Run 246953625

| Tissue Name | A | B | C | Tissue Name | A | B | C |
|---|---|---|---|---|---|---|---|
| 110967 COPD-F | 14.1 | 5.4 | 8.8 | 112427 Match Control | 31.6 | 0.0 | 30.6 |
| | | | | Psoriasis-F | | | |
| 110980 COPD-F | 8.5 | 5.9 | 9.2 | 112418 Psoriasis-M | 8.8 | 8.6 | 8.7 |
| 110968 COPD-M | 18.4 | 12.9 | 11.9 | 112723 Match Control | 8.9 | 11.0 | 8.8 |
| | | | | Psoriasis-M | | | |
| 110977 COPD-M | 0.0 | 18.8 | 25.7 | 112419 Psoriasis-M | 4.7 | 10.7 | 8.1 |
| 110989 Emphysema-F | 37.1 | 19.3 | 26.4 | 112424 Match Control | 5.0 | 7.4 | 4.1 |
| | | | | Psoriasis-M | | | |
| 110992 Emphysema-F | 22.1 | 13.5 | 30.8 | 112420 Psoriasis-M | 40.3 | 37.4 | 36.3 |
| 110993 Emphysema-F | 22.8 | 10.5 | 13.2 | 112425 Match Control | 16.2 | 11.7 | 6.2 |
| | | | | Psoriasis-M | | | |
| 110994 Emphysema-F | 10.2 | 10.4 | 7.3 | 104689 (MF) OA Bone- | 94.6 | 100.0 | 100.0 |
| | | | | Backus | | | |
| 110995 Emphysema-F | 60.3 | 25.5 | 25.9 | 104690 (MF) Adj “Normal” | 90.1 | 62.0 | 65.5 |
| | | | | Bone-Backus | | | |
| 110996 Emphysema-F | 7.0 | 3.7 | 6.5 | 104691 (ME) OA | 100.0 | 73.7 | 74.7 |
| | | | | Synovium-Backus | | | |
| 110997 Asthma-M | 4.1 | 2.5 | 2.4 | 104692 (BA) OA Cartilage- | 24.5 | 15.8 | 15.0 |
| | | | | Backus | | | |
| 111001 Asthma-F | 21.8 | 16.3 | 21.0 | 104694 (BA) OA Bone- | 85.9 | 69.3 | 79.0 |
| | | | | Backus | | | |
| 111002 Asthma-F | 27.9 | 24.0 | 22.1 | 104695 (BA) Adj “Normal” | 78.5 | 68.3 | 44.1 |
| | | | | Bone-Back | | | |
| 111003 Atopic Asthma-F | 25.5 | 14.9 | 35.4 | 104696 (BA) OA | 33.9 | 29.5 | 27.9 |
| | | | | Synovium-Backus | | | |
| 111004 Atopic Asthma-F | 46.0 | 31.6 | 147.0 | 104700 (SS) OA Bone- | 42.3 | 55.1 | 43.2 |
| | | | | Backus | | | |
| 111005 Atopic Asthma-F | 27.4 | 18.4 | 20.2 | 104701 (SS) Adj “Normal” | 75.3 | 72.2 | 95.3 |
| | | | | Bone-Backus | | | |
| 111006 Atopic Asthma-F | 8.4 | 2.6 | 5.6 | 104702 (SS) OA | 48.0 | 36.3 | 37.9 |
| | | | | Synovium-Backus | | | |
| 111417 Allergy-M | 21.8 | 13.4 | 8.5 | 117093 OA Cartilage Rep 7 | 7.5 | 4.9 | 11.3 |
| 112347 Allergy-M | 0.5 | 0.0 | 0.0 | 112672 OA Bone5 | 34.6 | 25.3 | 25.0 |
| 112349 Normal Lung-F | 0.0 | 0.0 | 0.0 | 112673 OA Synovium5 | 12.3 | 8.4 | 12.6 |
| 112357 Normal Lung-F | 25.2 | 15.5 | 16.4 | 112674 OA Synovial Fluid | 21.2 | 18.8 | 16.2 |
| | | | | cells5 | | | |
| 112354 Normal Lung-M | 6.2 | 3.7 | 1.5 | 117100 OA Cartilage | 11.8 | 8.0 | 10.5 |
| | | | | Rep14 | | | |
| 112374 Crohns-F | 12.2 | 16.6 | 21.6 | 112756 OA Bone9 | 7.7 | 3.6 | 11.2 |
| 112389 Match Control | 9.3 | 10.3 | 6.3 | 112757 OA Synovium9 | 5.4 | 6.0 | 5.4 |
| Crohns-F | | | | | | | |
| 112375 Crohns-F | 19.5 | 0.0 | 32.8 | 112758 OA Synovial Fluid | 12.2 | 9.9 | 9.4 |
| | | | | Cells9 | | | |
| 112732 Match Control | 15.4 | 10.4 | 9.7 | 117125 RA Cartilage Rep2 | 12.4 | 5.3 | 9.3 |
| Crohns-F | | | | | | | |
| 112725 Crohns-M | 1.0 | 2.2 | 0.8 | 113492 Bone2 RA | 6.8 | 4.0 | 4.1 |
| 112387 Match Control | 12.9 | 8.4 | 10.5 | 113493 Synovium2 RA | 0.2 | 1.0 | 1.7 |
| Crohns-M | | | | | | | |
| 112378 Crohns-M | 0.5 | 0.0 | 0.0 | 113494 Syn Fluid Cells RA | 3.5 | 2.6 | 5.6 |
| 112390 Match Control | 50.0 | 38.7 | 38.2 | 113499 Cartilage4 RA | 5.5 | 4.7 | 5.2 |
| Crohns-M | | | | | | | |
| 112726 Crohns-M | 31.2 | 27.4 | 22.8 | 113500 Bone4 RA | 6.4 | 4.0 | 4.6 |
| 112731 Match Control | 23.5 | 7.6 | 13.6 | 113501 Synovium4 RA | 4.2 | 3.6 | 3.1 |
| Crohns-M | | | | | | | |
| 112380 Ulcer Col-F | 18.6 | 15.9 | 20.4 | 113502 Syn Fluid Cells4 | 2.6 | 2.3 | 1.9 |
| | | | | RA | | | |
| 112734 Match Control | 28.3 | 13.5 | 26.4 | 113495 Cartilage3 RA | 1.3 | 3.3 | 5.4 |
| Ulcer Col-F | | | | | | | |
| 112384 Ulcer Col-F | 47.0 | 21.6 | 18.8 | 113496 Bone3 RA | 0.9 | 4.6 | 6.4 |
| 112737 Match Control | 8.5 | 5.6 | 5.8 | 113497 Synovium3 RA | 1.1 | 3.1 | 1.6 |
| Ulcer Col-F | | | | | | | |
| 112386 Ulcer Col-F | 8.6 | 0.7 | 1.1 | 113498 Syn Fluid Cells3 | 4.9 | 6.9 | 6.0 |
| | | | | RA | | | |
| 112738 MatchControl | 3.6 | 3.0 | 4.3 | 117106 Normal Cartilage | 16.4 | 13.7 | 13.0 |
| Ulcer Col-F | | | | Rep20 | | | |
| 112381 Ulcer Col-M | 2.5 | 0.0 | 0.1 | 113663 Bone3 Normal | 0.0 | 0.0 | 0.0 |
| 112735 Match Control | 2.2 | 2.1 | 0.8 | 113664 Synovium3 Normal | 0.0 | 0.0 | 0.0 |
| Ulcer Col-M | | | | | | | |
| 112382 Ulcer Col-M | 3.7 | 8.7 | 8.5 | 113665 Syn Fluid Cells3 | 0.0 | 0.0 | 0.1 |
| | | | | Normal | | | |
| 112394 Match Control | 3.7 | 1.5 | 4.7 | 117107 Normal Cartilage | 2.3 | 2.3 | 0.3 |
| Ulcer Col-M | | | | Rep22 | | | |
| 112383 Ulcer Col-M | 52.5 | 45.7 | 54.7 | 113667 Bone4 Normal | 11.0 | 8.6 | 4.7 |
| 112736 Match Control | 3.2 | 6.1 | 6.4 | 113668 Synovium4 Normal | 2.9 | 3.0 | 6.4 |
| Ulcer Col-M | | | | | | | |
| 112423 Psoriasis-F | 9.2 | 7.7 | 5.2 | 113669 Syn Fluid Cells4 | 13.9 | 12.7 | 11.0 |
| | | | | Normal | | | |

[1115] TABLE ND
General_screening_panel_v1.5
Column A - Rel. Exp.(%) Ag813, Run 247945092

| Tissue Name | A | Tissue Name | A |
|---|---|---|---|
| Adipose | 15.2 | Renal ca. TK-10 | 50.3 |
| Melanoma* | 26.2 | Bladder | 88.3 |
| Hs688(A).T | | | |
| Melanoma* | 42.6 | Gastric ca. (liver met.) NCI-N87 | 0.0 |
| Hs688(B).T | | | |
| Melanoma* M14 | 0.0 | Gastric ca. KATO III | 0.0 |
| Melanoma* LOXIMVI | 4.7 | Colon ca. SW-948 | 0.0 |
| Melanoma* | 0.0 | Colon ca. SW480 | 0.3 |
| SK-MEL-5 | | | |
| Squamous cell | 0.0 | Colon ca.* (SW480 met) SW620 | 0.0 |
| carcinoma SCC-4 | | | |
| Testis Pool | 9.6 | Colon ca. HT29 | 0.0 |
| Prostate ca.* | 0.0 | Colon ca. HCT-116 | 3.2 |
| (bone met) PC-3 | | | |
| Prostate Pool | 4.6 | Colon ca. CaCo-2 | 0.4 |
| Placenta | 36.6 | Colon cancer tissue | 30.1 |
| Uterus Pool | 5.4 | Colon ca. SW1116 | 0.0 |
| Ovarian ca. OVCAR-3 | 0.0 | Colon ca. Colo-205 | 0.0 |
| Ovarian ca. SK-OV-3 | 1.9 | Colon ca. SW-48 | 0.0 |
| Ovarian ca. OVCAR-4 | 1.2 | Colon Pool | 29.7 |
| Ovarian ca. OVCAR-5 | 14.3 | Small Intestine Pool | 9.5 |
| Ovarian ca. IGROV-1 | 9.7 | Stomach Pool | 16.3 |
| Ovarian ca. OVCAR-8 | 24.1 | Bone Marrow Pool | 7.9 |
| Ovary | 20.6 | Fetal Heart | 11.8 |
| Breast ca. MCF-7 | 0.0 | Heart Pool | 10.9 |
| Breast ca. | 0.0 | Lymph Node Pool | 31.4 |
| MDA-MB-231 | | | |
| Breast ca. BT 549 | 15.7 | Fetal Skeletal Muscle | 15.7 |
| Breast ca. T47D | 1.0 | Skeletal Muscle Pool | 4.1 |
| Breast ca. MDA-N | 0.0 | Spleen Pool | 12.3 |
| Breast Pool | 30.1 | Thymus Pool | 37.1 |
| Trachea | 6.0 | CNS cancer (glio/astro) U87-MG | 0.0 |
| Lung | 4.9 | CNS cancer (glio/astro) U-118-MG | 0.7 |
| Fetal Lung | 59.5 | CNS cancer (neuro; met) SK-N-AS | 0.6 |
| Lung ca. NCI-N417 | 0.0 | CNS cancer (astro) SF-539 | 15.0 |
| Lung ca. LX-1 | 0.0 | CNS cancer (astro) SNB-75 | 100.0 |
| Lung ca. NCI-H146 | 0.0 | CNS cancer (glio) SNB-19 | 10.7 |
| Lung ca. SHP-77 | 1.5 | CNS cancer (glio) SF-295 | 14.8 |
| Lung ca. A549 | 75.3 | Brain (Amygdala) Pool | 13.7 |
| Lung ca. NCI-H526 | 0.0 | Brain (cerebellum) | 8.5 |
| Lung ca. NCI-H23 | 30.6 | Brain (fetal) | 95.9 |
| Lung ca. NCI-H460 | 0.3 | Brain (Hippocampus) Pool | 12.9 |
| Lung ca. HOP-62 | 19.9 | Cerebral Cortex Pool | 20.0 |
| Lung ca. NCI-H522 | 17.7 | Brain (Substantia nigra) Pool | 10.5 |
| Liver | 0.4 | Brain (Thalamus) Pool | 22.2 |
| Fetal Liver | 6.3 | Brain (whole) | 12.0 |
| Liver ca. HepG2 | 0.0 | Spinal Cord Pool | 21.0 |
| Kidney Pool | 36.6 | Adrenal Gland | 19.2 |
| Fetal Kidney | 36.6 | Pituitary gland Pool | 1.6 |
| Renal ca. 786-0 | 0.0 | Salivary Gland | 0.4 |
| Renal ca. A498 | 55.5 | Thyroid (female) | 4.0 |
| Renal ca. ACHN | 0.0 | Pancreatic ca. CAPAN2 | 1.1 |
| Renal ca. UO-31 | 7.0 | Pancreas Pool | 45.7 |

[1116] TABLE NE
Panel 4.1D
Column A - Rel. Exp. (%) Ag3985, Run 170721255
Column B - Rel. Exp. (%) Ag813, Run 237369996

| Tissue Name | A | B | Tissue Name | A | B |
|---|---|---|---|---|---|
| Secondary Th1 act | 6.7 | 4.8 | HUVEC IL-1beta | 6.0 | 11.6 |
| Secondary Th2 act | 21.3 | 11.7 | HUVEC IFN gamma | 23.2 | 6.9 |
| Secondary Tr1 act | 14.8 | 5.3 | HUVEC TNF alpha + IFN gamma | 10.4 | 2.7 |
| Secondary Th1 rest | 33.2 | 4.9 | HUVEC TNF alpha +IL4 | 4.9 | 1.3 |
| Secondary Th2 rest | 46.3 | 2.1 | HUVEC IL-11 | 2.9 | 20.0 |
| Secondary Tr1 rest | 61.6 | 0.0 | Lung Microvascular EC none | 100.0 | 95.9 |
| Primary Th1 act | 27.2 | 0.0 | Lung Microvascular EC TNF alpha + | 54.3 | 39.0 |
| | | | IL-1beta | | |
| Primary Th2 act | 17.2 | 61.1 | Microvascular Dermal EC none | 23.7 | 2.8 |
| Primary Tr1 act | 12.4 | 25.9 | Microsvasular Dermal EC TNFalpha | 15.2 | 6.7 |
| | | | + IL-1beta | | |
| Primary Th1 rest | 40.1 | 14.7 | Bronchial epithelium TNFalpha + | 0.0 | 0.0 |
| | | | IL1beta | | |
| Primary Th2 rest | 28.1 | 15.8 | Small airway epithelium none | 11.9 | 0.0 |
| Primary Tr1 rest | 59.9 | 4.1 | Small airway epithelium TNFalpha + | 0.0 | 0.0 |
| | | | IL-1beta | | |
| CD45RA CD4 | 10.9 | 5.4 | Coronery artery SMG rest | 23.5 | 33.4 |
| lymphocyte act | | | | | |
| CD45RO CD4 | 9.9 | 22.2 | Coronery artery SMC TNFalpha + | 43.8 | 31.4 |
| lymphocyte act | | | IL-1beta | | |
| CD8 lymphocyte act | 14.3 | 0.9 | Astrocytes rest | 83.5 | 20.4 |
| Secondary CD8 | 0.0 | 6.0 | Astrocytes TNFalpha + IL-1beta | 63.3 | 6.9 |
| lymphocyte rest | | | | | |
| Secondary CD8 | 17.4 | 0.0 | KU-812 (Basophil) rest | 0.0 | 0.0 |
| lymphocyte act | | | | | |
| CD4 lymphocyte none | 27.4 | 6.0 | KU-812 (Basophil) PMA/ionomycin | 2.6 | 11.0 |
| 2ry Th1/Th2/Tr1 anti- | 74.7 | 7.1 | CCD1106 (Keratinocytes) none | 0.0 | 0.0 |
| CD95 CH11 | | | | | |
| LAK cells rest | 8.8 | 11.3 | 93580 CCD1106 (Keratinocytes) | 0.0 | 0.0 |
| | | | TNFa and IFNg | | |
| LAK cells IL-2 | 22.7 | 0.0 | Liver cirrhosis | 27.9 | 32.5 |
| LAK cells IL-2 + IL-12 | 8.4 | 0.0 | Lupus kidney | 0.0 | 0.0 |
| LAK cells IL-2 + IFN | 11.0 | 0.0 | NCI-H292 none | 0.0 | 0.0 |
| gamma | | | | | |
| LAK cells IL-2 + IL-18 | 12.2 | 0.0 | NCI-H292 IL-4 | 0.0 | 0.0 |
| LAK cells PMA/ | 13.0 | 10.7 | NCI-H292 IL-9 | 0.0 | 5.4 |
| ionomycin | | | | | |
| NK Cells IL-2 rest | 47.3 | 100.0 | NCI-H292 IL-13 | 0.0 | 0.0 |
| Two Way MLR 3 day | 48.0 | 13.9 | NCI-H292 IFN gamma | 14.5 | 5.3 |
| Two Way MLR 5 day | 17.7 | 0.0 | HPAEC none | 2.6 | 4.9 |
| Two Way MLR 7 day | 5.5 | 0.0 | HPAEC TNF alpha + IL-1 beta | 11.2 | 10.7 |
| PBMC rest | 38.7 | 2.9 | Lung fibroblast none | 2.6 | 9.4 |
| PBMC PWM | 14.5 | 0.0 | Lung fibroblast TNF alpha + IL-1 | 7.9 | 7.8 |
| | | | beta | | |
| PBMC PHA-L | 0.0 | 0.0 | Lung fibroblast IL-4 | 6.0 | 6.8 |
| Ramos (B cell) none | 0.0 | 0.0 | Lung fibroblast IL-9 | 22.8 | 0.0 |
| Ramos (B cell) | 0.0 | 0.0 | Lung fibroblast IL-13 | 7.5 | 16.5 |
| ionomycin | | | | | |
| B lymphocytes PWM | 0.0 | 2.4 | Lung fibroblast IFN gamma | 11.9 | 12.2 |
| B lymphocytes CD40L | 7.1 | 2.9 | Dermal fibroblast CCD1070 rest | 7.3 | 25.5 |
| and IL-4 | | | | | |
| EOL-1 dbcAMP | 48.3 | 80.1 | Dermal fibroblast CCD1070 TNF | 10.7 | 20.3 |
| | | | alpha | | |
| EOL-1 dbcAMP | 60.7 | 0.0 | Dermal fibroblast CCD1070 IL-1 | 29.9 | 9.9 |
| PMA/ionomycin | | | beta | | |
| Dendritic cells none | 4.2 | 0.0 | Dermal fibroblast IFN gamma | 59.9 | 57.8 |
| Dendritic cells LPS | 0.0 | 0.0 | Dermal fibroblast IL-4 | 14.3 | 13.0 |
| Dendritic cells anti-CD40 | 0.0 | 0.0 | IBD Colitis 2 | 3.3 | 0.0 |
| Monocytes rest | 0.0 | 0.0 | IBD Crohn's | 0.0 | 2.5 |
| Monocytes LPS | 0.0 | 0.0 | Colon | 9.0 | 0.0 |
| Macrophages rest | 4.7 | 0.0 | Lung | 4.5 | 0.0 |
| Macrophages LPS | 0.0 | 0.0 | Thymus | 15.6 | 4.8 |
| HUVEC none | 0.6 | 0.0 | Kidney | 11.3 | 21.9 |
| HUVEC starved | 8.7 | 14.2 | | | |

[1117] TABLE NF
Panel 5 Islet
Column A - Rel. Exp.(%) Ag813, Run 254387841

| Tissue Name | A | Tissue Name | A |
|---|---|---|---|
| 97457 Patient-02go adipose | 45.7 | 94709 Donor 2 AM - A adipose | 49.3 |
| 97476 Patient-07sk skeletal muscle | 11.7 | 94710 Donor 2 AM - B adipose | 15.8 |
| 97477 Patient-07ut uterus | 33.2 | 94711 Donor 2 AM - C adipose | 8.4 |
| 97478 Patient-07pl placenta | 11.7 | 94712 Donor 2 AD - A adipose | 52.9 |
| 99167 Bayer Patient 1 | 14.4 | 94713 Donor 2 AD - B adipose | 36.3 |
| 97482 Patient-08ut uterus | 45.7 | 94714 Donor 2 AD - C adipose | 35.6 |
| 97483 Patient-08pl placenta | 7.0 | 94742 Donor 3 U - A Mesenchymal | 27.4 |
| | | Stem Cells | |
| 97486 Patient-09sk skeletal muscle | 0.0 | 94743 Donor 3 U - B Mesenchymal | 33.9 |
| | | Stem Cells | |
| 97487 Patient-09ut uterus | 16.3 | 94730 Donor 3 AM - A adipose | 17.2 |
| 97488 Patient-09pl placenta | 13.8 | 94731 Donor 3 AM - B adipose | 21.2 |
| 97492 Patient-10ut uterus | 24.3 | 94732 Donor 3 AM - C adipose | 4.9 |
| 97493 Patient-10pl placenta | 5.1 | 94733 Donor 3 AD - A adipose | 100.0 |
| 97495 Patient-11go adipose | 9.7 | 94734 Donor 3 AD - B adipose | 40.3 |
| 97496 Patient-11sk skeletal muscle | 15.0 | 94735 Donor 3 AD - C adipose | 69.7 |
| 97497 Patient-11ut uterus | 43.2 | 77138 Liver HepG2untreated | 0.0 |
| 97498 Patient-11pl placenta | 7.9 | 73556 Heart Cardiac stromal cells | 7.9 |
| | | (primary) | |
| 97500 Patient-12go adipose | 36.3 | 81735 Small Intestine | 54.3 |
| 97501 Patient-12sk skeletal muscle | 33.2 | 72409 Kidney Proximal Convoluted | 0.0 |
| | | Tubule | |
| 97502 Patient-12ut uterus | 55.1 | 82685 Small intestine Duodenum | 0.0 |
| 97503 Patient-12pl placenta | 0.0 | 90650 Adrenal Adrenocortical | 26.2 |
| | | adenoma | |
| 94721 Donor 2 U - A Mesenchymal | 66.0 | 72410 Kidney HRCE | 0.0 |
| Stem Cells | | | |
| 94722 Donor 2 U - B Mesenchymal | 32.1 | 72411 Kidney HRE | 0.0 |
| Stem Cells | | | |
| 94723 Donor 2 U - C Mesenchymal | 62.0 | 73139 Uterus Uterine smooth muscle | 6.3 |
| Stem Cells | | cells | |

[1118] AI_comprehensive panel_v1.0 Summary: Ag3985/Ag813 Highest expression of this gene was detected in samples from an osteoarthritic bone sample and synovium (CTs=30). Significant expression of this gene was detected in samples derived from orthoarthitis bone, cartilage, synovium and synovial fluid samples, from normal lung, COPD lung, emphysema, atopic asthma, asthma, allergy, Crohn's disease (normal matched control and diseased), ulcerative colitis (normal matched control and diseased), and psoriasis (normal matched control and diseased). Modulation of this gene, encoded protein and/or use of antibodies or small molecule drug targeting this gene or gene product is useful for the amelioration of symptoms/conditions associated with autoimmune and inflammatory disorders including psoriasis, allergy, asthma, inflammatory bowel disease, and osteoarthritis.

[1119] General_screening_panel_v1.5 Summary: Ag813 Highest expression of this gene was detected in fetal brain and a brain cancer SNB-75 cell line (CTs=31). In addition, moderate expression of this gene was seen in all regions of the central nervous system examined, including amygdala, hippocampus, substantia nigra, thalamus, cerebellum, cerebral cortex, and spinal cord. This gene codes for a variant of ADAMTS-10, a member of Matrix metalloproteinases (MMPs). MMPs are a gene family of neutral proteases that are important in normal development, wound healing, and a wide variety of pathological processes, including the spread of metastatic cancer cells, arthritic destruction of joints, atherosclerosis, and neuroinflammation. In the central nervous system (CNS), MMPs have been shown to degrade components of the basal lamina, leading to disruption of the blood-brain barrier (BBB), and to contribute to the neuroinflammatory response in many neurological diseases (Rosenberg G A, 2002, Glia 39(3):279-91, PMID: 12203394). Modulation of this gene, encoded protein and/or use of antibodies of small molecule drug targeting this gene or gene product is useful in the treatment of neurological disorders such as Alzheimer's disease, Parkinson's disease, epilepsy, multiple sclerosis, schizophrenia, depression, allergic encephalomyelitis (EAE), allergic neuritis (EAN), and cerebral ischemia.

[1120] Moderate to low levels of expression of this gene were also detected in tissues with metabolic/endocrine function including pancreas, adipose, adrenal gland, skeletal muscle, heart, fetal liver and the gastrointestinal tract. Modulation of this gene, encoded protein and/or use of antibodies or small molecule drug targeting this gene or gene product is useful in the treatment of endocrine/metabolically related diseases, such as obesity and diabetes.

[1121] This gene was expressed at moderate to low levels in number of cancer cell lines derived from melanoma, ovarian, breast, lung, renal, colon and brain cancers. Modulation of this gene, encoded protein and/or use of antibodies or small molecule drug targeting this gene or gene product is useful in the treatment of these cancers.

[1122] Panel 4.1D Summary: Ag813/Ag3985 Highest expression of this gene was detected in IL-2 treated resting NK cells and lung microvascular endothelial cells (CTs=31-32.8). Moderate to low levels of expression of this gene were also detected in activated primary polarized T cells, eosinophils, lung microvascular endothelial cells, coronery artery SMC, liver cirrhosis and activated dermal fibroblasts. Modulation of this gene, encoded protein and/or use of antibodies or small molecule drug targeting this gene or gene product is useful in the treatment of autoimmune and inflammatory diseases including asthma, allergies, inflammatory bowel disease, lupus erythematosus, psoriasis, rheumatoid arthritis, and osteoarthritis.

[1123] Panel 5 Islet Summary: Ag813 Highest expression of this gene was detected in differentiated adipose cells (CT=33.5). Low expression of this gene was seen mainly in adipose and small intestine. Therefore, modulation of this gene and/or encoded protein is useful in the treatment of obesity and diabetes, including Type II diabetes.

[1124] O. CG51448-01 and CG51448-05: Myosin, Light Polypeptide Kinase

[1125] Expression of gene CG51448-05 was assessed using the primer-probe sets Ag1289 and Ag764, described in Tables OA and OB. Results of the RTQ-PCR runs are shown in Tables OC, OD and OE.

TABLE OA
Probe Name Ag1289

| | | | Start | SEQ ID |
|---|---|---|---|---|
| Primers | Sequences | Length | Position | No |
| Forward | 5′-aacgagaagctgaaggtgaact-3′ | 22 | 1277 | 1190 |
| Probe | TET-5′-accccagagttcctgtcacctgaggt-3′- | 26 | 1304 | 1191 |
| | TAMRA | | | |
| Reverse | 5′-tcggagatttggtcataattca-3′ | 22 | 1332 | 1192 |

[1126] TABLE OB
Probe Name Ag764

| | | | Start | SEQ ID |
|---|---|---|---|---|
| Primers | Sequences | Length | Position | No |
| Forward | 5′-aacgagaagctgaaggtgaact-3′ | 22 | 1277 | 1193 |
| Probe | TET-5′-accccagagttcctgtcacctgaggt-3′- | 26 | 1304 | 1194 |
| | TAMRA | | | |
| Reverse | 5′-tcggagatttggtcataattca-3′ | 22 | 1332 | 1195 |

[1127] TABLE OC
AI_comprehensive panel_v1.0
Column A - Rel. Exp.(%) Ag1289, Run 219421496
Column B - Rel. Exp.(%) Ag1289, Run 224054768
Column C - Rel. Exp.(%) Ag764, Run 219421440

| Tissue Name | A | B | C | Tissue Name | A | B | C |
|---|---|---|---|---|---|---|---|
| 110967 COPD-F | 0.0 | 0.0 | 0.0 | 112427 Match Control | 0.1 | 0.0 | 0.2 |
| | | | | Psoriasis-F | | | |
| 110980 COPD-F | 0.5 | 0.7 | 1.0 | 112418 Psoriasis-M | 0.0 | 0.0 | 0.0 |
| 110968 COPD-M | 0.0 | 0.1 | 0.0 | 112723 Match Control | 0.1 | 0.1 | 0.0 |
| | | | | Psoriasis-M | | | |
| 110977 COPD-M | 0.8 | 0.9 | 1.5 | 112419 Psoriasis-M | 0.0 | 0.1 | 0.0 |
| 110989 Emphysema-F | 0.4 | 0.1 | 0.2 | 112424 Match Control | 0.0 | 0.0 | 0.2 |
| | | | | Psoriasis-M | | | |
| 110992 Emphysema-F | 0.4 | 0.3 | 0.4 | 112420 Psoriasis-M | 0.2 | 0.1 | 0.0 |
| 110993 Emphysema-F | 0.4 | 0.3 | 0.2 | 112425 Match Control | 0.1 | 0.3 | 0.2 |
| | | | | Psoriasis-M | | | |
| 110994 Emphysema-F | 0.1 | 0.0 | 0.2 | 104689 (MF) OA Bone- | 0.6 | 0.7 | 0.6 |
| | | | | Backus | | | |
| 110995 Emphysema-F | 0.7 | 0.5 | 0.4 | 104690 (MF) Adj “Normal” | 0.0 | 0.2 | 0.2 |
| | | | | Bone-Backus | | | |
| 110996 Emphysema-F | 0.1 | 0.1 | 1.3 | 104691 (ME) OA | 0.6 | 0.3 | 1.5 |
| | | | | Synovium-Backus | | | |
| 110997 Asthma-M | 0.2 | 0.0 | 0.0 | 104692 (BA) OA Cartilage- | 0.0 | 0.0 | 0.0 |
| | | | | Backus | | | |
| 111001 Asthma-F | 0.0 | 0.2 | 0.0 | 104694 (BA) OA Bone- | 0.1 | 0.2 | 0.5 |
| | | | | Backus | | | |
| 111002 Asthma-F | 0.2 | 0.0 | 0.7 | 104695 (BA) Adj “Normal” | 0.2 | 0.0 | 0.4 |
| | | | | Bone-Back | | | |
| 111003 Atopic Asthma-F | 0.2 | 0.0 | 0.2 | 104696 (BA) OA | 0.0 | 0.1 | 0.0 |
| | | | | Synovium-Backus | | | |
| 111004 Atopic Asthma-F | 0.8 | 0.9 | 1.3 | 104700 (SS) OA Bone- | 0.1 | 0.1 | 0.2 |
| | | | | Backus | | | |
| 111005 Atopic Asthma-F | 0.4 | 0.5 | 0.6 | 104701 (SS) Adj “Normal” | 0.1 | 0.2 | 0.2 |
| | | | | Bone-Backus | | | |
| 111006 Atopic Asthma-F | 0.1 | 0.3 | 0.2 | 104702 (SS) OA | 0.0 | 0.2 | 0.2 |
| | | | | Synovium-Backus | | | |
| 111417 Allergy-M | 0.2 | 0.0 | 0.0 | 117093 OA Cartilage Rep 7 | 0.0 | 0.0 | 0.2 |
| 112347 Allergy-M | 0.1 | 0.1 | 0.0 | 112672 OA Bone5 | 0.3 | 0.2 | 0.5 |
| 112349 Normal Lung-F | 0.0 | 0.1 | 0.1 | 112673 OA Synovium5 | 0.2 | 0.0 | 0.3 |
| 112357 Normal Lung-F | 0.4 | 0.1 | 0.5 | 112674 OA Synovial Fluid | 0.1 | 0.1 | 0.2 |
| | | | | cells5 | | | |
| 112354 Normal Lung-M | 0.2 | 0.0 | 0.0 | 117100 OA Cartilage | 0.0 | 0.1 | 0.3 |
| | | | | Rep14 | | | |
| 112374 Crohns-F | 0.5 | 0.1 | 0.0 | 112756 OA Bone9 | 0.7 | 1.5 | 1.5 |
| 112389 Match Control | 0.0 | 0.0 | 0.2 | 112757 OA Synovium9 | 100.0 | 100.0 | 100.0 |
| Crohns-F | | | | | | | |
| 112375 Crohns-F | 0.3 | 0.0 | 45.1 | 112758 OA Synovial Fluid | 0.0 | 0.0 | 0.4 |
| | | | | Cells9 | | | |
| 112732 Match Control | 0.1 | 0.1 | 0.1 | 117125 RA Cartilage Rep2 | 0.0 | 0.0 | 0.0 |
| Crohns-F | | | | | | | |
| 112725 Crohns-M | 0.1 | 0.0 | 0.0 | 113492 Bone2 RA | 0.1 | 0.0 | 0.0 |
| 112387 Match Control | 0.1 | 0.0 | 0.0 | 113493 Synovium2 RA | 0.0 | 0.0 | 0.0 |
| Crohns-M | | | | | | | |
| 112378 Crohns-M | 0.1 | 0.1 | 0.4 | 113494 Syn Fluid Cells RA | 0.2 | 0.0 | 0.0 |
| 112390 Match Control | 0.9 | 0.8 | 1.6 | 113499 Cartilage4 RA | 0.0 | 0.0 | 0.0 |
| Crohns-M | | | | | | | |
| 112726 Crohns-M | 0.1 | 0.0 | 0.0 | 113500 Bone4 RA | 0.0 | 0.0 | 0.0 |
| 112731 Match Control | 0.0 | 0.0 | 0.0 | 113501 Synovium4 RA | 0.0 | 0.0 | 0.2 |
| Crohns-M | | | | | | | |
| 112380 Ulcer Col-F | 0.1 | 0.0 | 0.2 | 113502 Syn Fluid Cells4 | 0.0 | 0.0 | 0.0 |
| | | | | RA | | | |
| 112734 Match Control | 3.8 | 4.1 | 6.4 | 113495 Cartilage3 RA | 0.0 | 0.0 | 0.0 |
| Ulcer Col-F | | | | | | | |
| 112384 Ulcer Col-F | 0.9 | 0.5 | 0.7 | 113496 Bone3 RA | 0.0 | 0.1 | 0.0 |
| 112737 Match Control | 0.0 | 0.0 | 0.0 | 113497 Synovium3 RA | 0.0 | 0.0 | 0.0 |
| Ulcer Col-F | | | | | | | |
| 112386 Ulcer Col-F | 0.0 | 0.0 | 0.2 | 113498 Syn Fluid Cells3 | 0.0 | 0.0 | 0.0 |
| | | | | RA | | | |
| 112738 MatchControl | 0.1 | 0.0 | 0.4 | 117106 Normal Cartilage | 0.0 | 0.0 | 0.5 |
| Ulcer Col-F | | | | Rep20 | | | |
| 112381 Ulcer Col-M | 0.0 | 0.0 | 0.0 | 113663 Bone3 Normal | 0.1 | 0.0 | 0.0 |
| 112735 Match Control | 0.1 | 0.3 | 0.0 | 113664 Synovium3 Normal | 0.0 | 0.0 | 0.0 |
| Ulcer Col-M | | | | | | | |
| 112382 Ulcer Col-M | 0.0 | 0.0 | 0.0 | 113665 Syn Fluid Cells3 | 0.0 | 0.1 | 0.0 |
| | | | | Normal | | | |
| 112394 Match Control | 0.1 | 0.0 | 0.0 | 117107 Normal Cartilage | 0.0 | 0.0 | 0.3 |
| Ulcer Col-M | | | | Rep22 | | | |
| 112383 Ulcer Col-M | 0.3 | 0.9 | 1.0 | 113667 Bone4 Normal | 0.0 | 0.0 | 0.3 |
| 112736 Match Control | 0.1 | 0.0 | 0.0 | 113668 Synovium4 Normal | 0.1 | 0.8 | 0.5 |
| Ulcer Col-M | | | | | | | |
| 112423 Psoriasis-F | 0.0 | 0.0 | 0.3 | 113669 Syn Fluid Cells4 | 0.1 | 0.1 | 0.7 |
| | | | | Normal | | | |

[1128] TABLE OD
Panel 1.3D
Column A - Rel. Exp.(%) Ag1289, Run 146789972

| Tissue Name | A | Tissue Name | A |
|---|---|---|---|
| Liver adenocarcinoma | 0.1 | Kidney (fetal) | 0.0 |
| Pancreas | 0.2 | Renal ca. 786-0 | 0.0 |
| Pancreatic ca. | 0.0 | Renal ca. A498 | 0.0 |
| CAPAN 2 | | | |
| Adrenal gland | 0.0 | Renal ca. RXF 393 | 0.0 |
| Thyroid | 1.4 | Renal ca. ACHN | 0.0 |
| Salivary gland | 0.2 | Renal ca. UO-31 | 0.0 |
| Pituitary gland | 0.0 | Renal ca. TK-10 | 0.1 |
| Brain (fetal) | 0.0 | Liver | 0.0 |
| Brain (whole) | 0.1 | Liver (fetal) | 0.0 |
| Brain (amygdala) | 0.2 | Liver ca. (hepatoblast) HepG2 | 0.0 |
| Brain (cerebellum) | 0.0 | Lung | 0.0 |
| Brain (hippocampus) | 0.1 | Lung (fetal) | 0.1 |
| Brain | 0.1 | Lung ca. (small cell) LX-1 | 0.0 |
| (substantia nigra) | | | |
| Brain (thalamus) | 0.0 | Lung ca. (small cell) NCI-H69 | 0.1 |
| Cerebral Cortex | 0.4 | Lung ca. (s. cell var.) SHP-77 | 0.2 |
| Spinal cord | 0.1 | Lung ca. (large cell)NCI-H460 | 0.0 |
| glio/astro U87-MG | 0.0 | Lung ca. (non-sm. cell) A549 | 0.0 |
| glio/astro U-118-MG | 0.0 | Lung ca. (non-s. cell) NCI-H23 | 0.0 |
| astrocytoma SW1783 | 0.0 | Lung ca. (non-s. cell) HOP-62 | 0.0 |
| neuro*; met SK-N-AS | 0.0 | Lung ca. (non-s. cl) NCI-H522 | 0.0 |
| astrocytoma SF-539 | 0.0 | Lung ca. (squam.) SW 900 | 0.0 |
| astrocytoma SNB-75 | 0.1 | Lung ca. (squam.) NCI-H596 | 0.0 |
| glioma SNB-19 | 0.0 | Mammary gland | 0.0 |
| glioma U251 | 0.0 | Breast ca.* (pl.ef) MCF-7 | 0.0 |
| glioma SF-295 | 0.0 | Breast ca.* (pl.ef) MDA-MB-231 | 0.0 |
| Heart (Fetal) | 0.0 | Breast ca.* (pl.ef) T47D | 0.0 |
| Heart | 0.0 | Breast ca. BT-549 | 0.1 |
| Skeletal muscle (Fetal) | 100.0 | Breast ca. MDA-N | 0.0 |
| Skeletal muscle | 28.7 | Ovary | 0.1 |
| Bone marrow | 0.2 | Ovarian ca. OVCAR-3 | 0.0 |
| Thymus | 0.0 | Ovarian ca. OVCAR-4 | 0.0 |
| Spleen | 0.0 | Ovarian ca. OVCAR-5 | 0.0 |
| Lymph node | 0.0 | Ovarian ca. OVCAR-8 | 0.0 |
| Colorectal | 0.0 | Ovarian ca. IGROV-1 | 0.0 |
| Stomach | 0.0 | Ovarian ca. (ascites) SK-OV-3 | 0.1 |
| Small intestine | 0.0 | Uterus | 0.0 |
| Colon ca. SW480 | 0.0 | Placenta | 0.0 |
| Colon ca.* SW620 | 0.0 | Prostate | 0.0 |
| (SW480 met) | | | |
| Colon ca. HT29 | 0.0 | Prostate ca.* (bone met) PC-3 | 0.0 |
| Colon ca. HCT-116 | 0.0 | Testis | 0.2 |
| Colon ca. CaCo-2 | 0.0 | Melanoma Hs688(A).T | 0.0 |
| CC Well to Mod Diff | 0.0 | Melanoma* (met) Hs688(B).T | 0.0 |
| (ODO3866) | | | |
| Colon ca. HCC-2998 | 0.0 | Melanoma UACC-62 | 0.0 |
| Gastric ca. (liver met) | 0.0 | Melanoma M14 | 0.0 |
| NCI-N87 | | | |
| Bladder | 0.0 | Melanoma LOX IMVI | 0.0 |
| Trachea | 0.1 | Melanoma* (met) SK-MEL-5 | 0.0 |
| Kidney | 0.0 | Adipose | 0.4 |

[1129] TABLE OE
Panel 4D
Column A - Rel. Exp.(%) Ag764, Run 145632998

| Tissue Name | A | Tissue Name | A |
|---|---|---|---|
| Secondary Th1 act | 6.6 | HUVEC IL-1beta | 6.8 |
| Secondary Th2 act | 5.4 | HUVEC IFN gamma | 4.3 |
| Secondary Tr1 act | 4.2 | HUVEC TNF alpha + IFN gamma | 1.3 |
| Secondary Th1 rest | 0.0 | HUVEC TNF alpha + IL4 | 4.4 |
| Secondary Th2 rest | 1.1 | HUVEC IL-11 | 8.3 |
| Secondary Tr1 rest | 0.0 | Lung Microvascular EC none | 43.8 |
| Primary Th1 act | 5.0 | Lung Microvascular EC TNF alpha + IL- | 14.0 |
| | | 1beta | |
| Primary Th2 act | 2.6 | Microvascular Dermal EC none | 100.0 |
| Primary Tr1 act | 4.4 | Microvasular Dermal EC TNF alpha + IL- | 10.4 |
| | | 1beta | |
| Primary Th1 rest | 7.4 | Bronchial epithelium TNF alpha + IL1beta | 0.0 |
| Primary Th2 rest | 3.5 | Small airway epithelium none | 0.0 |
| Primary Tr1 rest | 3.0 | Small airway epithelium TNF alpha + IL- | 0.0 |
| | | 1beta | |
| CD45RA CD4 lymphocyte act | 3.9 | Coronery artery SMC rest | 17.0 |
| CD45RO CD4 lymphocyte act | 2.6 | Coronery artery SMC TNF alpha + IL-1beta | 5.6 |
| CD8 lymphocyte act | 2.5 | Astrocytes rest | 0.7 |
| Secondary CD8 lymphocyte rest | 4.7 | Astrocytes TNF alpha + IL-1beta | 0.0 |
| Secondary CD8 lymphocyte act | 2.3 | KU-812 (Basophil) rest | 3.0 |
| CD4 lymphocyte none | 0.0 | KU-812 (Basophil) PMA/ionomycin | 0.0 |
| 2ry Th1/Th2/Tr1 anti-CD95 | 2.6 | CCD1106 (Keratinocytes) none | 2.5 |
| CH11 | | | |
| LAK cells rest | 1.8 | CCD1106 (Keratinocytes) TNF alpha + IL- | 0.9 |
| | | 1beta | |
| LAK cells IL-2 | 3.3 | Liver cirrhosis | 2.3 |
| LAK cells IL-2 + IL-12 | 3.4 | Lupus kidney | 1.9 |
| LAK cells IL-2 + IFN gamma | 2.6 | NCI-H292 none | 2.1 |
| LAK cells IL-2 + IL-18 | 2.0 | NCI-H292 IL-4 | 3.1 |
| LAK cells PMA/ionomycin | 0.0 | NCI-H292 IL-9 | 3.6 |
| NK Cells IL-2 rest | 3.1 | NCI-H292 IL-13 | 5.3 |
| Two Way MLR 3 day | 0.0 | NCI-H292 IFN gamma | 0.6 |
| Two Way MLR 5 day | 3.3 | HPAEC none | 3.4 |
| Two Way MLR 7 day | 1.2 | HPAEC TNF alpha + IL-1beta | 1.6 |
| PBMC rest | 0.0 | Lung fibroblast none | 0.0 |
| PBMC PWM | 4.5 | Lung fibroblast TNF alpha + IL-1beta | 0.0 |
| PBMC PHA-L | 7.0 | Lung fibroblast IL-4 | 0.0 |
| Ramos (B cell) none | 7.5 | Lung fibroblast IL-9 | 0.0 |
| Ramos (B cell) ionomycin | 8.6 | Lung fibroblast IL-13 | 0.0 |
| B lymphocytes PWM | 2.1 | Lung fibroblast IFN gamma | 0.0 |
| B lymphocytes CD40L and IL-4 | 4.6 | Dermal fibroblast CCD1070 rest | 5.6 |
| EOL-1 dbcAMP | 0.8 | Dermal fibroblast CCD1070 TNF alpha | 19.8 |
| EOL-1 dbcAMP | 0.0 | Dermal fibroblast CCD1070 IL-1beta | 5.7 |
| PMA/ionomycin | | | |
| Dendritic cells none | 0.0 | Dermal fibroblast IFN gamma | 4.7 |
| Dendritic cells LPS | 0.0 | Dermal fibroblast IL-4 | 2.4 |
| Dendritic cells anti-CD40 | 0.0 | IBD Colitis 2 | 0.0 |
| Monocytes rest | 0.0 | IBD Crohn′s | 0.0 |
| Monocytes LPS | 1.0 | Colon | 3.6 |
| Macrophages rest | 0.5 | Lung | 3.0 |
| Macrophages LPS | 0.0 | Thymus | 0.0 |
| HUVEC none | 15.9 | Kidney | 3.8 |
| HUVEC starved | 47.6 | | |

[1130] AI_comprehensive panel_v1.0 Summary: Ag1289/Ag764 This gene was moderately expressed in a synovium sample from an osteoarthritis patient. Therefore, therapeutic modulation of this gene, expressed protein and/or use of antibodies or small molecule drugs targeting the gene or gene product is useful in the treatment of osteoarthritis.

[1131] The gene variant recognized by probe Ag764 was expressed in a Crohn's disease sample. Therefore, therapeutic modulation of this gene, expressed protein and/or use of antibodies or small molecule drugs targeting the gene or gene product are useful in the treatment of Crohn's disease.

[1132] Panel 1.3D Summary: Ag1289 Expression of this gene was highest among normal tissues in skeletal muscle, where it is expressed at roughly 10-fold higher levels than fetal skeletal muscle. Therefore, this gene is useful as a marker to differentiate between adult and fetal skeletal muscle.

[1133] This gene was also expressed at low levels in thyroid. Therapeutic modulation of this gene, expressed protein and/or use of antibodies or small molecule drugs targeting the gene or gene product is useful in the treatment of endocrine or metabolically related diseases, such as obesity and diabetes.

[1134] Panel 4D Summary: Ag764 This gene was highly expressed in untreated endothelial cells including the microvascular endothelium, human umbilical vein endothelial cells (HUVECS) and lung endothelial cells. This transcript was highly expressed in normal tissue and down regulated in activated endothelium. This gene encodes a protein important for a pathway that is involved in maintaining cellular homeostasis with in a tissue. A protein therapeutic designed with the protein encoded for by this transcript is useful for the reduction or elimination of inflammation in endothelium. Therapeutic modulation of this gene, expressed protein and/or use of antibodies or small molecule drugs targeting the gene or gene product is useful in the treatment of asthma, allergy, psoriasis and arthritis.

[1135] P. CG51752-01 and CG51752-02 and CG51752-03: Trypsin Family Serine Protease Tespec PRO-3

[1136] Expression of gene CG51752-01, variant CG51752-02 and full-length physical clone CG51752-03 was assessed using the primer-probe sets Ag1541 and Ag346, described in Tables PA and PB. Results of the RTQ-PCR runs are shown in Tables PC and PD. Please not that the primer-probe set Ag1541 is specific for CG51752-01 and CG51752-02 only.

TABLE PA
Probe Name Ag1541

| | | | Start | SEQ ID |
|---|---|---|---|---|
| Primers | Sequences | Length | Position | No |
| Forward | 5′-agaagaacaccccagggatata-3′ | 22 | 238 | 1196 |
| Probe | TET-5′-cctcgttggtgaactacaacctctgg-3′- | 26 | 210 | 1197 |
| | TAMRA | | | |
| Reverse | 5′-cctctagctgggtcactttctc-3′ | 22 | 185 | 1198 |

[1137] TABLE PB
Probe Name Ag346

| | | | Start | SEQ ID |
|---|---|---|---|---|
| Primers | Sequences | Length | Position | No |
| Forward | 5′-ctctgggactcccgagactg-3′ | 20 | 105 | 1199 |
| Probe | TET-5′-cccataggtttctgtttgacagaagtcct | 32 | 130 | 1200 |
| | cct-3′-TAMRA | | | |
| Reverse | 5′-aggcccttcaatgcagagaa-3′ | 20 | 163 | 1201 |

[1138] TABLE PC
Panel 1.3D
Column A - Rel. Exp.(%) Ag1541, Run 146287841
Column B - Rel. Exp.(%) Ag1541, Run 150033538
Column C - Rel. Exp.(%) Ag346, Run 153910033

| Tissue Name | A | B | C | Tissue Name | A | B | C |
|---|---|---|---|---|---|---|---|
| Liver adenocarcinoma | 0.0 | 0.0 | 0.0 | Kidney (fetal) | 0.5 | 0.6 | 0.0 |
| Pancreas | 0.0 | 0.0 | 1.2 | Renal Ca. 786-0 | 0.0 | 0.0 | 0.0 |
| Pancreatic ca. CAPAN 2 | 0.0 | 0.0 | 1.4 | Renal ca. A498 | 0.0 | 0.0 | 0.0 |
| Adrenal gland | 0.0 | 0.0 | 0.0 | Renal ca. RXF 393 | 0.0 | 0.0 | 0.0 |
| Thyroid | 0.0 | 0.0 | 0.0 | Renal ca. ACHN | 0.0 | 0.0 | 0.0 |
| Salivary gland | 0.0 | 0.0 | 0.0 | Renal ca. UO-31 | 0.0 | 0.0 | 0.0 |
| Pituitary gland | 0.0 | 0.0 | 0.8 | Renal ca. TK-10 | 0.0 | 0.0 | 0.0 |
| Brain (fetal) | 0.5 | 0.4 | 1.2 | Liver | 0.0 | 0.0 | 0.0 |
| Brain (whole) | 1.1 | 1.7 | 6.3 | Liver (fetal) | 0.2 | 0.0 | 0.0 |
| Brain (amygdala) | 0.0 | 1.7 | 1.5 | Liver ca. (hepatoblast) | 0.0 | 0.0 | 0.0 |
| | | | | HepG2 | | | |
| Brain (cerebellum) | 0.6 | 1.9 | 3.4 | Lung | 0.0 | 0.0 | 0.0 |
| Brain (hippocampus) | 3.3 | 3.4 | 6.7 | Lung (fetal) | 0.0 | 0.0 | 0.0 |
| Brain (substantia nigra) | 0.5 | 0.6 | 0.0 | Lung ca. (small cell) LX- | 1.7 | 2.3 | 5.2 |
| | | | | 1 | | | |
| Brain (thalamus) | 1.0 | 1.2 | 0.0 | Lung ca. (small cell) NCI- | 0.0 | 0.0 | 0.0 |
| Cerebral Cortex | 1.6 | 2.6 | 7.7 | Lung ca. (s.cell var.) | 1.3 | 2.5 | 0.0 |
| | | | | SHP-77 | | | |
| Spinal cord | 2.5 | 0.4 | 2.1 | Lung ca. (large cell) NCI- | 0.0 | 0.0 | 0.0 |
| | | | | H460 | | | |
| glio/astro U87-MG | 0.0 | 0.0 | 0.0 | Lung ca. (non-sm. cell) | 0.0 | 0.0 | 1.0 |
| | | | | A549 | | | |
| glio/astro U-118-MG | 0.0 | 0.0 | 0.0 | Lung Ca. (non-s.cell) | 1.2 | 0.4 | 2.6 |
| | | | | NCI-H23 | | | |
| astrocytoma SW1783 | 0.0 | 0.0 | 0.0 | Lung Ca. (non-s.cell) | 0.0 | 0.0 | 0.0 |
| | | | | HOP-62 | | | |
| neuro*; met SK-N-AS | 0.0 | 0.0 | 0.0 | Lung Ca. (non-s.cl) NCI- | 0.0 | 0.0 | 0.9 |
| | | | | H522 | | | |
| astrocytoma SF-539 | 0.0 | 0.0 | 0.0 | Lung ca. (squam.) SW | 0.0 | 0.7 | 0.0 |
| | | | | 900 | | | |
| astrocytoma SNB-75 | 0.7 | 0.0 | 0.0 | Lung Ca. (squam.) NCI- | 0.0 | 1.3 | 0.0 |
| | | | | H596 | | | |
| glioma SNB-19 | 0.0 | 0.0 | 2.7 | Mammary gland | 0.0 | 1.5 | 0.0 |
| glioma U251 | 0.0 | 0.0 | 0.0 | Breast ca.* (pl.ef) MCF-7 | 0.0 | 0.0 | 0.0 |
| glioma SF-295 | 0.0 | 0.8 | 1.0 | Breast ca.* (pl.ef) MDA- | 5.8 | 0.5 | 2.7 |
| | | | | MB-231 | | | |
| Heart (Fetal) | 0.0 | 0.0 | 0.0 | Breast ca.* (pl.ef) T47D | 1.2 | 0.3 | 6.1 |
| Heart | 0.0 | 0.0 | 0.0 | Breast Ca. BT-549 | 0.5 | 0.0 | 2.1 |
| Skeletal muscle (Fetal) | 0.6 | 1.6 | 1.4 | Breast Ca. MDA-N | 0.0 | 0.0 | 0.1 |
| Skeletal muscle | 0.0 | 0.0 | 0.0 | Ovary | 0.0 | 0.0 | 0.0 |
| Bone marrow | 0.0 | 0.0 | 2.1 | Ovarian ca. OVCAR-3 | 0.0 | 0.0 | 1.7 |
| Thymus | 0.0 | 0.0 | 0.0 | Ovarian ca. OVCAR-4 | 0.0 | 0.0 | 0.0 |
| Spleen | 0.0 | 0.0 | 1.6 | Ovarian ca. OVCAR-5 | 3.6 | 0.7 | 3.2 |
| Lymph node | 0.0 | 0.0 | 0.0 | Ovarian ca. OVCAR-8 | 0.0 | 0.0 | 0.0 |
| Colorectal | 0.0 | 0.6 | 2.2 | Ovarian ca. IGROV-1 | 0.0 | 0.0 | 0.0 |
| Stomach | 1.9 | 0.0 | 0.0 | Ovarian ca. (ascites) SK- | 0.0 | 0.0 | 0.0 |
| | | | | OV-3 | | | |
| Small intestine | 0.0 | 1.0 | 0.0 | Uterus | 0.0 | 0.0 | 1.6 |
| Colon ca. SW480 | 0.0 | 0.0 | 0.0 | Placenta | 0.0 | 0.0 | 0.0 |
| Colon ca.* SW620 (SW480 | 0.0 | 0.0 | 0.0 | Prostate | 0.0 | 0.7 | 1.5 |
| met) | | | | | | | |
| Colon ca. HT29 | 0.0 | 0.0 | 0.0 | Prostate ca.* (bone met) | 0.0 | 0.0 | 0.0 |
| | | | | PC-3 | | | |
| Colon ca. HCT-116 | 0.6 | 0.4 | 0.0 | Testis | 100.0 | 100.0 | 100.0 |
| Colon ca. CaCo-2 | 1.5 | 0.0 | 0.0 | Melanoma Hs688(A).T | 0.0 | 0.0 | 0.0 |
| CC Well to Mod Duff | 0.0 | 0.0 | 0.0 | Melanoma* (met) | 0.0 | 0.0 | 0.0 |
| (ODO3866) | | | | Hs688(B).T | | | |
| Colon ca. HCC-2998 | 0.0 | 0.0 | 0.0 | Melanoma UACC-62 | 0.0 | 0.0 | 0.0 |
| Gastric ca. (liver met) NCI- | 1.2 | 0.0 | 0.0 | Melanoma M14 | 0.0 | 0.0 | 0.0 |
| N87 | | | | | | | |
| Bladder | 0.0 | 0.0 | 0.0 | Melanoma LOX IMVI | 0.0 | 0.0 | 0.0 |
| Trachea | 0.0 | 0.4 | 0.0 | Melanoma* (met) SK- | 0.0 | 0.0 | 0.0 |
| | | | | MEL-5 | | | |
| Kidney | 0.8 | 1.2 | 2.6 | Adipose | 0.5 | 0.0 | 0.0 |

[1139] TABLE PD
Panel 2D
Column A - Rel. Exp.(%) Ag1541, Run 149802457
Column B - Rel. Exp.(%) Ag1541, Run 150033539
Column C - Rel. Exp.(%) Ag1541, Run 162624512

| Tissue Name | A | B | C | Tissue Name | A | B | C |
|---|---|---|---|---|---|---|---|
| Normal Colon | 5.4 | 2.4 | 0.0 | Kidney Margin 8120608 | 0.0 | 0.0 | 0.0 |
| CC Well to Mod Diff | 7.3 | 0.0 | 5.1 | Kidney Cancer 8120613 | 0.0 | 0.0 | 0.0 |
| (ODO3866) | | | | | | | |
| CC Margin (ODO3866) | 5.8 | 1.5 | 0.0 | Kidney Margin 8120614 | 20.6 | 22.8 | 16.6 |
| CC Gr.2 rectosigmoid | 3.4 | 0.0 | 0.0 | Kidney Cancer 9010320 | 0.0 | 0.0 | 0.0 |
| (ODO3868) | | | | | | | |
| CC Margin (ODO3868) | 0.0 | 0.0 | 0.0 | Kidney Margin 9010321 | 3.4 | 26.4 | 14.8 |
| CC Mod Diff (ODO3920) | 11.0 | 1.4 | 2.0 | Normal Uterus | 0.0 | 0.0 | 0.0 |
| CC Margin (ODO3920) | 0.0 | 0.0 | 3.4 | Uterine Cancer 064011 | 14.9 | 0.0 | 4.4 |
| CC Gr.2 ascend colon | 6.2 | 2.5 | 6.1 | Normal Thyroid | 0.0 | 0.0 | 0.0 |
| (ODO3921) | | | | | | | |
| CC Margin (ODO3921) | 10.2 | 0.0 | 6.0 | Thyroid Cancer | 0.0 | 0.0 | 0.0 |
| CC from Partial | 3.6 | 0.0 | 4.5 | Thyroid Cancer | 0.0 | 0.0 | 0.0 |
| Hepatectomy (ODO4309) | | | | A302152 | | | |
| Mets | | | | | | | |
| Liver Margin (ODO4309) | 0.0 | 2.4 | 4.7 | Thyroid Margin | 0.0 | 0.0 | 5.1 |
| | | | | A302153 | | | |
| Colon mets to lung | 7.2 | 4.4 | 7.6 | Normal Breast | 5.2 | 3.5 | 7.0 |
| (ODO4451-01) | | | | | | | |
| Lung Margin (ODO4451-02) | 0.0 | 0.0 | 0.0 | Breast Cancer | 0.0 | 0.0 | 2.4 |
| Normal Prostate 6546-1 | 4.8 | 2.9 | 22.1 | Breast Cancer | 0.0 | 0.0 | 0.0 |
| | | | | (ODO4590-01) | | | |
| Prostate Cancer (ODO4410) | 3.5 | 0.0 | 0.0 | Breast Cancer Mets | 0.0 | 0.0 | 0.0 |
| | | | | (ODO4590-03) | | | |
| Prostate Margin (ODO4410) | 3.4 | 0.0 | 0.0 | Breast Cancer | 0.0 | 0.0 | 0.0 |
| | | | | Metastasis | | | |
| Prostate Cancer (ODO4720- | 9.0 | 8.5 | 43.8 | Breast Cancer | 0.0 | 2.5 | 0.0 |
| 01) | | | | | | | |
| Prostate Margin (ODO4720- | 0.0 | 0.0 | 0.0 | Breast Cancer | 52.5 | 27.5 | 55.5 |
| 02) | | | | | | | |
| Normal Lung | 17.7 | 6.5 | 0.0 | Breast Cancer 9100266 | 6.2 | 0.0 | 0.0 |
| Lung Met to Muscle | 0.0 | 2.3 | 9.9 | Breast Margin 9100265 | 0.0 | 0.0 | 1.9 |
| (ODO4286) | | | | | | | |
| Muscle Margin (ODO4286) | 0.0 | 0.0 | 0.0 | Breast Cancer A209073 | 1.5 | 2.5 | 3.5 |
| Lung Malignant Cancer | 6.5 | 5.7 | 4.9 | Breast Margin A209073 | 24.3 | 26.2 | 61.1 |
| (ODO3126) | | | | | | | |
| Lung Margin (ODO3126) | 0.0 | 0.0 | 0.0 | Normal Liver | 10.5 | 2.7 | 4.2 |
| Lung Cancer (ODO4404) | 0.0 | 0.0 | 0.0 | Liver Cancer | 5.9 | 1.7 | 3.2 |
| Lung Margin (ODO4404) | 0.0 | 0.0 | 3.4 | Liver Cancer 1025 | 21.6 | 11.0 | 13.6 |
| Lung Cancer (ODO4565) | 0.0 | 0.0 | 0.0 | Liver Cancer 1026 | 0.0 | 0.0 | 0.0 |
| Lung Margin (ODO4565) | 0.0 | 0.0 | 0.0 | Liver Cancer 6004-T | 3.3 | 13.5 | 2.7 |
| Lung Cancer (OD04237-01) | 0.0 | 0.0 | 0.0 | Liver Tissue 6004-N | 3.2 | 1.4 | 0.0 |
| Lung Margin (ODO4237-02) | 0.0 | 0.0 | 0.0 | Liver Cancer 6005-T | 0.0 | 0.0 | 0.0 |
| Ocular Mel Met to Liver | 4.3 | 0.0 | 3.2 | Liver Tissue 6005-N | 0.0 | 0.0 | 0.0 |
| (ODO4310) | | | | | | | |
| Liver Margin (ODO4310) | 0.0 | 0.0 | 0.0 | Normal Bladder | 0.0 | 0.0 | 5.9 |
| Melanoma Metastasis | 0.0 | 0.0 | 0.0 | Bladder Cancer | 0.0 | 0.0 | 0.0 |
| Lung Margin (ODO4321) | 0.0 | 0.0 | 0.0 | Bladder Cancer | 4.6 | 2.3 | 7.5 |
| Normal Kidney | 28.1 | 39.2 | 54.0 | Bladder Cancer | 17.9 | 11.4 | 17.8 |
| | | | | (ODO4718-01) | | | |
| Kidney Ca, Nuclear grade 2 | 0.0 | 3.0 | 0.0 | Bladder Normal | 0.0 | 0.0 | 0.0 |
| (ODO4338) | | | | Adjacent (ODO4718-03) | | | |
| Kidney Margin (ODO4338) | 22.7 | 31.6 | 24.1 | Normal Ovary | 0.0 | 0.0 | 0.0 |
| Kidney Ca Nuclear grade 1/2 | 0.0 | 3.1 | 2.9 | Ovarian Cancer | 1.7 | 4.8 | 8.2 |
| (ODO4339) | | | | | | | |
| Kidney Margin (ODO4339) | 97.3 | 100.0 | 100.0 | Ovarian Cancer | 0.0 | 2.1 | 0.0 |
| | | | | (ODO4768-07) | | | |
| Kidney Ca, Clear cell type | 0.0 | 0.0 | 0.0 | Ovary Margin | 0.0 | 0.0 | 0.0 |
| (ODO4340) | | | | (ODO4768-08) | | | |
| Kidney Margin (ODO4340) | 100.0 | 34.4 | 33.4 | Normal Stomach | 3.3 | 2.9 | 0.0 |
| Kidney Ca, Nuclear grade 3 | 2.0 | 4.9 | 3.1 | Gastric Cancer 9060358 | 0.0 | 0.0 | 0.0 |
| (ODO4348) | | | | | | | |
| Kidney Margin (ODO4348) | 30.1 | 19.9 | 20.9 | Stomach Margin | 0.0 | 0.0 | 0.0 |
| | | | | 9060359 | | | |
| Kidney Cancer (ODO4622- | 0.0 | 2.4 | 0.0 | Gastric Cancer 9060395 | 0.0 | 0.0 | 0.0 |
| 01) | | | | | | | |
| Kidney Margin (ODO4622- | 8.4 | 7.2 | 13.9 | Stomach Margin | 0.0 | 0.0 | 0.0 |
| 03) | | | | 9060394 | | | |
| Kidney Cancer (ODO4450- | 0.0 | 0.0 | 0.0 | Gastric Cancer 9060397 | 0.0 | 0.0 | 0.0 |
| 01) | | | | | | | |
| Kidney Margin (ODO4450- | 47.3 | 12.9 | 30.6 | Stomach Margin | 0.0 | 0.0 | 0.0 |
| 03) | | | | 9060396 | | | |
| Kidney Cancer 8120607 | 0.0 | 0.0 | 0.0 | Gastric Cancer 064005 | 6.3 | 3.8 | 2.4 |

[1140] Panel 1.3D Summary: Ag346/Ag1541 The expression of this gene was only detected in the testis (CT=31). Gene or protein expression levels of this gene are useful as a marker for the detection of testis tissue. Therapeutic modulation of the activity of this gene or its protein product is useful for the treatment of male infertility.

[1141] Panel 2D Summary: Ag1541 Expression of this gene was highest in normal kidney (CT=31-32). This gene was significantly overexpressed in 8/9 normal kidney samples when compared to the adjacent tumor samples. Therefore, the gene or protein expression levels are useful as a marker to distinguish normal kidney from kidney tumors. Therapeutic modulation of the activity of this gene or its protein product using protein, antibody or small molecule drugs is useful in the treatment of kidney cancer.

[1142] Q. CG51914-02: Ephrin Type-A Receptor 7 Precursor

[1143] Expression of gene CG51914-02 was assessed using the primer-probe set Ag612, described in Table QA. Results of the RTQ-PCR runs are shown in Tables QB, QC and QD.

TABLE QA
Probe Name Ag612

| | | | Start | SEQ ID |
|---|---|---|---|---|
| Primers | Sequences | Length | Position | No |
| Forward | 5′-gccgctcccgagacactt-3′ | 18 | 2558 | 1202 |
| Probe | TET-5′-ccacttcagctctgccagtgacgtg-3′- | 25 | 2584 | 1203 |
| | TAMRA | | | |
| Reverse | 5′-cccacatgatgatgccgaa-3′ | 19 | 2615 | 1204 |

[1144] TABLE QB
CNS_neurodegeneration_v1.0
Column A - Rel. Exp.(%) Ag612, Run 309606071

| Tissue Name | A | Tissue Name | A |
|---|---|---|---|
| AD 1 Hippo | 46.0 | AH3 4624 | 31.0 |
| AD 2 Hippo | 37.1 | AH3 4640 | 100.0 |
| AD 3 Hippo | 9.5 | AD 1 Occipital Ctx | 11.0 |
| AD 4 Hippo | 33.9 | AD 2 Occipital Ctx (Missing) | 6.8 |
| AD 5 Hippo | 59.5 | AD 3 Occipital Ctx | 8.3 |
| AD 6 Hippo | 41.8 | AD 4 Occipital Ctx | 35.6 |
| Control 2 Hippo | 40.9 | AD 5 Occipital Ctx | 43.5 |
| Control 4 Hippo | 21.6 | AD 5 Occipital Ctx | 21.5 |
| Control (Path) 3 Hippo | 15.9 | Control 1 Occipital Ctx | 8.2 |
| AD 1 Temporal Ctx | 26.1 | Control 2 Occipital Ctx | 36.6 |
| AD 2 Temporal Ctx | 28.9 | Control 3 Occipital Ctx | 29.5 |
| AD 3 Temporal Ctx | 12.3 | Control 4 Occipital Ctx | 20.3 |
| AD 4 Temporal Ctx | 62.9 | Control (Path) 1 Occipital Ctx | 81.2 |
| AD 5 Inf Temporal Ctx | 57.4 | Control (Path) 2 Occipital Ctx | 37.4 |
| AD 5 Sup Temporal Ctx | 33.7 | Control (Path) 3 Occipital Ctx | 17.8 |
| AD 6 Inf Temporal Ctx | 50.7 | Control (Path) 4 Occipital Ctx | 29.9 |
| AD 6 Sup Temporal Ctx | 68.8 | Control 1 Parietal Ctx | 37.6 |
| Control 1 Temporal Ctx | 9.7 | Control 2 Parietal Ctx | 41.5 |
| Control 2 Temporal Ctx | 54.7 | Control 3 Parietal Ctx | 54.0 |
| Control 3 Temporal Ctx | 40.3 | Control (Path) 1 Parietal Ctx | 99.3 |
| Control 3 Temporal Ctx | 43.2 | Control (Path) 2 Parietal Ctx | 52.9 |
| AH3 3975 | 97.3 | Control (Path) 3 Parietal Ctx | 11.6 |
| AH3 3954 | 86.5 | Control (Path) 4 Parietal Ctx | 56.6 |

[1145] TABLE QC
Panel 1.1
Column A - Rel. Exp.(%) Ag612, Run 109649311

| Tissue Name | A | Tissue Name | A |
|---|---|---|---|
| Adrenal gland | 0.7 | Renal ca. UO-31 | 0.0 |
| Bladder | 25.0 | Renal ca. RXF 393 | 1.0 |
| Brain (amygdala) | 12.9 | Liver | 0.0 |
| Brain (cerebellum) | 7.7 | Liver (fetal) | 0.0 |
| Brain (hippocampus) | 39.8 | Liver ca. (hepatoblast) HepG2 | 0.3 |
| Brain (substantia nigra) | 50.0 | Lung | 0.0 |
| Brain (thalamus) | 20.9 | Lung (fetal) | 0.0 |
| Cerebral Cortex | 65.5 | Lung ca. (non-s. cell) HOP-62 | 0.3 |
| Brain (fetal) | 44.1 | Lung ca. (large cell)NCI-H460 | 1.9 |
| Brain (whole) | 36.3 | Lung ca. (non-s. cell) NCI-H23 | 18.3 |
| glio/astro U-118-MG | 0.0 | Lung ca. (non-s. cl) NCI-H522 | 100.0 |
| astrocytoma SF-539 | 0.0 | Lung ca. (non-sm. cell) A549 | 10.5 |
| astrocytoma SNB-75 | 0.0 | Lung ca. (s. cell var.) SHP-77 | 3.4 |
| astrocytoma SW1783 | 0.0 | Lung ca. (small cell) LX-1 | 1.5 |
| glioma U251 | 0.0 | Lung ca. (small cell) NCI-H69 | 3.5 |
| glioma SF-295 | 0.0 | Lung ca. (squam.) SW 900 | 24.1 |
| glioma SNB-19 | 0.0 | Lung ca. (squam.) NCI-H596 | 0.7 |
| glio/astro U87-MG | 0.0 | Lymph node | 0.3 |
| neuro*; met SK-N-AS | 0.0 | Spleen | 0.0 |
| Mammary gland | 4.3 | Thymus | 0.0 |
| Breast ca. BT-549 | 0.0 | Ovary | 0.1 |
| Breast ca. MDA-N | 0.1 | Ovarian ca. IGROV-1 | 1.8 |
| Breast ca.* (pl.ef) T47D | 18.6 | Ovarian ca. OVCAR-3 | 4.0 |
| Breast ca.* (pl.ef) | 14.9 | Ovarian ca. OVCAR-4 | 0.0 |
| MCF-7 | | | |
| Breast ca.* (pl.ef) | 0.1 | Ovarian ca. OVCAR-5 | 36.6 |
| MDA-MB-231 | | | |
| Small intestine | 14.8 | Ovarian ca. OVCAR-8 | 11.3 |
| Colorectal | 44.1 | Ovarian ca. (ascites) SK-OV-3 | 22.5 |
| Colon ca. HT29 | 0.7 | Pancreas | 64.2 |
| Colon ca. CaCo-2 | 3.4 | Pancreatic ca. CAPAN 2 | 1.1 |
| Colon ca. HCT-15 | 34.2 | Pituitary gland | 33.4 |
| Colon ca. HCT-116 | 6.1 | Placenta | 0.0 |
| Colon ca. HCC-2998 | 24.5 | Prostate | 3.3 |
| Colon ca. SW480 | 3.7 | Prostate ca.* (bone met) PC-3 | 4.2 |
| Colon ca.* SW620 | 4.9 | Salivary gland | 15.7 |
| (SW480 met) | | | |
| Stomach | 10.6 | Trachea | 1.6 |
| Gastric ca. (liver met) | 33.7 | Spinal cord | 5.8 |
| NCI-N87 | | | |
| Heart | 1.6 | Testis | 65.5 |
| Skeletal muscle (Fetal) | 0.0 | Thyroid | 0.0 |
| Skeletal muscle | 0.0 | Uterus | 0.0 |
| Endothelial cells | 0.0 | Melanoma M14 | 0.0 |
| Heart (Fetal) | 0.0 | Melanoma LOX IMVI | 0.0 |
| Kidney | 1.0 | Melanoma UACC-62 | 0.0 |
| Kidney (fetal) | 0.0 | Melanoma SK-MEL-28 | 0.0 |
| Renal ca. 786-0 | 0.0 | Melanoma* (met) SK-MEL-5 | 0.7 |
| Renal ca. A498 | 0.3 | Melanoma Hs688(A).T | 0.0 |
| Renal ca. ACHN | 7.3 | Melanoma* (met) Hs688(B).T | 0.0 |
| Renal ca. TK-10 | 42.6 | | |

[1146] TABLE QD
Panel 4D
Column A - Rel. Exp.(%) Ag612, Run 145645058

| Tissue Name | A | Tissue Name | A |
|---|---|---|---|
| Secondary Th1 act | 0.0 | HUVEC IL-1beta | 0.0 |
| Secondary Th2 act | 12.2 | HUVEC IFN gamma | 0.0 |
| Secondary Tr1 act | 0.0 | HUVEC TNF alpha + IFN gamma | 0.0 |
| Secondary Th1 rest | 0.0 | HUVEC TNF alpha + IL4 | 0.0 |
| Secondary Th2 rest | 0.0 | HUVEC IL-11 | 0.0 |
| Secondary Tr1 rest | 0.0 | Lung Microvascular EC none | 0.0 |
| Primary Th1 act | 0.0 | Lung Microvascular EC TNF alpha + IL- | 0.0 |
| | | 1beta | |
| Primary Th2 act | 0.0 | Microvascular Dermal EC none | 0.0 |
| Primary Tr1 act | 0.0 | Microsvasular Dermal EC TNF alpha + IL- | 0.0 |
| | | 1beta | |
| Primary Th1 rest | 0.0 | Bronchial epithelium TNF alpha + IL1beta | 0.0 |
| Primary Th2 rest | 0.0 | Small airway epithelium none | 0.0 |
| Primary Tr1 rest | 0.0 | Small airway epithelium TNF alpha + IL- | 4.6 |
| | | 1beta | |
| CD45RA CD4 lymphocyte act | 0.0 | Coronery artery SMC rest | 0.0 |
| CD45RO CD4 lymphocyte act | 4.6 | Coronery artery SMC TNF alpha + IL-1beta | 0.0 |
| CD8 lymphocyte act | 5.3 | Astrocytes rest | 0.0 |
| Secondary CD8 lymphocyte rest | 5.3 | Astrocytes TNF alpha + IL-1beta | 0.0 |
| Secondary CD8 lymphocyte act | 0.0 | KU-812 (Basophil) rest | 0.0 |
| CD4 lymphocyte none | 0.0 | KU-812 (Basophil) PMA/ionomycin | 0.0 |
| 2ry Th1/Th2/Tr1 anti-CD95 | 0.0 | CCD1106 (Keratinocytes) none | 0.0 |
| CH11 | | | |
| LAK cells rest | 9.7 | CCD1106 (Keratinocytes) TNF alpha + IL- | 1.0 |
| | | 1beta | |
| LAK cells IL-2 | 0.0 | Liver cirrhosis | 61.6 |
| LAK cells IL-2 + IL-12 | 0.0 | Lupus kidney | 0.0 |
| LAK cells IL-2 + IFN gamma | 5.1 | NCI-H292 none | 32.5 |
| LAK cells IL-2 + IL-18 | 0.0 | NCI-H292 IL-4 | 46.7 |
| LAK cells PMA/ionomycin | 0.0 | NCI-H292 IL-9 | 58.6 |
| NK Cells IL-2 rest | 0.0 | NCI-H292 IL-13 | 89.5 |
| Two Way MLR 3 day | 0.0 | NCI-H292 IFN gamma | 100.0 |
| Two Way MLR 5 day | 0.0 | HPAEC none | 0.0 |
| Two Way MLR 7 day | 0.0 | HPAEC TNF alpha + IL-1beta | 0.0 |
| PBMC rest | 0.0 | Lung fibroblast none | 0.0 |
| PBMC PWM | 0.0 | Lung fibroblast TNF alpha + IL-1beta | 0.0 |
| PBMC PHA-L | 8.9 | Lung fibroblast IL-4 | 0.0 |
| Ramos (B cell) none | 0.0 | Lung fibroblast IL-9 | 0.0 |
| Ramos (B cell) ionomycin | 0.0 | Lung fibroblast IL-13 | 9.0 |
| B lymphocytes PWM | 8.5 | Lung fibroblast IFN gamma | 0.0 |
| B lymphocytes CD40L and IL-4 | 0.0 | Dermal fibroblast CCD1070 rest | 0.0 |
| EOL-1 dbcAMP | 0.0 | Dermal fibroblast CCD1070 TNF alpha | 0.0 |
| EOL-1 dbcAMP | 0.0 | Dermal fibroblast CCD1070 IL-1beta | 0.0 |
| PMA/ionomycin | | | |
| Dendritic cells none | 5.3 | Dermal fibroblast IFN gamma | 0.0 |
| Dendritic cells LPS | 4.5 | Dermal fibroblast IL-4 | 0.0 |
| Dendritic cells anti-CD40 | 0.0 | IBD Colitis 2 | 10.7 |
| Monocytes rest | 0.0 | IBD Crohn's | 0.0 |
| Monocytes LPS | 1.2 | Colon | 51.8 |
| Macrophages rest | 0.0 | Lung | 24.7 |
| Macrophages LPS | 0.0 | Thymus | 4.1 |
| HUVEC none | 0.0 | Kidney | 4.6 |
| HUVEC starved | 0.0 | | |

[1147] CNS_neurodegeneration_v1.0 Summary: Ag612 This gene was found to be down-regulated in the temporal cortex of Alzheimer's disease patients. Therefore, up-regulation of this gene, encoded protein, and/or use of agonists for this receptor is useful in reversing the dementia/memory loss associated with this disease and neuronal death.

[1148] Panel 1.1 Summary: Ag612 Highest expression of this gene was detected in a lung cancer NCI-H522 cell line (CT=24). High expression of this gene was also seen in cluster of lung cancer, colon cancer, renal cancer, a liver cancer, two breast cancer and a melanoma cell lines. Levels of expression of this gene are useful as diagnostic markers and modulation of this gene, encoded protein and/or use of antibodies or small molecule drug targeting this gene or gene product is useful in the treatments of this cancers.

[1149] In addition, high expression of this gene was seen in all the regions of the central nervous system (CNS) examined including, amygdala, hippocampus, substantia nigra, thalamus, cerebellum, cerebral cortex, and spinal cord. This gene, encoded protein and/or use of antibodies or small molecule drug targeting this gene or gene product is useful in the treatment of CNS disorders such as Alzheimer's disease, Parkinson's disease, epilepsy, multiple sclerosis, schizophrenia and depression and therapeutic modulation of this gene product may be useful in the treatment of these disorders.

[1150] Among tissues with metabolic or endocrine function, this gene was expressed at high to moderate levels in pancreas, adrenal gland, pituitary gland, and the gastrointestinal tract. Modulation of this gene is useful in the treatment of endocrine/metabolically related diseases, such as obesity and diabetes

[1151] Panel 4D Summary: Ag612 Highest expression of this gene was detected in IFN gamma treated NCI-H292 cells (CT=33). Moderate to low expression of this gene was also seen in cytokine treated and untreated NCI-H292 cells, liver cirrhosis and colon tissue samples. Modulation of this gene, encoded protein and/or use of antibodies or small molecule drug targeting this gene is useful for the treatment of chronic obstructive pulmonary disease, asthma, allergy, and emphysema, liver cirrhosis, autoimmune and inflammatory disease affecting colon including Crohn's disease and ulcerative colitis.

[1152] R. CG51965-01: Protocadherin Flamingo 2 Like

[1153] Expression of gene CG51965-01 was assessed using the primer-probe sets Ag1989 and Ag1990, described in Tables RA and RB. Results of the RTQ-PCR runs are shown in Tables RC, RD, RE and RF.

TABLE RA
Probe Name Ag1989

| | | | Start | SEQ ID |
|---|---|---|---|---|
| Primers | Sequences | Length | Position | No |
| Forward | 5′-cctagagatcctcatcctcgat-3′ | 22 | 2631 | 1205 |
| Probe | TET-5′-aatgacaatgcaccccagttcctgt-3′- | 25 | 2656 | 1206 |
| | TAMRA | | | |
| Reverse | 5′-aaagatggaaccctggtagaaa-3′ | 22 | 2685 | 1207 |

[1154] TABLE RB
Probe Name Ag1990

| | | | Start | SEQ ID |
|---|---|---|---|---|
| Primers | Sequences | Length | Position | No |
| Forward | 5′-cctagagatcctcatcctcgat-3′ | 22 | 2631 | 1208 |
| Probe | TET-5′-aatgacaatgcaccccagttcctgt-3′- | 25 | 2656 | 1209 |
| | TAMRA | | | |
| Reverse | 5′-aaagatggaaccctggtagaaa-3′ | 22 | 2685 | 1210 |

[1155] TABLE RC
AI_comprehensive panel_v1.0
Column A - Rel. Exp.(%) Ag1989, Run 248122025
Column B - Rel. Exp.(%) Ag1990, Run 228059649

| Tissue Name | A | B | Tissue Name | A | B |
|---|---|---|---|---|---|
| 110967 COPD-F | 4.9 | 5.3 | 112427 Match Control Psoriasis-F | 23.0 | 25.5 |
| 110980 COPD-F | 3.8 | 5.7 | 112418 Psoriasis-M | 2.0 | 3.8 |
| 110968 COPD-M | 2.2 | 2.6 | 112723 Match Control Psoriasis- | 1.1 | 1.4 |
| | | | M | | |
| 110977 COPD-M | 9.4 | 17.9 | 112419 Psonasis-M | 4.8 | 5.1 |
| 110989 Emphysema-F | 19.5 | 24 | 1112424 Match Control Psoriasis- | 3.4 | 6.0 |
| | | | M | | |
| 110992 Emphysema-F | 35.4 | 42.3 | 112420 Psoriasis-M | 31.9 | 30.1 |
| 110993 Emphysema-F | 6.3 | 6.7 | 112425 Match Control Psoriasis- | 31.0 | 31.2 |
| | | | M | | |
| 110994 Emphysema-F | 4.1 | 6.3 | 104689 (MF) OA Bone-Backus | 12.7 | 22.1 |
| 110995 Emphysema-F | 54.7 | 59.9 | 104690 (MF) Adj “Normal” Bone- | 7.7 | 9.7 |
| | | | Backus | | |
| 110996 Emphysema-F | 18.6 | 21.5 | 104691 (MF) OA Synovium- | 3.7 | 6.8 |
| | | | Backus | | |
| 110997 Asthma-M | 14.1 | 19.5 | 104692 (BA) OA Cartilage- | 29.9 | 27.7 |
| | | | Backus | | |
| 111001 Asthma-F | 17.4 | 23.3 | 104694 (BA) OA Bone-Backus | 11.3 | 14.5 |
| 111002 Asthma-F | 32.1 | 31.6 | 104695 (BA) Adj “Normal” Bone- | 14.0 | 10.8 |
| | | | Backus | | |
| 111003 Atopic Asthma-F | 24.0 | 28.1 | 104696 (BA) OA Synovium- | 10.5 | 6.2 |
| | | | Backus | | |
| 111004 Atopic Asthma-F | 79.0 | 73.7 | 104700 (SS) OA Bone-Backus | 7.9 | 11.4 |
| 111005 Atopic Asthma-F | 34.6 | 42.0 | 104701 (SS) Adj “Normal” Bone- | 14.3 | 17.8 |
| | | | Backus | | |
| 111006 Atopic Asthma-F | 4.6 | 10.9 | 104702 (SS) OA Synovium- | 14.8 | 19.1 |
| | | | Backus | | |
| 111417 Allergy-M | 27.9 | 39.0 | 117093 OA Cartilage Rep7 | 29.1 | 28.1 |
| 112347 Allergy-M | 0.5 | 1.4 | 112672 OA Bone5 | 12.3 | 12.1 |
| 112349 Normal Lung-F | 0.6 | 0.4 | 112673 OA Synovium5 | 4.3 | 6.9 |
| 112357 Normal Lung-F | 2.5 | 5.7 | 112674 OA Synovial Fluid cells | 3.1 | 5.4 |
| 112354 Normal Lung-M | 2.4 | 3.1 | 117100 OA Cartilage Rep14 | 1.0 | 4.3 |
| 112374 Crohns-F | 6.0 | 6.3 | 112756 OA Bone9 | 100.0 | 100.0 |
| 112389 Match Control | 40.6 | 41.8 | 112757 OA Synovium9 | 0.4 | 0.0 |
| Crohns-F | | | | | |
| 112375 Crohns-F | 5.9 | 5.6 | 112758 OA Synovial Fluid Cells9 | 2.7 | 6.1 |
| 112732 Match Control | 23.2 | 20.9 | 117125 RA Cartilage Rep2 | 5.3 | 5.6 |
| Crohns-F | | | | | |
| 112725 Crobns-M | 1.1 | 1.7 | 113492 Bone2 RA | 53.2 | 64.6 |
| 112387 Match Control | 10.2 | 17.2 | 113493 Synovium2 RA | 28.9 | 22.4 |
| Crohns-M | | | | | |
| 112378 Crohns-M | 10.2 | 1.72 | 113494 Syn Fluid Cells RA | 29.7 | 45.4 |
| 112390 Match Control | 51.4 | 58.6 | 113499 Cartilage4 RA | 32.5 | 37.4 |
| Crohns-M | | | | | |
| 112726 Crohns-M | 19.5 | 22.4 | 113500 Bone4 RA | 35.6 | 48.3 |
| 112731 Match Control | 14.1 | 21.5 | 113501 Synovium4 RA | 21.6 | 27.7 |
| Crohns-M | | | | | |
| 112380 Ulcer Col-F | 21.2 | 27.7 | 113502 Syn Fluid Cells4 RA | 13.3 | 15.2 |
| Col-F | | | | | |
| 112384 Ulcer Col-F | 38.7 | 35.4 | 113496 Bone3 RA | 35.4 | 52.9 |
| 112737 Match Control Ulcer | 3.1 | 11.7 | 113497 Synovium3 RA | 16.4 | 25.7 |
| Col-F | | | | | |
| 112386 Ulcer Col-F | 4.9 | 6.9 | 113498 Syn Fluid Cells3 RA | 41.5 | 55.5 |
| 112738 Match Control Ulcer | 4.2 | 6.6 | 117106 Normal Cartilage Rep20 | 9.9 | 14.2 |
| Col-F | | | | | |
| 112381 Ulcer Col-M | 1.1 | 1.0 | 113663 Bone3 Normal | 1.2 | 0.9 |
| 112735 Match Control Ulcer | 9.9 | 11.3 | 113664 Synovium3 Normal | 0.2 | 0.5 |
| Col-M | | | | | |
| 112382 UlcerCol-M | 21.5 | 27.5 | 113665 SynFluid Cells3 Normal | 0.6 | 0.6 |
| 112394 Match Control Ulcer | 1.2 | 1.6 | 117107 Normal Cartilage Rep22 | 2.7 | 5.6 |
| Col-M | | | | | |
| 112383 Ulcer Col-M | 34.4 | 39.5 | 113667 Bone4 Normal | 10.4 | 9.9 |
| 112736 Match Control Ulcer | 16.2 | 17.8 | 113668 Synovium4 Normal | 5.2 | 9.7 |
| Col-M | | | | | |
| 112423 Psoriasis-F | 1.9 | 3.6 | 113669 Syn Fluid Cells4 Normal | 12.3 | 18.2 |

[1156] TABLE RD
Panel 1.3D
Column A - Rel. Exp.(%) Ag1989, Run 147796849
Column B - Rel. Exp.(%) Ag1989, Run 153940861
Column C - Rel. Exp.(%) Ag1990, Run 147797262

| Tissue Name | A | B | C | Tissue Name | A | B | C |
|---|---|---|---|---|---|---|---|
| Liver adenocarcinoma | 37.6 | 54.7 | 37.4 | Kidney (fetal) | 7.2 | 14.3 | 7.6 |
| Pancreas | 0.1 | 1.1 | 0.1 | Renal Ca. 786-0 | 30.4 | 48.0 | 32.8 |
| Pancreatic ca. CAPAN 2 | 8.4 | 15.0 | 10.0 | Renal ca. A498 | 52.9 | 65.5 | 65.5 |
| Adrenal gland | 0.7 | 0.7 | 0.4 | Renal ca. RXF 393 | 29.7 | 34.9 | 34.9 |
| Thyroid | 7.3 | 9.5 | 6.9 | Renal ca. ACHN | 89.5 | 49.0 | 65.5 |
| Salivary gland | 4.0 | 8.2 | 6.4 | Renal ca. UO-31 | 18.9 | 17.7 | 18.4 |
| Pituitary gland | 3.1 | 4.2 | 4.2 | Renal ca. TK-10 | 18.3 | 27.0 | 14.4 |
| Brain (fetal) | 0.4 | 0.5 | 0.2 | Liver | 0.0 | 0.0 | 0.0 |
| Brain (whole) | 0.6 | 0.3 | 0.1 | Liver (fetal) | 0.1 | 0.8 | 0.1 |
| Brain (amygdala) | 0.0 | 0.5 | 0.0 | Liver ca. (hepatoblast) | 0.0 | 0.2 | 0.1 |
| | | | | HepG2 | | | |
| Brain (cerebellum) | 0.0 | 0.0 | 0.0 | Lung | 11.0 | 25.2 | 9.3 |
| Brain (hippocampus) | 0.9 | 1.7 | 0.4 | Lung (fetal) | 14.7 | 12.1 | 13.9 |
| Brain (substantia nigra) | 0.0 | 0.0 | 0.0 | Lung ca. (small cell) LX- | 4.0 | 4.8 | 6.5 |
| | | | | 1 | | | |
| Brain (thalamus) | 0.1 | 0.0 | 0.5 | Lung ca. (small cell) NCI- | 3.4 | 5.3 | 3.1 |
| Cerebral Cortex | 0.1 | 0.0 | 0.4 | Lung ca. (s.cell var.) | 0.8 | 0.5 | 1.1 |
| | | | | SHP-77 | | | |
| Spinal cord | 0.1 | 0.1 | 0.1 | Lung ca. (large cell) NCI- | 8.1 | 8.1 | 11.2 |
| | | | | H460 | | | |
| glio/astro U87-MG | 14.4 | 16.6 | 19.6 | Lung ca. (non-sm. cell) | 13.5 | 17.6 | 13.9 |
| | | | | A549 | | | |
| glio/astro U-118-MG | 5.8 | 5.1 | 7.4 | Lung Ca. (non-s.cell) | 29.3 | 49.7 | 27.2 |
| | | | | NCI-H23 | | | |
| astrocytoma SW1783 | 12.2 | 14.5 | 19.5 | Lung Ca. (non-s.cell) | 33.4 | 46.7 | 39.8 |
| | | | | HOP-62 | | | |
| neuro*; met SK-N-AS | 0.0 | 0.0 | 0.0 | Lung Ca. (non-s.cl) NCI- | 18.6 | 33.2 | 22.8 |
| | | | | H522 | | | |
| astrocytoma SF-539 | 20.4 | 31.4 | 15.4 | Lung ca. (squam.) SW | 18.6 | 16.7 | 22.4 |
| | | | | 900 | | | |
| astrocytoma SNB-75 | 40.6 | 26.4 | 47.6 | Lung Ca. (squam.) NCI- | 1.0 | 0.6 | 0.7 |
| | | | | H596 | | | |
| glioma SNB-19 | 1.7 | 1.9 | 0.9 | Mammary gland | 15.3 | 10.4 | 16.6 |
| glioma U251 | 1.6 | 2.4 | 1.5 | Breast ca.* (pl.ef) MCF-7 | 60.7 | 11.2 | 67.8 |
| glioma SF-295 | 35.1 | 62.9 | 30.6 | Breast ca.* (pl.ef) MDA- | 9.2 | 5.5 | 13.0 |
| | | | | MB-231 | | | |
| Heart (Fetal) | 74.2 | 63.3 | 72.7 | Breast ca.* (pl.ef) T47D | 9.3 | 100.0 | 76.8 |
| Heart | 2.4 | 3.7 | 2.1 | Breast Ca. BT-549 | 10.7 | 7.3 | 11.0 |
| Skeletal muscle (Fetal) | 6.3 | 12.9 | 7.0 | Breast Ca. MDA-N | 0.0 | 0.0 | 0.0 |
| Skeletal muscle | 0.0 | 0.0 | 0.0 | Ovary | 11.7 | 18.8 | 10.1 |
| Bone marrow | 0.7 | 0.7 | 0.6 | Ovarian ca. OVCAR-3 | 47.3 | 42.0 | 49.3 |
| Thymus | 0.9 | 1.6 | 1.6 | Ovarian ca. OVCAR-4 | 19.1 | 41.5 | 23.3 |
| Spleen | 0.4 | 0.8 | 0.5 | Ovarian ca. OVCAR-5 | 49.7 | 49.3 | 49.3 |
| Lymph node | 7.0 | 11.1 | 8.1 | Ovarian ca. OVCAR-8 | 15.7 | 25.9 | 19.6 |
| Colorectal | 4.2 | 7.6 | 6.9 | Ovarian ca. IGROV-1 | 12.8 | 21.8 | 21.6 |
| Stomach | 10.8 | 16.7 | 10.7 | Ovarian ca. (ascites) SK- | 66.0 | 64.6 | 100.0 |
| | | | | OV-3 | | | |
| Small intestine | 1.0 | 2.7 | 0.9 | Uterus | 2.6 | 3.5 | 1.4 |
| Colon ca. SW480 | 16.7 | 18.8 | 16.0 | Placenta | 2.9 | 3.3 | 2.7 |
| Colon ca.* SW620 (SW480 | 6.0 | 5.5 | 3.9 | Prostate | 2.5 | 11.2 | 4.5 |
| met) | | | | | | | |
| Colon ca. HT29 | 0.5 | 0.2 | 0.6 | Prostate ca.* (bone met) | 20.4 | 24.0 | 14.7 |
| | | | | PC-3 | | | |
| Colon ca. HCT-116 | 9.2 | 12.2 | 5.4 | Testis | 3.6 | 3.8 | 3.7 |
| Colon ca. CaCo-2 | 23.7 | 14.2 | 16.4 | Melanoma Hs688(A).T | 0.8 | 0.2 | 0.4 |
| CC Well to Mod Duff | 20.6 | 15.8 | 16.4 | Melanoma* (met) | 0.1 | 0.0 | 0.6 |
| (ODO3866) | | | | Hs688(B).T | | | |
| Colon ca. HCC-2998 | 35.1 | 26.6 | 31.4 | Melanoma UACC-62 | 4.4 | 5.8 | 4.2 |
| Gastric ca. (liver met) NCI- | 100.0 | 62.9 | 92.7 | Melanoma M14 | 16.8 | 20.0 | 11.9 |
| N87 | | | | | | | |
| Bladder | 1.8 | 3.3 | 1.7 | Melanoma LOX IMVI | 0.1 | 0.0 | 0.0 |
| Trachea | 27.0 | 48.0 | 26.2 | Melanoma* (met) SK- | 20.3 | 35.1 | 17.4 |
| | | | | MEL-5 | | | |
| Kidney | 8.2 | 12.7 | 5.2 | Adipose | 2.5 | 3.0 | 1.6 |

[1157] TABLE RE
Panel 2D
Column A - Rel. Exp.(%) Ag1989, Run 149988692
Column B - Rel. Exp.(%) Ag1990, Run 152494531

| Tissue Name | A | B | Tissue Name | A | B |
|---|---|---|---|---|---|
| Normal Colon | 2.7 | 3.7 | Kidney Margin 8120608 | 9.4 | 8.5 |
| CC Well to Mod Diff (ODO3866) | 4.4 | 2.8 | Kidney Cancer 8120613 | 0.3 | 0.3 |
| CC Margin (ODO3866) | 0.1 | 0.1 | Kidney Margin 8120614 | 13.1 | 15.9 |
| CC Gr.2 rectosigmoid (ODO3868) | 0.91 | 0.8 | Kidney Cancer 9010320 | 7.9 | 7.5 |
| CC Margin (ODO3868) | 0.3 | 0.2 | Kidney Margin 9010321 | 12.3 | 12.8 |
| CC Mod Diff (ODO3920) | 4.0 | 3.8 | Normal Uterus | 0.3 | 0.2 |
| CC Margin (ODO3920) | 0.7 | 0.8 | Uterine Cancer 064011 | 8.7 | 9.8 |
| CC Gr.2 ascend colon (ODO3921) | 2.5 | 3.7 | Normal Thyroid | 2.8 | 2.8 |
| CC Margin (ODO3921) | 0.4 | 0.3 | Thyroid Cancer | 10.7 | 10.5 |
| CC from Partial Hepatectomy | 2.8 | 3.4 | Thyroid Cancer A302152 | 1.4 | 1.1 |
| (ODO4309) Mets | | | | | |
| Liver Margin (ODO4309) | 0.1 | 0.0 | Thyroid Margin A302153 | 4.0 | 4.2 |
| Colon mets to lung (ODO4451-01) | 4.4 | 5.3 | Normal Breast | 8.5 | 8.7 |
| Lung Margin (ODO4451-02) | 4.8 | 5.8 | Breast Cancer | 9.9 | 13.1 |
| Normal Prostate 6546-1 | 3.1 | 3.6 | Breast Cancer (ODO4590-01) | 25.7 | 27.7 |
| Prostate Cancer (ODO4410) | 5.9 | 5.4 | Breast Cancer Mets | 23.5 | 28.9 |
| | | | (ODO4590-03) | | |
| Prostate Margin (ODO4410) | 4.0 | 4.9 | Breast Cancer Metastasis | 100.0 | 100.0 |
| Prostate Cancer (ODO4720-01) | 6.0 | 7.2 | Breast Cancer | 20.9 | 20.7 |
| Prostate Margin (ODO4720-02) | 8.1 | 7.6 | Breast Cancer | 9.3 | 7.9 |
| Normal Lung | 9.0 | 10.2 | Breast Cancer 9100266 | 27.5 | 28.1 |
| Lung Met to Muscle (ODO4286) | 4.4 | 5.5 | Breast Margin 9100265 | 7.7 | 7.9 |
| Muscle Margin (ODO4286) | 0.1 | 0.1 | Breast Cancer A209073 | 14.4 | 12.3 |
| Lung Malignant Cancer | 20.2 | 20.9 | Breast Margin A209073 | 8.1 | 7.0 |
| (ODO3126) | | | | | |
| Lung Margin (ODO3126) | 9.2 | 10.4 | Normal Liver | 0.0 | 0.0 |
| Lung Cancer (ODO4404) | 33.0 | 28.7 | Liver Cancer | 0.1 | 0.1 |
| Lung Margin (ODO4404) | 7.3 | 9.8 | Liver Cancer 1025 | 0.1 | 0.2 |
| Lung Cancer (ODO4565) | 17.8 | 18.2 | Liver Cancer 1026 | 2.7 | 2.5 |
| Lung Margin (ODO4565) | 3.0 | 4.1 | Liver Cancer 6004-T | 0.1 | 0.0 |
| Lung Cancer (ODO4237-01) | 4.2 | 4.5 | Liver Tissue 6004-N | 0.2 | 0.3 |
| Lung Margin (ODO4237-02) | 5.3 | 5.6 | Liver Cancer 6005-T | 2.3 | 2.2 |
| Ocular Mel Met to Liver | 1.2 | 1.4 | Liver Tissue 6005-N | 0.1 | 0.1 |
| (ODO4310) | | | | | |
| Liver Margin (ODO4310) | 0.0 | 0.0 | Normal Bladder | 2.0 | 2.5 |
| Melanoma Metastasis | 3.1 | 3.7 | Bladder Cancer | 2.8 | 2.6 |
| Lung Margin (ODO4321) | 9.6 | 9.0 | Bladder Cancer | 5.4 | 7.4 |
| Normal Kidney | 21.6 | 18.4 | Bladder Cancer (ODO4718- | 1.2 | 0.6 |
| | | | 01) | | |
| Kidney Ca, Nuclear grade 2 | 10.2 | 9.6 | Bladder Normal Adjacent | 1.0 | 0.9 |
| (ODO4338) | | | (ODO4718-03) | | |
| Kidney Margin (ODO4338) | 10.2 | 9.0 | Normal Ovary | 1.2 | 1.2 |
| Kidney Ca Nuclear grade 1/2 | 11.2 | 10.4 | Ovarian Cancer | 7.3 | 8.6 |
| (ODO4339) | | | | | |
| Kidney Margin (ODO4339) | 18.2 | 19.2 | Ovarian Cancer (ODO4768- | 16.6 | 14.1 |
| | | | 07) | | |
| Kidney Ca, Clear cell type | 13.2 | 16.0 | Ovary Margin (ODO4768-08) | 0.9 | 0.6 |
| (ODO4340) | | | | | |
| Kidney Margin (ODO4340) | 16.4 | 15.7 | Normal Stomach | 2.2 | 2.1 |
| Kidney Ca, Nuclear grade 3 | 2.3 | 1.5 | Gastric Cancer 9060358 | 0.7 | 0.6 |
| (ODO4348) | | | | | |
| Kidney Margin (ODO4348) | 9.2 | 9.8 | Stomach Margin 9060359 | 1.8 | 2.0 |
| Kidney Cancer (ODO4622-01) | 7.7 | 9.9 | Gastric Cancer 9060395 | 3.8 | 3.5 |
| Kidney Margin (ODO4622-03) | 2.7 | 3.0 | Stomach Margin 9060394 | 2.2 | 2.3 |
| Kidney Cancer (ODO4450-01) | 10.4 | 9.2 | Gastric Cancer 9060397 | 10.9 | 9.0 |
| Kidney Margin (ODO4450-03) | 5.9 | 4.5 | Stomach Margin 9060396 | 0.5 | 0.6 |
| Kidney Cancer 8120607 | 1.2 | 0.8 | Gastric Cancer 064005 | 2.0 | 1.6 |

[1158] TABLE RF
Panel 4.1D
Column A - Rel. Exp.(%) Ag1989, Run 248122213

| Tissue Name | A | Tissue Name | A |
|---|---|---|---|
| Secondary Th1 act | 0.5 | HUVEC IL-1beta | 2.4 |
| Secondary Th2 act | 1.3 | HUVEC IFN gamma | 11.0 |
| Secondary Tr1 act | 0.4 | HUVEC TNF alpha + IFN gamma | 0.0 |
| Secondary Th1 rest | 0.0 | HUVEC TNF alpha + IL4 | 0.4 |
| Secondary Th2 rest | 0.0 | HUVEC IL-11 | 2.7 |
| Secondary Tr1 rest | 0.0 | Lung Microvascular EC none | 20.4 |
| Primary Th1 act | 0.0 | Lung Microvascular EC TNF alpha + IL- | 4.8 |
| | | 1beta | |
| Primary Th2 act | 0.4 | Microvascular Dermal EC none | 0.9 |
| Primary Tr1 act | 0.7 | Microsvasular Dermal EC TNF alpha + IL- | 2.2 |
| | | 1beta | |
| Primary Th1 rest | 0.0 | Bronchial epithelium TNF alpha + IL1beta | 50.7 |
| Primary Th2 rest | 0.0 | Small airway epithelium none | 43.2 |
| Primary Tr1 rest | 0.0 | Small airway epithelium TNF alpha + IL- | 85.9 |
| | | 1beta | |
| CD45RA CD4 lymphocyte act | 1.0 | Coronery artery SMC rest | 0.4 |
| CD45RO CD4 lymphocyte act | 0.2 | Coronery artery SMC TNF alpha + IL-1beta | 0.0 |
| CD8 lymphocyte act | 0.0 | Astrocytes rest | 6.0 |
| Secondary CD8 lymphocyte rest | 0.2 | Astrocytes TNF alpha + IL-1beta | 5.5 |
| Secondary CD8 lymphocyte act | 0.0 | KU-812 (Basophil) rest | 0.0 |
| CD4 lymphocyte none | 0.0 | KU-812 (Basophil) PMA/ionomycin | 0.2 |
| 2ry Th1/Th2/Tr1 anti-CD95 | 0.0 | CCD1106 (Keratinocytes) none | 92.0 |
| CH11 | | | |
| LAK cells rest | 1.7 | CCD1106 (Keratinocytes) TNF alpha + IL- | 57.0 |
| | | 1beta | |
| LAK cells IL-2 | 0.0 | Liver cirrhosis | 1.5 |
| LAK cells IL-2 + IL-12 | 0.0 | NCI-H292 none | 24.7 |
| LAK cells IL-2 + IFN gamma | 0.0 | NCI-H292 IL-4 | 25.2 |
| LAK cells IL-2 + IL-18 | 0.2 | NCI-H292 IL-9 | 25.7 |
| LAK cells PMA/ionomycin | 1.6 | NCI-H292 IL-13 | 40.9 |
| NK Cells IL-2 rest | 1.4 | NCI-H292 IFN gamma | 14.1 |
| Two Way MLR 3 day | 0.1 | HPAEC none | 0.8 |
| Two Way MLR 5 day | 0.0 | HPAEC TNF alpha + IL-1beta | 1.0 |
| Two Way MLR 7 day | 0.0 | Lung fibroblast none | 0.6 |
| PBMC rest | 0.1 | Lung fibroblast TNF alpha + IL-1beta | 0.0 |
| PBMC PWM | 0.0 | Lung fibroblast IL-4 | 0.1 |
| PBMC PHA-L | 0.2 | Lung fibroblast IL-9 | 0.0 |
| Ramos (B cell) none | 0.0 | Lung fibroblast IL-13 | 0.0 |
| Ramos (B cell) ionomycin | 0.0 | Lung fibroblast IFN gamma | 0.3 |
| B lymphocytes PWM | 0.0 | Dermal fibroblast CCD1070 rest | 3.2 |
| B lymphocytes CD40L and IL-4 | 0.1 | Dermal fibroblast CCD1070 TNF alpha | 2.1 |
| EOL-1 dbcAMP | 0.0 | Dermal fibroblast CCD1070 IL-1beta | 0.6 |
| EOL-1 dbcAMP | 0.0 | Dermal fibroblast IFN gamma | 0.4 |
| PMA/ionomycin | | | |
| Dendritic cells none | 14.1 | Dermal fibroblast IL-4 | 0.3 |
| Dendritic cells LPS | 1.6 | Dermal Fibroblasts rest | 1.7 |
| Dendritic cells anti-CD40 | 3.0 | Neutrophils TNFa + LPS | 0.0 |
| Monocytes rest | 0.0 | Neutrophils rest | 0.0 |
| Monocytes LPS | 2.9 | Colon | 0.5 |
| Macrophages rest | 6.0 | Lung | 2.9 |
| Macrophages LPS | 0.9 | Thymus | 1.0 |
| HUVEC none | 3.0 | Kidney | 100.0 |
| HUVEC starved | 3.1 | | |

[1159] AI_comprehensive panel_v1.0 Summary: Ag1989/Ag1990 The highest expression of this gene was detected in an osteoarthritic bone sample (CT=29). The expression of this gene was upregulated in bone, synovium, synovial fluid, and cartilage in patients with rheumatoid arthritis (RA) (CTs=29-30) compared to normal controls (CTs=32-38). In addition, expression of this gene was upregulated in lung samples from patients with asthma compared to normal lung controls (CT values=29-30 for patients with asthma versus 34-36 for normal controls). Therefore, expression of this gene is useful as a marker to identify samples from patients with rheumatoid arthritis or asthma. Therapeutic modulation of this gene, expressed protein and/or use of antibodies or small molecule drugs targeting the gene or gene product are useful in the treatment of rheumatoid arthritis or asthma.

[1160] Panel 1.3D Summary: Ag1989/Ag1990 This gene was strongly expressed in most tumor cell lines in this panel, while the expression in most normal tissues was moderate or low. Expression of this gene was up-regulated in a subset of glioma, astrocytoma, pancreatic, colon, kidney, lung, breast and ovarian cancer cell lines. Therefore, expression of this gene is useful in the detection and diagnosis of these types of cancer. Therefore, therapeutic modulation of this gene, expressed protein and/or use of antibodies or small molecule drugs targeting the gene or gene product is useful in the treatment of brain, pancreatic, colon, kidney, lung, breast and ovarian cancer.

[1161] Panel 2D Summary: Ag1989/Ag1990 The highest expression of this gene was detected in a metastatic breast cancer sample (CT=25). For all tumor sites there were several cases where the tumor tissues strongly overexpressed the CG53971-01 gene as compared to the normal adjacent controls, especially for lung, breast and ovarian cancers, indicating a role in tumorgenesis. Therefore, therapeutic modulation of this gene, expressed protein and/or use of antibodies or small molecule drugs targeting the gene or gene product is useful in the treatment of cancers including brain, pancreatic, colon, kidney, lung, breast and ovarian cancers.

[1162] Panel 4.1D Summary: Ag1989 Expression of this gene was highest in kidney (CT=28.2). In addition, this gene was expressed at moderate levels in the lung cell line NCI-H292 and keratinocytes, irrespective of treatment. Expression of this gene was also up-regulated approximately two-fold in activated small airway epithelium, consistent with a potential role for the CG53971-01 gene in asthma and emphysema. Therapeutic modulation of this gene, expressed protein and/or use of antibodies or small molecule drugs targeting the gene or gene product is useful in the treatment of asthma or emphysema.

[1163] S. CG51983-05: A Disintegrin and Metalloproteinase

[1164] Expression of gene CG51983-05 was assessed using the primer-probe set Ag1322, described in Table SA. Results of the RTQ-PCR runs are shown in Table SB.

TABLE SA
Probe Name Ag1322

| | | | Start | SEQ ID |
|---|---|---|---|---|
| Primers | Sequences | Length | Position | No |
| Forward | 5′-ggtatgtgcctgccctattatt-3′ | 22 | 922 | 1211 |
| Probe | TET-5′-ccaccagtatcattaaggatcttttacc | 30 | 944 | 1212 |
| | tg-3′-TAMRA | | | |
| Reverse | 5′-gccattctgtttgcaattatgt-3′ | 22 | 980 | 1213 |

[1165] TABLE SB
Panel 1.2
Column A - Rel. Exp.(%) Ag1322, Run 133804727

| Tissue Name | A | Tissue Name | A |
|---|---|---|---|
| Endothelial cells | 0.0 | Renal ca. 786-0 | 0.0 |
| Heart (Fetal) | 0.0 | Renal ca. A498 | 0.0 |
| Pancreas | 0.2 | Renal ca. RXF 393 | 0.0 |
| Pancreatic ca. CAPAN 2 | 0.0 | Renal ca. ACHN | 0.0 |
| Adrenal gland | 0.2 | Renal ca. UO-31 | 0.0 |
| Thyroid | 0.0 | Renal ca. TK-10 | 0.0 |
| Salivary gland | 0.1 | Liver | 0.0 |
| Pituitary gland | 0.0 | Liver (fetal) | 0.2 |
| Brain (fetal) | 0.0 | Liver ca. (hepatoblast) HepG2 | 0.0 |
| Brain (whole) | 0.0 | Lung | 0.0 |
| Brain (amygdala) | 0.0 | Lung (fetal) | 0.1 |
| Brain (cerebellum) | 0.0 | Lung ca. (small cell) LX-1 | 0.0 |
| Brain (hippocampus) | 0.0 | Lung ca. (small cell) NCI-H69 | 0.0 |
| Brain (thalamus) | 0.0 | Lung ca. (s. cell var.) SHP-77 | 0.0 |
| Cerebral Cortex | 0.0 | Lung ca. (large cell) NCI-H460 | 0.0 |
| Spinal cord | 0.1 | Lung ca. (non-sm. cell) A549 | 0.0 |
| glio/astro U87-MG | 0.0 | Lung ca. (non-s. cell) NCI-H23 | 0.0 |
| glio/astro U-118-MG | 0.0 | Lung ca. (non-s. cell) HOP-62 | 0.0 |
| astrocytoma SW1783 | 0.0 | Lung ca. (non-s. cl) NCI-H522 | 0.0 |
| neuro*; met SK-N-AS | 0.0 | Lung ca. (squam.) SW 900 | 0.0 |
| astrocytoma SF-539 | 0.0 | Lung ca. (squam.) NCI-H596 | 0.0 |
| astrocytoma SNB-75 | 0.0 | Mammary gland | 0.0 |
| glioma SNB-19 | 0.0 | Breast ca.* (pl.ef) MCF-7 | 0.0 |
| glioma U251 | 0.1 | Breast ca.* (pl.ef) MDA-MB-231 | 0.0 |
| glioma SF-295 | 0.0 | Breast ca.* (pl.ef) T47D | 0.0 |
| Heart | 0.0 | Breast ca. BT-549 | 0.0 |
| Skeletal muscle | 0.0 | Breast ca. MDA-N | 0.0 |
| Bone marrow | 0.0 | Ovary | 0.0 |
| Thymus | 0.0 | Ovarian ca. OVCAR-3 | 0.0 |
| Spleen | 0.0 | Ovarian ca. OVCAR-4 | 0.0 |
| Lymph node | 0.1 | Ovarian ca. OVCAR-5 | 0.0 |
| Colorectal | 0.0 | Ovarian ca. OVCAR-8 | 0.0 |
| Stomach | 0.1 | Ovarian ca. IGROV-1 | 0.0 |
| Small intestine | 0.0 | Ovarian ca. (ascites) SK-OV-3 | 0.0 |
| Colon ca. SW480 | 0.0 | Uterus | 0.0 |
| Colon ca.* SW620 | 0.0 | Placenta | 0.0 |
| (SW480 met) | | | |
| Colon ca. HT29 | 0.0 | Prostate | 2.1 |
| Colon ca. HCT-116 | 0.0 | Prostate ca.* (bone met) PC-3 | 0.0 |
| Colon ca. CaCo-2 | 0.0 | Testis | 100.0 |
| CC Well to Mod Diff | 0.0 | Melanoma Hs688(A).T | 0.0 |
| (ODO3866) | | | |
| Colon ca. HCC-2998 | 0.0 | Melanoma* (met) Hs688(B).T | 0.0 |
| Gastric ca. (liver met) | 0.0 | Melanoma UACC-62 | 0.0 |
| NCI-N87 | | | |
| Bladder | 0.1 | Melanoma M14 | 0.0 |
| Trachea | 0.0 | Melanoma LOX IMVI | 0.0 |
| Kidney | 0.0 | Melanoma* (met) SK-MEL-5 | 0.0 |
| Kidney (fetal) | 0.0 | | |

[1166] Panel 1.2 Summary: Ag1322 Expression of this gene was highest in testis (CT value=29). Low expression was also seen in prostate (CT value=34.6). The gene or encoded protein is useful as a marker for these tissues. This gene encodes a protein with homology to ADAM proteins, which are membrane disintegrin-metalloproteases. The expression of several other ADAM proteins has been shown to be testis-specific and these proteins are thought to play a role in fertilization (Hooft van Huijsduijnen R. (1998) Gene 206: 273-282). Therapeutic modulation of this gene, expressed protein and/or use of antibodies or small molecule drugs targeting the gene or gene product is useful in the treatment of diseases of the prostate and testis, including infertility.

[1167] T. CG53390-02: Olfactory Receptor

[1168] Expression of gene CG53390-02 was assessed using the primer-probe sets Ag1588 and Ag2015, described in Tables TA and TB. Results of the RTQ-PCR runs are shown in Tables TC, TD and TE.

TABLE TA
Probe Name Ag1588

| | | | Start | SEQ ID |
|---|---|---|---|---|
| Primers | Sequences | Length | Position | No |
| Forward | 5′-aagctctcctgtgcagatacct-3′ | 22 | 582 | 1214 |
| Probe | TET-5′-ctacgagatggcgctgtccacct-3′- | 23 | 608 | 1215 |
| | TAMRA | | | |
| Reverse | 5′-aaagagggagcattaggatcag-3′ | 22 | 639 | 1216 |

[1169] TABLE TB
Probe Name Ag2015

| | | | Start | SEQ ID |
|---|---|---|---|---|
| Primers | Sequences | Length | Position | No |
| Forward | 5′-aagctctcctgtgcagatacct-3′ | 22 | 582 | 1217 |
| Probe | TET-5′-ctacgagatggcgctgtccacct-3′- | 23 | 608 | 1218 |
| | TAMRA | | | |
| Reverse | 5′-aaagagggagcattaggatcag-3′ | 22 | 639 | 1219 |

[1170] TABLE TC
Panel 1.3D
Column A - Rel. Exp. (%) Ag1588, Run 165529897
Column B - Rel. Exp. (%) Ag2015, Run 147837991
Column C - Rel. Exp. (%) Ag2015, Run 152152893

| Tissue Name | A | B | C | Tissue Name | A | B | C |
|---|---|---|---|---|---|---|---|
| Liver adenocarcinoma | 0.0 | 0.0 | 0.0 | Kidney (fetal) | 0.0 | 0.0 | 0.0 |
| Pancreas | 0.0 | 0.0 | 0.0 | Renal ca. 786-0 | 0.0 | 0.0 | 0.0 |
| Pancreatic ca. CAPAN 2 | 0.0 | 0.0 | 0.0 | Renal ca. A498 | 0.0 | 0.0 | 0.0 |
| Adrenal gland | 0.0 | 0.0 | 0.6 | Renal ca. RXF 393 | 0.0 | 0.8 | 0.0 |
| Thyroid | 0.0 | 0.0 | 0.0 | Renal ca. ACHN | 0.0 | 0.0 | 1.2 |
| Salivary gland | 0.0 | 0.0 | 0.0 | Renal ca. UO-31 | 0.0 | 0.0 | 0.0 |
| Pituitary gland | 0.0 | 0.0 | 0.0 | Renal ca. TK-10 | 0.0 | 0.0 | 1.2 |
| Brain (fetal) | 0.0 | 0.0 | 0.0 | Liver | 0.0 | 0.0 | 0.0 |
| Brain (whole) | 0.0 | 0.0 | 0.0 | Liver (fetal) | 0.0 | 0.0 | 0.0 |
| Brain (amygdala) | 0.0 | 0.0 | 0.0 | Liver ca. (hepatoblast) | 0.0 | 0.0 | 0.0 |
| | | | | HepG2 | | | |
| Brain (cerebellum) | 0.0 | 0.0 | 0.0 | Lung | 0.0 | 0.3 | 0.0 |
| Brain (hippocampus) | 0.0 | 0.0 | 0.0 | Lung (fetal) | 0.0 | 0.0 | 0.0 |
| Brain (substantia nigra) | 0.0 | 0.0 | 0.0 | Lung ca. (small cell) LX-1 | 0.0 | 0.0 | 0.0 |
| Brain (thalamus) | 0.0 | 0.0 | 0.0 | Lung ca. (small cell) NCI- | 0.0 | 0.0 | 0.0 |
| | | | | H69 | | | |
| Cerebral Cortex | 0.0 | 0.0 | 2.6 | Lung ca. (s. cell var.) SHP- | 100.0 | 100.0 | 100.0 |
| | | | | 77 | | | |
| Spinal cord | 0.0 | 0.0 | 0.0 | Lung ca. (large cell) NCI- | 0.0 | 0.0 | 0.0 |
| | | | | H460 | | | |
| glio/astro U87-MG | 0.0 | 0.0 | 0.0 | Lung ca. (non-sm. cell) | 0.0 | 0.0 | 0.0 |
| | | | | A549 | | | |
| glio/astro U-118-MG | 0.0 | 0.0 | 1.1 | Lung ca. (non-s. cell) NCI- | 1.7 | 1.6 | 2.1 |
| | | | | H23 | | | |
| astrocytoma SW1783 | 1.4 | 0.3 | 0.0 | Lung ca. (non-s. cell) HOP- | 0.0 | 0.0 | 0.0 |
| | | | | 62 | | | |
| neuro*; met SK-N-AS | 0.0 | 0.0 | 0.0 | Lung ca. (non-s. cl) NCI- | 0.0 | 0.0 | 0.0 |
| | | | | H522 | | | |
| astrocytoma SF-539 | 0.0 | 0.0 | 0.0 | Lung ca. (squam.) SW 900 | 0.0 | 0.0 | 0.0 |
| astrocytoma SNB-75 | 0.0 | 0.0 | 1.1 | Lung ca. (squam.) NCI- | 0.0 | 0.0 | 0.0 |
| | | | | H596 | | | |
| glioma SNB-19 | 0.0 | 0.3 | 2.0 | Mammary gland | 0.0 | 0.0 | 1.3 |
| glioma U251 | 0.7 | 0.0 | 0.0 | Breast ca.* (pl. ef) MCF-7 | 0.0 | 0.5 | 0.0 |
| glioma SF-295 | 0.0 | 0.0 | 0.0 | Breast ca.* (pl. ef) MDA- | 0.0 | 0.0 | 0.0 |
| | | | | MB-231 | | | |
| Heart (Fetal) | 0.0 | 0.0 | 0.0 | Breast ca.* (pl. ef) T47D | 0.0 | 0.4 | 0.0 |
| Heart | 0.0 | 0.0 | 0.7 | Breast ca. BT-549 | 0.0 | 0.0 | 0.6 |
| Skeletal muscle (Fetal) | 0.0 | 0.0 | 0.6 | Breast ca. MDA-N | 0.0 | 0.9 | 0.0 |
| Skeletal muscle | 0.0 | 0.0 | 0.0 | Ovary | 0.0 | 0.0 | 0.0 |
| Bone marrow | 0.0 | 0.0 | 0.0 | Ovarian ca. OVCAR-3 | 0.0 | 0.8 | 0.0 |
| Thymus | 0.0 | 0.3 | 0.0 | Ovarian ca. OVCAR-4 | 0.0 | 0.0 | 0.0 |
| Spleen | 0.8 | 0.0 | 0.0 | Ovarian ca. OVCAR-5 | 0.0 | 0.4 | 0.0 |
| Lymph node | 0.0 | 0.0 | 0.0 | Ovarian ca. OVCAR-8 | 0.7 | 0.0 | 0.0 |
| Colorectal | 0.8 | 0.7 | 2.1 | Ovarian ca. IGROV-1 | 0.0 | 0.0 | 0.0 |
| Stomach | 0.0 | 0.0 | 0.0 | Ovarian ca. (ascites) SK- | 0.0 | 0.0 | 0.0 |
| | | | | OV-3 | | | |
| Small intestine | 0.0 | 0.0 | 0.6 | Uterus | 0.0 | 0.4 | 0.0 |
| Colon ca. SW480 | 0.0 | 0.0 | 0.0 | Placenta | 0.0 | 0.8 | 2.4 |
| Colon ca.* SW620 (SW480 | 0.0 | 0.0 | 1.9 | Prostate | 0.0 | 0.0 | 0.0 |
| met) | | | | | | | |
| Colon ca. HT29 | 0.0 | 0.0 | 0.0 | Prostate ca.* (bone met) | 0.0 | 0.0 | 0.0 |
| | | | | PC-3 | | | |
| Colon ca. HCT-116 | 0.0 | 0.7 | 0.0 | Testis | 0.0 | 1.6 | 0.5 |
| Colon ca. CaCo-2 | 0.0 | 0.0 | 38.7 | Melanoma Hs688(A).T | 0.0 | 0.0 | 0.0 |
| CC Well to Mod Diff | 0.0 | 0.0 | 1.6 | Melanoma* (met) | 0.0 | 0.0 | 0.0 |
| (ODO3866) | | | | Hs688(B).T | | | |
| Colon ca. HCC-2998 | 0.0 | 0.0 | 0.6 | Melanoma UACC-62 | 0.0 | 0.0 | 0.0 |
| Gastric ca. (liver met) NCI- | 0.0 | 0.0 | 0.7 | Melanoma M14 | 0.0 | 0.0 | 0.0 |
| N87 | | | | | | | |
| Bladder | 0.0 | 0.0 | 0.0 | Melanoma LOX IMVI | 0.0 | 0.0 | 1.1 |
| Trachea | 0.0 | 0.0 | 0.0 | Melanoma* (met) SK- | 0.0 | 0.0 | 1.4 |
| | | | | MEL-5 | | | |
| Kidney | 0.0 | 0.0 | 0.0 | Adipose | 0.0 | 0.0 | 0.0 |

[1171] TABLE TD
Panel 2D
Column A - Rel. Exp.(%) Ag2015, Run 152152937

| Tissue Name | A | Tissue Name | A |
|---|---|---|---|
| Normal Colon | 10.6 | Kidney Margin 8120608 | 0.0 |
| CC Well to Mod Diff (ODO3866) | 32.5 | Kidney Cancer 8120613 | 0.0 |
| CC Margin (ODO3866) | 1.1 | Kidney Margin 8120614 | 25.9 |
| CC Gr.2 rectosigmoid (ODO3868) | 20.6 | Kidney Cancer 9010320 | 0.0 |
| CC Margin (ODO3868) | 0.0 | Kidney Margin 9010321 | 0.0 |
| CC Mod Diff (ODO3920) | 0.0 | Normal Uterus | 0.0 |
| CC Margin (ODO3920) | 0.0 | Uterine Cancer 064011 | 0.0 |
| CC Gr.2 ascend colon (ODO3921) | 0.0 | Normal Thyroid | 0.0 |
| CC Margin (ODO3921) | 48.6 | Thyroid Cancer | 0.0 |
| CC from Partial Hepatectomy | 0.0 | Thyroid Cancer A302152 | 0.0 |
| (ODO4309) Mets | | | |
| Liver Margin (ODO4309) | 0.0 | Thyroid Margin A302153 | 0.0 |
| Colon mets to lung (OD04451-01) | 0.0 | Normal Breast | 0.0 |
| Lung Margin (OD04451-02) | 0.0 | Breast Cancer | 0.0 |
| Normal Prostate 6546-1 | 0.0 | Breast Cancer (OD04590-01) | 0.0 |
| Prostate Cancer (OD04410) | 0.0 | Breast Cancer Mets (OD04590-03) | 0.0 |
| Prostate Margin (OD04410) | 0.0 | Breast Cancer Metastasis | 0.0 |
| Prostate Cancer (OD04720-01) | 0.0 | Breast Cancer | 0.0 |
| Prostate Margin (OD04720-02) | 0.0 | Breast Cancer | 0.0 |
| Normal Lung | 25.0 | Breast Cancer 9100266 | 0.0 |
| Lung Met to Muscle (ODO4286) | 0.0 | Breast Margin 9100265 | 0.0 |
| Muscle Margin (ODO4286) | 0.0 | Breast Cancer A209073 | 21.3 |
| Lung Malignant Cancer (OD03126) | 0.0 | Breast Margin A209073 | 9.7 |
| Lung Margin (OD03126) | 0.0 | Normal Liver | 0.0 |
| Lung Cancer (OD04404) | 0.0 | Liver Cancer | 0.8 |
| Lung Margin (OD04404) | 0.0 | Liver Cancer 1025 | 0.0 |
| Lung Cancer (OD04565) | 0.0 | Liver Cancer 1026 | 0.0 |
| Lung Margin (OD04565) | 0.0 | Liver Cancer 6004-T | 11.9 |
| Lung Cancer (OD04237-01) | 0.0 | Liver Tissue 6004-N | 100.0 |
| Lung Margin (OD04237-02) | 0.0 | Liver Cancer 6005-T | 0.0 |
| Ocular Mel Met to Liver (ODO4310) | 0.0 | Liver Tissue 6005-N | 0.0 |
| Liver Margin (ODO4310) | 0.0 | Normal Bladder | 23.7 |
| Melanoma Metastasis | 0.0 | Bladder Cancer | 19.9 |
| Lung Margin (OD04321) | 0.0 | Bladder Cancer | 60.7 |
| Normal Kidney | 0.0 | Bladder Cancer (OD04718-01) | 0.0 |
| Kidney Ca, Nuclear grade 2 (OD04338) | 0.0 | Bladder Normal Adjacent | 0.0 |
| | | (OD04718-03) | |
| Kidney Margin (OD04338) | 0.0 | Normal Ovary | 0.0 |
| Kidney Ca Nuclear grade ½ (OD04339) | 0.0 | Ovarian Cancer | 0.0 |
| Kidney Margin (OD04339) | 0.0 | Ovarian Cancer (OD04768-07) | 26.1 |
| Kidney Ca, Clear cell type (OD04340) | 0.0 | Ovary Margin (OD04768-08) | 0.0 |
| Kidney Margin (OD04340) | 0.0 | Normal Stomach | 0.0 |
| Kidney Ca, Nuclear grade 3 (OD04348) | 0.0 | Gastric Cancer 9060358 | 21.0 |
| Kidney Margin (OD04348) | 0.0 | Stomach Margin 9060359 | 0.0 |
| Kidney Cancer (OD04622-01) | 0.0 | Gastric Cancer 9060395 | 0.0 |
| Kidney Margin (OD04622-03) | 0.0 | Stomach Margin 9060394 | 0.0 |
| Kidney Cancer (OD04450-01) | 0.0 | Gastric Cancer 9060397 | 0.0 |
| Kidney Margin (OD04450-03) | 24.7 | Stomach Margin 9060396 | 0.0 |
| Kidney Cancer 8120607 | 0.0 | Gastric Cancer 064005 | 19.8 |

[1172] TABLE TE
Panel 4D
Column A - Rel. Exp. (%) Ag1588, Run 165373604
Column B - Rel. Exp. (%) Ag2015, Run 152153145
Column C - Rel. Exp. (%) Ag2015, Run 152685551

| Tissue Name | A | B | C | Tissue Name | A | B | C |
|---|---|---|---|---|---|---|---|
| Secondary Th1 act | 0.0 | 0.0 | 40.1 | HUVEC IL-1beta | 0.0 | 0.0 | 0.0 |
| Secondary Th2 act | 26.4 | 25.3 | 26.1 | HUVEC IFN gamma | 0.0 | 0.0 | 0.0 |
| Secondary Tr1 act | 12.3 | 58.6 | 0.0 | HUVEC TNFalpha + IFN | 0.0 | 0.0 | 0.0 |
| | | | | gamma | | | |
| Secondary Th1 rest | 0.0 | 11.5 | 0.0 | HUVEC TNFalpha + IL4 | 0.0 | 0.0 | 0.0 |
| Secondary Th2 rest | 16.6 | 43.8 | 31.0 | HUVEC IL-11 | 0.0 | 0.0 | 0.0 |
| Secondary Tr1 rest | 42.6 | 24.5 | 14.2 | Lung Microvascular EC none | 0.0 | 0.0 | 0.0 |
| Primary Th1 act | 0.0 | 17.3 | 25.0 | Lung Microvascular EC | 0.0 | 0.0 | 0.0 |
| | | | | TNFalpha + IL-1beta | | | |
| Primary Th2 act | 0.0 | 0.0 | 0.0 | Microvascular Dermal EC | 0.0 | 0.0 | 0.0 |
| | | | | none | | | |
| Primary Tr1 act | 0.0 | 27.5 | 0.0 | Microsvasular Dermal EC | 0.0 | 0.0 | 24.0 |
| | | | | TNFalpha + IL-1beta | | | |
| Primary Th1 rest | 18.6 | 69.7 | 12.3 | Bronchial epithelium | 0.0 | 0.0 | 0.0 |
| | | | | TNFalpha + IL1beta | | | |
| Primary Th2 rest | 13.9 | 31.6 | 0.0 | Small airway epithelium none | 0.0 | 0.0 | 0.0 |
| Primary Tr1 rest | 0.0 | 0.0 | 0.0 | Small airway epithelium | 0.0 | 0.0 | 0.0 |
| | | | | TNFalpha + IL-1beta | | | |
| CD45RA CD4 | 0.0 | 0.0 | 12.6 | Coronery artery SMC rest | 0.0 | 44.4 | 0.0 |
| lymphocyte act | | | | | | | |
| CD45RO CD4 | 23.0 | 0.0 | 0.0 | Coronery artery SMC | 0.0 | 0.0 | 0.0 |
| lymphocyte act | | | | TNFalpha + IL-1beta | | | |
| CD8 lymphocyte act | 0.0 | 0.0 | 0.0 | Astrocytes rest | 0.0 | 0.0 | 27.5 |
| Secondary CD8 | 0.0 | 0.0 | 0.0 | Astrocytes TNFalpha + IL- | 0.0 | 0.0 | 0.0 |
| lymphocyte rest | | | | 1beta | | | |
| Secondary CD8 | 27.5 | 0.0 | 0.0 | KU-812 (Basophil) rest | 0.0 | 0.0 | 0.0 |
| lymphocyte act | | | | | | | |
| CD4 lymphocyte none | 13.1 | 0.0 | 13.2 | KU-812 (Basophil) | 0.0 | 0.0 | 41.8 |
| | | | | PMA/ionomycin | | | |
| 2ry Th1/Th2/Tr1 anti- | 0.0 | 23.2 | 29.5 | CCD1106 (Keratinocytes) | 0.0 | 0.0 | 0.0 |
| CD95 CH11 | | | | none | | | |
| LAK cells rest | 15.2 | 12.0 | 0.0 | CCD1106 (Keratinocytes) | 0.0 | 0.0 | 24.7 |
| | | | | TNFalpha + IL-1beta | | | |
| LAK cells IL-2 | 0.0 | 31.6 | 0.0 | Liver cirrhosis | 100.0 | 100.0 | 100.0 |
| LAK cells IL-2 + IL-12 | 16.6 | 33.2 | 0.0 | Lupus kidney | 0.0 | 0.0 | 0.0 |
| LAK cells IL-2 + IFN | 0.0 | 0.0 | 15.6 | NCI-H292 none | 0.0 | 0.0 | 0.0 |
| gamma | | | | | | | |
| LAK cells IL-2 + IL-18 | 0.0 | 0.0 | 25.3 | NCI-H292 IL-4 | 0.0 | 26.6 | 0.0 |
| LAK cells | 0.0 | 0.0 | 29.7 | NCI-H292 IL-9 | 0.0 | 0.0 | 0.0 |
| PMA/ionomycin | | | | | | | |
| NK Cells IL-2 rest | 35.6 | 25.5 | 20.3 | NCI-H292 IL-13 | 0.0 | 0.0 | 0.0 |
| Two Way MLR 3 day | 0.0 | 0.0 | 0.0 | NCI-H292 IFN gamma | 0.0 | 23.3 | 0.0 |
| Two Way MLR 5 day | 0.0 | 0.0 | 24.1 | HPAEC none | 0.0 | 0.0 | 0.0 |
| Two Way MLR 7 day | 0.0 | 0.0 | 0.0 | HPAEC TNFalpha + IL-1 | 0.0 | 0.0 | 0.0 |
| | | | | beta | | | |
| PBMC rest | 0.0 | 12.3 | 0.0 | Lung fibroblast none | 0.0 | 14.2 | 0.0 |
| PBMC PWM | 10.1 | 0.0 | 0.0 | Lung fibroblast TNFalpha + | 0.0 | 0.0 | 0.0 |
| | | | | IL-1 beta | | | |
| PBMC PHA-L | 0.0 | 0.0 | 24.3 | Lung fibroblast IL-4 | 0.0 | 25.7 | 0.0 |
| Ramos (B cell) none | 0.0 | 0.0 | 0.0 | Lung fibroblast IL-9 | 0.0 | 0.0 | 0.0 |
| Ramos (B cell) | 0.0 | 16.3 | 0.0 | Lung fibroblast IL-13 | 0.0 | 19.3 | 0.0 |
| ionomycin | | | | | | | |
| B lymphocytes PWM | 0.0 | 13.7 | 43.2 | Lung fibroblast IFN gamma | 0.0 | 0.0 | 0.0 |
| B lymphocytes CD40L | 0.0 | 20.2 | 0.0 | Dermal fibroblast CCD1070 | 0.0 | 0.0 | 30.1 |
| and IL-4 | | | | rest | | | |
| EOL-1 dbcAMP | 0.0 | 0.0 | 0.0 | Dermal fibroblast CCD1070 | 57.4 | 40.9 | 25.7 |
| | | | | TNFalpha | | | |
| EOL-1 dbcAMP | 0.0 | 11.0 | 0.0 | Dermal fibroblast CCD1070 | 0.0 | 0.0 | 0.0 |
| PMA/ionomycin | | | | IL-1 beta | | | |
| Dendritic cells none | 0.0 | 0.0 | 0.0 | Dermal fibroblast | 0.0 | 0.0 | 0.0 |
| | | | | gamma | | | |
| Dendritic cells LPS | 0.0 | 0.0 | 0.0 | Dermal fibroblast IL-4 | 0.0 | 0.0 | 0.0 |
| Dendritic cells anti- | 0.0 | 22.5 | 0.0 | IBD Colitis 2 | 0.0 | 0.0 | 0.0 |
| CD40 | | | | | | | |
| Monocytes rest | 0.0 | 0.0 | 23.2 | IBD Crohn's | 0.0 | 0.0 | 24.8 |
| Monocytes LPS | 0.0 | 0.0 | 22.7 | Colon | 0.0 | 0.0 | 29.9 |
| Macrophages rest | 0.0 | 0.0 | 24.5 | Lung | 0.0 | 22.5 | 56.3 |
| Macrophages LPS | 0.0 | 0.0 | 0.0 | Thymus | 14.7 | 0.0 | 0.0 |
| HUVEC none | 0.0 | 18.7 | 0.0 | Kidney | 0.0 | 0.0 | 0.0 |
| HUVEC starved | 0.0 | 0.0 | 0.0 | | | | |

[1173] Panel 1.3D Summary: Ag1588/Ag2015 Highest expression was detected in a lung cancer cell line (CTs=29).

[1174] Panel 2D Summary: Ag2015 Highest expression was detected in normal liver tissue (CT=33)

[1175] Panel 4D Summary: Ag2015 Highest expression was detected in liver cirrhosis (CTs=32-34).

[1176] U. CG53530-03: Olfactory Receptor

[1177] Expression of full-length physical clone CG53530-03 was assessed using the primer-probe set g1194 described in Table UA. Results of the RTQ-PCR runs are shown in Table UB

TABLE UA
Probe Name Ag1194

| | | | Start | SEQ ID |
|---|---|---|---|---|
| Primers | Sequences | Length | Position | No |
| Forward | 5′-gggaaaccttcttattgtggtca-3′ | 23 | 126 | 1220 |
| Probe | TET-5′-tgacctccgacccacacctgca-3′- | 22 | 152 | 1221 |
| | TAMRA | | | |
| Reverse | 5′-gattgcccaagagaaaatacatgg-3′ | 24 | 179 | 1222 |

[1178] TABLE UB
Panel 1.3D
Column A - Rel. Exp.(%) Ag1194, Run 153594145

| Tissue Name | A | Tissue Name | A |
|---|---|---|---|
| Liver adenocarcinoma | 0.0 | Kidney (fetal) | 0.0 |
| Pancreas | 56.3 | Renal ca. 786-0 | 0.0 |
| Pancreatic ca. | 0.0 | Renal ca. A498 | 0.0 |
| CAPAN 2 | | | |
| Adrenal gland | 0.0 | Renal ca. RXF 393 | 0.0 |
| Thyroid | 0.0 | Renal ca. ACHN | 0.0 |
| Salivary gland | 0.0 | Renal ca. UO-31 | 0.0 |
| Pituitary gland | 5.2 | Renal ca. TK-10 | 0.0 |
| Brain (fetal) | 7.0 | Liver | 0.0 |
| Brain (whole) | 0.0 | Liver (fetal) | 0.0 |
| Brain (amygdala) | 10.7 | Liver ca. (hepatoblast) HepG2 | 10.5 |
| Brain (cerebellum) | 0.0 | Lung | 0.0 |
| Brain (hippocampus) | 0.0 | Lung (fetal) | 0.0 |
| Brain (substantia | 0.0 | Lung ca. (small cell) LX-1 | 0.0 |
| nigra) | | | |
| Brain (thalamus) | 0.0 | Lung ca. (small cell) NCI-H69 | 0.0 |
| Cerebral Cortex | 9.5 | Lung ca. (s. cell var.) SHP-77 | 5.5 |
| Spinal cord | 0.0 | Lung ca. (large cell) NCI-H460 | 0.0 |
| glio/astro U87-MG | 0.0 | Lung ca. (non-sm. cell) A549 | 0.0 |
| glio/astro U-118-MG | 0.0 | Lung ca. (non-s. cell) NCI-H23 | 0.0 |
| astrocytoma SW1783 | 0.0 | Lung ca. (non-s. cell) HOP-62 | 0.0 |
| neuro*; met SK-N-AS | 0.0 | Lung ca. (non-s. cl) NCI-H522 | 0.0 |
| astrocytoma SF-539 | 0.0 | Lung ca. (squam.) SW 900 | 0.0 |
| astrocytoma SNB-75 | 0.0 | Lung ca. (squam.) NCI-H596 | 0.0 |
| glioma SNB-19 | 0.0 | Mammary gland | 0.0 |
| glioma U251 | 0.0 | Breast ca.* (pl.ef) MCF-7 | 0.0 |
| glioma SF-295 | 0.0 | Breast ca.* (pl.ef) MDA-MB-231 | 0.0 |
| Heart (Fetal) | 0.0 | Breast ca.* (pl.ef) T47D | 0.0 |
| Heart | 0.0 | Breast ca. BT-549 | 0.0 |
| Skeletal muscle (Fetal) | 18.3 | Breast ca. MDA-N | 0.0 |
| Skeletal muscle | 0.0 | Ovary | 7.5 |
| Bone marrow | 0.0 | Ovarian ca. OVCAR-3 | 0.0 |
| Thymus | 0.0 | Ovarian ca. OVCAR-4 | 0.0 |
| Spleen | 14.8 | Ovarian ca. OVCAR-5 | 0.0 |
| Lymph node | 0.0 | Ovarian ca. OVCAR-8 | 0.0 |
| Colorectal | 100.0 | Ovarian ca. IGROV-1 | 0.0 |
| Stomach | 0.0 | Ovarian ca. (ascites) SK-OV-3 | 0.0 |
| Small intestine | 0.0 | Uterus | 0.0 |
| Colon ca. SW480 | 0.0 | Placenta | 4.4 |
| Colon ca.* SW620 | 0.0 | Prostate | 0.0 |
| (SW480 met) | | | |
| Colon ca. HT29 | 0.0 | Prostate ca.* (bone met) PC-3 | 0.0 |
| Colon ca. HCT-116 | 0.0 | Testis | 28.5 |
| Colon ca. CaCo-2 | 0.0 | Melanoma Hs688(A).T | 0.0 |
| CC Well to Mod Diff | 0.0 | Melanoma* (met) Hs688(B).T | 0.0 |
| (ODO3866) | | | |
| Colon ca. HCC-2998 | 0.0 | Melanoma UACC-62 | 0.0 |
| Gastric ca. (liver met) | 0.0 | Melanoma M14 | 0.0 |
| NCI-N87 | | | |
| Bladder | 57.4 | Melanoma LOX IMVI | 4.7 |
| Trachea | 0.0 | Melanoma* (met) SK-MEL-5 | 0.0 |
| Kidney | 0.0 | Adipose | 0.0 |

[1179] Panel 1.3D Summary: Ag1194 Expression of the CG53530-03 gene was highest in colon (CT=32.4) and was primarily associated with normal tissue. Significant gene expression was also detected in bladder, pancreas, and testis. Expression of this gene was downregulated in colon and pancreatic cancer cell lines when compared to the appropriate normal controls. Therapeutic modulation of the activity of this gene or its protein product using nucleic acid, protein, antibody or small molecule drugs is useful in the treatment of colon or pancreatic cancer.

[1180] Panel 2D Summary: Ag1194 Prominent expression was detected in normal colon and bladder tissues, in agreement with the results in Panel 1.3D. This gene was expressed at higher levels in normal colon and bladder tissues than in malignant colon and bladder tissues. Targeting this gene or its protein product with small molecule, antibody, or protein therapeutics is useful in the treatment of colon and bladder cancers.

[1181] V. CG53719-02: Olfactory Receptor

[1182] Expression of gene CG53719-02 was assessed using the primer-probe set Ag379, described in Table VA. Results of the RTQ-PCR runs are shown in Tables VB and VC.

TABLE VA
Probe Name Ag379

| | | | Start | SEQ ID |
|---|---|---|---|---|
| Primers | Sequences | Length | Position | No |
| Forward | 5′-tgtgtccgattagtggccttc-3′ | 21 | 442 | 1223 |
| Probe | TET-5′-catcagtatggatagaaaaccacctgccc | 31 | 465 | 1224 |
| | tg-3′-TAMRA | | | |
| Reverse | 5′-ctcgggacataagcactgca-3′ | 20 | 498 | 1225 |

[1183] TABLE VB
Panel 1.3D
Column A - Rel. Exp. (%) Ag379, Run 153691589
Column B - Rel. Exp. (%) Ag379, Run 153789843

| Tissue Name | A | B | Tissue Name | A | B |
|---|---|---|---|---|---|
| Liver adenocarcinoma | 0.0 | 4.6 | Kidney (fetal) | 1.4 | 0.0 |
| Pancreas | 0.0 | 0.0 | Renal ca. 786-0 | 0.0 | 3.3 |
| Pancreatic ca. CAPAN 2 | 0.0 | 0.0 | Renal ca. A498 | 6.3 | 0.0 |
| Adrenal gland | 0.0 | 0.0 | Renal ca. RXF 393 | 4.3 | 0.0 |
| Thyroid | 4.5 | 0.0 | Renal ca. ACHN | 4.8 | 0.0 |
| Salivary gland | 0.0 | 0.0 | Renal ca. UO-31 | 2.0 | 0.0 |
| Pituitary gland | 0.0 | 0.0 | Renal ca. TK-10 | 0.0 | 3.2 |
| Brain (fetal) | 2.4 | 0.0 | Liver | 0.0 | 3.1 |
| Brain (whole) | 2.3 | 7.4 | Liver (fetal) | 0.0 | 0.0 |
| Brain (amygdala) | 0.0 | 0.0 | Liver ca. (hepatoblast) HepG2 | 0.0 | 0.0 |
| Brain (cerebellum) | 2.1 | 0.0 | Lung | 1.9 | 3.3 |
| Brain (hippocampus) | 2.4 | 2.2 | Lung (fetal) | 0.0 | 0.0 |
| Brain (substantia nigra) | 0.0 | 0.0 | Lung ca. (small cell) LX-1 | 2.6 | 0.0 |
| Brain (thalamus) | 0.0 | 2.1 | Lung ca. (small cell) NCI-H69 | 0.0 | 0.0 |
| Cerebral Cortex | 2.2 | 28.1 | Lung ca. (s. cell var.) SHP-77 | 2.2 | 0.0 |
| Spinal cord | 3.1 | 3.1 | Lung ca. (large cell) NCI-H460 | 2.2 | 5.0 |
| glio/astro U87-MG | 0.0 | 3.5 | Lung ca. (non-sm. cell) A549 | 2.3 | 3.1 |
| glio/astro U-118-MG | 0.8 | 9.6 | Lung ca. (non-s. cell) NCI-H23 | 0.0 | 0.0 |
| astrocytoma SW1783 | 2.0 | 0.0 | Lung ca. (non-s. cell) HOP-62 | 28.1 | 2.8 |
| neuro*; met SK-N-AS | 4.5 | 0.0 | Lung ca. (non-s. cl) NCI-H522 | 7.1 | 0.0 |
| astrocytoma SF-539 | 4.5 | 18.4 | Lung ca. (squam.) SW 900 | 1.9 | 0.0 |
| astrocytoma SNB-75 | 9.2 | 0.0 | Lung ca. (squam.) NCI-H596 | 0.0 | 0.0 |
| glioma SNB-19 | 6.0 | 15.4 | Mammary gland | 0.0 | 0.0 |
| glioma U251 | 4.0 | 3.5 | Breast ca.* (pl. ef) MCF-7 | 8.0 | 2.1 |
| glioma SF-295 | 5.4 | 0.0 | Breast ca.* (pl. ef) MDA-MB- | 2.4 | 7.9 |
| | | | 231 | | |
| Heart (Fetal) | 9.0 | 0.0 | Breast ca.* (pl. ef) T47D | 0.0 | 0.0 |
| Heart | 0.0 | 0.0 | Breast ca. BT-549 | 0.0 | 0.0 |
| Skeletal muscle (Fetal) | 0.0 | 3.4 | Breast ca. MDA-N | 2.3 | 0.0 |
| Skeletal muscle | 2.9 | 2.4 | Ovary | 2.6 | 0.0 |
| Bone marrow | 5.9 | 0.0 | Ovarian ca. OVCAR-3 | 0.0 | 0.0 |
| Thymus | 0.0 | 0.0 | Ovarian ca. OVCAR-4 | 0.0 | 0.0 |
| Spleen | 0.0 | 0.0 | Ovarian ca. OVCAR-5 | 4.9 | 0.0 |
| Lymph node | 1.7 | 4.0 | Ovarian ca. OVCAR-8 | 7.1 | 6.4 |
| Colorectal | 8.8 | 6.8 | Ovarian ca. IGROV-1 | 2.2 | 0.0 |
| Stomach | 0.0 | 0.0 | Ovarian ca. (ascites) SK-OV-3 | 0.0 | 5.8 |
| Small intestine | 0.0 | 0.0 | Uterus | 1.8 | 0.0 |
| Colon ca. SW480 | 0.0 | 4.2 | Placenta | 0.0 | 0.0 |
| Colon ca.* SW620 (SW480 met) | 4.5 | 0.0 | Prostate | 2.0 | 3.7 |
| Colon ca. HT29 | 4.9 | 0.0 | Prostate ca.* (bone met) PC-3 | 3.6 | 3.2 |
| Colon ca. HCT-116 | 2.8 | 0.0 | Testis | 100.0 | 100.0 |
| Colon ca. CaCo-2 | 0.0 | 0.0 | Melanoma Hs688(A).T | 0.0 | 3.4 |
| CC Well to Mod Diff | 0.0 | 0.0 | Melanoma* (met) Hs688(B).T | 0.0 | 0.0 |
| (ODO3866) | | | | | |
| Colon ca. HCC-2998 | 2.3 | 0.0 | Melanoma UACC-62 | 2.1 | 0.0 |
| Gastric ca. (liver met) NCI-N87 | 0.0 | 0.0 | Melanoma M14 | 0.0 | 4.1 |
| Bladder | 0.0 | 4.7 | Melanoma LOX IMVI | 2.5 | 0.0 |
| Trachea | 6.6 | 0.0 | Melanoma* (met) SK-MEL-5 | 0.0 | 0.0 |
| Kidney | 0.0 | 0.0 | Adipose | 2.0 | 0.0 |

[1184] TABLE VC
Panel 4.1D
Column A - Rel. Exp.(%) Ag379, Run 169827850

| Tissue Name | A | Tissue Name | A |
|---|---|---|---|
| Secondary Th1 act | 0.0 | HUVEC IL-1beta | 0.0 |
| Secondary Th2 act | 0.0 | HUVEC IFN gamma | 0.0 |
| Secondary Tr1 act | 5.3 | HUVEC TNF alpha + IFN gamma | 0.0 |
| Secondary Th1 rest | 0.0 | HUVEC TNF alpha + IL4 | 0.0 |
| Secondary Th2 rest | 0.0 | HUVEC IL-11 | 0.0 |
| Secondary Tr1 rest | 0.0 | Lung Microvascular EC none | 0.0 |
| Primary Th1 act | 0.0 | Lung Microvascular EC TNF alpha + IL- | 0.0 |
| | | 1beta | |
| Primary Th2 act | 16.6 | Microvascular Dermal EC none | 0.0 |
| Primary Tr1 act | 0.0 | Microsvasular Dermal EC TNF alpha + IL- | 0.0 |
| | | 1beta | |
| Primary Th1 rest | 0.0 | Bronchial epithelium TNF alpha + IL1beta | 0.0 |
| Primary Th2 rest | 0.0 | Small airway epithelium none | 0.0 |
| Primary Tr1 rest | 0.0 | Small airway epithelium TNF alpha + IL- | 0.0 |
| | | 1beta | |
| CD45RA CD4 lymphocyte act | 0.0 | Coronery artery SMC rest | 0.0 |
| CD45RO CD4 lymphocyte act | 0.0 | Coronery artery SMC TNF alpha + IL-1beta | 0.0 |
| CD8 lymphocyte act | 0.0 | Astrocytes rest | 0.0 |
| Secondary CD8 lymphocyte rest | 0.0 | Astrocytes TNF alpha + IL-1beta | 4.5 |
| Secondary CD8 lymphocyte act | 6.0 | KU-812 (Basophil) rest | 0.0 |
| CD4 lymphocyte none | 0.0 | KU-812 (Basophil) PMA/ionomycin | 0.0 |
| 2ry Th1/Th2/Tr1 anti-CD95 | 0.0 | CCD1106 (Keratinocytes) none | 0.0 |
| CH11 | | | |
| LAK cells rest | 0.0 | CCD1106 (Keratinocytes) TNF alpha + IL- | 5.0 |
| | | 1beta | |
| LAK cells IL-2 | 0.0 | Liver cirrhosis | 13.2 |
| LAK cells IL-2 + IL-12 | 0.0 | NCI-H292 none | 97.3 |
| LAK cells IL-2 + IFN gamma | 0.0 | NCI-H292 IL-4 | 50.0 |
| LAK cells IL-2 + IL-18 | 0.0 | NCI-H292 IL-9 | 47.0 |
| LAK cells PMA/ionomycin | 0.0 | NCI-H292 IL-13 | 56.6 |
| NK Cells IL-2 rest | 0.0 | NCI-H292 IFN gamma | 100.0 |
| Two Way MLR 3 day | 0.0 | HPAEC none | 0.0 |
| Two Way MLR 5 day | 9.3 | HPAEC TNF alpha + IL-1beta | 0.0 |
| Two Way MLR 7 day | 0.0 | Lung fibroblast none | 0.0 |
| PBMC rest | 0.0 | Lung fibroblast TNF alpha + IL-1beta | 0.0 |
| PBMC PWM | 0.0 | Lung fibroblast IL-4 | 0.0 |
| PBMC PHA-L | 0.0 | Lung fibroblast IL-9 | 0.0 |
| Ramos (B cell) none | 0.0 | Lung fibroblast IL-13 | 0.0 |
| Ramos (B cell) ionomycin | 0.0 | Lung fibroblast IFN gamma | 0.0 |
| B lymphocytes PWM | 0.0 | Dermal fibroblast CCD1070 rest | 0.0 |
| B lymphocytes CD40L and IL-4 | 0.0 | Dermal fibroblast CCD1070 TNF alpha | 0.0 |
| EOL-1 dbcAMP | 0.0 | Dermal fibroblast CCD1070 IL-1beta | 11.5 |
| EOL-1 dbcAMP | 0.0 | Dermal fibroblast IFN gamma | 0.0 |
| PMA/ionomycin | | | |
| Dendritic cells none | 0.0 | Dermal fibroblast IL-4 | 0.0 |
| Dendritic cells LPS | 0.0 | Dermal Fibroblasts rest | 0.0 |
| Dendritic cells anti-CD40 | 0.0 | Neutrophils TNFa + LPS | 0.0 |
| Monocytes rest | 0.0 | Neutrophils rest | 0.0 |
| Monocytes LPS | 0.0 | Colon | 0.0 |
| Macrophages rest | 6.2 | Lung | 0.0 |
| Macrophages LPS | 0.0 | Thymus | 8.0 |
| HUVEC none | 0.0 | Kidney | 0.0 |
| HUVEC starved | 0.0 | | |

[1185] Panel 1.3D Summary: Ag379 Highest expression of this gene was detected in testis (CTs=32-33). Therapeutic modulation of this gene, expressed protein and/or use of antibodies or small molecule drugs targeting the gene or gene product is useful in the treatment of disorders of the testis, such as infertility.

[1186] Panel 4.1D Summary: Ag379 Highest expression of this gene was detected in NCI-H292 cells stimulated by IFN-gamma (CT=34). The gene was also expressed in untreated samples from the NCI-H292 cell line, a human airway epithelial cell line that produces mucins. Mucus overproduction is an important feature of bronchial asthma and chronic obstructive pulmonary disease samples. The expression of the transcript in a mucoepidermoid cell line that is often used as a model for airway epithelium (NCI-H292 cells) showed that this transcript may be important in the proliferation or activation of airway epithelium. Therapeutic modulation of this gene, expressed protein and/or use of antibodies or small molecule drugs targeting the gene or gene product is useful in the treatment of inflammation in lung epithelia in chronic obstructive pulmonary disease, asthma, allergy, and emphysema.

[1187] W. CG53746-04: Odorant Receptor S25

[1188] Expression of full-length physical clone CG53746-04 was assessed using the primer-probe set Ag2690, described in Table WA. Results of the RTQ-PCR runs are shown in Tables WB and WC.

TABLE WA
Probe Name Ag2690

| | | | Start | SEQ ID |
|---|---|---|---|---|
| Primers | Sequences | Length | Position | No |
| Forward | 5′-agaacaaggtggtgtctgtgtt-3′ | 22 | 1456 | 1226 |
| Probe | TET-5′-ctacaccgtggtgattcccatgttga-3′- | 26 | 1478 | 1227 |
| | TAMRA | | | |
| Reverse | 5′-cttgttcctgaggctgtagatc-3′ | 22 | 1511 | 1228 |

[1189] TABLE WB
Panel 2D
Column A - Rel. Exp.(%) Ag2690, Run 153131447

| Tissue Name | A | Tissue Name | A |
|---|---|---|---|
| Normal Colon | 8.4 | Kidney Margin 8120608 | 0.0 |
| CC Well to Mod Diff (ODO3866) | 0.0 | Kidney Cancer 8120613 | 0.0 |
| CC Margin (ODO3866) | 0.0 | Kidney Margin 8120614 | 1.9 |
| CC Gr.2 rectosigmoid (ODO3868) | 0.0 | Kidney Cancer 9010320 | 0.0 |
| CC Margin (ODO3868) | 0.2 | Kidney Margin 9010321 | 0.6 |
| CC Mod Diff (ODO3920) | 0.0 | Normal Uterus | 0.0 |
| CC Margin (ODO3920) | 1.1 | Uterine Cancer 064011 | 3.4 |
| CC Gr.2 ascend colon (ODO3921) | 0.0 | Normal Thyroid | 0.0 |
| CC Margin (ODO3921) | 0.0 | Thyroid Cancer | 0.8 |
| CC from Partial Hepatectomy | 0.0 | Thyroid Cancer A302152 | 0.0 |
| (ODO4309) Mets | | | |
| Liver Margin (ODO4309) | 0.0 | Thyroid Margin A302153 | 0.0 |
| Colon mets to lung (OD04451-01) | 2.6 | Normal Breast | 66.9 |
| Lung Margin (OD04451-02) | 10.0 | Breast Cancer | 0.0 |
| Normal Prostate 6546-1 | 10.0 | Breast Cancer (OD04590-01) | 0.7 |
| Prostate Cancer (OD04410) | 4.2 | Breast Cancer Mets (OD04590-03) | 0.0 |
| Prostate Margin (OD04410) | 13.7 | Breast Cancer Metastasis | 0.0 |
| Prostate Cancer (OD04720-01) | 62.4 | Breast Cancer | 10.1 |
| Prostate Margin (OD04720-02) | 27.4 | Breast Cancer | 85.3 |
| Normal Lung | 100.0 | Breast Cancer 9100266 | 13.3 |
| Lung Met to Muscle (ODO4286) | 0.5 | Breast Margin 9100265 | 22.2 |
| Muscle Margin (ODO4286) | 0.0 | Breast Cancer A209073 | 51.4 |
| Lung Malignant Cancer (OD03126) | 5.9 | Breast Margin A209073 | 78.5 |
| Lung Margin (OD03126) | 39.8 | Normal Liver | 0.0 |
| Lung Cancer (OD04404) | 4.0 | Liver Cancer | 2.0 |
| Lung Margin (OD04404) | 17.9 | Liver Cancer 1025 | 0.1 |
| Lung Cancer (OD04565) | 1.1 | Liver Cancer 1026 | 0.0 |
| Lung Margin (OD04565) | 19.8 | Liver Cancer 6004-T | 0.5 |
| Lung Cancer (OD04237-01) | 0.0 | Liver Tissue 6004-N | 0.9 |
| Lung Margin (OD04237-02) | 25.0 | Liver Cancer 6005-T | 0.0 |
| Ocular Mel Met to Liver (ODO4310) | 0.0 | Liver Tissue 6005-N | 0.0 |
| Liver Margin (ODO4310) | 0.0 | Normal Bladder | 4.1 |
| Melanoma Metastasis | 0.0 | Bladder Cancer | 0.0 |
| Lung Margin (OD04321) | 47.0 | Bladder Cancer | 4.0 |
| Normal Kidney | 6.0 | Bladder Cancer (OD04718-01) | 9.9 |
| Kidney Ca, Nuclear grade 2 (OD04338) | 2.9 | Bladder Normal Adjacent | 0.6 |
| | | (OD04718-03) | |
| Kidney Margin (OD04338) | 8.6 | Normal Ovary | 0.0 |
| Kidney Ca Nuclear grade ½ (OD04339) | 0.0 | Ovarian Cancer | 0.6 |
| Kidney Margin (OD04339) | 2.3 | Ovarian Cancer (OD04768-07) | 4.7 |
| Kidney Ca, Clear cell type (OD04340) | 0.0 | Ovary Margin (OD04768-08) | 0.5 |
| Kidney Margin (OD04340) | 0.5 | Normal Stomach | 1.3 |
| Kidney Ca, Nuclear grade 3 (OD04348) | 0.0 | Gastric Cancer 9060358 | 0.0 |
| Kidney Margin (OD04348) | 2.6 | Stomach Margin 9060359 | 2.5 |
| Kidney Cancer (OD04622-01) | 0.6 | Gastric Cancer 9060395 | 0.0 |
| Kidney Margin (OD04622-03) | 0.8 | Stomach Margin 9060394 | 1.7 |
| Kidney Cancer (OD04450-01) | 0.0 | Gastric Cancer 9060397 | 0.0 |
| Kidney Margin (OD04450-03) | 2.8 | Stomach Margin 9060396 | 2.2 |
| Kidney Cancer 8120607 | 0.0 | Gastric Cancer 064005 | 2.4 |

[1190] TABLE WC
Panel 4D
Column A - Rel. Exp.(%) Ag2690, Run 153131451

| Tissue Name | A | Tissue Name | A |
|---|---|---|---|
| Secondary Th1 act | 0.0 | HUVEC IL-1beta | 0.0 |
| Secondary Th2 act | 0.0 | HUVEC IFN gamma | 0.0 |
| Secondary Tr1 act | 0.1 | HUVEC TNF alpha + IFN gamma | 0.0 |
| Secondary Th1 rest | 0.0 | HUVEC TNF alpha + IL4 | 0.0 |
| Secondary Th2 rest | 0.0 | HUVEC IL-11 | 0.0 |
| Secondary Tr1 rest | 0.0 | Lung Microvascular EC none | 0.0 |
| Primary Th1 act | 0.0 | Lung Microvascular EC TNF alpha + IL- | 0.2 |
| | | 1beta | |
| Primary Th2 act | 0.0 | Microvascular Dermal EC none | 0.3 |
| Primary Tr1 act | 0.0 | Microsvasular Dermal EC TNF alpha + IL- | 0.0 |
| | | 1beta | |
| Primary Th1 rest | 0.0 | Bronchial epithelium TNF alpha + IL1beta | 0.1 |
| Primary Th2 rest | 0.0 | Small airway epithelium none | 6.4 |
| Primary Tr1 rest | 0.0 | Small airway epithelium TNF alpha + IL- | 22.1 |
| | | 1beta | |
| CD45RA CD4 lymphocyte act | 0.2 | Coronery artery SMC rest | 0.0 |
| CD45RO CD4 lymphocyte act | 0.0 | Coronery artery SMC TNF alpha + IL-1beta | 0.0 |
| CD8 lymphocyte act | 0.0 | Astrocytes rest | 3.5 |
| Secondary CD8 lymphocyte rest | 0.0 | Astrocytes TNF alpha + IL-1beta | 1.8 |
| Secondary CD8 lymphocyte act | 0.0 | KU-812 (Basophil) rest | 0.0 |
| CD4 lymphocyte none | 0.0 | KU-812 (Basophil) PMA/ionomycin | 0.0 |
| 2ry Th1/Th2/Tr1 anti-CD95 | 0.0 | CCD1106 (Keratinocytes) none | 4.4 |
| CH11 | | | |
| LAK cells rest | 0.0 | CCD1106 (Keratinocytes) TNF alpha + IL- | 0.0 |
| | | 1beta | |
| LAK cells IL-2 | 0.0 | Liver cirrhosis | 1.1 |
| LAK cells IL-2 + IL-12 | 0.0 | Lupus kidney | 1.1 |
| LAK cells IL-2 + IFN gamma | 0.0 | NCI-H292 none | 42.9 |
| LAK cells IL-2 + IL-18 | 0.0 | NCI-H292 IL-4 | 100.0 |
| LAK cells PMA/ionomycin | 0.0 | NCI-H292 IL-9 | 41.8 |
| NK Cells IL-2 rest | 0.0 | NCI-H292 IL-13 | 37.4 |
| Two Way MLR 3 day | 0.0 | NCI-H292 IFN gamma | 15.7 |
| Two Way MLR 5 day | 0.0 | HPAEC none | 0.0 |
| Two Way MLR 7 day | 0.0 | HPAEC TNF alpha + IL-1beta | 0.0 |
| PBMC rest | 0.0 | Lung fibroblast none | 0.3 |
| PBMC PWM | 0.0 | Lung fibroblast TNF alpha + IL-1beta | 0.0 |
| PBMC PHA-L | 0.0 | Lung fibroblast IL-4 | 0.0 |
| Ramos (B cell) none | 0.0 | Lung fibroblast IL-9 | 0.3 |
| Ramos (B cell) ionomycin | 0.0 | Lung fibroblast IL-13 | 0.4 |
| B lymphocytes PWM | 0.2 | Lung fibroblast IFN gamma | 0.6 |
| B lymphocytes CD40L and IL-4 | 0.0 | Dermal fibroblast CCD1070 rest | 0.6 |
| EOL-1 dbcAMP | 0.0 | Dermal fibroblast CCD1070 TNF alpha | 0.0 |
| EOL-1 dbcAMP | 0.0 | Dermal fibroblast CCD1070 IL-1beta | 0.0 |
| PMA/ionomycin | | | |
| Dendritic cells none | 0.0 | Dermal fibroblast IFN gamma | 0.0 |
| Dendritic cells LPS | 0.0 | Dermal fibroblast IL-4 | 0.0 |
| Dendritic cells anti-CD40 | 0.0 | IBD Colitis 2 | 0.5 |
| Monocytes rest | 0.0 | IBD Crohn's | 0.1 |
| Monocytes LPS | 0.0 | Colon | 0.0 |
| Macrophages rest | 0.0 | Lung | 4.5 |
| Macrophages LPS | 0.0 | Thymus | 2.0 |
| HUVEC none | 0.0 | Kidney | 1.5 |
| HUVEC starved | 0.0 | | |

[1191] Panel 2D Summary: Ag2690 Highest expression of this gene was seen in normal lung tissue (CT=30)/. In addition, this gene was overexpressed in normal lung tissue when compared to expression in adjacent malignant tissue. Thus, expression of this gene is useful as a marker of lung cancer. Therapeutic modulation of this gene, expressed protein and/or use of antibodies or small molecule drugs targeting the gene or gene product is useful in the treatment of lung cancer.

[1192] Panel 4D Summary: Ag2690 Highest expression of this gene was seen in IL-4 treated NCI-H292 cells, a human airway epithelial cell line that produces mucins (CT=28). This gene was also expressed in a cluster of treated and untreated samples derived from the NCI-H292 cell line. Mucus overproduction is an important feature of bronchial asthma and chronic obstructive pulmonary disease samples. The transcript was also expressed at lower but still significant levels in small airway epithelium treated with IL-1 beta and TNF-alpha. The expression of the transcript in this mucoepidermoid cell line that is often used as a model for airway epithelium (NCI-H292 cells) showed that this transcript is important in the proliferation or activation of airway epithelium. Therapeutic modulation of this gene, expressed protein and/or use of antibodies or small molecule drugs targeting the gene or gene product is useful in the treatment of inflammation in lung epithelia in chronic obstructive pulmonary disease, asthma, allergy, and emphysema.

[1193] X. CG53767-02: Olfactory Receptor

[1194] Expression of full-length physical clone CG53767-02 was assessed using the primer-probe sets Ag2687 and Ag440, described in Tables XA and XB. Results of the RTQ-PCR runs are shown in Table XC.

TABLE XA
Probe Name Ag2687

| | | | Start | SEQ ID |
|---|---|---|---|---|
| Primers | Sequences | Length | Position | No |
| Forward | 5′-tgtgcatcatcgtcactgtatt-3′ | 22 | 807 | 1229 |
| Probe | TET-5′-tctttgcgacttgaacactatccagca- | 27 | 838 | 1230 |
| | 3′-TAMRA | | | |
| Reverse | 5′-ggagaccactggtgagatatca-3′ | 22 | 874 | 1231 |

[1195] TABLE XB
Probe Name Ag440

| | | | Start | SEQ ID |
|---|---|---|---|---|
| Primers | Sequences | Length | Position | No |
| Forward | 5′-tgctcctcccacctcactg-3′ | 19 | 1058 | 1232 |
| Probe | TET-5′-tgtccatacactatggatttgcttgctttg | 34 | 1080 | 1233 |
| | tcta-3′-TAMRA | | | |
| Reverse | 5′-tgctgttcttgggcctcaa-3′ | 19 | 1115 | 1234 |

[1196] TABLE XC
Panel 4D
Column A - Rel. Exp.(%) Ag2687, Run 153112357

| Tissue Name | A | Tissue Name | A |
|---|---|---|---|
| Secondary Th1 act | 0.0 | HUVEC IL-1beta | 0.0 |
| Secondary Th2 act | 0.0 | HUVEC IFN gamma | 0.0 |
| Secondary Tr1 act | 0.0 | HUVEC TNF alpha + IFN gamma | 0.0 |
| Secondary Th1 rest | 0.0 | HUVEC TNF alpha + IL4 | 0.0 |
| Secondary Th2 rest | 0.0 | HUVEC IL-11 | 0.0 |
| Secondary Tr1 rest | 0.0 | Lung Microvascular EC none | 0.0 |
| Primary Th1 act | 0.0 | Lung Microvascular EC TNF alpha + IL- | 0.0 |
| | | 1beta | |
| Primary Th2 act | 0.0 | Microvascular Dermal EC none | 0.2 |
| Primary Tr1 act | 0.0 | Microsvasular Dermal EC TNF alpha + IL- | 0.0 |
| | | 1beta | |
| Primary Th1 rest | 0.0 | Bronchial epithelium TNF alpha + IL1beta | 0.5 |
| Primary Th2 rest | 0.0 | Small airway epithelium none | 2.2 |
| Primary Tr1 rest | 0.0 | Small airway epithelium TNF alpha + IL- | 17.7 |
| | | 1beta | |
| CD45RA CD4 lymphocyte act | 0.0 | Coronery artery SMC rest | 0.2 |
| CD45RO CD4 lymphocyte act | 0.0 | Coronery artery SMC TNF alpha + IL-1beta | 0.0 |
| CD8 lymphocyte act | 0.0 | Astrocytes rest | 1.4 |
| Secondary CD8 lymphocyte rest | 0.0 | Astrocytes TNF alpha + IL-1beta | 1.3 |
| Secondary CD8 lymphocyte act | 0.0 | KU-812 (Basophil) rest | 0.0 |
| CD4 lymphocyte none | 0.0 | KU-812 (Basophil) PMA/ionomycin | 0.2 |
| 2ry Th1/Th2/Tr1 anti-CD95 | 0.0 | CCD1106 (Keratinocytes) none | 1.7 |
| CH11 | | | |
| LAK cells rest | 0.0 | CCD1106 (Keratinocytes) TNF alpha + IL- | 0.0 |
| | | 1beta | |
| LAK cells IL-2 | 0.0 | Liver cirrhosis | 1.2 |
| LAK cells IL-2 + IL-12 | 0.0 | Lupus kidney | 0.7 |
| LAK cells IL-2 + IFN gamma | 0.0 | NCI-H292 none | 54.7 |
| LAK cells IL-2 + IL-18 | 0.0 | NCI-H292 IL-4 | 100.0 |
| LAK cells PMA/ionomycin | 0.0 | NCI-H292 IL-9 | 40.1 |
| NK Cells IL-2 rest | 0.0 | NCI-H292 IL-13 | 38.2 |
| Two Way MLR 3 day | 0.0 | NCI-H292 IFN gamma | 9.9 |
| Two Way MLR 5 day | 0.0 | HPAEC none | 0.0 |
| Two Way MLR 7 day | 0.0 | HPAEC TNF alpha + IL-1beta | 0.0 |
| PBMC rest | 0.0 | Lung fibroblast none | 0.4 |
| PBMC PWM | 0.0 | Lung fibroblast TNF alpha + IL-1beta | 0.0 |
| PBMC PHA-L | 0.0 | Lung fibroblast IL-4 | 0.6 |
| Ramos (B cell) none | 0.2 | Lung fibroblast IL-9 | 0.4 |
| Ramos (B cell) ionomycin | 0.0 | Lung fibroblast IL-13 | 0.3 |
| B lymphocytes PWM | 0.4 | Lung fibroblast IFN gamma | 0.0 |
| B lymphocytes CD40L and IL-4 | 0.0 | Dermal fibroblast CCD1070 rest | 0.4 |
| EOL-1 dbcAMP | 0.0 | Dermal fibroblast CCD1070 TNF alpha | 0.4 |
| EOL-1 dbcAMP | 0.0 | Dermal fibroblast CCD1070 IL-1beta | 0.0 |
| PMA/ionomycin | | | |
| Dendritic cells none | 0.0 | Dermal fibroblast IFN gamma | 0.0 |
| Dendritic cells LPS | 0.0 | Dermal fibroblast IL-4 | 0.4 |
| Dendritic cells anti-CD40 | 0.0 | IBD Colitis 2 | 0.0 |
| Monocytes rest | 0.1 | IBD Crohn's | 0.0 |
| Monocytes LPS | 0.0 | Colon | 0.4 |
| Macrophages rest | 0.0 | Lung | 3.6 |
| Macrophages LPS | 0.0 | Thymus | 10.9 |
| HUVEC none | 0.0 | Kidney | 0.8 |
| HUVEC starved | 0.0 | | |

[1197] Panel 4D Summary: Ag2687 Highest expression of this gene was seen in IL-4 treated NCI-H292 cells, a human airway epithelial cell line that produces mucins (CT=28.8). The gene was also expressed in a cluster of treated and untreated samples derived from the NCI-H292 cell line. Mucus overproduction is an important feature of bronchial asthma and chronic obstructive pulmonary disease samples. The transcript was also expressed at lower but significant levels in small airway epithelium treated with IL-1 beta and TNF-alpha. CG53767-02 gene expression in a mucoepidermoid cell line that is often used as a model for airway epithelium (NCI-H292 cells) showed that this gene is important in the proliferation or activation of airway epithelium. Therapeutic modulation of the activity of this gene or its protein product using nucleic acid, protein, antibody or small molecule drugs is useful in reducing or eliminating the symptoms caused by inflammation in lung epithelia in chronic obstructive pulmonary disease, asthma, allergy, and emphysema.

[1198] Y. CG53776-02: Olfactory Receptor

[1199] Expression of full-length physical clone CG53776-02 was assessed using the primer-probe set Ag7081, described in Table YA. Results of the RTQ-PCR runs are shown in Table YB.

TABLE YA
Probe Name Ag7081

| | | | Start | SEQ ID |
|---|---|---|---|---|
| Primers | Sequences | Length | Position | No |
| Forward | 5′-atctacctggtaaccatatctggtaat-3′ | 27 | 168 | 1235 |
| Probe | TET-5′-ttcttatcagaatttcttctcagctcca- | 28 | 208 | 1236 |
| | 3′-TAMRA | | | |
| Reverse | 5′-gctcagaaagaaatacataggatga-3′ | 25 | 236 | 1237 |

[1200] TABLE YB
General_screening_panel_v1.6
Column A - Rel. Exp.(%) Ag7081, Run 283147418

| Tissue Name | A | Tissue Name | A |
|---|---|---|---|
| Adipose | 0.0 | Renal ca. TK-10 | 0.0 |
| Melanoma* Hs688(A).T | 0.0 | Bladder | 0.0 |
| Melanoma* Hs688(B).T | 0.0 | Gastric ca. (liver met.) NCI-N87 | 0.0 |
| Melanoma* M14 | 0.0 | Gastric ca. KATO III | 0.0 |
| Melanoma* LOXIMVI | 0.0 | Colon ca. SW-948 | 0.0 |
| Melanoma* SK-MEL-5 | 0.0 | Colon ca. SW480 | 0.0 |
| Squamous Cell | 0.0 | Colon ca.* (SW480 met) SW620 | 0.0 |
| carcinoma SCC-4 | | | |
| Testis Pool | 0.0 | Colon ca. HT29 | 0.0 |
| Prostate ca.* (bone met) | 0.0 | Colon ca. HCT-116 | 0.0 |
| PC-3 | | | |
| Prostate Pool | 2.3 | Colon ca. CaCo-2 | 3.6 |
| Placenta | 11.2 | Colon cancer tissue | 0.0 |
| Uterus Pool | 0.0 | Colon ca. SW1116 | 0.0 |
| Ovarian ca. OVCAR-3 | 0.0 | Colon ca. Colo-205 | 0.0 |
| Ovarian ca. SK-OV-3 | 0.0 | Colon ca. SW-48 | 0.0 |
| Ovarian ca. OVCAR-4 | 0.0 | Colon Pool | 0.0 |
| Ovarian ca. OVCAR-5 | 3.6 | Small Intestine Pool | 0.0 |
| Ovarian ca. IGROV-1 | 0.0 | Stomach Pool | 0.0 |
| Ovarian ca. OVCAR-8 | 0.0 | Bone Marrow Pool | 0.0 |
| Ovary | 0.0 | Fetal Heart | 0.0 |
| Breast ca. MCF-7 | 0.0 | Heart Pool | 0.0 |
| Breast ca. MDA-MB-231 | 0.0 | Lymph Node Pool | 0.0 |
| Breast ca. BT 549 | 3.3 | Fetal Skeletal Muscle | 0.0 |
| Breast ca. T47D | 0.0 | Skeletal Muscle Pool | 0.0 |
| Breast ca. MDA-N | 0.0 | Spleen Pool | 0.0 |
| Breast Pool | 0.0 | Thymus Pool | 2.5 |
| Trachea | 3.6 | CNS cancer (glio/astro) U87-MG | 0.0 |
| Lung | 0.0 | CNS cancer (glio/astro) U-118-MG | 3.0 |
| Fetal Lung | 100.0 | CNS cancer (neuro; met) SK-N-AS | 0.0 |
| Lung ca. NCI-N417 | 0.0 | CNS cancer (astro) SF-539 | 0.0 |
| Lung ca. LX-1 | 0.0 | CNS cancer (astro) SNB-75 | 0.0 |
| Lung ca. NCI-H146 | 0.0 | CNS cancer (glio) SNB-19 | 0.0 |
| Lung ca. SHP-77 | 0.0 | CNS cancer (glio) SF-295 | 0.0 |
| Lung ca. A549 | 0.0 | Brain (Amygdala) Pool | 0.0 |
| Lung ca. NCI-H526 | 0.0 | Brain (cerebellum) | 0.0 |
| Lung ca. NCI-H23 | 0.0 | Brain (fetal) | 0.0 |
| Lung ca. NCI-H460 | 0.0 | Brain (Hippocampus) Pool | 0.0 |
| Lung ca. HOP-62 | 0.0 | Cerebral Cortex Pool | 0.0 |
| Lung ca. NCI-H522 | 0.0 | Brain (Substantia nigra) Pool | 0.0 |
| Liver | 0.0 | Brain (Thalamus) Pool | 0.0 |
| Fetal Liver | 0.0 | Brain (whole) | 0.0 |
| Liver ca. HepG2 | 0.0 | Spinal Cord Pool | 0.0 |
| Kidney Pool | 0.0 | Adrenal Gland | 0.0 |
| Fetal Kidney | 0.0 | Pituitary gland Pool | 0.0 |
| Renal ca. 786-0 | 0.0 | Salivary Gland | 0.0 |
| Renal ca. A498 | 0.0 | Thyroid (female) | 0.0 |
| Renal ca. ACHN | 0.0 | Pancreatic ca. CAPAN2 | 0.0 |
| Renal ca. UO-31 | 0.0 | Pancreas Pool | 0.0 |

[1201] General_screening_panel_v1.6 Summary: Ag7081 Low but significant expression of this gene was detected in fetal lung (CT=34.3). The relative overexpression of this gene in fetal lung showed that the protein enhances lung growth or development in the fetus and also acts in a regenerative capacity in the adult.

[1202] Z. CG53803-02: Olfactory Receptor

[1203] Expression of full-length physical clone CG53803-02 was assessed using the primer-probe set Ag2018, described in Table ZA. Results of the RTQ-PCR runs are shown in Tables ZB and ZC.

TABLE ZA
Probe Name Ag2018

| | | | Start | SEQ ID |
|---|---|---|---|---|
| Primers | Sequences | Length | Position | No |
| Forward | 5′-atgctctccggttaaacttctc-3′ | 22 | 544 | 1238 |
| Probe | TET-5′-tggacctaatgtaatcaaccacttcttt | 30 | 566 | 1239 |
| | tg-3′-TAMRA | | | |
| Reverse | 5′-agagccagacacagagatgaga-3′ | 22 | 608 | 1240 |

[1204] TABLE ZB
Panel 2D
Column A - Rel. Exp.(%) Ag2018, Run 152517542

| Tissue Name | A | Tissue Name | A |
|---|---|---|---|
| Normal Colon | 0.0 | Kidney Margin 8120608 | 0.0 |
| CC Well to Mod Diff (ODO3866) | 0.0 | Kidney Cancer 8120613 | 0.0 |
| CC Margin (ODO3866) | 0.8 | Kidney Margin 8120614 | 0.0 |
| CC Gr.2 rectosigmoid (ODO3868) | 0.0 | Kidney Cancer 9010320 | 0.0 |
| CC Margin (ODO3868) | 0.0 | Kidney Margin 9010321 | 0.0 |
| CC Mod Diff (ODO3920) | 0.0 | Normal Uterus | 0.0 |
| CC Margin (ODO3920) | 0.0 | Uterine Cancer 064011 | 0.0 |
| CC Gr.2 ascend colon (ODO3921) | 0.0 | Normal Thyroid | 0.0 |
| CC Margin (ODO3921) | 0.2 | Thyroid Cancer | 0.0 |
| CC from Partial Hepatectomy | 0.0 | Thyroid Cancer A302152 | 0.0 |
| (ODO4309) Mets | | | |
| Liver Margin (ODO4309) | 0.0 | Thyroid Margin A302153 | 0.0 |
| Colon mets to lung (OD04451-01) | 0.0 | Normal Breast | 0.0 |
| Lung Margin (OD04451-02) | 0.0 | Breast Cancer | 0.0 |
| Normal Prostate 6546-1 | 0.0 | Breast Cancer (OD04590-01) | 0.0 |
| Prostate Cancer (OD04410) | 0.0 | Breast Cancer Mets (OD04590-03) | 0.0 |
| Prostate Margin (OD04410) | 0.0 | Breast Cancer Metastasis | 0.0 |
| Prostate Cancer (OD04720-01) | 0.0 | Breast Cancer | 0.0 |
| Prostate Margin (OD04720-02) | 0.0 | Breast Cancer | 0.0 |
| Normal Lung | 0.0 | Breast Cancer 9100266 | 0.0 |
| Lung Met to Muscle (ODO4286) | 0.1 | Breast Margin 9100265 | 100.0 |
| Muscle Margin (ODO4286) | 0.0 | Breast Cancer A209073 | 0.2 |
| Lung Malignant Cancer (OD03126) | 0.0 | Breast Margin A209073 | 0.0 |
| Lung Margin (OD03126) | 0.0 | Normal Liver | 0.0 |
| Lung Cancer (OD04404) | 0.0 | Liver Cancer | 0.0 |
| Lung Margin (OD04404) | 0.0 | Liver Cancer 1025 | 0.0 |
| Lung Cancer (OD04565) | 0.0 | Liver Cancer 1026 | 0.0 |
| Lung Margin (OD04565) | 0.0 | Liver Cancer 6004-T | 0.0 |
| Lung Cancer (OD04237-01) | 0.0 | Liver Tissue 6004-N | 0.0 |
| Lung Margin (OD04237-02) | 0.0 | Liver Cancer 6005-T | 0.0 |
| Ocular Mel Met to Liver (ODO4310) | 0.0 | Liver Tissue 6005-N | 0.0 |
| Liver Margin (ODO4310) | 0.0 | Normal Bladder | 0.0 |
| Melanoma Metastasis | 0.0 | Bladder Cancer | 0.0 |
| Lung Margin (OD04321) | 0.0 | Bladder Cancer | 0.8 |
| Normal Kidney | 0.0 | Bladder Cancer (OD04718-01) | 0.0 |
| Kidney Ca, Nuclear grade 2 (OD04338) | 0.0 | Bladder Normal Adjacent | 0.0 |
| | | (OD04718-03) | |
| Kidney Margin (OD04338) | 0.0 | Normal Ovary | 0.0 |
| Kidney Ca Nuclear grade ½ (OD04339) | 0.0 | Ovarian Cancer | 0.0 |
| Kidney Margin (OD04339) | 0.0 | Ovarian Cancer (OD04768-07) | 0.0 |
| Kidney Ca, Clear cell type (OD04340) | 0.0 | Ovary Margin (OD04768-08) | 0.0 |
| Kidney Margin (OD04340) | 0.0 | Normal Stomach | 0.0 |
| Kidney Ca, Nuclear grade 3 (OD04348) | 0.0 | Gastric Cancer 9060358 | 0.2 |
| Kidney Margin (OD04348) | 0.0 | Stomach Margin 9060359 | 0.0 |
| Kidney Cancer (OD04622-01) | 0.0 | Gastric Cancer 9060395 | 0.0 |
| Kidney Margin (OD04622-03) | 0.0 | Stomach Margin 9060394 | 0.0 |
| Kidney Cancer (OD04450-01) | 0.0 | Gastric Cancer 9060397 | 0.0 |
| Kidney Margin (OD04450-03) | 0.0 | Stomach Margin 9060396 | 0.0 |
| Kidney Cancer 8120607 | 0.0 | Gastric Cancer 064005 | 0.0 |

[1205] TABLE ZC
Panel 4D
Column A - Rel. Exp.(%) Ag2018, Run 152784446

| Tissue Name | A | Tissue Name | A |
|---|---|---|---|
| Secondary Th1 act | 0.0 | HUVEC IL-1beta | 0.0 |
| Secondary Th2 act | 0.0 | HUVEC IFN gamma | 0.0 |
| Secondary Tr1 act | 0.0 | HUVEC TNF alpha + IFN gamma | 0.0 |
| Secondary Th1 rest | 1.4 | HUVEC TNF alpha + IL4 | 0.0 |
| Secondary Th2 rest | 0.0 | HUVEC IL-11 | 0.0 |
| Secondary Tr1 rest | 0.0 | Lung Microvascular EC none | 0.0 |
| Primary Th1 act | 0.0 | Lung Microvascular EC TNF alpha + IL- | 0.0 |
| | | 1beta | |
| Primary Th2 act | 0.0 | Microvascular Dermal EC none | 0.0 |
| Primary Tr1 act | 0.0 | Microsvasular Dermal EC TNF alpha + IL- | 0.0 |
| | | 1beta | |
| Primary Th1 rest | 0.0 | Bronchial epithelium TNF alpha + IL1beta | 0.0 |
| Primary Th2 rest | 0.0 | Small airway epithelium none | 0.0 |
| Primary Tr1 rest | 0.0 | Small airway epithelium TNF alpha + IL- | 0.0 |
| | | 1beta | |
| CD45RA CD4 lymphocyte act | 0.0 | Coronery artery SMC rest | 0.0 |
| CD45RO CD4 lymphocyte act | 0.0 | Coronery artery SMC TNF alpha + IL-1beta | 0.0 |
| CD8 lymphocyte act | 0.0 | Astrocytes rest | 0.0 |
| Secondary CD8 lymphocyte rest | 0.0 | Astrocytes TNF alpha + IL-1beta | 0.0 |
| Secondary CD8 lymphocyte act | 0.0 | KU-812 (Basophil) rest | 0.0 |
| CD4 lymphocyte none | 0.0 | KU-812 (Basophil) PMA/ionomycin | 0.0 |
| 2ry Th1/Th2/Tr1 anti-CD95 | 0.0 | CCD1106 (Keratinocytes) none | 0.0 |
| CH11 | | | |
| LAK cells rest | 0.0 | CCD1106 (Keratinocytes) TNF alpha + IL- | 0.0 |
| | | 1beta | |
| LAK cells IL-2 | 0.0 | Liver cirrhosis | 100.0 |
| LAK cells IL-2 + IL-12 | 0.0 | Lupus kidney | 0.0 |
| LAK cells IL-2 + IFN gamma | 0.0 | NCI-H292 none | 0.0 |
| LAK cells IL-2 + IL-18 | 0.0 | NCI-H292 IL-4 | 0.0 |
| LAK cells PMA/ionomycin | 0.0 | NCI-H292 IL-9 | 0.0 |
| NK Cells IL-2 rest | 0.0 | NCI-H292 IL-13 | 0.0 |
| Two Way MLR 3 day | 0.0 | NCI-H292 IFN gamma | 0.0 |
| Two Way MLR 5 day | 0.0 | HPAEC none | 0.0 |
| Two Way MLR 7 day | 0.0 | HPAEC TNF alpha + IL-1beta | 0.0 |
| PBMC rest | 0.0 | Lung fibroblast none | 0.0 |
| PBMC PWM | 0.0 | Lung fibroblast TNF alpha + IL-1beta | 0.0 |
| PBMC PHA-L | 0.0 | Lung fibroblast IL-4 | 0.0 |
| Ramos (B cell) none | 0.0 | Lung fibroblast IL-9 | 0.0 |
| Ramos (B cell) ionomycin | 0.0 | Lung fibroblast IL-13 | 0.0 |
| B lymphocytes PWM | 0.0 | Lung fibroblast IFN gamma | 0.0 |
| B lymphocytes CD40L and IL-4 | 4.5 | Dermal fibroblast CCD1070 rest | 2.1 |
| EOL-1 dbcAMP | 0.0 | Dermal fibroblast CCD1070 TNF alpha | 0.0 |
| EOL-1 dbcAMP | 0.0 | Dermal fibroblast CCD1070 IL-1beta | 0.0 |
| PMA/ionomycin | | | |
| Dendritic cells none | 0.0 | Dermal fibroblast IFN gamma | 0.0 |
| Dendritic cells LPS | 0.0 | Dermal fibroblast IL-4 | 0.0 |
| Dendritic cells anti-CD40 | 0.0 | IBD Colitis 2 | 31.4 |
| Monocytes rest | 0.0 | IBD Crohn's | 3.8 |
| Monocytes LPS | 0.0 | Colon | 0.0 |
| Macrophages rest | 0.0 | Lung | 0.0 |
| Macrophages LPS | 0.0 | Thymus | 0.0 |
| HUVEC none | 0.0 | Kidney | 0.0 |
| HUVEC starved | 0.0 | | |

[1206] Panel 2D Summary: Ag2018 Significant expression of this gene was seen in a single normal breast sample (CT=27.6). Expression was down-regulated in the matched adjacent breast tumor tissue (CT=40). Therapeutic modulation of this gene, expressed protein and/or use of antibodies or small molecule drugs targeting the gene or gene product is useful in the treatment of breast cancer.

[1207] Panel 4D Summary: Ag2018 Significant expression of this gene was detected in a liver cirrhosis sample (CT=33.7). Epression of this gene was not detected in normal liver in Panel 1.3D, demonstrating that expression of this gene is unique to liver cirrhosis. This gene encodes a GPCR; therefore, antibodies or small molecule therapeutics will reduce or inhibit fibrosis that occurs in liver cirrhosis. In addition, antibodies to this GPCR are useful for the diagnosis of liver cirrhosis.

[1208] AA. CG53989-04: Mastocytoma Protease Precursor-Like.

[1209] Expression of gene CG53989-04 was assessed using the primer-probe sets Ag1038, Ag1590, Ag1918, Ag2899, Ag720, Ag730, Ag443, Ag5819, Ag6974 and Ag8406, described in Tables AAA, AAB, AAC, AAD, AAE, AAF, AAG, AAH, AAI and AAJ. Results of the RTQ-PCR runs are shown in Tables AAK, AAL, AAM, AAN and AAO.

TABLE AAA
Probe Name Ag1038

| | | | Start | SEQ ID |
|---|---|---|---|---|
| Primers | Sequences | Length | Position | No |
| Forward | 5′-aggagcaacgtcctctgtaac-3′ | 21 | 538 | 1241 |
| Probe | TET-5′-cttccaaccacactgagcggtttgag-3′- | 26 | 581 | 1242 |
| | TAMRA | | | |
| Reverse | 5′-agcatgtcgtccttgatgag-3′ | 20 | 610 | 1243 |

[1210] TABLE AAB
Probe Name Ag1590

| | | | Start | SEQ ID |
|---|---|---|---|---|
| Primers | Sequences | Length | Position | No |
| Forward | 5′-aggagcaacgtcctctgtaac-3′ | 21 | 538 | 1244 |
| Probe | TET-5′-cttccaaccacactgagcggtttgag-3′- | 26 | 581 | 1245 |
| | TAMRA | | | |
| Reverse | 5′-agcatgtcgtccttgatgag-3′ | 20 | 610 | 1246 |

[1211] TABLE AAC
Probe Name Ag1918

| | | | Start | SEQ ID |
|---|---|---|---|---|
| Primers | Sequences | Length | Position | No |
| Forward | 5′-aggagcaacgtcctctgtaac-3′ | 21 | 538 | 1247 |
| Probe | TET-5′-cttccaaccacactgagcggtttgag-3′- | 26 | 581 | 1248 |
| | TAMRA | | | |
| Reverse | 5′-agcatgtcgtccttgatgag-3′ | 20 | 610 | 1249 |

[1212] TABLE AAD
Probe Name Ag2899

| | | | Start | SEQ ID |
|---|---|---|---|---|
| Primers | Sequences | Length | Position | No |
| Forward | 5′-aggagcaacgtcctctgtaac-3′ | 21 | 538 | 1250 |
| Probe | TET-5′-cttccaaccacactgagcggtttgag-3′- | 26 | 581 | 1251 |
| | TAMRA | | | |
| Reverse | 5′-agcatgtcgtccttgatgag-3′ | 20 | 610 | 1252 |

[1213] TABLE AAE
Probe Name Ag720

| | | | Start | SEQ ID |
|---|---|---|---|---|
| Primers | Sequences | Length | Position | No |
| Forward | 5′-aggagcaacgtcctctgtaac-3′ | 21 | 538 | 1253 |
| Probe | TET-5′-cttccaaccacactgagcggtttgag-3′- | 26 | 581 | 1254 |
| | TAMRA | | | |
| Reverse | 5′-acagcatgtcgtccttgatg-3′ | 20 | 612 | 1255 |

[1214] TABLE AAF
Probe Name Ag730

| | | | Start | SEQ ID |
|---|---|---|---|---|
| Primers | Sequences | Length | Position | No |
| Forward | 5′-caggagcaacgtcctctgta-3′ | 20 | 537 | 1256 |
| Probe | TET-5′-cttccaaccacactgagcggtttgag-3′- | 26 | 581 | 1257 |
| | TAMRA | | | |
| Reverse | 5′-cacacagcatgtcgtcctt-3′ | 19 | 616 | 1258 |

[1215] TABLE AAG
Probe Name Ag443

| | | | Start | SEQ ID |
|---|---|---|---|---|
| Primers | Sequences | Length | Position | No |
| Forward | 5′-gacggtgaaggtcaggagca-3′ | 20 | 525 | 1259 |
| Probe | TET-5′-cctgtcgccgccgctttcc-3′-TAMRA | 19 | 563 | 1260 |
| Reverse | 5′-aaccgctcagtgtggttgg-3′ | 19 | 584 | 1261 |

[1216] TABLE AAH
Probe Name Ag5819

| | | | Start | SEQ ID |
|---|---|---|---|---|
| Primers | Sequences | Length | Position | No |
| Forward | 5′-cctggtagggaggagttgga-3′ | 20 | 100 | 1262 |
| Probe | TET-5′-ctgaggctctatgaggacgaccagcggac- | 29 | 151 | 1263 |
| | 3′-TAMRA | | | |
| Reverse | 5′-ccaggcccagcaggtcttc-3′ | 19 | 339 | 1264 |

[1217] TABLE AAI
Probe Name Ag6974

| | | | Start | SEQ ID |
|---|---|---|---|---|
| Primers | Sequences | Length | Position | No |
| Forward | 5′-gagacggatggccacag-3′ | 17 | 395 | 1265 |
| Probe | TET-5′-ccaggtggctcagagcagcaggaatgtac- | 29 | 413 | 1266 |
| | 3′-TAMRA | | | |
| Reverse | 5′-cgttccgcctgcagag-3′ | 16 | 452 | 1267 |

[1218] TABLE AAJ
Probe Name Ag8406

| | | | Start | SEQ ID |
|---|---|---|---|---|
| Primers | Sequences | Length | Position | No |
| Forward | 5′-gtgagctggtgggcatc-3′ | 17 | 49 | 1268 |
| Probe | TET-5′-ctccctaccaggggtgcctcctg-3′- | 23 | 89 | 1269 |
| | TAMRA | | | |
| Reverse | 5′-cactctaaacgcgcaagc-3′ | 18 | 121 | 1270 |

[1219] TABLE AAK
Ardais Breast1.0
Column A - Rel. Exp.(%) Ag720, Run 389241931

| Tissue Name | A | Tissue Name | A |
|---|---|---|---|
| 111297 Breast cancer metastasis (9369)* | 0.0 | 153636 Breast cancer (D3D) | 0.4 |
| 108830 Breast cancer metastasis | 1.1 | 164668 Breast cancer (6314) | 0.1 |
| (OD06855)* | | | |
| 97764 Breast cancer node metastasis | 1.3 | 164677 Breast cancer (5272) | 12.4 |
| (OD06083) | | | |
| 97739 Breast cancer (CHTN20676) | 0.1 | 164685 Breast cancer (0170) | 11.3 |
| 145848 Breast cancer (9B6) | 8.4 | 98857 Breast cancer (OD06397- | 0.0 |
| | | 12) | |
| 145859 Breast cancer (9EC) | 1.2 | 153628 Breast cancer (D35) | 0.8 |
| 153632 Breast cancer (D39) | 0.0 | 153637 Breast cancer (D3E) | 5.4 |
| 153643 Breast cancer (D44) | 10.7 | 164669 Breast cancer (6992) | 6.0 |
| 164672 Breast cancer (7464) | 26.1 | 164678 Breast cancer (5297) | 68.8 |
| 164681 Breast cancer (5787) | 9.7 | 164686 Breast cancer (0732) | 0.5 |
| 97748 Breast cancer (CHTN20931) | 2.2 | 145857 Breast cancer (9F0) | 15.2 |
| 145850 Breast cancer (9C7) | 0.1 | 153630 Breast cancer (D37) | 0.6 |
| 149844 Breast cancer (24178) | 2.5 | 153638 Breast cancer (D3F) | 23.7 |
| 153633 Breast cancer (D3A) | 0.4 | 164670 Breast cancer (7078) | 1.1 |
| 153644 Breast cancer (D45) | 9.0 | 164679 Breast cancer (5486) | 4.3 |
| 164673 Breast cancer (8452) | 29.1 | 164687 Breast cancer (5881) | 0.5 |
| 164682 Breast cancer (6342)* | 7.7 | 145846 Breast cancer (9B7) | 22.5 |
| 97751 Breast cancer (CHTN21053) | 0.8 | 145858 Breast cancer (9B4) | 0.0 |
| 116417 Breast cancer (3367)* | 0.1 | 153631 Breast cancer (D38) | 1.6 |
| 145852 Breast cancer (A1A) | 13.0 | 153639 Breast cancer (D40) | 22.2 |
| 151097 Breast cancer (CHTN24298) | 0.4 | 164671 Breast cancer (7082) | 0.3 |
| 153634 Breast cancer (D3B) | 0.8 | 164680 Breast cancer (5705) | 0.0 |
| 155797 Breast cancer (EA6) | 2.2 | 164688 Breast cancer (7222) | 0.0 |
| 164674 Breast cancer (8811) | 8.2 | 111288 Breast NAT (3367) | 0.3 |
| 164683 Breast cancer (6470) | 2.4 | 111302 Breast NAT (6314) | 0.6 |
| 97763 Breast cancer (OD06083) | 0.8 | 105687 Breast cancer 1B | 0.0 |
| 116418 Breast cancer (3378)* | 1.3 | 105688 Breast NAT 1A | 0.0 |
| 145853 Breast cancer (9F3) | 0.4 | 105689 Breast cancer 2B | 0.0 |
| 153432 Breast cancer (CHTN 24652) | 16.6 | 105690 Breast NAT 2A | 0.0 |
| 153635 Breast cancer (D3C) | 1.1 | 111289 Breast cancer 3B* | 0.0 |
| 164667 Breast cancer (5785) | 1.6 | 111290 Breast NAT 3A* | 0.0 |
| 164676 Breast cancer (5070) | 100.0 | 116424 Breast cancer 4B* | 0.1 |
| 164684 Breast cancer (6509) | 24.8 | 116425 Breast NAT 4A | 0.0 |
| 116421 Breast cancer (6314) | 0.0 | 108847 Breast cancer | 0.0 |
| 145854 Breast cancer (9B8) | 5.9 | 105694 Breast NAT | 0.0 |
| 153627 Breast cancer (D34) | 0.2 | | |

[1220] TABLE AAL
Panel 1.3D
Column A - Rel. Exp.(%) Ag1590, Run 152059684
Column B - Rel. Exp.(%) Ag1590, Run 155330156
Column C - Rel. Exp.(%) Ag2899, Run 160943164
Column D - Rel. Exp.(%) Ag2899, Run 165518181

| Tissue Name | A | B | C | D |
|---|---|---|---|---|
| Liver adenocarcinoma | 0.0 | 1.1 | 1.7 | 0.0 |
| Pancreas | 0.0 | 0.0 | 0.0 | 6.9 |
| Pancreatic ca. CAPAN 2 | 8.7 | 2.5 | 5.6 | 10.5 |
| Adrenal gland | 0.0 | 0.8 | 0.0 | 0.0 |
| Thyroid | 0.0 | 0.0 | 0.0 | 0.0 |
| Salivary gland | 0.0 | 0.0 | 0.0 | 2.4 |
| Pituitary gland | 34.2 | 34.2 | 16.7 | 42.0 |
| Brain (fetal) | 0.0 | 0.0 | 0.0 | 1.9 |
| Brain (whole) | 0.0 | 0.0 | 0.0 | 0.0 |
| Brain (amygdala) | 0.0 | 0.0 | 0.0 | 0.0 |
| Brain (cerebellum) | 0.0 | 0.0 | 0.0 | 0.0 |
| Brain (hippocampus) | 0.0 | 0.0 | 0.0 | 0.0 |
| Brain (substantia nigra) | 0.0 | 0.0 | 0.0 | 0.0 |
| Brain (thalamus) | 0.0 | 0.0 | 0.0 | 0.0 |
| Cerebral Cortex | 1.2 | 0.0 | 0.0 | 0.0 |
| Spinal cord | 0.0 | 0.0 | 0.0 | 0.0 |
| glio/astro U87-MG | 0.0 | 0.0 | 0.0 | 0.0 |
| glio/astro U-118-MG | 0.0 | 0.0 | 0.0 | 0.0 |
| astrocytoma SW1783 | 0.3 | 1.0 | 0.0 | 2.3 |
| neuro*; met SK-N-AS | 0.0 | 0.0 | 0.0 | 0.0 |
| astrocytoma SF-539 | 0.0 | 0.0 | 0.0 | 0.0 |
| astrocytoma SNB-75 | 0.7 | 0.0 | 0.0 | 4.5 |
| glioma SNB-19 | 0.0 | 0.0 | 0.0 | 2.5 |
| glioma U251 | 0.0 | 0.0 | 0.0 | 0.0 |
| glioma SF-295 | 0.0 | 0.0 | 0.0 | 0.0 |
| Heart (Fetal) | 0.0 | 1.4 | 0.0 | 0.0 |
| Heart | 0.0 | 0.0 | 0.0 | 0.0 |
| Skeletal muscle (Fetal) | 0.0 | 0.0 | 0.0 | 0.0 |
| Skeletal muscle | 0.0 | 0.0 | 0.0 | 0.0 |
| Bone marrow | 0.9 | 0.0 | 1.0 | 0.0 |
| Thymus | 0.7 | 0.9 | 1.4 | 3.7 |
| Spleen | 0.6 | 1.7 | 0.0 | 0.0 |
| Lymph node | 0.0 | 0.0 | 0.0 | 0.0 |
| Colorectal | 3.9 | 2.4 | 1.6 | 8.8 |
| Stomach | 0.0 | 2.4 | 0.0 | 0.0 |
| Small intestine | 0.0 | 0.0 | 0.0 | 2.0 |
| Colon ca. SW480 | 0.8 | 1.5 | 0.0 | 0.0 |
| Colon ca.* SW620 (SW480 met) | 0.9 | 0.9 | 3.4 | 0.0 |
| Colon ca. HT29 | 0.0 | 0.0 | 0.0 | 0.0 |
| Colon ca. HCT-116 | 0.0 | 1.0 | 0.0 | 1.0 |
| Colon ca. CaCo-2 | 0.0 | 1.4 | 0.0 | 0.0 |
| CC Well to Mod Diff (ODO3866) | 8.8 | 8.1 | 15.2 | 26.8 |
| Colon ca. HCC-2998 | 32.3 | 29.3 | 29.9 | 22.2 |
| Gastric ca. (liver met) NCI-N87 | 32.1 | 31.6 | 36.9 | 70.7 |
| Bladder | 0.8 | 0.0 | 0.0 | 0.0 |
| Trachea | 0.8 | 1.1 | 0.0 | 0.0 |
| Kidney | 1.8 | 0.0 | 1.7 | 1.0 |
| Kidney (fetal) | 3.8 | 0.9 | 7.6 | 0.0 |
| Renal ca. 786-0 | 0.0 | 0.0 | 0.0 | 0.0 |
| Renal ca. A498 | 0.8 | 0.0 | 0.0 | 0.0 |
| Renal ca. RXF 393 | 0.0 | 0.0 | 0.0 | 3.2 |
| Renal ca. ACHN | 2.1 | 0.0 | 0.0 | 0.0 |
| Renal ca. UO-31 | 0.0 | 0.0 | 0.0 | 0.0 |
| Renal ca. TK-10 | 0.0 | 0.0 | 0.0 | 0.0 |
| Liver | 4.7 | 5.2 | 3.5 | 33.9 |
| Liver (fetal) | 9.0 | 6.0 | 3.7 | 18.3 |
| Liver ca. (hepatoblast) HepG2 | 2.4 | 1.2 | 1.8 | 0.0 |
| Lung | 0.0 | 0.0 | 3.2 | 0.0 |
| Lung (fetal) | 0.4 | 0.0 | 0.0 | 0.0 |
| Lung ca. (small cell) LX-1 | 6.9 | 13.1 | 9.5 | 10.5 |
| Lung ca. (small cell) NCI-H69 | 2.2 | 1.3 | 0.8 | 0.0 |
| Lung ca. (s. cell var.) SHP-77 | 3.3 | 1.1 | 6.5 | 6.3 |
| Lung ca. (large cell) NCI-H460 | 0.0 | 0.0 | 0.0 | 0.0 |
| Lung ca. (non-sm. cell) A549 | 0.0 | 0.0 | 0.0 | 0.0 |
| Lung ca. (non-s. cell) NCI-H23 | 0.0 | 0.0 | 0.0 | 0.0 |
| Lung ca. (non-s. cell) HOP-62 | 0.8 | 0.0 | 0.0 | 0.0 |
| Lung ca. (non-s. cl) NCI-H522 | 0.0 | 0.5 | 0.0 | 0.0 |
| Lung ca. (squam.) SW 900 | 0.8 | 0.0 | 0.0 | 0.0 |
| Lung ca. (squam.) NCI-H596 | 0.4 | 0.5 | 0.0 | 0.0 |
| Mammary gland | 2.7 | 4.2 | 0.0 | 7.9 |
| Breast ca.* (pl.ef) MCF-7 | 4.1 | 0.0 | 0.0 | 2.5 |
| Breast ca.* (pl.ef) MDA-MB-231 | 0.0 | 0.0 | 1.7 | 0.0 |
| Breast ca.* (pl.ef) T47D | 6.5 | 5.3 | 0.7 | 4.3 |
| Breast ca. BT-549 | 0.0 | 0.0 | 0.0 | 0.0 |
| Breast ca. MDA-N | 0.0 | 1.1 | 1.7 | 0.0 |
| Ovary | 0.0 | 0.0 | 0.0 | 0.0 |
| Ovarian ca. OVCAR-3 | 0.0 | 0.0 | 0.0 | 0.0 |
| Ovarian ca. OVCAR-4 | 0.0 | 0.0 | 0.0 | 0.0 |
| Ovarian ca. OVCAR-5 | 100.0 | 100.0 | 100.0 | 100.0 |
| Ovarian ca. OVCAR-8 | 2.5 | 0.0 | 0.0 | 2.5 |
| Ovarian ca. IGROV-1 | 0.0 | 0.0 | 0.0 | 0.0 |
| Ovarian ca. (ascites) SK-OV-3 | 0.0 | 0.0 | 0.0 | 0.0 |
| Uterus | 0.0 | 0.0 | 0.0 | 0.0 |
| Placenta | 9.2 | 6.9 | 8.0 | 14.0 |
| Prostate | 1.9 | 5.2 | 1.8 | 4.1 |
| Prostate ca.* (bone met) PC-3 | 0.0 | 0.0 | 0.0 | 0.0 |
| Testis | 6.3 | 9.3 | 8.9 | 8.8 |
| Melanoma Hs688(A).T | 0.0 | 0.0 | 0.0 | 0.0 |
| Melanoma* (met) Hs688(B).T | 0.0 | 0.0 | 0.0 | 0.0 |
| Melanoma UACC-62 | 0.0 | 0.0 | 0.0 | 0.0 |
| Melanoma M14 | 0.0 | 0.0 | 0.0 | 0.0 |
| Melanoma LOX IMVI | 0.0 | 0.0 | 0.0 | 0.0 |
| Melanoma* (met) SK-MEL-5 | 0.0 | 0.0 | 0.0 | 0.0 |
| Adipose | 0.0 | 0.0 | 0.0 | 0.0 |

[1221] TABLE AAM
Panel 2D
Column A - Rel. Exp. (%) Ag1590, Run 152060853
Column B - Rel. Exp. (%) Ag1590, Run 155330182
Column C - Rel. Exp. (%) Ag2899, Run 160999416
Column D - Rel. Exp. (%) Ag2899, Run 164988403
Column E - Rel. Exp. (%) Ag720, Run 145375720

| Tissue Name | A | B | C | D | E |
|---|---|---|---|---|---|
| Normal Colon | 0.1 | 0.0 | 0.1 | 0.3 | 0.0 |
| CC Well to Mod Diff (ODO3866) | 9.2 | 11.3 | 5.5 | 8.5 | 2.2 |
| CC Margin (ODO3866) | 0.2 | 0.0 | 0.0 | 0.3 | 0.0 |
| CC Gr.2 rectosigmoid (ODO3868) | 0.0 | 0.2 | 0.0 | 0.3 | 0.0 |
| CC Margin (ODO3868) | 0.0 | 0.0 | 0.0 | 0.0 | 0.0 |
| CC Mod Diff (ODO3920) | 0.2 | 0.1 | 0.0 | 0.5 | 0.0 |
| CC Margin (ODO3920) | 0.0 | 0.0 | 0.0 | 0.0 | 0.0 |
| CC Gr.2 ascend colon (ODO3921) | 0.0 | 0.0 | 0.1 | 0.1 | 0.0 |
| CC Margin (ODO3921) | 0.3 | 0.2 | 0.1 | 0.1 | 0.0 |
| CC from Partial Hepatectomy (ODO4309) Mets | 1.4 | 1.4 | 0.2 | 1.8 | 0.3 |
| Liver Margin (ODO4309) | 1.8 | 0.9 | 0.6 | 2.0 | 0.4 |
| Colon mets to lung (OD04451-01) | 0.2 | 0.2 | 0.3 | 0.4 | 0.2 |
| Lung Margin (OD04451-02) | 0.0 | 0.0 | 0.0 | 0.0 | 0.0 |
| Normal Prostate 6546-1 | 0.4 | 0.7 | 0.2 | 1.6 | 0.4 |
| Prostate Cancer (OD04410) | 0.0 | 0.0 | 0.0 | 0.0 | 0.0 |
| Prostate Margin (OD04410) | 0.0 | 0.0 | 0.0 | 0.4 | 0.0 |
| Prostate Cancer (OD04720-01) | 0.9 | 1.2 | 0.3 | 0.5 | 0.4 |
| Prostate Margin (OD04720-02) | 0.3 | 0.4 | 0.3 | 0.0 | 0.1 |
| Normal Lung | 0.0 | 0.0 | 0.1 | 0.0 | 0.0 |
| Lung Met to Muscle (ODO4286) | 0.0 | 0.3 | 0.0 | 0.0 | 0.2 |
| Muscle Margin (ODO4286) | 0.2 | 0.0 | 0.0 | 0.1 | 0.0 |
| Lung Malignant Cancer (OD03126) | 0.0 | 0.3 | 0.0 | 0.2 | 0.2 |
| Lung Margin (OD03126) | 0.0 | 0.1 | 0.0 | 0.0 | 0.0 |
| Lung Cancer (OD04404) | 0.0 | 0.0 | 0.0 | 0.0 | 0.1 |
| Lung Margin (OD04404) | 0.0 | 0.0 | 0.0 | 0.0 | 0.0 |
| Lung Cancer (OD04565) | 0.2 | 0.0 | 0.0 | 0.4 | 0.1 |
| Lung Margin (OD04565) | 0.0 | 0.0 | 0.0 | 0.0 | 0.0 |
| Lung Cancer (OD04237-01) | 0.0 | 0.2 | 0.0 | 0.5 | 0.0 |
| Lung Margin (OD04237-02) | 0.0 | 0.0 | 0.0 | 0.0 | 0.0 |
| Ocular Mel Met to Liver (ODO4310) | 0.0 | 0.0 | 0.0 | 0.0 | 0.0 |
| Liver Margin (ODO4310) | 1.0 | 1.1 | 0.0 | 1.0 | 0.5 |
| Melanoma Metastasis | 0.0 | 0.0 | 0.0 | 0.0 | 0.0 |
| Lung Margin (OD04321) | 0.0 | 0.0 | 0.0 | 0.0 | 0.0 |
| Normal Kidney | 0.3 | 1.1 | 0.1 | 0.7 | 0.3 |
| Kidney ca, Nuclear grade 2 (OD04338) | 0.0 | 0.0 | 0.1 | 0.1 | 0.0 |
| Kidney Margin (OD04338) | 0.2 | 0.7 | 0.2 | 0.2 | 0.1 |
| Kidney Ca Nuclear grade 1/2 (OD04339) | 0.1 | 0.1 | 0.3 | 0.4 | 0.0 |
| Kidney Margin (OD04339) | 0.6 | 0.3 | 0.7 | 1.4 | 0.3 |
| Kidney Ca, Clear cell type (OD04340) | 0.0 | 0.0 | 0.0 | 0.0 | 0.0 |
| Kidney Margin (OD04340) | 1.2 | 0.8 | 0.4 | 0.9 | 0.5 |
| Kidney Ca, Nuclear grade 3 (OD04348) | 0.0 | 0.0 | 0.0 | 0.6 | 0.0 |
| Kidney Margin (OD04348) | 0.4 | 0.4 | 0.4 | 0.0 | 0.3 |
| Kidney Cancer (OD04622-01) | 0.0 | 0.0 | 0.0 | 0.0 | 0.0 |
| Kidney Margin (OD04622-03) | 0.4 | 0.1 | 0.0 | 0.0 | 0.2 |
| Kidney Cancer (OD04450-01) | 0.3 | 0.2 | 0.1 | 0.0 | 0.0 |
| Kidney Margin (OD04450-03) | 0.0 | 0.2 | 0.0 | 0.3 | 0.2 |
| Kidney Cancer 8120607 | 0.0 | 0.0 | 0.0 | 0.0 | 0.0 |
| Kidney Margin 8120608 | 0.0 | 0.4 | 0.1 | 0.0 | 0.1 |
| Kidney Cancer 8120613 | 0.1 | 0.9 | 0.3 | 0.6 | 0.2 |
| Kidney Margin 8120614 | 0.3 | 0.3 | 0.0 | 0.0 | 0.0 |
| Kidney Cancer 9010320 | 0.0 | 0.1 | 0.0 | 0.0 | 0.0 |
| Kidney Margin 9010321 | 0.1 | 0.0 | 0.0 | 0.0 | 0.1 |
| Normal Uterus | 0.0 | 0.0 | 0.0 | 0.0 | 0.0 |
| Uterine Cancer 064011 | 0.0 | 0.0 | 0.0 | 0.0 | 0.0 |
| Normal Thyroid | 0.0 | 0.1 | 0.0 | 0.0 | 0.0 |
| Thyroid Cancer | 0.0 | 0.3 | 0.3 | 0.0 | 0.0 |
| Thyroid Cancer A302152 | 0.1 | 0.0 | 0.0 | 0.0 | 0.1 |
| Thyroid Margin A302153 | 0.0 | 0.0 | 0.0 | 0.0 | 0.0 |
| Normal Breast | 0.3 | 0.4 | 0.1 | 1.2 | 0.5 |
| Breast Cancer | 33.4 | 34.6 | 22.7 | 55.9 | 47.0 |
| Breast Cancer (OD04590-01) | 100.0 | 100.0 | 100.0 | 100.0 | 30.6 |
| Breast Cancer Mets (OD04590-03) | 63.3 | 72.7 | 73.7 | 88.9 | 100.0 |
| Breast Cancer Metastasis | 2.8 | 2.6 | 2.0 | 2.6 | 2.9 |
| Breast Cancer | 3.6 | 5.2 | 2.2 | 6.4 | 3.1 |
| Breast Cancer | 1.0 | 1.9 | 2.2 | 1.9 | 0.5 |
| Breast Cancer 9100266 | 3.5 | 3.3 | 1.1 | 7.1 | 4.1 |
| Breast Margin 9100265 | 0.0 | 0.3 | 0.1 | 0.2 | 0.3 |
| Breast Cancer A209073 | 2.3 | 1.6 | 0.7 | 2.0 | 1.7 |
| Breast Margin A209073 | 0.7 | 1.3 | 0.7 | 0.9 | 0.2 |
| Normal Liver | 0.1 | 0.5 | 0.4 | 2.2 | 0.9 |
| Liver Cancer | 0.3 | 0.3 | 0.4 | 0.3 | 0.1 |
| Liver Cancer 1025 | 0.4 | 0.7 | 0.5 | 1.3 | 0.5 |
| Liver Cancer 1026 | 0.7 | 0.1 | 0.3 | 1.1 | 0.2 |
| Liver Cancer 6004-T | 0.9 | 1.1 | 1.4 | 2.8 | 0.6 |
| Liver Tissue 6004-N | 0.0 | 0.0 | 0.1 | 0.0 | 0.0 |
| Liver Cancer 6005-T | 0.8 | 0.8 | 1.2 | 0.7 | 0.2 |
| Liver Tissue 6005-N | 0.1 | 0.0 | 0.2 | 0.5 | 0.0 |
| Normal Bladder | 0.0 | 0.0 | 0.1 | 0.4 | 0.1 |
| Bladder Cancer | 0.0 | 0.1 | 0.0 | 0.0 | 0.1 |
| Bladder Cancer | 0.1 | 0.4 | 0.3 | 0.0 | 0.1 |
| Bladder Cancer (OD04718-01) | 0.2 | 0.2 | 0.3 | 0.0 | 0.4 |
| Bladder Normal Adjacent (OD04718-03) | 0.0 | 0.0 | 0.0 | 0.0 | 0.0 |
| Normal Ovary | 0.0 | 0.0 | 0.0 | 0.0 | 0.0 |
| Ovarian Cancer | 0.0 | 0.0 | 0.0 | 0.2 | 0.0 |
| Ovarian Cancer (OD04768-07) | 0.1 | 0.0 | 0.1 | 0.0 | 0.0 |
| Ovary Margin (OD04768-08) | 0.0 | 0.0 | 0.0 | 0.0 | 0.0 |
| Normal Stomach | 0.0 | 0.1 | 0.0 | 0.2 | 0.0 |
| Gastric Cancer 9060358 | 0.0 | 0.0 | 0.0 | 0.0 | 0.0 |
| Stomach Margin 9060359 | 0.0 | 0.0 | 0.0 | 0.0 | 0.0 |
| Gastric Cancer 9060395 | 0.0 | 0.0 | 0.0 | 0.0 | 0.0 |
| Stomach Margin 9060394 | 0.0 | 0.0 | 0.0 | 0.0 | 0.0 |
| Gastric Cancer 9060397 | 1.5 | 0.7 | 0.6 | 0.3 | 0.2 |
| Stomach Margin 9060396 | 0.0 | 0.0 | 0.0 | 0.0 | 0.0 |
| Gastric Cancer 064005 | 0.1 | 0.3 | 0.0 | 0.2 | 0.2 |

[1222] TABLE AAN
Panel 3D
Column A - Rel. Exp. (%) Ag2899, Run 164633619
Column B - Rel. Exp. (%) Ag720, Run 164843791

| Tissue Name | A | B | Tissue Name | A | B |
|---|---|---|---|---|---|
| 94905 Daoy | 0.0 | 0.0 | 94954 Ca Ski Cervical | 0.0 | 3.2 |
| Medulloblastoma/Cerebellum | | | epidermoid carcinoma | | |
| | | | (metastasis | | |
| 94906 TE671 | 0.0 | 0.0 | 94955 ES-2 Ovarian clear cell | 0.0 | 0.0 |
| Medulloblastom/Cerebellum | | | carcinoma | | |
| 94907 D283 Med | 0.0 | 0.0 | 94957 Ramos Stimulated with | 0.0 | 0.0 |
| Medulloblastoma/Cerebellum | | | PMA/ionomycin 6 h | | |
| 94908 PFSK-1 Primitive | 0.0 | 1.4 | 94958 Ramos Stimulated with | 0.0 | 0.0 |
| Neuroectodermal/Cerebellum | | | PMA/ionomycin 14 h | | |
| 94909 XF-498 CNS | 0.0 | 0.0 | 94962 MEG-01 Chronic | 0.0 | 0.0 |
| | | | myelogenous leukemia | | |
| | | | (megokaryoblast) | | |
| 94910 SNB-78 CNS/glioma | 0.0 | 0.0 | 94963 Raji Burkitt's | 0.0 | 0.0 |
| | | | lymphoma | | |
| 94911 SF-268 CNS/glioblastoma | 0.0 | 0.0 | 94964 Daudi Burkitt's | 0.0 | 0.0 |
| | | | lymphoma | | |
| 94912 T98G Glioblastoma | 0.0 | 0.0 | 94965 U266 B-cell | 14.7 | 17.6 |
| | | | plasmacytoma/myeloma | | |
| 96776 SK-N-SH Neuroblastoma | 0.0 | 0.0 | 94968 CA46 Burkitt's | 0.0 | 0.0 |
| (metastasis) | | | lymphoma | | |
| 94913 SF-295 CNS/glioblastoma | 0.0 | 0.0 | 94970 RL non-Hodgkin's B- | 0.0 | 0.0 |
| | | | cell lymphoma | | |
| 94914 Cerebellum | 0.0 | 0.0 | 94972 JM1 pre-B-cell | 0.0 | 0.0 |
| | | | lymphoma/leukemia | | |
| 96777 Cerebellum | 1.2 | 0.0 | 94973 Jurkat T cell leukemia | 0.0 | 0.0 |
| 94916 NCI-H292 | 0.0 | 0.0 | 94974 TF-1 Erythroleukemia | 0.0 | 0.0 |
| Mucoepidermoid lung carcinoma | | | | | |
| 94917 DMS-114 Small cell lung | 0.0 | 0.0 | 94975 HUT 78 T-cell | 0.0 | 0.0 |
| cancer | | | lymphoma | | |
| 94918 DMS-79 Small cell lung | 100.0 | 100.0 | 94977 U937 Histiocytic | 0.0 | 0.0 |
| cancer/neuroendocrine | | | lymphoma | | |
| 94919 NCI-H146 Small cell lung | 0.0 | 0.0 | 94980 KU-812 Myelogenous | 0.0 | 0.0 |
| cancer/neuroendocrine | | | leukemia | | |
| 94920 NCI-H526 Small cell lung | 0.0 | 0.0 | 769-P- Clear cell renal | 0.0 | 0.0 |
| cancer/neuroendocrine | | | carcinoma | | |
| 94921 NCI-N417 Small cell lung | 0.0 | 0.0 | 94983 Caki-2 Clear cell renal | 0.8 | 1.9 |
| cancer/neuroendocrine | | | carcinoma | | |
| 94923 NCI-H82 Small cell lung | 0.0 | 0.0 | 94984 SW 839 Clear cell renal | 0.0 | 0.0 |
| cancer/neuroendocrine | | | carcinoma | | |
| 94924 NCI-H157 Squamous cell | 0.0 | 0.0 | 94986 G401 Wilms' tumor | 0.0 | 0.0 |
| lung cancer (metastasis) | | | | | |
| 94925 NCI-H1155 Large cell | 0.0 | 0.0 | 94987 Hs766T Pancreatic | 1.2 | 5.5 |
| lung cancer/neuroendocrine | | | carcinoma (LN metastasis) | | |
| 94926 NCI-H1299 Large cell | 0.0 | 0.0 | 94988 CAPAN-l Pancreatic | 0.0 | 0.0 |
| lung cancer/neuroendocrine | | | adenocarcinoma (liver | | |
| | | | metastasis) | | |
| 94927 NCI-H727 Lung carcinoid | 0.0 | 0.0 | 94989 SU86.86 Pancreatic | 0.0 | 0.0 |
| | | | carcinoma (liver metastasis) | | |
| 94928 NCI-UMC-11 Lung | 0.0 | 4.9 | 94990 BxPC-3 Pancreatic | 0.0 | 2.9 |
| carcinoid | | | adenocarcinoma | | |
| 94929 LX-1 Small cell lung | 3.2 | 3.7 | 94991 HPAC Pancreatic | 1.2 | 5.1 |
| cancer | | | adenocarcinoma | | |
| 94930 Colo-205 Colon cancer | 7.5 | 29.3 | 94992 MIA PaCa-2 Pancreatic | 0.0 | 0.0 |
| | | | carcinoma | | |
| 94931 KM12 Colon cancer | 0.2 | 1.6 | 94993 CFPAC-1 Pancreatic | 29.1 | 47.6 |
| | | | ductal adenocarcinoma | | |
| 94932 KM20L2 Colon cancer | 1.2 | 0.0 | 94994 PANC-1 Pancreatic | 0.0 | 0.0 |
| | | | epithelioid ductal carcinoma | | |
| 94933 NCI-H716 Colon cancer | 0.0 | 0.0 | 94996 T24 Bladder carcinma | 0.0 | 0.0 |
| | | | (transitional cell | | |
| 94935 SW-48 Colon | 0.0 | 0.0 | 5637-Bladder carcinoma | 0.0 | 0.0 |
| adenocarcinoma | | | | | |
| 94936 SW1116 Colon | 0.0 | 0.0 | 94998 HT-1197 Bladder | 5.1 | 7.6 |
| adenocarcinoma | | | carcinoma | | |
| 94937 LS 174T Colon | 1.1 | 0.0 | 94999 UM-UC-3 Bladder | 0.0 | 0.0 |
| adenocarcinoma | | | carcinma (transitional cell) | | |
| 94938 SW-948 Colon | 0.0 | 0.0 | 95000 A204 | 0.0 | 0.0 |
| adenocarcinoma | | | Rhabdomyosarcoma | | |
| 94939 SW-480 Colon | 0.0 | 0.0 | 95001 HT-1080 Fibrosarcoma | 0.0 | 0.0 |
| adenocarcinoma | | | | | |
| 94940 NCI-SNU-5 Gastric | 0.0 | 1.1 | 95002 MG-63 Osteosarcoma | 0.0 | 0.0 |
| carcinoma | | | (bone) | | |
| KATO III-Gastric carcinoma | 0.0 | 1.9 | 95003 SK-LMS-1 | 0.0 | 0.0 |
| | | | Leiomyosarcoma (vulva) | | |
| 94943 NCI-SNU-16 Gastric | 2.2 | 0.0 | 95004 SJRH30 | 0.0 | 0.0 |
| carcinoma | | | Rhabdomyosarcoma (met to | | |
| | | | bone marrow) | | |
| 94944 NCI-SNU-1 Gastric | 0.0 | 0.0 | 95005 A431 Epidermoid | 1.8 | 1.6 |
| carcinoma | | | carcinoma | | |
| 94946 RF-1 Gastric | 0.0 | 0.0 | 95007 WM266-4 Melanoma | 0.0 | 0.0 |
| adenocarcinoma | | | | | |
| 94947 RF-48 Gastric | 0.0 | 0.0 | DU 145-Prostate carcinoma | 0.0 | 0.0 |
| adenocarcinoma | | | (brain metastasis) | | |
| 96778 MKN-45 Gastric | 0.0 | 0.0 | 95012 MDA-MB-468 Breast | 1.1 | 0.0 |
| carcinoma | | | adenocarcinoma | | |
| 94949 NCI-N87 Gastric | 0.0 | 3.8 | SCC-4-Squamous cell | 0.0 | 0.0 |
| carcinoma | | | carcinoma of tongue | | |
| 94951 OVCAR-5 Ovarian | 29.7 | 62.0 | SCC-9-Squamous cell | 0.0 | 0.0 |
| carcinoma | | | carcinoma of tongue | | |
| 94952 RL95-2 Uterine carcinoma | 19.3 | 21.8 | SCC-15-Squamous cell | 0.0 | 0.0 |
| | | | carcinoma of tongue | | |
| 94953 HelaS3 Cervical | 0.0 | 0.0 | 95017 CAL 27 Squamous cell | 0.0 | 0.0 |
| adenocarcinoma | | | carcinoma of tongue | | |

[1223] TABLE AAO
Panel 4D
Column A - Rel. Exp.(%) Ag1590, Run 152061102
Column B - Rel. Exp.(%) Ag1590, Run 155330411
Column C - Rel. Exp.(%) Ag1918, Run 147288180
Column D - Rel. Exp.(%) Ag2899, Run 159633215

| Tissue Name | A | B | C | D |
|---|---|---|---|---|
| Secondary Th1 act | 0.0 | 0.0 | 0.0 | 0.0 |
| Secondary Th2 act | 0.0 | 0.0 | 0.0 | 4.3 |
| Secondary Tr1 act | 0.0 | 0.0 | 0.0 | 6.6 |
| Secondary Th1 rest | 0.0 | 0.0 | 0.0 | 0.0 |
| Secondary Th2 rest | 0.0 | 0.0 | 0.0 | 0.0 |
| Secondary Tr1 rest | 0.0 | 0.0 | 0.0 | 0.0 |
| Primary Th1 act | 0.0 | 0.0 | 0.0 | 0.0 |
| Primary Th2 act | 0.0 | 0.0 | 0.0 | 0.0 |
| Primary Tr1 act | 0.0 | 0.0 | 0.0 | 0.0 |
| Primary Th1 rest | 0.0 | 0.0 | 0.0 | 0.0 |
| Primary Th2 rest | 0.0 | 0.0 | 0.0 | 0.0 |
| Primary Tr1 rest | 0.0 | 0.0 | 0.0 | 0.0 |
| CD45RA CD4 lymphocyte act | 0.0 | 0.0 | 0.0 | 0.0 |
| CD45RO CD4 lymphocyte act | 0.0 | 0.0 | 0.0 | 0.0 |
| CD8 lymphocyte act | 0.0 | 0.0 | 0.0 | 0.0 |
| Secondary CD8 lymphocyte rest | 0.0 | 0.0 | 0.0 | 0.0 |
| Secondary CD8 lymphocyte act | 0.0 | 0.0 | 0.0 | 0.0 |
| CD4 lymphocyte none | 0.0 | 0.0 | 0.0 | 0.0 |
| 2ry Th1/Th2/Tr1 anti-CD95 CH11 | 0.0 | 0.0 | 0.0 | 0.0 |
| LAK cells rest | 0.0 | 0.0 | 0.0 | 0.0 |
| LAK cells IL-2 | 0.0 | 0.0 | 0.0 | 0.0 |
| LAK cells IL-2 + IL-12 | 0.0 | 0.0 | 0.0 | 0.0 |
| LAK cells IL-2 + IFN gamma | 0.0 | 0.0 | 0.0 | 0.0 |
| LAK cells IL-2 + IL-18 | 0.0 | 0.0 | 0.0 | 0.0 |
| LAK cells PMA/ionomycin | 0.0 | 0.0 | 0.0 | 0.0 |
| NK Cells IL-2 rest | 0.0 | 0.0 | 0.0 | 0.0 |
| Two Way MLR 3 day | 0.0 | 0.0 | 0.0 | 0.0 |
| Two Way MLR 5 day | 0.0 | 0.0 | 0.0 | 0.0 |
| Two Way MLR 7 day | 0.0 | 0.0 | 0.0 | 0.0 |
| PBMC rest | 6.3 | 0.0 | 0.0 | 0.0 |
| PBMC PWM | 0.0 | 0.0 | 0.0 | 0.0 |
| PBMC PHA-L | 0.0 | 0.0 | 0.0 | 0.0 |
| Ramos (B cell) none | 0.0 | 0.0 | 0.0 | 0.0 |
| Ramos (B cell) ionomycin | 0.0 | 0.0 | 0.0 | 0.0 |
| B lymphocytes PWM | 0.0 | 0.0 | 0.0 | 0.0 |
| B lymphocytes CD40L and IL-4 | 0.0 | 0.0 | 0.0 | 0.0 |
| EOL-1 dbcAMP | 0.0 | 0.0 | 0.0 | 0.0 |
| EOL-1 dbcAMP PMA/ionomycin | 0.0 | 0.0 | 0.0 | 0.0 |
| Dendritic cells none | 0.0 | 0.0 | 0.0 | 0.0 |
| Dendritic cells LPS | 0.0 | 0.0 | 0.0 | 0.0 |
| Dendritic cells anti-CD40 | 0.0 | 0.0 | 0.0 | 0.0 |
| Monocytes rest | 0.0 | 0.0 | 0.0 | 12.9 |
| Monocytes LPS | 0.0 | 0.0 | 0.0 | 0.0 |
| Macrophages rest | 0.0 | 0.0 | 0.0 | 0.0 |
| Macrophages LPS | 0.0 | 0.0 | 0.0 | 0.0 |
| HUVEC none | 0.0 | 0.0 | 0.0 | 0.0 |
| HUVEC starved | 0.0 | 0.0 | 0.0 | 0.0 |
| HUVEC IL-1beta | 0.0 | 0.0 | 0.0 | 0.0 |
| HUVEC IFN gamma | 0.0 | 0.0 | 0.0 | 0.0 |
| HUVEC TNF alpha + IFN gamma | 0.0 | 0.0 | 0.0 | 0.0 |
| HUVEC TNF alpha + IL4 | 0.0 | 0.0 | 0.0 | 0.0 |
| HUVEC IL-11 | 0.0 | 0.0 | 0.0 | 0.0 |
| Lung Microvascular EC none | 0.0 | 0.0 | 0.0 | 0.0 |
| Lung Microvascular EC TNF alpha + | 0.0 | 0.0 | 0.0 | 0.0 |
| IL-1beta | | | | |
| Microvascular Dermal EC none | 0.0 | 0.0 | 0.0 | 0.0 |
| Microsvasular Dermal EC TNF alpha + | 0.0 | 0.0 | 0.0 | 0.0 |
| IL-1beta | | | | |
| Bronchial epithelium TNF alpha + IL1beta | 13.9 | 0.0 | 30.1 | 3.4 |
| Small airway epithelium none | 0.0 | 0.0 | 0.0 | 0.0 |
| Small airway epithelium TNF alpha + | 0.0 | 0.0 | 0.0 | 0.0 |
| IL-1beta | | | | |
| Coronery artery SMC rest | 0.0 | 0.0 | 0.0 | 0.0 |
| Coronery artery SMC TNF alpha + IL-1beta | 0.0 | 0.0 | 0.0 | 0.0 |
| Astrocytes rest | 0.0 | 0.0 | 0.0 | 0.0 |
| Astrocytes TNF alpha + IL-1beta | 0.0 | 0.0 | 0.0 | 0.0 |
| KU-812 (Basophil) rest | 0.0 | 0.0 | 0.0 | 0.0 |
| KU-812 (Basophil) PMA/ionomycin | 10.8 | 0.0 | 0.0 | 5.4 |
| CCD1106 (Keratinocytes) none | 0.0 | 0.0 | 0.0 | 0.0 |
| CCD1106 (Keratinocytes) TNF alpha + | 0.0 | 0.0 | 0.0 | 0.0 |
| IL-1beta | | | | |
| Liver cirrhosis | 22.7 | 80.1 | 63.7 | 100.0 |
| Lupus kidney | 0.0 | 7.4 | 0.0 | 0.0 |
| NCI-H292 none | 60.3 | 92.7 | 36.3 | 28.9 |
| NCI-H292 IL-4 | 55.9 | 6.5 | 28.7 | 14.3 |
| NCI-H292 IL-9 | 100.0 | 41.8 | 40.1 | 29.7 |
| NCI-H292 IL-13 | 35.8 | 6.7 | 9.4 | 23.7 |
| NCI-H292 IFN gamma | 0.0 | 23.8 | 1.2 | 0.0 |
| HPAEC none | 0.0 | 0.0 | 0.0 | 0.0 |
| HPAEC TNF alpha + IL-1beta | 0.0 | 0.0 | 0.0 | 0.0 |
| Lung fibroblast none | 0.0 | 0.0 | 0.0 | 0.0 |
| Lung fibroblast TNF alpha + IL-1beta | 0.0 | 0.0 | 0.0 | 0.0 |
| Lung fibroblast IL-4 | 0.0 | 0.0 | 0.0 | 0.0 |
| Lung fibroblast IL-9 | 0.0 | 0.0 | 0.0 | 0.0 |
| Lung fibroblast IL-13 | 0.0 | 0.0 | 0.0 | 0.0 |
| Lung fibroblast IFN gamma | 0.0 | 0.0 | 0.0 | 0.0 |
| Dermal fibroblast CCD1070 rest | 0.0 | 0.0 | 0.0 | 0.0 |
| Dermal fibroblast CCD1070 TNF alpha | 0.0 | 0.0 | 0.0 | 0.0 |
| Dermal fibroblast CCD1070 IL-1beta | 0.0 | 0.0 | 0.0 | 0.0 |
| Dermal fibroblast IFN gamma | 0.0 | 0.0 | 0.0 | 0.0 |
| Dermal fibroblast IL-4 | 0.0 | 0.0 | 0.0 | 0.0 |
| IBD Colitis 2 | 0.0 | 0.0 | 0.0 | 0.0 |
| IBD Crohn's | 13.8 | 0.0 | 0.0 | 0.0 |
| Colon | 79.6 | 100.0 | 100.0 | 74.7 |
| Lung | 77.9 | 66.0 | 53.6 | 85.3 |
| Thymus | 62.0 | 21.6 | 0.7 | 23.0 |
| Kidney | 0.0 | 0.0 | 0.0 | 0.0 |

[1224] Ardais Breast1.0 Summary: Ag720 Expression of this gene was highest in a breast cancer sample (CT=27.1). Significant CG53989-03 gene expression was detected in 45/64 breast cancer samples but only 1/7 normal breast samples. Gene or protein expression levels are useful for the detection of breast cancer. Therapeutic modulation of this gene, encoded protein and/or use of antibodies or small molecule drugs targeting this gene or gene product is useful in the treatment of breast cancer.

[1225] This gene encodes a protein with homology to mastocytoma protease precursor. Mast cell tryptase is a secretory granule associated serine protease with trypsin-like specificity. It is released extracellularly during mast cell degranulation. Mast cells (MC) have been associated with diverse human cancers. The primary function of these cells is to store and release a number of biologically active mediators, including the serine proteases tryptase and chymase. These proteases have been closely related with angiogenesis and tumor invasion, two critical steps during tumor progression. Malignant breast tumors have two to three times more tryptase-containing than chymase-containing mast cells, with the number of mast cells with trptase activity being significantly higher (p<0.02) than in benign lesions. In malignant lesions, tryptase-containing mast cells were concentrated at the tumor edge, i.e. the invasion zone (Kankkunen J P, Harvima I T, Naukkarinen A. Quantitative analysis of tryptase and chymase containing mast cells in benign and malignant breast lesions. Int J Cancer. 1997 Jul. 29; 72(3): 385-8). Therefore, the protease encoded by this gene plays a role in tumor invasion and metastasis.

[1226] General_screening_panel_v1.6 Summary: Ag6974 Highest expression of this gene was detected in a ovarian cancer OVCAR-5 cell line (CT=28). This gene showed preferential expression in colon cancer tissue and a number of cancer cell lines derived from pancreatic, colon, gastric, lung, breast and ovarian cancers. Expression of this gene is useful as diagnostic marker to detect these cancers and also, modulation of this gene, encoded protein and/or use of antibodies or small molecule drug targeting this gene or gene product is useful in the treatment of these cancers.

[1227] Panel 1.3D Summary: Ag1590/2899 The expression of the CG56242-01 gene was assessed in four independent runs using two different probe/primer sets. All of the runs show excellent concordance. The expression of this gene was highest in a sample derived from an ovarian cancer cell line (OVCAR-5) (CTs=31-32). There was significant expression associated with a colon cancer cell line, a gastric cancer cell line and pituitary tissue. Therapeutic modulation of this gene, encoded protein and/or use of small molecule or antibodies targeting this gene or gene product is useful in the treatment of ovarian cancer, gastric cancer or colon cancers.

[1228] Panel 2D Summary: Ag720/1590/2899 The expression of this gene was highest and exclusive to breast cancer samples (CTs=26-28). Thus, the expression of this gene is useful as marker for breast cancer. Therapeutic modulation of this gene, encoded protein and/or use of small molecule or antibodies targeting this gene or gene product is useful in the treatment of breast cancer.

[1229] Panel 3D Summary: Ag720/2899 The expression of this gene was highest in a sample derived from a lung cancer cell line (DMS-79)(CTs=29-31). There was low but significant expression associated with samples derived from an ovarian cancer cell line, a uterine cancer cell line and a pancreatic cancer cell line. The expression of this gene or expressed protein is useful in the detection of lung cancer. Therapeutic modulation of this gene, expressed protein and/or use of antibodies or small molecule drugs targeting the gene or gene product are useful in the treatment of lung cancer, ovarian cancer, pancreatic cancer or uterine cancer.

[1230] Panel 4D Summary: Ag1590/Ag1918/Ag2899 This gene, a tryptase homolog, was expressed at significant levels in IL-9-activated NCI-H292 cells, pulmonary mucoepidermoid cells. Colon, lung, and thymus tissues also showed low levels of expression of this gene. The expression in lung and in the activated NCI-H292 cell line, often used as a model for airway epithelium was consistent with published reports of tryptase in the lung (Walls A F, Bennett A R, Godfrey R C, Holgate S T, Church M K. Mast cell tryptase and histamine concentrations in bronchoalveolar lavage fluid from patients with interstitial lung disease. Clin Sci (Lond) 1991 August; 81(2):183-8). In addition, tryptase has been shown to be up-regulated in lungs affected by disease and specifically in COPD (Grashoff W F, Sont J K, Sterk P J, Hiemstra P S, de Boer W I, Stolk J, Han J, van Krieken J M. Chronic obstructive pulmonary disease: role of bronchiolar mast cells and macrophages. Am J Pathol 1997 December; 151(6):1785-90). Tryptase has also been implicated in the recruitment of granulocytes and epithelial repair (Cairns J A, Walls A F. Mast cell tryptase is a mitogen for epithelial cells. Stimulation of IL-8 production and intercellular adhesion molecule-1 expression. J Immunol 1996 Jan. 1; 156(1):275-83). Based on these observations, therapeutic modulation of this gene, encoded protein and/use of small molecule or antibodies targeting this gene is useful in the reduction or elimination of symptoms in patients with lung diseases including asthma, allergy, or chronic obstructive pulmonary disease.

[1231] AB. CG54212-02: GPCR.

[1232] Expression of gene CG54212-02 was assessed using the primer-probe set Ag431, described in Table ABA. Results of the RTQ-PCR runs are shown in Tables ABB, ABC and ABD.

TABLE ABA
Probe Name Ag431

| | | | Start | SEQ ID |
|---|---|---|---|---|
| Primers | Sequences | Length | Position | No |
| Forward | 5′-agtcacttcacctgcaagatcct-3′ | 23 | 533 | 1271 |
| Probe | TET-5′-ccgcatgccagcttcagcactg-3′- | 22 | 558 | 1272 |
| | TAMRA | | | |
| Reverse | 5′-cttcgctgaccgacgtgtt-3′ | 19 | 581 | 1273 |

[1233] TABLE ABB
Panel 1
Column A - Rel. Exp.(%) Ag431, Run 98747695

| Tissue Name | A | Tissue Name | A |
|---|---|---|---|
| Endothelial cells | 0.0 | Renal ca. 786-0 | 0.0 |
| Endothelial cells | 0.0 | Renal ca. A498 | 1.5 |
| (treated) | | | |
| Pancreas | 0.0 | Renal ca. RXF 393 | 0.0 |
| Pancreatic ca. | 0.0 | Renal ca. ACHN | 0.0 |
| CAPAN 2 | | | |
| Adrenal gland | 2.0 | Renal ca. UO-31 | 0.1 |
| Thyroid | 0.0 | Renal ca. TK-10 | 0.2 |
| Salivary gland | 0.1 | Liver | 0.1 |
| Pituitary gland | 0.4 | Liver (fetal) | 0.2 |
| Brain (fetal) | 27.5 | Liver ca. (hepatoblast) HepG2 | 0.0 |
| Brain (whole) | 21.9 | Lung | 1.3 |
| Brain (amygdala) | 36.1 | Lung (fetal) | 0.6 |
| Brain (cerebellum) | 28.5 | Lung ca. (small cell) LX-1 | 9.9 |
| Brain (hippocampus) | 36.1 | Lung ca. (small cell) NCI-H69 | 18.4 |
| Brain (substantia | 17.1 | Lung ca. (s. cell var.) SHP-77 | 0.0 |
| nigra) | | | |
| Brain (thalamus) | 36.1 | Lung ca. (large cell) NCI-H460 | 5.3 |
| Brain (hypothalamus) | 13.5 | Lung ca. (non-sm. cell) A549 | 8.4 |
| Spinal cord | 6.7 | Lung ca. (non-s. cell) NCI-H23 | 0.4 |
| glio/astro U87-MG | 0.0 | Lung ca. (non-s. cell) HOP-62 | 0.1 |
| glio/astro U-118-MG | 0.0 | Lung ca. (non-s. cl) NCI-H522 | 5.8 |
| astrocytoma SW1783 | 0.0 | Lung ca. (squam.) SW 900 | 13.5 |
| neuro*; met SK-N-AS | 0.1 | Lung ca. (squam.) NCI-H596 | 6.6 |
| astrocytoma SF-539 | 0.1 | Mammary gland | 25.2 |
| astrocytoma SNB-75 | 0.1 | Breast ca.* (pl.ef) MCF-7 | 0.9 |
| glioma SNB-19 | 2.6 | Breast ca.* (pl.ef) MDA-MB-231 | 0.0 |
| glioma U251 | 8.2 | Breast ca.* (pl.ef) T47D | 4.3 |
| glioma SF-295 | 2.6 | Breast ca. BT-549 | 0.3 |
| Heart | 4.0 | Breast ca. MDA-N | 0.2 |
| Skeletal muscle | 32.1 | Ovary | 0.4 |
| Bone marrow | 0.0 | Ovarian ca. OVCAR-3 | 1.4 |
| Thymus | 2.5 | Ovarian ca. OVCAR-4 | 0.1 |
| Spleen | 0.1 | Ovarian ca. OVCAR-5 | 17.9 |
| Lymph node | 0.0 | Ovarian ca. OVCAR-8 | 17.6 |
| Colon (ascending) | 16.0 | Ovarian ca. IGROV-1 | 8.1 |
| Stomach | 0.6 | Ovarian ca. (ascites) SK-OV-3 | 0.9 |
| Small intestine | 0.5 | Uterus | 1.0 |
| Colon ca. SW480 | 0.0 | Placenta | 0.5 |
| Colon ca.* SW620 | 0.0 | Prostate | 7.2 |
| (SW480 met) | | | |
| Colon ca. HT29 | 4.5 | Prostate ca.* (bone met) PC-3 | 2.0 |
| Colon ca. HCT-116 | 0.0 | Testis | 20.9 |
| Colon ca. CaCo-2 | 0.0 | Melanoma Hs688(A).T | 0.0 |
| Colon ca. HCT-15 | 10.5 | Melanoma* (met) Hs688(B).T | 1.6 |
| Colon ca. HCC-2998 | 9.6 | Melanoma UACC-62 | 1.9 |
| Gastric ca. (liver met) | 8.5 | Melanoma M14 | 0.1 |
| NCI-N87 | | | |
| Bladder | 5.3 | Melanoma LOX IMVI | 0.0 |
| Trachea | 0.0 | Melanoma* (met) SK-MEL-5 | 0.0 |
| Kidney | 1.0 | Melanoma SK-MEL-28 | 100.0 |
| Kidney (fetal) | 3.2 | | |

[1234] TABLE ABC
Panel 2D
Column A - Rel. Exp.(%) Ag431, Run 153681087

| Tissue Name | A | Tissue Name | A |
|---|---|---|---|
| Normal Colon | 2.0 | Kidney Margin 8120608 | 0.0 |
| CC Well to Mod Diff (ODO3866) | 1.4 | Kidney Cancer 8120613 | 0.0 |
| CC Margin (ODO3866) | 0.0 | Kidney Margin 8120614 | 0.0 |
| CC Gr.2 rectosigmoid (ODO3868) | 1.6 | Kidney Cancer 9010320 | 0.0 |
| CC Margin (ODO3868) | 2.0 | Kidney Margin 9010321 | 20.7 |
| CC Mod Diff (ODO3920) | 0.8 | Normal Uterus | 1.8 |
| CC Margin (ODO3920) | 1.1 | Uterine Cancer 064011 | 4.9 |
| CC Gr.2 ascend colon (ODO3921) | 1.9 | Normal Thyroid | 0.0 |
| CC Margin (ODO3921) | 2.1 | Thyroid Cancer | 0.0 |
| CC from Partial Hepatectomy | 0.0 | Thyroid Cancer A302152 | 0.0 |
| (ODO4309) Mets | | | |
| Liver Margin (ODO4309) | 1.2 | Thyroid Margin A302153 | 1.9 |
| Colon mets to lung (OD04451-01) | 9.2 | Normal Breast | 0.9 |
| Lung Margin (OD04451-02) | 0.7 | Breast Cancer | 29.5 |
| Normal Prostate 6546-1 | 3.6 | Breast Cancer (OD04590-01) | 2.8 |
| Prostate Cancer (OD04410) | 3.1 | Breast Cancer Mets (OD04590-03) | 0.0 |
| Prostate Margin (OD04410) | 7.0 | Breast Cancer Metastasis | 14.6 |
| Prostate Cancer (OD04720-01) | 6.9 | Breast Cancer | 9.4 |
| Prostate Margin (OD04720-02) | 7.9 | Breast Cancer | 100.0 |
| Normal Lung | 0.6 | Breast Cancer 9100266 | 4.0 |
| Lung Met to Muscle (ODO4286) | 0.0 | Breast Margin 9100265 | 1.3 |
| Muscle Margin (ODO4286) | 0.6 | Breast Cancer A209073 | 1.4 |
| Lung Malignant Cancer (OD03126) | 2.0 | Breast Margin A209073 | 2.7 |
| Lung Margin (OD03126) | 4.2 | Normal Liver | 0.0 |
| Lung Cancer (OD04404) | 0.0 | Liver Cancer | 0.7 |
| Lung Margin (OD04404) | 0.9 | Liver Cancer 1025 | 0.0 |
| Lung Cancer (OD04565) | 0.0 | Liver Cancer 1026 | 0.0 |
| Lung Margin (OD04565) | 0.0 | Liver Cancer 6004-T | 2.2 |
| Lung Cancer (OD04237-01) | 0.5 | Liver Tissue 6004-N | 2.4 |
| Lung Margin (OD04237-02) | 0.0 | Liver Cancer 6005-T | 0.0 |
| Ocular Mel Met to Liver (OD04310) | 0.0 | Liver Tissue 6005-N | 0.0 |
| Liver Margin (OD04310) | 0.0 | Normal Bladder | 3.6 |
| Melanoma Metastasis | 0.0 | Bladder Cancer | 2.8 |
| Lung Margin (OD04321) | 2.5 | Bladder Cancer | 2.8 |
| Normal Kidney | 2.5 | Bladder Cancer (OD04718-01) | 0.8 |
| Kidney Ca, Nuclear grade 2 (OD04338) | 0.9 | Bladder Normal Adjacent | 3.2 |
| | | (OD04718-03) | |
| Kidney Margin (OD04338) | 0.0 | Normal Ovary | 0.0 |
| Kidney Ca Nuclear grade ½ (OD04339) | 0.0 | Ovarian Cancer | 2.0 |
| Kidney Margin (OD04339) | 3.1 | Ovarian Cancer (OD04768-07) | 0.0 |
| Kidney Ca, Clear cell type (OD04340) | 0.0 | Ovary Margin (OD04768-08) | 0.0 |
| Kidney Margin (OD04340) | 0.0 | Normal Stomach | 4.8 |
| Kidney Ca, Nuclear grade 3 (OD04348) | 0.0 | Gastric Cancer 9060358 | 0.0 |
| Kidney Margin (OD04348) | 2.7 | Stomach Margin 9060359 | 0.0 |
| Kidney Cancer (OD04622-01) | 1.1 | Gastric Cancer 9060395 | 2.9 |
| Kidney Margin (OD04622-03) | 0.0 | Stomach Margin 9060394 | 0.6 |
| Kidney Cancer (OD04450-01) | 0.0 | Gastric Cancer 9060397 | 0.6 |
| Kidney Margin (OD04450-03) | 5.0 | Stomach Margin 9060396 | 0.0 |
| Kidney Cancer 8120607 | 0.0 | Gastric Cancer 064005 | 0.6 |

[1235] TABLE ABD
Panel 4D
Column A - Rel. Exp.(%) Ag431, Run 153681094

| Tissue Name | A | Tissue Name | A |
|---|---|---|---|
| Secondary Th1 act | 0.0 | HUVEC IL-1beta | 0.0 |
| Secondary Th2 act | 0.1 | HUVEC IFN gamma | 0.1 |
| Secondary Tr1 act | 0.0 | HUVEC TNF alpha + IFN gamma | 0.0 |
| Secondary Th1 rest | 0.0 | HUVEC TNF alpha + IL4 | 0.0 |
| Secondary Th2 rest | 0.0 | HUVEC IL-11 | 0.1 |
| Secondary Tr1 rest | 0.0 | Lung Microvascular EC none | 0.0 |
| Primary Th1 act | 0.0 | Lung Microvascular EC TNF alpha + IL- | 0.0 |
| | | 1beta | |
| Primary Th2 act | 0.2 | Microvascular Dermal EC none | 0.0 |
| Primary Tr1 act | 0.0 | Microsvasular Dermal EC TNF alpha + IL- | 0.0 |
| | | 1beta | |
| Primary Th1 rest | 0.0 | Bronchial epithelium TNF alpha + IL1beta | 0.3 |
| Primary Th2 rest | 0.0 | Small airway epithelium none | 0.0 |
| Primary Tr1 rest | 0.1 | Small airway epithelium TNF alpha + IL- | 0.0 |
| | | 1beta | |
| CD45RA CD4 lymphocyte act | 0.0 | Coronery artery SMC rest | 0.0 |
| CD45RO CD4 lymphocyte act | 0.0 | Coronery artery SMC TNF alpha + IL-1beta | 0.0 |
| CD8 lymphocyte act | 0.0 | Astrocytes rest | 0.0 |
| Secondary CD8 lymphocyte rest | 0.0 | Astrocytes TNF alpha + IL-1beta | 0.0 |
| Secondary CD8 lymphocyte act | 0.0 | KU-812 (Basophil) rest | 0.0 |
| CD4 lymphocyte none | 1.8 | KU-812 (Basophil) PMA/ionomycin | 0.0 |
| 2ry Th1/Th2/Tr1 anti-CD95 | 0.0 | CCD1106 (Keratinocytes) none | 0.0 |
| CH11 | | | |
| LAK cells rest | 0.0 | CCD1106 (Keratinocytes) TNF alpha + IL- | 0.0 |
| | | 1beta | |
| LAK cells IL-2 | 0.0 | Liver cirrhosis | 0.5 |
| LAK cells IL-2 + IL-12 | 0.0 | Lupus kidney | 0.0 |
| LAK cells IL-2 + IFN gamma | 0.0 | NCI-H292 none | 0.0 |
| LAK cells IL-2 + IL-18 | 0.0 | NCI-H292 IL-4 | 0.4 |
| LAK cells PMA/ionomycin | 0.1 | NCI-H292 IL-9 | 0.2 |
| NK Cells IL-2 rest | 0.0 | NCI-H292 IL-13 | 0.0 |
| Two Way MLR 3 day | 5.1 | NCI-H292 IFN gamma | 100.0 |
| Two Way MLR 5 day | 0.0 | HPAEC none | 0.0 |
| Two Way MLR 7 day | 0.0 | HPAEC TNF alpha + IL-1beta | 0.0 |
| PBMC rest | 0.0 | Lung fibroblast none | 0.0 |
| PBMC PWM | 0.0 | Lung fibroblast TNF alpha + IL-1beta | 0.0 |
| PBMC PHA-L | 0.0 | Lung fibroblast IL-4 | 0.0 |
| Ramos (B cell) none | 0.0 | Lung fibroblast IL-9 | 0.0 |
| Ramos (B cell) ionomycin | 0.0 | Lung fibroblast IL-13 | 0.2 |
| B lymphocytes PWM | 0.1 | Lung fibroblast IFN gamma | 0.0 |
| B lymphocytes CD40L and IL-4 | 0.4 | Dermal fibroblast CCD1070 rest | 0.1 |
| EOL-1 dbcAMP | 0.0 | Dermal fibroblast CCD1070 TNF alpha | 0.2 |
| EOL-1 dbcAMP | 0.0 | Dermal fibroblast CCD1070 IL-1beta | 0.0 |
| PMA/ionomycin | | | |
| Dendritic cells none | 0.2 | Dermal fibroblast IFN gamma | 0.0 |
| Dendritic cells LPS | 0.0 | Dermal fibroblast IL-4 | 0.0 |
| Dendritic cells anti-CD40 | 0.0 | IBD Colitis 2 | 0.1 |
| Monocytes rest | 0.0 | IBD Crohn's | 0.0 |
| Monocytes LPS | 0.0 | Colon | 0.2 |
| Macrophages rest | 0.0 | Lung | 0.2 |
| Macrophages LPS | 0.0 | Thymus | 0.1 |
| HUVEC none | 0.0 | Kidney | 0.2 |
| HUVEC starved | 0.0 | | |

[1236] Panel 1 Summary: Ag431 Expression of this gene was highest in a melanoma cell line (CT=27.1). Significant expression was also detected in ovarian, lung, and colon cancer cell lines. Modulation of this gene, encoded protein and/or use of small molecule drugs or antibodies targeting this gene or gene product is useful in the treatment of melanoma and lung, colon or ovarian cancers.

[1237] Among tissues with metabolic function, this gene was expressed in the pituitary and adrenal glands, the hypothalamus, heart and skeletal muscle. Modulation of this gene, encoded protein and/or use of antibodies or small molecule drug targeting this gene or gene product is useful in the treatment of metabolic/endocrine diseases such as diabetes and obesity.

[1238] This gene was also expressed at moderate levels in all the regions of the central nervous system examined including the fetal brain, cerebellum, amygdala, hippocampus, substantia nigra, thalamus, hypothalamus, and spinal cord. This gene codes for a GPCR. Neurotransmitter receptors belong to GPCR family of proteins. Thus, this protein may represent a novel neurotransmitter receptor. Neurotransmitter receptors that are GPCRs include the dopamine receptor family, the serotonin receptor family, the GABA receptor, and muscarinic acetylcholine receptors. The selected targeting of dopamine and serotonin receptors has proven to be effective in the treatement of psychiatric illnesses such as schizophrenia, bipolar disorder and depression. Furthermore, the cerebral cortex and hippocampus regions of the brain are known to play critical roles in Alzheimer's disease, seizure disorders, and in the normal process of memory formation. Therefore, modulation of this gene and/or encoded protein is useful in the treatment of any of these diseases.

[1239] Panel 2D Summary: Ag431 Expression of this gene was highest in breast cancer (CT=32.3) and was not detected at significant levels in normal breast tissue. There was significant expression in number of breast cancer samples. Modulation of this gene and encoded protein is useful in the treatment of breast cancer.

[1240] Panel 4D Summary: Ag431 This gene was expressed in IFN-gamma-stimulated mucoepidermoid (mucus-producing) NCI-H292 cells, but not in resting NCI-H292 cells, or in IL-4-, IL-9-, or IL-13-stimulated NCI-H292 cells. The gene was also expressed at low but significant levels at the three-day time point in a two-way mixed lymphocyte reaction with cells from normal human donors. Thus, modulation of this gene, encoded protein and/or use of antibody or small molecule drug targeting this gene or gene product is useful int he treatment of inflammatory diseases such as colitis, chronic obstructive pulmonary disease, asthma, allergy and emphysema.

[1241] AC. CG5423601: Cysteinyl Leukotriene Receptor 2.

[1242] Expression of gene CG54236-01 was assessed using the primer-probe set Ag2695, described in Table ACA. Results of the RTQ-PCR runs are shown in Tables ACB, ACC, ACD, ACE and ACF.

TABLE ACA
Probe Name Ag2695

| | | | Start | SEQ ID |
|---|---|---|---|---|
| Primers | Sequences | Length | Position | No |
| Forward | 5′-gggaaatgggttgtccatatat-3′ | 22 | 266 | 1274 |
| Probe | TET-5′-tcctgcagccttataagaagtccaca-3′- | 26 | 292 | 1275 |
| | TAMRA | | | |
| Reverse | 5′-atctgaaatggccagatttagc-3′ | 22 | 335 | 1276 |

[1243] TABLE ACB
AI_comprehensive panel_v1.0
Column A - Rel. Exp. (%) Ag2695, Run 249247284
Column B - Rel. Exp. (%) Ag2695, Run 249259794

| Tissue Name | A | B | Tissue Name | A | B |
|---|---|---|---|---|---|
| 110967 COPD-F | 7.1 | 2.5 | 112427 Match Control Psoriasis-F | 54.0 | 53.2 |
| 110980 COPD-F | 6.2 | 0.0 | 112418 Psoriasis-M | 0.0 | 6.4 |
| 110968 COPD-M | 6.9 | 7.9 | 112723 Match Control Psoriasis- | 0.0 | 0.0 |
| | | | M | | |
| 110977 COPD-M | 12.3 | 15.2 | 112419 Psoriasis-M | 12.5 | 12.5 |
| 110989 Emphysema-F | 45.1 | 28.5 | 112424 Match Control Psoriasis- | 19.5 | 11.0 |
| | | | M | | |
| 110992 Emphysema-F | 15.4 | 7.6 | 112420 Psoriasis-M | 85.9 | 75.3 |
| 110993 Emphysema-F | 11.9 | 4.8 | 112425 Match Control Psoriasis- | 48.0 | 58.2 |
| | | | M | | |
| 110994 Emphysema-F | 2.5 | 0.0 | 104689 (MF) OA Bone-Backus | 39.0 | 59.9 |
| 110995 Emphysema-F | 12.9 | 38.4 | 104690 (MF) Adj “Normal” Bone- | 21.8 | 27.7 |
| | | | Backus | | |
| 110996 Emphysema-F | 12.2 | 0.0 | 104691 (ME) OA Synovium- | 77.4 | 68.3 |
| | | | Backus | | |
| 110997 Asthma-M | 4.2 | 3.2 | 104692 (BA) OA Cartilage- | 0.0 | 0.0 |
| | | | Backus | | |
| 111001 Asthma-F | 46.3 | 25.2 | 104694 (BA) OA Bone-Backus | 48.3 | 47.0 |
| 111002 Asthma-F | 52.5 | 27.5 | 104695 (BA) Adj “Normal” Bone- | 24.8 | 21.5 |
| | | | Backus | | |
| 111003 Atopic Asthma-F | 58.2 | 46.0 | 104696 (BA) OA Synovium- | 81.8 | 49.7 |
| | | | Backus | | |
| 111004 Atopic Asthma-F | 42.3 | 53.2 | 104700 (SS) OA Bone-Backus | 26.8 | 15.2 |
| 111005 Atopic Asthma-F | 26.4 | 26.8 | 104701 (SS) Adj “Normal” Bone- | 13.5 | 11.4 |
| | | | Backus | | |
| 111006 Atopic Asthma-F | 7.1 | 13.7 | 104702 (SS) OA Synovium- | 62.0 | 49.0 |
| | | | Backus | | |
| 111417 Allergy-M | 20.0 | 18.8 | 117093 OA Cartilage Rep7 | 89.5 | 59.0 |
| 112347 Allergy-M | 0.0 | 0.0 | 112672 OA Bone5 | 16.7 | 38.2 |
| 112349 Normal Lung-F | 0.0 | 0.0 | 112673 OA Synovium5 | 15.7 | 11.3 |
| 112357 Normal Lung-F | 34.4 | 28.9 | 112674 OA Synovial Fluid cells5 | 0.0 | 12.9 |
| 112354 Normal Lung-M | 98.6 | 55.5 | 117100 OA Cartilage Rep14 | 7.6 | 6.1 |
| 112374 Crohns-F | 5.6 | 7.2 | 112756 OA Bone9 | 22.5 | 7.9 |
| 112389 Match Control | 11.0 | 5.2 | 112757 OA Synovium9 | 1.7 | 0.0 |
| Crohns-F | | | | | |
| 112375 Crohns-F | 7.8 | 2.5 | 112758 OA Synovial Fluid Cells9 | 6.7 | 20.4 |
| 112732 Match Control | 43.5 | 18.6 | 117125 RA Cartilage Rep2 | 2.3 | 4.7 |
| Crohns-F | | | | | |
| 112725 Crohns-M | 3.2 | 0.0 | 113492 Bone2 RA | 42.3 | 26.8 |
| 112387 Match Control | 2.1 | 8.0 | 113493 Synovium2 RA | 16.6 | 3.7 |
| Crohns-M | | | | | |
| 112378 Crohns-M | 0.0 | 0.0 | 113494 Syn Fluid Cells RA | 31.2 | 23.0 |
| 112390 Match Control | 28.1 | 32.5 | 113499 Cartilage4 RA | 20.9 | 20.0 |
| Crohns-M | | | | | |
| 112726 Crohns-M | 23.2 | 25.3 | 113500 Bone4 RA | 22.8 | 39.5 |
| 112731 Match Control | 20.0 | 15.3 | 113501 Synovium4 RA | 26.6 | 24.8 |
| Crohns-M | | | | | |
| 112380 Ulcer Col-F | 11.3 | 20.7 | 113502 Syn Fluid Cells4 RA | 26.2 | 19.2 |
| 12734 Match Control Ulcer | 82.9 | 43.2 | 113495 Cartilage3 RA | 22.4 | 16.5 |
| Col-F | | | | | |
| 112384 Ulcer Col-F | 24.7 | 25.9 | 113496 Bone3 RA | 13.0 | 18.4 |
| 112737 Match Control Ulcer | 8.3 | 3.7 | 113497 Synovium3 RA | 7.0 | 9.9 |
| Col-F | | | | | |
| 112386 Ulcer Col-F | 2.2 | 3.6 | 113498 Syn Fluid Cells3 RA | 25.9 | 27.4 |
| 112738 Match Control Ulcer | 10.5 | 4.1 | 117106 Normal Cartilage Rep20 | 6.9 | 1.9 |
| Col-F | | | | | |
| 112381 Ulcer Col-M | 1.5 | 0.0 | 113663 Bone3 Normal | 0.0 | 0.0 |
| 112735 Match Control Ulcer | 11.7 | 4.5 | 113664 Synovium3 Normal | 0.0 | 0.0 |
| Col-M | | | | | |
| 112382 Ulcer Col-M | 25.5 | 16.6 | 113665 Syn Fluid Cells3 Normal | 1.2 | 0.0 |
| 112394 Match Control Ulcer | 1.3 | 2.9 | 117107 Normal Cartilage Rep22 | 12.9 | 0.0 |
| Col-M | | | | | |
| 112383 Ulcer Col-M | 12.2 | 11.7 | 113667 Bone4 Normal | 50.7 | 45.4 |
| 112736 Match Control Ulcer | 15.7 | 5.6 | 113668 Synovium4 Normal | 50.0 | 64.6 |
| Col-M | | | | | |
| 112423 Psoriasis-F | 21.2 | 18.2 | 113669 Syn Fluid Cells4 Normal | 100.0 | 100.0 |

[1244] TABLE ACC
CNS_neurodegeneration_v1.0
Column A - Rel. Exp. (%) Ag2695, Run 209751330
Column B - Rel. Exp. (%) Ag2695, Run 219966626

| Tissue Name | A | B | Tissue Name | A | B |
|---|---|---|---|---|---|
| AD 1 Hippo | 24.8 | 15.5 | AH3 4624 | 100.0 | 47.6 |
| AD 2 Hippo | 37.6 | 34.4 | AH3 4640 | 58.6 | 63.3 |
| AD 3 Hippo | 27.0 | 19.1 | AD 1 Occipital Ctx | 20.9 | 31.0 |
| AD 4 Hippo | 28.5 | 20.4 | AD 2 Occipital Ctx | 7.8 | 16.7 |
| | | | (Missing) | | |
| AD 5 Hippo | 40.3 | 43.2 | AD 3 Occipital Ctx | 31.9 | 19.1 |
| AD 6 Hippo | 15.0 | 13.4 | AD 4 Occipital Ctx | 51.8 | 40.6 |
| Control 2 Hippo | 18.3 | 20.9 | AD 5 Occipital Ctx | 12.9 | 24.3 |
| Control 4 Hippo | 56.3 | 31.9 | AD 5 Occipital Ctx | 35.4 | 32.1 |
| Control (Path) | 43.2 | 20.9 | Control 1 | 100.0 | 97.3 |
| 3 Hippo | | | Occipital Ctx | | |
| AD 1 Temporal Ctx | 27.7 | 39.5 | Control 2 | 44.1 | 37.9 |
| | | | Occipital Ctx | | |
| AD 2 Temporal Ctx | 21.9 | 35.8 | Control 3 | 50.0 | 49.0 |
| | | | Occipital Ctx | | |
| AD 3 Temporal Ctx | 13.0 | 31.2 | Control 4 | 62.9 | 22.8 |
| | | | Occipital Ctx | | |
| AD 4 Temporal Ctx | 37.6 | 45.4 | Control (Path) 1 | 35.6 | 41.8 |
| | | | Occipital Ctx | | |
| AD 5 Inf Temporal | 32.3 | 44.1 | Control (Path) 2 | 67.4 | 50.0 |
| Ctx | | | Occipital Ctx | | |
| AD 5 Sup Temporal | 31.4 | 26.6 | Control (Path) 3 | 99.3 | 72.7 |
| Ctx | | | Occipital Ctx | | |
| AD 6 Inf Temporal | 16.8 | 15.3 | Control (Path) 4 | 88.9 | 90.8 |
| Ctx | | | Occipital Ctx | | |
| AD 6 Sup Temporal | 18.2 | 18.0 | Control 1 | 97.3 | 94.0 |
| Ctx | | | Parietal Ctx | | |
| Control 1 Temporal | 88.3 | 100.0 | Control 2 | 30.4 | 27.0 |
| Ctx | | | Parietal Ctx | | |
| Control 2 Temporal | 36.3 | 36.1 | Control 3 | 25.0 | 14.4 |
| Ctx | | | Parietal Ctx | | |
| Control 3 Temporal | 32.1 | 43.2 | Control (Path) 1 | 46.3 | 33.4 |
| Ctx | | | Parietal Ctx | | |
| Control 3 Temporal | 32.3 | 62.4 | Control (Path) 2 | 66.0 | 48.3 |
| Ctx | | | Parietal Ctx | | |
| AH3 3975 | 48.6 | 45.4 | Control (Path) 3 | 58.2 | 80.1 |
| | | | Parietal Ctx | | |
| AH3 3954 | 44.1 | 41.8 | Control (Path) 4 | 52.5 | 54.0 |
| | | | Parietal Ctx | | |

[1245] TABLE ACD
Panel 1.3D
Column A - Rel. Exp. (%) Ag2695, Run 153140732
Column B - Rel. Exp. (%) Ag2695, Run 153830081

| Tissue Name | A | B | Tissue Name | A | B |
|---|---|---|---|---|---|
| Liver adenocarcinoma | 0.0 | 0.0 | Kidney (fetal) | 0.0 | 3.9 |
| Pancreas | 2.1 | 4.2 | Renal ca. 786-0 | 0.0 | 0.0 |
| Pancreatic ca. CAPAN 2 | 0.0 | 0.0 | Renal ca. A498 | 0.0 | 1.9 |
| Adrenal gland | 67.4 | 100.0 | Renal ca. RXF 393 | 0.0 | 0.0 |
| Thyroid | 5.1 | 2.0 | Renal ca. ACHN | 0.0 | 0.0 |
| Salivary gland | 5.1 | 3.5 | Renal ca. UO-31 | 0.0 | 0.0 |
| Pituitary gland | 1.0 | 4.9 | Renal ca. TK-10 | 0.0 | 0.0 |
| Brain (fetal) | 3.5 | 0.0 | Liver | 1.5 | 3.9 |
| Brain (whole) | 20.3 | 16.0 | Liver (fetal) | 0.0 | 2.5 |
| Brain (amygdala) | 22.2 | 12.5 | Liver ca. (hepatoblast) HepG2 | 0.0 | 0.0 |
| Brain (cerebellum) | 2.1 | 4.5 | Lung | 18.8 | 16.2 |
| Brain (hippocampus) | 61.1 | 35.1 | Lung (fetal) | 3.7 | 3.7 |
| Brain (substantia nigra) | 9.2 | 8.8 | Lung ca. (small cell) LX-1 | 0.0 | 0.0 |
| Brain (thalamus) | 8.7 | 18.6 | Lung ca. (small cell) NCI-H69 | 0.0 | 0.0 |
| Cerebral Cortex | 45.1 | 53.2 | Lung ca. (s. cell var.) SHP-77 | 0.0 | 0.0 |
| Spinal cord | 11.3 | 8.0 | Lung ca. (large cell) NCI-H460 | 0.0 | 0.0 |
| glio/astro U87-MG | 0.0 | 0.0 | Lung ca. (non-sm. cell) A549 | 0.0 | 0.0 |
| glio/astro U-118-MG | 4.2 | 0.0 | Lung ca. (non-s. cell) NCI-H23 | 0.0 | 1.8 |
| astrocytoma SW1783 | 0.0 | 0.0 | Lung ca. (non-s. cell) HOP-62 | 0.0 | 0.0 |
| neuro*; met SK-N-AS | 0.0 | 0.0 | Lung ca. (non-s. cl) NCI-H522 | 0.0 | 0.0 |
| astrocytoma SF-539 | 9.0 | 0.0 | Lung ca. (squam.) SW 900 | 0.0 | 0.0 |
| astrocytoma SNB-75 | 0.0 | 0.0 | Lung ca. (squam.) NCI-H596 | 2.3 | 0.0 |
| glioma SNB-19 | 0.0 | 2.9 | Mammary gland | 5.2 | 9.0 |
| glioma U251 | 0.0 | 0.0 | Breast ca.* (pl. ef) MCF-7 | 0.0 | 0.0 |
| glioma SF-295 | 0.0 | 2.0 | Breast ca.* (pl. ef) MDA-MB- | 0.0 | 0.0 |
| | | | 231 | | |
| Heart (Fetal) | 17.4 | 16.5 | Breast ca.* (pl. ef) T47D | 0.0 | 0.0 |
| Heart | 41.5 | 33.0 | Breast ca. BT-549 | 0.0 | 0.0 |
| Skeletal muscle (Fetal) | 8.6 | 5.2 | Breast ca. MDA-N | 0.0 | 0.0 |
| Skeletal muscle | 0.0 | 0.0 | Ovary | 16.2 | 9.1 |
| Bone marrow | 3.5 | 11.7 | Ovarian ca. OVCAR-3 | 0.0 | 0.0 |
| Thymus | 1.4 | 6.8 | Ovarian ca. OVCAR-4 | 0.0 | 0.0 |
| Spleen | 100.0 | 59.0 | Ovarian ca. OVCAR-5 | 0.0 | 0.0 |
| Lymph node | 32.3 | 26.8 | Ovarian ca. OVCAR-8 | 0.0 | 0.0 |
| Colorectal | 17.9 | 20.2 | Ovarian ca. IGROV-1 | 0.0 | 0.0 |
| Stomach | 9.5 | 0.0 | Ovarian ca. (ascites) SK-OV-3 | 0.0 | 0.0 |
| Small intestine | 13.4 | 39.0 | Uterus | 6.5 | 4.3 |
| Colon ca. SW480 | 0.0 | 0.0 | Placenta | 49.0 | 32.5 |
| Colon ca.* SW620 (SW480 met) | 0.0 | 0.0 | Prostate | 15.0 | 2.2 |
| Colon ca. HT29 | 0.0 | 1.9 | Prostate ca.* (bone met) PC-3 | 0.0 | 0.0 |
| Colon ca. HCT-116 | 0.0 | 0.0 | Testis | 2.4 | 1.0 |
| Colon ca. CaCo-2 | 0.0 | 0.0 | Melanoma Hs688(A).T | 0.0 | 0.0 |
| CC Well to Mod Diff | 11.0 | 3.4 | Melanoma* (met) Hs688(B).T | 0.0 | 0.0 |
| (ODO3866) | | | | | |
| Colon ca. HCC-2998 | 0.6 | 0.0 | Melanoma UACC-62 | 0.0 | 0.0 |
| Gastric ca. (liver met) NCI-N87 | 0.0 | 1.9 | Melanoma M14 | 0.0 | 0.0 |
| Bladder | 0.0 | 2.4 | Melanoma LOX IMVI | 0.0 | 0.0 |
| Trachea | 4.2 | 0.0 | Melanoma* (met) SK-MEL-5 | 14.0 | 4.3 |
| Kidney | 2.4 | 0.0 | Adipose | 15.5 | 16.7 |

[1246] TABLE ACE
Panel 2D
Column A - Rel. Exp. (%) Ag2695, Run 153140795
Column B - Rel. Exp. (%) Ag2695, Run 153789847

| Tissue Name | A | B | Tissue Name | A | B |
|---|---|---|---|---|---|
| Normal Colon | 3.8 | 3.3 | Kidney Margin 8120608 | 1.4 | 0.5 |
| CC Well to Mod Diff (ODO3866) | 1.5 | 0.6 | Kidney Cancer 8120613 | 0.1 | 0.1 |
| CC Margin (ODO3866) | 2.7 | 0.5 | Kidney Margin 8120614 | 0.6 | 0.0 |
| CC Gr.2 rectosigmoid (ODO3868) | 0.1 | 0.2 | Kidney Cancer 9010320 | 4.0 | 2.5 |
| CC Margin (ODO3868) | 0.9 | 0.3 | Kidney Margin 9010321 | 0.4 | 1.1 |
| CC Mod Diff (ODO3920) | 0.6 | 0.2 | Normal Uterus | 0.4 | 0.3 |
| CC Margin (ODO3920) | 0.5 | 0.3 | Uterine Cancer 064011 | 1.2 | 0.9 |
| CC Gr.2 ascend colon (ODO3921) | 3.2 | 2.2 | Normal Thyroid | 0.6 | 0.8 |
| CC Margin (ODO3921) | 0.8 | 0.6 | Thyroid Cancer | 7.3 | 5.7 |
| CC from Partial Hepatectomy | 1.6 | 2.0 | Thyroid Cancer A302152 | 7.1 | 8.9 |
| (ODO4309) Mets | | | | | |
| Liver Margin (ODO4309) | 1.3 | 1.5 | Thyroid Margin A302153 | 1.3 | 1.1 |
| Colon mets to lung (OD04451-01) | 0.3 | 1.2 | Normal Breast | 1.1 | 1.8 |
| Lung Margin (OD04451-02) | 2.9 | 1.7 | Breast Cancer | 0.2 | 1.3 |
| Normal Prostate 6546-1 | 2.0 | 0.8 | Breast Cancer (OD04590-01) | 2.2 | 2.0 |
| Prostate Cancer (OD04410) | 1.9 | 1.7 | Breast Cancer Mets | | |
| | | | (OD04590-03) | 6.7 | 8.5 |
| Prostate Margin (OD04410) | 3.5 | 3.9 | Breast Cancer Metastasis | 2.7 | 2.7 |
| Prostate Cancer (OD04720-01) | 1.7 | 0.5 | Breast Cancer | 0.6 | 0.6 |
| Prostate Margin (OD04720-02) | 5.0 | 4.4 | Breast Cancer | 0.7 | 0.6 |
| Normal Lung | 6.9 | 7.8 | Breast Cancer 9100266 | 0.1 | 0.3 |
| Lung Met to Muscle (ODO4286) | 2.2 | 2.0 | Breast Margin 9100265 | 0.2 | 0.5 |
| Muscle Margin (ODO4286) | 0.3 | 0.5 | Breast Cancer A209073 | 2.3 | 1.7 |
| Lung Malignant Cancer | 2.4 | 3.7 | Breast Margin A209073 | 0.4 | 0.3 |
| (OD03126) | | | | | |
| Lung Margin (OD03126) | 6.9 | 6.7 | Normal Liver | 0.6 | 0.2 |
| Lung Cancer (OD04404) | 5.5 | 2.1 | Liver Cancer | 0.8 | 0.0 |
| Lung Margin (OD04404) | 1.6 | 1.9 | Liver Cancer 1025 | 0.2 | 0.2 |
| Lung Cancer (OD04565) | 0.6 | 0.5 | Liver Cancer 1026 | 0.8 | 0.6 |
| Lung Margin (OD04565) | 1.0 | 2.0 | Liver Cancer 6004-T | 0.4 | 0.5 |
| Lung Cancer (OD04237-01) | 4.5 | 3.8 | Liver Tissue 6004-N | 0.9 | 0.3 |
| Lung Margin (OD04237-02) | 3.9 | 5.2 | Liver Cancer 6005-T | 0.2 | 0.2 |
| Ocular Mel Met to Liver | 0.0 | 0.2 | Liver Tissue 6005-N | 0.3 | 0.3 |
| (ODO4310) | | | | | |
| Liver Margin (ODO4310) | 1.7 | 0.7 | Normal Bladder | 0.9 | 1.5 |
| Melanoma Metastasis | 100.0 | 100.0 | Bladder Cancer | 0.1 | 0.4 |
| Lung Margin (OD04321) | 7.3 | 6.5 | Bladder Cancer | 0.5 | 1.2 |
| Normal Kidney | 6.4 | 5.0 | Bladder Cancer (OD04718- | 1.8 | 1.2 |
| | | | 01) | | |
| Kidney Ca, Nuclear grade 2 | 34.2 | 33.9 | Bladder Normal Adjacent | 2.2 | 1.9 |
| (OD04338) | | | (OD04718-03) | | |
| Kidney Margin (OD04338) | 5.2 | 5.6 | Normal Ovary | 0.6 | 0.2 |
| Kidney Ca Nuclear grade 1/2 | 1.4 | 0.8 | Ovarian Cancer | 2.9 | 1.7 |
| (OD04339) | | | | | |
| Kidney Margin (OD04339) | 0.9 | 2.0 | Ovarian Cancer (OD04768- | 14.4 | 10.8 |
| | | | 07) | | |
| Kidney Ca, Clear cell type | 8.5 | 10.3 | Ovary Margin (OD04768-08) | 1.4 | 1.0 |
| (OD04340) | | | | | |
| Kidney Margin (OD04340) | 11.3 | 6.6 | Normal Stomach | 0.6 | 1.5 |
| Kidney Ca, Nuclear grade 3 | 1.4 | 1.9 | Gastric Cancer 9060358 | 0.5 | 0.7 |
| (OD04348) | | | | | |
| Kidney Margin (OD04348) | 5.4 | 7.3 | Stomach Margin 9060359 | 0.6 | 0.6 |
| Kidney Cancer (OD04622-01) | 49.0 | 63.7 | Gastric Cancer 9060395 | 1.1 | 1.2 |
| Kidney Margin (OD04622-03) | 0.7 | 1.2 | Stomach Margin 9060394 | 1.2 | 0.4 |
| Kidney Cancer (OD04450-01) | 1.4 | 1.4 | Gastric Cancer 9060397 | 0.9 | 0.9 |
| Kidney Margin (OD04450-03) | 5.7 | 4.6 | Stomach Margin 9060396 | 1.7 | 1.1 |
| Kidney Cancer 8120607 | 0.2 | 0.0 | Gastric Cancer 064005 | 3.0 | 2.6 |

[1247] TABLE ACF
Panel 4D
Column A - Rel. Exp. (%) Ag2695, Run 153140809
Column B - Rel. Exp. (%) Ag2695, Run 153766369

| Tissue Name | A | B | Tissue Name | A | B |
|---|---|---|---|---|---|
| Secondary Th1 act | 1.0 | 1.6 | HUVEC IL-1beta | 0.0 | 0.0 |
| Secondary Th2 act | 21.0 | 29.5 | HUVEC IFN gamma | 0.0 | 0.0 |
| Secondary Tr1 act | 5.0 | 10.8 | HUVEC TNFalpha + IFN gamma | 0.0 | 0.0 |
| Secondary Th1 rest | 0.6 | 3.8 | HUVEC TNFalpha + IL4 | 0.0 | 0.0 |
| Secondary Th2 rest | 13.9 | 15.4 | HUVEC IL-11 | 0.0 | 0.0 |
| Secondary Tr1 rest | 6.1 | 5.0 | Lung Microvascular EC none | 0.0 | 0.0 |
| Primary Th1 act | 0.0 | 2.6 | Lung Microvascular EC TNFalpha + | 0.0 | 0.0 |
| | | | IL-1beta | | |
| Primary Th2 act | 39.0 | 54.3 | Microvascular Dermal EC none | 0.0 | 0.0 |
| Primary Tr1 act | 10.7 | 21.6 | Microsvasular Dermal EC TNFalpha + | 0.0 | 0.0 |
| | | | IL-1beta | | |
| Primary Th1 rest | 21.0 | 24.7 | Bronchial epithelium TNFalpha + | 0.0 | 0.0 |
| | | | IL1beta | | |
| Primary Th2 rest | 26.1 | 21.2 | Small airway epithelium none | 0.0 | 0.0 |
| Primary Tr1 rest | 11.7 | 19.1 | Small airway epithelium TNFalpha + | 0.0 | 0.0 |
| | | | IL-1beta | | |
| CD45RA CD4 lymphocyte | 9.6 | 7.1 | Coronery artery SMC rest | 0.0 | 0.0 |
| act | | | | | |
| CD45RO CD4 lymphocyte | 15.6 | 17.3 | Coronery artery SMC TNFalpha + | 0.0 | 0.0 |
| act | | | IL-1beta | | |
| CD8 lymphocyte act | 11.7 | 9.3 | Astrocytes rest | 0.0 | 0.5 |
| Secondary CD8 lymphocyte | 8.4 | 9.0 | Astrocytes TNFalpha + IL-1beta | 0.0 | 0.0 |
| rest | | | | | |
| Secondary CD8 lymphocyte | 22.2 | 18.3 | KU-812 (Basophil) rest | 0.5 | 2.4 |
| act | | | | | |
| CD4 lymphocyte none | 18.6 | 9.1 | KU-812 (Basophil) PMA/ionomycin | 2.9 | 1.7 |
| 2ry Th1/Th2/Tr1 anti-CD95 | 3.8 | 7.6 | CCD1106 (Keratinocytes) none | 0.0 | 0.7 |
| CH11 | | | | | |
| LAK cells rest | 43.2 | 32.5 | CCD1106 (Keratinocytes) TNFalpha + | 0.0 | 0.0 |
| | | | IL-1beta | | |
| LAK cells IL-2 | 15.9 | 18.0 | Liver cirrhosis | 4.8 | 6.3 |
| LAK cells IL-2 + IL-12 | 32.3 | 30.8 | Lupus kidney | 0.6 | 0.0 |
| LAK cells IL-2 + IFN | 62.9 | 57.8 | NCI-H292 none | 0.0 | 0.0 |
| gamma | | | | | |
| LAK cells IL-2 + IL-18 | 39.2 | 52.1 | NCI-H292 IL-4 | 0.0 | 0.0 |
| LAK cells PMA/ionomycin | 43.5 | 52.9 | NCI-H292 IL-9 | 0.0 | 0.0 |
| NK Cells IL-2 rest | 37.4 | 35.6 | NCI-H292 IL-13 | 0.0 | 0.0 |
| Two Way MLR 3 day | 26.1 | 23.0 | NCI-H292 IFN gamma | 0.0 | 0.0 |
| Two Way MLR 5 day | 17.0 | 10.7 | HPAEC none | 0.0 | 0.5 |
| Two Way MLR 7 day | 2.1 | 7.4 | HPAEC TNFalpha + IL-1 beta | 0.0 | 0.0 |
| PBMC rest | 19.9 | 28.3 | Lung fibroblast none | 0.0 | 0.0 |
| PBMC PWM | 28.3 | 31.4 | Lung fibroblast TNFalpha + IL-1 | 0.0 | 0.0 |
| | | | beta | | |
| PBMC PHA-L | 10.9 | 14.4 | Lung fibroblast IL-4 | 0.0 | 0.0 |
| Ramos (B cell) none | 0.0 | 0.1 | Lung fibroblast IL-9 | 0.0 | 0.0 |
| Ramos (B cell) ionomycin | 0.0 | 0.0 | Lung fibroblast IL-13 | 0.0 | 0.0 |
| B lymphocytes PWM | 9.0 | 9.5 | Lung fibroblast IFN gamma | 0.0 | 0.0 |
| B lymphocytes CD40L and | 9.5 | 11.1 | Dermal fibroblast CCD1070 rest | 0.0 | 0.0 |
| IL-4 | | | | | |
| EOL-1 dbcAMP | 1.1 | 0.0 | Dermal fibroblast CCD1070 TNF | 17.1 | 20.3 |
| | | | alpha | | |
| EOL-1 dbcAMP | 3.7 | 0.6 | Dermal fibroblast CCD1070 IL-1 | 0.0 | 0.0 |
| PMA/ionomycin | | | beta | | |
| Dendritic cells none | 3.7 | 10.3 | Dermal fibroblast IFN gamma | 0.0 | 0.0 |
| Dendritic cells LPS | 6.1 | 8.1 | Dermal fibroblast IL-4 | 1.1 | 0.0 |
| Dendritic cells anti-CD40 | 4.9 | 3.6 | IBD Colitis 2 | 1.1 | 0.0 |
| Monocytes rest | 100.0 | 100.0 | IBD Crohn's | 2.2 | 3.5 |
| Monocytes LPS | 0.0 | 0.3 | Colon | 21.5 | 15.6 |
| Macrophages rest | 0.6 | 3.7 | Lung | 17.6 | 14.4 |
| Macrophages LPS | 1.0 | 3.1 | Thymus | 11.8 | 7.1 |
| HUVEC none | 0.0 | 0.0 | Kidney | 33.7 | 20.3 |
| HUVEC starved | 0.0 | 0.0 | | | |

[1248] AI_comprehensive panel_v1.0 Summary: Ag2695 The highest expression of this gene was detected in synovial fluid cells. Low expression of this gene is also seen in orthoarhritis bone, cartilage, synovium, RA bone, normal lung and a psoriasis sample. Therapeutic modulation of this gene, expressed protein and/or use of antibodies or small molecule drugs targeting the gene or gene product are useful in the treatment of orthoarthritis, rheumatoid arthritis and psoriasis.

[1249] CNS_neurodegeneration_v1.0 Summary: Ag2695 This gene was down-regulated in the temporal cortex of Alzheimer's disease patients. Up-regulation of this gene or its protein product, or treatment with specific agonists for this protein encoded by this gene is useful in reversing the dementia/memory loss associated with this disease and neuronal death.

[1250] Panel 1.3D Summary: Ag2695 Highest expression of this gene was seen in adrenal gland and spleen (CTS=31.7). Significant expression of this gene is seen mainly in the normal tissues including brain, lymphnode, heart, gastrointestinal tract, lung, ovary, placenta and adipose tissue. Expression of this gene was low or undetectable in any of the cancer cell lines. Therapeutic modulation of this gene, expressed protein and/or use of antibodies or small molecule drugs targeting the gene or gene product are useful in the treatment of cancer, metabolic and CNS disorders.

[1251] Panel 2D Summary: Ag2695 The expression of this gene was detected in metastatic melanoma (CTs=26-27.8). High to moderate expression of this gene was also seen in normal and cancer samples from colon, lung, prostate, liver, prostate, thyroid, uterus, breast, ovary and stomach. Expression of this gene is upregulated in ovarian, thyroid and kidney cancers compared to corresponding normal adjacent normal tissues. Therapeutic modulation of this gene, expressed protein and/or use of antibodies or small molecule drugs targeting the gene or gene product are useful in the treatment of ovarian, thyroid and kidney cancers.

[1252] Panel 4D Summary: Ag2695 Highest expression of this gene was seen in resting monocytes (CT=29.6). This gene was expressed by T lymphocytes prepared under a number of conditions at moderate levels and is expressed at significant levels in treated and untreated dendritic cells, LAK cells, PBMC, activated B lymphocytes, activated dermal fibroblasts, liver cirrhosis sample and normal tissues represented by colon, lung, thymus and kidney. Dendritic cells are powerful antigen-presenting cells (APC) whose function is pivotal in the initiation and maintenance of normal immune responses. Autoimmunity and inflammation may also be reduced by suppression of this function. Therapeutic modulation of this gene, expressed protein and/or use of antibodies or small molecule drugs targeting the gene or gene product are useful in the treatment of autoimmune and inflammatory diseases, such as lupus erythematosus, Crohn's disease, ulcerative colitis, multiple sclerosis, chronic obstructive pulmonary disease, asthma, emphysema, rheumatoid arthritis, or psoriasis.

[1253] AD. CG54479-05: Hepatocyte Growth Factor-Like Protein Precursor.

[1254] Expression of gene CG54479-05 was assessed using the primer-probe sets Ag3086 and Ag3797, described in Tables ADA and ADB. Results of the RTQ-PCR runs are shown in Tables ADC, ADD, ADE and ADF.

TABLE ADA
Probe Name Ag3086

| | | | Start | SEQ ID |
|---|---|---|---|---|
| Primers | Sequences | Length | Position | No |
| Forward | 5′-ggaccccattcgactactgt-3′ | 20 | 1229 | 1277 |
| Probe | TET-5′-ctgatgaccagccgccatcaatc-3′- | 23 | 1265 | 1278 |
| | TAMRA | | | |
| Reverse | 5′-ttctcaaactgcacctggtc-3′ | 20 | 1300 | 1279 |

[1255] TABLE ADB
Probe Name Ag3797

| | | | Start | SEQ ID |
|---|---|---|---|---|
| Primers | Sequences | Length | Position | No |
| Forward | 5′-tctggacgacaactattgcc-3′ | 20 | 621 | 1280 |
| Probe | TET-5′-atggtgctacactacggatccgcag-3′- | 25 | 666 | 1281 |
| | TAMRA | | | |
| Reverse | 5′-gtcacagaattctcgctcga-3′ | 20 | 692 | 1282 |

[1256] TABLE ADC
General_screening_panel_v1.4
Column A - Rel. Exp.(%) Ag3797, Run 217309613

| Tissue Name | A | Tissue Name | A |
|---|---|---|---|
| Adipose | 1.4 | Renal ca. TK-10 | 28.9 |
| Melanoma* | 0.4 | Bladder | 8.4 |
| Hs688(A).T | | | |
| Melanoma* | 0.5 | Gastric ca. (liver met.) NCI-N87 | 2.7 |
| Hs688(B).T | | | |
| Melanoma* M14 | 0.3 | Gastric ca. KATO III | 1.4 |
| Melanoma* LOXIMVI | 0.3 | Colon ca. SW-948 | 1.0 |
| Melanoma* | 0.5 | Colon ca. SW480 | 3.9 |
| SK-MEL-5 | | | |
| Squamous cell | 0.8 | Colon ca.* (SW480 met) SW620 | 1.2 |
| carcinoma SCC-4 | | | |
| Testis Pool | 2.0 | Colon ca. HT29 | 0.2 |
| Prostate ca.* PC-3 | 1.5 | Colon ca. HCT-116 | 4.3 |
| (bone met) | | | |
| Prostate Pool | 1.8 | Colon ca. CaCo-2 | 11.5 |
| Placenta | 1.7 | Colon cancer tissue | 2.8 |
| Uterus Pool | 0.5 | Colon ca. SW1116 | 2.9 |
| Ovarian ca. OVCAR-3 | 1.0 | Colon ca. Colo-205 | 0.5 |
| Ovarian ca. SK-OV-3 | 0.8 | Colon ca. SW-48 | 0.2 |
| Ovarian ca. OVCAR-4 | 0.3 | Colon Pool | 1.6 |
| Ovarian ca. OVCAR-5 | 6.4 | Small Intestine Pool | 2.0 |
| Ovarian ca. IGROV-1 | 4.6 | Stomach Pool | 1.9 |
| Ovarian ca. OVCAR-8 | 2.9 | Bone Marrow Pool | 0.4 |
| Ovary | 1.9 | Fetal Heart | 0.8 |
| Breast ca. MCF-7 | 2.3 | Heart Pool | 0.7 |
| Breast ca. | 2.2 | Lymph Node Pool | 1.7 |
| MDA-MB-231 | | | |
| Breast ca. BT 549 | 3.0 | Fetal Skeletal Muscle | 0.7 |
| Breast ca. T47D | 18.6 | Skeletal Muscle Pool | 1.1 |
| Breast ca. MDA-N | 0.7 | Spleen Pool | 2.5 |
| Breast Pool | 1.5 | Thymus Pool | 2.4 |
| Trachea | 1.2 | CNS cancer (glio/astro) U87-MG | 2.7 |
| Lung | 0.4 | CNS cancer (glio/astro) U-118-MG | 3.1 |
| Fetal Lung | 2.3 | CNS cancer (neuro; met) SK-N-AS | 2.1 |
| Lung ca. NCI-N417 | 0.2 | CNS cancer (astro) SF-539 | 0.6 |
| Lung ca. LX-1 | 3.3 | CNS cancer (astro) SNB-75 | 1.8 |
| Lung ca. NCI-H146 | 0.5 | CNS cancer (glio) SNB-19 | 4.1 |
| Lung ca. SHP-77 | 2.5 | CNS cancer (glio) SF-295 | 2.1 |
| Lung ca. A549 | 0.6 | Brain (Amygdala) Pool | 0.9 |
| Lung ca. NCI-H526 | 0.6 | Brain (cerebellum) | 1.9 |
| Lung ca. NCI-H23 | 3.7 | Brain (fetal) | 2.8 |
| Lung ca. NCI-H460 | 0.9 | Brain (Hippocampus) Pool | 1.0 |
| Lung ca. HOP-62 | 1.2 | Cerebral Cortex Pool | 0.7 |
| Lung ca. NCI-H522 | 1.7 | Brain (Substantia nigra) Pool | 0.9 |
| Liver | 26.6 | Brain (Thalamus) Pool | 1.0 |
| Fetal Liver | 45.7 | Brain (whole) | 1.6 |
| Liver ca. HepG2 | 100.0 | Spinal Cord Pool | 1.7 |
| Kidney Pool | 1.7 | Adrenal Gland | 3.1 |
| Fetal Kidney | 11.1 | Pituitary gland Pool | 1.7 |
| Renal ca. 786-0 | 1.0 | Salivary Gland | 1.0 |
| Renal ca. A498 | 0.3 | Thyroid (female) | 2.8 |
| Renal ca. ACHN | 1.4 | Pancreatic ca. CAPAN2 | 0.8 |
| Renal ca. UO-31 | 1.8 | Pancreas Pool | 7.5 |

[1257] TABLE ADD
Panel 1.3D
Column A - Rel. Exp.(%) Ag3086, Run 165552724

| Tissue Name | A | Tissue Name | A |
|---|---|---|---|
| Liver adenocarcinoma | 0.7 | Kidney (fetal) | 31.2 |
| Pancreas | 17.9 | Renal ca. 786-0 | 0.2 |
| Pancreatic ca. | 0.6 | Renal ca. A498 | 0.5 |
| CAPAN 2 | | | |
| Adrenal gland | 2.7 | Renal ca. RXF 393 | 0.7 |
| Thyroid | 3.3 | Renal ca. ACHN | 0.8 |
| Salivary gland | 1.2 | Renal ca. UO-31 | 0.4 |
| Pituitary gland | 3.6 | Renal ca. TK-10 | 0.2 |
| Brain (fetal) | 3.2 | Liver | 94.6 |
| Brain (whole) | 3.4 | Liver (fetal) | 100.0 |
| Brain (amygdala) | 2.1 | Liver ca. (hepatoblast) HepG2 | 58.6 |
| Brain (cerebellum) | 1.5 | Lung | 2.8 |
| Brain (hippocampus) | 3.0 | Lung (fetal) | 12.9 |
| Brain (substantia | 1.7 | Lung ca. (small cell) LX-1 | 1.3 |
| nigra) | | | |
| Brain (thalamus) | 3.1 | Lung ca. (small cell) NCI-H69 | 0.2 |
| Cerebral Cortex | 0.9 | Lung ca. (s. cell var.) SHP-77 | 1.2 |
| Spinal cord | 2.9 | Lung ca. (large cell) NCI-H460 | 1.4 |
| glio/astro U87-MG | 0.7 | Lung ca. (non-sm. cell) A549 | 0.2 |
| glio/astro U-118-MG | 0.9 | Lung ca. (non-s. cell) NCI-H23 | 0.9 |
| astrocytoma SW1783 | 0.4 | Lung ca. (non-s. cell) HOP-62 | 0.5 |
| neuro*; met SK-N-AS | 0.7 | Lung ca. (non-s. cl) NCI-H522 | 0.6 |
| astrocytoma SF-539 | 0.5 | Lung ca. (squam.) SW 900 | 0.4 |
| astrocytoma SNB-75 | 1.2 | Lung ca. (squam.) NCI-H596 | 0.5 |
| glioma SNB-19 | 1.6 | Mammary gland | 3.1 |
| glioma U251 | 2.4 | Breast ca.* (pl.ef) MCF-7 | 0.7 |
| glioma SF-295 | 0.7 | Breast ca.* (pl.ef) MDA-MB-231 | 0.7 |
| Heart (Fetal) | 0.6 | Breast ca.* (pl.ef) T47D | 2.7 |
| Heart | 0.5 | Breast ca. BT-549 | 0.7 |
| Skeletal muscle (Fetal) | 0.2 | Breast ca. MDA-N | 0.1 |
| Skeletal muscle | 1.4 | Ovary | 0.4 |
| Bone marrow | 2.0 | Ovarian ca. OVCAR-3 | 0.6 |
| Thymus | 1.2 | Ovarian ca. OVCAR-4 | 0.4 |
| Spleen | 4.0 | Ovarian ca. OVCAR-5 | 0.4 |
| Lymph node | 3.1 | Ovarian ca. OVCAR-8 | 0.7 |
| Colorectal | 1.6 | Ovarian ca. IGROV-1 | 0.7 |
| Stomach | 10.3 | Ovarian ca. (ascites) SK-OV-3 | 0.1 |
| Small intestine | 29.7 | Uterus | 3.3 |
| Colon ca. SW480 | 0.7 | Placenta | 4.6 |
| Colon ca.* SW620 | 0.2 | Prostate | 2.1 |
| (SW480 met) | | | |
| Colon ca. HT29 | 0.2 | Prostate ca.* (bone met) PC-3 | 0.9 |
| Colon ca. HCT-116 | 1.2 | Testis | 12.5 |
| Colon ca. CaCo-2 | 2.4 | Melanoma Hs688(A).T | 0.1 |
| CC Well to Mod Diff | 2.1 | Melanoma* (met) Hs688(B).T | 0.2 |
| (ODO3866) | | | |
| Colon ca. HCC-2998 | 1.4 | Melanoma UACC-62 | 0.4 |
| Gastric ca. (liver met) | 1.8 | Melanoma M14 | 0.8 |
| NCI-N87 | | | |
| Bladder | 4.5 | Melanoma LOX IMVI | 0.0 |
| Trachea | 2.6 | Melanoma* (met) SK-MEL-5 | 0.4 |
| Kidney | 26.1 | Adipose | 2.2 |

[1258] TABLE ADE
Panel 2.2
Column A - Rel. Exp.(%) Ag3086, Run 174268933

| Tissue Name | A | Tissue Name | A |
|---|---|---|---|
| Normal Colon | 1.4 | Kidney Margin (OD04348) | 40.9 |
| Colon cancer (OD06064) | 0.1 | Kidney malignant cancer | 0.4 |
| | | (OD06204B) | |
| Colon Margin (OD06064) | 0.0 | Kidney normal adjacent tissue | 5.1 |
| | | (OD06204E) | |
| Colon cancer (OD06159) | 0.1 | Kidney Cancer (OD04450-01) | 5.8 |
| Colon Margin (OD06159) | 1.4 | Kidney Margin (OD04450-03) | 15.0 |
| Colon cancer (OD06297-04) | 0.0 | Kidney Cancer 8120613 | 0.2 |
| Colon Margin (OD06297-05) | 1.1 | Kidney Margin 8120614 | 6.0 |
| CC Gr.2 ascend colon (ODO3921) | 0.4 | Kidney Cancer 9010320 | 0.4 |
| CC Margin (ODO3921) | 0.2 | Kidney Margin 9010321 | 1.5 |
| Colon cancer metastasis (OD06104) | 0.1 | Kidney Cancer 8120607 | 0.1 |
| Lung Margin (OD06104) | 0.6 | Kidney Margin 8120608 | 3.5 |
| Colon mets to lung (OD04451-01) | 1.3 | Normal Uterus | 0.2 |
| Lung Margin (OD04451-02) | 0.4 | Uterine Cancer 064011 | 0.1 |
| Normal Prostate | 0.6 | Normal Thyroid | 0.5 |
| Prostate Cancer (OD04410) | 0.2 | Thyroid Cancer | 0.3 |
| Prostate Margin (OD04410) | 0.5 | Thyroid Cancer A302152 | 2.1 |
| Normal Ovary | 0.4 | Thyroid Margin A302153 | 0.4 |
| Ovarian cancer (OD06283-03) | 0.2 | Normal Breast | 0.7 |
| Ovarian Margin (OD06283-07) | 1.2 | Breast Cancer | 2.3 |
| Ovarian Cancer | 1.5 | Breast Cancer | 1.9 |
| Ovarian cancer (OD06145) | 0.9 | Breast Cancer (OD04590-01) | 5.1 |
| Ovarian Margin (OD06145) | 1.8 | Breast Cancer Mets (OD04590-03) | 1.3 |
| Ovarian cancer (OD06455-03) | 0.6 | Breast Cancer Metastasis | 0.7 |
| Ovarian Margin (OD06455-07) | 0.2 | Breast Cancer | 0.5 |
| Normal Lung | 0.8 | Breast Cancer 9100266 | 0.2 |
| Invasive poor diff. lung adeno | 0.3 | Breast Margin 9100265 | 0.5 |
| (ODO4945-01 | | | |
| Lung Margin (ODO4945-03) | 1.1 | Breast Cancer A209073 | 0.2 |
| Lung Malignant Cancer (OD03126) | 1.6 | Breast Margin A209073 | 1.4 |
| Lung Margin (OD03126) | 0.3 | Breast cancer (OD06083) | 0.7 |
| Lung Cancer (OD05014A) | 0.5 | Breast cancer node metastasis | 0.2 |
| | | (OD06083) | |
| Lung Margin (OD05014B) | 0.6 | Normal Liver | 28.7 |
| Lung cancer (OD06081) | 0.5 | Liver Cancer 1026 | 7.5 |
| Lung Margin (OD06081) | 1.2 | Liver Cancer 1025 | 45.1 |
| Lung Cancer (OD04237-01) | 0.3 | Liver Cancer 6004-T | 35.8 |
| Lung Margin (OD04237-02) | 1.1 | Liver Tissue 6004-N | 5.1 |
| Ocular Mel Met to Liver (ODO4310) | 0.2 | Liver Cancer 6005-T | 14.8 |
| Liver Margin (ODO4310) | 21.6 | Liver Tissue 6005-N | 65.1 |
| Melanoma Metastasis | 0.2 | Liver Cancer | 100.0 |
| Lung Margin (OD04321) | 0.2 | Normal Bladder | 2.8 |
| Normal Kidney | 5.6 | Bladder Cancer | 0.2 |
| Kidney Ca, Nuclear grade 2 | 20.6 | Bladder Cancer | 0.7 |
| (OD04338) | | | |
| Kidney Margin (OD04338) | 4.5 | Normal Stomach | 2.5 |
| Kidney Ca Nuclear grade ½ | 6.6 | Gastric Cancer 9060397 | 0.0 |
| (OD04339) | | | |
| Kidney Margin (OD04339) | 6.0 | Stomach Margin 9060396 | 0.1 |
| Kidney Ca, Clear cell type (OD04340) | 0.4 | Gastric Cancer 9060395 | 0.1 |
| Kidney Margin (OD04340) | 8.8 | Stomach Margin 9060394 | 0.3 |
| Kidney Ca, Nuclear grade 3 | 0.3 | Gastric Cancer 064005 | 2.8 |
| (OD04348) | | | |

[1259] TABLE ADF
Panel 4.1D
Column A - Rel. Exp. (%) Ag3797, Run 170132421
Column B - Rel. Exp. (%) Ag3797, Run 170275745

| Tissue Name | A | B | Tissue Name | A | B |
|---|---|---|---|---|---|
| Secondary Th1 act | 8.9 | 1.3 | HUVEC IL-1beta | 2.4 | 0.1 |
| Secondary Th2 act | 2.6 | 1.3 | HUVEC IFN gamma | 2.6 | 1.2 |
| Secondary Tr1 act | 3.1 | 0.9 | HUVEC TNFalpha + IFN gamma | 0.0 | 0.3 |
| Secondary Th1 rest | 1.5 | 1.6 | HUVEC TNFalpha + IL4 | 1.6 | 0.4 |
| Secondary Th2 rest | 3.3 | 0.7 | HUVEC IL-11 | 2.2 | 0.4 |
| Secondary Tr1 rest | 3.4 | 0.9 | Lung Microvascular EC none | 1.8 | 0.9 |
| Primary Th1 act | 3.2 | 0.3 | Lung Microvascular EC TNFalpha + | 2.2 | 0.3 |
| | | | IL-1beta | | |
| Primary Th2 act | 2.0 | 1.1 | Microvascular Dermal EC none | 1.4 | 0.5 |
| Primary Tr1 act | 2.7 | 1.0 | Microsvasular Dermal EC TNFalpha + | 2.2 | 0.3 |
| | | | IL-1beta | | |
| Primary Th1 rest | 3.2 | 0.4 | Bronchial epithelium TNFalpha + | 17.8 | 0.5 |
| | | | IL1beta | | |
| Primary Th2 rest | 4.5 | 0.0 | Small airway epithelium none | 1.5 | 0.2 |
| Primary Tr1 rest | 2.3 | 0.7 | Small airway epithelium TNFalpha + | 3.0 | 0.6 |
| | | | IL-1beta | | |
| CD45RA CD4 lymphocyte | 2.0 | 0.7 | Coronery artery SMC rest | 1.1 | 0.6 |
| act | | | | | |
| CD45RO CD4 lymphocyte | 1.8 | 2.0 | Coronery artery SMC TNFalpha + IL- | 1.9 | 0.8 |
| act | | | 1beta | | |
| CD8 lymphocyte act | 5.6 | 0.9 | Astrocytes rest | 2.5 | 1.5 |
| Secondary CD8 lymphocyte | 4.6 | 1.1 | Astrocytes TNFalpha + IL-1beta | 0.5 | 1.2 |
| rest | | | | | |
| Secondary CD8 lymphocyte | 1.8 | 0.2 | KU-812 (Basophil) rest | 4.3 | 0.8 |
| act | | | | | |
| CD4 lymphocyte none | 7.2 | 1.3 | KU-812 (Basophil) PMA/ionomycin | 3.0 | 0.6 |
| 2ry Th1/Th2/Trl anti-CD95 | 6.6 | 1.1 | CCD1106 (Keratinocytes) none | 1.6 | 0.9 |
| CH11 | | | | | |
| LAK cells rest | 7.6 | 0.4 | CCD1106 (Keratinocytes) TNFalpha + | 2.4 | 0.0 |
| | | | IL-1beta | | |
| LAK cells IL-2 | 4.8 | 0.3 | Liver cirrhosis | 76.8 | 9.8 |
| LAK cells IL-2 + IL-12 | 5.7 | 0.8 | NCI-H292 none | 5.4 | 4.1 |
| LAK cells IL-2 + IFN gamma | 5.5 | 0.2 | NCI-H292 IL-4 | 10.3 | 0.6 |
| LAK cells IL-2 + IL-18 | 1.6 | 0.4 | NCI-H292 IL-9 | 16.5 | 1.3 |
| LAK cells PMA/ionomycin | 2.7 | 1.3 | NCI-H292 IL-13 | 8.5 | 3.6 |
| NK Cells IL-2 rest | 5.6 | 2.0 | NCI-H292 IFN gamma | 5.8 | 3.4 |
| Two Way MLR 3 day | 4.9 | 2.0 | HPAEC none | 1.2 | 1.0 |
| Two Way MLR 5 day | 0.5 | 0.8 | HPAEC TNFalpha + IL-1 beta | 1.5 | 0.3 |
| Two Way MLR 7 day | 6.0 | 0.2 | Lung fibroblast none | 2.5 | 0.8 |
| PBMC rest | 1.3 | 0.4 | Lung fibroblast TNFalpha + IL-1 beta | 5.7 | 0.9 |
| PBMC PWM | 7.9 | 0.5 | Lung fibroblast IL-4 | 2.9 | 0.4 |
| PBMC PHA-L | 5.1 | 0.5 | Lung fibroblast IL-9 | 2.5 | 0.4 |
| Ramos (B cell) none | 5.7 | 0.6 | Lung fibroblast IL-13 | 2.7 | 1.9 |
| Ramos (B cell) ionomycin | 4.4 | 0.3 | Lung fibroblast IFN gamma | 0.0 | 2.2 |
| B lymphocytes PWM | 1.1 | 0.2 | Dermal fibroblast CCD1070 rest | 6.1 | 3.4 |
| B lymphocytes CD40L and | 4.3 | 0.6 | Dermal fibroblast CCD1070 TNF | 2.1 | 3.8 |
| IL-4 | | | alpha | | |
| EOL-1 dbcAMP | 8.4 | 3.5 | Dermal fibroblast CCD1070 IL-1 beta | 4.0 | 1.5 |
| EOL-1 dbcAMP | 7.2 | 5.1 | Dermal fibroblast IFN gamma | 1.6 | 0.9 |
| PMA/ionomycin | | | | | |
| Dendritic cells none | 3.4 | 1.0 | Dermal fibroblast IL-4 | 1.4 | 1.3 |
| Dendritic cells LPS | 5.5 | 0.5 | Dermal Fibroblasts rest | 2.3 | 1.5 |
| Dendritic cells anti-CD40 | 2.6 | 0.3 | Neutrophils TNFa + LPS | 0.0 | 1.7 |
| Monocytes rest | 1.1 | 0.9 | Neutrophils rest | 0.8 | 0.6 |
| Monocytes LPS | 2.6 | 0.3 | Colon | 21.6 | 6.7 |
| Macrophages rest | 5.2 | 0.2 | Lung | 3.7 | 10.6 |
| Macrophages LPS | 1.4 | 0.3 | Thymus | 11.7 | 27.0 |
| HUVEC none | 1.2 | 0.2 | Kidney | 100.0 | 100.0 |
| HUVEC starved | 3.4 | 0.2 | | | |

[1260] General_screening_panel_v1.4 Summary: Ag3797 Highest expression of this gene was detected in liver cancer HepG2 cell line (CT=25.3). High expression of this gene was also seen in fetal and adult liver. Therapeutic modulation of this gene is useful in the treatment of liver related disorders.

[1261] Moderate levels of expression of this gene was also seen in cluster of cancer cell lines derived from pancreatic, gastric, colon, lung, liver, renal, breast, ovarian, prostate, squamous cell carcinoma, melanoma and brain cancers. Thus, expression of this gene is useful as a marker to detect these cancers. Therapeutic modulation of this gene, encoded protein and/or use of antibodies or small molecule targeting this gene or gene product is useful in the treatment of pancreatic, gastric, colon, lung, liver, renal, breast, ovarian, prostate, squamous cell carcinoma, melanoma and brain cancers.

[1262] Among tissues with metabolic or endocrine function, this gene was expressed at moderate levels in pancreas, adipose, adrenal gland, thyroid, pituitary gland, skeletal muscle, heart, liver and the gastrointestinal tract. Therapeutic modulation of the activity of this gene may prove useful in the treatment of endocrine/metabolically related diseases, such as obesity and diabetes.

[1263] In addition, this gene is expressed at moderate levels in all regions of the central nervous system examined, including amygdala, hippocampus, substantia nigra, thalamus, cerebellum, cerebral cortex, and spinal cord. Therefore, therapeutic modulation of this gene, encoded protein and/or use of antibodies or small molecule targeting this gene or gene product is useful in the treatment of central nervous system disorders such as Alzheimer's disease, Parkinson's disease, epilepsy, multiple sclerosis, schizophrenia and depression.

[1264] Panel 1.3D Summary: Ag3086 This gene was highly expressed in both fetal and adult liver tissue (CTs=26) and liver cancer cell lines (CT=27). The gene was also expressed at moderate to low levels in most of the other tissues in the panel. Therapeutic modulation of this gene is useful in the treatment of liver related disorders.

[1265] In tissues involved in the central nervous system, this gene was moderately expressed in the fetal and adult brain, including the adult thalamus, substantia nigra, hippocampus, amygdala and is also expressed at low but significant levels in the cerebellum and cerebral cortex. This expression profile suggests that this gene has functional significance in the CNS. This gene codes for a homolog of hepatocyte growth factor, which has numerous therapeutic applications in the CNS, including prevention of neuronal death in animal models of stroke and ischemia. Hepatocyte growth factor has mitogenic activity and thus has potential application as a protein therapeutic to treat brain pathologies when administered directly to the cortico spinal fluid or systemically when the blood brain barrier is disrupted. Hepatocyte growth factor-like protein is a neurotrophic factor useful in the prevention of motoneuron atrophy upon axotomy. Therefore, this gene, expressed protein and/or use of antibodies or small molecule targeting this gene or gene product is useful as a therapeutic agent in treating stroke and neurodegenerative diseases including Alzheimer's disease, Parkinson's disease, and Huntington's disease. The potential role of the this gene or its protein product in brain plasticity and regeneration affords utility in treating brain damage and aging related disorders, such as memory impairment that has hippocampal dysfunction as its primary focus.

[1266] Panel 2.2 Summary: Ag3086 The expression of this gene was highest in a sample derived from a liver cancer specimen (CT=26) and was expressed at significant levels in a number of samples derived from liver tissue. There was significant expression of this gene associated with normal kidney tissue (CT=27.2) relative to adjacent kidney cancer specimens therapeutic modulation of this gene, encoded protein and/or use of antibodies or small molecule targeting this gene or gene product is useful in the treatment of kidney cancer.

[1267] Panel 4.1D Summary: Ag3797 Highest expression of this gene was detected in kidney (CTs=27.4-29). Moderate levels of expression of this gene was also seen in liver cirrhosis sample. This gene was expressed at moderate to low levels in a wide range of cell types of significance in the immune response in health and disease. These cells included members of the T-cell, B-cell, endothelial cell, macrophage/monocyte, and peripheral blood mononuclear cell family, as well as epithelial and fibroblast cell types from lung and skin, and normal tissues represented by colon, lung, thymus and kidney. This ubiquitous pattern of expression indicates that this gene is involved in homeostatic processes for these and other cell types and tissues. Therefore, modulation of this gene, encoded protein and/or use of antibodies or small molecule targeting this gene or gene product is useful in the treatment autoimmune and inflammatory diseases such as asthma, allergies, inflammatory bowel disease, lupus erythematosus, psoriasis, rheumatoid arthritis, and osteoarthritis.

[1268] AE. CG54479-06: Macrophage Stimulatory Protein.

[1269] Expression of gene CG54479-06 was assessed using the primer-probe set Ag6711, described in Table AEA. Results of the RTQ-PCR runs are shown in Table AEB.

TABLE AEA
Probe Name Ag6711

| | | | Start | SEQ ID |
|---|---|---|---|---|
| Primers | Sequences | Length | Position | No |
| Forward | 5′-accaagtgtgagggtgacta-3′ | 20 | 1861 | 1283 |
| Probe | TET-5′-tcctggaaggaattataatccccaacc- | 27 | 1919 | 1284 |
| | 3′-TAMRA | | | |
| Reverse | 5′-ccagtccacaaacacagaga-3′ | 20 | 1988 | 1285 |

[1270] TABLE AEB
General_screening_panel_v1.6
Column A - Rel. Exp.(%) Ag6711, Run 277261482

| Tissue Name | A | Tissue Name | A |
|---|---|---|---|
| Adipose | 3.5 | Renal ca. TK-10 | 60.7 |
| Melanoma* | 1.8 | Bladder | 11.4 |
| Hs688(A).T | | | |
| Melanoma* | 4.2 | Gastric ca. (liver met.) NCI-N87 | 5.6 |
| Hs688(B).T | | | |
| Melanoma* M14 | 1.1 | Gastric ca. KATO III | 1.4 |
| Melanoma* LOXIMVI | 0.7 | Colon ca. SW-948 | 0.9 |
| Melanoma* | 3.3 | Colon ca. SW480 | 12.7 |
| SK-MEL-5 | | | |
| Squamous cell | 0.5 | Colon ca.* (SW480 met) SW620 | 3.4 |
| carcinoma SCC-4 | | | |
| Testis Pool | 4.3 | Colon ca. HT29 | 0.3 |
| Prostate ca.* | 2.6 | Colon ca. HCT-116 | 0.5 |
| (bone met) PC-3 | | | |
| Prostate Pool | 1.1 | Colon ca. CaCo-2 | 28.7 |
| Placenta | 1.4 | Colon cancer tissue | 9.4 |
| Uterus Pool | 0.8 | Colon ca. SW1116 | 4.4 |
| Ovarian ca. OVCAR-3 | 5.1 | Colon ca. Colo-205 | 0.0 |
| Ovarian ca. SK-OV-3 | 1.0 | Colon ca. SW-48 | 1.0 |
| Ovarian ca. OVCAR-4 | 0.5 | Colon Pool | 3.0 |
| Ovarian ca. OVCAR-5 | 10.2 | Small Intestine Pool | 2.1 |
| Ovarian ca. IGROV-1 | 12.9 | Stomach Pool | 4.6 |
| Ovarian ca. OVCAR-8 | 8.3 | Bone Marrow Pool | 4.1 |
| Ovary | 3.8 | Fetal Heart | 1.1 |
| Breast ca. MCF-7 | 3.5 | Heart Pool | 1.2 |
| Breast ca. | 1.9 | Lymph Node Pool | 4.7 |
| MDA-MB-231 | | | |
| Breast ca. BT 549 | 2.9 | Fetal Skeletal Muscle | 2.5 |
| Breast ca. T47D | 0.0 | Skeletal Muscle Pool | 1.0 |
| Breast ca. MDA-N | 0.3 | Spleen Pool | 2.4 |
| Breast Pool | 6.0 | Thymus Pool | 7.9 |
| Trachea | 1.5 | CNS cancer (glio/astro) U87-MG | 4.8 |
| Lung | 12.9 | CNS cancer (glio/astro) U-118-MG | 4.6 |
| Fetal Lung | 3.5 | CNS cancer (neuro; met) SK-N-AS | 3.3 |
| Lung ca. NCI-N417 | 0.0 | CNS cancer (astro) SF-539 | 1.3 |
| Lung ca. LX-1 | 7.2 | CNS cancer (astro) SNB-75 | 1.7 |
| Lung ca. NCI-H146 | 1.7 | CNS cancer (glio) SNB-19 | 7.7 |
| Lung ca. SHP-77 | 6.3 | CNS cancer (glio) SF-295 | 8.1 |
| Lung ca. A549 | 1.8 | Brain (Amygdala) Pool | 1.2 |
| Lung ca. NCI-H526 | 0.0 | Brain (cerebellum) | 6.9 |
| Lung ca. NCI-H23 | 11.3 | Brain (fetal) | 4.1 |
| Lung ca. NCI-H460 | 5.9 | Brain (Hippocampus) Pool | 1.5 |
| Lung ca. HOP-62 | 3.8 | Cerebral Cortex Pool | 1.2 |
| Lung ca. NCI-H522 | 8.3 | Brain (Substantia nigra) Pool | 2.2 |
| Liver | 18.8 | Brain (Thalamus) Pool | 3.9 |
| Fetal Liver | 28.7 | Brain (whole) | 5.4 |
| Liver ca. HepG2 | 100.0 | Spinal Cord Pool | 4.4 |
| Kidney Pool | 7.3 | Adrenal Gland | 2.6 |
| Fetal Kidney | 7.7 | Pituitary gland Pool | 2.7 |
| Renal ca. 786-0 | 4.4 | Salivary Gland | 0.3 |
| Renal ca. A498 | 0.6 | Thyroid (female) | 4.0 |
| Renal ca. ACHN | 3.8 | Pancreatic ca. CAPAN2 | 1.4 |
| Renal ca. UO-31 | 8.8 | Pancreas Pool | 1.9 |

[1271] General_screening_panel_v1.6 Summary: Ag6711 Highest expression of this gene was detected in a liver cancer HepG2 cell line (CT=30.6). Significant expression of this gene was also seen in number of cancer cell lines derived from ovarian, lung, renal, colon and brain cancers. Thus, expression levels of this gene is useful as a marker to detect these cancers. Therapeutic modulation of this gene, encoded protein and/or use of antibodies or small molecule targeting this gene or gene product is useful in the treatment of pancreatic, gastric, colon, lung, liver, renal, breast, ovarian, prostate, squamous cell carcinoma, melanoma and brain cancers.

[1272] Moderate levels of expression of this gene was also seen in fetal and adult liver. Therapeutic modulation of this gene is useful in the treatment of liver related disorders such as obesity, liver cirrhosis and other liver inflammatory diseases.

[1273] AF. CG54539-02: Zinc Transporter 1.

[1274] Expression of gene CG54539-02 was assessed using the primer-probe set Ag1160, described in Table AFA. Results of the RTQ-PCR runs are shown in Tables AFB, AFC and AFD. CG54539-02 represents a full length physical clone.

TABLE AFA
Probe Name Ag1160

| | | | Start | SEQ ID |
|---|---|---|---|---|
| Primers | Sequences | Length | Position | No |
| Forward | 5′-atacatggaggtggctaaaacc-3′ | 22 | 1186 | 1286 |
| Probe | TET-5′-tcataatcacggaattcacgctactacca- | 29 | 1222 | 1287 |
| | 3′-TAMRA | | | |
| Reverse | 5′-acactagcaaattcaggctgaa-3′ | 22 | 1251 | 1288 |

[1275] TABLE AFB
General_screening_panel_v1.4
Column A - Rel. Exp.(%) Ag1160, Run 214691191

| Tissue Name | A | Tissue Name | A |
|---|---|---|---|
| Adipose | 46.0 | Renal ca. TK-10 | 35.4 |
| Melanoma* | 31.2 | Bladder | 35.4 |
| Hs688(A).T | | | |
| Melanoma* | 30.6 | Gastric ca. (liver met.) NCI-N87 | 32.1 |
| Hs688(B).T | | | |
| Melanoma* M14 | 23.0 | Gastric ca. KATO III | 31.2 |
| Melanoma* LOXIMVI | 14.1 | Colon ca. SW-948 | 8.8 |
| Melanoma* | 15.9 | Colon ca. SW480 | 17.6 |
| SK-MEL-5 | | | |
| Squamous Cell | 16.5 | Colon ca.* (SW480 met) SW620 | 18.0 |
| carcinoma SCC-4 | | | |
| Testis Pool | 62.4 | Colon ca. HT29 | 8.5 |
| Prostate ca.* | 13.9 | Colon ca. HCT-116 | 16.0 |
| (bone met) PC-3 | | | |
| Prostate Pool | 4.5 | Colon ca. CaCo-2 | 38.4 |
| Placenta | 5.3 | Colon cancer tissue | 18.6 |
| Uterus Pool | 5.1 | Colon ca. SW1116 | 4.7 |
| Ovarian ca. OVCAR-3 | 42.6 | Colon ca. Colo-205 | 11.5 |
| Ovarian ca. SK-OV-3 | 80.1 | Colon ca. SW-48 | 12.6 |
| Ovarian ca. OVCAR-4 | 8.5 | Colon Pool | 17.8 |
| Ovarian ca. OVCAR-5 | 36.9 | Small Intestine Pool | 9.3 |
| Ovarian ca. IGROV-1 | 15.4 | Stomach Pool | 9.7 |
| Ovarian ca. OVCAR-8 | 4.3 | Bone Marrow Pool | 6.8 |
| Ovary | 9.9 | Fetal Heart | 7.3 |
| Breast ca. MCF-7 | 37.4 | Heart Pool | 5.2 |
| Breast ca. | 32.1 | Lymph Node Pool | 17.0 |
| MDA-MB-231 | | | |
| Breast ca. BT 549 | 12.7 | Fetal Skeletal Muscle | 3.2 |
| Breast ca. T47D | 66.0 | Skeletal Muscle Pool | 1.8 |
| Breast ca. MDA-N | 15.3 | Spleen Pool | 100.0 |
| Breast Pool | 13.5 | Thymus Pool | 7.1 |
| Trachea | 8.5 | CNS cancer (glio/astro) U87-MG | 29.3 |
| Lung | 6.2 | CNS cancer (glio/astro) U-118-MG | 41.8 |
| Fetal Lung | 78.5 | CNS cancer (neuro; met) SK-N-AS | 28.5 |
| Lung ca. NCI-N417 | 4.7 | CNS cancer (astro) SF-539 | 7.0 |
| Lung ca. LX-1 | 29.1 | CNS cancer (astro) SNB-75 | 14.3 |
| Lung ca. NCI-H146 | 1.7 | CNS cancer (glio) SNB-19 | 15.1 |
| Lung ca. SHP-77 | 8.8 | CNS cancer (glio) SF-295 | 14.2 |
| Lung ca. A549 | 26.4 | Brain (Amygdala) Pool | 4.8 |
| Lung ca. NCI-H526 | 4.0 | Brain (cerebellum) | 5.1 |
| Lung ca. NCI-H23 | 12.8 | Brain (fetal) | 7.4 |
| Lung ca. NCI-H460 | 19.9 | Brain (Hippocampus) Pool | 7.3 |
| Lung ca. HOP-62 | 10.9 | Cerebral Cortex Pool | 13.0 |
| Lung ca. NCI-H522 | 3.8 | Brain (Substantia nigra) Pool | 7.1 |
| Liver | 3.4 | Brain (Thalamus) Pool | 9.6 |
| Fetal Liver | 70.2 | Brain (whole) | 9.1 |
| Liver ca. HepG2 | 30.4 | Spinal Cord Pool | 5.9 |
| Kidney Pool | 17.6 | Adrenal Gland | 24.7 |
| Fetal Kidney | 8.0 | Pituitary gland Pool | 2.7 |
| Renal ca. 786-0 | 20.9 | Salivary Gland | 3.7 |
| Renal ca. A498 | 20.7 | Thyroid (female) | 9.3 |
| Renal ca. ACHN | 29.9 | Pancreatic ca. CAPAN2 | 46.7 |
| Renal ca. UO-31 | 17.6 | Pancreas Pool | 17.4 |

[1276] TABLE AFC
Panel 2D
Column A - Rel. Exp.(%) Ag1160, Run 164339479

| Tissue Name | A | Tissue Name | A |
|---|---|---|---|
| Normal Colon | 63.3 | Kidney Margin 8120608 | 18.3 |
| CC Well to Mod Diff (ODO3866) | 17.0 | Kidney Cancer 8120613 | 3.9 |
| CC Margin (ODO3866) | 8.9 | Kidney Margin 8120614 | 10.6 |
| CC Gr.2 rectosigmoid (ODO3868) | 7.8 | Kidney Cancer 9010320 | 13.9 |
| CC Margin (ODO3868) | 2.0 | Kidney Margin 9010321 | 20.7 |
| CC Mod Diff (ODO3920) | 9.8 | Normal Uterus | 8.2 |
| CC Margin (ODO3920) | 15.2 | Uterine Cancer 064011 | 33.2 |
| CC Gr.2 ascend colon (ODO3921) | 28.9 | Normal Thyroid | 9.0 |
| CC Margin (ODO3921) | 6.4 | Thyroid Cancer | 52.9 |
| CC from Partial Hepatectomy | 51.8 | Thyroid Cancer A302152 | 20.7 |
| (ODO4309) Mets | | | |
| Liver Margin (ODO4309) | 65.5 | Thyroid Margin A302153 | 33.0 |
| Colon mets to lung (OD04451-01) | 8.4 | Normal Breast | 13.1 |
| Lung Margin (OD04451-02) | 13.5 | Breast Cancer | 19.5 |
| Normal Prostate 6546-1 | 26.8 | Breast Cancer (OD04590-01) | 29.7 |
| Prostate Cancer (OD04410) | 18.7 | Breast Cancer Mets (OD04590-03) | 27.0 |
| Prostate Margin (OD04410) | 15.1 | Breast Cancer Metastasis | 30.8 |
| Prostate Cancer (OD04720-01) | 17.2 | Breast Cancer | 16.2 |
| Prostate Margin (OD04720-02) | 18.3 | Breast Cancer | 15.0 |
| Normal Lung | 34.9 | Breast Cancer 9100266 | 48.3 |
| Lung Met to Muscle (ODO4286) | 39.0 | Breast Margin 9100265 | 15.5 |
| Muscle Margin (ODO4286) | 8.1 | Breast Cancer A209073 | 36.3 |
| Lung Malignant Cancer (OD03126) | 28.5 | Breast Margin A209073 | 11.5 |
| Lung Margin (OD03126) | 19.5 | Normal Liver | 39.0 |
| Lung Cancer (OD04404) | 20.0 | Liver Cancer | 14.6 |
| Lung Margin (OD04404) | 11.9 | Liver Cancer 1025 | 18.8 |
| Lung Cancer (OD04565) | 13.8 | Liver Cancer 1026 | 11.0 |
| Lung Margin (OD04565) | 3.9 | Liver Cancer 6004-T | 35.1 |
| Lung Cancer (OD04237-01) | 17.8 | Liver Tissue 6004-N | 13.1 |
| Lung Margin (OD04237-02) | 33.0 | Liver Cancer 6005-T | 12.7 |
| Ocular Mel Met to Liver (ODO4310) | 5.8 | Liver Tissue 6005-N | 8.0 |
| Liver Margin (ODO4310) | 100.0 | Normal Bladder | 33.4 |
| Melanoma Metastasis | 7.3 | Bladder Cancer | 7.0 |
| Lung Margin (OD04321) | 13.8 | Bladder Cancer | 11.5 |
| Normal Kidney | 37.4 | Bladder Cancer (OD04718-01) | 38.7 |
| Kidney Ca, Nuclear grade 2 (OD04338) | 46.0 | Bladder Normal Adjacent | 17.3 |
| | | (OD04718-03) | |
| Kidney Margin (OD04338) | 18.8 | Normal Ovary | 4.6 |
| Kidney Ca Nuclear grade ½ (OD04339) | 17.3 | Ovarian Cancer | 33.7 |
| Kidney Margin (OD04339) | 71.2 | Ovarian Cancer (OD04768-07) | 28.3 |
| Kidney Ca, Clear cell type (OD04340) | 69.3 | Ovary Margin (OD04768-08) | 5.7 |
| Kidney Margin (OD04340) | 23.3 | Normal Stomach | 19.5 |
| Kidney Ca, Nuclear grade 3 (OD04348) | 9.8 | Gastric Cancer 9060358 | 4.5 |
| Kidney Margin (OD04348) | 32.8 | Stomach Margin 9060359 | 18.6 |
| Kidney Cancer (OD04622-01) | 10.5 | Gastric Cancer 9060395 | 34.2 |
| Kidney Margin (OD04622-03) | 5.4 | Stomach Margin 9060394 | 13.9 |
| Kidney Cancer (OD04450-01) | 27.7 | Gastric Cancer 9060397 | 48.6 |
| Kidney Margin (OD04450-03) | 20.4 | Stomach Margin 9060396 | 3.4 |
| Kidney Cancer 8120607 | 6.2 | Gastric Cancer 064005 | 30.6 |

[1277] TABLE AFD
Panel 4D
Column A - Rel. Exp.(%) Ag1160, Run 140155352

| Tissue Name | A | Tissue Name | A |
|---|---|---|---|
| Secondary Th1 act | 14.0 | HUVEC IL-1beta | 9.7 |
| Secondary Th2 act | 24.0 | HUVEC IFN gamma | 15.5 |
| Secondary Tr1 act | 18.7 | HUVEC TNF alpha + IFN gamma | 1.9 |
| Secondary Th1 rest | 2.3 | HUVEC TNF alpha + IL4 | 7.0 |
| Secondary Th2 rest | 4.3 | HUVEC IL-11 | 5.8 |
| Secondary Tr1 rest | 2.8 | Lung Microvascular EC none | 16.6 |
| Primary Th1 act | 21.3 | Lung Microvascular EC TNFalpha + IL- | 7.1 |
| | | 1beta | |
| Primary Th2 act | 20.6 | Microvascular Dermal EC none | 58.6 |
| Primary Tr1 act | 31.4 | Microsvasular Dermal EC TNFalpha + IL- | 16.8 |
| | | 1beta | |
| Primary Th1 rest | 16.4 | Bronchial epithelium TNFalpha + IL1beta | 40.3 |
| Primary Th2 rest | 10.3 | Small airway epithelium none | 14.6 |
| Primary Tr1 rest | 14.2 | Small airway epithelium TNFalpha + IL- | 92.0 |
| | | 1beta | |
| CD45RA CD4 lymphocyte act | 13.3 | Coronery artery SMC rest | 22.1 |
| CD45RO CD4 lymphocyte act | 11.7 | Coronery artery SMC TNFalpha + IL-1beta | 7.5 |
| CD8 lymphocyte act | 6.8 | Astrocytes rest | 8.0 |
| Secondary CD8 lymphocyte | 5.9 | Astrocytes TNFalpha + IL-1beta | 16.7 |
| rest | | | |
| Secondary CD8 lymphocyte act | 10.5 | KU-812 (Basophil) rest | 18.3 |
| CD4 lymphocyte none | 11.4 | KU-812 (Basophil) PMA/ionomycm | 69.3 |
| 2ry Th1/Th2/Tr1 anti-CD95 | 11.5 | CCD1106 (Keratinocytes) none | 13.7 |
| CH11 | | | |
| LAK cells rest | 66.0 | 93580 CCD1106 (Keratinocytes) TNFa and | 56.6 |
| | | IFNg | |
| LAK cells IL-2 | 13.8 | Liver cirrhosis | 7.6 |
| LAK cells IL-2 + IL-12 | 24.0 | Lupus kidney | 4.5 |
| LAK cells IL-2 + IFN gamma | 24.5 | NCI-H292 none | 37.9 |
| LAK cells IL-2 + IL-18 | 20.7 | NCI-H292 IL-4 | 51.8 |
| LAK cells PMA/ionomycin | 14.1 | NCI-H292 IL-9 | 48.0 |
| NK Cells IL-2 rest | 5.9 | NCI-H292 IL-13 | 26.2 |
| Two Way MLR 3 day | 35.6 | NCI-H292 IFN gamma | 27.9 |
| Two Way MLR 5 day | 23.2 | HPAEC none | 14.0 |
| Two Way MLR 7 day | 7.7 | HPAEC TNF alpha + IL-1 beta | 7.3 |
| PBMC rest | 7.4 | Lung fibroblast none | 14.7 |
| PBMC PWM | 100.0 | Lung fibroblast TNF alpha + IL-1 beta | 9.9 |
| PBMC PHA-L | 31.6 | Lung fibroblast IL-4 | 36.1 |
| Ramos (B cell) none | 29.5 | Lung fibroblast IL-9 | 27.9 |
| Ramos (B cell) ionomycin | 47.0 | Lung fibroblast IL-13 | 65.1 |
| B lymphocytes PWM | 36.6 | Lung fibroblast IFN gamma | 66.9 |
| B lymphocytes CD40L and IL- | 8.5 | Dermal fibroblast CCD1070 rest | 38.2 |
| 4 | | | |
| EOL-1 dbcAMP | 4.7 | Dermal fibroblast CCD1070 TNF alpha | 50.3 |
| EOL-1 dbcAMP | 15.8 | Dermal fibroblast CCD1070 IL-1 beta | 27.2 |
| PMA/ionomycin | | | |
| Dendritic cells none | 30.1 | Dermal fibroblast IFN gamma | 7.6 |
| Dendritic cells LPS | 34.4 | Dermal fibroblast IL-4 | 16.0 |
| Dendritic cells anti-CD40 | 39.5 | IBD Colitis 2 | 1.1 |
| Monocytes rest | 26.1 | IBD Crohn's | 3.5 |
| Monocytes LPS | 88.9 | Colon | 38.7 |
| Macrophages rest | 96.6 | Lung | 24.1 |
| Macrophages LPS | 68.8 | Thymus | 94.0 |
| HUVEC none | 15.9 | Kidney | 10.2 |
| HUVEC starved | 26.6 | | |

[1278] General_screening_panel_v1.4 Summary: Ag1160 Highest expression was detected in spleen (CT=27). This gene was widely expressed in this panel, demonstrating a role for this gene product in cell survival and proliferation. Moderate expression was also seen in brain, colon, gastric, lung, breast, ovarian, and melanoma cancer cell lines. Modulation of this gene product is useful in the treatment of these cancers.

[1279] Among tissues with metabolic function, this gene was expressed at moderte to low levels in pituitary, adipose, adrenal gland, pancreas, thyroid, and adult and fetal skeletal muscle, heart, and liver. This widespread expression among these tissues shows that this gene product plays a role in normal neuroendocrine and metabolic function and that disregulated expression of this gene contributes to neuroendocrine disorders or metabolic diseases, such as obesity and diabetes.

[1280] This gene was expressed at much higher levels in fetal lung and liver tissue (CTs=27) when compared to expression in the adult counterparts (CTs=30-31). Expression of this gene is useful as a marker to differentiate between the fetal and adult sources of these tissues. The relative overexpression of this gene in fetal lung shows that the protein product enhances lung and liver growth or development in the fetus and also acts in a regenerative capacity in the adult. Therapeutic modulation of the protein encoded by this gene is useful in treatment of lung and liver related diseases.

[1281] This gene was also expressed at moderate to low in the CNS, including the hippocampus, thalamus, substantia nigra, amygdala, cerebellum and cerebral cortex. Therapeutic modulation of the expression or function of this gene is useful in the treatment of neurologic disorders, such as Alzheimer's disease, Parkinson's disease, schizophrenia, multiple sclerosis, stroke and epilepsy.

[1282] Panel 2D Summary: Ag1160 Highest expression of this gene was detected in normal liver (CT=27). This gene was over expressed in gastric, colon, breast and lung cancers samples compared to the normal adjacent tissues. Targeting this gene or its protein product with a small molecule, antibody or protein therapeutic is useful in the treatment of these cancers.

[1283] Panel 4D Summary: Ag1160 This gene was upregulated in several normal and activated tissues. This gene was particularly high in activated monocytes and both activated and resting macrophages. Antibodies targeting this gene or gene product is useful to detect monocytes which are differentiating into macrophages. Antagonistic therapeutics to this molecule will inhibit the differentiation process, activation of the epithelium or keratinocytes in the skin and block or reduce inflammation in diseases such as asthma, allergy, psoriasis and emphysema.

[1284] AG. CG54683-05: Gamma-Aminobutyric-Acid Receptor RHO-3 Subunit Precursor.

[1285] Expression of gene CG54683-05 was assessed using the primer-probe sets Ag1130, Ag1198, Ag1253, Ag1603 and Ag3363, described in Tables AGA, AGB, AGC, AGD and AGE. Results of the RTQ-PCR runs are shown in Tables AGF and AGG.

TABLE AGA
Probe Name Ag1130

| | | | | |
|---|---|---|---|---|
| | | | Start | SEQ ID |
| Primers | Sequences | Length | Position | No |

| | | | | |
|---|---|---|---|---|
| Forward | 5′-gtcctggctttccagttagtct-3′ | 22 | 7 | 1289 |
| Probe | TET-5′-tcacctacatctggatcatattgaaacca- | 29 | 32 | 1290 |
| | 3′-TAMRA | | | |
| Reverse | 5′-ttgatgttagaagcagcacaaa-3′ | 22 | 65 | 1291 |

[1286] TABLE AGB
Probe Name Ag1198

| | | | | |
|---|---|---|---|---|
| | | | Start | SEQ ID |
| Primers | Sequences | Length | Position | No |

| | | | | |
|---|---|---|---|---|
| Forward | 5′-gtcctggctttccagttagtct-3′ | 22 | 7 | 1292 |
| Probe | TET-5′-tcacctacatctggatcatattgaaacca- | 29 | 32 | 1293 |
| | 3′-TAMRA | | | |
| Reverse | 5′-ttgatgttagaagcagcacaaa-3′ | 22 | 65 | 1294 |

[1287] TABLE AGC
Probe Name Ag1253

| | | | Start | SEQ ID |
|---|---|---|---|---|
| Primers | Sequences | Length | Position | No |
| Forward | 5′-atctgggtgcctgatatctttt-3′ | 22 | 415 | 1295 |
| Probe | TET-5′-tgtccactctaaaagatccttcatccat | 30 | 438 | 1296 |
| | ga-3′-TAMRA | | | |
| Reverse | 5′-cgcagcatgatattctccatag-3′ | 22 | 473 | 1297 |

[1288] TABLE AGD
Probe Name Ag1603

| | | | | |
|---|---|---|---|---|
| | | | Start | SEQ ID |
| Primers | Sequences | Length | Position | No |

| | | | | |
|---|---|---|---|---|
| Forward | 5′-gtcctggctttccagttagtct-3′ | 22 | 7 | 1298 |
| Probe | TET-5′-tcacctacatctggatcatattgaaacca- | 29 | 32 | 1299 |
| | 3′-TAMRA | | | |
| Reverse | 5′-ttgatgttagaagcagcacaaa-3′ | 22 | 65 | 1300 |

[1289] TABLE AGE
Probe Name Ag3363

| | | | Start | SEQ ID |
|---|---|---|---|---|
| Primers | Sequences | Length | Position | No |
| Forward | 5′-tggctttccagttagtctcctt-3′ | 22 | 11 | 1301 |
| Probe | TET-5′-cacctacatctggatcatattgaaacca- | 28 | 33 | 1302 |
| | 3′-TAMRA | | | |
| Reverse | 5′-ttgatgttagaagcagcacaaa-3′ | 22 | 65 | 1303 |

[1290] TABLE AGF
Panel 1.2
Column A - Rel. Exp.(%) Ag1130, Run 125117140
Column B - Rel. Exp.(%) Ag1130, Run 126566764
Column C - Rel. Exp.(%) Ag1198, Run 129140506

| Tissue Name | A | B | C | Tissue Name | A | B | C |
|---|---|---|---|---|---|---|---|
| Endothelial cells | 0.0 | 0.0 | 0.0 | Renal ca. 786-0 | 0.0 | 0.0 | 0.0 |
| Heart (Fetal) | 0.0 | 0.0 | 0.0 | Renal ca. A498 | 7.3 | 4.7 | 0.0 |
| Pancreas | 0.0 | 0.0 | 0.0 | Renal ca. RXF 393 | 0.0 | 0.0 | 0.0 |
| Pancreatic ca. CAPAN 2 | 9.0 | 0.0 | 0.0 | Renal ca. ACHN | 0.0 | 0.0 | 0.0 |
| Adrenal gland | 0.0 | 2.6 | 0.0 | Renal ca. UO-31 | 3.9 | 0.0 | 0.0 |
| Thyroid | 0.0 | 0.0 | 0.0 | Renal ca. TK-10 | 0.0 | 0.0 | 0.0 |
| Salivary gland | 0.0 | 0.0 | 0.0 | Liver | 26.6 | 0.0 | 0.0 |
| Pituitary gland | 0.0 | 0.0 | 0.0 | Liver (fetal) | 25.3 | 0.0 | 0.0 |
| Brain (fetal) | 0.0 | 0.0 | 0.0 | Liver ca. (hepatoblast) | 0.0 | 0.0 | 0.0 |
| | | | | HepG2 | | | |
| Brain (whole) | 2.6 | 20.0 | 0.0 | Lung | 0.0 | 0.0 | 0.0 |
| Brain (amygdala) | 1.3 | 32.1 | 0.0 | Lung (fetal) | 0.0 | 0.0 | 0.0 |
| Brain (cerebellum) | 1.5 | 3.8 | 0.0 | Lung ca. (small cell) LX-1 | 3.4 | 0.0 | 0.0 |
| Brain (hippocampus) | 0.0 | 27.0 | 0.0 | Lung ca. (small cell) NCI- | 28.5 | 74.2 | 0.0 |
| | | | | H69 | | | |
| Brain (thalamus) | 9.9 | 22.5 | 9.8 | Lung ca. (s.cell var.) SHP- | 3.8 | 9.7 | 0.0 |
| | | | | 77 | | | |
| Cerebral Cortex | 0.0 | 0.0 | 0.0 | Lung ca. (large cell) NCI- | 8.8 | 4.1 | 5.3 |
| | | | | H460 | | | |
| Spinal cord | 4.4 | 0.0 | 0.0 | Lung ca. (non-sm. cell) | 51.4 | 9.5 | 7.2 |
| | | | | A549 | | | |
| glio/astro U87-MG | 0.0 | 0.0 | 0.0 | Lung ca. (non-s.cell) Nd- | 0.0 | 0.0 | 0.0 |
| | | | | H23 | | | |
| glio/astro U-118-MG | 0.0 | 0.0 | 0.0 | Lung ca. (non-s.cell) | 8.4 | 2.7 | 9.6 |
| | | | | HOP-62 | | | |
| astrocytoma SW1783 | 2.9 | 0.0 | 0.0 | Lung ca. (non-s.cl) NCI- | 0.0 | 0.0 | 0.0 |
| | | | | H522 | | | |
| neuro*; met SK-N-AS | 0.0 | 0.0 | 0.0 | Lung ca. (squam.) SW | 3.2 | 8.7 | 0.0 |
| | | | | 900 | | | |
| astrocytoma SF-539 | 5.1 | 0.0 | 0.0 | Lung ca. (squam.) NCI | 2.3 | 15.9 | 0.0 |
| astrocytoma SNB-75 | 2.3 | 0.0 | 0.0 | Mammary gland | 0.0 | 0.0 | 0.0 |
| glioma SNB-19 | 6.3 | 20.7 | 9.0 | Breast ca.* (pl.ef) MCF-7 | 0.0 | 0.0 | 0.0 |
| glioma U251 | 1.4 | 0.0 | 1.8 | Breast ca.* (pl.ef) MDA- | 0.0 | 0.0 | 0.0 |
| | | | | MB-231 | | | |
| glioma SF-295 | 0.0 | 0.0 | 0.0 | Breast ca.* (pl.ef) T47D | 14.1 | 37.4 | 0.0 |
| Heart | 0.0 | 0.0 | 0.0 | Breast ca. BT-549 | 12.5 | 21.0 | 12.3 |
| Skeletal muscle | 2.3 | 0.0 | 0.0 | Breast ca. MDA-N | 0.0 | 0.0 | 0.0 |
| Bone marrow | 0.0 | 0.0 | 0.0 | Ovary | 0.0 | 0.0 | 0.0 |
| Thymus | 0.0 | 0.0 | 0.0 | Ovarian ca. OVCAR-3 | 0.0 | 0.0 | 0.0 |
| Spleen | 2.2 | 0.0 | 0.0 | Ovarian ca. OVCAR-4 | 0.0 | 0.0 | 0.0 |
| Lymph node | 0.0 | 0.0 | 0.0 | Ovarian ca. OVCAR-5 | 66.9 | 35.4 | 4.4 |
| Colorectal | 11.3 | 27.7 | 21.8 | Ovarian ca. OVCAR-8 | 2.7 | 0.0 | 0.0 |
| Stomach | 0.0 | 0.0 | 0.0 | Ovarian ca. IGROV-1 | 6.0 | 0.0 | 0.0 |
| Small intestine | 5.4 | 0.0 | 0.0 | Ovarian ca. (ascites) SK- | 30.8 | 0.0 | 0.0 |
| | | | | OV-3 | | | |
| Colon ca. SW480 | 3.2 | 0.0 | 0.0 | Uterus | 0.0 | 0.0 | 0.0 |
| Colon ca.* SW620 | 0.0 | 0.0 | 0.0 | Placenta | 0.0 | 0.0 | 0.0 |
| (SW480 met) | | | | | | | |
| Colon ca. HT29 | 1.9 | 14.4 | 0.0 | Prostate | 6.9 | 0.0 | 0.0 |
| Colon ca. HCT-116 | 0.0 | 0.0 | 0.0 | Prostate ca.* (bone met) | 100.0 | 0.0 | 0.0 |
| | | | | PC-3 | | | |
| Colon ca. CaCo-2 | 0.0 | 0.0 | 0.0 | Testis | 54.7 | 100.0 | 36.9 |
| CC Well to Mod Duff | 72.2 | 75.8 | 100.0 | Melanoma Hs688(A).T | 4.2 | 0.0 | 0.0 |
| (ODO3866) | | | | | | | |
| Colon ca. HCC-2998 | 5.3 | 4.8 | 0.0 | Melanoma* (met) | 2.7 | 34.2 | 13.3 |
| | | | | Hs688(B).T | | | |
| Gastric ca. (liver met) NCI- | 50.3 | 0.0 | 0.0 | Melanoma UACC-62 | 0.0 | 0.0 | 0.0 |
| N87 | | | | | | | |
| Bladder | 6.0 | 22.1 | 0.0 | Melanoma M14 | 31.4 | 36.3 | 20.2 |
| Trachea | 0.0 | 0.0 | 0.0 | Melanoma LOX IMVI | 0.0 | 0.0 | 0.0 |
| Kidney | 2.0 | 0.0 | 0.0 | Melanoma* (met) SK- | 2.4 | 0.0 | 0.0 |
| | | | | MEL-5 | | | |
| Kidney (fetal) | 1.1 | 2.5 | 0.0 | | | | |

[1291] TABLE AGG
Panel 4R
Column A - Rel. Exp.(%) Ag1198, Run 142014937

| Tissue Name | A | Tissue Name | A |
|---|---|---|---|
| Secondary Th1 act | 0.0 | HUVEC IL-1beta | 0.0 |
| Secondary Th2 act | 0.0 | HUVEC IFN gamma | 0.0 |
| Secondary Tr1 act | 2.5 | HUVEC TNF alpha + IFN gamma | 0.0 |
| Secondary Th1 rest | 0.0 | HUVEC TNF alpha + IL4 | 0.0 |
| Secondary Th2 rest | 0.0 | HUVEC IL-11 | 0.0 |
| Secondary Tr1 rest | 0.0 | Lung Microvascular EC none | 0.0 |
| Primary Th1 act | 0.0 | Lung Microvascular EC TNFalpha + IL- | 0.0 |
| | | 1beta | |
| Primary Th2 act | 0.0 | Microvascular Dermal EC none | 0.0 |
| Primary Tn act | 0.0 | Microsvasular Dermal EC TNFalpha + IL- | 0.0 |
| | | 1beta | |
| Primary Th1 rest | 0.0 | Bronchial epithelium TNFalpha + IL1beta | 0.0 |
| Primary Th2 rest | 0.0 | Small airway epithelium none | 0.0 |
| Primary Tr1 rest | 0.0 | Small airway epithelium TNFalpha + IL- | 0.0 |
| | | 1beta | |
| CD45RA CD4 lymphocyte act | 0.0 | Coronery artery SMC rest | 0.0 |
| CD45RO CD4 lymphocyte act | 0.0 | Coronery artery SMC TNFalpha + IL-Ibeta | 0.0 |
| CD8 lymphocyte act | 0.0 | Astrocytes rest | 0.0 |
| Secondary CD8 lymphocyte rest | 0.0 | Astrocytes TNFalpha + IL-1beta | 0.0 |
| Secondary CD8 lymphocyte act | 0.0 | KU-812 (Basophil) rest | 0.0 |
| CD4 lymphocyte none | 0.0 | KU-812 (Basophil) PMA/ionomycin | 0.0 |
| 2ry Th1/Th2/Tr1 anti-CD95 | 0.0 | CCD1106 (Keratinocytes) none | 0.0 |
| CH11 | | | |
| LAK cells rest | 0.0 | 93580 CCD1106 (Keratinocytes) TNFa and | 0.0 |
| | | IFNg | |
| LAK cells IL-2 | 0.0 | Liver cirrhosis | 16.4 |
| LAK cells IL-2 + IL-12 | 0.0 | Lupus kidney | 0.0 |
| LAK cells IL-2 + IFN gamma | 0.0 | NCI-H292 none | 0.0 |
| LAK cells IL-2 + IL-18 | 0.0 | NCI-H292 IL-4 | 0.0 |
| LAK cells PMA/ionomycin | 0.0 | NCI-H292 IL-9 | 0.0 |
| NK Cells IL-2 rest | 0.0 | NCI-H292 IL-13 | 0.0 |
| Two Way MLR 3 day | 0.0 | NCI-H292 IFN gamma | 0.0 |
| Two Way MLR 5 day | 0.0 | HPAEC none | 0.0 |
| Two Way MLR 7 day | 0.0 | HPAEC TNF alpha + IL-1 beta | 0.0 |
| PBMC rest | 0.0 | Lung fibroblast none | 0.0 |
| PBMC PWM | 0.0 | Lung fibroblast TNF alpha + IL-1 beta | 0.0 |
| PBMC PHA-L | 0.0 | Lung fibroblast IL-4 | 0.0 |
| Ramos (B cell) none | 0.0 | Lung fibroblast IL-9 | 0.0 |
| Ramos (B cell) ionomycm | 0.0 | Lung fibroblast IL-13 | 0.0 |
| B lymphocytes PWM | 0.0 | Lung fibroblast IFN gamma | 0.0 |
| B lymphocytes CD40L and IL-4 | 0.0 | Dermal fibroblast CCD1070 rest | 0.0 |
| EOL-1 dbcAMP | 0.0 | Dermal fibroblast CCD1070 TNF alpha | 0.0 |
| EOL-1 dbcAMP | | | |
| PMA/ionomycin | 0.0 | Dermal fibroblast CCD1070 IL-1 beta | 0.0 |
| Dendritic cells none | 0.0 | Dermal fibroblast IFN gamma | 0.0 |
| Dendritic cells LPS | 0.0 | Dermal fibroblast IL-4 | 0.0 |
| Dendritic cells anti-CD40 | 0.0 | IBD Colitis 1 | 100.0 |
| Monocytes rest | 10.0 | IBD Colitis 2 | 0.0 |
| Monocytes LPS | 0.0 | IBD Crohn's | 0.0 |
| Macrophages rest | 0.0 | Colon | 0.0 |
| Macrophages LPS | 0.0 | Lung | 0.0 |
| HUVEC none | 0.0 | Thymus | 0.0 |
| HUVEC starved | 0.0 | Kidney | 0.0 |

[1292] Panel 1.2 Summary: Ag1130/Ag1198—Significant expression of this gene was seen in testis, a colon cancer and prostate cancer cell line (CTs=33-34). Therefore, modulation of this gene is useful in the treatment of colon and prostate cancers.

[1293] Panel 4R Summary: Ag1198 Significant expression of this gene was seen only in the IBD colitis 1 sample (CT=34.2). Modulation of this gene is useful in the treatment of IBD colitis.

[1294] AH. CG54692-06: 5-Hydroxytryptamine 5A Receptor.

[1295] Expression of gene CG54692-06 was assessed using the primer-probe sets Ag1507, Ag1558 and Ag1602, described in Tables AHA, AHB and AHC. Results of the RTQ-PCR runs are shown in Tables AHD and AHE.

TABLE AHA
Probe Name Ag1507

| | | | Start | SEQ ID |
|---|---|---|---|---|
| Primers | Sequences | Length | Position | No |
| Forward | 5′-cccctgatttacacagctttta-3′ | 22 | 1042 | 1304 |
| Probe | TET-5′-acaacaatgccttcaagagcctcttt-3′- | 26 | 1073 | 1305 |
| | TAMRA | | | |
| Reverse | 5′-ccctgtgttcatctctgcttag-3′ | 22 | 1100 | 1306 |

[1296] TABLE AHB
Probe Name Ag1558

| | | | Start | SEQ ID |
|---|---|---|---|---|
| Primers | Sequences | Length | Position | No |
| Forward | 5′-cccctgatttacacagctttta-3′ | 22 | 1042 | 1307 |
| Probe | TET-5′-acaacaatgccttcaagagcctcttt-3′- | 26 | 1073 | 1308 |
| | TAMRA | | | |
| Reverse | 5′-ccctgtgttcatctctgcttag-3′ | 22 | 1100 | 1309 |

[1297] TABLE AHC
Probe Name Ag1602

| | | | Start | SEQ ID |
|---|---|---|---|---|
| Primers | Sequences | Length | Position | No |
| Forward | 5′-cccctgatttacacagctttta-3′ | 22 | 1042 | 1310 |
| Probe | TET-5′-acaacaatgccttcaagagcctcttt-3′- | 26 | 1073 | 1311 |
| | TAMRA | | | |
| Reverse | 5′-ccctgtgttcatctctgcttag-3′ | 22 | 1100 | 1312 |

[1298] TABLE AHD
Panel 1.2
Column A - Rel. Exp.(%) Ag1507, Run 142131135

| Tissue Name | A | Tissue Name | A |
|---|---|---|---|
| Endothelial cells | 7.5 | Renal ca. 786-0 | 0.9 |
| Heart (Fetal) | 5.3 | Renal ca. A498 | 27.4 |
| Pancreas | 8.7 | Renal ca. RXF 393 | 2.3 |
| Pancreatic ca. CAPAN 2 | 3.0 | Renal ca. ACHN | 15.5 |
| Adrenal Gland | 4.4 | Renal ca. UO-31 | 19.2 |
| Thyroid | 2.3 | Renal ca. TK-10 | 39.8 |
| Salivary gland | 12.9 | Liver | 5.8 |
| Pituitary gland | 0.0 | Liver (fetal) | 0.0 |
| Brain (fetal) | 0.0 | Liver ca. (hepatoblast) HepG2 | 27.2 |
| Brain (whole) | 4.0 | Lung | 0.0 |
| Brain (amygdala) | 20.3 | Lung (fetal) | 1.0 |
| Brain (cerebellum) | 3.2 | Lung ca. (small cell) LX-1 | 9.0 |
| Brain (hippocampus) | 13.0 | Lung ca. (small cell) NCI-H69 | 34.6 |
| Brain (thalamus) | 3.6 | Lung ca. (s.cell var.) SHP-77 | 2.0 |
| Cerebral Cortex | 16.6 | Lung ca. (large cell) NCI-H460 | 4.9 |
| Spinal cord | 0.0 | Lung ca. (non-sm. cell) A549 | 19.6 |
| gilo/astro U87-MG | 10.6 | Lung ca. (non-s.cell) NCI-H23 | 25.7 |
| glio/astro U-118-MG | 3.8 | Lung ca. (non-s.cell) HOP-62 | 35.8 |
| astrocytoma SW1783 | 2.0 | Lung ca. (non-s.cl) NCI-H522 | 21.6 |
| neuro*; met SK-N-AS | 1.6 | Lung ca. (squam.) SW 900 | 21.2 |
| astrocytoma SF-539 | 4.7 | Lung ca. (squam.) NCI-H596 | 3.3 |
| astrocytoma SNB-75 | 2.1 | Mammary gland | 1.1 |
| glioma SNB-19 | 16.4 | Breast ca.* (pl.ef) MCF-7 | 2.0 |
| glioma U251 | 9.2 | Breast ca.* (pl.ef) MDA-MB-231 | 2.9 |
| glioma SF-295 | 3.2 | Breast ca.* (pl.ef) T47D | 20.7 |
| Heart | 19.2 | Breast ca. BT-549 | 11.4 |
| Skeletal Muscle | 1.4 | Breast ca. MDA-N | 30.1 |
| Bone marrow | 0.9 | Ovary | 17.0 |
| Thymus | 0.0 | Ovarian ca. OVCAR-3 | 5.3 |
| Spleen | 3.9 | Ovarian ca. OVCAR-4 | 13.9 |
| Lymph node | 1.2 | Ovarian ca. OVCAR-5 | 100.0 |
| Colorectal | 6.0 | Ovarian ca. OVCAR-8 | 72.7 |
| Stomach | 0.9 | Ovarian ca. IGROV-1 | 49.3 |
| Small intestine | 6.0 | Ovarian ca. (ascites) SK-OV-3 | 36.1 |
| Colon ca. SW480 | 2.3 | Uterus | 1.0 |
| Colon ca.* SW620 (SW480 met) | 0.0 | Placenta | 0.0 |
| Colon ca. HT29 | 14.6 | Prostate | 3.0 |
| Colon ca. HCT-116 | 13.5 | Prostate ca.* (bone met) PC-3 | 16.0 |
| Colon ca. CaCo-2 | 3.5 | Testis | 30.8 |
| CC Well to Mod Diff (ODO3866) | 17.8 | Melanoma Hs688(B).T | 2.0 |
| Colon ca. HCC-2998 | 35.1 | Melanoma* (met) Hs688(B).T | 7.3 |
| Gastric ca. (liver met) NCI-N87 | 14.6 | Melanoma UACC-62 | 6.0 |
| Bladder | 38.4 | Melanoma M14 | 57.4 |
| Trachea | 0.0 | Melanoma LOX IMVI | 12.2 |
| Kidney | 28.5 | Melanoma* (met) SK-MEL-5 | 3.7 |
| Kidney (fetal) | 8.4 | | |

[1299] TABLE AHE
Panel 2D
Column A - Rel. Exp. (%) Ag1507, Run 165723610
Column B - Rel. Exp. (%) Ag1558, Run 157982934
Column C - Rel. Exp. (%) Ag1602, Run 162381799

| Tissue Name | A | B | C | Tissue Name | A | B | C |
|---|---|---|---|---|---|---|---|
| Normal Colon | 11.9 | 23.8 | 35.6 | Kidney Margin 8120608 | 0.0 | 0.0 | 0.0 |
| CC Well to Mod Diff | 47.0 | 19.5 | 47.3 | Kidney Cancer 8120613 | 0.0 | 0.0 | 3.8 |
| (ODO3866) | | | | | | | |
| CC Margin (ODO3866) | 41.5 | 9.9 | 11.3 | Kidney Margin 8120614 | 0.0 | 0.0 | 0.0 |
| CC Gr.2 rectosigmoid | 24.0 | 8.2 | 27.2 | Kidney Cancer 9010320 | 0.0 | 0.0 | 14.2 |
| (ODO3868) | | | | | | | |
| CC Margin (ODO3868) | 16.5 | 0.0 | 4.0 | Kidney Margin 9010321 | 11.9 | 0.0 | 18.3 |
| CC Mod Diff (ODO3920) | 62.0 | 17.6 | 0.0 | Normal Uterus | 0.0 | 13.1 | 0.0 |
| CC Margin (ODO3920) | 11.2 | 16.4 | 9.0 | Uterine Cancer 064011 | 0.0 | 8.9 | 18.2 |
| CC Gr.2 ascend colon | 6.9 | 28.9 | 0.0 | Normal Thyroid | 14.0 | 0.0 | 0.0 |
| (ODO3921) | | | | | | | |
| CC Margin (ODO3921) | 49.3 | 17.9 | 27.9 | Thyroid Cancer | 0.0 | 0.0 | 0.0 |
| CC from Partial | 12.5 | 9.3 | 8.1 | Thyroid Cancer | 0.0 | 0.0 | 5.0 |
| Hepatectomy (ODO4309) | | | | A302152 | | | |
| Mets | | | | | | | |
| Liver Margin (ODO4309) | 0.0 | 0.0 | 8.7 | Thyroid Margin | 19.2 | 30.4 | 18.7 |
| | | | | A302153 | | | |
| Colon mets to lung | 13.7 | 0.0 | 9.0 | Normal Breast | 0.0 | 21.9 | 0.0 |
| (OD04451-01) | | | | | | | |
| Lung Margin (OD04451-02) | 12.2 | 0.0 | 15.5 | Breast Cancer | 0.0 | 8.1 | 31.0 |
| Normal Prostate 6546-1 | 10.5 | 0.0 | 22.7 | Breast Cancer | 0.0 | 24.7 | 7.7 |
| | | | | (OD04590-01) | | | |
| Prostate Cancer (OD04410) | 0.0 | 8.4 | 0.0 | Breast Cancer Mets | 10.8 | 20.3 | 10.9 |
| | | | | (OD04590-03) | | | |
| Prostate Margin (OD04410) | 0.0 | 8.0 | 10.8 | Breast Cancer | 0.0 | 11.7 | 40.9 |
| | | | | Metastasis | | | |
| Prostate Cancer (OD04720- | 9.8 | 9.3 | 25.9 | Breast Cancer | 34.9 | 25.2 | 8.5 |
| 01) | | | | | | | |
| Prostate Margin (OD04720- | 39.0 | 33.7 | 25.7 | Breast Cancer | 30.6 | 8.5 | 0.0 |
| 02) | | | | | | | |
| Normal Lung | 24.5 | 60.3 | 100.0 | Breast Cancer 9100266 | 19.9 | 0.0 | 0.0 |
| Lung Met to Muscle | 7.0 | 7.1 | 27.2 | Breast Margin 9100265 | 0.0 | 7.4 | 0.0 |
| (ODO4286) | | | | | | | |
| Muscle Margin (ODO4286) | 0.0 | 0.0 | 28.5 | Breast Cancer A209073 | 44.8 | 25.3 | 9.0 |
| Lung Malignant Cancer | 0.0 | 9.8 | 11.5 | Breast Margin A209073 | 11.6 | 8.8 | 25.9 |
| (OD03126) | | | | | | | |
| Lung Margin (OD03126) | 20.0 | 35.6 | 11.2 | Normal Liver | 40.6 | 19.6 | 17.3 |
| Lung Cancer (OD04404) | 9.5 | 4.7 | 10.1 | Liver Cancer | 0.0 | 16.6 | 13.6 |
| Lung Margin (OD04404) | 0.0 | 8.9 | 0.0 | Liver Cancer 1025 | 0.0 | 8.6 | 10.2 |
| Lung Cancer (OD04565) | 0.0 | 0.0 | 0.0 | Liver Cancer 1026 | 0.0 | 9.5 | 0.0 |
| Lung Margin (OD04565) | 10.4 | 11.3 | 7.4 | Liver Cancer 6004-T | 0.0 | 24.7 | 9.3 |
| Lung Cancer (OD04237-01) | 10.4 | 8.1 | 0.0 | Liver Tissue 6004-N | 0.0 | 9.3 | 0.0 |
| Lung Margin (OD04237-02) | 18.7 | 7.6 | 17.7 | Liver Cancer 6005-T | 0.0 | 0.0 | 10.0 |
| Ocular Mel Met to Liver | 0.0 | 0.0 | 0.0 | Liver Tissue 6005-N | 0.0 | 0.0 | 0.0 |
| (ODO4310) | | | | | | | |
| Liver Margin (ODO4310) | 0.0 | 0.0 | 0.0 | Normal Bladder | 10.4 | 9.9 | 0.0 |
| Melanoma Metastasis | 0.0 | 6.7 | 0.0 | Bladder Cancer | 0.0 | 9.0 | 0.0 |
| Lung Margin (OD04321) | 0.0 | 0.0 | 27.4 | Bladder Cancer | 54.7 | 54.7 | 32.1 |
| Normal Kidney | 11.3 | 36.1 | 9.5 | Bladder Cancer | 0.0 | 8.0 | 9.3 |
| | | | | (OD04718-0l) | | | |
| Kidney Ca, Nuclear grade 2 | 0.0 | 0.0 | 0.0 | Bladder Normal | 0.0 | 17.2 | 6.3 |
| (OD04338) | | | | Adjacent (OD04718-03) | | | |
| Kidney Margin (OD04338) | 14.4 | 0.0 | 0.0 | Normal Ovary | 0.0 | 0.0 | 8.5 |
| Kidney Ca Nuclear grade 1/2 | 0.0 | 15.9 | 27.5 | Ovarian Cancer | 11.1 | 17.6 | 10.2 |
| (OD04339) | | | | | | | |
| Kidney Margin (OD04339) | 21.0 | 8.6 | 28.5 | Ovarian Cancer | 0.0 | 9.4 | 27.0 |
| | | | | (OD04768-07) | | | |
| Kidney Ca, Clear cell type | 0.0 | 14.0 | 16.0 | Ovary Margin | 0.0 | 0.0 | 0.0 |
| (OD04340) | | | | (OD04768-08) | | | |
| Kidney Margin (OD04340) | 18.6 | 0.0 | 17.9 | Normal Stomach | 24.5 | 7.7 | 5.0 |
| Kidney Ca, Nuclear grade 3 | 0.0 | 16.8 | 0.0 | Gastric Cancer 9060358 | 0.0 | 0.0 | 0.0 |
| (OD04348) | | | | | | | |
| Kidney Margin (OD04348) | 6.3 | 29.3 | 9.0 | Stomach Margin | 0.0 | 8.5 | 0.0 |
| | | | | 9060359 | | | |
| Kidney Cancer (OD04622- | 0.0 | 0.0 | 0.0 | Gastric Cancer 9060395 | 57.4 | 4.9 | 3.9 |
| 01) | | | | | | | |
| Kidney Margin (OD04622- | 0.0 | 0.0 | 0.0 | Stomach Margin | 0.0 | 32.8 | 18.2 |
| 03) | | | | 9060394 | | | |
| Kidney Cancer (OD04450- | 0.0 | 0.0 | 14.0 | Gastric Cancer 9060397 | 24.1 | 10.2 | 9.9 |
| 01) | | | | | | | |
| Kidney Margin (OD04450- | 0.0 | 5.5 | 0.0 | Stomach Margin | 15.1 | 0.0 | 0.0 |
| 03) | | | | 9060396 | | | |
| Kidney Cancer 8120607 | 0.0 | 0.0 | 0.0 | Gastric Cancer 064005 | 100.0 | 100.0 | 50.7 |

[1300] Panel 1.2 Summary: Ag1507 Low but significant expression of this gene was detected in ovarian cancer cell lines (CT=32.5). In general, expression of this gene was seen in cancer cell lines rather than in normal tissues, with low but significant expression also detectable in melanoma, breast cancer, lung cancer, and renal cancer cell lines. Thus, expression levels of this gene is useful to detect melanoma, breast, lung, renal and colon cancers. Therapeutic inhibition of the this gene or gene product, and/or use of antibodies, small molecule or protein drugs, is effective in the treatment of the afore mentioned cancers.

[1301] Panel 2D Summary: Ag1558 Significant expression of this gene was detected in a gastric cancer tissue sample (CT=34.7). Thus, expression of the gene is useful to distinguish between gastric cancer and normal tissue. Therapeutic modulation of this gene, expressed protein and/or use of antibodies or small molecule drugs targeting the gene or gene product are useful in the treatment of gastric cancer.

[1302] AI. CG55069-01, CG55069-03, CG55069-04, CG55069-09: Ten-m3.

[1303] Expression of gene CG55069-01, CG55069-03, CG55069-04, and CG55069-09 were assessed using the primer-probe sets Ag1479, Ag2674, and Ag2820, described in Tables AIA, AIB, and AIC. Results of the RTQ-PCR runs are shown in Tables AID, AIE, and AIF. CG55069-04, and CG55069-09 represent a physical clone for EGF domain. Probe-primer set Ag2820 is specific for variant CG55069-01.

TABLE AIA
Probe Name Ag1479

| | | | Start | SEQ ID |
|---|---|---|---|---|
| Primers | Sequences | Length | Position | No |
| Forward | 5′-cacggaacgtatcttcaagaaa-3′ | 22 | 2125 | 1313 |
| Probe | TET-5′-ctgcacgtgtgaccctaactggactg-3′- | 26 | 2154 | 1314 |
| | TAMRA | | | |
| Reverse | 5′-gccacagtccacagaacatatt-3′ | 22 | 2199 | 1315 |

[1304] TABLE AIB
Probe Name Ag2674

| | | | Start | SEQ ID |
|---|---|---|---|---|
| Primers | Sequences | Length | Position | No |
| Forward | 5′-acctactcggccactacctaga-3′ | 22 | 993 | 1316 |
| Probe | TET-5′-caccctatcaagaagtgcttttaaattca- | 29 | 1017 | 1317 |
| | 3′-TAMRA | | | |
| Reverse | 5′-cagtgcatttccagctacagta-3′ | 22 | 1060 | 1318 |

[1305] TABLE AIC
Probe Name Ag2820

| | | | Start | SEQ ID |
|---|---|---|---|---|
| Primers | Sequences | Length | Position | No |
| Forward | 5′-cagagaagcagacgagttcact-3′ | 22 | 354 | 1319 |
| Probe | TET-5′-caaggacagaattttaccctaaggca-3′- | 26 | 379 | 1320 |
| | TAMRA | | | |
| Reverse | 5′-gttgctggttcacaaactccta-3′ | 22 | 407 | 1321 |

[1306] TABLE AID
Panel 1.3D
Column A - Rel. Exp.(%) Ag1479, Run 165520101
Column B - Rel. Exp.(%) Ag2674, Run 162554642
Column C - Rel. Exp.(%) Ag2820, Run 165527000
Column D - Rel. Exp.(%) Ag2820, Run 165544916

| Tissue Name | A | B | C | D |
|---|---|---|---|---|
| Liver adenocarcinoma | 16.0 | 15.9 | 17.2 | 8.2 |
| Pancreas | 0.5 | 0.1 | 0.0 | 0.1 |
| Pancreatic ca. CAPAN 2 | 16.2 | 4.9 | 10.4 | 6.3 |
| Adrenal gland | 4.1 | 0.8 | 4.9 | 2.7 |
| Thyroid | 2.0 | 0.8 | 0.6 | 0.2 |
| Salivary gland | 0.2 | 0.1 | 0.0 | 0.1 |
| Pituitary gland | 3.5 | 0.6 | 0.8 | 0.1 |
| Brain (fetal) | 8.7 | 0.6 | 2.3 | 1.1 |
| Brain (whole) | 10.4 | 2.0 | 1.7 | 2.1 |
| Brain (amygdala) | 12.8 | 3.0 | 2.0 | 2.0 |
| Brain (cerebellum) | 10.0 | 1.8 | 0.3 | 0.3 |
| Brain (hippocampus) | 17.7 | 5.0 | 3.5 | 2.1 |
| Brain (substantia nigra) | 1.8 | 0.0 | 0.4 | 0.1 |
| Brain (thalamus) | 19.3 | 2.2 | 2.2 | 3.2 |
| Cerebral Cortex | 8.0 | 100.0 | 4.8 | 3.6 |
| Spinal cord | 1.4 | 1.1 | 0.4 | 1.0 |
| glio/astro U87-MG | 13.6 | 12.0 | 18.8 | 26.1 |
| glio/astro U-118-MG | 82.4 | 20.9 | 100.0 | 100.0 |
| asirocytoma SW1783 | 27.9 | 21.5 | 24.8 | 19.3 |
| neuro*; met SK-N-AS | 31.2 | 8.7 | 18.8 | 16.3 |
| astrocytoma SF-539 | 25.2 | 19.8 | 22.2 | 19.3 |
| astrocytoma SNB-75 | 20.6 | 5.2 | 27.2 | 15.7 |
| glioma SNB-19 | 4.7 | 1.6 | 4.0 | 3.4 |
| glioma U251 | 100.0 | 7.9 | 88.3 | 76.8 |
| glioma SF-295 | 5.6 | 3.3 | 5.6 | 3.5 |
| Heart (Fetal) | 1.0 | 4.3 | 0.3 | 0.3 |
| Heart | 0.7 | 0.3 | 0.0 | 0.0 |
| Skeletal muscle (Fetal) | 1.0 | 32.8 | 2.3 | 1.3 |
| Skeletal muscle | 6.0 | 2.0 | 0.0 | 0.2 |
| Bone marrow | 0.0 | 0.0 | 0.0 | 0.0 |
| Thymus | 0.2 | 0.7 | 0.5 | 0.6 |
| Spleen | 0.7 | 0.3 | 1.0 | 0.9 |
| Lymph node | 2.0 | 0.2 | 2.4 | 2.0 |
| Colorectal | 0.3 | 3.2 | 0.5 | 0.1 |
| Stomach | 3.4 | 0.1 | 2.2 | 0.1 |
| Small intestine | 3.5 | 0.6 | 1.3 | 0.7 |
| Colon ca. SW480 | 1.6 | 0.7 | 2.4 | 2.0 |
| Colon ca.* SW620 (SW480 met) | 0.0 | 0.0 | 0.0 | 0.0 |
| Colon ca. HT29 | 0.7 | 0.7 | 0.6 | 0.8 |
| Colon ca. HCT-116 | 0.3 | 0.0 | 0.0 | 0.1 |
| Colon ca. CaCo-2 | 8.6 | 14.3 | 9.7 | 7.4 |
| CC Well to Mod Duff (ODO3866) | 2.6 | 2.5 | 2.6 | 1.4 |
| Colon ca. HCC-2998 | 1.0 | 0.4 | 2.4 | 1.2 |
| Gastric ca. (liver met) NCI-N87 | 0.9 | 0.3 | 2.4 | 0.6 |
| Bladder | 0.9 | 2.5 | 2.3 | 0.4 |
| Trachea | 0.8 | 0.3 | 0.0 | 0.2 |
| Kidney | 0.8 | 0.5 | 0.0 | 0.0 |
| Kidney (fetal) | 2.8 | 1.4 | 2.5 | 1.3 |
| Renal ca. 786-0 | 11.2 | 6.4 | 19.9 | 9.5 |
| Renal ca. A498 | 13.1 | 4.3 | 13.2 | 7.2 |
| Renal ca. RXF 393 | 21.5 | 7.2 | 21.3 | 26.1 |
| Renal ca. ACHN | 10.1 | 5.1 | 7.6 | 7.5 |
| Renal ca. UO-31 | 10.2 | 3.3 | 13.8 | 9.5 |
| Renal ca. TK-10 | 0.0 | 0.0 | 0.0 | 0.0 |
| Liver | 0.0 | 0.0 | 0.0 | 0.0 |
| Liver (fetal) | 0.1 | 0.0 | 0.0 | 0.0 |
| Liver ca. (hepatoblast) HepG2 | 0.2 | 0.2 | 0.0 | 0.4 |
| Lung | 0.4 | 0.1 | 0.2 | 0.0 |
| Lung (fetal) | 0.3 | 0.3 | 0.0 | 0.7 |
| Lung ca. (small cell) LX-1 | 0.0 | 0.0 | 0.0 | 0.0 |
| Lung ca. (small cell) NCI-H69 | 3.1 | 11.6 | 5.4 | 11.2 |
| Lung ca. (s.cell var.) SHP-77 | 2.4 | 1.7 | 0.0 | 0.0 |
| Lung ca. (large cell) NCI-H460 | 18.6 | 2.6 | 26.1 | 12.9 |
| Lung ca. (non-sm. cell) A549 | 0.4 | 0.1 | 0.6 | 0.2 |
| Lung ca. (non-s.cell) NCI-H23 | 1.4 | 2.1 | 1.2 | 0.1 |
| Lung ca. (non-s.cell) HOP-62 | 9.5 | 3.9 | 16.0 | 6.8 |
| Lung ca. (non-s.cl) NCI-H522 | 28.1 | 36.9 | 15.3 | 5.8 |
| Lung ca. (squam.) SW 900 | 0.6 | 0.1 | 0.2 | 0.1 |
| Lung ca. (squam.) NGI-H596 | 16.5 | 8.0 | 19.2 | 12.3 |
| Mammary gland | 0.7 | 0.5 | 0.5 | 0.2 |
| Breast ca.* (pl.ef) MCF-7 | 5.0 | 8.8 | 5.1 | 2.1 |
| Breast ca.* (pl.ef) MDA-MB-231 | 2.4 | 0.3 | 0.5 | 0.4 |
| Breast ca.* (pl.ef) T47D | 53.6 | 26.1 | 1.9 | 1.1 |
| Breast ca. BT-549 | 0.0 | 0.0 | 0.0 | 0.0 |
| Breast ca. MDA-N | 0.8 | 1.1 | 1.5 | 1.1 |
| Ovary | 0.8 | 2.8 | 0.3 | 0.0 |
| Ovarian ca. OVCAR-3 | 58.6 | 19.3 | 26.8 | 20.0 |
| Ovarian ca. OVCAR-4 | 2.4 | 0.4 | 3.1 | 2.0 |
| Ovarian ca. OVCAR-5 | 0.0 | 0.0 | 0.0 | 0.0 |
| Ovarian ca. OVCAR-8 | 8.7 | 6.7 | 1.7 | 2.8 |
| Ovarian ca. IGROV-l | 3.1 | 1.5 | 0.0 | 0.4 |
| Ovarian ca. (ascites) SK-OV-3 | 27.9 | 6.7 | 22.2 | 0.0 |
| Uterus | 2.4 | 0.4 | 1.2 | 0.9 |
| Placenta | 8.1 | 4.4 | 7.7 | 4.1 |
| Prostate | 2.1 | 0.1 | 0.0 | 0.0 |
| Prostate ca.* (bone met) PC-3 | 0.7 | 1.1 | 0.0 | 0.0 |
| Testis | 4.5 | 1.1 | 0.0 | 0.1 |
| Melanoma Hs688(A).T | 10.0 | 20.4 | 12.8 | 7.5 |
| Melanoma* (met) Hs688(B).T | 12.5 | 18.9 | 12.0 | 4.2 |
| Melanoma UACC-62 | 1.2 | 0.3 | 0.4 | 0.3 |
| Melanoma M14 | 13.7 | 2.1 | 14.4 | 7.8 |
| Melanoma LOX IMVI | 1.2 | 1.2 | 0.0 | 0.0 |
| Melanoma* (met) SK-MEL-5 | 3.7 | 4.5 | 3.8 | 1.8 |
| Adipose | 3.6 | 4.5 | 12.9 | 0.6 |

[1307] TABLE AIE
Panel 2D
Column A - Rel. Exp. (%) Ag2674, Run 162455917
Column B - Rel. Exp. (%) Ag2820, Run 163578010
Column C - Rel. Exp. (%) Ag2820, Run 165910586

| Tissue Name | A | B | C | Tissue Name | A | B | C |
|---|---|---|---|---|---|---|---|
| Normal Colon | 47.6 | 12.4 | 15.7 | Kidney Margin 8120608 | 6.9 | 1.7 | 3.7 |
| CC Well to Mod Diff | 8.4 | 7.2 | 7.4 | Kidney Cancer 8120613 | 0.5 | 0.0 | 0.0 |
| (ODO3866) | | | | | | | |
| CC Margin (ODO3866) | 8.0 | 0.8 | 0.4 | Kidney Margin 8120614 | 2.8 | 1.6 | 0.0 |
| CC Gr.2 rectosigmoid | 5.4 | 3.8 | 2.3 | Kidney Cancer 9010320 | 22.4 | 39.5 | 36.1 |
| (ODO3868) | | | | | | | |
| CC Margin (ODO3868) | 12.4 | 2.2 | 1.2 | Kidney Margin 9010321 | 14.1 | 22.5 | 11.6 |
| CC Mod Diff (ODO3920) | 0.4 | 0.7 | 0.0 | Normal Uterus | 7.1 | 4.1 | 7.0 |
| CC Margin (ODO3920) | 12.2 | 1.6 | 1.4 | Uterine Cancer 064011 | 38.4 | 5.5 | 2.3 |
| CC Gr.2 ascend colon | 3.8 | 2.9 | 3.6 | Normal Thyroid | 13.9 | 4.7 | 1.1 |
| (ODO3921) | | | | | | | |
| CC Margin (ODO3921) | 8.9 | 1.3 | 0.0 | Thyroid Cancer | 30.4 | 36.3 | 40.9 |
| CC from Partial | 6.0 | 12.3 | 12.5 | Thyroid Cancer | 8.3 | 5.8 | 2.8 |
| Hepatectomy (ODO4309) | | | | A302152 | | | |
| Mets | | | | | | | |
| Liver Margin (ODO4309) | 0.4 | 0.4 | 0.0 | Thyroid Margin | 88.3 | 10.0 | 7.2 |
| | | | | A302153 | | | |
| Colon mets to lung | 1.4 | 1.5 | 1.1 | Normal Breast | 26.4 | 9.5 | 11.3 |
| (OD04451-01) | | | | | | | |
| Lung Margin (OD04451-02) | 0.7 | 0.0 | 0.8 | Breast Cancer | 2.0 | 0.7 | 0.8 |
| Normal Prostate 6546-1 | 14.1 | 6.3 | 2.0 | Breast Cancer | 13.7 | 4.0 | 2.9 |
| | | | | (OD04590-01) | | | |
| Prostate Cancer (OD04410) | 26.8 | 4.9 | 4.1 | Breast Cancer Mets | 55.1 | 32.5 | 15.9 |
| | | | | (OD04590-03) | | | |
| Prostate Margin (OD04410) | 27.0 | 6.0 | 1.9 | Breast Cancer | 24.8 | 12.2 | 2.9 |
| | | | | Metastasis | | | |
| Prostate Cancer (OD04720- | 18.8 | 3.2 | 1.2 | Breast Cancer | 11.2 | 7.5 | 5.5 |
| 01) | | | | | | | |
| Prostate Margin (OD04720- | 41.2 | 8.0 | 3.9 | Breast Cancer | 11.1 | 1.8 | 1.3 |
| 02) | | | | | | | |
| Normal Lung | 16.0 | 13.4 | 11.8 | Breast Cancer 9100266 | 11.8 | 3.5 | 1.2 |
| Lung Met to Muscle | 25.5 | 64.2 | 39.2 | Breast Margin 9100265 | 13.2 | 4.9 | 1.7 |
| (ODO4286) | | | | | | | |
| Muscle Margin (ODO4286) | 14.1 | 1.3 | 1.1 | Breast Cancer A209073 | 19.2 | 3.5 | 1.7 |
| Lung Malignant Cancer | 44.8 | 66.9 | 57.8 | Breast Margin A209073 | 25.3 | 0.6 | 2.0 |
| (OD03126) | | | | | | | |
| Lung Margin (OD03126) | 11.7 | 10.6 | 5.9 | Normal Liver | 1.7 | 1.2 | 0.3 |
| Lung Cancer (OD04404) | 13.7 | 10.4 | 11.6 | Liver Cancer | 0.5 | 0.0 | 0.0 |
| Lung Margin (OD04404) | 11.4 | 10.7 | 14.4 | Liver Cancer 1025 | 0.0 | 0.0 | 0.0 |
| Lung Cancer (OD04565) | 13.1 | 8.5 | 4.5 | Liver Cancer 1026 | 0.7 | 0.0 | 0.0 |
| Lung Margin (OD04565) | 3.1 | 5.3 | 6.2 | Liver Cancer 6004-T | 0.5 | 0.0 | 0.0 |
| Lung Cancer (OD04237-01) | 7.4 | 13.6 | 4.5 | Liver Tissue 6004-N | 0.6 | 1.0 | 0.3 |
| Lung Margin (OD04237-02) | 4.8 | 5.3 | 3.8 | Liver Cancer 6005-T | 1.1 | 0.0 | 0.0 |
| Ocular Mel Met to Liver | 0.9 | 0.0 | 0.0 | Liver Tissue 6005-N | 0.0 | 0.0 | 0.0 |
| (ODO4310) | | | | | | | |
| Liver Margin (ODO4310) | 5.0 | 0.0 | 0.3 | Normal Bladder | 26.1 | 14.7 | 12.7 |
| Melanoma Metastasis | 29.7 | 57.4 | 31.6 | Bladder Cancer | 6.0 | 9.2 | 2.0 |
| Lung Margin (OD04321) | 4.3 | 7.0 | 3.5 | Bladder Cancer | 6.0 | 3.9 | 2.3 |
| Normal Kidney | 27.7 | 18.9 | 14.4 | Bladder Cancer | 41.8 | 89.5 | 82.4 |
| | | | | (OD04718-01) | | | |
| Kidney Ca, Nuclear grade 2 | 2.9 | 5.6 | 2.9 | Bladder Normal | 22.4 | 3.5 | 3.9 |
| (OD04338) | | | | Adjacent (OD04718-03) | | | |
| Kidney Margin (OD04338) | 11.8 | 10.8 | 9.0 | Normal Ovary | 10.1 | 2.1 | 0.6 |
| Kidney Ca Nuclear grade 1/2 | 48.3 | 82.4 | 67.8 | Ovarian Cancer | 100.0 | 36.3 | 100.0 |
| (OD04339) | | | | | | | |
| Kidney Margin (OD04339) | 15.9 | 17.7 | 8.8 | Ovarian Cancer | 0.3 | 0.0 | 0.4 |
| | | | | (OD04768-07) | | | |
| Kidney Ca, Clear cell type | 0.8 | 0.0 | 0.3 | Ovary Margin | 8.2 | 6.9 | 4.4 |
| (OD04340) | | | | (OD04768-08) | | | |
| Kidney Margin (OD04340) | 21.6 | 13.9 | 8.0 | Normal Stomach | 5.7 | 2.2 | 1.9 |
| Kidney Ca, Nuclear grade 3 | 33.4 | 84.7 | 58.2 | Gastric Cancer 9060358 | 7.2 | 3.0 | 2.8 |
| (OD04348) | | | | | | | |
| Kidney Margin (OD04348) | 12.9 | 4.6 | 11.1 | Stomach Margin | 4.9 | 0.7 | 1.5 |
| | | | | 9060359 | | | |
| Kidney Cancer (OD04622- | 1.4 | 0.0 | 4.6 | Gastric Cancer 9060395 | 6.5 | 1.9 | 1.8 |
| 01) | | | | | | | |
| Kidney Margin (OD04622- | 7.3 | 3.9 | 1.1 | Stomach Margin | 7.2 | 2.2 | 2.3 |
| 03) | | | | 9060394 | | | |
| Kidney Cancer (OD04450- | 84.7 | 100.0 | 78.5 | Gastric Cancer 9060397 | 46.7 | 22.7 | 28.5 |
| 01) | | | | | | | |
| Kidney Margin (OD04450- | 19.9 | 12.0 | 6.9 | Stomach Margin | 4.7 | 0.7 | 0.0 |
| 03) | | | | 9060396 | | | |
| Kidney Cancer 8120607 | 12.7 | 4.9 | 4.2 | Gastric Cancer 064005 | 5.6 | 9.2 | 6.5 |

[1308] TABLE AIF
Panel 4D
Column A - Rel. Exp.(%) Ag1479, Run 162599612
Column B - Rel. Exp.(%) Ag2674, Run 160645450
Column C - Rel. Exp.(%) Ag2820, Run 162350531
Column D - Rel. Exp.(%) Ag2820, Run 164329602

| Tissue Name | A | B | C | D |
|---|---|---|---|---|
| Secondary Th1 act | 0.3 | 0.0 | 0.0 | 0.0 |
| Secondary Th2 act | 0.0 | 0.0 | 0.0 | 0.5 |
| Secondary Tr1 act | 0.0 | 0.0 | 0.0 | 0.3 |
| Secondary Th1 rest | 0.0 | 0.0 | 0.0 | 0.0 |
| Secondary Th2 rest | 0.0 | 0.0 | 0.0 | 0.0 |
| Secondary Tr1 rest | 0.0 | 0.0 | 0.0 | 0.0 |
| Primary Th1 act | 0.0 | 0.0 | 0.0 | 0.0 |
| Primary Th2 act | 0.0 | 0.0 | 0.0 | 0.0 |
| Primary Tr1 act | 0.0 | 0.0 | 0.0 | 0.0 |
| Primary Th1 act | 0.0 | 0.5 | 0.0 | 0.0 |
| Primary Th2 act | 0.0 | 0.0 | 0.0 | 0.0 |
| Primary Tr1 act | 0.0 | 0.0 | 0.0 | 0.0 |
| CD45RA GD4 lymphocyte act | 1.8 | 1.0 | 1.6 | 0.8 |
| CD45RO CD4 lymphocyte act | 0.0 | 0.0 | 0.0 | 0.0 |
| CD8 lymphocyte act | 0.0 | 0.0 | 0.0 | 0.0 |
| Secondary CD8 lymphocyte rest | 0.0 | 0.0 | 0.0 | 0.0 |
| Secondary CD8 lymphocyte act | 0.0 | 0.0 | 0.0 | 0.0 |
| CD4 lymphocyte none | 0.0 | 0.0 | 0.0 | 0.0 |
| 2ry Th1/Th2/Tr1 anti-CD95 CH11 | 0.0 | 0.0 | 0.0 | 0.0 |
| LAK cells rest | 0.0 | 0.0 | 0.0 | 0.0 |
| LAK cells IL-2 | 0.0 | 0.0 | 0.3 | 0.0 |
| LAX cells IL-2 + IL-12 | 0.0 | 0.0 | 0.0 | 0.7 |
| LAK cells IL-2 + IFN gamma | 0.0 | 0.0 | 0.0 | 0.0 |
| LAK cells IL-2 + IL-18 | 0.0 | 0.0 | 0.0 | 0.0 |
| LAK cells PMA/ionomycin | 0.0 | 0.0 | 0.0 | 0.5 |
| NK Cells IL-2 rest | 0.0 | 0.0 | 0.0 | 0.0 |
| Two Way MLR 3 day | 0.0 | 0.0 | 0.0 | 0.0 |
| Two Way MLR 5 day | 0.0 | 0.0 | 0.0 | 0.0 |
| Two Way MLR 7 day | 0.0 | 0.0 | 0.0 | 0.0 |
| PBMC rest | 0.0 | 0.0 | 0.0 | 0.0 |
| PBMC PWM | 0.0 | 0.0 | 0.0 | 0.0 |
| PBMC PHA-L | 0.0 | 0.0 | 0.0 | 0.0 |
| Ramos (B cell) none | 0.0 | 0.0 | 0.0 | 0.0 |
| Ramos (B cell) ionomycin | 0.0 | 0.0 | 0.0 | 0.0 |
| B lymphocytes PWM | 0.0 | 0.0 | 0.3 | 2.5 |
| B lymphocytes CD40L and IL-4 | 0.2 | 0.4 | 0.0 | 0.0 |
| EOL-1 dbcAMP | 0.2 | 0.2 | 0.3 | 0.7 |
| EOL-1 dbcAMP PMA/ionomycin | 0.1 | 0.2 | 0.9 | 0.0 |
| Dendritic cells none | 0.0 | 0.0 | 0.0 | 0.0 |
| Dendritic cells LPS | 0.0 | 0.0 | 0.0 | 0.0 |
| Dendritic cells anti-CD40 | 0.0 | 0.0 | 0.0 | 0.0 |
| Monocytes rest | 0.0 | 0.0 | 0.0 | 0.0 |
| Monocytes LPS | 0.0 | 0.0 | 0.0 | 0.0 |
| Macrophages rest | 0.0 | 0.0 | 0.0 | 0.0 |
| Macrophages LPS | 0.0 | 0.0 | 0.0 | 0.0 |
| HUVEC none | 23.0 | 17.7 | 0.0 | 0.0 |
| HUVEC starved | 25.0 | 26.1 | 0.0 | 0.0 |
| HUVEC IL-1beta | 8.1 | 7.1 | 0.0 | 0.0 |
| HUVEC IFN gamma | 14.8 | 13.8 | 0.0 | 0.3 |
| HUVEC TNF alpha + IFN gamma | 8.5 | 6.7 | 0.0 | 0.0 |
| HUVEC TNF alpha + IL4 | 12.0 | 10.2 | 0.0 | 0.0 |
| HUVEC IL-11 | 8.5 | 7.0 | 0.0 | 0.0 |
| Lung Microvascular EC none | 11.1 | 14.2 | 0.0 | 0.0 |
| Lung Microvascular EC TNFalpha + | 9.3 | 11.0 | 0.0 | 0.2 |
| IL-1beta | | | | |
| Microvascular Dermal EC none | 100.0 | 75.3 | 0.0 | 0.0 |
| Microsvasular Dermal EC TNFalpha + | 29.7 | 26.8 | 0.0 | 0.0 |
| IL-1beta | | | | |
| Bronchial epithelium TNFalpha + IL-1beta | 0.2 | 1.3 | 2.4 | 19.9 |
| Small airway epithelium none | 2.2 | 1.1 | 1.0 | 1.7 |
| Small airway epithelium TNFalpha + | 0.3 | 0.2 | 0.0 | 0.0 |
| IL-1beta | | | | |
| Coronery artery SMC rest | 8.3 | 8.0 | 1.9 | 2.6 |
| Coronery artery SMC TNFalpha + IL-1beta | 4.6 | 3.1 | 3.0 | 1.2 |
| Astrocytes rest | 85.9 | 70.2 | 100.0 | 100.0 |
| Astrocytes TNFalpha + IL-1beta | 59.0 | 100.0 | 71.7 | 65.5 |
| KU-812 (Basophil) rest | 0.0 | 0.3 | 0.0 | 0.0 |
| KU-812 (Basophil) PMA/ionomycin | 0.0 | 0.0 | 0.0 | 0.0 |
| CCD1106 (Keratinocytes) none | 19.8 | 17.2 | 35.6 | 70.2 |
| CCD1106 (Keratinocytes) TNFalpha + | 1.7 | 1.3 | 13.4 | 29.3 |
| IL-1beta | | | | |
| Liver cirrhosis | 0.0 | 0.5 | 0.3 | 0.0 |
| Lupus kidney | 1.8 | 2.9 | 6.2 | 8.1 |
| NCI-H292 none | 0.0 | 0.0 | 0.0 | 0.0 |
| NCI-H292 IL-4 | 0.0 | 0.0 | 0.3 | 0.4 |
| NCI-H292 IL-9 | 0.0 | 0.0 | 0.0 | 0.0 |
| NCI-H292 IL-13 | 0.0 | 0.0 | 0.0 | 0.0 |
| NCI-H292 IFN gamma | 0.0 | 0.0 | 0.0 | 0.0 |
| HPAEC none | 15.1 | 12.2 | 0.0 | 0.0 |
| HPAEC TNF alpha + IL-1 beta | 6.2 | 7.5 | 0.6 | 0.0 |
| Lung fibroblast none | 0.9 | 0.4 | 0.0 | 0.4 |
| Lung fibroblast TNF alpha + IL-1 beta | 0.6 | 0.0 | 0.0 | 0.0 |
| Lung fibroblast IL-4 | 2.1 | 2.9 | 1.7 | 3.7 |
| Lung fibroblast IL-9 | 1.2 | 0.5 | 1.2 | 2.0 |
| Lung fibroblast IL-13 | 1.2 | 0.9 | 1.6 | 3.3 |
| Lung fibroblast IFN gamma | 2.1 | 1.9 | 2.3 | 0.2 |
| Dermal fibroblast CCD1070 rest | 10.5 | 9.8 | 10.3 | 8.4 |
| Dermal fibroblast CCD1070 TNF alpha | 11.6 | 4.6 | 10.0 | 11.3 |
| Dermal fibroblast CCD1070 IL-1 beta | 4.9 | 2.2 | 4.5 | 3.8 |
| Dermal fibroblast IFN gamma | 1.2 | 1.7 | 0.3 | 1.6 |
| Dermal fibroblast IL-4 | 28.3 | 27.9 | 12.1 | 13.4 |
| IBD Colitis 2 | 0.7 | 1.6 | 0.3 | 0.0 |
| IBD Crohn's | 1.6 | 0.4 | 0.8 | 3.7 |
| Colon | 8.6 | 7.6 | 1.7 | 1.9 |
| Lung | 2.0 | 2.9 | 3.8 | 6.3 |
| Thymus | 7.0 | 13.7 | 4.1 | 4.4 |
| Kidney | 17.0 | 27.5 | 13.0 | 20.2 |

[1309] This gene codes for TenM3 protein. Ten-M proteins have been shown to be involved in cell migration. This gene was upregulated in a variety of cancers. It was highly expressed in glioma, astrocytoma, lung, renal, ovarian and breast cancer cell lines. It was also expressed at high levels in primary lung, kidney, bladder, ovarian, gastric, melanoma and breast cancer tissues. This EGF repeat domain (CG55069-04 and CG55069-09 variants) of Ten-M3 is known to be involved in dimerization of the full length protein in vivo. Treatment of cells expressing Ten-M3 with this purified protein fragment will interfere with the normal function of endogenous Ten-M3 and inhibit cell migration.

[1310] Panel 1.3D Summary: Ag1479/2674/Ag2820 Highest expression of this gene was seen in the brain and in brain cancer cell lines (CTs=28-31). Thus, inhibitors of this gene or gene product is useful for the treatment of diseases involving neurite outgrowth or organization, such as neurodegenerative diseases.

[1311] There was substantial expression in other samples derived from cancer cell lines, such as breast cancer, lung cancer ovarian cancer. Thus, therapeutic modulation of this gene, encoded protein and/or use of antibodies or small molecule targeting this gene or gene product is useful in the treatment of brain cancer, lung cancer, or ovarian cancer.

[1312] This gene was also moderately expressed in metabolic tissues including adrenal, thyroid, pituitary, fetal heart, adult and fetal skeletal muscle, and adipose. Thus, this geen product may be an antibody target for the treatment of any or all diseases in these tissues, including obesity and diabetes.

[1313] Panel 2D Summary: Ag2674/2820 The highest expression of this gene is generally associated with kidney cancers. Of particular note is the consistent absence of expression in normal kidney tissue adjacent to malignant kidney. In addition, there is substantial expression associated with ovarian cancer, bladder cancer and lung cancer. Thus, the expression of this gene could be used to distinguish the above listed malignant tissue from other tissues in the panel. Particularly, the expression of this gene could be used to distinguish malignant kidney tissue from normal kidney. Moreover, therapeutic modulation of this gene, through the use of small molecule drugs, antibodies or protein therapeutics might be of benefit in the treatment of kidney cancer, ovarian cancer, bladder cancer or lung cancer.

[1314] Panel 4D Summary: Ag1479/Ag2674/Ag2820 The expression of this gene was highest in astrocytes and microvascular dermal endothelial cells (CTs=29-30), with low but significant expression in keratinocytes, and dermal fibroblasts. Expression was not modulated by any treatment, indicating that this protein is important in normal homeostasis. Therefore, modulation of this gene, expressed protein and/or use of antibodies or small molecule targeting this gene or gene product is useful in the treatmen of autoimmune and inflammatory diseases such as asthma, IBD, psoriasis, multiple sclerosis or other inflammatory diseases of the CNS.

[1315] AJ. CG55343-03: Olfactory Receptor.

[1316] Expression of gene CG55343-03 was assessed using the primer-probe sets Ag1592 and Ag457, described in Tables AJA and AJB. Results of the RTQ-PCR runs are shown in Tables AJC, AJD, AJE and AJF. CG55343-03 represents the full-length physical clone.

TABLE AJA
Probe Name Ag1592

| | | | Start | SEQ ID |
|---|---|---|---|---|
| Primers | Sequences | Length | Position | No |
| Forward | 5′-aggaccaaggaaagatggttt-3′ | 21 | 804 | 1322 |
| Probe | TET-5′-tgcacccatgctgaatccccttatat-3′- | 26 | 844 | 1323 |
| | TAMRA | | | |
| Reverse | 5′-aagccttcctttacctccttgt-3′ | 22 | 882 | 1324 |

[1317] TABLE AJB
Probe Name Ag457

| | | | Start | SEQ ID |
|---|---|---|---|---|
| Primers | Sequences | Length | Position | No |
| Forward | 5′-gccgtctctgtgtacctgca-3′ | 20 | 764 | 1325 |
| Probe | TET-5′-ttcgcccagctccaaggaccaa-3′- | 22 | 790 | 1326 |
| | TAMRA | | | |
| Reverse | 5′-ttccatagaagagagaaaccatctttc-3′ | 27 | 813 | 1327 |

[1318] TABLE AJC
Panel 1.3D
Column A - Rel. Exp. (%) Ag1592, Run 152066536
Column B - Rel. Exp. (%) Ag457, Run 146581824
Column C - Rel. Exp. (%) Ag457, Run 151104452

| Tissue Name | A | B | C | Tissue Name | A | B | C |
|---|---|---|---|---|---|---|---|
| Liver adenocarcinoma | 0.0 | 0.8 | 0.0 | Kidney (fetal) | 1.3 | 0.0 | 2.1 |
| Pancreas | 0.0 | 0.0 | 4.0 | Renal ca. 786-0 | 0.0 | 0.0 | 0.0 |
| Pancreatic ca. CAPAN 2 | 0.0 | 1.3 | 2.1 | Renal ca. A498 | 8.5 | 9.5 | 10.6 |
| Adrenal gland | 3.5 | 1.4 | 0.0 | Renal ca. RXF 393 | 0.0 | 0.0 | 0.0 |
| Thyroid | 0.0 | 0.0 | 0.9 | Renal ca. ACHN | 0.0 | 0.6 | 0.0 |
| Salivary gland | 0.0 | 0.0 | 2.3 | Renal ca. UO-31 | 0.0 | 0.0 | 0.0 |
| Pituitary gland | 0.0 | 0.0 | 0.0 | Renal ca. TK-10 | 1.7 | 1.6 | 0.9 |
| Brain (fetal) | 0.0 | 0.0 | 0.0 | Liver | 2.5 | 2.0 | 1.8 |
| Brain (whole) | 0.0 | 1.5 | 0.0 | Liver (fetal) | 6.3 | 5.7 | 12.7 |
| Brain (amygdala) | 1.4 | 1.5 | 0.0 | Liver ca. (hepatoblast) | 9.5 | 5.3 | 6.1 |
| | | | | HepG2 | | | |
| Brain (cerebellum) | 1.8 | 0.0 | 2.0 | Lung | 1.5 | 0.7 | 1.9 |
| Brain (hippocampus) | 1.2 | 0.0 | 0.0 | Lung (fetal) | 2.3 | 4.0 | 5.6 |
| Brain (substantia nigra) | 1.2 | 0.0 | 2.5 | Lung ca. (small cell) LX- | 3.4 | 2.9 | 4.0 |
| | | | | 1 | | | |
| Brain (thalamus) | 0.0 | 0.0 | 0.0 | Lung ca. (small cell) NCI- | 10.8 | 15.6 | 14.4 |
| | | | | H69 | | | |
| Cerebral Cortex | 0.0 | 1.5 | 2.1 | Lung ca. (s. cell var.) | 21.2 | 33.9 | 21.3 |
| | | | | SHP-77 | | | |
| Spinal cord | 0.0 | 0.0 | 0.0 | Lung ca. (large cell) NCI- | 5.2 | 2.0 | 2.6 |
| | | | | H460 | | | |
| glio/astro U87-MG | 4.5 | 1.5 | 1.4 | Lung ca. (non-sm. cell) | 0.0 | 3.6 | 4.5 |
| | | | | A549 | | | |
| glio/astro U-118-MG | 18.9 | 11.4 | 20.2 | Lung ca. (non-s. cell) | 18.3 | 7.6 | 14.6 |
| | | | | NCI-H23 | | | |
| astrocytoma SW1783 | 5.3 | 2.0 | 3.0 | Lung ca. (non-s. cell) | 0.0 | 0.0 | 0.0 |
| | | | | HOP-62 | | | |
| neuro*; met SK-N-AS | 7.1 | 4.5 | 14.1 | Lung ca. (non-s. cl) NCI- | 18.0 | 7.0 | 17.3 |
| | | | | H522 | | | |
| astrocytoma SF-539 | 2.6 | 0.7 | 2.9 | Lung ca. (squam.) SW | 0.0 | 1.5 | 1.5 |
| | | | | 900 | | | |
| astrocytoma SNB-75 | 9.5 | 22.7 | 17.4 | Lung ca. (squam.) NCI- | 14.0 | 17.4 | 26.2 |
| | | | | H596 | | | |
| glioma SNB-19 | 0.0 | 1.8 | 0.0 | Mammary gland | 1.6 | 0.0 | 0.0 |
| glioma U251 | 0.0 | 1.3 | 0.0 | Breast ca.* (pl. ef) MCF-7 | 100.0 | 100.0 | 100.0 |
| glioma SF-295 | 4.6 | 1.2 | 4.5 | Breast ca.* (pl. ef) MDA- | 21.0 | 24.5 | 19.8 |
| | | | | MB-231 | | | |
| Heart (Fetal) | 5.6 | 0.4 | 3.1 | Breast ca.* (pl. ef) T47D | 5.9 | 2.1 | 1.7 |
| Heart | 0.0 | 0.0 | 1.2 | Breast ca. BT-549 | 13.8 | 22.8 | 16.0 |
| Skeletal muscle (Fetal) | 4.1 | 5.0 | 6.2 | Breast ca. MDA-N | 3.5 | 3.3 | 7.7 |
| Skeletal muscle | 0.0 | 0.0 | 0.9 | Ovary | 4.1 | 0.0 | 1.0 |
| Bone marrow | 8.5 | 3.7 | 2.2 | Ovarian ca. OVCAR-3 | 8.7 | 10.5 | 5.3 |
| Thymus | 3.1 | 5.3 | 0.8 | Ovarian ca. OVCAR-4 | 0.0 | 0.0 | 0.0 |
| Spleen | 1.6 | 0.7 | 1.1 | Ovarian ca. OVCAR-5 | 11.7 | 6.3 | 4.9 |
| Lymph node | 1.1 | 1.4 | 2.3 | Ovarian ca. OVCAR-8 | 1.5 | 2.2 | 2.9 |
| Colorectal | 4.0 | 0.4 | 5.5 | Ovarian ca. IGROV-1 | 1.8 | 0.0 | 0.9 |
| Stomach | 1.4 | 1.4 | 6.5 | Ovarian ca. (ascites) SK- | 1.2 | 1.3 | 0.8 |
| | | | | OV-3 | | | |
| Small intestine | 0.0 | 0.0 | 1.7 | Uterus | 0.0 | 1.4 | 3.3 |
| Colon ca. SW480 | 27.0 | 34.2 | 34.6 | Placenta | 11.1 | 9.5 | 11.4 |
| Colon ca.* SW620 (SW480 | 2.5 | 6.1 | 11.8 | Prostate | 0.0 | 0.0 | 0.9 |
| met) | | | | | | | |
| Colon ca. HT29 | 4.1 | 1.6 | 2.1 | Prostate ca.* (bone met) | 6.5 | 5.8 | 7.2 |
| | | | | PC-3 | | | |
| Colon ca. HCT-116 | 2.8 | 0.7 | 0.0 | Testis | 1.2 | 2.1 | 1.3 |
| Colon ca. CaCo-2 | 4.6 | 6.2 | 6.3 | Melanoma Hs688(A).T | 0.0 | 0.0 | 1.3 |
| CC Well to Mod Diff | 2.4 | 0.8 | 0.0 | Melanoma* (met) | 1.8 | 0.0 | 2.2 |
| (ODO3866) | | | | Hs688(B).T | | | |
| Colon ca. HCC-2998 | 4.9 | 5.9 | 1.6 | Melanoma UACC-62 | 0.0 | 0.0 | 0.0 |
| Gastric ca. (liver met) NCI- | 42.0 | 86.5 | 65.1 | Melanoma M14 | 1.6 | 0.0 | 2.0 |
| N87 | | | | | | | |
| Bladder | 3.2 | 1.4 | 3.2 | Melanoma LOX IMVI | 0.0 | 2.6 | 2.6 |
| Trachea | 0.0 | 0.0 | 0.0 | Melanoma* (met) SK- | 0.0 | 0.0 | 0.0 |
| | | | | MEL-5 | | | |
| Kidney | 1.5 | 0.0 | 0.0 | Adipose | 0.0 | 0.0 | 0.0 |

[1319] TABLE AID
Panel 2D
Column A - Rel. Exp.(%) Ag1592, Run 152066737
Column B - Rel. Exp.(%) Ag457, Run 146087098
Column C - Rel. Exp.(%) Ag457, Run 146581925
Column D - Rel. Exp.(%) Ag457, Run 158141680

| Tissue Name | A | B | C | D |
|---|---|---|---|---|
| Normal Colon | 0.0 | 1.6 | 0.8 | 3.6 |
| CC Well to Mod Diff (ODO3866) | 1.3 | 0.5 | 0.6 | 0.0 |
| CC Margin (OD03866) | 0.0 | 2.4 | 2.0 | 2.5 |
| CC Gr.2 rectosigmoid (ODO3868) | 1.3 | 4.3 | 2.3 | 0.8 |
| CC Margin (ODO3868) | 0.9 | 0.0 | 0.7 | 1.1 |
| CC Mod Diff(ODO3920) | 4.3 | 6.3 | 6.7 | 4.0 |
| CC Margin (ODO3920) | 0.9 | 2.7 | 0.5 | 1.0 |
| CC Gr.2 ascend colon (ODO3921) | 2.7 | 1.6 | 1.7 | 0.0 |
| CC Margin (ODO3921) | 2.1 | 0.4 | 1.5 | 1.3 |
| CC from Partial Hepatectomy (ODO4309) | 3.5 | 1.8 | 1.5 | 0.6 |
| Mets | | | | |
| Liver Margin (ODO4309) | 2.0 | 0.8 | 0.8 | 2.1 |
| Colon mets to lung (OD04451-01) | 4.1 | 0.0 | 0.4 | 0.6 |
| Lung Margin (OD04451-02) | 0.0 | 0.0 | 0.7 | 0.0 |
| Normal Prostate 6546-1 | 2.2 | 3.4 | 3.1 | 1.4 |
| Prostate Cancer (OD04410) | 14.5 | 12.4 | 16.2 | 7.3 |
| Prostate Margin (OD04410) | 9.0 | 4.7 | 6.4 | 5.9 |
| Prostate Cancer (OD04720-01) | 0.0 | 0.1 | 0.4 | 1.1 |
| Prostate Margin (OD04720-02) | 0.0 | 1.0 | 0.9 | 2.9 |
| Normal Lung | 2.2 | 1.2 | 2.5 | 1.7 |
| Lung Met to Muscle (OD04286) | 3.5 | 4.2 | 3.4 | 4.2 |
| Muscle Margin (OD04286) | 0.9 | 0.0 | 0.5 | 0.0 |
| Lung Malignant Cancer (OD03126) | 0.0 | 1.5 | 1.4 | 1.7 |
| Lung Margin (OD03 126) | 0.0 | 0.9 | 2.6 | 1.5 |
| Lung Cancer (OD04404) | 6.0 | 4.1 | 3.5 | 6.8 |
| Lung Margin (OD04404) | 0.0 | 1.3 | 0.0 | 0.9 |
| Lung Cancer (OD04565) | 1.1 | 0.6 | 0.9 | 0.0 |
| Lung Margin (OD04565) | 0.0 | 1.2 | 0.4 | 0.7 |
| Lung Cancer (OD04237-01) | 17.9 | 15.9 | 14.0 | 15.7 |
| Lung Margin (OD04237-02) | 0.9 | 0.0 | 1.4 | 0.8 |
| Ocular Mel Met to Liver (ODO4310) | 0.0 | 0.3 | 0.0 | 0.0 |
| Liver Margin (ODO4310) | 0.0 | 0.7 | 1.6 | 2.9 |
| Melanoma Metastasis | 9.7 | 10.1 | 9.7 | 8.2 |
| Lung Margin (OD04321) | 0.0 | 2.3 | 1.0 | 0.0 |
| Normal Kidney | 1.6 | 0.6 | 0.7 | 0.0 |
| Kidney Ca, Nuclear grade 2 (OD04338) | 0.8 | 0.0 | 0.4 | 0.7 |
| Kidney Margin (OD04338) | 1.4 | 0.0 | 0.0 | 0.0 |
| Kidney Ca Nuclear grade 1/2 (OD04339) | 0.0 | 0.6 | 0.0 | 1.4 |
| Kidney Margin (OD04339) | 0.0 | 0.0 | 0.7 | 0.0 |
| Kidney Ca, Clear cell type (OD04340) | 3.0 | 1.8 | 3.0 | 0.9 |
| Kidney Margin (OD04340) | 0.0 | 0.9 | 0.4 | 0.0 |
| Kidney Ca, Nuclear grade 3 (OD04348) | 0.0 | 3.1 | 2.2 | 1.3 |
| Kidney Margin (OD04348) | 0.0 | 2.4 | 0.0 | 0.0 |
| Kidney Cancer (OD04622-01) | 0.0 | 0.9 | 0.8 | 1.6 |
| Kidney Margin (OD04622-03) | 0.0 | 0.8 | 0.0 | 0.0 |
| Kidney Cancer (OD04450-0l) | 0.0 | 0.7 | 0.0 | 2.7 |
| Kidney Margin (OD04450-03) | 0.9 | 0.9 | 0.8 | 0.6 |
| Kidney Cancer 8120607 | 0.0 | 0.0 | 0.4 | 0.0 |
| Kidney Margin 8120608 | 0.0 | 0.5 | 0.3 | 0.8 |
| Kidney Cancer 8120613 | 1.1 | 0.0 | 0.0 | 0.6 |
| Kidney Margin 8120614 | 0.0 | 0.0 | 0.0 | 0.0 |
| Kidney Cancer 9010320 | 0.0 | 0.4 | 1.3 | 0.0 |
| Kidney Margin 9010321 | 0.0 | 0.8 | 0.0 | 0.0 |
| Normal Uterus | 0.0 | 0.0 | 0.0 | 0.0 |
| Uterine Cancer 064011 | 0.8 | 1.2 | 2.8 | 1.6 |
| Normal Thyroid | 0.0 | 0.4 | 2.6 | 0.0 |
| Thyroid Cancer | 1.1 | 0.0 | 1.5 | 0.0 |
| Thyroid Cancer A302152 | 2.0 | 3.2 | 2.2 | 1.9 |
| Thyroid Margin A302153 | 0.8 | 0.0 | 0.7 | 0.0 |
| Normal Breast | 0.0 | 0.2 | 0.4 | 1.5 |
| Breast Cancer | 4.6 | 8.4 | 9.9 | 15.3 |
| Breast Cancer (OD04590-01) | 87.1 | 100.0 | 87.2 | 59.9 |
| Breast Cancer Mets (OD04590-03) | 36.3 | 38.7 | 55.9 | 14.8 |
| Breast Cancer Metastasis | 17.3 | 17.6 | 22.4 | 8.1 |
| Breast Cancer | 6.3 | 5.4 | 3.4 | 4.3 |
| Breast Cancer | 17.3 | 20.6 | 20.9 | 18.7 |
| Breast Cancer 9100266 | 3.8 | 5.4 | 2.7 | 3.7 |
| Breast Margin 9100265 | 3.0 | 0.8 | 0.4 | 2.5 |
| Breast Cancer A209073 | 2.2 | 2.7 | 1.3 | 0.0 |
| Breast Margin A209073 | 0.7 | 0.0 | 1.7 | 0.9 |
| Normal Liver | 1.8 | 0.5 | 0.9 | 0.0 |
| Liver Cancer | 2.0 | 0.4 | 0.8 | 0.0 |
| Liver Cancer 1025 | 1.1 | 0.7 | 0.6 | 0.0 |
| Liver Cancer 1026 | 0.0 | 0.9 | 0.0 | 0.0 |
| Liver Cancer 6004-T | 1.3 | 0.0 | 0.0 | 0.9 |
| Liver Tissue 6004-N | 3.6 | 0.8 | 1.4 | 1.1 |
| Liver Cancer 6005-T | 0.0 | 0.6 | 2.4 | 0.0 |
| Liver Tissue 6005-N | 2.3 | 0.4 | 1.2 | 1.8 |
| Normal Bladder | 7.9 | 7.1 | 3.4 | 2.0 |
| Bladder Cancer | 0.0 | 0.0 | 0.0 | 1.0 |
| Bladder Cancer | 4.2 | 4.2 | 1.8 | 11.9 |
| Bladder Cancer (OD04718-01) | 97.3 | 62.0 | 100.0 | 100.0 |
| Bladder Normal Adjacent (OD04718-03) | 0.0 | 0.9 | 0.4 | 0.0 |
| Normal Ovary | 1.1 | 0.0 | 0.0 | 0.8 |
| Ovarian Cancer | 3.4 | 1.8 | 1.1 | 3.7 |
| Ovarian Cancer (OD04768-07) | 100.0 | 76.3 | 89.5 | 85.3 |
| Ovary Margin (OD04768-08) | 1.4 | 0.0 | 0.0 | 0.0 |
| Normal Stomach | 1.1 | 0.6 | 1.4 | 0.0 |
| Gastric Cancer 9060358 | 0.0 | 0.3 | 0.0 | 0.9 |
| Stomach Margin 9060359 | 2.4 | 0.5 | 0.8 | 0.0 |
| Gastric Cancer 9060395 | 1.9 | 2.4 | 1.8 | 2.1 |
| Stomach Margin 9060394 | 2.1 | 1.9 | 0.0 | 1.7 |
| Gastric Cancer 9060397 | 10.9 | 11.7 | 10.0 | 8.7 |
| Stomach Margin 9060396 | 0.0 | 1.0 | 0.5 | 1.2 |
| Gastric Cancer 064005 | 4.9 | 0.6 | 5.6 | 2.8 |

[1320] TABLE AJE
Panel 4D
Column A - Rel. Exp. (%) Ag1592, Run 152066880
Column B - Rel. Exp. (%) Ag457, Run 151104533

| Tissue Name | A | B | Tissue Name | A | B |
|---|---|---|---|---|---|
| Secondary Th1 act | 29.9 | 8.7 | HUVEC IL-1beta | 0.0 | 3.1 |
| Secondary Th2 act | 4.7 | 3.8 | HUVEC IFN gamma | 10.2 | 7.2 |
| Secondary Tr1 act | 15.3 | 4.8 | HUVEC TNFalpha + IFN gamma | 0.0 | 0.0 |
| Secondary Th1 rest | 12.2 | 16.2 | HUVEC TNFalpha + IL4 | 0.0 | 6.8 |
| Secondary Th2 rest | 0.0 | 5.4 | HUVEC IL-11 | 0.0 | 2.0 |
| Secondary Tr1 rest | 8.3 | 0.0 | Lung Microvascular EC none | 0.0 | 12.9 |
| Primary Th1 act | 0.0 | 9.2 | Lung Microvascular EC TNFalpha + | 0.0 | 0.0 |
| | | | IL-1beta | | |
| Primary Th2 act | 4.4 | 7.5 | Microvascular Dermal EC none | 5.0 | 6.4 |
| Primary Tr1 act | 0.0 | 3.7 | Microsvasular Dermal EC TNFalpha + | 0.0 | 4.2 |
| | | | IL-1beta | | |
| Primary Th1 rest | 18.2 | 7.8 | Bronchial epithelium TNFalpha + | 0.0 | 7.9 |
| | | | IL1beta | | |
| Primary Th2 rest | 15.4 | 3.6 | Small airway epithelium none | 4.6 | 5.9 |
| Primary Tr1 rest | 2.9 | 0.0 | Small airway epithelium TNFalpha + | 5.1 | 0.0 |
| | | | IL-1beta | | |
| CD45RA CD4 lymphocyte | 0.0 | 0.0 | Coronery artery SMC rest | 0.0 | 4.1 |
| act | | | | | |
| CD45RO CD4 lymphocyte | 19.6 | 6.7 | Coronery artery SMC TNFalpha + | 0.0 | 3.5 |
| act | | | IL-1beta | | |
| CD8 lymphocyte act | 0.0 | 8.1 | Astrocytes rest | 0.0 | 7.8 |
| Secondary CD8 lymphocyte | 14.2 | 10.4 | Astrocytes TNFalpha + IL-1beta | 0.0 | 0.0 |
| rest | | | | | |
| Secondary CD8 lymphocyte | 0.0 | 3.8 | KU-812 (Basophil) rest | 3.7 | 23.2 |
| act | | | | | |
| CD4 lymphocyte none | 0.0 | 0.0 | KU-812 (Basophil) PMA/ionomycin | 100.0 | 83.5 |
| 2ry Th1/Th2/Tr1 anti-CD95 | 15.4 | 9.0 | CCD1106 (Keratinocytes) none | 0.0 | 7.0 |
| CH11 | | | | | |
| LAK cells rest | 5.1 | 0.0 | CCD1106 (Keratinocytes) TNFalpha + | 0.0 | 3.7 |
| | | | IL-1beta | | |
| LAK cells IL-2 | 5.1 | 6.8 | Liver cirrhosis | 17.1 | 44.8 |
| LAK cells IL-2 + IL-12 | 0.0 | 3.8 | Lupus kidney | 0.0 | 0.0 |
| LAK cells IL-2 + IFN | 16.6 | 0.0 | NCI-H292 none | 9.2 | 4.1 |
| gamma | | | | | |
| LAK cells IL-2 + IL-18 | 0.0 | 0.0 | NCI-H292 IL-4 | 10.4 | 4.3 |
| LAK cells PMA/ionomycin | 0.0 | 0.0 | NCI-H292 IL-9 | 23.5 | 4.1 |
| NK Cells IL-2 rest | 0.0 | 8.7 | NCI-H292 IL-13 | 0.0 | 0.0 |
| Two Way MLR 3 day | 0.0 | 2.7 | NCI-H292 IFN gamma | 6.6 | 37.6 |
| Two Way MLR 5 day | 10.9 | 3.6 | HPAEC none | 0.0 | 0.0 |
| Two Way MLR 7 day | 4.1 | 0.0 | HPAEC TNFalpha + IL-1 beta | 4.7 | 4.3 |
| PBMC rest | 5.1 | 9.6 | Lung fibroblast none | 5.5 | 6.3 |
| PBMC PWM | 12.0 | 36.1 | Lung fibroblast TNFalpha + IL-1 | 21.3 | 10.2 |
| | | | beta | | |
| PBMC PHA-L | 0.0 | 14.6 | Lung fibroblast IL-4 | 6.6 | 0.0 |
| Ramos (B cell) none | 0.0 | 10.3 | Lung fibroblast IL-9 | 0.0 | 4.3 |
| Ramos (B cell) ionomycin | 18.4 | 36.1 | Lung fibroblast IL-13 | 0.0 | 18.6 |
| B lymphocytes PWM | 31.4 | 59.0 | Lung fibroblast IFN gamma | 0.0 | 16.2 |
| B lymphocytes CD40L and | 27.7 | 12.1 | Dermal fibroblast CCD1070 rest | 18.3 | 11.7 |
| IL-4 | | | | | |
| EOL-1 dbcAMP | 7.6 | 4.5 | Dermal fibroblast CCD1O7O TNF | 19.5 | 9.8 |
| | | | alpha | | |
| EOL-1 dbcAMP | 0.0 | 0.0 | Dermal fibroblast CCD1070 IL-1 | 4.9 | 0.0 |
| PMA/ionomycin | | | beta | | |
| Dendritic cells none | 0.0 | 2.8 | Dermal fibroblast IFN gamma | 0.0 | 3.9 |
| Dendritic cells LPS | 3.5 | 4.5 | Dermal fibroblast IL-4 | 14.0 | 4.5 |
| Dendritic cells anti-CD40 | 0.0 | 3.0 | IBD Colitis 2 | 6.0 | 23.8 |
| Monocytes rest | 0.0 | 0.0 | IBD Crohn's | 0.0 | 0.0 |
| Monocytes LPS | 0.0 | 0.0 | Colon | 0.0 | 2.4 |
| Macrophages rest | 0.0 | 3.0 | Lung | 5.3 | 3.5 |
| Macrophages LPS | 1.8 | 11.7 | Thymus | 0.0 | 13.6 |
| HUVEC none | 4.2 | 0.0 | Kidney | 41.5 | 100.0 |
| HUVEC starved | 6.6 | 4.8 | | | |

[1321] TABLE AJF
general oncology screening panel_v_2.4
Column A - Rel. Exp.(%) Ag457, Run 259804332

| Tissue Name | A | Tissue Name | A |
|---|---|---|---|
| Colon cancer 1 | 1.1 | Bladder NAT 2 | 0.0 |
| CC Margin (ODO3921) | 0.0 | Bladder NAT 3 | 0.3 |
| Colon cancer 2 | 2.1 | Bladder NAT 4 | 0.0 |
| Colon NAT 2 | 0.0 | Prostate adenocarcinoma 1 | 1.0 |
| Colon cancer 3 | 2.1 | Prostate adenocarcinoma 2 | 0.0 |
| Colon NAT 3 | 0.0 | Prostate adenocarcinoma 3 | 0.8 |
| Colon malignant cancer 4 | 5.5 | Prostate adenocarcinoma 4 | 2.8 |
| Colon NAT 4 | 0.0 | Prostate NAT 5 | 0.6 |
| Lung cancer 1 | 0.0 | Prostate adenocarcinoma 6 | 2.6 |
| Lung NAT 1 | 0.0 | Prostate adenocarcinoma 7 | 2.5 |
| Lung cancer 2 | 100.0 | Prostate adenocarcinoma 8 | 1.2 |
| Lung NAT 2 | 0.4 | Prostate adenocarcinoma 9 | 1.6 |
| Squamous cell carcinoma 3 | 0.5 | Prostate NAT 10 | 0.8 |
| Lung NAT 3 | 0.0 | Kidney cancer 1 | 1.1 |
| Metastatic melanoma 1 | 0.0 | Kidney NAT 1 | 0.0 |
| Melanoma 2 | 0.6 | Kidney cancer 2 | 9.9 |
| Melanoma 3 | 0.0 | Kidney NAT 2 | 1.6 |
| Metastatic melanoma 4 | 0.6 | Kidney cancer 3 | 2.4 |
| Metastatic melanoma 5 | 1.0 | Kidney NAT 3 | 0.0 |
| Bladder cancer 1 | 0.0 | Kidney cancer 4 | 0.0 |
| Bladder NAT 1 | 0.0 | Kidney NAT 4 | 0.0 |
| Bladder cancer 2 | 0.3 | | |

[1322] Panel 1.3D Summary: Ag457/Ag1592 Expression of this gene, encoding a protein with homology to olfactory receptors, was highest in breast cancer cell line MCF-7 (CTs=32-32.8). In general, this gene was more highly expressed in cancer cell lines relative to normal tissues. Expression of this gene was significantly upregulated in 3/5 breast cancer cell lines, 2/6 ovarian cancer cell lines, and 7/10 lung cancer cell lines. Thus, expression of this gene is useful as a marker for breast, ovarian and lung cancers. Modulation of this gene, encoded protein and/or use of antibodies or small molecule drug targeting this gene or gene product is useful in the treatment of breast, ovarian and lung cancers.

[1323] Panel 2D Summary: Ag457/Ag1592 Expression of this gene was upregulated in 6/8 breast cancer samples. Expression of this gene was higher in one ovarian and one bladder cancer sample relative to the normal adjacent tissue. These results are consistent with what was observed on Panel 1.3D. Thus, expression of this gene is useful as a marker for these cancers. Modulation of this gene, encoded protein and/or use of antibodies or small molecule drug targeting this gene or gene product is useful in the treatment of breast, ovarian and bladder cancers.

[1324] Panel 4D Summary: Ag1592/Ag457 This gene showed preferential expression in activated basophils (CTs=33.9). Basophils release histamines and other biological modifiers in reponse to allergens and play an important role in the pathology of asthma and hypersensitivity reactions. These cells are a good model for the inflammatory cells that take part in various inflammatory lung and bowel diseases, such as asthma, Crohn's disease, and ulcerative colitis. Modulation of this gene, encoded protein and/or use of antibodies or small molecule drug targeting this gene or gene product is useful to reduce or eliminate the symptoms of patients suffering from asthma, Crohn's disease, and ulcerative colitis.

[1325] general oncology screening panel_v_{—}2.4 Summary: Ag457 Moderate levels of expression of this gene was detected in a lung cancer sample (CT=30.8). Low but significant expression of this gene was also seen in a kidney cancer sample. Modulation of this gene, encoded protein and/or use of antibodies or small molecule drug targeting this gene or gene product is useful in the treatment of lung and kidney cancers.

[1326] AK. CG55358-03, CG55358-04: Olfactory Receptor.

[1327] Expression of gene CG55358-03 and CG55358-04 were assessed using the primer-probe sets Ag1593, Ag455b and Ag455, described in Tables AKA, AKB and AKC. Results of the RTQ-PCR runs are shown in Tables AKD, AKE, AKF, AKG and AKH. CG55358-03 and CG55358-04 represent full-length physical clones.

TABLE AKA
Probe Name Ag1593

| | | | Start | SEQ ID |
|---|---|---|---|---|
| Primers | Sequences | Length | Position | No |
| Forward | 5′-cctagagctgatcgtctttgtg-3′ | 22 | 53 | 1328 |
| Probe | TET-5′-tcatcttttatctgctgactcttcttgg | 30 | 82 | 1329 |
| | ca-3′-TAMRA | | | |
| Reverse | 5′-gaaagcaagacaatggtcatgt-3′ | 22 | 112 | 1330 |

[1328] TABLE AKB
Probe Name Ag455b

| | | | Start | SEQ ID |
|---|---|---|---|---|
| Primers | Sequences | Length | Position | No |
| Forward | 5′-cctggctgtcatggcatatg-3′ | 20 | 329 | 1331 |
| Probe | TET-5′-tgctgcagtctgcaaacccctgc-3′- | 23 | 356 | 1332 |
| | TAMRA | | | |
| Reverse | 5′-gacgtgggtgcatgatgatg-3′ | 20 | 386 | 1333 |

[1329] TABLE AKC
Probe Name Ag455

| | | | Start | SEQ ID |
|---|---|---|---|---|
| Primers | Sequences | Length | Position | No |
| Forward | 5′-cctggctgtcatggcatatg-3′ | 20 | 329 | 1334 |
| Probe | TET-5′-ctatgctgcagtctgcaaacccctgc-3′- | 26 | 353 | 1335 |
| | TAMRA | | | |
| Reverse | 5′-gacgtgggtgcatgatgatg-3′ | 20 | 386 | 1336 |

[1330] TABLE AKD
Ardais Breast 1.0
Column A - Rel. Exp. (%) Ag1593, Run 399643616
Column B - Rel. Exp. (%) Ag455b, Run 399643480

| Tissue Name | A | B | Tissue Name | A | B |
|---|---|---|---|---|---|
| 111297 Breast cancer metastasis | 1.2 | 1.2 | 153636 Breast cancer | 0.8 | 1.2 |
| (9369)* | | | (D3D) | | |
| 108830 Breast cancer metastasis | 2.0 | 3.1 | 164668 Breast cancer | 12.5 | 14.4 |
| (OD06855)* | | | (6314) | | |
| 97764 Breast cancer node metastasis | 0.0 | 0.1 | 164677 Breast cancer | 0.6 | 0.6 |
| (OD06083) | | | (5272) | | |
| 97739 Breast cancer (CHTN20676) | 1.5 | 1.8 | 164685 Breast cancer | 0.0 | 0.4 |
| | | | (0170) | | |
| 145848 Breast cancer (9B6) | 100.0 | 100.0 | 98857 Breast cancer | 5.8 | 7.3 |
| | | | (OD06397-12) | | |
| 145849 Breast cancer (9EC) | 1.3 | 1.5 | 153628 Breast cancer | 0.5 | 0.3 |
| | | | (D35) | | |
| 153632 Breast cancer (D39) | 14.8 | 20.9 | 153637 Breast cancer | 1.6 | 1.2 |
| | | | (D3E) | | |
| 153643 Breast cancer (D44) | 0.3 | 0.1 | 164669 Breast cancer | 3.0 | 3.1 |
| | | | (6992) | | |
| 164672 Breast cancer (7464) | 12.8 | 17.6 | 164678 Breast cancer | 2.9 | 36.3 |
| | | | (5297) | | |
| 164681 Breast cancer (5787) | 1.5 | 2.1 | 164686 Breast cancer | 9.8 | 10.6 |
| | | | (0732) | | |
| 97748 Breast cancer (CHTN20931) | 0.3 | 0.1 | 145857 Breast cancer (9F0) | 1.3 | 1.3 |
| 145850 Breast cancer (9C7) | 42.0 | 57.8 | 153630 Breast cancer | 28.3 | 27.2 |
| | | | (D37) | | |
| 149844 Breast cancer (24178) | 0.5 | 0.5 | 153638 Breast cancer | 8.0 | 8.5 |
| | | | (D3F) | | |
| 153633 Breast cancer (D3A) | 1.0 | 1.9 | 164670 Breast cancer | 17.2 | 25.9 |
| | | | (7078) | | |
| 153644 Breast cancer (D45) | 0.2 | 0.2 | 164679 Breast cancer | 0.5 | 0.7 |
| | | | (5486) | | |
| 164673 Breast cancer (8452) | 6.8 | 5.8 | 164687 Breast cancer | 4.1 | 4.5 |
| | | | (5881) | | |
| 164682 Breast cancer (6342)* | 10.2 | 13.0 | 145846 Breast cancer | 0.9 | 1.0 |
| | | | (9B7) | | |
| 97751 Breast cancer (CHTN21053) | 1.8 | 2.9 | 145858 Breast cancer | 5.9 | 0.0 |
| | | | (9B4) | | |
| 116417 Breast cancer (3367)* | 1.6 | 3.2 | 153631 Breast cancer | 1.4 | 1.1 |
| | | | (D38) | | |
| 145852 Breast cancer (A1A) | 5.7 | 7.9 | 153639 Breast cancer | 1.7 | 1.5 |
| | | | (D40) | | |
| 151097 Breast cancer (CHTN24298) | 0.2 | 0.5 | 164671 Breast cancer | 6.5 | 7.3 |
| | | | (7082) | | |
| 153634 Breast cancer (D3B) | 9.8 | 14.7 | 164680 Breast cancer | 14.5 | 13.1 |
| | | | (5705) | | |
| 155797 Breast cancer (EA6) | 1.0 | 0.9 | 164688 Breast cancer | 9.9 | 10.6 |
| | | | (7222) | | |
| 164674 Breast cancer (8811) | 8.4 | 12.2 | 111288 Breast NAT (3367) | 0.1 | 0.1 |
| 164683 Breast cancer (6470) | 22.2 | 25.5 | 111302 Breast NAT (6314) | 0.5 | 0.2 |
| 97763 Breast cancer (OD06083) | 0.7 | 0.1 | 105687 Breast cancer 1B | 0.1 | 0.0 |
| 116418 Breast cancer (3378)* | 0.7 | 0.8 | 105688 Breast NAT 1A | 0.0 | 0.0 |
| 145853 Breast cancer (9F3) | 13.3 | 22.8 | 105689 Breast cancer 2B | 0.0 | 0.0 |
| 153432 Breast cancer (CHTN 24652) | 7.0 | 9.8 | 105690 Breast NAT 2A | 0.0 | 0.0 |
| 153635 Breast cancer (D3C) | 0.2 | 0.5 | 111289 Breast cancer 3B* | 7.9 | 7.9 |
| 164667 Breast cancer (5785) | 21.0 | 19.3 | 111290 Breast NAT A* | 5.6 | 7.4 |
| 164676 Breast cancer (5070) | 4.2 | 5.1 | 116424 Breast cancer 4B* | 0.1 | 0.1 |
| 164684 Breast cancer (6509) | 1.4 | 1.5 | 116425 Breast NAT 4A | 0.0 | 0.0 |
| 116421 Breast cancer (6314) | 0.1 | 0.0 | 108847 Breast cancer | 0.0 | 0.0 |
| 145854 Breast cancer (9B8) | 3.4 | 3.0 | 105694 Breast NAT | 0.3 | 0.3 |
| 153627 Breast cancer (D34) | 4.3 | 3.9 | | | |

[1331] TABLE AKE
Panel 1.3D
Column A - Rel. Exp. (%) Ag1593, Run 152078944
Column B - Rel. Exp. (%) Ag455b, Run 165974813

| Tissue Name | A | B | Tissue Name | A | B |
|---|---|---|---|---|---|
| Liver adenocarcinoma | 0.0 | 0.0 | Kidney (fetal) | 2.8 | 0.0 |
| Pancreas | 0.0 | 5.1 | Renal ca. 786-0 | 3.6 | 0.0 |
| Pancreatic ca. CAPAN 2 | 0.0 | 0.0 | Renal ca. A498 | 8.5 | 0.0 |
| Adrenal gland | 0.0 | 0.0 | Renal ca. RXF 393 | 1.8 | 0.0 |
| Thyroid | 0.0 | 0.0 | Renal ca. ACHN | 2.5 | 0.7 |
| Salivary gland | 0.0 | 0.0 | Renal ca. UO-31 | 0.0 | 0.0 |
| Pituitary gland | 0.0 | 0.0 | Renal ca. TK-10 | 0.0 | 0.0 |
| Brain (fetal) | 0.0 | 0.0 | Liver | 0.0 | 5.6 |
| Brain (whole) | 0.0 | 0.0 | Liver (fetal) | 0.0 | 0.0 |
| Brain (amygdala) | 0.0 | 0.0 | Liver ca. (hepatoblast) HepG2 | 8.7 | 3.9 |
| Brain (cerebellum) | 0.0 | 0.0 | Lung | 0.0 | 0.0 |
| Brain (hippocampus) | 0.0 | 0.0 | Lung (fetal) | 2.0 | 0.0 |
| Brain (substantia nigra) | 0.0 | 0.0 | Lung ca. (small cell) LX-1 | 4.2 | 0.0 |
| Brain (thalamus) | 0.0 | 0.0 | Lung ca. (small cell) NCI-H69 | 11.9 | 17.2 |
| Cerebral Cortex | 0.0 | 0.0 | Lung ca. (s. cell var.) SHP-77 | 28.1 | 33.4 |
| Spinal cord | 0.0 | 0.0 | Lung ca. (large cell) NCI-H460 | 3.8 | 0.0 |
| glio/astro U87-MG | 2.1 | 0.0 | Lung ca. (non-sm. cell) A549 | 1.9 | 0.0 |
| glio/astro U-118-MG | 27.7 | 14.5 | Lung ca. (non-s. cell) NCI-H23 | 24.7 | 17.1 |
| astrocytoma SW1783 | 6.0 | 0.0 | Lung ca. (non-s. cell) HOP-62 | 5.8 | 4.1 |
| neuro*; met SK-N-AS | 20.4 | 0.0 | Lung ca. (non-s. cl) NCI-H522 | 25.3 | 0.0 |
| astrocytoma SF-539 | 0.0 | 0.0 | Lung ca. (squam.) SW 900 | 0.0 | 5.0 |
| astrocytoma SNB-75 | 6.3 | 10.6 | Lung ca. (squam.) NCI-H596 | 32.8 | 31.9 |
| glioma SNB-19 | 1.7 | 0.0 | Mammary gland | 0.0 | 0.0 |
| glioma U251 | 0.0 | 0.0 | Breast ca.* (pl. ef) MCF-7 | 100.0 | 100.0 |
| glioma SF-295 | 14.3 | 6.2 | Breast ca.* (pl. ef) MDA-MB- | 25.7 | 29.1 |
| | | | 231 | | |
| Heart (Fetal) | 2.4 | 0.0 | Breast ca.* (pl. ef) T47D | 8.5 | 5.8 |
| Heart | 0.0 | 0.0 | Breast ca. BT-549 | 26.6 | 11.3 |
| Skeletal muscle (Fetal) | 3.8 | 4.7 | Breast ca. MDA-N | 6.7 | 0.0 |
| Skeletal muscle | 0.0 | 0.0 | Ovary | 0.0 | 0.0 |
| Bone marrow | 0.0 | 0.0 | Ovarian ca. OVCAR-3 | 6.5 | 17.3 |
| Thymus | 0.0 | 3.3 | Ovarian ca. OVCAR-4 | 3.6 | 0.0 |
| Spleen | 0.0 | 0.0 | Ovarian ca. OVCAR-5 | 6.1 | 9.7 |
| Lymph node | 0.0 | 0.0 | Ovarian ca. OVCAR-8 | 2.0 | 0.0 |
| Colorectal | 5.6 | 4.5 | Ovarian ca. IGROV-1 | 0.0 | 8.1 |
| Stomach | 0.0 | 0.0 | Ovarian ca. (ascites) SK-OV-3 | 2.7 | 0.0 |
| Small intestine | 2.0 | 0.0 | Uterus | 3.6 | 0.0 |
| Colon ca. SW480 | 22.4 | 8.5 | Placenta | 4.1 | 27.0 |
| Colon ca.* SW620 (SW480 met) | 8.4 | 10.8 | Prostate | 0.0 | 5.2 |
| Colon ca. HT29 | 8.2 | 0.0 | Prostate ca.* (bone met) PC-3 | 6.9 | 0.0 |
| Colon ca. HCT-116 | 1.7 | 6.5 | Testis | 9.3 | 17.1 |
| Colon ca. CaCo-2 | 7.4 | 0.0 | Melanoma Hs688(A).T | 0.0 | 0.0 |
| CC Well to Mod Diff | 3.7 | 0.0 | Melanoma* (met) Hs688(B).T | 0.0 | 0.0 |
| (ODO3866) | | | | | |
| Colon ca. HCC-2998 | 9.1 | 23.2 | Melanoma UACC-62 | 1.6 | 0.0 |
| Gastric ca. (liver met) NCI-N87 | 64.6 | 43.5 | Melanoma M14 | 0.0 | 0.0 |
| Bladder | 0.0 | 0.0 | Melanoma LOX IMVI | 2.4 | 0.0 |
| Trachea | 0.0 | 6.3 | Melanoma* (met) SK-MEL-5 | 1.9 | 0.0 |
| Kidney | 0.0 | 0.0 | Adipose | 0.0 | 0.0 |

[1332] TABLE AKF
Panel 2D
Column A - Rel. Exp. (%) Ag1593, Run 152079595
Column B - Rel. Exp. (%) Ag455, Run 145367170
Column C - Rel. Exp. (%) Ag455, Run 145492233

| Tissue Name | A | B | C | Tissue Name | A | B | C |
|---|---|---|---|---|---|---|---|
| Normal Colon | 2.5 | 0.5 | 2.5 | Kidney Margin 8120608 | 0.0 | 0.0 | 0.0 |
| CC Well to Mod Diff | 1.1 | 0.0 | 0.6 | Kidney Cancer 8120613 | 0.0 | 0.0 | 0.0 |
| (ODO3866) | | | | | | | |
| CC Margin (ODO3866) | 2.1 | 1.2 | 1.0 | Kidney Margin 8120614 | 0.0 | 0.0 | 0.0 |
| CC Gr.2 rectosigmoid | 3.2 | 1.3 | 3.2 | Kidney Cancer 9010320 | 0.9 | 0.0 | 2.5 |
| (ODO3868) | | | | | | | |
| CC Margin (ODO3868) | 0.0 | 0.0 | 0.0 | Kidney Margin 9010321 | 0.0 | 0.0 | 1.0 |
| CC Mod Diff (ODO3920) | 8.7 | 3.0 | 2.4 | Normal Uterus | 0.0 | 0.0 | 0.6 |
| CC Margin (ODO3920) | 1.9 | 0.0 | 0.0 | Uterine Cancer 064011 | 0.4 | 0.4 | 0.0 |
| CC Gr.2 ascend colon | 3.0 | 1.7 | 1.4 | Normal Thyroid | 0.0 | 0.5 | 0.6 |
| (ODO3921) | | | | | | | |
| CC Margin (ODO3921) | 0.5 | 0.4 | 0.0 | Thyroid Cancer | 0.4 | 1.5 | 0.9 |
| CC from Partial Hepatectomy | 1.7 | 2.6 | 0.0 | Thyroid Cancer A302152 | 3.0 | 2.9 | 0.8 |
| (ODO4309) Mets | | | | | | | |
| Liver Margin (ODO4309) | 0.5 | 1.2 | 0.6 | Thyroid Margin | 0.0 | 0.8 | 0.5 |
| | | | | A302153 | | | |
| Colon mets to lung | 0.0 | 0.0 | 0.5 | Normal Breast | 0.0 | 0.3 | 2.1 |
| (OD04451-01) | | | | | | | |
| Lung Margin (OD04451-02) | 0.9 | 0.0 | 0.0 | Breast Cancer | 6.2 | 7.1 | 4.9 |
| Normal Prostate 6546-1 | 0.9 | 0.5 | 1.4 | Breast Cancer | 100.0 | 49.3 | 57.0 |
| | | | | (OD04590-01) | | | |
| Prostate Cancer (OD04410) | 16.3 | 11.9 | 2.9 | Breast Cancer Mets | 37.4 | 100.0 | 40.3 |
| | | | | (OD04590-03) | | | |
| Prostate Margin (OD04410) | 5.6 | 3.8 | 0.9 | Breast Cancer Metastasis | 13.8 | 27.4 | 11.0 |
| Prostate Cancer (OD04720- | 0.5 | 1.1 | 0.0 | Breast Cancer | 3.3 | 5.1 | 0.8 |
| 01) | | | | | | | |
| Prostate Margin (OD04720- | 0.5 | 1.8 | 0.0 | Breast Cancer | 8.2 | 8.1 | 13.1 |
| 02) | | | | | | | |
| Normal Lung | 2.8 | 1.5 | 0.0 | Breast Cancer 9100266 | 1.0 | 3.0 | 1.4 |
| Lung Met to Muscle | 3.6 | 10.4 | 1.1 | Breast Margin 9100265 | 1.7 | 0.0 | 1.7 |
| (ODO4286) | | | | | | | |
| Muscle Margin (ODO4286) | 0.0 | 0.0 | 0.7 | Breast Cancer A209073 | 1.5 | 3.2 | 0.7 |
| Lung Malignant Cancer | 0.0 | 1.8 | 0.7 | Breast Margin A209073 | 0.4 | 0.8 | 1.4 |
| (OD03126) | | | | | | | |
| Lung Margin (OD03126) | 0.0 | 1.4 | 0.7 | Normal Liver | 0.0 | 2.9 | 0.0 |
| Lung Cancer (OD04404) | 2.2 | 0.7 | 2.5 | Liver Cancer | 0.0 | 0.4 | 0.9 |
| Lung Margin (OD04404) | 0.0 | 0.0 | 1.5 | Liver Cancer 1025 | 2.1 | 0.4 | 0.7 |
| Lung Cancer (OD04565) | 0.4 | 0.4 | 1.9 | Liver Cancer 1026 | 0.0 | 0.0 | 0.0 |
| Lung Margin (OD04565) | 0.0 | 0.0 | 0.0 | Liver Cancer 6004-T | 0.4 | 0.0 | 0.0 |
| Lung Cancer (OD04237-01) | 7.6 | 5.4 | 5.5 | Liver Tissue 6004-N | 4.2 | 0.7 | 2.9 |
| Lung Margin (OD04237-02) | 0.4 | 0.4 | 0.0 | Liver Cancer 6005-T | 0.7 | 0.0 | 2.4 |
| Ocular Mel Met to Liver | 0.0 | 0.0 | 0.7 | Liver Tissue 6005-N | 0.0 | 0.4 | 0.0 |
| (ODO4310) | | | | | | | |
| Liver Margin (ODO4310) | 0.0 | 0.0 | 0.0 | Normal Bladder | 3.6 | 5.4 | 0.8 |
| Melanoma Metastasis | 3.6 | 6.8 | 0.8 | Bladder Cancer | 0.7 | 0.5 | 1.8 |
| Lung Margin (OD04321) | 1.0 | 3.1 | 0.0 | Bladder Cancer | 4.5 | 2.1 | 5.4 |
| Normal Kidney | 0.0 | 0.4 | 0.0 | Bladder Cancer | 33.4 | 64.2 | 20.4 |
| | | | | (OD04718-01) | | | |
| Kidney Ca, Nuclear grade 2 | 0.9 | 0.0 | 2.3 | Bladder Normal | 0.0 | 0.7 | 0.0 |
| (OD04338) | | | | Adjacent (OD04718-03) | | | |
| Kidney Margin (OD04338) | 1.2 | 0.8 | 0.8 | Normal Ovary | 0.0 | 0.0 | 0.0 |
| Kidney Ca Nuclear grade 1/2 | 1.9 | 0.7 | 1.5 | Ovarian Cancer | 2.6 | 2.4 | 0.7 |
| (OD04339) | | | | | | | |
| Kidney Margin (OD04339) | 0.0 | 0.0 | 0.0 | Ovarian Cancer | 97.9 | 65.1 | 100.0 |
| | | | | (OD04768-07) | | | |
| Kidney Ca, Clear cell type | 0.4 | 0.0 | 0.0 | Ovary Margin | 0.0 | 0.5 | 0.0 |
| (OD04340) | | | | (OD04768-08) | | | |
| Kidney Margin (OD04340) | 0.8 | 0.0 | 0.9 | Normal Stomach | 0.0 | 1.2 | 1.5 |
| Kidney Ca, Nuclear grade 3 | 0.5 | 3.3 | 0.0 | Gastric Cancer 9060358 | 0.0 | 0.0 | 2.2 |
| (OD04348) | | | | | | | |
| Kidney Margin (OD04348) | 2.0 | 2.4 | 3.0 | Stomach Margin | 0.4 | 0.0 | 0.0 |
| | | | | 9060359 | | | |
| Kidney Cancer (OD04622- | 0.0 | 1.7 | 0.0 | Gastric Cancer 9060395 | 0.0 | 0.0 | 0.0 |
| 01) | | | | | | | |
| Kidney Margin (OD04622- | 0.4 | 0.9 | 0.0 | Stomach Margin | 0.0 | 1.0 | 0.0 |
| 03) | | | | 9060394 | | | |
| Kidney Cancer (OD04450- | 0.0 | 0.4 | 0.0 | Gastric Cancer 9060397 | 4.1 | 2.3 | 1.0 |
| 01) | | | | | | | |
| Kidney Margin (OD04450- | 0.0 | 0.0 | 0.0 | Stomach Margin | 0.0 | 1.3 | 1.1 |
| 03) | | | | 9060396 | | | |
| Kidney Cancer 8120607 | 0.0 | 0.0 | 0.0 | Gastric Cancer 064005 | 2.9 | 0.4 | 1.6 |

[1333] TABLE AKG
Panel 3D
Column A - Rd. Exp.(%) Ag455, Run 164730890

| Tissue Name | A | Tissue Name | A |
|---|---|---|---|
| 94905 Daoy | 18.2 | 94954 Ca Ski Cervical epidermoid | 33.9 |
| Medulloblastoma/Cerebellum | | carcinoma (metastasis | |
| 94906 TE671 | 0.8 | 94955 ES-2 Ovarian clear cell | 0.0 |
| Medulloblastom/Cerebellum | | carcinoma | |
| 94907 D283 Med | 3.8 | 94957 Ramos Stimulated with | 1.3 |
| Medulloblastoma/Cerebellum | | PMA/ionomycin 6h | |
| 94908 PFSK-1 Primitive | 4.5 | 94958 Ramos Stimulated with | 1.5 |
| Neuroectodermal/Cerebellum | | PMA/ionomycin 14h | |
| 94909 XF-498 CNS | 4.5 | 94962 MEG-01 Chronic | 100.0 |
| | | myelogenous leukemia | |
| | | (megokaryoblast) | |
| 94910 SNB-78 CNS/glioma | 2.0 | 94963 Raji Burkitt's lymphoma | 0.0 |
| 94911 SF-268 CNS/glioblastoma | 0.0 | 94964 Daudi Burkitt's lymphoma | 0.0 |
| 94912 T98G Glioblastoma | 7.9 | 94965 U266 B-cell | 40.3 |
| | | plasmacytomalmyeloma | |
| 96776 SK-N-SH Neuroblastoma | 0.0 | 94968 CA46 Burkitt's lymphoma | 1.6 |
| (metastasis) | | | |
| 94913 SF-295 CNS/glioblastoma | 1.9 | 94970 RL non-Hodgkin's B-cell | 0.0 |
| | | lymphoma | |
| 94914 Cerebellum | 1.2 | 94972 JM1 pre-B-cell | 3.7 |
| | | lymphoma/leukemia | |
| 96777 Cerebellum | 2.1 | 94973 Jurkat T cell leukemia | 0.0 |
| 94916 NCI-H292 Mucoepidermoid | 2.4 | 94974 TF-1 Erythroleukemia | 10.6 |
| lung carcinoma | | | |
| 94917 DMS-114 Small cell lung | 0.2 | 94975 HUT 78 T-cell lymphoma | 3.0 |
| cancer | | | |
| 94918 DMS-79 Small cell lung | 97.9 | 94977 U937 Histiocytic lymphoma | 12.2 |
| cancer/neuroendocrine | | | |
| 94919 NCI-H146 Small cell lung | 22.5 | 94980 KU-812 Myelogenous | 17.6 |
| cancer/neuroendocrine | | leukemia | |
| 94920 NCI-H526 Small cell lung | 2.3 | 769-P- Clear cell renal carcinoma | 0.0 |
| cancer/neuroendocrine | | | |
| 94921 NCI-N417 Small cell lung | 14.4 | 94983 Caki-2 Clear cell renal | 0.0 |
| cancer/neuroendocrine | | carcinoma | |
| 94923 NCI-H82 Small cell lung | 3.6 | 94984 SW 839 Clear cell renal | 1.6 |
| cancer/neuroendocnne | | carcinoma | |
| 94924 NCI-H157 Squamous cell lung | 34.2 | 94986 G401 Wilms' tumor | 0.0 |
| cancer (metastasis) | | | |
| 94925 NCI-H1155 Large cell lung | 9.8 | 94987 Hs766T Pancreatic carcinoma | 11.6 |
| cancer/neuroendocrine | | (LN metastasis) | |
| 94926 NCI-H1299 Large cell lung | 18.2 | 94988 CAPAN-1 Pancreatic | 6.6 |
| cancer/neuroendocnne | | adenocarcinoma (liver metastasis) | |
| 94927 NCI-H727 Lung carcinoid | 1.8 | 94989 SU86.86 Pancreatic carcinoma | 3.0 |
| | | (liver metastasis) | |
| 94928 NCI-UMC-11 Lung carcinoid | 7.9 | 94990 BxPC-3 Pancreatic | 13.3 |
| | | adenocarcinoma | |
| 94929 LX-1 Small cell lung cancer | 1.3 | 94991 HPAC Pancreatic | 2.8 |
| | | adenocarcinoma | |
| 94930 Colo-205 Colon cancer | 0.0 | 94992 MIA PaCa-2 Pancreatic | 0.0 |
| | | carcinoma | |
| 94931 KM12 Colon cancer | 23.7 | 94993 CFPAC-1 Pancreatic ductal | 17.7 |
| | | adenocarcinoma | |
| 94932 KM20L2 Colon cancer | 0.0 | 94994 PANC-1 Pancreatic epithelioid | 5.5 |
| | | ductal carcinoma | |
| 94933 NCI-H716 Colon cancer | 40.6 | 94996 T24 Bladder carcinma | 5.0 |
| | | (transitional cell | |
| 94935 SW-48 Colon adenocarcinoma | 1.8 | 5637- Bladder carcinoma | 0.0 |
| 94936 SW1116 Colon | 2.4 | 94998 HT-1197 Bladder carcinoma | 15.2 |
| adenocarcinoma | | | |
| 94937 LS 174T Colon | 0.0 | 94999 UM-UC-3 Bladder carcinma | 0.0 |
| adenocarcinoma | | (transitional cell) | |
| 94938 SW-948 Colon | 1.1 | 95000 A204 Rhabdomyosarcoma | 5.6 |
| adenocarcinoma | | | |
| 94939 SW-480 Colon | 0.0 | 95001 HT-1080 Fibrosarcoma | 0.0 |
| adenocarcinoma | | | |
| 94940 NCI-SNU-5 Gastric carcinoma | 11.0 | 95002 MG-63 Osteosarcoma (bone) | 2.0 |
| KATO III- Gastric carcinoma | 9.7 | 95003 SK-LMS-1 Leiomyosarcoma | 10.7 |
| | | (vulva) | |
| 94943 NCI-SNU-16 Gastric | 11.6 | 95004 SJRH30 Rhabdomyosarcoma | 1.6 |
| carcinoma | | (met to bone marrow) | |
| 94944 NCI-SNU-1 Gastric carcinoma | 6.0 | 95005 A431 Epidermoid carcinoma | 4.6 |
| 94946 RF-1 Gastric adenocarcinoma | 2.6 | 95007 WM266-4 Melanoma | 1.3 |
| 94947 RF-48 Gastric adenocarcinoma | 6.0 | DU 145- Prostate carcinoma (brain | 0.0 |
| | | metastasis) | |
| 96778 MKLN-45 Gastric carcinoma | 0.0 | 95012 MDA-MB-468 Breast | 8.5 |
| | | adenocarcinoma | |
| 94949 NCI-N87 Gastric carcinoma | 1.4 | SCC-4- Squamous cell carcinoma of | 0.0 |
| | | tongue | |
| 94951 OVCAR-5 Ovarian carcinoma | 0.0 | SCC-9- Squamous cell carcinoma of | 1.2 |
| | | tongue | |
| 94952 RL95-2 Uterine carcinoma | 3.7 | SCC-15- Squamous cell carcinoma of | 1.8 |
| | | tongue | |
| 94953 HelaS3 Cervical | 29.9 | 95017 CAL 27 Squamous cell | 0.0 |
| adenocarcinoma | | carcinoma of tongue | |

[1334] TABLE AKH
Panel 4D
Column A - Rel. Exp. (%) Ag1593, Run 152080690
Column B - Rel. Exp. (%) Ag455, Run 138083105

| Tissue Name | A | B | Tissue Name | A | B |
|---|---|---|---|---|---|
| Secondary Th1 act | 7.5 | 4.0 | HUVEC IL-1beta | 0.0 | 0.0 |
| Secondary Th2 act | 9.9 | 5.5 | HUVEC IFN gamma | 6.3 | 0.0 |
| Secondary Tr1 act | 5.0 | 7.7 | HUVEC TNF alpha + IFN gamma | 0.0 | 0.0 |
| Secondary Th1 rest | 7.2 | 5.1 | HUVEC TNF alpha +IL4 | 0.0 | 0.0 |
| Secondary Th2 rest | 5.3 | 4.6 | HUVEC IL-11 | 0.0 | 3.4 |
| Secondary Tr1 rest | 0.0 | 8.1 | Lung Microvascular EC none | 0.0 | 0.0 |
| Primary Th1 act | 0.0 | 6.6 | Lung Microvascular EC TNFalpha + | 0.0 | 1.6 |
| | | | IL-1beta | | |
| Primary Th2 act | 5.1 | 0.0 | Microvascular Dermal EC none | 0.0 | 3.6 |
| Primary Tr1 act | 0.0 | 1.5 | Microsvasular Dermal EC TNFalpha + | 7.1 | 0.0 |
| | | | IL-1beta | | |
| Primary Th1 rest | 14.8 | 6.4 | Bronchial epithelium TNFalpha + | 0.0 | 0.0 |
| | | | IL1beta | | |
| Primary Th2 rest | 4.3 | 4.1 | Small airway epithelium none | 0.0 | 3.8 |
| Primary Tr1 rest | 4.5 | 0.9 | Small airway epithelium TNFalpha + | 0.0 | 2.3 |
| | | | IL-1beta | | |
| CD45RA CD4 lymphocyte | 6.3 | 10.4 | Coronery artery SMC rest | 0.0 | 1.6 |
| act | | | | | |
| CD45RO CD4 lymphocyte | 1.6 | 3.8 | Coronery artery SMC TNFalpha + | 0.0 | 6.4 |
| act | | | IL-1beta | | |
| CD8 lymphocyte act | 0.0 | 1.5 | Astrocytes rest | 6.8 | 0.0 |
| Secondary CD8 lymphocyte | 0.0 | 1.5 | Astrocytes TNFalpha + IL-1beta | 1.7 | 6.0 |
| rest | | | | | |
| Secondary CD8 lymphocyte | 0.0 | 5.3 | KU-812 (Basophil) rest | 13.7 | 25.9 |
| act | | | | | |
| CD4 lymphocyte none | 0.0 | 0.0 | KU-812 (Basophil) PMA/ionomycin | 100.0 | 100.0 |
| 2ry Th1/Th2/Tr1 anti-CD95 | 8.8 | 5.1 | CCD1106 (Keratinocytes) none | 4.5 | 2.1 |
| CH11 | | | | | |
| LAK cells rest | 0.0 | 3.1 | CCD1106 (Keratinocytes) TNFalpha + | 0.0 | 12.1 |
| | | | IL-1beta | | |
| LAK cells IL-2 | 5.2 | 14.0 | Liver cirrhosis | 3.5 | 14.9 |
| LAK cells IL-2 + IL-12 | 1.6 | 6.7 | Lupus kidney | 0.0 | 0.0 |
| LAK cells IL-2 + IFN | 8.9 | 6.7 | NCI-H292 none | 2.5 | 3.3 |
| gamma | | | | | |
| LAK cells IL-2 + IL-18 | 7.0 | 1.2 | NCI-H292 IL-4 | 13.8 | 7.5 |
| LAK cells PMA/ionomycin | 1.6 | 0.0 | NCI-H292 IL-9 | 9.7 | 7.9 |
| NK Cells IL-2 rest | 3.8 | 5.2 | NCI-H292 IL-13 | 1.7 | 5.4 |
| Two Way MLR 3 day | 6.3 | 4.3 | NCI-H292 IFN gamma | 6.8 | 10.9 |
| Two Way MLR 5 day | 1.7 | 3.4 | HPAEC none | 0.0 | 0.0 |
| Two Way MLR 7 day | 0.0 | 1.7 | HPAEC TNFalpha + IL-1beta | 9.6 | 3.3 |
| PBMC rest | 0.0 | 1.3 | Lung fibroblast none | 3.0 | 0.0 |
| PBMC PWM | 28.1 | 25.7 | Lung fibroblast TNFalpha + IL-1 | 6.8 | 0.0 |
| | | | beta | | |
| PBMC PHA-L | 1.1 | 10.1 | Lung fibroblast IL-4 | 1.5 | 0.0 |
| Ramos (B cell) none | 6.7 | 3.6 | Lung fibroblast IL-9 | 2.9 | 0.0 |
| Ramos (B cell) ionomycin | 9.1 | 16.0 | Lung fibroblast IL-13 | 0.0 | 2.6 |
| B lymphocytes PWM | 37.6 | 47.6 | Lung fibroblast IFN gamma | 0.0 | 2.5 |
| B lymphocytes CD40L and | 6.4 | 14.4 | Dermal fibroblast CCD1070 rest | 2.5 | 12.4 |
| IL-4 | | | | | |
| EOL-1 dbcAMP | 0.0 | 2.8 | Dermal fibroblast CCD1070 TNF | 4.9 | 12.4 |
| | | | alpha | | |
| EOL-l dbcAMP | 1.2 | 1.8 | Dermal fibroblast CCD1070 IL-1 | 0.0 | 5.2 |
| PMA/ionomycin | | | beta | | |
| Dendritic cells none | 0.0 | 0.0 | Dermal fibroblast IFN gamma | 0.0 | 0.0 |
| Dendritic cells LPS | 0.0 | 0.0 | Dermal fibroblast IL-4 | 1.6 | 4.3 |
| Dendritic cells anti-CD40 | 0.0 | 0.0 | IBD Colitis 2 | 3.4 | 1.4 |
| Monocytes rest | 0.0 | 0.0 | IBD Crohn's | 1.5 | 1.6 |
| Monocytes LPS | 0.0 | 4.7 | Colon | 6.9 | 2.0 |
| Macrophages rest | 0.0 | 0.0 | Lung | 2.2 | 0.0 |
| Macrophages LPS | 0.0 | 1.7 | Thymus | 0.0 | 0.0 |
| HUVEC none | 3.0 | 0.0 | Kidney | 36.6 | 62.0 |
| HUVEC starved | 3.1 | 3.3 | | | |

[1335] Ardais Breast1.0 Summary: Ag1593/Ag455 Highest expression of this gene is detected in breast cancer 9B6 samples (CTs=25-27). Significant expression of this gene is seen in number of cancer breast cancer samples. Modulation of this gene, encoded protein and/or use of antibodies or small molecule drug targeting this gene or gene product is useful in the treatment of breast cancer.

[1336] Panel 1.3D Summary: Ag1593/Ag455b The expression of this gene was detected in a number of the cancer cell lines and not in the normal tissues. The highest expression was found in MCF-7 breast cancer cells, which are estrogen receptor positive. Low expression of this gene was also seen in cell lines derived from lung, colon, breast and gastric cancers. Modulation of this gene, encoded protein and/or use of antibodies or small molecule drug targeting this gene or gene product is useful in the treatment of breast, lung, colon and gastric cancers.

[1337] Panel 2D Summary: Ag1593/Ag455 Highest expression of this gene was detected in breast cancer samples (CTs=29-30.5). Significant expression of this gene was seen in number of cancer samples derived from breast, ovarian, bladder, colon, and lung cancers. Expression of this gene is useful as marker to detect these cancers and modulation of this gene, encoded protein and/or use of antibodies or small molecule drug targeting this gene or gene product is useful in the treatment of breast, ovarian, bladder, colon, and lung cancers.

[1338] Panel 3D Summary: Ag455 This gene was expressed widely, but at a low level, across of all of the samples in panel 3D. Highest expression was detected in a chronic myelogenous leukemia (megokaryoblast) (CT value=30), indicating a potential role for the gene in this disease.

[1339] Panel 4D Summary: Ag1593/Ag455 This gene was highly induced the KU-812 basophil cell line and was expressed at lower levels in pokeweed mitogen-activated B cells and PBMC (CTs=31-34). Activated basophils release a number of potent bioresponse modifiers that can damage surrounding tissues. Modulation of this gene, encoded protein and/or use of antibodies or small molecule drug targeting this gene or gene product will reduce or block inflammation or tissue damage caused by inflammation by blocking activation of basophils and is useful for the treatment of asthma, emphysema, and allergy.

[1340] AL. CG55604-04: Olfactory Receptor.

[1341] Expression of gene CG55604-04 was assessed using the primer-probe set Ag1240, described in Table ALA. Results of the RTQ-PCR runs are shown in Tables ALB, ALC, ALD and ALE.

TABLE ALA
Probe Name Ag1240

| | | | Start | SEQ ID |
|---|---|---|---|---|
| Primers | Sequences | Length | Position | No |
| Forward | 5′-ttccctactggggacagaatat-3′ | 22 | 504 | 1337 |
| Probe | TET-5′-tacttttgtgaacctcctgccctcct-3′- | 26 | 536 | 1338 |
| | TAMRA | | | |
| Reverse | 5′-gccatttctgtgctgtaagtgt-3′ | 22 | 579 | 1339 |

[1342] TABLE ALB
AI_comprehensive panel_v1.0
Column A - Rel. Exp.(%) Ag1240, Run 306266935

| Tissue Name | A | Tissue Name | A |
|---|---|---|---|
| 110967 COPD-F | 15.2 | 112427 Match Control Psoriasis-F | 41.2 |
| 110980 COPD-F | 26.1 | 112418 Psoriasis-M | 4.9 |
| 110968 COPD-M | 26.1 | 112723 Match Control Psoriasis-M | 29.1 |
| 110977 COPD-M | 85.9 | 112419 Psoriasis-M | 15.0 |
| 110989 Emphysema-F | 25.5 | 112424 Match Control Psonasis-M | 34.6 |
| 110992 Emphysema-F | 12.9 | 112420 Psoriasis-M | 54.3 |
| 110993 Emphysema-F | 17.9 | 112425 Match Control Psoriasis-M | 37.6 |
| 110994 Emphysema-F | 15.2 | 104689 (MF) OA Bone-Backus | 54.3 |
| 110995 Emphysema-F | 66.9 | 104690 (MF) Adj “Normal” Bone- | 31.2 |
| | | Backus | |
| 110996 Emphysema-F | 8.8 | 104691 (ME) OA Synovium-Backus | 42.3 |
| 110997 Asthma-M | 1.5 | 104692 (BA) OA Cartilage-Backus | 0.0 |
| 111001 Asthma-F | 38.4 | 104694 (BA) OA Bone-Backus | 20.4 |
| 111002 Asthma-F | 56.3 | 104695 (BA) Adj “Normal” Bone- | 28.1 |
| | | Backus | |
| 111003 Atopic Asthma-F | 50.7 | 104696 (BA) OA Synovium-Backus | 23.2 |
| 111004 Atopic Asthma-F | 70.2 | 104700 (SS) QA Bone-Backus | 15.4 |
| 111005 Atopic Asthma-F | 46.7 | 104701 (SS) Adj “Normal” Bone-Backus | 18.3 |
| 111006 Atopic Asthma-F | 9.3 | 104702 (SS) OA Synovium-Backus | 25.9 |
| 111417 Allergy-M | 44.1 | 117093 OA Cartilage Rep7 | 53.2 |
| 112347 Allergy-M | 0.0 | 112672 OA BoneS | 5.6 |
| 112349 Normal Lung-F | 0.0 | 112673 OA SynoviumS | 4.3 |
| 112357 Normal Lung-F | 20.3 | 112674 OA Synovial Fluid cells 5 | 8.6 |
| 112354 NormalLung-M | 15.1 | 117100 OA Cartilage Rep14 | 1.2 |
| 112374 Crohns-F | 54.0 | 1112756 OA Bone9 | 23.2 |
| 112389 Match Control Crohns-F | 21.3 | 112757 OA Synovium9 | 0.9 |
| 112375 Crohns-F | 26.8 | 112758 OA Synovial Fluid Cells9 | 13.2 |
| 112732 Match Control Crohns-F | 38.2 | 117125 RA Cartilage Rep2 | 5.1 |
| 112725 Crohns-M | 9.0 | 113492 Bone2 RA | 6.7 |
| 112387 Match Control Crohns-M | 5.4 | 113493 Synovium2 RA | 3.4 |
| 112378 Crohns-M | 0.2 | 113494 Syn Fluid Cells RA | 6.9 |
| 112390 Match Control Crohns-M | 60.7 | 113499 Cartilage4 RA | 4.4 |
| 112726 Crohns-M | 41.5 | 113500 Bone4 RA | 6.7 |
| 112731 Match Control Crohns-M | 13.8 | 113501 Synovium4 RA | 4.1 |
| 112380 Ulcer Col-F | 4S.1 | 113502 Syn Fluid Cells4 RA | 4.1 |
| 112734 Match Control Ulcer Col-F | 82.9 | 113495 Cartilage3 RA | 3.4 |
| 112384 Ulcer Col-F | 86.5 | 113496 Bone3 RA | 5.0 |
| 112737 Match Control Ulcer Col-F | 7.3 | 113497 Synovium3 RA | 1.9 |
| 112386 Ulcer Col-F | 12.9 | 113498 Syn Fluid Cells3 RA | 6.8 |
| 112738 Match Control Ulcer Col-F | 10.4 | 117106 Normal Cartilage Rep20 | 1.0 |
| 112381 Ulcer CoI-M | 0.0 | 113663 Bone3 Normal | 0.0 |
| 112735 Match Control Ulcer Col- | 4.4 | 113664 Synovium3 Normal | 0.0 |
| 112382 Ulcer Col-M | 24.1 | 113665 Syn Fluid Cells3 Normal | 0.7 |
| 112394 Match Control Ulcer Col- | 5.3 | 117107 Normal Cartilage Rep22 | 21.6 |
| 112383 Ulcer Col-M | 100.0 | 113667 Bone4 Normal | 32.1 |
| 112736 Match Control Ulcer Col- | 5.6 | 113668 Synovium4 Normal | 27.2 |
| M | | | |
| 112423 Psoriasis-F | 17.9 | 113669 Syn Fluid Cells4 Normal | 60.7 |

[1343] TABLE ALC
General_screening_panel_v1.4
Column A - Rel. Exp.(%) Ag1240, Run 212696338

| Tissue Name | A | Tissue Name | A |
|---|---|---|---|
| Adipose | 0.0 | Renal ca. TK-10 | 12.8 |
| Melanoma* Hs688(A).T | 2.8 | Bladder | 3.4 |
| Melanoma* Hs688(B).T | 0.9 | Gastric ca. (liver met.) | 0.0 |
| | | NCI-N87 | |
| Melanoma* M14 | 28.1 | Gastric ca. KATO III | 1.6 |
| Melanoma* LOXIMVI | 15.6 | Colon ca. SW-948 | 7.0 |
| Melanoma* SK-MEL-5 | 46.3 | Colon ca. SW480 | 65.1 |
| Squamous cell carcinoma | 6.7 | Colon ca.* (SW480 met) | 100.0 |
| SCC-4 | | SW620 | |
| Testis Pool | 63.7 | Colon ca. HT29 | 15.5 |
| Prostate ca.* (bone met) | 16.6 | Colon ca. HCT-116 | 51.4 |
| PC-3 | | | |
| Prostate Pool | 10.7 | Colon ca. CaCo-2 | 0.0 |
| Placenta | 0.0 | Colon cancer tissue | 9.9 |
| Uterus Pool | 2.6 | Colon ca. SW116 | 16.0 |
| Ovarian ca. OVCAR-3 | 52.5 | Colon ca. Colo-205 | 0.0 |
| Ovarian ca. SK-OV-3 | 54.3 | Colon ca. SW-48 | 7.3 |
| Ovarian ca. OVCAR-4 | 0.0 | Colon Pool | 26.6 |
| Ovarian ca. OVCAR-5 | 29.5 | Small Intestine Pool | 16.4 |
| Ovarian ca. IGROV-1 | 0.0 | Stomach Pool | 23.5 |
| Ovarian ca. OVCAR-8 | 8.0 | Bone Marrow Pool | 4.0 |
| Ovary | 1.6 | Fetal Heart | 3.7 |
| Breast ca. MCF-7 | 0.0 | Heart Pool | 3.4 |
| Breast ca. MDA-MB-231 | 35.6 | Lymph Node Pool | 12.3 |
| Breast ca. BT 549 | 0.0 | Fetal Skeletal Muscle | 1.2 |
| Breast ca. T47D | 26.8 | Skeletal Muscle Pool | 0.0 |
| Breast ca. MDA-N | 50.7 | Spleen Pool | 12.5 |
| Breast Pool | 53.2 | Thymus Pool | 18.9 |
| Trachea | 6.5 | CNS cancer (glio/astro) | 36.9 |
| | | U87-MG | |
| Lung | 6.5 | CNS cancer (glio/astro) | 28.9 |
| | | U-118-MG | |
| Fetal Lung | 1.3 | CNS cancer (neuro;met) | 2.4 |
| | | SK-N-AS | |
| Lung ca. NCI-N417 | 0.0 | CNS cancer (astro) SF-539 | 0.0 |
| Lung ca. LX-1 | 99.3 | CNS cancer (astro) SNB-75 | 0.0 |
| Lung ca. NCI-H146 | 18.8 | CNS cancer (glio) SNB-19 | 0.0 |
| Lung ca. SHP-77 | 1.2 | CNS cancer (glio) SF-295 | 44.4 |
| Lung ca. A549 | 3.0 | Brain (Amygdala) Pool | 12.9 |
| Lung ca. NCI-H526 | 14.6 | Brain (cerebellum) | 1.4 |
| Lung ca. NCI-H523 | 40.9 | Brain (fetal) | 26.4 |
| Lung ca. NCI-H460 | 13.5 | Brain (Hippocampus) Pool | 11.9 |
| Lung ca. HOP-62 | 11.9 | Cerebral Cortex Pool | 29.9 |
| Lung ca. NCI-H522 | 0.0 | Brain (Substantia nigra) Pool | 8.8 |
| Liver | 0.0 | Brain (Thalamus) Pool | 0.0 |
| Fetal Liver | 17.9 | Brain (whole) | 15.9 |
| Liver ca. HepG2 | 0.0 | Spinal Cord Pool | 8.3 |
| Kidney Pool | 47.6 | Adrenal Gland | 6.4 |
| Fetal Kidney | 37.6 | Pituitary gland Pool | 1.6 |
| Renal ca. 786-0 | 22.5 | Salivary Gland | 0.0 |
| Renal ca. A498 | 8.5 | Thyroid (female) | 0.0 |
| Renal ca. ACHN | 6.3 | Pancreatic ca. CAPAN2 | 0.0 |
| Renal ca. UO-31 | 17.2 | Pancreas Pool | 22.8 |

[1344] TABLE ALD
Panel 1.2
Column A - Rel. Exp.(%) Ag1240, Run 129121683

| Tissue Name | A | Tissue Name | A |
|---|---|---|---|
| Endothelial cells | 0.0 | Renal ca. 786-0 | 0.0 |
| Heart (Fetal) | 0.0 | Renal ca. A498 | 0.0 |
| Pancreas | 0.0 | Renal ca. RXF 393 | 0.0 |
| Pancreatic ca. CAPAN 2 | 0.0 | Renal ca. ACHN | 0.0 |
| Adrenal gland | 0.0 | Renal ca. UO-31 | 0.0 |
| Thyroid | 0.0 | Renal ca. TK-10 | 0.0 |
| Salivary gland | 0.0 | Liver | 0.0 |
| Pituitary gland | 0.0 | Liver (fetal) | 0.0 |
| Brain (fetal) | 0.0 | Liver ca. (hepatoblast) HepG2 | 0.0 |
| Brain (whole) | 0.0 | Lung | 0.0 |
| Brain (amygdala) | 0.0 | Lung (fetal) | 0.0 |
| Brain (cerebellum) | 0.0 | Lung ca. (small cell) LX-1 | 39.5 |
| Brain (hippocampus) | 0.0 | Lung ca. (small cell) | 0.0 |
| | | NCI-H69 | |
| Brain (thalamus) | 0.0 | Lung ca. (s.celI var.) SHP-77 | 0.0 |
| Cerebral Cortex | 0.0 | Lung ca. (large cell) | 0.0 |
| | | NCI-H460 | |
| Spinal cord | 100.0 | Lung ca. (non-sm. cell) A549 | 0.0 |
| glio/astro U87-MG | 0.0 | Lung ca. (non.s.cell) | 0.0 |
| | | NGI-H23 | |
| glio/astro U-118-MG | 0.0 | Lung ca. (non-s.cell) HOP-62 | 0.0 |
| astrocytoma 5W1783 | 0.0 | Lung ca. (non-s.cl) NCI-H522 | 0.0 |
| neuro*; met SK-N-AS | 0.0 | Lung ca. (squam.) SW 900 | 0.0 |
| astrocytoma SF-539 | 0.0 | Lung ca. (squam.) NCI-H596 | 0.0 |
| astrocytoma SNB-75 | 0.0 | Mammary gland | 0.0 |
| glioma SNB-19 | 0.0 | Breast ca.* (pl.ef) MCF-7 | 0.0 |
| glioma U25 | 0.0 | Breast ca.* (pl.ef) | 0.0 |
| | | MDA-MB-231 | |
| glioma SF-295 | 0.0 | Breast ca.* (pl. ef) T47D | 0.0 |
| Heart | 0.0 | Breast ca. BT-549 | 0.0 |
| Skeletal muscle | 0.0 | Breast ca. MDA-N | 77.4 |
| Bone marrow | 0.0 | Ovary | 0.0 |
| Thymus | 0.0 | Ovarian ca. OVCAR-3 | 0.0 |
| Spleen | 0.0 | Ovarian ca. OVCAR-4 | 0.0 |
| Lymph node | 0.0 | Ovarian ca. OVCAR-5 | 17.7 |
| Colorectal | 7.5 | Ovarian ca. OVCAR-8 | 0.0 |
| Stomach | 0.0 | Ovarian ca. IGROV-1 | 0.0 |
| Small intestine | 0.0 | Ovarian ca. (ascites) | 0.0 |
| | | SK-OV-3 | |
| Colon ca. SW480 | 0.0 | Uterus | 0.0 |
| Colon ca.* SW620 | 58.2 | Placenta | 0.0 |
| (SW480 met) | | | |
| Colon ca. HT29 | 0.0 | Prostate | 0.0 |
| Colon ca. HCT-116 | 0.0 | Prostate ca.* (bone met) PC-3 | 0.0 |
| Colon ca. CaCo-2 | 0.0 | Testis | 0.0 |
| CC Well to Mod Diff | 57.0 | Melanoma Hs688(A).T | 0.0 |
| (OD03866) | | | |
| Colon ca. HCC-2998 | 0.0 | Melanoma* (met) Hs688(B).T | 0.0 |
| Gastric ca. (liver met) | 0.0 | Melanoma UACC-62 | 0.0 |
| NCI-N87 | | | |
| Bladder | 0.0 | Melanoma M14 | 54.0 |
| Trachea | 0.0 | Melanoma LOX IMYI | 0.0 |
| Kidney | 0.0 | Melanoma* (met) SK-MEL-5 | 0.0 |
| Kidney (fetal) | 0.0 | | |

[1345] TABLE ALE
Panel 4D
Column A - Rel. Exp.(%) Ag1240, Run 140461898
Column B - Rel. Exp.(%) Ag1240, Run 145779979

| Tissue Name | A | B | Tissue Name | A | B |
|---|---|---|---|---|---|
| Secondary Th1 act | 18.9 | 15.8 | HUVEC IL-1beta | 1.6 | 11.2 |
| Secondary Th2 act | 49.3 | 62.0 | HUVEC IFN gamma | 3.8 | 6.3 |
| Secondary Tr1 act | 51.4 | 52.9 | HUVEC TNF alpha + IFN gamma | 1.8 | 7.2 |
| Secondary Th1 rest | 1.4 | 0.0 | HUVEC TNF alpha + IL4 | 7.2 | 12.4 |
| Secondary Th2 rest | 2.8 | 4.6 | HUVEC IL-11 | 3.2 | 2.1 |
| Secondary Tr1 rest | 1.4 | 7.0 | Lung Microvascular EC none | 16.5 | 17.3 |
| Primary Th1 act | 52.1 | 46.3 | Lung Microvascular EC TNFalpha + | 9.6 | 10.6 |
| | | | IL-1beta | | |
| Primary Th2 act | 39.5 | 39.5 | Microvascular Dermal EC none | 4.8 | 8.0 |
| Primary Tr1 act | 73.7 | 69.3 | Microsvasular Dermal EC TNFalpha | 1.7 | 2.2 |
| | | | + IL-1beta | | |
| Primaiy Th1 rest | 11.2 | 12.6 | Bronchial epithelium TNFalpha + | 4.6 | 0.0 |
| | | | IL1beta | | |
| Primary Th2 rest | 4.5 | 11.0 | Small airway epithelium none | 2.1 | 2.8 |
| Primary Tr1 rest | 2.9 | 9.5 | Small airway epithelium TNFalpha + | 28.5 | 26.6 |
| | | | IL-1beta | | |
| CD45RA CD4 lymphocyte | 9.1 | 7.0 | Coronery artery SMC rest | 0.5 | 1.8 |
| CD45RO CD4 lymphocyte | 23.0 | 14.6 | Coronery artery SMC TNFalpha + | 1.8 | 2.8 |
| | | | IL-1beta | | |
| CD8 lymphocyte act | 2.5 | 8.9 | Astrocytes rest | 1.2 | 0.8 |
| Secondary CD8 | 2.3 | 3.7 | Astrocytes TNFalpha + IL-1beta | 0.8 | 0.0 |
| lymphocyte rest | | | | | |
| Secondary CD8 | 15.6 | 8.2 | KU-812 (Basophil) rest | 9.2 | 7.3 |
| lymphocyte act | | | | | |
| CD4 lymphocyte none | 0.4 | 1.8 | KU-812 (Basophil) PMA/ionomycin | 33.9 | 31.4 |
| 2ry Th1/Th2/Tr1 anti- | 1.4 | 2.9 | CCD1106 (Keratinocytes) none | 11.4 | 5.6 |
| CD95 CH11 | | | | | |
| LAK cells rest | 0.0 | 0.0 | 93580 CCD1106 (Keratinocytes) | 22.7 | 0.8 |
| | | | TNFa and IFNg | | |
| LAK cells IL-2 | 0.9 | 0.0 | Liver cirrhosis | 3.5 | 8.3 |
| LAK cells IL-2 + IL-12 | 8.6 | 4.1 | Lupus kidney | 2.6 | 1.0 |
| LAK cells IL-2 + IFN | 2.5 | 2.5 | NCI-H292 none | 24.7 | 15.6 |
| gamma | | | | | |
| LAK cells IL-2 + IL-18 | 5.4 | 4.9 | NCI-H292 IL-4 | 13.8 | 34.2 |
| LAK cells PMA/ionomycin | 0.0 | 4.9 | NCI-H292 IL-9 | 15.4 | 28.7 |
| NK Cells IL-2 rest | 0.9 | 0.9 | NCI-H292 IL-13 | 8.5 | 19.3 |
| Two Way MLR 3 day | 0.0 | 3.5 | NCI-H292 IFN gamma | 4.9 | 12.8 |
| Two Way MLR 5 day | 1.2 | 2.6 | HPAEC none | 12.5 | 12.9 |
| Two Way MLR 7 day | 3.5 | 7.3 | HPAEC TNF alpha + IL-1 beta | 12.9 | 19.5 |
| PBMC rest | 0.0 | 1.6 | Lung fibroblast none | 2.9 | 2.9 |
| PBMC PWM | 3.4 | 3.8 | Lung fibroblast TNF alpha + IL-1 | 2.0 | 1.0 |
| | | | beta | | |
| PBMC PHA-L | 12.2 | 10.4 | Lung fibroblast IL-4 | 4.0 | 2.9 |
| Ramos (B cell) none | 82.9 | 50.7 | Lung fibroblast IL-9 | 8.2 | 6.0 |
| Ramos (B cell) ionomycin | 100.0 | 100.0 | Lung fibroblast IL-13 | 5.0 | 3.3 |
| B lymphocytes PWM | 3.6 | 7.0 | Lung fibroblast IFN gamma | 2.5 | 5.6 |
| B lymphocytes CD40L and | 4.3 | 7.9 | Dermal fibroblast CCD1070 rest | 29.1 | 35.4 |
| IL-4 | | | | | |
| EOL-1 dbcAMP | 0.0 | 0.0 | Dermal fibroblast CCD1070 TNF | 42.6 | 57.0 |
| | | | alpha | | |
| EOL-1 dbcAMP | 0.0 | 0.0 | Dermal fibroblast CCD1070 IL-1 | 17.8 | 31.4 |
| PMA/ionomycin | | | beta | | |
| Dendritic cells none | 0.0 | 0.0 | Dermal fibroblast IFN gamma | 0.9 | 0.8 |
| Dendritic cells LPS | 0.0 | 42.9 | Dermal fibroblast IL-4 | 1.8 | 3.1 |
| Dendritic cells anti-CD40 | 0.0 | 0.0 | IBD Colitis 2 | 1.8 | 0.6 |
| Monocytes rest | 0.0 | 0.0 | IBD Crohn's | 0.0 | 0.9 |
| Monocytes LPS | 0.0 | 0.0 | Colon | 0.9 | 2.2 |
| Macrophages rest | 7.6 | 4.5 | Lung | 1.8 | 5.3 |
| Macrophages LPS | 1.2 | 0.0 | Thymus | 16.6 | 7.0 |
| HUVEC none | 11.5 | 11.3 | Kidney | 17.2 | 18.8 |
| HUVEC starved | 14.2 | 19.8 | | | |

[1346] AI_comprehensive panel_v1.0 Summary: Ag1240 The highest expression of this gene was detected in an ulcerative colitis sample. Moderate levels of expression of this gene were detected in samples derived from normal and orthoarthitis/rheumatoid arthritis bone and adjacent bone, cartilage, synovium and synovial fluid samples, from normal lung, COPD lung, emphysema, atopic asthma, asthma, allergy, Crohn's disease (normal matched control and diseased), ulcerative colitis (normal matched control and diseased), and psoriasis (normal matched control and diseased). Therapeutic modulation of this gene, expressed protein and/or use of antibodies or small molecule drugs targeting the gene or gene product are useful in the treatment of autoimmune and inflammatory disorders including psoriasis, allergy, asthma, inflammatory bowel disease, rheumatoid arthritis and osteoarthritis.

[1347] General_screening_panel_v1.4 Summary: Ag1240 The highest expression of this gene was detected in a colon cancer cell line (CT=31). Significant expression of this gene was seen in pancreas, melanoma, lymph node, spleen, thymus, brain, testis, prostate (both normal and cancer), breast (both normal and cancer), kidney (fetal, and adult normal and cancer). The expression of this gene was upregulated in several ovarian and lung cancer cell lines, and downregulated in stomach and breast cancer cell lines. Therapeutic modulation of this gene, expressed protein and/or use of antibodies or small molecule drugs targeting the gene or gene product are useful in the treatment of ovarian, lung, stomach and breast cancers.

[1348] Panel 1.2 Summary: Ag1240 The highest exoression of this gene was detected in spinal cord. Therapeutic modulation of this gene, expressed protein and/or use of antibodies or small molecule drugs targeting the gene or gene product are useful in the treatment of disorders and injuries of the spinal cord.

[1349] Panel 4D Summary: Ag1240 The highest expression of this gene was seen in the B cell lymphoma Ramos (CT=29). This gene was highly expressed in activated T cells, particularly in activated T cells which have been cultured under conditions which skew their development into Th1, Th2 or Tr1 cells, but not in resting T cells. Therapeutic modulation of this gene, expressed protein and/or use of antibodies or small molecule drugs targeting the gene or gene product are useful in the treatment of inflammation resulting from T cell activation and T cell-mediated autoimmune diseases such as arthritis, Crohn's disease, asthma/allergy, diabetes and psoriasis. These therapeutics is also important in preventing organ rejection due to T cell activation.

[1350] AM. CG55752406 and CG55752-07: Glucosidase.

[1351] Expression of genes CG55752-06 and CG55752-07 were assessed using the primer-probe set Ag401, described in Table AMA. Results of the RTQ-PCR runs are shown in Tables AMB and AMC.

TABLE AMA
Probe Name Ag401

| | | | Start | SEQ ID |
|---|---|---|---|---|
| Primers | Sequences | Length | Position | No |
| Forward | 5′-ttgtgccaaaacatccatcct-3′ | 21 | 1896 | 1340 |
| Probe | TET-5′-agcctggagaagctctcactcaacattgc- | 29 | 1918 | 1341 |
| | 3′-TAMRA | | | |
| Reverse | 5′-tatgatgcggacctcccagt-3′ | 20 | 1952 | 1342 |

[1352] TABLE AMB
Panel 1.3D
Column A - Rel. Exp.(%) Ag401, Run 165518174

| Tissue Name | A | Tissue Name | A |
|---|---|---|---|
| Liver adenocarcinoma | 2.9 | Kidney (fetal) | 13.8 |
| Pancreas | 10.1 | Renal ca. 786-0 | 14.8 |
| Pancreatic ca. CAPAN 2 | 10.2 | Renal ca. A498 | 13.9 |
| Adrenal gland | 16.2 | Renal ca. RXF 393 | 18.2 |
| Thyroid | 18.9 | Renal ca. ACHN | 12.7 |
| Salivary gland | 24.7 | Renal ca. UO-31 | 12.2 |
| Pituitary gland | 20.2 | Renal ca. TK-10 | 5.7 |
| Brain (fetal) | 23.5 | Liver | 16.7 |
| Brain (whole) | 52.1 | Liver (fetal) | 90 |
| Brain (amygdala) | 16.2 | Liver ca. (hepatoblast) HepG2 | 9.6 |
| Brain (cerebellum) | 47.6 | Lung | 19.5 |
| Brain (hippocampus) | 54.3 | Lung (fetal) | 11.2 |
| Brain (substantia nigra) | 20.0 | Lung ca. (small cell) LX-1 | 18.7 |
| Brain (thalamus) | 41.5 | Lung ca. (small cell) NCI-H69 | 0.0 |
| Cerebral Cortex | 15.0 | Lung ca. (s.cell var.) SHP-77 | 10.9 |
| Spinal cord | 38.7 | Lung ca. (large cell) NCI-H460 | 19.5 |
| glio/astro U87-MG | 9.5 | Lung ca. (non-sm. cell) A549 | 1.6 |
| glio/astro U-118-MG | 49.7 | Lung ca. (non-s.cell) NCI-H23 | 9.3 |
| astrocytoma SW1783 | 10.4 | Lung ca. (non-s.cell) HOP-62 | 17.8 |
| neuro*; met SK-N-AS | 20.2 | Lung ca. (non-s.cl) NCI-H522 | 9.0 |
| astrocytoma SF-539 | 25.7 | Lung ca. (squam.) SW 900 | 4.5 |
| astrocytoma SNB-75 | 22.4 | Lung ca. (squam.) NCI-H596 | 3.1 |
| glioma SNB-19 | 25.9 | Mammary gland | 27.0 |
| glioma U251 | 59.9 | Breast ca.* (pl.ef) MCF-7 | 4.3 |
| glioma SF-295 | 15.4 | Breast ca.* (pl.ef) | 47.3 |
| | | MDA-MB-231 | |
| Heart (Fetal) | 0.5 | Breast ca.* (pl.ef) T47D | 6.4 |
| Heart | 14.0 | Breast ca. BT-549 | 12.9 |
| Skeletal muscle (Fetal) | 7.0 | Breast ca. MDA-N | 6.2 |
| Skeletal muscle | 100.0 | Ovary | 6.3 |
| Bone marrow | 33.9 | Ovarian ca. OVCAR-3 | 10.5 |
| Thymus | 32.1 | Ovarian ca. OVCAR-4 | 7.2 |
| Spleen | 27.9 | Ovarian ca. OVCAR-5 | 13.6 |
| Lymph node | 76.8 | Ovarian ca. OVCAR-8 | 4.6 |
| Colorectal | 38.7 | Ovarian ca. IGROV-1 | 2.5 |
| Stomach | 21.0 | Ovarian ca. (ascites) SK-OV-3 | 17.3 |
| Small intestine | 60.7 | Utems | 61.6 |
| Colon ca. SW480 | 7.6 | Placenta | 2.9 |
| Colon ca.* SW620 | 2.9 | Prostate | 17.8 |
| (SW480 met) | | | |
| Colon ca. HT29 | 0.8 | Prostate ca.* (bone met) PC-3 | 19.6 |
| Colon ca. HCT-116 | 3.6 | Testis | 50.7 |
| Colon ca. CaCo-2 | 3.1 | Melanoma Hs688(A).T | 9.5 |
| CC Well to Mod Diff | 7.9 | Melanoma* (met) Hs688(B).T | 15.8 |
| (OD03866) | | | |
| Colon ca. HCC-2998 | 10.3 | Melanoma UACC-62 | 7.6 |
| Gastric ca. (liver met) | 55.1 | Melanoma M14 | 89.5 |
| NCI-N87 | | | |
| Bladder | 22.2 | Melanoma LOX IMVI | 2.2 |
| Trachea | 17.4 | Melanoma* (met) SK-MEL-5 | 1.9 |
| Kidney | 19.5 | Adipose | 15.5 |

[1353] TABLE AMC
Panel 5 Islet
Column A - Rel. Exp.(%) Ag401, Run 304686255

| Tissue Name | A | Tissue Name | A |
|---|---|---|---|
| 97457 Patient-02go adipose | 1.5 | 94709 Donor 2 AM - A adipose | 16.8 |
| 97476 Patient-07sk skeletal muscle | 0.0 | 94710 Donor 2 AM - B adipose | 11.3 |
| 97477 Patient-07ut uterus | 2.8 | 94711 Donor 2 AM - C adipose | 14.2 |
| 97478 Patient-07pl placenta | 0.8 | 94712 Donor 2 AD - A adipose | 28.1 |
| 99167 Bayer Patient 1 | 0.0 | 94713 Donor 2 AD - B adipose | 50.7 |
| 97482 Patient-08ut uterus | 0.0 | 94714 Donor 2 AD - C adipose | 25.0 |
| 97483 Patient-08pl placenta | 2.2 | 94742 Donor 3 U - A Mesenchymal | 8.2 |
| | | Stem Cells | |
| 97486 Patient-09sk skeletal muscle | 10.7 | 94743 Donor 3 U - B Mesenchymal | 5.2 |
| | | Stem Cells | |
| 97487 Patient-09ut uterus | 7.8 | 94730 Donor 3 AM - A adipose | 33.4 |
| 97488 Patient-09pl placenta | 2.0 | 94731 Donor 3 AM - B adipose | 100.0 |
| 97492 Patient-10ut uterus | 7.0 | 94732 Donor 3 AM - C adipose | 52.5 |
| 97493 Patient-10pl placenta | 9.3 | 94733 Donor 3 AD - A adipose | 47.6 |
| 97495 Patient-11go adipose | 24.1 | 94734 Donor 3 AD - B adipose | 29.5 |
| 97496 Patient-11sk skeletal muscle | 8.2 | 94735 Donor 3 AD - C adipose | 10.7 |
| 97497 Patient-11ut uterus | 18.2 | 77138 Liver HepG2untreated | 46.3 |
| 97498 Patient-11pl placenta | 0.0 | 73556 Heart Cardiac stromal cells | 12.0 |
| | | (primary) | |
| 97500 Patient-12go adipose | 25.2 | 81735 Small Intestine | 34.6 |
| 97501 Patient-12sk skeletal muscle | 17.9 | 72409 Kidney Proximal Convoluted | 70.2 |
| | | Tubule | |
| 97502 Patient-12ut uterus | 16.2 | 82685 Small intestine Duodenum | 9.9 |
| 97503 Patient-12pl placenta | 6.0 | 90650 Adrenal Adrenocortical | 5.6 |
| | | adenoma | |
| 94721 Donor 2 U - A Mesenchymal | 25.2 | 72410 Kidney HRCE | 44.1 |
| 94722 Donor 2 U - B Mesenchymal | 9.5 | 72411 Kidney HRE | 14.5 |
| Stem Cells | | | |
| 94723 Donor 2 U - C Mesenchymal | 19.1 | 73139 Uterus Uterine smooth muscle | 37.1 |
| Stem Cells | | cells | |

[1354] Panel 1.3D Summary: Ag401 The highest expression of this gene was detected in skeletal muscle. It was expressed in a variety of metabolic tissues, including pancreas, adipose, adrenal, thyroid, pituitary, adult and fetal heart, adult and fetal skeletal muscle, and adult and fetal liver. This gene encodes an alpha-glucosidase. Alpha-glucosidase inhibitors are currently used in the treatment of Type 2 diabetes to decrease glucose absorption from the gut (Raptis S A, Dimitriadis G D. Oral hypoglycemic agents: insulin secretagogues, alpha-glucosidase inhibitors and insulin sensitizers. Exp Clin Endocrinol Diabetes. 2001; 109 Suppl 2:S265-87). Thus, this gene, encoded protein and/or use of small molecule targeting this gene or gene product is useful for the treatment of metabolic diseases, including obesity and Types 1 and 2 diabetes.

[1355] This gene was expressed in all regions of the central nervous system examined, including amygdala, hippocampus, substantia nigra, thalamus, cerebellum, cerebral cortex, and spinal cord. Therapeutic modulation of this gene, expressed protein and/or use of antibodies or small molecule drugs targeting the gene or gene product are useful in the treatment of central nervous system disorders, such as Alzheimer's disease, Parkinson's disease, epilepsy, multiple sclerosis, schizophrenia and depression.

[1356] Panel 5 Islet Summary: Ag401 The highest expression of this gene was detected during adipocyte differention (CT=32). This gene was upregulated during adipocyte differentiation. It was expressed in a variety of metabolic tissues, including adipose, heart, small intestine, kidney, uterus, skeletal muscle. Therapeutic modulation of this gene, expressed protein and/or use of antibodies or small molecule drugs targeting the gene or gene product are useful in the treatment of obesity and diabetes.

[1357] AN. CG55778-03 and CG55778-06: Aldo-Keto Reductase.

[1358] Expression of gene CG55778-03 and CG55778-06 were assessed using the primer-probe set Ag7193, described in Table ANA. Results of the RTQ-PCR runs are shown in Table ANB. CG55778-03 and CG55778-06 represent full length physical clones.

TABLE ANA
Probe Name Ag7193

| | | | Start | SEQ ID |
|---|---|---|---|---|
| Primers | Sequences | Length | Position | No |
| Forward | 5′-gacacgtgggagattttgatc-3′ | 21 | 473 | 1343 |
| Probe | TET-5′-agtgatccccggatctatcaccccaa-3′- | 26 | 520 | 1344 |
| | TAMRA | | | |
| Reverse | 5′-acacctggatattctctttaatgtga-3′ | 26 | 547 | 1345 |

[1359] TABLE ANB
General_screening_panel_v1.7
Column A - Rel. Exp.(%) Ag7193, Run 318040434

| Tissue Name | A | Tissue Name | A |
|---|---|---|---|
| Adipose | 5.0 | Gastric ca. (liver met.) NCI-N87 | 0.0 |
| HUVEC | 1.9 | Stomach | 0.2 |
| Melanoma* Hs688(A).T | 0.0 | Colon ca. SW-948 | 0.4 |
| Melanoma* Hs688(B).T | 4.5 | Colon ca. SW480 | 0.0 |
| Melanoma (met) SK-MEL-5 | 0.5 | Colon ca. (SW480 met) SW620 | 12.9 |
| Testis | 3.7 | Colon ca. HT29 | 1.6 |
| Prostate ca. (bone met) PC-3 | 0.0 | Colon ca. HCT-116 | 1.2 |
| Prostate ca. DU145 | 1.4 | Colon cancer tissue | 0.0 |
| Prostate pool | 0.5 | Colon ca. SW1116 | 0.0 |
| Uterus pool | 0.6 | Colon ca. Colo-205 | 0.0 |
| Ovarian ca. OVCAR-3 | 0.1 | Colon ca. SW-48 | 1.8 |
| Ovarian ca. (ascites) SK-OV-3 | 0.2 | Colon | 1.1 |
| Ovarian ca. OVCAR-4 | 2.0 | Small Intestine | 0.3 |
| Ovarian ca. OVCAR-5 | 2.7 | Fetal Heart | 0.9 |
| Ovarian ca. IGROV-1 | 0.0 | Heart | 0.2 |
| Ovarian ca. OVCAR-8 | 3.5 | Lymph Node Pool | 0.3 |
| Ovary | 1.2 | Lymph Node pool 2 | 2.1 |
| Breast ca. MCF-7 | 2.3 | Fetal Skeletal Muscle | 0.8 |
| Breast ca. MDA-MB-231 | 3.1 | Skeletal Muscle pool | 0.1 |
| Breast ca. BT 549 | 0.4 | Skeletal Muscle | 0.6 |
| Breast ca. T47D | 1.1 | Spleen | 1.4 |
| 113452 mammary gland | 0.4 | Thymus | 0.8 |
| Trachea | 2.4 | CNS cancer (glio/astro) SF-268 | 0.0 |
| Lung | 9.5 | CNS cancer (glio/astro) T98G | 0.0 |
| Fetal Lung | 2.1 | CNS cancer (neuro;met) SK-N-AS | 0.0 |
| Lung ca. NCI-N417 | 0.0 | CNS cancer (astro) SF-539 | 0.0 |
| Lung ca. LX-1 | 3.0 | CNS cancer (astro) SNB-75 | 0.0 |
| Lung ca. NCI-H146 | 0.0 | CNS cancer (glio) SNB-19 | 0.0 |
| Lung ca. SHP-77 | 0.9 | CNS cancer (glio) SF-295 | 0.4 |
| Lung ca. NCI-H23 | 0.5 | Brain (Amygdala) | 0.8 |
| Lung ca. NCI-H460 | 0.3 | Brain (Cerebellum) | 5.3 |
| Lung ca. HOP-62 | 10.0 | Brain (Fetal) | 8.1 |
| Lung ca. NCI-H522 | 100.0 | Brain (Hippocampus) | 1.1 |
| Lung ca. DMS-114 | 7.6 | Cerebral Cortex pool | 1.0 |
| Liver | 0.2 | Brain (Substantia nigra) | 0.4 |
| Fetal Liver | 0.6 | Brain (Thalamus) | 0.8 |
| Kidney pool | 2.7 | Brain (Whole) | 4.6 |
| Fetal Kidney | 1.2 | Spinal Cord | 0.4 |
| Renal ca. 786-0 | 0.1 | Adrenal Gland | 1.7 |
| Renal ca. A498 | 1.2 | Pituitary Gland | 1.3 |
| Renal ca. ACHN | 0.2 | Salivary Gland | 0.8 |
| Renal ca. UO-31 | 0.2 | Thyroid | 4.6 |
| Renal ca. TK-10 | 0.0 | Pancreatic ca. PANC-1 | 0.3 |
| Bladder | 1.8 | Pancreas pool | 0.3 |

[1360] General_screening_panel_v1.7 Summary: Ag7193 Among tissues with metabolic or endocrine function, this gene was expressed at high to moderate levels in pancreas, adipose, adrenal gland, thyroid, pituitary gland, skeletal muscle, heart, liver and the gastrointestinal tract. Therapeutic modulation of this gene, expressed protein and/or use of antibodies or small molecule drugs targeting the gene or gene product are useful in the treatment of endocrine/metabolically related diseases, such as obesity and diabetes.

[1361] AO. CG55794-03: Novel Carboxypeptidase B Like Protein.

[1362] Expression of gene CG55794-03 was assessed using the primer-probe sets Ag2622 and Ag3953, described in Tables AOA and AOB. Results of the RTQ-PCR runs are shown in Tables AOC, AOD, AOE and AOF. This gene represents a full-length physical clone.

TABLE AOA
Probe Name Ag2622

| | | | Start | SEQ ID |
|---|---|---|---|---|
| Primers | Sequences | Length | Position | No |
| Forward | 5′-catcagggtcttcaagagattg-3′ | 22 | 909 | 1346 |
| Probe | TET-5′-ccgagacattgggattcccttctcat-3′- | 26 | 934 | 1347 |
| | TAMRA | | | |
| Reverse | 5′-acaaacccatatgttccactgt-3′ | 22 | 978 | 1348 |

[1363] TABLE AOB
Probe Name Ag3953

| | | | Start | SEQ ID |
|---|---|---|---|---|
| Primers | Sequences | Length | Position | No |
| Forward | 5′-acagtggaacatatgggtttgt-3′ | 22 | 978 | 1349 |
| Probe | TET-5′-agaagctcagatccagcccacctgt-3′- | 25 | 1006 | 1350 |
| | TAMRA | | | |
| Reverse | 5′-catacacatcatccaggactga-3′ | 22 | 1055 | 1351 |

[1364] TABLE AOC
Panel 1.3D
Column A - Rel. Exp.(%) Ag2622, Run 162554681
Column B - Rel. Exp.(%) Ag2622, Run 165672349

| Tissue Name | A | B | Tissue Name | A | B |
|---|---|---|---|---|---|
| Liver adenocarcinoma | 0.0 | 0.0 | Kidney (fetal) | 10.5 | 0.0 |
| Pancreas | 0.0 | 0.0 | Renal ca. 786-0 | 0.0 | 0.0 |
| Pancreatic ca. CAPAN 2 | 20.0 | 10.3 | Renal ca. A498 | 7.0 | 22.2 |
| Adrenal gland | 7.4 | 33.7 | Renal ca. RXF 393 | 0.0 | 8.5 |
| Thyroid | 46.7 | 7.7 | Renal ca. ACHN | 0.0 | 0.0 |
| Salivary gland | 0.0 | 21.2 | Renal ca. UO-31 | 0.0 | 0.0 |
| Pituitary gland | 14.8 | 40.9 | Renal ca. TK-10 | 0.0 | 0.0 |
| Brain (fetal) | 13.8 | 0.0 | Liver | 0.0 | 0.0 |
| Brain (whole) | 60.3 | 75.3 | Liver (fetal) | 6.8 | 0.0 |
| Brain (amygdala) | 61.6 | 28.9 | Liver ca. (hepatoblast) HepG2 | 0.0 | 0.0 |
| Brain (cerebellum) | 6.2 | 0.0 | Lung | 19.8 | 10.8 |
| Brain (hippocampus) | 47.3 | 97.9 | Lung (fetal) | 23.2 | 48.6 |
| Brain (substantia nigra) | 28.5 | 82.9 | Lung ca. (small cell) LX-1 | 0.0 | 0.0 |
| Brain (thalamus) | 54.0 | 100.0 | Lung ca. (small cell) NCI-H69 | 0.0 | 0.0 |
| Cerebral Cortex | 0.0 | 27.7 | Lung ca. (s.cell var.) SHP-77 | 0.0 | 0.0 |
| Spinal cord | 77.4 | 28.7 | Lung ca. (large cell) NCI-H460 | 0.0 | 0.0 |
| glio/astro U87-MG | 0.0 | 0.0 | Lung ca. (non-sm. cell) A549 | 0.0 | 0.0 |
| gilo/astro U-118-MG | 6.5 | 10.7 | Lung ca. (non-s.cell) NCI-H23 | 0.0 | 23.7 |
| astrocytoma SW1783 | 8.3 | 0.0 | Lung ca. (non-s.cell) HOP-62 | 0.0 | 10.2 |
| neuro*; met SK-N-AS | 0.0 | 0.0 | Lung ca. (non-s.cl) NCI-H522 | 0.0 | 14.8 |
| astrocytoma SF-539 | 0.0 | 0.0 | Lung ca. (squam.) SW 900 | 0.0 | 26.4 |
| astrocytoma SNB-75 | 7.6 | 19.8 | Lung ca. (squam.) NCI-H596 | 0.0 | 0.0 |
| glioma SNB-19 | 13.2 | 14.4 | Mammary gland | 13.0 | 0.0 |
| glionia U251 | 7.5 | 0.0 | Breast ca.* (pl.ef) MCF-7 | 0.0 | 0.0 |
| glioma SF-295 | 0.0 | 0.0 | Breast ca.* (pl.ef) MDA-MB | 0.0 | 0.0 |
| | | | 231 | | |
| Heart (Fetal) | 0.0 | 0.0 | Breast ca.* (pl.ef) T47D | 0.0 | 0.0 |
| Heart | 0.0 | 0.0 | Breast ca. BT-549 | 2.6 | 27.2 |
| Skeletal muscle (Fetal) | 7.1 | 11.3 | Breast ca. MDA-N | 0.0 | 0.0 |
| Skeletal muscle | 84.7 | 57.0 | Ovary | 24.1 | 0.0 |
| Bone marrow | 0.0 | 0.0 | Ovarian ca. OVCAR-3 | 0.0 | 5.8 |
| Thymus | 19.6 | 0.0 | Ovarian ca. OVCAR-4 | 0.0 | 0.0 |
| Spleen | 0.0 | 13.2 | Ovarian ca. OVCAR-5 | 0.0 | 0.0 |
| Lymph node | 0.0 | 0.0 | Ovarian ca. OVCAR-8 | 0.0 | 0.0 |
| Colorectal | 5.8 | 28.3 | Ovarian ca. IGROV-l | 0.0 | 0.0 |
| Stomach | 0.0 | 0.0 | Ovarian ca. (ascites) SK-OV-3 | 11.3 | 62.9 |
| Small intestine | 7.6 | 24.5 | Uterus | 0.0 | 33.9 |
| Colon ca. SW480 | 0.0 | 0.0 | Placenta | 0.0 | 0.0 |
| Colon ca.* SW620 (SW480 met) | 0.0 | 10.2 | Prostate | 13.3 | 0.0 |
| Colon ca. HT29 | 0.0 | 0.0 | Prostate ca.* (bone met) PC-3 | 0.0 | 0.0 |
| Colon ca. HCT-116 | 19.9 | 0.0 | Testis | 22.2 | 23.0 |
| Colon ca. CaCo-2 | 0.0 | 0.0 | Melanoma Hs688(A).T | 0.0 | 0.0 |
| CC Well to Mod Diff | 16.8 | 9.0 | Melanoma* (met) Hs688(B).T | 0.0 | 0.0 |
| (ODO3866) | | | | | |
| Colon ca. HCC-2998 | 12.5 | 0.0 | Melanoma UACC-62 | 0.0 | 0.0 |
| Gastric ca. (liver met) NCI-N87 | 27.0 | 13.3 | Melanoma M14 | 0.0 | 0.0 |
| Bladder | 28.9 | 12.4 | Melanoma LOX IMVI | 0.0 | 0.0 |
| Trachea | 13.6 | 0.0 | Melanoma* (met) SK-MEL-5 | 0.0 | 0.0 |
| Kidney | 100.0 | 28.5 | Adipose | 14.0 | 9.7 |

[1365] TABLE AOD
Panel 2D
Column A - Ret. Exp.(%) Ag2622, Run 163578215
Column B - Ret. Exp.(%) Ag2622, Run 165910584

| Tissue Name | A | B | Tissue Name | A | B |
|---|---|---|---|---|---|
| Normal Colon | 7.3 | 20.4 | Kidney Margin 8120608 | 0.8 | 0.0 |
| CC Well to Mod Diff (ODO3866) | 0.4 | 0.0 | Kidney Cancer 8120613 | 0.0 | 1.4 |
| CC Margin (ODO3866) | 2.7 | 2.7 | Kidney Margin 8120614 | 1.6 | 3.3 |
| CC Gr.2 rectosigmoid (ODO3868) | 3.3 | 0.0 | Kidney Cancer 9010320 | 0.9 | 1.9 |
| CC Margin (ODO3868) | 0.5 | 6.6 | Kidney Margin 9010321 | 5.2 | 12.4 |
| CC Mod Diff (ODO3920) | 0.0 | 0.0 | Normal Uterus | 0.5 | 0.0 |
| CC Margin (ODO3920) | 3.4 | 10.4 | Uterine Cancer 064011 | 4.6 | 9.4 |
| CC Gr.2 ascend colon (ODO3921) | 2.8 | 4.7 | Normal Thyroid | 8.2 | 9.7 |
| CC Margin (ODO3921) | 1.9 | 5.5 | Thyroid Cancer | 1.2 | 10.2 |
| CC from Partial Hepatectomy | 1.2 | 2.0 | Thyroid Cancer A302152 | 2.8 | 2.1 |
| (ODO4309) Mets | | | | | |
| Liver Margin (ODO4309) | 1.0 | 4.5 | Thyroid Margin A302153 | 7.4 | 19.2 |
| Colon mets to lung (OD04451-01) | 0.0 | 0.0 | Normal Breast | 1.9 | 4.7 |
| Lung Margin (OD04451-02) | 0.7 | 1.8 | Breast Cancer | 4.7 | 6.1 |
| Normal Prostate 6546-1 | 30.4 | 27.7 | Breast Cancer (OD04590-01) | 1.3 | 5.2 |
| Prostate Cancer (OD04410) | 7.9 | 15.9 | Breast Cancer Mets | 100.0 | 4.0 |
| | | | (OD04590-03) | | |
| Prostate Margin (OD04410) | 13.9 | 47.3 | Breast Cancer Metastasis | 17.3 | 33.9 |
| Prostate Cancer (OD04720-01) | 5.5 | 8.7 | Breast Cancer | 16.6 | 14.3 |
| Prostate Margin (OD04720-02) | 9.2 | 37.6 | Breast Cancer | 8.2 | 39.8 |
| Normal Lung | 4.6 | 5.3 | Breast Cancer 9100266 | 1.0 | 2.4 |
| Lung Met to Muscle (ODO4286) | 0.7 | 2.6 | Breast Margin 9100265 | 0.5 | 2.0 |
| Muscle Margin (ODO4286) | 5.3 | 19.6 | Breast Cancer A209073 | 0.0 | 17.0 |
| Lung Malignant Cancer | 2.4 | 3.7 | Breast Margin A209073 | 2.3 | 5.3 |
| (OD03126) | | | | | |
| Lung Margin (OD03126) | 4.6 | 7.2 | Normal Liver | 3.1 | 9.3 |
| Lung Cancer (OD04404) | 1.2 | 1.7 | Liver Cancer | 0.3 | 0.0 |
| Lung Margin (OD04404) | 1.5 | 3.6 | Liver Cancer 1025 | 0.8 | 0.0 |
| Lung Cancer (OD04565) | 0.0 | 0.0 | Liver Cancer 1026 | 0.0 | 0.0 |
| Lung Margin (OD04565) | 0.0 | 1.5 | Liver Cancer 6004-T | 0.4 | 4.6 |
| Lung Cancer (OD04237-01) | 3.9 | 17.4 | Liver Tissue 6004-N | 10.0 | 0.0 |
| Lung Margin (OD04237-02) | 0.6 | 6.5 | Liver Cancer 6005-T | 0.5 | 10.0 |
| Ocular Mel Met to Liver | 0.0 | 2.4 | Liver Tissue 6005-N | 0.0 | 0.0 |
| (ODO4310) | | | | | |
| Liver Margin (ODO4310) | 1.4 | 1.3 | Normal Bladder | 2.0 | 10.0 |
| Melanoma Metastasis | 1.0 | 2.5 | Bladder Cancer | 0.6 | 0.0 |
| Lung Margin (OD04321) | 0.9 | 8.5 | Bladder Cancer | 6.9 | 9.0 |
| Normal Kidney | 34.4 | 100.0 | Bladder Cancer (OD04718- | 1.0 | 1.7 |
| | | | 01) | | |
| Kidney Ca, Nuclear grade 2 | 4.8 | 16.5 | Bladder Normal Adjacent | 3.1 | 10.2 |
| (OD04338) | | | (OD04718-03) | | |
| Kidney Margin (OD04338) | 3.9 | 27.4 | Normal Ovary | 1.6 | 4.2 |
| Kidney Ca Nuclear grade 1/2 | 10.81 | 26.4 | Ovarian Cancer | 2.2 | 8.3 |
| (OD04339) | | | | | |
| Kidney Margin (OD04339) | 21.8 | 55.1 | Ovarian Cancer (OD04768- | 0.0 | 0.0 |
| | | | 07) | | |
| Kidney Ca, Clear cell type | 0.8 | 1.8 | Ovary Margin (OD04768-08) | 0.0 | 3.2 |
| (OD04340) | | | | | |
| Kidney Margin (OD04340) | 11.8 | 41.2 | Normal Stomach | 2.1 | 0.0 |
| Kidney Ca, Nuclear grade 3 | 0.0 | 0.0 | Gastric Cancer 9060358 | 0.0 | 0.0 |
| (OD04348) | | | | | |
| Kidney Margin (OD04348) | 17.9 | 28.3 | Stomach Margin 9060359 | 0.0 | 4.5 |
| Kidney Cancer (OD04622-01) | 1.9 | 2.3 | Gastric Cancer 9060395 | 2.0 | 0.0 |
| Kidney Margin (OD04622-03) | 4.6 | 2.4 | Stomach Margin 9060394 | 3.4 | 10.8 |
| Kidney Cancer (OD04450-01) | 2.1 | 6.5 | Gastric Cancer 9060397 | 1.3 | 0.0 |
| Kidney Margin (OD04450-03) | 16.5 | 47.3 | Stomach Margin 9060396 | 0.0 | 2.7 |
| Kidney Cancer 8120607 | 0.6 | 0.0 | Gastric Cancer 064005 | 1.8 | 13.6 |

[1366] TABLE AOE
Panel 4D
Column A - Rel. Exp.(%) Ag2622, Run 162554700
Column B - Rel. Exp.(%) Ag2622, Run 165806297

| Tissue Name | A | B | Tissue Name | A | B |
|---|---|---|---|---|---|
| Secondary Th1 act | 0.0 | 0.1 | HUVEC IL-1beta | 0.0 | 0.0 |
| Secondary Th2 act | 0.1 | 0.0 | HUVEC IFN gamma | 0.3 | 0.0 |
| Secondary Tr1 act | 0.0 | 0.0 | HUVEC TNF alpha + IFN gamma | 0.0 | 0.0 |
| Secondary Th1 rest | 0.0 | 0.0 | HUVEC TNF alpha + IL4 | 0.0 | 0.0 |
| Secondary Th2 rest | 0.0 | 0.0 | HUVEC IL-11 | 0.0 | 0.0 |
| Secondary Tr1 rest | 0.0 | 0.0 | Lung Microvascular EC none | 0.4 | 0.1 |
| Primary Th1 act | 0.0 | 0.0 | Lung Microvascular EC TNFalpha + | 0.0 | 0.0 |
| Primary Th2 act | 0.2 | 0.0 | Microvascular Dermal EC none | 0.0 | 0.0 |
| Primary Tr1 act | 0.0 | 0.0 | Microsvasular Dermal EC TNFalpha | 0.1 | 0.0 |
| | | | + IL-1beta | | |
| Primary Th1 rest | 0.0 | 0.0 | Bronchial epithelium TNFalpha + | 0.0 | 0.1 |
| | | | IL1beta | | |
| Primary Th2 rest | 0.1 | 0.0 | Small airway epithelium none | 0.0 | 0.1 |
| Primary Tr1 rest | 0.2 | 0.0 | Small airway epithelium TNFalpha + | 1.1 | 0.4 |
| | | | IL-1beta | | |
| CD45RA CD4 lymphocyte | 0.0 | 0.0 | Coronery artery SMG rest | 0.0 | 0.0 |
| act | | | | | |
| CD45RO CD4 lymphocyte | 0.1 | 0.1 | Coronery artery SMC TNFalpha + IL- | 0.0 | 0.0 |
| | | | 1beta | | |
| CD8 lymphocyte act | 0.0 | 0.0 | Astrocytes rest | 0.0 | 0.0 |
| Secondary CD8 lymphocyte | 0.0 | 0.0 | Astrocytes TNFalpha + IL-1beta | 0.2 | 0.2 |
| rest | | | | | |
| Secondary CD8 lymphocyte | 0.0 | 0.0 | KU-812 (Basophil) rest | 0.0 | 0.0 |
| act | | | | | |
| CD4 lymphocyte none | 0.2 | 0.0 | KU-812 (Basophil) PMA/ionomycin | 0.1 | 0.0 |
| 2ry Th1/Th2/Tr1 anti-CD95 | 0.0 | 0.0 | CCD1106 (Keratinocytes) none | 0.0 | 0.0 |
| CH11 | | | | | |
| LAK cells rest | 0.0 | 0.0 | CCD1106 (Keratinocytes) TNFalpha | 0.0 | 0.1 |
| | | | + IL-1beta | | |
| LAK cells IL-2 | 0.0 | 0.0 | Liver cirrhosis | 0.8 | 0.6 |
| LAK cells IL-2 + IL-12 | 0.0 | 0.0 | Lupus kidney | 0.2 | 0.4 |
| LAK cells IL-2 + IFN gamma | 0.1 | 0.1 | NCI-H292 none | 0.0 | 0.0 |
| LAK cells IL-2 + IL-18 | 0.1 | 0.0 | NCI-H292 IL-4 | 0.0 | 0.0 |
| LAK cells PMA/ionomycin | 0.0 | 0.0 | NCI-H292 IL-9 | 0.0 | 0.1 |
| NK Cells IL-2 rest | 0.1 | 0.0 | NCI-H292 IL-13 | 0.0 | 0.0 |
| Two Way MLR 3 day | 0.0 | 0.0 | NCI-H292 IFN gamma | 0.1 | 0.0 |
| Two Way MLR 5 day | 0.0 | 0.0 | HPAEC none | 0.1 | 0.0 |
| Two Way MLR 7 day | 0.0 | 0.0 | HPAEC TNF alpha + IL-1 beta | 0.0 | 0.0 |
| PBMC rest | 0.0 | 0.0 | Lung fibroblast none | 0.1 | 0.0 |
| PBMC PWM | 0.3 | 0.1 | Lung fibroblast TNF alpha + IL-1 beta | 0.1 | 0.0 |
| PBMC PHA-L | 0.1 | 0.0 | Lung fibroblast IL-4 | 0.0 | 0.1 |
| Ramos (B cell) none | 0.0 | 0.0 | Lung fibroblast IL-9 | 0.4 | 0.1 |
| Ramos (B cell) ionomycin | 0.0 | 0.0 | Lung fibroblast IL-13 | 0.1 | 0.0 |
| B lymphocytes PWM | 0.1 | 0.0 | Lung fibroblast IFN gamma | 0.5 | 0.1 |
| B lymphocytes CD40L and | 0.0 | 0.0 | Dermal fibroblast CCD1070 rest | 0.1 | 0.1 |
| IL-4 | | | | | |
| EOL-1 dbcAMP | 0.0 | 0.0 | Dermal fibroblast CCD1070 TNF | 0.0 | 0.0 |
| | | | alpha | | |
| EOL-1 dbcAMP | 0.2 | 0.1 | Dermal fibroblast CCD1070 IL-1 beta | 0.0 | 0.0 |
| PMA/ionomycin | | | | | |
| Dendritic cells none | 0.0 | 0.0 | Dermal fibroblast IFN gamma | 0.1 | 0.0 |
| Dendritic cells LPS | 0.0 | 0.1 | Dermal fibroblast IL-4 | 0.0 | 0.1 |
| Dendritic cells anti-CD40 | 0.0 | 0.0 | IBD Colitis 2 | 0.0 | 0.0 |
| Monocytes rest | 0.0 | 0.0 | IBD Crohn's | 1.0 | 2.2 |
| Monocytes LPS | 0.0 | 0.0 | Colon | 100.0 | 100.0 |
| Macrophages rest | 0.0 | 0.0 | Lung | 0.2 | 0.0 |
| Macrophages LPS | 0.0 | 0.0 | Thymus | 1.3 | 0.9 |
| HUVEC none | 10.0 | 0.0 | Kidney | 0.5 | 0.0 |
| HUVEC starved | 0.0 | 0.0 | | | |

[1367] TABLE AOF
Panel 5 Islet
Column A - Rel. Exp.(%) Ag3953, Run 223846464

| Tissue Name | A | Tissue Name | A |
|---|---|---|---|
| 97457 Patient-02go adipose | 0.0 | 94709 Donor 2 AM - A adipose | 0.0 |
| 97476 Patient-07sk skeletal muscle | 0.0 | 94710 Donor 2 AM - B adipose | 0.0 |
| 97477 Patient-07ut uterus | 0.0 | 94711 Donor 2 AM - C adipose | 0.0 |
| 97478 Patient-07pl placenta | 0.0 | 94712 Donor 2 AD - A adipose | 0.0 |
| 99167 Bayer Patient 1 | 0.0 | 94713 Donor 2 AD - B adipose | 0.0 |
| 97482 Patient-08ut uterus | 0.0 | 94714 Donor 2 AD - C adipose | 0.0 |
| 97483 Patient-08pl placenta | 3.7 | 94742 Donor 3 U - A Mesenchymal | 0.0 |
| | | Stem Cells | |
| 97486 Patient-09sk skeletal muscle | 0.0 | 94743 Donor 3 U - B Mesenchymal | 0.0 |
| | | Stem Cells | |
| 97487 Patient-09ut uterus | 3.8 | 94730 Donor 3 AM - A adipose | 4.4 |
| 97488 Patient-09pl placenta | 0.0 | 94731 Donor 3 AM - B adipose | 0.0 |
| 97492 Patient-10ut uterus | 0.0 | 94732 Donor 3 AM - C adipose | 0.0 |
| 97493 Patient-10pl placenta | 0.0 | 94733 Donor 3 AD - A adipose | 0.0 |
| 97495 Patient-11go adipose | 0.0 | 94734 Donor 3 AD - B adipose | 0.0 |
| 97496 Patient-11sk skeletal muscle | 3.3 | 94735 Donor 3 AD - C adipose | 3.6 |
| 97497 Patient-11ut uterus | 0.0 | 77138 Liver HepG2untreated | 0.0 |
| 97498 Patient-11pl placenta | 4.0 | 73556 Heart Cardiac stromal cells | 0.0 |
| | | (primary) | |
| 97500 Patient-12go adipose | 4.2 | 81735 Small Intestine | 100.0 |
| 97501 Patient-12sk skeletal muscle | 3.5 | 72409 Kidney Proximal Convoluted | 0.0 |
| | | Tubule | |
| 97502 Patient-12ut uterus | 0.0 | 82685 Small intestine Duodenum | 0.0 |
| 97503 Patient-12pl placenta | 0.0 | 90650 Adrenal Adrenocortical | 0.0 |
| | | adenoma | |
| 94721 Donor 2 U - A Mesenchymal | 0.0 | 72410 Kidney HRCE | 0.0 |
| Stem Cells | | | |
| 94722 Donor 2 U - B Mesenchymal | 4.0 | 72411 Kidney HRE | 0.0 |
| Stem Cells | | | |
| 94723 Donor 2 U - C Mesenchymal | 0.0 | 73139 Uterus Uterine smooth muscle | 0.0 |
| Stem Cells | | cells | |

[1368] Panel 1.3D Summary: Ag2622 The highest expression of this gene was detected in the brain and the kidney. There was significantly lower expression in the brain cancer cell lines than normal brain samples. This indicates that downregulation of this gene is important in cell proliferation. Hence this expression profile is useful as a diagnostic marker for brain cancer.

[1369] This gene was also expressed at low levels in the CNS. Carboxypeptidase is believed to have a role in the degradation of APP and A-beta, the major component of senile plaques in Alzheimer's disease (Matsumoto A, Itoh K, Matsumoto R. A novel carboxypeptidase B that processes native beta-amyloid precursor protein is present in human hippocampus. Eur J Neurosci 2000 January; 12(1):227-38). Therapeutic modulation of this gene, expressed protein and/or use of antibodies or small molecule drugs targeting the gene or gene product are useful in the treatment of Alzheimer's disease.

[1370] Panel 2D Summary: Ag2622 This gene was expressed at low levels in the tissues. There was increased expression in normal prostate and kidney compared to the adjacent tumor tissues. There was also increased expression in breast cancer tissues compared to normal breast tissue. Hence, expression of this gene useful as a diagnostic marker in breast, prostate and kidney cancers. Therapeutic modulation of this gene, expressed protein and/or use of antibodies or small molecule drugs targeting the gene or gene product are useful in the treatment of breast, prostate and kidney cancer.

[1371] Panel 4D Summary: Ag2622 This gene encoding a putative carboxypeptidase, was expressed in the colon (CT=25-27) and down regulated in colon tissue isolated from Crohn's and colitis patients (CTs>31). The carboxypeptidase family of enzymes has been found in the colon and is associated with colon disease (Sommer H, Schweisfurth H, Schulz M. Serum angiotensin-1-converting enzyme and carboxypeptidase N in Crohn's disease and ulcerative colitis. Enzyme 1986; 35(4):181-8). Therapeutic modulation of this gene, expressed protein and/or use of antibodies or small molecule drugs targeting the gene or gene product are useful in the treatment of IBD.

[1372] Panel 5 Islet Summary: Ag3953 This gene, a carboxypeptidase B1 homolog, showed moderate expression in small intestine (CT=32.6). Carboxypeptidase B1 is an endocrine tissue-specific protein and is a useful serum marker for acute pancreatitis and dysfunction of pancreatic transplants (Yamamoto, K. K.; Pousette, A.; Chow, P.; Wilson, H.; El Shami, S.; French, C. K. Isolation of a cDNA encoding a human serum marker for acute pancreatitis: identification of pancreas-specific protein as pancreatic procarboxypeptidase B. J. Biol. Chem. 1992 267: 2575-2581 PMID: 1370825). This class of peptidase has been implicated in hormone maturation and/or degradation of secreted peptides such as insulin, GLP-1, and PACAP. PACAP latter has a major role in metabolic processes. Several carboxypeptidases, like CPE or PC1, have been shown to be involved in development of diabetes and obesity. Therapeutic modulation of this gene, expressed protein and/or use of antibodies or small molecule drugs targeting the gene or gene product are useful in the treatment of diabetes and also, diseases associated with the GI tract and metabolism.

[1373] AP. CG55806-04: Factor-IX.

[1374] Expression of gene CG55806-04 was assessed using the primer-probe set Ag2613, described in Table APA. Results of the RTQ-PCR runs are shown in Tables APB, APC and APD.

TABLE APA
Probe Name Ag2613

| | | | Start | SEQ ID |
|---|---|---|---|---|
| Primers | Sequences | Length | Position | No |
| Forward | 5′-agccacatgtcttcgatctaca-3′ | 22 | 253 | 1352 |
| Probe | TET-5′-acaacatgttctgtgctggcttccat-3′- | 26 | 211 | 1353 |
| | TAMRA | | | |
| Reverse | 5′-cccactatctccttgacatgaa-3′ | 22 | 175 | 1354 |

[1375] TABLE APB
Panel 1.3D
Column A - Rel. Exp.(%) Ag2613, Run 165672326

| Tissue Name | A | Tissue Name | A |
|---|---|---|---|
| Liver adenocarcinoma | 0.0 | Kidney (fetal) | 10.7 |
| Pancreas | 0.0 | Renal ca. 786-0 | 0.0 |
| Pancreatic ca. CAPAN 2 | 0.0 | Renal ca. A498 | 0.0 |
| Adrenal gland | 0.0 | Renal ca. RXF 393 | 0.0 |
| Thyroid | 0.0 | Renal ca. ACHN | 0.0 |
| Salivary gland | 0.0 | Renal ca. UO-31 | 0.0 |
| Pituitary gland | 0.0 | Renal ca. TK-10 | 0.0 |
| Brain (fetal) | 0.0 | Liver | 100.0 |
| Brain (whole) | 0.0 | Liver (fetal) | 76.3 |
| Brain (amygdala) | 0.0 | Liver ca. (hepatoblast) HepG2 | 0.0 |
| Brain (cerebellum) | 0.0 | Lung | 0.0 |
| Brain (hippocampus) | 0.0 | Lung (fetal) | 0.0 |
| Brain (substantia nigra) | 0.0 | Lung ca. (small cell) LX-1 | 0.0 |
| Brain (thalamus) | 0.0 | Lung ca. (small cell) NCI-H69 | 0.0 |
| Cerebral Cortex | 0.0 | Lung ca. (s.cell var.) SHP-77 | 0.3 |
| Spinal cord | 0.0 | Lung ca. (large cell) NCI-H460 | 0.0 |
| glio/astro U87-MG | 0.0 | Lung ca. (non-sm. cell) A549 | 0.0 |
| glio/astro U-118-MG | 0.0 | Lung ca. (non-s.cell) NCI-H23 | 0.0 |
| astrocytoma SW1783 | 0.0 | Lung ca. (non-s.cell) HOP-62 | 0.0 |
| neuro*; met SK-N-AS | 0.0 | Lung ca. (non-s.cl) NCI-H522 | 0.0 |
| astTocytoma SF-539 | 0.0 | Lung ca. (squam.) SW 900 | 0.0 |
| astrocytoma SNB-75 | 0.0 | Lung ca. (squam.) NCI-H596 | 0.0 |
| glioma SNB-19 | 0.0 | Mammary gland | 0.0 |
| glioma U251 | 0.0 | Breast ca.* (pl.ef) MCF-7 | 0.0 |
| glioma SF-295 | 0.0 | Breast ca.* (pl.ef) | 0.2 |
| | | MDA-MB-231 | |
| Heart (Fetal) | 0.0 | Breast ca.* (pl.ef) T47D | 0.0 |
| Heart | 0.0 | Breast ca. BT-549 | 0.0 |
| Skeletal muscle (Fetal) | 0.0 | Breast ca. MDA-N | 0.0 |
| Skeletal muscle | 0.0 | Ovary | 0.0 |
| Bone marrow | 0.0 | Ovarian ca. OVCAR-3 | 0.0 |
| Thymus | 0.0 | Ovarian ca. OVCAR-4 | 0.0 |
| Spleen | 0.0 | Ovarian ca. OVCAR-5 | 0.0 |
| Lymph node | 0.0 | Ovarian ca. OVCAR-8 | 0.0 |
| Colorectal | 0.0 | Ovarian ca. IGROV-1 | 0.0 |
| Stomach | 0.0 | Ovarian ca. (ascites) SK-OV-3 | 0.0 |
| Small intestine | 0.0 | Uterus | 0.0 |
| Colon ca. SW480 | 0.0 | Placenta | 0.0 |
| Colon ca.* SW620 | 0.0 | Prostate | 0.0 |
| (SW480 met) | | | |
| Colon ca. HT29 | 0.0 | Prostate ca.* (bone met) PC-3 | 0.0 |
| Colon ca. HCT-116 | 0.0 | Testis | 0.0 |
| Colon ca. CaCo-2 | 0.0 | Melanoma Hs688(A).T | 0.0 |
| CC Well to Mod Diff | 0.0 | Melanoma* (met) Hs688(B).T | 0.0 |
| (OD03866) | | | |
| Colon ca. HCC-2998 | 0.0 | Melanoma UACC-62 | 0.0 |
| Gastric ca. (liver met) | 0.0 | Melanoma M14 | 0.0 |
| NCI-N87 | | | |
| Bladder | 0.0 | Melanoma LOX IMVI | 0.0 |
| Trachea | 0.0 | Melanoma* (met) | 0.0 |
| | | SK-MEL-5 | |
| Kidney | 0.0 | Adipose | 0.0 |

[1376] TABLE APC
Panel 2.2
Column A - Rel. Exp.(%) Ag2613, Run 175128272

| Tissue Name | A | Tissue Name | A |
|---|---|---|---|
| Normal Colon | 0.4 | Kidney Margin (OD04348) | 0.0 |
| Colon cancer (OD06064) | 0.0 | Kidney malignant cancer | 0.0 |
| | | (OD06204B) | |
| Colon Margin (OD06064) | 0.0 | Kidney normal adjacent tissue | 0.0 |
| | | (OD06204E) | |
| Colon cancer (OD06159) | 0.0 | Kidney Cancer (OD04450-01) | 0.0 |
| Colon Margin (OD06159) | 0.0 | Kidney Margin (OD04450-03) | 0.0 |
| Colon cancer (OD06297-04) | 0.0 | Kidney Cancer 8120613 | 0.0 |
| Colon Margin (OD06297-05) | 0.0 | Kidney Margin 8120614 | 0.0 |
| CC Gr.2 ascend colon (OD03921) | 0.0 | Kidney Cancer 9010320 | 0.0 |
| CC Margin (OD03921) | 0.0 | Kidney Margin 9010321 | 0.0 |
| Colon cancer metastasis (OD06104) | 0.0 | Kidney Cancer 8120607 | 0.0 |
| Lung Margin (OD06104) | 0.0 | Kidney Margin 8120608 | 0.0 |
| Colon mets to lung (OD04451-01) | 0.1 | Normal Uterus | 0.1 |
| Lung Margin (OD04451-02) | 0.0 | Uterine Cancer 064011 | 0.0 |
| Normal Prostate | 0.0 | Normal Thyroid | 0.0 |
| Prostate Cancer (OD04410) | 0.0 | Thyroid Cancer | 0.0 |
| Prostate Margin (OD04410) | 0.0 | Thyroid Cancer A302152 | 0.0 |
| Normal Ovary | 0.0 | Thyroid Margin A302153 | 0.0 |
| Ovarian cancer (OD06283-03) | 0.0 | Normal Breast | 0.0 |
| Ovarian Margin (OD06283-07) | 0.0 | Breast Cancer | 1.5 |
| Ovarian Cancer | 2.1 | Breast Cancer | 0.0 |
| Ovarian cancer (OD06145) | 1.0 | Breast Cancer (OD04590-01) | 0.2 |
| Ovarian Margin (OD06145) | 0.2 | Breast Cancer Mets (OD04590-03) | 0.0 |
| Ovarian cancer (OD06455-03) | 0.0 | Breast Cancer Metastasis | 0.0 |
| Ovarian Margin (OD06455-07) | 0.0 | Breast Cancer | 0.1 |
| Normal Lung | 0.2 | Breast Cancer 9100266 | 0.0 |
| Invasive poor diff. lung adeno | 0.0 | Breast Margin 9100265 | 0.0 |
| (OD04945-01 | | | |
| Lung Margin (OD04945-03) | 0.0 | Breast Cancer A209073 | 0.0 |
| Lung Malignant Cancer (OD03126) | 0.0 | Breast Margin A209073 | 0.0 |
| Lung Margin (OD03126) | 0.0 | Breast cancer (OD06083) | 0.0 |
| Lung Cancer (OD05014A) | 0.0 | Breast cancer node metastasis | 0.0 |
| | | (OD06083) | |
| Lung Margin (OD05014B) | 0.4 | Normal Liver | 100.0 |
| Lung cancer (OD06081) | 0.0 | Liver Cancer 1026 | 1.9 |
| Lung Margin (OD06081) | 0.0 | Liver Cancer 1025 | 60.3 |
| Lung Cancer (OD04237-01) | 0.0 | Liver Cancer 6004-T | 42.6 |
| Lung Margin (OD04237-02) | 0.0 | Liver Tissue 6004-N | 1.4 |
| Ocular Mel Met to Liver (OD04310) | 0.0 | Liver Cancer 6005-T | 3.3 |
| Liver Margin (OD04310) | 51.4 | Liver Tissue 6005-N | 33.7 |
| Melanoma Metastasis | 0.0 | Liver Cancer | 59.0 |
| Lung Margin (OD04321) | 0.0 | Normal Bladder | 0.0 |
| Normal Kidney | 0.0 | Bladder Cancer | 0.0 |
| Kidney Ca, Nuclear grade 2 | 0.0 | Bladder Cancer | 0.0 |
| (OD04338) | | | |
| Kidney Margin (OD04338) | 0.0 | Normal Stomach | 0.1 |
| Kidney Ca Nuclear grade 1/2 | 0.0 | Gastric Cancer 9060397 | 0.0 |
| (OD04339) | | | |
| Kidney Margin (OD04339) | 0.0 | Stomach Margin 9060396 | 0.0 |
| Kidney Ca, Clear cell type (OD04340) | 0.0 | Gastric Cancer 9060395 | 0.2 |
| Kidney Margin (OD04340) | 0.0 | Stomach Margin 9060394 | 0.0 |
| Kidney Ca, Nuclear grade 3 | 0.0 | Gastric Cancer 064005 | 0.0 |
| (OD04348) | | | |

[1377] TABLE APD
Panel 4D
Column A - Rel. Exp.(%) Ag2613, Run 164399517

| Tissue Name | A | Tissue Name | A |
|---|---|---|---|
| Secondary Th1 act | 0.0 | HUVEC IL-1beta | 0.0 |
| Secondary Th2 act | 0.0 | HUVEC IFN gamma | 0.0 |
| Secondary Tr1 act | 0.0 | HUVEC TNF alpha + IFN gamma | 0.0 |
| Secondary Th1 rest | 0.0 | HUVEC TNF alpha + IL4 | 0.0 |
| Secondary Th2 rest | 0.0 | HUVEC IL-11 | 0.0 |
| Secondary Tr1 rest | 0.0 | Lung Microvascular EC none | 0.0 |
| Primary Th1 act | 0.0 | Lung Microvascular EC TNFalpha + IL- | 0.0 |
| | | 1beta | |
| Primary Th2 act | 0.0 | Microvascular Dermal EC none | 0.0 |
| Primary Tr1 act | 0.0 | Microsyasular Dermal EC TNFalpha + IL- | 0.0 |
| | | 1beta | |
| Primary Th1 rest | 10.0 | Bronchial epithelium TNFalpha + IL1beta | 0.0 |
| Primary Th2 rest | 10.0 | Small airway epithelium none | 0.0 |
| Primary Tr1 rest | 10.0 | Small airway epithelium TNFalpha + IL- | 0.0 |
| | | 1beta | |
| CD45RA CD4 lymphocyte act | 0.0 | Coronery artery SMC rest | 0.0 |
| CD45RO CD4 lymphocyte act | 0.0 | Coronery artery SMC TNFalpha +IL-1beta | 0.0 |
| CD8 lymphocyte act | 0.0 | Astrocytes rest | 0.0 |
| Secondary CDS lymphocyte rest | 0.0 | Astrocytes TNFaIpha + IL-1beta | 0.0 |
| Secondary CD8 lymphocyte act | 0.0 | KU-812 (Basophil) rest | 0.0 |
| CD4 lymphocyte none | 0.0 | KU-812 (Basophil) PMA/ionomycin | 0.0 |
| 2ry Th1/Th2/Tr1 anti-CD95 | 0.0 | CCD1106 (Keratinocytes) none | 0.0 |
| CH11 | | | |
| LAK cells rest | 0.0 | CCD1106 (Keratinocytes) TNFalpha + IL- | 0.0 |
| | | 1beta | |
| LAK cells IL-2 | 0.0 | Liver cirrhosis | 100.0 |
| LAK cells IL-2 + IL-12 | 0.0 | Lupus kidney | 0.0 |
| LAK cells IL-2 + IFN gamma | 0.0 | NCI-H292 none | 0.0 |
| LAK cells IL-2 + IL-18 | 0.0 | NCI-H292 IL-4 | 0.0 |
| LAK cells PMA/ionomycin | 0.0 | NCI-H292 IL-9 | 0.0 |
| NK Cells IL-2 rest | 0.0 | NCI-H292 IL-13 | 0.0 |
| Two Way MLR 3 day | 0.0 | NCI-H292 IFN gamma | 0.0 |
| Two Way MLR 5 day | 0.0 | HPAEC none | 0.0 |
| Two Way MLR 7 day | 0.0 | HPAEC TNF alpha + IL-1 beta | 0.0 |
| PBMC rest | 0.0 | Lung fibroblast none | 0.0 |
| PBMC PWM | 0.0 | Lung fibroblast TNF alpha + IL-1 beta | 0.0 |
| PBMC PHA-L | 0.0 | Lung fibroblast IL-4 | 0.0 |
| Ramos (B cell) none | 10.0 | Lung fibroblast IL-9 | 10.0 |
| Ramos (B cell) ionomycin | 10.0 | Lung fibroblast IL-13 | 0.0 |
| B lymphocytes PWM | 0.0 | Lung fibroblast IFN gamma | 0.0 |
| B lymphocytes CD40L and IL-4 | 0.0 | Dermal fibroblast CCD1070 rest | 0.0 |
| EOL-1 dbcAMP | 0.0 | Dermal fibroblast CCD1070 TNF alpha | 0.0 |
| EOL-1 dbcAMP | 0.0 | Dermal fibroblast CCD1070 IL-1 beta | 0.0 |
| PMA/ionomycin | | | |
| Dendritic cells none | 0.0 | Dermal fibroblast IFN gamma | 0.0 |
| Dendritic cells LPS | 0.0 | Dermal fibroblast IL-4 | 0.0 |
| Dendritic cells anti-CD40 | 0.0 | IBD Colitis 2 | 0.0 |
| Monocytes rest | 0.0 | IBD Crohn's | 0.0 |
| Monocytes LPS | 0.0 | Colon | 0.0 |
| Macrophages rest | 0.0 | Lung | 1.0 |
| Macrophages LPS | 0.0 | Thymus | 0.0 |
| HUVEC none | 0.0 | Kidney | 0.0 |
| HUVEC starved | 0.0 | | |

[1378] Panel 1.3D Summary: Ag2613 The highest expression of this gene was found in adult liver. Expression of this gene was also detected in fetal liver and fetal kidney samples on this panel (CTs=27-31). This gene encodes a protein that is homologous to factor IX. The secreted form of the protein may be present in the circulatory sysytem and exhibit effects that are unrelated to the site of synthesis. Measurement of the expression level of this gene or expressed protein is useful to test liver function. Measurement of the expression level of this gene or expressed protein can be used to differentiate between liver derived tissue and other tissues. Therapeutic modulation of this gene, expressed protein and/or use of antibodies or small molecule drugs targeting the gene or gene product are effective in increasing the levels of factor IX in the blood, and useful in the treatment of hemophilia and liver related disease.

[1379] Panel 2.2 Summary: Ag2613 Expression of this gene was highest in samples derived from liver (CT=27.9), consistant with the results seen in Panel 1.3D. Therefore, expression of this gene is useful to differentiate between normal sections of liver as compared to tumors that are secordary metastases from other sites (such as melanoma).

[1380] Panel 4D Summary: Ag2613 This transcript was highly expressed in cirrhotic liver tissue (CT=27.8). Therapeutic modulation of this gene, expressed protein and/or use of antibodies or small molecule drugs targeting the gene or gene product are useful in the treatment of liver cirrhosis.

[1381] AQ. CG55828-02: Serine/Threonine-Protein Kinase PAK 5.

[1382] Expression of gene CG55828-02 was assessed using the primer-probe set Ag7281, described in Table AQA. Results of the RTQ-PCR runs are shown in Table AQB. Gene CG55828-02 represents full-length physical clone.

TABLE AQA
Probe Name Ag7281

| | | | Start | SEQ ID |
|---|---|---|---|---|
| Primers | Sequences | Length | Position | No |
| Forward | 5′-gtgtcccatgaacagtttcg-3′ | 20 | 894 | 1355 |
| Probe | TET-5′-agcccaggagaccccagggaatactt-3′- | 26 | 846 | 1356 |
| | TAMRA | | | |
| Reverse | 5′-tccccgattttgataaagttg-3′ | 21 | 822 | 1357 |

[1383] TABLE AQB
General_screening_panel_v1.7
Column A - Rel. Exp.(%) Ag7281, Run 318350125

| Tissue Name | A | Tissue Name | A |
|---|---|---|---|
| Adipose | 0.0 | Gastric Ca. (liver met.) | 0.0 |
| | | NCI-N87 | |
| HUVEC | 0.0 | Stomach | 0.0 |
| Melanoma* Hs688(A).T | 0.0 | Colon ca. SW-948 | 0.0 |
| Melanoma* Hs688(B).T | 0.0 | Colon ca. SW480 | 0.0 |
| Melanoma (met) SK-MEL-5 | 0.0 | Colon ca. (SW480 met) | 0.0 |
| | | SW620 | |
| Testis | 0.2 | Colon ca. HT29 | 0.0 |
| Prostate ca. (bone met) PC-3 | 0.0 | Colon ca. HCT-116 | 0.0 |
| Prostate ca. DU145 | 0.0 | Colon cancer tissue | 0.0 |
| Prostate pool | 0.2 | Colon ca. SW1116 | 0.0 |
| Uterus pool | 0.0 | Colon ca. Colo-205 | 0.0 |
| Ovarian ca. OVCAR-3 | 0.0 | Colon ca. SW-48 | 0.0 |
| Ovarian ca. (ascites) SK-OV-3 | 0.0 | Colon | 0.0 |
| Ovarian ca. OVCAR-4 | 0.0 | Small Intestine | 0.0 |
| Ovarian ca. OVCAR-5 | 0.0 | Fetal Heart | 0.0 |
| Ovarian ca. IGROV-1 | 0.0 | Heart | 0.0 |
| Ovarian ca. OVCAR-8 | 0.0 | Lymph Node Pool | 0.0 |
| Ovary | 0.3 | Lymph Node pool 2 | 0.0 |
| Breast ca. MCF-7 | 0.0 | Fetal Skeletal Muscle | 0.0 |
| Breast ca. MDA-MB-231 | 0.0 | Skeletal Muscle pool | 0.0 |
| Breast ca. BT 549 | 0.0 | Skeletal Muscle | 0.0 |
| Breast ca. T47D | 0.0 | Spleen | 0.3 |
| 113452 mammary gland | 0.0 | Thymus | 0.1 |
| Trachea | 0.5 | CNS cancer (glio/astro) | 0.0 |
| | | SF-268 | |
| Lung | 0.1 | CNS cancer (glio/astro) | 0.0 |
| | | T98G | |
| Fetal Lung | 0.1 | CNS cancer (neuro; met) | 0.0 |
| | | SK-N-AS | |
| Lung ca. NCI-N417 | 0.1 | CNS cancer (astro) | 0.0 |
| | | SF-539 | |
| Lung ca. LX-1 | 0.0 | CNS cancer (astro) | 0.0 |
| | | SNB-75 | |
| Lung ca. NCI-H146 | 11.2 | CNS cancer (glio) | 0.0 |
| | | SNB-19 | |
| Lung ca. SHP-77 | 3.8 | CNS cancer (glio) | 0.0 |
| | | SF-295 | |
| Lung ca. NCI-H23 | 0.0 | Brain (Amygdala) | 11.7 |
| Lung ca. NCI-H460 | 0.0 | Brain (Cerebellum) | 80.1 |
| Lung ca. HOP-62 | 0.0 | Brain (Fetal) | 100.0 |
| Lung ca. NCI-H522 | 0.0 | Brain (Hippocampus) | 8.1 |
| Lung ca. DMS-114 | 0.0 | Cerebral Cortex pool | 9.7 |
| Liver | 0.0 | Brain (Substantia nigra) | 5.9 |
| Fetal Liver | 0.0 | Brain (Thalamus) | 17.8 |
| Kidney pool | 0.6 | Brain (Whole) | 81.8 |
| Fetal Kidney | 0.0 | Spinal Cord | 0.5 |
| Renal ca. 786-0 | 0.0 | Adrenal Gland | 5.6 |
| Renal ca. A498 | 0.0 | Pituitary Gland | 2.3 |
| Renal ca. ACHN | 0.0 | Salivary Gland | 0.3 |
| Renal ca. UO-31 | 0.0 | Thyroid | 0.1 |
| Renal ca. TK-10 | 0.0 | Pancreatic ca. PANC-1 | 0.0 |
| Bladder | 0.1 | Pancreas pool | 0.4 |

[1384] General_screening_panel_v1.7 Summary: Ag7281 The highest expression of this gene was detected in fetal brain (CT=25). This gene was expressed in all central nervous system samples on this panel. Therapeutic modulation of this gene, expressed protein and/or use of antibodies or small molecule drugs targeting the gene or gene product are useful in the treatment of disorders of the central nervous system including Alzheimer's disease, Parkinson's disease, trauma, stroke, epilepsy, pain, multiple sclerosis, schizophrenia, bipolar disorder, depression, anxiety, obsessive compulsive disorder, ataxia, autism, drug and alcohol addiction.

[1385] AR. CG55988-04: Organic Cation Transporter OKB1.

[1386] Expression of gene CG55988-04 was assessed using the primer-probe set Ag6389, described in Table ARA. Results of the RTQ-PCR runs are shown in Table ARB.

TABLE ARA
Probe Name Ag6389

| | | | Start | SEQ ID |
|---|---|---|---|---|
| Primers | Sequences | Length | Position | No |
| Forward | 5′-tatggttggaaaatttgcc-3′ | 19 | 1341 | 1358 |
| Probe | TET-5′-atacagctgagctgtatccaaccattgt | 30 | 1391 | 1359 |
| | aa-3′-TAMRA | | | |
| Reverse | 5′-ctgtcctaggagctgtggta-3′ | 20 | 1514 | 1360 |

[1387] TABLE ARB
General_screening_panel_v1.6
Column A - Rel. Exp.(%) Ag6389, Run 277246969

| Tissue Name | A | Tissue Name | A |
|---|---|---|---|
| Adipose | 0.0 | Renal ca. TK-10 | 0.0 |
| Melanoma* Hs688(A).T | 0.0 | Bladder | 0.0 |
| Melanoma* Hs688(B).T | 0.0 | Gastric ca. (liver met.) NCI-N87 | 0.0 |
| Melanoma* M14 | 0.0 | Gastric ca. KATO III | 0.0 |
| Melanoma* LOXIMVI | 0.0 | Colon ca. SW-948 | 0.0 |
| Melanoma* SK-MEL-5 | 0.0 | Colon ca. SW480 | 0.0 |
| Squamous cell carcinoma | 0.0 | Colon ca.* (SW480 met) SW620 | 0.0 |
| SCC-4 | | | |
| Testis Pool | 100.0 | Colon ca. HT29 | 0.0 |
| Prostate ca.* (bone met) | 0.0 | Colon ca. HCT-116 | 0.0 |
| PC-3 | | | |
| Prostate Pool | 0.0 | Colon ca. CaCo-2 | 0.0 |
| Placenta | 0.0 | Colon cancer tissue | 0.0 |
| Uterus Pool | 0.0 | Colon ca. SW1116 | 0.0 |
| Ovarian ca. OVCAR-3 | 0.0 | Colon ca. Colo-205 | 0.0 |
| Ovarian ca. SK-OV-3 | 1.6 | Colon ca. SW-48 | 0.0 |
| Ovarian ca. OVCAR-4 | 0.0 | Colon Pool | 5.5 |
| Ovarian ca. OVCAR-5 | 0.0 | Small Intestine Pool | 0.0 |
| Ovarian ca. IGROV-1 | 0.0 | Stomach Pool | 0.0 |
| Ovarian ca. OVCAR-8 | 0.0 | Bone Marrow Pool | 0.0 |
| Ovary | 0.0 | Fetal Heart | 0.0 |
| Breast ca. MCF-7 | 0.0 | Heart Pool | 2.5 |
| Breast ca. MDA-MB-231 | 0.0 | Lymph Node Pool | 1.5 |
| Breast ca. BT 549 | 0.0 | Fetal Skeletal Muscle | 0.0 |
| Breast ca. T47D | 0.0 | Skeletal Muscle Pool | 0.0 |
| Breast ca. MDA-N | 0.0 | Spleen Pool | 0.0 |
| Breast Pool | 0.0 | Thymus Pool | 0.0 |
| Trachea | 2.5 | CNS cancer (glio/astro) U87-MG | 0.0 |
| Lung | 0.0 | CNS cancer (glio/astro) U-118-MG | 0.0 |
| Fetal Lung | 2.7 | CNS cancer (neuro; met) SK-N-AS | 0.0 |
| Lung ca. NCI-N417 | 2.5 | CNS cancer (astro) SF-539 | 0.0 |
| Lung ca. LX-1 | 0.0 | CNS cancer (astro) SNB-75 | 0.0 |
| Lung Ca. NCI-H146 | 0.0 | CNS cancer (glio) SNB-19 | 0.0 |
| Lung ca. SHP-77 | 0.0 | CNS cancer (glio) SF-295 | 0.0 |
| Lung ca. A549 | 0.0 | Brain (Amygdala) Pool | 0.0 |
| Lung ca. NCI-H526 | 0.0 | Brain (cerebellum) | 0.0 |
| Lung ca. NCI-H23 | 0.0 | Brain (fetal) | 0.0 |
| Lung ca. NCI-H460 | 0.0 | Brain (Hippocampus) Pool | 0.0 |
| Lung ca. HOP-62 | 0.0 | Cerebral Cortex Pool | 2.3 |
| Lung ca. NCI-H522 | 0.0 | Brain (Substantia nigra) Pool | 0.0 |
| Liver | 0.0 | Brain (Thalamus) Pool | 0.0 |
| Fetal Liver | 20.3 | Brain (whole) | 0.0 |
| Liver ca. HepG2 | 0.0 | Spinal Cord Pool | 0.0 |
| Kidney Pool | 0.0 | Adrenal Gland | 0.0 |
| Fetal Kidney | 5.0 | Pituitary gland Pool | 0.0 |
| Renal ca. 786-0 | 0.0 | Salivary Gland | 0.0 |
| Renal ca. A498 | 0.0 | Thyroid (female) | 0.0 |
| Renal ca. ACHN | 0.0 | Pancreatic ca. CAPAN2 | 0.0 |
| Renal ca. UO-31 | 0.0 | Pancreas Pool | 0.0 |

[1388] General_screening_panel_v1.6 Summary: Ag6389 Low expression of this gene was detected in testis. Modulation of this gene, encoded protein and/or use of antibodies or small molecule drug targeting this gene or gene product will be useful in the treatment testis related disorders including fertility and hypogonadism.

[1389] AS. CG56071-01: Mixed Lineage Kinase 2-Like.

[1390] Expression of gene CG56071-01 was assessed using the primer-probe sets Ag2872 and Ag4847, described in Tables ASA and ASB. Results of the RTQ-PCR runs are shown in Tables ASC, ASD, ASE, ASF, ASG, ASH and ASI.

TABLE ASA
Probe Name Ag2872

| | | | Start | SEQ ID |
|---|---|---|---|---|
| Primers | Sequences | Length | Position | No |
| Forward | 5′-tcagccagaccatagagaatgt-3′ | 22 | 506 | 1361 |
| Probe | TET-5′-atgctgaagcaccccaacatcattg-3′- | 25 | 553 | 1362 |
| | TAMRA | | | |
| Reverse | 5′-ctccttcagacatacccctctt-3′ | 22 | 582 | 1363 |

[1391] TABLE ASB
Probe Name Ag4847

| | | | Start | SEQ ID |
|---|---|---|---|---|
| Primers | Sequences | Length | Position | No |
| Forward | 5′-catagagaatgttcgccaagag-3′ | 22 | 516 | 1364 |
| Probe | TET-5′-atgctgaagcaccccaacatcattg-3′- | 25 | 553 | 1365 |
| | TAMRA | | | |
| Reverse | 5′-ctccttcagacatacccctctt-3′ | 22 | 582 | 1366 |

[1392] TABLE ASC
General_screening_panel_v1.5
Column A - Rel. Exp.(%) Ag4847, Run 228796410

| Tissue Name | A | Tissue Name | A |
|---|---|---|---|
| Adipose | 1.0 | Renal ca. TK-10 | 13.9 |
| Melanoma* Hs688(A).T | 0.1 | Bladder | 5.8 |
| Melanoma* Hs688(B).T | 0.0 | Gastric ca. (liver met.) NCI-N87 | 21.5 |
| Melanoma* M14 | 5.4 | Gastric ca. KATO III | 14.7 |
| Melanoma* LOXIMVI | 1.6 | Colon ca. SW-948 | 4.3 |
| Melanoma* SK-MEL-5 | 9.2 | Colon ca. SW480 | 16.2 |
| Squamous cell carcinoma | 28.9 | Colon ca.* (SW480 met) SW620 | 5.4 |
| SCC-4 | | | |
| Testis Pool | 2.8 | Colon ca. HT29 | 4.8 |
| Prostate ca.* (bone met) | 7.2 | Colon ca. HCT-116 | 13.4 |
| PC-3 | | | |
| Prostate Pool | 1.5 | Colon ca. CaCo-2 | 13.6 |
| Placenta | 5.3 | Colon cancer tissue | 3.0 |
| Uterus Pool | 1.0 | Colon ca. SW1116 | 2.3 |
| Ovarian ca. OVCAR-3 | 10.1 | Colon ca. Colo-205 | 2.7 |
| Ovarian ca. SK-OV-3 | 23.5 | Colon ca. SW-48 | 2.1 |
| Ovarian ca. OVCAR-4 | 7.1 | Colon Pool | 0.6 |
| Ovarian ca. OVCAR-5 | 24.0 | Small Intestine Pool | 1.3 |
| Ovarian ca. IGROV-1 | 29.5 | Stomach Pool | 1.3 |
| Ovarian ca. OVCAR-8 | 3.7 | Bone Marrow Pool | 0.9 |
| Ovary | 1.0 | Fetal Heart | 0.9 |
| Breast ca. MCF-7 | 10.5 | Heart Pool | 0.3 |
| Breast ca. MDA-MB-231 | 10.9 | Lymph Node Pool | 0.9 |
| Breast ca. BT 549 | 0.4 | Fetal Skeletal Muscle | 0.1 |
| Breast ca. T47D | 11.7 | Skeletal Muscle Pool | 2.9 |
| Breast ca. MDA-N | 1.6 | Spleen Pool | 2.4 |
| Breast Pool | 1.1 | Thymus Pool | 2.5 |
| Trachea | 3.9 | CNS cancer (glio/astro) | 13.3 |
| | | U87-MG | |
| Lung | 0.3 | CNS cancer (glio/astro) | 0.5 |
| | | U-118-MG | |
| Fetal Lung | 4.2 | CNS cancer (neuro; met) | 3.7 |
| | | SK-N-AS | |
| Lung ca. NCI-N417 | 2.1 | CNS cancer (astro) SF-539 | 0.8 |
| Lung ca. LX-1 | 8.8 | CNS cancer (astro) SNB-75 | 0.2 |
| Lung ca. NCI-H146 | 5.6 | CNS cancer (glio) SNB-19 | 4.0 |
| Lung ca. SHP-77 | 13.1 | CNS cancer (glio) SF-295 | 2.8 |
| Lung ca. A549 | 13.4 | Brain (Amygdala) Pool | 8.2 |
| Lung ca. NCI-H526 | 4.0 | Brain (cerebellum) | 100.0 |
| Lung ca. NCI-H23 | 7.3 | Brain (fetal) | 15.9 |
| Lung ca. NCI-H460 | 1.1 | Brain (Hippocampus) Pool | 8.1 |
| Lung ca. HOP-62 | 4.7 | Cerebral Cortex Pool | 18.3 |
| Lung ca. NCI-H522 | 7.1 | Brain (Substantia nigra) Pool | 24.0 |
| Liver | 0.4 | Brain (Thalamus) Pool | 13.7 |
| Fetal Liver | 1.2 | Brain (whole) | 18.8 |
| Liver ca. HepG2 | 6.0 | Spinal Cord Pool | 3.5 |
| Kidney Pool | 0.5 | Adrenal Gland | 2.6 |
| Fetal Kidney | 2.6 | Pituitary gland Pool | 2.3 |
| Renal ca. 786-0 | 10.8 | Salivary Gland | 1.8 |
| Renal ca. A498 | 9.5 | Thyroid (female) | 1.0 |
| Renal ca. ACHN | 11.0 | Pancreatic ca. CAPAN2 | 19.2 |
| Renal ca. UO-31 | 15.9 | Pancreas Pool | 2.5 |

[1393] TABLE ASD
Panel 1.3D
Column A - Rel. Exp.(%) Ag2872, Run 161971644
Column B - Rel. Exp.(%) Ag2872, Run 165721686
Column C - Rel. Exp.(%) Ag2872, Run 166006455

| Tissue Name | A | B | C | Tissue Name | A | B | C |
|---|---|---|---|---|---|---|---|
| Liver adenocarcinoma | 16.7 | 22.5 | 21.8 | Kidney (fetal) | 1.9 | 2.9 | 1.1 |
| Pancreas | 0.3 | 4.3 | 5.4 | Renal ca. 786-0 | 2.8 | 17.6 | 15.0 |
| Pancreatic ca. CAPAN 2 | 5.5 | 45.4 | 44.8 | Renal ca. A498 | 4.5 | 36.1 | 12.7 |
| Adrenal gland | 0.5 | 2.2 | 0.3 | Renal ca. RXF 393 | 13.5 | 85.9 | 77.9 |
| Thyroid | 0.9 | 1.7 | 1.6 | Renal ca. ACHN | 6.4 | 17.8 | 17.8 |
| Salivary gland | 0.5 | 3.7 | 5.4 | Renal ca. UO-31 | 5.0 | 27.0 | 19.3 |
| Pituitaiy gland | 1.7 | 11.4 | 4.3 | Renal ca. TK-10 | 2.3 | 7.9 | 10.0 |
| Brain (fetal) | 2.9 | 24.5 | 22.1 | Liver | 0.2 | 0.0 | 1.0 |
| Brain (whole) | 6.1 | 66.4 | 79.6 | Liver (fetal) | 0.4 | 0.8 | 0.7 |
| Brain (amygdala) | 6.4 | 49.7 | 41.8 | Liver ca. (hepatoblast) | 4.3 | 14.7 | 18.6 |
| | | | | HepG2 | | | |
| Brain (cerebellum) | 13.1 | 82.9 | 100.0 | Lung | 0.5 | 6.0 | 9.0 |
| Brain (hippocampus) | 10.2 | 32.8 | 29.3 | Lung (fetal) | 0.5 | 4.3 | 0.7 |
| Brain (substantia nigra) | 2.0 | 14.5 | 12.2 | Lung ca. (small cell) LX- | 3.4 | 16.0 | 11.6 |
| | | | | 1 | | | |
| Brain (thalamus) | 7.4 | 42.6 | 63.3 | Lung ca. (small cell) NCI | 3.6 | 26.1 | 26.4 |
| | | | | H69 | | | |
| Cerebral Cortex | 100.0 | 84.1 | 90.1 | Lung ca. (s.cell var.) | 11.1 | 25.0 | 13.8 |
| | | | | SHP-77 | | | |
| Spinal cord | 0.9 | 3.1 | 3.6 | Lung ca. (large cell)NCI- | 0.3 | 4.3 | 43.2 |
| | | | | H460 | | | |
| glio/astro U87-MG | 13.2 | 14.5 | 15.7 | Lung ca. (non-sm. cell) | 3.9 | 8.0 | 9.9 |
| | | | | A549 | | | |
| glio/astro U-118-MG | 0.0 | 0.0 | 0.0 | Lung ca. (non-s.cell) | 3.0 | 6.8 | 3.6 |
| | | | | NCI-H23 | | | |
| astrocytoma SW1783 | 7.3 | 7.9 | 10.3 | Lung ca. (non-s.cell) | 2.0 | 8.7 | 6.4 |
| | | | | HOP-62 | | | |
| neuro*; met SK-N-AS | 1.2 | 5.9 | 2.2 | Lung ca. (non-s.cl) NCI- | 2.6 | 5.0 | 3.1 |
| | | | | H522 | | | |
| astrocytoma SF-539 | 1.0 | 3.7 | 6.0 | Lung ca. (squam.) SW | 15.6 | 58.2 | 94.0 |
| | | | | 900 | | | |
| astrocytoma SNB-75 | 9.7 | 100.0 | 21.3 | Lung ca. (squam.) NCI- | 2.5 | 16.5 | 19.3 |
| | | | | H596 | | | |
| glioma SNB-19 | 2.5 | 6.4 | 6.7 | Mammary gland | 0.7 | 6.2 | 2.0 |
| glioma U251 | 2.8 | 22.2 | 8.9 | Breast ca.* (pl.ef) MCF-7 | 11.3 | 21.9 | 16.7 |
| glioma SF-295 | 1.2 | 3.7 | 6.3 | Breast ca.* (pl.ef) MDA- | 4.1 | 32.3 | 6.7 |
| | | | | MB-231 | | | |
| Heart (Fetal) | 0.5 | 0.6 | 1.7 | Breast ca.* (pl.ef) T47D | 3.5 | 17.0 | 14.4 |
| Heart | 0.1 | 1.1 | 0.0 | Breast ca. BT-549 | 0.3 | 4.7 | 0.8 |
| Skeletal muscle (Fetal) | 0.8 | 0.7 | 0.3 | Breast ca. MDA-N | 1.0 | 0.9 | 3.3 |
| Skeletal muscle | 1.0 | 4.4 | 2.5 | Ovary | 2.3 | 1.4 | 0.0 |
| Bone marrow | 0.4 | 1.4 | 0.9 | Ovarian ca. OVCAR-3 | 3.9 | 19.1 | 10.2 |
| Thymus | 2.5 | 0.7 | 2.3 | Ovarian ca. OVCAR-4 | 1.6 | 25.2 | 22.1 |
| Spleen | 0.7 | 6.0 | 3.3 | Ovarian ca. OVCAR-5 | 6.3 | 27.7 | 40.6 |
| Lymph node | 1.4 | 8.7 | 3.2 | Ovarian ca. OVCAR-8 | 3.3 | 14.0 | 6.2 |
| Colorectal | 7.5 | 6.7 | 6.8 | Ovarian ca. IGROV-1 | 1.4 | 4.6 | 11.2 |
| Stomach | 0.9 | 8.3 | 2.8 | Ovarian ca. (ascites) SK- | 6.4 | 46.7 | 39.2 |
| | | | | OV-3 | | | |
| Small intestine | 0.8 | 3.2 | 2.1 | Uterus | 0.1 | 1.1 | 0.0 |
| Colon ca. SW480 | 2.5 | 6.4 | 18.9 | Placenta | 2.2 | 6.8 | 9.7 |
| Colon ca.* SW620 (SW480 | 3.1 | 13.8 | 9.9 | Prostate | 0.5 | 2.6 | 2.8 |
| met) | | | | | | | |
| Colon ca. HT29 | 3.2 | 3.1 | 4.2 | Prostate ca.* (bone met) | 4.4 | 39.2 | 16.6 |
| | | | | PC-3 | | | |
| Colon ca. HCT-116 | 2.9 | 15.0 | 4.8 | Testis | 2.9 | 7.3 | 3.7 |
| Colon ca. CaCo-2 | 9.0 | 11.7 | 9.9 | Melanoma Hs688(A).T | 0.1 | 0.0 | 0.0 |
| CC Well to Mod Duff | 4.0 | 6.9 | 4.8 | Melanoma* (met) | 0.0 | 0.0 | 0.0 |
| (ODO3866) | | | | Hs688(B).T | | | |
| Colon ca. HCC-2998 | 3.1 | 12.6 | 11.1 | Melanoma UACC-62 | 1.6 | 6.3 | 9.3 |
| Gastric ca. (liver met) NCI- | 11.7 | 54.3 | 23.2 | Melanoma M14 | 0.9 | 11.9 | 2.1 |
| N87 | | | | | | | |
| Bladder | 7.3 | 14.7 | 6.6 | Melanoma LOX IMVI | 0.4 | 0.0 | 0.4 |
| Trachea | 2.8 | 5.9 | 2.0 | Melanoma* (met) SK- | 2.1 | 8.4 | 6.0 |
| | | | | MEL-S | | | |
| Kidney | 2.0 | 5.8 | 0.4 | Adipose | 0.7 | 2.4 | 2.4 |

[1394] TABLE ASE
Panel 2.2
Column A - Rel. Exp.(%) Ag2872, Run 175149214

| Tissue Name | A | Tissue Name | A |
|---|---|---|---|
| Normal Colon | 17.4 | Kidney Margin (OD04348) | 100.0 |
| Colon cancer (OD06064) | 26.6 | Kidney malignant cancer | 14.1 |
| | | (OD06204B) | |
| Colon Margin (OD06064) | 16.2 | Kidney normal adjacent tissue | 8.5 |
| | | (OD06204E) | |
| Colon cancer (OD06159) | 4.4 | Kidney Cancer (OD04450-01) | 29.1 |
| Colon Margin (OD06159) | 11.5 | Kidney Margin (OD04450-03) | 21.3 |
| Colon cancer (OD06297-04) | 1.1 | Kidney Cancer 8120613 | 2.3 |
| Colon Margin (OD06297-05) | 19.6 | Kidney Margin 8120614 | 16.7 |
| CC Gr.2 ascend colon (ODO3921) | 4.4 | Kidney Cancer 9010320 | 0.0 |
| CC Margin (ODO3921) | 3.5 | Kidney Margin 9010321 | 10.4 |
| Colon cancer metastasis (ODO6104) | 0.0 | Kidney Cancer 8120607 | 16.3 |
| Lung Margin (OD06104) | 6.6 | Kidney Margin 8120608 | 7.5 |
| Colon mets to lung (OD04451-01) | 33.0 | Normal Uterus | 0.0 |
| Lung Margin (OD04451-02) | 10.8 | Uterine Cancer 064011 | 2.2 |
| Normal Prostate | 7.3 | Normal Thyroid | 0.0 |
| Prostate Cancer (OD04410) | 8.0 | Thyroid Cancer | 5.8 |
| Prostate Margin (OD04410) | 5.8 | Thyroid Cancer A302152 | 20.0 |
| Normal Ovary | 2.4 | Thyroid Margin A302153 | 3.4 |
| Ovarian cancer (OD06283-03) | 4.2 | Normal Breast | 21.6 |
| Ovarian Margin (OD06283-07) | 8.2 | Breast Cancer | 8.3 |
| Ovarian Cancer | 12.2 | Breast Cancer | 22.5 |
| Ovarian cancer (OD06145) | 4.3 | Breast Cancer (OD04590-01) | 41.2 |
| Ovarian Margin (OD06145) | 8.7 | Breast Cancer Mets (OD04590-03) | 26.1 |
| Ovarian cancer (OD06455-03) | 20.2 | Breast Cancer Metastasis | 46.0 |
| Ovarian Margin (OD06455-07) | 0.0 | Breast Cancer | 15.8 |
| Normal Lung | 7.6 | Breast Cancer 9100266 | 9.6 |
| Invasive poor diff. lung adeno | 27.5 | Breast Margin 9100265 | 1.7 |
| ODO4945-01 | | | |
| Lung Margin (ODO4945-03) | 14.1 | Breast Cancer A209073 | 9.9 |
| Lung Malignant Cancer (OD03126) | 16.0 | Breast Margin A209073 | 17.2 |
| Lung Margin (OD03126) | 4.3 | Breast cancer (OD06083) | 50.3 |
| Lung Cancer (OD05014A) | 7.5 | Breast cancer node metastasis | 42.0 |
| | | (0D06083) | |
| Lung Margin (OD05014B) | 16.2 | Normal Liver | 12.2 |
| Lung cancer (OD06081) | 23.8 | Liver Cancer 1026 | 3.2 |
| Lung Margin (OD06081) | 12.3 | Liver Cancer 1025 | 10.4 |
| Lung Cancer (OD04237-01) | 9.9 | Liver Cancer 6004-T | 0.3 |
| Lung Margin (OD04237-02) | 25.5 | Liver Tissue 6004-N | 6.8 |
| Ocular Mel Met to Liver (ODO4310) | 4.3 | Liver Cancer 6005-T | 13.6 |
| Liver Margin (ODO4310) | 3.7 | Liver Tissue 6005-N | 8.8 |
| Melanoma Metastasis | 5.8 | Liver Cancer | 21.2 |
| Lung Margin (OD04321) | 15.1 | Normal Bladder | 17.4 |
| Normal Kidney | 1.8 | Bladder Cancer | 4.6 |
| Kidney Ca, Nuclear grade 2 | 41.8 | Bladder Cancer | 22.4 |
| (OD04338) | | | |
| Kidney Margin (OD04338) | 10.4 | Normal Stomach | 27.7 |
| Kidney Ca Nuclear grade 1/2 | 52.1 | Gastric Cancer 9060397 | 3.6 |
| (OD04339) | | | |
| Kidney Margin (OD04339) | 15.3 | Stomach Margin 9060396 | 14.2 |
| Kidney Ca, Clear cell type (OD04340) | 0.0 | Gastric Cancer 9060395 | 5.1 |
| Kidney Margin (OD04340) | 16.8 | Stomach Margin 9060394 | 10.2 |
| Kidney Ca, Nuclear grade 3 | 0.0 | Gastric Cancer 064005 | 12.1 |
| (OD04348) | | | |

[1395] TABLE ASF
Panel 2D
Column A - Rel. Exp.(%) Ag2872, Run 161971795

| Tissue Name | A | Tissue Name | A |
|---|---|---|---|
| Normal Colon | 30.8 | Kidney Margin 8120608 | 2.9 |
| CC Well to Mod Diff (ODO3866) | 13.0 | Kidney Cancer 8120613 | 7.6 |
| CC Margin (ODO3866) | 5.9 | Kidney Margin 8120614 | 15.3 |
| CC Gr.2 rectosigmoid (ODO3868) | 16.2 | Kidney Cancer 9010320 | 10.9 |
| CC Margin (ODO3868) | 3.4 | Kidney Margin 9010321 | 23.0 |
| CC Mod Diff(ODO3920) | 16.3 | Normal Uterus | 0.0 |
| CC Margin (ODO3920) | 10.9 | Uterine Cancer 064011 | 23.5 |
| CC Gr.2 ascend colon (ODO3921) | 20.4 | Normal Thyroid | 4.0 |
| CC Margin (ODO3921) | 4.8 | Thyroid Cancer | 14.5 |
| CC from Partial Hepatectomy | 21.6 | Thyroid Cancer A302152 | 15.0 |
| (ODO4309) Mets | | | |
| Liver Margin (ODO4309) | 6.2 | Thyroid Margin A302153 | 11.7 |
| Colon mets to lung (OD04451-01) | 24.0 | Normal Breast | 21.3 |
| Lung Margin (OD04451-02) | 9.5 | Breast Cancer | 25.9 |
| Normal Prostate 6546-1 | 1.8 | Breast Cancer (OD04590-01) | 42.3 |
| Prostate Cancer (OD04410) | 19.1 | Breast Cancer Mets (OD04590-03) | 39.2 |
| Prostate Margin (OD04410) | 15.2 | Breast Cancer Metastasis | 40.9 |
| Prostate Cancer (OD04720-01) | 17.2 | Breast Cancer | 15.9 |
| Prostate Margin (OD04720-02) | 18.3 | Breast Cancer | 24.8 |
| Normal Lung | 31.0 | Breast Cancer 9100266 | 23.8 |
| Lung Met to Muscle (ODO4286) | 12.1 | Breast Margin 9100265 | 7.9 |
| Muscle Margin (ODO4286) | 4.6 | Breast Cancer A209073 | 23.2 |
| Lung Malignant Cancer (OD03126) | 35.4 | Breast Margin A209073 | 17.2 |
| Lung Margin (OD03126) | 24.8 | Normal Liver | 4.2 |
| Lung Cancer (OD04404) | 43.2 | Liver Cancer | 10.1 |
| Lung Margin (OD04404) | 14.2 | Liver Cancer 1025 | 3.3 |
| Lung Cancer (OD04565) | 26.6 | Liver Cancer 1026 | 5.3 |
| Lung Margin (OD04565) | 8.1 | Liver Cancer 6004-T | 4.6 |
| Lung Cancer (OD04237-01) | 25.2 | Liver Tissue 6004-N | 8.5 |
| Lung Margin (OD04237-02) | 16.6 | Liver Cancer 6005-T | 5.6 |
| Ocular Mel Met to Liver (ODO4310) | 7.0 | Liver Tissue 6005-N | 1.6 |
| Liver Margin (ODO4310) | 9.2 | Normal Bladder | 28.7 |
| Melanoma Metastasis | 8.0 | Bladder Cancer | 15.1 |
| Lung Margin (OD04321) | 32.1 | Bladder Cancer | 27.4 |
| Normal Kidney | 32.5 | Bladder Cancer (OD04718-01) | 32.1 |
| Kidney Ca, Nuclear grade 2 (OD04338) | 30.8 | Bladder Normal Adjacent | 0.9 |
| | | (OD04718-03) | |
| Kidney Margin (OD04338) | 32.8 | Normal Ovary | 2.9 |
| Kidney Ca Nuclear grade 1/2 (OD04339) | 31.6 | Ovarian Cancer | 17.1 |
| Kidney Margin (OD04339) | 23.3 | Ovarian Cancer (OD04768-07) | 100.0 |
| Kidney Ca, Clear cell type (OD04340) | 5.5 | Ovary Margin (OD04768-08) | 1.5 |
| Kidney Margin (OD04340) | 29.5 | Normal Stomach | 15.8 |
| Kidney Ca, Nuclear grade 3 (OD04348) | 0.5 | Gastric Cancer 9060358 | 2.5 |
| Kidney Margin (OD04348) | 27.9 | Stomach Margin 9060359 | 7.5 |
| Kidney Cancer (OD04622-01) | 6.0 | Gastric Cancer 9060395 | 8.8 |
| Kidney Margin (OD04622-03) | 4.5 | Stomach Margin 9060394 | 14.4 |
| Kidney Cancer (OD04450-01) | 16.5 | Gastric Cancer 9060397 | 33.0 |
| Kidney Margin (OD04450-03) | 19.2 | Stomach Margin 9060396 | 7.9 |
| Kidney Cancer 8120607 | 11.5 | Gastric Cancer 064005 | 23.0 |

[1396] TABLE ASG
Panel 3D
Column A - Rel. Exp.(%) Ag2872, Run 164543502
Column B - Rel. Exp.(%) Ag2872, Run 164828587

| Tissue Name | A | B | Tissue Name | A | B |
|---|---|---|---|---|---|
| 94905 Daoy | 2.5 | 1.9 | 94954 Ca Ski Cervical | 8.2 | 9.7 |
| Medulloblastoma/Cerebellum | | | epidermoid carcinoma | | |
| | | | (metastasis | | |
| 94906 TE671 | 1.5 | 2.0 | 94955 ES-2 Ovarian clear cell | 0.6 | 0.5 |
| Medulloblastom/Cerebellum | | | carcinoma | | |
| 94907 D283 Med | 6.3 | 8.8 | 94957 Ramos Stimulated with | 3.0 | 3.3 |
| Medulloblastoma/Cerebellum | | | PMA/ionomycin 6h | | |
| 94908 PFSK-1 Primitive | 1.3 | 1.6 | 94958 Ramos Stimulated with | 3.0 | 3.8 |
| Neuroectodermal/Cerebellum | | | PMA/ionomycin 14h | | |
| 94909 XF-498 CNS | 0.3 | 0.4 | 94962 MEG-01 Chronic | 0.4 | 0.8 |
| | | | myelogenous leukemia | | |
| | | | (megokaryoblast) | | |
| 94910 SNB-78 CNS/glioma | 0.0 | 0.0 | 94963 Raji Burkitt's | 1.2 | 1.1 |
| | | | lymphoma | | |
| 94911 SF-268 CNS/glioblastoma | 0.7 | 0.9 | 94964 Daudi Burkitt's | 2.2 | 2.4 |
| | | | lymphoma | | |
| 94912 T98G Glioblastoma | 0.7 | 1.2 | 94965 U266 B-cell | 1.5 | 1.1 |
| | | | plasmacytoma/myeloma | | |
| 96776 SK-N-SH Neuroblastoma | 1.2 | 2.0 | 94968 CA46 Burkitt's | 1.4 | 0.8 |
| (metastasis) | | | lymphoma | | |
| 94913 SF-295 CNS/glioblastoma | 0.4 | 0.6 | 94970 RL non-Hodgkin's B- | 0.7 | 0.9 |
| | | | cell lymphoma | | |
| 94914 Cerebellum | 7.0 | 10.4 | 94972 JM1 pre-B-cell | 1.2 | 1.7 |
| | | | lymphoma/leukemia | | |
| 96777 Cerebellum | 7.9 | 12.1 | 94973 Jurkat T cell leukemia | 1.7 | 1.8 |
| 94916 NCI-H292 | 20.9 | 25.5 | 94974 TF-1 Erythroleukemia | 0.2 | 0.2 |
| Mucoepidermoid lung carcinoma | | | | | |
| 94917 DMS-114 Small cell lung | 1.6 | 1.7 | 94975 HUT 78 T-cell | 0.9 | 1.6 |
| cancer | | | lymphoma | | |
| 94918 DMS-79 Small cell lung | 100.0 | 100.0 | 94977 U937 Histiocytic | 0.6 | 1.4 |
| cancer/neuroendocrine | | | lymphoma | | |
| 94919 NCI-H146 Small cell lung | 8.5 | 8.9 | 94980 KU-812 Myelogenous | 0.1 | 0.2 |
| cancer/neuroendocrine | | | leukemia | | |
| 94920 NCI-H526 Small cell lung | 9.7 | 13.6 | 769-P- Clear cell renal | 1.7 | 2.2 |
| cancer/neuroendocrine | | | carcinoma | | |
| 94921 NCI-N417 Small cell lung | 2.5 | 2.9 | 94983 Caki-2 Clear cell renal | 1.8 | 2.6 |
| cancer/neuroendocrine carcinoma | | | | | |
| 94923 NCI-H82 Small cell lung | 1.5 | 1.7 | 94984 SW 839 Clear cell renal | 2.1 | 2.2 |
| cancer/neuroendocrine | | | carcinoma | | |
| 94924 NCI-H157 Squamous cell | 7.4 | 10.1 | 94986 G401 Wilms' tumor | 0.8 | 1.6 |
| lung cancer (metastasis) | | | | | |
| 94925 NCI-H1155 Large cell | 8.7 | 10.8 | 94987 Hs766T Pancreatic | 2.8 | 3.1 |
| lung cancer/neuroendocrine | | | carcinoma (LN metastasis) | | |
| 94926 NCI-H1299 Large cell | 5.1 | 5.1 | 94988 CAPAN-1 Pancreatic | 3.3 | 3.4 |
| lung cancer/neuroendocrine | | | adenocarcinoma (liver | | |
| | | | metastasis) | | |
| 94927 NCI-H727 Lung carcinoid | 6.2 | 6.7 | 94989 SU86.86 Pancreatic | 5.7 | 7.4 |
| | | | carcinoma (liver metastasis) | | |
| 94928 NCI-UMC-11 Lung | 17.8 | 15.4 | 94990 BxPC-3 Pancreatic | 7.1 | 10.0 |
| carcinoid | | | adenocarcinoma | | |
| 94929 LX-1 Small cell lung | 5.1 | 4.3 | 94991 HPAC Pancreatic | 4.4 | 3.2 |
| cancer | | | adenocarcinoma | | |
| 94930 Colo-205 Colon cancer | 3.5 | 4.5 | 94992 MIA PaCa-2 Pancreatic | 0.8 | 1.6 |
| | | | carcinoma | | |
| 94931 KM12 Colon cancer | 5.2 | 6.0 | 94993 CFPAC-1 Pancreatic | 30.4 | 28.5 |
| | | | ductal adenocarcinoma | | |
| 94932 KM20L2 Colon cancer | 1.3 | 0.9 | 94994 PANC-1 Pancreatic | 3.8 | 3.7 |
| | | | epithelioid ductal carcinoma | | |
| 94933 NCI-H716 Colon cancer | 10.8 | 13.9 | 94996 T24 Bladder carcinma | 2.5 | 2.4 |
| | | | (transitional cell | | |
| 94935 SW-48 Colon | 1.6 | 1.3 | 5637- Bladder carcinoma | 5.7 | 6.0 |
| adenocarcinoma | | | | | |
| 94936 SW1116 Colon | 2.9 | 2.9 | 94998 HT-1197 Bladder | 6.0 | 6.3 |
| adenocarcinoma | | | carcinoma | | |
| 94937 LS 174T Colon | 6.2 | 6.9 | 94999 UM-UC-3 Bladder | 0.8 | 0.6 |
| adenocarcinoma | | | carcinma (transitional cell) | | |
| 94938 SW-948 Colon | 0.7 | 0.6 | 95000 A204 | | |
| adenocarcinoma | | | Rhabdomyosarcoma | 0.9 | 1.2 |
| 94939 SW-480 Colon | 2.2 | 0.2 | 95001 HT-1080 Fibrosarcoma | 8.2 | 11.8 |
| adenocarcinoma | | | | | |
| 94940 NCI-SNU-5 Gastric | 2.8 | 3.4 | 95002 MG-63 Osteosarcoma | 0.0 | 0.0 |
| carcinoma | | | (bone) | | |
| KATO III- Gastric carcinoma | 3.3 | 6.3 | 95003 SK-LMS-1 | 1.7 | 1.8 |
| | | | Leiomyosarcoma (vulva) | | |
| 94943 NCI-SNU-16 Gastric | 3.9 | 3.8 | 95004 SJRH30 | 1.4 | 0.7 |
| carcinoma | | | Rhabdomyosarcoma (met to | | |
| | | | bone marrow) | | |
| 94944 NCI-SNU-1 Gastric | 6.0 | 8.0 | 95005 A431 Epidermoid | 4.1 | 5.6 |
| carcinoma | | | carcinoma | | |
| 94946 RF-1 Gastric | 1.6 | 2.3 | 95007 WM266-4 Melanoma | 2.0 | 2.1 |
| adenocarcinoma | | | | | |
| 94947 RF-48 Gastric | 2.3 | 1.8 | DU 145- Prostate carcinoma | 0.3 | 0.1 |
| adenocarcinoma | | | (brain metastasis) | | |
| 96778 MKN-45 Gastric | 7.0 | 7.6 | 95012 MDA-MB-468 Breast | 4.6 | 7.5 |
| carcinoma | | | adenocarcinoma | | |
| 94949 NCI-N87 Gastric | 4.4 | 4.8 | SCC-4- Squamous cell | 0.8 | 0.4 |
| carcinoma | | | carcinoma of tongue | | |
| 94951 OVCAR-5 Ovarian | 0.9 | 1.4 | SCC-9- Squamous cell | 0.7 | 0.5 |
| carcinoma | | | carcinoma of tongue | | |
| 94952 RL95-2 Uterine carcinoma | 2.3 | 3.0 | SGC-15- Squamous cell | 0.4 | 0.3 |
| | | | carcinoma of tongue | | |
| 94953 HelaS3 Cervical | 1.4 | 2.2 | 95017 CAL 27 Squamous cell | 3.1 | 3.4 |
| adenocarcinoma | | | carcinoma of tongue | | |

[1397] TABLE ASH
Panel 4.1D
Column A - Rel. Exp.(%) Ag4847, Run 223335762

| Tissue Name | A | Tissue Name | A |
|---|---|---|---|
| Secondary Th1 act | 12.2 | HUVEC IL-1beta | 0.0 |
| Secondary Th2 act | 14.8 | HUVEC IFN gamma | 0.0 |
| Secondary Tr1 act | 9.5 | HUVEC TNF alpha + IFN gamma | 0.0 |
| Secondary Th1 rest | 2.6 | HUVEC TNF alpha + IL4 | 0.0 |
| Secondary Th2 rest | 8.7 | HUVEC IL-11 | 0.0 |
| Secondary Tr1 rest | 9.9 | Lung Microvascular EC none | 0.0 |
| Primary Th1 act | 2.1 | Lung Microvascular EC TNFalpha + IL- | 0.0 |
| | | 1beta | |
| Primary Th2 act | 14.2 | Microvascular Dermal EC none | 0.0 |
| Primary Tr1 act | 2.8 | Microsvasular Dermal EC TNFalpha + IL- | 0.0 |
| | | 1beta | |
| Primary Th1 rest | 2.7 | Bronchial epithelium TNFalpha + IL1beta | 51.8 |
| Primary Th2 rest | 3.6 | Small airway epithelium none | 28.7 |
| Primary Tr1 rest | 19.1 | Small airway epithelium TNFalpha + IL- | 52.5 |
| | | 1beta | |
| CD45RA CD4 lymphocyte act | 5.3 | Coronery artery SMC rest | 0.0 |
| CD45RO CD4 lymphocyte act | 9.1 | Coronery artery SMC TNFalpha + IL-1beta | 0.1 |
| CD8 lymphocyte act | 3.9 | Astrocytes rest | 16.7 |
| Secondary CD8 lymphocyte rest | 6.6 | Astrocytes TNFalpha + IL-1beta | 9.7 |
| Secondary CD8 lymphocyte act | 2.4 | KU-812 (Basophil) rest | 0.3 |
| CD4 lymphocyte none | 0.5 | KU-812 (Basophil) PMA/ionomycin | 0.2 |
| 2ry Th1/Th2/Tr1 anti-CD95 | 7.0 | CCD1106 (Keratinocytes) none | 68.8 |
| CH11 | | | |
| LAK cells rest | 1.9 | CCD1106 (Keratinocytes) TNFalpha + IL- | 29.5 |
| | | 1beta | |
| LAK cells IL-2 | 6.3 | Liver cirrhosis | 4.1 |
| LAK cells IL-2 + IL-12 | 6.2 | NCI-H292 none | 27.7 |
| LAK cells IL-2 + IFN gamma | 4.0 | NCI-H292 IL-4 | 87.1 |
| LAK cells IL-2 + IL-18 | 3.5 | NCI-H292 IL-9 | 81.2 |
| LAK cells PMA/ionomycin | 3.3 | NCI-H292 IL-13 | 74.7 |
| NK Cells IL-2 rest | 5.1 | NCI-H292 IFN gamma | 35.4 |
| Two Way MLR 3 day | 1.6 | HPAEC none | 0.0 |
| Two Way MLR 5 day | 1.3 | HPAEC TNF alpha + IL-1 beta | 0.0 |
| Two Way MLR 7 day | 1.6 | Lung fibroblast none | 0.4 |
| PBMC rest | 3.8 | Lung fibroblast TNF alpha + IL-1 beta | 0.5 |
| PBMC PWM | 5.6 | Lung fibroblast IL-4 | 0.0 |
| PBMC PHA-L | 13.0 | Lung fibroblast IL-9 | 0.0 |
| Ramos (B cell) none | 15.1 | Lung fibroblast IL-13 | 0.0 |
| Ramos (B cell) ionomycin | 15.5 | Lung fibroblast IFN gamma | 0.0 |
| B lymphocytes PWM | 9.2 | Dermal fibroblast CCD1070 rest | 0.0 |
| B lymphocytes CD40L and IL-4 | 42.0 | Dermal fibroblast CCD1070 TNF alpha | 6.2 |
| EOL-1 dbcAMP | 0.0 | Dermal fibroblast CCD1070 IL-1 beta | 0.0 |
| EOL-1 dbcAMP | 0.0 | Dermal fibroblast IFN gamma | 0.0 |
| PMA/ionomycin | | | |
| Dendritic cells none | 0.0 | Dermal fibroblast IL-4 | 0.0 |
| Dendritic cells LPS | 0.0 | Dermal Fibroblasts rest | 0.0 |
| Dendritic cells anti-CD40 | 0.0 | Neutrophils TNFa + LPS | 0.0 |
| Monocytes rest | 0.0 | Neutrophils rest | 0.0 |
| Monocytes LPS | 0.0 | Colon | 0.7 |
| Macrophages rest | 0.0 | Lung | 8.8 |
| Macrophages LPS | 0.0 | Thymus | 32.5 |
| HUVEC none | 0.0 | Kidney | 100.0 |
| HUVEC starved | 0.0 | | |

[1398] TABLE ASI
Panel 5 Islet
Column A - Rel. Exp.(%) Ag2872, Run 237228677

| Tissue Name | A | Tissue Name | A |
|---|---|---|---|
| 97457 Patient-02go adipose | 5.1 | 94709 Donor 2 AM - A adipose | 1.8 |
| 97476 Patient-07sk skeletal muscle | 2.7 | 94710 Donor 2 AM - B adipose | 0.0 |
| 97477 Patient-07ut uterus | 0.0 | 94711 Donor 2 AM - C adipose | 0.0 |
| 97478 Patient-07pl placenta | 39.5 | 94712 Donor 2 AD - A adipose | 0.0 |
| 99167 Bayer Patient 1 | 97.9 | 94713 Donor 2 AD - B adipose | 0.0 |
| 97482 Patient-08ut uterus | 0.0 | 94714 Donor 2 AD - C adipose | 0.0 |
| 97483 Patient-08pl placenta | 21.9 | 94742 Donor 3 U - A Mesenchymal | 0.0 |
| | | Stem Cells | |
| 97486 Patient-09sk skeletal muscle | 2.5 | 94743 Donor 3 U - B Mesenchymal | 0.0 |
| | | Stem Cells | |
| 97487 Patient-09ut uterus | 0.0 | 94730 Donor 3 AM - A adipose | 0.0 |
| 97488 Patient-09pl placenta | 19.3 | 94731 Donor 3 AM - B adipose | 0.0 |
| 97492 Patient-10ut uterus | 1.9 | 94732 Donor 3 AM - C adipose | 0.0 |
| 97493 Patient-10pl placenta | 100.0 | 94733 Donor 3 AD - A adipose | 0.0 |
| 97495 Patient-11go adipose | 4.0 | 94734 Donor 3 AD - B adipose | 0.0 |
| 97496 Patient-11sk skeletal muscle | 3.2 | 94735 Donor 3 AD - C adipose | 0.0 |
| 97497 Patient-11ut uterus | 1.7 | 77138 Liver HepG2untreated | 46.0 |
| 97498 Patient-11pl placenta | 23.8 | 73556 Heart Cardiac stromal cells | 0.0 |
| | | (primary) | |
| 97500 Patient-12go adipose | 1.6 | 81735 Small Intestine | 13.5 |
| 97501 Patient-12sk skeletal muscle | 4.0 | 72409 Kidney Proximal Convoluted | 17.1 |
| | | Tubule | |
| 97502 Patient-12ut uterus | 0.0 | 82685 Small intestine Duodenum | 1.4 |
| 97503 Patient-12pl placenta | 20.3 | 90650 Adrenal Adrenocortical | 1.6 |
| | | adenoma | |
| 94721 Donor 2 U - A Mesenchymal | 0.0 | 72410 Kidney HRCE | 90.1 |
| Stem Cells | | | |
| 94722 Donor 2 U - B Mesenchymal | 0.0 | 72411 Kidney HRE | 48.6 |
| Stem Cells | | | |
| 94723 Donor 2 U - C Mesenchymal | 0.0 | 73139 Uterus Uterine smooth muscle | 2.9 |
| Stem Cells | | cells | |

[1399] General_screening_panel_v1.5 Summary: Ag4847 Expression of this gene was highest in the cerebellum (CT=25.4). This gene was also expressed at more moderate levels in other central nervous system tissues, including amygdala, hippocampus, cerebral cortex, substantia nigra, thalamus and spinal cord (CTs=27-30). This gene encodes a protein with homology to mixed lineage kinase 2. Mixed lineage kinase 2 is a mammalian protein kinase that activates stress-activated protein kinases/c-jun N-terminal kinases (SAPK/JNKs) through direct phosphorylation of their upstream activator, SEK1/JNKK. MAP kinase signaling pathways are important mediators of cellular responses to a wide variety of stimuli. Signals pass along these pathways via kinase cascades in which three protein kinases are sequentially phosphorylated and activated, initiating a range of cellular programs including cellular proliferation, endocrine, immune and inflammatory responses, and apoptosis. Mixed lineage kinases have been implicated in neuronal apoptosis (Xu Z, Maroney A C, Dobrzanski P, Kukekov N V, Greene L A. The MLK family mediates c-Jun N-terminal kinase activation in neuronal apoptosis. Mol Cell Biol 2001 July; 21(14):4713-24). Therapeutic modulation of this gene, expressed protein and/or use of antibodies or small molecule drugs targeting the gene or gene product are useful in slowing neuronal apoptosis in the treatment of neurodegenerative diseases such as Alzheimer's, Huntington's and Parkinson's diseases.

[1400] This gene also showed significant expression in cell lines drived from ovarian cancers. Therapeutic modulation of this gene, expressed protein and/or use of antibodies or small molecule drugs targeting the gene or gene product are useful in the treatment of ovarian cancer.

[1401] This gene was expressed at low to moderate levels in endocrine and metabolic tissues including adipose, adrenal gland, liver, pancreas, pituitary gland, skeletal muscle and thyroid. Therapeutic modulation of this gene, expressed protein and/or use of antibodies or small molecule drugs targeting the gene or gene product are useful in the treatment of endocrine/metabolic-related disorders, such as obesity and diabetes.

[1402] Panel 1.3D Summary: Ag2872 This gene showed highest expression in samples derived from brain tissue, either normal tissue or cell lines derived from malignant brain tissue. Please see panel General_Screening_V1.5 for a discussion of this gene in the central nervous system.

[1403] There was substantial expression of this gene in a number of cancer cell lines, including ovarian cancer, breast cancer and renal cancer cell lines. Therapeutic modulation of this gene, expressed protein and/or use of antibodies or small molecule drugs targeting the gene or gene product are useful in the treatment of ovarian, breast or renal cancer.

[1404] There was limited expression of this gene in endocrine/metabolic related tissues. Low expression of this gene was seen in adipose, pancreas, reproductive tissues (testes and ovaries) and skeletal muscle. Therapeutic modulation of this gene, expressed protein and/or use of antibodies or small molecule drugs targeting the gene or gene product are useful in the treatment of different endocrine/metabolic diseases, such as diabetes and obesity.

[1405] Panel 2.2 Summary: Ag2872 Expression of this gene was highest in a sample derived from normal kidney tissue adjacent to a kidney cancer (CT=31.2). In addition, there was substantial expression of this gene in samples derived from a cluster of breast cancers. Therapeutic modulation of this gene, expressed protein and/or use of antibodies or small molecule drugs targeting the gene or gene product are useful in the treatment of breast cancer.

[1406] Panel 2D Summary: Ag2872 Expression of this gene was highest in a sample derived from an ovarian cancer (CT=28.4). Thus, expression of this gene can be used to distinguish ovarian cancer tissue from the other tissues in the panel. There was substantial expression of this gene in samples derived from a cluster of breast cancers and well as a small but appreciable difference in expression between a set of colon cancers and their respective normal adjacent tissues. Therapeutic modulation of this gene, expressed protein and/or use of antibodies or small molecule drugs targeting the gene or gene product are useful in the treatment of breast cancer, ovarian cancer or colon cancer.

[1407] Panel 3D Summary: Ag2872 This gene showed highest expression in a sample derived from a small cell lung cancer derived cell line (CT=26.1). There was substantial expression of this gene in two other lung cancer derived cell lines and a pancreatic cancer derived cell line. Therapeutic modulation of this gene, expressed protein and/or use of antibodies or small molecule drugs targeting the gene or gene product are useful in the treatment of lung cancer.

[1408] Panel 4.1D Summary: Ag4847 Expression of this gene was highest in kidney (CT=28.3). This gene was also highly expressed in small airway epithelium treated with TNF-a and IL-1b, and to a lower extent in the same non treated tissue and also in the mucoepidermoid cell line H292 upon treatment with the Th2 cytokines IL-4 and Il-9, cytokines that are responsible for increasing mucus production in this cell line. Expression of this gene was up-regulated in bronchial epithelium upon TNF-a and IL-1 treatment. Moderate expression of this gene was also seen in activated B cells. This gene encodes for a mixed lineage kinase 2 (MLK2) like molecule which was reported to activate JNK pathway (Hirai S, Noda K, Moriguchi T, Nishida E, Yamashita A, Deyama T, Fukuyama K, Ohno S. Differential activation of two JNK activators, MKK7 and SEK1, by MKN28-derived nonreceptor serine/threonine kinase/mixed lineage kinase 2. J Biol Chem 1998 Mar. 27; 273(13):7406-12). Activation of this pathway has been associated to many inflammatory reactions in many cell types. Il-1b which is produced during airway inflammation, has been shown to regulate JNK pathway, for example (Hallsworth M P, Moir L M, Lai D, Hirst S J. Inhibitors of mitogen-activated protein kinases differentially regulate eosinophil-activating cytokine release from human airway smooth muscle. Am J Respir Crit Care Med 2001 Aug. 15; 164(4):688-97). The role of Il-4 and IL-13 in airway remodeling appears also to use JNK pathway (Hashimoto S, Gon Y, Takeshita I, Maruoka S, Horie T. IL-4 and IL-13 induce myofibroblastic phenotype of human lung fibroblasts through c-Jun NH2-terminal kinase-dependent pathway. J Allergy Clin Immunol 2001 June; 107(6):1001-8). Finally, JNK is required for the production of metalloproteinases (Han Z, Boyle D L, Chang L, Bennett B, Karin M, Yang L, Manning A M, Firestein G S. c-Jun N-terminal kinase is required for metalloproteinase expression and joint destruction in inflammatory arthritis. J Clin Invest 2001 July; 108(1):73-81), molecules that play an important role in inflammatory disesease such as rheumatoid arthritis, asthma, and inflammatory bowel disease (IBD). Therapeutic modulation of this gene, expressed protein and/or use of antibodies or small molecule drugs targeting the gene or gene product are useful in the treatment of inflammatory diseseas such as in chronic obstructive pulmonary disease, asthma, emphysema and also rheumatoid arthritis/osteoarthritis, IBD and psoriasis.

[1409] Panel 5 Islet Summary: Ag2872 This gene was expressed at low to moderate levels in pancreatic islet cells and placenta in panel 5I. Please refer to General_screening_panel_v1.5 for a synopsis of the the potential function of this MLK2-like gene in endocrine and metabolic disorders.

[1410] AT. CG56142-01 and CG56142-04: Prostasin.

[1411] Expression of gene CG56142-01 and CG56142-04 were assessed using the primer-probe sets Ag2888 and Ag4095, respectively, described in Table ATA and ATB. Results of the RTQ-PCR runs are shown in Tables ATC, ATD, ATE, ATF, ATG and ATH.

TABLE ATA
Probe Name Ag2888

| | | | Start | SEQ ID |
|---|---|---|---|---|
| Primers | Sequences | Length | Position | No |
| Forward | 5′-aatgagaggggtttcctgtct-3′ | 21 | 18 | 1368 |
| Probe | TET-5′-caggtcctgctccttctggtgctg-3′- | 24 | 40 | 1369 |
| | TAMRA | | | |
| Reverse | 5′-caacgatccgactggacat-3′ | 19 | 82 | 1370 |

[1412] TABLE ATB
Probe Name Ag4095

| | | | Start | SEQ ID |
|---|---|---|---|---|
| Primers | Sequences | Length | Position | No |
| Forward | 5′-aatgagaggggtttcctgtct-3′ | 21 | 13 | 1371 |
| Probe | TET-5′-caggtcctgctccttctggtgctg-3′- | 24 | 35 | 1372 |
| | TAMRA | | | |
| Reverse | 5′-gcagacttccttccctgagt-3′ | 20 | 71 | 1373 |

[1413] TABLE ATC
General_screening_panel_v1.4
Column A - Rel. Exp.(%) Ag4095, Run 219575329

| Tissue Name | A | Tissue Name | A |
|---|---|---|---|
| Adipose | 0.0 | Renal ca. TK-10 | 0.2 |
| Melanoma* Hs688(A).T | 0.0 | Bladder | 0.0 |
| Melanoma* Hs688(B).T | 0.0 | Gastric ca. (liver met.) NCI-N87 | 0.1 |
| Melanoma* M14 | 0.0 | Gastric ca. KATO III | 1.3 |
| Melanoma* LOXIMVI | 0.0 | Colon ca. SW-948 | 0.2 |
| Melanoma* SK-MEL-5 | 0.0 | Colon ca. SW480 | 2.9 |
| Squamous cell carcinoma | 0.0 | Colon ca.* (SW480 met) SW620 | 0.0 |
| SCC-4 | | | |
| Testis Pool | 0.0 | Colon ca. HT29 | 0.0 |
| Prostate ca.* (bone met) | 0.0 | Colon ca. HCT-116 | 0.0 |
| PC-3 | | | |
| Prostate Pool | 0.0 | Colon ca. CaCo-2 | 0.0 |
| Placenta | 0.0 | Colon cancer tissue | 100.0 |
| Uterus Pool | 0.0 | Colon ca. SW1116 | 0.1 |
| Ovarian ca. OVCAR-3 | 0.0 | Colon ca. Colo-205 | 0.0 |
| Ovarian ca. SK-OV-3 | 0.0 | Colon ca. SW-48 | 0.1 |
| Ovarian ca. OVCAR-4 | 0.0 | Colon Pool | 0.0 |
| Ovarian ca. OVCAR-5 | 0.0 | Small Intestine Pool | 0.0 |
| Ovarian ca. IGROV-1 | 7.5 | Stomach Pool | 0.0 |
| Ovarian ca. OVCAR-8 | 2.0 | Bone Marrow Pool | 0.0 |
| Ovary | 0.0 | Fetal Heart | 0.0 |
| Breast ca. MCF-7 | 0.0 | Heart Pool | 0.0 |
| Breast ca. MDA-MB-231 | 0.2 | Lymph Node Pool | 0.0 |
| Breast ca. BT 549 | 0.0 | Fetal Skeletal Muscle | 0.0 |
| Breast ca. T47D | 0.5 | Skeletal Muscle Pool | 0.0 |
| Breast ca. MDA-N | 0.2 | Spleen Pool | 0.0 |
| Breast Pool | 0.0 | Thymus Pool | 0.0 |
| Trachea | 0.0 | CNS cancer (glio/astro) U87-MG | 0.0 |
| Lung | 1.2 | CNS cancer (glio/astro) U-118-MG | 0.0 |
| Fetal Lung | 0.0 | CNS cancer (neuro; met) SK-N-AS | 0.0 |
| Lung ca. NCI-N417 | 0.0 | CNS cancer (astro) SF-539 | 0.0 |
| Lung ca. LX-1 | 0.0 | CNS cancer (astro) SNB-75 | 0.2 |
| Lung Ca. NCI-H146 | 0.0 | CNS cancer (glio) SNB-19 | 6.3 |
| Lung ca. SHP-77 | 0.7 | CNS cancer (glio) SF-295 | 0.5 |
| Lung ca. A549 | 0.0 | Brain (Amygdala) Pool | 0.0 |
| Lung ca. NCI-H526 | 0.0 | Brain (cerebellum) | 0.0 |
| Lung ca. NCI-H23 | 0.0 | Brain (fetal) | 0.0 |
| Lung ca. NCI-H460 | 0.0 | Brain (Hippocampus) Pool | 0.0 |
| Lung ca. HOP-62 | 0.0 | Cerebral Cortex Pool | 0.0 |
| Lung ca. NCI-H522 | 0.0 | Brain (Substantia nigra) Pool | 0.1 |
| Liver | 0.0 | Brain (Thalamus) Pool | 0.0 |
| Fetal Liver | 0.1 | Brain (whole) | 0.0 |
| Liver ca. HepG2 | 0.0 | Spinal Cord Pool | 0.0 |
| Kidney Pool | 0.0 | Adrenal Gland | 0.0 |
| Fetal Kidney | 0.1 | Pituitary gland Pool | 0.0 |
| Renal ca. 786-0 | 0.0 | Salivary Gland | 0.0 |
| Renal ca. A498 | 0.0 | Thyroid (female) | 0.0 |
| Renal ca. ACHN | 0.0 | Pancreatic ca. CAPAN2 | 0.0 |
| Renal ca. UO-31 | 0.0 | Pancreas Pool | 0.0 |

[1414] TABLE ATD
General_screening_panel_v1.5
Column A - Rel. Exp.(%) Ag2888, Run 258495050

| Tissue Name | A | Tissue Name | A |
|---|---|---|---|
| Adipose | 0.0 | Renal ca. TK-10 | 0.0 |
| Melanoma* Hs688(A).T | 0.0 | Bladder | 0.0 |
| Melanoma* Hs688(B).T | 0.0 | Gastric ca. (liver met.) NCI-N87 | 0.0 |
| Melanoma* M14 | 0.2 | Gastric ca. KATO III | 1.3 |
| Melanoma* LOXIMVI | 0.0 | Colon ca. SW-948 | 0.5 |
| Melanoma* SK-MEL-5 | 0.0 | Colon ca. SW480 | 2.7 |
| Squamous cell carcinoma | 0.0 | Colon ca.* (SW480 met) SW620 | 0.0 |
| SCC-4 | | | |
| Testis Pool | 0.0 | Colon ca. HT29 | 0.0 |
| Prostate ca.* (bone met) | 0.0 | Colon ca. HCT-116 | 0.0 |
| PC-3 | | | |
| Prostate Pool | 0.0 | Colon ca. CaCo-2 | 0.0 |
| Placenta | 0.0 | Colon cancer tissue | 100.0 |
| Uterus Pool | 0.0 | Colon ca. SW1116 | 0.0 |
| Ovarian ca. OVCAR-3 | 0.0 | Colon ca. Colo-205 | 0.2 |
| Ovarian ca. SK-OV-3 | 0.0 | Colon ca. SW-48 | 0.0 |
| Ovarian ca. OVCAR-4 | 0.0 | Colon Pool | 0.0 |
| Ovarian ca. OVCAR-5 | 0.0 | Small Intestine Pool | 0.0 |
| Ovarian ca. IGROV-1 | 6.6 | Stomach Pool | 0.0 |
| Ovarian ca. OVCAR-8 | 1.4 | Bone Marrow Pool | 0.0 |
| Ovary | 0.0 | Fetal Heart | 0.0 |
| Breast ca. MCF-7 | 0.0 | Heart Pool | 0.0 |
| Breast ca. MDA-MB-231 | 0.0 | Lymph Node Pool | 0.0 |
| Breast ca. BT 549 | 0.0 | Fetal Skeletal Muscle | 0.0 |
| Breast ca. T47D | 0.0 | Skeletal Muscle Pool | 0.0 |
| Breast ca. MDA-N | 0.3 | Spleen Pool | 0.0 |
| Breast Pool | 0.0 | Thymus Pool | 0.0 |
| Trachea | 0.2 | CNS cancer (glio/astro) U87-MG | 0.0 |
| Lung | 0.0 | CNS cancer (glio/astro) U-118-MG | 0.3 |
| Fetal Lung | 0.0 | CNS cancer (neuro; met) SK-N-AS | 0.0 |
| Lung ca. NCI-N417 | 0.0 | CNS cancer (astro) SF-539 | 0.0 |
| Lung ca. LX-1 | 0.0 | CNS cancer (astro) SNB-75 | 0.0 |
| Lung Ca. NCI-H146 | 0.0 | CNS cancer (glio) SNB-19 | 11.8 |
| Lung ca. SHP-77 | 0.0 | CNS cancer (glio) SF-295 | 0.1 |
| Lung ca. A549 | 0.0 | Brain (Amygdala) Pool | 0.0 |
| Lung ca. NCI-H526 | 0.0 | Brain (cerebellum) | 0.0 |
| Lung ca. NCI-H23 | 0.0 | Brain (fetal) | 0.0 |
| Lung ca. NCI-H460 | 0.0 | Brain (Hippocampus) Pool | 0.0 |
| Lung ca. HOP-62 | 0.0 | Cerebral Cortex Pool | 0.0 |
| Lung ca. NCI-H522 | 0.0 | Brain (Substantia nigra) Pool | 0.0 |
| Liver | 0.0 | Brain (Thalamus) Pool | 0.0 |
| Fetal Liver | 0.0 | Brain (whole) | 0.0 |
| Liver ca. HepG2 | 0.0 | Spinal Cord Pool | 0.0 |
| Kidney Pool | 0.0 | Adrenal Gland | 0.0 |
| Fetal Kidney | 0.0 | Pituitary gland Pool | 0.0 |
| Renal ca. 786-0 | 0.0 | Salivary Gland | 0.0 |
| Renal ca. A498 | 0.0 | Thyroid (female) | 0.0 |
| Renal ca. ACHN | 0.0 | Pancreatic ca. CAPAN2 | 0.0 |
| Renal ca. UO-31 | 0.0 | Pancreas Pool | 0.0 |

[1415] TABLE ATE
Panel 2D
Column A - Rel. Exp.(%) Ag2888, Run 160897960

| Tissue Name | A | Tissue Name | A |
|---|---|---|---|
| Normal Colon | 0.0 | Kidney Margin 8120608 | 0.0 |
| CC Well to Mod Diff (ODO3866) | 100.0 | Kidney Cancer 8120613 | 0.0 |
| CC Margin (ODO3866) | 1.1 | Kidney Margin 8120614 | 0.0 |
| CC Gr.2 rectosigmoid (ODO3868) | 0.0 | Kidney Cancer 9010320 | 0.5 |
| CC Margin (ODO3868) | 0.0 | Kidney Margin 9010321 | 0.0 |
| CC Mod Diff(ODO3920) | 3.5 | Normal Uterus | 0.0 |
| CC Margin (ODO3920) | 0.0 | Uterine Cancer 064011 | 0.0 |
| CC Gr.2 ascend colon (ODO3921) | 1.2 | Normal Thyroid | 0.0 |
| CC Margin (ODO3921) | 0.1 | Thyroid Cancer | 0.0 |
| CC from Partial Hepatectomy | 14.2 | Thyroid Cancer A302152 | 0.0 |
| (ODO4309) Mets | | | |
| Liver Margin (ODO4309) | 0.2 | Thyroid Margin A302153 | 0.0 |
| Colon mets to lung (OD04451-01) | 3.5 | Normal Breast | 0.0 |
| Lung Margin (OD04451-02) | 0.0 | Breast Cancer | 0.0 |
| Normal Prostate 6546-1 | 0.0 | Breast Cancer (OD04590-01) | 0.0 |
| Prostate Cancer (OD04410) | 0.0 | Breast Cancer Mets (OD04590-03) | 0.0 |
| Prostate Margin (OD04410) | 0.0 | Breast Cancer Metastasis | 0.0 |
| Prostate Cancer (OD04720-01) | 0.0 | Breast Cancer | 0.0 |
| Prostate Margin (OD04720-02) | 0.0 | Breast Cancer | 0.0 |
| Normal Lung | 0.0 | Breast Cancer 9100266 | 0.0 |
| Lung Met to Muscle (ODO4286) | 0.0 | Breast Margin 9100265 | 0.0 |
| Muscle Margin (ODO4286) | 0.0 | Breast Cancer A209073 | 0.0 |
| Lung Malignant Cancer (OD03126) | 0.2 | Breast Margin A209073 | 0.0 |
| Lung Margin (OD03126) | 0.0 | Normal Liver | 0.0 |
| Lung Cancer (OD04404) | 0.0 | Liver Cancer | 0.0 |
| Lung Margin (OD04404) | 0.0 | Liver Cancer 1025 | 0.2 |
| Lung Cancer (OD04565) | 0.0 | Liver Cancer 1026 | 0.0 |
| Lung Margin (OD04565) | 0.0 | Liver Cancer 6004-T | 0.0 |
| Lung Cancer (OD04237-01) | 0.2 | Liver Tissue 6004-N | 0.0 |
| Lung Margin (OD04237-02) | 0.0 | Liver Cancer 6005-T | 0.0 |
| Ocular Mel Met to Liver (ODO4310) | 0.0 | Liver Tissue 6005-N | 0.0 |
| Liver Margin (ODO4310) | 0.0 | Normal Bladder | 0.0 |
| Melanoma Metastasis | 0.7 | Bladder Cancer | 0.0 |
| Lung Margin (OD04321) | 0.0 | Bladder Cancer | 0.0 |
| Normal Kidney | 0.0 | Bladder Cancer (OD04718-01) | 0.3 |
| Kidney Ca, Nuclear grade 2 (OD04338) | 0.0 | Bladder Normal Adjacent | 0.0 |
| | | (OD04718-03) | |
| Kidney Margin (OD04338) | 0.0 | Normal Ovary | 0.4 |
| Kidney Ca Nuclear grade 1/2 (OD04339) | 0.0 | Ovarian Cancer | 0.0 |
| Kidney Margin (OD04339) | 0.0 | Ovarian Cancer (OD04768-07) | 0.1 |
| Kidney Ca, Clear cell type (OD04340) | 0.0 | Ovary Margin (OD04768-08) | 0.0 |
| Kidney Margin (OD04340) | 0.0 | Normal Stomach | 0.7 |
| Kidney Ca, Nuclear grade 3 (OD04348) | 0.3 | Gastric Cancer 9060358 | 0.0 |
| Kidney Margin (OD04348) | 0.0 | Stomach Margin 9060359 | 0.5 |
| Kidney Cancer (OD04622-01) | 0.0 | Gastric Cancer 9060395 | 0.0 |
| Kidney Margin (OD04622-03) | 0.0 | Stomach Margin 9060394 | 0.0 |
| Kidney Cancer (OD04450-01) | 0.0 | Gastric Cancer 9060397 | 17.6 |
| Kidney Margin (OD04450-03) | 0.0 | Stomach Margin 9060396 | 0.0 |
| Kidney Cancer 8120607 | 0.0 | Gastric Cancer 064005 | 0.0 |

[1416] TABLE ATF
Panel 3D
Column A - Rel. Exp.(%) Ag2888, Run 164629839

| Tissue Name | A | Tissue Name | A |
|---|---|---|---|
| 94905 Daoy | 0.0 | 94954 Ca Ski Cervical epidermoid | 0.0 |
| Medulloblastoma/Cerebellum | | carcinoma (metastasis | |
| 94906 TE671 | 0.0 | 94955 ES-2 Ovarian clear cell | 0.0 |
| Medulloblastom/Cerebellum | | carcinoma | |
| 94907 D283 Med | 0.0 | 94957 Ramos Stimulated with | 0.0 |
| Medulloblastoma/Cerebellum | | PMA/ionomycin 6 h | |
| 94908 PFSK-1 Primitive | 0.0 | 94958 Ramos Stimulated with | 0.0 |
| Neuroectodermal/Cerebellum | | PMA/ionomycin 14 h | |
| 94909 XF-498 CNS | 0.0 | 94962 MEG-01 Chronic | 0.0 |
| | | myelogenous leukemia | |
| | | (megokaryoblast) | |
| 94910 SNB-78 CNS/glioma | 0.0 | 94963 Raji Burkitt's lymphoma | 0.0 |
| 94911 SF-268 CNS/glioblastoma | 0.0 | 94964 Daudi Burkitt's lymphoma | 0.0 |
| 94912 T98G Glioblastoma | 0.0 | 94965 U266 B-cell | 0.0 |
| | | plasmacytoma/myeloma | |
| 96776 SK-N-SH Neuroblastoma | 0.0 | 94968 CA46 Burkitt's lymphoma | 0.0 |
| (metastasis) | | | |
| 94913 SF-295 CNS/glioblastoma | 0.0 | 94970 RL non-Hodgkin's B-cell | 0.0 |
| | | lymphoma | |
| 94914 Cerebellum | 0.0 | 94972 JM1 pre-B-cell | 0.0 |
| | | lymphoma/leukemia | |
| 96777 Cerebellum | 0.0 | 94973 Jurkat T cell leukemia | 0.0 |
| 94916 NCI-H292 Mucoepidermoid | 0.0 | 94974 TF-l Erythroleukemia | 0.0 |
| lung carcinoma | | | |
| 94917 DMS-114 Small cell lung | 0.0 | 94975 HUT 78 T-cell lymphoma | 0.0 |
| cancer | | | |
| 94918 DMS-79 Small cell lung | 0.0 | 94977 U937 Histiocytic lymphoma | 0.0 |
| cancer/neuroendocrine | | | |
| 94919 NCI-H146 Small cell lung | 0.0 | 94980 KU-812 Myelogenous | 0.0 |
| cancer/neuroendocrine | | leukemia | |
| 94920 NCI-H526 Small cell lung | 0.0 | 769-P-Clear cell renal carcinoma | 0.0 |
| cancer/neuroendocrine | | | |
| 94921 NCI-N417 Small cell lung | 0.0 | 94983 Caki-2 Clear cell renal | 0.0 |
| cancer/neuroendocrine | | carcinoma | |
| 94923 NCI-H82 Small cell lung | 0.0 | 94984 SW 839 Clear cell renal | 0.0 |
| cancer/neuroendocrine | | carcinoma | |
| 94924 NCI-H157 Squamous cell lung | 0.0 | 94986 G401 Wilms'tumor | 0.0 |
| cancer (metastasis) | | | |
| 94925 NCI-H1155 Large cell lung | 0.0 | 94987 Hs766T Pancreatic carcinoma | 77.9 |
| cancer/neuroendocrine | | (LN metastasis) | |
| 94926 NCI-H1299 Large cell lung | 0.0 | 94988 CAPAN-1 Pancreatic | |
| cancer/neuroendocrine | | adenocarcinoma (liver metastasis) | 1.6 |
| 94927 NCI-H727 Lung carcinoid | 0.0 | 94989 SU86.86 Pancreatic carcinoma | 2.5 |
| | | (liver metastasis) | |
| 94928 NCI-UMC-11 Lung carcinoid | 0.0 | 94990 BxPC-3 Pancreatic | 0.0 |
| | | adenocarcinoma | |
| 94929 LX-1 Small cell lung cancer | 0.0 | 94991 HPAC Pancreatic | 0.0 |
| | | adenocarcinoma | |
| 94930 Colo-205 Colon cancer | 0.0 | 94992 MIA PaCa-2 Pancreatic | 0.0 |
| | | carcinoma | |
| 94931 KM12 Colon cancer | 0.0 | 94993 CFPAC-1 Pancreatic ductal | 0.0 |
| | | adenocarcinoma | |
| 94932 KM20L2 Colon cancer | 0.0 | 94994 PANC-1 Pancreatic epithelioid | 0.0 |
| | | ductal carcinoma | |
| 94933 NCI-H716 Colon cancer | 0.0 | 94996 T24 Bladder carcinma | 0.0 |
| | | (transitional cell | |
| 94935 SW-48 Colon adenocarcinoma | 0.0 | 5637-Bladder carcinoma | 0.0 |
| 94936 SW1116 Colon | 0.0 | 94998 HT-1197 Bladder carcinoma | 0.0 |
| adenocarcinoma | | | |
| 94937 LS 174T Colon | 0.0 | 94999 UM-UC-3 Bladder carcinma | 0.0 |
| adenocarcinoma | | (transitional cell) | |
| 94938 SW-948 Colon | 0.0 | 95000 A204 Rhabdomyosarcoma | 0.0 |
| adenocarcinoma | | | |
| 94939 SW-480 Colon | 0.0 | 95001 HT-1080 Fibrosarcoma | 0.0 |
| adenocarcinoma | | | |
| 94940 NCI-SNU-5 Gastric carcinoma | 100.0 | 95002 MG-63 Osteosarcoma (bone) | 0.0 |
| KATO III-Gastric carcinoma | 0.0 | 95003 SK-LMS-1 Leiomyosarcoma | 0.0 |
| | | (vulva) | |
| 94943 NCI-SNU-16 Gastric | 0.0 | 95004 SJRH30 Rhabdomyosarcoma | 0.0 |
| carcinoma | | (met to bone marrow) | |
| 94944 NCI-SNU-1 Gastric carcinoma | 0.0 | 95005 A431 Epidermoid carcinoma | 0.0 |
| 94946 RF-1 Gastric adenocarcinoma | 0.0 | 95007 WM266-4 Melanoma | 0.0 |
| 94947 RF-48 Gastric adenocarcinoma | 0.0 | DU 145-Prostate carcinoma (brain | 0.0 |
| | | metastasis) | |
| 96778 MKN-45 Gastric carcinoma | 0.0 | 95012 MDA-MB-468 Breast | 0.0 |
| | | adenocarcinoma | |
| 94949 NCI-N87 Gastric carcinoma | 27.9 | SCC-4-Squamous cell carcinoma of | 0.0 |
| | | tongue | |
| 94951 OVCAR-5 Ovarian carcinoma | 0.0 | SCC-9-Squamous cell carcinoma of | 0.0 |
| | | tongue | |
| 94952 RL95-2 Uterine carcinoma | 0.0 | SCC-15-Squamous cell carcinoma of | 0.0 |
| | | tongue | |
| 94953 HelaS3 Cervical | 0.0 | 95017 CAL 27 Squamous cell | 0.0 |
| adenocarcinoma | | carcinoma of tongue | |

[1417] TABLE ATG
Panel 4.1D
Column A - Rel. Exp.(%) Ag4095, Run 172383943
Column B - Rel. Exp.(%) Ag4095, Run 268719443

| Tissue Name | A | B | Tissue Name | A | B |
|---|---|---|---|---|---|
| Secondary Th1 act | 0.0 | 0.0 | HUVEC IL-1beta | 0.0 | 0.0 |
| Secondary Th2 act | 0.0 | 0.0 | HUVEC IFN gamma | 0.0 | 0.0 |
| Secondary Tr1 act | 0.0 | 0.0 | HUVEC TNF alpha + IFN gamma | 0.0 | 0.0 |
| Secondary Th1 rest | 0.0 | 0.0 | HUVEC TNF alpha + IL4 | 0.0 | 0.0 |
| Secondary Th2 rest | 0.0 | 0.0 | HUVEC IL-11 | 0.0 | 0.0 |
| Secondary Tr1 rest | 0.0 | 0.0 | Lung Microvascular EC none | 0.0 | 0.0 |
| Primary Th1 act | 0.0 | 0.0 | Lung Microvascular EC TNFalpha + | 0.0 | 0.0 |
| | | | IL-1beta | | |
| Primary Th2 act | 0.0 | 0.0 | Microvascular Dermal EC none | 0.0 | 0.0 |
| Primary Tr1 act | 0.0 | 0.0 | Microsvasular Dermal EC TNFalpha + | 0.0 | 0.0 |
| | | | +IL-1beta | | |
| Primary Th1 rest | 0.0 | 0.0 | Bronchial epithelium TNFalpha + | 0.0 | 0.0 |
| | | | IL1beta | | |
| Primary Th2 rest | 0.0 | 0.0 | Small airway epithelium none | 0.0 | 0.0 |
| Primary Tr1 rest | 0.0 | 0.0 | Small airway epithelium TNFalpha + | 0.0 | 0.0 |
| | | | IL-1beta | | |
| CD45RA CD4 lymphocyte | 0.0 | 0.0 | Coronery artery SMC rest | 0.0 | 0.0 |
| act | | | | | |
| CD45RO CD4 lymphocyte | 0.0 | 0.0 | Coronery artery SMG TNFalpha + IL- | 0.0 | 0.0 |
| act | | | 1beta | | |
| CD8 lymphocyte act | 0.0 | 0.0 | Astrocytes rest | 8.3 | 0.0 |
| Secondary CD8 lymphocyte | 0.0 | 0.0 | Astrocytes TNFalpha + IL-1beta | 0.0 | 0.0 |
| rest | | | | | |
| Secondary CD8 lymphocyte | 0.0 | 0.0 | KU-812 (Basophil) rest | 0.0 | 0.0 |
| act | | | | | |
| CD4 lymphocyte none | 0.0 | 0.0 | KU-812 (Basophil) PMA/ionomycin | 0.0 | 0.0 |
| 2ry Th1/Th2/Tr1 anti-CD95 | 0.0 | 0.0 | CCD1106 (Keratinocytes) none | 0.0 | 0.0 |
| CH11 | | | | | |
| LAK cells rest | 0.0 | 0.0 | CCD1106 (Keratinocytes) TNFalpha | 0.0 | 0.0 |
| | | | + IL-1beta | | |
| LAK cells IL-2 | 0.0 | 0.0 | Liver cirrhosis | 0.0 | 0.0 |
| LAK cells IL-2 + IL-12 | 0.0 | 0.0 | NCI-H292 none | 0.0 | 0.0 |
| LAK cells IL-2 + IFN gamma | 0.0 | 0.0 | NCI-H292 IL-4 | 0.0 | 0.0 |
| LAK cells IL-2 + IL-18 | 0.0 | 0.0 | NCI-H292 IL-9 | 0.0 | 0.0 |
| LAK cells PMA/ionomycin | 0.0 | 0.0 | NCI-H292 IL-13 | 0.0 | 0.0 |
| NK Cells IL-2 rest | 0.0 | 0.3 | NCI-H292 IFN gamma | 0.0 | 0.0 |
| Two Way MLR 3 day | 0.0 | 0.0 | HPAEC none | 0.0 | 0.0 |
| Two Way MLR 5 day | 0.0 | 0.0 | HPAEC TNF alpha + IL-1 beta | 0.0 | 0.0 |
| Two Way MLR 7 day | 0.0 | 0.0 | Lung fibroblast none | 0.0 | 0.0 |
| PBMC rest | 0.0 | 0.0 | Lung fibroblast TNF alpha + IL-1 beta | 0.0 | 0.0 |
| PBMC PWM | 0.0 | 0.0 | Lung fibroblast IL-4 | 0.0 | 0.0 |
| PBMC PHA-L | 0.0 | 0.0 | Lung fibroblast IL-9 | 0.0 | 0.0 |
| Ramos (B cell) none | 0.0 | 0.0 | Lung fibroblast IL-13 | 0.0 | 0.0 |
| Ramos (B cell) ionomycin | 0.0 | 0.0 | Lung fibroblast IFN gamma | 0.0 | 0.0 |
| B lymphocytes PWM | 0.0 | 0.0 | Dermal fibroblast CCD1070 rest | 0.0 | 0.0 |
| B lymphocytes CD40L and | 0.0 | 0.0 | Dermal fibroblast CCD1070 TNF | 0.0 | 0.0 |
| IL-4 | | | alpha | | |
| EOL-1 dbcAMP | 0.0 | 0.0 | Dermal fibroblast CCD1070 IL-1 beta | 0.0 | 0.0 |
| EOL-1 dbcAMP | 0.0 | 0.0 | Dermal fibroblast IFN gamma | 0.0 | 0.0 |
| PMA/ionomycin | | | | | |
| Dendritic cells none | 0.0 | 0.0 | Dermal fibroblast IL-4 | 3.9 | 0.0 |
| Dendritic cells LPS | 0.0 | 0.0 | Dermal Fibroblasts rest | 0.0 | 0.0 |
| Dendritic cells anti-CD40 | 0.0 | 0.0 | Neutrophils TNFa + LPS | 17.9 | 0.0 |
| Monocytes rest | 0.0 | 0.0 | Neutrophils rest | 100.0 | 100.0 |
| Monocytes LPS | 0.0 | 0.0 | Colon | 0.0 | 0.0 |
| Macrophages rest | 0.0 | 0.0 | Lung | 0.0 | 0.0 |
| Macrophages LPS | 0.0 | 0.0 | Thymus | 0.0 | 0.0 |
| HUVEC none | 0.0 | 0.0 | Kidney | 0.0 | 0.0 |
| HUVEC starved | 0.0 | 0.0 | | | |

[1418] TABLE ATH
general oncology screening panel_v_2.4
Column A - Rel. Exp.(%) Ag4095, Run 268389981

| Tissue Name | A | Tissue Name | A |
|---|---|---|---|
| Colon cancer 1 | 50.7 | Bladder NAT 2 | 0.0 |
| CC Margin (ODO3921) | 0.0 | Bladder NAT 3 | 2.1 |
| Colon cancer 2 | 0.0 | Bladder NAT 4 | 0.0 |
| Colon NAT 2 | 0.0 | Prostate adenocarcinoma 1 | 0.0 |
| Colon cancer 3 | 21.9 | Prostate adenocarcinoma 2 | 0.0 |
| Colon NAT 3 | 0.0 | Prostate adenocarcinoma 3 | 0.0 |
| Colon malignant cancer 4 | 5.1 | Prostate adenocarcinoma 4 | 100.0 |
| Colon NAT 4 | 4.3 | Prostate NAT 5 | 0.0 |
| Lung cancer 1 | 0.0 | Prostate adenocarcinoma 6 | 0.0 |
| Lung NAT 1 | 0.0 | Prostate adenocarcinoma 7 | 0.0 |
| Lung cancer 2 | 0.0 | Prostate adenocarcinoma 8 | 0.0 |
| Lung NAT 2 | 0.0 | Prostate adenocarcinoma 9 | 0.0 |
| Squamous cell carcinoma 3 | 0.0 | Prostate NAT 10 | 0.0 |
| Lung NAT 3 | 0.0 | Kidney cancer 1 | 3.2 |
| Metastatic melanoma 1 | 11.0 | Kidney NAT 1 | 0.0 |
| Melanoma 2 | 0.0 | Kidney cancer 2 | 0.0 |
| Melanoma 3 | 0.0 | Kidney NAT 2 | 0.0 |
| Metastatic melanoma 4 | 0.0 | Kidney cancer 3 | 0.0 |
| Metastatic melanoma 5 | 7.0 | Kidney NAT 3 | 0.0 |
| Bladder cancer 1 | 0.0 | Kidney cancer 4 | 0.0 |
| Bladder NAT 1 | 0.0 | Kidney NAT 4 | 0.0 |
| Bladder cancer 2 | 0.0 | | |

[1419] General_screening_panel_v1.4 Summary: Ag4095 The expression of this gene was highest and almost exclusive to a sample derived from a colon cancer tissue (CT=27). Low to moderate levels of expression of this gene was also detected in two ovarian, two colon and a brain cancer cell lines. Expression levels of this gene is useful as marker to detect colon, ovarian, and brain cancers. Modulation of this gene, encoded protein and/or use of antibodies or small molecule drugs targeting this gene or gene product is useful in the treatment of colon ovarian, and brain cancers.

[1420] General_screening_panel_v1.5 Summary: Ag2888 Significant expression of the CG56142-01 gene was limited to cancer cell lines, with highest expression in a colon cancer cell line (CT=27.9). This gene encodes a putative prostasin, which has been identified as a potential marker of epithelial ovarian cancer. Based on the expression in these panels, expression of this gene will be used as a marker for colon cancer. Therapeutic modulation this gene, encoded protein and/or use of antibodies or small molecule targeting this gene or gene product is useful in the treatment of colon cancer.

[1421] Panel 2D Summary: Ag2888 The expression of the CG56142-01 gene appears to be highest and almost exclusive to a sample derived from a colon cancer (CT=30). Therapeutic modulation this gene, encoded protein and/or use of antibodies or small molecule targeting this gene or gene product is useful in the treatment of colon cancer.

[1422] Panel 3D Summary: Ag2888 The expression of the CG56142-01 gene was highest and almost exclusive to a sample derived from a gastric cancer cell line (CT=34.1). Thus, the expression of this gene is useful as marker for gastric cancer. Moreover, therapeutic modulation of this gene, throguh the use of small molecule drugs, antibodies or protein therapeutics might be beneficial in the treatment of gastric cancer.

[1423] Panel 4.1D Summary: Ag4095 This gene, which encodes a prostasin homolog, was expressed almost exclusively in resting neutrophils (CTs=31). This expression was down regulated in neutrophils activated by TNF-alpha and LPS. Modulation of this gene, encoded protein and/or use of agonist to activated this gene or gene product is useful to reduce activation of these inflammatory cells and eliminate the symptoms in patients with Crohn's disease, ulcerative colitis, multiple sclerosis, chronic obstructive pulmonary disease, asthma, emphysema, rheumatoid arthritis, lupus erythematosus, or psoriasis, AIDS or other immunodeficiencies.

[1424] general oncology screening panel_v_{—}2.4 Summary: Ag4095 Expression of this gene was highest in a prostate adenocarcinoma sample (CT=33). Expression of this gene was upregulated in 2/4 colon cancer samples compared to normal adjacent tissue. Therefore, expression of this gene is useful as a marker for colon cancer. Modulation of this gene, encoded protein and/or use of antibodies or small molecule drugs targeting this gene or gene product are beneficial in the treatment of colon cancer.

[1425] AV. CG56144-01: 7 Transmembrane Receptor.

[1426] Expression of gene CG56144-01 was assessed using the primer-probe sets Ag1221, Ag1221b and Ag1608, described in Tables AVA, AVB and AVC. Results of the RTQ-PCR runs are shown in Tables AVD, AVE, AVF and AVG.

TABLE AVA
Probe Name Ag1221

| | | | Start | SEQ ID |
|---|---|---|---|---|
| Primers | Sequences | Length | Position | No |
| Forward | 5′-ctacaaagcatttgggacatgt-3′ | 22 | 821 | 1374 |
| Probe | TET-5′-cataggtgccatcctgtccacctaca-3′- | 26 | 851 | 1375 |
| | TAMRA | | | |
| Reverse | 5′-ggtgcatgactgaagagatgac-3′ | 22 | 885 | 1376 |

[1427] TABLE AVB
Probe Name Ag1221b

| | | | Start | SEQ ID |
|---|---|---|---|---|
| Primers | Sequences | Length | Position | No |
| Forward | 5′-ctacacgacggtcctgactgggt-3′ | 23 | 512 | 1377 |
| Probe | TET-5′-catcaccaagattggcatggctgctgtg | 30 | 539 | 1378 |
| | gc-3′-TAMRA | | | |
| Reverse | 5′-aaggggagtggagtcattagtg-3′ | 22 | 580 | 1379 |

[1428] TABLE AVC
Probe Name Ag1608

| | | | Start | SEQ ID |
|---|---|---|---|---|
| Primers | Sequences | Length | Position | No |
| Forward | 5′-catattctggttcagggatcag-3′ | 22 | 368 | 1380 |
| Probe | TET-5′-caacttctttgcctgtctggtccaga-3′- | 26 | 395 | 1381 |
| | TAMRA | | | |
| Reverse | 5-′atggagaaggagtgaaggaaga-3′ | 22 | 424 | 1382 |

[1429] TABLE AVD
AI_comprehensive panel_v1.0
Column A - Rel. Exp.(%) Ag1221b, Run 228397224

| Tissue Name | A | Tissue Name | A |
|---|---|---|---|
| 110967 COPD-F | 10.8 | 112427 Match Control Psoriasis-F | 21.8 |
| 110980 COPD-F | 4.2 | 112418 Psoriasis-M | 43.8 |
| 110968 COPD-M | 10.0 | 112723 Match Control Psoriasis-M | 50.0 |
| 110977 COPD-M | 19.8 | 112419 Psoriasis-M | 18.3 |
| 110989 Emphysema-F | 22.8 | 112424 Match Control Psoriasis-M | 0.0 |
| 110992 Emphysema-F | 16.6 | 112420 Psoriasis-M | 34.2 |
| 110993 Emphysema-F | 42.3 | 112425 Match Control Psoriasis-M | 3.5 |
| 110994 Emphysema-F | 11.0 | 104689 (MF) OA Bone-Backus | 12.4 |
| 110995 Emphysema-F | 23.7 | 104690 (MF) Adj “Normal” Bone-Backus | 5.4 |
| 110996 Emphysema-F | 20.2 | 104691 (MF) OA Synovium-Backus | 42.0 |
| 110997 Asthma-M | 0.0 | 104692 (BA) OA Cartilage-Backus | 0.0 |
| 111001 Asthma-F | 9.9 | 104694 (BA) OA Bone-Backus | 11.5 |
| 111002 Asthma-F | 8.4 | 104695 (BA) Adj “Normal” Bone-Backus | 4.0 |
| 111003 Atopic Asthma-F | 6.0 | 104696 (BA) OA Synovium-Backus | 22.7 |
| 111004 Atopic Asthma-F | 0.0 | 104700 (SS) OA Bone-Backus | 85.9 |
| 111005 Atopic Asthma-F | 6.7 | 104701 (SS) Adj “Normal” Bone-Backus | 2.6 |
| 111006 Atopic Asthma-F | 0.0 | 104702 (SS) OA Synovium-Backus | 0.0 |
| 111417 Allergy-M | 1.8 | 117093 OA Cartilage Rep7 | 33.7 |
| 112347 Allergy-M | 1.8 | 112672 OA Bone5 | 16.3 |
| 112349 Normal Lung-F | 1.4 | 112673 OA Synovium5 | 13.9 |
| 112357 Normal Lung-F | 29.9 | 112674 OA Synovial Fluid cells5 | 12.1 |
| 112354 Normal Lung-M | 69.7 | 117100 OA Cartilage Rep14 | 0.0 |
| 112374 Crohns-F | 9.7 | 112756 OA Bone9 | 7.3 |
| 112389 Match Control Crohns-F | 9.0 | 112757 OA Synovium9 | 0.0 |
| 112375 Crohns-F | 0.0 | 112758 OA Synovial Fluid Cells9 | 0.0 |
| 112732 Match Control Crohns-F | 0.0 | 117125 RA Cartilage Rep2 | 19.3 |
| 112725 Crohns-M | 6.1 | 113492 Bone2 RA | 62.4 |
| 112387 Match Control Crohns-M | 9.2 | 113493 Synovium2 RA | 37.6 |
| 112378 Crohns-M | 13.4 | 113494 Syn Fluid Cells RA | 87.1 |
| 112390 Match Control Crohns-M | 11.0 | 113499 Cartilage4 RA | 89.5 |
| 112726 Crohns-M | 6.9 | 113500 Bone4 RA | 92.0 |
| 112731 Match Control Crohns-M | 22.7 | 113501 Synovium4 RA | 37.1 |
| 112380 Ulcer Col-F | 27.2 | 113502 Syn Fluid Cells4 RA | 24.8 |
| 112734 Match Control Ulcer Col-F | 25.2 | 113495 Cartilage3 RA | 53.2 |
| 112384 Ulcer Col-F | 45.1 | 113496 Bone3 RA | 59.5 |
| 112737 Match Control Ulcer Col-F | 10.0 | 113497 Synovium3 RA | 35.6 |
| 112386 Ulcer Col-F | 21.0 | 113498 Syn Fluid Cells3 RA | 100.0 |
| 112738 Match Control Ulcer Col-F | 15.4 | 117106 Normal Cartilage Rep20 | 0.0 |
| 112381 Ulcer Col-M | 2.6 | 113663 Bone3 Normal | 2.1 |
| 112735 Match Control Ulcer Col-M | 8.8 | 113664 Synovium3 Normal | 2.1 |
| 112382 Ulcer Col-M | 16.6 | 113665 Syn Fluid Cells3 Normal | 1.2 |
| 112394 Match Control Ulcer Col-M | 7.1 | 117107 Normal Cartilage Rep22 | 9.9 |
| 112383 Ulcer Col-M | 30.4 | 113667 Bone4 Normal | 3.5 |
| 112736 Match Control Ulcer Col-M | 4.5 | 113668 Synovium4 Normal | 11.8 |
| 112423 Psoriasis-F | 26.8 | 113669 Syn Fluid Cells4 Normal | 3.1 |

[1430] TABLE AVE
Panel 1.3D
Column A - Rel. Exp.(%) Ag1221b, Run 147341937
Column B - Rel. Exp.(%) Ag1221b, Run 152570853
Column C - Rel. Exp.(%) Ag1608, Run 147327901

| Tissue Name | A | B | C | Tissue Name | A | B | C |
|---|---|---|---|---|---|---|---|
| Liver adenocarcinoma | 0.0 | 0.0 | 0.0 | Kidney (fetal) | 1.6 | 0.0 | 0.0 |
| Pancreas | 0.0 | 0.0 | 0.0 | Renal ca. 786-0 | 0.0 | 0.0 | 0.0 |
| Pancreatic ca. CAPAN 2 | 0.0 | 0.0 | 0.0 | Renal ca. A498 | 1.6 | 2.5 | 0.9 |
| Adrenal gland | 1.2 | 4.2 | 0.0 | Renal ca. RXF 393 | 0.0 | 0.0 | 0.0 |
| Thyroid | 1.2 | 0.0 | 0.4 | Renal ca. ACHN | 0.0 | 0.0 | 0.0 |
| Salivary gland | 0.7 | 0.0 | 0.0 | Renal ca. UO-31 | 0.8 | 1.5 | 1.1 |
| Pituitaiy gland | 0.0 | 2.4 | 0.3 | Renal ca. TK-10 | 0.0 | 0.0 | 1.3 |
| Brain (fetal) | 0.0 | 0.0 | 0.0 | Liver | 2.3 | 5.2 | 1.2 |
| Brain (whole) | 1.6 | 3.6 | 0.0 | Liver (fetal) | 1.7 | 4.0 | 0.0 |
| Brain (amygdala) | 1.3 | 3.0 | 1.9 | Liver ca. (hepatoblast) | 0.0 | 0.0 | 0.0 |
| | | | | HepG2 | | | |
| Brain (cerebellum) | 0.0 | 1.3 | 0.0 | Lung | 6.3 | 16.7 | 5.8 |
| Brain (hippocampus) | 2.3 | 6.5 | 0.9 | Lung (fetal) | 2.0 | 8.1 | 3.0 |
| Brain (substantia nigra) | 2.4 | 3.9 | 2.6 | Lung ca. (small cell) LX-1 | 0.0 | 0.0 | 0.0 |
| Brain (thalamus) | 2.2 | 2.6 | 0.7 | Lung ca. (small cell) NCI- | 0.3 | 1.9 | 0.0 |
| | | | | H69 | | | |
| Cerebral Cortex | 1.6 | 5.5 | 0.7 | Lung ca. (s.cell var.) SHP- | 0.0 | 0.0 | 0.0 |
| | | | | 77 | | | |
| Spinal cord | 4.1 | 3.4 | 2.1 | Lung ca. (large cell) NCI- | 0.0 | 0.9 | 0.0 |
| | | | | H460 | | | |
| glio/astro U87-MG | 0.0 | 0.0 | 0.0 | Lung ca. (non-sm. cell) | 0.0 | 0.0 | 1.7 |
| | | | | A549 | | | |
| glio/astro U-118-MG | 0.5 | 0.0 | 2.7 | Lung ca. (non-s.cell) NCI- | 0.0 | 1.2 | 0.7 |
| | | | | H23 | | | |
| astrocytoma SW1783 | 0.0 | 0.0 | 0.0 | Lung ca. (non-s.cell) HOP- | 0.0 | 0.0 | 0.9 |
| | | | | 62 | | | |
| neuro*; met SK-N-AS | 0.3 | 0.0 | 0.0 | Lung ca. (non-s.cl) NCI- | 0.0 | 0.0 | 0.0 |
| | | | | H522 | | | |
| astrocytoma SF-539 | 0.0 | 2.4 | 0.0 | Lung ca. (squam.) SW 900 | 0.0 | 0.0 | 1.4 |
| astrocytoma SNB-75 | 0.6 | 0.0 | 0.0 | Lung ca. (squam.) NCI- | 1.1 | 0.0 | 0.0 |
| | | | | H596 | | | |
| glioma SNB-19 | 0.0 | 1.3 | 0.0 | Mammary gland | 0.6 | 0.0 | 1.1 |
| glioma U251 | 0.0 | 0.5 | 0.0 | Breast ca.* (pl.ef) MCF-7 | 0.0 | 0.0 | 0.0 |
| glioma SF-295 | 0.6 | 0.0 | 0.0 | Breast ca.* (pl.ef) MDA- | 0.0 | 0.0 | 0.0 |
| | | | | MB-231 | | | |
| Heart (Fetal) | 0.0 | 0.0 | 0.0 | Breast ca.* (pl.ef) T47D | 0.0 | 0.0 | 0.0 |
| Heart | 0.0 | 1.3 | 0.0 | Breast ca. BT-549 | 1.6 | 0.0 | 0.9 |
| Skeletal muscle (Fetal) | 2.9 | 7.7 | 2.0 | Breast ca. MDA-N | 0.0 | 0.0 | 0.4 |
| Skeletal muscle | 0.0 | 0.0 | 0.0 | Ovary | 4.4 | 6.3 | 3.4 |
| Bone marrow | 19.1 | 56.6 | 32.5 | Ovarian ca. OVCAR-3 | 0.0 | 0.0 | 0.0 |
| Thymus | 0.9 | 6.3 | 0.4 | Ovarian ca. OVCAR-4 | 0.0 | 0.0 | 0.0 |
| Spleen | 7.7 | 36.6 | 8.4 | Ovarian ca. OVCAR-5 | 0.4 | 0.0 | 2.2 |
| Lymph node | 0.7 | 1.5 | 0.6 | Ovarian ca. OVCAR-8 | 0.6 | 0.0 | 0.0 |
| Colorectal | 1.8 | 6.6 | 1.3 | Ovarian ca. IGROV-1 | 0.0 | 2.1 | 0.4 |
| Stomach | 0.3 | 0.8 | 0.5 | Ovarian ca. (ascites) SK- | 0.0 | 0.0 | 0.0 |
| | | | | OV-3 | | | |
| Small intestine | 1.0 | 1.2 | 0.7 | Uterus | 0.0 | 0.0 | 2.6 |
| Colon ca. SW480 | 0.0 | 0.0 | 0.0 | Placenta | 3.1 | 7.1 | 1.5 |
| Colon ca.* SW620 (SW480 | 0.0 | 0.0 | 0.0 | Prostate | 0.0 | 1.4 | 1.6 |
| met) | | | | | | | |
| Colon ca. HT29 | 0.5 | 1.2 | 0.0 | Prostate ca.* (bone met) | 0.0 | 0.0 | 0.0 |
| | | | | PC-3 | | | |
| Colon ca. HGT-116 | 0.0 | 1.1 | 0.0 | Testis | 1.2 | 2.4 | 1.0 |
| Colon ca. CaCo-2 | 0.0 | 3.4 | 0.0 | Melanoma Hs688(A).T | 0.0 | 0.0 | 0.0 |
| CC Well to Mod Duff | 3.1 | 3.8 | 3.9 | Melanoma* (met) | 0.6 | 0.0 | 0.0 |
| (ODO3866) | | | | Hs688(B).T | | | |
| Colon ca. HCC-2998 | 0.5 | 3.6 | 1.7 | Melanoma UACC-62 | 0.0 | 0.0 | 0.0 |
| Gastric ca. (liver met) NCI- | 100.0 | 100.0 | 100.0 | Melanoma M14 | 0.0 | 0.0 | 0.0 |
| N87 | | | | | | | |
| Bladder | 1.4 | 3.8 | 4.1 | Melanoma LOX IMVI | 1.1 | 0.0 | 0.0 |
| Trachea | 1.9 | 3.8 | 1.9 | Melanoma* (met) SK- | 0.0 | 0.0 | 0.0 |
| | | | | MEL-5 | | | |
| Kidney | 1.2 | 0.0 | 0.0 | Adipose | 0.9 | 14.1 | 8.4 |

[1431] TABLE AVF
Panel 2D
Column A - Rel. Exp.(%) Ag1221b, Run 150783273
Column B - Rel. Exp.(%) Ag1221b, Run 152570968

| Tissue Name | A | B | Tissue Name | A | B |
|---|---|---|---|---|---|
| Normal Colon | 27.4 | 12.9 | Kidney Margin 8120608 | 6.2 | 0.5 |
| CC Well to Mod Diff (OD03866) | 11.8 | 17.0 | Kidney Cancer 8120613 | 0.3 | 0.9 |
| CC Margin (ODO3866) | 20.2 | 7.0 | Kidney Margin 8120614 | 2.7 | 1.0 |
| CC Gr.2 rectosigmoid (ODO3868) | 0.0 | 2.0 | Kidney Cancer 9010320 | 30.8 | 20.6 |
| CC Margin (ODO3868) | 2.4 | 2.9 | Kidney Margin 9010321 | 5.3 | 2.8 |
| CC Mod Diff (ODO3920) | 12.9 | 2.5 | Normal Uterus | 0.0 | 0.0 |
| CC Margin (ODO3920) | 5.4 | 3.8 | Uterine Cancer 064011 | 11.7 | 5.3 |
| CC Gr.2 ascend colon (ODO3921) | 10.4 | 3.4 | Normal Thyroid | 2.7 | 0.0 |
| CC Margin (ODO3921) | 2.9 | 6.2 | Thyroid Cancer | 2.6 | 3.5 |
| CC from Partial Hepatectomy | 16.7 | 6.9 | Thyroid Cancer A302152 | 4.0 | 4.5 |
| (ODO4309) Mets | | | | | |
| Liver Margin (ODO4309) | 14.8 | 6.7 | Thyroid Margin A302153 | 3.7 | 5.2 |
| Colon mets to lung (OD04451-01) | 6.3 | 7.6 | Normal Breast | 5.4 | 6.8 |
| Lung Margin (OD04451-02) | 15.7 | 6.3 | Breast Cancer | 33.2 | 18.4 |
| Normal Prostate 6546-1 | 0.0 | 3.7 | Breast Cancer (OD04590-01) | 22.4 | 27.0 |
| Prostate Cancer (OD04410) | 7.8 | 10.4 | Breast Cancer Mets | 24.0 | 27.9 |
| | | | (OD04590-03) | | |
| Prostate Margin (OD04410) | 23.2 | 26.6 | Breast Cancer Metastasis | 5.1 | 6.1 |
| Prostate Cancer (OD04720-01) | 13.9 | 7.9 | Breast Cancer | 12.9 | 15.0 |
| Prostate Margin (OD04720-02) | 27.9 | 12.5 | Breast Cancer | 1.9 | 2.2 |
| Normal Lung | 100.0 | 100.0 | Breast Cancer 9100266 | 2.9 | 2.1 |
| Lung Met to Muscle (OD04286) | 15.9 | 7.1 | Breast Margin 9100265 | 2.4 | 1.2 |
| Muscle Margin (OD04286) | 13.9 | 13.9 | Breast Cancer A209073 | 13.7 | 5.8 |
| Lung Malignant Cancer | 29.3 | 24.0 | Breast Margin A209073 | 1.0 | 3.8 |
| (OD03126) | | | | | |
| Lung Margin (OD03126) | 61.6 | 53.6 | Normal Liver | 19.6 | 9.6 |
| Lung Cancer (OD04404) | 20.7 | 12.0 | Liver Cancer | 10.2 | 5.6 |
| Lung Margin (OD04404) | 28.7 | 25.7 | Liver Cancer 1025 | 2.9 | 5.0 |
| Lung Cancer (OD04565) | 1.3 | 2.8 | Liver Cancer 1026 | 13.7 | 14.7 |
| Lung Margin (OD04565) | 27.4 | 28.3 | Liver Cancer 6004-T | 3.2 | 11.3 |
| Lung Cancer (OD04237-01) | 2.5 | 8.5 | Liver Tissue 6004-N | 13.9 | 18.8 |
| Lung Margin (OD04237-02) | 39.0 | 36.9 | Liver Cancer 6005-T | 9.7 | 24.8 |
| Ocular Mel Met to Liver | 0.0 | 0.0 | Liver Tissue 6005-N | 2.1 | 3.4 |
| (ODO4310) | | | | | |
| Liver Margin (ODO4310) | 0.0 | 2.6 | Normal Bladder | 22.5 | 19.3 |
| Melanoma Metastasis | 0.0 | 1.1 | Bladder Cancer | 6.6 | 7.3 |
| Lung Margin (OD04321) | 33.4 | 31.2 | Bladder Cancer | 17.1 | 15.0 |
| Normal Kidney | 5.5 | 3.8 | Bladder Cancer (OD04718- | 39.0 | 29.5 |
| | | | 01) | | |
| Kidney Ca, Nuclear grade 2 | 45.7 | 22.7 | Bladder Normal Adjacent | 12.5 | 12.9 |
| (OD04338) | | | (OD04718-03) | | |
| Kidney Margin (OD04338) | 12.7 | 7.6 | Normal Ovary | 3.7 | 5.5 |
| Kidney Ca Nuclear grade 1/2 | 5.6 | 4.9 | Ovarian Cancer | 12.0 | 14.4 |
| (OD04339) | | | | | |
| Kidney Margin (OD04339) | 0.7 | 0.9 | Ovarian Cancer (OD04768- | 14.4 | 10.7 |
| | | | 07) | | |
| Kidney Ca, Clear cell type | 22.5 | 24.8 | Ovary Margin (OD04768-08) | 4.1 | 1.0 |
| (OD04340) | | | | | |
| Kidney Margin (OD04340) | 6.4 | 5.6 | Normal Stomach | 6.3 | 1.9 |
| Kidney Ca, Nuclear grade 3 | 17.6 | 21.2 | Gastric Cancer 9060358 | 1.4 | 3.4 |
| (OD04348) | | | | | |
| Kidney Margin (OD04348) | 26.6 | 24.8 | Stomach Margin 9060359 | 9.9 | 11.3 |
| Kidney Cancer (OD04622-01) | 53.6 | 59.0 | Gastric Cancer 9060395 | 12.7 | 7.7 |
| Kidney Margin (OD04622-03) | 2.2 | 1.9 | Stomach Margin 9060394 | 13.0 | 7.0 |
| Kidney Cancer (OD04450-01) | 1.3 | 0.0 | Gastric Cancer 9060397 | 28.3 | 18.9 |
| Kidney Margin (OD04450-03) | 2.5 | 7.3 | Stomach Margin 9060396 | 2.2 | 1.9 |
| Kidney Cancer 8120607 | 0.0 | 2.0 | Gastric Cancer 064005 | 31.9 | 27.2 |

[1432] TABLE AVG
Panel 4D
Column A - Rel. Exp.(%) Ag1221, Run 140237638
Column B - Ret. Exp.(%) Ag1221, Run 142014678
Column C - Ret. Exp.(%) Ag1221b, Run 150811715
Column D - Ret. Exp.(%) Ag1221b, Run 152571072
Column E - Ret. Exp.(%) Ag1221b, Run 158141668
Column F - Rel. Exp.(%) Ag1608, Run 149925800

| Tissue Name | A | B | C | D | E | F |
|---|---|---|---|---|---|---|
| Secondary Th1 act | 0.0 | 4.7 | 0.0 | 0.2 | 0.0 | 0.0 |
| Secondary Th2 act | 0.0 | 0.0 | 2.2 | 1.9 | 0.4 | 2.2 |
| Secondary Tr1 act | 0.0 | 0.0 | 0.0 | 0.3 | 0.0 | 0.7 |
| Secondary Th1 rest | 0.6 | 0.0 | 0.2 | 0.0 | 0.0 | 0.0 |
| Secondary Th2 rest | 0.0 | 0.0 | 0.0 | 0.0 | 0.0 | 0.0 |
| Secondary Tr1 rest | 0.0 | 0.0 | 0.0 | 0.0 | 0.0 | 0.8 |
| Primary Th1 act | 0.0 | 0.0 | 0.0 | 0.0 | 0.3 | 0.0 |
| Primary Th2 act | 0.0 | 0.0 | 0.0 | 0.0 | 0.0 | 0.4 |
| Primary Tr1 act | 0.0 | 2.6 | 0.2 | 0.0 | 0.1 | 0.0 |
| Primary Th1 rest | 3.1 | 0.0 | 0.7 | 0.6 | 0.6 | 0.6 |
| Primary Th2 rest | 0.0 | 2.7 | 0.0 | 0.0 | 0.0 | 0.0 |
| Primary Tr1 rest | 0.0 | 0.0 | 0.1 | 0.0 | 0.0 | 0.0 |
| CD45RA CD4 lymphocyte act | 1.4 | 0.0 | 0.9 | 3.6 | 0.8 | 2.1 |
| CD45RO CD4 lymphocyte act | 0.0 | 1.9 | 3.2 | 2.0 | 1.4 | 1.1 |
| CD8 lymphocyte act | 0.0 | 0.0 | 0.5 | 0.3 | 0.5 | 0.5 |
| Secondary CD8 lymphocyte rest | 0.0 | 0.0 | 0.7 | 2.8 | 1.2 | 1.6 |
| Secondary CD8 lymphocyte act | 0.0 | 0.0 | 0.0 | 0.0 | 0.0 | 0.0 |
| CD4 lymphocyte none | 1.8 | 0.0 | 0.9 | 0.0 | 0.9 | 3.5 |
| 2ry Th1/Th2/Tr1 anti-CD95 CH11 | 0.0 | 0.0 | 0.2 | 0.0 | 0.3 | 0.0 |
| LAK cells rest | 4.7 | 10.9 | 4.5 | 3.7 | 7.6 | 3.3 |
| LAK cells IL-2 | 0.0 | 2.3 | 1.3 | 3.5 | 1.9 | 2.1 |
| LAK cells IL-2 + IL-12 | 8.9 | 12.4 | 2.3 | 5.5 | 1.3 | 3.6 |
| LAK cells IL-2 + IFN gamma | 10.7 | 0.0 | 6.5 | 8.8 | 9.0 | 11.4 |
| LAK cells IL-2 + IL-18 | 5.8 | 5.31 | 2.5 | 9.6 | 4.8 | 7.3 |
| LAK cells PMA/ionomycin | 5.6 | 6.8 | 9.7 | 13.5 | 17.6 | 12.2 |
| NK Cells IL-2 rest | 1.5 | 2.2 | 0.4 | 0.7 | 0.0 | 0.2 |
| Two Way MLR 3 day | 21.9 | 33.0 | 17.3 | 20.4 | 32.1 | 19.6 |
| Two Way MLR 5 day | 4.3 | 7.0 | 4.9 | 5.2 | 6.7 | 1.8 |
| Two Way MLR 7 day | 2.7 | 0.0 | 0.7 | 1.8 | 0.9 | 0.8 |
| PBMC rest | 5.3 | 8.5 | 6.6 | 7.3 | 11.9 | 6.0 |
| PBMC PWM | 13.0 | 19.5 | 6.5 | 6.7 | 4.5 | 7.7 |
| PBMC PHA-L | 1.3 | 0.0 | 1.4 | 0.4 | 1.3 | 0.0 |
| Ramos (B cell) none | 0.0 | 0.0 | 0.0 | 0.0 | 0.7 | 0.0 |
| Ramos (B cell) ionomycin | 0.0 | 0.0 | 0.0 | 0.0 | 0.0 | 0.0 |
| B lymphocytes PWM | 4.2 | 4.7 | 0.7 | 0.3 | 0.5 | 1.9 |
| B lymphocytes CD40L and IL-4 | 0.0 | 0.0 | 0.0 | 0.1 | 0.2 | 0.3 |
| EOL-1 dbcAMP | 20.6 | 24.8 | 10.9 | 10.6 | 8.8 | 9.0 |
| EOL-1 dbcAMP PMA/ionomycin | 1.2 | 12.2 | 0.9 | 2.1 | 2.5 | 1.6 |
| Dendntic cells none | 0.0 | 0.0 | 0.8 | 0.9 | 1.4 | 1.1 |
| Dendritic cells LPS | 5.4 | 3.4 | 6.0 | 7.2 | 3.9 | 3.6 |
| Dendritic cells anti-CD40 | 4.9 | 19.2 | 6.0 | 6.4 | 4.3 | 6.7 |
| Monocytes rest | 100.0 | 94.6 | 100.0 | 100.0 | 100.0 | 100.0 |
| Monocytes LPS | 25.3 | 45.7 | 9.1 | 9.2 | 6.6 | 8.8 |
| Macrophages rest | 0.0 | 5.0 | 2.3 | 4.9 | 0.8 | 1.8 |
| Macrophages LPS | 58.2 | 100.0 | 25.0 | 32.5 | 25.9 | 21.0 |
| HUVEC none | 0.0 | 0.0 | 0.0 | 0.0 | 0.8 | 0.0 |
| HUVEC starved | 0.0 | 0.0 | 0.0 | 0.0 | 0.0 | 0.0 |
| HUVEC IL-1beta | 0.0 | 0.0 | 0.0 | 0.0 | 0.0 | 0.0 |
| HUVEC IFN gamma | 0.0 | 0.0 | 0.5 | 1.1 | 0.7 | 0.4 |
| HUVEC TNF alpha + IFN gamma | 0.0 | 0.0 | 0.2 | 0.5 | 0.3 | 0.3 |
| HUVEC TNF alpha + IL4 | 0.0 | 0.0 | 0.0 | 0.3 | 0.0 | 0.0 |
| HUVEC IL-11 | 0.0 | 0.0 | 0.0 | 0.0 | 0.0 | 0.0 |
| Lung Microvascular EC none | 0.0 | 0.0 | 0.2 | 0.0 | 1.3 | 0.0 |
| Lung Microvascular EC TNFalpha + IL-1beta | 0.0 | 0.0 | 0.4 | 0.6 | 0.3 | 0.3 |
| Microvascular Dermal EC none | 0.0 | 0.0 | 0.0 | 0.3 | 0.0 | 0.2 |
| Microsvasular Dermal EC TNFalpha + IL-1beta | 0.0 | 0.0 | 0.0 | 0.0 | 0.0 | 0.0 |
| Bronchial epithelium TNFalpha + IL1beta | 0.0 | 0.0 | 0.0 | 0.0 | 0.0 | 0.6 |
| Small airway epithelium none | 0.0 | 0.0 | 0.0 | 0.3 | 1.0 | 0.3 |
| Small airway epithelium TNFalpha + IL-1beta | 1.3 | 0.0 | 0.4 | 0.8 | 0.3 | 0.5 |
| Coronery artery SMC rest | 0.0 | 0.0 | 0.0 | 0.6 | 1.7 | 0.4 |
| Coronery artery SMC TNFalpha + IL-1beta | 0.0 | 0.0 | 0.0 | 0.0 | 0.0 | 0.4 |
| Astrocytes rest | 0.0 | 0.0 | 0.2 | 1.0 | 0.0 | 0.0 |
| Astrocytes TNFalpha + IL-1beta | 0.0 | 0.0 | 0.4 | 0.6 | 0.1 | 0.2 |
| KU-812 (Basophil) rest | 2.7 | 0.0 | 0.2 | 0.0 | 0.3 | 0.0 |
| KU-812 (Basophil) PMA/ionomycin | 1.2 | 1.4 | 0.7 | 0.6 | 0.5 | 0.6 |
| CCD1106 (Keratinocytes) none | 0.0 | 2.1 | 0.0 | 0.0 | 0.0 | 0.0 |
| 93580 CCD1106 (Keratinocytes) TNFa and IFNg | 6.3 | 13.3 | 0.2 | 0.0 | 1.1 | 0.4 |
| Liver cirrhosis | 15.1 | 20.0 | 4.6 | 10.2 | 7.4 | 5.0 |
| Lupus kidney | 0.0 | 0.0 | 0.0 | 0.0 | 0.0 | 0.0 |
| NCI-H292 none | 0.0 | 0.0 | 0.0 | 0.4 | 0.9 | 0.0 |
| NCI-H292 IL-4 | 0.0 | 0.0 | 0.0 | 0.0 | 0.0 | 0.1 |
| NCI-H292 IL-9 | 0.0 | 0.0 | 0.0 | 0.0 | 0.0 | 0.0 |
| NCI-H292 IL-13 | 0.0 | 0.0 | 0.0 | 0.0 | 0.0 | 0.0 |
| NCI-H292 IFN gamma | 0.0 | 1.7 | 0.4 | 1.0 | 0.4 | 0.4 |
| HPAEC none | 0.0 | 0.0 | 0.0 | 0.0 | 0.0 | 0.0 |
| HPAEC TNF alpha + IL-1 beta | 0.0 | 0.0 | 0.0 | 0.0 | 0.0 | 0.0 |
| Lung fibroblast none | 0.0 | 0.0 | 0.0 | 0.0 | 0.0 | 0.0 |
| Lung fibroblast TNF alpha + IL-1 beta | 0.9 | 0.0 | 0.2 | 0.6 | 0.3 | 0.5 |
| Lung fibroblast IL-4 | 0.0 | 0.0 | 0.0 | 0.3 | 0.3 | 0.0 |
| Lung fibroblast IL-9 | 0.0 | 0.0 | 0.0 | 0.0 | 0.3 | 0.0 |
| Lung fibroblast IL-13 | 0.0 | 0.0 | 0.0 | 0.6 | 0.0 | 0.0 |
| Lung fibroblast IFN gamma | 0.0 | 2.6 | 1.3 | 1.2 | 1.4 | 1.1 |
| Dermal fibroblast CCD1070 rest | 0.0 | 0.0 | 0.0 | 0.0 | 0.0 | 0.0 |
| Dermal fibroblast CCD1070 TNF alpha | 0.0 | 0.0 | 0.0 | 0.0 | 0.0 | 0.0 |
| Dermal fibroblast CCD1070 IL-1 beta | 0.0 | 0.0 | 0.0 | 0.0 | 0.0 | 0.0 |
| Dermal fibroblast IFN gamma | 1.6 | 0.0 | 0.2 | 1.1 | 0.3 | 0.9 |
| Dermal fibroblast IL-4 | 0.0 | 0.0 | 0.2 | 0.0 | 0.0 | 0.2 |
| IBD Colitis 2 | 0.0 | 0.0 | 0.0 | 0.0 | 0.0 | 0.0 |
| IBD Crohn's | 0.0 | 0.0 | 0.0 | 0.0 | 0.0 | 0.0 |
| Colon | 0.0 | 0.0 | 0.7 | 0.3 | 0.6 | 0.3 |
| Lung | 0.0 | 0.0 | 2.4 | 3.1 | 2.6 | 2.0 |
| Thymus | 0.0 | 0.0 | 0.4 | 0.6 | 1.0 | 0.4 |
| Kidney | 0.0 | 2.7 | 0.4 | 0.6 | 0.3 | 0.3 |

[1433] AI_comprehensive panel_v1.0 Summary: Ag1221b Highest expression of this gene was detected in synovial fluid from a rheumatoid arthritis (RA) patient (CT=33). This gene showed preferential expression in rheumatoid arthritis bone, cartilage, synovium and synovial fluid samples. Modulation of this gene, encoded protein and/or use of antibodies or small molecule drug targeting this gene or gene product is useful in the treatment of rheumatoid arthritis.

[1434] Panel 1.3D Summary: Ag1221b/Ag1608 The expression of this gene was seen predominantly in one gastric cancer cell line derived from a metastasis (CTs=30-32). This expression profile indicates that this gene plays a role in liver cancer metastasis to gastric. Significant expression was also seen in bone marrow and spleen indicating that this gene is also important in the hematopoietic system. Modulation of this gene, encoded protein and/or use of antibodies or small molecule drug are useful in treatment of gastric cancer, and disorders related to hematopoietic system.

[1435] Panel 2D Summary: Ag1221b Highest expression of this gene was detected in normal lung (CTs=31). Expression of this gene was downregulated in the lung cancers. Upregulation of this gene and/or use of agonist is useful in the treatment of lung cancers.

[1436] Significant expression of this gene was also seen in breast cancer, thyroid cancer, gastric cancer, ovarian cancer and renal cell carcinoma. Modulation of this gene, encoded protein and/or use of antibodies or small molecule drug targeting this gene or gene product is useful in the treatment of breast cancer, thyroid cancer, gastric cancer, ovarian cancer and renal cell carcinoma.

[1437] Panel 4D Summary: Ag1221b/Ag1608 Highest expression of this gene was detected in resting monocytes and LPS activated macrophages (CTs=28-33). The expression of this gene in resting monocytes indicated that this gene encoded a differentation antigen. Signalling through this molecule will stimulate activation. This gene was down regulated during activation of monocytes, but upregulated in activated macrophages indicating a role in antigen presentation. Significant expression of this gene was also detected in resting and activated LAK cells, two way MLR, resting eosinophils, activated PBMC and liver cirrhosis samples. Modulation of this gene, encoded protein and/or use of antibodies or small molecule targeting this gene or gene product will help reduce or eliminate inflammatory and autoimmune diseases such as asthma/allergy, emphysema, psoriasis, arthritis, IBD Colitis, liver cirrhosis.

[1438] AW. CG56146-01, CG56146-02 and CG5614603: 7 Transmembrane Receptor.

[1439] Expression of gene CG56146-01, CG56146-02 and CG56146-03 were assessed using the primer-probe sets Ag1175 and Ag1201, described in Tables AWA and AWB. Results of the RTQ-PCR runs are shown in Tables AWC, AWD, AWE and AWF. CG56146-02 and CG56146-03 represent full-length physical clones.

TABLE AWA
Probe Name Ag1175

| | | | Start | SEQ ID |
|---|---|---|---|---|
| Primers | Sequences | Length | Position | No |
| Forward | 5′-agagacaatccaaagccttttc-3′ | 22 | 551 | 1383 |
| Probe | TET-5′-caactgtgtgcctcacctcattgttg-3′- | 26 | 573 | 1384 |
| | TAMRA | | | |
| Reverse | 5′-agaccctggctttaaataagca-3′ | 22 | 627 | 1385 |

[1440] TABLE AWB
Probe Name Ag1201

| | | | Start | SEQ ID |
|---|---|---|---|---|
| Primers | Sequences | Length | Position | No |
| Forward | 5′-agagacaatccaaagccttttc-3′ | 22 | 551 | 1386 |
| Probe | TET-5′-caactgtgtgcctcacctcattgttg-3′- | 26 | 573 | 1387 |
| | TAMRA | | | |
| Reverse | 5′-agaccctggctttaaataagca-3′ | 22 | 627 | 1388 |

[1441] TABLE AWC
AI_comprehensive panel_v1.0
Column A - Rel. Exp.(%) Ag1175, Run 248064523
Column B - Rel. Exp.(%) Ag1201, Run 211193563
Column C - Rel. Exp.(%) Ag1201, Run 212308358

| Tissue Name | A | B | C | Tissue Name | A | B | C |
|---|---|---|---|---|---|---|---|
| 110967 COPD-F | 5.6 | 1.2 | 2.5 | 112427 Match Control | 76.3 | 42.9 | 98.6 |
| | | | | Psoriasis-F | | | |
| 110980 COPD-F | 5.0 | 0.0 | 0.0 | 112418 Psoriasis-M | 12.3 | 1.4 | 10.2 |
| 110968 COPD-M | 0.0 | 6.1 | 0.0 | 112723 Match Control | 0.0 | 0.0 | 0.0 |
| | | | | Psoriasis-M | | | |
| 110977 COPD-M | 14.7 | 12.5 | 9.5 | 112419 Psoriasis-M | 19.2 | 6.5 | 19.1 |
| 110989 Emphysema-F | 21.6 | 5.5 | 6.7 | 112424 Match Control | 5.6 | 1.8 | 9.4 |
| | | | | Psoriasis-M | | | |
| 110992 Emphysema-F | 0.0 | 8.7 | 3.6 | 112420 Psoriasis-M | 33.4 | 24.5 | 16.6 |
| 110993 Emphysema-F | 20.4 | 3.0 | 5.2 | 112425 Match Control | 58.6 | 100.0 | 87.7 |
| | | | | Psoriasis-M | | | |
| 110994 Emphysema-F | 8.1 | 0.0 | 0.0 | 104689 (MF) OA Bone- | 9.2 | 5.0 | 4.8 |
| | | | | Backus | | | |
| 110995 Emphysema-F | 18.9 | 4.1 | 10.1 | 104690 (MF) Adj “Normal” | 18.2 | 4.0 | 5.8 |
| | | | | Bone-Backus | | | |
| 110996 Emphysema-F | 3.7 | 0.0 | 0.0 | 104691 (MF) OA | 0.0 | 8.4 | 0.0 |
| | | | | Synovium-Backus | | | |
| 110997 Asthma-M | 20.9 | 0.0 | 13.5 | 104692 (BA) OA Cartilage- | 0.0 | 0.0 | 0.0 |
| | | | | Backus | | | |
| 111001 Asthma-F | 34.2 | 8.4 | 17.0 | 104694 (BA) OA Bone- | 7.7 | 0.0 | 8.1 |
| | | | | Backus | | | |
| 111002 Asthma-F | 30.8 | 5.9 | 23.8 | 104695 (BA) Adj “Normal” | 14.5 | 5.7 | 6.2 |
| | | | | Bone-Backus | | | |
| 111003 Atopic Asthma-F | 14.8 | 11.3 | 8.7 | 104696 (BA) OA | 13.4 | 19.2 | 6.3 |
| | | | | Synovium-Backus | | | |
| 111004 Atopic Asthma-F | 21.6 | 10.2 | 11.6 | 104700 (SS) OA Bone | 17.4 | 4.1 | 13.4 |
| | | | | Backus | | | |
| 111005 Atopic Asthma-F | 22.1 | 0.0 | 13.0 | 104701 (SS) Adj “Normal” | 13.7 | 7.6 | 3.3 |
| | | | | Bone-Backus | | | |
| 111006 Atopic Asthma-F | 5.8 | 0.0 | 4.7 | 104702 (SS) OA Synovium- | 8.6 | 12.5 | 4.0 |
| | | | | Backus | | | |
| 111417 Allergy-M | 1.5 | 11.7 | 17.9 | 117093 OA Cartilage Rep7 | 17.2 | 22.2 | 14.8 |
| 112347 Allergy-M | 0.0 | 0.0 | 0.0 | 112672 OA Bone5 | 15.0 | 3.0 | 14.6 |
| 112349 Normal Lung-F | 0.0 | 0.0 | 0.0 | 112673 OA Synovium5 | 26.8 | 2.7 | 3.8 |
| 112357 Normal Lung-F | 12.8 | 1.6 | 8.7 | 1112674 OA Synovial Fluid | 6.2 | 9.3 | 6.4 |
| 112354 Normal Lung-M | 10.5 | 0.0 | 11.8 | 17100 OA Cartilage | 1.9 | 11.0 | 4.2 |
| | | | | Rep14 | | | |
| 112374 Crohns-F | 12.7 | 10.7 | 12.6 | 112756 OA Bone9 | 100.0 | 60.3 | 100.0 |
| 112389 Match Control | 0.0 | 3.5 | 0.0 | 112757 OA Synovium9 | 0.0 | 0.0 | 0.0 |
| Crohns-F | | | | | | | |
| 112375 Crohns-F | 27.9 | 8.4 | 19.9 | 112758 OA Synovial Fluid | 0.0 | 7.2 | 12.2 |
| | | | | Cells9 | | | |
| 112732 Match Control | 0.0 | 1.8 | 5.4 | 117125 RA Cartilage Rep2 | 0.0 | 3.4 | 0.0 |
| 112725 Crohns-M | 5.4 | 3.3 | 4.1 | 113492 Bone2 RA | 0.0 | 6.8 | 0.0 |
| 112387 Match Control | 6.9 | 0.0 | 4.9 | 113493 Synovium2 RA | 0.0 | 0.0 | 0.0 |
| 112378 Crohns-M | 0.0 | 0.0 | 0.0 | 113494 Syn Fluid Cells RA | 0.0 | 0.0 | 4.2 |
| 112390 Match Control | 37.1 | 22.2 | 6.9 | 113499 Cartilage4 RA | 6.0 | 0.0 | 0.0 |
| Crohns-M | | | | | | | |
| 112726 Crohns-M | 3.3 | 0.0 | 0.0 | 113500 Bone4RA | 0.0 | 2.6 | 0.0 |
| 112731 Match Control | 0.0 | 3.1 | 15.8 | 113501 Synovium4 RA | 0.0 | 0.0 | 0.0 |
| Crohns-M | | | | | | | |
| 112380 Ulcer Col-F | 17.1 | 9.8 | 22.4 | 113502 Syn Fluid Cells4 | 0.0 | 5.1 | 3.6 |
| | | | | RA | | | |
| 112734 Match Control | 5.8 | 1.2 | 0.0 | 113495 Cartilage3 RA | 0.0 | 1.2 | 3.6 |
| Ulcer Col-F | | | | | | | |
| 112384 Ulcer Col-F | 39.2 | 6.1 | 11.3 | 113496 Bone3 RA | 3.5 | 0.0 | 0.0 |
| 112737 Match Control | 4.1 | 0.0 | 12.7 | 113497 Synovium3 RA | 0.0 | 0.0 | 0.0 |
| Ulcer Col-F | | | | | | | |
| 112386 Ulcer Col-F | 0.0 | 5.9 | 0.0 | 113498 Syn Fluid Cells3 | 0.0 | 0.0 | 0.0 |
| | | | | RA | | | |
| 112738 Match Control | 0.0 | 0.0 | 6.3 | 117106 Normal Cartilage | 0.0 | 3.9 | 0.0 |
| Ulcer Col-F | | | | Rep20 | | | |
| 112381 Ulcer Col-M | 0.0 | 0.4 | 0.6 | 113663 Bone3 Normal | 0.0 | 0.0 | 0.0 |
| 112735 Match Control | 3.6 | 1.0 | 6.6 | 113664 Synovium3 Normal | 0.0 | 0.0 | 0.0 |
| Ulcer Col-M | | | | | | | |
| 112382 Ulcer Col-M | 5.1 | 4.7 | 3.9 | 113665 Syn Fluid Cells3 | 0.0 | 0.0 | 0.7 |
| | | | | Normal | | | |
| 112394 Match Control | 0.0 | 2.1 | 0.0 | 117107 Normal Cartilage | 8.7 | 9.7 | 11.9 |
| Ulcer Col-M | | | | Rep22 | | | |
| 112383 Ulcer Col-M | 2.5 | 0.0 | 0.0 | 113667 Bone4 Normal | 6.3 | 10.2 | 15.0 |
| 112736 Match Control | 0.0 | 0.0 | 0.0 | 113668 Synovium4 Normal | 0.0 | 0.0 | 10.8 |
| Ulcer Col-M | | | | | | | |
| 112423 Psoriasis-F | 17.9 | 24.8 | 44.1 | 113669 SynFluid Cells4 | 21.8 | 9.6 | 23.2 |
| | | | | Normal | | | |

[1442] TABLE AWD
Panel 1.3D
Column A - Rel. Exp.(%) Ag1201, Run 147490505
Column B - Rel. Exp.(%) Ag1201, Run 148438245
Column C - Rel. Exp.(%) Ag1201, Run 152628232

| Tissue Name | A | B | C | Tissue Name | A | B | C |
|---|---|---|---|---|---|---|---|
| Liver adenocarcinoma | 0.0 | 0.0 | 13.7 | Kidney (fetal) | 15.7 | 0.0 | 19.6 |
| Pancreas | 0.0 | 0.0 | 0.0 | Renal ca. 786-0 | 0.0 | 0.0 | 0.0 |
| Pancreatic ca. CAPAN 2 | 0.0 | 0.0 | 0.0 | Renal ca. A498 | 0.0 | 0.0 | 0.0 |
| Adrenal gland | 0.0 | 0.0 | 0.0 | Renal ca. RXF 393 | 0.0 | 0.0 | 0.0 |
| Thyroid | 0.0 | 0.0 | 26.2 | Renal ca. ACHN | 0.0 | 0.0 | 0.0 |
| Salivary gland | 0.0 | 0.0 | 14.7 | Renal ca. UO-31 | 0.0 | 0.0 | 0.0 |
| Pituitary gland | 7.5 | 25.3 | 0.0 | Renal ca. TK-10 | 0.0 | 0.0 | 0.0 |
| Brain (fetal) | 0.0 | 13.5 | 0.0 | Liver | 0.0 | 0.0 | 0.0 |
| Brain (whole) | 3.3 | 0.0 | 0.0 | Liver (fetal) | 0.0 | 0.0 | 0.0 |
| Brain (amygdala) | 0.0 | 0.0 | 0.0 | Liver ca. (hepatoblast) | 0.0 | 0.0 | 0.0 |
| | | | | HepG2 | | | |
| Brain (cerebellum) | 0.0 | 0.0 | 0.0 | Lung | 9.2 | 0.0 | 0.0 |
| Brain (hippocampus) | 0.0 | 10.6 | 0.0 | Lung (fetal) | 0.0 | 0.0 | 0.0 |
| Brain (substantia nigra) | 0.0 | 0.0 | 0.0 | Lung ca. (small cell) LX-1 | 0.0 | 0.0 | 0.0 |
| Brain (thalamus) | 0.0 | 0.0 | 0.0 | Lung ca. (small cell) NCI-H69 | 0.0 | 0.0 | 0.0 |
| Cerebral Cortex | 0.0 | 0.0 | 0.0 | Lung ca. (s.cell var.) SHP-77 | 0.0 | 0.0 | 0.0 |
| Spinal cord | 8.3 | 0.0 | 0.0 | Lung ca. (large cell) NCI-H460 | 0.0 | 0.0 | 0.0 |
| glio/astro U87-MG | 0.0 | 0.0 | 0.0 | Lung ca. (non-sm. cell) A549 | 1.5 | 0.0 | 0.0 |
| gilo/astro U-118-MG | 0.0 | 0.0 | 0.0 | Lung ca. (non-s.cell) NCI-H23 | 6.2 | 26.6 | 94.0 |
| astrocytoma SW1783 | 0.0 | 0.0 | 0.0 | Lung ca. (non-s.cell) HOP-62 | 20.9 | 23.8 | 27.0 |
| neuro*; met SK-N-AS | 0.0 | 0.0 | 0.0 | Lung ca. (non-s.cl) NCI-H522 | 0.0 | 0.0 | 0.0 |
| astrocytoma SF-539 | 0.0 | 0.0 | 15.6 | Lung ca. (squam.) SW 900 | 0.0 | 0.0 | 0.0 |
| astrocytoma SNB-75 | 0.0 | 0.0 | 0.0 | Lung ca. (squam.) NCI-H596 | 0.0 | 0.0 | 0.0 |
| glioma SNB-19 | 0.0 | 0.0 | 12.0 | Mammary gland | 15.6 | 0.0 | 12.9 |
| glioma U251 | 0.0 | 0.0 | 0.0 | Breast ca.* (pl.ef) MCF-7 | 0.0 | 0.0 | 0.0 |
| glioma SF-295 | 0.0 | 0.0 | 0.0 | Breast ca.* (pl.ef) MDA- | 0.0 | 0.0 | 0.0 |
| | | | | MB-231 | | | |
| Heart (Fetal) | 0.0 | 0.0 | 0.0 | Breast ca.* (pl. ef) T47D | 0.0 | 0.0 | 0.0 |
| Heart | 7.7 | 0.0 | 0.0 | Breast ca. BT-549 | 6.7 | 0.0 | 0.0 |
| Skeletal muscle (Fetal) | 11.2 | 28.1 | 10.7 | Breast ca. MDA-N | 0.0 | 0.0 | 0.0 |
| Skeletal muscle | 0.0 | 0.0 | 0.0 | Ovary | 0.0 | 0.0 | 0.0 |
| Bone marrow | 0.0 | 9.9 | 20.7 | Ovarian ca. OVCAR-3 | 6.2 | 0.0 | 0.0 |
| Thymus | 8.6 | 0.0 | 0.0 | Ovarian ca. OVCAR-4 | 0.0 | 0.0 | 0.0 |
| Spleen | 11.3 | 0.0 | 28.1 | Ovarian ca. OVCAR-5 | 0.0 | 0.0 | 0.0 |
| Lymph node | 7.4 | 0.0 | 0.0 | Ovarian ca. OVCAR-8 | 33.7 | 36.3 | 83.5 |
| Colorectal | 10.8 | 30.1 | 0.0 | Ovarian ca. IGROV-1 | 0.0 | 0.0 | 15.3 |
| Stomach | 5.9 | 0.0 | 12.4 | Ovarian ca. (ascites) SK- | 0.0 | 5.9 | 0.0 |
| | | | | OV-3 | | | |
| Small intestine | 0.0 | 9.8 | 11.7 | Uterus | 0.0 | 20.0 | 0.0 |
| Colon ca. SW480 | 0.0 | 0.0 | 0.0 | Placenta | 0.0 | 0.0 | 0.0 |
| Colon ca.* SW620 | 0.0 | 0.0 | 0.0 | Prostate | 0.0 | 12.6 | 22.2 |
| (SW480 met) | | | | | | | |
| Colon ca. HT29 | 0.0 | 0.0 | 0.0 | Prostate ca.* (bone met) | 14.4 | 50.0 | 19.5 |
| | | | | PC-3 | | | |
| Colon ca. HCT-116 | 0.0 | 0.0 | 0.0 | Testis | 100.0 | 100.0 | 100.0 |
| Colon ca. CaCo-2 | 0.0 | 0.0 | 0.0 | Melanoma Hs688(A).T | 0.0 | 0.0 | 0.0 |
| CC Well to Mod Diff | 0.0 | 13.6 | 0.0 | Melanoma* (met) | 6.9 | 0.0 | 0.0 |
| (ODO3866) | | | | Hs688(B).T | | | |
| Colon ca. HCC-2998 | 0.0 | 0.0 | 0.0 | Melanoma UACC-62 | 0.0 | 0.0 | 0.0 |
| Gastric ca. (liver met) | 0.0 | 0.0 | 0.0 | Melanoma M14 | 0.0 | 0.0 | 0.0 |
| NCI-N87 | | | | | | | |
| Bladder | 0.0 | 0.0 | 0.0 | Melanoma LOX IMVI | 0.0 | 8.0 | 0.0 |
| Trachea | 71.2 | 0.0 | 0.0 | Melanoma* (met) SK-MEL-5 | 0.0 | 0.0 | 0.0 |
| Kidney | 0.0 | 0.0 | 0.0 | Adipose | 0.0 | 15.0 | 12.0 |

[1443] TABLE AWE
Panel 2D
Column A - Rel. Exp.(%) Ag1201, Run 147490530
Column B - Rel. Exp.(%) Ag1201, Run 148032505

| Tissue Name | A | B | Tissue Name | A | B |
|---|---|---|---|---|---|
| Normal Colon | 14.2 | 12.9 | Kidney Margin 8120608 | 0.0 | 10.0 |
| CC Well to Mod Diff (ODO3866) | 10.1 | 14.6 | Kidney Cancer 8120613 | 0.0 | 4.0 |
| CC Margin (ODO3866) | 0.0 | 10.7 | Kidney Margin 8120614 | 0.0 | 0.0 |
| CC Gr.2 rectosigmoid (ODO3868) | 0.0 | 4.5 | Kidney Cancer 9010320 | 0.0 | 0.0 |
| CC Margin (ODO3868) | 0.0 | 4.9 | Kidney Margin 9010321 | 0.0 | 0.0 |
| CC Mod Diff (ODO3920) | 0.0 | 5.4 | Normal Uterus | 0.0 | 3.6 |
| CC Margin (ODO3920) | 13.4 | 5.6 | Uterine Cancer 064011 | 66.4 | 54.0 |
| CC Gr.2 ascend colon (ODO3921) | 4.0 | 3.3 | Normal Thyroid | 9.5 | 0.0 |
| CC Margin (ODO3921) | 5.1 | 18.7 | Thyroid Cancer | 0.0 | 3.4 |
| CC from Partial Hepatectomy | 0.0 | 0.0 | Thyroid Cancer A302152 | 11.9 | 33.0 |
| (ODO4309) Mets | | | | | |
| Liver Margin (ODO4309) | 0.0 | 0.0 | Thyroid Margin A302153 | 28.5 | 39.5 |
| Colon mets to lung (OD04451-01) | 4.3 | 0.0 | Normal Breast | 18.2 | 28.3 |
| Lung Margin (OD04451-02) | 5.0 | 0.0 | Breast Cancer | 42.3 | 65.5 |
| Normal Prostate 6546-1 | 0.0 | 12.8 | Breast Cancer (OD04590-01) | 0.0 | 0.0 |
| Prostate Cancer (OD04410) | 100.0 | 100.0 | Breast Cancer Mets | 0.0 | 0.0 |
| | | | (OD04590-03) | | |
| Prostate Margin (OD04410) | 8.0 | 9.6 | Breast Cancer Metastasis | 31.6 | 35.6 |
| Prostate Cancer (OD04720-01) | 50.0 | 64.2 | Breast Cancer | 18.4 | 28.7 |
| Prostate Margin (OD04720-02) | 47.0 | 29.7 | Breast Cancer | 37.6 | 35.8 |
| Normal Lung | 2.8 | 10.6 | Breast Cancer 9100266 | 31.4 | 36.9 |
| Lung Met to Muscle (OD04286) | 3.9 | 11.1 | Breast Margin 9100265 | 14.5 | 48.3 |
| Muscle Margin (OD04286) | 0.0 | 0.0 | Breast Cancer A209073 | 51.8 | 68.3 |
| Lung Malignant Cancer | 0.0 | 0.0 | Breast Margin A209073 | 41.5 | 22.7 |
| (OD03126) | | | | | |
| Lung Margin (OD03126) | 0.0 | 5.2 | Normal Liver | 113.5 | 0.0 |
| Lung Cancer (OD04404) | 28.5 | 6.0 | Liver Cancer | 0.0 | 0.0 |
| Lung Margin (OD04404) | 5.4 | 19.2 | Liver Cancer 1025 | 4.7 | 5.0 |
| Lung Cancer (OD04565) | 0.0 | 0.0 | Liver Cancer 1026 | 0.0 | 0.0 |
| Lung Margin (OD04565) | 1.8 | 0.0 | Liver Cancer 6004-T | 0.0 | 3.8 |
| Lung Cancer (OD04237-01) | 0.0 | 0.0 | Liver Tissue 6004-N | 3.6 | 0.0 |
| Lung Margin (OD04237-02) | 6.2 | 4.9 | Liver Cancer 6005-T | 0.0 | 0.0 |
| Ocular Mel Met to Liver | 0.0 | 10.4 | Liver Tissue 6005-N | 0.0 | 0.0 |
| (ODO4310) | | | | | |
| Liver Margin (ODO4310) | 2.5 | 3.5 | Normal Bladder | 9.8 | 11.2 |
| Melanoma Metastasis | 0.0 | 0.0 | Bladder Cancer | 0.0 | 0.0 |
| Lung Margin (OD04321) | 0.0 | 0.0 | Bladder Cancer | 5.5 | 24.1 |
| Normal Kidney | 6.3 | 11.7 | Bladder Cancer (OD04718- | 0.0 | 0.0 |
| | | | 01) | | |
| Kidney Ca, Nuclear grade 2 | 47 | 13.1 | Bladder Normal Adjacent | 50 | 13.6 |
| (OD04338) | | | (OD04718-03) | | |
| Kidney Margin (OD04338) | 0.0 | 0.0 | Normal Ovary | 0.0 | 0.0 |
| Kidney Ca Nuclear grade 1/2 | 29.5 | 94.6 | Ovarian Cancer | 20.6 | 0.0 |
| (OD04339) | | | | | |
| Kidney Margin (OD04339) | 0.0 | 4.9 | Ovarian Cancer (OD04768- | 92.7 | 99.3 |
| | | | 07) | | |
| Kidney Ca, Clear cell type | 0.0 | 17.1 | Ovary Margin (OD04768-08) | 0.0 | 9.5 |
| (OD04340) | | | | | |
| Kidney Margin (OD04340) | 3.6 | 0.0 | Normal Stomach | 0.0 | 5.3 |
| Kidney Ca, Nuclear grade 3 | 0.0 | 0.0 | Gastric Cancer 9060358 | 0.0 | 0.0 |
| (OD04348) | | | | | |
| Kidney Margin (OD04348) | 7.9 | 5.1 | Stomach Margin 9060359 | 0.0 | 0.0 |
| Kidney Cancer (OD04622-01) | 7.4 | 0.0 | Gastric Cancer 9060395 | 10.4 | 0.0 |
| Kidney Margin (OD04622-03) | 0.0 | 0.0 | Stomach Margin 9060394 | 2.6 | 0.0 |
| Kidney Cancer (OD04450-01) | 0.0 | 0.0 | Gastric Cancer 9060397 | 4.3 | 0.0 |
| Kidney Margin (OD04450-03) | 0.0 | 0.0 | Stomach Margin 9060396 | 0.0 | 0.0 |
| Kidney Cancer 8120607 | 0.0 | 0.0 | Gastric Cancer 064005 | 4.8 | 0.0 |

[1444] TABLE AWF
Panel 4D
Column A - Rel. Exp.(%) Ag1175, Run 139801091
Column B - Rel. Exp.(%) Ag1201, Run 140237534
Column C - Rel. Exp.(%) Ag1201, Run 144180636

| Tissue Name | A | B | C | Tissue Name | A | B | C |
|---|---|---|---|---|---|---|---|
| Secondary Th1 act | 0.0 | 0.0 | 0.0 | HUVEC IL-1beta | 0.0 | 0.0 | 0.0 |
| Secondary Th2 act | 0.0 | 0.0 | 0.0 | HUVEC IFN gamma | 0.0 | 0.0 | 0.0 |
| Secondary Tr1 act | 0.0 | 0.0 | 0.0 | HUVEC TNF alpha + IFN | 0.0 | 0.0 | 0.0 |
| | | | | gamma | | | |
| Secondary Th1 rest | 0.0 | 0.0 | 0.0 | HUVEC TNF alpha + IL4 0.0 | 0.0 | 0.0 | |
| Secondary Th2 rest | 0.0 | 0.0 | 0.0 | HUVEC IL-11 | 0.0 | 0.0 | 0.0 |
| Secondary Tr1 rest | 0.0 | 0.0 | 0.0 | Lung Microvascular EC none | 0.0 | 0.0 | 0.0 |
| Primary Th1 act | 0.0 | 0.0 | 0.0 | Lung Microvascular EC | 0.0 | 0.0 | 0.0 |
| | | | | TNFalpha + IL-1beta | | | |
| Primary Th2 act | 0.0 | 0.0 | 0.0 | Microvascular Dermal EC | 0.0 | 5.4 | 0.0 |
| Primary Tr1 act | 0.0 | 0.0 | 0.0 | Microsvasular Dermal EC | 0.0 | 0.0 | 0.0 |
| | | | | TNFalpha + IL-1beta | | | |
| Primary Th1 rest | 0.0 | 0.0 | 0.0 | Bronchial epithelium | 0.0 | 0.0 | 0.0 |
| | | | | TNFalpha + IL1beta | | | |
| Primary Th2 rest | 0.0 | 0.0 | 0.0 | Small airway epithelium none | 0.0 | 0.0 | 0.0 |
| Primary Tr1 rest | 0.0 | 0.0 | 0.0 | Small airway epithelium | 0.0 | 0.0 | 0.0 |
| | | | | TNFalpha + IL-1beta | | | |
| CD45RA CD4 | 0.0 | 0.0 | 0.0 | Coronery artery SMC rest 0.0 | 0.0 | 0.0 | |
| lymphocyte act | | | | | | | |
| CD45RO CD4 | 0.0 | 0.0 | 0.0 | Coronery artery SMC | 0.0 | 0.0 | 0.0 |
| lymphocyte act | | | | TNFalpha + IL-1beta | | | |
| CD8 lymphocyte act | 0.0 | 2.3 | 0.0 | Astrocytes rest | 0.0 | 0.0 | 0.0 |
| Secondary CD8 | 3.6 | 0.0 | 0.0 | Astrocytes TNFalpha + IL- | 0.0 | 4.3 | 0.0 |
| lymphocyte rest | | | | 1beta | | | |
| Secondary CD8 | 0.0 | 0.0 | 0.0 | KU-812 (Basophil) rest | 15.8 | 7.9 | 29.1 |
| lymphocyte act | | | | | | | |
| CD4 lymphocyte none | 0.0 | 0.0 | 0.0 | KU-812 (Basophil) | 100.0 | 100.0 | 100.0 |
| | | | | PMA/ionomycin | | | |
| 2ry Th1/Th2/Tr1 anti- | 0.0 | 0.0 | 0.0 | CCD1106 (Keratinocytes) | 0.0 | 0.0 | 0.0 |
| CD95 CH11 | | | | none | | | |
| LAK cells rest | 0.0 | 3.3 | 4.4 | 93580 CCD1106 | 0.0 | 0.0 | 0.0 |
| | | | | (Keratinocytes) TNFa and | | | |
| | | | | IFNg | | | |
| LAK cells IL-2 | 3.4 | 0.0 | 0.0 | Liver cirrhosis | 16.4 | 11.3 | 15.2 |
| LAK cells IL-2 + IL-12 | 0.0 | 0.0 | 0.0 | Lupus kidney | 0.0 | 0.0 | 0.0 |
| LAX cells IL-2 + IFN | 0.0 | 0.0 | 0.0 | NCI-H292 none | 0.0 | 0.0 | 0.0 |
| gamma | | | | | | | |
| LAK cells IL-2 + IL-18 | 0.0 | 0.0 | 0.0 | NCI-H292 IL-4 | 0.0 | 0.0 | 0.0 |
| LAK Cells | 3.5 | 0.0 | 0.0 | NCI-H292 IL-9 | 0.0 | 0.0 | 0.0 |
| PMA/ionomycin | | | | | | | |
| NK Cells IL-2 rest | 0.0 | 0.0 | 0.0 | NCI-H292 IL-13 | 0.0 | 0.0 | 0.0 |
| Two Way MLR 3 day | 0.0 | 3.4 | 0.0 | NCI-H292 IFN gamma | 0.0 | 0.0 | 0.0 |
| Two Way MLR 5 day | 0.0 | 8.3 | 0.0 | HPAEC none | 0.0 | 0.0 | 0.0 |
| Two Way MLR 7 day | 0.0 | 0.0 | 0.0 | HPAEC TNF alpha + IL-1 | 0.0 | 0.0 | 0.0 |
| | | | | beta | | | |
| PBMC rest | 0.0 | 0.0 | 0.0 | Lung fibroblast none | 0.0 | 0.0 | 0.0 |
| PBMC PWM | 0.0 | 0.0 | 0.0 | Lung fibroblast TNF alpha + | 0.0 | 0.0 | 0.0 |
| | | | | IL-1 beta | | | |
| PBMC PHA-L | 0.0 | 0.0 | 0.0 | Lung fibroblast IL-4 | 0.0 | 0.0 | 0.0 |
| Ramos (B cell) none | 0.0 | 0.0 | 0.0 | Lung fibroblast IL-9 | 0.0 | 0.0 | 0.0 |
| Ramos (B cell) | 0.0 | 0.0 | 0.0 | Lung fibroblast IL-13 | 0.0 | 0.0 | 0.0 |
| ionomycin | | | | | | | |
| B lymphocytes PWM | 0.0 | 0.0 | 0.0 | Lung fibroblast IFN gamma | 0.0 | 0.0 | 0.0 |
| B lymphocytes CD40L | 0.0 | 0.0 | 0.0 | Dermal fibroblast CCD1070 | 6.2 | 0.0 | 0.0 |
| and IL-4 | | | | rest | | | |
| EOL-1 dbcAMP | 0.0 | 0.0 | 0.0 | Dermal fibroblast CCD1070 | 0.0 | 0.0 | 0.0 |
| | | | | TNF alpha | | | |
| EOL-1 dbcAMP | 0.0 | 0.0 | 0.0 | Dermal fibroblast CCD1070 | 0.0 | 0.0 | 0.0 |
| PMA/ionomycin | | | | IL-1 beta | | | |
| Dendritic cells none | 0.0 | 0.0 | 4.5 | Dermal fibroblast IFN gamma | 0.0 | 0.0 | 0.0 |
| Dendritic cells LPS | 0.0 | 10.0 | 0.0 | Dermal fibroblast IL-4 | 0.0 | 0.0 | 0.0 |
| Dendritic cells anti | 0.0 | 7.9 | 4.7 | IBD Colitis 2 | 3.1 | 5.3 | 0.0 |
| CD40 | | | | | | | |
| Monocytes rest | 0.0 | 0.0 | 0.0 | IBD Crohn's | 0.0 | 0.0 | 0.0 |
| Monocytes LPS | 0.0 | 0.0 | 0.0 | Colon | 2.4 | 0.0 | 0.0 |
| Macrophages rest | 4.1 | 3.7 | 13.4 | Lung | 14.9 | 3.1 | 0.0 |
| Macrophages LPS | 10.3 | 0.0 | 4.2 | Thymus | 9.6 | 7.4 | 12.0 |
| HUVEC none | 0.0 | 0.0 | 0.0 | Kidney | 0.0 | 3.9 | 3.6 |
| HUVEC starved | 6.3 | 0.0 | 0.0 | | | | |

[1445] AI_comprehensive panel_v1.0 Summary: Ag1175/Ag1201 Highest expression of this gene was detected in orthoarthritis bone and matched control psoriasis sample (CTs=32-33.5). Significant expression of this gene was also seen in psoriasis and asthma samples. Modulation of this gene, encoded protein and/or use of antibodies or small molecule drug targeting this gene or gene product is useful in the treatment of orthoarthritis, asthma and psoriasis.

[1446] Panel 1.3D Summary: Ag1201 This gene showed significant expression mainly in testis (CTs=33-34). Modulation of this gene and encoded protein is useful in the treatment of testis related disorders such as fertility and hypogonadism.

[1447] Panel 2D Summary: Ag1201 Highest expression of this gene was detected in prostate cancer sample (CTs=32). This gene was over-expressed in tumors derived from tissues responsive to steroid hormones—ovarian, uterine and prostate cancers. Expression level of this gene is useful as a marker to detect tumor cells responsive to steroid hormones and to differentiate hormone-responsive and non-hormone responsive tumors that are known to lead to different clinical outcomes. Modulation of this gene, encoded protein and/or use of antibodies or small molecule drug targeting this gene or gene product is useful in the treatment of ovarian, uterine and prostate cancers.

[1448] Panel 4D Summary: Ag1201 This gene showed low expression in activated basophils (CTs=32-33). Basophils are one of the key cell mediators of inflammation during asthma and allergy (Oliver J M, Kepley C L, Ortega E, Wilson B S, 2000, Immunologically mediated signaling in basophils and mast cells: finding therapeutic targets for allergic diseases in the human Fcvar epsilonR1 signaling pathway. Immunopharmacology 48(3):269-81). This expression indicated that this gene has a potential role in inflammation and helps the basophils to extravasate into the site of inflammation and/or in the activation of these cells. Modulation of this gene, encoded protein and/or use of antibodies or small molecule drug targeting this gene or gene product is useful to inhibit nasal and lung inflammation caused by basophil activation and effectively reduce or eliminate symptoms of asthma, emphysema, and allergic rhinitis.

[1449] AX. CG56258-02: Sodium/Calcium Exchanger.

[1450] Expression of gene CG56258-02 was assessed using the primer-probe sets Ag2903, Ag5035 and Ag6163, described in Tables AXA, AXB and AXC. Results of the RTQ-PCR runs are shown in Tables AXD, AXE, AXF, AXG, AXH, AXI and AXJ.

TABLE AXA
Probe Name Ag2903

| | | | Start | SEQ ID |
|---|---|---|---|---|
| Primers | Sequences | Length | Position | No |
| Forward | 5′-gactcgcaagatcaagcatcta-3′ | 22 | 641 | 1389 |
| Probe | TET-5′-cttcttcatcaccgctgcttggagta-3′- | 26 | 668 | 1390 |
| | TAMRA | | | |
| Reverse | 5′-tagagccagatgtaggcaaaga-3′ | 22 | 694 | 1391 |

[1451] TABLE AXB
Probe Name Ag5035

| | | | Start | SEQ ID |
|---|---|---|---|---|
| Primers | Sequences | Length | Position | No |
| Forward | 5′-gaaagccagtattgggtgaac-3′ | 21 | 2023 | 1392 |
| Probe | TET-5′-ccccaaactagaagtcatcattgaaga- | 27 | 2045 | 1393 |
| | 3′-TAMRA | | | |
| Reverse | 5′-tttgtccaccgtagtcttgaac-3′ | 22 | 2081 | 1394 |

[1452] TABLE AXC
Probe Name Ag6163

| | | | Start | SEQ ID |
|---|---|---|---|---|
| Primers | Sequences | Length | Position | No |
| Forward | 5′-ggggagttggaattcaagaat-3′ | 21 | 1815 | 1395 |
| Probe | TET-5′-tgaaactgtcaaaacaattcacatcaag- | 28 | 1838 | 1396 |
| | 3′-TAMRA | | | |
| Reverse | 5′-tctcatatgcctcatcatcaattac-3′ | 25 | 1866 | 1397 |

[1453] TABLE AXD
AI_comprehensive panel_v1.0
Column A - Rel. Exp.(%) Ag2903, Run 225410015
Column B - Rel. Exp.(%) Ag5035, Run 244570389

| Tissue Name | A | B | Tissue Name | A | B |
|---|---|---|---|---|---|
| 110967 COPD-F | 0.6 | 0.3 | 112427 Match Control Psoriasis-F | 4.1 | 4.8 |
| 110980 COPD-F | 0.4 | 0.6 | 112418 Psoriasis-M | 0.8 | 0.5 |
| 110968 COPD-M | 0.9 | 1.2 | 112723 Match Control Psoriasis-M | 0.1 | 0.0 |
| 110977 COPD-M | 0.9 | 0.8 | 112419 Psoriasis-M | 1.3 | 0.9 |
| 110989 Emphysema-F | 0.6 | 0.0 | 112424 Match Control Psoriasis-M | 1.1 | 0.5 |
| 110992 Emphysema-F | 0.4 | 0.7 | 112420 Psoriasis-M | 2.1 | 2.2 |
| 110993 Emphysema-F | 1.1 | 1.4 | 112425 Match Control Psoriasis-M | 2.9 | 5.8 |
| 110994 Emphysema-F | 1.0 | 0.7 | 104689 (MF) OA Bone-Backus | 68.3 | 44.4 |
| 110995 Emphysema-F | 1.1 | 0.8 | 104690 (ME) Adj “Normal” Bone- | 8.8 | 5.2 |
| | | | Backus | | |
| 110996 Emphysema-F | 0.0 | 0.0 | 104691 (ME) OA Synovium- | 2.1 | 1.7 |
| | | | Backus | | |
| 110997 Asthma-M | 1.5 | 0.6 | 104692 (BA) OA Cartilage-Backus | 3.3 | 3.6 |
| 111001 Asthma-F | 1.8 | 1.5 | 104694 (BA) OA Bone-Backus | 100.0 | 100.0 |
| 111002 Asthma-F | 1.9 | 1.9 | 104695 (BA) Adj “Normal” Bone- | 36.3 | 28.7 |
| | | | Backus | | |
| 111003 Atopic Asthma-F | 2.7 | 2.4 | 104696 (BA) OA Synovium- | 1.4 | 0.5 |
| | | | Backus | | |
| 111004 Atopic Asthma-F | 0.9 | 1.2 | 104700 (SS) OA Bone-Backus | 54.0 | 37.6 |
| 111005 Atopic Asthma-F | 0.9 | 1.1 | 104701 (SS) Adj “Normal” Bone- | 60.3 | 34.9 |
| | | | Backus | | |
| 111006 Atopic Asthma-F | 0.4 | 0.3 | 104702 (SS) OA Synovium-Backus | 2.9 | 2.1 |
| 111417 Allergy-M | 2.2 | 2.8 | 117093 OA Cartilage Rep7 | 1.4 | 0.4 |
| 112347 Allergy-M | 0.6 | 0.0 | 112672 OA Bone5 | 4.8 | 3.3 |
| 112349 Normal Lung-F | 0.9 | 0.0 | 112673 OA Synovium5 | 1.6 | 1.7 |
| 112357 Normal Lung-F | 0.1 | 0.3 | 112674 OA Synovial Fluid cells5 | 2.6 | 2.6 |
| 112354 Normal Lung-M | 0.0 | 0.3 | 117100 OA Cartilage Rep14 | 0.0 | 0.0 |
| 112374 Crohns-F | 0.2 | 0.0 | 112756 OA Bone9 | 5.6 | 0.4 |
| 112389 Match Control Crohns- | 0.2 | 1.1 | 112757 OA Synovium9 | 32.3 | 37.4 |
| F | | | | | |
| 112375 Crobns-F | 0.0 | 0.0 | 112758 OA Synovial Fluid Cells9 | 1.1 | 0.6 |
| 112732 Match Control Crohns- | 0.8 | 0.8 | 117125 RA Cartilage Rep2 | 2.8 | 1.1 |
| F | | | | | |
| 112725 Crohns-M | 0.1 | 0.0 | 113492 Bone2 RA | 3.0 | 1.2 |
| 112387 Match Control Crohns- | 1.6 | 1.1 | 113493 Synovium2 RA | 1.6 | 0.8 |
| M | | | | | |
| 112378 Crohns-M | 0.6 | 0.0 | 113494 Syn Fluid Cells RA | 1.8 | 0.8 |
| 112390 Match Control Crohns- | 1.0 | 0.8 | 113499 Cartilage4 RA | 1.7 | 1.9 |
| M | | | | | |
| 112726 Crohns-M | 0.8 | 0.7 | 113500 Bone4 RA | 2.6 | 2.2 |
| 112731 Match Control Crohns- | 0.9 | 0.3 | 113501 Synovium4 RA | 2.0 | 0.7 |
| M | | | | | |
| 112380 Ulcer Col-F | 0.4 | 0.5 | 113502 Syn Fluid Cells4 RA | 0.6 | 0.6 |
| 112734 Match Control Ulcer | 3.5 | 1.8 | 113495 Cartilage3 RA | 1.6 | 0.6 |
| Col-F | | | | | |
| 112384 Ulcer Col-F | 2.7 | 1.9 | 113496 Bone3 RA | 1.9 | 0.7 |
| 112737 Match Control Ulcer | 0.5 | 0.6 | 113497 Synovium3 RA | 1.4 | 0.8 |
| Col-F | | | | | |
| 112386 Ulcer Col-F | 2.0 | 1.4 | 113498 Syn Fluid Cells3 RA | 2.6 | 2.7 |
| 112738 Match Control Ulcer | 0.1 | 0.3 | 117106 Normal Cartilage Rep20 | 0.4 | 0.0 |
| Col-F | | | | | |
| 112381 Ulcer Col-M | 1.3 | 0.0 | 113663 Bone3 Normal | 0.6 | 0.0 |
| 112735 Match Control Ulcer | 3.3 | 1.2 | 113664 Synovium3 Normal | 0.2 | 0.0 |
| Col-M | | | | | |
| 112382 Ulcer Col-M | 1.2 | 0.6 | 113665 Syn Fluid Cells3 Normal | 0.2 | 0.0 |
| 112394 Match Control Ulcer | 0.9 | 0.8 | 117107 Normal Cartilage Rep22 | 2.9 | 0.4 |
| Col-M | | | | | |
| 112383 Ulcer Col-M | 0.7 | 0.0 | 113667 Bone4 Normal | 1.1 | 0.0 |
| 112736 Match Control Ulcer | 0.7 | 0.3 | 113668 Synovium4 Normal | 1.3 | 0.5 |
| Col-M | | | | | |
| 112423 Psoriasis-F | 0.7 | 0.3 | 113669 Syn Fluid Cells4 Normal | 1.1 | 0.5 |

[1454] TABLE AXE
Cellular OA/RA
Column A - Rel. Exp.(%) Ag2903, Run 406107093

| Tissue Name | A | Tissue Name | A |
|---|---|---|---|
| 158667 Nhost medium 1 h | 0.0 | 164336 SW1353 + TNF-a (100 ng/ml) 6 h | 54.3 |
| 158670 Nhost + IL-1b (10 | 4.2 | 164337 SW1353 medium alone 18 h | 74.2 |
| ng/ml), 1 h | | | |
| 158673 Nhost + PGE2 (10-6 M) | 0.0 | 164338 SW1353 + IL-1b (1 ng/ml) 18 h | 62.9 |
| 1 h | | | |
| 158668 Nhost medium alone 6 h | 2.3 | 164339 SW1353 + IL-1b (10 ng/ml) 18 h | 41.5 |
| 158671 Nhost + IL-1b (10 | 29.1 | 164340 SW1353 + TNF-a (10 ng/ml) 18 h | 49.3 |
| ng/ml) 6 h | | | |
| 158674 Nhost + PGE2 (10-6 M) | 2.5 | 164341 SW1353 + IL-1b (100 ng/ml) 18 h | 74.2 |
| 6 h | | | |
| 158669 Nhost medium alone 24 h | 1.4 | 173326 HFLS-RA (cell aplication) medium | 0.0 |
| | | alone 18 h | |
| 158672 Nhost + IL-1b (10 | 5.4 | 173327 HFLS-RA (cell aplication) + TNF-a | 12.9 |
| ng/ml) 24 h | | 18 h | |
| 158675 Nhost + PGE2 (10-6 M) | 1.2 | 173331 MH7A (synoviocyte cell line) | 46.7 |
| 24 h | | medium 1 h | |
| 164327 SW1353 medium alone | 95.3 | 173332 MH7A (synoviocyte cell line) + | 29.1 |
| 1 h | | IL1b 1 h | |
| 164328 SW1353 + IL-1b (1 | 88.3 | 173334 MH7A (synoviocyte cell line) TNFa | 0.0 |
| ng/ml) 1 h | | 1 h | |
| 164329 SW1353 + IL-1b (10 | 68.8 | 173336 MH7A (synoviocyte cell line) | 63.7 |
| ng/ml) 1 h | | medium alone 6 h | |
| 164330 SW1353 + TNF-a (10 | 82.9 | 173339 MH7A (synoviocyte cell line) + | 61.6 |
| ng/ml) 1 h | | IL1b 6 h | |
| 164331 SW1353 + TNF-a (100 | 100.0 | 173341 MH7A (synoviocyte cell line) TNFa | 37.9 |
| ng/ml) 1 h | | 6 h | |
| 164332 SW1353 medium alone | 54.7 | 173342 MH7A (synoviocyte cell line) | 37.4 |
| 6 h | | medium alone 18 h | |
| 164333 SW1353 + IL-1b (1 | 41.5 | 173344 MH7A (synoviocyte cell line) + | 73.7 |
| ng/ml) 6 h | | IL1b 18 h | |
| 164334 SW1353 + IL-1b (10 | 29.1 | 173346 MH7A (synoviocyte cell line) TNF-a | 32.1 |
| ng/ml) 6 h | | 18 h | |
| 164335 SW1353 + TNF-a (10 | 88.3 | | |
| ng/ml) 6 h | | | |

[1455] TABLE AXF
PGI1.0
Column A - Rel. Exp.(%) Ag2903, Run 398125347

| Tissue Name | A | Tissue Name | A |
|---|---|---|---|
| 162191 Normal Lung 1 (IBS) | 1.4 | 162185 Emphysema Lung 12 (Ardais) | 41.5 |
| 160468 MD lung | 13.7 | 162184 Emphysema Lung 13 (Ardais) | 23.2 |
| 156629 MD Lung 13 | 5.8 | 162183 Emphysema Lung 14 (Ardais) | 70.7 |
| 162570 Normal Lung 4 (Aastrand) | 18.6 | 162188 Emphysema Lung 15 (Genomic | 51.4 |
| | | Collaborative) | |
| 162571 Normal Lung 3 (Aastrand) | 6.1 | 162177 NAT UC Colon 1 (Ardais) | 7.6 |
| 162187 Fibrosis Lung 2 (Genomic | 100.0 | 162176 UC Colon 1 (Ardais) | 7.7 |
| Collaborative) | | | |
| 151281 Fibrosis lung 11 (Ardais) | 25.7 | 162179 NAT UC Colon 2 (Ardais) | 11.0 |
| 162186 Fibrosis Lung 1 (Genomic | 67.8 | 162178 UC Colon 2 (Ardais) | 19.5 |
| Collaborative) | | | |
| 162190 Asthma Lung 4 (Genomic | 38.4 | 162181 NAT UC Colon 3 (Ardais) | 3.1 |
| Collaborative) | | | |
| 160467 Asthma Lung 13 (MD) | 10.9 | 162180 UC Colon 3 (Ardais) | 2.9 |
| 137027 Emphysema Lung 1 | 13.8 | 162182 NAT UC Colon 4 (Ardais) | 6.5 |
| (Ardais) | | | |
| 137028 Emphysema Lung 2 | 11.4 | 137042 UC Colon 1108 | 8.0 |
| (Ardais) | | | |
| 137040 Emphysema Lung 3 | 14.8 | 137029 UC Colon 8215 | 5.2 |
| (Ardais) | | | |
| 137041 Emphysema Lung 4 | 23.3 | 137031 UC Colon 8217 | 4.9 |
| (Ardais) | | | |
| 137043 Emphysema Lung 5 | 12.9 | 137036 UC Colon 1137 | 9.2 |
| (Ardais) | | | |
| l428l7 Emphysema Lung 6 | 17.3 | 137038 UC Colon 1491 | 27.2 |
| (Ardais) | | | |
| 142818 Emphysema Lung 7 | 36.6 | 137039 UC Colon 1546 | 12.3 |
| (Ardais) | | | |
| 142819 Emphysema Lung 8 | 36.1 | 162593 Crohn's 47751 (NDRI) | 3.5 |
| (Ardais) | | | |
| 142820 Emphysema Lung 9 | 18.0 | 162594 NAT Crohn's 47751 (NDRI) | 3.1 |
| (Ardais) | | | |
| 142821 Emphysema Lung 10 | 49.3 | | |
| (Ardais) | | | |

[1456] TABLE AXG
Panel 1.3D
Column A - Rel. Exp.(%) Ag2903, Run 162556420

| Tissue Name | A | Tissue Name | A |
|---|---|---|---|
| Liver adenocarcinoma | 0.0 | Kidney (fetal) | 0.3 |
| Pancreas | 0.0 | Renal ca. 786-0 | 0.0 |
| Pancreatic ca. CAPAN 2 | 0.0 | Renal ca. A498 | 0.0 |
| Adrenal gland | 0.1 | Renal ca. RXF 393 | 0.0 |
| Thyroid | 0.2 | Renal ca. ACHN | 0.0 |
| Salivary gland | 0.1 | Renal ca. UO-31 | 0.1 |
| Pituitary gland | 0.4 | Renal ca. TK-10 | 0.0 |
| Brain (fetal) | 2.0 | Liver | 0.0 |
| Brain (whole) | 3.9 | Liver (fetal) | 0.4 |
| Brain (amygdala) | 3.7 | Liver ca. (hepatoblast) HepG2 | 0.0 |
| Brain (cerebellum) | 3.3 | Lung | 0.0 |
| Brain (hippocampus) | 5.6 | Lung (fetal) | 0.4 |
| Brain (substantia nigra) | 0.9 | Lung ca. (small cell) LX-1 | 0.0 |
| Brain (thalamus) | 5.9 | Lung ca. (small cell) NCI-H69 | 0.2 |
| Cerebral Cortex | 80.7 | Lung ca. (s. cell var.) SHP-77 | 3.4 |
| Spinal cord | 1.7 | Lung ca. (large cell) NCI-H460 | 0.0 |
| glio/astro U87-MG | 0.0 | Lung ca. (non-sm. cell) A549 | 0.1 |
| glio/astro U-118-MG | 0.0 | Lung ca. (non-s. cell) NCI-H23 | 0.0 |
| astrocytoma SW1783 | 0.6 | Lung ca. (non-s. cell) HOP-62 | 0.0 |
| neuro*; met SK-N-AS | 0.0 | Lung ca. (non-s. cl) NCI-H522 | 0.0 |
| astrocytoma SF-539 | 0.0 | Lung ca. (squam.) SW 900 | 0.0 |
| astrocytoma SNB-75 | 0.0 | Lung ca. (squam.) NCI-H596 | 0.2 |
| glioma SNB-19 | 0.1 | Mammary gland | 0.1 |
| glioma U251 | 0.0 | Breast ca.* (pl. ef) MCF-7 | 0.0 |
| glioma SF-295 | 0.0 | Breast ca.* (pl. ef) MDA-MB-231 | 0.0 |
| Heart (Fetal) | 5.2 | Breast ca.* (pl. ef) T47D | 0.0 |
| Heart | 0.3 | Breast ca. BT-549 | 0.0 |
| Skeletal muscle (Fetal) | 100.0 | Breast ca. MDA-N | 0.0 |
| Skeletal muscle | 21.2 | Ovary | 0.2 |
| Bone marrow | 0.2 | Ovarian ca. OVCAR-3 | 0.0 |
| Thymus | 0.6 | Ovarian ca. OVCAR-4 | 0.3 |
| Spleen | 0.0 | Ovarian ca. OVCAR-5 | 0.0 |
| Lymph node | 0.3 | Ovarian ca. OVCAR-8 | 0.0 |
| Colorectal | 1.1 | Ovarian ca. IGROV-1 | 0.0 |
| Stomach | 0.1 | Ovarian ca. (ascites) SK-OV-3 | 0.0 |
| Small intestine | 0.2 | Uterus | 0.1 |
| Colon ca. SW480 | 0.0 | Placenta | 0.0 |
| Colon ca.* SW620 | 0.0 | Prostate | 0.0 |
| (SW480 met) | | | |
| Colon ca. HT29 | 0.0 | Prostate ca.* (bone met) PC-3 | 0.0 |
| Colon ca. HCT-116 | 0.0 | Testis | 0.3 |
| Colon ca. CaCo-2 | 0.0 | Melanoma Hs688(A).T | 0.0 |
| CC Well to Mod Diff | 0.5 | Melanoma* (met) Hs688(B).T | 0.0 |
| (ODO3866) | | | |
| Colon ca. HCC-2998 | 0.0 | Melanoma UACC-62 | 0.2 |
| Gastric ca. (liver met) | 0.0 | Melanoma M14 | 0.0 |
| NCI-N87 | | | |
| Bladder | 0.2 | Melanoma LOXIMVI | 0.0 |
| Trachea | 0.3 | Melanoma* (met) SK-MEL-5 | 0.0 |
| Kidney | 0.0 | Adipose | 0.3 |

[1457] TABLE AXH
Panel 2D
Column A - Rel. Exp.(%) Ag2903, Run 162345106

| Tissue Name | A | Tissue Name | A |
|---|---|---|---|
| Normal Colon | 8.1 | Kidney Margin 8120608 | 0.5 |
| CC Well to Mod Diff (ODO3866) | 0.3 | Kidney Cancer 8120613 | 0.0 |
| CC Margin (ODO3866) | 0.3 | Kidney Margin 8120614 | 0.1 |
| CC Gr.2 rectosigmoid (ODO3868) | 0.1 | Kidney Cancer 9010320 | 0.5 |
| CC Margin (ODO3868) | 0.2 | Kidney Margin 9010321 | 0.0 |
| CC Mod Diff(ODO3920) | 0.3 | Normal Uterus | 1.0 |
| CC Margin (ODO3920) | 0.4 | Uterine Cancer 064011 | 0.5 |
| CC Gr.2 ascend colon (ODO3921) | 1.1 | Normal Thyroid | 1.0 |
| CC Margin (ODO3921) | 0.9 | Thyroid Cancer | 0.0 |
| CC from Partial Hepatectomy | 0.4 | Thyroid Cancer A302152 | 0.1 |
| (ODO4309) Mets | | | |
| Liver Margin (ODO4309) | 0.1 | Thyroid Margin A302153 | 0.1 |
| Colon mets to lung (OD04451-01) | 0.1 | Normal Breast | 3.0 |
| Lung Margin (OD04451-02) | 1.3 | Breast Cancer | 0.4 |
| Normal Prostate 6546-1 | 2.3 | Breast Cancer (OD04590-01) | 0.8 |
| Prostate Cancer (OD04410) | 1.2 | Breast Cancer Mets (OD04590-03) | 1.5 |
| Prostate Margin (OD04410) | 4.2 | Breast Cancer Metastasis | 0.2 |
| Prostate Cancer (OD04720-01) | 1.2 | Breast Cancer | 0.5 |
| Prostate Margin (OD04720-02) | 4.6 | Breast Cancer | 1.2 |
| Normal Lung | 5.8 | Breast Cancer 9100266 | 1.8 |
| Lung Met to Muscle (ODO4286) | 0.0 | Breast Margin 9100265 | 1.1 |
| Muscle Margin (ODO4286) | 100.0 | Breast Cancer A209073 | 0.6 |
| Lung Malignant Cancer (OD03126) | 0.8 | Breast Margin A209073 | 0.0 |
| Lung Margin (OD03126) | 7.7 | Normal Liver | 0.0 |
| Lung Cancer (OD04404) | 1.4 | Liver Cancer | 0.0 |
| Lung Margin (OD04404) | 4.1 | Liver Cancer 1025 | 0.0 |
| Lung Cancer (OD04565) | 0.3 | Liver Cancer 1026 | 0.0 |
| Lung Margin (OD04565) | 1.2 | Liver Cancer 6004-T | 0.1 |
| Lung Cancer (OD04237-01) | 0.7 | Liver Tissue 6004-N | 0.5 |
| Lung Margin (OD04237-02) | 2.4 | Liver Cancer 6005-T | 0.0 |
| Ocular Mel Met to Liver (ODO4310) | 0.0 | Liver Tissue 6005-N | 0.0 |
| Liver Margin (ODO4310) | 0.1 | Normal Bladder | 0.6 |
| Melanoma Metastasis | 0.1 | Bladder Cancer | 0.2 |
| Lung Margin (OD04321) | 2.4 | Bladder Cancer | 1.4 |
| Normal Kidney | 1.5 | Bladder Cancer (OD04718-01) | 0.5 |
| Kidney Ca, Nuclear grade 2 (OD04338) | 0.5 | Bladder Normal Adjacent | 4.9 |
| | | (OD04718-03) | |
| Kidney Margin (OD04338) | 1.4 | Normal Ovary | 0.1 |
| Kidney Ca Nuclear grade 1/2 (OD04339) | 1.8 | Ovarian Cancer | 1.9 |
| Kidney Margin (OD04339) | 0.6 | Ovarian Cancer (OD04768-07) | 0.0 |
| Kidney Ca, Clear cell type (OD04340) | 1.0 | Ovary Margin (OD04768-08) | 0.2 |
| Kidney Margin (OD04340) | 0.8 | Normal Stomach | 4.5 |
| Kidney Ca, Nuclear grade 3 (OD04348) | 1.3 | Gastric Cancer 9060358 | 1.7 |
| Kidney Margin (OD04348) | 0.7 | Stomach Margin 9060359 | 1.5 |
| Kidney Cancer (OD04622-01) | 0.7 | Gastric Cancer 9060395 | 1.2 |
| Kidney Margin (OD04622-03) | 0.0 | Stomach Margin 9060394 | 2.0 |
| Kidney Cancer (OD04450-01) | 0.0 | Gastric Cancer 9060397 | 0.6 |
| Kidney Margin (OD04450-03) | 0.1 | Stomach Margin 9060396 | 1.7 |
| Kidney Cancer 8120607 | 0.1 | Gastric Cancer 064005 | 2.9 |

[1458] TABLE AXI
Panel 4.1D
Column A - Rel. Exp.(%) Ag5035, Run 223740981

| Tissue Name | A | Tissue Name | A |
|---|---|---|---|
| Secondary Th1 act | 0.0 | HUVEC IL-1beta | 2.0 |
| Secondary Th2 act | 0.0 | HUVEC IFN gamma | 0.0 |
| Secondary Tr1 act | 0.0 | HUVEC TNF alpha + IFN gamma | 1.9 |
| Secondary Th1 rest | 0.0 | HUVEC TNF alpha + IL4 | 0.0 |
| Secondary Th2 rest | 0.0 | HUVEC IL-11 | 0.0 |
| Secondary Tr1 rest | 0.0 | Lung Microvascular EC none | 0.0 |
| Primary Th1 act | 0.0 | Lung Microvascular EC TNFalpha + IL- | 100.0 |
| | | 1beta | |
| Primary Th2 act | 0.0 | Microvascular Dermal EC none | 0.0 |
| Primary Tr1 act | 2.0 | Microsvasular Dermal EC TNFalpha + IL- | 55.5 |
| | | 1beta | |
| Primary Th1 rest | 0.0 | Bronchial epithelium TNFalpha +IL1beta | 2.2 |
| Primary Th2 rest | 0.0 | Small airway epithelium none | 4.2 |
| Primary Tr1 rest | 0.0 | Small airway epithelium TNFalpha + IL- | 3.7 |
| | | 1beta | |
| CD45RA CD4 lymphocyte act | 0.0 | Coronery artery SMC rest | 2.3 |
| CD45RO CD4 lymphocyte act | 0.0 | Coronery artery SMC TNFalpha + IL-1beta | 0.0 |
| CD8 lymphocyte act | 0.0 | Astrocytes rest | 0.0 |
| Secondary CD8 lymphocyte rest | 0.0 | Astrocytes TNFalpha + IL-1beta | 0.0 |
| Secondary CD8 lymphocyte act | 0.0 | KU-812 (Basophil) rest | 10.6 |
| CD4 lymphocyte none | 0.0 | KU-812 (Basophil) PMA/ionomycin | 13.6 |
| 2ry Th1/Th2/Tr1 anti-CD95 | 0.0 | CCD1106 (Keratinocytes) none | 0.0 |
| CH11 | | | |
| LAK cells rest | 0.0 | CCD1106 (Keratinocytes) TNFalpha + IL- | 0.0 |
| | | 1beta | |
| LAK cells IL-2 | 0.0 | Liver cirrhosis | 0.0 |
| LAK cells IL-2 + IL-12 | 8.4 | NCI-H292 none | 0.0 |
| LAK cells IL-2 + IFN gamma | 2.9 | NCI-H292 IL-4 | 0.0 |
| LAK cells IL-2 + IL-18 | 3.8 | NCI-H292 IL-9 | 0.0 |
| LAK cells PMA/ionomycin | 2.3 | NCI-H292 IL-13 | 2.5 |
| NK Cells IL-2 rest | 0.0 | NCI-H292 IFN gamma | 0.0 |
| Two Way MLR 3 day | 2.1 | HPAEC none | 0.0 |
| Two Way MLR 5 day | 2.3 | HPAEC TNF alpha + IL-1 beta | 8.8 |
| Two Way MLR 7 day | 1.8 | Lung fibroblast none | 0.0 |
| PBMC rest | 6.7 | Lung fibroblast TNF alpha + IL-1 beta | 0.0 |
| PBMC PWM | 0.0 | Lung fibroblast IL-4 | 0.0 |
| PBMC PHA-L | 6.3 | Lung fibroblast IL-9 | 0.0 |
| Ramos (B cell) none | 0.0 | Lung fibroblast IL-13 | 0.0 |
| Ramos (B cell) ionomycin | 0.0 | Lung fibroblast IFN gamma | 0.0 |
| B lymphocytes PWM | 9.2 | Dermal fibroblast CCD1070 rest | 0.0 |
| B lymphocytes CD40L and IL-4 | 1.9 | Dermal fibroblast CCD1070 TNF alpha | 0.0 |
| EOL-1 dbcAMP | 0.0 | Dermal fibroblast CCD1070 IL-1 beta | 0.0 |
| EOL-1 dbcAMP | 0.0 | Dermal fibroblast IFN gamma | 0.0 |
| PMA/ionomycin | | | |
| Dendritic cells none | 0.0 | Dermal fibroblast IL-4 | 0.0 |
| Dendritic cells LPS | 2.4 | Dermal Fibroblasts rest | 2.0 |
| Dendritic cells anti-CD40 | 0.0 | Neutrophils TNFa + LPS | 0.0 |
| Monocytes rest | 0.0 | Neutrophils rest | 0.0 |
| Monocytes LPS | 31.6 | Colon | 5.4 |
| Macrophages rest | 1.7 | Lung | 8.1 |
| Macrophages LPS | 6.5 | Thymus | 5.1 |
| HUVEC none | 0.0 | Kidney | 0.0 |
| HUVEC starved | 0.0 | | |

[1459] TABLE AXJ
Panel 5 Islet
Column A - Rel. Exp.(%) Ag2903, Run 242321748
Column B - Rel. Exp.(%) Ag2903, Run 258900739
Column C - Rel. Exp.(%) Ag5035, Run 244908253

| Tissue Name | A | B | C | Tissue Name | A | B | C |
|---|---|---|---|---|---|---|---|
| 97457 Patient-02go adipose | 0.7 | 0.8 | 1.4 | 94709 Donor 2 AM - A | 0.4 | 0.4 | 0.0 |
| | | | | adipose | | | |
| 97476 Patient-07sk skeletal | 9.9 | 15.2 | 3.2 | 94710 Donor 2 AM - B | 0.9 | 1.2 | 0.0 |
| muscle | | | | adipose | | | |
| 97477 Patient-07ut uterus | 0.6 | 1.4 | 0.0 | 94711 Donor2 AM - C | 0.0 | 0.4 | 0.0 |
| | | | | adipose | | | |
| 97478 Patient-07pl placenta | 1.4 | 0.0 | 1.1 | 94712 Donor 2 AD - A | 0.0 | 0.0 | 0.0 |
| | | | | adipose | | | |
| 99167 Bayer Patient 1 | 26.6 | 26.4 | 24.8 | 94713 Donor2 AD - B | 0.4 | 0.3 | 0.0 |
| | | | | adipose | | | |
| 97482 Patient-08ut uterus | 0.0 | 0.3 | 0.0 | 94714 Donor 2 AD - C | 0.0 | 0.8 | 0.0 |
| | | | | adipose | | | |
| 97483 Patient-08pl placenta | 0.0 | 0.7 | 0.0 | 94742 Donor 3 U - A | 0.0 | 0.0 | 0.0 |
| | | | | Mesenchymal Stem Cells | | | |
| 97486 Patient-09sk skeletal | 10.4 | 19.5 | 11.1 | 94743 Donor 3 U - B | 0.9 | 0.0 | 0.0 |
| muscle | | | | Mesenchymal Stem Cells | | | |
| 97487 Patient-09ut uterus | 0.6 | 2.8 | 1.7 | 94730 Donor 3 AM - A | 0.9 | 0.3 | 0.0 |
| | | | | adipose | | | |
| 97488 Patient-09pl placenta | 0.3 | 1.1 | 1.1 | 94731 Donor 3 AM - B | 0.0 | 0.0 | 0.0 |
| | | | | adipose | | | |
| 97492 Patient-10ut uterus | 0.2 | 0.4 | 0.0 | 94732 Donor 3 AM - C | 0.0 | 0.7 | 0.0 |
| | | | | adipose | | | |
| 97493 Patient-10pl placenta | 0.8 | 0.4 | 1.1 | 94733 Donor 3 AD - A | 1.0 | 0.3 | 0.0 |
| | | | | adipose | | | |
| 97495 Patient-11go adipose | 1.4 | 3.1 | 0.0 | 94734 Donor 3 AD - B | 0.0 | 0.4 | 0.0 |
| | | | | adipose | | | |
| 97496 Patient-11sk skeletal | 29.1 | 59.9 | 33.9 | 94735 Donor 3 AD - C | 0.0 | 0.0 | 0.0 |
| muscle | | | | adipose | | | |
| 97497 Patient-11ut uterus | 0.5 | 0.4 | 0.0 | 77138 Liver HepG2untreated | 0.0 | 0.4 | 0.0 |
| 97498 Patient-11pl placenta | 0.0 | 0.0 | 0.0 | 73556 Heart Cardiac stromal | 0.5 | 0.4 | 0.0 |
| | | | | cells (primary) | | | |
| 97500 Patient-12go adipose | 0.5 | 2.8 | 0.0 | 81735 Small Intestine | 2.3 | 0.7 | 0.0 |
| 97501 Patient-12sk skeletal | 100.0 | 100.0 | 100.0 | 72409 Kidney Proximal | 0.0 | 0.4 | 0.0 |
| muscle | | | | Convoluted Tubule | | | |
| 97502 Patient-12ut uterus | 1.0 | 0.3 | 0.0 | 82685 Small intestine | 0.0 | 1.7 | 1.1 |
| | | | | Duodenum | | | |
| 97503 Patient-12pl placenta | 0.0 | 0.0 | 0.0 | 90650 Adrenal | 0.0 | 0.0 | 0.0 |
| | | | | Adrenocortical adenoma | | | |
| 94721 Donor 2 U - A | 0.4 | 0.0 | 0.0 | 72410 Kidney HRCE | 0.0 | 0.0 | 1.6 |
| Mesenchymal Stem Cells | | | | | | | |
| 94722 Donor 2 U - B | 0.4 | 1.4 | 0.0 | 72411 Kidney HRE | 0.4 | 1.1 | 0.0 |
| Mesenchymal Stem Cells | | | | | | | |
| 94723 Donor 2 U - C | 0.0 | 0.0 | 0.0 | 73139 Uterus Uterine smooth | 0.0 | 0.0 | 0.0 |
| Mesenchymal Stem Cells | | | | muscle cells | | | |

[1460] AI_comprehensive panel_v1.0 Summary: Ag2903/Ag5035 The highest expression of this gene was detected in an OA bone sample. Expression of the CG56258-01 gene was highly associated with synovium and bone samples from patients with osteoarthritis when compared to expression in the control samples. Therapeutic modulation of this gene, expressed protein and/or use of antibodies or small molecule drugs targeting the gene or gene product are useful in the treatment of osteoarthritis.

[1461] Cellular OA/RA Summary: Ag2903 Moderate expression of this gene was detected in chondrosarcoma cell line (SW1353) and synoviocyte cell line (CTs=31-32). Significant expression of this gene was also detected in cells treated with IL-1-beta, a potent activator of pro-inflammatory cytokines and matrix metalloproteinases which participate in the destruction of cartilage observed in Osteoarthritis (OA). Therapeutic modulation of this gene, expressed protein and/or use of antibodies or small molecule drugs targeting the gene or gene product are useful in the prevention or treatment of the degeneration of cartilage observed in OA.

[1462] PGI1.0 Summary: Ag2903 The highest expression level of this gene was detected in a lung fibrosis sample (CT=26). It was upregulated in lung fibrosis and several emphysema samples. Therapeutic modulation of this gene, expressed protein and/or use of antibodies or small molecule drugs targeting the gene or gene product are useful in the treatment of lung fibrosis and emphysema.

[1463] Panel 1.3D Summary: Ag2903 Expression of this gene was highest in fetal skeletal muscle (CT=26.8). Significant levels of expression are also seen in adult skeletal muscle and fetal heart. This gene encodes a putative sodium/calcium exchanger. Altered levels of intracellular calcium have been implicated in many diseases, including type 2 diabetes. Based on its expression profile and homology to a calcium transport protein, therapeutic modulation of this gene, expressed protein and/or use of antibodies or small molecule drugs targeting the gene or gene product are useful in the treatment of type 2 diabetes.

[1464] Moderate to low levels of expression were seen in all regions of the CNS examined. Inhibition of calcium uptake has been shown to decrease neuronal death in response to cerebral ischemia. Therapeutic modulation of this gene, expressed protein and/or use of antibodies or small molecule drugs targeting the gene or gene product are useful in the treatment of stroke by decreasing the total infarct volume.

[1465] Panel 2D Summary: Ag2903 The expression of the CG56258-01 gene was consistent with the profile seen in Panel 1.3D. Expression was highest and most prominent in a normal muscle sample (CT=28.7). Please see Panel 1.3D for discussion of this gene in metabolic disease.

[1466] Panel 4.1D Summary: Ag5035 Expression of the CG56258-02 gene was restricted to TNF-alpha and IL-1 beta treated lung and dermal microvasculature (CTs=33-34). Endothelial cells are known to play important roles in inflammatory responses by altering the expression of surface proteins that are involved in activation and recruitment of effector inflammatory cells. The expression of this gene in dermal microvascular endothelial cells indicated that this protein product is involved in inflammatory responses to skin disorders, including psoriasis. Expression in lung microvascular endothelial cells indicated that the protein encoded by this gene is involved in lung disorders including asthma, allergies, chronic obstructive pulmonary disease, and emphysema. Therapeutic modulation of this gene, expressed protein and/or use of antibodies or small molecule drugs targeting the gene or gene product are useful in the treatment of psoriasis, asthma, allergies, chronic obstructive pulmonary disease, and emphysema.

[1467] Panel 5 Islet Summary: Ag2903/Ag5035 The expression of this gene in this panel was consistent with the profile seen in Panel 1.3D. Expression was highest and most prominent in sampels derived from skeletal muscle (CTs=29-33). Please see Panel 1.3D for discussion of this gene in metabolic disease.

[1468] AY. CG56258-04: SCL8A3 Splice Form B-Like.

[1469] Expression of gene CG56258-04 was assessed using the primer-probe sets Ag5035 and Ag6142, described in Tables AYA and AYB. Results of the RTQ-PCR runs are shown in Tables AYC, AYD, AYE and AYF.

TABLE AYA
Probe Name Ag5035

| | | | Start | SEQ ID |
|---|---|---|---|---|
| Primers | Sequences | Length | Position | No |
| Forward | 5′-gaaagccagtattgggtgaac-3′ | 21 | 2011 | 1398 |
| Probe | TET-5′-ccccaaactagaagtcatcattgaaga- | 27 | 2033 | 1399 |
| | 3′-TAMRA | | | |
| Reverse | 5′-tttgtccaccgtagtcttgaac-3′ | 22 | 2069 | 1340 |

[1470] TABLE AYB
Probe Name Ag6142

| | | | Start | SEQ ID |
|---|---|---|---|---|
| Primers | Sequences | Length | Position | No |
| Forward | 5′-gtagatgaggaggaatacgaaagg-3′ | 24 | 1869 | 1341 |
| Probe | TET-5′-aatttcttcattgcccttggtgaacc-3′- | 26 | 1899 | 1342 |
| | TAMRA | | | |
| Reverse | 5′-gatattccacgttccatccatt-3′ | 22 | 1927 | 1343 |

[1471] TABLE AYC
AI_comprehensive panel_v1.0
Column A - Rel. Exp.(%) Ag5035, Run 244570389
Column B - Rel. Exp.(%) Ag6142, Run 253050665

| | | | | | |
|---|---|---|---|---|---|
| Tissue Name | A | B | Tissue Name | A | B |

| | | | | | |
|---|---|---|---|---|---|
| 110967 COPD-F | 0.3 | 1.5 | 112427 Match Control Psoriasis-F | 4.8 | 9.8 |
| 110980 COPD-F | 0.6 | 0.0 | 112418 Psoriasis-M | 0.5 | 1.0 |
| 110968 COPD-M | 1.2 | 0.8 | 112723 Match Control Psoriasis-M | 0.0 | 0.0 |
| 110977 COPD-M | 0.8 | 1.3 | 112419 Psoriasis-M | 0.9 | 1.7 |
| 110989 Emphysema-F | 0.0 | 0.6 | 112424 Match Control Psoriasis-M | 0.5 | 0.8 |
| 110992 Emphysema-F | 0.7 | 0.7 | 112420 Psoriasis-M | 2.2 | 1.6 |
| 110993 Emphysema-F | 1.4 | 0.0 | 112425 Match Control Psoriasis-M | 5.8 | 4.4 |
| 110994 Emphysema-F | 0.7 | 0.6 | 104689 (MF) OA Bone-Backus | 44.4 | 52.9 |
| 110995 Emphysema-F | 0.8 | 0.7 | 104690 (MF) Adj “Normal” Bone | | |
| | | | Backus | 5.2 | 2.8 |
| 110996 Emphysema-F | 0.0 | 0.0 | 104691 (MF) OA Synovium- | | |
| | | | Backus | 1.7 | 1.5 |
| 110997 Asthma-M | 0.6 | 1.2 | 104692 (BA) OA Cartilage-Backus | 3.6 | 3.0 |
| 111001 Asthma-F | 1.5 | 0.8 | 104694 (BA) OA Bone-Backus | 100.0 | 100.0 |
| 111002 Asthma-F | 1.9 | 0.0 | 104695 (BA) Adj “Normal” Bone- | 28.7 | 33.7 |
| | | | Backus | | |
| 111003 Atopic Asthma-F | 2.4 | 1.9 | 104696 (BA) OA Synovium- | 0.5 | 0.7 |
| | | | Backus | | |
| 111004 Atopic Asthma-F | 1.2 | 0.8 | 104700 (55) OA Bone-Backus | 37.6 | 28.9 |
| 111005 Atopic Asthma-F | 1.1 | 1.5 | 104701 (SS) Adj “Normal” Bone- | 34.9 | 27.5 |
| | | | Backus | | |
| 111006 Atopic Asthma-F | 0.3 | 0.0 | 104702 (SS) OA Synovium-Backus | 2.1 | 2.5 |
| 111417 Allergy-M | 2.8 | 0.0 | 117093 OA Cartilage Rep7 | 0.41 | 0.6 |
| 112347 Allergy-M | 0.0 | 0.0 | 112672 OA Bone5 | 3.3 | 3.7 |
| 112349 Normal Lung-F | 0.0 | 0.0 | 112673 OA Synovium5 | 1.7 | 1.7 |
| 112357 Normal Lung-F | 0.3 | 0.0 | 112674 OA Synovial Fluid cells5 | 2.6 | 1.0 |
| 112354 Normal Lung-M | 0.3 | 0.0 | 117100 OA Cartilage Rep 14 | 0.0 | 0.0 |
| 112374 Crohns-F | 0.0 | 0.9 | 112756 OA Bone9 | 0.4 | 0.0 |
| 112389 Match Control Crohns- | 1.1 | 0.0 | 112757 OA Synovium9 | 37.4 | 25.0 |
| F | | | | | |
| 112375 Crohns-F | 0.0 | 0.0 | 112758 OA Synovial Fluid Cells9 | 0.6 | 1.2 |
| 112732 Match Control Crohns- | 0.8 | 0.7 | 1117125 RA Cartilage Rep2 | 1.1 | 1.4 |
| F | | | | | |
| 112725 Crohns-M | 0.0 | 0.6 | 113492 Bone2 RA | 1.2 | 1.4 |
| 112387 Match Control Crohns- | 1.1 | 1.1 | 113493 Synovium2 RA | 0.8 | 1.0 |
| M | | | | | |
| 112378 Crohns-M | 0.0 | 0.0 | 1113494 Syn Fluid Cells RA | 0.8 | 1.0 |
| 1112390 Match Control Crohns- | 0.8 | 1.2 | 1113499 Cartilage4 RA | 1.9 | 2.6 |
| M | | | | | |
| 112726 Crohns-M | 0.7 | 1.6 | 113500 Bone4 RA | 2.2 | 1.8 |
| 112731 Match Control Crohns- | 0.3 | 1.7 | 113501 Synovium4 RA | 0.7 | 1.0 |
| M | | | | | |
| 112380 UlcerCol-F | 0.5 | 1.7 | 113502 Syn Fluid Cells4 RA | 0.6 | 1.3 |
| 112734 Match Control Ulcer | 1.8 | 2.2 | 113495 Cartilage3 RA | 0.6 | 1.4 |
| Col-F | | | | | |
| 112384 UlcerCol-F | 1.9 | 1.4 | 113496 Bone3 RA | 0.7 | 1.3 |
| 112737 Match Control Ulcer | 0.6 | 0.0 | 113497 Synovium3 RA | 0.8 | 0.9 |
| Col-F | | | | | |
| 112386 Ulcer Col-F | 1.4 | 1.1 | 113498 Syn Fluid Cells3 RA | 2.7 | 2.5 |
| 112738 Match Control Ulcer | 0.3 | 0.0 | 117106 Normal Cartilage Rep20 | 0.0 | 0.0 |
| Col-F | | | | | |
| 112381 Ulcer Col-M | 0.0 | 0.0 | 113663 Bone3 Normal | 0.0 | 0.0 |
| 112735 Match Control Ulcer | 1.2 | 1.5 | 113664 Synovium3 Normal | 0.0 | 0.0 |
| Col-M | | | | | |
| 112382 Ulcer Col-M | 0.6 | 1.0 | 113665 Syn Fluid Cells3 Normal | 0.0 | 0.0 |
| 112394 Match Control Ulcer | 0.8 | 0.0 | 117107 Normal Cartilage Rep22 | 0.4 | 1.4 |
| Col-M | | | | | |
| 112383 Ulcer Col-M | 0.0 | 0.0 | 113667 Bone4 Normal | 0.0 | 0.0 |
| 112736 Match Control Ulcer | 0.3 | 0.7 | 113668 Synovium4 Normal | 0.5 | 0.9 |
| Col-M | | | | | |
| 112423 Psoriasis-F | 0.3 | 0.0 | 113669 Syn Fluid Cells4 Normal | 0.5 | 1.8 |

[1472] TABLE AYD
General_screening_panel v1.5
Column A - Rel. Exp.(%) Ag5035, Run 228967202
Column B - Rel. Exp.(%) Ag5035, Run 244373096
Column C - Rel. Exp.(%) Ag6142, Run 258495052
Column D - Rel. Exp.(%) Ag6142, Run 258496099

| Tissue Name | A | B | C | D |
|---|---|---|---|---|
| Adipose | 1.6 | 2.2 | 1.4 | 0.7 |
| Melanoma* Hs688(A).T | 0.0 | 0.0 | 0.0 | 0.0 |
| Melanoma* Hs688(B).T | 0.0 | 0.0 | 0.0 | 0.0 |
| Melanoma* M14 | 0.0 | 0.0 | 0.0 | 0.0 |
| Melanoma* LOXIMVI | 0.0 | 0.0 | 0.0 | 0.0 |
| Melanoma* SK-MEL-5 | 0.0 | 0.0 | 0.0 | 0.0 |
| Squamous cell carcinoma SCC-4 | 0.0 | 0.0 | 0.0 | 0.0 |
| Testis Pool | 0.0 | 0.1 | 0.6 | 0.5 |
| Prostate ca.* (bone met) PC-3 | 0.0 | 0.0 | 0.0 | 0.0 |
| Prostate Pool | 1.4 | 2.0 | 2.3 | 1.9 |
| Placenta | 0.3 | 0.1 | 0.3 | 0.0 |
| Uterus Pool | 2.1 | 1.6 | 1.1 | 0.8 |
| Ovarian ca. OVCAR-3 | 0.0 | 0.0 | 0.0 | 0.0 |
| Ovarian ca. SK-OV-3 | 0.0 | 0.0 | 0.0 | 0.8 |
| Ovarian ca. OVCAR-4 | 0.3 | 0.0 | 0.5 | 0.0 |
| Ovarian ca. OVCAR-5 | 0.0 | 0.0 | 0.2 | 0.2 |
| Ovarian ca. IGROV-1 | 0.0 | 0.0 | 0.2 | 0.0 |
| Ovarian ca. OVCAR-8 | 0.0 | 0.0 | 0.0 | 0.0 |
| Ovary | 0.3 | 0.3 | 0.1 | 0.0 |
| Breast ca. MCF-7 | 0.0 | 0.0 | 0.0 | 0.0 |
| Breast ca. MDA-MB-231 | 0.0 | 0.0 | 0.4 | 0.0 |
| Breast ca. BT 549 | 0.0 | 0.0 | 0.0 | 0.0 |
| Breast ca. T47D | 0.0 | 0.0 | 0.0 | 0.0 |
| Breast ca. MDA-N | 0.0 | 0.0 | 0.4 | 0.0 |
| Breast Pool | 2.6 | 3.5 | 2.5 | 3.4 |
| Trachea | 0.8 | 1.1 | 2.6 | 2.2 |
| Lung | 0.0 | 0.0 | 0.0 | 0.0 |
| Fetal Lung | 14.3 | 14.5 | 21.3 | 17.7 |
| Lung ca. NCI-N417 | 0.0 | 0.0 | 0.0 | 0.0 |
| Lung ca. LX-1 | 0.0 | 0.0 | 0.0 | 0.0 |
| Lung ca. NCI-H146 | 0.0 | 0.0 | 0.2 | 0.0 |
| Lung ca. SHP-77 | 9.3 | 12.7 | 19.9 | 11.7 |
| Lung ca. A549 | 0.0 | 0.0 | 0.0 | 0.0 |
| Lung ca. NCI-H526 | 0.2 | 0.2 | 0.0 | 0.0 |
| Lung ca. NCI-H23 | 0.0 | 0.0 | 0.2 | 0.0 |
| Lung ca. NCI-H460 | 0.0 | 0.0 | 5.4 | 2.5 |
| Lung Ca. HOP-62 | 0.0 | 0.0 | 0.0 | 0.0 |
| Lung Ca. NCI-H522 | 0.0 | 0.0 | 0.2 | 0.0 |
| Liver | 0.0 | 0.0 | 0.0 | 0.0 |
| Fetal Liver | 2.1 | 2.0 | 1.1 | 1.6 |
| Liver ca. HepG2 | 0.0 | 2.0 | 0.2 | 0.0 |
| Kidney Pool | 1.8 | 0.0 | 1.7 | 2.6 |
| Fetal Kidney | 0.8 | 0.7 | 1.4 | 0.0 |
| Renal ca. 786-0 | 0.0 | 0.0 | 0.0 | 0.0 |
| Renal ca. A498 | 0.0 | 0.0 | 0.0 | 0.0 |
| Renal ca. ACHN | 0.0 | 0.0 | 0.0 | 0.0 |
| Renal ca. UO-31 | 0.0 | 0.0 | 0.0 | 0.0 |
| Renal ca. TK-10 | 0.0 | 0.0 | 0.2 | 0.2 |
| Bladder | 0.6 | 0.3 | 2.0 | 1.3 |
| Gastric ca. (liver met.) NCI-N87 | 0.0 | 0.0 | 0.2 | 0.0 |
| Gastric ca. KATO III | 0.0 | 0.0 | 0.5 | 0.0 |
| Colon ca. SW-948 | 0.0 | 0.0 | 0.2 | 0.0 |
| Colon ca. SW480 | 0.0 | 0.0 | 0.1 | 0.0 |
| Colon ca.* (SW480 met) SW620 | 0.0 | 0.0 | 0.0 | 0.0 |
| Colon ca. HT29 | 0.0 | 0.0 | 0.0 | 0.0 |
| Colon ca. HCT-116 | 0.0 | 0.0 | 0.0 | 0.0 |
| Colon ca. CaCo-2 | 0.2 | 0.2 | 0.0 | 0.0 |
| Colon cancer tissue | 0.7 | 0.1 | 0.9 | 0.0 |
| Colon ca. SW1116 | 0.0 | 0.0 | 0.0 | 0.0 |
| Colon ca. Colo-205 | 0.0 | 0.0 | 0.0 | 0.0 |
| Colon ca. SW-48 | 0.0 | 0.0 | 0.0 | 0.0 |
| Colon Pool | 3.5 | 3.1 | 3.2 | 1.9 |
| Small Intestine Pool | 1.1 | 1.3 | 1.8 | 0.7 |
| Stomach Pool | 0.2 | 1.4 | 0.4 | 0.3 |
| Bone Marrow Pool | 2.3 | 1.8 | 1.4 | 2.4 |
| Fetal Heart | 0.3 | 0.6 | 0.8 | 0.6 |
| Heart Pool | 0.8 | 0.0 | 2.2 | 0.7 |
| Lymph Node Pool | 2.6 | 2.0 | 3.0 | 4.8 |
| Fetal Skeletal Muscle | 17.9 | 22.2 | 20.9 | 27.0 |
| Skeletal Muscle Pool | 100.0 | 83.5 | 96.6 | 79.0 |
| Spleen Pool | 0.6 | 0.0 | 0.2 | 0.5 |
| Thymus Pool | 0.6 | 0.4 | 1.5 | 1.1 |
| CNS cancer (glio/astro) U87-MG | 0.0 | 0.0 | 1.5 | 1.2 |
| CNS cancer (glio/astro) U-118-MG | 0.2 | 0.0 | 0.0 | 0.0 |
| CNS cancer (neuro; met) SK-N-AS | 0.0 | 0.0 | 0.0 | 0.0 |
| CNS cancer (astro) SF-539 | 0.0 | 0.0 | 0.0 | 0.0 |
| CNS cancer (astro) SNB-75 | 0.0 | 0.2 | 0.9 | 1.0 |
| CNS cancer (glio) SNB-19 | 0.0 | 0.0 | 0.0 | 0.0 |
| CNS cancer (glio) SF-295 | 0.0 | 0.0 | 0.0 | 0.0 |
| Brain (Amygdala) Pool | 32.8 | 31.0 | 36.3 | 26.2 |
| Brain (cerebellum) | 69.7 | 76.3 | 61.1 | 49.3 |
| Brain (fetal) | 90.1 | 100.0 | 100.0 | 100.0 |
| Brain (Hippocampus) Pool | 27.9 | 31.0 | 32.1 | 29.3 |
| Cerebral Cortex Pool | 36.3 | 48.3 | 39.5 | 42.3 |
| Brain (Substantia nigra) Pool | 31.0 | 32.1 | 28.3 | 24.8 |
| Brain (Thalamus) Pool | 50.0 | 50.3 | 54.7 | 51.1 |
| Brain (whole) | 46.0 | 38.2 | 50.7 | 46.7 |
| Spinal Cord Pool | 17.6 | 18.4 | 25.2 | 17.7 |
| Adrenal Gland | 2.5 | 2.5 | 3.1 | 2.1 |
| Pituitary gland Pool | 1.3 | 1.2 | 1.4 | 3.2 |
| Salivary Gland | 0.0 | 0.2 | 0.2 | 0.0 |
| Thyroid (female) | 0.0 | 0.0 | 0.3 | 0.2 |
| Pancreatic ca. CAPAN2 | 0.0 | 0.0 | 0.0 | 0.0 |
| Pancreas Pool | 1.6 | 7.9 | 1.3 | 1.6 |

[1473] TABLE AYE
Panel 4.1D
Column A - Rel. Exp.(%) Ag5035, Run 223740981

| Tissue Name | A | Tissue Name | A |
|---|---|---|---|
| Secondary Th1 act | 0.0 | HUVEC IL-1beta | 2.0 |
| Secondary Th2 act | 0.0 | HUVEC IFN gamma | 0.0 |
| Secondary Tr1 act | 0.0 | HUVEC TNF alpha + IFN gamma | 1.9 |
| Secondary Th1 rest | 0.0 | HUVEC TNF alpha + IL4 | 0.0 |
| Secondary Th2 rest | 0.0 | HUVEC IL-11 | 0.0 |
| Secondary Tr1 rest | 0.0 | Lung Microvascular EC none | 0.0 |
| Primary Th1 act | 0.0 | Lung Microvascular EC TNFalpha + IL- | 100.0 |
| | | 1beta | |
| Primary Th2 act | 0.0 | Microvascular Dermal EC none | 0.0 |
| Primary Tr1 act | 2.0 | Microsvasular Dermal EC TNFalpha + IL- | 55.5 |
| | | 1beta | |
| Primary Th1 rest | 0.0 | Bronchial epithelium TNFalpha +IL1beta | 2.2 |
| Primary Th2 rest | 0.0 | Small airway epithelium none | 4.2 |
| Primary Tr1 rest | 0.0 | Small airway epithelium TNFalpha + IL- | 3.7 |
| | | 1beta | |
| CD45RA CD4 lymphocyte act | 0.0 | Coronery artery SMC rest | 2.3 |
| CD45RO CD4 lymphocyte act | 0.0 | Coronery artery SMC TNFalpha + IL-1beta | 0.0 |
| CD8 lymphocyte act | 0.0 | Astrocytes rest | 0.0 |
| Secondary CD8 lymphocyte rest | 0.0 | Astrocytes TNFalpha + IL-1beta | 0.0 |
| Secondary CD8 lymphocyte act | 0.0 | KU-812 (Basophil) rest | 10.6 |
| CD4 lymphocyte none | 0.0 | KU-812 (Basophil) PMA/ionomycin | 13.6 |
| 2ry Th1/Th2/Tr1 anti-CD95 | 0.0 | CCD1106 (Keratinocytes) none | 0.0 |
| CH11 | | | |
| LAK cells rest | 0.0 | CCD1106 (Keratinocytes) TNFalpha + IL- | 0.0 |
| | | 1beta | |
| LAK cells IL-2 | 0.0 | Liver cirrhosis | 0.0 |
| LAK cells IL-2 + IL-12 | 8.4 | NCI-H292 none | 0.0 |
| LAK cells IL-2 + IFN gamma | 2.9 | NCI-H292 IL-4 | 0.0 |
| LAK cells IL-2 + IL-18 | 3.8 | NCI-H292 IL-9 | 0.0 |
| LAK cells PMA/ionomycin | 2.3 | NCI-H292 IL-13 | 2.5 |
| NK Cells IL-2 rest | 0.0 | NCI-H292 IFN gamma | 0.0 |
| Two Way MLR 3 day | 2.1 | HPAEC none | 0.0 |
| Two Way MLR 5 day | 2.3 | HPAEC TNF alpha + IL-1 beta | 8.8 |
| Two Way MLR 7 day | 1.8 | Lung fibroblast none | 0.0 |
| PBMC rest | 6.7 | Lung fibroblast TNF alpha + IL-1 beta | 0.0 |
| PBMC PWM | 0.0 | Lung fibroblast IL-4 | 0.0 |
| PBMC PHA-L | 6.3 | Lung fibroblast IL-9 | 0.0 |
| Ramos (B cell) none | 0.0 | Lung fibroblast IL-13 | 0.0 |
| Ramos (B cell) ionomycin | 0.0 | Lung fibroblast IFN gamma | 0.0 |
| B lymphocytes PWM | 9.2 | Dermal fibroblast CCD1070 rest | 0.0 |
| B lymphocytes CD40L and IL-4 | 1.9 | Dermal fibroblast CCD1070 TNF alpha | 0.0 |
| EOL-1 dbcAMP | 0.0 | Dermal fibroblast CCD1070 IL-1 beta | 0.0 |
| EOL-1 dbcAMP | 0.0 | Dermal fibroblast IFN gamma | 0.0 |
| PMA/ionomycin | | | |
| Dendritic cells none | 0.0 | Dermal fibroblast IL-4 | 0.0 |
| Dendritic cells LPS | 2.4 | Dermal Fibroblasts rest | 2.0 |
| Dendritic cells anti-CD40 | 0.0 | Neutrophils TNFa + LPS | 0.0 |
| Monocytes rest | 0.0 | Neutrophils rest | 0.0 |
| Monocytes LPS | 31.6 | Colon | 5.4 |
| Macrophages rest | 1.7 | Lung | 8.1 |
| Macrophages LPS | 6.5 | Thymus | 5.1 |
| HUVEC none | 0.0 | Kidney | 0.0 |
| HUVEC starved | 0.0 | | |

[1474] TABLE AYF
Panel 5 Islet
Column A - Rel. Exp.(%) Ag5035, Run 244908253

| Tissue Name | A | Tissue Name | A |
|---|---|---|---|
| 97457 Patient-02go adipose | 1.4 | 94709 Donor 2 AM - A adipose | 0.0 |
| 97476 Patient-07sk skeletal muscle | 3.2 | 94710 Donor 2 AM - B adipose | 0.0 |
| 97477 Patient-07ut uterus | 0.0 | 94711 Donor 2 AM - C adipose | 0.0 |
| 97478 Patient-07pl placenta | 1.1 | 94712 Donor 2 AD - A adipose | 0.0 |
| 99167 Bayer Patient 1 | 24.8 | 94713 Donor 2 AD - B adipose | 0.0 |
| 97482 Patient-08ut uterus | 0.0 | 94714 Donor 2 AD - C adipose | 0.0 |
| 97483 Patient-08pl placenta | 0.0 | 94742 Donor 3 U - A Mesenchymal | 0.0 |
| | | Stem Cells | |
| 97486 Patient-09sk skeletal muscle | 11.1 | 94743 Donor 3 U - B Mesenchymal | 0.0 |
| | | Stem Cells | |
| 97487 Patient-09ut uterus | 1.7 | 94730 Donor 3 AM - A adipose | 0.0 |
| 97488 Patient-09pl placenta | 1.1 | 94731 Donor 3 AM - B adipose | 0.0 |
| 97492 Patient-10ut uterus | 0.0 | 94732 Donor 3 AM - C adipose | 0.0 |
| 97493 Patient-10pl placenta | 1.1 | 94733 Donor 3 AD - A adipose | 0.0 |
| 97495 Patient-11go adipose | 0.0 | 94734 Donor 3 AD - B adipose | 0.0 |
| 97496 Patient-11sk skeletal muscle | 33.9 | 94735 Donor 3 AD - C adipose | 0.0 |
| 97497 Patient-11ut uterus | 0.0 | 77138 Liver HepG2untreated | 0.0 |
| 97498 Patient-11pl placenta | 0.0 | 73556 Heart Cardiac stromal cells | 0.0 |
| | | (primary) | |
| 97500 Patient-12go adipose | 0.0 | 81735 Small Intestine | 0.0 |
| 97501 Patient-12sk skeletal muscle | 100.0 | 72409 Kidney Proximal Convoluted | 0.0 |
| | | Tubule | |
| 97502 Patient-12ut uterus | 0.0 | 82685 Small intestine Duodenum | 1.1 |
| 97503 Patient-12pl placenta | 0.0 | 90650 Adrenal Adrenocortical | 0.0 |
| | | adenoma | |
| 94721 Donor 2 U - A Mesenchymal | 0.0 | 72410 Kidney HRCE | 1.6 |
| Stem Cells | | | |
| 94722 Donor 2 U - B Mesenchymal | 0.0 | 72411 Kidney HRE | 0.0 |
| Stem Cells | | | |
| 94723 Donor 2 U - C Mesenchymal | 0.0 | 73139 Uterus Uterine smooth muscle | 0.0 |
| Stem Cells | | cells | |

[1475] AI_comprehensive panel_v1.0 Summary: Ag5035/Ag6142 The highest expression of this gene was detected in an OA bone sample. Expression of the The expression of this gene was highly associated with synovium and bone samples from patients with osteoarthritis when compared to expression in the control samples. Therapeutic modulation of this gene, expressed protein and/or use of antibodies or small molecule drugs targeting the gene or gene product are useful in the treatment of osteoarthritis.

[1476] General_screening_panel_v1.5 Summary: Ag5035/Ag6142 This gene showed highly brain preferential expression (CTs=30-31). Inhibition of calcium uptake has been shown to decrease neuronal death in response to cerebral ischemia. Therapeutic modulation of this gene, expressed protein and/or use of antibodies or small molecule drugs targeting the gene or gene product are useful in the treatment of stroke by decreasing the total infarct volume.

[1477] Moderate levels of expression were seen in fetal and adult skeletal muscle (CTs=30-31). This gene encodes a putative sodium/calcium exchanger. Altered levels of intracellular calcium have been implicated in many diseases, including type 2 diabetes. Based on its expression profile and homology to a calcium transport protein, therapeutic modulation of this gene, expressed protein and/or use of antibodies or small molecule drugs targeting the gene or gene product are useful in the treatment of type 2 diabetes.

[1478] Panel 4.1D Summary: Ag5035 Expression of this gene was restricted to TNF-alpha and IL-1 beta treated lung and dermal microvasculature (CTs=33-34). Endothelial cells are known to play important roles in inflammatory responses by altering the expression of surface proteins that are involved in activation and recruitment of effector inflammatory cells. The expression of this gene in dermal microvascular endothelial cells indicated that this protein product may be involved in inflammatory responses to skin disorders, including psoriasis. Expression in lung microvascular endothelial cells indicated that the protein encoded by this transcript may also be involved in lung disorders including asthma, allergies, chronic obstructive pulmonary disease, and emphysema. Therapeutic modulation of this gene, expressed protein and/or use of antibodies or small molecule drugs targeting the gene or gene product are useful in the treatment of psoriasis, asthma, allergies, chronic obstructive pulmonary disease, and emphysema.

[1479] Panel 5 Islet Summary: Ag5035 Expression of this gene was highest and most prominent in sampels derived from skeletal muscle (CTs=29-33). Please see Panel 1.5 for discussion of this gene in metabolic disease.

[1480] AZ. CG56262-01: Ca-Binding Transporter.

[1481] Expression of gene CG56262-01 was assessed using the primer-probe sets Ag2896 and Ag2920, described in Tables AZA and AZB. Results of the RTQ-PCR runs are shown in Tables AZC, AZD, AZE, AZF and AZG.

TABLE AZA
Probe Name Ag2896

| | | | Start | SEQ ID |
|---|---|---|---|---|
| Primers | Sequences | Length | Position | No |
| Forward | 5′-gtcagcttctcttgctttgaga-3′ | 22 | 900 | 1344 |
| Probe | TET-5′-cactgtcaggcactcgccaatgt-3′- | 23 | 932 | 1345 |
| | TAMRA | | | |
| Reverse | 5′-ctgtatttctggaagcattcca-3′ | 22 | 964 | 1346 |

[1482] TABLE AZB
Probe Name Ag2920

| | | | Start | SEQ ID |
|---|---|---|---|---|
| Primers | Sequences | Length | Position | No |
| Forward | 5′-ttgatgtctctgagatccaaca-3′ | 22 | 1134 | 1347 |
| Probe | TET-5′-agtttccgagctctgggcatttccat-3′- | 26 | 1107 | 1348 |
| | TAMRA | | | |
| Reverse | 5′-catgctgtgcaaaattttctc-3′ | 21 | 1070 | 1349 |

[1483] TABLE AZC
CNS_neurodegeneration_v1.0
Column A - Rel. Exp.(%) Ag2896, Run 209734744
Column B - Rel. Exp.(%) Ag2920, Run 209779301

| Tissue Name | A | B | Tissue Name | A | B |
|---|---|---|---|---|---|
| AD 1 Hippo | 46.2 | 55.1 | AH3 4624 | 45.4 | 64.6 |
| AD 2 Hippo | 65.1 | 62.0 | AH3 4640 | 61.6 | 56.6 |
| AD 3 Hippo | 49.0 | 64.2 | AD 1 Occipital Ctx | 24.3 | 30.1 |
| AD 4 Hippo | 34.2 | 37.6 | AD 2 Occipital Ctx (Missing) | 0.3 | 0.3 |
| AD 5 Hippo | 52.5 | 46.3 | AD 3 Occipital Ctx | 32.1 | 35.4 |
| AD 6 Hippo | 59.9 | 67.8 | AD 4 Occipital Ctx | 46.0 | 53.2 |
| Control 2 Hippo | 76.3 | 87.1 | AD 5 Occipital Ctx | 60.3 | 29.5 |
| Control 4 Hippo | 38.7 | 48.3 | AD 5 Occipital Ctx | 28.7 | 55.9 |
| Control (Path) 3 Hippo | 38.7 | 47.0 | Control 1 Occipital Ctx | 32.5 | 40.9 |
| AD 1 Temporal Ctx | 38.2 | 41.5 | Control 2 Occipital Ctx | 60.3 | 66.4 |
| AD 2 Temporal Ctx | 62.9 | 65.1 | Control 3 Occipital Ctx | 29.9 | 42.6 |
| AD 3 Temporal Ctx | 39.0 | 49.7 | Control 4 Occipital Ctx | 38.4 | 43.8 |
| AD 4 Temporal Ctx | 55.5 | 52.5 | Control (Path) 1 Occipital Ctx | 67.8 | 85.3 |
| AD 5 Inf Temporal Ctx | 59.9 | 61.1 | Control (Path) 2 Occipital Ctx | 31.6 | 32.3 |
| AD 5 Sup Temporal Ctx | 49.7 | 45.7 | Control (Path) 3 Occipital Ctx | 29.9 | 40.1 |
| AD 6 Inf Temporal Ctx | 48.6 | 48.0 | Control (Path) 4 Occipital Ctx | 30.4 | 27.2 |
| AD 6 Sup Temporal Ctx | 45.1 | 52.5 | Control 1 Parietal Ctx | 46.7 | 51.8 |
| Control 1 Temporal Ctx | 55.5 | 62.9 | Control 2 Parietal Ctx | 48.3 | 46.7 |
| Control 2 Temporal Ctx | 81.2 | 99.3 | Control 3 Parietal Ctx | 6.5 | 40.9 |
| Control 3 Temporal Ctx | 55.1 | 54.0 | Control (Path) 1 Parietal Ctx | 100.0 | 100.0 |
| Control 3 Temporal Ctx | 52.9 | 47.3 | Control (Path) 2 Parietal Ctx | 43.2 | 42.0 |
| AH3 3975 | 94.6 | 99.3 | Control (Path) 3 Parietal Ctx | 33.0 | 47.3 |
| AH3 3954 | 64.2 | 72.2 | Control (Path) 4 Parietal Ctx | 57.4 | 62.0 |

[1484] TABLE AZD
Panel 1.3D
Column A - Rel. Exp.(%) Ag2896, Run 167660338
Column B - Rel. Exp.(%) Ag2920, Run 167646813

| Tissue Name | A | B | Tissue Name | A | B |
|---|---|---|---|---|---|
| Liver adenocarcinoma | 36.6 | 40.1 | Kidney (fetal) | 23.2 | 21.6 |
| Pancreas | 4.2 | 7.4 | Renal ca. 786-0 | 15.5 | 19.6 |
| Pancreatic ca. CAPAN 2 | 10.1 | 9.3 | Renal ca. A498 | 9.5 | 9.4 |
| Adrenal gland | 3.3 | 2.8 | Renal ca. RXF 393 | 17.3 | 16.6 |
| Thyroid | 11.8 | 18.9 | Renal ca. ACHN | 10.5 | 14.5 |
| Salivary gland | 6.7 | 6.6 | Renal ca. UO-31 | 7.7 | 9.9 |
| Pituitary gland | 2.2 | 2.7 | Renal ca. TK-10 | 12.4 | 14.7 |
| Brain (fetal) | 27.0 | 27.7 | Liver | 4.3 | 3.5 |
| Brain (whole) | 81.2 | 74.2 | Liver (fetal) | 1.8 | 2.6 |
| Brain (amygdala) | 40.1 | 40.3 | Liver ca. (hepatoblast) HepG2 | 4.7 | 4.9 |
| Brain (cerebellum) | 30.8 | 33.0 | Lung | 5.4 | 3.2 |
| Brain (hippocampus) | 44.8 | 42.0 | Lung (fetal) | 4.8 | 4.7 |
| Brain (substantia nigra) | 23.0 | 21.5 | Lung ca. (small cell) LX-1 | 6.7 | 6.2 |
| Brain (thalamus) | 25.5 | 31.6 | Lung ca. (small cell) NCI-H69 | 0.0 | 0.1 |
| Cerebral Cortex | 100.0 | 100.0 | Lung ca. (s.cell var.) SHP-77 | 26.1 | 31.9 |
| Spinal cord | 12.6 | 12.9 | Lung ca. (large cell) NCI-H460 | 1.2 | 1.4 |
| glio/astro U87-MG | 2.2 | 2.4 | Lung ca. (non-sm. cell) A549 | 10.4 | 8.9 |
| glio/astro U-118-MG | 9.9 | 8.1 | Lung ca. (non-s.cell) NCI-H23 | 11.0 | 12.7 |
| astrocytoma SW1783 | 8.8 | 10.1 | Lung ca. (non-s.cell) HOP-62 | 4.9 | 4.7 |
| neuro*; met SK-N-AS | 4.2 | 3.3 | Lung ca. (non-s.cl) NCI-H522 | 11.4 | 11.4 |
| astrocytoma SF-539 | 5.8 | 5.4 | Lung ca. (squam.) SW 900 | 7.9 | 8.6 |
| astrocytoma SNB-75 | 10.2 | 10.5 | Lung ca. (squam.) NCI-H596 | 0.3 | 0.4 |
| glioma SNB-19 | 10.1 | 11.0 | Mammary gland | 8.3 | 8.5 |
| glioma U251 | 14.1 | 15.8 | Breast ca.* (pl.ef) MCF-7 | 7.5 | 8.1 |
| glioma SF-295 | 6.0 | 5.9 | Breast ca.* (pl.ef) MDA-MB- | 6.6 | 7.1 |
| | | | 231 | | |
| Heart (Fetal) | 38.7 | 40.1 | Breast ca.* (pl.ef) T47D | 16.2 | 17.0 |
| Heart | 10.7 | 9.9 | Breast ca. BT-549 | 5.8 | 5.1 |
| Skeletal muscle (Fetal) | 16.0 | 11.8 | Breast ca. MDA-N | 19.5 | 22.5 |
| Skeletal muscle | 31.2 | 28.7 | Ovary | 10.4 | 10.3 |
| Bone marrow | 0.4 | 0.6 | Ovarian ca. OVCAR-3 | 11.5 | 9.2 |
| Thymus | 2.5 | 2.5 | Ovarian ca. OVCAR-4 | 35.6 | 32.5 |
| Spleen | 1.1 | 1.4 | Ovarian ca. OVCAR-5 | 31.0 | 34.2 |
| Lymph node | 2.6 | 1.7 | Ovarian ca. OVCAR-8 | 5.4 | 5.5 |
| Colorectal | 14.0 | 12.3 | Ovarian ca. IGROV-1 | 10.3 | 10.2 |
| Stomach | 4.4 | 4.0 | Ovarian ca. (ascites) SK-OV-3 | 13.8 | 18.0 |
| Small intestine | 4.4 | 4.9 | Uterus | 6.3 | 8.4 |
| Colon ca. SW480 | 5.1 | 5.3 | Placenta | 0.0 | 0.0 |
| Colon ca.* SW620 (SW480 met) | 14.9 | 18.7 | Prostate | 3.2 | 3.8 |
| Colon ca. HT29 | 6.8 | 7.2 | Prostate ca.* (bone met) PC-3 | 16.5 | 18.3 |
| Colon ca. HCT-116 | 10.7 | 10.4 | Testis | 1.4 | 1.3 |
| Colon ca. CaCo-2 | 17.0 | 21.9 | Melanoma Hs688(A).T | 2.8 | 2.6 |
| CC Well to Mod Duff | 2.4 | 2.4 | Melanoma* (met) Hs688(B).T | 2.6 | 3.8 |
| (ODO3866) | | | | | |
| Colon ca. HCC-2998 | 9.3 | 7.6 | Melanoma UACC-62 | 10.9 | 11.2 |
| Gastric ca. (liver met) NCI-N87 | 5.7 | 5.5 | Melanoma M14 | 8.6 | 5.8 |
| Bladder | 5.1 | 5.1 | Melanoma LOX IMVI | 12.2 | 10.8 |
| Trachea | 1.9 | 2.8 | Melanoma* (met) SK-MEL-5 | 24.0 | 25.2 |
| Kidney | 12.4 | 17.0 | Adipose | 6.1 | 6.4 |

[1485] TABLE AZE
Panel 4D
Column A - Rel. Exp.(%) Ag2896, Run 164401737
Column B - Rel. Exp.(%) Ag2920, Run 164403312

| Tissue Name | A | B | Tissue Name | A | B |
|---|---|---|---|---|---|
| Secondary Th1 act | 5.6 | 7.3 | HUVEC IL-1beta | 4.9 | 4.3 |
| Secondary Th2 act | 6.8 | 6.0 | HUVEC IFN gamma | 19.6 | 19.8 |
| Secondary Tr1 act | 7.4 | 7.7 | HUVEC TNF alpha + IFN gamma | 7.8 | 8.9 |
| Secondary Th1 rest | 6.4 | 6.7 | HUVEC TNF alpha + IL4 | 6.1 | 7.9 |
| Secondary Th2 rest | 7.6 | 7.1 | HUVEC IL-11 | 10.4 | 11.8 |
| Secondary Tr1 rest | 12.2 | 9.7 | Lung Microvascular EC none | 7.5 | 9.8 |
| Primary Th1 act | 12.7 | 14.5 | Lung Microvascular EC TNFalpha + | 5.5 | 6.1 |
| | | | IL-1beta | | |
| Primary Th2 act | 16.0 | 15.1 | Microvascular Dermal EC none | 13.7 | 12.6 |
| Primary Tr1 act | 26.4 | 22.1 | Microsvasular Dermal EC TNFalpha | 5.7 | 6.6 |
| | | | + IL-1beta | | |
| Primary Th1 rest | 31.6 | 33.4 | Bronchial epithelium TNFalpha + | 15.9 | 11.9 |
| | | | IL1beta | | |
| Primary Th2 rest | 19.3 | 18.7 | Small airway epithelium none | 4.7 | 5.3 |
| Primary Tr1 rest | 14.7 | 16.5 | Small airway epithelium TNFalpha | 35.6 | 37.1 |
| | | | + IL-1beta | | |
| CD45RA CD4 lymphocyte | 6.2 | 5.1 | Coronery artery SMC rest | 7.1 | 6.7 |
| act | | | | | |
| CD45RO CD4 lymphocyte | 11.2 | 12.3 | Coronery artery SMC TNFalpha + | 4.6 | 5.9 |
| act | | | IL-1beta | | |
| CD8 lymphocyte act | 11.6 | 10.8 | Astrocytes rest | 27.0 | 23.8 |
| Secondary CD8 lymphocyte | 8.2 | 9.9 | Astrocytes TNFalpha + IL-1beta | 30.8 | 28.1 |
| rest | | | | | |
| Secondary CD8 lymphocyte | 3.0 | 3.3 | KU-812 (Basophil) rest | 8.2 | 6.3 |
| act | | | | | |
| CD4 lymphocyte none | 2.8 | 3.4 | KU-812 (Basophil) PMA/ionomycin | 22.5 | 19.9 |
| 2ry Th1/Th2/Tr1 anti-CD95 | 7.3 | 7.4 | CCD1106 (Keratinocytes) none | 11.11 | 1.7 |
| CH11 | | | | | |
| LAK cells rest | 7.1 | 6.7 | CCD1106 (Keratinocytes) TNFalpha | 6.8 | 6.3 |
| | | | + IL-1beta | | |
| LAK cells IL-2 | 14.7 | 17.0 | Liver cirrhosis | 3.0 | 3.0 |
| LAK cells IL-2 + IL-12 | 6.9 | 7.0 | Lupus kidney | 6.5 | 6.2 |
| LAK cells IL-2 + IFN | 12.8 | 11.0 | NCI-H292 none | 63.3 | 72.7 |
| gamma | | | | | |
| LAK cells IL-2 + IL-18 | 6.7 | 9.0 | NCI-H292 IL-4 | 57.4 | 69.7 |
| LAK cells PMA/ionomycin | 0.9 | 0.6 | NCI-H292 IL-9 | 57.0 | 65.5 |
| NK Cells IL-2 rest | 7.2 | 6.5 | NCI-H292 IL-13 | 30.8 | 35.6 |
| Two Way MLR 3 day | 6.3 | 6.8 | NCI-H292 IFN gamma | 29.3 | 34.4 |
| Two Way MLR 5 day | 3.5 | 3.0 | HPAEC none | 10.8 | 11.7 |
| Two Way MLR 7 day | 4.2 | 4.5 | HPAEC TNF alpha + IL-1 beta | 6.9 | 6.4 |
| PBMC rest | 2.0 | 1.6 | Lung fibroblast none | 16.8 | 17.4 |
| PBMC PWM | 27.9 | 26.2 | Lung fibroblast TNF alpha + IL-1 | 7.4 | 8.0 |
| | | | beta | | |
| PBMC PHA-L | 27.5 | 26.8 | Lung fibroblast IL-4 | 30.6 | 34.6 |
| Ramos (B cell) none | 16.8 | 16.0 | Lung fibroblast IL-9 | 24.8 | 24.1 |
| Ramos (B cell) ionomycm | 100.0 | 100.0 | Lung fibroblast IL-13 | 19.6 | 21.8 |
| B lymphocytes PWM | 36.6 | 22.8 | Lung fibroblast IFN gamma | 31.4 | 37.6 |
| B lymphocytes CD40L and | 13.5 | 14.9 | Dermal fibroblast CCD1070 rest | 10.7 | 12.0 |
| IL-4 | | | | | |
| EOL-1 dbcAMP | 14.5 | 15.5 | Dermal fibroblast CCD1070 | 20.6 | 21.3 |
| | | | alpha | | |
| EOL-1 dbcAMP | 7.1 | 6.3 | Dermal fibroblast CCD1070 IL-1 | 6.5 | 5.9 |
| PMA/ionomycin | | | beta | | |
| Dendritic cells none | 0.8 | 1.5 | Dermal fibroblast IFN gamma | 10.1 | 11.3 |
| Dendritic cells LPS | 0.1 | 0.2 | Dermal fibroblast IL-4 | 23.0 | 23.2 |
| Dendritic cells anti-CD40 | 0.9 | 0.7 | IBD Colitis 2 | 2.0 | 2.3 |
| Monocytes rest | 0.1 | 0.0 | IBD Crohn's | 3.4 | 4.8 |
| Monocytes LPS | 0.2 | 0.0 | Colon | 41.5 | 50.7 |
| Macrophages rest | 4.0 | 3.4 | Lung | 15.8 | 17.2 |
| Macrophages LPS | 0.5 | 0.4 | Thymus | 57.8 | 55.5 |
| HUVEC none | 12.2 | 12.8 | Kidney | 5.0 | 8.5 |
| HUVEC starved | 21.6 | 20.4 | | | |

[1486] TABLE AZF
Panel 5 Islet
Column A - Rel. Exp.(%) Ag2896, Run 268363565

| Tissue Name | A | Tissue Name | A |
|---|---|---|---|
| 97457 Patient-02go adipose | 19.6 | 94709 Donor 2 AM - A adipose | 8.3 |
| 97476 Patient-07sk skeletal muscle | 6.6 | 94710 Donor 2 AM - B adipose | 8.1 |
| 97477 Patient-07ut uterus | 31.6 | 94711 Donor 2 AM - C adipose | 5.0 |
| 97478 Patient-07pl placenta | 2.6 | 94712 Donor 2 AD - A adipose | 17.6 |
| 99167 Bayer Patient 1 | 32.5 | 94713 Donor 2 AD - B adipose | 29.5 |
| 97482 Patient-08ut uterus | 26.6 | 94714 Donor 2 AD - C adipose | 25.7 |
| 97483 Patient-08pl placenta | 1.2 | 94742 Donor 3 U - A Mesenchymal | 5.7 |
| | | Stem Cells | |
| 97486 Patient-09sk skeletal muscle | 8.3 | 94743 Donor 3 U - B Mesenchymal | 5.1 |
| | | Stem Cells | |
| 97487 Patient-09ut uterus | 47.6 | 94730 Donor 3 AM - A adipose | 8.7 |
| 97488 Patient-09pl placenta | 1.3 | 94731 Donor 3 AM - B adipose | 4.4 |
| 97492 Patient-10ut uterus | 28.3 | 94732 Donor 3 AM - C adipose | 3.4 |
| 97493 Patient-10pl placenta | 3.0 | 94733 Donor 3 AD - A adipose | 9.9 |
| 97495 Patient-11go adipose | 47.6 | 94734 Donor 3 AD - B adipose | 4.4 |
| 97496 Patient-11sk skeletal muscle | 35.1 | 94735 Donor 3 AD - C adipose | 4.6 |
| 97497 Patient-11ut uterus | 100.0 | 77138 Liver HepG2untreated | 54.7 |
| 97498 Patient-11pl placenta | 0.4 | 73556 Heart Cardiac stromal cells | 10.6 |
| | | (primary) | |
| 97500 Patient-12go adipose | 17.3 | 81735 Small Intestine | 60.7 |
| 97501 Patient-12sk skeletal muscle | 37.4 | 72409 Kidney Proximal Convoluted | 24.1 |
| | | Tubule | |
| 97502 Patient-12ut uterus | 76.3 | 82685 Small intestine Duodenum | 18.8 |
| 97503 Patient-12pl placenta | 0.9 | 90650 Adrenal Adrenocortical | 3.8 |
| | | adenoma | |
| 94721 Donor 2 U - A Mesenchymal | 15.2 | 72410 Kidney HRCE | 70.2 |
| Stem Cells | | | |
| 94722 Donor 2 U - B Mesenchymal | 11.9 | 72411 Kidney HRE | 59.5 |
| Stem Cells | | | |
| 94723 Donor 2 U - C Mesenchymal | 9.7 | 73139 Uterus Uterine smooth muscle | 8.7 |
| Stem Cells | | cells | |

[1487] TABLE AZG
general oncology screening panel_v_2.4
Column A - Rel. Exp. (%) Ag2896, Run 260442400
Column B - Rel. Exp. (%) Ag2920, Run 260443377

| Tissue Name | A | B | Tissue Name | A | B |
|---|---|---|---|---|---|
| Colon cancer 1 | 26.6 | 28.1 | Bladder NAT 2 | 0.5 | 0.5 |
| CC Margin (ODO3921) | 29.9 | 29.1 | Bladder NAT 3 | 0.2 | 0.1 |
| Colon cancer 2 | 26.6 | 18.0 | Bladder NAT 4 | 13.4 | 11.0 |
| Colon NAT 2 | 25.7 | 20.2 | Prostate adenocarcinoma 1 | 35.8 | 18.4 |
| Colon cancer 3 | 52.5 | 59.0 | Prostate adenocarcinoma 2 | 3.3 | 2.0 |
| Colon NAT 3 | 74.7 | 71.2 | Prostate adenocarcinoma 3 | 19.1 | 16.0 |
| Colon malignant cancer 4 | 54.0 | 53.2 | Prostate adenocarcinoma 4 | 13.2 | 13.1 |
| Colon NAT 4 | 28.7 | 16.0 | Prostate NAT 5 | 2.4 | 2.8 |
| Lung cancer 1 | 11.4 | 9.9 | Prostate adenocarcinoma 6 | 7.9 | 5.3 |
| Lung NAT 1 | 1.6 | 0.5 | Prostate adenocarcinoma 7 | 8.0 | 5.2 |
| Lung cancer 2 | 64.2 | 66.0 | Prostate adenocarcinoma 8 | 1.7 | 1.4 |
| Lung NAT 2 | 1.5 | 0.6 | Prostate adenocarcinoma 9 | 39.8 | 29.1 |
| Squamous cell carcinoma 3 | 25.9 | 25.2 | Prostate NAT 10 | 2.5 | 0.8 |
| Lung NAT 3 | 0.6 | 0.4 | Kidney cancer 1 | 18.9 | 18.4 |
| Metastatic melanoma 1 | 32.8 | 22.5 | Kidney NAT 1 | 15.7 | 12.5 |
| Melanoma 2 | 1.8 | 0.8 | Kidney cancer 2 | 100.0 | 100.0 |
| Melanoma 3 | 2.1 | 1.2 | Kidney NAT 2 | 29.7 | 29.7 |
| Metastatic melanoma 4 | 37.6 | 44.8 | Kidney cancer 3 | 18.0 | 22.8 |
| Metastatic melanoma 5 | 79.6 | 72.7 | Kidney NAT 3 | 15.3 | 14.7 |
| Bladder cancer 1 | 1.0 | 0.3 | Kidney cancer 4 | 31.0 | 28.3 |
| Bladder NAT 1 | 0.0 | 0.0 | Kidney NAT 4 | 19.6 | 21.9 |
| Bladder cancer 2 | 8.3 | 5.7 | | | |

[1488] CNS_neurodegeneration_v1.0 Summary: Ag2896/Ag2920 This gene was found to be down-regulated in the temporal cortex of Alzheimer's disease patients. Up-regulation of this gene or its protein product, or treatment with specific agonists for this receptor is of use in reversing the dementia, memory loss and neuronal death associated with this disease.

[1489] Panel 1.3D Summary: Ag2896/Ag2920 Highest expression of this gene was detected in the cerebral cortex (CTs=26). High expression of this gene was seen predominantly in all the regions of the central nervous system examined, including amygdala, hippocampus, substantia nigra, thalamus, cerebellum, cerebral cortex, and spinal cord. This gene encodes a Ca binding transporter. Ca++ is critical for synaptic vesicle release (Kovacs I, Neurochem Int 1998 November; 33(5):399-405). Targeting this gene with a small molecule drug, protein therapeutic or antibody is useful for the treatment of diseases resulting from altered/inappropriate synaptic transmission such as epilepsy, schizophrenia, bipolar disorder, depression, and mania.

[1490] This gene also had moderate levels of expression adult and fetal heart, skeletal muscle and liver, and adipose. This gene product is homologous to a mitochondrial calcium-dependent transporter. Since intracellular calcium homeostasis is critically important for energy metabolism and signal transduction, modulation of this gene or gene product is useful as a therapeutic for metabolic and endocrine diseases.

[1491] Moderate expression was also seen in almost all the cancer cell lines on this panel. This shows that expression of this gene product is required for cell growth and proliferaton in almost all cell types.

[1492] Panel 4D Summary: Ag2896/Ag2920 Moderate to low expression of this gene was detected across a wide range of cells on this panel including epithelium, fibroblasts, and endothelial cells. Lower but still significant levels of expression were also seen in monocytes/macrophages, T and B cells, which all play an importan role in both innate and adaptive immunity. Expression of this gene was highest in the B cell lymphoma cell line, and the NCI H292 mucoepidermoid cell line (CTs=26.4-27). Inhibition of the function of the protein encoded by this transcript with a small molecule drug, protein therapeutic, or antibody is useful for the reduction of the symptoms of patients suffering from autoimmune and inflammatory diseases such as asthma, COPD, emphysema, psoriasis, inflammatory bowel disease, lupus erythematosus, or rheumatoid arthritis.

[1493] Panel 5 Islet Summary: Ag2896 This gene showed widespread expression in this panel with highest expression seen in uterus from a non-diabetic patient (CT=28.8). Significant expression of this gene was seen in adipose, skeletal muscle, uterus, kidney, small intestine and a liver cancer cell line, which is in agreement with expression seen in panel 1.3D.

[1494] general oncology screening panel_v_{—}2.4 Summary: Ag2896/Ag2920 Highest expression of this gene was detected in a kidney cancer sample (CTs=27). Prominent expression of this gene was also seen in melanoma and prostate cancer samples. This gene was overexpressed in lung cancer samples when compared to expression in matched normal adjacent tissue. Expression of this gene or its protein product is useful as a marker of lung cancers. Targeting this gene or its protein product with a small molecule drug, protein therapeutic, or antibody is useful in the treatment of these cancers.

[1495] BA. CG56398-01: Na/Glucose Cotransporter.

[1496] Expression of gene CG56398-01 was assessed using the primer-probe set Ag2925, described in Table BAA. Results of the RTQ-PCR runs are shown in Tables BAB, BAC, BAD and BAE.

TABLE BAA
Probe Name Ag2925

| | | | Start | SEQ ID |
|---|---|---|---|---|
| Primers | Sequences | Length | Position | No |
| Forward | 5′-ctccctcacctccatctttaac-3′ | 22 | 1191 | 1350 |
| Probe | TET-5′-ccatcttcaccatggacctctggaat-3′- | 26 | 1223 | 1351 |
| | TAMRA | | | |
| Reverse | 5′-atcatgagctccttctcagatg-3′ | 22 | 1265 | 1352 |

[1497] TABLE BAB
CNS_neurodegeneration_v1.0
Column A - Rel. Exp.(%) Ag2925, Run 209777392

| Tissue Name | A | Tissue Name | A |
|---|---|---|---|
| AD 1 Hippo | 51.8 | AH3 4624 | 2.3 |
| AD 2 Hippo | 31.9 | AH3 4640 | 10.7 |
| AD 3 Hippo | 27.7 | AD 1 Occipital Ctx | 100.0 |
| AD 4 Hippo | 5.7 | AD 2 Occipital Ctx (Missing) | 5.0 |
| AD 5 Hippo | 49.3 | AD 3 Occipital Ctx | 48.0 |
| AD 6 Hippo | 19.6 | AD 4 Occipital Ctx | 40.3 |
| Control 2 Hippo | 50.3 | AD 5 Occipital Ctx | 28.1 |
| Control 4 Hippo | 7.5 | AD 5 Occipital Ctx | 50.3 |
| Control (Path) 3 Hippo | 9.3 | Control 1 Occipital Ctx | 13.6 |
| AD 1 Temporal Ctx | 100.0 | Control 2 Occipital Ctx | 79.6 |
| AD 2 Temporal Ctx | 45.7 | Control 3 Occipital Ctx | 18.2 |
| AD 3 Temporal Ctx | 11.3 | Control 4 Occipital Ctx | 49.7 |
| AD 4 Temporal Ctx | 24.1 | Control (Path) 1 Occipital Ctx | 55.1 |
| AD 5 Inf Temporal Ctx | 92.7 | Control (Path) 2 Occipital Ctx | 28.1 |
| AD 5 Sup Temporal Ctx | 43.2 | Control (Path) 3 Occipital Ctx | 31.4 |
| AD 6 Inf Temporal Ctx | 29.7 | Control (Path) 4 Occipital Ctx | 13.9 |
| AD 6 Sup Temporal Ctx | 17.6 | Control 1 Parietal Ctx | 25.0 |
| Control 1 Temporal Ctx | 2.1 | Control 2 Parietal Ctx | 52.1 |
| Control 2 Temporal Ctx | 35.8 | Control 3 Parietal Ctx | 34.4 |
| Control 3 Temporal Ctx | 13.6 | Control (Path) 1 Parietal Ctx | 18.2 |
| Control 3 Temporal Ctx | 4.8 | Control (Path) 2 Parietal Ctx | 35.4 |
| AH3 3975 | 16.2 | Control (Path) 3 Parietal Ctx | 2.8 |
| AH3 3954 | 10.0 | Control (Path) 4 Parietal Ctx | 21.5 |

[1498] TABLE BAC
Panel 1.3D
Column A - Rel. Exp.(%) Ag2925, Run 158046924

| Tissue Name | A | Tissue Name | A |
|---|---|---|---|
| Liver adenocarcinoma | 0.4 | Kidney (fetal) | 1.2 |
| Pancreas | 0.0 | Renal ca. 786-0 | 0.0 |
| Pancreatic ca. CAPAN 2 | 0.0 | Renal ca. A498 | 0.1 |
| Adrenal gland | 0.3 | Renal ca. RXF 393 | 0.0 |
| Thyroid | 0.0 | Renal ca. ACHN | 0.0 |
| Salivary gland | 0.0 | Renal ca. UO-31 | 0.0 |
| Pituitary gland | 0.4 | Renal ca. TK-10 | 0.0 |
| Brain (fetal) | 0.3 | Liver | 0.2 |
| Brain (whole) | 19.5 | Liver (fetal) | 3.8 |
| Brain (amygdala) | 10.5 | Liver ca. (hepatoblast) HepG2 | 0.6 |
| Brain (cerebellum) | 4.6 | Lung | 0.2 |
| Brain (hippocampus) | 100.0 | Lung (fetal) | 0.0 |
| Brain (substantia nigra) | 22.2 | Lung ca. (small cell) LX-1 | 0.0 |
| Brain (thalamus) | 45.4 | Lung ca. (small cell) NCI-H69 | 0.0 |
| Cerebral Cortex | 13.0 | Lung ca. (s. cell var.) SHP-77 | 0.0 |
| Spinal cord | 25.9 | Lung ca. (large cell) NCI-H460 | 0.0 |
| glio/astro U87-MG | 0.0 | Lung ca. (non-sm. cell) A549 | 0.8 |
| glio/astro U-118-MG | 0.4 | Lung ca. (non-s. cell) NCI-H23 | 0.0 |
| astrocytoma SW1783 | 0.1 | Lung ca. (non-s. cell) HOP-62 | 0.0 |
| neuro*; met SK-N-AS | 0.0 | Lung ca. (non-s. cl) NCI-H522 | 0.0 |
| astrocytoma SF-539 | 0.1 | Lung ca. (squam.) SW 900 | 0.0 |
| astrocytoma SNB-75 | 0.1 | Lung ca. (squam.) NCI-H596 | 0.0 |
| glioma SNB-19 | 0.0 | Mammary gland | 0.1 |
| glioma U251 | 0.0 | Breast ca.* (pl. ef) MCF-7 | 0.0 |
| glioma SF-295 | 0.0 | Breast ca.* (pl. ef) MDA-MB-231 | 0.5 |
| Heart (Fetal) | 0.1 | Breast ca.* (pl. ef) T47D | 0.0 |
| Heart | 0.0 | Breast ca. BT-549 | 0.3 |
| Skeletal muscle (Fetal) | 0.1 | Breast ca. MDA-N | 0.2 |
| Skeletal muscle | 0.0 | Ovary | 0.1 |
| Bone marrow | 0.0 | Ovarian ca. OVCAR-3 | 0.0 |
| Thymus | 0.0 | Ovarian ca. OVCAR-4 | 0.0 |
| Spleen | 0.1 | Ovarian ca. OVCAR-5 | 0.0 |
| Lymph node | 0.1 | Ovarian ca. OVCAR-8 | 0.3 |
| Colorectal | 0.1 | Ovarian ca. IGROV-1 | 0.0 |
| Stomach | 0.0 | Ovarian ca. (ascites) SK-OV-3 | 0.0 |
| Small intestine | 1.0 | Uterus | 0.0 |
| Colon ca. SW480 | 0.2 | Placenta | 0.4 |
| Colon ca.* SW620 | 84.7 | Prostate | 0.2 |
| (SW480 met) | | | |
| Colon ca. HT29 | 0.2 | Prostate ca.* (bone met) PC-3 | 0.0 |
| Colon ca. HCT-116 | 0.0 | Testis | 0.3 |
| Colon ca. CaCo-2 | 0.2 | Melanoma Hs688(A).T | 0.0 |
| CC Well to Mod Diff | 0.1 | Melanoma* (met) Hs688(B).T | 0.0 |
| (ODO3866) | | | |
| Colon ca. HCC-2998 | 0.7 | Melanoma UACC-62 | 0.1 |
| Gastric ca. (liver met) | 0.0 | Melanoma M14 | 0.0 |
| NCI-N87 | | | |
| Bladder | 0.0 | Melanoma LOXIMVI | 0.0 |
| Trachea | 0.0 | Melanoma* (met) SK-MEL-5 | 0.0 |
| Kidney | 2.6 | Adipose | 0.0 |

[1499] TABLE BAD
Panel 2D
Column A - Rel. Exp.(%) Ag2925, Run 158047169

| Tissue Name | A | Tissue Name | A |
|---|---|---|---|
| Normal Colon | 2.6 | Kidney Margin 8120608 | 63.7 |
| CC Well to Mod Diff (ODO3866) | 0.6 | Kidney Cancer 8120613 | 0.0 |
| CC Margin (ODO3866) | 0.5 | Kidney Margin 8120614 | 100.0 |
| CC Gr.2 rectosigmoid (ODO3868) | 0.0 | Kidney Cancer 9010320 | 0.4 |
| CC Margin (ODO3868) | 0.4 | Kidney Margin 9010321 | 14.2 |
| CC Mod Diff (ODO3920) | 2.0 | Normal Uterus | 0.9 |
| CC Margin (ODO3920) | 0.7 | Uterine Cancer 064011 | 0.7 |
| CC Gr.2 ascend colon (ODO3921) | 0.0 | Normal Thyroid | 0.0 |
| CC Margin (ODO3921) | 1.2 | Thyroid Cancer | 0.0 |
| CC from Partial Hepatectomy | 1.5 | Thyroid Cancer A302152 | 0.0 |
| (ODO4309) Mets | | | |
| Liver Margin (ODO4309) | 0.7 | Thyroid Margin A302153 | 0.4 |
| Colon mets to lung (OD04451-01) | 0.0 | Normal Breast | 0.6 |
| Lung Margin (OD04451-02) | 0.9 | Breast Cancer | 0.9 |
| Normal Prostate 6546-1 | 0.6 | Breast Cancer (OD04590-01) | 1.2 |
| Prostate Cancer (OD04410) | 1.2 | Breast Cancer Mets (OD04590-03) | 0.5 |
| Prostate Margin (OD04410) | 1.2 | Breast Cancer Metastasis | 0.9 |
| Prostate Cancer (OD04720-01) | 0.9 | Breast Cancer | 0.0 |
| Prostate Margin (OD04720-02) | 1.1 | Breast Cancer | 0.9 |
| Normal Lung | 0.4 | Breast Cancer 9100266 | 1.4 |
| Lung Met to Muscle (ODO4286) | 0.0 | Breast Margin 9100265 | 0.0 |
| Muscle Margin (ODO4286) | 0.0 | Breast Cancer A209073 | 44.1 |
| Lung Malignant Cancer (OD03126) | 1.4 | Breast Margin A209073 | 1.4 |
| Lung Margin (OD03126) | 0.0 | Normal Liver | 0.0 |
| Lung Cancer (OD04404) | 0.8 | Liver Cancer | 0.0 |
| Lung Margin (OD04404) | 0.0 | Liver Cancer 1025 | 0.6 |
| Lung Cancer (OD04565) | 0.0 | Liver Cancer 1026 | 1.2 |
| Lung Margin (OD04565) | 0.4 | Liver Cancer 6004-T | 0.3 |
| Lung Cancer (OD04237-01) | 0.0 | Liver Tissue 6004-N | 3.3 |
| Lung Margin (OD04237-02) | 0.0 | Liver Cancer 6005-T | 0.3 |
| Ocular Mel Met to Liver (ODO4310) | 0.0 | Liver Tissue 6005-N | 0.4 |
| Liver Margin (ODO4310) | 0.1 | Normal Bladder | 1.2 |
| Melanoma Metastasis | 0.0 | Bladder Cancer | 0.9 |
| Lung Margin (OD04321) | 0.1 | Bladder Cancer | 0.4 |
| Normal Kidney | 48.3 | Bladder Cancer (OD04718-01) | 0.7 |
| Kidney Ca, Nuclear grade 2 (OD04338) | 0.9 | Bladder Normal Adjacent | 0.0 |
| | | (OD04718-03) | |
| Kidney Margin (OD04338) | 3.8 | Normal Ovary | 0.0 |
| Kidney Ca Nuclear grade 1/2 (OD04339) | 0.4 | Ovarian Cancer | 0.1 |
| Kidney Margin (OD04339) | 70.7 | Ovarian Cancer (OD04768-07) | 1.6 |
| Kidney Ca, Clear cell type (OD04340) | 3.0 | Ovary Margin (OD04768-08) | 0.0 |
| Kidney Margin (OD04340) | 11.7 | Normal Stomach | 1.0 |
| Kidney Ca, Nuclear grade 3 (OD04348) | 0.2 | Gastric Cancer 9060358 | 0.0 |
| Kidney Margin (OD04348) | 2.1 | Stomach Margin 9060359 | 0.0 |
| Kidney Cancer (OD04622-01) | 0.0 | Gastric Cancer 9060395 | 0.4 |
| Kidney Margin (OD04622-03) | 2.3 | Stomach Margin 9060394 | 0.7 |
| Kidney Cancer (OD04450-01) | 0.0 | Gastric Cancer 9060397 | 2.4 |
| Kidney Margin (OD04450-03) | 5.0 | Stomach Margin 9060396 | 0.4 |
| Kidney Cancer 8120607 | 0.3 | Gastric Cancer 064005 | 0.6 |

[1500] TABLE BAE
Panel 4D
Column A - Rel. Exp.(%) Ag2925, Run 158047348

| Tissue Name | A |
|---|---|
| Secondary Th1 act | 1.7 |
| Secondary Th2 act | 0.0 |
| Secondary Tr1 act | 0.6 |
| Secondary Th1 rest | 0.0 |
| Secondary Th2 rest | 0.8 |
| Secondary Tr1 rest | 0.0 |
| Primary Th1 act | 0.6 |
| Primary Th2 act | 0.7 |
| Primary Tr1 act | 0.6 |
| Primary Th1 rest | 0.8 |
| Primary Th2 rest | 1.9 |
| Primary Tr1 rest | 1.6 |
| CD45RA CD4 lymphocyte act | 0.5 |
| CD45RO CD4 lymphocyte act | 0.6 |
| CD8 lymphocyte act | 0.5 |
| Secondary CD8 lymphocyte rest | 0.3 |
| Secondary CD8 lymphocyte act | 0.0 |
| CD4 lymphocyte none | 0.1 |
| 2ry Th1/Th2/Tr1 anti-CD95 | 1.2 |
| CH11 | |
| LAK cells rest | 1.1 |
| LAK cells IL-2 | 1.1 |
| LAK cells IL-2 + IL-12 | 1.1 |
| LAK cells IL-2 + IFN gamma | 0.0 |
| LAK cells IL-2 + IL-18 | 0.4 |
| LAK cells PMA/ionomycin | 1.4 |
| NK Cells IL-2 rest | 0.7 |
| Two Way MLR 3 day | 2.3 |
| Two Way MLR 5 day | 0.8 |
| Two Way MLR 7 day | 0.5 |
| PBMC rest | 0.0 |
| PBMC PWM | 1.1 |
| PBMC PHA-L | 0.0 |
| Ramos (B cell) none | 0.0 |
| Ramos (B cell) ionomycin | 0.0 |
| B lymphocytes PWM | 0.6 |
| B lymphocytes CD40L and IL-4 | 0.4 |
| EOL-1 dbcAMP | 0.0 |
| EOL-1 dbcAMP | 0.0 |
| PMA/ionomycin | |
| Dendritic cells none | 1.1 |
| Dendritic cells LPS | 1.0 |
| Dendritic cells anti-CD40 | 1.1 |
| Monocytes rest | 0.6 |
| Monocytes LPS | 0.0 |
| Macrophages rest | 2.2 |
| Macrophages LPS | 0.0 |
| HUVEC none | 0.8 |
| HUVEC starved | 1.6 |
| HUVEC IL-1beta | 0.0 |
| HUVEC IFN gamma | 0.0 |
| HUVEC TNF alpha + IFN gamma | 0.0 |
| HUVEC TNF alpha + IL4 | 0.0 |
| HUVEC IL-11 | 0.6 |
| Lung Microvascular EC none | 0.2 |
| Lung Microvascular EC TNFalpha + IL- | 0.0 |
| 1beta | |
| Microvascular Dermal EC none | 0.0 |
| Microsvasular Dermal EC TNFalpha + IL- | 0.0 |
| 1beta | |
| Bronchial epithelium TNFalpha + IL1beta | 0.0 |
| Small airway epithelium none | 0.0 |
| Small airway epithelium TNFalpha + IL- | 0.0 |
| 1beta | |
| Coronery artery SMC rest | 0.0 |
| Coronery artery SMC TNFalpha + IL-1beta | 0.0 |
| Astrocytes rest | 0.0 |
| Astrocytes TNFalpha + IL-1beta | 0.0 |
| KU-812 (Basophil) rest | 0.0 |
| KU-812 (Basophil) PMA/ionomycin | 0.0 |
| CCD1106 (Keratinocytes) none | 0.0 |
| CCD1106 (Keratinocytes) TNFalpha + IL- | 0.0 |
| 1beta | |
| Liver cirrhosis | 2.8 |
| Lupus kidney | 1.2 |
| NCI-H292 none | 0.5 |
| NCI-H292 IL-4 | 0.2 |
| NCI-H292 IL-9 | 1.1 |
| NCI-H292 IL-13 | 0.6 |
| NCI-H292 IFN gamma | 0.6 |
| HPAEC none | 1.3 |
| HPAEC TNF alpha + IL-1 beta | 0.1 |
| Lung fibroblast none | 0.7 |
| Lung fibroblast TNF alpha + IL-1 beta | 0.0 |
| Lung fibroblast IL-4 | 0.3 |
| Lung fibroblast IL-9 | 0.0 |
| Lung fibroblast IL-13 | 0.0 |
| Lung fibroblast IFN gamma | 0.0 |
| Dermal fibroblast CCD1070 rest | 0.0 |
| Dermal fibroblast CCD1070 TNF alpha | 0.0 |
| Dermal fibroblast CCD1070 IL-1 beta | 0.0 |
| Dermal fibroblast IFN gamma | 0.0 |
| Dermal fibroblast IL-4 | 0.0 |
| IBD Colitis 2 | 0.0 |
| IBD Crohn's | 2.9 |
| Colon | 100.0 |
| Lung | 2.1 |
| Thymus | 85.3 |
| Kidney | 2.9 |

[1501] CNS_neurodegeneration_v1.0 Summary: Ag2925 This gene was found to be upregulated in the temporal cortex of Alzheimer's disease patients. Therapeutic modulation of this gene, expressed protein and/or use of antibodies or small molecule drugs targeting the gene or gene product are useful for decreasing neuronal death and as a treatment for this disease.

[1502] Panel 1.3D Summary: Ag2925 Expression of this gene was brain-specific. Highest expression was detected in the hippocampus (CT=28) a region that degenerates in Alzheimer's disease. Expression of this gene or its protein product is useful for distinguishing brain tissue from non-neural tissue. Therapeutic modulation of this gene, expressed protein and/or use of antibodies or small molecule drugs targeting the gene or gene product are useful in the treatment of neurodegenerative diseases.

[1503] Panel 2D Summary: Ag2925 This gene was most highly expressed in a normal kidney sample (CT=28.95). Expression of this gene was lost in the adjacent cancer samples. The loss of expression of this gene or its protein product is useful as a marker for kidney cancer. This gene was also expressed at low levels in breast and bladder cancer samples and was absent or extremely low in normal adjacent tissue. Therapeutic modulation of this gene, expressed protein and/or use of antibodies or small molecule drugs targeting the gene or gene product are useful in the treatment of breast and bladder cancer and as a diagnostic marker for the presence of these cancers.

[1504] Panel 4D Summary: Ag2925 Expression of this transcript was almost exclusively restricted to colon and thymus, with highest expression in normal colon (CT=29). This gene was expressed at much lower levels in IBD colon. The protein encoded by this transcript is involved in normal tissue/cellular functions in the kidney and colon. Loss-of-expression of this protein is useful as a diagnostic marker for lupus or IBD.

[1505] BB. CG56645-03 and CG56645-04: Sodium Glucose Cotransporter.

[1506] Expression of genes CG56645-03 and CG56645-04 were assessed using the primer-probe sets Ag2966 and Ag6497, described in Tables BBA and BBB. Results of the RTQ-PCR runs are shown in Tables BBC, BBD and BBE.

TABLE BBA
Probe Name Ag2966

| | | | Start | SEQ ID |
|---|---|---|---|---|
| Primers | Sequences | Length | Position | No |
| Forward | 5′-agcgggcaactcttcatcta-3′ | 20 | 1388 | 1353 |
| Probe | TET-5′-atgcagtcagtgaccagctccctg-3′- | 24 | 1409 | 1354 |
| | TAMRA | | | |
| Reverse | 5′-caggacaaagactgcagtcact-3′ | 22 | 1441 | 1355 |

[1507] TABLE BBB
Probe Name Ag6497

| | | | Start | SEQ ID |
|---|---|---|---|---|
| Primers | Sequences | Length | Position | No |
| Forward | 5′-tcatagtggcactcatcgg-3′ | 19 | 1329 | 1356 |
| Probe | TET-5′-aactcttcatctacatgcagtcagtgac | 30 | 1395 | 1357 |
| | ca-3′-TAMRA | | | |
| Reverse | 5′-ctatcaggcccaggacaaa-3′ | 19 | 1454 | 1358 |

[1508] TABLE BBC
Panel 1.3D
Column A - Rel. Exp. (%) Ag2966, Run 160658385
Column B - Rel. Exp. (%) Ag2966, Run 165701959

| Tissue Name | A | B | Tissue Name | A | B |
|---|---|---|---|---|---|
| Liver adenocarcinoma | 0.0 | 0.0 | Kidney (fetal) | 1.0 | 0.0 |
| Pancreas | 0.2 | 1.3 | Renal ca. 786-0 | 0.2 | 0.0 |
| Pancreatic ca. CAPAN 2 | 0.0 | 0.0 | Renal ca. A498 | 0.0 | 0.3 |
| Adrenal gland | 0.2 | 0.0 | Renal ca. RXF 393 | 0.0 | 0.5 |
| Thyroid | 0.3 | 0.0 | Renal ca. ACHN | 0.3 | 0.0 |
| Salivary gland | 0.1 | 0.4 | Renal ca. UO-31 | 0.0 | 0.0 |
| Pituitary gland | 0.0 | 0.0 | Renal ca. TK-10 | 0.0 | 0.0 |
| Brain (fetal) | 0.0 | 0.0 | Liver | 0.6 | 0.9 |
| Brain (whole) | 0.0 | 0.3 | Liver (fetal) | 0.4 | 0.0 |
| Brain (amygdala) | 0.0 | 0.0 | Liver ca. (hepatoblast) HepG2 | 0.3 | 0.0 |
| Brain (cerebellum) | 0.0 | 0.0 | Lung | 0.8 | 0.6 |
| Brain (hippocampus) | 0.5 | 0.3 | Lung (fetal) | 1.4 | 1.4 |
| Brain (substantia nigra) | 0.0 | 0.0 | Lung ca. (small cell) LX-1 | 0.6 | 0.0 |
| Brain (thalamus) | 0.0 | 0.5 | Lung ca. (small cell) NCI-H69 | 0.0 | 0.0 |
| Cerebral Cortex | 0.0 | 0.0 | Lung ca. (s. cell var.) SHP-77 | 0.3 | 0.4 |
| Spinal cord | 0.2 | 0.2 | Lung ca. (large cell) NCI-H460 | 0.2 | 0.0 |
| glio/astro U87-MG | 0.0 | 0.0 | Lung ca. (non-sm. cell) A549 | 0.8 | 0.7 |
| glio/astro U-118-MG | 0.0 | 0.0 | Lung ca. (non-s. cell) NCI-H23 | 0.0 | 0.0 |
| astrocytoma SW1783 | 0.0 | 0.0 | Lung ca. (non-s. cell) HOP-62 | 1.6 | 2.2 |
| neuro*; met SK-N-AS | 0.0 | 0.4 | Lung ca. (non-s. cl) NCI-H522 | 0.5 | 0.0 |
| astrocytoma SF-539 | 0.0 | 0.0 | Lung ca. (squam.) SW 900 | 0.0 | 0.0 |
| astrocytoma SNB-75 | 0.0 | 0.0 | Lung ca. (squam.) NCI-H596 | 0.0 | 0.0 |
| glioma SNB-19 | 0.0 | 0.4 | Mammary gland | 0.3 | 0.7 |
| glioma U251 | 0.0 | 0.4 | Breast ca.* (pl. ef) MCF-7 | 0.2 | 0.0 |
| glioma SF-295 | 0.0 | 0.0 | Breast ca.* (pl. ef) MDA-MB-231 | 0.0 | 0.0 |
| Heart (Fetal) | 0.0 | 0.0 | Breast ca.* (pl. ef) T47D | 0.0 | 0.0 |
| Heart | 0.0 | 0.0 | Breast ca. BT-549 | 0.2 | 0.0 |
| Skeletal muscle (Fetal) | 3.9 | 0.3 | Breast ca. MDA-N | 0.0 | 0.0 |
| Skeletal muscle | 0.0 | 0.0 | Ovary | 0.5 | 0.0 |
| Bone marrow | 6.9 | 2.5 | Ovarian ca. OVCAR-3 | 0.0 | 0.0 |
| Thymus | 1.9 | 0.9 | Ovarian ca. OVCAR-4 | 0.0 | 0.4 |
| Spleen | 4.2 | 1.0 | Ovarian ca. OVCAR-5 | 0.3 | 0.0 |
| Lymph node | 3.0 | 5.4 | Ovarian ca. OVCAR-8 | 0.0 | 0.0 |
| Colorectal | 0.5 | 0.0 | Ovarian ca. IGROV-1 | 0.0 | 0.0 |
| Stomach | 0.9 | 0.0 | Ovarian ca. (ascites) SK-OV-3 | 0.0 | 0.0 |
| Small intestine | 1.5 | 0.5 | Uterus | 0.0 | 0.5 |
| Colon ca. SW480 | 0.8 | 0.0 | Placenta | 0.0 | 0.0 |
| Colon ca.* SW620 (SW480 met) | 0.0 | 0.0 | Prostate | 0.0 | 0.0 |
| Colon ca. HT29 | 0.0 | 0.0 | Prostate ca.* (bone met) PC-3 | 0.0 | 0.0 |
| Colon ca. HCT-116 | 0.0 | 0.0 | Testis | 1.6 | 0.8 |
| Colon ca. CaCo-2 | 0.0 | 0.0 | Melanoma Hs688(A).T | 0.0 | 0.0 |
| CC Well to Mod Diff (ODO3866) | 0.3 | 0.3 | Melanoma* (met) Hs688(B).T | 0.0 | 0.0 |
| Colon ca. HCC-2998 | 0.3 | 0.0 | Melanoma UACC-62 | 0.0 | 0.0 |
| Gastric ca. (liver met) NCI-N87 | 0.2 | 0.7 | Melanoma M14 | 0.0 | 0.0 |
| Bladder | 0.2 | 0.3 | Melanoma LOX IMVI | 0.0 | 0.0 |
| Trachea | 0.6 | 0.0 | Melanoma* (met) SK-MEL-5 | 0.0 | 0.0 |
| Kidney | 100.0 | 100.0 | Adipose | 0.1 | 0.6 |

[1509] TABLE BBD
Panel 2D
Column A - Rel. Exp.(%) Ag2966, Run 160658389

| Tissue Name | A | Tissue Name | A |
|---|---|---|---|
| Normal Colon | 0.2 | Kidney Margin 8120608 | 91.4 |
| CC Well to Mod Diff (ODO3866) | 0.1 | Kidney Cancer 8120613 | 0.1 |
| CC Margin (ODO3866) | 0.3 | Kidney Margin 8120614 | 100.0 |
| CC Gr.2 rectosigmoid (ODO3868) | 0.3 | Kidney Cancer 9010320 | 0.4 |
| CC Margin (ODO3868) | 0.1 | Kidney Margin 9010321 | 66.9 |
| CC Mod Diff (ODO3920) | 0.6 | Normal Uterus | 0.2 |
| CC Margin (ODO3920) | 0.4 | Uterine Cancer 064011 | 0.4 |
| CC Gr.2 ascend colon (ODO3921) | 0.4 | Normal Thyroid | 0.1 |
| CC Margin (ODO3921) | 0.3 | Thyroid Cancer | 0.0 |
| CC from Partial Hepatectomy | 0.4 | Thyroid Cancer A302152 | 0.0 |
| (ODO4309) Mets | | | |
| Liver Margin (ODO4309) | 0.2 | Thyroid Margin A302153 | 0.5 |
| Colon mets to lung (OD04451-01) | 0.5 | Normal Breast | 0.8 |
| Lung Margin (OD04451-02) | 0.1 | Breast Cancer | 0.3 |
| Normal Prostate 6546-1 | 0.0 | Breast Cancer (OD04590-01) | 0.8 |
| Prostate Cancer (OD04410) | 0.2 | Breast Cancer Mets (OD04590-03) | 0.8 |
| Prostate Margin (OD04410) | 0.0 | Breast Cancer Metastasis | 0.9 |
| Prostate Cancer (OD04720-01) | 0.1 | Breast Cancer | 0.2 |
| Prostate Margin (OD04720-02) | 0.2 | Breast Cancer | 0.4 |
| Normal Lung | 1.5 | Breast Cancer 9100266 | 0.1 |
| Lung Met to Muscle (ODO4286) | 0.2 | Breast Margin 9100265 | 0.0 |
| Muscle Margin (ODO4286) | 0.0 | Breast Cancer A209073 | 0.2 |
| Lung Malignant Cancer (OD03126) | 0.2 | Breast Margin A209073 | 0.3 |
| Lung Margin (OD03126) | 0.4 | Normal Liver | 0.1 |
| Lung Cancer (OD04404) | 0.4 | Liver Cancer | 0.1 |
| Lung Margin (OD04404) | 0.4 | Liver Cancer 1025 | 0.2 |
| Lung Cancer (OD04565) | 0.2 | Liver Cancer 1026 | 0.0 |
| Lung Margin (OD04565) | 0.4 | Liver Cancer 6004-T | 0.1 |
| Lung Cancer (OD04237-01) | 0.1 | Liver Tissue 6004-N | 0.1 |
| Lung Margin (OD04237-02) | 0.0 | Liver Cancer 6005-T | 0.0 |
| Ocular Mel Met to Liver (ODO4310) | 1.8 | Liver Tissue 6005-N | 0.0 |
| Liver Margin (ODO4310) | 0.0 | Normal Bladder | 0.2 |
| Melanoma Metastasis | 0.1 | Bladder Cancer | 0.1 |
| Lung Margin (OD04321) | 0.4 | Bladder Cancer | 0.1 |
| Normal Kidney | 29.9 | Bladder Cancer (0D04718-01) | 0.1 |
| Kidney Ca, Nuclear grade 2 (OD04338) | 9.4 | Bladder Normal Adjacent | |
| | | (OD04718-03) | 0.1 |
| Kidney Margin (OD04338) | 26.2 | Normal Ovary | 0.0 |
| Kidney Ca Nuclear grade 1/2 (OD04339) | 1.3 | Ovarian Cancer | 0.1 |
| Kidney Margin (OD04339) | 75.8 | Ovarian Cancer (OD04768-07) | 0.0 |
| Kidney Ca, Clear cell type (OD04340) | 29.5 | Ovary Margin (OD04768-08) | 0.0 |
| Kidney Margin (OD04340) | 27.5 | Normal Stomach | 0.1 |
| Kidney Ca, Nuclear grade 3 (OD04348) | 0.7 | Gastric Cancer 9060358 | 0.1 |
| Kidney Margin (OD04348) | 11.4 | Stomach Margin 9060359 | 0.1 |
| Kidney Cancer (OD04622-01) | 0.9 | Gastric Cancer 9060395 | 0.1 |
| Kidney Margin (OD04622-03) | 9.6 | Stomach Margin 9060394 | 0.1 |
| Kidney Cancer (OD04450-01) | 0.8 | Gastric Cancer 9060397 | 0.1 |
| Kidney Margin (OD04450-03) | 8.2 | Stomach Margin 9060396 | 0.0 |
| Kidney Cancer 8120607 | 0.6 | Gastric Cancer 064005 | 0.3 |

[1510] TABLE BBE
Panel 4D
Column A - Rel. Exp.(%) Ag2966, Run 160660646

| Tissue Name | A | Tissue Name | A |
|---|---|---|---|
| Secondary Th1 act | 0.0 | HUVEC IL-1beta | 0.3 |
| Secondary Th2 act | 0.0 | HUVEC IFN gamma | 0.9 |
| Secondary Tr1 act | 0.7 | HUVEC TNF alpha + IFN gamma | 0.3 |
| Secondary Th1 rest | 0.2 | HUVEC TNF alpha + IL4 | 0.5 |
| Secondary Th2 rest | 1.6 | HUVEC IL-11 | 0.8 |
| Secondary Tr1 rest | 1.5 | Lung Microvascular EC none | 2.0 |
| Primary Th1 act | 0.3 | Lung Microvascular EC TNFalpha + IL- | 0.8 |
| | | 1beta | |
| Primary Th2 act | 0.0 | Microvascular Dermal EC none | 1.9 |
| Primary Tr1 act | 0.3 | Microsvasular Dermal EC TNFalpha + IL- | 1.7 |
| | | 1beta | |
| Primary Th1 rest | 4.8 | Bronchial epithelium TNFalpha + IL1beta | 0.0 |
| Primary Th2 rest | 2.1 | Small airway epithelium none | 0.0 |
| Primary Tr1 rest | 3.4 | Small airway epithelium TNFalpha + IL- | 0.3 |
| | | 1beta | |
| CD45RA CD4 lymphocyte act | 0.6 | Coronery artery SMC rest | 0.0 |
| CD45RO CD4 lymphocyte act | 1.1 | Coronery artery SMC TNFalpha + IL-1beta | 0.3 |
| CD8 lymphocyte act | 0.3 | Astrocytes rest | 0.0 |
| Secondary CD8 lymphocyte rest | 1.3 | Astrocytes TNFalpha + IL-1beta | 0.3 |
| Secondary CD8 lymphocyte act | 0.0 | KU-812 (Basophil) rest | 0.3 |
| CD4 lymphocyte none | 1.7 | KU-812 (Basophil) PMA/ionomycin | 0.0 |
| 2ry Th1/Th2/Tr1 anti-CD95 | 0.8 | CCD1106 (Keratinocytes) none | 0.1 |
| CH11 | | | |
| LAK cells rest | 2.1 | CCD1106 (Keratinocytes) TNFalpha + IL- | 0.0 |
| | | 1beta | |
| LAK cells IL-2 | 0.4 | Liver cirrhosis | 0.4 |
| LAK cells IL-2 + IL-12 | 0.3 | Lupus kidney | 1.0 |
| LAK cells IL-2 + IFN gamma | 0.6 | NCI-H292 none | 0.6 |
| LAK cells IL-2 + IL-18 | 0.6 | NCI-H292 IL-4 | 0.0 |
| LAK cells PMA/ionomycin | 0.0 | NCI-H292 IL-9 | 0.0 |
| NK Cells IL-2 rest | 0.6 | NCI-H292 IL-13 | 0.0 |
| Two Way MLR 3 day | 1.1 | NCI-H292 IFN gamma | 0.0 |
| Two Way MLR 5 day | 1.0 | HPAEC none | 0.6 |
| Two Way MLR 7 day | 0.5 | HPAEC TNF alpha + IL-1 beta | 0.0 |
| PBMC rest | 0.6 | Lung fibroblast none | 0.0 |
| PBMC PWM | 1.1 | Lung fibroblast TNF alpha + IL-1 beta | 0.0 |
| PBMC PHA-L | 0.2 | Lung fibroblast IL-4 | 0.0 |
| Ramos (B cell) none | 1.7 | Lung fibroblast IL-9 | 0.0 |
| Ramos (B cell) ionomycin | 1.1 | Lung fibroblast IL-13 | 0.0 |
| B lymphocytes PWM | 1.4 | Lung fibroblast IFN gamma | 0.2 |
| B lymphocytes CD40L and IL-4 | 4.7 | Dermal fibroblast CCD1070 rest | 0.0 |
| EOL-1 dbcAMP | 0.0 | Dermal fibroblast CCD1070 TNF alpha | 1.4 |
| EOL-1 dbcAMP | 0.1 | Dermal fibroblast CCD1070 IL-1 beta | 0.0 |
| PMA/ionomycin | | | |
| Dendritic cells none | 0.5 | Dermal fibroblast IFN gamma | 0.0 |
| Dendritic cells LPS | 0.0 | Dermal fibroblast IL-4 | 0.0 |
| Dendritic cells anti-CD40 | 0.5 | IBD Colitis 2 | 0.2 |
| Monocytes rest | 1.2 | IBD Crohn's | 0.0 |
| Monocytes LPS | 0.0 | Colon | 4.9 |
| Macrophages rest | 0.2 | Lung | 3.1 |
| Macrophages LPS | 0.0 | Thymus | 100.0 |
| HUVEC none | 0.5 | Kidney | 4.6 |
| HUVEC starved | 0.3 | | |

[1511] Panel 1.3D Summary: Ag2966 Expression of this gene, a sodium-glucose cotransporter homolog, was limited to the kidney (CTs=29). This restricted expression was in agreement with published data, where secondary active transport of glucose in the kidney is mediated by sodium glucose cotransporter. (Bissonnette P. J Physiol 1999 Oct. 15; 520 Pt 2:359-71). Expression of this gene or its protein product is useful as a marker of kidney tissue. Therapeutic modulation of this gene, expressed protein and/or use of antibodies or small molecule drugs targeting the gene or gene product are useful in the treatment of diseases that affect the kidney, including diabetes.

[1512] Panel 2D Summary: Ag2966 Expression of this gene was predominantly limited to the kidney. The expression was downregulated in kidney cancer samples. Therapeutic modulation of this gene, expressed protein and/or use of antibodies or small molecule drugs targeting the gene or gene product are useful in the treatment of diseases that affect the kidney, including kidney cancer.

[1513] Panel 4D Summary: Ag2966 Expression of this gene was predominantly found in normal tissue from thymus, lung, colon and kidney. This expression profile indicates that the protein product is involved in glucose transport and normal homeostasis in these tissues. Therapeutic modulation of this gene, expressed protein and/or use of antibodies or small molecule drugs targeting the gene or gene product are useful for maintaining or restoring normal function to these organs during inflammation.

[1514] BC. CG56667-01: GPCR.

[1515] Expression of gene CG56667-01 was assessed using the primer-probe set Ag2973, described in Table BCA. Results of the RTQ-PCR runs are shown in Table BCB.

TABLE BCA
Probe Name Ag2973

| | | | Start | SEQ ID |
|---|---|---|---|---|
| Primers | Sequences | Length | Position | No |
| Forward | 5′-gctgtgtggctcaagtctattt-3′ | 22 | 287 | 1359 |
| Probe | TET-5′-ttctctgcctttgcatctgctgagct-3′- | 26 | 310 | 1360 |
| | TAMRA | | | |
| Reverse | 5′-agcggtcataagacatgacagt-3′ | 22 | 346 | 1361 |

[1516] TABLE BCB
Panel 4D
Column A - Rel. Exp.(%) Ag2973, Run 164329850

| Tissue Name | A | Tissue Name | A |
|---|---|---|---|
| Secondary Th1 act | 0.0 | HUVEC IL-1beta | 0.0 |
| Secondary Th2 act | 0.0 | HUVEC IFN gamma | 0.0 |
| Secondary Tr1 act | 0.0 | HUVEC TNF alpha + IFN gamma | 0.0 |
| Secondary Th1 rest | 11.7 | HUVEC TNF alpha + IL4 | 0.0 |
| Secondary Th2 rest | 0.0 | HUVEC IL-11 | 0.0 |
| Secondary Tr1 rest | 0.0 | Lung Microvascular EC none | 0.0 |
| Primary Th1 act | 0.0 | Lung Microvascular EC TNFalpha + IL- | 0.0 |
| | | 1beta | |
| Primary Th2 act | 0.0 | Microvascular Dermal EC none | 0.0 |
| Primary Tr1 act | 0.0 | Microsvasular Dermal EC TNFalpha + IL- | 0.0 |
| | | 1beta | |
| Primary Th1 rest | 0.0 | Bronchial epithelium TNFalpha + IL1beta | 0.0 |
| Primary Th2 rest | 6.0 | Small airway epithelium none | 0.0 |
| Primary Tr1 rest | 0.0 | Small airway epithelium TNFalpha + IL- | 0.0 |
| | | 1beta | |
| CD45RA CD4 lymphocyte act | 0.0 | Coronery artery SMC rest | 0.0 |
| CD45RO CD4 lymphocyte act | 0.0 | Coronery artery SMC TNFalpha + IL-1beta | 0.0 |
| CD8 lymphocyte act | 0.0 | Astrocytes rest | 0.0 |
| Secondary CD8 lymphocyte rest | 0.0 | Astrocytes TNFalpha + IL-1beta | 0.0 |
| Secondary CD8 lymphocyte act | 0.0 | KU-812 (Basophil) rest | 0.0 |
| CD4 lymphocyte none | 0.0 | KU-812 (Basophil) PMA/ionomycin | 0.0 |
| 2ry Th1/Th2/Tr1 anti-CD95 | 0.0 | CCD1106 (Keratinocytes) none | 0.0 |
| CH11 | | | |
| LAK cells rest | 0.0 | CCD1106 (Keratinocytes) TNFalpha + IL- | 0.0 |
| | | 1beta | |
| LAK cells IL-2 | 0.0 | Liver cirrhosis | 100.0 |
| LAK cells IL-2 + IL-12 | 0.0 | Lupus kidney | 9.7 |
| LAK cells IL-2 + IFN gamma | 0.0 | NCI-H292 none | 0.0 |
| LAK cells IL-2 + IL-18 | 0.0 | NCI-H292 IL-4 | 0.0 |
| LAK cells PMA/ionomycin | 0.0 | NCI-H292 IL-9 | 0.0 |
| NK Cells IL-2 rest | 0.0 | NCI-H292 IL-13 | 0.0 |
| Two Way MLR 3 day | 0.0 | NCI-H292 IFN gamma | 0.0 |
| Two Way MLR 5 day | 0.0 | HPAEC none | 0.0 |
| Two Way MLR 7 day | 0.0 | HPAEC TNF alpha + IL-1 beta | 0.0 |
| PBMC rest | 0.0 | Lung fibroblast none | 0.0 |
| PBMC PWM | 0.0 | Lung fibroblast TNF alpha + IL-1 beta | 0.0 |
| PBMC PHA-L | 0.0 | Lung fibroblast IL-4 | 0.0 |
| Ramos (B cell) none | 0.0 | Lung fibroblast IL-9 | 0.0 |
| Ramos (B cell) ionomycin | 0.0 | Lung fibroblast IL-13 | 0.0 |
| B lymphocytes PWM | 0.0 | Lung fibroblast IFN gamma | 0.0 |
| B lymphocytes CD40L and IL-4 | 0.0 | Dermal fibroblast CCD1070 rest | 0.0 |
| EOL-1 dbcAMP | 0.0 | Dermal fibroblast CCD1070 TNF alpha | 0.0 |
| EOL-1 dbcAMP | 0.0 | Dermal fibroblast CCD1070 IL-1 beta | 0.0 |
| PMA/ionomycin | | | |
| Dendritic cells none | 0.0 | Dermal fibroblast IFN gamma | 0.0 |
| Dendritic cells LPS | 0.0 | Dermal fibroblast IL-4 | 0.0 |
| Dendritic cells anti-CD40 | 0.0 | IBD Colitis 2 | 0.0 |
| Monocytes rest | 0.0 | IBD Crohn's | 0.0 |
| Monocytes LPS | 0.0 | Colon | 8.7 |
| Macrophages rest | 0.0 | Lung | 6.6 |
| Macrophages LPS | 0.0 | Thymus | 13.9 |
| HUVEC none | 0.0 | Kidney | 0.0 |
| HUVEC starved | 0.0 | | |

[1517] Panel 4D Summary: Ag2973 Significant expression of the CG56667-01 gene was detected in a liver cirrhosis sample (CT=32.7). Expression of this gene was not detected in normal liver in Panel 1.3D, suggesting that its expression is unique to liver cirrhosis. Therapeutic modulation of this gene, expressed protein and/or use of antibodies or small molecule drugs targeting the gene or gene product are useful in the treatment of fibrosis that occurs in liver cirrhosis. Expression of this gene or expressed protein is useful in the diagnosis of liver cirrhosis.

[1518] BD. CG56868-01: ADAM7.

[1519] Expression of gene CG56868-01 was assessed using the primer-probe sets Ag1322, Ag1322b, Ag2071 and Ag2098, described in Tables BDA, BDB, BDC and BDD. Results of the RTQ-PCR runs are shown in Table BDE.

TABLE BDA
Probe Name Ag1322

| | | | Start | SEQ ID |
|---|---|---|---|---|
| Primers | Sequences | Length | Position | No |
| Forward | 5′-ggtatgtgcctgccctattatt-3′ | 22 | 972 | 1362 |
| Probe | TET-5′-ccaccagtatcattaaggatcttttacc | 30 | 994 | 1363 |
| | tg-3′-TAMRA | | | |
| Reverse | 5′-gccattctgtttgcaattatgt-3′ | 22 | 1030 | 1364 |

[1520] TABLE BDB
Probe Name Ag1322b

| | | | Start | SEQ ID |
|---|---|---|---|---|
| Primers | Sequences | Length | Position | No |
| Forward | 5′-ggtatgtgcctgccctattatt-3′ | 22 | 972 | 1365 |
| Probe | TET-5′-ccaccagtatcattaaggatcttttacc | 30 | 994 | 1366 |
| | tg-3′-TAMRA | | | |
| Reverse | 5′-gccattctgtttgcaattatgt-3′ | 22 | 1030 | 1367 |

[1521] TABLE BDC
Probe Name Ag2071

| | | | Start | SEQ ID |
|---|---|---|---|---|
| Primers | Sequences | Length | Position | No |
| Forward | 5′-tgccagaaattcatttcctaaa-3′ | 22 | 2236 | 1368 |
| Probe | TET-5′-ccttggaaagcctgcccactagtttt-3′- | 26 | 2275 | 1369 |
| | TAMRA | | | |
| Reverse | 5′-agtgtgatgtagtggggacttg-3′ | 22 | 2302 | 1370 |

[1522] TABLE BDD
Probe Name Ag2098

| | | | Start | SEQ ID |
|---|---|---|---|---|
| Primers | Sequences | Length | Position | No |
| Forward | 5′-tgccagaaattcatttcctaaa-3′ | 22 | 2236 | 1371 |
| Probe | TET-5′-ccttggaaagcctgcccactagtttt-3′- | 26 | 2275 | 1372 |
| | TAMRA | | | |
| Reverse | 5′-agtgtgatgtagtggggacttg-3′ | 22 | 2302 | 1373 |

[1523] TABLE BDE
Panel 1.2
Column A - Rel. Exp.(%) Ag1322, Run 133804727

| Tissue Name | A | Tissue Name | A |
|---|---|---|---|
| Endothelial cells | 0.0 | Renal ca. 786-0 | 0.0 |
| Heart (Fetal) | 0.0 | Renal ca. A498 | 0.0 |
| Pancreas | 0.2 | Renal ca. RXF 393 | 0.0 |
| Pancreatic ca. CAPAN 2 | 0.0 | Renal ca. ACHN | 0.0 |
| Adrenal gland | 0.2 | Renal ca. UO-31 | 0.0 |
| Thyroid | 0.0 | Renal ca. TK-10 | 0.0 |
| Salivary gland | 0.1 | Liver | 0.0 |
| Pituitary gland | 0.0 | Liver (fetal) | 0.2 |
| Brain (fetal) | 0.0 | Liver ca. (hepatoblast) HepG2 | 0.0 |
| Brain (whole) | 0.0 | Lung | 0.0 |
| Brain (amygdala) | 0.0 | Lung (fetal) | 0.1 |
| Brain (cerebellum) | 0.0 | Lung ca. (small cell) LX-1 | 0.0 |
| Brain (hippocampus) | 0.0 | Lung ca. (small cell) NCI-H69 | 0.0 |
| Brain (thalamus) | 0.0 | Lung ca. (s. cell var.) SHP-77 | 0.0 |
| Cerebral Cortex | 0.0 | Lung ca. (large cell)NCI-H460 | 0.0 |
| Spinal cord | 0.1 | Lung ca. (non-sm. cell) A549 | 0.0 |
| glio/astro U87-MG | 0.0 | Lung ca. (non-s. cell) NCI-H23 | 0.0 |
| glio/astro U-118-MG | 0.0 | Lung ca. (non-s. cell) HOP-62 | 0.0 |
| astrocytoma SW1783 | 0.0 | Lung ca. (non-s. cl) NCI-H522 | 0.0 |
| neuro*; met SK-N-AS | 0.0 | Lung ca. (squam.) SW 900 | 0.0 |
| astrocytoma SF-539 | 0.0 | Lung ca. (squam.) NCI-H596 | 0.0 |
| astrocytoma SNB-75 | 0.0 | Mammary gland | 0.0 |
| glioma SNB-19 | 0.0 | Breast ca.* (pl. ef) MCF-7 | 0.0 |
| glioma U251 | 0.1 | Breast ca.* (pl. ef) MDA-MB-231 | 0.0 |
| glioma SF-295 | 0.0 | Breast ca.* (pl. ef) T47D | 0.0 |
| Heart | 0.0 | Breast ca. BT-549 | 0.0 |
| Skeletal muscle | 0.0 | Breast ca. MDA-N | 0.0 |
| Bone marrow | 0.0 | Ovary | 0.0 |
| Thymus | 0.0 | Ovarian ca. OVCAR-3 | 0.0 |
| Spleen | 0.0 | Ovarian ca. OVCAR-4 | 0.0 |
| Lymph node | 0.1 | Ovarian ca. OVCAR-5 | 0.0 |
| Colorectal | 0.0 | Ovarian ca. OVCAR-8 | 0.0 |
| Stomach | 0.1 | Ovarian ca. IGROV-1 | 0.0 |
| Small intestine | 0.0 | Ovarian ca. (ascites) SK-OV-3 | 0.0 |
| Colon ca. SW480 | 0.0 | Uterus | 0.0 |
| Colon ca.* SW620 (SW480 met) | 0.0 | Placenta | 0.0 |
| Colon ca. HT29 | 0.0 | Prostate | 2.1 |
| Colon ca. HCT-116 | 0.0 | Prostate ca.* (bone met) PC-3 | 0.0 |
| Colon ca. CaCo-2 | 0.0 | Testis | 100.0 |
| CC Well to Mod Diff (ODO3866) | 0.0 | Melanoma Hs688(A).T | 0.0 |
| Colon ca. HCC-2998 | 0.0 | Melanoma* (met) Hs688(B).T | 0.0 |
| Gastric ca. (liver met) NCI-N87 | 0.0 | Melanoma UACC-62 | 0.0 |
| Bladder | 0.1 | Melanoma M14 | 0.0 |
| Trachea | 0.0 | Melanoma LOX IMVI | 0.0 |
| Kidney | 0.0 | Melanoma* (met) SK-MEL-5 | 0.0 |
| Kidney (fetal) | 0.0 | | |

[1524] Panel 1.2 Summary: Ag1322 Expression of this gene was highest in testis (CT value=29). Low expression was also seen in prostate (CT value=34.6). The gene or encoded protein is useful as a marker for these tissues. This gene encodes a protein with homology to ADAM proteins, which are membrane disintegrin-metalloproteases. The expression of several other ADAM proteins has been shown to be testis-specific and these proteins are thought to play a role in fertilization (Hooft van Huijsduijnen R. (1998) ADAM 20 and 21; two novel human testis-specific membrane metalloproteases with similarity to fertilin-alpha. Gene 206: 273-282). Therapeutic modulation of this gene, expressed protein and/or use of antibodies or small molecule drugs targeting the gene or gene product are useful in the treatment of diseases of the prostate and testis, including infertility.

[1525] BE. CG56870-01: NDR3.

[1526] Expression of genes CG56870-01 and CG56870-06 was assessed using the primer-probe set Ag2075, described in Table BEA. Results of the RTQ-PCR runs are shown in Tables BEB, BEC, BED and BEE.

TABLE BEA
Probe Name Ag2075

| | | | | |
|---|---|---|---|---|
| | | | Start | SEQ ID |
| Primers | Sequences | Length | Position | No |

| | | | | |
|---|---|---|---|---|
| Forward | 5′-catggatgaacttcaggatgtt-3′ | 22 | 70 | 1374 |
| Probe | TET-5′-cagctcacagagatcaaaccacttct-3′- | 26 | 92 | 1375 |
| | TAMRA | | | |
| Reverse | 5′-tgacagtcaaagtcctggaagt-3′ | 22 | 141 | 1376 |

[1527] TABLE BEB
Panel 1.3D
Column A - Rel. Exp.(%) Ag2075, Run 152355202

| Tissue Name | A | Tissue Name | A |
|---|---|---|---|
| Liver adenocarcinoma | 11.9 | Kidney (fetal) | 1.4 |
| Pancreas | 0.8 | Renal ca. 786-0 | 3.5 |
| Pancreatic ca. CAPAN 2 | 1.6 | Renal ca. A498 | 12.9 |
| Adrenal gland | 2.4 | Renal ca. RXF 393 | 1.5 |
| Thyroid | 1.8 | Renal ca. ACHN | 1.7 |
| Salivary gland | 1.2 | Renal ca. UO-31 | 6.8 |
| Pituitary gland | 2.4 | Renal ca. TK-10 | 2.8 |
| Brain (fetal) | 3.2 | Liver | 0.4 |
| Brain (whole) | 25.2 | Liver (fetal) | 0.8 |
| Brain (amygdala) | 14.1 | Liver ca. (hepatoblast) HepG2 | 6.7 |
| Brain (cerebellum) | 10.8 | Lung | 2.1 |
| Brain (hippocampus) | 39.8 | Lung (fetal) | 3.2 |
| Brain (substantia nigra) | 2.7 | Lung ca. (small cell) LX-1 | 4.1 |
| Brain (thalamus) | 12.4 | Lung ca. (small cell) NCI-H69 | 3.8 |
| Cerebral Cortex | 100.0 | Lung ca. (s. cell var.) SHP-77 | 3.8 |
| Spinal cord | 3.5 | Lung ca. (large cell)NCI-H460 | 0.6 |
| glio/astro U87-MG | 6.4 | Lung ca. (non-sm. cell) A549 | 3.0 |
| glio/astro U-118-MG | 10.4 | Lung ca. (non-s. cell) NCI-H23 | 7.7 |
| astrocytoma SW1783 | 5.1 | Lung ca. (non-s. cell) HOP-62 | 3.1 |
| neuro*; met SK-N-AS | 6.2 | Lung ca. (non-s. cl) NCI-H522 | 6.3 |
| astrocytoma SF-539 | 5.4 | Lung ca. (squam.) SW 900 | 1.4 |
| astrocytoma SNB-75 | 6.7 | Lung ca. (squam.) NCI-H596 | 1.4 |
| glioma SNB-19 | 3.1 | Mammary gland | 2.4 |
| glioma U251 | 2.0 | Breast ca.* (pl. ef) MCF-7 | 1.8 |
| glioma SF-295 | 3.4 | Breast ca.* (pl. ef) MDA-MB-231 | 11.6 |
| Heart (Fetal) | 6.7 | Breast ca.* (pl. ef) T47D | 9.0 |
| Heart | 1.4 | Breast ca. BT-549 | 4.8 |
| Skeletal muscle (Fetal) | 18.0 | Breast ca. MDA-N | 4.2 |
| Skeletal muscle | 0.7 | Ovary | 13.4 |
| Bone marrow | 0.9 | Ovarian ca. OVCAR-3 | 1.8 |
| Thymus | 0.9 | Ovarian ca. OVCAR-4 | 1.6 |
| Spleen | 3.7 | Ovarian ca. OVCAR-5 | 1.8 |
| Lymph node | 1.9 | Ovarian ca. OVCAR-8 | 4.9 |
| Colorectal | 3.3 | Ovarian ca. IGROV-1 | 1.6 |
| Stomach | 2.7 | Ovarian ca. (ascites) SK-OV-3 | 5.8 |
| Small intestine | 2.5 | Uterus | 2.4 |
| Colon ca. SW480 | 10.4 | Placenta | 1.2 |
| Colon ca.* SW620 (SW480 met) | 3.7 | Prostate | 6.0 |
| Colon ca. HT29 | 4.6 | Prostate ca.* (bone met) PC-3 | 4.5 |
| Colon ca. HCT-116 | 3.6 | Testis | 1.7 |
| Colon ca. CaCo-2 | 10.3 | Melanoma Hs688(A).T | 3.8 |
| CC Well to Mod Diff (ODO3866) | 3.2 | Melanoma* (met) Hs688(B).T | 4.4 |
| Colon ca. HCC-2998 | 2.6 | Melanoma UACC-62 | 1.4 |
| Gastric ca. (liver met) NCI-N87 | 3.1 | Melanoma M14 | 1.8 |
| Bladder | 0.8 | Melanoma LOX IMVI | 3.3 |
| Trachea | 2.0 | Melanoma* (met) SK-MEL-5 | 2.4 |
| Kidney | 1.3 | Adipose | 1.2 |

[1528] TABLE BEC
Panel 2.2
Column A - Rel. Exp.(%) Ag2075, Run 174255357

| Tissue Name | A | Tissue Name | A |
|---|---|---|---|
| Normal Colon | 27.7 | Kidney Margin (OD04348) | 46.3 |
| Colon cancer (OD06064) | 52.9 | Kidney malignant cancer | 19.2 |
| | | (OD06204B) | |
| Colon Margin (OD06064) | 30.1 | Kidney normal adjacent tissue | 14.3 |
| | | (OD06204E) | |
| Colon cancer (OD06159) | 5.5 | Kidney Cancer (OD04450-01) | 66.0 |
| Colon Margin (OD06159) | 21.0 | Kidney Margin (OD04450-03) | 19.8 |
| Colon cancer (OD06297-04) | 22.2 | Kidney Cancer 8120613 | 3.0 |
| Colon Margin (OD06297-05) | 41.8 | Kidney Margin 8120614 | 11.0 |
| CC Gr.2 ascend colon (ODO3921) | 4.0 | Kidney Cancer 9010320 | 6.8 |
| CC Margin (ODO3921) | 6.7 | Kidney Margin 9010321 | 9.7 |
| Colon cancer metastasis (OD06104) | 11.1 | Kidney Cancer 8120607 | 35.6 |
| Lung Margin (OD06104) | 42.6 | Kidney Margin 8120608 | 13.7 |
| Colon mets to lung (OD04451-01) | 117.8 | Normal Uterus | 59.5 |
| Lung Margin (OD04451-02) | 9.3 | Uterine Cancer 064011 | 9.7 |
| Normal Prostate | 51.4 | Normal Thyroid | 8.8 |
| Prostate Cancer (OD04410) | 23.0 | Thyroid Cancer | 11.2 |
| Prostate Margin (OD04410) | 19.3 | Thyroid Cancer A302152 | 17.9 |
| Normal Ovary | 22.8 | Thyroid Margin A302153 | 5.5 |
| Ovarian cancer (OD06283-03) | 9.9 | Normal Breast | 33.2 |
| Ovarian Margin (OD06283-07) | 17.1 | Breast Cancer | 8.5 |
| Ovarian Cancer | 18.0 | Breast Cancer | 36.1 |
| Ovarian cancer (OD06145) | 6.6 | Breast Cancer (OD04590-01) | 18.4 |
| Ovarian Margin (OD06145) | 12.5 | Breast Cancer Mets (OD04590-03) | 31.9 |
| Ovarian cancer (OD06455-03) | 14.7 | Breast Cancer Metastasis | 45.4 |
| Ovarian Margin (OD06455-07) | 21.8 | Breast Cancer | 11.5 |
| Normal Lung | 21.9 | Breast Cancer 9100266 | 20.9 |
| Invasive poor diff. lung adeno | 17.6 | Breast Margin 9100265 | 35.1 |
| (ODO4945-01 | | | |
| Lung Margin (ODO4945-03) | 12.2 | Breast Cancer A209073 | 9.7 |
| Lung Malignant Cancer (OD03126) | 8.7 | Breast Margin A209073 | 22.2 |
| Lung Margin (OD03126) | 7.4 | Breast cancer (OD06083) | 100.0 |
| Lung Cancer (OD05014A) | 9.9 | Breast cancer node metastasis | 63.7 |
| | | (OD06083) | |
| Lung Margin (OD05014B) | 21.8 | Normal Liver | 9.9 |
| Lung cancer (OD06081) | 5.1 | Liver Cancer 1026 | 5.6 |
| Lung Margin (OD06081) | 7.9 | Liver Cancer 1025 | 13.5 |
| Lung Cancer (OD04237-01) | 17.4 | Liver Cancer 6004-T | 4.8 |
| Lung Margin (OD04237-02) | 24.0 | Liver Tissue 6004-N | 9.3 |
| Ocular Mel Met to Liver (ODO4310) | 9.7 | Liver Cancer 6005-T | 15.7 |
| Liver Margin (ODO4310) | 4.6 | Liver Tissue 6005-N | 20.4 |
| Melanoma Metastasis | 19.8 | Liver Cancer | 10.7 |
| Lung Margin (OD04321) | 21.6 | Normal Bladder | 8.0 |
| Normal Kidney | 11.0 | Bladder Cancer | 10.5 |
| Kidney Ca, Nuclear grade 2 | 37.6 | Bladder Cancer | 17.3 |
| (OD04338) | | | |
| Kidney Margin (OD04338) | 22.1 | Normal Stomach | 37.9 |
| Kidney Ca Nuclear grade 1/2 | 21.6 | Gastric Cancer 9060397 | 11.1 |
| (OD04339) | | | |
| Kidney Margin (OD04339) | 12.9 | Stomach Margin 9060396 | 20.6 |
| Kidney Ca, Clear cell type (OD04340) | 6.5 | Gastric Cancer 9060395 | 22.7 |
| Kidney Margin (OD04340) | 18.4 | Stomach Margin 9060394 | 36.1 |
| Kidney Ca, Nuclear grade 3 | 12.9 | Gastric Cancer 064005 | 8.1 |
| (OD04348) | | | |

[1529] TABLE BED
Panel 3D
Column A - Rel. Exp.(%) Ag2075, Run 164750734

| Tissue Name | A | Tissue Name | A |
|---|---|---|---|
| 94905 Daoy | 6.7 | 94954 Ca Ski Cervical epidermoid | 50.3 |
| Medulloblastoma/Cerebellum | | carcinoma (metastasis | |
| 94906 TE671 | 9.0 | 94955 ES-2 Ovarian clear cell | 13.9 |
| Medulloblastom/Cerebellum | | carcinoma | |
| 94907 D283 Med | 35.4 | 94957 Ramos Stimulated with | 2.7 |
| Medulloblastoma/Cerebellum | | PMA/ionomycin 6 h | |
| 94908 PFSK-1 Primitive | 15.4 | 94958 Ramos Stimulated with | 3.3 |
| Neuroectodermal/Cerebellum | | PMA/ionomycin 14 h | |
| 94909 XF-498 CNS | 4.4 | 94962 MEG-01 Chronic | 3.4 |
| | | myelogenous leukemia | |
| | | (megokaryoblast) | |
| 94910 SNB-78 CNS/glioma | 23.3 | 94963 Raji Burkitt's lymphoma | 3.7 |
| 94911 SF-268 CNS/glioblastoma | 13.6 | 94964 Daudi Burkitt's lymphoma | 6.5 |
| 94912 T98G Glioblastoma | 18.6 | 94965 U266 B-cell | 8.4 |
| | | plasmacytoma/myeloma | 8.4 |
| 96776 SK-N-SH Neuroblastoma | 17.0 | 94968 CA46 Burkitt's lymphoma | 7.2 |
| (metastasis) | | | |
| 94913 SF-295 CNS/glioblastoma | 8.4 | 94970 RL non-Hodgkin's B-cell | 3.5 |
| | | lymphoma | |
| 94914 Cerebellum | 74.7 | 94972 JM1 pre-B-cell | 3.1 |
| | | lymphoma/leukemia | |
| 96777 Cerebellum | 62.4 | 94973 Jurkat T cell leukemia | 11.6 |
| 94916 NCI-H292 Mucoepidermoid | 45.7 | 94974 TF-1 Erythroleukemia | 13.4 |
| lung carcinoma | | | |
| 94917 DMS-114 Small cell lung | 10.9 | 94975 HUT 78 T-cell lymphoma | 10.0 |
| cancer | | | |
| 94918 DMS-79 Small cell lung | 100.0 | 94977 U937 Histiocytic lymphoma | 18.2 |
| cancer/neuroendocrine | | | |
| 94919 NCI-H146 Small cell lung | 30.6 | 94980 KU-812 Myelogenous | 6.0 |
| cancer/neuroendocrine | | leukemia | |
| 94920 NCI-H526 Small cell lung | 57.4 | 769-P-Clear cell renal carcinoma | 11.3 |
| cancer/neuroendocrine | | | |
| 94921 NCI-N417 Small cell lung | 15.2 | 94983 Caki-2 Clear cell renal | 10.4 |
| cancer/neuroendocrine | | carcinoma | |
| 94923 NCI-H82 Small cell lung | 36.9 | 94984 SW 839 Clear cell renal | 2.2 |
| cancer/neuroendocrine | | carcinoma | |
| 94924 NCI-H157 Squamous cell lung | 51.1 | 94986 G401 Wilms' tumor | 6.2 |
| cancer (metastasis) | | | |
| 94925 NCI-H1155 Large cell lung | 26.6 | 94987 Hs766T Pancreatic carcinoma | 42.9 |
| cancer/neuroendocrine | | (LN metastasis) | |
| 94926 NCI-H1299 Large cell lung | 44.4 | 94988 CAPAN-1 Pancreatic | |
| cancer/neuroendocrine | | adenocarcinoma (liver metastasis) | 5.0 |
| 94927 NCI-H727 Lung carcinoid | 47.0 | 94989 SU86.86 Pancreatic carcinoma | 28.1 |
| | | (liver metastasis) | |
| 94928 NCI-UMC-11 Lung carcinoid | 60.3 | 94990 BxPC-3 Pancreatic | 6.3 |
| | | adenocarcinoma | |
| 94929 LX-1 Small cell lung cancer | 23.5 | 94991 HPAC Pancreatic | 7.4 |
| | | adenocarcinoma | |
| 94930 Colo-205 Colon cancer | 29.5 | 94992 MIA PaCa-2 Pancreatic | 3.6 |
| | | carcinoma | |
| 94931 KM12 Colon cancer | 24.0 | 94993 CFPAC-1 Pancreatic ductal | 40.9 |
| | | adenocarcinoma | |
| 94932 KM20L2 Colon cancer | 8.4 | 94994 PANC-1 Pancreatic epithelioid | 20.9 |
| | | ductal carcinoma | |
| 94933 NCI-H716 Colon cancer | 23.3 | 94996 T24 Bladder carcinma | 13.1 |
| | | (transitional cell | |
| 94935 SW-48 Colon adenocarcinoma | 27.0 | 5637- Bladder carcinoma | 11.0 |
| 94936 SW1116 Colon | 10.0 | 94998 HT-1197 Bladder carcinoma | 9.2 |
| adenocarcinoma | | | |
| 94937 LS 174T Colon | 9.9 | 94999 UM-UC-3 Bladder carcinma | 7.2 |
| adenocarcinoma | | (transitional cell) | |
| 94938 SW-948 Colon | 1.1 | 95000 A204 Rhabdomyosarcoma | 7.0 |
| adenocarcinoma | | | |
| 94939 SW-480 Colon | 8.8 | 95001 HT-1080 Fibrosarcoma | 16.6 |
| adenocarcinoma | | | |
| 94940 NCI-SNU-5 Gastric carcinoma | 7.2 | 95002 MG-63 Osteosarcoma (bone) | 16.7 |
| KATO III- Gastric carcinoma | 32.8 | 95003 SK-LMS-1 Leiomyosarcoma | 26.4 |
| | | (vulva) | |
| 94943 NCI-SNU-16 Gastric | 13.6 | 95004 SJRH30 Rhabdomyosarcoma | 16.8 |
| carcinoma | | (met to bone marrow) | |
| 94944 NCI-SNU-1 Gastric carcinoma | 16.0 | 95005 A431 Epidermoid carcinoma | 9.8 |
| 94946 RF-1 Gastric adenocarcinoma | 2.1 | 95007 WM266-4 Melanoma | 12.0 |
| 94947 RF-48 Gastric adenocarcinoma | 4.0 | DU 145- Prostate carcinoma (brain | 0.1 |
| | | (metastasis) | |
| 96778 MKN-45 Gastric carcinoma | 28.7 | 95012 MDA-MB-468 Breast | 14.7 |
| | | adenocarcinoma | |
| 94949 NCI-N87 Gastric carcinoma | 13.3 | SCC-4- Squamous cell carcinoma of | 0.9 |
| | | tongue | |
| 94951 OVCAR-5 Ovarian carcinoma | 2.6 | SCC-9- Squamous cell carcinoma of | 0.3 |
| | | tongue | |
| 94952 RL95-2 Uterine carcinoma | 7.2 | SCC-15- Squamous cell carcinoma of | 0.5 |
| | | tongue | |
| 94953 HelaS3 Cervical | 13.4 | 95017 CAL 27 Squamous cell | 21.2 |
| adenocarcinoma | | carcinoma of tongue | |

[1530] TABLE BEE
Panel 4D
Column A - Rel. Exp.(%) Ag2075, Run 152787491

| Tissue Name | A | Tissue Name | A |
|---|---|---|---|
| Secondary Th1 act | 46.3 | HUVEC IL-1beta | 25.0 |
| Secondary Th2 act | 39.2 | HUVEC IFN gamma | 33.0 |
| Secondary Tr1 act | 31.9 | HUVEC TNF alpha + IFN gamma | 13.1 |
| Secondary Th1 rest | 11.7 | HUVEC TNF alpha + IL4 | 20.7 |
| Secondary Th2 rest | 13.9 | HUVEC IL-11 | 20.0 |
| Secondary Tr1 rest | 21.6 | Lung Microvascular EC none | 22.7 |
| Primary Th1 act | 30.1 | Lung Microvascular EC TNFalpha + IL- | 15.0 |
| | | 1beta | |
| Primary Th2 act | 39.2 | Microvascular Dermal EC none | 26.8 |
| Primary Tr1 act | 54.7 | Microsvasular Dermal EC TNFalpha + IL- | 16.6 |
| | | 1beta | |
| Primary Th1 rest | 84.1 | Bronchial epithelium TNFalpha + IL1beta | 4.9 |
| Primary Th2 rest | 48.6 | Small airway epithelium none | 19.9 |
| Primary Tr1 rest | 39.0 | Small airway epithelium TNFalpha + IL- | 72.7 |
| | | 1beta | |
| CD45RA CD4 lymphocyte act | 21.8 | Coronery artery SMC rest | 27.9 |
| CD45RO CD4 lymphocyte act | 33.0 | Coronery artery SMC TNFalpha + IL-1beta | 19.6 |
| CD8 lymphocyte act | 25.5 | Astrocytes rest | 26.4 |
| Secondary CD8 lymphocyte rest | 21.5 | Astrocytes TNFalpha + IL-1beta | 13.2 |
| Secondary CD8 lymphocyte act | 29.3 | KU-812 (Basophil) rest | 6.3 |
| CD4 lymphocyte none | 12.7 | KU-812 (Basophil) PMA/ionomycin | 16.0 |
| 2ry Th1/Th2/Tr1 anti-CD95 | 25.5 | CCD1106 (Keratinocytes) none | 46.0 |
| CH11 | | | |
| LAK cells rest | 26.1 | CCD1106 (Keratinocytes) TNFalpha + IL- | 4.3 |
| | | 1beta | |
| LAK cells IL-2 | 30.6 | Liver cirrhosis | 2.7 |
| LAK cells IL-2 + IL-12 | 18.2 | Lupus kidney | 3.0 |
| LAK cells IL-2 + IFN gamma | 31.0 | NCI-H292 none | 76.8 |
| LAX cells IL-2 + IL-18 | 31.2 | NCI-H292 IL-4 | 94.6 |
| LAK cells PMA/ionomycin | 9.5 | NCI-H292 IL-9 | 97.3 |
| NK Cells IL-2 rest | 37.4 | NCI-H292 IL-13 | 59.5 |
| Two Way MLR 3 day | 24.0 | NCI-H292 IFN gamma | 51.8 |
| Two Way MLR 5 day | 23.0 | HPAEC none | 23.3 |
| Two Way MLR 7 day | 19.6 | HPAEC TNF alpha + IL-1 beta | 15.8 |
| PBMC rest | 11.4 | Lung fibroblast none | 18.4 |
| PBMC PWM | 72.2 | Lung fibroblast TNF alpha + IL-1 beta | 12.0 |
| PBMC PHA-L | 33.9 | Lung fibroblast IL-4 | 35.8 |
| Ramos (B cell) none | 19.6 | Lung fibroblast IL-9 | 25.5 |
| Ramos (B cell) ionomycin | 100.0 | Lung fibroblast IL-13 | 18.7 |
| B lymphocytes PWM | 81.8 | Lung fibroblast IFN gamma | 38.4 |
| B lymphocytes CD40L and IL-4 | 42.3 | Dermal fibroblast CCD1070 rest | 48.0 |
| EOL-1 dbcAMP | 23.7 | Dermal fibroblast CCD1070 TNF alpha | 83.5 |
| EOL-1 dbcAMP | 13.5 | Dermal fibroblast CCD1070 IL-1 beta | 13.6 |
| PMA/ionomycin | | | |
| Dendritic cells none | 20.9 | Dermal fibroblast IFN gamma | 13.1 |
| Dendritic cells LPS | 11.5 | Dermal fibroblast IL-4 | 36.6 |
| Dendritic cells anti-CD40 | 23.2 | IBD Colitis 2 | 1.8 |
| Monocytes rest | 19.2 | IBD Crohn's | 2.4 |
| Monocytes LPS | 6.5 | Colon | 26.8 |
| Macrophages rest | 36.1 | Lung | 21.3 |
| Macrophages LPS | 13.3 | Thymus | 41.5 |
| HUVEC none | 37.6 | Kidney | 24.3 |
| HUVEC starved | 58.6 | | |

[1531] Panel 1.3D Summary: Ag2075 Highest expression of the CG56870-01 and CG56870-06 genes was detected in the cerebral cortex (CT=24.2). Thus expression of this gene is useful in distinguishing this sample from other samples in the panel. Significant expression of this gene is observed throughout the CNS, including in amygdala, substantia nigra, thalamus, cerebellum, cerebral cortex, and spinal cord. The CG56870-01 and CG56870-06 genes encode an Ndr3 homolog which is a putative member of Ndr family. This family consists of proteins from different gene families: Ndr1/RTP/Drg1/NDRG1, Ndr2, and Ndr3 (PFAM: IPR004142). NDRG1 is a cytoplasmic protein involved in stress responses, hormone responses, cell growth, and differentiation. Mutation of this gene was reported to be causative for hereditary motor and sensory neuropathy-Lom. Recently, NDRG4, another memember of Ndr family, was shown to be expressed in neurons of the brain and spinal cord. Its expression was markedly decreased in the brain of Alzheimer's disease patient (Zhou R H, Kokame K, Tsukamoto Y, Yutani C, Kato H, Miyata T. (2001) Characterization of the human NDRG gene family: a newly identified member, NDRG4, is specifically expressed in brain and heart. Genomics 73(1):86-97). Therapeutic modulation of this gene, expressed protein and/or use of antibodies or small molecule drugs targeting the gene or gene product are useful in the treatment of central nervous system disorders such as Alzheimer's disease, Parkinson's disease, epilepsy, multiple sclerosis, schizophrenia and depression.

[1532] This gene also showed moderate levels of expression in adipose, adrenal, thyroid, liver, heart, thyroid and skeletal muscle. Therapeutic modulation of this gene, expressed protein and/or use of antibodies or small molecule drugs targeting the gene or gene product are useful in the treatment of metabolic and endocrine disease, including Types 1 and 2 diabetes and obesity.

[1533] In addition, there was significant expression in other samples derived from breast cancer cell lines, lung cancer cell lines, renal cancer cell lines and colon cancer cell lines. Therapeutic modulation of this gene, expressed protein and/or use of antibodies or small molecule drugs targeting the gene or gene product are useful in the treatment of breast, lung, renal or colon cancer.

[1534] Panel 2.2 Summary: Ag2075 Highest expression of the CG56870-01 and CG56870-06 genes was detected in breast cancer sample (CT=29.89). Expression of this gene is useful as a marker for breast cancer. There was significant expression in other samples derived from breast cancers, kidney cancers and colon cancers. Therapeutic modulation of this gene, expressed protein and/or use of antibodies or small molecule drugs targeting the gene or gene product are useful in the treatment of breast, kidney or colon cancer.

[1535] Panel 3D Summary: Ag2075 The expression of this gene was highest in a sample derived from a lung cancer cell line (DMS-79)(CT=26.4). There was significant expression in other samples derived from pancreatic cancer cell lines, lung cancer cell lines, brain cancer cell lines and cervical cancer cell lines. Expression of this gene is useful as a marker for pancreatic, lung, brain and cervical cancers. Therapeutic modulation of this gene, expressed protein and/or use of antibodies or small molecule drugs targeting the gene or gene product are useful in the treatment of pancreatic, lung, brain or cervical cancer.

[1536] Panel 4D Summary: Ag2075 Expression of the CG56870-01 and CG56870-06 genes was ubiquitous througout this panel, with highest expression in samples derived from ionomycin treated Ramos (B cell) cells (CT=26.1). Expression was also detected in PWM treated PBMC cells and PWM treated B lymphocytes. Therapeutic modulation of these gene, expressed proteins and/or use of antibodies or small molecule drugs targeting the genes or gene products are useful in the treatment of autoimmune and inflammatory diseases in which B cells play a part in the initiation or progression of the disease process, such as systemic lupus erythematosus, Crohn's disease, ulcerative colitis, multiple sclerosis, chronic obstructive pulmonary disease, asthma, emphysema, rheumatoid arthritis, or psoriasis.

[1537] BF. CG57109-01 and CG57109-05: Doublecortin/CAMkinase.

[1538] Expression of genes CG57109-01 and CG57109-05 was assessed using the primer-probe sets Ag1137, Ag1150, Ag1860, Ag3112 and Ag4281, described in Tables BFA, BFB, BFC, BFD and BFE. Results of the RTQ-PCR runs are shown in Tables BFF, BFG, BFH, BFI, BFJ, BFK, BFL and BFM. CG57109-05 represents a full-length physical clone of the CG57109-01 gene.

TABLE BFA
Probe Name Ag1137

| | | | Start | SEQ ID |
|---|---|---|---|---|
| Primers | Sequences | Length | Position | No |
| Forward | 5′-gacatggtggacagtgagatct-3′ | 22 | 1338 | 1377 |
| Probe | TET-5′-cctctctcaccccaacatcgtgaaat-3′- | 26 | 1373 | 1378 |
| | TAMRA | | | |
| Reverse | 5′-tctgtttcgtagacttcatgca-3′ | 22 | 1399 | 1379 |

[1539] TABLE BFB
Probe Name Ag1150

| | | | Start | SEQ ID |
|---|---|---|---|---|
| Primers | Sequences | Length | Position | No |
| Forward | 5′-gaaattggctgattttggactt-3′ | 22 | 1634 | 1380 |
| Probe | TET-5′-cctatatttactgtgtgtgggacccca- | 27 | 1674 | 1381 |
| | 3′-TAMRA | | | |
| Reverse | 5′-agaatttcgggagctacgtaag-3′ | 22 | 1702 | 1382 |

[1540] TABLE BFC
Probe Name Ag1860

| | | | Start | SEQ ID |
|---|---|---|---|---|
| Primers | Sequences | Length | Position | No |
| Forward | 5′-gacatggtggacagtgagatct-3′ | 22 | 1338 | 1383 |
| Probe | TET-5′-cctctctcaccccaacatcgtgaaat-3′- | 26 | 1373 | 1384 |
| | TAMRA | | | |
| Reverse | 5′-tctgtttcgtagacttcatgca-3′ | 22 | 1399 | 1385 |

[1541] TABLE BFD
Probe Name Ag3112

| | | | Start | SEQ ID |
|---|---|---|---|---|
| Primers | Sequences | Length | Position | No |
| Forward | 5′-gaaattggctgattttggactt-3′ | 22 | 1634 | 1386 |
| Probe | TET-5′-cctatatttactgtgtgtgggacccca- | 27 | 1674 | 1387 |
| | 3′-TAMRA | | | |
| Reverse | 5′-agaatttcgggagctacgtaag-3′ | 22 | 1702 | 1388 |

[1542] TABLE BFE
Probe Name Ag4281

| | | | Start | SEQ ID |
|---|---|---|---|---|
| Primers | Sequences | Length | Position | No |
| Forward | 5′-gacatggtggacagtgagatct-3′ | 22 | 1338 | 1389 |
| Probe | TET-5′-atccagagcctctctcaccccaacat-3′- | 26 | 1365 | 1390 |
| | TAMRA | | | |
| Reverse | 5′-tcgtagacttcatgcaatttca-3′ | 22 | 1393 | 1391 |

[1543] TABLE BFF
AI.05 chondrosarcoma
Column A - Rel. Exp.(%) Ag1860, Run 306913837

| Tissue Name | A | Tissue Name | A |
|---|---|---|---|
| 138353 PMA (18 hrs) | 1.6 | 138346 IL-1beta + Oncostatin M | 21.2 |
| | | (6 hrs) | |
| 138352 IL-1beta + Oncostatin M | 2.6 | 138345 IL-1beta + TNFa (6 hrs) | 95.9 |
| (18 hrs) | | | |
| 138351 IL-1beta + TNFa (18 hrs) | 100.0 | 138344 IL-1beta (6 hrs) | 29.9 |
| 138350 IL-1beta (18 hrs) | 6.1 | 138348 Untreated-complete medium | 0.0 |
| | | (6 hrs) | |
| 138354 Untreated-complete medium | 1.3 | 138349 Untreated-serum starved | 0.0 |
| (18 hrs) | | (6 hrs) | |
| 138347 PMA (6 hrs) | 7.7 | | |

[1544] TABLE BFG
AI_{—comprehensive} panel_v1.0
Column A - Rel. Exp.(%) Ag1860, Run 225404259

| Tissue Name | A | Tissue Name | A |
|---|---|---|---|
| 110967 COPD-F | 3.7 | 112427 Match Control Psoriasis-F | 7.9 |
| 110980 COPD-F | 0.0 | 112418 Psoriasis-M | 13.1 |
| 110968 COPD-M | 20.0 | 112723 Match Control Psoriasis-M | 17.9 |
| 110977 COPD-M | 3.0 | 112419 Psoriasis-M | 26.8 |
| 110989 Emphysema-F | 26.2 | 112424 Match Control Psoriasis-M | 19.5 |
| 110992 Emphysema-F | 4.2 | 112420 Psoriasis-M | 36.9 |
| 110993 Emphysema-F | 11.0 | 112425 Match Control Psoriasis-M | 23.3 |
| 110994 Emphysema-F | 19.8 | 104689 (ME) OA Bone-Backus | 13.0 |
| 110995 Emphysema-F | 8.5 | 104690 (ME) Adj “Normal” Bone- | 3.9 |
| | | Backus | |
| 110996 Emphysema-F | 0.0 | 104691 (ME) OA Synovium-Backus | 29.5 |
| 110997 Asthma-M | 17.2 | 104692 (BA) OA Cartilage-Backus | 0.0 |
| 111001 Asthma-F | 38.4 | 104694 (BA) OA Bone-Backus | 17.3 |
| 111002 Asthma-F | 27.9 | 104695 (BA) Adj “Normal” Bone- | 0.0 |
| | | Backus | |
| 111003 Atopic Asthma-F | 50.7 | 104696 (BA) OA Synovium-Backus | 93.3 |
| 111004 Atopic Asthma-F | 68.3 | 104700 (SS) OA Bone-Backus | 11.7 |
| 111005 Atopic Asthma-F | 56.6 | 104701 (SS) Adj “Normal” Bone-Backus | 15.3 |
| 111006 Atopic Asthma-F | 17.9 | 104702 (SS) OA Synovium-Backus | 100.0 |
| 111417 Allergy-M | 31.0 | 117093 OA Cartilage Rep7 | 19.1 |
| 112347 Allergy-M | 8.3 | 112672 OA Bone5 | 6.8 |
| 112349 Normal Lung-F | 2.5 | 112673 OA Synovium5 | 4.8 |
| 112357 Normal Lung-F | 4.4 | 112674 OA Synovial Fluid cells5 | 13.9 |
| 112354 Normal Lung-M | 0.0 | 117100 OA Cartilage Rep14 | 4.5 |
| 112374 Crohns-F | 27.5 | 112756 OA Bone9 | 63.7 |
| 112389 Match Control Crohns-F | 9.0 | 112757 OA Synovium9 | 17.7 |
| 112375 Crohns-F | 36.6 | 112758 OA Synovial Fluid Cells9 | 11.7 |
| 112732 Match Control Crohns-F | 0.0 | 117125 RA Cartilage Rep2 | 27.5 |
| 112725 Crohns-M | 4.4 | 113492 Bone2 RA | 20.0 |
| 112387 Match Control Crohns-M | 17.1 | 113493 Synovium2 RA | 6.8 |
| 112378 Crohns-M | 4.2 | 113494 Syn Fluid Cells RA | 8.8 |
| 112390 Match Control Crohns-M | 49.3 | 113499 Cartilage4 RA | 4.7 |
| 112726 Crohns-M | 30.1 | 113500 Bone4 RA | 8.8 |
| 112731 Match Control Crohns-M | 0.0 | 113501 Synovium4 RA | 3.5 |
| 112380 Ulcer Col-F | 37.9 | 113502 Syn Fluid Cells4 RA | 4.0 |
| 112734 Match Control Ulcer Col-F | 17.9 | 113495 Cartilage3 RA | 10.4 |
| 112384 Ulcer Col-F | 29.7 | 113496 Bone3 RA | 4.2 |
| 112737 Match Control Ulcer Col-F | 9.0 | 113497 Synovium3 RA | 0.0 |
| 112386 Ulcer Col-F | 5.0 | 113498 Syn Fluid Cells3 RA | 7.9 |
| 112738 Match Control Ulcer Col-F | 9.8 | 117106 Normal Cartilage Rep20 | 0.0 |
| 112381 Ulcer Col-M | 0.0 | 113663 Bone3 Normal | 0.0 |
| 112735 Match Control Ulcer Col-M | 28.7 | 113664 Synovium3 Normal | 0.0 |
| 112382 Ulcer Col-M | 10.0 | 113665 Syn Fluid Cells3 Normal | 0.0 |
| 112394 Match Control Ulcer Col-M | 0.0 | 117107 Normal Cartilage Rep22 | 0.0 |
| 112383 Ulcer Col-M | 35.4 | 113667 Bone4 Normal | 13.3 |
| 112736 Match Control Ulcer Col-M | 6.3 | 113668 Synovium4 Normal | 0.0 |
| 112423 Psoriasis-F | 21.5 | 113669 Syn Fluid Cells4 Normal | 9.4 |

[1545] TABLE BFH
General_screening_panel_v1.4
Column A - Rel. Exp.(%) Ag4281, Run 222183233

| Tissue Name | A | Tissue Name | A |
|---|---|---|---|
| Adipose | 0.5 | Renal ca.TK-10 | 0.0 |
| Melanoma* Hs688(A).T | 0.0 | Bladder | 5.4 |
| Melanoma* Hs688(B).T | 0.0 | Gastric ca. (liver met.) NCI-N87 | 0.0 |
| Melanoma* M14 | 0.0 | Gastric ca. KATO III | 0.0 |
| Melanoma* LOXIMVI | 0.0 | Colon ca. SW-948 | 0.0 |
| Melanoma* SK-MEL-5 | 0.0 | Colon ca. SW480 | 0.2 |
| Squamous cell carcinoma SCC-4 | 0.0 | Colon ca.* (SW480 met) SW620 | 0.0 |
| Testis Pool | 34.2 | Colon ca. HT29 | 0.0 |
| Prostate ca.* (bone met) PC-3 | 0.0 | Colon ca. HCT-116 | 0.0 |
| Prostate Pool | 0.9 | Colon ca. CaCo-2 | 2.6 |
| Placenta | 2.0 | Colon cancer tissue | 5.6 |
| Uterus Pool | 0.8 | Colon ca. SW1116 | 0.0 |
| Ovarian ca. OVCAR-3 | 0.7 | Colon ca. Colo-205 | 0.0 |
| Ovarian ca. SK-OV-3 | 0.6 | Colon ca. SW-48 | 0.0 |
| Ovarian ca. OVCAR-4 | 0.0 | Colon Pool | 4.0 |
| Ovarian ca. OVCAR-5 | 0.0 | Small Intestine Pool | 0.5 |
| Ovarian ca. IGROV-1 | 0.0 | Stomach Pool | 0.4 |
| Ovarian ca. OVCAR-8 | 0.0 | Bone Marrow Pool | 1.1 |
| Ovary | 0.6 | Fetal Heart | 4.5 |
| Breast ca. MCF-7 | 0.0 | Heart Pool | 2.7 |
| Breast ca. MDA-MB-231 | 0.0 | Lymph Node Pool | 5.9 |
| Breast ca. BT 549 | 0.0 | Fetal Skeletal Muscle | 22.1 |
| Breast ca. T47D | 1.0 | Skeletal Muscle Pool | 9.3 |
| Breast ca. MDA-N | 0.0 | Spleen Pool | 2.4 |
| Breast Pool | 3.1 | Thymus Pool | 3.1 |
| Trachea | 1.7 | CNS cancer (glio/astro) U87-MG | 0.0 |
| Lung | 0.0 | CNS cancer (glio/astro) U-118-MG | 0.0 |
| Fetal Lung | 14.4 | CNS cancer (neuro; met) SK-N-AS | 0.8 |
| Lung ca. NCI-N417 | 0.0 | CNS cancer (astro) SF-539 | 0.0 |
| Lung ca. LX-1 | 0.0 | CNS cancer (astro) SNB-75 | 0.0 |
| Lung ca. NCI-H146 | 0.9 | CNS cancer (glio) SNB-19 | 0.0 |
| Lung ca. SHP-77 | 0.0 | CNS cancer (glio) SF-295 | 0.0 |
| Lung ca. A549 | 0.0 | Brain (Amygdala) Pool | 25.5 |
| Lung ca. NCI-H526 | 0.0 | Brain (cerebellum) | 5.4 |
| Lung ca. NCI-H23 | 2.1 | Brain (fetal) | 100.0 |
| Lung ca. NCI-H460 | 0.0 | Brain (Hippocampus) Pool | 59.0 |
| Lung ca. HOP-62 | 0.0 | Cerebral Cortex Pool | 14.1 |
| Lung ca. NCI-H522 | 0.7 | Brain (Substantia nigra) Pool | 15.1 |
| Liver | 0.3 | Brain (Thalamus) Pool | 28.9 |
| Fetal Liver | 1.0 | Brain (whole) | 33.9 |
| Liver ca. HepG2 | 0.0 | Spinal Cord Pool | 25.2 |
| Kidney Pool | 4.2 | Adrenal Gland | 2.3 |
| Fetal Kidney | 4.6 | Pituitary gland Pool | 36.6 |
| Renal ca. 786-0 | 0.0 | Salivary Gland | 0.4 |
| Renal ca. A498 | 0.0 | Thyroid (female) | 0.4 |
| Renal ca. ACHN | 0.0 | Pancreatic ca. CAPAN2 | 0.0 |
| Renal ca. UO-31 | 0.0 | Pancreas Pool | 2.1 |

[1546] TABLE BFI
PGI1.0
Column A - Rel. Exp.(%) Ag3112, Run 395549582

| Tissue Name | A | Tissue Name | A |
|---|---|---|---|
| 162191 Normal Lung 1 (IBS) | 0.5 | 162185 Emphysema Lung 12 (Ardais) | 5.4 |
| 160468 MD lung | 6.8 | 162184 Emphysema Lung 13 (Ardais) | 6.5 |
| 156629 MD Lung 13 | 2.3 | 162183 Emphysema Lung 14 (Ardais) | 13.3 |
| 162570 Normal Lung 4 (Aastrand) | 2.0 | 162188 Emphysema Lung 15 (Genomic | 42.9 |
| | | Collaborative) | |
| 162571 Normal Lung 3 (Aastrand) | 0.8 | 162177 NAT UC Colon 1 (Ardais) | 15.3 |
| 162187 Fibrosis Lung 2 (Genomic | 99.3 | 162176 UC Colon 1 (Ardais) | 21.0 |
| Collaborative) | | | |
| 151281 Fibrosis lung 11(Ardais) | 24.0 | 162179 NAT UC Colon 2(Ardais) | 5.8 |
| 162186 Fibrosis Lung 1 (Genomic | 35.6 | 162178 UC Colon 2(Ardais) | 38.2 |
| Collaborative) | | | |
| 162190 Asthma Lung 4 (Genomic | 53.2 | 162181 NAT UC Colon 3(Ardais) | 3.9 |
| Collaborative) | | | |
| 160467 Asthma Lung 13 (MD) | 0.6 | 162180 UC Colon 3(Ardais) | 20.3 |
| 137027 Emphysema Lung 1 | 2.3 | 162182 NAT UC Colon 4 (Ardais) | 5.1 |
| (Ardais) | | | |
| 137028 Emphysema Lung 2 | 0.0 | 137042 UC Colon 1108 | 27.4 |
| (Ardais) | | | |
| 137040 Emphysema Lung 3 | 4.4 | 137029 UC Colon 8215 | 100.0 |
| (Ardais) | | | |
| 137041 Emphysema Lung 4 | 4.0 | 137031 UC Colon 8217 | 66.4 |
| (Ardais) | | | |
| 137043 Emphysema Lung 5 | 15.0 | 137036 UC Colon 1137 | 43.5 |
| (Ardais) | | | |
| 142817 Emphysema Lung 6 | 7.6 | 137038 UC Colon 1491 | 62.4 |
| (Ardais) | | | |
| 142818 Emphysema Lung 7 | 5.9 | 137039 UC Colon 1546 | 78.5 |
| (Ardais) | | | |
| 142819 Emphysema Lung 8 | 8.2 | 162593 Crohn's 47751 (NDRI) | 9.4 |
| (Ardais) | | | |
| 142820 Emphysema Lung 9 | 4.0 | 162594 NAT Crohn's 47751 (NDRI) | 3.9 |
| (Ardais) | | | |
| 142821 Emphysema Lung 10 | 6.7 | | |
| (Ardais) | | | |

[1547] TABLE BFK
Panel 3D
Column A - Rel. Exp.(%) Ag3112, Run 182114339

| Tissue Name | A | Tissue Name | A |
|---|---|---|---|
| 94905 Daoy | 0.0 | 94954 Ca Ski Cervical epidermoid | 0.0 |
| Medulloblastoma/Cerebellum | | carcinoma (metastasis | |
| 94906 TE671 | 0.0 | 94955 ES-2 Ovarian clear cell | 0.0 |
| Medulloblastom/Cerebellum | | carcinoma | |
| 94907 D283 Med | 0.0 | 94957 Ramos Stimulated with | 0.0 |
| Medulloblastoma/Cerebellum | | PMA/ionomycin 6 h | |
| 94908 PFSK-1 Primitive | 0.0 | 94958 Ramos Stimulated with | 0.0 |
| Neuroectodermal/Cerebellum | | PMA/ionomycin 14 h | |
| 94909 XF-498 CNS | 0.0 | 94962 MEG-01 Chronic myelogenous | 0.0 |
| | | leukemia (megokaryoblast) | |
| 94910 SNB-78 CNS/glioma | 0.0 | 94963 Raji Burkitt's lymphoma | 0.0 |
| 94911 SF-268 CNS/glioblastoma | 0.0 | 94964 Daudi Burkitt's lymphoma | 0.0 |
| 94912 T98G Glioblastoma | 0.0 | 94965 U266 B-cell | 0.0 |
| | | plasmacytoma/myeloma | |
| 96776 SK-N-SH Neuroblastoma | 0.0 | 94968 CA46 Burkitt's lymphoma | 0.0 |
| (metastasis) | | | |
| 94913 SF-295 CNS/glioblastoma | 0.0 | 94970 RL non-Hodgkin's B-cell | 0.0 |
| | | lymphoma | |
| 94914 Cerebellum | 6.5 | 94972 JM1 pre-B-cell | 0.0 |
| | | lymphoma/leukemia | |
| 96777 Cerebellum | 2.4 | 94973 Jurkat T cell leukemia | 7.3 |
| 94916 NCI-H292 Mucoepidermoid | 0.0 | 94974 TF-1 Erythroleukemia | 0.0 |
| lung carcinoma | | | |
| 94917 DMS-114 Small cell lung | 0.0 | 94975 HUT 78 T-cell lymphoma | 0.0 |
| cancer | | | |
| 94918 DMS-79 Small cell lung | 100.0 | 94977 U937 Histiocytic lymphoma | 0.0 |
| cancer/neuroendocrine | | | |
| 94919 NCI-H146 Small cell lung | 0.0 | 94980 KU-812 Myelogenous | 0.0 |
| cancer/neuroendocrine | | leukemia | |
| 94920 NCI-H526 Small cell lung | 0.0 | 769-P- Clear cell renal carcinoma | 0.0 |
| cancer/neuroendocrine | | | |
| 94921 NCI-N417 Small cell lung | 0.0 | 94983 Caki-2 Clear cell renal | 0.0 |
| cancer/neuroendocrine | | carcinoma | |
| 94923 NCI-H82 Small cell lung | 0.0 | 94984 SW 839 Clear cell renal | 0.0 |
| cancer/neuroendocrine | | carcinoma | |
| 94924 NCI-H157 Squamous cell lung | 0.0 | 94986 G401 Wilims' tumor | 0.0 |
| cancer (metastasis) | | | |
| 94925 NCI-H1155 Large cell lung | 3.6 | 94987 Hs766T Pancreatic carcinoma | 0.0 |
| cancer/neuroendocrine | | (LN metastasis) | |
| 94926 NCI-H1299 Large cell lung | 0.0 | 94988 CAPAN-1 Pancreatic | 0.0 |
| cancer/neuroendocrine | | adenocarcinoma (liver metastasis) | |
| 94927 NCI-H727 Lung carcinoid | 0.0 | 94989 SU86.86 Pancreatic carcinoma | 0.0 |
| | | (liver metastasis) | |
| 94928 NCI-UMC-11 Lung carcinoid | 0.0 | 94990 BxPC-3 Pancreatic | 0.0 |
| | | adenocarcinoma | |
| 94929 LX-1 Small cell lung cancer | 0.0 | 94991 HPAC Pancreatic | 0.0 |
| | | adenocarcinoma | |
| 94930 Colo-205 Colon cancer | 0.0 | 94992 MIA PaCa-2 Pancreatic | 0.0 |
| | | carcinoma | |
| 94931 KM12 Colon cancer | 0.0 | 94993 CFPAC-1 Pancreatic ductal | 0.0 |
| | | adenocarcinoma | |
| 94932 KM20L2 Colon cancer | 0.0 | 94994 PANC-1 Pancreatic epithelioid | 0.0 |
| | | ductal carcinoma | |
| 94933 NCI-H716 Colon cancer | 0.0 | 94996 T24 Bladder carcinma | 0.0 |
| | | (transitional cell | |
| 94935 SW-48 Colon adenocarcinoma | 0.0 | 5637- Bladder carcinoma | 0.0 |
| 94936 SW1116 Colon adenocarcinoma | 0.0 | 94998 HT-1197 Bladder carcinoma | 0.0 |
| 94937 LS 174T Colon | 0.0 | 94999 UM-UC-3 Bladder carcinma | 0.0 |
| adenocarcinoma | | (transitional cell) | |
| 94938 SW-948 Colon adenocarcinoma | 0.0 | 95000 A204 Rhabdomyosarcoma | 0.0 |
| 94939 SW-480 Colon adenocarcinoma | 0.0 | 95001 HT-1080 Fibrosarcoma | 0.0 |
| 94940 NCI-SNU-5 Gastric carcinoma | 0.0 | 95002 MG-63 Osteosarcoma (bone) | 0.0 |
| KATO III- Gastnc carcinoma | 0.0 | 95003 SK-LMS-1 Leiomyosarcoma | 0.0 |
| | | (vulva) | |
| 94943 NCI-SNU-16 Gastric carcinoma | 0.0 | 95004 SJRH30 Rhabdomyosarcoma | 0.0 |
| | | (met to bone marrow) | |
| 94944 NCI-SNU-1 Gastric carcinoma | 0.0 | 95005 A431 Epidermoid carcinoma | 0.0 |
| 94946 RE-1 Gastric adenocarcinoma | 0.0 | 95007 WM266-4 Melanoma | 0.0 |
| 94947 RF-48 Gastric adenocarcinoma | 0.0 | DU 145- Prostate carcinoma (brain | 0.0 |
| | | metastasis) | |
| 96778 MKN-45 Gastric carcinoma | 0.0 | 95012 MDA-MB-468 Breast | 0.0 |
| | | adenocarcinoma | |
| 94949 NCI-N87 Gastric carcinoma | 0.0 | SCC-4- Squamous cell carcinoma of | 0.0 |
| | | tongue | |
| 94951 OVCAR-5 Ovarian carcinoma | 0.0 | SCC-9- Squamous cell carcinoma of | 0.0 |
| | | tongue | |
| 94952 RL95-2 Uterine carcinoma | 0.0 | SCC-15- Squamous cell carcinoma of | 0.0 |
| | | tongue | |
| 94953 Hela53 Cervical | 0.0 | 95017 CAL 27 Squamous cell | 0.0 |
| adenocarcinoma | | carcinoma of tongue | |

[1548] TABLE BFM
Panel 4D
Column A - Rel. Exp. (%) Ag1860, Run 165828919
Column B - Rel. Exp. (%) Ag3112, Run 164526081

| Tissue Name | A | B | Tissue Name | A | B |
|---|---|---|---|---|---|
| Secondary Th1 act | 0.0 | 0.0 | HUVEC IL-1 beta | 6.5 | 2.2 |
| Secondary Th2 act | 0.0 | 0.0 | HUVEC IFN gamma | 0.0 | 0.0 |
| Secondary Tr1 act | 0.8 | 0.0 | HUVEC TNF alpha + IFN gamma | 0.6 | 0.0 |
| Secondary Th1 rest | 0.0 | 1.7 | HUVEC TNF alpha + IL4 | 0.6 | 0.0 |
| Secondary Th2 rest | 0.0 | 0.0 | HUVEC IL-11 | 0.0 | 0.0 |
| Secondary Tr1 rest | 0.6 | 0.0 | Lung Microvascular EC none | 0.0 | 0.0 |
| Primary Th1 act | 0.0 | 0.0 | Lung Microvascular EC TNF alpha + | 9.7 | 9.7 |
| | | | IL-1 beta | | |
| Primary Th2 act | 0.0 | 0.0 | Microvascular Dermal EC none | 0.0 | 0.0 |
| Primary Tr1 act | 0.7 | 0.0 | Microsvasular Dermal EC TNF alpha + | 1.4 | 5.9 |
| | | | IL-1 beta | | |
| Primary Th1 rest | 0.7 | 0.0 | Bronchial epithelium TNF alpha + | 0.6 | 0.0 |
| | | | IL1 beta | | |
| Primary Th2 rest | 0.6 | 0.0 | Small airway epithelium none | 0.0 | 0.0 |
| Primary Tr1 rest | 0.0 | 0.0 | Small airway epithelium TNF alpha + | 0.0 | 0.0 |
| | | | IL-1 beta | | |
| CD45RA CD4 lymphocyte | 6.7 | 2.9 | Coronery artery SMC rest | 9.7 | 10.4 |
| act | | | | | |
| CD45RO CD4 lymphocyte | 0.0 | 0.0 | Coronery artery SMC TNF alpha + | 23.7 | 32.8 |
| act | | | IL-1 beta | | |
| CD8 lymphocyte act | 1.4 | 0.0 | Astrocytes rest | 0.0 | 0.0 |
| Secondary CD8 lymphocyte | 0.0 | 0.0 | Astrocytes TNF alpha + IL-1 beta | 11.7 | 0.0 |
| rest | | | | | |
| Secondary CD8 lymphocyte | 0.0 | 1.9 | KU-812 (Basophil) rest | 0.0 | 0.0 |
| act | | | | | |
| CD4 lymphocyte none | 0.0 | 0.0 | KU-812 (Basophil) PMA/ionomycin | 0.0 | 0.0 |
| 2ry Th1/Th2/Tr1 anti-CD95 | 0.0 | 2.0 | CCD1106 (Keratinocytes) none | 0.0 | 0.0 |
| CH11 | | | | | |
| LAK cells rest | 0.9 | 0.0 | CCD1106 (Keratinocytes) TNF alpha + | 0.0 | 0.0 |
| | | | IL-1 beta | | |
| LAK cells IL-2 | 2.7 | 0.0 | Liver cirrhosis | 20.0 | 6.4 |
| LAK cells IL-2 + IL-12 | 0.0 | 0.0 | Lupus kidney | 0.0 | 0.0 |
| LAK cells IL-2 + IFN | 0.4 | 0.0 | NCI-H292 none | 0.0 | 0.0 |
| gamma | | | | | |
| LAK cells IL-2 + IL-18 | 0.0 | 0.0 | NCI-H292 IL-4 | 0.0 | 0.0 |
| LAK cells PMA/ionomycin | 1.8 | 0.0 | NCI-H292 IL-9 | 0.0 | 2.6 |
| NK Cells IL-2 rest | 1.7 | 0.0 | NCI-H292 IL-13 | 0.0 | 1.7 |
| Two Way MLR 3 day | 1.6 | 0.0 | NCI-H292 IFN gamma | 0.0 | 0.0 |
| Two Way MLR 5 day | 0.0 | 0.0 | HPAEC none | 0.0 | 0.0 |
| Two Way MLR 7 day | 0.0 | 0.0 | HPAEC TNF alpha + IL-1 beta | 100.0 | 69.3 |
| PBMC rest | 0.8 | 0.0 | Lung fibroblast none | 0.0 | 0.0 |
| PBMC PWM | 1.5 | 1.2 | Lung fibroblast TNF alpha + IL-1 | 16.4 | 3.5 |
| | | | beta | | |
| PBMC PHA-L | 0.0 | 0.0 | Lung fibroblast IL-4 | 0.0 | 0.0 |
| Ramos (B cell) none | 0.0 | 0.0 | Lung fibroblast IL-9 | 0.0 | 0.0 |
| Ramos (B cell) ionomycin | 0.0 | 0.0 | Lung fibroblast IL-13 | 0.7 | 0.0 |
| B lymphocytes PWM | 0.0 | 2.5 | Lung fibroblast IFN gamma | 0.0 | 0.0 |
| B lymphocytes CD40L and | 0.0 | 1.7 | Dermal fibroblast CCD1070 rest | 2.3 | 4.1 |
| IL-4 | | | | | |
| EOL-1 dbcAMP | 0.0 | 0.0 | Dermal fibroblast CCD1070 TNF | 28.7 | 42.6 |
| | | | alpha | | |
| EOL-1 dbcAMP | 0.0 | 0.0 | Dermal fibroblast CCD1070 IL-1 | 49.7 | 100.0 |
| PMA/ionomycin | | | beta | | |
| Dendritic cells none | 4.6 | 0.0 | Dermal fibroblast IFN gamma | 0.0 | 0.9 |
| Dendritic cells LPS | 4.2 | 2.9 | Dermal fibroblast IL-4 | 0.3 | 0.0 |
| Dendritic cells anti-CD40 | 15.8 | 11.5 | IBD Colitis 2 | 1.9 | 0.0 |
| Monocytes rest | 0.0 | 0.0 | IBD Crohn's | 2.7 | 5.1 |
| Monocytes LPS | 2.3 | 0.0 | Colon | 15.6 | 3.2 |
| Macrophages rest | 5.7 | 3.4 | Lung | 23.0 | 27.7 |
| Macrophages LPS | 6.8 | 3.4 | Thymus | 0.0 | 1.7 |
| HUVEC none | 0.0 | 0.0 | Kidney | 26.8 | 27.5 |
| HUVEC starved | 0.0 | 0.0 | | | |

[1549] AI.05 chondrosarcoma Summary: Ag1860 Highest expression was detected in IL-1TNF-a treated chondrosarcoma cells (SW1353 cell lines). Expression of this gene was up-regulated upon IL-1 treatment, a potent activator of pro-inflammatory cytokines and matrix metalloproteinases, which participate in the destruction of cartilage observed in Osteoarthritis (OA). Therapeutic modulation of these genes, expressed proteins and/or use of antibodies or small molecule drugs targeting the genes or gene products are useful in the treatment of the degeneration of cartilage observed in OA.

[1550] AI_comprehensive panel_v1.0 Summary: Ag1860 Highest expression in this panel was seen in synovium from an OA patient (CT=33.7). Overall, the CG57109-01 and CG57109-05 genes were expressed in OA tissue but not in normal joint tissue and were expressed in pulmonary tissue from patients with atopic asthma but not in normal lung tissue. Therapeutic modulation of these genes, expressed proteins and/or use of antibodies or small molecule drugs targeting the genes or gene products are useful in the treatment of inflammatory diseases including OA and asthma.

[1551] General_screening_panel_v1.4 Summary: Ag4281 Highest expression of the CG57109-01 and CG57109-05 genes was detected in the fetal brain (CT=29.5). Overall, expression of this gene was highly brain-specific in this panel, with moderate levels of expression in the amygdala, hippocampus, thalamus and spinal cord and low but significant levels in the cerebral cortex and the substantia nigra. CG57109-01 and CG57109-05 encode a novel doublecortin/CAM kinase like protein. Other members of this family have been implicated in the calcium-signaling pathway that controls neuronal migration in the developing brain. In addition, CAM kinase has been shown to play a crucial role in hippocampal Long Term Potentiation (LTP) from studies in transgenic and knock-out mice, and may also play a role in memory formation in the mature nervous system as well as the developing brain. CAM kinases have also been shown to phosporylate tau, an integral component of the neurofibrillary tangles seen in Alzheimer's, in a manner which shifts tau electrophorytic motility to that seen in the AD brain. Furthermore, tau from AD brains shows aberrent phosphorylation. Therapeutic modulation of these gene, expressed protein and/or use of antibodies or small molecule drugs targeting the genes or gene products are useful in the treatment of learning and memory deficits that are a result of aging or neurodegenerative disease and also in the treatment of neurologic disorders themselves, including Alzheimer's disease.

[1552] Moderate to low levels of expression were also seen in a variety of samples from normal tissues, including testis, fetal and adult heart and skeletal muscle and fetal lung.

[1553] Expression was much higher in fetal lung (CT=32.3) when compared to expression in the adult counterpart (CT=40). Expression of this gene is useful for distinguishing between the fetal and adult source of this tissue.

[1554] PGI1.0 Summary: Ag3112 Highest expression was detected in a colon sample from an ulcerative colitis patient (CT=30.7). Strong expression was observed in a cluster of colon samples derived from ulcerative colitis patients and in fibrotic lung samples. Therapeutic modulation of this gene, expressed protein and/or use of antibodies or small molecule drugs targeting the gene or gene product are useful in the treatment of inflammatory conditions of the colon and lung.

[1555] Panel 3D Summary: Ag3112 Expression was restricted to a sample derived from a lung cancer cell line (CT=32.6). Expression of this gene or expressed protein could be used to detect the presence of lung cancer. Therapeutic modulation of these genes, expressed proteins and/or use of antibodies or small molecule drugs targeting the genes or gene products are useful in the treatment of lung cancer.

[1556] Panel 4D Summary: Ag1860 This transcript was highly expressed in activated dermal fibroblasts, endothelial cells, and astrocytes after treatment with IL-1 or TNFalpha, with highest expression in TNF alpha and IL-1 beta treated HPAECs (CT=30.9). The proteins encoded by the CG57109-01 and CG57109-05 genes have homology to protein kinase and may be involved in leukocyte extravasation from the peripheral blood into tissues (Borbiev T, Am J Physiol Lung Cell Mol Physiol 2001 May; 280(5):L983-90). Therapeutic modulation of these genes, expressed proteins and/or use of antibodies or small molecule drugs targeting the genes or gene products are useful in the treatment of inflammation due to asthma, allergy, emphysema, osteoarthritis, colitis, psoriasis, or delayed type hypersensitivity. Agonistic therapies are useful for directing leukocyte traffic into tumors or sites of infection.

[1557] Ag3112 Highest expression of the transcript was seen in IL-1 beta treated dermal fibroblasts (CT=30.4). Expression was in agreement with the profile seen with Ag1860, except no expression was seen in astrocytes.

[1558] BG. CG57399-04: Phospholipase ADRAB-B Precursor.

[1559] Expression of gene CG57399-04 was assessed using the primer-probe set Ag3952, described in Table BGA. Results of the RTQ-PCR runs are shown in Tables BGB and BGC. CG57399-04 represents a full-length physical clone of the CG57399-02 gene.

TABLE BGA
Probe Name Ag3952

| | | | Start | SEQ ID |
|---|---|---|---|---|
| Primers | Sequences | Length | Position | No |
| Forward | 5′-ctgtgtccctgtgtcctgaa-3′ | 20 | 274 | 1392 |
| Probe | TET-5′-tcaacagaacttgctaccctcatcga-3′- | 26 | 307 | 1393 |
| | TAMRA | | | |
| Reverse | 5′-gtgggtcttctcctgaaacttc-3′ | 22 | 342 | 1394 |

[1560] TABLE BGB
General_screening_panel_v1.4
Column A - Rel. Exp.(%) Ag3952, Run 213856126

| Tissue Name | A | Tissue Name | A |
|---|---|---|---|
| Adipose | 9.0 | Renal ca. TK-10 | 15.0 |
| Melanoma* Hs688(A).T | 3.0 | Bladder | 22.7 |
| Melanoma* Hs688(B).T | 3.4 | Gastric ca. (liver met.) NCI-N87 | 13.0 |
| Melanoma* M14 | 0.9 | Gastric ca. KATO III | 75.3 |
| Melanoma* LOXIMVI | 11.7 | Colon ca. SW-948 | 4.3 |
| Melanoma* SK-MEL-5 | 1.5 | Colon ca. SW480 | 97.3 |
| Squamous cell Carcinoma SCC-4 | 8.7 | Colon ca.* (SW480 met) SW620 | 4.4 |
| Testis Pool | 12.8 | Colon ca. HT29 | 0.4 |
| Prostate ca.* (bone met) PC-3 | 10.5 | Colon ca. HCT-116 | 1.2 |
| Prostate Pool | 12.9 | Colon ca. CaCo-2 | 60.7 |
| Placenta | 5.1 | Colon cancer tissue | 28.7 |
| Uterus Pool | 6.5 | Colon ca. SW1116 | 0.0 |
| Ovarian ca. OVCAR-3 | 7.3 | Colon ca. Colo-205 | 0.9 |
| Ovarian ca. SK-OV-3 | 26.4 | Colon ca. SW-48 | 26.1 |
| Ovarian ca. OVCAR-4 | 1.9 | Colon Pool | 18.8 |
| Ovarian ca. OVCAR-5 | 6.7 | Small Intestine Pool | 5.3 |
| Ovarian ca. IGROV-1 | 9.2 | Stomach Pool | 7.9 |
| Ovarian ca. OVCAR-8 | 4.2 | Bone Marrow Pool | 8.4 |
| Ovary | 10.0 | Fetal Heart | 1.2 |
| Breast ca. MCF-7 | 0.4 | Heart Pool | 5.7 |
| Breast ca. MDA-MB-231 | 92.0 | Lymph Node Pool | 32.1 |
| Breast ca. BT 549 | 5.5 | Fetal Skeletal Muscle | 1.2 |
| Breast ca. T47D | 2.5 | Skeletal Muscle Pool | 4.7 |
| Breast ca. MDA-N | 1.6 | Spleen Pool | 18.2 |
| Breast Pool | 19.6 | Thymus Pool | 19.3 |
| Trachea | 10.3 | CNS cancer (glio/astro) U87-MG | 38.2 |
| Lung | 1.2 | CNS cancer (glio/astro) U-118-MG | 12.2 |
| Fetal Lung | 8.3 | CNS cancer (neuro; met) SK-N-AS | 0.9 |
| Lung ca. NCI-N417 | 0.9 | CNS cancer (astro) SF-539 | 7.6 |
| Lung ca. LX-1 | 27.2 | CNS cancer (astro) SNB-75 | 17.1 |
| Lung ca. NCI-H146 | 10.7 | CNS cancer (glio) SNB-19 | 6.8 |
| Lung ca. SHP-77 | 47.3 | CNS cancer (glio) SF-295 | 5.7 |
| Lung ca. A549 | 5.1 | Brain (Amygdala) Pool | 7.0 |
| Lung ca. NCI-H526 | 0.0 | Brain (cerebellum) | 3.2 |
| Lung ca. NCI-H23 | 4.1 | Brain (fetal) | 19.3 |
| Lung ca. NCI-H460 | 0.5 | Brain (Hippocampus) Pool | 13.1 |
| Lung ca. HOP-62 | 2.7 | Cerebral Cortex Pool | 14.8 |
| Lung ca. NCI-H522 | 1.3 | Brain (Substantia nigra) Pool | 6.3 |
| Liver | 0.0 | Brain (Thalamus) Pool | 15.2 |
| Fetal Liver | 1.7 | Brain (whole) | 10.4 |
| Liver ca. HepG2 | 0.5 | Spinal Cord Pool | 5.3 |
| Kidney Pool | 21.2 | Adrenal Gland | 100.0 |
| Fetal Kidney | 1.6 | Pituitary gland Pool | 4.3 |
| Renal ca. 786-0 | 1.7 | Salivary Gland | 3.4 |
| Renal ca. A498 | 1.3 | Thyroid (female) | 14.5 |
| Renal ca. ACHN | 4.3 | Pancreatic ca. CAPAN2 | 1.7 |
| Renal ca. UO-31 | 17.4 | Pancreas Pool | 24.5 |

[1561] TABLE BGC
Panel 5 Islet
Column A - Rel. Exp.(%) Ag3952, Run 323591168

| Tissue Name | A | Tissue Name | A |
|---|---|---|---|
| 97457 Patient-02go adipose | 39.8 | 94709 Donor 2 AM - A adipose | 20.9 |
| 97476 Patient-07sk skeletal muscle | 0.0 | 94710 Donor 2 AM - B adipose | 9.5 |
| 97477 Patient-07ut uterus | 27.5 | 94711 Donor 2 AM - C adipose | 3.9 |
| 97478 Patient-07pl placenta | 2.8 | 94712 Donor 2 AD - A adipose | 5.7 |
| 99167 Bayer Patient 1 | 16.0 | 94713 Donor 2 AD - B adipose | 23.3 |
| 97482 Patient-08ut uterus | 6.3 | 94714 Donor 2 AD - C adipose | 5.5 |
| 97483 Patient-08pl placenta | 4.9 | 94742 Donor 3 U - A Mesenchymal | 6.9 |
| | | Stem Cells | |
| 97486 Patient-09sk skeletal muscle | 8.3 | 94743 Donor 3 U - B Mesenchymal | 0.0 |
| | | Stem Cells | |
| 97487 Patient-09ut uterus | 19.8 | 94730 Donor 3 AM - A adipose | 10.7 |
| 97488 Patient-09pl placenta | 8.0 | 94731 Donor 3 AM - B adipose | 23.5 |
| 97492 Patient-10ut uterus | 20.4 | 94732 Donor 3 AM - C adipose | 18.2 |
| 97493 Patient-10pl placenta | 18.0 | 94733 Donor 3 AD - A adipose | 9.3 |
| 97495 Patient-11go adipose | 49.7 | 94734 Donor 3 AD - B adipose | 0.0 |
| 97496 Patient-11sk skeletal muscle | 2.4 | 94735 Donor 3 AD - C adipose | 5.1 |
| 97497 Patient-11ut uterus | 26.8 | 77138 Liver HepG2untreated | 4.5 |
| 97498 Patient-11pl placenta | 12.9 | 73556 Heart Cardiac stromal cells | 0.0 |
| | | (primary) | |
| 97500 Patient-12go adipose | 31.6 | 81735 Small Intestine | 100.0 |
| 97501 Patient-12sk skeletal muscle | 11.2 | 72409 Kidney Proximal Convoluted | 7.3 |
| | | Tubule | |
| 97502 Patient-12ut uterus | 16.4 | 82685 Small intestine Duodenum | 17.2 |
| 97503 Patient-12p1 placenta | 30.1 | 90650 Adrenal Adrenocortical | |
| | | adenoma | |
| 94721 Donor 2 U - A Mesenchymal | 5.4 | 72410 Kidney HRCE | 10.2 |
| Stem Cells | | | |
| 94722 Donor 2 U - B Mesenchymal | 36.1 | 72411 Kidney HRE | 14.5 |
| Stem Cells | | | |
| 94723 Donor 2 U - C Mesenchymal | 5.2 | 73139 Uterus Uterine smooth muscle | 36.3 |
| Stem Cells | | cells | |

[1562] General_screening_panel_v1.4 Summary: Ag3952 Highest expression of this gene was seen in the adrenal gland (CT=29). Therapeutic modulation of this gene, expressed protein and/or use of antibodies or small molecule drugs targeting the gene or gene product are useful in the treatment of Addison's disease and other adrenalopathies. This gene showed significant expression in adipose, heart, skeletal muscle, pituitary, thyroid, and pancreas. Therapeutic modulation of this gene, expressed protein and/or use of antibodies or small molecule drugs targeting the gene or gene product are useful in the treatment of endocrine or metabolic disease, including Types 1 and 2 diabetes, obesity and pancreatitis.

[1563] Expression of this gene was detected in samples derived from colon, gastric, lung and breast cancers. Expression of this gene is useful for detecting the presence of these cancers. Therapeutic modulation of this gene, expressed protein and/or use of antibodies or small molecule drugs targeting the gene or gene product are useful in the treatment of colon, gastric, lung and breast cancers.

[1564] Low but significant levels of expression were seen for all regions of the CNS examined. Therapeutic modulation of this gene, expressed protein and/or use of antibodies or small molecule drugs targeting the gene or gene product are useful in the treatment of CNS disorders such as Alzheimer's disease, Parkinson's disease, stroke, epilepsy, schizophrenia and multiple sclerosis.

[1565] Panel 5 Islet Summary: Ag3952 Highest expression was detected in small intestine (CT=32.5). Low but significant expression was also detected in adipose.

[1566] BH. CG57562-02: Cation-Transporting ATPase.

[1567] Expression of gene CG57562-02 was assessed using the primer-probe sets Ag1179, Ag3287 and Ag6477, described in Tables BHA, BHB and BHC. Results of the RTQ-PCR runs are shown in Tables BHD, BHE and BHF.

TABLE BHA
Probe Name Ag1179

| | | | Start | SEQ ID |
|---|---|---|---|---|
| Primers | Sequences | Length | Position | No |
| Forward | 5′-cgctacagatgttcaagatcct-3′ | 22 | 2844 | 1395 |
| Probe | TET-5′-ctacagccagagcgtcctctacctgg-3′- | 26 | 2890 | 1396 |
| | TAMRA | | | |
| Reverse | 5′-cctggaagtcactgaacttgac-3′ | 22 | 2921 | 1397 |

[1568] TABLE BHB
Probe Name Ag3287

| | | | Start | SEQ ID |
|---|---|---|---|---|
| Primers | Sequences | Length | Position | No |
| Forward | 5′-cgctacagatgttcaagatcct-3′ | 22 | 2844 | 1398 |
| Probe | TET-5′-ctacagccagagcgtcctctacctgg-3′- | 26 | 2890 | 1399 |
| | TAMRA | | | |
| Reverse | 5′-cctggaagtcactgaacttgac-3′ | 22 | 2921 | 1400 |

[1569] TABLE BHC
Probe Name Ag6477

| | | | Start | SEQ ID |
|---|---|---|---|---|
| Primers | Sequences | Length | Position | No |
| Forward | 5′-ctctgcactccatggccc-3′ | 18 | 1980 | 1401 |
| Probe | TET-5′-cctggagtgcagcctcaagttcgtc-3′- | 25 | 2017 | 1402 |
| | TAMRA | | | |
| Reverse | 5′-gtctcccgtgatcatgaaca-3′ | 20 | 2121 | 1403 |

[1570] TABLE BHD
General_screening_panel_v1.4
Column A - Rel. Exp.(%) Ag3287, Run 216516908

| Tissue Name | A | Tissue Name | A |
|---|---|---|---|
| Adipose | 4.8 | Renal ca.TK-10 | 26.4 |
| Melanoma* Hs688(A).T | 23.0 | Bladder | 19.9 |
| Melanoma* Hs688(B).T | 27.9 | Gastric ca. (liver met.) NCI-N87 | 44.4 |
| Melanoma* M14 | 31.6 | Gastric ca. KATO III | 39.8 |
| Melanoma* LOXIMVI | 33.7 | Colon ca. SW-948 | 24.3 |
| Melanoma* SK-MEL-5 | 31.0 | Colon ca. SW480 | 39.8 |
| Squamous cell carcinoma SCC-4 | 18.4 | Colon ca.* (SW480 met) SW620 | 33.0 |
| Testis Pool | 12.2 | Colon ca. HT29 | 10.0 |
| Prostate ca.* (bone met) PC-3 | 49.7 | Colon ca. HCT-116 | 48.3 |
| Prostate Pool | 6.8 | Colon ca. CaCo-2 | 46.7 |
| Placenta | 23.0 | Colon cancer tissue | 19.1 |
| Uterus Pool | 4.5 | Colon ca. SW1116 | 11.7 |
| Ovarian ca. OVCAR-3 | 22.7 | Colon ca. Colo-205 | 15.9 |
| Ovarian ca. SK-OV-3 | 48.0 | Colon ca. SW-48 | 10.9 |
| Ovarian ca. OVCAR-4 | 20.6 | Colon Pool | 16.5 |
| Ovarian ca. OVCAR-5 | 38.4 | Small Intestine Pool | 14.5 |
| Ovarian ca. IGROV-1 | 34.2 | Stomach Pool | 9.2 |
| Ovarian ca. OVCAR-8 | 13.5 | Bone Marrow Pool | 6.8 |
| Ovary | 11.7 | Fetal Heart | 18.0 |
| Breast ca. MCF-7 | 33.0 | Heart Pool | 5.2 |
| Breast ca. MDA-MB-231 | 49.3 | Lymph Node Pool | 19.8 |
| Breast ca. BT 549 | 100.0 | Fetal Skeletal Muscle | 10.5 |
| Breast ca. T47D | 76.8 | Skeletal Muscle Pool | 5.8 |
| Breast ca. MDA-N | 24.0 | Spleen Pool | 12.0 |
| Breast Pool | 18.4 | Thymus Pool | 19.1 |
| Trachea | 16.6 | CNS cancer (glio/astro) U87-MG | 36.1 |
| Lung | 5.5 | CNS cancer (glio/astro) U-118-MG | 65.5 |
| Fetal Lung | 42.6 | CNS cancer (neuro; met) SK-N-AS | 69.3 |
| Lung ca. NCI-N417 | 18.3 | CNS cancer (astro) SF-539 | 22.4 |
| Lung ca. LX-1 | 26.1 | CNS cancer (astro) SNB-75 | 49.0 |
| Lung ca. NCI-H146 | 17.8 | CNS cancer (glio) SNB-19 | 31.9 |
| Lung ca. SHP-77 | 37.9 | CNS cancer (glio) SF-295 | 84.7 |
| Lung ca. A549 | 24.1 | Brain (Amygdala) Pool | 7.5 |
| Lung ca. NCI-H526 | 7.3 | Brain (cerebellum) | 42.3 |
| Lung ca. NCI-H23 | 41.8 | Brain (fetal) | 26.8 |
| Lung ca. NCI-H460 | 34.6 | Brain (Hippocampus) Pool | 8.2 |
| Lung ca. HOP-62 | 13.4 | Cerebral Cortex Pool | 9.1 |
| Lung ca. NCI-H522 | 17.6 | Brain (Substantia nigra) Pool | 9.1 |
| Liver | 5.3 | Brain (Thalamus) Pool | 13.1 |
| Fetal Liver | 21.6 | Brain (whole) | 18.4 |
| Liver ca. HepG2 | 23.0 | Spinal Cord Pool | 6.6 |
| Kidney Pool | 22.1 | Adrenal Gland | 24.0 |
| Fetal Kidney | 24.1 | Pituitary gland Pool | 6.0 |
| Renal ca. 786-0 | 20.9 | Salivary Gland | 13.3 |
| Renal ca. A498 | 23.2 | Thyroid (female) | 9.5 |
| Renal ca. ACHN | 12.4 | Pancreatic ca. CAPAN2 | 44.8 |
| Renal ca. UO-31 | 27.7 | Pancreas Pool | 21.6 |

[1571] TABLE BHE
Panel 4D
Column A - Rel. Exp. (%) Ag1179, Run 139820117
Column B - Rel. Exp. (%) Ag3287, Run 164633941

| Tissue Name | A | B | Tissue Name | A | B |
|---|---|---|---|---|---|
| Secondary Th1 act | 46.0 | 55.5 | HUVEC IL-1 beta | 5.9 | 9.9 |
| Secondary Th2 act | 76.3 | 71.7 | HUVEC IFN gamma | 21.3 | 65.1 |
| Secondary Tr1 act | 38.4 | 49.7 | HUVEC TNF alpha + IFN gamma | 10.7 | 25.9 |
| Secondary Th1 rest | 15.0 | 18.2 | HUVEC TNF alpha + IL4 | 17.1 | 23.5 |
| Secondary Th2 rest | 18.8 | 18.8 | HUVEC IL-11 | 9.3 | 14.4 |
| Secondary Tr1 rest | 10.7 | 23.5 | Lung Microvascular EC none | 17.6 | 26.8 |
| Primary Th1 act | 59.5 | 52.1 | Lung Microvascular EC TNF alpha + | 10.9 | 21.0 |
| | | | IL-1 beta | | |
| Primary Th2 act | 47.0 | 40.1 | Microvascular Dermal EC none | 37.9 | 26.1 |
| Primary Tr1 act | 75.3 | 68.8 | Microsvasular Dermal EC TNF alpha + | 21.3 | 17.7 |
| | | | IL-1 beta | | |
| Primary Th1 rest | 52.1 | 60.3 | Bronchial epithelium TNF alpha + | 32.5 | 33.4 |
| | | | IL1 beta | | |
| Primary Th2 rest | 30.1 | 33.9 | Small airway epithelium none | 11.9 | 19.8 |
| Primary Tr1 rest | 25.3 | 25.7 | Small airway epithelium TNF alpha + | 58.6 | 73.2 |
| | | | IL-1 beta | | |
| CD4SRA CD4 lymphocyte | 25.0 | 40.1 | Coronery artery SMC rest | 15.6 | 22.5 |
| act | | | | | |
| CD45RO CD4 lymphocyte | 56.3 | 63.7 | Coronery artery SMC TNF alpha + | 14.9 | 13.6 |
| act | | | IL-1 beta | | |
| CD8 lymphocyte act | 35.6 | 53.6 | Astrocytes rest | 15.2 | 21.8 |
| Secondary CD8 | 44.4 | 48.3 | Astrocytes TNF alpha + IL-1 beta | 17.3 | 19.6 |
| lymphocyte rest | | | | | |
| Secondary CD8 | 29.1 | 21.3 | KU-812 (Basophil) rest | 39.0 | 59.9 |
| lymphocyte act | | | | | |
| CD4 lymphocyte none | 16.5 | 22.5 | KU-812 (Basophil) PMA/ionomycin | 83.5 | 83.5 |
| 2ry Th1/Th2/Tr1 anti- | 31.4 | 25.2 | CCD1106 (Keratinocytes) none | 16.4 | 24.1 |
| CD95 CH11 | | | | | |
| LAK cells rest | 40.6 | 43.8 | 93580 CCD1106 (Keratinocytes) | 54.7 | 25.0 |
| | | | TNFa and IFNg | | |
| LAK cells IL-2 | 37.1 | 42.6 | Liver cirrhosis | 6.0 | 6.8 |
| LAK cells IL-2 + IL-12 | 35.8 | 34.2 | Lupus kidney | 17.1 | 10.4 |
| LAK cells IL-2 + IFN | 39.8 | 42.0 | NCI-H292 none | 29.5 | 35.4 |
| gamma | | | | | |
| LAK cells IL-2 + IL-18 | 28.3 | 42.0 | NCI-H292 IL-4 | 41.8 | 73.2 |
| LAK cells PMA/ionomycin | 18.4 | 19.8 | NCI-H292 IL-9 | 35.4 | 48.6 |
| NK Cells IL-2 rest | 18.3 | 26.2 | NCI-H292 IL-13 | 39.8 | 40.9 |
| Two Way MLR 3 day | 27.9 | 50.0 | NCI-H292 IFN gamma | 24.5 | 48.3 |
| Two Way MLR 5 day | 21.9 | 29.5 | HPAEC none | 20.0 | 29.5 |
| Two Way MLR 7 day | 19.3 | 19.6 | HPAEC TNF alpha + IL-1 beta | 18.9 | 23.7 |
| PBMC rest | 10.8 | 11.5 | Lung fibroblast none | 20.0 | 22.8 |
| PBMC PWM | 100.0 | 94.6 | Lung fibroblast TNF alpha + IL-1 | 9.9 | 15.5 |
| | | | beta | | |
| PBMC PHA-L | 62.0 | 49.0 | Lung fibroblast IL-4 | 26.2 | 42.0 |
| Ramos (B cell) none | 69.7 | 39.8 | Lung fibroblast IL-9 | 19.3 | 28.5 |
| Ramos (B cell) ionomycin | 93.3 | 100.0 | Lung fibroblast IL-13 | 41.5 | 27.9 |
| B lymphocytes PWM | 79.6 | 91.4 | Lung fibroblast IFN gamma | 34.6 | 43.5 |
| B lymphocytes CD40L and | 40.6 | 59.0 | Dermal fibroblast CCD1070 rest | 47.3 | 48.3 |
| IL-4 | | | | | |
| EOL-1 dbcAMP | 43.2 | 76.3 | Dermal fibroblast CCD1070 TNF | 47.6 | 67.4 |
| | | | alpha | | |
| EOL-1 dbcAMP | 28.9 | 23.8 | Dermal fibroblast CCD1070 IL-1 | 31.4 | 34.6 |
| PMA/ionomycin | | | beta | | |
| Dendritic cells none | 30.8 | 36.3 | Dermal fibroblast IFN gamma | 10.2 | 18.6 |
| Dendritic cells LPS | 32.8 | 44.4 | Dermal fibroblast IL-4 | 23.7 | 24.8 |
| Dendritic cells anti-CD40 | 35.6 | 38.4 | IBD Colitis 2 | 2.6 | 2.8 |
| Monocytes rest | 28.1 | 37.9 | IBD Crohn's | 1.1 | 1.4 |
| Monocytes LPS | 37.9 | 24.3 | Colon | 17.0 | 23.7 |
| Macrophages rest | 58.2 | 67.4 | Lung | 13.9 | 21.6 |
| Macrophages LPS | 69.3 | 40.9 | Thymus | 39.0 | 31.6 |
| HUVEC none | 18.7 | 23.5 | Kidney | 40.6 | 63.3 |
| HUVEC starved | 24.8 | 34.9 | | | |

[1572] TABLE BHF
general oncology screening panel_v_2.4
Column A - Rel. Exp.(%) Ag3287, Run 268695261

| Tissue Name | A |
|---|---|
| Colon cancer 1 | 36.1 |
| Colon NAT 1 | 11.3 |
| Colon cancer 2 | 34.6 |
| Colon NAT 2 | 20.0 |
| Colon cancer 3 | 100.0 |
| Colon NAT 3 | 22.2 |
| Colon malignant cancer 4 | 100.0 |
| Colon NAT 4 | 15.1 |
| Lung cancer 1 | 48.6 |
| Lung NAT 1 | 5.4 |
| Lung cancer 2 | 95.9 |
| Lung NAT 2 | 4.6 |
| Squamous cell carcinoma 3 | 51.4 |
| Lung NAT 3 | 3.5 |
| Metastatic melanoma 1 | 28.9 |
| Melanoma 2 | 5.6 |
| Melanoma 3 | 4.9 |
| Metastatic melanoma 4 | 76.8 |
| Metastatic melanoma 5 | 59.5 |
| Bladder cancer 1 | 2.4 |
| Bladder NAT 1 | 0.0 |
| Bladder cancer 2 | 9.5 |
| Bladder NAT 2 | 0.8 |
| Bladder NAT 3 | 1.4 |
| Bladder NAT 4 | 5.3 |
| Prostate adenocarcinoma 1 | 30.1 |
| Prostate adenocarcinoma 2 | 6.3 |
| Prostate adenocarcinoma 3 | 15.6 |
| Prostate adenocarcinoma 4 | 21.6 |
| Prostate NAT 5 | 14.3 |
| Prostate adenocarcinoma 6 | 12.4 |
| Prostate adenocarcinoma 7 | 10.8 |
| Prostate adenocarcinoma 8 | 3.8 |
| Prostate adenocarcinoma 9 | 31.9 |
| Prostate NAT 10 | 3.3 |
| Kidney cancer 1 | 31.9 |
| Kidney NAT 1 | 21.8 |
| Kidney cancer 2 | 78.5 |
| Kidney NAT 2 | 23.5 |
| Kidney cancer 3 | 30.6 |
| Kidney NAT 3 | 7.7 |
| Kidney cancer 4 | 16.0 |
| Kidney NAT 4 | 11.3 |

[1573] General_screening_panel_v1.4 Summary: Ag3287—This gene showed moderate to high expression in all samples on this panel, with the highest level of expression in breast cancer cell line BT 549 (CT=25.0). The widespread expression of this gene indicates that the gene product may be involved in cell differentiation and growth.

[1574] This gene was widely expressed among tissues with metabolic function, including adipose, adult and fetal skeletal muscle and heart, the pancreas, fetal liver, and the adrenal, thyroid, and pituitary glands. This expression profile indicates that this gene product is involved in metabolic function. Therapeutic modulation of this gene, expressed protein and/or use of antibodies or small molecule drugs targeting the gene or gene product are useful in the treatment of metabolic disorders, such as obesity and diabetes.

[1575] This gene showed widespread expression of this gene in the brain. This indicates that the protein encoded by this gene is important for normal neurological function. Therapeutic modulation of this gene, expressed protein and/or use of antibodies or small molecule drugs targeting the gene or gene product are useful in the treatment of neurodegenerative disorders, such as Alzheimer's disease and Parkinson's disease.

[1576] Panel 4D Summary: Ag1179/Ag3287 This gene was expressed at high to moderate levels in a wide range of cell types of significance in the immune response in health and disease. These cells include members of the T-cell, B-cell, endothelial cell, macrophage/monocyte, and peripheral blood mononuclear cell family, as well as epithelial and fibroblast cell types from lung and skin, and normal tissues represented by colon, lung, thymus and kidney. This ubiquitous pattern of expression indicates that this gene product may be involved in homeostatic processes for these and other cell types and tissues.

[1577] This pattern is in agreement with the expression profile in General_screening_panel_v1.5 and also indicates a role for the gene product in cell survival and proliferation.

[1578] Therapeutic modulation of this gene, expressed protein and/or use of antibodies or small molecule drugs targeting the gene or gene product are useful in the treatment of autoimmune and inflammatory diseases such as asthma, allergies, inflammatory bowel disease, lupus erythematosus, psoriasis, rheumatoid arthritis, and osteoarthritis.

[1579] general oncology screening panel_v_{—}2.4 Summary: Ag3287 Highest expression was detected in a colon cancer sample (CT=26.4), with prominent expression seen in squamous cell carcinoma and melanoma samples. This gene was overexpressed in colon and lung cancers when compared to expression in the normal adjacent tissues. Expression of this gene is useful as a marker of colon and lung cancers. Therapeutic modulation of this gene, expressed protein and/or use of antibodies or small molecule drugs targeting the gene or gene product are useful in the treatment of colon and lung cancers.

[1580] BI. CG57758-03: Renal Sodium/Dicarboxylate Cotransporter.

[1581] Expression of gene CG57758-03 was assessed using the primer-probe sets Ag3326 and Ag3692, described in Tables BIA and BIB. Results of the RTQ-PCR runs are shown in Tables BIC, BID and BIE. CG57758-03 represents a full-length physical clone of the CG57758-01 gene.

TABLE BIA
Probe Name Ag3326

| | | | | SEQ |
|---|---|---|---|---|
| | | | Start | ID |
| Primers | Sequences | Length | Position | No |
| Forward | 5′-ccatttactggtgcacagaagt-3′ | 22 | 138 | 1404 |
| Probe | TET-5′-atccctctggctgtcacctctctcat-3′- | 26 | 161 | 1405 |
| | TAMRA | | | |
| Reverse | 5′-ggagtccagaatctggaagagt-3′ | 22 | 205 | 1406 |

[1582] TABLE BIB
Probe Name Ag3692

| | | | | SEQ |
|---|---|---|---|---|
| | | | Start | ID |
| Primers | Sequences | Length | Position | No |
| Forward | 5′-ccatttactggtgcacagaagt-3′ | 22 | 138 | 1407 |
| Probe | TET-5′-atccctctggctgtcacctctctcat-3′- | 26 | 161 | 1408 |
| | TAMRA | | | |
| Reverse | 5′-ggagtccagaatctggaagagt-3′ | 22 | 205 | 1409 |

[1583] TABLE BIC
General_screening_panel_v1.4
Column A - Rel. Exp. (%) Ag3326, Run 215678613
Column B - Rel. Exp. (%) Ag3692, Run 217131191

| Tissue Name | A | B | Tissue Name | A | B |
|---|---|---|---|---|---|
| Adipose | 0.0 | 0.0 | Renal Ca. TK-10 | 11.4 | 12.0 |
| Melanoma* Hs688(A).T | 0.0 | 0.0 | Bladder | 0.0 | 0.1 |
| Melanoma* Hs688(B).T | 0.1 | 0.0 | Gastric ca. (liver met.) NCI-N87 | 0.0 | 0.0 |
| Melanoma* M14 | 0.0 | 0.0 | Gastric ca. KATO III | 0.0 | 0.0 |
| Melanoma* LOXIMVI | 0.0 | 0.0 | Colon ca. SW-948 | 0.0 | 0.0 |
| Melanoma* SK-MEL-5 | 0.0 | 0.0 | Colon ca. SW480 | 0.0 | 0.0 |
| Squamous cell carcinoma | 0.9 | 0.7 | Colon ca.* (SW480 met) SW620 | 0.0 | 0.0 |
| SCC-4 | | | | | |
| Testis Pool | 0.1 | 0.2 | Colon ca. HT29 | 0.0 | 0.0 |
| Prostate ca.* (bone met) PC-3 | 0.0 | 0.0 | Colon ca. HCT-116 | 0.0 | 0.0 |
| Prostate Pool | 0.0 | 0.0 | Colon ca. CaCo-2 | 0.0 | 0.0 |
| Placenta | 0.0 | 0.0 | Colon cancer tissue | 0.1 | 0.0 |
| Uterus Pool | 0.0 | 0.0 | Colon ca. SW1116 | 0.0 | 0.0 |
| Ovarian ca. OVCAR-3 | 0.0 | 0.0 | Colon ca. Colo-205 | 0.0 | 0.0 |
| Ovarian ca. SK-OV-3 | 0.0 | 0.0 | Colon ca. SW-48 | 0.0 | 0.0 |
| Ovarian ca. OVCAR-4 | 0.1 | 0.0 | Colon Pool | 0.6 | 0.0 |
| Ovarian ca. OVCAR-5 | 0.0 | 0.0 | Small Intestine Pool | 0.1 | 0.0 |
| Ovarian ca. IGROV-1 | 0.0 | 0.0 | Stomach Pool | 0.0 | 0.0 |
| Ovarian ca. OVCAR-8 | 2.8 | 2.2 | Bone Marrow Pool | 0.0 | 0.1 |
| Ovary | 0.7 | 0.6 | Fetal Heart | 0.0 | 0.0 |
| Breast ca. MCF-7 | 0.0 | 0.0 | Heart Pool | 0.0 | 0.0 |
| Breast ca. MDA-MB-231 | 0.0 | 0.0 | Lymph Node Pool | 0.1 | 0.0 |
| Breast ca. BT 549 | 0.6 | 0.8 | Fetal Skeletal Muscle | 0.0 | 0.0 |
| Breast ca. T47D | 0.0 | 0.0 | Skeletal Muscle Pool | 0.0 | 0.0 |
| Breast ca. MDA-N | 0.0 | 0.0 | Spleen Pool | 0.4 | 0.2 |
| Breast Pool | 0.0 | 0.1 | Thymus Pool | 0.0 | 0.0 |
| Trachea | 0.2 | 0.1 | CNS cancer (glio/astro) U87-MG | 0.0 | 0.0 |
| Lung | 0.0 | 0.0 | CNS cancer (glio/astro) U-118- | 0.0 | 0.0 |
| | | | MG | | |
| Fetal Lung | 0.2 | 0.1 | CNS cancer (neuro; met) SK-N- | 0.0 | 0.0 |
| | | | AS | | |
| Lung ca. NCI-N417 | 0.0 | 0.0 | CNS cancer (astro) SF-539 | 0.0 | 0.0 |
| Lung ca. LX-1 | 0.0 | 0.0 | CNS cancer (astro) SNB-75 | 0.0 | 0.0 |
| Lung ca. NCI-H146 | 0.0 | 0.0 | CNS cancer (glio) SNB-19 | 0.0 | 0.0 |
| Lung ca. SHP-77 | 0.0 | 0.0 | CNS cancer (glio) SF-295 | 0.1 | 0.1 |
| Lung ca. A549 | 0.0 | 0.1 | Brain (Amygdala) Pool | 0.4 | 0.4 |
| Lung ca. NCI-H526 | 2.0 | 0.0 | Brain (cerebellum) | 1.4 | 1.0 |
| Lung ca. NCI-H23 | 0.7 | 0.6 | Brain (fetal) | 0.7 | 0.4 |
| Lung ca. NCI-H460 | 0.0 | 0.0 | Brain (Hippocampus) Pool | 0.5 | 0.7 |
| Lung ca. HOP-62 | 0.1 | 0.2 | Cerebral Cortex Pool | 1.4 | 1.5 |
| Lung ca. NCI-H522 | 0.0 | 0.0 | Brain (Substantia nigra) Pool | 1.4 | 1.4 |
| Liver | 28.7 | 24.1 | Brain (Thalamus) Pool | 1.1 | 0.9 |
| Fetal Liver | 100.0 | 100.0 | Brain (whole) | 4.1 | 3.7 |
| Liver ca. HepG2 | 29.5 | 26.2 | Spinal Cord Pool | 0.1 | 0.2 |
| Kidney Pool | 0.0 | 0.0 | Adrenal Gland | 2.6 | 1.9 |
| Fetal Kidney | 0.1 | 0.1 | Pituitary gland Pool | 0.0 | 0.2 |
| Renal ca. 786-0 | 0.0 | 0.0 | Salivary Gland | 40.9 | 35.1 |
| Renal ca. A498 | 0.0 | 0.0 | Thyroid (female) | 0.0 | 0.0 |
| Renal ca. ACHN | 0.0 | 0.0 | Pancreatic ca. CAPAN2 | 0.5 | 0.8 |
| Renal ca. UO-31 | 0.0 | 0.0 | Pancreas Pool | 0.0 | 0.0 |

[1584] TABLE BID
Panel 4.1D
Column A - Rel. Exp.(%) Ag3692, Run 169987356

| Tissue Name | A | Tissue Name | A |
|---|---|---|---|
| Secondary Th1 act | 0.0 | HUVEC IL-1beta | 0.0 |
| Secondary Th2 act | 0.0 | HUVEC IFN gamma | 0.0 |
| Secondary Tr1 act | 0.0 | HUVEC TNF alpha + IFN gamma | 0.0 |
| Secondary Th1 rest | 0.0 | HUVEC TNF alpha + IL4 | 0.0 |
| Secondary Th2 rest | 0.0 | HUVEC IL-11 | 0.0 |
| Secondary Tr1 rest | 0.0 | Lung Microvascular EC none | 0.0 |
| Primary Th1 act | 0.0 | Lung Microvascular EC TNFalpha + IL- | 0.0 |
| | | 1beta | |
| Primary Th2 act | 0.0 | Microvascular Dermal EC none | 11.3 |
| Primary Tr1 act | 4.2 | Microsvasular Dermal EC TNFalpha + IL- | 0.0 |
| | | 1beta | |
| Primary Th1 rest | 0.0 | Bronchial epithelium TNFalpha + IL1beta | 28.5 |
| Primary Th2 rest | 0.0 | Small airway epithelium none | 5.7 |
| Primary Tr1 rest | 0.0 | Small airway epithelium TNFalpha + IL- | 0.0 |
| | | 1beta | |
| CD45RA CD4 lymphocyte act | 3.9 | Coronery artery SMC rest | 0.0 |
| CD45RO CD4 lymphocyte act | 0.0 | Coronery artery SMC TNFalpha + IL-1beta | 0.0 |
| CD8 lymphocyte act | 0.0 | Astrocytes rest | 0.0 |
| Secondary CD8 lymphocyte rest | 0.0 | Astrocytes TNFalpha + IL-1beta | 0.0 |
| Secondary CD8 lymphocyte act | 0.0 | KU-812 (Basophil) rest | 3.6 |
| CD4 lymphocyte none | 0.0 | KU-812 (Basophil) PMA/ionomycin | 4.3 |
| 2ry Th1/Th2/Tr1 anti-CD95 | 0.0 | CCD1106 (Keratinocytes) none | 10.7 |
| CH11 | | | |
| LAK cells rest | 0.0 | CCD1106 (Keratinocytes) TNFalpha + IL- | 0.0 |
| | | 1beta | |
| LAK cells IL-2 | 0.0 | Liver cirrhosis | 94.0 |
| LAK cells IL-2 + IL-12 | 0.0 | NCI-H292 none | 0.0 |
| LAK cells IL-2 + IFN gamma | 0.0 | NCI-H292 IL-4 | 0.0 |
| LAK cells IL-2 + IL-18 | 0.0 | NCI-H292 IL-9 | 0.0 |
| LAK cells PMA/ionomycin | 0.0 | NCI-H292 IL-13 | 0.0 |
| NK Cells IL-2 rest | 0.0 | NCI-H292 IFN gamma | 0.0 |
| Two Way MLR 3 day | 0.0 | HPAEC none | 0.0 |
| Two Way MLR 5 day | 3.2 | HPAEC TNF alpha + IL-1 beta | 0.0 |
| Two Way MLR 7 day | 0.0 | Lung fibroblast none | 0.0 |
| PBMC rest | 0.0 | Lung fibroblast TNF alpha + IL-1 beta | 0.0 |
| PBMC PWM | 0.0 | Lung fibroblast IL-4 | 0.0 |
| PBMC PHA-L | 0.0 | Lung fibroblast IL-9 | 0.0 |
| Ramos (B cell) none | 0.0 | Lung fibroblast IL-13 | 0.0 |
| Ramos (B cell) ionomycin | 0.0 | Lung fibroblast IFN gamma | 0.0 |
| B lymphocytes PWM | 0.0 | Dermal fibroblast CCD1070 rest | 0.0 |
| B lymphocytes CD40L and IL-4 | 0.0 | Dermal fibroblast CCD1070 TNF alpha | 0.0 |
| EOL-1 dbcAMP | 0.0 | Dermal fibroblast CCD1070 IL-1 beta | 0.0 |
| EOL-1 dbcAMP | 0.0 | Dermal fibroblast IFN gamma | 0.0 |
| PMA/ionomycin | | | |
| Dendritic cells none | 0.0 | Dermal fibroblast IL-4 | 0.0 |
| Dendritic cells LPS | 0.0 | Dermal Fibroblasts rest | 0.0 |
| Dendritic cells anti-CD40 | 0.0 | Neutrophils TNFa + LPS | 0.0 |
| Monocytes rest | 0.0 | Neutrophils rest | 0.0 |
| Monocytes LPS | 0.0 | Colon | 0.0 |
| Macrophages rest | 0.0 | Lung | 0.0 |
| Macrophages LPS | 0.0 | Thymus | 2.4 |
| HUVEC none | 0.0 | Kidney | 100.0 |
| HUVEC starved | 0.0 | | |

[1585] General_screening_panel_v1.4 Summary: This gene was highly expressed in fetal liver (CT=26.5-27.0) and moderately expressed in adult liver and liver cancer cell line HepG2. This result agrees with the results seen in Panel 5 (expression in HepG2). These results are in agreement with published data that show a novel sodium dicarboxylate transporter in brain, choroid plexus kidney, intestine and liver (Chen X Z, Shayakul C, Berger U V, Tian W, Hediger M A. Characterization of a rat Na+-dicarboxylate cotransporter. J Biol Chem 1998 Aug. 14; 273(33):20972-81; Pajor A M, Gangula R, Yao X. Cloning and functional characterization of a high-affinity Na(+)/dicarboxylate cotransporter from mouse brain. Am J Physiol Cell Physiol 2001 May; 280(5):C 1215-23). Expression of this gene is useful as a marker for liver derived tissue.

[1586] This gene was expressed at low levels throughout the CNS, including in amygdala, substantia nigra, thalamus, cerebellum, and cerebral cortex. Therapeutic modulation of this gene, expressed protein and/or use of antibodies or small molecule drugs targeting the gene or gene product are useful in the treatment of central nervous system disorders such as Parkinson's disease, epilepsy, multiple sclerosis, schizophrenia and depression.

[1587] Low but significant levels of expression were also seen in the adrenal gland. Therapeutic modulation of this gene, expressed protein and/or use of antibodies or small molecule drugs targeting the gene or gene product are useful in the treatment of metabolic disorders of the adrenal gland, including adrenoleukodystrophy and congenital adrenal hyperplasia.

[1588] Panel 4.1D Summary: Ag3692 Significant expression of this gene was seen only in kidney and a liver cirrhosis sample (CTs=34.0). These results confirm that this gene was expressed in liver derived samples. The presence in the kidney was also in agreement with published results. Please see Panel 1.4. Therapeutic modulation of this gene, expressed protein and/or use of antibodies or small molecule drugs targeting the gene or gene product are useful in the treatment of kidney inflammation.

[1589] BJ. CG58504-01: ADAMTS12.

[1590] Expression of gene CG58504-01 was assessed using the primer-probe set Ag2475, described in Table BJA. Results of the RTQ-PCR runs are shown in Tables BJB, BJC, BJD, BJE and BJF.

TABLE BJA
Probe Name Ag2475

| | | | | SEQ |
|---|---|---|---|---|
| | | | Start | ID |
| Primers | Sequences | Length | Position | No |
| Forward | 5′-agagtgacctcaatcctgttca-3′ | 22 | 1318 | 1410 |
| Probe | TET-5′-acgtggctgtccttctcaccagaaag-3′- | 26 | 1345 | 1411 |
| | TAMRA | | | |
| Reverse | 5′-gattgaaaccagcacagatgtc-3′ | 22 | 1371 | 1412 |

[1591] TABLE BJB
HASS Panel v1.0
Column A - Rel. Exp.(%) Ag2475, Run 268366853

| Tissue Name | A |
|---|---|
| MGF-7 C1 | 0.1 |
| MCF-7 C2 | 0.0 |
| MCF-7 C3 | 0.0 |
| MCF-7 C4 | 0.0 |
| MCF-7 C5 | 0.0 |
| MCF-7 C6 | 0.0 |
| MCF-7 C7 | 0.0 |
| MCF-7 C9 | 0.0 |
| MCF-7 C10 | 0.0 |
| MCF-7 C11 | 0.0 |
| MCF-7 C12 | 0.0 |
| MCF-7 C13 | 0.0 |
| MCF-7 C15 | 0.0 |
| MCF-7 C16 | 0.0 |
| MCF-7 C17 | 0.0 |
| T24 D1 | 16.2 |
| T24 D2 | 14.4 |
| T24 D3 | 40.1 |
| T24 D4 | 28.1 |
| T24 D5 | 31.4 |
| T24 D6 | 23.2 |
| T24 D7 | 8.0 |
| T24 D9 | 7.2 |
| T24 D10 | 10.3 |
| T24 D11 | 9.5 |
| T24 D12 | 14.8 |
| T24 D13 | 3.8 |
| T24 D15 | 4.6 |
| T24 D16 | 6.7 |
| T24 D17 | 13.0 |
| CAPaN B1 | 0.0 |
| CAPaN B2 | 0.0 |
| CAPaN B3 | 0.1 |
| CAPaN B4 | 0.2 |
| CAPaN B5 | 0.1 |
| CAPaN B6 | 0.2 |
| CAPaN B7 | 0.0 |
| CAPaN B8 | 0.1 |
| CAPaN B9 | 0.1 |
| CAPaN B10 | 0.4 |
| CAPaN B11 | 0.1 |
| CAPaN B12 | 0.3 |
| CAPaN B13 | 0.1 |
| CAPaN B14 | 0.0 |
| CAPaN B15 | 0.0 |
| CAPaN B16 | 0.2 |
| CAPaN B17 | 0.3 |
| U87-MG F1 (B) | 17.3 |
| U87-MG F2 | 12.9 |
| U87-MG F3 | 17.4 |
| U87-MG F4 | 27.4 |
| U87-MG F5 | 66.0 |
| U87-MG F6 | 84.7 |
| U87-MG F7 | 9.2 |
| U87-MG F8 | 10.6 |
| U87-MG F9 | 5.4 |
| U87-MG F10 | 61.1 |
| U87-MG F11 | 87.7 |
| U87-MG F12 | 45.7 |
| U87-MG F13 | 15.7 |
| U87-MG F14 | 25.2 |
| U87-MG F15 | 16.3 |
| U87-MG F16 | 56.6 |
| U87-MG F17 | 73.2 |
| LnCAP A1 | 0.0 |
| LnCAP A2 | 0.0 |
| LnCAP A3 | 0.0 |
| LnCAP A4 | 0.1 |
| LnGAP A5 | 0.0 |
| LnCAP A6 | 0.0 |
| LnCAP A7 | 0.0 |
| LnCAP A8 | 0.0 |
| LnCAP A9 | 0.1 |
| LnCAP A10 | 0.0 |
| LnCAP A11 | 0.0 |
| LnCAP A12 | 0.0 |
| LnCAP A13 | 0.1 |
| LnCAP A14 | 0.0 |
| LnCAP A15 | 0.0 |
| LnCAP A16 | 0.0 |
| LnCAP A17 | 0.1 |
| Primary Astrocytes | 100.0 |
| Primary Renal Proximal Tubule Epithelial cell A2 | 4.4 |
| Primary melanocytes A5 | 4.5 |
| 126443 - 341 medullo | 0.0 |
| 126444 - 487 medullo | 0.0 |
| 126445 - 425 medullo | 0.3 |
| 126446 - 690 medullo | 1.0 |
| 126447 - 54 adult glioma | 17.6 |
| 126448 - 245 adult glioma | 13.2 |
| 126449 - 317 adult glioma | 0.2 |
| 126450 - 212 glioma | 4.4 |
| 126451 - 456 glioma | 0.3 |

[1592] TABLE BJC
Panel 1.3D
Column A - Rel. Exp.(%) Ag2475, Run 162401130

| Tissue Name | A | Tissue Name | A |
|---|---|---|---|
| Liver adenocarcinoma | 0.0 | Kidney (fetal) | 5.4 |
| Pancreas | 0.0 | Renal ca. 786-0 | 0.0 |
| Pancreatic ca. CAPAN 2 | 0.1 | Renal ca. A498 | 8.1 |
| Adrenal gland | 0.5 | Renal ca. RXF 393 | 5.5 |
| Thyroid | 0.0 | Renal ca. ACHN | 0.0 |
| Salivary gland | 0.0 | Renal ca. UO-31 | 23.8 |
| Pituitary gland | 0.0 | Renal ca. TK-10 | 1.5 |
| Brain (fetal) | 0.0 | Liver | 0.2 |
| Brain (whole) | 0.1 | Liver (fetal) | 0.8 |
| Brain (amygdala) | 0.0 | Liver ca. (hepatoblast) HepG2 | 0.0 |
| Brain (cerebellum) | 0.0 | Lung | 1.9 |
| Brain (hippocampus) | 0.0 | Lung (fetal) | 4.3 |
| Brain (substantia nigra) | 0.1 | Lung ca. (small cell) LX-1 | 2.0 |
| Brain (thalamus) | 0.5 | Lung ca. (small cell) NCI-H69 | 0.0 |
| Cerebral Cortex | 0.3 | Lung ca. (s. cell var.) SHP-77 | 0.0 |
| Spinal cord | 0.2 | Lung ca. (large cell)NCI-H460 | 0.2 |
| glio/astro U87-MG | 14.9 | Lung ca. (non-sm. cell) A549 | 0.3 |
| glio/astro U-118-MG | 2.6 | Lung ca. (non-s. cell) NCI-H23 | 0.0 |
| astrocytoma SW1783 | 67.8 | Lung ca. (non-s. cell) HOP-62 | 37.1 |
| neuro*; met SK-N-AS | 0.0 | Lung ca. (non-s. cl) NCI-H522 | 0.0 |
| astrocytoma SF-539 | 2.9 | Lung ca. (squam.) SW 900 | 0.0 |
| astrocytoma SNB-75 | 6.5 | Lung ca. (squam.) NCI-H596 | 0.0 |
| glioma SNB-19 | 1.1 | Mammary gland | 3.9 |
| glioma U251 | 0.7 | Breast ca.* (pl. ef) MCF-7 | 0.0 |
| glioma SF-295 | 0.4 | Breast ca.* (pl. ef) MDA-MB-231 | 17.1 |
| Heart (Fetal) | 7.7 | Breast ca.* (p1. ef) T47D | 0.0 |
| Heart | 0.5 | Breast ca. BT-549 | 6.0 |
| Skeletal muscle (Fetal) | 100.0 | Breast ca. MDA-N | 0.0 |
| Skeletal muscle | 0.3 | Ovary | 13.7 |
| Bone marrow | 0.0 | Ovarian ca. OVCAR-3 | 0.0 |
| Thymus | 0.3 | Ovarian ca. OVCAR-4 | 0.0 |
| Spleen | 0.2 | Ovarian ca. OVCAR-5 | 0.0 |
| Lymph node | 0.0 | Ovarian ca. OVCAR-8 | 3.5 |
| Colorectal | 1.3 | Ovarian ca. IGROV-1 | 0.0 |
| Stomach | 0.3 | Ovarian ca. (ascites) SK-OV-3 | 0.5 |
| Small intestine | 0.4 | Uterus | 0.4 |
| Colon ca. SW480 | 0.0 | Placenta | 2.0 |
| Colon ca.* SW620 (SW480 met) | 0.3 | Prostate | 0.2 |
| Colon ca. HT29 | 0.0 | Prostate ca.* (bone met) PC-3 | 0.0 |
| Colon ca. HCT-116 | 0.0 | Testis | 1.3 |
| Colon ca. CaCo-2 | 0.0 | Melanoma Hs688(A).T | 9.5 |
| CC Well to Mod Diff(ODO3866) | 24.8 | Melanoma* (met) Hs688(B).T | 22.1 |
| Colon ca. HCC-2998 | 0.0 | Melanoma UACC-62 | 0.0 |
| Gastric ca. (liver met) NCI-N87 | 0.0 | Melanoma M14 | 0.0 |
| Bladder | 6.7 | Melanoma LOX IMVI | 1.8 |
| Trachea | 0.1 | Melanoma (met) SK-MEL-5 | 0.0 |
| Kidney | 0.2 | Adipose | 7.9 |

[1593] TABLE BJD
Panel 2D
Column A - Rel. Exp.(%) Ag2475, Run 165296233

| Tissue Name | A | Tissue Name | A |
|---|---|---|---|
| Normal Colon | 21.2 | Kidney Margin 8120608 | 1.2 |
| CC Well to Mod Diff(ODO3866) | 40.3 | Kidney Cancer 8120613 | 2.8 |
| CC Margin (ODO3866) | 4.7 | Kidney Margin 8120614 | 4.1 |
| CC Gr.2 rectosigmoid (ODO3868) | 29.1 | Kidney Cancer 9010320 | 42.6 |
| CC Margin (ODO3868) | 4.7 | Kidney Margin 9010321 | 11.3 |
| CC Mod Diff (ODO3920) | 8.8 | Normal Uterus | 6.9 |
| CC Margin (ODO3920) | 6.6 | Uterine Cancer 064011 | 27.5 |
| CC Gr.2 ascend colon (ODO3921) | 60.3 | Normal Thyroid | 2.2 |
| CC Margin (ODO3921) | 13.6 | Thyroid Cancer | 0.8 |
| CC from Partial Hepatectomy | 53.2 | Thyroid Cancer A302152 | 7.4 |
| (ODO4309) Mets | | | |
| Liver Margin (ODO4309) | 6.7 | Thyroid Margin A302153 | 6.3 |
| Colon mets to lung (OD04451-01) | 18.3 | Normal Breast | 59.9 |
| Lung Margin (OD04451-02) | 5.8 | Breast Cancer | 42.0 |
| Normal Prostate 6546-1 | 1.0 | Breast Cancer (OD04590-01) | 51.4 |
| Prostate Cancer (OD04410) | 7.4 | Breast Cancer Mets (OD04590-03) | 65.1 |
| Prostate Margin (OD04410) | 14.5 | Breast Cancer Metastasis | 4.3 |
| Prostate Cancer (OD04720-01) | 7.1 | Breast Cancer | 67.8 |
| Prostate Margin (OD04720-02) | 14.2 | Breast Cancer | 86.5 |
| Normal Lung | 23.0 | Breast Cancer 9100266 | 19.6 |
| Lung Met to Muscle (ODO4286) | 15.5 | Breast Margin 9100265 | 48.3 |
| Muscle Margin (ODO4286) | 9.7 | Breast Cancer A209073 | 93.3 |
| Lung Malignant Cancer (OD03126) | 100.0 | Breast Margin A209073 | 53.6 |
| Lung Margin (OD03126) | 27.2 | Normal Liver | 5.8 |
| Lung Cancer (OD04404) | 78.5 | Liver Cancer | 1.5 |
| Lung Margin (OD04404) | 25.3 | Liver Cancer 1025 | 4.8 |
| Lung Cancer (OD04565) | 54.7 | Liver Cancer 1026 | 16.5 |
| Lung Margin (OD04565) | 24.0 | Liver Cancer 6004-T | 5.7 |
| Lung Cancer (OD04237-01) | 54.7 | Liver Tissue 6004-N | 5.9 |
| Lung Margin (OD04237-02) | 38.7 | Liver Cancer 6005-T | 14.0 |
| Ocular Mel Met to Liver (ODO4310) | 0.4 | Liver Tissue 6005-N | 5.9 |
| Liver Margin (ODO4310) | 10.8 | Normal Bladder | 32.3 |
| Melanoma Metastasis | 4.7 | Bladder Cancer | 29.7 |
| Lung Margin (OD04321) | 15.1 | Bladder Cancer | 15.0 |
| Normal Kidney | 19.2 | Bladder Cancer (OD04718-01) | 48.0 |
| Kidney Ca, Nuclear grade 2 (OD04338) | 3.1 | Bladder Normal Adjacent | 17.6 |
| | | (OD04718-03) | |
| Kidney Margin (OD04338) | 6.7 | Normal Ovary | 9.5 |
| Kidney Ca Nuclear grade 1/2 | 1.4 | Ovarian Cancer | 71.7 |
| (OD04339) | | | |
| Kidney Margin (OD04339) | 9.9 | Ovarian Cancer (OD04768-07) | 2.7 |
| Kidney Ca, Clear cell type (OD04340) | 4.9 | Ovary Margin (OD04768-08) | 10.2 |
| Kidney Margin (OD04340) | 9.9 | Normal Stomach | 9.0 |
| Kidney Ca, Nuclear grade 3 (OD04348) | 17.0 | Gastric Cancer 9060358 | 4.0 |
| Kidney Margin (OD04348) | 6.1 | Stomach Margin 9060359 | 2.5 |
| Kidney Cancer (OD04622-O1) | 9.2 | Gastric Cancer 9060395 | 17.2 |
| Kidney Margin (OD04622-03) | 0.8 | Stomach Margin 9060394 | 5.7 |
| Kidney Cancer (OD04450-01) | 2.5 | Gastric Cancer 9060397 | 56.6 |
| Kidney Margin (OD04450-03) | 9.2 | Stomach Margin 9060396 | 1.8 |
| Kidney Cancer 8120607 | 3.2 | Gastric Cancer 064005 | 22.1 |

[1594] TABLE BJF
Panel 4D
Column A - Rel. Exp.(%) Ag2475, Run 163583185

| Tissue Name | A | Tissue Name | A |
|---|---|---|---|
| Secondary Th1 act | 0.0 | HUVEC IL-1beta | 0.2 |
| Secondary Th2 act | 0.0 | HUVEC IFN gamma | 0.3 |
| Secondary Tr1 act | 0.0 | HUVEC TNF alpha + IFN gamma | 0.1 |
| Secondary Th1 rest | 0.0 | HUVEC TNF alpha + IL4 | 0.0 |
| Secondary Th2 rest | 0.0 | HUVEC IL-11 | 0.1 |
| Secondary Tr1 rest | 0.0 | Lung Microvascular EC none | 0.0 |
| Primary Th1 act | 0.0 | Lung Microvascular EC TNFalpha + IL- | 0.0 |
| | | 1beta | |
| Primary Th2 act | 0.0 | Microvascular Dermal EC none | 0.7 |
| Primary Tr1 act | 0.0 | Microsvasular Dermal EC TNFalpha + IL- | 0.2 |
| | | 1beta | |
| Primary Th1 rest | 0.1 | Bronchial epithelium TNFalpha + IL1beta | 0.0 |
| Primary Th2 rest | 0.0 | Small airway epithelium none | 1.8 |
| Primary Trl rest | 0.0 | Small airway epithelium TNFalpha + IL- | 0.1 |
| | | 1beta | |
| CD45RA CD4 lymphocyte act | 3.9 | Coronery artery SMC rest | 100.0 |
| CD45RO CD4 lymphocyte act | 0.0 | Coronery artery SMC TNFalpha + IL-1beta | 29.9 |
| CD8 lymphocyte act | 0.0 | Astrocytes rest | 22.2 |
| Secondary CD8 lymphocyte rest | 0.0 | Astrocytes TNFalpha + IL-1beta | 24.5 |
| Secondary CD8 lymphocyte act | 0.0 | KU-812 (Basophil) rest | 0.0 |
| CD4 lymphocyte none | 0.0 | KU-812 (Basophil) PMA/ionomycin | 0.0 |
| 2ry Th1/Th2/Tr1 anti-CD95 | 0.0 | CCD1106 (Keratinocytes) none | 0.5 |
| CH11 | | | |
| LAK cells rest | 0.0 | CCD1106 (Keratinocytes) TNFalpha + IL- | 0.0 |
| | | 1beta | |
| LAK cells IL-2 | 0.0 | Liver cirrhosis | 1.9 |
| LAK cells IL-2 + IL-12 | 0.1 | Lupus kidney | 0.6 |
| LAK cells IL-2 + IFN gamma | 0.0 | NCI-H292 none | 1.7 |
| LAK cells IL-2 + IL-18 | 0.0 | NCI-H292 IL-4 | 1.9 |
| LAK cells PMA/ionomycin | 0.0 | NCI-H292 IL-9 | 6.2 |
| NK Cells IL-2 rest | 0.0 | NCI-H292 IL-13 | 1.9 |
| Two Way MLR 3 day | 0.0 | NCI-H292 IFN gamma | 0.9 |
| Two Way MLR 5 day | 0.0 | HPAEC none | 0.0 |
| Two Way MLR 7 day | 0.0 | HPAEC TNF alpha + IL-1 beta | 0.0 |
| PBMC rest | 0.0 | Lung fibroblast none | 4.3 |
| PBMC PWM | 0.0 | Lung fibroblast TNF alpha + IL-1 beta | 7.0 |
| PBMC PHA-L | 0.0 | Lung fibroblast IL-4 | 20.2 |
| Ramos (B cell) none | 0.0 | Lung fibroblast IL-9 | 13.4 |
| Ramos (B cell) ionomycin | 0.0 | Lung fibroblast IL-13 | 9.2 |
| B lymphocytes PWM | 0.0 | Lung fibroblast IFN gamma | 7.7 |
| B lymphocytes CD40L and IL-4 | 0.0 | Dermal fibroblast CCD1070 rest | 13.4 |
| EOL-1 dbcAMP | 0.0 | Dermal fibroblast CCD1070 TNF alpha | 51.4 |
| EOL-1 dbcAMP | 0.0 | Dermal fibroblast CCD1070 IL-1 beta | 12.9 |
| PMA/ionomycin | | | |
| Dendritic cells none | 0.0 | Dermal fibroblast IFN gamma | 3.0 |
| Dendritic cells LPS | 0.0 | Dermal fibroblast IL-4 | 37.9 |
| Dendritic cells anti-CD40 | 0.0 | IBD Colitis 2 | 0.0 |
| Monocytes rest | 0.0 | IBD Crohn's | 0.2 |
| Monocytes LPS | 0.0 | Colon | 1.9 |
| Macrophages rest | 0.0 | Lung | 20.7 |
| Macrophages LPS | 0.0 | Thymus | 0.6 |
| HUVEC none | 0.0 | Kidney | 0.1 |
| HUVEC starved | 0.1 | | |

[1595] HASS Panel v1.0 Summary: Ag2475 This gene was expressed in glioma samples and primary astrocytes in culture (highest expression CT=27.8) indicating a role in cell growth. Expression of this gene in U87-MG (a mixed glial/astrocytoma cell line) was repressed by reducing the oxygen content of the environment. Serum starvation of these cells induces expression. This effect was not observed in T24 (bladder cancer) cells and thus may reflect tissue specific regulation of this gene.

[1596] Panel 1.3D Summary: Ag2475 Highest expression of the CG58504-01 gene was seen in fetal skeletal muscle (CT=28.4). This expression was significantly higher than expression seen in the corresponding adult tissue (CT=36.9). In addition, the relative overexpression of this gene in fetal skeletal muscle indicates that the protein product may enhance muscular growth or development in the fetus and thus may also act in a regenerative capacity in the adult. Therapeutic modulation of this gene, expressed protein and/or use of antibodies or small molecule drugs targeting the gene or gene product are useful in restoring muscle mass or function in the treatment of muscle related diseases.

[1597] Low levels of expression were also seen in other metabolic tissues, including adipose and fetal heart, indicating a potential role for this gene in obesity and/or diabetes.

[1598] Moderate levels of expression were also seen in cell lines derived from brain cancer, breast cancer, renal cancer, lung cancer, colon cancer and melanoma. Since cell lines and fetal tissues are, on the whole, more proliferative than normal tissues, this expression profile indicates that this gene might be involved in cell proliferation. Therapeutic modulation of this gene, expressed protein and/or use of antibodies or small molecule drugs targeting the gene or gene product are useful in the treatment of cancer or other diseases that involve cell proliferation. Furthermore, therapeutic targeting of this gene product with a monoclonal antibody is anticipated to limit or block the extent of tumor cell migration and invasion and tumor metastasis, particularly in brain cancer, breast cancer, renal cancer, lung cancer, colon cancer and melanoma. Expression of this gene or expressed protein is useful in the diagnosis and detection of these cancers.

[1599] Panel 2D Summary: Ag2475 Highest expression of the CG58504-01 gene was seen in a lung cancer (CT=28.3). This gene encodes a putative member of the ADAMS family. The ADAMS family of proteins has multiple domains associated with function; A fibronectin domain involved cell/extracellular matrix interaction, a thrombospondin domain involved in angiogenesis and a metalloproteinase domain involved in matrix degredation. This multi-domain structure has implications for this molecule in several tumorigenic processes, including invasion and metastasis and proliferation and cell survival. Thus, the metalloproteinase domain might play a role in cell invasion and metastasis, the fibronectin domain may play a role in cell adhesion or survival and the thrombospondin domain might play a role in angiogenesis. ADAM 12-S cleaves insulin-like growth factor binding protein-3 (IGFBP-3). IGFBP-3 enhances the p53-dependent apoptotic response of colorectal cells to DNA damage. IGF-BP3 is inversely, associated with risk for colorectal cancer. Expression of IGFBP-3 induces growth inhibition and differentiation of the human colon carcinoma cell line, Caco-2. All these data indicate that the protein encoded by CG58504-01 acts by cleaving and inactivating IGFBP-3 limiting its anti-tumor activity.

[1600] Therapeutic modulation of this gene, expressed protein and/or use of antibodies or small molecule drugs targeting the gene or gene product are useful in the treatment of those cancer types, like colon, lung, kidney, bladder ovarian and gastric tumors where the gene is overexpressed in the tumor compared to the normal adjacent tissue.

[1601] Panel 4D Summary: Ag2475 Highest expression of the CG58504-01 gene was seen in resting coronary artery smooth muscle cells (CT=2,7.3). Moderate to low levels of expression were seen in resting astrocytes and TNFalpha+IL-1beta treated astrocytes and coronary artery smooth muscle cells, TNF alpha and IL-4 treated dermal fibroblasts, and lung. Lower levels of expression were seen in treated and untreated lung fibroblasts. This expression indicates that this gene is a marker of smooth muscle. In addition, expression in fibroblasts and astrocytes indicates that this gene product may be involved in inflammatory conditions that involve these cells. This gene encodes a putative ADAMTS molecule which has been implicated in extracellular proteolysis and may play a critical role in the tissue degradation seen in arthritis and other inflammatory conditions (Kuno K.: J Biol Chem 1997 Jan. 3; 272(1):556-62). Therapeutic modulation of this gene, expressed protein and/or use of antibodies or small molecule drugs targeting the gene or gene product are useful in the treatment of pathological and inflammatory lung and skin disorders that include chronic obstructive pulmonary disease, asthma, allergy, psoriasis and emphysema.

[1602] BK. CG59309-01: Acyl-Coenzyme a Thioester Hydrolase.

[1603] Expression of gene CG59309-01 was assessed using the primer-probe set Ag3540, described in Table BKA. Results of the RTQ-PCR runs are shown in Tables BKB, BKC, BKD and BKE.

TABLE BKA
Probe Name Ag3540

| | | | | SEQ |
|---|---|---|---|---|
| | | | Start | ID |
| Primers | Sequences | Length | Position | No |
| Forward | 5′-ccacgttggctctagcttatta-3′ | 22 | 649 | 1413 |
| Probe | TET-5′-tgaagatctccccaataacatggaca-3′- | 26 | 677 | 1414 |
| | TAMRA | | | |
| Reverse | 5′-ttcgaagtactccagggatatg-3′ | 22 | 704 | 1415 |

[1604] TABLE BKB
General_screening_panel_v1.4
Column A - Rel. Exp. (%) Ag3540, Run 217049291

| | |
|---|---|
| Tissue Name | A |

| | |
|---|---|
| Adipose | 1.3 |
| Melanoma* Hs688(A).T | 0.7 |
| Melanoma* Hs688(B).T | 0.5 |
| Melanoma* M14 | 0.2 |
| Melanoma* LOXIMVI | 0.0 |
| Melanoma* SK-MEL-5 | 0.0 |
| Squamous cell carcinoma SCC-4 | 0.3 |
| Testis Pool | 0.3 |
| Prostate ca.* (bone met) PC-3 | 0.8 |
| Prostate Pool | 0.3 |
| Placenta | 1.4 |
| Uterus Pool | 0.1 |
| Ovarian ca. OVCAR-3 | 1.6 |
| Ovarian ca. SK-OV-3 | 3.6 |
| Ovarian ca. OVCAR-4 | 0.4 |
| Ovarian ca. OVCAR-5 | 23.7 |
| Ovarian ca. IGROV-1 | 0.0 |
| Ovarian ca. OVCAR-8 | 0.0 |
| Ovary | 0.1 |
| Breast ca. MCF-7 | 0.0 |
| Breast ca. MDA-MB-231 | 2.5 |
| Breast ca. BT 549 | 3.0 |
| Breast ca. T47D | 100.0 |
| Breast ca. MDA-N | 0.0 |
| Breast Pool | 0.3 |
| Trachea | 0.4 |
| Lung | 0.0 |
| Fetal Lung | 0.2 |
| Lung ca. NCI-N417 | 0.0 |
| Lung ca. LX-1 | 3.5 |
| Lung ca. NCI-H146 | 0.0 |
| Lung ca. SHP-77 | 0.1 |
| Lung ca. A549 | 1.4 |
| Lung ca. NCI-H526 | 0.7 |
| Lung ca. NCI-H23 | 1.3 |
| Lung ca. NCI-H460 | 0.8 |
| Lung ca. HOP-62 | 1.2 |
| Lung ca. NCI-H522 | 0.0 |
| Liver | 2.6 |
| Fetal Liver | 0.8 |
| Liver ca. HepG2 | 0.1 |
| Kidney Pool | 0.7 |
| Fetal Kidney | 0.6 |
| Renal ca. 786-0 | 0.0 |
| Renal ca. A498 | 0.0 |
| Renal ca. ACHN | 0.0 |
| Renal ca. UO-31 | 1.1 |
| Renal ca. TK-10 | 0.1 |
| Bladder | 1.1 |
| Gastric ca. (liver met.) NCI-N87 | 5.6 |
| Gastric ca. KATO III | 0.0 |
| Colon ca. SW-948 | 0.0 |
| Colon ca. SW480 | 10.3 |
| Colon ca.* (SW480 met) SW620 | 2.8 |
| Colon ca. HT29 | 0.8 |
| Colon ca. HCT-116 | 0.0 |
| Colon ca. CaCo-2 | 3.5 |
| Colon cancer tissue | 1.4 |
| Colon ca. SW1116 | 0.0 |
| Colon ca. Colo-205 | 3.3 |
| Colon ca. SW-48 | 1.7 |
| Colon Pool | 0.2 |
| Small Intestine Pool | 0.3 |
| Stomach Pool | 0.1 |
| Bone Marrow Pool | 0.2 |
| Fetal Heart | 0.4 |
| Heart Pool | 0.2 |
| Lymph Node Pool | 0.3 |
| Fetal Skeletal Muscle | 0.1 |
| Skeletal Muscle Pool | 0.4 |
| Spleen Pool | 0.2 |
| Thymus Pool | 0.3 |
| CNS cancer (glio/astro) U87-MG | 0.0 |
| CNS cancer (glio/astro) U-118-MG | 0.3 |
| CNS cancer (neuro; met) SK-N-AS | 1.0 |
| CNS cancer (astro) SF-539 | 0.6 |
| CNS cancer (astro) SNB-75 | 3.1 |
| CNS cancer (glio) SNB-19 | 0.0 |
| CNS cancer (glio) SF-295 | 0.2 |
| Brain (Amygdala) Pool | 0.7 |
| Brain (cerebellum) | 2.1 |
| Brain (fetal) | 0.5 |
| Brain (Hippocampus) Pool | 1.0 |
| Cerebral Cortex Pool | 0.9 |
| Brain (Substantia nigra) Pool | 1.3 |
| Brain (Thalamus) Pool | 1.1 |
| Brain (whole) | 1.4 |
| Spinal Cord Pool | 0.5 |
| Adrenal Gland | 0.8 |
| Pituitary gland Pool | 0.1 |
| Salivary Gland | 0.2 |
| Thyroid (female) | 0.7 |
| Pancreatic ca. CAPAN2 | 9.4 |
| Pancreas Pool | 0.9 |

[1605] TABLE BKC
Panel 4D
Column A - Rel. Exp. (%) Ag3540, Run 166447040

| Tissue Name | A | Tissue Name | A |
|---|---|---|---|
| Secondary Th1 act | 4.8 | HUVEC IL-1 beta | 1.7 |
| Secondary Th2 act | 10.2 | HUVEC IFN gamma | 0.9 |
| Secondary Tr1 act | 12.9 | HUVEC TNF alpha + IFN gamma | 1.5 |
| Secondary Th1 rest | 2.1 | HUVEC TNF alpha + IL4 | 0.8 |
| Secondary Th2 rest | 1.4 | HUVEC IL-11 | 1.5 |
| Secondary Tr1 rest | 1.6 | Lung Microvascular EC none | 0.6 |
| Primary Th1 act | 4.7 | Lung Microvascular EC TNF alpha + IL-1 | 0.8 |
| | | beta | |
| Primary Th2 act | 6.8 | Microvascular Dermal EC none | 1.5 |
| Primary Tr1 act | 7.3 | Microsvasular Dermal EC TNF alpha + IL-1 | 0.8 |
| | | beta | |
| Primary Th1 rest | 6.6 | Bronchial epithelium TNF alpha + IL1beta | 1.3 |
| Primary Th2 rest | 2.6 | Small airway epithelium none | 0.6 |
| Primary Tr1 rest | 4.2 | Small airway epithelium TNF alpha + IL-1 | 0.0 |
| | | beta | |
| CD45RA CD4 lymphocyte act | 4.1 | Coronery artery SMC rest | 0.9 |
| CD45RO CD4 lymphocyte act | 10.9 | Coronery artery SMC TNF alpha + IL-1 beta | 0.0 |
| CD8 lymphocyte act | 6.6 | Astrocytes rest | 2.6 |
| Secondary CD8 lymphocyte rest | 17.0 | Astrocytes TNF alpha + IL-1 beta | 2.1 |
| Secondary CD8 lymphocyte act | 6.0 | KU-812 (Basophil) rest | 2.2 |
| CD4 lymphocyte none | 2.0 | KU-812 (Basophil) PMA/ionomycin | 10.2 |
| 2ry Th1/Th2/Tr1 anti-CD95 | 2.4 | CCD1106 (Keratinocytes) none | 6.8 |
| CH11 | | | |
| LAK cells rest | 2.0 | CCD1106 (Keratinocytes) TNF alpha + IL-1 | 25.7 |
| | | beta | |
| LAK cells IL-2 | 16.2 | Liver cirrhosis | 12.0 |
| LAK cells IL-2 + IL-12 | 12.8 | Lupus kidney | 5.1 |
| LAK cells IL-2 + IFN gamma | 15.6 | NCI-H292 none | 44.8 |
| LAK cells IL-2 + IL-18 | 7.4 | NCI-H292 IL-4 | 37.6 |
| LAK cells PMA/ionomycin | 3.4 | NCI-H292 IL-9 | 41.2 |
| NK Cells IL-2 rest | 9.0 | NCI-H292 IL-13 | 19.8 |
| Two Way MLR 3 day | 10.5 | NCI-H292 IFN gamma | 30.1 |
| Two Way MLR 5 day | 7.2 | HPAEC none | 1.2 |
| Two Way MLR 7 day | 8.9 | HPAEC TNF alpha + IL-1 beta | 3.3 |
| PBMC rest | 0.5 | Lung fibroblast none | 0.9 |
| PBMC PWM | 3.8 | Lung fibroblast TNF alpha + IL-1 beta | 0.7 |
| PBMC PHA-L | 1.0 | Lung fibroblast IL-4 | 0.5 |
| Ramos (B cell) none | 0.0 | Lung fibroblast IL-9 | 0.0 |
| Ramos (B cell) ionomycin | 0.0 | Lung fibroblast IL-13 | 0.9 |
| B lymphocytes PWM | 10.3 | Lung fibroblast IFN gamma | 1.2 |
| B lymphocytes CD40L and IL-4 | 3.8 | Dermal fibroblast CCD1070 rest | 1.1 |
| EOL-1 dbcAMP | 0.0 | Dermal fibroblast CCD1070 TNF alpha | 18.9 |
| EOL-1 dbcAMP | 0.0 | Dermal fibroblast CCD1070 IL-1 beta | 1.9 |
| PMA/ionomycin | | | |
| Dendritic cells none | 14.9 | Dermal fibroblast IFN gamma | 0.0 |
| Dendritic cells LPS | 8.9 | Dermal fibroblast IL-4 | 1.5 |
| Dendritic cells anti-CD40 | 7.9 | IBD Colitis 2 | 2.9 |
| Monocytes rest | 0.0 | IBD Crohn's | 1.9 |
| Monocytes LPS | 0.6 | Colon | 82.9 |
| Macrophages rest | 40.3 | Lung | 9.7 |
| Macrophages LPS | 6.1 | Thymus | 100.0 |
| HUVEC none | 1.1 | Kidney | 1.8 |
| HUVEC starved | 1.4 | | |

[1606] TABLE BKD
Panel 5 Islet
Column A - Rel. Exp. (%) Ag3540, Run 242386396

| Tissue Name | A | Tissue Name | A |
|---|---|---|---|
| 97457 Patient-02go adipose | 3.3 | 94709 Donor 2 AM - A adipose | 9.1 |
| 97476 Patient-07sk skeletal muscle | 0.8 | 94710 Donor 2 AM - B adipose | 1.6 |
| 97477 Patient-07ut uterus | 0.0 | 94711 Donor 2 AM - C adipose | 1.4 |
| 97478 Patient-07pl placenta | 12.9 | 94712 Donor 2 AD - A adipose | 2.8 |
| 99167 Bayer Patient 1 | 15.5 | 94713 Donor 2 AD - B adipose | 5.8 |
| 97482 Patient-08ut uterus | 3.4 | 94714 Donor 2 AD - C adipose | 4.2 |
| 97483 Patient-08pl placenta | 3.4 | 94742 Donor 3 U - A Mesenchymal | 3.0 |
| | | Stem Cells | |
| 97486 Patient-09sk skeletal muscle | 100.0 | 94743 Donor 3 U - B Mesenchymal | 1.1 |
| | | Stem Cells | |
| 97487 Patient-09ut uterus | 1.6 | 94730 Donor 3 AM - A adipose | 4.3 |
| 97488 Patient-09pl placenta | 2.6 | 94731 Donor 3 AM - B adipose | 2.0 |
| 97492 Patient-10ut uterus | 3.1 | 94732 Donor 3 AM - C adipose | 2.0 |
| 97493 Patient-10pl placenta | 23.2 | 94733 Donor 3 AD - A adipose | 10.7 |
| 97495 Patient-11go adipose | 0.8 | 94734 Donor 3 AD - B adipose | 3.0 |
| 97496 Patient-11sk skeletal muscle | 0.0 | 94735 Donor 3 AD - C adipose | 4.0 |
| 97497 Patient-11ut uterus | 2.5 | 77138 Liver HepG2untreated | 0.7 |
| 97498 Patient-11pl placenta | 6.7 | 73556 Heart Cardiac stromal cells | 0.0 |
| | | (primary) | |
| 97500 Patient-12go adipose | 6.5 | 81735 Small Intestine | 4.8 |
| 97501 Patient-12sk skeletal muscle | 4.5 | 72409 Kidney Proximal Convoluted | 0.7 |
| | | Tubule | |
| 97502 Patient-12ut uterus | 6.7 | 82685 Small intestine Duodenum | 3.6 |
| 97503 Patient-12p1 placenta | 2.4 | 90650 Adrenal Adrenocortical | 0.6 |
| | | adenoma | |
| 94721 Donor 2 U - A Mesenchymal | 2.2 | 72410 Kidney HRCE | 8.0 |
| Stem Cells | | | |
| 94722 Donor 2 U - B Mesenchymal | 0.6 | 72411 Kidney HRE | 8.5 |
| Stem Cells | | | |
| 94723 Donor 2 U - C Mesenchymal | 3.1 | 73139 Uterus Uterine smooth muscle | 0.0 |
| Stem Cells | | cells | |

[1607] TABLE BKE
general oncology screening panel_v_2.4
Column A - Rel. Exp. (%) Ag3540, Run 267294323

| Tissue Name | A | Tissue Name | A |
|---|---|---|---|
| Colon cancer 1 | 2.8 | Bladder NAT 2 | 0.0 |
| CC Margin (ODO3921) | 2.9 | Bladder NAT 3 | 0.0 |
| Colon cancer 2 | 6.9 | Bladder NAT 4 | 0.0 |
| Colon NAT 2 | 3.3 | Prostate adenocarcinoma 1 | 3.5 |
| Colon cancer 3 | 7.9 | Prostate adenocarcinoma 2 | 0.0 |
| Colon NAT 3 | 5.0 | Prostate adenocarcinoma 3 | 1.1 |
| Colon malignant cancer 4 | 7.1 | Prostate adenocarcinoma 4 | 0.8 |
| Colon NAT 4 | 0.9 | Prostate NAT 5 | 0.4 |
| Lung cancer 1 | 1.9 | Prostate adenocarcinoma 6 | 0.6 |
| Lung NAT 1 | 0.0 | Prostate adenocarcinoma 7 | 0.0 |
| Lung cancer 2 | 0.0 | Prostate adenocarcinoma 8 | 0.0 |
| Lung NAT 2 | 0.0 | Prostate adenocarcinoma 9 | 0.8 |
| Squamous cell carcinoma 3 | 2.6 | Prostate NAT 10 | 0.0 |
| Lung NAT 3 | 0.0 | Kidney cancer 1 | 5.1 |
| Metastatic melanoma 1 | 2.4 | Kidney NAT 1 | 2.3 |
| Melanoma 2 | 0.4 | Kidney cancer 2 | 100.0 |
| Melanoma 3 | 0.0 | Kidney NAT 2 | 5.1 |
| Metastatic melanoma 4 | 2.7 | Kidney cancer 3 | 7.7 |
| Metastatic melanoma 5 | 6.9 | Kidney NAT 3 | 1.3 |
| Bladder cancer 1 | 0.0 | Kidney cancer 4 | 1.3 |
| Bladder NAT 1 | 0.0 | Kidney NAT 4 | 13.1 |
| Bladder cancer 2 | 0.4 | | |

[1608] General_screening_panel_v1.4 Summary: Ag3540 This gene was most highly expressed in a breast cancer cell line (CT=27.1). Expression of this gene is useful as a marker to detect the presence of breast cancer. Therapeutic modulation of this gene, expressed protein and/or use of antibodies or small molecule drugs targeting the gene or gene product are useful in the treatment of breast cancer.

[1609] Among metabolic tissues, this gene, an acyl coA thioesterase homolog, had a low level of expression in adipose, adult and fetal liver, adrenal, thyroid and pancreas. Acyl CoA thioesterases have multiple roles in lipid homeostasis (Hunt M C, Alexson S E. The role Acyl-CoA thioesterases play in mediating intracellular lipid metabolism. Prog Lipid Res. 2002 March; 41(2):99-130; Hunt M C, Nousiainen S E, Huttunen M K, Orii K E, Svensson L T, Alexson S E. Peroxisome proliferator-induced long chain acyl-CoA thioesterases comprise a highly conserved novel multi-gene family involved in lipid metabolism. J Biol. Chem. 1999 Nov. 26; 274(48):34317-26). Therapeutic modulation of this gene, expressed protein and/or use of antibodies or small molecule drugs targeting the gene or gene product are useful in the treatment of endocrine and metabolic disease, including Types 1 and 2 diabetes and obesity.

[1610] In addition, this gene was expressed in all CNS regions examined. Therapeutic modulation of this gene, expressed protein and/or use of antibodies or small molecule drugs targeting the gene or gene product are useful in the treatment of neurologic disorders such as Alzheimer's disease, Parkinson's disease, epilepsy, stroke, schizophrenia and multiple sclerosis.

[1611] Panel 4D Summary: Ag3540 Highest expression of the CG59309-01 gene was seen in the thymus and colon (CTs=31.5). Significant levels of expression were also seen in a cluster of treated and untreated samples derived from the NCI-H292 mucoepidermoid cell line. Expression of this gene is useful as a marker for thymus and colon tissue. Therapeutic modulation of this gene, expressed protein and/or use of antibodies or small molecule drugs targeting the gene or gene product are useful in regulating T cell development in the thymus or in the treatment of T cell mediated autoimmune or inflammatory diseases, including asthma, allergies, inflammatory bowel disease, lupus erythematosus, or rheumatoid arthritis. Small molecule or antibody therapeutics designed against this protein disrupts T cell development in the thymus and functions as an immunosuppresant for tissue transplants.

[1612] Panel 5 Islet Summary: Ag3540 This gene had moderate expression in skeletal muscle (highest expression CT=30.5). Acyl CoA thioesterases function in peroxisomal fatty acid oxidation (Hunt M C, Solaas K, Kase B F, Alexson S E. Characterization of an acyl-coA thioesterase that functions as a major regulator of peroxisomal lipid metabolism. J Biol. Chem. 2002 Jan. 11; 277(2): 1128-38). Therapeutic modulation of this gene, expressed protein and/or use of antibodies or small molecule drugs targeting the gene or gene product are useful in increasing fatty acid oxidation in muscle, and in the treatment of Type 2 diabetes and obesity.

[1613] general oncology screening panel_v_{—}2.4 Summary: Ag3540 Prominent expression was detected in a kidney cancer sample (CT=31.8). Expression of this gene is useful as a marker of this cancer. Targeting this gene or gene product with small molecule, antibody, or protein therapeutics is useful in the treatment of kidney cancer.

[1614] BL. CG59490-01: S562_F7.

[1615] Expression of gene CG59490-01 was assessed using the primer-probe sets Ag1038, Ag1590, Ag1918, Ag2899, Ag720, Ag730 and Ag443, described in Tables BLA, BLB, BLC, BLD, BLE, BLF and BLG. Results of the RTQ-PCR runs are shown in Tables BLH, BLI, BLJ, BLK and BLL.

TABLE BLA
Probe Name Ag1038

| | | | | SEQ |
|---|---|---|---|---|
| | | | Start | ID |
| Primers | Sequences | Length | Position | No |
| Forward | 5′-aggagcaacgtcctctgtaac-3′ | 21 | 367 | 1416 |
| Probe | TET-5′-cttccaaccacactgagcggtttgag-3′- | 26 | 410 | 1417 |
| | TAMRA | | | |
| Reverse | 5-agcatgtcgtccttgatgag-3′ | 20 | 439 | 1418 |

[1616] TABLE BLB
Probe Name Ag1590

| | | | | SEQ |
|---|---|---|---|---|
| | | | Start | ID |
| Primers | Sequences | Length | Position | No |
| Forward | 5′-aggagcaacgtcctctgtaac-3′ | 21 | 367 | 1419 |
| Probe | TET-5′-cttccaaccacactgagcggtttgag-3′- | 26 | 410 | 1420 |
| | TAMRA | | | |
| Reverse | 5′-agcatgtcgtccttgatgag-3′ | 20 | 439 | 1421 |

[1617] TABLE BLC
Probe Name Ag1918

| | | | | SEQ |
|---|---|---|---|---|
| | | | Start | ID |
| Primers | Sequences | Length | Position | No |
| Forward | 5′-aggagcaacgtcctctgtaac-3′ | 21 | 367 | 1422 |
| Probe | TET-5′-cttccaaccacactgagcggtttgag-3′- | 26 | 410 | 1423 |
| | TAMRA | | | |
| Reverse | 5′-agcatgtcgtccttgatgag-3′ | 20 | 439 | 1424 |

[1618] TABLE BLD
Probe Name Ag2899

| | | | | SEQ |
|---|---|---|---|---|
| | | | Start | ID |
| Primers | Sequences | Length | Position | No |
| Forward | 5′-aggagcaacgtcctctgtaac-3′ | 21 | 367 | 1425 |
| Probe | TET-5′-cttccaaccacactgagcggtttgag-3′ | 26 | 410 | 1426 |
| | TAMRA | | | |
| Reverse | 5′-agcatgtcgtccttgatgag-3′ | 20 | 439 | 1427 |

[1619] TABLE BLE
Probe Name Ag720

| | | | | SEQ |
|---|---|---|---|---|
| | | | Start | ID |
| Primers | Sequences | Length | Position | No |
| Forward | 5′-aggagcaacgtcctctgtaac-3′ | 21 | 367 | 1428 |
| Probe | TET-5′-cttccaaccacactgagcggtttgag-3′- | 26 | 410 | 1429 |
| | TAMRA | | | |
| Reverse | 5′-acagcatgtcgtccttgatg-3′ | 20 | 441 | 1430 |

[1620] TABLE BLF
Probe Name Ag730

| | | | | SEQ |
|---|---|---|---|---|
| | | | Start | ID |
| Primers | Sequences | Length | Position | No |
| Forward | 5′-caggagcaacgtcctctgta-3′ | 20 | 366 | 1431 |
| Probe | TET-5′-cttccaaccacactgagcggtttgag-3′- | 26 | 410 | 1432 |
| | TAMRA | | | |
| Reverse | 5′-cacacagcatgtcgtcctt-3′ | 19 | 445 | 1433 |

[1621] TABLE BLG
Probe Name Ag443

| | | | | SEQ |
|---|---|---|---|---|
| | | | Start | ID |
| Primers | Sequences | Length | Position | No |
| Forward | 5′-gacggtgaaggtcaggagca-3′ | 20 | 354 | 1434 |
| Probe | TET-5′-cctgtcgccgccgctttcc-3′-TAMRA | 19 | 392 | 1435 |
| Reverse | 5′-aaccgctcagtgtggttgg-3′ | 19 | 413 | 1436 |

[1622] TABLE BLH
Ardais Breast1.0
Column A - Rel. Exp. (%) Ag720, Run 389241931

| Tissue Name | A |
|---|---|
| 111297 Breast cancer metastasis (9369)* | 0.0 |
| 108830 Breast cancer metastasis (OD06855)* | 1.1 |
| 97764 Breast cancer node metastasis (OD06083) | 1.3 |
| 97739 Breast cancer (CHTN20676) | 0.1 |
| 145848 Breast cancer (9B6) | 8.4 |
| 145859 Breast cancer (9EC) | 1.2 |
| 153632 Breast cancer (D39) | 0.0 |
| 153636 Breast cancer (D3D) | 0.4 |
| 164668 Breast cancer (6314) | 0.1 |
| 164677 Breast cancer (5272) | 12.4 |
| 164685 Breast cancer (0170) | 11.3 |
| 98857 Breast cancer (OD06397-12) | 0.0 |
| 153628 Breast cancer (D35) | 0.8 |
| 153637 Breast cancer (D3E) | 5.4 |
| 153643 Breast cancer (D44) | 10.7 |
| 164672 Breast cancer (7464) | 26.1 |
| 164681 Breast cancer (5787) | 9.7 |
| 97748 Breast cancer (CHTN20931) | 2.2 |
| 145850 Breast cancer (9C7) | 0.1 |
| 149844 Breast cancer (24178) | 2.5 |
| 153633 Breast cancer (D3A) | 0.4 |
| 153644 Breast cancer (D45) | 9.0 |
| 164673 Breast cancer (8452) | 29.1 |
| 164682 Breast cancer (6342)* | 7.7 |
| 97751 Breast cancer (CHTN21053) | 0.8 |
| 116417 Breast cancer (3367)* | 0.1 |
| 145852 Breast cancer (A1A) | 13.0 |
| 151097 Breast cancer (CHTN24298) | 0.4 |
| 153634 Breast cancer (D3B) | 0.8 |
| 155797 Breast cancer (EA6) | 2.2 |
| 164674 Breast cancer (8811) | 8.2 |
| 164683 Breast cancer (6470) | 2.4 |
| 97763 Breast cancer (OD06083) | 0.8 |
| 116418 Breast cancer (3378)* | 1.3 |
| 145853 Breast cancer (9F3) | 0.4 |
| 153432 Breast cancer (CHTN 24652) | 16.6 |
| 153635 Breast cancer (D3C) | 1.1 |
| 164667 Breast cancer (5785) | 1.6 |
| 164676 Breast cancer (5070) | 100.0 |
| 164684 Breast cancer (6509) | 24.8 |
| 116421 Breast cancer (6314) | 0.0 |
| 145854 Breast cancer (9B8) | 5.9 |
| 153627 Breast cancer (D34) | 0.2 |
| 164669 Breast cancer (6992) | 6.0 |
| 164678 Breast cancer (5297) | 68.8 |
| 164686 Breast cancer (0732) | 0.5 |
| 145857 Breast cancer (9F0) | 15.2 |
| 153630 Breast cancer (D37) | 0.6 |
| 153638 Breast cancer (D3F) | 23.7 |
| 164670 Breast cancer (7078) | 1.1 |
| 164679 Breast cancer (5486) | 4.3 |
| 164687 Breast cancer (5881) | 0.5 |
| 145846 Breast cancer (9B7) | 22.5 |
| 145858 Breast cancer (9B4) | 0.0 |
| 153631 Breast cancer (D38) | 1.6 |
| 153639 Breast cancer (D40) | 22.2 |
| 164671 Breast cancer (7082) | 0.3 |
| 164680 Breast cancer (5705) | 0.0 |
| 164688 Breast cancer (7222) | 0.0 |
| 111288 Breast NAT (3367) | 0.3 |
| 111302 Breast NAT (6314) | 0.6 |
| 105687 Breast cancer 1B | 0.0 |
| 105688 Breast NAT 1A | 0.0 |
| 105689 Breast cancer 2B | 0.0 |
| 105690 Breast NAT 2A | 0.0 |
| 111289 Breast cancer 3B* | 0.0 |
| 111290 Breast NAT 3A* | 0.0 |
| 116424 Breast cancer 4B* | 0.1 |
| 116425 Breast NAT 4A | 0.0 |
| 108847 Breast cancer | 0.0 |
| 105694 Breast NAT | 0.0 |

[1623] TABLE BLI
Panel 1.3D
Column A - Rel. Exp. (%) Ag1590, Run 152059684
Column B - Rel. Exp. (%) Ag1590, Run 155330156
Column C - Rel. Exp. (%) Ag2899, Run 160943164
Column D - Rel. Exp. (%) Ag2899, Run 165518181

| Tissue Name | A | B | C | D |
|---|---|---|---|---|
| Liver adenocarcinoma | 0.0 | 1.1 | 1.7 | 0.0 |
| Pancreas | 0.0 | 0.0 | 0.0 | 6.9 |
| Pancreatic ca. CAPAN 2 | 8.7 | 2.5 | 5.6 | 10.5 |
| Adrenal gland | 0.0 | 0.8 | 0.0 | 0.0 |
| Thyroid | 0.0 | 0.0 | 0.0 | 0.0 |
| Salivary gland | 0.0 | 0.0 | 0.0 | 2.4 |
| Pituitaiy gland | 34.2 | 34.2 | 16.7 | 42.0 |
| Brain (fetal) | 0.0 | 0.0 | 0.0 | 1.9 |
| Brain (whole) | 0.0 | 0.0 | 0.0 | 0.0 |
| Brain (amygdala) | 0.0 | 0.0 | 0.0 | 0.0 |
| Brain (cerebellum) | 0.0 | 0.0 | 0.0 | 0.0 |
| Brain (hippocampus) | 0.0 | 0.0 | 0.0 | 0.0 |
| Brain (substantia nigra) | 0.0 | 0.0 | 0.0 | 0.0 |
| Brain (thalamus) | 0.0 | 0.0 | 0.0 | 0.0 |
| Cerebral Cortex | 1.2 | 0.0 | 0.0 | 0.0 |
| Spinal cord | 0.0 | 0.0 | 0.0 | 0.0 |
| glio/astro U87-MG | 0.0 | 0.0 | 0.0 | 0.0 |
| glio/astro U-118-MG | 0.0 | 0.0 | 0.0 | 0.0 |
| astrocytoma SW1783 | 0.3 | 1.0 | 0.0 | 2.3 |
| neuro*; met SK-N-AS | 0.0 | 0.0 | 0.0 | 0.0 |
| astrocytoma SF-539 | 0.0 | 0.0 | 0.0 | 0.0 |
| astrocytoma SNB-75 | 0.7 | 0.0 | 0.0 | 4.5 |
| glioma SNB-19 | 0.0 | 0.0 | 0.0 | 2.5 |
| glioma U251 | 0.0 | 0.0 | 0.0 | 0.0 |
| glioma SF-295 | 0.0 | 0.0 | 0.0 | 0.0 |
| Heart (Fetal) | 0.0 | 1.4 | 0.0 | 0.0 |
| Heart | 0.0 | 0.0 | 0.0 | 0.0 |
| Skeletal muscle (Fetal) | 0.0 | 0.0 | 0.0 | 0.0 |
| Skeletal muscle | 0.0 | 0.0 | 0.0 | 0.0 |
| Bone marrow | 0.9 | 0.0 | 1.0 | 0.0 |
| Thymus | 0.7 | 0.9 | 1.4 | 3.7 |
| Spleen | 0.6 | 1.7 | 0.0 | 0.0 |
| Lymph node | 0.0 | 0.0 | 0.0 | 0.0 |
| Colorectal | 3.9 | 2.4 | 1.6 | 8.8 |
| Stomach | 0.0 | 2.4 | 0.0 | 0.0 |
| Small intestine | 0.0 | 0.0 | 0.0 | 2.0 |
| Colon ca. SW480 | 0.8 | 1.5 | 0.0 | 0.0 |
| Colon ca.* SW620 (SW480 met) | 0.9 | 0.9 | 3.4 | 0.0 |
| Colon ca. HT29 | 0.0 | 0.0 | 0.0 | 0.0 |
| Colon ca. HCT-116 | 0.0 | 1.0 | 0.0 | 1.0 |
| Colon ca. CaCo-2 | 0.0 | 1.4 | 0.0 | 0.0 |
| CC Well to Mod Diff (ODO3866) | 8.8 | 8.1 | 15.2 | 26.8 |
| Colon ca. HCC-2998 | 32.3 | 29.3 | 29.9 | 22.2 |
| Gastric ca. (liver met) NCI-N87 | 32.1 | 31.6 | 36.9 | 70.7 |
| Bladder | 0.8 | 0.0 | 0.0 | 0.0 |
| Trachea | 0.8 | 1.1 | 0.0 | 0.0 |
| Kidney | 1.8 | 0.0 | 1.7 | 1.0 |
| Kidney (fetal) | 3.8 | 0.9 | 7.6 | 0.0 |
| Renal ca. 786-0 | 0.0 | 0.0 | 0.0 | 0.0 |
| Renal ca. A498 | 0.8 | 0.0 | 0.0 | 0.0 |
| Renal ca. RXF 393 | 0.0 | 0.0 | 0.0 | 3.2 |
| Renal ca. ACHN | 2.1 | 0.0 | 0.0 | 0.0 |
| Renal ca. UO-31 | 0.0 | 0.0 | 0.0 | 0.0 |
| Renal ca. TK-10 | 0.0 | 0.0 | 0.0 | 0.0 |
| Liver | 4.7 | 5.2 | 3.5 | 33.9 |
| Liver (fetal) | 9.0 | 6.0 | 3.7 | 18.3 |
| Liver ca. (hepatoblast) HepG2 | 2.4 | 1.2 | 1.8 | 0.0 |
| Lung | 0.0 | 0.0 | 3.2 | 0.0 |
| Lung (fetal) | 0.4 | 0.0 | 0.0 | 0.0 |
| Lung ca. (small cell) LX-1 | 6.9 | 13.1 | 9.5 | 10.5 |
| Lung ca. (small cell) NCI-H69 | 2.2 | 1.3 | 0.8 | 0.0 |
| Lung ca. (s. cell var.) SHP-77 | 3.3 | 1.1 | 6.5 | 6.3 |
| Lung ca. (large cell) NCI-H460 | 0.0 | 0.0 | 0.0 | 0.0 |
| Lung ca. (non-sm. cell) A549 | 0.0 | 0.0 | 0.0 | 0.0 |
| Lung ca. (non-s.cell) NCI-H23 | 0.0 | 0.0 | 0.0 | 0.0 |
| Lung ca. (non-s.cell) HOP-62 | 0.8 | 0.0 | 0.0 | 0.0 |
| Lung ca. (non-s.cl) NCI-H522 | 0.0 | 0.5 | 0.0 | 0.0 |
| Lung ca. (squam.) SW 900 | 0.8 | 0.0 | 0.0 | 0.0 |
| Lung ca. (squam.) NCI-H596 | 0.4 | 0.5 | 0.0 | 0.0 |
| Mammary gland | 2.7 | 4.2 | 0.0 | 7.9 |
| Breast ca.* (pl.ef) MCF-7 | 4.1 | 0.0 | 0.0 | 2.5 |
| Breast ca.* (pl.ef) MDA-MB-231 | 0.0 | 0.0 | 1.7 | 0.0 |
| Breast ca.* (p1. ef) T47D | 6.5 | 5.3 | 0.7 | 4.3 |
| Breast ca. BT-549 | 0.0 | 0.0 | 0.0 | 0.0 |
| Breast ca. MDA-N | 0.0 | 1.1 | 1.7 | 0.0 |
| Ovary | 0.0 | 0.0 | 0.0 | 0.0 |
| Ovarian ca. OVCAR-3 | 0.0 | 0.0 | 0.0 | 0.0 |
| Ovarian ca. OVCAR-4 | 0.0 | 0.0 | 0.0 | 0.0 |
| Ovarian ca. OVCAR-5 | 100.0 | 100.0 | 100.0 | 100.0 |
| Ovarian ca. OVCAR-8 | 2.5 | 0.0 | 0.0 | 2.5 |
| Ovarian ca. IGROV-1 | 0.0 | 0.0 | 0.0 | 0.0 |
| Ovarian ca. (ascites) SK-OV-3 | 0.0 | 0.0 | 0.0 | 0.0 |
| Uterus | 0.0 | 0.0 | 0.0 | 0.0 |
| Placenta | 9.2 | 6.9 | 8.0 | 14.0 |
| Prostate | 1.9 | 5.2 | 1.8 | 4.1 |
| Prostate ca.* (bone met) PC-3 | 0.0 | 0.0 | 0.0 | 0.0 |
| Testis | 6.3 | 9.3 | 8.9 | 8.8 |
| Melanoma Hs688(A).T | 0.0 | 0.0 | 0.0 | 0.0 |
| Melanoma* (met) Hs688(B).T | 0.0 | 0.0 | 0.0 | 0.0 |
| Melanoma UACC-62 | 0.0 | 0.0 | 0.0 | 0.0 |
| Melanoma M14 | 0.0 | 0.0 | 0.0 | 0.0 |
| Melanoma LOX IMVI | 0.0 | 0.0 | 0.0 | 0.0 |
| Melanoma* (met) SK-MEL-5 | 0.0 | 0.0 | 0.0 | 0.0 |
| Adipose | 0.0 | 0.0 | 0.0 | 0.0 |

[1624] TABLE BLJ
Panel 2D
Column A - Rel. Exp. (%) Ag1590, Run 152060853
Column B - Rel. Exp. (%) Ag1590, Run 155330182
Column C - Rel. Exp. (%) Ag2899, Run 160999416
Column D - Rel. Exp. (%) Ag2899, Run 164988403
Column E - Rel. Exp. (%) Ag720, Run 145375720

| Tissue Name | A | B | C | D | E |
|---|---|---|---|---|---|
| Normal Colon | 0.1 | 0.0 | 0.1 | 0.3 | 0.0 |
| CC Well to Mod Diff (ODO3866) | 9.2 | 11.3 | 5.5 | 8.5 | 2.2 |
| CC Margin (ODO3866) | 0.2 | 0.0 | 0.0 | 0.3 | 0.0 |
| CC Gr. 2 rectosigmoid (ODO3868) | 0.0 | 0.2 | 0.0 | 0.3 | 0.0 |
| CC Margin (ODO3868) | 0.0 | 0.0 | 0.0 | 0.0 | 0.0 |
| CC Mod Diff (ODO3920) | 0.2 | 0.1 | 0.0 | 0.5 | 0.0 |
| CC Margin (ODO3920) | 0.0 | 0.0 | 0.0 | 0.0 | 0.0 |
| CC Gr. 2 ascend colon (ODO3921) | 0.0 | 0.0 | 0.1 | 0.1 | 0.0 |
| CC Margin (ODO3921) | 0.3 | 0.2 | 0.1 | 0.1 | 0.0 |
| CC from Partial Hepatectomy (ODO4309) Mets | 1.4 | 1.4 | 0.2 | 1.8 | 0.3 |
| Liver Margin (ODO4309) | 1.8 | 0.9 | 0.6 | 2.0 | 0.4 |
| Colon mets to lung (ODO4451-01) | 0.2 | 0.2 | 0.3 | 0.4 | 0.2 |
| Lung Margin (OD04451-02) | 0.0 | 0.0 | 0.0 | 0.0 | 0.0 |
| Normal Prostate 6546-1 | 0.4 | 0.7 | 0.2 | 1.6 | 0.4 |
| Prostate Cancer (OD04410) | 0.0 | 0.0 | 0.0 | 0.0 | 0.0 |
| Prostate Margin (OD04410) | 0.0 | 0.0 | 0.0 | 0.4 | 0.0 |
| Prostate Cancer (OD04720-01) | 0.9 | 1.2 | 0.3 | 0.5 | 0.4 |
| Prostate Margin (OD04720-02) | 0.3 | 0.4 | 0.3 | 0.0 | 0.1 |
| Normal Lung | 0.0 | 0.0 | 0.1 | 0.0 | 0.0 |
| Lung Met to Muscle (ODO4286) | 0.0 | 0.3 | 0.0 | 0.0 | 0.2 |
| Muscle Margin (ODO4286) | 0.2 | 0.0 | 0.0 | 0.1 | 0.0 |
| Lung Malignant Cancer (OD03126) | 0.0 | 0.3 | 0.0 | 0.2 | 0.2 |
| Lung Margin (OD03126) | 0.0 | 0.1 | 0.0 | 0.0 | 0.0 |
| Lung Cancer (OD04404) | 0.0 | 0.0 | 0.0 | 0.0 | 0.1 |
| Lung Margin (OD04404) | 0.0 | 0.0 | 0.0 | 0.0 | 0.0 |
| Lung Cancer (OD04565) | 0.2 | 0.0 | 0.0 | 0.4 | 0.1 |
| Lung Margin (OD04565) | 0.0 | 0.0 | 0.0 | 0.0 | 0.0 |
| Lung Cancer (OD04237-01) | 0.0 | 0.2 | 0.0 | 0.5 | 0.0 |
| Lung Margin (OD04237-02) | 0.0 | 0.0 | 0.0 | 0.0 | 0.0 |
| Ocular Mel Met to Liver (ODO4310) | 0.0 | 0.0 | 0.0 | 0.0 | 0.0 |
| Liver Margin (ODO4310) | 1.0 | 1.1 | 0.0 | 1.0 | 0.5 |
| Melanoma Metastasis | 0.0 | 0.0 | 0.0 | 0.0 | 0.0 |
| Lung Margin (OD04321) | 0.0 | 0.0 | 0.0 | 0.0 | 0.0 |
| Normal Kidney | 0.3 | 1.1 | 0.1 | 0.7 | 0.3 |
| Kidney Ca, Nuclear grade 2 (OD04338) | 0.0 | 0.0 | 0.1 | 0.1 | 0.0 |
| Kidney Margin (OD04338) | 0.2 | 0.7 | 0.2 | 0.2 | 0.1 |
| Kidney Ca Nuclear grade 1/2 (OD04339) | 0.1 | 0.1 | 0.3 | 0.4 | 0.0 |
| Kidney Margin (OD04339) | 0.6 | 0.3 | 0.7 | 1.4 | 0.3 |
| Kidney Ca, Clear cell type (OD04340) | 0.0 | 0.0 | 0.0 | 0.0 | 0.0 |
| Kidney Margin (OD04340) | 1.2 | 0.8 | 0.4 | 0.9 | 0.5 |
| Kidney Ca, Nuclear grade 3 (OD04348) | 0.0 | 0.0 | 0.0 | 0.6 | 0.0 |
| Kidney Margin (OD04348) | 0.4 | 0.4 | 0.4 | 0.0 | 0.3 |
| Kidney Cancer (OD04622-01) | 0.0 | 0.0 | 0.0 | 0.0 | 0.0 |
| Kidney Margin (OD04622-03) | 0.4 | 0.1 | 0.0 | 0.0 | 0.2 |
| Kidney Cancer (OD04450-01) | 0.3 | 0.2 | 0.1 | 0.0 | 0.0 |
| Kidney Margin (OD04450-03) | 0.0 | 0.2 | 0.0 | 0.3 | 0.2 |
| Kidney Cancer 8120607 | 0.0 | 0.0 | 0.0 | 0.0 | 0.0 |
| Kidney Margin 8120608 | 0.0 | 0.4 | 0.1 | 0.0 | 0.1 |
| Kidney Cancer 8120613 | 0.1 | 0.9 | 0.3 | 0.6 | 0.2 |
| Kidney Margin 8120614 | 0.3 | 0.3 | 0.0 | 0.0 | 0.0 |
| Kidney Cancer 9010320 | 0.0 | 0.1 | 0.0 | 0.0 | 0.0 |
| Kidney Margin 9010321 | 0.1 | 0.0 | 0.0 | 0.0 | 0.1 |
| Normal Uterus | 0.0 | 0.0 | 0.0 | 0.0 | 0.0 |
| Uterine Cancer 064011 | 0.0 | 0.0 | 0.0 | 0.0 | 0.0 |
| Normal Thyroid | 0.0 | 0.1 | 0.0 | 0.0 | 0.0 |
| Thyroid Cancer | 0.0 | 0.3 | 0.3 | 0.0 | 0.0 |
| Thyroid Cancer A302152 | 0.1 | 0.0 | 0.0 | 0.0 | 0.1 |
| Thyroid Margin A302153 | 0.0 | 0.0 | 0.0 | 0.0 | 0.0 |
| Normal Breast | 0.3 | 0.4 | 0.1 | 1.2 | 0.5 |
| Breast Cancer | 33.4 | 34.6 | 22.7 | 55.9 | 47.0 |
| Breast Cancer (OD04590-01) | 100.0 | 100.0 | 100.0 | 100.0 | 30.6 |
| Breast Cancer Mets (OD04590-03) | 63.3 | 72.7 | 73.7 | 88.9 | 100.0 |
| Breast Cancer Metastasis | 2.8 | 2.6 | 2.0 | 2.6 | 2.9 |
| Breast Cancer | 3.6 | 5.2 | 2.2 | 6.4 | 3.1 |
| Breast Cancer | 1.0 | 1.9 | 2.2 | 1.9 | 0.5 |
| Breast Cancer 9100266 | 3.5 | 3.3 | 1.1 | 7.1 | 4.1 |
| Breast Margin 9100265 | 0.0 | 0.3 | 0.1 | 0.2 | 0.3 |
| Breast Cancer A209073 | 2.3 | 1.6 | 0.7 | 2.0 | 1.7 |
| Breast Margin A209073 | 0.7 | 1.3 | 0.7 | 0.9 | 0.2 |
| Normal Liver | 0.1 | 0.5 | 0.4 | 2.2 | 0.9 |
| Liver Cancer | 0.3 | 0.3 | 0.4 | 0.3 | 0.1 |
| Liver Cancer 1025 | 0.4 | 0.7 | 0.5 | 1.3 | 0.5 |
| Liver Cancer 1026 | 0.7 | 0.1 | 0.3 | 1.1 | 0.2 |
| Liver Cancer 6004-T | 0.9 | 1.1 | 1.4 | 2.8 | 0.6 |
| Liver Tissue 6004-N | 0.0 | 0.0 | 0.1 | 0.0 | 0.0 |
| Liver Cancer 6005-T | 0.8 | 0.8 | 1.2 | 0.7 | 0.2 |
| Liver Tissue 6005-N | 0.1 | 0.0 | 0.2 | 0.5 | 0.0 |
| Normal Bladder | 0.0 | 0.0 | 0.1 | 0.4 | 0.1 |
| Bladder Cancer | 0.0 | 0.1 | 0.0 | 0.0 | 0.1 |
| Bladder Cancer | 0.1 | 0.4 | 0.3 | 0.0 | 0.1 |
| Bladder Cancer (OD04718-01) | 0.2 | 0.2 | 0.3 | 0.0 | 0.4 |
| Bladder Normal Adjacent (OD04718-03) | 0.0 | 0.0 | 0.0 | 0.0 | 0.0 |
| Normal Ovary | 0.0 | 0.0 | 0.0 | 0.0 | 0.0 |
| Ovarian Cancer | 0.0 | 0.0 | 0.0 | 0.2 | 0.0 |
| Ovarian Cancer (OD04768-07) | 0.1 | 0.0 | 0.1 | 0.0 | 0.0 |
| Ovary Margin (OD04768-08) | 0.0 | 0.0 | 0.0 | 0.0 | 0.0 |
| Normal Stomach | 0.0 | 0.1 | 0.0 | 0.2 | 0.0 |
| Gastric Cancer 9060358 | 0.0 | 0.0 | 0.0 | 0.0 | 0.0 |
| Stomach Margin 9060359 | 0.0 | 0.0 | 0.0 | 0.0 | 0.0 |
| Gastric Cancer 9060395 | 0.0 | 0.0 | 0.0 | 0.0 | 0.0 |
| Stomach Margin 9060394 | 0.0 | 0.0 | 0.0 | 0.0 | 0.0 |
| Gastric Cancer 9060397 | 1.5 | 0.7 | 0.6 | 0.3 | 0.2 |
| Stomach Margin 9060396 | 0.0 | 0.0 | 0.0 | 0.0 | 0.0 |
| Gastric Cancer 064005 | 0.1 | 0.3 | 0.0 | 0.2 | 0.2 |

[1625] TABLE BLK
Panel 3D
Column A - Rel. Exp. (%) Ag2899, Run 164633619
Column B - Rel. Exp. (%) Ag720, Run 164843791

| Tissue Name | A | B | Tissue Name | A | B |
|---|---|---|---|---|---|
| 94905 Daoy | 0.0 | 0.0 | 94954 Ca Ski Cervical | 0.0 | 3.2 |
| Medulloblastoma/Cerebellum | | | epidermoid carcinoma | | |
| | | | (metastasis | | |
| 94906 TE671 | 0.0 | 0.0 | 94955 ES-2 Ovarian clear cell | 0.0 | 0.0 |
| Medulloblastom/Cerebellum | | | carcinoma | | |
| 94907 D283 Med | 0.0 | 0.0 | 94957 Ramos Stimulated with | 0.0 | 0.0 |
| Medulloblastoma/Cerebellum | | | PMA/ionomycin 6 h | | |
| 94908 PFSK-1 Primitive | 0.0 | 1.4 | 94958 Ramos Stimulated with | 0.0 | 0.0 |
| Neuroectodermal/Cerebellum | | | PMA/ionomycin 14 h | | |
| 94909 XF-498 CNS | 0.0 | 0.0 | 94962 MEG-01 Chronic | 0.0 | 0.0 |
| | | | myelogenous leukemia | | |
| | | | (megokaryoblast) | | |
| 94910 SNB-78 CNS/glioma | 0.0 | 0.0 | 94963 Raji Burkitt's | 0.0 | 0.0 |
| | | | lymphoma | | |
| 94911 SF-268 CNS/glioblastoma | 0.0 | 0.0 | 94964 Daudi Burkitt's | 0.0 | 0.0 |
| | | | lymphoma | | |
| 94912 T98G Glioblastoma | 0.0 | 0.0 | 94965 U266 B-cell | 14.7 | 17.6 |
| | | | plasmacytoma/myeloma | | |
| 96776 SK-N-SH Neuroblastoma | 0.0 | 0.0 | 94968 CA46 Burkitt's | 0.0 | 0.0 |
| (metastasis) | | | lymphoma | | |
| 94913 SF-295 CNS/glioblastoma | 0.0 | 0.0 | 94970 RL non-Hodgkin's B- | 0.0 | 0.0 |
| | | | cell lymphoma | | |
| 94914 Cerebellum | 0.0 | 0.0 | 94972 JM1 pre-B-cell | 0.0 | 0.0 |
| | | | lymphoma/leukemia | | |
| 96777 Cerebellum | 1.2 | 0.0 | 94973 Jurkat T cell leukemia | 0.0 | 0.0 |
| 94916 NCI-H292 | 0.0 | 0.0 | 94974 TF-1 Erythroleukemia | 0.0 | 0.0 |
| Mucoepidermoid lung carcinoma | | | | | |
| 94917 DMS-114 Small cell lung | 0.0 | 0.0 | 94975 HUT 78 T-cell | 0.0 | 0.0 |
| cancer | | | lymphoma | | |
| 94918 DMS-79 Small cell lung | 100.0 | 100.0 | 94977 U937 Histiocytic | 0.0 | 0.0 |
| cancer/neuroendocrine | | | lymphoma | | |
| 94919 NCI-H146 Small cell lung | 0.0 | 0.0 | 94980 KU-812 Myelogenous | 0.0 | 0.0 |
| cancer/neuroendocrine | | | leukemia | | |
| 94920 NCI-H526 Small cell lung | 0.0 | 0.0 | 769-P- Clear cell renal | 0.0 | 0.0 |
| cancer/neuroendocrine | | | carcinoma | | |
| 94921 NCI-N417 Small cell lung | 0.0 | 0.0 | 94983 Caki-2 Clear cell renal | 0.8 | 1.9 |
| cancer/neuroendocrine | | | carcinoma | | |
| 94923 NCI-H82 Small cell lung | 0.0 | 0.0 | 94984 SW 839 Clear cell renal | 0.0 | 0.0 |
| cancer/neuroendocrine | | | carcinoma | | |
| 94924 NCI-H157 Squamous cell | 0.0 | 0.0 | 94986 G401 Wilms' tumor | 0.0 | 0.0 |
| lung cancer (metastasis) | | | | | |
| 94925 NCI-H1155 Large cell | 0.0 | 0.0 | 94987 Hs766T Pancreatic | 1.2 | 5.5 |
| lung cancer/neuroendocrine | | | carcinoma (LN metastasis) | | |
| 94926 NCI-H1299 Large cell | 0.0 | 0.0 | 94988 CAPAN-1 Pancreatic | 0.0 | 0.0 |
| lung cancer/neuroendocrine | | | adenocarcinoma (liver | | |
| | | | metastasis) | | |
| 94927 NCI-H727 Lung carcinoid | 0.0 | 0.0 | 94989 SU86.86 Pancreatic | 0.0 | 0.0 |
| | | | carcinoma (liver metastasis) | | |
| 94928 NCI-UMC-11 Lung | 0.0 | 4.9 | 94990 BxPC-3 Pancreatic | 0.0 | 2.9 |
| carcinoid | | | adenocarcinoma | | |
| 94929 LX-1 Small cell lung | 3.2 | 3.7 | 94991 HPAC Pancreatic | 1.2 | 5.1 |
| cancer | | | adenocarcinoma | | |
| 94930 Colo-205 Colon cancer | 7.5 | 29.3 | 94992 MIA PaCa-2 Pancreatic | 0.0 | 0.0 |
| | | | carcinoma | | |
| 94931 KM12 Colon cancer | 0.2 | 1.6 | 94993 CFPAC-1 Pancreatic | 29.1 | 47.6 |
| | | | ductal adenocarcinoma | | |
| 94932 KM20L2 Colon cancer | 1.2 | 0.0 | 94994 PANC-1 Pancreatic | 0.0 | 0.0 |
| | | | epithelioid ductal carcinoma | | |
| 94933 NCI-H716 Colon cancer | 0.0 | 0.0 | 94996 T24 Bladder carcinma | 0.0 | 0.0 |
| | | | (transitional cell | | |
| 94935 SW-48 Colon | 0.0 | 0.0 | 5637- Bladder carcinoma | 0.0 | 0.0 |
| adenocarcinoma | | | | | |
| 94936 SW1116 Colon | 0.0 | 0.0 | 94998 HT-1197 Bladder | 5.1 | 7.6 |
| adenocarcinoma | | | carcinoma | | |
| 94937 LS 174T Colon | 1.1 | 0.0 | 94999 UM-UC-3 Bladder | 0.0 | 0.0 |
| adenocarcinoma | | | carcinma (transitional cell) | | |
| 94938 SW-948 Colon | 0.0 | 0.0 | 95000 A204 | 0.0 | 0.0 |
| adenocarcinoma | | | Rhabdomyosarcoma | | |
| 94939 SW-480 Colon | 0.0 | 0.0 | 95001 HT-1080 Fibrosarcoma | 0.0 | 0.0 |
| adenocarcinoma | | | | | |
| 94940 NCI-SNU-5 Gastric | 0.0 | 1.1 | 95002 MG-63 Osteosarcoma | 0.0 | 0.0 |
| carcinoma | | | (bone) | | |
| KATO III- Gastric carcinoma | 0.0 | 1.9 | 95003 SK-LMS-1 | 0.0 | 0.0 |
| | | | Leiomyosarcoma (vulva) | | |
| 94943 NCI-SNU-16 Gastric | 2.2 | 0.0 | 95004 SJRH30 | 0.0 | 0.0 |
| carcinoma | | | Rhabdomyosarcoma (met to | | |
| | | | bone marrow) | | |
| 94944 NCI-SNU-1 Gastric | 0.0 | 0.0 | 95005 A431 Epidermoid | 1.8 | 1.6 |
| carcinoma | | | carcinoma | | |
| 94946 RF-1 Gastric | 0.0 | 0.0 | 95007 WM266-4 Melanoma | 0.0 | 0.0 |
| adenocarcinoma | | | | | |
| 94947 RF-48 Gastric | 0.0 | 0.0 | DU 145- Prostate carcinoma | 0.0 | 0.0 |
| adenocarcinoma | | | (brain metastasis) | | |
| 96778 MKN-45 Gastric | 0.0 | 0.0 | 95012 MDA-MB-468 Breast | 1.1 | 0.0 |
| carcinoma | | | adenocarcinoma | | |
| 94949 NCI-N87 Gastric | 0.0 | 3.8 | SCC-4- Squamous cell | 0.0 | 0.0 |
| carcinoma | | | carcinoma of tongue | | |
| 94951 OVCAR-5 Ovarian | 29.7 | 62.0 | SCC-9- Squamous cell | 0.0 | 0.0 |
| carcinoma | | | carcinoma of tongue | | |
| 94952 RL95-2 Uterine carcinoma | 19.3 | 21.8 | SCC-15- Squamous cell | 0.0 | 0.0 |
| | | | carcinoma of tongue | | |
| 94953 HelaS3 Cervical | 0.0 | 0.0 | 95017 CAL 27 Squamous cell | 0.0 | 0.0 |
| adenocarcinoma | | | carcinoma of tongue | | |

[1626] TABLE BLL
Panel 4D
Column A - Rel. Exp. (%) Ag1590, Run 152061102
Column B - Rel. Exp. (%) Ag1590, Run 155330411
Column C - Rel. Exp. (%) Ag1918, Run 147288180
Column D - Rel. Exp. (%) Ag2899, Run 159633215

| Tissue Name | A | B | C | D |
|---|---|---|---|---|
| Secondary Th1 act | 0.0 | 0.0 | 0.0 | 0.0 |
| Secondary Th2 act | 0.0 | 0.0 | 0.0 | 4.3 |
| Secondary Tr1 act | 0.0 | 0.0 | 0.0 | 6.6 |
| Secondary Th1 rest | 0.0 | 0.0 | 0.0 | 0.0 |
| Secondary Th2 rest | 0.0 | 0.0 | 0.0 | 0.0 |
| Secondary Tr1 rest | 0.0 | 0.0 | 0.0 | 0.0 |
| Primary Th1 act | 0.0 | 0.0 | 0.0 | 0.0 |
| Primaiy Th2 act | 0.0 | 0.0 | 0.0 | 0.0 |
| Primary Tr1 act | 0.0 | 0.0 | 0.0 | 0.0 |
| Primary Th1 rest | 0.0 | 0.0 | 0.0 | 0.0 |
| Primary Th2 rest | 0.0 | 0.0 | 0.0 | 0.0 |
| Primary Tr1 rest | 0.0 | 0.0 | 0.0 | 0.0 |
| CD45RA CD4 lymphocyte act | 0.0 | 0.0 | 0.0 | 0.0 |
| CD45RO CD4 lymphocyte act | 0.0 | 0.0 | 0.0 | 0.0 |
| CD8 lymphocyte act | 0.0 | 0.0 | 0.0 | 0.0 |
| Secondary CD8 lymphocyte rest | 0.0 | 0.0 | 0.0 | 0.0 |
| Secondary CD8 lymphocyte act | 0.0 | 0.0 | 0.0 | 0.0 |
| CD4 lymphocyte none | 0.0 | 0.0 | 0.0 | 0.0 |
| 2ry Th1/Th2/Tr1 anti-CD95 CH11 | 0.0 | 0.0 | 0.0 | 0.0 |
| LAK cells rest | 0.0 | 0.0 | 0.0 | 0.0 |
| LAK cells IL-2 | 0.0 | 0.0 | 0.0 | 0.0 |
| LAK cells IL-2 + IL-12 | 0.0 | 0.0 | 0.0 | 0.0 |
| LAK cells IL-2 + IFN gamma | 0.0 | 0.0 | 0.0 | 0.0 |
| LAK cells IL-2 + IL-18 | 0.0 | 0.0 | 0.0 | 0.0 |
| LAK cells PMA/ionomycin | 0.0 | 0.0 | 0.0 | 0.0 |
| NK cells IL-2 rest | 0.0 | 0.0 | 0.0 | 0.0 |
| Two Way MLR 3 day | 0.0 | 0.0 | 0.0 | 0.0 |
| Two Way MLR 5 day | 0.0 | 0.0 | 0.0 | 0.0 |
| Two Way MLR 7 day | 0.0 | 0.0 | 0.0 | 0.0 |
| PBMC rest | 6.3 | 0.0 | 0.0 | 0.0 |
| PBMC PWM | 0.0 | 0.0 | 0.0 | 0.0 |
| PBMC PHA-L | 0.0 | 0.0 | 0.0 | 0.0 |
| Ramos (B cell) none | 0.0 | 0.0 | 0.0 | 0.0 |
| Ramos (B cell) ionomycin | 0.0 | 0.0 | 0.0 | 0.0 |
| B lymphocytes PWM | 0.0 | 0.0 | 0.0 | 0.0 |
| B lymphocytes CD40L and IL-4 | 0.0 | 0.0 | 0.0 | 0.0 |
| EOL-1 dbcAMP | 0.0 | 0.0 | 0.0 | 0.0 |
| EOL-1 dbcAMP PMA/ionomycin | 0.0 | 0.0 | 0.0 | 0.0 |
| Dendritic cells none | 0.0 | 0.0 | 0.0 | 0.0 |
| Dendritic cells LPS | 0.0 | 0.0 | 0.0 | 0.0 |
| Dendnitic cells anti-CD40 | 0.0 | 0.0 | 0.0 | 0.0 |
| Monocytes rest | 0.0 | 0.0 | 0.0 | 12.9 |
| Monocytes LPS | 0.0 | 0.0 | 0.0 | 0.0 |
| Macrophages rest | 0.0 | 0.0 | 0.0 | 0.0 |
| Macrophages LPS | 0.0 | 0.0 | 0.0 | 0.0 |
| HUVEC none | 0.0 | 0.0 | 0.0 | 0.0 |
| HUVEC starved | 0.0 | 0.0 | 0.0 | 0.0 |
| HUVEC IL-1beta | 0.0 | 0.0 | 0.0 | 0.0 |
| HUVEC IFN gamma | 0.0 | 0.0 | 0.0 | 0.0 |
| HUVEC TNF alpha + IFN gamma | 0.0 | 0.0 | 0.0 | 0.0 |
| HUVEC TNF alpha + IL4 | 0.0 | 0.0 | 0.0 | 0.0 |
| HUVEC IL-11 | 0.0 | 0.0 | 0.0 | 0.0 |
| Lung Microvascular EC none | 0.0 | 0.0 | 0.0 | 0.0 |
| Lung Microvascular EC TNFalpha + | 0.0 | 0.0 | 0.0 | 0.0 |
| IL-1beta | | | | |
| Microvascular Dermal EC none | 0.0 | 0.0 | 0.0 | 0.0 |
| Microsvasular Dermal EC TNFalpha + | 0.0 | 0.0 | 0.0 | 0.0 |
| IL-1beta | | | | |
| Bronchial epithelium TNFalpha + IL-1beta | 13.9 | 0.0 | 30.1 | 3.4 |
| Small airway epithelium none | 0.0 | 0.0 | 0.0 | 0.0 |
| Small airway epithelium TNFalpha + | 0.0 | 0.0 | 0.0 | 0.0 |
| IL-1beta | | | | |
| Coronery artery SMC rest | 0.0 | 0.0 | 0.0 | 0.0 |
| Coronety artery SMG TNFalpha + IL-1beta | 0.0 | 0.0 | 0.0 | 0.0 |
| Astrocytes rest | 0.0 | 0.0 | 0.0 | 0.0 |
| Astrocytes TNFalpha + IL-1beta | 0.0 | 0.0 | 0.0 | 0.0 |
| KU-812 (Basophil) rest | 0.0 | 0.0 | 0.0 | 0.0 |
| KU-812 (Basophil) PMA/ionomycin | 10.8 | 0.0 | 0.0 | 5.4 |
| CCD1106 (Keratinocytes) none | 0.0 | 0.0 | 0.0 | 0.0 |
| CCD1106 (Keratinocytes) TNFalpha + | 0.0 | 0.0 | 0.0 | 0.0 |
| IL-1beta | | | | |
| Liver cirrhosis | 22.7 | 80.1 | 63.7 | 100.0 |
| Lupus kidney | 0.0 | 7.4 | 0.0 | 0.0 |
| NCI-H292 none | 60.3 | 92.7 | 36.3 | 28.9 |
| NCI-H292 IL-4 | 55.9 | 6.5 | 28.7 | 14.3 |
| NCI-H292 IL-9 | 100.0 | 41.8 | 40.1 | 29.7 |
| NCI-H292 IL-13 | 35.8 | 6.7 | 9.4 | 23.7 |
| NCI-H292 IFN gamma | 0.0 | 23.8 | 1.2 | 0.0 |
| HPAEC none | 0.0 | 0.0 | 0.0 | 0.0 |
| HPAEC TNF alpha + IL-1 beta | 0.0 | 0.0 | 0.0 | 0.0 |
| Lung fibroblast none | 0.0 | 0.0 | 0.0 | 0.0 |
| Lung fibroblast TNF alpha + IL-1 beta | 0.0 | 0.0 | 0.0 | 0.0 |
| Lung fibroblast IL-4 | 0.0 | 0.0 | 0.0 | 0.0 |
| Lung fibroblast IL-9 | 0.0 | 0.0 | 0.0 | 0.0 |
| Lung fibroblast IL-13 | 0.0 | 0.0 | 0.0 | 0.0 |
| Lung fibroblast IFN gamma | 0.0 | 0.0 | 0.0 | 0.0 |
| Dermal fibroblast CCD1070 rest | 0.0 | 0.0 | 0.0 | 0.0 |
| Dermal fibroblast CCD1070 TNF alpha | 0.0 | 0.0 | 0.0 | 0.0 |
| Dermal fibroblast CCD1070 IL-1 beta | 0.0 | 0.0 | 0.0 | 0.0 |
| Dermal fibroblast IFN gamma | 0.0 | 0.0 | 0.0 | 0.0 |
| Dermal fibroblast IL-4 | 0.0 | 0.0 | 0.0 | 0.0 |
| IBD Colitis 2 | 0.0 | 0.0 | 0.0 | 0.0 |
| IBD Crohn's | 13.8 | 0.0 | 0.0 | 0.0 |
| Colon | 79.6 | 100.0 | 100.0 | 74.7 |
| Lung | 77.9 | 66.0 | 53.6 | 85.3 |
| Thymus | 62.0 | 21.6 | 0.7 | 23.0 |
| Kidney | 0.0 | 0.0 | 0.0 | 0.0 |

[1627] Ardais Breast1.0 Summary: Ag720 Expression of this gene was highest in a breast cancer sample (CT=27.1). Significant expression of this gene was detected in 45/64 breast cancer samples but only 1/7 normal breast samples. Gene or protein expression levels are useful for the detection of breast cancer. Therapeutic modulation of the activity of this gene or its protein product using nucleic acid, protein, antibody or small molecule drugs are useful in the treatment of breast cancer.

[1628] This gene encodes a protein with homology to mastocytoma protease precursor. Mast cell tryptase is a secretory granule associated serine protease with trypsin-like specificity. It is released extracellularly during mast cell degranulation. Mast cells (MC) have been associated with diverse human cancers. The primary function of these cells is to store and release a number of biologically active mediators, including the serine proteases tryptase and chymase. These proteases have been closely related with angiogenesis and tumor invasion, two critical steps during tumor progression. Malignant breast tumors have two to three times more tryptase-containing than chymase-containing mast cells, with the number of mast cells with trptase activity being significantly higher (p<0.02) than in benign lesions. In malignant lesions, tryptase-containing mast cells were concentrated at the tumor edge, i.e. the invasion zone (Kankkunen J P, Harvima I T, Naukkarinen A. Quantitative analysis of tryptase and chymase containing mast cells in benign and malignant breast lesions. Int J Cancer. 1997 Jul. 29; 72(3): 385-8). It is therefore likely that this protein has a role in tumor invasion and metastasis.

[1629] Panel 1.3D Summary: Ag1590/2899 The expression of this gene was assessed in four independent runs using two different probe/primer sets. All of the runs show excellent concordance. The expression of this gene appears to be highest in a sample derived from an ovarian cancer cell line (OVCAR-5) (CTs=31-32). In addition, there appears to be substantial expression associated with a colon cancer cell line, a gastric cancer cell line and pituitary tissue. Thus, the expression of this gene could be used to distinguish OVCAR-5 cells from the other samples in the panel. Moreover, therapeutic modulation of this gene, through the use of small molecule drugs, protein therapeutics or antibodies might be of benefit in the treatment of ovarian cancer, gastric cancer or colon cancer

[1630] Panel 2D Summary: Ag720/1590/2899 The expression of this gene was assessed in five independent runs in panel 2D using three different primer/probe paris. There is excellent concordance of between these runs. The expression of this gene was highest and exclusive to breast cancer samples (CTs=26-28). Thus, the expression of this gene could be used to distinguish breast cancer samples from other samples in the panel. Moreover, therapeutic modulation of this gene, through the use of small molecule drugs, protein therapeutics or antibodies might be of benefit in the treatment of breast cancer.

[1631] Panel 3D Summary: Ag720/2899 The expression of this gene was highest and almost exclusive to a sample derived from a lung cancer cell line (DMS-79)(CTs=29-31). In addition, there was low but substantial expression associated with samples derived from an ovarian cancer cell line, a uterine cancer cell line and a pancreatic cancer cell line. The expression of this gene or expressed protein is useful in the detection of lung cancer. Therapeutic modulation of this gene, expressed protein and/or use of antibodies or small molecule drugs targeting the gene or gene product are useful in the treatment of lung cancer, ovarian cancer, pancreatic cancer or uterine cancer.

[1632] Panel 4D Summary: Ag1590/Ag1918/Ag2899 This gene, a tryptase homolog, was expressed at significant levels in IL-9-activated NCI-H292 cells, pulmonary mucoepidermoid cells. Colon, lung, and thymus tissues also showed low levels of expression of this gene. The expression in lung and in the activated NCI-H292 cell line—often used as a model for airway epithelium—is consistent with published reports of tryptase in the lung (Walls A F, Bennett A R, Godfrey R C, Holgate S T, Church M K. Mast cell tryptase and histamine concentrations in bronchoalveolar lavage fluid from patients with interstitial lung disease. Clin Sci (Lond) 1991 August; 81(2):183-8). In addition, tryptase has been shown to be up-regulated in lungs affected by disease and specifically in COPD (Grashoff W F, Sont J K, Sterk P J, Hiemstra P S, de Boer W I, Stolk J, Han J, van Krieken J M. Chronic obstructive pulmonary disease: role of bronchiolar mast cells and macrophages. Am J Pathol 1997 December; 151(6):1785-90). Tryptase has also been implicated in the recruitment of granulocytes and epithelial repair (Cairns J A, Walls A F. Mast cell tryptase is a mitogen for epithelial cells. Stimulation of IL-8 production and intercellular adhesion molecule-1 expression. J Immunol 1996 Jan. 1; 156(1):275-83). Based On these observations, small molecule antagonists or antagonist antibodies are useful in the reduction or elimination of symptoms in patients with lung diseases including asthma, allergy, or chronic obstructive pulmonary disease.

[1633] BM. CG59693-01 and CG59693-03: 20 Alpha-Hydroxysteroid Dehydrogenase.

[1634] Expression of genes CG59693-01 and CG59693-03 was assessed using the primer-probe set Ag3562, described in Table BMA. Results of the RTQ-PCR runs are shown in Tables BMB, BMC, BMD, BME, BMF, BMG, BMH and BMI. CG59693-03 represents a full-length physical clone of the CG59693-01 gene.

TABLE BMA
Probe Name Ag3562

| | | | | SEQ |
|---|---|---|---|---|
| | | | Start | ID |
| Primers | Sequences | Length | Position | No |
| Forward | 5′-ctggccaagagctacaatga-3′ | 20 | 802 | 1437 |
| Probe | TET-5′-catcagacagaacgtgcaggtgtttg-3′- | 26 | 828 | 1438 |
| | TAMRA | | | |
| Reverse | 5′-aggccatctatggctttcat-3′ | 20 | 877 | 1439 |

[1635] TABLE BMB
Ardais Panel v.1.0
Column A - Rel. Exp. (%) Ag3562, Run 263525399

| Tissue Name | A |
|---|---|
| 136799 Lung cancer(362) | 52.9 |
| 136800 Lung NAT(363) | 0.8 |
| 136813 Lung cancer(372) | 100.0 |
| 136814 Lung NAT(373) | 0.4 |
| 136815 Lung cancer(374) | 1.1 |
| 136816 Lung NAT(375) | 1.6 |
| 136791 Lung cancer(35A) | 0.4 |
| 136795 Lung cancer(35E) | 1.6 |
| 136797 Lung cancer(360) | 0.4 |
| 136794 lung NAT(35D) | 1.2 |
| 136818 Lung NAT(377) | 0.5 |
| 136787 lung cancer(356) | 0.1 |
| 136788 lung NAT(357) | 1.1 |
| 136806 Lung cancer(36B) | 0.1 |
| 136807 Lung NAT(36C) | 0.4 |
| 136789 lung cancer(358) | 0.4 |
| 136802 Lung cancer(365) | 1.6 |
| 136803 Lung cancer(368) | 0.5 |
| 136804 Lung cancer(369) | 1.4 |
| 136811 Lung cancer(370) | 64.2 |
| 136810 Lung NAT(36F) | 3.9 |

[1636] TABLE BMC
CNS_neurodegeneration_v1.0
Column A - Rel. Exp. (%) Ag3562, Run 210629741
Column B - Rel. Exp. (%) Ag3562, Run 224078542

| Tissue Name | A | B | Tissue Name | A | B |
|---|---|---|---|---|---|
| AD 1 Hippo | 100.0 | 100.0 | AH3 4624 | 16.5 | 24.3 |
| AD 2 Hippo | 37.9 | 33.9 | AH3 4640 | 22.7 | 21.3 |
| AD 3 Hippo | 28.1 | 35.6 | AD 1 Occipital Ctx | 42.0 | 65.5 |
| AD 4 Hippo | 26.8 | 25.7 | AD 2 Occipital Ctx (Missing) | 0.7 | 1.2 |
| AD 5 Hippo | 37.1 | 41.5 | AD 3 Occipital Ctx | 32.8 | 27.7 |
| AD 6 Hippo | 76.8 | 66.4 | AD 4 Occipital Ctx | 20.6 | 11.2 |
| Control 2 Hippo | 30.6 | 32.3 | AD 5 Occipital Ctx | 26.1 | 27.0 |
| Control 4 Hippo | 30.8 | 34.9 | AD 5 Occipital Ctx | 39.0 | 48.0 |
| Control (Path) 3 Hippo | 24.1 | 21.0 | Control 1 Occipital Ctx | 18.2 | 16.6 |
| AD 1 Temporal Ctx | 57.8 | 64.2 | Control 2 Occipital Ctx | 16.7 | 24.0 |
| AD 2 Temporal Ctx | 34.4 | 29.9 | Control 3 Occipital Ctx | 18.4 | 19.8 |
| AD 3 Temporal Ctx | 25.7 | 27.7 | Control 4 Occipital Ctx | 20.4 | 22.1 |
| AD 4 Temporal Ctx | 23.0 | 24.1 | Control (Path) 1 Occipital Ctx | 21.8 | 18.0 |
| AD 5 Inf Temporal Ctx | 33.7 | 44.1 | Control (Path) 2 Occipital Ctx | 11.9 | 15.7 |
| AD 5 Sup Temporal Ctx | 54.7 | 54.3 | Control (Path) 3 Occipital Ctx | 34.4 | 22.1 |
| AD 6 Inf Temporal Ctx | 47.3 | 48.0 | Control (Path) 4 Occipital Ctx | 18.0 | 18.6 |
| AD 6 Sup Temporal Ctx | 45.4 | 46.7 | Control 1 Parietal Ctx | 16.5 | 19.1 |
| Control 1 Temporal Ctx | 22.8 | 23.8 | Control 2 Parietal Ctx | 62.9 | 55.9 |
| Control 2 Temporal Ctx | 18.4 | 29.1 | Control 3 Parietal Ctx | 35.8 | 29.7 |
| Control 3 Temporal Ctx | 25.5 | 19.3 | Control (Path) 1 Parietal Ctx | 24.0 | 24.7 |
| Control 3 Temporal Ctx | 18.2 | 16.8 | Control (Path) 2 Parietal Ctx | 15.9 | 15.6 |
| AH3 3975 | 21.5 | 22.1 | Control (Path) 3 Parietal Ctx | 22.1 | 26.1 |
| AH3 3954 | 17.4 | 17.3 | Control (Path) 4 Parietal Ctx | 23.0 | 24.1 |

[1637] TABLE BMD
General_screening_panel_v1.4
Column A - Rel. Exp. (%) Ag3562, Run 217240778

| Tissue Name | A |
|---|---|
| Adipose | 2.1 |
| Melanoma* Hs688(A).T | 0.2 |
| Melanoma* Hs688(B).T | 0.3 |
| Melanoma* M14 | 0.0 |
| Melanoma* LOXIMVI | 0.0 |
| Melanoma* SK-MEL-5 | 0.0 |
| Squamous cell carcinoma SCC-4 | 0.5 |
| Testis Pool | 0.2 |
| Prostate ca.* (bone met) PC-3 | 0.0 |
| Prostate Pool | 0.1 |
| Placenta | 0.0 |
| Uterus Pool | 0.1 |
| Ovarian ca. OVCAR-3 | 0.0 |
| Ovarian ca. SK-OV-3 | 11.8 |
| Ovarian ca. OVCAR-4 | 0.0 |
| Ovarian ca. OVCAR-5 | 0.3 |
| Ovarian ca. IGROV-1 | 0.5 |
| Ovarian ca. OVCAR-8 | 0.2 |
| Ovary | 0.2 |
| Breast ca. MCF-7 | 0.5 |
| Breast ca. MDA-MB-231 | 1.1 |
| Breast ca. BT 549 | 1.2 |
| Breast ca. T47D | 0.6 |
| Breast ca. MDA-N | 0.0 |
| Breast Pool | 0.1 |
| Trachea | 1.3 |
| Lung | 0.2 |
| Fetal Lung | 0.3 |
| Lung ca. NCI-N417 | 0.0 |
| Lung ca. LX-1 | 1.6 |
| Lung ca. NCI-H146 | 1.0 |
| Lung ca. SHP-77 | 14.7 |
| Lung ca. A549 | 100.0 |
| Lung ca. NCI-H526 | 0.0 |
| Lung ca. NCI-H23 | 0.2 |
| Lung ca. NCI-H460 | 11.1 |
| Lung ca. HOP-62 | 0.1 |
| Lung ca. NCI-H522 | 0.6 |
| Liver | 0.7 |
| Fetal Liver | 4.1 |
| Liver ca. HepG2 | 2.4 |
| Kidney Pool | 0.2 |
| Fetal Kidney | 0.1 |
| Renal ca. 786-0 | 0.3 |
| Renal ca. A498 | 11.2 |
| Renal ca. ACHN | 0.2 |
| Renal ca. UO-31 | 0.1 |
| Renal ca. TK-10 | 1.5 |
| Bladder | 0.8 |
| Gastric ca. (liver met.) NCI-N87 | 0.1 |
| Gastric ca. KATO III | 0.4 |
| Colon ca. SW-948 | 0.6 |
| Colon ca. SW480 | 0.1 |
| Colon ca.* (SW480 met) SW620 | 0.5 |
| Colon ca. HT29 | 0.5 |
| Colon ca. HCT-116 | 0.0 |
| Colon ca. CaCo-2 | 2.6 |
| Colon cancer tissue | 0.4 |
| Colon ca. SW1116 | 0.0 |
| Colon ca. Colo-205 | 3.0 |
| Colon ca. SW-48 | 0.9 |
| Colon Pool | 0.1 |
| Small Intestine Pool | 0.1 |
| Stomach Pool | 0.1 |
| Bone Marrow Pool | 0.1 |
| Fetal Heart | 0.0 |
| Heart Pool | 0.1 |
| Lymph Node Pool | 0.2 |
| Fetal Skeletal Muscle | 0.1 |
| Skeletal Muscle Pool | 0.7 |
| Spleen Pool | 0.0 |
| Thymus Pool | 0.2 |
| CNS cancer (glio/astro) | 0.9 |
| U87-MG | |
| CNS cancer (glio/astro) | 1.0 |
| U-118-MG | |
| CNS cancer (neuro; met) | 0.3 |
| SK-N-AS | |
| CNS cancer (astro) SF-539 | 0.1 |
| CNS cancer (astro) SNB-75 | 10.2 |
| CNS cancer (glio) SNB-19 | 0.4 |
| CNS cancer (glio) SF-295 | 4.0 |
| Brain (Amygdala) Pool | 0.2 |
| Brain (cerebellum) | 0.1 |
| Brain (fetal) | 0.5 |
| Brain (Hippocampus) Pool | 0.1 |
| Cerebral Cortex Pool | 0.1 |
| Brain (Substantia nigra) Pool | 0.2 |
| Brain (Thalamus) Pool | 0.2 |
| Brain (whole) | 0.4 |
| Spinal Cord Pool | 0.3 |
| Adrenal Gland | 0.2 |
| Pituitary gland Pool | 0.0 |
| Salivary Gland | 0.1 |
| Thyroid (female) | 0.1 |
| Pancreatic ca. CAPAN2 | 0.2 |
| Pancreas Pool | 0.2 |

[1638] TABLE BME
HASS Panel v1.0
Column A - Rel. Exp. (%) Ag3562, Run 276044499

| Tissue Name | A |
|---|---|
| MCF-7 C1 | 8.5 |
| MCF-7 C2 | 12.0 |
| MCF-7 C3 | 15.7 |
| MGF-7 C4 | 13.2 |
| MGF-7 C5 | 20.2 |
| MCF-7 C6 | 10.4 |
| MCF-7 C7 | 8.8 |
| MGF-7 C9 | 6.9 |
| MCF-7 C10 | 10.2 |
| MCF-7 C11 | 5.8 |
| MCF-7 C12 | 8.7 |
| MGF-7 C13 | 7.6 |
| MCF-7 C15 | 3.6 |
| MGF-7 C16 | 13.2 |
| MCF-7 C17 | 9.8 |
| T24 D1 | 32.8 |
| T24 D2 | 12.2 |
| T24 D3 | 26.4 |
| T24 D4 | 48.3 |
| T24 D5 | 18.2 |
| T24 D6 | 0.2 |
| T24 D7 | 1.0 |
| T24 D9 | 0.0 |
| T24 D10 | 23.7 |
| T24 D11 | 2.7 |
| T24 D12 | 0.1 |
| T24 D13 | 0.3 |
| T24 D15 | 0.3 |
| T24 D16 | 0.2 |
| T24 D17 | 0.5 |
| CAPaN B1 | 4.4 |
| CAPaN B2 | 6.3 |
| CAPaN B3 | 4.3 |
| CAPaN B4 | 3.4 |
| CAPaN B5 | 14.9 |
| CAPaN B6 | 2.1 |
| CAPaN B7 | 1.8 |
| CAPaN B8 | 10.7 |
| CAPaN B9 | 2.6 |
| CAPaN B10 | 6.4 |
| CAPaN B11 | 16.3 |
| CAPaN B12 | 1.7 |
| CAPaN B13 | 1.3 |
| CAPaN B14 | 7.4 |
| CAPaN B15 | 11.2 |
| CAPaN B16 | 4.2 |
| CAPaN B17 | 14.2 |
| U87-MG F1 (B) | 19.6 |
| U87-MG F2 | 5.2 |
| U87-MG F3 | 15.8 |
| U87-MG F4 | 10.2 |
| U87-MG F5 | 40.3 |
| U87-MG F6 | 92.7 |
| U87-MG F7 | 5.9 |
| U87-MG F8 | 9.1 |
| U87-MG F9 | 1.9 |
| U87-MG F10 | 57.4 |
| U87-MG F11 | 100.0 |
| U87-MG F12 | 30.4 |
| U87-MG F13 | 10.2 |
| U87-MG F14 | 16.7 |
| U87-MG F15 | 9.5 |
| U87-MG F16 | 66.4 |
| U87-MG F17 | 67.4 |
| LnCAP A1 | 0.2 |
| LnCAP A2 | 0.2 |
| LnCAP A3 | 0.1 |
| LnCAP A4 | 0.1 |
| LnCAP A5 | 0.2 |
| LnCAP A6 | 0.2 |
| LnCAP A7 | 0.4 |
| LnCAP A8 | 0.6 |
| LnCAP A9 | 0.8 |
| LnCAP A10 | 0.2 |
| LnCAP A11 | 0.4 |
| LnCAP A12 | 0.1 |
| LnCAP A13 | 0.0 |
| LnCAP A14 | 0.2 |
| LnCAP A15 | 0.3 |
| LnCAP A16 | 0.2 |
| LnCAP A17 | 0.5 |
| Primary Astrocytes | 0.4 |
| Primary Renal Proximal Tubule Epithelial cell A2 | 25.0 |
| Primary melanocytes A5 | 1.7 |
| 126443 - 341 medullo | 0.1 |
| 126444 - 487 medullo | 0.0 |
| 126445 - 425 medullo | 0.0 |
| 126446 - 690 medullo | 0.2 |
| 126447 - 54 adult glioma | 3.8 |
| 126448 - 245 adult glioma | 0.0 |
| 126449 - 317 adult glioma | 0.0 |
| 126450 - 212 glioma | 0.1 |
| 126451 - 456 glioma | 0.0 |

[1639] TABLE BMF
Oncology cell_line_screening_panel_v3.1
Column A - Rel. Exp. (%) Ag3562, Run 222546381

| Tissue Name | A |
|---|---|
| 94905 Daoy Medulloblastoma/Cerebellum | 0.0 |
| 94906 TE671 Medulloblastom/Cerebellum | 0.2 |
| 94907 D283 Med Medulloblastoma/Cerebellum | 0.0 |
| 94908 PFSK-1 Primitive Neuroectodermal/Cerebellum | 0.1 |
| 94909 XF-498 CNS | 0.0 |
| 94910 SNB-78 CNS/glioma | 0.3 |
| 94911 SF-268 CNS/glioblastoma | 0.0 |
| 94912 T98G Glioblastoma | 33.2 |
| 96776 SK-N-SH Neuroblastoma (metastasis) | 0.0 |
| 94913 SF-295 CNS/glioblastoma | 2.3 |
| 94914 Cerebellum | 0.4 |
| 96777 Cerebellum | 0.1 |
| 94916 NCI-H292 Mucoepidermoid lung carcinoma | 0.3 |
| 94917 DMS-114 Small cell lung cancer | 0.0 |
| 94918 DMS-79 Small cell lung cancer/neuroendocrine | 0.0 |
| 94919 NCI-H146 Small cell lung cancer/neuroendocrine | 2.2 |
| 94920 NCI-H526 Small cell lung cancer/neuroendocrine | 0.0 |
| 94921 NCI-N417 Small cell lung cancer/neuroendocrine | 0.0 |
| 94923 NCI-H82 Small cell lung cancer/neuroendocrine carcinoma | 0.0 |
| 94924 NCI-H157 Squamous cell lung cancer (metastasis) | 0.0 |
| 94925 NCI-H1155 Large cell lung cancer/neuroendocrine | 0.0 |
| 94926 NCI-H1299 Large cell lung cancer/neuroendocrine | 0.0 |
| 94927 NCI-H727 Lung carcinoid | 1.3 |
| 94928 NCI-UMC-11 Lung carcinoid | 100.0 |
| 94929 LX-1 Small cell lung cancer | 1.6 |
| 94930 Colo-205 Colon cancer | 7.5 |
| 94931 KM12 Colon cancer | 0.1 |
| 94932 KM20L2 Colon cancer | 0.1 |
| 94933 NCI-H716 Colon cancer | 19.2 |
| 94935 SW-48 Colon adenocarcinoma | 2.3 |
| 94936 SW1116 Colon adenocarcinoma | 0.0 |
| 94937 LS 174T Colon adenocarcinoma | 0.9 |
| 94938 SW-948 Colon adenocarcinoma | 0.3 |
| 94939 SW-480 Colon adenocarcinoma | 0.5 |
| 94940 NCI-SNU-5 Gastric carcinoma | 0.0 |
| 112197 KATO III Stomach | 0.1 |
| 94943 NCI-SNU-16 Gastric carcinoma | 2.7 |
| 94944 NCI-SNU-1 Gastric carcinoma | 16.8 |
| 94946 RF-1 Gastric adenocarcinoma | 0.5 |
| 94947 RF-48 Gastric adenocarcinoma | 0.0 |
| 96778 MKN-45 Gastric carcinoma | 1.6 |
| 94949 NCI-N87 Gastric carcinoma | 0.8 |
| 94951 OVCAR-5 Ovarian carcinoma | 0.4 |
| 94952 RL95-2 Uterine carcinoma | 0.5 |
| 94953 HelaS3 Cervical adenocarcinoma | 0.9 |
| 94954 Ca Ski Cervical epidermoid carcinoma (metastasis | 0.3 |
| 94955 ES-2 Ovarian clear cell carcinoma | 0.0 |
| 94957 Ramos Stimulated with PMA/ionomycin 6h | 0.0 |
| 94958 Ramos Stimulated with PMA/ionomycin 14h | 0.0 |
| 94962 MEG-01 Chronic myelogenous leukemia (megokaryoblast) | 0.1 |
| 94963 Raji Burkitt's lymphoma | 0.0 |
| 94964 Daudi Burkitt's lymphoma | 0.0 |
| 94965 U266 B-cell plasmacytoma/myeloma | 0.0 |
| 94968 CA46 Burkitt's lymphoma | 0.0 |
| 94970 RL non-Hodgkin's B-cell lymphoma | 0.0 |
| 94972 JM1 pre-B-cell lymphoma/leukemia | 0.0 |
| 94973 Jurkat T cell leukemia | 0.0 |
| 94974 TF-1 Erythroleukemia | 1.6 |
| 94975 HUT 78 T-cell lymphoma | 0.0 |
| 94977 U937 Histiocytic lymphoma | 0.0 |
| 94980 KU-812 Myelogenous leukemia | 0.9 |
| 769-P- Clear cell renal carcinoma | 1.0 |
| 94983 Caki-2 Clear cell renal carcinoma | 63.7 |
| 94984 SW 839 Clear cell renal | 0.4 |
| 94986 G401 Wilms' tumor | 0.0 |
| 94987 Hs766T Pancreatic carcinoma (LN metastasis) | 0.2 |
| 94988 CAPAN-1 Pancreatic adenocarcinoma (liver metastasis) | 0.3 |
| 94989 SU86.86 Pancreatic carcinoma (liver metastasis) | 1.2 |
| 94990 BxPC-3 Pancreatic adenocarcinoma | 3.6 |
| 94991 HPAC Pancreatic adenocarcinoma | 3.1 |
| 94992 MIA PaCa-2 Pancreatic carcinoma | 0.0 |
| 94993 CFPAC-1 Pancreatic ductal adenocarcinoma | 3.9 |
| 94994 PANC-1 Pancreatic epitheliold ductal carcinoma | 0.0 |
| 94996 T24 Bladder carcinma (transitional cell | 2.0 |
| 5637- Bladder carcinoma | 0.1 |
| 94998 HT-1197 Bladder carcinoma | 0.0 |
| 94999 UM-UC-3 Bladder carcinma (transitional cell) | 0.1 |
| 95000 A204 Rhabdomyosarcoma | 0.8 |
| 95001 HT-1080 Fibrosarcoma | 0.0 |
| 95002 MG-63 Osteosarcoma (bone) | 0.0 |
| 95003 SK-LMS-1 Leiomyosarcoma (vulva) | 0.0 |
| 95004 SJRH30 Rhabdomyosarcoma (met to bone marrow) | 0.1 |
| 95005 A431 Epidermoid carcinoma | 3.8 |
| 95007 WM266-4 Melanoma | 0.1 |
| 112195 DU 145 Prostate | 0.1 |
| 95012 MDA-MB-468 Breast adenocarcinoma | 0.5 |
| 112196 SSC-4 Tongue | 0.4 |
| 112194 SSC-9 Tongue | 0.2 |
| 112191 SSC-15 Tongue | 0.3 |
| 95017 CAL 27 Squamous cell carcinoma of | 0.1 |
| tongue | |

[1640] TABLE BMG
Panel 2D
Column A - Rel. Exp. (%) Ag3562, Run 170858350

| Tissue Name | A |
|---|---|
| Normal Colon | 5.0 |
| CC Well to Mod Diff (OD03866) | 1.5 |
| CC Margin (OD03866) | 2.0 |
| CC Gr.2 rectosigmoid (OD03868) | 0.5 |
| CC Margin (OD03868) | 0.5 |
| CC Mod Duff (OD03920) | 0.5 |
| CC Margin (OD03920) | 1.2 |
| CC Gr.2 ascend colon (OD03921) | 2.1 |
| CC Margin (OD03921) | 1.4 |
| CC from Partial Hepatectomy (OD04309) Mets | 5.5 |
| Liver Margin (OD04309) | 27.0 |
| Colon mets to lung (OD04451-01) | 0.4 |
| Lung Margin (OD04451-02) | 1.8 |
| Normal Prostate 6546-1 | 1.3 |
| Prostate cancer (OD04410) | 0.4 |
| Prostate Margin (OD04410) | 0.5 |
| Prostate cancer (OD04720-01) | 0.6 |
| Prostate Margin (OD04720-02) | 1.6 |
| Normal Lung | 4.1 |
| Lung Met to Muscle (OD04286) | 41.8 |
| Muscle Margin (OD04286) | 1.7 |
| Lung Malignant cancer (OD03126) | 2.0 |
| Lung Margin (OD03126) | 2.1 |
| Lung cancer (OD04404) | 100.0 |
| Lung Margin (OD04404) | 1.7 |
| Lung cancer (OD04565) | 43.2 |
| Lung Margin (OD04565) | 0.7 |
| Lung cancer (OD04237-01) | 0.5 |
| Lung Margin (OD04237-02) | 2.2 |
| Ocular Mel Met to Liver (OD04310) | 0.1 |
| Liver Margin (OD04310) | 14.8 |
| Melanoma Metastasis | 0.1 |
| Lung Margin (OD04321) | 2.3 |
| Normal Kidney | 5.0 |
| Kidney Ca, Nuclear grade 2 (OD04338) | 29.1 |
| Kidney Margin (OD04338) | 3.1 |
| Kidney Ca Nuclear grade 1/2 (OD04339) | 3.7 |
| Kidney Margin (OD04339) | 5.1 |
| Kidney Ca, Clear cell type (OD04340) | 6.3 |
| Kidney Margin (OD04340) | 3.6 |
| Kidney Ca, Nuclear grade 3 (OD04348) | 0.1 |
| Kidney Margin (OD04348) | 1.8 |
| Kidney cancer (OD04622-01) | 1.9 |
| Kidney Margin (OD04622-03) | 1.5 |
| Kidney cancer (OD04450-01) | 12.0 |
| Kidney Margin (OD04450-03) | 4.5 |
| Kidney cancer 8120607 | 34.2 |
| Kidney Margin 8120608 | 2.3 |
| Kidney cancer 8120613 | 4.4 |
| Kidney Margin 8120614 | 4.2 |
| Kidney cancer 9010320 | 1.5 |
| Kidney Margin 9010321 | 2.6 |
| Normal Uterus | 0.4 |
| Uterine cancer 064011 | 0.5 |
| Normal Thyroid | 1.2 |
| Thyroid cancer | 0.1 |
| Thyroid cancer A302152 | 0.2 |
| Thyroid Margin A302153 | 1.6 |
| Normal Breast | 5.3 |
| Breast cancer | 0.2 |
| Breast cancer (OD04590-01) | 1.4 |
| Breast cancer Mets (OD04590-03) | 5.2 |
| Breast cancer Metastasis | 1.1 |
| Breast cancer | 0.3 |
| Breast cancer | 0.8 |
| Breast cancer 9100266 | 0.3 |
| Breast Margin 9100265 | 0.5 |
| Breast cancer A209073 | 0.6 |
| Breast Margin A209073 | 0.5 |
| Normal Liver | 11.9 |
| Liver cancer | 5.0 |
| Liver cancer 1025 | 14.7 |
| Liver cancer 1026 | 3.9 |
| Liver cancer 6004-T | 14.0 |
| Liver Tissue 6004-N | 20.9 |
| Liver cancer 6005-T | 3.7 |
| Liver Tissue 6005-N | 6.3 |
| Normal Bladder | 5.6 |
| Bladder cancer | 0.3 |
| Bladder cancer | 0.8 |
| Bladder cancer (OD04718-01) | 0.1 |
| Bladder Normal Adjacent (OD04718-03) | 0.9 |
| Normal Ovary | 0.4 |
| Ovarian cancer | 0.5 |
| Ovarian cancer (OD04768-07) | 0.6 |
| Ovary Margin (OD04768-08) | 0.3 |
| Normal Stomach | 5.5 |
| Gastric cancer 9060358 | 1.0 |
| Stomach Margin 9060359 | 11.7 |
| Gastric cancer 9060395 | 14.4 |
| Stomach Margin 9060394 | 15.3 |
| Gastric cancer 9060397 | 2.1 |
| Stomach Margin 9060396 | 6.7 |
| Gastric cancer 064005 | 7.6 |

[1641] TABLE BMH
Panel 4.1D
Column A - Rel. Exp. (%) Ag3562, Run 169990867

| Tissue Name | A | Tissue Name | A |
|---|---|---|---|
| Secondary Th1 act | 0.0 | HUVEC IL-1beta | 0.7 |
| Secondary Th2 act | 0.1 | HUVEC IFN gamma | 2.1 |
| Secondary Tr1 act | 0.2 | HUVEC TNF alpha + IFN gamma | 0.7 |
| Secondary Th1 rest | 0.2 | HUVEC TNF alpha + IL4 | 0.5 |
| Secondary Th2 rest | 0.1 | HUVEC IL-11 | 2.4 |
| Secondary Tr1 rest | 0.1 | Lung Microvascular EC none | 13.1 |
| Primary Th1 act | 0.0 | Lung Microvascular EC TNF alpha + IL-1 | 10.1 |
| | | beta | |
| Primary Th2 act | 0.1 | Microvascular Dermal EC none | 11.8 |
| Primary Tr1 act | 0.0 | Microsvasular Dermal EC TNF alpha + IL-1 | 12.8 |
| | | beta | |
| Primary Th1 rest | 0.4 | Bronchial epithelium TNF alpha + IL1beta | 92.7 |
| Primary Th2 rest | 0.2 | Small airway epithelium none | 29.9 |
| Primary Tr1 rest | 0.1 | Small airway epithelium TNF alpha + IL-1 | 50.3 |
| | | beta | |
| CD45RA CD4 lymphocyte act | 6.7 | Coronery artery SMC rest | 5.4 |
| CD45RO CD4 lymphocyte act | 0.4 | Coronery artery SMC TNF alpha + IL-1 beta | 7.0 |
| CD8 lymphocyte act | 0.3 | Astrocytes rest | 0.6 |
| Secondary CD8 lymphocyte rest | 0.0 | Astrocytes TNF alpha + IL-1 beta | 0.7 |
| Secondary CD8 lymphocyte act | 0.0 | KU-812 (Basophil) rest | 16.4 |
| CD4 lymphocyte none | 0.6 | KU-812 (Basophil) PMA/ionomycin | 33.2 |
| 2ry Th1/Th2/Tr1 anti-CD95 | 0.2 | CCD1106 (Keratinocytes) none | 2.9 |
| CH11 | | | |
| LAK cells rest | 0.5 | CCD1106 (Keratinocytes) TNF alpha + IL-1 | 2.3 |
| | | beta | |
| LAK cells IL-2 | 1.3 | Liver cirrhosis | 38.2 |
| LAK cells IL-2 + IL-12 | 0.5 | NCI-H292 none | 11.8 |
| LAK cells IL-2 + IFN gamma | 1.1 | NCI-H292 IL-4 | 7.1 |
| LAK cells IL-2 + IL-18 | 0.7 | NCI-H292 IL-9 | 22.5 |
| LAK cells PMA/ionomycin | 1.2 | NCI-H292 IL-13 | 5.2 |
| NK Cells IL-2 rest | 3.5 | NCI-H292 IFN gamma | 4.7 |
| Two Way MLR 3 day | 1.4 | HPAEC none | 5.1 |
| Two Way MLR 5 day | 0.6 | HPAEC TNF alpha + IL-1 beta | 7.6 |
| Two Way MLR 7 day | 0.3 | Lung fibroblast none | 6.8 |
| PBMC rest | 0.8 | Lung fibroblast TNF alpha + IL-1 beta | 48.6 |
| PBMC PWM | 15.0 | Lung fibroblast IL-4 | 7.5 |
| PBMC PHA-L | 0.3 | Lung fibroblast IL-9 | 7.2 |
| Ramos (B cell) none | 0.0 | Lung fibroblast IL-13 | 8.8 |
| Ramos (B cell) ionomycin | 0.0 | Lung fibroblast IFN gamma | 6.8 |
| B lymphocytes PWM | 0.2 | Dermal fibroblast CCD1070 rest | 13.9 |
| B lymphocytes CD40L and IL-4 | 0.3 | Dermal fibroblast CCD1070 TNF alpha | 19.9 |
| EOL-1 dbcAMP | 0.1 | Dermal fibroblast CCD1070 IL-1 beta | 24.7 |
| EOL-1 dbcAMP | 0.1 | Dermal fibroblast IFN gamma | 38.4 |
| PMA/ionomycin | | | |
| Dendritic cells none | 0.8 | Dermal fibroblast IL-4 | 100.0 |
| Dendritic cells LPS | 2.9 | Dermal Fibroblasts rest | 68.3 |
| Dendritic cells anti-CD40 | 0.6 | Neutrophilis TNFa + LPS | 0.2 |
| Monocytes rest | 0.1 | Neutrophilis rest | 0.1 |
| Monocytes LPS | 9.7 | Colon | 14.0 |
| Macrophages rest | 2.4 | Lung | 5.8 |
| Macrophages LPS | 2.9 | Thymus | 6.6 |
| HUVEC none | 1.0 | Kidney | 20.7 |
| HUVEC starved | 0.9 | | |

[1642] TABLE BMI
Panel 5 Islet
Column A - Rel. Exp. (%) Ag3562, Run 242386397

| Tissue Name | A | Tissue Name | A |
|---|---|---|---|
| 97457 Patient-02go adipose | 12.8 | 94709 Donor 2 AM - A adipose | 10.2 |
| 97476 Patient-07sk skeletal muscle | 12.4 | 94710 Donor 2 AM - B adipose | 7.1 |
| 97477 Patient-07ut uterus | 1.6 | 94711 Donor 2 AM - C adipose | 6.4 |
| 97478 Patient-07pl placenta | 0.3 | 94712 Donor 2 AD - A adipose | 17.9 |
| 99167 Bayer Patient 1 | 100.0 | 94713 Donor 2 AD - B adipose | 15.6 |
| 97482 Patient-08ut uterus | 0.7 | 94714 Donor 2 AD - C adipose | 19.1 |
| 97483 Patient-08pl placenta | 0.0 | 94742 Donor 3 U - A Mesenchymal | 2.0 |
| | | Stem Cells | |
| 97486 Patient-09sk skeletal muscle | 7.6 | 94743 Donor 3 U - B Mesenchymal | 3.4 |
| | | Stem Cells | |
| 97487 Patient-09ut uterus | 3.9 | 94730 Donor 3 AM - A adipose | 17.6 |
| 97488 Patient-09pl placenta | 0.4 | 94731 Donor 3 AM - B adipose | 7.6 |
| 97492 Patient-10ut uterus | 1.9 | 94732 Donor 3 AM - C adipose | 9.7 |
| 97493 Patient-10pl placenta | 0.5 | 94733 Donor 3 AD - A adipose | 32.5 |
| 97495 Patient-11go adipose | 7.4 | 94734 Donor 3 AD - B adipose | 6.7 |
| 97496 Patient-11sk skeletal muscle | 8.0 | 94735 Donor 3 AD - C adipose | 23.2 |
| 97497 Patient-11ut uterus | 2.8 | 77138 Liver HepG2untreated | 82.9 |
| 97498 Patient-11pl placenta | 0.1 | 73556 Heart Cardiac stromal cells | 1.9 |
| | | (primary) | |
| 97500 Patient-12go adipose | 11.3 | 81735 Small Intestine | 13.4 |
| 97501 Patient-12sk skeletal muscle | 33.2 | 72409 Kidney Proximal Convoluted | 3.6 |
| | | Tubule | |
| 97502 Patient-12ut uterus | 3.1 | 82685 Small intestine Duodenum | 2.5 |
| 97503 Patient-12p1 placenta | 0.4 | 90650 Adrenal Adrenocortical | 2.4 |
| | | adenoma | |
| 94721 Donor 2 U - A Mesenchymal | 3.8 | 72410 Kidney HRCE | 11.6 |
| Stem Cells | | | |
| 94722 Donor 2 U - B Mesenchymal | 4.3 | 72411 Kidney HRE | 1.3 |
| Stem Cells | | | |
| 94723 Donor 2 U - C Mesenchymal | 6.0 | 73139 Uterus Uterine smooth muscle | 0.4 |
| Stem Cells | | cells | |

[1643] Ardais Panel v.1.0 Summary: Ag3562 Highest expression of this gene was seen in lung cancer (CT=19.1). In addition, this gene was more highly expressed in three lung cancer samples than in the corresponding normal adjacent tissue. Thus, expression of this gene is useful as a marker of this cancer. Therapeutic modulation of this gene, expressed protein and/or use of antibodies or small molecule drugs targeting the gene or gene product are useful in the treatment of lung cancer.

[1644] CNS_neurodegeneration_v1.0 Summary: Ag3562 This panel confirms the expression of this gene at low levels in the brain in an independent group of individuals. This gene was found to be upregulated in the temporal cortex of Alzheimer's disease patients when analyzed by ANCOVA, (p=0.002). Therapeutic modulation of this gene, expressed protein and/or use of antibodies or small molecule drugs targeting the gene or gene product are useful in prevention or slowing the progression of Alzheimer's disease.

[1645] General_screening_panel_v1.4 Summary: Ag3562 Highest expression of this gene was detected in lung cancer A549 cell line (CT=20.01). High expression of this gene was also seen in cluster of cancer cell lines derived from gastric, colon, lung, renal, breast, ovarian, prostate, squamous cell carcinoma, melanoma and brain cancers. Thus, expression of this gene is useful as a marker to detect the presence of these cancers. Therapeutic modulation of this gene, expressed protein and/or use of antibodies or small molecule drugs targeting the gene or gene product are useful in the treatment of gastric, colon, lung, renal, breast, ovarian, prostate, squamous cell carcinoma, melanoma and brain cancers.

[1646] Among tissues with metabolic or endocrine function, this gene was expressed at moderate to high levels in pancreas, adipose, adrenal gland, thyroid, pituitary gland, skeletal muscle, heart, liver and the gastrointestinal tract. Therapeutic modulation of this gene, expressed protein and/or use of antibodies or small molecule drugs targeting the gene or gene product are useful in the treatment of endocrine/metabolically related diseases, such as obesity and diabetes.

[1647] In addition, this gene was expressed at high levels in all regions of the central nervous system examined, including amygdala, hippocampus, substantia nigra, thalamus, cerebellum, cerebral cortex, and spinal cord. Therapeutic modulation of this gene, expressed protein and/or use of antibodies or small molecule drugs targeting the gene or gene product are useful in the treatment of central nervous system disorders such as Alzheimer's disease, Parkinson's disease, epilepsy, multiple sclerosis, schizophrenia and depression.

[1648] HASS Panel v1.0 Summary: Ag3562. The expression of this gene was not increased by oxygen deprivation, acidic or a serum starved environment in the breast, bladder, pancreatic and prostate cell line in this panel.

[1649] However expression was increased in a glioblastoma/astrocytoma cell line when these cells are subjected to an acidic environment (Maximum expression U87-MG F11; CT=23.96) which indicates that expression may also be upregulated in the acidic regions of brain cancers. Moderate to low-expression was also shown in 2 of 5 glioma and 2 of 4 medulloblastoma tissue samples in this panel. Therapeutic modulation of this gene, expressed protein and/or use of antibodies or small molecule drugs targeting the gene or gene product are useful in the treatment of brain cancer.

[1650] Oncology_cell_line_screening_panel_v3.1 Summary: Ag3562 Highest expression of this gene was detected in lung carcinoid sample (CT=21.7). High to moderate levels of expression of this gene was also seen in number of cancer samples including tongue, breast, prostate, melanoma, bone marrow, bladder, pancreatic, renal, lymphoma, ovarian, cervical, uterine, gastric, lung and brain cancer. Therapeutic modulation of this gene, expressed protein and/or use of antibodies or small molecule drugs targeting the gene or gene product are useful in the treatment of cancers, including tongue, breast, prostate, melanoma, bone marrow, bladder, pancreatic, renal, lymphoma, ovarian, cervical, uterine, gastric, lung and brain cancer.

[1651] Panel 2D Summary: Ag3562 Highest expression of this gene was detected in lung cancer (CT=23.5). High expression of this gene was seen in number o f lung cancer samples. Expression of this gene was higher in cancer sample as compared to corresponding adjacent control samples. Therefore, expression of this gene is useful as marker to detect the presence of lung cancer. Therapeutic modulation of this gene, expressed protein and/or use of antibodies or small molecule drugs targeting the gene or gene product are useful in the treatment of lung cancer.

[1652] High to moderate levels of expression of this gene was also seen in number of cancer samples including colon, gastric, ovarian, liver, breast, thyroid, kidney, and prostate cancers. Therapeutic modulation of this gene, expressed protein and/or use of antibodies or small molecule drugs targeting the gene or gene product are useful in the treatment of these cancers.

[1653] Panel 4.1D Summary: Ag3562 Highest expression of this gene was detected in IL-4 treated dermal fibroblasts (CT=25.2). This gene was expressed at moderate to low levels in a wide range of cell types of significance in the immune response in health and disease. These cells include members of the T-cell, B-cell, endothelial cell, macrophage/monocyte, and peripheral blood mononuclear cell family, as well as epithelial and fibroblast cell types from lung and skin, and normal tissues represented by colon, lung, thymus and kidney. This ubiquitous pattern of expression indicates that this gene product may be involved in homeostatic processes for these and other cell types and tissues. This pattern is in agreement with the expression profile in General_screening_panel_v1.5 and also indicates a role for the gene product in cell survival and proliferation. Therapeutic modulation of this gene, expressed protein and/or use of antibodies or small molecule drugs targeting the gene or gene product are useful in the treatment of autoimmune and inflammatory diseases such as asthma, allergies, inflammatory bowel disease, lupus erythematosus, psoriasis, rheumatoid arthritis, and osteoarthritis.

[1654] Panel 5 Islet Summary: Ag3562 Highest expression of this gene was detected in islet cells (Bayer patient 1) (CT=25.3). High to moderate levels of expression of this gene were also seen in adipose, skeletal muscle, placenta, uterus, liver, heart, small intestine and kidney. Therefore, therapeutic modulation of the activity of this gene may prove useful in the treatment of endocrine/metabolically related diseases, such as obesity and diabetes.

[1655] BN. CG59839-02: Cation-Transporting Atpase.

[1656] Expression of gene CG59839-02 was assessed using the primer-probe sets Ag1417, Ag3604 and Ag3956, described in Tables BNA, BNB and BNC. Results of the RTQ-PCR runs are shown in Tables BND, BNE and BNF.

TABLE BNA
Probe Name Ag1417

| | | | | SEQ |
|---|---|---|---|---|
| | | | Start | ID |
| Primers | Sequences | Length | Position | No |
| Forward | 5′-ataggaaaatggacgcctacat-3′ | 22 | 2698 | 1440 |
| Probe | TET-5′-ccattgccggtctctgtaaacctgaa-3′- | 26 | 2737 | 1441 |
| | TAMRA | | | |
| Reverse | 5′-ttttgaaaatcgacaggaactg-3′ | 22 | 2764 | 1442 |

[1657] TABLE BNC
Probe Name Ag3956

| | | | | SEQ |
|---|---|---|---|---|
| | | | Start | ID |
| Primers | Sequences | Length | Position | No |
| Forward | 5′-cagcttgttcgttccatattgt-3 | 22 | 1956 | 1446 |
| Probe | TET-5′-tcccaaaccaactgattttaaactctaca- | 29 | 1979 | 1447 |
| | 3′-TAMRA | | | |
| Reverse | 5′-agcaactgccacaagacatagt-3′ | 22 | 2027 | 1448 |

[1658] TABLE BND
General_screening_panel v1.4
Column A - Rel. Exp. (%) Ag3604, Run 217674539
Column B - Rel. Exp. (%) Ag3956, Run 213856332

| Tissue Name | A | B | Tissue Name | A | B |
|---|---|---|---|---|---|
| Adipose | 5.6 | 9.2 | Renal ca. TK-10 | 17.9 | 28.5 |
| Melanoma* Hs688(A).T | 17.9 | 29.1 | Bladder | 10.9 | 14.4 |
| Melanoma* Hs688(B).T | 24.0 | 37.1 | Gastric ca. (liver met.) NCI-N87 | 17.0 | 22.4 |
| Melanoma* M14 | 12.3 | 21.9 | Gastric ca. KATO III | 38.7 | 55.9 |
| Melanoma* LOXIMVI | 13.4 | 22.1 | Colon ca. SW-948 | 4.4 | 6.9 |
| Melanoma* SK-MEL-5 | 17.8 | 24.1 | Colon ca. SW480 | 31.9 | 46.3 |
| Squamous cell carcinoma | 11.9 | 21.0 | Colon ca.* (SW480 met) SW620 | 17.0 | 25.3 |
| SCC-4 | | | | | |
| Testis Pool | 1.3 | 2.1 | Colon ca. HT29 | 9.1 | 14.1 |
| Prostate ca.* (bone met) PC-3 | 15.5 | 22.8 | Colon ca. HCT-116 | 27.9 | 45.1 |
| Prostate Pool | 1.4 | 2.1 | Colon ca. CaCo-2 | 14.8 | 22.8 |
| Placenta | 0.9 | 1.0 | Colon cancer tissue | 10.2 | 13.6 |
| Uterus Pool | 1.4 | 3.2 | Colon ca. SW1116 | 1.5 | 1.7 |
| Ovarian ca. OVCAR-3 | 12.4 | 20.9 | Colon ca. Colo-205 | 4.1 | 6.7 |
| Ovarian ca. SK-OV-3 | 24.3 | 35.6 | Colon ca. SW-48 | 5.8 | 4.3 |
| Ovarian ca. OVCAR-4 | 10.8 | 17.7 | Colon Pool | 4.0 | 7.7 |
| Ovarian ca. OVCAR-5 | 50.3 | 52.1 | Small Intestine Pool | 2.5 | 4.3 |
| Ovarian ca. IGROV-1 | 9.0 | 11.4 | Stomach Pool | 3.0 | 5.2 |
| Ovarian ca. OVCAR-8 | 5.4 | 5.8 | Bone Marrow Pool | 1.2 | 2.7 |
| Ovary | 2.1 | 4.9 | Fetal Heart | 5.6 | 7.3 |
| Breast ca. MCF-7 | 12.0 | 16.2 | Heart Pool | 2.1 | 2.8 |
| Breast ca. MDA-MB-231 | 15.3 | 23.2 | Lymph Node Pool | 4.7 | 7.5 |
| Breast ca. BT 549 | 9.2 | 14.7 | Fetal Skeletal Muscle | 0.6 | 1.0 |
| Breast ca. T47D | 100.0 | 100.0 | Skeletal Muscle Pool | 1.7 | 2.4 |
| Breast ca. MDA-N | 15.2 | 16.6 | Spleen Pool | 4.8 | 4.8 |
| Breast Pool | 3.9 | 7.9 | Thymus Pool | 2.9 | 5.4 |
| Trachea | 3.0 | 6.4 | CNS cancer (glio/astro) U87-MG | 84.7 | 98.6 |
| Lung | 0.5 | 0.8 | CNS cancer (glio/astro) U-118- | 30.8 | 51.4 |
| | | | MG | | |
| Fetal Lung | 8.0 | 10.6 | CNS cancer (neuro; met) SK-N- | 14.5 | 22.1 |
| | | | AS | | |
| Lung ca. NCI-N417 | 1.5 | 1.9 | CNS cancer (astro) SF-539 | 13.1 | 18.6 |
| Lung ca. LX-1 | 10.9 | 15.3 | CNS cancer (astro) SNB-75 | 39.8 | 50.0 |
| Lung ca. NCI-H146 | 11.7 | 20.0 | CNS cancer (glio) SNB-19 | 9.8 | 9.5 |
| Lung ca. SHP-77 | 5.3 | 8.1 | CNS cancer (glio) SF-295 | 30.6 | 43.8 |
| Lung ca. A549 | 9.6 | 15.3 | Brain (Amygdala) Pool | 1.9 | 2.7 |
| Lung ca. NCI-H526 | 4.5 | 5.3 | Brain (cerebellum) | 1.4 | 1.8 |
| Lung ca. NCI-H23 | 25.7 | 40.6 | Brain (fetal) | 4.4 | 7.4 |
| Lung ca. NCI-H460 | 5.9 | 7.2 | Brain (Hippocampus) Pool | 2.1 | 2.9 |
| Lung ca. HOP-62 | 5.8 | 7.0 | Cerebral Cortex Pool | 2.7 | 3.8 |
| Lung ca. NCI-H522 | 8.8 | 13.3 | Brain (Substantia nigra) Pool | 1.9 | 2.4 |
| Liver | 0.6 | 0.9 | Brain (Thalamus) Pool | 2.8 | 3.8 |
| Fetal Liver | 11.1 | 14.5 | Brain (whole) | 2.4 | 3.4 |
| Liver ca. HepG2 | 6.2 | 10.5 | Spinal Cord Pool | 1.9 | 2.1 |
| Kidney Pool | 5.2 | 10.8 | Adrenal Gland | 2.5 | 3.8 |
| Fetal Kidney | 4.2 | 6.4 | Pituitary gland Pool | 0.7 | 0.9 |
| Renal ca. 786-0 | 44.1 | 56.3 | Salivary Gland | 0.8 | 1.1 |
| Renal ca. A498 | 10.2 | 13.3 | Thyroid (female) | 5.0 | 7.5 |
| Renal ca. ACHN | 6.4 | 11.4 | Pancreatic ca. CAPAN2 | 12.0 | 18.4 |
| Renal ca. UO-31 | 37.9 | 49.0 | Pancreas Pool | 5.6 | 7.8 |

[1659] TABLE BNE
Panel 4.1D
Column A - Rel. Exp. (%) Ag3604, Run 169910577
Column B - Rel. Exp. (%) Ag3956, Run 170729090

| Tissue Name | A | B | Tissue Name | A | B |
|---|---|---|---|---|---|
| Secondary Th1 act | 14.2 | 11.5 | HUVEC IL-1 beta | 8.5 | 5.0 |
| Secondary Th2 act | 18.0 | 13.5 | HUVEC IFN gamma | 5.2 | 4.1 |
| Secondary Tr1 act | 17.9 | 10.2 | HUVEC TNF alpha + IFN gamma | 7.4 | 4.6 |
| Secondary Th1 rest | 1.6 | 1.1 | HUVEC TNF alpha + IL4 | 11.3 | 6.8 |
| Secondary Th2 rest | 3.8 | 2.7 | HUVEC IL-11 | 1.8 | 1.5 |
| Secondary Tr1 rest | 2.5 | 1.8 | Lung Microvascular EC none | 8.0 | 5.8 |
| Primary Th1 act | 11.8 | 9.0 | Lung Microvascular EC TNF alpha + | 24.1 | 17.0 |
| | | | IL-1 beta | | |
| Primary Th2 act | 13.6 | 10.2 | Microvascular Dermal EC none | 4.1 | 2.6 |
| Primary Tr1 act | 12.1 | 8.8 | Microsvasular Dermal EC TNF alpha + | 12.2 | 6.7 |
| | | | IL-1 beta | | |
| Primary Th1 rest | 3.6 | 2.0 | Bronchial epithelium TNF alpha + | 11.7 | 7.7 |
| | | | IL1 beta | | |
| Primary Th2 rest | 3.4 | 1.2 | Small airway epithelium none | 4.2 | 2.5 |
| Primary Tr1 rest | 3.4 | 3.0 | Small airway epithelium TNF alpha + | 13.6 | 9.3 |
| | | | IL-1 beta | | |
| CD45RA CD4 lymphocyte | 13.5 | 9.2 | Coronery artery SMC rest | 37.1 | 24.7 |
| act | | | | | |
| CD45RO CD4 lymphocyte | 14.8 | 10.4 | Coronery artery SMC TNF alpha + | 48.6 | 31.6 |
| act | | | IL-1 beta | | |
| CD8 lymphocyte act | 14.1 | 8.7 | Astrocytes rest | 6.7 | 3.7 |
| Secondary CD8 lymphocyte | 11.9 | 9.3 | Astrocytes TNF alpha + IL-1 beta | 15.1 | 7.9 |
| rest | | | | | |
| Secondary CD8 lymphocyte | 7.2 | 5.1 | KU-812 (Basophil) rest | 9.3 | 6.5 |
| act | | | | | |
| CD4 lymphocyte none | 1.6 | 1.2 | KU-812 (Basophil) PMA/ionomycin | 23.0 | 17.1 |
| 2ry Th1/Th2/Tr1 anti-CD95 | 2.8 | 2.5 | CCD1106 (Keratinocytes) none | 10.6 | 7.6 |
| CH11 | | | | | |
| LAK cells rest | 15.7 | 15.3 | CCD1106 (Keratinocytes) TNF alpha + | 16.2 | 10.1 |
| | | | IL-1 beta | | |
| LAK cells IL-2 | 6.7 | 5.3 | Liver cirrhosis | 3.5 | 1.8 |
| LAK cells IL-2 + IL-12 | 7.2 | 4.5 | NCI-H292 none | 6.0 | 4.0 |
| LAK cells IL-2 + IFN | 10.4 | 4.3 | NCI-H292 IL-4 | 13.3 | 7.4 |
| gamma | | | | | |
| LAK cells IL-2 + IL-18 | 9.4 | 4.9 | NCI-H292 IL-9 | 13.6 | 8.3 |
| LAK cells PMA/ionomycin | 60.7 | 34.2 | NCI-H292 IL-13 | 12.5 | 8.6 |
| NK Cells IL-2 rest | 7.2 | 5.0 | NCI-H292 IFN gamma | 13.7 | 8.1 |
| Two Way MLR 3 day | 15.1 | 7.0 | HPAEC none | 5.3 | 6.9 |
| Two Way MLR 5 day | 13.1 | 8.5 | HPAEC TNF alpha + IL-1 beta | 54.7 | 38.7 |
| Two Way MLR 7 day | 8.7 | 6.3 | Lung fibroblast none | 11.1 | 9.4 |
| PBMC rest | 1.6 | 1.2 | Lung fibroblast TNF alpha + IL-1 | 7.4 | 7.5 |
| | | | beta | | |
| PBMC PWM | 12.8 | 7.5 | Lung fibroblast IL-4 | 18.6 | 10.2 |
| PBMC PHA-L | 10.1 | 6.1 | Lung fibroblast IL-9 | 24.7 | 19.1 |
| Ramos (B cell) none | 10.0 | 5.0 | Lung fibroblast IL-13 | 13.8 | 10.2 |
| Ramos (B cell) ionomycin | 8.4 | 5.1 | Lung fibroblast IFN gamma | 20.4 | 14.6 |
| B lymphocytes PWM | 9.7 | 6.5 | Dermal fibroblast CCD1070 rest | 11.8 | 10.6 |
| B lymphocytes CD40L and | 6.7 | 3.8 | Dermal fibroblast CCD1070 TNF | 23.2 | 16.7 |
| IL-4 | | | alpha | | |
| EOL-1 dbcAMP | 7.9 | 5.1 | Dermal fibroblast CCD1070 IL-1 | 25.7 | 13.3 |
| | | | beta | | |
| EOL-1 dbcAMP | 24.0 | 16.0 | Dermal fibroblast IFN gamma | 12.2 | 8.4 |
| PMA/ionomycin | | | | | |
| Dendritic cells none | 23.3 | 13.4 | Dermal fibroblast IL-4 | 12.6 | 8.5 |
| Dendritic cells LPS | 28.7 | 20.7 | Dermal Fibroblast rest | 8.7 | 8.6 |
| Dendritic cells anti-CD40 | 18.6 | 12.9 | Neutrophils TNFa + LPS | 7.5 | 6.4 |
| Monocytes rest | 2.8 | 1.8 | Neutrophils rest | 0.6 | 0.7 |
| Monocytes LPS | 100.0 | 100.0 | Colon | 1.6 | 1.0 |
| Macrophages rest | 27.7 | 27.4 | Lung | 3.7 | 3.3 |
| Macrophages LPS | 24.8 | 15.5 | Thymus | 5.7 | 3.5 |
| HUVEC none | 3.5 | 2.3 | Kidney | 6.6 | 4.6 |
| HUVEC starved | 4.2 | 2.8 | | | |

[1660] TABLE BKE
general oncology screening panel_v_2.4
Column A - Rel. Exp. (%) Ag3540, Run 267294323

| Tissue Name | A | Tissue Name | A |
|---|---|---|---|
| Colon cancer 1 | 39.2 | Bladder NAT 2 | 0.2 |
| CC Margin (ODO3921) | 10.2 | Bladder NAT 3 | 0.3 |
| Colon cancer 2 | 45.4 | Bladder NAT 4 | 3.4 |
| Colon NAT 2 | 18.2 | Prostate adenocarcinoma 1 | 23.2 |
| Colon cancer 3 | 71.7 | Prostate adenocarcinoma 2 | 2.8 |
| Colon NAT 3 | 28.9 | Prostate adenocarcinoma 3 | 15.5 |
| Colon malignant cancer 4 | 92.0 | Prostate adenocarcinoma 4 | 33.4 |
| Colon NAT 4 | 10.4 | Prostate NAT 5 | 2.3 |
| Lung cancer 1 | 15.3 | Prostate adenocarcinoma 6 | 4.2 |
| Lung NAT 1 | 2.1 | Prostate adenocarcinoma 7 | 6.5 |
| Lung cancer 2 | 100.0 | Prostate adenocarcinoma 8 | 2.0 |
| Lung NAT 2 | 4.5 | Prostate adenocarcinoma 9 | 20.3 |
| Squamous cell carcinoma 3 | 91.4 | Prostate NAT 10 | 0.8 |
| Lung NAT 3 | 1.2 | Kidney cancer 1 | 60.3 |
| Metastatic melanoma 1 | 21.8 | Kidney NAT 1 | 13.6 |
| Melanoma 2 | 1.8 | Kidney cancer 2 | 71.2 |
| Melanoma 3 | 1.8 | Kidney NAT 2 | 26.1 |
| Metastatic melanoma 4 | 72.2 | Kidney cancer 3 | 55.5 |
| Metastatic melanoma 5 | 84.7 | Kidney NAT 3 | 8.7 |
| Bladder cancer 1 | 1.4 | Kidney cancer 4 | 54.7 |
| Bladder NAT 1 | 0.0 | Kidney NAT 4 | 17.6 |
| Bladder cancer 2 | 5.0 | | |

[1661] General_screening_panel_v1.4 Summary: Ag3604/Ag3956 Highest expression of this gene was seen in a breast cancer cell line (CTs=24-25). High levels of expression were also seen in all the cell lines on this panel. Significant levels of expression were seen in the fetal tissue samples. Expression in fetal liver and lung (CTs=27) was significantly higher than in the adult liver and lung (CTs=31.5). Furthermore, this expression profile indicates a role for this gene product in cell growth and proliferation.

[1662] Among tissues with metabolic function, this gene was expressed at moderate to low levels in pituitary, adipose, adrenal gland, pancreas, thyroid, and adult and fetal skeletal muscle, heart, and liver. This widespread expression among these tissues indicates that this gene product plays a role in normal neuroendocrine and metabolic tissues. Therapeutic modulation of this gene, expressed protein and/or use of antibodies or small molecule drugs targeting the gene or gene product are useful in the treatment of neuroendocrine disorders or metabolic diseases, such as obesity and diabetes.

[1663] This gene was also expressed at moderate levels in the CNS, including the hippocampus, thalamus, substantia nigra, amygdala, cerebellum and cerebral cortex. Therapeutic modulation of this gene, expressed protein and/or use of antibodies or small molecule drugs targeting the gene or gene product are useful in the treatment of neurologic disorders, such as Alzheimer's disease, Parkinson's disease, schizophrenia, multiple sclerosis, stroke and epilepsy.

[1664] The CG94820-02 gene codes for a cation-transporting ATPase A, P type. A P-type cation transporting ATPase has been implicated in Menkes disease, a disorder of copper transport characterized by progressive neurological degeneration and death in early childhood (Harrison M D, Dameron C T. (1999) Molecular mechanisms of copper metabolism and the role of the Menkes disease protein. J Biochem Mol Toxicol 1999; 13(2):93-106). Thus, the CG94820-02 gene product may play a role in this disease. Therapeutic modulation of this gene, expressed protein and/or use of antibodies or small molecule drugs targeting the gene or gene product are useful in the treatment of Menkes disease.

[1665] Panel 4.1D Summary: Ag3604/Ag3956 Highest expression of the CG94820-02 gene was seen in LPS stimulated monocytes (CTs=25-26). The protein encoded by this gene may therefore be involved in the activation of monocytes in their function as antigen-presenting cells. This indicates that therapeutics that block the function of this membrane protein are useful as anti-inflammatory therapeutics for the treatment of autoimmune and inflammatory diseases. Antibodies or small molecule therapeutics that stimulate the function of this protein may be useful therapeutics for the treatment of immunosupressed individuals.

[1666] This gene was expressed at moderate to low levels in a wide range of cell types of significance in the immune response in health and disease. These cells include members of the T-cell, B-cell, endothelial cell, macrophage/monocyte, and peripheral blood mononuclear cell family, as well as epithelial and fibroblast cell types from lung and skin, and normal tissues represented by colon, lung, thymus and kidney. This ubiquitous pattern of expression indicates that this gene product is involved in homeostatic processes for these and other cell types and tissues. This pattern is in agreement with the expression profile in General_screening_panel_v1.4 and also indicates a role for the gene product in cell survival and proliferation. Therapeutic modulation of this gene, expressed protein and/or use of antibodies or small molecule drugs targeting the gene or gene product are useful in the treatment of autoimmune and inflammatory diseases such as asthma, allergies, inflammatory bowel disease, lupus erythematosus, psoriasis, rheumatoid arthritis, and osteoarthritis.

[1667] general oncology screening panel_v_{—}2.4 Summary: Ag3604 Highest expression was detected in a lung cancer sample, with prominent expression seen in prostate and melanoma cancer samples. This gene was more highly expressed in lung, kidney, and colon cancers than in the normal adjacent tissues. Expression of this gene is useful as a marker of these cancers. Therapeutic modulation of this gene, expressed protein and/or use of antibodies or small molecule drugs targeting the gene or gene product are useful in the treatment of lung, colon, kidney, melanoma and prostate cancers.

[1668] BO. CG90866-03 and CG90866-04: Serine/Threonine-Protein Kinase.

[1669] Expression of genes CG90866-03 and CG90866-04 was assessed using the primer-probe sets Ag1088, Ag941 and Ag3771, described in Tables BOA, BOB and BOC. Results of the RTQ-PCR runs are shown in Tables BOD, BOE, BOF and BOG.

TABLE BOA
Probe Name Ag1088

| | | | | SEQ |
|---|---|---|---|---|
| | | | Start | ID |
| Primers | Sequences | Length | Position | No |
| Forward | 5′-cttgatgaagaaagcagaggaa-3′ | 22 | 776 | 1449 |
| Probe | TET-5′-atccagatcaaccaaggctcaccatt-3′- | 26 | 814 | 1450 |
| | TAMRA | | | |
| Reverse | 5′-agtcaggggcaatctgagatat-3′ | 22 | 843 | 1451 |

[1670] TABLE BOB
Probe Name Ag941

| | | | | SEQ |
|---|---|---|---|---|
| | | | Start | ID |
| Primers | Sequences | Length | Position | No |
| Forward | 5′-cctccactcagccatgatta-3′ | 20 | 1241 | 1452 |
| Probe | TET-5′-ataccgagacctgaaaccccacaatg-3′- | 26 | 1262 | 1453 |
| | TAMRA | | | |
| Reverse | 5′-gcagcattgggatacagtgt-3′ | 20 | 1299 | 1454 |

[1671] TABLE BOG
Probe Name Ag3771

| | | | | SEQ |
|---|---|---|---|---|
| | | | Start | ID |
| Primers | Sequences | Length | Position | No |
| Forward | 5′-ggcacaaagattttctcctttt-3 | 22 | 2247 | 1455 |
| Probe | TET-5′-tgatttcaccattcagaaactcattga-3′- | 27 | 2273 | 1456 |
| | TAMRA | | | |
| Reverse | 5′-gaaaacagttggcttgttcttg-3′ | 22 | 2302 | 1457 |

[1672] TABLE BOD
AI_comprehensive panel_v1.0
Column A - Rel. Exp. (%) Ag3771, Run 311756509

| Tissue Name | A | Tissue Name | A |
|---|---|---|---|
| 110967 COPD-F | 6.6 | 1112427 Match Control Psoriasis-F | 39.5 |
| 110980 COPD-F | 12.2 | 112418 Psoriasis-M | 5.7 |
| 110968 COPD-M | 9.1 | 112723 Match Control Psoriasis-M | 8.1 |
| 110977 COPD-M | 32.3 | 1112419 Psoriasis-M | 12.2 |
| 110989 Emphysema-F | 17.8 | 1112424 Match Control Psoriasis-M | 9.8 |
| 110992 Emphysema-F | 4.4 | 112420 Psoriasis-M | 23.0 |
| 110993 Emphysema-F | 8.5 | 112425 Match Control Psoriasis-M | 36.3 |
| 110994 Emphysema-F | 4.9 | 104689 (ME) OA Bone-Backus | 10.8 |
| 110995 Emphysema-F | 7.4 | 104690 (ME) Adj “Normal” Bone- | 9.7 |
| | | Backus | |
| 110996 Emphysema-F | 1.0 | 104691 (ME) OA Synovium-Backus | 17.7 |
| 110997 Asthma-M | 3.1 | 104692 (BA) OA Cartilage-Backus | 0.0 |
| 111001 Asthma-F | 10.7 | 104694 (BA) OA Bone-Backus | 8.5 |
| 111002 Asthma-F | 15.1 | 104695 (BA) Adj “Normal” Bone- | 9.9 |
| | | Backus | |
| 111003 Atopic Asthma-F | 10.5 | 104696 (BA) OA Synovium-Backus | 14.4 |
| 111004 Atopic Asthma-F | 8.0 | 104700 (55) OA Bone-Backus | 20.0 |
| 111005 Atopic Asthma-F | 9.5 | 104701 (SS) Adj “Normal” Bone-Backus | 9.3 |
| 111006 Atopic Asthma-F | 1.4 | 104702 (SS) OA Synovium-Backus | 22.5 |
| 111417 Allergy-M | 7.7 | 117093 OA Cartilage Rep7 | 7.7 |
| 112347 Allergy-M | 0.1 | 112672 OA Bone5 | 18.6 |
| 112349 Normal Lung-F | 0.1 | 112673 OA Synovium5 | 10.0 |
| 112357 Normal Lung-F | 20.2 | 1112674 OA Synovial Fluid Cells5 | 11.0 |
| 112354 Normal Lung-M | 11.4 | 117100 OA Cartilage Rep14 | 1.3 |
| 112374 Crohns-F | 5.1 | 112756 OA Bone9 | 1.6 |
| 112389 Match Control Crohns-F | 6.4 | 112757 OA Synovium9 | 22.7 |
| 112375 Crohns-F | 3.0 | 112758 OA Synovial Fluid Cells9 | 7.5 |
| 112732 Match Control Crohns-F | 8.4 | 117125 RA Cartilage Rep2 | 2.7 |
| 112725 Crohns-M | 2.4 | 113492 Bone2 RA | 85.3 |
| 112387 Match Control Crohns-M | 2.4 | 113493 Synovium2 RA | 26.4 |
| 112378 Crohns-M | 0.2 | 113494 Syn Fluid Cells RA | 48.0 |
| 112390 Match Control Crohns-M | 16.8 | 113499 Cartilage4 RA | 75.3 |
| 112726 Crohns-M | 12.4 | 113500 Bone4 RA | 100.0 |
| 112731 Match Control Crohns-M | 12.9 | 113501 Synovium RA | 85.9 |
| 112380 Ulcer Col-F | 11.5 | 113502 Syn Fluid Cells4 RA | 54.7 |
| 112734 Match Control Ulcer Col-F | 20.3 | 113495 Cartilage3 RA | 60.3 |
| 112384 Ulcer Col-F | 12.9 | 113496 Bone3 RA | 70.2 |
| 112737 Match Control Ulcer Col-F | 4.4 | 113497 Synovium3 RA | 45.4 |
| 112386 Ulcer Col-F | 5.4 | 113498 Syn Fluid Cells3 RA | 92.7 |
| 112738 Match Control Ulcer Col-F | 2.3 | 117106 Normal Cartilage Rep20 | 0.5 |
| 112381 Ulcer Col-M | 0.2 | 113663 Bone3 Normal | 0.0 |
| 112735 Match Control Ulcer Col- | 1.2 | 113664 Synovium3 Normal | 0.0 |
| M | | | |
| 112382 Ulcer Col-M | 8.5 | 113665 Syn Fluid Cells3 Normal | 0.1 |
| 112394 Match Control Ulcer Col- | 2.8 | 117107 Normal Cartilage Rep22 | 4.0 |
| M | | | |
| 112383 Ulcer Col-M | 3.6 | 113667 Bone4 Normal | 10.0 |
| 112736 13667 Match Control Ulcer | 4.0 | 113668 Synovium4 Normal | 9.3 |
| Col-M | | | |
| 112423 Psoriasis-F | 11.1 | 113669 Syn Fluid Cells4 Normal | 14.4 |

[1673] TABLE BOE
General_screening_panel_v1.4
Column A - Rel. Exp. (%) Ag3771, Run 218982528

| Tissue Name | A |
|---|---|
| Adipose | 11.7 |
| Melanoma* Hs688(A).T | 2.3 |
| Melanoma* Hs688(B).T | 0.9 |
| Melanoma* M14 | 23.0 |
| Melanoma* LOXIMVI | 0.6 |
| Melanoma* SK-MEL-5 | 23.7 |
| Squamous cell carcinoma SCC-4 | 0.0 |
| Testis Pool | 3.8 |
| Prostate ca.* (bone met) PC-3 | 1.3 |
| Prostate Pool | 4.3 |
| Placenta | 0.2 |
| Uterus Pool | 7.4 |
| Ovarian ca. OVCAR-3 | 0.3 |
| Ovarian ca. SK-OV-3 | 3.8 |
| Ovarian ca. OVCAR-4 | 0.0 |
| Ovarian ca. OVCAR-5 | 1.7 |
| Ovarian ca. IGROV-1 | 0.1 |
| Ovarian ca. OVCAR-8 | 0.1 |
| Ovary | 5.5 |
| Breast ca. MCF-7 | 0.0 |
| Breast ca. MDA-MB-231 | 0.1 |
| Breast ca. BT 549 | 0.0 |
| Breast ca. T47D | 5.0 |
| Breast ca. MDA-N | 4.5 |
| Breast Pool | 13.9 |
| Trachea | 5.3 |
| Lung | 5.0 |
| Fetal Lung | 100.0 |
| Lung ca. NCI-N417 | 0.2 |
| Lung ca. LX-1 | 0.0 |
| Lung ca. NCI-H146 | 0.0 |
| Lung ca. SHP-77 | 0.1 |
| Lung ca. A549 | 21.3 |
| Lung ca. NCI-H526 | 0.0 |
| Lung ca. NCI-H23 | 1.9 |
| Lung ca. NCI-H460 | 0.7 |
| Lung ca. HOP-62 | 0.4 |
| Lung ca. NCI-H522 | 0.0 |
| Liver | 0.3 |
| Fetal Liver | 9.3 |
| Liver ca. HepG2 | 0.0 |
| Kidney Pool | 23.2 |
| Fetal Kidney | 27.7 |
| Renal ca. 786-0 | 17.9 |
| Renal ca. A498 | 4.8 |
| Renal ca. ACHN | 9.0 |
| Renal ca. UO-31 | 4.0 |
| Renal ca. TK-10 | 5.6 |
| Bladder | 8.0 |
| Gastric ca. (liver met.) NCI-N87 | 0.0 |
| Gastric ca. KATO III | 0.0 |
| Colon ca. SW-948 | 0.0 |
| Colon ca. SW480 | 0.0 |
| Colon ca.* (SW480 met) SW620 | 0.0 |
| Colon ca. HT29 | 0.0 |
| Colon ca. HCT-116 | 0.1 |
| Colon ca. CaCo-2 | 0.2 |
| Colon cancer tissue | 4.6 |
| Colon ca. SW1116 | 0.0 |
| Colon ca. Colo-205 | 0.0 |
| Colon ca. SW-48 | 0.0 |
| Colon Pool | 15.6 |
| Small Intestine Pool | 13.3 |
| Stomach Pool | 8.5 |
| Bone Marrow Pool | 5.9 |
| Fetal Heart | 2.0 |
| Heart Pool | 6.7 |
| Lymph Node Pool | 12.8 |
| Fetal Skeletal Muscle | 2.0 |
| Skeletal Muscle Pool | 5.9 |
| Spleen Pool | 16.6 |
| Thymus Pool | 7.2 |
| CNS cancer (glio/astro) | 4.7 |
| U87-MG | |
| CNS cancer (glio/astro) | 11.7 |
| U-118-MG | |
| CNS cancer (neuro; met) | 0.6 |
| SK-N-AS | |
| CNS cancer (astro) SF-539 | 0.1 |
| CNS cancer (astro) SNB-75 | 0.0 |
| CNS cancer (glio) SNB-19 | 0.5 |
| CNS cancer (glio) SF-295 | 3.1 |
| Brain (Amygdala) Pool | 4.9 |
| Brain (cerebellum) | 1.1 |
| Brain (fetal) | 2.9 |
| Brain (Hippocampus) Pool | 6.2 |
| Cerebral Cortex Pool | 12.5 |
| Brain (Substantia nigra) Pool | 7.6 |
| Brain (Thalamus) Pool | 13.8 |
| Brain (whole) | 5.7 |
| Spinal Cord Pool | 6.3 |
| Adrenal Gland | 3.7 |
| Pituitary gland Pool | 2.0 |
| Salivary Gland | 1.3 |
| Thyroid (female) | 7.7 |
| Pancreatic ca. CAPAN2 | 0.0 |
| Pancreas Pool | 9.7 |

[1674] TABLE BOF
Panel 4.1D
Column A - Rel. Exp. (%) Ag3771, Run 170130259
Column B - Rel. Exp. (%) Ag3771, Run 311582828

| Tissue Name | A | B | Tissue Name | A | B |
|---|---|---|---|---|---|
| Secondary Th1 act | 0.0 | 0.0 | HUVEC IL-1 beta | 0.1 | 0.0 |
| Secondary Th2 act | 0.0 | 0.0 | HUVEC IFN gamma | 0.7 | 0.5 |
| Secondary Tr1 act | 0.0 | 0.0 | HUVEC TNF alpha + IFN gamma | 0.1 | 0.0 |
| Secondary Th1 rest | 0.0 | 0.0 | HUVEC TNF alpha + IL4 | 0.0 | 0.0 |
| Secondary Th2 rest | 0.0 | 0.0 | HUVEC IL-11 | 0.2 | 0.1 |
| Secondary Tr1 rest | 0.0 | 0.0 | Lung Microvascular EC none | 0.0 | 0.1 |
| Primary Th1 act | 0.0 | 0.0 | Lung Microvascular EC TNF alpha + | 0.0 | 0.0 |
| | | | IL-1 beta | | |
| Primary Th2 act | 0.0 | 0.0 | Microvascular Dermal EC none | 0.0 | 0.0 |
| Primary Tr1 act | 0.0 | 0.0 | Microsvasular Dermal EC TNF alpha + | 0.0 | 0.0 |
| | | | IL-1 beta | | |
| Primary Th1 rest | 0.0 | 0.0 | Bronchial epithelium TNF alpha + | 0.3 | 0.1 |
| | | | IL1 beta | | |
| Primary Th2 rest | 0.0 | 0.0 | Small airway epithelium none | 0.1 | 0.0 |
| Primary Tr1 rest | 0.0 | 0.0 | Small airway epithelium TNF alpha + | 0.0 | 0.0 |
| | | | IL-1 beta | | |
| CD45RA CD4 lymphocyte | 0.6 | 0.7 | Coronery artery SMC rest | 1.0 | 0.9 |
| act | | | | | |
| CD45RO CD4 lymphocyte | 0.2 | 0.3 | Coronery artery SMC TNF alpha + | 0.8 | 0.7 |
| act | | | IL-1 beta | | |
| CD8 lymphocyte act | 0.1 | 0.0 | Astrocytes rest | 0.1 | 0.0 |
| Secondary CD8 lymphocyte | 0.0 | 0.0 | Astrocytes TNF alpha + IL-1 beta | 0.0 | 0.0 |
| rest | | | | | |
| Secondary CD8 lymphocyte | 0.0 | 0.0 | KU-812 (Basophil) rest | 0.0 | 0.0 |
| act | | | | | |
| CD4 lymphocyte none | 0.7 | 0.1 | KU-812 (Basophil) PMA/ionomycin | 0.1 | 0.0 |
| 2ry Th1/Th2/Tr1 anti-CD95 | 0.0 | 0.0 | CCD1106 (Keratinocytes) none | 0.0 | 0.0 |
| CH11 | | | | | |
| LAK cells rest | 25.9 | 5.6 | CCD1106 (Keratinocytes) TNF alpha + | 0.0 | 0.0 |
| | | | IL-1 beta | | |
| LAK cells IL-2 | 0.7 | 0.3 | Liver cirrhosis | 3.2 | 0.4 |
| LAK cells IL-2 + IL-12 | 0.6 | 0.1 | NCI-H292 none | 1.9 | 0.5 |
| LAK cells IL-2 + IFN | 1.3 | 0.2 | NCI-H292 IL-4 | 1.5 | 0.8 |
| gamma | | | | | |
| LAK cells IL-2 + IL-18 | 0.8 | 0.2 | NCI-H292 IL-9 | 2.1 | 1.8 |
| LAK cells PMA/ionomycin | 7.3 | 4.6 | NCI-H292 IL-13 | 1.3 | 1.0 |
| NK Cells IL-2 rest | 0.7 | 0.6 | NCI-H292 IFN gamma | 2.5 | 0.8 |
| Two Way MLR 3 day | 23.0 | 7.9 | HPAEC none | 0.8 | 0.3 |
| Two Way MLR 5 day | 7.7 | 0.0 | HPAEC TNF alpha + IL-1 beta | 0.7 | 0.4 |
| Two Way MLR 7 day | 1.7 | 0.2 | Lung fibroblast none | 1.4 | 1.0 |
| PBMC rest | 10.0 | 1.6 | Lung fibroblast TNF alpha + IL-1 | 3.9 | 4.2 |
| | | | beta | | |
| PBMC PWM | 2.0 | 0.1 | Lung fibroblast IL-4 | 0.5 | 0.3 |
| PBMC PHA-L | 3.0 | 1.1 | Lung fibroblast IL-9 | 1.2 | 0.3 |
| Ramos (B cell) none | 0.2 | 0.0 | Lung fibroblast IL-13 | 0.4 | 0.2 |
| Ramos (B cell) ionomycin | 0.1 | 0.0 | Lung fibroblast IFN gamma | 0.9 | 0.7 |
| B lymphocytes PWM | 1.6 | 0.8 | Dermal fibroblast CCD1070 rest | 0.5 | 0.3 |
| B lymphocytes CD40L and | 6.6 | 4.7 | Dermal fibroblast CCD1070 TNF | 0.4 | 0.3 |
| IL-4 | | | alpha | | |
| EOL-1 dbcAMP | 0.1 | 0.1 | Dermal fibroblast CCD1070 IL-1 | 0.7 | 0.5 |
| | | | beta | | |
| EOL-1 dbcAMP | 0.0 | 0.0 | Dermal fibroblast IFN gamma | 2.2 | 1.6 |
| PMA/ionomycin | | | | | |
| Dendritic cells none | 11.1 | 2.4 | Dermal fibroblast IL-4 | 1.6 | 0.8 |
| Dendritic cells LPS | 10.5 | 2.0 | Dermal Fibroblasts rest | 2.0 | 1.3 |
| Dendritic cells anti-CD40 | 8.1 | 1.5 | Neutrophils TNFa + LPS | 21.8 | 16.2 |
| Monocytes rest | 63.7 | 17.3 | Neutrophils rest | 100.0 | 100.0 |
| Monocytes LPS | 3.5 | 1.6 | Colon | 1.4 | 0.3 |
| Macrophages rest | 6.1 | 1.3 | Lung | 27.9 | 3.9 |
| Macrophages LPS | 6.6 | 2.9 | Thymus | 3.1 | 0.4 |
| HUVEC none | 0.2 | 0.0 | Kidney | 14.2 | 8.8 |
| HUVEC starved | 0.3 | 0.3 | | | |

[1675] TABLE BOG
general oncology screening panel_v_2.4
Column A - Rel. Exp. (%) Ag3771, Run 267820396
Column B - Rel. Exp. (%) Ag941, Run 262229106

| Tissue Name | A | B | Tissue Name | A | B |
|---|---|---|---|---|---|
| Colon cancer 1 | 0.8 | 1.1 | Bladder NAT 2 | 0.2 | 0.2 |
| CC Margin (ODO3921) | 0.9 | 1.4 | Bladder NAT 3 | 0.2 | 0.1 |
| Colon cancer 2 | 1.1 | 1.3 | Bladder NAT 4 | 1.6 | 2.3 |
| Colon NAT 2 | 0.7 | 0.9 | Prostate adenocarcinoma 1 | 13.4 | 14.9 |
| Colon cancer 3 | 1.8 | 1.8 | Prostate adenocarcinoma 2 | 0.6 | 0.5 |
| Colon NAT 3 | 2.6 | 2.9 | Prostate adenocarcinoma 3 | 2.0 | 2.8 |
| Colon malignant cancer 4 | 1.9 | 2.9 | Prostate adenocarcinoma 4 | 1.0 | 2.2 |
| Colon NAT 4 | 0.6 | 0.5 | Prostate NAT 5 | 0.3 | 0.2 |
| Lung cancer 1 | 5.8 | 6.2 | Prostate adenocarcinoma 6 | 0.3 | 0.2 |
| Lung NAT 1 | 5.1 | 8.4 | Prostate adenocarcinoma 7 | 0.7 | 0.9 |
| Lung cancer 2 | 20.3 | 23.0 | Prostate adenocarcinoma 8 | 0.4 | 0.4 |
| Lung NAT 2 | 14.8 | 17.3 | Prostate adenocarcinoma 9 | 4.3 | 4.0 |
| Squamous cell carcinoma 3 | 21.2 | 26.8 | Prostate NAT 10 | 0.2 | 0.2 |
| Lung NAT 3 | 5.6 | 0.8 | Kidney cancer 1 | 25.3 | 24.5 |
| Metastatic melanoma 1 | 7.2 | 6.6 | Kidney NAT 1 | 9.6 | 8.5 |
| Melanoma 2 | 0.1 | 0.1 | Kidney cancer 2 | 100.0 | 100.0 |
| Melanoma 3 | 0.4 | 0.5 | Kidney NAT 2 | 10.7 | 10.4 |
| Metastatic melanoma 4 | 12.4 | 12.2 | Kidney cancer 3 | 51.8 | 36.6 |
| Metastatic melanoma 5 | 11.0 | 12.1 | Kidney NAT 3 | 3.0 | 4.6 |
| Bladder cancer 1 | 0.6 | 0.7 | Kidney cancer 4 | 5.5 | 11.0 |
| Bladder NAT 1 | 0.0 | 0.0 | Kidney NAT 4 | 3.8 | 6.1 |
| Bladder cancer 2 | 1.4 | 1.1 | | | |

[1676] AI_comprehensive panel_v1.0 Summary: Ag3771 Highest expression of this gene was detected in a bone sample from a rheumatoid arthritis patient (CT=26). Prominent expression was detected in a cluster of rheumatoid arthritis samples, including samples from bone, synovium, and cartilage. Targeting this gene or gene product with small molecule, antibody, or protein therapeutics is useful in the treatment of rheumatoid arthritis.

[1677] General_screening_panel_v1.4 Summary: Ag3771 Highest expression of this gene was detected in fetal lung sample (CT=27.5). The expression of this gene is much higher in fetal (27-31) as compared to adult lung and liver (CT=32-35). Therefore, expression of this gene can be used to distinguish these fetal from adult tissues. In addition, the relative overexpression of this gene in these fetal tissues indicates that the protein product enhances growth or development of these tissues in the fetus and thus may also act in a regenerative capacity in the adult. Therapeutic modulation of this gene, expressed protein and/or use of antibodies or small molecule drugs targeting the gene or gene product are useful in the treatment of lung and liver related diseases.

[1678] Among tissues with metabolic or endocrine function, this gene was expressed at moderate levels in pancreas, adipose, adrenal gland, thyroid, pituitary gland, skeletal muscle, heart, liver and the gastrointestinal tract. Therapeutic modulation of this gene, expressed protein and/or use of antibodies or small molecule drugs targeting the gene or gene product are useful in the treatment of endocrine/metabolically related diseases, such as obesity and diabetes.

[1679] In addition, this gene was expressed at moderate levels in all regions of the central nervous system examined, including amygdala, hippocampus, substantia nigra, thalamus, cerebellum, cerebral cortex, and spinal cord. Therapeutic modulation of this gene, expressed protein and/or use of antibodies or small molecule drugs targeting the gene or gene product are useful in the treatment of central nervous system disorders such as Alzheimer's disease, Parkinson's disease, epilepsy, multiple sclerosis, schizophrenia and depression.

[1680] Panel 4.1D Summary: Ag3771 Highest expression of this gene was detected in resting neutropils (CT=27.3). In addition, this gene was expressed in TNFalpha+LPS treated neutrophils. Therefore, the gene product may reduce activation of these inflammatory cells and be useful as a protein therapeutic to reduce or eliminate the symptoms in patients with Crohn's disease, ulcerative colitis, multiple sclerosis, chronic obstructive pulmonary disease, asthma, emphysema, rheumatoid arthritis, lupus erythematosus, or psoriasis. Therapeutic modulation of this gene, expressed protein and/or use of antibodies or small molecule drugs targeting the gene or gene product are useful in increasing the immune response in patients with AIDS or other immunodeficiencies.

[1681] In addition, expression of this gene was down-regulated in cytokine stimulated LAK cells and LPS-treated monocytes. Therefore, expression of this gene is useful for distinguishing these stimulated versus resting cells.

[1682] In addition, low to moderate expression of this gene was also seen in B cells, dendritic cells, endothelial cells, fibroblasts and normal tissues represented by kidney, thymus, lung, and colon. Therapeutic modulation of this gene, expressed protein and/or use of antibodies or small molecule drugs targeting the gene or gene product are useful in the treatment of cancer, Crohn's disease, ulcerative colitis, multiple sclerosis, chronic obstructive pulmonary disease, asthma, emphysema, rheumatoid arthritis, lupus erythematosus, or psoriasis, microbial and viral infections.

[1683] general oncology screening panel_v_{—}2.4 Summary: Ag941/Ag3771 Highest expression of this gene was detected in a kidney cancer sample (CTs=27). Prominent expression was also seen in prostate and melanoma cancer samples. This gene was overexpressed in the kidney cancer samples when compared to expression in the normal adjacent tissue. Expression of this gene is useful as a marker of kidney cancer. Therapeutic modulation of this gene, expressed protein and/or use of antibodies or small molecule drugs targeting the gene or gene product are useful in the treatment of kidney, melanoma and prostate cancers.

[1684] BP. CG9170802: Stromelysin-1.

[1685] Expression of gene CG91708-02 was assessed using the primer-probe set Ag3395, described in Table BPA. Results of the RTQ-PCR runs are shown in Tables BPB, BPC, BPD, BPE, BPF, BPG, BPH, BPI and BPJ. CG91708-02 represents a full-length physical clone of the CG91708-01 gene.

TABLE BPA
Probe Name Ag3395

| | | | | SEQ |
|---|---|---|---|---|
| | | | Start | ID |
| Primers | Sequences | Length | Position | No |
| Forward | 5′-gtaaagccagtggaaatgaaga-3′ | 22 | 36 | 1458 |
| Probe | TET-5′-tcttccaatcctactgttgctgtgcg-3- | 26 | 59 | 1459 |
| | TAMRA | | | |
| Reverse | 5′-caatggataggctgagcaaac-3′ | 21 | 90 | 1460 |

[1686] TABLE BPB
AI.05 chondrosarcoma
Column A - Rel. Exp. (%) Ag3395, Run 306941365

| Tissue Name | A |
|---|---|
| 138353 PMA (18 hrs) | 1.2 |
| 138352 IL-1beta + Oncostatin M (18 hrs) | 37.4 |
| 138351 IL-1beta + TNFa (18 hrs) | 100.0 |
| 138350 IL-1beta (18 hrs) | 31.9 |
| 138354 Untreated-complete medium (18 hrs) | 0.2 |
| 138347 PMA (6 hrs) | 4.0 |
| 138346 IL-1beta + Oncostatin M (6 hrs) | 29.5 |
| 138345 IL-1beta + TNFa (6 hrs) | 20.6 |
| 138344 IL-1beta (6 hrs) | 8.4 |
| 138348 Untreated-complete medium (6 hrs) | 0.9 |
| 138349 Untreated-serum starved (6 hrs) | 1.8 |

[1687] TABLE BPC
AI_comprehensive panel_v1.0
Column A - Rel. Exp. (%) Ag3395, Run 217700657

| Tissue Name | A | Tissue Name | A |
|---|---|---|---|
| 110967 COPD-F | 0.0 | 1112427 Match Control Psoriasis-F | 0.0 |
| 110980 COPD-F | 0.0 | 112418 Psoriasis-M | 0.0 |
| 110968 COPD-M | 0.0 | 112723 Match Control Psoriasis-M | 0.0 |
| 110977 COPD-M | 0.0 | 1112419 Psoriasis-M | 0.0 |
| 110989 Emphysema-F | 0.0 | 1112424 Match Control Psoriasis-M | 0.0 |
| 110992 Emphysema-F | 0.0 | 112420 Psoriasis-M | 0.0 |
| 110993 Emphysema-F | 0.0 | 112425 Match Control Psoriasis-M | 0.0 |
| 110994 Emphysema-F | 0.0 | 104689 (ME) OA Bone-Backus | 1.0 |
| 110995 Emphysema-F | 0.0 | 104690 (ME) Adj “Normal” Bone- | 2.3 |
| | | Backus | |
| 110996 Emphysema-F | 0.0 | 104691 (ME) OA Synovium-Backus | 4.9 |
| 110997 Asthma-M | 0.0 | 104692 (BA) OA Cartilage-Backus | 27.9 |
| 111001 Asthma-F | 0.0 | 104694 (BA) OA Bone-Backus | 2.6 |
| 111002 Asthma-F | 0.0 | 104695 (BA) Adj “Normal” Bone- | 90.1 |
| | | Backus | |
| 111003 Atopic Asthma-F | 0.0 | 104696 (BA) OA Synovium-Backus | 100.0 |
| 111004 Atopic Asthma-F | 0.0 | 104700 (SS) OA Bone-Backus | 0.7 |
| 111005 Atopic Asthma-F | 0.0 | 104701 (SS) Adj “Normal” Bone-Backus | 14.1 |
| 111006 Atopic Asthma-F | 0.0 | 104702 (SS) OA Synovium-Backus | 1.6 |
| 111417 Allergy-M | 0.0 | 117093 OA Cartilage Rep7 | 0.3 |
| 112347 Allergy-M | 0.0 | 112672 OA Bone5 | 0.6 |
| 112349 Normal Lung-F | 0.0 | 112673 OA Synovium5 | 0.3 |
| 112357 Normal Lung-F | 0.0 | 1112674 OA Synovial Fluid Cells5 | 0.3 |
| 112354 Normal Lung-M | 0.0 | 117100 OA Cartilage Rep14 | 0.0 |
| 112374 Crohns-F | 0.0 | 112756 OA Bone9 | 0.0 |
| 112389 Match Control Crohns-F | 0.1 | 112757 OA Synovium9 | 0.0 |
| 112375 Crohns-F | 0.0 | 112758 OA Synovial Fluid Cells9 | 0.0 |
| 112732 Match Control Crohns-F | 0.0 | 117125 RA Cartilage Rep2 | 0.0 |
| 112725 Crohns-M | 0.1 | 113492 Bone2 RA | 0.0 |
| 112387 Match Control Crohns-M | 0.2 | 113493 Synovium2 RA | 0.0 |
| 112378 Crohns-M | 0.0 | 113494 Syn Fluid Cells RA | 0.0 |
| 112390 Match Control Crohns-M | 0.0 | 113499 Cartilage4 RA | 0.0 |
| 112726 Crohns-M | 0.0 | 113500 Bone4 RA | 0.0 |
| 112731 Match Control Crohns-M | 0.0 | 113501 Synovium RA | 0.0 |
| 112380 Ulcer Col-F | 0.0 | 113502 Syn Fluid Cells4 RA | 0.0 |
| 112734 Match Control Ulcer Col-F | 0.3 | 113495 Cartilage3 RA | 0.0 |
| 112384 Ulcer Col-F | 0.0 | 113496 Bone3 RA | 0.0 |
| 112737 Match Control Ulcer Col-F | 0.0 | 113497 Synovium3 RA | 0.0 |
| 112386 Ulcer Col-F | 0.3 | 113498 Syn Fluid Cells3 RA | 0.1 |
| 112738 Match Control Ulcer Col-F | 3.0 | 117106 Normal Cartilage Rep20 | 0.0 |
| 112381 Ulcer Col-M | 0.0 | 113663 Bone3 Normal | 0.0 |
| 112735 Match Control Ulcer Col- | 0.2 | 113664 Synovium3 Normal | 0.0 |
| M | | | |
| 112382 Ulcer Col-M | 0.0 | 113665 Syn Fluid Cells3 Normal | 0.0 |
| 112394 Match Control Ulcer Col- | 0.1 | 117107 Normal Cartilage Rep22 | 0.0 |
| M | | | |
| 112736 13667 Match Control Ulcer | 0.0 | 113668 Synovium4 Normal | 0.0 |
| Col-M | | | |
| 112383 Ulcer Col-M | 0.0 | 113667 Bone4 Normal | 0.0 |
| 112423 Psoriasis-F | 0.0 | 113669 Syn Fluid Cells4 Normal | 0.0 |

[1688] TABLE BPD
Ardais Panel v.1.0
Column A - Rel. Exp. (%) Ag3395, Run 263151265

| Tissue Name | A |
|---|---|
| 136799 Lung cancer(362) | 0.8 |
| 136800 Lung NAT(363) | 0.4 |
| 136813 Lung cancer(372) | 77.9 |
| 136814 Lung NAT(373) | 0.2 |
| 136815 Lung cancer(374) | 1.1 |
| 136816 Lung NAT(375) | 100.0 |
| 136791 Lung cancer(35A) | 0.5 |
| 136795 Lung cancer(35E) | 9.9 |
| 136797 Lung cancer(360) | 0.1 |
| 136794 lung NAT(35D) | 0.1 |
| 136818 Lung NAT(377) | 0.3 |
| 136787 lung cancer(356) | 0.1 |
| 136788 lung NAT(357) | 0.1 |
| 136804 Lung cancer(369) | 0.6 |
| 136805 Lung NAT(36A) | 0.1 |
| 136806 Lung cancer(36B) | 4.3 |
| 136807 Lung NAT(36C) | 0.1 |
| 136789 lung cancer(358) | 0.0 |
| 136802 Lung cancer(365) | 0.2 |
| 136803 Lung cancer(368) | 0.2 |
| 136811 Lung cancer(370) | 31.2 |
| 136810 Lung NAT(36F) | 0.9 |

[1689] TABLE BPE
Ardais Prostate 1.0
Column A - Rel. Exp. (%) Ag3395, Run 320416133

| Tissue Name | A | Tissue Name | A |
|---|---|---|---|
| 151135 Prostate NAT(B87) | 1.7 | 151128 Prostate cancer(B8C) | 34.4 |
| 151143 Prostate NAT(B8A) | 7.9 | 151136 Prostate cancer(B8B) | 34.4 |
| 153669 Prostate NAT(D5E) | 5.8 | 151144 Prostate cancer(B8F) | 3.4 |
| 153677 Prostate NAT(D66) | 0.8 | 153654 Prostate cancer(D4F) | 100.0 |
| 153685 Prostate NAT(D6E) | 5.1 | 153662 Prostate cancer(D57) | 2.8 |
| 145905 Prostate NAT(A0C) | 3.5 | 153655 Prostate cancer(D50) | 89.5 |
| 153670 Prostate NAT(D5F) | 5.3 | 145907 Prostate cancer(A0A) | 15.5 |
| 153678 Prostate NAT(D67) | 13.3 | 153663 Prostate cancer(D58) | 2.6 |
| 153686 Prostate NAT(D6F) | 6.0 | 151130 Prostate cancer(B90) | 69.3 |
| 145906 Prostate NAT(A09) | 15.4 | 153648 Prostate cancer(D49) | 2.8 |
| 151129 Prostate NAT(B93) | 4.0 | 153656 Prostate cancer(D51) | 5.8 |
| 151137 Prostate NAT(B86) | 3.7 | 153664 Prostate cancer(D59) | 0.1 |
| 153671 Prostate NAT(D60) | 10.4 | 155799 Prostate cancer(EA8) | 6.4 |
| 151145 Prostate NAT(B91) | 25.3 | 145909 Prostate cancer(9E7) | 23.8 |
| 153679 Prostate NAT(D68) | 2.7 | 153649 Prostate cancer(D4A) | 4.9 |
| 153687 Prostate NAT(D70) | 2.0 | 153657 Prostate cancer(D52) | 9.0 |
| 153672 Prostate NAT(D61) | 12.4 | 153665 Prostate cancer(D5A) | 5.5 |
| 153680 Prostate NAT(D69) | 5.9 | 151132 Prostate cancer(B88) | 23.8 |
| 151131 Prostate NAT(B85) | 1.8 | 153650 Prostate cancer(D4B) | 3.9 |
| 153673 Prostate NAT(D62) | 4.8 | 153658 Prostate cancer(D53) | 3.5 |
| 153681 Prostate NAT(D6A) | 1.3 | 153666 Prostate cancer(D5B) | 9.7 |
| 145910 Prostate NAT(9G3) | 0.9 | 153651 Prostate cancer(D4C) | 0.7 |
| 153674 Prostate NAT(D63) | 26.2 | 153659 Prostate cancer(D54) | 7.1 |
| 153682 Prostate NAT(D6B) | 10.7 | 153667 Prostate cancer(D5C) | 33.9 |
| 151133 Prostate NAT(B94) | 12.2 | 151134 Prostate cancer(B92) | 31.4 |
| 153675 Prostate NAT(D64) | 9.8 | 151142 Prostate cancer(B89) | 1.6 |
| 153683 Prostate NAT(D6C) | 15.7 | 153652 Prostate cancer(D4D) | 2.1 |
| 153668 Prostate NAT(D5D) | 34.9 | 153660 Prostate cancer(D55) | 3.4 |
| 153676 Prostate NAT(D65) | 6.4 | 149773 Prostate NAT(AD8) | 16.5 |
| 153684 Prostate NAT(D6D) | 2.7 | 149774 Prostate cancer(AD7) | 6.4 |
| 145904 Prostate cancer(9E2) | 2.3 | 151139 Prostate NAT(B8E) | 6.5 |
| 149776 Prostate cancer(AD5) | 49.3 | 151138 Prostate cancer(B8D) | 8.5 |
| 153653 Prostate cancer(D4E) | 5.4 | 151141 Prostate NAT(B96) | 2.8 |
| 153661 Prostate cancer(D56) | 4.2 | 151140 Prostate cancer(B95) | 4.1 |

[1690] TABLE BPF
General_screening_panel_v1.4
Column A - Rel. Exp. (%) Ag3395, Run 208034252
Column B - Rel. Exp. (%) Ag3395, Run 212141064

| Tissue Name | A | B | Tissue Name | A | B |
|---|---|---|---|---|---|
| Adipose | 0.1 | 0.1 | Renal ca. TK-10 | 0.0 | 0.0 |
| Melanoma* Hs688(A).T | 1.2 | 1.9 | Bladder | 0.1 | 0.1 |
| Melanoma* Hs688(B).T | 0.3 | 0.5 | Gastric ca. (liver met.) NCI-N87 | 0.5 | 0.8 |
| Melanoma* M14 | 0.1 | 0.1 | Gastric ca. KATO III | 0.4 | 0.8 |
| Melanoma* LOXIMVI | 3.2 | 6.6 | Colon ca. SW-948 | 0.0 | 0.0 |
| Melanoma* SK-MEL-5 | 0.0 | 0.0 | Colon ca. SW480 | 0.0 | 0.0 |
| Squamous cell carcinoma | 0.0 | 0.1 | Colon ca.* (SW480 met) SW620 | 0.0 | 0.0 |
| SCC-4 | | | | | |
| Testis Pool | 0.8 | 1.2 | Colon ca. HT29 | 0.0 | 0.0 |
| Prostate ca.* (bone met) PC-3 | 0.1 | 0.1 | Colon ca. HCT-116 | 0.0 | 0.0 |
| Prostate Pool | 0.1 | 0.2 | Colon ca. CaCo-2 | 0.1 | 0.1 |
| Placenta | 0.0 | 0.0 | Colon cancer tissue | 30.1 | 37.1 |
| Uterus Pool | 0.0 | 0.0 | Colon ca. SW1116 | 0.0 | 0.0 |
| Ovarian ca. OVCAR-3 | 0.0 | 0.1 | Colon ca. Colo-205 | 0.0 | 0.0 |
| Ovarian ca. SK-OV-3 | 0.0 | 0.3 | Colon ca. SW-48 | 0.0 | 0.0 |
| Ovarian ca. OVCAR-4 | 0.0 | 0.0 | Colon Pool | 0.0 | 0.0 |
| Ovarian ca. OVCAR-5 | 0.2 | 0.4 | Small Intestine Pool | 0.6 | 1.2 |
| Ovarian ca. IGROV-1 | 0.0 | 0.1 | Stomach Pool | 2.2 | 3.7 |
| Ovarian ca. OVCAR-8 | 0.0 | 0.0 | Bone Marrow Pool | 0.0 | 0.0 |
| Ovary | 0.0 | 0.0 | Fetal Heart | 0.0 | 0.0 |
| Breast ca. MCF-7 | 0.0 | 0.0 | Heart Pool | 0.0 | 0.0 |
| Breast ca. MDA-MB-231 | 0.0 | 0.0 | Lymph Node Pool | 0.0 | 0.0 |
| Breast ca. BT 549 | 0.1 | 0.2 | Fetal Skeletal Muscle | 0.0 | 0.0 |
| Breast ca. T47D | 0.1 | 0.3 | Skeletal Muscle Pool | 0.1 | 0.2 |
| Breast ca. MDA-N | 0.1 | 0.2 | Spleen Pool | 0.1 | 0.1 |
| Breast Pool | 0.1 | 0.3 | Thymus Pool | 0.0 | 0.1 |
| Trachea | 1.6 | 1.8 | CNS cancer (glio/astro) U87-MG | 100.0 | 100.0 |
| Lung | 0.0 | 0.0 | CNS cancer (glio/astro) U-118- | 52.5 | 72.7 |
| | | | MG | | |
| Fetal Lung | 0.1 | 0.1 | CNS cancer (neuro; met) SK-N-AS | 0.0 | 0.0 |
| Lung ca. NCI-N417 | 0.0 | 0.0 | CNS cancer (astro) SF-539 | 0.1 | 0.2 |
| Lung ca. LX-1 | 0.0 | 0.0 | CNS cancer (astro) SNB-75 | 0.3 | 0.7 |
| Lung ca. NCI-H146 | 0.0 | 0.0 | CNS cancer (glio) SNB-19 | 0.1 | 0.2 |
| Lung ca. SHP-77 | 0.0 | 0.0 | CNS cancer (glio) SF-295 | 21.2 | 54.0 |
| Lung ca. A549 | 0.0 | 0.0 | Brain (Amygdala) Pool | 0.0 | 0.0 |
| Lung ca. NCI-H526 | 0.0 | 0.0 | Brain (cerebellum) | 0.0 | 0.0 |
| Lung ca. NCI-H23 | 0.0 | 0.4 | Brain (fetal) | 0.0 | 0.0 |
| Lung ca. NCI-H460 | 0.0 | 0.2 | Brain (Hippocampus) Pool | 0.1 | 0.2 |
| Lung ca. HOP-62 | 0.0 | 0.0 | Cerebral Cortex Pool | 0.0 | 0.0 |
| Lung ca. NCI-H522 | 0.1 | 0.3 | Brain (Substantia nigra) Pool | 0.0 | 0.0 |
| Liver | 0.0 | 0.0 | Brain (Thalamus) Pool | 0.0 | 0.0 |
| Fetal Liver | 0.0 | 0.0 | Brain (whole) | 0.0 | 0.1 |
| Liver ca. HepG2 | 0.0 | 0.0 | Spinal Cord Pool | 0.0 | 0.0 |
| Kidney Pool | 0.0 | 0.0 | Adrenal Gland | 0.0 | 0.1 |
| Fetal Kidney | 0.3 | 0.5 | Pituitary gland Pool | 0.0 | 0.0 |
| Renal ca. 786-0 | 0.0 | 0.0 | Salivary Gland | 0.1 | 0.0 |
| Renal ca. A498 | 0.0 | 0.0 | Thyroid (female) | 0.0 | 0.0 |
| Renal ca. ACHN | 0.0 | 0.8 | Pancreatic ca. CAPAN2 | 0.1 | 0.1 |
| Renal ca. UO-31 | 0.0 | 0.0 | Pancreas Pool | 0.0 | 0.1 |

[1691] TABLE BPG
Panel 2D
Column A - Rel. Exp. (%) Ag3395, Run 165469036

| Tissue Name | A |
|---|---|
| Normal Colon | 4.4 |
| CC Well to Mod Diff (OD03866) | 48.6 |
| CC Margin (OD03866) | 4.6 |
| CC Gr.2 rectosigmoid (OD03868) | 9.0 |
| CC Margin (OD03868) | 0.3 |
| CC Mod Duff (OD03920) | 10.9 |
| CC Margin (OD03920) | 1.8 |
| CC Gr.2 ascend colon (OD03921) | 100.0 |
| CC Margin (OD03921) | 3.1 |
| CC from Partial Hepatectomy (OD04309) Mets | 1.4 |
| Liver Margin (OD04309) | 0.3 |
| Colon mets to lung (OD04451-01) | 0.1 |
| Lung Margin (OD04451-02) | 0.0 |
| Normal Prostate 6546-1 | 1.9 |
| Prostate cancer (OD04410) | 0.3 |
| Prostate Margin (OD04410) | 0.0 |
| Prostate cancer (OD04720-01) | 0.5 |
| Prostate Margin (OD04720-02) | 0.9 |
| Normal Lung | 0.4 |
| Lung Met to Muscle (OD04286) | 0.4 |
| Muscle Margin (OD04286) | 9.3 |
| Lung Malignant cancer (OD03126) | 2.6 |
| Lung Margin (OD03126) | 0.3 |
| Lung cancer (OD04404) | 25.9 |
| Lung Margin (OD04404) | 0.2 |
| Lung cancer (OD04565) | 21.9 |
| Lung Margin (OD04565) | 0.4 |
| Lung cancer (OD04237-01) | 1.4 |
| Lung Margin (OD04237-02) | 0.3 |
| Ocular Mel Met to Liver (OD04310) | 0.1 |
| Liver Margin (OD04310) | 0.1 |
| Melanoma Metastasis | 0.2 |
| Lung Margin (OD04321) | 0.3 |
| Normal Kidney | 1.7 |
| Kidney Ca, Nuclear grade 2 (OD04338) | 0.1 |
| Kidney Margin (OD04338) | 1.0 |
| Kidney Ca Nuclear grade 1/2 (OD04339) | 0.1 |
| Kidney Margin (OD04339) | 1.4 |
| Kidney Ca, Clear cell type (OD04340) | 0.0 |
| Kidney Margin (OD04340) | 0.5 |
| Kidney Ca, Nuclear grade 3 (OD04348) | 0.0 |
| Kidney Margin (OD04348) | 1.2 |
| Kidney cancer (OD04622-01) | 0.1 |
| Kidney Margin (OD04622-03) | 0.3 |
| Kidney cancer (OD04450-01) | 0.3 |
| Kidney Margin (OD04450-03) | 0.2 |
| Kidney cancer 8120607 | 0.5 |
| Kidney Margin 8120608 | 0.0 |
| Kidney cancer 8120613 | 0.0 |
| Kidney Margin 8120614 | 0.2 |
| Kidney cancer 9010320 | 0.6 |
| Kidney Margin 9010321 | 1.1 |
| Normal Uterus | 0.5 |
| Uterine cancer 064011 | 0.9 |
| Normal Thyroid | 0.2 |
| Thyroid cancer | 0.0 |
| Thyroid cancer A302152 | 0.9 |
| Thyroid Margin A302153 | 0.0 |
| Normal Breast | 5.8 |
| Breast cancer | 3.8 |
| Breast cancer (OD04590-01) | 2.7 |
| Breast cancer Mets (OD04590-03) | 2.5 |
| Breast cancer Metastasis | 0.3 |
| Breast cancer | 17.7 |
| Breast cancer | 4.1 |
| Breast cancer 9100266 | 18.2 |
| Breast Margin 9100265 | 30.4 |
| Breast cancer A209073 | 16.8 |
| Breast Margin A209073 | 19.3 |
| Normal Liver | 0.1 |
| Liver cancer | 0.1 |
| Liver cancer 1025 | 0.0 |
| Liver cancer 1026 | 0.0 |
| Liver cancer 6004-T | 0.0 |
| Liver Tissue 6004-N | 1.6 |
| Liver cancer 6005-T | 0.0 |
| Liver Tissue 6005-N | 0.0 |
| Normal Bladder | 0.5 |
| Bladder cancer | 0.6 |
| Bladder cancer | 4.3 |
| Bladder cancer (OD04718-01) | 13.4 |
| Bladder Normal Adjacent (OD04718-03) | 35.4 |
| Normal Ovary | 0.0 |
| Ovarian cancer | 1.3 |
| Ovarian cancer (OD04768-07) | 0.0 |
| Ovary Margin (OD04768-08) | 1.7 |
| Normal Stomach | 1.3 |
| Gastric cancer 9060358 | 6.9 |
| Stomach Margin 90603591 | 1.4 |
| Gastric cancer 90603951 | 10.2 |
| Stomach Margin 90603941 | 1.3 |
| Gastric cancer 9060397 | 25.0 |
| Stomach Margin 9060396 | 1.0 |
| Gastric cancer 064005 | 60.7 |

[1692] TABLE BPH
Panel 3D
Column A - Rel. Exp. (%) Ag3395, Run 165924467
Column B - Rel. Exp. (%) Ag3395, Run 167542915

| Tissue Name | A | B | Tissue Name | A | B |
|---|---|---|---|---|---|
| 94905 Daoy | 0.0 | 0.0 | 94954 Ca Ski Cervical | 0.3 | 0.2 |
| Medulloblastoma/Cerebellum | | | epidermoid carcinoma | | |
| | | | (metastasis | | |
| 94906 TE671 | 0.0 | 0.0 | 94955 ES-2 Ovarian clear cell | 3.1 | 4.0 |
| Medulloblastom/Cerebellum | | | carcinoma | | |
| 94907 D283 Med | 0.0 | 0.0 | 94957 Ramos Stimulated with | 0.0 | 0.0 |
| Medulloblastoma/Cerebellum | | | PMA/ionomycin 6 h | | |
| 94908 PFSK-1 Primitive | 0.0 | 0.0 | 94958 Ramos Stimulated with | 0.0 | 0.0 |
| Neuroectodermal/Cerebellum | | | PMA/ionomycin 14 h | | |
| 94909 XF-498 CNS | 0.1 | 0.1 | 94962 MEG-01 Chronic | 0.0 | 0.0 |
| | | | myelogenous leukemia | | |
| | | | (megokaryoblast) | | |
| 94910 SNB-78 CNS/glioma | 0.3 | 0.2 | 94963 Raji Burkitt's | 0.0 | 0.0 |
| | | | lymphoma | | |
| 94911 SF-268 CNS/glioblastoma | 0.0 | 0.1 | 94964 Daudi Burkitt's | 0.0 | 0.0 |
| | | | lymphoma | | |
| 94912 T98G Glioblastoma | 0.8 | 1.3 | 94965 U266 B-cell | 0.0 | 0.0 |
| | | | plasmacytoma/myeloma | | |
| 96776 SK-N-SH Neuroblastoma | 12.9 | 16.7 | 94968 CA46 Burkitt's | 0.0 | 0.0 |
| (metastasis) | | | lymphoma | | |
| 94913 SF-295 CNS/glioblastoma | 100.0 | 100.0 | 94970 RL non-Hodgkin's B- | 0.0 | 0.0 |
| | | | cell lymphoma | | |
| 94914 Cerebellum | 0.0 | 0.0 | 94972 JM1 pre-B-cell | 0.0 | 0.0 |
| | | | lymphoma/leukemia | | |
| 96777 Cerebellum | 0.0 | 0.0 | 94973 Jurkat T cell leukemia | 0.0 | 0.0 |
| 94916 NCI-H292 | 0.0 | 0.0 | 94974 TF-1 Erythroleukemia | 0.0 | 0.0 |
| Mucoepidermoid lung carcinoma | | | | | |
| 94917 DMS-114 Small cell lung | 0.2 | 0.3 | 94975 HUT 78 T-cell | 0.0 | 0.0 |
| cancer | | | lymphoma | | |
| 94918 DMS-79 Small cell lung | 0.0 | 0.0 | 94977 U937 Histiocytic | 0.0 | 0.0 |
| cancer/neuroendocrine | | | lymphoma | | |
| 94919 NCI-H146 Small cell lung | 0.0 | 0.0 | 94980 KU-812 Myelogenous | 0.0 | 0.2 |
| cancer/neuroendocrine | | | leukemia | | |
| 94920 NCI-H526 Small cell lung | 0.0 | 0.0 | 769-P- Clear cell renal | 0.0 | 0.0 |
| cancer/neuroendocrine | | | carcinoma | | |
| 94921 NCI-N417 Small cell lung | 0.0 | 0.0 | 94983 Caki-2 Clear cell renal | 0.0 | 0.0 |
| cancer/neuroendocrine | | | carcinoma | | |
| 94923 NCI-H82 Small cell lung | 0.0 | 0.0 | 94984 SW 839 Clear cell renal | 0.0 | 0.0 |
| cancer/neuroendocrine | | | carcinoma | | |
| 94924 NCI-H157 Squamous cell | 0.0 | 0.0 | 94986 G401 Wilms' tumor | 0.0 | 0.0 |
| lung cancer (metastasis) | | | | | |
| 94925 NCI-H1155 Large cell | 0.0 | 0.0 | 94987 Hs766T Pancreatic | 0.0 | 0.0 |
| lung cancer/neuroendocrine | | | carcinoma (LN metastasis) | | |
| 94926 NCI-H1299 Large cell | 0.0 | 0.0 | 94988 CAPAN-1 Pancreatic | 0.0 | 0.0 |
| lung cancer/neuroendocrine | | | adenocarcinoma (liver | | |
| | | | metastasis) | | |
| 94927 NCI-H727 Lung carcinoid | 0.0 | 0.0 | 94989 SU86.86 Pancreatic | 0.0 | 0.1 |
| | | | carcinoma (liver metastasis) | | |
| 94928 NCI-UMC-11 Lung | 0.1 | 0.0 | 94990 BxPC-3 Pancreatic | 0.2 | 0.1 |
| carcinoid | | | adenocarcinoma | | |
| 94929 LX-1 Small cell lung | 0.0 | 0.0 | 94991 HPAC Pancreatic | 0.0 | 0.0 |
| cancer | | | adenocarcinoma | | |
| 94930 Colo-205 Colon cancer | 0.0 | 0.0 | 94992 MIA PaCa-2 Pancreatic | 0.0 | 0.0 |
| | | | carcinoma | | |
| 94931 KM12 Colon cancer | 0.0 | 0.0 | 94993 CFPAC-1 Pancreatic | 0.0 | 0.1 |
| | | | ductal adenocarcinoma | | |
| 94932 KM20L2 Colon cancer | 0.0 | 0.0 | 94994 PANC-1 Pancreatic | 0.0 | 0.0 |
| | | | epithelioid ductal carcinoma | | |
| 94933 NCI-H716 Colon cancer | 0.0 | 0.0 | 94996 T24 Bladder carcinma | 0.0 | 0.0 |
| | | | (transitional cell | | |
| 94935 SW-48 Colon | 0.0 | 0.0 | 5637- Bladder carcinoma | 0.0 | 0.0 |
| adenocarcinoma | | | | | |
| 94936 SW1116 Colon | 0.0 | 0.0 | 94998 HT-1197 Bladder | 0.0 | 0.1 |
| adenocarcinoma | | | carcinoma | | |
| 94937 LS 174T Colon | 0.0 | 0.0 | 94999 UM-UC-3 Bladder | 0.2 | 0.2 |
| adenocarcinoma | | | carcinma (transitional cell) | | |
| 94938 SW-948 Colon | 0.0 | 0.0 | 95000 A204 | 0.2 | 0.2 |
| adenocarcinoma | | | Rhabdomyosarcoma | | |
| 94939 SW-480 Colon | 0.0 | 0.0 | 95001 HT-1080 Fibrosarcoma | 0.0 | 0.1 |
| adenocarcinoma | | | | | |
| 94940 NCI-SNU-5 Gastric | 0.0 | 0.0 | 95002 MG-63 Osteosarcoma | 0.3 | 0.5 |
| carcinoma | | | (bone) | | |
| KATO III- Gastric carcinoma | 0.0 | 0.0 | 95003 SK-LMS-1 | 23.7 | 38.4 |
| | | | Leiomyosarcoma (vulva) | | |
| 94943 NCI-SNU-16 Gastric | 0.1 | 0.2 | 95004 SJRH30 | 0.0 | 0.0 |
| carcinoma | | | Rhabdomyosarcoma (met to | | |
| | | | bone marrow) | | |
| 94944 NCI-SNU-1 Gastric | 0.0 | 0.0 | 95005 A431 Epidermoid | 0.0 | 0.0 |
| carcinoma | | | carcinoma | | |
| 94946 RF-1 Gastric | 0.0 | 0.0 | 95007 WM266-4 Melanoma | 0.0 | 0.0 |
| adenocarcinoma | | | | | |
| 94947 RF-48 Gastric | 0.0 | 0.0 | DU 145- Prostate carcinoma | 0.0 | 0.0 |
| adenocarcinoma | | | (brain metastasis) | | |
| 96778 MKN-45 Gastric | 0.0 | 0.0 | 95012 MDA-MB-468 Breast | 0.0 | 0.0 |
| carcinoma | | | adenocarcinoma | | |
| 94949 NCI-N87 Gastric | 0.0 | 0.0 | SCC-4- Squamous cell | 0.0 | 0.0 |
| carcinoma | | | carcinoma of tongue | | |
| 94951 OVCAR-5 Ovarian | 0.0 | 0.0 | SCC-9- Squamous cell | 0.0 | 0.0 |
| carcinoma | | | carcinoma of tongue | | |
| 94952 RL95-2 Uterine carcinoma | 0.0 | 0.0 | SCC-15- Squamous cell | 0.0 | 0.0 |
| | | | carcinoma of tongue | | |
| 94953 HelaS3 Cervical | 0.0 | 0.0 | 95017 CAL 27 Squamous cell | 0.0 | 4.3 |
| adenocarcinoma | | | carcinoma of tongue | | |

[1693] TABLE BPI
Panel 4D
Column A - Rel. Exp. (%) Ag3395, Run 166447040

| Tissue Name | A | Tissue Name | A |
|---|---|---|---|
| Secondary Th1 act | 0.0 | HUVEC IL-1 beta | 0.0 |
| Secondary Th2 act | 0.0 | HUVEC IFN gamma | 0.0 |
| Secondary Tr1 act | 0.0 | HUVEC TNF alpha + IFN gamma | 0.0 |
| Secondary Th1 rest | 0.0 | HUVEC TNF alpha + IL4 | 0.0 |
| Secondary Th2 rest | 0.0 | HUVEC IL-11 | 0.0 |
| Secondary Tr1 rest | 0.0 | Lung Microvascular EC none | 0.0 |
| Primary Th1 act | 0.0 | Lung Microvascular EC TNF alpha + IL-1 | 0.0 |
| | | beta | |
| Primary Th2 act | 0.0 | Microvascular Dermal EC none | 0.0 |
| Primary Tr1 act | 0.0 | Microsvasular Dermal EC TNF alpha + IL-1 | 0.0 |
| | | beta | |
| Primary Th1 rest | 0.0 | Bronchial epithelium TNF alpha + IL1beta | 4.0 |
| Primary Th2 rest | 0.0 | Small airway epithelium none | 0.8 |
| Primary Tr1 rest | 0.0 | Small airway epithelium TNF alpha + IL-1 | 7.7 |
| | | beta | |
| CD45RA CD4 lymphocyte act | 23.3 | Coronery artery SMC rest | 0.6 |
| CD45RO CD4 lymphocyte act | 0.0 | Coronery artery SMC TNF alpha + IL-1 beta | 0.8 |
| CD8 lymphocyte act | 0.0 | Astrocytes rest | 0.0 |
| Secondary CD8 lymphocyte rest | 0.0 | Astrocytes TNF alpha + IL-1 beta | 0.3 |
| Secondary CD8 lymphocyte act | 0.0 | KU-812 (Basophil) rest | 0.0 |
| CD4 lymphocyte none | 0.0 | KU-812 (Basophil) PMA/ionomycin | 0.0 |
| 2ry Th1/Th2/Tr1 anti-CD95 | 0.0 | CCD1106 (Keratinocytes) none | 0.0 |
| CH11 | | | |
| LAK cells rest | 0.0 | CCD1106 (Keratinocytes) TNF alpha + IL-1 | 0.1 |
| | | beta | |
| LAK cells IL-2 | 0.0 | Liver cirrhosis | 0.0 |
| LAK cells IL-2 + IL-12 | 0.0 | Lupus kidney | 0.0 |
| LAK cells IL-2 + IFN gamma | 0.0 | NCI-H292 none | 0.0 |
| LAK cells IL-2 + IL-18 | 0.0 | NCI-H292 IL-4 | 0.0 |
| LAK cells PMA/ionomycin | 0.0 | NCI-H292 IL-9 | 0.0 |
| NK Cells IL-2 rest | 0.0 | NCI-H292 IL-13 | 0.0 |
| Two Way MLR 3 day | 0.0 | NCI-H292 IFN gamma | 0.0 |
| Two Way MLR 5 day | 0.0 | HPAEC none | 0.0 |
| Two Way MLR 7 day | 0.0 | HPAEC TNF alpha + IL-1 beta | 0.0 |
| PBMC rest | 0.0 | Lung fibroblast none | 0.3 |
| PBMC PWM | 0.0 | Lung fibroblast TNF alpha + IL-1 beta | 56.6 |
| PBMC PHA-L | 0.0 | Lung fibroblast IL-4 | 0.2 |
| Ramos (B cell) none | 0.0 | Lung fibroblast IL-9 | 1.7 |
| Ramos (B cell) ionomycin | 0.0 | Lung fibroblast IL-13 | 0.1 |
| B lymphocytes PWM | 0.0 | Lung fibroblast IFN gamma | 0.2 |
| B lymphocytes CD40L and IL-4 | 0.0 | Dermal fibroblast CCD1070 rest | 16.5 |
| EOL-1 dbcAMP | 0.0 | Dermal fibroblast CCD1070 TNF alpha | 57.0 |
| EOL-1 dbcAMP | 0.0 | Dermal fibroblast CCD1070 IL-1 beta | 100.0 |
| PMA/ionomycin | 0.0 | | |
| Dendritic cells none | 0.0 | Dermal fibroblast IFN gamma | 1.7 |
| Dendritic cells LPS | 0.0 | Dermal fibroblast IL-4 | 2.9 |
| Dendritic cells anti-CD40 | 0.0 | IBD Colitis 2 | 0.1 |
| Monocytes rest | 0.0 | IBD Crohn's | 0.0 |
| Monocytes LPS | 0.0 | Colon | 0.1 |
| Macrophages rest | 0.0 | Lung | 0.0 |
| Macrophages LPS | 0.0 | Thymus | 0.1 |
| HUVEC none | 0.0 | Kidney | 0.0 |
| HUVEC starved | 0.0 | | |

[1694] TABLE BPJ
Panel 5 Islet
Column A - Rel. Exp. (%) Ag3395, Run 259154756

| Tissue Name | A | Tissue Name | A |
|---|---|---|---|
| 97457 Patient-02go adipose | 0.0 | 94709 Donor 2 AM - A adipose | 8.0 |
| 97476 Patient-07sk skeletal muscle | 15.3 | 94710 Donor 2 AM - B adipose | 4.1 |
| 97477 Patient-07ut uterus | 0.0 | 94711 Donor 2 AM - C adipose | 4.5 |
| 97478 Patient-07pl placenta | 0.0 | 94712 Donor 2 AD - A adipose | 0.3 |
| 99167 Bayer Patient 1 | 100.0 | 94713 Donor 2 AD - B adipose | 0.5 |
| 97482 Patient-08ut uterus | 2.3 | 94714 Donor 2 AD - C adipose | 1.0 |
| 97483 Patient-08pl placenta | 0.4 | 94742 Donor 3 U - A Mesenchymal | 0.6 |
| | | Stem Cells | |
| 97486 Patient-09sk skeletal muscle | 0.5 | 94743 Donor 3 U - B Mesenchymal | 0.3 |
| | | Stem Cells | |
| 97487 Patient-09ut uterus | 0.1 | 94730 Donor 3 AM - A adipose | 21.6 |
| 97488 Patient-09pl placenta | 0.0 | 94731 Donor 3 AM - B adipose | 12.7 |
| 97492 Patient-10ut uterus | 0.4 | 94732 Donor 3 AM - C adipose | 13.2 |
| 97493 Patient-10pl placenta | 0.0 | 94733 Donor 3 AD - A adipose | 2.9 |
| 97495 Patient-11go adipose | 0.0 | 94734 Donor 3 AD - B adipose | 3.0 |
| 97496 Patient-11sk skeletal muscle | 0.3 | 94735 Donor 3 AD - C adipose | 0.6 |
| 97497 Patient-11ut uterus | 1.0 | 77138 Liver HepG2untreated | 0.3 |
| 97498 Patient-11pl placenta | 0.0 | 73556 Heart Cardiac stromal cells | 0.3 |
| | | (primary) | |
| 97500 Patient-12go adipose | 0.0 | 81735 Small Intestine | 1.9 |
| 97501 Patient-12sk skeletal muscle | 0.0 | 72409 Kidney Proximal Convoluted | 0.3 |
| | | Tubule | |
| 97502 Patient-12ut uterus | 0.2 | 82685 Small intestine Duodenum | 1.8 |
| 97503 Patient-12p1 placenta | 0.3 | 90650 Adrenal Adrenocortical | 0.0 |
| | | adenoma | |
| 94721 Donor 2 U - A Mesenchymal | 0.3 | 72410 Kidney HRCE | 1.2 |
| Stem Cells | | | |
| 94722 Donor 2 U - B Mesenchymal | 0.7 | 72411 Kidney HRE | 0.3 |
| Stem Cells | | | |
| 94723 Donor 2 U - C Mesenchymal | 0.0 | 73139 Uterus Uterine smooth muscle | 22.1 |
| Stem Cells | | cells | |

[1695] AI.05 chondrosarcoma Summary: Ag3395 Highest expression of this gene was detected in IL-1 and TNF alpha treated chondrosarcoma cell line (SW1353) (CT=18.8). Expression of this gene was upregulated upon IL-1 treatment, a potent activator of pro-inflammatory cytokines and matrix metalloproteinases. This gene codes for matrix metalloproteinase 3 (MMP3), which is capable of degrading proteoglycan, fibronectin, laminin, and type IV collagen. MMPs are known to participate in the destruction of cartilage observed in Osteoarthritis (OA). Therapeutic modulation of this gene, expressed protein and/or use of antibodies or small molecule drugs targeting the gene or gene product are useful in the prevention of the degeneration of cartilage observed in OA.

[1696] AI_comprehensive panel_v1.0 Summary: Ag3395 This gene was expressed in orthoarthritis (OA) tissues but not in control tissue. This gene encodes MMP3 protein, which has been shown to be present in OA joint (Bluteau G, Conrozier T, Mathieu P, Vignon E, Herbage D, Mallein-Gerin F. Matrix metalloproteinase-1, -3, -13 and aggrecanase-1 and -2 are differentially expressed in experimental osteoarthritis. Biochim Biophys Acta 2001 May 3; 1526(2):147-58) tissue and may contribute to the pathology of this disease. Therapeutic modulation of this gene, expressed protein and/or use of antibodies or small molecule drugs targeting the gene or gene product are useful in the treatment of OA.

[1697] Ardais Panel v.1.0 Summary: Ag3395 Highest expression of this gene was detected in a normal adjacent lung (375) sample (CT=24.7). Significant expression of this gene was seen in normal and cancer samples from lung. This gene shows up-regulated expression in 4/6 cancer samples relative to corresponding normal adjacent samples. Therefore, modulation of this, expressed protein, and/or use of antibodies or small molecule drug targeting this gene or gene product will be of use to treat lung cancer.

[1698] Ardais Prostate 1.0 Summary: Ag3395 Highest expression of this gene was detected in prostate cancer (D4F) sample (CT=27). Significant expression of this gene was seen in normal and cancer samples from prostate. The expression of this gene was relatively higher in number of prostate cancer samples. Therefore, modulation of this, expressed protein, and/or use of antibodies or small molecule drug targeting this gene or gene product will be of use to treat prostate cancer.

[1699] General_screening_panel_v1.4 Summary: Ag3395 The expression of this gene was highest in a sample derived a brain cancer cell line (U87-MG) (CTs=22-24). Significant expression of this gene was also seen in brain cancer cell lines, colon cancer cell lines and melanoma cell lines. Modulation of this gene, encoded protein and/or use of antibodies or small molecule drug targeting this gene or gene product is useful in the treatment of brain or colon cancer or melanoma.

[1700] Among tissues with metabolic function, this gene was expressed at low levels in pancreas, adipose, and fetal skeletal muscle. This expression indicates that this gene product plays a role in normal neuroendocrine and metabolic and that disregulated expression of this gene will contribute to neuroendocrine disorders or metabolic diseases, such as obesity and diabetes.

[1701] This gene was also expressed at low but significant levels in the hippocampus, a structure critical for learning and memory. The hippocampus-preferential expression of this gene indicate that it plays a role in learning and memory processes. Modulation of this gene is useful in treatment of CNS disorders involving memory deficits, including Alzheimer's disease and aging.

[1702] Panel 2D Summary: Ag3395 Highest expression of this gene was detected in a sample derived from a colon cancer (CT=26.8). Significant expression was also seen in gastric cancer, bladder cancer, breast cancer, lung cancer and colon cancer. Expression levels of this gene is useful as marker to detect these cancers. Therapeutic modulation of this gene, encoded protein and/or use of antibodies or small molecule drug targeting this gene or gene product is useful in the treatment of gastric, bladder, breast, lung or colon cancers.

[1703] Panel 3D Summary: Ag3395 The expression of this gene was highest in a sample derived from a brain cancer cell line (SF-295) (CTs=24-26). Significant levels of expression of this gene was also seen in cell lines derived from brain, lung, ovarian, cervical, pancreatic, vulval, and bone cancers. Therapeutic modulation of this gene, encoded protein and/or use of antibodies or small molecule drugs is useful in the treatment of brain lung, ovarian, cervical, pancreatic, vulval, and bone cancers.

[1704] Panel 4D Summary: Ag3395 The expression level of this gene was up-regulated in lung and dermal fibroblasts after treatment with IL-1 beta and/or TNF alpha (CTs=21.5-22.5). High expression of this gene was also seen in activated small airway and bronchial epithelium, activated naive T cells (CD45RA CD4 lymphocyte), activated asatrocytes, resting and activated coronary artery SMC cells. This expression profile indicates that the stromolysin protein encoded by this gene may facilitate tissue destruction, remodeling and participate in cell:cell interactions that prevent the resolution of the inflammatory response. Modulation of this gene, encoded protein and/or use of antibodies or small molecule drug targeting this gene or gene product will help to reduce or eliminate inflammation in the skin and lung resulting from psoriasis, allergy, asthma, emphysema, promote wound healing and prevent delayed type hypersensitivity type reactions.

[1705] Panel 5 Islet Summary: Ag3395 Highest expression of this gene was detected in islet cells (bayer patient 1) (CT=27.9). Significant expression of this gene was also seen in adipose, skeletal muscle and uterus. Modulation of this gene or expressed protein is useful in the treatment of metabolic disorders, including type II diabetes and obesity.

[1706] BQ. CG94235-01: Thymidylate Kinase.

[1707] Expression of gene CG94235-01 was assessed using the primer-probe sets Ag1980 and Ag3909, described in Tables BQA and BQB. Results of the RTQ-PCR runs are shown in Tables BQC, BQD, BQE, BQF, BQG, BQH, BQI and BQJ.

TABLE BOA
Probe Name Ag1980

| | | | | SEQ |
|---|---|---|---|---|
| | | | Start | ID |
| Primers | Sequences | Length | Position | No |
| Forward | 5′-gggtacgatggctgaagtaaa-3′ | 21 | 1437 | 1461 |
| Probe | TET-5′-ccagttttctgccacacaacatgctt-3′- | 26 | 1394 | 1462 |
| | TAMRA | | | |
| Reverse | 5′-ttatgcagtgttcccaaatttc-3′ | 22 | 1364 | 1463 |

[1708] TABLE BOB
Probe Name Ag3909

| | | | | SEQ |
|---|---|---|---|---|
| | | | Start | ID |
| Primers | Sequences | Length | Position | No |
| Forward | 5′-caggtgccacgtctaactagat-3′ | 22 | 1307 | 1464 |
| Probe | TET-5′-tgttgtttgaaacatctacatccacca-3′- | 27 | 1333 | 1465 |
| | TAMRA | | | |
| Reverse | 5′-gaaatttgggaacactgcataa-3′ | 22 | 1364 | 1466 |

[1709] TABLE BQG
AI.05 chondrosarcoma
Column A - Rel. Exp.(%) Ag1980, Run 306913835

| Tissue Name | A | Tissue Name | A |
|---|---|---|---|
| 138353 PMA (18 hrs) | 0.3 | 138346 IL-1beta + Oncostatin M | 9.9 |
| | | (6 hrs) | |
| 138352 IL-1beta + Oncostatin M | 0.8 | 138345 IL-1beta + TNFa (6 hrs) | 19.2 |
| (18 hrs) | | | |
| 138351 IL-1beta + TNFa (18 hrs) | 100.0 | 138344 IL-1beta (6 hrs) | 7.5 |
| 138350 IL-1beta (18 hrs) | 13.7 | 138348 Untreated-complete medium | 0.1 |
| | | (6 hrs) | |
| 138354 Untreated-complete medium | 0.0 | 138349 Untreated-serum starved | 0.4 |
| (18 hrs) | | (6 hrs) | |
| 138347 PMA (6 hrs) | 0.4 | | |

[1710] TABLE BQD
AI_comprehensive panel_v1.0
Column A - Rel. Exp. (%) Ag1980, Run 211061884
Column B - Rel. Exp. (%) Ag1980, Run 212317511

| Tissue Name | A | B | Tissue Name | A | B |
|---|---|---|---|---|---|
| 110967 COPD-F | 10.1 | 11.6 | 112427 Match Control Psoriasis-F | 100.0 | 100.0 |
| 110980 COPD-F | 12.5 | 16.8 | 112418 Psoriasis-M | 19.1 | 18.7 |
| 110968 COPD-M | 13.9 | 13.5 | 112723 Match Control Psoriasis- | 6.6 | 7.2 |
| | | | M | | |
| 110977 COPD-M | 50.3 | 32.8 | 112419 Psoriasis-M | 35.6 | 17.0 |
| 110989 Emphysema-F | 20.7 | 24.5 | 112424 Match Control Psoriasis- | 7.6 | 10.1 |
| | | | M | | |
| 110992 Emphysema-F | 12.2 | 6.0 | 112420 Psoriasis-M | 54.0 | 53.2 |
| 110993 Emphysema-F | 12.9 | 8.7 | 112425 Match Control Psoriasis- | 62.4 | 72.7 |
| | | | M | | |
| 110994 Emphysema-F | 7.0 | 5.8 | 104689 (MF) OA Bone-Backus | 66.0 | 56.3 |
| 110995 Emphysema-F | 17.0 | 17.6 | 104690 (MF) Adj “Normal” Bone- | 34.6 | 24.0 |
| | | | Backus | | |
| 110996 Emphysema-F | 3.3 | 7.0 | 104691 (MF) OA Synovium- | 36.6 | 40.9 |
| | | | Backus | | |
| 110997 Asthma-M | 8.0 | 3.1 | 104692 (BA) OA Cartilage- | 12.1 | 6.8 |
| | | | Backus | | |
| 111001 Asthma-F | 21.8 | 15.8 | 104694 (BA) OA Bone-Backus | 51.8 | 36.3 |
| 111002 Asthma-F | 24.0 | 13.1 | 104695 (BA) Adj “Normal” Bone- | 26.4 | 19.5 |
| | | | Backus | | |
| 111003 Atopic Asthma-F | 20.3 | 22.5 | 104696 (BA) OA Synovium- | 63.7 | 40.9 |
| | | | Backus | | |
| 111004 Atopic Asthma-F | 26.1 | 28.5 | 104700 (SS) OA Bone-Backus | 20.9 | 62.0 |
| 111005 Atopic Asthma-F | 24.5 | 10.3 | 104701 (SS) Adj “Normal” Bone- | 28.7 | 25.7 |
| | | | Backus | | |
| 111006 Atopic Asthma-F | 11.0 | 8.1 | 104702 (SS) OA Synovium- | 80.1 | 59.5 |
| | | | Backus | | |
| 111417 Allergy-M | 8.7 | 7.7 | 117093 OA Cartilage Rep7 | 17.8 | 20.9 |
| 112347 Allergy-M | 0.0 | 0.0 | 112672 OA Bone5 | 36.6 | 33.9 |
| 112349 Normal Lung-F | 0.0 | 0.0 | 112673 OA Synovium5 | 21.3 | 22.4 |
| 112357 Normal Lung-F | 67.4 | 64.6 | 112674 OA Synovial Fluid cells5 | 20.3 | 20.0 |
| 112354 Normal Lung-M | 9.8 | 15.6 | 117100 OA Cartilage Rep14 | 9.6 | 6.9 |
| 112374 Crohns-F | 11.1 | 15.0 | 112756 OA Bone9 | 95.3 | 66.0 |
| 112389 Match Control | 10.4 | 18.4 | 112757 OA Synovium9 | 17.4 | 19.2 |
| Crohns-F | | | | | |
| 112375 Crohns-F | 14.5 | 9.9 | 112758 OA Synovial Fluid Cells9 | 14.1 | 17.8 |
| 112732 Match Control | 29.3 | 28.5 | 117125 RA Cartilage Rep2 | 19.9 | 22.5 |
| Crohns-F | | | | | |
| 112725 Crohns-M | 5.1 | 3.6 | 113492 Bone2 RA | 76.3 | 66.0 |
| 112387 Match Control | 14.4 | 15.7 | 113493 Synovium2 RA | 20.9 | 19.3 |
| Crohns-M | | | | | |
| 112378 Crohns-M | 0.0 | 0.0 | 113494 Syn Fluid Cells RA | 48.0 | 43.2 |
| 112390 Match Control | 33.7 | 48.6 | 113499 Cartilage4 RA | 40.3 | 49.7 |
| Crohns-M | | | | | |
| 112726 Crohns-M | 25.0 | 19.9 | 113500 Bone4 RA | 63.3 | 50.3 |
| 112731 Match Control | 19.1 | 16.8 | 113501 Synovium4 RA | 44.8 | 36.6 |
| Crohns-M | | | | | |
| 112380 Ulcer Col-F | 14.8 | 15.9 | 113502 Syn Fluid Cells4 RA | 33.7 | 21.5 |
| 112734 Match Control Ulcer | 74.2 | 59.9 | 113495 Cartilage3 RA | 48.3 | 29.3 |
| Col-F | | | | | |
| 112384 Ulcer Col-F | 26.2 | 28.9 | 113496 Bone3 RA | 51.8 | 45.1 |
| 112737 Match Control Ulcer | 8.8 | 4.1 | 113497 Synovium3 RA | 21.9 | 25.3 |
| Col-F | | | | | |
| 112386 Ulcer Col-F | 11.8 | 10.9 | 113498 Syn Fluid Cells3 RA | 44.1 | 47.6 |
| 112738 Match Control Ulcer | 27.0 | 15.0 | 117106 Normal Cartilage Rep20 | 2.0 | 5.3 |
| Col-F | | | | | |
| 112381 Ulcer Col-M | 0.0 | 0.0 | 113663 Bone3 Normal | 0.0 | 0.2 |
| 112735 Match Control Ulcer | 6.3 | 6.5 | 113664 Synovium3 Normal | 0.0 | 0.0 |
| Col-M | | | | | |
| 112382 Ulcer Col-M | 13.5 | 10.8 | 113665 Syn Fluid Cells3 Normal | 0.0 | 0.0 |
| 112394 Match Control Ulcer | 1.6 | 7.7 | 117107 Normal Cartilage Rep22 | 10.6 | 11.8 |
| Col-M | | | | | |
| 112383 Ulcer Col-M | 18.7 | 26.6 | 113667 Bone4 Normal | 10.1 | 8.4 |
| 112736 Match Control Ulcer | 12.9 | 6.7 | 113668 Synovium4 Normal | 10.6 | 8.1 |
| Col-M | | | | | |
| 112423 Psoriasis-F | 20.7 | 18.6 | 113669 Syn Fluid Cells4 Normal | 15.8 | 21.3 |

[1711] TABLE BQE
General_screening_panel_v1.4
Column A - Rel. Exp. (%) Ag3909, Run 217235826
Column B - Rel. Exp. (%) Ag3909, Run 219173644

| Tissue Name | A | B | Tissue Name | A | B |
|---|---|---|---|---|---|
| Adipose | 0.6 | 0.6 | Renal ca. TK-10 | 0.0 | 0.0 |
| Melanoma* Hs688(A).T | 0.0 | 0.0 | Bladder | 9.7 | 11.7 |
| Melanoma* Hs688(B).T | 0.0 | 0.0 | Gastric ca. (liver met.) NCI-N87 | 100.0 | 100.0 |
| Melanoma* M14 | 0.3 | 0.4 | Gastric ca. KATO III | 0.5 | 0.6 |
| Melanoma* LOXIMVI | 0.1 | 0.2 | Colon ca. SW-948 | 0.5 | 0.5 |
| Melanoma* SK-MEL-5 | 0.2 | 0.2 | Colon ca. SW480 | 0.1 | 0.1 |
| Squamous Cell carcinoma | 0.5 | 0.5 | Colon ca.* (SW480 met) SW620 | 0.0 | 0.0 |
| SCC-4 | | | | | |
| Testis Pool | 0.6 | 0.5 | Colon ca. HT29 | 0.1 | 0.1 |
| Prostate ca.* (bone met) PC-3 | 0.1 | 0.1 | Colon ca. HCT-116 | 0.3 | 0.3 |
| Prostate Pool | 0.3 | 0.3 | Colon ca. CaCo-2 | 0.1 | 0.0 |
| Placenta | 0.4 | 0.5 | Colon cancer tissue | 0.6 | 0.5 |
| Uterus Pool | 0.2 | 0.2 | Colon ca. SW1116 | 0.2 | 0.1 |
| Ovarian ca. OVCAR-3 | 0.2 | 0.2 | Colon ca. Colo-205 | 0.0 | 0.0 |
| Ovarian ca. SK-OV-3 | 0.5 | 0.4 | Colon ca. SW-48 | 0.0 | 0.0 |
| Ovarian ca. OVCAR-4 | 0.1 | 0.1 | Colon Pool | 0.4 | 0.5 |
| Ovarian ca. OVCAR-5 | 0.6 | 0.5 | Small Intestine Pool | 0.4 | 0.4 |
| Ovarian ca. IGROV-1 | 0.0 | 0.0 | Stomach Pool | 0.1 | 0.3 |
| Ovarian ca. OVCAR-8 | 0.0 | 0.0 | Bone Marrow Pool | 0.2 | 0.2 |
| Ovary | 0.8 | 0.6 | Fetal Heart | 0.2 | 0.2 |
| Breast ca. MCF-7 | 0.0 | 0.0 | Heart Pool | 0.5 | 0.5 |
| Breast ca. MDA-MB-231 | 0.2 | 0.2 | Lymph Node Pool | 0.4 | 0.4 |
| Breast ca. BT 549 | 2.3 | 3.1 | Fetal Skeletal Muscle | 0.2 | 0.2 |
| Breast ca. T47D | 1.1 | 1.0 | Skeletal Muscle Pool | 1.7 | 1.9 |
| Breast ca. MDA-N | 0.2 | 0.2 | Spleen Pool | 2.3 | 2.6 |
| Breast Pool | 0.3 | 0.4 | Thymus Pool | 0.5 | 0.5 |
| Trachea | 0.9 | 1.0 | CNS cancer (glio/astro) U87-MG | 0.0 | 0.0 |
| Lung | 0.1 | 0.1 | CNS cancer (glio/astro) U-118- | 1.0 | 1.3 |
| | | | MG | | |
| Fetal Lung | 0.9 | 0.9 | CNS cancer (neuro; met) SK-N-AS | 1.2 | 1.5 |
| Lung ca. NCI-N417 | 0.0 | 0.0 | CNS cancer (astro) SF-539 | 0.3 | 0.4 |
| Lung ca. LX-1 | 0.0 | 0.0 | CNS cancer (astro) SNB-75 | 0.1 | 0.1 |
| Lung ca. NCI-H146 | 0.9 | 1.1 | CNS cancer (glio) SNB-19 | 0.0 | 0.0 |
| Lung ca. SHP-77 | 0.5 | 0.5 | CNS cancer (glio) SF-295 | 0.2 | 0.2 |
| Lung ca. A549 | 0.0 | 0.0 | Brain (Amygdala) Pool | 0.6 | 0.5 |
| Lung ca. NCI-H526 | 0.0 | 0.0 | Brain (cerebellum) | 0.1 | 0.2 |
| Lung ca. NCI-H23 | 0.0 | 0.0 | Brain (fetal) | 0.8 | 0.7 |
| Lung ca. NCI-H460 | 0.0 | 0.0 | Brain (Hippocampus) Pool | 0.5 | 0.5 |
| Lung ca. HOP-62 | 0.0 | 0.0 | Cerebral Cortex Pool | 0.7 | 0.7 |
| Lung ca. NCI-H522 | 0.0 | 0.0 | Brain (Substantia nigra) Pool | 0.8 | 0.7 |
| Liver | 0.1 | 0.1 | Brain (Thalamus) Pool | 0.8 | 0.9 |
| Fetal Liver | 4.7 | 4.1 | Brain (whole) | 1.3 | 1.3 |
| Liver ca. HepG2 | 0.0 | 0.0 | Spinal Cord Pool | 0.4 | 0.5 |
| Kidney Pool | 0.7 | 0.8 | Adrenal Gland | 0.7 | 0.8 |
| Fetal Kidney | 0.2 | 0.2 | Pituitary gland Pool | 0.3 | 0.3 |
| Renal ca. 786-0 | 0.0 | 0.0 | Salivary Gland | 0.5 | 0.4 |
| Renal ca. A498 | 0.2 | 0.2 | Thyroid (female) | 0.4 | 0.2 |
| Renal ca. ACHN | 0.0 | 0.0 | Pancreatic ca. CAPAN2 | 0.3 | 0.3 |
| Renal ca. UO-31 | 0.1 | 0.0 | Pancreas Pool | 0.4 | 0.3 |

[1712] TABLE BQF
Panel 1.3D
Column A - Rel. Exp.(%) Ag198O, Run 165534458

| Tissue Name | A | Tissue Name | A |
|---|---|---|---|
| Liver adenocarcinoma | 1.4 | Kidney (fetal) | 0.4 |
| Pancreas | 0.4 | Renal ca. 786-0 | 0.0 |
| Pancreatic ca. CAPAN 2 | 0.0 | Renal ca. A498 | 2.0 |
| Adrenal gland | 0.6 | Renal ca. RXF 393 | 0.7 |
| Thyroid | 0.7 | Renal ca. ACHN | 0.0 |
| Salivary gland | 1.0 | Renal ca. UO-31 | 0.0 |
| Pituitary gland | 0.5 | Renal ca. TK-10 | 0.1 |
| Brain (fetal) | 0.8 | Liver | 0.5 |
| Brain (whole) | 3.8 | Liver (fetal) | 5.3 |
| Brain (amygdala) | 2.9 | Liver ca. (hepatoblast) HepG2 | 0.0 |
| Brain (cerebellum) | 0.6 | Lung | 1.5 |
| Brain (hippocampus) | 3.2 | Lung (fetal) | 2.5 |
| Brain (substantia nigra) | 1.6 | Lung ca. (small cell) LX-1 | 0.0 |
| Brain (thalamus) | 5.1 | Lung ca. (small cell) NCI-H69 | 0.4 |
| Cerebral Cortex | 1.9 | Lung ca. (s.cell var.) SHP-77 | 0.5 |
| Spinal cord | 1.6 | Lung ca. (large cell)NCI-H460 | 0.0 |
| glio/astro U87-MG | 0.0 | Lung ca. (non-sm. cell) A549 | 0.0 |
| glio/astro U-118-MG | 1.8 | Lung ca. (non-s.cell) NCI-H23 | 0.0 |
| astrocytoma SW1783 | 0.0 | Lung ca. (non-s.cell) HOP-62 | 0.0 |
| neuro*; met SK-N-AS | 1.1 | Lung ca. (non-s.cl) NCI-H522 | 0.0 |
| astrocytoma SF-539 | 7.9 | Lung ca. (squam.) SW 900 | 1.5 |
| astrocytoma SNB-75 | 1.7 | Lung ca. (squam.) NCI-H596 | 0.1 |
| glioma SNB-19 | 0.0 | Mammary gland | 0.7 |
| glioma U251 | 0.7 | Breast ca.* (pl.ef) MCF-7 | 0.1 |
| glioma SF-295 | 0.0 | Breast ca.* (pl.ef) MDA-MB-231 | 0.3 |
| Heart (Fetal) | 0.1 | Breast ca.* (pl.ef) T47D | 0.0 |
| Heart | 1.2 | Breast ca. BT-549 | 1.1 |
| Skeletal muscle (Fetal) | 0.0 | Breast ca. MDA-N | 0.0 |
| Skeletal muscle | 1.0 | Ovary | 0.3 |
| Bone marrow | 4.5 | Ovarian ca. OVCAR-3 | 0.1 |
| Thymus | 1.2 | Ovarian ca. OVCAR-4 | 0.1 |
| Spleen | 1.4 | Ovarian ca. OVCAR-5 | 0.3 |
| Lymph node | 2.9 | Ovarian ca. OVCAR-8 | 0.0 |
| Colorectal | 0.3 | Ovarian ca. IGROV-1 | 0.0 |
| Stomach | 1.4 | Ovarian ca. (ascites) SK-OV-3 | 0.4 |
| Small intestine | 1.2 | Uterus | 1.8 |
| Colon ca. SW480 | 0.0 | Placenta | 1.3 |
| Colon ca.* SW620 (SW480 met) | 0.0 | Prostate | 0.3 |
| Colon ca. HT29 | 0.0 | Prostate ca.* (bone met) PC-3 | 0.1 |
| Colon ca. HCT-116 | 0.1 | Testis | 1.2 |
| Colon Ca. CaCo-2 | 0.0 | Melanoma Hs688(A).T | 0.1 |
| CC Well to Mod Diff (ODO3866) | 0.6 | Melanoma* (met) Hs688(B).T | 0.1 |
| Colon Ca. HCC-2998 | 12.0 | Melanoma UACC-62 | 1.0 |
| Gastric ca. (liver met) NCI-N87 | 100.0 | Melanoma M14 | 0.3 |
| Bladder | 8.2 | Melanoma LOX IMVI | 0.1 |
| Trachea | 2.0 | Melanoma* (met) SK-MEL-5 | 0.1 |
| Kidney | 0.4 | Adipose | 0.6 |

[1713] TABLE BQG
Panel 2D
Column A - Rel. Exp.(%) Ag1980, Run 169484147

| Tissue Name | A | Tissue Name | A |
|---|---|---|---|
| Normal Colon | 14.7 | Kidney Margin 8120608 | 1.1 |
| CC Well to Mod Duff (ODO3866) | 3.2 | Kidney Cancer 8120613 | 1.4 |
| CC Margin (ODO3866) | 6.3 | Kidney Margin 8120614 | 1.5 |
| CC Gr.2 rectosigmoid (ODO3868) | 3.5 | Kidney Cancer 9010320 | 6.2 |
| CC Margin (ODO3868) | 3.3 | Kidney Margin 9010321 | 2.6 |
| CC Mod Diff (ODO3920) | 1.3 | Normal Uterus | 1.2 |
| CC Margin (ODO3920) | 1.5 | Uterine Cancer 064011 | 3.4 |
| CC Gr.2 ascend colon (ODO3921) | 3.7 | Normal Thyroid | 4.7 |
| CC Margin (ODO3921) | 1.8 | Thyroid Cancer | 12.1 |
| CC from Partial Hepatectomy | 5.0 | Thyroid Cancer A302152 | 1.6 |
| (ODO4309) Mets | | | |
| Liver Margin (ODO4309) | 16.7 | Thyroid Margin A302153 | 4.4 |
| Colon mets to lung (OD04451-01) | 15.0 | Normal Breast | 4.5 |
| Lung Margin (OD04451-02) | 18.4 | Breast Cancer | 8.1 |
| Normal Prostate 6546-1 | 5.2 | Breast Cancer (OD04590-01) | 11.8 |
| Prostate Cancer (OD04410) | 9.1 | Breast Cancer Mets (OD04590-03) | 7.9 |
| Prostate Margin (OD04410) | 3.1 | Breast Cancer Metastasis | 5.3 |
| Prostate Cancer (OD04720-01) | 3.2 | Breast Cancer | 18.0 |
| Prostate Margin (OD04720-02) | 6.4 | Breast Cancer | 2.7 |
| Normal Lung | 14.8 | Breast Cancer 9100266 | 6.2 |
| Lung Met to Muscle (ODO4286) | 3.4 | Breast Margin 9100265 | 1.9 |
| Muscle Margin (ODO4286) | 2.8 | Breast Cancer A209073 | 6.5 |
| Lung Malignant Cancer (OD03126) | 5.2 | Breast Margin A209073 | 1.5 |
| Lung Margin (OD03126) | 21.5 | Normal Liver | 2.3 |
| Lung Cancer (OD04404) | 53.6 | Liver Cancer | 6.2 |
| Lung Margin (OD04404) | 6.8 | Liver Cancer 1025 | 6.5 |
| Lung Cancer (OD04565) | 6.8 | Liver Cancer 1026 | 2.1 |
| Lung Margin (OD04565) | 3.6 | Liver Cancer 6004-T | 6.0 |
| Lung Cancer (OD04237-01) | 10.1 | Liver Tissue 6004-N | 2.9 |
| Lung Margin (OD04237-02) | 24.5 | Liver Cancer 6005-T | 3.3 |
| Ocular Mel Met to Liver (ODO4310) | 0.2 | Liver Tissue 6005-N | 1.7 |
| Liver Margin (ODO4310) | 3.5 | Normal Bladder | 100.0 |
| Melanoma Metastasis | 1.8 | Bladder Cancer | 0.6 |
| Lung Margin (OD04321) | 10.3 | Bladder Cancer | 6.3 |
| Normal Kidney | 11.4 | Bladder Cancer (OD04718-01) | 74.2 |
| Kidney Ca, Nuclear grade 2 (OD04338) | 5.3 | Bladder Normal Adjacent | 5.1 |
| | | (OD04718-03) | |
| Kidney Margin (OD04338) | 4.2 | Normal Ovary | 3.5 |
| Kidney Ca Nuclear grade ½ (OD04339) | 1.5 | Ovarian Cancer | 11.7 |
| Kidney Margin (OD04339) | 4.6 | Ovarian Cancer (OD04768-07) | 99.3 |
| Kidney Ca, Clear cell type (OD04340) | 11.1 | Ovary Margin (OD04768-08) | 0.9 |
| Kidney Margin (OD04340) | 3.5 | Normal Stomach | 10.7 |
| Kidney Ca, Nuclear grade 3 (OD04348) | 59.9 | Gastric Cancer 9060358 | 3.0 |
| Kidney Margin (OD04348) | 81.2 | Stomach Margin 9060359 | 9.9 |
| Kidney Cancer (OD04622-01) | 6.1 | Gastric Cancer 9060395 | 6.9 |
| Kidney Margin (OD04622-03) | 1.1 | Stomach Margin 9060394 | 7.7 |
| Kidney Cancer (OD04450-01) | 1.5 | Gastric Cancer 9060397 | 7.2 |
| Kidney Margin (OD04450-03) | 1.7 | Stomach Margin 9060396 | 10.4 |
| Kidney Cancer 8120607 | 0.9 | Gastric Cancer 064005 | 19.9 |

[1714] TABLE BQH
Panel 4.1D
Column A - Rel. Exp.(%) Ag3909, Run 170127176

| Tissue Name | A | Tissue Name | A |
|---|---|---|---|
| Secondary Th1 act | 0.9 | HUVEC IL-1beta | 0.1 |
| Secondary Th2 act | 32.3 | HUVEC IFN gamma | 0.9 |
| Secondary Tr1 act | 3.6 | HUVEC TNF alpha + IFN gamma | 10.5 |
| Secondary Th1 rest | 5.5 | HUVEC TNF alpha + IL4 | 0.4 |
| Secondary Th2 rest | 2.0 | HUVEC IL-11 | 0.0 |
| Secondary Tr1 rest | 4.8 | Lung Microvascular EC none | 0.2 |
| Primary Th1 act | 1.3 | Lung Microvascular EC TNFalpha + IL- | 0.6 |
| | | 1beta | |
| Primary Th2 act | 2.0 | Microvascular Dermal EC none | 0.1 |
| Primary Tr1 act | 1.1 | Microsvasular Dermal EC TNFalpha + IL- | 0.4 |
| | | 1beta | |
| Primary Th1 rest | 3.5 | Bronchial epithelium TNFalpha + IL1beta | 0.0 |
| Primary Th2 rest | 0.3 | Small airway epithelium none | 0.0 |
| Primary Tr1 rest | 2.5 | Small airway epithelium TNFalpha + IL- | 0.0 |
| | | 1beta | |
| CD45RA CD4 lymphocyte act | 9.3 | Coronery artery SMC rest | 0.0 |
| CD45RO CD4 lymphocyte act | 12.4 | Coronery artery SMC TNFalpha + IL-1beta | 0.0 |
| CD8 lymphocyte act | 1.2 | Astrocytes rest | 0.0 |
| Secondary CD8 lymphocyte rest | 4.7 | Astrocytes TNFalpha + IL-1beta | 0.5 |
| Secondary CD8 lymphocyte act | 0.7 | KU-812 (Basophil) rest | 1.4 |
| CD4 lymphocyte none | 0.5 | KU-812 (Basophil) PMA/ionomycin | 4.7 |
| 2ry Th1/Th2/Tr1 anti-CD95 | 1.2 | CCD1106 (Keratinocytes) none | 0.4 |
| CH11 | | | |
| LAK cells rest | 2.8 | CCD1106 (Keratinocytes) TNFalpha + IL- | 7.7 |
| | | 1beta | |
| LAK cells IL-2 | 7.5 | Liver cirrhosis | 0.1 |
| LAK cells IL-2 + IL-12 | 7.1 | NCI-H292 none | 0.1 |
| LAK cells IL-2 + IFN gamma | 9.5 | NCI-H292 IL-4 | 0.3 |
| LAK cells IL-2 + IL-18 | 11.7 | NCI-H292 IL-9 | 0.4 |
| LAK cells PMA/ionomycin | 6.9 | NCI-H292 IL-13 | 0.5 |
| NK Cells IL-2 rest | 11.3 | NCI-H292 IFN gamma | 2.0 |
| Two Way MLR 3 day | 14.0 | HPAEC none | 0.0 |
| Two Way MLR 5 day | 5.3 | HPAEC TNF alpha + IL-1 beta | 2.9 |
| Two Way MLR 7 day | 1.7 | Lung fibroblast none | 0.0 |
| PBMC rest | 0.4 | Lung fibroblast TNF alpha + IL-1 beta | 9.5 |
| PBMC PWM | 2.7 | Lung fibroblast IL-4 | 0.0 |
| PBMC PHA-L | 1.1 | Lung fibroblast IL-9 | 0.0 |
| Ramos (B cell) none | 0.0 | Lung fibroblast IL-13 | 0.0 |
| Ramos (B cell) ionomycin | 0.0 | Lung fibroblast IFN gamma | 3.6 |
| B lymphocytes PWM | 0.9 | Dermal fibroblast CCD1070 rest | 0.0 |
| B lymphocytes CD40L and IL-4 | 0.5 | Dermal fibroblast CCD1070 TNF alpha | 1.1 |
| EOL-1 dbcAMP | 0.6 | Dermal fibroblast CCD1070 IL-1 beta | 0.8 |
| EOL-1 dbcAMP | 0.0 | Dermal fibroblast IFN gamma | 6.3 |
| PMA/ionomycin | | | |
| Dendritic cells none | 0.6 | Dermal fibroblast IL-4 | 0.3 |
| Dendritic cells LPS | 20.0 | Dermal Fibroblasts rest | 0.1 |
| Dendritic cells anti-CD40 | 0.3 | Neutrophils TNFa + LPS | 0.1 |
| Monocytes rest | 2.7 | Neutrophils rest | 0.3 |
| Monocytes LPS | 100.0 | Colon | 0.5 |
| Macrophages rest | 0.9 | Lung | 0.9 |
| Macrophages LPS | 36.9 | Thymus | 1.0 |
| HUVEC none | 0.0 | Kidney | 0.4 |
| HUVEC starved | 0.1 | | |

[1715] TABLE BQJ
Panel 5 Islet
Column A - Rel. Exp.(%) Ag3909, Run 242413199

| Tissue Name | A | Tissue Name | A |
|---|---|---|---|
| 97457 Patient-02go adipose | 90.1 | 94709 Donor 2 AM - A adipose | 0.0 |
| 97476 Patient-07sk skeletal muscle | 22.2 | 94710 Donor 2 AM - B adipose | 1.8 |
| 97477 Patient-07ut uterus | 18.2 | 94711 Donor 2 AM - C adipose | 0.0 |
| 97478 Patient-07pl placenta | 53.6 | 94712 Donor 2 AD - A adipose | 1.6 |
| 99167 Bayer Patient 1 | 100.0 | 94713 Donor 2 AD - B adipose | 1.2 |
| 97482 Patient-08ut uterus | 44.8 | 94714 Donor 2 AD - C adipose | 0.0 |
| 97483 Patient-08pl placenta | 74.2 | 94742 Donor 3 U - A Mesenchymal | 3.1 |
| | | Stem Cells | |
| 97486 Patient-09sk skeletal muscle | 9.3 | 94743 Donor 3 U - B Mesenchymal | 3.7 |
| | | Stem Cells | |
| 97487 Patient-09ut uterus | 24.1 | 94730 Donor 3 AM - A adipose | 1.7 |
| 97488 Patient-09pl placenta | 44.1 | 94731 Donor 3 AM - B adipose | 3.6 |
| 97492 Patient-10ut uterus | 47.0 | 94732 Donor 3 AM - C adipose | 0.0 |
| 97493 Patient-10pl placenta | 68.3 | 94733 Donor 3 AD - A adipose | 0.0 |
| 97495 Patient-11go adipose | 17.4 | 94734 Donor 3 AD - B adipose | 0.0 |
| 97496 Patient-11sk skeletal muscle | 22.8 | 94735 Donor 3 AD - C adipose | 0.0 |
| 97497 Patient-11ut uterus | 24.3 | 77138 Liver HepG2untreated | 1.8 |
| 97498 Patient-11pl placenta | 15.4 | 73556 Heart Cardiac stromal cells | 0.0 |
| | | (primary) | |
| 97500 Patient-12go adipose | 62.4 | 81735 Small Intestine | 97.3 |
| 97501 Patient-12sk skeletal muscle | 79.6 | 72409 Kidney Proximal Convoluted | 5.6 |
| | | Tubule | |
| 97502 Patient-12ut uterus | 30.6 | 82685 Small intestine Duodenum | 54.3 |
| 97503 Patient-12pl placenta | 29.7 | 90650 Adrenal Adrenocortical | 10.0 |
| | | adenoma | |
| 94721 Donor 2 U - A Mesenchymal | 0.0 | 72410 Kidney HRCE | 8.3 |
| Stem Cells | | | |
| 94722 Donor 2 U - B Mesenchymal | 0.0 | 72411 Kidney HRE | 28.3 |
| Stem Cells | | | |
| 94723 Donor 2 U - C Mesenchymal | 0.0 | 73139 Uterus Uterine smooth muscle | 0.0 |
| Stem Cells | | cells | |

[1716] AI.05 chondrosarcoma Summary: Ag1980 Highest expression of this gene was detected in the IL-1 beta/TNF-a treated chondrosarcoma cell line (SW1353). Expression of this gene was up-regulated upon IL-1 treatment, a potent activator of pro-inflammatory cytokines and matrix metalloproteinases, which participate in the destruction of cartilage observed in Osteoarthritis (OA). Modulation of the expression of this transcript in chondrocytes by either small molecules, antibody, or protein therapeutics is useful for preventing the degeneration of cartilage observed in OA.

[1717] AI_comprehensive panel_v1.0 Summary: Ag1980 Highest expression was detected in normal tissue adjacent to psoriasis (CTs=30.5-31.2). Expression of this gene was induced in bone tissue, synovial fluid, synovial fluid cells and synovium from arthritis patients (rheumatoid-RA and osteoarthritis-OA), while the expression of this transcript in these samples from normal patients was much lower. Other tissues including skin and lung also expressed this transcript. However, a consistent expression in diseased tissue, as compared to adjacent tissue or normal lung, is not apparent. This may be due to contamination with activated monocytes which highly express this transcript (see panel 4.1D) Modulation of the expression of this transcript in chondrocytes by either small molecules, antibody, or protein therapeutics is useful for treating rheumatoid arthritis and preventing the degeneration of cartilage observed in OA.

[1718] General_screening_panel_v1.4 Summary: Ag3909 Highest expression of the CG94235-01 gene was detected in a gastric cancer cell line (CTs=23.6-24.4). Thus, expression of this gene is useful as a marker of gastric cancer. This gene encodes a putative thymidylate kinase, a DNA synthesis enzyme necessary for cell growth. Therapeutic modulation of this gene, expressed protein and/or use of antibodies or small molecule drugs targeting the gene or gene product are useful in the treatment of gastric cancer.

[1719] Among tissues with metabolic function, this gene was expressed at moderate to low levels in pituitary, adipose, adrenal gland, pancreas, thyroid, and adult and fetal skeletal muscle, heart, and liver. The widespread expression among these tissues indicates that this gene product may play a role in normal neuroendocrine and metabolic disorders. Therapeutic modulation of this gene, expressed protein and/or use of antibodies or small molecule drugs targeting the gene or gene product are useful in the treatment of neuroendocrine disorders or metabolic diseases, such as obesity and diabetes.

[1720] In addition, this gene was expressed at much higher levels in fetal lung, liver and skeletal muscle tissue (CTs=28-30) when compared to expression in the adult counterpart (CTs=32.5-35). Thus, expression of this gene is useful for distinguishing between the fetal and adult source of these tissues.

[1721] This gene was also expressed at moderate to low levels in the CNS, including the hippocampus, thalamus, substantia nigra, amygdala, cerebellum and cerebral cortex. Therapeutic modulation of this gene, expressed protein and/or use of antibodies or small molecule drugs targeting the gene or gene product are useful in the treatment of neurologic disorders, such as Alzheimer's disease, Parkinson's disease, schizophrenia, multiple sclerosis, stroke and epilepsy.

[1722] Panel 1.3D Summary: Ag1980 Highest expression of the CG94235-01 gene in this panel was seen in a gastric cancer cell line (CT=26). Overall, expression was in reasonable agreement with the results in Panel 1.4. Moderate to low levels of expression were seen in metabolic tissues including adipose, adult and fetal liver, skeletal muscle, heart, pituitary, thyroid, adrenal and pituitary. Moderate to low levels of expression were seen in all CNS regions examined.

[1723] In addition, higher levels of expression were seen in fetal liver (CT=30.2) when compared to expression in adult liver (CT=33.7). Thus, expression of this gene is useful for distinguishing between the adult and fetal sources of this tissue.

[1724] Panel 2D Summary: Ag1980 Highest expression of the CG94235-01 gene was seen in normal bladder (CT=27.3). In addition, higher levels of expression were seen in ovarian, bladder and lung cancers when compared to expression in normal adjacent tissue. Thus, expression of this gene is useful as a marker of these cancers. Therapeutic modulation of this gene, expressed protein and/or use of antibodies or small molecule drugs targeting the gene or gene product are useful in the treatment of ovarian, bladder and lung cancers.

[1725] Panel 4.1D Summary: Ag3909 Highest expression of the CG94235-01 gene was seen in LPS treated monocytes (CT=25.4). Prominent levels of expression were also seen in LPS activated macrophages and dendritic cells. This transcript encodes a protein that may be important in the normal regulation of cytokines. Inappropriate regulation of the protein encoded by this gene may result in the enhanced and uncontrolled expression of inflammatory cytokines. Therapeutic modulation of this gene, expressed protein and/or use of antibodies or small molecule drugs targeting the gene or gene product are useful in the treatment of osteoarthritis and rheumatoid arthritis.

[1726] Panel 5 Islet Summary: Ag3909 Highest expression of the CG94235-01 gene was seen in islet cells (CT=33.4). Low but significant levels of expression were seen in other metabolic tissues, including adipose, placenta and skeletal muscle. Please see Panel 1.4 for discussion of this gene in metabolic disease.

[1727] BR. CG95175-01: Ephrin Type-A Receptor 7 Precursor.

[1728] Expression of gene CG95175-01 was assessed using the primer-probe sets Ag3992 and Ag612, described in Tables BRA and BRB. Results of the RTQ-PCR runs are shown in Tables BRC, BRD, BRE and BRF.

TABLE BRA
Probe Name Ag3992

| | | | | SEQ |
|---|---|---|---|---|
| | | | Start | ID |
| Primers | Sequences | Length | Position | No |
| Forward | 5′-accactatggtgaggctacaga-3′ | 22 | 2427 | 1467 |
| Probe | TET-5′-ctatgggccgctcccgagacact-3′- | 23 | 2466 | 1468 |
| | TAMRA | | | |
| Reverse | 5′-agagctgaagtggccaaact-3′ | 20 | 2491 | 1469 |

[1729] TABLE BRB
Probe Name Ag612

| | | | | SEQ |
|---|---|---|---|---|
| | | | Start | ID |
| Primers | Sequences | Length | Position | No |
| Forward | 5′-gccgctcccgagacactt-3′ | 18 | 2472 | 1470 |
| Probe | TET-5′-ccacttcagctctgccagtgacgtg-3′ | 25 | 2498 | 1471 |
| | TAMRA | | | |
| Reverse | 5′-cccacatgatgatgccgaa-3′ | 19 | 2529 | 1472 |

[1730] TABLE BRC
CNS_neurodegeneration_v1.0
Column A - Rel. Exp.(%) Ag612, Run 309606071

| Tissue Name | A |
|---|---|
| AD 1 Hippo | 46.0 |
| AD 2 Hippo | 37.1 |
| AD 3 Hippo | 9.5 |
| AD 4 Hippo | 33.9 |
| AD 5 Hippo | 59.5 |
| AD 6 Hippo | 41.8 |
| Control 2 Hippo | 40.9 |
| Control 4 Hippo | 21.6 |
| Control (Path) 3 Hippo | 15.9 |
| AD 1 Temporal Ctx | 26.1 |
| AD 2 Temporal Ctx | 28.9 |
| AD 3 Temporal Ctx | 12.3 |
| AD 4 Temporal Ctx | 62.9 |
| AD 5 Inf Temporal Ctx | 57.4 |
| AD 5 Sup Temporal Ctx | 33.7 |
| AD 6 Inf Temporal Ctx | 50.7 |
| AD 6 Sup Temporal Ctx | 68.8 |
| Control 1 Temporal Ctx | 9.7 |
| Control 2 Temporal Ctx | 54.7 |
| Control 3 Temporal Ctx | 40.3 |
| Control 3 Temporal Ctx | 43.2 |
| AH3 3975 | 97.3 |
| AH3 3954 | 86.5 |
| AH3 4624 | 31.0 |
| AH3 4640 | 100.0 |
| AD 1 Occipital Ctx | 11.0 |
| AD 2 Occipital Ctx (Missing) | 6.8 |
| AD 3 Occipital Ctx | 8.3 |
| AD 4 Occipital Ctx | 35.6 |
| AD 5 Occipital Ctx | 43.5 |
| AD 5 Occipital Ctx | 21.5 |
| Control 1 Occipital Ctx | 8.2 |
| Control 2 Occipital Ctx | 36.6 |
| Control 3 Occipital Ctx | 29.5 |
| Control 4 Occipital Ctx | 20.3 |
| Control (Path) 1 Occipital Ctx | 81.2 |
| Control (Path) 2 Occipital Ctx | 37.4 |
| Control (Path) 3 Occipital Ctx | 17.8 |
| Control (Path) 4 Occipital Ctx | 29.9 |
| Control 1 Parietal Ctx | 37.6 |
| Control 2 Parietal Ctx | 41.5 |
| Control 3 Parietal Ctx | 54.0 |
| Control (Path) 1 Parietal Ctx | 99.3 |
| Control (Path) 2 Parietal Ctx | 52.9 |
| Control (Path) 3 Parietal Ctx | 11.6 |
| Control (Path) 4 Parietal Ctx | 56.6 |

[1731] TABLE BRE
Panel 1.3D
Column A - Rel. Exp.(%) Ag612, Run 165720641

| Tissue Name | A | Tissue Name | A |
|---|---|---|---|
| Liver adenocarcinoma | 8.0 | Kidney (fetal) | 0.0 |
| Pancreas | 2.8 | Renal ca. 786-0 | 0.0 |
| Pancreatic ca. CAPAN 2 | 0.7 | Renal ca. A498 | 0.0 |
| Adrenal gland | 0.0 | Renal ca. RXF 393 | 1.7 |
| Thyroid | 0.0 | Renal ca. ACHN | 5.9 |
| Salivary gland | 4.0 | Renal ca. UO-31 | 0.0 |
| Pituitary gland | 16.0 | Renal ca. TK-10 | 6.7 |
| Brain (fetal) | 67.8 | Liver | 0.0 |
| Brain (whole) | 17.9 | Liver (fetal) | 0.0 |
| Brain (amygdala) | 32.5 | Liver ca. (hepatoblast) HepG2 | 0.0 |
| Brain (cerebellum) | 7.6 | Lung | 0.0 |
| Brain (hippocampus) | 41.2 | Lung (fetal) | 0.0 |
| Brain (substantia nigra) | 10.5 | Lung ca. (small cell) LX-1 | 1.6 |
| Brain (thalamus) | 22.1 | Lung ca. (small cell) NCI-H69 | 0.6 |
| Cerebral Cortex | 27.7 | Lung ca. (s. cell var.) SHP-77 | 4.6 |
| Spinal cord | 5.9 | Lung ca. (large cell)NCI-H460 | 2.4 |
| glio/astro U87-MG | 0.0 | Lung ca. (non-sm. cell) A549 | 0.0 |
| glio/astro U-118-MG | 0.0 | Lung ca. (non-s. cell) NCI-H23 | 5.2 |
| astrocytoma SW1783 | 0.0 | Lung ca. (non-s. cell) HOP-62 | 0.0 |
| neuro*; met SK-N-AS | 0.6 | Lung ca. (non-s. cl) NCI-H522 | 10.7 |
| astrocytoma SF-539 | 0.0 | Lung ca. (squam.) SW 900 | 6.9 |
| astrocytoma SNB-75 | 13.7 | Lung ca. (squam.) NCI-H596 | 0.0 |
| glioma SNB-19 | 0.0 | Mammary gland | 4.2 |
| glioma U251 | 0.0 | Breast ca.* (pl. ef) MCF-7 | 7.9 |
| glioma SF-295 | 0.0 | Breast ca.* (pl. ef) MDA-MB-231 | 0.6 |
| Heart (Fetal) | 0.0 | Breast ca.* (pl. ef) T47D | 1.9 |
| Heart | 0.7 | Breast ca. BT-549 | 0.0 |
| Skeletal muscle (Fetal) | 0.0 | Breast ca. MDA-N | 0.0 |
| Skeletal muscle | 0.0 | Ovary | 0.7 |
| Bone marrow | 0.0 | Ovarian ca. OVCAR-3 | 7.1 |
| Thymus | 0.1 | Ovarian ca. OVCAR-4 | 0.1 |
| Spleen | 1.3 | Ovarian ca. OVCAR-5 | 2.7 |
| Lymph node | 0.9 | Ovarian ca. OVCAR-8 | 3.5 |
| Colorectal | 24.3 | Ovarian ca. IGROV-1 | 0.0 |
| Stomach | 9.5 | Ovarian ca. (ascites) SK-OV-3 | 12.4 |
| Small intestine | 11.3 | Uterus | 0.0 |
| Colon ca. SW480 | 3.7 | Placenta | 0.0 |
| Colon ca.* SW620 (SW480 met) | 1.8 | Prostate | 4.2 |
| Colon ca. HT29 | 0.0 | Prostate ca.* (bone met) PC-3 | 2.9 |
| Colon ca. HCT-116 | 0.8 | Testis | 100.0 |
| Colon Ca. CaCo-2 | 1.7 | Melanoma Hs688(A).T | 0.0 |
| CC Well to Mod Diff (ODO3866) | 8.7 | Melanoma* (met) Hs688(B).T | 0.0 |
| Colon ca. HCC-2998 | 9.6 | Melanoma UACC-62 | 0.0 |
| Gastric ca. (liver met) NCI-N87 | 15.1 | Melanoma M14 | 0.0 |
| Bladder | 3.3 | Melanoma LOX IMVI | 0.0 |
| Trachea | 3.8 | Melanoma* (met) SK-MEL-5 | 0.7 |
| Kidney | 0.0 | Adipose | 0.6 |

[1732] TABLE BRF
Panel 4D
Column A - Rel. Exp.(%) Ag612, Run 145645058

| Tissue Name | A | Tissue Name | A |
|---|---|---|---|
| Secondary Th1 act | 0.0 | HUVEC IL-1beta | 0.0 |
| Secondary Th2 act | 12.2 | HUVEC IFN gamma | 0.0 |
| Secondary Tr1 act | 0.0 | HUVEC TNF alpha + IFN gamma | 0.0 |
| Secondary Th1 rest | 0.0 | HUVEC TNF alpha + IL4 | 0.0 |
| Secondary Th2 rest | 0.0 | HUVEC IL-11 | 0.0 |
| Secondary Tr1 rest | 0.0 | Lung Microvascular EC none | 0.0 |
| Primary Th1 act | 0.0 | Lung Microvascular EC TNFalpha + IL- | 0.0 |
| | | 1beta | |
| Primary Th2 act | 0.0 | Microvascular Dermal EC none | 0.0 |
| Primary Tr1 act | 0.0 | Microsvasular Dermal EC TNFalpha + IL- | 0.0 |
| | | 1beta | |
| Primary Th1 rest | 0.0 | Bronchial epithelium TNFalpha + IL1beta | 0.0 |
| Primary Th2 rest | 0.0 | Small airway epithelium none | 0.0 |
| Primary Tn rest | 0.0 | Small airway epithelium TNFalpha + IL- | 4.6 |
| | | 1beta | |
| CD45RA CD4 lymphocyte act | 0.0 | Coronery artery SMC rest | 0.0 |
| CD45RO CD4 lymphocyte act | 4.6 | Coronery artery SMC TNFalpha + IL-1beta | 0.0 |
| CD8 lymphocyte act | 5.3 | Astrocytes rest | 0.0 |
| Secondary CD8 lymphocyte rest | 5.3 | Astrocytes TNFalpha + IL-1beta | 0.0 |
| Secondary CD8 lymphocyte act | 0.0 | KU-812 (Basophil) rest | 0.0 |
| CD4 lymphocyte none | 0.0 | KU-812 (Basophil) PMA/ionomycin | 0.0 |
| 2ry Th1/Th2/Tr1 anti-CD95 | 0.0 | CCD1106 (Keratinocytes) none | 0.0 |
| CH11 | | | |
| LAK cells rest | 9.7 | CCD1106 (Keratinocytes) TNFalpha + IL- | 1.0 |
| | | 1beta | |
| LAK cells IL-2 | 0.0 | Liver cirrhosis | 61.6 |
| LAK cells IL-2 + IL-12 | 0.0 | Lupus kidney | 0.0 |
| LAK cells IL-2 + IFN gamma | 5.1 | NCI-H292 none | 32.5 |
| LAK cells IL-2 + IL-18 | 0.0 | NCI-H292 IL-4 | 46.7 |
| LAK cells PMA/ionomycin | 0.0 | NCI-H292 IL-9 | 58.6 |
| NK Cells IL-2 rest | 0.0 | NCI-H292 IL-13 | 89.5 |
| Two Way MLR 3 day | 0.0 | NCI-H292 IFN gamma | 100.0 |
| Two Way MLR 5 day | 0.0 | HPAEC none | 0.0 |
| Two Way MLR 7 day | 0.0 | HPAEC TNF alpha + IL-1 beta | 0.0 |
| PBMC rest | 0.0 | Lung fibroblast none | 0.0 |
| PBMC PWM | 0.0 | Lung fibroblast TNF alpha + IL-1 beta | 0.0 |
| PBMC PHA-L | 8.9 | Lung fibroblast IL-4 | 0.0 |
| Ramos (B cell) none | 0.0 | Lung fibroblast IL-9 | 0.0 |
| Ramos (B cell) ionomycin | 0.0 | Lung fibroblast IL-13 | 9.0 |
| B lymphocytes PWM | 8.5 | Lung fibroblast IFN gamma | 0.0 |
| B lymphocytes CD40L and IL-4 | 0.0 | Dermal fibroblast CCD1070 rest | 0.0 |
| EOL-1 dbcAMP | 0.0 | Dermal fibroblast CCD1070 TNF alpha | 0.0 |
| EOL-1 dbcAMP | 0.0 | Dermal fibroblast CCD1070 IL-1 beta | 0.0 |
| PMA/ionomycin | | | |
| Dendritic cells none | 5.3 | Dermal fibroblast IFN gamma | 0.0 |
| Dendritic cells LPS | 4.5 | Dermal fibroblast IL-4 | 0.0 |
| Dendritic cells anti-CD40 | 0.0 | IBD Colitis 2 | 10.7 |
| Monocytes rest | 0.0 | IBD Crohn's | 0.0 |
| Monocytes LPS | 1.2 | Colon | 51.8 |
| Macrophages rest | 0.0 | Lung | 24.7 |
| Macrophages LPS | 0.0 | Thymus | 4.1 |
| HUVEC none | 0.0 | Kidney | 4.6 |
| HUVEC starved | 0.0 | | |

[1733] CNS_neurodegeneration_v1.0 Summary: Ag612 This gene was found to be down-regulated in the temporal cortex of Alzheimer's disease patients. Therapeutic modulation of this gene, expressed protein and/or use of antibodies or small molecule drugs targeting the gene or gene product are useful in the treatment of dementia/memory loss associated with this disease and neuronal death.

[1734] Panel 1.3D Summary: Ag612 Highest expression of the CG95175-01 gene was detected in testis (CT=29). In addition, high expression of this gene was also detected in all the region of the central nervous system examined, and in a cluster of lung cancer, colon cancer, renal cancer, a liver cancer, breast cancer, ovarian cancer and an astrocytoma cell lines, pancreas, pituitary gland, and the gastrointestinal tract. Therapeutic modulation of this gene, expressed protein and/or use of antibodies or small molecule drugs targeting the gene or gene product are useful in the treatment of diseases of the central nervous system including Alzheimer's disease.

[1735] Panel 4D Summary: Ag612 Highest expression of this gene was detected in IFN gama treated NCI-H292 cells (CT=33). Moderate to low expression of this gene was also seen in cytokine treated and untreated NCI-H292 cells, liver cirrhosis and colon tissue samples. Therapeutic modulation of this gene, expressed protein and/or use of antibodies or small molecule drugs targeting the gene or gene product are useful in the treatment of chronic obstructive pulmonary disease, asthma, allergy, and emphysema, liver cirrhosis, autoimmune and inflammatory disease affecting colon including Crohn's disease and ulcerative colitis.

[1736] BS. CG9963801: Sodium/Nucleoside Cotransporter 1.

[1737] Expression of gene CG99638-01 was assessed using the primer-probe set Ag1521, described in Table BSA. Results of the RTQ-PCR runs are shown in Tables BSB, BSC and BSD.

TABLE BSA
Probe Name Ag1521

| | | | | SEQ |
|---|---|---|---|---|
| | | | Start | ID |
| Primers | Sequences | Length | Position | No |
| Forward | 5′-tggttttcttcagcactgtgat-3′ | 22 | 889 | 1473 |
| Probe | TET-5′-catgctgtactaccctggactgatgca-3′- | 27 | 914 | 1474 |
| | TAMRA | | | |
| Reverse | 5′-catgatccatccaacctttcta-3′ | 22 | 950 | 1475 |

[1738] TABLE BSB
Panel 1.3D
Column A - Rel. Exp.(%) Ag1521, Run 165544920

| Tissue Name | A | Tissue Name | A |
|---|---|---|---|
| Liver adenocarcinoma | 0.0 | Kidney (fetal) | 2.6 |
| Pancreas | 29.3 | Renal ca. 786-0 | 0.0 |
| Pancreatic ca. CAPAN 2 | 0.0 | Renal ca. A498 | 0.0 |
| Adrenal gland | 0.0 | Renal ca. RXF 393 | 0.0 |
| Thyroid | 0.0 | Renal ca. ACHN | 0.0 |
| Salivary gland | 1.6 | Renal ca. UO-31 | 0.9 |
| Pituitary gland | 1.9 | Renal ca. TK-10 | 0.0 |
| Brain (fetal) | 0.0 | Liver | 0.0 |
| Brain (whole) | 1.2 | Liver (fetal) | 1.6 |
| Brain (amygdala) | 0.0 | Liver ca. (hepatoblast) HepG2 | 0.0 |
| Brain (cerebellum) | 0.0 | Lung | 0.6 |
| Brain (hippocampus) | 3.1 | Lung (fetal) | 3.3 |
| Brain (substantia nigra) | 0.0 | Lung ca. (small cell) LX-1 | 0.0 |
| Brain (thalamus) | 1.8 | Lung ca. (small cell) NCI-H69 | 0.0 |
| Cerebral Cortex | 0.0 | Lung ca. (s. cell var.) SHP-77 | 0.0 |
| Spinal cord | 0.7 | Lung ca. (large cell)NCI-H460 | 0.0 |
| glio/astro U87-MG | 0.0 | Lung ca. (non-sm. cell) A549 | 0.0 |
| glio/astro U-118-MG | 4.2 | Lung ca. (non-s. cell) NCI-H23 | 0.0 |
| astrocytoma SW1783 | 4.9 | Lung ca. (non-s. cell) HOP-62 | 0.0 |
| neuro*; met SK-N-AS | 0.0 | Lung ca. (non-s. cl) NCI-H522 | 0.0 |
| astrocytoma SF-539 | 0.3 | Lung ca. (squam.) SW 900 | 0.0 |
| astrocytoma SNB-75 | 0.0 | Lung ca. (squam.) NCI-H596 | 0.0 |
| glioma SNB-19 | 0.0 | Mammary gland | 7.8 |
| glioma U251 | 0.0 | Breast ca.* (pl. ef) MCF-7 | 0.6 |
| glioma SF-295 | 3.3 | Breast ca.* (pl. ef) MDA-MB-231 | 1.1 |
| Heart (Fetal) | 0.0 | Breast ca.* (pl. ef) T47D | 0.0 |
| Heart | 0.0 | Breast ca. BT-549 | 0.0 |
| Skeletal muscle (Fetal) | 0.0 | Breast ca. MDA-N | 0.0 |
| Skeletal muscle | 0.0 | Ovary | 0.0 |
| Bone marrow | 100.0 | Ovarian ca. OVCAR-3 | 3.1 |
| Thymus | 0.7 | Ovarian ca. OVCAR-4 | 2.8 |
| Spleen | 1.4 | Ovarian ca. OVCAR-5 | 2.1 |
| Lymph node | 2.9 | Ovarian ca. OVCAR-8 | 0.0 |
| Colorectal | 5.3 | Ovarian ca. IGROV-l | 0.0 |
| Stomach | 5.3 | Ovarian ca. (ascites) SK-OV-3 | 0.6 |
| Small intestine | 4.6 | Uterus | 1.8 |
| Colon ca. SW480 | 0.0 | Placenta | 0.0 |
| Colon ca.* SW620 (SW480 met) | 0.0 | Prostate | 0.4 |
| Colon ca. HT29 | 5.4 | Prostate ca.* (bone met) PC-3 | 0.0 |
| Colon ca. HCT-116 | 0.0 | Testis | 2.0 |
| Colon ca. CaCo-2 | 0.5 | Melanoma Hs688(A).T | 0.0 |
| CC Well to Mod Diff (ODO3866) | 13.9 | Melanoma* (met) Hs688(B).T | 0.0 |
| Colon ca. HCC-2998 | 0.0 | Melanoma UACC-62 | 0.0 |
| Gastric ca. (liver met) NCI-N87 | 2.2 | Melanoma M14 | 0.0 |
| Bladder | 36.3 | Melanoma LOX IMVI | 0.0 |
| Trachea | 22.5 | Melanoma* (met) SK-MEL-5 | 0.0 |
| Kidney | 0.0 | Adipose | 14.5 |

[1739] TABLE BSC
Panel 2.2
Column A - Rel. Exp.(%) Ag1521, Run 173816642

| Tissue Name | A | Tissue Name | A |
|---|---|---|---|
| Normal Colon | 3.2 | Kidney Margin (OD04348) | 1.0 |
| Colon cancer (OD06064) | 9.9 | Kidney malignant cancer | 1.3 |
| | | (OD06204B) | |
| Colon Margin (OD06064) | 2.6 | Kidney normal adjacent tissue | 0.0 |
| | | (OD06204E) | |
| Colon cancer (OD06159) | 0.0 | Kidney Cancer (OD04450-01) | 0.0 |
| Colon Margin (OD06159) | 1.9 | Kidney Margin (OD04450-03) | 0.0 |
| Colon cancer (OD06297-04) | 1.1 | Kidney Cancer 8120613 | 0.0 |
| Colon Margin (OD06297-05) | 2.3 | Kidney Margin 8120614 | 0.0 |
| CC Gr.2 ascend colon (ODO3921) | 0.0 | Kidney Cancer 9010320 | 0.0 |
| CC Margin (ODO3921) | 1.7 | Kidney Margin 9010321 | 2.8 |
| Colon cancer metastasis (OD06104) | 9.5 | Kidney Cancer 8120607 | 0.0 |
| Lung Margin (OD06104) | 6.0 | Kidney Margin 8120608 | 0.0 |
| Colon mets to lung (OD04451-01) | 13.1 | Normal Uterus | 0.0 |
| Lung Margin (OD04451-02) | 3.0 | Uterine Cancer 064011 | 9.7 |
| Normal Prostate | 2.2 | Normal Thyroid | 0.0 |
| Prostate Cancer (OD04410) | 0.0 | Thyroid Cancer | 0.0 |
| Prostate Margin (OD04410) | 0.0 | Thyroid Cancer A302152 | 10.7 |
| Normal Ovary | 0.0 | Thyroid Margin A302153 | 0.0 |
| Ovarian cancer (OD06283-03) | 6.7 | Normal Breast | 100.0 |
| Ovarian Margin (OD06283-07) | 6.0 | Breast Cancer | 0.0 |
| Ovarian Cancer | 1.8 | Breast Cancer | 9.3 |
| Ovarian cancer (OD06145) | 6.9 | Breast Cancer (OD04590-01) | 1.3 |
| Ovarian Margin (OD06145) | 16.4 | Breast Cancer Mets (OD04590-03) | 0.0 |
| Ovarian cancer (OD06455-03) | 6.7 | Breast Cancer Metastasis | 1.4 |
| Ovarian Margin (0D06455-07) | 0.0 | Breast Cancer | 1.6 |
| Normal Lung | 0.0 | Breast Cancer 9100266 | 0.0 |
| Invasive poor diff. lung adeno | 13.9 | Breast Margin 9100265 | 6.9 |
| (ODO4945-01 | | | |
| Lung Margin (ODO4945-03) | 6.0 | Breast Cancer A209073 | 0.0 |
| Lung Malignant Cancer (OD03126) | 5.3 | Breast Margin A209073 | 22.4 |
| Lung Margin (OD03126) | 1.5 | Breast cancer (OD06083) | 20.6 |
| Lung Cancer (OD05014A) | 20.7 | Breast cancer node metastasis | 1.1 |
| | | (OD06083) | |
| Lung Margin (OD05014B) | 12.1 | Normal Liver | 1.5 |
| Lung cancer (OD06081) | 0.0 | Liver Cancer 1026 | 0.0 |
| Lung Margin (OD06081) | 1.4 | Liver Cancer 1025 | 0.0 |
| Lung Cancer (OD04237-01) | 1.8 | Liver Cancer 6004-T | 0.0 |
| Lung Margin (OD04237-02) | 3.6 | Liver Tissue 6004-N | 0.0 |
| Ocular Mel Met to Liver (ODO4310) | 0.0 | Liver Cancer 6005-T | 2.5 |
| Liver Margin (ODO4310) | 0.0 | Liver Tissue 6005-N | 3.1 |
| Melanoma Metastasis | 0.0 | Liver Cancer | 0.0 |
| Lung Margin (OD04321) | 0.0 | Normal Bladder | 15.2 |
| Normal Kidney | 0.0 | Bladder Cancer | 1.6 |
| Kidney Ca, Nuclear grade 2 | 0.0 | Bladder Cancer | 8.2 |
| (OD04338) | | | |
| Kidney Margin (OD04338) | 0.0 | Normal Stomach | 3.3 |
| Kidney Ca Nuclear grade 1/2 | 3.8 | Gastric Cancer 9060397 | 1.7 |
| (OD04339) | | | |
| Kidney Margin (OD04339) | 0.0 | Stomach Margin 9060396 | 0.0 |
| Kidney Ca, Clear cell type (OD04340) | 0.0 | Gastric Cancer 9060395 | 0.0 |
| Kidney Margin (OD04340) | 0.0 | Stomach Margin 9060394 | 8.2 |
| Kidney Ca, Nuclear grade 3 | 0.0 | Gastric Cancer 064005 | 0.0 |
| (OD04348) | | | |

[1740] TABLE BSD
Panel 4D
Column A - Rel. Exp.(%) Ag1521, Run 165725922

| Tissue Name | A | Tissue Name | A |
|---|---|---|---|
| Secondary Th1 act | 0.4 | HUVEC IL-1beta | 0.0 |
| Secondary Th2 act | 0.1 | HUVEC IFN gamma | 0.0 |
| Secondary Tr1 act | 0.1 | HUVEC TNF alpha + IFN gamma | 0.0 |
| Secondary Th1 rest | 0.2 | HUVEC TNF alpha + IL4 | 0.0 |
| Secondary Th2 rest | 0.0 | HUVEC IL-11 | 0.0 |
| Secondary Tr1 rest | 0.0 | Lung Microvascular EC none | 0.0 |
| Primary Th1 act | 0.4 | Lung Microvascular EC TNFalpha + IL- | 0.1 |
| | | 1beta | |
| Primary Th2 act | 0.1 | Microvascular Dermal EC none | 0.0 |
| Primary Tr1 act | 0.4 | Microsvasular Dermal EC TNFalpha + IL- | 0.0 |
| | | 1beta | |
| Primary Th1 rest | 2.5 | Bronchial epithelium TNFalpha + IL1beta | 2.6 |
| Primary Th2 rest | 0.6 | Small airway epithelium none | 1.1 |
| Primary Tr1 rest | 0.2 | Small airway epithelium TNFalpha + IL- | 15.1 |
| | | 1beta | |
| CD45RA CD4 lymphocyte act | 0.9 | Coronery artery SMC rest | 0.2 |
| CD45RO CD4 lymphocyte act | 0.6 | Coronery artery SMG TNFalpha + IL-1beta | 0.2 |
| CD8 lymphocyte act | 1.0 | Astrocytes rest | 0.6 |
| Secondary CD8 lymphocyte rest | 0.0 | Astrocytes TNFalpha + IL-1beta | 2.3 |
| Secondary CD8 lymphocyte act | 0.8 | KU-812 (Basophil) rest | 0.0 |
| CD4 lymphocyte none | 0.0 | KU-812 (Basophil) PMA/ionomycin | 0.1 |
| 2ry Th1/Th2/Tr1 anti-CD95 | 1.0 | CCD1106 (Keratinocytes) none | 0.2 |
| CH11 | | | |
| LAK cells rest | 5.4 | CCD1106 (Keratinocytes) TNFalpha + IL- | 16.3 |
| | | 1beta | |
| LAK cells IL-2 | 0.2 | Liver cirrhosis | 4.2 |
| LAK cells IL-2 + IL-12 | 1.3 | Lupus kidney | 0.2 |
| LAK cells IL-2 + IFN gamma | 3.6 | NCI-H292 none | 1.1 |
| LAK cells IL-2 + IL-18 | 0.7 | NCI-H292 IL-4 | 3.8 |
| LAK cells PMA/ionomycin | 5.5 | NCI-H292 IL-9 | 0.6 |
| NK Cells IL-2 rest | 0.0 | NCI-H292 IL-13 | 1.7 |
| Two Way MLR 3 day | 0.7 | NCI-H292 IFN gamma | 0.3 |
| Two Way MLR 5 day | 2.4 | HPAEC none | 0.0 |
| Two Way MIR 7 day | 2.4 | HPAEC TNF alpha + IL-1 beta | 0.0 |
| PBMC rest | 0.2 | Lung fibroblast none | 0.4 |
| PBMC PWM | 0.3 | Lung fibroblast TNF alpha + IL-1 beta | 0.1 |
| PBMC PHA-L | 0.1 | Lung fibroblast IL-4 | 0.3 |
| Ramos (B cell) none | 0.0 | Lung fibroblast IL-9 | 0.6 |
| Ramos (B cell) ionomycin | 0.0 | Lung fibroblast IL-13 | 0.2 |
| B lymphocytes PWM | 0.5 | Lung fibroblast IFN gamma | 0.5 |
| B lymphocytes CD40L and IL-4 | 0.1 | Dermal fibroblast CCD1070 rest | 0.7 |
| EOL-1 dbcAMP | 0.0 | Dermal fibroblast CCD1070 TNF alpha | 4.4 |
| EOL-1 dbcAMP | 0.0 | Dermal fibroblast CCD1070 IL-1 beta | 0.4 |
| PMA/ionomycin | | | |
| Dendritic cells none | 35.6 | Dermal fibroblast IFN gamma | 0.5 |
| Dendritic cells LPS | 8.4 | Dermal fibroblast IL-4 | 0.4 |
| Dendritic cells anti-CD40 | 19.3 | IBD Colitis 2 | 0.0 |
| Monocytes rest | 0.8 | IBD Crohn's | 0.7 |
| Monocytes LPS | 0.2 | Colon | 5.8 |
| Macrophages rest | 100.0 | Lung | 0.1 |
| Macrophages LPS | 20.9 | Thymus | 0.0 |
| HUVEC none | 0.0 | Kidney | 0.6 |
| HUVEC starved | 0.0 | | |

[1741] Panel 1.3D Summary: Ag1521 Highest expression of this gene was detected in the bone marrow (CT=30.5). Moderate to low expression was also detected in other normal tissues, including pancreas, adipose, bladder and trachea. Therapeutic modulation of this gene, expressed protein and/or use of antibodies or small molecule drugs targeting the gene or gene product are useful in the treatment of diseases of the bone marrow, pancreas, adipose, bladder and trachea.

[1742] Panel 2.2 Summary: Ag1521 Prominent expression was detected in the breast (CT=33), but not in malignant breast samples. Expression of this gene or its protein product was useful as a marker of this tissue pancreas, adipose, bladder and trachea breast cancer.

[1743] Panel 4D Summary: AG1521 Highest expression was detected in resting macrophages (CT=27). Prominent expression was also detected in a cluster of treated and untreated dendritic cells. The protein encoded by this gene was down regulated in macrophages after LPS stimulation. This gene product responds to inflammatory stimuli and becomes down regulated after 12-24 hr exposure. Therapeutic modulation of this gene, expressed protein and/or use of antibodies or small molecule drugs targeting the gene or gene product are useful in the treatment of inflammation in diseases such as asthma, IBD, psoriasis, arthritis and allergy. Agonistic (ligand-like) therapeutics designed with this protein product are useful for stimulating the immune response and improving the efficacy of vaccines and antiviral or antibacterial treatments. Therapeutic modulation of this gene, expressed protein and/or use of antibodies or small molecule drugs targeting the gene or gene product are useful in immune modulation, organ/bone marrow transplantation, and the treatment of diseases where antigen presentation, a function of mature dendritic cells, plays an important role such as asthma, rheumatoid arthritis, IBD, and psoriasis.

### Example D

### CG5580604, NOV47a

[1744] Coagulation Factor IX is one of the many proteins involved in the cascade of reactions leading to blood coagulation. This protein exists as a zymogen which is processed by either factor VIIa or factor XIa to yield the activated version, IXa which then binds with factor VIIIa to convert factor X to its active form (factor Xa). Factor IXa exists as a complex of a disulfide-linked heavy and light chain with removal of the activation peptide. The heavy chain contains a serine protease domain which is used to activate factor X. The enzymatic activity of IXa by itself is very low, but the catalytic efficiency is increased by about 7 orders of magnitude higher when bound to factor VIIIa.

[1745] The light chain contains a γ-carboxyglutamic acid (Gla) domain followed by two EGF domains. The EGF1 domain binds Ca++ and has been shown, along with a small portion of the serine protease domain, to interact with factor VIIIa (Mathur, A. and Bajaj, S. P., 1999, J. Biol. Chem., 274, 18477-18486). The Gla domain is essential for interaction with phospholipid vesicles which help to increase the catalytic efficiency of the serine protease domain of factor IXa (Freedman, S. J., Blostein, M. D., Baleja, J. D., Jacobs, M., Furie, B. C., and Furie, B., 1996, J. Biol. Chem., 271, 16227-16236). A series of experiments have shown that the EGF2 domain is essential for factor IXa binding to surface of activated platelets (Wong, M. Y., Gurr, J. A., and Walsh, P. N., 1999, Biochemistry, 38, 8948-8960). This platelet binding is essential for efficient catalysis to activate factor X.

[1746] Figure D1 shows the alignment of CG55806-02 (wild type factor IX), the splice variant CG55806-04 and the sequence of the porcine factor IXa denoted as 1PFX. Figure D2 shows the structure of porcine factor IXa (1PFX) (Brandstetter, H., Bauer, M., Huber, R., Lollar, P., and Bode, W., 1995, Proc. Natl. Acad. Sci. USA, 92, 9796-9800). The deleted portion of CG55806-04 corresponds to the EGF2 domain. Since EGF2 domain has been shown to be essential for platelet binding, the CG55806-04 splice variant may prevent blood clotting.

### Example E

### CG59693-01, NOV72A Knockdown Cell Validation

[1747] Knockdown Oligonucleotides. All oligonucleotides were mixed-backbone oligonucleotides containing modified phosphorothioate segments at 5′ and 3′ ends and 2′-O-methyl RNA oligoribonucleotide segments located in the middle synthesized by Midland, Inc. All oligonucleotides were desalted and gel purified. The purity of the oligonucleotides was confirmed by Mass spectroscopy. The antisense oligonucleotide sequences for CG59693-01 used were:

| | |
|---|---|
| AS1-5′ GATATTTCGAATCCATTTCTGG 3′ | (SEQ ID NO:1477) |
| AS2-5′ CATCATTCAGCTTCACACAC 3′ | (SEQ ID NO:1478) |
| AS3-5′ GAACCTCTGCAGGCGCATAG 3′ | (SEQ ID NO:1479) |
| AS4-5′ CACTGGAAAATGAATAAGGTA 3′ | (SEQ ID NO:1480) |
| AS5-5′ CCATGTTAATATTCATCAGA 3′ | (SEQ ID NO:1481) |

A17-mer targeted to human immunodeficiency virus
was used as a scramble control

| | |
|---|---|
| (5′ GAGCTCCCAGGCTCAGA 3′). | (SEQ ID NO:1482) |

[1748] Oligonucleotide Transfection. Ten thousand cells were seeded in each well of the 96 well plate in complete medium 24 h before transfection to reach 50% confluency on the day of transfection. Oligonucleotides were diluted with Optimen to 400 nM, and mixed with Oligofectamine (Invitrogen) according to manufacturer's instructions. Cells were first washed with serum-free medium. The oligo and liposome mixture was then added to cells. After 4 h incubation period, serum was added back to cells. Readout assays were performed 24 and 48 h after transfection.

[1749] Cell Proliferation Assay. CELLTITER 96® AQueous Non-Radioactive Cell Porliferation Assay (MTS) Kit from PROMEGA was used to determine the number of viable cells in the proliferation assay. Briefly, 20 μl of combined MTS/PMS solution were diluted with 100 μl complete medium and added to each well of the 96 well plate. After 1 h incubation at 37° C., the absorbance at 490 nm was recorded using an ELISA plate reader.

[1750] Chemosensitivity Analysis. MCF-7 cells were transfected with 400 nM CG59693-01 knockdown oligonucleotides. Four hours after transfection, different chemotherapeutic agents were added to the cells at indicated concentration. Drug-treated cells were collected 2 days after and analyzed by MTS assay.

[1751] Knockdown Results.

[1752] Transfection with antisense oligonucleotides had minimal inhibitory effect (about 10-20%) on NCI-H460 cell proliferation when compared with the results of untransfected (UC), liposome (LC) and scrambled oligonucleotide transfected (SC) controls, as shown in Figure E1.

[1753] The antisense oligonucleotides transfected cells and control cells were then treated with different chemotherapeutic agents that are used clinically for NSCLC. In the control cells, the chemoagents resulted in less than 40% inhibitory effect on cell growth at indicated concentrations, as shown in Figures E2-E9.

[1754] However, up to 90% of growth inhibition was observed in CG59693-01 antisense oligonucleotide transfected cells treated with different chemotherapeutic agents, as shown in Figures E2-E9. Therefore, knockdown of CG59693-01 expression sensitized NCI-H460 cells to chemotherapeutic agents, such as paclitaxel, gemcitabine, etoposide, daunorubicin and cisplatin.

[1755] Role(s) of CG59693-01 in Tumorgenesis: Some lung tumors, especially non-small cell lung tumors, are known to be especially detrimental to health. Such characteristic is strongly associated with the ability of these tumors to have acquired resistance to chemotherapy. As shown above, CG59693-01 gene is over expressed in that subset of lung tumors (see differential expression data, also referred to as RTQ PCR data or as TAQMAN data; see also Hsu et al., Cancer Res 2001 Mar. 15; 61(6):2727-31, Overexpression of dihydrodiol dehydrogenase as a prognostic marker of non-small cell lung cancer). Additionally, over expression of this gene has been linked to chemotherapy resistance in human ovarian carcinoma (Deng H B, Parekh H K, Chow K, Simpkins H., J Biol Chem 2002 Feb. 12; [epub ahead of print], Increased expression of dihydrodiol dehydrogenase induces resistance to cisplatin in human ovarian carcinoma cells).

[1756] The antisense experiments showed that decreasing activity of the enzyme encoded by the CG59693-01 gene reduces the level of drug resistance. This reduction should correlate with an improved clinical outcome in patients treated with chemotherapy.

[1757] Impact of therapeutic targeting of CG59693-01: Therapeutic targeting of the enzymatic activity of the protein encoded by CG59693-01 with a small molecule inhibitor is anticipated to reduce or eliminate resistance to chemotherapy in lung cancers, especially non-small cell lung tumors. Additionally, targeting of the enzymatic activity of the CG59693-01 protein with a small molecule inhibitor may be effective in reduction of resistrance to chemotherapy in other types of cancers.

### Other Embodiments

[1758] Although particular embodiments have been disclosed herein in detail, this has been done by way of example for purposes of illustration only, and is not intended to be limiting with respect to the scope of the appended claims, which follow. In particular, it is contemplated by the inventors that various substitutions, alterations, and modifications may be made to the invention without departing from the spirit and scope of the invention as defined by the claims. The choice of nucleic acid starting material, clone of interest, or library type is believed to be a matter of routine for a person of ordinary skill in the art with knowledge of the embodiments described herein. Other aspects, advantages, and modifications considered to be within the scope of the following claims. The claims presented are representative of the inventions disclosed herein. Other, unclaimed inventions are also contemplated. Applicants reserve the right to pursue such inventions in later claims.

The application's sequence listing, which the Patent Office published only in electronic form, follows.

SEQUENCE LISTING (1540 sequences)

SEQ ID NO: 1 - DNA, 1327 bp, Homo sapiens
gaggtgaatgccatgccatgattctggtgtgctccatggcatccccagcctagctcccaatcccactttggcacgatgttagccaacagctcctcaaccaacagttctgttctcccgtgtcctgactaccgacctacccaccgcctgcacttggtggtctacagcttggtgctggctgccgggctccccctcaacgcgctagccctctgggtcttcctgcgcgcgctgcgcgtgcactcggtggtgagcgtgtacatgtgtaacctggcggccagcgacctgctcttcaccctctcgctgcccgttcgtctctcctactacgcactgcaccactggcccttccccgacctcctgtgccagacgacgggcgccatcttccagatgaacatgtacggcagctgcatcttcctgatgctcatcaacgtggaccgctacgccgccatcgtgcacccgctgcgactgcgccacctgtggcggccccgcgtggcgcggctgctctacctgggcgtgtgggcgctcatcctggtgtttgccgtgcccgccgcccgcgtgcacaggccctcgcgttgccgctaccgggacctcgaggtgcgcctatgcttcgagagcttctgcgacgagctgtggaaaggcaggctgctgcccctcgtgctgctggccgaggcgctgggcttcctgctgcccctggcggcggtggtctactcgtcgggccgagtcttctggacgctggcgcgccccgacgccacgcagagccagcggcggtggaagaccgtgcgcctcctgctggctaacctcgtcatcttcctgctgtgcttcgtgccctacaacagcacgctggcggtctacgggctgctgcggagcaagctggtggcggccagcgtgcctgcccgcgatcgcgtgcgcggggtgctgatggtgatggtgctgctggccggcgccaactgcgtgctggacccgctggtgtactactttagcgccgagggcttccgcaacaccctgcgcggcctgggcactccgcaccgggccaggacctcggccaccaacgggacgcgggcggcgctcgcgcaatccgaaaggtccgccgtcaccaccgacgccaccaggccggatgccgccagtcaggggctgctccgaccctccgactcccactctctgtcttccttcacacagtgtccccaggattccgccctctgaacacacatgccattgcgctgtccgtgcccgactcccaacgcctctcgttctgggaggcttacagggcgtacacacaagaaggtgggctgggcacttggacctttgggtggcaattccagcttagcaacgcaga

SEQ ID NO: 2 - protein, 372 aa, Homo sapiens
MLANSSSTNSSVLPCPDYRPTHRLHLVVYSLVLAAGLPLNALALWVFLRALRVHSVVSVYMCNLAASDLLFTLSLPVRLSYYALHHWPFPDLLCQTTGAIFQMNMYGSCIFLMLINVDRYAAIVHPLRLRHLWRPRVARLLYLGVWALILVFAVPAARVHRPSRCRYRDLEVRLCFESFCDELWKGRLLPLVLLAEALGFLLPLAAVVYSSGRVFWTLARPDATQSQRRWKTVRLLLANLVIFLLCFVPYNSTLAVYGLLRSKLVAASVPARDRVRGVLMVMVLLAGANCVLDPLVYYFSAEGFRNTLRGLGTPHRARTSATNGTRAALAQSERSAVTTDATRPDAASQGLLRPSDSHSLSSFTQCPQDSAL

SEQ ID NO: 3 - DNA, 1327 bp, Homo sapiens
gaggtgaatgccatgccatgattctggtgtgctccatggcatccccagcctagctcccaatcccactttggcacgatgttagccaacagctcctcaaccaacagttctgttctcccgtgtcctgactaccgacctacccaccgcctgcacttggtggtctacagcttggtgctggctgccgggctccccctcaacgcgctagccctctgggtcttcctgcgcgcgctgcgcgtgcactcggtggtgagcgtgtacatgtgtaacctggcggccagcgacctgctcttcaccctctcgctgcccgttcgtctctcctactacgcactgcaccactggcccttccccgacctcctgtgccagacgacgggcgccatcttccagatgaacatgtacggcagctgcatcttcctgatgctcatcaacgtggaccgctacgccgccatcgtgcacccgctgcgactgcgccacctgcggcggccccgcgtggcgcggctgctctacctgggcgtgtgggcgctcatcctggtgtttgccgtgcccgccgcccgcgtgcacaggccctcgcgttgccgctaccgggacctcgaggtgcgcctatgcttcgagagcttctgcgacgagctgtggaaaggcaggctgctgcccctcgtgctgctggccgaggcgctgggcttcctgctgcccctggcggcggtggtctactcgtcgggccgagtcttctggacgctggcgcgccccgacgccacgcagagccagcggcggtggaagaccgtgcgcctcctgctggctaacctcgtcatcttcctgctgtgcttcgtgccctacaacagcacgctggcggtctacgggctgctgcggagcaagctggtggcggccagcgtgcctgcccgcgatcgcgtgcgcggggtgctgatggtgatggtgctgctggccggcgccaactgcgtgctggacccgctggtgtactactttagcgccgagggcttccgcaacaccctgcgcggcctgggcactccgcaccgggccaggacctcggccaccaacgggacgcgggcggcgctcgcgcaatccgaaaggtccgccgtcaccaccgacgccaccaggccggatgccgccagtcaggggctgctccgaccctccgactcccactctctgtcttccttcacacagtgtccccaggattccgccctctgaacacacatgccattgcgctgtccgtgcccgactcccaacgcctctcgttctgggaggcttacagggcgtacacacaagaaggtgggctgggcacttggacctttgggtggcaattccagcttagcaacgcaga

SEQ ID NO: 4 - protein, 372 aa, Homo sapiens
MLANSSSTNSSVLPCPDYRPTHRLHLVVYSLVLAAGLPLNALALWVFLRALRVHSVVSVYMCNLAASDLLFTLSLPVRLSYYALHHWPFPDLLCQTTGAIFQMNMYGSCIFLMLINVDRYAAIVHPLRLRHLRRPRVARLLYLGVWALILVFAVPAARVHRPSRCRYRDLEVRLCFESFCDELWKGRLLPLVLLAEALGFLLPLAAVVYSSGRVFWTLARPDATQSQRRWKTVRLLLANLVIFLLCFVPYNSTLAVYGLLRSKLVAASVPARDRVRGVLMVMVLLAGANCVLDPLVYYFSAEGFRNTLRGLGTPHRARTSATNGTRAALAQSERSAVTTDATRPDAASQGLLRPSDSHSLSSFTQCPQDSAL

SEQ ID NO: 5 - DNA, 3189 bp, Homo sapiens
ctgcaccgggaccagcgcctccccgcttcgcgctgccctcggcctcgccccgggcccgggtggatgagccgcgcgcccgggggacatggaagcgctgacgctgtggcttctcccctggatatgccagtgcgtgtcggtgcgggccgactccatcatccacatcggtgccatcttcgaggagaacgcggccaaggacgacagggtgttccagttggcggtatccgacctgagcctcaacgatgacatcctgcagagcgagaagatcacctactccatcaaggtcatcgaggccaacaacccattccaggctgtgcaggaagcctgtgacctcatgacccaggggattttggccttggtcacgtccactggctgtgcatctgccaatgccctgcagtccctcacggatgccatgcacatcccacacctctttgtccagcgcaacccgggagggtcgccacgcaccgcatgccacctgaaccccagccccgatggtgaggcctacacactggcttcgagaccacccgtccgcctcaatgatgtcatgctcaggctggtgacggagctgcgctggcagaagttcgtcatgttctacgacagcgagtatgatatccgtgggcttcaaagctttctggaccaggcctcgcggctgggccttgacgtctctttacaaaaggtggacaagaacattagccacgtattcaccagcctcttcaccacgatgaagacagaggagctgaatcgctaccgggacacgcttcgccgcgccatcctgctgctcagcccacagggagcccactccttcatcaacgaggccgtggagaccaacctggcttccaaggacagccactgggtctttgtgaatgaggaaatcagtgacccggagatcctggatctggtccatagtgcccttggaaggatgaccgtggtccggcaaatctttccgtctgcaaaggacaatcagaaatgcacgaggaacaaccaccgcatctcctccctgctctgcgacccccaggaaggctacctccagatgctgcagatctccaacctctatctgtatgacagtgttctgatgctggccaacgcctttcacaggaagctggaggaccggaagtggcatagcatggcgagcctcaactgcatacggaaatccactaagccatggaatggtgggaggtccatgctggataccatcaaaaagggccacatcactggcctcactggggtgatggagtttcgggaggacagttcgaatccctatgtccagtttgaaatccttggcactacctatagtgagacttttggcaaagacatgcgcaagttggcgacatgggactcagagaagggcttgaatggcagcttgcaagagaggcccatgggcagccgcctccaaggattgactcttaaagtggtgactgtcttggaagagcctttcgtgatggtggctgagaacatcctaggacagcccaagcgctacaaagggttctccatagatgtcctggatgcactggccaaggctctgggctttaaatatgagatttaccaagcccctgatggcaggtacggtcaccagctccataacacctcctggaacgggatgatcggggagctcatcagcaagagagcagacttggccatctctgccatcaccatcaccccagagagggagagcgttgtggacttcagcaagcggtacatggactattcagtggggattctaattaagaagcccgaggagaaaatcagcatcttctccctctttgctccatttgatttcgctgtgtgggcctgcattgcagcagccatccctgtggttggtgtgctgatatttgtgttgaacaggatacaggctgtgagggctcagagtgctgcccagcccaggccgtcagcttctgccactctgcacagcgccatctggattgtctatggagccttcgtacagcaaggtggcgaatcttccgtgaactccatggccatgcgcatcgtgatgggcagctggtggctcttcacgctcattgtgtgctcctcctacacagccaaccttgctgccttcctcacagtgtccaggatggacaaccccataaggactttccaggacctgtccaaacaagtggaaatgtcttatggcactgtccgggattctgctgtatatgagtacttccgagccaagggcaccaaccccctggagcaggacagcacgtttgctgaactctggcggaccatcagcaagaacggaggggctgacaactgcgtgtccagtccttcagaaggcatcaggaaggcaaagaaggggaactacgccttcctgtgggatgtggccgtggtggaatacgcagccctgacggatgacgactgctcggtgactgtcatcggcaacagcatcagcagcaagggttacgggattgccctgcagcatggcagcccctacagggacctcttctcccagaggatcctggagctgcaggacacaggggacctggatgtgctgaagcagaagtggtggccgcacatgggccgctgtgacctcaccagccatgccagcgcccaggccgacggcaaatccctcaagctgcacagcttcgccggggtcttctgcatcctggccattggcctgctcctggcctgcctggtggctgccctggagttgtggtggaacagcaaccggtgccaccaggagacccccaaggaggacaaagaagtgaacttggagcaggtccaccggcgcatgaacagcctcatggatgaagacattgctcacaagcagatttccccagcgtcgattgagctctcggccctggagatggggggcctggctcccacccagaccttggagccgacacgggagtaccagaacacccagctctcggtcagcacctttctgccagagcagagcagccatggcaccagccggacactctcatcagggcccagcagcaacctgccgctgccgctgagcagctcggcgaccatgccctccatgcagtgcaaacacaggtcacccaacggggggctgttccggcagagcccggtgaagacccccatccccatgtccttccagcccgtgcctggaggcgtccttccagaggctctggacacctcccacgggacctccatctgactgcgccgcctgccctcctgcccaccctcccacccacccgaccagcagagctttttaatacaagaaaacaacaa

SEQ ID NO: 6 - protein, 1009 aa, Homo sapiens
MEALTLWLLPWICQCVSVRADSIIHIGAIFEENAAKDDRVFQLAVSDLSLNDDILQSEKITYSIKVIEANNPFQAVQEACDLMTQGILALVTSTGCASANALQSLTDAMHIPHLFVQRNPGGSPRTACHLNPSPDGEAYTLASRPPVRLNDVMLRLVTELRWQKFVMFYDSEYDIRGLQSFLDQASRLGLDVSLQKVDKNISHVFTSLFTTMKTEELNRYRDTLRRAILLLSPQGAHSFINEAVETNLASKDSHWVFVNEEISDPEILDLVHSALGRMTVVRQIFPSAKDNQKCTRNNHRISSLLCDPQEGYLQMLQISNLYLYDSVLMLANAFHRKLEDRKWHSMASLNCIRKSTKPWNGGRSMLDTIKKGHITGLTGVMEFREDSSNPYVQFEILGTTYSETFGKDMRKLATWDSEKGLNGSLQERPMGSRLQGLTLKVVTVLEEPFVMVAENILGQPKRYKGFSIDVLDALAKALGFKYEIYQAPDGRYGHQLHNTSWNGMIGELISKRADLAISAITITPERESVVDFSKRYMDYSVGILIKKPEEKISIFSLFAPFDFAVWACIAAAIPVVGVLIFVLNRIQAVRAQSAAQPRPSASATLHSAIWIVYGAFVQQGGESSVNSMAMRIVMGSWWLFTLIVCSSYTANLAAFLTVSRMDNPIRTFQDLSKQVEMSYGTVRDSAVYEYFRAKGTNPLEQDSTFAELWRTISKNGGADNCVSSPSEGIRKAKKGNYAFLWDVAVVEYAALTDDDCSVTVIGNSISSKGYGIALQHGSPYRDLFSQRILELQDTGDLDVLKQKWWPHMGRCDLTSHASAQADGKSLKLHSFAGVFCILAIGLLLACLVAALELWWNSNRCHQETPKEDKEVNLEQVHRRMNSLMDEDIAHKQISPASIELSALEMGGLAPTQTLEPTREYQNTQLSVSTFLPEQSSHGTSRTLSSGPSSNLPLPLSSSATMPSMQCKHRSPNGGLFRQSPVKTPIPMSFQPVPGGVLPEALDTSHGTSI

SEQ ID NO: 7 - DNA, 2986 bp, Homo sapiens
caccggtaccgactccatcatccacatcggtgccatcttcgaggagaacgcggccaaggacgacagggtgttccagttggcggtatccgacctgagcctcaacgatgacatcctgcagagcgagaagatcacctactccatcaaggtcatcgaggccaacaacccattccaggctgtgcaggaagcctgtgacctcatgacccaggggattttggccttggtcacgtccactggctgtgcatctgccaatgccctgcagtccctcacggatgccatgcacatcccacacctctttgtccagcgcaacccgggagggtcgccacgcaccgcatgccacctgaaccccagccccgatggtgaggcctacacactggcttcgagaccacccgtccgcctcaatgatgtcatgctcaggctggtgacggagctgcgctggcagaagttcgtcatgttctacgacagcgagtatgatatccgtgggcttcaaagctttctggaccaggcctcgcggctgggccttgacgtctctttacaaaaggtggacaagaacattagccacgtattcaccagcctcttcaccacgatgaagacagaggagctgaatcgctaccgggacacgcttcgccgcgccatcctgctgctcagcccacagggagcccactccttcatcaacgaggccgtggagaccaacctggcttccaaggacagccactgggtctttgtgaatgaggaaatcagtgacccggagatcctggatctggtccatagtgcccttggaaggatgaccgtggtccggcaaatctttccgtctgcaaaggacaatcagaaatgcacgaggaacaaccaccgcatctcctccctgctctgcgacccccaggaaggctacctccagatgctgcagatctccaacctctatctgtatgacagtgttctgatgctggccaacgcctttcacaggaagctggaggaccggaagtggcatagcatggcgagcctcaactgcatacggaaatccactaagccatggaatggtgggaggtccatgctggataccatcaaaaagggccacatcactggcctcactggggtgatggagtttcgggaggacagttcgaatccctatgtccagtttgaaatccttggcactacctatagtgagacttttggcaaagacatgcgcaagttggcgacatgggactcagagaagggcttgaatggcagcttgcaagagaggcccatgggcagccgcctccaaggattgactcttaaagtggtgactgtcttggaagagcctttcgtgatggtggctgagaacatcctaggacagcccaagcgctacaaagggttctccatagatgtcctggatgcactggccaaggctctgggctttaaatatgagatttaccaagcccctgatggcaggtacggtcaccagctccataacacctcctggaacgggatgatcggggagctcatcagcaagagagcagacttggccatctctgccatcaccatcaccccagagagggagagcgttgtggacttcagcaagcggtacatggactattcagtggggattctaattaagaagcccgaggagaaaatcagcatcttctccctctttgctccatttgatttcgctgtgtgggcctgcattgcagcagccatccctgtggttggtgtgctgatatttgtgttgaacaggatacaggctgtgagggctcagagtgctgcccagcccaggccgtcagcttctgccactctgcacagcgccatctggattgtctatggagccttcgtacagcaaggtggcgaatcttccgtgaactccatggccatgcgcatcgtgatgggcagctggtggctcttcacgctcattgtgtgctcctcctacacagccaaccttgctgccttcctcacagtgtccaggatggacaaccccataaggactttccaggacctgtccaaacaagtggaaatgtcttatggcactgtccgggattctgctgtatatgagtacttccgagccaagggcaccaaccccctggagcaggacagcacgtttgctgaactctggcggaccatcagcaagaacggaggggctgacaactgcgtgtccagtccttcagaaggcatcaggaaggcaaagaaggggaactacgccttcctgtgggatgtggccgtggtggaatacgcagccctgacggatgacgactgctcggtgactgtcatcggcaacagcatcagcagcaagggttacgggattgccctgcagcatggcagcccctacagggacctcttctcccagaggatcctggagctgcaggacacaggggacctggatgtgctgaagcagaagtggtggccgcacatgggccgctgtgacctcaccagccatgccagcgcccaggccgacggcaaatccctcaagctgcacagcttcgccggggtcttctgcatcctggccattggcctgctcctggcctgcctggtggctgccctggagttgtggtggaacagcaaccggtgccaccaggagacccccaaggaggacaaagaagtgaacttggagcaggtccaccggcgcatgaacagcctcatggatgaagacattgctcacaagcagatttccccagcgtcgattgagctctcggccctggagatggggagcctggctcccacccagaccttggagccgacacgggagtaccagaacacccagctctcggtcagcacctttctgccagagcagagcagccatggcaccagccggacactctcatcagggcccagcagcaacctgccgctgccgctgagcagctcggcgaccatgccctccatgcagtgcaaacacaggtcacccaacggggggctgttccggcagagcccggtgaagacccccatccccatgtccttccagcccgtgcctggaggcgtccttccagaggctctggacacctcccacgggacctccatcctcgagggc

SEQ ID NO: 8 - protein, 995 aa, Homo sapiens
TGTDSIIHIGAIFEENAAKDDRVFQLAVSDLSLNDDILQSEKITYSIKVIEANNPFQAVQEACDLMTQGILALVTSTGCASANALQSLTDAMHIPHLFVQRNPGGSPRTACHLNPSPDGEAYTLASRPPVRLNDVMLRLVTELRWQKFVMFYDSEYDIRGLQSFLDQASRLGLDVSLQKVDKNISHVFTSLFTTMKTEELNRYRDTLRRAILLLSPQGAHSFINEAVETNLASKDSHWVFVNEEISDPEILDLVHSALGRMTVVRQIFPSAKDNQKCTRNNHRISSLLCDPQEGYLQMLQISNLYLYDSVLMLANAFHRKLEDRKWHSMASLNCIRKSTKPWNGGRSMLDTIKKGHITGLTGVMEFREDSSNPYVQFEILGTTYSETFGKDMRKLATWDSEKGLNGSLQERPMGSRLQGLTLKVVTVLEEPFVMVAENILGQPKRYKGFSIDVLDALAKALGFKYEIYQAPDGRYGHQLHNTSWNGMIGELISKRADLAISAITITPERESVVDFSKRYMDYSVGILIKKPEEKISIFSLFAPFDFAVWACIAAAIPVVGVLIFVLNRIQAVRAQSAAQPRPSASATLHSAIWIVYGAFVQQGGESSVNSMAMRIVMGSWWLFTLIVCSSYTANLAAFLTVSRMDNPIRTFQDLSKQVEMSYGTVRDSAVYEYFRAKGTNPLEQDSTFAELWRTISKNGGADNCVSSPSEGIRKAKKGNYAFLWDVAVVEYAALTDDDCSVTVIGNSISSKGYGIALQHGSPYRDLFSQRILELQDTGDLDVLKQKWWPHMGRCDLTSHASAQADGKSLKLHSFAGVFCILAIGLLLACLVAALELWWNSNRCHQETPKEDKEVNLEQVHRRMNSLMDEDIAHKQISPASIELSALEMGSLAPTQTLEPTREYQNTQLSVSTFLPEQSSHGTSRTLSSGPSSNLPLPLSSSATMPSMQCKHRSPNGGLFRQSPVKTPIPMSFQPVPGGVLPEALDTSHGTSILEG

SEQ ID NO: 9 - DNA, 3049 bp, Homo sapiens
caccggatccaccatggaagcgctgacgctgtggcttctcccctggatatgccagtgcgtgtcggtgcgggccgactccatcatccacattggtgccatcttcgaggagaacgcggccaaggacgacagggtgttccagttggcggtatccgacctgagcctcaacgatgacatcctgcagagcgagaagatcacctactccatcaaggtcatcgaggccaacaacccattccaggctgtgcaggaagcctgtgacctcatgacccaggggattttggccttggtcacgtccactggctgtgcatctgccaatgccctgcagtccctcacggatgccatgcacatcccacacctctttgtccagcgcaacccgggagggtcgccacgcaccgcatgccacctgaaccccagccccgatggtgaggcctacacactggcttcgagaccacccgtccgcctcaatgatgtcatgctcaggctggtgacggagctgcgctggcagaagttcgtcatgttctacgacagcgagtatgatatccgtgggcttcaaagctttctggaccaggcctcgcggctgggccttgacgtctctttacaaaaggtggacaagaacattagccacgtattcaccagcctcttcaccacgatgaagacagaggagctgaatcgctaccgggacacgcttcgccgcgccatcctgctgctcagcccacagggagcccactccttcatcaacgaggccgtggagaccaacctggcttccaaggacagccactgggtctttgtgaatgaggaaatcagtgacccggagatcctggatctggtccatagtgcccttggaaggatgaccgtggtccggcaaatctttccgtctgcaaaggacaatcagaaatgcacgaggaacaaccaccgcatctcctccctgctctgcgacccccaggaaggctacctccagatgctgcagatctccaacctctatctgtatgacagtgttctgatgctggccaacgcctttcacaggaagctggaggaccggaagtggcatagcatggcgagcctcaactgcatacggaaatccactaagccatggaatggtgggaggtccatgctggataccatcaaaaagggccacatcactggcctcactggggtgatggagtttcgggaggacagttcgaatccctatgtccagtttgaaatccttggcactacctatagtgagacttttggcaaagacatgcgcaagttggcgacatgggactcagagaagggcttgaatggcagcttgcaagagaggcccatgggcagccgcctccaaggattgactcttaaagtggtgactgtcttggaagagcctttcgtgatggtggctgagaacatcctaggacagcccaagcgctacaaagggttctccatagatgtcctggatgcactggccaaggctctgggctttaaatatgagatttaccaagcccctgatggcaggtacggtcaccagctccataacacctcctggaacgggatgatcggggagctcatcagcaagagagcagacttggccatctctgccatcaccatcaccccagagagggagagcgttgtggacttcagcaagcggtacatggactattcagtggggattctaattaagaagcccgaggagaaaatcagcatcttctccctctttgctccatttgatttcgctgtgtgggcctgcattgcagcagccatccctgtggttggtgtgctgatatttgtgttgaacaggatacaggctgtgagggctcagagtgctgcccagcccaggccgtcagcttctgccactctgcacagcgccatctggattgtctatggagccttcgtacagcaaggtggcgaatcttccgtgaactccatggccatgcgcatcgtgatgggcagctggtggctcttcacgctcattgtgtgctcctcctacacagccaaccttgctgccttcctcacagtgtccaggatggacaaccccataaggactttccaggacctgtccaaacaagtggaaatgtcttatggcactgtccgggattctgctgtatatgagtacttccgagccaagggcaccaaccccctggagcaggacagcacgtttgctgaactctggcggaccatcagcaagaacggaggggctgacaactgcgtgtccagtccttcagaaggcatcaggaaggcaaagaaggggaactacgccttcctgtgggatgtggccgtggtggaatacgcagccctgacggatgacgactgctcggtgactgtcatcggcaacagcatcagcagcaagggttacgggattgccctgcagcatggcagcccctacagggacctcttctcccagaggatcctggagctgcaggacacaggggacctggatgtgctgaagcagaagtggtggccgcacatgggccgctgtgacctcaccagccatgccagcgcccaggccgacggcaaatccctcaagctgcacagcttcgccggggtcttctgcatcctggccattggcctgctcctggcctgcctggtggctgccctggagttgtggtggaacagcaaccggtgccaccaggagacccccaaggaggacaaagaagtgaacttggagcaggtccaccggcgcatgaacagcctcatggatgaagacattgctcacaagcagatttccccagcgtcgattgagctctcggccctggagatggggggcctggctcccacccagaccttggagccgacacgggagtaccagaacacccagctctcggtcagcacctttctgccagagcagagcagccatggcaccagccggacactctcatcagggcccagcagcaacctgccgctgccgctgagcagctcggcgaccatgccctccatgcagtgcaaacacaggtcacccaacggggggctgttccggcagagcccggtgaagacccccatccccatgtccttccagcccgtgcctggaggcgtccttccagaggctctggacacctcccacgggacctccatcctcgagggc

SEQ ID NO: 10 - protein, 1016 aa, Homo sapiens
TGSTMEALTLWLLPWICQCVSVRADSIIHIGAIFEENAAKDDRVFQLAVSDLSLNDDILQSEKITYSIKVIEANNPFQAVQEACDLMTQGILALVTSTGCASANALQSLTDAMHIPHLFVQRNPGGSPRTACHLNPSPDGEAYTLASRPPVRLNDVMLRLVTELRWQKFVMFYDSEYDIRGLQSFLDQASRLGLDVSLQKVDKNISHVFTSLFTTMKTEELNRYRDTLRRAILLLSPQGAHSFINEAVETNLASKDSHWVFVNEEISDPEILDLVHSALGRMTVVRQIFPSAKDNQKCTRNNHRISSLLCDPQEGYLQMLQISNLYLYDSVLMLANAFHRKLEDRKWHSMASLNCIRKSTKPWNGGRSMLDTIKKGHITGLTGVMEFREDSSNPYVQFEILGTTYSETFGKDMRKLATWDSEKGLNGSLQERPMGSRLQGLTLKVVTVLEEPFVMVAENILGQPKRYKGFSIDVLDALAKALGFKYEIYQAPDGRYGHQLHNTSWNGMIGELISKRADLAISAITITPERESVVDFSKRYMDYSVGILIKKPEEKISIFSLFAPFDFAVWACIAAAIPVVGVLIFVLNRIQAVRAQSAAQPRPSASATLHSAIWIVYGAFVQQGGESSVNSMAMRIVMGSWWLFTLIVCSSYTANLAAFLTVSRMDNPIRTFQDLSKQVEMSYGTVRDSAVYEYFRAKGTNPLEQDSTFAELWRTISKNGGADNCVSSPSEGIRKAKKGNYAFLWDVAVVEYAALTDDDCSVTVIGNSISSKGYGIALQHGSPYRDLFSQRILELQDTGDLDVLKQKWWPHMGRCDLTSHASAQADGKSLKLHSFAGVFCILAIGLLLACLVAALELWWNSNRCHQETPKEDKEVNLEQVHRRMNSLMDEDIAHKQISPASIELSALEMGGLAPTQTLEPTREYQNTQLSVSTFLPEQSSHGTSRTLSSGPSSNLPLPLSSSATMPSMQCKHRSPNGGLFRQSPVKTPIPMSFQPVPGGVLPEALDTSHGTSILEG

SEQ ID NO: 11 - DNA, 3094 bp, Homo sapiens
tgtcgacggcgccagtgtgatgatattgcagattcgccttcaccgcggccgcaccatggaagcgctgacgctgtggcttctcccctggatatgccagtgcgtgtcggtgcgggccgactccatcatccacatcggtgccatcttcgaggagaacgcggccaaggacgacagggtgttccagttggcggtatccgacctgagcctcagcgatgacatcctgcagagcgagaagatcacctactccatcaaggtcatcgaggccaacaacccattccaggctgtgcaggaagcctgtgacctcatgacccaggggattttggccttggtcacgtccactggctgtgcatctgccaatgccctgcagtccctcacggatgccatgcacatcccacacctctttgtccagcgcaacccgggagggtcgccacgcaccgcatgccacctgaaccccagccccgatggtgaggcctacacactggcttcgagaccacccgtccgcctcaatgatgtcatgctcaggctggtgacggagctgcgctggcagaagttcgtcatgttctacgacagcgagtatgatatccgtgggcttcaaagctttctggaccaggcctcgcggctgggccttgacgtctctttacaaaaggtggacaagaacattagccacgtattcaccagcctcttcaccacgatgaagacagaggagctgaatcgctaccgggacacgcttcgccgcgccatcctgctgctcagcccacagggagcccactccttcatcaacgaggccgtggagaccaacctggcttccaaggacagccactgggtctttgtgaatgaggaaatcagtgacccggagatcctggatctggtccatagtgcccttggaaggatgaccgtggtccggcaaatctttccgtctgcaaaggacaatcagaaatgcacgaggaacaaccaccgcatctcctccctgctctgcgacccccaggaaggctacctccagatgctgcagatctccaacctctatctgtatgacagtgttctgatgctggccaacgcctttcacaggaagctggaggaccggaagtggcatagcatggcgagcctcaactgcatacggaaatccactaagccatggaatggtgggaggtccatgctggataccatcaaaaagggccacatcactggcctcactggggtgatggagtttcgggaggacagttcgaatccctatgtccagtttgaaatccttggcactacctatagtgagacttttggcaaagacatgcgcaagttggcgacatgggactcagagaagggcttgaatggcagcttgcaagagaggcccatgggcagccgcctccaaggattgactcttaaagtggtgactgtcttggaagagcctttcgtgatggtggctgagaacatcctaggacagcccaagcgctacaaagggttctccatagatgtcctggatgcactggccaaggctctgggctttaaatatgagatttaccaagcccctgatggcaggtacggtcaccagctccataacacctcctggaacgggatgatcggggagctcatcagcaagagagcagacttggccatctctgccatcaccatcaccccagagagggagagcgttgtggacttcagcaagcggtacatggactattcagtggggattctaattaagaagcccgaggagaaaatcagcatcttctccctctttgctccatttgatttcgctgtgtgggcctgcattgcagcagccatccctgtggttggtgtgctgatatttgtgttgaacaggatacaggctgtgagggctcagagtgctgcccagcccaggccgtcagcttctgccactctgcacagcgccatctggattgtctatggagccttcgtacagcaaggtggcgaatcttccgtgaactccatggccatgcgcatcgtgatgggcagctggtggctcttcacgctcattgtgtgctcctcctacacagccaaccttgctgccttcctcacagtgtccaggatggacaaccccataaggactttccaggacctgtccaaacaagtggaaatgtcttatggcactgtccgggattctgctgtatatgagtacttccgagccaagggcaccaaccccctggagcaggacagcacgtttgctgaactctggcggaccatcagcaagaacggaggggctgacaactgcgtgtccagtccttcagaaggcatcaggaaggcaaagaaggggaactacgccttcctgtgggatgtggccgtggtggaatacgcagccctgacggatgacgactgctcggtgactgtcatcggcaacagcatcagcagcaagggttacgggattgccctgcagcatggcagcccctacagggacctcttctcccagaggatcctggagctgcaggacacaggggacctggatgtgctgaagcagaagtggtggccgcacatgggccgctgtgacctcaccagccatgccagcgcccaggccgacggcaaatccctcaagctgcacagcttcgccggggtcttctgcatcctggccattggcctgctcctggcctgcctggtggctgccctggagttgtggtggaacagcaaccggtgccaccaggagacccccaaggaggacaaagaagtgaacttggagcaggtccaccggcgcatgaacagcctcatggatgaagacattgctcacaagcagatttccccagcgtcgattgagctctcggccctggagatggggggcctggctcccacccagaccttggagccgacacgggagtaccagaacacccagctctcggtcagcacctttctgccagagcagagcagccatggcaccagccggacactctcatcagggcccagcagcaacctgccgctgccgctgagcagctcggcgaccatgccctccatgcagtgcaaacacaggtcacccaacggggggctgttccggcagagcccggtgaagacccccatccccatgtccttccagcccgtgcctggaggcgtccttccagaggctctggacacctcccacgggacctccatctagctcgagggc

SEQ ID NO: 12 - protein, 1009 aa, Homo sapiens
MEALTLWLLPWICQCVSVRADSIIHIGAIFEENAAKDDRVFQLAVSDLSLSDDILQSEKITYSIKVIEANNPFQAVQEACDLMTQGILALVTSTGCASANALQSLTDAMHIPHLFVQRNPGGSPRTACHLNPSPDGEAYTLASRPPVRLNDVMLRLVTELRWQKFVMFYDSEYDIRGLQSFLDQASRLGLDVSLQKVDKNISHVFTSLFTTMKTEELNRYRDTLRRAILLLSPQGAHSFINEAVETNLASKDSHWVFVNEEISDPEILDLVHSALGRMTVVRQIFPSAKDNQKCTRNNHRISSLLCDPQEGYLQMLQISNLYLYDSVLMLANAFHRKLEDRKWHSMASLNCIRKSTKPWNGGRSMLDTIKKGHITGLTGVMEFREDSSNPYVQFEILGTTYSETFGKDMRKLATWDSEKGLNGSLQERPMGSRLQGLTLKVVTVLEEPFVMVAENILGQPKRYKGFSIDVLDALAKALGFKYEIYQAPDGRYGHQLHNTSWNGMIGELISKRADLAISAITITPERESVVDFSKRYMDYSVGILIKKPEEKISIFSLFAPFDFAVWACIAAAIPVVGVLIFVLNRIQAVRAQSAAQPRPSASATLHSAIWIVYGAFVQQGGESSVNSMAMRIVMGSWWLFTLIVCSSYTANLAAFLTVSRMDNPIRTFQDLSKQVEMSYGTVRDSAVYEYFRAKGTNPLEQDSTFAELWRTISKNGGADNCVSSPSEGIRKAKKGNYAFLWDVAVVEYAALTDDDCSVTVIGNSISSKGYGIALQHGSPYRDLFSQRILELQDTGDLDVLKQKWWPHMGRCDLTSHASAQADGKSLKLHSFAGVFCILAIGLLLACLVAALELWWNSNRCHQETPKEDKEVNLEQVHRRMNSLMDEDIAHKQISPASIELSALEMGGLAPTQTLEPTREYQNTQLSVSTFLPEQSSHGTSRTLSSGPSSNLPLPLSSSATMPSMQCKHRSPNGGLFRQSPVKTPIPMSFQPVPGGVLPEALDTSHGTSI

SEQ ID NO: 13 - DNA, 3189 bp, Homo sapiens
ctgcaccgggaccagcgcctccccgcttcgcgctgccctcggcctcgccccgggcccgggtggatgagccgcgcgcccgggggacatggaagcgctgacgctgtggcttctcccctggatatgccagtgcgtgtcggtgcgggccgactccatcatccacatcggtgccatcttcgaggagaacgcggccaaggacgacagggtgttccagttggcggtatccgacctgagcctcaacgatgacatcctgcagagcgagaagatcacctactccatcaaggtcatcgaggccaacaacccattccaggctgtgcaggaagcctgtgacctcatgacccaggggattttggccttggtcacgtccactggctgtgcatctgccaatgccctgcagtccctcacggatgccatgcacatcccacacctctttgtccagcgcaacccgggagggtcgccacgcaccgcatgccacctgaaccccagccccgatggtgaggcctacacactggcttcgagaccacccgtccgcctcaatgatgtcatgctcaggctggtgacggagctgcgctggcagaagttcgtcatgttctacgacagcgagtatgatatccgtgggcttcaaagctttctggaccaggcctcgcggctgggccttgacgtctctttacaaaaggtggacaagaacattagccacgtattcaccagcctcttcaccacgatgaagacagaggagctgaatcgctaccgggacacgcttcgccgcgccatcctgctgctcagcccacagggagcccactccttcatcaacgaggccgtggagaccaacctggcttccaaggacagccactgggtctttgtgaatgaggaaatcagtgacccggagatcctggatctggtccatagtgcccttggaaggatgaccgtggtccggcaaatctttccgtctgcaaaggacaatcagaaatgcacgaggaacaaccaccgcatctcctccctgctctgcgacccccaggaaggctacctccagatgctgcagatctccaacctctatctgtatgacagtgttctgatgctggccaacgcctttcacaggaagctggaggaccggaagtggcatagcatggcgagcctcaactgcatacggaaatccactaagccatggaatggtgggaggtccatgctggataccatcaaaaagggccacatcactggcctcactggggtgatggagtttcgggaggacagttcgaatccctatgtccagtttgaaatccttggcactacctatagtgagacttttggcaaagacatgcgcaagttggcgacatgggactcagagaagggcttgaatggcagcttgcaagagaggcccatgggcagccgcctccaaggattgactcttaaagtggtgactgtcttggaagagcctttcgtgatggtggctgagaacatcctaggacagcccaagcgctacaaagggttctccatagatgtcctggatgcactggccaaggctctgggctttaaatatgagatttaccaagcccctgatggcaggtacggtcaccagctccataacacctcctggaacgggatgatcggggagctcatcagcaagagagcagacttggccatctctgccatcaccatcaccccagagagggagagcgttgtggacttcagcaagcggtacatggactattcagtggggattctaattaagaagcccgaggagaaaatcagcatcttctccctctttgctccatttgatttcgctgtgtgggcctgcattgcagcagccatccctgtggttggtgtgctgatatttgtgttgaacaggatacaggctgtgagggctcagagtgctgcccagcccaggccgtcagcttctgccactctgcacagcgccatctggattgtctatggagccttcgtacagcaaggtggcgaatcttccgtgaactccatggccatgcgcatcgtgatgggcagctggtggctcttcacgctcattgtgtgctcctcctacacagccaaccttgctgccttcctcacagtgtccaggatggacaaccccataaggactttccaggacctgtccaaacaagtggaaatgtcttatggcactgtccgggattctgctgtatatgagtacttccgagccaagggcaccaaccccctggagcaggacagcacgtttgctgaactctggcggaccatcagcaagaacggaggggctgacaactgcgtgtccagtccttcagaaggcatcaggaaggcaaagaaggggaactacgccttcctgtgggatgtggccgtggtggaatacgcagccctgacggatgacgactgctcggtgactgtcatcggcaacagcatcagcagcaagggttacgggattgccctgcagcatggcagcccctacagggacctcttctcccagaggatcctggagctgcaggacacaggggacctggatgtgctgaagcagaagtggtggccgcacatgggccgctgtgacctcaccagccatgccagcgcccaggccgacggcaaatccctcaagctgcacagcttcgccggggtcttctgcatcctggccattggcctgctcctggcctgcctggtggctgccctggagttgtggtggaacagcaaccggtgccaccaggagacccccaaggaggacaaagaagtgaacttggagcaggtccaccggcgcatgaacagcctcatggatgaagacattgctcacaagcagatttccccagcgtcgattgagctctcggccctggagatggggggcctggctcccacccagaccttggagccgacacgggagtaccagaacacccagctctcggtcagcacctttctgccagagcagagcagccatggcaccagccggacactctcatcagggcccagcagcaacctgccgctgccgctgagcagctcggcgaccatgccctccatgcagtgcaaacacaggtcacccaacggggggctgttccggcagagcccggtgaagacccccatccccatgtccttccagcccgtgcctggaggcgtccttccagaggctctggacacctcccacgggacctccatctgactgcgccgcctgccctcctgcccaccctcccacccacccgaccagcagagctttttaatacaagaaaataacaa

SEQ ID NO: 14 - protein, 1009 aa, Homo sapiens; identical to SEQ ID NO: 6

SEQ ID NO: 15 - DNA, 3345 bp, Homo sapiens
  CDS (18)..(1478)
cagatgtccagttccagatgcctggacccagagtgtgggggaaatatctctggagaagccctcactccaaaggctgtccaggcgcaatgtggtggctgcttctctggggagtcctccaggcttgcccaacccggggctccgtcctcttggcccaagagctaccccagcagctgacatcccccgggtacccagagccgtatggcaaaggccaagagagcagcacggacatcaaggctccagagggctttgctgtgaggctcgtcttccaggacttcgacctggagccgtcccaggactgtgcaggggactctgtcacaatctcattcgtcggttcggatccaagccagttctgtggtcagcaaggctcccctctgggcaggccccctggtcagagggagtttgtatcctcagggaggagtttgcggctgaccttccgcacacagccttcctcggagaacaagactgcccaccttcacaagggctttctggccctctaccaaaccgtggctgtgaactatagtcagcccatcagcgaggccagcaggggctctgaggccatcaacgcacctggagacaaccctgccaaggtccagaaccactgccaggagccctattatcaggccgcggcagcaggggcactcacctgtgcaaccccagggacctggaaagacagacaggatggggaggaggttcttcagtgtatgcctgtctgcggacggccagtcacccccattgcccagaatcagacgaccctcggttcttccagagccaagctgggcaacttcccctggcaagccttcaccagtatccacggccgtgggggcggggccctgctgggggacagatggatcctcactgctgcccacaccgtctaccccaaggacagtgtttctctcaggaagaaccagagtgtgaatgtgttcttgggccacacagccatagatgagatgctgaaactggggaaccaccctgtccaccgtgtcgttgtgcaccccgactaccgtcagaatgagtcccataactttagcggggacatcgccctcctggagctgcagcacagcatccccctgggccccaacgtcctcccggtctgtctgcccgataatgagaccctctaccgcagcggcttgttgggctacgtcagtgggtttggcatggagatgggctggctaactactgagctgaagtactcgaggctgcctgtagctcccagggaggcctgcaacgcctggctccaaaagagacagagacccgaggtgttttctgacaatatgttctgtgttggggatgagacgcaaaggcacagtgtctgccagggggacagtggcagcgtctatgtggtatgggacaatcatgcccatcactgggtggccacgggcattgtgtcctggggcatagggtgtggcgaagggtatgacttctacaccaaggtgctcagctatgtggactggatcaagggagtgatgaatggcaagaattgaccctgggggcttgaacagggactgaccagcacagtggaggccccaggcaacagagggcctggagtgaggactgaacactggggtaggggttgggggtggggggttgggggaggcagggaaatcctattcacatcactgttgcaccaagccactgcaagagaaacccccacccggcaagcccgccccatcccagacaggaagcagagtcccacagaccgctcctcctcaccctctacctccctgtgctcatgcactaggccccgggaagcctgtacatctcaacaactttcgccttgaatgtccttagaaccaccttcccctacttcatctgttgacacagcttttatactcacctgtggaagagtcagctactcacccgctattagagtatggaggaaggggttttcattgcattgcatttctgaaacattcctaagaccctttagttgaccttcaaatattcaagctattctgcagctccaagatgcaattatagaaacagctccttttttattttatgtcctctatatgccaggtgcttcacctgttatttcacttaatcctcataccatatttgcaaaggatgtgttattatctatgtgtgacaaatgaggaaactgaggctcaggggataaagggacttgcccaagtcccacagctggtgtgtgactgcagagactgtgctcttcccagtgtgctgcaatacttctcaaccctcctctaacctgctgtgtcacccgctttccctcccagcccccacatccttaccattttccctccctgggaattcctgcttctgcgaaaatggtatcctctagctcacactttcctaatggccccatctcctgcagaagccaggtgagcccagcactggactgaagttcttgcagacaccccacctgtgcccctatcatcaggggaactgctccacctgagaggaccaactctttaatttttagtaaaacctgaaggtgatgggccgggcgcagtggctcacgcctgtaatcccaacaccttaggagtccgaggtgggtggatcacgaggtcaggagatccagcccatcctggccaacatggtgaaaccccatctctactaaaaatacaaaaattagccgggcgtggtgacacgtgcctgtagtcccagctactcgggaggctgaggcaggagaatcacttgaacctgggaggcggaggttgcagtgagctaagatcacgccactgcactccagcctgcggacagaccaagacttcatcccccccaaaaaaaaaagattggaggtgatttacagtgaaagacacaaataaaatacaactgttcaatggaaatagaaaataaacaccataaaagagagaagagaggtaatttgttagcatcaagagtcaagttgctatatggtcaaaggttaaatttatctctaaaaaatggcaggattcaaagttgtacatacatgtgattacttctgttttttacacccacatacagtacaaaagattattaaaaatattcccaaaaggcaggtgcaatgatgcacacttatacccccagccactcaggaggctgatgcaagaggatcgcttgagcccaggagttgaagtccagcctaagcaacatagtgaaaccccatctccaaaaatataataataattctctcaaaatactaaacagaggtggttttattgataagattttggctgtttggttttccactattctctattggctaaaatttgtttaatgagcatgaaatgtttttattttattttgcttatttttatgattgcaaaaaatgatatgagtttctccctgccaaggcaaaaaatatatatatatacctataaaaaaaaaaaaaaaaaaaaaaaaaaa

SEQ ID NO: 16 - protein, 487 aa, Homo sapiens
MPGPRVWGKYLWRSPHSKGCPGAMWWLLLWGVLQACPTRGSVLLAQELPQQLTSPGYPEPYGKGQESSTDIKAPEGFAVRLVFQDFDLEPSQDCAGDSVTISFVGSDPSQFCGQQGSPLGRPPGQREFVSSGRSLRLTFRTQPSSENKTAHLHKGFLALYQTVAVNYSQPISEASRGSEAINAPGDNPAKVQNHCQEPYYQAAAAGALTCATPGTWKDRQDGEEVLQCMPVCGRPVTPIAQNQTTLGSSRAKLGNFPWQAFTSIHGRGGGALLGDRWILTAAHTVYPKDSVSLRKNQSVNVFLGHTAIDEMLKLGNHPVHRVVVHPDYRQNESHNFSGDIALLELQHSIPLGPNVLPVCLPDNETLYRSGLLGYVSGFGMEMGWLTTELKYSRLPVAPREACNAWLQKRQRPEVFSDNMFCVGDETQRHSVCQGDSGSVYVVWDNHAHHWVATGIVSWGIGCGEGYDFYTKVLSYVDWIKGVMNGKN

SEQ ID NO: 17 - DNA, 1368 bp, Homo sapiens
  CDS (1)..(1368)
aagctttgcccaacccggggctccgtcctcttggcccaagagctaccccagcagctgacatcccccgggtacccagagccgtatggcaaaggccaagagagcagcacggacatcaaggctccagagggctttgctgtgaggttcgtcttccaggacttcgacctggagtcgtcccaggactgtgcaggggactctgtcacaatctcattcgtcggttcggatccaagccagttctgtggtcagcaaggctcccctctgggcaggccccctggtcagagggagtttgtatcctcagggaggagtttgcggctgaccttccgcacacagccttcctcggagaacaagactgcccacctccacaagggcttcctggccctctaccaaaccgtggctgtgaactatagtcagcccatcagcgaggccagcaggggctctgaggccatcaacgcacctggagacaaccctgccaaggtccagaaccactgccaggagccctattatcaggccacggcagcaggggcactcacctgtgcaaccccagggacctggaaagacagacaggatggggaggaggttcttcagtgtatgcctgtctgcggacggccagtcacccccattgcccagaatcagacgaccctcggttcttccagagccaagctgggcaacttcccctggcaagccttcaccagtatccacggccgtgggggcggggccctgctgggggacagatggatcctcactgctgcccacaccatctaccccaaggacagtgtttctctcaggaagaaccagagtgtgaatgtgttcttgggccacacagccatagatgagatgctgaaactggggaaccaccctgtccaccgtgtcgttgtgcaccccgactaccgtcagaatgagtcccataactttagcggggacatcgccctcctggagctgcagcacagcatccccctgggccccaacgtcctcccggtctgtctgcccgataatgagaccctctaccgcagcggcttgttgggctacgtcagtgggtttggcatggagatgggctggctaactactgagctgaagtactcgaggctgcctgtagctcccagggaggcctgcaacgcctggctccaaaagagacagagacccgaggtgttttctgacaatatgttctgtgttggggatgagacgcaaaggcacagtgtctgccagggggacagtggcagcgtctatgtggtatgggacaatcatgcccatcactgggtggccacgggcattgtgtcctggggcatagggtgtggcgaagggtatgacttctacaccaaggtgctcagctatgtggactggatcaagggagtgatgaatggcaagaataagctt

SEQ ID NO: 18 - protein, 456 aa, Homo sapiens
KLCPTRGSVLLAQELPQQLTSPGYPEPYGKGQESSTDIKAPEGFAVRFVFQDFDLESSQDCAGDSVTISFVGSDPSQFCGQQGSPLGRPPGQREFVSSGRSLRLTFRTQPSSENKTAHLHKGFLALYQTVAVNYSQPISEASRGSEAINAPGDNPAKVQNHCQEPYYQATAAGALTCATPGTWKDRQDGEEVLQCMPVCGRPVTPIAQNQTTLGSSRAKLGNFPWQAFTSIHGRGGGALLGDRWILTAAHTIYPKDSVSLRKNQSVNVFLGHTAIDEMLKLGNHPVHRVVVHPDYRQNESHNFSGDIALLELQHSIPLGPNVLPVCLPDNETLYRSGLLGYVSGFGMEMGWLTTELKYSRLPVAPREACNAWLQKRQRPEVFSDNMFCVGDETQRHSVCQGDSGSVYVVWDNHAHHWVATGIVSWGIGCGEGYDFYTKVLSYVDWIKGVMNGKNKL

SEQ ID NO: 19 - DNA, 741 bp, Homo sapiens
  CDS (1)..(741)
aagcttaccctcggttcttccagagccaagctgggcaacttcccctggcaagccttcaccagtatccacggccgtgggggcggggccctgctgggggacagatggatcctcactgctgcccacaccatctaccccaagaacagtgtttctctcaggaagaaccagagtgtgaatgtgttcttgggccacacagccatagatgagatgctgaaactggggaaccaccctgtccaccgtgtcgttgtgcaccccgactaccgtcagaatgagtcccataactttagcggggacatcgccctcctggagctgcagcacagcatccccctgggccccaacgtcctcccggtctgtctgcccgataatgagaccctctaccgcagcggcttgttgggctacgtcagtgggtttggcatggagatgggctggctaactactgagctgaagtactcgaggctgcctgtagctcccagggaggcctgcaacgcctggctccaaaagagacagagacccgaggtgttttctgacaatatgttctgtgttggggatgagacgcaaaggcacagtgtctgccagggggacagtggcagcgtctatgtggtatgggacaatcgtgcccatcactgggtggccacgggcattgtgtcctggggcatagggtgtggcgaagggtatgacttctacaccaaggtgctcagctatgtggactggatcaagggagtgatgaatggcaagaataagctt

SEQ ID NO: 20 - protein, 247 aa, Homo sapiens
KLTLGSSRAKLGNFPWQAFTSIHGRGGGALLGDRWILTAAHTIYPKNSVSLRKNQSVNVFLGHTAIDEMLKLGNHPVHRVVVHPDYRQNESHNFSGDIALLELQHSIPLGPNVLPVCLPDNETLYRSGLLGYVSGFGMEMGWLTTELKYSRLPVAPREACNAWLQKRQRPEVFSDNMFCVGDETQRHSVCQGDSGSVYVVWDNRAHHWVATGIVSWGIGCGEGYDFYTKVLSYVDWIKGVMNGKNKL

SEQ ID NO: 21 - DNA, 1368 bp, Homo sapiens
  CDS (1)..(1368)
aagctttgcccaacccggggctccgtcctcttggcccaagagctaccccagcagctgacatcccccgggtacccagagccgtatggcaaaggccaagagagcagcacggacatcaaggctccagagggctttgctgtgaggctcgtcttccaggacttcgacctggagccgtcccaggactgtgcaggggactctgtcacaatctcattcgtcggttcggatccaagccagttctgtggtcagcaaggctcccctctgggcaggccccctggtcagagggagtttgtatcctcagggaggagtttgcggctgaccttccgcacacagccttcctcggagaacaagactgcccacctccacaagggcttcctggccctctaccaaaccgtggctgtgaactatagtcagcccatcagcgaggccagcaggggctctgaggccatcaacgcacctggagacaaccctgccaaggtccagaaccactgccaggagccctattatcaggccgcggcagcaggggcactcacctgtgcaaccccagggacctggaaagacagacaggatggggaggaggttcttcagtgtatgcctgtctgcggacggccagtcacccccattgcccagaatcagacgaccctcggttcttccagagccaagctgggcaacttcccctggcaagccttcaccagtatccacggccgtgggggcggggccctgctgggggacagatggatcctcactgctgcccacaccgtctaccccaaggacagtgtttctctcaggaagaaccagagtgtgaatgtgttcttgggccacacagccatagatgagatgctgaaactggggaaccaccctgtccaccgtgtcgttgtgcaccccgactaccgtcagaatgagtcccataactttagcggggacatcgccctcctggagctgcagcacagcatccccctgggccccaacgtcctcccggtctgtctgcccgataatgagaccctctaccgcagcggcttgttgggctacgtcagtgggtttggcatggagatgggctggctaactactgagctgaagtactcgaggctgcctgtagctcccagggaggcctgcaacgcctggctccaaaagagacagagacccgaggtgttttctgacaatatgttctgtgttggggatgagacgcaaaggcacagtgtctgccagggggacagtggcagcgtctatgtggtatgggacaatcatgcccatcactgggtggccacgggcattgtgtcctggggcatagggtgtggcgaagggtatgacttctacaccaaggtgctcagctatgtggactggatcaagggagtgatgaatggcaagaataagctt

SEQ ID NO: 22 - protein, 456 aa, Homo sapiens
KLCPTRGSVLLAQELPQQLTSPGYPEPYGKGQESSTDIKAPEGFAVRLVFQDFDLEPSQDCAGDSVTISFVGSDPSQFCGQQGSPLGRPPGQREFVSSGRSLRLTFRTQPSSENKTAHLHKGFLALYQTVAVNYSQPISEASRGSEAINAPGDNPAKVQNHCQEPYYQAAAAGALTCATPGTWKDRQDGEEVLQCMPVCGRPVTPIAQNQTTLGSSRAKLGNFPWQAFTSIHGRGGGALLGDRWILTAAHTVYPKDSVSLRKNQSVNVFLGHTAIDEMLKLGNHPVHRVVVHPDYRQNESHNFSGDIALLELQHSIPLGPNVLPVCLPDNETLYRSGLLGYVSGFGMEMGWLTTELKYSRLPVAPREACNAWLQKRQRPEVFSDNMFCVGDETQRHSVCQGDSGSVYVVWDNHAHHWVATGIVSWGIGCGEGYDFYTKVLSYVDWIKGVMNGKNKL

SEQ ID NO: 23 - DNA, 1368 bp, Homo sapiens
  CDS (1)..(1368)
aagctttgcccaacccggggctccgtcctcttggcccaagagctaccccagcagctgacatcccccgggtacccagagccgtatggcaaaggccaagagagcagcacggacatcaaggctccagagggctttgctgtgaggctcgtcttccaggacttcgacctggagccgtcccaggactgtgcaggggactctgtcacaatctcattcgtcggttcggatccaagccagttctgtggtcagcaaggctcccctctgggcaggccccctggtcagagggagtttgtatcctcagggaggagtttgcggctgaccttccgcacacagccttcctcggaggacaagactgcccacctccacaagggcttcctggccctctaccaaaccgtggctgtgaactatagtcagcccatcagcgaggccagcaggggctctgaggccatcaacgcacctggagacaaccctgccaaggtccagaaccactgccaggagccctattatcaggccgcggcagcaggggcactcacctgtgcaaccccagggacctggaaagacagacaggatggggaggaggttcttcagtgtatgcctgtctgcggacggccagtcacccccattgcccagaatcagacgaccctcggttcttccagagccaagctgggcaacttcccctggcaagccttcaccagtatccacggccgtgggggcggggccctgctgggggacagatggatcctcactgctgcccacaccatctaccccaaggacagtgtttctctcaggaagaaccagagtgtgaatgtgttcttgggccacacagccatagatgagatgctgaaactggggaaccaccctgtccaccgtgtcgttgtgcaccccgactaccgtcagaatgagtcccataactttagcggggacatcgccctcctggagctgcagcacagcatccccctgggccccaacgtcctcccggtctgtctgcccgataatgagaccctctaccgcagcggcttgttgggctacgtcagtgggtttggcatggagatgggctggctaactactgagctgaagtactcgaggctgcctgtagctcccagggaggcctgcaacgcctggctccaaaagagacagagacccgaggtgttttctgacaatatgttctgtgttggggatgagacgcaaaggcacagtgtctgccagggggacagtggcagcgtctatgtggtatgggacaatcatgcccatcactgggtggccacgggcattgtgtcctggggcatagggtgtggcgaagggtatgacttctacaccaaggtgctcagctatgtggactggatcaagggagtgatgaatggcaagaataagctt

SEQ ID NO: 24 - protein, 456 aa, Homo sapiens
KLCPTRGSVLLAQELPQQLTSPGYPEPYGKGQESSTDIKAPEGFAVRLVFQDFDLEPSQDCAGDSVTISFVGSDPSQFCGQQGSPLGRPPGQREFVSSGRSLRLTFRTQPSSEDKTAHLHKGFLALYQTVAVNYSQPISEASRGSEAINAPGDNPAKVQNHCQEPYYQAAAAGALTCATPGTWKDRQDGEEVLQCMPVCGRPVTPIAQNQTTLGSSRAKLGNFPWQAFTSIHGRGGGALLGDRWILTAAHTIYPKDSVSLRKNQSVNVFLGHTAIDEMLKLGNHPVHRVVVHPDYRQNESHNFSGDIALLELQHSIPLGPNVLPVCLPDNETLYRSGLLGYVSGFGMEMGWLTTELKYSRLPVAPREACNAWLQKRQRPEVFSDNMFCVGDETQRHSVCQGDSGSVYVVWDNHAHHWVATGIVSWGIGCGEGYDFYTKVLSYVDWIKGVMNGKNKL

SEQ ID NO: 25 - DNA, 1479 bp, Homo sapiens
  CDS (1)..(1479)
aagcttcccaccatgcctggacccagagtgtgggggaaatatctctggagaagccctcactccaaaggctgtccaggcgcaatgtggtggctgcttctctggggagtcctccaggcttgcccaacccggggctccgtcctcttggcccaagagctaccccagcagctgacatcccccgggtacccagagccgtatggcaaaggccaagagagcagcacggacatcaaggctccagagggctttgctgtgaggctcgtcttccaggacttcgacctggagccgtcccaggactgtgcaggggactctgtcacagtctcattcgtcggttcggatccaagccagttctgtggtcagcaaggctcccctctgggcaggccccctggtcagagggagtttgtatcctcagggaggagtttgcggctgaccttccgcacacagccttcctcggagaacaagactgcccacctccacaagggcttcctggccctctaccaaaccgtggctgtgaactatagtcagcccatcagcgaggccagcaggggctctgaggccatcaacgcacctggagacaaccctgccaaggtccagaaccactgccaggagccctattatcaggccgcggcagcaggggcactcacctgtgcaaccccagggacctggaaagacagacaggatggggaggaggttcttcagtgtatgcctgtctgcggacggccagtcacccccattgcccagaatcagacgaccctcggttcttccagagccaagctgggcaacttcccctggcaagccttcaccagtatccacggccgtgggggcggggccctgctgggggacagatggatcctcactgctgcccacaccatctaccccaaggacagtgtttctctcaggaagaaccagagtgtgaatgtgttcttgggccacacagccatagatgagatgctgaaactggggaaccaccctgtccaccgtgtcgttgtgcaccccgactaccgtcagaatgagtcccataactttagcggggacatcgccctcctggagctgcagcacagcatccccctgggccccaacgtcctcccggtctgtctgcccgataatgagaccctctaccgcagcggcttgttgggctacgtcagtgggtttggcatggagatgggctggctaactactgagctgaagtactcgaggctgcctgtagctcccagggaggcctgcaacgcctggctccaaaagagacagagacccgaggtgttttctgacaatatgttctgtgttggggatgagacgcaaaggcacagtgtctgccagggggacagtggcagcgtctatgtggtatgggacaatcatgcccatcactgggtggccacgggcattgtgtcctggggcatagggtgtggcgaagggtatgacttctacaccaaggtgctcagctatgtggactggatcaagggagtgatgaatggcaagaataagctt

SEQ ID NO: 26 - protein, 493 aa, Homo sapiens
KLPTMPGPRVWGKYLWRSPHSKGCPGAMWWLLLWGVLQACPTRGSVLLAQELPQQLTSPGYPEPYGKGQESSTDIKAPEGFAVRLVFQDFDLEPSQDCAGDSVTVSFVGSDPSQFCGQQGSPLGRPPGQREFVSSGRSLRLTFRTQPSSENKTAHLHKGFLALYQTVAVNYSQPISEASRGSEAINAPGDNPAKVQNHCQEPYYQAAAAGALTCATPGTWKDRQDGEEVLQCMPVCGRPVTPIAQNQTTLGSSRAKLGNFPWQAFTSIHGRGGGALLGDRWILTAAHTIYPKDSVSLRKNQSVNVFLGHTAIDEMLKLGNHPVHRVVVHPDYRQNESHNFSGDIALLELQHSIPLGPNVLPVCLPDNETLYRSGLLGYVSGFGMEMGWLTTELKYSRLPVAPREACNAWLQKRQRPEVFSDNMFCVGDETQRHSVCQGDSGSVYVVWDNHAHHWVATGIVSWGIGCGEGYDFYTKVLSYVDWIKGVMNGKNKL

SEQ ID NO: 27 - DNA, 1293 bp, Homo sapiens
  CDS (1)..(1293)
aagctttgcccaacccggggctccgtcctcttggcccaagagctaccccagcagctgacatcccccgggtacccagagccgtatggcaaaggccaagagagcagcacggacatcaaggctccagagggctttgctgtgaggctcgtcttccaggacttcgacctggagccgtcccaggactgtgcaggggactctgtcacaatctcattcgtcggttcggatccaagccagttctgtggtcagcaaggctcccctctgggcaggccccctggtcagagggagtttgtatcctcagggaggagtttgcggctgaccttccgcacacagccttcctcggagaacaagactgcccacctccacaagggcttcctggccctctaccaaaccgtggctgtgaactatagtcagcccatcagcgaggccagcaggggctctgaggccatcaacgcacctggagacaaccctgccaaggtccagaaccactgccaggagccctattatcaggccgcggcagcagtctgcggacggccagtcacccccattgcccagaatcagacgaccctcggttcttccagagccaagctgggcaacttcccctggcaagccttcaccagtatccacggccgtgggggcggggccctgctgggggacagatggatcctcactgctgcccacaccatctaccccaaggacagtgtttctctcaggaagaaccagagtgtgaatgtgttcttgggccacacagccatagatgagatgctgaaactggggaaccaccctgtccaccgtgtcgttgtgcaccccgactaccgtcagaatgagtcccataactttagcggggacatcgccctcctggagctgcagcacagcatccccctgggccccaacgtcctcccggtctgtctgcccgataatgagaccctctaccgcagcggcttgttgggctacgtcagtgggtttggcatggagatgggccggctaactactgagctgaagtactcgaggctgcctgtagctcccagggaggcctgcaacgcctggctccaaaagagacagagacccgaggtgttttctgacaatatgttctgtgtcggggatgagacgcaaaggcacagtgtctgccagggggacagtggcagcgtctatgtggtatgggacaatcatgcccatcactgggtggccacgggcattgtgtcctggggcatagggtgtggcgaagggtatgacttctacaccaaggtgctcagctatgtggactggatcaagggagtgatgaatggcaagaataagctt

SEQ ID NO: 28 - protein, 431 aa, Homo sapiens
KLCPTRGSVLLAQELPQQLTSPGYPEPYGKGQESSTDIKAPEGFAVRLVFQDFDLEPSQDCAGDSVTISFVGSDPSQFCGQQGSPLGRPPGQREFVSSGRSLRLTFRTQPSSENKTAHLHKGFLALYQTVAVNYSQPISEASRGSEAINAPGDNPAKVQNHCQEPYYQAAAAVCGRPVTPIAQNQTTLGSSRAKLGNFPWQAFTSIHGRGGGALLGDRWILTAAHTIYPKDSVSLRKNQSVNVFLGHTAIDEMLKLGNHPVHRVVVHPDYRQNESHNFSGDIALLELQHSIPLGPNVLPVCLPDNETLYRSGLLGYVSGFGMEMGRLTTELKYSRLPVAPREACNAWLQKRQRPEVFSDNMFCVGDETQRHSVCQGDSGSVYVVWDNHAHHWVATGIVSWGIGCGEGYDFYTKVLSYVDWIKGVMNGKNKL

SEQ ID NO: 29 - DNA, 1368 bp, Homo sapiens
  CDS (1)..(1368)
aagctttgcccaacccggggctccgtcctcttggcccaagagctaccccagcagctgacatcccccgggtacccagagccgtatggcaaaggccaagagagcagcacggacatcaaggctccagagggctttgctgtgaggctcgtcttccaggacttcgacctggagccgtcccaggactgtgcaggggactctgtcacaatctcattcgtcggttcggatccaagccagttctgtggtcagcaaggctcccctctgggcaggccccctggtcagagggagtttgtatcctcagggaggagtttgcggctgaccttccgcacacagccttcctcggagaacaagactgcccacctccacaagggcttcctggccctctaccaaaccgtggctgtgaactatagtcagcccatcagcgaggccagcaggggctctgaggccatcaacgcacctggagacaaccccgccaaggtccagaaccactgccaggagccctattatcaggccgcggcagcaggggcactcacctgtgcaaccccagggacctgggaagacagacaggatggggaagaggttcttcagtgtatgcctgtctgtggacggccagtcacccccattgcccagaatcagacgaccctcggttcttccagagccaagctgggcaacttcccctggcaagccttcaccagtatccacggccgtgggggcggggccctgctgggggacagatggatcctcactgctgcccacaccatctaccccaaggacagtgtttctctcaggaagaaccagagtgtgaatgtgttcttgggccacacagccatagatgagatgctgaaactggggaaccaccctgtccaccgtgtcgttgtgcaccccgactaccgtcagaatgagtcccataactttagcggggacatcgccctcctggagctgcagcacagcatccccctgggccccaacgtcctcccggtctgtctgcccgataatgagaccctctaccgcagcggcttgttgggctacgtcagtgggtttggcatggagatgggctggctaactactgagctgaagtactcgaggctgcctgtagctcccagggaggcctgcaacgcctggctccaaaagagacagagacccgaggtgttttctgacaatatgttctgtgttggggatgagacgcaaaggcacagtgtctgccagggggacagtggcagcgtctatgtggtatgggacaatcatgcccatcactgggtggccacgggcattgtgtcctggggcatagggtgtggcgaagggtatgacttctacaccaaggtgctcagctatgtggactggatcaagggagtgatgaatggcaagaataagctt

SEQ ID NO: 30 - protein, 456 aa, Homo sapiens
KLCPTRGSVLLAQELPQQLTSPGYPEPYGKGQESSTDIKAPEGFAVRLVFQDFDLEPSQDCAGDSVTISFVGSDPSQFCGQQGSPLGRPPGQREFVSSGRSLRLTFRTQPSSENKTAHLHKGFLALYQTVAVNYSQPISEASRGSEAINAPGDNPAKVQNHCQEPYYQAAAAGALTCATPGTWEDRQDGEEVLQCMPVCGRPVTPIAQNQTTLGSSRAKLGNFPWQAFTSIHGRGGGALLGDRWILTAAHTIYPKDSVSLRKNQSVNVFLGHTAIDEMLKLGNHPVHRVVVHPDYRQNESHNFSGDIALLELQHSIPLGPNVLPVCLPDNETLYRSGLLGYVSGFGMEMGWLTTELKYSRLPVAPREACNAWLQKRQRPEVFSDNMFCVGDETQRHSVCQGDSGSVYVVWDNHAHHWVATGIVSWGIGCGEGYDFYTKVLSYVDWIKGVMNGKNKL

SEQ ID NO: 31 - DNA, 1368 bp, Homo sapiens
  CDS (1)..(1368)
aagctttgcccaacccggggctccgtcctcttggcccaagagctaccccagcagctgacatcccccgggtacccagagccgtatggcaaaggccaagagagcagcacggacatcaaggctccagagggctttgctgtgaggctcgtcttccaggacttcgacctggagccgtcccaggactgtgcaggggactctgtcacaatctcattcgtcggttcggatccaagccagttctgtggtcagcaaggctcccctctgggcaggccccctggtcagagggagtttgtatcctcagggaggagtttgcggctgaccttccgcacacagccttcctcggagaacaagactgcccacctccacaagggcttcctggccctctaccaaaccgtggctgtgaactatagtcagcccatcagcgaggccagcaggggctctgaggccatcaacgcacctggagacaaccctgccaaggtccagaaccactgccaggagccctattatcaggccgcggcagcaggggcactcacctgtgcaaccccagggacctggaaagacagacaggatggggaggaggttcttcagtgtatgcctgtctgcggacggccagtcacccccattgcccagaatcagacgaccctcggttcttccagagccaagctgggcaacttcccctggcaagccttcaccagtatccacggccgtgggggcggggccctgctgggggacagatggatcctcactgctgcccacaccatctaccccaaggacagtgtttctctcaggaagaaccagagtgtgaatgtgttcttgggccacacagccatagatgagatgctgaaactggggaaccaccctgtccaccgtgtcgttgtgcaccccgactaccgtcagaatgagtcccataactttagcggggacatcgccctcctggagctgcggcacagcatccccctgggccccaacgtcctcccggtctgtctgcccgataatgagaccctctaccgcagcggcttgttgggctacgtcagtgggtttggcatggagatgggctggctaactactgagctgaagtactcgaggctgcctgtagctcccagggaggcctgcaacgcctggctccaaaagagacagagacccgaggtgttttctgacaatatgttctgtgttggggatgggacacaaaggcacagtgtctgccagggggacagtggcagcgtctatgtggtatgggacaatcatgcccatcactgggtggccacgggcattgtgtcctggggcatagggtgtggcgaagggtatgacttctacaccaaggtgctcagctatgtggactggatcaagggagtgatgaatggcaagaataagctt

SEQ ID NO: 32 - protein, 456 aa, Homo sapiens
KLCPTRGSVLLAQELPQQLTSPGYPEPYGKGQESSTDIKAPEGFAVRLVFQDFDLEPSQDCAGDSVTISFVGSDPSQFCGQQGSPLGRPPGQREFVSSGRSLRLTFRTQPSSENKTAHLHKGFLALYQTVAVNYSQPISEASRGSEAINAPGDNPAKVQNHCQEPYYQAAAAGALTCATPGTWKDRQDGEEVLQCMPVCGRPVTPIAQNQTTLGSSRAKLGNFPWQAFTSIHGRGGGALLGDRWILTAAHTIYPKDSVSLRKNQSVNVFLGHTAIDEMLKLGNHPVHRVVVHPDYRQNESHNFSGDIALLELRHSIPLGPNVLPVCLPDNETLYRSGLLGYVSGFGMEMGWLTTELKYSRLPVAPREACNAWLQKRQRPEVFSDNMFCVGDGTQRHSVCQGDSGSVYVVWDNHAHHWVATGIVSWGIGCGEGYDFYTKVLSYVDWIKGVMNGKNKL

SEQ ID NO: 33 - DNA, 387 bp, Homo sapiens
  CDS (1)..(387)
aagctttgcccaacccggggctccgtcctcttggcccaagagctaccccagcagctgacatcccccgggtacccagagccgtatggcaaaggccaagagagcagcacggacatcaaggctccagagggctttgctgtgaggctcgtcttccaggacttcgacctggagccgtcccaggactgtgcgggggactctgtcacaatctcattcgtcggttcggatccaagccagttctgtggtcagcaaggctcccctctgggcaggccccctggtcagagggagtttgtatcctcagggaggagtttgcggctgaccttccgcacacagccttcctcggagaacaagactgcccaccttcacaagggctttctggccctctacaagctt

SEQ ID NO: 34 - protein, 129 aa, Homo sapiens
KLCPTRGSVLLAQELPQQLTSPGYPEPYGKGQESSTDIKAPEGFAVRLVFQDFDLEPSQDCAGDSVTISFVGSDPSQFCGQQGSPLGRPPGQREFVSSGRSLRLTFRTQPSSENKTAHLHKGFLALYKL

SEQ ID NO: 35 - DNA, 387 bp, Homo sapiens; identical to SEQ ID NO: 33
  CDS (7)..(381)

SEQ ID NO: 36 - protein, 125 aa, Homo sapiens
CPTRGSVLLAQELPQQLTSPGYPEPYGKGQESSTDIKAPEGFAVRLVFQDFDLEPSQDCAGDSVTISFVGSDPSQFCGQQGSPLGRPPGQREFVSSGRSLRLTFRTQPSSENKTAHLHKGFLALY

SEQ ID NO: 37 - DNA, 741 bp, Homo sapiens; identical to SEQ ID NO: 19
  CDS (7)..(735)

SEQ ID NO: 38 - protein, 243 aa, Homo sapiens
TLGSSRAKLGNFPWQAFTSIHGRGGGALLGDRWILTAAHTIYPKNSVSLRKNQSVNVFLGHTAIDEMLKLGNHPVHRVVVHPDYRQNESHNFSGDIALLELQHSIPLGPNVLPVCLPDNETLYRSGLLGYVSGFGMEMGWLTTELKYSRLPVAPREACNAWLQKRQRPEVFSDNMFCVGDETQRHSVCQGDSGSVYVVWDNRAHHWVATGIVSWGIGCGEGYDFYTKVLSYVDWIKGVMNGKN

SEQ ID NO: 39 - DNA, 1293 bp, Homo sapiens; identical to SEQ ID NO: 27
  CDS (7)..(1287)

SEQ ID NO: 40 - protein, 427 aa, Homo sapiens
CPTRGSVLLAQELPQQLTSPGYPEPYGKGQESSTDIKAPEGFAVRLVFQDFDLEPSQDCAGDSVTISFVGSDPSQFCGQQGSPLGRPPGQREFVSSGRSLRLTFRTQPSSENKTAHLHKGFLALYQTVAVNYSQPISEASRGSEAINAPGDNPAKVQNHCQEPYYQAAAAVCGRPVTPIAQNQTTLGSSRAKLGNFPWQAFTSIHGRGGGALLGDRWILTAAHTIYPKDSVSLRKNQSVNVFLGHTAIDEMLKLGNHPVHRVVVHPDYRQNESHNFSGDIALLELQHSIPLGPNVLPVCLPDNETLYRSGLLGYVSGFGMEMGRLTTELKYSRLPVAPREACNAWLQKRQRPEVFSDNMFCVGDETQRHSVCQGDSGSVYVVWDNHAHHWVATGIVSWGIGCGEGYDFYTKVLSYVDWIKGVMNGKN

SEQ ID NO: 41 - DNA, 1368 bp, Homo sapiens; identical to SEQ ID NO: 17
  CDS (7)..(1362)

SEQ ID NO: 42 - protein, 452 aa, Homo sapiens
CPTRGSVLLAQELPQQLTSPGYPEPYGKGQESSTDIKAPEGFAVRFVFQDFDLESSQDCAGDSVTISFVGSDPSQFCGQQGSPLGRPPGQREFVSSGRSLRLTFRTQPSSENKTAHLHKGFLALYQTVAVNYSQPISEASRGSEAINAPGDNPAKVQNHCQEPYYQATAAGALTCATPGTWKDRQDGEEVLQCMPVCGRPVTPIAQNQTTLGSSRAKLGNFPWQAFTSIHGRGGGALLGDRWILTAAHTIYPKDSVSLRKNQSVNVFLGHTAIDEMLKLGNHPVHRVVVHPDYRQNESHNFSGDIALLELQHSIPLGPNVLPVCLPDNETLYRSGLLGYVSGFGMEMGWLTTELKYSRLPVAPREACNAWLQKRQRPEVFSDNMFCVGDETQRHSVCQGDSGSVYVVWDNHAHHWVATGIVSWGIGCGEGYDFYTKVLSYVDWIKGVMNGKN

SEQ ID NO: 43 - DNA, 1479 bp, Homo sapiens
  CDS (13)..(1473)
aagcttcccaccatgcctggacccagagtgtgggggaaatatctctggagaagccctcactccaaaggctgtccaggcgcaatgtggtggctgcttctctggggagtcctccaggcttgcccaacccggggctccgtcctcttggcccaagagctaccccagcagctgacatcccccgggtacccagagccgtatggcaaaggccaagagagcagcacggacatcaaggctccagagggctttgctgtgaggctcgtcttccaggacttcgacctggagccgtcccaggactgtgcaggggactctgtcacaatctcattcgtcggttcggatccaagccagttctgtggtcagcaaggctcccctctgggcaggccccctggtcagagggagtttgtatcctcagggaggagtttgcggctgaccttccgcacacagccttcctcggagaacaagactgcccacctccacaagggcttcctggccctctaccaaaccgtggctgtgaactatagtcagcccatcagcgaggccagcaggggctctgaggccatcaacgcacctggagacaaccctgccaaggtccagaaccactgccaggagccctattatcaggccacggcagcaggggcactcacctgtgcaaccccagggacctggaaagacagacaggatggggaggaggttcttcagtgtatgcctgtctgcggacggccagtcacccccattgcccagaatcagacgaccctcggttcttccagagccaagctgggcaacttcccctggcaagccttcaccagtatccacggccgtgggggcggggccctgctgggggacagatggatcctcactgctgcccacaccatctaccccaaggacagtgtttctctcaggaagaaccagagtgtgaatgtgttcttgggccacacagccatagatgagatgctgaaactggggaaccaccctgtccaccgtgtcgttgtgcaccccgactaccgtcagaatgagtcccataactttagcggggacatcgccctcctggagctgcagcacagcatccccctgggccccaacgtcctcccggtctgtctgcccgataatgagaccctctaccgcagcggcttgttgggctacgtcagtgggtttggcatggagatgggctggctaactactgagctgaagtactcgaggctgcctgtagctcccagggaggcctgcaacgcctggctccaaaagagacagagacccgaggtgttttctgacaatatgttctgtgttggggatgagacgcaaaggcacagtgtctgccagggggacagtggcagcgtctatgtggtatgggacaatcatgcccatcactgggtggccacgggcattgtgtcctggggcatagggtgtggcgaagggtatgacttctacaccaaggtgctcagctatgtggactggatcaagggagtgatgaatggcaagaataagctt

SEQ ID NO: 44 - protein, 487 aa, Homo sapiens [sequence omitted]

SEQ ID NO: 45 - DNA, 3345 bp, Homo sapiens
  CDS (18)..(1478)
cagatgtccagttccagatgcctggacccagagtgtgggggaaatatctctggagaagccctcactccaaaggctgtccaggcgcaatgtggtggctgcttctctggggagtcctccaggcttgcccaacccggggctccgtcctcttggcccaagagctaccccagcagctgacatcccccgggtacccagagccgtatggcaaaggccaagagagcagcacggacatcaaggctccagagggctttgctgtgaggctcgtcttccaggacttcgacctggagccgtcccaggactgtgcaggggactctgtcacaatctcattcgtcggttcggatccaaaccagttctgtggtcagcaaggctcccctctgggcaggccccctggtcagagggagtttgtatcctcagggaggagtttgcggctgaccttccgcacacagccttcctcggagaacaagactgcccaccttcacaagggctttctggccctctaccaaaccgtggctgtgaactatagtcagcccatcagcgaggccagcaggggctctgaggccatcaacgcacctggagacaaccctgccaaggtccagaaccactgccaggagccctattatcaggccgcggcagcaggggcactcacctgtgcaaccccagggacctggaaagacagacaggatggggaggaggttcttcagtgtatgcctgtctgcggacggccagtcacccccattgcccagaatcagacgaccctcggttcttccagagccaagctgggcaacttcccctggcaagccttcaccagtatccacggccgtgggggcggggccctgctgggggacagatggatcctcactgctgcccacaccgtctaccccaaggacagtgtttctctcaggaagaaccagagtgtgaatgtgttcttgggccacacagccatagatgagatgctgaaactggggaaccaccctgtccaccgtgtcgttgtgcaccccgactaccgtcagaatgagtcccataactttagcggggacatcgccctcctggagctgcagcacagcatccccctgggccccaacgtcctcccggtctgtctgcccgataatgagaccctctaccgcagcggcttgttgggctacgtcagtgggtttggcatggagatgggctggctaactactgagctgaagtactcgaggctgcctgtagctcccagggaggcctgcaacgcctggctccaaaagagacagagacccgaggtgttttctgacaatatgttctgtgttggggatgagacgcaaaggcacagtgtctgccagggggacagtggcagcgtctatgtggtatgggacaatcatgcccatcactgggtggccacgggcattgtgtcctggggcatagggtgtggcgaagggtatgacttctacaccaaggtgctcagctatgtggactggatcaagggagtgatgaatggcaagaattgaccctgggggcttgaacagggactgaccagcacagtggaggccccaggcaacagagggcctggagtgaggactgaacactggggtaggggttgggggtggggggttgggggaggcagggaaatcctattcacatcactgttgcaccaagccactgcaagagaaacccccacccggcaagcccgccccatcccagacaggaagcagagtcccacagaccgctcctcctcaccctctacctccctgtgctcatgcactaggccccgggaagcctgtacatctcaacaactttcgccttgaatgtccttagaaccaccttcccctacttcatctgttgacacagcttttatactcacctgtggaagagtcagctactcacccgctattagagtatggaggaaggggttttcattgcattgcatttctgaaacattcctaagaccctttagttgaccttcaaatattcaagctattctgcagctccaagatgcaattatagaaacagctccttttttattttatgtcctctatatgccaggtgcttcacctgttatttcacttaatcctcataccatatttgcaaaggatgtgttattatctatgtgtgacaaatgaggaaactgaggctcaggggataaagggacttgcccaagtcccacagctggtgtgtgactgcagagactgtgctcttcccagtgtgctgcaatacttctcaaccctcctctaacctgctgtgtcacccgctttccctcccagcccccacatccttaccattttccctccctgggaattcctgcttctgcgaaaatggtatcctctagctcacactttcctaatggccccatctcctgcagaagccaggtgagcccagcactggactgaagttcttgcagacaccccacctgtgcccctatcatcaggggaactgctccacctgagaggaccaactctttaatttttagtaaaacctgaaggtgatgggccgggcgcagtggctcacgcctgtaatcccaacaccttaggagtccgaggtgggtggatcacgaggtcaggagatccagcccatcctggccaacatggtgaaaccccatctctactaaaaatacaaaaattagccgggcgtggtgacacgtgcctgtagtcccagctactcgggaggctgaggcaggagaatcacttgaacctgggaggcggaggttgcagtgagctaagatcacgccactgcactccagcctgcggacagaccaagacttcatcccccccaaaaaaaaaagattggaggtgatttacagtgaaagacacaaataaaatacaactgttcaatggaaatagaaaataaacaccataaaagagagaagagaggtaatttgttagcatcaagagtcaagttgctatatggtcaaaggttaaatttatctctaaaaaatggcaggattcaaagttgtacatacatgtgattacttctgttttttacacccacatacagtacaaaagattattaaaaatattcccaaaaggcaggtgcaatgatgcacacttatacccccagccactcaggaggctgatgcaagaggatcgcttgagcccaggagttgaagtccagcctaagcaacatagtgaaaccccatctccaaaaatataataataattctctcaaaatactaaacagaggtggttttattgataagattttggctgtttggttttccactattctctattggctaaaatttgtttaatgagcatgaaatgtttttattttattttgcttatttttatgattgcaaaaaatgatatgagtttctccctgccaaggcaaaaaatatatatatatacctataaaaaaaaaaaaaaaaaaaaaaaaaaa

SEQ ID NO: 46 - protein, 487 aa, Homo sapiens
MPGPRVWGKYLWRSPHSKGCPGAMWWLLLWGVLQACPTRGSVLLAQELPQQLTSPGYPEPYGKGQESSTDIKAPEGFAVRLVFQDFDLEPSQDCAGDSVTISFVGSDPNQFCGQQGSPLGRPPGQREFVSSGRSLRLTFRTQPSSENKTAHLHKGFLALYQTVAVNYSQPISEASRGSEAINAPGDNPAKVQNHCQEPYYQAAAAGALTCATPGTWKDRQDGEEVLQCMPVCGRPVTPIAQNQTTLGSSRAKLGNFPWQAFTSIHGRGGGALLGDRWILTAAHTVYPKDSVSLRKNQSVNVFLGHTAIDEMLKLGNHPVHRVVVHPDYRQNESHNFSGDIALLELQHSIPLGPNVLPVCLPDNETLYRSGLLGYVSGFGMEMGWLTTELKYSRLPVAPREACNAWLQKRQRPEVFSDNMFCVGDETQRHSVCQGDSGSVYVVWDNHAHHWVATGIVSWGIGCGEGYDFYTKVLSYVDWIKGVMNGKN

SEQ ID NO: 47 - DNA, 3345 bp, Homo sapiens
  CDS (18)..(1478)
cagatgtccagttccagatgcctggacccagagtgtgggggaaatatctctggagaagccctcactccaaaggctgtccaggcgcaatgtggtggctgcttctctggggagtcctccaggcttgcccaacccggggctccgtcctcttggcccaagagctaccccagcagctgacatcccccgggtacccagagccgtatggcaaaggccaagagagcagcacggacatcaaggctccagagggctttgctgtgaggctcgtcttccaggacttcgacctggagccgtcccaggactgtgcaggggactctgtcacaatctcattcgtcggttcggatccaagccagttctgtggtcagcaaggctcccctctgggcaggccccctggtcagagggagtttgtatcctcagggaggagtttgcggctgaccttccgcacacagccttcctcggagaacaagactgcccaccttcacaagggctttctggccctctaccaaaccgtggctgtgaactatagtcagcccatcagcgaggccagcaggggctctgaggccatcaacacacctggagacaaccctgccaaggtccagaaccactgccaggagccctattatcaggccgcggcagcaggggcactcacctgtgcaaccccagggacctggaaagacagacaggatggggaggaggttcttcagtgtatgcctgtctgcggacggccagtcacccccattgcccagaatcagacgaccctcggttcttccagagccaagctgggcaacttcccctggcaagccttcaccagtatccacggccgtgggggcggggccctgctgggggacagatggatcctcactgctgcccacaccgtctaccccaaggacagtgtttctctcaggaagaaccagagtgtgaatgtgttcttgggccacacagccatagatgagatgctgaaactggggaaccaccctgtccaccgtgtcgttgtgcaccccgactaccgtcagaatgagtcccataactttagcggggacatcgccctcctggagctgcagcacagcatccccctgggccccaacgtcctcccggtctgtctgcccgataatgagaccctctaccgcagcggcttgttgggctacgtcagtgggtttggcatggagatgggctggctaactactgagctgaagtactcgaggctgcctgtagctcccagggaggcctgcaacgcctggctccaaaagagacagagacccgaggtgttttctgacaatatgttctgtgttggggatgagacgcaaaggcacagtgtctgccagggggacagtggcagcgtctatgtggtatgggacaatcatgcccatcactgggtggccacgggcattgtgtcctggggcatagggtgtggcgaagggtatgacttctacaccaaggtgctcagctatgtggactggatcaagggagtgatgaatggcaagaattgaccctgggggcttgaacagggactgaccagcacagtggaggccccaggcaacagagggcctggagtgaggactgaacactggggtaggggttgggggtggggggttgggggaggcagggaaatcctattcacatcactgttgcaccaagccactgcaagagaaacccccacccggcaagcccgccccatcccagacaggaagcagagtcccacagaccgctcctcctcaccctctacctccctgtgctcatgcactaggccccgggaagcctgtacatctcaacaactttcgccttgaatgtccttagaaccaccttcccctacttcatctgttgacacagcttttatactcacctgtggaagagtcagctactcacccgctattagagtatggaggaaggggttttcattgcattgcatttctgaaacattcctaagaccctttagttgaccttcaaatattcaagctattctgcagctccaagatgcaattatagaaacagctccttttttattttatgtcctctatatgccaggtgcttcacctgttatttcacttaatcctcataccatatttgcaaaggatgtgttattatctatgtgtgacaaatgaggaaactgaggctcaggggataaagggacttgcccaagtcccacagctggtgtgtgactgcagagactgtgctcttcccagtgtgctgcaatacttctcaaccctcctctaacctgctgtgtcacccgctttccctcccagcccccacatccttaccattttccctccctgggaattcctgcttctgcgaaaatggtatcctctagctcacactttcctaatggccccatctcctgcagaagccaggtgagcccagcactggactgaagttcttgcagacaccccacctgtgcccctatcatcaggggaactgctccacctgagaggaccaactctttaatttttagtaaaacctgaaggtgatgggccgggcgcagtggctcacgcctgtaatcccaacaccttaggagtccgaggtgggtggatcacgaggtcaggagatccagcccatcctggccaacatggtgaaaccccatctctactaaaaatacaaaaattagccgggcgtggtgacacgtgcctgtagtcccagctactcgggaggctgaggcaggagaatcacttgaacctgggaggcggaggttgcagtgagctaagatcacgccactgcactccagcctgcggacagaccaagacttcatcccccccaaaaaaaaaagattggaggtgatttacagtgaaagacacaaataaaatacaactgttcaatggaaatagaaaataaacaccataaaagagagaagagaggtaatttgttagcatcaagagtcaagttgctatatggtcaaaggttaaatttatctctaaaaaatggcaggattcaaagttgtacatacatgtgattacttctgttttttacacccacatacagtacaaaagattattaaaaatattcccaaaaggcaggtgcaatgatgcacacttatacccccagccactcaggaggctgatgcaagaggatcgcttgagcccaggagttgaagtccagcctaagcaacatagtgaaaccccatctccaaaaatataataataattctctcaaaatactaaacagaggtggttttattgataagattttggctgtttggttttccactattctctattggctaaaatttgtttaatgagcatgaaatgtttttattttattttgcttatttttatgattgcaaaaaatgatatgagtttctccctgccaaggcaaaaaatatatatatatacctataaaaaaaaaaaaaaaaaaaaaaaaaaa

SEQ ID NO: 48 - protein, 487 aa, Homo sapiens
MPGPRVWGKYLWRSPHSKGCPGAMWWLLLWGVLQACPTRGSVLLAQELPQQLTSPGYPEPYGKGQESSTDIKAPEGFAVRLVFQDFDLEPSQDCAGDSVTISFVGSDPSQFCGQQGSPLGRPPGQREFVSSGRSLRLTFRTQPSSENKTAHLHKGFLALYQTVAVNYSQPISEASRGSEAINTPGDNPAKVQNHCQEPYYQAAAAGALTCATPGTWKDRQDGEEVLQCMPVCGRPVTPIAQNQTTLGSSRAKLGNFPWQAFTSIHGRGGGALLGDRWILTAAHTVYPKDSVSLRKNQSVNVFLGHTAIDEMLKLGNHPVHRVVVHPDYRQNESHNFSGDIALLELQHSIPLGPNVLPVCLPDNETLYRSGLLGYVSGFGMEMGWLTTELKYSRLPVAPREACNAWLQKRQRPEVFSDNMFCVGDETQRHSVCQGDSGSVYVVWDNHAHHWVATGIVSWGIGCGEGYDFYTKVLSYVDWIKGVMNGKN

SEQ ID NO: 49 - DNA, 3345 bp, Homo sapiens
  CDS (18)..(1478)
cagatgtccagttccagatgcctggacccagagtgtgggggaaatatctctggagaagccctcactccaaaggctgtccaggcgcaatgtggtggctgcttctctggggagtcctccaggcttgcccaacccggggctccgtcctcttggcccaagagctaccccagcagctgacatcccccgggtacccagagccgtatggcaaaggccaagagagcagcacggacatcaaggctccagagggctttgctgtgaggctcgtcttccaggacttcgacctggagccgtcccaggactgtgcaggggactctgtcacaatctcattcgtcggttcggatccaagccagttctgtggtcagcaaggctcccctctgggcaggccccctggtcagagggagtttgtatcctcagggaggagtttgcggctgaccttccgcacacagccttcctcggagaacaagactgcccaccttcacaagggctttctggccctctaccaaaccgtggctgtgaactatagtcagcccatcagcgaggccagcaggggctctgaggccatcaacgcacctggagacaaccctgccaaggtccagaaccactgccaggagccctattatcaggccgcggcagcaggggcactcacctgtgcaaccccagggacctggaaagacagacaggatggggaggaggtttttcagtgtatgcctgtctgcggacggccagtcacccccattgcccagaatcagacgaccctcggttcttccagagccaagctgggcaacttcccctggcaagccttcaccagtatccacggccgtgggggcggggccctgctgggggacagatggatcctcactgctgcccacaccgtctaccccaaggacagtgtttctctcaggaagaaccagagtgtgaatgtgttcttgggccacacagccatagatgagatgctgaaactggggaaccaccctgtccaccgtgtcgttgtgcaccccgactaccgtcagaatgagtcccataactttagcggggacatcgccctcctggagctgcagcacagcatccccctgggccccaacgtcctcccggtctgtctgcccgataatgagaccctctaccgcagcggcttgttgggctacgtcagtgggtttggcatggagatgggctggctaactactgagctgaagtactcgaggctgcctgtagctcccagggaggcctgcaacgcctggctccaaaagagacagagacccgaggtgttttctgacaatatgttctgtgttggggatgagacgcaaaggcacagtgtctgccagggggacagtggcagcgtctatgtggtatgggacaatcatgcccatcactgggtggccacgggcattgtgtcctggggcatagggtgtggcgaagggtatgacttctacaccaaggtgctcagctatgtggactggatcaagggagtgatgaatggcaagaattgaccctgggggcttgaacagggactgaccagcacagtggaggccccaggcaacagagggcctggagtgaggactgaacactggggtaggggttgggggtggggggttgggggaggcagggaaatcctattcacatcactgttgcaccaagccactgcaagagaaacccccacccggcaagcccgccccatcccagacaggaagcagagtcccacagaccgctcctcctcaccctctacctccctgtgctcatgcactaggccccgggaagcctgtacatctcaacaactttcgccttgaatgtccttagaaccaccttcccctacttcatctgttgacacagcttttatactcacctgtggaagagtcagctactcacccgctattagagtatggaggaaggggttttcattgcattgcatttctgaaacattcctaagaccctttagttgaccttcaaatattcaagctattctgcagctccaagatgcaattatagaaacagctccttttttattttatgtcctctatatgccaggtgcttcacctgttatttcacttaatcctcataccatatttgcaaaggatgtgttattatctatgtgtgacaaatgaggaaactgaggctcaggggataaagggacttgcccaagtcccacagctggtgtgtgactgcagagactgtgctcttcccagtgtgctgcaatacttctcaaccctcctctaacctgctgtgtcacccgctttccctcccagcccccacatccttaccattttccctccctgggaattcctgcttctgcgaaaatggtatcctctagctcacactttcctaatggccccatctcctgcagaagccaggtgagcccagcactggactgaagttcttgcagacaccccacctgtgcccctatcatcaggggaactgctccacctgagaggaccaactctttaatttttagtaaaacctgaaggtgatgggccgggcgcagtggctcacgcctgtaatcccaacaccttaggagtccgaggtgggtggatcacgaggtcaggagatccagcccatcctggccaacatggtgaaaccccatctctactaaaaatacaaaaattagccgggcgtggtgacacgtgcctgtagtcccagctactcgggaggctgaggcaggagaatcacttgaacctgggaggcggaggttgcagtgagctaagatcacgccactgcactccagcctgcggacagaccaagacttcatcccccccaaaaaaaaaagattggaggtgatttacagtgaaagacacaaataaaatacaactgttcaatggaaatagaaaataaacaccataaaagagagaagagaggtaatttgttagcatcaagagtcaagttgctatatggtcaaaggttaaatttatctctaaaaaatggcaggattcaaagttgtacatacatgtgattacttctgttttttacacccacatacagtacaaaagattattaaaaatattcccaaaaggcaggtgcaatgatgcacacttatacccccagccactcaggaggctgatgcaagaggatcgcttgagcccaggagttgaagtccagcctaagcaacatagtgaaaccccatctccaaaaatataataataattctctcaaaatactaaacagaggtggttttattgataagattttggctgtttggttttccactattctctattggctaaaatttgtttaatgagcatgaaatgtttttattttattttgcttatttttatgattgcaaaaaatgatatgagtttctccctgccaaggcaaaaaatatatatatatacctataaaaaaaaaaaaaaaaaaaaaaaaaaa

SEQ ID NO: 50 - protein, 487 aa, Homo sapiens
MPGPRVWGKYLWRSPHSKGCPGAMWWLLLWGVLQACPTRGSVLLAQELPQQLTSPGYPEPYGKGQESSTDIKAPEGFAVRLVFQDFDLEPSQDCAGDSVTISFVGSDPSQFCGQQGSPLGRPPGQREFVSSGRSLRLTFRTQPSSENKTAHLHKGFLALYQTVAVNYSQPISEASRGSEAINAPGDNPAKVQNHCQEPYYQAAAAGALTCATPGTWKDRQDGEEVFQCMPVCGRPVTPIAQNQTTLGSSRAKLGNFPWQAFTSIHGRGGGALLGDRWILTAAHTVYPKDSVSLRKNQSVNVFLGHTAIDEMLKLGNHPVHRVVVHPDYRQNESHNFSGDIALLELQHSIPLGPNVLPVCLPDNETLYRSGLLGYVSGFGMEMGWLTTELKYSRLPVAPREACNAWLQKRQRPEVFSDNMFCVGDETQRHSVCQGDSGSVYVVWDNHAHHWVATGIVSWGIGCGEGYDFYTKVLSYVDWIKGVMNGKN

SEQ ID NO: 51 - DNA, 3345 bp, Homo sapiens
  CDS (18)..(1478)
cagatgtccagttccagatgcctggacccagagtgtgggggaaatatctctggagaagccctcactccaaaggctgtccaggcgcaatgtggtggctgcttctctggggagtcctccaggcttgcccaacccggggctccgtcctcttggcccaagagctaccccagcagctgacatcccccgggtacccagagccgtatggcaaaggccaagagagcagcacggacatcaaggctccagagggctttgctgtgaggctcgtcttccaggacttcgacctggagccgtcccaggactgtgcaggggactctgtcacaatctcattcgtcggttcggatccaagccagttctgtggtcagcaaggctcccctctgggcaggccccctggtcagagggagtttgtatcctcagggaggagtttgcggctgaccttccgcacacagccttcctcggagaacaagactgcccaccttcacaagggctttctggccctctaccaaaccgtggctgtgaactatagtcagcccatcagcgaggccagcaggggctctgaggccatcaacgcacctggagacaaccctgccaaggtccagaaccactgccaggagccctattatcaggccgcggcagcaggggcactcacctgtgcaaccccagggacctggaaagacagacaggatggggaggaggttcttcagtgtatgcctgtctgcggacggccagtcacccccattgcccagaatcagacgaccctcggttcttccagagccaagctgggcaacttcccctggcaagccttcaccagtatccacggccgtgggggcggggccctgctgggggacagatggatcctcactgctgcccacaccgtctaccccaaggacagtgtttctctcaggaagaaccagagtgtgaatgtgttcttgggccacacagccatagatgagatgctgaaactggggaaccaccctgtccaccgtgtcgttgtgcaccccgactaccgtcagaatgagtcccataactttagcggggacatcgccctcctggagctgcagcacagcatccccctgggccccaacgtcctcccggtctgtctgcccgataatgagaccctctaccgcagcggcttgttgggctacgtcagtgggtttggcatggagatgggctggctaactactgagctgaagtactcgaggctgcctgtagctcccagggaggcctgcaacgcctggctccaaaagagacagagacccgaggtgttttctgacaatatgttctgtgttggggatgagacgcaaaggcacagtgtctgccagggggacagtggcagcgtctatgtggtatgggacaatcatgcccatcactgggtggccacgggcattgtgtcctggggcatagggtgtggcgaagggtatgacttctacaccaaggtgctcagctatgtggactggatcaaggaagtgatgaatggcaagaattgaccctgggggcttgaacagggactgaccagcacagtggaggccccaggcaacagagggcctggagtgaggactgaacactggggtaggggttgggggtggggggttgggggaggcagggaaatcctattcacatcactgttgcaccaagccactgcaagagaaacccccacccggcaagcccgccccatcccagacaggaagcagagtcccacagaccgctcctcctcaccctctacctccctgtgctcatgcactaggccccgggaagcctgtacatctcaacaactttcgccttgaatgtccttagaaccaccttcccctacttcatctgttgacacagcttttatactcacctgtggaagagtcagctactcacccgctattagagtatggaggaaggggttttcattgcattgcatttctgaaacattcctaagaccctttagttgaccttcaaatattcaagctattctgcagctccaagatgcaattatagaaacagctccttttttattttatgtcctctatatgccaggtgcttcacctgttatttcacttaatcctcataccatatttgcaaaggatgtgttattatctatgtgtgacaaatgaggaaactgaggctcaggggataaagggacttgcccaagtcccacagctggtgtgtgactgcagagactgtgctcttcccagtgtgctgcaatacttctcaaccctcctctaacctgctgtgtcacccgctttccctcccagcccccacatccttaccattttccctccctgggaattcctgcttctgcgaaaatggtatcctctagctcacactttcctaatggccccatctcctgcagaagccaggtgagcccagcactggactgaagttcttgcagacaccccacctgtgcccctatcatcaggggaactgctccacctgagaggaccaactctttaatttttagtaaaacctgaaggtgatgggccgggcgcagtggctcacgcctgtaatcccaacaccttaggagtccgaggtgggtggatcacgaggtcaggagatccagcccatcctggccaacatggtgaaaccccatctctactaaaaatacaaaaattagccgggcgtggtgacacgtgcctgtagtcccagctactcgggaggctgaggcaggagaatcacttgaacctgggaggcggaggttgcagtgagctaagatcacgccactgcactccagcctgcggacagaccaagacttcatcccccccaaaaaaaaaagattggaggtgatttacagtgaaagacacaaataaaatacaactgttcaatggaaatagaaaataaacaccataaaagagagaagagaggtaatttgttagcatcaagagtcaagttgctatatggtcaaaggttaaatttatctctaaaaaatggcaggattcaaagttgtacatacatgtgattacttctgttttttacacccacatacagtacaaaagattattaaaaatattcccaaaaggcaggtgcaatgatgcacacttatacccccagccactcaggaggctgatgcaagaggatcgcttgagcccaggagttgaagtccagcctaagcaacatagtgaaaccccatctccaaaaatataataataattctctcaaaatactaaacagaggtggttttattgataagattttggctgtttggttttccactattctctattggctaaaatttgtttaatgagcatgaaatgtttttattttattttgcttatttttatgattgcaaaaaatgatatgagtttctccctgccaaggcaaaaaatatatatatatacctataaaaaaaaaaaaaaaaaaaaaaaaaaa

SEQ ID NO: 52 - protein, 487 aa, Homo sapiens
MPGPRVWGKYLWRSPHSKGCPGAMWWLLLWGVLQACPTRGSVLLAQELPQQLTSPGYPEPYGKGQESSTDIKAPEGFAVRLVFQDFDLEPSQDCAGDSVTISFVGSDPSQFCGQQGSPLGRPPGQREFVSSGRSLRLTFRTQPSSENKTAHLHKGFLALYQTVAVNYSQPISEASRGSEAINAPGDNPAKVQNHCQEPYYQAAAAGALTCATPGTWKDRQDGEEVLQCMPVCGRPVTPIAQNQTTLGSSRAKLGNFPWQAFTSIHGRGGGALLGDRWILTAAHTVYPKDSVSLRKNQSVNVFLGHTAIDEMLKLGNHPVHRVVVHPDYRQNESHNFSGDIALLELQHSIPLGPNVLPVCLPDNETLYRSGLLGYVSGFGMEMGWLTTELKYSRLPVAPREACNAWLQKRQRPEVFSDNMFCVGDETQRHSVCQGDSGSVYVVWDNHAHHWVATGIVSWGIGCGEGYDFYTKVLSYVDWIKEVMNGKN

SEQ ID NO: 53 - DNA, 1880 bp, Homo sapiens
  CDS (24)..(1562)
ttacaacagtgccactgacccctatgagcctgatgctggatgaccaaccccctatggaggcccagtatgcagaggagggcccaggacctgggatcttcagagcagagcctggagaccagcagcatcccagtaggccagactgggccataggggaaatgacagggtggggacagtggagggcaatcatcctacattccccggatcctccttggggtcagccccacatgattgatgtttctcaggcagtgtgctggcgttccatgcgacgtggctgtgcagtgctgggagccctggggctgctggccggtgcaggtgttggctcatggctcctagtgctgtatctgtgtcctgctgcctctcagcccatttccgggaccttgcaggatgaggagataactttgagctgctcagaggccagcgctgaggaagctctgctccctgcacttcccaaaacacctgcacttcccaaaacagtatctttcagaataaacagcgaagacttcttgctggaagcgcaagtgagggatcagccacgctggctcctggtctgccatgagggctggagccccgccctggggctgcagatctgctggagccttgggcatctcagactcactcaccacaagggagtaaacctcactgacatcaaactcaacagttcccaggagtttgctcagctctctcctagactgggaggcttcctggaggaggcgtggcagcccagtaggactactgaggctgttaggaacaactgcacttctggtcaagttgtttccctcagatgctctgagtgtggagcgaggcccctggcttcccggatagttggtgggcagtctgtggctcctgggcgctggccgtggcaggccagcgtggccctgggcttccggcacacgtgtgggggctctgtgctagcgccacgctgggtggtgactgctgcacattgtatgcacagtttcaggctggcccgcctgtccagctggcgggttcatgcggggctggtcagccacagtgccgtcaggccccaccaaggggctctggtggagaggattatcccacaccccctctacagtgcccagaatcatgactacgacgtcgccctcctgaggctccagaccgctctcaacttctcagacactgtgggcgctgtgtgcctgccggccaaggaacagcattttccgaagggctcgcggtgctgggtgtctggctggggccacacccaccctagccatacttacagctcggatatgctccaggacacggtggtgcccctgctcagcactcagctctgcaacagctcttgcgtgtacagcggagccctcaccccccgcatgctttgcgctggctacctggacggaagggctgatgcatgccagggagatagcgggggccccctagtgtgcccagatggggacacatggcgcctagtgggggtggtcagctgggggcgtggctgcgcagagcccaatcacccaggtgtctacgccaaggtagctgagtttctggactggatccatgacactgctcaggtgagtgtgggggcaggagtagggcagggagatttctaaaggacctgccctcgaatgcaaggaaccttaccccttaggcccgggccctgctggggactggggagggtgctaggacatattccccagagtgagtggaggaagaagtgaagcttaaacatggaatccattggatttctatcagtttaaggatgaactgggtaagagtatgcctgagtttgtatcccagatctaccatttcctgtgtcgacctttggcaaatttctaactttgttaaaccttaatttcctgataataaccatgatggctacttatatgctattgttatatgctattaaataagacccgtacaatgcc

SEQ ID NO: 54 - protein, 513 aa, Homo sapiens
MSLMLDDQPPMEAQYAEEGPGPGIFRAEPGDQQHPSRPDWAIGEMTGWGQWRAIILHSPDPPWGQPHMIDVSQAVCWRSMRRGCAVLGALGLLAGAGVGSWLLVLYLCPAASQPISGTLQDEEITLSCSEASAEEALLPALPKTPALPKTVSFRINSEDFLLEAQVRDQPRWLLVCHEGWSPALGLQICWSLGHLRLTHHKGVNLTDIKLNSSQEFAQLSPRLGGFLEEAWQPSRTTEAVRNNCTSGQVVSLRCSECGARPLASRIVGGQSVAPGRWPWQASVALGFRHTCGGSVLAPRWVVTAAHCMHSFRLARLSSWRVHAGLVSHSAVRPHQGALVERIIPHPLYSAQNHDYDVALLRLQTALNFSDTVGAVCLPAKEQHFPKGSRCWVSGWGHTHPSHTYSSDMLQDTVVPLLSTQLCNSSCVYSGALTPRMLCAGYLDGRADACQGDSGGPLVCPDGDTWRLVGVVSWGRGCAEPNHPGVYAKVAEFLDWIHDTAQVSVGAGVGQGDF

SEQ ID NO: 55 - DNA, 1787 bp, Homo sapiens
  CDS (54)..(1469)
gcggaacattgcctagtagaccctgaggctttacaacagtgccactgacccctatgagcctgatgctggatgaccaaccccctatggaggcccagtatgcagaggagggcccaggacctgggatcttcagagcagagcctggagaccagcagcatcccatttctcaggcggtgtgctggcgttccatgcgacgtggctgtgcagtgctgggagccctggggctgctggccggtgcaggtgttggctcatggctcctagtgctgtatctgtgtcctgctgcctctcagcccatttccgggaccttgcaggatgaggagataactttgagctgctcagaggccagcgctgaggaagctctgctccctgcacttcccaaaacagtatctttcagaataaacagcgaagacttcttgctggaagcgcaagtgagggatcagccacgctggctcctggtctgccatgagggctggagccccgccctggggctgcagatctgctggagccttgggcatctcagactcactcaccacaagggagtaaacctcactgacatcaaactcaacagttcccaggagtttgctcagctctctcctagactgggaggcttcctggaggaggcgtggcagcccagtaggactactgaggctgttaggaacaactgcacttctggtcaagttgtttccctcagatgctctgagtgtggagcgaggcccctggcttcccggatagttggtgggcagtctgtggctcctgggcgctggccgtggcaggccagcgtggccctgggcttccggcacacgtgtgggggctctgtgctagcgccacgctgggtggtgactgctgcacattgtatgcacagtttcaggctggcccgcctgtccagctggcgggttcatgcggggctggtcagccacagtgccgtcaggccccaccaaggggctctggtggagaggattatcccacaccccctctacagtgcccagaatcatgactacgacgtcgccctcctgaggctccagaccgctctcaacttctcagacactgtgggcgctgtgtgcctgccggccaaggaacagcattttccgaagggctcgcggtgctgggtgtctggctggggccacacccaccctagccatacttacagctcggatatgctccaggacacggtggtgcccctgctcagcactcagctctgcaacagctcttgcgtgtacagcggagccctcaccccccgcatgctttgcgctggctacctggacggaagggctgatgcatgccagggagatagcgggggccccctagtgtgcccagatggggacacatggcgcctagtgggggtggtcagctgggggcgtggctgcgcagagcccaatcacccaggtgtctacgccaaggtagctgagtttctggactggatccatgacactgctcaggtgagtgtgggggcaggagtagggcagggagatttctaaaggacctgccctcgaatgcaaggaaccttaccccttaggcccgggccctgctggggactggggagggtgctaggacatattccccagagtgagtggaggaagaagtgaagcttaaacatggaatccattggatttctatcagtttaaggatgaactgggtaagagtatgcctgagtttgtatcccagatctaccatttcctgtgtcgacctttggcaaatttctaactttgttaaaccttaatttcctgataataaccatgatggctacttatatgctattgttatatgctattaaataagacccgtacaatgcc

SEQ ID NO: 56 - protein, 472 aa, Homo sapiens
MSLMLDDQPPMEAQYAEEGPGPGIFRAEPGDQQHPISQAVCWRSMRRGCAVLGALGLLAGAGVGSWLLVLYLCPAASQPISGTLQDEEITLSCSEASAEEALLPALPKTVSFRINSEDFLLEAQVRDQPRWLLVCHEGWSPALGLQICWSLGHLRLTHHKGVNLTDIKLNSSQEFAQLSPRLGGFLEEAWQPSRTTEAVRNNCTSGQVVSLRCSECGARPLASRIVGGQSVAPGRWPWQASVALGFRHTCGGSVLAPRWVVTAAHCMHSFRLARLSSWRVHAGLVSHSAVRPHQGALVERIIPHPLYSAQNHDYDVALLRLQTALNFSDTVGAVCLPAKEQHFPKGSRCWVSGWGHTHPSHTYSSDMLQDTVVPLLSTQLCNSSCVYSGALTPRMLCAGYLDGRADACQGDSGGPLVCPDGDTWRLVGVVSWGRGCAEPNHPGVYAKVAEFLDWIHDTAQVSVGAGVGQGDF

SEQ ID NO: 57 - DNA, 1880 bp, Homo sapiens
  CDS (24)..(1562)
ttacaacagtgccactgacccctatgagcctgatgttggatgaccaaccccctatggaggcccagtatgcagaggagggcccaggacctgggatcttcagagcagagcctggagaccagcagcatcccagtaggccagactgggccataggggaaatgacagggtggggacagtggagggcaatcatcctacattccccggatcctccttggggtcagccccacatgattgatgtttctcaggcagtgtgctggcgttccatgcgacgtggctgtgcagtgctgggagccctggggctgctggccggtgcaggtgttggctcatggctcctagtgctgtatctgtgtcctgctgcctctcagcccatttccgggaccttgcaggatgaggagataactttgagctgctcagaggccagcgctgaggaagctctgctccctgcacttcccaaaacacctgcacttcccaaaacagtatctttcagaataaacagcgaagacttcttgctggaagcgcaagtgagggatcagccacgctggctcctggtctgccatgagggctggagccccgccctggggctgcagatctgctggagccttgggcatctcagactcactcaccacaagggagtaaacctcactgacatcaaactcaacagttcccaggagtttgctcagctctctcctagactgggaggcttcctggaggaggcgtggcagcccagtaggactactgaggctgttaggaacaactgcacttctggtcaagttgtttccctcagatgctctgagtgtggagcgaggcccctggcttcccggatagttggtgggcagtctgtggctcctgggcgctggccgtggcaggccagcgtggccctgggcttccggcacacgtgtgggggctctgtgctagcgccacgctgggtggtgactgctgcacattgtatgcacagtttcaggctggcccgcctgtccagctggcgggttcatgcggggctggtcagccacagtgccgtcaggccccaccaaggggctctggtggagaggattatcccacaccccctctacagtgcccagaatcatgactacgacgtcgccctcctgaggctccagaccgctctcaacttctcagacactgtgggcgctgtgtgcctgccggccaaggaacagcattttccgaagggctcgcggtgctgggtgtctggctggggccacacccaccctagccatacttacagctcggatatgctccaggacacggtggtgcccctgctcagcactcagctctgcaacagctcttgcgtgtacagcggagccctcaccccccgcatgctttgcgctggctacctggacggaagggctgatgcatgccagggagatagcgggggccccctagtgtgcccagatggggacacatggcgcctagtgggggtggtcagctgggggcgtggctgcgcagagcccaatcacccaggtgtctacgccaaggtagctgagtttctggactggatccatgacactgctcaggtgagtgtgggggcaggagtagggcagggagatttctaaaggacctgccctcgaatgcaaggaaccttaccccttaggcccgggccctgctggggactggggagggtgctaggacatattccccagagtgagtggaggaagaagtgaagcttaaacatggaatccattggatttctatcagtttaaggatgaactgggtaagagtatgcctgagtttgtatcccagatctaccatttcctgtgtcgacctttggcaaatttctaactttgttaaaccttaatttcctgataataaccatgatggctacttatatgctattgttatatgctattaaataagacccgtacaatgcc

SEQ ID NO: 58 - protein, 513 aa, Homo sapiens; identical to SEQ ID NO: 54

SEQ ID NO: 59 - DNA, 1880 bp, Homo sapiens
  CDS (24)..(1562)
ttacaacagtgccactgacccctatgagcctgatgctggatgaccaaccccctatggaggcccagtatgcagaggagggcccaggacctgggatcttcagagcagagcctggagaccagcagcatcccagtaggccagactgggccataggggaaatgacagggtggggacagtggagggcaatcatcctacattccccggatcctccttggggtcagccccacatgattgatgtttctcaggcagtgtgctggcgttccatgcaacgtggctgtgcagtgctgggagccctggggctgctggccggtgcaggtgttggctcatggctcctagtgctgtatctgtgtcctgctgcctctcagcccatttccgggaccttgcaggatgaggagataactttgagctgctcagaggccagcgctgaggaagctctgctccctgcacttcccaaaacacctgcacttcccaaaacagtatctttcagaataaacagcgaagacttcttgctggaagcgcaagtgagggatcagccacgctggctcctggtctgccatgagggctggagccccgccctggggctgcagatctgctggagccttgggcatctcagactcactcaccacaagggagtaaacctcactgacatcaaactcaacagttcccaggagtttgctcagctctctcctagactgggaggcttcctggaggaggcgtggcagcccagtaggactactgaggctgttaggaacaactgcacttctggtcaagttgtttccctcagatgctctgagtgtggagcgaggcccctggcttcccggatagttggtgggcagtctgtggctcctgggcgctggccgtggcaggccagcgtggccctgggcttccggcacacgtgtgggggctctgtgctagcgccacgctgggtggtgactgctgcacattgtatgcacagtttcaggctggcccgcctgtccagctggcgggttcatgcggggctggtcagccacagtgccgtcaggccccaccaaggggctctggtggagaggattatcccacaccccctctacagtgcccagaatcatgactacgacgtcgccctcctgaggctccagaccgctctcaacttctcagacactgtgggcgctgtgtgcctgccggccaaggaacagcattttccgaagggctcgcggtgctgggtgtctggctggggccacacccaccctagccatacttacagctcggatatgctccaggacacggtggtgcccctgctcagcactcagctctgcaacagctcttgcgtgtacagcggagccctcaccccccgcatgctttgcgctggctacctggacggaagggctgatgcatgccagggagatagcgggggccccctagtgtgcccagatggggacacatggcgcctagtgggggtggtcagctgggggcgtggctgcgcagagcccaatcacccaggtgtctacgccaaggtagctgagtttctggactggatccatgacactgctcaggtgagtgtgggggcaggagtagggcagggagatttctaaaggacctgccctcgaatgcaaggaaccttaccccttaggcccgggccctgctggggactggggagggtgctaggacatattccccagagtgagtggaggaagaagtgaagcttaaacatggaatccattggatttctatcagtttaaggatgaactgggtaagagtatgcctgagtttgtatcccagatctaccatttcctgtgtcgacctttggcaaatttctaactttgttaaaccttaatttcctgataataaccatgatggctacttatatgctattgttatatgctattaaataagacccgtacaatgcc

SEQ ID NO: 60 - protein, 513 aa, Homo sapiens
MSLMLDDQPPMEAQYAEEGPGPGIFRAEPGDQQHPSRPDWAIGEMTGWGQWRAIILHSPDPPWGQPHMIDVSQAVCWRSMQRGCAVLGALGLLAGAGVGSWLLVLYLCPAASQPISGTLQDEEITLSCSEASAEEALLPALPKTPALPKTVSFRINSEDFLLEAQVRDQPRWLLVCHEGWSPALGLQICWSLGHLRLTHHKGVNLTDIKLNSSQEFAQLSPRLGGFLEEAWQPSRTTEAVRNNCTSGQVVSLRCSECGARPLASRIVGGQSVAPGRWPWQASVALGFRHTCGGSVLAPRWVVTAAHCMHSFRLARLSSWRVHAGLVSHSAVRPHQGALVERIIPHPLYSAQNHDYDVALLRLQTALNFSDTVGAVCLPAKEQHFPKGSRCWVSGWGHTHPSHTYSSDMLQDTVVPLLSTQLCNSSCVYSGALTPRMLCAGYLDGRADACQGDSGGPLVCPDGDTWRLVGVVSWGRGCAEPNHPGVYAKVAEFLDWIHDTAQVSVGAGVGQGDF

SEQ ID NO: 61 - DNA, 1880 bp, Homo sapiens
  CDS (24)..(1562)
ttacaacagtgccactgacccctatgagcctgatgctggatgaccaaccccctatggaggcccagtatgcagaggagggcccaggacctgggatcttcagagcagagcctggagaccagcagcatcccagtaggccagactgggccataggggaaatgacagggtggggacagtggagggcaatcatcctacattccccggatcctccttggggtcagccccacatgattgatgtttctcaggcagtgtgctggcgttccatgcgacgtggctgtgcagtgctgggagccctggggctgctggccggtgcaggtgttggctcatggctcctagtgctgtatctgtgtcctgctgcctctcagcccatttccgggaccttgcaggatgaggagataactttgagctgctcagaggccagcgctgaggaagctctgctccctgcacttcccaaaacacctgcacttcccaaaacagtatctttcagaataaacagcgaagacttcttgctggaagcgcaagtgagggatcagccacgctggctcctggtctgccatgagggctggagccccgccctggggctgcagatctgctggagccttgggcatctcagactcactcaccacaagggagtaaacctcactgacatcaaactcaacagttcccaggagtttgctcagctctctcctagactgggaggcttcctggaggaggcgtggcagcccagtaggactactgaggctgttaggaacaactgcacttctggtcaagttgtttccctcagatgctctgagtgtggagcgaggcccctggcttcccggatagttggcgggcagtctgtggctcctgggcgctggccgtggcaggccagcgtggccctgggcttccggcacacgtgtgggggctctgtgctagcgccacgctgggtggtgactgctgcacattgtatgcacagtttcaggctggcccgcctgtccagctggcgggttcatgcggggctggtcagccacagtgccgtcaggccccaccaaggggctctggtggagaggattatcccacaccccctctacagtgcccagaatcatgactacgacgtcgccctcctgaggctccagaccgctctcaacttctcagacactgtgggcgctgtgtgcctgccggccaaggaacagcattttccgaagggctcgcggtgctgggtgtctggctggggccacacccaccctagccatacttacagctcggatatgctccaggacacggtggtgcccctgctcagcactcagctctgcaacagctcttgcgtgtacagcggagccctcaccccccgcatgctttgcgctggctacctggacggaagggctgatgcatgccagggagatagcgggggccccctagtgtgcccagatggggacacatggcgcctagtgggggtggtcagctgggggcgtggctgcgcagagcccaatcacccaggtgtctacgccaaggtagctgagtttctggactggatccatgacactgctcaggtgagtgtgggggcaggagtagggcagggagatttctaaaggacctgccctcgaatgcaaggaaccttaccccttaggcccgggccctgctggggactggggagggtgctaggacatattccccagagtgagtggaggaagaagtgaagcttaaacatggaatccattggatttctatcagtttaaggatgaactgggtaagagtatgcctgagtttgtatcccagatctaccatttcctgtgtcgacctttggcaaatttctaactttgttaaaccttaatttcctgataataaccatgatggctacttatatgctattgttatatgctattaaataagacccgtacaatgcc

SEQ ID NO: 62 - protein, 513 aa, Homo sapiens; identical to SEQ ID NO: 54

SEQ ID NO: 63 - DNA, 1880 bp, Homo sapiens
  CDS (24)..(1562)
ttacaacagtgccactgacccctatgagcctgatgctggatgaccaaccccctatggaggcccagtatgcagaggagggcccaggacctgggatcttcagagcagagcctggagaccagcagcatcccagtaggccagactgggccataggggaaatgacagggtggggacagtggagggcaatcatcctacattccccggatcctccttggggtcagccccacatgattgatgtttctcaggcagtgtgctggcgttccatgcgacgtggctgtgcagtgctgggagccctggggctgctggccggtgcaggtgttggctcatggctcctagtgctgtatctgtgtcctgctgcctctcagcccatttccgggaccttgcaggatgaggagataactttgagctgctcagaggccagcgctgaggaagctctgctccctgcacttcccaaaacacctgcacttcccaaaacagtatctttcagaataaacagcgaagacttcttgctggaagcgcaagtgagggatcagccacgctggctcctggtctgccatgagggctggagccccgccctggggctgcagatctgctggagccttgggcatctcagactcactcaccacaagggagtaaacctcactgacatcaaactcaacagttcccaggagtttgctcagctctctcctagactgggaggcttcctggaggaggcgtggcagcccagtaggactactgaggctgttaggaacaactgcacttctggtcaagttgtttccctcagatgctctgagtgtggagcgaggcccctggcttcccggatagttggtggtcagtctgtggctcctgggcgctggccgtggcaggccagcgtggccctgggcttccggcacacgtgtgggggctctgtgctagcgccacgctgggtggtgactgctgcacattgtatgcacagtttcaggctggcccgcctgtccagctggcgggttcatgcggggctggtcagccacagtgccgtcaggccccaccaaggggctctggtggagaggattatcccacaccccctctacagtgcccagaatcatgactacgacgtcgccctcctgaggctccagaccgctctcaacttctcagacactgtgggcgctgtgtgcctgccggccaaggaacagcattttccgaagggctcgcggtgctgggtgtctggctggggccacacccaccctagccatacttacagctcggatatgctccaggacacggtggtgcccctgctcagcactcagctctgcaacagctcttgcgtgtacagcggagccctcaccccccgcatgctttgcgctggctacctggacggaagggctgatgcatgccagggagatagcgggggccccctagtgtgcccagatggggacacatggcgcctagtgggggtggtcagctgggggcgtggctgcgcagagcccaatcacccaggtgtctacgccaaggtagctgagtttctggactggatccatgacactgctcaggtgagtgtgggggcaggagtagggcagggagatttctaaaggacctgccctcgaatgcaaggaaccttaccccttaggcccgggccctgctggggactggggagggtgctaggacatattccccagagtgagtggaggaagaagtgaagcttaaacatggaatccattggatttctatcagtttaaggatgaactgggtaagagtatgcctgagtttgtatcccagatctaccatttcctgtgtcgacctttggcaaatttctaactttgttaaaccttaatttcctgataataaccatgatggctacttatatgctattgttatatgctattaaataagacccgtacaatgcc

SEQ ID NO: 64 - protein, 513 aa, Homo sapiens; identical to SEQ ID NO: 54

SEQ ID NO: 65 - DNA, 1880 bp, Homo sapiens
  CDS (24)..(1562)
ttacaacagtgccactgacccctatgagcctgatgctggatgaccaaccccctatggaggcccagtatgcagaggagggcccaggacctgggatcttcagagcagagcctggagaccagcagcatcccagtaggccagactgggccataggggaaatgacagggtggggacagtggagggcaatcatcctacattccccggatcctccttggggtcagccccacatgattgatgtttctcaggcagtgtgctggcgttccatgcgacgtggctgtgcagtgctgggagccctggggctgctggccggtgcaggtgttggctcatggctcctagtgctgtatctgtgtcctgctgcctctcagcccatttccgggaccttgcaggatgaggagataactttgagctgctcagaggccagcgctgaggaagctctgctccctgcacttcccaaaacacctgcacttcccaaaacagtatctttcagaataaacagcgaagacttcttgctggaagcgcaagtgagggatcagccacgctggctcctggtctgccatgagggctggagccccgccctggggctgcagatctgctggagccttgggcatctcagactcactcaccacaagggagtaaacctcactgacatcaaactcaacagttcccaggagtttgctcagctctctcctagactgggaggcttcctggaggaggcgtggcagcccagtaggactactgaggctgttaggaacaactgcacttctggtcaagttgtttccctcagatgctctgagtgtggagcgaggcccctggcttcccggatagttggtgggcagtccgtggctcctgggcgctggccgtggcaggccagcgtggccctgggcttccggcacacgtgtgggggctctgtgctagcgccacgctgggtggtgactgctgcacattgtatgcacagtttcaggctggcccgcctgtccagctggcgggttcatgcggggctggtcagccacagtgccgtcaggccccaccaaggggctctggtggagaggattatcccacaccccctctacagtgcccagaatcatgactacgacgtcgccctcctgaggctccagaccgctctcaacttctcagacactgtgggcgctgtgtgcctgccggccaaggaacagcattttccgaagggctcgcggtgctgggtgtctggctggggccacacccaccctagccatacttacagctcggatatgctccaggacacggtggtgcccctgctcagcactcagctctgcaacagctcttgcgtgtacagcggagccctcaccccccgcatgctttgcgctggctacctggacggaagggctgatgcatgccagggagatagcgggggccccctagtgtgcccagatggggacacatggcgcctagtgggggtggtcagctgggggcgtggctgcgcagagcccaatcacccaggtgtctacgccaaggtagctgagtttctggactggatccatgacactgctcaggtgagtgtgggggcaggagtagggcagggagatttctaaaggacctgccctcgaatgcaaggaaccttaccccttaggcccgggccctgctggggactggggagggtgctaggacatattccccagagtgagtggaggaagaagtgaagcttaaacatggaatccattggatttctatcagtttaaggatgaactgggtaagagtatgcctgagtttgtatcccagatctaccatttcctgtgtcgacctttggcaaatttctaactttgttaaaccttaatttcctgataataaccatgatggctacttatatgctattgttatatgctattaaataagacccgtacaatgcc

SEQ ID NO: 66 - protein, 513 aa, Homo sapiens; identical to SEQ ID NO: 54

SEQ ID NO: 67 - DNA, 1880 bp, Homo sapiens
  CDS (24)..(1562)
ttacaacagtgccactgacccctatgagcctgatgctggatgaccaaccccctatggaggcccagtatgcagaggagggcccaggacctgggatcttcagagcagagcctggagaccagcagcatcccagtaggccagactgggccataggggaaatgacagggtggggacagtggagggcaatcatcctacattccccggatcctccttggggtcagccccacatgattgatgtttctcaggcagtgtgctggcgttccatgcgacgtggctgtgcagtgctgggagccctggggctgctggccggtgcaggtgttggctcatggctcctagtgctgtatctgtgtcctgctgcctctcagcccatttccgggaccttgcaggatgaggagataactttgagctgctcagaggccagcgctgaggaagctctgctccctgcacttcccaaaacacctgcacttcccaaaacagtatctttcagaataaacagcgaagacttcttgctggaagcgcaagtgagggatcagccacgctggctcctggtctgccatgagggctggagccccgccctggggctgcagatctgctggagccttgggcatctcagactcactcaccacaagggagtaaacctcactgacatcaaactcaacagttcccaggagtttgctcagctctctcctagactgggaggcttcctggaggaggcgtggcagcccagtaggactactgaggctgttaggaacaactgcacttctggtcaagttgtttccctcagatgctctgagtgtggagcgaggcccctggcttcccggatagttggtgggcagtctgtggctcctgggcgctggccgtggcaggccagtgtggccctgggcttccggcacacgtgtgggggctctgtgctagcgccacgctgggtggtgactgctgcacattgtatgcacagtttcaggctggcccgcctgtccagctggcgggttcatgcggggctggtcagccacagtgccgtcaggccccaccaaggggctctggtggagaggattatcccacaccccctctacagtgcccagaatcatgactacgacgtcgccctcctgaggctccagaccgctctcaacttctcagacactgtgggcgctgtgtgcctgccggccaaggaacagcattttccgaagggctcgcggtgctgggtgtctggctggggccacacccaccctagccatacttacagctcggatatgctccaggacacggtggtgcccctgctcagcactcagctctgcaacagctcttgcgtgtacagcggagccctcaccccccgcatgctttgcgctggctacctggacggaagggctgatgcatgccagggagatagcgggggccccctagtgtgcccagatggggacacatggcgcctagtgggggtggtcagctgggggcgtggctgcgcagagcccaatcacccaggtgtctacgccaaggtagctgagtttctggactggatccatgacactgctcaggtgagtgtgggggcaggagtagggcagggagatttctaaaggacctgccctcgaatgcaaggaaccttaccccttaggcccgggccctgctggggactggggagggtgctaggacatattccccagagtgagtggaggaagaagtgaagcttaaacatggaatccattggatttctatcagtttaaggatgaactgggtaagagtatgcctgagtttgtatcccagatctaccatttcctgtgtcgacctttggcaaatttctaactttgttaaaccttaatttcctgataataaccatgatggctacttatatgctattgttatatgctattaaataagacccgtacaatgcc

SEQ ID NO: 68 - protein, 513 aa, Homo sapiens; identical to SEQ ID NO: 54

SEQ ID NO: 69 - DNA, 1880 bp, Homo sapiens
  CDS (24)..(1562)
ttacaacagtgccactgacccctatgagcctgatgctggatgaccaaccccctatggaggcccagtatgcagaggagggcccaggacctgggatcttcagagcagagcctggagaccagcagcatcccagtaggccagactgggccataggggaaatgacagggtggggacagtggagggcaatcatcctacattccccggatcctccttggggtcagccccacatgattgatgtttctcaggcagtgtgctggcgttccatgcgacgtggctgtgcagtgctgggagccctggggctgctggccggtgcaggtgttggctcatggctcctagtgctgtatctgtgtcctgctgcctctcagcccatttccgggaccttgcaggatgaggagataactttgagctgctcagaggccagcgctgaggaagctctgctccctgcacttcccaaaacacctgcacttcccaaaacagtatctttcagaataaacagcgaagacttcttgctggaagcgcaagtgagggatcagccacgctggctcctggtctgccatgagggctggagccccgccctggggctgcagatctgctggagccttgggcatctcagactcactcaccacaagggagtaaacctcactgacatcaaactcaacagttcccaggagtttgctcagctctctcctagactgggaggcttcctggaggaggcgtggcagcccagtaggactactgaggctgttaggaacaactgcacttctggtcaagttgtttccctcagatgctctgagtgtggagcgaggcccctggcttcccggatagttggtgggcagtctgtggctcctgggcgctggccgtggcaggccagcgtggccctgggcttccggcacacgtgtgggggctctgtgctagcgccacgctgggtggtgactgctgcacattgtatgcacagtttcaggctggcccgcctgtccggctggcgggttcatgcggggctggtcagccacagtgccgtcaggccccaccaaggggctctggtggagaggattatcccacaccccctctacagtgcccagaatcatgactacgacgtcgccctcctgaggctccagaccgctctcaacttctcagacactgtgggcgctgtgtgcctgccggccaaggaacagcattttccgaagggctcgcggtgctgggtgtctggctggggccacacccaccctagccatacttacagctcggatatgctccaggacacggtggtgcccctgctcagcactcagctctgcaacagctcttgcgtgtacagcggagccctcaccccccgcatgctttgcgctggctacctggacggaagggctgatgcatgccagggagatagcgggggccccctagtgtgcccagatggggacacatggcgcctagtgggggtggtcagctgggggcgtggctgcgcagagcccaatcacccaggtgtctacgccaaggtagctgagtttctggactggatccatgacactgctcaggtgagtgtgggggcaggagtagggcagggagatttctaaaggacctgccctcgaatgcaaggaaccttaccccttaggcccgggccctgctggggactggggagggtgctaggacatattccccagagtgagtggaggaagaagtgaagcttaaacatggaatccattggatttctatcagtttaaggatgaactgggtaagagtatgcctgagtttgtatcccagatctaccatttcctgtgtcgacctttggcaaatttctaactttgttaaaccttaatttcctgataataaccatgatggctacttatatgctattgttatatgctattaaataagacccgtacaatgcc

SEQ ID NO: 70 - protein, 513 aa, Homo sapiens
MSLMLDDQPPMEAQYAEEGPGPGIFRAEPGDQQHPSRPDWAIGEMTGWGQWRAIILHSPDPPWGQPHMIDVSQAVCWRSMRRGCAVLGALGLLAGAGVGSWLLVLYLCPAASQPISGTLQDEEITLSCSEASAEEALLPALPKTPALPKTVSFRINSEDFLLEAQVRDQPRWLLVCHEGWSPALGLQICWSLGHLRLTHHKGVNLTDIKLNSSQEFAQLSPRLGGFLEEAWQPSRTTEAVRNNCTSGQVVSLRCSECGARPLASRIVGGQSVAPGRWPWQASVALGFRHTCGGSVLAPRWVVTAAHCMHSFRLARLSGWRVHAGLVSHSAVRPHQGALVERIIPHPLYSAQNHDYDVALLRLQTALNFSDTVGAVCLPAKEQHFPKGSRCWVSGWGHTHPSHTYSSDMLQDTVVPLLSTQLCNSSCVYSGALTPRMLCAGYLDGRADACQGDSGGPLVCPDGDTWRLVGVVSWGRGCAEPNHPGVYAKVAEFLDWIHDTAQVSVGAGVGQGDF

SEQ ID NO: 71 - DNA, 1880 bp, Homo sapiens
  CDS (24)..(1562)
ttacaacagtgccactgacccctatgagcctgatgctggatgaccaaccccctatggaggcccagtatgcagaggagggcccaggacctgggatcttcagagcagagcctggagaccagcagcatcccagtaggccagactgggccataggggaaatgacagggtggggacagtggagggcaatcatcctacattccccggatcctccttggggtcagccccacatgattgatgtttctcaggcagtgtgctggcgttccatgcgacgtggctgtgcagtgctgggagccctggggctgctggccggtgcaggtgttggctcatggctcctagtgctgtatctgtgtcctgctgcctctcagcccatttccgggaccttgcaggatgaggagataactttgagctgctcagaggccagcgctgaggaagctctgctccctgcacttcccaaaacacctgcacttcccaaaacagtatctttcagaataaacagcgaagacttcttgctggaagcgcaagtgagggatcagccacgctggctcctggtctgccatgagggctggagccccgccctggggctgcagatctgctggagccttgggcatctcagactcactcaccacaagggagtaaacctcactgacatcaaactcaacagttcccaggagtttgctcagctctctcctagactgggaggcttcctggaggaggcgtggcagcccagtaggactactgaggctgttaggaacaactgcacttctggtcaagttgtttccctcagatgctctgagtgtggagcgaggcccctggcttcccggatagttggtgggcagtctgtggctcctgggcgctggccgtggcaggccagcgtggccctgggcttccggcacacgtgtgggggctctgtgctagcgccacgctgggtggtgactgctgcacattgtatgcacagtttcaggctggcccgcctgtccagctggcgggttcatgcggggctggtcagccacagtgccgtcaggccccaccaaggggctctggtggagaggattatcccacaccccctctacagtgcccagaatcatgactacgacgtcgccctcctgaggctccagaccgctctcaacttctcagacactgtgggcgctgtgtgcctgccggccaaggaacagcattttccgaagggctcgcggtgctgggtgtctggctggggccacacccaccctagccatacttacagctcggatatgctccaggacacggtggtgcccttgctcagcactcagctctgcaacagctcttgcgtgtacagcggagccctcaccccccgcatgctttgcgctggctacctggacggaagggctgatgcatgccagggagatagcgggggccccctagtgtgcccagatggggacacatggcgcctagtgggggtggtcagctgggggcgtggctgcgcagagcccaatcacccaggtgtctacgccaaggtagctgagtttctggactggatccatgacactgctcaggtgagtgtgggggcaggagtagggcagggagatttctaaaggacctgccctcgaatgcaaggaaccttaccccttaggcccgggccctgctggggactggggagggtgctaggacatattccccagagtgagtggaggaagaagtgaagcttaaacatggaatccattggatttctatcagtttaaggatgaactgggtaagagtatgcctgagtttgtatcccagatctaccatttcctgtgtcgacctttggcaaatttctaactttgttaaaccttaatttcctgataataaccatgatggctacttatatgctattgttatatgctattaaataagacccgtacaatgcc

SEQ ID NO: 72 - protein, 513 aa, Homo sapiens; identical to SEQ ID NO: 54

SEQ ID NO: 73 - DNA, 1880 bp, Homo sapiens
  CDS (24)..(1562)
ttacaacagtgccactgacccctatgagcctgatgctggatgaccaaccccctatggaggcccagtatgcagaggagggcccaggacctgggatcttcagagcagagcctggagaccagcagcatcccagtaggccagactgggccataggggaaatgacagggtggggacagtggagggcaatcatcctacattccccggatcctccttggggtcagccccacatgattgatgtttctcaggcagtgtgctggcgttccatgcgacgtggctgtgcagtgctgggagccctggggctgctggccggtgcaggtgttggctcatggctcctagtgctgtatctgtgtcctgctgcctctcagcccatttccgggaccttgcaggatgaggagataactttgagctgctcagaggccagcgctgaggaagctctgctccctgcacttcccaaaacacctgcacttcccaaaacagtatctttcagaataaacagcgaagacttcttgctggaagcgcaagtgagggatcagccacgctggctcctggtctgccatgagggctggagccccgccctggggctgcagatctgctggagccttgggcatctcagactcactcaccacaagggagtaaacctcactgacatcaaactcaacagttcccaggagtttgctcagctctctcctagactgggaggcttcctggaggaggcgtggcagcccagtaggactactgaggctgttaggaacaactgcacttctggtcaagttgtttccctcagatgctctgagtgtggagcgaggcccctggcttcccggatagttggtgggcagtctgtggctcctgggcgctggccgtggcaggccagcgtggccctgggcttccggcacacgtgtgggggctctgtgctagcgccacgctgggtggtgactgctgcacattgtatgcacagtttcaggctggcccgcctgtccagctggcgggttcatgcggggctggtcagccacagtgccgtcaggccccaccaaggggctctggtggagaggattatcccacaccccctctacagtgcccagaatcatgactacgacgtcgccctcctgaggctccagaccgctctcaacttctcagacactgtgggcgctgtgtgcctgccggccaaggaacagcattttccgaagggctcgcggtgctgggtgtctggctggggccacacccaccctagccatacttacagctcggatatgctccaggacacggtggtgcccctgttcagcactcagctctgcaacagctcttgcgtgtacagcggagccctcaccccccgcatgctttgcgctggctacctggacggaagggctgatgcatgccagggagatagcgggggccccctagtgtgcccagatggggacacatggcgcctagtgggggtggtcagctgggggcgtggctgcgcagagcccaatcacccaggtgtctacgccaaggtagctgagtttctggactggatccatgacactgctcaggtgagtgtgggggcaggagtagggcagggagatttctaaaggacctgccctcgaatgcaaggaaccttaccccttaggcccgggccctgctggggactggggagggtgctaggacatattccccagagtgagtggaggaagaagtgaagcttaaacatggaatccattggatttctatcagtttaaggatgaactgggtaagagtatgcctgagtttgtatcccagatctaccatttcctgtgtcgacctttggcaaatttctaactttgttaaaccttaatttcctgataataaccatgatggctacttatatgctattgttatatgctattaaataagacccgtacaatgcc

SEQ ID NO: 74 - protein, 513 aa, Homo sapiens
MSLMLDDQPPMEAQYAEEGPGPGIFRAEPGDQQHPSRPDWAIGEMTGWGQWRAIILHSPDPPWGQPHMIDVSQAVCWRSMRRGCAVLGALGLLAGAGVGSWLLVLYLCPAASQPISGTLQDEEITLSCSEASAEEALLPALPKTPALPKTVSFRINSEDFLLEAQVRDQPRWLLVCHEGWSPALGLQICWSLGHLRLTHHKGVNLTDIKLNSSQEFAQLSPRLGGFLEEAWQPSRTTEAVRNNCTSGQVVSLRCSECGARPLASRIVGGQSVAPGRWPWQASVALGFRHTCGGSVLAPRWVVTAAHCMHSFRLARLSSWRVHAGLVSHSAVRPHQGALVERIIPHPLYSAQNHDYDVALLRLQTALNFSDTVGAVCLPAKEQHFPKGSRCWVSGWGHTHPSHTYSSDMLQDTVVPLFSTQLCNSSCVYSGALTPRMLCAGYLDGRADACQGDSGGPLVCPDGDTWRLVGVVSWGRGCAEPNHPGVYAKVAEFLDWIHDTAQVSVGAGVGQGDF

SEQ ID NO: 75 - DNA, 941 bp, Homo sapiens
  CDS (4)..(930)
gacatggaacaggataatacaacattgctgacagagtttgttctcacaggacttacatatcagccagagtggaaaatgcccctgttcttggtgttcttggtgatctatctcatcactattgtgtggaaccttggtctgattgctcttatctggaatgacccacaacttcacatccccatgtacttttttcttgggagtttagcctttgttgatgcttggatatcttccacagtaactcccaaaatgttggttaatttcttggccaaaaacaggatgatatctctgtctgaatgcatgattcaatttttttcctttgcatttggtggaactacagaatgttttctcttggcaacaatggcatatgatcgctatgtagccatatgcaaacctttactatatccagtgattatgaacaattcactatgcatacggctgttagccttctcatttttaggtggcttcctccatgccttaattcatgaagtccttatattcagattaaccttctgcaattctaacataatacatcatttttactgtgatattataccactgtttatgatttcctgtactgacccttctattaattttctaatggtttttattttgtctggctcaattcaggtattcaccattgtgacagttcttaattcttacacatttgctcttttcacaatcctaaaaaagaagtctgttagaggcgtaaggaaagccttttccacctgtggagcccatctcttatctgtctctttatattatggcccacttatcttcatgtatttgcgccctgcatctccacaagcagatgaccaggatatgatagactctgtcttttatacaatcataattcctttgctaaatcccattatctacagtctgagaaataaacaagtaatagattcattcacaaaaatggtaaaaagaaatgtttagatttcata

SEQ ID NO: 76 - protein, 309 aa, Homo sapiens
MEQDNTTLLTEFVLTGLTYQPEWKMPLFLVFLVIYLITIVWNLGLIALIWNDPQLHIPMYFFLGSLAFVDAWISSTVTPKMLVNFLAKNRMISLSECMIQFFSFAFGGTTECFLLATMAYDRYVAICKPLLYPVIMNNSLCIRLLAFSFLGGFLHALIHEVLIFRLTFCNSNIIHHFYCDIIPLFMISCTDPSINFLMVFILSGSIQVFTIVTVLNSYTFALFTILKKKSVRGVRKAFSTCGAHLLSVSLYYGPLIFMYLRPASPQADDQDMIDSVFYTIIIPLLNPIIYSLRNKQVIDSFTKMVKRNV

SEQ ID NO: 77 - DNA, 941 bp, Homo sapiens
  CDS (4)..(930)
gacatggaacaggataatacaacattgctgacagagtttgttctcacaggacttacatatcagccagagtggaaaatgcccctgttcttggtgttcttggtgatctatctcatcactattgtgtggaaccttggtctgattgctcttatctggaatgacccacaacttcacatccccatgtacttttttcttgggagtttagcctttgttgatgcttggatatcttccacagtaactcccaaaatgttggttaatttcttggccaaaaacaggatgatatctctgtctgaatgcatgattcaatttttttcctttgcatttggtggaactacagaatgttttctcttggcaacaatggcatatgatcgctatgtagccatatgcaaacctttactatatccagtgattatgaacaattcactatgcatacggctgttagccttctcatttttaggtggcttcctccatgccttaattcatgaagtccttatattcagattaaccttctgcaattctaacataatacatcatttttactgtgatattataccactgtttatgatttcctgtactgacccttctattaattttctaatggtttttattttgtctggctcaattcaggtattcaccattgtgacagttcttaattcttacacatttgctcttttcacaatcctaaaaaagaagtctgttagaggcgtaaggaaagccttttccacctgtggagcccatctcttatctgtctctttatattatggcccacttatcttcatgtatttgcgccctgcatctccacaagcagatgaccaagatatgatagactctgtcttttatacaatcataattcctttgctaaatcccattatctacagtctgagaaataaacaagtaatagattcattcacaaaaatggtaaaaagaaatgtttagatttcata

SEQ ID NO: 78 - protein, 309 aa, Homo sapiens; identical to SEQ ID NO: 76

SEQ ID NO: 79 - DNA, 2680 bp, Homo sapiens
  CDS (873)..(2483)
gggcaggtgttaagcgataaaggggggcagaacaagtcttttatccggccatttaattggtcaccttaagaaagaatcctatcttcccaccgcagctgagaagacacttctaagaggtacagctaaaaggtggaggactgatagacaacttagaggttggtttcgggaacgataaaacaagtaacgggctgcccggcctgcgccgcggagtcccgaggagcctgcgctgtgctcctctcgcggtgtctcgtcatctccgggaagactcggcgcctgggtccgcgctctctgggtaagctttccgggaagctttcccgggagctcgctggtcctggccccagaagcctgcggacccgcccagggaggataagcagctgaaagaccgcgcggtgccgctccgaggccccgggacgtgggcccatggtcggcctggcgccacctttccgggggaagccacgcgcaccaggcatcgcacgcggctctgcacccgcgccgccggacctgaaacccggcggagggcacacggggctgccgctgcgggccccggaccaacccatgcttactccggagcctgtaccggcgccgacgggtcggacctccctgcgcggtgtcgcccagcgggttcgtgcgaaaggcggggccgactacacgcggtgccgcgccctgagaccgtttatctgcagtcaacgcagcctcccggctcagcctgggaagatgcgcgaatcgggaaccccagagcgcggtggctagaccgggctccgccgcctcccccacagcccctttcctaatcgttcagacggagcctggtcgacttcgccggagactgccagatctcgttcctcttccctgtgtcatcttcttaattataaataatgggggatgaagataaaagaattacatatgaagattcagaaccatccacaggaatgaattacacgccctccatgcatcaagaagcacaggaggagacagttatgaagctcaaaggtatagatgcaaatgaaccaacagaaggaagtattcttttgaaaagcagtgaaaaaaagctacaagaaacaccaactgaagcaaatcacgtacaaagactgagacaaatgctggcttgccctccacatggtttactggacagggtcataacaaatgttaccatcattgttcttctgtgggctgtagtttggtcaattactggcagtgaatgtcttcctggaggaaacctatttggaattataatcctattctattgtgccatcattggtggtaaacttttggggcttattaagttacctacattgcctccactgccttctcttcttggcatgctgcttgcagggtttctcatcagaaatatcccagtcatcaacgataatgtgcagatcaagcacaagtggtcttcctctttgagaagcatagccctgtctatcattctggttcgtgctggccttggtctggattcaaaggccctgaagaagttaaagggcgtttgtgtaagactgtccatgggtccctgtattgtggaggcgtgcacatctgctcttcttgcccattacctgctgggtttaccatggcaatggggatttatactgggttttgttttaggtgctgtatctccagctgttgtggtgccttcaatgctccttttgcagggaggaggctatggtgttgagaagggtgtcccaaccttgctcatggcagctggcagcttcgatgacattctggccatcactggcttcaacacatgcttgggcatagccttttccacaggctctactgtctttaatgtcctcagaggagttttggaggtggtaattggtgtggcaactggatctgttcttggatttttcattcagtactttccaagccgtgaccaggacaaacttgtgtgtaagagaacattccttgtgttggggttgtctgtgctagctgtgttcagcagtgtgcattttggtttccctggatcaggaggactgtgcacgttggtcatggctttccttgcaggcatgggatggaccagcgaaaaggcagaggttgaaaagataattgcagttgcctgggacatttttcagccccttctttttggactaattggagcagaggtatctattgcatctctcagaccagaaactgtaggcctttgtgttgccaccgtaggcattgcagtattgatacgaattttgactacatttctgatggtgtgttttgctggttttaacttaaaagaaaagatatttatttcttttgcatggcttccaaaggccacagttcaggctgcaataggatctgtggctttggacacagcaaggtcacatggagagaaacaattagaagactatggaatggatgtgttgacagtggcatttttgtccatcctcatcacagccccaattggaagtctgcttattggtttactgggccccaggcttctgcagaaagttgaacatcaaaataaagatgaagaagttcaaggagagacttctgtgcaagtttaggaagcgcggattctattactggaaactttgggactgaaaggccaaagcttctgggcccaccatcaacgcagctccgctttcatttctttcacatacaactttccacataagatttcatgcggaaaaaaaaaaaaaactcacaaaggttttatactgataacagtatattaagtgtttactttgtacacagcgtc

SEQ ID NO: 80 - protein, 537 aa, Homo sapiens
MGDEDKRITYEDSEPSTGMNYTPSMHQEAQEETVMKLKGIDANEPTEGSILLKSSEKKLQETPTEANHVQRLRQMLACPPHGLLDRVITNVTIIVLLWAVVWSITGSECLPGGNLFGIIILFYCAIIGGKLLGLIKLPTLPPLPSLLGMLLAGFLIRNIPVINDNVQIKHKWSSSLRSIALSIILVRAGLGLDSKALKKLKGVCVRLSMGPCIVEACTSALLAHYLLGLPWQWGFILGFVLGAVSPAVVVPSMLLLQGGGYGVEKGVPTLLMAAGSFDDILAITGFNTCLGIAFSTGSTVFNVLRGVLEVVIGVATGSVLGFFIQYFPSRDQDKLVCKRTFLVLGLSVLAVFSSVHFGFPGSGGLCTLVMAFLAGMGWTSEKAEVEKIIAVAWDIFQPLLFGLIGAEVSIASLRPETVGLCVATVGIAVLIRILTTFLMVCFAGFNLKEKIFISFAWLPKATVQAAIGSVALDTARSHGEKQLEDYGMDVLTVAFLSILITAPIGSLLIGLLGPRLLQKVEHQNKDEEVQGETSVQV

SEQ ID NO: 81 - DNA, 2285 bp, Homo sapiens
  CDS (873)..(2234)
gggcaggtgttaagcgataaaggggggcagaacaagtcttttatccggccatttaattggtcaccttaagaaagaatcctatcttcccaccgcagctgagaagacacttctaagaggtacagctaaaaggtggaggactgatagacaacttagaggttggtttcgggaacgataaaacaagtaacgggctgcccggcctgcgccgcggagtcccgaggagcctgcgctgtgctcctctcgcggtgtctcgtcatctccgggaagactcggcgcctgggtccgcgctctctgggtaagctttccgggaagctttcccgggagctcgctggtcctggccccagaagcctgcggacccgcccagggaggataagcagctgaaagaccgcgcggtgccgctccgaggccccgggacgtgggcccatggtcggcctggcgccacctttccgggggaagccacgcgcaccaggcatcgcacgcggctctgcacccgcgccgccggacctgaaacccggcggagggcacacggggctgccgctgcgggccccggaccaacccatgcttactccggagcctgtaccggcgccgacgggtcggacctccctgcgcggtgtcgcccagcgggttcgtgcgaaaggcggggccgactacacgcggtgccgcgccctgagaccgtttatctgcagtcaacgcagcctcccggctcagcctgggaagatgcgcgaatcgggaaccccagagcgcggtggctagaccgggctccgccgcctcccccacagcccctttcctaatcgttcagacggagcctggtcgacttcgccggagactgccagatctcgttcctcttccctgtgtcatcttcttaattataaataatgggggatgaagataaaagaattacatatgaagattcagaaccatccacaggaatgaattacacgccctccatgcatcaagaagcacaggaggagacagttatgaagctcaaaggtatagatgcaaatgaaccaacagaaggaagtattcttttgaaaagcagtgaaaaaaagctacaagaaacaccaactgaagcaaatcacgtacaaagactgagacaaatgctggcttgccctccacatggtttactggacagggtcataacaaatgttaccatcattgttcttctgtgggctgtagtttggtcaattactggcagtgaatgtcttcctggaggaaacctatttggaattataatcctattctattgtgccatcattggtggtaaacttttggggcttattaagttacctacattgcctccactgccttctcttcttggcatgctgcttgcagggtttctcatcagaaatatcccagtcatcaacgataatgtgcagatcaagcacaagtggtcttcctctttgagaagcatagccctgtctatcattctggttcgtgctggccttggtctggattcaaaggccctgaagaagttaaagggcgtttgtgtaagactgtccatgggtccctgtattgtggaggcgtgcacatctgctcttcttgcccattacctgctgggtttaccatggcaatggggatttatactgggttttgttttaggtgctgtatctccagctgttgtggtgccttcaatgctccttttgcagggaggaggctatggtgttgagaagggtgtcccaaccttgctcatggcagctggcagcttcgatgacattctggccatcactggcttcaacacatgcttgggcatagccttttccacaggctctactgtctttaatgtcctcagaggagttttggaggtggtaattggtgtggcaactggatctgttcttggatttttcattcagtactttccaagccgtgaccaggacaaacttgtgtgtaagagaacattccttgtgttggggttgtctgtgctagctgtgttcagcagtgtgcattttggtttccctggatcaggaggactgtgcacgttggtcatggctttccttgcaggcatgggatggaccagcgaaaaggcagaggttgaaaagataattgcagttgcctgggacatttttcagccccttctttttggactaattggagcagaggtatctattgcatctctcagaccagaaactgtaggaagcgcggattctattactggaaactttgggactgaaaggccaaagcttctgggcccaccatcaacgcagctccgctttcatttctttcacatacaactttccacataagatttcatgcggaaaaaaaaaaaaaactcacaaaggttttatactgat

SEQ ID NO: 82 - protein, 454 aa, Homo sapiens
MGDEDKRITYEDSEPSTGMNYTPSMHQEAQEETVMKLKGIDANEPTEGSILLKSSEKKLQETPTEANHVQRLRQMLACPPHGLLDRVITNVTIIVLLWAVVWSITGSECLPGGNLFGIIILFYCAIIGGKLLGLIKLPTLPPLPSLLGMLLAGFLIRNIPVINDNVQIKHKWSSSLRSIALSIILVRAGLGLDSKALKKLKGVCVRLSMGPCIVEACTSALLAHYLLGLPWQWGFILGFVLGAVSPAVVVPSMLLLQGGGYGVEKGVPTLLMAAGSFDDILAITGFNTCLGIAFSTGSTVFNVLRGVLEVVIGVATGSVLGFFIQYFPSRDQDKLVCKRTFLVLGLSVLAVFSSVHFGFPGSGGLCTLVMAFLAGMGWTSEKAEVEKIIAVAWDIFQPLLFGLIGAEVSIASLRPETVGSADSITGNFGTERPKLLGPPSTQLRFHFFHIQLST

SEQ ID NO: 83 - DNA, 2474 bp, Homo sapiens
  CDS (5)..(2269)
aaaaatgaaaaaacagaggaaaattctatggaggaaaggaatccacttagccttttctgagaaatggaatactgggtttggaggctttaagaagttttattttcaccaacacttgtgcattctgaaagctaagctgggaaggccagttacttggaatagacagttgagacatttccagggtagaaagaaagctcttcaaatccagaaaacgtggatcaaggatgaacccctttgtgctaagaccaagttcaatgtggctactcaaaatgttagtactttgtcctctaaagtgaaaagaaaggacgctaaacacttcatttcctcctcaaagactctcctgagactccaagcagagaagctgttgtcatcagcaaagaattctgaccatgaatactgcagagagaaaaatctcttgaaggcagttactgactttccatcaaatagtgctttaggtcaggccaatggtcacagacctaggacagacccacaaccttctgactttcccatgaagttcaatggggagagccaaagtccaggtgagagtggcacgattgtggtcaccttgaacaaccataagagaaagggcttttgttacggctgctgccaagggccggagcaccacaggaatgggggacccttgattccaaaaaagttccaacttaaccaacatagaaggataaaattatctcctcttatgatgtatgagaaattatccatgattagatttcggtacaggattctcagatcccagcacttcagaaccaaaagcaaggtttgcaagctaagaaaagcccagcgaagctgggtacagaaagtcactggggaccatcaagagacccgtagggagaacggtgagggtggcagttgcagcccatttccttccccagaacctaaagacccttcttgtcggcatcagccgtactttccagatatggacagcagtgctgtggtgaaggggacgaactctcatgtgcctgattgccacactaaaggaagctctttcttgggcaaggagcttagtttagacgaagcattccctgaccaacagaatggcagtgccacaaacgcctgggaccagtcatcctgttcttctcctaagtgggagtgtacagagctgattcatgacatccccttaccagaacatcgttctaataccatgttcatttcagaaactgaaagagaaattatgactctgggtcaggaaaatcagacaagttctgtcagtgatgacagagtaaaactgtcagtgtctggagcagatacatctgtgagtagcgtagatgggcctgtgtcccaaaaggctgttcaaaatgagaactcataccagatggaggaggatggatctctcaagcagagcattcttagttctgagttgctggaccacccttactgtaaaagtccactggaggctcccttggtgtgcagtggactcaaactagaaaatcaagtaggaggtggaaagaacagtcagaaagcctctccagtggatgatgaacagctgtcagtctgtctttctggattcctagatgaggttatgaagaagtatggcagtttggttccactcagtgaaaaagaagtccttggaagattaaaagatgtctttaatgaagacttttctaatagaaaaccatttatcaatagggaaataacaaactatcgggccagacatcaaaaatgtaacttccgtatcttctataataaacacatgctggatatggacgacctggcgactctggatggtcagaactggctgaatgaccaggtcattaatatgtatggtgagctgataatggatgcagtcccagacaaagttcacttcttcaacagcttttttcatagacagctggtaaccaaaggatataatggagtaaaaagatggactaaaaaggtggatttgtttaaaaagagtcttctgttgattcctattcacctggaagtccactggtctctcattactgtgacactctctaatcgaattatttcattttatgattcccaaggcattcattttaagttttgtgtagagaatataagaaagtatttgctgactgaagccagagaaaaaaatagacctgaatttcttcagggttggcagactgctgttacgaagtgtattccacaacagaaaaacgacagtgactgtggagtctttgtgctccagtactgcaagtgcctcgccttagagcagcctttccagttttcacaagaagacatgccccgagtgcggaagaggatttacaaggagctatgtgagtgccggctcatggactgaaactcagcagggactctgggaagtctgaccaagttggagcagatggtttgttacttgaatctccaaacacttagttgaatttttacagatatttcagatcagtggtgttgggccactattgttacctcaaatttattttttgcccttattcatttctccagctaccatgtactattgtttaatgttcagtttggtttcaaaa

SEQ ID NO: 84 - protein, 755 aa, Homo sapiens
MKKQRKILWRKGIHLAFSEKWNTGFGGFKKFYFHQHLCILKAKLGRPVTWNRQLRHFQGRKKALQIQKTWIKDEPLCAKTKFNVATQNVSTLSSKVKRKDAKHFISSSKTLLRLQAEKLLSSAKNSDHEYCREKNLLKAVTDFPSNSALGQANGHRPRTDPQPSDFPMKFNGESQSPGESGTIVVTLNNHKRKGFCYGCCQGPEHHRNGGPLIPKKFQLNQHRRIKLSPLMMYEKLSMIRFRYRILRSQHFRTKSKVCKLRKAQRSWVQKVTGDHQETRRENGEGGSCSPFPSPEPKDPSCRHQPYFPDMDSSAVVKGTNSHVPDCHTKGSSFLGKELSLDEAFPDQQNGSATNAWDQSSCSSPKWECTELIHDIPLPEHRSNTMFISETEREIMTLGQENQTSSVSDDRVKLSVSGADTSVSSVDGPVSQKAVQNENSYQMEEDGSLKQSILSSELLDHPYCKSPLEAPLVCSGLKLENQVGGGKNSQKASPVDDEQLSVCLSGFLDEVMKKYGSLVPLSEKEVLGRLKDVFNEDFSNRKPFINREITNYRARHQKCNFRIFYNKHMLDMDDLATLDGQNWLNDQVINMYGELIMDAVPDKVHFFNSFFHRQLVTKGYNGVKRWTKKVDLFKKSLLLIPIHLEVHWSLITVTLSNRIISFYDSQGIHFKFCVENIRKYLLTEAREKNRPEFLQGWQTAVTKCIPQQKNDSDCGVFVLQYCKCLALEQPFQFSQEDMPRVRKRIYKELCECRLMD

SEQ ID NO: 85 - DNA, 3120 bp, Homo sapiens
  CDS (256)..(2718)
taacctgtctcacgacggtctaaacccaggcagcctcggccgccgggcaagtagctccgagcggctgcttcccggttgcctcgaagaagacagggggcgccgcgctccgcttgctccgcgcctgagccatgcccagcagccctgtgtaaccaccgagtcccggccggagccgaccgacccagtgtgcgccgtctttcggccgagctgagctttcgtgcacgcaactccctctgccccagccggccccgcgccaccatgccccgggcgactgcacttggggccctggtgtcactgctgctgctgctgccgctgcctcgcggcgccgggggactcggggagcgcccggacgccaccgcagactactcagagctggacggcgaggagggcacggagcagcagctggagcattaccacgacccttgcaaagccgctgtcttttggggagacattgccttagatgaagatgacttgaagctgtttcacattgacaaagccagagactggaccaagcagacagtgggggcaacaggacacagcacaggtgggcttgaagagcaggcatctgagagcagcccagacaccacagccatggacactggcaccaaggaagctggaaaggatggccgggagaataccacactcctgcacagccctgggaccttgcatgccgcagccaagaccttctctccccgggtccgaagagccacaacctcaaggacagagaggatatggcctggaggagtcatcccctacgtcattggagggaacttcactgggagccagagggccatttttaagcaggccatgagacactgggagaagcacacctgtgtgaccttcatagaaaggacggatgaggaaagctttattgtattcagttacagaacctgtggctgttgctcctatgttgggcgccgaggaggaggcccacaggccatatccattgggaagaactgtgacaagtttggcattgtggctcacgagctgggccatgtggttgggttttggcatgaacacacccggccagacagagaccaacatgtcaccatcatcagggaaaacatccagccaggtcaggagtataatttcttaaaaatggaagctggggaagtgagctctctgggagagacatacgactttgacagcatcatgcactacgcccggaacaccttctcaagaggagttttcttagacaccatccttccccgtcaagatgacaatggcgtcaggccaaccattggccagcgcgtgcggctcagtcagggagacatagctcaagcccggaagctgtacaaatgcccagcgtgtggggagaccctgcaggacacaacgggaaacttttctgcacctggtttcccaaatgggtacccatcttactcccactgcgtctggaggatctcggtcaccccaggggaaaagatcgtattaaacttcacatccatggatttgtttaaaagccgactgtgctggtatgattacgtggaggtccgggatggttactggagaaaagccccccttttgggcaggttttgtggcgataagatcccggagcccctcgtctccacggacagccggctctgggtggagttccgcagcagcagcaacatcttgggcaagggcttctttgcagcgtacgaagctacctgcgggggagacatgaacaaagatgccggtcagattcaatctcccaactatccggatgactacagaccttccaaggaatgtgtctggaggattacggtttcggaggggtttcacgtgggacttaccttccaagcttttgagattgaaaggcacgacagctgtgcatatgactacctggaagtccgggatggccccacggaagagagtgccctgatcggccacttttgtggctatgagaagccggaggatgtgaaatcgagctccaacagactgtggatgaagtttgtgtccgatggctctatcaataaagcgggctttgcagccaattttttcaaggaggtggatgagtgttcctggccagatcacggcgggtgcgaacatcgctgtgtgaacacgctgggcagctacaagtgtgcctgtgaccctggctacgagctggccgccgataagaagatgtgtgaagtggcctgtggcggtttcattaccaagctgaatggaaccatcaccagccctgggtggccgaaggagtatcccacaaacaaaaactgtgtctggcaggtggtggcccccgctcagtaccggatctcccttcagtttgaagtgtttgaactggaaggcaatgacgtctgtaagtacgactttgtagaggtgcgcagcggcctgtcccccgacgccaagctgcacggcaggttctgcggctctgagacgccggaagtcatcacctcgcagagcaacaacatgcgcgtggagttcaagtccgacaacaccgtctccaagcgcggcttcagggcccacttcttctcagataaggacgagtgtgccaaggacaacggcgggtgtcagcatgagtgcgtcaacaccttcgggagctacctgtgcaggtgcagaaacggctactggctccacgagaatgggcatgactgcaaagaggctggctgtgcacacaagatcagcagtgtggaggggaccctggcgagccccaactggcctgacaaataccccagccggagggagtgtacctggaacatctcttcgactgcaggccacagagtaaaactcagtgcggggtcaggctgaaggctgaagtgcagaccaaagagctctattcccacgcccagtttggggacaacaactacccgagcgaggcccgctgtgactgggtgatcgtggcagaggacggctacggcgtggagctgacattccggacctttgaggttgaggaggaggccgactgcggctacgactacatggaagcctacgacggctacgacagctcagcgcccaggctcggccgcttctgtggctctgggccattagaagaaatctactctgcaggtgattccctgatgattcgattccgcacagatgacaccatcaacaagaaaggctttcatgcccgatacaccagcaccaagttccaggatgccctgcacatgaagaaatagtgctgatgttcttgaaagacagaaactgaga

SEQ ID NO: 86 - protein, 821 aa, Homo sapiens
MPRATALGALVSLLLLLPLPRGAGGLGERPDATADYSELDGEEGTEQQLEHYHDPCKAAVFWGDIALDEDDLKLFHIDKARDWTKQTVGATGHSTGGLEEQASESSPDTTAMDTGTKEAGKDGRENTTLLHSPGTLHAAAKTFSPRVRRATTSRTERIWPGGVIPYVIGGNFTGSQRAIFKQAMRHWEKHTCVTFIERTDEESFIVFSYRTCGCCSYVGRRGGGPQAISIGKNCDKFGIVAHELGHVVGFWHEHTRPDRDQHVTIIRENIQPGQEYNFLKMEAGEVSSLGETYDFDSIMHYARNTFSRGVFLDTILPRQDDNGVRPTIGQRVRLSQGDIAQARKLYKCPACGETLQDTTGNFSAPGFPNGYPSYSHCVWRISVTPGEKIVLNFTSMDLFKSRLCWYDYVEVRDGYWRKAPLLGRFCGDKIPEPLVSTDSRLWVEFRSSSNILGKGFFAAYEATCGGDMNKDAGQIQSPNYPDDYRPSKECVWRITVSEGFHVGLTFQAFEIERHDSCAYDYLEVRDGPTEESALIGHFCGYEKPEDVKSSSNRLWMKFVSDGSINKAGFAANFFKEVDECSWPDHGGCEHRCVNTLGSYKCACDPGYELAADKKMCEVACGGFITKLNGTITSPGWPKEYPTNKNCVWQVVAPAQYRISLQFEVFELEGNDVCKYDFVEVRSGLSPDAKLHGRFCGSETPEVITSQSNNMRVEFKSDNTVSKRGFRAHFFSDKDECAKDNGGCQHECVNTFGSYLCRCRNGYWLHENGHDCKEAGCAHKISSVEGTLASPNWPDKYPSRRECTWNISSTAGHRVKLSAGSG

SEQ ID NO: 87 - DNA, 3350 bp, Homo sapiens
  CDS (365)..(3340)
cgcccattggctcctcagccaagcacgtacaccaaatgtctgaacctgcggttcctctcgtactgagcaggattaccatggcaacaacacatcatcagtagggtaaaactaacctgtctcacgacggtctaaacccaggcagcctcggccgccgggcaagtagctccgagcggctgcttcccggttgcctcgaagaagacagggggcgccgcgctccgcttgctccgcgcctgagccatgcccagcagccctgtgtaaccaccgagtcccggccggagccgaccgacccagtgtgcgccgtctttcggccgagctgagctttcgtgcacgcaactccctctgccccagccggccccgcgccaccatgccccgggcgactgcacttggggccctggtgtcactgctgctgctgctgccgctgcctcgcggcgccgggggactcggggagcgcccggacgccaccgcagactactcagagctggacggcgaggagggcacggagcagcagctggagcattaccacgacccttgcaaagccgctgtcttttggggagacattgccttagatgaagatgacttgaagctgtttcacattgacaaagccagagactggaccaagcagacagtgggggcaacaggacacagcacaggtgggcttgaagagcaggcatctgagagcagcccagacaccacagccatggacactggcaccaaggaagctggaaaggatggccgggagaataccacactcctgcacagccctgggaccttgcatgccgcagccaagaccttctctccccgggtccgaagagccacaacctcaaggacagagaggatatggcctggaggagtcatcccctacgtcattggagggaacttcactgggagccagagggccatttttaagcaggccatgagacactgggagaagcacacctgtgtgaccttcatagaaaggacggatgaggaaagctttattgtattcagttacagaacctgtggctgttgctcctatgttgggcgccgaggaggaggcccacaggccatatccattgggaagaactgtgacaagtttggcattgtggctcacgagctgggccatgtggttgggttttggcatgaacacacccggccagacagagaccaacatgtcaccatcatcagggaaaacatccagccaggtcaggagtataatttcttaaaaatggaagctggggaagtgagctctctgggagagacatacgactttgacagcatcatgcactacgcccggaacaccttctcaagaggagttttcttagacaccatccttccccgtcaagatgacaatggcgtcaggccaaccattggccagcgcgtgcggctcagtcagggagacatagctcaagcccggaagctgtacaaatgcccagcgtgtggggagaccctgcaggacacaacgggaaacttttctgcacctggtttcccaaatgggtacccatcttactcccactgcgtctggaggatctcggtcaccccaggggaaaagatcgtattaaacttcacatccatggatttgtttaaaagccgactgtgctggtatgattacgtggaggtccgggatggttactggagaaaagccccccttttgggcaggttttgtggcgataagatcccggagcccctcgtctccacggacagccggctctgggtggagttccgcagcagcagcaacatcttgggcaagggcttctttgcagcgtacgaagctacctgcgggggagacatgaacaaagatgccggtcagattcaatctcccaactatccggatgactacagaccttccaaggaatgtgtctggaggattacggtttcagaggggtttcacgtgggacttaccttccaagcttttgagattgaaaggcacgacagctgtgcatatgactacctggaagtccgggatggccccacggaagagagtgccctgatcggccacttttgtggctatgagaagccggaggatgtgaaatcgagctccaacagactgtggatgaagtttgtgtccgatggctctatcaataaagcgggctttgcagccaattttttcaaggaggtggatgagtgttcctggccagatcacggcgggtgcgaacatcgctgtgtgaacacgctgggcagctacaagtgtgcctgtgaccctggctacgagctggccgccgataagaagatgtgtgaagtggcctgtggcggtttcattaccaagctgaatggaaccatcaccagccctgggtggccgaaggagtatcccacaaacaaaaactgtgtctggcaggtggtggcccccactcagtaccggatctcccttcagtttgaagtgtttgaactggaaggcaatgacgtctgtaagtacgactttgtagaggtgcgcagcggcctgtcccccgacgccaagctgcacggcaggttctgcggctctgagacgccggaagtcatcacctcgcagagcaacaacatgcgcgtggagttcaagtccgacaacaccgtctccaagcgcggcttcagggcccacttcttctcagataaggacgagtgtgccaaggacaacggcgggtgtcagcatgagtgcgtcaacaccttcgggagctacctgtgcaggtgcagaaacggctactggctccacgagaatgggcatgactgcaaagaggctggctgtgcacacaagatcagcagtgtggaggggaccctggcgagccccaactggcctgacaaataccccagccggagggagtgtacctggaacatctcttcgactgcaggccacagagtgaaactcacctttaatgagtttgagatcgagcagcaccaggaatgtgcctatgaccacctggaaatgtatgacgggccggacagcctggcccccattctgggccgtttctgcggcagcaagaaaccagaccccacggtggcttccggcagcaagtgcgggggcaggctgaaggctgaagtgcagaccaaagagctctattcccacgcccagtttggggacaacaactacccgagcgaggcccgctgtgactgggtgatcgtggcagaggacggctacggcgtggagctgacattccggacctttgaggttgaggaggaggccgactgcggctacgactacatggaagcctacgacggctacgacagctcagcgcccaggctcggccgcttctgtggctctgggccattagaagaaatctactctgcaggtgattccctgatgattcgattccgcacagatgacaccatcaacaagaaaggctttcatgcccgatacaccagcaccaagttccaggatggcctgcacatgaagaaatagtgctgat

SEQ ID NO: 88 - protein, 992 aa, Homo sapiens
MPRATALGALVSLLLLLPLPRGAGGLGERPDATADYSELDGEEGTEQQLEHYHDPCKAAVFWGDIALDEDDLKLFHIDKARDWTKQTVGATGHSTGGLEEQASESSPDTTAMDTGTKEAGKDGRENTTLLHSPGTLHAAAKTFSPRVRRATTSRTERIWPGGVIPYVIGGNFTGSQRAIFKQAMRHWEKHTCVTFIERTDEESFIVFSYRTCGCCSYVGRRGGGPQAISIGKNCDKFGIVAHELGHVVGFWHEHTRPDRDQHVTIIRENIQPGQEYNFLKMEAGEVSSLGETYDFDSIMHYARNTFSRGVFLDTILPRQDDNGVRPTIGQRVRLSQGDIAQARKLYKCPACGETLQDTTGNFSAPGFPNGYPSYSHCVWRISVTPGEKIVLNFTSMDLFKSRLCWYDYVEVRDGYWRKAPLLGRFCGDKIPEPLVSTDSRLWVEFRSSSNILGKGFFAAYEATCGGDMNKDAGQIQSPNYPDDYRPSKECVWRITVSEGFHVGLTFQAFEIERHDSCAYDYLEVRDGPTEESALIGHFCGYEKPEDVKSSSNRLWMKFVSDGSINKAGFAANFFKEVDECSWPDHGGCEHRCVNTLGSYKCACDPGYELAADKKMCEVACGGFITKLNGTITSPGWPKEYPTNKNCVWQVVAPTQYRISLQFEVFELEGNDVCKYDFVEVRSGLSPDAKLHGRFCGSETPEVITSQSNNMRVEFKSDNTVSKRGFRAHFFSDKDECAKDNGGCQHECVNTFGSYLCRCRNGYWLHENGHDCKEAGCAHKISSVEGTLASPNWPDKYPSRRECTWNISSTAGHRVKLTFNEFEIEQHQECAYDHLEMYDGPDSLAPILGRFCGSKKPDPTVASGSKCGGRLKAEVQTKELYSHAQFGDNNYPSEARCDWVIVAEDGYGVELTFRTFEVEEEADCGYDYMEAYDGYDSSAPRLGRFCGSGPLEEIYSAGDSLMIRFRTDDTINKKGFHARYTSTKFQDGLHMKK

SEQ ID NO: 89 - DNA, 5006 bp, Homo sapiens
  CDS (365)..(3409)
cgcccattggctcctcagccaagcacgtacaccaaatgtctgaacctgcggttcctctcgtactgagcaggattaccatggcaacaacacatcatcagtagggtaaaactaacctgtctcacgacggtctaaacccaggcagcctcggccgccgggcaagtagctccgagcggctgcttcccggttgcctcgaagaagacagggggcgccgcgctccgcttgctccgcgcctgagccatgcccagcagccctgtgtaaccaccgagtcccggccggagccgaccgacccagtgtgcgccgtctttcggccgagctgagctttcgtgcacgcaactccctctgccccagccggccccgcgccaccatgccccgggcgactgcacttggggccctggtgtcactgctgctgctgctgccgctgcctcgcggcgccgggggactcggggagcgcccggacgccaccgcagactactcagagctggacggcgaggagggcacggagcagcagctggagcattaccacgacccttgcaaagccgctgtcttttggggagacattgccttagatgaagatgacttgaagctgtttcacattgacaaagccagagactggaccaagcagacagtgggggcaacaggacacagcacaggtgggcttgaagagcaggcatctgagagcagcccagacaccacagccatggacactggcaccaaggaagctggaaaggatggccgggagaataccacactcctgcacagccctgggaccttgcatgccgcagccaagaccttctctccccgggtccgaagagccacaacctcaaggacagagaggatatggcctggaggagtcatcccctacgtcattggagggaacttcactgggagccagagggccatttttaagcaggccatgagacactgggagaagcacacctgtgtgaccttcatagaaaggacggatgaggaaagctttattgtattcagttacagaacctgtggctgttgctcctatgttgggcgccgaggaggaggcccacaggccatatccattgggaagaactgtgacaagtttggcattgtggctcacgagctgggccatgtggttgggttttggcatgaacacacccggccagacagagaccaacatgtcaccatcatcagggaaaacatccagccaggtcaggagtataatttcttaaaaatggaagctggggaagtgagctctctgggagagacatacgactttgacagcatcatgcactacgcccggaacaccttctcaagaggagttttcttagacaccatccttccccgtcaagatgacaatggcgtcaggccaaccattggccagcgcgtgcggctcagtcagggagacatagctcaagcccggaagctgtacaaatgcccagcgtgtggggagaccctgcaggacacaacgggaaacttttctgcacctggtttcccaaatgggtacccatcttactcccactgcgtctggaggatctcggtcaccccaggggaaaagatcgtattaaacttcacatccatggatttgtttaaaagccgactgtgctggtatgattacgtggaggtccgggatggttactggagaaaagccccccttttgggcaggttttgtggcgataagatcccggagcccctcgtctccacggacagccggctctgggtggagttccgcagcagcagcaacatcttgggcaagggcttctttgcagcgtacgaagctacctgcgggggagacatgaacaaagatgccggtcagattcaatctcccaactatccggatgactacagaccttccaaggaatgtgtctggaggattacggtttcggaggggtttcacgtgggacttaccttccaagcttttgagattgaaaggcacgacagctgtgcatatgactacctggaagtccgggatggccccacggaagagagtgccctgatcggccacttttgtggctatgagaagccggaggatgtgaaatcgagctccaacagactgtggatgaagtttgtgtccgatggctctatcaataaagcgggctttgcagccaattttttcaaggaggtggatgagtgttcctggccagatcacggcgggtgcgaacatcgctgtgtgaacacgctgggcagctacaagtgtgcctgtgaccctggctacgagctggccgccgataagaagatgtgtgaagtggcctgtggcggtttcattaccaagctgaatggaaccatcaccagccctgggtggccgaaggagtatcccacaaacaaaaactgtgtctggcaggtggtggcccccgctcagtaccggatctcccttcagtttgaagtgtttgaactggaaggcaatgacgtctgtaagtacgactttgtagaggtgcgcagcggcctgtcccccgacgccaagctgcacggcaggttctgcggctctgagacgccggaagtcatcacctcgcagagcaacaacatgcgcgtggagttcaagtccgacaacaccgtctccaagcgcggcttcagggcccacttcttctcagataaggacgagtgtgccaaggacaacggcgggtgtcagcatgagtgcgtcaacaccttcgggagctacctgtgcaggtgcagaaacggctactggctccacgagaatgggcatgactgcaaagaggctggctgtgcacacaagatcagcagtgtggaggggaccctggcgagccccaactggcctgacaaataccccagccggagggagtgtacctggaacatctcttcgactgcaggccacagagtgaaactcacctttaatgagtttgagatcgagcagcaccaggaatgtgcctatgaccacctggaaatgtatgacgggccggacagcctggcccccattctgggccgtttctgcggcagcaagaaaccagaccccacggtggcttccggcagcagtatgtttctcaggttttattcggatgcctcagtgcagaggaaaggcttccaggcagtgcacagcacagagtgcgggggcaggctgaaggctgaagtgcagaccaaagagctctattcccacgcccagtttggggacaacaactacccgagcgaggcccgctgtgactgggtgatcgtggcagaggacggctacggcgtggagctgacattccggacctttgaggttgaggaggaggccgactgcggctacgactacatggaagcctacgacggctacgacagctcagcgcccaggctcggccgcttctgtggctctgggccattagaagaaatctactctgcaggtgattccctgatgattcgattccgcacagatgacaccatcaacaagaaaggctttcatgcccgatacaccagcaccaagttccaggatgccctgcacatgaagaaatagtgctgatgttcttgaaagacagaaactgagaatttttttgttttgttttgtttttaacaacaatagcaccttgaaaatctgccctaaaacagtgtacagtatttttctcaaacaaaaactcagaatccagccttagaggtatatatttgaatgaaagtcttgtaagtttggccaacaaggtggagaaaaaaatgttcttttgcttctgtctgcaatgttgtcattcatgaactgttaaagtgttaaagattaggattggagtcactgaccattccggctatgcttcttcataccattctccttgttgtcccttgctcctatgtggcaaaaggtcagccttggggttggccgttcctctaatctggacttgcttgcaaaggtgccaggctgtcttctgtccatgttgggcataagggatgaaaacttggccgagactaatgtgtggcccacagctttggctggaatcattttctttctctctgccagggacatgtcaaccaagaaacctgaaaatatggatggatgtcaggactaaaaaaaggcatcacagtgagcagtgagcacagagggagtttcgagtataagaatcattgtcatgaagttaggagaccacaaagccatttctcagagtcattcactctccttgtccctttggtttccccccttccttaattgcagtgggggctaaggtatccattatgaatacagcagaacatttgctggcgagagtcctgtctgctgagaagacaatattgtggctcgtcctgatattttttcattcattgactttgagaagactccacctgtgcttggaattccatgggcttcaaagaacatttcttcttttagctttggaggcacttgccgtggcacacctggactccttgacatccaattcaaactgcatttgcaaaatgtgcaaagacctcttatgagggaccaattcaggtcccttatggggtgaacactgttgaagactggttaattataagttatgtaagaatcatcgccttgtggaacaagtcaatcagtgactagcttcctgtagccaatcaggttaaagagggcgttggtaattttgttctgatttaactagtattcaatcaccaacttgcaaacagaattcataacacttggcacttgttctagagaagtgtagaggatgatgttaacataattttagcacttcaaggtataatttaaacagtgaggtagttttgaatggcatttcattaaggcatctatgggcattatgagctaaaagctgtggtatgttagctttaaaagagtatttatgttggaataatttttaaataatgtttacataactgtaagtcctgtttggttgttgttggacgcagggcggcacatgagtgtttttggttagagccaagatagctcccatgcaccggaattcctttgggatgaatcagcatcattttaaacaaagtatatgtaaaaggtgaaaggttatattttttacagatcagaatgtggcaccagaggactgtgtctcattaaagtgattgctgggagcaaaaactagaatgatacaaagaaaggtcagagaaatgcatgggaatattttttcttt

SEQ ID NO: 90 - protein, 1015 aa, Homo sapiens
MPRATALGALVSLLLLLPLPRGAGGLGERPDATADYSELDGEEGTEQQLEHYHDPCKAAVFWGDIALDEDDLKLFHIDKARDWTKQTVGATGHSTGGLEEQASESSPDTTAMDTGTKEAGKDGRENTTLLHSPGTLHAAAKTFSPRVRRATTSRTERIWPGGVIPYVIGGNFTGSQRAIFKQAMRHWEKHTCVTFIERTDEESFIVFSYRTCGCCSYVGRRGGGPQAISIGKNCDKFGIVAHELGHVVGFWHEHTRPDRDQHVTIIRENIQPGQEYNFLKMEAGEVSSLGETYDFDSIMHYARNTFSRGVFLDTILPRQDDNGVRPTIGQRVRLSQGDIAQARKLYKCPACGETLQDTTGNFSAPGFPNGYPSYSHCVWRISVTPGEKIVLNFTSMDLFKSRLCWYDYVEVRDGYWRKAPLLGRFCGDKIPEPLVSTDSRLWVEFRSSSNILGKGFFAAYEATCGGDMNKDAGQIQSPNYPDDYRPSKECVWRITVSEGFHVGLTFQAFEIERHDSCAYDYLEVRDGPTEESALIGHFCGYEKPEDVKSSSNRLWMKFVSDGSINKAGFAANFFKEVDECSWPDHGGCEHRCVNTLGSYKCACDPGYELAADKKMCEVACGGFITKLNGTITSPGWPKEYPTNKNCVWQVVAPAQYRISLQFEVFELEGNDVCKYDFVEVRSGLSPDAKLHGRFCGSETPEVITSQSNNMRVEFKSDNTVSKRGFRAHFFSDKDECAKDNGGCQHECVNTFGSYLCRCRNGYWLHENGHDCKEAGCAHKISSVEGTLASPNWPDKYPSRRECTWNISSTAGHRVKLTFNEFEIEQHQECAYDHLEMYDGPDSLAPILGRFCGSKKPDPTVASGSSMFLRFYSDASVQRKGFQAVHSTECGGRLKAEVQTKELYSHAQFGDNNYPSEARCDWVIVAEDGYGVELTFRTFEVEEEADCGYDYMEAYDGYDSSAPRLGRFCGSGPLEEIYSAGDSLMIRFRTDDTINKKGFHARYTSTKFQDALHMKK

SEQ ID NO: 91 - DNA, 3146 bp, Homo sapiens
  CDS (227)..(3136)
gcagcctcggccgccgggcaagtagctccgagcggctgcttcccggttgcctcgacgaagacagggggcgccgcgctccgcttgctccgcgcctgagccatgcccagcagccctgtgtaaccaccgagtcccggccggagccgaccgacccagtgtgcgccgtctttcggccgagctgagctttcgtgcacgcaactccctctgccccagccggccccgcgccaccatgccccgggcgactgcacttggggccctggtgtcactgctgctgctgctgccgctgcctcgcggcgccgggggactcggggagcgcccggacgccaccgcagactactcagagctggacggcgaggagggcacggagcagcagctggagcattaccacgacccttgcaaagccgctgtcttttggggagacattgccttagatgaagatgacttgaagctgtttcacattgacaaagccagagactggaccaagcagacagtgggggcaacaggacacagcacaggtgggcttgaagagcaggcatctgagagcagcccagacaccacagccatggacactggcaccaaggaagctggaaaggggagccagagggccatttttaagcaggccatgagacactgggagaagcacacctgtgtgaccttcatagaaaggacggatgaggaaagctttattgtattcagttacagaacctgtggctgttgctcctatgttgggcgccgaggaggaggcccacaggccatatccattgggaagaactgtgacaagtttggcattgtggctcacgagctgggccatgtggttgggttttggcatgaacacacccggccagacagagaccaacatgtcaccatcatcagggaaaacatccagccaggtcaggagtataatttcttaaaaatggaagctggggaagtgagctctctgggagagacatacgactttgacagcatcatgcactacgcccggaacaccttctcaagaggagtttttttagacaccatccttccccgtcaagatgacaatggcgtcaggccaaccattggccagcgcgtgcggctcagtcagggagacatagctcaagcccggaagctgtacaaatgcccaggtcctacttgtgcttttgttagccagaaaacatcaatctgcttgctacacttctcaccaacctgttccgagggctttggctggcaaagggcgtgtggggagaccctgcaggacacaacgggaaacttttctgcacctggtttcccaaatgggtacccatcttactcccactgcgtctggaggatctcggtcaccccaggggaaaagatcgtattaaacttcacatccatggatttgtttaaaagccgactgtgctggtatgattacgtggaggtccgggatggttactggagaaaagccccccttttgggcaggttttgtggcgataagatcccggagcccctcgtctccacggacagccggctctgggtggagttccgcagcagcagcaacatcttgggcaagggcttctttgcagcgtacgaagctacctgcgggggagacatgaacaaagatgccggtcagattcaatctcccaactatccggatgactacagaccttccaaggaatgtgtctggaggattacggtttcagaggggtttcacgtgggacttaccttccaagcttttgagattgaaaggcacgacagctgtgcatatgactacctggaagtccgggatggccccacggaagagagtgccctgatcggccacttttgtggctatgagaagccggaggatgtgaaatcgagctccaacagactgtggatgaagtttgtgtccgatggctctatcaataaagcgggctttgcagccaattttttcaaggaggtggatgagtgttcctggccagatcacggcgggtgcgagcatcgctgtgtgaacacgctgggcagctacaagtgtgcctgtgaccctggctacgagctggccgccgataagaagatgtgtgaagtggcctgtggcggtttcattaccaagctgaatggaaccatcaccagccctgggtggccgaaggagtatcccacaaacaaaaactgtgtctggcaggtggtggcccccactcagtaccggatctcccttcagtttgaagtgtttgaactggaaggcaatgacgtctgtaagtacgactttgtagaggtgcgcagcggcctgtcccccgacgccaagctgcacggcaggttctgcggctctgagacgccggaggtcatcacctcgcagagcaacaacatgcgcgtggagttcaagtccgacaacaccgtctccaagcgcggcttcagggcccacttcttctcagataaggacgagtgtgccaaggacaacggcgggtgtcagcatgagtgcgtcaacaccttcgggagctacctgtgcaggtgcagaaacggctactggctccacgagaatgggcatgactgcaaagaggctggctgtgcacacaagatcagcagtgtggaggggaccctggcgagccccaactggcctgacaaataccccagccggagggagtgtacctggaacatctcttcgactgcaggccacagagtgaaactcacctttaatgagtttgagatcgagcagcaccaggaatgtgcctatgaccacctggaaatgtatgacgggccggacagcctggcccccattctgggccgtttctgcggtagcaagaaaccagaccccacggtggcttccggcagcaagtgcgggggcaggctgaaggctgaagtgcagaccaaagagctctattcccacgcccagtttggggacaacaactacccgagcgaggcccgctgtgactgggtgatcgtggcagaggacggctacggcgtggagctgacattccggacctttgaggttgaggaggaggccgactgcggctacgactacatggaagcctacgacggctacgacagctcagcgcccaggctcggccgcttctgtggctctgggccattagaagaaatctactctgcaggtgattccctgatgattcgattccgcacagatgacaccatcaacaagaaaggctttcatgcccgatacaccagcaccaagttccaggatgccctgcacatgaagaaatagtgctgat

SEQ ID NO: 92 - protein, 970 aa, Homo sapiens
MPRATALGALVSLLLLLPLPRGAGGLGERPDATADYSELDGEEGTEQQLEHYHDPCKAAVFWGDIALDEDDLKLFHIDKARDWTKQTVGATGHSTGGLEEQASESSPDTTAMDTGTKEAGKGSQRAIFKQAMRHWEKHTCVTFIERTDEESFIVFSYRTCGCCSYVGRRGGGPQAISIGKNCDKFGIVAHELGHVVGFWHEHTRPDRDQHVTIIRENIQPGQEYNFLKMEAGEVSSLGETYDFDSIMHYARNTFSRGVFLDTILPRQDDNGVRPTIGQRVRLSQGDIAQARKLYKCPGPTCAFVSQKTSICLLHFSPTCSEGFGWQRACGETLQDTTGNFSAPGFPNGYPSYSHCVWRISVTPGEKIVLNFTSMDLFKSRLCWYDYVEVRDGYWRKAPLLGRFCGDKIPEPLVSTDSRLWVEFRSSSNILGKGFFAAYEATCGGDMNKDAGQIQSPNYPDDYRPSKECVWRITVSEGFHVGLTFQAFEIERHDSCAYDYLEVRDGPTEESALIGHFCGYEKPEDVKSSSNRLWMKFVSDGSINKAGFAANFFKEVDECSWPDHGGCEHRCVNTLGSYKCACDPGYELAADKKMCEVACGGFITKLNGTITSPGWPKEYPTNKNCVWQVVAPTQYRISLQFEVFELEGNDVCKYDFVEVRSGLSPDAKLHGRFCGSETPEVITSQSNNMRVEFKSDNTVSKRGFRAHFFSDKDECAKDNGGCQHECVNTFGSYLCRCRNGYWLHENGHDCKEAGCAHKISSVEGTLASPNWPDKYPSRRECTWNISSTAGHRVKLTFNEFEIEQHQECAYDHLEMYDGPDSLAPILGRFCGSKKPDPTVASGSKCGGRLKAEVQTKELYSHAQFGDNNYPSEARCDWVIVAEDGYGVELTFRTFEVEEEADCGYDYMEAYDGYDSSAPRLGRFCGSGPLEEIYSAGDSLMIRFRTDDTINKKGFHARYTSTKFQDALHMKK

SEQ ID NO: 93 - DNA, 3120 bp, Homo sapiens
  CDS (256)..(2718)
taacctgtctcacgacggtctaaacccaggcagcctcggccgccgggcaagtagctccgagcggctgcttcccggttgcctcgaagaagacagggggcgccgcgctccgcttgctccgcgcctgagccatgcccagcagccctgtgtaaccaccgagtcccggccggagccgaccgacccagtgtgcgccgtctttcggccgagctgagctttcgtgcacgcaactccctctgccccagccggccccgcgccaccatgccccgggcgactgcacttggggccctggtgtcactgctgctgctgctgccgctgcctcgcggcgccgggggactcggggagcgcccggacgccaccgcagactactcagagctggacggcgaggagggcacggagcagcagctggagcattaccacgacccttgcaaagccgctgtcttttggggagacattgccttagatgaagatgacttgaagctgtttcacattgacaaagccagagactggaccaagcagacagtgggggcaacaggacacagcacaggtgggcttgaagagcaggcatctgagagcagcccagacaccacagccatggacactggcaccaaggaagctggaaaggatggccgggagaataccacactcctgcacagccctgggaccttgcatgccgcagccaagaccttctctccccgggtccgaagagccacaacctcaaggacagagaggatatggcctggaggagtcatcccctacgtcattggagggaacttcactgggagccagagggccatttttaagcaggccatgagacactgggagaagcacacctgtgtgaccttcatagaaaggacggatgaggaaagctttattgtattcagttacagaacctgtggctgttgctcctatgttgggcgccgaggaggaggcccacaggccatatccattgggaagaactgtgacaagtttggcattgtggctcacgagctgggccatgtggttgggttttggcatgaacacacccggccagacagagaccaacatgtcaccatcatcagggaaaacatccagccaggtcaggagtataatttcttaaaaatggaagctggggaagtgagctctctgggagagacatacgactttgacagcatcatgcactacgcccggaacaccttctcaagaggagttttcttagacaccatccttccccgtcaagatgacaatggcgtcaggccaaccattggccagcgcgtgcggctcagtcagggagacatagctcaagcccggaagctgtacaaatgcccagcgtgtggggagaccctgcaggacacaacgggaaacttttctgcacctggtttcccaaatgggtacccatcttactcccactgcgtctggaggatctcggtcaccccaggggaaaagatcgtattaaacttcacatccatggatttgtttaaaagccgactgtgctggtatgattacgtggaggtccgggatggttactggagaaaagccccccttttgggcaggttttgtggcgataagatcccggagcccctcgtctccacggacagccggctctgggtggagttccgcagcagcagcaacatcttgggcaagggcttctttgcagcgtacgaagctacctgcgggggagacatgaacaaagatgccggtcagattcaatctcccaactatccggatgactacagaccttccaaggaatgtgtctggaggattacggtttcggaggggtttcacgtgggacttaccttccaagcttttgagattgaaaggcacgacagctgtgcatatgactacctggaagtccgggatggccccacggaagagagtgccctgatcggccacttttgtggctatgagaagccggaggatgtgaaatcgagctccaacagactgtggatgaagtttgtgtccgatggctctatcaataaagcgggctttgcagccaattttttcaaggaggtggatgagtgttcctggccagatcacggcgggtgcgaacatcgctgtgtgaacacgctgggcagctacaagtgtgcctgtgaccctggctacgagctggccgccgataagaagatgtgtgaagtggcctgtggcggtttcattaccaagctgaatggaaccatcaccagccctgggtggccgaaggagtatcccacaaacaaaaactgtgtctggcgggtggtggcccccgctcagtaccggatctcccttcagtttgaagtgtttgaactggaaggcaatgacgtctgtaagtacgactttgtagaggtgcgcagcggcctgtcccccgacgccaagctgcacggcaggttctgcggctctgagacgccggaagtcatcacctcgcagagcaacaacatgcgcgtggagttcaagtccgacaacaccgtctccaagcgcggcttcagggcccacttcttctcagataaggacgagtgtgccaaggacaacggcgggtgtcagcatgagtgcgtcaacaccttcgggagctacctgtgcaggtgcagaaacggctactggctccacgagaatgggcatgactgcaaagaggctggctgtgcacacaagatcagcagtgtggaggggaccctggcgagccccaactggcctgacaaataccccagccggagggagtgtacctggaacatctcttcgactgcaggccacagagtaaaactcagtgcggggtcaggctgaaggctgaagtgcagaccaaagagctctattcccacgcccagtttggggacaacaactacccgagcgaggcccgctgtgactgggtgatcgtggcagaggacggctacggcgtggagctgacattccggacctttgaggttgaggaggaggccgactgcggctacgactacatggaagcctacgacggctacgacagctcagcgcccaggctcggccgcttctgtggctctgggccattagaagaaatctactctgcaggtgattccctgatgattcgattccgcacagatgacaccatcaacaagaaaggctttcatgcccgatacaccagcaccaagttccaggatgccctgcacatgaagaaatagtgctgatgttcttgaaagacagaaactgaga

SEQ ID NO: 94 - protein, 821 aa, Homo sapiens
MPRATALGALVSLLLLLPLPRGAGGLGERPDATADYSELDGEEGTEQQLEHYHDPCKAAVFWGDIALDEDDLKLFHIDKARDWTKQTVGATGHSTGGLEEQASESSPDTTAMDTGTKEAGKDGRENTTLLHSPGTLHAAAKTFSPRVRRATTSRTERIWPGGVIPYVIGGNFTGSQRAIFKQAMRHWEKHTCVTFIERTDEESFIVFSYRTCGCCSYVGRRGGGPQAISIGKNCDKFGIVAHELGHVVGFWHEHTRPDRDQHVTIIRENIQPGQEYNFLKMEAGEVSSLGETYDFDSIMHYARNTFSRGVFLDTILPRQDDNGVRPTIGQRVRLSQGDIAQARKLYKCPACGETLQDTTGNFSAPGFPNGYPSYSHCVWRISVTPGEKIVLNFTSMDLFKSRLCWYDYVEVRDGYWRKAPLLGRFCGDKIPEPLVSTDSRLWVEFRSSSNILGKGFFAAYEATCGGDMNKDAGQIQSPNYPDDYRPSKECVWRITVSEGFHVGLTFQAFEIERHDSCAYDYLEVRDGPTEESALIGHFCGYEKPEDVKSSSNRLWMKFVSDGSINKAGFAANFFKEVDECSWPDHGGCEHRCVNTLGSYKCACDPGYELAADKKMCEVACGGFITKLNGTITSPGWPKEYPTNKNCVWRVVAPAQYRISLQFEVFELEGNDVCKYDFVEVRSGLSPDAKLHGRFCGSETPEVITSQSNNMRVEFKSDNTVSKRGFRAHFFSDKDECAKDNGGCQHECVNTFGSYLCRCRNGYWLHENGHDCKEAGCAHKISSVEGTLASPNWPDKYPSRRECTWNISSTAGHRVKLSAGSG

SEQ ID NO: 95 - DNA, 3120 bp, Homo sapiens
  CDS (256)..(2718)
taacctgtctcacgacggtctaaacccaggcagcctcggccgccgggcaagtagctccgagcggctgcttcccggttgcctcgaagaagacagggggcgccgcgctccgcttgctccgcgcctgagccatgcccagcagccctgtgtaaccaccgagtcccggccggagccgaccgacccagtgtgcgccgtctttcggccgagctgagctttcgtgcacgcaactccctctgccccagccggccccgcgccaccatgccccgggcgactgcacttggggccctggtgtcactgctgctgctgctgccgctgcctcgcggcgccgggggactcggggagcgcccggacgccaccgcagactactcagagctggacggcgaggagggcacggagcagcagctggagcattaccacgacccttgcaaagccgctgtcttttggggagacattgccttagatgaagatgacttgaagctgtttcacattgacaaagccagagactggaccaagcagacagtgggggcaacaggacacagcacaggtgggcttgaagagcaggcatctgagagcagcccagacaccacagccatggacactggcaccaaggaagctggaaaggatggccgggagaataccacactcctgcacagccctgggaccttgcatgccgcagccaagaccttctctccccgggtccgaagagccacaacctcaaggacagagaggatatggcctggaggagtcatcccctacgtcattggagggaacttcactgggagccagagggccatttttaagcaggccatgagacactgggagaagcacacctgtgtgaccttcatagaaaggacggatgaggaaagctttattgtattcagttacagaacctgtggctgttgctcctatgttgggcgccgaggaggaggcccacaggccatatccattgggaagaactgtgacaagtttggcattgtggctcacgagctgggccatgtggttgggttttggcatgaacacacccggccagacagagaccaacatgtcaccatcatcagggaaaacatccagccaggtcaggagtataatttcttaaaaatggaagctggggaagtgagctctctgggagagacatacgactttgacagcatcatgcactacgcccggaacaccttctcaagaggagttttcttagacaccatccttccccgtcaagatgacaatggcgtcaggccaaccattggccagcgcgtgcggctcagtcagggagacatagctcaagcccggaagctgtacaaatgcccagcgtgtggggagaccctgcaggacacaacgggaaacttttctgcacctggtttcccaaatgggtacccatcttactcccactgcgtctggaggatctcggtcaccccaggggaaaagatcgtattaaacttcacatccatggatttgtttaaaagccgactgtgctggtatgattacgtggaggtccgggatggttactggagaaaagccccccttttgggcaggttttgtggcgataagatcccggagcccctcgtctccacggacagccggctctgggtggagttccgcagcagcagcaacatcttgggcaagggcttctttgcagcgtacgaagctacctgcgggggagacatgaacaaagatgccggtcagattcaatctcccaactatccggatgactacagaccttccaaggaatgtgtctggaggattacggtttcggaggggtttcacgtgggacttaccttccaagcttttgagattgaaaggcacgacagctgtgcatatgactacctggaagtccgggatggccccacggaagagagtgccctgatcggccacttttgtggctatgagaagccggaggatgtgaaatcgagctccaacagactgtggatgaagtttgtgtccgatggctctatcaataaagcgggctttgcagccaattttttcaaggaggtggatgagtgttcctggccagatcacggcgggtgcgaacatcgctgtgtgaacacgctgggcagctacaagtgtgcctgtgaccctggctacgagctggccgccgataagaagatgtgtgaagtggcctgtggcggtttcattaccaagctgaatggaaccatcaccagccctgggtggccgaaggagtatcccacaaacaaaaactgtgtctggcaggtggtggcccccgctcagtaccggatctcccttcagtttgaagtgtttgaactggaaggcaatgacgtctgtaagtacgactttgtagaggtgcgcagcggcctgtcccccgacgccaagctgcacggcaggttctgcggctctgagacgccggaagtcatcacctcgcagagcaacaacatgcgcgtggagttcaagtccgacaacaccgtctccaagcgcggcttcaggacccacttcttctcagataaggacgagtgtgccaaggacaacggcgggtgtcagcatgagtgcgtcaacaccttcgggagctacctgtgcaggtgcagaaacggctactggctccacgagaatgggcatgactgcaaagaggctggctgtgcacacaagatcagcagtgtggaggggaccctggcgagccccaactggcctgacaaataccccagccggagggagtgtacctggaacatctcttcgactgcaggccacagagtaaaactcagtgcggggtcaggctgaaggctgaagtgcagaccaaagagctctattcccacgcccagtttggggacaacaactacccgagcgaggcccgctgtgactgggtgatcgtggcagaggacggctacggcgtggagctgacattccggacctttgaggttgaggaggaggccgactgcggctacgactacatggaagcctacgacggctacgacagctcagcgcccaggctcggccgcttctgtggctctgggccattagaagaaatctactctgcaggtgattccctgatgattcgattccgcacagatgacaccatcaacaagaaaggctttcatgcccgatacaccagcaccaagttccaggatgccctgcacatgaagaaatagtgctgatgttcttgaaagacagaaactgaga

SEQ ID NO: 96 - protein, 821 aa, Homo sapiens
MPRATALGALVSLLLLLPLPRGAGGLGERPDATADYSELDGEEGTEQQLEHYHDPCKAAVFWGDIALDEDDLKLFHIDKARDWTKQTVGATGHSTGGLEEQASESSPDTTAMDTGTKEAGKDGRENTTLLHSPGTLHAAAKTFSPRVRRATTSRTERIWPGGVIPYVIGGNFTGSQRAIFKQAMRHWEKHTCVTFIERTDEESFIVFSYRTCGCCSYVGRRGGGPQAISIGKNCDKFGIVAHELGHVVGFWHEHTRPDRDQHVTIIRENIQPGQEYNFLKMEAGEVSSLGETYDFDSIMHYARNTFSRGVFLDTILPRQDDNGVRPTIGQRVRLSQGDIAQARKLYKCPACGETLQDTTGNFSAPGFPNGYPSYSHCVWRISVTPGEKIVLNFTSMDLFKSRLCWYDYVEVRDGYWRKAPLLGRFCGDKIPEPLVSTDSRLWVEFRSSSNILGKGFFAAYEATCGGDMNKDAGQIQSPNYPDDYRPSKECVWRITVSEGFHVGLTFQAFEIERHDSCAYDYLEVRDGPTEESALIGHFCGYEKPEDVKSSSNRLWMKFVSDGSINKAGFAANFFKEVDECSWPDHGGCEHRCVNTLGSYKCACDPGYELAADKKMCEVACGGFITKLNGTITSPGWPKEYPTNKNCVWQVVAPAQYRISLQFEVFELEGNDVCKYDFVEVRSGLSPDAKLHGRFCGSETPEVITSQSNNMRVEFKSDNTVSKRGFRTHFFSDKDECAKDNGGCQHECVNTFGSYLCRCRNGYWLHENGHDCKEAGCAHKISSVEGTLASPNWPDKYPSRRECTWNISSTAGHRVKLSAGSG

SEQ ID NO: 97 - DNA, 3120 bp, Homo sapiens
  CDS (256)..(2718)
taacctgtctcacgacggtctaaacccaggcagcctcggccgccgggcaagtagctccgagcggctgcttcccggttgcctcgaagaagacagggggcgccgcgctccgcttgctccgcgcctgagccatgcccagcagccctgtgtaaccaccgagtcccggccggagccgaccgacccagtgtgcgccgtctttcggccgagctgagctttcgtgcacgcaactccctctgccccagccggccccgcgccaccatgccccgggcgactgcacttggggccctggtgtcactgctgctgctgctgccgctgcctcgcggcgccgggggactcggggagcgcccggacgccaccgcagactactcagagctggacggcgaggagggcacggagcagcagctggagcattaccacgacccttgcaaagccgctgtcttttggggagacattgccttagatgaagatgacttgaagctgtttcacattgacaaagccagagactggaccaagcagacagtgggggcaacaggacacagcacaggtgggcttgaagagcaggcatctgagagcagcccagacaccacagccatggacactggcaccaaggaagctggaaaggatggccgggagaataccacactcctgcacagccctgggaccttgcatgccgcagccaagaccttctctccccgggtccgaagagccacaacctcaaggacagagaggatatggcctggaggagtcatcccctacgtcattggagggaacttcactgggagccagagggccatttttaagcaggccatgagacactgggagaagcacacctgtgtgaccttcatagaaaggacggatgaggaaagctttattgtattcagttacagaacctgtggctgttgctcctatgttgggcgccgaggaggaggcccacaggccatatccattgggaagaactgtgacaagtttggcattgtggctcacgagctgggccatgtggttgggttttggcatgaacacacccggccagacagagaccaacatgtcaccatcatcagggaaaacatccagccaggtcaggagtataatttcttaaaaatggaagctggggaagtgagctctctgggagagacatacgactttgacagcatcatgcactacgcccggaacaccttctcaagaggagttttcttagacaccatccttccccgtcaagatgacaatggcgtcaggccaaccattggccagcgcgtgcggctcagtcagggagacatagctcaagcccggaagctgtacaaatgcccagcgtgtggggagaccctgcaggacacaacgggaaacttttctgcacctggtttcccaaatgggtacccatcttactcccactgcgtctggaggatctcggtcaccccaggggaaaagatcgtattaaacttcacatccatggatttgtttaaaagccgactgtgctggtatgattacgtggaggtccgggatggttactggagaaaagccccccttttgggcaggttttgtggcgataagatcccggagcccctcgtctccacggacagccggctctgggtggagttccgcagcagcagcaacatcttgggcaagggcttctttgcagcgtacgaagctacctgcgggggagacatgaacaaagatgccggtcagattcaatctcccaactatccggatgactacagaccttccaaggaatgtgtctggaggattacggtttcggaggggtttcacgtgggacttaccttccaagcttttgagattgaaaggcacgacagctgtgcatatgactacctggaagtccgggatggccccacggaagagagtgccctgatcggccacttttgtggctatgagaagccggaggatgtgaaatcgagctccaacagactgtggatgaagtttgtgtccgatggctctatcaataaagcgggctttgcagccaattttttcaaggaggtggatgagtgttcctggccagatcacggcgggtgcgaacatcgctgtgtgaacacgctgggcagctacaagtgtgcctgtgaccctggctacgagctggccgccgataagaagatgtgtgaagtggcctgtggcggtttcattaccaagctgaatggaaccatcaccagccctgggtggccgaaggagtatcccacaaacaaaaactgtgtctggcaggtggtggcccccgctcagtaccggatctcccttcagtttgaagtgtttgaactggaaggcaatgacgtctgtaagtacgactttgtagaggtgcgcagcggcctgtcccccgacgccaagctgcacggcaggttctgcggctctgagacgccggaagtcatcacctcgcagagcaacaacatgcgcgtggagttcaagtccgacaacaccgtctccaagcgcggcttcagggcccacttcttctcagataaggacgagtgtgccaaggacaacggcgggtgtcagcatgagtgcgtcaacaccttcgggagctacctgtgcaggtgcagaaacggctactggctccacgagaatgggcatgactgcaaagaggctggctgtgcacacaagatcagcagtgtggaggggaccctggcgagccccaactggcctgacaaataccccagccggagggagtgtacctggaacatctcttcgactgcaggccacagagtaaaactcagtgcggggtcaggctgaaggctgaagtgcagaccaaagagctctatccccacgcccagtttggggacaacaactacccgagcgaggcccgctgtgactgggtgatcgtggcagaggacggctacggcgtggagctgacattccggacctttgaggttgaggaggaggccgactgcggctacgactacatggaagcctacgacggctacgacagctcagcgcccaggctcggccgcttctgtggctctgggccattagaagaaatctactctgcaggtgattccctgatgattcgattccgcacagatgacaccatcaacaagaaaggctttcatgcccgatacaccagcaccaagttccaggatgccctgcacatgaagaaatagtgctgatgttcttgaaagacagaaactgaga

SEQ ID NO: 98 - protein, 821 aa, Homo sapiens; identical to SEQ ID NO: 86

SEQ ID NO: 99 - DNA, 3120 bp, Homo sapiens
  CDS (256)..(2718)
taacctgtctcacgacggtctaaacccaggcagcctcggccgccgggcaagtagctccgagcggctgcttcccggttgcctcgaagaagacagggggcgccgcgctccgcttgctccgcgcctgagccatgcccagcagccctgtgtaaccaccgagtcccggccggagccgaccgacccagtgtgcgccgtctttcggccgagctgagctttcgtgcacgcaactccctctgccccagccggccccgcgccaccatgccccgggcgactgcacttggggccctggtgtcactgctgctgctgctgccgctgcctcgcggcgccgggggactcggggagcgcccggacgccaccgcagactactcagagctggacggcgaggagggcacggagcagcagctggagcattaccacgacccttgcaaagccgctgtcttttggggagacattgccttagatgaagatgacttgaagctgtttcacattgacaaagccagagactggaccaagcagacagtgggggcaacaggacacagcacaggtgggcttgaagagcaggcatctgagagcagcccagacaccacagccatggacactggcaccaaggaagctggaaaggatggccgggagaataccacactcctgcacagccctgggaccttgcatgccgcagccaagaccttctctccccgggtccgaagagccacaacctcaaggacagagaggatatggcctggaggagtcatcccctacgtcattggagggaacttcactgggagccagagggccatttttaagcaggccatgagacactgggagaagcacacctgtgtgaccttcatagaaaggacggatgaggaaagctttattgtattcagttacagaacctgtggctgttgctcctatgttgggcgccgaggaggaggcccacaggccatatccattgggaagaactgtgacaagtttggcattgtggctcacgagctgggccatgtggttgggttttggcatgaacacacccggccagacagagaccaacatgtcaccatcatcagggaaaacatccagccaggtcaggagtataatttcttaaaaatggaagctggggaagtgagctctctgggagagacatacgactttgacagcatcatgcactacgcccggaacaccttctcaagaggagttttcttagacaccatccttccccgtcaagatgacaatggcgtcaggccaaccattggccagcgcgtgcggctcagtcagggagacatagctcaagcccggaagctgtacaaatgcccagcgtgtggggagaccctgcaggacacaacgggaaacttttctgcacctggtttcccaaatgggtacccatcttactcccactgcgtctggaggatctcggtcaccccaggggaaaagatcgtattaaacttcacatccatggatttgtttaaaagccgactgtgctggtatgattacgtggaggtccgggatggttactggagaaaagccccccttttgggcaggttttgtggcgataagatcccggagcccctcgtctccacggacagccggctctgggtggagttccgcagcagcagcaacatcttgggcaagggcttctttgcagcgtacgaagctacctgcgggggagacatgaacaaagatgccggtcagattcaatctcccaactatccggatgactacagaccttccaaggaatgtgtctggaggattacggtttcggaggggtttcacgtgggacttaccttccaagcttttgagattgaaaggcacgacagctgtgcatatgactacctggaagtccgggatggccccacggaagagagtgccctgatcggccacttttgtggctatgagaagccggaggatgtgaaatcgagctccaacagactgtggatgaagtttgtgtccgatggctctatcaataaagcgggctttgcagccaattttttcaaggaggtggatgagtgttcctggccagatcacggcgggtgcgaacatcgctgtgtgaacacgctgggcagctacaagtgtgcctgtgaccctggctacgagctggccgccgataagaagatgtgtgaagtggcctgtggcggtttcattaccaagctgaatggaaccatcaccagccctgggtggccgaaggagtatcccacaaacaaaaactgtgtctggcaggtggtggcccccgctcagtaccggatctcccttcagtttgaagtgtttgaactggaaggcaatgacgtctgtaagtacgactttgtagaggtgcgcagcggcctgtcccccgacgccaagctgcacggcaggttctgcggctctgagacgccggaagtcatcacctcgcagagcaacaacatgcgcgtggagttcaagtccgacaacaccgtctccaagcgcggcttcagggcccacttcttctcagataaggacgagtgtgccaaggacaacggcgggtgtcagcatgagtgcgtcaacaccttcgggagctacctgtgcaggtgcagaaacggctactggctccacgagaatgggcatgactgcaaagaggctggctgtgcacacaagatcagcagtgtggaggggaccctggcgagccccaactggcctgacaaataccccagccggagggagtgtacctggaacatctcttcgactgcaggccacagagtaaaactcagtgcggggtcaggctgaaggctgaagtgcagaccaaagagctctattcccacgcccagtttggggacaacaactacccgagcgaggcccactgtgactgggtgatcgtggcagaggacggctacggcgtggagctgacattccggacctttgaggttgaggaggaggccgactgcggctacgactacatggaagcctacgacggctacgacagctcagcgcccaggctcggccgcttctgtggctctgggccattagaagaaatctactctgcaggtgattccctgatgattcgattccgcacagatgacaccatcaacaagaaaggctttcatgcccgatacaccagcaccaagttccaggatgccctgcacatgaagaaatagtgctgatgttcttgaaagacagaaactgaga

SEQ ID NO: 100 - protein, 821 aa, Homo sapiens; identical to SEQ ID NO: 86

SEQ ID NO: 101 - DNA, 3120 bp, Homo sapiens
  CDS (256)..(2718)
taacctgtctcacgacggtctaaacccaggcagcctcggccgccgggcaagtagctccgagcggctgcttcccggttgcctcgaagaagacagggggcgccgcgctccgcttgctccgcgcctgagccatgcccagcagccctgtgtaaccaccgagtcccggccggagccgaccgacccagtgtgcgccgtctttcggccgagctgagctttcgtgcacgcaactccctctgccccagccggccccgcgccaccatgccccgggcgactgcacttggggccctggtgtcactgctgctgctgctgccgctgcctcgcggcgccgggggactcggggagcgcccggacgccaccgcagactactcagagctggacggcgaggagggcacggagcagcagctggagcattaccacgacccttgcaaagccgctgtcttttggggagacattgccttagatgaagatgacttgaagctgtttcacattgacaaagccagagactggaccaagcagacagtgggggcaacaggacacagcacaggtgggcttgaagagcaggcatctgagagcagcccagacaccacagccatggacactggcaccaaggaagctggaaaggatggccgggagaataccacactcctgcacagccctgggaccttgcatgccgcagccaagaccttctctccccgggtccgaagagccacaacctcaaggacagagaggatatggcctggaggagtcatcccctacgtcattggagggaacttcactgggagccagagggccatttttaagcaggccatgagacactgggagaagcacacctgtgtgaccttcatagaaaggacggatgaggaaagctttattgtattcagttacagaacctgtggctgttgctcctatgttgggcgccgaggaggaggcccacaggccatatccattgggaagaactgtgacaagtttggcattgtggctcacgagctgggccatgtggttgggttttggcatgaacacacccggccagacagagaccaacatgtcaccatcatcagggaaaacatccagccaggtcaggagtataatttcttaaaaatggaagctggggaagtgagctctctgggagagacatacgactttgacagcatcatgcactacgcccggaacaccttctcaagaggagttttcttagacaccatccttccccgtcaagatgacaatggcgtcaggccaaccattggccagcgcgtgcggctcagtcagggagacatagctcaagcccggaagctgtacaaatgcccagcgtgtggggagaccctgcaggacacaacgggaaacttttctgcacctggtttcccaaatgggtacccatcttactcccactgcgtctggaggatctcggtcaccccaggggaaaagatcgtattaaacttcacatccatggatttgtttaaaagccgactgtgctggtatgattacgtggaggtccgggatggttactggagaaaagccccccttttgggcaggttttgtggcgataagatcccggagcccctcgtctccacggacagccggctctgggtggagttccgcagcagcagcaacatcttgggcaagggcttctttgcagcgtacgaagctacctgcgggggagacatgaacaaagatgccggtcagattcaatctcccaactatccggatgactacagaccttccaaggaatgtgtctggaggattacggtttcggaggggtttcacgtgggacttaccttccaagcttttgagattgaaaggcacgacagctgtgcatatgactacctggaagtccgggatggccccacggaagagagtgccctgatcggccacttttgtggctatgagaagccggaggatgtgaaatcgagctccaacagactgtggatgaagtttgtgtccgatggctctatcaataaagcgggctttgcagccaattttttcaaggaggtggatgagtgttcctggccagatcacggcgggtgcgaacatcgctgtgtgaacacgctgggcagctacaagtgtgcctgtgaccctggctacgagctggccgccgataagaagatgtgtgaagtggcctgtggcggtttcattaccaagctgaatggaaccatcaccagccctgggtggccgaaggagtatcccacaaacaaaaactgtgtctggcaggtggtggcccccgctcagtaccggatctcccttcagtttgaagtgtttgaactggaaggcaatgacgtctgtaagtacgactttgtagaggtgcgcagcggcctgtcccccgacgccaagctgcacggcaggttctgcggctctgagacgccggaagtcatcacctcgcagagcaacaacatgcgcgtggagttcaagtccgacaacaccgtctccaagcgcggcttcagggcccacttcttctcagataaggacgagtgtgccaaggacaacggcgggtgtcagcatgagtgcgtcaacaccttcgggagctacctgtgcaggtgcagaaacggctactggctccacgagaatgggcatgactgcaaagaggctggctgtgcacacaagatcagcagtgtggaggggaccctggcgagccccaactggcctgacaaataccccagccggagggagtgtacctggaacatctcttcgactgcaggccacagagtaaaactcagtgcggggtcaggctgaaggctgaagtgcagaccaaagagctctattcccacgcccagtttggggacaacaactacccgagcgaggcccgctgtgactgggtgatcgtggcagaggacggctacggcgtggagctgacattccggacctttgaggttgaggaggaggccgactgcggctacgactacatggaagcctacgacggctacgacagctcagcgcccaggctcggccgcttctgtggctctgggccattagaagaaatctactctgcaggtggttccctgatgattcgattccgcacagatgacaccatcaacaagaaaggctttcatgcccgatacaccagcaccaagttccaggatgccctgcacatgaagaaatagtgctgatgttcttgaaagacagaaactgaga

SEQ ID NO: 102 - protein, 821 aa, Homo sapiens; identical to SEQ ID NO: 86

SEQ ID NO: 103 - DNA, 1953 bp, Homo sapiens
  CDS (16)..(1929)
gtctgagtcacagagatgggcaagatcgagaacaacgagagggtgatcctcaatgtcgggggcacccggcacgaaacctaccgcagcaccctcaagaccctgcctggaacacgcctggcccttcttgcctcctccgagcccccaggcgactgcttgaccacggcgggcgacaagctgcagccgtcgccgcctccactgtcgccgccgccgagagcgcccccgctgtcccccgggccaggcggctgcttcgagggcggcgcgggcaactgcagttcccgcggcggcagggccagcgaccatcccggtggcggccgcgagttcttcttcgaccggcacccgggcgtcttcgcctatgtgctcaattactaccgcaccggcaagctgcactgccccgcagacgtgtgcgggccgctcttcgaggaggagctggccttctggggcatcgacgagaccgacgtggagccctgctgctggatgacctaccggcagcaccgcgacgccgaggaggcgctggacatcttcgagacccccgacctcattggcggcgaccccggcgacgacgaggacctggcggccaagaggctgggcatcgaggacgcggcggggctcgggggcccggacggcaaatctggccgctggaggaggctgcagccccgcatgtgggccctcttcgaagacccctactcgtccagagccgccaggtttattgcttttgcttctttattcttcatcctggtttcaattacaactttttgcctggaaacacatgaagctttcaatattgttaaaaacaagacagaaccagtcatcaatggcacaagtgttgttctacagtatgaaattgaaacggatcctgccttgacgtatgtagaaggagtgtgtgtggtgtggtttacttttgaatttttagtccgtattgttttttcacccaataaacttgaattcatcaaaaatctcttgaatatcattgactttgtggccatcctacctttctacttagaggtgggactcagtgggctgtcatccaaagctgctaaagatgtgcttggcttcctcagggtggtaaggtttgtgaggatcctgagaattttcaagctcacccgccattttgtaggtctgagggtgcttggacatactcttcgagctagtactaatgaatttttgctgctgataattttcctggctctaggagttttgatatttgctaccatgatctactatgccgagagagtgggagctcaacctaacgacccttcagctagtgagcacacacagttcaaaaacattcccattgggttctggtgggctgtagtgaccatgactaccctgggttatggggatatgtacccccaaacatggtcaggcatgctggtgggagccctgtgtgctctggctggagtgctgacaatagccatgccagtgcctgtcattgtcaataattttggaatgtactactccttggcaatggcaaagcagaaacttccaaggaaaagaaagaagcacatccctcctgctcctcaggcaagctcacctactttttgcaagacagaattaaatatggcctgcaatagtacacagagtgacacatgtctgggcaaagacaatcgacttctggaacataacagatcagtgttatcaggtgacgacagtacaggaagtgagccgccactatcacccccagaaaggctccccatcagacgctctagtaccagagacaaaaacagaagaggggaaacatgtttcctactgacgacaggtgattacacgtgtgcttctgatggagggatcaggaaaggttatgaaaaatcccgaagcttaaacaacatagcgggcttggcaggcaatgctctgaggctctctccagtaacatcaccctacaactctccttgtcctctgaggcgctctcgatctcccatcccatctatcttgtaaaccaaacaaccaaactgcatc

SEQ ID NO: 104 - protein, 638 aa, Homo sapiens
MGKIENNERVILNVGGTRHETYRSTLKTLPGTRLALLASSEPPGDCLTTAGDKLQPSPPPLSPPPRAPPLSPGPGGCFEGGAGNCSSRGGRASDHPGGGREFFFDRHPGVFAYVLNYYRTGKLHCPADVCGPLFEEELAFWGIDETDVEPCCWMTYRQHRDAEEALDIFETPDLIGGDPGDDEDLAAKRLGIEDAAGLGGPDGKSGRWRRLQPRMWALFEDPYSSRAARFIAFASLFFILVSITTFCLETHEAFNIVKNKTEPVINGTSVVLQYEIETDPALTYVEGVCVVWFTFEFLVRIVFSPNKLEFIKNLLNIIDFVAILPFYLEVGLSGLSSKAAKDVLGFLRVVRFVRILRIFKLTRHFVGLRVLGHTLRASTNEFLLLIIFLALGVLIFATMIYYAERVGAQPNDPSASEHTQFKNIPIGFWWAVVTMTTLGYGDMYPQTWSGMLVGALCALAGVLTIAMPVPVIVNNFGMYYSLAMAKQKLPRKRKKHIPPAPQASSPTFCKTELNMACNSTQSDTCLGKDNRLLEHNRSVLSGDDSTGSEPPLSPPERLPIRRSSTRDKNRRGETCFLLTTGDYTCASDGGIRKGYEKSRSLNNIAGLAGNALRLSPVTSPYNSPCPLRRSRSPIPSIL

SEQ ID NO: 105 - DNA, 1815 bp, Homo sapiens
  CDS (1)..(1815)
agatctcccaccatgggcaagatcgagaacaacgagagggtgatcctcaatgtcgggggcacccggcacgaaacctaccgcagcaccctcaagaccctgcctggaacacgcctggcccttcttgcctcctccgagcccccaggcaactgcagttcccgcggcggcagggccagcgaccatcccggtggcggccgcgagttcttcttcgaccggcacccgggcgtcttcgcctatgtgctcaattactaccgcaccggcaagctgcactgccccgcagacgtgtgcgggccgctcttcgaggaggagctggccttctggggcatcgacgagaccgacgtggagccctgctgctggatgacctaccggcagcaccgcgacgccgaggaggcgctggacatcttcgagacccccgacctcattggcggcgaccccggcgacgacgaggacctggcggccaagaggctgggcatcgaggacgcggcggggctcgggggccccgacggcaaatctggccgctggaggaggctgcagccccgcatgtgggccctcttcgaagacccctactcgtccagagccgccaggtttattgcttttgcttctttattcttcatcctggtttcaattacaactttttgcctggaaacacatgaagctttcaatattgttaaaaacaagacagaaccagtcatcaatggcacaagtgttgttctacagtatgaaattgaaacggatcctgccttgacgtatgtagaaggagtgtgtgtggtgtggtttacttttgaatttttagtccgtattgttttttcacccaataaacttgaattcatcaaaaatctcttgaatatcattgactttgtggccatcctacctttctacttagaggtgggactcagtgggctgtcatccaaagctgctaaagatgtgcttggcttcctcagggtggtaaggtttgtgaggatcctgagaattttcaagctcacccgccattttgtaggtctgagggtgcttggacatactcttcgagctagtactaatgaatttttgctgctgataattttcctggctctaggagttttgatatttgctaccatgatctactatgccgagagagtgggagctcaacctaacgacccttcagctagtgagcacacacagttcaaaaacattcccattgggttctggtgggctgtagtgaccatgactaccctgggttatgaggatacgtacccccaaacatggtcaggcatgctggtgggagccctgtgtgctctggctggagtgctgacaatagccatgccagtgcctgtcattgtcaataattttggaatgtactactccttggcaatggcaaagcagaaacttccaaggaaaagaaagaagcacatccctcctgctcctcaggcaagctcacctactttttgcaagacagaattaaatatggcctgcaatagtacacagagtgacacatgtctgggcaaagacaatcgacttctggaacataacagatcagtgttatcaggtgacgacagtacaggaagtgagccgccactatcacccccagaaaggctccccatcagacgctctagtaccagagacaaaaacagaagaggggaaacatgtttcctactgacgacaggtgattacacgtgtgcttctgatggagggatcaggaaaggatatgaaaaatcccgaagcttaaacaacatagcgggcttggcaggcaatgctctgaggctctctccagtaacatcaccctacaactctccttgtcctctgaggcgctctcgatctcccatcccatctatcttgctcgag

SEQ ID NO: 106 - protein, 605 aa, Homo sapiens
RSPTMGKIENNERVILNVGGTRHETYRSTLKTLPGTRLALLASSEPPGNCSSRGGRASDHPGGGREFFFDRHPGVFAYVLNYYRTGKLHCPADVCGPLFEEELAFWGIDETDVEPCCWMTYRQHRDAEEALDIFETPDLIGGDPGDDEDLAAKRLGIEDAAGLGGPDGKSGRWRRLQPRMWALFEDPYSSRAARFIAFASLFFILVSITTFCLETHEAFNIVKNKTEPVINGTSVVLQYEIETDPALTYVEGVCVVWFTFEFLVRIVFSPNKLEFIKNLLNIIDFVAILPFYLEVGLSGLSSKAAKDVLGFLRVVRFVRILRIFKLTRHFVGLRVLGHTLRASTNEFLLLIIFLALGVLIFATMIYYAERVGAQPNDPSASEHTQFKNIPIGFWWAVVTMTTLGYEDTYPQTWSGMLVGALCALAGVLTIAMPVPVIVNNFGMYYSLAMAKQKLPRKRKKHIPPAPQASSPTFCKTELNMACNSTQSDTCLGKDNRLLEHNRSVLSGDDSTGSEPPLSPPERLPIRRSSTRDKNRRGETCFLLTTGDYTCASDGGIRKGYEKSRSLNNIAGLAGNALRLSPVTSPYNSPCPLRRSRSPIPSILLE

SEQ ID NO: 107 - DNA, 607 bp, Homo sapiens
  CDS (13)..(603)
agatttcccaccatgggcaagatcgagaacaacgagagggtgatcctcaatgtcgggggcacccggcacgaaacctaccgcagcaccctcaagaccctgcctggaacacgcctggcccttcttgcctcctccgagcccccaggcgactgcttgaccacagcgggcaactgcagttcccgcggcggcagggccagcgaccatcccggtggcggccgcgagttcttcttcgaccggcatccgggcgtcttcgcctatgtgctcaattactaccgcaccggcaagctgcactgtcccgcagacgtgtgcgggccgctcttcgaggaggagctggccttctggggcatcgacgagaccgacgtggagccctgctgctggatgacctaccggcagcaccgcgacgccgaggaggcgctggacatcttcgagacccccgacctcattggcggcgaccccggcgacgacgaggacctggcggccaagaggctgggcatcgaggacgcggcggggctcgggggccccgacggcaaatctggccgctggaggaggctgcagccccgcatgtgggccctcttcgaagacccctactcgtccagagccgccaggctcg

SEQ ID NO: 108 - protein, 197 aa, Homo sapiens
MGKIENNERVILNVGGTRHETYRSTLKTLPGTRLALLASSEPPGDCLTTAGNCSSRGGRASDHPGGGREFFFDRHPGVFAYVLNYYRTGKLHCPADVCGPLFEEELAFWGIDETDVEPCCWMTYRQHRDAEEALDIFETPDLIGGDPGDDEDLAAKRLGIEDAAGLGGPDGKSGRWRRLQPRMWALFEDPYSSRAAR

SEQ ID NO: 109 - DNA, 1815 bp, Homo sapiens; identical to SEQ ID NO: 105
  CDS (13)..(1809)

SEQ ID NO: 110 - protein, 599 aa, Homo sapiens
MGKIENNERVILNVGGTRHETYRSTLKTLPGTRLALLASSEPPGNCSSRGGRASDHPGGGREFFFDRHPGVFAYVLNYYRTGKLHCPADVCGPLFEEELAFWGIDETDVEPCCWMTYRQHRDAEEALDIFETPDLIGGDPGDDEDLAAKRLGIEDAAGLGGPDGKSGRWRRLQPRMWALFEDPYSSRAARFIAFASLFFILVSITTFCLETHEAFNIVKNKTEPVINGTSVVLQYEIETDPALTYVEGVCVVWFTFEFLVRIVFSPNKLEFIKNLLNIIDFVAILPFYLEVGLSGLSSKAAKDVLGFLRVVRFVRILRIFKLTRHFVGLRVLGHTLRASTNEFLLLIIFLALGVLIFATMIYYAERVGAQPNDPSASEHTQFKNIPIGFWWAVVTMTTLGYEDTYPQTWSGMLVGALCALAGVLTIAMPVPVIVNNFGMYYSLAMAKQKLPRKRKKHIPPAPQASSPTFCKTELNMACNSTQSDTCLGKDNRLLEHNRSVLSGDDSTGSEPPLSPPERLPIRRSSTRDKNRRGETCFLLTTGDYTCASDGGIRKGYEKSRSLNNIAGLAGNALRLSPVTSPYNSPCPLRRSRSPIPSIL

SEQ ID NO: 111 - DNA, 3028 bp, Homo sapiens
  CDS (22)..(1860)
agtcatgtctgagtcacagagatgggcaagatcgagaacaacgagagggtgatcctcaatgtcgggggcacccggcacgaaacctaccgcagcaccctcaagaccctgcctggaacacgcctggcccttcttgcctcctccgagcccccaggcgactgcttgaccacggcgggcgacaagctgcagccgtcgccgcctccactgtcgccgccgccgagagcgcccccgctgtcccccgggccaggcggctgcttcgagggcggcgcgggcaactgcagttcccgcggcggcagggccagcgaccatcccggtggcggccgcgagttcttcttcgaccggcacccgggcgtcttcgcctatgtgctcaattactaccgcaccggcaagctgcactgccccgcagacgtgtgcgggccgctcttcgaggaggagctggccttctggggcatcgacgagaccgacgtggagccctgctgctggatgacctaccggcagcaccgcgacgccgaggaggcgctggacatcttcgagacccccgacctcattggcggcgaccccggcgacgacgaggacctggcggccaagaggctgggcatcgaggacgcggcggggctcgggggccccgacggcaaatctggccgctggaggaggctgcagccccgcatgtgggccctcttcgaagacccctactcgtccagagccgccaggtttattgcttttgcttctttattcttcatcctggtttcaattacaactttttgcctggaaacacatgaagctttcaatattgttaaaaacaagacagaaccagtcatcaatggcacaagtgttgttctacagtatgaaattgaaacggatcctgccttgacgtatgtagaaggagtgtgtgtggtgtggtttacttttgaatttttagtccgtattgttttttcacccaataaacttgaattcatcaaaaatctcttgaatatcattgactttgtggccatcctacctttctacttagaggtgggactcagtgggctgtcatccaaagctgctaaagatgtgcttggcttcctcagggtggtaaggtttgtgaggatcctgagaattttcaagctcacccgccattttgtaggtctgagggtgcttggacatactcttcgagctagtactaatgaatttttgctgctgataattttcctggctctaggagttttgatatttgctaccatgatctactatgccgagagagtgggagctcaacctaacgacccttcagctagtgagcacacacagttcaaaaacattcccattgggttctggtgggctgtagtgaccatgactaccctgggttatggggatatgtacccccaaacatggtcaggcatgctggtgggagccctgtgtgctctggctggagtgctgacaatagccatgccagtgcctgtcattgtcaataattttggaatgtactactccttggcaatggcaaagcagaaacttccaaggaaaagaaagaagcacatccctcctgctcctcaggcaagctcacctactttttgcaagacagaattaaatatggcctgcaatagtacacagagtgacacatgtctgggcaaagacaatcgacttctggaacataacagatcagtgttatcaggtgacgacagtacaggaagtgagccgccactatcacccccagaaaggctccccatcagacgctctagtaccagagacaaaaacagaagaggggaaacatgtttcctactgacgacaggtgattacacgtgtgcttctgatggagggatcaggaaagataactgcaaagaggttgtcattactggttacacgcaagccgaggccagatctcttacttaatgacttgggggaaggcacaaaacatgagagaaagtgttgtacagaatttatcatggattattgactgctgagaaagggacagtggaatttagccatacaaaggactatactggaaacagacttctgctgctgaatgtgccctgatgtgaccaggttgcacttggaagagatcctccgcgtcttcatgaggcacttaaagcttataaaagaactgcggctggaactcatctggtgctccccatgagagtgctctgcttgtagactggccagtgtccatgaaacaactgtaaataccaacatgtgtgcatgggtcaacagtcttggccatttctcatcaaaagaagccaaattcatgatcaacatctctgaagtttcaagtaaggcccacacttctttgaattactcttcatgggcccacattaggttgtgctgtgaattacttaaggcagtgatactgatgtagtatagttttgtcttaatttcccttatttctacttctttggttgaatctatgaacttgattgtataattttcttataaattactgatgtaatcagcttgtcaattatgttgtgaaattgttagtattcatttatcaaaaatgacctatgtttagtcacatatttgtttagttctgggaaattgttatagcttaaatggaactcaccaacattattcatagtttaagtcttttatcattattacctcaattataaatattacaaaaacataattctggcaatgagagtatttttttattcaatgatcaaggagcaatgtcagtatatagtagaatatcaattaaattatatcctaaaatgtatattttgcataaaagagatattctttaatcaattacttttttgtgagttttgtggcgaatgaagcttgtacgtgtctttaaaactgttgtagatgaaactgtataagatttttacatcttgcttaatcaatattttcagagtctattagttcccctgggattctgaatataacatatagcctattataaatccctgtatcgtggaccttttgtgaacatttcaaggcgcatgcacaaccttgatgataaccagtggaaatgtaactaactgaaatgaagaataaaaggcaaatgagctggggataaacttgaatgttatctgattaaattactcaaattatt

SEQ ID NO: 112 - protein, 613 aa, Homo sapiens
MGKIENNERVILNVGGTRHETYRSTLKTLPGTRLALLASSEPPGDCLTTAGDKLQPSPPPLSPPPRAPPLSPGPGGCFEGGAGNCSSRGGRASDHPGGGREFFFDRHPGVFAYVLNYYRTGKLHCPADVCGPLFEEELAFWGIDETDVEPCCWMTYRQHRDAEEALDIFETPDLIGGDPGDDEDLAAKRLGIEDAAGLGGPDGKSGRWRRLQPRMWALFEDPYSSRAARFIAFASLFFILVSITTFCLETHEAFNIVKNKTEPVINGTSVVLQYEIETDPALTYVEGVCVVWFTFEFLVRIVFSPNKLEFIKNLLNIIDFVAILPFYLEVGLSGLSSKAAKDVLGFLRVVRFVRILRIFKLTRHFVGLRVLGHTLRASTNEFLLLIIFLALGVLIFATMIYYAERVGAQPNDPSASEHTQFKNIPIGFWWAVVTMTTLGYGDMYPQTWSGMLVGALCALAGVLTIAMPVPVIVNNFGMYYSLAMAKQKLPRKRKKHIPPAPQASSPTFCKTELNMACNSTQSDTCLGKDNRLLEHNRSVLSGDDSTGSEPPLSPPERLPIRRSSTRDKNRRGETCFLLTTGDYTCASDGGIRKDNCKEVVITGYTQAEARSLT

SEQ ID NO: 113 - DNA, 1162 bp, Homo sapiens
  CDS (97)..(1086)
atctacggagtccctttggccacataagattggccttaagagaaggacggagccacatactgctgacggcccagaactggcagagagaaggttgccatggctgctgttgacagtttctacctcttgtactgggaaatcgccaggtcttgcaattgctatatggaagctctagctttggttggagcctggtatacggccagaaaaagcatcactgtcatctgtgacttttacagcctgatcaggctgcattttatcccccgcctggggagcagagcagacttgatcaagcagtatggaagatgggccgttgtcagcggtgcaacagatgggattggaaaagcctacgctgaagagttagcaagccgaggtctcaatataatcctgattagtcggaacgaggagaagttgcaggttgttgctaaagacatagccgacacgtacaaagtggaaactgatattatagttgcggacttcagcagcggtcgtgagatctaccttccaattcgagaagccctgaaggacaaagacgttggcatcttggtaaataacgtgggtgtgttttatccctacccgcagtatttcactcagctgtccgaggacaagctctgggacatcataaatgtgaacattgccgccgctagtttgatggtccatgttgtgttaccgggaatggtggagagaaagaaaggtgccatcgtcacgatctcttctggctcctgctgcaaacccactcctcagctggctgcattttctgcttctaaggcttatttagaccacttcagcagagccttgcaatatgaatatgcctctaaaggaatctttgtacagagtctaatccctttctatgtagccaccagcatgacagcacccagcaactttctgcacaggtgctcgtggttggtgccttcgccaaaagtctatgcacatcatgctgtttctactcttgggatttccaaaaggaccacaggatattggtcccattctattcagtttctttttgcacagtatatgcctgaatggctctgggtgtggggagcaaatattctcaaccgttcactacgtaaggaagccttatcctgcacagcctgagtctggatggccacttgagaagttttgccaactcctgggaacctcgatattctgacatttggaaaaacacatt

SEQ ID NO: 114 - protein, 330 aa, Homo sapiens
MAAVDSFYLLYWEIARSCNCYMEALALVGAWYTARKSITVICDFYSLIRLHFIPRLGSRADLIKQYGRWAVVSGATDGIGKAYAEELASRGLNIILISRNEEKLQVVAKDIADTYKVETDIIVADFSSGREIYLPIREALKDKDVGILVNNVGVFYPYPQYFTQLSEDKLWDIINVNIAAASLMVHVVLPGMVERKKGAIVTISSGSCCKPTPQLAAFSASKAYLDHFSRALQYEYASKGIFVQSLIPFYVATSMTAPSNFLHRCSWLVPSPKVYAHHAVSTLGISKRTTGYWSHSIQFLFAQYMPEWLWVWGANILNRSLRKEALSCTA

SEQ ID NO: 115 - DNA, 1012 bp, Homo sapiens
  CDS (2)..(1012)
caccggatccaccatggctgctgttgacagtttctacctcttgtacagggaaatcgccaggtcttgcaattgctatatggaagctctagctttggttggagcctggtatacggccagaaaaagcatcactgtcatctgtgacttttacagcctgatcaggctgcattttatcccccgcctggggagcagagcagacttgatcaagcagtatggaagatgggccgttgtcagcggtgcaacagatgggattggaaaagcctacgctgaagagttagcaagccgaggtctcaatataatcctgattagtcggaacgaggagaagttgcaggttgttgctaaagacatagccgacacgtacaaagtggaaactgatattatagttgcggacttcagcagcggtcgtgagatctaccttccaattcgagaagccctgaaggacaaagacgttggcatcttggtaaataacgtgggtgtgttttatccctacccgcagtatttcactcagctgtccgaggacaagctctgggacatcataaatgtgaacattgccgccgctagtttgatggtccatgttgtgttaccgggaatggtggagagaaagaaaggtgccatcgtcacgatctcttctggctcctgctgcaaacccactcctcagctggctgcattttctgcttctaaggcttatttagaccacttcagcagagccttgcaatatgaatatgcctctaaaggaatctttgtacagagtctaatccctttctatgtagccaccagcatgacagcacccagcaactttctgcacaggtgctcgtggttggtgccttcgccaaaagtctatgcacatcatgctgtttctactcttgggatttccaaaaggaccacaggatattggtcccattctattcagtttctttttgcacagtatatgcctgaatggctctgggtgtggggagcaaatattctcaaccgttcactacgtaaggaagccttatcctgcacagccctcgagggc

SEQ ID NO: 116 - protein, 337 aa, Homo sapiens
TGSTMAAVDSFYLLYREIARSCNCYMEALALVGAWYTARKSITVICDFYSLIRLHFIPRLGSRADLIKQYGRWAVVSGATDGIGKAYAEELASRGLNIILISRNEEKLQVVAKDIADTYKVETDIIVADFSSGREIYLPIREALKDKDVGILVNNVGVFYPYPQYFTQLSEDKLWDIINVNIAAASLMVHVVLPGMVERKKGAIVTISSGSCCKPTPQLAAFSASKAYLDHFSRALQYEYASKGIFVQSLIPFYVATSMTAPSNFLHRCSWLVPSPKVYAHHAVSTLGISKRTTGYWSHSIQFLFAQYMPEWLWVWGANILNRSLRKEALSCTALEG

SEQ ID NO: 117 - DNA, 1831 bp, Homo sapiens
  CDS (183)..(1172)
  misc_feature (923)..(923): Wherein n may be a, c, g or t
  misc_feature (921)..(923): Wherein Xaa may be Ile or Met
accggtttggaagactttgccggcctgcaggacacatgatgacattggacccaccctccccagctcggagtctttaactcagtcacatctacggagtccctttggccacataagattggccttaagagaaggacggagccacatactgctgacggcccagaactggcagagagaaggttgccatggctgctgttgacagtttctacctcttgtacagggaaatcgccaggtcttgcaattgctatatggaagctctagctttggttggagcctggtatacggccagaaaaagcatcactgtcatctgtgacttttacagcctgatcaggctgcattttatcccccgcctggggagcagagcagacttgatcaagcagtatggaagatgggccgttgtcagcggtgcaacagatgggattggaaaagcctacgctgaagagttagcaagccgaggtctcaatataatcctgattagtcggaacgaggagaagttgcaggttgttgctaaagacatagccgacacgtacaaagtggaaactgatattatagttgcggacttcagcagcggtcgtgagatctaccttccaattcgagaagccctgaaggacaaagacgttggcatcttggtaaataacgtgggtgtgttttatccctacccgcagtatttcactcagctgtccgaggacaagctctgggacatcataaatgtgaacattgccgccgctagtttgatggtccatgttgtgttaccgggaatggtggagagaaagaaaggtgccatcgtcacgatctcttctggctcctgctgcaaacccactcctcagctggctgcattttctgcttctaaggcttatttagaccacttcagcagagccttgcaatatgaatatgcctctaaaggaatctttgtacagagtctaatncctttctatgtagccaccagcatgacagcacccagcaactttctgcacaggtgctcgtggttggtgccttcgccaaaagtctatgcacatcatgctgtttctactcttgggatttccaaaaggaccacaggatattggtcccattctattcagtttctttttgcacagtatatgcctgaatggctctgggtgtggggagcaaatattctcaaccgttcactacgtaaggaagccttatcctgcacagcctgagtctggatggccacttgagaagttttgccaactcctgggaacctcgatattctgacatttggaaaaacacatttaatttatctcctgtgtttcattgctgattattcagcatactgttgattcgtcatttgcaaaacacacataataccgtcagagtgctgtgaaaaaccttaagggtgtgtggatggcacaggatcaataatgcctgaggctgattgacgacatctacatttcagtgctttttccctaagctgtttgaaagttacgcttttctgttgttctagagccacagcagtctaatattgaaatataatatgattgtcaggtcttataatttcagatgttgttttttaagggaaattgaccatttcactagaggagttgtgctggtttttacatgtgcatcaaggaaagactactggaaaagtatttattttggtaactaagattgctggctactattagggacacactccgggctgtttggtatagctctacctggtttgactatctgtcatggaaatgctgccttccactggtttttcctttgagacggggtgtgtgcctgggttgtggggcccttgggccccttttttttggtgccccttcttccacccactttcggcccgcgggccccctggcgctctgggtttccc

SEQ ID NO: 118 - protein, 330 aa, Homo sapiens
  misc_feature (247)..(247): Wherein Xaa may be any naturally occurring amino acid
MAAVDSFYLLYREIARSCNCYMEALALVGAWYTARKSITVICDFYSLIRLHFIPRLGSRADLIKQYGRWAVVSGATDGIGKAYAEELASRGLNIILISRNEEKLQVVAKDIADTYKVETDIIVADFSSGREIYLPIREALKDKDVGILVNNVGVFYPYPQYFTQLSEDKLWDIINVNIAAASLMVHVVLPGMVERKKGAIVTISSGSCCKPTPQLAAFSASKAYLDHFSRALQYEYASKGIFVQSLXPFYVATSMTAPSNFLHRCSWLVPSPKVYAHHAVSTLGISKRTTGYWSHSIQFLFAQYMPEWLWVWGANILNRSLRKEALSCTA

SEQ ID NO: 119 - DNA, 1152 bp, Homo sapiens
  CDS (97)..(1086)
atctacggagtccctttggccacataagattggccttaagagaaggacggagccacatactgctgacggcccagaactggcagagagaaggttgccatggctgctgttgacagtttctacctcttgtacagggaaatcgccaggtcttgcaattgctatatggaagctctagctttggttggagcctggtatacggccagaaaaagcatcactgtcatctgtgacttttacagcctgatcaggctgcattttatcccccgcctggggagcagagcagacttgatcaagcagtatggaagatgggccgttgtcagcggtgcaacagatgggattggaaaagcctacgctgaagagttagcaagccgaggtctcaatataatcctgattagtcggaacgaggagaagttgcaggttgttgctaaagacatagccgacacgtacaaagtggaaactgatattatagttgcggacttcagcagcggtcgtgagatctaccttccaattcgagaagccctgaaggacaaagacgttggcatcttggtaaataacgtgggtgtgttttatccctacccgcagtatttcactcagctgtccgaggacaagctctgggacatcataaatgtgaacattgccgccgctagtttgatggtccatgttgtgttaccgggaatggtggagagaaagaaaggtgccatcgtcacgatctcttctggctcctgctgcaaacccactcctcagctggctgcattttctgcttctaaggcttatttagaccacttcagcagagccttgcaatatgaatatgcctctaaaggaatctttgtacagagtctaatccctttctatgtagccaccagcatgacagcacccagcaactttctgcacaggtgctcgtggttggtgccttcgccaaaagtctatgcacatcatgctgtttctactcttgggatttccaaaaggaccacaggatattggtcccattctattcagtttctttttgcacagtatatgcctgaatggctctgggtgtggggagcaaatattctcaaccgttcactacgtaaggaagccttatgctgcacagcctgagtctggatggccacttgagaagttttgccaactcctgggaacctcgatattctgacatttgga

SEQ ID NO: 120 - protein, 330 aa, Homo sapiens
MAAVDSFYLLYREIARSCNCYMEALALVGAWYTARKSITVICDFYSLIRLHFIPRLGSRADLIKQYGRWAVVSGATDGIGKAYAEELASRGLNIILISRNEEKLQVVAKDIADTYKVETDIIVADFSSGREIYLPIREALKDKDVGILVNNVGVFYPYPQYFTQLSEDKLWDIINVNIAAASLMVHVVLPGMVERKKGAIVTISSGSCCKPTPQLAAFSASKAYLDHFSRALQYEYASKGIFVQSLIPFYVATSMTAPSNFLHRCSWLVPSPKVYAHHAVSTLGISKRTTGYWSHSIQFLFAQYMPEWLWVWGANILNRSLRKEALCCTA

SEQ ID NO: 121 - DNA, 1162 bp, Homo sapiens
  CDS (97)..(1086)
atctacggagtccctttggccacataagattggccttaagagaaggacggagccacatactgctgacggcccagaactggcagagagaaggttgccatggctgctgttgacagtttctacctcttgtactgggaaatcgccaggtcttgcaattgctatatggaagctctagctttggttggagcctggtatacggccagaaaaagcatcactgtcatctgtgacttttacagcctgatcaggctgcattttatcccccgcctggggagcagagcagacttgatcaagcagtatggaagatgggccgttgtcagcggtgcaacagatgggattggaaaagcctacgctgaagagttagcaagccgaggtctcaatataatcctgattagtcggaacgaggagaagttgcaggttgttgctaaagacatagccgacacgtacaaagtggaaactgatattatagttgcggacttcagcagcggtcgtgagatctaccttccaattcgagaagccctgaaggacaaagacgttggcatcttggtaaataacgtgggtgtgttttatccctacccgcagtatttcactcagctgtccgaggacaagctctgggacatcataaatgtgaacattgccgccgctagtttgatggtccatgttgtgttaccgggaatggtggagagaaagaaaggtgccatcgtcacgatctcttctggctcctgctgcaaacccactcctcagctggctgcattttctgcttctaaggcttatttagaccacttcagcagagccttgcaatatgaatatgcctctaaaggaatctttgtacagagtctaatccctttctatgtagccaccagcatgacagcacccagcaactttctgcacaggtgctcgtggttggtgccttcgccaaaagtctatgcacatcatgctgtttctactcttgggatttccaaaaggaccacaggatattggtcccattctattcagtttctttttgcacagtatatgcctgaatggctctgggtgtggggagcaaatattctcaaccgttcactacgtaaggaagccttatgctgcacagcctgagtctggatggccacttgagaagttttgccaactcctgggaacctcgatattctgacatttggaaaaacacatt

SEQ ID NO: 122 - protein, 330 aa, Homo sapiens
MAAVDSFYLLYWEIARSCNCYMEALALVGAWYTARKSITVICDFYSLIRLHFIPRLGSRADLIKQYGRWAVVSGATDGIGKAYAEELASRGLNIILISRNEEKLQVVAKDIADTYKVETDIIVADFSSGREIYLPIREALKDKDVGILVNNVGVFYPYPQYFTQLSEDKLWDIINVNIAAASLMVHVVLPGMVERKKGAIVTISSGSCCKPTPQLAAFSASKAYLDHFSRALQYEYASKGIFVQSLIPFYVATSMTAPSNFLHRCSWLVPSPKVYAHHAVSTLGISKRTTGYWSHSIQFLFAQYMPEWLWVWGANILNRSLRKEALCCTA

SEQ ID NO: 123 - DNA, 938 bp, Homo sapiens
  CDS (1)..(930)
aatctcaccagagtaaccgaattcattctcatgggctttatggaccaccccaaattggagattcccctctttctggtgtttctgagtttctacctagtcacccttcttgggaatgtggggatgattatgttaatccaagtagatgtcaaactctacaccccaatgtacttcttcctgagccacctctccctgctggatgcctgttacacctcagtcatcacccctcagatcctagccacattggccacaggcaaaacggtcatctcctacggccactgtgctgcccagttctttttattcaccatctgtgcaggcacagagtgctttctgctggcagtgatggcctatgatcgctatgctgccattcgcaacccactgctctataccgtggccatgaatcccaggctctactggagcctggtggtaggagcctatgtctgtggggtgtcaggagccatcctgcgtaccacttgcaccttcaccctctccttctgtaaggacaatcaaataaacttcttcttctgtgacctcccacccctgctgaagcttgcctgcagtgacacagcaaacatcgagattgtcatcatcttctttggcaattttgtgattttggccaatgcctccgtcatcctgatttcctatctgctcatcatcaagaccattttgaaagtgaagtcttcaggtggcagggccaagactttctccacatgtgcctctcacatcactgctgtggcccttttctttggagcccttatcttcatgtatctgcaaagtggctcaggcaaatctctggaggaagacaaagtcgtgtctgtcttctatacagtggtcatccccatgctgaaccctctgatctacagcttaagaaacaaagatgtaaaagacgccttcagaaaggtcgctaggagactccaggtgtccctgagcatgtagattta

SEQ ID NO: 124 - protein, 310 aa, Homo sapiens
NLTRVTEFILMGFMDHPKLEIPLFLVFLSFYLVTLLGNVGMIMLIQVDVKLYTPMYFFLSHLSLLDACYTSVITPQILATLATGKTVISYGHCAAQFFLFTICAGTECFLLAVMAYDRYAAIRNPLLYTVAMNPRLYWSLVVGAYVCGVSGAILRTTCTFTLSFCKDNQINFFFCDLPPLLKLACSDTANIEIVIIFFGNFVILANASVILISYLLIIKTILKVKSSGGRAKTFSTCASHITAVALFFGALIFMYLQSGSGKSLEEDKVVSVFYTVVIPMLNPLIYSLRNKDVKDAFRKVARRLQVSLSM

SEQ ID NO: 125 - DNA, 822 bp, Homo sapiens
  CDS (1)..(822)
ggatccatgattatgttaatccaagtagatgtcaaactctacaccccaatgtacttcttcctgagccacctctccctgctggatgcctgttacacctcagtcatcacccctcagatcctagccacattggccacaggcaaaacggtcatctcctacggccactgtgctgcccagttctttttattcaccatctgtgcaggcacagagtgctttctgctggcagtgatggcctatgatcgctatgctgccattcgcaacccactgctctataccgtggccatgaatcccaggctctactggagcctggtggtaggagcctatgtctgtggggtgtcaggagccatcctgcgtaccacttgcaccttcaccctctccttctgtaaggacaatcaaataaacttcttcttctgtgacctcccacccctgctgaagcttgcctgcagtgacacagcaaacatcgagattgtcatcatcttctttggcaattttgtgattttggccaatgcctccgtcatcctgatttcctatctgctcatcatcaagaccattttgaaagtgaagtcttcaggtggcagggccaagactttctccacatgtgcctctcacatcactgctgtggcccttttctttggagcccttatcttcatgtatctgcaaagtggctcaggcaaatctctggaggaagacaaagtcgtgtctgtcttctatacagtggtcatccccatgctgaaccctctgatctacagcttaagaaacaaagatgtaaaagacgccttcagaaaggtcgctaggagactccaggtgttcctgagcatgctcgag

SEQ ID NO: 126 - protein, 274 aa, Homo sapiens
GSMIMLIQVDVKLYTPMYFFLSHLSLLDACYTSVITPQILATLATGKTVISYGHCAAQFFLFTICAGTECFLLAVMAYDRYAAIRNPLLYTVAMNPRLYWSLVVGAYVCGVSGAILRTTCTFTLSFCKDNQINFFFCDLPPLLKLACSDTANIEIVIIFFGNFVILANASVILISYLLIIKTILKVKSSGGRAKTFSTCASHITAVALFFGALIFMYLQSGSGKSLEEDKVVSVFYTVVIPMLNPLIYSLRNKDVKDAFRKVARRLQVFLSMLE

SEQ ID NO: 127 - DNA, 964 bp, Homo sapiens
  CDS (2)..(964)
caccggatccaccatggccaagaataatctcaccagagtaaccgaattcattctcatgggctttatggaccaccccaaattggagattcccctctttctggtgtttctgagtttctacctagtcacccttcttgggaatgtggggatgattatgttaatccaagtagatgtcaaactctacaccccaatgtacttcttcctgagccacctctccctgctggatgcctgttacacctcagtcatcacccctcagatcctagccacattggccacaggcaaaacggtcatctcctacggccactgtgctgcccagttctttttattcaccatctgtgcaggcacagagtgctttctgctggcagtgatggcctatgatcgctatgctgccattcgcaacccactgctctataccgtggccatgaatcccaggctctgctggagcctggtggtaggagcctatgtctgtggggtgtcaggagccatcctgcgtaccacttgcaccttcaccctctccttctgtaaggacaatcaaataaacttcttcttctgtgacctcccacccctgctgaagcttgcctgcagtgacacagcaaacatcgagattgtcatcatcttctttggcaattttgtgattttggccaatgcctccgtcatcctgatttcctatctgctcatcatcaagaccattttgaaagtgaagtcttcaggtggcagggccaagactttctccacatgtgcctctcacatcactgctgtggcccttttctttggagcccttatcttcatgtatctgcaaagtggctcaggcaaatctctggaggaagacaaagtcgtgtctgtcttctatacagtggtcatccccatgctgaaccctctgatctacagcttaagaaacaaagatgtaaaagacgccttcagaaaggtcgctaggagactccaggtgtccctgagcatgctcgagggc

SEQ ID NO: 128 - protein, 321 aa, Homo sapiens
TGSTMAKNNLTRVTEFILMGFMDHPKLEIPLFLVFLSFYLVTLLGNVGMIMLIQVDVKLYTPMYFFLSHLSLLDACYTSVITPQILATLATGKTVISYGHCAAQFFLFTICAGTECFLLAVMAYDRYAAIRNPLLYTVAMNPRLCWSLVVGAYVCGVSGAILRTTCTFTLSFCKDNQINFFFCDLPPLLKLACSDTANIEIVIIFFGNFVILANASVILISYLLIIKTILKVKSSGGRAKTFSTCASHITAVALFFGALIFMYLQSGSGKSLEEDKVVSVFYTVVIPMLNPLIYSLRNKDVKDAFRKVARRLQVSLSMLEG

SEQ ID NO: 129 - DNA, 968 bp, Homo sapiens
  CDS (17)..(958)
agtccacattgtctccatggccaagaataatctcaccagagtaaccgaattcattctcatgggctttatggaccaccccaaattggagattcccctctttctggtgtttctgagtttctacctagtcacccttcttgggaatgtggggatgattatgttaatccaagtagatgtcaaactctacaccccaatgtacttcttcctgagccacctctccctgctggatgcctgttacacctcagtcatcacccctcagatcctagccacattggccacaggcaaaacggtcatctcctacggccactgtgctgcccagttctttttattcaccatctgtgcaggcacagagtgctttctgctggcagtgatggcctatgatcgctatgctgccattcgcaacccactgctctataccgtggccatgaatcccaggctctgctggagcctggtggtaggagcctatgtctgtggggtgtcaggagccatcctgcgtaccacttgcaccttcaccctctccttctgtaaggacaatcaaataaacttcttcttctgtgacctcccacccctgctgaagcttgcctgcagtgacacagcaaacatcgagattgtcatcatcttctttggcaattttgtgattttggccaatgcctccgtcatcctgatttcctatctgctcatcatcaagaccattttgaaagtgaagtcttcaggtggcagggccaagactttctccacatgtgcctctcacatcactgctgtggcccttttctttggagcccttatcttcatgtatctgcaaagtggctcaggcaaatctctggaggaagacaaagtcgtgtctgtcttctatacagtggtcatccccatgctgaaccctctgatctacagcttaagaaacaaagatgtaaaagacgccttcagaaaggtcgctaggagactccaggtgtccctgagcatgtagatctaag

SEQ ID NO: 130 - protein, 314 aa, Homo sapiens
MAKNNLTRVTEFILMGFMDHPKLEIPLFLVFLSFYLVTLLGNVGMIMLIQVDVKLYTPMYFFLSHLSLLDACYTSVITPQILATLATGKTVISYGHCAAQFFLFTICAGTECFLLAVMAYDRYAAIRNPLLYTVAMNPRLCWSLVVGAYVCGVSGAILRTTCTFTLSFCKDNQINFFFCDLPPLLKLACSDTANIEIVIIFFGNFVILANASVILISYLLIIKTILKVKSSGGRAKTFSTCASHITAVALFFGALIFMYLQSGSGKSLEEDKVVSVFYTVVIPMLNPLIYSLRNKDVKDAFRKVARRLQVSLSM

SEQ ID NO: 131 - DNA, 822 bp, Homo sapiens; identical to SEQ ID NO: 125
  CDS (7)..(816)

SEQ ID NO: 132 - protein, 270 aa, Homo sapiens
MIMLIQVDVKLYTPMYFFLSHLSLLDACYTSVITPQILATLATGKTVISYGHCAAQFFLFTICAGTECFLLAVMAYDRYAAIRNPLLYTVAMNPRLYWSLVVGAYVCGVSGAILRTTCTFTLSFCKDNQINFFFCDLPPLLKLACSDTANIEIVIIFFGNFVILANASVILISYLLIIKTILKVKSSGGRAKTFSTCASHITAVALFFGALIFMYLQSGSGKSLEEDKVVSVFYTVVIPMLNPLIYSLRNKDVKDAFRKVARRLQVFLSM

SEQ ID NO: 133 - DNA, 997 bp, Homo sapiens
  CDS (21)..(965)
  misc_feature (996)..(996): Wherein n may be a, c, g or t
  misc_feature (997)..(997): Wherein n may be a, c, g or t
ggcgcttataattttgaactatgaccaatcagacacagatgatggaattcttgcttgtgagatttactgagaattgggtgctcctgaggctgcatgctttgctcttctcactgatctacctcacggctgtgctgatgaatttagtcatcattctcctcatgattctggaccatcgtctccacatggcaatgtactttttcctccgacatttgtccttcttagacctgtgtctcatttctgccacagtccccaaatccatcctcaactctgtcgcctccactgactccatctccttcctggggtgtgtgttgcagctcttcttggtggtactgctggctggatcagagattggcatccttactgccatgtcctatgaccgctatgctgccatctgctgccccctacactgtgaggctgtcatgagcagagggctctgtgtccagttgatggctctgtcctggctcaacagaggggccttgggactcttgtacacagctggaacattctctctgaatttttatggctctgatgagctacatcagttcttctgcgatgtccctgccctactaaagctcacttgttctaaagaacatgccatcattagtgtcagtgtggccattggggtctgttatgcattttcatgtttagtttgcattgtagtttcctatgtgtacattttctctgctgtgttaaggatatcacagagacagagacaatccaaagccttttccaactgtgtgcctcacctcattgttgtcactgtgtttcttgtaacaggtgctgttgcttatttaaagccagggtctgatgcaccttctattctagacttgctggtgtctgtgttctattctgtcgcacctccaaccttgaaccctgttatctactgtctgaagaacaaggacattaaatccgctctgagtaaagtcctgtggaatgttagaagcagtggggtaatgaaagatgactaaagttgaagatgggaagtactttttttgnn

SEQ ID NO: 134 - protein, 315 aa, Homo sapiens
MTNQTQMMEFLLVRFTENWVLLRLHALLFSLIYLTAVLMNLVIILLMILDHRLHMAMYFFLRHLSFLDLCLISATVPKSILNSVASTDSISFLGCVLQLFLVVLLAGSEIGILTAMSYDRYAAICCPLHCEAVMSRGLCVQLMALSWLNRGALGLLYTAGTFSLNFYGSDELHQFFCDVPALLKLTCSKEHAIISVSVAIGVCYAFSCLVCIVVSYVYIFSAVLRISQRQRQSKAFSNCVPHLIVVTVFLVTGAVAYLKPGSDAPSILDLLVSVFYSVAPPTLNPVIYCLKNKDIKSALSKVLWNVRSSGVMKDD

SEQ ID NO: 135 - DNA, 819 bp, Homo sapiens
  CDS (1)..(819)
ggatccatgattctggaccatcgtctccacatggcaatgtactttttcctccgacatttgtccttcttagacctgtgtctcatttctgccacagtccccaaatccatcctcaactctgtcgcctccactgactccatctccttcctggggtgtgtgttgcagctcttcttggtggtactgctggctggatcagagattggcatccttactgccatgtcctatgaccgctatgctgccatctgctgccccctacactgtgaggctgtcatgagcagagggctctgtgtccagttgatggctctgtcctggctcaacagaggggccttgggactcttgtacacagctggaacattctctctgaatttttatggctctgatgagctacatcagttcttctgcgatgtccctgccctactaaagctcacttgttctaaagaacatgccatcattagtgtcagtgtggccattggggtctgttatgcattttcatgtttagtttgcattgtagtttcctatgtgtacattttctctgctgtgttaaggatatcacagagacagagacaatccaaagccttttccaactgtgtgcctcacctcattgttgtcactgtgtttcttgtaacaggtgctgttgcttatttaaagccagggtctgatgcaccttctattctagacttgctggtgtctgtgttctattctgtcgcacctccaaccttgaaccctgttatctactgtctgaagaacaaggacattaaatccgctctgagtaaagtcctgtggaatgttagaagcagtggggtaatgaaagatgacctcgag

SEQ ID NO: 136 - protein, 273 aa, Homo sapiens
GSMILDHRLHMAMYFFLRHLSFLDLCLISATVPKSILNSVASTDSISFLGCVLQLFLVVLLAGSEIGILTAMSYDRYAAICCPLHCEAVMSRGLCVQLMALSWLNRGALGLLYTAGTFSLNFYGSDELHQFFCDVPALLKLTCSKEHAIISVSVAIGVCYAFSCLVCIVVSYVYIFSAVLRISQRQRQSKAFSNCVPHLIVVTVFLVTGAVAYLKPGSDAPSILDLLVSVFYSVAPPTLNPVIYCLKNKDIKSALSKVLWNVRSSGVMKDDLE

SEQ ID NO: 137 - DNA, 996 bp, Homo sapiens
  CDS (21)..(965)
ggcgcttataattttgaactatgaccaatcagacacagatgatggaattcttgcttgtgagatttactgagaattgggtgctcctgaggctgcatgctttgctcttctcactgatctacctcacggctgtgctgatgaatttagtcatcattctcctcatgattctggaccatcgtctccacatggcaatgtactttttcctccgacatttgtccttcttagacctgtgtctcatttctgccacagtccccaaatccatcctcaactctgtcgcctccactgactccatctccttcctggggtgtgtgttgcagctcttcttggtggtactgctggctggatcagagattggcatccttactgccatgtcctatgaccgctatgctgccatctgctgccccctacactgtgaggctgtcatgagcagagggctctgtgtccagttgatggctctgtcctggctcaacagaggggccttgggactcttgtacacagctggaacattctctctgaatttttatggctctgatgagctacatcagttcttctgcgatgtccctgccctactaaagctcacttgttctaaagaacatgccatcattagtgtcagtgtggccattggggtctgttatgcattttcatgtttagtttgcattgtagtttcctatgtgtacattttctctgctgtgttaaggatatcacagagacagagacaatccaaagccttttccaactgtgtgcctcacctcattgttgtcactgtgtttcttgtaacaggtgctgttgcttatttaaagccagggtctgatgcaccttctattctagacttgctggtgtctgtgttctattctgtcgcacctccaaccttgaaccctgttatctactgtctgaagaacaaggacattaaatccgctctgagtaaagtcctgtggaatgttagaagcagtggggtaatgaaagatgactaaagattgaagatgggaagtactttttttg

SEQ ID NO: 138 - protein, 315 aa, Homo sapiens; identical to SEQ ID NO: 134

SEQ ID NO: 139 - DNA, 819 bp, Homo sapiens; identical to SEQ ID NO: 135
  CDS (7)..(813)

SEQ ID NO: 140 - protein, 269 aa, Homo sapiens
MILDHRLHMAMYFFLRHLSFLDLCLISATVPKSILNSVASTDSISFLGCVLQLFLVVLLAGSEIGILTAMSYDRYAAICCPLHCEAVMSRGLCVQLMALSWLNRGALGLLYTAGTFSLNFYGSDELHQFFCDVPALLKLTCSKEHAIISVSVAIGVCYAFSCLVCIVVSYVYIFSAVLRISQRQRQSKAFSNCVPHLIVVTVFLVTGAVAYLKPGSDAPSILDLLVSVFYSVAPPTLNPVIYCLKNKDIKSALSKVLWNVRSSGVMKDD

SEQ ID NO: 141 - DNA, 957 bp, Homo sapiens
  CDS (7)..(951)
ggatccatgaccaatcagacacagatgatggaattcttgcttgtgagatttactgagaattgggtgctcctgaggctgcatgctttgctcttctcactgatctacctcacggctgtgctgatgaatttagtcatcattctcctcatgattctggaccatcgtctccacatggcaatgtactttttcctccgacatttgtccttcttagacctgtgtctcatttctgccacagtccccaaatccatcctcaactctgtcgcctccactgactccatctccttcctggggtgtgtgttgcagctcttcttggtggtactgctggctggatcagagattggcatccttactgccatgtcctatgaccgctatgctgccatctgctgccccctacactgtgaggctgtcatgagcagagggctctgtgtccagttgatggctctgtcctggctcaacagaggggccttgggactcttgtacacagctggaacattctctctgaatttttatggctctgatgagctacatcagttcttctgcgatgtccctgccctactaaagctcacttgttctaaagaacatgccatcattagtgtcagtgtggccattggggtctgttatgcattttcatgtttagtttgcattgtagtttcctatgtgtacattttctctgctgtgttaaggatatcacagagacagagacaatccaaagccttttccaactgtgtgcctcacctcattgttgtcactgtgtttcttgtaacaggtgctgttgcttatttaaagccagggtctgatgcaccttctattctagacttgctggtgtctgtgttctattctgtcgcacctccaaccttgaaccctgttatctactgtctgaagaacaaggacattaaatccgctctgagtaaagtcctgtggaatgttagaagcagtggggtaatgaaagatgacctcgag

SEQ ID NO: 142 - protein, 315 aa, Homo sapiens; identical to SEQ ID NO: 134

SEQ ID NO: 143 - DNA, 828 bp, Homo sapiens
  CDS (16)..(801)
ccaccccgagggaccatgtcgaggctcagctggggataccgcgagcacaacggtcctattcactggaaggaatttttccctattgctgatggtgatcagcaatctccaattgagattaaaaccaaagaagtgaaatatgactcttccctccgaccacttagtatcaagtatgacccaagctcagctaaaatcatcagcaacagcggccattccttcaatgttgactttgatgacacagagaacaaatcagttctgcgtggtggtcctctcactggaagctacaggttacggcaggttcaccttcactgggggtccgctgatgaccacggctccgagcacatagtagatggagtgagctatgctgcagagctccatgttgttcactggaattcagacaaataccccagctttgttgaggcagctcatgaaccagatggactggctgtcttgggagtgtttttacaggtgggtgaacctaattcccaactgcaaaagattactgacactttggattccattaaagaaaagggtaaacaaactcgattcacaaattttgacctattgtctctgcttccaccatcctgggactactggacatatcctggttctcttacagttccacctcttcttgagagtgtcacatggattgttttaaagcaacctataaacatcagctctcaacagctggccaaatttcgcagtctcctgtgcacagcggagggtgaagcagcagcttttctggtgagcaatcaccgcccaccacagcctctaaagggccgcaaagtgagagcctctttccattaaaaattgtcaccaatgaactccccc

SEQ ID NO: 144 - protein, 262 aa, Homo sapiens
MSRLSWGYREHNGPIHWKEFFPIADGDQQSPIEIKTKEVKYDSSLRPLSIKYDPSSAKIISNSGHSFNVDFDDTENKSVLRGGPLTGSYRLRQVHLHWGSADDHGSEHIVDGVSYAAELHVVHWNSDKYPSFVEAAHEPDGLAVLGVFLQVGEPNSQLQKITDTLDSIKEKGKQTRFTNFDLLSLLPPSWDYWTYPGSLTVPPLLESVTWIVLKQPINISSQQLAKFRSLLCTAEGEAAAFLVSNHRPPQPLKGRKVRASFH

SEQ ID NO: 145 - DNA, 784 bp, Homo sapiens
  CDS (2)..(784)
caccggatccagctggggataccgcgagcacaacggtcctattcactggaaggaatttttccctattgctgatggtgatcagcaatctccaattgagattaaaaccaaagaagtgaaatatgactcttccctccgaccacttagtatcaagtatgacccaagctcagctaaaatcatcagcaacagcggccattccttcaatgttgactttgatgacacagagaacaaatcagttctgcgtggtggtcctctcactggaagctacaggttacggcaggttcaccttcactgggggtccgctgatgaccacggctccgagcacatagtagatggagtgagctatgctgcagagctccatgttgttcactggaattcagacaaataccccagctttgttgaggcagctcatgaaccagatggactggctgtcttgggagtgtttttacagattggtgaacctaattcccaactgcaaaagattactgacactttggattccattaaagaaaagggtaaacaaactcgattcacaaattttgacctattgtctctgcttccaccatcctgggactactggacatatcctggttctcttacagttccacctcttcttgagagtgtcacatggattgttttaaagcaacctataaacatcagctctcaacagctggccaaatttcgcagtctcctgtgcacagcggagggtgaagcagcagcttttctggtgagcaatcaccgcccaccacagcctctaaagggccgcaaagtgagagccctcgagggc

SEQ ID NO: 146 - protein, 261 aa, Homo sapiens
TGSSWGYREHNGPIHWKEFFPIADGDQQSPIEIKTKEVKYDSSLRPLSIKYDPSSAKIISNSGHSFNVDFDDTENKSVLRGGPLTGSYRLRQVHLHWGSADDHGSEHIVDGVSYAAELHVVHWNSDKYPSFVEAAHEPDGLAVLGVFLQIGEPNSQLQKITDTLDSIKEKGKQTRFTNFDLLSLLPPSWDYWTYPGSLTVPPLLESVTWIVLKQPINISSQQLAKFRSLLCTAEGEAAAFLVSNHRPPQPLKGRKVRALEG

SEQ ID NO: 147 - DNA, 833 bp, Homo sapiens
  CDS (21)..(806)
atgtcgaggctcagctggggatgtcgaggctcagctggggataccgcgagcacaacggtcctattcactggaaggaatttttccctattgctgatggtgatcagcaatctccaattgagattaaaaccaaagaagtgaaatatgactcttccctccgaccacttagtatcaagtatgacccaagctcagctaaaatcatcagcaacagcggccattccttcaatgttgactttgatgacacagagaacaaatcagttctgcgtggtggtcctctcactggaagctacaggttacggcaggttcaccttcactgggggtccgctgatgaccacggctccgagcacatagtagatggagtgagctatgctgcagagctccatgttgttcactggaattcagacaaataccccagctttgttgaggcagctcatgaaccagatggactggctgtcttgggagtgtttttacagattggtgaacctaattcccaactgcaaaagattactgacactttggattccattaaagaaaagggtaaacaaactcgattcacaaattttgacctattgtctctgcttccaccatcctgggactactggacatatcctggttctcttacagttccacctcttcttgagagtgtcacatggattgttttaaagcaacctataaacatcagctctcaacagctggccaaatttcgcagtctcctgtgcacagcggagggtgaagcagcagcttttctggtgagcaatcaccgcccaccacagcctctaaagggccgcaaagtgagagcctctttccattaaaaattgtcaccaatgaactccccc

SEQ ID NO: 148 - protein, 262 aa, Homo sapiens
MSRLSWGYREHNGPIHWKEFFPIADGDQQSPIEIKTKEVKYDSSLRPLSIKYDPSSAKIISNSGHSFNVDFDDTENKSVLRGGPLTGSYRLRQVHLHWGSADDHGSEHIVDGVSYAAELHVVHWNSDKYPSFVEAAHEPDGLAVLGVFLQIGEPNSQLQKITDTLDSIKEKGKQTRFTNFDLLSLLPPSWDYWTYPGSLTVPPLLESVTWIVLKQPINISSQQLAKFRSLLCTAEGEAAAFLVSNHRPPQPLKGRKVRASFH

SEQ ID NO: 149 - DNA, 2762 bp, Homo sapiens
  CDS (3)..(2744)
ctatgggctggaggccccggagagctcgggggaccccgttgctgctgctgctactactgctgctgctctggccagtgccaggcgccggggtgcttcaaggacatatccctgggcagccagtcaccccgcactgggtcctggatggacaaccctggcgcaccgtcagcctggaggagccggtctcgaagccagacatggggctggtggccctggaggctgaaggccaggagctcctgcttgagctggagaagaaccacaggctgctggccccaggatacatagaaacccactacggcccagatgggcagccagtggtgctggcccccaaccacacggatcattgccactaccaagggcgagtaaggggcttccccgactcctgggtagtcctctgcacctgctctgggatgagtggcctgatcaccctcagcaggaatgccagctattatctgcgtccctggccaccccggggctccaaggacttctcaacccacgagatctttcggatggagcagctgctcacctggaaaggaacctgtggccacagggatcctgggaacaaagcgggcatgaccagccttcctggtggtccccagagcaggggcaggcgagaagcgcgcaggacccggaagtacctggaactgtacattgtggcagaccacaccctgttcttgactcggcaccgaaacttgaaccacaccaaacagcgtctcctggaagtcgccaactacgtggaccagcttctcaggactctggacattcaggtggcgctgaccggcctggaggtgtggaccgagcgggaccgcagccgcgtcacgcaggacgccaacgccacgctctgggccttcctgcagtggcgccgggggctgtgggcgcagcggccccacgactccgcgcagctgctcacgggccgcgccttccagggcgccacagtgggcctggcgcccgtcgagggcatgtgccgcgccgagagctcgggaggcgtgagcacggaccactcggagctccccatcggcgccgcagccaccatggcccatgagatcggccacagcctcggcctcagccacgaccccgacggctgctgcgtggaggctgcggccgagtccggaggctgcgtcatggctgcggccaccgggcacccgtttccgcgcgtgttcagcgcctgcagccgccgccagctgcgcgccttcttccgcaaggggggcggcgcttgcctctccaatgccccggaccccggactcccggtgccgccggcgctctgcgggaacggcttcgtggaagcgggcgaggagtgtgactgcggccctggccaggagtgccgcgacctctgctgctttgctcacaactgctcgctgcgcccgggggcccagtgcgcccacggggactgctgcgtgcgctgcctgctgaagccggctggagcgctgtgccgccaggccatgggtgactgtgacctccctgagttttgcacgggcacctcctcccactgtcccccagacgtttacctactggacggctcaccctgtgccaggggcagtggctactgctgggatggcgcatgtcccacgctggagcagcagtgccagcagctctgggggcctggctcccacccagctcccgaggcctgtttccaggtggtgaactctgcgggagatgctcatggaaactgcggccaggacagcgagggccacttcctgccctgtgcagggagggatgccctgtgtgggaagctgcagtgccagggtggaaagcccagcctgctcgcaccgcacatggtgccagtggactctaccgttcacctagatggccaggaagtgacttgtcggggagccttggcactccccagtgcccagctggacctgcttggcctgggcctggtagagccaggcacccagtgtggacctagaatggtgtgccagagcaggcgctgcaggaagaatgccttccaggagcttcagcgctgcctgactgcctgccacagccacggggtttgcaatagcaaccataactgccactgtgctccaggctgggctccacccttctgtgacaagccaggctttggtggcagcatggacagtggccctgtgcaggctgaaaaccatgacaccttcctgctggccatgctcctcagcgtcctgctgcctctgctcccaggggccggcctggcctggtgttgctaccgactcccaggagcccatctgcagcgatgcagctggggctgcagaagggaccctgcgtgcagtggccccaaagatggcccacacagggaccaccccctgggcggcgttcaccccatggagttgggccccacagccactggacagccctggcccctggccccaggggctcctgctgaccatattcacaacatttaccctccaccatttctcccagaccctgagaactctcatgagcccagcagccaccctgagaagcctctgccagcagtctcgcctgacccccaaggtggttcccttgcagcctggggccccagtcctttaggggacaacatatcctcctcattctcagcagatcaagtccagatgccaagatcctgcctctgtggcgaaccctggggaggccacgtgggaaggaaagagggctctaagaggggaggccccagactgggggagaggcctgtctggagcccaggatcacctggctgtgctgcagaactggagaagagaagctcagcagaaaggagctggcatggggccaacagcagaaaagcaggaggcacgcagaagtgactgggaagcaggagg

SEQ ID NO: 150 - protein, 914 aa, Homo sapiens [sequence omitted]

SEQ ID NO: 151 - DNA, 3397 bp, Homo sapiens
  CDS (37)..(2397)
gcgagccgctgcctagaggccgaggagctcacagctatgggctggaggccccggagagctcgggggaccccgttgctgctgctgctactactgctgctgctctggccagtgccaggcgccggggtgcttcaaggacatatccctgggcagccagtcaccccgcactgggtcctggatggacaaccctggcgcaccgtcagcctggaggagccggtctcgaagccagacatggggctggtggccctggaggctgaaggccaggagctcctgcttgagctggagaagaaccacaggctgctggccccaggatacatagaaacccactacggcccagatgggcagccagtggtgctggcccccaaccacacggatcattgccactaccaagggcgagtaaggggcttccccgactcctgggtagtcctctgcacctgctctgggatgagtggcctgatcaccctcagcaggaatgccagctattatctgcgtccctggccaccccggggctccaaggacttctcaacccacgagatctttcggatggagcagctgctcacctggaaaggaacctgtggccacagggatcctgggaacaaagcgggcatgaccagccttcctggtggtccccagagcaggggcaggcgagaagcgcgcaggacccggaagtacctggaactgtacattgtggcagaccacaccctgttcttgactcggcaccgaaacttgaaccacaccaaacagcgtctcctggaagtcgccaactacgtggaccagcttctcaggactctggacattcaggtggcgctgaccggcctggaggtgtggaccgagcgggaccgcagccgcgtcacgcaggacgccaacgccacgctctgggccttcctgcagtggcgccgggggctgtgggcgcagcggccccacgactccgcgcagctgctcacgggccgcgccttccagggcgccacagtgggcctggcgcccgtcgagggcatgtgccgcgccgagagctcgggaggcgtgagcacggaccactcggagctccccatcggcgccgcagccaccatggcccatgagatcggccacagcctcggcctcagccacgaccccgacggctgctgcgtggaggctgcggccgagtccggaggctgcgtcatggctgcggccaccgggcacccgtttccgcgcgtgttcagcgcctgcagccgccgccagctgcgcgccttcttccgcaaggggggcggcgcttgcctctccaatgccccggaccccggactcccggtgccgccggcgctctgcgggaacggcttcgtggaagcgggcgaggagtgtgactgcggccctggccaggagtgccgcgacctctgctgctttgctcacaactgctcgctgcgcccgggggcccagtgcgcccacggggactgctgcgtgcgctgcctgctgaagccggctggagcgctgtgccgccaggccatgggtgactgtgacctccctgagttttgcacgggcacctcctcccactgtcccccagacgtttacctactggacggctcaccctgtgccaggggcagtggctactgctgggatggcgcatgtcccacgctggagcagcagtgccagcagctctgggggcctggctcccacccagctcccgaggcctgtttccaggtggtgaactctgcgggagatgctcatggaaactgcggccaggacagcgagggccacttcctgccctgtgcagggagggatgccctgtgtgggaagctgcagtgccagggtggaaagcccagcctgctcgcaccgcacatggtgccagtggactctaccgttcacctagatggccaggaagtgacttgtcggggagccttggcactccccagtgcccagctggacctgcttggcctgggcctggtagagtcaggcacccagtgtggacctagaatggtttgcaatagcaaccataactgccactgtgctccaggctgggctccacccttctgtgacaagccaggctttggtggcagcatggacagtggccctgtgcaggctgaaaaccatgacaccttcctgctggccatgctcctcagcgtcctgctgcctctgctcccaggggccggcctggcctggtgttgctaccgactcccaggagcccatctgcagcgatgcagctggggctgcagaagggaccctgcgtgcagtggccccaaagatggcccacacagggaccaccccctgggcggcgttcaccccatggagttgggccccacagccactggacagccctggcccctggaccctgagaactctcatgagcccagcagccaccctgagaagcctctgccagcagtctcgcccgacccccaagcagatcaagtccagatgccaagatcctgcctctggtgagaggtagctcctaaaatgaacagatttaaagacaggtggccactgacagccactccaggaacttgaactgcaggggcagagccagtgaatcaccggacctccagcacctgcaggcagcttggaagtttcttccccgagtggagcttcgacccacccactccaggaacccagagccacactagaagttcctgagggctggagaacactgctgggcacactctccagctcaataaaccatcagtcccagaagcaaaggtcacacagcccctgacctccctcaccagtggaggctgggtagtgctggccatcccaaaagggctctgtcctgggagtctggtgtgtctcctacatgcaatttccacggacccagctctgtggagggcatgactgctggccagaagctagtggtcctggggccctatggttcgactgagtccacactcccctgcagcctggctggcctctgcaaacaaacataattttggggaccttccttcctgtttcttcccaccctgtcttctcccctaggtggttcctgagcccccacccccaatcccagtgctacacctgaggttctggagctcagaatctgacagcctctcccccattctgtgtgtgtcggggggacagagggaaccatttaagaaaagataccaaagtagaagtcaaaagaaagacatgttggctataggcgtggtggctcatgcctataatcccagcactttgggaagccggggtaggaggatcaccagaggccagcaggtccacaccagcctgggcaacacagcaagacaccgcatctacagaaaaattttaaaattagctgggcgtggtggtgtgtacctgtaggcctagctgctcaggaggctgaagcaggaggatcacttgagcctgagttcaacactgcagtgagctatggtggcaccactgcactccagcctgggtgacagagcaagaccctgtctctaaaataaattttaaaaagacatattacact

SEQ ID NO: 152 - protein, 787 aa, Homo sapiens
MGWRPRRARGTPLLLLLLLLLLWPVPGAGVLQGHIPGQPVTPHWVLDGQPWRTVSLEEPVSKPDMGLVALEAEGQELLLELEKNHRLLAPGYIETHYGPDGQPVVLAPNHTDHCHYQGRVRGFPDSWVVLCTCSGMSGLITLSRNASYYLRPWPPRGSKDFSTHEIFRMEQLLTWKGTCGHRDPGNKAGMTSLPGGPQSRGRREARRTRKYLELYIVADHTLFLTRHRNLNHTKQRLLEVANYVDQLLRTLDIQVALTGLEVWTERDRSRVTQDANATLWAFLQWRRGLWAQRPHDSAQLLTGRAFQGATVGLAPVEGMCRAESSGGVSTDHSELPIGAAATMAHEIGHSLGLSHDPDGCCVEAAAESGGCVMAAATGHPFPRVFSACSRRQLRAFFRKGGGACLSNAPDPGLPVPPALCGNGFVEAGEECDCGPGQECRDLCCFAHNCSLRPGAQCAHGDCCVRCLLKPAGALCRQAMGDCDLPEFCTGTSSHCPPDVYLLDGSPCARGSGYCWDGACPTLEQQCQQLWGPGSHPAPEACFQVVNSAGDAHGNCGQDSEGHFLPCAGRDALCGKLQCQGGKPSLLAPHMVPVDSTVHLDGQEVTCRGALALPSAQLDLLGLGLVESGTQCGPRMVCNSNHNCHCAPGWAPPFCDKPGFGGSMDSGPVQAENHDTFLLAMLLSVLLPLLPGAGLAWCCYRLPGAHLQRCSWGCRRDPACSGPKDGPHRDHPLGGVHPMELGPTATGQPWPLDPENSHEPSSHPEKPLPAVSPDPQADQVQMPRSCLW

SEQ ID NO: 153 - DNA, 3351 bp, Homo sapiens
  CDS (37)..(1578)
gcgagccgctgcctagaggccgaggagctcacagctatgggctggaggccccggagagctcgggggaccccgttgctgctgctgctactactgctgctgctctggccagtgccaggcgccggggtgcttcaaggacatatccctgggcagccagtcaccccgcactgggtcctggatggacaaccctggcgcaccgtcagcctggaggagccggtctcgaagccagacatggggctggtggccctggaggctgaaggccaggagctcctgcttgagctggagaagaaccacaggctgctggccccaggatacatagaaacccactacggcccagatgggcagccagtggtgctggcccccaaccacacggatcattgccactaccaagggcgagtaaggggcttccccgactcctgggtagtcctctgcacctgctctgggatgagtggcctgatcaccctcagcaggaatgccagctattatctgcgtccctggccaccccggggctccaaggacttctcaacccacgagatctttcggatggagcagctgctcacctggaaaggaacctgtggccacagggatcctgggaacaaagcgggcatgaccagccttcctggtggtccccagagcaggggcaggcgagaagcgcgcaggacccggaagtacctggaactgtacattgtggcagaccacaccctgttcttgactcggcaccgaaacttgaaccacaccaaacagcgtctcctggaagtcgccaactacgtggaccagcttctcaggactctggacattcaggtggcgctgaccggcctggaggtgtggaccgagcgggaccgcagccgcgtcacgcaggacgccaacgccacgctctgggccttcctgcagtggcgccgggggctgtgggcgcagcggccccacgactccgcgcagctgctcacgggccgcgccttccagggcgccacagtgggcctggcgcccgtcgagggcatgtgccgcgccgagagctcgggaggcgtgagcacggaccactcggagctccccatcggcgccgcagccaccatggcccatgagatcggccacagcctcggcctcagccacgaccccgacggctgctgcgtggaggctgcggccgagtccggaggctgcgtcatggctgcggccaccgggcacccgtttccgcgcgtgttcagcgcctgcagccgccgccagctgcgcgccttcttccgcaaggggggcggcgcttgcctctccaatgccccggaccccggactcccggtgccgccggcgctctgcgggaacggcttcgtggaagcgggcgaggagtgtgactgcggccctggccaggagtgccgcgacctctgctgctttgctcacaactgctcgctgcgcccgggggcccagtgcgcccacggggactgctgcgtgcgctgcctgacgtttacctactggacggctcaccctgtgccaggggcagtggctactgctgggatggcgcatgtcccacgctggagcagcagtgccagcagctctgggggcctggctcccacccagctcccgaggcctgtttccaggtggtgaactctgcgggagatgctcatggaaactgcggccaggacagcgagggccacttcctgccctgtgcagggagggatgccctgtgtgggaagctgcagtgccagggtggaaagcccagcctgctcgcaccgcacatggtgccagtggactctaccgttcacctagatggccaggaagtgacttgtcggggagccttggcactccccagtgcccagctggacctgcttggcctgggcctggtagagccaggcacccagtgtggacctagaatggtgtgccagagcaggcgctgcaggaagaatgccttccaggagcttcagcgctgcctgactgcctgccacagccacggggtttgcaatagcaaccataactgccactgtgctccaggctgggctccacccttctgtgacaagccaggctttggtggcagcatggacagtggccctgtgcaggctgaaaaccatgacaccttcctgctggccatgctcctcagcgtcctgctgcctctgctcccaggggccggcctggcctggtgttgctaccgactcccaggagcccatctgcagcgatgcagctggggctgcagaagggaccctgcgtgcagtggccccaaagatggcccacacagggaccaccccctgggcggcgttcaccccatggagttgggccccacagccactggacagccctggcccctggaccctgagaactctcatgagcccagcagccaccctgagaagcctctgccagcagtctcgcctgacccccaagatcaagtccagatgccaagatcctgcctctggtgagaggtagctcctaaaatgaacagatttaaagacaggtggccactgacagccactccaggaacttgaactgcaggggcagagccagtgaatcaccggacctccagcacctgcaggcagcttggaagtttcttccccgagtggagcttcgacccacccactccaggaacccagagccacattagaagttcctgagggctggagaacactgctgggcacactctccagctcaataaaccatcagtcccagaagcaaaggtcacacagcccctgacctccctcaccagtggaggctgggtagtgctggccatcccaaaagggctctgtcctgggagtctggtgtgtctcctacatgcaatttccacggacccagctctgtggagggcatgactgctggccagaagctagtggtcctggggccctatggttcgactgagtccacactcccctggagcctggctggcctctgcaaacaaacataattttggggaccttccttcctgtttcttcccaccctgtcttctcccctaggtggttcctgagcccccacccccaatcccagtgctacacctgaggttctggagctcagaatctgacagcctctcccccattctgtgtgtgtcggggggacagagggaaccatttaagaaaagataccaaagtagaagtcaaaagaaagacatgttggctataggcgtggtggctcatgcctataatcccagcactttgggaagccggggtaggaggatcaccagaggccagcaggtccacaccagcctgggcaacacagcaagacaccgcatctacagaaaaattttaaaattagctgggcgtggtggtgtgtacctgtaggcctagctgctcaggaggctgaagcaggaggatcacttgagcctgagttcaacactgcagtgagctatggtggcaccactgcactccagcctgggtgacagagcaagaccctgtctct

SEQ ID NO: 154 - protein, 514 aa, Homo sapiens
MGWRPRRARGTPLLLLLLLLLLWPVPGAGVLQGHIPGQPVTPHWVLDGQPWRTVSLEEPVSKPDMGLVALEAEGQELLLELEKNHRLLAPGYIETHYGPDGQPVVLAPNHTDHCHYQGRVRGFPDSWVVLCTCSGMSGLITLSRNASYYLRPWPPRGSKDFSTHEIFRMEQLLTWKGTCGHRDPGNKAGMTSLPGGPQSRGRREARRTRKYLELYIVADHTLFLTRHRNLNHTKQRLLEVANYVDQLLRTLDIQVALTGLEVWTERDRSRVTQDANATLWAFLQWRRGLWAQRPHDSAQLLTGRAFQGATVGLAPVEGMCRAESSGGVSTDHSELPIGAAATMAHEIGHSLGLSHDPDGCCVEAAAESGGCVMAAATGHPFPRVFSACSRRQLRAFFRKGGGACLSNAPDPGLPVPPALCGNGFVEAGEECDCGPGQECRDLCCFAHNCSLRPGAQCAHGDCCVRCLTFTYWTAHPVPGAVATAGMAHVPRWSSSASSSGGLAPTQLPRPVSRW

SEQ ID NO: 155 - DNA, 3139 bp, Homo sapiens
  CDS (37)..(1353)
gcgagccgctgcctagaggccgaggagctcacagctatgggctggaggccccggagagctcgggggaccccgttgctgctgctgctactactgctgctgctctggccagtgccaggcgccggggtgcttcaaggacatatccctgggcagccagtcaccccgcactgggtcctggatggacaaccctggcgcaccgtcagcctggaggagccggtctcgaagccagacatggggctggtggccctggaggctgaaggccaggagctcctgcttgagctggagaagaaccacaggctgctggccccaggatacatagaaacccactacggcccagatgggcagccagtggtgctggcccccaaccacacggatcattgccactaccaagggcgagtaaggggcttccccgactcctgggtagtcctctgcacctgctctgggatgagtggcctgatcaccctcagcaggaatgccagctattatctgcgtccctggccaccccggggctccaaggacttctcaacccacgagatctttcggatggagcagctgctcacctggaaaggaacctgtggccacagggatcctgggaacaaagcgggcatgaccagccttcctggtggtccccagagcaggggcaggcgagaagcgcgcaggacccggaagtacctggaactgtacattgtggcagaccacaccctgttcttgactcggcaccgaaacttgaaccacaccaaacagcgtctcctggaagtcgccaactacgtggaccagcttctcaggactctggacattcaggtggcgctgaccggcctggaggtgtggaccgagcgggaccgcagccgcgtcacgcaggacgccaacgccacgctctgggccttcctgcagtggcgccggggactgtgggcgcagcggccccacgactccgcgcagctgctcacgaccactcggagctccccatcggcgccgcagccaccatggcccatgagatcggccacagcctcggcctcagccacgaccccgacggctgctgcgtggaggctgcggccgagtccggaggctgcgtcatggctgcggccaccgggcacccgtttccgcgcgtgttcagcgcctgcagccgccgccagctgcgcgccttcttccgcaaggggggcggcgcttgcctctccaatgccccggaccccggactcccggtgccgccggcgctctgcgggaacggcttcgtggaagcgggcgaggagtgtgactgcggccctggccaggagtgccgcgacctctgctgctttgctcacaactgctcgctgcgcccgggggcccagtgcgcccacggggactgctgcgtgcgctgcctgctgaagccggctggagcgctgtgccgccaggccatgggtgactgtgacctccctgagttttgcacgggcacctcctcccactgtcccccagacgtttacctactggacggctcaccctgtgccaggggcagtggctactgctgggatggcgcatgtcccacgctggagcagcagtgccagcagctctgggggcctggctcccacccagctcccgaggcctgtttccaggtggtgaactctgcgggagatgctcatggaaactgcggccaggacagcgagggccacttcctgccctgtgcagggagggatgccctgtgtgggaagctgcagtgccagggtggaaagcccagcctgctcgcaccgcacatggtgccagtggactctaccgttcacctagatggccaggaagtgacttgtcggggagccttggcactccccagtgcccagctggacctgcttggcctgggcctggtagagccaggcacccagtgtggacctagaatggtgtgccagagcaggcgctgcaggaagaatgccttccaggagcttcagcgctgcctgactgcctgccacagccacggggtttgcaatagcaaccataactgccactgtgctccaggctgggctccacccttctgtgacaagccaggctttggtggcagcatggacagtggccctgtgcaggctgaaaaccatgacaccttcctgctggccatgctcctcagcgtcctgctgcctctgctcccaggggccggcctggcctggtgttgctaccgactcccaggagcccatctgcagcgatgcagctggggctgcagaagggaccctgcgtgcagtggccccaaagatggcccacacagggaccaccccctgggcggcgttcaccccatggagttgggccccacagccactggacagccctggcccctggaccctgagaactctcatgagcccagcagccaccctgagaagcctctgccagcagtctcgcctgacccccaagatcaagtccagatgccaagatcctgcctctggtgagaggtagctcctaaaatgaacagatttaaagacaggtggccactgacagccactccaggaacttgaactgcaggggcagagccagtgaatcaccggacctccagcacctgcaggcagcttggaagtttcttccccgagtggagcttcgacccacccactccaggaacccagagccacattagaagttcctgagggctggagaacactgctgggcacactctccagctcaataaaccatcagtcccagaagcaaaggtcacacagcccctgacctccctcaccagtggaggctgggtagtgctggccatcccaaaagggctctgtcctgggagtctggtgtgtctcctacatgcaatttccacggacccagctctgtggagggcatgactgctggccagaagctagtggtcctggggccctatggttcgactgagtccacactcccctggagcctggctggcctctgcaaacaaacataattttggggaccttccttcctgtttcttcccaccctgtcttctcccctaggtggttcctgagcccccacccccaatcccagtgctacacctgaggttctggagctcagaatctgacagcctctcccccattctgtgtgtgtcggggggacagagggaaccatttaagaaaagataccaaagtagaagtcaaaagaaagacatgttggctataggcgtggtggctcatgcctataatcccagcactttgggaagccggggtaggaggatcac

SEQ ID NO: 156 - protein, 439 aa, Homo sapiens
MGWRPRRARGTPLLLLLLLLLLWPVPGAGVLQGHIPGQPVTPHWVLDGQPWRTVSLEEPVSKPDMGLVALEAEGQELLLELEKNHRLLAPGYIETHYGPDGQPVVLAPNHTDHCHYQGRVRGFPDSWVVLCTCSGMSGLITLSRNASYYLRPWPPRGSKDFSTHEIFRMEQLLTWKGTCGHRDPGNKAGMTSLPGGPQSRGRREARRTRKYLELYIVADHTLFLTRHRNLNHTKQRLLEVANYVDQLLRTLDIQVALTGLEVWTERDRSRVTQDANATLWAFLQWRRGLWAQRPHDSAQLLTTTRSSPSAPQPPWPMRSATASASATTPTAAAWRLRPSPEAASWLRPPGTRFRACSAPAAAASCAPSSARGAALASPMPRTPDSRCRRRSAGTASWKRARSVTAALARSAATSAALLTTARCARGPSAPTGTAACAAC

SEQ ID NO: 157 - DNA, 1278 bp, Homo sapiens
  CDS (1)..(1278)
aagcttgagctggagaagaaccacaggctgctggccccaggatacatagaaacccactacggcccagatgggcagccagtggtgctggcccccaaccacacggatcattgccactaccaagggcgagtaaggggcttccccgactcctgggtagtcctctgcacctgctctgggatgagtggcctgatcaccctcagcaggaatgccagctattatctgcgtccctggccaccccggggctccaaggacttctcaacccacgagatctttcggatggagcagctgctcacctggaaaggaacctgtggccacagggatcctgggaacaaagcgggcatgaccagccttcctggtggtccccagagcaggggcaggcgagaagcgcgcaggacccggaagtacctggaactgtacattgtggcagaccacaccctgttcttgactcggcaccgaaacttgaaccacaccaaacagcgtctcctggaagtcgacaactacgtggaccagcttctcaggactctggacattcaggtggcgctgaccggcctggaggtgtggaccgagcgggaccgcagccgcgtcacgcaggacgccaacgccacgctctgggccttcctgcagtggcgccggggactgtgggcgcagcggccccacgactccgcgcagctgctcacgggccgcgccttccagggcgccacagtgggcctggcgcccgtcgagggcatgtgccgcgccgagagctcgggaggcgtgagcacggaccactcggagctccccatcggcgccgcagccaccatggcccatgagatcggccacagcctcggcctcagccacgaccccgacggctgctgcgtggaggctgcggccgagtccggaggctgcgtcatggctgcggccaccgggcacccgtttccgcgcgtgttcagcgcctgcagccgccgccagctgcgcgccttcttccgcaaggggggcggcgcttgcctctccaatgccccggaccccggactcccggtgccgccggcgctctgcgggaacggcttcgtggaagcgggcgaggagtgtgactgcggccctggccaggagtgccgcgacctctgctgctttgctcacaactgctcgctgcgcccgggggcccagtgcgcccacggggactgctgcgtgcgctgcctgctgaagccggctggagcgctgtgccgccaggccatgggtgactgtgacctccctgagttttgcacgggcacctcctcccactgtcccccagacgtttacctactcgag

SEQ ID NO: 158 - protein, 426 aa, Homo sapiens
KLELEKNHRLLAPGYIETHYGPDGQPVVLAPNHTDHCHYQGRVRGFPDSWVVLCTCSGMSGLITLSRNASYYLRPWPPRGSKDFSTHEIFRMEQLLTWKGTCGHRDPGNKAGMTSLPGGPQSRGRREARRTRKYLELYIVADHTLFLTRHRNLNHTKQRLLEVDNYVDQLLRTLDIQVALTGLEVWTERDRSRVTQDANATLWAFLQWRRGLWAQRPHDSAQLLTGRAFQGATVGLAPVEGMCRAESSGGVSTDHSELPIGAAATMAHEIGHSLGLSHDPDGCCVEAAAESGGCVMAAATGHPFPRVFSACSRRQLRAFFRKGGGACLSNAPDPGLPVPPALCGNGFVEAGEECDCGPGQECRDLCCFAHNCSLRPGAQCAHGDCCVRCLLKPAGALCRQAMGDCDLPEFCTGTSSHCPPDVYLLE

SEQ ID NO: 159 - DNA, 2705 bp, Homo sapiens
  CDS (3)..(2687)
ctatgggctggaggccccggagagctcgggggaccccgttgctgctgctgctactactgctgctgctctggccagtgccaggcgccggggtgcttcaaggacatatccctgggcagccagtcaccccgcactgggtcctggatggacaaccctggcgcaccgtcagcctggaggagccggtctcgaagccagacatggggctggtggccctggaggctgaaggccaggagctcctgcttgagctggagaagaaccacaggctgctggccccaggatacatagaaacccactacggcccagatgggcagccagtggtgctggcccccaaccacacggatcattgccactaccaagggcgagtaaggggcttccccgactcctgggtagtcctctgcacctgctctgggatgagtggcctgatcaccctcagcaggaatgccagctattatctgcgtccctggccaccccggggctccaaggacttctcaacccacgagatctttcggatggagcagctgctcacctggaaaggaacctgtggccacagggatcctgggaacaaagcgggcatgaccagccttcctggtggtccccagagcaggggcaggcgagaagcgcgcaggacccggaagtacctggaactgtacattgtggcagaccacaccctgttcttgactcggcaccgaaacttgaaccacaccaaacagcgtctcctggaagtcgccaactacgtggaccagcttctcaggactctggacattcaggtggcgctgaccggcctggaggtgtggaccgagcgggaccgcagccgcgtcacgcaggacgccaacgccacgctctgggccttcctgcagtggcgccgggggctgtgggcgcagcggccccacgactccgcgcagctgctcacgggccgcgccttccagggcgccacagtgggcctggcgcccgtcgagggcatgtgccgcgccgagagctcgggaggcgtgagcacggaccactcggagctccccatcggcgccgcagccaccatggcccatgagatcggccacagcctcggcctcagccacgaccccgacggctgctgcgtggaggctgcggccgagtccggaggctgcgtcatggctgcggccaccgggcacccgtttccgcgcgtgttcagcgcctgcagccgccgccagctgcgcgccttcttccgcaaggggggcggcgcttgcctctccaatgccccggaccccggactcccggtgccgccggcgctctgcgggaacggcttcgtggaagcgggcgaggagtgtgactgcggccctggccaggagtgccgcgacctctgctgctttgctcacaactgctcgctgcgcccgggggcccagtgcgcccacggggactgctgcgtgcgctgcctgctgaagccggctggagcgctgtgccgccaggccatgggtgactgtgacctccctgagttttgcacgggcacctcctcccactgtcccccagacgtttacctactggacggctcaccctgtgccaagggcagtggctactgctgggatggcgcatgtcccacgctggagcagcagtgccagcagctctgggggcctggctcccacccagctcccgaggcctgtttccaggtggtgaactctgcgggagatgctcatggaaactgcggccaggacagcgagggccacttcctgccctgtgcagggagggatgccctgtgtgggaagctgcagtgccagggtggaaagcccagcctgctcgcaccgcacatggtgccagtggactctaccgttcacctagatggccaggaagtgacttgtcggggagccttggcactccccagtgcccagctggacctgcttggcctgggcctggtagagccaggcacccagtgtggacctagaatggtgtgccagagcaggcgctgcaggaagaatgccttccaggagcttcagcgctgcctgactgcctgccacagccacggggtttgcaatagcaaccataactgccactgtgctccaggctgggctccacccttctgtgacaagccaggctttggtggcagcatggacagtggccctgtgcaggctgaaaaccatgacaccttcctgctggccatgctcctcagcgtcctgctgcctctgctcccaggcgccggcctggcctggtgttgctaccgactcccaggagcccatctgcagcgatgcagctggggctgcagaagggaccctgcgtgcagtggccccaaagatggcccacacagagaccaccccctgggcggcgttcaccccatggagttgggccccacagccactggacagccctggcccctggaccctgagaactctcatgagcccagcagccaccctgagaagcctctgccagcagtctcgcctgacccccaaggtggttcccttgcagcctggggccccagtcctttaggggacaacatatcctcctcattctcagcagatcaagtccagatgccaagatcctgcctctgtggcgaaccctggggaggccacgtgggaaggaaagagggctctaagaggggaggccccagactgggggagaggcctgtctggagcccaggatcacctggctgtgctgcagaactggagaagagaagctcagcagaaaggagctggcatggggccaacagcagaaaagcaggaggcacgcagaagtgactgggaagcaggagg

SEQ ID NO: 160 - protein, 895 aa, Homo sapiens
MGWRPRRARGTPLLLLLLLLLLWPVPGAGVLQGHIPGQPVTPHWVLDGQPWRTVSLEEPVSKPDMGLVALEAEGQELLLELEKNHRLLAPGYIETHYGPDGQPVVLAPNHTDHCHYQGRVRGFPDSWVVLCTCSGMSGLITLSRNASYYLRPWPPRGSKDFSTHEIFRMEQLLTWKGTCGHRDPGNKAGMTSLPGGPQSRGRREARRTRKYLELYIVADHTLFLTRHRNLNHTKQRLLEVANYVDQLLRTLDIQVALTGLEVWTERDRSRVTQDANATLWAFLQWRRGLWAQRPHDSAQLLTGRAFQGATVGLAPVEGMCRAESSGGVSTDHSELPIGAAATMAHEIGHSLGLSHDPDGCCVEAAAESGGCVMAAATGHPFPRVFSACSRRQLRAFFRKGGGACLSNAPDPGLPVPPALCGNGFVEAGEECDCGPGQECRDLCCFAHNCSLRPGAQCAHGDCCVRCLLKPAGALCRQAMGDCDLPEFCTGTSSHCPPDVYLLDGSPCAKGSGYCWDGACPTLEQQCQQLWGPGSHPAPEACFQVVNSAGDAHGNCGQDSEGHFLPCAGRDALCGKLQCQGGKPSLLAPHMVPVDSTVHLDGQEVTCRGALALPSAQLDLLGLGLVEPGTQCGPRMVCQSRRCRKNAFQELQRCLTACHSHGVCNSNHNCHCAPGWAPPFCDKPGFGGSMDSGPVQAENHDTFLLAMLLSVLLPLLPGAGLAWCCYRLPGAHLQRCSWGCRRDPACSGPKDGPHRDHPLGGVHPMELGPTATGQPWPLDPENSHEPSSHPEKPLPAVSPDPQGGSLAAWGPSPLGDNISSSFSADQVQMPRSCLCGEPWGGHVGRKEGSKRGGPRLGERPVWSPGSPGCAAELEKRSSAERSWHGANSRKAGGTQK

SEQ ID NO: 161 - DNA, 2642 bp, Homo sapiens
  CDS (3)..(2624)
ctatgggctggaggccccggagagctcgggggaccccgttgctgctgctgctactactgctgctgctctggccagtgccaggcgccggggtgcttcaaggacatatccctgggcagccagtcaccccgcactgggtcctggatggacaaccctggcgcaccgtcagcctggaggagccggtctcgaagccagacatggggctggtggccctggaggctgaaggccaggagctcctgcttgagctggagaagaaccacaggctgctggccccaggatacatagaaacccactacggcccagatgggcagccagtggtgctggcccccaaccacacggatcattgccactaccaagggcgagtaaggggcttccccgactcctgggtagtcctctgcacctgctctgggatgagtggcctgatcaccctcagcaggaatgccagctattatctgcgtccctggccaccccggggctccaaggacttctcaacccacgagatctttcggatggagcagctgctcacctggaaaggaacctgtggccacagggatcctgggaacaaagcgggcatgaccagccttcctggtggtccccagagcaggggcaggcgagaagcgcgcaggacccggaagtacctggaactgtacattgtggcagaccacaccctgttcttgactcggcaccgaaacttgaaccacaccaaacagcgtctcctggaagtcgccaactacgtggaccagcttctcaggactctggacattcaggtggcgctgaccggcctggaggtgtggaccgagcgggaccgcagccgcgtcacgcaggacgccaacgccacgctctgggccttcctgcagtggcgccgggggctgtgggcgcagcggccccacgactccgcgcagctgctcacgggccgcgccttccagggcgccacagtgggcctggcgcccgtcgagggcatgtgccgcgccgagagctcgggaggcgtgagcacggaccactcggagctccccatcggcgccgcagccaccatggcccatgagatcggccacagcctcggcctcagccacgaccccgacggctgctgcgtggaggctgcggccgagtccggaggctgcgtcatggctgcggccaccgggcacccgtttccgcgcgtgttcagcgcctgcagccgccgccagctgcgcgccttcttccgcaaggggggcggcgcttgcctctccaatgccccggaccccggactcccggtgccgccggcgctctgcgggaacggcttcgtggaagcgggcgaggagtgtgactgcggccctggccaggagtgccgcgacctctgctgctttgctcacaactgctcgctgcgcccgggggcccagtgcgcccacggggactgctgcgtgcgctgcctgctgaagccggctggagcgctgtgccgccaggccatgggtgactgtgacctccctgagttttgcacgggcacctcctcccactgtcccccagacgtttacctactggacggctcaccctgtgccaagggcagtggctactgctgggatggcgcatgtcccacgctggagcagcagtgccagcagctctgggggcctggctcccacccagctcccgaggcctgtttccaggtggtgaactctgcgggagatgctcatggaaactgcggccaggacagcgagggccacttcctgccctgtgcagggagggatgccctgtgtgggaagctgcagtgccagggtggaaagcccagcctgctcgcaccgcacatggtgccagtggactctaccgttcacctagatggccaggaagtgacttgtcggggagccttggcactccccagtgcccagctggacctgcttggcctgggcctggtagagccaggcacccagtgtggacctagaatggtgtgccagagcaggcgctgcaggaagaatgccttccaggagcttcagcgctgcctgactgcctgccacagccacggggtttgcaatagcaaccataactgccactgtgctccaggctgggctccacccttctgtgacaagccaggctttggtggcagcatggacagtggccctgtgcaggctgaaaaccatgacaccttcctgctggccatgctcctcagcgtcctgctgcctctgctcccaggcgccggcctggcctggtgttgctaccgactcccaggagcccatctgcagcgatgcagctggggctgcagaagggaccctgcgtgcagtggccccaaagatggcccacacagagaccaccccctgggcggcgttcaccccatggagttgggccccacagccactggacagccctggcccctggaccctgagaactctcatgagcccagcagccaccctgagaagcctctgccagcagtctcgcctgacccccaagcagatcaagtccagatgccaagatcctgcctctgtggcgaaccctggggaggccacgtgggaaggaaagagggctctaagaggggaggccccagactgggggagaggcctgtctggagcccaggatcacctggctgtgctgcagaactggagaagagaagctcagcagaaaggagctggcatggggccaacagcagaaaagcaggaggcacgcagaagtgactgggaagcaggagg

SEQ ID NO: 162 - protein, 874 aa, Homo sapiens
MGWRPRRARGTPLLLLLLLLLLWPVPGAGVLQGHIPGQPVTPHWVLDGQPWRTVSLEEPVSKPDMGLVALEAEGQELLLELEKNHRLLAPGYIETHYGPDGQPVVLAPNHTDHCHYQGRVRGFPDSWVVLCTCSGMSGLITLSRNASYYLRPWPPRGSKDFSTHEIFRMEQLLTWKGTCGHRDPGNKAGMTSLPGGPQSRGRREARRTRKYLELYIVADHTLFLTRHRNLNHTKQRLLEVANYVDQLLRTLDIQVALTGLEVWTERDRSRVTQDANATLWAFLQWRRGLWAQRPHDSAQLLTGRAFQGATVGLAPVEGMCRAESSGGVSTDHSELPIGAAATMAHEIGHSLGLSHDPDGCCVEAAAESGGCVMAAATGHPFPRVFSACSRRQLRAFFRKGGGACLSNAPDPGLPVPPALCGNGFVEAGEECDCGPGQECRDLCCFAHNCSLRPGAQCAHGDCCVRCLLKPAGALCRQAMGDCDLPEFCTGTSSHCPPDVYLLDGSPCAKGSGYCWDGACPTLEQQCQQLWGPGSHPAPEACFQVVNSAGDAHGNCGQDSEGHFLPCAGRDALCGKLQCQGGKPSLLAPHMVPVDSTVHLDGQEVTCRGALALPSAQLDLLGLGLVEPGTQCGPRMVCQSRRCRKNAFQELQRCLTACHSHGVCNSNHNCHCAPGWAPPFCDKPGFGGSMDSGPVQAENHDTFLLAMLLSVLLPLLPGAGLAWCCYRLPGAHLQRCSWGCRRDPACSGPKDGPHRDHPLGGVHPMELGPTATGQPWPLDPENSHEPSSHPEKPLPAVSPDPQADQVQMPRSCLCGEPWGGHVGRKEGSKRGGPRLGERPVWSPGSPGCAAELEKRSSAERSWHGANSRKAGGTQK

SEQ ID NO: 163 - DNA, 3468 bp, Homo sapiens
  CDS (37)..(2472)
gcgagccgctgcctagaggccgaggagctcacagctatgggctggaggccccggagagctcgggggaccccgttgctgctgctgctactactgctgctgctctggccagtgccaggcgccggggtgcttcaaggacatatccctgggcagccagtcaccccgcactgggtcctggatggacaaccctggcgcaccgtcagcctggaggagccggtctcgaagccagacatggggctggtggccctggaggctgaaggccaggagctcctgcttgagctggagaagaaccacaggctgctggccccaggatacatagaaacccactacggcccagatgggcagccagtggtgctggcccccaaccacacggatcattgccactaccaagggcgagtaaggggcttccccgactcctgggtagtcctctgcacctgctctgggatgagtggcctgatcaccctcagcaggaatgccagctattatctgcgtccctggccaccccggggctccaaggacttctcaacccacgagatctttcggatggagcagctgctcacctggaaaggaacctgtggccacagggatcctgggaacaaagcgggcatgaccagccttcctggtggtccccagagcaggggcaggcgagaagcgcgcaggacccggaagtacctggaactgtacattgtggcagaccacaccctgttcttgactcggcaccgaaacttgaaccacaccaaacagcgtctcctggaagtcgccaactacgtggaccagcttctcaggactctggacattcaggtggcgctgaccggcctggaggtgtggaccgagcgggaccgcagccgcgtcacgcaggacgccaacgccacgctctgggccttcctgcagtggcgccgggggctgtgggcgcagcggccccacgactccgcgcagctgctcacgggccgcgccttccagggcgccacagtgggcctggcgcccgtcgagggcatgtgccgcgccgagagctcgggaggcgtgagcacggaccactcggagctccccatcggcgccgcagccaccatggcccatgagatcggccacagcctcggcctcagccacgaccccgacggctgctgcgtggaggctgcggccgagtccggaggctgcgtcatggctgcggccaccgggcacccgtttccgcgcgtgttcagcgcctgcagccgccgccagctgcgcgccttcttccgcaaggggggcggcgcttgcctctccaatgccccggaccccggactcccggtgccgccggcgctctgcgggaacggcttcgtggaagcgggcgaggagtgtgactgcggccctggccaggagtgccgcgacctctgctgctttgctcacaactgctcgctgcgcccgggggcccagtgcgcccacggggactgctgcgtgcgctgcctgctgaagccggctggagcgctgtgccgccaggccatgggtgactgtgacctccctgagttttgcacgggcacctcctcccactgtcccccagacgtttacctactggacggctcaccctgtgccaggggcagtggctactgctgggatggcgcatgtcccacgctggagcagcagtgccagcagctctgggggcctggctcccacccagctcccgaggcctgtttccaggtggtgaactctgcgggagatgctcatggaaactgcggccaggacagcgagggccacttcctgccctgtgcagggagggatgccctgtgtgggaagctgcagtgccagggtggaaagcccagcctgctcgcaccgcacatggtgccagtggactctaccgttcacctagatggccaggaagtgacttgtcggggagccttggcactccccagtgcccagctggacctgcttggcctgggcctggtagagccaggcacccagtgtggacctagaatggtgtgccagagcaggcgctgcaggaagaatgccttccaggagcttcagcgctgcctgactgcctgccacagccacggggtttgcaatagcaaccataactgccactgtgctccaggctgggctccacccttctgtgacaagccaggctttggtggcagcatggacagtggccctgtgcaggctgaaaaccatgacaccttcctgctggccatgctcctcagcgtcctgctgcctctgctcccaggggccggcctggcctggtgttgctaccgactcccaggagcccatctgcagcgatgcagctggggctgcagaagggaccctgcgtgcagtggccccaaagatggcccacacagggaccaccccctgggcggcgttcaccccatggagttgggccccacagccactggacagccctggcccctggaccctgagaactctcatgagcccagcagccaccctgagaagcctctgccagcagtctcgcctgacccccaagatcaagtccagatgccaagatcctgcctctggtgagaggtagctcctaaaatgaacagatttaaagacaggtggccactgacagccactccaggaacttgaactgcaggggcagagccagtgaatcaccggacctccagcacctgcaggcagcttggaagtttcttccccgagtggagcttcgacccacccactccaggaacccagagccacattagaagttcctgagggctggagaacactgctgggcacactctccagctcaataaaccatcagtcccagaagcaaaggtcacacagcccctgacctccctcaccagtggaggctgggtagtgctggccatcccaaaagggctctgtcctgggagtctggtgtgtctcctacatgcaatttccacggacccagctctgtggagggcatgactgctggccagaagctagtggtcctggggccctatggttcgactgagtccacactcccctggagcctggctggcctctgcaaacaaacataattttggggaccttccttcctgtttcttcccaccctgtcttctcccctaggtggttcctgagcccccacccccaatcccagtgctacacctgaggttctggagctcagaatctgacagcctctcccccattctgtgtgtgtcggggggacagagggaaccatttaagaaaagataccaaagtagaagtcaaaagaaagacatgttggctataggcgtggtggctcatgcctataatcccagcactttgggaagccggggtaggaggatcaccagaggccagcaggtccacaccagcctgggcaacacagcaagacaccgcatctacagaaaaattttaaaattagctgggcgtggtggtgtgtacctgtaggcctagctgctcaggaggctgaagcaggaggatcacttgagcctgagttcaacactgcagtgagctatggtggcaccactgcactccagcctgggtgacagagcaagaccctgtctctaaaataaattttaaaaagacatatta

SEQ ID NO: 164 - protein, 812 aa, Homo sapiens
MGWRPRRARGTPLLLLLLLLLLWPVPGAGVLQGHIPGQPVTPHWVLDGQPWRTVSLEEPVSKPDMGLVALEAEGQELLLELEKNHRLLAPGYIETHYGPDGQPVVLAPNHTDHCHYQGRVRGFPDSWVVLCTCSGMSGLITLSRNASYYLRPWPPRGSKDFSTHEIFRMEQLLTWKGTCGHRDPGNKAGMTSLPGGPQSRGRREARRTRKYLELYIVADHTLFLTRHRNLNHTKQRLLEVANYVDQLLRTLDIQVALTGLEVWTERDRSRVTQDANATLWAFLQWRRGLWAQRPHDSAQLLTGRAFQGATVGLAPVEGMCRAESSGGVSTDHSELPIGAAATMAHEIGHSLGLSHDPDGCCVEAAAESGGCVMAAATGHPFPRVFSACSRRQLRAFFRKGGGACLSNAPDPGLPVPPALCGNGFVEAGEECDCGPGQECRDLCCFAHNCSLRPGAQCAHGDCCVRCLLKPAGALCRQAMGDCDLPEFCTGTSSHCPPDVYLLDGSPCARGSGYCWDGACPTLEQQCQQLWGPGSHPAPEACFQVVNSAGDAHGNCGQDSEGHFLPCAGRDALCGKLQCQGGKPSLLAPHMVPVDSTVHLDGQEVTCRGALALPSAQLDLLGLGLVEPGTQCGPRMVCQSRRCRKNAFQELQRCLTACHSHGVCNSNHNCHCAPGWAPPFCDKPGFGGSMDSGPVQAENHDTFLLAMLLSVLLPLLPGAGLAWCCYRLPGAHLQRCSWGCRRDPACSGPKDGPHRDHPLGGVHPMELGPTATGQPWPLDPENSHEPSSHPEKPLPAVSPDPQDQVQMPRSCLW

SEQ ID NO: 165 - DNA, 6881 bp, Homo sapiens
  CDS (16)..(6858)
aaaaatgtaataaagatggattttcttatcatttttcttttactttttattgggacttcagagacacaggtagatgtttccaatgtcgttcctggtactaggtacgatataaccatctcttcaatttctacaacatacacctcacctgttactagaataggggcttctaatgaaccagggcctccagtcttcctagccggggaaagagtcggatctgctgggattcttctgtcttggaatacaccacctaatccaaatggaaggattatatcttacattgtcaaatataaggaagtttgtccgtggatgcaaacagtatatacacaagtcagatcaaagccagacagtctggaagttcttcttactaatcttaatcctggaacaacatatgaaattaaggtagctgctgaaaacagtgctggcattggagtgtttagtgatccatttctcttccaaactgcagaaagtgctccaggaaaagtggtggatttcacaggtgaggctgtcccgttcagcagtaagctgatgtggtatacctcggcaaccaaaaaaaaaattaccagcttcaagattagtgtcaagcataacagaagtgggatagtagtgaaagaagtgtcaatcagagtggagtgcattttaagtgcttcccttcctttgcactgcaacgagaatagtgaatcttttttatggagtacagccagcccttctccaacccttggtagagttacacctccatcgcgtaccacacattcatcaagcacgttgacacagaatgagatcagctctgtgaaagagcctatcagttttgtagtgacacacttgagaccttatacaacatatctttttgaagtttcagctgctacaactgaagcaggttatattgatagtacgattgtcagaacaccagaatcagtgcctgaaggaccaccacaaaactgcgtaacaggcaacatcacaggaaagtccttttcaattttatgggacccaccaactatagtaacagggaaatttagttatagagttgaattatatggaccatcagcaggtcgcattttggataacagcacaaaagacctcaagtttgcattcactaacctaacaccatttacaatgtatgatgtctatattgcggctgaaaccagtgcagggactgggcccaagtcaaatatttcagtattcactccaccagatgttccaggggcagtgtttgatttacaacttgcagaggtagaatccacgcaagtaagaattacttggaagaaaccacgacaaccaaatggaattattaaccaataccgagtgaaagtgctagttccagagacaggaataattttggaaaatactttgctcactggaaataatgagataaatgaccccatggctccagaaattgtgaacatagtacagccaatggtaggattatatgagggttcagcagagatgtcgtctgaccttcactcacttgctacatttatatataacagccatccagataaaaactttcctgcaaggaatagagctgaagaccagacttcaccagttgtaactacaaggaatcagtatattactgacattgcagctgaacagctgacttatgttcttatcagattaaggagattttgggctgagacaatggggttttctagatatacaatcatgtcatctgcaagcagggacaatttgacttccccaggccctttgtcagcccaaaatttcagagttacacatgttaccataacagaagtatttttacactgggatcctccagatcctgtattttttcatcattaccttatcactattttggatgttgaaaaccaatccaagagtattattttaaggacattaaacagtttgtctcttgtccttatagggttaaagaaatacacaaaatacaaaatgagagtggcagcctcaacccacgttggagaaagttctttgtctgaagaaaatgacatctttgtgagaacttcagaagatgaaccggaatcatcacctcaagatgtcgaagtaattgatgttaccgcagatgaaataaggttgaagtggtcaccacccgaaaagcccaatgggatcattattgcttatgaagtgctatataaaaatatagatactttatatatgaagaacacatcaacaacagacataatattaaggaacttaagacctcacaccctctataacatttctgtaaggtcttacaccagatttggtcatggcaatcaggtatcttctttactctctgtaaggacttcggagtcagtgcctgatagtgcaccagaaaatatcacttacaaaaatatttcttctggagagattgagctatcattccttcccccaagtagtcccaatggaatcatacaaaaatatacaatttatctcaagagaagtaatggaaatgaggaaagaactataaatacaacctctttaacccaaaacattaaaggtctgaagaaatatacccaatatatcattgaggtgtctgctagtacactcaaaggtgaaggagttcggagtgctcccataagtatactgacggaggaagatgctcctgattctccccctcaagacttctctgtaaaacagttgtctggtgtcacggtgaagttgtcatggcaaccacccctggagccaaatggaattatcctttattacacagtttatgtctggagatcatcattaaaaactattaatgtcactgaaacatcattggagttatcagatttggattataatgttgaatacagtgcttatgtaacagctagcaccagatttggtgatgggaaaacaagaagcaatatcattagctttcaaacaccagagggaccaagcgatcctcccaaagatgtttattatgcaaacctcagttcttcatcaataattcttttctggacacctccttcaaaacctaatgggattatacaatattactctgtttattacagaaatacttcaggtacttttatgcagaattttacactccatgaagtaaccaatgactttgacaatatgactgtatccacaattatagataaactgacaatattcagctactatacattttggttaacagcaagtacttcagttggaaatgggaataaaagcagtgacatcattgaagtatacacagatcaagacgtacctgaagggtttgttggaaacctgacttacgaatccatttcgtcaactgcaataaatgtaagctgggtcccaccggctcaaccaaacggtctagtcttctactatgtttcactgatcttacagcagactcctcgccatgtgagaccacctcttgttacatatgagagaagcatatattttgataatctggaaaaatacactgattatatattaaaaattactccatcaacagaaaagggattctctgatacctatactgcccagctatacatcaagactgaagaagatatcccagaaacttcaccaataatcaacacttttaaaaacctttcctctacctcagttctcttatcatgggatcccccagtaaagccaaatggtgcaataataagttatgatttaactttacaaggaccaaatgaaaattattctttcattacttctgataattacataatattggaagagctttcaccatttacattatatagcttttttgctgccgcaagaactagaaaaggacttggtccttccagtattcttttcttttacacagatgagtcagtgccgttagcacctccacaaaatttgactttaatcaactgtacttcagactttgtatggctgaaatggagcccaagtcctcttccaggtggtattgttaaagtatatagttttaaaattcatgaacatgaaactgacactatatattataagaatatatcaggatttaaaactgaagccaaacttgttggactggaaccagtcagcacctactctatccgtgtatctgcgttcaccaaagttggaaatggcaatcaatttagtaatgtagtaaaattcacaacccaagaatcagttccagatgtcgtgcagaatatgcagtgcatggcaactagctggcagtcagttttagtgaaatgggatccacccaaaaaggcaaatggaataataacgcagtatatggtaacagttgaaaggaattctacaaaagtttctccccaagatcacatgtacactttcataaagcttcttgccaatacctcatatgtctttaaagtaagagcttcaacctcagctggtgaaggtgatgaaagcacatgccatgtcagcacactacctgaaacagttcccagtgttcccacaaatattgctttttctgatgttcagtcaactagtgcaacattgacatggataagacctgacactatccttggctactttcaaaattacaaaattaccactcaacttcgtgctcaaaaatgcaaagaatgggaatccgaagaatgtgttgaatatcaaaaaattcaatacctctatgaagctcacttaactgaagagacagtatatggattaaagaaatttagatggtatagattccaagtggctgccagcaccaatgctggctatggcaatgcttcaaactggatttctacaaaaactctgcctggccctccagatggtcctcctgaaaatgttcatgtagtagcaacatcaccttttagcatcagcataagctggagtgaacctgctgtcattactggaccaacatgttatctgattgatgtcaaatcggtagataatgatgaatttaatatatccttcatcaagtcaaatgaagaaaataaaaccatagaaattaaagatttagaaatattcacaaggtattctgtagtgatcactgcatttactgggaacattagtgctgcatatgtagaagggaagtcaagtgctgaaatgattgttactactttagaatcagccccaaaggacccacctaacaacatgacatttcagaagataccagatgaagttacaaaatttcaattaacgttccttcctccttctcaacctaatggaaatatccaagtatatcaagctctggtttaccgagaagatgatcctactgctgtccagattcacaacctcagtattatacagaaaaccaacacattcgtcattgcaatgctagaaggactaaaaggtggacatacatacaatatcagtgtttacgcagtcaatagtgctggtgcaggtccaaaggttccgatgagaataaccatggatatcaaagctccagcacgaccaaaaaccaaaccaacccctatttatgatgccacaggaaaactgcttgtgacttcaacaacaattacaatcagaatgccaatatgttactacagtgatgatcatggaccaataaaaaatgtacaagtgcttgtgacagaaacaggagctcagcatgatggaaatgtaacaaagtggtatgatgcatattttaataaagcaaggccatattttacaaatgaaggctttcctaaccctccatgtacagaaggaaagacaaagtttagtggcaatgaagaaatctacatcataggtgctgataatgcatgcatgattcctggcaatgaagacaaaatttgcaatggaccactgaaaccaaaaaagcaatacttatttaaatttagagctacaaatattatgggacaatttactgactctgattattctgaccctgttaagactttaggcgaaggactttcagaaagaaccgtagagatcattctttccgtcactttgtgtatcctttcaataattctccttggaacagctatttttgcatttgcaagaattcgacagaagcagaaagaaggtggcacatactctcctcaggatgcagaaattattgacactaaattgaagctggatcagctcatcacagtggcagacctggaactgaaggacgagagattaacgcggccaataagcaagaaatccttcctgcaacatgttgaagagctttgcacaaacaacaacctaaagtttcaagaagaattttcggaattaccaaaatttcttcaggatctttcttcaactgatgctgatctgccttggaatagagcaaaaaaccgcttcccaaacataaaaccatataataataacagagtaaagctgatagctgacgctagtgttccaggttcggattatattaatgccagctatatttctggttatttatgtccaaatgaatttattgctactcaaggtccactaccaggaacagttggagatttttggagaatggtgtgggaaaccagagcaaaaacattagtaatgctaacacagtgttttgaaaaaggacggatcagatgccatcagtattggccagaggacaacaagccagttactgtctttggagatatagtgattacaaagctaatggaggatgttcaaatagattggactatcagggatctgaaaattgaaaggcatggggattgcatgactgttcgacagtgtaactttactgcctggccagagcatggggttcctgagaacagcgcccctctaattcactttgtgaagttggttcgagcaagcagggcacatgacaccacacctatgattgttcactgcagtgctggagttggaagaactggagtttttattgctctggaccatttaacacaacatataaatgaccatgattttgtggatatatatggactagtagctgaactgagaagtgaaagaatgtgcatggtgcagaatctggcacagtatatctttttacaccagtgcattctggatctcttatcaaataagggaagtaatcagcccatctgttttgttaactattcagcacttcagaagatggactctttggacgccatggaaggtggtgatgttgagcttgaatgggaagaaaccactatgtaaatattcagaccaaaggatac

SEQ ID NO: 166 - protein, 2281 aa, Homo sapiens
MDFLIIFLLLFIGTSETQVDVSNVVPGTRYDITISSISTTYTSPVTRIGASNEPGPPVFLAGERVGSAGILLSWNTPPNPNGRIISYIVKYKEVCPWMQTVYTQVRSKPDSLEVLLTNLNPGTTYEIKVAAENSAGIGVFSDPFLFQTAESAPGKVVDFTGEAVPFSSKLMWYTSATKKKITSFKISVKHNRSGIVVKEVSIRVECILSASLPLHCNENSESFLWSTASPSPTLGRVTPPSRTTHSSSTLTQNEISSVKEPISFVVTHLRPYTTYLFEVSAATTEAGYIDSTIVRTPESVPEGPPQNCVTGNITGKSFSILWDPPTIVTGKFSYRVELYGPSAGRILDNSTKDLKFAFTNLTPFTMYDVYIAAETSAGTGPKSNISVFTPPDVPGAVFDLQLAEVESTQVRITWKKPRQPNGIINQYRVKVLVPETGIILENTLLTGNNEINDPMAPEIVNIVQPMVGLYEGSAEMSSDLHSLATFIYNSHPDKNFPARNRAEDQTSPVVTTRNQYITDIAAEQLTYVLIRLRRFWAETMGFSRYTIMSSASRDNLTSPGPLSAQNFRVTHVTITEVFLHWDPPDPVFFHHYLITILDVENQSKSIILRTLNSLSLVLIGLKKYTKYKMRVAASTHVGESSLSEENDIFVRTSEDEPESSPQDVEVIDVTADEIRLKWSPPEKPNGIIIAYEVLYKNIDTLYMKNTSTTDIILRNLRPHTLYNISVRSYTRFGHGNQVSSLLSVRTSESVPDSAPENITYKNISSGEIELSFLPPSSPNGIIQKYTIYLKRSNGNEERTINTTSLTQNIKGLKKYTQYIIEVSASTLKGEGVRSAPISILTEEDAPDSPPQDFSVKQLSGVTVKLSWQPPLEPNGIILYYTVYVWRSSLKTINVTETSLELSDLDYNVEYSAYVTASTRFGDGKTRSNIISFQTPEGPSDPPKDVYYANLSSSSIILFWTPPSKPNGIIQYYSVYYRNTSGTFMQNFTLHEVTNDFDNMTVSTIIDKLTIFSYYTFWLTASTSVGNGNKSSDIIEVYTDQDVPEGFVGNLTYESISSTAINVSWVPPAQPNGLVFYYVSLILQQTPRHVRPPLVTYERSIYFDNLEKYTDYILKITPSTEKGFSDTYTAQLYIKTEEDIPETSPIINTFKNLSSTSVLLSWDPPVKPNGAIISYDLTLQGPNENYSFITSDNYIILEELSPFTLYSFFAAARTRKGLGPSSILFFYTDESVPLAPPQNLTLINCTSDFVWLKWSPSPLPGGIVKVYSFKIHEHETDTIYYKNISGFKTEAKLVGLEPVSTYSIRVSAFTKVGNGNQFSNVVKFTTQESVPDVVQNMQCMATSWQSVLVKWDPPKKANGIITQYMVTVERNSTKVSPQDHMYTFIKLLANTSYVFKVRASTSAGEGDESTCHVSTLPETVPSVPTNIAFSDVQSTSATLTWIRPDTILGYFQNYKITTQLRAQKCKEWESEECVEYQKIQYLYEAHLTEETVYGLKKFRWYRFQVAASTNAGYGNASNWISTKTLPGPPDGPPENVHVVATSPFSISISWSEPAVITGPTCYLIDVKSVDNDEFNISFIKSNEENKTIEIKDLEIFTRYSVVITAFTGNISAAYVEGKSSAEMIVTTLESAPKDPPNNMTFQKIPDEVTKFQLTFLPPSQPNGNIQVYQALVYREDDPTAVQIHNLSIIQKTNTFVIAMLEGLKGGHTYNISVYAVNSAGAGPKVPMRITMDIKAPARPKTKPTPIYDATGKLLVTSTTITIRMPICYYSDDHGPIKNVQVLVTETGAQHDGNVTKWYDAYFNKARPYFTNEGFPNPPCTEGKTKFSGNEEIYIIGADNACMIPGNEDKICNGPLKPKKQYLFKFRATNIMGQFTDSDYSDPVKTLGEGLSERTVEIILSVTLCILSIILLGTAIFAFARIRQKQKEGGTYSPQDAEIIDTKLKLDQLITVADLELKDERLTRPISKKSFLQHVEELCTNNNLKFQEEFSELPKFLQDLSSTDADLPWNRAKNRFPNIKPYNNNRVKLIADASVPGSDYINASYISGYLCPNEFIATQGPLPGTVGDFWRMVWETRAKTLVMLTQCFEKGRIRCHQYWPEDNKPVTVFGDIVITKLMEDVQIDWTIRDLKIERHGDCMTVRQCNFTAWPEHGVPENSAPLIHFVKLVRASRAHDTTPMIVHCSAGVGRTGVFIALDHLTQHINDHDFVDIYGLVAELRSERMCMVQNLAQYIFLHQCILDLLSNKGSNQPICFVNYSALQKMDSLDAMEGGDVELEWEETTM

SEQ ID NO: 167 - DNA, 6900 bp, Homo sapiens
  CDS (1)..(6897)
atggattttcttatcatttttcttttactttttattgggacttcagagacacaggtagatgtttccaatgtcgttcctggtactaggtacgatataaccatctcttcaatttctacaacatacacctcacctgttactagaatagtgacaacaaatgtaacaaaaccagggcctccagtcttcctagccggggaaagagtcggatctgctgggattcttctgtcttggaatacaccacctaatccaaatggaaggattatatcttacattgtcaaatataaggaagtttgtccgtggatgcaaacagtatatacacaagtcagatcaaagccagacagtctggaagttcttcttactaatcttaatcctggaacaacatatgaaattaaggttgctgctgaaaacagtgctggcattggagtgtttagtgatccatttctcttccaaactgcagaaagtgctccaggaaaagtggtgaatctcacagttgaggcctacaacgcttcagcagttaagctgatttggtatttacctcggcaaccaaatggcaaaattaccagcttcaagattagtgtcaagcatgccagaagtgggatagtagtgaaagatgtctcaatcagagtagaggacattttgactgggaaattgccagaatgcaatgagaatagtgaatcttttttatggagtacagccagcccttctccaacccttggtagagttacacctccatcgcgtaccacacattcatcaagcacgttgacacagaatgagatcagctctgtgtggaaagagcctatcagttttgtagtgacacacttgagaccttatacaacatatctttttgaagtttcagctgttacaactgaagcaggttatattgatagtacgattgtcagaacaccagaatcagtgcctgaaggaccaccacaaaactgcgtaacaggcaacatcacaggaaagtccttttcaattttatgggacccaccaactatagtaacagggaaatttagttatagagttgaattatatggaccatcaggtcgcattttggataacagcacaaaagacctcaagtttgcattcactaacctaacaccatttacaatgtatgatgtctatattgcggctgaaaccagtgcagggactgggcccaagtcaaatatttcagtattcactccaccagatgttccaggggcagtgtttgatttacaacttgcagaggtagaatccacgcaagtaagaattacttggaagaaaccacgacaaccaaatggaattattaaccaataccgagtgaaagtgctagttccagagacaggaataattttggaaaatactttgctcactggaaataatgagtatataaatgaccccatggctccagaaattgtgaacatagtagagccaatggtaggattatatgagggttcagcagagatgtcgtctgaccttcactcacttgctacatttatatataacagccatccagataaaaactttcctgcaaggaatagagctgaagaccagacttcaccagttgtaactacaaggaatcagtatattactgacattgcagctgaacagctgtcttatgttatcaggagacttgtacctttcactgagcacatgattagtgtatctgctttcaccatcatgggagaaggaccaccaacagttctcagtgttaggacacgtcagcaagtgccaagctccattaaaattataaactataaaaatattagttcttcatctattttgttatattgggatcctccagaatatcccaatggaaaaataactcactatacgatttatgcaatggaattggatacaaacagagcattccagataactaccatagataacagctttctcataacagggttaaagaaatacacaaaatacaaaatgagagtggcagcctcaacccacgatggagaaagttctttgtctgaagaaaatgacatctttgtgagaacttcagaagatgaaccggaatcatcacctcaagatgtcgaagtaattgatgttaccgcagatgaaataaggttgaagtggtcaccacccgaaaagcccaatgggatcattattgcttatgaagtgctatataaaaatatagatactttatatatgaagaacacatcaacaacagacataatattaaggaacttaagacctcacaccctctataacatttctgtaaggtcttacaccagatttggtcatggcaatcaggtatcttctttactctctgtaaggacttcggagactgtgcctgatagtgcaccagaaaatatcacttacaaaaatatttcttctggagagattgagctatcattccttcccccaagtagtcccaatggaatcataaaaaaatatacaatttatctcaagagaagtaatggaaatgaggaaagaactataaatacaacctctttaacccaaaacattaaagtactgaagaaatatacccaatatatcattgaggtgtctgctagtacactgaaaggtgaaggagttcggagtgctcccataagtatactgacggaggaagatgctcctgattctccccctcaagacttctctgtaaaacagttgtctggtgtcacggtgaagttgtcatggcaaccacccctggagccaaatggaattatcctttattacacagtttatgtctggaatagatcatcattaaaaactattaatgtcactgaaacatcattggagttatcagatttggattataatgttgaatacagtgcttatgtaacagctagcaccagatttggtgatgggaaaacaagaagcaatatcattagctttcaaacaccagagggagcaccaagcgatcctcccaaagatgtttattatgcaaacctcagttcttcatcaataattcttttctggacacctccttcaaaacctaatgggattatacaatattactctgtttattacagaaatacttcaggtacttttatgcagaattttacactccatgaagtaaccaatgactttgacaatatgactgtatccacaattatagataaactgacaatattcagctactatacattttggttaacagcaagtacttcagttggaaatgggaataaaagcagtgacatcattgaagtatacacagatcaagacgtccctgaagggtttgttggaaacctgacttacgaatccatttcgtcaactgcaataaatgtaagctgggtcccaccggctcaaccaaacggtctagtcttctactatgtttcactgatcttacagcagactcctcgccatgtgagaccacctcttgttacatatgagagaagcatatattttgataatctggaaaaatacactgattatatattaaaaattactccatcaacagaaaagggattctctgatacctatactgcccagctatacatcaagactgaagaagatgtcccagaaacttcaccaataatcaacacttttaaaaacctttcctctacctcagttctcttatcatgggatcccccagtaaagccaaatggtgcaataataagttatgatttaactttacaaggaccaaatgaaaattattctttcattacttctgataattacataatattggaagagctttcaccatttacattatatagcttttttgctgccgcaagaactagaaaaggacttggtccttccagtattcttttcttttacacagatgagtcagtgccgttagcacctccacaaaatttgactttaatcaactgtacttcagactttgtatggctgaaatggagcccaagtcctcttccaggtggtattgttaaagtatatagttttaaaattcatgaacatgaaactgacactatatattataagaatatatcaggatttaaaactgaagccaaacttgttggactggaaccagtcagcacctactctatccgtgtatctgcgttcaccaaagttggaaatggcaatcaatttagtaatgtagtaaaattcacaacccaagaatcagttccagatgtcgtgcagaatatgcagtgcatggcaactagctggcagtcagttttagtgaaatgggatccacccaaaaaggcaaatggaataataacgcagtatatggtaacagttgaaaggaattctacaaaagtttctccccaagatcacatgtacactttcataaagcttcttgccaatacctcatatgtctttaaagtaagagcttcaacctcagctggtgaaggtgatgaaagcacatgccatgtcagcacactacctgaaacagttcccagtgttcccacaaatattgctttttctgatgttcagtcaactagtgcaacattgacatggataagacctgacactatccttggctactttcaaaattacaaaattaccactcaacttcgtgctcaaaaatgcaaagaatgggaatccgaagaatgtgttgaatatcaaaaaattcaatacctctatgaagctcacttaactgaagagacagtatatggattaaagaaatttagatggtatagattccaagtggctgccagcaccaatgctggctatggcaatgcttcaaactggatttctacaaaaactctgcctggccctccagatggtcctcctgaaaatgttcatgtagtagcaacatcaccttttagcatcagcataagctggagtgaacctgctgtcattactggaccaacatgttatctgattgatgtcaaatcggtagataatgatgaatttaatatatccttcatcaagtcaaatgaagaaaataaaaccatagaaattaaagatttagaaatattcacaaggtattctgtagtgatcactgcatttactgggaacattagtgctgcatatgtagaagggaagtcaagtgctgaaatgattgttactactttagaatcagccccaaaggacccacctaacaacatgacatttcagaagataccagatgaagttacaaaatttcaattaacgtcccttcctccttctcaacctaatggaaatatccaagtatatcaagctctggtttaccgagaagatgatcctactgctgtccagattcacaacctcagtattatacagaaaaccaacacattcgtcattgcaatgctagaaggactaaaaggtggacatacatacaatatcagtgtttacgcagtcaatagtgctggtgcaggtccaaaggttccgatgagaataaccatggatatcaaagctccagcacgaccaaaaaccaaaccaacccctatttatgatgccacaggaaaactgcttgtgacttcaacaacaattacaatcagaatgccaatatgttactacagtgatgatcatggaccaataaaaaatgtacaagtgcttgtgacagaaacaggagctcagcatgatggaaatgtaacaaagtggtatgatgcatattttaataaagcaaggccatattttacaaatgaaggctttcctaaccctccatgtacagaaggaaagacaaagtttagtggcaatgaagaaatctacatcataggtgctgataatgcatgcatgattcctggcaatgaagacaaaatttgcaatggaccactgaaaccaaaaaagcaatacttatttaaatttagagctacaaatattatgggacaatttactgactctgattattctgaccctgttaagactttaggcgaaggactttcagaaagaaccctagagatcattctttccgtcactttgtgtatcctttcaataattctccttggaacagctatttttgcatttgcaagaattcgacagaagcagaaagaaggtggcacatactctcctcaggatgcagaaattattgacactaaattgaagctggatcagctcatcacagtggcagacctggaactgaaggacgagagattaacgcggttacttagttatagaaaatccatcaagccaataagcaagaaatccttcctgcaacatgttgaagagctttgcacaaacaacaacctaaagtttcaagaagaattttcggaattaccaaaatttcttcaggatctttcttcaactgatgctgatctgccttggaatagagcaaaaaaccgcttcccaaacataaaaccatataataataacagagtaaagctgatagctgacgctagtgttccaggttcggattatattaatgccagctatatttctggttatttatgtccaaatgaatttattgctactcaaggtccactaccaggaacagttggagatttttggagaatggtgtgggaaaccagagcaaaaacattagtaatgctaacacagtgttttgaaaaaggacggatcagatgccatcagtattggccagaggacaacaagccagttactgtctttggagatatagtgattacaaagctaatggaggatgttcaaatagattggactatcagggatctgaaaattgaaaggcatggggattgcatgactgttcgacagtgtaactttactgcctggccagagcatggggttcctgagaacagcgcccctctaattcactttgtgaagttggttcgagcaagcagggcacatgacaccacacctatgattgttcactgtagtgctggagttggaagaactggagtttttattgctctggaccatttaacacaacatataaatgaccatgattttgtggatatatatggactagtagctgaactgagaagtgaaagaatgtgcatggtgcagaatctggcacagtatatctttttacaccagtgcattctggatctcttatcaaataagggaagtaatcagcccatctgttttgttaactattcagcacttcagaagatggactctttggacgccatggaaggtgatgttgagcttgaatgggaagaaaccactatgtaa

SEQ ID NO: 168 - protein, 2299 aa, Homo sapiens
MDFLIIFLLLFIGTSETQVDVSNVVPGTRYDITISSISTTYTSPVTRIVTTNVTKPGPPVFLAGERVGSAGILLSWNTPPNPNGRIISYIVKYKEVCPWMQTVYTQVRSKPDSLEVLLTNLNPGTTYEIKVAAENSAGIGVFSDPFLFQTAESAPGKVVNLTVEAYNASAVKLIWYLPRQPNGKITSFKISVKHARSGIVVKDVSIRVEDILTGKLPECNENSESFLWSTASPSPTLGRVTPPSRTTHSSSTLTQNEISSVWKEPISFVVTHLRPYTTYLFEVSAVTTEAGYIDSTIVRTPESVPEGPPQNCVTGNITGKSFSILWDPPTIVTGKFSYRVELYGPSGRILDNSTKDLKFAFTNLTPFTMYDVYIAAETSAGTGPKSNISVFTPPDVPGAVFDLQLAEVESTQVRITWKKPRQPNGIINQYRVKVLVPETGIILENTLLTGNNEYINDPMAPEIVNIVEPMVGLYEGSAEMSSDLHSLATFIYNSHPDKNFPARNRAEDQTSPVVTTRNQYITDIAAEQLSYVIRRLVPFTEHMISVSAFTIMGEGPPTVLSVRTRQQVPSSIKIINYKNISSSSILLYWDPPEYPNGKITHYTIYAMELDTNRAFQITTIDNSFLITGLKKYTKYKMRVAASTHDGESSLSEENDIFVRTSEDEPESSPQDVEVIDVTADEIRLKWSPPEKPNGIIIAYEVLYKNIDTLYMKNTSTTDIILRNLRPHTLYNISVRSYTRFGHGNQVSSLLSVRTSETVPDSAPENITYKNISSGEIELSFLPPSSPNGIIKKYTIYLKRSNGNEERTINTTSLTQNIKVLKKYTQYIIEVSASTLKGEGVRSAPISILTEEDAPDSPPQDFSVKQLSGVTVKLSWQPPLEPNGIILYYTVYVWNRSSLKTINVTETSLELSDLDYNVEYSAYVTASTRFGDGKTRSNIISFQTPEGAPSDPPKDVYYANLSSSSIILFWTPPSKPNGIIQYYSVYYRNTSGTFMQNFTLHEVTNDFDNMTVSTIIDKLTIFSYYTFWLTASTSVGNGNKSSDIIEVYTDQDVPEGFVGNLTYESISSTAINVSWVPPAQPNGLVFYYVSLILQQTPRHVRPPLVTYERSIYFDNLEKYTDYILKITPSTEKGFSDTYTAQLYIKTEEDVPETSPIINTFKNLSSTSVLLSWDPPVKPNGAIISYDLTLQGPNENYSFITSDNYIILEELSPFTLYSFFAAARTRKGLGPSSILFFYTDESVPLAPPQNLTLINCTSDFVWLKWSPSPLPGGIVKVYSFKIHEHETDTIYYKNISGFKTEAKLVGLEPVSTYSIRVSAFTKVGNGNQFSNVVKFTTQESVPDVVQNMQCMATSWQSVLVKWDPPKKANGIITQYMVTVERNSTKVSPQDHMYTFIKLLANTSYVFKVRASTSAGEGDESTCHVSTLPETVPSVPTNIAFSDVQSTSATLTWIRPDTILGYFQNYKITTQLRAQKCKEWESEECVEYQKIQYLYEAHLTEETVYGLKKFRWYRFQVAASTNAGYGNASNWISTKTLPGPPDGPPENVHVVATSPFSISISWSEPAVITGPTCYLIDVKSVDNDEFNISFIKSNEENKTIEIKDLEIFTRYSVVITAFTGNISAAYVEGKSSAEMIVTTLESAPKDPPNNMTFQKIPDEVTKFQLTSLPPSQPNGNIQVYQALVYREDDPTAVQIHNLSIIQKTNTFVIAMLEGLKGGHTYNISVYAVNSAGAGPKVPMRITMDIKAPARPKTKPTPIYDATGKLLVTSTTITIRMPICYYSDDHGPIKNVQVLVTETGAQHDGNVTKWYDAYFNKARPYFTNEGFPNPPCTEGKTKFSGNEEIYIIGADNACMIPGNEDKICNGPLKPKKQYLFKFRATNIMGQFTDSDYSDPVKTLGEGLSERTLEIILSVTLCILSIILLGTAIFAFARIRQKQKEGGTYSPQDAEIIDTKLKLDQLITVADLELKDERLTRLLSYRKSIKPISKKSFLQHVEELCTNNNLKFQEEFSELPKFLQDLSSTDADLPWNRAKNRFPNIKPYNNNRVKLIADASVPGSDYINASYISGYLCPNEFIATQGPLPGTVGDFWRMVWETRAKTLVMLTQCFEKGRIRCHQYWPEDNKPVTVFGDIVITKLMEDVQIDWTIRDLKIERHGDCMTVRQCNFTAWPEHGVPENSAPLIHFVKLVRASRAHDTTPMIVHCSAGVGRTGVFIALDHLTQHINDHDFVDIYGLVAELRSERMCMVQNLAQYIFLHQCILDLLSNKGSNQPICFVNYSALQKMDSLDAMEGDVELEWEETTM

SEQ ID NO: 169 - DNA, 2220 bp, Homo sapiens
  CDS (1)..(2220)
agatctcctgaaggaccaccacaaaactgcgtaacaggcaacatcacaggaaagtccttttcaattttatgggacccaccaactatagtaacagggaaatttagttatagagttgaattatatggaccatcaggtcgcattttggataacagcacaaaagacctcaagtttgcattcactaacctaacaccatttacaatgtatgatgtctatattgcggctgaaaccagtgcagggactgggcccaagtcaaatatttcagtattcactccaccagatgttccaggggcagtgtttgatttacaacttgcagaggtagaatccacgcaagtaagaattacttggaagaaaccacgacaaccaaatggaattattaaccaataccgagtgaaagtgctagttccagagacaggaataattttggaaaatactttgctcactggaaataatgagtatataaatgaccccatggctccagaaattgtgaacatagtagagccaatggtaggattatatgagggttcagcagagatgtcgtctgaccttcactcacttgctacatttatatataacagccatccagataaaaactttcctgcaaggaatagagctgaagaccagacttcaccagttgtaactacaaggaatcagtatattactgacattgcagctgaacagctgtcttatgttatcaggagacttgtacctttcactgagcacatgattagtgtatctgctttcaccatcatgggagaaggaccaccaacagttctcagtgttaggacacgtcagcaagtgccaagctccattaaaattataaactataaaaatattagttcttcatctattttgttatattgggatcctccagaatatcccaatggaaaaataactcactatacgatttatgcaatggaattggatacaaacagagcattccagataactaccatagataacagctttctcataacagggttaaagaaatacacaaaatacaaaatgagagtggcagcctcaacccacgatggagaaagttctttgtctgaagaaaatgacatctttgtgagaacttcagaagatgaaccggaatcatcacctcaagatgtcgaagtaattgatgttaccgcagatgaaataaggttgaagtggtcaccacccgaaaagcccaatgggatcattattgcttatgaagtgctatataaaaatatagatactttatatatgaagaacacatcaacaacagacataatattaaggaacttaagacctcacaccctctataacatttctgtaaggtcttacaccagatttggtcatggcaatcaggtatcttctttactctctgtaaggacttcggagactgtgcctgatagtgcaccagaaaatatcacttacaaaaatatttcttctggagagattgagctatcattccttcccccaagtagtcccaatggaatcataaaaaaatatacaatttatctcaagagaagtaatggaaatgaggaaagaactataaatacaacctctttaacccaaaacattaaagtactgaagaaatatacccaatatatcattgaggtgtctgctagtacactgaaaggtgaaggagttcggagtgctcccataagtatactgacggaggaagatgctcctgattctccccctcaagacttctctgtaaaacagttgtctggtgtcacggtgaagttgtcatggcaaccacccctggagccaaatggaattatcctttattacacagtttatgtctggaatagatcatcattaaaaactattaatgtcactgaaacatcattggagttatcagatttggattataatgttgaatacagtgcttatgtaacagctagcaccagatttggtgatgggaaaacaagaagcaatatcattagctttcaaacaccagagggagcaccaagcgatcctcccaaagatgtttattatgcaaacctcagttcttcatcaataattcttttctggacacctccttcaaaacctaatgggattatacaatattactctgtttattacagaaatacttcaggtacttttatgcagaattttacactccatgaagtaaccaatgactttgacaatatgactgtatccacaattatagataaactgacaatattcagctactatacattttggttaacagcaagtacttcagttggaaatgggaataaaagcctcgag

SEQ ID NO: 170 - protein, 740 aa, Homo sapiens
RSPEGPPQNCVTGNITGKSFSILWDPPTIVTGKFSYRVELYGPSGRILDNSTKDLKFAFTNLTPFTMYDVYIAAETSAGTGPKSNISVFTPPDVPGAVFDLQLAEVESTQVRITWKKPRQPNGIINQYRVKVLVPETGIILENTLLTGNNEYINDPMAPEIVNIVEPMVGLYEGSAEMSSDLHSLATFIYNSHPDKNFPARNRAEDQTSPVVTTRNQYITDIAAEQLSYVIRRLVPFTEHMISVSAFTIMGEGPPTVLSVRTRQQVPSSIKIINYKNISSSSILLYWDPPEYPNGKITHYTIYAMELDTNRAFQITTIDNSFLITGLKKYTKYKMRVAASTHDGESSLSEENDIFVRTSEDEPESSPQDVEVIDVTADEIRLKWSPPEKPNGIIIAYEVLYKNIDTLYMKNTSTTDIILRNLRPHTLYNISVRSYTRFGHGNQVSSLLSVRTSETVPDSAPENITYKNISSGEIELSFLPPSSPNGIIKKYTIYLKRSNGNEERTINTTSLTQNIKVLKKYTQYIIEVSASTLKGEGVRSAPISILTEEDAPDSPPQDFSVKQLSGVTVKLSWQPPLEPNGIILYYTVYVWNRSSLKTINVTETSLELSDLDYNVEYSAYVTASTRFGDGKTRSNIISFQTPEGAPSDPPKDVYYANLSSSSIILFWTPPSKPNGIIQYYSVYYRNTSGTFMQNFTLHEVTNDFDNMTVSTIIDKLTIFSYYTFWLTASTSVGNGNKSLE

SEQ ID NO: 171 - DNA, 6994 bp, Homo sapiens
  CDS (31)..(6873)
tgattctactggctgaaaaatgtaataaagatggattttcttatcatttttcttttactttttattgggacttcagagacacaggtagatgtttccaatgtcgttcctggtactaggtacgatataaccatctcttcaatttctacaacatacacctcacctgttactagaataggggcttctaatgaaccagggcctccagtcttcctagccggggaaagagtcggatctgctgggattcttctgtcttggaatacaccacctaatccaaatggaaggattatatcttacattgtcaaatataaggaagtttgtccgtggatgcaaacagtatatacacaagtcagatcaaagccagacagtctggaagttcttcttactaatcttaatcctggaacaacatatgaaattaaggtagctgctgaaaacagtgctggcattggagtgtttagtgatccatttctcttccaaactgcagaaagtgctccaggaaaagtggtggatttcacaggtgaggctgtcccgttcagcagtaagctgatgtggtatacctcggcaaccaaaaaaaaaattaccagcttcaagattagtgtcaagcataacagaagtgggatagtagtgaaagaagtgtcaatcagagtggagtgcattttaagtgcttcccttcctttgcactgcaacgagaatagtgaatcttttttatggagtacagccagcccttctccaacccttggtagagttacacctccatcgcgtaccacacattcatcaagcacgttgacacagaatgagatcagctctgtgaaagagcctatcagttttgtagtgacacacttgagaccttatacaacatatctttttgaagtttcagctgctacaactgaagcaggttatattgatagtacgattgtcagaacaccagaatcagtgcctgaaggaccaccacaaaactgcgtaacaggcaacatcacaggaaagtccttttcaattttatgggacccaccaactatagtaacagggaaatttagttatagagttgaattatatggaccatcagcaggtcgcattttggataacagcacaaaagacctcaagtttgcattcactaacctaacaccatttacaatgtatgatgtctatattgcggctgaaaccagtgcagggactgggcccaagtcaaatatttcagtattcactccaccagatgttccaggggcagtgtttgatttacaacttgcagaggtagaatccacgcaagtaagaattacttggaagaaaccacgacaaccaaatggaattattaaccaataccgagtgaaagtgctagttccagagacaggaataattttggaaaatactttgctcactggaaataatgagataaatgaccccatggctccagaaattgtgaacatagtacagccaatggtaggattatatgagggttcagcagagatgtcgtctgaccttcactcacttgctacatttatatataacagccatccagataaaaactttcctgcaaggaatagagctgaagaccagacttcaccagttgtaactacaaggaatcagtatattactgacattgcagctgaacagctgacttatgttcttatcagattaaggagattttgggctgagacaatggggttttctagatatacaatcatgtcatctgcaagcagggacaatttgacttccccaggccctttgtcagcccaaaatttcagagttacacatgttaccataacagaagtatttttacactgggatcctccagatcctgtattttttcatcattaccttatcactattttggatgttgaaaaccaatccaagagtattattttaaggacattaaacagtttgtctcttgtccttatagggttaaagaaatacacaaaatacaaaatgagagtggcagcctcaacccacgttggagaaagttctttgtctgaagaaaatgacatctttgtgagaacttcagaagatgaaccggaatcatcacctcaagatgtcgaagtaattgatgttaccgcagatgaaataaggttgaagtggtcaccacccgaaaagcccaatgggatcattattgcttatgaagtgctatataaaaatatagatactttatatatgaagaacacatcaacaacagacataatattaaggaacttaagacctcacaccctctataacatttctgtaaggtcttacaccagatttggtcatggcaatcaggtatcttctttactctctgtaaggacttcggagtcagtgcctgatagtgcaccagaaaatatcacttacaaaaatatttcttctggagagattgagctatcattccttcccccaagtagtcccaatggaatcatacaaaaatatacaatttatctcaagagaagtaatggaaatgaggaaagaactataaatacaacctctttaacccaaaacattaaaggtctgaagaaatatacccaatatatcattgaggtgtctgctagtacactcaaaggtgaaggagttcggagtgctcccataagtatactgacggaggaagatgctcctgattctccccctcaagacttctctgtaaaacagttgtctggtgtcacggtgaagttgtcatggcaaccacccctggagccaaatggaattatcctttattacacagtttatgtctggagatcatcattaaaaactattaatgtcactgaaacatcattggagttatcagatttggattataatgttgaatacagtgcttatgtaacagctagcaccagatttggtgatgggaaaacaagaagcaatatcattagctttcaaacaccagagggaccaagcgatcctcccaaagatgtttattatgcaaacctcagttcttcatcaataattcttttctggacacctccttcaaaacctaatgggattatacaatattactctgtttattacagaaatacttcaggtacttttatgcagaattttacactccatgaagtaaccaatgactttgacaatatgactgtatccacaattatagataaactgacaatattcagctactatacattttggttaacagcaagtacttcagttggaaatgggaataaaagcagtgacatcattgaagtatacacagatcaagacgtacctgaagggtttgttggaaacctgacttacgaatccatttcgtcaactgcaataaatgtaagctgggtcccaccggctcaaccaaacggtctagtcttctactatgtttcactgatcttacagcagactcctcgccatgtgagaccacctcttgttacatatgagagaagcatatattttgataatctggaaaaatacactgattatatattaaaaattactccatcaacagaaaagggattctctgatacctatactgcccagctatacatcaagactgaagaagatatcccagaaacttcaccaataatcaacacttttaaaaacctttcctctacctcagttctcttatcatgggatcccccagtaaagccaaatggtgcaataataagttatgatttaactttacaaggaccaaatgaaaattattctttcattacttctgataattacataatattggaagagctttcaccatttacattatatagcttttttgctgccgcaagaactagaaaaggacttggtccttccagtattcttttcttttacacagatgagtcagtgccgttagcacctccacaaaatttgactttaatcaactgtacttcagactttgtatggctgaaatggagcccaagtcctcttccaggtggtattgttaaagtatatagttttaaaattcatgaacatgaaactgacactatatattataagaatatatcaggatttaaaactgaagccaaacttgttggactggaaccagtcagcacctactctatccgtgtatctgcgttcaccaaagttggaaatggcaatcaatttagtaatgtagtaaaattcacaacccaagaatcagttccagatgtcgtgcagaatatgcagtgcatggcaactagctggcagtcagttttagtgaaatgggatccacccaaaaaggcaaatggaataataacgcagtatatggtaacagttgaaaggaattctacaaaagtttctccccaagatcacatgtacactttcataaagcttcttgccaatacctcatatgtctttaaagtaagagcttcaacctcagctggtgaaggtgatgaaagcacatgccatgtcagcacactacctgaaacagttcccagtgttcccacaaatattgctttttctgatgttcagtcaactagtgcaacattgacatggataagacctgacactatccttggctactttcaaaattacaaaattaccactcaacttcgtgctcaaaaatgcaaagaatgggaatccgaagaatgtgttgaatatcaaaaaattcaatacctctatgaagctcacttaactgaagagacagtatatggattaaagaaatttagatggtatagattccaagtggctgccagcaccaatgctggctatggcaatgcttcaaactggatttctacaaaaactctgcctggccctccagatggtcctcctgaaaatgttcatgtagtagcaacatcaccttttagcatcagcataagctggagtgaacctgctgtcattactggaccaacatgttatctgattgatgtcaaatcggtagataatgatgaatttaatatatccttcatcaagtcaaatgaagaaaataaaaccatagaaattaaagatttagaaatattcacaaggtattctgtagtgatcactgcatttactgggaacattagtgctgcatatgtagaagggaagtcaagtgctgaaatgattgttactactttagaatcagccccaaaggacccacctaacaacatgacatttcagaagataccagatgaagttacaaaatttcaattaacgttccttcctccttctcaacctaatggaaatatccaagtatatcaagctctggtttaccgagaagatgatcctactgctgtccagattcacaacctcagtattatacagaaaaccaacacattcgtcattgcaatgctagaaggactaaaaggtggacatacatacaatatcagtgtttacgcagtcaatagtgctggtgcaggtccaaaggttccgatgagaataaccatggatatcaaagctccagcacgaccaaaaaccaaaccaacccctatttatgatgccacaggaaaactgcttgtgacttcaacaacaattacaatcagaatgccaatatgttactacagtgatgatcatggaccaataaaaaatgtacaagtgcttgtgacagaaacaggagctcagcatgatggaaatgtaacaaagtggtatgatgcatattttaataaagcaaggccatattttacaaatgaaggctttcctaaccctccatgtacagaaggaaagacaaagtttagtggcaatgaagaaatctacatcataggtgctgataatgcatgcatgattcctggcaatgaagacaaaatttgcaatggaccactgaaaccaaaaaagcaatacttatttaaatttagagctacaaatattatgggacaatttactgactctgattattctgaccctgttaagactttaggcgaaggactttcagaaagaaccgtagagatcattctttccgtcactttgtgtatcctttcaataattctccttggaacagctatttttgcatttgcaagaattcgacagaagcagaaagaaggtggcacatactctcctcaggatgcagaaattattgacactaaattgaagctggatcagctcatcacagtggcagacctggaactgaaggacgagagattaacgcggccaataagcaagaaatccttcctgcaacatgttgaagagctttgcacaaacaacaacctaaagtttcaagaagaattttcggaattaccaaaatttcttcaggatctttcttcaactgatgctgatctgccttggaatagagcaaaaaaccgcttcccaaacataaaaccatataataataacagagtaaagctgatagctgacgctagtgttccaggttcggattatattaatgccagctatatttctggttatttatgtccaaatgaatttattgctactcaaggtccactaccaggaacagttggagatttttggagaatggtgtgggaaaccagagcaaaaacattagtaatgctaacacagtgttttgaaaaaggacggatcagatgccatcagtattggccagaggacaacaagccagttactgtctttggagatatagtgattacaaagctaatggaggatgttcaaatagattggactatcagggatctgaaaattgaaaggcatggggattgcatgactgttcgacagtgtaactttactgcctggccagagcatggggttcctgagaacagcgcccctctaattcactttgtgaagttggttcgagcaagcagggcacatgacaccacacctatgattgttcactgcagtgctggagttggaagaactggagtttttattgctctggaccatttaacacaacatataaatgaccatgattttgtggatatatatggactagtagctgaactgagaagtgaaagaatgtgcatggtgcagaatctggcacagtatatctttttacaccagtgcattctggatctcttatcaaataagggaagtaatcagcccatctgttttgttaactattcagcacttcagaagatggactctttggacgccatggaaggtggtgatgttgagcttgaatgggaagaaaccactatgtaaatattcagaccaaaggatacaattggaagagatttttaaatcccaggggccaaagttaccccctcattcttccgaattgaaatgtgcaaccttaaagaaatatctatgcttctctcac

SEQ ID NO: 172 - protein, 2281 aa, Homo sapiens; identical to SEQ ID NO: 166

SEQ ID NO: 173 - DNA, 2739 bp, Homo sapiens
  CDS (7)..(2733)
agatctcaggtagatgtttccaatgtcgttcctggtactaggtacgatataaccatctcttcaatttctacaacatacacctcacctgttactagaatagtgacaacaaatgtaacaaaaccagggcctccagtcttcctagccggggaaagagtcggatctgctgggattcttctgtcttggaatacaccacctaatccaaatggaaggattatatcttacattgtcaaatataaggaagtttgtccgtggatgcaaacagtatatacacaagtcagatcaaagccagacagtctggaagttcttcttactaatcttaatcctggaacaacatatgaaattaaggttgctgctgaaaacagtgctggcattggagtgtttagtgatccatttctcttccaaactgcagaaagtgctccaggaaaagtggtgaatctcacagttgaggcctacaacgcttcagcagttaagctgatttggtatttacctcggcaaccaaatggcaaaattaccagcttcaagattagtgtcaagcatgccagaagtgggatagtagtgaaagatgtctcaatcagagtagaggacattttgactgggaaattgccagaatgcaatgagaatagtgaatcttttttatggagtacagccagcccttctccaacccttggtagagttacacctccatcgcgtaccacacattcatcaagcacgttgacacagaatgagatcagctctgtgtggaaagagcctatcagttttgtagtgacacacttgagaccttatacaacatatctttttgaagtttcagctgttacaactgaagcaggttatattgatagtacgattgtcagaacaccagaatcagtgcctgaaggaccaccacaaaactgcgtaacaggcaacatcacaggaaagtccttttcaattttatgggacccaccaactatagtaacagggaaatttagttatagagttgaattatatggaccatcaggtcgcattttggataacagcacaaaagacctcaagtttgcattcactaacctaacaccatttacaatgtatgatgtctatattgcggctgaaaccagtgcagggactgggcccaagtcaaatatttcagtattcactccaccagatgttccaggggcagtgtttgatttacaacttgcagaggtagaatccacgcaagtaagaattacttggaagaaaccacgacaaccaaatggaattattaaccaataccgagtgaaagtgctagttccagagacaggaataattttggaaaatactttgctcactggaaataatgagtatataaatgaccccatggctccagaaattgtgaacatagtagagccaatggtaggattatatgagggttcagcagagatgtcgtctgaccttcactcacttgctacatttatatataacagccatccagataaaaactttcctgcaaggaatagagctgaagaccagacttcaccagttgtaactacaaggaatcagtatattactgacattgcagctgaacagctgtcttatgttatcaggagacttgtacctttcactgagcacatgattagtgtatctgctttcaccatcatgggagaaggaccaccaacagttctcagtgttaggacacgtcagcaagtgccaagctccattaaaattataaactataaaaatattagttcttcatctattttgttatattgggatcctccagaatatcccaatggaaaaataactcactatacgatttatgcaatggaattggatacaaacagagcattccagataactaccatagataacagctttctcataacagggttaaagaaatacacaaaatacaaaatgagagtggcagcctcaacccacgatggagaaagttctttgtctgaagaaaatgacatctttgtgagaacttcagaagatgaaccggaatcatcacctcaagatgtcgaagtaattgatgttaccgcagatgaaataaggttgaagtggtcaccacccgaaaagcccaatgggatcattattgcttatgaagtgctatataaaaatatagatactttatatatgaagaacacatcaacaacagacataatattaaggaacttaagacctcacaccctctataacatttctgtaaggtcttacaccagatttggtcatggcaatcaggtatcttctttactctctgtaaggacttcggagactgtgcctgatagtgcaccagaaaatatcacttacaaaaatatttcttctggagagattgagctatcattccttcccccaagtagtcccaatggaatcatacaaaaatatacaatttatctcaagagaagtaatggaaatgaggaaagaactataaatacaacctctttaacccaaaacattaaaggactgaagaaatatacccaatatatcattgaggtgtctgctagtacactcaaaggtgaaggagttcggagtgctcccataagtatactgacggaggaagatgctcctgattctccccctcaagacttctctgtaaaacagttgtctggtgtcacggtgaagttgtcatggcaaccacccctggagccaaatggaattatcctttattacacagtttatgtctggaatagatcatcattaaaaactattaatgtcactgaaacatcattggagttatcagatttggattataatgttgaatacagtgcttatgtaacagctagcctcgag

SEQ ID NO: 174 - protein, 909 aa, Homo sapiens
QVDVSNVVPGTRYDITISSISTTYTSPVTRIVTTNVTKPGPPVFLAGERVGSAGILLSWNTPPNPNGRIISYIVKYKEVCPWMQTVYTQVRSKPDSLEVLLTNLNPGTTYEIKVAAENSAGIGVFSDPFLFQTAESAPGKVVNLTVEAYNASAVKLIWYLPRQPNGKITSFKISVKHARSGIVVKDVSIRVEDILTGKLPECNENSESFLWSTASPSPTLGRVTPPSRTTHSSSTLTQNEISSVWKEPISFVVTHLRPYTTYLFEVSAVTTEAGYIDSTIVRTPESVPEGPPQNCVTGNITGKSFSILWDPPTIVTGKFSYRVELYGPSGRILDNSTKDLKFAFTNLTPFTMYDVYIAAETSAGTGPKSNISVFTPPDVPGAVFDLQLAEVESTQVRITWKKPRQPNGIINQYRVKVLVPETGIILENTLLTGNNEYINDPMAPEIVNIVEPMVGLYEGSAEMSSDLHSLATFIYNSHPDKNFPARNRAEDQTSPVVTTRNQYITDIAAEQLSYVIRRLVPFTEHMISVSAFTIMGEGPPTVLSVRTRQQVPSSIKIINYKNISSSSILLYWDPPEYPNGKITHYTIYAMELDTNRAFQITTIDNSFLITGLKKYTKYKMRVAASTHDGESSLSEENDIFVRTSEDEPESSPQDVEVIDVTADEIRLKWSPPEKPNGIIIAYEVLYKNIDTLYMKNTSTTDIILRNLRPHTLYNISVRSYTRFGHGNQVSSLLSVRTSETVPDSAPENITYKNISSGEIELSFLPPSSPNGIIQKYTIYLKRSNGNEERTINTTSLTQNIKGLKKYTQYIIEVSASTLKGEGVRSAPISILTEEDAPDSPPQDFSVKQLSGVTVKLSWQPPLEPNGIILYYTVYVWNRSSLKTINVTETSLELSDLDYNVEYSAYVTAS

SEQ ID NO: 175 - DNA, 2565 bp, Homo sapiens
  CDS (7)..(2559)
agatctcctgaagggtttgttggaaacctgacttacgaatccatttcgtcaactgcaataaatgtaagctgggtcccaccggctcaaccaaacggtctagtcttctactatgtttcactgatcttacagcagactcctcgccatgtgagaccacctcttgttacatatgagagaagcatatattttgataatctggaaaaatacactgattatatattaaaaattactccatcaacagaaaagggattctctgatacctatactgcccagctatacatcaagactgaagaagatgtcccagaaacttcaccaataatcaacacttttaaaaacctttcctctacctcagttctcttatcatgggatcccccagtaaagccaaatggtgcaataataagttatgatttaactttacaaggaccaaatgaaaattattctttcattacttctgataattacataatattggaagagctttcaccatttacattatatagcttttttgctgccgcaagaactagaaaaggacttggtccttccagtattcttttcttttacacagatgagtcagtgccgttagcacctccacaaaatttgactttaatcaactgtacttcagactttgtatggctgaaatggagcccaagtcctcttccaggtggtattgttaaagtatatagttttaaaattcatgaacatgaaactgacactatatattataagaatatatcaggatttaaaactgaagccaaacttgttggactggaaccagtcagcacctactctatccgtgtatctgcgttcaccaaagttggaaatggcaatcaatttagtaatgtagtaaaattcacaacccaagaatcagttccagatgtcgtgcagaatatgcagtgcatggcaactagctggcagtcagttttagtgaaatgggatccacccaaaaaggcaaatggaataataacgcagtatatggtaacagttgaaaggaattctacaaaagtttctccccaagatcacatgtacactttcataaagcttcttgccaatacctcatatgtctttaaagtaagagcttcaacctcagctggtgaaggtgatgaaagcacatgccatgtcagcacactacctgaaacagttcccagtgttcccacaaatattgctttttctgatgttcagtcaactagtgcaacattgacatggataagacctgacactatccttggctactttcaaaattacaaaattaccactcaacttcgtgctcaaaaatgcaaagaatgggaatccgaagaatgtgttgaatatcaaaaaattcaatacctctatgaagctcacttaactgaagagacagtatatggattaaagaaatttagatggtatagattccaagtggctgccagcaccaatgctggctatggcaatgcttcaaactggatttctacaaaaactctgcctggccctccagatggtcctcctgaaaatgttcatgtagtagcaacatcaccttttagcatcagcataagctggagtgaacctgctgtcattactggaccaacatgttatctgattgatgtcaaatcggtagataatgatgaatttaatatatccttcatcaagtcaaatgaagaaaataaaaccatagaaattaaagatttagaaatattcacaaggtattctgtagtgatcactgcatttactgggaacattagtgctgcatatgtagaagggaagtcaagtgctgaaatgattgttactactttagaatcagccccaaaggacccacctaacaacatgacatttcagaagataccagatgaagttacaaaatttcaattaacgtcccttcctccttctcaacctaatggaaatatccaagtatatcaagctctggtttaccgagaagatgatcctactgctgtccagattcacaacctcagtattatacagaaaaccaacacattcgtcattgcaatgctagaaggactaaaaggtggacatacatacaatatcagtgtttacgcagtcaatagtgctggtgcaggtccaaaggttccgatgagaataaccatggatatcaaagctccagcacgaccaaaaaccaaaccaacccctatttatgatgccacaggaaaactgcttgtgacttcaacaacaattacaatcagaatgccaatatgttactacagtgatgatcatggaccaataaaaaatgtacaagtgcttgtgacagaaacaggagctcagcatgatggaaatgtaacaaagtggtatgatgcatattttaataaagcaaggccatattttacaaatgaaggctttcctaaccctccatgtacagaaggaaagacaaagtttagtggcaatgaagaaatctacatcataggtgctgataatgcatgcatgattcctggcaatgaagacaaaatttgcaatggaccactgaaaccaaaaaagcaatacttatttaaatttagagctacaaatattatgggacaatttactgactctgattattctgaccctgttaagactttaggcgaaggactttcagaaagaaccctcgag

SEQ ID NO: 176 - protein, 851 aa, Homo sapiens
PEGFVGNLTYESISSTAINVSWVPPAQPNGLVFYYVSLILQQTPRHVRPPLVTYERSIYFDNLEKYTDYILKITPSTEKGFSDTYTAQLYIKTEEDVPETSPIINTFKNLSSTSVLLSWDPPVKPNGAIISYDLTLQGPNENYSFITSDNYIILEELSPFTLYSFFAAARTRKGLGPSSILFFYTDESVPLAPPQNLTLINCTSDFVWLKWSPSPLPGGIVKVYSFKIHEHETDTIYYKNISGFKTEAKLVGLEPVSTYSIRVSAFTKVGNGNQFSNVVKFTTQESVPDVVQNMQCMATSWQSVLVKWDPPKKANGIITQYMVTVERNSTKVSPQDHMYTFIKLLANTSYVFKVRASTSAGEGDESTCHVSTLPETVPSVPTNIAFSDVQSTSATLTWIRPDTILGYFQNYKITTQLRAQKCKEWESEECVEYQKIQYLYEAHLTEETVYGLKKFRWYRFQVAASTNAGYGNASNWISTKTLPGPPDGPPENVHVVATSPFSISISWSEPAVITGPTCYLIDVKSVDNDEFNISFIKSNEENKTIEIKDLEIFTRYSVVITAFTGNISAAYVEGKSSAEMIVTTLESAPKDPPNNMTFQKIPDEVTKFQLTSLPPSQPNGNIQVYQALVYREDDPTAVQIHNLSIIQKTNTFVIAMLEGLKGGHTYNISVYAVNSAGAGPKVPMRITMDIKAPARPKTKPTPIYDATGKLLVTSTTITIRMPICYYSDDHGPIKNVQVLVTETGAQHDGNVTKWYDAYFNKARPYFTNEGFPNPPCTEGKTKFSGNEEIYIIGADNACMIPGNEDKICNGPLKPKKQYLFKFRATNIMGQFTDSDYSDPVKTLGEGLSERT

SEQ ID NO: 177 - DNA, 6903 bp, Homo sapiens
  CDS (1)..(6900)
atggattttcttatcatttttcttttactttttattgggacttcagagacacaggtagatgtttccaatgtcgttcctggtactaggtacgatataaccatctcttcaatttctacaacatacacctcacctgttactagaatagtgacaacaaatgtaacagaaccagggcctccagtcttcctagccggggaaagagtcggatctgctgggattcttctgtcttggaatacaccacctaatccaaatggaaggattatatcttacattgtcaaatataaggaagtttgtccgtggatgcaaacagtatatacacaagtcagatcaaagccagacagtctggaagttcttcttactaatcttaatcctggaacaacatatgaaattaaggtagctgctgaaaacagtgctggcattggagtgtttagtgatccatttctcttccaaactgcagaaagtccagctccaggaaaagtggtgaatctcacagttgaggcctacaacgcttcagcagttaagctgatttggtatttacctcggcaaccaaatggcaaaattaccagcttcaagattagtgtcaagcatgccagaagtgggatagtagtgaaagatgtctcaatcagagtagaggacattttgactgggaaattgccagaatgcaatgtagagaatagtgaatcttttttatggagtacagccagcccttctccaacccttggtagagttacacctccatcgcgtaccacacattcatcaagcacgttgacacagaatgagatcagctctgtgtggaaagagcctatcagttttgtagtgacacacttgagaccttatacaacatatctttttgaagtttcagctgctacaactgaagcaggttatattgatagtacgattgtcagaacaccagaatcagtgcctgaaggaccaccacaaaactgcgtaacaggcaacatcacaggaaagtccttttcaattttatgggacccaccaactatagtaacagggaaatttagttatagagttgaattatatggaccatcaggtcgcattttggataacagcacaaaagacctcaagtttgcattcactaacctaacaccatttacaatgtatgatgtctatattgcggctgaaaccagtgcagggactgggcccaagtcaaatatttcagtattcactccaccagatgttccaggggcagtgtttgatttacaacttgcagaggtagaatccacgcaagtaagaattacttggaagaaaccacgacaaccaaatggaattattaaccaataccgagtgaaagtgctagttccagagacaggaataattttggaaaatactttgctcactggaaataatgagataaatgaccccatggctccagaaattgtgaacatagtagagccaatggtaggattatatgagggttcagcagagatgtcgtctgaccttcactcacttgctacatttatatataacagccatccagataaaaactttcctgcaaggaatagagctgaagaccagacttcaccagttgtaactacaaggaatcagtatattactgacattgcagctgaacagctgtcttatgttatcaggagacttgtacctttcactgagcacatgattagtgtatctgctttcaccatcatgggagaaggaccaccaacagttctcagtgttaggacacgtcagcaagtgccaagctccattaaaattataaactataaaaatattagttcttcatctattttgttatattgggatcctccagaatatcccaatggaaaaataactcactatacgatttatgcaatggaattggatacaaacagagcattccagataactaccatagataacagctttctcataacaggtatagggttaaagaaatacacaaaatacaaaatgagagtggcagcctcaacccacgttggagaaagttctttgtctgaagaaaatgacatctttgtgagaacttcagaagatgaaccggaatcatcacctcaagatgtcgaagtaattgatgttaccgcagatgaaataaggttgaagtggtcaccacccgaaaagcccaatgggatcattattgcttatgaagtgctatataaaaatatagatactttatatatgaagaacacatcaacaacagacataatattaaggaacttaagacctcacaccctctataacatttctgtaaggtcttacaccagatttggtcatggcaatcaggtatcttctttactctctgtaaggacttcggagactgtgcctgatagtgcaccagaaaatatcacttacaaaaatatttcttctggagagattgagctatcattccttcccccaagtagtcccaatggaatcatacaaaaatatacaatttatctcaagagaagtaatggaaatgaggaaagaactataaatacaacctctttaacccaaaacattctgaagaaatatacccaatatatcattgaggtgtctgctagtacactcaaaggtgaaggagttcggagtgctcccataagtatactgacggaggaagatgctcctgattctccccctcaagacttctctgtaaaacagttgtctggtgtcacggtgaagttgtcatggcaaccacccctggagccaaatggaattatcctttattacacagtttatgtctggaggaatagatcatcattaaaaactattaatgtcactgaaacatcattggagttatcagatttggattataatgttgaatacagtgcttatgtaacagctagcaccagatttggtgatgggaaaacaagaagcaatatcattagctttcaaacaccagagggaccaagcgatcctcccaaagatgtttattatgcaaacctcagttcttcatcaataattcttttctggacacctccttcaaaacctaatgggattatacaatattactctgtttattacagaaatacttcaggtacttttatgcagaattttacactccatgaagtaaccaatgactttgacaatatgactgtatccacaattatagataaactgacaatattcagctactatacattttggttaacagcaagtacttcagttggaaatgggaataaaagcagtgacatcattgaagtatacacagatcaagacgtccctgaagggtttgttggaaacctgacttacgaatccatttcgtcaactgcaataaatgtaagctgggtcccaccggctcaaccaaacggtctagtcttctactatgtttcactgatcttacagcagactcctcgccatgtgagaccacctcttgttacatatgagagaagcatatattttgataatctggaaaaatacactgattatatattaaaaattactccatcaacagaaaagggattctctgatacctatactgcccagctatacatcaagactgaagaagatgtcccagaaacttcaccaataatcaacacttttaaaaacctttcctctacctcagttctcttatcatgggatcccccagtaaagccaaatggtgcaataataagttatgatttaactttacaaggaccaaatgaaaattattctttcattacttctgataattacataatattggaagagctttcaccatttacattatatagcttttttgctgccgcaagaactagaaaaggacttggtccttccagtattcttttcttttacacagatgagtcagtgccgttagcacctccacaaaatttgactttaatcaactgtacttcagactttgtatggctgaaatggagcccaagtcctcttccaggtggtattgttaaagtatatagttttaaaattcatgaacatgaaactgacactatatattataagaatatatcaggatttaaaactgaagccaaacttgttggactggaaccagtcagcacctactctatccgtgtatctgcgttcaccaaagttggaaatggcaatcaatttagtaatgtagtaaaattcacaacccaagaatcagttccagatgtcgtgcagaatatgcagtgcatggcaactagctggcagtcagttttagtgaaatgggatccacccaaaaaggcaaatggaataataacgcagtatatggtaacagttgaaaggaattctacaaaagtttctccccaagatcacatgtacactttcataaagcttcttgccaatacctcatatgtctttaaagtaagagcttcaacctcagctggtgaaggtgatgaaagcacatgccatgtcagcacactacctgaaacagttcccagtgttcccacaaatattgctttttctgatgttcagtcaactagtgcaacattgacatggataagacctgacactatccttggctactttcaaaattacaaaattaccactcaacttcgtgctcaaaaatgcaaagaatgggaatccgaagaatgtgttgaatatcaaaaaattcaatacctctatgaagctcacttaactgaagagacagtatatggattaaagaaatttagatggtatagattccaagtggctgccagcaccaatgctggctatggcaatgcttcaaactggatttctacaaaaactctgcctggccctccagatggtcctcctgaaaatgttcatgtagtagcaacatcaccttttagcatcagcataagctggagtgaacctgctgtcattactggaccaacatgttatctgattgatgtcaaatcggtagataatgatgaatttaatatatccttcatcaagtcaaatgaagaaaataaaaccatagaaattaaagatttagaaatattcacaaggtattctgtagtgatcactgcatttactgggaacattagtgctgcatatgtagaagggaagtcaagtgctgaaatgattgttactactttagaatcagccccaaaggacccacctaacaacatgacatttcagaagataccagatgaagttacaaaatttcaattaacgtcccttcctccttctcaacctaatggaaatatccaagtatatcaagctctggtttaccgagaagatgatcctactgctgtccagattcacaacctcagtattatacagaaaaccaacacattcgtcattgcaatgctagaaggactaaaaggtggacatacatacaatatcagtgtttacgcagtcaatagtgctggtgcaggtccaaaggttccgatgagaataaccatggatatcaaagctccagcacgaccaaaaaccaaaccaacccctatttatgatgccacaggaaaactgcttgtgacttcaacaacaattacaatcagaatgccaatatgttactacagtgatgatcatggaccaataaaaaatgtacaagtgcttgtgacagaaacaggagctcagcatgatggaaatgtaacaaagtggtatgatgcatattttaataaagcaaggccatattttacaaatgaaggctttcctaaccctccatgtacagaaggaaagacaaagtttagtggcaatgaagaaatctacatcataggtgctgataatgcatgcatgattcctggcaatgaagacaaaatttgcaatggaccactgaaaccaaaaaagcaatacttatttaaatttagagctacaaatattatgggacaatttactgactctgattattctgaccctgttaagactttaggcgaaggactttcagaaagaaccctagagatcattctttccgtcactttgtgtatcctttcaataattctccttggaacagctatttttgcatttgcaagaattcgacagaagcagaaagaaggtggcacatactctcctcaggatgcagaaattattgacactaaattgaagctggatcagctcatcacagtggcagacctggaactgaaggacgagagattaacgcggttacttagttatagaaaatccatcaagccaataagcaagaaatccttcctgcaacatgttgaagagctttgcacaaacaacaacctaaagtttcaagaagaattttcggaattaccaaaatttcttcaggatctttcttcaactgatgctgatctgccttggaatagagcaaaaaaccgcttcccaaacataaaaccatataataataacagagtaaagctgatagctgacgctagtgttccaggttcggattatattaatgccagctatatttctggttatttatgtccaaatgaatttattgctactcaaggtccactaccaggaacagttggagatttttggagaatggtgtgggaaaccagagcaaaaacattagtaatgctaacacagtgttttgaaaaaggacggatcagatgccatcagtattggccagaggacaacaagccagttactgtctttggagatatagtgattacaaagctaatggaggatgttcaaatagattggactatcagggatctgaaaattgaaaggcatggggattgcatgactgttcgacagtgtaactttactgcctggccagagcatggggttcctgagaacagcgcccctctaattcactttgtgaagttggttcgagcaagcagggcacatgacaccacacctatgattgttcactgtagtgctggagttggaagaactggagtttttattgctctggaccatttaacacaacatataaatgaccatgattttgtggatatatatggactagtagctgaactgagaagtgaaagaatgtgcatggtgcagaatctggcacagtatatctttttacaccagtgcattctggatctcttatcaaataagggaagtaatcagcccatctgttttgttaactattcagcacttcagaagatggactctttggacgccatggaaggtgatgttgagcttgaatgggaagaaaccactatgtaa

SEQ ID NO: 178 - protein, 2300 aa, Homo sapiens
MDFLIIFLLLFIGTSETQVDVSNVVPGTRYDITISSISTTYTSPVTRIVTTNVTEPGPPVFLAGERVGSAGILLSWNTPPNPNGRIISYIVKYKEVCPWMQTVYTQVRSKPDSLEVLLTNLNPGTTYEIKVAAENSAGIGVFSDPFLFQTAESPAPGKVVNLTVEAYNASAVKLIWYLPRQPNGKITSFKISVKHARSGIVVKDVSIRVEDILTGKLPECNVENSESFLWSTASPSPTLGRVTPPSRTTHSSSTLTQNEISSVWKEPISFVVTHLRPYTTYLFEVSAATTEAGYIDSTIVRTPESVPEGPPQNCVTGNITGKSFSILWDPPTIVTGKFSYRVELYGPSGRILDNSTKDLKFAFTNLTPFTMYDVYIAAETSAGTGPKSNISVFTPPDVPGAVFDLQLAEVESTQVRITWKKPRQPNGIINQYRVKVLVPETGIILENTLLTGNNEINDPMAPEIVNIVEPMVGLYEGSAEMSSDLHSLATFIYNSHPDKNFPARNRAEDQTSPVVTTRNQYITDIAAEQLSYVIRRLVPFTEHMISVSAFTIMGEGPPTVLSVRTRQQVPSSIKIINYKNISSSSILLYWDPPEYPNGKITHYTIYAMELDTNRAFQITTIDNSFLITGIGLKKYTKYKMRVAASTHVGESSLSEENDIFVRTSEDEPESSPQDVEVIDVTADEIRLKWSPPEKPNGIIIAYEVLYKNIDTLYMKNTSTTDIILRNLRPHTLYNISVRSYTRFGHGNQVSSLLSVRTSETVPDSAPENITYKNISSGEIELSFLPPSSPNGIIQKYTIYLKRSNGNEERTINTTSLTQNILKKYTQYIIEVSASTLKGEGVRSAPISILTEEDAPDSPPQDFSVKQLSGVTVKLSWQPPLEPNGIILYYTVYVWRNRSSLKTINVTETSLELSDLDYNVEYSAYVTASTRFGDGKTRSNIISFQTPEGPSDPPKDVYYANLSSSSIILFWTPPSKPNGIIQYYSVYYRNTSGTFMQNFTLHEVTNDFDNMTVSTIIDKLTIFSYYTFWLTASTSVGNGNKSSDIIEVYTDQDVPEGFVGNLTYESISSTAINVSWVPPAQPNGLVFYYVSLILQQTPRHVRPPLVTYERSIYFDNLEKYTDYILKITPSTEKGFSDTYTAQLYIKTEEDVPETSPIINTFKNLSSTSVLLSWDPPVKPNGAIISYDLTLQGPNENYSFITSDNYIILEELSPFTLYSFFAAARTRKGLGPSSILFFYTDESVPLAPPQNLTLINCTSDFVWLKWSPSPLPGGIVKVYSFKIHEHETDTIYYKNISGFKTEAKLVGLEPVSTYSIRVSAFTKVGNGNQFSNVVKFTTQESVPDVVQNMQCMATSWQSVLVKWDPPKKANGIITQYMVTVERNSTKVSPQDHMYTFIKLLANTSYVFKVRASTSAGEGDESTCHVSTLPETVPSVPTNIAFSDVQSTSATLTWIRPDTILGYFQNYKITTQLRAQKCKEWESEECVEYQKIQYLYEAHLTEETVYGLKKFRWYRFQVAASTNAGYGNASNWISTKTLPGPPDGPPENVHVVATSPFSISISWSEPAVITGPTCYLIDVKSVDNDEFNISFIKSNEENKTIEIKDLEIFTRYSVVITAFTGNISAAYVEGKSSAEMIVTTLESAPKDPPNNMTFQKIPDEVTKFQLTSLPPSQPNGNIQVYQALVYREDDPTAVQIHNLSIIQKTNTFVIAMLEGLKGGHTYNISVYAVNSAGAGPKVPMRITMDIKAPARPKTKPTPIYDATGKLLVTSTTITIRMPICYYSDDHGPIKNVQVLVTETGAQHDGNVTKWYDAYFNKARPYFTNEGFPNPPCTEGKTKFSGNEEIYIIGADNACMIPGNEDKICNGPLKPKKQYLFKFRATNIMGQFTDSDYSDPVKTLGEGLSERTLEIILSVTLCILSIILLGTAIFAFARIRQKQKEGGTYSPQDAEIIDTKLKLDQLITVADLELKDERLTRLLSYRKSIKPISKKSFLQHVEELCTNNNLKFQEEFSELPKFLQDLSSTDADLPWNRAKNRFPNIKPYNNNRVKLIADASVPGSDYINASYISGYLCPNEFIATQGPLPGTVGDFWRMVWETRAKTLVMLTQCFEKGRIRCHQYWPEDNKPVTVFGDIVITKLMEDVQIDWTIRDLKIERHGDCMTVRQCNFTAWPEHGVPENSAPLIHFVKLVRASRAHDTTPMIVHCSAGVGRTGVFIALDHLTQHINDHDFVDIYGLVAELRSERMCMVQNLAQYIFLHQCILDLLSNKGSNQPICFVNYSALQKMDSLDAMEGDVELEWEETTM

SEQ ID NO: 179 - DNA, 964 bp, Homo sapiens
  CDS (67)..(654)
gaccatctgattgccggtctctcctggtgcccctgagctctgggaagaccctcgtccgtccccctcatgagcccggcacggggcgtgagctggtgggcatcactgggggctgcgacgtctcggccaggaggcacccctggcagggaggagttggaggcttgcgcgtttagagtgcaggtggggcagctgaggctctatgaggacgaccagcggacgaaggtggttgagatcgtccgtcacccccagtacaacgagagcctgtctgcccagggcggtgcggacatcgccctgctgaagctggaggccccggtgccgctgtctgagctcatccacccggtctcgctcccgtctgcctcccgggacgtgccctcggggaagacctgctgggtgaccggctggggtgtcattggacgtggaggtcaggagcaggaccacttgggtgggatgtggagagatgacccggaatgtcggtgcaggcctgggctccagacgcgtcctggatggcttcctgccgctgccgagacggatggccacaggccaggtggctcagagcagcaggaatgtactatctcacggctctgcaggcggaacgtccacactccaggcgtgggcaggaactactgccctggcccctcagcttgtgggaggcgacggtgaaggtcaggagcaacgtcctctgtaaccagacctgtcgccgccgcattccttccaaccacactgagcggtttgagcggctcatcaaggacgacatgctgtgtgccggggacgggaaccacggctcctggccaggcgacaacgggggccccctcctgtgcaggcggaattgcacctgggtccaggtggaggtggtgagctggggcaaactctgcggccttcgcggctatcccggcatgtacacccgcgtgacgagctacgtgtcctggatccgccagtacgtcccgccgttccccagacgctagctggg

SEQ ID NO: 180 - protein, 196 aa, Homo sapiens
MSPARGVSWWASLGAATSRPGGTPGREELEACAFRVQVGQLRLYEDDQRTKVVEIVRHPQYNESLSAQGGADIALLKLEAPVPLSELIHPVSLPSASRDVPSGKTCWVTGWGVIGRGGQEQDHLGGMWRDDPECRCRPGLQTRPGWLPAAAETDGHRPGGSEQQECTISRLCRRNVHTPGVGRNYCPGPSACGRRR

SEQ ID NO: 181 - DNA, 1171 bp, Homo sapiens
  CDS (187)..(804)
atgctgtggctactgctcctgaccctcccctgcctgatgggctctgtgcccaggaacccaggcgagtccgccccacccaatgcccctgctgcccaggaccccctccttgccctgccccgggctcagagtgccagccctggggtgggtggggaccatctgattgccggtctctcctggtgcccctgagctctgggaagaccctcgtccgtccccctcatgagcccggcacggggcgtgagctggtgggcatcactgggggctgcgacgtctcggccaggaggcacccctggcagggaggagttggaggcttgcgcgtttagagtgcaggtggggcagctgaggctctatgaggacgaccagcggacgaaggtggttgagatcgtccgtcacccccagtacaacgagagcctgtctgcccagggcggtgcggacatcgccctgctgaagctggaggccccggtgccgctgtctgagctcatccacccggtctcgctcccgtctgcctccctggacgtgccctcggggaagacctgctgggtgaccggctggggtgtcattggacgtggaggtcaggagcaggaccacttgggtgggatgtggagagatgacccggaatgtcggtgcaggcctgggctccagacgcgtcctggatggcttcctgccgctgccgagacggatggccacaggccaggtggctcagagcagcaggaatgtactatctcacggctctgcaggcggaacgtccacactccaggcgtgggcaggaactactgccctggcccctcagcttgtgggaggcgacggtgaaggtcaggagcaacgtcctctgtaaccagacctgtcgccgccgctttccttccaaccacactgagcggtttgagcggctcatcaaggacgacatgctgtgtgccggggacgggaaccacggctcctggccaggcgacaacgggggccccctcctgtgcaggcggaattgcacctgggtccaggtggaggtggtgagctggggcaaactctgcggccttcgcggctatcccggcatgtacacccgcgtgacgagctacgtgtcctggatccgccagtacgtcccgccgttccccagacgctagctggggtgcagtggggtctgcatgatccaggagggcccgtcttccttgtggacacgcctgct

SEQ ID NO: 182 - protein, 206 aa, Homo sapiens
ALGRPSSVPLMSPARGVSWWASLGAATSRPGGTPGREELEACAFRVQVGQLRLYEDDQRTKVVEIVRHPQYNESLSAQGGADIALLKLEAPVPLSELIHPVSLPSASLDVPSGKTCWVTGWGVIGRGGQEQDHLGGMWRDDPECRCRPGLQTRPGWLPAAAETDGHRPGGSEQQECTISRLCRRNVHTPGVGRNYCPGPSACGRRR

SEQ ID NO: 183 - DNA, 843 bp, Homo sapiens
  CDS (26)..(835)
gaggtggaggttgcagtaagccaagatggcgccactgcactctagcctgtttctgctgagcgggaccatgagcccaaaagtgggcatcactgggggctgcgacgtctcggccaggaggcacccctggcaggtcagcctgaggttctacagcatgaagaagggtctgtgggagcccatctgtgggggctccctcatccacccagagtgggtgctgaccgccgcccactgcgtcgagcttgaggagttggaggcttgcgcgtttagagtgcaggtggggcagctgaggctctatgaggacgaccagcggacgaaggtggttgagatcgtccgtcacccccagtacaacgagagcctgtctgcccagggcggtgcggacatcgccctgctgaagctggaggccccggtgccgctgtctgagctcatccacccggtctcgctcccgtctgcctccctggacgtgccctcggggaagacctgctgggtgaccggctggggtgtcatttggggacacgttttcctgctcccgccaccccacctcagggcagcggaaggtccaatcatgaggacccgagcttgcgagaggatgtatcacaaaggccccactgcccacgtcaccatcatcaaggctgccatgccgtgtgcaggggctgagcgccatctctccccacagggcgacaacgggggccccctcctgtgcaggcggaattgcacctgggtccaggtggaggtggtgagctggggcaaactctgcggccttcgctatcccggcatgtacacccgcgtgacgagctacgtgtcctggatccgccagtacgtcccgccgttccccagacgctagctggg

SEQ ID NO: 184 - protein, 270 aa, Homo sapiens
MAPLHSSLFLLSGTMSPKVGITGGCDVSARRHPWQVSLRFYSMKKGLWEPICGGSLIHPEWVLTAAHCVELEELEACAFRVQVGQLRLYEDDQRTKVVEIVRHPQYNESLSAQGGADIALLKLEAPVPLSELIHPVSLPSASLDVPSGKTCWVTGWGVIWGHVFLLPPPHLRAAEGPIMRTRACERMYHKGPTAHVTIIKAAMPCAGAERHLSPQGDNGGPLLCRRNCTWVQVEVVSWGKLCGLRYPGMYTRVTSYVSWIRQYVPPFPRR

SEQ ID NO: 185 - DNA, 964 bp, Homo sapiens
  CDS (67)..(654)
gaccatctgattgccggtctctcctggtgcccctgagctctgggaagaccctcgtccgtccccctcatgagcccggcacggggcgtgagctggtgggcatcactgggggctgcgacgtctcggccaggaggcacccctggcagggaggagttggaggcttgcgcgtttagagtgcaggtggggcagctgaggctctatgaggacgaccagcggacgaaggtggttgagatcgtccgtcacccccagtacaacgagagcctgtctgcccagggcggtgcggacatcgccctgctgaagctggaggccccggtgccgctgtctgagctcatccacccggcctcgctcccgtctgcctcccgggacgtgccctcggggaagacctgctgggtgaccggctggggtgtcattggacgtggaggtcaggagcaggaccacttgggtgggatgtggagagatgacccggaatgtcggtgcaggcctgggctccagacgcgtcctggatggcttcctgccgctgccgagacggatggccacaggccaggtggctcagagcagcaggaatgtactatctcacggctctgcaggcggaacgtccacactccaggcgtgggcaggaactactgccctggcccctcagcttgtgggaggcgacggtgaaggtcaggagcaacgtcctctgtaaccagacctgtcgccgccgcattccttccaaccacactgagcggtttgagcggctcatcaaggacgacatgctgtgtgccggggacgggaaccacggctcctggccaggcgacaacgggggccccctcctgtgcaggcggaattgcacctgggtccaggtggaggtggtgagctggggcaaactctgcggccttcgcggctatcccggcatgtacacccgcgtgacgagctacgtgtcctggatccgccagtacgtcccgccgttccccagacgctagctggg

SEQ ID NO: 186 - protein, 196 aa, Homo sapiens
MSPARGVSWWASLGAATSRPGGTPGREELEACAFRVQVGQLRLYEDDQRTKVVEIVRHPQYNESLSAQGGADIALLKLEAPVPLSELIHPASLPSASRDVPSGKTCWVTGWGVIGRGGQEQDHLGGMWRDDPECRCRPGLQTRPGWLPAAAETDGHRPGGSEQQECTISRLCRRNVHTPGVGRNYCPGPSACGRRR

SEQ ID NO: 187 - DNA, 964 bp, Homo sapiens
  CDS (67)..(654)
gaccatctgattgccggtctctcctggtgcccctgagctctgggaagaccctcgtccgtccccctcatgagcccggcacggggcgtgagctggtgggcatcactgggggctgcgacgtctcggccaggaggcacccctggcagggaggagttggaggcttgcgcgtttagagtgcaggtggggcagctgaggctctatgaggacgaccagcggacgaaggtggttgagatcgtccgtcacccccagtacaacgagagcctgtctgcccagggcggtgcggacatcgccctgctgaagctggaggccccggtgccgctgtctgagctcatccacccggtctcgctcccgtctgcctccctggacgtgccctcggggaagacctgctgggtgaccggctggggtgtcattggacgtggaggtcaggagcaggaccacttgggtgggatgtggagagatgacccggaatgtcggtgcaggcctgggctccagacgcgtcctggatggcttcctgccgctgccgagacggatggccacaggccaggtggctcagagcagcaggaatgtactatctcacggctctgcaggcggaacgtccacactccaggcgtgggcaggaactactgccctggcccctcagcttgtgggaggcgacggtgaaggtcaggagcaacgtcctctgtaaccagacctgtcgccgccgcattccttccaaccacactgagcggtttgagcggctcatcaaggacgacatgctgtgtgccggggacgggaaccacggctcctggccaggcgacaacgggggccccctcctgtgcaggcggaattgcacctgggtccaggtggaggtggtgagctggggcaaactctgcggccttcgcggctatcccggcatgtacacccgcgtgacgagctacgtgtcctggatccgccagtacgtcccgccgttccccagacgctagctggg

SEQ ID NO: 188 - protein, 196 aa, Homo sapiens
MSPARGVSWWASLGAATSRPGGTPGREELEACAFRVQVGQLRLYEDDQRTKVVEIVRHPQYNESLSAQGGADIALLKLEAPVPLSELIHPVSLPSASLDVPSGKTCWVTGWGVIGRGGQEQDHLGGMWRDDPECRCRPGLQTRPGWLPAAAETDGHRPGGSEQQECTISRLCRRNVHTPGVGRNYCPGPSACGRRR

SEQ ID NO: 189 - DNA, 964 bp, Homo sapiens
  CDS (67)..(654)
gaccatctgattgccggtctctcctggtgcccctgagctctgggaagaccctcgtccgtccccctcatgagcccggcacggggcgtgagctggtgggcatcactgggggctgcgacgtctcggccaggaggcacccctggcagggaggagttggaggcttgcgcgtttagagtgcaggtggggcagctgaggctctatgaggacgaccagcggacgaaggtggttgagatcgtccgtcacccccagtacaacgagagcctgtctgcccagggcggtgcggacatcgccctgctgaagctggaggccccggtgccgctgtctgagctcatccacccggtctcgctcccgtctgcctcccgggacgtgccctcggggaagacctgctgggtgaccggctggggtgtcattggacgtggaggtcaggagcaggaccacttgggtgggatgtggagagatgacccggaatgtcggtgcaggcctgggctccagacgcgtcctggatggcttcctgccgctgccgagacggatggccacaggccaggtggctcagagcagcaggaatgtactatctcacggctctgcaggcggaacgtccacactccaggcgtgggcaggaactactgccctggcccctcagcttatgggaggcgacggtgaaggtcaggagcaacgtcctctgtaaccagacctgtcgccgccgcattccttccaaccacactgagcggtttgagcggctcatcaaggacgacatgctgtgtgccggggacgggaaccacggctcctggccaggcgacaacgggggccccctcctgtgcaggcggaattgcacctgggtccaggtggaggtggtgagctggggcaaactctgcggccttcgcggctatcccggcatgtacacccgcgtgacgagctacgtgtcctggatccgccagtacgtcccgccgttccccagacgctagctggg

SEQ ID NO: 190 - protein, 196 aa, Homo sapiens
MSPARGVSWWASLGAATSRPGGTPGREELEACAFRVQVGQLRLYEDDQRTKVVEIVRHPQYNESLSAQGGADIALLKLEAPVPLSELIHPVSLPSASRDVPSGKTCWVTGWGVIGRGGQEQDHLGGMWRDDPECRCRPGLQTRPGWLPAAAETDGHRPGGSEQQECTISRLCRRNVHTPGVGRNYCPGPSAYGRRR

SEQ ID NO: 191 - DNA, 964 bp, Homo sapiens
  CDS (67)..(654)
gaccatctgattgccggtctctcctggtgcccctgagctctgggaagaccctcgtccgtccccctcatgagcccggcacggggcgtgagctggtgggcatcactgggggctgcgacgtctcggccaggaggcacccctggcagggaggagttggaggcttgcgcgtttagagtgcaggtggggcagctgaggctctatgaggacgaccagcggacgaaggtggttgagatcgtccgtcacccccagtacaacgagagcctgtctgcccagggcggtgcggacatcgccctgctgaagctggaggccccggtgccgctgtctgagctcatccacccggtctcgctcccgtctgcctcccgggacgtgccctcggggaagacctgctgggtgaccggctggggtgtcattggacgtggaggtcaggagcaggaccacttgggtgggatgtggagagatgacccggaatgtcggtgcaggcctgggctccagacgcgtcctggatggcttcctgccgctgccgagacggatggccacaggccaggtggctcagagcagcaggaatgtactatctcacggctctgcaggcggaacgtccacactccaggcgtgggcaggaactactgccctggcccctcagcttgtgggaggcgacggtgaaggtcaggagcaacgtcctctgtaaccagacctgtcgccgccgcattccttccaaccacactgagcggtttgagcggctcatcaaggacgacatgctgtgtgccggggacgggaaccacggctcctggccaggcgacaacgggggccccctcctgtgcaggcggaattgcacctgggtccaggtggaggtggtgagctggggcaaactctacggccttcgcggctatcccggcatgtacacccgcgtgacgagctacgtgtcctggatccgccagtacgtcccgccgttccccagacgctagctggg

SEQ ID NO: 192 - protein, 196 aa, Homo sapiens; identical to SEQ ID NO: 180

SEQ ID NO: 193 - DNA, 964 bp, Homo sapiens
  CDS (67)..(654)
gaccatctgattgccggtctctcctggtgcccctgagctctgggaagaccctcgtccgtccccctcatgagcccggcacggggcgtgagctggtgggcatcactgggggctgcgacgtctcggccaggaggcacccctggcagggaggagttggaggcttgcgcgtttagagtgcaggtggggcagctgaggctctatgaggacgaccagcggacgaaggtggttgagatcgtccgtcacccccagtacaacgagagcctgtctgcccagggcggtgcggacatcgccctgctgaagctggaggccccggtgccgctgtctgagctcatccacccggtctcgctcccgtctgcctcccgggacgtgccctcggggaagacctgctgggtgaccggctggggtgtcattggacgtggaggtcaggagcaggaccacttgggtgggatgtggagagatgacccggaatgtcggtgcaggcctgggctccagacgcgtcctggatggcttcctgccgctgccgagacggatggccacaggccaggtggctcagagcagcaggaatgtactatctcacggctctgcaggcggaacgtccacactccaggcgtgggcaggaactactgccctggcccctcagcttgtgggaggcgacggtgaaggtcaggagcaacgtcctctgtaaccagacctgtcgccgccgcattccttccaaccacactgagcggtttgagcggctcatcaaggacgacatgctgtgtgccggggacgggaaccacggctcctggccaggcgacaacgggggccccctcctgtgcaggcggaattgcacctgggtccaggtggaggtggtgagctggggcaaactctgcggccttcgcggctatcccggcatgtacacccgcgtgatgagctacgtgtcctggatccgccagtacgtcccgccgttccccagacgctagctggg

SEQ ID NO: 194 - protein, 196 aa, Homo sapiens; identical to SEQ ID NO: 180

SEQ ID NO: 195 - DNA, 2804 bp, Homo sapiens
  CDS (71)..(2635)
tggccagccaggcctgaagcgatcggtcagccgagagcgctacgtggagaccctggtggtggctgacaagatgatggtggcctatcacgggcgccgggatgtggagcagtatgtcctggccatcatgaacattcaggttgccaaacttttccaggactcgagtctgggaagcaccgttaacatcctcgtaactcgcctcatcctgctcacggaggaccagcccactctggagatcacccaccatgccgggaagtccctggacagcttctgtaagtggcagaaatccatcgtgaaccacagcggccatggcaatgccattccagagaacggtgtggctaaccatgacacagcagtgctcatcacacgctatgacatctgcatctacaagaacaaaccctgcggcacactaggcctggccccggtgggcggaatgtgtgagcgcgagagaagctgcagcgtcaatgaggacattggcctggccacagcgttcaccattgcccacgagatcgggcacacattcggcatgaaccatgacggcgtgggaaacagctgtggggcccgtggtcaggacccagccaagctcatggctgcccacattaccatgaagaccaacccattcgtgtggtcatcctgcagccgtgactacatcaccagctttctagactcgggcctggggctctgcctgaacaaccggccccccagacaggactttgtgtacccgacagtggcaccgggccaagcctacgatgcagatgagcaatgccgctttcagcatggagtcaaatcgcgtcagtgtaaatacggggaggtctgcagcgagctgtggtgtctgagcaagagcaaccggtgcatcaccaacagcatcccggccgccgagggcacgctgtgccagacgcacaccatcgacaaggggtggtgctacaaacgggtctgtgtcccctttgggtcgcgcccagagggtgtggacggagcctgggggccgtggactccatggggcgactgcagccggacctgtggcggcggcgtgtcctcttctagccgtcactgcgacagccccaggccaaccatcgggggcaagtactgtctgagtgagagaaggcggcaccgctcctgcaacacggatgactgtccccctggctcccaggacttcagagaagtgcagtgttctgaatttgacagcatccctttccgtgggaaattctacaagtggaaaacgtaccggggagggggcgtgaaggcctgctcgctcacgagcctagcggaaggcttcaacttctacacggagagggcggcagccgtggtggacgggacaccctgccgtccagacacggtggacatttgcgtcagtggcgaatgcaagcacgtgggctgcgaccgagtcctgggctccgacctgcgggaggacaagtgccgagtgtgtggcggtgacggcagtgcctgcgagaccatcgagggcgtcttcagcccagcctcacctggggccgggtacgaggatgtcgtctggattcccaaaggctccgtccacatcttcatccaggatctgaacctctctctcagtcacttggccctgaagggagaccaggagtccctgctgctggaggggctgcctgggaccccccagccccaccgtctgcctctagctgggaccacctttcaactgcgacaggggccagaccaggtccagagcctcgaagccctgggaccgattaatgcatctctcatcgtcatggtgctggcccggaccgagctgcctgccctccgctaccgcttcaatgcccccatcgcccgtgactcgctgcccccctactcctggcactatgcgccctggaccaagtgctcggcccagtgtgcaggcggtagccaggtgcaggcggtggagtgccgcaaccagctggacagctccgcggtcgccccccactactgcagtgcccacagcaagctgcccaaaaggcagcgcgcctgcaacacggagccttgccctccagactgggttgtagggaactggtcgctctgcagccgcagctgcgatgcaggcgtgcgcagtcgctcggtcgtgtgccagcgccgcgtctctgccgcggaggagaaggcgctggacgacagcgcatgcccgcagccgcgcccacctgtactggaggcctgccacggccccacttgccctccggagtgggcggccctcgactggtctgagtgcacccccagctgcgggccgggcctccgccaccgcgtggtcctttgcaagagcgcagaccaccgcgccacgctgcccccggcgcactgctcacccgccgccaagccaccggccaccatgcgctgcaacttgcgccgctgccccccggcccgctgggtggctggcgagtggggtgagtgctctgcacagtgcggcgtcgggcagcggcagcgctcggtgcgctgcaccagccacacgggccaggcgtcgcacgagtgcacggaggccctgcggccgcccaccacgcagcagtgtgaggccaagtgcgacagcccaacccccggggacggccctgaagagtgcaaggatgtgaacaaggtcgcctactgccccctggtgctcaaatttcagttctgcagccgagcctacttccgccagatgtgctgcaaaacctgccagggccactagggggcgcgcggcacccggagccacagctggcggggtctccgccgccagccctgcagcgggccggccaaagggggccccgggggggcgggaactgggagggaagggtgagacggagccggaagttatttattgggaacccctgcagggccctggctggggggatgga

SEQ ID NO: 196 - protein, 855 aa, Homo sapiens
MMVAYHGRRDVEQYVLAIMNIQVAKLFQDSSLGSTVNILVTRLILLTEDQPTLEITHHAGKSLDSFCKWQKSIVNHSGHGNAIPENGVANHDTAVLITRYDICIYKNKPCGTLGLAPVGGMCERERSCSVNEDIGLATAFTIAHEIGHTFGMNHDGVGNSCGARGQDPAKLMAAHITMKTNPFVWSSCSRDYITSFLDSGLGLCLNNRPPRQDFVYPTVAPGQAYDADEQCRFQHGVKSRQCKYGEVCSELWCLSKSNRCITNSIPAAEGTLCQTHTIDKGWCYKRVCVPFGSRPEGVDGAWGPWTPWGDCSRTCGGGVSSSSRHCDSPRPTIGGKYCLSERRRHRSCNTDDCPPGSQDFREVQCSEFDSIPFRGKFYKWKTYRGGGVKACSLTSLAEGFNFYTERAAAVVDGTPCRPDTVDICVSGECKHVGCDRVLGSDLREDKCRVCGGDGSACETIEGVFSPASPGAGYEDVVWIPKGSVHIFIQDLNLSLSHLALKGDQESLLLEGLPGTPQPHRLPLAGTTFQLRQGPDQVQSLEALGPINASLIVMVLARTELPALRYRFNAPIARDSLPPYSWHYAPWTKCSAQCAGGSQVQAVECRNQLDSSAVAPHYCSAHSKLPKRQRACNTEPCPPDWVVGNWSLCSRSCDAGVRSRSVVCQRRVSAAEEKALDDSACPQPRPPVLEACHGPTCPPEWAALDWSECTPSCGPGLRHRVVLCKSADHRATLPPAHCSPAAKPPATMRCNLRRCPPARWVAGEWGECSAQCGVGQRQRSVRCTSHTGQASHECTEALRPPTTQQCEAKCDSPTPGDGPEECKDVNKVAYCPLVLKFQFCSRAYFRQMCCKTCQGH

SEQ ID NO: 197 - DNA, 2266 bp, Homo sapiens
  CDS (589)..(2157)
ctcgggcctggggctctgcctgaacaaccggccccccagacaggactttgtgtacccgacagtggcaccgggccaagcctacgatgcagatgagcaatgccgctttcagcatggagtcaaatcgcgtcagttggtgctacaaacgggtctgtgtcccctttgggtcgcgcccagagggtgtggacggagcctgggggccgtggactccatggggcgactgcagccggacctgtggcggcggcgtgtcctcttctagccgtcactgcgacagccccaggccaaccatcgggggcaagtactgtctgggtgagagaaggcggcaccgctcctgcaacacggatgactgtccccctggctcccaggacttcagagaagtgcagtgttctgaatttgacagcatccctttccgtgggaaattctacaagtggaaaacgtaccggggaaggtgagtgtgggactccaaaggctgtggggccgtgaagggcagccgtgggagtgtccagcagcaggtggatgaatgcagcatcccggggtctgccatgagccctgtccccacccggggagacagagtacctgggatacggtaccatgggggttcaacgtgacgctgggagcccccactccctctgcccaagctgcccttcctcttgggtctggggtctgtccctcttggcctcactcccccagggagcaagcaaagagttccggggtggcctggcccgtggtgtgacggggccgtgccccccagggggcgtgaaggcctgctcgctcacgtgcctagcggaaggcttcaacttctacacggagagggcggcagccgtggtggacgggacaccctgccgtccagacacggtggacatttgcgtcagtggcgaatgcaagcacgtgggctgcgaccgagtcctgggctccgacctgcgggaggacaagtgccgagtgtgtggcggtgacggcagtgcctgcgagaccatcgagggcgtcttcagcccagcctcacctggggccgggtacgaggatgtcgtctggattcccaaaggctccgtccacatcttcatccaggatctgaacctctctctcagtcacttggccctgaagggagaccaggagtccctgctgctggaggggctgcctgggaccccccagccccaccgtctgcctctagctgggaccacctttcaactgcgacaggggccagaccaggtccagagcctcgaagccctgggaccgattaatgcatctctcatcgtcatggtgctggcccggaccgagctgcctgccctccgctaccgcttcaatgcccccatcgcccgtgactcgctgcccccctactcctggcactatgcgccctggaccaagtgctcggcccagtgtgcaggcggtagccaggtgcaggcggtggagtgccgcaaccagctggacagctccgcggtcgccccccactactgcagtgcccacagcaagctgcccaaaaggcagcgcgcctgcaacacggagccttgccctccagactgggttgtagggaactggtcgctctgcagccgcagctgcgatgcaggcgtgcgcagccgctcggtcgtgtgccagcgccgcgtctctgccgcggaggagaaggcgctggacgacagcgcatgcccgcagccgcgcccacctgtactggaggcctgccacggccccacttgccctccggagtgggcggccctcgactggtctgagtgcacccccagctgcgggccgggcctccgccaccgcgtggtcctttgcaagagcgcagaccaccgcgccacgctgcccccggcgcactgctcacccgccgccaagccaccggccaccatgcgctgcaacttgcgccgctgccccccggcccgctgggtggctggcgagtggggtgagtgctctgcacagtgcggcgtcgggcagcggcagcgctcggtgcgctgcaccagccacacgggccaggcgtcgcacgagtgcacggaggccctgcggccgcccaccacgcagcagtgtgaggccaagtgcgacagcccaacccccggggacggccctgaagagtgcaaggatgtgaacaaggtcgcctactgccccctggtgctcaaatttcagttctgcagccgagcctacttccgccagatgtgctgcaaaacctgccagggccactagggggcgcgcggcacccggagccacagctggcggggtctccgccgccagccctgcagctgggccggccagagggggccccgggggggcgggaactgggagggaaggg

SEQ ID NO: 198 - protein, 523 aa, Homo sapiens
MGVQRDAGSPHSLCPSCPSSWVWGLSLLASLPQGASKEFRGGLARGVTGPCPPGGVKACSLTCLAEGFNFYTERAAAVVDGTPCRPDTVDICVSGECKHVGCDRVLGSDLREDKCRVCGGDGSACETIEGVFSPASPGAGYEDVVWIPKGSVHIFIQDLNLSLSHLALKGDQESLLLEGLPGTPQPHRLPLAGTTFQLRQGPDQVQSLEALGPINASLIVMVLARTELPALRYRFNAPIARDSLPPYSWHYAPWTKCSAQCAGGSQVQAVECRNQLDSSAVAPHYCSAHSKLPKRQRACNTEPCPPDWVVGNWSLCSRSCDAGVRSRSVVCQRRVSAAEEKALDDSACPQPRPPVLEACHGPTCPPEWAALDWSECTPSCGPGLRHRVVLCKSADHRATLPPAHCSPAAKPPATMRCNLRRCPPARWVAGEWGECSAQCGVGQRQRSVRCTSHTGQASHECTEALRPPTTQQCEAKCDSPTPGDGPEECKDVNKVAYCPLVLKFQFCSRAYFRQMCCKTCQGH

SEQ ID NO: 199 - DNA, 706 bp, Homo sapiens
  CDS (2)..(706)
caccggatcctggcactatgcgccctggaccaagtgctcggcccagtgtgcaggcggtagccaggtgcaggcggtggagtgccgcaaccagctggacagctccgcggtcgccccccactactgcagtgcccacagcaagctgcccaaaaggcagcgcgcctgcaacacggagccttgccctccagactgggttgtagggaactggtcgctctgcagccgcagctgcgatgcaggcgtgcgcagccgctcggtcgtgtgccagcgccgcgtctctgccgcggaggagaaggcgctggacgacagcgcatgcccgcagccgcgcccacctgtactggaggcctgccacggccccacttgccctccggagtgggcggccctcgactggtctgagtgcacccccagctgcgggccgggcctccgccaccgcgtggtcctttgcaagagcgcagaccaccgcgccacgctgcccccggcgcactgctcacccgccgccaagccaccggccaccatgcgctgcaacttgcgccgctgccccccggcccgctgggtggctggcgagtggggtgagtgctctgcacagtgcggcgtcgggcagcggcagcgctcggtgcgctgcaccagccacacgggccaggcgtcgcacgagtgcacggaggccctgcggccgcccaccacgcagcagtgtgaggccaagtgcctcgagggc

SEQ ID NO: 200 - protein, 235 aa, Homo sapiens
TGSWHYAPWTKCSAQCAGGSQVQAVECRNQLDSSAVAPHYCSAHSKLPKRQRACNTEPCPPDWVVGNWSLCSRSCDAGVRSRSVVCQRRVSAAEEKALDDSACPQPRPPVLEACHGPTCPPEWAALDWSECTPSCGPGLRHRVVLCKSADHRATLPPAHCSPAAKPPATMRCNLRRCPPARWVAGEWGECSAQCGVGQRQRSVRCTSHTGQASHECTEALRPPTTQQCEAKCLEG

SEQ ID NO: 201 - DNA, 3199 bp, Homo sapiens
  CDS (1297)..(3198)
taaagggttcagcctggtgcctggtccagagatagtggtggtcattgttaccccataatggcattggtgcaagtcctttcttatctatcctgtcacgtgcctcatagccatttatataggcaagacaggcattaggctgcccatcttgtagatgagtaaactgaggcccagagaggggaaatatattgcaagttggtagcagaattgaggtctctgcacaactcaaatatgccacagtgcctccttgtggagaggaggacaaaagcagagctgaaatcattatcttgaagaggtgtcagaagtgggattgcgacaggactgatgtgatatttttagatatggccaagaggacacagtctgagtttttagctgagaaatgtcctctataaggcagaaggcagagattctagaggacctttgagggagaatgtatttgagaacaactcttccagcttcttacatatgtacaggtatctctcaggggctgacctaggaagggtcctttcctgtggccattgatcgatccagtcccacatctggaaagcttacaagaattgggttcaaagcggggattacacttgataattacagaaggaccacctacttcttagaggaaagacgctgggaggttgcttaggatgtgggccaagagggtcagagaggaccacctactttttagaggaaagacgctgggaggttgcttaggatgtgggccaagagggtcagagattttgcttcacctgaactcactggggcttctccagggatattaacctggactttaagagtcagagtgagtccctgggactagttcagcccatccaggattcagacgggaagaaggtggggctgatttttcacctggagaaagagaggcatgtcccacacagacctaactcggcattgtcccctcccaaactcccacccctccacatagcttaaaagtgttgggggcttctccagtttagatgggggaacaaagagaaccaacagctggaaaaaactagagatgaggccgttggcctagtcatcatccaggccgatttctcagaaccaccactttctcttcggctactttgcccatcccataaaagaaccccaaatccttcctgttcattcctcagcagttcccacgtttccttccagaaactcagaaggcaccaggaactgaattgcaaagttcgttagagcacagactctgaattaaagagctgggttaaactccaggctattcccttagtagctgtgtgaccttacctgtctgaagcttggttttctcccagtaagatggggtagtactgcctaaagaggtatatggcatgtataaagtgctccataaatggagcttattgggagagtataagtcacaggccatgccccgcaaggggatgcacgaagacccaccgcgagccaggaagggagcaccgggctctctgctctgggaccggcagtgagccggacatctgggtcctcccaagccgggcgggctgccccagggaggaagggaggggggcgagcctgagcgggcacctcggcccgcaggaggtctgcagcgagctgtggtgtctgagcaagagcaaccggtgcatcaccaacagcatcccggccgccgagggcacgctgtgccagacgcacaccatcgacaaggggtggtgctacaaacgggtctgtgtcccctttgggtcgcgcccagagggtgtggacggagcctgggggccgtggactccatggggcgactgcagccggacctgtggcggcggcgtgtcctcttctagccgtcactgcgacagccccaggccaaccatcgggggcaagtactgtctgggtgagagaaggcggcaccgctcctgcaacacggatgactgtccccctggctcccaggacttcagagaagtgcagtgttctgaatttgacagcatccctttccgtgggaaattctacaagtggaaaacgtaccggggagggggcgtgaaggcctgctcgctcacgtgcctagcggaaggcttcaacttctacacggagagggcggcagccgtggtggacgggacaccctgccgtccagacacggtggacatttgcgtcagtggcgaatgcaagcacgtgggctgcgaccgagtcctgggctccgacctgcgggaggacaagtgccgagtgtgtggcggtgacggcagtgcctgcgagaccatcgagggcgtcttcagcccagcctcacctggggccgggtacgaggatgtcgtctggattcccaaaggctccgtccacatcttcatccaggatctgaacctctctctcagtcacttggccctgaagggagaccaggagtccctgctgctggaggggctgcccgggaccccccagccccaccgtctgcctctagctgggaccacctttcaactgcgacaggggccagaccaggtccagagcctcgaagccctgggaccgattaatgcatctctcatcgtcatggtgctggcccggaccgagctgcctgccctccgctaccgcttcaatgcccccatcgcccgtgactcgctgcccccctactcctggcactatgcgccctggaccaagtgctcggcccagtgtgcaggcggtagccaggtgcaggcggtggagtgccgcaaccagctggacagctccgcggtcgccccccactactgcagtgcccacagcaagctgcccaaaaggcagcgcgcctgcaacacggagccttgccctccagactgggttgtagggaactggtcgctctgcagccgcagctgcgatgcaggcgtgcgcagccgctcggtcgtgtgccagcgccgcgtctctgccgcggaggagaaggcgctggacgacagcgcatgcccgcagccgcgcccacctgtactggaggcctgccacggccccacttgccctccggagtgggcggccctcgactggtctgagtgcacccccagctgcgggccgggcctccgccaccgcgtggtcctttgcaagagcgcagaccaccgcgccacgctgcccccggcgcactgctcacccgccgccaagccaccggccaccatgcgctgcaacttgcgccgctgccccccggcccgctgggtggctggcgagtggggtgagtgctctgcacagtgcggcgtcgggcagcggcagcgctcggtgcgctgcaccagccacacgggccaggcgtcgcacgagtgcacggaggccctgc

SEQ ID NO: 202 - protein, 634 aa, Homo sapiens
YCLKRYMACIKCSINGAYWESISHRPCPARGCTKTHREPGREHRALCSGTGSEPDIWVLPSRAGCPREEGRGASLSGHLGPQEVCSELWCLSKSNRCITNSIPAAEGTLCQTHTIDKGWCYKRVCVPFGSRPEGVDGAWGPWTPWGDCSRTCGGGVSSSSRHCDSPRPTIGGKYCLGERRRHRSCNTDDCPPGSQDFREVQCSEFDSIPFRGKFYKWKTYRGGGVKACSLTCLAEGFNFYTERAAAVVDGTPCRPDTVDICVSGECKHVGCDRVLGSDLREDKCRVCGGDGSACETIEGVFSPASPGAGYEDVVWIPKGSVHIFIQDLNLSLSHLALKGDQESLLLEGLPGTPQPHRLPLAGTTFQLRQGPDQVQSLEALGPINASLIVMVLARTELPALRYRFNAPIARDSLPPYSWHYAPWTKCSAQCAGGSQVQAVECRNQLDSSAVAPHYCSAHSKLPKRQRACNTEPCPPDWVVGNWSLCSRSCDAGVRSRSVVCQRRVSAAEEKALDDSACPQPRPPVLEACHGPTCPPEWAALDWSECTPSCGPGLRHRVVLCKSADHRATLPPAHCSPAAKPPATMRCNLRRCPPARWVAGEWGECSAQCGVGQRQRSVRCTSHTGQASHECTEAL

SEQ ID NO: 203 - DNA, 3700 bp, Homo sapiens
  CDS (1798)..(3699)
ctgacattccacccttgacaccccccaacatcctaacttagctggtaactgcagcaccctctaaggaattcctaaagaattctgaagctactcctcaacatctgctgtgacccaggtatcctaacaatgatcatggtgtctgacatttactgagctctcactatgggctaagcatgtgctgtgtgtcaccatctaaactcctgacaatcctgctagcccccacgttacagaggaagggactgagccatagcatagggaggatgacttgtccaaggccacagtttgagaccatgacagagctgggatttaaatccaggtctctcatgactctctaaattttacaaaggggcaggggaggggaggagctgtcaaaatatcaagcttgggctggcactggctatatgttgaattgagccttccttttagtttttgaaggaacatctttcaggccatcttggcaaagggggatttatttactaaatgtgaactggttaatatatgtaaagggttcagcctggtgcctggtccagagatagtggtggtcattgttaccccataatggcattggtgcaagtcctttcttatctatcctgtcacgtgcctcatagccatttatataggcaagacaggcattaggctgcccatcttgtagatgagtaaactgaggcccagagaggggaaatatattgcaagttggtagcagaattgaggtctctgcacaactcaaatatgccacagtgcctccttgtggagaggaggacaaaagcagagctgaaatcattatcttgaagaggtgtcagaagtgggattgcgacaggactgatgtgatatttttagatatggccaagaggacacagtctgagtttttagctgagaaatgtcctctataaggcagaaggcagagattctagaggacctttgagggagaatgtatttgagaacaactcttccagcttcttacatatgtacaggtatctctcaggggctgacctaggaagggtcctttcctgtggccattgatcgatccagtcccacatctggaaagcttacaagaattgggttcaaagcggggattacacttgataattacagaaggaccacctacttcttagaggaaagacgctgggaggttgcttaggatgtgggccaagagggtcagagaggaccacctactttttagaggaaagacgctgggaggttgcttaggatgtgggccaagagggtcagagattttgcttcacctgaactcactggggcttctccagggatattaacctggactttaagagtcagagtgagtccctgggactagttcagcccatccaggattcagacgggaagaaggtggggctgatttttcacctggagaaagagaggcatgtcccacacagacctaactcggcattgtcccctcccaaactcccacccctccacatagcttaaaagtgttgggggcttctccagtttagatgggggaacaaagagaaccaacagctggaaaaaactagagatgaggccgttggcctagtcatcatccaggccgatttctcagaaccaccactttctcttcggctactttgcccatcccataaaagaaccccaaatccttcctgttcattcctcagcagttcccacgtttccttccagaaactcagaaggcaccaggaactgaattgcaaagttcgttagagcacagactctgaattaaagagctgggttaaactccaggctattcccttagtagctgtgtgaccttacctgtctgaagcttggttttctcccagtaagatggggtagtactgcctaaagaggtatatggcatgtataaagtgctccataaatggagcttattgggagagtataagtcacaggccatgccccgcaaggggatgcacgaagacccaccgcgagccaggaagggagcacggggctctctgctctgggaccggcagtgagccggacatctgggtcctcccaagccgggcgggctgccccagggaggaagggaggggggcgagcctgagcgggcacctcggcccgcaggaggtctgcagcgagctgtggtgtctgagcaagagcaaccggtgcatcaccaacagcatcccggccgccgagggcacgctgtgccagacgcacaccatcgacaaggggtggtgctacaaacgggtctgtgtcccctttgggtcgcgcccagagggtgtggacggagcctgggggccgtggactccatggggcgactgcagccggacctgtggcggcggcgtgtcctcttctagccgtcactgcgacagccccaggccaaccatcgggggcaagtactgtctgggtgagagaaggcggcaccgctcctgcaacacggatgactgtccccctggctcccaggacttcagagaagtgcagtgttctgaatttgacagcatccctttccgtgggaaattctacaagtggaaaacgtaccggggagggggcgtgaaggcctgctcgctcacgtgcctagcggaaggcttcaacttctacacggagagggcggcagccgtggtggacgggacaccctgccgtccagacacggtggacatttgcgtcagtggcgaatgcaagcacgtgggctgcgaccgagtcctgggctccgacctgcgggaggacaagtgccgagtgtgtggcggtgacggcagtgcctgcgagaccatcgagggcgtcttcagcccagcctcacctggggccgggtacgaggatgtcgtctggattcccaaaggctccgtccacatcttcatccaggatctgaacctctctctcagtcacttggccctgaagggagaccaggagtccctgctgctggaggggctgcccgggaccccccagccccaccgtctgcctctagctgggaccacctttcaactgcgacaggggccagaccaggtccagagcctcgaagccctgggaccgattaatgcatctctcatcgtcatggtgctggcccggaccgagctgcctgccctccgctaccgcttcaatgcccccatcgcccgtgactcgctgcccccctactcctggcactatgcgccctggaccaagtgctcggcccagtgtgcaggcggtagccaggtgcaggcggtggagtgccgcaaccagctggacagctccgcggtcgccccccactactgcagtgcccacagcaagctgcccaaaaggcagcgcgcctgcaacacggagccttgccctccagactgggttgtagggaactggtcgctctgcagccgcagctgcgatgcaggcgtgcgcagccgctcggtcgtgtgccagcgccgcgtctctgccgcggaggagaaggcgctggacgacagcgcatgcccgcagccgcgcccacctgtactggaggcctgccacggccccacttgccctccggagtgggcggccctcgactggtctgagtgcacccccagctgcgggccgggcctccgccaccgcgtggtcctttgcaagagcgcagaccaccgcgccacgctgcccccggcgcactgctcacccgccgccaagccaccggccaccatgcgctgcaacttgcgccgctgccccccggcccgctgggtggctggcgagtggggtgagtgctctgcacagtgcggcgtcgggcagcggcagcgctcggtgcgctgcaccagccacacgggccaggcgtcgcacgagtgcacggaggccctgc

SEQ ID NO: 204 - protein, 634 aa, Homo sapiens
YCLKRYMACIKCSINGAYWESISHRPCPARGCTKTHREPGREHGALCSGTGSEPDIWVLPSRAGCPREEGRGASLSGHLGPQEVCSELWCLSKSNRCITNSIPAAEGTLCQTHTIDKGWCYKRVCVPFGSRPEGVDGAWGPWTPWGDCSRTCGGGVSSSSRHCDSPRPTIGGKYCLGERRRHRSCNTDDCPPGSQDFREVQCSEFDSIPFRGKFYKWKTYRGGGVKACSLTCLAEGFNFYTERAAAVVDGTPCRPDTVDICVSGECKHVGCDRVLGSDLREDKCRVCGGDGSACETIEGVFSPASPGAGYEDVVWIPKGSVHIFIQDLNLSLSHLALKGDQESLLLEGLPGTPQPHRLPLAGTTFQLRQGPDQVQSLEALGPINASLIVMVLARTELPALRYRFNAPIARDSLPPYSWHYAPWTKCSAQCAGGSQVQAVECRNQLDSSAVAPHYCSAHSKLPKRQRACNTEPCPPDWVVGNWSLCSRSCDAGVRSRSVVCQRRVSAAEEKALDDSACPQPRPPVLEACHGPTCPPEWAALDWSECTPSCGPGLRHRVVLCKSADHRATLPPAHCSPAAKPPATMRCNLRRCPPARWVAGEWGECSAQCGVGQRQRSVRCTSHTGQASHECTEAL

SEQ ID NO: 205 - DNA, 3400 bp, Homo sapiens
  CDS (1)..(3231)
cggtctcaagatgagttcctgtccagtctggagagctatgagatcgccttccccacccgcgtggaccacaacggggcactgctggccttctcgccacctcctccccggaggcagcgccgcggcacgggggccacagccgagtcccgcctcttctacaaagtagcctcgcccagcacccacttcctgctgaacctgacccgcagctcccgtctactggcagggcacgtctccgtggagtactggacacgggagggcctggcctggcagagggcggcccggccccactgcctctacgctggtcacctgcagggccaggccagcagctcccatgtggccatcagcacctgtggaggcctgcacggcctgatcgtggcagacgaggaagagtacctgattgagcccctgcacggtgggcccaagggttctcggagcccggaggaaagtggaccacatgtggtgtacaagcgttcctctctgcgtcacccccacctggacacagcctgtggagtgagagatgagaaaccgtggaaagggcggccatggtggctgcggaccttgaagccaccgcctgccagacccctggggaatgaaacagagcgtggccagccaggcctgaagcgatcggtcagccgagagcgctacgtggagaccctggtggtggctgacaagatgatggtggcctatcacgggcgccgggatgtggagcagtatgtcctggccatcatgaacattgttgccaaacttttccaggactcgagtctgggaagcaccgttaacatcctcgtaactcgcctcatcctgctcacggaggaccagcccactctggagatcacccaccatgccgggaagtccctagacagcttctgtaagtggcagaaatccatcgtgaaccacagcggccatggcaatgccattccagagaacggtgtggctaaccatgacacagcagtgctcatcacacgctatgacatctgcatctacaagaacaaaccctgcggcacactaggcctggccccggtgggcggaatgtgtgagcgcgagagaagctgcagcgtcaatgaggacattggcctgccacaagcgttcaccattgcccacgagatcgggcacacattcggcatgaaccatgacggcgtgggaaacagctgtggggcccgtggtcaggacccagccaagctcatggctgcccacattaccatgaagaccaacccattcgtgtggtcatcctgcaaccgtgactacatcaccagctttctagactcgggcctggggctctgcctgaacaaccggccccccagacaggactttgtgtacccgacagtggcaccgggccaagcctacgatgcagatgagcaatgccgctttcagcatggagtcaaatcgcgtcagtgtaaatacggggaggtctgcagcgagctgtggtgtctgagcaagagcaaccggtgcatcaccaacagcatcccggccgccgagggcacgctgtgccagacgcacaccatcgacaaggggtggtgctacaaacgggtctgtgtcccctttgggtcgcgcccagagggtgtggacggagcctgggggccgtggactccatggggcgactgcagccggacctgtggcggcggcgtgtcctcttctagtcgtcactgcgacagccccaggccaaccatcgggggcaagtactgtctgggtgagagaaggcggcaccgctcctgcaacacggatgactgtccccctggctcccaggacttcagagaagtgcagtgttctgaatttgacagcatccctttccgtgggaaattctacaagtggaaaacgtaccggggagggggcgtgaaggcctgctcgctcacgagcctagcggaaggcttcaacttctacacggagagggcggcagccgtggtggacgggacaccctgccgtccagacacggtggacatttgcgtcagtggcgaatgcaagcacgtgggctgcgaccgagtcctgggctccgacctgcgggaggacaagtgccgagtgtgtggcggtgacggcagtgcctgcgagaccatcgagggcgtcttcagcccagcctcacctggggccgggtacgaggatgtcgtctggattcccaaaggctccgtccacatcttcatccaggatctgaacctctctctcagtcacttggccctgaagggagaccaggagtccctgctgctggaggggctgcctgggaccccccagccccaccgtctgcctctagctgggaccacctttcaactgcgacaggggccagaccaggtccagagcctcgaagccctgggaccgattaatgcatctctcatcgtcatggtgctggcccggaccgagctgcctgccctccgctaccgcttcaatgcccccatcgcccgtgactcgctgcccccctactcctggcactatgcgccctggaccaagtgctcggcccagtgtgcaggcggtagccaggtgcaggcggtggagtgccgcaaccagctggacagctccgcggtcgccccccactactgcagtgcccacagcaagctgcccaaaaggcagcgcgcctgcaacacggagccttgccctccagactgggttgtagggaactggtcgctctgcagccgcagctgcgatgcaggcgtgcgcagtcgctcggtcgtgtgccagcgccgcgtctctgccgcggaggagaaggcgctggacgacagcgcatgcccgcagccgcgcccacctgtactggaggcctgccacggccccacttgccctccggagtgggcggccctcgactggtctgagtgcacccccagctgcgggccgggcctccgccaccgcgtggtcctttgcaagagcgcagaccaccgcgccacgctgcccccggcgcactgctcacccgccgccaagccaccggccaccatgcgctgcaacttgcgccgctgccccccggcccgctgggtggctggcgagtggggtgagtgctctgcacagtgcggcgtcgggcagcggcagcgctcggtgcgctgcaccagccacacgggccaggcgtcgcacgagtgcacggaggccctgcggccgcccaccacgcagcagtgtgaggccaagtgcgacagcccaacccccggggacggccctgaagagtgcaaggatgtgaacaaggtcgcctactgccccctggtgctcaaatttcagttctgcagccgagcctacttccgccagatgtgctgcaaaacctgccagggccactagggggcgcgcggcacccggagccacagctggcggggtctccgccgccagccctgcagcgggccggccaaagggggccccgggggggcgggaactgggagggaagggtgagacggagccggaagttatttattgggaacccctgcagggccctggctggggggatgga

SEQ ID NO: 206 - protein, 1077 aa, Homo sapiens
RSQDEFLSSLESYEIAFPTRVDHNGALLAFSPPPPRRQRRGTGATAESRLFYKVASPSTHFLLNLTRSSRLLAGHVSVEYWTREGLAWQRAARPHCLYAGHLQGQASSSHVAISTCGGLHGLIVADEEEYLIEPLHGGPKGSRSPEESGPHVVYKRSSLRHPHLDTACGVRDEKPWKGRPWWLRTLKPPPARPLGNETERGQPGLKRSVSRERYVETLVVADKMMVAYHGRRDVEQYVLAIMNIVAKLFQDSSLGSTVNILVTRLILLTEDQPTLEITHHAGKSLDSFCKWQKSIVNHSGHGNAIPENGVANHDTAVLITRYDICIYKNKPCGTLGLAPVGGMCERERSCSVNEDIGLPQAFTIAHEIGHTFGMNHDGVGNSCGARGQDPAKLMAAHITMKTNPFVWSSCNRDYITSFLDSGLGLCLNNRPPRQDFVYPTVAPGQAYDADEQCRFQHGVKSRQCKYGEVCSELWCLSKSNRCITNSIPAAEGTLCQTHTIDKGWCYKRVCVPFGSRPEGVDGAWGPWTPWGDCSRTCGGGVSSSSRHCDSPRPTIGGKYCLGERRRHRSCNTDDCPPGSQDFREVQCSEFDSIPFRGKFYKWKTYRGGGVKACSLTSLAEGFNFYTERAAAVVDGTPCRPDTVDICVSGECKHVGCDRVLGSDLREDKCRVCGGDGSACETIEGVFSPASPGAGYEDVVWIPKGSVHIFIQDLNLSLSHLALKGDQESLLLEGLPGTPQPHRLPLAGTTFQLRQGPDQVQSLEALGPINASLIVMVLARTELPALRYRFNAPIARDSLPPYSWHYAPWTKCSAQCAGGSQVQAVECRNQLDSSAVAPHYCSAHSKLPKRQRACNTEPCPPDWVVGNWSLCSRSCDAGVRSRSVVCQRRVSAAEEKALDDSACPQPRPPVLEACHGPTCPPEWAALDWSECTPSCGPGLRHRVVLCKSADHRATLPPAHCSPAAKPPATMRCNLRRCPPARWVAGEWGECSAQCGVGQRQRSVRCTSHTGQASHECTEALRPPTTQQCEAKCDSPTPGDGPEECKDVNKVAYCPLVLKFQFCSRAYFRQMCCKTCQGH

SEQ ID NO: 207 - DNA, 978 bp, Homo sapiens
  CDS (1)..(978)
tccataaatggagcttattgggagagtataagtcacaggccatgccccgcaaggggatgcacgaagacccaccgcgagccaggaagggagcaccgggctctctgctctgggaccggcagtgagccggacatctgggtcctcccaagccgggcgggctgccccagggaggaagggaggggggcgagcctgagcgggcacctcggcccgcaggaggtctgcagcgagctgtggtgtctgagcaagagcaaccggtgcatcaccaacagcatcccggccgccgagggcacgctgtgccagacgcacaccatcgacaaggggtggtgctacaaacgggtctgtgtcccctttgggtcgcgcccagagggtgtggacggagcctgggggccgtggactccatggggcgactgcagccggacctgtggcggcggcgtgtcctcttctagccgtcactgcgacagccccaggccaaccatcgggggcaagtactgtctgggtgagagaaggcggcaccgctcctgcaacacggatgactgtccccctggctcccaggacttcagagaagtgcagtgttctgaatttgacagcatccctttccgtgggaaattctacaagtggaaaacgtaccggggagggggcgtgaaggcctgctcgctcacgtgcctagcggaaggcttcaacttctacacggagagggcggcagccgtggtggacgggacaccctgccgtccagacacggtggacatttgcgtcagtggcgaatgcaagcacgtgggctgcgaccgagtcctgggctccgacctgcgggaggacaagtgccgagtgtgtggcggtgacggcagtgcctgcgagaccatcgagggcgtcttcagcccagcctcacctggggccgggtacgaggatgtcgtctggattcccaaaggctccgtccacatcttcatccaggatctgaacctctctctcagtcacttggccctgaag

SEQ ID NO: 208 - protein, 326 aa, Homo sapiens
SINGAYWESISHRPCPARGCTKTHREPGREHRALCSGTGSEPDIWVLPSRAGCPREEGRGASLSGHLGPQEVCSELWCLSKSNRCITNSIPAAEGTLCQTHTIDKGWCYKRVCVPFGSRPEGVDGAWGPWTPWGDCSRTCGGGVSSSSRHCDSPRPTIGGKYCLGERRRHRSCNTDDCPPGSQDFREVQCSEFDSIPFRGKFYKWKTYRGGGVKACSLTCLAEGFNFYTERAAAVVDGTPCRPDTVDICVSGECKHVGCDRVLGSDLREDKCRVCGGDGSACETIEGVFSPASPGAGYEDVVWIPKGSVHIFIQDLNLSLSHLALK

SEQ ID NO: 209 - DNA, 1866 bp, Homo sapiens
  CDS (1)..(1866)
tccataaatggagcttattgggagagtataagtcacaggccatgccccgcaaggggatgcacgaagacccaccgcgagccaggaagggagcaccgggctctctgctctgggaccggcagtgagccggacatctgggtcctcccaagccgggcgggctgccccagggaggaagggaggggggcgagcctgagcgggcacctcggcccgcaggaggtctgcagcgagctgtggtgtctgagcaagagcaaccggtgcatcaccaacagcatcccggccgccgagggcacgctgtgccagacgcacaccatcgacaaggggtggtgctacaaacgggtctgtgtcccctttgggtcgcgcccagagggtgtggacggagcctgggggccgtggactccatggggcgactgcagccggacctgtggcggcggcgtgtcctcttctagccgtcactgcgacagccccaggccaaccatcgggggcaagtactgtctgggtgagagaaggcggcaccgctcctgcaacacggatgactgtccccctggctcccaggacttcagagaagtgcagtgttctgaatttgacagcatccctttccgtgggaaattctacaagtggaaaacgtaccggggagggggcgtgaaggcctgctcgctcacgtgcctagcggaaggcttcaacttctacacggagagggcggcagccgtggtggacgggacaccctgccgtccagacacggtggacatttgcgtcagtggcgaatgcaagcacgtgggctgcgaccgagtcctgggctccgacctgcgggaggacaagtgccgagtgtgtggcggtgacggcagtgcctgcgagaccatcgagggcgtcttcagcccagcctcacctggggccgggtacgaggatgtcgtctggattcccaaaggctccgtccacatcttcatccaggatctgaacctctctctcagtcacttggccctgaagggagaccaggagtccctgctgctggaggggctgcccgggaccccccagccccaccgtctgcctctagctgggaccacctttcaactgcgacaggggccagaccaggtccagagcctcgaagccctgggaccgattaatgcatctctcatcgtcatggtgctggcccggaccgagctgcctgccctccgctaccgcttcaatgcccccatcgcccgtgactcgctgcccccctactcctggcactatgcgccctggaccaagtgctcggcccagtgtgcaggcggtagccaggtgcaggcggtggagtgccgcaaccagctggacagctccgcggtcgccccccactactgcagtgcccacagcaagctgcccaaaaggcagcgcgcctgcaacacggagccttgccctccagactgggttgtagggaactggtcgctctgcagccgcagctgcgatgcaggcgtgcgcagccgctcggtcgtgtgccagcgccgcgtctctgccgcggaggagaaggcgctggacgacagcgcatgcccgcagccgcgcccacctgtactggaggcctgccacggccccacttgccctccggagtgggcggccctcgactggtctgagtgcacccccagctgcgggccgggcctccgccaccgcgtggtcctttgcaagagcgcagaccaccgcgccacgctgcccccggcgcactgctcacccgccgccaagccaccggccaccatgcgctgcaacttgcgccgctgccccccggcccgctgggtggctggcgagtggggtgagtgctctgcacagtgcggcgtcgggcagcggcagcgctcggtgcgctgcaccagccacacgggccaggcgtcgcacgagtgcacggaggccctg

SEQ ID NO: 210 - protein, 622 aa, Homo sapiens
SINGAYWESISHRPCPARGCTKTHREPGREHRALCSGTGSEPDIWVLPSRAGCPREEGRGASLSGHLGPQEVCSELWCLSKSNRCITNSIPAAEGTLCQTHTIDKGWCYKRVCVPFGSRPEGVDGAWGPWTPWGDCSRTCGGGVSSSSRHCDSPRPTIGGKYCLGERRRHRSCNTDDCPPGSQDFREVQCSEFDSIPFRGKFYKWKTYRGGGVKACSLTCLAEGFNFYTERAAAVVDGTPCRPDTVDICVSGECKHVGCDRVLGSDLREDKCRVCGGDGSACETIEGVFSPASPGAGYEDVVWIPKGSVHIFIQDLNLSLSHLALKGDQESLLLEGLPGTPQPHRLPLAGTTFQLRQGPDQVQSLEALGPINASLIVMVLARTELPALRYRFNAPIARDSLPPYSWHYAPWTKCSAQCAGGSQVQAVECRNQLDSSAVAPHYCSAHSKLPKRQRACNTEPCPPDWVVGNWSLCSRSCDAGVRSRSVVCQRRVSAAEEKALDDSACPQPRPPVLEACHGPTCPPEWAALDWSECTPSCGPGLRHRVVLCKSADHRATLPPAHCSPAAKPPATMRCNLRRCPPARWVAGEWGECSAQCGVGQRQRSVRCTSHTGQASHECTEAL

SEQ ID NO: 211 - DNA, 1762 bp, Homo sapiens
  CDS (197)..(1759)
tttgagttagacaagcagcagcacacgcctccctacctcatggcgacagaaaatggagcagttgagctgggaattcagaacccatcaacagacaaggcacctaaaggtcccacaggtgaaagacccctggctgcagggaaagaccctggccccccagacccaaagaaagctccggatccacccaccctgaagaaagatgccaaagcccctgcctcagagaaaggggatggtaccctggcccaaccctcaactagcagccctgccccagcagactgcgacacctgagaccagcgtcaagaagcccaaggctgagcagggagcctcaggcagccaggatcctggaaagcccagggtgggcaagaaggcagcagagggccaagcagcagccaggaggggctcacctgcctttctgcatagccccagctgtcctgccatcatctccagttctgagaagctgctggccaagaagcccccaagcgaggcatcagagctcacctttgaaggggtgcccatgacccacagccccacggatcccaggccagccaaggcagaagaaggaaagaacatcctggcagagagccagaaggaagtgggagagaaaaccccaggccaggctggccaggctaagatgcaaggggacacctcgagggggattgagttccaggctgttccctcagagaaatccgaggtggggcaggccctctgtctcacagccagggaggaggactgcttccagattttggatgattgcccgccacctccggcccccttccctcaccgcatggtggagctgaggaccgggaatgtcagcagtgaattcagtatgaactccaaggaggcgctcggaggtggcaagtttggggcagtctgtacctgcatggagaaagccacaggcctcaagctggcagccaaggtcatcaagaaacagactcccaaagacaaggaaatggtgttgctggagattgaggtcatgaaccagctgaaccaccgcaatctgatccagctgtatgcagccatcgagactccgcatgagatcgtcctgttcatggagtacatcgagggcggagagctcttcgagaggattgtggatgaggactaccatctgaccgaggtggacaccatggtgtttgtcaggcagatctgtgacgggatcctcttcatgcacaagatgagggttttgcacctggacctcaagccagagaacatcctgtgtgtcaacaccaccgggcatttggtgaagatcattgactttggcctggcacggaggtataaccccaacgagaagctgaaggtgaactttgggaccccagagttcctgtcacctgaggtggtgaattatgaccaaatctccgataagacagacatgtggagtatgggggtgatcacctacatgctgctgagcggcctctcccccttcctgggagatgatgacacagagaccctaaacaacgttctatctggcaactggtactttgatgaagagacctttgaggccgtatcagacgaggccaaagactttgtctccaacctcatcgtcaaggaccagagggcccggatgaacgctgcccagtgtctcgcccatccctggctcaacaacctggcggagaaagccaaacgctgtaaccgacgccttaagtcccagatcttgcttaagaaatacctcatgaagaggcgctggaagaaaaacttcattgctgtcagcgctgccaaccgcttcaagaagatcagcagctcgggggcactgatggctctgggggtctga

SEQ ID NO: 212 - protein, 521 aa, Homo sapiens
MPKPLPQRKGMVPWPNPQLAALPQQTATPETSVKKPKAEQGASGSQDPGKPRVGKKAAEGQAAARRGSPAFLHSPSCPAIISSSEKLLAKKPPSEASELTFEGVPMTHSPTDPRPAKAEEGKNILAESQKEVGEKTPGQAGQAKMQGDTSRGIEFQAVPSEKSEVGQALCLTAREEDCFQILDDCPPPPAPFPHRMVELRTGNVSSEFSMNSKEALGGGKFGAVCTCMEKATGLKLAAKVIKKQTPKDKEMVLLEIEVMNQLNHRNLIQLYAAIETPHEIVLFMEYIEGGELFERIVDEDYHLTEVDTMVFVRQICDGILFMHKMRVLHLDLKPENILCVNTTGHLVKIIDFGLARRYNPNEKLKVNFGTPEFLSPEVVNYDQISDKTDMWSMGVITYMLLSGLSPFLGDDDTETLNNVLSGNWYFDEETFEAVSDEAKDFVSNLIVKDQRARMNAAQCLAHPWLNNLAEKAKRCNRRLKSQILLKKYLMKRRWKKNFIAVSAANRFKKISSSGALMALGV

SEQ ID NO: 213 - DNA, 1788 bp, Homo sapiens
  CDS (1)..(1785)
atggcgacagaaaatggagcagttgagctgggaattcagaacccatcaacagacaaggcacctaaaggtcccacaggtgaaagacccctggctgcagggaaagaccctggccccccagacccaaagaaagctccggatccacccaccctgaagaaagatgccaaagcccctgcctcagagaaaggggatggtaccctggcccaaccctcaactagcagccaaggccccaaaggagagggtgacaggggcggggggcccgcggagggcagtgctgggcccccggcagccctgccccagcagactgcgacacctgagaccagcgtcaagaagcccaaggctgagcagggagcctcaggcagccaggatcctggaaagcccagggtgggcaagaaggcagcagagggccaagcagcagccaggaggggctcacctgcctttctgcatagccccagctgtcctgccatcatctccagttctgagaagctgctggccaagaagcccccaagcgaggcatcagagctcacctttgaaggggtgcccatgacccacagccccacggatcccaggccagccaaggcagaagaaggaaagaacatcctggcagagagccagaaggaagtgggagagaaaaccccaggccaggctggccaggctaagatgcaaggggacacctcgagggggattgagttccaggctgttccctcagagaaatccgaggtggggcaggccctctgtctcacagccagggaggaggactgcttccagattttggatgattgcccgccacctccggcccccttccctcaccgcatggtggagctgaggaccgggaatgtcagcagtgaattcagtatgaactccaaggaggcgctcggagggggcaagtttggggcagtctgtacctgcatggagaaagccacaggcctcaagctggcagccaaggtcatcaagaaacagactcccaaagacaaggaaatggtgttgctggagattgaggtcatgaaccagctgaaccaccgcaatctgatccagctgtatgcagccatcgagactccgcatgagatcgtcctgttcatggagatcgagggcggagagctcttcgagaggattgtggatgaggactaccatctgaccgaggtggacaccatggtgtttgtcaggcagatctgtgacgggatcctcttcatgcacaagatgagggttttgcacctggacctcaagccagagaacatcctgtgtgtcaacaccaccgggcatttggtgaagatcattgactttggcctggcacggaggtaccacaaccccaacgagaagctgaaggtgaactttgggaccccagagttcctgtcacctgaggtggtgaattatgaccaaatctccgataagacagacatgtggagtatgggggtgatcacctacatgctgctgagcggcctctcccccttcctgggagatgatgacacagagaccctaaacaacgttctatctggcaactggtactttgatgaagagacctttgaggccgtatcagacgaggccaaagactttgtctccaacctcatcgtcaaggaccaggcccggatgaacgctgcccagtgtctcgcccatccctggctcaacaacctggcggagaaagccaaacgctgtaaccgacgccttaagtcccagatcttgcttaagaaatacctcatgaagaggcgctggaagaaaaacttcattgctgtcagcgctgccaaccgcttcaagaagatcagcagctcgggggcactgatggctctgggggtctga

SEQ ID NO: 214 - protein, 595 aa, Homo sapiens
MATENGAVELGIQNPSTDKAPKGPTGERPLAAGKDPGPPDPKKAPDPPTLKKDAKAPASEKGDGTLAQPSTSSQGPKGEGDRGGGPAEGSAGPPAALPQQTATPETSVKKPKAEQGASGSQDPGKPRVGKKAAEGQAAARRGSPAFLHSPSCPAIISSSEKLLAKKPPSEASELTFEGVPMTHSPTDPRPAKAEEGKNILAESQKEVGEKTPGQAGQAKMQGDTSRGIEFQAVPSEKSEVGQALCLTAREEDCFQILDDCPPPPAPFPHRMVELRTGNVSSEFSMNSKEALGGGKFGAVCTCMEKATGLKLAAKVIKKQTPKDKEMVLLEIEVMNQLNHRNLIQLYAAIETPHEIVLFMEIEGGELFERIVDEDYHLTEVDTMVFVRQICDGILFMHKMRVLHLDLKPENILCVNTTGHLVKIIDFGLARRYHNPNEKLKVNFGTPEFLSPEVVNYDQISDKTDMWSMGVITYMLLSGLSPFLGDDDTETLNNVLSGNWYFDEETFEAVSDEAKDFVSNLIVKDQARMNAAQCLAHPWLNNLAEKAKRCNRRLKSQILLKKYLMKRRWKKNFIAVSAANRFKKISSSGALMALGV

SEQ ID NO: 215 - DNA, 787 bp, Homo sapiens
  CDS (2)..(787)
caccaagcttatgaactccaaggaggcgctcggagggggcaagtttggggcagtctgtacctgcatggagaaagccacaggcctcaagctggcagccaaggtcatcaagaaacagactcccaaagacaaggaaatggtgttgctggagattgaggtcatgaaccagctgaaccaccgcaatctgatccagctgtatgcagccatcgagactccgcatgagatcgtcctgttcatggagtacatcgagggcggagagctcttcgagaggattgtggatgaggactaccatctgaccgaggtggacaccatggtgtttgtcaggcagatctgtgacgggatcctcttcatgcacaagatgagggttttgcacctggacctcaagccagagaacatcctgtgtgtcaacaccaccgggcatttggtgaagatcattgactttggcctggcacggaggtataaccccaacgagaagctgaaggtgaactttgggaccccagagttcctgtcacctgaggtggtgaattatgaccaaatctccgataagacagacatgtggagtatgggggtgatcacctacatgctgctgagcggcctctcccccttcctgggagatgatgacacagagaccctaaacaacgttctatctggcaactggtactttgatgaagagacctttgaggccgtatcagacgaggccaaagactttgtctccaacctcatcgtcaaggaccagagggcccggatgaacgctgcccagtgtctcgcccatccctggctcgtcgacggc

SEQ ID NO: 216 - protein, 262 aa, Homo sapiens
TKLMNSKEALGGGKFGAVCTCMEKATGLKLAAKVIKKQTPKDKEMVLLEIEVMNQLNHRNLIQLYAAIETPHEIVLFMEYIEGGELFERIVDEDYHLTEVDTMVFVRQICDGILFMHKMRVLHLDLKPENILCVNTTGHLVKIIDFGLARRYNPNEKLKVNFGTPEFLSPEVVNYDQISDKTDMWSMGVITYMLLSGLSPFLGDDDTETLNNVLSGNWYFDEETFEAVSDEAKDFVSNLIVKDQRARMNAAQCLAHPWLVDG

SEQ ID NO: 217 - DNA, 1813 bp, Homo sapiens
  CDS (2)..(1813)
caccaagcttcccaccatggcgacagaaaatggagcagttgagctgggaattcagaacccatcaacagacaaggcacctaaaggtcccacaggtgaaagacccctggctgcagggaaagaccctggccccccagacccaaagaaagctccggatccacccaccctgaagaaagatgccaaagcccctgcctcagagaaaggggatggtaccctggcccaaccctcaactagcagccaaggccccaaaggagagggtgacaggggcggggggcccgcggagggcagtgctgggcccccggcagccctgccccagcagactgcgacacctgagaccagcgtcaagaagcccaaggctgagcagggagcctcaggcagccaggatcctggaaagcccagggtgggcaagaaggcagcagagggccaagcagcagccaggaggggctcacctgcctttctgcatagccccagctgtcctgccatcatctccagttctgagaagctgctggccaagaagcccccaagcgaggcatcagagctcacctttgaaggggtgcccatgacccacagccccacggatcccaggccagccaaggcagaagaaggaaagaacatcctggcagagagccagaaggaagtgggagagaaaaccccaggccaggctggccaggctaagatgcaaggggacacctcgagggggattgagttccaggctgttccctcagagaaatccgaggtggggcaggccctctgtctcacagccagggaggaggactgcttccagattttggatgattgcccgccacctccggcccccttccctcaccgcatggtggagctgaggaccgggaatgtcagcagtgaattcagtatgaactccaaggaggcgctcggaggtggcaagtttggggcagtctgtacctgcatggagaaagccacaggcctcaagctggcagccaaggtcatcaagaaacagactcccaaagacaaggaaatggtgttgctggagattgaggtcatgaaccagctgaaccaccgcaatctgatccagctgtatgcagccatcgagactccgcatgagatcgtcctgttcatggagtacatcgagggcggagagctcttcgagaggattgtggatgaggactaccatctgaccgaggtggacaccatggtgtttgtcaggcagatctgtgacgggatcctcttcatgcacaagatgagggttttgcacctggacctcaagccagagaacatcctgtgtgtcaacaccaccgggcatttggtgaagatcattgactttggcctggcacggaggtataaccccaacgagaagctgaaggtgaactttgggaccccagagttcctgtcacctgaggtggtgaattatgaccaaatctccgataagacagacatgtggagtatgggggtgatcacctacatgctgctgagcggcctctcccccttcctgggagatgatgacacagagaccctaaacaacgttctatctggcaactggtactttgatgaagagacctttgaggccgtatcagacgaggccaaagactttgtctccaacctcatcgtcaaggaccagagggcccggatgaacgctgcccagtgtctcgcccatccctggctcaacaacctggcggagaaagccaaacgctgtaaccgacgccttaagtcccagatcttgcttaagaaatacctcatgaagaggcgctggaagaaaaacttcattgctgtcagcgctgccaaccgcttcaagaagatcagcagctcgggggcactgatggctctgggggtcgtcgacggc

SEQ ID NO: 218 - protein, 604 aa, Homo sapiens
TKLPTMATENGAVELGIQNPSTDKAPKGPTGERPLAAGKDPGPPDPKKAPDPPTLKKDAKAPASEKGDGTLAQPSTSSQGPKGEGDRGGGPAEGSAGPPAALPQQTATPETSVKKPKAEQGASGSQDPGKPRVGKKAAEGQAAARRGSPAFLHSPSCPAIISSSEKLLAKKPPSEASELTFEGVPMTHSPTDPRPAKAEEGKNILAESQKEVGEKTPGQAGQAKMQGDTSRGIEFQAVPSEKSEVGQALCLTAREEDCFQILDDCPPPPAPFPHRMVELRTGNVSSEFSMNSKEALGGGKFGAVCTCMEKATGLKLAAKVIKKQTPKDKEMVLLEIEVMNQLNHRNLIQLYAAIETPHEIVLFMEYIEGGELFERIVDEDYHLTEVDTMVFVRQICDGILFMHKMRVLHLDLKPENILCVNTTGHLVKIIDFGLARRYNPNEKLKVNFGTPEFLSPEVVNYDQISDKTDMWSMGVITYMLLSGLSPFLGDDDTETLNNVLSGNWYFDEETFEAVSDEAKDFVSNLIVKDQRARMNAAQCLAHPWLNNLAEKAKRCNRRLKSQILLKKYLMKRRWKKNFIAVSAANRFKKISSSGALMALGVVDG

SEQ ID NO: 219 - DNA, 2010 bp, Homo sapiens
  CDS (40)..(1827)
tttgagttagacaagcagcagcacacgcctccctacctcatggcgacagaaaatggagcagttgagctgggaattcagaacccatcaacagacaaggcacctaaaggtcccacaggtgaaagacccctggctgcagggaaagaccctggccccccagacccaaagaaagctccggatccacccaccctgaagaaagatgccaaagcccctgcctcagagaaaggggatggtaccctggcccaaccctcaactagcagccaaggccccaaaggagagggtgacaggggcggggggcccgcggagggcagtgctgggcccccggcagccctgccccagcagactgcgacacctgagaccagcgtcaagaagcccaaggctgagcagggagcctcaggcagccaggatcctggaaagcccagggtgggcaagaaggcagcagagggccaagcagcagccaggaggggctcacctgcctttctgcatagccccagctgtcctgccatcatctccagttctgagaagctgctggccaagaagcccccaagcgaggcatcagagctcacctttgaaggggtgcccatgacccacagccccacggatcccaggccagccaaggcagaagaaggaaagaacatcctggcagagagccagaaggaagtgggagagaaaaccccaggccaggctggccaggctaagatgcaaggggacacctcgagggggattgagttccaggctgttccctcagagaaatccgaggtggggcaggccctctgtctcacagccagggaggaggactgcttccagattttggatgattgcccgccacctccggcccccttccctcaccgcatggtggagctgaggaccgggaatgtcagcagtgaattcagtatgaactccaaggaggcgctcggaggtggcaagtttggggcagtctgtacctgcatggagaaagccacaggcctcaagctggcagccaaggtcatcaagaaacagactcccaaagacaaggaaatggtgttgctggagattgaggtcatgaaccagctgaaccaccgcaatctgatccagctgtatgcagccatcgagactccgcatgagatcgtcctgttcatggagtacatcgagggcggagagctcttcgagaggattgtggatgaggactaccatctgaccgaggtggacaccatggtgtttgtcaggcagatctgtgacgggatcctcttcatgcacaagatgagggttttgcacctggacctcaagccagagaacatcctgtgtgtcaacaccaccgggcatttggtgaagatcattgactttggcctggcacggaggtataaccccaacgagaagctgaaggtgaactttgggaccccagagttcctgtcacctgaggcggtgaattatgaccaaatctccgataagacagacatgtggagtatgggggtgatcacctacatgctgctgagcggcctctcccccttcctgggagatgatgacacagagaccctaaacaacgttctatctggcaactggtactttgatgaagagacctttgaggccgtatcagacgaggccaaagactttgtctccaacctcatcgtcaaggaccagagggcccggatgaacgctgcccagtgtctcgcccatccctggctcaacaacctggcggagaaagccaaacgctgtaaccgacgccttaagtcccagatcttgcttaagaaatacctcatgaagaggcgctggaagaaaaacttcattgctgtcagcgctgccaaccgcttcaagaagatcagcagctcgggggcactgatggctctgggggtctgagccctgggcgcagctgaagcctggacgcagccacacagtggccggggctgaagccacacagcccagaaggccagaaaaggcagccagatccccagggcagcctcgttaggacaaggctgtgccaggctgggaggctcggggctccccacgcccccatgcagtgaccgcttccccgatgtg

SEQ ID NO: 220 - protein, 596 aa, Homo sapiens
MATENGAVELGIQNPSTDKAPKGPTGERPLAAGKDPGPPDPKKAPDPPTLKKDAKAPASEKGDGTLAQPSTSSQGPKGEGDRGGGPAEGSAGPPAALPQQTATPETSVKKPKAEQGASGSQDPGKPRVGKKAAEGQAAARRGSPAFLHSPSCPAIISSSEKLLAKKPPSEASELTFEGVPMTHSPTDPRPAKAEEGKNILAESQKEVGEKTPGQAGQAKMQGDTSRGIEFQAVPSEKSEVGQALCLTAREEDCFQILDDCPPPPAPFPHRMVELRTGNVSSEFSMNSKEALGGGKFGAVCTCMEKATGLKLAAKVIKKQTPKDKEMVLLEIEVMNQLNHRNLIQLYAAIETPHEIVLFMEYIEGGELFERIVDEDYHLTEVDTMVFVRQICDGILFMHKMRVLHLDLKPENILCVNTTGHLVKIIDFGLARRYNPNEKLKVNFGTPEFLSPEAVNYDQISDKTDMWSMGVITYMLLSGLSPFLGDDDTETLNNVLSGNWYFDEETFEAVSDEAKDFVSNLIVKDQRARMNAAQCLAHPWLNNLAEKAKRCNRRLKSQILLKKYLMKRRWKKNFIAVSAANRFKKISSSGALMALGV

SEQ ID NO: 221 - DNA, 1839 bp, Homo sapiens
  CDS (49)..(1836)
ctagaaagacttgagttagacaagcagcagcacacgcctccctacctcatggcgacagaaaatggagcagttgagctgggaattcagaacccatcaacagacaaggcacctaaaggtcccacaggtgaaagacccctggctgcagggaaagaccctggccccccagacccaaagaaagctccggatccacccaccctgaagaaagatgccaaagcccctgcctcagagaaaggggatggtaccctggcccaaccctcaactagcagccaaggccccaaaggagagggtgacaggggcggggggcccgcggagggcagtgctgggcccccggcagccctgccccagcagactgcgacacctgagaccagcgtcaagaagcccaaggctgagcagggagcctcaggcagccaggatcctggaaagcccagggtgggcaagaaggcagcagagggccaagcagcagccaggaggggctcacctgcctttctgcatagccccagctgtcctgccatcatctccagttctgagaagctgctggccaagaagcccccaagcgaggcatcagagctcacctttgaaggggtgcccatgacccacagccccacggatcccaggccagccaaggcagaagaaggaaagaacatcctggcagagagccagaaggaagtgggagagaaaaccccaggccaggctggccaggctaagatgcaaggggacacctcgagggggattgagttccaggctgttccctcagagaaatccgaggtggggcaggccctctgtctcacagccagggaggaggactgcttccagattttggatgattgcccgccacctccggcccccttccctcaccgcatggtggagctgaggaccgggaatgtcagcagtgaattcagtatgaactccaaggaggcgctcggaggtggcaagtttggggcagtctgtacctgcatggagaaagccacaggcctcaagctggcagccaaggtcatcaagaaacagactcccaaagacaaggaaatggtgttgctggagattgaggtcatgaaccagctgaaccaccgcaatctgatccagctgtatgcagccatcgagactccgcatgagatcgtcctgttcatggagtacatcgagggcggagagctcttcgagaggattgtggatgaggactaccatctgaccgaggtggacaccatggtgtttgtcaggcagatctgtgacgggatcctcttcatgcacaagatgagggttttgcacctggacctcaagccagagaacatcctgtgtgtcaacaccaccgggcatttggtgaagatcattgactttggcctggcacggaggtataaccccaacgagaagctgaaggtgaactttgggaccccagagttcctgtcacctgaggcggtgaattatgaccaaatctccgataagacagacatgtggagtatgggggtgatcacctacatgctgctgagcggcctctcccccttcctgggagatgatgacacagagaccctaaacaacgttctatctggcaactggtactttgatgaagagacctttgaggccgtatcagacgaggccaaagactttgtctccaacctcatcgtcaaggaccagagggcccggatgaacgctgcccagtgtctcgcccatccctggctcaacaacctggcggagaaagccaaacgctgtaaccgacgccttaagtcccagatcttgcttaagaaatacctcatgaagaggcgctggaagaaaaacttcattgctgtcagcgctgccaaccgcttcaagaagatcagcagctcgggggcactgatggctctgggggtctga

SEQ ID NO: 222 - protein, 596 aa, Homo sapiens; identical to SEQ ID NO: 220

SEQ ID NO: 223 - DNA, 2558 bp, Homo sapiens
  CDS (164)..(1948)
ctttgctccaggtacctctctcccctcagttagcaggcctcggcttcctgtctcactgcagccagacgagaggggaaattggacagcctgacacactccactcttgtttctgcagctagaaagacttgagttagacaagcagcagcacacgcctccctacctcatggcgacagaaaatggagcagttgagctgggaattcagaacccatcaacagacaaggcacctaaaggtcccacaggtgaaagacccctggctgcagggaaagaccctggccccccagacccaaagaaagctccggatccacccaccctgaagaaagatgccaaagcccctgcctcagagaaaggggatggtaccctggcccaaccctcaactagcagccaaggccccaaaggagagggtgacaggggcggggggcccgcggagggcagtgctgggcccccggcagccctgccccagcagactgcgacacctgagaccagcgtcaagaagcccaaggctgagcagggagcctcaggcagccaggatcctggaaagcccagggtgggcaagaaggcagcagagggccaagcagcagccaggaggggctcacctgcctttctgcatagccccagctgtcccgccatcatctccagttctgagaagctgctggccaagaagcccccaagcgaggcatcagagctcacctttgaaggggtgcccatgacccacagccccacggatcccaggtcggccaaggcagaagaaggaaagaacatcctggcagagagccagaaggaagtgggagagaaaaccccaggccaggctggccaggctaagatgcaaggggacacctcgagggggattgagttccaggctgttccctcagagaaatccgaggtggggcaggccctctgtctcacagccagggaggaggactgcttccagattttggatgattgcccgccacctccggcccccttccctcaccgcatggtggagctgaggaccgggaatgtcagcagtgaattcagtatgaactccaaggaggcgctcggagggggcaagtttggggcagtctgtacctgcatggagaaagccacaggcctcaagctggcagccaaggtcatcaagaaacagactcccaaagacaaggaaatggtgttgctggagattgaggtcatgaaccagctgaaccaccgcaatctgatccagctgtatgcagccatcgagactccgcatgagatcgtcctgttcatggagatcgagggcggagagctcttcgagaggattgtggatgaggactaccatctgaccgaggtggacaccatggtgtttgtcaggcagatctgtgacgggatcctcttgatgcacaagatgagggttttgcacctggacctcaagccagagaacatcctgtgtgtcaacaccaccgggcatttggtgaagatcattgactttggcctggcacggaggtataaccccaacgagaagctgaaggtgaactttgggaccccagagttcctgtcacctgaggtggtgaattatgaccaaatctccgataagacagacatgtggagtatgggggtgatcacctacatgctgctgagcggcctctcccccttcctgggagatgatgacacagagaccctaaacaacgttctatctggcaactggtactttgatgaagagacctttgaggccgtatcagacgaggccaaagactttgtctccaacctcatcgtcaaggaccagagggcccggatgaacgctgcccagtgtctcgcccatccctggctcaacaacctggcggagaaagccaaacgctgtaaccgacgccttaagtcccagatcttgcttaagaaatacctcatgaagaggcgctggaagaaaaacttcattgctgtcagcgctgccaaccgcttcaagaagatcagcagctcgggggcactgatggctctgggggtctgagccctgggcgcagctgaagcctggacgcagccacacagtggccggggctgaagccacacagcccagaaggccagaaaaggcagccagatccccagggcagcctcgttaggacaaggctgtgccaggctgggaggctcggggctccccacgcccccatgcagtgaccgcttccccgatgtgagccgcctcggagtgtggcctggatccatcctgctagcacctccccagacagggctccagcctgtcggccacaccccagactccaggcccccgttgaagccgctcccggttccctccccagctcctcgtctttgaactgccgccgccgtggtgacccctgctttgccccactgggagagtccttagcctgggcctcctcctagctggagtgccatggctggggggtctcagcatgtagggcttctgtggttgtggatgggaggctcctggtggggcagaaaggctgcaacgctgattcctaaggcccagctgccagggaagacagagcaggctttgtgagagaggacctccatgcccccgccacctccccactccagcagataaggccgagcccacaccatctggcccaggctggcccccaccacct

SEQ ID NO: 224 - protein, 595 aa, Homo sapiens
MATENGAVELGIQNPSTDKAPKGPTGERPLAAGKDPGPPDPKKAPDPPTLKKDAKAPASEKGDGTLAQPSTSSQGPKGEGDRGGGPAEGSAGPPAALPQQTATPETSVKKPKAEQGASGSQDPGKPRVGKKAAEGQAAARRGSPAFLHSPSCPAIISSSEKLLAKKPPSEASELTFEGVPMTHSPTDPRSAKAEEGKNILAESQKEVGEKTPGQAGQAKMQGDTSRGIEFQAVPSEKSEVGQALCLTAREEDCFQILDDCPPPPAPFPHRMVELRTGNVSSEFSMNSKEALGGGKFGAVCTCMEKATGLKLAAKVIKKQTPKDKEMVLLEIEVMNQLNHRNLIQLYAAIETPHEIVLFMEIEGGELFERIVDEDYHLTEVDTMVFVRQICDGILLMHKMRVLHLDLKPENILCVNTTGHLVKIIDFGLARRYNPNEKLKVNFGTPEFLSPEVVNYDQISDKTDMWSMGVITYMLLSGLSPFLGDDDTETLNNVLSGNWYFDEETFEAVSDEAKDFVSNLIVKDQRARMNAAQCLAHPWLNNLAEKAKRCNRRLKSQILLKKYLMKRRWKKNFIAVSAANRFKKISSSGALMALGV

SEQ ID NO: 225 - DNA, 1788 bp, Homo sapiens
  CDS (1)..(1785)
atggcgacagaaaatggagcagttgagctgggaattcagaacccatcaacagacaaggcacctaaaggtcccacaggtgaaagacccctggctgcagggaaggaccctggccccccagacccaaagaaagctccggatccacccaccctgaagaaagatgccaaagcccctgcctcagagaaaggggatggtaccctggcccaaccctcaactagcagccaaggccccaaaggagagggtgacaggggcggggggcccgcggagggcagtgctgggcccccggcagccctgccccagcagactgcgacacctgagaccagcgtcaagaagcccaaggctgagcagggagcctcaggcagccaggatcctggaaagcccagggtgggcaagaaggcagcagagggccaagcagcagccaggaggggctcacctgcctttctgcatagccccagctgtcctgccatcatctccagttctgagaagctgctggccaagaagcccccaagcgaggcatcagagctcacctttgaaggggtgcccatgacccacagccccacggatcccaggccagccaaggcagaagaaggaaagaacatcctggcagagagccagaaggaagtgggagagaaaaccccaggccaggctggccaggctaagatgcaaggggacacctcgagggggattgagttccaggctgttccctcagagaaatccgaggtggggcaggccctctgtctcacagccagggaggaggactgcttccagattttggatgattgcccgccacctccggcccccttccctcaccgcatggtggagctgaggaccgggaatgtcagcagtgaattcagtatgaactccaaggaggcgctcggagggggcaagtttggggcagtctgtacctgcatggagaaagccacaggcctcaagctggcagccaaggtcatcaagaaacagactcccaaagacaaggaaatggtgttgctggagattgaggtcatgaaccagctgaaccaccgcaatctgatccagctgtatgcagccatcgagactccgcatgagatcgtcctgttcatggagatcgagggcggagagctcttcgagaggattgtggatgaggactaccatctgaccgaggtggacaccatggtgtttgtcaggcagatctgtgacgggatcctcttcatgcacaagatgagggttttgcacctggacctcaagccagagaacatcctgtgtgtcaacaccaccgggcatttggtgaagatcattgactttggcctggcacggaggtaccacaaccccaacgagaagctgaaggtgaactttgggaccccagagttcctgtcacctgaggtggtgaattatgaccaaatctccgataagacagacatgtggagtatgggggtgatcacctacatgctgctgagcggcctctcccccttcctgggagatgatgacacagagaccctaaacaacgttctatctggcaactggtactttgatgaagagacctttgaggccgtatcagacgaggccaaagactttgtctccaacctcatcgtcaaggaccaggcccggatgaacgctgcccagtgtctcgcccatccctggctcaacaacctggcggagaaagccaaacgctgtaaccgacgccttaagtcccagatcttgcttaagaaatacctcatgaagaggcgctggaagaaaaacttcattgctgtcagcgctgccaaccgcttcaagaagatcagcagctcgggggcactgatggctctgggggtctga

SEQ ID NO: 226 - protein, 595 aa, Homo sapiens; identical to SEQ ID NO: 214

SEQ ID NO: 227 - DNA, 1788 bp, Homo sapiens
  CDS (1)..(1785)
atggcgacagaaaatggagcagttgagctgggaattcagaacccatcaacagacaaggcacctaaaggtcccacaggtgaaagacccctggctgcagggaaagaccctggccccccagacccaaagaaagctccggatccacccaccctgaagaaagatgccaaagcccctgcctcagagaaaggggatggtaccctggcccaaccctcaactagcagccaaggccccaaaggagagggtgacaggggcggggggcccgcggagggcagtgctgggcccccggcagtcctgccccagcagactgcgacacctgagaccagcgtcaagaagcccaaggctgagcagggagcctcaggcagccaggatcctggaaagcccagggtgggcaagaaggcagcagagggccaagcagcagccaggaggggctcacctgcctttctgcatagccccagctgtcctgccatcatctccagttctgagaagctgctggccaagaagcccccaagcgaggcatcagagctcacctttgaaggggtgcccatgacccacagccccacggatcccaggccagccaaggcagaagaaggaaagaacatcctggcagagagccagaaggaagtgggagagaaaaccccaggccaggctggccaggctaagatgcaaggggacacctcgagggggattgagttccaggctgttccctcagagaaatccgaggtggggcaggccctctgtctcacagccagggaggaggactgcttccagattttggatgattgcccgccacctccggcccccttccctcaccgcatggtggagctgaggaccgggaatgtcagcagtgaattcagtatgaactccaaggaggcgctcggagggggcaagtttggggcagtctgtacctgcatggagaaagccacaggcctcaagctggcagccaaggtcatcaagaaacagactcccaaagacaaggaaatggtgttgctggagattgaggtcatgaaccagctgaaccaccgcaatctgatccagctgtatgcagccatcgagactccgcatgagatcgtcctgttcatggagatcgagggcggagagctcttcgagaggattgtggatgaggactaccatctgaccgaggtggacaccatggtgtttgtcaggcagatctgtgacgggatcctcttcatgcacaagatgagggttttgcacctggacctcaagccagagaacatcctgtgtgtcaacaccaccgggcatttggtgaagatcattgactttggcctggcacggaggtaccacaaccccaacgagaagctgaaggtgaactttgggaccccagagttcctgtcacctgaggtggtgaattatgaccaaatctccgataagacagacatgtggagtatgggggtgatcacctacatgctgctgagcggcctctcccccttcctgggagatgatgacacagagaccctaaacaacgttctatctggcaactggtactttgatgaagagacctttgaggccgtatcagacgaggccaaagactttgtctccaacctcatcgtcaaggaccaggcccggatgaacgctgcccagtgtctcgcccatccctggctcaacaacctggcggagaaagccaaacgctgtaaccgacgccttaagtcccagatcttgcttaagaaatacctcatgaagaggcgctggaagaaaaacttcattgctgtcagcgctgccaaccgcttcaagaagatcagcagctcgggggcactgatggctctgggggtctga

SEQ ID NO: 228 - protein, 595 aa, Homo sapiens
MATENGAVELGIQNPSTDKAPKGPTGERPLAAGKDPGPPDPKKAPDPPTLKKDAKAPASEKGDGTLAQPSTSSQGPKGEGDRGGGPAEGSAGPPAVLPQQTATPETSVKKPKAEQGASGSQDPGKPRVGKKAAEGQAAARRGSPAFLHSPSCPAIISSSEKLLAKKPPSEASELTFEGVPMTHSPTDPRPAKAEEGKNILAESQKEVGEKTPGQAGQAKMQGDTSRGIEFQAVPSEKSEVGQALCLTAREEDCFQILDDCPPPPAPFPHRMVELRTGNVSSEFSMNSKEALGGGKFGAVCTCMEKATGLKLAAKVIKKQTPKDKEMVLLEIEVMNQLNHRNLIQLYAAIETPHEIVLFMEIEGGELFERIVDEDYHLTEVDTMVFVRQICDGILFMHKMRVLHLDLKPENILCVNTTGHLVKIIDFGLARRYHNPNEKLKVNFGTPEFLSPEVVNYDQISDKTDMWSMGVITYMLLSGLSPFLGDDDTETLNNVLSGNWYFDEETFEAVSDEAKDFVSNLIVKDQARMNAAQCLAHPWLNNLAEKAKRCNRRLKSQILLKKYLMKRRWKKNFIAVSAANRFKKISSSGALMALGV

SEQ ID NO: 229 - DNA, 1788 bp, Homo sapiens
  CDS (1)..(1785)
atggcgacagaaaatggagcagttgagctgggaattcagaacccatcaacagacaaggcacctaaaggtcccacaggtgaaagacccctggctgcagggaaagaccctggccccccagacccaaagaaagctccggatccacccaccctgaagaaagatgccaaagcccctgcctcagagaaaggggatggtaccctggcccaaccctcaactagcagccaaggccccaaaggagagggtgacaggggcggggggcccgcggagggcagtgctgggcccccggcagccctgccccagcagactgcgacacctgagaccagcgtcaagaagcccaaggctgagcagggagtctcaggcagccaggatcctggaaagcccagggtgggcaagaaggcagcagagggccaagcagcagccaggaggggctcacctgcctttctgcatagccccagctgtcctgccatcatctccagttctgagaagctgctggccaagaagcccccaagcgaggcatcagagctcacctttgaaggggtgcccatgacccacagccccacggatcccaggccagccaaggcagaagaaggaaagaacatcctggcagagagccagaaggaagtgggagagaaaaccccaggccaggctggccaggctaagatgcaaggggacacctcgagggggattgagttccaggctgttccctcagagaaatccgaggtggggcaggccctctgtctcacagccagggaggaggactgcttccagattttggatgattgcccgccacctccggcccccttccctcaccgcatggtggagctgaggaccgggaatgtcagcagtgaattcagtatgaactccaaggaggcgctcggagggggcaagtttggggcagtctgtacctgcatggagaaagccacaggcctcaagctggcagccaaggtcatcaagaaacagactcccaaagacaaggaaatggtgttgctggagattgaggtcatgaaccagctgaaccaccgcaatctgatccagctgtatgcagccatcgagactccgcatgagatcgtcctgttcatggagatcgagggcggagagctcttcgagaggattgtggatgaggactaccatctgaccgaggtggacaccatggtgtttgtcaggcagatctgtgacgggatcctcttcatgcacaagatgagggttttgcacctggacctcaagccagagaacatcctgtgtgtcaacaccaccgggcatttggtgaagatcattgactttggcctggcacggaggtaccacaaccccaacgagaagctgaaggtgaactttgggaccccagagttcctgtcacctgaggtggtgaattatgaccaaatctccgataagacagacatgtggagtatgggggtgatcacctacatgctgctgagcggcctctcccccttcctgggagatgatgacacagagaccctaaacaacgttctatctggcaactggtactttgatgaagagacctttgaggccgtatcagacgaggccaaagactttgtctccaacctcatcgtcaaggaccaggcccggatgaacgctgcccagtgtctcgcccatccctggctcaacaacctggcggagaaagccaaacgctgtaaccgacgccttaagtcccagatcttgcttaagaaatacctcatgaagaggcgctggaagaaaaacttcattgctgtcagcgctgccaaccgcttcaagaagatcagcagctcgggggcactgatggctctgggggtctga

SEQ ID NO: 230 - protein, 595 aa, Homo sapiens
MATENGAVELGIQNPSTDKAPKGPTGERPLAAGKDPGPPDPKKAPDPPTLKKDAKAPASEKGDGTLAQPSTSSQGPKGEGDRGGGPAEGSAGPPAALPQQTATPETSVKKPKAEQGVSGSQDPGKPRVGKKAAEGQAAARRGSPAFLHSPSCPAIISSSEKLLAKKPPSEASELTFEGVPMTHSPTDPRPAKAEEGKNILAESQKEVGEKTPGQAGQAKMQGDTSRGIEFQAVPSEKSEVGQALCLTAREEDCFQILDDCPPPPAPFPHRMVELRTGNVSSEFSMNSKEALGGGKFGAVCTCMEKATGLKLAAKVIKKQTPKDKEMVLLEIEVMNQLNHRNLIQLYAAIETPHEIVLFMEIEGGELFERIVDEDYHLTEVDTMVFVRQICDGILFMHKMRVLHLDLKPENILCVNTTGHLVKIIDFGLARRYHNPNEKLKVNFGTPEFLSPEVVNYDQISDKTDMWSMGVITYMLLSGLSPFLGDDDTETLNNVLSGNWYFDEETFEAVSDEAKDFVSNLIVKDQARMNAAQCLAHPWLNNLAEKAKRCNRRLKSQILLKKYLMKRRWKKNFIAVSAANRFKKISSSGALMALGV

SEQ ID NO: 231 - DNA, 1788 bp, Homo sapiens
  CDS (1)..(1785)
atggcgacagaaaatggagcagttgagctgggaattcagaacccatcaacagacaaggcacctaaaggtcccacaggtgaaagacccctggctgcagggaaagaccctggccccccagacccaaagaaagctccggatccacccaccctgaagaaagatgccaaagcccctgcctcagagaaaggggatggtaccctggcccaaccctcaactagcagccaaggccccaaaggagagggtgacaggggcggggggcccgcggagggcagtgctgggcccccggcagccctgccccagcagactgcgacacctgagaccagcgtcaagaagcccaaggctgagcagggagcctcaggcagccaggatcctggaaagcccagggtgggcaagaaggcagcagagggccaagcagcagccaggaggggctcacctgcctttctgcatagccccagctgtcctgccatcatctccagttctgagaagctgctggccaagaagcccccaagcgaggcatcagagctcacctttgaaggggtgcccatgacccacagccccacggatcccaggccagccaaggcagaagaaggaaagaacatcctggcagagagccagaaggaagtgggagagaaaaccccaggccaggctggccaggctaagatgcaaggggacacctcgagggggattgagttccaggctgttccctcagagaaatccgaggtggggcaggccctctgtctcacagccagggaggaggactgcttccagattttggatgattgcccgccacctccggcccccttccctcaccgcatggtggagctgaggaccgggaatgtcagcagtgaattcagtatgaactccaaggaggcgctcggagggggcaagtttggggcagtctgtacctgcatggagaaagccacaggcctcaagctggcagccaaggtcatcaagaaacagactcccaaagacaaggaaatggtgttgctggagattgaggtcatgaaccagctgaaccaccgcaatctgatccagctgtatgcagccatcgagactccgcatgagatcgtcctgttcatggagatcgagggcggagagctcttcgagaggattgtggatgaggactaccatctgaccgaggtggacaccatggtgtttgtcaggcagatctgtgacgggatcctcttcatgcacaagatgagggttttgcacctggacctcaagccagagaacatcctgtgtgtcaacacctccgggcatttggtgaagatcattgactttggcctggcacggaggtaccacaaccccaacgagaagctgaaggtgaactttgggaccccagagttcctgtcacctgaggtggtgaattatgaccaaatctccgataagacagacatgtggagtatgggggtgatcacctacatgctgctgagcggcctctcccccttcctgggagatgatgacacagagaccctaaacaacgttctatctggcaactggtactttgatgaagagacctttgaggccgtatcagacgaggccaaagactttgtctccaacctcatcgtcaaggaccaggcccggatgaacgctgcccagtgtctcgcccatccctggctcaacaacctggcggagaaagccaaacgctgtaaccgacgccttaagtcccagatcttgcttaagaaatacctcatgaagaggcgctggaagaaaaacttcattgctgtcagcgctgccaaccgcttcaagaagatcagcagctcgggggcactgatggctctgggggtctga

SEQ ID NO: 232 - protein, 595 aa, Homo sapiens
MATENGAVELGIQNPSTDKAPKGPTGERPLAAGKDPGPPDPKKAPDPPTLKKDAKAPASEKGDGTLAQPSTSSQGPKGEGDRGGGPAEGSAGPPAALPQQTATPETSVKKPKAEQGASGSQDPGKPRVGKKAAEGQAAARRGSPAFLHSPSCPAIISSSEKLLAKKPPSEASELTFEGVPMTHSPTDPRPAKAEEGKNILAESQKEVGEKTPGQAGQAKMQGDTSRGIEFQAVPSEKSEVGQALCLTAREEDCFQILDDCPPPPAPFPHRMVELRTGNVSSEFSMNSKEALGGGKFGAVCTCMEKATGLKLAAKVIKKQTPKDKEMVLLEIEVMNQLNHRNLIQLYAAIETPHEIVLFMEIEGGELFERIVDEDYHLTEVDTMVFVRQICDGILFMHKMRVLHLDLKPENILCVNTSGHLVKIIDFGLARRYHNPNEKLKVNFGTPEFLSPEVVNYDQISDKTDMWSMGVITYMLLSGLSPFLGDDDTETLNNVLSGNWYFDEETFEAVSDEAKDFVSNLIVKDQARMNAAQCLAHPWLNNLAEKAKRCNRRLKSQILLKKYLMKRRWKKNFIAVSAANRFKKISSSGALMALGV

SEQ ID NO: 233 - DNA, 1788 bp, Homo sapiens
  CDS (1)..(1785)
atggcgacagaaaatggagcagttgagctgggaattcagaacccatcaacagacaaggcacctaaaggtcccacaggtgaaagacccctggctgcagggaaagaccctggccccccagacccaaagaaagctccggatccacccaccctgaagaaagatgccaaagcccctgcctcagagaaaggggatggtaccctggcccaaccctcaactagcagccaaggccccaaaggagagggtgacaggggcggggggcccgcggagggcagtgctgggcccccggcagccctgccccagcagactgcgacacctgagaccagcgtcaagaagcccaaggctgagcagggagcctcaggcagccaggatcctggaaagcccagggtgggcaagaaggcagcagagggccaagcagcagccaggaggggctcacctgcctttctgcatagccccagctgtcctgccatcatctccagttctgagaagctgctggccaagaagcccccaagcgaggcatcagagctcacctttgaaggggtgcccatgacccacagccccacggatcccaggccagccaaggcagaagaaggaaagaacatcctggcagagagccagaaggaagtgggagagaaaaccccaggccaggctggccaggctaagatgcaaggggacacctcgagggggattgagttccaggctgttccctcagagaaatccgaggtggggcaggccctctgtctcacagccagggaggaggactgcttccagattttggatgattgcccgccacctccggcccccttccctcaccgcatggtggagctgaggaccgggaatgtcagcagtgaattcagtatgaactccaaggaggcgctcggagggggcaagtttggggcagtctgtacctgcatggagaaagccacaggcctcaagctggcagccaaggtcatcaagaaacagactcccaaagacaaggaaatggtgttgctggagattgaggtcatgaaccagctgaaccaccgcaatctgatccagctgtatgcagccatcgagactccgcatgagatcgtcctgttcatggagatcgagggcggagagctcttcgagaggattgtggatgaggactaccatctgaccgaggtggacaccatggtgtttgtcaggcagatctgtgacgggatcctcttcatgcacaagatgagggttttgcacctggacctcaagccagagaacatcctgtgtgtcaacaccaccgggcatttggtgaagatcattgactttggcctggcacggaggtaccacaaccccaacgagaagctgaaggtgaactttgggaccccagagttcctgtcacctgaggcggtgaattatgaccaaatctccgataagacagacatgtggagtatgggggtgatcacctacatgctgctgagcggcctctcccccttcctgggagatgatgacacagagaccctaaacaacgttctatctggcaactggtactttgatgaagagacctttgaggccgtatcagacgaggccaaagactttgtctccaacctcatcgtcaaggaccaggcccggatgaacgctgcccagtgtctcgcccatccctggctcaacaacctggcggagaaagccaaacgctgtaaccgacgccttaagtcccagatcttgcttaagaaatacctcatgaagaggcgctggaagaaaaacttcattgctgtcagcgctgccaaccgcttcaagaagatcagcagctcgggggcactgatggctctgggggtctga

SEQ ID NO: 234 - protein, 595 aa, Homo sapiens
MATENGAVELGIQNPSTDKAPKGPTGERPLAAGKDPGPPDPKKAPDPPTLKKDAKAPASEKGDGTLAQPSTSSQGPKGEGDRGGGPAEGSAGPPAALPQQTATPETSVKKPKAEQGASGSQDPGKPRVGKKAAEGQAAARRGSPAFLHSPSCPAIISSSEKLLAKKPPSEASELTFEGVPMTHSPTDPRPAKAEEGKNILAESQKEVGEKTPGQAGQAKMQGDTSRGIEFQAVPSEKSEVGQALCLTAREEDCFQILDDCPPPPAPFPHRMVELRTGNVSSEFSMNSKEALGGGKFGAVCTCMEKATGLKLAAKVIKKQTPKDKEMVLLEIEVMNQLNHRNLIQLYAAIETPHEIVLFMEIEGGELFERIVDEDYHLTEVDTMVFVRQICDGILFMHKMRVLHLDLKPENILCVNTTGHLVKIIDFGLARRYHNPNEKLKVNFGTPEFLSPEAVNYDQISDKTDMWSMGVITYMLLSGLSPFLGDDDTETLNNVLSGNWYFDEETFEAVSDEAKDFVSNLIVKDQARMNAAQCLAHPWLNNLAEKAKRCNRRLKSQILLKKYLMKRRWKKNFIAVSAANRFKKISSSGALMALGV

SEQ ID NO: 235 - DNA, 1788 bp, Homo sapiens
  CDS (1)..(1785)
atggcgacagaaaatggagcagttgagctgggaattcagaacccatcaacagacaaggcacctaaaggtcccacaggtgaaagacccctggctgcagggaaagaccctggccccccagacccaaagaaagctccggatccacccaccctgaagaaagatgccaaagcccctgcctcagagaaaggggatggtaccctggcccaaccctcaactagcagccaaggccccaaaggagagggtgacaggggcggggggcccgcggagggcagtgctgggcccccggcagccctgccccagcagactgcgacacctgagaccagcgtcaagaagcccaaggctgagcagggagcctcaggcagccaggatcctggaaagcccagggtgggcaagaaggcagcagagggccaagcagcagccaggaggggctcacctgcctttctgcatagccccagctgtcctgccatcatctccagttctgagaagctgctggccaagaagcccccaagcgaggcatcagagctcacctttgaaggggtgcccatgacccacagccccacggatcccaggccagccaaggcagaagaaggaaagaacatcctggcagagagccagaaggaagtgggagagaaaaccccaggccaggctggccaggctaagatgcaaggggacacctcgagggggattgagttccaggctgttccctcagagaaatccgaggtggggcaggccctctgtctcacagccagggaggaggactgcttccagattttggatgattgcccgccacctccggcccccttccctcaccgcatggtggagctgaggaccgggaatgtcagcagtgaattcagtatgaactccaaggaggcgctcggagggggcaagtttggggcagtctgtacctgcatggagaaagccacaggcctcaagctggcagccaaggtcatcaagaaacagactcccaaagacaaggaaatggtgttgctggagattgaggtcatgaaccagctgaaccaccgcaatctgatccagctgtatgcagccatcgagactccgcatgagatcgtcctgttcatggagatcgagggcggagagctcttcgagaggattgtggatgaggactaccatctgaccgaggtggacaccatggtgtttgtcaggcagatctgtgacgggatcctcttcatgcacaagatgagggttttgcacctggacctcaagccagagaacatcctgtgtgtcaacaccaccgggcatttggtgaagatcattgactttggcctggcacggaggtaccacaaccccaacgagaagctgaaggtgaactttgggaccccagagttcctgtcacctgaggtggtgaattatgaccaaatctccgataagacaggcatgtggagtatgggggtgatcacctacatgctgctgagcggcctctcccccttcctgggagatgatgacacagagaccctaaacaacgttctatctggcaactggtactttgatgaagagacctttgaggccgtatcagacgaggccaaagactttgtctccaacctcatcgtcaaggaccaggcccggatgaacgctgcccagtgtctcgcccatccctggctcaacaacctggcggagaaagccaaacgctgtaaccgacgccttaagtcccagatcttgcttaagaaatacctcatgaagaggcgctggaagaaaaacttcattgctgtcagcgctgccaaccgcttcaagaagatcagcagctcgggggcactgatggctctgggggtctga

SEQ ID NO: 236 - protein, 595 aa, Homo sapiens
MATENGAVELGIQNPSTDKAPKGPTGERPLAAGKDPGPPDPKKAPDPPTLKKDAKAPASEKGDGTLAQPSTSSQGPKGEGDRGGGPAEGSAGPPAALPQQTATPETSVKKPKAEQGASGSQDPGKPRVGKKAAEGQAAARRGSPAFLHSPSCPAIISSSEKLLAKKPPSEASELTFEGVPMTHSPTDPRPAKAEEGKNILAESQKEVGEKTPGQAGQAKMQGDTSRGIEFQAVPSEKSEVGQALCLTAREEDCFQILDDCPPPPAPFPHRMVELRTGNVSSEFSMNSKEALGGGKFGAVCTCMEKATGLKLAAKVIKKQTPKDKEMVLLEIEVMNQLNHRNLIQLYAAIETPHEIVLFMEIEGGELFERIVDEDYHLTEVDTMVFVRQICDGILFMHKMRVLHLDLKPENILCVNTTGHLVKIIDFGLARRYHNPNEKLKVNFGTPEFLSPEVVNYDQISDKTGMWSMGVITYMLLSGLSPFLGDDDTETLNNVLSGNWYFDEETFEAVSDEAKDFVSNLIVKDQARMNAAQCLAHPWLNNLAEKAKRCNRRLKSQILLKKYLMKRRWKKNFIAVSAANRFKKISSSGALMALGV

SEQ ID NO: 237 - DNA, 1788 bp, Homo sapiens
  CDS (1)..(1785)
atggcgacagaaaatggagcagttgagctgggaattcagaacccatcaacagacaaggcacctaaaggtcccacaggtgaaagacccctggctgcagggaaagaccctggccccccagacccaaagaaagctccggatccacccaccctgaagaaagatgccaaagcccctgcctcagagaaaggggatggtaccctggcccaaccctcaactagcagccaaggccccaaaggagagggtgacaggggcggggggcccgcggagggcagtgctgggcccccggcagccctgccccagcagactgcgacacctgagaccagcgtcaagaagcccaaggctgagcagggagcctcaggcagccaggatcctggaaagcccagggtgggcaagaaggcagcagagggccaagcagcagccaggaggggctcacctgcctttctgcatagccccagctgtcctgccatcatctccagttctgagaagctgctggccaagaagcccccaagcgaggcatcagagctcacctttgaaggggtgcccatgacccacagccccacggatcccaggccagccaaggcagaagaaggaaagaacatcctggcagagagccagaaggaagtgggagagaaaaccccaggccaggctggccaggctaagatgcaaggggacacctcgagggggattgagttccaggctgttccctcagagaaatccgaggtggggcaggccctctgtctcacagccagggaggaggactgcttccagattttggatgattgcccgccacctccggcccccttccctcaccgcatggtggagctgaggaccgggaatgtcagcagtgaattcagtatgaactccaaggaggcgctcggagggggcaagtttggggcagtctgtacctgcatggagaaagccacaggcctcaagctggcagccaaggtcatcaagaaacagactcccaaagacaaggaaatggtgttgctggagattgaggtcatgaaccagctgaaccaccgcaatctgatccagctgtatgcagccatcgagactccgcatgagatcgtcctgttcatggagatcgagggcggagagctcttcgagaggattgtggatgaggactaccatctgaccgaggtggacaccatggtgtttgtcaggcagatctgtgacgggatcctcttcatgcacaagatgagggttttgcacctggacctcaagccagagaacatcctgtgtgtcaacaccaccgggcatttggtgaagatcattgactttggcctggcacggaggtaccacaaccccaacgagaagctgaaggtgaactttgggaccccagagttcctgtcacctgaggtggtgaattatgaccaaatctccgataagacagacatgtggagtatgggggtgatcacctacatgctgctgagcggcctctcccccttcctgggagatgatgacacagagaccctaaacaacgttctatctggcaactggtactttgatgaagggacctttgaggccgtatcagacgaggccaaagactttgtctccaacctcatcgtcaaggaccaggcccggatgaacgctgcccagtgtctcgcccatccctggctcaacaacctggcggagaaagccaaacgctgtaaccgacgccttaagtcccagatcttgcttaagaaatacctcatgaagaggcgctggaagaaaaacttcattgctgtcagcgctgccaaccgcttcaagaagatcagcagctcgggggcactgatggctctgggggtctga

SEQ ID NO: 238 - protein, 595 aa, Homo sapiens
MATENGAVELGIQNPSTDKAPKGPTGERPLAAGKDPGPPDPKKAPDPPTLKKDAKAPASEKGDGTLAQPSTSSQGPKGEGDRGGGPAEGSAGPPAALPQQTATPETSVKKPKAEQGASGSQDPGKPRVGKKAAEGQAAARRGSPAFLHSPSCPAIISSSEKLLAKKPPSEASELTFEGVPMTHSPTDPRPAKAEEGKNILAESQKEVGEKTPGQAGQAKMQGDTSRGIEFQAVPSEKSEVGQALCLTAREEDCFQILDDCPPPPAPFPHRMVELRTGNVSSEFSMNSKEALGGGKFGAVCTCMEKATGLKLAAKVIKKQTPKDKEMVLLEIEVMNQLNHRNLIQLYAAIETPHEIVLFMEIEGGELFERIVDEDYHLTEVDTMVFVRQICDGILFMHKMRVLHLDLKPENILCVNTTGHLVKIIDFGLARRYHNPNEKLKVNFGTPEFLSPEVVNYDQISDKTDMWSMGVITYMLLSGLSPFLGDDDTETLNNVLSGNWYFDEGTFEAVSDEAKDFVSNLIVKDQARMNAAQCLAHPWLNNLAEKAKRCNRRLKSQILLKKYLMKRRWKKNFIAVSAANRFKKISSSGALMALGV

SEQ ID NO: 239 - DNA, 1788 bp, Homo sapiens
  CDS (1)..(1785)
atggcgacagaaaatggagcagttgagctgggaattcagaacccatcaacagacaaggcacctaaaggtcccacaggtgaaagacccctggctgcagggaaagaccctggccccccagacccaaagaaagctccggatccacccaccctgaagaaagatgccaaagcccctgcctcagagaaaggggatggtaccctggcccaaccctcaactagcagccaaggccccaaaggagagggtgacaggggcggggggcccgcggagggcagtgctgggcccccggcagccctgccccagcagactgcgacacctgagaccagcgtcaagaagcccaaggctgagcagggagcctcaggcagccaggatcctggaaagcccagggtgggcaagaaggcagcagagggccaagcagcagccaggaggggctcacctgcctttctgcatagccccagctgtcctgccatcatctccagttctgagaagctgctggccaagaagcccccaagcgaggcatcagagctcacctttgaaggggtgcccatgacccacagccccacggatcccaggccagccaaggcagaagaaggaaagaacatcctggcagagagccagaaggaagtgggagagaaaaccccaggccaggctggccaggctaagatgcaaggggacacctcgagggggattgagttccaggctgttccctcagagaaatccgaggtggggcaggccctctgtctcacagccagggaggaggactgcttccagattttggatgattgcccgccacctccggcccccttccctcaccgcatggtggagctgaggaccgggaatgtcagcagtgaattcagtatgaactccaaggaggcgctcggagggggcaagtttggggcagtctgtacctgcatggagaaagccacaggcctcaagctggcagccaaggtcatcaagaaacagactcccaaagacaaggaaatggtgttgctggagattgaggtcatgaaccagctgaaccaccgcaatctgatccagctgtatgcagccatcgagactccgcatgagatcgtcctgttcatggagatcgagggcggagagctcttcgagaggattgtggatgaggactaccatctgaccgaggtggacaccatggtgtttgtcaggcagatctgtgacgggatcctcttcatgcacaagatgagggttttgcacctggacctcaagccagagaacatcctgtgtgtcaacaccaccgggcatttggtgaagatcattgactttggcctggcacggaggtaccacaaccccaacgagaagctgaaggtgaactttgggaccccagagttcctgtcacctgaggtggtgaattatgaccaaatctccgataagacagacatgtggagtatgggggtgatcacctacatgctgctgagcggcctctcccccttcctgggagatgatgacacagagaccctaaacaacgttctatctggcaactggtactttgatgaagagacctttgaggccgtatcagacgaggccaaagactttgtctccaacctcatcgtcaaggaccaggcccggatgaacgctgcccagtgtctcgcccatccctggctcaacaacctggcggagaaagccaaacgctgtaaccgacgccttaagtcccagatcttgtttaagaaatacctcatgaagaggcgctggaagaaaaacttcattgctgtcagcgctgccaaccgcttcaagaagatcagcagctcgggggcactgatggctctgggggtctga

SEQ ID NO: 240 - protein, 595 aa, Homo sapiens
MATENGAVELGIQNPSTDKAPKGPTGERPLAAGKDPGPPDPKKAPDPPTLKKDAKAPASEKGDGTLAQPSTSSQGPKGEGDRGGGPAEGSAGPPAALPQQTATPETSVKKPKAEQGASGSQDPGKPRVGKKAAEGQAAARRGSPAFLHSPSCPAIISSSEKLLAKKPPSEASELTFEGVPMTHSPTDPRPAKAEEGKNILAESQKEVGEKTPGQAGQAKMQGDTSRGIEFQAVPSEKSEVGQALCLTAREEDCFQILDDCPPPPAPFPHRMVELRTGNVSSEFSMNSKEALGGGKFGAVCTCMEKATGLKLAAKVIKKQTPKDKEMVLLEIEVMNQLNHRNLIQLYAAIETPHEIVLFMEIEGGELFERIVDEDYHLTEVDTMVFVRQICDGILFMHKMRVLHLDLKPENILCVNTTGHLVKIIDFGLARRYHNPNEKLKVNFGTPEFLSPEVVNYDQISDKTDMWSMGVITYMLLSGLSPFLGDDDTETLNNVLSGNWYFDEETFEAVSDEAKDFVSNLIVKDQARMNAAQCLAHPWLNNLAEKAKRCNRRLKSQILFKKYLMKRRWKKNFIAVSAANRFKKISSSGALMALGV

SEQ ID NO: 241 - DNA, 1788 bp, Homo sapiens
  CDS (1)..(1785)
atggcgacagaaaatggagcagttgagctgggaattcagaacccatcaacagacaaggcacctaaaggtcccacaggtgaaagacccctggctgcagggaaagaccctggccccccagacccaaagaaagctccggatccacccaccctgaagaaagatgccaaagcccctgcctcagagaaaggggatggtaccctggcccaaccctcaactagcagccaaggccccaaaggagagggtgacaggggcggggggcccgcggagggcagtgctgggcccccggcagccctgccccagcagactgcgacacctgagaccagcgtcaagaagcccaaggctgagcagggagcctcaggcagccaggatcctggaaagcccagggtgggcaagaaggcagcagagggccaagcagcagccaggaggggctcacctgcctttctgcatagccccagctgtcctgccatcatctccagttctgagaagctgctggccaagaagcccccaagcgaggcatcagagctcacctttgaaggggtgcccatgacccacagccccacggatcccaggccagccaaggcagaagaaggaaagaacatcctggcagagagccagaaggaagtgggagagaaaaccccaggccaggctggccaggctaagatgcaaggggacacctcgagggggattgagttccaggctgttccctcagagaaatccgaggtggggcaggccctctgtctcacagccagggaggaggactgcttccagattttggatgattgcccgccacctccggcccccttccctcaccgcatggtggagctgaggaccgggaatgtcagcagtgaattcagtatgaactccaaggaggcgctcggagggggcaagtttggggcagtctgtacctgcatggagaaagccacaggcctcaagctggcagccaaggtcatcaagaaacagactcccaaagacaaggaaatggtgttgctggagattgaggtcatgaaccagctgaaccaccgcaatctgatccagctgtatgcagccatcgagactccgcatgagatcgtcctgttcatggagatcgagggcggagagctcttcgagaggattgtggatgaggactaccatctgaccgaggtggacaccatggtgtttgtcaggcagatctgtgacgggatcctcttcatgcacaagatgagggttttgcacctggacctcaagccagagaacatcctgtgtgtcaacaccaccgggcatttggtgaagatcattgactttggcctggcacggaggtaccacaaccccaacgagaagctgaaggtgaactttgggaccccagagttcctgtcacctgaggtggtgaattatgaccaaatctccgataagacagacatgtggagtatgggggtgatcacctacatgctgctgagcggcctctcccccttcctgggagatgatgacacagagaccctaaacaacgttctatctggcaactggtactttgatgaagagacctttgaggccgtatcagacgaggccaaagactttgtctccaacctcatcgtcaaggaccaggcccggatgaacgctgcccagtgtctcgcccatccctggctcaacaacctggcggagaaagccaaacgctgtaaccgacgccttaagtcccagatcttgcttaagaaatacctcatgaagaggcgctggaagaaaaacttcattgctggcagcgctgccaaccgcttcaagaagatcagcagctcgggggcactgatggctctgggggtctga

SEQ ID NO: 242 - protein, 595 aa, Homo sapiens
MATENGAVELGIQNPSTDKAPKGPTGERPLAAGKDPGPPDPKKAPDPPTLKKDAKAPASEKGDGTLAQPSTSSQGPKGEGDRGGGPAEGSAGPPAALPQQTATPETSVKKPKAEQGASGSQDPGKPRVGKKAAEGQAAARRGSPAFLHSPSCPAIISSSEKLLAKKPPSEASELTFEGVPMTHSPTDPRPAKAEEGKNILAESQKEVGEKTPGQAGQAKMQGDTSRGIEFQAVPSEKSEVGQALCLTAREEDCFQILDDCPPPPAPFPHRMVELRTGNVSSEFSMNSKEALGGGKFGAVCTCMEKATGLKLAAKVIKKQTPKDKEMVLLEIEVMNQLNHRNLIQLYAAIETPHEIVLFMEIEGGELFERIVDEDYHLTEVDTMVFVRQICDGILFMHKMRVLHLDLKPENILCVNTTGHLVKIIDFGLARRYHNPNEKLKVNFGTPEFLSPEVVNYDQISDKTDMWSMGVITYMLLSGLSPFLGDDDTETLNNVLSGNWYFDEETFEAVSDEAKDFVSNLIVKDQARMNAAQCLAHPWLNNLAEKAKRCNRRLKSQILLKKYLMKRRWKKNFIAGSAANRFKKISSSGALMALGV

SEQ ID NO: 243 - DNA, 1042 bp, Homo sapiens
  CDS (207)..(1007)
agagtgctctaaacccagctcggcctttgctgtattagacagaagcacctcattcatatccctggggcccctgatggtgcagtggtctggctgtggtctgcacaccagctattctgttttgttttgttttgttttttcctacctttttccaatcctcacaccttctgatcaacagccccagtagggtttaaaggtcctagagctacatgggatttaggtttctgggcacagccaattctgccacttttgagacttcccttccccttccacttgcccctctctggttctctgccaccagtccagaagaactgagtgtcgtgctggggaccaacgacttaactagcccatccatggaaataaaggaggtcgccagcatcattcttcacaaagactttaagagagccaacatggacaatgacattgccttgctgctgctggcttcgcccatcaagctcgatgacctgaaggtgcccatctgcctccccacgcagcccggccctgccacatggcgcgaatgctgggtggcaggttggggccagaccaatgctgctgacaaaaactctgtgaaaacggatctgatgaaagtgccaatggtcatcatggactgggaggagtgttcaaagatgtttccaaaacttaccaaaaatatgctgtgtgccggatacaagaatgagagctatgatgcctgcaagggtgacagtggggggcctctggtctgcaccccagagcctggtgagaagtggtaccaggtgggcatcatcagctggggaaagagctgtggagagaagaacaccccagggatatacacctcgttggtgaactacaacctctggatcgagaaagtgacccagctagagggcaggcccttcaatgcagagaaaaggaggacttctgtcaaacagaaacctatgggctccccagtctcgggagtcccagagccaggcagccccagatcctggctcctgctctgtcccctgtcccatgtgttgttcagagctattttgtactgataataaaatagaggctattctttcaaccgaaa

SEQ ID NO: 244 - protein, 267 aa, Homo sapiens
MGFRFLGTANSATFETSLPLPLAPLWFSATSPEELSVVLGTNDLTSPSMEIKEVASIILHKDFKRANMDNDIALLLLASPIKLDDLKVPICLPTQPGPATWRECWVAGWGQTNAADKNSVKTDLMKVPMVIMDWEECSKMFPKLTKNMLCAGYKNESYDACKGDSGGPLVCTPEPGEKWYQVGIISWGKSCGEKNTPGIYTSLVNYNLWIEKVTQLEGRPFNAEKRRTSVKQKPMGSPVSGVPEPGSPRSWLLLCPLSHVLFRAILY

SEQ ID NO: 245 - DNA, 888 bp, Homo sapiens
  CDS (79)..(879)
ttgttttttcctacctttttccaatcctcacaccttctgatcaacagccccagtagggtttaaaggtcctagagctacatgggatttaggtttctgggcacagccaattctgccacttttgagacttcccttccccttccacttgcccctctctggttctctgccaccagtccagaagaactgagtgtcgtgctggggaccaacgacttaactagcccatccatggaaataaaggaggtcgccagcatcattcttcacaaagactttaagagagccaacatggacaatgacattgccttgctgctgctggcttcgcccatcaagctcgatgacctgaaggtgcccatctgcctccccacgcagcccggccctgccacatggcgcgaatgctgggtggcaggttggggccagaccaatgctgctgacaaaaactctgtgaaaacggatctgatgaaagcgccaatggtcatcatggactgggaggagtgttcaaagatgtttccaaaacttaccaaaaatatgctgtgtgccggatacaagaatgagagctatgatgcctgcaagggtgacagtggggggcctctggtctgcaccccagagcctggtgagaagtggtaccaggtgggcatcataacctggggaaagagctgtggagagaagaacaccccagggatatacacctcgttggtgaactacaacctctggatcgagaaagtgacccagctagagggcaggcccttcaatgcagagaaaaggaggacttctgtcaaacagaaacctatgggctccccagtctcgggagtcccagagccaggcagccccagatcctggctcccgctctgtcccctgtcccatgtgttgttcagagctattttgtactgattataa

SEQ ID NO: 246 - protein, 267 aa, Homo sapiens
MGFRFLGTANSATFETSLPLPLAPLWFSATSPEELSVVLGTNDLTSPSMEIKEVASIILHKDFKRANMDNDIALLLLASPIKLDDLKVPICLPTQPGPATWRECWVAGWGQTNAADKNSVKTDLMKAPMVIMDWEECSKMFPKLTKNMLCAGYKNESYDACKGDSGGPLVCTPEPGEKWYQVGIITWGKSCGEKNTPGIYTSLVNYNLWIEKVTQLEGRPFNAEKRRTSVKQKPMGSPVSGVPEPGSPRSWLPLCPLSHVLFRAILY

SEQ ID NO: 247 - DNA, 816 bp, Homo sapiens
  CDS (1)..(816)
ggatccaccatgggatttaggtttctgggcacagccaattctgccgcttttgagacttcccttccccttccacttgcccctctctggttctctgccaccagtccagaagaactgagtgtcgtgctggggaccaacgacttaactagcccatccatggaaataaaggaggtcgccagcatcattcttcacaaagactttaagagagccaacatggacaatgacattgccttgctgctgctggcttcgcccatcaagctcgatgacctgaaggtgcccatctgcctccccacgcagcccggccctgccacatggcgcgaatgctgggtggcaggttggggccagaccaatgctgctgacaaaaactctgtgaaaacggatctgatgaaagcgccaatggtcatcatggactgggaggagtgttcaaagatgtttccaaaacttaccaaaaatatgctgtgtgccggatacaagaatgagagctatgatgcctgcaagggtgacagtggggggcctctggtctgcaccccagagcctggtgagaagtggtaccaggtgggcatcataagctggggaaagagctgtggagagaagaacaccccagggatatacacctcgttggtgaactacaacctctggatcgagaaagtgacccagctagagggcaggcccttcaatgcagagaaaaggaggacttctgtcaaacagaaacctatgggctccccagtctcgggagtcccagagccaggcagccccagatcctggctcctgctctgtcccctgtcccatgtgttgttcagagctattttgtacctcgag

SEQ ID NO: 248 - protein, 272 aa, Homo sapiens
GSTMGFRFLGTANSAAFETSLPLPLAPLWFSATSPEELSVVLGTNDLTSPSMEIKEVASIILHKDFKRANMDNDIALLLLASPIKLDDLKVPICLPTQPGPATWRECWVAGWGQTNAADKNSVKTDLMKAPMVIMDWEECSKMFPKLTKNMLCAGYKNESYDACKGDSGGPLVCTPEPGEKWYQVGIISWGKSCGEKNTPGIYTSLVNYNLWIEKVTQLEGRPFNAEKRRTSVKQKPMGSPVSGVPEPGSPRSWLLLCPLSHVLFRAILYLE

SEQ ID NO: 249 - DNA, 816 bp, Homo sapiens
  CDS (1)..(816)
ggatccaccatgggatttaggtttctgggcacagccaattctgccgcttttgagacttcccttccccttccacttgcccctctctggttctctgccaccagtccagaagaactgagtgtcgtgctggggaccaacgacttaactagcccatccatggaaataaaggaggtcgccagcatcattcttcacaaagactttaagagagccaacatggacaatgacattgccttgctgctgctggcttcgcccatcaagctcgatgacctgaaggtgcccatctgcctccccacgcagcccggccctgccacatggcgcgaatgctgggtggcaggttggggccagaccaatgctgctgacaaaaactctgtgaaaacggatctgatgaaagcgccaatggtcatcatggactgggaggagtgttcaaagatgtttccaaaacttaccaaaaatatgctgcgtgccggatacaagaatgagagctatgatgcctgcaagggtgacagtggggggcctctggtctgcaccccagagcctggtgagaagtggtaccaggtgggcatcataagctggggaaagagctgtggagagaagaacaccccagggatatacacctcgttggtgaactacaacctctggatcgagaaagtgacccagctagagggcaggcccttcaatgcagagaaaaggaggacttctgtcaaacagaaacctatgggctccccagtctcgggagtcccagagccaggcagccccagatcctggctcctgctctgtcccctgtcccatgtgttgttcagagctattttgtacctcgag

SEQ ID NO: 250 - protein, 272 aa, Homo sapiens
GSTMGFRFLGTANSAAFETSLPLPLAPLWFSATSPEELSVVLGTNDLTSPSMEIKEVASIILHKDFKRANMDNDIALLLLASPIKLDDLKVPICLPTQPGPATWRECWVAGWGQTNAADKNSVKTDLMKAPMVIMDWEECSKMFPKLTKNMLRAGYKNESYDACKGDSGGPLVCTPEPGEKWYQVGIISWGKSCGEKNTPGIYTSLVNYNLWIEKVTQLEGRPFNAEKRRTSVKQKPMGSPVSGVPEPGSPRSWLLLCPLSHVLFRAILYLE

SEQ ID NO: 251 - DNA, 729 bp, Homo sapiens
  CDS (1)..(729)
ggatccgccaccagtccagaagaactgagtgtcgtgctggggaccaacgacttaactagcccatccatggaaataaaggaggtcgccagcatcattcttcacaaagactttaagagagccaacatggacaatgacattgccttgctgctgctggcttcgcccatcaagctcgatgacctgaaggtgcccatctgcctccccacgcagcccggccctgccacatggcgcgaatgctgggtggcaggttggggccagaccaatgctgctgacaaaaactctgtgaaaacggatctgatgaaagcgccaatggtcatcatggactgggaggagtgttcaaagatgtttccaaaacttaccaaaaatatgctgtgtgccggatacaagaatgagagctatgatgcctgcaagggtgacagtggggggcctctggtctgcaccccagagcctggtgagaagtggtaccaggtgggcatcatcagctggggaaagagctgtggagagaagaacaccccagggatatacacctcgttggtgaactacaacctctggatcgagaaagtgacccagctagagggcaggcccttcaatgcagagaaaaggaggacttctgtcaaacagaaacctatgggctccccagtctcgggagtcccagagccaggcagccccagatcctggctcctgctctgtcccctgtcccatgtgttgttcagagctattttgtacctcgag

SEQ ID NO: 252 - protein, 243 aa, Homo sapiens
GSATSPEELSVVLGTNDLTSPSMEIKEVASIILHKDFKRANMDNDIALLLLASPIKLDDLKVPICLPTQPGPATWRECWVAGWGQTNAADKNSVKTDLMKAPMVIMDWEECSKMFPKLTKNMLCAGYKNESYDACKGDSGGPLVCTPEPGEKWYQVGIISWGKSCGEKNTPGIYTSLVNYNLWIEKVTQLEGRPFNAEKRRTSVKQKPMGSPVSGVPEPGSPRSWLLLCPLSHVLFRAILYLE

SEQ ID NO: 253 - DNA, 729 bp, Homo sapiens
  CDS (1)..(729)
ggatccgccaccagtccagaagaactgagtgtcgtgctggggaccaacgacttaactagcccatccatggaaataaaggaggtcgccagcatcattcttcacaaagactttaagagagccaacatggacaatgacattgccttgctgctgctggcttcgcccatcaagctcgatgacctgaaggtgcccatctgcctccccacgcagcccggccctgccacatggcgcgaatgctgggtggcaggttggggccagaccaatgctgctgacaaaaactctgtgaaaacggatctgatgaaagtgccaatggtcatcatggactgggaggagtgttcaaagatgtttccaaaacttaccaaaaatatgctgtgtgccggatacaagaatgagagctatgatgcctgcaagggtgacagtggggggcctctggtctgcaccccagagcctggtgagaagtggtaccaggtgggcatcatcagctggggaaagagctgtggagagaagaacaccccagggatatacacctcgttggtgaactacaacctctggatcgagaaagtgacccagctagagggcaggcccttcaatgcagagaaaaggaggacttctgtcaaacagaaacctatgggctccccagtctcgggagtcccagagccaggcagccccagatcctggctcctgctctgtcccctgtcccatgtgttgttcagagctattttgtacctcgag

SEQ ID NO: 254 - protein, 243 aa, Homo sapiens
GSATSPEELSVVLGTNDLTSPSMEIKEVASIILHKDFKRANMDNDIALLLLASPIKLDDLKVPICLPTQPGPATWRECWVAGWGQTNAADKNSVKTDLMKVPMVIMDWEECSKMFPKLTKNMLCAGYKNESYDACKGDSGGPLVCTPEPGEKWYQVGIISWGKSCGEKNTPGIYTSLVNYNLWIEKVTQLEGRPFNAEKRRTSVKQKPMGSPVSGVPEPGSPRSWLLLCPLSHVLFRAILYLE

SEQ ID NO: 255 - DNA, 852 bp, Homo sapiens
  CDS (46)..(846)
cttctgatcaacagccccagtagggtttaaaggtcctagagctacatgggatttaggtttctgggcacagccaattctgccacttttgaggcttcccttccccttccacttgcccctctctggttctctgcccccagtccagaagaactgagtgtcgtgctggggaccaacgacttaactagcccatccatggaaataaaggaggtcgccagcatcattcttcacaaagactttaagagagccaacatggacaatgacattgccttgctgctgctggcttcgcccatcaagctcgatgacctgaaggtgcccatctgcctccccacgcagcccggccctgccacatggcgcgaatgctgggtggcaggttggggccagaccaatgctgctgacaaaaactctgtgaaaacggatctgatgaaagcgccaatggtcatcatggactgggaggagtgttcaaagatgtttccaaaacttaccaaaaatatgctgtgtgccggatacaagaatgagagctatgatgcctgcaagggtgacagtggggggcctctggtctgcaccccagagcctggtgagaagtggtaccaggtgggcatcatcagctggggaaagagctgtggagagaagaacaccccagggatatacacctcgttggtgaattacaacctctggatcgagaaagtgacccagctagagggcaggcccttcaatgcagagaaaaggaggacttctgtcaaacagaaacctatgggctccccagtctcgggagtcccagagccaggcagccccagatcctggctcctgctctgtcccctgtcccatgtgttgttcagagctattttgtactgataa

SEQ ID NO: 256 - protein, 267 aa, Homo sapiens
MGFRFLGTANSATFEASLPLPLAPLWFSAPSPEELSVVLGTNDLTSPSMEIKEVASIILHKDFKRANMDNDIALLLLASPIKLDDLKVPICLPTQPGPATWRECWVAGWGQTNAADKNSVKTDLMKAPMVIMDWEECSKMFPKLTKNMLCAGYKNESYDACKGDSGGPLVCTPEPGEKWYQVGIISWGKSCGEKNTPGIYTSLVNYNLWIEKVTQLEGRPFNAEKRRTSVKQKPMGSPVSGVPEPGSPRSWLLLCPLSHVLFRAILY

SEQ ID NO: 257 - DNA, 816 bp, Homo sapiens
  CDS (1)..(816)
ggatccaccatgggatttaggtttctgggcacagccaattctgccacttttgagacttcccttccccttccacttgcccctctctggttctctgccaccagtccagaagaactgagtgtcgtgctggggaccaacgacttaactagcccatccatggaaataaaggaggtcgccagcatcattcttcacaaagactttaagagagccaacatggacaatgacattgccttgctgctgctggcttcgcccatcaagctcgatgacctgaaggtgcccatctgcctccccacgcagcccggccctgccacatggcgcgaatgctgggtggcaggttggggccagaccaatgctgctgacaaaaactctgtgaaaacggatctgatgaaagtgccaatggtcatcatggactgggaggagtgttcaaagatgtttccaaaacttaccaaaaatatgctgtgtgccggatacaagaatgagagctatgatgcctgcaagggtgacagtggggggcctctggtctgcaccccagagcctggtgagaagtggtaccaggtgggcatcatcagctggggaaagagctgtggagagaagaacaccccagggatatacacctcgttggtgaactacaacctctggatcgagaaagtgacccagctagagggcaggcccttcaatgcagagaaaaggaggacctctgtcaaacagaaacctatgggctccccagtctcgggagtcccagagccaggcagccccagatcctggctcctgctctgtcccctgtcccatgtgttgttcagagctattttgtacctcgag

SEQ ID NO: 258 - protein, 272 aa, Homo sapiens
GSTMGFRFLGTANSATFETSLPLPLAPLWFSATSPEELSVVLGTNDLTSPSMEIKEVASIILHKDFKRANMDNDIALLLLASPIKLDDLKVPICLPTQPGPATWRECWVAGWGQTNAADKNSVKTDLMKVPMVIMDWEECSKMFPKLTKNMLCAGYKNESYDACKGDSGGPLVCTPEPGEKWYQVGIISWGKSCGEKNTPGIYTSLVNYNLWIEKVTQLEGRPFNAEKRRTSVKQKPMGSPVSGVPEPGSPRSWLLLCPLSHVLFRAILYLE

SEQ ID NO: 259 - DNA, 1078 bp, Homo sapiens
  CDS (243)..(1043)
ttgatccgtgccaagtggctttttgtgggctctgtagagtgctctaaacccagctcggcctttgctgtattagacagaagcacctcattcatatccctggggcccctgatggtgcagtggtctggctgtggtctgcacaccagctattctgttttgttttgttttgtttttttcctacctttttccaatcctcacaccttctgatcaacagccccagtagggtttaaaggtcctagagctacatgggatttaggtttctgggcacagccaattctgccacttttgagacttcccttccccttccacttgcccctctctggttctctgccaccagtccagaagaactgagtgtcgtgctggggaccaacgacttaactagcccatccatggaaataaaggaggtcgccagcatcattcttcacaaagactttaagagagccaacatggacaatgacattgccttgctgctgctggcttcgcccatcaagctcgatgacctgaaggtgcccatctgcctccccacgcagcccggccctgccacatggcgcgaatgctgggtggcaggttggggccagaccaatgctgctgacaaaaactctgtgaaaacggatctgatgaaagtgccaatggtcatcatggactgggaggagtgttcaaagatgtttccaaaacttaccaaaaatatgctgtgtgccggatacaagaatgagagctatgatgcctgcaagggtgacagtggggggcctctggtctgcaccccagagcctggtgagaagtggtaccaggtgggcatcatcagctggggaaagagctgtggagataagaacaccccagggatatacacctcgttggtgaactacaacctctggatcgagaaagtgacccagctaggaggcaggcccttcaatgcagagaaaaggaggacttctgtcaaacagaaacctatgggctccccagtctcgggagtcccagagccaggcagccccagatcctggctcctgctctgtcccctgtcccatgtgttgttcagagctattttgtactgataataaaatagaggctattctttcaaccgaaa

SEQ ID NO: 260 - protein, 267 aa, Homo sapiens
MGFRFLGTANSATFETSLPLPLAPLWFSATSPEELSVVLGTNDLTSPSMEIKEVASIILHKDFKRANMDNDIALLLLASPIKLDDLKVPICLPTQPGPATWRECWVAGWGQTNAADKNSVKTDLMKVPMVIMDWEECSKMFPKLTKNMLCAGYKNESYDACKGDSGGPLVCTPEPGEKWYQVGIISWGKSCGDKNTPGIYTSLVNYNLWIEKVTQLGGRPFNAEKRRTSVKQKPMGSPVSGVPEPGSPRSWLLLCPLSHVLFRAILY

SEQ ID NO: 261 - DNA, 816 bp, Homo sapiens; identical to SEQ ID NO: 247
  CDS (10)..(810)

SEQ ID NO: 262 - protein, 267 aa, Homo sapiens
MGFRFLGTANSAAFETSLPLPLAPLWFSATSPEELSVVLGTNDLTSPSMEIKEVASIILHKDFKRANMDNDIALLLLASPIKLDDLKVPICLPTQPGPATWRECWVAGWGQTNAADKNSVKTDLMKAPMVIMDWEECSKMFPKLTKNMLCAGYKNESYDACKGDSGGPLVCTPEPGEKWYQVGIISWGKSCGEKNTPGIYTSLVNYNLWIEKVTQLEGRPFNAEKRRTSVKQKPMGSPVSGVPEPGSPRSWLLLCPLSHVLFRAILY

SEQ ID NO: 263 - DNA, 729 bp, Homo sapiens
  CDS (7)..(723)
ggatccgccaccagtccagaagaactgagtgtcgtgctggggaccaacgacttaactagcccatccatggaaataaaggaggtcgccagcatcattcttcacaaagactttaagagagccaacatggacaatgacattgccttgctgctgctggcttcgcccatcaagctcgatgacctgaaggtgcccatctgcctccccacgcagcccggccctgccacatggcgcgaatgctgggtggcaggttggggccagaccaatgctgctgacaaaaactctgtgaaaacggatctgatgaaagtgccaatggtcatcatggactgggaggagtgttcaaagatgtttccaaaacttaccaaaaatatgctgtgtgccggatacaagaatgagagctatgatgcctgcaagggtgacagtggggggcctctggtctgcaccccagagcctggtgagaagtggtaccaggtgggcatcatcagctggggaaagagctgtggagagaagaacaccccagggatatacacctcgttggtgaactacaacctctggatcgagaaagtgacccagctagagggcaggcccttcaatgcagagaaaaggaggacctctgtcaaacagaaacctatgggctccccagtctcgggagtcccagagccaggcagccccagatcctggctcctgctctgtcccctgtcccatgtgttgttcagagctattttgtacctcgag

SEQ ID NO: 264 - protein, 239 aa, Homo sapiens
ATSPEELSVVLGTNDLTSPSMEIKEVASIILHKDFKRANMDNDIALLLLASPIKLDDLKVPICLPTQPGPATWRECWVAGWGQTNAADKNSVKTDLMKVPMVIMDWEECSKMFPKLTKNMLCAGYKNESYDACKGDSGGPLVCTPEPGEKWYQVGIISWGKSCGEKNTPGIYTSLVNYNLWIEKVTQLEGRPFNAEKRRTSVKQKPMGSPVSGVPEPGSPRSWLLLCPLSHVLFRAILY

SEQ ID NO: 265 - DNA, 816 bp, Homo sapiens; identical to SEQ ID NO: 257
  CDS (10)..(810)

SEQ ID NO: 266 - protein, 267 aa, Homo sapiens; identical to SEQ ID NO: 244

SEQ ID NO: 267 - DNA, 1042 bp, Homo sapiens
  CDS (207)..(1007)
agagtgctctaaacccagctcggcctttgctgtattagacagaagcacctcattcatatccctggggcccctgatggtgcagtggtctggctgtggtctgcacaccagctattctgttttgttttgttttgttttttcctacctttttccaatcctcacaccttctgatcaacagccccagtagggtttaaaggtcctagagctacatgggatttaggtttctgggcacagccaattctgccgcttttgagacttcccttccccttccacttgcccctctctggttctctgccaccagtccagaagaactgagtgtcgtgctggggaccaacgacttaactagcccatccatggaaataaaggaggtcgccagcatcattcttcacaaagactttaagagagccaacatggacaatgacattgccttgctgctgctggcttcgcccatcaagctcgatgacctgaaggtgcccatctgcctccccacgcagcccggccctgccacatggcgcgaatgctgggtggcaggttggggccagaccaatgctgctgacaaaaactctgtgaaaacggatctgatgaaagtgccaatggtcatcatggactgggaggagtgttcaaagatgtttccaaaacttaccaaaaatatgctgtgtgccggatacaagaatgagagctatgatgcctgcaagggtgacagtggggggcctctggtctgcaccccagagcctggtgagaagtggtaccaggtgggcatcatcagctggggaaagagctgtggagagaagaacaccccagggatatacacctcgttggtgaactacaacctctggatcgagaaagtgacccagctagagggcaggcccttcaatgcagagaaaaggaggacttctgtcaaacagaaacctatgggctccccagtctcgggagtcccagagccaggcagccccagatcctggctcctgctctgtcccctgtcccatgtgttgttcagagctattttgtactgataataaaatagaggctattctttcaaccgaaa

SEQ ID NO: 268 - protein, 267 aa, Homo sapiens
MGFRFLGTANSAAFETSLPLPLAPLWFSATSPEELSVVLGTNDLTSPSMEIKEVASIILHKDFKRANMDNDIALLLLASPIKLDDLKVPICLPTQPGPATWRECWVAGWGQTNAADKNSVKTDLMKVPMVIMDWEECSKMFPKLTKNMLCAGYKNESYDACKGDSGGPLVCTPEPGEKWYQVGIISWGKSCGEKNTPGIYTSLVNYNLWIEKVTQLEGRPFNAEKRRTSVKQKPMGSPVSGVPEPGSPRSWLLLCPLSHVLFRAILY

SEQ ID NO: 269 - DNA, 1042 bp, Homo sapiens
  CDS (207)..(1007)
agagtgctctaaacccagctcggcctttgctgtattagacagaagcacctcattcatatccctggggcccctgatggtgcagtggtctggctgtggtctgcacaccagctattctgttttgttttgttttgttttttcctacctttttccaatcctcacaccttctgatcaacagccccagtagggtttaaaggtcctagagctacatgggatttaggtttctgggcacagccaattctgccacttttgagacttcccttccccttccacttgcccctctctggttctctgccaccagtccagaagaactgagtgtcgtgctggggaccaacgacttaactagcccatccatggaaataaaggaggtcgccagcatcattcttcacaaagactttaagagagccaacatggacaatgacattgccttgctgctgctggcttcgcccatcaagctcgatgacctgaaggtgcccatctgcctccccacgcagcccggccctgccacatggcgcgaatgctgggtggcaggttggggccagaccaatgctgctgacaaaaactctgtgaaaacggatctgatgaaagcgccaatggtcatcatggactgggaggagtgttcaaagatgtttccaaaacttaccaaaaatatgctgtgtgccggatacaagaatgagagctatgatgcctgcaagggtgacagtggggggcctctggtctgcaccccagagcctggtgagaagtggtaccaggtgggcatcatcagctggggaaagagctgtggagagaagaacaccccagggatatacacctcgttggtgaactacaacctctggatcgagaaagtgacccagctagagggcaggcccttcaatgcagagaaaaggaggacttctgtcaaacagaaacctatgggctccccagtctcgggagtcccagagccaggcagccccagatcctggctcctgctctgtcccctgtcccatgtgttgttcagagctattttgtactgataataaaatagaggctattctttcaaccgaaa

SEQ ID NO: 270 - protein, 267 aa, Homo sapiens
MGFRFLGTANSATFETSLPLPLAPLWFSATSPEELSVVLGTNDLTSPSMEIKEVASIILHKDFKRANMDNDIALLLLASPIKLDDLKVPICLPTQPGPATWRECWVAGWGQTNAADKNSVKTDLMKAPMVIMDWEECSKMFPKLTKNMLCAGYKNESYDACKGDSGGPLVCTPEPGEKWYQVGIISWGKSCGEKNTPGIYTSLVNYNLWIEKVTQLEGRPFNAEKRRTSVKQKPMGSPVSGVPEPGSPRSWLLLCPLSHVLFRAILY

SEQ ID NO: 271 - DNA, 3261 bp, Homo sapiens
  CDS (92)..(3145)
agcggggctctggggtctgggggcattgctcagcggtgctaggctggcgcggcttgagccgccgccggactgacagctcggtctgcggaccatggagacctgcgccggtccacacccgctgcgcctcttcctctgccggatgcagctctgtctcgcgctgcttttgggaccctggcggcctgggaccgccgaggaagttatcctcctggattccaaagcctcccaggccgagctgggctggactgcactgccaagtaatgggtgggaggagatcagcggcgtggatgaacacgaccgtcccatccgcacgtaccaagtgtgcaatgtgctggagcccaaccaggacaactggctgcagactggctggataagccgtggccgcgggcagcgcatcttcgtggaactgcagttcacactccgtgactgcagcagcatccctggcgccgcgggtacctgcaaggagaccttcaacgtctactacctggaaactgaggccgacctgggccgtgggcgtccccgcctaggcggcagccggccccgcaaaatcgacacgatcgcggcggacgagagcttcacgcagggcgacctgggtgagcgcaagatgaagctgaacacagaggtgcgcgagatcggaccgctcagccggcggggtttccacctggcctttcaggacgtgggcgcatgcgtggcgcttgtctcggtgcgcgtctactacaagcagtgccgcgccaccgtgcggggcctggccacgttcccagccaccgcagccgagagcgccttctccacactggtggaagtggccggaacgtgcgtggcgcactcggaaggggagcctggcagccccccacgcatgcactgcggcgccgacggcgagtggctggtgcctgtgggccgctgcagctgcagcgcgggattccaggagcgtggtgacttctgcgaatgtcccccagggttttacaaggtgtccccgcggcggcccctctgctcaccgtgcccagagcacagccgggccctggaaaacgcctccaccttctgcgtgtgccaggacagctatgcgcgctcacccaccgacccgccctcggcttcctgcacccgtccgccgtcggcgccgcgggacctgcagtacagcctgagccgctcgccgctggtgctgcgactgcgctggctgccgccggccgactcgggaggccgctcggacgtcacctactcgctgctgtgcctgcgctgcggccgcgagggcccggcgggcgcctgcgagccgtgcgggccgcgcgtggccttcctaccgcgccaggcagggctgcgggagcgagccgccacgctgctgcacctgcggcccggggcgcgctacaccgtgcgcgtggccgtgctcaacggcgtctcgtcagcgccctgggaggaggatgagatccgcagggaccgagtggaaccccagagcgtgtccctgtcgtggcgggagcccatccctgccggagcccctggggccaatgacacggagtacgagatccgatactacgagaagggtcagagtgagcagacttactccatggtgaagacgggggcgcccacagtcaccgtcaccaacctgaagccggctacccgctacgtctttcagatccgggccgcttccccggggccatcctgggaggcccagagttttaaccccagcattgaagtacagaccctgggggaggctgcctcagggtccagggaccagagccccgccattgtcgtcaccgtagtgaccatctcggccctcctcgtcctgggctccgtgatgagtgtgctggccatttggaggaggccctgcagctatggcaaaggaggaggggatgcccatgatgaagaggagctgtatttccacttcaaagtcccaacacgtcgcacattcctggacccccagagctgtggggacctgctgcaggctgtgcatctgttcgccaaggaactggatgcgaaaagcgtcacgctggagaggagccttggaggaggcaagctgggcgcccaggaagccttgtccccatctggaagcctcacccactctataggccccgcccctactctgtccacacctctatccgggcggtttggggagctgtgctgtggctgcttgcagctccccggtcgccaggagctgctcgtagccgtgcatatgctgagggacagcgcctccgactcacagaggctcggcttcctggccgaggccctcacgctgggccagtttgaccatagccacatcgtgcggctggagggcgttgttacccgaggtaggggaagcaccttgatgattgtcaccgagtacatgagccatggggccctggacggcttcctcaggcggcacgaggggcagctggtggctgggcaactgatggggttgctgcctgggctggcatcagccatgaagtatctgtcagagatgggctacgttcaccggggcctggcagctcgccatgtgctggtcagcagcgaccttgtctgcaagatctctggcttcgggcggggcccccgggaccgatcagaggctgtctacaccactggccggagcccagcgctatgggccgctcccgagacacttcagtttggccacttcagctctgccagtgacgtgtggagcttcggcatcatcatgtgggaggtgatggcctttggggagcggccttactgggacatgtctggccaagacgtgatcaaggctgtggaggatggcttccggctgccaccccccaggaactgtcctaaccttctgcaccgactaatgctcgactgctggcagaaggacccaggtgagcggcccaggttctcccagatccacagcatcctgagcaagatggtgcaggacccagagccccccaagtgtgccctgactacctgtcccaggcctcccaccccactagcggaccgtgccttctccaccttcccctcctttggctctgtgggcgcgtggctggaggccctggacctgtgccgctacaaggacagcttcgcggctgctggctatgggagcctggaggccgtggccgagatgactgcccaggacctggtgagcctaggcatctctttggctgaacatcgagaggccctcctcagcgggatcagcgccctgcaggcacgagtgctccagctgcagggccagggggtgcaggtgtgagtggaccccattcttccaaggcaggactccggtgggggtccagtcccccagccctgcccaaggaccgtggcaagctgcgctccagcagtgtgggagggagcgctctcttcctc

SEQ ID NO: 272 - protein, 1018 aa, Homo sapiens
METCAGPHPLRLFLCRMQLCLALLLGPWRPGTAEEVILLDSKASQAELGWTALPSNGWEEISGVDEHDRPIRTYQVCNVLEPNQDNWLQTGWISRGRGQRIFVELQFTLRDCSSIPGAAGTCKETFNVYYLETEADLGRGRPRLGGSRPRKIDTIAADESFTQGDLGERKMKLNTEVREIGPLSRRGFHLAFQDVGACVALVSVRVYYKQCRATVRGLATFPATAAESAFSTLVEVAGTCVAHSEGEPGSPPRMHCGADGEWLVPVGRCSCSAGFQERGDFCECPPGFYKVSPRRPLCSPCPEHSRALENASTFCVCQDSYARSPTDPPSASCTRPPSAPRDLQYSLSRSPLVLRLRWLPPADSGGRSDVTYSLLCLRCGREGPAGACEPCGPRVAFLPRQAGLRERAATLLHLRPGARYTVRVAVLNGVSSAPWEEDEIRRDRVEPQSVSLSWREPIPAGAPGANDTEYEIRYYEKGQSEQTYSMVKTGAPTVTVTNLKPATRYVFQIRAASPGPSWEAQSFNPSIEVQTLGEAASGSRDQSPAIVVTVVTISALLVLGSVMSVLAIWRRPCSYGKGGGDAHDEEELYFHFKVPTRRTFLDPQSCGDLLQAVHLFAKELDAKSVTLERSLGGGKLGAQEALSPSGSLTHSIGPAPTLSTPLSGRFGELCCGCLQLPGRQELLVAVHMLRDSASDSQRLGFLAEALTLGQFDHSHIVRLEGVVTRGRGSTLMIVTEYMSHGALDGFLRRHEGQLVAGQLMGLLPGLASAMKYLSEMGYVHRGLAARHVLVSSDLVCKISGFGRGPRDRSEAVYTTGRSPALWAAPETLQFGHFSSASDVWSFGIIMWEVMAFGERPYWDMSGQDVIKAVEDGFRLPPPRNCPNLLHRLMLDCWQKDPGERPRFSQIHSILSKMVQDPEPPKCALTTCPRPPTPLADRAFSTFPSFGSVGAWLEALDLCRYKDSFAAAGYGSLEAVAEMTAQDLVSLGISLAEHREALLSGISALQARVLQLQGQGVQV

SEQ ID NO: 273 - DNA, 3003 bp, Homo sapiens
  CDS (1)..(3000)
atggtattgacaactgctataccagcctggcttcttagctgttccctcccactctcatcctgggcccaccatgcgacaccgcccctccgtctagtagttatcctcctggattccaaagcctcccaggccgagctgggctggactgcactgccaagtaatgggtgggaggagatcagcggcgtggatgaacacgaccgtcccatccgcacgtaccaagtgtgcaatgtgctggagcccaaccaggacaactggctgcagactggctggataagccgtggccgcgggcagcgcatcttcgtggaactgcagttcacactccgtgactgcagcagcatccctggcgccgcgggtacctgcaaggagaccttcaacgtctactacctggaaactgaggccgacctgggccgtgggcgtccccgcctaggcggcagccggccccgcaaaatcgacacgatcgcggcggacgagagcttcacgcagggcgacctgggtgagcgcaagatgaagctgaacacagaggtgcgcgagatcggaccgctcagccggcggggtttccacctggcctttcaggacgtgggcgcatgcgtggcgcttgtctcggtgcgcgtctactacaagcagtgccgcgccaccgtgcggggcctggccacgttcccagccaccgcagccgagagcgccttctccacactggtggaagtggccggaacgtgcgtggcgcactcggaaggggagcctggcagccccccacgcatgcactgcggcgccgacggcgagtggctggtgcctgtgggccgctgcagctgcagcgcgggattccaggagcgtggtgacttctgcgaatgtcccccagggttttacaaggtgtccccgcggcggcccctctgctcaccgtgcccagagcacagccgggccctggaaaacgcctccaccttctgcgtgtgccaggacagctatgcgcgctcacccaccgacccgccctcggcttcctgcacccgtccgccgtcggcgccgcgggacctgcagtacagcctgagccgctcgccgctggtgctgcgactgcgctggctgccgccggccgactcgggaggccgctcggacgtcacctactcgctgctgtgcctgcgctgcggccgcgagggcccggcgggcgcctgcgagccgtgcgggccgcgcgtggccttcctaccgcgccaggcagggctgcgggagcgagccgccacgctgctgcacctgcggcccggcgcgcgctacaccgtgcgcgtggccgcgctcaacggcgtctcgggcccggcggccgccgcgggaaccacctacgcgcaggtcaccgtctccaccgggccctcagcgccctgggaggaggatgagatccgcagggaccgagtggaaccccagagcgtgtccctgtcgtggcgggagcccatccctgccggagcccctggggccaatgacacggagtacgagatccgatactacgagaagcagagtgagcagacttactccatggtgaagacaggggcgcccacagtcaccgtcaccaacctgaagccggctacccgctacgtctttcagatccgggccgcttccccggggccatcctgggaggcccagagttttaaccccagcattgaagtacagaccctgggggaggctgcctcagggtccagggaccagagccccgccattgtcgtcaccgtagtgaccatctcggccctcctcgtcctgggctccgtgatgagtgtgctggccatttggaggaggaggccctgcagctatggcaaaggaggaggggatgcccatgatgaagaggagctgtatttccactgtaaagtcccaacacgtcgcacattcctggacccccagagctgtggggacctgctgcaggctgtgcatctgttcgccaaggaactggatgcgaaaagcgtcacgctggagaggagccttggaggaggcaagtttggggagctgtgctgtggctgcttgcagctccccggtcgccaggagctgctcgtagccgtgcacatgctgagggacagcgcctccgactcacagaggctcggcttcctggccgaggccctcacgctgggccagtttgaccatagccacatcgtgcggctggagggcgttgttacccgaggtaggaccttgatgattgtcaccgagtacatgagccatggggccctggacggcttcctcaggcacgaggggcagctggtggctgggcaactgatggggttgctgcctgggctggcatcagccatgaagtatctgtcagagatgggctacgttcaccggggcctggcagctcgccatgtgctggtcagcagcgaccttgtctgcaagatctctggcttcgggcggggcccccgggaccgatcagaggctgtctacaccactggccggagcccagcgctatgggccgctcccgagacacttcagtttggccacttcagctctgccagtgacgtgtggagcttcggcatcatcatgtgggaggtgatggcctttggggagcggccttactgggacatgtctggccaagacgtgaaggctgtggaggatggcttccggctgccaccccccaggaactgtcctaaccttctgcaccgactaatgctcgactgctggcagaaggacccaggtgagcggcccaggttctcccagatccacagcatcctgagcaagatggtgcaggacccagagccccccaagtgtgccctgactacctgtcccaggcctcccactccactagccgaccgtgccttctccaccttcccctcctttggctctgtgggcgcgtggctggaggccctggacctgtgccgctacaaggacagcttcgcggctgctggctatgggagcctggaggccgtggccgagatgactgcccaggacctggtgagcctaggcatctctttggctgaacatcgagaggccctcctcagcgggatcagcgccctgcaggcacgagtgctccagctgcagggccagggggtgcaggtgtga

SEQ ID NO: 274 - protein, 1000 aa, Homo sapiens
MVLTTAIPAWLLSCSLPLSSWAHHATPPLRLVVILLDSKASQAELGWTALPSNGWEEISGVDEHDRPIRTYQVCNVLEPNQDNWLQTGWISRGRGQRIFVELQFTLRDCSSIPGAAGTCKETFNVYYLETEADLGRGRPRLGGSRPRKIDTIAADESFTQGDLGERKMKLNTEVREIGPLSRRGFHLAFQDVGACVALVSVRVYYKQCRATVRGLATFPATAAESAFSTLVEVAGTCVAHSEGEPGSPPRMHCGADGEWLVPVGRCSCSAGFQERGDFCECPPGFYKVSPRRPLCSPCPEHSRALENASTFCVCQDSYARSPTDPPSASCTRPPSAPRDLQYSLSRSPLVLRLRWLPPADSGGRSDVTYSLLCLRCGREGPAGACEPCGPRVAFLPRQAGLRERAATLLHLRPGARYTVRVAALNGVSGPAAAAGTTYAQVTVSTGPSAPWEEDEIRRDRVEPQSVSLSWREPIPAGAPGANDTEYEIRYYEKQSEQTYSMVKTGAPTVTVTNLKPATRYVFQIRAASPGPSWEAQSFNPSIEVQTLGEAASGSRDQSPAIVVTVVTISALLVLGSVMSVLAIWRRRPCSYGKGGGDAHDEEELYFHCKVPTRRTFLDPQSCGDLLQAVHLFAKELDAKSVTLERSLGGGKFGELCCGCLQLPGRQELLVAVHMLRDSASDSQRLGFLAEALTLGQFDHSHIVRLEGVVTRGRTLMIVTEYMSHGALDGFLRHEGQLVAGQLMGLLPGLASAMKYLSEMGYVHRGLAARHVLVSSDLVCKISGFGRGPRDRSEAVYTTGRSPALWAAPETLQFGHFSSASDVWSFGIIMWEVMAFGERPYWDMSGQDVKAVEDGFRLPPPRNCPNLLHRLMLDCWQKDPGERPRFSQIHSILSKMVQDPEPPKCALTTCPRPPTPLADRAFSTFPSFGSVGAWLEALDLCRYKDSFAAAGYGSLEAVAEMTAQDLVSLGISLAEHREALLSGISALQARVLQLQGQGVQV

SEQ ID NO: 275 - DNA, 9087 bp, Homo sapiens
  CDS (1)..(9084)
atggcgccgccgccgccgcccgtgctgcccgtgctgctgctcctggccgccgccgccgccctgccggcgatggggctgcgagcggccgcctgggagccgcgcgtacccggcgggacccgcgccttcgccctccggcccggctgtacctacgcggtgggcgccgcttgcacgccccgggcgccgcgggagctgctggacgtgggccgcgatgggcggctggcaggacgtcggcgcgtctcgggcgcggggcgcccgctgccgctgcaagtccgcttggtggcccgcagtgccccgacggcgctgagccgccgcctgcgggcgcgcacgcaccttcccggctgcggagcccgtgcccggctctgcggaaccggtgcccggctctgcggggcgctctgcttccccgtccccggcggctgcgcggccgcgcagcattcggcgctcgcagctccgaccaccttacccgcctgccgctgcccgccgcgccccaggccccgctgtcccggccgtcccatctgcctgccgccgggcggctcggtccgcctgcgtctgctgtgcgccctgcggcgcgcggctggcgccgtccgggtgggactggcgctggaggccgccaccgcggggacgccctccgcgtcgccatccccatcgccgcccctgccgccgaacttgcccgaagcccgggcggggccggcgcgacgggcccggcggggcacgagcggcagagggagcctgaagtttccgatgcccaactaccaggtggcgttgtttgagaacgaaccggcgggcaccctcatcctccagctgcacgcgcactacaccatcgagggcgaggaggagcgcgtgagctattacatggaggggctgttcgacgagcgctcccggggctacttccgaatcgactctgccacgggcgccgtgagcacggacagcgtactggaccgcgagaccaaggagacgcacgtcctcagggtgaaagccgtggactacagtacgccgccgcgctcggccaccacctacatcactgtcttggtcaaagacaccaacgaccacagcccggtcttcgagcagtcggagtaccgcgagcgcgtgcgggagaacctggaggtgggctacgaggtgctgaccatccgcgccagcgaccgcgactcgcccatcaacgccaacttgcgttaccgcgtgttggggggcgcgtgggacgtcttccagctcaacgagagctctggcgtggtgagcacacgggcggtgctggaccgggaggaggcggccgagtaccagctcctggtggaggccaacgaccaggggcgcaatccgggcccgctcagtgccacggccaccgtgtacatcgaggtggaggacgagaacgacaactacccccagttcagcgagcagaactacgtggtccaggtgcccgaggacgtggggctcaacacggctgtgctgcgagtgcaggccacggaccgggaccagggccagaacgcggccattcactacagcatcctcagcgggaacgtggccggccagttctacctgcactcgctgagcgggatcctggatgtgatcaaccccttggatttcgaggatgtccagaaatactcgctgagcattaaggcccaggatgggggccggcccccgctcatcaattcttcaggggtggtgtctgtgcaggtgctggatgtcaacgacaacgagcctatctttgtgagcagccccttccaggccacggtgctggagaatgtgcccctgggctaccccgtggtgcacattcaggcggtggacgcggactctggagagaacgcccggctgcactatcgcctggtggacacggcctccacctttctggggggcggcagcgctgggcctaagaatcctgcccccacccctgacttccccttccagatccacaacagctccggttggatcacagtgtgtgccgagctggaccgcgaggaggtggagcactacagcttcggggtggaggcggtggaccacggctcgccccccatgagctcctccaccagcgtgtccatcacggtgctggacgtgaatgacaacgacccggtgttcacgcagcccacctacgagcttcgtctgaatgaggatgcggccgtggggagcagcgtgctgaccctgcaggcccgcgaccgtgacgccaacagtgtgattacctaccagctcacaggcggcaacacccggaaccgctttgcactcagcagccagagagggggcggcctcatcaccctggcgctacctctggactacaagcaggagcagcagtacgtgctggcggtgacagcatccgacggcacacggtcgcacactgcgcatgtcctaatcaacgtcactgatgccaacacccacaggcctgtctttcagagctcccattacacagtgagtgtcagtgaggacaggcctgtgggcacctccattgctaccctcagtgccaacgatgaggacacaggagagaatgcccgcatcacctacgtgattcaggaccccgtgccgcagttccgcattgaccccgacagtggcaccatgtacaccatgatggagctggactatgagaaccaggtcgcctacacgctgaccatcatggcccaggacaacggcatcccgcagaaatcagacaccaccaccctagagatcctcatcctcgatgccaatgacaatgcaccccagttcctgtgggatttctaccagggttccatctttgaggatgctccaccctcgaccagcatcctccaggtctctgccacggaccgggactcaggtcccaatgggcgtctgctgtacaccttccagggtggggacgacggcgatggggacttctacatcgagcccacgtccggtgtgattcgcacccagcgccggctggaccgggagaatgtggccgtgtacaacctttgggctctggctgtggatcggggcagtcccactccccttagcgcctcggtagaaatccaggtgaccatcttggacattaatgacaatgcccccatgtttgagaaggacgaactggagctgtttgttgaggagaacaacccagtggggtcggtggtggcaaagattcgtgctaacgaccctgatgaaggccctaatgcccagatcatgtatcagattgtggaaggggacatgcggcatttcttccagctggacctgctcaacggggacctgcgtgccatggtggagctggactttgaggtccggcgggagtatgtgctggtggtgcaggccacgtcggctccgctggtgagccgagccacggtgcacatccttctcgtggaccagaatgacaacccgcctgtgctgcccgacttccagatcctcttcaacaactatgtcaccaacaagtccaacagtttccccaccggcgtgatcggctgcatcccggcccatgaccccgacgtgtcagacagcctcaactacaccttcgtgcagggcaacgagctgcgcctgttgctgctggaccccgccacgggcgaactgcagctcagccgcgacctggacaacaaccggccgctggaggcgctcatggaggtgtctgtgtctgcagatggcatccacagcgtcacggccttctgcaccctgcgtgtcaccatcatcacggacgacatgctgaccaacagcatcactgtccgcctggagaacatgtcccaggagaagttcctgtccccgctgctggccctcttcgtggagggggtggccgccgtgctgtccaccaccaaggacgacgtcttcgtcttcaacgtccagaacgacaccgacgtcagctccaacatcctgaacgtgaccttctcggcgctgctgcctggcggcgtccgcggccagttcttcccgtcggaggacctgcaggagcagatctacctgaatcggacgctgctgaccaccatctccacgcagcgcgtgctgcccttcgacgacaacatctgcctgcgcgagccctgcgagaactacatgaagtgcgtgtccgttctgcgattcgacagctccgcgcccttcctcagctccaccaccgtgctcttccggcccatccaccccatcaacggcctgcgctgccgctgcccgcccggcttcaccggcgactactgcgagacggagatcgacctctgctactccgacccgtgcggcgccaacggccgctgccgcagccgcgagggcggctacacctgcgagtgcttcgaggacttcactggagagcactgtgaggtggatgcccgctcaggccgctgtgccaacggggtgtgcaagaacgggggcacctgcgtgaacctgctcatcggcggcttccactgcgtgtgtcctcctggcgagtatgagaggccctactgtgaggtgaccaccaggagcttcccgccccagtccttcgtcaccttccggggcctgagacagcgcttccacttcaccatctccctcacgtttgccactcaggaaaggaacggcttgcttctctacaacggccgcttcaatgagaagcacgacttcatcgccctggagatcgtggacgagcaggtgcagctcaccttctctgcaggtgcaggcgagacaacaacgaccgtggcaccgaaggttcccagtggtgtgagtgacgggcggtggcactctgtgcaggtgcagtactacaacaaggtaagatgggccccaccacttccccctggcccccagcccaatattggccacctgggcctgccccatgggccgtccggggaaaagatggccgtggtgacagtggatgattgtgacacaaccatggctgtgcgctttggaaaggacatcgggaactacagctgcgctgcccagggcactcagaccggctccaagaagtccctggatctgaccggccctctactcctggggggtgtccccaacctgccagaagacttcccagtgcacaaccggcagttcgtgggctgcatgcggaacctgtcagtcgacggcaaaaatgtggacatggccggattcatcgccaacaatggcacccgggaaggctgcgctgctcggaggaacttctgcgatgggaggcggtgtcagaatggaggcacctgtgtcaacaggtggaatatgtatctgtgtgagtgtccactccgattcggcgggaagaactgtgagcaagccatgcctcacccccagctcttcagcggtgagagcgtcgtgtcctggagtgacctgaacatcatcatctctgtgccctggtacctggggctcatgttccggacccggaaggaggacagcgttctgatggaggccaccagtggtgggcccaccagctttcgcctccagatcctgaacaactacctccagtttgaggtgtcccacggcccctccgatgtggagtccgtgatgctgtccgggttgcgggtgaccgacggggagtggcaccacctgctgatcgagctgaagaatgttaaggaggacagtgagatgaagcacctggtcaccatgaccttggactatgggatggaccagaacaaggcagatatcgggggcatgcttcccgggctgacggtaaggagcgtggtggtcggaggcgcctctgaagacaaggtctccgtgcgccgtggattccgaggctgcatgcagggagtgaggatgggggggacgcccaccaacgtcgccaccctgaacatgaacaacgcactcaaggtcagggtgaaggacggctgtgatgtggacgacccctgtacctcgagcccctgtccccccaatagccgctgccacgacgcctgggaggactacagctgcgtctgtgacaaagggtaccttggaataaactgtgtggatgcctgtcacctgaacccctgcgagaacatgggggcctgcgtgcgctcccccggctccccgcagggctacgtgtgcgagtgtgggcccagtcactacgggccgtactgtgagaacaaactcgaccttccgtgccccagaggctggtgggggaaccccgtctgtggaccctgccactgtgccgtcagcaaaggctttgatcccgactgtaataagaccaacggccagtgccaatgcaaggagaattactacaagctcctagcccaggacacctgtctgccctgcgactgcttcccccatggctcccacagccgcacttgcgacatggccaccgggcagtgtgcctgcaagcccggcgtcatcggccgccagtgcaaccgctgcgacaacccgtttgccgaggtcaccacgctcggctgtgaagtgatctacaatggctgtcccaaagcatttgaggccggcatctggtggccacagaccaagttcgggcagccggctgcggtgccatgccctaagggatccgttggaaatgcggtccgacactgcagcggggagaagggctggctgcccccagagctctttaactgtaccaccatctccttcgtggacctcagggccatgaatgagaagctgagccgcaatgagacgcaggtggacggcgccagggccctgcagctggtgagggcgctgcgcagtgctacacagcacacgggcacgctctttggcaatgacgtgcgcacggcctaccagctgctgggccacgtccttcagcacgagagctggcagcagggcttcgacctggcagccacgcaggacgccgactttcacgaggacgtcatccactcgggcagcgccctcctggccccagccaccagggcggcgtgggagcagatccagcggagcgagggcggcacggcacagctgctccggcgcctcgagggctacttcagcaacgtggcacgcaacgtgcggcggacgtacctgcggcccttcgtcatcgtcaccgccaacatggttcttgctgtcgacatctttgacaagttcaactttacgggagccagggtcccgcgattcgacaccatccatgaagagttccccagggagctggagtcctccgtctccttcccagccgacttcttcagaccacctgaagaaaaagaaggccccctgctgaggccggctggccggaggaccaccccgcagaccacgcgcccggggcctggcaccgagagggaggccccgatcagcaggcggaggcgacaccctgatgacgctggccagttcgccgtcgctctggtcatcatttaccgcaccctggggcagctcctgcccgagcgctacgaccccgaccgtcgcagcctccggttgcctcaccggcccatcattaataccccgatggtgagcacgctggtgtacagcgagggggctccgctcccgagacccctggagaggcccgtcctggtggagttcgccctgctggaggtggaggagcgaaccaagcctgtctgcgtgttctggaaccactccctggccgttggtgggacgggagggtggtctgcccggggctgcgagctcctgtccaggaaccggacacatgtcgcctgccagtgcagccacacagccagctttgcggtgctcatggatatctccaggcgtgagaacggggaggtcctgcctctgaagattgtcacctatgccgctgtgtccttgtcactggcagccctgctggtggccttcgtcctcctgagcctggtccgcatgctgcgctccaacctgcacagcattcacaagcacctcgccgtggcgctcttcctctctcagctggtgttcgtgattgggatcaaccagacggaaaacccgtttctgtgcacagtggttgccatcctcctccactacatctacatgagcacctttgcctggaccctcgtggagagcctgcatgtctaccgcatgctgaccgaggtgcgcaacatcgacacggggcccatgcggttctactacgtcgtgggctggggcatcccggccattgtcacaggactggcggtcggcctggacccccagggctacgggaaccccgacttctgctggctgtcgcttcaagacaccctgatttggagctttgcggggcccatcggagctgttataatcatcaacacagtcacttctgtcctatctgcaaaggtttcctgccaaagaaagcaccattattatgggaaaaaagggatcgtctccctgctgaggaccgcattcctcctgctgctgctcatcagcgccacctggctgctggggctgctggctgtgaaccgcgatgcactgagctttcactacctcttcgccatcttcagcggcttacagggccccttcgtcctccttttccactgcgtgctcaaccaggaggtccggaagcacctgaagggcgtgctcggcgggaggaagctgcacctggaggactccgccaccaccagggccaccctgctgacgcgctccctcaactgcaacaccaccttcggtgacgggcctgacatgctgcgcacagacttgggcgagtccaccgcctcgctggacagcatcgtcagggatgaagggatccagaagctcggcgtgtcctctgggctggtgaggggcagccacggagagccagacgcgtccctcatgcccaggagctgcaaggatccccctggccacgattccgactcagatagcgagctgtccctggatgagcagagcagctcttacgcctcctcacactcgtcagacagcgaggacgatggggtgggagctgaggaaaaatgggacccggccaggggcgccgtccacagcacccccaaaggggacgctgtggccaaccacgttccggccggctggcccgaccagagcctggctgagagtgacagtgaggaccccagcggcaagccccgcctgaaggtggagaccaaggtcagcgtggagctgcaccgcgaggagcagggcagtcaccgtggagagtaccccccggaccaggagagcgggggcgcagccaggcttgctagcagccagcccccagagcagaggagcatcttgaaaaataaagtcacctacccgccgccgctgacgctgacggagcagacgctgaagggccggctccgggagaagctggccgactgtgagcagagccccacatcctcgcgcacgtcttccctgggctctggcggccccgactgcgccatcacagtcaagagccctgggagggagccggggcgtgaccacctcaacggggtggccatgaatgtgcgcactgggagcgcccaggccgatggctccgactctgagaaaccgtga

SEQ ID NO: 276 - protein, 3028 aa, Homo sapiens
MAPPPPPVLPVLLLLAAAAALPAMGLRAAAWEPRVPGGTRAFALRPGCTYAVGAACTPRAPRELLDVGRDGRLAGRRRVSGAGRPLPLQVRLVARSAPTALSRRLRARTHLPGCGARARLCGTGARLCGALCFPVPGGCAAAQHSALAAPTTLPACRCPPRPRPRCPGRPICLPPGGSVRLRLLCALRRAAGAVRVGLALEAATAGTPSASPSPSPPLPPNLPEARAGPARRARRGTSGRGSLKFPMPNYQVALFENEPAGTLILQLHAHYTIEGEEERVSYYMEGLFDERSRGYFRIDSATGAVSTDSVLDRETKETHVLRVKAVDYSTPPRSATTYITVLVKDTNDHSPVFEQSEYRERVRENLEVGYEVLTIRASDRDSPINANLRYRVLGGAWDVFQLNESSGVVSTRAVLDREEAAEYQLLVEANDQGRNPGPLSATATVYIEVEDENDNYPQFSEQNYVVQVPEDVGLNTAVLRVQATDRDQGQNAAIHYSILSGNVAGQFYLHSLSGILDVINPLDFEDVQKYSLSIKAQDGGRPPLINSSGVVSVQVLDVNDNEPIFVSSPFQATVLENVPLGYPVVHIQAVDADSGENARLHYRLVDTASTFLGGGSAGPKNPAPTPDFPFQIHNSSGWITVCAELDREEVEHYSFGVEAVDHGSPPMSSSTSVSITVLDVNDNDPVFTQPTYELRLNEDAAVGSSVLTLQARDRDANSVITYQLTGGNTRNRFALSSQRGGGLITLALPLDYKQEQQYVLAVTASDGTRSHTAHVLINVTDANTHRPVFQSSHYTVSVSEDRPVGTSIATLSANDEDTGENARITYVIQDPVPQFRIDPDSGTMYTMMELDYENQVAYTLTIMAQDNGIPQKSDTTTLEILILDANDNAPQFLWDFYQGSIFEDAPPSTSILQVSATDRDSGPNGRLLYTFQGGDDGDGDFYIEPTSGVIRTQRRLDRENVAVYNLWALAVDRGSPTPLSASVEIQVTILDINDNAPMFEKDELELFVEENNPVGSVVAKIRANDPDEGPNAQIMYQIVEGDMRHFFQLDLLNGDLRAMVELDFEVRREYVLVVQATSAPLVSRATVHILLVDQNDNPPVLPDFQILFNNYVTNKSNSFPTGVIGCIPAHDPDVSDSLNYTFVQGNELRLLLLDPATGELQLSRDLDNNRPLEALMEVSVSADGIHSVTAFCTLRVTIITDDMLTNSITVRLENMSQEKFLSPLLALFVEGVAAVLSTTKDDVFVFNVQNDTDVSSNILNVTFSALLPGGVRGQFFPSEDLQEQIYLNRTLLTTISTQRVLPFDDNICLREPCENYMKCVSVLRFDSSAPFLSSTTVLFRPIHPINGLRCRCPPGFTGDYCETEIDLCYSDPCGANGRCRSREGGYTCECFEDFTGEHCEVDARSGRCANGVCKNGGTCVNLLIGGFHCVCPPGEYERPYCEVTTRSFPPQSFVTFRGLRQRFHFTISLTFATQERNGLLLYNGRFNEKHDFIALEIVDEQVQLTFSAGAGETTTTVAPKVPSGVSDGRWHSVQVQYYNKVRWAPPLPPGPQPNIGHLGLPHGPSGEKMAVVTVDDCDTTMAVRFGKDIGNYSCAAQGTQTGSKKSLDLTGPLLLGGVPNLPEDFPVHNRQFVGCMRNLSVDGKNVDMAGFIANNGTREGCAARRNFCDGRRCQNGGTCVNRWNMYLCECPLRFGGKNCEQAMPHPQLFSGESVVSWSDLNIIISVPWYLGLMFRTRKEDSVLMEATSGGPTSFRLQILNNYLQFEVSHGPSDVESVMLSGLRVTDGEWHHLLIELKNVKEDSEMKHLVTMTLDYGMDQNKADIGGMLPGLTVRSVVVGGASEDKVSVRRGFRGCMQGVRMGGTPTNVATLNMNNALKVRVKDGCDVDDPCTSSPCPPNSRCHDAWEDYSCVCDKGYLGINCVDACHLNPCENMGACVRSPGSPQGYVCECGPSHYGPYCENKLDLPCPRGWWGNPVCGPCHCAVSKGFDPDCNKTNGQCQCKENYYKLLAQDTCLPCDCFPHGSHSRTCDMATGQCACKPGVIGRQCNRCDNPFAEVTTLGCEVIYNGCPKAFEAGIWWPQTKFGQPAAVPCPKGSVGNAVRHCSGEKGWLPPELFNCTTISFVDLRAMNEKLSRNETQVDGARALQLVRALRSATQHTGTLFGNDVRTAYQLLGHVLQHESWQQGFDLAATQDADFHEDVIHSGSALLAPATRAAWEQIQRSEGGTAQLLRRLEGYFSNVARNVRRTYLRPFVIVTANMVLAVDIFDKFNFTGARVPRFDTIHEEFPRELESSVSFPADFFRPPEEKEGPLLRPAGRRTTPQTTRPGPGTEREAPISRRRRHPDDAGQFAVALVIIYRTLGQLLPERYDPDRRSLRLPHRPIINTPMVSTLVYSEGAPLPRPLERPVLVEFALLEVEERTKPVCVFWNHSLAVGGTGGWSARGCELLSRNRTHVACQCSHTASFAVLMDISRRENGEVLPLKIVTYAAVSLSLAALLVAFVLLSLVRMLRSNLHSIHKHLAVALFLSQLVFVIGINQTENPFLCTVVAILLHYIYMSTFAWTLVESLHVYRMLTEVRNIDTGPMRFYYVVGWGIPAIVTGLAVGLDPQGYGNPDFCWLSLQDTLIWSFAGPIGAVIIINTVTSVLSAKVSCQRKHHYYGKKGIVSLLRTAFLLLLLISATWLLGLLAVNRDALSFHYLFAIFSGLQGPFVLLFHCVLNQEVRKHLKGVLGGRKLHLEDSATTRATLLTRSLNCNTTFGDGPDMLRTDLGESTASLDSIVRDEGIQKLGVSSGLVRGSHGEPDASLMPRSCKDPPGHDSDSDSELSLDEQSSSYASSHSSDSEDDGVGAEEKWDPARGAVHSTPKGDAVANHVPAGWPDQSLAESDSEDPSGKPRLKVETKVSVELHREEQGSHRGEYPPDQESGGAARLASSQPPEQRSILKNKVTYPPPLTLTEQTLKGRLREKLADCEQSPTSSRTSSLGSGGPDCAITVKSPGREPGRDHLNGVAMNVRTGSAQADGSDSEKP

SEQ ID NO: 277 - DNA, 1263 bp, Homo sapiens
  CDS (1)..(1263)
ctcaagcttgaagtgatctacaatggctgtcccaaagcatttgaggccggcatctggtggccacagaccaagttcgggcagccggctgcggtgccatgccctaagggatccgttggaaatgcggtccgacactgcagcggggagaagggctggctgcccccagagctctttaactgtaccaccatctccttcgtggacctcagggccatgaatgagaagctgagccgcaatgagacgcaggtggacggcgccagggccctgcagctggtgagggcgctgcgcagtgctacacagcacacgggcacgctctttggcaatgacgtgcgcacggcctaccagctgctgggccacgtccttcagcacgagagctggcagcagggcttcgacctggcagccacgcaggacgccgactttcacgaggacgtcatccactcgggcagcgccctcctggccccagccaccagggcggcgtgggagcagatccagcggagcgagggcggcacggcacagctgctccggcgcctcgagggctacttcagcaacgtggcacgcaacgtgcggcggacgtacctgcggcccttcgtcatcgtcaccgccaacatgattcttgctgtcgacatctttgacaagttcaactttacgggagccagggtcccgcgattcgacaccatccatgaagagttccccagggagctggagtcctccgtctccttcccagccgacttcttcagaccacctgaagaaaaagaaggccccctgctgaggccggctggccggaggaccaccccgcagaccacgcgcccggggcctggcaccgagagggaggccccgatcagcaggcggaggcgacaccctgatgacgctggccagttcgccgtcgctctggtcatcatttaccgcaccctggggcagctcctgcccgagcgctacgaccccgaccgtcgcagcctccggttgcctcaccggcccatcattaataccccgatggtgagcacgctggtgtacagcgagggggctccgctcccgagacccctggagaggcccgtcctggtggagttcgccctgctggaggtggaggagcgaaccaagcctgtctgcgtgttctggaaccactccctggccgttggtgggacgggagggtggtctgcccggggctgcgagctcctgtccaggaaccggacacatgtcgcctgccagtgcagccacacagccagctttgcggtgctcatggatatctccaggcgtgagaacggggagaagctt

SEQ ID NO: 278 - protein, 421 aa, Homo sapiens
LKLEVIYNGCPKAFEAGIWWPQTKFGQPAAVPCPKGSVGNAVRHCSGEKGWLPPELFNCTTISFVDLRAMNEKLSRNETQVDGARALQLVRALRSATQHTGTLFGNDVRTAYQLLGHVLQHESWQQGFDLAATQDADFHEDVIHSGSALLAPATRAAWEQIQRSEGGTAQLLRRLEGYFSNVARNVRRTYLRPFVIVTANMILAVDIFDKFNFTGARVPRFDTIHEEFPRELESSVSFPADFFRPPEEKEGPLLRPAGRRTTPQTTRPGPGTEREAPISRRRRHPDDAGQFAVALVIIYRTLGQLLPERYDPDRRSLRLPHRPIINTPMVSTLVYSEGAPLPRPLERPVLVEFALLEVEERTKPVCVFWNHSLAVGGTGGWSARGCELLSRNRTHVACQCSHTASFAVLMDISRRENGEKL

SEQ ID NO: 279 - DNA, 750 bp, Homo sapiens
  CDS (1)..(750)
cgcaagcttgtcctgcctctgaagattgtcacctatgccgctgtgtccttgtcactggcagccctgctggtggccttcgtcctcctgagcctggtccgcatgctgcgctccaacctgcacagcattcacaagcacctcgccgtggcgctcttcctctctcagctggtgttcgtgattgggatcaaccagacggaaaacccgtttctgtgcacagtggttgccatcctcctccactacatctacatgagcacctttgcctggaccctcgtggagagcctgcatgtctaccgcatgctgaccgaggtgcgcaacatcgacacggggcccatgcggttctactacgtcgtgggctggggcatcccggccattgtcacaggactggcggtcggcctggacccccagggctacgggaaccccgacttctgctggctgtcgcttcaagacaccctgatttggagctttgcggggcccatcggagctgttataatcatcaacacagtcacttctgtcctatctgcaaaggtttcctgccaaagaaagcaccattattatgggaaaaaagggatcgtctccctgctgaggaccgcattcctcctgctgctgctcatcagcgccacctggctgctggggctgctggctgtgaaccgcgacgcactgagctttcactacctcttcgccatcttcagcggcttacagggccccttcgtcctccttttccactgcgtgctcaaccaggaggtcaagcttgcg

SEQ ID NO: 280 - protein, 250 aa, Homo sapiens
RKLVLPLKIVTYAAVSLSLAALLVAFVLLSLVRMLRSNLHSIHKHLAVALFLSQLVFVIGINQTENPFLCTVVAILLHYIYMSTFAWTLVESLHVYRMLTEVRNIDTGPMRFYYVVGWGIPAIVTGLAVGLDPQGYGNPDFCWLSLQDTLIWSFAGPIGAVIIINTVTSVLSAKVSCQRKHHYYGKKGIVSLLRTAFLLLLLISATWLLGLLAVNRDALSFHYLFAIFSGLQGPFVLLFHCVLNQEVKLA

SEQ ID NO: 281 - DNA, 2541 bp, Homo sapiens
  CDS (1)..(2541)
aagctttaccaggtggcgttgtttgagaacgaaccggcgggcaccctcatcctccagctgcacgcgcaccacaccatcgagggcgaggaggagcgcgtgagctattacatggaggggctgttcgacgagcgctcccggggctacttccgaatcgactctgccgcgggcgccgtgagcacggacagcgtactggaccgcgagaccaaggagacgcacgtcctcagggtgaaagccgtggactacagtacgccgccgcgctcggccaccacctacatcactgtcttggtcaaagacaccaacgaccacagcccggtcttcgagcagtcggagtaccgcgagcgcgtgcgggagaacctggaggtgggctacgaggtgctgaccatccgcgccagcgaccgcgactcgcccatcaacgccaacttgcgttaccgcgtgttggggggcgcgtgggacgtcttccagctcaacgagagctctggcgtggtgagtacacgggcggtgctggaccgggaggaggcggccgagtaccagctgctggtggaggccaacgaccaggggcgcaatccgggcccgctcagtgccacggccaccgtgtacatcgaggtggaggacgagaacgacaactacccccagttcagcgagcagaactacgtggtccaggtgcccgaggacgtggggctcaacacggctgtgctgcgagtgcaggccacggaccgggaccagggccagaacgcggccattcactacagcatcctcagcgggaacgtggccggccagttctacctgcactcgctgagcgggatcctggatgtgatcaaccccttggatttcgaggatgtccagaaatactcgctgagcattaaggcccaggatgggggccggcccccgctcatcaattcttcaggggtggtgtctgtgcaggtgctggatgtcaacgacaacgagcctatctttgtgagcagccccttccaggccacggtgctggagaatgtgcccctgggctaccccgtggtgcacattcaggcggtggacgcggactctggagagaacgcccggctgcactatcgcctggtggacacggcctccacctttctggggggcggcagcgctgggcctaagaatcctgcccccacccctgacttccccttccagatccgcaacagctccggttggatcacagtgtgtgccgagctggaccgcgaggaggtggagcactacagcttcggggtggaggcggtggaccacggctggccccccatgagctcctccaccagcgtgtccatcacggtgctggacgtgaatgacaacgacccggtgttcacgcagcccacctacgagcttcgtctgaatgaggatgcggccgtggggagcagcgtgctgaccctgcaggcccgcgaccgtgacgccaacagtgtgattacctaccagctcacaggcggcaacacccggaaccgctttgcactcagcagccagagagggggcggcctcatcaccctggcgctacctctggactacaagcaggagcagcagtacgtgctggcggtgacagcatccgacggcacacggtcgcacactgcgcatgtcctaatcaacgtcactgatgccaacacccacaggcctgtctttcagagctcccattacacagtgagtgtcagtgaggacaggcctgtgggcacctccattgctaccctcagtgccaacgatgaggacacaggagagaatgcccgcatcacctacgtgattcaggaccccgtgccgcagttccgcattgaccccgacagtggcaccatgtacaccatgatggagctggactatgagaaccaggtcgcctacacgctgaccatcatggcccaggacaacggcatcccgcagaaatcagacaccaccaccctagagatcctcatcctcgatgccaatgacaatgcaccccagttcctgtgggatttctaccagggttccatctttgaggatgctccaccctcgaccagcatcctccaggtctctgccacggaccgggactcaggtcccaatgggcgtctgctgtacaccttccagggtggggacgacggcgatggggacttctacatcgagcccacgtccggtgtgattcgcacccagcgccggctggaccgggagaatgtggccgtgtacaacctttgggctctggctgtggatcggggcagtcccactccccttagcgcctcggtagaaatccaggtgaccatcttggacattaatgacaatgcccccatgtttgagaaggacgaactggagctgtttgttgaggagaacaacccagtggggtcggtggtggcaaagattcgtgctaacgaccctgatgaaggccctaatgcccagatcatgtatcagattgtggaaggggacatgcggcatttcttccagctggacctgctcaacggggacctgcgtgccatggtggagctggactttgaggtccggcgggagtatgtgctggtggtgcaggccacgtcggctccgctggtgagccgagccacggtgcacatccttctcgtgctcgag

SEQ ID NO: 282 - protein, 847 aa, Homo sapiens
KLYQVALFENEPAGTLILQLHAHHTIEGEEERVSYYMEGLFDERSRGYFRIDSAAGAVSTDSVLDRETKETHVLRVKAVDYSTPPRSATTYITVLVKDTNDHSPVFEQSEYRERVRENLEVGYEVLTIRASDRDSPINANLRYRVLGGAWDVFQLNESSGVVSTRAVLDREEAAEYQLLVEANDQGRNPGPLSATATVYIEVEDENDNYPQFSEQNYVVQVPEDVGLNTAVLRVQATDRDQGQNAAIHYSILSGNVAGQFYLHSLSGILDVINPLDFEDVQKYSLSIKAQDGGRPPLINSSGVVSVQVLDVNDNEPIFVSSPFQATVLENVPLGYPVVHIQAVDADSGENARLHYRLVDTASTFLGGGSAGPKNPAPTPDFPFQIRNSSGWITVCAELDREEVEHYSFGVEAVDHGWPPMSSSTSVSITVLDVNDNDPVFTQPTYELRLNEDAAVGSSVLTLQARDRDANSVITYQLTGGNTRNRFALSSQRGGGLITLALPLDYKQEQQYVLAVTASDGTRSHTAHVLINVTDANTHRPVFQSSHYTVSVSEDRPVGTSIATLSANDEDTGENARITYVIQDPVPQFRIDPDSGTMYTMMELDYENQVAYTLTIMAQDNGIPQKSDTTTLEILILDANDNAPQFLWDFYQGSIFEDAPPSTSILQVSATDRDSGPNGRLLYTFQGGDDGDGDFYIEPTSGVIRTQRRLDRENVAVYNLWALAVDRGSPTPLSASVEIQVTILDINDNAPMFEKDELELFVEENNPVGSVVAKIRANDPDEGPNAQIMYQIVEGDMRHFFQLDLLNGDLRAMVELDFEVRREYVLVVQATSAPLVSRATVHILLVLE

SEQ ID NO: 283 - DNA, 9087 bp, Homo sapiens
  CDS (1)..(9084)
atggcgccgccgccgccgcccgtgctgcccgtgctgctgctcctggccgccgccgccgccctgccggcgatggggctgcgagcggccgcctgggagccgcgcgtacccggcgggacccgcgccttcgccctccggcccggctgtacctacgcggtgggcgccgcttgcacgccccgggcgccgcgggagctgctggacgtgggccgcgatgggcggctggcaggacgtcggcgcgtctcgggcgcggggcgcccgctgccgctgcaagtccgcttggtggcccgcagtgccccgacggcgctgagccgccgcctgcgggcgcgcacgcaccttcccggctgcggagcccgtgcccggctctgcggaaccggtgcccggctctgcggggcgctctgcttccccgtccccggcggctgcgcggccgcgcagcattcggcgctcgcagctccgaccaccttacccgcctgccgctgcccgccgcgccccaggccccgctgtcccggccgtcccatctgcctgccgccgggcggctcggtccgcctgcgtctgctgtgcgccctgcggcgcgcggctggcgccgtccgggtgggactggcgctggaggccgccaccgcggggacgccctccgcgtcgccatccccatcgccgcccctgccgccgaacttgcccgaagcccgggcggggccggcgcgacgggcccggcggggcacgagcggcagagggagcctgaagtttccgatgcccaactaccaggtggcgttgtttgagaacgaaccggcgggcaccctcatcctccagctgcacgcgcactacaccatcgagggcgaggaggagcgcgtgagctattacatggaggggctgttcgacgagcgctcccggggctacttccgaatcgactctgccacgggcgccgtgagcacggacagcgtactggaccgcgagaccaaggagacgcacgtcctcagggtgaaagccgtggactacagtacgccgccgcgctcggccaccacctacatcactgtcttggtcaaagacaccaacgaccacagcccggtcttcgagcagtcggagtaccgcgagcgcgtgcgggagaacctggaggtgggctacgaggtgctgaccatccgcgccagcgaccgcgactcgcccatcaacgccaacttgcgttaccgcgtgttggggggcgcgtgggacgtcttccagctcaacgagagctctggcgtggtgagcacacgggcggtgctggaccgggaggaggcggccgagtaccagctcctggtggaggccaacgaccaggggcgcaatccgggcccgctcagtgccacggccaccgtgtacatcgaggtggaggacgagaacgacaactacccccagttcagcgagcagaactacgtggtccaggtgcccgaggacgtggggctcaacacggctgtgctgcgagtgcaggccacggaccgggaccagggccagaacgcggccattcactacagcatcctcagcgggaacgtggccggccagttctacctgcactcgctgagcgggatcctggatgtgatcaaccccttggatttcgaggatgtccagaaatactcgctgagcattaaggcccaggatgggggccggcccccgctcatcaattcttcaggggtggtgtctgtgcaggtgctggatgtcaacgacaacgagcctatctttgtgagcagccccttccaggccacggtgctggagaatgtgcccctgggctaccccgtggtgcacattcaggcggtggacgcggactctggagagaacgcccggctgcactatcgcctggtggacacggcctccacctttctggggggcggcagcgctgggcctaagaatcctgcccccacccctgacttccccttccagatccacaacagctccggttggatcacagtgtgtgccgagctggaccgcgaggaggtggagcactacagcttcggggtggaggcggtggaccacggctcgccccccatgagctcctccaccagcgtgtccatcacggtgctggacgtgaatgacaacgacccggtgttcacgcagcccacctacgagcttcgtctgaatgaggatgcggccgtggggagcagcgtgctgaccctgcaggcccgcgaccgtgacgccaacagtgtgattacctaccagctcacaggcggcaacacccggaaccgctttgcactcagcagccagagagggggcggcctcatcaccctggcgctacctctggactacaagcaggagcagcagtacgtgctggcggtgacagcatccgacggcacacggtcgcacactgcgcatgtcctaatcaacgtcactgatgccaacacccacaggcctgtctttcagagctcccattacacagtgagtgtcagtgaggacaggcctgtgggcacctccattgctaccctcagtgccaacgatgaggacacaggagagaatgcccgcatcacctacgtgattcaggaccccgtgccgcagttccgcattgaccccgacagtggcaccatgtacaccatgatggagctggactatgagaaccaggtcgcctacacgctgaccatcatggcccaggacaacggcatcccgcagaaatcagacaccaccaccctagagatcctcatcctcgatgccaatgacaatgcaccccagttcctgtgggatttctaccagggttccatctttgaggatgctccaccctcgaccagcatcctccaggtctctgccacggaccgggactcaggtcccaatgggcgtctgctgtacaccttccagggtggggacgacggcgatggggacttctacatcgagcccacgtccggtgtgattcgcacccagcgccggctggaccgggagaatgtggccgtgtacaacctttgggctctggctgtggatcggggcagtcccactccccttagcgcctcggtagaaatccaggtgaccatcttggacattaatgacaatgcccccatgtttgagaaggacgaactggagctgtttgttgaggagaacaacccagtggggtcggtggtggcaaagattcgtgctaacgaccctgatgaaggccctaatgcccagatcatgtatcagattgtggaaggggacatgcggcatttcttccagctggacctgctcaacggggacctgcgtgccatggtggagctggactttgaggtccggcgggagtatgtgctggtggtgcaggccacgtcggctccgctggtgagccgagccacggtgcacatccttctcgtggaccagaatgacaacccgcctgtgctgcccgacttccagatcctcttcaacaactatgtcaccaacaagtccaacagtttccccaccggcgtgatcggctgcatcccggcccatgaccccgacgtgtcagacagcctcaactacaccttcgtgcagggcaacgagctgcgcctgttgctgctggaccccgccacgggcgaactgcagctcagccgcgacctggacaacaaccggccgctggaggcgctcatggaggtgtctgtgtctgcagatggcatccacagcgtcacggccttctgcaccctgcgtgtcaccatcatcacggacgacatgctgaccaacagcatcactgtccgcctggagaacatgtcccaggagaagttcctgtccccgctgctggccctcttcgtggagggggtggccgccgtgctgtccaccaccaaggacgacgtcttcgtcttcaacgtccagaacgacaccgacgtcagctccaacatcctgaacgtgaccttctcggcgctgctgcctggcggcgtccgcggccagttcttcccgtcggaggacctgcaggagcagatctacctgaatcggacgctgctgaccaccatctccacgcagcgcgtgctgcccttcgacgacaacatctgcctgcgcgagccctgcgagaactacatgaagtgcgtgtccgttctgcgattcgacagctccgcgcccttcctcagctccaccaccgtgctcttccggcccatccaccccatcaacggcctgcgctgccgctgcccgcccggcttcaccggcgactactgcgagacggagatcgacctctgctactccgacccgtgcggcgccaacggccgctgccgcagccgcgagggcggctacacctgcgagtgcttcgaggacttcactggagagcactgtgaggtggatgcccgctcaggccgctgtgccaacggggtgtgcaagaacgggggcacctgcgtgaacctgctcatcggcggcttccactgcgtgtgtcctcctggcgagtatgagaggccctactgtgaggtgaccaccaggagcttcccgccccagtccttcgtcaccttccggggcctgagacagcgcttccacttcaccatctccctcacgtttgccactcaggaaaggaacggcttgcttctctacaacggccgcttcaatgagaagcacgacttcatcgccctggagatcgtggacgagcaggtgcagctcaccttctctgcaggtgcaggcgagacaacaacgaccgtggcaccgaaggttcccagtggtgtgagtgacgggcggtggcactctgtgcaggtgcagtactacaacaaggtaagatgggccccaccacttccccctggcccccagcccaatattggccacctgggcctgccccatgggccgtccggggaaaagatggccgtggtgacagtggatgattgtgacacaaccatggctgtgcgctttggaaaggacatcgggaactacagctgcgctgcccagggcactcagaccggctccaagaagtccctggatctgaccggccctctactcctggggggtgtccccaacctgccagaagacttcccagtgcacaaccggcagttcgtgggctgcatgcggaacctgtcagtcgacggcaaaaatgtggacatggccggattcatcgccaacaatggcacccgggaaggctgcgctgctcggaggaacttctgcgatgggaggcggtgtcagaatggaggcacctgtgtcaacaggtggaatatgtatctgtgtgagtgtccactccgattcggcgggaagaactgtgagcaagccatgcctcacccccagctcttcagcggtgagagcgtcgtgtcctggagtgacctgaacatcatcatctctgtgccctggtacctggggctcatgttccggacccggaaggaggacagcgttctgatggaggccaccagtggtgggcccaccagctttcgcctccagatcctgaacaactacctccagtttgaggtgtcccacggcccctccgatgtggagtccgtgatgctgtccgggttgcgggtgaccgacggggagtggcaccacctgctgatcgagctgaagaatgttaaggaggacagtgagatgaagcacctggtcaccatgaccttggactatgggatggaccagaacaaggcagatatcgggggcatgcttcccgggctgacggtaaggagcgtggtggtcggaggcgcctctgaagacaaggtctccgtgcgccgtggattccgaggctgcatgcagggagtgaggatgggggggacgcccaccaacgtcgccaccctgaacatgaacaacgcactcaaggtcagggtgaaggacggctgtgatgtggacgacccctgtacctcgagcccctgtccccccaatagccgctgccacgacgcctgggaggactacagctgcgtctgtgacaaagggtaccttggaataaactgtgtggatgcctgtcacctgaacccctgcgagaacatgggggcctgcgtgcgctcccccggctccccgcagggctacgtgtgcgagtgtgggcccagtcactacgggccgtactgtgagaacaaactcgaccttccgtgccccagaggctggtgggggaaccccgtctgtggaccctgccactgtgccgtcagcaaaggctttgatcccgactgtaataagaccaacggccagtgccaatgcaaggagaattactacaagctcctagcccaggacacctgtctgccctgcgactgcttcccccatggctcccacagccgcacttgcgacatggccaccgggcagtgtgcctgcaagcccggcgtcatcggccgccagtgcaaccgctgcgacaacccgtttgccgaggtcaccacgctcggctgtgaagtgatctacaatggctgtcccaaagcatttgaggccggcatctggtggccacagaccaagttcgggcagccggctgcggtgccatgccctaagggatccgttggaaatgcggtccgacactgcagcggggagaagggctggctgcccccagagctctttaactgtaccaccatctccttcgtggacctcagggccatgaatgagaagctgagccgcaatgagacgcaggtggacggcgccagggccctgcagctggtgagggcgctgcgcagtgctacacagcacacgggcacgctctttggcaatgacgtgcgcacggcctaccagctgctgggccacgtccttcagcacgagagctggcagcagggcttcgacctggcagccacgcaggacgccgactttcacgaggacgtcatccactcgggcagcgccctcctggccccagccaccagggcggcgtgggagcagatccagcggagcgagggcggcacggcacagctgctccggcgcctcgagggctacttcagcaacgtggcacgcaacgtgcggcggacgtacctgcggcccttcgtcatcgtcaccgccaacatggttcttgctgtcgacatctttgacaagttcaactttacgggagccagggtcccgcgattcgacaccatccatgaagagttccccagggagctggagtcctccgtctccttcccagccgacttcttcagaccacctgaagaaaaagaaggccccctgctgaggccggctggccggaggaccaccccgcagaccacgcgcccggggcctggcaccgagagggaggccccgatcagcaggcggaggcgacaccctgatgacgctggccagttcgccgtcgctctggtcatcatttaccgcaccctggggcagctcctgcccgagcgctacgaccccgaccgtcgcagcctccggttgcctcaccggcccatcattaataccccgatggtgagcacgctggtgtacagcgagggggctccgctcccgagacccctggagaggcccgtcctggtggagttcgccctgctggaggtggaggagcgaaccaagcctgtctgcgtgttctggaaccactccctggccgttggtgggacgggagggtggtctgcccggggctgcgagctcctgtccaggaaccggacacatgtcgcctgccagtgcagccacacagccagctttgcggtgctcatggatatctccaggcgtgagaacggggaggtcctgcctctgaagattgtcacctatgccgctgtgtccttgtcactggcagccctgctggtggccttcgtcctcctgagcctggtccgcatgctgcgctccaacctgcacagcattcacaagcacctcgccgtggcgctcttcctctctcagctggtgttcgtgattgggatcaaccagacggaaaacccgtttctgtgcacagtggttgccatcctcctccactacatctacatgagcacctttgcctggaccctcgtggagagcctgcatgtctaccgcatgctgaccgaggtgcgcaacatcgacacggggcccatgcggttctactacgtcgtgggctggggcatcccggccattgtcacaggactggcggtcggcctggacccccagggctacgggaaccccgacttctgctggctgtcgcttcaagacaccctgatttggagctttgcggggcccatcggagctgttataatcatcaacacagtcacttctgtcctatctgcaaaggtttcctgccaaagaaagcaccattattatgggaaaaaagggatcgtctccctgctgaggaccgcattcctcctgctgctgctcatcagcgccacctggctgctggggctgctggctgtgaaccgcgatgcactgagctttcactacctcttcgccatcttcagcggcttacagggccccttcgtcctccttttccactgcgtgctcaaccaggaggtccggaagcacctgaagggcgtgctcggcgggaggaagctgcacctggaggactccgccaccaccagggccaccctgctgacgcgctccctcaactgcaacaccaccttcggtgacgggcctgacatgctgcgcacagacttgggcgagtccaccgcctcgctggacagcatcgtcagggatgaagggatccagaagctcggcgtgtcctctgggctggtgaggggcagccacggagagccagacgcgtccctcatgcccaggagctccaaggatccccctggccacgattccgactcagatagcgagctgtccctggatgagcagagcagctcttacgcctcctcacactcgtcagacagcgaggacgatggggtgggagctgaggaaaaatgggacccggccaggggcgccgtccacagcacccccaaaggggacgctgtggccaaccacgttccggccggctggcccgaccagagcctggctgagagtgacagtgaggaccccagcggcaagccccgcctgaaggtggagaccaaggtcagcgtggagctgcaccgcgaggagcagggcagtcaccgtggagagtaccccccggaccaggagagcgggggcgcagccaggcttgctagcagccagcccccagagcagaggagcatcttgaaaaataaagtcacctacccgccgccgctgacgctgacggagcagacgctgaagggccggctccgggagaagctggccgactgtgagcagagccccacatcctcgcgcacgtcttccctgggctctggcggccccgactgcgccatcacagtcaagagccctgggagggagccggggcgtgaccacctcaacggggtggccatgaatgtgcgcactgggagcgcccaggccgatggctccgactctgagaaaccgtga

SEQ ID NO: 284 - protein, 3028 aa, Homo sapiens
MAPPPPPVLPVLLLLAAAAALPAMGLRAAAWEPRVPGGTRAFALRPGCTYAVGAACTPRAPRELLDVGRDGRLAGRRRVSGAGRPLPLQVRLVARSAPTALSRRLRARTHLPGCGARARLCGTGARLCGALCFPVPGGCAAAQHSALAAPTTLPACRCPPRPRPRCPGRPICLPPGGSVRLRLLCALRRAAGAVRVGLALEAATAGTPSASPSPSPPLPPNLPEARAGPARRARRGTSGRGSLKFPMPNYQVALFENEPAGTLILQLHAHYTIEGEEERVSYYMEGLFDERSRGYFRIDSATGAVSTDSVLDRETKETHVLRVKAVDYSTPPRSATTYITVLVKDTNDHSPVFEQSEYRERVRENLEVGYEVLTIRASDRDSPINANLRYRVLGGAWDVFQLNESSGVVSTRAVLDREEAAEYQLLVEANDQGRNPGPLSATATVYIEVEDENDNYPQFSEQNYVVQVPEDVGLNTAVLRVQATDRDQGQNAAIHYSILSGNVAGQFYLHSLSGILDVINPLDFEDVQKYSLSIKAQDGGRPPLINSSGVVSVQVLDVNDNEPIFVSSPFQATVLENVPLGYPVVHIQAVDADSGENARLHYRLVDTASTFLGGGSAGPKNPAPTPDFPFQIHNSSGWITVCAELDREEVEHYSFGVEAVDHGSPPMSSSTSVSITVLDVNDNDPVFTQPTYELRLNEDAAVGSSVLTLQARDRDANSVITYQLTGGNTRNRFALSSQRGGGLITLALPLDYKQEQQYVLAVTASDGTRSHTAHVLINVTDANTHRPVFQSSHYTVSVSEDRPVGTSIATLSANDEDTGENARITYVIQDPVPQFRIDPDSGTMYTMMELDYENQVAYTLTIMAQDNGIPQKSDTTTLEILILDANDNAPQFLWDFYQGSIFEDAPPSTSILQVSATDRDSGPNGRLLYTFQGGDDGDGDFYIEPTSGVIRTQRRLDRENVAVYNLWALAVDRGSPTPLSASVEIQVTILDINDNAPMFEKDELELFVEENNPVGSVVAKIRANDPDEGPNAQIMYQIVEGDMRHFFQLDLLNGDLRAMVELDFEVRREYVLVVQATSAPLVSRATVHILLVDQNDNPPVLPDFQILFNNYVTNKSNSFPTGVIGCIPAHDPDVSDSLNYTFVQGNELRLLLLDPATGELQLSRDLDNNRPLEALMEVSVSADGIHSVTAFCTLRVTIITDDMLTNSITVRLENMSQEKFLSPLLALFVEGVAAVLSTTKDDVFVFNVQNDTDVSSNILNVTFSALLPGGVRGQFFPSEDLQEQIYLNRTLLTTISTQRVLPFDDNICLREPCENYMKCVSVLRFDSSAPFLSSTTVLFRPIHPINGLRCRCPPGFTGDYCETEIDLCYSDPCGANGRCRSREGGYTCECFEDFTGEHCEVDARSGRCANGVCKNGGTCVNLLIGGFHCVCPPGEYERPYCEVTTRSFPPQSFVTFRGLRQRFHFTISLTFATQERNGLLLYNGRFNEKHDFIALEIVDEQVQLTFSAGAGETTTTVAPKVPSGVSDGRWHSVQVQYYNKVRWAPPLPPGPQPNIGHLGLPHGPSGEKMAVVTVDDCDTTMAVRFGKDIGNYSCAAQGTQTGSKKSLDLTGPLLLGGVPNLPEDFPVHNRQFVGCMRNLSVDGKNVDMAGFIANNGTREGCAARRNFCDGRRCQNGGTCVNRWNMYLCECPLRFGGKNCEQAMPHPQLFSGESVVSWSDLNIIISVPWYLGLMFRTRKEDSVLMEATSGGPTSFRLQILNNYLQFEVSHGPSDVESVMLSGLRVTDGEWHHLLIELKNVKEDSEMKHLVTMTLDYGMDQNKADIGGMLPGLTVRSVVVGGASEDKVSVRRGFRGCMQGVRMGGTPTNVATLNMNNALKVRVKDGCDVDDPCTSSPCPPNSRCHDAWEDYSCVCDKGYLGINCVDACHLNPCENMGACVRSPGSPQGYVCECGPSHYGPYCENKLDLPCPRGWWGNPVCGPCHCAVSKGFDPDCNKTNGQCQCKENYYKLLAQDTCLPCDCFPHGSHSRTCDMATGQCACKPGVIGRQCNRCDNPFAEVTTLGCEVIYNGCPKAFEAGIWWPQTKFGQPAAVPCPKGSVGNAVRHCSGEKGWLPPELFNCTTISFVDLRAMNEKLSRNETQVDGARALQLVRALRSATQHTGTLFGNDVRTAYQLLGHVLQHESWQQGFDLAATQDADFHEDVIHSGSALLAPATRAAWEQIQRSEGGTAQLLRRLEGYFSNVARNVRRTYLRPFVIVTANMVLAVDIFDKFNFTGARVPRFDTIHEEFPRELESSVSFPADFFRPPEEKEGPLLRPAGRRTTPQTTRPGPGTEREAPISRRRRHPDDAGQFAVALVIIYRTLGQLLPERYDPDRRSLRLPHRPIINTPMVSTLVYSEGAPLPRPLERPVLVEFALLEVEERTKPVCVFWNHSLAVGGTGGWSARGCELLSRNRTHVACQCSHTASFAVLMDISRRENGEVLPLKIVTYAAVSLSLAALLVAFVLLSLVRMLRSNLHSIHKHLAVALFLSQLVFVIGINQTENPFLCTVVAILLHYIYMSTFAWTLVESLHVYRMLTEVRNIDTGPMRFYYVVGWGIPAIVTGLAVGLDPQGYGNPDFCWLSLQDTLIWSFAGPIGAVIIINTVTSVLSAKVSCQRKHHYYGKKGIVSLLRTAFLLLLLISATWLLGLLAVNRDALSFHYLFAIFSGLQGPFVLLFHCVLNQEVRKHLKGVLGGRKLHLEDSATTRATLLTRSLNCNTTFGDGPDMLRTDLGESTASLDSIVRDEGIQKLGVSSGLVRGSHGEPDASLMPRSSKDPPGHDSDSDSELSLDEQSSSYASSHSSDSEDDGVGAEEKWDPARGAVHSTPKGDAVANHVPAGWPDQSLAESDSEDPSGKPRLKVETKVSVELHREEQGSHRGEYPPDQESGGAARLASSQPPEQRSILKNKVTYPPPLTLTEQTLKGRLREKLADCEQSPTSSRTSSLGSGGPDCAITVKSPGREPGRDHLNGVAMNVRTGSAQADGSDSEKP

(The sequence listing continues in the following parts.)

What is claimed is:

1. An isolated polypeptide comprising the mature form of an amino acid sequence selected from the group consisting of SEQ ID NO:2n, wherein n is an integer between 1 and 566.

2. An isolated polypeptide comprising an amino acid sequence selected from the group consisting of SEQ ID NO:2n, wherein n is an integer between 1 and 566.

3. An isolated polypeptide comprising an amino acid sequence which is at least 95% identical to an amino acid sequence selected from the group consisting of SEQ ID NO:2n, wherein n is an integer between 1 and 566.

4. An isolated polypeptide, wherein the polypeptide comprises an amino acid sequence comprising one or more conservative substitutions in the amino acid sequence selected from the group consisting of SEQ ID NO:2n, wherein n is an integer between 1 and 566.

5. The polypeptide of claim 1 wherein said polypeptide is naturally occurring.

6. A composition comprising the polypeptide of claim 1 and a carrier.

7. A kit comprising, in one or more containers, the composition of claim 6.

8. The use of a therapeutic in the manufacture of a medicament for treating a syndrome associated with a human disease, the disease selected from a pathology associated with the polypeptide of claim 1 wherein the therapeutic comprises the polypeptide of claim 1.

9. A method for determining the presence or amount of the polypeptide of claim 1 in a sample, the method comprising:
(a) providing said sample;
(b) introducing said sample to an antibody that binds immunospecifically to the polypeptide; and
(c) determining the presence or amount of antibody bound to said polypeptide,
thereby determining the presence or amount of polypeptide in said sample.

10. A method for determining the presence of or predisposition to a disease associated with altered levels of expression of the polypeptide of claim 1 in a first mammalian subject, the method comprising:
a) measuring the level of expression of the polypeptide in a sample from the first mammalian subject; and
b) comparing the expression of said polypeptide in the sample of step (a) to the expression of the polypeptide present in a control sample from a second mammalian subject known not to have, or not to be predisposed to, said disease,
wherein an alteration in the level of expression of the polypeptide in the first subject as compared to the control sample indicates the presence of or predisposition to said disease.

11. A method of identifying an agent that binds to the polypeptide of claim 1, the method comprising:
(a) introducing said polypeptide to said agent; and
(b) determining whether said agent binds to said polypeptide.

12. The method of claim 11 wherein the agent is a cellular receptor or a downstream effector.

13. A method for identifying a potential therapeutic agent for use in treatment of a pathology, wherein the pathology is related to aberrant expression or aberrant physiological interactions of the polypeptide of claim 1, the method comprising:
(a) providing a cell expressing the polypeptide of claim 1 and having a property or function ascribable to the polypeptide;
(b) contacting the cell with a composition comprising a candidate substance; and
(c) determining whether the substance alters the property or function ascribable to the polypeptide;
whereby, if an alteration observed in the presence of the substance is not observed when the cell is contacted with a composition in the absence of the substance, the substance is identified as a potential therapeutic agent.

14. A method for screening for a modulator of activity of or of latency or predisposition to a pathology associated with the polypeptide of claim 1, said method comprising:
(a) administering a test compound to a test animal at increased risk for a pathology associated with the polypeptide of claim 1, wherein said test animal recombinantly expresses the polypeptide of claim 1;
(b) measuring the activity of said polypeptide in said test animal after administering the compound of step (a); and
(c) comparing the activity of said polypeptide in said test animal with the activity of said polypeptide in a control animal not administered said polypeptide, wherein a change in the activity of said polypeptide in said test animal relative to said control animal indicates the test compound is a modulator of activity or of latency or of predisposition to, a pathology associated with the polypeptide of claim 1.

15. The method of claim 14, wherein said test animal is a recombinant test animal that expresses a test protein transgene or expresses said transgene under the control of a promoter at an increased level relative to a wild-type test animal, and wherein said promoter is not the native gene promoter of said transgene.

16. A method for modulating the activity of the polypeptide of claim 1, the method comprising contacting a cell sample expressing the polypeptide of claim 1 with a compound that binds to said polypeptide in an amount sufficient to modulate the activity of the polypeptide.

17. A method of treating or preventing a pathology associated with the polypeptide of claim 1, the method comprising administering the polypeptide of claim 1 to a subject in which such treatment or prevention is desired in an amount sufficient to treat or prevent the pathology in the subject.

18. The method of claim 17, wherein the subject is a human.

19. A method of treating a pathological state in a mammal, the method comprising administering to the mammal a polypeptide in an amount that is sufficient to alleviate the pathological state, wherein the polypeptide is a polypeptide having an amino acid sequence at least 95% identical to a polypeptide comprising the amino acid sequence selected from the group consisting of SEQ ID NO:2n, wherein n is an integer between 1 and 566 or a biologically active fragment thereof.

20. An isolated nucleic acid molecule comprising a nucleic acid sequence selected from the group consisting of SEQ ID NO:2n−1, wherein n is an integer between 1 and 566.

21. The nucleic acid molecule of claim 20, wherein the nucleic acid molecule is naturally occurring.

22. A nucleic acid molecule, wherein the nucleic acid molecule differs by a single nucleotide from a nucleic acid sequence selected from the group consisting of SEQ ID NO: 2n-1, wherein n is an integer between 1 and 566.

23. An isolated nucleic acid molecule encoding the mature form of a polypeptide having an amino acid sequence selected from the group consisting of SEQ ID NO:2n, wherein n is an integer between 1 and 566.

24. An isolated nucleic acid molecule comprising a nucleic acid selected from the group consisting of 2n-1, wherein n is an integer between 1 and 566.

25. The nucleic acid molecule of claim 20, wherein said nucleic acid molecule hybridizes under stringent conditions to the nucleotide sequence selected from the group consisting of SEQ ID NO: 2n-1, wherein n is an integer between 1 and 566, or a complement of said nucleotide sequence.

26. A vector comprising the nucleic acid molecule of claim 20.

27. The vector of claim 26, further comprising a promoter operably linked to said nucleic acid molecule.

28. A cell comprising the vector of claim 26.

29. An antibody that immunospecifically binds to the polypeptide of claim 1.

30. The antibody of claim 29, wherein the antibody is a monoclonal antibody.

31. The antibody of claim 29, wherein the antibody is a humanized antibody.

32. A method for determining the presence or amount of the nucleic acid molecule of claim 20 in a sample, the method comprising:
(a) providing said sample;
(b) introducing said sample to a probe that binds to said nucleic acid molecule; and
(c) determining the presence or amount of said probe bound to said nucleic acid molecule,
thereby determining the presence or amount of the nucleic acid molecule in said sample.

33. The method of claim 32 wherein presence or amount of the nucleic acid molecule is used as a marker for cell or tissue type.

34. The method of claim 33 wherein the cell or tissue type is cancerous.

35. A method for determining the presence of or predisposition to a disease associated with altered levels of expression of the nucleic acid molecule of claim 20 in a first mammalian subject, the method comprising:
a) measuring the level of expression of the nucleic acid in a sample from the first mammalian subject; and
b) comparing the level of expression of said nucleic acid in the sample of step (a) to the level of expression of the nucleic acid present in a control sample from a second mammalian subject known not to have or not be predisposed to, the disease;
wherein an alteration in the level of expression of the nucleic acid in the first subject as compared to the control sample indicates the presence of or predisposition to the disease.

36. A method of producing the polypeptide of claim 1, the method comprising culturing a cell under conditions that lead to expression of the polypeptide, wherein said cell comprises a vector comprising an isolated nucleic acid molecule comprising a nucleic acid sequence selected from the group consisting of SEQ ID NO:2n−1, wherein n is an integer between 1 and 566.

37. The method of claim 36 wherein the cell is a bacterial cell.

38. The method of claim 36 wherein the cell is an insect cell.

39. The method of claim 36 wherein the cell is a yeast cell.

40. The method of claim 36 wherein the cell is a mammalian cell.

41. A method of producing the polypeptide of claim 2, the method comprising culturing a cell under conditions that lead to expression of the polypeptide, wherein said cell comprises a vector comprising an isolated nucleic acid molecule comprising a nucleic acid sequence selected from the group consisting of SEQ ID NO:2n−1, wherein n is an integer between 1 and 566.

42. The method of claim 41 wherein the cell is a bacterial cell.

43. The method of claim 41 wherein the cell is an insect cell.

44. The method of claim 41 wherein the cell is a yeast cell.

45. The method of claim 41 wherein the cell is a mammalian cell.
